(19) United States
(12) Patent Application Publication
(10) Pub. No.: US 2007/0048740 A1
(43) Pub. Date: Mar. 1, 2007

(54) Full-length cDNA

(75) Inventors: Takao Isogai, Ibaraki (JP); Junichi Yamamoto, Chiba (JP); Tetsuo Nishikawa, Tokyo (JP); Yuko Isono, Chiba (JP); Tomoyasu Sugiyama, Tokyo (JP); Tetsuji Otsuki, Tokyo (JP); Ai Wakamatsu, Chiba (JP); Shizuko Ishii, Hokkaido (JP); Keiichi Nagai, Tokyo (JP); Ryotaro Irie, Saitama (JP)

Correspondence Address: FOLEY AND LARDNER;SUITE 500, 3000 K STREET NW, WASHINGTON, DC, 20007, US

(73) Assignee: RESEARCH ASSOCIATION FOR BIOTECHNOLOGY

(21) Appl. No.: 10/777,288

(22) Filed: Feb. 13, 2004

Related U.S. Application Data
(60) Provisional application No. 60/460,871, filed on Apr. 8, 2003.
(60) Provisional application No. 60/476,172, filed on Jun. 6, 2003.

(30) Foreign Application Priority Data
Feb. 14, 2003 (JP) 2003-102207
May 9, 2003 (JP) 2003-131452

(51) Int. Cl. C12Q 1/68; G06F 19/00; G01N 33/48; G01N 33/50; C07H 21/04; C12N 9/00

(52) U.S. Cl. 435/6; 435/69.1; 435/320.1; 435/325; 435/183; 530/350; 536/23.2; 702/19

(57) ABSTRACT

Novel full-length cDNAs are provided. 1,995 cDNA derived from human have been isolated. The full-length nucleotide sequences of the cDNA and amino acid sequences encoded by the nucleotide sequences have been determined. Because the cDNA of the present invention are full-length and contain the translation start site, they provide information useful for analyzing the functions of the polypeptide.

### FIELD OF THE INVENTION

[0001] The present invention relates to polynucleotides encoding novel polypeptides, the polypeptides encoded by these polynucleotides, and new uses of these.

### BACKGROUND OF THE INVENTION

[0002] The genomic DNAs of various living organisms are currently being sequenced and analyzed all over the world. The entire genomic sequences of more than 40 species of prokaryotes, a lower eukaryote, yeast, a multicellular eukaryote, C. elegans, and a higher plant, arabidopsis, and such have already been determined. Analysis of the human genome, presumed to have three billion base pairs, was advanced under global cooperative organization, and a draft sequence was disclosed in 2001. In 2003 the complete structure had been elucidated and publically disclosed. A genome is a blueprint for highly complicated living organisms. The aim in determining a genomic sequence is to reveal the function and regulation of all genes, and to understand living organisms as a network of interactions between genes, proteins, cells or individuals. Understanding living organisms through the genomic information of various species is not only academically important, but also socially significant from the viewpoint of industrial application.

[0003] However, simply determining a genomic sequence will not reveal the function of all genes. For example, in the case of yeast, the function of only approximately half of the 6000 genes predicted on the basis of genomic sequence have been deduced. The human genome has been estimated to contain about 30,000 to 40,000 genes. Further, 100,000 or more types of mRNAs are said to exist when variants produced by alternative splicing are taken into consideration. Therefore, it is desirable to establish “a high throughput system for analysis of gene functions” which allows rapid and efficient identification of the functions of vast amounts of genes obtained by genomic sequencing.

[0004] Many genes in the eukaryotic genome are split by introns into multiple exons. Thus, it is difficult to correctly predict the structure of an encoded protein based solely on genomic information. In contrast, cDNA, which is produced from mRNA that lacks introns, encodes a protein as a single continuous amino acid sequence and allows easy identification of the protein's primary structure. In human cDNA research to date, more than three million ESTs (Expression Sequence Tags) are publicly available, which presumably covers no less than 80% of all human genes.

[0005] EST information is utilized in a variety of ways, for example in analyzing the structure of the human genome, or in predicting exon regions of genomic sequences or their expression profiles. However, most human ESTs have been derived from regions proximal to the cDNA 3′-end, and little information is available from around the mRNA 5′-end. In human cDNAs, the full-length protein sequence of approximately 15,000 corresponding mRNAs have been deduced.

[0006] It is possible to identify the mRNA transcription start site on the genomic sequence based on the 5′-end sequence of a full-length cDNA, and to analyze factors involved in the stability of mRNA contained in that sequence, or in the regulation of its expression at the translation stage. Also, since the atg codon, or translation start site, is contained in the 5′-region of a full-length cDNA, translation to proteins will occur in the correct frame. Therefore, it is possible to produce a large amount of the protein encoded by the cDNA, or to analyze the biological activity of the expressed protein by utilizing an appropriate expression system. Thus, analysis of full-length cDNA provides valuable information which complements genome sequencing information. Also, full-length cDNA clones that can be expressed are extremely valuable in empirical analysis of gene function and in industrial application.

[0007] Therefore, if a novel human full-length cDNA can be isolated, it can be used for developing medicines for diseases in which its gene is involved. A protein encoded by such a gene can be used as a drug by itself. Thus, obtaining full-length cDNAs encoding novel human proteins is of great significance.

[0008] In particular, human secretory proteins or membrane proteins would be useful used as medicines in the same manner as tissue plasminogen activator (TPA), or as target proteins for medicines like membrane receptors. In addition, genes for signal transduction-related proteins (protein kinases, etc.), glycoprotein-related proteins, transcription-related proteins, and such, are genes whose relationships to human diseases have been elucidated. Moreover, genes for disease-related proteins form a gene group rich in genes whose relationships to human diseases have been elucidated.

[0009] Isolating novel full-length human cDNA clones, only a few of which have been isolated, is of great significance. The isolation of novel cDNA clones encoding secretory proteins or membrane proteins is especially desired since such proteins would be useful in themselves as medicines, and also their clones would potentially include genes involved in disease. In addition, genes encoding proteins involved in signal transduction, glycoprotein, transcription, or disease, are expected to be useful as target molecules for therapy, or as medicines in themselves. These genes form a gene group predicted to be strongly involved in disease. Thus, identification of full-length cDNA clones encoding these proteins has great significance.

### SUMMARY OF THE INVENTION

[0010] An objective of the present invention is to provide polynucleotides encoding novel polypeptides, polypeptides encoded by the polynucleotides, and novel usages of these.

[0011] The inventors have developed a method for efficiently cloning, from a cDNA library having a very high fullness-ratio, human full-length cDNAs predicted to be full-length cDNA clones, where that cDNA library is synthesized by an improved method (WO 01/04286) of oligo-capping (K. Maruyama and S. Sugano, Gene, 138: 171-174 (1994); Y. Suzuki et al., Gene, 200: 149-156 (1997)). The nucleotide sequences of cDNA clones whose fullness ratio is high, obtained by this method, were determined mainly from their 5′-end, and, if required, from their 3′-end.

[0012] Among the clones obtained, representative clones estimated to be novel and full-length were analyzed for their full-length nucleotide sequence. The determined full-length nucleotide sequences were analyzed using a BLAST homology search of the databases shown below. Homology searches of the present invention were carried out based on full-length cDNA information, including the entire coding region, and thus homology to every part of a polypeptide could be analyzed. Therefore, in the present invention, the reliability of homology searches has been greatly improved.

[1] SwissProt (http://www.ebi.ac.uk/ebi_docsSwissProt₁₃ db/swisshome.html),

[2] GenBank (http://www.ncbi.nlm.nih.gov/web/GenBank),

[0013] [3] nr (a protein database, which has been constructed by combining data of coding sequences (CDS) in nucleotide sequences deposited in GenBank, and data of SwissProt, PDB (http://www.rcsb.org/pdb/index.html), PIR (http://pir.georgetown.edu/pirwww/pirhome.shtml), and PRF (http://www.prf.or.jp/en/); overlapping sequences have been removed.), and

[4] RefSeq (http://www.ncbi.nlm.nih.gov/LocusLink/refseq.html).

[0014] The gene expression profiles of cDNA clones whose full-length nucleotide sequence had been determined were studied by analyzing the large-scale cDNA database constructed based on the 5′-end nucleotide sequences of cDNAs obtained. The present inventors revealed the usefulness of the genes of the present invention based on these analysis results.

[0015] In the present invention, gene functions were revealed by analysis of expression profiles in silico, based on full-length nucleotide sequence information. The expression profiles used in the expression frequency analysis were studied based on databases containing a sufficient amount of fragment sequence data. Expression frequency analysis was carried out by referring, for these expression profiles, to the full-length nucleotide sequences of the many cDNA clones obtained in the present invention. Thus, highly reliable analysis was achieved by referring to the full-length nucleotide sequences of a wide variety of genes in a sufficiently large population for analysis (expression profiles). Namely, the results of expression frequency analysis using the full-length sequences of the present invention more precisely reflect gene expression frequency in tissues and cells from which a certain cDNA library was derived. Thus, the full-length cDNA nucleotide sequence information of the present invention made it possible to achieve highly reliable expression frequency analysis.

[0016] The full-length cDNA clones of the present invention were obtained by a method comprising the steps of [1] preparing libraries containing cDNAs with a high fullness ratio using oligo-capping, and [2] assembling 5′-end sequences and selecting those with the highest probability of completeness in length in the cluster formed (there are many clones longer in the 5′-end direction). The use of primers designed based on the 5′- and 3′-end sequences of polynucleotides provided by the present invention enable full-length cDNAs to be readily obtained without using such special techniques. Primers, which are designed for use in obtaining cDNAs capable of being expressed, are not limited to the 5′- and 3′-end sequences of a polynucleotide.

[0017] Specifically, the present invention relates to polynucleotides and proteins encoded by the polypeptides as follows.

[0018] [1] A polynucleotide selected from the group consisting of:
[0019] (a) a polynucleotide comprising a protein-coding region of the nucleotide sequence according to any one of SEQ ID NOs: 1-1956 and SEQ ID NOs: 3913-3951;
[0020] (b) a polynucleotide comprising the nucleotide sequence encoding a polypeptide that comprises the amino acid sequence of any one of SEQ ID NOs: 1957-3912 and SEQ ID NOs: 3952-3990;
[0021] (c) a polynucleotide comprising a nucleotide sequence encoding a polypeptide, which comprises the amino acid sequence selected from SEQ ID NO: SEQ ID NOs: 1957-3912 and SEQ ID NOs: 3952-3990 wherein one or more amino acids have been substituted, deleted, inserted, and/or added, and which is functionally equivalent to the polypeptide comprising the selected amino acid sequence as described above;
[0022] (d) a polynucleotide which hybridizes to a polynucleotide comprising the nucleotide sequence selected from SEQ ID NOs: 1-1956 and SEQ ID NOs: 3913-3951, and which comprises the nucleotide sequence encoding a polypeptide functionally equivalent to a polypeptide encoded by the selected nucleotide sequence as described above;
[0023] (e) a polynucleotide comprising a nucleotide sequence encoding a partial amino acid sequence of a polypeptide encoded by the polynucleotides according to any one of (a)-(d);
[0024] (f) a polynucleotide comprising a nucleotide sequence having at least 70% identity to the nucleotide sequence of any one of SEQ ID NOs: 1-1956 and SEQ ID NOs: 3913-3951; and
[0025] (g) a polynucleotide comprising a nucleotide sequence having at least 90% identity to the nucleotide sequence of any one of SEQ ID NOs: 1-1956 and SEQ ID NOs: 3913-3951.

[0026] [2] A polypeptide encoded by the polynucleotide according to [1], or a partial peptide thereof.

[0027] [3] An antibody which binds to the polypeptide or the peptide according to [2].

[0028] [4] An immunoassay method for the polypeptide or the peptide according to [2], which comprises the steps of:
[0029] (a) contacting the polypeptide or the peptide according to [2] with the antibody according to [3]; and
[0030] (b) observing the binding between the two.

[0031] [5] A vector comprising the polynucleotide according to [1].

[0032] [6] A transformant comprising the polynucleotide according to [1] or the vector according to [5].

[0033] [7] A transformant which comprises the polynucleotide according to [1] or vector according to [5] in an expressible manner.

[0034] [8] A method for producing the polypeptide or the peptide according to [2], which comprises the steps of:
[0035] (a) culturing the transformant according to [7]; and
[0036] (b) recovering the expression product.

[0037] [9] An oligonucleotide comprising 15 or more nucleotides, which comprises the nucleotide sequence according to any one of SEQ ID NOs: 1-1956 and SEQ ID NOs: 3913-3951, or a nucleotide sequence complementary to the complementary strand thereof.

[0038] [10] A primer for synthesizing a polynucleotide, which comprises the oligonucleotide according to [9].

[0039] [11] A probe for detecting a polynucleotide, which comprises the oligonucleotide according to [9].

[0040] [12] A polynucleotide according to any one of:
[0041] (a) an antisense polynucleotide comprising a nucleotide sequence complementary to the transcript of the polynucleotide according to [1];
[0042] (b) a polynucleotide with the ribozyme activity for specifically cleaving the transcript of the polynucleotide according to [1]; and
[0043] (c) a polynucleotide which downregulates the expression of the polynucleotide of [1] due to RNAi activity in a host cell.

[0044] [13] A method for detecting the polynucleotide according to [1], which comprises the steps of:
[0045] (a) incubating a target polynucleotide with the oligonucleotide according to [9] under conditions ensuring hybridization; and
[0046] (b) detecting the hybridization between the target polynucleotide and the oligonucleotide according to [9].

[0047] [14] A database of polynucleotides and/or polypeptides, which comprises information on at least one of the nucleotide sequences of SEQ ID NOs: 1-1956 and SEQ ID NOs: 3913-3951 and/or on at least one of the amino acid sequences of SEQ ID NOs: 1957-3912 and SEQ ID NOs: 3952-3990.

[0048] Herein, “polynucleotide” is defined as a molecule, such as a DNA or RNA, in which multiple nucleotides are polymerized. There is no limitation as to the number of polymerized nucleotides. If a polymer contains a relatively low number of nucleotides, it is also described as an “oligonucleotide”, which is included in the “polynucleotide” of the present invention. The polynucleotides or oligonucleotides of the present invention can be natural or chemically synthesized. Alternatively, they can be synthesized using a template polynucleotide in an enzymatic reaction such as PCR. Furthermore, the polynucleotides of the present invention may be modified chemically. Single-stranded and double-stranded polynucleotides are included in the present invention. In this specification, especially in the claims, when the polynucleotides are described merely as “polynucleotide”, it means not only single-stranded polynucleotides but also double-stranded polynucleotides. When it means a double-stranded polynucleotide, the nucleotide sequence of only one chain is indicated. However, based on the nucleotide sequence of a sense chain, the nucleotide sequence of the corresponding complementary strand is essentially determined.

[0049] All the cDNAs provided by the present invention are full-length cDNAs. “Full-length cDNAs” herein means cDNAs containing the ATG codon, which is the start point of translation therein. Untranslated regions upstream and downstream of the protein-coding region are both naturally contained in natural mRNAs and are not essential. It is preferable that the full-length cDNAs of the present invention contain a stop codon.

### BRIEF DESCRIPTION OF THE DRAWINGS

[0050] FIG. 1 shows the restriction map of the vector pME18SFL3.

### DETAILED DESCRIPTION OF THE INVENTION

[0051] All of the clones (1,995 clones) of the present invention are novel and encode full-length polypeptides. Further, all of the clones are cDNAs with a high fullness ratio, and which were obtained by oligo-capping method. None of the clones are identical to any known human mRNAs (namely, they are novel clones) selected by searching 5′-end sequences and mRNA sequences with the annotation of “complete cds” in the GenBank and UniGene (Human) (http://www.ncbi.nlm.gov/UniGene) databases using BLAST homology [S. F. Altschul, W. Gish, W. Miller, E. W. Myers & D. J. Lipman, J. Mol. Biol., 215: 403-410 (1990); W. Gish & D. J. States, Nature Genet., 3: 266-272 (1993)]. They are also clones that were assumed to have a higher fullness ratio among members in assembled clusters. Most of the clones with a high fullness ratio in a cluster had nucleotide sequences longer in the 5′-end direction.

[0052] All of the full-length cDNAs of the present invention can be synthesized by a method such as PCR (Current protocols in Molecular Biology edit. Ausubel et al. (1987) Publish. John Wiley & Sons Section 6.1-6.4) using primer sets designed based on 5′-end and 3′-end sequences, or using primer sets of primers designed based on 5′-end sequences and a primer of oligo dT sequence corresponding to poly A sequence. Table 1 contains the clone names of 1,995 full-length cDNA clones of the present invention, SEQ ID NOs of the full-length nucleotide sequences, CDS portions deduced from the full-length nucleotide sequences, and SEQ ID NOs of the translated amino acids. The positions of CDS are shown according to the rules set out in “DDBJ/EMBL/GenBank Feature Table Definition” (http://www.ncbi.nlm.nih.gov/collab/FT/index.html). The start position number corresponds to the first letter of “ATG”, the nucleotide triplet encoding methionine; the termination position number corresponds to the third letter of the stop codon. These are indicated by flanking with the mark “..”. However, in clones without a stop codon, the termination position is indicated by the mark “>”, according to the above rules.

TABLE 1

| | SEQ ID | | SEQ ID |
|---|---|---|---|
| Clone | NO of | CDS | NO of |
| Name | Nucleotide | Portion | Amino Acid |
| 3NB692004045 | 1 | 220 . . . >1437 | 1957 |
| ADIPS2000069 | 2 | 48 . . . 1538 | 1958 |
| ADRGL2010315 | 3 | 1182 . . . 1604 | 1959 |
| ADRGL2010594 | 4 | 203 . . . 664 | 1960 |
| AHMSC1000138 | 5 | 135 . . . 455 | 1961 |
| ASTRO2008972 | 6 | 455 . . . 805 | 1962 |
| ASTRO2015162 | 7 | 244 . . . 951 | 1963 |
| ASTRO2016114 | 8 | 796 . . . 1779 | 1964 |
| ASTRO3000154 | 9 | 2154 . . . 2807 | 1965 |
| BEAST2000981 | 10 | 149 . . . 1357 | 1966 |
| BLADE2000256 | 11 | 461 . . . 1687 | 1967 |
| BLADE2001031 | 12 | 27 . . . 506 | 1968 |
| BLADE2002310 | 13 | 1065 . . . >2616 | 1969 |
| BLADE2002744 | 14 | 82 . . . 510 | 1970 |
| BLADE2004849 | 15 | 276 . . . 1202 | 1971 |
| BLADE2006043 | 16 | 218 . . . 622 | 1972 |
| BLADE2007735 | 17 | 310 . . . 723 | 1973 |
| BLADE2007744 | 18 | 1629 . . . >1944 | 1974 |
| BLADE2007799 | 19 | 917 . . . 2158 | 1975 |
| BLADE2008809 | 20 | 286 . . . 1575 | 1976 |
| BRACE1000475 | 21 | 2878 . . . 3471 | 1977 |
| BRACE2002392 | 22 | 76 . . . 1008 | 1978 |
| BRACE2003628 | 23 | 145 . . . 1164 | 1979 |
| BRACE2005991 | 24 | 337 . . . 666 | 1980 |
| BRACE2010336 | 25 | 23 . . . 1387 | 1981 |
| BRACE2012528 | 26 | 114 . . . 1289 | 1982 |
| BRACE2012625 | 27 | 84 . . . 1406 | 1983 |
| BRACE2012833 | 28 | 244 . . . 651 | 1984 |
| BRACE2012838 | 29 | 127 . . . 468 | 1985 |
| BRACE2012936 | 30 | 617 . . . 994 | 1986 |
| BRACE2012947 | 31 | 756 . . . 1223 | 1987 |
| BRACE2013009 | 32 | 777 . . . 1487 | 1988 |
| BRACE2013126 | 33 | 334 . . . 651 | 1989 |
| BRACE2013132 | 34 | 73 . . . 795 | 1990 |
| BRACE2016896 | 35 | 27 . . . 1298 | 1991 |
| BRACE2017359 | 36 | 755 . . . 1228 | 1992 |
| BRACE2017397 | 37 | 99 . . . 872 | 1993 |
| BRACE2017580 | 38 | 514 . . . 834 | 1994 |
| BRACE2017844 | 39 | 1674 . . . >2015 | 1995 |
| BRACE2017872 | 40 | 148 . . . >1404 | 1996 |
| BRACE2017992 | 41 | 934 . . . 1245 | 1997 |
| BRACE2019348 | 42 | 1423 . . . 2004 | 1998 |
| BRACE2023633 | 43 | 122 . . . 478 | 1999 |
| BRACE2023744 | 44 | 349 . . . 771 | 2000 |
| BRACE2025452 | 45 | 55 . . . 426 | 2001 |
| BRACE2026404 | 46 | 67 . . . 408 | 2002 |
| BRACE2027312 | 47 | 255 . . . 848 | 2003 |
| BRACE2027382 | 48 | 1749 . . . 2090 | 2004 |
| BRACE2028956 | 49 | 133 . . . 480 | 2005 |
| BRACE2030039 | 50 | 87 . . . 719 | 2006 |
| BRACE2032584 | 51 | 129 . . . 485 | 2007 |
| BRACE2033128 | 52 | 296 . . . 676 | 2008 |
| BRACE2034434 | 53 | 1963 . . . 2664 | 2009 |
| BRACE2035120 | 54 | 22 . . . 1938 | 2010 |
| BRACE2035191 | 55 | 207 . . . 542 | 2011 |
| BRACE2039362 | 56 | 81 . . . 440 | 2012 |
| BRACE2039607 | 57 | 1850 . . . 2398 | 2013 |
| BRACE2042541 | 58 | 96 . . . 1562 | 2014 |
| BRACE2046976 | 59 | 836 . . . 1345 | 2015 |
| BRACE2047232 | 60 | 1434 . . . 2363 | 2016 |
| BRACE2047975 | 61 | 299 . . . 652 | 2017 |
| BRACE3001403 | 62 | 1965 . . . 2507 | 2018 |
| BRACE3001973 | 63 | 24 . . . 2702 | 2019 |
| BRACE3002264 | 64 | 72 . . . 2870 | 2020 |
| BRACE3002344 | 65 | 113 . . . 3295 | 2021 |
| BRACE3002541 | 66 | 2255 . . . 2593 | 2022 |
| BRACE3002756 | 67 | 595 . . . 2700 | 2023 |
| BRACE3003866 | 68 | 2667 . . . 3542 | 2024 |
| BRACE3004046 | 69 | 2774 . . . 3277 | 2025 |
| BRACE3004371 | 70 | 467 . . . 832 | 2026 |
| BRACE3004767 | 71 | 3944 . . . 4390 | 2027 |
| BRACE3004887 | 72 | 2217 . . . 2792 | 2028 |
| BRACE3004981 | 73 | 3154 . . . 3624 | 2029 |
| BRACE3005870 | 74 | 5 . . . 379 | 2030 |
| BRACE3005903 | 75 | 328 . . . 3378 | 2031 |
| BRACE3006553 | 76 | 2589 . . . 3344 | 2032 |
| BRACE3007649 | 77 | 4951 . . . 5472 | 2033 |
| BRACE3007869 | 78 | 932 . . . 1549 | 2034 |
| BRACE3009075 | 79 | 1318 . . . 2025 | 2035 |
| BRACE3009265 | 80 | 1886 . . . 2374 | 2036 |
| BRACE3009392 | 81 | 2134 . . . 3072 | 2037 |
| BRACE3009416 | 82 | 2056 . . . 2805 | 2038 |
| BRACE3009539 | 83 | 117 . . . 449 | 2039 |
| BRACE3010702 | 84 | 1062 . . . 1619 | 2040 |
| BRACE3011447 | 85 | 289 . . . 786 | 2041 |
| BRACE3011774 | 86 | 906 . . . 1331 | 2042 |
| BRACE3013418 | 87 | 17 . . . 3121 | 2043 |
| BRACE3013874 | 88 | 765 . . . 2255 | 2044 |
| BRACE3013986 | 89 | 335 . . . 661 | 2045 |
| BRACE3014523 | 90 | 318 . . . 1532 | 2046 |
| BRACE3014714 | 91 | 1034 . . . 2182 | 2047 |
| BRACE3015090 | 92 | 287 . . . 616 | 2048 |
| BRACE3015898 | 93 | 119 . . . 448 | 2049 |
| BRACE3016020 | 94 | 62 . . . 586 | 2050 |
| BRACE3016167 | 95 | 67 . . . 507 | 2051 |
| BRACE3016580 | 96 | 225 . . . 578 | 2052 |
| BRACE3016788 | 97 | 1740 . . . 2486 | 2053 |
| BRACE3016810 | 98 | 2064 . . . 2561 | 2054 |
| BRACE3016862 | 99 | 33 . . . 335 | 2055 |
| BRACE3017253 | 100 | 86 . . . 1342 | 2056 |
| BRACE3018083 | 101 | 1447 . . . 2541 | 2057 |
| BRACE3019570 | 102 | 320 . . . 3358 | 2058 |
| BRACE3019611 | 103 | 2005 . . . 2484 | 2059 |
| BRACE3019817 | 104 | 7 . . . 345 | 2060 |
| BRACE3019941 | 105 | 1120 . . . 3507 | 2061 |
| BRACE3020356 | 106 | 344 . . . 661 | 2062 |
| BRACE3020669 | 107 | 2192 . . . 2650 | 2063 |
| BRACE3021430 | 108 | 243 . . . 686 | 2064 |
| BRACE3021517 | 109 | 218 . . . 523 | 2065 |
| BRACE3021805 | 110 | 312 . . . 1283 | 2066 |
| BRACE3022051 | 111 | 1042 . . . 1515 | 2067 |
| BRACE3022303 | 112 | 2107 . . . 3009 | 2068 |
| BRACE3022312 | 113 | 98 . . . 1003 | 2069 |
| BRACE3022340 | 114 | 20 . . . 2785 | 2070 |
| BRACE3022847 | 115 | 560 . . . 1066 | 2071 |
| BRACE3023604 | 116 | 600 . . . >1057 | 2072 |
| BRACE3024379 | 117 | 412 . . . 717 | 2073 |
| BRACE3024444 | 118 | 129 . . . 455 | 2074 |
| BRACE3024497 | 119 | 219 . . . 545 | 2075 |
| BRACE3024537 | 120 | 377 . . . 724 | 2076 |
| BRACE3024879 | 121 | 142 . . . 786 | 2077 |
| BRACE3025627 | 122 | 1648 . . . 2019 | 2078 |
| BRACE3025719 | 123 | 111 . . . 1811 | 2079 |
| BRACE3026161 | 124 | 330 . . . 722 | 2080 |
| BRACE3026290 | 125 | 211 . . . 3225 | 2081 |
| BRACE3026345 | 126 | 2603 . . . 3145 | 2082 |
| BRACE3026456 | 127 | 2113 . . . 2439 | 2083 |
| BRACE3026802 | 128 | 298 . . . 1260 | 2084 |
| BRACE3026844 | 129 | 1231 . . . 3081 | 2085 |
| BRACE3026947 | 130 | 1528 . . . 3849 | 2086 |
| BRACE3027256 | 131 | 670 . . . 1020 | 2087 |
| BRACE3027931 | 132 | 64 . . . 1260 | 2088 |
| BRACE3028360 | 133 | 4486 . . . 4920 | 2089 |
| BRACE3028895 | 134 | 716 . . . 1129 | 2090 |
| BRACE3028998 | 135 | 264 . . . 785 | 2091 |
| BRACE3029005 | 136 | 394 . . . 771 | 2092 |
| BRACE3029021 | 137 | 208 . . . 657 | 2093 |
| BRACE3029205 | 138 | 3800 . . . 4531 | 2094 |
| BRACE3029447 | 139 | 1873 . . . 2424 | 2095 |
| BRACE3030538 | 140 | 253 . . . 828 | 2096 |
| BRACE3031161 | 141 | 138 . . . 494 | 2097 |
| BRACE3031184 | 142 | 57 . . . 422 | 2098 |
| BRACE3031185 | 143 | 11 . . . 370 | 2099 |
| BRACE3031315 | 144 | 1220 . . . 2563 | 2100 |
| BRACE3031372 | 145 | 1587 . . . 2429 | 2101 |
| BRACE3031579 | 146 | 1636 . . . 2079 | 2102 |
| BRACE3031728 | 147 | 22 . . . 2196 | 2103 |
| BRACE3031743 | 148 | 53 . . . 805 | 2104 |
| BRACE3031843 | 149 | 115 . . . 429 | 2105 |
| BRACE3032385 | 150 | 103 . . . 2007 | 2106 |
| BRACE3032537 | 151 | 639 . . . 1199 | 2107 |
| BRACE3032538 | 152 | 3317 . . . 4198 | 2108 |
| BRACE3032631 | 153 | 790 . . . 1701 | 2109 |
| BRACE3032980 | 154 | 223 . . . 618 | 2110 |
| BRACE3033525 | 155 | 1346 . . . 1672 | 2111 |
| BRACE3034183 | 156 | 190 . . . 1686 | 2112 |
| BRACE3034389 | 157 | 176 . . . 1294 | 2113 |
| BRACE3034964 | 158 | 2385 . . . 3278 | 2114 |
| BRACE3034993 | 159 | 1533 . . . 1838 | 2115 |
| BRACE3035168 | 160 | 829 . . . 1149 | 2116 |
| BRACE3036156 | 161 | 3 . . . 338 | 2117 |
| BRACE3036271 | 162 | 2019 . . . 3125 | 2118 |
| BRACE3036283 | 163 | 2599 . . . 3186 | 2119 |
| BRACE3037612 | 164 | 2401 . . . 2892 | 2120 |
| BRACE3037637 | 165 | 199 . . . 570 | 2121 |
| BRACE3037803 | 166 | 2507 . . . 2884 | 2122 |
| BRACE3038012 | 167 | 2134 . . . 2634 | 2123 |
| BRACE3038030 | 168 | 976 . . . 1302 | 2124 |
| BRACE3038570 | 169 | 223 . . . 621 | 2125 |
| BRACE3038760 | 170 | 2145 . . . 2906 | 2126 |
| BRACE3039288 | 171 | 876 . . . 1511 | 2127 |
| BRACE3039358 | 172 | 385 . . . 2664 | 2128 |
| BRACE3039378 | 173 | 479 . . . 2254 | 2129 |
| BRACE3039454 | 174 | 351 . . . 1073 | 2130 |
| BRACE3040012 | 175 | 145 . . . 465 | 2131 |
| BRACE3040239 | 176 | 1505 . . . 2548 | 2132 |
| BRACE3040504 | 177 | 307 . . . 738 | 2133 |
| BRACE3040644 | 178 | 1280 . . . 3214 | 2134 |
| BRACE3040863 | 179 | 12 . . . 626 | 2135 |
| BRACE3041059 | 180 | 99 . . . 2558 | 2136 |
| BRACE3041162 | 181 | 2041 . . . 2604 | 2137 |
| BRACE3041827 | 182 | 3169 . . . 3561 | 2138 |
| BRACE3042046 | 183 | 1488 . . . 2879 | 2139 |
| BRACE3042210 | 184 | 174 . . . 533 | 2140 |
| BRACE3042326 | 185 | 216 . . . 2366 | 2141 |
| BRACE3042409 | 186 | 238 . . . 3258 | 2142 |
| BRACE3042432 | 187 | 2084 . . . 2473 | 2143 |
| BRACE3042594 | 188 | 179 . . . 517 | 2144 |
| BRACE3043597 | 189 | 23 . . . 460 | 2145 |
| BRACE3044090 | 190 | 1198 . . . 1602 | 2146 |
| BRACE3044172 | 191 | 803 . . . 3067 | 2147 |
| BRACE3044247 | 192 | 107 . . . 451 | 2148 |
| BRACE3044377 | 193 | 223 . . . 900 | 2149 |
| BRACE3044495 | 194 | 893 . . . 1510 | 2150 |
| BRACE3045078 | 195 | 90 . . . 593 | 2151 |
| BRACE3045145 | 196 | 187 . . . 501 | 2152 |
| BRACE3045424 | 197 | 275 . . . 619 | 2153 |
| BRACE3045708 | 198 | 219 . . . 587 | 2154 |
| BRACE3045981 | 199 | 302 . . . 724 | 2155 |
| BRACE3046049 | 200 | 849 . . . 1298 | 2156 |
| BRACE3046152 | 201 | 2241 . . . 3440 | 2157 |
| BRACE3046294 | 202 | 189 . . . 578 | 2158 |
| BRACE3046466 | 203 | 111 . . . 2969 | 2159 |
| BRACE3046491 | 204 | 26 . . . 2275 | 2160 |
| BRACE3046609 | 205 | 1563 . . . 2477 | 2161 |
| BRACE3046837 | 206 | 25 . . . 558 | 2162 |
| BRACE3046855 | 207 | 3735 . . . 4247 | 2163 |
| BRACE3046966 | 208 | 12 . . . 452 | 2164 |
| BRACE3047018 | 209 | 2886 . . . 3425 | 2165 |
| BRACE3047482 | 210 | 43 . . . 2313 | 2166 |
| BRACE3047801 | 211 | 17 . . . 3757 | 2167 |
| BRACE3048483 | 212 | 2340 . . . 2672 | 2168 |
| BRACE3048565 | 213 | 264 . . . 626 | 2169 |
| BRACE3048615 | 214 | 352 . . . 729 | 2170 |
| BRACE3048677 | 215 | 238 . . . 732 | 2171 |
| BRACE3048756 | 216 | 2483 . . . 3052 | 2172 |
| BRACE3048904 | 217 | 229 . . . 759 | 2173 |
| BRACE3048905 | 218 | 1733 . . . 2038 | 2174 |
| BRACE3049186 | 219 | 106 . . . 519 | 2175 |
| BRACE3049714 | 220 | 294 . . . 2957 | 2176 |
| BRACE3050270 | 221 | 2725 . . . 3291 | 2177 |
| BRACE3050504 | 222 | 287 . . . 1306 | 2178 |
| BRACE3051144 | 223 | 176 . . . 763 | 2179 |
| BRACE3051621 | 224 | 1748 . . . 3418 | 2180 |
| BRACE3051627 | 225 | 1216 . . . 2235 | 2181 |
| BRACE3051722 | 226 | 816 . . . 1190 | 2182 |
| BRACE3051819 | 227 | 3 . . . 2801 | 2183 |
| BRACE3051879 | 228 | 193 . . . 519 | 2184 |
| BRACE3052321 | 229 | 124 . . . 1614 | 2185 |
| BRACE3052410 | 230 | 17 . . . 2926 | 2186 |
| BRACE3052486 | 231 | 1622 . . . 1942 | 2187 |
| BRACE3052595 | 232 | 40 . . . 780 | 2188 |
| BRALZ2003119 | 233 | 363 . . . 1844 | 2189 |
| BRALZ2007661 | 234 | 1159 . . . 1746 | 2190 |
| BRALZ2008930 | 235 | 61 . . . 825 | 2191 |
| BRALZ2010842 | 236 | 173 . . . 1048 | 2192 |
| BRALZ2011337 | 237 | 3 . . . 305 | 2193 |
| BRALZ2013621 | 238 | 214 . . . 576 | 2194 |
| BRALZ2013690 | 239 | 283 . . . 603 | 2195 |
| BRALZ2014054 | 240 | 213 . . . 920 | 2196 |
| BRAMY2015516 | 241 | 747 . . . 1292 | 2197 |
| BRAMY2021098 | 242 | 1405 . . . 1785 | 2198 |
| BRAMY2022320 | 243 | 320 . . . 1975 | 2199 |
| BRAMY2023939 | 244 | 39 . . . >2128 | 2200 |
| BRAMY2025495 | 245 | 552 . . . 1031 | 2201 |
| BRAMY2031516 | 246 | 1227 . . . >2798 | 2202 |
| BRAMY2033895 | 247 | 175 . . . 531 | 2203 |
| BRAMY2035801 | 248 | 1487 . . . 1963 | 2204 |
| BRAMY2036254 | 249 | 156 . . . 548 | 2205 |
| BRAMY2036266 | 250 | 294 . . . 776 | 2206 |
| BRAMY2037609 | 251 | 107 . . . 787 | 2207 |
| BRAMY2039630 | 252 | 1281 . . . 1703 | 2208 |
| BRAMY2040915 | 253 | 488 . . . 2380 | 2209 |
| BRAMY2041347 | 254 | 332 . . . 2059 | 2210 |
| BRAMY2041384 | 255 | 682 . . . 2211 | 2211 |
| BRAMY2041507 | 256 | 1331 . . . 2029 | 2212 |
| BRAMY2044686 | 257 | 1418 . . . 1990 | 2213 |
| BRAMY2046489 | 258 | 375 . . . 698 | 2214 |
| BRAMY2046537 | 259 | 293 . . . 952 | 2215 |
| BRAMY3000692 | 260 | 1427 . . . 1960 | 2216 |
| BRAMY3001409 | 261 | 1952 . . . 2428 | 2217 |
| BRAMY3002329 | 262 | 2751 . . . 3269 | 2218 |
| BRAMY3002508 | 263 | 1949 . . . 2374 | 2219 |
| BRAMY3002886 | 264 | 25 . . . 2148 | 2220 |
| BRAMY3004126 | 265 | 1657 . . . 2676 | 2221 |
| BRAMY3004364 | 266 | 1056 . . . 1466 | 2222 |
| BRAMY3005184 | 267 | 430 . . . 3735 | 2223 |
| BRAMY3005656 | 268 | 919 . . . 1632 | 2224 |
| BRAMY3005912 | 269 | 3863 . . . 4513 | 2225 |
| BRAMY3007078 | 270 | 493 . . . 3057 | 2226 |
| BRAMY3007449 | 271 | 229 . . . 726 | 2227 |
| BRAMY3007471 | 272 | 3 . . . 344 | 2228 |
| BRAMY3008436 | 273 | 3093 . . . 3557 | 2229 |
| BRAMY3009158 | 274 | 116 . . . 511 | 2230 |
| BRAMY3009491 | 275 | 2262 . . . 3581 | 2231 |
| BRAMY3009556 | 276 | 3108 . . . 3455 | 2232 |
| BRAMY3009904 | 277 | 286 . . . 705 | 2233 |
| BRAMY3010321 | 278 | 332 . . . 2785 | 2234 |
| BRAMY3010603 | 279 | 311 . . . 706 | 2235 |
| BRAMY3010654 | 280 | 1357 . . . 1947 | 2236 |
| BRAMY3010902 | 281 | 182 . . . 487 | 2237 |
| BRAMY3011501 | 282 | 185 . . . 2437 | 2238 |
| BRAMY3011581 | 283 | 1000 . . . 2361 | 2239 |
| BRAMY3011865 | 284 | 2563 . . . 3414 | 2240 |
| BRAMY3014027 | 285 | 362 . . . 2593 | 2241 |
| BRAMY3014555 | 286 | 100 . . . 1563 | 2242 |
| BRAMY3014613 | 287 | 437 . . . 2254 | 2243 |
| BRAMY3015086 | 288 | 179 . . . 2284 | 2244 |
| BRAMY3015547 | 289 | 983 . . . 4105 | 2245 |
| BRAMY3015549 | 290 | 622 . . . >3960 | 2246 |
| BRAMY3016829 | 291 | 99 . . . 428 | 2247 |
| BRAMY3017827 | 292 | 24 . . . 1400 | 2248 |
| BRAMY3017920 | 293 | 398 . . . 1486 | 2249 |
| BRAMY3017965 | 294 | 2468 . . . 3796 | 2250 |
| BRAMY3018121 | 295 | 78 . . . 605 | 2251 |
| BRAMY3018248 | 296 | 2236 . . . 2946 | 2252 |
| BRAMY3018340 | 297 | 161 . . . >3646 | 2253 |
| BRAMY3018754 | 298 | 101 . . . 1555 | 2254 |
| BRAMY4000915 | 299 | 307 . . . 2370 | 2255 |
| BRAMY4000962 | 300 | 1695 . . . 3305 | 2256 |
| BRAMY4001234 | 301 | 578 . . . 1183 | 2257 |
| BRAMY4001652 | 302 | 184 . . . 2169 | 2258 |
| BRAMY4001863 | 303 | 30 . . . 923 | 2259 |
| BRAMY4001913 | 304 | 1048 . . . 1440 | 2260 |
| BRAMY4002575 | 305 | 41 . . . 886 | 2261 |
| BRAMY4002628 | 306 | 10 . . . 2097 | 2262 |
| BRAWH2000256 | 307 | 898 . . . 1617 | 2263 |
| BRAWH2002333 | 308 | 387 . . . 1385 | 2264 |
| BRAWH2004078 | 309 | 536 . . . 1525 | 2265 |
| BRAWH2010364 | 310 | 1383 . . . 2126 | 2266 |
| BRAWH2010619 | 311 | 291 . . . 896 | 2267 |
| BRAWH2011796 | 312 | 2109 . . . 2423 | 2268 |
| BRAWH2011812 | 313 | 9 . . . 3053 | 2269 |
| BRAWH2011958 | 314 | 1316 . . . 1732 | 2270 |
| BRAWH2012054 | 315 | 1195 . . . 1809 | 2271 |
| BRAWH2012866 | 316 | 658 . . . 1926 | 2272 |
| BRAWH2013955 | 317 | 325 . . . 642 | 2273 |
| BRAWH2014053 | 318 | 363 . . . 962 | 2274 |
| BRAWH2016209 | 319 | 96 . . . 1985 | 2275 |
| BRAWH2016223 | 320 | 1144 . . . 2187 | 2276 |
| BRAWH2016305 | 321 | 727 . . . 1320 | 2277 |
| BRAWH2016514 | 322 | 325 . . . 1236 | 2278 |
| BRAWH2016562 | 323 | 1832 . . . 2242 | 2279 |
| BRAWH2016785 | 324 | 695 . . . 1201 | 2280 |
| BRAWH3000446 | 325 | 822 . . . 2396 | 2281 |
| BRAWH3000884 | 326 | 2966 . . . 4306 | 2282 |
| BRAWH3001053 | 327 | 1956 . . . 3152 | 2283 |
| BRAWH3001638 | 328 | 1017 . . . 4334 | 2284 |
| BRAWH3001783 | 329 | 363 . . . 2540 | 2285 |
| BRAWH3001833 | 330 | 209 . . . 1012 | 2286 |
| BRAWH3003244 | 331 | 892 . . . 1248 | 2287 |
| BRAWH3003573 | 332 | 2544 . . . 2936 | 2288 |
| BRAWH3003975 | 333 | 40 . . . 342 | 2289 |
| BRAWH3004335 | 334 | 1017 . . . 1733 | 2290 |
| BRAWH3004350 | 335 | 498 . . . 1247 | 2291 |
| BRAWH3005037 | 336 | 1815 . . . 2180 | 2292 |
| BRAWH3005886 | 337 | 307 . . . 1545 | 2293 |
| BRAWH3005892 | 338 | 668 . . . 970 | 2294 |
| BRAWH3005896 | 339 | 328 . . . 636 | 2295 |
| BRAWH3008167 | 340 | 212 . . . 2563 | 2296 |
| BRAWH3008559 | 341 | 244 . . . 3627 | 2297 |
| BRAWH3008867 | 342 | 249 . . . 686 | 2298 |
| BRAWH3009961 | 343 | 140 . . . 4189 | 2299 |
| BRAWH3010461 | 344 | 188 . . . 895 | 2300 |
| BRAWH3010602 | 345 | 642 . . . 1319 | 2301 |
| BRAWH3010657 | 346 | 363 . . . 3491 | 2302 |
| BRAWH3010726 | 347 | 1866 . . . 3446 | 2303 |
| BRAWH3010833 | 348 | 2255 . . . 2632 | 2304 |
| BRAWH3011101 | 349 | 188 . . . 502 | 2305 |
| BRAWH3011331 | 350 | 193 . . . 942 | 2306 |
| BRAWH3011402 | 351 | 173 . . . 538 | 2307 |
| BRAWH3011577 | 352 | 369 . . . 737 | 2308 |
| BRAWH3011623 | 353 | 2953 . . . 3834 | 2309 |
| BRAWH3011685 | 354 | 1342 . . . 1935 | 2310 |
| BRAWH3011907 | 355 | 140 . . . 472 | 2311 |
| BRAWH3011929 | 356 | 447 . . . 800 | 2312 |
| BRAWH3012005 | 357 | 1816 . . . 2289 | 2313 |
| BRAWH3012662 | 358 | 1213 . . . 1854 | 2314 |
| BRAWH3012779 | 359 | 460 . . . 999 | 2315 |
| BRAWH3013009 | 360 | 2236 . . . 3414 | 2316 |
| BRAWH3013049 | 361 | 17 . . . 343 | 2317 |
| BRAWH3013264 | 362 | 68 . . . 2716 | 2318 |
| BRAWH3013508 | 363 | 1159 . . . 1539 | 2319 |
| BRAWH3014609 | 364 | 416 . . . 1972 | 2320 |
| BRAWH3014639 | 365 | 84 . . . 515 | 2321 |
| BRAWH3015017 | 366 | 1097 . . . 1402 | 2322 |
| BRAWH3015175 | 367 | 38 . . . 1054 | 2323 |
| BRAWH3015610 | 368 | 450 . . . 896 | 2324 |
| BRAWH3015825 | 369 | 180 . . . 1181 | 2325 |
| BRAWH3016123 | 370 | 3057 . . . 3677 | 2326 |
| BRAWH3016715 | 371 | 953 . . . 1690 | 2327 |
| BRAWH3017180 | 372 | 88 . . . 2925 | 2328 |
| BRAWH3017259 | 373 | 259 . . . 3957 | 2329 |
| BRAWH3017260 | 374 | 549 . . . 2114 | 2330 |
| BRAWH3017477 | 375 | 11 . . . 1324 | 2331 |
| BRAWH3017980 | 376 | 23 . . . 358 | 2332 |
| BRAWH3018063 | 377 | 67 . . . 2175 | 2333 |
| BRAWH3018369 | 378 | 271 . . . 846 | 2334 |
| BRAWH3018548 | 379 | 569 . . . 3589 | 2335 |
| BRAWH3018969 | 380 | 192 . . . 1553 | 2336 |
| BRAWH3019026 | 381 | 26 . . . 2530 | 2337 |
| BRAWH3019529 | 382 | 12 . . . 464 | 2338 |
| BRAWH3019594 | 383 | 657 . . . 1079 | 2339 |
| BRAWH3019820 | 384 | 1802 . . . 2194 | 2340 |
| BRAWH3020200 | 385 | 412 . . . 822 | 2341 |
| BRAWH3020318 | 386 | 23 . . . 775 | 2342 |
| BRAWH3020884 | 387 | 265 . . . 1347 | 2343 |
| BRAWH3020928 | 388 | 1114 . . . 1422 | 2344 |
| BRAWH3021012 | 389 | 410 . . . 2296 | 2345 |
| BRAWH3021574 | 390 | 17 . . . 1576 | 2346 |
| BRAWH3021580 | 391 | 710 . . . 2128 | 2347 |
| BRAWH3021641 | 392 | 222 . . . 524 | 2348 |
| BRAWH3021643 | 393 | 64 . . . 408 | 2349 |
| BRAWH3021724 | 394 | 63 . . . 1172 | 2350 |
| BRAWH3022347 | 395 | 1572 . . . 3788 | 2351 |
| BRAWH3022431 | 396 | 100 . . . 414 | 2352 |
| BRAWH3022459 | 397 | 256 . . . 621 | 2353 |
| BRAWH3022542 | 398 | 395 . . . 772 | 2354 |
| BRAWH3022651 | 399 | 171 . . . 2396 | 2355 |
| BRAWH3022719 | 400 | 209 . . . 565 | 2356 |
| BRAWH3022900 | 401 | 47 . . . 391 | 2357 |
| BRAWH3023156 | 402 | 2880 . . . 3281 | 2358 |
| BRAWH3023168 | 403 | 2271 . . . 2606 | 2359 |
| BRAWH3023172 | 404 | 968 . . . 2017 | 2360 |
| BRAWH3023274 | 405 | 3302 . . . 3706 | 2361 |
| BRAWH3023415 | 406 | 2179 . . . 2850 | 2362 |
| BRAWH3023421 | 407 | 1713 . . . 2354 | 2363 |
| BRAWH3024186 | 408 | 58 . . . 2940 | 2364 |
| BRAWH3024231 | 409 | 1815 . . . 2843 | 2365 |
| BRAWH3024242 | 410 | 1094 . . . 1741 | 2366 |
| BRAWH3024506 | 411 | 2506 . . . 3510 | 2367 |
| BRAWH3024989 | 412 | 1445 . . . 2161 | 2368 |
| BRAWH3025157 | 413 | 1 . . . 1746 | 2369 |
| BRAWH3026349 | 414 | 165 . . . 1166 | 2370 |
| BRAWH3026938 | 415 | 270 . . . 2579 | 2371 |
| BRAWH3027420 | 416 | 67 . . . 483 | 2372 |
| BRAWH3027440 | 417 | 1644 . . . 2651 | 2373 |
| BRAWH3027533 | 418 | 328 . . . 2253 | 2374 |
| BRAWH3027574 | 419 | 20 . . . 3067 | 2375 |
| BRAWH3027607 | 420 | 3857 . . . 4312 | 2376 |
| BRAWH3027616 | 421 | 233 . . . 682 | 2377 |
| BRAWH3027675 | 422 | 1315 . . . 1779 | 2378 |
| BRAWH3027806 | 423 | 359 . . . 2653 | 2379 |
| BRAWH3027880 | 424 | 244 . . . 1482 | 2380 |
| BRAWH3028202 | 425 | 1707 . . . 2297 | 2381 |
| BRAWH3028223 | 426 | 26 . . . 352 | 2382 |
| BRAWH3028461 | 427 | 194 . . . 526 | 2383 |
| BRAWH3028754 | 428 | 173 . . . 811 | 2384 |
| BRAWH3028796 | 429 | 1035 . . . 2291 | 2385 |
| BRAWH3029313 | 430 | 171 . . . 563 | 2386 |
| BRAWH3029385 | 431 | 3368 . . . 4567 | 2387 |
| BRAWH3029538 | 432 | 153 . . . 773 | 2388 |
| BRAWH3029806 | 433 | 16 . . . 2613 | 2389 |
| BRAWH3030772 | 434 | 470 . . . 865 | 2390 |
| BRAWH3030810 | 435 | 2278 . . . 2976 | 2391 |
| BRAWH3030910 | 436 | 872 . . . 1864 | 2392 |
| BRAWH3031054 | 437 | 374 . . . 769 | 2393 |
| BRAWH3031342 | 438 | 170 . . . 1699 | 2394 |
| BRAWH3031710 | 439 | 1326 . . . 4424 | 2395 |
| BRAWH3032298 | 440 | 114 . . . 4013 | 2396 |
| BRAWH3032340 | 441 | 254 . . . 3775 | 2397 |
| BRAWH3032571 | 442 | 1 . . . 3678 | 2398 |
| BRAWH3033117 | 443 | 479 . . . 1165 | 2399 |
| BRAWH3033293 | 444 | 308 . . . 3097 | 2400 |
| BRAWH3033448 | 445 | 352 . . . 1584 | 2401 |
| BRAWH3033513 | 446 | 660 . . . 1061 | 2402 |
| BRAWH3034097 | 447 | 1331 . . . 1711 | 2403 |
| BRAWH3034114 | 448 | 230 . . . 727 | 2404 |
| BRAWH3034134 | 449 | 211 . . . 555 | 2405 |
| BRAWH3034668 | 450 | 1326 . . . 3407 | 2406 |
| BRAWH3034743 | 451 | 2 . . . 1855 | 2407 |
| BRAWH3034775 | 452 | 133 . . . 2391 | 2408 |
| BRAWH3034890 | 453 | 123 . . . 1124 | 2409 |
| BRAWH3035403 | 454 | 77 . . . 1249 | 2410 |
| BRAWH3035904 | 455 | 49 . . . 2673 | 2411 |
| BRAWH3035914 | 456 | 54 . . . 1340 | 2412 |
| BRAWH3035936 | 457 | 703 . . . 2760 | 2413 |
| BRAWH3036077 | 458 | 350 . . . 973 | 2414 |
| BRAWH3036247 | 459 | 282 . . . 2219 | 2415 |
| BRAWH3036270 | 460 | 1844 . . . 3085 | 2416 |
| BRAWH3036334 | 461 | 456 . . . 2537 | 2417 |
| BRAWH3036561 | 462 | 136 . . . 579 | 2418 |
| BRAWH3037265 | 463 | 1658 . . . >4355 | 2419 |
| BRAWH3037394 | 464 | 15 . . . 485 | 2420 |
| BRAWH3037428 | 465 | 1010 . . . 1558 | 2421 |
| BRAWH3037533 | 466 | 282 . . . 593 | 2422 |
| BRAWH3037979 | 467 | 249 . . . >4245 | 2423 |
| BRAWH3038055 | 468 | 1554 . . . 5042 | 2424 |
| BRAWH3038230 | 469 | 29 . . . 364 | 2425 |
| BRAWH3038252 | 470 | 1 . . . 2535 | 2426 |
| BRAWH3038324 | 471 | 925 . . . 2925 | 2427 |
| BRAWH3038827 | 472 | 270 . . . 2669 | 2428 |
| BRAWH3039258 | 473 | 1933 . . . 4083 | 2429 |
| BRAWH3039623 | 474 | 2197 . . . 2607 | 2430 |
| BRAWH3040297 | 475 | 198 . . . 686 | 2431 |
| BRAWH3040695 | 476 | 3041 . . . 3466 | 2432 |
| BRAWH3040711 | 477 | 165 . . . 746 | 2433 |
| BRAWH3040900 | 478 | 567 . . . 1043 | 2434 |
| BRAWH3041492 | 479 | 2501 . . . 3106 | 2435 |
| BRAWH3041556 | 480 | 780 . . . 3560 | 2436 |
| BRAWH3041928 | 481 | 144 . . . 464 | 2437 |
| BRAWH3042132 | 482 | 160 . . . 621 | 2438 |
| BRAWH3042438 | 483 | 27 . . . 974 | 2439 |
| BRAWH3042447 | 484 | 303 . . . 2771 | 2440 |
| BRAWH3042568 | 485 | 243 . . . 803 | 2441 |
| BRAWH3042772 | 486 | 470 . . . 979 | 2442 |
| BRAWH3042787 | 487 | 67 . . . 405 | 2443 |
| BRAWH3042820 | 488 | 1311 . . . 1778 | 2444 |
| BRAWH3042996 | 489 | 349 . . . 744 | 2445 |
| BRAWH3043034 | 490 | 84 . . . 3068 | 2446 |
| BRAWH3043295 | 491 | 547 . . . 945 | 2447 |
| BRAWH3043498 | 492 | 28 . . . 375 | 2448 |
| BRAWH3043623 | 493 | 236 . . . 832 | 2449 |
| BRAWH3043944 | 494 | 128 . . . 796 | 2450 |
| BRAWH3044122 | 495 | 106 . . . 2874 | 2451 |
| BRAWH3044151 | 496 | 1625 . . . 2767 | 2452 |
| BRAWH3044487 | 497 | 80 . . . 1294 | 2453 |
| BRAWH3044585 | 498 | 276 . . . 857 | 2454 |
| BRAWH3044676 | 499 | 249 . . . 611 | 2455 |
| BRAWH3044985 | 500 | 3188 . . . 3493 | 2456 |
| BRAWH3045118 | 501 | 5 . . . 3106 | 2457 |
| BRAWH3045229 | 502 | 315 . . . 1136 | 2458 |
| BRAWH3045625 | 503 | 71 . . . 388 | 2459 |
| BRAWH3046196 | 504 | 45 . . . 584 | 2460 |
| BRAWH3046209 | 505 | 4437 . . . 4874 | 2461 |
| BRAWH3046424 | 506 | 1763 . . . 3661 | 2462 |
| BRAWH3046802 | 507 | 155 . . . 478 | 2463 |
| BRAWH3046959 | 508 | 1722 . . . 2213 | 2464 |
| BRAWH3047063 | 509 | 94 . . . 483 | 2465 |
| BRAWH3047539 | 510 | 126 . . . 455 | 2466 |
| BRAWH3047565 | 511 | 335 . . . 952 | 2467 |
| BRAWH3047644 | 512 | 1314 . . . 4229 | 2468 |
| BRAWH3047692 | 513 | 668 . . . 2413 | 2469 |
| BRAWH3047946 | 514 | 115 . . . 609 | 2470 |
| BRAWH3048374 | 515 | 869 . . . 3058 | 2471 |
| BRAWH3048548 | 516 | 124 . . . 924 | 2472 |
| BRAWH3048724 | 517 | 1708 . . . 2232 | 2473 |
| BRAWH3049068 | 518 | 234 . . . 626 | 2474 |
| BRAWH3049544 | 519 | 102 . . . 1913 | 2475 |
| BRAWH3049726 | 520 | 49 . . . 468 | 2476 |
| BRAWH3049858 | 521 | 161 . . . 643 | 2477 |
| BRCAN2000923 | 522 | 125 . . . 685 | 2478 |
| BRCAN2002662 | 523 | 1502 . . . 1897 | 2479 |
| BRCAN2002892 | 524 | 289 . . . 888 | 2480 |
| BRCAN2003269 | 525 | 10 . . . 945 | 2481 |
| BRCAN2003814 | 526 | 76 . . . 1044 | 2482 |
| BRCAN2006051 | 527 | 1 . . . 570 | 2483 |
| BRCAN2006955 | 528 | 123 . . . 485 | 2484 |
| BRCAN2007525 | 529 | 188 . . . 559 | 2485 |
| BRCAN2008701 | 530 | 435 . . . 944 | 2486 |
| BRCAN2009168 | 531 | 2594 . . . >3177 | 2487 |
| BRCAN2010547 | 532 | 405 . . . 737 | 2488 |
| BRCAN2010581 | 533 | 1674 . . . 2045 | 2489 |
| BRCAN2010665 | 534 | 193 . . . 1851 | 2490 |
| BRCAN2015402 | 535 | 1718 . . . 2158 | 2491 |
| BRCAN2015757 | 536 | 192 . . . 1175 | 2492 |
| BRCAN2018269 | 537 | 131 . . . 751 | 2493 |
| BRCAN2018667 | 538 | 217 . . . 582 | 2494 |
| BRCAN2019653 | 539 | 165 . . . 779 | 2495 |
| BRCAN2019907 | 540 | 88 . . . 516 | 2496 |
| BRCAN2019953 | 541 | 56 . . . 589 | 2497 |
| BRCAN2020234 | 542 | 595 . . . 1089 | 2498 |
| BRCAN2020331 | 543 | 58 . . . 1401 | 2499 |
| BRCAN2020412 | 544 | 989 . . . 1609 | 2500 |
| BRCAN2020467 | 545 | 269 . . . 673 | 2501 |
| BRCAN2020880 | 546 | 1036 . . . 1623 | 2502 |
| BRCAN2020972 | 547 | 651 . . . 1016 | 2503 |
| BRCAN2021325 | 548 | 163 . . . 1428 | 2504 |
| BRCAN2021452 | 549 | 1107 . . . 1502 | 2505 |
| BRCAN2021718 | 550 | 876 . . . 1691 | 2506 |
| BRCAN2022126 | 551 | 87 . . . 3116 | 2507 |
| BRCAN2025093 | 552 | 62 . . . 862 | 2508 |
| BRCAN2027593 | 553 | 749 . . . 1108 | 2509 |
| BRCAN2028702 | 554 | 135 . . . 1082 | 2510 |
| BRCOC2001355 | 555 | 67 . . . 936 | 2511 |
| BRCOC2002777 | 556 | 2206 . . . 2814 | 2512 |
| BRCOC2006164 | 557 | 325 . . . 2700 | 2513 |
| BRCOC2006639 | 558 | 188 . . . 1027 | 2514 |
| BRCOC2006942 | 559 | 116 . . . 643 | 2515 |
| BRCOC2009638 | 560 | 244 . . . 726 | 2516 |
| BRCOC2010115 | 561 | 204 . . . 569 | 2517 |
| BRCOC2012386 | 562 | 224 . . . 1543 | 2518 |
| BRHIP2006819 | 563 | 21 . . . 557 | 2519 |
| BRHIP2006921 | 564 | 80 . . . 517 | 2520 |
| BRHIP2008756 | 565 | 924 . . . 2273 | 2521 |
| BRHIP2009177 | 566 | 101 . . . 541 | 2522 |
| BRHIP2011199 | 567 | 44 . . . 694 | 2523 |
| BRHIP2013958 | 568 | 78 . . . 3164 | 2524 |
| BRHIP2015153 | 569 | 1959 . . . 2474 | 2525 |
| BRHIP2016125 | 570 | 930 . . . 1538 | 2526 |
| BRHIP2017714 | 571 | 130 . . . 438 | 2527 |
| BRHIP2020930 | 572 | 285 . . . >602 | 2528 |
| BRHIP2021929 | 573 | 253 . . . 1413 | 2529 |
| BRHIP2023735 | 574 | 865 . . . 1191 | 2530 |
| BRHIP2024941 | 575 | 110 . . . 574 | 2531 |
| BRHIP2026346 | 576 | 10 . . . 1791 | 2532 |
| BRHIP2027077 | 577 | 194 . . . 541 | 2533 |
| BRHIP2027563 | 578 | 14 . . . 1234 | 2534 |
| BRHIP2029529 | 579 | 345 . . . 1643 | 2535 |
| BRHIP2029643 | 580 | 1799 . . . 2104 | 2536 |
| BRHIP2029663 | 581 | 72 . . . 1607 | 2537 |
| BRHIP3000626 | 582 | 558 . . . 1139 | 2538 |
| BRHIP3000859 | 583 | 30 . . . 536 | 2539 |
| BRHIP3001076 | 584 | 974 . . . 2767 | 2540 |
| BRHIP3001141 | 585 | 402 . . . 893 | 2541 |
| BRHIP3001338 | 586 | 3819 . . . >4142 | 2542 |
| BRHIP3001360 | 587 | 689 . . . 2866 | 2543 |
| BRHIP3001481 | 588 | 775 . . . 2172 | 2544 |
| BRHIP3001573 | 589 | 1429 . . . 3393 | 2545 |
| BRHIP3001878 | 590 | 3977 . . . 4435 | 2546 |
| BRHIP3002000 | 591 | 44 . . . 2758 | 2547 |
| BRHIP3002114 | 592 | 2654 . . . 3442 | 2548 |
| BRHIP3002124 | 593 | 194 . . . 790 | 2549 |
| BRHIP3002141 | 594 | 1668 . . . 2993 | 2550 |
| BRHIP3002363 | 595 | 1196 . . . 1591 | 2551 |
| BRHIP3002691 | 596 | 56 . . . 757 | 2552 |
| BRHIP3002920 | 597 | 265 . . . 906 | 2553 |
| BRHIP3002931 | 598 | 2360 . . . 2896 | 2554 |
| BRHIP3003063 | 599 | 726 . . . 3443 | 2555 |
| BRHIP3003126 | 600 | 1121 . . . 2608 | 2556 |
| BRHIP3003306 | 601 | 1972 . . . 3834 | 2557 |
| BRHIP3003340 | 602 | 768 . . . 1412 | 2558 |
| BRHIP3003395 | 603 | 214 . . . 540 | 2559 |
| BRHIP3003688 | 604 | 247 . . . 636 | 2560 |
| BRHIP3003795 | 605 | 1693 . . . 2085 | 2561 |
| BRHIP3003845 | 606 | 1649 . . . 2635 | 2562 |
| BRHIP3003961 | 607 | 1163 . . . 1738 | 2563 |
| BRHIP3003984 | 608 | 987 . . . 3938 | 2564 |
| BRHIP3004215 | 609 | 1217 . . . 3940 | 2565 |
| BRHIP3004710 | 610 | 889 . . . 3069 | 2566 |
| BRHIP3004725 | 611 | 1741 . . . 4032 | 2567 |
| BRHIP3004774 | 612 | 23 . . . 412 | 2568 |
| BRHIP3004786 | 613 | 18 . . . 434 | 2569 |
| BRHIP3005037 | 614 | 671 . . . 2284 | 2570 |
| BRHIP3005142 | 615 | 1051 . . . 4995 | 2571 |
| BRHIP3005231 | 616 | 1519 . . . 3309 | 2572 |
| BRHIP3005307 | 617 | 2128 . . . 3567 | 2573 |
| BRHIP3005673 | 618 | 907 . . . 1515 | 2574 |
| BRHIP3005801 | 619 | 483 . . . 926 | 2575 |
| BRHIP3005944 | 620 | 1826 . . . 2575 | 2576 |
| BRHIP3006279 | 621 | 98 . . . 448 | 2577 |
| BRHIP3006294 | 622 | 455 . . . 3478 | 2578 |
| BRHIP3006449 | 623 | 385 . . . 2763 | 2579 |
| BRHIP3006786 | 624 | 209 . . . 1057 | 2580 |
| BRHIP3006950 | 625 | 139 . . . 546 | 2581 |
| BRHIP3007172 | 626 | 1426 . . . 1815 | 2582 |
| BRHIP3007195 | 627 | 143 . . . 3709 | 2583 |
| BRHIP3007223 | 628 | 764 . . . 4627 | 2584 |
| BRHIP3007291 | 629 | 115 . . . 837 | 2585 |
| BRHIP3007409 | 630 | 2136 . . . 4439 | 2586 |
| BRHIP3007424 | 631 | 93 . . . 1148 | 2587 |
| BRHIP3007609 | 632 | 2063 . . . 4171 | 2588 |
| BRHIP3007960 | 633 | 3709 . . . 4917 | 2589 |
| BRHIP3008082 | 634 | 254 . . . >3526 | 2590 |
| BRHIP3008320 | 635 | 75 . . . 3710 | 2591 |
| BRHIP3008714 | 636 | 2704 . . . 3252 | 2592 |
| BRHIP3009672 | 637 | 343 . . . 705 | 2593 |
| BRHIP3009753 | 638 | 188 . . . 1006 | 2594 |
| BRHIP3010289 | 639 | 303 . . . 4004 | 2595 |
| BRHIP3010916 | 640 | 602 . . . 1054 | 2596 |
| BRHIP3011082 | 641 | 2495 . . . 3835 | 2597 |
| BRHIP3011269 | 642 | 2043 . . . 3173 | 2598 |
| BRHIP3011460 | 643 | 285 . . . 2900 | 2599 |
| BRHIP3011567 | 644 | 1572 . . . 2684 | 2600 |
| BRHIP3011831 | 645 | 2815 . . . 3318 | 2601 |
| BRHIP3012185 | 646 | 409 . . . 792 | 2602 |
| BRHIP3012289 | 647 | 2691 . . . 3719 | 2603 |
| BRHIP3012357 | 648 | 1095 . . . 1799 | 2604 |
| BRHIP3012736 | 649 | 134 . . . 625 | 2605 |
| BRHIP3012997 | 650 | 243 . . . 617 | 2606 |
| BRHIP3013078 | 651 | 926 . . . 1357 | 2607 |
| BRHIP3013588 | 652 | 2846 . . . 3625 | 2608 |
| BRHIP3013698 | 653 | 271 . . . 801 | 2609 |
| BRHIP3014675 | 654 | 51 . . . 1976 | 2610 |
| BRHIP3015854 | 655 | 227 . . . 616 | 2611 |
| BRHIP3016032 | 656 | 260 . . . 1984 | 2612 |
| BRHIP3016421 | 657 | 335 . . . 3670 | 2613 |
| BRHIP3017109 | 658 | 185 . . . 637 | 2614 |
| BRHIP3017146 | 659 | 306 . . . 929 | 2615 |
| BRHIP3017256 | 660 | 3558 . . . 3971 | 2616 |
| BRHIP3017558 | 661 | 393 . . . 1853 | 2617 |
| BRHIP3017855 | 662 | 1719 . . . 4223 | 2618 |
| BRHIP3018784 | 663 | 37 . . . 345 | 2619 |
| BRHIP3019643 | 664 | 1575 . . . 2339 | 2620 |
| BRHIP3019824 | 665 | 25 . . . 4392 | 2621 |
| BRHIP3019880 | 666 | 3145 . . . >3494 | 2622 |
| BRHIP3019956 | 667 | 66 . . . 386 | 2623 |
| BRHIP3020046 | 668 | 705 . . . 1736 | 2624 |
| BRHIP3020155 | 669 | 2852 . . . 3238 | 2625 |
| BRHIP3020733 | 670 | 728 . . . 1399 | 2626 |
| BRHIP3021019 | 671 | 1266 . . . 2867 | 2627 |
| BRHIP3021499 | 672 | 1425 . . . 1760 | 2628 |
| BRHIP3021987 | 673 | 30 . . . 401 | 2629 |
| BRHIP3022656 | 674 | 403 . . . 735 | 2630 |
| BRHIP3023922 | 675 | 993 . . . 1409 | 2631 |
| BRHIP3024703 | 676 | 1929 . . . 2840 | 2632 |
| BRHIP3024820 | 677 | 653 . . . 1183 | 2633 |
| BRHIP3025795 | 678 | 2311 . . . 3708 | 2634 |
| BRHIP3025844 | 679 | 172 . . . 702 | 2635 |
| BRHIP3026231 | 680 | 50 . . . 652 | 2636 |
| BRHIP3026651 | 681 | 30 . . . 341 | 2637 |
| BRHIP3027160 | 682 | 569 . . . 1048 | 2638 |
| BRHIP3027191 | 683 | 131 . . . 3106 | 2639 |
| BRHIP3027651 | 684 | 90 . . . 2582 | 2640 |
| BRHIP3027947 | 685 | 140 . . . 550 | 2641 |
| BRHIP3028246 | 686 | 408 . . . 4205 | 2642 |
| BRHIP3028570 | 687 | 112 . . . 4293 | 2643 |
| BRHIP3028742 | 688 | 5 . . . 694 | 2644 |
| BRHIP3029409 | 689 | 134 . . . 670 | 2645 |
| BRHIP3029530 | 690 | 187 . . . 501 | 2646 |
| BRHIP3029670 | 691 | 339 . . . 812 | 2647 |
| BRHIP3029866 | 692 | 73 . . . 630 | 2648 |
| BRHIP3030230 | 693 | 159 . . . 1457 | 2649 |
| BRHIP3031733 | 694 | 53 . . . 361 | 2650 |
| BRHIP3031890 | 695 | 2921 . . . 3229 | 2651 |
| BRHIP3032148 | 696 | 1862 . . . 3133 | 2652 |
| BRHIP3032311 | 697 | 27 . . . 887 | 2653 |
| BRHIP3032374 | 698 | 2973 . . . 4667 | 2654 |
| BRHIP3033481 | 699 | 71 . . . 484 | 2655 |
| BRHIP3033557 | 700 | 22 . . . 2580 | 2656 |
| BRHIP3033734 | 701 | 718 . . . 1986 | 2657 |
| BRHIP3033806 | 702 | 1241 . . . 2221 | 2658 |
| BRHIP3035006 | 703 | 2734 . . . 3606 | 2659 |
| BRHIP3035222 | 704 | 1658 . . . 2143 | 2660 |
| BRHIP3035754 | 705 | 301 . . . 615 | 2661 |
| BRHIP3036371 | 706 | 3591 . . . 4817 | 2662 |
| BRHIP3036715 | 707 | 416 . . . 1063 | 2663 |
| BRHIP3036936 | 708 | 235 . . . 3189 | 2664 |
| BRHIP3037543 | 709 | 960 . . . 1286 | 2665 |
| BRHIP3037810 | 710 | 2158 . . . 2556 | 2666 |
| BRHIP3038030 | 711 | 1970 . . . 3091 | 2667 |
| BRHIP3038735 | 712 | 571 . . . 2007 | 2668 |
| BRHIP3039430 | 713 | 190 . . . 702 | 2669 |
| BRHIP3039509 | 714 | 1145 . . . 3061 | 2670 |
| BRHIP3039592 | 715 | 1 . . . 1914 | 2671 |
| BRHIP3040878 | 716 | 612 . . . 1046 | 2672 |
| BRHIP3041587 | 717 | 54 . . . 365 | 2673 |
| BRHIP3042817 | 718 | 117 . . . 473 | 2674 |
| BRHIP3043012 | 719 | 2292 . . . 2714 | 2675 |
| BRSSN2004303 | 720 | 193 . . . 714 | 2676 |
| BRSSN2004710 | 721 | 1102 . . . 1491 | 2677 |
| BRSSN2008464 | 722 | 774 . . . 1076 | 2678 |
| BRSSN2011843 | 723 | 61 . . . 825 | 2679 |
| BRSSN2012157 | 724 | 28 . . . 546 | 2680 |
| BRSSN2012198 | 725 | 1877 . . . 2182 | 2681 |
| BRSSN2013696 | 726 | 572 . . . 1351 | 2682 |
| BRSSN2015497 | 727 | 251 . . . 3196 | 2683 |
| BRSSN2018218 | 728 | 126 . . . 485 | 2684 |
| BRSTN2000312 | 729 | 270 . . . 1166 | 2685 |
| BRSTN2006466 | 730 | 954 . . . >1515 | 2686 |
| BRSTN2006638 | 731 | 50 . . . 1099 | 2687 |
| BRSTN2008475 | 732 | 2167 . . . 2511 | 2688 |
| BRSTN2009247 | 733 | 319 . . . 1197 | 2689 |
| BRSTN2010089 | 734 | 103 . . . 1464 | 2690 |
| BRSTN2010416 | 735 | 114 . . . 584 | 2691 |
| BRSTN2011688 | 736 | 288 . . . 719 | 2692 |
| BRSTN2011899 | 737 | 218 . . . 553 | 2693 |
| BRSTN2011961 | 738 | 415 . . . 972 | 2694 |
| BRSTN2012069 | 739 | 64 . . . 1452 | 2695 |
| BRSTN2015699 | 740 | 720 . . . 1250 | 2696 |
| BRSTN2015788 | 741 | 45 . . . 401 | 2697 |
| BRSTN2016892 | 742 | 10 . . . 351 | 2698 |
| BRSTN2016918 | 743 | 9 . . . 1304 | 2699 |
| BRSTN2016992 | 744 | 89 . . . 523 | 2700 |
| BRSTN2017104 | 745 | 237 . . . 632 | 2701 |
| BRSTN2017151 | 746 | 160 . . . 486 | 2702 |
| BRSTN2017184 | 747 | 157 . . . 660 | 2703 |
| BRSTN2018712 | 748 | 226 . . . 744 | 2704 |
| BRTHA2000969 | 749 | 199 . . . 528 | 2705 |
| BRTHA2001304 | 750 | 47 . . . 886 | 2706 |
| BRTHA2001953 | 751 | 175 . . . 537 | 2707 |
| BRTHA2002091 | 752 | 785 . . . 1684 | 2708 |
| BRTHA2003759 | 753 | 209 . . . 601 | 2709 |
| BRTHA2005448 | 754 | 310 . . . 2469 | 2710 |
| BRTHA2006720 | 755 | 278 . . . 874 | 2711 |
| BRTHA2008502 | 756 | 902 . . . 1711 | 2712 |
| BRTHA2008598 | 757 | 653 . . . 976 | 2713 |
| BRTHA2010672 | 758 | 2012 . . . 2770 | 2714 |
| BRTHA2012189 | 759 | 447 . . . 818 | 2715 |
| BRTHA2014647 | 760 | 1952 . . . 2290 | 2716 |
| BRTHA2018304 | 761 | 987 . . . 1526 | 2717 |
| BRTHA2019726 | 762 | 81 . . . 1511 | 2718 |
| BRTHA2019743 | 763 | 260 . . . 616 | 2719 |
| BRTHA2020400 | 764 | 38 . . . 562 | 2720 |
| BRTHA2020566 | 765 | 268 . . . 615 | 2721 |
| BRTHA2020642 | 766 | 235 . . . 1155 | 2722 |
| BRTHA2020695 | 767 | 83 . . . 466 | 2723 |
| BRTHA2020721 | 768 | 80 . . . 1495 | 2724 |
| BRTHA2020781 | 769 | 1138 . . . 1563 | 2725 |
| BRTHA2020910 | 770 | 1901 . . . 2815 | 2726 |
| BRTHA2021212 | 771 | 209 . . . 583 | 2727 |
| BRTHA2021440 | 772 | 216 . . . 911 | 2728 |
| BRTHA2021450 | 773 | 158 . . . 550 | 2729 |
| BRTHA2022074 | 774 | 248 . . . 556 | 2730 |
| BRTHA2022914 | 775 | 315 . . . 704 | 2731 |
| BRTHA2022968 | 776 | 621 . . . 1133 | 2732 |
| BRTHA2023402 | 777 | 69 . . . 578 | 2733 |
| BRTHA2023437 | 778 | 106 . . . 438 | 2734 |
| BRTHA2024177 | 779 | 448 . . . 813 | 2735 |
| BRTHA2024354 | 780 | 123 . . . 1502 | 2736 |
| BRTHA2024712 | 781 | 2765 . . . 3208 | 2737 |
| BRTHA2025869 | 782 | 98 . . . 1429 | 2738 |
| BRTHA2026071 | 783 | 1069 . . . 1449 | 2739 |
| BRTHA2026290 | 784 | 2508 . . . 3953 | 2740 |
| BRTHA2026311 | 785 | 339 . . . 1817 | 2741 |
| BRTHA2027227 | 786 | 7 . . . 885 | 2742 |
| BRTHA2027229 | 787 | 698 . . . 1135 | 2743 |
| BRTHA2027250 | 788 | 589 . . . 2013 | 2744 |
| BRTHA2028297 | 789 | 2669 . . . 3112 | 2745 |
| BRTHA2029969 | 790 | 238 . . . 543 | 2746 |
| BRTHA2030036 | 791 | 254 . . . 2149 | 2747 |
| BRTHA2030213 | 792 | 27 . . . 389 | 2748 |
| BRTHA2031517 | 793 | 94 . . . 426 | 2749 |
| BRTHA2031917 | 794 | 1729 . . . 2394 | 2750 |
| BRTHA2032763 | 795 | 88 . . . 453 | 2751 |
| BRTHA2033122 | 796 | 165 . . . 557 | 2752 |
| BRTHA2033155 | 797 | 198 . . . 665 | 2753 |
| BRTHA2033320 | 798 | 186 . . . 590 | 2754 |
| BRTHA2033469 | 799 | 140 . . . 514 | 2755 |
| BRTHA2033683 | 800 | 301 . . . 1146 | 2756 |
| BRTHA2034281 | 801 | 9 . . . 533 | 2757 |
| BRTHA2034576 | 802 | 148 . . . 483 | 2758 |
| BRTHA2035743 | 803 | 127 . . . 1824 | 2759 |
| BRTHA2036055 | 804 | 2274 . . . 3482 | 2760 |
| BRTHA2036295 | 805 | 514 . . . 2751 | 2761 |
| BRTHA2037247 | 806 | 2592 . . . 3308 | 2762 |
| BRTHA2038279 | 807 | 1530 . . . 2024 | 2763 |
| BRTHA2038345 | 808 | 1236 . . . 2291 | 2764 |
| BRTHA2038353 | 809 | 397 . . . 798 | 2765 |
| BRTHA3000456 | 810 | 488 . . . 1603 | 2766 |
| BRTHA3002411 | 811 | 557 . . . 1996 | 2767 |
| BRTHA3003225 | 812 | 52 . . . 1092 | 2768 |
| BRTHA3003417 | 813 | 3420 . . . 3806 | 2769 |
| BRTHA3003736 | 814 | 2707 . . . 4320 | 2770 |
| BRTHA3005988 | 815 | 220 . . . >3773 | 2771 |
| BRTHA3006593 | 816 | 4 . . . 516 | 2772 |
| BRTHA3007469 | 817 | 1400 . . . 1732 | 2773 |
| BRTHA3007662 | 818 | 2834 . . . 3355 | 2774 |
| BRTHA3009858 | 819 | 934 . . . 1293 | 2775 |
| BRTHA3010135 | 820 | 121 . . . 1947 | 2776 |
| BRTHA3010212 | 821 | 81 . . . 1829 | 2777 |
| BRTHA3010469 | 822 | 2653 . . . 3081 | 2778 |
| BRTHA3010530 | 823 | 251 . . . 1171 | 2779 |
| BRTHA3010540 | 824 | 122 . . . 574 | 2780 |
| BRTHA3010717 | 825 | 208 . . . 915 | 2781 |
| BRTHA3011187 | 826 | 126 . . . 3383 | 2782 |
| BRTHA3011194 | 827 | 309 . . . >2485 | 2783 |
| BRTHA3011229 | 828 | 205 . . . 633 | 2784 |
| BRTHA3011265 | 829 | 174 . . . 569 | 2785 |
| BRTHA3011306 | 830 | 356 . . . 769 | 2786 |
| BRTHA3011361 | 831 | 1184 . . . 2929 | 2787 |
| BRTHA3011510 | 832 | 702 . . . 1079 | 2788 |
| BRTHA3011892 | 833 | 416 . . . 784 | 2789 |
| BRTHA3011998 | 834 | 53 . . . 388 | 2790 |
| BRTHA3012265 | 835 | 381 . . . 1760 | 2791 |
| BRTHA3013860 | 836 | 60 . . . 527 | 2792 |
| BRTHA3013882 | 837 | 34 . . . 639 | 2793 |
| BRTHA3014000 | 838 | 116 . . . 3646 | 2794 |
| BRTHA3014105 | 839 | 378 . . . 752 | 2795 |
| BRTHA3014507 | 840 | 1901 . . . 2767 | 2796 |
| BRTHA3014547 | 841 | 52 . . . 4179 | 2797 |
| BRTHA3014835 | 842 | 300 . . . 743 | 2798 |
| BRTHA3014854 | 843 | 185 . . . 664 | 2799 |
| BRTHA3014920 | 844 | 336 . . . 662 | 2800 |
| BRTHA3016616 | 845 | 293 . . . 616 | 2801 |
| BRTHA3017791 | 846 | 12 . . . 1109 | 2802 |
| BRTHA3018409 | 847 | 13 . . . 2601 | 2803 |
| BRTHA3018623 | 848 | 207 . . . 701 | 2804 |
| BRTHA3019183 | 849 | 2860 . . . 3315 | 2805 |
| BRTHA3020369 | 850 | 182 . . . 574 | 2806 |
| BRTHA3020771 | 851 | 218 . . . 1810 | 2807 |
| BRTHA3021569 | 852 | 2914 . . . >3417 | 2808 |
| BRTHA3021708 | 853 | 1925 . . . 2560 | 2809 |
| BRTHA3021786 | 854 | 48 . . . 566 | 2810 |
| BRTHA3021971 | 855 | 180 . . . 2975 | 2811 |
| BRTHA3022641 | 856 | 219 . . . 590 | 2812 |
| BRTHA3023403 | 857 | 1461 . . . 3743 | 2813 |
| BRTHA3023590 | 858 | 3479 . . . 3856 | 2814 |
| BRTHA3023929 | 859 | 292 . . . 606 | 2815 |
| BRTHA3024600 | 860 | 2490 . . . 3026 | 2816 |
| BRTHA3025073 | 861 | 234 . . . 3422 | 2817 |
| BRTHA3026161 | 862 | 290 . . . 601 | 2818 |
| BRTHA3026180 | 863 | 35 . . . 475 | 2819 |
| BRTHA3026556 | 864 | 1128 . . . 1478 | 2820 |
| BRTHA3026916 | 865 | 84 . . . 2825 | 2821 |
| BRTHA3027171 | 866 | 412 . . . 864 | 2822 |
| BRTHA3027318 | 867 | 166 . . . 489 | 2823 |
| BRTHA3027638 | 868 | 1777 . . . 2181 | 2824 |
| BRTHA3027820 | 869 | 3477 . . . 3821 | 2825 |
| BRTHA3027879 | 870 | 123 . . . 701 | 2826 |
| BRTHA3027957 | 871 | 20 . . . 1756 | 2827 |
| BRTHA3028339 | 872 | 69 . . . 422 | 2828 |
| BRTHA3028505 | 873 | 60 . . . 527 | 2829 |
| CERVX2000812 | 874 | 186 . . . 686 | 2830 |
| CERVX2000968 | 875 | 652 . . . 1602 | 2831 |
| CHONS2000797 | 876 | 316 . . . 1806 | 2832 |
| CHONS2001287 | 877 | 3 . . . 836 | 2833 |
| CHONS2001797 | 878 | 621 . . . 1019 | 2834 |
| CHONS2001834 | 879 | 51 . . . 1106 | 2835 |
| CHONS2002419 | 880 | 20 . . . 1141 | 2836 |
| CHONS2002829 | 881 | 69 . . . 2270 | 2837 |
| COLON2001829 | 882 | 334 . . . 948 | 2838 |
| COLON2001866 | 883 | 268 . . . 924 | 2839 |
| COLON2004351 | 884 | 82 . . . 876 | 2840 |
| COLON2004911 | 885 | 251 . . . 919 | 2841 |
| COLON2005623 | 886 | 293 . . . 967 | 2842 |
| COLON2005735 | 887 | 390 . . . 1595 | 2843 |
| CTONG2001932 | 888 | 405 . . . 2174 | 2844 |
| CTONG2003517 | 889 | 138 . . . 1211 | 2845 |
| CTONG2006235 | 890 | 21 . . . 1673 | 2846 |
| CTONG2008989 | 891 | 172 . . . 843 | 2847 |
| CTONG2009033 | 892 | 412 . . . 720 | 2848 |
| CTONG2009570 | 893 | 1762 . . . 3051 | 2849 |
| CTONG2010330 | 894 | 418 . . . 1896 | 2850 |
| CTONG2010633 | 895 | 394 . . . 711 | 2851 |
| CTONG2011801 | 896 | 122 . . . 2419 | 2852 |
| CTONG2012123 | 897 | 728 . . . 1360 | 2853 |
| CTONG2014206 | 898 | 826 . . . 1710 | 2854 |
| CTONG2014959 | 899 | 154 . . . 1101 | 2855 |
| CTONG2020582 | 900 | 27 . . . 1754 | 2856 |
| CTONG2026987 | 901 | 384 . . . 1031 | 2857 |
| CTONG2027150 | 902 | 300 . . . 731 | 2858 |
| CTONG2027591 | 903 | 1451 . . . 2728 | 2859 |
| CTONG2027783 | 904 | 300 . . . 2561 | 2860 |
| CTONG2027959 | 905 | 65 . . . 412 | 2861 |
| CTONG3001605 | 906 | 321 . . . 896 | 2862 |
| CTONG3002518 | 907 | 1943 . . . 2269 | 2863 |
| CTONG3002588 | 908 | 107 . . . 454 | 2864 |
| CTONG3003669 | 909 | 258 . . . 2015 | 2865 |
| CTONG3008223 | 910 | 159 . . . 464 | 2866 |
| D9OST2003106 | 911 | 737 . . . >2505 | 2867 |
| D9OST2003989 | 912 | 239 . . . 658 | 2868 |
| D9OST2004417 | 913 | 54 . . . 689 | 2869 |
| DFNES2001829 | 914 | 105 . . . 758 | 2870 |
| DFNES2011221 | 915 | 196 . . . 3138 | 2871 |
| ERLTF2001452 | 916 | 836 . . . 1321 | 2872 |
| ERLTF2001835 | 917 | 300 . . . 1388 | 2873 |
| ERLTF2002178 | 918 | 127 . . . 1683 | 2874 |
| ERLTF2002369 | 919 | 160 . . . 1986 | 2875 |
| FCBBF3001018 | 920 | 133 . . . 1026 | 2876 |
| FCBBF3002188 | 921 | 300 . . . 611 | 2877 |
| FCBBF3005160 | 922 | 263 . . . 658 | 2878 |
| FCBBF3012443 | 923 | 148 . . . 1173 | 2879 |
| FCBBF3020030 | 924 | 1 . . . 1650 | 2880 |
| FCBBF3021191 | 925 | 179 . . . 1768 | 2881 |
| FCBBF3024911 | 926 | 1228 . . . >2188 | 2882 |
| FCBBF5000384 | 927 | 782 . . . 2089 | 2883 |
| FEBRA2000805 | 928 | 65 . . . 568 | 2884 |
| FEBRA2002260 | 929 | 303 . . . 734 | 2885 |
| FEBRA2012625 | 930 | 393 . . . 821 | 2886 |
| FEBRA2013069 | 931 | 353 . . . 667 | 2887 |
| FEBRA2013570 | 932 | 128 . . . 1567 | 2888 |
| FEBRA2017736 | 933 | 98 . . . 406 | 2889 |
| FEBRA2017811 | 934 | 458 . . . 1705 | 2890 |
| FEBRA2023498 | 935 | 295 . . . 708 | 2891 |
| FEBRA2026582 | 936 | 22 . . . 348 | 2892 |
| FEBRA2026977 | 937 | 1950 . . . 2378 | 2893 |
| FEBRA2028222 | 938 | 538 . . . 2613 | 2894 |
| FEBRA2028457 | 939 | 149 . . . 1960 | 2895 |
| FEHRT2001482 | 940 | 1257 . . . 1589 | 2896 |
| FEHRT2002708 | 941 | 332 . . . 1078 | 2897 |
| FEKID2001001 | 942 | 206 . . . >2002 | 2898 |
| FEKID2001201 | 943 | 41 . . . >2361 | 2899 |
| FEKID2002231 | 944 | 259 . . . 672 | 2900 |
| FEKID2002493 | 945 | 54 . . . 1043 | 2901 |
| FEKID2002637 | 946 | 50 . . . 1291 | 2902 |
| FELNG2000720 | 947 | 120 . . . 1037 | 2903 |
| FELNG2001613 | 948 | 194 . . . 907 | 2904 |
| FELNG2001706 | 949 | 306 . . . 821 | 2905 |
| FELNG2001953 | 950 | 723 . . . 1358 | 2906 |
| HCASM2007773 | 951 | 1930 . . . 2421 | 2907 |
| HCASM2008154 | 952 | 38 . . . 1852 | 2908 |
| HCHON2009766 | 953 | 264 . . . >2250 | 2909 |
| HEART2002531 | 954 | 342 . . . 695 | 2910 |
| HHDPC2008185 | 955 | 435 . . . 2105 | 2911 |
| HLUNG2012600 | 956 | 30 . . . 380 | 2912 |
| HSYRA2004550 | 957 | 35 . . . 1408 | 2913 |
| HSYRA2007338 | 958 | 91 . . . 1491 | 2914 |
| JCMLC1000159 | 959 | 1312 . . . 1782 | 2915 |
| JCMLC2000273 | 960 | 522 . . . 2198 | 2916 |
| JCMLC2002095 | 961 | 159 . . . 1178 | 2917 |
| JCMLC2002751 | 962 | 291 . . . 1475 | 2918 |
| KIDNE2004531 | 963 | 315 . . . 1430 | 2919 |
| KIDNE2010049 | 964 | 121 . . . 1710 | 2920 |
| KIDNE2014496 | 965 | 292 . . . 948 | 2921 |
| KIDNE2015987 | 966 | 125 . . . 1648 | 2922 |
| KIDNE2016464 | 967 | 725 . . . 1168 | 2923 |
| KIDNE2017153 | 968 | 415 . . . 1122 | 2924 |
| KIDNE2018268 | 969 | 925 . . . 2145 | 2925 |
| LIVER2008465 | 970 | 71 . . . 898 | 2926 |
| LYMPB1000158 | 971 | 87 . . . 3215 | 2927 |
| LYMPB2001387 | 972 | 302 . . . 622 | 2928 |
| LYMPB2002236 | 973 | 91 . . . 1584 | 2929 |
| LYMPB2002344 | 974 | 389 . . . 1801 | 2930 |
| LYMPB2002458 | 975 | 108 . . . 1433 | 2931 |
| LYMPB2002478 | 976 | 172 . . . 546 | 2932 |
| MESAN2007032 | 977 | 122 . . . 922 | 2933 |
| MESAN2009156 | 978 | 295 . . . 2175 | 2934 |
| MESAN2014624 | 979 | 957 . . . 1658 | 2935 |
| MESAN2016304 | 980 | 1045 . . . 1353 | 2936 |
| MESAN2017133 | 981 | 35 . . . 733 | 2937 |
| MESTC2000170 | 982 | 147 . . . 467 | 2938 |
| N1ESE2000698 | 983 | 129 . . . 1844 | 2939 |
| NETRP2000439 | 984 | 70 . . . 537 | 2940 |
| NETRP2000961 | 985 | 644 . . . 1870 | 2941 |
| NETRP2002082 | 986 | 132 . . . 479 | 2942 |
| NETRP2003103 | 987 | 84 . . . 566 | 2943 |
| NETRP2003268 | 988 | 8 . . . 391 | 2944 |
| NETRP2003448 | 989 | 176 . . . 859 | 2945 |
| NETRP2003539 | 990 | 67 . . . 372 | 2946 |
| NETRP2004017 | 991 | 679 . . . 1584 | 2947 |
| NETRP2004090 | 992 | 68 . . . 454 | 2948 |
| NETRP2004434 | 993 | 95 . . . 1516 | 2949 |
| NETRP2005282 | 994 | 409 . . . 789 | 2950 |
| NETRP2005849 | 995 | 254 . . . 580 | 2951 |
| NETRP2005972 | 996 | 1023 . . . 1370 | 2952 |
| NETRP2006468 | 997 | 1740 . . . >2944 | 2953 |
| NETRP2007945 | 998 | 225 . . . 554 | 2954 |
| NETRP2008488 | 999 | 646 . . . 1035 | 2955 |
| NETRP2008582 | 1000 | 108 . . . 524 | 2956 |
| NOVAR2000783 | 1001 | 387 . . . 1364 | 2957 |
| NT2NE2011107 | 1002 | 100 . . . 1353 | 2958 |
| NT2NE2016041 | 1003 | 594 . . . 1358 | 2959 |
| NT2RI2004818 | 1004 | 106 . . . >2988 | 2960 |
| NT2RI2009233 | 1005 | 307 . . . 1119 | 2961 |
| NT2RI2010795 | 1006 | 275 . . . 685 | 2962 |
| NT2RI2012542 | 1007 | 689 . . . 1072 | 2963 |
| NT2RI2015533 | 1008 | 1023 . . . 2843 | 2964 |
| NT2RI2023671 | 1009 | 1124 . . . 1486 | 2965 |
| NT2RI2028537 | 1010 | 3 . . . 734 | 2966 |
| NT2RI3001573 | 1011 | 947 . . . 2095 | 2967 |
| NT2RI3001967 | 1012 | 224 . . . 2254 | 2968 |
| NT2RI3005861 | 1013 | 135 . . . 509 | 2969 |
| NT2RI3005923 | 1014 | 363 . . . 4463 | 2970 |
| NT2RI3007095 | 1015 | 115 . . . 2856 | 2971 |
| NT2RI3008179 | 1016 | 184 . . . >3991 | 2972 |
| NT2RI3009480 | 1017 | 333 . . . 1463 | 2973 |
| NT2RI3009524 | 1018 | 85 . . . 3615 | 2974 |
| NT2RP7003439 | 1019 | 63 . . . 548 | 2975 |
| NT2RP7007387 | 1020 | 12 . . . 3557 | 2976 |
| NT2RP7014178 | 1021 | 922 . . . 1752 | 2977 |
| NT2RP7014778 | 1022 | 302 . . . 700 | 2978 |
| NT2RP7016508 | 1023 | 587 . . . 1954 | 2979 |
| NT2RP7017139 | 1024 | 50 . . . 1780 | 2980 |
| NT2RP7019682 | 1025 | 386 . . . 1180 | 2981 |
| NT2RP7020343 | 1026 | 256 . . . 741 | 2982 |
| NT2RP8000633 | 1027 | 31 . . . 348 | 2983 |
| NT2RP8001363 | 1028 | 711 . . . 2567 | 2984 |
| NT2RP8001407 | 1029 | 162 . . . 854 | 2985 |
| NT2RP8001584 | 1030 | 711 . . . 2912 | 2986 |
| NT2RP8001604 | 1031 | 223 . . . 3726 | 2987 |
| NT2RP8001605 | 1032 | 1254 . . . 1751 | 2988 |
| NT2RP8003490 | 1033 | 384 . . . 1532 | 2989 |
| NT2RP8003657 | 1034 | 325 . . . 804 | 2990 |
| NT2RP8003787 | 1035 | 118 . . . 1647 | 2991 |
| NT2RP8005546 | 1036 | 1104 . . . 3023 | 2992 |
| NT2RP8006452 | 1037 | 55 . . . 2667 | 2993 |
| NT2RP8006521 | 1038 | 2089 . . . 2691 | 2994 |
| NT2RP8007416 | 1039 | 45 . . . 410 | 2995 |
| NT2RP8007503 | 1040 | 199 . . . 564 | 2996 |
| NT2RP8007920 | 1041 | 25 . . . 3366 | 2997 |
| NT2RP8008057 | 1042 | 103 . . . 3591 | 2998 |
| NT2RP8009119 | 1043 | 591 . . . 1307 | 2999 |
| NT2RP8009248 | 1044 | 501 . . . 1025 | 3000 |
| NTONG2002278 | 1045 | 536 . . . 886 | 3001 |
| NTONG2003805 | 1046 | 1092 . . . 2708 | 3002 |
| NTONG2004829 | 1047 | 756 . . . 1412 | 3003 |
| NTONG2008483 | 1048 | 145 . . . 2553 | 3004 |
| NTONG2009468 | 1049 | 13 . . . 717 | 3005 |
| OCBBF2000831 | 1050 | 355 . . . 2085 | 3006 |
| OCBBF2003518 | 1051 | 271 . . . 2073 | 3007 |
| OCBBF2004478 | 1052 | 238 . . . 1593 | 3008 |
| OCBBF2007039 | 1053 | 139 . . . 2925 | 3009 |
| OCBBF2009536 | 1054 | 3 . . . 1481 | 3010 |
| OCBBF2014745 | 1055 | 6 . . . 1388 | 3011 |
| OCBBF2016928 | 1056 | 108 . . . 1742 | 3012 |
| OCBBF2018229 | 1057 | 223 . . . 711 | 3013 |
| OCBBF2018618 | 1058 | 922 . . . 1902 | 3014 |
| OCBBF2019761 | 1059 | 332 . . . 691 | 3015 |
| OCBBF2024589 | 1060 | 103 . . . 1821 | 3016 |
| OCBBF2024779 | 1061 | 1734 . . . 2081 | 3017 |
| OCBBF2025631 | 1062 | 53 . . . 868 | 3018 |
| OCBBF2030927 | 1063 | 158 . . . 2335 | 3019 |
| OCBBF2036019 | 1064 | 24 . . . 908 | 3020 |
| OCBBF3000743 | 1065 | 8 . . . 355 | 3021 |
| OCBBF3000830 | 1066 | 94 . . . 468 | 3022 |
| OCBBF3001076 | 1067 | 861 . . . 3401 | 3023 |
| OCBBF3001202 | 1068 | 826 . . . 2655 | 3024 |
| OCBBF3001333 | 1069 | 36 . . . 1466 | 3025 |
| OCBBF3001616 | 1070 | 1795 . . . 2349 | 3026 |
| OCBBF3003745 | 1071 | 2 . . . 412 | 3027 |
| OCBBF3004487 | 1072 | 1472 . . . 2344 | 3028 |
| OCBBF3004908 | 1073 | 134 . . . 532 | 3029 |
| OCBBF3005330 | 1074 | 1168 . . . >4215 | 3030 |
| OCBBF3005843 | 1075 | 241 . . . 750 | 3031 |
| OCBBF3006986 | 1076 | 72 . . . 4016 | 3032 |
| OCBBF3007078 | 1077 | 1883 . . . 2401 | 3033 |
| OCBBF3007704 | 1078 | 2601 . . . 2999 | 3034 |
| OCBBF3008392 | 1079 | 83 . . . 1657 | 3035 |
| OCBBF3008835 | 1080 | 58 . . . 2874 | 3036 |
| OCBBF3009244 | 1081 | 89 . . . 988 | 3037 |
| OCBBF3019269 | 1082 | 763 . . . 1359 | 3038 |
| OCBBF3020263 | 1083 | 353 . . . 1633 | 3039 |
| OCBBF3020414 | 1084 | 20 . . . 1339 | 3040 |
| OCBBF3021086 | 1085 | 137 . . . >3623 | 3041 |
| OCBBF3021166 | 1086 | 2350 . . . 2985 | 3042 |
| OCBBF3021361 | 1087 | 783 . . . >3838 | 3043 |
| OCBBF3021502 | 1088 | 1345 . . . 1851 | 3044 |
| OCBBF3021515 | 1089 | 243 . . . 641 | 3045 |
| OCBBF3022123 | 1090 | 276 . . . 677 | 3046 |
| OCBBF3022166 | 1091 | 1848 . . . 2273 | 3047 |
| OCBBF3022576 | 1092 | 1966 . . . 2424 | 3048 |
| OCBBF3022827 | 1093 | 108 . . . 2234 | 3049 |
| OCBBF3023175 | 1094 | 50 . . . 4726 | 3050 |
| OCBBF3023543 | 1095 | 122 . . . 3793 | 3051 |
| OCBBF3023913 | 1096 | 230 . . . 3364 | 3052 |
| OCBBF3023993 | 1097 | 74 . . . 379 | 3053 |
| OCBBF3025127 | 1098 | 1867 . . . 2325 | 3054 |
| OCBBF3025131 | 1099 | 585 . . . 944 | 3055 |
| OCBBF3025475 | 1100 | 37 . . . 1692 | 3056 |
| OCBBF3025503 | 1101 | 425 . . . 1837 | 3057 |
| OCBBF3025630 | 1102 | 2380 . . . 3138 | 3058 |
| OCBBF3025887 | 1103 | 264 . . . 653 | 3059 |
| OCBBF3025901 | 1104 | 273 . . . 605 | 3060 |
| OCBBF3026088 | 1105 | 3651 . . . 4004 | 3061 |
| OCBBF3026361 | 1106 | 286 . . . >3475 | 3062 |
| OCBBF3026979 | 1107 | 154 . . . 2670 | 3063 |
| OCBBF3027969 | 1108 | 623 . . . 3430 | 3064 |
| OCBBF3028001 | 1109 | 10 . . . 1581 | 3065 |
| PEBLM2001803 | 1110 | 389 . . . 1747 | 3066 |
| PEBLM2003935 | 1111 | 78 . . . 998 | 3067 |
| PEBLM2005615 | 1112 | 64 . . . 1200 | 3068 |
| PEBLM2006298 | 1113 | 208 . . . >2264 | 3069 |
| PERIC2003349 | 1114 | 340 . . . 2499 | 3070 |
| PLACE5000492 | 1115 | 653 . . . 2305 | 3071 |
| PLACE5000522 | 1116 | 245 . . . 688 | 3072 |
| PLACE5000527 | 1117 | 2193 . . . 2498 | 3073 |
| PLACE6000012 | 1118 | 111 . . . 527 | 3074 |
| PLACE6000055 | 1119 | 76 . . . >1552 | 3075 |
| PLACE6001933 | 1120 | 875 . . . 1192 | 3076 |
| PLACE6003004 | 1121 | 39 . . . 1463 | 3077 |
| PLACE6008315 | 1122 | 161 . . . 691 | 3078 |
| PLACE6010925 | 1123 | 828 . . . 2033 | 3079 |
| PLACE6010936 | 1124 | 494 . . . 1585 | 3080 |
| PLACE6016030 | 1125 | 224 . . . 679 | 3081 |
| PLACE6019542 | 1126 | 257 . . . 559 | 3082 |
| PLACE6019600 | 1127 | 307 . . . 633 | 3083 |
| PLACE6019674 | 1128 | 333 . . . 956 | 3084 |
| PLACE7000266 | 1129 | 153 . . . 3767 | 3085 |
| PLACE7000707 | 1130 | 728 . . . 1117 | 3086 |
| PLACE7001759 | 1131 | 227 . . . 1069 | 3087 |
| PLACE7002303 | 1132 | 1662 . . . 2615 | 3088 |
| PLACE7003639 | 1133 | 1309 . . . 1881 | 3089 |
| PLACE7003684 | 1134 | 16 . . . 579 | 3090 |
| PLACE7003985 | 1135 | 3721 . . . 4707 | 3091 |
| PLACE7004103 | 1136 | 284 . . . 2827 | 3092 |
| PLACE7004961 | 1137 | 173 . . . 835 | 3093 |
| PLACE7005169 | 1138 | 15 . . . >4050 | 3094 |
| PLACE7005671 | 1139 | 796 . . . 1185 | 3095 |
| PLACE7005840 | 1140 | 912 . . . 1418 | 3096 |
| PLACE7006090 | 1141 | 3573 . . . 3947 | 3097 |
| PLACE7006240 | 1142 | 383 . . . 784 | 3098 |
| PLACE7006268 | 1143 | 1746 . . . 2198 | 3099 |
| PLACE7006498 | 1144 | 330 . . . 1298 | 3100 |
| PLACE7006540 | 1145 | 204 . . . 536 | 3101 |
| PLACE7007379 | 1146 | 2794 . . . 3576 | 3102 |
| PLACE7007973 | 1147 | 227 . . . 1678 | 3103 |
| PLACE7008136 | 1148 | 277 . . . 666 | 3104 |
| PLACE7008766 | 1149 | 296 . . . 772 | 3105 |
| PLACE7009563 | 1150 | 1696 . . . 2880 | 3106 |
| PLACE7009757 | 1151 | 279 . . . 1409 | 3107 |
| PLACE7009936 | 1152 | 33 . . . 1223 | 3108 |
| PLACE7010567 | 1153 | 3473 . . . 3841 | 3109 |
| PLACE7011269 | 1154 | 70 . . . 678 | 3110 |
| PLACE7011559 | 1155 | 1965 . . . 2978 | 3111 |
| PLACE7012111 | 1156 | 283 . . . 2532 | 3112 |
| PLACE7012127 | 1157 | 2243 . . . 2848 | 3113 |
| PLACE7013060 | 1158 | 189 . . . 539 | 3114 |
| PLACE7014247 | 1159 | 3149 . . . 3544 | 3115 |
| PLACE7014396 | 1160 | 126 . . . 716 | 3116 |
| PLACE7015238 | 1161 | 82 . . . 408 | 3117 |
| PLACE7015647 | 1162 | 1172 . . . 1882 | 3118 |
| PLACE7016214 | 1163 | 1250 . . . 1696 | 3119 |
| PLACE7016321 | 1164 | 203 . . . 622 | 3120 |
| PLACE7016454 | 1165 | 761 . . . 1375 | 3121 |
| PLACE7016526 | 1166 | 15 . . . 2786 | 3122 |
| PLACE7018304 | 1167 | 148 . . . 4749 | 3123 |
| PLACE7018349 | 1168 | 93 . . . 875 | 3124 |
| PLACE7018452 | 1169 | 9 . . . 533 | 3125 |
| PLACE7018479 | 1170 | 90 . . . 3317 | 3126 |
| PLACE7018512 | 1171 | 471 . . . 3329 | 3127 |
| PROST2002078 | 1172 | 269 . . . 898 | 3128 |
| PROST2007444 | 1173 | 2286 . . . 3500 | 3129 |
| PROST2016566 | 1174 | 1009 . . . 1482 | 3130 |
| PROST2017578 | 1175 | 81 . . . 386 | 3131 |
| PROST2017729 | 1176 | 1759 . . . 2088 | 3132 |
| PROST2017749 | 1177 | 1422 . . . 1799 | 3133 |
| PROST2017910 | 1178 | 269 . . . 2098 | 3134 |
| PUAEN2000594 | 1179 | 1864 . . . 2304 | 3135 |
| PUAEN2000684 | 1180 | 180 . . . 2591 | 3136 |
| PUAEN2006639 | 1181 | 637 . . . 1746 | 3137 |
| RECTM2001519 | 1182 | 58 . . . 402 | 3138 |
| SKMUS2008585 | 1183 | 444 . . . 1319 | 3139 |
| SKMUS2009479 | 1184 | 324 . . . 647 | 3140 |
| SKMUS2009557 | 1185 | 323 . . . 661 | 3141 |
| SKNMC2003639 | 1186 | 207 . . . 671 | 3142 |
| SKNSH2007306 | 1187 | 164 . . . 1570 | 3143 |
| SMINT2003641 | 1188 | 87 . . . 578 | 3144 |
| SMINT2009292 | 1189 | 72 . . . 2024 | 3145 |
| SMINT2009895 | 1190 | 914 . . . 1420 | 3146 |
| SMINT2010753 | 1191 | 73 . . . 1950 | 3147 |
| SMINT2011406 | 1192 | 932 . . . 1501 | 3148 |
| SMINT2011509 | 1193 | 692 . . . 1495 | 3149 |
| SMINT2012040 | 1194 | 1068 . . . 1541 | 3150 |
| SMINT2012179 | 1195 | 1021 . . . 1833 | 3151 |
| SMINT2014166 | 1196 | 1300 . . . 1740 | 3152 |
| SMINT2014721 | 1197 | 202 . . . 2124 | 3153 |
| SMINT2017964 | 1198 | 328 . . . 1419 | 3154 |
| SMINT2019105 | 1199 | 179 . . . 733 | 3155 |
| SPLEN2001227 | 1200 | 278 . . . 649 | 3156 |
| SPLEN2007689 | 1201 | 263 . . . 931 | 3157 |
| SPLEN2011252 | 1202 | 750 . . . 1199 | 3158 |
| SPLEN2012571 | 1203 | 121 . . . 1770 | 3159 |
| SPLEN2017999 | 1204 | 2270 . . . 2677 | 3160 |
| SPLEN2019092 | 1205 | 505 . . . 1098 | 3161 |
| SPLEN2019480 | 1206 | 1113 . . . 1487 | 3162 |
| SPLEN2021231 | 1207 | 15 . . . 578 | 3163 |
| SPLEN2021991 | 1208 | 332 . . . 715 | 3164 |
| SPLEN2022785 | 1209 | 104 . . . 511 | 3165 |
| SPLEN2022920 | 1210 | 660 . . . 1001 | 3166 |
| SPLEN2024571 | 1211 | 1 . . . 690 | 3167 |
| SPLEN2025012 | 1212 | 18 . . . 1520 | 3168 |
| SPLEN2027852 | 1213 | 129 . . . 482 | 3169 |
| SPLEN2028417 | 1214 | 348 . . . 1814 | 3170 |
| SPLEN2028593 | 1215 | 323 . . . 655 | 3171 |
| SPLEN2031004 | 1216 | 292 . . . 876 | 3172 |
| SPLEN2032677 | 1217 | 46 . . . 1452 | 3173 |
| SPLEN2033996 | 1218 | 2306 . . . 3064 | 3174 |
| SPLEN2034551 | 1219 | 669 . . . 1649 | 3175 |
| SPLEN2034601 | 1220 | 6 . . . 317 | 3176 |
| SPLEN2034934 | 1221 | 331 . . . 891 | 3177 |
| SPLEN2035615 | 1222 | 170 . . . 475 | 3178 |
| SPLEN2036608 | 1223 | 153 . . . 1118 | 3179 |
| SPLEN2037077 | 1224 | 243 . . . 545 | 3180 |
| SPLEN2042051 | 1225 | 343 . . . 807 | 3181 |
| STOMA2003894 | 1226 | 311 . . . 862 | 3182 |
| STOMA2004663 | 1227 | 106 . . . 516 | 3183 |
| SYNOV2003326 | 1228 | 191 . . . 595 | 3184 |
| SYNOV2017179 | 1229 | 21 . . . 1568 | 3185 |
| SYNOV3000345 | 1230 | 148 . . . 1356 | 3186 |
| SYNOV4000598 | 1231 | 457 . . . 2010 | 3187 |
| SYNOV4003174 | 1232 | 273 . . . 2282 | 3188 |
| SYNOV4004210 | 1233 | 104 . . . 2215 | 3189 |
| SYNOV4009139 | 1234 | 2294 . . . 3715 | 3190 |
| SYNOV4009575 | 1235 | 262 . . . 2406 | 3191 |
| T1ESE2000609 | 1236 | 58 . . . 1422 | 3192 |
| T1ESE2000904 | 1237 | 265 . . . 2259 | 3193 |
| T1ESE2002665 | 1238 | 66 . . . 2210 | 3194 |
| TBAES2003917 | 1239 | 67 . . . 2532 | 3195 |
| TBAES2005361 | 1240 | 217 . . . 582 | 3196 |
| TBAES2007428 | 1241 | 22 . . . 1569 | 3197 |
| TBAES2007548 | 1242 | 1037 . . . 1381 | 3198 |
| TBAES2007862 | 1243 | 195 . . . 641 | 3199 |
| TESOP2002005 | 1244 | 315 . . . 665 | 3200 |
| TESOP2003308 | 1245 | 1105 . . . 1536 | 3201 |
| TESOP2004110 | 1246 | 1562 . . . 2053 | 3202 |
| TESOP2008556 | 1247 | 344 . . . 685 | 3203 |
| TESTI1000459 | 1248 | 60 . . . 2720 | 3204 |
| TESTI2001364 | 1249 | 119 . . . 850 | 3205 |
| TESTI2001915 | 1250 | 199 . . . 1440 | 3206 |
| TESTI2003768 | 1251 | 621 . . . 932 | 3207 |
| TESTI2004452 | 1252 | 252 . . . 770 | 3208 |
| TESTI2004601 | 1253 | 265 . . . 1644 | 3209 |
| TESTI2004971 | 1254 | 1095 . . . 1637 | 3210 |
| TESTI2005112 | 1255 | 958 . . . 1689 | 3211 |
| TESTI2005153 | 1256 | 49 . . . 1011 | 3212 |
| TESTI2005564 | 1257 | 149 . . . 1867 | 3213 |
| TESTI2006543 | 1258 | 653 . . . 1057 | 3214 |
| TESTI2007490 | 1259 | 506 . . . 2131 | 3215 |
| TESTI2008636 | 1260 | 136 . . . 618 | 3216 |
| TESTI2009497 | 1261 | 233 . . . 2119 | 3217 |
| TESTI2009739 | 1262 | 172 . . . >1871 | 3218 |
| TESTI2011020 | 1263 | 986 . . . 1432 | 3219 |
| TESTI2011033 | 1264 | 265 . . . 567 | 3220 |
| TESTI2018335 | 1265 | 413 . . . 1825 | 3221 |
| TESTI2018687 | 1266 | 1233 . . . 2936 | 3222 |
| TESTI2018867 | 1267 | 53 . . . 2755 | 3223 |
| TESTI2021112 | 1268 | 310 . . . 732 | 3224 |
| TESTI2021654 | 1269 | 212 . . . 1123 | 3225 |
| TESTI2022323 | 1270 | 710 . . . 1660 | 3226 |
| TESTI2023053 | 1271 | 333 . . . 647 | 3227 |
| TESTI2023903 | 1272 | 7 . . . 1899 | 3228 |
| TESTI2024267 | 1273 | 177 . . . 1673 | 3229 |
| TESTI2026024 | 1274 | 321 . . . 1124 | 3230 |
| TESTI2026284 | 1275 | 867 . . . 1322 | 3231 |
| TESTI2028613 | 1276 | 683 . . . 1114 | 3232 |
| TESTI2030519 | 1277 | 16 . . . 1683 | 3233 |
| TESTI2030901 | 1278 | 1407 . . . 1751 | 3234 |
| TESTI2033905 | 1279 | 60 . . . 2384 | 3235 |
| TESTI2034913 | 1280 | 733 . . . 1326 | 3236 |
| TESTI2035962 | 1281 | 774 . . . 1466 | 3237 |
| TESTI2036285 | 1282 | 398 . . . 958 | 3238 |
| TESTI2036822 | 1283 | 263 . . . 1474 | 3239 |
| TESTI2037085 | 1284 | 325 . . . 771 | 3240 |
| TESTI2037209 | 1285 | 266 . . . 1063 | 3241 |
| TESTI2037572 | 1286 | 285 . . . 983 | 3242 |
| TESTI2037657 | 1287 | 73 . . . >1778 | 3243 |
| TESTI2037877 | 1288 | 352 . . . 1500 | 3244 |
| TESTI2038733 | 1289 | 945 . . . 1352 | 3245 |
| TESTI2039342 | 1290 | 26 . . . 433 | 3246 |
| TESTI2039732 | 1291 | 307 . . . 999 | 3247 |
| TESTI2039738 | 1292 | 346 . . . 714 | 3248 |
| TESTI2040372 | 1293 | 322 . . . 981 | 3249 |
| TESTI2040377 | 1294 | 41 . . . 1942 | 3250 |
| TESTI2041362 | 1295 | 1041 . . . 1484 | 3251 |
| TESTI2041976 | 1296 | 849 . . . 1208 | 3252 |
| TESTI2046188 | 1297 | 42 . . . 569 | 3253 |
| TESTI2049041 | 1298 | 175 . . . 1302 | 3254 |
| TESTI2049062 | 1299 | 72 . . . 707 | 3255 |
| TESTI2051742 | 1300 | 206 . . . 1120 | 3256 |
| TESTI2052110 | 1301 | 446 . . . 1354 | 3257 |
| TESTI2052202 | 1302 | 273 . . . 602 | 3258 |
| TESTI2052670 | 1303 | 172 . . . 1959 | 3259 |
| TESTI2052799 | 1304 | 526 . . . 1260 | 3260 |
| TESTI4000370 | 1305 | 994 . . . 3684 | 3261 |
| TESTI4000534 | 1306 | 5562 . . . 5957 | 3262 |
| TESTI4000600 | 1307 | 1693 . . . 2196 | 3263 |
| TESTI4000621 | 1308 | 386 . . . >7666 | 3264 |
| TESTI4000703 | 1309 | 251 . . . 4408 | 3265 |
| TESTI4000957 | 1310 | 2650 . . . 3012 | 3266 |
| TESTI4001037 | 1311 | 1856 . . . 2248 | 3267 |
| TESTI4001348 | 1312 | 1443 . . . 3488 | 3268 |
| TESTI4001517 | 1313 | 800 . . . 1201 | 3269 |
| TESTI4001569 | 1314 | 205 . . . 3540 | 3270 |
| TESTI4001679 | 1315 | 1512 . . . 2084 | 3271 |
| TESTI4002003 | 1316 | 2189 . . . 2623 | 3272 |
| TESTI4002072 | 1317 | 246 . . . 983 | 3273 |
| TESTI4002141 | 1318 | 1400 . . . 3520 | 3274 |
| TESTI4002195 | 1319 | 599 . . . 1111 | 3275 |
| TESTI4002520 | 1320 | 484 . . . 921 | 3276 |
| TESTI4002774 | 1321 | 447 . . . 2672 | 3277 |
| TESTI4002799 | 1322 | 581 . . . 3988 | 3278 |
| TESTI4002868 | 1323 | 229 . . . 4074 | 3279 |
| TESTI4002889 | 1324 | 68 . . . 457 | 3280 |
| TESTI4003179 | 1325 | 18 . . . 335 | 3281 |
| TESTI4003279 | 1326 | 360 . . . 956 | 3282 |
| TESTI4003319 | 1327 | 187 . . . 495 | 3283 |
| TESTI4003404 | 1328 | 1290 . . . 2780 | 3284 |
| TESTI4003565 | 1329 | 283 . . . 5193 | 3285 |
| TESTI4003574 | 1330 | 312 . . . 638 | 3286 |
| TESTI4003579 | 1331 | 120 . . . 2084 | 3287 |
| TESTI4003602 | 1332 | 2867 . . . 3784 | 3288 |
| TESTI4003703 | 1333 | 68 . . . 3613 | 3289 |
| TESTI4003733 | 1334 | 2180 . . . 2773 | 3290 |
| TESTI4003796 | 1335 | 1947 . . . 2933 | 3291 |
| TESTI4003944 | 1336 | 779 . . . 4684 | 3292 |
| TESTI4004031 | 1337 | 267 . . . 3998 | 3293 |
| TESTI4004210 | 1338 | 219 . . . 599 | 3294 |
| TESTI4004539 | 1339 | 591 . . . 1664 | 3295 |
| TESTI4004653 | 1340 | 588 . . . 2351 | 3296 |
| TESTI4004695 | 1341 | 1400 . . . 4468 | 3297 |
| TESTI4004917 | 1342 | 2286 . . . 4751 | 3298 |
| TESTI4005013 | 1343 | 9 . . . 1967 | 3299 |
| TESTI4005322 | 1344 | 113 . . . 1600 | 3300 |
| TESTI4005399 | 1345 | 289 . . . 1830 | 3301 |
| TESTI4005470 | 1346 | 194 . . . 2185 | 3302 |
| TESTI4005653 | 1347 | 65 . . . >4403 | 3303 |
| TESTI4006441 | 1348 | 324 . . . 752 | 3304 |
| TESTI4006539 | 1349 | 1689 . . . 2123 | 3305 |
| TESTI4007565 | 1350 | 1253 . . . 1675 | 3306 |
| TESTI4007671 | 1351 | 70 . . . 1800 | 3307 |
| TESTI4007965 | 1352 | 801 . . . 3338 | 3308 |
| TESTI4008086 | 1353 | 24 . . . 329 | 3309 |
| TESTI4008305 | 1354 | 1977 . . . 2687 | 3310 |
| TESTI4009501 | 1355 | 53 . . . 730 | 3311 |
| TESTI4010544 | 1356 | 254 . . . 3787 | 3312 |
| TESTI4010721 | 1357 | 380 . . . 1459 | 3313 |
| TESTI4010902 | 1358 | 1372 . . . 3834 | 3314 |
| TESTI4010979 | 1359 | 69 . . . 488 | 3315 |
| TESTI4011616 | 1360 | 1096 . . . 2172 | 3316 |
| TESTI4011744 | 1361 | 270 . . . 1058 | 3317 |
| TESTI4011926 | 1362 | 2465 . . . 2962 | 3318 |
| TESTI4012258 | 1363 | 419 . . . 847 | 3319 |
| TESTI4012382 | 1364 | 34 . . . 360 | 3320 |
| TESTI4012623 | 1365 | 1027 . . . 1653 | 3321 |
| TESTI4012956 | 1366 | 185 . . . 544 | 3322 |
| TESTI4012960 | 1367 | 1588 . . . >4231 | 3323 |
| TESTI4013474 | 1368 | 69 . . . 3125 | 3324 |
| TESTI4013742 | 1369 | 47 . . . >3602 | 3325 |
| TESTI4013774 | 1370 | 1239 . . . 2138 | 3326 |
| TESTI4013960 | 1371 | 56 . . . 451 | 3327 |
| TESTI4013962 | 1372 | 1170 . . . 1946 | 3328 |
| TESTI4014262 | 1373 | 189 . . . 623 | 3329 |
| TESTI4014415 | 1374 | 424 . . . 3798 | 3330 |
| TESTI4014891 | 1375 | 318 . . . 1235 | 3331 |
| TESTI4014908 | 1376 | 1459 . . . 4134 | 3332 |
| TESTI4014932 | 1377 | 47 . . . 4318 | 3333 |
| TESTI4014977 | 1378 | 240 . . . 659 | 3334 |
| TESTI4015129 | 1379 | 2023 . . . 2352 | 3335 |
| TESTI4015339 | 1380 | 2521 . . . 2853 | 3336 |
| TESTI4016848 | 1381 | 32 . . . 679 | 3337 |
| TESTI4017229 | 1382 | 8 . . . 352 | 3338 |
| TESTI4017382 | 1383 | 2725 . . . 3801 | 3339 |
| TESTI4017647 | 1384 | 861 . . . 1187 | 3340 |
| TESTI4017854 | 1385 | 1918 . . . 2277 | 3341 |
| TESTI4018436 | 1386 | 2379 . . . 2828 | 3342 |
| TESTI4018506 | 1387 | 930 . . . 3350 | 3343 |
| TESTI4019149 | 1388 | 69 . . . 374 | 3344 |
| TESTI4020342 | 1389 | 116 . . . 1918 | 3345 |
| TESTI4020596 | 1390 | 187 . . . 2229 | 3346 |
| TESTI4020819 | 1391 | 3802 . . . 4266 | 3347 |
| TESTI4021129 | 1392 | 109 . . . 3558 | 3348 |
| TESTI4021197 | 1393 | 210 . . . 3806 | 3349 |
| TESTI4021377 | 1394 | 86 . . . 754 | 3350 |
| TESTI4021569 | 1395 | 94 . . . 1497 | 3351 |
| TESTI4021713 | 1396 | 297 . . . 1172 | 3352 |
| TESTI4021821 | 1397 | 274 . . . 606 | 3353 |
| TESTI4022158 | 1398 | 452 . . . 3289 | 3354 |
| TESTI4023096 | 1399 | 237 . . . 3125 | 3355 |
| TESTI4023172 | 1400 | 607 . . . 1740 | 3356 |
| TESTI4023654 | 1401 | 335 . . . 778 | 3357 |
| TESTI4024240 | 1402 | 2136 . . . 2660 | 3358 |
| TESTI4024245 | 1403 | 96 . . . 2003 | 3359 |
| TESTI4024294 | 1404 | 95 . . . 1024 | 3360 |
| TESTI4024494 | 1405 | 162 . . . 1736 | 3361 |
| TESTI4025062 | 1406 | 1503 . . . 2345 | 3362 |
| TESTI4025401 | 1407 | 322 . . . 633 | 3363 |
| TESTI4025908 | 1408 | 1629 . . . 2258 | 3364 |
| TESTI4026080 | 1409 | 106 . . . 3897 | 3365 |
| TESTI4026680 | 1410 | 321 . . . 1382 | 3366 |
| TESTI4027139 | 1411 | 1 . . . 537 | 3367 |
| TESTI4027170 | 1412 | 77 . . . 466 | 3368 |
| TESTI4027262 | 1413 | 144 . . . 836 | 3369 |
| TESTI4027660 | 1414 | 335 . . . 1504 | 3370 |
| TESTI4028042 | 1415 | 226 . . . >4276 | 3371 |
| TESTI4028182 | 1416 | 399 . . . 2429 | 3372 |
| TESTI4029023 | 1417 | 2005 . . . 2856 | 3373 |
| TESTI4029297 | 1418 | 262 . . . 3138 | 3374 |
| TESTI4029651 | 1419 | 79 . . . 1287 | 3375 |
| TESTI4029676 | 1420 | 271 . . . 651 | 3376 |
| TESTI4029731 | 1421 | 894 . . . 2738 | 3377 |
| TESTI4029743 | 1422 | 137 . . . 2536 | 3378 |
| TESTI4030319 | 1423 | 372 . . . 1022 | 3379 |
| TESTI4030673 | 1424 | 1273 . . . 1584 | 3380 |
| TESTI4030864 | 1425 | 5420 . . . 6574 | 3381 |
| TESTI4031066 | 1426 | 52 . . . 2520 | 3382 |
| TESTI4031173 | 1427 | 170 . . . 2068 | 3383 |
| TESTI4031818 | 1428 | 107 . . . 430 | 3384 |
| TESTI4032128 | 1429 | 354 . . . 2324 | 3385 |
| TESTI4032270 | 1430 | 376 . . . 720 | 3386 |
| TESTI4032375 | 1431 | 489 . . . 800 | 3387 |
| TESTI4032834 | 1432 | 1268 . . . >3008 | 3388 |
| TESTI4032856 | 1433 | 126 . . . 428 | 3389 |
| TESTI4032913 | 1434 | 326 . . . 2587 | 3390 |
| TESTI4033177 | 1435 | 1606 . . . 3528 | 3391 |
| TESTI4034633 | 1436 | 293 . . . 643 | 3392 |
| TESTI4034973 | 1437 | 195 . . . 572 | 3393 |
| TESTI4035770 | 1438 | 1828 . . . 2241 | 3394 |
| TESTI4035872 | 1439 | 258 . . . 599 | 3395 |
| TESTI4035898 | 1440 | 141 . . . 737 | 3396 |
| TESTI4035989 | 1441 | 590 . . . 1066 | 3397 |
| TESTI4036012 | 1442 | 2397 . . . 2801 | 3398 |
| TESTI4036048 | 1443 | 23 . . . 1696 | 3399 |
| TESTI4037228 | 1444 | 906 . . . 2576 | 3400 |
| TESTI4037949 | 1445 | 386 . . . 2248 | 3401 |
| TESTI4038047 | 1446 | 177 . . . 590 | 3402 |
| TESTI4038758 | 1447 | 279 . . . 785 | 3403 |
| TESTI4039451 | 1448 | 292 . . . 3714 | 3404 |
| TESTI4039575 | 1449 | 61 . . . 441 | 3405 |
| TESTI4039744 | 1450 | 88 . . . 1245 | 3406 |
| TESTI4039904 | 1451 | 350 . . . 1588 | 3407 |
| TESTI4040197 | 1452 | 40 . . . 624 | 3408 |
| TESTI4040559 | 1453 | 225 . . . 2219 | 3409 |
| TESTI4040598 | 1454 | 277 . . . 1899 | 3410 |
| TESTI4040804 | 1455 | 1878 . . . 2429 | 3411 |
| TESTI4041049 | 1456 | 3669 . . . 4301 | 3412 |
| TESTI4041482 | 1457 | 141 . . . 2540 | 3413 |
| TESTI4041832 | 1458 | 1266 . . . 2633 | 3414 |
| TESTI4041984 | 1459 | 339 . . . 2873 | 3415 |
| TESTI4042420 | 1460 | 315 . . . 674 | 3416 |
| TESTI4042846 | 1461 | 160 . . . 477 | 3417 |
| TESTI4043067 | 1462 | 48 . . . 4778 | 3418 |
| TESTI4043166 | 1463 | 215 . . . 3145 | 3419 |
| TESTI4043223 | 1464 | 104 . . . 553 | 3420 |
| TESTI4043371 | 1465 | 127 . . . 612 | 3421 |
| TESTI4043378 | 1466 | 286 . . . 687 | 3422 |
| TESTI4044076 | 1467 | 1421 . . . 1996 | 3423 |
| TESTI4044291 | 1468 | 98 . . . 958 | 3424 |
| TESTI4044770 | 1469 | 1000 . . . 1689 | 3425 |
| TESTI4045168 | 1470 | 363 . . . 674 | 3426 |
| TESTI4045330 | 1471 | 13 . . . 561 | 3427 |
| TESTI4045470 | 1472 | 772 . . . 1218 | 3428 |
| TESTI4046073 | 1473 | 346 . . . 1989 | 3429 |
| TESTI4046090 | 1474 | 1776 . . . 2138 | 3430 |
| TESTI4046245 | 1475 | 321 . . . 3464 | 3431 |
| TESTI4046328 | 1476 | 144 . . . 521 | 3432 |
| TESTI4046450 | 1477 | 173 . . . 544 | 3433 |
| TESTI4046873 | 1478 | 347 . . . 2647 | 3434 |
| TESTI4046962 | 1479 | 18 . . . 887 | 3435 |
| TESTI4047119 | 1480 | 309 . . . 2705 | 3436 |
| TESTI4047305 | 1481 | 2524 . . . 3351 | 3437 |
| TESTI4047328 | 1482 | 285 . . . 4811 | 3438 |
| TESTI4047437 | 1483 | 144 . . . 1694 | 3439 |
| TESTI4047569 | 1484 | 1785 . . . 2396 | 3440 |
| TESTI4047746 | 1485 | 406 . . . 744 | 3441 |
| TESTI4047808 | 1486 | 4 . . . >3552 | 3442 |
| TESTI4048232 | 1487 | 926 . . . 1276 | 3443 |
| TESTI4048296 | 1488 | 137 . . . 505 | 3444 |
| TESTI4048545 | 1489 | 951 . . . 3350 | 3445 |
| TESTI4048619 | 1490 | 2964 . . . 4142 | 3446 |
| TESTI4049110 | 1491 | 62 . . . 373 | 3447 |
| TESTI4049552 | 1492 | 307 . . . 624 | 3448 |
| TESTI4049562 | 1493 | 257 . . . 697 | 3449 |
| TESTI4049677 | 1494 | 313 . . . 1092 | 3450 |
| TESTI4049786 | 1495 | 390 . . . 3248 | 3451 |
| TESTI4049863 | 1496 | 2520 . . . 2981 | 3452 |
| TESTI4049899 | 1497 | 1599 . . . 2156 | 3453 |
| TESTI4050293 | 1498 | 2539 . . . 4578 | 3454 |
| TESTI4050954 | 1499 | 219 . . . 581 | 3455 |
| TESTI4051015 | 1500 | 335 . . . 787 | 3456 |
| TESTI4051054 | 1501 | 149 . . . 721 | 3457 |
| TESTI4051388 | 1502 | 364 . . . 1224 | 3458 |
| TESTI4051424 | 1503 | 19 . . . 3537 | 3459 |
| TESTI4051504 | 1504 | 1199 . . . 1702 | 3460 |
| TESTI4051747 | 1505 | 156 . . . 821 | 3461 |
| TESTI4051858 | 1506 | 151 . . . 612 | 3462 |
| TESTI4051865 | 1507 | 157 . . . 2943 | 3463 |
| TESTI4051952 | 1508 | 3884 . . . >4234 | 3464 |
| TESTI4052132 | 1509 | 253 . . . 861 | 3465 |
| TESTI4052217 | 1510 | 1058 . . . 1606 | 3466 |
| TESTI4052219 | 1511 | 324 . . . 2528 | 3467 |
| TESTI4052430 | 1512 | 88 . . . 1038 | 3468 |
| TESTI4052598 | 1513 | 129 . . . 827 | 3469 |
| TESTI4052775 | 1514 | 187 . . . 1566 | 3470 |
| THYMU2008207 | 1515 | 735 . . . 1469 | 3471 |
| THYMU2038199 | 1516 | 12 . . . 422 | 3472 |
| THYMU3000390 | 1517 | 3 . . . 587 | 3473 |
| THYMU3000776 | 1518 | 2139 . . . 2495 | 3474 |
| THYMU3001082 | 1519 | 563 . . . 967 | 3475 |
| THYMU3001593 | 1520 | 1895 . . . 2224 | 3476 |
| THYMU3001776 | 1521 | 603 . . . 1142 | 3477 |
| THYMU3002825 | 1522 | 2232 . . . 3350 | 3478 |
| THYMU3002887 | 1523 | 1159 . . . 2085 | 3479 |
| THYMU3003007 | 1524 | 3153 . . . 3662 | 3480 |
| THYMU3003350 | 1525 | 1815 . . . 2138 | 3481 |
| THYMU3003958 | 1526 | 1970 . . . 2416 | 3482 |
| THYMU3004628 | 1527 | 221 . . . 562 | 3483 |
| THYMU3004632 | 1528 | 303 . . . 899 | 3484 |
| THYMU3007308 | 1529 | 793 . . . 1413 | 3485 |
| THYMU3007559 | 1530 | 1215 . . . 1532 | 3486 |
| THYMU3008105 | 1531 | 1829 . . . 3454 | 3487 |
| THYMU3008935 | 1532 | 274 . . . 645 | 3488 |
| THYMU3009643 | 1533 | 583 . . . 948 | 3489 |
| THYMU3009755 | 1534 | 147 . . . 512 | 3490 |
| THYMU3011012 | 1535 | 763 . . . 1230 | 3491 |
| THYMU3011244 | 1536 | 44 . . . 352 | 3492 |
| THYMU3011360 | 1537 | 168 . . . 572 | 3493 |
| THYMU3011534 | 1538 | 318 . . . 3047 | 3494 |
| THYMU3011556 | 1539 | 65 . . . 430 | 3495 |
| THYMU3011717 | 1540 | 39 . . . 386 | 3496 |
| THYMU3012402 | 1541 | 1422 . . . 2435 | 3497 |
| THYMU3012907 | 1542 | 304 . . . 669 | 3498 |
| THYMU3012983 | 1543 | 4 . . . 1542 | 3499 |
| THYMU3013114 | 1544 | 1724 . . . 2092 | 3500 |
| THYMU3013197 | 1545 | 64 . . . 486 | 3501 |
| THYMU3013241 | 1546 | 294 . . . 1394 | 3502 |
| THYMU3013470 | 1547 | 212 . . . 736 | 3503 |
| THYMU3013785 | 1548 | 1136 . . . 2656 | 3504 |
| THYMU3013897 | 1549 | 1550 . . . 1981 | 3505 |
| THYMU3014038 | 1550 | 140 . . . 571 | 3506 |
| THYMU3014173 | 1551 | 20 . . . 448 | 3507 |
| THYMU3014372 | 1552 | 58 . . . 2484 | 3508 |
| THYMU3014620 | 1553 | 217 . . . 1077 | 3509 |
| THYMU3014701 | 1554 | 165 . . . 650 | 3510 |
| THYMU3015042 | 1555 | 731 . . . >1237 | 3511 |
| THYMU3015457 | 1556 | 492 . . . 854 | 3512 |
| THYMU3015571 | 1557 | 593 . . . 895 | 3513 |
| THYMU3015647 | 1558 | 255 . . . 1841 | 3514 |
| THYMU3016518 | 1559 | 38 . . . 1657 | 3515 |
| THYMU3016822 | 1560 | 183 . . . 611 | 3516 |
| THYMU3017761 | 1561 | 711 . . . 1121 | 3517 |
| THYMU3018151 | 1562 | 186 . . . 518 | 3518 |
| THYMU3018896 | 1563 | 49 . . . 429 | 3519 |
| THYMU3019095 | 1564 | 2331 . . . 2666 | 3520 |
| THYMU3019476 | 1565 | 115 . . . 732 | 3521 |
| THYMU3019605 | 1566 | 243 . . . 716 | 3522 |
| THYMU3019916 | 1567 | 1539 . . . 1937 | 3523 |
| THYMU3020221 | 1568 | 80 . . . 1513 | 3524 |
| THYMU3020869 | 1569 | 29 . . . 415 | 3525 |
| THYMU3020970 | 1570 | 1659 . . . 2924 | 3526 |
| THYMU3021404 | 1571 | 314 . . . 2083 | 3527 |
| THYMU3021586 | 1572 | 466 . . . 3147 | 3528 |
| THYMU3021755 | 1573 | 838 . . . 1827 | 3529 |
| THYMU3021900 | 1574 | 2284 . . . 2676 | 3530 |
| THYMU3022211 | 1575 | 36 . . . 431 | 3531 |
| THYMU3022434 | 1576 | 1094 . . . >3280 | 3532 |
| THYMU3022528 | 1577 | 165 . . . 518 | 3533 |
| THYMU3022668 | 1578 | 2098 . . . 2616 | 3534 |
| THYMU3022982 | 1579 | 282 . . . 626 | 3535 |
| THYMU3023107 | 1580 | 91 . . . 1113 | 3536 |
| THYMU3023394 | 1581 | 3 . . . 521 | 3537 |
| THYMU3023400 | 1582 | 849 . . . 2909 | 3538 |
| THYMU3023797 | 1583 | 93 . . . 443 | 3539 |
| THYMU3024164 | 1584 | 188 . . . 652 | 3540 |
| THYMU3024339 | 1585 | 1334 . . . 1924 | 3541 |
| THYMU3025118 | 1586 | 30 . . . 1625 | 3542 |
| THYMU3025313 | 1587 | 103 . . . 546 | 3543 |
| THYMU3025642 | 1588 | 120 . . . 1124 | 3544 |
| THYMU3025683 | 1589 | 125 . . . 2854 | 3545 |
| THYMU3025772 | 1590 | 91 . . . 921 | 3546 |
| THYMU3026000 | 1591 | 218 . . . 1642 | 3547 |
| THYMU3026306 | 1592 | 2902 . . . 4020 | 3548 |
| THYMU3026350 | 1593 | 162 . . . 488 | 3549 |
| THYMU3026479 | 1594 | 1530 . . . 2747 | 3550 |
| THYMU3026532 | 1595 | 83 . . . 2368 | 3551 |
| THYMU3026783 | 1596 | 3025 . . . 3552 | 3552 |
| THYMU3026869 | 1597 | 1884 . . . 2414 | 3553 |
| THYMU3027251 | 1598 | 2631 . . . 3344 | 3554 |
| THYMU3027540 | 1599 | 244 . . . 633 | 3555 |
| THYMU3027655 | 1600 | 2018 . . . 2356 | 3556 |
| THYMU3027671 | 1601 | 2909 . . . 3913 | 3557 |
| THYMU3028075 | 1602 | 339 . . . 680 | 3558 |
| THYMU3028461 | 1603 | 15 . . . 584 | 3559 |
| THYMU3028702 | 1604 | 76 . . . 4164 | 3560 |
| THYMU3029188 | 1605 | 652 . . . 1104 | 3561 |
| THYMU3029318 | 1606 | 81 . . . 509 | 3562 |
| THYMU3029421 | 1607 | 2123 . . . 3187 | 3563 |
| THYMU3029719 | 1608 | 2067 . . . 2567 | 3564 |
| THYMU3029774 | 1609 | 13 . . . 954 | 3565 |
| THYMU3029795 | 1610 | 2128 . . . 3012 | 3566 |
| THYMU3030072 | 1611 | 96 . . . 2144 | 3567 |
| THYMU3030706 | 1612 | 237 . . . 581 | 3568 |
| THYMU3030752 | 1613 | 261 . . . 1238 | 3569 |
| THYMU3031146 | 1614 | 182 . . . 688 | 3570 |
| THYMU3031402 | 1615 | 78 . . . 395 | 3571 |
| THYMU3031612 | 1616 | 836 . . . 1360 | 3572 |
| THYMU3031868 | 1617 | 6 . . . 1733 | 3573 |
| THYMU3031878 | 1618 | 43 . . . 930 | 3574 |
| THYMU3032032 | 1619 | 159 . . . 536 | 3575 |
| THYMU3032798 | 1620 | 349 . . . 2139 | 3576 |
| THYMU3032867 | 1621 | 146 . . . 565 | 3577 |
| THYMU3033626 | 1622 | 2310 . . . 2663 | 3578 |
| THYMU3033630 | 1623 | 6 . . . 428 | 3579 |
| THYMU3033649 | 1624 | 79 . . . 1047 | 3580 |
| THYMU3033754 | 1625 | 439 . . . 2073 | 3581 |
| THYMU3033759 | 1626 | 198 . . . >2907 | 3582 |
| THYMU3034099 | 1627 | 2025 . . . 2519 | 3583 |
| THYMU3034453 | 1628 | 652 . . . 1053 | 3584 |
| THYMU3034616 | 1629 | 1533 . . . 1922 | 3585 |
| THYMU3034671 | 1630 | 737 . . . 2014 | 3586 |
| THYMU3034853 | 1631 | 118 . . . 510 | 3587 |
| THYMU3034867 | 1632 | 287 . . . 619 | 3588 |
| THYMU3034983 | 1633 | 1151 . . . 1942 | 3589 |
| THYMU3036200 | 1634 | 59 . . . 3331 | 3590 |
| THYMU3036310 | 1635 | 262 . . . 702 | 3591 |
| THYMU3036934 | 1636 | 141 . . . 482 | 3592 |
| THYMU3036953 | 1637 | 77 . . . 502 | 3593 |
| THYMU3037052 | 1638 | 274 . . . 1278 | 3594 |
| THYMU3037192 | 1639 | 1952 . . . 2524 | 3595 |
| THYMU3037617 | 1640 | 1845 . . . 3041 | 3596 |
| THYMU3037772 | 1641 | 56 . . . 1489 | 3597 |
| THYMU3037827 | 1642 | 175 . . . 543 | 3598 |
| THYMU3037856 | 1643 | 1766 . . . 2281 | 3599 |
| THYMU3037867 | 1644 | 85 . . . 606 | 3600 |
| THYMU3037909 | 1645 | 115 . . . 645 | 3601 |
| THYMU3037980 | 1646 | 2802 . . . 3170 | 3602 |
| THYMU3038158 | 1647 | 286 . . . 1623 | 3603 |
| THYMU3038167 | 1648 | 2621 . . . 3073 | 3604 |
| THYMU3038214 | 1649 | 1458 . . . 2123 | 3605 |
| THYMU3038266 | 1650 | 47 . . . 358 | 3606 |
| THYMU3038347 | 1651 | 2641 . . . 3315 | 3607 |
| THYMU3038375 | 1652 | 1644 . . . >3418 | 3608 |
| THYMU3038603 | 1653 | 568 . . . 1041 | 3609 |
| THYMU3038687 | 1654 | 1496 . . . 2065 | 3610 |
| THYMU3038759 | 1655 | 2993 . . . >3473 | 3611 |
| THYMU3038879 | 1656 | 543 . . . 860 | 3612 |
| THYMU3038970 | 1657 | 253 . . . 1536 | 3613 |
| THYMU3039807 | 1658 | 107 . . . 445 | 3614 |
| THYMU3039846 | 1659 | 153 . . . 632 | 3615 |
| THYMU3040068 | 1660 | 111 . . . 683 | 3616 |
| THYMU3040126 | 1661 | 32 . . . 943 | 3617 |
| THYMU3040146 | 1662 | 249 . . . 707 | 3618 |
| THYMU3040168 | 1663 | 1088 . . . 1630 | 3619 |
| THYMU3040172 | 1664 | 187 . . . 2136 | 3620 |
| THYMU3040725 | 1665 | 33 . . . 359 | 3621 |
| THYMU3040746 | 1666 | 41 . . . 1666 | 3622 |
| THYMU3040816 | 1667 | 1824 . . . 2267 | 3623 |
| THYMU3040829 | 1668 | 85 . . . 492 | 3624 |
| THYMU3040830 | 1669 | 1770 . . . 2087 | 3625 |
| THYMU3041354 | 1670 | 108 . . . 419 | 3626 |
| THYMU3041386 | 1671 | 109 . . . 420 | 3627 |
| THYMU3041428 | 1672 | 81 . . . 2483 | 3628 |
| THYMU3041573 | 1673 | 88 . . . 951 | 3629 |
| THYMU3041603 | 1674 | 2167 . . . 2631 | 3630 |
| THYMU3041736 | 1675 | 3246 . . . 3650 | 3631 |
| THYMU3041918 | 1676 | 2664 . . . 2990 | 3632 |
| THYMU3042075 | 1677 | 93 . . . 401 | 3633 |
| THYMU3042321 | 1678 | 1382 . . . 2146 | 3634 |
| THYMU3042758 | 1679 | 201 . . . 557 | 3635 |
| THYMU3043200 | 1680 | 955 . . . 2460 | 3636 |
| THYMU3043327 | 1681 | 1405 . . . 2043 | 3637 |
| THYMU3043482 | 1682 | 944 . . . 1321 | 3638 |
| THYMU3043688 | 1683 | 48 . . . 461 | 3639 |
| THYMU3043779 | 1684 | 159 . . . 833 | 3640 |
| THYMU3043883 | 1685 | 67 . . . 417 | 3641 |
| THYMU3043993 | 1686 | 87 . . . 572 | 3642 |
| THYMU3044075 | 1687 | 55 . . . 1215 | 3643 |
| THYMU3044188 | 1688 | 670 . . . 1035 | 3644 |
| THYMU3044441 | 1689 | 1014 . . . 1415 | 3645 |
| THYMU3044445 | 1690 | 153 . . . 500 | 3646 |
| THYMU3045510 | 1691 | 1095 . . . 2255 | 3647 |
| THYMU3045673 | 1692 | 337 . . . 810 | 3648 |
| THYMU3045692 | 1693 | 105 . . . 1211 | 3649 |
| THYMU3045704 | 1694 | 1040 . . . 1627 | 3650 |
| THYMU3046140 | 1695 | 2273 . . . 2683 | 3651 |
| THYMU3046360 | 1696 | 22 . . . 1254 | 3652 |
| THYMU3047115 | 1697 | 199 . . . 2808 | 3653 |
| THYMU3047144 | 1698 | 84 . . . 701 | 3654 |
| THYMU3047156 | 1699 | 152 . . . 544 | 3655 |
| THYMU3047513 | 1700 | 1574 . . . 2215 | 3656 |
| THYMU3047542 | 1701 | 1008 . . . 1358 | 3657 |
| THYMU3047760 | 1702 | 2623 . . . 3039 | 3658 |
| THYMU3047891 | 1703 | 804 . . . 1325 | 3659 |
| TKIDN2000319 | 1704 | 13 . . . 720 | 3660 |
| TKIDN2003396 | 1705 | 442 . . . 1374 | 3661 |
| TKIDN2010602 | 1706 | 121 . . . 684 | 3662 |
| TKIDN2011051 | 1707 | 274 . . . 1995 | 3663 |
| TKIDN2011160 | 1708 | 322 . . . 1305 | 3664 |
| TLIVE2000142 | 1709 | 2934 . . . 3287 | 3665 |
| TLIVE2001616 | 1710 | 521 . . . 2425 | 3666 |
| TLIVE2007736 | 1711 | 653 . . . 1261 | 3667 |
| TLIVE2008797 | 1712 | 237 . . . 560 | 3668 |
| TLUNG2000654 | 1713 | 55 . . . 1392 | 3669 |
| TLUNG2001445 | 1714 | 80 . . . 1558 | 3670 |
| TLUNG2001600 | 1715 | 80 . . . 1507 | 3671 |
| TLUNG2001810 | 1716 | 190 . . . 567 | 3672 |
| TLUNG2002055 | 1717 | 245 . . . 676 | 3673 |
| TRACH2011057 | 1718 | 1660 . . . 2277 | 3674 |
| TRACH2013585 | 1719 | 395 . . . 1864 | 3675 |
| TRACH2019080 | 1720 | 294 . . . 599 | 3676 |
| TRACH2022113 | 1721 | 1206 . . . 1520 | 3677 |
| TRACH2024730 | 1722 | 8 . . . 2029 | 3678 |
| TRACH3002188 | 1723 | 210 . . . 584 | 3679 |
| TRACH3002293 | 1724 | 1633 . . . 2253 | 3680 |
| TRACH3002752 | 1725 | 1018 . . . 3147 | 3681 |
| TRACH3002890 | 1726 | 197 . . . 781 | 3682 |
| TRACH3003037 | 1727 | 233 . . . 3394 | 3683 |
| TRACH3003357 | 1728 | 597 . . . 2234 | 3684 |
| TRACH3003458 | 1729 | 267 . . . 2207 | 3685 |
| TRACH3003872 | 1730 | 70 . . . 543 | 3686 |
| TRACH3004113 | 1731 | 692 . . . 2758 | 3687 |
| TRACH3004288 | 1732 | 271 . . . 759 | 3688 |
| TRACH3004412 | 1733 | 1696 . . . 3171 | 3689 |
| TRACH3004424 | 1734 | 75 . . . 2810 | 3690 |
| TRACH3004596 | 1735 | 153 . . . 536 | 3691 |
| TRACH3004747 | 1736 | 16 . . . 2190 | 3692 |
| TRACH3005173 | 1737 | 796 . . . 1419 | 3693 |
| TRACH3005191 | 1738 | 2363 . . . >4128 | 3694 |
| TRACH3005274 | 1739 | 3430 . . . 4416 | 3695 |
| TRACH3005699 | 1740 | 174 . . . 4097 | 3696 |
| TRACH3006379 | 1741 | 52 . . . 810 | 3697 |
| TRACH3006397 | 1742 | 1332 . . . 1634 | 3698 |
| TRACH3006717 | 1743 | 114 . . . 1691 | 3699 |
| TRACH3006800 | 1744 | 112 . . . 5055 | 3700 |
| TRACH3007274 | 1745 | 1276 . . . 1635 | 3701 |
| TRACH3007625 | 1746 | 252 . . . 1412 | 3702 |
| TRACH3007689 | 1747 | 1626 . . . 3743 | 3703 |
| TRACH3007995 | 1748 | 2775 . . . 3248 | 3704 |
| TRACH3008042 | 1749 | 543 . . . 1694 | 3705 |
| TRACH3008508 | 1750 | 1594 . . . 2829 | 3706 |
| TRACH3008632 | 1751 | 590 . . . 919 | 3707 |
| TRACH3009008 | 1752 | 63 . . . 1808 | 3708 |
| TRACH3009061 | 1753 | 130 . . . 2496 | 3709 |
| TRACH3009701 | 1754 | 34 . . . 2739 | 3710 |
| TRACH3010079 | 1755 | 2516 . . . 3328 | 3711 |
| TRACH3010167 | 1756 | 285 . . . 1580 | 3712 |
| TRACH3010342 | 1757 | 3307 . . . 3627 | 3713 |
| TRACH3010382 | 1758 | 222 . . . 608 | 3714 |
| TRACH3011082 | 1759 | 35 . . . 613 | 3715 |
| TRACH3011184 | 1760 | 33 . . . 425 | 3716 |
| TRACH3011282 | 1761 | 100 . . . 630 | 3717 |
| TRACH3011313 | 1762 | 155 . . . 1132 | 3718 |
| TRACH3011454 | 1763 | 285 . . . 839 | 3719 |
| TRACH3011503 | 1764 | 237 . . . 1391 | 3720 |
| TRACH3011538 | 1765 | 185 . . . 1324 | 3721 |
| TRACH3012106 | 1766 | 405 . . . 2675 | 3722 |
| TRACH3012460 | 1767 | 3 . . . 605 | 3723 |
| TRACH3012659 | 1768 | 80 . . . 709 | 3724 |
| TRACH3012718 | 1769 | 2096 . . . 2527 | 3725 |
| TRACH3012864 | 1770 | 224 . . . 850 | 3726 |
| TRACH3012891 | 1771 | 236 . . . 580 | 3727 |
| TRACH3013043 | 1772 | 810 . . . 3005 | 3728 |
| TRACH3013072 | 1773 | 92 . . . 1135 | 3729 |
| TRACH3013684 | 1774 | 188 . . . 565 | 3730 |
| TRACH3013900 | 1775 | 296 . . . 673 | 3731 |
| TRACH3014063 | 1776 | 3143 . . . 3523 | 3732 |
| TRACH3014183 | 1777 | 119 . . . 4420 | 3733 |
| TRACH3014580 | 1778 | 1813 . . . 2325 | 3734 |
| TRACH3015136 | 1779 | 832 . . . 1560 | 3735 |
| TRACH3015346 | 1780 | 265 . . . 1728 | 3736 |
| TRACH3015354 | 1781 | 776 . . . 2002 | 3737 |
| TRACH3015467 | 1782 | 283 . . . 678 | 3738 |
| TRACH3015951 | 1783 | 49 . . . 1932 | 3739 |
| TRACH3016264 | 1784 | 734 . . . 1672 | 3740 |
| TRACH3016368 | 1785 | 384 . . . 806 | 3741 |
| TRACH3016455 | 1786 | 2059 . . . 2943 | 3742 |
| TRACH3016805 | 1787 | 2373 . . . 4172 | 3743 |
| TRACH3016885 | 1788 | 1228 . . . 1644 | 3744 |
| TRACH3016992 | 1789 | 20 . . . 352 | 3745 |
| TRACH3017409 | 1790 | 22 . . . 3924 | 3746 |
| TRACH3018108 | 1791 | 168 . . . 1538 | 3747 |
| TRACH3018191 | 1792 | 2795 . . . 3268 | 3748 |
| TRACH3018240 | 1793 | 5 . . . 337 | 3749 |
| TRACH3018261 | 1794 | 29 . . . 586 | 3750 |
| TRACH3018519 | 1795 | 98 . . . 406 | 3751 |
| TRACH3018524 | 1796 | 17 . . . >4237 | 3752 |
| TRACH3018606 | 1797 | 672 . . . 1229 | 3753 |
| TRACH3018783 | 1798 | 273 . . . 617 | 3754 |
| TRACH3018907 | 1799 | 81 . . . 1559 | 3755 |
| TRACH3018943 | 1800 | 113 . . . 451 | 3756 |
| TRACH3019058 | 1801 | 41 . . . 1054 | 3757 |
| TRACH3019370 | 1802 | 206 . . . 2761 | 3758 |
| TRACH3019621 | 1803 | 1553 . . . 2779 | 3759 |
| TRACH3019807 | 1804 | 3915 . . . 4550 | 3760 |
| TRACH3020137 | 1805 | 186 . . . 710 | 3761 |
| TRACH3020563 | 1806 | 2232 . . . 3158 | 3762 |
| TRACH3020605 | 1807 | 1391 . . . 3862 | 3763 |
| TRACH3020769 | 1808 | 62 . . . >3300 | 3764 |
| TRACH3020930 | 1809 | 40 . . . 1773 | 3765 |
| TRACH3021023 | 1810 | 38 . . . 1618 | 3766 |
| TRACH3021335 | 1811 | 346 . . . 2559 | 3767 |
| TRACH3021373 | 1812 | 1857 . . . 4919 | 3768 |
| TRACH3021544 | 1813 | 1471 . . . 3357 | 3769 |
| TRACH3021778 | 1814 | 989 . . . 2113 | 3770 |
| TRACH3021834 | 1815 | 204 . . . 860 | 3771 |
| TRACH3021883 | 1816 | 1935 . . . 2594 | 3772 |
| TRACH3022109 | 1817 | 14 . . . 1000 | 3773 |
| TRACH3022198 | 1818 | 422 . . . 991 | 3774 |
| TRACH3022296 | 1819 | 45 . . . 431 | 3775 |
| TRACH3022732 | 1820 | 115 . . . 426 | 3776 |
| TRACH3022758 | 1821 | 274 . . . 2112 | 3777 |
| TRACH3022960 | 1822 | 221 . . . 3502 | 3778 |
| TRACH3023063 | 1823 | 300 . . . 671 | 3779 |
| TRACH3023203 | 1824 | 37 . . . 429 | 3780 |
| TRACH3023242 | 1825 | 830 . . . 1333 | 3781 |
| TRACH3023373 | 1826 | 417 . . . >3334 | 3782 |
| TRACH3023516 | 1827 | 112 . . . 1824 | 3783 |
| TRACH3023752 | 1828 | 90 . . . 998 | 3784 |
| TRACH3023945 | 1829 | 223 . . . 564 | 3785 |
| TRACH3023960 | 1830 | 1542 . . . 3920 | 3786 |
| TRACH3024020 | 1831 | 709 . . . 1401 | 3787 |
| TRACH3024081 | 1832 | 463 . . . 1197 | 3788 |
| TRACH3024342 | 1833 | 97 . . . 726 | 3789 |
| TRACH3024423 | 1834 | 964 . . . 1926 | 3790 |
| TRACH3024428 | 1835 | 96 . . . 488 | 3791 |
| TRACH3024512 | 1836 | 97 . . . 2523 | 3792 |
| TRACH3024671 | 1837 | 903 . . . 2780 | 3793 |
| TRACH3024823 | 1838 | 1468 . . . 2226 | 3794 |
| TRACH3025316 | 1839 | 727 . . . 1662 | 3795 |
| TRACH3025346 | 1840 | 1687 . . . 2352 | 3796 |
| TRACH3025520 | 1841 | 3112 . . . 3417 | 3797 |
| TRACH3026283 | 1842 | 45 . . . 821 | 3798 |
| TRACH3026299 | 1843 | 80 . . . 1675 | 3799 |
| TRACH3026303 | 1844 | 155 . . . 1705 | 3800 |
| TRACH3026542 | 1845 | 144 . . . 545 | 3801 |
| TRACH3026650 | 1846 | 56 . . . 4174 | 3802 |
| TRACH3026676 | 1847 | 119 . . . 754 | 3803 |
| TRACH3026949 | 1848 | 410 . . . 766 | 3804 |
| TRACH3027229 | 1849 | 774 . . . 1532 | 3805 |
| TRACH3027681 | 1850 | 64 . . . 474 | 3806 |
| TRACH3027701 | 1851 | 132 . . . 1484 | 3807 |
| TRACH3028164 | 1852 | 63 . . . 467 | 3808 |
| TRACH3028180 | 1853 | 293 . . . 2080 | 3809 |
| TRACH3028441 | 1854 | 81 . . . 1685 | 3810 |
| TRACH3028597 | 1855 | 110 . . . 415 | 3811 |
| TRACH3028837 | 1856 | 1811 . . . 4627 | 3812 |
| TRACH3028855 | 1857 | 202 . . . 2187 | 3813 |
| TRACH3029139 | 1858 | 186 . . . 506 | 3814 |
| TRACH3029329 | 1859 | 108 . . . 1742 | 3815 |
| TRACH3029462 | 1860 | 262 . . . >4112 | 3816 |
| TRACH3029520 | 1861 | 839 . . . 1219 | 3817 |
| TRACH3029592 | 1862 | 2928 . . . 3299 | 3818 |
| TRACH3029670 | 1863 | 80 . . . 1696 | 3819 |
| TRACH3030176 | 1864 | 17 . . . 3145 | 3820 |
| TRACH3030855 | 1865 | 2600 . . . 3463 | 3821 |
| TRACH3031316 | 1866 | 26 . . . 463 | 3822 |
| TRACH3031660 | 1867 | 25 . . . 1242 | 3823 |
| TRACH3031678 | 1868 | 491 . . . 1723 | 3824 |
| TRACH3032044 | 1869 | 2 . . . 472 | 3825 |
| TRACH3032150 | 1870 | 29 . . . 1042 | 3826 |
| TRACH3032480 | 1871 | 97 . . . 420 | 3827 |
| TRACH3032570 | 1872 | 1515 . . . 2471 | 3828 |
| TRACH3033535 | 1873 | 7 . . . 492 | 3829 |
| TRACH3034680 | 1874 | 17 . . . 1813 | 3830 |
| TRACH3035451 | 1875 | 17 . . . >5003 | 3831 |
| TRACH3036004 | 1876 | 996 . . . 4160 | 3832 |
| TRACH3036103 | 1877 | 80 . . . 556 | 3833 |
| TRACH3036278 | 1878 | 40 . . . 492 | 3834 |
| TRACH3036750 | 1879 | 209 . . . 1915 | 3835 |
| TRACH3036792 | 1880 | 110 . . . 457 | 3836 |
| TRACH3036897 | 1881 | 2016 . . . 2777 | 3837 |
| TRACH3036932 | 1882 | 87 . . . 662 | 3838 |
| TRACH3037505 | 1883 | 81 . . . 1694 | 3839 |
| TRACH3038399 | 1884 | 509 . . . 3406 | 3840 |
| TSTOM2000235 | 1885 | 17 . . . 1378 | 3841 |
| TSTOM2001571 | 1886 | 1784 . . . 2608 | 3842 |
| TSTOM2002611 | 1887 | 72 . . . 641 | 3843 |
| TSTOM2002682 | 1888 | 97 . . . 480 | 3844 |
| TUTER1000014 | 1889 | 98 . . . 937 | 3845 |
| TUTER2001433 | 1890 | 80 . . . 1579 | 3846 |
| UTERU2000300 | 1891 | 608 . . . 1351 | 3847 |
| UTERU2014998 | 1892 | 876 . . . 1379 | 3848 |
| UTERU2016464 | 1893 | 662 . . . 1540 | 3849 |
| UTERU2016669 | 1894 | 111 . . . 758 | 3850 |
| UTERU2020226 | 1895 | 1256 . . . 1747 | 3851 |
| UTERU2022955 | 1896 | 139 . . . 543 | 3852 |
| UTERU2023941 | 1897 | 121 . . . 687 | 3853 |
| UTERU2024042 | 1898 | 192 . . . 632 | 3854 |
| UTERU2027369 | 1899 | 161 . . . 697 | 3855 |
| UTERU2028377 | 1900 | 348 . . . 773 | 3856 |
| UTERU2029660 | 1901 | 1766 . . . 2335 | 3857 |
| UTERU2035926 | 1902 | 187 . . . 552 | 3858 |
| UTERU2037423 | 1903 | 1228 . . . 2184 | 3859 |
| UTERU3000670 | 1904 | 122 . . . 5446 | 3860 |
| UTERU3001029 | 1905 | 1074 . . . 3416 | 3861 |
| UTERU3001394 | 1906 | 76 . . . 651 | 3862 |
| UTERU3001946 | 1907 | 133 . . . 2736 | 3863 |
| UTERU3004635 | 1908 | 3 . . . >5144 | 3864 |
| UTERU3005264 | 1909 | 2519 . . . 4000 | 3865 |
| UTERU3005422 | 1910 | 51 . . . 962 | 3866 |
| UTERU3006538 | 1911 | 2549 . . . 3055 | 3867 |
| UTERU3006720 | 1912 | 1643 . . . 2821 | 3868 |
| UTERU3007108 | 1913 | 343 . . . 783 | 3869 |
| UTERU3009775 | 1914 | 1679 . . . 2092 | 3870 |
| UTERU3010029 | 1915 | 1769 . . . 2287 | 3871 |
| UTERU3010409 | 1916 | 2375 . . . 2902 | 3872 |
| UTERU3010604 | 1917 | 243 . . . 761 | 3873 |
| UTERU3010892 | 1918 | 2018 . . . 2425 | 3874 |
| UTERU3010919 | 1919 | 125 . . . 1669 | 3875 |
| UTERU3011092 | 1920 | 1978 . . . 2853 | 3876 |
| UTERU3011398 | 1921 | 4299 . . . 4982 | 3877 |
| UTERU3011558 | 1922 | 1239 . . . 3335 | 3878 |
| UTERU3011579 | 1923 | 160 . . . 795 | 3879 |
| UTERU3011837 | 1924 | 836 . . . 1627 | 3880 |
| UTERU3012293 | 1925 | 638 . . . 2485 | 3881 |
| UTERU3012414 | 1926 | 469 . . . 1170 | 3882 |
| UTERU3012476 | 1927 | 66 . . . 425 | 3883 |
| UTERU3012599 | 1928 | 207 . . . 632 | 3884 |
| UTERU3012999 | 1929 | 1 . . . 501 | 3885 |
| UTERU3013167 | 1930 | 2919 . . . 3398 | 3886 |
| UTERU3013302 | 1931 | 1461 . . . 3221 | 3887 |
| UTERU3014274 | 1932 | 58 . . . 540 | 3888 |
| UTERU3014647 | 1933 | 199 . . . 558 | 3889 |
| UTERU3014906 | 1934 | 5 . . . 625 | 3890 |
| UTERU3015011 | 1935 | 1055 . . . 2266 | 3891 |
| UTERU3015299 | 1936 | 470 . . . 937 | 3892 |
| UTERU3015647 | 1937 | 771 . . . 1136 | 3893 |
| UTERU3015844 | 1938 | 1871 . . . 2188 | 3894 |
| UTERU3016070 | 1939 | 138 . . . 1613 | 3895 |
| UTERU3016273 | 1940 | 135 . . . 776 | 3896 |
| UTERU3016274 | 1941 | 226 . . . 1458 | 3897 |
| UTERU3016308 | 1942 | 220 . . . 1974 | 3898 |
| UTERU3017441 | 1943 | 616 . . . 3621 | 3899 |
| UTERU3017626 | 1944 | 2588 . . . 3340 | 3900 |
| UTERU3017995 | 1945 | 1796 . . . 2227 | 3901 |
| UTERU3018172 | 1946 | 2006 . . . 2551 | 3902 |
| UTERU3018255 | 1947 | 259 . . . 741 | 3903 |
| UTERU3019708 | 1948 | 993 . . . 2114 | 3904 |
| UTERU3020090 | 1949 | 1828 . . . 3153 | 3905 |
| UTERU3021231 | 1950 | 172 . . . 576 | 3906 |
| UTERU3021850 | 1951 | 665 . . . 1906 | 3907 |
| UTERU3022168 | 1952 | 61 . . . 3237 | 3908 |
| UTERU3022588 | 1953 | 269 . . . 1717 | 3909 |
| UTERU3022922 | 1954 | 66 . . . 368 | 3910 |
| UTERU3023141 | 1955 | 93 . . . 947 | 3911 |
| UTERU3023413 | 1956 | 164 . . . 490 | 3912 |
| ADRGL2011190 | 3913 | 56 . . . 2113 | 3952 |
| BRACE3002184 | 3914 | 199 . . . 1890 | 3953 |
| BRACE3026993 | 3915 | 143 . . . 4903 | 3954 |
| BRACE3046450 | 3916 | 361 . . . 4356 | 3955 |
| BRAMY3008096 | 3917 | 602 . . . 1396 | 3956 |
| BRAMY3016953 | 3918 | 4547 . . . 5188 | 3957 |
| BRAWH3013197 | 3919 | 233 . . . 2623 | 3958 |
| BRAWH3028645 | 3920 | 256 . . . 1938 | 3959 |
| BRAWH3046240 | 3921 | 2257 . . . 3441 | 3960 |
| BRCAN2019772 | 3922 | 5 . . . 1273 | 3961 |
| BRHIP3030064 | 3923 | 3039 . . . 3347 | 3962 |
| BRHIP3038037 | 3924 | 122 . . . 739 | 3963 |
| BRTHA3004432 | 3925 | 1988 . . . 2629 | 3964 |
| BRTHA3024233 | 3926 | 1440 . . . 2039 | 3965 |
| CTONG2002832 | 3927 | 346 . . . 2148 | 3966 |
| CTONG2003764 | 3928 | 1438 . . . 2169 | 3967 |
| PLACE7013963 | 3929 | 2326 . . . >5202 | 3968 |
| PROST2010326 | 3930 | 298 . . . 1869 | 3969 |
| TBAES2004105 | 3931 | 135 . . . >1864 | 3970 |
| TBAES2007379 | 3932 | 70 . . . 2118 | 3971 |
| TBAES2007481 | 3933 | 53 . . . 1162 | 3972 |
| TBAES2008133 | 3934 | 389 . . . 2719 | 3973 |
| TESTI2043585 | 3935 | 310 . . . 1296 | 3974 |
| TESTI2046536 | 3936 | 111 . . . 533 | 3975 |
| TESTI4002988 | 3937 | 597 . . . 2687 | 3976 |
| TESTI4005158 | 3938 | 952 . . . 2961 | 3977 |
| TESTI4005500 | 3939 | 249 . . . 2336 | 3978 |
| TESTI4052089 | 3940 | 1517 . . . 2038 | 3979 |
| THYMU3024602 | 3941 | 31 . . . 2634 | 3980 |
| THYMU3044175 | 3942 | 1101 . . . 2054 | 3981 |
| THYMU3046350 | 3943 | 282 . . . 1787 | 3982 |
| TLIVE2007192 | 3944 | 350 . . . 730 | 3983 |
| TRACH1000193 | 3945 | 998 . . . 2956 | 3984 |
| TRACH3019290 | 3946 | 152 . . . 1738 | 3985 |
| TRACH3021066 | 3947 | 2485 . . . 3792 | 3986 |
| UTERU2017492 | 3948 | 80 . . . 808 | 3987 |
| UTERU2025415 | 3949 | 47 . . . 379 | 3988 |
| UTERU2036507 | 3950 | 276 . . . 1691 | 3989 |
| UTERU3020583 | 3951 | 126 . . . 575 | 3990 |

[0053] Primers used to synthesize polynucleotides can be designed based on the nucleotide sequences of polynucleotides of the present invention, shown in SEQ ID NOs in Table 1 above. When synthesizing full-length cDNAs, an oligo dT primer can be used as the 3′-end primer. The length of the primer is usually 15-100 bp, and favorably between 15-35 bp. In the case of LA PCR, described below, a primer length of 25-35 bp provides a good result.

[0054] Methods for designing a primer that enables specific amplification based on a target nucleotide sequence are known to those skilled in the art (Current Protocols in Molecular Biology, Ausubel et al. edit, (1987) John Wiley & Sons, Section 6.1-6.4). In principle, primers based on 5′-end sequences are designed such that amplification products will include the translation start site. Accordingly, for example, when the 5′-end primer is designed based on the nucleotide sequence of the 5′ untranslated region (5′UTR), any part of the 5′-end, which ensures specificity to the cDNA of interest, can be selected as the primer.

[0055] When synthesizing a full-length cDNA, the target nucleotide sequence to be amplified can extend to several thousand bp in some cDNA. Such long nucleotides can be amplified using methods such as LA PCR (Long and Accurate PCR). The use of LA PCR is advantageous when synthesizing long DNA. In LA PCR, in which a special DNA polymerase having 3′->5′ exonuclease activity is used, misincorporated nucleotides can be removed. Accordingly, accurate synthesis of the complementary strand can be achieved even with a long nucleotide sequence. By using LA PCR, amplification of nucleotides 20 kb or longer can be achieved under desirable conditions (Takeshi Hayashi (1996) Jikken-Igaku Bessatsu, “Advanced Technologies in PCR” Youdo-sha).

[0056] Template DNAs for synthesizing the full-length cDNAs of the present invention can be obtained by using cDNA libraries prepared by various methods. The full-length cDNA clones of the present invention are clones with a high probability of completeness in length, obtained by a method comprising the steps of [1] preparing libraries containing cDNAs with a very high fullness ratio using oligo-capping, and [2] assembling 5′-end sequences and selecting those with the highest probability of completeness in length in clusters formed (there are many clones longer in the 5′-end direction).

[0057] However, the use of primers designed based on the full-length nucleotide sequences provided by the present invention enable full-length cDNAs to be easily obtained without using such a special technique.

[0058] The problem with commercially available cDNA libraries or those prepared by known methods is that mRNA contained in these libraries has a very low fullness ratio. Thus, it is difficult to screen full-length cDNA clones directly from the library using ordinary cloning methods. The present invention has revealed nucleotide sequences of novel full-length cDNA. If such a full-length nucleotide sequence is provided, it is possible to synthesize a target full-length cDNA by using enzymatic reactions such as PCR. In particular, a full-length-enriched cDNA library, synthesized by methods such as oligo-capping, is desirable to more reliably synthesize a full-length cDNA.

[0059] The present invention provides isolated polynucleotides comprising the nucleotide sequences of SEQ ID NO: 1 as shown in Table 1, or homologs thereof. As used herein, an “isolated polynucleotide” is a polynucleotide whose structure is not identical to that of any naturally occurring polynucleotide or to that of any fragment of a naturally occurring genomic polynucleotide spanning more than three separate genes. The term therefore includes, for example, (a) a DNA which comprises the sequence of part of a naturally occurring genomic DNA molecule in the genome of the organism in which it naturally occurs; (b) a polynucleotide incorporated into a vector or into the genomic DNA of a prokaryote or eukaryote such that the resulting molecule is not identical to any naturally occurring vector or genomic DNA; (c) a separate molecule such as a cDNA, a genomic fragment, a fragment produced by polymerase chain reaction (PCR), or a restriction fragment; and (d) a recombinant nucleotide sequence that is part of a hybrid gene, i.e., a gene encoding a fusion polypeptide. Specifically excluded from this definition are polynucleotides of DNA molecules present in mixtures of different (i) DNA molecules, (ii) transfected cells, or (iii) cell clones; e.g., as these occur in DNA libraries such as cDNA or genomic DNA libraries.

[0060] The 5′-end sequence of the full-length cDNA clones of this invention can be used to isolate the regulatory elements of transcription, including the promoter on the genome. A rough draft of the human genome (an analysis of the human genomic sequence with lower accuracy), which covers 90% of the genome, has been reported (Nature, Vol. 409, 814-823, 2001), and by the year 2003, analysis of the entire human genomic sequence will be finished. However, using software to analyze transcription start sites on the human genome, in which long introns exist, is difficult. In contrast, it is easy to specify transcription start sites in the genomic sequence using nucleotide sequences which include the 5′-end of the full-length cDNA clones of the present invention, and thus it is easy to obtain genomic regions involved in transcription regulation, which include promoters contained upstream of the transcription start site.

[0061] The polypeptides encoded by the full-length cDNAs of the invention can be prepared as recombinant polypeptides or as natural polypeptides. For example, a recombinant polypeptide can be prepared by inserting a polynucleotide encoding a polypeptide of the present invention into a vector, introducing the vector into an appropriate host cell, and purifying the polypeptide expressed within that transformed host cell, as described below. In contrast, a natural polypeptide can be prepared, for example, by utilizing an affinity column to which is attached an antibody against a polypeptide of the present invention (Current Protocols in Molecular Biology (1987) Ausubel et al. edit, John Wiley & Sons, Section 16.1-16.19). The antibody used for affinity purification may be either a polyclonal antibody, or a monoclonal antibody. Alternatively, in vitro translation (see, for example, “On the fidelity of mRNA translation in the nuclease-treated rabbit reticulocyte lysate system.” Dasso M. C., and Jackson R. J. (1989) Nucleic Acids Res. 17: 3129-3144) may be used for preparing a polypeptide of the invention.

[0062] The present invention provides substantially pure proteins encoded by the full-length cDNAs of the present invention. The term “substantially pure” herein used in reference to a given protein or polypeptide means that the protein or polypeptide is substantially free from other biological macromolecules. For example, the substantially pure protein or polypeptide is at least 75%, 80%, 85%, 95%, or 99% pure by dry weight. Purity can be measured by any appropriate standard method known in the art, for example, by column chromatography, polyacrylamide gel electrophoresis, or HPLC analysis.

[0063] Polypeptides functionally equivalent to the polypeptides of the present invention can be prepared based on the activities of the polypeptides of the present invention, clarified in the above-mentioned manner. Whether or not a particular polypeptide is functionally equivalent to a polypeptide of the present invention can be verified by using the biological activity of the polypeptide of the present invention as an index to examine whether that polypeptide has the said activity.

[0064] Polypeptides functionally equivalent to polypeptides of the present invention can be prepared by those skilled in the art, for example, by using a method for introducing mutations into a polypeptide amino acid sequence (for example, site-directed mutagenesis (Current Protocols in Molecular Biology, edit, Ausubel et al., (1987) John Wiley & Sons, Section 8.1-8.5). Such polypeptides can also be generated by spontaneous mutations. The present invention also includes polypeptides comprising the amino acid sequences shown in Table 1 in which one or more amino acids are substituted, deleted, inserted, and/or added, as long as the polypeptides have a function equivalent to that of a polypeptide identified in the Examples of the present invention, described later.

[0065] There are no limitations as to the number and site of amino acid mutation, as long as polypeptide function is maintained. The number of mutations typically corresponds to 30% or less, or 20% or less, or 10% or less, preferably 5% or less or 3% or less of the total amino acids, more preferably 2% or less or 1% or less of the total amino acids. Alternatively, herein, substitution of one or more amino acids includes substitution of several amino acids. As used herein, the term “several amino acids” means, for example, five amino acids, preferably four or three amino acids, more preferably two amino acids, and further preferably one amino acid.

[0066] Herein “conservative amino acid substitution” refers to substitution of an amino acid residue belonging to a group comprising a chemically similar side chain, with another amino acid in the same group. Groups of amino acid residues having similar side chains have been defined in the art. These groups include amino acids with basic side chains (e.g., lysine, arginine, histidine), acidic side chains (e.g., aspartic acid, glutamic acid), uncharged polar side chains (e.g., glycine, asparagine, glutamine, serine, threonine, tyrosine, cysteine), nonpolar side chains (e.g., alanine, valine, leucine, isoleucine, proline, phenylalanine, methionine, tryptophan), beta-branched side chains (e.g., threonine, valine, isoleucine) and aromatic side chains (e.g., tyrosine, phenylalanine, tryptophan, histidine).

[0067] In addition, polypeptides functionally equivalent to the polypeptides of the present invention can be isolated by using techniques of hybridization or gene amplification known to those skilled in the art. Specifically, using hybridization (Current Protocols in Molecular Biology, edit, Ausubel et al., (1987) John Wiley & Sons, Section 6.3-6.4)), those skilled in the art can usually isolate a polynucleotide highly homologous to a polynucleotide encoding the polypeptide identified in the present Example, based on the identified nucleotide sequence (Table 1) or a portion thereof, and obtain a functionally equivalent polypeptide from the isolated polynucleotide. The present invention includes polypeptides encoded by polynucleotides which hybridize with the polynucleotides encoding the polypeptides identified in the present Example, as long as the polypeptides are functionally equivalent to those identified in the present Example. Organisms from which the functionally equivalent polypeptides are isolated include but are not limited to vertebrates such as humans, mice, rats, rabbits, pigs and cows.

[0068] Washing conditions for hybridization for polynucleotide isolation encoding functionally equivalent polypeptides are usually “1×SSC, 0.1% SDS, 37° C.”; more stringent conditions are “0.5×SSC, 0.1% SDS, 42° C.”; and still more stringent conditions are “0.1×SSC, 0.1% SDS, 65° C.”. Alternatively, the following conditions can be given as hybridization conditions of the present invention. Namely, conditions in which hybridization is performed at “6×SSC, 40% Formamide, 25° C.”, and washing at “1×SSC, 55° C.” can be given. More preferable conditions are those in which hybridization is performed at “6×SSC, 40% Formamide, 37° C.”, and washing at “0.2×SSC, 55° C.”. Even more preferable are those in which hybridization is performed at “6×SSC, 50% Formamide, 37° C.”, and washing at “0.1×SSC, 62° C.”. The more stringent the hybridization conditions, the more frequently polynucleotides highly homologous to the probe sequence are isolated. Therefore, it is preferable to conduct hybridization under stringent conditions. Examples of stringent conditions in the present invention are, washing conditions of “0.5×SSC, 0.1% SDS, 42° C.”, or alternatively, hybridization conditions of “6×SSC, 40% Formamide, 37° C.”, and washing at “0.2×SSC, 55° C.”.

[0069] One skilled in the art can suitably select various conditions, such as SSC dilution ratio, formamide concentration, and temperature, to accomplish a similar stringency.

[0070] The above-mentioned combinations of SSC, SDS, and temperature conditions are indicated just as examples. Those skilled in the art can select hybridization conditions with similar stringency to those mentioned above by properly combining the above-mentioned or other factors that determine hybridization stringency (for example, probe concentration, probe length, and duration of hybridization reaction).

[0071] The amino acid sequences of polypeptides isolated by using hybridization techniques usually have high identity to those of the polypeptides of the present invention, shown in Table 1. The present invention encompasses polynucleotides comprising a nucleotide sequence with high identity to the nucleotide sequence of claim 1 (a). Furthermore, the present invention encompasses peptides, or polypeptides comprising an amino acid sequence with high identity to the amino acid sequence encoded by the polynucleotide of claim 1 (b). The term “high identity” indicates sequence identity of at least 40% or more; preferably 60% or more; and more preferably 70% or more. Even more preferable is identity of 90% or more, 93% or more, or 95% or more. Further more preferable is 97% or more, or 99% or more. Identity can be determined using the BLAST search algorithm.

[0072] As used herein, “percent identity” of amino acid sequences or nucleic acids is determined using the BLAST algorithm of Karlin and Altschul (Proc. Natl. Acad. Sci. USA 90:5873-5877, 1993). Such an algorithm is incorporated into the BLASTN and BLASTX programs of Altschul et al. (J. Mol. Biol. 215:403-410, 1990). BLAST nucleotide searches are performed with the BLASTN program, using for example, score=100, wordlength=12. BLAST protein searches are performed with the BLASTX program, using for example, score=50, wordlength=3. When utilizing the BLAST and Gapped BLAST programs, the default parameters of each program are used. See http://www.ncbi.nlm.nih.gov.

[0073] Using the gene amplification technique (PCR) (Current Protocols in Molecular Biology, edit, Ausubel et al., (1987) John Wiley & Sons, Section 6.1-6.4)) and primers designed based on the nucleotide sequences (Table 1) or portions thereof as identified in the present Example, it is possible to isolate polynucleotide fragments highly homologous to the polynucleotide sequences or portions thereof, and to obtain polypeptides functionally equivalent to a particular polypeptide identified in the present Example, based on the isolated polynucleotide fragment.

[0074] The present invention also provides polynucleotides containing at least 15 nucleotides complementary to a polynucleotide comprising a nucleotide sequence of SEQ ID NOs shown in Table 1, or the complementary strand thereof. Herein, the term “complementary strand” is defined as the other strand to one strand of a double stranded DNA composed of A:T and G:C base pairs. In addition, “complementary” is not only defined as sequences completely matching a continuous region of at least 15 nucleotides, but is also defined to include sequences comprising identity of at least 70%, favorably 80% or higher, more favorably 90% or higher, and most favorably 95% or higher within that region. Identity may be determined using the algorithm described herein.

[0075] Such polynucleotides includes probes and primers used for the detection and amplification of polynucleotides encoding the inventive polypeptides. When used as a primer, such a polynucleotide usually comprises 15 to 100 bp, and preferably of 15 to 35 bp. When used as a probe, such a polynucleotide comprises the whole or a part of the sequence of a polynucleotide of the present invention, and comprises at least 15 bp. When used as a primer, such a polynucleotide is complementary at the 3′-end, and restriction enzyme recognition sequences or tags can be added to the 5′-end.

[0076] Furthermore, polynucleotides of the present invention include antisense polynucleotides for suppressing the expression of a polypeptide of the present invention, which comprises an amino acid sequence of SEQ ID NOs shown in Table 1. To exert an antisense effect, an antisense polynucleotide has at least 15 bp or more, for example 50 bp or more, preferably 100 bp or more, and more preferably 500 bp or more, and usually has 3000 bp or less, and preferably 2000 bp or less. Antisense polynucleotides can be used in gene therapy of diseases caused by abnormalities of the polypeptides of the invention (abnormal function or abnormal expression). An antisense polynucleotide can be prepared, for example, using the phosphorothioate method (“Physicochemical properties of phosphorothioate oligodeoxynucleotides.” Stein (1988) Nucleic Acids Res. 16: 3209-3221) based on the sequence information of polynucleotides encoding a polypeptide of this invention (for example, the nucleotide sequences of SEQ ID NOs: 1 to 1956 and SEQ ID NOs: 3913 to 3951).

[0077] The present invention also includes polynucleotides that can use ribozyme or RNA interference (RNAi) activity to downregulate expression of a polynucleotide of the present invention, where such a polynucleotide can be designed based on the nucleotide sequence of the polynucleotide of the present invention.

[0078] A ribozyme is a polynucleotide that comprises 1) an antisense sequence of a polynucleotide of the present invention, and 2) the nucleotide sequence of a catalytic unit required for catalytic action. The antisense sequence constituting the ribozyme can be appropriately selected to be compatible with the structure of the ribozyme's catalytic unit. The ribozome's catalytic unit is well known in the art. For example, the hammer-head ribozyme (Rossi et al. (1991) Pharmac. Ther. 50: 245-254) and hairpin ribozyme (Hampel et al. (1990) Nucl. Acids Res. 18: 299-304, and U.S. Pat. No. 5,254,678) are known to have nucleotide sequence-specific cleaving activity. These ribozymes use this catalytic activity to cleave, at a specific position, polynucleotides which hybridize to the antisense sequence.

[0079] For example, the autolytic domain of a hammer-head ribozyme cleaves on the 3′ side of C15 in the sequence G13U14C15. Base pairing between U14 and A9 plays an important role in this activity, and A15 or U15 can be cleaved instead of C15 (Koizumi M, et al: FEBS Lett 228: 228, 1988). A restriction enzyme-like RNA-cleaving ribozyme that recognizes the target RNA sequences UC, UU, or UA can be produced by designing the ribozyme such that the substrate binding site complements the RNA sequence near the target site (Koizumi, M. et al., FEBS Lett, 239:285, 1988; Koizumi, M. and Otsuka, E., Protein, Nucleic acid, and Enzyme, 35:2191, 1990; Koizumi, M. et al., Nucl Acids Res, 17:7059, 1989). For example, the polynucleotides of the present invention (SEQ ID NOs: 1-1956 and SEQ ID NOs: 3913-3951) contain a number of potential target sites. The polynucleotides of the present invention can be cleaved at desired positions with a ribozyme which contains an appropriately selected antisense sequence.

[0080] The ribozyme preferably comprises RNA and may be synthesized chemically or produced by enzymatic reaction. Methods of chemical synthesizing RNA are known in the art. Alternatively, the ribozyme can be produced by using RNA polymerase to transcribe a polynucleotide encoding the ribozyme. To produce a ribozyme by transcription, a polynucleotide encoding the ribozyme is arranged downstream of a promotor recognized by an RNA polymerase. Such RNA polymerases include T7 RNA polymerase and SP6 RNA polymerase. Alternatively, a ribozyme can be expressed in a host cell by inserting a polynucleotide encoding the ribozyme into an appropriate vector, and then introducing the vector into a host cell. The vector contains a promotor that can direct the expression of the gene in the host cell.

[0081] The present invention also provides siRNA (small interfering RNA) that downregulates the expression of a polynucleotide of the present invention. siRNA is a technique for controlling gene expression that inhibits protein synthesis from an mRNA by using a double-stranded RNA which comprises the same nucleotide sequence as that mRNA (Fire et al. (1998) Nature 391: 806-811). The effect of downregulating gene expression using double-stranded RNA is called “the RNAi effect”. siRNA has been reported to effectively control gene expression in mice (Zamore et al. (2000) Cell 101:25-33; Gura (2000) Nature 404: 804-808). Thus the introduction of such a double-stranded RNA into cells can result in selective downregulation of target gene expression.

[0082] There is no limitation as to the length of the siRNAs. The double-stranded RNAs introduced into cells are enzymatically digested inside these cells, starting from their original 3′ end and forming fragments of 21 bp to 23 bp. The enzyme that digests the double-stranded RNA is called ‘dicer’. The resulting double-stranded RNA fragments recognize and bind to target nucleotide sequences which comprise the same sequence. The nucleotide sequence is then cleaved by the activity of RNase III-like nuclease (Hammond et al. (2000) Nature, 404: 293-298; Zamore et al. (2000) Cell 101: 25-33).

[0083] siRNA is introduced into cells to downregulate gene expression using RNAi activity. siRNA can be introduced into cells using the same methods as for ribozymes. Specifically, chemically-synthesized, double-stranded RNA can be introduced into cells. When synthesized RNA, including antisense RNA and siRNA, is intended for introduction into cells, it can be pre-modified to prevent degradation by nuclease. For example, thiolated RNA is protected from nuclease degradation.

[0084] Alternatively, siRNA can be expressed in cells. For example, siRNA can be expressed in cells by inserting a sense sequence and its corresponding antisense sequence into a vector, and then transforming cells with that vector. When the two strands are adjacent, the expressed double-stranded RNA will have a hairpin-loop structure. When the two strands are expressed under the control of different promoters, the resulting double-stranded RNA will comprise two separate strands. Promotors generally used for the expression of siRNA include the U6 promotor.

[0085] The nucleotide sequence of an antisense polynucleotide, ribozyme, or siRNA of the present invention may be completely identical or complementary to any one of the nucleotide sequences of SEQ ID NOs: 1-1956 and SEQ ID NOs: 3913-3951, or may have high homology to these nucleotide sequences. The phrase “high homology” to an antisense polynucleotide, ribozyme, or siRNA nucleotide sequence typically means 90% or higher homology, preferably 95% or higher homology, more preferably 98% or higher homology, and still more preferably 99% or higher homology. The homology of a nucleotide sequence can be estimated, for example, by a method described herein.

[0086] One skilled in the art can design siRNA based on the nucleotide sequence of a gene whose expression is to be downregulated. The typical methods for designing siRNA include, for example, those described below. To begin with, it is advantageous to avoid using as target sequences: 1) 5′- or 3′-untranslated regions, and 2) regions adjacent to the start codon.

[0087] These regions often serve as binding regions for transcriptional regulatory proteins. In addition, these regions may also contain nucleotide sequences conserved among various mRNAs, and thus they may act to inhibit the expression of genes other than the gene of interest.

[0088] Thus, it may be advantageous to arrange the target sequence, for example, within the ORF downstream of the start codon. It is preferable to adjust the number of nucleotides between the start codon and the target sequence, for example, to 50 nucleotides or more. Typically, the nucleotide sequence of an siRNA is designed so that it starts from an aa sequence and comprises 19-21 consecutive nucleotides. A dinucleotide overhang is added to one end of siRNA. The nucleotide sequence of such an overhang may include doublets, dTdT or UU sequences. The GC content of a nucleotide sequence constituting siRNA is preferably about 50%. G and C nucleotide residues are preferably uniformly distributed throughout the siRNA.

[0089] The action of siRNA is based on sequence-specific mRNA hybridization. Thus, to achieve downregulation specific to a particular gene, it is essential to make the target nucleotide sequence as specific as possible to that gene. It is thus preferable to use homology searches to confirm that the proposed target nucleotide sequence exhibits negligible homology with other genes. Nucleotide sequence homology can be determined using established algorithms.

[0090] As long as an siRNA of the present invention down-regulates the expression of a polynucleotide of the present invention, it is not limited to nucleotide sequences obtained using the typical design method described above. For example, even if the target sequence is not specific to the nucleotide sequence of a particular gene, it can specifically downregulate the expression of a gene of interest in cells which do not express genes comprising homologous nucleotide sequences. Furthermore, double-stranded RNA having RNAi activity can be obtained without using the above-described methods typically used to select a target sequence.

[0091] The polynucleotides or antisense polynucleotides, ribozymes, and siRNAs of the present invention can be used in, for example, gene therapy. Preferable target diseases may be, for example, cancers or various inflammatory diseases. Such molecules can be used for gene therapy, for example, by administrating them to patients in vivo or ex vivo using viral vectors such as retroviral vectors, adenoviral vectors, and adeno-related viral vectors, or non-viral vectors such as liposomes.

[0092] The present invention also includes partial peptides of the polypeptides of the invention. Such a partial peptide comprises a polypeptide generated as a result of removing a signal peptide from a secretory protein. If a polypeptide of the present invention has activity as a receptor or ligand, the partial peptide may function as a competitive inhibitor of the polypeptide, and may bind to the receptor (or ligand). In addition, the present invention includes an antigen peptide for raising antibodies. For the peptides to be specific to a polypeptide of the present invention, the peptides comprise at least seven amino acids, preferably eight amino acids or more, more preferably nine amino acids or more, and even more preferably ten amino acids or more. The peptide can be used to prepare an antibody against or competitive inhibitor of a polypeptide of the present invention, and can also be used to screen for a receptor that binds to the polypeptide of this invention. The partial peptides of this invention can be produced, for example, by genetic engineering methods, known methods for synthesizing peptides, or by digesting a polypeptide of the invention with an appropriate peptidase.

[0093] The present invention also relates to a vector into which a polynucleotide of the invention is inserted. Vectors of the present invention are not limited as long as they can contain the inserted polynucleotide stably. For example, if E. coli is used as a host, vectors such as pBluescript vector (Stratagene) are preferred cloning vectors. To produce a polypeptide of the invention, expression vectors are especially useful. Any expression vector can be used as long as it is capable of expressing the polypeptide in vitro, in E. coli, in cultured cells, or in vivo. For example, pBEST vector (Promega) is preferable for in vitro expression, pET vector (Invitrogen) for E. coli, pME18S-FL3 vector (GenBank Accession No. AB009864) for cultured cells, and pME18S vector (Mol. Cell. Biol. (1988) 8: 466-472) for in vivo expression. To insert a polynucleotide of the present invention, ligation utilizing restriction sites can be performed according to standard methods (Current Protocols in Molecular Biology (1987) Ausubel et al. edit, John Wiley & Sons, Section 11.4-11.11).

[0094] The GATEWAY™ system (Invitrogen), which is an expression vector construction system for polypeptide expression, can also be used (Experimental Medicine, Vol. 18, No. 19 (December), p 2716-2717, 2000). This system includes two types of site-specific recombinases (BP CLONASE™ and LR CLONASE™) derived from lambda phage and uses BP CLONASE™-specific recombination sites for the Entry Vector, and LR CLONASE-specific recombination sites for the Destination Vector, which may comprise a tag useful for polypeptide purification. With this system, an expression vector can be obtained by using homologous recombination.

[0095] First, a polynucleotide fragment of interest is inserted into the entry vector using the first recombination. Then, a second recombination is allowed to take place between the entry vector, where the polynucleotide fragment of interest has been inserted, and the destination vector. Thus, the expression vector can be prepared rapidly and efficiently. Using the above-mentioned typical restriction enzyme/ligase reaction method, expression vector construction and expression of a polypeptide of interest takes about seven to ten days. However, using the GATEWAY™ system, the polypeptide of interest can be expressed and prepared in only three to four days. Thus, the system ensures a high-throughput functional analysis for expressed polypeptides (http://biotech.nikkeibp.co.jp/netlink/lto/gateway/).

[0096] The present invention also relates to a transformant carrying a vector of the present invention. Any cell can be used as a host into which a vector of this invention is inserted, and various kinds of host cells can be used depending on the purpose. For example, COS cells or CHO cells can be used for strong expression of the polypeptide in eukaryotic cells.

[0097] Introduction of such a vector into host cells can be performed, for example, by calcium phosphate precipitation, electroporation (Current Protocols in Molecular Biology (1987) Ausubel et al. edit, John Wiley & Sons, Section 9.1-9.9), lipofectamine method (GIBCO-BRL), or microinjection, etc.

[0098] Further, a polynucleotide containing at least 15 nucleotides comprising a nucleotide sequence of any one of the polynucleotides comprising the nucleotide sequences of SEQ ID NOs shown in Table 1, or the complementary strand thereof, can be used not only as a primer for synthesizing full-length cDNAs, but also for testing and diagnosing abnormalities of the polypeptide encoded by the full-length cDNA of the present invention. For example, by utilizing polymerase chain reaction (genomic DNA-PCR, or RT-PCR) using a polynucleotide of this invention as a primer, a polynucleotide encoding a polypeptide of the invention can be amplified. It is also possible to obtain the regulatory region of expression in the 5′-upstream by using PCR or hybridization, since the transcription start site within the genomic sequence can be easily specified based on the 5′-end sequence of the full-length cDNA. The obtained genomic region can be used for detection and/or diagnosis of sequence abnormality using RFLP analysis, SSCP, or sequencing. Where expression of an mRNA of the present invention varies according to a specific disease, analysis of the amount of mRNA expression using a polynucleotide of the present invention as a probe or a primer enables detection and diagnosis of that disease.

[0099] The present invention also relates to antibodies that bind to a polypeptide of the present invention. There are no limitations as to the form of the antibodies of this invention. They include polyclonal antibodies, monoclonal antibodies, or portions thereof that can bind to an antigen. They also include antibodies of all classes. Furthermore, special antibodies such as humanized antibodies and chimeric antibodies are also included.

[0100] A polyclonal antibody of this invention can be obtained according to the standard method of synthesizing an oligopeptide corresponding to an amino acid sequence, and immunizing rabbits with that peptide (Current Protocols in Molecular Biology (1987) Ausubel et al. edit, John Wiley & Sons, Section 11.12-11.13). A monoclonal antibody of the present invention can be obtained according to the standard method of purifying a polypeptide expressed in E. coli, immunizing mice with that polypeptide, and producing a hybridoma cell by fusing spleen cells and myeloma cells (Current Protocols in Molecular Biology (1987) Ausubel et al. edit, John Wiley & Sons, Section 11.4-11.11).

[0101] An antibody binding to a polypeptide of the present invention can be used for purification of the polypeptide of the invention, and also for detection and/or diagnosis of abnormalities of the expression and structure of that polypeptide. Specifically, polypeptides can be extracted, for example, from tissues, blood, or cells, and a polypeptide of this invention can then be detected for the above purpose using Western blotting, immunoprecipitation, or ELISA.

[0102] Furthermore, an antibody binding to a polypeptide of the present invention can be utilized for treating a disease associated with that polypeptide. If the antibody is used to treat patients, human antibodies, humanized antibodies, or chimeric antibodies are preferred due to their low antigenicity. Human antibodies can be prepared by immunizing a mouse whose immune system is replaced with that of a human (e.g., see “Functional transplant of megabase human immunoglobulin loci recapitulates human antibody response in mice”, Mendez, M. J. et al. (1997) Nat. Genet. 15: 146-156). These humanized antibodies can be prepared by recombination of the hypervariable region of a monoclonal antibody (Methods in Enzymology (1991) 203: 99-121).

[0103] The cDNAs (clones) of the present invention include polypeptide sequences encoding proteins whose function can be predicted, such as, for example, secretory and/or membrane proteins, glycoprotein-related proteins, signal transduction-related proteins, transcription-related proteins, disease-related proteins, enzyme and/or metabolism-related proteins, cell division- and/or cell proliferation-related proteins, cytoskeleton-related proteins, nuclear protein and/or RNA synthesis-related proteins, protein synthesis and/or transport-related proteins, cellular defense-related proteins, development and/or differentiation-related proteins, DNA- and/or RNA-binding proteins, ATP- and/or GTP-binding proteins. The results of cDNA homology searches can be used to estimate whether a cDNA sequence comprises the function of an above-described protein. Specifically, the function of a polypeptide encoded by a cDNA of the present invention can be inferred by (a) searching for a known gene or protein which is homologous to the complete or partial nucleotide sequence of the full-length cDNA of the present invention, and (b) comparing the function of the gene and that of the protein encoded by the gene.

[0104] Alternatively, the function of a polypeptide encoded by a cDNA of the present invention can be predicted when a signal sequence, transmembrane domain, nuclear translocation signal, glycosylation signal, phosphorylation site, zinc-finger motif, SH3 domain, or such is found in the amino acid sequence. In particular, partial sequence structures such as motif and domain structures are commonly found in a number of proteins, and comprise a minimal functional protein structure. The Pfam database identifies a total of 4,832 types of motifs and domains, including both those whose functions have been clarified and those whose functions remain unclear (http://www.sanger.ac.uk/Software/Pfam/index.shtml) Version 7.7 (the latest version as of December 2002).

[0105] A specific example of motif/domain function is shown below. The ITAM motif (immunoreceptor tyrosine-based activation motif) is found in the intracellular region of the T cell receptor which is expressed on the cell membrane of T cells participating in an immune response (Flaswinkel, H. et al. Semin Immunol 1995 February, 7(1):21-7). The ITAM motif has a tandem YXXL structure (tyrosine-arbitrary amino acid-arbitrary amino acid-leucine). On extracellular stimulus by an antigen or antibody, the tyrosine in the motif is phosphorylated by an enzyme (LCK) with a kinase domain. Then, ZAP70 binds to the phosphorylated tyrosine via the SH2 domain, resulting in downstream signal transduction (Bu, J. Y. et al., Proc Natl Acad Sci USA 1995 May 23, 92(11):5106-10; Neumeister, E. N. et al., Mol Cell Biol 1995 June, 15(6):3171-8).

[0106] A similar phenomenon has been found in mast cells as well as in T cells (Chen, T. et al., J Biol Chem 1996 Oct. 11, 271(41):25308-15). Thus, at the molecular level, such a phenomenon is the first step in the activation of immune cells in immunologic diseases such as allergies, atopic dermatitis, and asthma.

[0107] Even in a simple exemplary scheme such as the one described above, there are three major motif/domain structures—ITAM, the SH2 domain, and the protein kinase domain—each of which play an important role. The mechanism of this scheme can be interpreted using these three structures. Thus, collecting, categorizing and elucidating the function of molecules that comprise common motif/domain structures is exceedingly important in understanding the molecular-based mechanisms of various cellular functions, including and in addition to the immune response described herein. Searching for motif/domain structures is highly important as the first step in elucidating the functions of unknown polypeptides. It is also understood that an entire polypeptide structure is comprised by minimal structures such as motifs and domains, thus providing the overall function of an entire polypeptide.

[0108] The overall function of a polypeptide in cells can be accurately predicted at the molecular level using data obtained by domain and motif structure analysis. In addition, a fusion polypeptide comprising a partial amino acid sequence and a GFP protein or the like may be prepared, and then introduced into cultured cells. For example, if a polypeptide is localized on the cell membrane, it may function as a receptor or ion channel. Alternatively, if a polypeptide is localized in the nucleus, it can be predicted to serve as a polynucleotide-binding protein or to participate in transcription. Thus, the function of a polypeptide can also be predicted by determining its localization.

[0109] The function of a full-length cDNA obtained in the present invention can be predicted by carrying out the above-described analysis using its entire nucleotide sequence and the amino acid sequence it encodes. Even when the full-length cDNA nucleotide sequence is not available, however, a partial sequence thereof (preferably 300 nucleotides or more) often enables function to be predicted. However, function predicted based on information yielded in a partial sequence homology search will not necessarily be the same as that based on a full-length sequence. Functional prediction based on a full-length nucleotide sequence is obviously preferable.

[0110] A more specific method for predicting function involves homology searches of databases such as GenBank, Swiss-Prot, UniGene, nr and RefSeq, using BLAST or FASTA. The functions of polypeptides encoded by the cDNAs of the present invention can be predicted based on hit genes and the function of polypeptides encoded by these genes. Polypeptide functions can be predicted from the amino acid sequences deduced from the structure of the full-length nucleotide sequences. In this way, signal sequences and transmembrane domains can be predicted from amino acid sequences using PSORT [K. Nakai & M. Kanehisa, Genomics, 14: 897-911 (1992)], SOSUI [T. Hirokawa et al., Bioinformatics, 14, 378-379 (1998)] (Mitsui Knowledge Industry Co., Ltd.), MEMSAT [D. T. Jones, W. R. Taylor & J. M. Thornton, Biochemistry, 33, 3038-3049 (1994)], and the like. Alternatively, motifs and domains can be predicted from amino acid sequences by carrying out searches using Pfam, PROSITE (http://www.expasy.ch/prosite/), or such. The above-described procedures facilitate more accurate prediction of polypeptide function.

[0111] The databases GenBank, Swiss-Prot, nr and RefSeq were searched as described above for homology to the 1,995 full-length clone sequences of the present invention whose full-length nucleotide had been determined (see Example 4 and the results of homology searches). In addition, the amino acid sequences deduced from the full-length nucleotide sequences were analyzed by database searches for signal sequences and transmembrane domains using PSORT and SOSUI (see Example 5). The clones were categorized into the fourteen functional categories shown below, based on 1) the results of annotation-based functional prediction (by referring to keywords in the hit data of Swiss-Prot, or to Definitions and Reference information in the hit data of nr or RefSeq), 2) the results of PSORT searches for signal sequences using the deduced ORFs and 3) the results of SOSUI searches for transmembrane domains using the deduced ORFs. As a result, 1,006 clones were estimated to encode proteins belonging to the categories described below.

Secretory and/or membrane protein (570 clones)

Glycoprotein-related protein (124 clones)

Signal transduction-related protein (75 clones)

Transcription-related protein (113 clones)

Disease-related protein (414 clones)

Enzyme and/or metabolism-related protein (172 clones)

Cell division- and/or cell proliferation-related protein (29 clones)

Cytoskeleton-related protein (61 clones)

Nuclear protein and/or RNA synthesis-related protein (41 clones)

Protein synthesis- and/or transport-related protein (52 clones)

Cellular defense-related protein (five clones)

Development and/or differentiation-related protein (17 clones)

DNA- and/or RNA-binding protein (127 clones)

ATP- and/or GTP-binding protein (70 clones)

[0112] The clones predicted to belong to the category of secretory protein and/or membrane protein are the following 551 clones.

[0113] 3NB692004045, ADIPS2000069, ADRGL2010315, ASTRO2015162, BLADE2001031, BLADE2002744, BLADE2007744, BRACE2003628, BRACE2012528, BRACE2013126, BRACE2017397, BRACE2017580, BRACE2017992, BRACE2023633, BRACE2030039, BRACE2035191, BRACE3001403, BRACE3001973, BRACE3002264, BRACE3002756, BRACE3004767, BRACE3004981, BRACE3007869, BRACE3009392, BRACE3013874, BRACE3013986, BRACE3014523, BRACE3015898, BRACE3018083, BRACE3021517, BRACE3021805, BRACE3022051, BRACE3024379, BRACE3024444, BRACE3024497, BRACE3024879, BRACE3026345, BRACE3026456, BRACE3026802, BRACE3028360, BRACE3029021, BRACE3030538, BRACE3031372, BRACE3031579, BRACE3031728, BRACE3032385, BRACE3032537, BRACE3032980, BRACE3033525, BRACE3034964, BRACE3034993, BRACE3037637, BRACE3037803, BRACE3038570, BRACE3039358, BRACE3039378, BRACE3040644, BRACE3040863, BRACE3042326, BRACE3042409, BRACE3042432, BRACE3044090, BRACE3046049, BRACE3046466, BRACE3048565, BRACE3050504, BRACE3051144, BRACE3051621, BRACE3052486, BRALZ2010842, BRALZ2011337, BRALZ2013690, BRAMY2015516, BRAMY2021098, BRAMY2025495, BRAMY2037609, BRAMY2041507, BRAMY2044686, BRAMY2046537, BRAMY3002886, BRAMY3004126, BRAMY3007449, BRAMY3009556, BRAMY3009904, BRAMY3010654, BRAMY3010902, BRAMY3015549, BRAMY3016829, BRAMY3018248, BRAWH2000256, BRAWH2010364, BRAWH2011812, BRAWH2011958, BRAWH2012866, BRAWH2014053, BRAWH2016209, BRAWH2016305, BRAWH3001053, BRAWH3001783, BRAWH3001833, BRAWH3003573, BRAWH3005892, BRAWH3008867, BRAWH3010461, BRAWH3010657, BRAWH3011907, BRAWH3012005, BRAWH3012662, BRAWH3012779, BRAWH3013049, BRAWH3014609, BRAWH3015175, BRAWH3016123, BRAWH3017259, BRAWH3018063, BRAWH3018548, BRAWH3018969, BRAWH3019529, BRAWH3019820, BRAWH3020200, BRAWH3020884, BRAWH3021012, BRAWH3021641, BRAWH3022347, BRAWH3023156, BRAWH3023274, BRAWH3023415, BRAWH3023421, BRAWH3024186, BRAWH3024242, BRAWH3027574, BRAWH3027880, BRAWH3028223, BRAWH3028754, BRAWH3029806, BRAWH3030810, BRAWH3032298, BRAWH3034114, BRAWH3034134, BRAWH3035914, BRAWH3036270, BRAWH3038055, BRAWH3038324, BRAWH3040711, BRAWH3040900, BRAWH3042132, BRAWH3042772, BRAWH3042996, BRAWH3043498, BRAWH3043623, BRAWH3044151, BRAWH3044676, BRAWH3046196, BRAWH3047063, BRAWH3048374, BRAWH3048724, BRAWH3049068, BRAWH3049544, BRCAN2002662, BRCAN2003269, BRCAN2003814, BRCAN2006051, BRCAN2006955, BRCAN2015402, BRCAN2018269, BRCAN2019653, BRCAN2019907, BRCAN2020234, BRCAN2020412, BRCAN2020972, BRCAN2021325, BRCAN2022126, BRCOC2006164, BRCOC2006639, BRCOC2009638, BRHIP2006921, BRHIP2020930, BRHIP2021929, BRHIP3000859, BRHIP3001878, BRHIP3002000, BRHIP3002124, BRHIP3003063, BRHIP3003306, BRHIP3003395, BRHIP3004774, BRHIP3005801, BRHIP3005944, BRHIP3006950, BRHIP3007195, BRHIP3007424, BRHIP3007960, BRHIP3008320, BRHIP3010289, BRHIP3011269, BRHIP3011831, BRHIP3012185, BRHIP3012357, BRHIP3012997, BRHIP3013078, BRHIP3016032, BRHIP3017146, BRHIP3017558, BRHIP3019956, BRHIP3020733, BRHIP3021019, BRHIP3025795, BRHIP3025844, BRHIP3027160, BRHIP3027191, BRHIP3028742, BRHIP3029530, BRHIP3030230, BRHIP3031733, BRHIP3035222, BRHIP3035754, BRHIP3036715, BRHIP3036936, BRHIP3037810, BRHIP3039430, BRHIP3039509, BRSSN2004710, BRSSN2018218, BRSTN2010089, BRSTN2011688, BRSTN2011899, BRSTN2011961, BRTHA2000969, BRTHA2003759, BRTHA2012189, BRTHA2014647, BRTHA2018304, BRTHA2019726, BRTHA2019743, BRTHA2020400, BRTHA2020566, BRTHA2020721, BRTHA2020781, BRTHA2021212, BRTHA2021440, BRTHA2021450, BRTHA2022914, BRTHA2022968, BRTHA2023437, BRTHA2026311, BRTHA2027250, BRTHA2030036, BRTHA2031917, BRTHA2033155, BRTHA2033320, BRTHA2033469, BRTHA2033683, BRTHA2036055, BRTHA2036295, BRTHA3003225, BRTHA3006593, BRTHA3010135, BRTHA3010540, BRTHA3010717, BRTHA3011194, BRTHA3011998, BRTHA3012265, BRTHA3013882, BRTHA3014835, BRTHA3016616, BRTHA3018623, BRTHA3026161, BRTHA3027820, BRTHA3028505, CHONS2001287, CHONS2001797, CHONS2002419, COLON2004351, COLON2005623, COLON2005735, CTONG2008989, CTONG2020582, CTONG2027150, CTONG3001605, CTONG3002588, CTONG3008223, FCBBF3012443, FEBRA2023498, FEBRA2026977, FEHRT2002708, FEKID2002231, FEKID2002493, FELNG2000720, FELNG2001706, HCHON2009766, HSYRA2004550, JCMLC1000159, JCMLC2000273, JCMLC2002095, JCMLC2002751, KIDNE2004531, KIDNE2015987, KIDNE2017153, LYMPB1000158, LYMPB2002236, LYMPB2002458, LYMPB2002478, MESAN2014624, NETRP2004090, NETRP2004434, NETRP2005282, NETRP2005849, NETRP2008582, NT2RI3001967, NT2RI3005861, NT2RI3005923, NT2RI3009524, NT2RP7019682, NT2RP8001605, NT2RP8003787, NT2RP8008057, OCBBF2000831, OCBBF2004478, OCBBF2007039, OCBBF2009536, OCBBF2018229, OCBBF2018618, OCBBF2036019, OCBBF3003745, OCBBF3007704, OCBBF3021502, OCBBF3022123, OCBBF3022576, OCBBF3023175, OCBBF3023993, OCBBF3025475, OCBBF3025887, OCBBF3026979, OCBBF3028001, PEBLM2003935, PEBLM2005615, PLACE5000522, PLACE6000012, PLACE6010936, PLACE6019674, PLACE7000266, PLACE7000707, PLACE7001759, PLACE7003639, PLACE7006090, PLACE7006498, PLACE7008136, PLACE7011269, PLACE7012111, PLACE7016321, PLACE7016454, PUAEN2000684, SMINT2003641, SPLEN2011252, SPLEN2025012, SPLEN2031004, SPLEN2034551, SPLEN2035615, SPLEN2042051, STOMA2004663, SYNOV4009139, T1ESE2002665, TBAES2005361, TBAES2007428, TESOP2008556, TESTI2003768, TESTI2007490, TESTI2018335, TESTI2022323, TESTI2024267, TESTI2028613, TESTI2036822, TESTI2037085, TESTI2037657, TESTI2037877, TESTI2046188, TESTI2049041, TESTI2052670, TESTI4001037, TESTI4002072, TESTI4002889, TESTI4003602, TESTI4004539, TESTI4004653, TESTI4005399, TESTI4007671, TESTI4010544, TESTI4010721, TESTI4013774, TESTI4014415, TESTI4014932, TESTI4014977, TESTI4017647, TESTI4017854, TESTI4019149, TESTI4021197, TESTI4021377, TESTI4021569, TESTI4022158, TESTI4023096, TESTI4023654, TESTI4024494, TESTI4026680, TESTI4027170, TESTI4028042, TESTI4031173, TESTI4031818, TESTI4032128, TESTI4034973, TESTI4035872, TESTI4035989, TESTI4036012, TESTI4037949, TESTI4038047, TESTI4040559, TESTI4041049, TESTI4043067, TESTI4043371, TESTI4045168, TESTI4046450, TESTI4047119, TESTI4048296, TESTI4048545, TESTI4051015, TESTI4051858, TESTI4052219, TESTI4052430, TESTI4052598, THYMU3002825, THYMU3003007, THYMU3003350, THYMU3008935, THYMU3009755, THYMU3011360, THYMU3013197, THYMU3014173, THYMU3015457, THYMU3015647, THYMU3016518, THYMU3018151, THYMU3019605, THYMU3021404, THYMU3022211, THYMU3022528, THYMU3022668, THYMU3023107, THYMU3023400, THYMU3025118, THYMU3025313, THYMU3025642, THYMU3026306, THYMU3026532, THYMU3026869, THYMU3027540, THYMU3028461, THYMU3029795, THYMU3031878, THYMU3032032, THYMU3033649, THYMU3033754, THYMU3034099, THYMU3034616, THYMU3036310, THYMU3036934, THYMU3036953, THYMU3037192, THYMU3037772, THYMU3038158, THYMU3038167, THYMU3040068, THYMU3040126, THYMU3040146, THYMU3040172, THYMU3040746, THYMU3040816, THYMU3041918, THYMU3042321, THYMU3043688, THYMU3043779, THYMU3044188, THYMU3045510, THYMU3047115, THYMU3047156, THYMU3047542, THYMU3047760, TKIDN2011160, TLIVE2008797, TRACH3003872, TRACH3004747, TRACH3005274, TRACH3005699, TRACH3007274, TRACH3007625, TRACH3009008, TRACH3009061, TRACH3010382, TRACH3011082, TRACH3011184, TRACH3012659, TRACH3012891, TRACH3013900, TRACH3014063, TRACH3014580, TRACH3015136, TRACH3015346, TRACH3016368, TRACH3016885, TRACH3016992, TRACH3017409, TRACH3018191, TRACH3018240, TRACH3018524, TRACH3018943, TRACH3019058, TRACH3019370, TRACH3019621, TRACH3019807, TRACH3020930, TRACH3021023, TRACH3021544, TRACH3022758, TRACH3023063, TRACH3023203, TRACH3023516, TRACH3023945, TRACH3024081, TRACH3024671, TRACH3025346, TRACH3026542, TRACH3027681, TRACH3029670, TRACH3031316, TRACH3031678, TRACH3032480, TRACH3034680, TRACH3036103, TRACH3036278, TSTOM2002682, UTERU3005422, UTERU3010029, UTERU3011092, UTERU3011398, UTERU3011837, UTERU3012414, UTERU3015647, UTERU3016273, UTERU3017626, UTERU3021850, UTERU3022168, UTERU3022922, UTERU3023413

[0114] The following 19 clones are also predicted to belong to the category of secretory protein and/or membrane protein.

[0115] ADRGL2011190, BRACE3046450, BRAWH3013197, BRAWH3028645, BRAWH3046240, BRTHA3024233, PROST2010326, TBAES2004105, TBAES2007379, TBAES2007481, TBAES2008133, TESTI2043585, TESTI4005158, THYMU3024602, THYMU3044175, THYMU3046350, TLIVE2007192, UTERU2025415, UTERU2036507

[0116] The clones predicted to belong to the category of glycoprotein-related protein are the following 114 clones.

[0117] 3NB692004045, ADIPS2000069, BRACE2017397, BRACE3001403, BRACE3001973, BRACE3002264, BRACE3009392, BRACE3026345, BRACE3032385, BRACE3039358, BRACE3039378, BRACE3042432, BRACE3046466, BRACE3051621, BRAMY3004126, BRAWH2012866, BRAWH3001783, BRAWH3003573, BRAWH3014609, BRAWH3023156, BRAWH3024186, BRAWH3029806, BRAWH3040900, BRAWH3043623, BRAWH3044151, BRAWH3049544, BRCAN2003269, BRCAN2021325, BRHIP3005944, BRHIP3007424, BRHIP3010289, BRHIP3011269, BRHIP3011567, BRHIP3030230, BRHIP3036715, BRHIP3036936, BRHIP3039509, BRTHA2019726, BRTHA2020721, BRTHA2022968, BRTHA2025869, BRTHA2027250, BRTHA2031917, BRTHA2033155, BRTHA2033683, BRTHA3010135, CHONS2001287, COLON2004351, FEKID2002493, FELNG2000720, JCMLC1000159, JCMLC2000273, JCMLC2002095, JCMLC2002751, KIDNE2015987, LYMPB2002458, NT2RI3005923, NT2RI3009524, OCBBF2000831, OCBBF2004478, OCBBF2007039, OCBBF2018618, OCBBF3026979, PEBLM2005615, PLACE6001933, PLACE6010936, PLACE7006090, PLACE7012111, SPLEN2025012, STOMA2004663, T1ESE2002665, TESTI2007490, TESTI2022323, TESTI2037657, TESTI2052670, TESTI4001517, TESTI4014932, TESTI4031173, THYMU3014173, THYMU3015647, THYMU3016518, THYMU3020221, THYMU3025118, THYMU3026532, THYMU3032032, THYMU3037772, THYMU3040172, TKIDN2011160, TLUNG2001445, TRACH3005274, TRACH3009061, TRACH3015136, TRACH3018524, TRACH3018907, TRACH3019058, TRACH3019370, TRACH3019621, TRACH3019807, TRACH3020930, TRACH3021023, TRACH3023516, TRACH3025346, TRACH3026299, TRACH3028441, TRACH3029670, TRACH3031678, TRACH3034680, TRACH3037505, TRACH3038399, TUTER2001433, UTERU3011398, UTERU3011837, UTERU3015647, UTERU3021850

[0118] The following ten clones are also predicted to belong to the category of glycoprotein-related protein.

BRAWH3013197, BRAWH3046240, PROST2010326, TBAES2004105, TESTI2043585, TESTI4005158, THYMU3024602, THYMU3046350, TRACH3021066, UTERU2036507

[0119] The clones predicted to belong to the category of signal transduction-related protein are the following 71 clones.

[0120] BRACE3002344, BRACE3017253, BRACE3031315, BRACE3036283, BRACE3042046, BRACE3044172, BRACE3046491, BRACE3046609, BRAMY3009491, BRAMY3015547, BRAMY3017920, BRAWH3017180, BRAWH3019026, BRAWH3027806, BRAWH3032340, BRAWH3042438, BRAWH3047644, BRCAN2010665, BRHIP3006294, BRHIP3011460, BRHIP3011567, BRHIP3033557, BRHIP3037543, BRHIP3041587, BRTHA2026290, BRTHA2035743, BRTHA3011187, BRTHA3021708, BRTHA3025073, BRTHA3026916, KIDNE2010049, N1ESE2000698, OCBBF3005330, OCBBF3006986, OCBBF3009244, OCBBF3025630, PLACE6000055, PLACE6001933, PLACE7009936, PLACE7011559, PLACE7014247, PUAEN2006639, SKMUS2008585, SPLEN2007689, TESTI2021654, TESTI2040377, TESTI4010902, TESTI4013474, TESTI4046073, TESTI4049786, TESTI4051865, THYMU3013785, THYMU3025683, THYMU3032798, TRACH3003037, TRACH3003357, TRACH3005173, TRACH3018519, TRACH3018606, TRACH3024020, TRACH3026650, TRACH3027701, TRACH3029462, TRACH3030176, TRACH3038399, TSTOM2001571, TSTOM2002611, UTERU2024042, UTERU3001029, UTERU3010919, UTERU3021231

[0121] The following four clones are also predicted to belong to the category of signal transduction-related protein.

BRHIP3030064, CTONG2003764, PLACE7013963, TRACH3021066

[0122] The clones predicted to belong to the category of transcription-related protein are the following 106 clones.

[0123] ASTRO2016114, BEAST2000981, BRACE2012947, BRACE2019348, BRACE3025719, BRACE3026844, BRACE3034183, BRACE3041162, BRACE3046152, BRAMY2040915, BRAMY3000692, BRAMY3007078, BRAMY3011581, BRAMY3014027, BRAMY3018754, BRAWH3000446, BRAWH3005886, BRAWH3011577, BRAWH3013009, BRAWH3013264, BRAWH3017477, BRAWH3023172, BRAWH3028796, BRAWH3031342, BRAWH3032571, BRAWH3035936, BRAWH3036247, BRAWH3036334, BRAWH3038827, BRCOC2012386, BRHIP2023735, BRHIP2027077, BRHIP2029529, BRHIP3004725, BRHIP3027651, BRHIP3028246, BRTHA2024712, BRTHA3000456, BRTHA3003736, BRTHA3010212, BRTHA3014000, BRTHA3028339, CHONS2000797, CHONS2002829, CTONG2001932, CTONG2011801, D90ST2003106, FCBBF3020030, FCBBF5000384, HCASM2008154, NETRP2004017, NT2RI3008179, NT2RI3009480, NT2RP8003490, NTONG2003805, NTONG2008483, OCBBF2016928, OCBBF3005330, OCBBF3008392, OCBBF3020263, OCBBF3021361, OCBBF3022166, PLACE7002303, PLACE7005169, PLACE7009757, SPLEN2012571, SPLEN2028417, SYNOV2003326, T1ESE2000904, TESTI2040377, TESTI4001679, TESTI4002799, TESTI4002868, TESTI4003796, TESTI4003944, TESTI4005322, TESTI4005470, TESTI4039904, TESTI4052775, THYMU3008105, THYMU3012983, THYMU3014372, THYMU3020869, THYMU3021586, THYMU3022434, THYMU3026000, THYMU3030072, THYMU3037052, THYMU3043200, TLIVE2001616, TRACH3003037, TRACH3003458, TRACH3004424, TRACH3010079, TRACH3010167, TRACH3010342, TRACH3015951, TRACH3021883, TRACH3022109, TRACH3028180, TRACH3036750, UTERU2037423, UTERU3012293, UTERU3016070, UTERU3019708, UTERU3022588

[0124] The following seven clones are also predicted to belong to the category of transcription-related protein.

BRACE3002184, BRCAN2019772, CTONG2002832, TESTI4002988, TESTI4005500, TRACH1000193, TRACH3019290

[0125] The clones predicted to belong to the category of disease-related protein are the following 391 clones.

[0126] ADIPS2000069, ASTRO2015162, ASTRO2016114, ASTRO3000154, BLADE2000256, BRACE1000475, BRACE2012838, BRACE2012947, BRACE2013009, BRACE2016896, BRACE2017397, BRACE2023744, BRACE2027382, BRACE3001403, BRACE3001973, BRACE3002756, BRACE3004767, BRACE3009392, BRACE3013418, BRACE3018083, BRACE3019941, BRACE3020669, BRACE3025719, BRACE3026345, BRACE3026802, BRACE3028998, BRACE3036283, BRACE3039378, BRACE3040644, BRACE3041059, BRACE3041162, BRACE3042046, BRACE3042432, BRACE3043597, BRACE3044172, BRACE3046152, BRACE3046466, BRACE3046609, BRACE3051621, BRACE3052321, BRALZ2010842, BRALZ2013621, BRAMY2041384, BRAMY3000692, BRAMY3004126, BRAMY3007078, BRAMY3009491, BRAMY3011501, BRAMY3011581, BRAMY3014027, BRAMY3015086, BRAMY3017920, BRAMY3018248, BRAWH2002333, BRAWH2012866, BRAWH2014053, BRAWH3001638, BRAWH3001783, BRAWH3004335, BRAWH3010602, BRAWH3011577, BRAWH3011623, BRAWH3017180, BRAWH3017259, BRAWH3018548, BRAWH3019026, BRAWH3021580, BRAWH3023156, BRAWH3023172, BRAWH3023415, BRAWH3024186, BRAWH3029385, BRAWH3029538, BRAWH3031342, BRAWH3032298, BRAWH3032571, BRAWH3033513, BRAWH3034668, BRAWH3034775, BRAWH3034890, BRAWH3036334, BRAWH3038324, BRAWH3038827, BRAWH3040900, BRAWH3041492, BRAWH3041556, BRAWH3042438, BRAWH3042447, BRAWH3042772, BRAWH3043295, BRAWH3043623, BRAWH3044151, BRAWH3046424, BRAWH3047565, BRAWH3047644, BRAWH3049544, BRCAN2003269, BRCAN2006051, BRCAN2010665, BRCAN2020331, BRCAN2021325, BRCOC2012386, BRHIP2008756, BRHIP2023735, BRHIP2029529, BRHIP3001076, BRHIP3001481, BRHIP3003984, BRHIP3004215, BRHIP3004725, BRHIP3005037, BRHIP3005307, BRHIP3005673, BRHIP3005801, BRHIP3006449, BRHIP3007609, BRHIP3010289, BRHIP3011567, BRHIP3017146, BRHIP3017855, BRHIP3021019, BRHIP3023922, BRHIP3025795, BRHIP3027191, BRHIP3027651, BRHIP3028742, BRHIP3029409, BRHIP3030230, BRHIP3032374, BRHIP3035006, BRHIP3036715, BRHIP3037543, BRHIP3039509, BRSSN2004710, BRSTN2006466, BRSTN2008475, BRSTN2011961, BRSTN2012069, BRSTN2016918, BRTHA2019726, BRTHA2020721, BRTHA2020910, BRTHA2024712, BRTHA2025869, BRTHA2026071, BRTHA2026290, BRTHA2031917, BRTHA2033155, BRTHA2033683, BRTHA3003736, BRTHA3010135, BRTHA3010212, BRTHA3011187, BRTHA3011998, BRTHA3012265, BRTHA3014547, BRTHA3021708, BRTHA3021971, BRTHA3023403, BRTHA3026916, BRTHA3027957, CHONS2001287, CHONS2002829, COLON2001829, COLON2004911, COLON2005735, CTONG2001932, CTONG2010330, CTONG2011801, CTONG2014206, D90ST2004417, FCBBF3020030, FCBBF3021191, FCBBF3024911, FCBBF5000384, FEBRA2013570, FEBRA2026582, FEBRA2028457, FEKID2002637, FELNG2000720, FELNG2001953, HCASM2008154, JCMLC1000159, JCMLC2000273, JCMLC2002095, KIDNE2015987, N1ESE2000698, NETRP2000961, NETRP2003448, NETRP2004017, NETRP2008582, NT2RI3008179, NT2RI3009480, NT2RI3009524, NT2RP8003787, NT2RP8008057, NTONG2003805, OCBBF2004478, OCBBF2007039, OCBBF2018618, OCBBF2024589, OCBBF2030927, OCBBF2036019, OCBBF3001202, OCBBF3004487, OCBBF3008392, OCBBF3020263, OCBBF3022166, OCBBF3025475, OCBBF3025503, OCBBF3025630, OCBBF3026979, PEBLM2005615, PLACE5000492, PLACE6001933, PLACE6016030, PLACE7000266, PLACE7001759, PLACE7002303, PLACE7003985, PLACE7004103, PLACE7006090, PLACE7006268, PLACE7006498, PLACE7007379, PLACE7009563, PLACE7009757, PLACE7009936, PLACE7011559, PLACE7012111, PLACE7014247, PLACE7016526, PUAEN2000594, SKNSH2007306, SMINT2011406, SMINT2011509, SMINT2014721, SPLEN2007689, SPLEN2012571, SPLEN2025012, SPLEN2028417, SPLEN2033996, SYNOV2003326, SYNOV4009139, T1ESE2000609, TESTI2005112, TESTI2007490, TESTI2009739, TESTI2023903, TESTI2030901, TESTI2034913, TESTI2052670, TESTI4001517, TESTI4001679, TESTI4002868, TESTI4003796, TESTI4003944, TESTI4004653, TESTI4005322, TESTI4005653, TESTI4007965, TESTI4017382, TESTI4017647, TESTI4018436, TESTI4020596, TESTI4021197, TESTI4021569, TESTI4021713, TESTI4023096, TESTI4026080, TESTI4028182, TESTI4031173, TESTI4032128, TESTI4032834, TESTI4032913, TESTI4033177, TESTI4036048, TESTI4039575, TESTI4039904, TESTI4041984, TESTI4046073, TESTI4047119, TESTI4049786, TESTI4049899, TESTI4051015, TESTI4052775, THYMU3002825, THYMU3008105, THYMU3012402, THYMU3012983, THYMU3013785, THYMU3014173, THYMU3014372, THYMU3014620, THYMU3016518, THYMU3020221, THYMU3020869, THYMU3021586, THYMU3021755, THYMU3022434, THYMU3023400, THYMU3025118, THYMU3026306, THYMU3026532, THYMU3027671, THYMU3032032, THYMU3032798, THYMU3033649, THYMU3033759, THYMU3037052, THYMU3037772, THYMU3038158, THYMU3038375, THYMU3040172, THYMU3040746, THYMU3040816, THYMU3040829, THYMU3043200, THYMU3047115, THYMU3047760, TKIDN2011160, TLIVE2007736, TLUNG2000654, TLUNG2001445, TLUNG2001600, TRACH2024730, TRACH3004424, TRACH3005173, TRACH3005191, TRACH3005699, TRACH3006379, TRACH3006800, TRACH3008042, TRACH3009008, TRACH3009701, TRACH3010079, TRACH3010167, TRACH3010342, TRACH3011282, TRACH3011313, TRACH3011503, TRACH3012891, TRACH3015951, TRACH3016455, TRACH3016805, TRACH3018524, TRACH3018907, TRACH3019058, TRACH3019621, TRACH3020769, TRACH3020930, TRACH3021023, TRACH3021373, TRACH3021778, TRACH3021883, TRACH3023373, TRACH3023960, TRACH3024081, TRACH3024671, TRACH3025346, TRACH3026283, TRACH3026299, TRACH3028441, TRACH3028597, TRACH3028837, TRACH3029670, TRACH3030855, TRACH3031660, TRACH3031678, TRACH3032570, TRACH3034680, TRACH3036750, TRACH3037505, TRACH3038399, TUTER2001433, UTERU2024042, UTERU2037423, UTERU3001946, UTERU3004635, UTERU3011398, UTERU3012293, UTERU3012414, UTERU3012999, UTERU3015011, UTERU3015299, UTERU3016308, UTERU3017441, UTERU3017626, UTERU3019708, UTERU3021850, UTERU3022588

[0127] The following 23 clones are also predicted to belong to the category of disease-related protein.

[0128] ADRGL2011190, BRACE3002184, BRACE3026993, BRACE3046450, BRAWH3013197, BRAWH3046240, BRCAN2019772, BRHIP3030064, BRTHA3024233, CTONG2002832, CTONG2003764, PROST2010326, TBAES2004105, TESTI2046536, TESTI4005158, TESTI4005500, THYMU3024602, THYMU3046350, TRACH1000193, TRACH3019290, TRACH3021066, UTERU2017492, UTERU2036507

[0129] In particular, hit data of the following 390 clones for Swiss-Prot, or nr or RefSeq corresponded to genes or proteins which had been deposited in the Online Mendelian Inheritance in Man (OMIM), which is the human gene and disease database (the OMIM Number is shown in the parenthesis after the Clone Name).

[0130] ADIPS2000069(146900), ASTRO2015162(606106), ASTRO2016114(603899), ASTRO3000154(601594), BLADE2000256(140750), BRACE1000475(600696), BRACE2012838(605032), BRACE2012947(140580), BRACE2013009(605888), BRACE2016896(601421), BRACE2017397(115437), BRACE2023744(600763), BRACE2027382(606019), BRACE3001403(126141), BRACE3001973(600976), BRACE3002756(603143), BRACE3004767(182790), BRACE3009392(600229), BRACE3013418(182900), BRACE3018083(605268), BRACE3019941(600595), BRACE3020669(603917), BRACE3025719(605493), BRACE3026345(147470), BRACE3026802(605784), BRACE3028998(603063), BRACE3036283(602052), BRACE3039378(604100), BRACE3040644(603159), BRACE3041059(603486), BRACE3041162(194556), BRACE3042046(311030), BRACE3042432(192321), BRACE3043597(603704), BRACE3044172(601231), BRACE3046152(604950), BRACE3046466(604210;600105), BRACE3046609(606457), BRACE3051621(601313;173900), BRACE3052321(603050), BRALZ2010842(212138), BRALZ2013621(600712), BRAMY2041384(114070), BRAMY3000692(603971), BRAMY3004126(603071), BRAMY3007078(602410), BRAMY3009491(600286), BRAMY3011501(602869), BRAMY3011581(601243), BRAMY3014027(194542), BRAMY3015086(602879), BRAMY3017920(600365), BRAMY3018248(605464), BRAWH2002333(171891), BRAWH2012866(185605), BRAWH2014053(604581), BRAWH3001638(605003), BRAWH3001783(605514), BRAWH3004335(603244), BRAWH3010602(603216), BRAWH3011577(601139), BRAWH3011623(164020), BRAWH3017180(601441), BRAWH3017259(603143), BRAWH3018548(193065), BRAWH3019026(602033), BRAWH3021580(179838), BRAWH3023156(137190), BRAWH3023172(603755), BRAWH3023415(604346), BRAWH3024186(179590), BRAWH3029385(602378), BRAWH3029538(600948), BRAWH3031342(603971), BRAWH3032298(601995), BRAWH3032571(603277), BRAWH3033513(604054;261510), BRAWH3034668(603486), BRAWH3034775(605800), BRAWH3034890(606265), BRAWH3036334(603971), BRAWH3038324(604249), BRAWH3038827(600574), BRAWH3040900(604265), BRAWH3041492(130500), BRAWH3041556(172460), BRAWH3042438(125855), BRAWH3042447(606323), BRAWH3042772(602878), BRAWH3043295(179030), BRAWH3043623(600976), BRAWH3044151(605421), BRAWH3046424(300272), BRAWH3047565(606277), BRAWH3047644(605216), BRAWH3049544(602273), BRCAN2003269(171060;602347), BRCAN2006051(604581), BRCAN2010665(603583), BRCAN2020331(604851), BRCAN2021325(114855), BRCOC2012386(602277), BRHIP2008756(605819), BRHIP2023735(601670), BRHIP2029529(189972), BRHIP3001076(604673), BRHIP3001481(176889), BRHIP3003984(603722;223900), BRHIP3004215(603294), BRHIP3004725(602075), BRHIP3005037(603526), BRHIP3005307(603197), BRHIP3005673(138385), BRHIP3005801(605704), BRHIP3006449(604275), BRHIP3007609(426000), BRHIP3010289(603130), BRHIP3011567(114207), BRHIP3017146(602878), BRHIP3017855(606406), BRHIP3021019(176879), BRHIP3023922(156570;250940), BRHIP3025795(603877), BRHIP3027191(601746), BRHIP3027651(604589), BRHIP3028742(602076), BRHIP3029409(604156), BRHIP3030230(602367), BRHIP3032374(603197), BRHIP3035006(604402), BRHIP3036715(142800), BRHIP3037543(602052), BRHIP3039509(601328), BRSSN2004710(600127), BRSTN2006466(138275), BRSTN2008475(605178), BRSTN2011961(176790), BRSTN2012069(130590), BRSTN2016918(137780), BRTHA2019726(147100), BRTHA2020721(147100), BRTHA2020910(602661), BRTHA2024712(600747), BRTHA2025869(162280), BRTHA2026071(605297), BRTHA2026290(602306), BRTHA2031917(118946), BRTHA2033155(601873), BRTHA2033683(111000), BRTHA3003736(133510;234050), BRTHA3010135(179590), BRTHA3010212(603971), BRTHA3011187(605837), BRTHA3011998(603264), BRTHA3012265(605646), BRTHA3014547(182900), BRTHA3021708(602654), BRTHA3021971(605609), BRTHA3023403(600597), BRTHA3026916(601619), BRTHA3027957(606078), CHONS2001287(146732), CHONS2002829(602981), COLON2001829(604399), COLON2004911(603937;180100), COLON2005735(111690;111700), CTONG2001932(605683), CTONG2010330(606088), CTONG2011801(603971), CTONG2014206(605609), D90ST2004417(113703), FCBBF3020030(603406), FCBBF3021191(605119), FCBBF5000384(601737), FEBRA2013570(248600), FEBRA2026582(300252), FEBRA2028457(164035), FEKID2002637(176875), FELNG2000720(601662), FELNG2001953(603597), HCASM2008154(133450), JCMLC1000159(107470;209950), JCMLC2000273(120980), JCMLC2002095(600738), KIDNE2015987(191845), N1ESE2000698(604734), NETRP2000961(600417), NETRP2003448(179551), NETRP2004017(605344), NETRP2008582(103195), NT2RI3008179(603808), NT2RI3009480(601804), NT2RI3009524(604210;600105), NT2RP8003787(605427), NT2RP8008057(603489), NTONG2003805(601781), OCBBF2004478(604265), OCBBF2007039(605009), OCBBF2018618(102775), OCBBF2024589(602462), OCBBF2030927(603897), OCBBF2036019(601825;256000), OCBBF3001202(140750), OCBBF3004487(142560), OCBBF3008392(605682), OCBBF3020263(604077), OCBBF3022166(600848) OCBBF3025475(604148), OCBBF3025503(601653;113650), OCBBF3025630(604141), OCBBF3026979(602319), PEBLM2005615(600242), PLACE5000492(602142), PLACE6001933(131550), PLACE6016030(605442), PLACE7000266(188840), PLACE7001759(600338), PLACE7002303(601542;180500;137600;604229), PLACE7003985(109684), PLACE7004103(142695), PLACE7006090(154360), PLACE7006268(603053), PLACE7006498(604394), PLACE7007379(603105), PLACE7009563(300344), PLACE7009757(601804), PLACE7009936(600365), PLACE7011559(600831), PLACE7012111(602714), PLACE7014247(601232), PLACE7016526(605490), PUAEN2000594(604679), SKNSH2007306(118990), SMINT2011406(147890), SMINT2011509(606343), SMINT2014721(606090), SPLEN2007689(233700), SPLEN2012571(603430), SPLEN2025012(146900), SPLEN2028417(142995), SPLEN2033996(603853), SYNOV2003326(602960), SYNOV4009139(603551), T1ESE2000609(182465), TESTI2005112(603846), TESTI2007490(601291), TESTI2009739(160745), TESTI2023903(605046), TESTI2030901(600436), TESTI2034913(148060), TESTI2052670(142461), TESTI4001517(148070), TESTI4001679(602850), TESTI4002868(601863;209920), TESTI4003796(603132), TESTI4003944(603971), TESTI4004653(606106), TESTI4005322(603899), TESTI4005653(182465), TESTI4007965(603533), TESTI4017382(605689), TESTI4017647(603211), TESTI4018436(601754), TESTI4020596(602537), TESTI4021197(602189), TESTI4021569(605464), TESTI4021713(604105), TESTI4023096(604878), TESTI4026080(605575), TESTI4028182(603892), TESTI4031173(190197), TESTI4032128(104776), TESTI4032834(300188), TESTI4032913(106410), TESTI4033177(602038), TESTI4036048(601272), TESTI4039575(600951), TESTI4039904(603899), TESTI4041984(604710), TESTI4046073(300118;309801), TESTI4047119(606202), TESTI4049786(142600;235700), TESTI4049899(601969), TESTI4051015(602974), TESTI4052775(165250), THYMU3002825(604346), THYMU3008105(194548), THYMU3012402(600686), THYMU3012983(194556), THYMU3013785(604722), THYMU3014173(143010), THYMU3014372(116945), THYMU3014620(605657), THYMU3016518(147100), THYMU3020221(147100), THYMU3020869(602550), THYMU3021586(184756), THYMU3021755(605024), THYMU3022434(601408), THYMU3023400(605180), THYMU3025118(155735), THYMU3026306(604346), THYMU3026532(600065;116920), THYMU3027671(604143), THYMU3032032(604463), THYMU3032798(601212), THYMU3033649(186780), THYMU3033759(600495), THYMU3037052(300346), THYMU3037772(147100), THYMU3038158(603033;603034), THYMU3038375(181590), THYMU3040172(186720), THYMU3040746(147110), THYMU3040816(605704), THYMU3040829(602649), THYMU3043200(605596), THYMU3047115(108730), THYMU3047760(604783), TKIDN2011160(605011), TLIVE2007736(604990), TLUNG2000654(148059), TLUNG2001445(146900), TLUNG2001600(147130), TRACH2024730(605611), TRACH3004424(603971), TRACH3005173(151410), TRACH3005191(605333), TRACH3005699(606154), TRACH3006379(148059), TRACH3006800(606154), TRACH3008042(166945), TRACH3009008(601112), TRACH3009701(603330), TRACH3010079(604850), TRACH3010167(601804), TRACH3010342(602943), TRACH3011282(601833), TRACH3011313(113520), TRACH3011503(602862), TRACH3012891(602397), TRACH3015951(604084), TRACH3016455(605286), TRACH3016805(106410), TRACH3018524(176882), TRACH3018907(146900), TRACH3019058(147170), TRACH3019621(191350), TRACH3020769(160776), TRACH3020930(147100), TRACH3021023(147170), TRACH3021373(606030), TRACH3021778(164035), TRACH3021883(603347), TRACH3023373(159350), TRACH3023960(603337), TRACH3024081(605867), TRACH3024671(605942), TRACH3025346(603377;212140), TRACH3026283(601517), TRACH3026299(147170), TRACH3028441(147170), TRACH3028597(604310), TRACH3028837(602127), TRACH3029670(147170), TRACH3030855(173321), TRACH3031660(176912), TRACH3031678(600523), TRACH3032570(602217), TRACH3034680(147170), TRACH3036750(604077), TRACH3037505(147170), TRACH3038399(604032;226980), TUTER2001433(146900), UTERU2024042(602214), UTERU2037423(604077), UTERU3001946(606154), UTERU3004635(103390), UTERU3011398(120240;158810;254090), UTERU3012293(194556), UTERU3012414(604394), UTERU3012999(605567), UTERU3015011(602505), UTERU3015299(601825;256000), UTERU3016308(602127), UTERU3017441(604276), UTERU3017626(603788), UTERU3019708(601430), UTERU3021850(605009), UTERU3022588(123811)

[0131] Additionally, hit data of the following 23 clones for Swiss-Prot, nr or RefSeq corresponded to genes or proteins which had been deposited in the Online Mendelian Inheritance in Man (OMIM), which is the human gene and disease database (the OMIM Number is shown in the parenthesis after the Clone Name).

[0132] ADRGL2011190(602658), BRACE3002184(603899), BRACE3026993 (601282), BRACE3046450(603035), BRAWH3013197(604100), BRAWH3046240(602646), BRCAN2019772(603849), BRHIP3030064 (605762), BRTHA3024233(603088), CTONG2002832(604668), CTONG2003764(176977), PROST2010326(604110), TBAES2004105 (605008), TESTI2046536 (182890; 182882), TESTI4005158(601328), TESTI4005500(602277), THYMU3024602(600493), THYMU3046350 (603080), TRACH1000193(139139), TRACH3019290(603975), TRACH3021066(164870), UTERU2017492(602917), UTERU2036507 (605008)

[0133] The clones predicted to belong to the category of enzyme and/or metabolism-related protein are the following 164 clones.

[0134] ASTRO2008972, BRACE1000475, BRACE2013132, BRACE2016896, BRACE2035120, BRACE3017253, BRACE3021805, BRACE3028998, BRACE3031315, BRACE3036283, BRACE3041059, BRACE3042409, BRACE3044172, BRACE3046609, BRAMY3009491, BRAMY3011581, BRAWH2002333, BRAWH2014053, BRAWH3001638, BRAWH3004335, BRAWH3011331, BRAWH3017180, BRAWH3020928, BRAWH3023415, BRAWH3023421, BRAWH3024186, BRAWH3024506, BRAWH3029385, BRAWH3029806, BRAWH3032571, BRAWH3033513, BRAWH3034668, BRAWH3037428, BRAWH3037979, BRAWH3041556, BRAWH3042438, BRAWH3043295, BRAWH3044151, BRAWH3046424, BRAWH3047692, BRAWH3049544, BRCAN2003814, BRCAN2006051, BRCAN2015402, BRCAN2021325, BRHIP3001481, BRHIP3003126, BRHIP3005307, BRHIP3005673, BRHIP3007195, BRHIP3007223, BRHIP3011082, BRHIP3011269, BRHIP3021019, BRHIP3023922, BRHIP3032374, BRHIP3035006, BRHIP3037543, BRHIP3041587, BRSSN2004710, BRSTN2006466, BRSTN2011961, BRTHA2005448, BRTHA2010672, BRTHA2025869, BRTHA2026311, BRTHA2033155, BRTHA2035743, BRTHA3003736, BRTHA3010135, BRTHA3010469, BRTHA3023403, CHONS2002829, COLON2004351, CTONG2010330, CTONG2020582, CTONG3001605, FCBBF3001018, FCBBF3021191, FCBBF5000384, FEBRA2013570, FEBRA2026582, FEKID2002637, HSYRA2004550, KIDNE2010049, NETRP2000961, NT2RI2004818, NT2RP7016508, OCBBF2007039, OCBBF2024589, OCBBF2036019, OCBBF3004487, OCBBF3005330, OCBBF3009244, PLACE5000492, PLACE6001933, PLACE7001759, PLACE7003985, PLACE7004103, PLACE7004961, PLACE7006090, PLACE7006268, PLACE7007379, PLACE7011559, PLACE7012111, PLACE7014247, PLACE7016526, SKMUS2008585, SMINT2011509, SMINT2012179, SMINT2014721, SPLEN2007689, SYNOV4009139, TBAES2007428, TESTI2005112, TESTI2007490, TESTI2021654, TESTI2040377, TESTI2049062, TESTI4000621, TESTI4002799, TESTI4007671, TESTI4020596, TESTI4033177, TESTI4049786, TESTI4052219, THYMU3002825, THYMU3026306, THYMU3032798, THYMU3034671, THYMU3036953, THYMU3041428, THYMU3047115, THYMU3047891, TKIDN2011160, TRACH3005173, TRACH3005274, TRACH3009008, TRACH3011313, TRACH3011503, TRACH3012891, TRACH3015136, TRACH3016455, TRACH3018108, TRACH3018261, TRACH3018524, TRACH3019621, TRACH3021544, TRACH3022758, TRACH3023516, TRACH3024020, TRACH3024081, TRACH3027229, TRACH3027701, TRACH3032150, TRACH3038399, TSTOM2001571, TSTOM2002611, UTERU2024042, UTERU3010604, UTERU3010919, UTERU3015299, UTERU3019708, UTERU3021850

[0135] The following eight clones are also predicted to belong to the category of enzyme and/or metabolism-related protein.

ADRGL2011190, BRHIP3030064, CTONG2003764, PLACE7013963, TBAES2004105, THYMU3044175, TRACH3021066, UTERU2036507

[0136] The clones predicted to belong to the category of cell division and/or cell proliferation-related protein are the following 27 clones.

[0137] BLADE2000256, BRACE2002392, BRACE3030538, BRACE3036283, BRACE3044495, BRAMY3002886, BRAMY3009556, BRAWH2016209, BRAWH3004350, BRAWH3027574, BRCAN2019907, BRHIP3001076, BRHIP3029409, BRSTN2008475, BRTHA3011265, FEKID2002637, NT2RP8005546, OCBBF3001202, PLACE7011559, SPLEN2033996, TESTI2023903, TESTI4020819, TESTI4049899, THYMU3014372, THYMU3021586, UTERU3010919, UTERU3012999

[0138] The following two clones are also predicted to belong to the category of cell division and/or cell proliferation-related protein.

TBAES2007481, TESTI2046536

[0139] The clones predicted to belong to the category of cytoskeleton-related protein are the following 60 clones.

[0140] BRACE3004767, BRACE3013418, BRACE3051819, BRAMY3005184, BRAMY3015086, BRAMY4000915, BRAMY4001652, BRAWH3001783, BRAWH3015175, BRAWH3018548, BRAWH3019026, BRAWH3021580, BRAWH3021724, BRAWH3027440, BRAWH3027806, BRAWH3029385, BRAWH3040900, BRAWH3041492, BRCAN2020467, BRHIP3003063, BRHIP3003340, BRSTN2016918, BRTHA2020910, BRTHA2025869, BRTHA3014547, BRTHA3025073, CERVX2000968, JCMLC2000273, N1ESE2000698, NT2RI3005923, OCBBF2003518, OCBBF2004478, OCBBF3027969, PLACE7000266, PLACE7004961, SMINT2010753, SPLEN2034934, SYNOV4003174, TESTI2001915, TESTI2009739, TESTI2034913, TESTI4001517, TESTI4004917, TESTI4010902, TESTI4032913, TESTI4051424, THYMU3026532, TLUNG2000654, TRACH3006379, TRACH3016805, TRACH3020769, TRACH3022960, TRACH3026650, TRACH3028837, TRACH3029462, TRACH3032570, UTERU3000670, UTERU3001029, UTERU3015011, UTERU3016308

[0141] The following one clone is also predicted to belong to the category of cytoskeleton-related protein.

BRACE3026993

[0142] The clones predicted to belong to the category of nuclear protein and/or RNA synthesis-related protein are the following 40 clones.

[0143] ASTRO3000154, BRACE3014714, BRACE3036283, BRALZ2013621, BRAMY3009556, BRAMY3011501, BRAWH3011623, BRAWH3017180, BRAWH3022651, BRAWH3038252, BRAWH3040695, BRAWH3046424, BRHIP3004215, BRHIP3007223, BRHIP3020046, BRTHA3010530, CTONG2006235, FEBRA2028457, NT2RP7016508, OCBBF3001333, OCBBF3004487, PLACE7004103, PLACE7006268, TESTI2036285, TESTI2037657, TESTI4014932, TESTI4028182, TESTI4032128, TESTI4033177, TESTI4039575, THYMU3012402, THYMU3040829, THYMU3041428, TRACH3002752, TRACH3018108, TRACH3021778, UTERU3004635, UTERU3010409, UTERU3010919, UTERU3013302

[0144] The following one clone is also predicted to belong to the category of nuclear protein and/or RNA synthesis-related protein.

TESTI2046536

[0145] The clones predicted to belong to the category of protein synthesis and/or transport-related protein are the following 50 clones.

[0146] BRACE2016896, BRACE2023744, BRACE3020669, BRACE3030538, BRACE3041059, BRACE3043597, BRAWH2014053, BRAWH3001638, BRAWH3010602, BRAWH3024506, BRAWH3026349, BRAWH3034668, BRAWH3037979, BRAWH3041556, BRAWH3044151, BRAWH3047692, BRCAN2000923, BRCAN2002892, BRCAN2006051, BRCAN2021325, BRHIP3007223, BRSTN2012069, BRTHA2005448, BRTHA2010672, CHONS2002829, CTONG3001605, D90ST2004417, OCBBF2000831, OCBBF2007039, PLACE6019600, PLACE7007379, PLACE7012111, PLACE7016526, TESTI4018436, TESTI4020596, TESTI4032128, TESTI4036048, THYMU3012402, THYMU3033759, THYMU3036953, THYMU3046360, TKIDN2011160, TRACH3016455, TRACH3018519, TRACH3021544, TRACH3025316, TRACH3030855, TRACH3038399, UTERU3014647, UTERU3021850

[0147] The following two clones are also predicted to belong to the category of protein synthesis and/or transport-related protein.

TBAES2004105, UTERU2036507

[0148] The clones predicted to belong to the category of cellular defense-related protein are the following five clones.

BRACE2012947, BRHIP2029529, BRTHA3003736, THYMU3015571, TRACH3022296

[0149] The clones predicted to belong to the category of development and/or differentiation-related protein are the following 16 clones.

ASTRO3000154, BRACE3034964, BRAWH3004350, BRAWH3029538, BRAWH3038252, BRHIP3007424, BRTHA2024712, BRTHA3011265, FEKID2002493, NT2RP8003490, NT2RP8006452, OCBBF3025503, PLACE7002303, TESTI2026024, TRACH3028180, UTERU3016070

[0150] The following one clone is also predicted to belong to the category of development and/or differentiation-related protein.

BRCAN2019772

[0151] The clones predicted to belong to the category of DNA-binding and/or RNA-binding protein are the following 119 clones.

[0152] ASTRO2016114, BEAST2000981, BRACE2012947, BRACE2019348, BRACE3020669, BRACE3025719, BRACE3026844, BRACE3031743, BRACE3034183, BRACE3041162, BRACE3046152, BRALZ2013621, BRAMY2040915, BRAMY2046537, BRAMY3000692, BRAMY3007078, BRAMY3011501, BRAMY3011581, BRAMY3014027, BRAMY3018754, BRAMY4000962, BRAWH3000446, BRAWH3011577, BRAWH3011623, BRAWH3013009, BRAWH3013264, BRAWH3017477, BRAWH3028796, BRAWH3031342, BRAWH3032571, BRAWH3034775, BRAWH3035936, BRAWH3036247, BRAWH3036334, BRAWH3038827, BRCAN2020331, BRCOC2012386, BRHIP2027077, BRHIP3004725, BRHIP3028246, BRSSN2015497, BRTHA2024712, BRTHA3000456, BRTHA3003736, BRTHA3010212, BRTHA3014000, BRTHA3028339, CHONS2000797, CHONS2002829, CTONG2001932, CTONG2011801, D90ST2003106, FCBBF3020030, FCBBF5000384, FEBRA2028457, HCASM2008154, NETRP2004017, NT2RI3008179, NT2RI3009480, NT2RP7016508, NT2RP8003490, NTONG2003805, NTONG2008483, OCBBF2016928, OCBBF3004487, OCBBF3008392, OCBBF3020263, OCBBF3021361, OCBBF3022166, PLACE7002303, PLACE7004103, PLACE7005169, PLACE7009757, PROST2002078, PUAEN2000594, SMINT2011509, SPLEN2012571, SPLEN2028417, T1ESE2000609, T1ESE2000904, TESTI4002868, TESTI4003796, TESTI4003944, TESTI4005322, TESTI4005470, TESTI4005653, TESTI4032128, TESTI4039575, TESTI4039904, TESTI4052775, THYMU3008105, THYMU3012983, THYMU3014372, THYMU3020869, THYMU3021586, THYMU3026000, THYMU3030072, THYMU3033759, THYMU3037052, THYMU3040829, TLIVE2001616, TRACH3003458, TRACH3004424, TRACH3005191, TRACH3008508, TRACH3010079, TRACH3010167, TRACH3010342, TRACH3015951, TRACH3021778, TRACH3021883, TRACH3022109, TRACH3028180, TRACH3036750, UTERU2037423, UTERU3012293, UTERU3013302, UTERU3016070, UTERU3022588

[0153] The following eight clones are also predicted to belong to the category of DNA-binding and/or RNA-binding protein.

BRACE3002184, BRCAN2019772, CTONG2002832, TESTI2046536, TESTI4002988, TESTI4005500, TRACH1000193, TRACH3019290

[0154] The clones predicted to belong to the category of ATP binding and/or GTP-binding protein are the following 68 clones.

[0155] BRACE2013009, BRACE2016896, BRACE3002344, BRACE3014714, BRACE3017253, BRACE3036283, BRACE3051819, BRAMY3011501, BRAMY3018248, BRAWH2014053, BRAWH3015175, BRAWH3024506, BRAWH3029385, BRAWH3032571, BRAWH3037428, BRAWH3041556, BRAWH3047692, BRCAN2000923, BRCAN2002892, BRCAN2003269, BRCAN2006051, BRHIP3007195, BRHIP3027191, BRHIP3041587, BRSTN2012069, BRTHA2020910, BRTHA3003736, HSYRA2004550, KIDNE2010049, NETRP2003448, NT2RP7016508, OCBBF2003518, OCBBF3004487, PLACE6001933, PLACE6019600, PLACE7004961, PLACE7006498, PLACE7011559, PLACE7016526, PUAEN2006639, SMINT2011406, TESTI2009739, TESTI2040377, TESTI4004917, TESTI4013474, TESTI4021569, TESTI4028182, TESTI4049786, TESTI4052219, THYMU3014372, THYMU3032798, THYMU3041428, THYMU3047115, TRACH3005191, TRACH3009061, TRACH3009701, TRACH3012891, TRACH3019370, TRACH3020769, TRACH3022960, TRACH3023960, TRACH3024081, TRACH3038399, TSTOM2001571, UTERU2024042, UTERU3010919, UTERU3012414, UTERU3019708

[0156] The following two clones are also predicted to belong to the category of ATP binding and/or GTP-binding protein.

CTONG2003764, TRACH3021066

[0157] The 104 clones shown below are clones which were unassignable to any of the above-mentioned categories, but have been predicted to have some function based on homology search using t heir full-length nucleotide sequences. Clone Name and Definition in the result of homology search, demarcated by a double slash mark (//), are shown below.

BLADE2002310//SH3-domain binding protein 1 [Homo sapiens]

BLADE2007799//Hepatocellular carcinoma-associated antigen 66.

BRACE2017359//Mus musculus suppressor of Ty 6 homolog (S. cerevisiae) (Supt6h)

BRACE2017872//nuclear receptor-binding SET-domain protein 1 [Mus musculus]

BRACE3009416//testis specific ankyrin-like protein 1 [Homo sapiens]

BRACE3016020//SBBI31 protein [Homo sapiens]

BRACE3019570//SNAP-25-interacting protein [Rattus norvegicus]

BRACE3022303//Pax transcription activation domain interacting protein [Mus musculus]

BRACE3022340//SNAP-25-interacting protein [Rattus norvegicus]

BRACE3026290//Homo sapiens lethal giant larvae homolog 2 [Homo sapiens]

BRACE3032631//F-box protein FBX13 [Mus musculus].

BRACE3040239//Deltex3 [Mus musculus]

BRACE3047482//tripartite motif-containing 9 [Homo sapiens]

BRACE3049714//NYD-TSPG protein [Homo sapiens]

BRACE3052410//IDN3 protein [Homo sapiens]

BRACE3052595//Nim2 [Rattus norvegicus]

BRALZ2014054//cenexin 2 [Rattus norvegicus].

BRAMY3007471//gene trap locus F3b; transcript expressed during hematopoiesis 2 [Mus musculus]

BRAMY3010321//MRIP-1 protein [Homo sapiens]

BRAMY3014613//SH3-domain binding protein 1 [Homo sapiens]

BRAMY4001863//Mus musculus enabled homolog (Drosophila) (Enah), mRNA

BRAWH2011796//S-100 protein, alpha chain.

BRAWH3008167//CUB and Sushi multiple domains 1 [Homo sapiens]

BRAWH3009961//Nim2 [Rattus norvegicus]

BRAWH3010726//phosphatidylinositol transfer protein, membrane-associated; Drosophila retinal degeneration B [Homo sapiens]

BRAWH3015017//axonemal dynein light chain p33.

BRAWH3024231//Tetratricopeptide repeat protein 4.

BRAWH3026938//semaF cytoplasmic domain associated protein 3; semaphorin cytoplasmic domain-associated protein 3A [Mus musculus]

BRAWH3027533//rap2 interacting protein x [Homo sapiens].

BRAWH3030910//Sec23-interacting protein p125 [Homo sapiens]

BRAWH3031710//serologically defined colon cancer antigen 33 [Homo sapiens]

BRAWH3033293//synaptopodin [Homo sapiens]

BRAWH3042568//ventral anterior homeobox containing gene 1 [Mus musculus]

BRAWH3043034//Mus musculus neuregulin 1 (Nrg1)

BRAWH3044122//Munc13-1 [Rattus norvegicus]

BRHIP2026346//lymphocyte specific formin related protein; formin-related gene in leukocytes [Mus musculus]

BRHIP2027563//host cell factor homolog [Homo sapiens]

BRHIP3002114//rTS beta protein [Homo sapiens]

BRHIP3003795//cytochrome P450 retinoid metabolizing protein [Homo sapiens]

BRHIP3006786//peptidylprolyl isomerase (cyclophilin)-like 2; cyclophilin-like protein CyP-60 [Homo sapiens]

BRHIP3017109//Socs-5 [Mus musculus]

BRHIP3019643//Homo sapiens gamma tubulin ring complex protein (76p gene) (76P), mRNA

BRHIP3032148//brain-enriched guanylate kinase-associated [Rattus norvegicus]

BRSTN2006638//synaptotagmin interacting protein 1 [Rattus norvegicus]

BRSTN2016892//BUP protein [Homo sapiens]

BRSTN2016992//DRR1 protein (TU3A protein).

BRSTN2017151//COP9 (constitutive photomorphogenic), subunit 7a (Arabidopsis); COP9 complex S7a [Mus musculus]

BRTHA2020642//DRR1 protein (TU3A protein).

BRTHA3018409//synaptotagmin-like 4; granuphilin-a; granuphilin-b; granuphilin

BRTHA3019183//<Ca2+>dependent activator protein for secretion; Ca2+-dependent activator protein for secretion [Mus musculus]

CHONS2001834//tumor endothelial marker 7 precursor [Homo sapiens]

CTONG2009570//rab11 binding protein [Bos taurus].

CTONG2012123//Mus musculus enabled homolog (Drosophila) (Enah), mRNA

CTONG2027591//Mus musculus pecanex homolog (Drosophila) (Pcnx), mRNA.

CTONG3003669//high-glucose-regulated protein 8 [Homo sapiens]

ERLTF2002178//Kelch-like protein X.

HHDPC2008185//jerky [Mus musculus]

NT2RI3001573//F-box protein FBL10 [Mus musculus].

NT2RI3007095//Mus musculus neuregulin 1 (Nrg1), mRNA.

NT2RP8001363//signal peptide, CUB domain, EGF-like 1 [Mus musculus]

NT2RP8001584//alpha integrin binding protein 63 [Homo sapiens]

NT2RP8001604//CUB and Sushi multiple domains 1 [Homo sapiens]

OCBBF3019269//Homo sapiens Dvl-binding protein IDAX (inhibition of the Dvl and Axin complex) (IDAX)

OCBBF3022827//putative Rab5 GDP/GTP exchange factor homologue [Homo sapiens]

OCBBF3023913//Mus musculus protein phosphatase 1, regulatory (inhibitor) subunit 1C (Ppp1r1c)

PLACE6003004//rTS beta protein [Homo sapiens]

PLACE6008315//similar to ALPHA-ACTININ, SARCOMERIC (F-ACTIN CROSS LINKING PROTEIN) (D. melanogaster) [Homo sapiens].

PLACE6010925//NY-REN-50 antigen [Homo sapiens]

PLACE7012127//AAA-ATPase TOB3 [Homo sapiens]

PROST2016566//erythroblast macrophage protein [Mus musculus]

SYNOV2017179//EBP50-PDZ interactor of 64 kD [Homo sapiens]

SYNOV3000345//upregulated by 1,25-dihydroxyvitamin D-3 [Homo sapiens]

TBAES2003917//NG28 protein [Mus musculus]

TESTI2001364//lactate dehydrogenase A-like [Homo sapiens]

TESTI2004601//NYD-TSPG protein [Homo sapiens]

TESTI2009497//GPI-anchored protein p137 (p137GPI).

TESTI4002774//oxysterol binding protein 2 [Mus musculus]

TESTI4003579//FH1/FH2 domains-containing protein (Formin homolog overexpressed in spleen) (FHOS).

TESTI4003703//retinoblastoma-associated protein RAP140 [Homo sapiens]

TESTI4013742//antigen identified by monoclonal antibody 2A8 [Mus musculus]

TESTI4014908//dedicator of cyto-kinesis 2 [Mus musculus]

TESTI4018506//tomosyn [Rattus norvegicus]

TESTI4020342//H326 [Homo sapiens]

TESTI4024294//WW domain binding protein 2 [Mus musculus]

TESTI4039451//B29 protein [Homo sapiens]

TESTI4041482//Rattus norvegicus SEC15 homolog (S. cerevisiae) (Sec15), mRNA

TESTI4043166//lymphocyte specific formin related protein; formin-related gene in leukocytes [Mus musculus]

TESTI4047328//otogelin [Mus musculus]

THYMU3011717//exocyst component protein 70 kDa homolog (S. cerevisiae)

THYMU3016822//erythroblast macrophage protein [Mus musculus]

THYMU3026479//secretory pathway component Sec31B-1 [Homo sapiens]

THYMU3028702//chromosome condensation-related SMC-associated

protein 1; chromosome condensation-related SMC-associated

protein 1; KIAA0159 gene product [Homo sapiens]

THYMU3029719//AAA-ATPase TOB3 [Homo sapiens]

THYMU3038347//tumor stroma and activated macrophage protein DLM-1 [Homo sapiens]

THYMU3038603//WW domain binding protein 2 [Mus musculus]

THYMU3040830//AD-012 protein [Homo sapiens]

THYMU3041603//gamma-tubulin complex protein 2 [Homo sapiens]

TKIDN2003396//Homo sapiens paternally expressed 10 (PEG10), mRNA

TRACH2011057//D-type cyclin-interacting protein 1; MAID protein [Homo sapiens]

TRACH3004412//clusterin-like 1 (retinal); unknown prepropeptide specific to rod photoreceptor [Homo sapiens]

TRACH3012106//erythrocyte protein band 4.1-like 3 [Mus musculus]

UTERU3009775//PAPIN [Rattus norvegicus]

UTERU3010892//adaptor-related protein complex 3, delta 1 subunit; adaptin, delta [Homo sapiens]

UTERU3017995//p47 [Homo sapiens]

[0158] So far no information suggesting the function of the following six clones has been provided by the homology search. The functions of these clones may be clarified when an updated database becomes available in future. Clone names are shown below.

BRAMY3008096, BRAMY3016953, BRHIP3038037, BRTHA3004432, TESTI4052089, UTERU3020583

[0159] Further, a polypeptide will not always belong solely to a single category of the above-described functional categories, and therefore, a polypeptide may belong to any of the predicted functional categories. Further analyses may yield additional functions for clones classified into these functional categories.

[0160] Detailed descriptions concerning each domain or motif can be found in websites linked from the websites of Pfam, InterPro (http://www.ebi.ac.uk/interpro/), PROSITE (http://www.expasy.ch/cgi-bin/prosite-list.pl), or such. This information can be found based on domain/motif names, and accession numbers of hit data obtained through domain searches of Pfam (http://www.sanger.ac.uk/Software/Pfam/index.shtml) (see Example 5) for amino acid sequences deduced from the 2,495 full-length clones of the present invention whose full-length nucleotide sequences have been determined. PROSITE in particular enables comparison of unique functional categories. The functions of polypeptides encoded by the 825 clones with hit data in Pfam were predicted and classified into the 14 functional categories described below. As a result, 646 clones were estimated to encode proteins belonging to these categories.

[0161] Secretory and/or membrane protein (102 clones)

[0162] Glycoprotein-related protein (83 clones)

[0163] Signal transduction-related protein (128 clones)

[0164] Transcription-related protein (149 clones)

[0165] Disease-related protein (four clones)

[0166] Enzyme and/or metabolism-related protein (271 clones)

[0167] Cell division- and/or cell proliferation-related protein (14 clones)

[0168] Cytoskeleton-related protein (51 clones)

[0169] Nuclear protein and/or RNA synthesis-related protein (29 clones)

[0170] Protein synthesis- and/or transport-related protein (51 clones)

[0171] Cellular defense-related protein (four clones)

[0172] Development and/or differentiation-related protein (one clone)

[0173] DNA- and/or RNA-binding protein (192 clones)

[0174] ATP- and/or GTP-binding protein (42 clones)

[0175] The clones predicted to belong to the category of secretory protein and/or membrane protein are the following 92 clones.

[0176] 3NB692004045, BRACE3002264, BRACE3009392, BRACE3013418, BRACE3024879, BRACE3032385, BRACE3039378, BRACE3042432, BRACE3050504, BRACE3051621, BRAMY2046537, BRAMY3004126, BRAWH2000256, BRAWH2011812, BRAWH3023156, BRAWH3025157, BRAWH3027880, BRAWH3036270, BRAWH3037265, BRAWH3042772, BRCAN2003269, BRCAN2022126, BRCOC2006164, BRHIP3002000, BRHIP3005944, BRHIP3008320, BRHIP3011567, BRHIP3014675, BRHIP3016032, BRHIP3017558, BRHIP3025795, BRHIP3033557, BRHIP3039509, BRSTN2010089, BRTHA2031917, BRTHA3011194, BRTHA3012265, BRTHA3014547, COLON2005735, JCMLC2000273, KIDNE2004531, LYMPB2002236, NT2RP7019682, NT2RP8001363, NT2RP8003787, OCBBF2003518, OCBBF2004478, OCBBF2009536, OCBBF2018618, OCBBF3004487, OCBBF3025475, OCBBF3028001, PEBLM2005615, PLACE6010936, PLACE7004103, PLACE7011559, PLACE7018304, TESTI2018335, TESTI2022323, TESTI2024267, TESTI2036822, TESTI4003602, TESTI4004539, TESTI4005399, TESTI4008305, TESTI4010544, TESTI4014415, TESTI4021569, TESTI4023096, TESTI4026080, TESTI4040559, TESTI4049899, THYMU3015647, THYMU3021404, THYMU3023400, THYMU3026532, THYMU3030752, THYMU3040172, THYMU3044075, TRACH3003357, TRACH3004113, TRACH3004747, TRACH3005699, TRACH3006800, TRACH3009061, TRACH3019370, TRACH3023373, TRACH3031678, TRACH3032150, UTERU3001946, UTERU3016273, UTERU3017626

[0177] The following ten clones are also predicted to belong to the category of secretory protein and/or membrane protein.

BRAWH3013197, BRAWH3028645, BRAWH3046240, BRCAN2019772, PROST2010326, TESTI2043585, TESTI4005158, THYMU3024602, THYMU3046350, TRACH1000193

[0178] The clones predicted to belong to the category of glycoprotein-related protein are the following 81 clones.

[0179] 3NB692004045, ADIPS2000069, BRACE2017397, BRACE3013874, BRACE3017253, BRACE3039358, BRAMY2040915, BRAMY3015549, BRAWH3009961, BRAWH3023415, BRAWH3049544, BRHIP3017558, BRHIP3025795, BRHIP3036371, BRHIP3036715, BRHIP3038735, BRTHA2019726, BRTHA2020400, BRTHA2020721, BRTHA3017791, CERVX2000968, FELNG2000720, JCMLC2000273, KIDNE2004531, NT2RP8008057, OCBBF2000831, OCBBF2004478, OCBBF2030927, PEBLM2005615, PLACE7006090, SPLEN2025012, STOMA2004663, TESTI2021654, TESTI2052670, TESTI4008305, TESTI4022158, TESTI4031173, TESTI4032128, TESTI4037949, TESTI4051424, THYMU3002825, THYMU3014173, THYMU3016518, THYMU3020221, THYMU3025118, THYMU3026306, THYMU3026532, THYMU3037772, THYMU3040746, TLUNG2001445, TLUNG2001600, TRACH3003357, TRACH3004113, TRACH3004412, TRACH3005274, TRACH3005699, TRACH3006800, TRACH3011082, TRACH3011184, TRACH3012659, TRACH3015354, TRACH3018261, TRACH3018907, TRACH3019058, TRACH3019621, TRACH3019807, TRACH3020930, TRACH3021023, TRACH3024512, TRACH3026299, TRACH3028441, TRACH3029670, TRACH3031316, TRACH3034680, TRACH3036103, TRACH3037505, TUTER2001433, UTERU3001946, UTERU3010409, UTERU3011398, UTERU3015647

[0180] The following two clones are also predicted to belong to the category of glycoprotein-related protein.

BRAWH3028645, TESTI4005158

[0181] The clones predicted to belong to the category of signal transduction-related protein are the following 125 clones.

[0182] BLADE2002310, BLADE2008809, BRACE2047975, BRACE3002344, BRACE3003866, BRACE3004767, BRACE3013418, BRACE3015898, BRACE3017253, BRACE3042046, BRACE3044172, BRACE3045424, BRACE3046491, BRACE3051621, BRACE3052321, BRACE3052595, BRAMY3005184, BRAMY3009491, BRAMY3010321, BRAMY3014613, BRAMY3015547, BRAMY3017920, BRAWH2012866, BRAWH3009961, BRAWH3017180, BRAWH3018063, BRAWH3019026, BRAWH3022431, BRAWH3024186, BRAWH3026349, BRAWH3027574, BRAWH3027806, BRAWH3029385, BRAWH3031342, BRAWH3032340, BRAWH3035914, BRAWH3037428, BRAWH3044122, BRAWH3047692, BRCAN2000923, BRCAN2002892, BRCOC2001355, BRHIP3003306, BRHIP3006294, BRHIP3006786, BRHIP3011460, BRHIP3017109, BRHIP3021019, BRHIP3028570, BRHIP3037543, BRHIP3041587, BRTHA2026290, BRTHA2027250, BRTHA3014547, BRTHA3020771, BRTHA3021708, BRTHA3023403, BRTHA3026916, CTONG2009570, ERLTF2002369, FEKID2001001, FEKID2002637, FELNG2001953, KIDNE2010049, LYMPB2002344, N1ESE2000698, NETRP2003448, NT2RI2004818, NTONG2008483, OCBBF3006986, OCBBF3021086, OCBBF3021502, OCBBF3023175, PLACE5000492, PLACE6000055, PLACE6019600, PLACE7009936, PLACE7014247, PLACE7016526, PUAEN2006639, SKMUS2008585, SKMUS2009557, SMINT2017964, SPLEN2007689, SYNOV2017179, SYNOV4009575, TESTI4002774, TESTI4004695, TESTI4010902, TESTI4012960, TESTI4013474, TESTI4020342, TESTI4020596, TESTI4021197, TESTI4022158, TESTI4028042, TESTI4029731, TESTI4033177, TESTI4036048, TESTI4046073, TESTI4047808, TESTI4049786, TESTI4051865, THYMU3013785, THYMU3025683, THYMU3032798, TRACH2024730, TRACH3003037, TRACH3003357, TRACH3005173, TRACH3011538, TRACH3018519, TRACH3020605, TRACH3024020, TRACH3030176, TRACH3031660, TRACH3036750, TRACH3038399, TSTOM2001571, UTERU2024042, UTERU3001029, UTERU3006720, UTERU3010919, UTERU3021231, UTERU3022168

[0183] The following three clones are also predicted to belong to the category of signal transduction-related protein.

BRAMY3008096, TESTI4052089, TRACH3021066

[0184] The clones predicted to belong to the category of transcription-related protein are the following 141 clones.

[0185] ASTRO2016114, BEAST2000981, BRACE2019348, BRACE3025719, BRACE3026844, BRACE3026947, BRACE3029021, BRACE3034183, BRACE3040239, BRACE3041162, BRACE3047482, BRAMY2041347, BRAMY3000692, BRAMY3007078, BRAMY3011581, BRAMY3014027, BRAMY4002575, BRAWH2000256, BRAWH2014053, BRAWH2016209, BRAWH3000446, BRAWH3005886, BRAWH3009961, BRAWH3013009, BRAWH3013264, BRAWH3015175, BRAWH3015610, BRAWH3017477, BRAWH3021580, BRAWH3022651, BRAWH3027533, BRAWH3027880, BRAWH3028796, BRAWH3031342, BRAWH3031710, BRAWH3032571, BRAWH3035936, BRAWH3036247, BRAWH3036334, BRAWH3042787, BRAWH3044122, BRAWH3046424, BRCAN2021452, BRCOC2012386, BRHIP2027077, BRHIP2029663, BRHIP3005037, BRHIP3007609, BRHIP3017256, BRHIP3019824, BRHIP3027651, BRHIP3028246, BRHIP3039592, BRSSN2011843, BRSTN2012069, BRTHA3000456, BRTHA3003225, BRTHA3010212, BRTHA3014000, BRTHA3028339, CHONS2000797, CTONG2006235, CTONG2011801, FCBBF3020030, FEBRA2002260, HCASM2008154, KIDNE2018268, NETRP2003103, NETRP2004017, NT2RI3009480, NTONG2003805, NTONG2008483, OCBBF2014745, OCBBF2016928, OCBBF3001333, OCBBF3008392, OCBBF3019269, OCBBF3020263, OCBBF3022827, OCBBF3025503, OCBBF3026361, PLACE7005169, PLACE7007973, PLACE7009757, PLACE7018512, SMINT2014721, SPLEN2012571, SPLEN2036608, T1ESE2000904, TESTI2036822, TESTI2040377, TESTI4000370, TESTI4000621, TESTI4001679, TESTI4002799, TESTI4003796, TESTI4003944, TESTI4005322, TESTI4005470, TESTI4024494, TESTI4028182, TESTI4032913, TESTI4039904, TESTI4051054, TESTI4052775, THYMU2008207, THYMU2038199, THYMU3008105, THYMU3012983, THYMU3014372, THYMU3021586, THYMU3022434, THYMU3026000, THYMU3030072, THYMU3034671, THYMU3037617, THYMU3043200, THYMU3045704, TKIDN2003396, TLIVE2001616, TLUNG2000654, TRACH3002752, TRACH3003037, TRACH3003458, TRACH3004113, TRACH3004412, TRACH3004424, TRACH3005274, TRACH3010079, TRACH3010167, TRACH3015951, TRACH3022109, TRACH3026303, TRACH3028180, TRACH3036750, UTERU2037423, UTERU3012293, UTERU3015011, UTERU3016070, UTERU3018172, UTERU3022588

[0186] The following eight clones are also predicted to belong to the category of transcription-related protein.

BRACE3002184, BRCAN2019772, CTONG2002832, TESTI2046536, TESTI4002988, TESTI4005500, TRACH1000193, TRACH3019290

[0187] The clones predicted to belong to the category of disease-related protein are the following four clones.

BRAWH3041928, BRHIP3000859, BRTHA3018409, THYMU3025642

[0188] The clones predicted to belong to the category of enzyme and/or metabolism-related protein are the following 264 clones.

[0189] BRACE1000475, BRACE2003628, BRACE2012528, BRACE2013132, BRACE2016896, BRACE2035120, BRACE2042541, BRACE2047975, BRACE3002344, BRACE3009392, BRACE3013418, BRACE3015898, BRACE3017253, BRACE3019941, BRACE3024444, BRACE3031315, BRACE3031372, BRACE3032537, BRACE3033525, BRACE3034183, BRACE3034964, BRACE3039288, BRACE3039454, BRACE3041059, BRACE3042409, BRACE3044172, BRACE3046491, BRACE3049714, BRACE3050270, BRACE3051819, BRACE3052410, BRACE3052595, BRAMY3007078, BRAMY3009491, BRAMY3011581, BRAMY3014613, BRAMY4000915, BRAWH2000256, BRAWH2002333, BRAWH2012866, BRAWH2014053, BRAWH2016785, BRAWH3009961, BRAWH3010657, BRAWH3013264, BRAWH3015175, BRAWH3017180, BRAWH3017259, BRAWH3019026, BRAWH3021724, BRAWH3022431, BRAWH3023415, BRAWH3024186, BRAWH3028796, BRAWH3029385, BRAWH3029806, BRAWH3032571, BRAWH3033513, BRAWH3034668, BRAWH3034743, BRAWH3037979, BRAWH3041556, BRAWH3043295, BRAWH3044122, BRAWH3044985, BRAWH3046424, BRAWH3047692, BRAWH3048724, BRAWH3049544, BRCAN2003814, BRCAN2006051, BRCAN2015402, BRCAN2021325, BRCOC2001355, BRCOC2006164, BRHIP2029663, BRHIP3001481, BRHIP3002000, BRHIP3002114, BRHIP3002141, BRHIP3003063, BRHIP3003126, BRHIP3003795, BRHIP3004725, BRHIP3005307, BRHIP3005673, BRHIP3007195, BRHIP3007223, BRHIP3011082, BRHIP3012289, BRHIP3016032, BRHIP3019643, BRHIP3021019, BRHIP3032374, BRHIP3033557, BRHIP3035006, BRHIP3037543, BRHIP3038030, BRHIP3041587, BRSSN2004710, BRSSN2011843, BRSTN2011961, BRSTN2016918, BRTHA2001304, BRTHA2005448, BRTHA2026290, BRTHA2026311, BRTHA2027250, BRTHA2030036, BRTHA2033683, BRTHA2035743, BRTHA2036295, BRTHA2037247, BRTHA3003736, BRTHA3010135, BRTHA3014547, BRTHA3021786, BRTHA3023403, BRTHA3026916, CHONS2002829, COLON2004351, CTONG2010330, CTONG2020582, CTONG2026987, FCBBF3001018, FCBBF3021191, FEBRA2013570, FEBRA2026582, FEHRT2002708, FEKID2002637, HHDPC2008185, HSYRA2004550, KIDNE2004531, KIDNE2010049, LYMPB2002236, NT2RI2004818, NT2RI3001967, NT2RP7016508, NT2RP8003490, NT2RP8003787, NT2RP8005546, OCBBF2000831, OCBBF2007039, OCBBF2024589, OCBBF3001616, OCBBF3004487, OCBBF3021086, OCBBF3023175, OCBBF3025503, OCBBF3026088, OCBBF3026361, PLACE5000492, PLACE6003004, PLACE7003985, PLACE7004103, PLACE7004961, PLACE7006090, PLACE7007379, PLACE7008136, PLACE7012111, PLACE7014247, PLACE7016526, SKMUS2008585, SKMUS2009557, SMINT2011406, SMINT2011509, SYNOV2017179, SYNOV4003174, SYNOV4009139, T1ESE2000609, T1ESE2002665, TESTI2001364, TESTI2005112, TESTI2007490, TESTI2018335, TESTI2021112, TESTI2021654, TESTI2030901, TESTI2037877, TESTI2049062, TESTI4000621, TESTI4002774, TESTI4002799, TESTI4003404, TESTI4003565, TESTI4003602, TESTI4003703, TESTI4005399, TESTI4007671, TESTI4010544, TESTI4010721, TESTI4012960, TESTI4017854, TESTI4020342, TESTI4020596, TESTI4020819, TESTI4021129, TESTI4021197, TESTI4023096, TESTI4024494, TESTI4026080, TESTI4028182, TESTI4031066, TESTI4033177, TESTI4040598, TESTI4041482, TESTI4046073, TESTI4047808, TESTI4049786, TESTI4051424, TESTI4051865, TESTI4052219, THYMU3000390, THYMU3002825, THYMU3014372, THYMU3023400, THYMU3025683, THYMU3026306, THYMU3026479, THYMU3031878, THYMU3032798, THYMU3034671, THYMU3036953, THYMU3041428, THYMU3047115, THYMU3047891, TRACH2022113, TRACH2024730, TRACH3003037, TRACH3005274, TRACH3006800, TRACH3009008, TRACH3009061, TRACH3011313, TRACH3016455, TRACH3017409, TRACH3018108, TRACH3018261, TRACH3019621, TRACH3021544, TRACH3023516, TRACH3024020, TRACH3024081, TRACH3024342, TRACH3024512, TRACH3025316, TRACH3026303, TRACH3026650, TRACH3027229, TRACH3027701, TRACH3029329, TRACH3032150, TRACH3036750, TRACH3038399, TSTOM2001571, UTERU2024042, UTERU3001946, UTERU3010604, UTERU3010919, UTERU3015299, UTERU3017441, UTERU3019708, UTERU3020090, UTERU3022168

[0190] The following seven clones are also predicted to belong to the category of enzyme and/or metabolism-related protein.

ADRGL2011190, BRAMY3008096, CTONG2002832, TESTI4052089, THYMU3024602, THYMU3044175, TRACH3021066

[0191] The clones predicted to belong to the category of cell division and/or cell proliferation-related protein are the following 13 clones.

BRACE3022303, BRAWH3017260, BRHIP2008756, BRHIP3028570, BRSTN2006638, NT2RI2004818, PLACE7009563, PLACE7016526, SMINT2014721, THYMU3025642, THYMU3033626, TRACH3029329, UTERU3010919

[0192] The following one clone is also predicted to belong to the category of cell division and/or cell proliferation-related protein.

TBAES2007481

[0193] The clones predicted to belong to the category of cytoskeleton-related protein are the following 51 clones.

[0194] BRACE2046976, BRACE3013874, BRACE3047482, BRACE3051819, BRAMY3015549, BRAWH3015175, BRAWH3018548, BRAWH3021580, BRAWH3024186, BRAWH3024506, BRAWH3029385, BRAWH3032298, BRAWH3049544, BRHIP3003340, BRHIP3012736, BRHIP3036936, BRSTN2016918, BRTHA2020910, BRTHA2025869, BRTHA2031917, BRTHA3011361, BRTHA3025073, CTONG2008989, HSYRA2007338, LYMPB2002458, OCBBF3008835, OCBBF3027969, PEBLM2006298, PLACE7000266, PLACE7004103, PLACE7004961, SMINT2011406, SYNOV4003174, TESTI2006543, TESTI2034913, TESTI4001517, TESTI4005653, TESTI4008305, TESTI4041049, TESTI4051424, TESTI4051865, THYMU3020221, THYMU3038158, TLUNG2000654, TRACH3002890, TRACH3006379, TRACH3012460, TRACH3018524, TRACH3020769, TRACH3028837, UTERU3011837

[0195] The clones predicted to belong to the category of nuclear protein and/or RNA synthesis-related protein are the following 29 clones.

[0196] BRACE2016896, BRACE3032537, BRACE3034183, BRACE3039288, BRAWH3013264, BRAWH3032571, BRCOC2006164, BRHIP3004725, BRSSN2011843, BRTHA2026290, BRTHA3003736, BRTHA3014547, NT2RP7016508, NT2RP8005546, OCBBF3004487, OCBBF3021086, OCBBF3026361, PLACE5000492, TESTI4000621, TESTI4002799, TESTI4010721, TESTI4012960, THYMU3014372, THYMU3033626, THYMU3041428, TRACH3017409, TRACH3029462, UTERU3010919, UTERU3019708

[0197] The clones predicted to belong to the category of protein synthesis and/or transport-related protein are the following 50 clones.

[0198] BRACE3033525, BRACE3041059, BRAMY4001652, BRAWH3010657, BRAWH3013264, BRAWH3034668, BRAWH3036247, BRAWH3037428, BRAWH3037979, BRCAN2000923, BRCAN2002892, BRCAN2006051, BRCAN2021325, BRCAN2021718, BRHIP2029663, BRHIP3002000, BRHIP3003126, BRHIP3007223, BRHIP3011082, BRSTN2010089, BRTHA2036295, BRTHA3012265, CHONS2002829, D90ST2004417, HHDPC2008185, NETRP2003448, OCBBF2007039, OCBBF3021086, PLACE6003004, PLACE6010925, PLACE7006498, PLACE7007379, PLACE7012111, PLACE7016526, TESTI2023903, TESTI2036285, TESTI4003602, TESTI4012960, TESTI4014415, TESTI4030864, TESTI4051865, THYMU3036953, THYMU3047891, TRACH3004113, TRACH3006800, TRACH3009061, TRACH3021544, TRACH3026650, UTERU3001946, UTERU3012414

[0199] The following one clone is also predicted to belong to the category of protein synthesis and/or transport-related protein.

CTONG2002832

[0200] The clones predicted to belong to the category of cellular defense-related protein are the following four clones.

BRHIP3027191, SYNOV4009575, TESTI2023903, TRACH3029462

[0201] The clones predicted to belong to the category of development and/or differentiation-related protein are the following one clone.

CHONS2000797

[0202] The clones predicted to belong to the category of DNA-binding and/or RNA-binding protein are the following 185 clones.

[0203] ASTRO2016114, BEAST2000981, BRACE2012625, BRACE2016896, BRACE2019348, BRACE3019941, BRACE3025719, BRACE3026844, BRACE3026947, BRACE3029021, BRACE3031743, BRACE3032537, BRACE3034183, BRACE3039288, BRACE3040239, BRACE3041162, BRACE3047482, BRACE3050270, BRALZ2013621, BRAMY2041347, BRAMY3000692, BRAMY3007078, BRAMY3011581, BRAMY3014027, BRAMY4002575, BRAWH2000256, BRAWH2014053, BRAWH2016209, BRAWH3000446, BRAWH3005886, BRAWH3009961, BRAWH3011623, BRAWH3013009, BRAWH3013264, BRAWH3015175, BRAWH3015610, BRAWH3017477, BRAWH3021580, BRAWH3022651, BRAWH3027533, BRAWH3027607, BRAWH3027880, BRAWH3028796, BRAWH3031342, BRAWH3031710, BRAWH3032571, BRAWH3035403, BRAWH3035936, BRAWH3036247, BRAWH3036334, BRAWH3038055, BRAWH3042787, BRAWH3044122, BRCAN2020331, BRCAN2021452, BRCOC2006164, BRCOC2012386, BRHIP2027077, BRHIP2029663, BRHIP3002141, BRHIP3004725, BRHIP3005037, BRHIP3007609, BRHIP3017256, BRHIP3019824, BRHIP3027651, BRHIP3028246, BRHIP3039592, BRSSN2011843, BRSTN2012069, BRTHA2026290, BRTHA2037247, BRTHA3000456, BRTHA3003225, BRTHA3003736, BRTHA3010212, BRTHA3014000, BRTHA3014547, BRTHA3028339, CHONS2000797, CTONG2003517, CTONG2006235, CTONG2011801, CTONG2026987, D90ST2003106, FCBBF3020030, FEBRA2002260, FEBRA2028457, FEHRT2002708, HCASM2008154, KIDNE2018268, NETRP2003103, NETRP2004017, NT2RI3009480, NT2RP7016508, NT2RP8005546, NTONG2003805, NTONG2008483, OCBBF2014745, OCBBF2016928, OCBBF3001333, OCBBF3001616, OCBBF3004487, OCBBF3008392, OCBBF3019269, OCBBF3020263, OCBBF3021086, OCBBF3021361, OCBBF3022827, OCBBF3025503, OCBBF3026361, PLACE5000492, PLACE7004103, PLACE7005169, PLACE7007973, PLACE7008136, PLACE7009757, PLACE7018512, PROST2002078, SMINT2011509, SMINT2014721, SPLEN2012571, SPLEN2036608, T1ESE2000609, T1ESE2000904, TESTI2036822, TESTI2040377, TESTI4000370, TESTI4000621, TESTI4001679, TESTI4002799, TESTI4003796, TESTI4003944, TESTI4005322, TESTI4005470, TESTI4012960, TESTI4024494, TESTI4028182, TESTI4032913, TESTI4039904, TESTI4051054, TESTI4052775, THYMU2008207, THYMU2038199, THYMU3008105, THYMU3012983, THYMU3014372, THYMU3021586, THYMU3022434, THYMU3023400, THYMU3026000, THYMU3030072, THYMU3037617, THYMU3040829, THYMU3041428, THYMU3043200, THYMU3045704, TKIDN2003396, TLIVE2001616, TLUNG2000654, TRACH3002752, TRACH3003037, TRACH3003458, TRACH3004113, TRACH3004412, TRACH3004424, TRACH3005274, TRACH3010079, TRACH3010167, TRACH3015951, TRACH3017409, TRACH3021778, TRACH3022109, TRACH3026303, TRACH3028180, TRACH3036750, UTERU2037423, UTERU3012293, UTERU3015011, UTERU3016070, UTERU3019708, UTERU3020090, UTERU3022168, UTERU3022588, UTERU3023141

[0204] The following seven clones are also predicted to belong to the category of DNA-binding and/or RNA-binding protein.

BRACE3002184, BRCAN2019772, CTONG2002832, TESTI4002988, TESTI4005500, TRACH1000193, TRACH3019290

[0205] The clones predicted to belong to the category of ATP binding and/or GTP-binding protein are the following 41 clones.

[0206] BRACE3042409, BRAWH2002333, BRAWH2014053, BRAWH3015175, BRAWH3029385, BRAWH3029806, BRAWH3034743, BRAWH3037428, BRAWH3047692, BRCAN2000923, BRCAN2002892, BRCAN2022126, BRCOC2001355, BRCOC2006164, BRHIP3007195, BRSSN2004710, BRTHA2026290, BRTHA2033683, BRTHA3026916, CTONG2020582, HSYRA2004550, NETRP2003448, PLACE6019600, PLACE7004961, PLACE7006498, PLACE7016526, SMINT2011406, TESTI4010544, TESTI4014415, TESTI4028182, TESTI4029731, TESTI4040559, TESTI4041482, TESTI4052219, THYMU3013785, THYMU3047115, TRACH2024730, TRACH3024081, TRACH3029329, TRACH3031660, UTERU3012414

[0207] The following one clone is also predicted to belong to the category of ATP binding and/or GTP-binding protein.

ADRGL2011190

[0208] The following 172 clones had hit data in Pfam (see Example 5), although it remains unclear as to which of the above-described categories each clone belongs. If data on polypeptides with a similar domain or motif can be accumulated, and their functions clarified in more detail, they may be classified into any of the above-described categories.

[0209] BLADE2001031, BRACE2010336, BRACE2013009, BRACE2017872, BRACE2023744, BRACE2034434, BRACE3001973, BRACE3002756, BRACE3005903, BRACE3014523, BRACE3019570, BRACE3022340, BRACE3026345, BRACE3036283, BRACE3040644, BRACE3043597, BRACE3046466, BRACE3048615, BRALZ2010842, BRAMY2031516, BRAMY2041384, BRAMY3002886, BRAMY3011501, BRAMY3015086, BRAMY3018754, BRAMY4000962, BRAWH2011796, BRAWH2016223, BRAWH3001783, BRAWH3003573, BRAWH3008167, BRAWH3011331, BRAWH3011577, BRAWH3014609, BRAWH3021574, BRAWH3022347, BRAWH3022719, BRAWH3024231, BRAWH3026938, BRAWH3027440, BRAWH3030772, BRAWH3030910, BRAWH3033448, BRAWH3034775, BRAWH3038252, BRAWH3038324, BRAWH3038827, BRAWH3042438, BRAWH3042568, BRAWH3044151, BRAWH3045118, BRAWH3048374, BRCAN2010665, BRCAN2019907, BRCAN2020234, BRCAN2025093, BRCOC2006639, BRHIP2013958, BRHIP2026346, BRHIP2027563, BRHIP3001878, BRHIP3004710, BRHIP3005142, BRHIP3005231, BRHIP3006449, BRHIP3007424, BRHIP3009753, BRHIP3010289, BRHIP3020733, BRHIP3029409, BRHIP3030230, BRHIP3033734, BRSSN2015497, BRTHA2038345, BRTHA3011187, BRTHA3021971, BRTHA3026161, BRTHA3027171, BRTHA3027638, CHONS2001287, CHONS2001834, DFNES2011221, ERLTF2002178, FCBBF3012443, FCBBF3024911, FCBBF5000384, FEBRA2000805, FEBRA2023498, FEKID2002493, HCHON2009766, JCMLC2002751, KIDNE2015987, NT2RI3001573, NT2RI3005923, NT2RI3009524, NT2RP7007387, NT2RP7020343, NT2RP8000633, NT2RP8001604, NT2RP8006452, NT2RP8007920, NT2RP8009119, OCBBF3001202, OCBBF3005330, OCBBF3023913, OCBBF3026979, PEBLM2001803, PLACE6001933, PLACE7002303, PUAEN2000594, PUAEN2000684, SMINT2010753, SPLEN2022785, SPLEN2028417, SYNOV2003326, TBAES2003917, TBAES2007428, TESOP2002005, TESTI2005564, TESTI2009739, TESTI2011020, TESTI2018867, TESTI2049041, TESTI4001569, TESTI4002141, TESTI4002868, TESTI4004031, TESTI4007965, TESTI4011926, TESTI4013742, TESTI4024294, TESTI4035898, TESTI4039451, TESTI4041984, TESTI4043166, TESTI4046873, TESTI4047328, TESTI4047569, TESTI4051015, TESTI4052598, THYMU3003007, THYMU3012402, THYMU3015042, THYMU3015571, THYMU3017761, THYMU3019476, THYMU3021755, THYMU3033649, THYMU3040126, THYMU3046360, TKIDN2011051, TKIDN2011160, TLIVE2007736, TRACH3007689, TRACH3012106, TRACH3015346, TRACH3016805, TRACH3018606, TRACH3022296, TRACH3022758, TRACH3023203, TRACH3028855, TRACH3030855, TRACH3032570, UTERU2016669, UTERU3001394, UTERU3009775, UTERU3011558, UTERU3011579, UTERU3017995, UTERU3018255, UTERU3021850

[0210] Likewise, the following seven clones also had hit data in Pfam (see Example 5), although it remains unclear as to which of the above-described categories each clone belongs. When data on polypeptides with a similar domain or motif are accumulated, and their functions are clarified in more detail, these clones may also be classified into any of the above-described categories.

BRACE3026993//TSC-22/dip/bun family

BRACE3046450//PDZ domain (Also known as DHR or GLGF).//PDZ domain (Also known as DHR or GLGF).//PDZ domain (Also known as DHR or GLGF). 1//PDZ domain (Also known as DHR or GLGF).

CTONG2003764//Phorbol esters/diacylglycerol binding domain (C1 domain)

TBAES2004105//Thrombospondin type 1 domain

[0211] TBAES2007379//EGF-like domain//EGF-like domain//Trypsin Inhibitor like cysteine rich domain//EGF-like domain//EGF-like domain//Keratin, high sulfur B2 protein//EGF-like domain//EGF-like domain//Granulins//EGF-like domain//EGF-like domain//EGF-like domain

TBAES2008133//PDZ domain (Also known as DHR or GLGF).

UTERU2036507//Thrombospondin type 1 domain//NTR/C345C module

[0212] The function of a motif or domain may sometimes belong to more than one of the above-described functional categories, and there is also the possibility that such a motif or domain may be predicted to belong to every functional category. As new polypeptide data are accumulated and novel domains and motifs are found, a new functional domain or motif may be identified by re-analyzing deduced amino acid sequences in homology searches using updated databases. Thus in the future, the remaining clones, for which there are currently no hit data, may be classified into any of the above-described categories.

[0213] Since the polypeptides encoded by clones of the present invention contain full-length amino acid sequences, it is possible to analyze their biological activity and effect on cellular conditions such as cell proliferation and differentiation, by expressing the polypeptides as recombinant polypeptides using an appropriate expression system, injecting the recombinant into a cell, or raising a specific antibody against that polypeptide.

[0214] The biological activities of respective polypeptides can be analyzed by the methods as shown below.

Secretory Protein, Transmembrane Protein:

[0215] “Ion Channels” (Ed., R. H. Ashley, 1995) of “The Practical Approach Series” (IRL PRESS),

[0216] “Growth. Factors” (Eds., I. McKay, I. Leigh, 1993),

[0217] “Extracellular Matrix” (Eds., M. A. Haralson, J. R. Hassell, 1995);

Glycoprotein-Related Protein:

[0218] “Glycobiology” (Eds., M. Fukuda, A. Kobata, 1993) of “The Practical Approach Series” (IRL PRESS),

[0219] “Glycoprotein Analysis in Biomedicine” (Ed., Elizabeth F. Hounsell, 1993) of “Method in Molecular Biology” (Humana Press) series;

Signal Transduction-Related Protein:

[0220] “Signal Transduction” (Ed., G. Milligan, 1992) of “The Practical Approach Series” (IRL PRESS),

[0221] “Protein Phosphorylation” (Ed., D. G. Hardie, 1993), or

[0222] “Signal Transduction Protocols” (Eds., David A. Kendall, Stephen J. Hill, 1995) of “Method in Molecular Biology” (Humana Press) series;

Transcription-Related Protein:

[0223] “Gene Transcription” (Eds., B. D. Hames, S. J. Higgins, 1993) of “The Practical Approach Series” (IRL PRESS),

[0224] “Transcription Factors” (Ed., D. S. Latchman, 1993);

Enzyme and/or Metabolism-Related Protein:

[0225] “Enzyme Assays” (Eds., ROBERT EISENTHAL and MICHAEL J. DANSON, 1992) of “The Practical Approach Series” (IRL PRESS);

Cell Division and/or Cell Proliferation-Related Protein:

[0226] “Cell Growth, Differentiation and Senescence” (Ed., GEORGE STUDZINSKI, 2000) of “The Practical Approach Series” (IRL PRESS);

Cytoskeleton-Related Protein:

[0227] “Cytoskeleton: Signalling and Cell Regulation” (Eds., KERMIT L. CARRAWAY and CAROLIE A. CAROTHERS CARRAWAY, 2000) of “The Practical Approach Series” (IRL PRESS),

[0228] “Cytoskeleton Methods and Protocols” (Ed., Gavin, Ray H., 2000) of “Method in Molecular Biology” (Humana Press) series; Nuclear protein and/or RNA synthesis-related protein:

[0229] “Nuclear Receptors” (Ed., DIDIER PICARD, 1999) of “The Practical Approach Series” (IRL PRESS),

[0230] “RNA Processing” (Eds., STEPHEN J. HIGGINS and B. DAVID HAMES, 1994);

Protein Synthesis and/or Transport-Related Protein:

[0231] “Membrane Transport” (Ed., STEPHEN A. BALDWIN, 2000) of “The Practical Approach Series” (IRL PRESS),

[0232] “Protein Synthesis Methods and Protocols” (Eds., Martin, Robin, 1998) of “Method in Molecular Biology” (Humana Press) series;

Cellular Defense-Related Protein:

[0233] “DNA Repair Protocols” (Henderson, Daryl S., 1999) of

[0234] “Method in Molecular Biology” (Humana Press) series,

[0235] “Chaperonin Protocols” (Eds., Schneider, Christine, 2000);

Development and/or Differentiation-Related Protein:

[0236] “Developmental Biology Protocols” (Eds., ROBERT EISENTHAL and MICHAEL J. DANSON, 1992) of “Method in Molecular Biology” (Humana Press) series;

DNA- and/or RNA-Binding Protein:

[0237] “DNA-Protein Interactions Principles and Protocols” (Eds. Kneale, G. Geoff, 1994) of “Method in Molecular Biology” (Humana Press) series,

[0238] “RNA-Protein Interaction Protocols” (Eds., Haynes, Susan R., 1999);

ATP- and/or GTP-Binding Protein:

[0239] “Signal Transduction Protocols” (Eds., David A. Kendall, Stephen J. Hill, 1995) of “Method in Molecular Biology” (Humana Press) series.

[0240] When other techniques are used, the activity of a polypeptide can be analyzed according to the description in Methods in Enzymology (Academic Press).

[0241] In the above-described categorization, a clone predicted to belong to the secretory and/or membrane protein category refers to a clone having hit data in a homology search with some annotation to suggest that the clone encodes a secretory and/or membrane protein, such as a growth factor, cytokine, hormone, signal, transmembrane, membrane, extracellular matrix, receptor, G-protein coupled receptor, ionic channel, voltage-gated channel, calcium channel, cell adhesion, collagen, and connective tissue protein; or a clone in which the results of PSORT and SOSUI analyses for deduced ORF suggest the presence of a nucleotide sequence encoding a signal sequence or transmembrane region; or a clone in which the results of a domain/motif search with Pfam suggest the presence of domains/motifs that suggest receptors, ion channels, hormones, or growth factors, for example, seven-transmembrane receptors, pancreatic hormone peptides, ion transport proteins, or fibroblast growth factors.

[0242] A clone predicted to belong to the glycoprotein-related protein category means a clone having hit data in a homology search with some annotation, such as glycoprotein, suggesting that the clone encodes a glycoprotein-related protein; or a clone in which the results of a domain/motif search with Pfam indicate the presence of domains and motifs such as a glycoprotein or glycosyltransferase that suggest the involvement of glycobiology, for example, immunoglobulin domain or glycosyl transferases group 1.

[0243] A clone predicted to belong to the signal transduction-related protein category means a clone having hit data in a homology search with some annotation, such as serine/threonine-protein kinase, tyrosine-protein kinase, SH3 domain, and SH2 domain, suggesting that the clone encodes a signal transduction-related protein; or a clone in which the results of a domain/motif search with Pfam suggest the presence of domains and motifs that suggest a protein kinase, dephosphoenzyme, SH2 domain, or small G protein, for example, eukaryotic protein kinase domain, protein phosphatase 2C, or Ras family.

[0244] A clone predicted to belong to the transcription-related protein category means a clone having hit data in a homology search with some annotation, such as transcription regulation, zinc finger, and homeobox, suggesting that the clone encodes a transcription-related protein; or a clone in which the results of a domain/motif search with Pfam suggest the presence of domains and motifs that suggest a transcription factor or transcription-controlling protein, for example, bZIP transcription factor, Zinc finger, or C2H2 type.

[0245] A clone predicted to belong to the category of disease-related protein means a clone having hit data in a homology search with some annotation, such as disease mutation and syndrome, suggesting that the clone encodes a disease-related protein; or a clone whose full-length nucleotide sequence has hit data in Swiss-Prot, nr, or RefSeq, where that hit data corresponds to genes or polypeptides which have been deposited in the Online Mendelian Inheritance in Man (OMIM) (http://www.ncbi.nlm.nih.gov/Omim/), the human gene and disease database described later; or a clone in which the results of a domain/motif search with Pfam suggest the presence of domains and motifs, that suggest proteins with disease-specific expression or proteins involved in increasing or decreasing expression (depending on the disease), for example, Wilm's tumor protein or von Hippel-Lindau disease tumor suppressor protein.

[0246] A clone predicted to belong to the category of enzyme and/or metabolism-related protein means a clone having hit data in a homology search with some annotation, such as metabolism, oxidoreductase, and E. C. No. (Enzyme commission number), suggesting that the clone encodes an enzyme and/or metabolism-related protein; or a clone in which the results of a domain/motif search with Pfam suggests the presence of domains and motifs that suggest transferase, synthase, or hydrolase, for example, aldehyde dehydrogenase family, chitin synthase, or glucose-6-phosphate dehydrogenase.

[0247] A clone predicted to belong to the category of cell division and/or cell proliferation-related protein means a clone having hit data in a homology search with some annotation, such as cell division, cell cycle, mitosis, chromosomal protein, cell growth, and apoptosis, suggesting that the clone encodes a cell division and/or cell proliferation-related protein; or a clone in which the results of a domain/motif search with Pfam suggest the presence of domains and motifs that suggest cyclin or cell proliferation-controlling protein, for example, cyclin or cell division protein.

[0248] A clone predicted to belong to the category of cytoskeleton-related protein means a clone having hit data in a homology search with some annotation, such as structural protein, cytoskeleton, actin-binding, and microtubles, suggesting that the clone encodes a cytoskeleton-related protein; or a clone in which the results of a domain/motif search with Pfam suggest the presence of domains and motifs that suggest actin, kinesin, or fibronectin, for example, actin, fibronectin type I domain, or kinesin motor domain.

[0249] A clone predicted to belong to the category of nuclear protein and/or RNA synthesis-related protein means a clone having hit data in a homology search with some annotation, such as nuclear protein, RNA splicing, RNA processing, RNA helicase, and polyadenylation, suggesting that the clone encodes a nuclear protein and/or RNA synthesis-related protein; or a clone in which the results of a domain/motif search with Pfam suggest the presence of domains and motifs that suggest splicing factor, RNA synthase, or helicase, for example, hepatitis C virus RNA dependent RNA polymerase or DEAD/DEAH box helicase.

[0250] A clone predicted to belong to the category of protein synthesis and/or transport-related protein means a clone having hit data in a homology search with some annotation, such as translation regulation, protein biosynthesis, amino-acid biosynthesis, ribosomal protein, protein transport, and signal recognition particle, suggesting that the clone encodes a protein synthesis and/or transport-related protein; or a clone in which the results of a domain/motif search with Pfam suggest the presence of domains and motifs that suggest translation-relating protein, ubiquitin-relating protein, or ribosomal protein, for example, translation initiation factor SUI1, ubiquitin family, or ribosomal protein L16.

[0251] A clone predicted to belong to the category of cellular defense-related protein means a clone having hit data in a homology search with some annotation, such as heat shock, DNA repair, and DNA damage, suggesting that the clone encodes a cellular defense-related protein; or a clone in which the results of a domain/motif search with Pfam suggest the presence of domains and motifs that suggest chaperonin or DNA repair protein, for example, HSP90 protein or DNA mismatch repair protein.

[0252] A clone predicted to belong to the category of development and/or differentiation-related proteins means a clone having hit data in a homology search with some annotation, such as developmental protein, suggesting that the clone encodes a development and/or differentiation-related protein; or a clone in which the results of a domain/motif search with Pfam suggest the presence of domains and motifs that suggest organogenesis-relating protein, for example, floricaula/leafy protein.

[0253] A clone predicted to belong to the category of DNA- and/or RNA-binding protein means a clone having hit data in a homology search with some annotation, such as DNA-binding, RNA-binding, and such; or a clone in which the results of a domain/motif search with Pfam suggest the presence of domains and motifs that suggest DNA/RNA-relating enzyme group including transcription factor and DNA ligase or Zinc-finger relating protein, for example, transcription factor WhiB, B-box zinc finger, or tRNA synthetases class I (C).

[0254] A clone predicted to belong to the category of ATP- and/or GTP-binding protein means a clone having hit data in a homology search with some annotation, such as ATP-binding, GTP-binding, and such; or a clone in which the results of a domain/motif search with Pfam suggest the presence of domains and motifs that suggest ATP/GTP-relating enzyme group including ATPase or G protein, for example, E1-E2 ATPase or Ras family.

[0255] It is possible to perform functional analysis of a protein involved in a disease as described above. It is also possible to analyze correlation between a protein's expression or activity and a certain disease by using a specific antibody obtained by using the expressed protein. Alternatively, it is possible to utilize the OMIM database, which is a database of human genes and diseases, to analyze the protein. New information is constantly being deposited into this database. Therefore, it is possible that one skilled in the art will find a new relationship between a particular disease and a gene of the present invention by using the most up-to-date database. Proteins involved in diseases are useful for developing diagnostic markers or medicines for regulation of their expression and activity, or as gene therapy targets.

[0256] The proteins may have a variety of functions, including but not limited to the above 14 categories, such as secretory proteins, membrane proteins, signal transduction-related proteins, glycoprotein-related proteins, or transcription-related proteins. When searching OMIM using these keywords, the proteins are revealed to be involved in a great number of diseases (the results of the OMIM search for secretory and membrane proteins are shown below as an Example). Associations between proteins related to signal transduction or transcription and diseases are reported in “Transcription Factor Research-1999” (Fujii, Tamura, Morohashi, Kageyama, and Satake edit, (1999) Jikken-Igaku Zoukan, Vol. 17, No. 3), and “Gene Medicine” (1999) Vol. 3, No. 2). As another example and as described in “Biology of Cancer”, many proteins are involved in cancers, including enzymes and/or metabolism-related proteins, cytoskeleton-related proteins, cell division and/or cell proliferation-related proteins as well as secretory proteins, membrane proteins, signal transduction-related proteins, glycoprotein-related proteins, transcription-related proteins, (S. Matsubara, 1992) of Life Science series (Shokabo). As the above example clearly demonstrates, not only disease-related proteins but also secretory proteins, membrane proteins, signal transduction-related proteins, glycoprotein-related proteins, and transcription-related proteins are often involved in diseases, and thus such proteins can be useful targets in the field of medical industry.

[0257] The results of the OMIM search for secretory and membrane proteins are shown below. The keywords used were:

(1) secretion protein,

(2) membrane protein,

(3) channel, and

(4) extracellular matrix.

[0258] Only the OMIM accession numbers are shown in the search results. The first 50 accession numbers displayed in the search results are provided. Using this number, data showing the relationship between a disease and a gene or protein can be seen. OMIM data is renewed daily.

1) Secretion Protein

[0259] When searching under these keywords, 436 genes were registered as being associated with disease. The OMIM numbers for 50 of these genes are as follows.

[0260] *604667, *104760, *176860, *139320, *118910, *151675, *107400, *604029, #200100, *177061, *600946, *601693, *139250, *176880, *600998, *603850, *605083, *147572, *179513, *606055, *604028, *125950, *157147, *246700, *602926, *600560, *602421, *603215, 185860, *600174, *179512, *109270, *179511, *179510, *179509, *601146, *604710, *177020, *138120, *170280, *600626, *164160, *168470, *154545, *603831, *601652, *104311, *601489, *603062, *102720

2) Membrane Protein

[0261] When searching under these keywords, 1873 genes were registered as being associated with disease. The OMIM numbers for 50 of these genes are as follows.

[0262] *130500, *605704, *305360, *153330, *109270, *173610, *170995, *120920, *170993, *309060, *104776, *602333, *605703, *602690, *605943, *159430, *600897, *606867, *133090, *601178, *602413, *602003, *604405, *605940, *603237, *109280, *606958, *600378, *606959, *602173, *107776, *602334, *125305, *602335, *309845, *601134, *605731, *606795, *185881, *607178, *603177, *154045, *603214, *603718, *606909, *600594, *603241, *606629, *603657, *600182

3) Channel (Member of Membrane Proteins)

[0263] When searching under these keywords, 449 genes were registered as being associated with disease. The OMIM numbers for 50 of these genes are as follows.

[0264] *176266, *600724, *605427, *182390, *123825, *114208, *114206, *114205, *176267, *600053, *601784, *603749, *182392, *600937, *603415, *114204, *114209, *114207, *607370, *604528, *604527, *601011, *600760, *192500, *118425, *600228, *600359, *176261, *602235, *600761, *182389, *300008, *600877, *605692, *300338, *602232, *603537, *182391, *176263, *602343, *601328, *605874, *604385, *603939, *602208, *601534, *601958, *603220, *600504, *607368

4) Extracellular Matrix

[0265] When searching under these keywords, 267 genes were registered as being associated with disease. The OMIM numbers for 50 of these genes are as follows.

[0266] *605912, *602201, *603479, *604633, *601418, *601548, *115437, *154870, *120361, *602285, *600754, *602262, *134797, *602261, *603320, *603321, *604871, *604629, *601807, #154700, *128239, *600310, *605470, *185250, *178990, *603767, *120360, *185261, *116935, *607056, *253700, *190180, *600985, *188826, *193300, *276901, *308700, *120150, *602109, *120324, *600514, #177170, #247100, #116920, #200610, *605127, *601313, *601652, *120180, *154790

[0267] In addition to these, various keywords shown in the above-mentioned categorizations or others can be used in an OMIM search to reveal involvement in disease.

[0268] Further, the use of nucleotide sequences of cDNAs of the present invention enables the expression frequency of genes corresponding to those cDNAs to be analyzed. Gene function can be predicted based on information obtained by expression frequency analysis.

[0269] There are several methods for analyzing the expression level of genes involved in disease. Differences in gene expression levels between diseased and normal tissues can be studied by analytical methods using, for example, Northern blotting, RT-PCR, DNA microarrays, etc. (Experimental Medicine, Vol. 17, No. 8, 980-1056 (1999); Cell Engineering (additional volume) DNA Microarray and Advanced PCR Methods, Muramatsu & Nawa (eds.), Shujunsya (2000)). In addition to these analysis methods, computer analysis can be used to compare the nucleotide sequences of expressed genes, and hence to analyze expression frequency. For example, in the “BODYMAP” database, gene clones are randomly extracted from cDNA libraries of various tissues and/or cells, clones homologous to each other are assigned to a single cluster based on 3′-end nucleotide sequence homology information, genes are then classified into clusters, and the number of clones in each cluster is compared to gain information on expression frequency (http://bodymap.ims.u-tokyo.ac.jp/).

[0270] When these analytical methods result in observation of an explicit difference between gene expression levels in diseased tissues and normal tissues, it can be concluded that the gene is closely involved in the disease or disorder. When gene expression is explicitly different between normal cells and cells reproducing specific disease-associated features, even if they are not diseased tissues, it can be concluded that the gene is closely involved in a disease or disorder.

[0271] Of the 1,995 clones whose full-length nucleotide sequences were revealed, genes involved in a particular pathology or function were selected using the database shown below (see Example 8; “Expression frequency analysis in silico”). The database used in the analyses of the present invention contains the nucleotide sequences of 1,402,069 clones, a sufficiently large population for analysis. Sequence information in the database was obtained by randomly selecting cDNA clones from cDNA libraries derived from the various tissues and cells shown in Example 1, and determining the 5′-end sequences thereof.

[0272] The nucleotide sequence of each clone in this database was then categorized (clustered) based on nucleotide sequence homology determined with a search program. The number of clones belonging to each cluster of each library was determined and normalized; and the ratio of a certain gene in a cDNA library was determined. This analysis provided information on the expression frequency of a gene in the tissue or cell that was the source of the cDNA library.

[0273] In order to analyze the expression of genes corresponding to the nucleotide sequences of cDNAs of the present invention in tissues and cells, the libraries from the tissues or cells, which had been used in large-scale cDNA analyses, were taken as subjects for comparison of expression levels between different tissues or cells. Namely, expression frequency was analyzed by comparing the previously normalized values between tissues or cells from which were derived the 600 or more cDNA clones whose nucleotide sequences had been analyzed. This analysis showed that the cDNA clones corresponded to the genes involved in the pathologies and functions indicated below. Each value in Tables 2 to 24 indicated below represents a relative expression frequency; a higher value indicates a higher expression level. Genes included in these Tables do not indicate such a big difference between compared libraries, but when compared with other tissue- or gene-derived libraries based on Example 9, they indicate a significant difference. Thus, these genes are specific to a tissue or cell, and can be considered useful diagnostic markers for disease, as well as useful for analyzing molecular mechanisms.

Osteoporosis-Related Genes

[0274] Osteoporosis is a pathology in which bones are easily broken owing to an overall decrease in bone components. The onset involves the balance between the functions of osteoblast producing bone and osteoclast absorbing bone, namely bone metabolism. Genes involved in the increase of osteoclasts differentiating from precursor cells of monocyte/macrophage line (Molecular Medicine 38. 642-648. (2001)) are thus genes involved in osteoporosis relevant to bone metabolism.

[0275] Nucleotide sequence-based analysis was carried out to identify genes whose expression frequencies were higher or lower in CD34+ cells (cells expressing glycoprotein CD34) treated with osteoclast differentiation factor (Molecular Medicine 38. 642-648. (2001)), compared to untreated CD34+ cells, which are precursor cells in monocyte/macrophage lines. The result of comparative analysis of frequency between the cDNA libraries prepared from the RNA of CD34+ cells (CD34C), and from the RNA of CD34+ cells treated with the osteoclast differentiation factor (D30ST, D60ST or D90ST) (Table 2), showed that the genes whose expression levels differed between the two were twelve clones indicated below.

BRAWH3018063, BRHIP3020046, BRSSN2013696, BRSTN2012069, BRTHA2027229, D90ST2003106, D90ST2003989, D90ST2004417, OCBBF2016928, TESTI4005653, TESTI4013474, THYMU3032798

[0276] These clones are involved in osteoporosis.

Genes Involved in Neural Cell Differentiation

[0277] Genes involved in neural cell differentiation are useful for treating neurological disease. Genes with varying expression levels in response to induction of cellular differentiation in neural cells are thought to be involved in neurological disease.

[0278] A survey was performed for genes whose expression levels varied in response to induction of differentiation (stimulation by retinoic acid (RA) or growth inhibitor treatment after RA stimulation) in cultured cells of a neural strain, NT2. The result of comparative analysis of cDNA libraries derived from undifferentiated NT2 cells (NT2RM) and cells subjected to differentiation treatment (NT2RP, NT2RI or NT2NE) (Table 3) showed that the genes whose expression levels differed between the two were 102 clones indicated below.

[0279] BLADE2004849, BRACE2003628, BRACE2012528, BRAMY2023939, BRAMY2031516, BRAMY4002628, BRAWH3010461, BRAWH3017259, BRAWH3018063, BRAWH3022651, BRAWH3024186, BRCAN2019653, BRCAN2022126, BRCOC2012386, BRHIP3002000, BRHIP3007223, BRHIP3021019, BRSTN2011961, BRSTN2012069, BRTHA2033155, BRTHA3010212, BRTHA3011194, BRTHA3011265, BRTHA3017791, BRTHA3021971, CHONS2002829, CTONG2006235, FCBBF3012443, FEBRA2026582, LIVER2008465, NT2NE2011107, NT2NE2016041, NT2RI2004818, NT2RI2009233, NT2RI2010795, NT2RI2015533, NT2RI2023671, NT2RI2028537, NT2RI3001573, NT2RI3001967, NT2RI3005861, NT2RI3005923, NT2RI3007095, NT2RI3008179, NT2RI3009480, NT2RI3009524, NT2RP7003439, NT2RP7007387, NT2RP7014178, NT2RP7014778, NT2RP7016508, NT2RP7017139, NT2RP7019682, NT2RP7020343, NT2RP8000633, NT2RP8001363, NT2RP8001407, NT2RP8001584, NT2RP8001604, NT2RP8001605, NT2RP8003490, NT2RP8003657, NT2RP8003787, NT2RP8005546, NT2RP8006452, NT2RP8006521, NT2RP8007416, NT2RP8007503, NT2RP8007920, NT2RP8008057, NT2RP8009119, NT2RP8009248, NTONG2008483, OCBBF2003518, OCBBF3001333, OCBBF3004908, PLACE7004103, PROST2017910, SMINT2009292, SPLEN2012571, T1ESE2000904, TESTI4002072, TESTI4002774, TESTI4002799, TESTI4005653, TESTI4007965, TESTI4012960, TESTI4018436, THYMU3001776, THYMU3002887, THYMU3029795, THYMU3041428, THYMU3047115, TRACH3003872, TRACH3004424, TRACH3006717, TRACH3007625, TRACH3009008, TRACH3016805, TRACH3016885, TRACH3026303, UTERU2016669

[0280] These genes are neurological disease-related genes.

Genes Involved in Alzheimer's Disease

[0281] Alzheimer's disease is a cranial neurological disease characterized by memory loss. As the disease advances, patients can no longer support themselves and require nursing. Alzheimer's disease eventually leads to brain atrophication. Environmental factors such as stress, and vascular factors such as hypertension and cholesterolemia, are assumed but not confirmed to contribute to the onset of Alzheimer's disease. Genes whose expression levels differ between normal brain tissues and tissues affected with Alzheimer's disease are expected to be involved in Alzheimer's disease. Such genes can be used to elucidate the disease's onset mechanism and in genetic diagnosis. cDNA libraries derived from the cerebral cortex of Alzheimer patients (BRALZ and BRASW) and a library derived from the whole tissues of a normal brain (BRAWH) were analyzed and compared (Table 4). Genes whose expression levels differed between the two were the 298 clones and five clones listed below.

[0282] ASTRO2016114, BRACE2002392, BRACE2012528, BRACE3004371, BRACE3004767, BRACE3022340, BRACE3031185, BRACE3031743, BRACE3032385, BRACE3032631, BRACE3039358, BRACE3040863, BRACE3042432, BRACE3045981, BRALZ2003119, BRALZ2007661, BRALZ2008930, BRALZ2010842, BRALZ2011337, BRALZ2013621, BRALZ2013690, BRALZ2014054, BRAMY2031516, BRAMY3002329, BRAMY3004126, BRAMY3005912, BRAMY3008436, BRAWH2000256, BRAWH2002333, BRAWH2004078, BRAWH2010364, BRAWH2010619, BRAWH2011796, BRAWH2011812, BRAWH2011958, BRAWH2012054, BRAWH2012866, BRAWH2013955, BRAWH2014053, BRAWH2016209, BRAWH2016223, BRAWH2016305, BRAWH2016514, BRAWH2016562, BRAWH2016785, BRAWH3000446, BRAWH3000884, BRAWH3001053, BRAWH3001638, BRAWH3001783, BRAWH3001833, BRAWH3003244, BRAWH3003573, BRAWH3003975, BRAWH3004335, BRAWH3004350, BRAWH3005037, BRAWH3005886, BRAWH3005892, BRAWH3005896, BRAWH3008167, BRAWH3008559, BRAWH3008867, BRAWH3009961, BRAWH3010461, BRAWH3010602, BRAWH3010657, BRAWH3010726, BRAWH3010833, BRAWH3011101, BRAWH3011331, BRAWH3011402, BRAWH3011577, BRAWH3011623, BRAWH3011685, BRAWH3011907, BRAWH3011929, BRAWH3012005, BRAWH3012662, BRAWH3012779, BRAWH3013009, BRAWH3013049, BRAWH3013264, BRAWH3013508, BRAWH3014609, BRAWH3014639, BRAWH3015017, BRAWH3015175, BRAWH3015610, BRAWH3015825, BRAWH3016123, BRAWH3016715, BRAWH3017180, BRAWH3017259, BRAWH3017260, BRAWH3017477, BRAWH3017980, BRAWH3018063, BRAWH3018369, BRAWH3018548, BRAWH3018969, BRAWH3019026, BRAWH3019529, BRAWH3019594, BRAWH3019820, BRAWH3020200, BRAWH3020318, BRAWH3020884, BRAWH3020928, BRAWH3021012, BRAWH3021574, BRAWH3021580, BRAWH3021641, BRAWH3021643, BRAWH3021724, BRAWH3022347, BRAWH3022431, BRAWH3022459, BRAWH3022542, BRAWH3022651, BRAWH3022719, BRAWH3022900, BRAWH3023156, BRAWH3023168, BRAWH3023172, BRAWH3023274, BRAWH3023421, BRAWH3024186, BRAWH3024231, BRAWH3024242, BRAWH3024506, BRAWH3024989, BRAWH3026349, BRAWH3026938, BRAWH3027420, BRAWH3027440, BRAWH3027533, BRAWH3027574, BRAWH3027607, BRAWH3027616, BRAWH3027675, BRAWH3027806, BRAWH3027880, BRAWH3028202, BRAWH3028223, BRAWH3028461, BRAWH3028754, BRAWH3028796, BRAWH3029313, BRAWH3029385, BRAWH3029538, BRAWH3029806, BRAWH3030772, BRAWH3030810, BRAWH3030910, BRAWH3031054, BRAWH3031342, BRAWH3031710, BRAWH3032298, BRAWH3032340, BRAWH3032571, BRAWH3033117, BRAWH3033293, BRAWH3033448, BRAWH3033513, BRAWH3034097, BRAWH3034114, BRAWH3034134, BRAWH3034668, BRAWH3034743, BRAWH3034775, BRAWH3034890, BRAWH3035403, BRAWH3035904, BRAWH3035914, BRAWH3035936, BRAWH3036077, BRAWH3036247, BRAWH3036270, BRAWH3036334, BRAWH3036561, BRAWH3037265, BRAWH3037394, BRAWH3037428, BRAWH3037533, BRAWH3037979, BRAWH3038055, BRAWH3038230, BRAWH3038252, BRAWH3038324, BRCAN2010665, BRCAN2019653, BRCAN2022126, BRCAN2025093, BRCOC2012386, BRHIP2015153, BRHIP2027077, BRHIP3001573, BRHIP3002000, BRHIP3003063, BRHIP3003984, BRHIP3004774, BRHIP3007223, BRHIP3007409, BRHIP3008320, BRHIP3014675, BRHIP3017855, BRHIP3018784, BRHIP3021019, BRHIP3028246, BRHIP3028570, BRSTN2010089, BRSTN2012069, BRSTN2016992, BRTHA2033155, BRTHA3003736, BRTHA3005988, BRTHA3010135, BRTHA3010212, BRTHA3011194, BRTHA3011265, BRTHA3017791, BRTHA3020771, BRTHA3021971, BRTHA3023403, CTONG2006235, CTONG2009033, CTONG2020582, D90ST2003106, DFNES2001829, KIDNE2010049, MESAN2017133, NT2RI2009233, NT2RI2015533, NT2RI3005923, NT2RI3009524, NT2RP7007387, NT2RP8001605, NT2RP8007920, NTONG2008483, OCBBF2003518, OCBBF2018618, OCBBF3001333, OCBBF3004487, PLACE7004103, PLACE7006240, PROST2007444, PROST2017910, TBAES2007428, TESTI2005112, TESTI2021654, TESTI4002072, TESTI4002774, TESTI4002799, TESTI4003602, TESTI4004210, TESTI4005399, TESTI4005653, TESTI4006441, TESTI4013474, TESTI4014908, TESTI4022158, THYMU3000776, THYMU3002887, THYMU3003350, THYMU3021586, THYMU3026000, THYMU3026306, THYMU3026350, THYMU3032798, THYMU3032867, THYMU3037827, THYMU3038214, THYMU3041428, THYMU3044075, TRACH2013585, TRACH3002752, TRACH3003037, TRACH3003872, TRACH3004424, TRACH3006717, TRACH3007625, TRACH3007689, TRACH3008632, TRACH3009008, TRACH3010079, TRACH3016805, TRACH3016885, TRACH3024342, TRACH3024671, TRACH3026303, TRACH3026676, TRACH3028855, TRACH3032570, TRACH3036932, TRACH3038399, UTERU3010409, UTERU3013167 BRACE3046450, BRAWH3013197, BRAWH3028645, BRTHA3004432, TRACH1000193

[0283] These genes are involved in Alzheimer's disease.

Genes Involved in Parkinson's Disease

[0284] Parkinson's disease is a cranial neurological disease characterized by impaired production of the neurotransmitter dopamine in the substantia nigra in the brain. This results in dyskinesia, such as hand tremors, and impaired body movement due to muscular rigidity. Normally, the number of brain neurons gradually decreases with age. However, compared to healthy people, patients with Parkinson's disease experience a rapid and marked decrease in the number of neurons in their substantia nigra. Genes whose expression levels differ between tissues of the whole brain and the nigra are expected to be involved in Parkinson's disease. These genes exhibit nigra-specific alterations in their expression levels, and can be used to elucidate the disease onset mechanism and in gene diagnosis. cDNA libraries derived from the substantia nigra (BRSSN) and a library derived from whole tissues of a normal brain (BRAWH) were analyzed and compared (Table 5). Genes whose expression levels differed between the two were the 305 clones and five clones listed below.

[0285] ASTRO2016114, BRACE2012528, BRACE2017844, BRACE3004371, BRACE3004767, BRACE3022340, BRACE3025719, BRACE3026802, BRACE3031185, BRACE3031743, BRACE3032385, BRACE3032631, BRACE3039358, BRACE3040863, BRACE3042432, BRACE3045981, BRAMY2031516, BRAMY3002329, BRAMY3004126, BRAMY3005912, BRAMY3008436, BRAWH2000256, BRAWH2002333, BRAWH2004078, BRAWH2010364, BRAWH2010619, BRAWH2011796, BRAWH2011812, BRAWH2011958, BRAWH2012054, BRAWH2012866, BRAWH2013955, BRAWH2014053, BRAWH2016209, BRAWH2016223, BRAWH2016305, BRAWH2016514, BRAWH2016562, BRAWH2016785, BRAWH3000446, BRAWH3000884, BRAWH3001053, BRAWH3001638, BRAWH3001783, BRAWH3001833, BRAWH3003244, BRAWH3003573, BRAWH3003975, BRAWH3004335, BRAWH3004350, BRAWH3005037, BRAWH3005886, BRAWH3005892, BRAWH3005896, BRAWH3008167, BRAWH3008559, BRAWH3008867, BRAWH3009961, BRAWH3010461, BRAWH3010602, BRAWH3010657, BRAWH3010726, BRAWH3010833, BRAWH3011101, BRAWH3011331, BRAWH3011402, BRAWH3011577, BRAWH3011623, BRAWH3011685, BRAWH3011907, BRAWH3011929, BRAWH3012005, BRAWH3012662, BRAWH3012779, BRAWH3013009, BRAWH3013049, BRAWH3013264, BRAWH3013508, BRAWH3014609, BRAWH3014639, BRAWH3015017, BRAWH3015175, BRAWH3015610, BRAWH3015825, BRAWH3016123, BRAWH3016715, BRAWH3017180, BRAWH3017259, BRAWH3017260, BRAWH3017477, BRAWH3017980, BRAWH3018063, BRAWH3018369, BRAWH3018548, BRAWH3018969, BRAWH3019026, BRAWH3019529, BRAWH3019594, BRAWH3019820, BRAWH3020200, BRAWH3020318, BRAWH3020884, BRAWH3020928, BRAWH3021012, BRAWH3021574, BRAWH3021580, BRAWH3021641, BRAWH3021643, BRAWH3021724, BRAWH3022347, BRAWH3022431, BRAWH3022459, BRAWH3022542, BRAWH3022651, BRAWH3022719, BRAWH3022900, BRAWH3023156, BRAWH3023168, BRAWH3023172, BRAWH3023274, BRAWH3023421, BRAWH3024186, BRAWH3024231, BRAWH3024242, BRAWH3024506, BRAWH3024989, BRAWH3026349, BRAWH3026938, BRAWH3027420, BRAWH3027440, BRAWH3027533, BRAWH3027574, BRAWH3027607, BRAWH3027616, BRAWH3027675, BRAWH3027806, BRAWH3027880, BRAWH3028202, BRAWH3028223, BRAWH3028461, BRAWH3028754, BRAWH3028796, BRAWH3029313, BRAWH3029385, BRAWH3029538, BRAWH3029806, BRAWH3030772, BRAWH3030810, BRAWH3030910, BRAWH3031054, BRAWH3031342, BRAWH3031710, BRAWH3032298, BRAWH3032340, BRAWH3032571, BRAWH3033117, BRAWH3033293, BRAWH3033448, BRAWH3033513, BRAWH3034097, BRAWH3034114, BRAWH3034134, BRAWH3034668, BRAWH3034743, BRAWH3034775, BRAWH3034890, BRAWH3035403, BRAWH3035904, BRAWH3035914, BRAWH3035936, BRAWH3036077, BRAWH3036247, BRAWH3036270, BRAWH3036334, BRAWH3036561, BRAWH3037265, BRAWH3037394, BRAWH3037428, BRAWH3037533, BRAWH3037979, BRAWH3038055, BRAWH3038230, BRAWH3038252, BRAWH3038324, BRCAN2010665, BRCAN2022126, BRCAN2025093, BRCOC2012386, BRHIP2015153, BRHIP2027077, BRHIP2029643, BRHIP3001573, BRHIP3002000, BRHIP3003063, BRHIP3003984, BRHIP3004774, BRHIP3007223, BRHIP3007409, BRHIP3008320, BRHIP3014675, BRHIP3017855, BRHIP3018784, BRHIP3020046, BRHIP3021019, BRHIP3028246, BRHIP3028570, BRSSN2004303, BRSSN2004710, BRSSN2008464, BRSSN2011843, BRSSN2012157, BRSSN2012198, BRSSN2013696, BRSSN2015497, BRSSN2018218, BRSTN2010089, BRSTN2011961, BRSTN2012069, BRSTN2016992, BRSTN2017104, BRTHA2033155, BRTHA3003736, BRTHA3005988, BRTHA3010135, BRTHA3010212, BRTHA3011194, BRTHA3011265, BRTHA3017791, BRTHA3020771, BRTHA3021971, BRTHA3023403, CTONG2006235, CTONG2009033, CTONG2011801, CTONG2020582, D90ST2003106, DFNES2001829, KIDNE2010049, MESAN2017133, NT2RI2009233, NT2RI2015533, NT2RI3005923, NT2RI3009524, NT2RP7007387, NT2RP8001605, NT2RP8007920, NTONG2008483, OCBBF2003518, OCBBF2018618, OCBBF3001333, OCBBF3004487, PLACE7004103, PLACE7006240, PROST2007444, SMINT2009292, T1ESE2000904, TBAES2007428, TESTI2005112, TESTI2021654, TESTI4002072, TESTI4002774, TESTI4002799, TESTI4003602, TESTI4004210, TESTI4005399, TESTI4005653, TESTI4006441, TESTI4014908, TESTI4022158, THYMU3000776, THYMU3002887, THYMU3003350, THYMU3021586, THYMU3026000, THYMU3026306, THYMU3026350, THYMU3032798, THYMU3032867, THYMU3037827, THYMU3038214, THYMU3044075, TRACH2013585, TRACH3002752, TRACH3003037, TRACH3003872, TRACH3004424, TRACH3006717, TRACH3007625, TRACH3007689, TRACH3008632, TRACH3009008, TRACH3010079, TRACH3016805, TRACH3016885, TRACH3022198, TRACH3024342, TRACH3024671, TRACH3026303, TRACH3026676, TRACH3028855, TRACH3032570, TRACH3036932, TRACH3038399, UTERU3010409, UTERU3013167 BRACE3046450, BRAWH3013197, BRAWH3028645, BRTHA3004432, TRACH1000193

[0286] These genes are involved in Parkinson's disease.

Genes Involved in Short-Term Memory and Dementia

[0287] In the brain, the hippocampus is a highly important memory-related area. The hippocampus functions to establish a memory by judging whether acquired information is necessary, and then accumulating the memory in another area of the brain. According to clinical findings, patients can retain a new memory for only about five minutes with an abnormal, or at worst without a hippocampus. Some dementia patients are presumed to have hippocampus abnormalities. Thus, genes whose expression levels differ between tissues of the whole brain and the hippocampus are expected to be involved in memory or dementia. Such genes can be used to elucidate the mechanism underlying memory, and in gene diagnosis. cDNA libraries derived from the hippocampus (BRHIP) and from the whole tissues of a normal brain (BRAWH) were analyzed and compared (Table 6). Genes whose expression levels differed between the two were the 438 clones and five clones listed below.

[0288] ASTRO2016114, BRACE2002392, BRACE2012528, BRACE2017359, BRACE2017397, BRACE2017844, BRACE3004046, BRACE3004371, BRACE3004767, BRACE3009416, BRACE3022340, BRACE3027931, BRACE3029021, BRACE3031185, BRACE3031743, BRACE3032385, BRACE3032631, BRACE3036156, BRACE3039358, BRACE3040863, BRACE3042326, BRACE3042432, BRACE3045078, BRACE3045981, BRAMY2031516, BRAMY3002329, BRAMY3004126, BRAMY3005184, BRAMY3005912, BRAMY3007078, BRAMY3008436, BRAMY4000915, BRAWH2000256, BRAWH2002333, BRAWH2004078, BRAWH2010364, BRAWH2010619, BRAWH2011796, BRAWH2011812, BRAWH2011958, BRAWH2012054, BRAWH2012866, BRAWH2013955, BRAWH2014053, BRAWH2016209, BRAWH2016223, BRAWH2016305, BRAWH2016514, BRAWH2016562, BRAWH2016785, BRAWH3000446, BRAWH3000884, BRAWH3001053, BRAWH3001638, BRAWH3001783, BRAWH3001833, BRAWH3003244, BRAWH3003573, BRAWH3003975, BRAWH3004335, BRAWH3004350, BRAWH3005037, BRAWH3005886, BRAWH3005892, BRAWH3005896, BRAWH3008167, BRAWH3008559, BRAWH3008867, BRAWH3009961, BRAWH3010461, BRAWH3010602, BRAWH3010657, BRAWH3010726, BRAWH3010833, BRAWH3011101, BRAWH3011331, BRAWH3011402, BRAWH3011577, BRAWH3011623, BRAWH3011685, BRAWH3011907, BRAWH3011929, BRAWH3012005, BRAWH3012662, BRAWH3012779, BRAWH3013009, BRAWH3013049, BRAWH3013264, BRAWH3013508, BRAWH3014609, BRAWH3014639, BRAWH3015017, BRAWH3015175, BRAWH3015610, BRAWH3015825, BRAWH3016123, BRAWH3016715, BRAWH3017180, BRAWH3017259, BRAWH3017260, BRAWH3017477, BRAWH3017980, BRAWH3018063, BRAWH3018369, BRAWH3018548, BRAWH3018969, BRAWH3019026, BRAWH3019529, BRAWH3019594, BRAWH3019820, BRAWH3020200, BRAWH3020318, BRAWH3020884, BRAWH3020928, BRAWH3021012, BRAWH3021574, BRAWH3021580, BRAWH3021641, BRAWH3021643, BRAWH3021724, BRAWH3022347, BRAWH3022431, BRAWH3022459, BRAWH3022542, BRAWH3022651, BRAWH3022719, BRAWH3022900, BRAWH3023156, BRAWH3023168, BRAWH3023172, BRAWH3023274, BRAWH3023421, BRAWH3024186, BRAWH3024231, BRAWH3024242, BRAWH3024506, BRAWH3024989, BRAWH3026349, BRAWH3026938, BRAWH3027420, BRAWH3027440, BRAWH3027533, BRAWH3027574, BRAWH3027607, BRAWH3027616, BRAWH3027675, BRAWH3027806, BRAWH3027880, BRAWH3028202, BRAWH3028223, BRAWH3028461, BRAWH3028754, BRAWH3028796, BRAWH3029313, BRAWH3029385, BRAWH3029538, BRAWH3029806, BRAWH3030772, BRAWH3030810, BRAWH3030910, BRAWH3031054, BRAWH3031342, BRAWH3031710, BRAWH3032298, BRAWH3032340, BRAWH3032571, BRAWH3033117, BRAWH3033293, BRAWH3033448, BRAWH3033513, BRAWH3034097, BRAWH3034114, BRAWH3034134, BRAWH3034668, BRAWH3034743, BRAWH3034775, BRAWH3034890, BRAWH3035403, BRAWH3035904, BRAWH3035914, BRAWH3035936, BRAWH3036077, BRAWH3036247, BRAWH3036270, BRAWH3036334, BRAWH3036561, BRAWH3037265, BRAWH3037394, BRAWH3037428, BRAWH3037533, BRAWH3037979, BRAWH3038055, BRAWH3038230, BRAWH3038252, BRAWH3038324, BRCAN2010665, BRCAN2019953, BRCAN2022126, BRCAN2025093, BRCOC2012386, BRHIP2006819, BRHIP2006921, BRHIP2008756, BRHIP2009177, BRHIP2011199, BRHIP2013958, BRHIP2015153, BRHIP2016125, BRHIP2017714, BRHIP2020930, BRHIP2021929, BRHIP2023735, BRHIP2024941, BRHIP2026346, BRHIP2027077, BRHIP2027563, BRHIP2029529, BRHIP2029643, BRHIP2029663, BRHIP3000626, BRHIP3000859, BRHIP3001076, BRHIP3001141, BRHIP3001338, BRHIP3001360, BRHIP3001481, BRHIP3001573, BRHIP3001878, BRHIP3002000, BRHIP3002114, BRHIP3002124, BRHIP3002141, BRHIP3002363, BRHIP3002691, BRHIP3002920, BRHIP3002931, BRHIP3003063, BRHIP3003126, BRHIP3003306, BRHIP3003340, BRHIP3003395, BRHIP3003688, BRHIP3003795, BRHIP3003845, BRHIP3003961, BRHIP3003984, BRHIP3004215, BRHIP3004710, BRHIP3004725, BRHIP3004774, BRHIP3004786, BRHIP3005037, BRHIP3005142, BRHIP3005231, BRHIP3005307, BRHIP3005673, BRHIP3005801, BRHIP3005944, BRHIP3006279, BRHIP3006294, BRHIP3006449, BRHIP3006786, BRHIP3006950, BRHIP3007172, BRHIP3007195, BRHIP3007223, BRHIP3007291, BRHIP3007409, BRHIP3007424, BRHIP3007609, BRHIP3007960, BRHIP3008082, BRHIP3008320, BRHIP3008714, BRHIP3009672, BRHIP3009753, BRHIP3010289, BRHIP3010916, BRHIP3011082, BRHIP3011269, BRHIP3011460, BRHIP3011567, BRHIP3011831, BRHIP3012185, BRHIP3012289, BRHIP3012357, BRHIP3012736, BRHIP3012997, BRHIP3013078, BRHIP3013588, BRHIP3013698, BRHIP3014675, BRHIP3015854, BRHIP3016032, BRHIP3016421, BRHIP3017109, BRHIP3017146, BRHIP3017256, BRHIP3017558, BRHIP3017855, BRHIP3018784, BRHIP3019643, BRHIP3019824, BRHIP3019880, BRHIP3019956, BRHIP3020046, BRHIP3020155, BRHIP3020733, BRHIP3021019, BRHIP3021499, BRHIP3021987, BRHIP3022656, BRHIP3023922, BRHIP3024703, BRHIP3024820, BRHIP3025795, BRHIP3025844, BRHIP3026231, BRHIP3026651, BRHIP3027160, BRHIP3027191, BRHIP3027651, BRHIP3027947, BRHIP3028246, BRHIP3028570, BRHIP3028742, BRSTN2010089, BRSTN2012069, BRSTN2016992, BRTHA2001953, BRTHA2008502, BRTHA2031517, BRTHA2033155, BRTHA2035743, BRTHA3003417, BRTHA3003736, BRTHA3005988, BRTHA3007662, BRTHA3010135, BRTHA3010212, BRTHA3011194, BRTHA3011265, BRTHA3012265, BRTHA3017791, BRTHA3020771, BRTHA3021971, BRTHA3023403, CHONS2002829, CTONG2006235, CTONG2009033, CTONG2020582, D90ST2003106, DFNES2001829, KIDNE2010049, LIVER2008465, MESAN2017133, NT2RI2009233, NT2RI2010795, NT2RI2015533, NT2RI3005923, NT2RI3009524, NT2RP7007387, NT2RP8001605, NT2RP8007920, NTONG2008483, OCBBF2000831, OCBBF2003518, OCBBF2018618, OCBBF3001333, OCBBF3004487, PLACE7004103, PLACE7006240, PROST2007444, SMINT2012179, SYNOV4004210, TBAES2007428, TESTI2005112, TESTI2005564, TESTI2021654, TESTI4001569, TESTI4002072, TESTI4002774, TESTI4002799, TESTI4003602, TESTI4003703, TESTI4003944, TESTI4004210, TESTI4005399, TESTI4005653, TESTI4006441, TESTI4014908, TESTI4022158, TESTI4029297, THYMU3000776, THYMU3002887, THYMU3003067, THYMU3003350, THYMU3007308, THYMU3008105, THYMU3021586, THYMU3026000, THYMU3026306, THYMU3026350, THYMU3032798, THYMU3032867, THYMU3034671, THYMU3037827, THYMU3038214, THYMU3044075, TKIDN2000319, TRACH2013585, TRACH3002752, TRACH3003037, TRACH3003872, TRACH3004424, TRACH3006717, TRACH3007625, TRACH3007689, TRACH3008632, TRACH3009008, TRACH3010079, TRACH3016805, TRACH3016885, TRACH3022198, TRACH3024342, TRACH3024671, TRACH3025316, TRACH3026303, TRACH3026676, TRACH3028855, TRACH3032570, TRACH3036932, TRACH3038399, TSTOM2000235, UTERU3005422, UTERU3010409, UTERU3013167, UTERU3016273 BRACE3046450, BRAWH3013197, BRAWH3028645, BRTHA3004432, TRACH1000193

[0289] These genes are involved in memory and dementia.

Genes Involved in Equilibrium Sense and Movement Function

[0290] The cerebellum is the center of equilibrium sense, muscular movement, and motor learning. This area is thought to be involved in motor control, and smooth movements are achieved unconsciously due to cerebellum action. Recent studies have elucidated that the cerebellum participates in not only simple movements but also in establishing higher-order movements such as reading and writing. Thus, genes whose expression levels differ between tissues of the whole brain and the cerebellum are expected to be involved in equilibrium sense or motor function, which can be useful for elucidating the molecular mechanism controlled by the brain. cDNA libraries derived from the cerebellum (BRACE) and from the whole tissues of a normal brain (BRAWH) were analyzed and compared (Table 7). Genes whose expression levels differed between the two were the 502 clones and nine clones listed below.

[0291] ASTRO2016114, BRACE1000475, BRACE2002392, BRACE2003628, BRACE2005991, BRACE2010336, BRACE2012528, BRACE2012625, BRACE2012833, BRACE2012838, BRACE2012936, BRACE2012947, BRACE2013009, BRACE2013126, BRACE2013132, BRACE2016896, BRACE2017359, BRACE2017397, BRACE2017580, BRACE2017844, BRACE2017872, BRACE2017992, BRACE2019348, BRACE2023633, BRACE2023744, BRACE2025452, BRACE2026404, BRACE2027312, BRACE2027382, BRACE2028956, BRACE2030039, BRACE2032584, BRACE2033128, BRACE2034434, BRACE2035120, BRACE2035191, BRACE2039362, BRACE2039607, BRACE2042541, BRACE2046976, BRACE2047232, BRACE2047975, BRACE3001403, BRACE3001973, BRACE3002344, BRACE3002541, BRACE3002756, BRACE3003866, BRACE3004046, BRACE3004371, BRACE3004767, BRACE3004887, BRACE3004981, BRACE3005870, BRACE3005903, BRACE3006553, BRACE3007649, BRACE3007869, BRACE3009075, BRACE3009265, BRACE3009392, BRACE3009416, BRACE3009539, BRACE3010702, BRACE3011447, BRACE3011774, BRACE3013418, BRACE3013874, BRACE3013986, BRACE3014523, BRACE3014714, BRACE3015090, BRACE3015898, BRACE3016020, BRACE3016167, BRACE3016580, BRACE3016788, BRACE3016810, BRACE3016862, BRACE3017253, BRACE3018083, BRACE3019570, BRACE3019611, BRACE3019817, BRACE3019941, BRACE3020356, BRACE3020669, BRACE3021430, BRACE3021517, BRACE3021805, BRACE3022051, BRACE3022303, BRACE3022312, BRACE3022340, BRACE3022847, BRACE3023604, BRACE3024379, BRACE3024444, BRACE3024497, BRACE3024537, BRACE3024879, BRACE3025627, BRACE3025719, BRACE3026161, BRACE3026290, BRACE3026345, BRACE3026456, BRACE3026802, BRACE3026844, BRACE3026947, BRACE3027256, BRACE3027931, BRACE3028360, BRACE3028895, BRACE3028998, BRACE3029005, BRACE3029021, BRACE3029205, BRACE3029447, BRACE3030538, BRACE3031161, BRACE3031184, BRACE3031185, BRACE3031315, BRACE3031372, BRACE3031579, BRACE3031728, BRACE3031743, BRACE3031843, BRACE3032385, BRACE3032537, BRACE3032538, BRACE3032631, BRACE3032980, BRACE3033525, BRACE3034183, BRACE3034389, BRACE3034964, BRACE3034993, BRACE3035168, BRACE3036156, BRACE3036271, BRACE3036283, BRACE3037612, BRACE3037637, BRACE3037803, BRACE3038012, BRACE3038030, BRACE3038570, BRACE3038760, BRACE3039288, BRACE3039358, BRACE3039378, BRACE3039454, BRACE3040012, BRACE3040239, BRACE3040504, BRACE3040644, BRACE3040863, BRACE3041059, BRACE3041162, BRACE3041827, BRACE3042046, BRACE3042210, BRACE3042326, BRACE3042409, BRACE3042432, BRACE3042594, BRACE3043597, BRACE3044090, BRACE3044172, BRACE3044247, BRACE3044377, BRACE3044495, BRACE3045078, BRACE3045145, BRACE3045424, BRACE3045708, BRACE3045981, BRACE3046049, BRACE3046152, BRACE3046294, BRACE3046466, BRACE3046491, BRACE3046609, BRACE3046837, BRACE3046855, BRACE3046966, BRACE3047018, BRACE3047482, BRACE3047801, BRAMY2031516, BRAMY3002329, BRAMY3004126, BRAMY3004364, BRAMY3005912, BRAMY3008436, BRAMY3009491, BRAWH2000256, BRAWH2002333, BRAWH2004078, BRAWH2010364, BRAWH2010619, BRAWH2011796, BRAWH2011812, BRAWH2011958, BRAWH2012054, BRAWH2012866, BRAWH2013955, BRAWH2014053, BRAWH2016209, BRAWH2016223, BRAWH2016305, BRAWH2016514, BRAWH2016562, BRAWH2016785, BRAWH3000446, BRAWH3000884, BRAWH3001053, BRAWH3001638, BRAWH3001783, BRAWH3001833, BRAWH3003244, BRAWH3003573, BRAWH3003975, BRAWH3004335, BRAWH3004350, BRAWH3005037, BRAWH3005886, BRAWH3005892, BRAWH3005896, BRAWH3008167, BRAWH3008559, BRAWH3008867, BRAWH3009961, BRAWH3010461, BRAWH3010602, BRAWH3010657, BRAWH3010726, BRAWH3010833, BRAWH3011101, BRAWH3011331, BRAWH3011402, BRAWH3011577, BRAWH3011623, BRAWH3011685, BRAWH3011907, BRAWH3011929, BRAWH3012005, BRAWH3012662, BRAWH3012779, BRAWH3013009, BRAWH3013049, BRAWH3013264, BRAWH3013508, BRAWH3014609, BRAWH3014639, BRAWH3015017, BRAWH3015175, BRAWH3015610, BRAWH3015825, BRAWH3016123, BRAWH3016715, BRAWH3017180, BRAWH3017259, BRAWH3017260, BRAWH3017477, BRAWH3017980, BRAWH3018063, BRAWH3018369, BRAWH3018548, BRAWH3018969, BRAWH3019026, BRAWH3019529, BRAWH3019594, BRAWH3019820, BRAWH3020200, BRAWH3020318, BRAWH3020884, BRAWH3020928, BRAWH3021012, BRAWH3021574, BRAWH3021580, BRAWH3021641, BRAWH3021643, BRAWH3021724, BRAWH3022347, BRAWH3022431, BRAWH3022459, BRAWH3022542, BRAWH3022651, BRAWH3022719, BRAWH3022900, BRAWH3023156, BRAWH3023168, BRAWH3023172, BRAWH3023274, BRAWH3023421, BRAWH3024186, BRAWH3024231, BRAWH3024242, BRAWH3024506, BRAWH3024989, BRAWH3026349, BRAWH3026938, BRAWH3027420, BRAWH3027440, BRAWH3027533, BRAWH3027574, BRAWH3027607, BRAWH3027616, BRAWH3027675, BRAWH3027806, BRAWH3027880, BRAWH3028202, BRAWH3028223, BRAWH3028461, BRAWH3028754, BRAWH3028796, BRAWH3029313, BRAWH3029385, BRAWH3029538, BRAWH3029806, BRAWH3030772, BRAWH3030810, BRAWH3030910, BRAWH3031054, BRAWH3031342, BRAWH3031710, BRAWH3032298, BRAWH3032340, BRAWH3032571, BRAWH3033117, BRAWH3033293, BRAWH3033448, BRAWH3033513, BRAWH3034097, BRAWH3034114, BRAWH3034134, BRAWH3034668, BRAWH3034743, BRAWH3034775, BRAWH3034890, BRAWH3035403, BRAWH3035904, BRAWH3035914, BRAWH3035936, BRAWH3036077, BRAWH3036247, BRAWH3036270, BRAWH3036334, BRAWH3036561, BRAWH3037265, BRAWH3037394, BRAWH3037428, BRAWH3037533, BRAWH3037979, BRAWH3038055, BRAWH3038230, BRAWH3038252, BRAWH3038324, BRCAN2010665, BRCAN2019953, BRCAN2022126, BRCAN2025093, BRCOC2012386, BRHIP2015153, BRHIP2027077, BRHIP2029643, BRHIP3001360, BRHIP3001573, BRHIP3002000, BRHIP3002114, BRHIP3003063, BRHIP3003126, BRHIP3003961, BRHIP3003984, BRHIP3004215, BRHIP3004774, BRHIP3005801, BRHIP3007223, BRHIP3007409, BRHIP3008320, BRHIP3014675, BRHIP3017855, BRHIP3018784, BRHIP3021019, BRHIP3028246, BRHIP3028570, BRSSN2011843, BRSSN2013696, BRSTN2010089, BRSTN2011961, BRSTN2012069, BRSTN2016992, BRTHA2033155, BRTHA2035743, BRTHA3003736, BRTHA3005988, BRTHA3009858, BRTHA3010135, BRTHA3010212, BRTHA3010530, BRTHA3011194, BRTHA3011265, BRTHA3011998, BRTHA3017791, BRTHA3020771, BRTHA3021708, BRTHA3021971, BRTHA3023403, CHONS2002829, CTONG2006235, CTONG2009033, CTONG2020582, CTONG2027959, D90ST2003106, DFNES2001829, KIDNE2010049, KIDNE2017153, LIVER2008465, MESAN2017133, NOVAR2000783, NT2RI2009233, NT2RI2015533, NT2RI3005923, NT2RI3009524, NT2RP7007387, NT2RP8001605, NT2RP8007920, NT2RP8009119, NTONG2008483, NTONG2009468, OCBBF2003518, OCBBF2014745, OCBBF2018618, OCBBF3001333, OCBBF3004487, PLACE7004103, PLACE7006240, PROST2007444, TBAES2007428, TESTI2005112, TESTI2018867, TESTI2021654, TESTI4002072, TESTI4002774, TESTI4002799, TESTI4003602, TESTI4003703, TESTI4004210, TESTI4005013, TESTI4005399, TESTI4005653, TESTI4006441, TESTI4014908, TESTI4022158, TESTI4029297, TESTI4032913, TESTI4043223, THYMU3000776, THYMU3002887, THYMU3003350, THYMU3007308, THYMU3021586, THYMU3026000, THYMU3026306, THYMU3026350, THYMU3032798, THYMU3032867, THYMU3033626, THYMU3034671, THYMU3037827, THYMU3038214, THYMU3044075, TLIVE2007736, TRACH2013585, TRACH3002752, TRACH3003037, TRACH3003872, TRACH3004424, TRACH3006717, TRACH3007625, TRACH3007689, TRACH3007995, TRACH3008632, TRACH3009008, TRACH3010079, TRACH3016805, TRACH3016885, TRACH3024342, TRACH3024671, TRACH3026303, TRACH3026676, TRACH3028855, TRACH3032570, TRACH3036932, TRACH3038399, UTERU3000670, UTERU3010409, UTERU3013167, UTERU3015011

BRACE3002184, BRACE3026993, BRACE3046450, BRAMY3008096, BRAWH3013197, BRAWH3028645, BRTHA3004432, TESTI4002988, TRACH1000193

[0292] These genes are involved in equilibrium sense or motor function.

Genes Involved in Signaling from Sensory Organs

[0293] The thalamus is an area which comprises many neurons strongly connected to the cerebrum, and which transmits sensory information from the spinal cord or such to the responsible area of the cerebrum. The thalamus also controls the direction of movement from the cerebrum. For example, the thalamus resolves vision into the elements of size, shape, and color, and resolves sound into volume and sweetness or harshness to the ear, and then transmits this information to the sensory area of the cerebral cortex. Thus, genes whose expression levels differ between tissues of the whole brain and the thalamus are expected to be involved in signaling from sensory organs. These genes can be used to elucidate the molecular mechanism underlying signaling controlled by the brain. cDNA libraries derived from the thalamus (BRTHA) and from whole tissues of a normal brain (BRAWH) were analyzed and compared (Table 8). Genes whose expression levels differed between the two were the 440 clones and eight clones listed below.

[0294] ASTRO2008972, ASTRO2016114, BLADE2004849, BRACE2002392, BRACE2012528, BRACE2019348, BRACE3004371, BRACE3004767, BRACE3019941, BRACE3022312, BRACE3022340, BRACE3031185, BRACE3031743, BRACE3032385, BRACE3032631, BRACE3036156, BRACE3039358, BRACE3040863, BRACE3042432, BRACE3045981, BRAMY2031516, BRAMY3002329, BRAMY3004126, BRAMY3005912, BRAMY3008436, BRAMY3009556, BRAMY3010654, BRAMY4001863, BRAWH2000256, BRAWH2002333, BRAWH2004078, BRAWH2010364, BRAWH2010619, BRAWH2011796, BRAWH2011812, BRAWH2011958, BRAWH2012054, BRAWH2012866, BRAWH2013955, BRAWH2014053, BRAWH2016209, BRAWH2016223, BRAWH2016305, BRAWH2016514, BRAWH2016562, BRAWH2016785, BRAWH3000446, BRAWH3000884, BRAWH3001053, BRAWH3001638, BRAWH3001783, BRAWH3001833, BRAWH3003244, BRAWH3003573, BRAWH3003975, BRAWH3004335, BRAWH3004350, BRAWH3005037, BRAWH3005886, BRAWH3005892, BRAWH3005896, BRAWH3008167, BRAWH3008559, BRAWH3008867, BRAWH3009961, BRAWH3010461, BRAWH3010602, BRAWH3010657, BRAWH3010726, BRAWH3010833, BRAWH3011101, BRAWH3011331, BRAWH3011402, BRAWH3011577, BRAWH3011623, BRAWH3011685, BRAWH3011907, BRAWH3011929, BRAWH3012005, BRAWH3012662, BRAWH3012779, BRAWH3013009, BRAWH3013049, BRAWH3013264, BRAWH3013508, BRAWH3014609, BRAWH3014639, BRAWH3015017, BRAWH3015175, BRAWH3015610, BRAWH3015825, BRAWH3016123, BRAWH3016715, BRAWH3017180, BRAWH3017259, BRAWH3017260, BRAWH3017477, BRAWH3017980, BRAWH3018063, BRAWH3018369, BRAWH3018548, BRAWH3018969, BRAWH3019026, BRAWH3019529, BRAWH3019594, BRAWH3019820, BRAWH3020200, BRAWH3020318, BRAWH3020884, BRAWH3020928, BRAWH3021012, BRAWH3021574, BRAWH3021580, BRAWH3021641, BRAWH3021643, BRAWH3021724, BRAWH3022347, BRAWH3022431, BRAWH3022459, BRAWH3022542, BRAWH3022651, BRAWH3022719, BRAWH3022900, BRAWH3023156, BRAWH3023168, BRAWH3023172, BRAWH3023274, BRAWH3023421, BRAWH3024186, BRAWH3024231, BRAWH3024242, BRAWH3024506, BRAWH3024989, BRAWH3026349, BRAWH3026938, BRAWH3027420, BRAWH3027440, BRAWH3027533, BRAWH3027574, BRAWH3027607, BRAWH3027616, BRAWH3027675, BRAWH3027806, BRAWH3027880, BRAWH3028202, BRAWH3028223, BRAWH3028461, BRAWH3028754, BRAWH3028796, BRAWH3029313, BRAWH3029385, BRAWH3029538, BRAWH3029806, BRAWH3030772, BRAWH3030810, BRAWH3030910, BRAWH3031054, BRAWH3031342, BRAWH3031710, BRAWH3032298, BRAWH3032340, BRAWH3032571, BRAWH3033117, BRAWH3033293, BRAWH3033448, BRAWH3033513, BRAWH3034097, BRAWH3034114, BRAWH3034134, BRAWH3034668, BRAWH3034743, BRAWH3034775, BRAWH3034890, BRAWH3035403, BRAWH3035904, BRAWH3035914, BRAWH3035936, BRAWH3036077, BRAWH3036247, BRAWH3036270, BRAWH3036334, BRAWH3036561, BRAWH3037265, BRAWH3037394, BRAWH3037428, BRAWH3037533, BRAWH3037979, BRAWH3038055, BRAWH3038230, BRAWH3038252, BRAWH3038324, BRCAN2002892, BRCAN2010665, BRCAN2020234, BRCAN2022126, BRCAN2025093, BRCOC2006164, BRCOC2012386, BRHIP2013958, BRHIP2015153, BRHIP2027077, BRHIP3001573, BRHIP3002000, BRHIP3002691, BRHIP3002920, BRHIP3003063, BRHIP3003961, BRHIP3003984, BRHIP3004215, BRHIP3004774, BRHIP3007223, BRHIP3007409, BRHIP3008320, BRHIP3014675, BRHIP3017855, BRHIP3018784, BRHIP3020046, BRHIP3021019, BRHIP3028246, BRHIP3028570, BRSSN2015497, BRSTN2010089, BRSTN2011961, BRSTN2012069, BRSTN2016992, BRTHA2000969, BRTHA2001304, BRTHA2001953, BRTHA2002091, BRTHA2003759, BRTHA2005448, BRTHA2006720, BRTHA2008502, BRTHA2008598, BRTHA2010672, BRTHA2012189, BRTHA2014647, BRTHA2018304, BRTHA2019726, BRTHA2019743, BRTHA2020400, BRTHA2020566, BRTHA2020642, BRTHA2020695, BRTHA2020721, BRTHA2020781, BRTHA2020910, BRTHA2021212, BRTHA2021440, BRTHA2021450, BRTHA2022074, BRTHA2022914, BRTHA2022968, BRTHA2023402, BRTHA2023437, BRTHA2024177, BRTHA2024354, BRTHA2024712, BRTHA2025869, BRTHA2026071, BRTHA2026290, BRTHA2026311, BRTHA2027227, BRTHA2027229, BRTHA2027250, BRTHA2028297, BRTHA2029969, BRTHA2030036, BRTHA2030213, BRTHA2031517, BRTHA2031917, BRTHA2032763, BRTHA2033122, BRTHA2033155, BRTHA2033320, BRTHA2033469, BRTHA2033683, BRTHA2034281, BRTHA2034576, BRTHA2035743, BRTHA2036055, BRTHA2036295, BRTHA2037247, BRTHA2038279, BRTHA2038345, BRTHA2038353, BRTHA3000456, BRTHA3002411, BRTHA3003225, BRTHA3003417, BRTHA3003736, BRTHA3005988, BRTHA3006593, BRTHA3007469, BRTHA3007662, BRTHA3009858, BRTHA3010135, BRTHA3010212, BRTHA3010469, BRTHA3010530, BRTHA3010540, BRTHA3010717, BRTHA3011187, BRTHA3011194, BRTHA3011229, BRTHA3011265, BRTHA3011306, BRTHA3011361, BRTHA3011510, BRTHA3011892, BRTHA3011998, BRTHA3012265, BRTHA3013860, BRTHA3013882, BRTHA3014000, BRTHA3014105, BRTHA3014507, BRTHA3014547, BRTHA3014835, BRTHA3014854, BRTHA3014920, BRTHA3016616, BRTHA3017791, BRTHA3018409, BRTHA3018623, BRTHA3019183, BRTHA3020369, BRTHA3020771, BRTHA3021569, BRTHA3021708, BRTHA3021786, BRTHA3021971, BRTHA3022641, BRTHA3023403, BRTHA3023590, BRTHA3023929, BRTHA3024600, BRTHA3025073, BRTHA3026161, BRTHA3026180, BRTHA3026556, BRTHA3026916, BRTHA3027171, BRTHA3027318, BRTHA3027638, BRTHA3027820, BRTHA3027879, BRTHA3027957, BRTHA3028339, BRTHA3028505, CHONS2002829, CTONG2006235, CTONG2009033, CTONG2011801, CTONG2020582, D90ST2003106, DFNES2001829, KIDNE2010049, LIVER2008465, MESAN2017133, NT2RI2009233, NT2RI2010795, NT2RI2015533, NT2RI3005923, NT2RI3009524, NT2RP7007387, NT2RP8001605, NT2RP8007920, NTONG2008483, OCBBF2003518, OCBBF2009536, OCBBF2018618, OCBBF3001333, OCBBF3004487, OCBBF3008835, PLACE6003004, PLACE7004103, PLACE7006240, PROST2007444, SMINT2009292, TBAES2007428, TESTI2005112, TESTI2021654, TESTI2039342, TESTI4002072, TESTI4002774, TESTI4002799, TESTI4003602, TESTI4003703, TESTI4004210, TESTI4004695, TESTI4005399, TESTI4005653, TESTI4006441, TESTI4007965, TESTI4010979, TESTI4013474, TESTI4014908, TESTI4022158, TESTI4029297, TESTI4032913, THYMU3000776, THYMU3002887, THYMU3003350, THYMU3021586, THYMU3026000, THYMU3026306, THYMU3026350, THYMU3032798, THYMU3032867, THYMU3037827, THYMU3038214, THYMU3044075, TRACH2013585, TRACH3002752, TRACH3003037, TRACH3003872, TRACH3004424, TRACH3006717, TRACH3007625, TRACH3007689, TRACH3008508, TRACH3008632, TRACH3009008, TRACH3010079, TRACH3016805, TRACH3016885, TRACH3024342, TRACH3024671, TRACH3026303, TRACH3026676, TRACH3028855, TRACH3032570, TRACH3036932, TRACH3038399, UTERU3010409, UTERU3012414, UTERU3013167, UTERU3017995, UTERU3018172 BRACE3046450, BRAWH3013197, BRAWH3028645, BRTHA3004432, BRTHA3024233, CTONG2002832, THYMU3046350, TRACH1000193

[0295] These genes are involved in signaling from sensory organs.

Genes Involved in Emotional Reaction

[0296] The amygdala is the center of emotion in the brain. Information passing through the amygdala induces an emotional reaction, for example, panic or fear. When a strong fear reaction is produced due to the emotional evaluation of stimulus in the amygdala, the amygdala transmits an alert signal to each area of the brain. This results in various reactions such as sweating palms, palpitation, elevated blood pressure, and rapid secretion of adrenaline. In other words, the amygdala transmits signals which cause the body to be on the alert and is a tissue involved in a kind of defense instinct. Thus, genes whose expression levels differ between tissues of the whole brain and the amygdala are expected to be involved in emotional reaction. Such genes can be used to elucidate the molecular mechanism underlying emotional reaction, fear, or panic. cDNA libraries derived from the amygdale (BRAMY) and from whole tissues of a normal brain (BRAWH) were analyzed and compared (Table 9). Genes whose expression levels differed between the two were the 357 clones and nine clones listed below.

[0297] ASTRO2016114, BRACE2002392, BRACE2012528, BRACE2017397, BRACE2017844, BRACE3004371, BRACE3004767, BRACE3022340, BRACE3031185, BRACE3031315, BRACE3031743, BRACE3032385, BRACE3032631, BRACE3039358, BRACE3040863, BRACE3042432, BRACE3045981, BRAMY2015516, BRAMY2021098, BRAMY2022320, BRAMY2023939, BRAMY2025495, BRAMY2031516, BRAMY2033895, BRAMY2035801, BRAMY2036254, BRAMY2036266, BRAMY2037609, BRAMY2039630, BRAMY2040915, BRAMY2041347, BRAMY2041384, BRAMY2041507, BRAMY2044686, BRAMY2046489, BRAMY2046537, BRAMY3000692, BRAMY3001409, BRAMY3002329, BRAMY3002508, BRAMY3002886, BRAMY3004126, BRAMY3004364, BRAMY3005184, BRAMY3005656, BRAMY3005912, BRAMY3007078, BRAMY3007449, BRAMY3007471, BRAMY3008436, BRAMY3009158, BRAMY3009491, BRAMY3009556, BRAMY3009904, BRAMY3010321, BRAMY3010603, BRAMY3010654, BRAMY4000915, BRAMY4000962, BRAMY4001234, BRAMY4001652, BRAMY4001863, BRAMY4001913, BRAMY4002575, BRAMY4002628, BRAWH2000256, BRAWH2002333, BRAWH2004078, BRAWH2010364, BRAWH2010619, BRAWH2011796, BRAWH2011812, BRAWH2011958, BRAWH2012054, BRAWH2012866, BRAWH2013955, BRAWH2014053, BRAWH2016209, BRAWH2016223, BRAWH2016305, BRAWH2016514, BRAWH2016562, BRAWH2016785, BRAWH3000446, BRAWH3000884, BRAWH3001053, BRAWH3001638, BRAWH3001783, BRAWH3001833, BRAWH3003244, BRAWH3003573, BRAWH3003975, BRAWH3004335, BRAWH3004350, BRAWH3005037, BRAWH3005886, BRAWH3005892, BRAWH3005896, BRAWH3008167, BRAWH3008559, BRAWH3008867, BRAWH3009961, BRAWH3010461, BRAWH3010602, BRAWH3010657, BRAWH3010726, BRAWH3010833, BRAWH3011101, BRAWH3011331, BRAWH3011402, BRAWH3011577, BRAWH3011623, BRAWH3011685, BRAWH3011907, BRAWH3011929, BRAWH3012005, BRAWH3012662, BRAWH3012779, BRAWH3013009, BRAWH3013049, BRAWH3013264, BRAWH3013508, BRAWH3014609, BRAWH3014639, BRAWH3015017, BRAWH3015175, BRAWH3015610, BRAWH3015825, BRAWH3016123, BRAWH3016715, BRAWH3017180, BRAWH3017259, BRAWH3017260, BRAWH3017477, BRAWH3017980, BRAWH3018063, BRAWH3018369, BRAWH3018548, BRAWH3018969, BRAWH3019026, BRAWH3019529, BRAWH3019594, BRAWH3019820, BRAWH3020200, BRAWH3020318, BRAWH3020884, BRAWH3020928, BRAWH3021012, BRAWH3021574, BRAWH3021580, BRAWH3021641, BRAWH3021643, BRAWH3021724, BRAWH3022347, BRAWH3022431, BRAWH3022459, BRAWH3022542, BRAWH3022651, BRAWH3022719, BRAWH3022900, BRAWH3023156, BRAWH3023168, BRAWH3023172, BRAWH3023274, BRAWH3023421, BRAWH3024186, BRAWH3024231, BRAWH3024242, BRAWH3024506, BRAWH3024989, BRAWH3026349, BRAWH3026938, BRAWH3027420, BRAWH3027440, BRAWH3027533, BRAWH3027574, BRAWH3027607, BRAWH3027616, BRAWH3027675, BRAWH3027806, BRAWH3027880, BRAWH3028202, BRAWH3028223, BRAWH3028461, BRAWH3028754, BRAWH3028796, BRAWH3029313, BRAWH3029385, BRAWH3029538, BRAWH3029806, BRAWH3030772, BRAWH3030810, BRAWH3030910, BRAWH3031054, BRAWH3031342, BRAWH3031710, BRAWH3032298, BRAWH3032340, BRAWH3032571, BRAWH3033117, BRAWH3033293, BRAWH3033448, BRAWH3033513, BRAWH3034097, BRAWH3034114, BRAWH3034134, BRAWH3034668, BRAWH3034743, BRAWH3034775, BRAWH3034890, BRAWH3035403, BRAWH3035904, BRAWH3035914, BRAWH3035936, BRAWH3036077, BRAWH3036247, BRAWH3036270, BRAWH3036334, BRAWH3036561, BRAWH3037265, BRAWH3037394, BRAWH3037428, BRAWH3037533, BRAWH3037979, BRAWH3038055, BRAWH3038230, BRAWH3038252, BRAWH3038324, BRCAN2010665, BRCAN2022126, BRCAN2025093, BRCOC2012386, BRHIP2015153, BRHIP2027077, BRHIP3001573, BRHIP3002000, BRHIP3002691, BRHIP3003063, BRHIP3003984, BRHIP3004215, BRHIP3004774, BRHIP3005673, BRHIP3007223, BRHIP3007409, BRHIP3008320, BRHIP3012736, BRHIP3014675, BRHIP3017146, BRHIP3017855, BRHIP3018784, BRHIP3020046, BRHIP3021019, BRHIP3028246, BRHIP3028570, BRSTN2010089, BRSTN2012069, BRSTN2016992, BRTHA2026071, BRTHA2033155, BRTHA3003736, BRTHA3005988, BRTHA3010135, BRTHA3010212, BRTHA3011194, BRTHA3011265, BRTHA3017791, BRTHA3020771, BRTHA3021971, BRTHA3023403, BRTHA3026916, CHONS2002829, CTONG2006235, CTONG2009033, CTONG2020582, D90ST2003106, DFNES2001829, KIDNE2010049, MESAN2017133, NT2RI2009233, NT2RI2010795, NT2RI2015533, NT2RI3005923, NT2RI3009524, NT2RP7007387, NT2RP8001605, NT2RP8007920, NTONG2008483, OCBBF2000831, OCBBF2003518, OCBBF2018618, OCBBF2030927, OCBBF3001333, OCBBF3004487, OCBBF3009244, PLACE6008315, PLACE6010936, PLACE7004103, PLACE7006240, PROST2007444, SPLEN2012571, SYNOV4004210, SYNOV4009575, TBAES2007428, TESTI2005112, TESTI2021654, TESTI4002072, TESTI4002774, TESTI4002799, TESTI4003602, TESTI4003703, TESTI4004210, TESTI4005399, TESTI4005653, TESTI4006441, TESTI4014908, TESTI4022158, TESTI4029297, TESTI4032913, TESTI4043223, TESTI4046073, THYMU3000776, THYMU3002887, THYMU3003350, THYMU3008105, THYMU3019476, THYMU3021586, THYMU3026000, THYMU3026306, THYMU3026350, THYMU3032798, THYMU3032867, THYMU3037827, THYMU3038214, THYMU3044075, TRACH2013585, TRACH3002752, TRACH3003037, TRACH3003872, TRACH3004424, TRACH3006717, TRACH3007625, TRACH3007689, TRACH3008632, TRACH3009008, TRACH3010079, TRACH3016805, TRACH3016885, TRACH3024342, TRACH3024671, TRACH3026303, TRACH3026676, TRACH3028855, TRACH3032570, TRACH3036932, TRACH3038399, UTERU3010409, UTERU3013167 BRACE3046450, BRAMY3008096, BRAWH3013197, BRAWH3028645, BRTHA3004432, TESTI4002988, THYMU3046350, TRACH1000193, TRACH3019290

[0298] These genes are involved in emotional reaction.

Cancer-Related Genes

[0299] Cancer tissues are assumed to express a distinct set of genes distinct from normal tissues, and thus expression of these genes can contribute to carcinogenesis in tissues and cells. Thus, genes whose expression patterns in cancer tissues differ from those in normal tissues are cancer-related genes. A search was carried out for genes whose expression levels in cancer tissues differed from those in normal tissues.

[0300] The result of comparative analysis of cDNA libraries derived from breast tumor (TBAES) and normal breast (BEAST) (Table 10) showed that the genes whose expression levels differed between the two were the ten and four clones listed below.

BRSTN2011961, BRSTN2012069, TBAES2003917, TBAES2005361, TBAES2007428, TBAES2007548, TBAES2007862, TESTI2005564, TESTI4017854, TRACH3016805 TBAES2004105, TBAES2007379, TBAES2007481, TBAES2008133

[0301] The result of comparative analysis of cDNA libraries derived from cervical tumor (TCERX) and normal cervical duct (CERVX) (Table 11) showed that the genes whose expression levels differed between the two were six clones listed below.

BRACE2017397, BRHIP2027077, BRSTN2011961, BRSTN2012069, CERVX2000812, CERVX2000968

[0302] The result of comparative analysis of cDNA libraries derived from colon tumor (TCOLN) and normal colon (COLON) (Table 12) showed that the genes whose expression levels differed between the two were ten clones listed below.

BRSTN2011961, BRSTN2012069, COLON2001829, COLON2001866, COLON2004351, COLON2004911, COLON2005623, COLON2005735, OCBBF3001333, SMINT2017964

[0303] The result of comparative analysis of cDNA libraries derived from esophageal tumor (TESOP) and normal esophagus (NESOP) (Table 13) showed that the genes whose expression levels differed between the two were the 14 clones listed below.

BRAMY3004364, BRAWH3027533, BRHIP3007223, BRSTN2011961, BRSTN2012069, CTONG2011801, CTONG3002518, SMINT2009292, TESOP2002005, TESOP2003308, TESOP2004110, TESOP2008556, UTERU3015011, UTERU3017995

[0304] The result of comparative analysis of cDNA libraries derived from kidney tumor (TKIDN) and normal kidney (KIDNE) (Table 14) showed that the genes whose expression levels differed between the two were the 43 clones listed below.

[0305] BRACE2002392, BRACE2012528, BRACE3004371, BRAMY2039630, BRAMY3004364, BRAMY3008436, BRAWH2004078, BRAWH3012662, BRAWH3021574, BRAWH3022651, BRAWH3037428, BRCAN2019953, BRCAN2022126, BRHIP3002000, BRHIP3002691, BRHIP3012997, BRHIP3020046, BRSTN2012069, BRSTN2016992, BRTHA3010212, CTONG2006235, KIDNE2004531, KIDNE2010049, KIDNE2014496, KIDNE2015987, KIDNE2016464, KIDNE2017153, KIDNE2018268, NT2RI2015533, NT2RP7007387, OCBBF3004487, PLACE6008315, SYNOV4004210, TESTI2005112, THYMU3001776, THYMU3002887, THYMU3029795, THYMU3032867, TKIDN2000319, TKIDN2003396, TKIDN2010602, TKIDN2011051, TKIDN2011160

[0306] The result of comparative analysis of cDNA libraries derived from liver tumor (TLIVE) and normal liver (LIVER) (Table 15) showed that the genes whose expression levels differed between the two were the 14 and two clones listed below.

BRAWH3022651, BRCAN2020412, BRSTN2012069, BRTHA3003736, CTONG2006235, LIVER2008465, TESTI4013474, THYMU3002887, THYMU3038158, TLIVE2000142, TLIVE2001616, TLIVE2007736, TLIVE2008797, TRACH3027229

THYMU3046350, TLIVE2007192

[0307] The result of comparative analysis of cDNA libraries derived from lung tumor (TLUNG) and normal lung (HLUNG) (Table 16) showed that the genes whose expression levels differed between the two were the 17 clones listed below.

BRACE3036283, BRAMY2031516, BRSTN2011961, BRSTN2012069, HLUNG2012600, MESAN2009156, NTONG2008483, PROST2007444, TESTI4003703, TESTI4005653, TESTI4013474, TESTI4029297, THYMU3001776, THYMU3033626, THYMU3034671, THYMU3041428, TRACH3022198

[0308] The result of comparative analysis of cDNA libraries derived from ovary tumor (TOVER) and normal ovary (NOVER) (Table 17A) showed the genes whose expression levels differed between the two were the three clones listed below.

BRSTN2012069, NOVAR2000783, THYMU3002887

[0309] The result of comparative analysis of cDNA libraries derived from stomach tumor (TSTOM) and normal stomach (STOMA) (Table 18) showed that the genes whose expression levels differed between the two were the nine clones listed below.

BRSTN2012069, CHONS2002829, STOMA2003894, STOMA2004663, THYMU3001776, TSTOM2000235, TSTOM2001571, TSTOM2002611, TSTOM2002682

[0310] The result of comparative analysis of cDNA libraries derived from uterine tumor (TUTER) and normal uterus (UTERU) (Table 19) showed that the genes whose expression levels differed between the two were the 128 and three clones listed below.

[0311] BRACE2012528, BRACE2017397, BRACE3004371, BRACE3036283, BRACE3040863, BRAMY2031516, BRAMY3005184, BRAWH2004078, BRAWH3004350, BRAWH3022651, BRAWH3024186, BRAWH3029806, BRAWH3031342, BRCAN2022126, BRHIP3001076, BRHIP3002000, BRHIP3002141, BRHIP3005307, BRHIP3007223, BRHIP3017855, BRHIP3020046, BRSTN2010089, BRSTN2011961, BRSTN2012069, BRSTN2016892, BRTHA3003736, BRTHA3011265, BRTHA3023403, BRTHA3027879, CHONS2002829, CTONG2001932, CTONG2003517, CTONG2006235, CTONG2011801, CTONG3002518, DFNES2001829, KIDNE2010049, LIVER2008465, NT2RI3005923, OCBBF3001333, OCBBF3004487, PLACE6008315, PLACE7006240, PROST2007444, SPLEN2012571, SYNOV4000598, SYNOV4009575, T1ESE2000904, TESTI4002072, TESTI4002195, TESTI4002774, TESTI4002799, TESTI4003703, TESTI4003944, TESTI4005399, TESTI4005653, TESTI4024245, TESTI4029297, THYMU3002887, THYMU3021586, THYMU3026350, THYMU3032798, THYMU3034616, THYMU3034671, TRACH3003872, TRACH3005699, TRACH3006800, TRACH3008632, TRACH3009008, TUTER1000014, TUTER2001433, UTERU2000300, UTERU2014998, UTERU2016464, UTERU2016669, UTERU2020226, UTERU2022955, UTERU2023941, UTERU2024042, UTERU2027369, UTERU2028377, UTERU2029660, UTERU2035926, UTERU2037423, UTERU3000670, UTERU3001029, UTERU3001394, UTERU3001946, UTERU3004635, UTERU3005264, UTERU3005422, UTERU3006538, UTERU3006720, UTERU3007108, UTERU3009775, UTERU3010029, UTERU3010409, UTERU3010604, UTERU3010892, UTERU3010919, UTERU3011092, UTERU3011398, UTERU3011558, UTERU3011579, UTERU3011837, UTERU3012293, UTERU3012414, UTERU3012476, UTERU3012599, UTERU3012999, UTERU3013167, UTERU3013302, UTERU3014274, UTERU3014647, UTERU3014906, UTERU3015011, UTERU3015299, UTERU3015647, UTERU3015844, UTERU3016070, UTERU3016273, UTERU3016274, UTERU3016308, UTERU3017441, UTERU3017626, UTERU3017995, UTERU3018172, UTERU3018255 UTERU2017492, UTERU2025415, UTERU2036507

[0312] The result of comparative analysis of cDNA libraries derived from tongue cancer (CTONG) and normal tongue (NTONG) (Table 20) showed that the genes whose expression levels differed between the two were the 67 and two clones listed below.

[0313] BRACE2012528, BRAMY4001863, BRAWH3021574, BRAWH3022651, BRAWH3024186, BRHIP2027077, BRHIP3001573, BRHIP3002000, BRHIP3007223, BRHIP3012997, BRHIP3020046, BRSSN2013696, BRSTN2011961, BRSTN2012069, BRTHA2027229, BRTHA2033155, BRTHA3011194, BRTHA3022641, CTONG2001932, CTONG2003517, CTONG2006235, CTONG2008989, CTONG2009033, CTONG2009570, CTONG2010330, CTONG2011801, CTONG2012123, CTONG2014206, CTONG2014959, CTONG2020582, CTONG2026987, CTONG2027150, CTONG2027591, CTONG2027783, CTONG2027959, CTONG3001605, CTONG3002518, CTONG3002588, CTONG3003669, CTONG3008223, NT2RI2009233, NTONG2002278, NTONG2003805, NTONG2004829, NTONG2008483, NTONG2009468, OCBBF3004487, PLACE6008315, PLACE7004103, SKNMC2003639, SPLEN2012571, SPLEN2019092, SYNOV4009575, T1ESE2000904, TESTI2005564, TESTI2018867, TESTI4002799, TESTI4005653, TESTI4032913, THYMU3021586, THYMU3047115, TRACH3006717, TRACH3007625, TRACH3016805, TRACH3036932, TRACH3038399, UTERU2000300 CTONG2002832, CTONG2003764

[0314] These genes are involved in cancer.

[0315] Expression frequency analysis is used when searching for genes involved in development and differentiation, where the expression levels of genes in developing and/or differentiating tissues and/or cells are compared with those in adult tissues and/or cells. Genes involved in tissue development and/or differentiation are genes which participate in tissue construction and function expression. These genes are thus useful genes available for medicine aiming at regeneration of injured tissues.

[0316] By using information on gene expression frequency gained from the database of the nucleotide sequences of the 1,402,069 clones as described above, genes whose expression frequencies differed between developing and/or differentiating tissues and/or cells, and adult tissues and/or cells, were analyzed.

[0317] The result of comparative analysis of cDNA libraries derived from fetal brain (FCBBF, FEBRA or OCBBF) and adult brain (BRACE, BRALZ, BRAMY, BRAWH, BRCAN, BRCOC, BRHIP, BRSSN, BRSTN or BRTHA) (Table 21) showed that the genes whose expression levels differed between the two were the 916 and 13 clones listed below.

[0318] ASTRO2008972, ASTRO2016114, BLADE2004849, BRACE1000475, BRACE2002392, BRACE2003628, BRACE2005991, BRACE2010336, BRACE2012528, BRACE2012625, BRACE2012833, BRACE2012838, BRACE2012936, BRACE2012947, BRACE2013009, BRACE2013126, BRACE2013132, BRACE2016896, BRACE2017359, BRACE2017397, BRACE2017580, BRACE2017844, BRACE2017872, BRACE2017992, BRACE2019348, BRACE2023633, BRACE2023744, BRACE2025452, BRACE2026404, BRACE2027312, BRACE2027382, BRACE2028956, BRACE2030039, BRACE2032584, BRACE2033128, BRACE2034434, BRACE2035120, BRACE2035191, BRACE2039362, BRACE2039607, BRACE2042541, BRACE2046976, BRACE2047232, BRACE2047975, BRACE3001403, BRACE3001973, BRACE3002344, BRACE3002541, BRACE3002756, BRACE3003866, BRACE3004046, BRACE3004371, BRACE3004767, BRACE3004887, BRACE3004981, BRACE3005870, BRACE3005903, BRACE3006553, BRACE3007649, BRACE3007869, BRACE3009075, BRACE3009265, BRACE3009392, BRACE3009416, BRACE3009539, BRACE3010702, BRACE3011447, BRACE3011774, BRACE3013418, BRACE3013874, BRACE3013986, BRACE3014523, BRACE3014714, BRACE3015090, BRACE3015898, BRACE3016020, BRACE3016167, BRACE3016580, BRACE3016788, BRACE3016810, BRACE3016862, BRACE3017253, BRACE3018083, BRACE3019570, BRACE3019611, BRACE3019817, BRACE3019941, BRACE3020356, BRACE3020669, BRACE3021430, BRACE3021517, BRACE3021805, BRACE3022051, BRACE3022303, BRACE3022312, BRACE3022340, BRACE3022847, BRACE3023604, BRACE3024379, BRACE3024444, BRACE3024497, BRACE3024537, BRACE3024879, BRACE3025627, BRACE3025719, BRACE3026161, BRACE3026290, BRACE3026345, BRACE3026456, BRACE3026802, BRACE3026844, BRACE3026947, BRACE3027256, BRACE3027931, BRACE3028360, BRACE3028895, BRACE3028998, BRACE3029005, BRACE3029021, BRACE3029205, BRACE3029447, BRACE3030538, BRACE3031161, BRACE3031184, BRACE3031185, BRACE3031315, BRACE3031372, BRACE3031579, BRACE3031728, BRACE3031743, BRACE3031843, BRACE3032385, BRACE3032537, BRACE3032538, BRACE3032631, BRACE3032980, BRACE3033525, BRACE3034183, BRACE3034389, BRACE3034964, BRACE3034993, BRACE3035168, BRACE3036156, BRACE3036271, BRACE3036283, BRACE3037612, BRACE3037637, BRACE3037803, BRACE3038012, BRACE3038030, BRACE3038570, BRACE3038760, BRACE3039288, BRACE3039358, BRACE3039378, BRACE3039454, BRACE3040012, BRACE3040239, BRACE3040504, BRACE3040644, BRACE3040863, BRACE3041059, BRACE3041162, BRACE3041827, BRACE3042046, BRACE3042210, BRACE3042326, BRACE3042409, BRACE3042432, BRACE3042594, BRACE3043597, BRACE3044090, BRACE3044172, BRACE3044247, BRACE3044377, BRACE3044495, BRACE3045078, BRACE3045145, BRACE3045424, BRACE3045708, BRACE3045981, BRACE3046049, BRACE3046152, BRACE3046294, BRACE3046466, BRACE3046491, BRACE3046609, BRACE3046837, BRACE3046855, BRACE3046966, BRACE3047018, BRACE3047482, BRACE3047801, BRALZ2003119, BRALZ2007661, BRALZ2008930, BRALZ2010842, BRALZ2011337, BRALZ2013621, BRALZ2013690, BRALZ2014054, BRAMY2015516, BRAMY2021098, BRAMY2022320, BRAMY2023939, BRAMY2025495, BRAMY2031516, BRAMY2033895, BRAMY2035801, BRAMY2036254, BRAMY2036266, BRAMY2037609, BRAMY2039630, BRAMY2040915, BRAMY2041347, BRAMY2041384, BRAMY2041507, BRAMY2044686, BRAMY2046489, BRAMY2046537, BRAMY3000692, BRAMY3001409, BRAMY3002329, BRAMY3002508, BRAMY3002886, BRAMY3004126, BRAMY3004364, BRAMY3005184, BRAMY3005656, BRAMY3005912, BRAMY3007078, BRAMY3007449, BRAMY3007471, BRAMY3008436, BRAMY3009158, BRAMY3009491, BRAMY3009556, BRAMY3009904, BRAMY3010321, BRAMY3010603, BRAMY3010654, BRAMY4000915, BRAMY4000962, BRAMY4001234, BRAMY4001652, BRAMY4001863, BRAMY4001913, BRAMY4002575, BRAMY4002628, BRAWH2000256, BRAWH2002333, BRAWH2004078, BRAWH2010364, BRAWH2010619, BRAWH2011796, BRAWH2011812, BRAWH2011958, BRAWH2012054, BRAWH2012866, BRAWH2013955, BRAWH2014053, BRAWH2016209, BRAWH2016223, BRAWH2016305, BRAWH2016514, BRAWH2016562, BRAWH2016785, BRAWH3000446, BRAWH3000884, BRAWH3001053, BRAWH3001638, BRAWH3001783, BRAWH3001833, BRAWH3003244, BRAWH3003573, BRAWH3003975, BRAWH3004335, BRAWH3004350, BRAWH3005037, BRAWH3005886, BRAWH3005892, BRAWH3005896, BRAWH3008167, BRAWH3008559, BRAWH3008867, BRAWH3009961, BRAWH3010461, BRAWH3010602, BRAWH3010657, BRAWH3010726, BRAWH3010833, BRAWH3011101, BRAWH3011331, BRAWH3011402, BRAWH3011577, BRAWH3011623, BRAWH3011685, BRAWH3011907, BRAWH3011929, BRAWH3012005, BRAWH3012662, BRAWH3012779, BRAWH3013009, BRAWH3013049, BRAWH3013264, BRAWH3013508, BRAWH3014609, BRAWH3014639, BRAWH3015017, BRAWH3015175, BRAWH3015610, BRAWH3015825, BRAWH3016123, BRAWH3016715, BRAWH3017180, BRAWH3017259, BRAWH3017260, BRAWH3017477, BRAWH3017980, BRAWH3018063, BRAWH3018369, BRAWH3018548, BRAWH3018969, BRAWH3019026, BRAWH3019529, BRAWH3019594, BRAWH3019820, BRAWH3020200, BRAWH3020318, BRAWH3020884, BRAWH3020928, BRAWH3021012, BRAWH3021574, BRAWH3021580, BRAWH3021641, BRAWH3021643, BRAWH3021724, BRAWH3022347, BRAWH3022431, BRAWH3022459, BRAWH3022542, BRAWH3022651, BRAWH3022719, BRAWH3022900, BRAWH3023156, BRAWH3023168, BRAWH3023172, BRAWH3023274, BRAWH3023421, BRAWH3024186, BRAWH3024231, BRAWH3024242, BRAWH3024506, BRAWH3024989, BRAWH3026349, BRAWH3026938, BRAWH3027420, BRAWH3027440, BRAWH3027533, BRAWH3027574, BRAWH3027607, BRAWH3027616, BRAWH3027675, BRAWH3027806, BRAWH3027880, BRAWH3028202, BRAWH3028223, BRAWH3028461, BRAWH3028754, BRAWH3028796, BRAWH3029313, BRAWH3029385, BRAWH3029538, BRAWH3029806, BRAWH3030772, BRAWH3030810, BRAWH3030910, BRAWH3031054, BRAWH3031342, BRAWH3031710, BRAWH3032298, BRAWH3032340, BRAWH3032571, BRAWH3033117, BRAWH3033293, BRAWH3033448, BRAWH3033513, BRAWH3034097, BRAWH3034114, BRAWH3034134, BRAWH3034668, BRAWH3034743, BRAWH3034775, BRAWH3034890, BRAWH3035403, BRAWH3035904, BRAWH3035914, BRAWH3035936, BRAWH3036077, BRAWH3036247, BRAWH3036270, BRAWH3036334, BRAWH3036561, BRAWH3037265, BRAWH3037394, BRAWH3037428, BRAWH3037533, BRAWH3037979, BRAWH3038055, BRAWH3038230, BRAWH3038252, BRAWH3038324, BRCAN2000923, BRCAN2002662, BRCAN2002892, BRCAN2003269, BRCAN2003814, BRCAN2006051, BRCAN2006955, BRCAN2007525, BRCAN2008701, BRCAN2009168, BRCAN2010547, BRCAN2010581, BRCAN2010665, BRCAN2015402, BRCAN2015757, BRCAN2018269, BRCAN2018667, BRCAN2019653, BRCAN2019907, BRCAN2019953, BRCAN2020234, BRCAN2020331, BRCAN2020412, BRCAN2020467, BRCAN2020880, BRCAN2021325, BRCAN2021452, BRCAN2021718, BRCAN2022126, BRCAN2025093, BRCAN2027593, BRCAN2028702, BRCOC2001355, BRCOC2002777, BRCOC2006164, BRCOC2006639, BRCOC2006942, BRCOC2009638, BRCOC2010115, BRCOC2012386, BRHIP2006819, BRHIP2006921, BRHIP2008756, BRHIP2009177, BRHIP2011199, BRHIP2013958, BRHIP2015153, BRHIP2016125, BRHIP2017714, BRHIP2020930, BRHIP2021929, BRHIP2023735, BRHIP2024941, BRHIP2026346, BRHIP2027077, BRHIP2027563, BRHIP2029529, BRHIP2029643, BRHIP2029663, BRHIP3000626, BRHIP3000859, BRHIP3001076, BRHIP3001141, BRHIP3001338, BRHIP3001360, BRHIP3001481, BRHIP3001573, BRHIP3001878, BRHIP3002000, BRHIP3002114, BRHIP3002124, BRHIP3002141, BRHIP3002363, BRHIP3002691, BRHIP3002920, BRHIP3002931, BRHIP3003063, BRHIP3003126, BRHIP3003306, BRHIP3003340, BRHIP3003395, BRHIP3003688, BRHIP3003795, BRHIP3003845, BRHIP3003961, BRHIP3003984, BRHIP3004215, BRHIP3004710, BRHIP3004725, BRHIP3004774, BRHIP3004786, BRHIP3005037, BRHIP3005142, BRHIP3005231, BRHIP3005307, BRHIP3005673, BRHIP3005801, BRHIP3005944, BRHIP3006279, BRHIP3006294, BRHIP3006449, BRHIP3006786, BRHIP3006950, BRHIP3007172, BRHIP3007195, BRHIP3007223, BRHIP3007291, BRHIP3007409, BRHIP3007424, BRHIP3007609, BRHIP3007960, BRHIP3008082, BRHIP3008320, BRHIP3008714, BRHIP3009672, BRHIP3009753, BRHIP3010289, BRHIP3010916, BRHIP3011082, BRHIP3011269, BRHIP3011460, BRHIP3011567, BRHIP3011831, BRHIP3012185, BRHIP3012289, BRHIP3012357, BRHIP3012736, BRHIP3012997, BRHIP3013078, BRHIP3013588, BRHIP3013698, BRHIP3014675, BRHIP3015854, BRHIP3016032, BRHIP3016421, BRHIP3017109, BRHIP3017146, BRHIP3017256, BRHIP3017558, BRHIP3017855, BRHIP3018784, BRHIP3019643, BRHIP3019824, BRHIP3019880, BRHIP3019956, BRHIP3020046, BRHIP3020155, BRHIP3020733, BRHIP3021019, BRHIP3021499, BRHIP3021987, BRHIP3022656, BRHIP3023922, BRHIP3024703, BRHIP3024820, BRHIP3025795, BRHIP3025844, BRHIP3026231, BRHIP3026651, BRHIP3027160, BRHIP3027191, BRHIP3027651, BRHIP3027947, BRHIP3028246, BRHIP3028570, BRHIP3028742, BRSSN2004303, BRSSN2004710, BRSSN2008464, BRSSN2011843, BRSSN2012157, BRSSN2012198, BRSSN2013696, BRSSN2015497, BRSSN2018218, BRSTN2000312, BRSTN2006466, BRSTN2006638, BRSTN2008475, BRSTN2009247, BRSTN2010089, BRSTN2010416, BRSTN2011688, BRSTN2011961, BRSTN2012069, BRSTN2016892, BRSTN2016918, BRSTN2016992, BRSTN2017104, BRSTN2017151, BRSTN2018712, BRTHA2000969, BRTHA2001304, BRTHA2001953, BRTHA2002091, BRTHA2003759, BRTHA2005448, BRTHA2006720, BRTHA2008502, BRTHA2008598, BRTHA2010672, BRTHA2012189, BRTHA2014647, BRTHA2018304, BRTHA2019726, BRTHA2019743, BRTHA2020400, BRTHA2020566, BRTHA2020642, BRTHA2020695, BRTHA2020721, BRTHA2020781, BRTHA2020910, BRTHA2021212, BRTHA2021440, BRTHA2021450, BRTHA2022074, BRTHA2022914, BRTHA2022968, BRTHA2023402, BRTHA2023437, BRTHA2024177, BRTHA2024354, BRTHA2024712, BRTHA2025869, BRTHA2026071, BRTHA2026290, BRTHA2026311, BRTHA2027227, BRTHA2027229, BRTHA2027250, BRTHA2028297, BRTHA2029969, BRTHA2030036, BRTHA2030213, BRTHA2031517, BRTHA2031917, BRTHA2032763, BRTHA2033122, BRTHA2033155, BRTHA2033320, BRTHA2033469, BRTHA2033683, BRTHA2034281, BRTHA2034576, BRTHA2035743, BRTHA2036055, BRTHA2036295, BRTHA2037247, BRTHA2038279, BRTHA2038345, BRTHA2038353, BRTHA3000456, BRTHA3002411, BRTHA3003225, BRTHA3003417, BRTHA3003736, BRTHA3005988, BRTHA3006593, BRTHA3007469, BRTHA3007662, BRTHA3009858, BRTHA3010135, BRTHA3010212, BRTHA3010469, BRTHA3010530, BRTHA3010540, BRTHA3010717, BRTHA3011187, BRTHA3011194, BRTHA3011229, BRTHA3011265, BRTHA3011306, BRTHA3011361, BRTHA3011510, BRTHA3011892, BRTHA3011998, BRTHA3012265, BRTHA3013860, BRTHA3013882, BRTHA3014000, BRTHA3014105, BRTHA3014507, BRTHA3014547, BRTHA3014835, BRTHA3014854, BRTHA3014920, BRTHA3016616, BRTHA3017791, BRTHA3018409, BRTHA3018623, BRTHA3019183, BRTHA3020369, BRTHA3020771, BRTHA3021569, BRTHA3021708, BRTHA3021786, BRTHA3021971, BRTHA3022641, BRTHA3023403, BRTHA3023590, BRTHA3023929, BRTHA3024600, BRTHA3025073, BRTHA3026161, BRTHA3026180, BRTHA3026556, BRTHA3026916, BRTHA3027171, BRTHA3027318, BRTHA3027638, BRTHA3027820, BRTHA3027879, BRTHA3027957, BRTHA3028339, BRTHA3028505, CHONS2002829, CTONG2001932, CTONG2006235, CTONG2009033, CTONG2011801, CTONG2020582, CTONG2027959, D90ST2003106, DFNES2001829, FCBBF3001018, FCBBF3002188, FCBBF3005160, FCBBF3012443, FCBBF3020030, FCBBF3021191, FCBBF3024911, FCBBF5000384, FEBRA2000805, FEBRA2002260, FEBRA2012625, FEBRA2013069, FEBRA2013570, FEBRA2017736, FEBRA2017811, FEBRA2023498, FEBRA2026582, FEBRA2026977, FEBRA2028222, FEBRA2028457, JCMLC2000273, KIDNE2010049, KIDNE2017153, LIVER2008465, MESAN2017133, NOVAR2000783, NT2NE2011107, NT2RI2009233, NT2RI2010795, NT2RI2015533, NT2RI3005923, NT2RI3009524, NT2RP7007387, NT2RP8001604, NT2RP8001605, NT2RP8007920, NT2RP8009119, NTONG2008483, NTONG2009468, OCBBF2000831, OCBBF2003518, OCBBF2004478, OCBBF2007039, OCBBF2009536, OCBBF2014745, OCBBF2016928, OCBBF2018229, OCBBF2018618, OCBBF2019761, OCBBF2024589, OCBBF2024779, OCBBF2025631, OCBBF2030927, OCBBF2036019, OCBBF3000743, OCBBF3000830, OCBBF3001076, OCBBF3001202, OCBBF3001333, OCBBF3001616, OCBBF3003745, OCBBF3004487, OCBBF3004908, OCBBF3005330, OCBBF3005843, OCBBF3006986, OCBBF3007078, OCBBF3007704, OCBBF3008392, OCBBF3008835, OCBBF3009244, PLACE5000492, PLACE6003004, PLACE6008315, PLACE6010936, PLACE7004103, PLACE7006240, PROST2007444, PROST2017910, SMINT2009292, SMINT2012179, SPLEN2012571, SYNOV4004210, SYNOV4009575, T1ESE2000609, T1ESE2000904, TBAES2007428, TESTI2005112, TESTI2005564, TESTI2009497, TESTI2018867, TESTI2021654, TESTI2039342, TESTI4001569, TESTI4002072, TESTI4002195, TESTI4002774, TESTI4002799, TESTI4003602, TESTI4003703, TESTI4003944, TESTI4004210, TESTI4004695, TESTI4005013, TESTI4005399, TESTI4005653, TESTI4006441, TESTI4007965, TESTI4010979, TESTI4012960, TESTI4013474, TESTI4014908, TESTI4020596, TESTI4022158, TESTI4029297, TESTI4032913, TESTI4035770, TESTI4043223, TESTI4046073, THYMU3000776, THYMU3002887, THYMU3003007, THYMU3003350, THYMU3007308, THYMU3008105, THYMU3019476, THYMU3021586, THYMU3026000, THYMU3026306, THYMU3026350, THYMU3032798, THYMU3032867, THYMU3033626, THYMU3034671, THYMU3037827, THYMU3038214, THYMU3041428, THYMU3044075, TKIDN2000319, TLIVE2007736, TRACH2013585, TRACH3002752, TRACH3003037, TRACH3003872, TRACH3004424, TRACH3006717, TRACH3007625, TRACH3007689, TRACH3007995, TRACH3008508, TRACH3008632, TRACH3009008, TRACH3010079, TRACH3016805, TRACH3016885, TRACH3021544, TRACH3022109, TRACH3022198, TRACH3024342, TRACH3024671, TRACH3025316, TRACH3026303, TRACH3026676, TRACH3028855, TRACH3032570, TRACH3036932, TRACH3038399, TSTOM2000235, UTERU2000300, UTERU2027369, UTERU3000670, UTERU3005422, UTERU3010409, UTERU3012414, UTERU3013167, UTERU3015011, UTERU3016273, UTERU3017995, UTERU3018172 BRACE3002184, BRACE3026993, BRACE3046450, BRAMY3008096, BRAWH3013197, BRAWH3028645, BRTHA3004432, BRTHA3024233, CTONG2002832, TESTI4002988, THYMU3046350, TRACH1000193, TRACH3019290

[0319] The result of comparative analysis of cDNA libraries derived from fetal heart (FEHRT) and adult heart (HEART) (Table 22) showed that the genes whose expression levels differed between the two were the ten clones listed below.

BRACE2012528, BRACE3004371, BRCAN2003814, BRSTN2011961, BRSTN2012069, BRSTN2016992, HEART2002531, NTONG2008483, PROST2002078, T1ESE2000609

[0320] The result of comparative analysis of cDNA libraries derived from fetal kidney (FEKID) and adult kidney (KIDNE) (Table 23) showed that the genes whose expression levels differed between the two were the 21 clones listed below.

[0321] BRACE3004371, BRAMY2039630, BRAMY3004364, BRAWH2004078, BRHIP3002000, BRSTN2011961, BRSTN2012069, BRTHA2027229, KIDNE2004531, KIDNE2010049, KIDNE2014496, KIDNE2015987, KIDNE2016464, KIDNE2017153, KIDNE2018268, NT2RP7007387, TESTI2005112, TESTI4002799, THYMU3001776, THYMU3029795, THYMU3032867

[0322] The result of comparative analysis of cDNA libraries derived from fetal lung (FELNG) and adult lung (HLUNG) (Table 24) showed that the genes whose expression levels differed between the two were the 18 clones listed below.

[0323] BRACE3036283, BRAMY2031516, BRSTN2011961, BRSTN2012069, HLUNG2012600, MESAN2009156, NTONG2008483, PROST2007444, TESTI4003703, TESTI4005653, TESTI4013474, TESTI4029297, THYMU3001776, THYMU3033626, THYMU3034671, THYMU3041428, THYMU3044188, TRACH3022198

[0324] These genes are involved in regeneration of tissues and/or cells.

[0325] For example, if a polypeptide encoded by a cDNA of the present invention is a regulatory factor for cellular conditions such as growth and differentiation, it can be used for developing medicines as follows. The polypeptide or antibody provided by the present invention is injected into cells using microinjection, and then low molecular weight compounds and such can be screened by using, as an index, change in cellular conditions (such as growth and differentiation), or activation/inhibition of a particular gene in the cell. The screening can be performed as follows.

[0326] A polypeptide of the present invention is first expressed and purified as a recombinant. This purified polypeptide is then microinjected into cells such as various cell lines, or primary culture cells, and cellular changes such as growth and differentiation are examined. Alternatively, induction of a gene whose expression is known to be involved in the change of a particular cellular condition may be detected using mRNA or polypeptide amounts. Alternatively, the amount of an intracellular molecule (low molecular weight compounds, etc.) may be detected, where that amount is changed by the function of a gene product (polypeptide) known to influence change in a particular cellular condition. The compounds to be screened (including both low and high molecular compounds) can be added to culture media and screened using, as an index, their ability to change a cellular condition.

[0327] Cell lines introduced with a gene of the present invention can be used for screening, even without microinjection. If the product of a gene of the present invention is revealed to be involved in a particular change in cellular conditions, the change in that product can be used as an index for screening. Once a compound which can activate or inhibit the function of a polypeptide of the present invention has been developed using this screening, such a compound can be practically applied in medicines.

[0328] If a polypeptide encoded by a cDNA of the present invention is a secretory or membrane protein, or a protein involved in signal transduction, glycoproteins, transcription, or disease, it can be used in functional assays for developing medicines as described below.

[0329] In case of a membrane protein, the polypeptide is very likely to function as a receptor or ligand on the cell surface. Therefore, it is possible to reveal new ligand-receptor relationships by screening membrane proteins of the present invention, based on binding activity with known or new ligands or receptors. Screening can be performed according to known methods.

[0330] For example, a ligand against a polypeptide of the present invention can be screened in the following manner. Namely, a ligand that binds to a specific polypeptide can be screened using a method comprising the steps of: (a) contacting a test sample with a polypeptide of the present invention, or partial peptide thereof, or cells expressing such, and (b) selecting a test sample that binds to said polypeptide, said partial peptide, or said cells.

[0331] Screening using cells expressing receptor polypeptides of the present invention can also be performed, for example, as follows. Receptors capable of binding to a specific polypeptide can be screened by (a) attaching sample cells to a polypeptide of the present invention or its partial peptide, and (b) selecting cells that can bind to the said polypeptide or its partial peptide.

[0332] For example, screening can be carried out as follows: a polypeptide of the present invention is first expressed, the recombinant polypeptide is purified and labeled, a binding assay is performed using various cell lines or primary cultured cells, and cells that express the receptor are selected (Growth and differentiation factors and their receptors, Shin-Seikagaku Jikken Kouza Vol. 7 (1991) Honjyo, Arai, Taniguchi, and Muramatsu edit, p 203-236, Tokyo-Kagaku-Doujin). A polypeptide of the present invention can be labeled with RI such as ¹²⁵I, and enzyme (alkaline phosphatase etc.).

[0333] Alternatively, a polypeptide of the present invention may be used without labeling and then detected by using a labeled antibody against that polypeptide. Cells expressing a receptor polypeptide of the present invention, and selected using the above screening methods, can be applied as mentioned below to screen agonists or antagonists of that receptor.

[0334] Once a ligand binding to a polypeptide of the present invention, a receptor of that polypeptide, or cells expressing that receptor have been obtained by screening as described above, a compound binding to that ligand or receptor can be screened. It is also possible to screen a compound that can inhibit both bindings (agonists or antagonists of the receptor, for example) by using this binding activity as an index.

[0335] When a polypeptide of the present invention is a receptor, the screening method comprises the steps of (a) contacting the ligand with a polypeptide of the present invention, or cells expressing that polypeptide, in the presence of a test sample, (b) detecting binding activity between that polypeptide or cells expressing that polypeptide and the ligand, and (c) selecting a compound that can reduce that binding activity when compared to activity in the absence of the test sample. Furthermore, when a polypeptide of the present invention is a ligand, the screening method comprises the steps of (a) contacting the polypeptide of the present invention with its receptor or cells expressing that receptor, in the presence of a test sample, (b) detecting binding activity between the polypeptide and its receptor, or cells expressing that receptor, and (c) selecting a compound that can reduce that binding activity compared to activity in the absence of the test sample.

[0336] Examples of test samples to screen include, but are not limited to, cell extracts, expressed gene library products, synthesized low molecular compounds, synthesized peptides, and natural compounds. A compound that is isolated by the above screening can also be used as a test sample, using binding activity with a polypeptide of the present invention as an index.

[0337] A compound isolated using this screening may be a candidate agonist or antagonist of a polypeptide or polypeptide receptor of the present invention. By monitoring changes in intracellular signals, such as phosphorylation due to reduced binding between a polypeptide and its receptor, it is possible to identify whether the obtained compound is an agonist or antagonist of the polypeptide receptor of the present invention. Also, the screened compound may be a candidate for a compound that can inhibit interaction between a polypeptide and its associated molecules (including receptors) in vivo. The polypeptides of this invention, recepters that bind to those polypeptides or ligands, and compounds thereof, can be applied in the development of preventative, therapeutic or testing agents for diseases in which the polypeptides of the present invention are involved.

[0338] Secretory proteins may regulate cellular conditions such as growth and differentiation. A novel factor that regulates cellular conditions can be found by i) adding a secretory protein of the present invention to a certain kind of cell, and ii) screening using as an index cellular changes in growth or differentiation, or activation of a particular gene.

[0339] Screening can be performed, for example, as follows. First, a polypeptide of the present invention is expressed and purified in a recombinant form. Then, the purified polypeptide is added to various cell lines or primary cultured cells, and changes in cell growth and differentiation are monitored. The induction of a particular gene known to be involved in a certain cellular change is detected using mRNA and polypeptide amounts. Alternatively, detection can be carried out using the amount of an intracellular molecule (low-molecular-weight compounds, etc.) changed by the action of a gene product (polypeptide) which influences a certain cellular change.

[0340] If screening reveals that a polypeptide of the present invention can regulate cellular conditions or functions, it is possible to apply that polypeptide as a pharmaceutical and diagnostic medicine for related diseases, either directly or by altering a part of it into an appropriate composition.

[0341] As for membrane proteins as described above, a secretory protein provided by the present invention may be used to explore a novel ligand-receptor interaction by screening based on binding activity to a known or new ligand or receptor. A similar method can be used to identify an agonist or antagonist. Compounds obtained by these methods are candidate compounds for inhibiting the interaction between the polypeptide of the present invention and an interacting molecule (including receptors). These compounds may be applied as preventive, therapeutic, or testing agents for diseases in which the polypeptide plays a role.

[0342] Proteins involved in signal transduction or transcription may be factors that affect a certain polypeptide or gene in response to intra- or extra-cellular stimuli. A novel factor able to affect a polypeptide or gene can be found by expressing a polypeptide provided by the present invention in a certain type of cell, and screening using as an index the activation of a certain intracellular polypeptide or gene.

[0343] Screening may be performed as follows. First, a transformed cell line which expresses a polypeptide of the present invention is obtained. Then, changes in a certain gene between the transformed and the original untransformed cell lines are detected using mRNA or polypeptide amounts. Alternatively, detection may be carried out using the amount of an intracellular molecule (low molecular weight compounds, etc.) changed by the function of a certain gene product (polypeptide). Furthermore, change in expression of a certain gene can be detected by estimating the activity of a marker gene product (polypeptide), where the polypeptide of the present invention is expressed in a cell that has been introduced with a fusion gene comprising a regulatory region of the certain gene and a marker gene (luciferase, β-galactosidase, etc.).

[0344] If the polypeptide or gene influenced by a protein of the present invention is involved in disease, it is possible to screen a gene or compound that can regulate that polypeptide or gene's expression and/or activity, either directly or indirectly, by utilizing a polypeptide of the present invention.

[0345] For example, a polypeptide of the present invention is expressed and purified as a recombinant polypeptide, and a polypeptide or gene that interacts with that polypeptide is purified and screened based on binding. Alternatively, changes in binding activity can be monitored after adding a candidate inhibitor compound. In another method, the 5′-upstream transcription regulatory region of a gene that encodes a polypeptide of the present invention and that can regulate the expression of another gene, is obtained. The gene is fused with a marker gene and then introduced into a cell, compounds and the like are added, and a factor which can regulate expression of that gene can be discovered.

[0346] A compound obtained by this screening can be used for developing pharmaceutical medicines for a disease in which a polypeptide of the present invention is involved. Similarly, if a regulatory factor obtained by screening turns out to be a polypeptide, compounds that can newly affect the expression or activity of this polypeptide may be used as a medicine for diseases in which the polypeptide of the present invention is involved.

[0347] If a polypeptide of the present invention has enzymatic activity, regardless of whether it is a secretory protein, membrane protein, or a protein involved in signal transduction, glycoprotein, transcription, or disease, screening may be performed by adding a compound to the polypeptide of the present invention under suitable conditions, and monitoring that compound's change. This enzymatic activity may also be used as an index to screen a compound that inhibits the polypeptide activity.

[0348] In an example of this screening, a polypeptide of the present invention is expressed and the recombinant polypeptide is purified. Then, compounds are contacted with the purified polypeptide, and the amount of compound and reaction product is examined. Alternatively, inhibitor candidate compounds are added, then a compound (substrate) that reacts with the purified polypeptide is added, and change in the amount of substrate and reaction product is examined.

[0349] A compound obtained by screening may be used as a medicine for diseases in which a polypeptide of the present invention is involved. Also such a compound can be applied in tests that examine, for example, whether a polypeptide of the invention functions normally in vivo.

[0350] Whether a secretory protein, membrane protein, signal transduction-related protein, glycoprotein-related protein, or transcription-related protein of the present invention is a novel protein involved in disease or not is determined using different method to that described above. In this method, a specific antibody against a polypeptide of the present invention is obtained, and the relationship between the expression or activity of the polypeptide and a certain disease is examined. Alternatively, analysis can use the methods in “Molecular Diagnosis of Genetic Diseases” as a reference (Elles R. edit, (1996) in the series of “Method in Molecular Biology” (Humana Press).

[0351] Proteins involved in disease are very useful in developing drugs which regulate their expression and activity, and become targets of the above-mentioned screenings. They are also useful in the medicinal industry as diagnostic markers for their related disease, or as gene therapy targets.

[0352] A compound isolated as mentioned above can be administered to patients as is, or after being formulated into a pharmaceutical composition according to known methods. Specific examples of pharmaceutically acceptable carriers or vehicles include sterilized water, saline, plant oils, emulsifiers, suspending agents and the like, where they are mixed with the compound appropriately. The pharmaceutical compositions can be administered to patients by a method known to those skilled in the art, such as intraarterial, intravenous, or subcutaneous injection. Dosage may vary depending on the weight or age of a patient, or the method of administration, but those skilled in the art can properly choose an appropriate dosage. If a compound is encoded by a polynucleotide, the polynucleotide can be cloned into a gene therapy vector, and used for gene therapy. Those skilled in the art can properly choose the dosage of the polynucleotide and the method of its administration, and these may vary depending on the weight, age or symptoms of a patient.

[0353] The present invention further relates to databases comprising at least one sequence of a polynucleotide and/or polypeptide, or a medium recorded in such databases, selected from the sequence data of the nucleotides and/or amino acids indicated in Table 1. The term “database” means a set of accumulated, machine-searchable and readable nucleotide sequence information. The databases of the present invention comprise at least one of the novel nucleotide sequences of the polynucleotides provided by the present invention. The databases of the present invention can consist only of the sequence data of the novel polynucleotides provided by the present invention, or can comprise other information on known nucleotide sequences of full-length cDNAs or ESTs. The databases of the present invention can be comprised of not only information on nucleotide sequences, but also information on gene functions as revealed by the present invention. Additional information such as the names of DNA clones carrying the full-length cDNAs can be recorded or linked together with the sequence data in the databases.

[0354] The database of the present invention is useful for gaining complete gene sequence information from the partial sequence information of a gene of interest. The database of the present invention comprises nucleotide sequence information of full-length cDNAs. Consequently, by comparing information in this database with the nucleotide sequence of a partial gene fragment yielded by differential display method or subtraction method, information on the full-length nucleotide sequence of interest can be gained from the sequence of the partial fragment as a starting clue.

[0355] Sequence information of the full-length cDNAs constituting the database of the present invention contains information on not only complete sequences, but also on gene expression frequency and gene homology to known genes and polypeptides. This extra information facilitates rapid functional analyses of partial gene fragments. Further, information on human genes is accumulated in the database of the present invention, and therefore, the database is useful for isolating a human homologue of a gene originating from another species. The human homologue can be isolated based on the nucleotide sequence of the gene from the original species.

[0356] At present, information on a wide variety of gene fragments can be obtained by differential display method and subtraction method. In general, these gene fragments are utilized as tools for isolating the full-length sequences thereof. When the gene fragment corresponds to a known gene, the full-length sequence is easily obtained by comparing the partial sequence with the information in known databases. However, when there is no information corresponding to the partial sequence of interest in known databases, cDNA cloning should be carried out for the full-length cDNA. It is often difficult to obtain the full-length nucleotide sequence using partial sequence information as an initial clue. If the full-length gene is not available, the amino acid sequence of the polypeptide encoded by that gene remains unidentified. Thus the database of the present invention can contribute to the identification of full-length cDNAs corresponding to gene fragments, which cannot be revealed using databases of known genes.

[0357] The present invention has provided 1,995 polynucleotides. In humans, where isolation of full-length cDNA has not progressed, the provision of new full-length cDNAs has great significance. Secretory proteins, membrane proteins, signal transduction-related proteins, glycoprotein-related proteins, transcription-related proteins, and so on are known to be involved in many diseases. The genes and proteins involved in diseases are useful for developing diagnostic markers or medicines for regulation of their expression and activity, or as a gene therapy target.

[0358] In particular, cDNA encoding secretory proteins of the present invention are extremely important to the industry since these proteins are expected to be useful as pharmaceutical agents, and many disease-related genes can be included with them. In addition, membrane proteins, signal transduction-related proteins, transcription-related proteins, disease-related proteins, and genes encoding these proteins can be used as disease indexes, etc. These cDNAs are also very important to the industry, and are expected to be effective in treating diseases and the like by regulating the activity or expression of the proteins they encode.

### INDUSTRIAL APPLICABILITY

[0359] Human cDNAs involved in various diseases, morbid states, or functions were isolated in the present invention. The cDNAs of the present invention include, for example, genes that can be useful as diagnostic markers or therapeutic targets for the diseases or morbid states shown below. These diseases receive widespread attention, and require the development of new technology for treatment and diagnosis.
[0360] osteoporosis
[0361] neurologic diseases
[0362] Alzheimer's disease
[0363] Parkinson's disease
[0364] dementia
[0365] various cancers

[0366] In addition, human cDNAs involved in the functions shown below were isolated in the present invention. These genes can be used to elucidate the mechanisms of various functions, and in therapeutic methods which enhance or repress those functions. For example, genes participating in tissue generation and functional expression can be used in regenerative medicines.
[0367] emotional reaction
[0368] tissue generation and functional expression
[0369] motor function controlled by the brain, signaling function controlled by the brain
[0370] emotional reaction, fear response, and panic Furthermore, information on the nucleotide sequence of the full-length cDNAs or their full-length amino acid sequences as provided by the present invention can be used to isolate human genes based on partial sequence information obtained by functional analysis of various genes, or from sequence information of genes from non-human organisms.

[0371] Any patents, patent applications, and publications cited herein are incorporated by reference.

[0372] The present invention is illustrated more specifically with reference to the following examples, but is not to be construed as being limited thereto.

### EXAMPLE 1

### Preparation of cDNA Library by Oligo-Capping

(1) Extraction and Purchase of mRNA

[0373] Total RNAs as mRNA sources were extracted from human tissues (shown below) by the method described in the reference (J. Sambrook, E. F. Fritsch & T. Maniatis, Molecular Cloning Second edition, Cold Spring harbor Laboratory Press, 1989). Further, by the method described in the reference (J. Sambrook, E. F. Fritsch & T. Maniatis, Molecular Cloning Second edition, Cold Spring harbor Laboratory Press, 1989), total RNAs as mRNA sources were extracted from human culture cells and human primary culture cells (shown below) cultivated by the methods described in the catalogs.

[0374] The library names and origins are indicated below in the order of “Library name: Origin”. When a library was prepared by the subtraction method, the item is followed by a description of how to prepare the subtracted library.

<Extraction of mRNA from Human Tissues>

NTONG: Normal tongue;

CTONG: Tongue cancer;

FCBBF: Fetal brain;

OCBBF: Fetal brain;

PLACE: Placenta;

SYNOV: Synovial membrane tissue (from rheumatioid arthritis);

CORDB: Cord blood.

<Extraction of mRNA from Culture Cells>

BNGH4: H4 cells (ATCC #HTB-148);

IMR32: IMR32 cells (ATCC #CCL-127);

SKNMC: SK-N-MC cells (ATCC #HTB-10);

3NB69: NB69 cells (RCB #RCB0480);

BGGI1: GI1 cells (RCB #RCB0763);

NB9N4: NB9 cells (RCB #RCB0477);

SKNSH: SK-N-SH cells (RCB #RCB0426);

AHMSC: Human mesenchymal cells (HMSC);

CHONS: Chondrocytes;

ERLTF: TF-1 cells (Erythroleukemia);

HELAC: HeLa cells;

JCMLC: Myelogenous leukemia cells;

MESTC: Mesenchyme stem cells;

N1ESE: Mesenchymal stem cells;

NCRRM: Embryonal carcinomas;

NCRRP: Embryonal carcinomas treated with retinoic acid (RA) to induce the differentiation;

TLESE: Mesenchymal stem cells treated with trichostatin and 5-azacytidine to induce the differentiation;

NT2RM: NT2 cells (STARATAGENE #204101);

NT2RP: NT2 cells treated with RA for 5 weeks to induce the differentiation;

NT2RI: NT2 cells treated with RA for 5 weeks to induce the differentiation, followed by the treatment with the growth inhibitor for 2 weeks;

NT2NE: NT2 cells were treated with RA and the growth inhibitor for the neuronal differentiation, and the resultant neurons were concentrated and harvested (NT2 Neuron);

[0375] NTISM: NT2 cells (STARATAGENE #204101) were treated with RA for five weeks to induce the differentiation, and then treated with the growth inhibitor for two weeks; mRNA was prepared from the cells and a cDNA library was constructed from the mRNA; the cDNA libraries whose nucleotide sequences were shared by those of mRNAs from undifferentiated NT2 cells were subtracted by using a Subtract Kit (Invitrogen #K4320-01); the subtracted library (NT2RI-NT2RM) was provided by this procedure.

[0376] RCB indicates that the cell was provided by the Cell Bank, RIKEN GENE BANK, The Institute of Physical and Chemical Research; ATCC indicates that the cell was provided by American Type Culture Collection.

<Extraction of mRNA from Primary Culture Cells>

ASTRO: Normal human astrocyte NHA5732, Takara Shuzo #CC2565;

DFNES: Normal human dermal fibroblast (neonatal skin); NHDF-Neo NHDF2564, Takara Shuzo #CC2509;

MESAN: Normal human mesangial cell NHMC56046-2, Takara Shuzo #CC2559;

NHNPC: Normal human neural progenitor cell NHNP5958, Takara Shuzo #CC2599;

PEBLM: Normal human peripheral blood mononuclear cell HPBMC5939, Takara Shuzo #CC2702;

[0377] HSYRA: Human synoviocyte HS-RA (from rheumatoid arthritis), Toyobo #T404K-05;
   PUAEN: Normal human pulmonary artery endothelial cells, Toyobo #T302K-05;
   UMVEN: Normal human umbilical vein endothelial cell HUVEC, Toyobo #T200K-05;
   HCASM: Normal human coronary artery smooth muscle cell HCASMC, Toyobo #T305K-05;
   HCHON: Normal human chondrocyte HC, Toyobo #T402K-05;
   HHDPC: Normal human dermal papilla cell HDPC, Toyobo #THPCK-001;
   CD34C: CD34+ cells (AllCells, LLC #CB14435M);
   D30ST: CD34+ cells treated with the osteoclast differentiation factor (ODF) for three days to induce the differentiation;
   D60ST: CD34+ cells treated with ODF for six days to induce the differentiation;
   D90ST: CD34+ cells treated with ODF for nine days to induce the differentiation;
   ACTVT: Activated T-cells;
   LYMPB: Lymphoblasts (EB virus transferred B cells);
   NETRP: Neutrophils.

[0378] Total RNAs extracted from the following human tissues were then purchased and used as mRNA sources. Library names and the origins are indicated below in the order of “Library name: Origin”. When a library was prepared by the subtraction method, the item is followed by a description of how to prepare the subtracted library.

<Purchase of Total RNA Containing mRNA Extracted from Human Tissues>

ADRGL: Adrenal gland, CLONTECH #64016-1;

BRACE: Brain (cerebellum), CLONTECH #64035-1;

BRAWH: Whole brain, CLONTECH #64020-1;

FEBRA: Fetal brain, CLONTECH #64019-1;

FELIV: Fetal liver, CLONTECH #64018-1;

HEART: Heart, CLONTECH #64025-1;

HLUNG: Lung, CLONTECH #64023-1;

KIDNE: Kidney, CLONTECH #64030-1;

LIVER: Liver, CLONTECH #64022-1;

MAMGL: Mammary Gland, CLONTECH #64037-1;

PANCR: Pancreas, CLONTECH #64031-1;

PROST: Prostate, CLONTECH #64038-1;

SALGL: Salivary Gland, CLONTECH #64026-1;

SKMUS: Skeletal Muscle, CLONTECH #64033-1;

SMINT: Small Intestine, CLONTECH #64039-1;

SPLEN: Spleen, CLONTECH #64034-1;

STOMA: Stomach, CLONTECH #64090-1;

TBAES: Breast (Tumor), CLONTECH #64015-1;

TCERX: Cervix (Tumor), CLONTECH #64010-1;

TCOLN: Colon (Tumor), CLONTECH #64014-1;

TESTI: Testis, CLONTECH #64027-1;

THYMU: Thymus, CLONTECH #64028-1;

TLUNG: Lung (Tumor), CLONTECH #64013-1;

TOVAR: Ovary (Tumor), CLONTECH #64011-1;

TRACH: Trachea, CLONTECH #64091-1;

TUTER: Uterus (Tumor), CLONTECH #64008-1;

UTERU: Uterus, CLONTECH #64029-1;

ADIPS: Adipose, Invitrogen #D6005-01;

BLADE: Bladder, Invitrogen #D6020-01;

BRALZ: Cerebral cortex from an Alzheimer patient (Brain, cortex, Alzheimer), Invitrogen #D6830-01;

CERVX: Cervix, Invitrogen #D6047-01;

COLON: Colon, Invitrogen #D6050-0;

NESOP: Esophagus, Invitrogen #D6060-01;

PERIC: Pericardium, Invitrogen #D6105-01;

RECTM: Rectum, Invitrogen #D6110-01;

TESOP: Esophageal (Tumor), Invitrogen #D6860-01;

TKIDN: Kidney (Tumor), Invitrogen #D6870-01;

TLIVE: Liver (Tumor), Invitrogen #D6880-01;

TSTOM: Stomach (Tumor), Invitrogen #D6920-01;

BEAST: Adult breast, STARATAGENE #735044;

FEHRT: Fetal heart, STARATAGENE #738012;

FEKID: Fetal kidney, STARATAGENE #738014;

FELNG: Fetal lung, STARATAGENE #738020;

NOVAR: Adult ovary, STARATAGENE #735260;

[0379] BRASW: subtracted library (BRALZ-BRAWH). A cDNA library was constructed from mRNA prepared from tissues of cerebral cortex obtained from an Alzheimer patient [BRALZ: Cerebral cortex from an Alzheimer patient (Brain, cortex, Alzheimer), Invitrogen #D6830-01]; the cDNA libraries whose nucleotide sequences were shared by those of mRNAs from whole brain tissue [BRAWH: Whole brain, CLONTECH #64020-1] were subtracted using a Subtract Kit (Invitrogen #K4320-01).

[0380] Further, mRNAs extracted and purified as poly A(+) RNAs from the human tissues shown below were purchased. A cDNA library was prepared from an RNA mixture in which the poly A(+) RNA from each tissue was combined with poly A(−) RNA. The poly A(−) RNA was prepared by removing poly A(+) RNA from the total RNA of whole brain tissue (CLONTECH #64020-1) by using oligo dT cellulose. The library names and origins are indicated below in the order of “Library name: Origin”.

<Purchase of mRNAs of Human Tissues as Poly A(+) RNAs>

BRAMY: Brain (amygdala), CLONTECH #6574-1;

BRCAN: Brain (caudate nucleus), CLONTECH #6575-1;

BRCOC: Brain (corpus callosum), CLONTECH #6577-1;

BRHIP: Brain (hippocampus), CLONTECH #6578-1;

BRSSN: Brain (substantia nigra), CLONTECH #6580-1;

BRSTN: Brain (subthalamic nucleus), CLONTECH #6581-1;

BRTHA: Brain (thalamus), CLONTECH #6582-1.

(2) Preparation of cDNA Libraries

[0381] A cDNA library was prepared from each RNA using the improved method (WO 01/04286) of oligo capping [M. Maruyama and S. Sugano, Gene, 138: 171-174 (1994)]. A series of procedures, BAP (Bacterial Alkaline Phosphatase) treatment, TAP (Tobacco Acid Pyrophosphatase) treatment, RNA ligation, first strand cDNA synthesis and RNA removal, were carried out using the oligo-cap linker (agcaucgagu cggccuuguu ggccuacugg/SEQ ID NO: 3991) and oligo dT primer (gcggctgaag acggcctatg tggccttttt tttttttttt tt/SEQ ID NO: 3992), as described in WO 01/04286. The single-stranded cDNA was then converted to a double-stranded cDNA by PCR (polymerase chain reaction) using 5′ (agcatcgagt cggccttgtt g/SEQ ID NO: 3993) and 3′ (gcggctgaag acggcctatg t/SEQ ID NO: 3994) PCR primers, and then digested with SfiI. Then, a fraction of cDNA fragments, typically 2-kb or longer (3-kb or longer in some cases), was unidirectionally cloned into a DraIII-digested pME18SFL3 vector (FIG. 1) (GenBank AB009864, Expression vector); and the cDNA library was thus prepared.

[0382] Shown below are the names of cDNA libraries used in the analysis of full-length cDNA sequences, and their origins. The Library Name is provided with the Type, Origin, and such of the library source, demarcated by a slash mark (/) within parentheses.

3NB69 (culture cells/NB69 cells (RCB #RCB0480))

ADIPS (Tissues/Adipose (Invitrogen #D6005-01))

ADRGL (Tissues/Adrenal gland (CLONTECH #64016-1))

AHMSC (culture cells/HMSC cells (Human mesenchymal cell))

ASTRO (primary culture cells/Normal Human Astrocyte NHA5732 (Takara Shuzo #CC2565))

BEAST (Tissues/Adult Breast (STARATAGENE #735044))

BLADE (Tissues/Bladder (Invitrogen #D6020-01))

BRACE (Tissues/Brain (cerebellum) (CLONTECH #64035-1))

BRALZ (Tissues/Cerebral cortex from an Alzheimer patient (Brain, cortex, Alzheimer) (Invitrogen #D6830-01))

BRAMY (Tissues/Brain (amygdala) (CLONTECH #6574-1))

BRAWH (Tissues/Whole brain (CLONTECH #64020-1))

BRCAN (Tissues/Brain (caudate nucleus) (CLONTECH #6575-1))

BRCOC (Tissues/Brain (corpus callosum) (CLONTECH #6577-1))

BRHIP (Tissues/Brain (hippocampus) (CLONTECH #6578-1))

BRSSN (Tissues/Brain (substantia nigra) (CLONTECH #6580-1))

BRSTN (Tissues/Brain (subthalamic nucleus) (CLONTECH #6581-1))

BRTHA (Tissues/Brain (thalamus) (CLONTECH #6582-1))

CERVX (Tissues/Cervix (Invitrogen #D6047-01))

CHONS (culture cells/Chondrocyte)

COLON (Tissues/Colon (Invitrogen #D6050-0))

CTONG (Tissues/Tongue Cancer)

D90ST (primary culture cells/CD34+ cells (treated with ODF for nine days to induce the differentiation))

DFNES (primary culture cells/Normal human dermal fibroblasts (neonatal skin); NHDF-Neo NHDF2564 (Takara Shuzo #CC2509))

ERLTF (culture cells/TF-1 cells (Erythroleukemia))

FCBBF (Tissues/Fetal brain)

FEBRA (Tissues/Fetal brain (CLONTECH #64019-1))

FEHRT (Tissues/Fetal heart (STARATAGENE #738012))

FEKID (Tissues/Fetal kidney)

FELNG (Tissues/Fetal lung (STARATAGENE #738020))

HCASM (primary culture cells/Normal human coronary artery smooth muscle cell HCASMC (Toyobo #T305K-05))

HCHON (primary culture cells/Normal human chondrocyte HC (Toyobo #T402K-05))

HEART (Tissues/Heart (CLONTECH #64025-1))

HHDPC (primary culture cells/Normal human dermal papilla cell HDPC (Toyobo #THPCK-001))

HLUNG (Tissues/Lung (CLONTECH #64023-1))

HSYRA (primary culture cells/Human synoviocyte HS-RA (from rheumatoid arthritis)(Toyobo #T404K-05))

JCMLC (culture cells/myelogenous leukemias)

KIDNE (Tissues/Kidney (CLONTECH #64030-1))

LIVER (Tissues/Liver (CLONTECH #64022-1))

LYMPB (primary culture cells/Lymphoblasts (EB virus transferred B cells))

MESAN (primary culture cells/Normal human mesangial cell NHMC56046-2 (Takara Shuzo #CC2559))

MESTC (culture cells/Mesenchyme stem cells)

N1ESE (culture cells/Mesenchyme stem cells)

NETRP (primary culture cells/Neutrophil)

NOVAR (Tissues/Adult ovary (STARATAGENE #735260))

NT2NE (culture cells/NT2 cells were treated with RA and the growth inhibitor for the neuronal differentiation, and the resultant neurons were concentrated and harvested (NT2 Neuron))

NT2RI (culture cells/NT2 cells treated with RA for five weeks to induce the differentiation, followed by the treatment with the growth inhibitor for 2 weeks)

NT2RP (culture cells/NT2 cells treated with RA for five weeks to induce the differentiation)

NTONG (Tissues/Normal tongue)

OCBBF (Tissues/Fetal brain)

PEBLM (primary culture cells/Normal human peripheral blood mononuclear cell HPBMC5939 (Takara Shuzo #CC2702))

PERIC (Tissues/Pericardium (Invitrogen #D6105-01))

PLACE (Tissues/Placenta)

PROST (Tissues/Prostate (CLONTECH #64038-1))

PUAEN (primary culture cells/Normal human pulmonary artery endothelial cells (Toyobo #T302K-05))

RECTM (Tissues/Rectum (Invitrogen #D6110-01))

SKMUS (Tissues/Skeletal Muscle (CLONTECH #64033-1))

SKNMC (culture cells/SK-N-MC cells (ATCC #HTB-10))

SKNSH (culture cells/SK-N-SH cells (RCB #RCB0426))

SMINT (Tissues/Small Intestine (CLONTECH #64039-1))

SPLEN (Tissues/Spleen (CLONTECH #64034-1))

STOMA (Tissues/Stomach (CLONTECH #64090-1))

SYNOV (Tissues/Synovial membrane tissue (from rheumatoid arthritis))

T1ESE (culture cells/Mesenchymal stem cell (treated with trichostatin and 5-azacytidine to induce the differentiation))

TBAES (Tissues/Breast (Tumor) (CLONTECH #64015-1))

TESOP (Tissues/Esophageal (Tumor) (Invitrogen #D6860-01))

TESTI (Tissues/Testis (CLONTECH #64027-1))

THYMU (Tissues/Thymus (CLONTECH #64028-1))

TKIDN (Tissues/Kidney (Tumor) (Invitrogen #D6870-01))

TLIVE (Tissues/Liver (Tumor) (Invitrogen #D6880-01))

TLUNG (Tissues/Lung (Tumor))

TRACH (Tissues/Trachea (CLONTECH #64091-1))

TSTOM (Tissues/Stomach (Tumor) (Invitrogen #D6920-01))

TUTER (Tissues/Uterus (Tumor) (CLONTECH #64008-1))

UTERU (Tissues/Uterus (CLONTECH #64029-1))

[0383] cDNA libraries with a high fullness ratio (the fullness ratio of 5′-end was 90% on average, calculated for each cDNA library using the protein coding region found in known mRNA species as an index) prepared by the improved oligo-capping method were constructed using a eukaryotic expression vector pME18SFL3. The vector contained SRα promoter and SV40 small t intron upstream of the cloning site, and SV40 polyA added signal sequence site downstream. As the cloning site of pME18SFL3 has asymmetrical DraIII sites, and the ends of cDNA fragments contain SfiI sites complementary to the DraIII sites, the cloned cDNA fragments can be inserted downstream of the SRα promoter unidirectionally. Therefore, clones containing full-length cDNA can be expressed transiently by introducing the obtained plasmid directly into COS cells, etc. Thus, clones can be analyzed very easily using the clone gene product proteins, or those proteins' biological activities.

(3) Assessment of 5′-End Completeness of Clones Derived from a cDNA Library Prepared by Oligo-Capping

[0384] With respect to the plasmid DNAs of clones derived from the libraries, the nucleotide sequences of cDNA 5′-ends (3′-ends as well in some cases) were determined in a DNA sequencer (ABI PRISM 3700, PE Biosystems), after sequencing reaction were conducted using a DNA sequencing reagent (BigDye Terminator Cycle Sequencing FS Ready Reaction Kit, PE Biosystems) according to the manual. A database was constructed based on the obtained data.

[0385] The 5′-end completeness of about 1,110,000 clones derived from the human cDNA libraries prepared by the improved oligo-capping method was determined using the following method. The clones whose 5′-end sequences were consistent with those of known human mRNA in the public database were judged to be “full-length” if they had a longer 5′-end sequence than that of the known human mRNA. Even if the 5′-end sequence was shorter, clones containing the translation initiation codon were judged to comprise the “full-length” sequence. Clones which did not comprise the translation initiation codon were judged to be “not-full-length”. The fullness ratio ((the number of full-length clones)/(the number of full-length and not-full-length clones)) at the 5′-end of the cDNA clones was determined by comparison with known human mRNA. The fullness ratio of the 5′-ends was found to be 90%. The result indicates that the fullness ratio at the 5′-end sequence was extremely high in human cDNA clones obtained by the oligo-capping method.

### EXAMPLE 2

### Sequencing Analysis of cDNA Ends and Selection of Full-Length Clones

[0386] With respect to the plasmid DNAs of clones obtained from each cDNA library, the 5′-end nucleotide sequences of the cDNAs were determined in a DNA sequencer (ABI PRISM 3700, PE Biosystems), after sequencing reaction was conducted by using a DNA sequencing reagent (Dye Terminator Cycle Sequencing FS Ready Reaction Kit, dRhodamine Terminator Cycle Sequencing FS Ready Reaction Kit or BigDye Terminator Cycle Sequencing FS Ready Reaction Kit, PE Biosystems) according to the manual. A database was constructed using the data obtained.

[0387] For the analyzed 5′-end sequences of cDNA clones, the data with the annotation of “complete cds” in the GenBank and UniGene were searched by BLAST homology search. When identical to certain human mRNA sequences, such cDNA clones were excluded. Then, clustering was carried out. When the identity was 90% or higher, and the length of consensus sequence was 50 base pairs or longer, the cDNA clones were assumed to belong to an identical cluster, and thus clustered. cDNA clones longer in the 5′ direction were selected from the members belonging to a cluster; if required, the 3′-end sequences of the selected clones were determined by the same analysis method as used to determine the 5′-end sequences. The data of the end sequences obtained were analyzed, and then the clones forming a sequence contig at 5′- and 3′-ends were excluded. Further, as mentioned above, the data was analyzed again by BLAST homology search; when identical to certain human mRNA sequences (including sequences patented and applied for), the cDNA clones were excluded. Thus, the cDNAs clones to be analyzed for their nucleotide sequence were obtained.

### EXAMPLE 3

### Analysis of the Full-Length Nucleotide Sequences

[0388] The full-length nucleotide sequences of the selected clones were determined. The nucleotide sequence determination was mainly performed by primer walking method comprising the dideoxy terminator method using custom-made synthetic DNA primers. Namely, the nucleotide sequences of the DNAs were determined in a sequencer from PE Biosystems, after sequencing reaction was carried out with a DNA sequencing reagent from the same supplier using the custom-made synthetic DNA primers according to the manual. A part of the clones were analyzed with a DNA sequencer from Licor.

[0389] Further, the nucleotide sequences of a part of the clones were determined by the shotgun method where the plasmids containing the cDNAs were digested at random were used, instead of the use of custom-made primers, by the same method in the DNA sequencer. The full-length nucleotide sequences were finally determined by completely assembling the partial nucleotide sequences obtained by the above method.

[0390] Then, the regions translatable to proteins were deduced from the determined full-length nucleotide sequences, and thereby the amino acid sequences were determined. SEQ ID NOs corresponding to the respective sequences are shown in Table 1.

### EXAMPLE 4

### Functional Prediction by Homology Search

[0391] SwissProt, RefSeq, and nr were searched using BLAST for the determined nucleotide sequences and the ORF amino acid sequences deduced to encode the polypeptides. Of the hit data which met the criteria described below, representative hit data were selected. This representative data is hit data with a higher homology and that enables relatively easy functional prediction for nucleotide sequences and deduced amino acid sequences. The results of the homology search are shown at the end of this specification.

[0392] Hit data whose P value or E value is 10⁻⁴ or less

[0393] For analysis using an amino acid database, hit data whose P value or E value is 10⁻⁴ or less, where the length of consensus sequence×homology=30 or higher,

[0394] Thus, only representative data are indicated and molecules exhibiting homology to each clone are not limited thereto. For some clones, hit data that do not meet the above-described criteria in BLAST search are not shown.

### EXAMPLE 5

### Search for Signal Sequence, Transmembrane Domain and Other Functional Domains in the Deduced Amino Acid Sequences

[0395] With respect to the amino acid sequences deduced from the full-length nucleotide sequences, the prediction was made for the presence of signal sequence at the amino terminus, the presence of transmembrane domain, and the presence of functional protein domains (motifs). The signal sequence at the amino terminus was searched for by PSORT [K. Nakai & M. Kanehisa, Genomics, 14: 897-911 (1992)]; the transmembrane domain, by SOSUI [T. Hirokawa et al., Bioinformatics, 14: 378-379 (1998)] (Mitsui Knowledge Industry); the function domain, by Pfam (Version 5.5) (http://www.sanger.ac.uk/Software/Pfam/index.shtml). The amino acid sequence in which the signal sequence at the amino terminus or transmembrane domain had been predicted to be present by PSORT or SOSUI were assumed to be a secretory or membrane protein. Further, when the amino acid sequence hit a certain functional domain by the Pfam functional domain search, the protein function can be predicted based on the hit data, for example, by referring to the function categories on the PROSITE (http://www.expasy.ch/cgi-bin/prosite-list.pl). In addition, the functional domain search can also be carried out on the PROSITE.

[0396] The search results obtained with the respective programs are shown below.

[0397] The 130 clones whose deduced amino acid sequences were detected to have the signal sequences by PSORT are as follows.

[0398] ADIPS2000069, ASTRO2015162, BEAST2000981, BLADE2001031, BRACE2017397, BRACE2023633, BRACE3009392, BRACE3013986, BRACE3014523, BRACE3026345, BRACE3032537, BRACE3037803, BRACE3051144, BRAMY2015516, BRAMY3002886, BRAMY3009556, BRAMY3016829, BRAWH2011958, BRAWH2016209, BRAWH3005886, BRAWH3012005, BRAWH3014609, BRAWH3016123, BRAWH3018063, BRAWH3020200, BRAWH3023421, BRAWH3028223, BRAWH3032298, BRAWH3034134, BRAWH3040695, BRAWH3042438, BRAWH3046196, BRAWH3049068, BRCAN2003269, BRCAN2006955, BRCAN2018269, BRHIP2006921, BRHIP2020930, BRHIP3000859, BRHIP3012997, BRHIP3016032, BRHIP3020046, BRHIP3020733, BRHIP3028742, BRHIP3030230, BRHIP3035754, BRSSN2018218, BRSTN2010089, BRSTN2011688, BRTHA2000969, BRTHA2014647, BRTHA2020400, BRTHA2020721, BRTHA2026290, BRTHA2030036, BRTHA2033320, BRTHA2033683, BRTHA3003225, BRTHA3014835, BRTHA3018623, BRTHA3026161, BRTHA3027820, COLON2005623, CTONG3002588, FEBRA2023498, FEKID2002493, HCHON2009766, JCMLC2002095, NETRP2004090, NETRP2005849, NT2RI3009524, NT2RP8008057, OCBBF3007704, OCBBF3021502, OCBBF3022123, OCBBF3028001, PEBLM2005615, SKMUS2008585, SPLEN2025012, SPLEN2035615, SPLEN2042051, STOMA2004663, SYNOV4009139, TESTI2037657, TESTI2049041, TESTI4002072, TESTI4022158, TESTI4024494, TESTI4035872, TESTI4043371, TESTI4045168, THYMU3003350, THYMU3014173, THYMU3015457, THYMU3023107, THYMU3025118, THYMU3025313, THYMU3025642, THYMU3026532, THYMU3026869, THYMU3028461, THYMU3029795, THYMU3034099, THYMU3036310, THYMU3036953, THYMU3037772, THYMU3038158, THYMU3038167, THYMU3040068, THYMU3040746, THYMU3044188, THYMU3045510, THYMU3047542, TRACH3003872, TRACH3014580, TRACH3016368, TRACH3019058, TRACH3020930, TRACH3021023, TRACH3021544, TRACH3022758, TRACH3023203, TRACH3023516, TRACH3025346, TRACH3026542, TRACH3026650, TRACH3029670, TRACH3031316, TRACH3034680, TRACH3036278

[0399] Deduced amino acid sequences of following nine clones were also detected to have the signal sequences by PSORT.

ADRGL2011190, PROST2010326, TBAES2004105, TBAES2007379, TBAES2008133, THYMU3044175, TLIVE2007192, UTERU2025415, UTERU2036507

[0400] The 455 clones whose deduced amino acid sequences were detected to have the transmembrane domains by SOSUI are as follows. Numerals indicate the numbers of transmembrane domains detected in the deduced amino acid sequences. Of the search result, the Clone Name and the Number of transmembrane domains are demarcated by a double slash mark (//).

[0401] 3NB692004045//5, ADRGL2010315//3, ASTRO2015162//5, BEAST2000981//4, BLADE2002744//2, BLADE2007744//1, BRACE2003628//4, BRACE2012528//1, BRACE2013126//3, BRACE2017580//2, BRACE2017992//2, BRACE2023633//2, BRACE2030039//6, BRACE2035191//1, BRACE3001973//2, BRACE3002264//11, BRACE3002344//1, BRACE3004981//1, BRACE3007869//3, BRACE3009392//6, BRACE3013874//2, BRACE3015898//1, BRACE3018083//1, BRACE3021517//1, BRACE3021805//1, BRACE3022051//1, BRACE3024379//2, BRACE3024444//2, BRACE3024497//2, BRACE3024879//6, BRACE3026345//1, BRACE3026456//1, BRACE3026802//2, BRACE3028360//2, BRACE3029021//1, BRACE3030538//5, BRACE3031372//3, BRACE3031579//3, BRACE3031728//1, BRACE3032385//8, BRACE3032980//1, BRACE3033525//1, BRACE3034964//1, BRACE3034993//2, BRACE3037637//3, BRACE3037803//2, BRACE3038570//3, BRACE3039358//1, BRACE3039378//6, BRACE3040644//1, BRACE3040863//2, BRACE3042326//11, BRACE3042409//4, BRACE3042432//2, BRACE3044090//2, BRACE3046049//1, BRACE3046152//3, BRACE3046466//2, BRACE3048565//2, BRACE3050504//7, BRACE3051144//3, BRACE3051621//3, BRACE3052486//1, BRALZ2011337//1, BRALZ2013690//2, BRAMY2015516//4, BRAMY2021098//1, BRAMY2025495//2, BRAMY2037609//2, BRAMY2040915//1, BRAMY2041507//2, BRAMY2044686//4, BRAMY2046537//5, BRAMY3002886//5, BRAMY3004126//6, BRAMY3007449//2, BRAMY3009904//2, BRAMY3010654//2, BRAMY3010902//2, BRAMY3015547//2, BRAMY3015549//2, BRAMY3016829//3, BRAWH2000256//5, BRAWH2010364//2, BRAWH2011812//1, BRAWH2012866//1, BRAWH2016209//5, BRAWH2016305//1, BRAWH3001053//1, BRAWH3001783//1, BRAWH3001833//7, BRAWH3005892//1, BRAWH3008867//2, BRAWH3010461//4, BRAWH3010657//1, BRAWH3011907//1, BRAWH3012662//1, BRAWH3012779//3, BRAWH3013049//1, BRAWH3014609//2, BRAWH3015175//1, BRAWH3018063//1, BRAWH3018969//5, BRAWH3019529//1, BRAWH3019820//3, BRAWH3020200//3, BRAWH3020884//1, BRAWH3021012//2, BRAWH3021641//2, BRAWH3022347//1, BRAWH3023156//1, BRAWH3023274//2, BRAWH3023415//1, BRAWH3024186//1, BRAWH3024242//3, BRAWH3027574//1, BRAWH3027880//5, BRAWH3028223//2, BRAWH3028754//2, BRAWH3029806//10, BRAWH3030810//1, BRAWH3034114//1, BRAWH3034134//1, BRAWH3035914//1, BRAWH3036270//1, BRAWH3038055//1, BRAWH3038324//3, BRAWH3040695//1, BRAWH3040711//2, BRAWH3042132//1, BRAWH3042438//1, BRAWH3042772//2, BRAWH3042996//2, BRAWH3043498//2, BRAWH3044676//1, BRAWH3046196//3, BRAWH3047063//1, BRAWH3048374//2, BRAWH3048724//2, BRAWH3049068//2, BRAWH3049544//1, BRCAN2002662//1, BRCAN2003269//3, BRCAN2018269//2, BRCAN2019653//2, BRCAN2020412//2, BRCAN2020972//1, BRCAN2022126//5, BRCOC2006164//8, BRCOC2006639//1, BRCOC2009638//3, BRHIP2021929//7, BRHIP3001878//3, BRHIP3002000//10, BRHIP3002124//3, BRHIP3003306//2, BRHIP3003395//1, BRHIP3004774//1, BRHIP3005801//1, BRHIP3006950//2, BRHIP3007195//8, BRHIP3007960//1, BRHIP3008320//6, BRHIP3010289//2, BRHIP3011831//1, BRHIP3012185//2, BRHIP3013078//1, BRHIP3016032//10, BRHIP3017146//3, BRHIP3017558//11, BRHIP3019956//1, BRHIP3021019//1, BRHIP3025795//11, BRHIP3025844//1, BRHIP3027160//1, BRHIP3027191//1, BRHIP3028742//2, BRHIP3029530//2, BRHIP3031733//1, BRHIP3033557//5, BRHIP3035222//2, BRHIP3036715//3, BRHIP3036936//1, BRHIP3037810//3, BRHIP3039430//4, BRHIP3041587//1, BRSSN2004710//1, BRSSN2018218//2, BRSTN2010089//11, BRSTN2011688//2, BRSTN2011899//1, BRTHA2000969//2, BRTHA2003759//3, BRTHA2012189//1, BRTHA2014647//2, BRTHA2018304//2, BRTHA2019726//1, BRTHA2019743//2, BRTHA2020566//1, BRTHA2020781//1, BRTHA2021212//1, BRTHA2021440//1, BRTHA2021450//1, BRTHA2022914//2, BRTHA2022968//1, BRTHA2023437//1, BRTHA2030036//3, BRTHA2031917//1, BRTHA2033469//2, BRTHA2033683//7, BRTHA2036055//1, BRTHA2036295//1, BRTHA3006593//1, BRTHA3010540//2, BRTHA3010717//4, BRTHA3011194//11, BRTHA3011998//3, BRTHA3012265//4, BRTHA3013882//3, BRTHA3014835//1, BRTHA3016616//2, BRTHA3018623//2, BRTHA3028505//1, CHONS2001797//1, CHONS2002419//2, COLON2005623//1, COLON2005735//10, CTONG2008989//4, CTONG2020582//1, CTONG2027150//1, CTONG3001605//5, CTONG3002588//1, CTONG3008223//2, FCBBF3012443//1, FEBRA2023498//1, FEBRA2026977//1, FEHRT2002708//4, FEKID2002231//1, FELNG2000720//1, FELNG2001706//1, HCHON2009766//12, HSYRA2004550//6, JCMLC2000273//1, KIDNE2004531//6, KIDNE2015987//2, KIDNE2017153//1, LYMPB1000158//1, LYMPB2002236//12, LYMPB2002478//2, MESAN2014624//5, N1ESE2000698//1, NETRP2004090//3, NETRP2004434//1, NETRP2005282//2, NETRP2005849//2, NT2RI3005861//1, NT2RI3009524//1, NT2RP7019682//2, NT2RP8001605//2, NT2RP8003787//6, NT2RP8008057//1, OCBBF2004478//4, OCBBF2018229//2, OCBBF2018618//6, OCBBF2036019//2, OCBBF3003745//2, OCBBF3007704//1, OCBBF3022123//1, OCBBF3022576//2, OCBBF3023175//3, OCBBF3023993//3, OCBBF3025475//13, OCBBF3025887//1, OCBBF3028001//2, PEBLM2003935//1, PEBLM2005615//9, PLACE5000522//2, PLACE6000012//3, PLACE6010936//6, PLACE6019674//1, PLACE7000266//1, PLACE7000707//2, PLACE7003639//3, PLACE7008136//2, PLACE7011269//2, PLACE7014247//3, PLACE7016321//3, PLACE7016454//2, PUAEN2000684//4, SKMUS2008585//2, SMINT2003641//1, SPLEN2007689//2, SPLEN2011252//3, SPLEN2031004//1, SPLEN2034551//1, SPLEN2035615//1, STOMA2004663//1, T1ESE2002665//12, TBAES2005361//1, TBAES2007428//2, TESOP2008556//1, TESTI2007490//2, TESTI2018335//10, TESTI2022323//6, TESTI2024267//9, TESTI2028613//3, TESTI2036822//5, TESTI2037085//1, TESTI2037877//1, TESTI2046188//1, TESTI4001037//2, TESTI4002072//6, TESTI4002889//2, TESTI4003602//6, TESTI4004539//8, TESTI4004653//9, TESTI4005399//11, TESTI4007671//1, TESTI4010544//13, TESTI4010721//6, TESTI4013774//2, TESTI4014415//14, TESTI4014932//2, TESTI4014977//1, TESTI4017647//1, TESTI4017854//2, TESTI4019149//1, TESTI4021377//4, TESTI4021569//4, TESTI4022158//2, TESTI4023096//9, TESTI4023654//1, TESTI4026680//1, TESTI4027170//1, TESTI4028042//2, TESTI4031818//1, TESTI4032128//1, TESTI4033177//2, TESTI4034973//3, TESTI4035989//1, TESTI4036012//3, TESTI4037949//2, TESTI4038047//2, TESTI4039575//1, TESTI4040559//4, TESTI4041049//2, TESTI4043067//1, TESTI4043371//3, TESTI4046073//1, TESTI4046450//2, TESTI4047119//11, TESTI4048296//2, TESTI4048545//1, TESTI4051015//3, TESTI4051858//1, TESTI4052219//2, TESTI4052430//1, TESTI4052598//1, THYMU3002825//1, THYMU3003007//1, THYMU3008935//1, THYMU3009755//2, THYMU3011360//2, THYMU3013197//1, THYMU3014173//1, THYMU3015647//9, THYMU3016518//2, THYMU3018151//2, THYMU3019605//1, THYMU3021404//7, THYMU3021586//3, THYMU3022211//2, THYMU3022528//3, THYMU3022668//1, THYMU3023107//5, THYMU3023400//9, THYMU3025313//1, THYMU3025642//2, THYMU3026306//1, THYMU3026532//2, THYMU3026869//1, THYMU3027540//2, THYMU3031878//4, THYMU3032032//2, THYMU3033649//2, THYMU3034616//2, THYMU3036310//1, THYMU3036934//2, THYMU3038158//1, THYMU3040126//3, THYMU3040146//2, THYMU3040172//2, THYMU3040746//2, THYMU3040816//2, THYMU3041918//1, THYMU3042321//1, THYMU3043688//4, THYMU3043779//2, THYMU3044188//2, THYMU3047115//7, THYMU3047156//3, THYMU3047542//2, THYMU3047760//2, TLIVE2008797//1, TRACH3003872//2, TRACH3004747//12, TRACH3005274//1, TRACH3005699//1, TRACH3007274//2, TRACH3007625//7, TRACH3009008//2, TRACH3009061//6, TRACH3010382//1, TRACH3011184//1, TRACH3012891//2, TRACH3013900//1, TRACH3014063//3, TRACH3015346//1, TRACH3016368//1, TRACH3016885//1, TRACH3016992//1, TRACH3017409//1, TRACH3018191//2, TRACH3018240//1, TRACH3018943//1, TRACH3019370//6, TRACH3019621//10, TRACH3020930//2, TRACH3022109//3, TRACH3023063//3, TRACH3023203//3, TRACH3023945//1, TRACH3024081//2, TRACH3024671//2, TRACH3025346//5, TRACH3026542//2, TRACH3026650//1, TRACH3027681//2, TRACH3029670//2, TRACH3031316//1, TRACH3031678//8, TRACH3032480//1, TRACH3038399//1, TSTOM2002682//1, UTERU3005422//3, UTERU3010029//3, UTERU3011092//8, UTERU3011837//1, UTERU3012414//1, UTERU3015647//1, UTERU3016273//5, UTERU3017626//6, UTERU3022168//1, UTERU3022922//2, UTERU3023413//1

[0402] Deduced amino acid sequences of following 14 clones were also detected to have the transmembrane domains by SOSUI.

BRAWH3013197//6, BRAWH3028645//7, BRAWH3046240//7, BRTHA3024233//3, PROST2010326//8, TBAES2004105//1, TBAES2007379//1, TBAES2007481//1, TESTI2043585//8, THYMU3024602//8, THYMU3044175//2, THYMU3046350//9, TLIVE2007192//2, TRACH3021066//2

[0403] The 796 clones whose deduced amino acid sequences were detected to have functional domains with Pfam are as follows. The search result is indicated as “Clone Name//Functional Domain Name”. When the clone has Multiple Hit Functional Domains, they are listed and demarcated by a double slash mark (//). When the clone has multiple hits of an identical functional domain, each is listed without abridgment.

3NB692004045//Sodium Bile acid symporter family//FecCD transport family

ADIPS2000069//Immunoglobulin domain//Immunoglobulin domain//Immunoglobulin domain//Immunoglobulin domain//Immunoglobulin domain

[0404] ASTRO2016114//Zinc finger, C2H2 type//Zinc finger, C2H2 type//PHD-finger//Zinc finger, C2H2 type//Zinc finger, C2H2 type//Transcription factor S-II (TFIIS)//Zinc finger, C2H2 type//Zinc finger, C2H2 type//Zinc finger, C2H2 type//Zinc finger, C2H2 type//Zinc finger, C2H2 type//Zinc finger, C2H2 type

BEAST2000981//PA domain//Zinc finger, C3HC4 type (RING finger)//PHD-finger

BLADE2001031//Thrombospondin type 1 domain

BLADE2002310//RhoGAP domain

BLADE2008809//PH domain

BRACE1000475//Enoyl-CoA hydratase/isomerase family

BRACE2003628//NADH-Ubiquinone oxidoreductase (complex I), chain 5 C-terminus

BRACE2010336//TPR Domain//TPR Domain//TPR Domain//TPR Domain//TPR Domain//TPR Domain//TPR Domain

BRACE2012528//alpha/beta hydrolase fold

BRACE2012625//RNA recognition motif. (a.k.a. RRM, RBD, or RNP domain)//RNA recognition motif. (a.k.a. RRM, RBD, or RNP domain)//RNA recognition motif. (a.k.a. RRM, RBD, or RNP domain)

BRACE2013009//EF hand

BRACE2013132//Adenosine/AMP deaminase

BRACE2016896//tRNA synthetases class II (F)//tRNA synthetases class II (F)//tRNA synthetases class II (D, K and N)

BRACE2017397//von Willebrand factor type A domain

BRACE2017872//PWWP domain

BRACE2019348//Zinc finger, C2H2 type//Zinc finger, C2H2 type

BRACE2023744//Translationally controlled tumor protein

BRACE2034434//Protein of unknown function

BRACE2035120//Inositol polyphosphate phosphatase family, catalytic domain

BRACE2042541//Ank repeat//Ank repeat//Glutathione S-transferases.

BRACE2046976//Collagen triple helix repeat (20 copies)

BRACE2047975//Eukaryotic protein kinase domain

BRACE3001973//EGF-like domain//Laminin G domain//EGF-like domain//EGF-like domain//EGF-like domain

BRACE3002264//GNS1/SUR4 family//Ion transport protein//Ion transport protein

BRACE3002344//WD domain, G-beta repeat//WD domain, G-beta repeat//WD domain, G-beta repeat//WD domain, G-beta repeat//PQQ enzyme repeat//WD domain, G-beta repeat//WD domain, G-beta repeat//WD domain, G-beta repeat//WD domain, G-beta repeat

BRACE3002756//SAM domain (Sterile alpha motif)

BRACE3003866//Src homology domain 2

BRACE3004767//PH domain

BRACE3005903//K-box region//TSC-22/dip/bun family

BRACE3009392//Aminotransferases class-III pyridoxal-phosphate//Sodium:dicarboxylate symporter family

BRACE3013418//Ank repeat//Ank repeat//ZU5 domain//Death domain//TGF-beta propeptide//Fatty acid desaturase//Isocitrate lyase

BRACE3013874//Leucine rich repeat C-terminal domain//Immunoglobulin domain//Fibronectin type III domain

BRACE3014523//Wiskott Aldrich syndrome homology region 2

BRACE3015898//PI3-kinase family, ras-binding domain

BRACE3017253//Adenylate kinase//Transferrin

BRACE3019570//Troponin

BRACE3019941//TPR Domain//TPR Domain//DNA-dependent RNA polymerase//TPR Domain//TPR Domain//TPR Domain//7-fold repeat in Clathrin and VPS//TPR Domain//TPR Domain//TPR Domain//TPR Domain

BRACE3022303//BRCA1 C Terminus (BRCT) domain//BRCA1 C Terminus (BRCT) domain

BRACE3022340//Troponin

BRACE3024444//Copper/zinc superoxide dismutase (SODC)

BRACE3024879//7 transmembrane receptor (Secretin family)

BRACE3025719//Zinc finger, C3HC4 type (RING finger)//Filamin/ABP280 repeat.//NHL repeat//NHL repeat//NHL repeat//NHL repeat//Squash family of serine protease inhibitors

BRACE3026345//Insulin/IGF/Relaxin family

[0405] BRACE3026844//KRAB box//Zinc finger, C2H2 type//Zinc finger, C2H2 type//Zinc finger, C2H2 type//Zinc finger, C2H2 type//Zinc finger, C2H2 type//Zinc finger, C2H2 type//PHD-finger//Zinc finger, C2H2 type//Zinc finger, C2H2 type//TRAF-type zinc finger//Zinc finger, C2H2 type//Zinc finger, C2H2 type//Zinc finger, C2H2 type//Zinc finger, C2H2 type//Zinc finger, C2H2 type//Transcription factor S-II (TFIIS)//Zinc finger, C2H2 type

BRACE3026947//FYVE zinc finger

BRACE3029021//Zinc finger, C2H2 type

BRACE3031315//Serine hydroxymethyltransferase//UBA domain

BRACE3031372//D-isomer specific 2-hydroxyacid dehydrogenases

BRACE3031743//RNA recognition motif. (a.k.a. RRM, RBD, or RNP domain)

BRACE3032385//Ion transport protein

BRACE3032537//Luteovirus (ORF3) RNA-directed RNA-polymerase

BRACE3033525//Prolyl oligopeptidase family

[0406] BRACE3034183//Zinc finger, C2H2 type//PHD-finger//Zinc finger, C2H2 type//Plant PEC family metallothionein//Transcription factor S-II (TFIIS)//Zinc finger, C2H2 type//Zinc finger, C2H2 type//Zinc finger, C2H2 type//FYVE zinc finger//Zinc finger, C2H2 type//RNA polymerases M/15 Kd subunits//Zinc finger, C2H2 type//Zinc finger, C2H2 type//TRAF-type zinc finger//Zinc finger, C2H2 type//Zinc finger, C2H2 type//Zinc finger, C2H2 type//Zinc finger, C2H2 type//Zinc finger, C2H2 type//Zinc finger, C2H2 type

BRACE3034964//alpha/beta hydrolase fold

BRACE3036283//DnaJ domain

BRACE3039288//Viral RNA dependent RNA polymerase

BRACE3039358//Leucine Rich Repeat//Leucine Rich Repeat//Leucine rich repeat C-terminal domain//Immunoglobulin domain//Immunoglobulin domain//Immunoglobulin domain

BRACE3039378//Pentaxin family//Receptor family ligand binding region//7 transmembrane receptor (metabotropic glutamate family)

BRACE3039454//Aminotransferases class-III pyridoxal-phosphate

BRACE3040239//Zinc finger, C3HC4 type (RING finger)

BRACE3040644//Low-density lipoprotein receptor domain class A//EB module//Low-density lipoprotein receptor domain class A//CUB domain//Low-density lipoprotein receptor domain class A//Low-density lipoprotein receptor domain class A

BRACE3041059//Ubiquitin carboxyl-terminal hydrolases family 2//Ubiquitin carboxyl-terminal hydrolase family 2

BRACE3041162//Zinc finger, C2H2 type//Zinc finger, C2H2 type//PHD-finger//Zinc finger, C2H2 type//Zinc finger, C2H2 type//Zinc finger, C2H2 type//Zinc finger, C2H2 type//Putative zinc finger in N-recognin

BRACE3042046//RhoGEF domain//PH domain

BRACE3042409//AMP-binding enzyme

BRACE3042432//7 transmembrane receptor (Secretin family)

BRACE3043597//KOW motif

BRACE3044172//Phosphatidylinositol 3- and 4-kinases

BRACE3045424//PH domain

[0407] BRACE3046466//EGF-like domain//EGF-like domain//Laminin G domain//Laminin G domain//EGF-like domain//Laminin G domain//EGF-like domain//Laminin G domain//Laminin G domain//EGF-like domain//EGF-like domain//Laminin EGF-like (Domains III and V)//EB module//EGF-like domain//EGF-like domain

BRACE3046491//PDZ domain (Also known as DHR or GLGF).//PDZ domain (Also known as DHR or GLGF).//PDZ domain (Also known as DHR or GLGF).//SH3 domain//Guanylate kinase

BRACE3047482//Zinc finger, C3HC4 type (RING finger)//Zinc finger, C3HC4 type (RING finger)//B-box zinc finger.//CONSTANS family zinc finger//B-box zinc finger.//Fibronectin type III domain//SPRY domain

BRACE3048615//Leucine Rich Repeat//Leucine Rich Repeat

BRACE3049714//Dihydroneopterin aldolase

BRACE3050270//Reverse transcriptase (RNA-dependent DNA polymerase)

BRACE3050504//Ion transport protein

BRACE3051621//Latrophilin/CL-1-like GPS domain//PLAT/LH2 domain//Regulator of G protein signaling domain

BRACE3051819//Myosin head (motor domain)//IQ calmodulin-binding motif//IQ calmodulin-binding motif//Myosin tail//KE2 family protein//Myosin tail//lactate/malate dehydrogenase//Troponin//Myosin tail

BRACE3052321//SH3 domain

BRACE3052410//Viral methyltransferase

BRACE3052595//C2 domain

BRALZ2010842//Mitochondrial carrier proteins

BRALZ2013621//KH domain

BRAMY2031516//wnt family of developmental signaling proteins

BRAMY2040915//Immunoglobulin domain

BRAMY2041347//Mov34/MPN/PAD-1 family

BRAMY2041384//Annexin//Annexin//Annexin//Annexin//Annexin//Annexin

BRAMY2046537//PMP-22/EMP/MP20/Claudin family

BRAMY3000692//Zinc finger, C2H2 type//Zinc finger, C2H2 type

BRAMY3002886//Domain of unknown function//CBS domain//CBS domain

BRAMY3004126//Transmembrane 4 family//7 transmembrane receptor (rhodopsin family)

BRAMY3005184//ZU5 domain//Death domain

BRAMY3007078//Inositol monophosphatase family//PHD-finger//PHD-finger

BRAMY3009491//Phosphatidylinositol 3- and 4-kinases

BRAMY3010321//SAM domain (Sterile alpha motif)//PH domain//PH domain//Putative GTP-ase activating protein for Arf

BRAMY3011501//SAP domain//SPRY domain

BRAMY3011581//Prokaryotic DNA topoisomerase//Topoisomerase DNA binding C4 zinc finger//PHD-finger//Zinc finger, CCHC class

[0408] BRAMY3014027//KRAB box//Zinc finger, C2H2 type//Zinc finger, C2H2 type//Zinc finger, C2H2 type//Zinc finger, C2H2 type//Zinc finger, C2H2 type//Zinc finger, C2H2 type//Zinc finger, C2H2 type//Zinc finger, C2H2 type//Zinc finger, C2H2 type//Zinc finger, C2H2 type//Zinc finger, C2H2 type//Zinc finger, C2H2 type//Zinc finger, C2H2 type//Zinc finger, C2H2 type//Zinc finger, C2H2 type//Zinc finger, C2H2 type//Zinc finger, C2H2 type//Transcription factor S-II (TFIIS)//Zinc finger, C2H2 type

BRAMY3014613//RhoGAP domain//haloacid dehalogenase-like hydrolase

BRAMY3015086//FERM domain (Band 4.1 family)

BRAMY3015547//RhoGEF domain

BRAMY3015549//Immunoglobulin domain//Immunoglobulin domain//Immunoglobulin domain//Immunoglobulin domain//Immunoglobulin domain//Fibronectin type III domain//Fibronectin type III domain//Fibronectin type III domain//Fibronectin type III domain

BRAMY3017920//RhoGEF domain//PH domain//RhoGAP domain

BRAMY3018754//Protein of unknown function//Domain of unknown function

[0409] BRAMY4000915//Ank repeat//Ank repeat//Ank repeat//Ank repeat//Ank repeat//Ank repeat//Ank repeat//Ank repeat//Ank repeat//Ank repeat//Glutamine amidotransferases class-II//Ank repeat//Ank repeat//Ank repeat//Ank repeat//Ank repeat//Ank repeat//Hantavirus nucleocapsid protein//Ank repeat//Ank repeat

BRAMY4000962//Tudor domain

[0410] BRAMY4001652//Ank repeat//Ank repeat//Ank repeat//Ank repeat//Ank repeat//Ank repeat//Ank repeat//Ank repeat//Ank repeat//Ank repeat//Ank repeat//Ank repeat//Ank repeat//Ank repeat//Ribosomal protein L34//Ank repeat//Ank repeat//Ank repeat//Uncharacterized protein family UPF0028

BRAMY4002575//Zinc finger, C2H2 type//Transcription factor S-II (TFIIS)//Zinc finger, C2H2 type//Zinc finger, C2H2 type

BRAWH2000256//Progesterone receptor//Cytochrome c oxidase subunit III//Sulfate transporter family

BRAWH2002333//3′5′-cyclic nucleotide phosphodiesterase

BRAWH2011796//S-100/ICaBP type calcium binding domain//EF hand

BRAWH2011812//Syndecan domain//BNR repeat//BNR repeat//BNR repeat//BNR repeat//BNR repeat//PKD domain

BRAWH2012866//C2 domain//C2 domain

BRAWH2014053//Sigma-54 transcription factors//ATPases associated with various cellular activities (AAA)

BRAWH2016209//Zinc finger, C3HC4 type (RING finger)//PHD-finger

BRAWH2016223//TPR Domain

BRAWH2016785//Pyridine nucleotide-disulphide oxidoreductase

BRAWH3000446//Zinc finger, C2H2 type//Zinc finger, C2H2 type//Zinc finger, C2H2 type//Zinc finger, C2H2 type//Zinc finger, C2H2 type

BRAWH3001783//Cadherin domain//Cadherin domain//Cadherin domain//Cadherin domain//Cadherin domain

BRAWH3003573//EF hand//EF hand//EF hand

BRAWH3005886//Rubredoxin//PHD-finger

BRAWH3008167//Sushi domain (SCR repeat)//CUB domain//Sushi domain (SCR repeat)//CUB domain//Sushi domain (SCR repeat)//CUB domain//Sushi domain (SCR repeat)//CUB domain

BRAWH3009961//PHD-finger//Glycophorin A//PDZ domain (Also known as DHR or GLGF).//C2 domain//C2 domain

BRAWH3010657//Ubiquitin carboxyl-terminal hydrolases family 2//Ubiquitin carboxyl-terminal hydrolase family 2

BRAWH3011331//Disintegrin

BRAWH3011577//KRAB box

BRAWH3011623//RNA recognition motif. (a.k.a. RRM, RBD, or RNP domain)

[0411] BRAWH3013009//Zinc finger, C2H2 type//Zinc finger, C2H2 type//Zinc finger, C2H2 type//Zinc finger, C2H2 type//Zinc finger, C2H2 type//Zinc finger, C2H2 type//Zinc finger, C2H2 type//Zinc finger, C2H2 type//Zinc finger, C2H2 type//Zinc finger, C2H2 type//Zinc finger, C2H2 type//Putative zinc finger in N-recognin//Zinc finger, C2H2 type//DM DNA binding domain//Zinc finger, C2H2 type

BRAWH3013264//SNF2 and others N-terminal domain//SNF2 and others N-terminal domain//TPR Domain//3C cysteine protease (picornain 3C)//Zinc finger, C3HC4 type (RING finger)//Plant PEC family metallothionein//Helicases conserved C-terminal domain

[0412] BRAWH3014609//Leucine rich repeat N-terminal domain//Leucine Rich Repeat//Leucine Rich Repeat//Leucine Rich Repeat//Leucine Rich Repeat//Leucine Rich Repeat//Leucine Rich Repeat//Leucine Rich Repeat//Leucine Rich Repeat//Leucine Rich Repeat//Leucine Rich Repeat//Leucine Rich Repeat//Leucine rich repeat C-terminal domain

BRAWH3015175//Xylose isomerase//Intermediate filament proteins//Helix-loop-helix DNA-binding domain//ATP synthase Alpha chain, C terminal

BRAWH3015610//TFIIE beta subunit core domain

BRAWH3017180//Phorbol esters/diacylglycerol binding domain (C1 domain)//Diacylglycerol kinase catalytic domain (presumed)//Diacylglycerol kinase accessory domain (presumed)//Ank repeat//Ank repeat

BRAWH3017259//Carboxylesterases//Syntaxin//SAM domain (Sterile alpha motif)

BRAWH3017260//Pancreatic hormone peptides

BRAWH3017477//Zinc finger, C2H2 type//Zinc finger, C2H2 type//Zinc finger, C2H2 type

BRAWH3018063//Rap/ran-GAP

BRAWH3018548//Intermediate filament proteins//Vinculin family

BRAWH3019026//WD domain, G-beta repeat//WD domain, G-beta repeat//WD domain, G-beta repeat//Protein phosphatase 2A regulatory subunit PR55//WD domain, G-beta repeat//WD domain, G-beta repeat//WD domain, G-beta repeat

BRAWH3021574//Wiskott Aldrich syndrome homology region 2

BRAWH3021580//Intermediate filament proteins//Zinc finger, CCHC class

BRAWH3021724//Transglutaminase-like superfamily

BRAWH3022347//Leucine Rich Repeat

BRAWH3022431//FGGY family of carbohydrate kinases

BRAWH3022651//PHD-finger//Zn-finger in ubiquitin-hydrolases and other proteins

BRAWH3022719//Eukaryotic initiation factor 4E

BRAWH3023156//Neurotransmitter-gated ion-channel

BRAWH3023415//Glycosyl hydrolase family 47

BRAWH3024186//Fibronectin type III domain//Protein-tyrosine phosphatase//Dual specificity phosphatase, catalytic domain//Protein-tyrosine phosphatase

BRAWH3024231//TPR Domain//TPR Domain//TPR Domain

BRAWH3024506//I/LWEQ domain

BRAWH3025157//Ank repeat//Ank repeat//Ank repeat//BTB/POZ domain//K+ channel tetramerisation domain

BRAWH3026349//PX domain

BRAWH3026938//PDZ domain (Also known as DHR or GLGF).

BRAWH3027440//TPR Domain//TPR Domain//TPR Domain//TPR Domain//PPR repeat

BRAWH3027533//AN1-like Zinc finger//PHD-finger//FYVE zinc finger

BRAWH3027574//TBC domain//EF hand

BRAWH3027607//DNA binding domain with preference for A/T rich regions

BRAWH3027806//WD domain, G-beta repeat//WD domain, G-beta repeat//WD domain, G-beta repeat//WD domain, G-beta repeat//Arenavirus nucleocapsid protein//WD domain, G-beta repeat//WD domain, G-beta repeat

BRAWH3027880//Integral membrane protein//AN1-like Zinc finger//DHHC zinc finger domain

[0413] BRAWH3028796//Zinc finger C-x8-C-x5-C-x3-H type (and similar).//Zinc finger C-x8-C-x5-C-x3-H type (and similar).//Zinc finger C-x8-C-x5-C-x3-H type (and similar).//Zinc finger, C3HC4 type (RING finger)//Integrase Zinc binding domain//Zinc finger C-x8-C-x5-C-x3-H type (and similar).//Protein phosphatase 2A regulatory B subunit (B56 family)

BRAWH3029385//PH domain//Dynamin GTPase effector domain

BRAWH3029806//Copper/zinc superoxide dismutase (SODC)//Adenylate and Guanylate cyclase catalytic domain//NADH-ubiquinone oxidoreductase chain 4, amino terminus//Endothelin family

BRAWH3030772//Ank repeat//Ank repeat//Ank repeat

BRAWH3030910//SAM domain (Sterile alpha motif)

[0414] BRAWH3031342//Zinc finger, C2H2 type//Zinc finger, C2H2 type//Zinc finger, C2H2 type//Zinc finger, C2H2 type//Zinc finger, C2H2 type//Zinc finger, C2H2 type//Zinc finger, C2H2 type//Zinc finger, C2H2 type//Zinc finger, C2H2 type//Zinc finger, C2H2 type//Zinc finger, C2H2 type//Zinc finger, C2H2 type//Zinc finger, C2H2 type//Putative zinc finger in N-recognin//Zinc finger, C2H2 type//Zinc finger, C2H2 type//Transcription factor S-II (TFIIS)//Src homology domain 2//Zinc finger, C2H2 type//Zinc finger, C2H2 type//Src homology domain 2//Zinc finger, C2H2 type

BRAWH3031710//Zinc finger, C2H2 type//Zinc finger, C2H2 type//Zinc finger, C2H2 type//Zinc finger, C2H2 type//Zinc finger, C2H2 type

[0415] BRAWH3032298//EGF-like domain//EGF-like domain//EGF-like domain//EB module//EGF-like domain//Fibronectin type III domain//Fibronectin type III domain//Fibronectin type III domain//Fibronectin type III domain//Fibronectin type III domain//Fibronectin type III domain//Fibronectin type III domain//Fibronectin type III domain//Fibronectin type III domain//Fibrinogen beta and gamma chains, C-terminal globular domain

BRAWH3032340//RhoGEF domain//PH domain//Ezrin/radixin/moesin family

[0416] BRAWH3032571//PHD-finger//von Willebrand factor type C domain//PHD-finger//‘chromo’ (CHRromatin Organization MOdifier) domain//‘chromo’ (CHRromatin Organization MOdifier) domain//DEAD/DEAH box helicase//SNF2 and others N-terminal domain//Helicases conserved C-terminal domain

BRAWH3033448//TPR Domain//TPR Domain

BRAWH3033513//Thiolase

BRAWH3034668//Ubiquitin carboxyl-terminal hydrolases family 2//E7 protein, Early protein//Ubiquitin carboxyl-terminal hydrolase family 2

BRAWH3034743//ATP synthase (E/31 kDa) subunit//Ezrin/radixin/moesin family

BRAWH3034775//SAP domain//SPRY domain

BRAWH3035403//RNA recognition motif. (a.k.a. RRM, RBD, or RNP domain)//RNA recognition motif. (a.k.a. RRM, RBD, or RNP domain)

BRAWH3035914//TBC domain

[0417] BRAWH3035936//Zinc finger, C2H2 type//Zinc finger, C2H2 type//Zinc finger, C2H2 type//Zinc finger, C2H2 type//Zinc finger, C2H2 type//Zinc finger, C2H2 type//Zinc finger, C2H2 type//Zinc finger, C2H2 type//Zinc finger, C2H2 type//Zinc finger, C2H2 type//PHD-finger//Zinc finger, C2H2 type//Zinc finger, C2H2 type//Zinc finger, C2H2 type//Zinc finger, C2H2 type//Zinc finger, C2H2 type//Zinc finger, C2H2 type//Zinc finger, C2H2 type//Zinc finger, C2H2 type//Zinc finger, C2H2 type//Zinc finger, C2H2 type//Zinc finger, C2H2 type//Zinc finger, C2H2 type//Zinc finger, C2H2 type

[0418] BRAWH3036247//BTB/POZ domain//Zinc finger, C2H2 type//Zinc finger, C2H2 type//Zinc finger, C2H2 type//Zinc finger, C2H2 type//Phorbol esters/diacylglycerol binding domain (C1 domain)//Zinc finger, C2H2 type//Ribosomal protein L31//Zinc finger, C2H2 type//Zinc finger, C2H2 type//Zinc finger, C2H2 type//Zinc finger, C2H2 type

BRAWH3036270//Atrial natriuretic peptide

[0419] BRAWH3036334//Zinc finger, C2H2 type//Zinc finger, C2H2 type//Zinc finger, C2H2 type//Zinc finger, C2H2 type//Zinc finger, C2H2 type//Zinc finger, C2H2 type//Zinc finger, C2H2 type//Zinc finger, C2H2 type//Zinc finger, C2H2 type//Zinc finger, C2H2 type//Zinc finger, C2H2 type//Zinc finger, C2H2 type//Zinc finger, C2H2 type//Zinc finger, C2H2 type//Zinc finger, C2H2 type//Zinc finger, C2H2 type//Zinc finger, C2H2 type//Zinc finger, C2H2 type//Zinc finger, C2H2 type//Zinc finger, C2H2 type//Zinc finger, C2H2 type

BRAWH3037265//SURF4 family

BRAWH3037428//ADP-ribosylation factor family//Ras family

BRAWH3037979//wnt family of developmental signaling proteins//Ubiquitin carboxyl-terminal hydrolases family 2//Ubiquitin carboxyl-terminal hydrolase family 2

BRAWH3038055//Spectrin repeat//Myb-like DNA-binding domain//Spectrin repeat//7-fold repeat in Clathrin and VPS//Spectrin repeat//Spectrin repeat//Spectrin repeat//Spectrin repeat//Spectrin repeat

BRAWH3038252//Formin Homology 2 Domain

BRAWH3038324//Dehydrins

BRAWH3038827//Kelch motif//Kelch motif//Kelch motif//Kelch motif//BTB/POZ domain//BTB/POZ domain

BRAWH3041556//Tetrahydrofolate dehydrogenase/cyclohydrolase//Formate—tetrahydrofolate ligase

BRAWH3041928//Wilm's tumour protein

BRAWH3042438//‘Paired box’ domain//EF hand//Phorbol esters/diacylglycerol binding domain (C1 domain)

BRAWH3042568//Homeobox domain

BRAWH3042772//Cation efflux family

BRAWH3042787//Gag P30 core shell protein//Zinc finger, CCHC class

BRAWH3043295//Inorganic pyrophosphatase

BRAWH3044122//C2 domain//Sigma-70 factor

BRAWH3044151//Thrombospondin type 1 domain//Thrombospondin type 1 domain//Thrombospondin type 1 domain//Keratin, high sulfur B2 protein//Thrombospondin type 1 domain

BRAWH3044985//Phosphotriesterase family

BRAWH3045118//DnaJ domain

BRAWH3046424//Histone deacetylase family

BRAWH3047692//Shikimate kinase//ATPases associated with various cellular activities (AAA)

[0420] BRAWH3048374//Sushi domain (SCR repeat)//Sushi domain (SCR repeat)//Sushi domain (SCR repeat)//Sushi domain (SCR repeat)//Sushi domain (SCR repeat)//Sushi domain (SCR repeat)//Sushi domain (SCR repeat)//Keratin, high sulfur B2 protein//Sushi domain (SCR repeat)

BRAWH3048724//Subtilase family

BRAWH3049544//Glycosyl transferases//Similarity to lectin domain of ricin beta-chain, 3 copies.

BRCAN2000923//ADP-ribosylation factor family//Ras family

BRCAN2002892//ADP-ribosylation factor family//Ras family

BRCAN2003269//ABC transporter

BRCAN2003814//Phosphatidylinositol-specific phospholipase C, X domain

BRCAN2006051//Peptidase family M41

BRCAN2010665//PDZ domain (Also known as DHR or GLGF).//PDZ domain (Also known as DHR or GLGF).//PDZ domain (Also known as DHR or GLGF).

BRCAN2015402//Cytochrome P450

BRCAN2019907//EF hand

BRCAN2020234//Lipocalin/cytosolic fatty-acid binding protein family

BRCAN2020331//RNA recognition motif. (a.k.a. RRM, RBD, or RNP domain)//RNA recognition motif. (a.k.a. RRM, RBD, or RNP domain)//RNA recognition motif. (a.k.a. RRM, RBD, or RNP domain)

BRCAN2021325//Zinc carboxypeptidase//Zinc carboxypeptidase

BRCAN2021452//Zinc finger, CCHC class//Zinc finger, CCHC class

BRCAN2021718//Ribosomal protein L10

BRCAN2022126//IstB-like ATP binding protein//Receptor family ligand binding region//Bacterial extracellular solute-binding proteins, family 3//Ligand-gated ion channel

BRCAN2025093//Ank repeat//Flagellar FliJ protein//Ank repeat

BRCOC2001355//GTP1/OBG family//Phosphoribulokinase//Adenylylsulfate kinase

BRCOC2006164//ATP synthase subunit C//Nucleoside transporter//Sugar (and other) transporter//Influenza RNA-dependent RNA polymerase subunit PA

BRCOC2006639//Leucine Rich Repeat//Leucine Rich Repeat//Leucine Rich Repeat//Leucine Rich Repeat

BRCOC2012386//KRAB box//Zinc finger, C2H2 type//Zinc finger, C2H2 type//Zinc finger, C2H2 type//Transcription factor S-II (TFIIS)//Zinc finger, C2H2 type//Zinc finger, C2H2 type//Zinc finger, C2H2 type//Zinc finger, C2H2 type

BRHIP2008756//MAS20 protein import receptor//BRCA1 C Terminus (BRCT) domain

BRHIP2013958//Domain of unknown function//MSP (Major sperm protein) domain

BRHIP2026346//Formin Homology 2 Domain

BRHIP2027077//Zinc finger, C2H2 type//Zinc finger, C2H2 type

BRHIP2027563//Kelch motif

BRHIP2029663//TPR Domain//Zinc finger, C3HC4 type (RING finger)//ATP-dependent protease La (LON) domain

BRHIP3000859//Wilm's tumour protein

BRHIP3001481//Protein-tyrosine phosphatase

BRHIP3001878//POT family

BRHIP3002000//Peptidase family M20/M25/M40//Sugar (and other) transporter

BRHIP3002114//Mandelate racemase/muconate lactonizing enzyme family

BRHIP3002141//DNA polymerase (viral) C-terminal domain

BRHIP3003063//cAMP phosphodiesterases class-II//Vinculin family

BRHIP3003126//HECT-domain (ubiquitin-transferase).

BRHIP3003306//Uncharacterized protein family//Rap/ran-GAP

BRHIP3003340//Actin

BRHIP3003795//Cytochrome P450

BRHIP3004710//TPR Domain//TPR Domain//TPR Domain

BRHIP3004725//tRNA synthetases class I (C)

BRHIP3005037//BAH domain//ELM2 domain//Myb-like DNA-binding domain//GATA zinc finger

BRHIP3005142//Adaptin N terminal region

BRHIP3005231//TPR Domain//TPR Domain

BRHIP3005307//Glutathione S-transferases.//Uncharacterized protein family UPF0028

BRHIP3005673//Glutathione S-transferases.

BRHIP3005944//Scavenger receptor cysteine-rich domain//Scavenger receptor cysteine-rich domain

BRHIP3006294//SH3 domain//RhoGAP domain

BRHIP3006449//Armadillo/beta-catenin-like repeats//Armadillo/beta-catenin-like repeats//Armadillo/beta-catenin-like repeats//Armadillo/beta-catenin-like repeats//Armadillo/beta-catenin-like repeats

BRHIP3006786//Sec7 domain

BRHIP3007195//Type I restriction modification DNA specificity domain//E1-E2 ATPase//E1-E2 ATPase//Neuraxin and MAPLB proteins//E1-E2 ATPase//Cof family

BRHIP3007223//Ubiquitin carboxyl-terminal hydrolases family 2//Ubiquitin carboxyl-terminal hydrolase family 2

BRHIP3007424//wnt family of developmental signaling proteins

BRHIP3007609//PHD-finger

BRHIP3008320//Transmembrane region cyclic Nucleotide Gated Channel

BRHIP3009753//CUB domain//Low-density lipoprotein receptor domain class A

[0421] BRHIP3010289//Delta serrate ligand//Kelch motif//Kelch motif//Plexin repeat//Plexin repeat//Lectin C-type domain//Plexin repeat//Plexin repeat//Laminin EGF-like (Domains III and V)//Keratin, high sulfur B2 protein//Laminin EGF-like (Domains III and V)

BRHIP3011082//HECT-domain (ubiquitin-transferase).

BRHIP3011460//RhoGEF domain//PH domain//SH3 domain

BRHIP3011567//Dihydropyridine sensitive L-type calcium channel (Beta subunit)//Dihydropyridine sensitive L-type calcium channel (Beta subunit)

BRHIP3012289//Flavin containing amine oxidase

BRHIP3012736//Collagen triple helix repeat (20 copies)

BRHIP3014675//Ank repeat//Ank repeat//Ank repeat//BTB/POZ domain//K+ channel tetramerisation domain

BRHIP3016032//Integral membrane protein//Divalent cation transporter//TPR Domain//TPR Domain//TPR Domain

BRHIP3017109//Src homology domain 2

BRHIP3017256//LIM domain containing proteins//AN1-like Zinc finger

BRHIP3017558//eubacterial secY protein//FecCD transport family//Domain of unknown function//Sugar (and other) transporter//Sodium:galactoside symporter family//Monocarboxylate transporter

BRHIP3019643//Biopterin-dependent aromatic amino acid hydroxylase

BRHIP3019824//Prokaryotic transcription elongation factor, GreA/GreB

BRHIP3020733//Keratin, high sulfur B2 protein

BRHIP3021019//Protein-tyrosine phosphatase//Dual specificity phosphatase, catalytic domain

BRHIP3025795//Sugar (and other) transporter//Protein of unknown function//Sodium:galactoside symporter family//Herpesvirus glycoprotein M//Monocarboxylate transporter

BRHIP3027191//Hsp70 protein

BRHIP3027651//PHD-finger//PHD-finger

BRHIP3028246//CXXC zinc finger//PHD-finger//Beta type Zein

BRHIP3028570//PH domain//Fibroblast growth factor

BRHIP3029409//NTR/C345C module

BRHIP3030230//Pentaxin family

BRHIP3032374//Glutathione S-transferases.//Uncharacterized protein family UPF0028

BRHIP3033557//Pyridoxamine 5′-phosphate oxidase//Ligand-gated ion channel

BRHIP3033734//Keratin, high sulfur B2 protein

BRHIP3035006//Sialyltransferase family

BRHIP3036371//Immunoglobulin domain//Kunitz/Bovine pancreatic trypsin inhibitor domain//Kunitz/Bovine pancreatic trypsin inhibitor domain

BRHIP3036715//Class I Histocompatibility antigen, domains alpha 1 and 2//Immunoglobulin domain

BRHIP3036936//Fibronectin type III domain

BRHIP3037543//Eukaryotic protein kinase domain

BRHIP3038030//Pyridine nucleotide-disulphide oxidoreductase//Phytoene dehydrogenase related enzyme

BRHIP3038735//Immunoglobulin domain//Immunoglobulin domain//Immunoglobulin domain

BRHIP3039509//Notch (DSL) domain//Amiloride-sensitive sodium channel

BRHIP3039592//Zinc finger, C3HC4 type (RING finger)

BRHIP3041587//Eukaryotic protein kinase domain

BRSSN2004710//3′5′-cyclic nucleotide phosphodiesterase

BRSSN2011843//bZIP transcription factor//RNA polymerase alpha subunit

BRSSN2015497//Tudor domain

BRSTN2006638//EF hand//EF hand//Pancreatic hormone peptides

BRSTN2010089//Cell cycle protein//7 transmembrane receptor (Secretin family)

BRSTN2011961//Thioredoxin

BRSTN2012069//Elongation factor Tu family

BRSTN2016918//Transposase//Ezrin/radixin/moesin family//Intermediate filament proteins

BRTHA2001304//Exonuclease

BRTHA2005448//Calpain family cysteine protease//Calpain large subunit, domain III//EF hand

BRTHA2019726//Immunoglobulin domain//Immunoglobulin domain//Immunoglobulin domain//Immunoglobulin domain

BRTHA2020400//Immunoglobulin domain

BRTHA2020721//Immunoglobulin domain//Immunoglobulin domain//Immunoglobulin domain//Immunoglobulin domain

BRTHA2020910//Tubulin/FtsZ family

BRTHA2025869//Intermediate filament proteins//Intermediate filament proteins

BRTHA2026290//Guanine nucleotide exchange factor for Ras-like GTPases; N-terminal motif//Initiator RepB protein//RasGEF domain

BRTHA2026311//Thioredoxin//Thioredoxin

BRTHA2027250//C2 domain//C2 domain

BRTHA2030036//Lipase

BRTHA2031917//Fibronectin type III domain//Photosynthetic reaction center protein

BRTHA2033683//E1-E2 ATPase

BRTHA2035743//Serine hydroxymethyltransferase//UBA domain

BRTHA2036295//Helper component proteinase

BRTHA2037247//Reverse transcriptase (RNA-dependent DNA polymerase)

BRTHA2038345//Ank repeat//Ank repeat//Ank repeat

[0422] BRTHA3000456//Zinc finger, C2H2 type//DM DNA binding domain//Zinc finger, C2H2 type//Transcription factor S-II (TFIIS)//Zinc finger, C2H2 type//Putative zinc finger in N-recognin//Zinc finger, C2H2 type//Zinc finger, C2H2 type//Zinc finger, C2H2 type//Zinc finger, C2H2 type//Zinc finger, C2H2 type//Zinc finger, C2H2 type//Zinc finger, C2H2 type//Zinc finger, C2H2 type//Zinc finger, C2H2 type

BRTHA3003225//Zinc finger, C3HC4 type (RING finger)//PHD-finger

BRTHA3003736//DEAD/DEAH box helicase//Helicases conserved C-terminal domain

BRTHA3010135//Protein-tyrosine phosphatase//Protein-tyrosine phosphatase

[0423] BRTHA3010212//Zinc finger, C2H2 type//Zinc finger, C2H2 type//Zinc finger, C2H2 type//Zinc finger, C2H2 type//Zinc finger, C2H2 type//Zinc finger, C2H2 type//Zinc finger, C2H2 type//Zinc finger, C2H2 type//Zinc finger, C2H2 type//Zinc finger, C2H2 type//Zinc finger, C2H2 type//Zinc finger, C2H2 type//Zinc finger, C2H2 type//Zinc finger, C2H2 type//Zinc finger, C2H2 type//Zinc finger, C2H2 type//Zinc finger, C2H2 type//Zinc finger, C2H2 type//Zinc finger, C2H2 type//Zinc finger, C2H2 type

BRTHA3011187//EF hand

BRTHA3011194//Voltage gated chloride channels//CBS domain

BRTHA3011361//Calponin homology (CH) domain//LIM domain containing proteins

BRTHA3012265//Sulfate transporter family//Ribosomal protein S3, C-terminal domain.

BRTHA3014000//Birnavirus VP3 protein//Zinc finger, C2H2 type//ELM2 domain//Myb-like DNA-binding domain//Zinc finger, C2H2 type//Zinc finger, C2H2 type

[0424] BRTHA3014547//Adenylate kinase//Viral (Superfamily 1) RNA helicase//Arsenical pump membrane protein//Ank repeat//Ank repeat//Ank repeat//Ank repeat//Ank repeat//Dehydrogenase E1 component//Ank repeat//Shikimate/quinate 5-dehydrogenase//Ank repeat//Ank repeat//Ank repeat//Ank repeat//Ank repeat//Ank repeat//Ank repeat//Ank repeat//Ank repeat//Ank repeat//Ank repeat

BRTHA3017791//Lectin (probable mannose binding)

BRTHA3018409//Wilm's tumour protein

BRTHA3020771//PH domain

BRTHA3021708//PH domain

BRTHA3021786//Protein prenyltransferase alpha subunit repeat

BRTHA3021971//Putative peptidoglycan binding domain

BRTHA3023403//Phosphatidylinositol-specific phospholipase C, X domain//Phosphatidylinositol-specific phospholipase C, X domain//C2 domain

BRTHA3025073//Calponin homology (CH) domain

BRTHA3026161//Adenosine-deaminase (editase) domain

BRTHA3026916//Guanine nucleotide exchange factor for Ras-like GTPases; N-terminal motif//RasGEF domain//Ras association (RalGDS/AF-6) domain

BRTHA3027171//Scorpion short toxins

BRTHA3027638//Matrix protein (MA), p15

BRTHA3028339//Zn-finger in Ran binding protein and others.

CERVX2000968//Immunoglobulin domain

CHONS2000797//T-box

CHONS2001287//Insulin-like growth factor binding proteins//Thyroglobulin type-1 repeat

CHONS2001834//Plexin repeat

CHONS2002829//F5/8 type C domain//Zinc carboxypeptidase//Zinc carboxypeptidase//Zinc carboxypeptidase

COLON2004351//Galactosyltransferase

COLON2005735//CbiM//Ammonium Transporter Family

CTONG2003517//RNA recognition motif. (a.k.a. RRM, RBD, or RNP domain)

CTONG2006235//Zn-finger in ubiquitin-hydrolases and other proteins

CTONG2008989//Connexin

CTONG2009570//WD domain, G-beta repeat//WD domain, G-beta repeat//WD domain, G-beta repeat//WD domain, G-beta repeat//WD domain, G-beta repeat

CTONG2010330//Lysophospholipase catalytic domain

CTONG2011801//BTB/POZ domain//Zinc finger, C2H2 type//Zinc finger, C2H2 type//Transcription factor S-II (TFIIS)//Zinc finger, C2H2 type//Zinc finger, C2H2 type//Zinc finger, C2H2 type//PHD-finger//Zinc finger, C2H2 type//Zinc finger, C2H2 type

CTONG2020582//AMP-binding enzyme

CTONG2026987//Reverse transcriptase (RNA-dependent DNA polymerase)

D90ST2003106//RNA recognition motif. (a.k.a. RRM, RBD, or RNP domain)//RNA recognition motif. (a.k.a. RRM, RBD, or RNP domain)

D90ST2004417//Ribosomal protein L13e

DFNES2011221//Rotavirus NS26

ERLTF2002178//Kelch motif//Kelch motif//Kelch motif//Kelch motif//Kelch motif//Kelch motif

ERLTF2002369//PH domain//RhoGAP domain//Tropomyosins

FCBBF3001018//HMGL-like

FCBBF3012443//Leucine rich repeat N-terminal domain//Leucine Rich Repeat//Leucine Rich Repeat//Leucine Rich Repeat//Leucine Rich Repeat//Leucine Rich Repeat//Leucine rich repeat C-terminal domain

FCBBF3020030//B-box zinc finger.//B-box zinc finger.//Putative zinc finger in N-recognin

FCBBF3021191//Protein phosphatase 2C//Protein phosphatase 2C

FCBBF3024911//PWWP domain

FCBBF5000384//BAF60b domain of the SWIB complex

FEBRA2000805//Uncharacterized protein family UPF0054

FEBRA2002260//CXXC zinc finger

FEBRA2013570//Dehydrogenase E1 component

FEBRA2023498//Leucine rich repeat N-terminal domain//Leucine Rich Repeat//Leucine Rich Repeat//Leucine Rich Repeat

FEBRA2026582//PPIC-type PPIASE domain.

FEBRA2028457//RNA recognition motif. (a.k.a. RRM, RBD, or RNP domain)//RNA recognition motif. (a.k.a. RRM, RBD, or RNP domain)//RNA recognition motif. (a.k.a. RRM, RBD, or RNP domain)//RNA recognition motif. (a.k.a. RRM, RBD, or RNP domain)

FEHRT2002708//DNA gyrase/topoisomerase IV, subunit A

FEKID2001001//SH3 domain//WW domain//WW domain//PH domain

FEKID2002493//wnt family of developmental signaling proteins

FEKID2002637//Ser/Thr protein phosphatase

FELNG2000720//Immunoglobulin domain//Immunoglobulin domain

FELNG2001953//Src homology domain 2

HCASM2008154//RNA recognition motif. (a.k.a. RRM, RBD, or RNP domain)//Zn-finger in Ran binding protein and others.

HCHON2009766//eIF4-gamma/eIF5/eIF2-epsilon

HHDPC2008185//Helper component proteinase//Site-specific recombinases

HSYRA2004550//E1-E2 ATPase//E1-E2 ATPase

HSYRA2007338//Fibronectin type III domain

JCMLC2000273//Lysosome-associated membrane glycoprotein (Lamp)//Integrin alpha cytoplasmic region

JCMLC2002751//von Willebrand factor type D domain//Plant PEC family metallothionein//Trypsin Inhibitor like cysteine rich domain//von Willebrand factor type C domain//von Willebrand factor type D domain

KIDNE2004531//Prion protein//Integral membrane protein//Cytochrome c oxidase subunit III//Uncharacterized protein family

KIDNE2010049//FGGY family of carbohydrate kinases//FGGY family of carbohydrate kinases

KIDNE2015987//EGF-like domain//Keratin, high sulfur B2 protein//Zona pellucida-like domain

KIDNE2018268//Zinc finger, C2H2 type

LYMPB2002236//ABC 3 transport family//CbiM//NADH-ubiquinone oxidoreductase chain 4, amino terminus//UDP-glucoronosyl and UDP-glucosyl transferases

LYMPB2002344//TBC domain

LYMPB2002458//Fibronectin type III domain//Fibronectin type III domain//Fibrinogen beta and gamma chains, C-terminal globular domain

N1ESE2000698//WD domain, G-beta repeat//WD domain, G-beta repeat//WD domain, G-beta repeat//WD domain, G-beta repeat//WD domain, G-beta repeat//WD domain, G-beta repeat//WD domain, G-beta repeat//WD domain, G-beta repeat

NETRP2003103//Zinc finger, C3HC4 type (RING finger)//PHD-finger

NETRP2003448//ADP-ribosylation factor family//Ras family

NETRP2004017//Histone-like transcription factor (CBF/NF-Y) and archaeal histone//2S seed storage family

NT2RI2004818//Phosphatidylinositol-specific phospholipase C, X domain//Phosphatidylinositol-specific phospholipase C, X domain//C2 domain//Fes/CIP4 homology domain

NT2RI3001573//Leucine Rich Repeat//Leucine Rich Repeat//Leucine Rich Repeat//Leucine Rich Repeat

NT2RI3001967//Ank repeat//Ank repeat//Ank repeat//Ank repeat//Glutathione S-transferases.//SAM domain (Sterile alpha motif)

NT2RI3005923//Cadherin domain//Cadherin domain//Cadherin domain//Cadherin domain//Cadherin domain//Cadherin domain//Cadherin domain//Cadherin domain//Cadherin domain//Cadherin domain//Cadherin domain

NT2RI3009480//Zinc finger, C2H2 type//Zinc finger, C2H2 type//Zinc finger, C2H2 type

[0425] NT2RI3009524//EGF-like domain//EGF-like domain//EGF-like domain//EGF-like domain//EGF-like domain//EGF-like domain//EGF-like domain//EGF-like domain//Metallothionein//EGF-like domain//Laminin G domain//Laminin G domain//EGF-like domain//Laminin G domain//EGF-like domain//Laminin G domain//Laminin G domain//EGF-like domain//EGF-like domain

NT2RP7007387//Armadillo/beta-catenin-like repeats//picornavirus capsid protein

NT2RP7016508//DEAD/DEAH box helicase//Helicases conserved C-terminal domain

NT2RP7019682//Cation efflux family

NT2RP7020343//Transforming growth factor beta like domain//Keratin, high sulfur B2 protein

NT2RP8000633//VPR/VPX protein

NT2RP8001363//TNFR/NGFR cysteine-rich region//CUB domain

[0426] NT2RP8001604//CUB domain//Sushi domain (SCR repeat)//CUB domain//Sushi domain (SCR repeat)//CUB domain//Sushi domain (SCR repeat)//CUB domain//Sushi domain (SCR repeat)//CUB domain//Sushi domain (SCR repeat)//CUB domain//Sushi domain (SCR repeat)//CUB domain

NT2RP8003490//Hemagglutinin-neuraminidase//LIM domain containing proteins//LIM domain containing proteins//Homeobox domain

NT2RP8003787//Thermophilic metalloprotease (M29)//Ank repeat//Ion transport protein//Sodium:galactoside symporter family

NT2RP8005546//Viral (Superfamily 1) RNA helicase

[0427] NT2RP8006452//African swine fever virus multigene family 360 protein//Leucine Rich Repeat//Leucine Rich Repeat//Leucine Rich Repeat//Leucine Rich Repeat//Leucine Rich Repeat//Leucine Rich Repeat//Leucine Rich Repeat//Leucine Rich Repeat//Leucine Rich Repeat//Leucine Rich Repeat

NT2RP8007920//PPR repeat//LIM domain containing proteins

NT2RP8008057//Thrombospondin type 1 domain//Immunoglobulin domain//Transforming growth factor beta like domain

NT2RP8009119//Picornavirus 2B protein

[0428] NTONG2003805//KRAB box//Zinc finger, C2H2 type//Zinc finger, C2H2 type//Zinc finger, C2H2 type//TRAF-type zinc finger//Zinc finger, C2H2 type//Transcription factor S-II (TFIIS)//Zinc finger, C2H2 type//Zinc finger, C2H2 type//Zinc finger, C2H2 type//Zinc finger, C2H2 type

NTONG2008483//WD domain, G-beta repeat//WD domain, G-beta repeat//WD domain, G-beta repeat//WD domain, G-beta repeat//WD domain, G-beta repeat//WD domain, G-beta repeat//Zinc finger, C2H2 type

[0429] OCBBF2000831//WAP-type (Whey Acidic Protein) ‘four-disulfide core’//Kazal-type serine protease inhibitor domain//Immunoglobulin domain//Kunitz/Bovine pancreatic trypsin inhibitor domain//Kunitz/Bovine pancreatic trypsin inhibitor domain//Furin-like cysteine-rich region//Respiratory-chain NADH dehydrogenase, 49 Kd subunit//NTR/C345C module

OCBBF2003518//Transient receptor//Transient receptor

OCBBF2004478//Trypanosome variant surface glycoprotein//7 transmembrane receptor (Secretin family)

OCBBF2007039//Reprolysin family propeptide//Reprolysin (M12B) family zinc metalloprotease//Thrombospondin type 1 domain//EB module

OCBBF2009536//Amiloride-sensitive sodium channel

OCBBF2014745//Zinc finger, C2H2 type//Zinc finger, C2H2 type

[0430] OCBBF2016928//KRAB box//Zinc finger, C2H2 type//Zinc finger, C2H2 type//Zinc finger, C2H2 type//Zinc finger, C2H2 type//Zinc finger, C2H2 type//PHD-finger//Zinc finger, C2H2 type//Zinc finger, C2H2 type//Zinc finger, C2H2 type//Zinc finger, C2H2 type

OCBBF2018618//7 transmembrane receptor (Secretin family)//7 transmembrane receptor (rhodopsin family)

OCBBF2024589//Glutamine amidotransferases class-II//Dihydroorotase-like

OCBBF2030927//Neuregulin family//von Willebrand factor type A domain//EGF-like domain//Response regulator receiver domain//von Willebrand factor type A domain//von Willebrand factor type A domain

OCBBF3001202//DENN (AEX-3) domain

[0431] OCBBF3001333//Zinc finger, C2H2 type//Zinc finger, C2H2 type//Zinc finger, C2H2 type//Zinc finger, C2H2 type//Zinc finger//Transcription factor S-II (TFIIS)//Zinc finger, C2H2 type//Zinc finger, C2H2 type//Zinc finger, C2H2 type//Zinc finger, C2H2 type//Zinc finger, C2H2 type

OCBBF3001616//Reverse transcriptase (RNA-dependent DNA polymerase)

OCBBF3004487//Platelet-derived growth factor (PDGF)//DEAD/DEAH box helicase

OCBBF3005330//Domain found in Dishevelled, Egl-10, and Pleckstrin//TCP-1/cpn60 chaperonin family//TCP-1/cpn60 chaperonin family

OCBBF3006986//Beige/BEACH domain//WD domain, G-beta repeat//WD domain, G-beta repeat

OCBBF3008392//DNA binding domain with preference for A/T rich regions//PHD-finger//Bromodomain

OCBBF3008835//Collagen triple helix repeat (20 copies)

OCBBF3019269//CXXC zinc finger

OCBBF3020263//KRAB box//Zinc finger, C2H2 type//Zinc finger, C2H2 type//Zinc finger, C2H2 type//Zinc finger, C2H2 type//Transcription factor S-II (TFIIS)//Zinc finger, C2H2 type//Zinc finger, C2H2 type//Zinc finger, C2H2 type//Zinc finger, C2H2 type

OCBBF3021086//Influenza RNA-dependent RNA polymerase subunit PA//Reprolysin family propeptide//Leptin

OCBBF3021361//ELM2 domain//Myb-like DNA-binding domain

OCBBF3021502//Leptin

OCBBF3022827//A20-like zinc finger//Vacuolar sorting protein 9 (VPS9) domain

OCBBF3023175//Protein phosphatase 2C//Beige/BEACH domain//WD domain, G-beta repeat//WD domain, G-beta repeat//WD domain, G-beta repeat//WD domain, G-beta repeat

OCBBF3023913//R3H domain//Retroviral Vif (Viral infectivity) protein

OCBBF3025475//Sodium:sulfate symporter transmembrane region//Sodium:sulfate symporter transmembrane region

OCBBF3025503//Vesiculovirus phosphoprotein//haloacid dehalogenase-like hydrolase

OCBBF3026088//Fatty acid desaturase

[0432] OCBBF3026361//Zinc finger, C2H2 type//Zinc finger, C2H2 type//Zinc finger, C2H2 type//Zinc finger, C2H2 type//Zinc finger, C2H2 type//Zinc finger, C2H2 type//Zinc finger, C2H2 type//Zinc finger, C2H2 type//Zinc finger, C2H2 type//Zinc finger, C2H2 type//Zinc finger, C2H2 type//RNA polymerases M/15 Kd subunits

[0433] OCBBF3026979//Laminin G domain//Thrombospondin N-terminal-like domains//von Willebrand factor type C domain//von Willebrand factor type C domain//EGF-like domain//EB module//EGF-like domain//Plant PEC family metallothionein//EGF-like domain//Trypsin Inhibitor like cysteine rich domain//Metallothionein//EGF-like domain//EGF-like domain//EGF-like domain//EGF-like domain//von Willebrand factor type C domain//von Willebrand factor type C domain

OCBBF3027969//Ank repeat//Ank repeat//Ank repeat//Ank repeat//Myosin head (motor domain)

OCBBF3028001//Transmembrane region cyclic Nucleotide Gated Channel

PEBLM2001803//Vacuolar sorting protein 9 (VPS9) domain

PEBLM2005615//7 transmembrane receptor (rhodopsin family)//Herpesvirus glycoprotein M

PEBLM2006298//Kinesin motor domain

PLACE5000492//Viral RNA dependent RNA polymerase//Phosphatidylinositol-specific phospholipase C, X domain//Phosphatidylinositol-specific phospholipase C, X domain//C2 domain

PLACE6000055//WD domain, G-beta repeat//WD domain, G-beta repeat//WD domain, G-beta repeat

PLACE6001933//Receptor L domain

PLACE6003004//Signal peptidase I//Mandelate racemase/muconate lactonizing enzyme family

PLACE6010925//Ribosomal protein S11

PLACE6010936//7 transmembrane receptor (rhodopsin family)

PLACE6019600//Ras family

[0434] PLACE7000266//Fibronectin type III domain//Fibronectin type III domain//Fibronectin type III domain//Fibronectin type III domain//Fibronectin type III domain//Fibronectin type III domain//Fibronectin type III domain//Fibronectin type III domain//Fibronectin type III domain

PLACE7002303//Homeobox domain

PLACE7003985//Prokaryotic molybdopterin oxidoreductases//short chain dehydrogenase

[0435] PLACE7004103//KH domain//KH domain//KH domain//KH domain//Dynamin central region//Domain of unknown function//KH domain//KH domain//KH domain//Small cytokines (intecrine/chemokine), interleukin-8 like//Fanconi anaemia group C protein//KH domain//KH domain//AIR carboxylase//KH domain

PLACE7004961//Dynamin GTPase effector domain

PLACE7005169//Zinc finger, C2H2 type//Zinc finger, C2H2 type//Zinc finger, C2H2 type//Zinc finger, C2H2 type//Zinc finger, C2H2 type//Zinc finger, C2H2 type//Zinc finger, C2H2 type//Zinc finger, C2H2 type//Zinc finger, C2H2 type

PLACE7006090//Glycosyl hydrolases family 31

PLACE7006498//ADP-ribosylation factor family//G-protein alpha subunit

PLACE7007379//Zinc carboxypeptidase

PLACE7007973//Matrix protein (MA), p15//Matrix protein (MA), p15//Gag P30 core shell protein//Zinc finger, CCHC class

PLACE7008136//Reverse transcriptase (RNA-dependent DNA polymerase)

PLACE7009563//Arginase family//MAGE family

PLACE7009757//Zinc finger, C2H2 type//Zinc finger, C2H2 type//Zinc finger, C2H2 type

PLACE7009936//RhoGAP domain

PLACE7011559//Ank repeat//Ank repeat//Ank repeat//Ank repeat//Ank repeat//Ank repeat//Integrin alpha cytoplasmic region

PLACE7012111//Reprolysin family propeptide//Reprolysin (M12B) family zinc metalloprotease//Keratin, high sulfur B2 protein//Disintegrin//EGF-like domain

PLACE7014247//Phosphatidylinositol 3- and 4-kinases

PLACE7016526//ATP-dependent protease La (LON) domain//NB-ARC domain//Adenylylsulfate kinase//IstB-like ATP binding protein//Shikimate kinase//Isopentenyl transferase//ATPases associated with various cellular activities (AAA)

PLACE7018304//PLAT/LH2 domain//PLAT/LH2 domain//PLAT/LH2 domain//PLAT/LH2 domain//PLAT/LH2 domain//PLAT/LH2 domain//PLAT/LH2 domain//PLAT/LH2 domain//PLAT/LH2 domain//PLAT/LH2 domain

PLACE7018512//Zinc finger, C2H2 type//Zinc finger, C2H2 type

PROST2002078//RNA recognition motif. (a.k.a. RRM, RBD, or RNP domain)

PUAEN2000594//Poly-adenylate binding protein, unique domain.

PUAEN2000684//Geminivirus AL2 protein//Leucine Rich Repeat//Leucine Rich Repeat//Leucine Rich Repeat//Leucine Rich Repeat//Leucine Rich Repeat//Leucine Rich Repeat//Leucine Rich Repeat//Leucine Rich Repeat//Leucine Rich Repeat

PUAEN2006639//WD domain, G-beta repeat//WD domain, G-beta repeat//WD domain, G-beta repeat//WD domain, G-beta repeat//WD domain, G-beta repeat//WD domain, G-beta repeat

SKMUS2008585//Dual specificity phosphatase, catalytic domain

SKMUS2009557//Hydroxyethylthiazole kinase family

SMINT2010753//TPR Domain//TPR Domain//TPR Domain//TPR Domain//PPR repeat//TPR Domain

SMINT2011406//Dynamin GTPase effector domain

SMINT2011509//DNA polymerase X family

SMINT2014721//E2 (early) protein, N terminal//Carnitate acyltransferase

SMINT2017964//PH domain

SPLEN2007689//PX domain//SH3 domain

SPLEN2012571//SCAN domain//KRAB box//Zinc finger, C2H2 type//Zinc finger, C2H2 type//Zinc finger, C2H2 type//Zinc finger, C2H2 type//TRAF-type zinc finger//Zinc finger, C2H2 type

SPLEN2022785//Polyomavirus coat protein

SPLEN2025012//Immunoglobulin domain//Immunoglobulin domain//Immunoglobulin domain//Immunoglobulin domain//Immunoglobulin domain

SPLEN2028417//Homeobox domain

SPLEN2036608//Zinc finger C-x8-C-x5-C-x3-H type (and similar).

STOMA2004663//Immunoglobulin domain

SYNOV2003326//TSC-22/dip/bun family

SYNOV2017179//Hepatitis C virus non-structural protein NS4a//TBC domain

SYNOV4003174//Phosphoribulokinase//Myosin head (motor domain)

SYNOV4009139//Hyaluronidase

SYNOV4009575//WD domain, G-beta repeat//Gram-negative pili assembly chaperone//WD domain, G-beta repeat//WD domain, G-beta repeat

T1ESE2000609//DNA polymerase (viral) C-terminal domain//G-patch domain//Double-stranded RNA binding motif

[0436] T1ESE2000904//KRAB box//Zinc finger, C2H2 type//Zinc finger, C2H2 type//Zinc finger, C2H2 type//Zinc finger, C2H2 type//Zinc finger, C2H2 type//Zinc finger, C2H2 type//Zinc finger, C2H2 type//Transcription factor S-II (TFIIS)//Zinc finger, C2H2 type//Zinc finger, C2H2 type//Zinc finger, C2H2 type//Zinc finger, C2H2 type//Zinc finger, C2H2 type//Zinc finger, C2H2 type//Zinc finger, C2H2 type//Zinc finger, C2H2 type//Zinc finger, C2H2 type//Zinc finger, C2H2 type

T1ESE2002665//Amino acid permease

TBAES2003917//Ank repeat//Ank repeat//Ank repeat//Ank repeat

TBAES2007428//Scorpion short toxins//EGF-like domain//EGF-like domain

TESOP2002005//E7 protein, Early protein

TESTI2001364//Pyridine nucleotide-disulphide oxidoreductase//lactate/malate dehydrogenase

TESTI2005112//Respiratory-chain NADH dehydrogenase, 30 Kd subunit

TESTI2005564//EF hand

TESTI2006543//Collagen triple helix repeat (20 copies)

TESTI2007490//UDP-glucoronosyl and UDP-glucosyl transferases

TESTI2009739//Tropomyosins//Domain of unknown function

TESTI2011020//Keratin, high sulfur B2 protein

TESTI2018335//NADH-ubiquinone/plastoquinone oxidoreductase chain 4L//Transmembrane amino acid transporter protein//Amino acid permease

TESTI2018867//FF domain

TESTI2021112//Carbamoyl-phosphate synthase (CPSase)

TESTI2021654//Glycosyl hydrolases family 11

TESTI2022323//7 transmembrane receptor (rhodopsin family)

TESTI2023903//Ubiquitin family//Gram-negative pili assembly chaperone

TESTI2024267//Transmembrane amino acid transporter protein//Ion transport protein

TESTI2030901//Glutathione S-transferases.

TESTI2034913//Intermediate filament proteins//Intermediate filament proteins

TESTI2036285//Ubiquitin family//Ubiquitin family//Ubiquitin family

TESTI2036822//Integral membrane protein//AN1-like Zinc finger//DHHC zinc finger domain

TESTI2037877//Flavin containing amine oxidase

TESTI2040377//Phorbol esters/diacylglycerol binding domain (C1 domain)//Zinc finger, C3HC4 type (RING finger)//PHD-finger//Zinc finger present in dystrophin, CBP/p300//Zinc finger, C3HC4 type (RING finger)

TESTI2049041//TPR Domain//TPR Domain

TESTI2049062//short chain dehydrogenase

TESTI2052670//Immunoglobulin domain//Immunoglobulin domain//Immunoglobulin domain//Immunoglobulin domain//Immunoglobulin domain

TESTI4000370//Keratin, high sulfur B2 protein//Bacterial regulatory proteins, gntR family

TESTI4000621//SNF2 and others N-terminal domain//6-O-methylguanine DNA methyltransferase//Rel homology domain (RHD).//Helicases conserved C-terminal domain

TESTI4001517//Intermediate filament proteins

[0437] TESTI4001569//Leucine Rich Repeat//Leucine Rich Repeat//Leucine Rich Repeat//Leucine Rich Repeat//Leucine Rich Repeat//KE2 family protein//Leucine Rich Repeat//Leucine Rich Repeat//Leucine Rich Repeat//Leucine Rich Repeat//Leucine Rich Repeat//Leucine Rich Repeat//Leucine Rich Repeat//Leucine Rich Repeat//Leucine Rich Repeat//Leucine Rich Repeat//Leucine Rich Repeat

TESTI4001679//FYVE zinc finger//Zinc finger, C3HC4 type (RING finger)//PHD-finger

TESTI4002141//Keratin, high sulfur B2 protein

TESTI4002774//PH domain//Phosphoglycerate mutase family//Oxysterol-binding protein

TESTI4002799//RNA polymerase beta subunit//PHD-finger

TESTI4002868//Metallothionein

TESTI4003404//Ank repeat//Ank repeat//Ank repeat//PEP-utilizing enzymes

TESTI4003565//Inositol monophosphatase family

TESTI4003602//Translation initiation factor IF-3//Divalent cation transporter

TESTI4003703//Inositol monophosphatase family

TESTI4003796//Zinc finger, C2H2 type//Zinc finger, C2H2 type//Zinc finger, C2H2 type//Zinc finger, C2H2 type//Zinc finger, C2H2 type//Zinc finger, C2H2 type//Zinc finger, C2H2 type//Zinc finger, C2H2 type

[0438] TESTI4003944//Zinc finger, C2H2 type//Zinc finger, C2H2 type//Zinc finger, C2H2 type//Zinc finger, C2H2 type//Domain of unknown function//Zinc finger, C2H2 type//Zinc finger, C2H2 type//Zinc finger, C2H2 type//Zinc finger, C2H2 type//Zinc finger, C2H2 type//Zinc finger, C2H2 type//Zinc finger, C2H2 type//Zinc finger, C2H2 type//PHD-finger//Zinc finger, C2H2 type//Zinc finger, C2H2 type

TESTI4004031//Domain of unknown function

TESTI4004539//Integral membrane protein//Sodium Bile acid symporter family

TESTI4004695//Leptin

[0439] TESTI4005322//KRAB box//Fungal cellulose binding domain//Zinc finger, C2H2 type//Zinc finger, C2H2 type//Zinc finger, C2H2 type//Zinc finger, C2H2 type//Zinc finger, C2H2 type//TRAF-type zinc finger//Zinc finger, C2H2 type//Zinc finger, C2H2 type//Zinc finger, C2H2 type//Zinc finger, C2H2 type//Zinc finger, C2H2 type//Zinc finger, C2H2 type

TESTI4005399//Divalent cation transporter//Divalent cation transporter

[0440] TESTI4005470//Zinc finger, C2H2 type//Zinc finger, C2H2 type//Zinc finger, C2H2 type//Zinc finger, C2H2 type//Zinc finger, C2H2 type//Zinc finger, C2H2 type//Zinc finger, C2H2 type//Zinc finger, C2H2 type//Zinc finger, C2H2 type//Zinc finger, C2H2 type//Zinc finger, C2H2 type

TESTI4005653//Collagen triple helix repeat (20 copies)

TESTI4007671//Thioredoxin

TESTI4007965//Adaptin N terminal region//Gamma-adaptin, C-terminus

TESTI4008305//Collagen triple helix repeat (20 copies)//Herpesvirus Glycoprotein B

TESTI4010544//Cytochrome C and Quinol oxidase polypeptide I//Sodium/hydrogen exchanger family//Ion transport protein//Cyclic nucleotide-binding domain

TESTI4010721//Ribonucleotide reductase

TESTI4010902//WD domain, G-beta repeat//WD domain, G-beta repeat//WD domain, G-beta repeat//WD domain, G-beta repeat//WD domain, G-beta repeat//WD domain, G-beta repeat

TESTI4011926//Gag P30 core shell protein

TESTI4012960//Influenza RNA-dependent RNA polymerase subunit PA//Reprolysin family propeptide//Leptin

TESTI4013474//Nuclear transition protein 2//Phorbol esters/diacylglycerol binding domain (C1 domain)//RhoGAP domain

TESTI4013742//Leucine Rich Repeat//Leucine Rich Repeat//Hantavirus nucleocapsid protein//Troponin//Formin Homology 2 Domain//Apolipoprotein A1/A4/E family

TESTI4014415//Ribosomal protein S8//Uncharacterized protein family//Domain of unknown function//Sodium/hydrogen exchanger family//Ion transport protein//Cyclic nucleotide-binding domain

TESTI4017854//Hepatitis C virus non-structural protein E2/NS1

TESTI4020342//WD domain, G-beta repeat//WD domain, G-beta repeat//WD domain, G-beta repeat//WD domain, G-beta repeat//WD domain, G-beta repeat//WD domain, G-beta repeat//Protein phosphatase 2A regulatory subunit PR55//WD domain, G-beta repeat

TESTI4020596//Calpain family cysteine protease//Calpain large subunit, domain III//C2 domain

TESTI4020819//C1q domain

TESTI4021129//GAF domain

TESTI4021197//C2 domain//PDZ domain (Also known as DHR or GLGF).//Regulator of G protein signaling domain//Regulator of G protein signaling domain

TESTI4021569//ABC transporter transmembrane region.

TESTI4022158//Immunoglobulin domain//Thrombospondin type 1 domain//Thrombospondin type 1 domain//ZU5 domain//Death domain

TESTI4023096//ABC 3 transport family//Amino acid permease//Cystatin domain

TESTI4024294//Chorion protein

TESTI4024494//Zinc finger, C3HC4 type (RING finger)//Peroxidase//Zinc finger, C3HC4 type (RING finger)//B-box zinc finger.//Scorpion short toxins

TESTI4026080//Nucleosome assembly protein (NAP)//Lipoate-protein ligase B//Asparaginase//ABC transporter

TESTI4028042//WD domain, G-beta repeat//WD domain, G-beta repeat//WD domain, G-beta repeat//Fibrillar collagen C-terminal domain

TESTI4028182//3′5′-cyclic nucleotide phosphodiesterase//Elongation factor Tu family

TESTI4029731//Ras family

TESTI4030864//Ribosomal protein L36

TESTI4031066//Lipoate-protein ligase B//KE2 family protein

TESTI4031173//Immunoglobulin domain//Immunoglobulin domain//Immunoglobulin domain//Immunoglobulin domain

TESTI4032128//Amyloid A4 extracellular domain//Kunitz/Bovine pancreatic trypsin inhibitor domain

TESTI4032913//Zinc finger present in dystrophin, CBP/p300//Ank repeat//Ank repeat//Ank repeat//Ank repeat//Ank repeat//Ank repeat//Ank repeat

TESTI4033177//K-box region//Dual specificity phosphatase, catalytic domain//Penicillin amidase

TESTI4035898//Kelch motif//Kelch motif//Kelch motif

TESTI4036048//PX domain

TESTI4037949//BTB/POZ domain//Kelch motif//Kelch motif//Kelch motif//Kelch motif//Glycophorin A//Kelch motif//Kelch motif

TESTI4039451//Adaptin N terminal region

[0441] TESTI4039904//Zinc finger, C2H2 type//Zinc finger, C2H2 type//Zinc finger, C2H2 type//Zinc finger, C2H2 type//Zinc finger, C2H2 type//Zinc finger, C2H2 type//Transcription factor S-II (TFIIS)//Zinc finger, C2H2 type//Zinc finger, C2H2 type//Zinc finger, C2H2 type//Zinc finger, C2H2 type//Zinc finger, C2H2 type

TESTI4040559//Transmembrane region cyclic Nucleotide Gated Channel//Cyclic nucleotide-binding domain

TESTI4040598//Cytochrome P450

TESTI4041049//Calponin homology (CH) domain

TESTI4041482//Archaeal ATPase

TESTI4041984//EGF-like domain//EGF-like domain//EGF-like domain//EGF-like domain//EB module//EGF-like domain//EGF-like domain//EGF-like domain//EGF-like domain//TB domain//EGF-like domain//EGF-like domain//TB domain//EGF-like domain//EGF-like domain

TESTI4043166//Formin Homology 2 Domain

TESTI4046073//Dockerin domain type I//RhoGAP domain

TESTI4046873//TPR Domain//TPR Domain//TPR Domain//TPR Domain

TESTI4047328//von Willebrand factor type D domain//Trypsin Inhibitor like cysteine rich domain//Chitin binding domain//von Willebrand factor type D domain//Trypsin Inhibitor like cysteine rich domain//Metallothionein

TESTI4047569//Keratin, high sulfur B2 protein

TESTI4047808//Eukaryotic protein kinase domain//Eukaryotic protein kinase domain

TESTI4049786//Mur ligase family//Hexokinase//Hexokinase

TESTI4049899//Scavenger receptor cysteine-rich domain//CUB domain

TESTI4051015//Major intrinsic protein//Major intrinsic protein

TESTI4051054//B-box zinc finger.

[0442] TESTI4051424//Immunoglobulin domain//Fibronectin type III domain//Fibronectin type III domain//Fibronectin type III domain//Fibronectin type III domain//Fibronectin type III domain//Aldo/keto reductase family//Immunoglobulin domain//Thioredoxin//Immunoglobulin domain//Immunoglobulin domain

[0443] TESTI4051865//PDZ domain (Also known as DHR or GLGF).//Collagen triple helix repeat (20 copies)//PDZ domain (Also known as DHR or GLGF).//PDZ domain (Also known as DHR or GLGF).//SH3 domain//Ribosomal protein L15 amino terminal region//Guanylate kinase

TESTI4052219//E1-E2 ATPase//E1-E2 ATPase//GTP cyclohydrolase II

TESTI4052598//Lectin C-type domain

TESTI4052775//Zinc finger, C2H2 type//Zinc finger, C2H2 type//Zinc finger, C2H2 type//TRAF-type zinc finger//Zinc finger, C2H2 type

THYMU2008207//Zinc finger, C3HC4 type (RING finger)

THYMU2038199//Zinc finger, C2H2 type//Zinc finger, C2H2 type

THYMU3000390//Ribonuclease T2 family

THYMU3002825//FliP family//Glycosyl hydrolase family 47

THYMU3003007//TPR Domain

[0444] THYMU3008105//Zinc finger, C2H2 type//FYVE zinc finger//Zinc finger, C2H2 type//Zinc finger, C2H2 type//Zinc finger, C2H2 type//Zinc finger, C2H2 type//Zinc finger, C2H2 type//PHD-finger//Zinc finger, C2H2 type//Zinc finger, C2H2 type//Zinc finger, C2H2 type//Zinc finger, C2H2 type//Zinc finger, C2H2 type//Zinc finger, C2H2 type

THYMU3012402//Armadillo/beta-catenin-like repeats//Armadillo/beta-catenin-like repeats//Armadillo/beta-catenin-like repeats//Armadillo/beta-catenin-like repeats//Armadillo/beta-catenin-like repeats//Armadillo/beta-catenin-like repeats

[0445] THYMU3012983//Zinc finger, C2H2 type//Zinc finger, C2H2 type//Transcription factor S-II (TFIIS)//Zinc finger, C2H2 type//Zinc finger, C2H2 type//Zinc finger, C2H2 type//Zinc finger, C2H2 type//Zinc finger, C2H2 type//Zinc finger, C2H2 type//Zinc finger, C2H2 type//Zinc finger, C2H2 type//Transcription factor S-II (TFIIS)//Zinc finger, C2H2 type//Zinc finger, C2H2 type//Zinc finger, C2H2 type//Zinc finger, C2H2 type//Zinc finger, C2H2 type

THYMU3013785//RasGEF domain

THYMU3014173//Class I Histocompatibility antigen, domains alpha 1 and 2

THYMU3014372//Integrase Zinc binding domain//Aldo/keto reductase family//MCM2/3/5 family

THYMU3015042//Polyomavirus coat protein

THYMU3015571//Chaperonins 10 Kd subunit

THYMU3015647//Domain of unknown function//Latrophilin/CL-1-like GPS domain//CbiM//7 transmembrane receptor (Secretin family)

THYMU3016518//Immunoglobulin domain//Immunoglobulin domain//Immunoglobulin domain//Immunoglobulin domain

THYMU3017761//Gag P30 core shell protein

THYMU3019476//Matrix protein (MA), p15

THYMU3020221//Immunoglobulin domain//Fibronectin type II domain//Immunoglobulin domain//Immunoglobulin domain//Immunoglobulin domain

THYMU3021404//Sugar (and other) transporter

THYMU3021586//Helix-loop-helix DNA-binding domain

THYMU3021755//HCO3- transporter family

THYMU3022434//Zinc finger, C2H2 type//MOZ/SAS family

THYMU3023400//Transmembrane amino acid transporter protein//Large-conductance mechanosensitive channel, MscL//CbiM//DNA gyrase/topoisomerase IV, subunit A

THYMU3025118//Immunoglobulin domain//Immunoglobulin domain//Immunoglobulin domain//Immunoglobulin domain//Immunoglobulin domain

THYMU3025642//von Hippel-Lindau disease tumor suppressor protein

THYMU3025683//Heavy-metal-associated domain//Vacuolar sorting protein 9 (VPS9) domain//chorismate binding enzyme//Ras association (RalGDS/AF-6) domain

[0446] THYMU3026000//KRAB box//Zinc finger, C2H2 type//Zinc finger, C2H2 type//Zinc finger, C2H2 type//Zinc finger, C2H2 type//Zinc finger, C2H2 type//Zinc finger, C2H2 type//Transcription factor S-II (TFIIS)//Zinc finger, C2H2 type//Zinc finger, C2H2 type//Zinc finger, C2H2 type

THYMU3026306//FliP family//Glycosyl hydrolase family 47

THYMU3026479//Glutathione S-transferases.

THYMU3026532//Plexin repeat//Integrins, beta chain

[0447] THYMU3030072//KRAB box//Zinc finger, C2H2 type//Zinc finger, C2H2 type//Zinc finger, C2H2 type//Zinc finger, C2H2 type//Zinc finger, C2H2 type//Zinc finger, C2H2 type//Zinc finger, C2H2 type//Zinc finger, C2H2 type//Zinc finger, C2H2 type//PHD-finger//Zinc finger, C2H2 type//Zinc finger, C2H2 type//Zinc finger, C2H2 type//DnaJ central domain (4 repeats)//Zinc finger, C2H2 type//Zinc finger, C2H2 type//Zinc finger, C2H2 type//Zinc finger, C2H2 type//Zinc finger, C2H2 type

THYMU3030752//K+ channel tetramerisation domain

THYMU3031878//PAP2 superfamily

THYMU3032798//Eukaryotic protein kinase domain

THYMU3033626//NOL1/NOP2/sun family

THYMU3033649//Immunoreceptor tyrosine-based activation motif

THYMU3034671//Histone deacetylase family

THYMU3036953//Trypsin

THYMU3037617//FYVE zinc finger//AN1-like Zinc finger

THYMU3037772//Immunoglobulin domain//Immunoglobulin domain//Immunoglobulin domain//Immunoglobulin domain

THYMU3038158//Collagen triple helix repeat (20 copies)//Collagen triple helix repeat (20 copies)//Collagen triple helix repeat (20 copies)

THYMU3040126//Metallothionein

THYMU3040172//Scavenger receptor cysteine-rich domain//Scavenger receptor cysteine-rich domain//Scavenger receptor cysteine-rich domain

THYMU3040746//Immunoglobulin domain//Immunoglobulin domain//Immunoglobulin domain//Immunoglobulin domain

THYMU3040829//RNA recognition motif. (a.k.a. RRM, RBD, or RNP domain)

THYMU3041428//DEAD/DEAH box helicase//Helicases conserved C-terminal domain

THYMU3043200//Zinc finger, C2H2 type

THYMU3044075//BTB/POZ domain//K+ channel tetramerisation domain

THYMU3045704//Prokaryotic transcription elongation factor, GreA/GreB

THYMU3046360//F-box domain.

THYMU3047115//Site-specific recombinases//E1-E2 ATPase//Na+/K+ ATPase C-terminus

THYMU3047891//ThiF family//short chain dehydrogenase

TKIDN2003396//Zinc finger, CCHC class

TKIDN2011051//Keratin, high sulfur B2 protein

TKIDN2011160//Thrombospondin type 1 domain

[0448] TLIVE2001616//Zinc finger, C2H2 type//Zinc finger, C2H2 type//Zinc finger, C2H2 type//Zinc finger, C2H2 type//Zinc finger, C2H2 type//Zinc finger, C2H2 type//Zinc finger, C2H2 type//Zinc finger, C2H2 type//Zinc finger, C2H2 type//Zinc finger, C2H2 type//Zinc finger, C2H2 type//Zinc finger, C2H2 type//Zinc finger, C2H2 type//Zinc finger, C2H2 type//Zinc finger, C2H2 type//Zinc finger, C2H2 type//Zinc finger, C2H2 type

TLIVE2007736//PDZ domain (Also known as DHR or GLGF).

TLUNG2000654//bZIP transcription factor//Intermediate filament proteins

TLUNG2001445//Immunoglobulin domain//Immunoglobulin domain//Immunoglobulin domain//Immunoglobulin domain//Immunoglobulin domain

TLUNG2001600//Immunoglobulin domain//Immunoglobulin domain//Immunoglobulin domain//Immunoglobulin domain

TRACH2022113//dUTPase

TRACH2024730//Phosphoribosyl-ATP pyrophosphohydrolase//Death domain

TRACH3002752//PHD-finger//Zn-finger in ubiquitin-hydrolases and other proteins

TRACH3002890//Collagen triple helix repeat (20 copies)

TRACH3003037//Phosphotriesterase family//RhoGEF domain//PH domain//Thaumatin family//GATA zinc finger//FYVE zinc finger//PH domain

TRACH3003357//Interleukin-6/G-CSF/MGF family//SH3 domain//SH3 domain//SH3 domain//SH3 domain

[0449] TRACH3003458//Zinc finger, C2H2 type//Zinc finger, C2H2 type//Zinc finger, C2H2 type//Zinc finger, C2H2 type//Zinc finger, C2H2 type//Zinc finger, C2H2 type//Zinc finger, C2H2 type//Zinc finger, C2H2 type//Zinc finger, C2H2 type//Zinc finger, C2H2 type//Zinc finger, C2H2 type//Zinc finger, C2H2 type//Zinc finger, C2H2 type//Zinc finger, C2H2 type//Zinc finger, C2H2 type//Zinc finger, C2H2 type//Zinc finger, C2H2 type//Zinc finger, C2H2 type//Zinc finger, C2H2 type//Zinc finger, C2H2 type//Zinc finger, C2H2 type

TRACH3004113//Ribosomal protein L37e//FYVE zinc finger//Alpha-2-macroglobulin family//Interleukin 4

TRACH3004412//Zinc finger, CCHC class//Clusterin

[0450] TRACH3004424//Fungal cellulose binding domain//Zinc finger, C2H2 type//Zinc finger, C2H2 type//Zinc finger, C2H2 type//Zinc finger, C2H2 type//Zinc finger, C2H2 type//Zinc finger, C2H2 type//Zinc finger, C2H2 type//Zinc finger, C2H2 type//Zinc finger, C2H2 type//Zinc finger, C2H2 type//Zinc finger, C2H2 type//Zinc finger, C2H2 type//Zinc finger, C2H2 type//Zinc finger, C2H2 type//Zinc finger, C2H2 type//Zinc finger, C2H2 type//Zinc finger, C2H2 type//Zinc finger, C2H2 type//Zinc finger, C2H2 type//Zinc finger, C2H2 type//Zinc finger, C2H2 type//Zinc finger, C2H2 type//Zinc finger, C2H2 type//Zinc finger, C2H2 type//Zinc finger, C2H2 type

TRACH3004747//Sugar (and other) transporter

TRACH3005173//PH domain

TRACH3005274//Trans-activation protein X//Glycosyl transferases group 1

TRACH3005699//SEA domain//SEA domain

TRACH3006379//Intermediate filament proteins

TRACH3006800//Fungalysin metallopeptidase (M36)//SEA domain//SEA domain//SEA domain

TRACH3007689//Ank repeat//Ank repeat//Ank repeat//TPR Domain//TPR Domain//TPR Domain

TRACH3009008//Pyridine nucleotide-disulphide oxidoreductase

TRACH3009061//Papain family cysteine protease//ABC transporter

TRACH3010079//Mov34/MPN/PAD-1 family

TRACH3010167//Zinc finger, C2H2 type//Zinc finger, C2H2 type//Zinc finger, C2H2 type

TRACH3011082//Immunoglobulin domain

TRACH3011184//Immunoglobulin domain

TRACH3011313//Aminotransferase class IV

TRACH3011538//RhoGEF domain//PH domain

TRACH3012106//FERM domain (Band 4.1 family)

TRACH3012460//Collagen triple helix repeat (20 copies)

TRACH3012659//Immunoglobulin domain

TRACH3015346//Uncharacterized protein family UPF0004//Uncharacterized protein family UPF0004

TRACH3015354//Lectin (probable mannose binding)

[0451] TRACH3015951//BTB/POZ domain//Zinc finger, C2H2 type//Zinc finger, C3HC4 type (RING finger)//Zinc finger, C2H2 type//Zinc finger, C2H2 type//Zinc finger, C2H2 type//PHD-finger//Zinc finger, C2H2 type//Zinc finger, C2H2 type//Zinc finger, C2H2 type//Zinc finger, C2H2 type//Zinc finger, C2H2 type//Zinc finger, C2H2 type

TRACH3016455//Calpain family cysteine protease//Calpain large subunit, domain III

TRACH3016805//Ank repeat//Ank repeat//Ank repeat//Ank repeat//Ank repeat//Ank repeat//Ank repeat

TRACH3017409//RNA dependent RNA polymerase

TRACH3018108//FKBP-type peptidyl-prolyl cis-trans isomerases//TPR Domain//TPR Domain

TRACH3018261//Glycosyl hydrolase family 47

TRACH3018519//WD domain, G-beta repeat

[0452] TRACH3018524//Fibronectin type III domain//Fibronectin type III domain//Fibronectin type III domain//Fibronectin type III domain//Fibronectin type III domain//Fibronectin type III domain//Fibronectin type III domain//Fibronectin type III domain//Fibronectin type III domain//Fibronectin type III domain//Fibronectin type III domain//Fibronectin type III domain//Fibronectin type III domain//Fibronectin type III domain

TRACH3018606//SAM domain (Sterile alpha motif)

TRACH3018907//Immunoglobulin domain//Immunoglobulin domain//Immunoglobulin domain//Immunoglobulin domain//Immunoglobulin domain

TRACH3019058//Immunoglobulin domain//Immunoglobulin domain

TRACH3019370//ABC transporter

TRACH3019621//Glycosyl transferase

TRACH3019807//Immunoglobulin domain

TRACH3020605//RhoGEF domain//SH3 domain//SH3 domain

TRACH3020769//Ezrin/radixin/moesin family//Myosin tail

TRACH3020930//Immunoglobulin domain//Immunoglobulin domain//Immunoglobulin domain//Immunoglobulin domain

TRACH3021023//Immunoglobulin domain//Immunoglobulin domain//Immunoglobulin domain//Immunoglobulin domain

TRACH3021544//Ubiquitin carboxyl-terminal hydrolases family 2//Ubiquitin carboxyl-terminal hydrolase family 2

TRACH3021778//RNA recognition motif. (a.k.a. RRM, RBD, or RNP domain)

TRACH3022109//DHHC zinc finger domain

TRACH3022296//DnaJ domain

TRACH3022758//EF hand//EF hand

TRACH3023203//Flavivirus polyprotein propeptide

TRACH3023373//EF hand//EF hand//Reovirus viral attachment protein sigma 1//Peptide hormone

TRACH3023516//FKBP-type peptidyl-prolyl cis-trans isomerases//FKBP-type peptidyl-prolyl cis-trans isomerases//FKBP-type peptidyl-prolyl cis-trans isomerases//FKBP-type peptidyl-prolyl cis-trans isomerases//EF hand//EF hand

TRACH3024020//Eukaryotic protein kinase domain

TRACH3024081//E1-E2 ATPase

TRACH3024342//Metallo-beta lactamase superfamily

TRACH3024512//Chitin synthase//von Willebrand factor type A domain

TRACH3025316//Armadillo/beta-catenin-like repeats//Armadillo/beta-catenin-like repeats//Armadillo/beta-catenin-like repeats//Armadillo/beta-catenin-like repeats//Beta-lactamase//Armadillo/beta-catenin-like repeats

TRACH3026299//Immunoglobulin domain//Immunoglobulin domain//Immunoglobulin domain//Immunoglobulin domain

TRACH3026303//Rhodanese-like domain//Integrase Zinc binding domain//Integrase Zinc binding domain

TRACH3026650//IPT/TIG domain//IPT/TIG domain//IPT/TIG domain//C1q domain//EF hand//EF hand//Growth-Arrest-Specific Protein 2 Domain//Potyvirus P1 protease

TRACH3027229//Acyltransferase

TRACH3027701//Thermophilic metalloprotease (M29)

[0453] TRACH3028180//SCAN domain//Zinc finger, C2H2 type//Zinc finger, C2H2 type//Transcription factor S-II (TFIIS)//Zinc finger, C2H2 type//Zinc finger, C2H2 type//PHD-finger//Zinc finger, C2H2 type//Zinc finger, C2H2 type//Zinc finger, C2H2 type//Zinc finger, C2H2 type//Zinc finger, C2H2 type//Zinc finger, C2H2 type//Zinc finger, C2H2 type//Zinc finger, C2H2 type//Zinc finger, C2H2 type//Zinc finger, C2H2 type

TRACH3028441//Immunoglobulin domain//Immunoglobulin domain//Immunoglobulin domain//Immunoglobulin domain

TRACH3028837//Calponin homology (CH) domain

TRACH3028855//R3H domain//Uncharacterized protein family

UPF0024

TRACH3029329//Fes/CIP4 homology domain//Hr1 repeat motif//ENV polyprotein (coat polyprotein)//ATP synthase Alpha chain, C terminal

[0454] TRACH3029462//Spectrin repeat//Spectrin repeat//Protein of unknown function//Spectrin repeat//Bacterial flagellin N-terminus//Spectrin repeat//Spectrin repeat//Spectrin repeat//Caulimovirus movement protein//Spectrin repeat//Spectrin repeat//Spectrin repeat//UvrB/uvrC motif//Spectrin repeat//Spectrin repeat//Spectrin repeat//KE2 family protein

TRACH3029670//Immunoglobulin domain//Immunoglobulin domain//Immunoglobulin domain//Immunoglobulin domain

TRACH3030176//Beige/BEACH domain//WD domain, G-beta repeat//WD domain, G-beta repeat

TRACH3030855//Serpins (serine protease inhibitors)

TRACH3031316//Immunoglobulin domain

TRACH3031660//Regulatory subunit of type II PKA R-subunit//Cyclic nucleotide-binding domain//Cyclic nucleotide-binding domain

TRACH3031678//Natural resistance-associated macrophage protein

TRACH3032150//Calcium channel extracellular region//Pyridoxal-dependent decarboxylase conserved domain

TRACH3032570//PDZ domain (Also known as DHR or GLGF).//PDZ domain (Also known as DHR or GLGF).

TRACH3034680//Immunoglobulin domain//Immunoglobulin domain//Immunoglobulin domain//Immunoglobulin domain

TRACH3036103//Immunoglobulin domain

[0455] TRACH3036750//BTK motif//Zinc finger, C2H2 type//Zinc finger, C2H2 type//Zinc finger, C2H2 type//Zinc finger, C2H2 type//Zinc finger, C2H2 type//Zinc finger, C2H2 type//GATA zinc finger//Zinc finger, C2H2 type//Zinc finger, C2H2 type//Zinc finger, C2H2 type//Zinc finger, C2H2 type//Ribonuclease T2 family

TRACH3037505//Immunoglobulin domain//Immunoglobulin domain//Immunoglobulin domain//Immunoglobulin domain

TRACH3038399//Eukaryotic protein kinase domain//Eukaryotic protein kinase domain

TSTOM2001571//Eukaryotic protein kinase domain

TUTER2001433//Immunoglobulin domain//Immunoglobulin domain//Immunoglobulin domain//Immunoglobulin domain//Immunoglobulin domain

UTERU2016669//Helix-hairpin-helix motif.//Helix-hairpin-helix motif.

UTERU2024042//Eukaryotic protein kinase domain

UTERU2037423//Zinc finger, C2H2 type//Zinc finger, C2H2 type//Zinc finger, C2H2 type//Zinc finger, C2H2 type//Transcription factor S-II (TFIIS)//Zinc finger, C2H2 type//Zinc finger, C2H2 type//Zinc finger, C2H2 type//Zinc finger, C2H2 type

UTERU3001029//WD domain, G-beta repeat//WD domain, G-beta repeat//WD domain, G-beta repeat//WD domain, G-beta repeat//WD domain, G-beta repeat//WD domain, G-beta repeat

UTERU3001394//EGF-like domain

UTERU3001946//Fungalysin metallopeptidase (M36)//SEA domain//SEA domain

UTERU3006720//RhoGAP domain

UTERU3009775//PDZ domain (Also known as DHR or GLGF).

UTERU3010409//Immunoglobulin domain

UTERU3010604//Indoleamine 2,3-dioxygenase

UTERU3010919//Eukaryotic protein kinase domain//Regulator of chromosome condensation (RCC1)//Regulator of chromosome condensation (RCC1)//Regulator of chromosome condensation (RCC1)

UTERU3011398//von Willebrand factor type A domain

UTERU3011558//GTPase of unknown function

UTERU3011579//Plant PEC family metallothionein

UTERU3011837//Fibronectin type III domain

[0456] UTERU3012293//Zinc finger, C2H2 type//Zinc finger, C2H2 type//Zinc finger, C2H2 type//Zinc finger, C2H2 type//Zinc finger, C2H2 type//Zinc finger, C2H2 type//Zinc finger, C2H2 type//Zinc finger, C2H2 type//Zinc finger, C2H2 type//Zinc finger, C2H2 type//Zinc finger, C2H2 type//Transcription factor S-II (TFIIS)//Zinc finger, C2H2 type//Zinc finger, C2H2 type//Zinc finger, C2H2 type//Zinc finger, C2H2 type//Zinc finger, C2H2 type

UTERU3012414//ADP-ribosylation factor family//G-protein alpha subunit

UTERU3015011//LIM domain containing proteins//LIM domain containing proteins//LIM domain containing proteins//Phorbol esters/diacylglycerol binding domain (C1 domain)//PHD-finger//LIM domain containing proteins

UTERU3015299//NADH ubiquinone oxidoreductase, 20 Kd subunit

UTERU3015647//Immunoglobulin domain

[0457] UTERU3016070//SCAN domain//Zinc finger, C2H2 type//Zinc finger, C2H2 type//Zinc finger, C2H2 type//Zinc finger, C2H2 type//Transcription factor S-II (TFIIS)//Zinc finger, C2H2 type//Zinc finger, C2H2 type//Zinc finger, C2H2 type//Zinc finger, C2H2 type

UTERU3016273//Integral membrane protein

UTERU3017441//Armadillo/beta-catenin-like repeats//Armadillo/beta-catenin-like repeats//Armadillo/beta-catenin-like repeats//D-isomer specific 2-hydroxyacid dehydrogenases//Armadillo/beta-catenin-like repeats//Armadillo/beta-catenin-like repeats

UTERU3017626//Ion transport protein//Transmembrane region cyclic Nucleotide Gated Channel

UTERU3017995//UBX domain

UTERU3018172//Bacterial regulatory proteins, crp family

UTERU3018255//Thrombospondin type 1 domain

UTERU3019708//Viral (Superfamily 1) RNA helicase

UTERU3020090//DNA polymerase (viral) C-terminal domain

UTERU3021231//PX domain

UTERU3021850//Thrombospondin type 1 domain//DnaJ central domain (4 repeats)

UTERU3022168//DNA polymerase family B//C2 domain//C2 domain//C2 domain//C2 domain//C2 domain

UTERU3022588//bZIP transcription factor

UTERU3023141//Double-stranded RNA binding motif Deduced amino acid sequences of following 29 clones were also detected to have functional domains with Pfam.

ADRGL2011190//GAF domain//Transposase, Mutator family//315′-cyclic nucleotide phosphodiesterase

[0458] BRACE3002184//KRAB box//Zinc finger, C2H2 type//Zinc finger, C2H2 type//Zinc finger, C2H2 type//Zinc finger, C2H2 type//Zinc finger, C2H2 type//Zinc finger, C2H2 type//Transcription factor S-II (TFIIS)//Zinc finger, C2H2 type//Zinc finger, C2H2 type//Zinc finger, C2H2 type//Zinc finger, C2H2 type//Zinc finger, C2H2 type//Zinc finger, C2H2 type//Zinc finger, C2H2 type//Zinc finger, C2H2 type.

BRACE3026993//TSC-22/dip/bun family

BRACE3046450//PDZ domain (Also known as DHR or GLGF).//PDZ domain (Also known as DHR or GLGF).//PDZ domain (Also known as DHR or GLGF). 1//PDZ domain (Also known as DHR or GLGF).

BRAMY3008096//Eukaryotic protein kinase domain

BRAWH3013197//Receptor family ligand binding region//7 transmembrane receptor (metabotropic glutamate family)

BRAWH3028645//Latrophilin/CL-1-like GPS domain//FecCD transport family//7 transmembrane receptor (Secretin family)

BRAWH3046240//7 transmembrane receptor (rhodopsin family)

BRCAN2019772//Zinc finger, C4 type (two domains)//Ligand-binding domain of nuclear hormone receptor

[0459] CTONG2002832//KRAB box//Zinc finger, C2H2 type//Zinc finger, C2H2 type//Zinc finger, C2H2 type//Zinc finger, C2H2 type//Zinc finger, C2H2 type//Zinc finger, C2H2 type//Zinc carboxypeptidase//Zinc finger, C2H2 type//Zinc finger, C2H2 type//Zinc finger, C2H2 type//Zinc finger, C2H2 type//Zinc finger, C2H2 type//Zinc finger, C2H2 type//Zinc finger, C2H2 type

CTONG2003764//Phorbol esters/diacylglycerol binding domain (C1 domain)

PROST2010326//Latrophilin/CL-1-like GPS domain//Cytochrome C assembly protein//7 transmembrane receptor (Secretin family)

TBAES2004105//Thrombospondin type 1 domain

[0460] TBAES2007379//EGF-like domain//EGF-like domain//Trypsin Inhibitor like cysteine rich domain//EGF-like domain//EGF-like domain//Keratin, high sulfur B2 protein//EGF-like domain//EGF-like domain//Granulins//EGF-like domain//EGF-like domain//EGF-like domain

TBAES2007481//Cyclin

TBAES2008133//PDZ domain (Also known as DHR or GLGF).

TESTI2043585//7 transmembrane receptor (rhodopsin family)

TESTI2046536//Sperm histone P2

[0461] TESTI4002988//KRAB box//Zinc finger, C2H2 type//Zinc finger, C2H2 type//Zinc finger, C2H2 type//Zinc finger, C2H2 type//Zinc finger, C2H2 type//Zinc finger, C2H2 type//Zinc finger, C2H2 type//Zinc finger, C2H2 type//DM DNA binding domain//Zinc finger, C2H2 type//Transcription factor S-II (TFIIS)//Zinc finger, C2H2 type//Putative zinc finger in N-recognin//Zinc finger, C2H2 type//Zinc finger, C2H2 type//Zinc finger, C2H2 type//Zinc finger, C2H2 type//Zinc finger, C2H2 type//Zinc finger, C2H2 type//Zinc finger, C2H2 type//Zinc finger, C2H2 type//Zinc finger, C2H2 type

TESTI4005158//Integrins, beta chain//Notch (DSL) domain//Amiloride-sensitive sodium channel

[0462] TESTI4005500//KRAB box//Zinc finger, C2H2 type//Zinc finger, C2H2 type//Zinc finger, C2H2 type//Zinc finger, C2H2 type//Zinc finger, C2H2 type//Zinc finger, C2H2 type//Zinc finger, C2H2 type//Zinc finger, C2H2 type//DM DNA binding domain//Zinc finger, C2H2 type//Transcription factor S-II (TFIIS)//Zinc finger, C2H2 type//Putative zinc finger in N-recognin//Zinc finger, C2H2 type//Zinc finger, C2H2 type//Zinc finger, C2H2 type//Zinc finger, C2H2 type//Zinc finger, C2H2 type//Zinc finger, C2H2 type//Zinc finger, C2H2 type//Zinc finger, C2H2 type//Zinc finger, C2H2 type

TESTI4052089//Eukaryotic protein kinase domain

[0463] THYMU3024602//EGF-like domain//EB module//EGF-like domain//Metallothionein//EGF-like domain//EGF-like domain//Keratin, high sulfur B2 protein//EGF-like domain//Latrophilin/CL-1-like GPS domain//Leishmanolysin//7 transmembrane receptor (Secretin family)

THYMU3044175//S-adenosyl-L-homocysteine hydrolase

THYMU3046350//Sodium:neurotransmitter symporter family//Sulfate transporter family//Sodium:neurotransmitter symporter family//Sodium:neurotransmitter symporter family

TRACH1000193//Metallothionein family 5//Zinc finger, C4 type (two domains)//Ligand-binding domain of nuclear hormone receptor

[0464] TRACH3019290//KRAB box//Zinc finger, C2H2 type//Zinc finger, C2H2 type//Zinc finger//Zinc finger, C2H2 type//Zinc finger, C2H2 type//Zinc finger, C2H2 type//Zinc finger, C2H2 type//Zinc finger, C2H2 type//Zinc finger, C2H2 type//Zinc finger, C2H2 type//Zinc finger, C2H2 type//Transcription factor S-II (TFIIS)//Zinc finger, C2H2 type//PHD-finger//Zinc finger, C2H2 type

TRACH3021066//Furin-like cysteine rich region//Eukaryotic protein kinase domain

UTERU2036507//Thrombospondin type 1 domain//NTR/C345C module

### EXAMPLE 6

### Functional Categorization Based on Homology Search of the Full-Length Nucleotide Sequences and Deduced Amino Acid Sequences

[0465] The functional prediction and categorization of the proteins encoded by the clones were carried out based on the result of homology search of the databases of Swiss-Prot, nr, and RefSeq (see the Homology Search Result Data) for the full-length nucleotide sequences and deduced amino acid sequences.

[0466] A clone predicted to belong to the category of secretory protein/membrane protein means a clone having hit data with some annotation, such as growth factor, cytokine, hormone, signal, transmembrane, membrane, extracellular matrix, receptor, G-protein coupled receptor, ionic channel, voltage-gated channel, calcium channel, cell adhesion, collagen, and connective tissue, suggesting that it is a secretory or membrane protein, or means a clone in which the presence of nucleotide sequence encoding a signal sequence or transmembrane domain was suggested by the results of PSORT and SOSUI analyses for deduced ORF.

[0467] A clone predicted to belong to the category of glycoprotein-related protein means a clone having hit data with some annotation, such as glycoprotein, suggesting that the clone encodes a glycoprotein-related protein.

[0468] A clone predicted to belong to the category of signal transduction-related protein means a clone having hit data with some annotation, such as serine/threonine-protein kinase, tyrosine-protein kinase, SH3 domain, and SH2 domain, suggesting that the clone encodes a signal transduction-related protein.

[0469] A clone predicted to belong to the category of transcription-related protein means a clone having hit data with some annotation, such as transcription regulation, zinc finger, and homeobox, suggesting that the clone encodes a transcription-related protein.

[0470] A clone predicted to belong to the category of disease-related protein means a clone having hit data with some annotation, such as disease mutation and syndrome, suggesting that the clone encodes a disease-related protein, or means a clone whose full-length nucleotide sequence has hit data for Swiss-Prot, nr, or RefSeq, where the hit data corresponds to genes or proteins which have been deposited in the Online Mendelian Inheritance in Man (OMIM) (http://www.ncbi.nlm.nih.gov/Omim/), which is the human gene and disease database.

[0471] A clone predicted to belong to the category of enzyme and/or metabolism-related protein means a clone having hit data with some annotation, such as metabolism, oxidoreductase, and E. C. No. (Enzyme commission number), suggesting that the clone encodes an enzyme and/or metabolism-related protein.

[0472] A clone predicted to belong to the category of cell division and/or cell proliferation-related protein means a clone having hit data with some annotation, such as cell division, cell cycle, mitosis, chromosomal protein, cell growth, and apoptosis, suggesting that the clone encodes a cell division and/or cell proliferation-related protein.

[0473] A clone predicted to belong to the category of cytoskeleton-related protein means a clone having hit data with some annotation, such as structural protein, cytoskeleton, actin-binding, and microtubles, suggesting that the clone encodes a cytoskeleton-related protein.

[0474] A clone which is predicted to belong to the category of nuclear protein and/or RNA synthesis-related protein means a clone having hit data with some annotation, such as nuclear protein, RNA splicing, RNA processing, RNA helicase, and polyadenylation, suggesting that the clone encodes a nuclear protein and/or RNA synthesis-related protein.

[0475] A clone predicted to belong to the category of protein synthesis and/or transport-related protein means a clone having hit data with some annotation, such as translation regulation, protein biosynthesis, amino-acid biosynthesis, ribosomal protein, protein transport, and signal recognition particle, suggesting that the clone encodes a protein synthesis and/or transport-related protein.

[0476] A clone predicted to belong to the category of cellular defense-related protein means a clone having hit data with some annotation, such as heat shock, DNA repair, and DNA damage, suggesting that the clone encodes a cellular defense-related protein.

[0477] A clone predicted to belong to the category of development and/or differentiation-related proteins means a clone having hit data with some annotation, such as developmental protein, suggesting that the clone encodes a development and/or differentiation-related protein.

[0478] A clone predicted to belong to the category of DNA-binding and/or RNA-binding protein means a clone having hit data with some annotation, such as DNA-binding, RNA-binding, etc.

[0479] A clone predicted to belong to the category of ATP-binding and/or GTP-binding protein means a clone having hit data with some annotation, such as ATP-binding, GTP-binding, etc.

[0480] In this functional categorization, when a single clone corresponded to multiple categories of those shown above, the clone was assigned to the multiple categories. However, the function of a protein is not restricted to the functional categories in this classification, and there is the possibility that other functions are newly assigned to the protein.

[0481] The clones predicted to belong to the category of secretory protein and/or membrane protein are the following 551 clones.

[0482] 3NB692004045, ADIPS2000069, ADRGL2010315, ASTRO2015162, BLADE2001031, BLADE2002744, BLADE2007744, BRACE2003628, BRACE2012528, BRACE2013126, BRACE2017397, BRACE2017580, BRACE2017992, BRACE2023633, BRACE2030039, BRACE2035191, BRACE3001403, BRACE3001973, BRACE3002264, BRACE3002756, BRACE3004767, BRACE3004981, BRACE3007869, BRACE3009392, BRACE3013874, BRACE3013986, BRACE3014523, BRACE3015898, BRACE3018083, BRACE3021517, BRACE3021805, BRACE3022051, BRACE3024379, BRACE3024444, BRACE3024497, BRACE3024879, BRACE3026345, BRACE3026456, BRACE3026802, BRACE3028360, BRACE3029021, BRACE3030538, BRACE3031372, BRACE3031579, BRACE3031728, BRACE3032385, BRACE3032537, BRACE3032980, BRACE3033525, BRACE3034964, BRACE3034993, BRACE3037637, BRACE3037803, BRACE3038570, BRACE3039358, BRACE3039378, BRACE3040644, BRACE3040863, BRACE3042326, BRACE3042409, BRACE3042432, BRACE3044090, BRACE3046049, BRACE3046466, BRACE3048565, BRACE3050504, BRACE3051144, BRACE3051621, BRACE3052486, BRALZ2010842, BRALZ2011337, BRALZ2013690, BRAMY2015516, BRAMY2021098, BRAMY2025495, BRAMY2037609, BRAMY2041507, BRAMY2044686, BRAMY2046537, BRAMY3002886, BRAMY3004126, BRAMY3007449, BRAMY3009556, BRAMY3009904, BRAMY3010654, BRAMY3010902, BRAMY3015549, BRAMY3016829, BRAMY3018248, BRAWH2000256, BRAWH2010364, BRAWH2011812, BRAWH2011958, BRAWH2012866, BRAWH2014053, BRAWH2016209, BRAWH2016305, BRAWH3001053, BRAWH3001783, BRAWH3001833, BRAWH3003573, BRAWH3005892, BRAWH3008867, BRAWH3010461, BRAWH3010657, BRAWH3011907, BRAWH3012005, BRAWH3012662, BRAWH3012779, BRAWH3013049, BRAWH3014609, BRAWH3015175, BRAWH3016123, BRAWH3017259, BRAWH3018063, BRAWH3018548, BRAWH3018969, BRAWH3019529, BRAWH3019820, BRAWH3020200, BRAWH3020884, BRAWH3021012, BRAWH3021641, BRAWH3022347, BRAWH3023156, BRAWH3023274, BRAWH3023415, BRAWH3023421, BRAWH3024186, BRAWH3024242, BRAWH3027574, BRAWH3027880, BRAWH3028223, BRAWH3028754, BRAWH3029806, BRAWH3030810, BRAWH3032298, BRAWH3034114, BRAWH3034134, BRAWH3035914, BRAWH3036270, BRAWH3038055, BRAWH3038324, BRAWH3040711, BRAWH3040900, BRAWH3042132, BRAWH3042772, BRAWH3042996, BRAWH3043498, BRAWH3043623, BRAWH3044151, BRAWH3044676, BRAWH3046196, BRAWH3047063, BRAWH3048374, BRAWH3048724, BRAWH3049068, BRAWH3049544, BRCAN2002662, BRCAN2003269, BRCAN2003814, BRCAN2006051, BRCAN2006955, BRCAN2015402, BRCAN2018269, BRCAN2019653, BRCAN2019907, BRCAN2020234, BRCAN2020412, BRCAN2020972, BRCAN2021325, BRCAN2022126, BRCOC2006164, BRCOC2006639, BRCOC2009638, BRHIP2006921, BRHIP2020930, BRHIP2021929, BRHIP3000859, BRHIP3001878, BRHIP3002000, BRHIP3002124, BRHIP3003063, BRHIP3003306, BRHIP3003395, BRHIP3004774, BRHIP3005801, BRHIP3005944, BRHIP3006950, BRHIP3007195, BRHIP3007424, BRHIP3007960, BRHIP3008320, BRHIP3010289, BRHIP3011269, BRHIP3011831, BRHIP3012185, BRHIP3012357, BRHIP3012997, BRHIP3013078, BRHIP3016032, BRHIP3017146, BRHIP3017558, BRHIP3019956, BRHIP3020733, BRHIP3021019, BRHIP3025795, BRHIP3025844, BRHIP3027160, BRHIP3027191, BRHIP3028742, BRHIP3029530, BRHIP3030230, BRHIP3031733, BRHIP3035222, BRHIP3035754, BRHIP3036715, BRHIP3036936, BRHIP3037810, BRHIP3039430, BRHIP3039509, BRSSN2004710, BRSSN2018218, BRSTN2010089, BRSTN2011688, BRSTN2011899, BRSTN2011961, BRTHA2000969, BRTHA2003759, BRTHA2012189, BRTHA2014647, BRTHA2018304, BRTHA2019726, BRTHA2019743, BRTHA2020400, BRTHA2020566, BRTHA2020721, BRTHA2020781, BRTHA2021212, BRTHA2021440, BRTHA2021450, BRTHA2022914, BRTHA2022968, BRTHA2023437, BRTHA2026311, BRTHA2027250, BRTHA2030036, BRTHA2031917, BRTHA2033155, BRTHA2033320, BRTHA2033469, BRTHA2033683, BRTHA2036055, BRTHA2036295, BRTHA3003225, BRTHA3006593, BRTHA3010135, BRTHA3010540, BRTHA3010717, BRTHA3011194, BRTHA3011998, BRTHA3012265, BRTHA3013882, BRTHA3014835, BRTHA3016616, BRTHA3018623, BRTHA3026161, BRTHA3027820, BRTHA3028505, CHONS2001287, CHONS2001797, CHONS2002419, COLON2004351, COLON2005623, COLON2005735, CTONG2008989, CTONG2020582, CTONG2027150, CTONG3001605, CTONG3002588, CTONG3008223, FCBBF3012443, FEBRA2023498, FEBRA2026977, FEHRT2002708, FEKID2002231, FEKID2002493, FELNG2000720, FELNG2001706, HCHON2009766, HSYRA2004550, JCMLC1000159, JCMLC2000273, JCMLC2002095, JCMLC2002751, KIDNE2004531, KIDNE2015987, KIDNE2017153, LYMPB1000158, LYMPB2002236, LYMPB2002458, LYMPB2002478, MESAN2014624, NETRP2004090, NETRP2004434, NETRP2005282, NETRP2005849, NETRP2008582, NT2RI3001967, NT2RI3005861, NT2RI3005923, NT2RI3009524, NT2RP7019682, NT2RP8001605, NT2RP8003787, NT2RP8008057, OCBBF2000831, OCBBF2004478, OCBBF2007039, OCBBF2009536, OCBBF2018229, OCBBF2018618, OCBBF2036019, OCBBF3003745, OCBBF3007704, OCBBF3021502, OCBBF3022123, OCBBF3022576, OCBBF3023175, OCBBF3023993, OCBBF3025475, OCBBF3025887, OCBBF3026979, OCBBF3028001, PEBLM2003935, PEBLM2005615, PLACE5000522, PLACE6000012, PLACE6010936, PLACE6019674, PLACE7000266, PLACE7000707, PLACE7001759, PLACE7003639, PLACE7006090, PLACE7006498, PLACE7008136, PLACE7011269, PLACE7012111, PLACE7016321, PLACE7016454, PUAEN2000684, SMINT2003641, SPLEN2011252, SPLEN2025012, SPLEN2031004, SPLEN2034551, SPLEN2035615, SPLEN2042051, STOMA2004663, SYNOV4009139, T1ESE2002665, TBAES2005361, TBAES2007428, TESOP2008556, TESTI2003768, TESTI2007490, TESTI2018335, TESTI2022323, TESTI2024267, TESTI2028613, TESTI2036822, TESTI2037085, TESTI2037657, TESTI2037877, TESTI2046188, TESTI2049041, TESTI2052670, TESTI4001037, TESTI4002072, TESTI4002889, TESTI4003602, TESTI4004539, TESTI4004653, TESTI4005399, TESTI4007671, TESTI4010544, TESTI4010721, TESTI4013774, TESTI4014415, TESTI4014932, TESTI4014977, TESTI4017647, TESTI4017854, TESTI4019149, TESTI4021197, TESTI4021377, TESTI4021569, TESTI4022158, TESTI4023096, TESTI4023654, TESTI4024494, TESTI4026680, TESTI4027170, TESTI4028042, TESTI4031173, TESTI4031818, TESTI4032128, TESTI4034973, TESTI4035872, TESTI4035989, TESTI4036012, TESTI4037949, TESTI4038047, TESTI4040559, TESTI4041049, TESTI4043067, TESTI4043371, TESTI4045168, TESTI4046450, TESTI4047119, TESTI4048296, TESTI4048545, TESTI4051015, TESTI4051858, TESTI4052219, TESTI4052430, TESTI4052598, THYMU3002825, THYMU3003007, THYMU3003350, THYMU3008935, THYMU3009755, THYMU3011360, THYMU3013197, THYMU3014173, THYMU3015457, THYMU3015647, THYMU3016518, THYMU3018151, THYMU3019605, THYMU3021404, THYMU3022211, THYMU3022528, THYMU3022668, THYMU3023107, THYMU3023400, THYMU3025118, THYMU3025313, THYMU3025642, THYMU3026306, THYMU3026532, THYMU3026869, THYMU3027540, THYMU3028461, THYMU3029795, THYMU3031878, THYMU3032032, THYMU3033649, THYMU3033754, THYMU3034099, THYMU3034616, THYMU3036310, THYMU3036934, THYMU3036953, THYMU3037192, THYMU3037772, THYMU3038158, THYMU3038167, THYMU3040068, THYMU3040126, THYMU3040146, THYMU3040172, THYMU3040746, THYMU3040816, THYMU3041918, THYMU3042321, THYMU3043688, THYMU3043779, THYMU3044188, THYMU3045510, THYMU3047115, THYMU3047156, THYMU3047542, THYMU3047760, TKIDN2011160, TLIVE2008797, TRACH3003872, TRACH3004747, TRACH3005274, TRACH3005699, TRACH3007274, TRACH3007625, TRACH3009008, TRACH3009061, TRACH3010382, TRACH3011082, TRACH3011184, TRACH3012659, TRACH3012891, TRACH3013900, TRACH3014063, TRACH3014580, TRACH3015136, TRACH3015346, TRACH3016368, TRACH3016885, TRACH3016992, TRACH3017409, TRACH3018191, TRACH3018240, TRACH3018524, TRACH3018943, TRACH3019058, TRACH3019370, TRACH3019621, TRACH3019807, TRACH3020930, TRACH3021023, TRACH3021544, TRACH3022758, TRACH3023063, TRACH3023203, TRACH3023516, TRACH3023945, TRACH3024081, TRACH3024671, TRACH3025346, TRACH3026542, TRACH3027681, TRACH3029670, TRACH3031316, TRACH3031678, TRACH3032480, TRACH3034680, TRACH3036103, TRACH3036278, TSTOM2002682, UTERU3005422, UTERU3010029, UTERU3011092, UTERU3011398, UTERU3011837, UTERU3012414, UTERU3015647, UTERU3016273, UTERU3017626, UTERU3021850, UTERU3022168, UTERU3022922, UTERU3023413

[0483] The following 19 clones are also predicted to belong to the category of secretory protein and/or membrane protein.

[0484] ADRGL2011190, BRACE3046450, BRAWH3013197, BRAWH3028645, BRAWH3046240, BRTHA3024233, PROST2010326, TBAES2004105, TBAES2007379, TBAES2007481, TBAES2008133, TESTI2043585, TESTI4005158, THYMU3024602, THYMU3044175, THYMU3046350, TLIVE2007192, UTERU2025415, UTERU2036507

[0485] The clones predicted to belong to the category of glycoprotein-related protein are the following 114 clones.

[0486] 3NB692004045, ADIPS2000069, BRACE2017397, BRACE3001403, BRACE3001973, BRACE3002264, BRACE3009392, BRACE3026345, BRACE3032385, BRACE3039358, BRACE3039378, BRACE3042432, BRACE3046466, BRACE3051621, BRAMY3004126, BRAWH2012866, BRAWH3001783, BRAWH3003573, BRAWH3014609, BRAWH3023156, BRAWH3024186, BRAWH3029806, BRAWH3040900, BRAWH3043623, BRAWH3044151, BRAWH3049544, BRCAN2003269, BRCAN2021325, BRHIP3005944, BRHIP3007424, BRHIP3010289, BRHIP3011269, BRHIP3011567, BRHIP3030230, BRHIP3036715, BRHIP3036936, BRHIP3039509, BRTHA2019726, BRTHA2020721, BRTHA2022968, BRTHA2025869, BRTHA2027250, BRTHA2031917, BRTHA2033155, BRTHA2033683, BRTHA3010135, CHONS2001287, COLON2004351, FEKID2002493, FELNG2000720, JCMLC1000159, JCMLC2000273, JCMLC2002095, JCMLC2002751, KIDNE2015987, LYMPB2002458, NT2RI3005923, NT2RI3009524, OCBBF2000831, OCBBF2004478, OCBBF2007039, OCBBF2018618, OCBBF3026979, PEBLM2005615, PLACE6001933, PLACE6010936, PLACE7006090, PLACE7012111, SPLEN2025012, STOMA2004663, T1ESE2002665, TESTI2007490, TESTI2022323, TESTI2037657, TESTI2052670, TESTI4001517, TESTI4014932, TESTI4031173, THYMU3014173, THYMU3015647, THYMU3016518, THYMU3020221, THYMU3025118, THYMU3026532, THYMU3032032, THYMU3037772, THYMU3040172, TKIDN2011160, TLUNG2001445, TRACH3005274, TRACH3009061, TRACH3015136, TRACH3018524, TRACH3018907, TRACH3019058, TRACH3019370, TRACH3019621, TRACH3019807, TRACH3020930, TRACH3021023, TRACH3023516, TRACH3025346, TRACH3026299, TRACH3028441, TRACH3029670, TRACH3031678, TRACH3034680, TRACH3037505, TRACH3038399, TUTER2001433, UTERU3011398, UTERU3011837, UTERU3015647, UTERU3021850

[0487] The following ten clones are also predicted to belong to the category of glycoprotein-related protein.

BRAWH3013197, BRAWH3046240, PROST2010326, TBAES2004105, TESTI2043585, TESTI4005158, THYMU3024602, THYMU3046350, TRACH3021066, UTERU2036507

[0488] The clones predicted to belong to the category of signal transduction-related protein are the following 71 clones.

[0489] BRACE3002344, BRACE3017253, BRACE3031315, BRACE3036283, BRACE3042046, BRACE3044172, BRACE3046491, BRACE3046609, BRAMY3009491, BRAMY3015547, BRAMY3017920, BRAWH3017180, BRAWH3019026, BRAWH3027806, BRAWH3032340, BRAWH3042438, BRAWH3047644, BRCAN2010665, BRHIP3006294, BRHIP3011460, BRHIP3011567, BRHIP3033557, BRHIP3037543, BRHIP3041587, BRTHA2026290, BRTHA2035743, BRTHA3011187, BRTHA3021708, BRTHA3025073, BRTHA3026916, KIDNE2010049, N1ESE2000698, OCBBF3005330, OCBBF3006986, OCBBF3009244, OCBBF3025630, PLACE6000055, PLACE6001933, PLACE7009936, PLACE7011559, PLACE7014247, PUAEN2006639, SKMUS2008585, SPLEN2007689, TESTI2021654, TESTI2040377, TESTI4010902, TESTI4013474, TESTI4046073, TESTI4049786, TESTI4051865, THYMU3013785, THYMU3025683, THYMU3032798, TRACH3003037, TRACH3003357, TRACH3005173, TRACH3018519, TRACH3018606, TRACH3024020, TRACH3026650, TRACH3027701, TRACH3029462, TRACH3030176, TRACH3038399, TSTOM2001571, TSTOM2002611, UTERU2024042, UTERU3001029, UTERU3010919, UTERU3021231

[0490] The following four clones are also predicted to belong to the category of signal transduction-related protein.

BRHIP3030064, CTONG2003764, PLACE7013963, TRACH3021066

[0491] The clones predicted to belong to the category of transcription-related protein are the following 106 clones.

[0492] ASTRO2016114, BEAST2000981, BRACE2012947, BRACE2019348, BRACE3025719, BRACE3026844, BRACE3034183, BRACE3041162, BRACE3046152, BRAMY2040915, BRAMY3000692, BRAMY3007078, BRAMY3011581, BRAMY3014027, BRAMY3018754, BRAWH3000446, BRAWH3005886, BRAWH3011577, BRAWH3013009, BRAWH3013264, BRAWH3017477, BRAWH3023172, BRAWH3028796, BRAWH3031342, BRAWH3032571, BRAWH3035936, BRAWH3036247, BRAWH3036334, BRAWH3038827, BRCOC2012386, BRHIP2023735, BRHIP2027077, BRHIP2029529, BRHIP3004725, BRHIP3027651, BRHIP3028246, BRTHA2024712, BRTHA3000456, BRTHA3003736, BRTHA3010212, BRTHA3014000, BRTHA3028339, CHONS2000797, CHONS2002829, CTONG2001932, CTONG2011801, D90ST2003106, FCBBF3020030, FCBBF5000384, HCASM2008154, NETRP2004017, NT2RI3008179, NT2RI3009480, NT2RP8003490, NTONG2003805, NTONG2008483, OCBBF2016928, OCBBF3005330, OCBBF3008392, OCBBF3020263, OCBBF3021361, OCBBF3022166, PLACE7002303, PLACE7005169, PLACE7009757, SPLEN2012571, SPLEN2028417, SYNOV2003326, T1ESE2000904, TESTI2040377, TESTI4001679, TESTI4002799, TESTI4002868, TESTI4003796, TESTI4003944, TESTI4005322, TESTI4005470, TESTI4039904, TESTI4052775, THYMU3008105, THYMU3012983, THYMU3014372, THYMU3020869, THYMU3021586, THYMU3022434, THYMU3026000, THYMU3030072, THYMU3037052, THYMU3043200, TLIVE2001616, TRACH3003037, TRACH3003458, TRACH3004424, TRACH3010079, TRACH3010167, TRACH3010342, TRACH3015951, TRACH3021883, TRACH3022109, TRACH3028180, TRACH3036750, UTERU2037423, UTERU3012293, UTERU3016070, UTERU3019708, UTERU3022588

[0493] The following seven clones are also predicted to belong to the category of transcription-related protein.

BRACE3002184, BRCAN2019772, CTONG2002832, TESTI4002988, TESTI4005500, TRACH1000193, TRACH3019290

[0494] The clones predicted to belong to the category of disease-related protein are the following 391 clones.

[0495] ADIPS2000069, ASTRO2015162, ASTRO2016114, ASTRO3000154, BLADE2000256, BRACE1000475, BRACE2012838, BRACE2012947, BRACE2013009, BRACE2016896, BRACE2017397, BRACE2023744, BRACE2027382, BRACE3001403, BRACE3001973, BRACE3002756, BRACE3004767, BRACE3009392, BRACE3013418, BRACE3018083, BRACE3019941, BRACE3020669, BRACE3025719, BRACE3026345, BRACE3026802, BRACE3028998, BRACE3036283, BRACE3039378, BRACE3040644, BRACE3041059, BRACE3041162, BRACE3042046, BRACE3042432, BRACE3043597, BRACE3044172, BRACE3046152, BRACE3046466, BRACE3046609, BRACE3051621, BRACE3052321, BRALZ2010842, BRALZ2013621, BRAMY2041384, BRAMY3000692, BRAMY3004126, BRAMY3007078, BRAMY3009491, BRAMY3011501, BRAMY3011581, BRAMY3014027, BRAMY3015086, BRAMY3017920, BRAMY3018248, BRAWH2002333, BRAWH2012866, BRAWH2014053, BRAWH3001638, BRAWH3001783, BRAWH3004335, BRAWH3010602, BRAWH3011577, BRAWH3011623, BRAWH3017180, BRAWH3017259, BRAWH3018548, BRAWH3019026, BRAWH3021580, BRAWH3023156, BRAWH3023172, BRAWH3023415, BRAWH3024186, BRAWH3029385, BRAWH3029538, BRAWH3031342, BRAWH3032298, BRAWH3032571, BRAWH3033513, BRAWH3034668, BRAWH3034775, BRAWH3034890, BRAWH3036334, BRAWH3038324, BRAWH3038827, BRAWH3040900, BRAWH3041492, BRAWH3041556, BRAWH3042438, BRAWH3042447, BRAWH3042772, BRAWH3043295, BRAWH3043623, BRAWH3044151, BRAWH3046424, BRAWH3047565, BRAWH3047644, BRAWH3049544, BRCAN2003269, BRCAN2006051, BRCAN2010665, BRCAN2020331, BRCAN2021325, BRCOC2012386, BRHIP2008756, BRHIP2023735, BRHIP2029529, BRHIP3001076, BRHIP3001481, BRHIP3003984, BRHIP3004215, BRHIP3004725, BRHIP3005037, BRHIP3005307, BRHIP3005673, BRHIP3005801, BRHIP3006449, BRHIP3007609, BRHIP3010289, BRHIP3011567, BRHIP3017146, BRHIP3017855, BRHIP3021019, BRHIP3023922, BRHIP3025795, BRHIP3027191, BRHIP3027651, BRHIP3028742, BRHIP3029409, BRHIP3030230, BRHIP3032374, BRHIP3035006, BRHIP3036715, BRHIP3037543, BRHIP3039509, BRSSN2004710, BRSTN2006466, BRSTN2008475, BRSTN2011961, BRSTN2012069, BRSTN2016918, BRTHA2019726, BRTHA2020721, BRTHA2020910, BRTHA2024712, BRTHA2025869, BRTHA2026071, BRTHA2026290, BRTHA2031917, BRTHA2033155, BRTHA2033683, BRTHA3003736, BRTHA3010135, BRTHA3010212, BRTHA3011187, BRTHA3011998, BRTHA3012265, BRTHA3014547, BRTHA3021708, BRTHA3021971, BRTHA3023403, BRTHA3026916, BRTHA3027957, CHONS2001287, CHONS2002829, COLON2001829, COLON2004911, COLON2005735, CTONG2001932, CTONG2010330, CTONG2011801, CTONG2014206, D90ST2004417, FCBBF3020030, FCBBF3021191, FCBBF3024911, FCBBF5000384, FEBRA2013570, FEBRA2026582, FEBRA2028457, FEKID2002637, FELNG2000720, FELNG2001953, HCASM2008154, JCMLC1000159, JCMLC2000273, JCMLC2002095, KIDNE2015987, N1ESE2000698, NETRP2000961, NETRP2003448, NETRP2004017, NETRP2008582, NT2RI3008179, NT2RI3009480, NT2RI3009524, NT2RP8003787, NT2RP8008057, NTONG2003805, OCBBF2004478, OCBBF2007039, OCBBF2018618, OCBBF2024589, OCBBF2030927, OCBBF2036019, OCBBF3001202, OCBBF3004487, OCBBF3008392, OCBBF3020263, OCBBF3022166, OCBBF3025475, OCBBF3025503, OCBBF3025630, OCBBF3026979, PEBLM2005615, PLACE5000492, PLACE6001933, PLACE6016030, PLACE7000266, PLACE7001759, PLACE7002303, PLACE7003985, PLACE7004103, PLACE7006090, PLACE7006268, PLACE7006498, PLACE7007379, PLACE7009563, PLACE7009757, PLACE7009936, PLACE7011559, PLACE7012111, PLACE7014247, PLACE7016526, PUAEN2000594, SKNSH2007306, SMINT2011406, SMINT2011509, SMINT2014721, SPLEN2007689, SPLEN2012571, SPLEN2025012, SPLEN2028417, SPLEN2033996, SYNOV2003326, SYNOV4009139, T1ESE2000609, TESTI2005112, TESTI2007490, TESTI2009739, TESTI2023903, TESTI2030901, TESTI2034913, TESTI2052670, TESTI4001517, TESTI4001679, TESTI4002868, TESTI4003796, TESTI4003944, TESTI4004653, TESTI4005322, TESTI4005653, TESTI4007965, TESTI4017382, TESTI4017647, TESTI4018436, TESTI4020596, TESTI4021197, TESTI4021569, TESTI4021713, TESTI4023096, TESTI4026080, TESTI4028182, TESTI4031173, TESTI4032128, TESTI4032834, TESTI4032913, TESTI4033177, TESTI4036048, TESTI4039575, TESTI4039904, TESTI4041984, TESTI4046073, TESTI4047119, TESTI4049786, TESTI4049899, TESTI4051015, TESTI4052775, THYMU3002825, THYMU3008105, THYMU3012402, THYMU3012983, THYMU3013785, THYMU3014173, THYMU3014372, THYMU3014620, THYMU3016518, THYMU3020221, THYMU3020869, THYMU3021586, THYMU3021755, THYMU3022434, THYMU3023400, THYMU3025118, THYMU3026306, THYMU3026532, THYMU3027671, THYMU3032032, THYMU3032798, THYMU3033649, THYMU3033759, THYMU3037052, THYMU3037772, THYMU3038158, THYMU3038375, THYMU3040172, THYMU3040746, THYMU3040816, THYMU3040829, THYMU3043200, THYMU3047115, THYMU3047760, TKIDN2011160, TLIVE2007736, TLUNG2000654, TLUNG2001445, TLUNG2001600, TRACH2024730, TRACH3004424, TRACH3005173, TRACH3005191, TRACH3005699, TRACH3006379, TRACH3006800, TRACH3008042, TRACH3009008, TRACH3009701, TRACH3010079, TRACH3010167, TRACH3010342, TRACH3011282, TRACH3011313, TRACH3011503, TRACH3012891, TRACH3015951, TRACH3016455, TRACH3016805, TRACH3018524, TRACH3018907, TRACH3019058, TRACH3019621, TRACH3020769, TRACH3020930, TRACH3021023, TRACH3021373, TRACH3021778, TRACH3021883, TRACH3023373, TRACH3023960, TRACH3024081, TRACH3024671, TRACH3025346, TRACH3026283, TRACH3026299, TRACH3028441, TRACH3028597, TRACH3028837, TRACH3029670, TRACH3030855, TRACH3031660, TRACH3031678, TRACH3032570, TRACH3034680, TRACH3036750, TRACH3037505, TRACH3038399, TUTER2001433, UTERU2024042, UTERU2037423, UTERU3001946, UTERU3004635, UTERU3011398, UTERU3012293, UTERU3012414, UTERU3012999, UTERU3015011, UTERU3015299, UTERU3016308, UTERU3017441, UTERU3017626, UTERU3019708, UTERU3021850, UTERU3022588

[0496] The following 23 clones are also predicted to belong to the category of disease-related protein.

[0497] ADRGL2011190, BRACE3002184, BRACE3026993, BRACE3046450, BRAWH3013197, BRAWH3046240, BRCAN2019772, BRHIP3030064, BRTHA3024233, CTONG2002832, CTONG2003764, PROST2010326, TBAES2004105, TESTI2046536, TESTI4005158, TESTI4005500, THYMU3024602, THYMU3046350, TRACH1000193, TRACH3019290, TRACH3021066, UTERU2017492, UTERU2036507

[0498] In particular, hit data of the following 390 clones for Swiss-Prot, or nr or RefSeq corresponded to genes or proteins which had been deposited in the Online Mendelian Inheritance in Man (OMIM), which is the human gene and disease database (the OMIM Number is shown in the parenthesis after the Clone Name).

[0499] ADIPS2000069(146900), ASTRO2015162(606106), ASTRO2016114(603899), ASTRO3000154(601594), BLADE2000256(140750), BRACE1000475(600696), BRACE2012838(605032), BRACE2012947(140580), BRACE2013009(605888), BRACE2016896(601421), BRACE2017397(115437), BRACE2023744(600763), BRACE2027382(606019), BRACE3001403(126141), BRACE3001973(600976), BRACE3002756(603143), BRACE3004767(182790), BRACE3009392(600229), BRACE3013418(182900), BRACE3018083(605268), BRACE3019941(600595), BRACE3020669(603917), BRACE3025719(605493), BRACE3026345(147470), BRACE3026802(605784), BRACE3028998(603063), BRACE3036283(602052), BRACE3039378(604100), BRACE3040644(603159), BRACE3041059(603486), BRACE3041162(194556), BRACE3042046(311030), BRACE3042432(192321), BRACE3043597(603704), BRACE3044172(601231), BRACE3046152(604950), BRACE3046466(604210;600105), BRACE3046609(606457), BRACE3051621(601313;173900), BRACE3052321(603050), BRALZ2010842(212138), BRALZ2013621(600712), BRAMY2041384(114070), BRAMY3000692(603971), BRAMY3004126(603071), BRAMY3007078(602410), BRAMY3009491(600286), BRAMY3011501(602869), BRAMY3011581(601243), BRAMY3014027(194542), BRAMY3015086(602879), BRAMY3017920(600365), BRAMY3018248(605464), BRAWH2002333(171891), BRAWH2012866(185605), BRAWH2014053(604581), BRAWH3001638(605003), BRAWH3001783(605514), BRAWH3004335(603244), BRAWH3010602(603216), BRAWH3011577(601139), BRAWH3011623(164020), BRAWH3017180(601441), BRAWH3017259(603143), BRAWH3018548(193065), BRAWH3019026(602033), BRAWH3021580(179838), BRAWH3023156(137190), BRAWH3023172(603755), BRAWH3023415(604346), BRAWH3024186(179590), BRAWH3029385(602378), BRAWH3029538(600948), BRAWH3031342(603971), BRAWH3032298(601995), BRAWH3032571(603277), BRAWH3033513(604054;261510), BRAWH3034668(603486), BRAWH3034775(605800), BRAWH3034890(606265), BRAWH3036334(603971), BRAWH3038324(604249), BRAWH3038827(600574), BRAWH3040900(604265), BRAWH3041492(130500), BRAWH3041556(172460), BRAWH3042438(125855), BRAWH3042447(606323), BRAWH3042772(602878), BRAWH3043295(179030), BRAWH3043623(600976) BRAWH3044151(605421), BRAWH3046424(300272), BRAWH3047565(606277) BRAWH3047644(605216), BRAWH3049544(602273), BRCAN2003269(171060;602347), BRCAN2006051(604581), BRCAN2010665(603583) BRCAN2020331(604851), BRCAN2021325(114855), BRCOC2012386(602277), BRHIP2008756(605819), BRHIP2023735(601670), BRHIP2029529(189972), BRHIP3001076(604673), BRHIP3001481(176889), BRHIP3003984(603722;223900), BRHIP3004215(603294), BRHIP3004725(602075), BRHIP3005037(603526), BRHIP3005307(603197), BRHIP3005673(138385), BRHIP3005801(605704), BRHIP3006449(604275), BRHIP3007609(426000), BRHIP3010289(603130), BRHIP3011567(114207), BRHIP3017146(602878), BRHIP3017855(606406), BRHIP3021019(176879), BRHIP3023922(156570;250940), BRHIP3025795(603877), BRHIP3027191(601746), BRHIP3027651(604589), BRHIP3028742(602076), BRHIP3029409(604156), BRHIP3030230(602367), BRHIP3032374(603197), BRHIP3035006(604402) BRHIP3036715(142800), BRHIP3037543(602052), BRHIP3039509(601328), BRSSN2004710(600127), BRSTN2006466(138275), BRSTN2008475(605178), BRSTN2011961(176790), BRSTN2012069(130590), BRSTN2016918(137780) BRTHA2019726(147100), BRTHA2020721(147100), BRTHA2020910(602661), BRTHA2024712(600747), BRTHA2025869(162280), BRTHA2026071(605297), BRTHA2026290(602306), BRTHA2031917(118946), BRTHA2033155(601873), BRTHA2033683(111000), BRTHA3003736(133510;234050), BRTHA3010135(179590), BRTHA3010212(603971), BRTHA3011187(605837), BRTHA3011998(603264), BRTHA3012265(605646), BRTHA3014547(182900), BRTHA3021708(602654), BRTHA3021971(605609), BRTHA3023403(600597), BRTHA3026916(601619), BRTHA3027957(606078), CHONS2001287(146732), CHONS2002829(602981), COLON2001829(604399), COLON2004911(603937;180100), COLON2005735(111690;111700), CTONG2001932(605683), CTONG2010330(606088), CTONG2011801(603971), CTONG2014206(605609) D90ST2004417(113703), FCBBF3020030(603406), FCBBF3021191(605119), FCBBF5000384(601737), FEBRA2013570(248600), FEBRA2026582(300252), FEBRA2028457(164035), FEKID2002637(176875), FELNG2000720(601662), FELNG2001953(603597), HCASM2008154(133450), JCMLC1000159(107470;209950), JCMLC2000273(120980), JCMLC2002095(600738), KIDNE2015987(191845), N1ESE2000698(604734), NETRP2000961(600417), NETRP2003448(179551), NETRP2004017(605344), NETRP2008582(103195), NT2RI3008179(603808), NT2RI3009480(601804), NT2RI3009524(604210;600105), NT2RP8003787(605427), NT2RP8008057(603489), NTONG2003805(601781), OCBBF2004478(604265), OCBBF2007039(605009), OCBBF2018618(102775), OCBBF2024589(602462), OCBBF2030927(603897), OCBBF2036019(601825;256000), OCBBF3001202(140750), OCBBF3004487(142560), OCBBF3008392(605682), OCBBF3020263(604077), OCBBF3022166(600848), OCBBF3025475(604148), OCBBF3025503(601653;113650), OCBBF3025630(604141), OCBBF3026979(602319), PEBLM2005615(600242), PLACE5000492(602142), PLACE6001933(131550), PLACE6016030(605442), PLACE7000266(188840), PLACE7001759(600338), PLACE7002303(601542;180500;137600;604229), PLACE7003985(109684), PLACE7004103(142695), PLACE7006090(154360), PLACE7006268(603053), PLACE7006498(604394), PLACE7007379(603105), PLACE7009563(300344), PLACE7009757(601804), PLACE7009936(600365), PLACE7011559(600831), PLACE7012111(602714), PLACE7014247(601232), PLACE7016526(605490), PUAEN2000594(604679), SKNSH2007306(118990), SMINT2011406(147890), SMINT2011509(606343), SMINT2014721(606090), SPLEN2007689(233700), SPLEN2012571(603430), SPLEN2025012(146900), SPLEN2028417(142995), SPLEN2033996(603853), SYNOV2003326(602960), SYNOV4009139(603551), T1ESE2000609(182465), TESTI2005112(603846), TESTI2007490(601291), TESTI2009739(160745), TESTI2023903(605046), TESTI2030901(600436), TESTI2034913(148060), TESTI2052670(142461), TESTI4001517(148070), TESTI4001679(602850), TESTI4002868(601863;209920), TESTI4003796(603132), TESTI4003944(603971), TESTI4004653(606106), TESTI4005322(603899), TESTI4005653(182465), TESTI4007965(603533), TESTI4017382(605689), TESTI4017647(603211), TESTI4018436(601754), TESTI4020596(602537), TESTI4021197(602189), TESTI4021569(605464), TESTI4021713(604105), TESTI4023096(604878), TESTI4026080(605575), TESTI4028182(603892), TESTI4031173(190197), TESTI4032128(104776), TESTI4032834(300188), TESTI4032913(106410), TESTI4033177(602038), TESTI4036048(601272), TESTI4039575(600951), TESTI4039904(603899), TESTI4041984(604710), TESTI4046073(300118;309801), TESTI4047119(606202), TESTI4049786(142600;235700), TESTI4049899(601969), TESTI4051015(602974), TESTI4052775(165250), THYMU3002825(604346), THYMU3008105(194548), THYMU3012402(600686), THYMU3012983(194556), THYMU3013785(604722), THYMU3014173(143010), THYMU3014372(116945), THYMU3014620(605657), THYMU3016518(147100), THYMU3020221(147100), THYMU3020869(602550), THYMU3021586(184756), THYMU3021755(605024), THYMU3022434(601408), THYMU3023400(605180), THYMU3025118(155735), THYMU3026306(604346), THYMU3026532(600065;116920), THYMU3027671(604143), THYMU3032032(604463), THYMU3032798(601212), THYMU3033649(186780), THYMU3033759(600495), THYMU3037052(300346), THYMU3037772(147100), THYMU3038158(603033;603034), THYMU3038375(181590), THYMU3040172(186720), THYMU3040746(147110), THYMU3040816(605704), THYMU3040829(602649), THYMU3043200(605596), THYMU3047115(108730), THYMU3047760(604783), TKIDN2011160(605011), TLIVE2007736(604990), TLUNG2000654(148059), TLUNG2001445(146900), TLUNG2001600(147130), TRACH2024730(605611), TRACH3004424(603971), TRACH3005173(151410), TRACH3005191(605333), TRACH3005699(606154), TRACH3006379(148059), TRACH3006800(606154), TRACH3008042(166945), TRACH3009008(601112), TRACH3009701(603330), TRACH3010079(604850), TRACH3010167(601804), TRACH3010342(602943), TRACH3011282(601833), TRACH3011313(113520), TRACH3011503(602862), TRACH3012891(602397), TRACH3015951(604084), TRACH3016455(605286), TRACH3016805(106410), TRACH3018524(176882), TRACH3018907(146900), TRACH3019058(147170), TRACH3019621(191350), TRACH3020769(160776), TRACH3020930(147100), TRACH3021023(147170), TRACH3021373(606030), TRACH3021778(164035), TRACH3021883(603347), TRACH3023373(159350), TRACH3023960(603337), TRACH3024081(605867), TRACH3024671(605942), TRACH3025346(603377;212140), TRACH3026283(601517), TRACH3026299(147170), TRACH3028441(147170), TRACH3028597(604310), TRACH3028837(602127), TRACH3029670(147170), TRACH3030855(173321), TRACH3031660(176912), TRACH3031678(600523), TRACH3032570(602217), TRACH3034680(147170), TRACH3036750(604077), TRACH3037505(147170), TRACH3038399(604032;226980), TUTER2001433(146900), UTERU2024042(602214), UTERU2037423(604077), UTERU3001946(606154), UTERU3004635(103390), UTERU3011398(120240;158810;254090), UTERU3012293(194556), UTERU3012414(604394), UTERU3012999(605567), UTERU3015011(602505), UTERU3015299(601825;256000), UTERU3016308(602127), UTERU3017441(604276), UTERU3017626(603788), UTERU3019708(601430), UTERU3021850(605009), UTERU3022588(123811)

[0500] Additionally, hit data of the following 23 clones for Swiss-Prot, or nr or RefSeq corresponded to genes or proteins which had been deposited in the Online Mendelian Inheritance in Man (OMIM), which is the human gene and disease database (the OMIM Number is shown in the parenthesis after the Clone Name).

[0501] ADRGL2011190(602658), BRACE3002184(603899), BRACE3026993 (601282), BRACE3046450(603035), BRAWH3013197(604100), BRAWH3046240(602646), BRCAN2019772(603849), BRHIP3030064 (605762), BRTHA3024233(603088), CTONG2002832(604668), CTONG2003764(176977), PROST2010326(604110), TBAES2004105 (605008), TESTI2046536 (182890; 182882), TESTI4005158(601328), TESTI4005500(602277), THYMU3024602(600493), THYMU3046350 (603080), TRACH1000193(139139), TRACH3019290(603975), TRACH3021066(164870), UTERU2017492(602917), UTERU2036507 (605008)

[0502] The clones predicted to belong to the category of enzyme and/or metabolism-related protein are the following 164 clones.

[0503] ASTRO2008972, BRACE1000475, BRACE2013132, BRACE2016896, BRACE2035120, BRACE3017253, BRACE3021805, BRACE3028998, BRACE3031315, BRACE3036283, BRACE3041059, BRACE3042409, BRACE3044172, BRACE3046609, BRAMY3009491, BRAMY3011581, BRAWH2002333, BRAWH2014053, BRAWH3001638, BRAWH3004335, BRAWH3011331, BRAWH3017180, BRAWH3020928, BRAWH3023415, BRAWH3023421, BRAWH3024186, BRAWH3024506, BRAWH3029385, BRAWH3029806, BRAWH3032571, BRAWH3033513, BRAWH3034668, BRAWH3037428, BRAWH3037979, BRAWH3041556, BRAWH3042438, BRAWH3043295, BRAWH3044151, BRAWH3046424, BRAWH3047692, BRAWH3049544, BRCAN2003814, BRCAN2006051, BRCAN2015402, BRCAN2021325, BRHIP3001481, BRHIP3003126, BRHIP3005307, BRHIP3005673, BRHIP3007195, BRHIP3007223, BRHIP3011082, BRHIP3011269, BRHIP3021019, BRHIP3023922, BRHIP3032374, BRHIP3035006, BRHIP3037543, BRHIP3041587, BRSSN2004710, BRSTN2006466, BRSTN2011961, BRTHA2005448, BRTHA2010672, BRTHA2025869, BRTHA2026311, BRTHA2033155, BRTHA2035743, BRTHA3003736, BRTHA3010135, BRTHA3010469, BRTHA3023403, CHONS2002829, COLON2004351, CTONG2010330, CTONG2020582, CTONG3001605, FCBBF3001018, FCBBF3021191, FCBBF5000384, FEBRA2013570, FEBRA2026582, FEKID2002637, HSYRA2004550, KIDNE2010049, NETRP2000961, NT2RI2004818, NT2RP7016508, OCBBF2007039, OCBBF2024589, OCBBF2036019, OCBBF3004487, OCBBF3005330, OCBBF3009244, PLACE5000492, PLACE6001933, PLACE7001759, PLACE7003985, PLACE7004103, PLACE7004961, PLACE7006090, PLACE7006268, PLACE7007379, PLACE7011559, PLACE7012111, PLACE7014247, PLACE7016526, SKMUS2008585, SMINT2011509, SMINT2012179, SMINT2014721, SPLEN2007689, SYNOV4009139, TBAES2007428, TESTI2005112, TESTI2007490, TESTI2021654, TESTI2040377, TESTI2049062, TESTI4000621, TESTI4002799, TESTI4007671, TESTI4020596, TESTI4033177, TESTI4049786, TESTI4052219, THYMU3002825, THYMU3026306, THYMU3032798, THYMU3034671, THYMU3036953, THYMU3041428, THYMU3047115, THYMU3047891, TKIDN2011160, TRACH3005173, TRACH3005274, TRACH3009008, TRACH3011313, TRACH3011503, TRACH3012891, TRACH3015136, TRACH3016455, TRACH3018108, TRACH3018261, TRACH3018524, TRACH3019621, TRACH3021544, TRACH3022758, TRACH3023516, TRACH3024020, TRACH3024081, TRACH3027229, TRACH3027701, TRACH3032150, TRACH3038399, TSTOM2001571, TSTOM2002611, UTERU2024042, UTERU3010604, UTERU3010919, UTERU3015299, UTERU3019708, UTERU3021850

[0504] The following eight clones are also predicted to belong to the category of enzyme and/or metabolism-related protein.

ADRGL2011190, BRHIP3030064, CTONG2003764, PLACE7013963, TBAES2004105, THYMU3044175, TRACH3021066, UTERU2036507

[0505] The clones predicted to belong to the category of cell division and/or cell proliferation-related protein are the following 27 clones.

[0506] BLADE2000256, BRACE2002392, BRACE3030538, BRACE3036283, BRACE3044495, BRAMY3002886, BRAMY3009556, BRAWH2016209, BRAWH3004350, BRAWH3027574, BRCAN2019907, BRHIP3001076, BRHIP3029409, BRSTN2008475, BRTHA3011265, FEKID2002637, NT2RP8005546, OCBBF3001202, PLACE7011559, SPLEN2033996, TESTI2023903, TESTI4020819, TESTI4049899, THYMU3014372, THYMU3021586, UTERU3010919, UTERU3012999

[0507] The following two clones are also predicted to belong to the category of cell division and/or cell proliferation-related protein.

TBAES2007481, TESTI2046536

[0508] The clones predicted to belong to the category of cytoskeleton-related protein are the following 60 clones.

[0509] BRACE3004767, BRACE3013418, BRACE3051819, BRAMY3005184, BRAMY3015086, BRAMY4000915, BRAMY4001652, BRAWH3001783, BRAWH3015175, BRAWH3018548, BRAWH3019026, BRAWH3021580, BRAWH3021724, BRAWH3027440, BRAWH3027806, BRAWH3029385, BRAWH3040900, BRAWH3041492, BRCAN2020467, BRHIP3003063, BRHIP3003340, BRSTN2016918, BRTHA2020910, BRTHA2025869, BRTHA3014547, BRTHA3025073, CERVX2000968, JCMLC2000273, N1ESE2000698, NT2RI3005923, OCBBF2003518, OCBBF2004478, OCBBF3027969, PLACE7000266, PLACE7004961, SMINT2010753, SPLEN2034934, SYNOV4003174, TESTI2001915, TESTI2009739, TESTI2034913, TESTI4001517, TESTI4004917, TESTI4010902, TESTI4032913, TESTI4051424, THYMU3026532, TLUNG2000654, TRACH3006379, TRACH3016805, TRACH3020769, TRACH3022960, TRACH3026650, TRACH3028837, TRACH3029462, TRACH3032570, UTERU3000670, UTERU3001029, UTERU3015011, UTERU3016308

[0510] The following one clone is also predicted to belong to the category of cytoskeleton-related protein.

BRACE3026993

[0511] The clones predicted to belong to the category of nuclear protein and/or RNA synthesis-related protein are the following 40 clones.

[0512] ASTRO3000154, BRACE3014714, BRACE3036283, BRALZ2013621, BRAMY3009556, BRAMY3011501, BRAWH3011623, BRAWH3017180, BRAWH3022651, BRAWH3038252, BRAWH3040695, BRAWH3046424, BRHIP3004215, BRHIP3007223, BRHIP3020046, BRTHA3010530, CTONG2006235, FEBRA2028457, NT2RP7016508, OCBBF3001333, OCBBF3004487, PLACE7004103, PLACE7006268, TESTI2036285, TESTI2037657, TESTI4014932, TESTI4028182, TESTI4032128, TESTI4033177, TESTI4039575, THYMU3012402, THYMU3040829, THYMU3041428, TRACH3002752, TRACH3018108, TRACH3021778, UTERU3004635, UTERU3010409, UTERU3010919, UTERU3013302

[0513] The following one clone is also predicted to belong to the category of nuclear protein and/or RNA synthesis-related protein.

TESTI2046536

[0514] The clones predicted to belong to the category of protein synthesis and/or transport-related protein are the following 50 clones.

[0515] BRACE2016896, BRACE2023744, BRACE3020669, BRACE3030538, BRACE3041059, BRACE3043597, BRAWH2014053, BRAWH3001638, BRAWH3010602, BRAWH3024506, BRAWH3026349, BRAWH3034668, BRAWH3037979, BRAWH3041556, BRAWH3044151, BRAWH3047692, BRCAN2000923, BRCAN2002892, BRCAN2006051, BRCAN2021325, BRHIP3007223, BRSTN2012069, BRTHA2005448, BRTHA2010672, CHONS2002829, CTONG3001605, D90ST2004417, OCBBF2000831, OCBBF2007039, PLACE6019600, PLACE7007379, PLACE7012111, PLACE7016526, TESTI4018436, TESTI4020596, TESTI4032128, TESTI4036048, THYMU3012402, THYMU3033759, THYMU3036953, THYMU3046360, TKIDN2011160, TRACH3016455, TRACH3018519, TRACH3021544, TRACH3025316, TRACH3030855, TRACH3038399, UTERU3014647, UTERU3021850

[0516] The following two clones are also predicted to belong to the category of protein synthesis and/or transport-related protein.

TBAES2004105, UTERU2036507

[0517] The clones predicted to belong to the category of cellular defense-related protein are the following five clones.

BRACE2012947, BRHIP2029529, BRTHA3003736, THYMU3015571, TRACH3022296

[0518] The clones predicted to belong to the category of development and/or differentiation-related protein are the following 16 clones.

ASTRO3000154, BRACE3034964, BRAWH3004350, BRAWH3029538, BRAWH3038252, BRHIP3007424, BRTHA2024712, BRTHA3011265, FEKID2002493, NT2RP8003490, NT2RP8006452, OCBBF3025503, PLACE7002303, TESTI2026024, TRACH3028180, UTERU3016070

[0519] The following one clone is also predicted to belong to the category of development and/or differentiation-related protein.

BRCAN2019772

[0520] The clones predicted to belong to the category of DNA-binding and/or RNA-binding protein are the following 119 clones.

[0521] ASTRO2016114, BEAST2000981, BRACE2012947, BRACE2019348, BRACE3020669, BRACE3025719, BRACE3026844, BRACE3031743, BRACE3034183, BRACE3041162, BRACE3046152, BRALZ2013621, BRAMY2040915, BRAMY2046537, BRAMY3000692, BRAMY3007078, BRAMY3011501, BRAMY3011581, BRAMY3014027, BRAMY3018754, BRAMY4000962, BRAWH3000446, BRAWH3011577, BRAWH3011623, BRAWH3013009, BRAWH3013264, BRAWH3017477, BRAWH3028796, BRAWH3031342, BRAWH3032571, BRAWH3034775, BRAWH3035936, BRAWH3036247, BRAWH3036334, BRAWH3038827, BRCAN2020331, BRCOC2012386, BRHIP2027077, BRHIP3004725, BRHIP3028246, BRSSN2015497, BRTHA2024712, BRTHA3000456, BRTHA3003736, BRTHA3010212, BRTHA3014000, BRTHA3028339, CHONS2000797, CHONS2002829, CTONG2001932, CTONG2011801, D90ST2003106, FCBBF3020030, FCBBF5000384, FEBRA2028457, HCASM2008154, NETRP2004017, NT2RI3008179, NT2RI3009480, NT2RP7016508, NT2RP8003490, NTONG2003805, NTONG2008483, OCBBF2016928, OCBBF3004487, OCBBF3008392, OCBBF3020263, OCBBF3021361, OCBBF3022166, PLACE7002303, PLACE7004103, PLACE7005169, PLACE7009757, PROST2002078, PUAEN2000594, SMINT2011509, SPLEN2012571, SPLEN2028417, T1ESE2000609, T1ESE2000904, TESTI4002868, TESTI4003796, TESTI4003944, TESTI4005322, TESTI4005470, TESTI4005653, TESTI4032128, TESTI4039575, TESTI4039904, TESTI4052775, THYMU3008105, THYMU3012983, THYMU3014372, THYMU3020869, THYMU3021586, THYMU3026000, THYMU3030072, THYMU3033759, THYMU3037052, THYMU3040829, TLIVE2001616, TRACH3003458, TRACH3004424, TRACH3005191, TRACH3008508, TRACH3010079, TRACH3010167, TRACH3010342, TRACH3015951, TRACH3021778, TRACH3021883, TRACH3022109, TRACH3028180, TRACH3036750, UTERU2037423, UTERU3012293, UTERU3013302, UTERU3016070, UTERU3022588

[0522] The following eight clones are also predicted to belong to the category of DNA-binding and/or RNA-binding protein.

BRACE3002184, BRCAN2019772, CTONG2002832, TESTI2046536, TESTI4002988, TESTI4005500, TRACH1000193, TRACH3019290

[0523] The clones predicted to belong to the category of ATP binding and/or GTP-binding protein are the following 68 clones.

[0524] BRACE2013009, BRACE2016896, BRACE3002344, BRACE3014714, BRACE3017253, BRACE3036283, BRACE3051819, BRAMY3011501, BRAMY3018248, BRAWH2014053, BRAWH3015175, BRAWH3024506, BRAWH3029385, BRAWH3032571, BRAWH3037428, BRAWH3041556, BRAWH3047692, BRCAN2000923, BRCAN2002892, BRCAN2003269, BRCAN2006051, BRHIP3007195, BRHIP3027191, BRHIP3041587, BRSTN2012069, BRTHA2020910, BRTHA3003736, HSYRA2004550, KIDNE2010049, NETRP2003448, NT2RP7016508, OCBBF2003518, OCBBF3004487, PLACE6001933, PLACE6019600, PLACE7004961, PLACE7006498, PLACE7011559, PLACE7016526, PUAEN2006639, SMINT2011406, TESTI2009739, TESTI2040377, TESTI4004917, TESTI4013474, TESTI4021569, TESTI4028182, TESTI4049786, TESTI4052219, THYMU3014372, THYMU3032798, THYMU3041428, THYMU3047115, TRACH3005191, TRACH3009061, TRACH3009701, TRACH3012891, TRACH3019370, TRACH3020769, TRACH3022960, TRACH3023960, TRACH3024081, TRACH3038399, TSTOM2001571, UTERU2024042, UTERU3010919, UTERU3012414, UTERU3019708

[0525] The following two clones are also predicted to belong to the category of ATP binding and/or GTP-binding protein.

CTONG2003764, TRACH3021066

[0526] The 104 clones shown below are clones which were unassignable to any of the above-mentioned categories, but have been predicted to have some functions based on homology search using their full-length nucleotide sequences. Clone Name and Definition in the result of homology search, demarcated by a double slash mark (//), are shown below.

BLADE2002310//SH3-domain binding protein 1 [Homo sapiens]

BLADE2007799//Hepatocellular carcinoma-associated antigen 66.

BRACE2017359//Mus musculus suppressor of Ty 6 homolog (S. cerevisiae) (Supt6h)

BRACE2017872//nuclear receptor-binding SET-domain protein 1 [Mus musculus]

BRACE3009416//testis specific ankyrin-like protein 1 [Homo sapiens]

BRACE3016020//SBBI31 protein [Homo sapiens]

BRACE3019570//SNAP-25-interacting protein [Rattus norvegicus]

BRACE3022303//Pax transcription activation domain interacting protein [Mus musculus]

BRACE3022340//SNAP-25-interacting protein [Rattus norvegicus]

BRACE3026290//Homo sapiens lethal giant larvae homolog 2 [Homo sapiens]

BRACE3032631//F-box protein FBX13 [Mus musculus].

BRACE3040239//Deltex3 [Mus musculus]

BRACE3047482//tripartite motif-containing 9 [Homo sapiens]

BRACE3049714//NYD-TSPG protein [Homo sapiens]

BRACE3052410//IDN3 protein [Homo sapiens]

BRACE3052595//Nim2 [Rattus norvegicus]

BRALZ2014054//cenexin 2 [Rattus norvegicus].

BRAMY3007471//gene trap locus F3b; transcript expressed during hematopoiesis 2 [Mus musculus]

BRAMY3010321//MRIP-1 protein [Homo sapiens]

BRAMY3014613//SH3-domain binding protein 1 [Homo sapiens]

BRAMY4001863//Mus musculus enabled homolog (Drosophila) (Enah), mRNA

BRAWH2011796//S-100 protein, alpha chain.

BRAWH3008167//CUB and Sushi multiple domains 1 [Homo sapiens]

BRAWH3009961//Nim2 [Rattus norvegicus]

BRAWH3010726//phosphatidylinositol transfer protein, membrane-associated; Drosophila retinal degeneration B [Homo sapiens]

BRAWH3015017//axonemal dynein light chain p33.

BRAWH3024231//Tetratricopeptide repeat protein 4.

BRAWH3026938//semaF cytoplasmic domain associated protein 3; semaphorin cytoplasmic domain-associated protein 3A [Mus musculus]

BRAWH3027533//rap2 interacting protein x [Homo sapiens].

BRAWH3030910//Sec23-interacting protein p125 [Homo sapiens]

BRAWH3031710//serologically defined colon cancer antigen 33 [Homo sapiens]

BRAWH3033293//synaptopodin [Homo sapiens]

BRAWH3042568//ventral anterior homeobox containing gene 1 [Mus musculus]

BRAWH3043034//Mus musculus neuregulin 1 (Nrg1)

BRAWH3044122//Munc13-1 [Rattus norvegicus]

BRHIP2026346//lymphocyte specific formin related protein; formin-related gene in leukocytes [Mus musculus]

BRHIP2027563//host cell factor homolog [Homo sapiens]

BRHIP3002114//rTS beta protein [Homo sapiens]

BRHIP3003795//cytochrome P450 retinoid metabolizing protein [Homo sapiens]

BRHIP3006786//peptidylprolyl isomerase (cyclophilin)-like 2; cyclophilin-like protein CyP-60 [Homo sapiens]

BRHIP3017109//Socs-5 [Mus musculus]

BRHIP3019643//Homo sapiens gamma tubulin ring complex protein (76p gene) (76P), mRNA

BRHIP3032148//brain-enriched guanylate kinase-associated [Rattus norvegicus]

BRSTN2006638//synaptotagmin interacting protein 1 [Rattus norvegicus]

BRSTN2016892//BUP protein [Homo sapiens]

BRSTN2016992//DRR1 protein (TU3A protein).

BRSTN2017151//COP9 (constitutive photomorphogenic), subunit 7a (Arabidopsis); COP9 complex S7a [Mus musculus]

BRTHA2020642//DRR1 protein (TU3A protein).

BRTHA3018409//synaptotagmin-like 4; granuphilin-a; granuphilin-b; granuphilin

BRTHA3019183//Ca<2+>dependent activator protein for secretion; Ca2+-dependent activator protein for secretion [Mus musculus]

CHONS2001834//tumor endothelial marker 7 precursor [Homo sapiens]

CTONG2009570//rab11 binding protein [Bos taurus].

CTONG2012123//Mus musculus enabled homolog (Drosophila) (Enah), mRNA

CTONG2027591//Mus musculus pecanex homolog (Drosophila) (Pcnx), mRNA.

CTONG3003669//high-glucose-regulated protein 8 [Homo sapiens]

ERLTF2002178//Kelch-like protein X.

HHDPC2008185//jerky [Mus musculus]

NT2RI3001573//F-box protein FBL10 [Mus musculus].

NT2RI3007095//Mus musculus neuregulin 1 (Nrg1), mRNA.

NT2RP8001363//signal peptide, CUB domain, EGF-like 1 [Mus musculus]

NT2RP8001584//alpha integrin binding protein 63 [Homo sapiens]

NT2RP8001604//CUB and Sushi multiple domains 1 [Homo sapiens]

OCBBF3019269//Homo sapiens Dvl-binding protein IDAX (inhibition of the Dvl and Axin complex) (IDAX)

OCBBF3022827//putative Rab5 GDP/GTP exchange factor homologue [Homo sapiens]

OCBBF3023913//Mus musculus protein phosphatase 1, regulatory (inhibitor) subunit 1C (Ppp1r1c)

PLACE6003004//rTS beta protein [Homo sapiens]

PLACE6008315//similar to ALPHA-ACTININ, SARCOMERIC (F-ACTIN CROSS LINKING PROTEIN) (D. melanogaster) [Homo sapiens].

PLACE6010925//NY-REN-50 antigen [Homo sapiens]

PLACE7012127//AAA-ATPase TOB3 [Homo sapiens]

PROST2016566//erythroblast macrophage protein [Mus musculus]

SYNOV2017179//EBP50-PDZ interactor of 64 kD [Homo sapiens]

SYNOV3000345//upregulated by 1,25-dihydroxyvitamin D-3 [Homo sapiens]

TBAES2003917//NG28 protein [Mus musculus]

TESTI2001364//lactate dehydrogenase A-like [Homo sapiens]

TESTI2004601//NYD-TSPG protein [Homo sapiens]

TESTI2009497//GPI-anchored protein p137 (p137GPI).

TESTI4002774//oxysterol binding protein 2 [Mus musculus]

TESTI4003579//FH1/FH2 domains-containing protein (Formin homolog overexpressed in spleen) (FHOS).

TESTI4003703//retinoblastoma-associated protein RAP140 [Homo sapiens]

TESTI4013742//antigen identified by monoclonal antibody 2A8 [Mus musculus]

TESTI4014908//dedicator of cyto-kinesis 2 [Mus musculus]

TESTI4018506//tomosyn [Rattus norvegicus]

TESTI4020342//H326 [Homo sapiens]

TESTI4024294//WW domain binding protein 2 [Mus musculus]

TESTI4039451//B29 protein [Homo sapiens]

TESTI4041482//Rattus norvegicus SEC15 homolog (S. cerevisiae) (Sec15), mRNA

TESTI4043166//lymphocyte specific formin related protein; formin-related gene in leukocytes [Mus musculus]

TESTI4047328//otogelin [Mus musculus]

THYMU3011717//exocyst component protein 70 kDa homolog (S. cerevisiae)

THYMU3016822//erythroblast macrophage protein [Mus musculus]

THYMU3026479//secretory pathway component Sec31B-1 [Homo sapiens]

THYMU3028702//chromosome condensation-related SMC-associated protein 1; chromosome condensation-related SMC-associated protein 1; KIAA0159 gene product [Homo sapiens]

THYMU3029719//AAA-ATPase TOB3 [Homo sapiens]

THYMU3038347//tumor stroma and activated macrophage protein DLM-1 [Homo sapiens]

THYMU3038603//WW domain binding protein 2 [Mus musculus]

THYMU3040830//AD-012 protein [Homo sapiens]

THYMU3041603//gamma-tubulin complex protein 2 [Homo sapiens]

TKIDN2003396//Homo sapiens paternally expressed 10 (PEG10), mRNA

TRACH2011057//D-type cyclin-interacting protein 1; MAID protein [Homo sapiens]

TRACH3004412//clusterin-like 1 (retinal); unknown prepropeptide specific to rod photoreceptor [Homo sapiens]

TRACH3012106//erythrocyte protein band 4.1-like 3 [Mus musculus]

UTERU3009775//PAPIN [Rattus norvegicus]

UTERU3010892//adaptor-related protein complex 3, delta 1 subunit; adaptin, delta [Homo sapiens]

UTERU3017995//p47 [Homo sapiens]

[0527] So far no information suggesting the function of the remaining 879 clones has been provided by the homology search. The functions of these clones may be clarified when an updated database becomes available in future. Clone names are shown below.

[0528] ADRGL2010594, AHMSC1000138, BLADE2004849, BLADE2006043, BLADE2007735, BLADE2008809, BRACE2005991, BRACE2010336, BRACE2012625, BRACE2012833, BRACE2012936, BRACE2017844, BRACE2025452, BRACE2026404, BRACE2027312, BRACE2028956, BRACE2032584, BRACE2033128, BRACE2034434, BRACE2039362, BRACE2039607, BRACE2042541, BRACE2046976, BRACE2047232, BRACE2047975, BRACE3002541, BRACE3003866, BRACE3004046, BRACE3004371, BRACE3004887, BRACE3005870, BRACE3005903, BRACE3006553, BRACE3007649, BRACE3009075, BRACE3009265, BRACE3009539, BRACE3010702, BRACE3011447, BRACE3011774, BRACE3015090, BRACE3016167, BRACE3016580, BRACE3016788, BRACE3016810, BRACE3016862, BRACE3019611, BRACE3019817, BRACE3020356, BRACE3021430, BRACE3022312, BRACE3022847, BRACE3023604, BRACE3024537, BRACE3025627, BRACE3026161, BRACE3026947, BRACE3027256, BRACE3027931, BRACE3028895, BRACE3029005, BRACE3029205, BRACE3029447, BRACE3031161, BRACE3031184, BRACE3031185, BRACE3031843, BRACE3032538, BRACE3034389, BRACE3035168, BRACE3036156, BRACE3036271, BRACE3037612, BRACE3038012, BRACE3038030, BRACE3038760, BRACE3039288, BRACE3039454, BRACE3040012, BRACE3040504, BRACE3041827, BRACE3042210, BRACE3042594, BRACE3044247, BRACE3044377, BRACE3045078, BRACE3045145, BRACE3045424, BRACE3045708, BRACE3045981, BRACE3046294, BRACE3046837, BRACE3046855, BRACE3046966, BRACE3047018, BRACE3047801, BRACE3048483, BRACE3048615, BRACE3048677, BRACE3048756, BRACE3048904, BRACE3048905, BRACE3049186, BRACE3050270, BRACE3051627, BRACE3051722, BRACE3051879, BRALZ2003119, BRALZ2007661, BRALZ2008930, BRAMY2022320, BRAMY2023939, BRAMY2031516, BRAMY2033895, BRAMY2035801, BRAMY2036254, BRAMY2036266, BRAMY2039630, BRAMY2041347, BRAMY2046489, BRAMY3001409, BRAMY3002329, BRAMY3002508, BRAMY3004364, BRAMY3005656, BRAMY3005912, BRAMY3008436, BRAMY3009158, BRAMY3010603, BRAMY3011865, BRAMY3014555, BRAMY3017827, BRAMY3017965, BRAMY3018121, BRAMY3018340, BRAMY4001234, BRAMY4001913, BRAMY4002575, BRAMY4002628, BRAWH2004078, BRAWH2010619, BRAWH2012054, BRAWH2013955, BRAWH2016223, BRAWH2016514, BRAWH2016562, BRAWH2016785, BRAWH3000884, BRAWH3003244, BRAWH3003975, BRAWH3005037, BRAWH3005896, BRAWH3008559, BRAWH3010833, BRAWH3011101, BRAWH3011402, BRAWH3011685, BRAWH3011929, BRAWH3013508, BRAWH3014639, BRAWH3015610, BRAWH3015825, BRAWH3016715, BRAWH3017260, BRAWH3017980, BRAWH3018369, BRAWH3019594, BRAWH3020318, BRAWH3021574, BRAWH3021643, BRAWH3022431, BRAWH3022459, BRAWH3022542, BRAWH3022719, BRAWH3022900, BRAWH3023168, BRAWH3024989, BRAWH3025157, BRAWH3027420, BRAWH3027607, BRAWH3027616, BRAWH3027675, BRAWH3028202, BRAWH3028461, BRAWH3029313, BRAWH3030772, BRAWH3031054, BRAWH3033117, BRAWH3033448, BRAWH3034097, BRAWH3034743, BRAWH3035403, BRAWH3035904, BRAWH3036077, BRAWH3036561, BRAWH3037265, BRAWH3037394, BRAWH3037533, BRAWH3038230, BRAWH3039258, BRAWH3039623, BRAWH3040297, BRAWH3041928, BRAWH3042787, BRAWH3042820, BRAWH3043944, BRAWH3044487, BRAWH3044585, BRAWH3044985, BRAWH3045118, BRAWH3045229, BRAWH3045625, BRAWH3046209, BRAWH3046802, BRAWH3046959, BRAWH3047539, BRAWH3047946, BRAWH3048548, BRAWH3049726, BRAWH3049858, BRCAN2007525, BRCAN2008701, BRCAN2009168, BRCAN2010547, BRCAN2010581, BRCAN2015757, BRCAN2018667, BRCAN2019953, BRCAN2020880, BRCAN2021452, BRCAN2021718, BRCAN2025093, BRCAN2027593, BRCAN2028702, BRCOC2001355, BRCOC2002777, BRCOC2006942, BRCOC2010115, BRHIP2006819, BRHIP2009177, BRHIP2011199, BRHIP2013958, BRHIP2015153, BRHIP2016125, BRHIP2017714, BRHIP2024941, BRHIP2029643, BRHIP2029663, BRHIP3000626, BRHIP3001141, BRHIP3001338, BRHIP3001360, BRHIP3001573, BRHIP3002141, BRHIP3002363, BRHIP3002691, BRHIP3002920, BRHIP3002931, BRHIP3003688, BRHIP3003845, BRHIP3003961, BRHIP3004710, BRHIP3004786, BRHIP3005142, BRHIP3005231, BRHIP3006279, BRHIP3007172, BRHIP3007291, BRHIP3007409, BRHIP3008082, BRHIP3008714, BRHIP3009672, BRHIP3009753, BRHIP3010916, BRHIP3012289, BRHIP3012736, BRHIP3013588, BRHIP3013698, BRHIP3014675, BRHIP3015854, BRHIP3016421, BRHIP3017256, BRHIP3018784, BRHIP3019824, BRHIP3019880, BRHIP3020155, BRHIP3021499, BRHIP3021987, BRHIP3022656, BRHIP3024703, BRHIP3024820, BRHIP3026231, BRHIP3026651, BRHIP3027947, BRHIP3028570, BRHIP3029670, BRHIP3029866, BRHIP3031890, BRHIP3032311, BRHIP3033481, BRHIP3033734, BRHIP3033806, BRHIP3036371, BRHIP3038030, BRHIP3038735, BRHIP3039592, BRHIP3040878, BRHIP3042817, BRHIP3043012, BRSSN2004303, BRSSN2008464, BRSSN2011843, BRSSN2012157, BRSSN2012198, BRSSN2013696, BRSTN2000312, BRSTN2009247, BRSTN2010416, BRSTN2015699, BRSTN2015788, BRSTN2017104, BRSTN2017184, BRSTN2018712, BRTHA2001304, BRTHA2001953, BRTHA2002091, BRTHA2006720, BRTHA2008502, BRTHA2008598, BRTHA2020695, BRTHA2022074, BRTHA2023402, BRTHA2024177, BRTHA2024354, BRTHA2027227, BRTHA2027229, BRTHA2028297, BRTHA2029969, BRTHA2030213, BRTHA2031517, BRTHA2032763, BRTHA2033122, BRTHA2034281, BRTHA2034576, BRTHA2037247, BRTHA2038279, BRTHA2038345, BRTHA2038353, BRTHA3002411, BRTHA3003417, BRTHA3005988, BRTHA3007469, BRTHA3007662, BRTHA3009858, BRTHA3011229, BRTHA3011306, BRTHA3011361, BRTHA3011510, BRTHA3011892, BRTHA3013860, BRTHA3014105, BRTHA3014507, BRTHA3014854, BRTHA3014920, BRTHA3017791, BRTHA3020369, BRTHA3020771, BRTHA3021569, BRTHA3021786, BRTHA3022641, BRTHA3023590, BRTHA3023929, BRTHA3024600, BRTHA3026180, BRTHA3026556, BRTHA3027171, BRTHA3027318, BRTHA3027638, BRTHA3027879, CERVX2000812, COLON2001866, CTONG2003517, CTONG2009033, CTONG2010633, CTONG2014959, CTONG2026987, CTONG2027783, CTONG2027959, CTONG3002518, D90ST2003989, DFNES2001829, DFNES2011221, ERLTF2001452, ERLTF2001835, ERLTF2002369, FCBBF3002188, FCBBF3005160, FEBRA2000805, FEBRA2002260, FEBRA2012625, FEBRA2013069, FEBRA2017736, FEBRA2017811, FEBRA2028222, FEHRT2001482, FEKID2001001, FEKID2001201, FELNG2001613, HCASM2007773, HEART2002531, HLUNG2012600, HSYRA2007338, KIDNE2014496, KIDNE2016464, KIDNE2018268, LIVER2008465, LYMPB2001387, LYMPB2002344, MESAN2007032, MESAN2009156, MESAN2016304, MESAN2017133, MESTC2000170, NETRP2000439, NETRP2002082, NETRP2003103, NETRP2003268, NETRP2003539, NETRP2005972, NETRP2006468, NETRP2007945, NETRP2008488, NOVAR2000783, NT2NE2011107, NT2NE2016041, NT2RI2009233, NT2RI2010795, NT2RI2012542, NT2RI2015533, NT2RI2023671, NT2RI2028537, NT2RP7003439, NT2RP7007387, NT2RP7014178, NT2RP7014778, NT2RP7017139, NT2RP7020343, NT2RP8000633, NT2RP8001407, NT2RP8003657, NT2RP8006521, NT2RP8007416, NT2RP8007503, NT2RP8007920, NT2RP8009119, NT2RP8009248, NTONG2002278, NTONG2004829, NTONG2009468, OCBBF2014745, OCBBF2019761, OCBBF2024779, OCBBF2025631, OCBBF3000743, OCBBF3000830, OCBBF3001076, OCBBF3001616, OCBBF3004908, OCBBF3005843, OCBBF3007078, OCBBF3008835, OCBBF3020414, OCBBF3021086, OCBBF3021166, OCBBF3021515, OCBBF3023543, OCBBF3025127, OCBBF3025131, OCBBF3025901, OCBBF3026088, OCBBF3026361, PEBLM2001803, PEBLM2006298, PERIC2003349, PLACE5000527, PLACE6019542, PLACE7003684, PLACE7005671, PLACE7005840, PLACE7006240, PLACE7006540, PLACE7007973, PLACE7008766, PLACE7010567, PLACE7013060, PLACE7014396, PLACE7015238, PLACE7015647, PLACE7016214, PLACE7018304, PLACE7018349, PLACE7018452, PLACE7018479, PLACE7018512, PROST2007444, PROST2017578, PROST2017729, PROST2017749, PROST2017910, RECTM2001519, SKMUS2009479, SKMUS2009557, SKNMC2003639, SMINT2009292, SMINT2009895, SMINT2012040, SMINT2014166, SMINT2017964, SMINT2019105, SPLEN2001227, SPLEN2017999, SPLEN2019092, SPLEN2019480, SPLEN2021231, SPLEN2021991, SPLEN2022785, SPLEN2022920, SPLEN2024571, SPLEN2027852, SPLEN2028593, SPLEN2032677, SPLEN2034601, SPLEN2036608, SPLEN2037077, STOMA2003894, SYNOV4000598, SYNOV4004210, SYNOV4009575, TBAES2007548, TBAES2007862, TESOP2002005, TESOP2003308, TESOP2004110, TESTI1000459, TESTI2004452, TESTI2004971, TESTI2005153, TESTI2005564, TESTI2006543, TESTI2008636, TESTI2011020, TESTI2011033, TESTI2018687, TESTI2018867, TESTI2021112, TESTI2023053, TESTI2026284, TESTI2030519, TESTI2033905, TESTI2035962, TESTI2037209, TESTI2037572, TESTI2038733, TESTI2039342, TESTI2039732, TESTI2039738, TESTI2040372, TESTI2041362, TESTI2041976, TESTI2051742, TESTI2052110, TESTI2052202, TESTI2052799, TESTI4000370, TESTI4000534, TESTI4000600, TESTI4000703, TESTI4000957, TESTI4001348, TESTI4001569, TESTI4002003, TESTI4002141, TESTI4002195, TESTI4002520, TESTI4003179, TESTI4003279, TESTI4003319, TESTI4003404, TESTI4003565, TESTI4003574, TESTI4003733, TESTI4004031, TESTI4004210, TESTI4004695, TESTI4005013, TESTI4006441, TESTI4006539, TESTI4007565, TESTI4008086, TESTI4008305, TESTI4009501, TESTI4010979, TESTI4011616, TESTI4011744, TESTI4011926, TESTI4012258, TESTI4012382, TESTI4012623, TESTI4012956, TESTI4012960, TESTI4013960, TESTI4013962, TESTI4014262, TESTI4014891, TESTI4015129, TESTI4015339, TESTI4016848, TESTI4017229, TESTI4021129, TESTI4021821, TESTI4023172, TESTI4024240, TESTI4024245, TESTI4025062, TESTI4025401, TESTI4025908, TESTI4027139, TESTI4027262, TESTI4027660, TESTI4029023, TESTI4029297, TESTI4029651, TESTI4029676, TESTI4029731, TESTI4029743, TESTI4030319, TESTI4030673, TESTI4030864, TESTI4031066, TESTI4032270, TESTI4032375, TESTI4032856, TESTI4034633, TESTI4035770, TESTI4035898, TESTI4037228, TESTI4038758, TESTI4039744, TESTI4040197, TESTI4040598, TESTI4040804, TESTI4041832, TESTI4042420, TESTI4042846, TESTI4043223, TESTI4043378, TESTI4044076, TESTI4044291, TESTI4044770, TESTI4045330, TESTI4045470, TESTI4046090, TESTI4046245, TESTI4046328, TESTI4046873, TESTI4046962, TESTI4047305, TESTI4047437, TESTI4047569, TESTI4047746, TESTI4047808, TESTI4048232, TESTI4048619, TESTI4049110, TESTI4049552, TESTI4049562, TESTI4049677, TESTI4049863, TESTI4050293, TESTI4050954, TESTI4051054, TESTI4051388, TESTI4051504, TESTI4051747, TESTI4051952, TESTI4052132, TESTI4052217, THYMU2008207, THYMU2038199, THYMU3000390, THYMU3000776, THYMU3001082, THYMU3001593, THYMU3001776, THYMU3002887, THYMU3003958, THYMU3004628, THYMU3004632, THYMU3007308, THYMU3007559, THYMU3009643, THYMU3011012, THYMU3011244, THYMU3011534, THYMU3011556, THYMU3012907, THYMU3013114, THYMU3013241, THYMU3013470, THYMU3013897, THYMU3014038, THYMU3014701, THYMU3015042, THYMU3017761, THYMU3018896, THYMU3019095, THYMU3019476, THYMU3019916, THYMU3020970, THYMU3021900, THYMU3022982, THYMU3023394, THYMU3023797, THYMU3024164, THYMU3024339, THYMU3025772, THYMU3026350, THYMU3026783, THYMU3027251, THYMU3027655, THYMU3028075, THYMU3029188, THYMU3029318, THYMU3029421, THYMU3029774, THYMU3030706, THYMU3030752, THYMU3031146, THYMU3031402, THYMU3031612, THYMU3031868, THYMU3032867, THYMU3033626, THYMU3033630, THYMU3034453, THYMU3034853, THYMU3034867, THYMU3034983, THYMU3036200, THYMU3037617, THYMU3037827, THYMU3037856, THYMU3037867, THYMU3037909, THYMU3037980, THYMU3038214, THYMU3038266, THYMU3038687, THYMU3038759, THYMU3038879, THYMU3038970, THYMU3039807, THYMU3039846, THYMU3040168, THYMU3040725, THYMU3041354, THYMU3041386, THYMU3041573, THYMU3041736, THYMU3042075, THYMU3042758, THYMU3043327, THYMU3043482, THYMU3043883, THYMU3043993, THYMU3044075, THYMU3044441, THYMU3044445, THYMU3045673, THYMU3045692, THYMU3045704, THYMU3046140, THYMU3047144, THYMU3047513, TKIDN2000319, TKIDN2010602, TKIDN2011051, TLIVE2000142, TLUNG2001810, TLUNG2002055, TRACH2013585, TRACH2019080, TRACH2022113, TRACH3002188, TRACH3002293, TRACH3002890, TRACH3004113, TRACH3004288, TRACH3004596, TRACH3006397, TRACH3006717, TRACH3007689, TRACH3007995, TRACH3008632, TRACH3011454, TRACH3011538, TRACH3012460, TRACH3012718, TRACH3012864, TRACH3013043, TRACH3013072, TRACH3013684, TRACH3014183, TRACH3015354, TRACH3015467, TRACH3016264, TRACH3018783, TRACH3020137, TRACH3020563, TRACH3020605, TRACH3021335, TRACH3021834, TRACH3022198, TRACH3022732, TRACH3023242, TRACH3023752, TRACH3024342, TRACH3024423, TRACH3024428, TRACH3024512, TRACH3024823, TRACH3025520, TRACH3026303, TRACH3026676, TRACH3026949, TRACH3028164, TRACH3028855, TRACH3029139, TRACH3029329, TRACH3029520, TRACH3029592, TRACH3032044, TRACH3033535, TRACH3035451, TRACH3036004, TRACH3036792, TRACH3036897, TRACH3036932, TSTOM2000235, TUTER1000014, UTERU2000300, UTERU2014998, UTERU2016464, UTERU2016669, UTERU2020226, UTERU2022955, UTERU2023941, UTERU2027369, UTERU2028377, UTERU2029660, UTERU2035926, UTERU3001394, UTERU3005264, UTERU3006538, UTERU3006720, UTERU3007108, UTERU3011558, UTERU3011579, UTERU3012476, UTERU3012599, UTERU3013167, UTERU3014274, UTERU3014906, UTERU3015844, UTERU3016274, UTERU3018172, UTERU3018255, UTERU3020090, UTERU3023141

[0529] Likewise, so far no information suggesting the function of six clones shown below has been provided by the homology search. The functions of these clones may be clarified when an updated database becomes available in future. Clone names are shown below.

BRAMY3008096, BRAMY3016953, BRHIP3038037, BRTHA3004432, TESTI4052089, UTERU3020583

### EXAMPLE 7

### Functional Categorization Based on a Functional Domain Search for Deduced Amino Acid Sequences

[0530] Domains and motifs are minimal functional structures of polypeptides. The structure of a polypeptide is constituted by a collection of such minimal structures, and thus the overall function of a polypeptide is ensured by the resulting structure. Thus, the overall function of a polypeptide can be predicted relatively accurately using data obtained by analysis of domain and motif structures. Furthermore, classifying these results into functional categories in a database allows clones comprising specific functions to be easily selected. Thus, such databases are highly useful in the functional analysis of each clone.

[0531] Pfam was used to undertake a domain search for the amino acid sequences deduced from the full-length nucleotide sequences (see Example 5). Based on these results, the proteins encoded by clones 664 and 29 were categorized and their functions predicted. This was performed by referring to domain and motif names, accession numbers for hit data, and detailed descriptions in Pfam (http://www.sanger.ac.uk/Software/Pfam/index.shtml) as well as functional categorizations in PROSITE (http://www.expasy.ch/cgi-bin/prosite-list.pl).

[0532] A clone predicted to belong to the category of secretory and/or membrane protein means a clone having domains and motifs, for example, seven-transmembrane receptor, pancreatic hormone peptides, ion transport protein, or fibroblast growth factor, which suggest receptor, ion channel, hormone, or growth factor.

[0533] A clone predicted to belong to the category of glycoprotein-related protein means a clone having domains and motifs, for example, immunoglobulin domain or glycosyl transferases group 1, which suggest involvement in glycobiology, such as glycoprotein or glycosyltransferase.

[0534] A clone predicted to belong to the category of signal transduction-related protein means a clone having domains and motifs, for example, eukaryotic protein kinase domain, protein phosphatase 2C, or Ras family, which suggest protein kinase, dephosphoenzyme, SH2 domain, or small G protein.

[0535] A clone predicted to belong to the category of transcription-related protein means a clone having domains and motifs, for example, bZIP transcription factor, Zinc finger, or C2H2 type, which suggest transcription factor or transcription-controlling protein.

[0536] A clone predicted to belong to the category of disease-related protein means a clone having domains and motifs, for example, Wilm's tumor protein or von Hippel-Lindau disease tumor suppressor protein, which suggest proteins with disease-specific expression or that promote or suppress expression, depending on the disease.

[0537] A clone predicted to belong to the category of enzyme and/or metabolism-related protein means a clone having domains and motifs, for example, aldehyde dehydrogenase family, chitin synthase, or glucose-6-phosphate dehydrogenase, which suggest transferase, synthase, or hydrolase.

[0538] A clone predicted to belong to the category of cell division- and/or cell proliferation-related protein means a clone having domains and motifs, for example, cyclin or cell division protein, which suggest cyclin or cell proliferation-controlling protein.

[0539] A clone predicted to belong to the category of cytoskeleton-related protein means a clone having domains and motifs, for example, actin, fibronectin type I domain, or kinesin motor domain, which suggest actin, kinesin, or fibronectin.

[0540] A clone predicted to belong to the category of nuclear protein and/or RNA synthesis-related protein means a clone having domains and motifs, for example, hepatitis C virus RNA dependent. RNA polymerase or DEAD/DEAH box helicase, which suggest splicing factor, RNA synthase, or helicase.

[0541] A clone predicted to belong to the category of protein synthesis and/or transport-related protein means a clone having domains and motifs, for example, translation initiation factor SUI1, ubiquitin family, or ribosomal protein L16, which suggest translation-related protein, ubiquitin-related protein, or ribosomal protein.

[0542] A clone predicted to belong to the category of cellular defense-related protein means a clone having domains and motifs, for example, HSP90 protein or DNA mismatch repair protein, which suggest chaperonin or DNA repair protein.

[0543] A clone predicted to belong to the category of development- and/or differentiation-related proteins means a clone having domains and motifs, for example, floricaula/leafy protein, which suggest organogenesis-related protein.

[0544] A clone predicted to belong to the category of DNA- and/or RNA-binding protein means a clone having domains and motifs, for example, transcription factor WhiB, B-box zinc finger, or tRNA synthetases class I (C), which suggest DNA/RNA-relating enzyme group including transcription factor and DNA ligase or Zinc-finger related protein.

[0545] A clone predicted to belong to the category of ATP- and/or GTP-binding protein means a clone having domains and motifs, for example, E1-E2 ATPase or Ras family, which suggest ATP/GTP-related enzyme group including ATPase or G protein.

[0546] During this functional categorization, if a clone met every criterion of multiple categories as described above, it was grouped into multiple categories. However, the function of a polypeptide is not limited to these functional categories.

[0547] The clones predicted to belong to the category of secretory protein and/or membrane protein are the following 92 clones.

[0548] 3NB692004045, BRACE3002264, BRACE3009392, BRACE3013418, BRACE3024879, BRACE3032385, BRACE3039378, BRACE3042432, BRACE3050504, BRACE3051621, BRAMY2046537, BRAMY3004126, BRAWH2000256, BRAWH2011812, BRAWH3023156, BRAWH3025157, BRAWH3027880, BRAWH3036270, BRAWH3037265, BRAWH3042772, BRCAN2003269, BRCAN2022126, BRCOC2006164, BRHIP3002000, BRHIP3005944, BRHIP3008320, BRHIP3011567, BRHIP3014675, BRHIP3016032, BRHIP3017558, BRHIP3025795, BRHIP3033557, BRHIP3039509, BRSTN2010089, BRTHA2031917, BRTHA3011194, BRTHA3012265, BRTHA3014547, COLON2005735, JCMLC2000273, KIDNE2004531, LYMPB2002236, NT2RP7019682, NT2RP8001363, NT2RP8003787, OCBBF2003518, OCBBF2004478, OCBBF2009536, OCBBF2018618, OCBBF3004487, OCBBF3025475, OCBBF3028001, PEBLM2005615, PLACE6010936, PLACE7004103, PLACE7011559, PLACE7018304, TESTI2018335, TESTI2022323, TESTI2024267, TESTI2036822, TESTI4003602, TESTI4004539, TESTI4005399, TESTI4008305, TESTI4010544, TESTI4014415, TESTI4021569, TESTI4023096, TESTI4026080, TESTI4040559, TESTI4049899, THYMU3015647, THYMU3021404, THYMU3023400, THYMU3026532, THYMU3030752, THYMU3040172, THYMU3044075, TRACH3003357, TRACH3004113, TRACH3004747, TRACH3005699, TRACH3006800, TRACH3009061, TRACH3019370, TRACH3023373, TRACH3031678, TRACH3032150, UTERU3001946, UTERU3016273, UTERU3017626

[0549] The following ten clones are also predicted to belong to the category of secretory protein and/or membrane protein.

BRAWH3013197, BRAWH3028645, BRAWH3046240, BRCAN2019772, PROST2010326, TESTI2043585, TESTI4005158, THYMU3024602, THYMU3046350, TRACH1000193

[0550] The clones predicted to belong to the category of glycoprotein-related protein are the following 81 clones.

[0551] 3NB692004045, ADIPS2000069, BRACE2017397, BRACE3013874, BRACE3017253, BRACE3039358, BRAMY2040915, BRAMY3015549, BRAWH3009961, BRAWH3023415, BRAWH3049544, BRHIP3017558, BRHIP3025795, BRHIP3036371, BRHIP3036715, BRHIP3038735, BRTHA2019726, BRTHA2020400, BRTHA2020721, BRTHA3017791, CERVX2000968, FELNG2000720, JCMLC2000273, KIDNE2004531, NT2RP8008057, OCBBF2000831, OCBBF2004478, OCBBF2030927, PEBLM2005615, PLACE7006090, SPLEN2025012, STOMA2004663, TESTI2021654, TESTI2052670, TESTI4008305, TESTI4022158, TESTI4031173, TESTI4032128, TESTI4037949, TESTI4051424, THYMU3002825, THYMU3014173, THYMU3016518, THYMU3020221, THYMU3025118, THYMU3026306, THYMU3026532, THYMU3037772, THYMU3040746, TLUNG2001445, TLUNG2001600, TRACH3003357, TRACH3004113, TRACH3004412, TRACH3005274, TRACH3005699, TRACH3006800, TRACH3011082, TRACH3011184, TRACH3012659, TRACH3015354, TRACH3018261, TRACH3018907, TRACH3019058, TRACH3019621, TRACH3019807, TRACH3020930, TRACH3021023, TRACH3024512, TRACH3026299, TRACH3028441, TRACH3029670, TRACH3031316, TRACH3034680, TRACH3036103, TRACH3037505, TUTER2001433, UTERU3001946, UTERU3010409, UTERU3011398, UTERU3015647

[0552] The following two clones are also predicted to belong to the category of glycoprotein-related protein.

BRAWH3028645, TESTI4005158

[0553] The clones predicted to belong to the category of signal transduction-related protein are the following 125 clones.

[0554] BLADE2002310, BLADE2008809, BRACE2047975, BRACE3002344, BRACE3003866, BRACE3004767, BRACE3013418, BRACE3015898, BRACE3017253, BRACE3042046, BRACE3044172, BRACE3045424, BRACE3046491, BRACE3051621, BRACE3052321, BRACE3052595, BRAMY3005184, BRAMY3009491, BRAMY3010321, BRAMY3014613, BRAMY3015547, BRAMY3017920, BRAWH2012866, BRAWH3009961, BRAWH3017180, BRAWH3018063, BRAWH3019026, BRAWH3022431, BRAWH3024186, BRAWH3026349, BRAWH3027574, BRAWH3027806, BRAWH3029385, BRAWH3031342, BRAWH3032340, BRAWH3035914, BRAWH3037428, BRAWH3044122, BRAWH3047692, BRCAN2000923, BRCAN2002892, BRCOC2001355, BRHIP3003306, BRHIP3006294, BRHIP3006786, BRHIP3011460, BRHIP3017109, BRHIP3021019, BRHIP3028570, BRHIP3037543, BRHIP3041587, BRTHA2026290, BRTHA2027250, BRTHA3014547, BRTHA3020771, BRTHA3021708, BRTHA3023403, BRTHA3026916, CTONG2009570, ERLTF2002369, FEKID2001001, FEKID2002637, FELNG2001953, KIDNE2010049, LYMPB2002344, N1ESE2000698, NETRP2003448, NT2RI2004818, NTONG2008483, OCBBF3006986, OCBBF3021086, OCBBF3021502, OCBBF3023175, PLACE5000492, PLACE6000055, PLACE6019600, PLACE7009936, PLACE7014247, PLACE7016526, PUAEN2006639, SKMUS2008585, SKMUS2009557, SMINT2017964, SPLEN2007689, SYNOV2017179, SYNOV4009575, TESTI4002774, TESTI4004695, TESTI4010902, TESTI4012960, TESTI4013474, TESTI4020342, TESTI4020596, TESTI4021197, TESTI4022158, TESTI4028042, TESTI4029731, TESTI4033177, TESTI4036048, TESTI4046073, TESTI4047808, TESTI4049786, TESTI4051865, THYMU3013785, THYMU3025683, THYMU3032798, TRACH2024730, TRACH3003037, TRACH3003357, TRACH3005173, TRACH3011538, TRACH3018519, TRACH3020605, TRACH3024020, TRACH3030176, TRACH3031660, TRACH3036750, TRACH3038399, TSTOM2001571, UTERU2024042, UTERU3001029, UTERU3006720, UTERU3010919, UTERU3021231, UTERU3022168

[0555] The following three clones are also predicted to belong to the category of signal transduction-related protein.

BRAMY3008096, TESTI4052089, TRACH3021066

[0556] The clones predicted to belong to the category of transcription-related protein are the following 141 clones.

[0557] ASTRO2016114, BEAST2000981, BRACE2019348, BRACE3025719, BRACE3026844, BRACE3026947, BRACE3029021, BRACE3034183, BRACE3040239, BRACE3041162, BRACE3047482, BRAMY2041347, BRAMY3000692, BRAMY3007078, BRAMY3011581, BRAMY3014027, BRAMY4002575, BRAWH2000256, BRAWH2014053, BRAWH2016209, BRAWH3000446, BRAWH3005886, BRAWH3009961, BRAWH3013009, BRAWH3013264, BRAWH3015175, BRAWH3015610, BRAWH3017477, BRAWH3021580, BRAWH3022651, BRAWH3027533, BRAWH3027880, BRAWH3028796, BRAWH3031342, BRAWH3031710, BRAWH3032571, BRAWH3035936, BRAWH3036247, BRAWH3036334, BRAWH3042787, BRAWH3044122, BRAWH3046424, BRCAN2021452, BRCOC2012386, BRHIP2027077, BRHIP2029663, BRHIP3005037, BRHIP3007609, BRHIP3017256, BRHIP3019824, BRHIP3027651, BRHIP3028246, BRHIP3039592, BRSSN2011843, BRSTN2012069, BRTHA3000456, BRTHA3003225, BRTHA3010212, BRTHA3014000, BRTHA3028339, CHONS2000797, CTONG2006235, CTONG2011801, FCBBF3020030, FEBRA2002260, HCASM2008154, KIDNE2018268, NETRP2003103, NETRP2004017, NT2RI3009480, NTONG2003805, NTONG2008483, OCBBF2014745, OCBBF2016928, OCBBF3001333, OCBBF3008392, OCBBF3019269, OCBBF3020263, OCBBF3022827, OCBBF3025503, OCBBF3026361, PLACE7005169, PLACE7007973, PLACE7009757, PLACE7018512, SMINT2014721, SPLEN2012571, SPLEN2036608, T1ESE2000904, TESTI2036822, TESTI2040377, TESTI4000370, TESTI4000621, TESTI4001679, TESTI4002799, TESTI4003796, TESTI4003944, TESTI4005322, TESTI4005470, TESTI4024494, TESTI4028182, TESTI4032913, TESTI4039904, TESTI4051054, TESTI4052775, THYMU2008207, THYMU2038199, THYMU3008105, THYMU3012983, THYMU3014372, THYMU3021586, THYMU3022434, THYMU3026000, THYMU3030072, THYMU3034671, THYMU3037617, THYMU3043200, THYMU3045704, TKIDN2003396, TLIVE2001616, TLUNG2000654, TRACH3002752, TRACH3003037, TRACH3003458, TRACH3004113, TRACH3004412, TRACH3004424, TRACH3005274, TRACH3010079, TRACH3010167, TRACH3015951, TRACH3022109, TRACH3026303, TRACH3028180, TRACH3036750, UTERU2037423, UTERU3012293, UTERU3015011, UTERU3016070, UTERU3018172, UTERU3022588

[0558] The following eight clones are also predicted to belong to the category of transcription-related protein.

BRACE3002184, BRCAN2019772, CTONG2002832, TESTI2046536, TESTI4002988, TESTI4005500, TRACH1000193, TRACH3019290

[0559] The clones predicted to belong to the category of disease-related protein are the following four clones.

BRAWH3041928, BRHIP3000859, BRTHA3018409, THYMU3025642

[0560] The clones predicted to belong to the category of enzyme and/or metabolism-related protein are the following 264 clones.

[0561] BRACE1000475, BRACE2003628, BRACE2012528, BRACE2013132, BRACE2016896, BRACE2035120, BRACE2042541, BRACE2047975, BRACE3002344, BRACE3009392, BRACE3013418, BRACE3015898, BRACE3017253, BRACE3019941, BRACE3024444, BRACE3031315, BRACE3031372, BRACE3032537, BRACE3033525, BRACE3034183, BRACE3034964, BRACE3039288, BRACE3039454, BRACE3041059, BRACE3042409, BRACE3044172, BRACE3046491, BRACE3049714, BRACE3050270, BRACE3051819, BRACE3052410, BRACE3052595, BRAMY3007078, BRAMY3009491, BRAMY3011581, BRAMY3014613, BRAMY4000915, BRAWH2000256, BRAWH2002333, BRAWH2012866, BRAWH2014053, BRAWH2016785, BRAWH3009961, BRAWH3010657, BRAWH3013264, BRAWH3015175, BRAWH3017180, BRAWH3017259, BRAWH3019026, BRAWH3021724, BRAWH3022431, BRAWH3023415, BRAWH3024186, BRAWH3028796, BRAWH3029385, BRAWH3029806, BRAWH3032571, BRAWH3033513, BRAWH3034668, BRAWH3034743, BRAWH3037979, BRAWH3041556, BRAWH3043295, BRAWH3044122, BRAWH3044985, BRAWH3046424, BRAWH3047692, BRAWH3048724, BRAWH3049544, BRCAN2003814, BRCAN2006051, BRCAN2015402, BRCAN2021325, BRCOC2001355, BRCOC2006164, BRHIP2029663, BRHIP3001481, BRHIP3002000, BRHIP3002114, BRHIP3002141, BRHIP3003063, BRHIP3003126, BRHIP3003795, BRHIP3004725, BRHIP3005307, BRHIP3005673, BRHIP3007195, BRHIP3007223, BRHIP3011082, BRHIP3012289, BRHIP3016032, BRHIP3019643, BRHIP3021019, BRHIP3032374, BRHIP3033557, BRHIP3035006, BRHIP3037543, BRHIP3038030, BRHIP3041587, BRSSN2004710, BRSSN2011843, BRSTN2011961, BRSTN2016918, BRTHA2001304, BRTHA2005448, BRTHA2026290, BRTHA2026311, BRTHA2027250, BRTHA2030036, BRTHA2033683, BRTHA2035743, BRTHA2036295, BRTHA2037247, BRTHA3003736, BRTHA3010135, BRTHA3014547, BRTHA3021786, BRTHA3023403, BRTHA3026916, CHONS2002829, COLON2004351, CTONG2010330, CTONG2020582, CTONG2026987, FCBBF3001018, FCBBF3021191, FEBRA2013570, FEBRA2026582, FEHRT2002708, FEKID2002637, HHDPC2008185, HSYRA2004550, KIDNE2004531, KIDNE2010049, LYMPB2002236, NT2RI2004818, NT2RI3001967, NT2RP7016508, NT2RP8003490, NT2RP8003787, NT2RP8005546, OCBBF2000831, OCBBF2007039, OCBBF2024589, OCBBF3001616, OCBBF3004487, OCBBF3021086, OCBBF3023175, OCBBF3025503, OCBBF3026088, OCBBF3026361, PLACE5000492, PLACE6003004, PLACE7003985, PLACE7004103, PLACE7004961, PLACE7006090, PLACE7007379, PLACE7008136, PLACE7012111, PLACE7014247, PLACE7016526, SKMUS2008585, SKMUS2009557, SMINT2011406, SMINT2011509, SYNOV2017179, SYNOV4003174, SYNOV4009139, T1ESE2000609, T1ESE2002665, TESTI2001364, TESTI2005112, TESTI2007490, TESTI2018335, TESTI2021112, TESTI2021654, TESTI2030901, TESTI2037877, TESTI2049062, TESTI4000621, TESTI4002774, TESTI4002799, TESTI4003404, TESTI4003565, TESTI4003602, TESTI4003703, TESTI4005399, TESTI4007671, TESTI4010544, TESTI4010721, TESTI4012960, TESTI4017854, TESTI4020342, TESTI4020596, TESTI4020819, TESTI4021129, TESTI4021197, TESTI4023096, TESTI4024494, TESTI4026080, TESTI4028182, TESTI4031066, TESTI4033177, TESTI4040598, TESTI4041482, TESTI4046073, TESTI4047808, TESTI4049786, TESTI4051424, TESTI4051865, TESTI4052219, THYMU3000390, THYMU3002825, THYMU3014372, THYMU3023400, THYMU3025683, THYMU3026306, THYMU3026479, THYMU3031878, THYMU3032798, THYMU3034671, THYMU3036953, THYMU3041428, THYMU3047115, THYMU3047891, TRACH2022113, TRACH2024730, TRACH3003037, TRACH3005274, TRACH3006800, TRACH3009008, TRACH3009061, TRACH3011313, TRACH3016455, TRACH3017409, TRACH3018108, TRACH3018261, TRACH3019621, TRACH3021544, TRACH3023516, TRACH3024020, TRACH3024081, TRACH3024342, TRACH3024512, TRACH3025316, TRACH3026303, TRACH3026650, TRACH3027229, TRACH3027701, TRACH3029329, TRACH3032150, TRACH3036750, TRACH3038399, TSTOM2001571, UTERU2024042, UTERU3001946, UTERU3010604, UTERU3010919, UTERU3015299, UTERU3017441, UTERU3019708, UTERU3020090, UTERU3022168

[0562] The following seven clones are also predicted to belong to the category of enzyme and/or metabolism-related protein.

ADRGL2011190, BRAMY3008096, CTONG2002832, TESTI4052089, THYMU3024602, THYMU3044175, TRACH3021066

[0563] The clones predicted to belong to the category of cell division and/or cell proliferation-related protein are the following 13 clones.

BRACE3022303, BRAWH3017260, BRHIP2008756, BRHIP3028570, BRSTN2006638, NT2RI2004818, PLACE7009563, PLACE7016526, SMINT2014721, THYMU3025642, THYMU3033626, TRACH3029329, UTERU3010919

[0564] The following one clone is also predicted to belong to the category of cell division and/or cell proliferation-related protein.

TBAES2007481

[0565] The clones predicted to belong to the category of cytoskeleton-related protein are the following 51 clones.

[0566] BRACE2046976, BRACE3013874, BRACE3047482, BRACE3051819, BRAMY3015549, BRAWH3015175, BRAWH3018548, BRAWH3021580, BRAWH3024186, BRAWH3024506, BRAWH3029385, BRAWH3032298, BRAWH3049544, BRHIP3003340, BRHIP3012736, BRHIP3036936, BRSTN2016918, BRTHA2020910, BRTHA2025869, BRTHA2031917, BRTHA3011361, BRTHA3025073, CTONG2008989, HSYRA2007338, LYMPB2002458, OCBBF3008835, OCBBF3027969, PEBLM2006298, PLACE7000266, PLACE7004103, PLACE7004961, SMINT2011406, SYNOV4003174, TESTI2006543, TESTI2034913, TESTI4001517, TESTI4005653, TESTI4008305, TESTI4041049, TESTI4051424, TESTI4051865, THYMU3020221, THYMU3038158, TLUNG2000654, TRACH3002890, TRACH3006379, TRACH3012460, TRACH3018524, TRACH3020769, TRACH3028837, UTERU3011837

[0567] The clones predicted to belong to the category of nuclear protein and/or RNA synthesis-related protein are the following 29 clones.

[0568] BRACE2016896, BRACE3032537, BRACE3034183, BRACE3039288, BRAWH3013264, BRAWH3032571, BRCOC2006164, BRHIP3004725, BRSSN2011843, BRTHA2026290, BRTHA3003736, BRTHA3014547, NT2RP7016508, NT2RP8005546, OCBBF3004487, OCBBF3021086, OCBBF3026361, PLACE5000492, TESTI4000621, TESTI4002799, TESTI4010721, TESTI4012960, THYMU3014372, THYMU3033626, THYMU3041428, TRACH3017409, TRACH3029462, UTERU3010919, UTERU3019708

[0569] The clones predicted to belong to the category of protein synthesis and/or transport-related protein are the following 50 clones.

[0570] BRACE3033525, BRACE3041059, BRAMY4001652, BRAWH3010657, BRAWH3013264, BRAWH3034668, BRAWH3036247, BRAWH3037428, BRAWH3037979, BRCAN2000923, BRCAN2002892, BRCAN2006051, BRCAN2021325, BRCAN2021718, BRHIP2029663, BRHIP3002000, BRHIP3003126, BRHIP3007223, BRHIP3011082, BRSTN2010089, BRTHA2036295, BRTHA3012265, CHONS2002829, D90ST2004417, HHDPC2008185, NETRP2003448, OCBBF2007039, OCBBF3021086, PLACE6003004, PLACE6010925, PLACE7006498, PLACE7007379, PLACE7012111, PLACE7016526, TESTI2023903, TESTI2036285, TESTI4003602, TESTI4012960, TESTI4014415, TESTI4030864, TESTI4051865, THYMU3036953, THYMU3047891, TRACH3004113, TRACH3006800, TRACH3009061, TRACH3021544, TRACH3026650, UTERU3001946, UTERU3012414

[0571] The following one clone is also predicted to belong to the category of protein synthesis and/or transport-related protein.

CTONG2002832

[0572] The clones predicted to belong to the category of cellular defense-related protein are the following four clones.

BRHIP3027191, SYNOV4009575, TESTI2023903, TRACH3029462

[0573] The clone predicted to belong to the category of development and/or differentiation-related protein is the following one clone.

CHONS2000797

[0574] The clones predicted to belong to the category of DNA-binding and/or RNA-binding protein are the following 185 clones.

[0575] ASTRO2016114, BEAST2000981, BRACE2012625, BRACE2016896, BRACE2019348, BRACE3019941, BRACE3025719, BRACE3026844, BRACE3026947, BRACE3029021, BRACE3031743, BRACE3032537, BRACE3034183, BRACE3039288, BRACE3040239, BRACE3041162, BRACE3047482, BRACE3050270, BRALZ2013621, BRAMY2041347, BRAMY3000692, BRAMY3007078, BRAMY3011581, BRAMY3014027, BRAMY4002575, BRAWH2000256, BRAWH2014053, BRAWH2016209, BRAWH3000446, BRAWH3005886, BRAWH3009961, BRAWH3011623, BRAWH3013009, BRAWH3013264, BRAWH3015175, BRAWH3015610, BRAWH3017477, BRAWH3021580, BRAWH3022651, BRAWH3027533, BRAWH3027607, BRAWH3027880, BRAWH3028796, BRAWH3031342, BRAWH3031710, BRAWH3032571, BRAWH3035403, BRAWH3035936, BRAWH3036247, BRAWH3036334, BRAWH3038055, BRAWH3042787, BRAWH3044122, BRCAN2020331, BRCAN2021452, BRCOC2006164, BRCOC2012386, BRHIP2027077, BRHIP2029663, BRHIP3002141, BRHIP3004725, BRHIP3005037, BRHIP3007609, BRHIP3017256, BRHIP3019824, BRHIP3027651, BRHIP3028246, BRHIP3039592, BRSSN2011843, BRSTN2012069, BRTHA2026290, BRTHA2037247, BRTHA3000456, BRTHA3003225, BRTHA3003736, BRTHA3010212, BRTHA3014000, BRTHA3014547, BRTHA3028339, CHONS2000797, CTONG2003517, CTONG2006235, CTONG2011801, CTONG2026987, D90ST2003106, FCBBF3020030, FEBRA2002260, FEBRA2028457, FEHRT2002708, HCASM2008154, KIDNE2018268, NETRP2003103, NETRP2004017, NT2RI3009480, NT2RP7016508, NT2RP8005546, NTONG2003805, NTONG2008483, OCBBF2014745, OCBBF2016928, OCBBF3001333, OCBBF3001616, OCBBF3004487, OCBBF3008392, OCBBF3019269, OCBBF3020263, OCBBF3021086, OCBBF3021361, OCBBF3022827, OCBBF3025503, OCBBF3026361, PLACE5000492, PLACE7004103, PLACE7005169, PLACE7007973, PLACE7008136, PLACE7009757, PLACE7018512, PROST2002078, SMINT2011509, SMINT2014721, SPLEN2012571, SPLEN2036608, T1ESE2000609, T1ESE2000904, TESTI2036822, TESTI2040377, TESTI4000370, TESTI4000621, TESTI4001679, TESTI4002799, TESTI4003796, TESTI4003944, TESTI4005322, TESTI4005470, TESTI4012960, TESTI4024494, TESTI4028182, TESTI4032913, TESTI4039904, TESTI4051054, TESTI4052775, THYMU2008207, THYMU2038199, THYMU3008105, THYMU3012983, THYMU3014372, THYMU3021586, THYMU3022434, THYMU3023400, THYMU3026000, THYMU3030072, THYMU3037617, THYMU3040829, THYMU3041428, THYMU3043200, THYMU3045704, TKIDN2003396, TLIVE2001616, TLUNG2000654, TRACH3002752, TRACH3003037, TRACH3003458, TRACH3004113, TRACH3004412, TRACH3004424, TRACH3005274, TRACH3010079, TRACH3010167, TRACH3015951, TRACH3017409, TRACH3021778, TRACH3022109, TRACH3026303, TRACH3028180, TRACH3036750, UTERU2037423, UTERU3012293, UTERU3015011, UTERU3016070, UTERU3019708, UTERU3020090, UTERU3022168, UTERU3022588, UTERU3023141

[0576] The following seven clones are also predicted to belong to the category of DNA-binding and/or RNA-binding protein.

BRACE3002184, BRCAN2019772, CTONG2002832, TESTI4002988, TESTI4005500, TRACH1000193, TRACH3019290

[0577] The clones predicted to belong to the category of ATP binding and/or GTP-binding protein are the following 41 clones.

[0578] BRACE3042409, BRAWH2002333, BRAWH2014053, BRAWH3015175, BRAWH3029385, BRAWH3029806, BRAWH3034743, BRAWH3037428, BRAWH3047692, BRCAN2000923, BRCAN2002892, BRCAN2022126, BRCOC2001355, BRCOC2006164, BRHIP3007195, BRSSN2004710, BRTHA2026290, BRTHA2033683, BRTHA3026916, CTONG2020582, HSYRA2004550, NETRP2003448, PLACE6019600, PLACE7004961, PLACE7006498, PLACE7016526, SMINT2011406, TESTI4010544, TESTI4014415, TESTI4028182, TESTI4029731, TESTI4040559, TESTI4041482, TESTI4052219, THYMU3013785, THYMU3047115, TRACH2024730, TRACH3024081, TRACH3029329, TRACH3031660, UTERU3012414

[0579] The following one clone is also predicted to belong to the category of ATP binding and/or GTP-binding protein.

ADRGL2011190

[0580] Although the 172 clones described below have hit data in Pfam, it remains unclear as to which of the above-described categories each of these clones belong. However, if data for proteins having a similar domain or motif are accumulated and their functions clarified in more detail, in the future these clones can be classified into any of the above-described categories. The Clone Name and Functional Domain Name are indicated as “Clone Name//Functional Domain Name”. When a clone had hit data in multiple functional domains, all data were represented, with each marked with a double slash (//).

[0581] In addition, even when a clone had multiple hit data in an identical functional domain, these data are fully represented without abridgment.

BLADE2001031//Thrombospondin type 1 domain

BRACE2010336//TPR Domain

BRACE2013009//EF hand

BRACE2017872//PWWP domain

BRACE2023744//Translationally controlled tumor protein

BRACE2034434//Protein of unknown function

BRACE3001973//EGF-like domain//Laminin G domain

BRACE3002756//SAM domain (Sterile alpha motif)

BRACE3005903//K-box region//TSC-22/dip/bun family

BRACE3014523//Wiskott Aldrich syndrome homology region 2

BRACE3019570//Troponin

BRACE3022340//Troponin

BRACE3026345//Insulin/IGF/Relaxin family

BRACE3036283//DnaJ domain

BRACE3040644//Low-density lipoprotein receptor domain class A//EB module//CUB domain

BRACE3043597//KOW motif

BRACE3046466//EGF-like domain//Laminin G domain//Laminin EGF-like (Domains III and V)//EB module

BRACE3048615//Leucine Rich Repeat

BRALZ2010842//Mitochondrial carrier proteins

BRAMY2031516//wnt family of developmental signaling proteins

BRAMY2041384//Annexin

BRAMY3002886//Domain of unknown function//CBS domain

BRAMY3011501//SAP domain//SPRY domain

BRAMY3015086//FERM domain (Band 4.1 family)

BRAMY3018754//Protein of unknown function//Domain of unknown function

BRAMY4000962//Tudor domain

BRAWH2011796//S-100/ICaBP type calcium binding domain//EF hand

BRAWH2016223//TPR Domain

BRAWH3001783//Cadherin domain

BRAWH3003573//EF hand

BRAWH3008167//Sushi domain (SCR repeat)//CUB domain

BRAWH3011331//Disintegrin

BRAWH3011577//KRAB box

BRAWH3014609//Leucine rich repeat N-terminal domain//Leucine Rich Repeat//Leucine rich repeat C-terminal domain

BRAWH3021574//Wiskott Aldrich syndrome homology region 2

BRAWH3022347//Leucine Rich Repeat

BRAWH3022719//Eukaryotic initiation factor 4E

BRAWH3024231//TPR Domain

BRAWH3026938//PDZ domain (Also known as DHR or GLGF).

BRAWH3027440//TPR Domain//PPR repeat

BRAWH3030772//Ank repeat

BRAWH3030910//SAM domain (Sterile alpha motif)

BRAWH3033448//TPR Domain

BRAWH3034775//SAP domain//SPRY domain

BRAWH3038252//Formin Homology 2 Domain

BRAWH3038324//Dehydrins

BRAWH3038827//Kelch motif//BTB/POZ domain

BRAWH3042438//‘Paired box’ domain//EF hand//Phorbol esters/diacylglycerol binding domain (C1 domain)

BRAWH3042568//Homeobox domain

BRAWH3044151//Thrombospondin type 1 domain//Keratin, high sulfur B2 protein

BRAWH3045118//DnaJ domain

BRAWH3048374//Sushi domain (SCR repeat)//Keratin, high sulfur B2 protein

BRCAN2010665//PDZ domain (Also known as DHR or GLGF).

BRCAN2019907//EF hand

BRCAN2020234//Lipocalin/cytosolic fatty-acid binding protein family

BRCAN2025093//Ank repeat//Flagellar FliJ protein

BRCOC2006639//Leucine Rich Repeat

BRHIP2013958//Domain of unknown function//MSP (Major sperm protein) domain

BRHIP2026346//Formin Homology 2 Domain

BRHIP2027563//Kelch motif

BRHIP3001878//POT family

BRHIP3004710//TPR Domain

BRHIP3005142//Adaptin N terminal region

BRHIP3005231//TPR Domain

BRHIP3006449//Armadillo/beta-catenin-like repeats

BRHIP3007424//wnt family of developmental signaling proteins

BRHIP3009753//CUB domain//Low-density lipoprotein receptor domain class A

BRHIP3010289//Delta serrate ligand//Kelch motif//Plexin repeat//Lectin C-type domain//Laminin EGF-like (Domains III and V)//Keratin, high sulfur B2 protein

BRHIP3020733//Keratin, high sulfur B2 protein

BRHIP3029409//NTR/C345C module

BRHIP3030230//Pentaxin family

BRHIP3033734//Keratin, high sulfur B2 protein

BRSSN2015497//Tudor domain

BRTHA2038345//Ank repeat

BRTHA3011187//EF hand

BRTHA3021971//Putative peptidoglycan binding domain

BRTHA3026161//Adenosine-deaminase (editase) domain

BRTHA3027171//Scorpion short toxins

BRTHA3027638//Matrix protein (MA), p15

CHONS2001287//Insulin-like growth factor binding proteins//Thyroglobulin type-1 repeat

CHONS2001834//Plexin repeat

DFNES2011221//Rotavirus NS26

ERLTF2002178//Kelch motif

FCBBF3012443//Leucine rich repeat N-terminal domain//Leucine Rich Repeat//Leucine rich repeat C-terminal domain

FCBBF3024911//PWWP domain

FCBBF5000384//BAF60b domain of the SWIB complex

FEBRA2000805//Uncharacterized protein family UPF0054

FEBRA2023498//Leucine rich repeat N-terminal domain//Leucine Rich Repeat

FEKID2002493//wnt family of developmental signaling proteins

HCHON2009766//eIF4-gamma/eIF5/eIF2-epsilon

JCMLC2002751//von Willebrand factor type D domain//Plant PEC family metallothionein//Trypsin Inhibitor like cysteine rich domain//von Willebrand factor type C domain

KIDNE2015987//EGF-like domain//Keratin, high sulfur B2 protein//Zona pellucida-like domain

NT2RI3001573//Leucine Rich Repeat

NT2RI3005923//Cadherin domain

NT2RI3009524//EGF-like domain//Metallothionein//Laminin G domain

NT2RP7007387//Armadillo/beta-catenin-like repeats//picornavirus capsid protein

NT2RP7020343//Transforming growth factor beta like domain//Keratin, high sulfur B2 protein

NT2RP8000633//VPR/VPX protein

NT2RP8001604//CUB domain//Sushi domain (SCR repeat)

NT2RP8006452//African swine fever virus multigene family 360 protein//Leucine Rich Repeat

NT2RP8007920//PPR repeat//LIM domain containing proteins

NT2RP8009119//Picornavirus 2B protein

OCBBF3001202//DENN (AEX-3) domain

OCBBF3005330//Domain found in Dishevelled, Egl-10, and Pleckstrin//TCP-1/cpn60 chaperonin family

OCBBF3023913//R3H domain//Retroviral Vif (Viral infectivity) protein

OCBBF3026979//Laminin G domain//Thrombospondin N-terminal-like domains//von Willebrand factor type C domain//EGF-like domain//EB module//Plant PEC family metallothionein//Trypsin Inhibitor like cysteine rich domain//Metallothionein

PEBLM2001803//Vacuolar sorting protein 9 (VPS9) domain

PLACE6001933//Receptor L domain

PLACE7002303//Homeobox domain

PUAEN2000594//Poly-adenylate binding protein, unique domain.

PUAEN2000684//Geminivirus AL2 protein//Leucine Rich Repeat

SMINT2010753//TPR Domain//PPR repeat

SPLEN2022785//Polyomavirus coat protein

SPLEN2028417//Homeobox domain

SYNOV2003326//TSC-22/dip/bun family

TBAES2003917//Ank repeat

TBAES2007428//Scorpion short toxins//EGF-like domain

TESOP2002005//E7 protein, Early protein

TESTI2005564//EF hand

TESTI2009739//Tropomyosins//Domain of unknown function

TESTI2011020//Keratin, high sulfur B2 protein

TESTI2018867//FF domain

TESTI2049041//TPR Domain

TESTI4001569//Leucine Rich Repeat//KE2 family protein

TESTI4002141//Keratin, high sulfur B2 protein

TESTI4002868//Metallothionein

TESTI4004031//Domain of unknown function

TESTI4007965//Adaptin N terminal region//Gamma-adaptin, C-terminus

TESTI4011926//Gag P30 core shell protein

TESTI4013742//Leucine Rich Repeat//Hantavirus nucleocapsid protein//Troponin//Formin Homology 2 Domain//Apolipoprotein

A1/A4/E family

TESTI4024294//Chorion protein

TESTI4035898//Kelch motif

TESTI4039451//Adaptin N terminal region

TESTI4041984//EGF-like domain//EB module//TB domain

TESTI4043166//Formin Homology 2 Domain

TESTI4046873//TPR Domain

TESTI4047328//von Willebrand factor type D domain//Trypsin Inhibitor like cysteine rich domain//Chitin binding domain//Metallothionein

TESTI4047569//Keratin, high sulfur B2 protein

TESTI4051015//Major intrinsic protein

TESTI4052598//Lectin C-type domain

THYMU3003007//TPR Domain

THYMU3012402//Armadillo/beta-catenin-like repeats

THYMU3015042//Polyomavirus coat protein

THYMU3015571//Chaperonins 10 Kd subunit

THYMU3017761//Gag P30 core shell protein

THYMU3019476//Matrix protein (MA), p15

THYMU3021755//HCO3- transporter family

THYMU3033649//Immunoreceptor tyrosine-based activation motif

THYMU3040126//Metallothionein

THYMU3046360//F-box domain.

TKIDN2011051//Keratin, high sulfur B2 protein

TKIDN2011160//Thrombospondin type 1 domain

TLIVE2007736//PDZ domain (Also known as DHR or GLGF).

TRACH3007689//Ank repeat//TPR Domain

TRACH3012106//FERM domain (Band 4.1 family)

TRACH3015346//Uncharacterized protein family UPF0004

TRACH3016805//Ank repeat

TRACH3018606//SAM domain (Sterile alpha motif)

TRACH3022296//DnaJ domain

TRACH3022758//EF hand

TRACH3023203//Flavivirus polyprotein propeptide

TRACH3028855//R3H domain//Uncharacterized protein family

UPF0024

TRACH3030855//Serpins (serine protease inhibitors)

TRACH3032570//PDZ domain (Also known as DHR or GLGF).

UTERU2016669//Helix-hairpin-helix motif.

UTERU3001394//EGF-like domain

UTERU3009775//PDZ domain (Also known as DHR or GLGF).

UTERU3011558//GTPase of unknown function

UTERU3011579//Plant PEC family metallothionein

UTERU3017995//UBX domain

UTERU3018255//Thrombospondin type 1 domain

UTERU3021850//Thrombospondin type 1 domain//DnaJ central domain (4 repeats)

[0582] Likewise, although seven clones described below have hit data in Pfam (see Example 5), it remains unclear as to which of the above-described categories each of the clones belong. However, if data for proteins comprising a similar domain or motif are accumulated and their functions are clarified in more detail, in the future these clones can be classified into any of the categories described above.

BRACE3026993//TSC-22/dip/bun family

BRACE3046450//PDZ domain (Also known as DHR or GLGF).//PDZ domain (Also known as DHR or GLGF).//PDZ domain (Also known as DHR or GLGF). 1//PDZ domain (Also known as DHR or GLGF).

CTONG2003764//Phorbol esters/diacylglycerol binding domain (C1 domain)

TBAES2004105//Thrombospondin type 1 domain

[0583] TBAES2007379//EGF-like domain//EGF-like domain//Trypsin Inhibitor like cysteine rich domain//EGF-like domain//EGF-like domain//Keratin, high sulfur B2 protein//EGF-like domain//EGF-like domain//Granulins//EGF-like domain//EGF-like domain//EGF-like domain

TBAES2008133//PDZ domain (Also known as DHR or GLGF).

[0584] UTERU2036507//Thrombospondin type-1 domain//NTR/C345C module In addition, when data for proteins are accumulated and novel domains and motifs are found, in the future the remaining clones, which had no hit data in the search with Pfam, can be classified into any of the above-described categories if a new functional domain or motif is identified by re-analyzing the deduced amino acid sequences of the clones using a homology search against an updated database.

### EXAMPLE 8

### Expression Frequency Analysis in Silico

[0585] The cDNA libraries derived from various tissues and cells as indicated in Example 1 were prepared, and cDNA clones were selected from each library at random. The 5′-end sequences were determined and the database was constructed based on the data. The database was constructed based on the nucleotide sequences of 1,402,069 clones, and thus the population of the database is large enough for the analysis.

[0586] Then, clones having a homologous sequence are categorized into a single cluster (clustering) by searching the nucleotide sequences of respective clones in this database with the program of nucleotide sequence homology search; the number of clones belonging to each cluster was determined and normalized for every library; thus, the ratio of a certain gene in each cDNA library was determined. This analysis gave the information of the expression frequency of genes in tissues and cells which were sources of the cDNA libraries.

[0587] Then, in order to analyze the expression of a gene containing the nucleotide sequence of the cDNA of the present invention in tissues and cells, the library derived from a tissue or a cell used in the large-scale cDNA analysis was subjected to the comparison of the expression levels between tissues or cells. Namely, the expression frequency was analyzed by comparing the previously normalized values between tissues and/or cells for which the nucleotide sequences of 600 or more cDNA clones had been analyzed. By this analysis, some of the genes were revealed to be involved in the pathology and functions indicated below. Each value in Tables 2 to 24 shown below represents a relative expression frequency; the higher the value, the higher the expression level. The genes which are included a part of the Tables indicate not so big difference between compared libraries, but when compared with other libraries from another tissue or cell based on Example 9, they indicate significant difference. Thus, the genes are specific in each tissue or cell, and can be considered to be useful as diagnosing markers for the disease as well as useful for analyzing molecular mechanisms.

Osteoporosis-related genes

[0588] Osteoporosis is a pathology in which bones are easily broken owing to overall decrease in components of bone. The onset involves the balance between the functions of osteoblast producing bone and osteoclast absorbing bone, namely bone metabolism. Thus, the genes involved in the increase of osteoclasts differentiating from precursor cells of monocyte/macrophage line (Molecular Medicine 38. 642-648. (2001)) are genes involved in osteoporosis relevant to bone metabolism.

[0589] A nucleotide sequence information-based analysis was carried out to identify the genes whose expression frequencies are higher or lower in CD34+ cell (cell expressing a glycoprotein CD34) treated with the osteoclast differentiation factor (Molecular Medicine 38. 642-648. (2001)) than in the untreated CD34+ cell, which is the precursor cell of monocyte/macrophage line. The result of comparative analysis for the frequency between the two cDNA libraries prepared from the RNA of CD34+ cells (CD34C) and from the RNA of CD34+ cells treated with the osteoclast differentiation factor (D30ST, D60ST or D90ST) showed that the genes whose expression levels were different between the two were the following twelve clones (Table 2).

BRAWH3018063, BRHIP3020046, BRSSN2013696, BRSTN2012069, BRTHA2027229, D90ST2003106, D90ST2003989, D90ST2004417, OCBBF2016928, TESTI4005653, TESTI4013474, THYMU3032798

[0590] These genes are involved in osteoporosis.

Genes Involved in Neural Cell Differentiation

[0591] Genes involved in neural cell differentiation are useful for treating neurological diseases. Genes with varying expression levels in response to induction of cellular differentiation in neural cells are thought to be involved in neurological diseases.

[0592] A survey was performed for genes whose expression levels are varied in response to induction of differentiation (stimulation by retinoic acid (RA) or growth inhibitor treatment after RA stimulation) in cultured cells of a neural strain, NT2. The result of comparative analysis of cDNA libraries derived from undifferentiated NT2 cells (NT2RM) and the cells subjected to the differentiation treatment (NT2RP, NT2RI or NT2NE) showed that the genes whose expression levels were different between the two were the following 102 clones (Table 3).

[0593] BLADE2004849, BRACE2003628, BRACE2012528, BRAMY2023939, BRAMY2031516, BRAMY4002628, BRAWH3010461, BRAWH3017259, BRAWH3018063, BRAWH3022651, BRAWH3024186, BRCAN2019653, BRCAN2022126, BRCOC2012386, BRHIP3002000, BRHIP3007223, BRHIP3021019, BRSTN2011961, BRSTN2012069, BRTHA2033155, BRTHA3010212, BRTHA3011194, BRTHA3011265, BRTHA3017791, BRTHA3021971, CHONS2002829, CTONG2006235, FCBBF3012443, FEBRA2026582, LIVER2008465, NT2NE2011107, NT2NE2016041, NT2RI2004818, NT2RI2009233, NT2RI2010795, NT2RI2015533, NT2RI2023671, NT2RI2028537, NT2RI3001573, NT2RI3001967, NT2RI3005861, NT2RI3005923, NT2RI3007095, NT2RI3008179, NT2RI3009480, NT2RI3009524, NT2RP7003439, NT2RP7007387, NT2RP7014178, NT2RP7014778, NT2RP7016508, NT2RP7017139, NT2RP7019682, NT2RP7020343, NT2RP8000633, NT2RP8001363, NT2RP8001407, NT2RP8001584, NT2RP8001604, NT2RP8001605, NT2RP8003490, NT2RP8003657, NT2RP8003787, NT2RP8005546, NT2RP8006452, NT2RP8006521, NT2RP8007416, NT2RP8007503, NT2RP8007920, NT2RP8008057, NT2RP8009119, NT2RP8009248, NTONG2008483, OCBBF2003518, OCBBF3001333, OCBBF3004908, PLACE7004103, PROST2017910, SMINT2009292, SPLEN2012571, T1ESE2000904, TESTI4002072, TESTI4002774, TESTI4002799, TESTI4005653, TESTI4007965, TESTI4012960, TESTI4018436, THYMU3001776, THYMU3002887, THYMU3029795, THYMU3041428, THYMU3047115, TRACH3003872, TRACH3004424, TRACH3006717, TRACH3007625, TRACH3009008, TRACH3016805, TRACH3016885, TRACH3026303, UTERU2016669

[0594] These genes are neurological disease-related genes.

Genes Involved in Alzheimer's Disease

[0595] Alzheimer's disease is a cranial neurological disease that is characterized by memory loss. As the disease advances, patients can no longer support themselves and require nursing. Alzheimer's disease eventually leads to atrophication of the brain itself. Environmental factors such as stress, and vascular factors such as hypertension and cholesterolemia, are assumed, but not confirmed, to contribute to the onset of Alzheimer's disease. Genes whose expression levels differ between normal brain tissues and tissues affected with Alzheimer's disease are expected to be involved in Alzheimer's disease. Such genes can be used to elucidate the disease's onset mechanism and in genetic diagnosis. cDNA libraries derived from the cerebral cortex of Alzheimer patients (BRALZ and BRASW), and a library derived from whole tissues of a normal brain (BRAWH) were analyzed and compared (Table 4). The results showed that genes whose expression levels differed between the two are the following 298 and five clones listed below.

[0596] ASTRO2016114, BRACE2002392, BRACE2012528, BRACE3004371, BRACE3004767, BRACE3022340, BRACE3031185, BRACE3031743, BRACE3032385, BRACE3032631, BRACE3039358, BRACE3040863, BRACE3042432, BRACE3045981, BRALZ2003119, BRALZ2007661, BRALZ2008930, BRALZ2010842, BRALZ2011337, BRALZ2013621, BRALZ2013690, BRALZ2014054, BRAMY2031516, BRAMY3002329, BRAMY3004126, BRAMY3005912, BRAMY3008436, BRAWH2000256, BRAWH2002333, BRAWH2004078, BRAWH2010364, BRAWH2010619, BRAWH2011796, BRAWH2011812, BRAWH2011958, BRAWH2012054, BRAWH2012866, BRAWH2013955, BRAWH2014053, BRAWH2016209, BRAWH2016223, BRAWH2016305, BRAWH2016514, BRAWH2016562, BRAWH2016785, BRAWH3000446, BRAWH3000884, BRAWH3001053, BRAWH3001638, BRAWH3001783, BRAWH3001833, BRAWH3003244, BRAWH3003573, BRAWH3003975, BRAWH3004335, BRAWH3004350, BRAWH3005037, BRAWH3005886, BRAWH3005892, BRAWH3005896, BRAWH3008167, BRAWH3008559, BRAWH3008867, BRAWH3009961, BRAWH3010461, BRAWH3010602, BRAWH3010657, BRAWH3010726, BRAWH3010833, BRAWH3011101, BRAWH3011331, BRAWH3011402, BRAWH3011577, BRAWH3011623, BRAWH3011685, BRAWH3011907, BRAWH3011929, BRAWH3012005, BRAWH3012662, BRAWH3012779, BRAWH3013009, BRAWH3013049, BRAWH3013264, BRAWH3013508, BRAWH3014609, BRAWH3014639, BRAWH3015017, BRAWH3015175, BRAWH3015610, BRAWH3015825, BRAWH3016123, BRAWH3016715, BRAWH3017180, BRAWH3017259, BRAWH3017260, BRAWH3017477, BRAWH3017980, BRAWH3018063, BRAWH3018369, BRAWH3018548, BRAWH3018969, BRAWH3019026, BRAWH3019529, BRAWH3019594, BRAWH3019820, BRAWH3020200, BRAWH3020318, BRAWH3020884, BRAWH3020928, BRAWH3021012, BRAWH3021574, BRAWH3021580, BRAWH3021641, BRAWH3021643, BRAWH3021724, BRAWH3022347, BRAWH3022431, BRAWH3022459, BRAWH3022542, BRAWH3022651, BRAWH3022719, BRAWH3022900, BRAWH3023156, BRAWH3023168, BRAWH3023172, BRAWH3023274, BRAWH3023421, BRAWH3024186, BRAWH3024231, BRAWH3024242, BRAWH3024506, BRAWH3024989, BRAWH3026349, BRAWH3026938, BRAWH3027420, BRAWH3027440, BRAWH3027533, BRAWH3027574, BRAWH3027607, BRAWH3027616, BRAWH3027675, BRAWH3027806, BRAWH3027880, BRAWH3028202, BRAWH3028223, BRAWH3028461, BRAWH3028754, BRAWH3028796, BRAWH3029313, BRAWH3029385, BRAWH3029538, BRAWH3029806, BRAWH3030772, BRAWH3030810, BRAWH3030910, BRAWH3031054, BRAWH3031342, BRAWH3031710, BRAWH3032298, BRAWH3032340, BRAWH3032571, BRAWH3033117, BRAWH3033293, BRAWH3033448, BRAWH3033513, BRAWH3034097, BRAWH3034114, BRAWH3034134, BRAWH3034668, BRAWH3034743, BRAWH3034775, BRAWH3034890, BRAWH3035403, BRAWH3035904, BRAWH3035914, BRAWH3035936, BRAWH3036077, BRAWH3036247, BRAWH3036270, BRAWH3036334, BRAWH3036561, BRAWH3037265, BRAWH3037394, BRAWH3037428, BRAWH3037533, BRAWH3037979, BRAWH3038055, BRAWH3038230, BRAWH3038252, BRAWH3038324, BRCAN2010665, BRCAN2019653, BRCAN2022126, BRCAN2025093, BRCOC2012386, BRHIP2015153, BRHIP2027077, BRHIP3001573, BRHIP3002000, BRHIP3003063, BRHIP3003984, BRHIP3004774, BRHIP3007223, BRHIP3007409, BRHIP3008320, BRHIP3014675, BRHIP3017855, BRHIP3018784, BRHIP3021019, BRHIP3028246, BRHIP3028570, BRSTN2010089, BRSTN2012069, BRSTN2016992, BRTHA2033155, BRTHA3003736, BRTHA3005988, BRTHA3010135, BRTHA3010212, BRTHA3011194, BRTHA3011265, BRTHA3017791, BRTHA3020771, BRTHA3021971, BRTHA3023403, CTONG2006235, CTONG2009033, CTONG2020582, D90ST2003106, DFNES2001829, KIDNE2010049, MESAN2017133, NT2RI2009233, NT2RI2015533, NT2RI3005923, NT2RI3009524, NT2RP7007387, NT2RP8001605, NT2RP8007920, NTONG2008483, OCBBF2003518, OCBBF2018618, OCBBF3001333, OCBBF3004487, PLACE7004103, PLACE7006240, PROST2007444, PROST2017910, TBAES2007428, TESTI2005112, TESTI2021654, TESTI4002072, TESTI4002774, TESTI4002799, TESTI4003602, TESTI4004210, TESTI4005399, TESTI4005653, TESTI4006441, TESTI4013474, TESTI4014908, TESTI4022158, THYMU3000776, THYMU3002887, THYMU3003350, THYMU3021586, THYMU3026000, THYMU3026306, THYMU3026350, THYMU3032798, THYMU3032867, THYMU3037827, THYMU3038214, THYMU3041428, THYMU3044075, TRACH2013585, TRACH3002752, TRACH3003037, TRACH3003872, TRACH3004424, TRACH3006717, TRACH3007625, TRACH3007689, TRACH3008632, TRACH3009008, TRACH3010079, TRACH3016805, TRACH3016885, TRACH3024342, TRACH3024671, TRACH3026303, TRACH3026676, TRACH3028855, TRACH3032570, TRACH3036932, TRACH3038399, UTERU3010409, UTERU3013167

BRACE3046450, BRAWH3013197, BRAWH3028645, BRTHA3004432, TRACH1000193

[0597] These genes are involved in Alzheimer's disease.

Genes Involved in Parkinson's Disease

[0598] Parkinson's disease is a cranial neurological disease characterized by impaired production of the neurotransmitter dopamine in the substantia nigra in the brain. This results in dyskinesia, such as hand tremors, and impaired body movement due to muscular rigidity. Normally, the number of brain neurons gradually decreases with age. However, compared to healthy people, patients with Parkinson's disease experience a rapid and marked decrease in the number of neurons in their substantia nigra. Genes whose expression levels differ between tissues of the whole brain and the nigra are expected to be involved in Parkinson's disease. These genes exhibit nigra-specific alterations in their expression levels, and can be used to elucidate the disease onset mechanism and in gene diagnosis. cDNA libraries derived from the substantia nigra (BRSSN) and a library derived from whole tissues of a normal brain (BRAWH) were analyzed and compared (Table 5). Genes whose expression levels differed between the two were the 305 clones and five clones listed below.

[0599] ASTRO2016114, BRACE2012528, BRACE2017844, BRACE3004371, BRACE3004767, BRACE3022340, BRACE3025719, BRACE3026802, BRACE3031185, BRACE3031743, BRACE3032385, BRACE3032631, BRACE3039358, BRACE3040863, BRACE3042432, BRACE3045981, BRAMY2031516, BRAMY3002329, BRAMY3004126, BRAMY3005912, BRAMY3008436, BRAWH2000256, BRAWH2002333, BRAWH2004078, BRAWH2010364, BRAWH2010619, BRAWH2011796, BRAWH2011812, BRAWH2011958, BRAWH2012054, BRAWH2012866, BRAWH2013955, BRAWH2014053, BRAWH2016209, BRAWH2016223, BRAWH2016305, BRAWH2016514, BRAWH2016562, BRAWH2016785, BRAWH3000446, BRAWH3000884, BRAWH3001053, BRAWH3001638, BRAWH3001783, BRAWH3001833, BRAWH3003244, BRAWH3003573, BRAWH3003975, BRAWH3004335, BRAWH3004350, BRAWH3005037, BRAWH3005886, BRAWH3005892, BRAWH3005896, BRAWH3008167, BRAWH3008559, BRAWH3008867, BRAWH3009961, BRAWH3010461, BRAWH3010602, BRAWH3010657, BRAWH3010726, BRAWH3010833, BRAWH3011101, BRAWH3011331, BRAWH3011402, BRAWH3011577, BRAWH3011623, BRAWH3011685, BRAWH3011907, BRAWH3011929, BRAWH3012005, BRAWH3012662, BRAWH3012779, BRAWH3013009, BRAWH3013049, BRAWH3013264, BRAWH3013508, BRAWH3014609, BRAWH3014639, BRAWH3015017, BRAWH3015175, BRAWH3015610, BRAWH3015825, BRAWH3016123, BRAWH3016715, BRAWH3017180, BRAWH3017259, BRAWH3017260, BRAWH3017477, BRAWH3017980, BRAWH3018063, BRAWH3018369, BRAWH3018548, BRAWH3018969, BRAWH3019026, BRAWH3019529, BRAWH3019594, BRAWH3019820, BRAWH3020200, BRAWH3020318, BRAWH3020884, BRAWH3020928, BRAWH3021012, BRAWH3021574, BRAWH3021580, BRAWH3021641, BRAWH3021643, BRAWH3021724, BRAWH3022347, BRAWH3022431, BRAWH3022459, BRAWH3022542, BRAWH3022651, BRAWH3022719, BRAWH3022900, BRAWH3023156, BRAWH3023168, BRAWH3023172, BRAWH3023274, BRAWH3023421, BRAWH3024186, BRAWH3024231, BRAWH3024242, BRAWH3024506, BRAWH3024989, BRAWH3026349, BRAWH3026938, BRAWH3027420, BRAWH3027440, BRAWH3027533, BRAWH3027574, BRAWH3027607, BRAWH3027616, BRAWH3027675, BRAWH3027806, BRAWH3027880, BRAWH3028202, BRAWH3028223, BRAWH3028461, BRAWH3028754, BRAWH3028796, BRAWH3029313, BRAWH3029385, BRAWH3029538, BRAWH3029806, BRAWH3030772, BRAWH3030810, BRAWH3030910, BRAWH3031054, BRAWH3031342, BRAWH3031710, BRAWH3032298, BRAWH3032340, BRAWH3032571, BRAWH3033117, BRAWH3033293, BRAWH3033448, BRAWH3033513, BRAWH3034097, BRAWH3034114, BRAWH3034134, BRAWH3034668, BRAWH3034743, BRAWH3034775, BRAWH3034890, BRAWH3035403, BRAWH3035904, BRAWH3035914, BRAWH3035936, BRAWH3036077, BRAWH3036247, BRAWH3036270, BRAWH3036334, BRAWH3036561, BRAWH3037265, BRAWH3037394, BRAWH3037428, BRAWH3037533, BRAWH3037979, BRAWH3038055, BRAWH3038230, BRAWH3038252, BRAWH3038324, BRCAN2010665, BRCAN2022126, BRCAN2025093, BRCOC2012386, BRHIP2015153, BRHIP2027077, BRHIP2029643, BRHIP3001573, BRHIP3002000, BRHIP3003063, BRHIP3003984, BRHIP3004774, BRHIP3007223, BRHIP3007409, BRHIP3008320, BRHIP3014675, BRHIP3017855, BRHIP3018784, BRHIP3020046, BRHIP3021019, BRHIP3028246, BRHIP3028570, BRSSN2004303, BRSSN2004710, BRSSN2008464, BRSSN2011843, BRSSN2012157, BRSSN2012198, BRSSN2013696, BRSSN2015497, BRSSN2018218, BRSTN2010089, BRSTN2011961, BRSTN2012069, BRSTN2016992, BRSTN2017104, BRTHA2033155, BRTHA3003736, BRTHA3005988, BRTHA3010135, BRTHA3010212, BRTHA3011194, BRTHA3011265, BRTHA3017791, BRTHA3020771, BRTHA3021971, BRTHA3023403, CTONG2006235, CTONG2009033, CTONG2011801, CTONG2020582, D90ST2003106, DFNES2001829, KIDNE2010049, MESAN2017133, NT2RI2009233, NT2RI2015533, NT2RI3005923, NT2RI3009524, NT2RP7007387, NT2RP8001605, NT2RP8007920, NTONG2008483, OCBBF2003518, OCBBF2018618, OCBBF3001333, OCBBF3004487, PLACE7004103, PLACE7006240, PROST2007444, SMINT2009292, T1ESE2000904, TBAES2007428, TESTI2005112, TESTI2021654, TESTI4002072, TESTI4002774, TESTI4002799, TESTI4003602, TESTI4004210, TESTI4005399, TESTI4005653, TESTI4006441, TESTI4014908, TESTI4022158, THYMU3000776, THYMU3002887, THYMU3003350, THYMU3021586, THYMU3026000, THYMU3026306, THYMU3026350, THYMU3032798, THYMU3032867, THYMU3037827, THYMU3038214, THYMU3044075, TRACH2013585, TRACH3002752, TRACH3003037, TRACH3003872, TRACH3004424, TRACH3006717, TRACH3007625, TRACH3007689, TRACH3008632, TRACH3009008, TRACH3010079, TRACH3016805, TRACH3016885, TRACH3022198, TRACH3024342, TRACH3024671, TRACH3026303, TRACH3026676, TRACH3028855, TRACH3032570, TRACH3036932, TRACH3038399, UTERU3010409, UTERU3013167

BRACE3046450, BRAWH3013197, BRAWH3028645, BRTHA3004432, TRACH1000193

[0600] These genes are involved in Parkinson's disease.

Genes Involved in Short-Term Memory and Dementia

[0601] In the brain, the hippocampus is a highly important memory-related area. The hippocampus functions to establish a memory by judging whether acquired information is necessary, and then accumulating the memory in another area of the brain. According to clinical findings, patients can retain a new memory for only about five minutes with an abnormal, or at the worst without a hippocampus. Some dementia patients are presumed to have hippocampus abnormalities. Thus, genes whose expression levels differ between tissues of the whole brain and the hippocampus are expected to be involved in memory or dementia. Such genes can be used to elucidate the mechanism underlying the memory and in gene diagnosis. cDNA libraries derived from the hippocampus (BRHIP) and from the whole tissues of a normal brain (BRAWH) were analyzed and compared (Table 6). Genes whose expression levels differed between the two were the 438 clones and five clones listed below.

[0602] ASTRO2016114, BRACE2002392, BRACE2012528, BRACE2017359, BRACE2017397, BRACE2017844, BRACE3004046, BRACE3004371, BRACE3004767, BRACE3009416, BRACE3022340, BRACE3027931, BRACE3029021, BRACE3031185, BRACE3031743, BRACE3032385, BRACE3032631, BRACE3036156, BRACE3039358, BRACE3040863, BRACE3042326, BRACE3042432, BRACE3045078, BRACE3045981, BRAMY2031516, BRAMY3002329, BRAMY3004126, BRAMY3005184, BRAMY3005912, BRAMY3007078, BRAMY3008436, BRAMY4000915, BRAWH2000256, BRAWH2002333, BRAWH2004078, BRAWH2010364, BRAWH2010619, BRAWH2011796, BRAWH2011812, BRAWH2011958, BRAWH2012054, BRAWH2012866, BRAWH2013955, BRAWH2014053, BRAWH2016209, BRAWH2016223, BRAWH2016305, BRAWH2016514, BRAWH2016562, BRAWH2016785, BRAWH3000446, BRAWH3000884, BRAWH3001053, BRAWH3001638, BRAWH3001783, BRAWH3001833, BRAWH3003244, BRAWH3003573, BRAWH3003975, BRAWH3004335, BRAWH3004350, BRAWH3005037, BRAWH3005886, BRAWH3005892, BRAWH3005896, BRAWH3008167, BRAWH3008559, BRAWH3008867, BRAWH3009961, BRAWH3010461, BRAWH3010602, BRAWH3010657, BRAWH3010726, BRAWH3010833, BRAWH3011101, BRAWH3011331, BRAWH3011402, BRAWH3011577, BRAWH3011623, BRAWH3011685, BRAWH3011907, BRAWH3011929, BRAWH3012005, BRAWH3012662, BRAWH3012779, BRAWH3013009, BRAWH3013049, BRAWH3013264, BRAWH3013508, BRAWH3014609, BRAWH3014639, BRAWH3015017, BRAWH3015175, BRAWH3015610, BRAWH3015825, BRAWH3016123, BRAWH3016715, BRAWH3017180, BRAWH3017259, BRAWH3017260, BRAWH3017477, BRAWH3017980, BRAWH3018063, BRAWH3018369, BRAWH3018548, BRAWH3018969, BRAWH3019026, BRAWH3019529, BRAWH3019594, BRAWH3019820, BRAWH3020200, BRAWH3020318, BRAWH3020884, BRAWH3020928, BRAWH3021012, BRAWH3021574, BRAWH3021580, BRAWH3021641, BRAWH3021643, BRAWH3021724, BRAWH3022347, BRAWH3022431, BRAWH3022459, BRAWH3022542, BRAWH3022651, BRAWH3022719, BRAWH3022900, BRAWH3023156, BRAWH3023168, BRAWH3023172, BRAWH3023274, BRAWH3023421, BRAWH3024186, BRAWH3024231, BRAWH3024242, BRAWH3024506, BRAWH3024989, BRAWH3026349, BRAWH3026938, BRAWH3027420, BRAWH3027440, BRAWH3027533, BRAWH3027574, BRAWH3027607, BRAWH3027616, BRAWH3027675, BRAWH3027806, BRAWH3027880, BRAWH3028202, BRAWH3028223, BRAWH3028461, BRAWH3028754, BRAWH3028796, BRAWH3029313, BRAWH3029385, BRAWH3029538, BRAWH3029806, BRAWH3030772, BRAWH3030810, BRAWH3030910, BRAWH3031054, BRAWH3031342, BRAWH3031710, BRAWH3032298, BRAWH3032340, BRAWH3032571, BRAWH3033117, BRAWH3033293, BRAWH3033448, BRAWH3033513, BRAWH3034097, BRAWH3034114, BRAWH3034134, BRAWH3034668, BRAWH3034743, BRAWH3034775, BRAWH3034890, BRAWH3035403, BRAWH3035904, BRAWH3035914, BRAWH3035936, BRAWH3036077, BRAWH3036247, BRAWH3036270, BRAWH3036334, BRAWH3036561, BRAWH3037265, BRAWH3037394, BRAWH3037428, BRAWH3037533, BRAWH3037979, BRAWH3038055, BRAWH3038230, BRAWH3038252, BRAWH3038324, BRCAN2010665, BRCAN2019953, BRCAN2022126, BRCAN2025093, BRCOC2012386, BRHIP2006819, BRHIP2006921, BRHIP2008756, BRHIP2009177, BRHIP2011199, BRHIP2013958, BRHIP2015153, BRHIP2016125, BRHIP2017714, BRHIP2020930, BRHIP2021929, BRHIP2023735, BRHIP2024941, BRHIP2026346, BRHIP2027077, BRHIP2027563, BRHIP2029529, BRHIP2029643, BRHIP2029663, BRHIP3000626, BRHIP3000859, BRHIP3001076, BRHIP3001141, BRHIP3001338, BRHIP3001360, BRHIP3001481, BRHIP3001573, BRHIP3001878, BRHIP3002000, BRHIP3002114, BRHIP3002124, BRHIP3002141, BRHIP3002363, BRHIP3002691, BRHIP3002920, BRHIP3002931, BRHIP3003063, BRHIP3003126, BRHIP3003306, BRHIP3003340, BRHIP3003395, BRHIP3003688, BRHIP3003795, BRHIP3003845, BRHIP3003961, BRHIP3003984, BRHIP3004215, BRHIP3004710, BRHIP3004725, BRHIP3004774, BRHIP3004786, BRHIP3005037, BRHIP3005142, BRHIP3005231, BRHIP3005307, BRHIP3005673, BRHIP3005801, BRHIP3005944, BRHIP3006279, BRHIP3006294, BRHIP3006449, BRHIP3006786, BRHIP3006950, BRHIP3007172, BRHIP3007195, BRHIP3007223, BRHIP3007291, BRHIP3007409, BRHIP3007424, BRHIP3007609, BRHIP3007960, BRHIP3008082, BRHIP3008320, BRHIP3008714, BRHIP3009672, BRHIP3009753, BRHIP3010289, BRHIP3010916, BRHIP3011082, BRHIP3011269, BRHIP3011460, BRHIP3011567, BRHIP3011831, BRHIP3012185, BRHIP3012289, BRHIP3012357, BRHIP3012736, BRHIP3012997, BRHIP3013078, BRHIP3013588, BRHIP3013698, BRHIP3014675, BRHIP3015854, BRHIP3016032, BRHIP3016421, BRHIP3017109, BRHIP3017146, BRHIP3017256, BRHIP3017558, BRHIP3017855, BRHIP3018784, BRHIP3019643, BRHIP3019824, BRHIP3019880, BRHIP3019956, BRHIP3020046, BRHIP3020155, BRHIP3020733, BRHIP3021019, BRHIP3021499, BRHIP3021987, BRHIP3022656, BRHIP3023922, BRHIP3024703, BRHIP3024820, BRHIP3025795, BRHIP3025844, BRHIP3026231, BRHIP3026651, BRHIP3027160, BRHIP3027191, BRHIP3027651, BRHIP3027947, BRHIP3028246, BRHIP3028570, BRHIP3028742, BRSTN2010089, BRSTN2012069, BRSTN2016992, BRTHA2001953, BRTHA2008502, BRTHA2031517, BRTHA2033155, BRTHA2035743, BRTHA3003417, BRTHA3003736, BRTHA3005988, BRTHA3007662, BRTHA3010135, BRTHA3010212, BRTHA3011194, BRTHA3011265, BRTHA3012265, BRTHA3017791, BRTHA3020771, BRTHA3021971, BRTHA3023403, CHONS2002829, CTONG2006235, CTONG2009033, CTONG2020582, D90ST2003106, DFNES2001829, KIDNE2010049, LIVER2008465, MESAN2017133, NT2RI2009233, NT2RI2010795, NT2RI2015533, NT2RI3005923, NT2RI3009524, NT2RP7007387, NT2RP8001605, NT2RP8007920, NTONG2008483, OCBBF2000831, OCBBF2003518, OCBBF2018618, OCBBF3001333, OCBBF3004487, PLACE7004103, PLACE7006240, PROST2007444, SMINT2012179, SYNOV4004210, TBAES2007428, TESTI2005112, TESTI2005564, TESTI2021654, TESTI4001569, TESTI4002072, TESTI4002774, TESTI4002799, TESTI4003602, TESTI4003703, TESTI4003944, TESTI4004210, TESTI4005399, TESTI4005653, TESTI4006441, TESTI4014908, TESTI4022158, TESTI4029297, THYMU3000776, THYMU3002887, THYMU3003007, THYMU3003350, THYMU3007308, THYMU3008105, THYMU3021586, THYMU3026000, THYMU3026306, THYMU3026350, THYMU3032798, THYMU3032867, THYMU3034671, THYMU3037827, THYMU3038214, THYMU3044075, TKIDN2000319, TRACH2013585, TRACH3002752, TRACH3003037, TRACH3003872, TRACH3004424, TRACH3006717, TRACH3007625, TRACH3007689, TRACH3008632, TRACH3009008, TRACH3010079, TRACH3016805, TRACH3016885, TRACH3022198, TRACH3024342, TRACH3024671, TRACH3025316, TRACH3026303, TRACH3026676, TRACH3028855, TRACH3032570, TRACH3036932, TRACH3038399, TSTOM2000235, UTERU3005422, UTERU3010409, UTERU3013167, UTERU3016273 BRACE3046450, BRAWH3013197, BRAWH3028645, BRTHA3004432, TRACH1000193

[0603] These genes are involved in memory and dementia.

Genes Involved in Equilibrium Sense and Movement Function

[0604] The cerebellum is the center of equilibrium sense, muscular movement, and motor learning. This area is thought to be involved in motor control, and smooth movements are achieved unconsciously due to cerebellum action. Recent studies have elucidated that the cerebellum participates in not only simple movements but also in establishing higher-order movements such as reading and writing. Thus, genes whose expression levels differ between tissues of the whole brain and the cerebellum are expected to be involved in equilibrium sense or motor function, which can be useful for elucidating the molecular mechanism controlled by the brain. cDNA libraries derived from the cerebellum (BRACE) and from the whole tissues of a normal brain (BRAWH) were analyzed and compared (Table 7). Genes whose expression levels differed between the two were the 502 clones and nine clones listed below.

[0605] ASTRO2016114, BRACE1000475, BRACE2002392, BRACE2003628, BRACE2005991, BRACE2010336, BRACE2012528, BRACE2012625, BRACE2012833, BRACE2012838, BRACE2012936, BRACE2012947, BRACE2013009, BRACE2013126, BRACE2013132, BRACE2016896, BRACE2017359, BRACE2017397, BRACE2017580, BRACE2017844, BRACE2017872, BRACE2017992, BRACE2019348, BRACE2023633, BRACE2023744, BRACE2025452, BRACE2026404, BRACE2027312, BRACE2027382, BRACE2028956, BRACE2030039, BRACE2032584, BRACE2033128, BRACE2034434, BRACE2035120, BRACE2035191, BRACE2039362, BRACE2039607, BRACE2042541, BRACE2046976, BRACE2047232, BRACE2047975, BRACE3001403, BRACE3001973, BRACE3002344, BRACE3002541, BRACE3002756, BRACE3003866, BRACE3004046, BRACE3004371, BRACE3004767, BRACE3004887, BRACE3004981, BRACE3005870, BRACE3005903, BRACE3006553, BRACE3007649, BRACE3007869, BRACE3009075, BRACE3009265, BRACE3009392, BRACE3009416, BRACE3009539, BRACE3010702, BRACE3011447, BRACE3011774, BRACE3013418, BRACE3013874, BRACE3013986, BRACE3014523, BRACE3014714, BRACE3015090, BRACE3015898, BRACE3016020, BRACE3016167, BRACE3016580, BRACE3016788, BRACE3016810, BRACE3016862, BRACE3017253, BRACE3018083, BRACE3019570, BRACE3019611, BRACE3019817, BRACE3019941, BRACE3020356, BRACE3020669, BRACE3021430, BRACE3021517, BRACE3021805, BRACE3022051, BRACE3022303, BRACE3022312, BRACE3022340, BRACE3022847, BRACE3023604, BRACE3024379, BRACE3024444, BRACE3024497, BRACE3024537, BRACE3024879, BRACE3025627, BRACE3025719, BRACE3026161, BRACE3026290, BRACE3026345, BRACE3026456, BRACE3026802, BRACE3026844, BRACE3026947, BRACE3027256, BRACE3027931, BRACE3028360, BRACE3028895, BRACE3028998, BRACE3029005, BRACE3029021, BRACE3029205, BRACE3029447, BRACE3030538, BRACE3031161, BRACE3031184, BRACE3031185, BRACE3031315, BRACE3031372, BRACE3031579, BRACE3031728, BRACE3031743, BRACE3031843, BRACE3032385, BRACE3032537, BRACE3032538, BRACE3032631, BRACE3032980, BRACE3033525, BRACE3034183, BRACE3034389, BRACE3034964, BRACE3034993, BRACE3035168, BRACE3036156, BRACE3036271, BRACE3036283, BRACE3037612, BRACE3037637, BRACE3037803, BRACE3038012, BRACE3038030, BRACE3038570, BRACE3038760, BRACE3039288, BRACE3039358, BRACE3039378, BRACE3039454, BRACE3040012, BRACE3040239, BRACE3040504, BRACE3040644, BRACE3040863, BRACE3041059, BRACE3041162, BRACE3041827, BRACE3042046, BRACE3042210, BRACE3042326, BRACE3042409, BRACE3042432, BRACE3042594, BRACE3043597, BRACE3044090, BRACE3044172, BRACE3044247, BRACE3044377, BRACE3044495, BRACE3045078, BRACE3045145, BRACE3045424, BRACE3045708, BRACE3045981, BRACE3046049, BRACE3046152, BRACE3046294, BRACE3046466, BRACE3046491, BRACE3046609, BRACE3046837, BRACE3046855, BRACE3046966, BRACE3047018, BRACE3047482, BRACE3047801, BRAMY2031516, BRAMY3002329, BRAMY3004126, BRAMY3004364, BRAMY3005912, BRAMY3008436, BRAMY3009491, BRAWH2000256, BRAWH2002333, BRAWH2004078, BRAWH2010364, BRAWH2010619, BRAWH2011796, BRAWH2011812, BRAWH2011958, BRAWH2012054, BRAWH2012866, BRAWH2013955, BRAWH2014053, BRAWH2016209, BRAWH2016223, BRAWH2016305, BRAWH2016514, BRAWH2016562, BRAWH2016785, BRAWH3000446, BRAWH3000884, BRAWH3001053, BRAWH3001638, BRAWH3001783, BRAWH3001833, BRAWH3003244, BRAWH3003573, BRAWH3003975, BRAWH3004335, BRAWH3004350, BRAWH3005037, BRAWH3005886, BRAWH3005892, BRAWH3005896, BRAWH3008167, BRAWH3008559, BRAWH3008867, BRAWH3009961, BRAWH3010461, BRAWH3010602, BRAWH3010657, BRAWH3010726, BRAWH3010833, BRAWH3011101, BRAWH3011331, BRAWH3011402, BRAWH3011577, BRAWH3011623, BRAWH3011685, BRAWH3011907, BRAWH3011929, BRAWH3012005, BRAWH3012662, BRAWH3012779, BRAWH3013009, BRAWH3013049, BRAWH3013264, BRAWH3013508, BRAWH3014609, BRAWH3014639, BRAWH3015017, BRAWH3015175, BRAWH3015610, BRAWH3015825, BRAWH3016123, BRAWH3016715, BRAWH3017180, BRAWH3017259, BRAWH3017260, BRAWH3017477, BRAWH3017980, BRAWH3018063, BRAWH3018369, BRAWH3018548, BRAWH3018969, BRAWH3019026, BRAWH3019529, BRAWH3019594, BRAWH3019820, BRAWH3020200, BRAWH3020318, BRAWH3020884, BRAWH3020928, BRAWH3021012, BRAWH3021574, BRAWH3021580, BRAWH3021641, BRAWH3021643, BRAWH3021724, BRAWH3022347, BRAWH3022431, BRAWH3022459, BRAWH3022542, BRAWH3022651, BRAWH3022719, BRAWH3022900, BRAWH3023156, BRAWH3023168, BRAWH3023172, BRAWH3023274, BRAWH3023421, BRAWH3024186, BRAWH3024231, BRAWH3024242, BRAWH3024506, BRAWH3024989, BRAWH3026349, BRAWH3026938, BRAWH3027420, BRAWH3027440, BRAWH3027533, BRAWH3027574, BRAWH3027607, BRAWH3027616, BRAWH3027675, BRAWH3027806, BRAWH3027880, BRAWH3028202, BRAWH3028223, BRAWH3028461, BRAWH3028754, BRAWH3028796, BRAWH3029313, BRAWH3029385, BRAWH3029538, BRAWH3029806, BRAWH3030772, BRAWH3030810, BRAWH3030910, BRAWH3031054, BRAWH3031342, BRAWH3031710, BRAWH3032298, BRAWH3032340, BRAWH3032571, BRAWH3033117, BRAWH3033293, BRAWH3033448, BRAWH3033513, BRAWH3034097, BRAWH3034114, BRAWH3034134, BRAWH3034668, BRAWH3034743, BRAWH3034775, BRAWH3034890, BRAWH3035403, BRAWH3035904, BRAWH3035914, BRAWH3035936, BRAWH3036077, BRAWH3036247, BRAWH3036270, BRAWH3036334, BRAWH3036561, BRAWH3037265, BRAWH3037394, BRAWH3037428, BRAWH3037533, BRAWH3037979, BRAWH3038055, BRAWH3038230, BRAWH3038252, BRAWH3038324, BRCAN2010665, BRCAN2019953, BRCAN2022126, BRCAN2025093, BRCOC2012386, BRHIP2015153, BRHIP2027077, BRHIP2029643, BRHIP3001360, BRHIP3001573, BRHIP3002000, BRHIP3002114, BRHIP3003063, BRHIP3003126, BRHIP3003961, BRHIP3003984, BRHIP3004215, BRHIP3004774, BRHIP3005801, BRHIP3007223, BRHIP3007409, BRHIP3008320, BRHIP3014675, BRHIP3017855, BRHIP3018784, BRHIP3021019, BRHIP3028246, BRHIP3028570, BRSSN2011843, BRSSN2013696, BRSTN2010089, BRSTN2011961, BRSTN2012069, BRSTN2016992, BRTHA2033155, BRTHA2035743, BRTHA3003736, BRTHA3005988, BRTHA3009858, BRTHA3010135, BRTHA3010212, BRTHA3010530, BRTHA3011194, BRTHA3011265, BRTHA3011998, BRTHA3017791, BRTHA3020771, BRTHA3021708, BRTHA3021971, BRTHA3023403, CHONS2002829, CTONG2006235, CTONG2009033, CTONG2020582, CTONG2027959, D90ST2003106, DFNES2001829, KIDNE2010049, KIDNE2017153, LIVER2008465, MESAN2017133, NOVAR2000783, NT2RI2009233, NT2RI2015533, NT2RI3005923, NT2RI3009524, NT2RP7007387, NT2RP8001605, NT2RP8007920, NT2RP8009119, NTONG2008483, NTONG2009468, OCBBF2003518, OCBBF2014745, OCBBF2018618, OCBBF3001333, OCBBF3004487, PLACE7004103, PLACE7006240, PROST2007444, TBAES2007428, TESTI2005112, TESTI2018867, TESTI2021654, TESTI4002072, TESTI4002774, TESTI4002799, TESTI4003602, TESTI4003703, TESTI4004210, TESTI4005013, TESTI4005399, TESTI4005653, TESTI4006441, TESTI4014908, TESTI4022158, TESTI4029297, TESTI4032913, TESTI4043223, THYMU3000776, THYMU3002887, THYMU3003350, THYMU3007308, THYMU3021586, THYMU3026000, THYMU3026306, THYMU3026350, THYMU3032798, THYMU3032867, THYMU3033626, THYMU3034671, THYMU3037827, THYMU3038214, THYMU3044075, TLIVE2007736, TRACH2013585, TRACH3002752, TRACH3003037, TRACH3003872, TRACH3004424, TRACH3006717, TRACH3007625, TRACH3007689, TRACH3007995, TRACH3008632, TRACH3009008, TRACH3010079, TRACH3016805, TRACH3016885, TRACH3024342, TRACH3024671, TRACH3026303, TRACH3026676, TRACH3028855, TRACH3032570, TRACH3036932, TRACH3038399, UTERU3000670, UTERU3010409, UTERU3013167, UTERU3015011 BRACE3002184, BRACE3026993, BRACE3046450, BRAMY3008096, BRAWH3013197, BRAWH3028645, BRTHA3004432, TESTI4002988, TRACH1000193

[0606] These genes are involved in equilibrium sense or motor function.

Genes Involved in Signaling from Sensory Organs

[0607] The thalamus is an area which comprises many neurons strongly connected to the cerebrum, and which transmits sensory information from the spinal cord or such to the responsible area of the cerebrum. The thalamus also controls the direction of movement from the cerebrum. For example, the thalamus resolves vision into the elements of size, shape, and color, and resolves sound into volume and sweetness or harshness to the ear, and then transmits this information to the sensory area of the cerebral cortex. Thus, genes whose expression levels differ between tissues of the whole brain and the thalamus are expected to be involved in signaling from sensory organs. These genes can be used to elucidate the molecular mechanism underlying signaling controlled by the brain. cDNA libraries derived from the thalamus (BRTHA) and from whole tissues of a normal brain (BRAWH) were analyzed and compared (Table 8). Genes whose expression levels differed between the two were the 440 clones and eight clones listed below.

[0608] ASTRO2008972, ASTRO2016114, BLADE2004849, BRACE2002392, BRACE2012528, BRACE2019348, BRACE3004371, BRACE3004767, BRACE3019941, BRACE3022312, BRACE3022340, BRACE3031185, BRACE3031743, BRACE3032385, BRACE3032631, BRACE3036156, BRACE3039358, BRACE3040863, BRACE3042432, BRACE3045981, BRAMY2031516, BRAMY3002329, BRAMY3004126, BRAMY3005912, BRAMY3008436, BRAMY3009556, BRAMY3010654, BRAMY4001863, BRAWH2000256, BRAWH2002333, BRAWH2004078, BRAWH2010364, BRAWH2010619, BRAWH2011796, BRAWH2011812, BRAWH2011958, BRAWH2012054, BRAWH2012866, BRAWH2013955, BRAWH2014053, BRAWH2016209, BRAWH2016223, BRAWH2016305, BRAWH2016514, BRAWH2016562, BRAWH2016785, BRAWH3000446, BRAWH3000884, BRAWH3001053, BRAWH3001638, BRAWH3001783, BRAWH3001833, BRAWH3003244, BRAWH3003573, BRAWH3003975, BRAWH3004335, BRAWH3004350, BRAWH3005037, BRAWH3005886, BRAWH3005892, BRAWH3005896, BRAWH3008167, BRAWH3008559, BRAWH3008867, BRAWH3009961, BRAWH3010461, BRAWH3010602, BRAWH3010657, BRAWH3010726, BRAWH3010833, BRAWH3011101, BRAWH3011331, BRAWH3011402, BRAWH3011577, BRAWH3011623, BRAWH3011685, BRAWH3011907, BRAWH3011929, BRAWH3012005, BRAWH3012662, BRAWH3012779, BRAWH3013009, BRAWH3013049, BRAWH3013264, BRAWH3013508, BRAWH3014609, BRAWH3014639, BRAWH3015017, BRAWH3015175, BRAWH3015610, BRAWH3015825, BRAWH3016123, BRAWH3016715, BRAWH3017180, BRAWH3017259, BRAWH3017260, BRAWH3017477, BRAWH3017980, BRAWH3018063, BRAWH3018369, BRAWH3018548, BRAWH3018969, BRAWH3019026, BRAWH3019529, BRAWH3019594, BRAWH3019820, BRAWH3020200, BRAWH3020318, BRAWH3020884, BRAWH3020928, BRAWH3021012, BRAWH3021574, BRAWH3021580, BRAWH3021641, BRAWH3021643, BRAWH3021724, BRAWH3022347, BRAWH3022431, BRAWH3022459, BRAWH3022542, BRAWH3022651, BRAWH3022719, BRAWH3022900, BRAWH3023156, BRAWH3023168, BRAWH3023172, BRAWH3023274, BRAWH3023421, BRAWH3024186, BRAWH3024231, BRAWH3024242, BRAWH3024506, BRAWH3024989, BRAWH3026349, BRAWH3026938, BRAWH3027420, BRAWH3027440, BRAWH3027533, BRAWH3027574, BRAWH3027607, BRAWH3027616, BRAWH3027675, BRAWH3027806, BRAWH3027880, BRAWH3028202, BRAWH3028223, BRAWH3028461, BRAWH3028754, BRAWH3028796, BRAWH3029313, BRAWH3029385, BRAWH3029538, BRAWH3029806, BRAWH3030772, BRAWH3030810, BRAWH3030910, BRAWH3031054, BRAWH3031342, BRAWH3031710, BRAWH3032298, BRAWH3032340, BRAWH3032571, BRAWH3033117, BRAWH3033293, BRAWH3033448, BRAWH3033513, BRAWH3034097, BRAWH3034114, BRAWH3034134, BRAWH3034668, BRAWH3034743, BRAWH3034775, BRAWH3034890, BRAWH3035403, BRAWH3035904, BRAWH3035914, BRAWH3035936, BRAWH3036077, BRAWH3036247, BRAWH3036270, BRAWH3036334, BRAWH3036561, BRAWH3037265, BRAWH3037394, BRAWH3037428, BRAWH3037533, BRAWH3037979, BRAWH3038055, BRAWH3038230, BRAWH3038252, BRAWH3038324, BRCAN2002892, BRCAN2010665, BRCAN2020234, BRCAN2022126, BRCAN2025093, BRCOC2006164, BRCOC2012386, BRHIP2013958, BRHIP2015153, BRHIP2027077, BRHIP3001573, BRHIP3002000, BRHIP3002691, BRHIP3002920, BRHIP3003063, BRHIP3003961, BRHIP3003984, BRHIP3004215, BRHIP3004774, BRHIP3007223, BRHIP3007409, BRHIP3008320, BRHIP3014675, BRHIP3017855, BRHIP3018784, BRHIP3020046, BRHIP3021019, BRHIP3028246, BRHIP3028570, BRSSN2015497, BRSTN2010089, BRSTN2011961, BRSTN2012069, BRSTN2016992, BRTHA2000969, BRTHA2001304, BRTHA2001953, BRTHA2002091, BRTHA2003759, BRTHA2005448, BRTHA2006720, BRTHA2008502, BRTHA2008598, BRTHA2010672, BRTHA2012189, BRTHA2014647, BRTHA2018304, BRTHA2019726, BRTHA2019743, BRTHA2020400, BRTHA2020566, BRTHA2020642, BRTHA2020695, BRTHA2020721, BRTHA2020781, BRTHA2020910, BRTHA2021212, BRTHA2021440, BRTHA2021450, BRTHA2022074, BRTHA2022914, BRTHA2022968, BRTHA2023402, BRTHA2023437, BRTHA2024177, BRTHA2024354, BRTHA2024712, BRTHA2025869, BRTHA2026071, BRTHA2026290, BRTHA2026311, BRTHA2027227, BRTHA2027229, BRTHA2027250, BRTHA2028297, BRTHA2029969, BRTHA2030036, BRTHA2030213, BRTHA2031517, BRTHA2031917, BRTHA2032763, BRTHA2033122, BRTHA2033155, BRTHA2033320, BRTHA2033469, BRTHA2033683, BRTHA2034281, BRTHA2034576, BRTHA2035743, BRTHA2036055, BRTHA2036295, BRTHA2037247, BRTHA2038279, BRTHA2038345, BRTHA2038353, BRTHA3000456, BRTHA3002411, BRTHA3003225, BRTHA3003417, BRTHA3003736, BRTHA3005988, BRTHA3006593, BRTHA3007469, BRTHA3007662, BRTHA3009858, BRTHA3010135, BRTHA3010212, BRTHA3010469, BRTHA3010530, BRTHA3010540, BRTHA3010717, BRTHA3011187, BRTHA3011194, BRTHA3011229, BRTHA3011265, BRTHA3011306, BRTHA3011361, BRTHA3011510, BRTHA3011892, BRTHA3011998, BRTHA3012265, BRTHA3013860, BRTHA3013882, BRTHA3014000, BRTHA3014105, BRTHA3014507, BRTHA3014547, BRTHA3014835, BRTHA3014854, BRTHA3014920, BRTHA3016616, BRTHA3017791, BRTHA3018409, BRTHA3018623, BRTHA3019183, BRTHA3020369, BRTHA3020771, BRTHA3021569, BRTHA3021708, BRTHA3021786, BRTHA3021971, BRTHA3022641, BRTHA3023403, BRTHA3023590, BRTHA3023929, BRTHA3024600, BRTHA3025073, BRTHA3026161, BRTHA3026180, BRTHA3026556, BRTHA3026916, BRTHA3027171, BRTHA3027318, BRTHA3027638, BRTHA3027820, BRTHA3027879, BRTHA3027957, BRTHA3028339, BRTHA3028505, CHONS2002829, CTONG2006235, CTONG2009033, CTONG2011801, CTONG2020582, D90ST2003106, DFNES2001829, KIDNE2010049, LIVER2008465, MESAN2017133, NT2RI2009233, NT2RI2010795, NT2RI2015533, NT2RI3005923, NT2RI3009524, NT2RP7007387, NT2RP8001605, NT2RP8007920, NTONG2008483, OCBBF2003518, OCBBF2009536, OCBBF2018618, OCBBF3001333, OCBBF3004487, OCBBF3008835, PLACE6003004, PLACE7004103, PLACE7006240, PROST2007444, SMINT2009292, TBAES2007428, TESTI2005112, TESTI2021654, TESTI2039342, TESTI4002072, TESTI4002774, TESTI4002799, TESTI4003602, TESTI4003703, TESTI4004210, TESTI4004695, TESTI4005399, TESTI4005653, TESTI4006441, TESTI4007965, TESTI4010979, TESTI4013474, TESTI4014908, TESTI4022158, TESTI4029297, TESTI4032913, THYMU3000776, THYMU3002887, THYMU3003350, THYMU3021586, THYMU3026000, THYMU3026306, THYMU3026350, THYMU3032798, THYMU3032867, THYMU3037827, THYMU3038214, THYMU3044075, TRACH2013585, TRACH3002752, TRACH3003037, TRACH3003872, TRACH3004424, TRACH3006717, TRACH3007625, TRACH3007689, TRACH3008508, TRACH3008632, TRACH3009008, TRACH3010079, TRACH3016805, TRACH3016885, TRACH3024342, TRACH3024671, TRACH3026303, TRACH3026676, TRACH3028855, TRACH3032570, TRACH3036932, TRACH3038399, UTERU3010409, UTERU3012414, UTERU3013167, UTERU3017995, UTERU3018172 BRACE3046450, BRAWH3013197, BRAWH3028645, BRTHA3004432, BRTHA3024233, CTONG2002832, THYMU3046350, TRACH1000193

[0609] These genes are involved in signaling from sensory organs.

Genes Involved in Emotional Reaction

[0610] The amygdala is the center of emotion in the brain. Information passing through the amygdala induces an emotional reaction, for example, panic or fear. When a strong fear reaction is produced due to the emotional evaluation of stimulus in the amygdala, the amygdala transmits an alert signal to each area of the brain. This results in various reactions such as sweating palms, palpitation, elevated blood pressure, and rapid secretion of adrenaline. In other words, the amygdala transmits signals which cause the body to be on the alert and is a tissue involved in a kind of defense instinct. Thus, genes whose expression levels differ between tissues of the whole brain and the amygdala are expected to be involved in emotional reaction. Such genes can be used to elucidate the molecular mechanism underlying emotional reaction, fear, or panic. cDNA libraries derived from the amygdale (BRAMY) and from whole tissues of a normal brain (BRAWH) were analyzed and compared (Table 9). Genes whose expression levels differed between the two were the 357 clones and nine clones listed below.

[0611] ASTRO2016114, BRACE2002392, BRACE2012528, BRACE2017397, BRACE2017844, BRACE3004371, BRACE3004767, BRACE3022340, BRACE3031185, BRACE3031315, BRACE3031743, BRACE3032385, BRACE3032631, BRACE3039358, BRACE3040863, BRACE3042432, BRACE3045981, BRAMY2015516, BRAMY2021098, BRAMY2022320, BRAMY2023939, BRAMY2025495, BRAMY2031516, BRAMY2033895, BRAMY2035801, BRAMY2036254, BRAMY2036266, BRAMY2037609, BRAMY2039630, BRAMY2040915, BRAMY2041347, BRAMY2041384, BRAMY2041507, BRAMY2044686, BRAMY2046489, BRAMY2046537, BRAMY3000692, BRAMY3001409, BRAMY3002329, BRAMY3002508, BRAMY3002886, BRAMY3004126, BRAMY3004364, BRAMY3005184, BRAMY3005656, BRAMY3005912, BRAMY3007078, BRAMY3007449, BRAMY3007471, BRAMY3008436, BRAMY3009158, BRAMY3009491, BRAMY3009556, BRAMY3009904, BRAMY3010321, BRAMY3010603, BRAMY3010654, BRAMY4000915, BRAMY4000962, BRAMY4001234, BRAMY4001652, BRAMY4001863, BRAMY4001913, BRAMY4002575, BRAMY4002628, BRAWH2000256, BRAWH2002333, BRAWH2004078, BRAWH2010364, BRAWH2010619, BRAWH2011796, BRAWH2011812, BRAWH2011958, BRAWH2012054, BRAWH2012866, BRAWH2013955, BRAWH2014053, BRAWH2016209, BRAWH2016223, BRAWH2016305, BRAWH2016514, BRAWH2016562, BRAWH2016785, BRAWH3000446, BRAWH3000884, BRAWH3001053, BRAWH3001638, BRAWH3001783, BRAWH3001833, BRAWH3003244, BRAWH3003573, BRAWH3003975, BRAWH3004335, BRAWH3004350, BRAWH3005037, BRAWH3005886, BRAWH3005892, BRAWH3005896, BRAWH3008167, BRAWH3008559, BRAWH3008867, BRAWH3009961, BRAWH3010461, BRAWH3010602, BRAWH3010657, BRAWH3010726, BRAWH3010833, BRAWH3011101, BRAWH3011331, BRAWH3011402, BRAWH3011577, BRAWH3011623, BRAWH3011685, BRAWH3011907, BRAWH3011929, BRAWH3012005, BRAWH3012662, BRAWH3012779, BRAWH3013009, BRAWH3013049, BRAWH3013264, BRAWH3013508, BRAWH3014609, BRAWH3014639, BRAWH3015017, BRAWH3015175, BRAWH3015610, BRAWH3015825, BRAWH3016123, BRAWH3016715, BRAWH3017180, BRAWH3017259, BRAWH3017260, BRAWH3017477, BRAWH3017980, BRAWH3018063, BRAWH3018369, BRAWH3018548, BRAWH3018969, BRAWH3019026, BRAWH3019529, BRAWH3019594, BRAWH3019820, BRAWH3020200, BRAWH3020318, BRAWH3020884, BRAWH3020928, BRAWH3021012, BRAWH3021574, BRAWH3021580, BRAWH3021641, BRAWH3021643, BRAWH3021724, BRAWH3022347, BRAWH3022431, BRAWH3022459, BRAWH3022542, BRAWH3022651, BRAWH3022719, BRAWH3022900, BRAWH3023156, BRAWH3023168, BRAWH3023172, BRAWH3023274, BRAWH3023421, BRAWH3024186, BRAWH3024231, BRAWH3024242, BRAWH3024506, BRAWH3024989, BRAWH3026349, BRAWH3026938, BRAWH3027420, BRAWH3027440, BRAWH3027533, BRAWH3027574, BRAWH3027607, BRAWH3027616, BRAWH3027675, BRAWH3027806, BRAWH3027880, BRAWH3028202, BRAWH3028223, BRAWH3028461, BRAWH3028754, BRAWH3028796, BRAWH3029313, BRAWH3029385, BRAWH3029538, BRAWH3029806, BRAWH3030772, BRAWH3030810, BRAWH3030910, BRAWH3031054, BRAWH3031342, BRAWH3031710, BRAWH3032298, BRAWH3032340, BRAWH3032571, BRAWH3033117, BRAWH3033293, BRAWH3033448, BRAWH3033513, BRAWH3034097, BRAWH3034114, BRAWH3034134, BRAWH3034668, BRAWH3034743, BRAWH3034775, BRAWH3034890, BRAWH3035403, BRAWH3035904, BRAWH3035914, BRAWH3035936, BRAWH3036077, BRAWH3036247, BRAWH3036270, BRAWH3036334, BRAWH3036561, BRAWH3037265, BRAWH3037394, BRAWH3037428, BRAWH3037533, BRAWH3037979, BRAWH3038055, BRAWH3038230, BRAWH3038252, BRAWH3038324, BRCAN2010665, BRCAN2022126, BRCAN2025093, BRCOC2012386, BRHIP2015153, BRHIP2027077, BRHIP3001573, BRHIP3002000, BRHIP3002691, BRHIP3003063, BRHIP3003984, BRHIP3004215, BRHIP3004774, BRHIP3005673, BRHIP3007223, BRHIP3007409, BRHIP3008320, BRHIP3012736, BRHIP3014675, BRHIP3017146, BRHIP3017855, BRHIP3018784, BRHIP3020046, BRHIP3021019, BRHIP3028246, BRHIP3028570, BRSTN2010089, BRSTN2012069, BRSTN2016992, BRTHA2026071, BRTHA2033155, BRTHA3003736, BRTHA3005988, BRTHA3010135, BRTHA3010212, BRTHA3011194, BRTHA3011265, BRTHA3017791, BRTHA3020771, BRTHA3021971, BRTHA3023403, BRTHA3026916, CHONS2002829, CTONG2006235, CTONG2009033, CTONG2020582, D90ST2003106, DFNES2001829, KIDNE2010049, MESAN2017133, NT2RI2009233, NT2RI2010795, NT2RI2015533, NT2RI3005923, NT2RI3009524, NT2RP7007387, NT2RP8001605, NT2RP8007920, NTONG2008483, OCBBF2000831, OCBBF2003518, OCBBF2018618, OCBBF2030927, OCBBF3001333, OCBBF3004487, OCBBF3009244, PLACE6008315, PLACE6010936, PLACE7004103, PLACE7006240, PROST2007444, SPLEN2012571, SYNOV4004210, SYNOV4009575, TBAES2007428, TESTI2005112, TESTI2021654, TESTI4002072, TESTI4002774, TESTI4002799, TESTI4003602, TESTI4003703, TESTI4004210, TESTI4005399, TESTI4005653, TESTI4006441, TESTI4014908, TESTI4022158, TESTI4029297, TESTI4032913, TESTI4043223, TESTI4046073, THYMU3000776, THYMU3002887, THYMU3003350, THYMU3008105, THYMU3019476, THYMU3021586, THYMU3026000, THYMU3026306, THYMU3026350, THYMU3032798, THYMU3032867, THYMU3037827, THYMU3038214, THYMU3044075, TRACH2013585, TRACH3002752, TRACH3003037, TRACH3003872, TRACH3004424, TRACH3006717, TRACH3007625, TRACH3007689, TRACH3008632, TRACH3009008, TRACH3010079, TRACH3016805, TRACH3016885, TRACH3024342, TRACH3024671, TRACH3026303, TRACH3026676, TRACH3028855, TRACH3032570, TRACH3036932, TRACH3038399, UTERU3010409, UTERU3013167 BRACE3046450, BRAMY3008096, BRAWH3013197, BRAWH3028645, BRTHA3004432, TESTI4002988, THYMU3046350, TRACH1000193, TRACH3019290

[0612] These genes are involved in emotional reaction.

Cancer-Related Genes

[0613] Cancer tissues are assumed to express a distinct set of genes distinct from normal tissues, and thus expression of these genes can contribute to carcinogenesis in tissues and cells. Thus, genes whose expression patterns in cancer tissues differ from those in normal tissues are cancer-related genes. A search was carried out for genes whose expression levels in cancer tissues differed from those in normal tissues.

[0614] The result of comparative analysis of cDNA libraries derived from breast tumor (TBAES) and normal breast (BEAST) (Table 10) showed that the genes whose expression levels differed between the two were ten and four clones as described below.

BRSTN2011961, BRSTN2012069, TBAES2003917, TBAES2005361, TBAES2007428, TBAES2007548, TBAES2007862, TESTI2005564, TESTI4017854, TRACH3016805 TBAES2004105, TBAES2007379, TBAES2007481, TBAES2008133

[0615] The result of comparative analysis of cDNA libraries derived from cervical tumor (TCERX) and normal cervical duct (CERVX) (Table 11) showed that the genes whose expression levels differed between the two were six clones as described below.

BRACE2017397, BRHIP2027077, BRSTN2011961, BRSTN2012069, CERVX2000812, CERVX2000968

[0616] The result of comparative analysis of cDNA libraries derived from colon tumor (TCOLN) and normal colon (COLON) (Table 12) showed that the genes whose expression levels were different between the two were ten clones as described below.

BRSTN2011961, BRSTN2012069, COLON2001829, COLON2001866, COLON2004351, COLON2004911, COLON2005623, COLON2005735, OCBBF3001333, SMINT2017964

[0617] The result of comparative analysis of cDNA libraries derived from esophageal tumor (TESOP) and normal esophagus (NESOP) (Table 13) showed that the genes whose expression levels were different between the two were 14 clones as described below.

BRAMY3004364, BRAWH3027533, BRHIP3007223, BRSTN2011961, BRSTN2012069, CTONG2011801, CTONG3002518, SMINT2009292, TESOP2002005, TESOP2003308, TESOP2004110, TESOP2008556, UTERU3015011, UTERU3017995

[0618] The result of comparative analysis of cDNA libraries derived from kidney tumor (TKIDN) and normal kidney (KIDNE) (Table 14) showed that the genes whose expression levels were different between the two were 43 clones as described below.

[0619] BRACE2002392, BRACE2012528, BRACE3004371, BRAMY2039630, BRAMY3004364, BRAMY3008436, BRAWH2004078, BRAWH3012662, BRAWH3021574, BRAWH3022651, BRAWH3037428, BRCAN2019953, BRCAN2022126, BRHIP3002000, BRHIP3002691, BRHIP3012997, BRHIP3020046, BRSTN2012069, BRSTN2016992, BRTHA3010212, CTONG2006235, KIDNE2004531, KIDNE2010049, KIDNE2014496, KIDNE2015987, KIDNE2016464, KIDNE2017153, KIDNE2018268, NT2RI2015533, NT2RP7007387, OCBBF3004487, PLACE6008315, SYNOV4004210, TESTI2005112, THYMU3001776, THYMU3002887, THYMU3029795, THYMU3032867, TKIDN2000319, TKIDN2003396, TKIDN2010602, TKIDN2011051, TKIDN2011160

[0620] The result of comparative analysis of cDNA libraries derived from liver tumor (TLIVE) and normal liver (LIVER) (Table 15) showed that the genes whose expression levels were different between the two were 14 and two clones as described below.

BRAWH3022651, BRCAN2020412, BRSTN2012069, BRTHA3003736, CTONG2006235, LIVER2008465, TESTI4013474, THYMU3002887, THYMU3038158, TLIVE2000142, TLIVE2001616, TLIVE2007736, TLIVE2008797, TRACH3027229

THYMU3046350, TLIVE2007192

[0621] The result of comparative analysis of cDNA libraries derived from lung tumor (TLUNG) and normal lung (HLUNG) (Table 16) showed that the genes whose expression levels were different between the two were 17 clones as described below.

BRACE3036283, BRAMY2031516, BRSTN2011961, BRSTN2012069, HLUNG2012600, MESAN2009156, NTONG2008483, PROST2007444, TESTI4003703, TESTI4005653, TESTI4013474, TESTI4029297, THYMU3001776, THYMU3033626, THYMU3034671, THYMU3041428, TRACH3022198

[0622] The result of comparative analysis of cDNA libraries derived from ovary tumor (TOVER) and normal ovary (NOVER) (Table 17) showed the genes whose expression levels were different between the two were three clones as described below.

BRSTN2012069, NOVAR2000783, THYMU3002887

[0623] The result of comparative analysis of cDNA libraries derived from stomach tumor (TSTOM) and normal stomach (STOMA) (Table 18) showed that the genes whose expression levels were different between the two were 9 clones as described below.

BRSTN2012069, CHONS2002829, STOMA2003894, STOMA2004663, THYMU3001776, TSTOM2000235, TSTOM2001571, TSTOM2002611, TSTOM2002682

[0624] The result of comparative analysis of cDNA libraries derived from uterine tumor (TUTER) and normal uterus (UTERU) (Table 19) showed that the genes whose expression levels were different between the two were 128 and three clones as described below.

[0625] BRACE2012528, BRACE2017397, BRACE3004371, BRACE3036283, BRACE3040863, BRAMY2031516, BRAMY3005184, BRAWH2004078, BRAWH3004350, BRAWH3022651, BRAWH3024186, BRAWH3029806, BRAWH3031342, BRCAN2022126, BRHIP3001076, BRHIP3002000, BRHIP3002141, BRHIP3005307, BRHIP3007223, BRHIP3017855, BRHIP3020046, BRSTN2010089, BRSTN2011961, BRSTN2012069, BRSTN2016892, BRTHA3003736, BRTHA3011265, BRTHA3023403, BRTHA3027879, CHONS2002829, CTONG2001932, CTONG2003517, CTONG2006235, CTONG2011801, CTONG3002518, DFNES2001829, KIDNE2010049, LIVER2008465, NT2RI3005923, OCBBF3001333, OCBBF3004487, PLACE6008315, PLACE7006240, PROST2007444, SPLEN2012571, SYNOV4000598, SYNOV4009575, T1ESE2000904, TESTI4002072, TESTI4002195, TESTI4002774, TESTI4002799, TESTI4003703, TESTI4003944, TESTI4005399, TESTI4005653, TESTI4024245, TESTI4029297, THYMU3002887, THYMU3021586, THYMU3026350, THYMU3032798, THYMU3034616, THYMU3034671, TRACH3003872, TRACH3005699, TRACH3006800, TRACH3008632, TRACH3009008, TUTER1000014, TUTER2001433, UTERU2000300, UTERU2014998, UTERU2016464, UTERU2016669, UTERU2020226, UTERU2022955, UTERU2023941, UTERU2024042, UTERU2027369, UTERU2028377, UTERU2029660, UTERU2035926, UTERU2037423, UTERU3000670, UTERU3001029, UTERU3001394, UTERU3001946, UTERU3004635, UTERU3005264, UTERU3005422, UTERU3006538, UTERU3006720, UTERU3007108, UTERU3009775, UTERU3010029, UTERU3010409, UTERU3010604, UTERU3010892, UTERU3010919, UTERU3011092, UTERU3011398, UTERU3011558, UTERU3011579, UTERU3011837, UTERU3012293, UTERU3012414, UTERU3012476, UTERU3012599, UTERU3012999, UTERU3013167, UTERU3013302, UTERU3014274, UTERU3014647, UTERU3014906, UTERU3015011, UTERU3015299, UTERU3015647, UTERU3015844, UTERU3016070, UTERU3016273, UTERU3016274, UTERU3016308, UTERU3017441, UTERU3017626, UTERU3017995, UTERU3018172, UTERU3018255 UTERU2017492, UTERU2025415, UTERU2036507

[0626] The result of comparative analysis of cDNA libraries derived from tongue cancer (CTONG) and normal tongue (NTONG) (Table 20) showed that the genes whose expression levels were different between the two were 67 and two clones as described below.

[0627] BRACE2012528, BRAMY4001863, BRAWH3021574, BRAWH3022651, BRAWH3024186, BRHIP2027077, BRHIP3001573, BRHIP3002000, BRHIP3007223, BRHIP3012997, BRHIP3020046, BRSSN2013696, BRSTN2011961, BRSTN2012069, BRTHA2027229, BRTHA2033155, BRTHA3011194, BRTHA3022641, CTONG2001932, CTONG2003517, CTONG2006235, CTONG2008989, CTONG2009033, CTONG2009570, CTONG2010330, CTONG2011801, CTONG2012123, CTONG2014206, CTONG2014959, CTONG2020582, CTONG2026987, CTONG2027150, CTONG2027591, CTONG2027783, CTONG2027959, CTONG3001605, CTONG3002518, CTONG3002588, CTONG3003669, CTONG3008223, NT2RI2009233, NTONG2002278, NTONG2003805, NTONG2004829, NTONG2008483, NTONG2009468, OCBBF3004487, PLACE6008315, PLACE7004103, SKNMC2003639, SPLEN2012571, SPLEN2019092, SYNOV4009575, T1ESE2000904, TESTI2005564, TESTI2018867, TESTI4002799, TESTI4005653, TESTI4032913, THYMU3021586, THYMU3047115, TRACH3006717, TRACH3007625, TRACH3016805, TRACH3036932, TRACH3038399, UTERU2000300 CTONG2002832, CTONG2003764

[0628] These genes are involved in cancer.

[0629] Further, there is a method to search for genes involved in development and differentiation, which is the expression frequency analysis in which the expression levels of genes are compared between developing and/or differentiating tissues and/or cells and adult tissues and/or cells. The genes involved in tissue development and/or differentiation are genes participating in tissue construction and expression of function, and thus are useful genes, which are available for regenerative medicine aiming at convenient regeneration of injured tissues.

[0630] By using the information of gene expression frequency gained from the database of nucleotide sequences of 1,402,069 clones as described above, genes whose expression frequencies were different between developing and/or differentiating tissues and/or cells and adult tissues and/or cells were analyzed.

[0631] The result of comparative analysis of cDNA libraries derived from fetal brain (FCBBF, FEBRA or OCBBF) and adult brain (BRACE, BRALZ, BRAMY, BRAWH, BRCAN, BRCOC, BRHIP, BRSSN, BRSTN or BRTHA) (Table 21) showed that the genes whose expression levels were different between the two were 916 and 13 clones as described below.

[0632] ASTRO2008972, ASTRO2016114, BLADE2004849, BRACE1000475, BRACE2002392, BRACE2003628, BRACE2005991, BRACE2010336, BRACE2012528, BRACE2012625, BRACE2012833, BRACE2012838, BRACE2012936, BRACE2012947, BRACE2013009, BRACE2013126, BRACE2013132, BRACE2016896, BRACE2017359, BRACE2017397, BRACE2017580, BRACE2017844, BRACE2017872, BRACE2017992, BRACE2019348, BRACE2023633, BRACE2023744, BRACE2025452, BRACE2026404, BRACE2027312, BRACE2027382, BRACE2028956, BRACE2030039, BRACE2032584, BRACE2033128, BRACE2034434, BRACE2035120, BRACE2035191, BRACE2039362, BRACE2039607, BRACE2042541, BRACE2046976, BRACE2047232, BRACE2047975, BRACE3001403, BRACE3001973, BRACE3002344, BRACE3002541, BRACE3002756, BRACE3003866, BRACE3004046, BRACE3004371, BRACE3004767, BRACE3004887, BRACE3004981, BRACE3005870, BRACE3005903, BRACE3006553, BRACE3007649, BRACE3007869, BRACE3009075, BRACE3009265, BRACE3009392, BRACE3009416, BRACE3009539, BRACE3010702, BRACE3011447, BRACE3011774, BRACE3013418, BRACE3013874, BRACE3013986, BRACE3014523, BRACE3014714, BRACE3015090, BRACE3015898, BRACE3016020, BRACE3016167, BRACE3016580, BRACE3016788, BRACE3016810, BRACE3016862, BRACE3017253, BRACE3018083, BRACE3019570, BRACE3019611, BRACE3019817, BRACE3019941, BRACE3020356, BRACE3020669, BRACE3021430, BRACE3021517, BRACE3021805, BRACE3022051, BRACE3022303, BRACE3022312, BRACE3022340, BRACE3022847, BRACE3023604, BRACE3024379, BRACE3024444, BRACE3024497, BRACE3024537, BRACE3024879, BRACE3025627, BRACE3025719, BRACE3026161, BRACE3026290, BRACE3026345, BRACE3026456, BRACE3026802, BRACE3026844, BRACE3026947, BRACE3027256, BRACE3027931, BRACE3028360, BRACE3028895, BRACE3028998, BRACE3029005, BRACE3029021, BRACE3029205, BRACE3029447, BRACE3030538, BRACE3031161, BRACE3031184, BRACE3031185, BRACE3031315, BRACE3031372, BRACE3031579, BRACE3031728, BRACE3031743, BRACE3031843, BRACE3032385, BRACE3032537, BRACE3032538, BRACE3032631, BRACE3032980, BRACE3033525, BRACE3034183, BRACE3034389, BRACE3034964, BRACE3034993, BRACE3035168, BRACE3036156, BRACE3036271, BRACE3036283, BRACE3037612, BRACE3037637, BRACE3037803, BRACE3038012, BRACE3038030, BRACE3038570, BRACE3038760, BRACE3039288, BRACE3039358, BRACE3039378, BRACE3039454, BRACE3040012, BRACE3040239, BRACE3040504, BRACE3040644, BRACE3040863, BRACE3041059, BRACE3041162, BRACE3041827, BRACE3042046, BRACE3042210, BRACE3042326, BRACE3042409, BRACE3042432, BRACE3042594, BRACE3043597, BRACE3044090, BRACE3044172, BRACE3044247, BRACE3044377, BRACE3044495, BRACE3045078, BRACE3045145, BRACE3045424, BRACE3045708, BRACE3045981, BRACE3046049, BRACE3046152, BRACE3046294, BRACE3046466, BRACE3046491, BRACE3046609, BRACE3046837, BRACE3046855, BRACE3046966, BRACE3047018, BRACE3047482, BRACE3047801, BRALZ2003119, BRALZ2007661, BRALZ2008930, BRALZ2010842, BRALZ2011337, BRALZ2013621, BRALZ2013690, BRALZ2014054, BRAMY2015516, BRAMY2021098, BRAMY2022320, BRAMY2023939, BRAMY2025495, BRAMY2031516, BRAMY2033895, BRAMY2035801, BRAMY2036254, BRAMY2036266, BRAMY2037609, BRAMY2039630, BRAMY2040915, BRAMY2041347, BRAMY2041384, BRAMY2041507, BRAMY2044686, BRAMY2046489, BRAMY2046537, BRAMY3000692, BRAMY3001409, BRAMY3002329, BRAMY3002508, BRAMY3002886, BRAMY3004126, BRAMY3004364, BRAMY3005184, BRAMY3005656, BRAMY3005912, BRAMY3007078, BRAMY3007449, BRAMY3007471, BRAMY3008436, BRAMY3009158, BRAMY3009491, BRAMY3009556, BRAMY3009904, BRAMY3010321, BRAMY3010603, BRAMY3010654, BRAMY4000915, BRAMY4000962, BRAMY4001234, BRAMY4001652, BRAMY4001863, BRAMY4001913, BRAMY4002575, BRAMY4002628, BRAWH2000256, BRAWH2002333, BRAWH2004078, BRAWH2010364, BRAWH2010619, BRAWH2011796, BRAWH2011812, BRAWH2011958, BRAWH2012054, BRAWH2012866, BRAWH2013955, BRAWH2014053, BRAWH2016209, BRAWH2016223, BRAWH2016305, BRAWH2016514, BRAWH2016562, BRAWH2016785, BRAWH3000446, BRAWH3000884, BRAWH3001053, BRAWH3001638, BRAWH3001783, BRAWH3001833, BRAWH3003244, BRAWH3003573, BRAWH3003975, BRAWH3004335, BRAWH3004350, BRAWH3005037, BRAWH3005886, BRAWH3005892, BRAWH3005896, BRAWH3008167, BRAWH3008559, BRAWH3008867, BRAWH3009961, BRAWH3010461, BRAWH3010602, BRAWH3010657, BRAWH3010726, BRAWH3010833, BRAWH3011101, BRAWH3011331, BRAWH3011402, BRAWH3011577, BRAWH3011623, BRAWH3011685, BRAWH3011907, BRAWH3011929, BRAWH3012005, BRAWH3012662, BRAWH3012779, BRAWH3013009, BRAWH3013049, BRAWH3013264, BRAWH3013508, BRAWH3014609, BRAWH3014639, BRAWH3015017, BRAWH3015175, BRAWH3015610, BRAWH3015825, BRAWH3016123, BRAWH3016715, BRAWH3017180, BRAWH3017259, BRAWH3017260, BRAWH3017477, BRAWH3017980, BRAWH3018063, BRAWH3018369, BRAWH3018548, BRAWH3018969, BRAWH3019026, BRAWH3019529, BRAWH3019594, BRAWH3019820, BRAWH3020200, BRAWH3020318, BRAWH3020884, BRAWH3020928, BRAWH3021012, BRAWH3021574, BRAWH3021580, BRAWH3021641, BRAWH3021643, BRAWH3021724, BRAWH3022347, BRAWH3022431, BRAWH3022459, BRAWH3022542, BRAWH3022651, BRAWH3022719, BRAWH3022900, BRAWH3023156, BRAWH3023168, BRAWH3023172, BRAWH3023274, BRAWH3023421, BRAWH3024186, BRAWH3024231, BRAWH3024242, BRAWH3024506, BRAWH3024989, BRAWH3026349, BRAWH3026938, BRAWH3027420, BRAWH3027440, BRAWH3027533, BRAWH3027574, BRAWH3027607, BRAWH3027616, BRAWH3027675, BRAWH3027806, BRAWH3027880, BRAWH3028202, BRAWH3028223, BRAWH3028461, BRAWH3028754, BRAWH3028796, BRAWH3029313, BRAWH3029385, BRAWH3029538, BRAWH3029806, BRAWH3030772, BRAWH3030810, BRAWH3030910, BRAWH3031054, BRAWH3031342, BRAWH3031710, BRAWH3032298, BRAWH3032340, BRAWH3032571, BRAWH3033117, BRAWH3033293, BRAWH3033448, BRAWH3033513, BRAWH3034097, BRAWH3034114, BRAWH3034134, BRAWH3034668, BRAWH3034743, BRAWH3034775, BRAWH3034890, BRAWH3035403, BRAWH3035904, BRAWH3035914, BRAWH3035936, BRAWH3036077, BRAWH3036247, BRAWH3036270, BRAWH3036334, BRAWH3036561, BRAWH3037265, BRAWH3037394, BRAWH3037428, BRAWH3037533, BRAWH3037979, BRAWH3038055, BRAWH3038230, BRAWH3038252, BRAWH3038324, BRCAN2000923, BRCAN2002662, BRCAN2002892, BRCAN2003269, BRCAN2003814, BRCAN2006051, BRCAN2006955, BRCAN2007525, BRCAN2008701, BRCAN2009168, BRCAN2010547, BRCAN2010581, BRCAN2010665, BRCAN2015402, BRCAN2015757, BRCAN2018269, BRCAN2018667, BRCAN2019653, BRCAN2019907, BRCAN2019953, BRCAN2020234, BRCAN2020331, BRCAN2020412, BRCAN2020467, BRCAN2020880, BRCAN2021325, BRCAN2021452, BRCAN2021718, BRCAN2022126, BRCAN2025093, BRCAN2027593, BRCAN2028702, BRCOC2001355, BRCOC2002777, BRCOC2006164, BRCOC2006639, BRCOC2006942, BRCOC2009638, BRCOC2010115, BRCOC2012386, BRHIP2006819, BRHIP2006921, BRHIP2008756, BRHIP2009177, BRHIP2011199, BRHIP2013958, BRHIP2015153, BRHIP2016125, BRHIP2017714, BRHIP2020930, BRHIP2021929, BRHIP2023735, BRHIP2024941, BRHIP2026346, BRHIP2027077, BRHIP2027563, BRHIP2029529, BRHIP2029643, BRHIP2029663, BRHIP3000626, BRHIP3000859, BRHIP3001076, BRHIP3001141, BRHIP3001338, BRHIP3001360, BRHIP3001481, BRHIP3001573, BRHIP3001878, BRHIP3002000, BRHIP3002114, BRHIP3002124, BRHIP3002141, BRHIP3002363, BRHIP3002691, BRHIP3002920, BRHIP3002931, BRHIP3003063, BRHIP3003126, BRHIP3003306, BRHIP3003340, BRHIP3003395, BRHIP3003688, BRHIP3003795, BRHIP3003845, BRHIP3003961, BRHIP3003984, BRHIP3004215, BRHIP3004710, BRHIP3004725, BRHIP3004774, BRHIP3004786, BRHIP3005037, BRHIP3005142, BRHIP3005231, BRHIP3005307, BRHIP3005673, BRHIP3005801, BRHIP3005944, BRHIP3006279, BRHIP3006294, BRHIP3006449, BRHIP3006786, BRHIP3006950, BRHIP3007172, BRHIP3007195, BRHIP3007223, BRHIP3007291, BRHIP3007409, BRHIP3007424, BRHIP3007609, BRHIP3007960, BRHIP3008082, BRHIP3008320, BRHIP3008714, BRHIP3009672, BRHIP3009753, BRHIP3010289, BRHIP3010916, BRHIP3011082, BRHIP3011269, BRHIP3011460, BRHIP3011567, BRHIP3011831, BRHIP3012185, BRHIP3012289, BRHIP3012357, BRHIP3012736, BRHIP3012997, BRHIP3013078, BRHIP3013588, BRHIP3013698, BRHIP3014675, BRHIP3015854, BRHIP3016032, BRHIP3016421, BRHIP3017109, BRHIP3017146, BRHIP3017256, BRHIP3017558, BRHIP3017855, BRHIP3018784, BRHIP3019643, BRHIP3019824, BRHIP3019880, BRHIP3019956, BRHIP3020046, BRHIP3020155, BRHIP3020733, BRHIP3021019, BRHIP3021499, BRHIP3021987, BRHIP3022656, BRHIP3023922, BRHIP3024703, BRHIP3024820, BRHIP3025795, BRHIP3025844, BRHIP3026231, BRHIP3026651, BRHIP3027160, BRHIP3027191, BRHIP3027651, BRHIP3027947, BRHIP3028246, BRHIP3028570, BRHIP3028742, BRSSN2004303, BRSSN2004710, BRSSN2008464, BRSSN2011843, BRSSN2012157, BRSSN2012198, BRSSN2013696, BRSSN2015497, BRSSN2018218, BRSTN2000312, BRSTN2006466, BRSTN2006638, BRSTN2008475, BRSTN2009247, BRSTN2010089, BRSTN2010416, BRSTN2011688, BRSTN2011961, BRSTN2012069, BRSTN2016892, BRSTN2016918, BRSTN2016992, BRSTN2017104, BRSTN2017151, BRSTN2018712, BRTHA2000969, BRTHA2001304, BRTHA2001953, BRTHA2002091, BRTHA2003759, BRTHA2005448, BRTHA2006720, BRTHA2008502, BRTHA2008598, BRTHA2010672, BRTHA2012189, BRTHA2014647, BRTHA2018304, BRTHA2019726, BRTHA2019743, BRTHA2020400, BRTHA2020566, BRTHA2020642, BRTHA2020695, BRTHA2020721, BRTHA2020781, BRTHA2020910, BRTHA2021212, BRTHA2021440, BRTHA2021450, BRTHA2022074, BRTHA2022914, BRTHA2022968, BRTHA2023402, BRTHA2023437, BRTHA2024177, BRTHA2024354, BRTHA2024712, BRTHA2025869, BRTHA2026071, BRTHA2026290, BRTHA2026311, BRTHA2027227, BRTHA2027229, BRTHA2027250, BRTHA2028297, BRTHA2029969, BRTHA2030036, BRTHA2030213, BRTHA2031517, BRTHA2031917, BRTHA2032763, BRTHA2033122, BRTHA2033155, BRTHA2033320, BRTHA2033469, BRTHA2033683, BRTHA2034281, BRTHA2034576, BRTHA2035743, BRTHA2036055, BRTHA2036295, BRTHA2037247, BRTHA2038279, BRTHA2038345, BRTHA2038353, BRTHA3000456, BRTHA3002411, BRTHA3003225, BRTHA3003417, BRTHA3003736, BRTHA3005988, BRTHA3006593, BRTHA3007469, BRTHA3007662, BRTHA3009858, BRTHA3010135, BRTHA3010212, BRTHA3010469, BRTHA3010530, BRTHA3010540, BRTHA3010717, BRTHA3011187, BRTHA3011194, BRTHA3011229, BRTHA3011265, BRTHA3011306, BRTHA3011361, BRTHA3011510, BRTHA3011892, BRTHA3011998, BRTHA3012265, BRTHA3013860, BRTHA3013882, BRTHA3014000, BRTHA3014105, BRTHA3014507, BRTHA3014547, BRTHA3014835, BRTHA3014854, BRTHA3014920, BRTHA3016616, BRTHA3017791, BRTHA3018409, BRTHA3018623, BRTHA3019'183, BRTHA3020369, BRTHA3020771, BRTHA3021569, BRTHA3021708, BRTHA3021786, BRTHA3021971, BRTHA3022641, BRTHA3023403, BRTHA3023590, BRTHA3023929, BRTHA3024600, BRTHA3025073, BRTHA3026161, BRTHA3026180, BRTHA3026556, BRTHA3026916, BRTHA3027171, BRTHA3027318, BRTHA3027638, BRTHA3027820, BRTHA3027879, BRTHA3027957, BRTHA3028339, BRTHA3028505, CHONS2002829, CTONG2001932, CTONG2006235, CTONG2009033, CTONG2011801, CTONG2020582, CTONG2027959, D90ST2003106, DFNES2001829, FCBBF3001018, FCBBF3002188, FCBBF3005160, FCBBF3012443, FCBBF3020030, FCBBF3021191, FCBBF3024911, FCBBF5000384, FEBRA2000805, FEBRA2002260, FEBRA2012625, FEBRA2013069, FEBRA2013570, FEBRA2017736, FEBRA2017811, FEBRA2023498, FEBRA2026582, FEBRA2026977, FEBRA2028222, FEBRA2028457, JCMLC2000273, KIDNE2010049, KIDNE2017153, LIVER2008465, MESAN2017133, NOVAR2000783, NT2NE2011107, NT2RI2009233, NT2RI2010795, NT2RI2015533, NT2RI3005923, NT2RI3009524, NT2RP7007387, NT2RP8001604, NT2RP8001605, NT2RP8007920, NT2RP8009119, NTONG2008483, NTONG2009468, OCBBF2000831, OCBBF2003518, OCBBF2004478, OCBBF2007039, OCBBF2009536, OCBBF2014745, OCBBF2016928, OCBBF2018229, OCBBF2018618, OCBBF2019761, OCBBF2024589, OCBBF2024779, OCBBF2025631, OCBBF2030927, OCBBF2036019, OCBBF3000743, OCBBF3000830, OCBBF3001076, OCBBF3001202, OCBBF3001333, OCBBF3001616, OCBBF3003745, OCBBF3004487, OCBBF3004908, OCBBF3005330, OCBBF3005843, OCBBF3006986, OCBBF3007078, OCBBF3007704, OCBBF3008392, OCBBF3008835, OCBBF3009244, PLACE5000492, PLACE6003004, PLACE6008315, PLACE6010936, PLACE7004103, PLACE7006240, PROST2007444, PROST2017910, SMINT2009292, SMINT2012179, SPLEN2012571, SYNOV4004210, SYNOV4009575, T1ESE2000609, T1ESE2000904, TBAES2007428, TESTI2005112, TESTI2005564, TESTI2009497, TESTI2018867, TESTI2021654, TESTI2039342, TESTI4001569, TESTI4002072, TESTI4002195, TESTI4002774, TESTI4002799, TESTI4003602, TESTI4003703, TESTI4003944, TESTI4004210, TESTI4004695, TESTI4005013, TESTI4005399, TESTI4005653, TESTI4006441, TESTI4007965, TESTI4010979, TESTI4012960, TESTI4013474, TESTI4014908, TESTI4020596, TESTI4022158, TESTI4029297, TESTI4032913, TESTI4035770, TESTI4043223, TESTI4046073, THYMU3000776, THYMU3002887, THYMU3003007, THYMU3003350, THYMU3007308, THYMU3008105, THYMU3019476, THYMU3021586, THYMU3026000, THYMU3026306, THYMU3026350, THYMU3032798, THYMU3032867, THYMU3033626, THYMU3034671, THYMU3037827, THYMU3038214, THYMU3041428, THYMU3044075, TKIDN2000319, TLIVE2007736, TRACH2013585, TRACH3002752, TRACH3003037, TRACH3003872, TRACH3004424, TRACH3006717, TRACH3007625, TRACH3007689, TRACH3007995, TRACH3008508, TRACH3008632, TRACH3009008, TRACH3010079, TRACH3016805, TRACH3016885, TRACH3021544, TRACH3022109, TRACH3022198, TRACH3024342, TRACH3024671, TRACH3025316, TRACH3026303, TRACH3026676, TRACH3028855, TRACH3032570, TRACH3036932, TRACH3038399, TSTOM2000235, UTERU2000300, UTERU2027369, UTERU3000670, UTERU3005422, UTERU3010409, UTERU3012414, UTERU3013167, UTERU3015011, UTERU3016273, UTERU3017995, UTERU3018172 BRACE3002184, BRACE3026993, BRACE3046450, BRAMY3008096, BRAWH3013197, BRAWH3028645, BRTHA3004432, BRTHA3024233, CTONG2002832, TESTI4002988, THYMU3046350, TRACH1000193, TRACH3019290

[0633] The result of comparative analysis of cDNA libraries derived from fetal heart (FEHRT) and adult heart (HEART) (Table 22) showed that the genes whose expression levels were different between the two were ten clones as described below.

BRACE2012528, BRACE3004371, BRCAN2003814, BRSTN2011961, BRSTN2012069, BRSTN2016992, HEART2002531, NTONG2008483, PROST2002078, T1ESE2000609

[0634] The result of comparative analysis of cDNA libraries derived from fetal kidney (FEKID) and adult kidney (KIDNE) (Table 23) showed that the genes whose expression levels were different between the two were 21 clones as described below.

[0635] BRACE3004371, BRAMY2039630, BRAMY3004364, BRAWH2004078, BRHIP3002000, BRSTN2011961, BRSTN2012069, BRTHA2027229, KIDNE2004531, KIDNE2010049, KIDNE2014496, KIDNE2015987, KIDNE2016464, KIDNE2017153, KIDNE2018268, NT2RP7007387, TESTI2005112, TESTI4002799, THYMU3001776, THYMU3029795, THYMU3032867

[0636] The result of comparative analysis of cDNA libraries derived from fetal lung (FELNG) and adult lung (HLUNG) (Table 24) showed that the genes whose expression levels were different between the two were 18 clones as described below.

[0637] BRACE3036283, BRAMY2031516, BRSTN2011961, BRSTN2012069, HLUNG2012600, MESAN2009156, NTONG2008483, PROST2007444, TESTI4003703, TESTI4005653, TESTI4013474, TESTI4029297, THYMU3001776, THYMU3033626, THYMU3034671, THYMU3041428, THYMU3044188, TRACH3022198

[0638] These genes are involved in regeneration of tissues and/or cells.

[0639] A nucleotide sequence information-based analysis was carried out to identify the genes whose expression frequencies are higher or lower in CD34+ cell (cell expressing a glycoprotein CD34) treated with the osteoclast differentiation factor (Molecular Medicine 38. 642-648. (2001)) than in the untreated CD34+ cell, which is the precursor cell of monocyte/macrophage line. The result of comparative analysis for the frequency between the two cDNA libraries prepared from the RNA of CD34+ cells (CD34C) and from the RNA of CD34+ cells treated with the osteoclast differentiation factor (D30ST, D60ST or D90ST) showed following genes whose expression levels were different between the two.

TABLE 2

| Clone ID | CD34C | D30ST | D60ST | D90ST |
|---|---|---|---|---|
| BRAWH3018063 | 0.000 | 30.813 | 0.000 | 0.000 |
| BRHIP3020046 | 0.000 | 0.000 | 68.001 | 0.000 |
| BRSSN2013696 | 0.000 | 41.698 | 0.000 | 0.000 |
| BRSTN2012069 | 2.383 | 0.442 | 0.000 | 0.128 |
| BRTHA2027229 | 0.000 | 0.000 | 61.446 | 0.000 |
| D90ST2003106 | 0.000 | 0.000 | 0.000 | 93.096 |
| D90ST2003989 | 0.000 | 0.000 | 0.000 | 100.000 |
| D90ST2004417 | 0.000 | 0.000 | 0.000 | 100.000 |
| OCBBF2016928 | 0.000 | 31.972 | 0.000 | 0.000 |
| TESTI4005653 | 0.000 | 0.000 | 0.000 | 6.704 |
| TESTI4013474 | 43.396 | 0.000 | 0.000 | 0.000 |
| THYMU3032798 | 0.000 | 0.000 | 0.000 | 26.074 |

[0640] A survey was performed for genes whose expression levels are varied in response to induction of differentiation (stimulation by retinoic acid (RA) or growth inhibitor treatment after RA stimulation) in cultured cells of a neural strain, NT2. The result of comparative analysis of cDNA libraries derived from undifferentiated NT2 cells (NT2RM) and the cells subjected to the differentiation treatment (NT2RP, NT2RI or NT2NE) showed following genes whose expression levels were different between the two.

TABLE 3

| Clone ID | NT2RM | NT2RP | NT2RI | NT2NE |
|---|---|---|---|---|
| BLADE2004849 | 0.000 | 0.000 | 0.000 | 26.862 |
| BRACE2003628 | 0.000 | 16.442 | 0.000 | 0.000 |
| BRACE2012528 | 0.000 | 1.143 | 0.862 | 0.000 |
| BRAMY2023939 | 0.000 | 0.000 | 11.107 | 22.151 |
| BRAMY2031516 | 0.000 | 17.802 | 0.000 | 0.000 |
| BRAMY4002628 | 0.000 | 17.119 | 12.908 | 0.000 |
| BRAWH3010461 | 0.000 | 0.000 | 3.733 | 0.000 |
| BRAWH3017259 | 0.000 | 0.000 | 0.000 | 50.722 |
| BRAWH3018063 | 0.000 | 0.000 | 14.389 | 0.000 |
| BRAWH3022651 | 0.000 | 3.948 | 0.000 | 0.000 |
| BRAWH3024186 | 0.000 | 0.000 | 18.135 | 0.000 |
| BRCAN2019653 | 0.000 | 15.031 | 0.000 | 0.000 |
| BRCAN2022126 | 0.000 | 0.000 | 8.824 | 0.000 |
| BRCOC2012386 | 0.000 | 27.482 | 20.721 | 0.000 |
| BRHIP3002000 | 0.000 | 3.615 | 0.000 | 0.000 |
| BRHIP3007223 | 0.000 | 4.859 | 3.664 | 0.000 |
| BRHIP3021019 | 0.000 | 0.000 | 14.074 | 0.000 |
| BRSTN2011961 | 8.334 | 0.000 | 0.526 | 3.149 |
| BRSTN2012069 | 0.000 | 0.479 | 0.052 | 0.788 |
| BRTHA2033155 | 0.000 | 0.000 | 7.729 | 0.000 |
| BRTHA3010212 | 0.000 | 13.315 | 0.000 | 0.000 |
| BRTHA3011194 | 0.000 | 0.000 | 0.000 | 12.809 |
| BRTHA3011265 | 0.000 | 20.563 | 0.000 | 0.000 |
| BRTHA3017791 | 0.000 | 5.698 | 0.000 | 0.000 |
| BRTHA3021971 | 55.855 | 0.000 | 0.000 | 0.000 |
| CHONS2002829 | 0.000 | 0.000 | 2.969 | 0.000 |
| CTONG2006235 | 0.000 | 3.948 | 0.000 | 0.000 |
| FCBBF3012443 | 0.000 | 0.000 | 49.588 | 0.000 |
| FEBRA2026582 | 0.000 | 0.000 | 42.162 | 0.000 |
| LIVER2008465 | 0.000 | 15.950 | 0.000 | 0.000 |
| NT2NE2011107 | 0.000 | 0.000 | 0.000 | 43.585 |
| NT2NE2016041 | 0.000 | 0.000 | 0.000 | 100.000 |
| NT2RI2004818 | 0.000 | 0.000 | 100.000 | 0.000 |
| NT2RI2009233 | 0.000 | 5.436 | 4.099 | 0.000 |
| NT2RI2010795 | 0.000 | 0.000 | 29.973 | 0.000 |
| NT2RI2015533 | 0.000 | 0.000 | 2.824 | 0.000 |
| NT2RI2023671 | 0.000 | 0.000 | 100.000 | 0.000 |
| NT2RI2028537 | 0.000 | 0.000 | 100.000 | 0.000 |
| NT2RI3001573 | 0.000 | 0.000 | 100.000 | 0.000 |
| NT2RI3001967 | 0.000 | 0.000 | 100.000 | 0.000 |
| NT2RI3005861 | 0.000 | 0.000 | 100.000 | 0.000 |
| NT2RI3005923 | 0.000 | 0.000 | 35.423 | 0.000 |
| NT2RI3007095 | 0.000 | 0.000 | 100.000 | 0.000 |
| NT2RI3008179 | 0.000 | 0.000 | 100.000 | 0.000 |
| NT2RI3009480 | 0.000 | 0.000 | 68.547 | 0.000 |
| NT2RI3009524 | 0.000 | 0.000 | 64.504 | 0.000 |
| NT2RP7003439 | 0.000 | 100.000 | 0.000 | 0.000 |
| NT2RP7007387 | 0.000 | 9.894 | 3.730 | 0.000 |
| NT2RP7014178 | 0.000 | 100.000 | 0.000 | 0.000 |
| NT2RP7014778 | 0.000 | 100.000 | 0.000 | 0.000 |
| NT2RP7016508 | 0.000 | 100.000 | 0.000 | 0.000 |
| NT2RP7017139 | 0.000 | 100.000 | 0.000 | 0.000 |
| NT2RP7019682 | 0.000 | 100.000 | 0.000 | 0.000 |
| NT2RP7020343 | 0.000 | 100.000 | 0.000 | 0.000 |
| NT2RP8000633 | 0.000 | 100.000 | 0.000 | 0.000 |
| NT2RP8001363 | 0.000 | 100.000 | 0.000 | 0.000 |
| NT2RP8001407 | 0.000 | 100.000 | 0.000 | 0.000 |
| NT2RP8001584 | 0.000 | 100.000 | 0.000 | 0.000 |
| NT2RP8001604 | 0.000 | 33.445 | 25.218 | 0.000 |
| NT2RP8001605 | 0.000 | 70.676 | 0.000 | 0.000 |
| NT2RP8003490 | 0.000 | 100.000 | 0.000 | 0.000 |
| NT2RP8003657 | 0.000 | 100.000 | 0.000 | 0.000 |
| NT2RP8003787 | 0.000 | 100.000 | 0.000 | 0.000 |
| NT2RP8005546 | 0.000 | 59.103 | 0.000 | 0.000 |
| NT2RP8006452 | 0.000 | 100.000 | 0.000 | 0.000 |
| NT2RP8006521 | 0.000 | 100.000 | 0.000 | 0.000 |
| NT2RP8007416 | 0.000 | 100.000 | 0.000 | 0.000 |
| NT2RP8007503 | 0.000 | 100.000 | 0.000 | 0.000 |
| NT2RP8007920 | 0.000 | 9.535 | 0.000 | 0.000 |
| NT2RP8008057 | 0.000 | 68.270 | 0.000 | 0.000 |
| NT2RP8009119 | 0.000 | 11.123 | 0.000 | 0.000 |
| NT2RP8009248 | 0.000 | 100.000 | 0.000 | 0.000 |
| NTONG2008483 | 0.000 | 0.000 | 4.356 | 0.000 |
| OCBBF2003518 | 0.000 | 0.000 | 1.873 | 0.000 |
| OCBBF3001333 | 0.000 | 7.743 | 5.839 | 0.000 |
| OCBBF3004908 | 0.000 | 23.051 | 17.381 | 0.000 |
| PLACE7004103 | 0.000 | 6.234 | 9.400 | 0.000 |
| PROST2017910 | 0.000 | 25.185 | 0.000 | 0.000 |
| SMINT2009292 | 0.000 | 0.000 | 6.446 | 0.000 |
| SPLEN2012571 | 0.000 | 15.323 | 5.777 | 0.000 |
| T1ESE2000904 | 0.000 | 11.128 | 0.000 | 0.000 |
| TESTI4002072 | 0.000 | 8.048 | 6.068 | 0.000 |
| TESTI4002774 | 0.000 | 0.000 | 7.456 | 0.000 |
| TESTI4002799 | 0.000 | 4.258 | 1.605 | 0.000 |
| TESTI4005653 | 0.000 | 1.198 | 7.228 | 1.802 |
| TESTI4007965 | 0.000 | 0.000 | 32.797 | 0.000 |
| TESTI4012960 | 0.000 | 71.770 | 0.000 | 0.000 |
| TESTI4018436 | 0.000 | 0.000 | 9.457 | 0.000 |
| THYMU3001776 | 0.000 | 7.637 | 0.000 | 0.000 |
| THYMU3002887 | 0.000 | 1.880 | 0.000 | 14.135 |
| THYMU3029795 | 0.000 | 0.000 | 19.335 | 0.000 |
| THYMU3041428 | 0.000 | 0.614 | 0.463 | 0.000 |
| THYMU3047115 | 0.000 | 0.000 | 0.747 | 0.000 |
| TRACH3003872 | 0.000 | 13.230 | 0.000 | 0.000 |
| TRACH3004424 | 0.000 | 0.000 | 30.905 | 0.000 |
| TRACH3006717 | 0.000 | 0.000 | 6.668 | 0.000 |
| TRACH3007625 | 0.000 | 2.833 | 2.136 | 4.260 |
| TRACH3009008 | 0.000 | 11.807 | 0.000 | 0.000 |
| TRACH3016805 | 0.000 | 10.851 | 0.000 | 0.000 |
| TRACH3016885 | 0.000 | 0.000 | 14.459 | 0.000 |
| TRACH3026303 | 0.000 | 27.016 | 0.000 | 0.000 |
| UTERU2016669 | 0.000 | 0.000 | 0.000 | 29.924 |

[0641] The result of comparative analysis of cDNA libraries derived from the cerebral cortex of Alzheimer patients (BRALZ and BRASW), and from whole tissues of a normal brain (BRAWH) showed the following genes whose expression levels differed between the two.

TABLE 4

| Clone ID | BRAWH | BRALZ | BRASW |
|---|---|---|---|
| ASTRO2016114 | 14.497 | 0.000 | 0.000 |
| BRACE2002392 | 0.000 | 18.684 | 0.000 |
| BRACE2012528 | 3.794 | 1.714 | 0.000 |
| BRACE3004371 | 11.270 | 0.000 | 0.000 |
| BRACE3004767 | 58.488 | 0.000 | 0.000 |
| BRACE3022340 | 58.488 | 0.000 | 0.000 |
| BRACE3031185 | 58.488 | 0.000 | 0.000 |
| BRACE3031743 | 5.455 | 0.000 | 0.000 |
| BRACE3032385 | 13.674 | 0.000 | 0.000 |
| BRACE3032631 | 12.612 | 0.000 | 0.000 |
| BRACE3039358 | 41.331 | 0.000 | 0.000 |
| BRACE3040863 | 17.888 | 0.000 | 0.000 |
| BRACE3042432 | 58.488 | 0.000 | 0.000 |
| BRACE3045981 | 26.434 | 0.000 | 0.000 |
| BRALZ2003119 | 0.000 | 100.000 | 0.000 |
| BRALZ2007661 | 0.000 | 100.000 | 0.000 |
| BRALZ2008930 | 0.000 | 100.000 | 0.000 |
| BRALZ2010842 | 0.000 | 100.000 | 0.000 |
| BRALZ2011337 | 0.000 | 100.000 | 0.000 |
| BRALZ2013621 | 0.000 | 100.000 | 0.000 |
| BRALZ2013690 | 0.000 | 100.000 | 0.000 |
| BRALZ2014054 | 0.000 | 38.408 | 0.000 |
| BRAMY2031516 | 14.772 | 0.000 | 0.000 |
| BRAMY3002329 | 20.323 | 0.000 | 0.000 |
| BRAMY3004126 | 49.811 | 0.000 | 0.000 |
| BRAMY3005912 | 21.416 | 0.000 | 0.000 |
| BRAMY3008436 | 5.603 | 5.061 | 0.000 |
| BRAWH2000256 | 100.000 | 0.000 | 0.000 |
| BRAWH2002333 | 100.000 | 0.000 | 0.000 |
| BRAWH2004078 | 10.539 | 0.000 | 0.000 |
| BRAWH2010364 | 34.464 | 0.000 | 0.000 |
| BRAWH2010619 | 100.000 | 0.000 | 0.000 |
| BRAWH2011796 | 100.000 | 0.000 | 0.000 |
| BRAWH2011812 | 13.544 | 0.000 | 0.000 |
| BRAWH2011958 | 100.000 | 0.000 | 0.000 |
| BRAWH2012054 | 100.000 | 0.000 | 0.000 |
| BRAWH2012866 | 8.503 | 0.000 | 0.000 |
| BRAWH2013955 | 100.000 | 0.000 | 0.000 |
| BRAWH2014053 | 23.222 | 0.000 | 0.000 |
| BRAWH2016209 | 8.306 | 0.000 | 0.000 |
| BRAWH2016223 | 100.000 | 0.000 | 0.000 |
| BRAWH2016305 | 4.308 | 0.000 | 0.000 |
| BRAWH2016514 | 35.037 | 0.000 | 0.000 |
| BRAWH2016562 | 49.499 | 0.000 | 0.000 |
| BRAWH2016785 | 100.000 | 0.000 | 0.000 |
| BRAWH3000446 | 100.000 | 0.000 | 0.000 |
| BRAWH3000884 | 100.000 | 0.000 | 0.000 |
| BRAWH3001053 | 100.000 | 0.000 | 0.000 |
| BRAWH3001638 | 100.000 | 0.000 | 0.000 |
| BRAWH3001783 | 100.000 | 0.000 | 0.000 |
| BRAWH3001833 | 100.000 | 0.000 | 0.000 |
| BRAWH3003244 | 100.000 | 0.000 | 0.000 |
| BRAWH3003573 | 20.162 | 0.000 | 0.000 |
| BRAWH3003975 | 100.000 | 0.000 | 0.000 |
| BRAWH3004335 | 100.000 | 0.000 | 0.000 |
| BRAWH3004350 | 16.580 | 0.000 | 0.000 |
| BRAWH3005037 | 100.000 | 0.000 | 0.000 |
| BRAWH3005886 | 100.000 | 0.000 | 0.000 |
| BRAWH3005892 | 100.000 | 0.000 | 0.000 |
| BRAWH3005896 | 100.000 | 0.000 | 0.000 |
| BRAWH3008167 | 100.000 | 0.000 | 0.000 |
| BRAWH3008559 | 100.000 | 0.000 | 0.000 |
| BRAWH3008867 | 100.000 | 0.000 | 0.000 |
| BRAWH3009961 | 47.417 | 0.000 | 0.000 |
| BRAWH3010461 | 16.435 | 0.000 | 0.000 |
| BRAWH3010602 | 100.000 | 0.000 | 0.000 |
| BRAWH3010657 | 100.000 | 0.000 | 0.000 |
| BRAWH3010726 | 100.000 | 0.000 | 0.000 |
| BRAWH3010833 | 100.000 | 0.000 | 0.000 |
| BRAWH3011101 | 100.000 | 0.000 | 0.000 |
| BRAWH3011331 | 100.000 | 0.000 | 0.000 |
| BRAWH3011402 | 100.000 | 0.000 | 0.000 |
| BRAWH3011577 | 100.000 | 0.000 | 0.000 |
| BRAWH3011623 | 100.000 | 0.000 | 0.000 |
| BRAWH3011685 | 100.000 | 0.000 | 0.000 |
| BRAWH3011907 | 47.417 | 0.000 | 0.000 |
| BRAWH3011929 | 100.000 | 0.000 | 0.000 |
| BRAWH3012005 | 100.000 | 0.000 | 0.000 |
| BRAWH3012662 | 33.972 | 0.000 | 0.000 |
| BRAWH3012779 | 100.000 | 0.000 | 0.000 |
| BRAWH3013009 | 100.000 | 0.000 | 0.000 |
| BRAWH3013049 | 100.000 | 0.000 | 0.000 |
| BRAWH3013264 | 100.000 | 0.000 | 0.000 |
| BRAWH3013508 | 100.000 | 0.000 | 0.000 |
| BRAWH3014609 | 44.597 | 0.000 | 0.000 |
| BRAWH3014639 | 100.000 | 0.000 | 0.000 |
| BRAWH3015017 | 100.000 | 0.000 | 0.000 |
| BRAWH3015175 | 100.000 | 0.000 | 0.000 |
| BRAWH3015610 | 100.000 | 0.000 | 0.000 |
| BRAWH3015825 | 100.000 | 0.000 | 0.000 |
| BRAWH3016123 | 100.000 | 0.000 | 0.000 |
| BRAWH3016715 | 100.000 | 0.000 | 0.000 |
| BRAWH3017180 | 28.251 | 0.000 | 0.000 |
| BRAWH3017259 | 13.996 | 0.000 | 0.000 |
| BRAWH3017260 | 100.000 | 0.000 | 0.000 |
| BRAWH3017477 | 100.000 | 0.000 | 0.000 |
| BRAWH3017980 | 49.811 | 0.000 | 0.000 |
| BRAWH3018063 | 15.836 | 0.000 | 0.000 |
| BRAWH3018369 | 100.000 | 0.000 | 0.000 |
| BRAWH3018548 | 100.000 | 0.000 | 0.000 |
| BRAWH3018969 | 100.000 | 0.000 | 0.000 |
| BRAWH3019026 | 100.000 | 0.000 | 0.000 |
| BRAWH3019529 | 100.000 | 0.000 | 0.000 |
| BRAWH3019594 | 100.000 | 0.000 | 0.000 |
| BRAWH3019820 | 100.000 | 0.000 | 0.000 |
| BRAWH3020200 | 100.000 | 0.000 | 0.000 |
| BRAWH3020318 | 100.000 | 0.000 | 0.000 |
| BRAWH3020884 | 100.000 | 0.000 | 0.000 |
| BRAWH3020928 | 49.499 | 0.000 | 0.000 |
| BRAWH3021012 | 100.000 | 0.000 | 0.000 |
| BRAWH3021574 | 9.400 | 0.000 | 0.000 |
| BRAWH3021580 | 100.000 | 0.000 | 0.000 |
| BRAWH3021641 | 100.000 | 0.000 | 0.000 |
| BRAWH3021643 | 100.000 | 0.000 | 0.000 |
| BRAWH3021724 | 100.000 | 0.000 | 0.000 |
| BRAWH3022347 | 100.000 | 0.000 | 0.000 |
| BRAWH3022431 | 100.000 | 0.000 | 0.000 |
| BRAWH3022459 | 100.000 | 0.000 | 0.000 |
| BRAWH3022542 | 100.000 | 0.000 | 0.000 |
| BRAWH3022651 | 9.828 | 5.919 | 0.000 |
| BRAWH3022719 | 100.000 | 0.000 | 0.000 |
| BRAWH3022900 | 100.000 | 0.000 | 0.000 |
| BRAWH3023156 | 100.000 | 0.000 | 0.000 |
| BRAWH3023168 | 100.000 | 0.000 | 0.000 |
| BRAWH3023172 | 0.916 | 0.000 | 0.000 |
| BRAWH3023274 | 100.000 | 0.000 | 0.000 |
| BRAWH3023421 | 100.000 | 0.000 | 0.000 |
| BRAWH3024186 | 19.959 | 0.000 | 0.000 |
| BRAWH3024231 | 100.000 | 0.000 | 0.000 |
| BRAWH3024242 | 31.843 | 0.000 | 0.000 |
| BRAWH3024506 | 100.000 | 0.000 | 0.000 |
| BRAWH3024989 | 2.369 | 0.000 | 0.000 |
| BRAWH3026349 | 100.000 | 0.000 | 0.000 |
| BRAWH3026938 | 6.894 | 8.303 | 0.000 |
| BRAWH3027420 | 100.000 | 0.000 | 0.000 |
| BRAWH3027440 | 58.488 | 0.000 | 0.000 |
| BRAWH3027533 | 11.008 | 0.000 | 0.000 |
| BRAWH3027574 | 47.417 | 0.000 | 0.000 |
| BRAWH3027607 | 100.000 | 0.000 | 0.000 |
| BRAWH3027616 | 100.000 | 0.000 | 0.000 |
| BRAWH3027675 | 100.000 | 0.000 | 0.000 |
| BRAWH3027806 | 100.000 | 0.000 | 0.000 |
| BRAWH3027880 | 100.000 | 0.000 | 0.000 |
| BRAWH3028202 | 100.000 | 0.000 | 0.000 |
| BRAWH3028223 | 100.000 | 0.000 | 0.000 |
| BRAWH3028461 | 100.000 | 0.000 | 0.000 |
| BRAWH3028754 | 100.000 | 0.000 | 0.000 |
| BRAWH3028796 | 100.000 | 0.000 | 0.000 |
| BRAWH3029313 | 100.000 | 0.000 | 0.000 |
| BRAWH3029385 | 35.187 | 0.000 | 0.000 |
| BRAWH3029538 | 100.000 | 0.000 | 0.000 |
| BRAWH3029806 | 26.735 | 0.000 | 0.000 |
| BRAWH3030772 | 100.000 | 0.000 | 0.000 |
| BRAWH3030810 | 21.287 | 0.000 | 0.000 |
| BRAWH3030910 | 100.000 | 0.000 | 0.000 |
| BRAWH3031054 | 100.000 | 0.000 | 0.000 |
| BRAWH3031342 | 10.856 | 0.000 | 0.000 |
| BRAWH3031710 | 100.000 | 0.000 | 0.000 |
| BRAWH3032298 | 100.000 | 0.000 | 0.000 |
| BRAWH3032340 | 100.000 | 0.000 | 0.000 |
| BRAWH3032571 | 100.000 | 0.000 | 0.000 |
| BRAWH3033117 | 100.000 | 0.000 | 0.000 |
| BRAWH3033293 | 100.000 | 0.000 | 0.000 |
| BRAWH3033448 | 100.000 | 0.000 | 0.000 |
| BRAWH3033513 | 100.000 | 0.000 | 0.000 |
| BRAWH3034097 | 100.000 | 0.000 | 0.000 |
| BRAWH3034114 | 100.000 | 0.000 | 0.000 |
| BRAWH3034134 | 100.000 | 0.000 | 0.000 |
| BRAWH3034668 | 100.000 | 0.000 | 0.000 |
| BRAWH3034743 | 16.662 | 0.000 | 0.000 |
| BRAWH3034775 | 100.000 | 0.000 | 0.000 |
| BRAWH3034890 | 100.000 | 0.000 | 0.000 |
| BRAWH3035403 | 35.337 | 0.000 | 0.000 |
| BRAWH3035904 | 100.000 | 0.000 | 0.000 |
| BRAWH3035914 | 100.000 | 0.000 | 0.000 |
| BRAWH3035936 | 70.575 | 0.000 | 0.000 |
| BRAWH3036077 | 100.000 | 0.000 | 0.000 |
| BRAWH3036247 | 54.530 | 0.000 | 0.000 |
| BRAWH3036270 | 100.000 | 0.000 | 0.000 |
| BRAWH3036334 | 6.241 | 0.000 | 0.000 |
| BRAWH3036561 | 100.000 | 0.000 | 0.000 |
| BRAWH3037265 | 44.597 | 0.000 | 0.000 |
| BRAWH3037394 | 100.000 | 0.000 | 0.000 |
| BRAWH3037428 | 5.877 | 0.000 | 0.000 |
| BRAWH3037533 | 100.000 | 0.000 | 0.000 |
| BRAWH3037979 | 100.000 | 0.000 | 0.000 |
| BRAWH3038055 | 100.000 | 0.000 | 0.000 |
| BRAWH3038230 | 100.000 | 0.000 | 0.000 |
| BRAWH3038252 | 100.000 | 0.000 | 0.000 |
| BRAWH3038324 | 100.000 | 0.000 | 0.000 |
| BRCAN2010665 | 19.610 | 0.000 | 0.000 |
| BRCAN2019653 | 0.000 | 22.535 | 0.000 |
| BRCAN2022126 | 4.855 | 0.000 | 0.000 |
| BRCAN2025093 | 21.732 | 0.000 | 0.000 |
| BRCOC2012386 | 11.403 | 0.000 | 0.000 |
| BRHIP2015153 | 20.038 | 0.000 | 0.000 |
| BRHIP2027077 | 2.020 | 0.000 | 0.000 |
| BRHIP3001573 | 24.474 | 0.000 | 0.000 |
| BRHIP3002000 | 4.500 | 2.710 | 0.000 |
| BRHIP3003063 | 10.960 | 0.000 | 0.000 |
| BRHIP3003984 | 27.477 | 0.000 | 0.000 |
| BRHIP3004774 | 39.520 | 0.000 | 0.000 |
| BRHIP3007223 | 2.016 | 0.000 | 0.000 |
| BRHIP3007409 | 31.957 | 0.000 | 0.000 |
| BRHIP3008320 | 23.349 | 0.000 | 0.000 |
| BRHIP3014675 | 37.925 | 0.000 | 0.000 |
| BRHIP3017855 | 15.316 | 0.000 | 0.000 |
| BRHIP3018784 | 6.930 | 0.000 | 0.000 |
| BRHIP3021019 | 7.745 | 0.000 | 0.000 |
| BRHIP3028246 | 22.147 | 0.000 | 0.000 |
| BRHIP3028570 | 31.957 | 0.000 | 0.000 |
| BRSTN2010089 | 6.598 | 0.000 | 0.000 |
| BRSTN2012069 | 0.047 | 0.718 | 7.145 |
| BRSTN2016992 | 1.476 | 40.898 | 0.000 |
| BRTHA2033155 | 4.253 | 0.000 | 0.000 |
| BRTHA3003736 | 4.302 | 0.000 | 0.000 |
| BRTHA3005988 | 31.076 | 0.000 | 0.000 |
| BRTHA3010135 | 20.010 | 0.000 | 0.000 |
| BRTHA3010212 | 5.525 | 0.000 | 0.000 |
| BRTHA3011194 | 3.534 | 0.000 | 0.000 |
| BRTHA3011265 | 25.596 | 0.000 | 0.000 |
| BRTHA3017791 | 11.821 | 4.271 | 0.000 |
| BRTHA3020771 | 31.957 | 0.000 | 0.000 |
| BRTHA3021971 | 1.941 | 0.000 | 0.000 |
| BRTHA3023403 | 14.857 | 0.000 | 0.000 |
| CTONG2006235 | 9.828 | 5.919 | 0.000 |
| CTONG2009033 | 25.755 | 0.000 | 0.000 |
| CTONG2020582 | 9.594 | 0.000 | 0.000 |
| D90ST2003106 | 6.904 | 0.000 | 0.000 |
| DFNES2001829 | 9.228 | 0.000 | 0.000 |
| KIDNE2010049 | 3.438 | 0.000 | 0.000 |
| MESAN2017133 | 17.548 | 31.703 | 0.000 |
| NT2RI2009233 | 6.767 | 0.000 | 0.000 |
| NT2RI2015533 | 6.216 | 5.616 | 0.000 |
| NT2RI3005923 | 19.493 | 0.000 | 0.000 |
| NT2RI3009524 | 35.496 | 0.000 | 0.000 |
| NT2RP7007387 | 6.158 | 0.000 | 0.000 |
| NT2RP8001605 | 29.324 | 0.000 | 0.000 |
| NT2RP8007920 | 1.978 | 0.000 | 0.000 |
| NTONG2008483 | 2.397 | 0.000 | 0.000 |
| OCBBF2003518 | 2.062 | 0.000 | 0.000 |
| OCBBF2018618 | 16.218 | 0.000 | 0.000 |
| OCBBF3001333 | 9.639 | 0.000 | 0.000 |
| OCBBF3004487 | 4.531 | 0.000 | 0.000 |
| PLACE7004103 | 3.880 | 0.000 | 0.000 |
| PLACE7006240 | 25.174 | 0.000 | 0.000 |
| PROST2007444 | 4.374 | 0.000 | 0.000 |
| PROST2017910 | 0.000 | 37.758 | 0.000 |
| TBAES2007428 | 5.371 | 0.000 | 0.000 |
| TESTI2005112 | 19.455 | 0.000 | 0.000 |
| TESTI2021654 | 9.773 | 0.000 | 0.000 |
| TESTI4002072 | 16.696 | 0.000 | 0.000 |
| TESTI4002774 | 4.103 | 0.000 | 0.000 |
| TESTI4002799 | 1.767 | 0.000 | 0.000 |
| TESTI4003602 | 25.967 | 0.000 | 0.000 |
| TESTI4004210 | 36.051 | 0.000 | 0.000 |
| TESTI4005399 | 7.797 | 0.000 | 0.000 |
| TESTI4005653 | 1.989 | 0.000 | 0.000 |
| TESTI4006441 | 60.471 | 0.000 | 0.000 |
| TESTI4013474 | 0.000 | 3.733 | 0.000 |
| TESTI4014908 | 36.051 | 0.000 | 0.000 |
| TESTI4022158 | 53.386 | 0.000 | 0.000 |
| THYMU3000776 | 15.604 | 0.000 | 0.000 |
| THYMU3002887 | 4.680 | 0.000 | 0.000 |
| THYMU3003350 | 54.530 | 0.000 | 0.000 |
| THYMU3021586 | 20.651 | 0.000 | 0.000 |
| THYMU3026000 | 49.066 | 0.000 | 0.000 |
| THYMU3026306 | 46.281 | 0.000 | 0.000 |
| THYMU3026350 | 14.291 | 0.000 | 0.000 |
| THYMU3032798 | 9.668 | 0.000 | 0.000 |
| THYMU3032867 | 12.871 | 0.000 | 0.000 |
| THYMU3037827 | 54.530 | 0.000 | 0.000 |
| THYMU3038214 | 39.314 | 0.000 | 0.000 |
| THYMU3041428 | 0.000 | 0.000 | 96.263 |
| THYMU3044075 | 37.925 | 0.000 | 0.000 |
| TRACH2013585 | 23.471 | 0.000 | 0.000 |
| TRACH3002752 | 10.215 | 0.000 | 0.000 |
| TRACH3003037 | 64.100 | 0.000 | 0.000 |
| TRACH3003872 | 2.745 | 0.000 | 0.000 |
| TRACH3004424 | 17.006 | 0.000 | 0.000 |
| TRACH3006717 | 18.347 | 0.000 | 0.000 |
| TRACH3007625 | 1.175 | 0.000 | 0.000 |
| TRACH3007689 | 47.167 | 0.000 | 0.000 |
| TRACH3008632 | 25.351 | 0.000 | 0.000 |
| TRACH3009008 | 24.495 | 0.000 | 0.000 |
| TRACH3010079 | 48.305 | 0.000 | 0.000 |
| TRACH3016805 | 4.502 | 0.000 | 0.000 |
| TRACH3016885 | 3.978 | 0.000 | 0.000 |
| TRACH3024342 | 47.167 | 0.000 | 0.000 |
| TRACH3024671 | 47.167 | 0.000 | 0.000 |
| TRACH3026303 | 5.605 | 0.000 | 0.000 |
| TRACH3026676 | 11.631 | 0.000 | 0.000 |
| TRACH3028855 | 22.309 | 0.000 | 0.000 |
| TRACH3032570 | 47.167 | 0.000 | 0.000 |
| TRACH3036932 | 14.659 | 0.000 | 0.000 |
| TRACH3038399 | 12.435 | 0.000 | 0.000 |
| UTERU3010409 | 3.461 | 0.000 | 0.000 |
| UTERU3013167 | 45.606 | 0.000 | 0.000 |
| BRACE3046450 | 21.984 | 0.000 | 0.000 |
| BRAWH3013197 | 100.000 | 0.000 | 0.000 |
| BRAWH3028645 | 100.000 | 0.000 | 0.000 |
| BRTHA3004432 | 32.087 | 0.000 | 0.000 |
| TRACH1000193 | 21.722 | 0.000 | 0.000 |

[0642] The result of comparative analysis of cDNA libraries derived from the substantia nigra (BRSSN), and from whole tissues of a normal brain (BRAWH) showed following genes whose expression levels differed between the two.

TABLE 5

| Clone ID | BRAWH | BRSSN |
|---|---|---|
| ASTRO2016114 | 14.497 | 0.000 |
| BRACE2012528 | 3.794 | 0.000 |
| BRACE2017844 | 0.000 | 38.254 |
| BRACE3004371 | 11.270 | 0.000 |
| BRACE3004767 | 58.488 | 0.000 |
| BRACE3022340 | 58.488 | 0.000 |
| BRACE3025719 | 0.000 | 67.040 |
| BRACE3026802 | 0.000 | 63.610 |
| BRACE3031185 | 58.488 | 0.000 |
| BRACE3031743 | 5.455 | 0.000 |
| BRACE3032385 | 13.674 | 0.000 |
| BRACE3032631 | 12.612 | 0.000 |
| BRACE3039358 | 41.331 | 0.000 |
| BRACE3040863 | 17.888 | 0.000 |
| BRACE3042432 | 58.488 | 0.000 |
| BRACE3045981 | 26.434 | 0.000 |
| BRAMY2031516 | 14.772 | 0.000 |
| BRAMY3002329 | 20.323 | 0.000 |
| BRAMY3004126 | 49.811 | 0.000 |
| BRAMY3005912 | 21.416 | 0.000 |
| BRAMY3008436 | 5.603 | 10.427 |
| BRAWH2000256 | 100.000 | 0.000 |
| BRAWH2002333 | 100.000 | 0.000 |
| BRAWH2004078 | 10.539 | 0.000 |
| BRAWH2010364 | 34.464 | 0.000 |
| BRAWH2010619 | 100.000 | 0.000 |
| BRAWH2011796 | 100.000 | 0.000 |
| BRAWH2011812 | 13.544 | 0.000 |
| BRAWH2011958 | 100.000 | 0.000 |
| BRAWH2012054 | 100.000 | 0.000 |
| BRAWH2012866 | 8.503 | 0.000 |
| BRAWH2013955 | 100.000 | 0.000 |
| BRAWH2014053 | 23.222 | 0.000 |
| BRAWH2016209 | 8.306 | 0.000 |
| BRAWH2016223 | 100.000 | 0.000 |
| BRAWH2016305 | 4.308 | 0.000 |
| BRAWH2016514 | 35.037 | 0.000 |
| BRAWH2016562 | 49.499 | 0.000 |
| BRAWH2016785 | 100.000 | 0.000 |
| BRAWH3000446 | 100.000 | 0.000 |
| BRAWH3000884 | 100.000 | 0.000 |
| BRAWH3001053 | 100.000 | 0.000 |
| BRAWH3001638 | 100.000 | 0.000 |
| BRAWH3001783 | 100.000 | 0.000 |
| BRAWH3001833 | 100.000 | 0.000 |
| BRAWH3003244 | 100.000 | 0.000 |
| BRAWH3003573 | 20.162 | 0.000 |
| BRAWH3003975 | 100.000 | 0.000 |
| BRAWH3004335 | 100.000 | 0.000 |
| BRAWH3004350 | 16.580 | 0.000 |
| BRAWH3005037 | 100.000 | 0.000 |
| BRAWH3005886 | 100.000 | 0.000 |
| BRAWH3005892 | 100.000 | 0.000 |
| BRAWH3005896 | 100.000 | 0.000 |
| BRAWH3008167 | 100.000 | 0.000 |
| BRAWH3008559 | 100.000 | 0.000 |
| BRAWH3008867 | 100.000 | 0.000 |
| BRAWH3009961 | 47.417 | 0.000 |
| BRAWH3010461 | 16.435 | 7.646 |
| BRAWH3010602 | 100.000 | 0.000 |
| BRAWH3010657 | 100.000 | 0.000 |
| BRAWH3010726 | 100.000 | 0.000 |
| BRAWH3010833 | 100.000 | 0.000 |
| BRAWH3011101 | 100.000 | 0.000 |
| BRAWH3011331 | 100.000 | 0.000 |
| BRAWH3011402 | 100.000 | 0.000 |
| BRAWH3011577 | 100.000 | 0.000 |
| BRAWH3011623 | 100.000 | 0.000 |
| BRAWH3011685 | 100.000 | 0.000 |
| BRAWH3011907 | 47.417 | 0.000 |
| BRAWH3011929 | 100.000 | 0.000 |
| BRAWH3012005 | 100.000 | 0.000 |
| BRAWH3012662 | 33.972 | 0.000 |
| BRAWH3012779 | 100.000 | 0.000 |
| BRAWH3013009 | 100.000 | 0.000 |
| BRAWH3013049 | 100.000 | 0.000 |
| BRAWH3013264 | 100.000 | 0.000 |
| BRAWH3013508 | 100.000 | 0.000 |
| BRAWH3014609 | 44.597 | 0.000 |
| BRAWH3014639 | 100.000 | 0.000 |
| BRAWH3015017 | 100.000 | 0.000 |
| BRAWH3015175 | 100.000 | 0.000 |
| BRAWH3015610 | 100.000 | 0.000 |
| BRAWH3015825 | 100.000 | 0.000 |
| BRAWH3016123 | 100.000 | 0.000 |
| BRAWH3016715 | 100.000 | 0.000 |
| BRAWH3017180 | 28.251 | 0.000 |
| BRAWH3017259 | 13.996 | 0.000 |
| BRAWH3017260 | 100.000 | 0.000 |
| BRAWH3017477 | 100.000 | 0.000 |
| BRAWH3017980 | 49.811 | 0.000 |
| BRAWH3018063 | 15.836 | 0.000 |
| BRAWH3018369 | 100.000 | 0.000 |
| BRAWH3018548 | 100.000 | 0.000 |
| BRAWH3018969 | 100.000 | 0.000 |
| BRAWH3019026 | 100.000 | 0.000 |
| BRAWH3019529 | 100.000 | 0.000 |
| BRAWH3019594 | 100.000 | 0.000 |
| BRAWH3019820 | 100.000 | 0.000 |
| BRAWH3020200 | 100.000 | 0.000 |
| BRAWH3020318 | 100.000 | 0.000 |
| BRAWH3020884 | 100.000 | 0.000 |
| BRAWH3020928 | 49.499 | 0.000 |
| BRAWH3021012 | 100.000 | 0.000 |
| BRAWH3021574 | 9.400 | 17.492 |
| BRAWH3021580 | 100.000 | 0.000 |
| BRAWH3021641 | 100.000 | 0.000 |
| BRAWH3021643 | 100.000 | 0.000 |
| BRAWH3021724 | 100.000 | 0.000 |
| BRAWH3022347 | 100.000 | 0.000 |
| BRAWH3022431 | 100.000 | 0.000 |
| BRAWH3022459 | 100.000 | 0.000 |
| BRAWH3022542 | 100.000 | 0.000 |
| BRAWH3022651 | 9.828 | 6.097 |
| BRAWH3022719 | 100.000 | 0.000 |
| BRAWH3022900 | 100.000 | 0.000 |
| BRAWH3023156 | 100.000 | 0.000 |
| BRAWH3023168 | 100.000 | 0.000 |
| BRAWH3023172 | 0.916 | 0.000 |
| BRAWH3023274 | 100.000 | 0.000 |
| BRAWH3023421 | 100.000 | 0.000 |
| BRAWH3024186 | 19.959 | 0.000 |
| BRAWH3024231 | 100.000 | 0.000 |
| BRAWH3024242 | 31.843 | 0.000 |
| BRAWH3024506 | 100.000 | 0.000 |
| BRAWH3024989 | 2.369 | 0.000 |
| BRAWH3026349 | 100.000 | 0.000 |
| BRAWH3026938 | 6.894 | 0.000 |
| BRAWH3027420 | 100.000 | 0.000 |
| BRAWH3027440 | 58.488 | 0.000 |
| BRAWH3027533 | 11.008 | 0.000 |
| BRAWH3027574 | 47.417 | 0.000 |
| BRAWH3027607 | 100.000 | 0.000 |
| BRAWH3027616 | 100.000 | 0.000 |
| BRAWH3027675 | 100.000 | 0.000 |
| BRAWH3027806 | 100.000 | 0.000 |
| BRAWH3027880 | 100.000 | 0.000 |
| BRAWH3028202 | 100.000 | 0.000 |
| BRAWH3028223 | 100.000 | 0.000 |
| BRAWH3028461 | 100.000 | 0.000 |
| BRAWH3028754 | 100.000 | 0.000 |
| BRAWH3028796 | 100.000 | 0.000 |
| BRAWH3029313 | 100.000 | 0.000 |
| BRAWH3029385 | 35.187 | 0.000 |
| BRAWH3029538 | 100.000 | 0.000 |
| BRAWH3029806 | 26.735 | 0.000 |
| BRAWH3030772 | 100.000 | 0.000 |
| BRAWH3030810 | 21.287 | 0.000 |
| BRAWH3030910 | 100.000 | 0.000 |
| BRAWH3031054 | 100.000 | 0.000 |
| BRAWH3031342 | 10.856 | 0.000 |
| BRAWH3031710 | 100.000 | 0.000 |
| BRAWH3032298 | 100.000 | 0.000 |
| BRAWH3032340 | 100.000 | 0.000 |
| BRAWH3032571 | 100.000 | 0.000 |
| BRAWH3033117 | 100.000 | 0.000 |
| BRAWH3033293 | 100.000 | 0.000 |
| BRAWH3033448 | 100.000 | 0.000 |
| BRAWH3033513 | 100.000 | 0.000 |
| BRAWH3034097 | 100.000 | 0.000 |
| BRAWH3034114 | 100.000 | 0.000 |
| BRAWH3034134 | 100.000 | 0.000 |
| BRAWH3034668 | 100.000 | 0.000 |
| BRAWH3034743 | 16.662 | 0.000 |
| BRAWH3034775 | 100.000 | 0.000 |
| BRAWH3034890 | 100.000 | 0.000 |
| BRAWH3035403 | 35.337 | 0.000 |
| BRAWH3035904 | 100.000 | 0.000 |
| BRAWH3035914 | 100.000 | 0.000 |
| BRAWH3035936 | 70.575 | 0.000 |
| BRAWH3036077 | 100.000 | 0.000 |
| BRAWH3036247 | 54.530 | 0.000 |
| BRAWH3036270 | 100.000 | 0.000 |
| BRAWH3036334 | 6.241 | 0.000 |
| BRAWH3036561 | 100.000 | 0.000 |
| BRAWH3037265 | 44.597 | 0.000 |
| BRAWH3037394 | 100.000 | 0.000 |
| BRAWH3037428 | 5.877 | 21.873 |
| BRAWH3037533 | 100.000 | 0.000 |
| BRAWH3037979 | 100.000 | 0.000 |
| BRAWH3038055 | 100.000 | 0.000 |
| BRAWH3038230 | 100.000 | 0.000 |
| BRAWH3038252 | 100.000 | 0.000 |
| BRAWH3038324 | 100.000 | 0.000 |
| BRCAN2010665 | 19.610 | 0.000 |
| BRCAN2022126 | 4.855 | 0.000 |
| BRCAN2025093 | 21.732 | 0.000 |
| BRCOC2012386 | 11.403 | 0.000 |
| BRHIP2015153 | 20.038 | 0.000 |
| BRHIP2027077 | 2.020 | 0.000 |
| BRHIP2029643 | 0.000 | 55.599 |
| BRHIP3001573 | 24.474 | 0.000 |
| BRHIP3002000 | 4.500 | 5.583 |
| BRHIP3003063 | 10.960 | 0.000 |
| BRHIP3003984 | 27.477 | 0.000 |
| BRHIP3004774 | 39.520 | 0.000 |
| BRHIP3007223 | 2.016 | 0.000 |
| BRHIP3007409 | 31.957 | 0.000 |
| BRHIP3008320 | 23.349 | 0.000 |
| BRHIP3014675 | 37.925 | 0.000 |
| BRHIP3017855 | 15.316 | 0.000 |
| BRHIP3018784 | 6.930 | 0.000 |
| BRHIP3020046 | 0.000 | 3.770 |
| BRHIP3021019 | 7.745 | 0.000 |
| BRHIP3028246 | 22.147 | 0.000 |
| BRHIP3028570 | 31.957 | 0.000 |
| BRSSN2004303 | 0.000 | 100.000 |
| BRSSN2004710 | 0.000 | 100.000 |
| BRSSN2008464 | 0.000 | 100.000 |
| BRSSN2011843 | 0.000 | 44.546 |
| BRSSN2012157 | 0.000 | 100.000 |
| BRSSN2012198 | 0.000 | 100.000 |
| BRSSN2013696 | 0.000 | 13.293 |
| BRSSN2015497 | 0.000 | 26.619 |
| BRSSN2018218 | 0.000 | 100.000 |
| BRSTN2010089 | 6.598 | 0.000 |
| BRSTN2011961 | 0.000 | 1.078 |
| BRSTN2012069 | 0.047 | 0.000 |
| BRSTN2016992 | 1.476 | 5.495 |
| BRSTN2017104 | 0.000 | 7.257 |
| BRTHA2033155 | 4.253 | 15.830 |
| BRTHA3003736 | 4.302 | 0.000 |
| BRTHA3005988 | 31.076 | 0.000 |
| BRTHA3010135 | 20.010 | 0.000 |
| BRTHA3010212 | 5.525 | 0.000 |
| BRTHA3011194 | 3.534 | 0.000 |
| BRTHA3011265 | 25.596 | 0.000 |
| BRTHA3017791 | 11.821 | 0.000 |
| BRTHA3020771 | 31.957 | 0.000 |
| BRTHA3021971 | 1.941 | 0.000 |
| BRTHA3023403 | 14.857 | 0.000 |
| CTONG2006235 | 9.828 | 6.097 |
| CTONG2009033 | 25.755 | 0.000 |
| CTONG2011801 | 0.000 | 11.021 |
| CTONG2020582 | 9.594 | 0.000 |
| D90ST2003106 | 6.904 | 0.000 |
| DFNES2001829 | 9.228 | 0.000 |
| KIDNE2010049 | 3.438 | 0.000 |
| MESAN2017133 | 17.548 | 0.000 |
| NT2RI2009233 | 6.767 | 0.000 |
| NT2RI2015533 | 6.216 | 0.000 |
| NT2RI3005923 | 19.493 | 0.000 |
| NT2RI3009524 | 35.496 | 0.000 |
| NT2RP7007387 | 6.158 | 0.000 |
| NT2RP8001605 | 29.324 | 0.000 |
| NT2RP8007920 | 1.978 | 7.363 |
| NTONG2008483 | 2.397 | 0.000 |
| OCBBF2003518 | 2.062 | 0.000 |
| OCBBF2018618 | 16.218 | 0.000 |
| OCBBF3001333 | 9.639 | 0.000 |
| OCBBF3004487 | 4.531 | 0.000 |
| PLACE7004103 | 3.880 | 0.000 |
| PLACE7006240 | 25.174 | 0.000 |
| PROST2007444 | 4.374 | 8.140 |
| SMINT2009292 | 0.000 | 13.202 |
| T1ESE2000904 | 0.000 | 8.593 |
| TBAES2007428 | 5.371 | 0.000 |
| TESTI2005112 | 19.455 | 0.000 |
| TESTI2021654 | 9.773 | 0.000 |
| TESTI4002072 | 16.696 | 0.000 |
| TESTI4002774 | 4.103 | 0.000 |
| TESTI4002799 | 1.767 | 0.000 |
| TESTI4003602 | 25.967 | 0.000 |
| TESTI4004210 | 36.051 | 0.000 |
| TESTI4005399 | 7.797 | 0.000 |
| TESTI4005653 | 1.989 | 0.000 |
| TESTI4006441 | 60.471 | 0.000 |
| TESTI4014908 | 36.051 | 0.000 |
| TESTI4022158 | 53.386 | 0.000 |
| THYMU3000776 | 15.604 | 0.000 |
| THYMU3002887 | 4.680 | 2.903 |
| THYMU3003350 | 54.530 | 0.000 |
| THYMU3021586 | 20.651 | 0.000 |
| THYMU3026000 | 49.066 | 0.000 |
| THYMU3026306 | 46.281 | 0.000 |
| THYMU3026350 | 14.291 | 0.000 |
| THYMU3032798 | 9.668 | 0.000 |
| THYMU3032867 | 12.871 | 0.000 |
| THYMU3037827 | 54.530 | 0.000 |
| THYMU3038214 | 39.314 | 0.000 |
| THYMU3044075 | 37.925 | 0.000 |
| TRACH2013585 | 23.471 | 0.000 |
| TRACH3002752 | 10.215 | 19.010 |
| TRACH3003037 | 64.100 | 0.000 |
| TRACH3003872 | 2.745 | 10.216 |
| TRACH3004424 | 17.006 | 0.000 |
| TRACH3006717 | 18.347 | 0.000 |
| TRACH3007625 | 1.175 | 0.000 |
| TRACH3007689 | 47.167 | 0.000 |
| TRACH3008632 | 25.351 | 0.000 |
| TRACH3009008 | 24.495 | 0.000 |
| TRACH3010079 | 48.305 | 0.000 |
| TRACH3016805 | 4.502 | 0.000 |
| TRACH3016885 | 3.978 | 0.000 |
| TRACH3022198 | 0.000 | 30.935 |
| TRACH3024342 | 47.167 | 0.000 |
| TRACH3024671 | 47.167 | 0.000 |
| TRACH3026303 | 5.605 | 0.000 |
| TRACH3026676 | 11.631 | 0.000 |
| TRACH3028855 | 22.309 | 0.000 |
| TRACH3032570 | 47.167 | 0.000 |
| TRACH3036932 | 14.659 | 0.000 |
| TRACH3038399 | 12.435 | 0.000 |
| UTERU3010409 | 3.461 | 0.000 |
| UTERU3013167 | 45.606 | 0.000 |
| BRACE3046450 | 21.984 | 0.000 |
| BRAWH3013197 | 100.000 | 0.000 |
| BRAWH3028645 | 100.000 | 0.000 |
| BRTHA3004432 | 32.087 | 0.000 |
| TRACH1000193 | 21.722 | 0.000 |

[0643] The result of comparative analysis of cDNA libraries derived from the hippocampus (BRHIP), and from whole tissues of a normal brain (BRAWH) showed following genes whose expression levels differed between the two.

TABLE 6

| Clone ID | BRAWH | BRHIP |
|---|---|---|
| ASTRO2016114 | 14.497 | 0.000 |
| BRACE2002392 | 0.000 | 5.275 |
| BRACE2012528 | 3.794 | 4.354 |
| BRACE2017359 | 0.000 | 41.817 |
| BRACE2017397 | 0.000 | 4.813 |
| BRACE2017844 | 0.000 | 5.243 |
| BRACE3004046 | 0.000 | 58.973 |
| BRACE3004371 | 11.270 | 7.666 |
| BRACE3004767 | 58.488 | 0.000 |
| BRACE3009416 | 0.000 | 29.118 |
| BRACE3022340 | 58.488 | 0.000 |
| BRACE3027931 | 0.000 | 34.325 |
| BRACE3029021 | 0.000 | 74.193 |
| BRACE3031185 | 58.488 | 0.000 |
| BRACE3031743 | 5.455 | 5.566 |
| BRACE3032385 | 13.674 | 20.927 |
| BRACE3032631 | 12.612 | 0.000 |
| BRACE3036156 | 0.000 | 44.660 |
| BRACE3039358 | 41.331 | 21.084 |
| BRACE3040863 | 17.888 | 18.250 |
| BRACE3042326 | 0.000 | 35.796 |
| BRACE3042432 | 58.488 | 0.000 |
| BRACE3045078 | 0.000 | 41.817 |
| BRACE3045981 | 26.434 | 0.000 |
| BRAMY2031516 | 14.772 | 7.536 |
| BRAMY3002329 | 20.323 | 34.558 |
| BRAMY3004126 | 49.811 | 0.000 |
| BRAMY3005184 | 0.000 | 22.861 |
| BRAMY3005912 | 21.416 | 0.000 |
| BRAMY3007078 | 0.000 | 50.312 |
| BRAMY3008436 | 5.603 | 27.152 |
| BRAMY4000915 | 0.000 | 50.312 |
| BRAWH2000256 | 100.000 | 0.000 |
| BRAWH2002333 | 100.000 | 0.000 |
| BRAWH2004078 | 10.539 | 0.000 |
| BRAWH2010364 | 34.464 | 17.581 |
| BRAWH2010619 | 100.000 | 0.000 |
| BRAWH2011796 | 100.000 | 0.000 |
| BRAWH2011812 | 13.544 | 0.000 |
| BRAWH2011958 | 100.000 | 0.000 |
| BRAWH2012054 | 100.000 | 0.000 |
| BRAWH2012866 | 8.503 | 4.337 |
| BRAWH2013955 | 100.000 | 0.000 |
| BRAWH2014053 | 23.222 | 0.000 |
| BRAWH2016209 | 8.306 | 0.000 |
| BRAWH2016223 | 100.000 | 0.000 |
| BRAWH2016305 | 4.308 | 0.000 |
| BRAWH2016514 | 35.037 | 35.747 |
| BRAWH2016562 | 49.499 | 50.501 |
| BRAWH2016785 | 100.000 | 0.000 |
| BRAWH3000446 | 100.000 | 0.000 |
| BRAWH3000884 | 100.000 | 0.000 |
| BRAWH3001053 | 100.000 | 0.000 |
| BRAWH3001638 | 100.000 | 0.000 |
| BRAWH3001783 | 100.000 | 0.000 |
| BRAWH3001833 | 100.000 | 0.000 |
| BRAWH3003244 | 100.000 | 0.000 |
| BRAWH3003573 | 20.162 | 0.000 |
| BRAWH3003975 | 100.000 | 0.000 |
| BRAWH3004335 | 100.000 | 0.000 |
| BRAWH3004350 | 16.580 | 0.000 |
| BRAWH3005037 | 100.000 | 0.000 |
| BRAWH3005886 | 100.000 | 0.000 |
| BRAWH3005892 | 100.000 | 0.000 |
| BRAWH3005896 | 100.000 | 0.000 |
| BRAWH3008167 | 100.000 | 0.000 |
| BRAWH3008559 | 100.000 | 0.000 |
| BRAWH3008867 | 100.000 | 0.000 |
| BRAWH3009961 | 47.417 | 0.000 |
| BRAWH3010461 | 16.435 | 8.384 |
| BRAWH3010602 | 100.000 | 0.000 |
| BRAWH3010657 | 100.000 | 0.000 |
| BRAWH3010726 | 100.000 | 0.000 |
| BRAWH3010833 | 100.000 | 0.000 |
| BRAWH3011101 | 100.000 | 0.000 |
| BRAWH3011331 | 100.000 | 0.000 |
| BRAWH3011402 | 100.000 | 0.000 |
| BRAWH3011577 | 100.000 | 0.000 |
| BRAWH3011623 | 100.000 | 0.000 |
| BRAWH3011685 | 100.000 | 0.000 |
| BRAWH3011907 | 47.417 | 0.000 |
| BRAWH3011929 | 100.000 | 0.000 |
| BRAWH3012005 | 100.000 | 0.000 |
| BRAWH3012662 | 33.972 | 11.553 |
| BRAWH3012779 | 100.000 | 0.000 |
| BRAWH3013009 | 100.000 | 0.000 |
| BRAWH3013049 | 100.000 | 0.000 |
| BRAWH3013264 | 100.000 | 0.000 |
| BRAWH3013508 | 100.000 | 0.000 |
| BRAWH3014609 | 44.597 | 0.000 |
| BRAWH3014639 | 100.000 | 0.000 |
| BRAWH3015017 | 100.000 | 0.000 |
| BRAWH3015175 | 100.000 | 0.000 |
| BRAWH3015610 | 100.000 | 0.000 |
| BRAWH3015825 | 100.000 | 0.000 |
| BRAWH3016123 | 100.000 | 0.000 |
| BRAWH3016715 | 100.000 | 0.000 |
| BRAWH3017180 | 28.251 | 0.000 |
| BRAWH3017259 | 13.996 | 0.000 |
| BRAWH3017260 | 100.000 | 0.000 |
| BRAWH3017477 | 100.000 | 0.000 |
| BRAWH3017980 | 49.811 | 0.000 |
| BRAWH3018063 | 15.836 | 0.000 |
| BRAWH3018369 | 100.000 | 0.000 |
| BRAWH3018548 | 100.000 | 0.000 |
| BRAWH3018969 | 100.000 | 0.000 |
| BRAWH3019026 | 100.000 | 0.000 |
| BRAWH3019529 | 100.000 | 0.000 |
| BRAWH3019594 | 100.000 | 0.000 |
| BRAWH3019820 | 100.000 | 0.000 |
| BRAWH3020200 | 100.000 | 0.000 |
| BRAWH3020318 | 100.000 | 0.000 |
| BRAWH3020884 | 100.000 | 0.000 |
| BRAWH3020928 | 49.499 | 50.501 |
| BRAWH3021012 | 100.000 | 0.000 |
| BRAWH3021574 | 9.400 | 0.000 |
| BRAWH3021580 | 100.000 | 0.000 |
| BRAWH3021641 | 100.000 | 0.000 |
| BRAWH3021643 | 100.000 | 0.000 |
| BRAWH3021724 | 100.000 | 0.000 |
| BRAWH3022347 | 100.000 | 0.000 |
| BRAWH3022431 | 100.000 | 0.000 |
| BRAWH3022459 | 100.000 | 0.000 |
| BRAWH3022542 | 100.000 | 0.000 |
| BRAWH3022651 | 9.828 | 5.014 |
| BRAWH3022719 | 100.000 | 0.000 |
| BRAWH3022900 | 100.000 | 0.000 |
| BRAWH3023156 | 100.000 | 0.000 |
| BRAWH3023168 | 100.000 | 0.000 |
| BRAWH3023172 | 0.916 | 1.869 |
| BRAWH3023274 | 100.000 | 0.000 |
| BRAWH3023421 | 100.000 | 0.000 |
| BRAWH3024186 | 19.959 | 10.182 |
| BRAWH3024231 | 100.000 | 0.000 |
| BRAWH3024242 | 31.843 | 32.488 |
| BRAWH3024506 | 100.000 | 0.000 |
| BRAWH3024989 | 2.369 | 4.834 |
| BRAWH3026349 | 100.000 | 0.000 |
| BRAWH3026938 | 6.894 | 2.344 |
| BRAWH3027420 | 100.000 | 0.000 |
| BRAWH3027440 | 58.488 | 0.000 |
| BRAWH3027533 | 11.008 | 0.000 |
| BRAWH3027574 | 47.417 | 0.000 |
| BRAWH3027607 | 100.000 | 0.000 |
| BRAWH3027616 | 100.000 | 0.000 |
| BRAWH3027675 | 100.000 | 0.000 |
| BRAWH3027806 | 100.000 | 0.000 |
| BRAWH3027880 | 100.000 | 0.000 |
| BRAWH3028202 | 100.000 | 0.000 |
| BRAWH3028223 | 100.000 | 0.000 |
| BRAWH3028461 | 100.000 | 0.000 |
| BRAWH3028754 | 100.000 | 0.000 |
| BRAWH3028796 | 100.000 | 0.000 |
| BRAWH3029313 | 100.000 | 0.000 |
| BRAWH3029385 | 35.187 | 17.949 |
| BRAWH3029538 | 100.000 | 0.000 |
| BRAWH3029806 | 26.735 | 0.000 |
| BRAWH3030772 | 100.000 | 0.000 |
| BRAWH3030810 | 21.287 | 0.000 |
| BRAWH3030910 | 100.000 | 0.000 |
| BRAWH3031054 | 100.000 | 0.000 |
| BRAWH3031342 | 10.856 | 0.000 |
| BRAWH3031710 | 100.000 | 0.000 |
| BRAWH3032298 | 100.000 | 0.000 |
| BRAWH3032340 | 100.000 | 0.000 |
| BRAWH3032571 | 100.000 | 0.000 |
| BRAWH3033117 | 100.000 | 0.000 |
| BRAWH3033293 | 100.000 | 0.000 |
| BRAWH3033448 | 100.000 | 0.000 |
| BRAWH3033513 | 100.000 | 0.000 |
| BRAWH3034097 | 100.000 | 0.000 |
| BRAWH3034114 | 100.000 | 0.000 |
| BRAWH3034134 | 100.000 | 0.000 |
| BRAWH3034668 | 100.000 | 0.000 |
| BRAWH3034743 | 16.662 | 21.249 |
| BRAWH3034775 | 100.000 | 0.000 |
| BRAWH3034890 | 100.000 | 0.000 |
| BRAWH3035403 | 35.337 | 0.000 |
| BRAWH3035904 | 100.000 | 0.000 |
| BRAWH3035914 | 100.000 | 0.000 |
| BRAWH3035936 | 70.575 | 0.000 |
| BRAWH3036077 | 100.000 | 0.000 |
| BRAWH3036247 | 54.530 | 0.000 |
| BRAWH3036270 | 100.000 | 0.000 |
| BRAWH3036334 | 6.241 | 19.102 |
| BRAWH3036561 | 100.000 | 0.000 |
| BRAWH3037265 | 44.597 | 0.000 |
| BRAWH3037394 | 100.000 | 0.000 |
| BRAWH3037428 | 5.877 | 0.000 |
| BRAWH3037533 | 100.000 | 0.000 |
| BRAWH3037979 | 100.000 | 0.000 |
| BRAWH3038055 | 100.000 | 0.000 |
| BRAWH3038230 | 100.000 | 0.000 |
| BRAWH3038252 | 100.000 | 0.000 |
| BRAWH3038324 | 100.000 | 0.000 |
| BRCAN2010665 | 19.610 | 13.338 |
| BRCAN2019953 | 0.000 | 9.704 |
| BRCAN2022126 | 4.855 | 4.954 |
| BRCAN2025093 | 21.732 | 0.000 |
| BRCOC2012386 | 11.403 | 0.000 |
| BRHIP2006819 | 0.000 | 100.000 |
| BRHIP2006921 | 0.000 | 100.000 |
| BRHIP2008756 | 0.000 | 100.000 |
| BRHIP2009177 | 0.000 | 100.000 |
| BRHIP2011199 | 0.000 | 55.026 |
| BRHIP2013958 | 0.000 | 36.661 |
| BRHIP2015153 | 20.038 | 20.443 |
| BRHIP2016125 | 0.000 | 100.000 |
| BRHIP2017714 | 0.000 | 100.000 |
| BRHIP2020930 | 0.000 | 100.000 |
| BRHIP2021929 | 0.000 | 100.000 |
| BRHIP2023735 | 0.000 | 100.000 |
| BRHIP2024941 | 0.000 | 100.000 |
| BRHIP2026346 | 0.000 | 100.000 |
| BRHIP2027077 | 2.020 | 2.061 |
| BRHIP2027563 | 0.000 | 100.000 |
| BRHIP2029529 | 0.000 | 100.000 |
| BRHIP2029643 | 0.000 | 15.240 |
| BRHIP2029663 | 0.000 | 45.093 |
| BRHIP3000626 | 0.000 | 100.000 |
| BRHIP3000859 | 0.000 | 100.000 |
| BRHIP3001076 | 0.000 | 46.104 |
| BRHIP3001141 | 0.000 | 100.000 |
| BRHIP3001338 | 0.000 | 100.000 |
| BRHIP3001360 | 0.000 | 58.973 |
| BRHIP3001481 | 0.000 | 38.435 |
| BRHIP3001573 | 24.474 | 24.970 |
| BRHIP3001878 | 0.000 | 100.000 |
| BRHIP3002000 | 4.500 | 3.826 |
| BRHIP3002114 | 0.000 | 39.793 |
| BRHIP3002124 | 0.000 | 100.000 |
| BRHIP3002141 | 0.000 | 16.008 |
| BRHIP3002363 | 0.000 | 100.000 |
| BRHIP3002691 | 0.000 | 16.923 |
| BRHIP3002920 | 0.000 | 64.789 |
| BRHIP3002931 | 0.000 | 100.000 |
| BRHIP3003063 | 10.960 | 55.910 |
| BRHIP3003126 | 0.000 | 74.193 |
| BRHIP3003306 | 0.000 | 60.949 |
| BRHIP3003340 | 0.000 | 100.000 |
| BRHIP3003395 | 0.000 | 100.000 |
| BRHIP3003688 | 0.000 | 100.000 |
| BRHIP3003795 | 0.000 | 45.093 |
| BRHIP3003845 | 0.000 | 10.774 |
| BRHIP3003961 | 0.000 | 19.351 |
| BRHIP3003984 | 27.477 | 28.033 |
| BRHIP3004215 | 0.000 | 13.851 |
| BRHIP3004710 | 0.000 | 100.000 |
| BRHIP3004725 | 0.000 | 100.000 |
| BRHIP3004774 | 39.520 | 60.480 |
| BRHIP3004786 | 0.000 | 100.000 |
| BRHIP3005037 | 0.000 | 82.401 |
| BRHIP3005142 | 0.000 | 60.949 |
| BRHIP3005231 | 0.000 | 100.000 |
| BRHIP3005307 | 0.000 | 46.104 |
| BRHIP3005673 | 0.000 | 52.564 |
| BRHIP3005801 | 0.000 | 19.121 |
| BRHIP3005944 | 0.000 | 100.000 |
| BRHIP3006279 | 0.000 | 100.000 |
| BRHIP3006294 | 0.000 | 40.683 |
| BRHIP3006449 | 0.000 | 100.000 |
| BRHIP3006786 | 0.000 | 100.000 |
| BRHIP3006950 | 0.000 | 100.000 |
| BRHIP3007172 | 0.000 | 100.000 |
| BRHIP3007195 | 0.000 | 75.737 |
| BRHIP3007223 | 2.016 | 2.057 |
| BRHIP3007291 | 0.000 | 100.000 |
| BRHIP3007409 | 31.957 | 32.604 |
| BRHIP3007424 | 0.000 | 100.000 |
| BRHIP3007609 | 0.000 | 100.000 |
| BRHIP3007960 | 0.000 | 100.000 |
| BRHIP3008082 | 0.000 | 45.093 |
| BRHIP3008320 | 23.349 | 47.644 |
| BRHIP3008714 | 0.000 | 100.000 |
| BRHIP3009672 | 0.000 | 100.000 |
| BRHIP3009753 | 0.000 | 1.187 |
| BRHIP3010289 | 0.000 | 100.000 |
| BRHIP3010916 | 0.000 | 45.093 |
| BRHIP3011082 | 0.000 | 100.000 |
| BRHIP3011269 | 0.000 | 100.000 |
| BRHIP3011460 | 0.000 | 100.000 |
| BRHIP3011567 | 0.000 | 100.000 |
| BRHIP3011831 | 0.000 | 100.000 |
| BRHIP3012185 | 0.000 | 100.000 |
| BRHIP3012289 | 0.000 | 100.000 |
| BRHIP3012357 | 0.000 | 100.000 |
| BRHIP3012736 | 0.000 | 33.611 |
| BRHIP3012997 | 0.000 | 2.837 |
| BRHIP3013078 | 0.000 | 100.000 |
| BRHIP3013588 | 0.000 | 60.949 |
| BRHIP3013698 | 0.000 | 100.000 |
| BRHIP3014675 | 37.925 | 19.346 |
| BRHIP3015854 | 0.000 | 100.000 |
| BRHIP3016032 | 0.000 | 100.000 |
| BRHIP3016421 | 0.000 | 100.000 |
| BRHIP3017109 | 0.000 | 100.000 |
| BRHIP3017146 | 0.000 | 66.943 |
| BRHIP3017256 | 0.000 | 100.000 |
| BRHIP3017558 | 0.000 | 100.000 |
| BRHIP3017855 | 15.316 | 11.720 |
| BRHIP3018784 | 6.930 | 3.535 |
| BRHIP3019643 | 0.000 | 100.000 |
| BRHIP3019824 | 0.000 | 100.000 |
| BRHIP3019880 | 0.000 | 100.000 |
| BRHIP3019956 | 0.000 | 100.000 |
| BRHIP3020046 | 0.000 | 2.067 |
| BRHIP3020155 | 0.000 | 100.000 |
| BRHIP3020733 | 0.000 | 55.026 |
| BRHIP3021019 | 7.745 | 7.901 |
| BRHIP3021499 | 0.000 | 100.000 |
| BRHIP3021987 | 0.000 | 36.438 |
| BRHIP3022656 | 0.000 | 100.000 |
| BRHIP3023922 | 0.000 | 100.000 |
| BRHIP3024703 | 0.000 | 100.000 |
| BRHIP3024820 | 0.000 | 100.000 |
| BRHIP3025795 | 0.000 | 100.000 |
| BRHIP3025844 | 0.000 | 100.000 |
| BRHIP3026231 | 0.000 | 100.000 |
| BRHIP3026651 | 0.000 | 100.000 |
| BRHIP3027160 | 0.000 | 100.000 |
| BRHIP3027191 | 0.000 | 100.000 |
| BRHIP3027651 | 0.000 | 100.000 |
| BRHIP3027947 | 0.000 | 100.000 |
| BRHIP3028246 | 22.147 | 22.595 |
| BRHIP3028570 | 31.957 | 32.604 |
| BRHIP3028742 | 0.000 | 100.000 |
| BRSTN2010089 | 6.598 | 0.000 |
| BRSTN2012069 | 0.047 | 0.000 |
| BRSTN2016992 | 1.476 | 2.510 |
| BRTHA2001953 | 0.000 | 9.766 |
| BRTHA2008502 | 0.000 | 22.073 |
| BRTHA2031517 | 0.000 | 47.917 |
| BRTHA2033155 | 4.253 | 0.000 |
| BRTHA2035743 | 0.000 | 34.617 |
| BRTHA3003417 | 0.000 | 31.398 |
| BRTHA3003736 | 4.302 | 6.584 |
| BRTHA3005988 | 31.076 | 0.000 |
| BRTHA3007662 | 0.000 | 64.789 |
| BRTHA3010135 | 20.010 | 0.000 |
| BRTHA3010212 | 5.525 | 0.000 |
| BRTHA3011194 | 3.534 | 10.818 |
| BRTHA3011265 | 25.596 | 0.000 |
| BRTHA3012265 | 0.000 | 64.789 |
| BRTHA3017791 | 11.821 | 4.824 |
| BRTHA3020771 | 31.957 | 32.604 |
| BRTHA3021971 | 1.941 | 1.980 |
| BRTHA3023403 | 14.857 | 15.157 |
| CHONS2002829 | 0.000 | 11.668 |
| CTONG2006235 | 9.828 | 5.014 |
| CTONG2009033 | 25.755 | 26.276 |
| CTONG2020582 | 9.594 | 1.958 |
| D90ST2003106 | 6.904 | 0.000 |
| DFNES2001829 | 9.228 | 18.830 |
| KIDNE2010049 | 3.438 | 0.000 |
| LIVER2008465 | 0.000 | 6.752 |
| MESAN2017133 | 17.548 | 0.000 |
| NT2RI2009233 | 6.767 | 0.000 |
| NT2RI2010795 | 0.000 | 16.827 |
| NT2RI2015533 | 6.216 | 1.586 |
| NT2RI3005923 | 19.493 | 0.000 |
| NT2RI3009524 | 35.496 | 0.000 |
| NT2RP7007387 | 6.158 | 2.094 |
| NT2RP8001605 | 29.324 | 0.000 |
| NT2RP8007920 | 1.978 | 0.000 |
| NTONG2008483 | 2.397 | 0.815 |
| OCBBF2000831 | 0.000 | 9.824 |
| OCBBF2003518 | 2.062 | 0.000 |
| OCBBF2018618 | 16.218 | 16.546 |
| OCBBF3001333 | 9.639 | 0.000 |
| OCBBF3004487 | 4.531 | 4.622 |
| PLACE7004103 | 3.880 | 5.278 |
| PLACE7006240 | 25.174 | 0.000 |
| PROST2007444 | 4.374 | 5.578 |
| SMINT2012179 | 0.000 | 18.954 |
| SYNOV4004210 | 0.000 | 1.927 |
| TBAES2007428 | 5.371 | 0.000 |
| TESTI2005112 | 19.455 | 0.000 |
| TESTI2005564 | 0.000 | 3.736 |
| TESTI2021654 | 9.773 | 0.000 |
| TESTI4001569 | 0.000 | 43.832 |
| TESTI4002072 | 16.696 | 20.440 |
| TESTI4002774 | 4.103 | 4.186 |
| TESTI4002799 | 1.767 | 2.703 |
| TESTI4003602 | 25.967 | 0.000 |
| TESTI4003703 | 0.000 | 4.514 |
| TESTI4003944 | 0.000 | 35.590 |
| TESTI4004210 | 36.051 | 0.000 |
| TESTI4005399 | 7.797 | 15.910 |
| TESTI4005653 | 1.989 | 3.551 |
| TESTI4006441 | 60.471 | 0.000 |
| TESTI4014908 | 36.051 | 0.000 |
| TESTI4022158 | 53.386 | 13.617 |
| TESTI4029297 | 0.000 | 4.514 |
| THYMU3000776 | 15.604 | 0.000 |
| THYMU3002887 | 4.680 | 6.367 |
| THYMU3003007 | 0.000 | 19.391 |
| THYMU3003350 | 54.530 | 0.000 |
| THYMU3007308 | 0.000 | 39.793 |
| THYMU3008105 | 0.000 | 20.662 |
| THYMU3021586 | 20.651 | 16.855 |
| THYMU3026000 | 49.066 | 0.000 |
| THYMU3026306 | 46.281 | 0.000 |
| THYMU3026350 | 14.291 | 14.581 |
| THYMU3032798 | 9.668 | 0.000 |
| THYMU3032867 | 12.871 | 0.000 |
| THYMU3034671 | 0.000 | 4.866 |
| THYMU3037827 | 54.530 | 0.000 |
| THYMU3038214 | 39.314 | 0.000 |
| THYMU3044075 | 37.925 | 19.346 |
| TKIDN2000319 | 0.000 | 21.607 |
| TRACH2013585 | 23.471 | 23.946 |
| TRACH3002752 | 10.215 | 10.422 |
| TRACH3003037 | 64.100 | 0.000 |
| TRACH3003872 | 2.745 | 5.600 |
| TRACH3004424 | 17.006 | 0.000 |
| TRACH3006717 | 18.347 | 11.231 |
| TRACH3007625 | 1.175 | 10.794 |
| TRACH3007689 | 47.167 | 0.000 |
| TRACH3008632 | 25.351 | 8.621 |
| TRACH3009008 | 24.495 | 0.000 |
| TRACH3010079 | 48.305 | 24.641 |
| TRACH3016805 | 4.502 | 0.000 |
| TRACH3016885 | 3.978 | 4.059 |
| TRACH3022198 | 0.000 | 8.480 |
| TRACH3024342 | 47.167 | 0.000 |
| TRACH3024671 | 47.167 | 0.000 |
| TRACH3025316 | 0.000 | 31.291 |
| TRACH3026303 | 5.605 | 11.436 |
| TRACH3026676 | 11.631 | 0.000 |
| TRACH3028855 | 22.309 | 0.000 |
| TRACH3032570 | 47.167 | 0.000 |
| TRACH3036932 | 14.659 | 14.956 |
| TRACH3038399 | 12.435 | 0.000 |
| TSTOM2000235 | 0.000 | 4.535 |
| UTERU3005422 | 0.000 | 21.641 |
| UTERU3010409 | 3.461 | 7.062 |
| UTERU3013167 | 45.606 | 0.000 |
| UTERU3016273 | 0.000 | 46.104 |
| BRACE3046450 | 21.984 | 0.000 |
| BRAWH3013197 | 100.000 | 0.000 |
| BRAWH3028645 | 100.000 | 0.000 |
| BRTHA3004432 | 32.087 | 0.000 |
| TRACH1000193 | 21.722 | 0.000 |

[0644] The result of comparative analysis of cDNA libraries derived from the cerebellum (BRACE), and from whole tissues of a normal brain (BRAWH) showed following genes whose expression levels differed between the two.

TABLE 7

| Clone ID | BRAWH | BRACE |
|---|---|---|
| ASTRO2016114 | 14.497 | 0.000 |
| BRACE1000475 | 0.000 | 100.000 |
| BRACE2002392 | 0.000 | 3.670 |
| BRACE2003628 | 0.000 | 9.684 |
| BRACE2005991 | 0.000 | 100.000 |
| BRACE2010336 | 0.000 | 9.658 |
| BRACE2012528 | 3.794 | 15.820 |
| BRACE2012625 | 0.000 | 100.000 |
| BRACE2012833 | 0.000 | 100.000 |
| BRACE2012838 | 0.000 | 100.000 |
| BRACE2012936 | 0.000 | 100.000 |
| BRACE2012947 | 0.000 | 100.000 |
| BRACE2013009 | 0.000 | 100.000 |
| BRACE2013126 | 0.000 | 100.000 |
| BRACE2013132 | 0.000 | 100.000 |
| BRACE2016896 | 0.000 | 100.000 |
| BRACE2017359 | 0.000 | 58.183 |
| BRACE2017397 | 0.000 | 3.348 |
| BRACE2017580 | 0.000 | 100.000 |
| BRACE2017844 | 0.000 | 29.179 |
| BRACE2017872 | 0.000 | 100.000 |
| BRACE2017992 | 0.000 | 100.000 |
| BRACE2019348 | 0.000 | 74.228 |
| BRACE2023633 | 0.000 | 100.000 |
| BRACE2023744 | 0.000 | 100.000 |
| BRACE2025452 | 0.000 | 100.000 |
| BRACE2026404 | 0.000 | 100.000 |
| BRACE2027312 | 0.000 | 100.000 |
| BRACE2027382 | 0.000 | 100.000 |
| BRACE2028956 | 0.000 | 100.000 |
| BRACE2030039 | 0.000 | 100.000 |
| BRACE2032584 | 0.000 | 100.000 |
| BRACE2033128 | 0.000 | 100.000 |
| BRACE2034434 | 0.000 | 100.000 |
| BRACE2035120 | 0.000 | 100.000 |
| BRACE2035191 | 0.000 | 100.000 |
| BRACE2039362 | 0.000 | 100.000 |
| BRACE2039607 | 0.000 | 100.000 |
| BRACE2042541 | 0.000 | 100.000 |
| BRACE2046976 | 0.000 | 100.000 |
| BRACE2047232 | 0.000 | 100.000 |
| BRACE2047975 | 0.000 | 100.000 |
| BRACE3001403 | 0.000 | 100.000 |
| BRACE3001973 | 0.000 | 36.360 |
| BRACE3002344 | 0.000 | 100.000 |
| BRACE3002541 | 0.000 | 100.000 |
| BRACE3002756 | 0.000 | 100.000 |
| BRACE3003866 | 0.000 | 100.000 |
| BRACE3004046 | 0.000 | 41.027 |
| BRACE3004371 | 11.270 | 10.666 |
| BRACE3004767 | 58.488 | 41.512 |
| BRACE3004887 | 0.000 | 100.000 |
| BRACE3004981 | 0.000 | 100.000 |
| BRACE3005870 | 0.000 | 100.000 |
| BRACE3005903 | 0.000 | 100.000 |
| BRACE3006553 | 0.000 | 18.271 |
| BRACE3007649 | 0.000 | 100.000 |
| BRACE3007869 | 0.000 | 100.000 |
| BRACE3009075 | 0.000 | 100.000 |
| BRACE3009265 | 0.000 | 100.000 |
| BRACE3009392 | 0.000 | 100.000 |
| BRACE3009416 | 0.000 | 20.257 |
| BRACE3009539 | 0.000 | 100.000 |
| BRACE3010702 | 0.000 | 100.000 |
| BRACE3011447 | 0.000 | 100.000 |
| BRACE3011774 | 0.000 | 100.000 |
| BRACE3013418 | 0.000 | 100.000 |
| BRACE3013874 | 0.000 | 100.000 |
| BRACE3013986 | 0.000 | 100.000 |
| BRACE3014523 | 0.000 | 100.000 |
| BRACE3014714 | 0.000 | 100.000 |
| BRACE3015090 | 0.000 | 100.000 |
| BRACE3015898 | 0.000 | 100.000 |
| BRACE3016020 | 0.000 | 100.000 |
| BRACE3016167 | 0.000 | 100.000 |
| BRACE3016580 | 0.000 | 100.000 |
| BRACE3016788 | 0.000 | 100.000 |
| BRACE3016810 | 0.000 | 100.000 |
| BRACE3016862 | 0.000 | 100.000 |
| BRACE3017253 | 0.000 | 55.894 |
| BRACE3018083 | 0.000 | 100.000 |
| BRACE3019570 | 0.000 | 100.000 |
| BRACE3019611 | 0.000 | 100.000 |
| BRACE3019817 | 0.000 | 100.000 |
| BRACE3019941 | 0.000 | 2.074 |
| BRACE3020356 | 0.000 | 100.000 |
| BRACE3020669 | 0.000 | 38.787 |
| BRACE3021430 | 0.000 | 8.467 |
| BRACE3021517 | 0.000 | 100.000 |
| BRACE3021805 | 0.000 | 100.000 |
| BRACE3022051 | 0.000 | 100.000 |
| BRACE3022303 | 0.000 | 100.000 |
| BRACE3022312 | 0.000 | 24.151 |
| BRACE3022340 | 58.488 | 41.512 |
| BRACE3022847 | 0.000 | 100.000 |
| BRACE3023604 | 0.000 | 100.000 |
| BRACE3024379 | 0.000 | 100.000 |
| BRACE3024444 | 0.000 | 100.000 |
| BRACE3024497 | 0.000 | 100.000 |
| BRACE3024537 | 0.000 | 100.000 |
| BRACE3024879 | 0.000 | 100.000 |
| BRACE3025627 | 0.000 | 100.000 |
| BRACE3025719 | 0.000 | 12.784 |
| BRACE3026161 | 0.000 | 100.000 |
| BRACE3026290 | 0.000 | 100.000 |
| BRACE3026345 | 0.000 | 100.000 |
| BRACE3026456 | 0.000 | 100.000 |
| BRACE3026802 | 0.000 | 36.390 |
| BRACE3026844 | 0.000 | 100.000 |
| BRACE3026947 | 0.000 | 100.000 |
| BRACE3027256 | 0.000 | 100.000 |
| BRACE3027931 | 0.000 | 23.879 |
| BRACE3028360 | 0.000 | 100.000 |
| BRACE3028895 | 0.000 | 32.302 |
| BRACE3028998 | 0.000 | 100.000 |
| BRACE3029005 | 0.000 | 100.000 |
| BRACE3029021 | 0.000 | 25.807 |
| BRACE3029205 | 0.000 | 100.000 |
| BRACE3029447 | 0.000 | 100.000 |
| BRACE3030538 | 0.000 | 36.360 |
| BRACE3031161 | 0.000 | 100.000 |
| BRACE3031184 | 0.000 | 100.000 |
| BRACE3031185 | 58.488 | 41.512 |
| BRACE3031315 | 0.000 | 41.329 |
| BRACE3031372 | 0.000 | 100.000 |
| BRACE3031579 | 0.000 | 100.000 |
| BRACE3031728 | 0.000 | 100.000 |
| BRACE3031743 | 5.455 | 15.488 |
| BRACE3031843 | 0.000 | 100.000 |
| BRACE3032385 | 13.674 | 19.411 |
| BRACE3032537 | 0.000 | 100.000 |
| BRACE3032538 | 0.000 | 100.000 |
| BRACE3032631 | 12.612 | 8.951 |
| BRACE3032980 | 0.000 | 100.000 |
| BRACE3033525 | 0.000 | 100.000 |
| BRACE3034183 | 0.000 | 100.000 |
| BRACE3034389 | 0.000 | 100.000 |
| BRACE3034964 | 0.000 | 100.000 |
| BRACE3034993 | 0.000 | 100.000 |
| BRACE3035168 | 0.000 | 29.854 |
| BRACE3036156 | 0.000 | 31.069 |
| BRACE3036271 | 0.000 | 100.000 |
| BRACE3036283 | 0.000 | 5.298 |
| BRACE3037612 | 0.000 | 100.000 |
| BRACE3037637 | 0.000 | 100.000 |
| BRACE3037803 | 0.000 | 100.000 |
| BRACE3038012 | 0.000 | 100.000 |
| BRACE3038030 | 0.000 | 100.000 |
| BRACE3038570 | 0.000 | 100.000 |
| BRACE3038760 | 0.000 | 100.000 |
| BRACE3039288 | 0.000 | 100.000 |
| BRACE3039358 | 41.331 | 14.668 |
| BRACE3039378 | 0.000 | 100.000 |
| BRACE3039454 | 0.000 | 100.000 |
| BRACE3040012 | 0.000 | 100.000 |
| BRACE3040239 | 0.000 | 100.000 |
| BRACE3040504 | 0.000 | 100.000 |
| BRACE3040644 | 0.000 | 100.000 |
| BRACE3040863 | 17.888 | 12.696 |
| BRACE3041059 | 0.000 | 100.000 |
| BRACE3041162 | 0.000 | 100.000 |
| BRACE3041827 | 0.000 | 100.000 |
| BRACE3042046 | 0.000 | 100.000 |
| BRACE3042210 | 0.000 | 100.000 |
| BRACE3042326 | 0.000 | 24.903 |
| BRACE3042409 | 0.000 | 100.000 |
| BRACE3042432 | 58.488 | 41.512 |
| BRACE3042594 | 0.000 | 100.000 |
| BRACE3043597 | 0.000 | 100.000 |
| BRACE3044090 | 0.000 | 100.000 |
| BRACE3044172 | 0.000 | 100.000 |
| BRACE3044247 | 0.000 | 100.000 |
| BRACE3044377 | 0.000 | 100.000 |
| BRACE3044495 | 0.000 | 100.000 |
| BRACE3045078 | 0.000 | 58.183 |
| BRACE3045145 | 0.000 | 100.000 |
| BRACE3045424 | 0.000 | 100.000 |
| BRACE3045708 | 0.000 | 100.000 |
| BRACE3045981 | 26.434 | 56.286 |
| BRACE3046049 | 0.000 | 100.000 |
| BRACE3046152 | 0.000 | 100.000 |
| BRACE3046294 | 0.000 | 100.000 |
| BRACE3046466 | 0.000 | 100.000 |
| BRACE3046491 | 0.000 | 100.000 |
| BRACE3046609 | 0.000 | 100.000 |
| BRACE3046837 | 0.000 | 100.000 |
| BRACE3046855 | 0.000 | 100.000 |
| BRACE3046966 | 0.000 | 100.000 |
| BRACE3047018 | 0.000 | 100.000 |
| BRACE3047482 | 0.000 | 100.000 |
| BRACE3047801 | 0.000 | 100.000 |
| BRAMY2031516 | 14.772 | 0.000 |
| BRAMY3002329 | 20.323 | 9.616 |
| BRAMY3004126 | 49.811 | 0.000 |
| BRAMY3004364 | 0.000 | 4.821 |
| BRAMY3005912 | 21.416 | 30.401 |
| BRAMY3008436 | 5.603 | 5.965 |
| BRAMY3009491 | 0.000 | 22.146 |
| BRAWH2000256 | 100.000 | 0.000 |
| BRAWH2002333 | 100.000 | 0.000 |
| BRAWH2004078 | 10.539 | 3.740 |
| BRAWH2010364 | 34.464 | 36.692 |
| BRAWH2010619 | 100.000 | 0.000 |
| BRAWH2011796 | 100.000 | 0.000 |
| BRAWH2011812 | 13.544 | 0.000 |
| BRAWH2011958 | 100.000 | 0.000 |
| BRAWH2012054 | 100.000 | 0.000 |
| BRAWH2012866 | 8.503 | 3.017 |
| BRAWH2013955 | 100.000 | 0.000 |
| BRAWH2014053 | 23.222 | 16.482 |
| BRAWH2016209 | 8.306 | 11.791 |
| BRAWH2016223 | 100.000 | 0.000 |
| BRAWH2016305 | 4.308 | 0.000 |
| BRAWH2016514 | 35.037 | 0.000 |
| BRAWH2016562 | 49.499 | 0.000 |
| BRAWH2016785 | 100.000 | 0.000 |
| BRAWH3000446 | 100.000 | 0.000 |
| BRAWH3000884 | 100.000 | 0.000 |
| BRAWH3001053 | 100.000 | 0.000 |
| BRAWH3001638 | 100.000 | 0.000 |
| BRAWH3001783 | 100.000 | 0.000 |
| BRAWH3001833 | 100.000 | 0.000 |
| BRAWH3003244 | 100.000 | 0.000 |
| BRAWH3003573 | 20.162 | 14.310 |
| BRAWH3003975 | 100.000 | 0.000 |
| BRAWH3004335 | 100.000 | 0.000 |
| BRAWH3004350 | 16.580 | 0.000 |
| BRAWH3005037 | 100.000 | 0.000 |
| BRAWH3005886 | 100.000 | 0.000 |
| BRAWH3005892 | 100.000 | 0.000 |
| BRAWH3005896 | 100.000 | 0.000 |
| BRAWH3008167 | 100.000 | 0.000 |
| BRAWH3008559 | 100.000 | 0.000 |
| BRAWH3008867 | 100.000 | 0.000 |
| BRAWH3009961 | 47.417 | 0.000 |
| BRAWH3010461 | 16.435 | 10.207 |
| BRAWH3010602 | 100.000 | 0.000 |
| BRAWH3010657 | 100.000 | 0.000 |
| BRAWH3010726 | 100.000 | 0.000 |
| BRAWH3010833 | 100.000 | 0.000 |
| BRAWH3011101 | 100.000 | 0.000 |
| BRAWH3011331 | 100.000 | 0.000 |
| BRAWH3011402 | 100.000 | 0.000 |
| BRAWH3011577 | 100.000 | 0.000 |
| BRAWH3011623 | 100.000 | 0.000 |
| BRAWH3011685 | 100.000 | 0.000 |
| BRAWH3011907 | 47.417 | 0.000 |
| BRAWH3011929 | 100.000 | 0.000 |
| BRAWH3012005 | 100.000 | 0.000 |
| BRAWH3012662 | 33.972 | 0.000 |
| BRAWH3012779 | 100.000 | 0.000 |
| BRAWH3013009 | 100.000 | 0.000 |
| BRAWH3013049 | 100.000 | 0.000 |
| BRAWH3013264 | 100.000 | 0.000 |
| BRAWH3013508 | 100.000 | 0.000 |
| BRAWH3014609 | 44.597 | 0.000 |
| BRAWH3014639 | 100.000 | 0.000 |
| BRAWH3015017 | 100.000 | 0.000 |
| BRAWH3015175 | 100.000 | 0.000 |
| BRAWH3015610 | 100.000 | 0.000 |
| BRAWH3015825 | 100.000 | 0.000 |
| BRAWH3016123 | 100.000 | 0.000 |
| BRAWH3016715 | 100.000 | 0.000 |
| BRAWH3017180 | 28.251 | 40.103 |
| BRAWH3017259 | 13.996 | 4.967 |
| BRAWH3017260 | 100.000 | 0.000 |
| BRAWH3017477 | 100.000 | 0.000 |
| BRAWH3017980 | 49.811 | 0.000 |
| BRAWH3018063 | 15.836 | 0.000 |
| BRAWH3018369 | 100.000 | 0.000 |
| BRAWH3018548 | 100.000 | 0.000 |
| BRAWH3018969 | 100.000 | 0.000 |
| BRAWH3019026 | 100.000 | 0.000 |
| BRAWH3019529 | 100.000 | 0.000 |
| BRAWH3019594 | 100.000 | 0.000 |
| BRAWH3019820 | 100.000 | 0.000 |
| BRAWH3020200 | 100.000 | 0.000 |
| BRAWH3020318 | 100.000 | 0.000 |
| BRAWH3020884 | 100.000 | 0.000 |
| BRAWH3020928 | 49.499 | 0.000 |
| BRAWH3021012 | 100.000 | 0.000 |
| BRAWH3021574 | 9.400 | 3.336 |
| BRAWH3021580 | 100.000 | 0.000 |
| BRAWH3021641 | 100.000 | 0.000 |
| BRAWH3021643 | 100.000 | 0.000 |
| BRAWH3021724 | 100.000 | 0.000 |
| BRAWH3022347 | 100.000 | 0.000 |
| BRAWH3022431 | 100.000 | 0.000 |
| BRAWH3022459 | 100.000 | 0.000 |
| BRAWH3022542 | 100.000 | 0.000 |
| BRAWH3022651 | 9.828 | 1.163 |
| BRAWH3022719 | 100.000 | 0.000 |
| BRAWH3022900 | 100.000 | 0.000 |
| BRAWH3023156 | 100.000 | 0.000 |
| BRAWH3023168 | 100.000 | 0.000 |
| BRAWH3023172 | 0.916 | 0.000 |
| BRAWH3023274 | 100.000 | 0.000 |
| BRAWH3023421 | 100.000 | 0.000 |
| BRAWH3024186 | 19.959 | 0.000 |
| BRAWH3024231 | 100.000 | 0.000 |
| BRAWH3024242 | 31.843 | 0.000 |
| BRAWH3024506 | 100.000 | 0.000 |
| BRAWH3024989 | 2.369 | 0.000 |
| BRAWH3026349 | 100.000 | 0.000 |
| BRAWH3026938 | 6.894 | 4.893 |
| BRAWH3027420 | 100.000 | 0.000 |
| BRAWH3027440 | 58.488 | 41.512 |
| BRAWH3027533 | 11.008 | 0.000 |
| BRAWH3027574 | 47.417 | 0.000 |
| BRAWH3027607 | 100.000 | 0.000 |
| BRAWH3027616 | 100.000 | 0.000 |
| BRAWH3027675 | 100.000 | 0.000 |
| BRAWH3027806 | 100.000 | 0.000 |
| BRAWH3027880 | 100.000 | 0.000 |
| BRAWH3028202 | 100.000 | 0.000 |
| BRAWH3028223 | 100.000 | 0.000 |
| BRAWH3028461 | 100.000 | 0.000 |
| BRAWH3028754 | 100.000 | 0.000 |
| BRAWH3028796 | 100.000 | 0.000 |
| BRAWH3029313 | 100.000 | 0.000 |
| BRAWH3029385 | 35.187 | 12.487 |
| BRAWH3029538 | 100.000 | 0.000 |
| BRAWH3029806 | 26.735 | 0.000 |
| BRAWH3030772 | 100.000 | 0.000 |
| BRAWH3030810 | 21.287 | 67.989 |
| BRAWH3030910 | 100.000 | 0.000 |
| BRAWH3031054 | 100.000 | 0.000 |
| BRAWH3031342 | 10.856 | 7.705 |
| BRAWH3031710 | 100.000 | 0.000 |
| BRAWH3032298 | 100.000 | 0.000 |
| BRAWH3032340 | 100.000 | 0.000 |
| BRAWH3032571 | 100.000 | 0.000 |
| BRAWH3033117 | 100.000 | 0.000 |
| BRAWH3033293 | 100.000 | 0.000 |
| BRAWH3033448 | 100.000 | 0.000 |
| BRAWH3033513 | 100.000 | 0.000 |
| BRAWH3034097 | 100.000 | 0.000 |
| BRAWH3034114 | 100.000 | 0.000 |
| BRAWH3034134 | 100.000 | 0.000 |
| BRAWH3034668 | 100.000 | 0.000 |
| BRAWH3034743 | 16.662 | 5.913 |
| BRAWH3034775 | 100.000 | 0.000 |
| BRAWH3034890 | 100.000 | 0.000 |
| BRAWH3035403 | 35.337 | 25.081 |
| BRAWH3035904 | 100.000 | 0.000 |
| BRAWH3035914 | 100.000 | 0.000 |
| BRAWH3035936 | 70.575 | 0.000 |
| BRAWH3036077 | 100.000 | 0.000 |
| BRAWH3036247 | 54.530 | 0.000 |
| BRAWH3036270 | 100.000 | 0.000 |
| BRAWH3036334 | 6.241 | 4.430 |
| BRAWH3036561 | 100.000 | 0.000 |
| BRAWH3037265 | 44.597 | 0.000 |
| BRAWH3037394 | 100.000 | 0.000 |
| BRAWH3037428 | 5.877 | 25.026 |
| BRAWH3037533 | 100.000 | 0.000 |
| BRAWH3037979 | 100.000 | 0.000 |
| BRAWH3038055 | 100.000 | 0.000 |
| BRAWH3038230 | 100.000 | 0.000 |
| BRAWH3038252 | 100.000 | 0.000 |
| BRAWH3038324 | 100.000 | 0.000 |
| BRCAN2010665 | 19.610 | 0.000 |
| BRCAN2019953 | 0.000 | 6.751 |
| BRCAN2022126 | 4.855 | 3.446 |
| BRCAN2025093 | 21.732 | 0.000 |
| BRCOC2012386 | 11.403 | 0.000 |
| BRHIP2015153 | 20.038 | 14.222 |
| BRHIP2027077 | 2.020 | 0.000 |
| BRHIP2029643 | 0.000 | 10.603 |
| BRHIP3001360 | 0.000 | 41.027 |
| BRHIP3001573 | 24.474 | 0.000 |
| BRHIP3002000 | 4.500 | 0.532 |
| BRHIP3002114 | 0.000 | 27.684 |
| BRHIP3003063 | 10.960 | 0.000 |
| BRHIP3003126 | 0.000 | 25.807 |
| BRHIP3003961 | 0.000 | 13.462 |
| BRHIP3003984 | 27.477 | 29.254 |
| BRHIP3004215 | 0.000 | 9.636 |
| BRHIP3004774 | 39.520 | 0.000 |
| BRHIP3005801 | 0.000 | 13.302 |
| BRHIP3007223 | 2.016 | 1.431 |
| BRHIP3007409 | 31.957 | 0.000 |
| BRHIP3008320 | 23.349 | 0.000 |
| BRHIP3014675 | 37.925 | 26.918 |
| BRHIP3017855 | 15.316 | 13.588 |
| BRHIP3018784 | 6.930 | 0.000 |
| BRHIP3021019 | 7.745 | 0.000 |
| BRHIP3028246 | 22.147 | 0.000 |
| BRHIP3028570 | 31.957 | 0.000 |
| BRSSN2011843 | 0.000 | 8.495 |
| BRSSN2013696 | 0.000 | 12.675 |
| BRSTN2010089 | 6.598 | 4.683 |
| BRSTN2011961 | 0.000 | 3.083 |
| BRSTN2012069 | 0.047 | 0.517 |
| BRSTN2016992 | 1.476 | 5.588 |
| BRTHA2033155 | 4.253 | 9.056 |
| BRTHA2035743 | 0.000 | 4.816 |
| BRTHA3003736 | 4.302 | 1.527 |
| BRTHA3005988 | 31.076 | 0.000 |
| BRTHA3009858 | 0.000 | 16.462 |
| BRTHA3010135 | 20.010 | 0.000 |
| BRTHA3010212 | 5.525 | 0.000 |
| BRTHA3010530 | 0.000 | 19.846 |
| BRTHA3011194 | 3.534 | 0.000 |
| BRTHA3011265 | 25.596 | 0.000 |
| BRTHA3011998 | 0.000 | 56.141 |
| BRTHA3017791 | 11.821 | 9.229 |
| BRTHA3020771 | 31.957 | 0.000 |
| BRTHA3021708 | 0.000 | 39.025 |
| BRTHA3021971 | 1.941 | 0.000 |
| BRTHA3023403 | 14.857 | 0.000 |
| CHONS2002829 | 0.000 | 1.160 |
| CTONG2006235 | 9.828 | 1.163 |
| CTONG2009033 | 25.755 | 0.000 |
| CTONG2020582 | 9.594 | 1.362 |
| CTONG2027959 | 0.000 | 27.592 |
| D9OST2003106 | 6.904 | 0.000 |
| DFNES2001829 | 9.228 | 6.550 |
| KIDNE2010049 | 3.438 | 0.000 |
| KIDNE2017153 | 0.000 | 16.915 |
| LIVER2008465 | 0.000 | 4.697 |
| MESAN2017133 | 17.548 | 0.000 |
| NOVAR2000783 | 0.000 | 2.684 |
| NT2RI2009233 | 6.767 | 1.601 |
| NT2RI2015533 | 6.216 | 3.309 |
| NT2RI3005923 | 19.493 | 0.000 |
| NT2RI3009524 | 35.496 | 0.000 |
| NT2RP7007387 | 6.158 | 0.000 |
| NT2RP8001605 | 29.324 | 0.000 |
| NT2RP8007920 | 1.978 | 1.404 |
| NT2RP8009119 | 0.000 | 3.276 |
| NTONG2008483 | 2.397 | 0.000 |
| NTONG2009468 | 0.000 | 13.482 |
| OCBBF2003518 | 2.062 | 0.000 |
| OCBBF2014745 | 0.000 | 36.360 |
| OCBBF2018618 | 16.218 | 0.000 |
| OCBBF3001333 | 9.639 | 4.561 |
| OCBBF3004487 | 4.531 | 6.432 |
| PLACE7004103 | 3.880 | 0.918 |
| PLACE7006240 | 25.174 | 0.000 |
| PROST2007444 | 4.374 | 5.433 |
| TBAES2007428 | 5.371 | 0.000 |
| TESTI2005112 | 19.455 | 0.000 |
| TESTI2018867 | 0.000 | 4.042 |
| TESTI2021654 | 9.773 | 0.000 |
| TESTI4002072 | 16.696 | 11.850 |
| TESTI4002774 | 4.103 | 0.000 |
| TESTI4002799 | 1.767 | 0.627 |
| TESTI4003602 | 25.967 | 18.431 |
| TESTI4003703 | 0.000 | 6.281 |
| TESTI4004210 | 36.051 | 0.000 |
| TESTI4005013 | 0.000 | 11.599 |
| TESTI4005399 | 7.797 | 11.068 |
| TESTI4005653 | 1.989 | 1.059 |
| TESTI4006441 | 60.471 | 0.000 |
| TESTI4014908 | 36.051 | 0.000 |
| TESTI4022158 | 53.386 | 9.473 |
| TESTI4029297 | 0.000 | 6.281 |
| TESTI4032913 | 0.000 | 5.753 |
| TESTI4043223 | 0.000 | 19.643 |
| THYMU3000776 | 15.604 | 22.150 |
| THYMU3002887 | 4.680 | 7.197 |
| THYMU3003350 | 54.530 | 0.000 |
| THYMU3007308 | 0.000 | 27.684 |
| THYMU3021586 | 20.651 | 0.000 |
| THYMU3026000 | 49.066 | 0.000 |
| THYMU3026306 | 46.281 | 0.000 |
| THYMU3026350 | 14.291 | 0.000 |
| THYMU3032798 | 9.668 | 10.979 |
| THYMU3032867 | 12.871 | 9.135 |
| THYMU3033626 | 0.000 | 7.979 |
| THYMU3034671 | 0.000 | 5.078 |
| THYMU3037827 | 54.530 | 0.000 |
| THYMU3038214 | 39.314 | 27.904 |
| THYMU3044075 | 37.925 | 26.918 |
| TLIVE2007736 | 0.000 | 9.358 |
| TRACH2013585 | 23.471 | 0.000 |
| TRACH3002752 | 10.215 | 3.625 |
| TRACH3003037 | 64.100 | 0.000 |
| TRACH3003872 | 2.745 | 0.000 |
| TRACH3004424 | 17.006 | 0.000 |
| TRACH3006717 | 18.347 | 10.418 |
| TRACH3007625 | 1.175 | 2.503 |
| TRACH3007689 | 47.167 | 0.000 |
| TRACH3007995 | 0.000 | 38.787 |
| TRACH3008632 | 25.351 | 11.995 |
| TRACH3009008 | 24.495 | 0.000 |
| TRACH3010079 | 48.305 | 0.000 |
| TRACH3016805 | 4.502 | 3.196 |
| TRACH3016885 | 3.978 | 5.647 |
| TRACH3024342 | 47.167 | 0.000 |
| TRACH3024671 | 47.167 | 0.000 |
| TRACH3026303 | 5.605 | 0.000 |
| TRACH3026676 | 11.631 | 0.000 |
| TRACH3028855 | 22.309 | 0.000 |
| TRACH3032570 | 47.167 | 0.000 |
| TRACH3036932 | 14.659 | 10.405 |
| TRACH3038399 | 12.435 | 8.826 |
| UTERU3000670 | 0.000 | 16.553 |
| UTERU3010409 | 3.461 | 17.196 |
| UTERU3013167 | 45.606 | 0.000 |
| UTERU3015011 | 0.000 | 5.009 |
| BRACE3002184 | 0.000 | 19.020 |
| BRACE3026993 | 0.000 | 100.000 |
| BRACE3046450 | 21.984 | 78.016 |
| BRAMY3008096 | 0.000 | 41.329 |
| BRAWH3013197 | 100.000 | 0.000 |
| BRAWH3028645 | 100.000 | 0.000 |
| BRTHA3004432 | 32.087 | 0.000 |
| TESTI4002988 | 0.000 | 15.392 |
| TRACH1000193 | 21.722 | 15.417 |

[0645] The result of comparative analysis of cDNA libraries derived from the thalamus (BRTHA), and from whole tissues of a normal brain (BRAWH) showed following genes whose expression levels differed between the two.

TABLE 8

| Clone ID | BRAWH | BRTHA |
|---|---|---|
| ASTRO2008972 | 0.000 | 17.271 |
| ASTRO2016114 | 14.497 | 0.000 |
| BLADE2004849 | 0.000 | 8.220 |
| BRACE2002392 | 0.000 | 1.911 |
| BRACE2012528 | 3.794 | 13.673 |
| BRACE2019348 | 0.000 | 25.772 |
| BRACE3004371 | 11.270 | 4.166 |
| BRACE3004767 | 58.488 | 0.000 |
| BRACE3019941 | 0.000 | 6.480 |
| BRACE3022312 | 0.000 | 37.734 |
| BRACE3022340 | 58.488 | 0.000 |
| BRACE3031185 | 58.488 | 0.000 |
| BRACE3031743 | 5.455 | 0.000 |
| BRACE3032385 | 13.674 | 15.164 |
| BRACE3032631 | 12.612 | 0.000 |
| BRACE3036156 | 0.000 | 24.272 |
| BRACE3039358 | 41.331 | 22.917 |
| BRACE3040863 | 17.888 | 0.000 |
| BRACE3042432 | 58.488 | 0.000 |
| BRACE3045981 | 26.434 | 0.000 |
| BRAMY2031516 | 14.772 | 0.000 |
| BRAMY3002329 | 20.323 | 15.025 |
| BRAMY3004126 | 49.811 | 0.000 |
| BRAMY3005912 | 21.416 | 0.000 |
| BRAMY3008436 | 5.603 | 12.427 |
| BRAMY3009556 | 0.000 | 52.395 |
| BRAMY3010654 | 0.000 | 52.395 |
| BRAMY4001863 | 0.000 | 16.612 |
| BRAWH2000256 | 100.000 | 0.000 |
| BRAWH2002333 | 100.000 | 0.000 |
| BRAWH2004078 | 10.539 | 0.000 |
| BRAWH2010364 | 34.464 | 0.000 |
| BRAWH2010619 | 100.000 | 0.000 |
| BRAWH2011796 | 100.000 | 0.000 |
| BRAWH2011812 | 13.544 | 0.000 |
| BRAWH2011958 | 100.000 | 0.000 |
| BRAWH2012054 | 100.000 | 0.000 |
| BRAWH2012866 | 8.503 | 11.786 |
| BRAWH2013955 | 100.000 | 0.000 |
| BRAWH2014053 | 23.222 | 25.752 |
| BRAWH2016209 | 8.306 | 0.000 |
| BRAWH2016223 | 100.000 | 0.000 |
| BRAWH2016305 | 4.308 | 0.000 |
| BRAWH2016514 | 35.037 | 0.000 |
| BRAWH2016562 | 49.499 | 0.000 |
| BRAWH2016785 | 100.000 | 0.000 |
| BRAWH3000446 | 100.000 | 0.000 |
| BRAWH3000884 | 100.000 | 0.000 |
| BRAWH3001053 | 100.000 | 0.000 |
| BRAWH3001638 | 100.000 | 0.000 |
| BRAWH3001783 | 100.000 | 0.000 |
| BRAWH3001833 | 100.000 | 0.000 |
| BRAWH3003244 | 100.000 | 0.000 |
| BRAWH3003573 | 20.162 | 22.358 |
| BRAWH3003975 | 100.000 | 0.000 |
| BRAWH3004335 | 100.000 | 0.000 |
| BRAWH3004350 | 16.580 | 18.386 |
| BRAWH3005037 | 100.000 | 0.000 |
| BRAWH3005886 | 100.000 | 0.000 |
| BRAWH3005892 | 100.000 | 0.000 |
| BRAWH3005896 | 100.000 | 0.000 |
| BRAWH3008167 | 100.000 | 0.000 |
| BRAWH3008559 | 100.000 | 0.000 |
| BRAWH3008867 | 100.000 | 0.000 |
| BRAWH3009961 | 47.417 | 52.583 |
| BRAWH3010461 | 16.435 | 11.391 |
| BRAWH3010602 | 100.000 | 0.000 |
| BRAWH3010657 | 100.000 | 0.000 |
| BRAWH3010726 | 100.000 | 0.000 |
| BRAWH3010833 | 100.000 | 0.000 |
| BRAWH3011101 | 100.000 | 0.000 |
| BRAWH3011331 | 100.000 | 0.000 |
| BRAWH3011402 | 100.000 | 0.000 |
| BRAWH3011577 | 100.000 | 0.000 |
| BRAWH3011623 | 100.000 | 0.000 |
| BRAWH3011685 | 100.000 | 0.000 |
| BRAWH3011907 | 47.417 | 52.583 |
| BRAWH3011929 | 100.000 | 0.000 |
| BRAWH3012005 | 100.000 | 0.000 |
| BRAWH3012662 | 33.972 | 12.558 |
| BRAWH3012779 | 100.000 | 0.000 |
| BRAWH3013009 | 100.000 | 0.000 |
| BRAWH3013049 | 100.000 | 0.000 |
| BRAWH3013264 | 100.000 | 0.000 |
| BRAWH3013508 | 100.000 | 0.000 |
| BRAWH3014609 | 44.597 | 0.000 |
| BRAWH3014639 | 100.000 | 0.000 |
| BRAWH3015017 | 100.000 | 0.000 |
| BRAWH3015175 | 100.000 | 0.000 |
| BRAWH3015610 | 100.000 | 0.000 |
| BRAWH3015825 | 100.000 | 0.000 |
| BRAWH3016123 | 100.000 | 0.000 |
| BRAWH3016715 | 100.000 | 0.000 |
| BRAWH3017180 | 28.251 | 0.000 |
| BRAWH3017259 | 13.996 | 0.000 |
| BRAWH3017260 | 100.000 | 0.000 |
| BRAWH3017477 | 100.000 | 0.000 |
| BRAWH3017980 | 49.811 | 0.000 |
| BRAWH3018063 | 15.836 | 0.000 |
| BRAWH3018369 | 100.000 | 0.000 |
| BRAWH3018548 | 100.000 | 0.000 |
| BRAWH3018969 | 100.000 | 0.000 |
| BRAWH3019026 | 100.000 | 0.000 |
| BRAWH3019529 | 100.000 | 0.000 |
| BRAWH3019594 | 100.000 | 0.000 |
| BRAWH3019820 | 100.000 | 0.000 |
| BRAWH3020200 | 100.000 | 0.000 |
| BRAWH3020318 | 100.000 | 0.000 |
| BRAWH3020884 | 100.000 | 0.000 |
| BRAWH3020928 | 49.499 | 0.000 |
| BRAWH3021012 | 100.000 | 0.000 |
| BRAWH3021574 | 9.400 | 0.000 |
| BRAWH3021580 | 100.000 | 0.000 |
| BRAWH3021641 | 100.000 | 0.000 |
| BRAWH3021643 | 100.000 | 0.000 |
| BRAWH3021724 | 100.000 | 0.000 |
| BRAWH3022347 | 100.000 | 0.000 |
| BRAWH3022431 | 100.000 | 0.000 |
| BRAWH3022459 | 100.000 | 0.000 |
| BRAWH3022542 | 100.000 | 0.000 |
| BRAWH3022651 | 9.828 | 5.450 |
| BRAWH3022719 | 100.000 | 0.000 |
| BRAWH3022900 | 100.000 | 0.000 |
| BRAWH3023156 | 100.000 | 0.000 |
| BRAWH3023168 | 100.000 | 0.000 |
| BRAWH3023172 | 0.916 | 2.031 |
| BRAWH3023274 | 100.000 | 0.000 |
| BRAWH3023421 | 100.000 | 0.000 |
| BRAWH3024186 | 19.959 | 0.000 |
| BRAWH3024231 | 100.000 | 0.000 |
| BRAWH3024242 | 31.843 | 0.000 |
| BRAWH3024506 | 100.000 | 0.000 |
| BRAWH3024989 | 2.369 | 0.000 |
| BRAWH3026349 | 100.000 | 0.000 |
| BRAWH3026938 | 6.894 | 0.000 |
| BRAWH3027420 | 100.000 | 0.000 |
| BRAWH3027440 | 58.488 | 0.000 |
| BRAWH3027533 | 11.008 | 0.000 |
| BRAWH3027574 | 47.417 | 52.583 |
| BRAWH3027607 | 100.000 | 0.000 |
| BRAWH3027616 | 100.000 | 0.000 |
| BRAWH3027675 | 100.000 | 0.000 |
| BRAWH3027806 | 100.000 | 0.000 |
| BRAWH3027880 | 100.000 | 0.000 |
| BRAWH3028202 | 100.000 | 0.000 |
| BRAWH3028223 | 100.000 | 0.000 |
| BRAWH3028461 | 100.000 | 0.000 |
| BRAWH3028754 | 100.000 | 0.000 |
| BRAWH3028796 | 100.000 | 0.000 |
| BRAWH3029313 | 100.000 | 0.000 |
| BRAWH3029385 | 35.187 | 0.000 |
| BRAWH3029538 | 100.000 | 0.000 |
| BRAWH3029806 | 26.735 | 9.883 |
| BRAWH3030772 | 100.000 | 0.000 |
| BRAWH3030810 | 21.287 | 0.000 |
| BRAWH3030910 | 100.000 | 0.000 |
| BRAWH3031054 | 100.000 | 0.000 |
| BRAWH3031342 | 10.856 | 0.000 |
| BRAWH3031710 | 100.000 | 0.000 |
| BRAWH3032298 | 100.000 | 0.000 |
| BRAWH3032340 | 100.000 | 0.000 |
| BRAWH3032571 | 100.000 | 0.000 |
| BRAWH3033117 | 100.000 | 0.000 |
| BRAWH3033293 | 100.000 | 0.000 |
| BRAWH3033448 | 100.000 | 0.000 |
| BRAWH3033513 | 100.000 | 0.000 |
| BRAWH3034097 | 100.000 | 0.000 |
| BRAWH3034114 | 100.000 | 0.000 |
| BRAWH3034134 | 100.000 | 0.000 |
| BRAWH3034668 | 100.000 | 0.000 |
| BRAWH3034743 | 16.662 | 18.478 |
| BRAWH3034775 | 100.000 | 0.000 |
| BRAWH3034890 | 100.000 | 0.000 |
| BRAWH3035403 | 35.337 | 0.000 |
| BRAWH3035904 | 100.000 | 0.000 |
| BRAWH3035914 | 100.000 | 0.000 |
| BRAWH3035936 | 70.575 | 0.000 |
| BRAWH3036077 | 100.000 | 0.000 |
| BRAWH3036247 | 54.530 | 0.000 |
| BRAWH3036270 | 100.000 | 0.000 |
| BRAWH3036334 | 6.241 | 6.921 |
| BRAWH3036561 | 100.000 | 0.000 |
| BRAWH3037265 | 44.597 | 0.000 |
| BRAWH3037394 | 100.000 | 0.000 |
| BRAWH3037428 | 5.877 | 19.551 |
| BRAWH3037533 | 100.000 | 0.000 |
| BRAWH3037979 | 100.000 | 0.000 |
| BRAWH3038055 | 100.000 | 0.000 |
| BRAWH3038230 | 100.000 | 0.000 |
| BRAWH3038252 | 100.000 | 0.000 |
| BRAWH3038324 | 100.000 | 0.000 |
| BRCAN2002892 | 0.000 | 32.586 |
| BRCAN2010665 | 19.610 | 7.249 |
| BRCAN2020234 | 0.000 | 27.335 |
| BRCAN2022126 | 4.855 | 0.000 |
| BRCAN2025093 | 21.732 | 0.000 |
| BRCOC2006164 | 0.000 | 32.234 |
| BRCOC2012386 | 11.403 | 0.000 |
| BRHIP2013958 | 0.000 | 39.849 |
| BRHIP2015153 | 20.038 | 0.000 |
| BRHIP2027077 | 2.020 | 0.000 |
| BRHIP3001573 | 24.474 | 27.141 |
| BRHIP3002000 | 4.500 | 0.832 |
| BRHIP3002691 | 0.000 | 18.395 |
| BRHIP3002920 | 0.000 | 35.211 |
| BRHIP3003063 | 10.960 | 0.000 |
| BRHIP3003961 | 0.000 | 21.034 |
| BRHIP3003984 | 27.477 | 15.236 |
| BRHIP3004215 | 0.000 | 15.055 |
| BRHIP3004774 | 39.520 | 0.000 |
| BRHIP3007223 | 2.016 | 4.472 |
| BRHIP3007409 | 31.957 | 35.439 |
| BRHIP3008320 | 23.349 | 0.000 |
| BRHIP3014675 | 37.925 | 0.000 |
| BRHIP3017855 | 15.316 | 4.246 |
| BRHIP3018784 | 6.930 | 0.000 |
| BRHIP3020046 | 0.000 | 1.123 |
| BRHIP3021019 | 7.745 | 0.000 |
| BRHIP3028246 | 22.147 | 0.000 |
| BRHIP3028570 | 31.957 | 35.439 |
| BRSSN2015497 | 0.000 | 7.931 |
| BRSTN2010089 | 6.598 | 0.000 |
| BRSTN2011961 | 0.000 | 1.285 |
| BRSTN2012069 | 0.047 | 0.000 |
| BRSTN2016992 | 1.476 | 1.091 |
| BRTHA2000969 | 0.000 | 100.000 |
| BRTHA2001304 | 0.000 | 100.000 |
| BRTHA2001953 | 0.000 | 10.615 |
| BRTHA2002091 | 0.000 | 100.000 |
| BRTHA2003759 | 0.000 | 100.000 |
| BRTHA2005448 | 0.000 | 100.000 |
| BRTHA2006720 | 0.000 | 100.000 |
| BRTHA2008502 | 0.000 | 23.993 |
| BRTHA2008598 | 0.000 | 100.000 |
| BRTHA2010672 | 0.000 | 100.000 |
| BRTHA2012189 | 0.000 | 100.000 |
| BRTHA2014647 | 0.000 | 100.000 |
| BRTHA2018304 | 0.000 | 100.000 |
| BRTHA2019726 | 0.000 | 100.000 |
| BRTHA2019743 | 0.000 | 100.000 |
| BRTHA2020400 | 0.000 | 100.000 |
| BRTHA2020566 | 0.000 | 100.000 |
| BRTHA2020642 | 0.000 | 100.000 |
| BRTHA2020695 | 0.000 | 100.000 |
| BRTHA2020721 | 0.000 | 100.000 |
| BRTHA2020781 | 0.000 | 100.000 |
| BRTHA2020910 | 0.000 | 100.000 |
| BRTHA2021212 | 0.000 | 100.000 |
| BRTHA2021440 | 0.000 | 57.080 |
| BRTHA2021450 | 0.000 | 100.000 |
| BRTHA2022074 | 0.000 | 100.000 |
| BRTHA2022914 | 0.000 | 100.000 |
| BRTHA2022968 | 0.000 | 100.000 |
| BRTHA2023402 | 0.000 | 100.000 |
| BRTHA2023437 | 0.000 | 100.000 |
| BRTHA2024177 | 0.000 | 100.000 |
| BRTHA2024354 | 0.000 | 100.000 |
| BRTHA2024712 | 0.000 | 100.000 |
| BRTHA2025869 | 0.000 | 100.000 |
| BRTHA2026071 | 0.000 | 13.612 |
| BRTHA2026290 | 0.000 | 100.000 |
| BRTHA2026311 | 0.000 | 100.000 |
| BRTHA2027227 | 0.000 | 100.000 |
| BRTHA2027229 | 0.000 | 2.030 |
| BRTHA2027250 | 0.000 | 100.000 |
| BRTHA2028297 | 0.000 | 100.000 |
| BRTHA2029969 | 0.000 | 100.000 |
| BRTHA2030036 | 0.000 | 100.000 |
| BRTHA2030213 | 0.000 | 100.000 |
| BRTHA2031517 | 0.000 | 52.083 |
| BRTHA2031917 | 0.000 | 100.000 |
| BRTHA2032763 | 0.000 | 100.000 |
| BRTHA2033122 | 0.000 | 100.000 |
| BRTHA2033155 | 4.253 | 9.433 |
| BRTHA2033320 | 0.000 | 100.000 |
| BRTHA2033469 | 0.000 | 38.930 |
| BRTHA2033683 | 0.000 | 100.000 |
| BRTHA2034281 | 0.000 | 100.000 |
| BRTHA2034576 | 0.000 | 100.000 |
| BRTHA2035743 | 0.000 | 22.576 |
| BRTHA2036055 | 0.000 | 100.000 |
| BRTHA2036295 | 0.000 | 100.000 |
| BRTHA2037247 | 0.000 | 100.000 |
| BRTHA2038279 | 0.000 | 100.000 |
| BRTHA2038345 | 0.000 | 100.000 |
| BRTHA2038353 | 0.000 | 100.000 |
| BRTHA3000456 | 0.000 | 62.915 |
| BRTHA3002411 | 0.000 | 100.000 |
| BRTHA3003225 | 0.000 | 47.165 |
| BRTHA3003417 | 0.000 | 34.129 |
| BRTHA3003736 | 4.302 | 2.385 |
| BRTHA3005988 | 31.076 | 68.924 |
| BRTHA3006593 | 0.000 | 100.000 |
| BRTHA3007469 | 0.000 | 100.000 |
| BRTHA3007662 | 0.000 | 35.211 |
| BRTHA3009858 | 0.000 | 25.720 |
| BRTHA3010135 | 20.010 | 44.380 |
| BRTHA3010212 | 5.525 | 6.127 |
| BRTHA3010469 | 0.000 | 100.000 |
| BRTHA3010530 | 0.000 | 31.009 |
| BRTHA3010540 | 0.000 | 7.466 |
| BRTHA3010717 | 0.000 | 100.000 |
| BRTHA3011187 | 0.000 | 100.000 |
| BRTHA3011194 | 3.534 | 3.920 |
| BRTHA3011229 | 0.000 | 100.000 |
| BRTHA3011265 | 25.596 | 18.923 |
| BRTHA3011306 | 0.000 | 13.657 |
| BRTHA3011361 | 0.000 | 62.915 |
| BRTHA3011510 | 0.000 | 100.000 |
| BRTHA3011892 | 0.000 | 100.000 |
| BRTHA3011998 | 0.000 | 43.859 |
| BRTHA3012265 | 0.000 | 35.211 |
| BRTHA3013860 | 0.000 | 100.000 |
| BRTHA3013882 | 0.000 | 100.000 |
| BRTHA3014000 | 0.000 | 100.000 |
| BRTHA3014105 | 0.000 | 100.000 |
| BRTHA3014507 | 0.000 | 100.000 |
| BRTHA3014547 | 0.000 | 100.000 |
| BRTHA3014835 | 0.000 | 100.000 |
| BRTHA3014854 | 0.000 | 100.000 |
| BRTHA3014920 | 0.000 | 100.000 |
| BRTHA3016616 | 0.000 | 100.000 |
| BRTHA3017791 | 11.821 | 5.244 |
| BRTHA3018409 | 0.000 | 100.000 |
| BRTHA3018623 | 0.000 | 100.000 |
| BRTHA3019183 | 0.000 | 100.000 |
| BRTHA3020369 | 0.000 | 100.000 |
| BRTHA3020771 | 31.957 | 35.439 |
| BRTHA3021569 | 0.000 | 100.000 |
| BRTHA3021708 | 0.000 | 60.975 |
| BRTHA3021786 | 0.000 | 100.000 |
| BRTHA3021971 | 1.941 | 4.305 |
| BRTHA3022641 | 0.000 | 19.618 |
| BRTHA3023403 | 14.857 | 8.238 |
| BRTHA3023590 | 0.000 | 100.000 |
| BRTHA3023929 | 0.000 | 100.000 |
| BRTHA3024600 | 0.000 | 100.000 |
| BRTHA3025073 | 0.000 | 100.000 |
| BRTHA3026161 | 0.000 | 100.000 |
| BRTHA3026180 | 0.000 | 100.000 |
| BRTHA3026556 | 0.000 | 100.000 |
| BRTHA3026916 | 0.000 | 52.395 |
| BRTHA3027171 | 0.000 | 100.000 |
| BRTHA3027318 | 0.000 | 100.000 |
| BRTHA3027638 | 0.000 | 100.000 |
| BRTHA3027820 | 0.000 | 100.000 |
| BRTHA3027879 | 0.000 | 48.181 |
| BRTHA3027957 | 0.000 | 100.000 |
| BRTHA3028339 | 0.000 | 100.000 |
| BRTHA3028505 | 0.000 | 100.000 |
| CHONS2002829 | 0.000 | 1.812 |
| CTONG2006235 | 9.828 | 5.450 |
| CTONG2009033 | 25.755 | 0.000 |
| CTONG2011801 | 0.000 | 3.284 |
| CTONG2020582 | 9.594 | 4.256 |
| D9OST2003106 | 6.904 | 0.000 |
| DFNES2001829 | 9.228 | 0.000 |
| KIDNE2010049 | 3.438 | 0.000 |
| LIVER2008465 | 0.000 | 7.339 |
| MESAN2017133 | 17.548 | 0.000 |
| NT2RI2009233 | 6.767 | 2.501 |
| NT2RI2010795 | 0.000 | 36.581 |
| NT2RI2015533 | 6.216 | 12.064 |
| NT2RI3005923 | 19.493 | 0.000 |
| NT2RI3009524 | 35.496 | 0.000 |
| NT2RP7007387 | 6.158 | 2.276 |
| NT2RP8001605 | 29.324 | 0.000 |
| NT2RP8007920 | 1.978 | 0.000 |
| NTONG2008483 | 2.397 | 1.772 |
| OCBBF2003518 | 2.062 | 0.000 |
| OCBBF2009536 | 0.000 | 47.165 |
| OCBBF2018618 | 16.218 | 0.000 |
| OCBBF3001333 | 9.639 | 0.000 |
| OCBBF3004487 | 4.531 | 0.000 |
| OCBBF3008835 | 0.000 | 47.165 |
| PLACE6003004 | 0.000 | 38.390 |
| PLACE7004103 | 3.880 | 4.302 |
| PLACE7006240 | 25.174 | 0.000 |
| PROST2007444 | 4.374 | 3.638 |
| SMINT2009292 | 0.000 | 3.933 |
| TBAES2007428 | 5.371 | 0.000 |
| TESTI2005112 | 19.455 | 0.000 |
| TESTI2021654 | 9.773 | 10.838 |
| TESTI2039342 | 0.000 | 77.236 |
| TESTI4002072 | 16.696 | 11.109 |
| TESTI4002774 | 4.103 | 0.000 |
| TESTI4002799 | 1.767 | 1.469 |
| TESTI4003602 | 25.967 | 0.000 |
| TESTI4003703 | 0.000 | 4.907 |
| TESTI4004210 | 36.051 | 0.000 |
| TESTI4004695 | 0.000 | 36.122 |
| TESTI4005399 | 7.797 | 0.000 |
| TESTI4005653 | 1.989 | 0.551 |
| TESTI4006441 | 60.471 | 0.000 |
| TESTI4007965 | 0.000 | 20.014 |
| TESTI4010979 | 0.000 | 21.790 |
| TESTI4013474 | 0.000 | 2.292 |
| TESTI4014908 | 36.051 | 0.000 |
| TESTI4022158 | 53.386 | 14.801 |
| TESTI4029297 | 0.000 | 4.907 |
| TESTI4032913 | 0.000 | 8.989 |
| THYMU3000776 | 15.604 | 0.000 |
| THYMU3002887 | 4.680 | 3.460 |
| THYMU3003350 | 54.530 | 0.000 |
| THYMU3021586 | 20.651 | 4.580 |
| THYMU3026000 | 49.066 | 0.000 |
| THYMU3026306 | 46.281 | 0.000 |
| THYMU3026350 | 14.291 | 15.849 |
| THYMU3032798 | 9.668 | 4.289 |
| THYMU3032867 | 12.871 | 0.000 |
| THYMU3037827 | 54.530 | 0.000 |
| THYMU3038214 | 39.314 | 0.000 |
| THYMU3044075 | 37.925 | 0.000 |
| TRACH2013585 | 23.471 | 0.000 |
| TRACH3002752 | 10.215 | 0.000 |
| TRACH3003037 | 64.100 | 0.000 |
| TRACH3003872 | 2.745 | 0.000 |
| TRACH3004424 | 17.006 | 18.859 |
| TRACH3006717 | 18.347 | 0.000 |
| TRACH3007625 | 1.175 | 3.911 |
| TRACH3007689 | 47.167 | 0.000 |
| TRACH3008508 | 0.000 | 21.245 |
| TRACH3008632 | 25.351 | 9.371 |
| TRACH3009008 | 24.495 | 0.000 |
| TRACH3010079 | 48.305 | 0.000 |
| TRACH3016805 | 4.502 | 0.000 |
| TRACH3016885 | 3.978 | 0.000 |
| TRACH3024342 | 47.167 | 0.000 |
| TRACH3024671 | 47.167 | 0.000 |
| TRACH3026303 | 5.605 | 0.000 |
| TRACH3026676 | 11.631 | 12.899 |
| TRACH3028855 | 22.309 | 0.000 |
| TRACH3032570 | 47.167 | 0.000 |
| TRACH3036932 | 14.659 | 16.256 |
| TRACH3038399 | 12.435 | 13.790 |
| UTERU3010409 | 3.461 | 0.000 |
| UTERU3012414 | 0.000 | 48.181 |
| UTERU3013167 | 45.606 | 0.000 |
| UTERU3017995 | 0.000 | 12.128 |
| UTERU3018172 | 0.000 | 35.368 |
| BRACE3046450 | 21.984 | 0.000 |
| BRAWH3013197 | 100.000 | 0.000 |
| BRAWH3028645 | 100.000 | 0.000 |
| BRTHA3004432 | 32.087 | 35.583 |
| BRTHA3024233 | 0.000 | 100.000 |
| CTONG2002832 | 0.000 | 12.432 |
| THYMU3046350 | 0.000 | 15.320 |
| TRACH1000193 | 21.722 | 0.000 |

[0646] The result of comparative analysis of cDNA libraries derived from the amygdale (BRAMY), and from whole tissues of a normal brain (BRAWH) showed following genes whose expression levels differed between the two.

TABLE 9

| Clone ID | BRAWH | BRAMY |
|---|---|---|
| ASTRO2016114 | 14.497 | 0.000 |
| BRACE2002392 | 0.000 | 5.210 |
| BRACE2012528 | 3.794 | 10.512 |
| BRACE2017397 | 0.000 | 2.376 |
| BRACE2017844 | 0.000 | 15.534 |
| BRACE3004371 | 11.270 | 7.571 |
| BRACE3004767 | 58.488 | 0.000 |
| BRACE3022340 | 58.488 | 0.000 |
| BRACE3031185 | 58.488 | 0.000 |
| BRACE3031315 | 0.000 | 58.671 |
| BRACE3031743 | 5.455 | 5.497 |
| BRACE3032385 | 13.674 | 13.778 |
| BRACE3032631 | 12.612 | 0.000 |
| BRACE3039358 | 41.331 | 0.000 |
| BRACE3040863 | 17.888 | 0.000 |
| BRACE3042432 | 58.488 | 0.000 |
| BRACE3045981 | 26.434 | 0.000 |
| BRAMY2015516 | 0.000 | 100.000 |
| BRAMY2021098 | 0.000 | 100.000 |
| BRAMY2022320 | 0.000 | 100.000 |
| BRAMY2023939 | 0.000 | 6.159 |
| BRAMY2025495 | 0.000 | 100.000 |
| BRAMY2031516 | 14.772 | 7.442 |
| BRAMY2033895 | 0.000 | 100.000 |
| BRAMY2035801 | 0.000 | 100.000 |
| BRAMY2036254 | 0.000 | 100.000 |
| BRAMY2036266 | 0.000 | 100.000 |
| BRAMY2037609 | 0.000 | 100.000 |
| BRAMY2039630 | 0.000 | 8.744 |
| BRAMY2040915 | 0.000 | 100.000 |
| BRAMY2041347 | 0.000 | 100.000 |
| BRAMY2041384 | 0.000 | 100.000 |
| BRAMY2041507 | 0.000 | 100.000 |
| BRAMY2044686 | 0.000 | 100.000 |
| BRAMY2046489 | 0.000 | 100.000 |
| BRAMY2046537 | 0.000 | 100.000 |
| BRAMY3000692 | 0.000 | 100.000 |
| BRAMY3001409 | 0.000 | 100.000 |
| BRAMY3002329 | 20.323 | 20.478 |
| BRAMY3002508 | 0.000 | 100.000 |
| BRAMY3002886 | 0.000 | 100.000 |
| BRAMY3004126 | 49.811 | 50.189 |
| BRAMY3004364 | 0.000 | 13.689 |
| BRAMY3005184 | 0.000 | 22.578 |
| BRAMY3005656 | 0.000 | 100.000 |
| BRAMY3005912 | 21.416 | 21.579 |
| BRAMY3007078 | 0.000 | 49.688 |
| BRAMY3007449 | 0.000 | 100.000 |
| BRAMY3007471 | 0.000 | 100.000 |
| BRAMY3008436 | 5.603 | 4.234 |
| BRAMY3009158 | 0.000 | 100.000 |
| BRAMY3009491 | 0.000 | 31.439 |
| BRAMY3009556 | 0.000 | 47.605 |
| BRAMY3009904 | 0.000 | 100.000 |
| BRAMY3010321 | 0.000 | 100.000 |
| BRAMY3010603 | 0.000 | 100.000 |
| BRAMY3010654 | 0.000 | 47.605 |
| BRAMY4000915 | 0.000 | 49.688 |
| BRAMY4000962 | 0.000 | 100.000 |
| BRAMY4001234 | 0.000 | 54.718 |
| BRAMY4001652 | 0.000 | 100.000 |
| BRAMY4001863 | 0.000 | 15.094 |
| BRAMY4001913 | 0.000 | 100.000 |
| BRAMY4002575 | 0.000 | 100.000 |
| BRAMY4002628 | 0.000 | 7.157 |
| BRAWH2000256 | 100.000 | 0.000 |
| BRAWH2002333 | 100.000 | 0.000 |
| BRAWH2004078 | 10.539 | 0.000 |
| BRAWH2010364 | 34.464 | 0.000 |
| BRAWH2010619 | 100.000 | 0.000 |
| BRAWH2011796 | 100.000 | 0.000 |
| BRAWH2011812 | 13.544 | 13.646 |
| BRAWH2011958 | 100.000 | 0.000 |
| BRAWH2012054 | 100.000 | 0.000 |
| BRAWH2012866 | 8.503 | 14.993 |
| BRAWH2013955 | 100.000 | 0.000 |
| BRAWH2014053 | 23.222 | 0.000 |
| BRAWH2016209 | 8.306 | 0.000 |
| BRAWH2016223 | 100.000 | 0.000 |
| BRAWH2016305 | 4.308 | 0.000 |
| BRAWH2016514 | 35.037 | 0.000 |
| BRAWH2016562 | 49.499 | 0.000 |
| BRAWH2016785 | 100.000 | 0.000 |
| BRAWH3000446 | 100.000 | 0.000 |
| BRAWH3000884 | 100.000 | 0.000 |
| BRAWH3001053 | 100.000 | 0.000 |
| BRAWH3001638 | 100.000 | 0.000 |
| BRAWH3001783 | 100.000 | 0.000 |
| BRAWH3001833 | 100.000 | 0.000 |
| BRAWH3003244 | 100.000 | 0.000 |
| BRAWH3003573 | 20.162 | 0.000 |
| BRAWH3003975 | 100.000 | 0.000 |
| BRAWH3004335 | 100.000 | 0.000 |
| BRAWH3004350 | 16.580 | 0.000 |
| BRAWH3005037 | 100.000 | 0.000 |
| BRAWH3005886 | 100.000 | 0.000 |
| BRAWH3005892 | 100.000 | 0.000 |
| BRAWH3005896 | 100.000 | 0.000 |
| BRAWH3008167 | 100.000 | 0.000 |
| BRAWH3008559 | 100.000 | 0.000 |
| BRAWH3008867 | 100.000 | 0.000 |
| BRAWH3009961 | 47.417 | 0.000 |
| BRAWH3010461 | 16.435 | 14.490 |
| BRAWH3010602 | 100.000 | 0.000 |
| BRAWH3010657 | 100.000 | 0.000 |
| BRAWH3010726 | 100.000 | 0.000 |
| BRAWH3010833 | 100.000 | 0.000 |
| BRAWH3011101 | 100.000 | 0.000 |
| BRAWH3011331 | 100.000 | 0.000 |
| BRAWH3011402 | 100.000 | 0.000 |
| BRAWH3011577 | 100.000 | 0.000 |
| BRAWH3011623 | 100.000 | 0.000 |
| BRAWH3011685 | 100.000 | 0.000 |
| BRAWH3011907 | 47.417 | 0.000 |
| BRAWH3011929 | 100.000 | 0.000 |
| BRAWH3012005 | 100.000 | 0.000 |
| BRAWH3012662 | 33.972 | 0.000 |
| BRAWH3012779 | 100.000 | 0.000 |
| BRAWH3013009 | 100.000 | 0.000 |
| BRAWH3013049 | 100.000 | 0.000 |
| BRAWH3013264 | 100.000 | 0.000 |
| BRAWH3013508 | 100.000 | 0.000 |
| BRAWH3014609 | 44.597 | 0.000 |
| BRAWH3014639 | 100.000 | 0.000 |
| BRAWH3015017 | 100.000 | 0.000 |
| BRAWH3015175 | 100.000 | 0.000 |
| BRAWH3015610 | 100.000 | 0.000 |
| BRAWH3015825 | 100.000 | 0.000 |
| BRAWH3016123 | 100.000 | 0.000 |
| BRAWH3016715 | 100.000 | 0.000 |
| BRAWH3017180 | 28.251 | 0.000 |
| BRAWH3017259 | 13.996 | 0.000 |
| BRAWH3017260 | 100.000 | 0.000 |
| BRAWH3017477 | 100.000 | 0.000 |
| BRAWH3017980 | 49.811 | 50.189 |
| BRAWH3018063 | 15.836 | 7.978 |
| BRAWH3018369 | 100.000 | 0.000 |
| BRAWH3018548 | 100.000 | 0.000 |
| BRAWH3018969 | 100.000 | 0.000 |
| BRAWH3019026 | 100.000 | 0.000 |
| BRAWH3019529 | 100.000 | 0.000 |
| BRAWH3019594 | 100.000 | 0.000 |
| BRAWH3019820 | 100.000 | 0.000 |
| BRAWH3020200 | 100.000 | 0.000 |
| BRAWH3020318 | 100.000 | 0.000 |
| BRAWH3020884 | 100.000 | 0.000 |
| BRAWH3020928 | 49.499 | 0.000 |
| BRAWH3021012 | 100.000 | 0.000 |
| BRAWH3021574 | 9.400 | 0.000 |
| BRAWH3021580 | 100.000 | 0.000 |
| BRAWH3021641 | 100.000 | 0.000 |
| BRAWH3021643 | 100.000 | 0.000 |
| BRAWH3021724 | 100.000 | 0.000 |
| BRAWH3022347 | 100.000 | 0.000 |
| BRAWH3022431 | 100.000 | 0.000 |
| BRAWH3022459 | 100.000 | 0.000 |
| BRAWH3022542 | 100.000 | 0.000 |
| BRAWH3022651 | 9.828 | 4.952 |
| BRAWH3022719 | 100.000 | 0.000 |
| BRAWH3022900 | 100.000 | 0.000 |
| BRAWH3023156 | 100.000 | 0.000 |
| BRAWH3023168 | 100.000 | 0.000 |
| BRAWH3023172 | 0.916 | 0.000 |
| BRAWH3023274 | 100.000 | 0.000 |
| BRAWH3023421 | 100.000 | 0.000 |
| BRAWH3024186 | 19.959 | 10.055 |
| BRAWH3024231 | 100.000 | 0.000 |
| BRAWH3024242 | 31.843 | 0.000 |
| BRAWH3024506 | 100.000 | 0.000 |
| BRAWH3024989 | 2.369 | 0.000 |
| BRAWH3026349 | 100.000 | 0.000 |
| BRAWH3026938 | 6.894 | 0.000 |
| BRAWH3027420 | 100.000 | 0.000 |
| BRAWH3027440 | 58.488 | 0.000 |
| BRAWH3027533 | 11.008 | 0.000 |
| BRAWH3027574 | 47.417 | 0.000 |
| BRAWH3027607 | 100.000 | 0.000 |
| BRAWH3027616 | 100.000 | 0.000 |
| BRAWH3027675 | 100.000 | 0.000 |
| BRAWH3027806 | 100.000 | 0.000 |
| BRAWH3027880 | 100.000 | 0.000 |
| BRAWH3028202 | 100.000 | 0.000 |
| BRAWH3028223 | 100.000 | 0.000 |
| BRAWH3028461 | 100.000 | 0.000 |
| BRAWH3028754 | 100.000 | 0.000 |
| BRAWH3028796 | 100.000 | 0.000 |
| BRAWH3029313 | 100.000 | 0.000 |
| BRAWH3029385 | 35.187 | 0.000 |
| BRAWH3029538 | 100.000 | 0.000 |
| BRAWH3029806 | 26.735 | 8.979 |
| BRAWH3030772 | 100.000 | 0.000 |
| BRAWH3030810 | 21.287 | 10.724 |
| BRAWH3030910 | 100.000 | 0.000 |
| BRAWH3031054 | 100.000 | 0.000 |
| BRAWH3031342 | 10.856 | 0.000 |
| BRAWH3031710 | 100.000 | 0.000 |
| BRAWH3032298 | 100.000 | 0.000 |
| BRAWH3032340 | 100.000 | 0.000 |
| BRAWH3032571 | 100.000 | 0.000 |
| BRAWH3033117 | 100.000 | 0.000 |
| BRAWH3033293 | 100.000 | 0.000 |
| BRAWH3033448 | 100.000 | 0.000 |
| BRAWH3033513 | 100.000 | 0.000 |
| BRAWH3034097 | 100.000 | 0.000 |
| BRAWH3034114 | 100.000 | 0.000 |
| BRAWH3034134 | 100.000 | 0.000 |
| BRAWH3034668 | 100.000 | 0.000 |
| BRAWH3034743 | 16.662 | 12.592 |
| BRAWH3034775 | 100.000 | 0.000 |
| BRAWH3034890 | 100.000 | 0.000 |
| BRAWH3035403 | 35.337 | 0.000 |
| BRAWH3035904 | 100.000 | 0.000 |
| BRAWH3035914 | 100.000 | 0.000 |
| BRAWH3035936 | 70.575 | 0.000 |
| BRAWH3036077 | 100.000 | 0.000 |
| BRAWH3036247 | 54.530 | 0.000 |
| BRAWH3036270 | 100.000 | 0.000 |
| BRAWH3036334 | 6.241 | 0.000 |
| BRAWH3036561 | 100.000 | 0.000 |
| BRAWH3037265 | 44.597 | 0.000 |
| BRAWH3037394 | 100.000 | 0.000 |
| BRAWH3037428 | 5.877 | 5.921 |
| BRAWH3037533 | 100.000 | 0.000 |
| BRAWH3037979 | 100.000 | 0.000 |
| BRAWH3038055 | 100.000 | 0.000 |
| BRAWH3038230 | 100.000 | 0.000 |
| BRAWH3038252 | 100.000 | 0.000 |
| BRAWH3038324 | 100.000 | 0.000 |
| BRCAN2010665 | 19.610 | 9.879 |
| BRCAN2022126 | 4.855 | 14.677 |
| BRCAN2025093 | 21.732 | 0.000 |
| BRCOC2012386 | 11.403 | 0.000 |
| BRHIP2015153 | 20.038 | 10.095 |
| BRHIP2027077 | 2.020 | 2.035 |
| BRHIP3001573 | 24.474 | 8.220 |
| BRHIP3002000 | 4.500 | 0.756 |
| BRHIP3002691 | 0.000 | 8.357 |
| BRHIP3003063 | 10.960 | 33.130 |
| BRHIP3003984 | 27.477 | 0.000 |
| BRHIP3004215 | 0.000 | 13.679 |
| BRHIP3004774 | 39.520 | 0.000 |
| BRHIP3005673 | 0.000 | 25.956 |
| BRHIP3007223 | 2.016 | 0.000 |
| BRHIP3007409 | 31.957 | 0.000 |
| BRHIP3008320 | 23.349 | 0.000 |
| BRHIP3012736 | 0.000 | 66.389 |
| BRHIP3014675 | 37.925 | 0.000 |
| BRHIP3017146 | 0.000 | 33.057 |
| BRHIP3017855 | 15.316 | 0.000 |
| BRHIP3018784 | 6.930 | 0.000 |
| BRHIP3020046 | 0.000 | 1.021 |
| BRHIP3021019 | 7.745 | 7.803 |
| BRHIP3028246 | 22.147 | 22.315 |
| BRHIP3028570 | 31.957 | 0.000 |
| BRSTN2010089 | 6.598 | 0.000 |
| BRSTN2012069 | 0.047 | 0.029 |
| BRSTN2016992 | 1.476 | 4.958 |
| BRTHA2026071 | 0.000 | 12.368 |
| BRTHA2033155 | 4.253 | 4.285 |
| BRTHA3003736 | 4.302 | 0.000 |
| BRTHA3005988 | 31.076 | 0.000 |
| BRTHA3010135 | 20.010 | 0.000 |
| BRTHA3010212 | 5.525 | 5.567 |
| BRTHA3011194 | 3.534 | 0.000 |
| BRTHA3011265 | 25.596 | 0.000 |
| BRTHA3017791 | 11.821 | 5.956 |
| BRTHA3020771 | 31.957 | 0.000 |
| BRTHA3021971 | 1.941 | 1.956 |
| BRTHA3023403 | 14.857 | 7.485 |
| BRTHA3026916 | 0.000 | 47.605 |
| CHONS2002829 | 0.000 | 1.646 |
| CTONG2006235 | 9.828 | 4.952 |
| CTONG2009033 | 25.755 | 0.000 |
| CTONG2020582 | 9.594 | 3.867 |
| D9OST2003106 | 6.904 | 0.000 |
| DFNES2001829 | 9.228 | 0.000 |
| KIDNE2010049 | 3.438 | 0.000 |
| MESAN2017133 | 17.548 | 0.000 |
| NT2RI2009233 | 6.767 | 4.545 |
| NT2RI2010795 | 0.000 | 16.619 |
| NT2RI2015533 | 6.216 | 12.527 |
| NT2RI3005923 | 19.493 | 0.000 |
| NT2RI3009524 | 35.496 | 0.000 |
| NT2RP7007387 | 6.158 | 0.000 |
| NT2RP8001605 | 29.324 | 0.000 |
| NT2RP8007920 | 1.978 | 0.000 |
| NTONG2008483 | 2.397 | 0.000 |
| OCBBF2000831 | 0.000 | 9.702 |
| OCBBF2003518 | 2.062 | 1.039 |
| OCBBF2018618 | 16.218 | 16.341 |
| OCBBF2030927 | 0.000 | 44.784 |
| OCBBF3001333 | 9.639 | 6.475 |
| OCBBF3004487 | 4.531 | 4.565 |
| OCBBF3009244 | 0.000 | 34.702 |
| PLACE6008315 | 0.000 | 1.403 |
| PLACE6010936 | 0.000 | 12.399 |
| PLACE7004103 | 3.880 | 1.303 |
| PLACE7006240 | 25.174 | 0.000 |
| PROST2007444 | 4.374 | 1.102 |
| SPLEN2012571 | 0.000 | 3.203 |
| SYNOV4004210 | 0.000 | 0.952 |
| SYNOV4009575 | 0.000 | 4.828 |
| TBAES2007428 | 5.371 | 0.000 |
| TESTI2005112 | 19.455 | 0.000 |
| TESTI2021654 | 9.773 | 9.847 |
| TESTI4002072 | 16.696 | 3.364 |
| TESTI4002774 | 4.103 | 0.000 |
| TESTI4002799 | 1.767 | 0.000 |
| TESTI4003602 | 25.967 | 0.000 |
| TESTI4003703 | 0.000 | 4.458 |
| TESTI4004210 | 36.051 | 0.000 |
| TESTI4005399 | 7.797 | 15.713 |
| TESTI4005653 | 1.989 | 3.507 |
| TESTI4006441 | 60.471 | 0.000 |
| TESTI4014908 | 36.051 | 0.000 |
| TESTI4022158 | 53.386 | 0.000 |
| TESTI4029297 | 0.000 | 4.458 |
| TESTI4032913 | 0.000 | 8.167 |
| TESTI4043223 | 0.000 | 27.886 |
| TESTI4046073 | 0.000 | 19.130 |
| THYMU3000776 | 15.604 | 0.000 |
| THYMU3002887 | 4.680 | 3.930 |
| THYMU3003350 | 54.530 | 0.000 |
| THYMU3008105 | 0.000 | 20.406 |
| THYMU3019476 | 0.000 | 54.718 |
| THYMU3021586 | 20.651 | 4.162 |
| THYMU3026000 | 49.066 | 0.000 |
| THYMU3026306 | 46.281 | 0.000 |
| THYMU3026350 | 14.291 | 14.400 |
| THYMU3032798 | 9.668 | 1.948 |
| THYMU3032867 | 12.871 | 0.000 |
| THYMU3037827 | 54.530 | 0.000 |
| THYMU3038214 | 39.314 | 0.000 |
| THYMU3044075 | 37.925 | 0.000 |
| TRACH2013585 | 23.471 | 0.000 |
| TRACH3002752 | 10.215 | 0.000 |
| TRACH3003037 | 64.100 | 0.000 |
| TRACH3003872 | 2.745 | 2.765 |
| TRACH3004424 | 17.006 | 0.000 |
| TRACH3006717 | 18.347 | 3.697 |
| TRACH3007625 | 1.175 | 3.553 |
| TRACH3007689 | 47.167 | 0.000 |
| TRACH3008632 | 25.351 | 0.000 |
| TRACH3009008 | 24.495 | 0.000 |
| TRACH3010079 | 48.305 | 0.000 |
| TRACH3016805 | 4.502 | 0.000 |
| TRACH3016885 | 3.978 | 12.025 |
| TRACH3024342 | 47.167 | 0.000 |
| TRACH3024671 | 47.167 | 0.000 |
| TRACH3026303 | 5.605 | 0.000 |
| TRACH3026676 | 11.631 | 0.000 |
| TRACH3028855 | 22.309 | 0.000 |
| TRACH3032570 | 47.167 | 0.000 |
| TRACH3036932 | 14.659 | 0.000 |
| TRACH3038399 | 12.435 | 0.000 |
| UTERU3010409 | 3.461 | 0.000 |
| UTERU3013167 | 45.606 | 0.000 |
| BRACE3046450 | 21.984 | 0.000 |
| BRAMY3008096 | 0.000 | 58.671 |
| BRAWH3013197 | 100.000 | 0.000 |
| BRAWH3028645 | 100.000 | 0.000 |
| BRTHA3004432 | 32.087 | 32.330 |
| TESTI4002988 | 0.000 | 21.851 |
| THYMU3046350 | 0.000 | 6.960 |
| TRACH1000193 | 21.722 | 0.000 |
| TRACH3019290 | 0.000 | 27.871 |

[0647] The result of comparative analysis of cDNA libraries derived from breast tumor (TBAES), and normal breast (BEAST) showed the following genes whose expression levels differed between the two.

TABLE 10

| Clone ID | BEAST | TBAES |
|---|---|---|
| BRSTN2011961 | 6.317 | 4.075 |
| BRSTN2012069 | 0.000 | 0.067 |
| TBAES2003917 | 0.000 | 100.000 |
| TBAES2005361 | 0.000 | 100.000 |
| TBAES2007428 | 0.000 | 37.783 |
| TBAES2007548 | 0.000 | 100.000 |
| TBAES2007862 | 0.000 | 100.000 |
| TESTI2005564 | 0.000 | 25.762 |
| TESTI4017854 | 0.000 | 91.498 |
| TRACH3016805 | 0.000 | 31.673 |
| TBAES2004105 | 0.000 | 100.000 |
| TBAES2007379 | 0.000 | 100.000 |
| TBAES2007481 | 0.000 | 100.000 |
| TBAES2008133 | 0.000 | 100.000 |

[0648] The result of comparative analysis of cDNA libraries derived cervical tumor (TCERX), and normal cervical duct (CERVX) showed the following genes whose expression levels differed between the two.

TABLE 11

| Clone ID | CERVX | TCERX |
|---|---|---|
| BRACE2017397 | 48.741 | 0.000 |
| BRHIP2027077 | 41.741 | 0.000 |
| BRSTN2011961 | 5.985 | 0.000 |
| BRSTN2012069 | 5.668 | 7.585 |
| CERVX2000812 | 100.000 | 0.000 |
| CERVX2000968 | 100.000 | 0.000 |

[0649] The result of comparative analysis of cDNA libraries derived from colon tumor (TCOLN), and normal colon (COLON) showed the following genes whose expression levels differed between the two.

TABLE 12

| Clone ID | COLON | TCOLN |
|---|---|---|
| BRSTN2011961 | 0.000 | 6.140 |
| BRSTN2012069 | 1.726 | 1.805 |
| COLON2001829 | 100.000 | 0.000 |
| COLON2001866 | 100.000 | 0.000 |
| COLON2004351 | 100.000 | 0.000 |
| COLON2004911 | 100.000 | 0.000 |
| COLON2005623 | 100.000 | 0.000 |
| COLON2005735 | 100.000 | 0.000 |
| OCBBF3001333 | 22.556 | 0.000 |
| SMINT2017964 | 34.030 | 0.000 |

[0650] The result of comparative analysis of cDNA libraries derived from esophageal tumor (TESOP), and normal esophagus (NESOP) showed the following genes whose expression levels differed between the two.

TABLE 13

| Clone ID | NESOP | TESOP |
|---|---|---|
| BRAMY3004364 | 0.000 | 46.478 |
| BRAWH3027533 | 0.000 | 75.317 |
| BRHIP3007223 | 42.899 | 0.000 |
| BRSTN2011961 | 0.000 | 1.981 |
| BRSTN2012069 | 1.409 | 2.071 |
| CTONG2011801 | 0.000 | 20.259 |
| CTONG3002518 | 0.000 | 57.732 |
| SMINT2009292 | 0.000 | 24.268 |
| TESOP2002005 | 0.000 | 100.000 |
| TESOP2003308 | 0.000 | 100.000 |
| TESOP2004110 | 0.000 | 100.000 |
| TESOP2008556 | 0.000 | 100.000 |
| UTERU3015011 | 0.000 | 48.286 |
| UTERU3017995 | 0.000 | 74.828 |

[0651] The result of comparative analysis of cDNA libraries derived from kidney tumor (TKIDN), and normal kidney (KIDNE) showed the following genes whose expression levels differed between the two.

TABLE 14

| Clone ID | KIDNE | TKIDN |
|---|---|---|
| BRACE2002392 | 0.000 | 6.380 |
| BRACE2012528 | 0.000 | 14.044 |
| BRACE3004371 | 13.097 | 0.000 |
| BRAMY2039630 | 60.511 | 0.000 |
| BRAMY3004364 | 23.683 | 0.000 |
| BRAMY3008436 | 0.000 | 5.185 |
| BRAWH2004078 | 18.371 | 0.000 |
| BRAWH3012662 | 0.000 | 41.917 |
| BRAWH3021574 | 0.000 | 17.397 |
| BRAWH3022651 | 0.000 | 6.064 |
| BRAWH3037428 | 0.000 | 21.753 |
| BRCAN2019953 | 0.000 | 35.208 |
| BRCAN2022126 | 0.000 | 17.973 |
| BRHIP3002000 | 10.458 | 0.000 |
| BRHIP3002691 | 0.000 | 30.700 |
| BRHIP3012997 | 0.000 | 3.431 |
| BRHIP3020046 | 0.000 | 3.749 |
| BRSTN2012069 | 0.429 | 0.140 |
| BRSTN2016992 | 0.000 | 1.822 |
| BRTHA3010212 | 0.000 | 20.450 |
| CTONG2006235 | 0.000 | 6.064 |
| KIDNE2004531 | 80.699 | 0.000 |
| KIDNE2010049 | 11.987 | 0.000 |
| KIDNE2014496 | 100.000 | 0.000 |
| KIDNE2015987 | 100.000 | 0.000 |
| KIDNE2016464 | 100.000 | 0.000 |
| KIDNE2017153 | 83.085 | 0.000 |
| KIDNE2018268 | 100.000 | 0.000 |
| NT2RI2015533 | 0.000 | 11.506 |
| NT2RP7007387 | 7.156 | 0.000 |
| OCBBF3004487 | 0.000 | 16.771 |
| PLACE6008315 | 0.000 | 5.154 |
| SYNOV4004210 | 0.000 | 3.496 |
| TESTI2005112 | 67.827 | 0.000 |
| THYMU3001776 | 22.094 | 0.000 |
| THYMU3002887 | 0.000 | 2.887 |
| THYMU3029795 | 37.093 | 0.000 |
| THYMU3032867 | 44.871 | 0.000 |
| TKIDN2000319 | 0.000 | 78.393 |
| TKIDN2003396 | 0.000 | 100.000 |
| TKIDN2010602 | 0.000 | 100.000 |
| TKIDN2011051 | 0.000 | 100.000 |
| TKIDN2011160 | 0.000 | 100.000 |

[0652] The result of comparative analysis of cDNA libraries derived from liver tumor (TLIVE), and normal liver (LIVER) showed the following genes whose expression levels differed between the two.

TABLE 15

| Clone ID | LIVER | TLIVE |
|---|---|---|
| BRAWH3022651 | 14.200 | 0.000 |
| BRCAN2020412 | 0.000 | 74.979 |
| BRSTN2012069 | 0.000 | 0.390 |
| BRTHA3003736 | 18.647 | 0.000 |
| CTONG2006235 | 14.200 | 0.000 |
| LIVER2008465 | 57.368 | 0.000 |
| TESTI4013474 | 0.000 | 7.104 |
| THYMU3002887 | 6.762 | 0.000 |
| THYMU3038158 | 53.382 | 0.000 |
| TLIVE2000142 | 0.000 | 100.000 |
| TLIVE2001616 | 0.000 | 100.000 |
| TLIVE2007736 | 0.000 | 90.642 |
| TLIVE2008797 | 0.000 | 100.000 |
| TRACH3027229 | 93.931 | 0.000 |
| THYMU3046350 | 0.000 | 47.489 |
| TLIVE2007192 | 0.000 | 100.000 |

[0653] The result of comparative analysis of cDNA libraries derived from lung tumor (TLUNG), and normal lung (HLUNG) showed the following genes whose expression levels differed between the two.

TABLE 16

| Clone ID | HLUNG | TLUNG |
|---|---|---|
| BRACE3036283 | 27.376 | 0.000 |
| BRAMY2031516 | 27.091 | 0.000 |
| BRSTN2011961 | 2.124 | 0.000 |
| BRSTN2012069 | 0.763 | 0.000 |
| HLUNG2012600 | 100.000 | 0.000 |
| MESAN2009156 | 38.142 | 0.000 |
| NTONG2008483 | 2.930 | 0.000 |
| PROST2007444 | 4.011 | 0.000 |
| TESTI4003703 | 16.229 | 0.000 |
| TESTI4005653 | 1.824 | 0.000 |
| TESTI4013474 | 3.790 | 0.000 |
| TESTI4029297 | 16.229 | 0.000 |
| THYMU3001776 | 11.622 | 0.000 |
| THYMU3033626 | 20.615 | 0.000 |
| THYMU3034671 | 8.747 | 0.000 |
| THYMU3041428 | 0.935 | 0.000 |
| TRACH3022198 | 30.484 | 0.000 |

[0654] showed the following genes whose expression levels differed between the two.

TABLE 17

| Clone ID | NOVAR | TOVAR |
|---|---|---|
| BRSTN2012069 | 5.861 | 6.386 |
| NOVAR2000783 | 90.145 | 0.000 |
| THYMU3002887 | 0.000 | 16.991 |

[0655] The result of comparative analysis of cDNA libraries derived from stomach tumor (TSTOM) and normal stomach (STOMA) showed the following genes whose expression levels differed between the two.

TABLE 18

| Clone ID | STOMA | TSTOM |
|---|---|---|
| BRSTN2012069 | 1.995 | 4.062 |
| CHONS2002829 | 11.118 | 0.000 |
| STOMA2003894 | 100.000 | 0.000 |
| STOMA2004663 | 47.516 | 0.000 |
| THYMU3001776 | 21.564 | 0.000 |
| TSTOM2000235 | 0.000 | 95.465 |
| TSTOM2001571 | 0.000 | 100.000 |
| TSTOM2002611 | 0.000 | 100.000 |
| TSTOM2002682 | 0.000 | 100.000 |

[0656] The result of comparative, analysis of cDNA libraries derived from uterine tumor (TUTER) and normal uterus (UTERU) showed the following genes whose expression levels differed between the two.

TABLE 19

| Clone ID | UTERU | TUTER |
|---|---|---|
| BRACE2012528 | 0.566 | 0.000 |
| BRACE2017397 | 11.252 | 0.000 |
| BRACE3004371 | 4.481 | 0.000 |
| BRACE3036283 | 8.902 | 0.000 |
| BRACE3040863 | 21.335 | 0.000 |
| BRAMY2031516 | 8.809 | 0.000 |
| BRAMY3005184 | 26.725 | 0.000 |
| BRAWH2004078 | 6.285 | 0.000 |
| BRAWH3004350 | 19.774 | 0.000 |
| BRAWH3022651 | 1.954 | 0.000 |
| BRAWH3024186 | 11.902 | 0.000 |
| BRAWH3029806 | 10.629 | 0.000 |
| BRAWH3031342 | 6.474 | 0.000 |
| BRCAN2022126 | 5.791 | 0.000 |
| BRHIP3001076 | 53.896 | 0.000 |
| BRHIP3002000 | 0.894 | 0.000 |
| BRHIP3002141 | 18.713 | 0.000 |
| BRHIP3005307 | 53.896 | 0.000 |
| BRHIP3007223 | 2.405 | 0.000 |
| BRHIP3017855 | 27.401 | 0.000 |
| BRHIP3020046 | 1.208 | 0.000 |
| BRSTN2010089 | 7.869 | 0.000 |
| BRSTN2011961 | 0.345 | 0.000 |
| BRSTN2012069 | 0.271 | 3.583 |
| BRSTN2016892 | 3.559 | 0.000 |
| BRTHA3003736 | 5.131 | 0.000 |
| BRTHA3011265 | 10.176 | 0.000 |
| BRTHA3023403 | 26.579 | 0.000 |
| BRTHA3027879 | 51.819 | 0.000 |
| CHONS2002829 | 11.691 | 0.000 |
| CTONG2001932 | 12.322 | 0.000 |
| CTONG2003517 | 13.371 | 0.000 |
| CTONG2006235 | 1.954 | 0.000 |
| CTONG2011801 | 3.532 | 0.000 |
| CTONG3002518 | 10.064 | 0.000 |
| DFNES2001829 | 11.006 | 0.000 |
| KIDNE2010049 | 4.101 | 76.623 |
| LIVER2008465 | 7.893 | 0.000 |
| NT2RI3005923 | 23.249 | 0.000 |
| OCBBF3001333 | 3.832 | 0.000 |
| OCBBF3004487 | 5.404 | 0.000 |
| PLACE6008315 | 1.661 | 0.000 |
| PLACE7006240 | 30.024 | 0.000 |
| PROST2007444 | 5.217 | 0.000 |
| SPLEN2012571 | 3.792 | 0.000 |
| SYNOV4000598 | 35.608 | 0.000 |
| SYNOV4009575 | 5.715 | 0.000 |
| T1ESE2000904 | 2.754 | 0.000 |
| TESTI4002072 | 3.983 | 0.000 |
| TESTI4002195 | 15.959 | 0.000 |
| TESTI4002774 | 9.787 | 0.000 |
| TESTI4002799 | 1.053 | 9.842 |
| TESTI4003703 | 5.277 | 0.000 |
| TESTI4003944 | 41.606 | 0.000 |
| TESTI4005399 | 9.300 | 0.000 |
| TESTI4005653 | 1.779 | 0.000 |
| TESTI4024245 | 40.205 | 0.000 |
| TESTI4029297 | 5.277 | 0.000 |
| THYMU3002887 | 0.930 | 0.000 |
| THYMU3021586 | 4.926 | 0.000 |
| THYMU3026350 | 17.045 | 0.000 |
| THYMU3032798 | 2.306 | 0.000 |
| THYMU3034616 | 58.853 | 0.000 |
| THYMU3034671 | 19.911 | 0.000 |
| TRACH3003872 | 9.820 | 0.000 |
| TRACH3005699 | 22.893 | 0.000 |
| TRACH3006800 | 34.742 | 0.000 |
| TRACH3008632 | 20.157 | 0.000 |
| TRACH3009008 | 5.843 | 0.000 |
| TUTER1000014 | 0.000 | 100.000 |
| TUTER2001433 | 0.000 | 100.000 |
| UTERU2000300 | 11.765 | 0.000 |
| UTERU2014998 | 100.000 | 0.000 |
| UTERU2016464 | 100.000 | 0.000 |
| UTERU2016669 | 9.848 | 0.000 |
| UTERU2020226 | 78.491 | 0.000 |
| UTERU2022955 | 100.000 | 0.000 |
| UTERU2023941 | 100.000 | 0.000 |
| UTERU2024042 | 100.000 | 0.000 |
| UTERU2027369 | 39.231 | 0.000 |
| UTERU2028377 | 100.000 | 0.000 |
| UTERU2029660 | 100.000 | 0.000 |
| UTERU2035926 | 100.000 | 0.000 |
| UTERU2037423 | 100.000 | 0.000 |
| UTERU3000670 | 83.447 | 0.000 |
| UTERU3001029 | 100.000 | 0.000 |
| UTERU3001394 | 100.000 | 0.000 |
| UTERU3001946 | 34.742 | 0.000 |
| UTERU3004635 | 100.000 | 0.000 |
| UTERU3005264 | 100.000 | 0.000 |
| UTERU3005422 | 25.298 | 0.000 |
| UTERU3006538 | 100.000 | 0.000 |
| UTERU3006720 | 100.000 | 0.000 |
| UTERU3007108 | 100.000 | 0.000 |
| UTERU3009775 | 100.000 | 0.000 |
| UTERU3010029 | 100.000 | 0.000 |
| UTERU3010409 | 53.665 | 0.000 |
| UTERU3010604 | 40.126 | 0.000 |
| UTERU3010892 | 100.000 | 0.000 |
| UTERU3010919 | 100.000 | 0.000 |
| UTERU3011092 | 100.000 | 0.000 |
| UTERU3011398 | 100.000 | 0.000 |
| UTERU3011558 | 100.000 | 0.000 |
| UTERU3011579 | 34.742 | 0.000 |
| UTERU3011837 | 100.000 | 0.000 |
| UTERU3012293 | 100.000 | 0.000 |
| UTERU3012414 | 51.819 | 0.000 |
| UTERU3012476 | 100.000 | 0.000 |
| UTERU3012599 | 100.000 | 0.000 |
| UTERU3012999 | 100.000 | 0.000 |
| UTERU3013167 | 54.394 | 0.000 |
| UTERU3013302 | 58.853 | 0.000 |
| UTERU3014274 | 100.000 | 0.000 |
| UTERU3014647 | 100.000 | 0.000 |
| UTERU3014906 | 100.000 | 0.000 |
| UTERU3015011 | 16.834 | 0.000 |
| UTERU3015299 | 100.000 | 0.000 |
| UTERU3015647 | 100.000 | 0.000 |
| UTERU3015844 | 100.000 | 0.000 |
| UTERU3016070 | 100.000 | 0.000 |
| UTERU3016273 | 53.896 | 0.000 |
| UTERU3016274 | 100.000 | 0.000 |
| UTERU3016308 | 100.000 | 0.000 |
| UTERU3017441 | 100.000 | 0.000 |
| UTERU3017626 | 100.000 | 0.000 |
| UTERU3017995 | 13.044 | 0.000 |
| UTERU3018172 | 38.038 | 0.000 |
| UTERU3018255 | 100.000 | 0.000 |
| UTERU2017492 | 5.197 | 0.000 |
| UTERU2025415 | 100.000 | 0.000 |
| UTERU2036507 | 100.000 | 0.000 |

[0657] The result of comparative analysis of cDNA libraries derived from tongue cancer (CTONG) and normal tongue (NTONG) showed the following genes whose expression levels differed between the two.

TABLE 20

| Clone ID | NTONG | CTONG |
|---|---|---|
| BRACE2012528 | 0.000 | 0.883 |
| BRAMY4001863 | 0.000 | 55.803 |
| BRAWH3021574 | 0.000 | 17.507 |
| BRAWH3022651 | 0.000 | 3.051 |
| BRAWH3024186 | 0.000 | 18.588 |
| BRHIP2027077 | 0.000 | 3.762 |
| BRHIP3001573 | 0.000 | 15.195 |
| BRHIP3002000 | 0.000 | 12.571 |
| BRHIP3007223 | 14.859 | 3.755 |
| BRHIP3012997 | 0.000 | 1.726 |
| BRHIP3020046 | 0.000 | 3.773 |
| BRSSN2013696 | 0.000 | 6.652 |
| BRSTN2011961 | 2.134 | 0.539 |
| BRSTN2012069 | 0.000 | 0.018 |
| BRTHA2027229 | 0.000 | 3.410 |
| BRTHA2033155 | 0.000 | 7.921 |
| BRTHA3011194 | 0.000 | 6.583 |
| BRTHA3022641 | 0.000 | 32.949 |
| CTONG2001932 | 0.000 | 38.485 |
| CTONG2003517 | 0.000 | 20.880 |
| CTONG2006235 | 0.000 | 3.051 |
| CTONG2008989 | 0.000 | 100.000 |
| CTONG2009033 | 0.000 | 47.970 |
| CTONG2009570 | 0.000 | 100.000 |
| CTONG2010330 | 0.000 | 100.000 |
| CTONG2011801 | 0.000 | 5.515 |
| CTONG2012123 | 0.000 | 100.000 |
| CTONG2014206 | 0.000 | 100.000 |
| CTONG2014959 | 0.000 | 100.000 |
| CTONG2020582 | 0.000 | 21.442 |
| CTONG2026987 | 0.000 | 100.000 |
| CTONG2027150 | 0.000 | 100.000 |
| CTONG2027591 | 0.000 | 100.000 |
| CTONG2027783 | 0.000 | 100.000 |
| CTONG2027959 | 0.000 | 72.408 |
| CTONG3001605 | 0.000 | 100.000 |
| CTONG3002518 | 0.000 | 15.716 |
| CTONG3002588 | 0.000 | 100.000 |
| CTONG3003669 | 0.000 | 100.000 |
| CTONG3008223 | 0.000 | 100.000 |
| NT2RI2009233 | 0.000 | 8.402 |
| NTONG2002278 | 100.000 | 0.000 |
| NTONG2003805 | 100.000 | 0.000 |
| NTONG2004829 | 100.000 | 0.000 |
| NTONG2008483 | 17.664 | 2.976 |
| NTONG2009468 | 69.996 | 0.000 |
| OCBBF3004487 | 0.000 | 8.439 |
| PLACE6008315 | 10.262 | 0.000 |
| PLACE7004103 | 9.531 | 12.044 |
| SKNMC2003639 | 0.000 | 19.285 |
| SPLEN2012571 | 0.000 | 5.921 |
| SPLEN2019092 | 0.000 | 51.706 |
| SYNOV4009575 | 0.000 | 8.924 |
| T1ESE2000904 | 0.000 | 4.300 |
| TESTI2005564 | 0.000 | 6.821 |
| TESTI2018867 | 20.987 | 0.000 |
| TESTI4002799 | 0.000 | 1.645 |
| TESTI4005653 | 0.000 | 7.408 |
| TESTI4032913 | 59.736 | 0.000 |
| THYMU3021586 | 0.000 | 7.693 |
| THYMU3047115 | 57.541 | 0.000 |
| TRACH3006717 | 0.000 | 13.669 |
| TRACH3007625 | 0.000 | 4.379 |
| TRACH3016805 | 0.000 | 8.386 |
| TRACH3036932 | 0.000 | 27.304 |
| TRACH3038399 | 0.000 | 23.161 |
| UTERU2000300 | 0.000 | 9.187 |
| CTONG2002832 | 0.000 | 20.880 |
| CTONG2003764 | 0.000 | 24.325 |

[0658] The result of comparative analysis of cDNA libraries derived from fetal brain (FCBBF, FEBRA, or OCBBF) and adult brain (BRACE, BRALZ, BRAMY, BRAWH, BRCAN, BRCOC, BRHIP, BRSSN, BRSTN, or BRTHA) showed the following genes whose expression levels differed between the two.

TABLE 21

| Clone ID | FCBBF | FEBRA | OCBBF | BRACE | BRALZ | BRAMY | BRAWH | BRCAN | BRCOC | BRHIP | BRSSN | BRSTN | BRTHA |
|---|---|---|---|---|---|---|---|---|---|---|---|---|---|
| ASTRO2008972 | 28.772 | 0.000 | 0.000 | 0.000 | 0.000 | 0.000 | 0.000 | 0.000 | 0.000 | 0.000 | 0.000 | 0.000 | 17.271 |
| ASTRO2016114 | 0.000 | 0.000 | 0.000 | 0.000 | 0.000 | 0.000 | 14.497 | 0.000 | 0.000 | 0.000 | 0.000 | 0.000 | 0.000 |
| BLADE2004849 | 0.000 | 0.000 | 0.000 | 0.000 | 0.000 | 0.000 | 0.000 | 0.000 | 0.000 | 0.000 | 0.000 | 0.000 | 8.220 |
| BRACE1000475 | 0.000 | 0.000 | 0.000 | 100.000 | 0.000 | 0.000 | 0.000 | 0.000 | 0.000 | 0.000 | 0.000 | 0.000 | 0.000 |
| BRACE2002392 | 0.000 | 0.000 | 0.000 | 3.670 | 18.684 | 5.210 | 0.000 | 15.817 | 12.212 | 5.275 | 0.000 | 6.215 | 1.911 |
| BRACE2003628 | 0.000 | 0.000 | 0.000 | 9.684 | 0.000 | 0.000 | 0.000 | 0.000 | 0.000 | 0.000 | 0.000 | 0.000 | 0.000 |
| BRACE2005991 | 0.000 | 0.000 | 0.000 | 100.000 | 0.000 | 0.000 | 0.000 | 0.000 | 0.000 | 0.000 | 0.000 | 0.000 | 0.000 |
| BRACE2010336 | 0.000 | 0.000 | 0.000 | 9.658 | 0.000 | 0.000 | 0.000 | 0.000 | 0.000 | 0.000 | 0.000 | 0.000 | 0.000 |
| BRACE2012528 | 0.876 | 5.911 | 3.535 | 15.820 | 1.714 | 10.512 | 3.794 | 7.616 | 0.000 | 4.354 | 0.000 | 6.840 | 13.673 |
| BRACE2012625 | 0.000 | 0.000 | 0.000 | 100.000 | 0.000 | 0.000 | 0.000 | 0.000 | 0.000 | 0.000 | 0.000 | 0.000 | 0.000 |
| BRACE2012833 | 0.000 | 0.000 | 0.000 | 100.000 | 0.000 | 0.000 | 0.000 | 0.000 | 0.000 | 0.000 | 0.000 | 0.000 | 0.000 |
| BRACE2012838 | 0.000 | 0.000 | 0.000 | 100.000 | 0.000 | 0.000 | 0.000 | 0.000 | 0.000 | 0.000 | 0.000 | 0.000 | 0.000 |
| BRACE2012936 | 0.000 | 0.000 | 0.000 | 100.000 | 0.000 | 0.000 | 0.000 | 0.000 | 0.000 | 0.000 | 0.000 | 0.000 | 0.000 |
| BRACE2012947 | 0.000 | 0.000 | 0.000 | 100.000 | 0.000 | 0.000 | 0.000 | 0.000 | 0.000 | 0.000 | 0.000 | 0.000 | 0.000 |
| BRACE2013009 | 0.000 | 0.000 | 0.000 | 100.000 | 0.000 | 0.000 | 0.000 | 0.000 | 0.000 | 0.000 | 0.000 | 0.000 | 0.000 |
| BRACE2013126 | 0.000 | 0.000 | 0.000 | 100.000 | 0.000 | 0.000 | 0.000 | 0.000 | 0.000 | 0.000 | 0.000 | 0.000 | 0.000 |
| BRACE2013132 | 0.000 | 0.000 | 0.000 | 100.000 | 0.000 | 0.000 | 0.000 | 0.000 | 0.000 | 0.000 | 0.000 | 0.000 | 0.000 |
| BRACE2016896 | 0.000 | 0.000 | 0.000 | 100.000 | 0.000 | 0.000 | 0.000 | 0.000 | 0.000 | 0.000 | 0.000 | 0.000 | 0.000 |
| BRACE2017359 | 0.000 | 0.000 | 0.000 | 58.183 | 0.000 | 0.000 | 0.000 | 0.000 | 0.000 | 41.817 | 0.000 | 0.000 | 0.000 |
| BRACE2017397 | 0.000 | 0.000 | 0.000 | 3.348 | 0.000 | 2.376 | 0.000 | 0.000 | 0.000 | 4.813 | 0.000 | 0.000 | 0.000 |
| BRACE2017580 | 0.000 | 0.000 | 0.000 | 100.000 | 0.000 | 0.000 | 0.000 | 0.000 | 0.000 | 0.000 | 0.000 | 0.000 | 0.000 |
| BRACE2017844 | 0.000 | 0.000 | 0.000 | 29.179 | 0.000 | 15.534 | 0.000 | 11.790 | 0.000 | 5.243 | 38.254 | 0.000 | 0.000 |
| BRACE2017872 | 0.000 | 0.000 | 0.000 | 100.000 | 0.000 | 0.000 | 0.000 | 0.000 | 0.000 | 0.000 | 0.000 | 0.000 | 0.000 |
| BRACE2017992 | 0.000 | 0.000 | 0.000 | 100.000 | 0.000 | 0.000 | 0.000 | 0.000 | 0.000 | 0.000 | 0.000 | 0.000 | 0.000 |
| BRACE2019348 | 0.000 | 0.000 | 0.000 | 74.228 | 0.000 | 0.000 | 0.000 | 0.000 | 0.000 | 0.000 | 0.000 | 0.000 | 25.772 |
| BRACE2023633 | 0.000 | 0.000 | 0.000 | 100.000 | 0.000 | 0.000 | 0.000 | 0.000 | 0.000 | 0.000 | 0.000 | 0.000 | 0.000 |
| BRACE2023744 | 0.000 | 0.000 | 0.000 | 100.000 | 0.000 | 0.000 | 0.000 | 0.000 | 0.000 | 0.000 | 0.000 | 0.000 | 0.000 |
| BRACE2025452 | 0.000 | 0.000 | 0.000 | 100.000 | 0.000 | 0.000 | 0.000 | 0.000 | 0.000 | 0.000 | 0.000 | 0.000 | 0.000 |
| BRACE2026404 | 0.000 | 0.000 | 0.000 | 100.000 | 0.000 | 0.000 | 0.000 | 0.000 | 0.000 | 0.000 | 0.000 | 0.000 | 0.000 |
| BRACE2027312 | 0.000 | 0.000 | 0.000 | 100.000 | 0.000 | 0.000 | 0.000 | 0.000 | 0.000 | 0.000 | 0.000 | 0.000 | 0.000 |
| BRACE2027382 | 0.000 | 0.000 | 0.000 | 100.000 | 0.000 | 0.000 | 0.000 | 0.000 | 0.000 | 0.000 | 0.000 | 0.000 | 0.000 |
| BRACE2028956 | 0.000 | 0.000 | 0.000 | 100.000 | 0.000 | 0.000 | 0.000 | 0.000 | 0.000 | 0.000 | 0.000 | 0.000 | 0.000 |
| BRACE2030039 | 0.000 | 0.000 | 0.000 | 100.000 | 0.000 | 0.000 | 0.000 | 0.000 | 0.000 | 0.000 | 0.000 | 0.000 | 0.000 |
| BRACE2032584 | 0.000 | 0.000 | 0.000 | 100.000 | 0.000 | 0.000 | 0.000 | 0.000 | 0.000 | 0.000 | 0.000 | 0.000 | 0.000 |
| BRACE2033128 | 0.000 | 0.000 | 0.000 | 100.000 | 0.000 | 0.000 | 0.000 | 0.000 | 0.000 | 0.000 | 0.000 | 0.000 | 0.000 |
| BRACE2034434 | 0.000 | 0.000 | 0.000 | 100.000 | 0.000 | 0.000 | 0.000 | 0.000 | 0.000 | 0.000 | 0.000 | 0.000 | 0.000 |
| BRACE2035120 | 0.000 | 0.000 | 0.000 | 100.000 | 0.000 | 0.000 | 0.000 | 0.000 | 0.000 | 0.000 | 0.000 | 0.000 | 0.000 |
| BRACE2035191 | 0.000 | 0.000 | 0.000 | 100.000 | 0.000 | 0.000 | 0.000 | 0.000 | 0.000 | 0.000 | 0.000 | 0.000 | 0.000 |
| BRACE2039362 | 0.000 | 0.000 | 0.000 | 100.000 | 0.000 | 0.000 | 0.000 | 0.000 | 0.000 | 0.000 | 0.000 | 0.000 | 0.000 |
| BRACE2039607 | 0.000 | 0.000 | 0.000 | 100.000 | 0.000 | 0.000 | 0.000 | 0.000 | 0.000 | 0.000 | 0.000 | 0.000 | 0.000 |
| BRACE2042541 | 0.000 | 0.000 | 0.000 | 100.000 | 0.000 | 0.000 | 0.000 | 0.000 | 0.000 | 0.000 | 0.000 | 0.000 | 0.000 |
| BRACE2046976 | 0.000 | 0.000 | 0.000 | 100.000 | 0.000 | 0.000 | 0.000 | 0.000 | 0.000 | 0.000 | 0.000 | 0.000 | 0.000 |
| BRACE2047232 | 0.000 | 0.000 | 0.000 | 100.000 | 0.000 | 0.000 | 0.000 | 0.000 | 0.000 | 0.000 | 0.000 | 0.000 | 0.000 |
| BRACE2047975 | 0.000 | 0.000 | 0.000 | 100.000 | 0.000 | 0.000 | 0.000 | 0.000 | 0.000 | 0.000 | 0.000 | 0.000 | 0.000 |
| BRACE3001403 | 0.000 | 0.000 | 0.000 | 100.000 | 0.000 | 0.000 | 0.000 | 0.000 | 0.000 | 0.000 | 0.000 | 0.000 | 0.000 |
| BRACE3001973 | 0.000 | 0.000 | 63.640 | 36.360 | 0.000 | 0.000 | 0.000 | 0.000 | 0.000 | 0.000 | 0.000 | 0.000 | 0.000 |
| BRACE3002344 | 0.000 | 0.000 | 0.000 | 100.000 | 0.000 | 0.000 | 0.000 | 0.000 | 0.000 | 0.000 | 0.000 | 0.000 | 0.000 |
| BRACE3002541 | 0.000 | 0.000 | 0.000 | 100.000 | 0.000 | 0.000 | 0.000 | 0.000 | 0.000 | 0.000 | 0.000 | 0.000 | 0.000 |
| BRACE3002756 | 0.000 | 0.000 | 0.000 | 100.000 | 0.000 | 0.000 | 0.000 | 0.000 | 0.000 | 0.000 | 0.000 | 0.000 | 0.000 |
| BRACE3003866 | 0.000 | 0.000 | 0.000 | 100.000 | 0.000 | 0.000 | 0.000 | 0.000 | 0.000 | 0.000 | 0.000 | 0.000 | 0.000 |
| BRACE3004046 | 0.000 | 0.000 | 0.000 | 41.027 | 0.000 | 0.000 | 0.000 | 0.000 | 0.000 | 58.973 | 0.000 | 0.000 | 0.000 |
| BRACE3004371 | 0.000 | 0.000 | 9.334 | 10.666 | 0.000 | 7.571 | 11.270 | 0.000 | 0.000 | 7.666 | 0.000 | 0.000 | 4.166 |
| BRACE3004767 | 0.000 | 0.000 | 0.000 | 41.512 | 0.000 | 0.000 | 58.488 | 0.000 | 0.000 | 0.000 | 0.000 | 0.000 | 0.000 |
| BRACE3004887 | 0.000 | 0.000 | 0.000 | 100.000 | 0.000 | 0.000 | 0.000 | 0.000 | 0.000 | 0.000 | 0.000 | 0.000 | 0.000 |
| BRACE3004981 | 0.000 | 0.000 | 0.000 | 100.000 | 0.000 | 0.000 | 0.000 | 0.000 | 0.000 | 0.000 | 0.000 | 0.000 | 0.000 |
| BRACE3005870 | 0.000 | 0.000 | 0.000 | 100.000 | 0.000 | 0.000 | 0.000 | 0.000 | 0.000 | 0.000 | 0.000 | 0.000 | 0.000 |
| BRACE3005903 | 0.000 | 0.000 | 0.000 | 100.000 | 0.000 | 0.000 | 0.000 | 0.000 | 0.000 | 0.000 | 0.000 | 0.000 | 0.000 |
| BRACE3006553 | 0.000 | 0.000 | 0.000 | 18.271 | 0.000 | 0.000 | 0.000 | 0.000 | 0.000 | 0.000 | 0.000 | 0.000 | 0.000 |
| BRACE3007649 | 0.000 | 0.000 | 0.000 | 100.000 | 0.000 | 0.000 | 0.000 | 0.000 | 0.000 | 0.000 | 0.000 | 0.000 | 0.000 |
| BRACE3007869 | 0.000 | 0.000 | 0.000 | 100.000 | 0.000 | 0.000 | 0.000 | 0.000 | 0.000 | 0.000 | 0.000 | 0.000 | 0.000 |
| BRACE3009075 | 0.000 | 0.000 | 0.000 | 100.000 | 0.000 | 0.000 | 0.000 | 0.000 | 0.000 | 0.000 | 0.000 | 0.000 | 0.000 |
| BRACE3009265 | 0.000 | 0.000 | 0.000 | 100.000 | 0.000 | 0.000 | 0.000 | 0.000 | 0.000 | 0.000 | 0.000 | 0.000 | 0.000 |
| BRACE3009392 | 0.000 | 0.000 | 0.000 | 100.000 | 0.000 | 0.000 | 0.000 | 0.000 | 0.000 | 0.000 | 0.000 | 0.000 | 0.000 |
| BRACE3009416 | 0.000 | 0.000 | 0.000 | 20.257 | 0.000 | 0.000 | 0.000 | 0.000 | 0.000 | 29.118 | 0.000 | 0.000 | 0.000 |
| BRACE3009539 | 0.000 | 0.000 | 0.000 | 100.000 | 0.000 | 0.000 | 0.000 | 0.000 | 0.000 | 0.000 | 0.000 | 0.000 | 0.000 |
| BRACE3010702 | 0.000 | 0.000 | 0.000 | 100.000 | 0.000 | 0.000 | 0.000 | 0.000 | 0.000 | 0.000 | 0.000 | 0.000 | 0.000 |
| BRACE3011447 | 0.000 | 0.000 | 0.000 | 100.000 | 0.000 | 0.000 | 0.000 | 0.000 | 0.000 | 0.000 | 0.000 | 0.000 | 0.000 |
| BRACE3011774 | 0.000 | 0.000 | 0.000 | 100.000 | 0.000 | 0.000 | 0.000 | 0.000 | 0.000 | 0.000 | 0.000 | 0.000 | 0.000 |
| BRACE3013418 | 0.000 | 0.000 | 0.000 | 100.000 | 0.000 | 0.000 | 0.000 | 0.000 | 0.000 | 0.000 | 0.000 | 0.000 | 0.000 |
| BRACE3013874 | 0.000 | 0.000 | 0.000 | 100.000 | 0.000 | 0.000 | 0.000 | 0.000 | 0.000 | 0.000 | 0.000 | 0.000 | 0.000 |
| BRACE3013986 | 0.000 | 0.000 | 0.000 | 100.000 | 0.000 | 0.000 | 0.000 | 0.000 | 0.000 | 0.000 | 0.000 | 0.000 | 0.000 |
| BRACE3014523 | 0.000 | 0.000 | 0.000 | 100.000 | 0.000 | 0.000 | 0.000 | 0.000 | 0.000 | 0.000 | 0.000 | 0.000 | 0.000 |
| BRACE3014714 | 0.000 | 0.000 | 0.000 | 100.000 | 0.000 | 0.000 | 0.000 | 0.000 | 0.000 | 0.000 | 0.000 | 0.000 | 0.000 |
| BRACE3015090 | 0.000 | 0.000 | 0.000 | 100.000 | 0.000 | 0.000 | 0.000 | 0.000 | 0.000 | 0.000 | 0.000 | 0.000 | 0.000 |
| BRACE3015898 | 0.000 | 0.000 | 0.000 | 100.000 | 0.000 | 0.000 | 0.000 | 0.000 | 0.000 | 0.000 | 0.000 | 0.000 | 0.000 |
| BRACE3016020 | 0.000 | 0.000 | 0.000 | 100.000 | 0.000 | 0.000 | 0.000 | 0.000 | 0.000 | 0.000 | 0.000 | 0.000 | 0.000 |
| BRACE3016167 | 0.000 | 0.000 | 0.000 | 100.000 | 0.000 | 0.000 | 0.000 | 0.000 | 0.000 | 0.000 | 0.000 | 0.000 | 0.000 |
| BRACE3016580 | 0.000 | 0.000 | 0.000 | 100.000 | 0.000 | 0.000 | 0.000 | 0.000 | 0.000 | 0.000 | 0.000 | 0.000 | 0.000 |
| BRACE3016788 | 0.000 | 0.000 | 0.000 | 100.000 | 0.000 | 0.000 | 0.000 | 0.000 | 0.000 | 0.000 | 0.000 | 0.000 | 0.000 |
| BRACE3016810 | 0.000 | 0.000 | 0.000 | 100.000 | 0.000 | 0.000 | 0.000 | 0.000 | 0.000 | 0.000 | 0.000 | 0.000 | 0.000 |
| BRACE3016862 | 0.000 | 0.000 | 0.000 | 100.000 | 0.000 | 0.000 | 0.000 | 0.000 | 0.000 | 0.000 | 0.000 | 0.000 | 0.000 |
| BRACE3017253 | 0.000 | 0.000 | 0.000 | 55.894 | 0.000 | 0.000 | 0.000 | 0.000 | 0.000 | 0.000 | 0.000 | 0.000 | 0.000 |
| BRACE3018083 | 0.000 | 0.000 | 0.000 | 100.000 | 0.000 | 0.000 | 0.000 | 0.000 | 0.000 | 0.000 | 0.000 | 0.000 | 0.000 |
| BRACE3019570 | 0.000 | 0.000 | 0.000 | 100.000 | 0.000 | 0.000 | 0.000 | 0.000 | 0.000 | 0.000 | 0.000 | 0.000 | 0.000 |
| BRACE3019611 | 0.000 | 0.000 | 0.000 | 100.000 | 0.000 | 0.000 | 0.000 | 0.000 | 0.000 | 0.000 | 0.000 | 0.000 | 0.000 |
| BRACE3019817 | 0.000 | 0.000 | 0.000 | 100.000 | 0.000 | 0.000 | 0.000 | 0.000 | 0.000 | 0.000 | 0.000 | 0.000 | 0.000 |
| BRACE3019941 | 0.000 | 0.000 | 0.000 | 2.074 | 0.000 | 0.000 | 0.000 | 0.000 | 0.000 | 0.000 | 0.000 | 0.000 | 6.480 |
| BRACE3020356 | 0.000 | 0.000 | 0.000 | 100.000 | 0.000 | 0.000 | 0.000 | 0.000 | 0.000 | 0.000 | 0.000 | 0.000 | 0.000 |
| BRACE3020669 | 0.000 | 0.000 | 0.000 | 38.787 | 0.000 | 0.000 | 0.000 | 0.000 | 0.000 | 0.000 | 0.000 | 0.000 | 0.000 |
| BRACE3021430 | 0.000 | 0.000 | 0.000 | 8.467 | 0.000 | 0.000 | 0.000 | 0.000 | 0.000 | 0.000 | 0.000 | 0.000 | 0.000 |
| BRACE3021517 | 0.000 | 0.000 | 0.000 | 100.000 | 0.000 | 0.000 | 0.000 | 0.000 | 0.000 | 0.000 | 0.000 | 0.000 | 0.000 |
| BRACE3021805 | 0.000 | 0.000 | 0.000 | 100.000 | 0.000 | 0.000 | 0.000 | 0.000 | 0.000 | 0.000 | 0.000 | 0.000 | 0.000 |
| BRACE3022051 | 0.000 | 0.000 | 0.000 | 100.000 | 0.000 | 0.000 | 0.000 | 0.000 | 0.000 | 0.000 | 0.000 | 0.000 | 0.000 |
| BRACE3022303 | 0.000 | 0.000 | 0.000 | 100.000 | 0.000 | 0.000 | 0.000 | 0.000 | 0.000 | 0.000 | 0.000 | 0.000 | 0.000 |
| BRACE3022312 | 0.000 | 0.000 | 0.000 | 24.151 | 0.000 | 0.000 | 0.000 | 0.000 | 0.000 | 0.000 | 0.000 | 0.000 | 37.734 |
| BRACE3022340 | 0.000 | 0.000 | 0.000 | 41.512 | 0.000 | 0.000 | 58.488 | 0.000 | 0.000 | 0.000 | 0.000 | 0.000 | 0.000 |
| BRACE3022847 | 0.000 | 0.000 | 0.000 | 100.000 | 0.000 | 0.000 | 0.000 | 0.000 | 0.000 | 0.000 | 0.000 | 0.000 | 0.000 |
| BRACE3023604 | 0.000 | 0.000 | 0.000 | 100.000 | 0.000 | 0.000 | 0.000 | 0.000 | 0.000 | 0.000 | 0.000 | 0.000 | 0.000 |
| BRACE3024379 | 0.000 | 0.000 | 0.000 | 100.000 | 0.000 | 0.000 | 0.000 | 0.000 | 0.000 | 0.000 | 0.000 | 0.000 | 0.000 |
| BRACE3024444 | 0.000 | 0.000 | 0.000 | 100.000 | 0.000 | 0.000 | 0.000 | 0.000 | 0.000 | 0.000 | 0.000 | 0.000 | 0.000 |
| BRACE3024497 | 0.000 | 0.000 | 0.000 | 100.000 | 0.000 | 0.000 | 0.000 | 0.000 | 0.000 | 0.000 | 0.000 | 0.000 | 0.000 |
| BRACE3024537 | 0.000 | 0.000 | 0.000 | 100.000 | 0.000 | 0.000 | 0.000 | 0.000 | 0.000 | 0.000 | 0.000 | 0.000 | 0.000 |
| BRACE3024879 | 0.000 | 0.000 | 0.000 | 100.000 | 0.000 | 0.000 | 0.000 | 0.000 | 0.000 | 0.000 | 0.000 | 0.000 | 0.000 |
| BRACE3025627 | 0.000 | 0.000 | 0.000 | 100.000 | 0.000 | 0.000 | 0.000 | 0.000 | 0.000 | 0.000 | 0.000 | 0.000 | 0.000 |
| BRACE3025719 | 0.000 | 0.000 | 0.000 | 12.784 | 0.000 | 0.000 | 0.000 | 0.000 | 0.000 | 0.000 | 67.040 | 0.000 | 0.000 |
| BRACE3026161 | 0.000 | 0.000 | 0.000 | 100.000 | 0.000 | 0.000 | 0.000 | 0.000 | 0.000 | 0.000 | 0.000 | 0.000 | 0.000 |
| BRACE3026290 | 0.000 | 0.000 | 0.000 | 100.000 | 0.000 | 0.000 | 0.000 | 0.000 | 0.000 | 0.000 | 0.000 | 0.000 | 0.000 |
| BRACE3026345 | 0.000 | 0.000 | 0.000 | 100.000 | 0.000 | 0.000 | 0.000 | 0.000 | 0.000 | 0.000 | 0.000 | 0.000 | 0.000 |
| BRACE3026456 | 0.000 | 0.000 | 0.000 | 100.000 | 0.000 | 0.000 | 0.000 | 0.000 | 0.000 | 0.000 | 0.000 | 0.000 | 0.000 |
| BRACE3026802 | 0.000 | 0.000 | 0.000 | 36.390 | 0.000 | 0.000 | 0.000 | 0.000 | 0.000 | 0.000 | 63.610 | 0.000 | 0.000 |
| BRACE3026844 | 0.000 | 0.000 | 0.000 | 100.000 | 0.000 | 0.000 | 0.000 | 0.000 | 0.000 | 0.000 | 0.000 | 0.000 | 0.000 |
| BRACE3026947 | 0.000 | 0.000 | 0.000 | 100.000 | 0.000 | 0.000 | 0.000 | 0.000 | 0.000 | 0.000 | 0.000 | 0.000 | 0.000 |
| BRACE3027256 | 0.000 | 0.000 | 0.000 | 100.000 | 0.000 | 0.000 | 0.000 | 0.000 | 0.000 | 0.000 | 0.000 | 0.000 | 0.000 |
| BRACE3027931 | 0.000 | 0.000 | 41.796 | 23.879 | 0.000 | 0.000 | 0.000 | 0.000 | 0.000 | 34.325 | 0.000 | 0.000 | 0.000 |
| BRACE3028360 | 0.000 | 0.000 | 0.000 | 100.000 | 0.000 | 0.000 | 0.000 | 0.000 | 0.000 | 0.000 | 0.000 | 0.000 | 0.000 |
| BRACE3028895 | 0.000 | 0.000 | 0.000 | 32.302 | 0.000 | 0.000 | 0.000 | 0.000 | 0.000 | 0.000 | 0.000 | 0.000 | 0.000 |
| BRACE3028998 | 0.000 | 0.000 | 0.000 | 100.000 | 0.000 | 0.000 | 0.000 | 0.000 | 0.000 | 0.000 | 0.000 | 0.000 | 0.000 |
| BRACE3029005 | 0.000 | 0.000 | 0.000 | 100.000 | 0.000 | 0.000 | 0.000 | 0.000 | 0.000 | 0.000 | 0.000 | 0.000 | 0.000 |
| BRACE3029021 | 0.000 | 0.000 | 0.000 | 25.807 | 0.000 | 0.000 | 0.000 | 0.000 | 0.000 | 74.193 | 0.000 | 0.000 | 0.000 |
| BRACE3029205 | 0.000 | 0.000 | 0.000 | 100.000 | 0.000 | 0.000 | 0.000 | 0.000 | 0.000 | 0.000 | 0.000 | 0.000 | 0.000 |
| BRACE3029447 | 0.000 | 0.000 | 0.000 | 100.000 | 0.000 | 0.000 | 0.000 | 0.000 | 0.000 | 0.000 | 0.000 | 0.000 | 0.000 |
| BRACE3030538 | 0.000 | 0.000 | 63.640 | 36.360 | 0.000 | 0.000 | 0.000 | 0.000 | 0.000 | 0.000 | 0.000 | 0.000 | 0.000 |
| BRACE3031161 | 0.000 | 0.000 | 0.000 | 100.000 | 0.000 | 0.000 | 0.000 | 0.000 | 0.000 | 0.000 | 0.000 | 0.000 | 0.000 |
| BRACE3031184 | 0.000 | 0.000 | 0.000 | 100.000 | 0.000 | 0.000 | 0.000 | 0.000 | 0.000 | 0.000 | 0.000 | 0.000 | 0.000 |
| BRACE3031185 | 0.000 | 0.000 | 0.000 | 41.512 | 0.000 | 0.000 | 58.488 | 0.000 | 0.000 | 0.000 | 0.000 | 0.000 | 0.000 |
| BRACE3031315 | 0.000 | 0.000 | 0.000 | 41.329 | 0.000 | 58.671 | 0.000 | 0.000 | 0.000 | 0.000 | 0.000 | 0.000 | 0.000 |
| BRACE3031372 | 0.000 | 0.000 | 0.000 | 100.000 | 0.000 | 0.000 | 0.000 | 0.000 | 0.000 | 0.000 | 0.000 | 0.000 | 0.000 |
| BRACE3031579 | 0.000 | 0.000 | 0.000 | 100.000 | 0.000 | 0.000 | 0.000 | 0.000 | 0.000 | 0.000 | 0.000 | 0.000 | 0.000 |
| BRACE3031728 | 0.000 | 0.000 | 0.000 | 100.000 | 0.000 | 0.000 | 0.000 | 0.000 | 0.000 | 0.000 | 0.000 | 0.000 | 0.000 |
| BRACE3031743 | 0.000 | 67.995 | 0.000 | 15.488 | 0.000 | 5.497 | 5.455 | 0.000 | 0.000 | 5.566 | 0.000 | 0.000 | 0.000 |
| BRACE3031843 | 0.000 | 0.000 | 0.000 | 100.000 | 0.000 | 0.000 | 0.000 | 0.000 | 0.000 | 0.000 | 0.000 | 0.000 | 0.000 |
| BRACE3032385 | 0.000 | 17.044 | 0.000 | 19.411 | 0.000 | 13.778 | 13.674 | 0.000 | 0.000 | 20.927 | 0.000 | 0.000 | 15.164 |
| BRACE3032537 | 0.000 | 0.000 | 0.000 | 100.000 | 0.000 | 0.000 | 0.000 | 0.000 | 0.000 | 0.000 | 0.000 | 0.000 | 0.000 |
| BRACE3032538 | 0.000 | 0.000 | 0.000 | 100.000 | 0.000 | 0.000 | 0.000 | 0.000 | 0.000 | 0.000 | 0.000 | 0.000 | 0.000 |
| BRACE3032631 | 0.000 | 0.000 | 0.000 | 8.951 | 0.000 | 0.000 | 12.612 | 0.000 | 0.000 | 0.000 | 0.000 | 45.475 | 0.000 |
| BRACE3032980 | 0.000 | 0.000 | 0.000 | 100.000 | 0.000 | 0.000 | 0.000 | 0.000 | 0.000 | 0.000 | 0.000 | 0.000 | 0.000 |
| BRACE3033525 | 0.000 | 0.000 | 0.000 | 100.000 | 0.000 | 0.000 | 0.000 | 0.000 | 0.000 | 0.000 | 0.000 | 0.000 | 0.000 |
| BRACE3034183 | 0.000 | 0.000 | 0.000 | 100.000 | 0.000 | 0.000 | 0.000 | 0.000 | 0.000 | 0.000 | 0.000 | 0.000 | 0.000 |
| BRACE3034389 | 0.000 | 0.000 | 0.000 | 100.000 | 0.000 | 0.000 | 0.000 | 0.000 | 0.000 | 0.000 | 0.000 | 0.000 | 0.000 |
| BRACE3034964 | 0.000 | 0.000 | 0.000 | 100.000 | 0.000 | 0.000 | 0.000 | 0.000 | 0.000 | 0.000 | 0.000 | 0.000 | 0.000 |
| BRACE3034993 | 0.000 | 0.000 | 0.000 | 100.000 | 0.000 | 0.000 | 0.000 | 0.000 | 0.000 | 0.000 | 0.000 | 0.000 | 0.000 |
| BRACE3035168 | 0.000 | 0.000 | 0.000 | 29.854 | 0.000 | 0.000 | 0.000 | 0.000 | 0.000 | 0.000 | 0.000 | 0.000 | 0.000 |
| BRACE3036156 | 0.000 | 0.000 | 0.000 | 31.069 | 0.000 | 0.000 | 0.000 | 0.000 | 0.000 | 44.660 | 0.000 | 0.000 | 24.272 |
| BRACE3036271 | 0.000 | 0.000 | 0.000 | 100.000 | 0.000 | 0.000 | 0.000 | 0.000 | 0.000 | 0.000 | 0.000 | 0.000 | 0.000 |
| BRACE3036283 | 0.000 | 0.000 | 0.000 | 5.298 | 0.000 | 0.000 | 0.000 | 0.000 | 0.000 | 0.000 | 0.000 | 0.000 | 0.000 |
| BRACE3037612 | 0.000 | 0.000 | 0.000 | 100.000 | 0.000 | 0.000 | 0.000 | 0.000 | 0.000 | 0.000 | 0.000 | 0.000 | 0.000 |
| BRACE3037637 | 0.000 | 0.000 | 0.000 | 100.000 | 0.000 | 0.000 | 0.000 | 0.000 | 0.000 | 0.000 | 0.000 | 0.000 | 0.000 |
| BRACE3037803 | 0.000 | 0.000 | 0.000 | 100.000 | 0.000 | 0.000 | 0.000 | 0.000 | 0.000 | 0.000 | 0.000 | 0.000 | 0.000 |
| BRACE3038012 | 0.000 | 0.000 | 0.000 | 100.000 | 0.000 | 0.000 | 0.000 | 0.000 | 0.000 | 0.000 | 0.000 | 0.000 | 0.000 |
| BRACE3038030 | 0.000 | 0.000 | 0.000 | 100.000 | 0.000 | 0.000 | 0.000 | 0.000 | 0.000 | 0.000 | 0.000 | 0.000 | 0.000 |
| BRACE3038570 | 0.000 | 0.000 | 0.000 | 100.000 | 0.000 | 0.000 | 0.000 | 0.000 | 0.000 | 0.000 | 0.000 | 0.000 | 0.000 |
| BRACE3038760 | 0.000 | 0.000 | 0.000 | 100.000 | 0.000 | 0.000 | 0.000 | 0.000 | 0.000 | 0.000 | 0.000 | 0.000 | 0.000 |
| BRACE3039288 | 0.000 | 0.000 | 0.000 | 100.000 | 0.000 | 0.000 | 0.000 | 0.000 | 0.000 | 0.000 | 0.000 | 0.000 | 0.000 |
| BRACE3039358 | 0.000 | 0.000 | 0.000 | 14.668 | 0.000 | 0.000 | 41.331 | 0.000 | 0.000 | 21.084 | 0.000 | 0.000 | 22.917 |
| BRACE3039378 | 0.000 | 0.000 | 0.000 | 100.000 | 0.000 | 0.000 | 0.000 | 0.000 | 0.000 | 0.000 | 0.000 | 0.000 | 0.000 |
| BRACE3039454 | 0.000 | 0.000 | 0.000 | 100.000 | 0.000 | 0.000 | 0.000 | 0.000 | 0.000 | 0.000 | 0.000 | 0.000 | 0.000 |
| BRACE3040012 | 0.000 | 0.000 | 0.000 | 100.000 | 0.000 | 0.000 | 0.000 | 0.000 | 0.000 | 0.000 | 0.000 | 0.000 | 0.000 |
| BRACE3040239 | 0.000 | 0.000 | 0.000 | 100.000 | 0.000 | 0.000 | 0.000 | 0.000 | 0.000 | 0.000 | 0.000 | 0.000 | 0.000 |
| BRACE3040504 | 0.000 | 0.000 | 0.000 | 100.000 | 0.000 | 0.000 | 0.000 | 0.000 | 0.000 | 0.000 | 0.000 | 0.000 | 0.000 |
| BRACE3040644 | 0.000 | 0.000 | 0.000 | 100.000 | 0.000 | 0.000 | 0.000 | 0.000 | 0.000 | 0.000 | 0.000 | 0.000 | 0.000 |
| BRACE3040863 | 0.000 | 0.000 | 0.000 | 12.696 | 0.000 | 0.000 | 17.888 | 0.000 | 0.000 | 18.250 | 0.000 | 0.000 | 0.000 |
| BRACE3041059 | 0.000 | 0.000 | 0.000 | 100.000 | 0.000 | 0.000 | 0.000 | 0.000 | 0.000 | 0.000 | 0.000 | 0.000 | 0.000 |
| BRACE3041162 | 0.000 | 0.000 | 0.000 | 100.000 | 0.000 | 0.000 | 0.000 | 0.000 | 0.000 | 0.000 | 0.000 | 0.000 | 0.000 |
| BRACE3041827 | 0.000 | 0.000 | 0.000 | 100.000 | 0.000 | 0.000 | 0.000 | 0.000 | 0.000 | 0.000 | 0.000 | 0.000 | 0.000 |
| BRACE3042046 | 0.000 | 0.000 | 0.000 | 100.000 | 0.000 | 0.000 | 0.000 | 0.000 | 0.000 | 0.000 | 0.000 | 0.000 | 0.000 |
| BRACE3042210 | 0.000 | 0.000 | 0.000 | 100.000 | 0.000 | 0.000 | 0.000 | 0.000 | 0.000 | 0.000 | 0.000 | 0.000 | 0.000 |
| BRACE3042326 | 0.000 | 0.000 | 0.000 | 24.903 | 0.000 | 0.000 | 0.000 | 0.000 | 0.000 | 35.796 | 0.000 | 0.000 | 0.000 |
| BRACE3042409 | 0.000 | 0.000 | 0.000 | 100.000 | 0.000 | 0.000 | 0.000 | 0.000 | 0.000 | 0.000 | 0.000 | 0.000 | 0.000 |
| BRACE3042432 | 0.000 | 0.000 | 0.000 | 41.512 | 0.000 | 0.000 | 58.488 | 0.000 | 0.000 | 0.000 | 0.000 | 0.000 | 0.000 |
| BRACE3042594 | 0.000 | 0.000 | 0.000 | 100.000 | 0.000 | 0.000 | 0.000 | 0.000 | 0.000 | 0.000 | 0.000 | 0.000 | 0.000 |
| BRACE3043597 | 0.000 | 0.000 | 0.000 | 100.000 | 0.000 | 0.000 | 0.000 | 0.000 | 0.000 | 0.000 | 0.000 | 0.000 | 0.000 |
| BRACE3044090 | 0.000 | 0.000 | 0.000 | 100.000 | 0.000 | 0.000 | 0.000 | 0.000 | 0.000 | 0.000 | 0.000 | 0.000 | 0.000 |
| BRACE3044172 | 0.000 | 0.000 | 0.000 | 100.000 | 0.000 | 0.000 | 0.000 | 0.000 | 0.000 | 0.000 | 0.000 | 0.000 | 0.000 |
| BRACE3044247 | 0.000 | 0.000 | 0.000 | 100.000 | 0.000 | 0.000 | 0.000 | 0.000 | 0.000 | 0.000 | 0.000 | 0.000 | 0.000 |
| BRACE3044377 | 0.000 | 0.000 | 0.000 | 100.000 | 0.000 | 0.000 | 0.000 | 0.000 | 0.000 | 0.000 | 0.000 | 0.000 | 0.000 |
| BRACE3044495 | 0.000 | 0.000 | 0.000 | 100.000 | 0.000 | 0.000 | 0.000 | 0.000 | 0.000 | 0.000 | 0.000 | 0.000 | 0.000 |
| BRACE3045078 | 0.000 | 0.000 | 0.000 | 58.183 | 0.000 | 0.000 | 0.000 | 0.000 | 0.000 | 41.817 | 0.000 | 0.000 | 0.000 |
| BRACE3045145 | 0.000 | 0.000 | 0.000 | 100.000 | 0.000 | 0.000 | 0.000 | 0.000 | 0.000 | 0.000 | 0.000 | 0.000 | 0.000 |
| BRACE3045424 | 0.000 | 0.000 | 0.000 | 100.000 | 0.000 | 0.000 | 0.000 | 0.000 | 0.000 | 0.000 | 0.000 | 0.000 | 0.000 |
| BRACE3045708 | 0.000 | 0.000 | 0.000 | 100.000 | 0.000 | 0.000 | 0.000 | 0.000 | 0.000 | 0.000 | 0.000 | 0.000 | 0.000 |
| BRACE3045981 | 0.000 | 0.000 | 0.000 | 56.286 | 0.000 | 0.000 | 26.434 | 0.000 | 0.000 | 0.000 | 0.000 | 0.000 | 0.000 |
| BRACE3046049 | 0.000 | 0.000 | 0.000 | 100.000 | 0.000 | 0.000 | 0.000 | 0.000 | 0.000 | 0.000 | 0.000 | 0.000 | 0.000 |
| BRACE3046152 | 0.000 | 0.000 | 0.000 | 100.000 | 0.000 | 0.000 | 0.000 | 0.000 | 0.000 | 0.000 | 0.000 | 0.000 | 0.000 |
| BRACE3046294 | 0.000 | 0.000 | 0.000 | 100.000 | 0.000 | 0.000 | 0.000 | 0.000 | 0.000 | 0.000 | 0.000 | 0.000 | 0.000 |
| BRACE3046466 | 0.000 | 0.000 | 0.000 | 100.000 | 0.000 | 0.000 | 0.000 | 0.000 | 0.000 | 0.000 | 0.000 | 0.000 | 0.000 |
| BRACE3046491 | 0.000 | 0.000 | 0.000 | 100.000 | 0.000 | 0.000 | 0.000 | 0.000 | 0.000 | 0.000 | 0.000 | 0.000 | 0.000 |
| BRACE3046609 | 0.000 | 0.000 | 0.000 | 100.000 | 0.000 | 0.000 | 0.000 | 0.000 | 0.000 | 0.000 | 0.000 | 0.000 | 0.000 |
| BRACE3046837 | 0.000 | 0.000 | 0.000 | 100.000 | 0.000 | 0.000 | 0.000 | 0.000 | 0.000 | 0.000 | 0.000 | 0.000 | 0.000 |
| BRACE3046855 | 0.000 | 0.000 | 0.000 | 100.000 | 0.000 | 0.000 | 0.000 | 0.000 | 0.000 | 0.000 | 0.000 | 0.000 | 0.000 |
| BRACE3046966 | 0.000 | 0.000 | 0.000 | 100.000 | 0.000 | 0.000 | 0.000 | 0.000 | 0.000 | 0.000 | 0.000 | 0.000 | 0.000 |
| BRACE3047018 | 0.000 | 0.000 | 0.000 | 100.000 | 0.000 | 0.000 | 0.000 | 0.000 | 0.000 | 0.000 | 0.000 | 0.000 | 0.000 |
| BRACE3047482 | 0.000 | 0.000 | 0.000 | 100.000 | 0.000 | 0.000 | 0.000 | 0.000 | 0.000 | 0.000 | 0.000 | 0.000 | 0.000 |
| BRACE3047801 | 0.000 | 0.000 | 0.000 | 100.000 | 0.000 | 0.000 | 0.000 | 0.000 | 0.000 | 0.000 | 0.000 | 0.000 | 0.000 |
| BRALZ2003119 | 0.000 | 0.000 | 0.000 | 0.000 | 100.000 | 0.000 | 0.000 | 0.000 | 0.000 | 0.000 | 0.000 | 0.000 | 0.000 |
| BRALZ2007661 | 0.000 | 0.000 | 0.000 | 0.000 | 100.000 | 0.000 | 0.000 | 0.000 | 0.000 | 0.000 | 0.000 | 0.000 | 0.000 |
| BRALZ2008930 | 0.000 | 0.000 | 0.000 | 0.000 | 100.000 | 0.000 | 0.000 | 0.000 | 0.000 | 0.000 | 0.000 | 0.000 | 0.000 |
| BRALZ2010842 | 0.000 | 0.000 | 0.000 | 0.000 | 100.000 | 0.000 | 0.000 | 0.000 | 0.000 | 0.000 | 0.000 | 0.000 | 0.000 |
| BRALZ2011337 | 0.000 | 0.000 | 0.000 | 0.000 | 100.000 | 0.000 | 0.000 | 0.000 | 0.000 | 0.000 | 0.000 | 0.000 | 0.000 |
| BRALZ2013621 | 0.000 | 0.000 | 0.000 | 0.000 | 100.000 | 0.000 | 0.000 | 0.000 | 0.000 | 0.000 | 0.000 | 0.000 | 0.000 |
| BRALZ2013690 | 0.000 | 0.000 | 0.000 | 0.000 | 100.000 | 0.000 | 0.000 | 0.000 | 0.000 | 0.000 | 0.000 | 0.000 | 0.000 |
| BRALZ2014054 | 0.000 | 0.000 | 0.000 | 0.000 | 38.408 | 0.000 | 0.000 | 0.000 | 0.000 | 0.000 | 0.000 | 0.000 | 0.000 |
| BRAMY2015516 | 0.000 | 0.000 | 0.000 | 0.000 | 0.000 | 100.000 | 0.000 | 0.000 | 0.000 | 0.000 | 0.000 | 0.000 | 0.000 |
| BRAMY2021098 | 0.000 | 0.000 | 0.000 | 0.000 | 0.000 | 100.000 | 0.000 | 0.000 | 0.000 | 0.000 | 0.000 | 0.000 | 0.000 |
| BRAMY2022320 | 0.000 | 0.000 | 0.000 | 0.000 | 0.000 | 100.000 | 0.000 | 0.000 | 0.000 | 0.000 | 0.000 | 0.000 | 0.000 |
| BRAMY2023939 | 11.292 | 15.237 | 15.186 | 0.000 | 0.000 | 6.159 | 0.000 | 0.000 | 0.000 | 0.000 | 0.000 | 0.000 | 0.000 |
| BRAMY2025495 | 0.000 | 0.000 | 0.000 | 0.000 | 0.000 | 100.000 | 0.000 | 0.000 | 0.000 | 0.000 | 0.000 | 0.000 | 0.000 |
| BRAMY2031516 | 0.000 | 0.000 | 0.000 | 0.000 | 0.000 | 7.442 | 14.772 | 0.000 | 0.000 | 7.536 | 0.000 | 0.000 | 0.000 |
| BRAMY2033895 | 0.000 | 0.000 | 0.000 | 0.000 | 0.000 | 100.000 | 0.000 | 0.000 | 0.000 | 0.000 | 0.000 | 0.000 | 0.000 |
| BRAMY2035801 | 0.000 | 0.000 | 0.000 | 0.000 | 0.000 | 100.000 | 0.000 | 0.000 | 0.000 | 0.000 | 0.000 | 0.000 | 0.000 |
| BRAMY2036254 | 0.000 | 0.000 | 0.000 | 0.000 | 0.000 | 100.000 | 0.000 | 0.000 | 0.000 | 0.000 | 0.000 | 0.000 | 0.000 |
| BRAMY2036266 | 0.000 | 0.000 | 0.000 | 0.000 | 0.000 | 100.000 | 0.000 | 0.000 | 0.000 | 0.000 | 0.000 | 0.000 | 0.000 |
| BRAMY2037609 | 0.000 | 0.000 | 0.000 | 0.000 | 0.000 | 100.000 | 0.000 | 0.000 | 0.000 | 0.000 | 0.000 | 0.000 | 0.000 |
| BRAMY2039630 | 0.000 | 0.000 | 0.000 | 0.000 | 0.000 | 8.744 | 0.000 | 0.000 | 30.744 | 0.000 | 0.000 | 0.000 | 0.000 |
| BRAMY2040915 | 0.000 | 0.000 | 0.000 | 0.000 | 0.000 | 100.000 | 0.000 | 0.000 | 0.000 | 0.000 | 0.000 | 0.000 | 0.000 |
| BRAMY2041347 | 0.000 | 0.000 | 0.000 | 0.000 | 0.000 | 100.000 | 0.000 | 0.000 | 0.000 | 0.000 | 0.000 | 0.000 | 0.000 |
| BRAMY2041384 | 0.000 | 0.000 | 0.000 | 0.000 | 0.000 | 100.000 | 0.000 | 0.000 | 0.000 | 0.000 | 0.000 | 0.000 | 0.000 |
| BRAMY2041507 | 0.000 | 0.000 | 0.000 | 0.000 | 0.000 | 100.000 | 0.000 | 0.000 | 0.000 | 0.000 | 0.000 | 0.000 | 0.000 |
| BRAMY2044686 | 0.000 | 0.000 | 0.000 | 0.000 | 0.000 | 100.000 | 0.000 | 0.000 | 0.000 | 0.000 | 0.000 | 0.000 | 0.000 |
| BRAMY2046489 | 0.000 | 0.000 | 0.000 | 0.000 | 0.000 | 100.000 | 0.000 | 0.000 | 0.000 | 0.000 | 0.000 | 0.000 | 0.000 |
| BRAMY2046537 | 0.000 | 0.000 | 0.000 | 0.000 | 0.000 | 100.000 | 0.000 | 0.000 | 0.000 | 0.000 | 0.000 | 0.000 | 0.000 |
| BRAMY3000692 | 0.000 | 0.000 | 0.000 | 0.000 | 0.000 | 100.000 | 0.000 | 0.000 | 0.000 | 0.000 | 0.000 | 0.000 | 0.000 |
| BRAMY3001409 | 0.000 | 0.000 | 0.000 | 0.000 | 0.000 | 100.000 | 0.000 | 0.000 | 0.000 | 0.000 | 0.000 | 0.000 | 0.000 |
| BRAMY3002329 | 0.000 | 0.000 | 0.000 | 9.616 | 0.000 | 20.478 | 20.323 | 0.000 | 0.000 | 34.558 | 0.000 | 0.000 | 15.025 |
| BRAMY3002508 | 0.000 | 0.000 | 0.000 | 0.000 | 0.000 | 100.000 | 0.000 | 0.000 | 0.000 | 0.000 | 0.000 | 0.000 | 0.000 |
| BRAMY3002886 | 0.000 | 0.000 | 0.000 | 0.000 | 0.000 | 100.000 | 0.000 | 0.000 | 0.000 | 0.000 | 0.000 | 0.000 | 0.000 |
| BRAMY3004126 | 0.000 | 0.000 | 0.000 | 0.000 | 0.000 | 50.189 | 49.811 | 0.000 | 0.000 | 0.000 | 0.000 | 0.000 | 0.000 |
| BRAMY3004364 | 0.000 | 0.000 | 0.000 | 4.821 | 0.000 | 13.689 | 0.000 | 0.000 | 0.000 | 0.000 | 0.000 | 0.000 | 0.000 |
| BRAMY3005184 | 0.000 | 0.000 | 27.836 | 0.000 | 0.000 | 22.578 | 0.000 | 0.000 | 0.000 | 22.861 | 0.000 | 0.000 | 0.000 |
| BRAMY3005656 | 0.000 | 0.000 | 0.000 | 0.000 | 0.000 | 100.000 | 0.000 | 0.000 | 0.000 | 0.000 | 0.000 | 0.000 | 0.000 |
| BRAMY3005912 | 0.000 | 0.000 | 26.605 | 30.401 | 0.000 | 21.579 | 21.416 | 0.000 | 0.000 | 0.000 | 0.000 | 0.000 | 0.000 |
| BRAMY3007078 | 0.000 | 0.000 | 0.000 | 0.000 | 0.000 | 49.688 | 0.000 | 0.000 | 0.000 | 50.312 | 0.000 | 0.000 | 0.000 |
| BRAMY3007449 | 0.000 | 0.000 | 0.000 | 0.000 | 0.000 | 100.000 | 0.000 | 0.000 | 0.000 | 0.000 | 0.000 | 0.000 | 0.000 |
| BRAMY3007471 | 0.000 | 0.000 | 0.000 | 0.000 | 0.000 | 100.000 | 0.000 | 0.000 | 0.000 | 0.000 | 0.000 | 0.000 | 0.000 |
| BRAMY3008436 | 0.000 | 0.000 | 0.000 | 5.965 | 5.061 | 4.234 | 5.603 | 12.854 | 9.924 | 27.152 | 10.427 | 0.000 | 12.427 |
| BRAMY3009158 | 0.000 | 0.000 | 0.000 | 0.000 | 0.000 | 100.000 | 0.000 | 0.000 | 0.000 | 0.000 | 0.000 | 0.000 | 0.000 |
| BRAMY3009491 | 0.000 | 0.000 | 0.000 | 22.146 | 0.000 | 31.439 | 0.000 | 0.000 | 0.000 | 0.000 | 0.000 | 0.000 | 0.000 |
| BRAMY3009556 | 0.000 | 0.000 | 0.000 | 0.000 | 0.000 | 47.605 | 0.000 | 0.000 | 0.000 | 0.000 | 0.000 | 0.000 | 52.395 |
| BRAMY3009904 | 0.000 | 0.000 | 0.000 | 0.000 | 0.000 | 100.000 | 0.000 | 0.000 | 0.000 | 0.000 | 0.000 | 0.000 | 0.000 |
| BRAMY3010321 | 0.000 | 0.000 | 0.000 | 0.000 | 0.000 | 100.000 | 0.000 | 0.000 | 0.000 | 0.000 | 0.000 | 0.000 | 0.000 |
| BRAMY3010603 | 0.000 | 0.000 | 0.000 | 0.000 | 0.000 | 100.000 | 0.000 | 0.000 | 0.000 | 0.000 | 0.000 | 0.000 | 0.000 |
| BRAMY3010654 | 0.000 | 0.000 | 0.000 | 0.000 | 0.000 | 47.605 | 0.000 | 0.000 | 0.000 | 0.000 | 0.000 | 0.000 | 52.395 |
| BRAMY4000915 | 0.000 | 0.000 | 0.000 | 0.000 | 0.000 | 49.688 | 0.000 | 0.000 | 0.000 | 50.312 | 0.000 | 0.000 | 0.000 |
| BRAMY4000962 | 0.000 | 0.000 | 0.000 | 0.000 | 0.000 | 100.000 | 0.000 | 0.000 | 0.000 | 0.000 | 0.000 | 0.000 | 0.000 |
| BRAMY4001234 | 0.000 | 0.000 | 0.000 | 0.000 | 0.000 | 54.718 | 0.000 | 0.000 | 0.000 | 0.000 | 0.000 | 0.000 | 0.000 |
| BRAMY4001652 | 0.000 | 0.000 | 0.000 | 0.000 | 0.000 | 100.000 | 0.000 | 0.000 | 0.000 | 0.000 | 0.000 | 0.000 | 0.000 |
| BRAMY4001863 | 0.000 | 0.000 | 0.000 | 0.000 | 0.000 | 15.094 | 0.000 | 0.000 | 0.000 | 0.000 | 0.000 | 0.000 | 16.612 |
| BRAMY4001913 | 0.000 | 0.000 | 0.000 | 0.000 | 0.000 | 100.000 | 0.000 | 0.000 | 0.000 | 0.000 | 0.000 | 0.000 | 0.000 |
| BRAMY4002575 | 0.000 | 0.000 | 0.000 | 0.000 | 0.000 | 100.000 | 0.000 | 0.000 | 0.000 | 0.000 | 0.000 | 0.000 | 0.000 |
| BRAMY4002628 | 0.000 | 0.000 | 8.824 | 0.000 | 0.000 | 7.157 | 0.000 | 0.000 | 0.000 | 0.000 | 0.000 | 0.000 | 0.000 |
| BRAWH2000256 | 0.000 | 0.000 | 0.000 | 0.000 | 0.000 | 0.000 | 100.000 | 0.000 | 0.000 | 0.000 | 0.000 | 0.000 | 0.000 |
| BRAWH2002333 | 0.000 | 0.000 | 0.000 | 0.000 | 0.000 | 0.000 | 100.000 | 0.000 | 0.000 | 0.000 | 0.000 | 0.000 | 0.000 |
| BRAWH2004078 | 0.000 | 0.000 | 0.000 | 3.740 | 0.000 | 0.000 | 10.539 | 0.000 | 0.000 | 0.000 | 0.000 | 0.000 | 0.000 |
| BRAWH2010364 | 0.000 | 0.000 | 0.000 | 36.692 | 0.000 | 0.000 | 34.464 | 0.000 | 0.000 | 17.581 | 0.000 | 0.000 | 0.000 |
| BRAWH2010619 | 0.000 | 0.000 | 0.000 | 0.000 | 0.000 | 0.000 | 100.000 | 0.000 | 0.000 | 0.000 | 0.000 | 0.000 | 0.000 |
| BRAWH2011796 | 0.000 | 0.000 | 0.000 | 0.000 | 0.000 | 0.000 | 100.000 | 0.000 | 0.000 | 0.000 | 0.000 | 0.000 | 0.000 |
| BRAWH2011812 | 25.021 | 0.000 | 0.000 | 0.000 | 0.000 | 13.646 | 13.544 | 0.000 | 0.000 | 0.000 | 0.000 | 0.000 | 0.000 |
| BRAWH2011958 | 0.000 | 0.000 | 0.000 | 0.000 | 0.000 | 0.000 | 100.000 | 0.000 | 0.000 | 0.000 | 0.000 | 0.000 | 0.000 |
| BRAWH2012054 | 0.000 | 0.000 | 0.000 | 0.000 | 0.000 | 0.000 | 100.000 | 0.000 | 0.000 | 0.000 | 0.000 | 0.000 | 0.000 |
| BRAWH2012866 | 15.708 | 0.000 | 18.485 | 3.017 | 0.000 | 14.993 | 8.503 | 0.000 | 0.000 | 4.337 | 0.000 | 7.665 | 11.786 |
| BRAWH2013955 | 0.000 | 0.000 | 0.000 | 0.000 | 0.000 | 0.000 | 100.000 | 0.000 | 0.000 | 0.000 | 0.000 | 0.000 | 0.000 |
| BRAWH2014053 | 0.000 | 0.000 | 0.000 | 16.482 | 0.000 | 0.000 | 23.222 | 0.000 | 0.000 | 0.000 | 0.000 | 0.000 | 25.752 |
| BRAWH2016209 | 0.000 | 0.000 | 0.000 | 11.791 | 0.000 | 0.000 | 8.306 | 0.000 | 0.000 | 0.000 | 0.000 | 0.000 | 0.000 |
| BRAWH2016223 | 0.000 | 0.000 | 0.000 | 0.000 | 0.000 | 0.000 | 100.000 | 0.000 | 0.000 | 0.000 | 0.000 | 0.000 | 0.000 |
| BRAWH2016305 | 0.000 | 0.000 | 0.000 | 0.000 | 0.000 | 0.000 | 4.308 | 0.000 | 0.000 | 0.000 | 0.000 | 0.000 | 0.000 |
| BRAWH2016514 | 0.000 | 0.000 | 0.000 | 0.000 | 0.000 | 0.000 | 35.037 | 0.000 | 0.000 | 35.747 | 0.000 | 0.000 | 0.000 |
| BRAWH2016562 | 0.000 | 0.000 | 0.000 | 0.000 | 0.000 | 0.000 | 49.499 | 0.000 | 0.000 | 50.501 | 0.000 | 0.000 | 0.000 |
| BRAWH2016785 | 0.000 | 0.000 | 0.000 | 0.000 | 0.000 | 0.000 | 100.000 | 0.000 | 0.000 | 0.000 | 0.000 | 0.000 | 0.000 |
| BRAWH3000446 | 0.000 | 0.000 | 0.000 | 0.000 | 0.000 | 0.000 | 100.000 | 0.000 | 0.000 | 0.000 | 0.000 | 0.000 | 0.000 |
| BRAWH3000884 | 0.000 | 0.000 | 0.000 | 0.000 | 0.000 | 0.000 | 100.000 | 0.000 | 0.000 | 0.000 | 0.000 | 0.000 | 0.000 |
| BRAWH3001053 | 0.000 | 0.000 | 0.000 | 0.000 | 0.000 | 0.000 | 100.000 | 0.000 | 0.000 | 0.000 | 0.000 | 0.000 | 0.000 |
| BRAWH3001638 | 0.000 | 0.000 | 0.000 | 0.000 | 0.000 | 0.000 | 100.000 | 0.000 | 0.000 | 0.000 | 0.000 | 0.000 | 0.000 |
| BRAWH3001783 | 0.000 | 0.000 | 0.000 | 0.000 | 0.000 | 0.000 | 100.000 | 0.000 | 0.000 | 0.000 | 0.000 | 0.000 | 0.000 |
| BRAWH3001833 | 0.000 | 0.000 | 0.000 | 0.000 | 0.000 | 0.000 | 100.000 | 0.000 | 0.000 | 0.000 | 0.000 | 0.000 | 0.000 |
| BRAWH3003244 | 0.000 | 0.000 | 0.000 | 0.000 | 0.000 | 0.000 | 100.000 | 0.000 | 0.000 | 0.000 | 0.000 | 0.000 | 0.000 |
| BRAWH3003573 | 0.000 | 0.000 | 0.000 | 14.310 | 0.000 | 0.000 | 20.162 | 0.000 | 0.000 | 0.000 | 0.000 | 0.000 | 22.358 |
| BRAWH3003975 | 0.000 | 0.000 | 0.000 | 0.000 | 0.000 | 0.000 | 100.000 | 0.000 | 0.000 | 0.000 | 0.000 | 0.000 | 0.000 |
| BRAWH3004335 | 0.000 | 0.000 | 0.000 | 0.000 | 0.000 | 0.000 | 100.000 | 0.000 | 0.000 | 0.000 | 0.000 | 0.000 | 0.000 |
| BRAWH3004350 | 0.000 | 0.000 | 20.597 | 0.000 | 0.000 | 0.000 | 16.580 | 0.000 | 0.000 | 0.000 | 0.000 | 0.000 | 18.386 |
| BRAWH3005037 | 0.000 | 0.000 | 0.000 | 0.000 | 0.000 | 0.000 | 100.000 | 0.000 | 0.000 | 0.000 | 0.000 | 0.000 | 0.000 |
| BRAWH3005886 | 0.000 | 0.000 | 0.000 | 0.000 | 0.000 | 0.000 | 100.000 | 0.000 | 0.000 | 0.000 | 0.000 | 0.000 | 0.000 |
| BRAWH3005892 | 0.000 | 0.000 | 0.000 | 0.000 | 0.000 | 0.000 | 100.000 | 0.000 | 0.000 | 0.000 | 0.000 | 0.000 | 0.000 |
| BRAWH3005896 | 0.000 | 0.000 | 0.000 | 0.000 | 0.000 | 0.000 | 100.000 | 0.000 | 0.000 | 0.000 | 0.000 | 0.000 | 0.000 |
| BRAWH3008167 | 0.000 | 0.000 | 0.000 | 0.000 | 0.000 | 0.000 | 100.000 | 0.000 | 0.000 | 0.000 | 0.000 | 0.000 | 0.000 |
| BRAWH3008559 | 0.000 | 0.000 | 0.000 | 0.000 | 0.000 | 0.000 | 100.000 | 0.000 | 0.000 | 0.000 | 0.000 | 0.000 | 0.000 |
| BRAWH3008867 | 0.000 | 0.000 | 0.000 | 0.000 | 0.000 | 0.000 | 100.000 | 0.000 | 0.000 | 0.000 | 0.000 | 0.000 | 0.000 |
| BRAWH3009961 | 0.000 | 0.000 | 0.000 | 0.000 | 0.000 | 0.000 | 47.417 | 0.000 | 0.000 | 0.000 | 0.000 | 0.000 | 52.583 |
| BRAWH3010461 | 0.000 | 5.121 | 15.313 | 10.207 | 0.000 | 14.490 | 16.435 | 0.000 | 7.278 | 8.384 | 7.646 | 0.000 | 11.391 |
| BRAWH3010602 | 0.000 | 0.000 | 0.000 | 0.000 | 0.000 | 0.000 | 100.000 | 0.000 | 0.000 | 0.000 | 0.000 | 0.000 | 0.000 |
| BRAWH3010657 | 0.000 | 0.000 | 0.000 | 0.000 | 0.000 | 0.000 | 100.000 | 0.000 | 0.000 | 0.000 | 0.000 | 0.000 | 0.000 |
| BRAWH3010726 | 0.000 | 0.000 | 0.000 | 0.000 | 0.000 | 0.000 | 100.000 | 0.000 | 0.000 | 0.000 | 0.000 | 0.000 | 0.000 |
| BRAWH3010833 | 0.000 | 0.000 | 0.000 | 0.000 | 0.000 | 0.000 | 100.000 | 0.000 | 0.000 | 0.000 | 0.000 | 0.000 | 0.000 |
| BRAWH3011101 | 0.000 | 0.000 | 0.000 | 0.000 | 0.000 | 0.000 | 100.000 | 0.000 | 0.000 | 0.000 | 0.000 | 0.000 | 0.000 |
| BRAWH3011331 | 0.000 | 0.000 | 0.000 | 0.000 | 0.000 | 0.000 | 100.000 | 0.000 | 0.000 | 0.000 | 0.000 | 0.000 | 0.000 |
| BRAWH3011402 | 0.000 | 0.000 | 0.000 | 0.000 | 0.000 | 0.000 | 100.000 | 0.000 | 0.000 | 0.000 | 0.000 | 0.000 | 0.000 |
| BRAWH3011577 | 0.000 | 0.000 | 0.000 | 0.000 | 0.000 | 0.000 | 100.000 | 0.000 | 0.000 | 0.000 | 0.000 | 0.000 | 0.000 |
| BRAWH3011623 | 0.000 | 0.000 | 0.000 | 0.000 | 0.000 | 0.000 | 100.000 | 0.000 | 0.000 | 0.000 | 0.000 | 0.000 | 0.000 |
| BRAWH3011685 | 0.000 | 0.000 | 0.000 | 0.000 | 0.000 | 0.000 | 100.000 | 0.000 | 0.000 | 0.000 | 0.000 | 0.000 | 0.000 |
| BRAWH3011907 | 0.000 | 0.000 | 0.000 | 0.000 | 0.000 | 0.000 | 47.417 | 0.000 | 0.000 | 0.000 | 0.000 | 0.000 | 52.583 |
| BRAWH3011929 | 0.000 | 0.000 | 0.000 | 0.000 | 0.000 | 0.000 | 100.000 | 0.000 | 0.000 | 0.000 | 0.000 | 0.000 | 0.000 |
| BRAWH3012005 | 0.000 | 0.000 | 0.000 | 0.000 | 0.000 | 0.000 | 100.000 | 0.000 | 0.000 | 0.000 | 0.000 | 0.000 | 0.000 |
| BRAWH3012662 | 0.000 | 0.000 | 0.000 | 0.000 | 0.000 | 0.000 | 33.972 | 0.000 | 0.000 | 11.553 | 0.000 | 0.000 | 12.558 |
| BRAWH3012779 | 0.000 | 0.000 | 0.000 | 0.000 | 0.000 | 0.000 | 100.000 | 0.000 | 0.000 | 0.000 | 0.000 | 0.000 | 0.000 |
| BRAWH3013009 | 0.000 | 0.000 | 0.000 | 0.000 | 0.000 | 0.000 | 100.000 | 0.000 | 0.000 | 0.000 | 0.000 | 0.000 | 0.000 |
| BRAWH3013049 | 0.000 | 0.000 | 0.000 | 0.000 | 0.000 | 0.000 | 100.000 | 0.000 | 0.000 | 0.000 | 0.000 | 0.000 | 0.000 |
| BRAWH3013264 | 0.000 | 0.000 | 0.000 | 0.000 | 0.000 | 0.000 | 100.000 | 0.000 | 0.000 | 0.000 | 0.000 | 0.000 | 0.000 |
| BRAWH3013508 | 0.000 | 0.000 | 0.000 | 0.000 | 0.000 | 0.000 | 100.000 | 0.000 | 0.000 | 0.000 | 0.000 | 0.000 | 0.000 |
| BRAWH3014609 | 0.000 | 0.000 | 55.403 | 0.000 | 0.000 | 0.000 | 44.597 | 0.000 | 0.000 | 0.000 | 0.000 | 0.000 | 0.000 |
| BRAWH3014639 | 0.000 | 0.000 | 0.000 | 0.000 | 0.000 | 0.000 | 100.000 | 0.000 | 0.000 | 0.000 | 0.000 | 0.000 | 0.000 |
| BRAWH3015017 | 0.000 | 0.000 | 0.000 | 0.000 | 0.000 | 0.000 | 100.000 | 0.000 | 0.000 | 0.000 | 0.000 | 0.000 | 0.000 |
| BRAWH3015175 | 0.000 | 0.000 | 0.000 | 0.000 | 0.000 | 0.000 | 100.000 | 0.000 | 0.000 | 0.000 | 0.000 | 0.000 | 0.000 |
| BRAWH3015610 | 0.000 | 0.000 | 0.000 | 0.000 | 0.000 | 0.000 | 100.000 | 0.000 | 0.000 | 0.000 | 0.000 | 0.000 | 0.000 |
| BRAWH3015825 | 0.000 | 0.000 | 0.000 | 0.000 | 0.000 | 0.000 | 100.000 | 0.000 | 0.000 | 0.000 | 0.000 | 0.000 | 0.000 |
| BRAWH3016123 | 0.000 | 0.000 | 0.000 | 0.000 | 0.000 | 0.000 | 100.000 | 0.000 | 0.000 | 0.000 | 0.000 | 0.000 | 0.000 |
| BRAWH3016715 | 0.000 | 0.000 | 0.000 | 0.000 | 0.000 | 0.000 | 100.000 | 0.000 | 0.000 | 0.000 | 0.000 | 0.000 | 0.000 |
| BRAWH3017180 | 0.000 | 0.000 | 0.000 | 40.103 | 0.000 | 0.000 | 28.251 | 0.000 | 0.000 | 0.000 | 0.000 | 0.000 | 0.000 |
| BRAWH3017259 | 12.928 | 0.000 | 17.387 | 4.967 | 0.000 | 0.000 | 13.996 | 0.000 | 0.000 | 0.000 | 0.000 | 0.000 | 0.000 |
| BRAWH3017260 | 0.000 | 0.000 | 0.000 | 0.000 | 0.000 | 0.000 | 100.000 | 0.000 | 0.000 | 0.000 | 0.000 | 0.000 | 0.000 |
| BRAWH3017477 | 0.000 | 0.000 | 0.000 | 0.000 | 0.000 | 0.000 | 100.000 | 0.000 | 0.000 | 0.000 | 0.000 | 0.000 | 0.000 |
| BRAWH3017980 | 0.000 | 0.000 | 0.000 | 0.000 | 0.000 | 50.189 | 49.811 | 0.000 | 0.000 | 0.000 | 0.000 | 0.000 | 0.000 |
| BRAWH3018063 | 0.000 | 0.000 | 3.279 | 0.000 | 0.000 | 7.978 | 15.836 | 0.000 | 0.000 | 0.000 | 0.000 | 0.000 | 0.000 |
| BRAWH3018369 | 0.000 | 0.000 | 0.000 | 0.000 | 0.000 | 0.000 | 100.000 | 0.000 | 0.000 | 0.000 | 0.000 | 0.000 | 0.000 |
| BRAWH3018548 | 0.000 | 0.000 | 0.000 | 0.000 | 0.000 | 0.000 | 100.000 | 0.000 | 0.000 | 0.000 | 0.000 | 0.000 | 0.000 |
| BRAWH3018969 | 0.000 | 0.000 | 0.000 | 0.000 | 0.000 | 0.000 | 100.000 | 0.000 | 0.000 | 0.000 | 0.000 | 0.000 | 0.000 |
| BRAWH3019026 | 0.000 | 0.000 | 0.000 | 0.000 | 0.000 | 0.000 | 100.000 | 0.000 | 0.000 | 0.000 | 0.000 | 0.000 | 0.000 |
| BRAWH3019529 | 0.000 | 0.000 | 0.000 | 0.000 | 0.000 | 0.000 | 100.000 | 0.000 | 0.000 | 0.000 | 0.000 | 0.000 | 0.000 |
| BRAWH3019594 | 0.000 | 0.000 | 0.000 | 0.000 | 0.000 | 0.000 | 100.000 | 0.000 | 0.000 | 0.000 | 0.000 | 0.000 | 0.000 |
| BRAWH3019820 | 0.000 | 0.000 | 0.000 | 0.000 | 0.000 | 0.000 | 100.000 | 0.000 | 0.000 | 0.000 | 0.000 | 0.000 | 0.000 |
| BRAWH3020200 | 0.000 | 0.000 | 0.000 | 0.000 | 0.000 | 0.000 | 100.000 | 0.000 | 0.000 | 0.000 | 0.000 | 0.000 | 0.000 |
| BRAWH3020318 | 0.000 | 0.000 | 0.000 | 0.000 | 0.000 | 0.000 | 100.000 | 0.000 | 0.000 | 0.000 | 0.000 | 0.000 | 0.000 |
| BRAWH3020884 | 0.000 | 0.000 | 0.000 | 0.000 | 0.000 | 0.000 | 100.000 | 0.000 | 0.000 | 0.000 | 0.000 | 0.000 | 0.000 |
| BRAWH3020928 | 0.000 | 0.000 | 0.000 | 0.000 | 0.000 | 0.000 | 49.499 | 0.000 | 0.000 | 50.501 | 0.000 | 0.000 | 0.000 |
| BRAWH3021012 | 0.000 | 0.000 | 0.000 | 0.000 | 0.000 | 0.000 | 100.000 | 0.000 | 0.000 | 0.000 | 0.000 | 0.000 | 0.000 |
| BRAWH3021574 | 8.683 | 0.000 | 11.677 | 3.336 | 0.000 | 0.000 | 9.400 | 0.000 | 0.000 | 0.000 | 17.492 | 0.000 | 0.000 |
| BRAWH3021580 | 0.000 | 0.000 | 0.000 | 0.000 | 0.000 | 0.000 | 100.000 | 0.000 | 0.000 | 0.000 | 0.000 | 0.000 | 0.000 |
| BRAWH3021641 | 0.000 | 0.000 | 0.000 | 0.000 | 0.000 | 0.000 | 100.000 | 0.000 | 0.000 | 0.000 | 0.000 | 0.000 | 0.000 |
| BRAWH3021643 | 0.000 | 0.000 | 0.000 | 0.000 | 0.000 | 0.000 | 100.000 | 0.000 | 0.000 | 0.000 | 0.000 | 0.000 | 0.000 |
| BRAWH3021724 | 0.000 | 0.000 | 0.000 | 0.000 | 0.000 | 0.000 | 100.000 | 0.000 | 0.000 | 0.000 | 0.000 | 0.000 | 0.000 |
| BRAWH3022347 | 0.000 | 0.000 | 0.000 | 0.000 | 0.000 | 0.000 | 100.000 | 0.000 | 0.000 | 0.000 | 0.000 | 0.000 | 0.000 |
| BRAWH3022431 | 0.000 | 0.000 | 0.000 | 0.000 | 0.000 | 0.000 | 100.000 | 0.000 | 0.000 | 0.000 | 0.000 | 0.000 | 0.000 |
| BRAWH3022459 | 0.000 | 0.000 | 0.000 | 0.000 | 0.000 | 0.000 | 100.000 | 0.000 | 0.000 | 0.000 | 0.000 | 0.000 | 0.000 |
| BRAWH3022542 | 0.000 | 0.000 | 0.000 | 0.000 | 0.000 | 0.000 | 100.000 | 0.000 | 0.000 | 0.000 | 0.000 | 0.000 | 0.000 |
| BRAWH3022651 | 3.026 | 4.084 | 2.035 | 1.163 | 5.919 | 4.952 | 9.828 | 0.000 | 11.606 | 5.014 | 6.097 | 0.000 | 5.450 |
| BRAWH3022719 | 0.000 | 0.000 | 0.000 | 0.000 | 0.000 | 0.000 | 100.000 | 0.000 | 0.000 | 0.000 | 0.000 | 0.000 | 0.000 |
| BRAWH3022900 | 0.000 | 0.000 | 0.000 | 0.000 | 0.000 | 0.000 | 100.000 | 0.000 | 0.000 | 0.000 | 0.000 | 0.000 | 0.000 |
| BRAWH3023156 | 0.000 | 0.000 | 0.000 | 0.000 | 0.000 | 0.000 | 100.000 | 0.000 | 0.000 | 0.000 | 0.000 | 0.000 | 0.000 |
| BRAWH3023168 | 0.000 | 0.000 | 0.000 | 0.000 | 0.000 | 0.000 | 100.000 | 0.000 | 0.000 | 0.000 | 0.000 | 0.000 | 0.000 |
| BRAWH3023172 | 0.000 | 0.000 | 0.000 | 0.000 | 0.000 | 0.000 | 0.916 | 2.101 | 0.000 | 1.869 | 0.000 | 3.302 | 2.031 |
| BRAWH3023274 | 0.000 | 0.000 | 0.000 | 0.000 | 0.000 | 0.000 | 100.000 | 0.000 | 0.000 | 0.000 | 0.000 | 0.000 | 0.000 |
| BRAWH3023421 | 0.000 | 0.000 | 0.000 | 0.000 | 0.000 | 0.000 | 100.000 | 0.000 | 0.000 | 0.000 | 0.000 | 0.000 | 0.000 |
| BRAWH3024186 | 0.000 | 0.000 | 0.000 | 0.000 | 0.000 | 10.055 | 19.959 | 0.000 | 0.000 | 10.182 | 0.000 | 0.000 | 0.000 |
| BRAWH3024231 | 0.000 | 0.000 | 0.000 | 0.000 | 0.000 | 0.000 | 100.000 | 0.000 | 0.000 | 0.000 | 0.000 | 0.000 | 0.000 |
| BRAWH3024242 | 0.000 | 0.000 | 0.000 | 0.000 | 0.000 | 0.000 | 31.843 | 0.000 | 0.000 | 32.488 | 0.000 | 0.000 | 0.000 |
| BRAWH3024506 | 0.000 | 0.000 | 0.000 | 0.000 | 0.000 | 0.000 | 100.000 | 0.000 | 0.000 | 0.000 | 0.000 | 0.000 | 0.000 |
| BRAWH3024989 | 0.000 | 0.000 | 0.000 | 0.000 | 0.000 | 0.000 | 2.369 | 0.000 | 0.000 | 4.834 | 0.000 | 0.000 | 0.000 |
| BRAWH3026349 | 0.000 | 0.000 | 0.000 | 0.000 | 0.000 | 0.000 | 100.000 | 0.000 | 0.000 | 0.000 | 0.000 | 0.000 | 0.000 |
| BRAWH3026938 | 29.716 | 11.456 | 22.837 | 4.893 | 8.303 | 0.000 | 6.894 | 5.272 | 0.000 | 2.344 | 0.000 | 8.285 | 0.000 |
| BRAWH3027420 | 0.000 | 0.000 | 0.000 | 0.000 | 0.000 | 0.000 | 100.000 | 0.000 | 0.000 | 0.000 | 0.000 | 0.000 | 0.000 |
| BRAWH3027440 | 0.000 | 0.000 | 0.000 | 41.512 | 0.000 | 0.000 | 58.488 | 0.000 | 0.000 | 0.000 | 0.000 | 0.000 | 0.000 |
| BRAWH3027533 | 0.000 | 0.000 | 13.675 | 0.000 | 0.000 | 0.000 | 11.008 | 0.000 | 0.000 | 0.000 | 0.000 | 0.000 | 0.000 |
| BRAWH3027574 | 0.000 | 0.000 | 0.000 | 0.000 | 0.000 | 0.000 | 47.417 | 0.000 | 0.000 | 0.000 | 0.000 | 0.000 | 52.583 |
| BRAWH3027607 | 0.000 | 0.000 | 0.000 | 0.000 | 0.000 | 0.000 | 100.000 | 0.000 | 0.000 | 0.000 | 0.000 | 0.000 | 0.000 |
| BRAWH3027616 | 0.000 | 0.000 | 0.000 | 0.000 | 0.000 | 0.000 | 100.000 | 0.000 | 0.000 | 0.000 | 0.000 | 0.000 | 0.000 |
| BRAWH3027675 | 0.000 | 0.000 | 0.000 | 0.000 | 0.000 | 0.000 | 100.000 | 0.000 | 0.000 | 0.000 | 0.000 | 0.000 | 0.000 |
| BRAWH3027806 | 0.000 | 0.000 | 0.000 | 0.000 | 0.000 | 0.000 | 100.000 | 0.000 | 0.000 | 0.000 | 0.000 | 0.000 | 0.000 |
| BRAWH3027880 | 0.000 | 0.000 | 0.000 | 0.000 | 0.000 | 0.000 | 100.000 | 0.000 | 0.000 | 0.000 | 0.000 | 0.000 | 0.000 |
| BRAWH3028202 | 0.000 | 0.000 | 0.000 | 0.000 | 0.000 | 0.000 | 100.000 | 0.000 | 0.000 | 0.000 | 0.000 | 0.000 | 0.000 |
| BRAWH3028223 | 0.000 | 0.000 | 0.000 | 0.000 | 0.000 | 0.000 | 100.000 | 0.000 | 0.000 | 0.000 | 0.000 | 0.000 | 0.000 |
| BRAWH3028461 | 0.000 | 0.000 | 0.000 | 0.000 | 0.000 | 0.000 | 100.000 | 0.000 | 0.000 | 0.000 | 0.000 | 0.000 | 0.000 |
| BRAWH3028754 | 0.000 | 0.000 | 0.000 | 0.000 | 0.000 | 0.000 | 100.000 | 0.000 | 0.000 | 0.000 | 0.000 | 0.000 | 0.000 |
| BRAWH3028796 | 0.000 | 0.000 | 0.000 | 0.000 | 0.000 | 0.000 | 100.000 | 0.000 | 0.000 | 0.000 | 0.000 | 0.000 | 0.000 |
| BRAWH3029313 | 0.000 | 0.000 | 0.000 | 0.000 | 0.000 | 0.000 | 100.000 | 0.000 | 0.000 | 0.000 | 0.000 | 0.000 | 0.000 |
| BRAWH3029385 | 0.000 | 0.000 | 0.000 | 12.487 | 0.000 | 0.000 | 35.187 | 0.000 | 0.000 | 17.949 | 0.000 | 0.000 | 0.000 |
| BRAWH3029538 | 0.000 | 0.000 | 0.000 | 0.000 | 0.000 | 0.000 | 100.000 | 0.000 | 0.000 | 0.000 | 0.000 | 0.000 | 0.000 |
| BRAWH3029806 | 0.000 | 0.000 | 22.142 | 0.000 | 0.000 | 8.979 | 26.735 | 0.000 | 0.000 | 0.000 | 0.000 | 0.000 | 9.883 |
| BRAWH3030772 | 0.000 | 0.000 | 0.000 | 0.000 | 0.000 | 0.000 | 100.000 | 0.000 | 0.000 | 0.000 | 0.000 | 0.000 | 0.000 |
| BRAWH3030810 | 0.000 | 0.000 | 0.000 | 67.989 | 0.000 | 10.724 | 21.287 | 0.000 | 0.000 | 0.000 | 0.000 | 0.000 | 0.000 |
| BRAWH3030910 | 0.000 | 0.000 | 0.000 | 0.000 | 0.000 | 0.000 | 100.000 | 0.000 | 0.000 | 0.000 | 0.000 | 0.000 | 0.000 |
| BRAWH3031054 | 0.000 | 0.000 | 0.000 | 0.000 | 0.000 | 0.000 | 100.000 | 0.000 | 0.000 | 0.000 | 0.000 | 0.000 | 0.000 |
| BRAWH3031342 | 0.000 | 0.000 | 13.487 | 7.705 | 0.000 | 0.000 | 10.856 | 0.000 | 0.000 | 0.000 | 0.000 | 0.000 | 0.000 |
| BRAWH3031710 | 0.000 | 0.000 | 0.000 | 0.000 | 0.000 | 0.000 | 100.000 | 0.000 | 0.000 | 0.000 | 0.000 | 0.000 | 0.000 |
| BRAWH3032298 | 0.000 | 0.000 | 0.000 | 0.000 | 0.000 | 0.000 | 100.000 | 0.000 | 0.000 | 0.000 | 0.000 | 0.000 | 0.000 |
| BRAWH3032340 | 0.000 | 0.000 | 0.000 | 0.000 | 0.000 | 0.000 | 100.000 | 0.000 | 0.000 | 0.000 | 0.000 | 0.000 | 0.000 |
| BRAWH3032571 | 0.000 | 0.000 | 0.000 | 0.000 | 0.000 | 0.000 | 100.000 | 0.000 | 0.000 | 0.000 | 0.000 | 0.000 | 0.000 |
| BRAWH3033117 | 0.000 | 0.000 | 0.000 | 0.000 | 0.000 | 0.000 | 100.000 | 0.000 | 0.000 | 0.000 | 0.000 | 0.000 | 0.000 |
| BRAWH3033293 | 0.000 | 0.000 | 0.000 | 0.000 | 0.000 | 0.000 | 100.000 | 0.000 | 0.000 | 0.000 | 0.000 | 0.000 | 0.000 |
| BRAWH3033448 | 0.000 | 0.000 | 0.000 | 0.000 | 0.000 | 0.000 | 100.000 | 0.000 | 0.000 | 0.000 | 0.000 | 0.000 | 0.000 |
| BRAWH3033513 | 0.000 | 0.000 | 0.000 | 0.000 | 0.000 | 0.000 | 100.000 | 0.000 | 0.000 | 0.000 | 0.000 | 0.000 | 0.000 |
| BRAWH3034097 | 0.000 | 0.000 | 0.000 | 0.000 | 0.000 | 0.000 | 100.000 | 0.000 | 0.000 | 0.000 | 0.000 | 0.000 | 0.000 |
| BRAWH3034114 | 0.000 | 0.000 | 0.000 | 0.000 | 0.000 | 0.000 | 100.000 | 0.000 | 0.000 | 0.000 | 0.000 | 0.000 | 0.000 |
| BRAWH3034134 | 0.000 | 0.000 | 0.000 | 0.000 | 0.000 | 0.000 | 100.000 | 0.000 | 0.000 | 0.000 | 0.000 | 0.000 | 0.000 |
| BRAWH3034668 | 0.000 | 0.000 | 0.000 | 0.000 | 0.000 | 0.000 | 100.000 | 0.000 | 0.000 | 0.000 | 0.000 | 0.000 | 0.000 |
| BRAWH3034743 | 0.000 | 0.000 | 10.350 | 5.913 | 0.000 | 12.592 | 16.662 | 0.000 | 14.757 | 21.249 | 0.000 | 0.000 | 18.478 |
| BRAWH3034775 | 0.000 | 0.000 | 0.000 | 0.000 | 0.000 | 0.000 | 100.000 | 0.000 | 0.000 | 0.000 | 0.000 | 0.000 | 0.000 |
| BRAWH3034890 | 0.000 | 0.000 | 0.000 | 0.000 | 0.000 | 0.000 | 100.000 | 0.000 | 0.000 | 0.000 | 0.000 | 0.000 | 0.000 |
| BRAWH3035403 | 0.000 | 0.000 | 0.000 | 25.081 | 0.000 | 0.000 | 35.337 | 0.000 | 0.000 | 0.000 | 0.000 | 0.000 | 0.000 |
| BRAWH3035904 | 0.000 | 0.000 | 0.000 | 0.000 | 0.000 | 0.000 | 100.000 | 0.000 | 0.000 | 0.000 | 0.000 | 0.000 | 0.000 |
| BRAWH3035914 | 0.000 | 0.000 | 0.000 | 0.000 | 0.000 | 0.000 | 100.000 | 0.000 | 0.000 | 0.000 | 0.000 | 0.000 | 0.000 |
| BRAWH3035936 | 0.000 | 0.000 | 0.000 | 0.000 | 0.000 | 0.000 | 70.575 | 0.000 | 0.000 | 0.000 | 0.000 | 0.000 | 0.000 |
| BRAWH3036077 | 0.000 | 0.000 | 0.000 | 0.000 | 0.000 | 0.000 | 100.000 | 0.000 | 0.000 | 0.000 | 0.000 | 0.000 | 0.000 |
| BRAWH3036247 | 0.000 | 0.000 | 0.000 | 0.000 | 0.000 | 0.000 | 54.530 | 0.000 | 0.000 | 0.000 | 0.000 | 0.000 | 0.000 |
| BRAWH3036270 | 0.000 | 0.000 | 0.000 | 0.000 | 0.000 | 0.000 | 100.000 | 0.000 | 0.000 | 0.000 | 0.000 | 0.000 | 0.000 |
| BRAWH3036334 | 11.530 | 15.558 | 31.013 | 4.430 | 0.000 | 0.000 | 6.241 | 0.000 | 0.000 | 19.102 | 0.000 | 0.000 | 6.921 |
| BRAWH3036561 | 0.000 | 0.000 | 0.000 | 0.000 | 0.000 | 0.000 | 100.000 | 0.000 | 0.000 | 0.000 | 0.000 | 0.000 | 0.000 |
| BRAWH3037265 | 0.000 | 0.000 | 55.403 | 0.000 | 0.000 | 0.000 | 44.597 | 0.000 | 0.000 | 0.000 | 0.000 | 0.000 | 0.000 |
| BRAWH3037394 | 0.000 | 0.000 | 0.000 | 0.000 | 0.000 | 0.000 | 100.000 | 0.000 | 0.000 | 0.000 | 0.000 | 0.000 | 0.000 |
| BRAWH3037428 | 0.000 | 0.000 | 0.000 | 25.026 | 0.000 | 5.921 | 5.877 | 0.000 | 0.000 | 0.000 | 21.873 | 0.000 | 19.551 |
| BRAWH3037533 | 0.000 | 0.000 | 0.000 | 0.000 | 0.000 | 0.000 | 100.000 | 0.000 | 0.000 | 0.000 | 0.000 | 0.000 | 0.000 |
| BRAWH3037979 | 0.000 | 0.000 | 0.000 | 0.000 | 0.000 | 0.000 | 100.000 | 0.000 | 0.000 | 0.000 | 0.000 | 0.000 | 0.000 |
| BRAWH3038055 | 0.000 | 0.000 | 0.000 | 0.000 | 0.000 | 0.000 | 100.000 | 0.000 | 0.000 | 0.000 | 0.000 | 0.000 | 0.000 |
| BRAWH3038230 | 0.000 | 0.000 | 0.000 | 0.000 | 0.000 | 0.000 | 100.000 | 0.000 | 0.000 | 0.000 | 0.000 | 0.000 | 0.000 |
| BRAWH3038252 | 0.000 | 0.000 | 0.000 | 0.000 | 0.000 | 0.000 | 100.000 | 0.000 | 0.000 | 0.000 | 0.000 | 0.000 | 0.000 |
| BRAWH3038324 | 0.000 | 0.000 | 0.000 | 0.000 | 0.000 | 0.000 | 100.000 | 0.000 | 0.000 | 0.000 | 0.000 | 0.000 | 0.000 |
| BRCAN2000923 | 0.000 | 0.000 | 0.000 | 0.000 | 0.000 | 0.000 | 0.000 | 2.660 | 0.000 | 0.000 | 0.000 | 0.000 | 0.000 |
| BRCAN2002662 | 0.000 | 0.000 | 0.000 | 0.000 | 0.000 | 0.000 | 0.000 | 100.000 | 0.000 | 0.000 | 0.000 | 0.000 | 0.000 |
| BRCAN2002892 | 0.000 | 0.000 | 0.000 | 0.000 | 0.000 | 0.000 | 0.000 | 67.414 | 0.000 | 0.000 | 0.000 | 0.000 | 32.586 |
| BRCAN2003269 | 0.000 | 0.000 | 0.000 | 0.000 | 0.000 | 0.000 | 0.000 | 100.000 | 0.000 | 0.000 | 0.000 | 0.000 | 0.000 |
| BRCAN2003814 | 0.000 | 0.000 | 0.000 | 0.000 | 0.000 | 0.000 | 0.000 | 9.924 | 0.000 | 0.000 | 0.000 | 0.000 | 0.000 |
| BRCAN2006051 | 0.000 | 0.000 | 0.000 | 0.000 | 0.000 | 0.000 | 0.000 | 100.000 | 0.000 | 0.000 | 0.000 | 0.000 | 0.000 |
| BRCAN2006955 | 0.000 | 0.000 | 0.000 | 0.000 | 0.000 | 0.000 | 0.000 | 100.000 | 0.000 | 0.000 | 0.000 | 0.000 | 0.000 |
| BRCAN2007525 | 0.000 | 0.000 | 0.000 | 0.000 | 0.000 | 0.000 | 0.000 | 100.000 | 0.000 | 0.000 | 0.000 | 0.000 | 0.000 |
| BRCAN2008701 | 0.000 | 0.000 | 0.000 | 0.000 | 0.000 | 0.000 | 0.000 | 100.000 | 0.000 | 0.000 | 0.000 | 0.000 | 0.000 |
| BRCAN2009168 | 0.000 | 0.000 | 0.000 | 0.000 | 0.000 | 0.000 | 0.000 | 100.000 | 0.000 | 0.000 | 0.000 | 0.000 | 0.000 |
| BRCAN2010547 | 0.000 | 0.000 | 0.000 | 0.000 | 0.000 | 0.000 | 0.000 | 100.000 | 0.000 | 0.000 | 0.000 | 0.000 | 0.000 |
| BRCAN2010581 | 0.000 | 0.000 | 0.000 | 0.000 | 0.000 | 0.000 | 0.000 | 100.000 | 0.000 | 0.000 | 0.000 | 0.000 | 0.000 |
| BRCAN2010665 | 0.000 | 8.147 | 0.000 | 0.000 | 0.000 | 9.879 | 19.610 | 29.993 | 0.000 | 13.338 | 0.000 | 11.785 | 7.249 |
| BRCAN2015402 | 0.000 | 0.000 | 0.000 | 0.000 | 0.000 | 0.000 | 0.000 | 100.000 | 0.000 | 0.000 | 0.000 | 0.000 | 0.000 |
| BRCAN2015757 | 0.000 | 0.000 | 0.000 | 0.000 | 0.000 | 0.000 | 0.000 | 100.000 | 0.000 | 0.000 | 0.000 | 0.000 | 0.000 |
| BRCAN2018269 | 0.000 | 0.000 | 0.000 | 0.000 | 0.000 | 0.000 | 0.000 | 100.000 | 0.000 | 0.000 | 0.000 | 0.000 | 0.000 |
| BRCAN2018667 | 0.000 | 0.000 | 0.000 | 0.000 | 0.000 | 0.000 | 0.000 | 100.000 | 0.000 | 0.000 | 0.000 | 0.000 | 0.000 |
| BRCAN2019653 | 0.000 | 0.000 | 0.000 | 0.000 | 22.535 | 0.000 | 0.000 | 57.233 | 0.000 | 0.000 | 0.000 | 0.000 | 0.000 |
| BRCAN2019907 | 0.000 | 0.000 | 0.000 | 0.000 | 0.000 | 0.000 | 0.000 | 100.000 | 0.000 | 0.000 | 0.000 | 0.000 | 0.000 |
| BRCAN2019953 | 0.000 | 0.000 | 0.000 | 6.751 | 0.000 | 0.000 | 0.000 | 21.821 | 0.000 | 9.704 | 0.000 | 0.000 | 0.000 |
| BRCAN2020234 | 0.000 | 0.000 | 0.000 | 0.000 | 0.000 | 0.000 | 0.000 | 56.552 | 0.000 | 0.000 | 0.000 | 0.000 | 27.335 |
| BRCAN2020331 | 0.000 | 0.000 | 0.000 | 0.000 | 0.000 | 0.000 | 0.000 | 100.000 | 0.000 | 0.000 | 0.000 | 0.000 | 0.000 |
| BRCAN2020412 | 0.000 | 0.000 | 0.000 | 0.000 | 0.000 | 0.000 | 0.000 | 25.021 | 0.000 | 0.000 | 0.000 | 0.000 | 0.000 |
| BRCAN2020467 | 0.000 | 0.000 | 0.000 | 0.000 | 0.000 | 0.000 | 0.000 | 100.000 | 0.000 | 0.000 | 0.000 | 0.000 | 0.000 |
| BRCAN2020880 | 0.000 | 0.000 | 0.000 | 0.000 | 0.000 | 0.000 | 0.000 | 100.000 | 0.000 | 0.000 | 0.000 | 0.000 | 0.000 |
| BRCAN2021325 | 0.000 | 0.000 | 0.000 | 0.000 | 0.000 | 0.000 | 0.000 | 100.000 | 0.000 | 0.000 | 0.000 | 0.000 | 0.000 |
| BRCAN2021452 | 0.000 | 0.000 | 0.000 | 0.000 | 0.000 | 0.000 | 0.000 | 100.000 | 0.000 | 0.000 | 0.000 | 0.000 | 0.000 |
| BRCAN2021718 | 0.000 | 0.000 | 0.000 | 0.000 | 0.000 | 0.000 | 0.000 | 100.000 | 0.000 | 0.000 | 0.000 | 0.000 | 0.000 |
| BRCAN2022126 | 0.000 | 0.000 | 0.000 | 3.446 | 0.000 | 14.677 | 4.855 | 22.279 | 17.201 | 4.954 | 0.000 | 0.000 | 0.000 |
| BRCAN2025093 | 0.000 | 0.000 | 0.000 | 0.000 | 0.000 | 0.000 | 21.732 | 49.857 | 0.000 | 0.000 | 0.000 | 0.000 | 0.000 |
| BRCAN2027593 | 0.000 | 0.000 | 0.000 | 0.000 | 0.000 | 0.000 | 0.000 | 100.000 | 0.000 | 0.000 | 0.000 | 0.000 | 0.000 |
| BRCAN2028702 | 0.000 | 0.000 | 0.000 | 0.000 | 0.000 | 0.000 | 0.000 | 100.000 | 0.000 | 0.000 | 0.000 | 0.000 | 0.000 |
| BRCOC2001355 | 0.000 | 0.000 | 0.000 | 0.000 | 0.000 | 0.000 | 0.000 | 0.000 | 100.000 | 0.000 | 0.000 | 0.000 | 0.000 |
| BRCOC2002777 | 0.000 | 0.000 | 0.000 | 0.000 | 0.000 | 0.000 | 0.000 | 0.000 | 100.000 | 0.000 | 0.000 | 0.000 | 0.000 |
| BRCOC2006164 | 0.000 | 0.000 | 0.000 | 0.000 | 0.000 | 0.000 | 0.000 | 0.000 | 51.486 | 0.000 | 0.000 | 0.000 | 32.234 |
| BRCOC2006639 | 0.000 | 0.000 | 0.000 | 0.000 | 0.000 | 0.000 | 0.000 | 0.000 | 100.000 | 0.000 | 0.000 | 0.000 | 0.000 |
| BRCOC2006942 | 0.000 | 0.000 | 0.000 | 0.000 | 0.000 | 0.000 | 0.000 | 0.000 | 100.000 | 0.000 | 0.000 | 0.000 | 0.000 |
| BRCOC2009638 | 0.000 | 0.000 | 0.000 | 0.000 | 0.000 | 0.000 | 0.000 | 0.000 | 100.000 | 0.000 | 0.000 | 0.000 | 0.000 |
| BRCOC2010115 | 0.000 | 0.000 | 0.000 | 0.000 | 0.000 | 0.000 | 0.000 | 0.000 | 100.000 | 0.000 | 0.000 | 0.000 | 0.000 |
| BRCOC2012386 | 0.000 | 0.000 | 0.000 | 0.000 | 0.000 | 0.000 | 11.403 | 0.000 | 40.395 | 0.000 | 0.000 | 0.000 | 0.000 |
| BRHIP2006819 | 0.000 | 0.000 | 0.000 | 0.000 | 0.000 | 0.000 | 0.000 | 0.000 | 0.000 | 100.000 | 0.000 | 0.000 | 0.000 |
| BRHIP2006921 | 0.000 | 0.000 | 0.000 | 0.000 | 0.000 | 0.000 | 0.000 | 0.000 | 0.000 | 100.000 | 0.000 | 0.000 | 0.000 |
| BRHIP2008756 | 0.000 | 0.000 | 0.000 | 0.000 | 0.000 | 0.000 | 0.000 | 0.000 | 0.000 | 100.000 | 0.000 | 0.000 | 0.000 |
| BRHIP2009177 | 0.000 | 0.000 | 0.000 | 0.000 | 0.000 | 0.000 | 0.000 | 0.000 | 0.000 | 100.000 | 0.000 | 0.000 | 0.000 |
| BRHIP2011199 | 0.000 | 0.000 | 0.000 | 0.000 | 0.000 | 0.000 | 0.000 | 0.000 | 0.000 | 55.026 | 0.000 | 0.000 | 0.000 |
| BRHIP2013958 | 0.000 | 0.000 | 0.000 | 0.000 | 0.000 | 0.000 | 0.000 | 0.000 | 0.000 | 36.661 | 0.000 | 0.000 | 39.849 |
| BRHIP2015153 | 0.000 | 0.000 | 0.000 | 14.222 | 0.000 | 10.095 | 20.038 | 0.000 | 0.000 | 20.443 | 0.000 | 0.000 | 0.000 |
| BRHIP2016125 | 0.000 | 0.000 | 0.000 | 0.000 | 0.000 | 0.000 | 0.000 | 0.000 | 0.000 | 100.000 | 0.000 | 0.000 | 0.000 |
| BRHIP2017714 | 0.000 | 0.000 | 0.000 | 0.000 | 0.000 | 0.000 | 0.000 | 0.000 | 0.000 | 100.000 | 0.000 | 0.000 | 0.000 |
| BRHIP2020930 | 0.000 | 0.000 | 0.000 | 0.000 | 0.000 | 0.000 | 0.000 | 0.000 | 0.000 | 100.000 | 0.000 | 0.000 | 0.000 |
| BRHIP2021929 | 0.000 | 0.000 | 0.000 | 0.000 | 0.000 | 0.000 | 0.000 | 0.000 | 0.000 | 100.000 | 0.000 | 0.000 | 0.000 |
| BRHIP2023735 | 0.000 | 0.000 | 0.000 | 0.000 | 0.000 | 0.000 | 0.000 | 0.000 | 0.000 | 100.000 | 0.000 | 0.000 | 0.000 |
| BRHIP2024941 | 0.000 | 0.000 | 0.000 | 0.000 | 0.000 | 0.000 | 0.000 | 0.000 | 0.000 | 100.000 | 0.000 | 0.000 | 0.000 |
| BRHIP2026346 | 0.000 | 0.000 | 0.000 | 0.000 | 0.000 | 0.000 | 0.000 | 0.000 | 0.000 | 100.000 | 0.000 | 0.000 | 0.000 |
| BRHIP2027077 | 3.732 | 0.000 | 0.000 | 0.000 | 0.000 | 2.035 | 2.020 | 0.000 | 0.000 | 2.061 | 0.000 | 0.000 | 0.000 |
| BRHIP2027563 | 0.000 | 0.000 | 0.000 | 0.000 | 0.000 | 0.000 | 0.000 | 0.000 | 0.000 | 100.000 | 0.000 | 0.000 | 0.000 |
| BRHIP2029529 | 0.000 | 0.000 | 0.000 | 0.000 | 0.000 | 0.000 | 0.000 | 0.000 | 0.000 | 100.000 | 0.000 | 0.000 | 0.000 |
| BRHIP2029643 | 0.000 | 0.000 | 18.557 | 10.603 | 0.000 | 0.000 | 0.000 | 0.000 | 0.000 | 15.240 | 55.599 | 0.000 | 0.000 |
| BRHIP2029663 | 0.000 | 0.000 | 54.907 | 0.000 | 0.000 | 0.000 | 0.000 | 0.000 | 0.000 | 45.093 | 0.000 | 0.000 | 0.000 |
| BRHIP3000626 | 0.000 | 0.000 | 0.000 | 0.000 | 0.000 | 0.000 | 0.000 | 0.000 | 0.000 | 100.000 | 0.000 | 0.000 | 0.000 |
| BRHIP3000859 | 0.000 | 0.000 | 0.000 | 0.000 | 0.000 | 0.000 | 0.000 | 0.000 | 0.000 | 100.000 | 0.000 | 0.000 | 0.000 |
| BRHIP3001076 | 0.000 | 0.000 | 0.000 | 0.000 | 0.000 | 0.000 | 0.000 | 0.000 | 0.000 | 46.104 | 0.000 | 0.000 | 0.000 |
| BRHIP3001141 | 0.000 | 0.000 | 0.000 | 0.000 | 0.000 | 0.000 | 0.000 | 0.000 | 0.000 | 100.000 | 0.000 | 0.000 | 0.000 |
| BRHIP3001338 | 0.000 | 0.000 | 0.000 | 0.000 | 0.000 | 0.000 | 0.000 | 0.000 | 0.000 | 100.000 | 0.000 | 0.000 | 0.000 |
| BRHIP3001360 | 0.000 | 0.000 | 0.000 | 41.027 | 0.000 | 0.000 | 0.000 | 0.000 | 0.000 | 58.973 | 0.000 | 0.000 | 0.000 |
| BRHIP3001481 | 0.000 | 0.000 | 0.000 | 0.000 | 0.000 | 0.000 | 0.000 | 0.000 | 0.000 | 38.435 | 0.000 | 0.000 | 0.000 |
| BRHIP3001573 | 0.000 | 0.000 | 0.000 | 0.000 | 0.000 | 8.220 | 24.474 | 0.000 | 0.000 | 24.970 | 0.000 | 0.000 | 27.141 |
| BRHIP3001878 | 0.000 | 0.000 | 0.000 | 0.000 | 0.000 | 0.000 | 0.000 | 0.000 | 0.000 | 100.000 | 0.000 | 0.000 | 0.000 |
| BRHIP3002000 | 0.000 | 1.870 | 0.000 | 0.532 | 2.710 | 0.756 | 4.500 | 0.000 | 2.657 | 3.826 | 5.583 | 5.408 | 0.832 |
| BRHIP3002114 | 0.000 | 0.000 | 0.000 | 27.684 | 0.000 | 0.000 | 0.000 | 0.000 | 0.000 | 39.793 | 0.000 | 0.000 | 0.000 |
| BRHIP3002124 | 0.000 | 0.000 | 0.000 | 0.000 | 0.000 | 0.000 | 0.000 | 0.000 | 0.000 | 100.000 | 0.000 | 0.000 | 0.000 |
| BRHIP3002141 | 0.000 | 39.113 | 0.000 | 0.000 | 0.000 | 0.000 | 0.000 | 0.000 | 0.000 | 16.008 | 0.000 | 0.000 | 0.000 |
| BRHIP3002363 | 0.000 | 0.000 | 0.000 | 0.000 | 0.000 | 0.000 | 0.000 | 0.000 | 0.000 | 100.000 | 0.000 | 0.000 | 0.000 |
| BRHIP3002691 | 15.322 | 0.000 | 10.303 | 0.000 | 0.000 | 8.357 | 0.000 | 0.000 | 0.000 | 16.923 | 0.000 | 0.000 | 18.395 |
| BRHIP3002920 | 0.000 | 0.000 | 0.000 | 0.000 | 0.000 | 0.000 | 0.000 | 0.000 | 0.000 | 64.789 | 0.000 | 0.000 | 35.211 |
| BRHIP3002931 | 0.000 | 0.000 | 0.000 | 0.000 | 0.000 | 0.000 | 0.000 | 0.000 | 0.000 | 100.000 | 0.000 | 0.000 | 0.000 |
| BRHIP3003063 | 0.000 | 0.000 | 0.000 | 0.000 | 0.000 | 33.130 | 10.960 | 0.000 | 0.000 | 55.910 | 0.000 | 0.000 | 0.000 |
| BRHIP3003126 | 0.000 | 0.000 | 0.000 | 25.807 | 0.000 | 0.000 | 0.000 | 0.000 | 0.000 | 74.193 | 0.000 | 0.000 | 0.000 |
| BRHIP3003306 | 0.000 | 0.000 | 0.000 | 0.000 | 0.000 | 0.000 | 0.000 | 0.000 | 0.000 | 60.949 | 0.000 | 0.000 | 0.000 |
| BRHIP3003340 | 0.000 | 0.000 | 0.000 | 0.000 | 0.000 | 0.000 | 0.000 | 0.000 | 0.000 | 100.000 | 0.000 | 0.000 | 0.000 |
| BRHIP3003395 | 0.000 | 0.000 | 0.000 | 0.000 | 0.000 | 0.000 | 0.000 | 0.000 | 0.000 | 100.000 | 0.000 | 0.000 | 0.000 |
| BRHIP3003688 | 0.000 | 0.000 | 0.000 | 0.000 | 0.000 | 0.000 | 0.000 | 0.000 | 0.000 | 100.000 | 0.000 | 0.000 | 0.000 |
| BRHIP3003795 | 0.000 | 0.000 | 54.907 | 0.000 | 0.000 | 0.000 | 0.000 | 0.000 | 0.000 | 45.093 | 0.000 | 0.000 | 0.000 |
| BRHIP3003845 | 0.000 | 0.000 | 0.000 | 0.000 | 0.000 | 0.000 | 0.000 | 0.000 | 0.000 | 10.774 | 0.000 | 0.000 | 0.000 |
| BRHIP3003961 | 0.000 | 0.000 | 0.000 | 13.462 | 0.000 | 0.000 | 0.000 | 0.000 | 0.000 | 19.351 | 0.000 | 0.000 | 21.034 |
| BRHIP3003984 | 0.000 | 0.000 | 0.000 | 29.254 | 0.000 | 0.000 | 27.477 | 0.000 | 0.000 | 28.033 | 0.000 | 0.000 | 15.236 |
| BRHIP3004215 | 0.000 | 0.000 | 0.000 | 9.636 | 0.000 | 13.679 | 0.000 | 0.000 | 0.000 | 13.851 | 0.000 | 0.000 | 15.055 |
| BRHIP3004710 | 0.000 | 0.000 | 0.000 | 0.000 | 0.000 | 0.000 | 0.000 | 0.000 | 0.000 | 100.000 | 0.000 | 0.000 | 0.000 |
| BRHIP3004725 | 0.000 | 0.000 | 0.000 | 0.000 | 0.000 | 0.000 | 0.000 | 0.000 | 0.000 | 100.000 | 0.000 | 0.000 | 0.000 |
| BRHIP3004774 | 0.000 | 0.000 | 0.000 | 0.000 | 0.000 | 0.000 | 39.520 | 0.000 | 0.000 | 60.480 | 0.000 | 0.000 | 0.000 |
| BRHIP3004786 | 0.000 | 0.000 | 0.000 | 0.000 | 0.000 | 0.000 | 0.000 | 0.000 | 0.000 | 100.000 | 0.000 | 0.000 | 0.000 |
| BRHIP3005037 | 0.000 | 0.000 | 0.000 | 0.000 | 0.000 | 0.000 | 0.000 | 0.000 | 0.000 | 82.401 | 0.000 | 0.000 | 0.000 |
| BRHIP3005142 | 0.000 | 0.000 | 0.000 | 0.000 | 0.000 | 0.000 | 0.000 | 0.000 | 0.000 | 60.949 | 0.000 | 0.000 | 0.000 |
| BRHIP3005231 | 0.000 | 0.000 | 0.000 | 0.000 | 0.000 | 0.000 | 0.000 | 0.000 | 0.000 | 100.000 | 0.000 | 0.000 | 0.000 |
| BRHIP3005307 | 0.000 | 0.000 | 0.000 | 0.000 | 0.000 | 0.000 | 0.000 | 0.000 | 0.000 | 46.104 | 0.000 | 0.000 | 0.000 |
| BRHIP3005673 | 0.000 | 0.000 | 0.000 | 0.000 | 0.000 | 25.956 | 0.000 | 0.000 | 0.000 | 52.564 | 0.000 | 0.000 | 0.000 |
| BRHIP3005801 | 0.000 | 0.000 | 0.000 | 13.302 | 0.000 | 0.000 | 0.000 | 0.000 | 0.000 | 19.121 | 0.000 | 67.577 | 0.000 |
| BRHIP3005944 | 0.000 | 0.000 | 0.000 | 0.000 | 0.000 | 0.000 | 0.000 | 0.000 | 0.000 | 100.000 | 0.000 | 0.000 | 0.000 |
| BRHIP3006279 | 0.000 | 0.000 | 0.000 | 0.000 | 0.000 | 0.000 | 0.000 | 0.000 | 0.000 | 100.000 | 0.000 | 0.000 | 0.000 |
| BRHIP3006294 | 0.000 | 0.000 | 0.000 | 0.000 | 0.000 | 0.000 | 0.000 | 0.000 | 0.000 | 40.683 | 0.000 | 0.000 | 0.000 |
| BRHIP3006449 | 0.000 | 0.000 | 0.000 | 0.000 | 0.000 | 0.000 | 0.000 | 0.000 | 0.000 | 100.000 | 0.000 | 0.000 | 0.000 |
| BRHIP3006786 | 0.000 | 0.000 | 0.000 | 0.000 | 0.000 | 0.000 | 0.000 | 0.000 | 0.000 | 100.000 | 0.000 | 0.000 | 0.000 |
| BRHIP3006950 | 0.000 | 0.000 | 0.000 | 0.000 | 0.000 | 0.000 | 0.000 | 0.000 | 0.000 | 100.000 | 0.000 | 0.000 | 0.000 |
| BRHIP3007172 | 0.000 | 0.000 | 0.000 | 0.000 | 0.000 | 0.000 | 0.000 | 0.000 | 0.000 | 100.000 | 0.000 | 0.000 | 0.000 |
| BRHIP3007195 | 0.000 | 0.000 | 0.000 | 0.000 | 0.000 | 0.000 | 0.000 | 0.000 | 0.000 | 75.737 | 0.000 | 0.000 | 0.000 |
| BRHIP3007223 | 0.000 | 0.000 | 2.505 | 1.431 | 0.000 | 0.000 | 2.016 | 0.000 | 0.000 | 2.057 | 0.000 | 0.000 | 4.472 |
| BRHIP3007291 | 0.000 | 0.000 | 0.000 | 0.000 | 0.000 | 0.000 | 0.000 | 0.000 | 0.000 | 100.000 | 0.000 | 0.000 | 0.000 |
| BRHIP3007409 | 0.000 | 0.000 | 0.000 | 0.000 | 0.000 | 0.000 | 31.957 | 0.000 | 0.000 | 32.604 | 0.000 | 0.000 | 35.439 |
| BRHIP3007424 | 0.000 | 0.000 | 0.000 | 0.000 | 0.000 | 0.000 | 0.000 | 0.000 | 0.000 | 100.000 | 0.000 | 0.000 | 0.000 |
| BRHIP3007609 | 0.000 | 0.000 | 0.000 | 0.000 | 0.000 | 0.000 | 0.000 | 0.000 | 0.000 | 100.000 | 0.000 | 0.000 | 0.000 |
| BRHIP3007960 | 0.000 | 0.000 | 0.000 | 0.000 | 0.000 | 0.000 | 0.000 | 0.000 | 0.000 | 100.000 | 0.000 | 0.000 | 0.000 |
| BRHIP3008082 | 0.000 | 0.000 | 54.907 | 0.000 | 0.000 | 0.000 | 0.000 | 0.000 | 0.000 | 45.093 | 0.000 | 0.000 | 0.000 |
| BRHIP3008320 | 0.000 | 0.000 | 29.007 | 0.000 | 0.000 | 0.000 | 23.349 | 0.000 | 0.000 | 47.644 | 0.000 | 0.000 | 0.000 |
| BRHIP3008714 | 0.000 | 0.000 | 0.000 | 0.000 | 0.000 | 0.000 | 0.000 | 0.000 | 0.000 | 100.000 | 0.000 | 0.000 | 0.000 |
| BRHIP3009672 | 0.000 | 0.000 | 0.000 | 0.000 | 0.000 | 0.000 | 0.000 | 0.000 | 0.000 | 100.000 | 0.000 | 0.000 | 0.000 |
| BRHIP3009753 | 0.000 | 0.000 | 0.000 | 0.000 | 0.000 | 0.000 | 0.000 | 0.000 | 0.000 | 1.187 | 0.000 | 0.000 | 0.000 |
| BRHIP3010289 | 0.000 | 0.000 | 0.000 | 0.000 | 0.000 | 0.000 | 0.000 | 0.000 | 0.000 | 100.000 | 0.000 | 0.000 | 0.000 |
| BRHIP3010916 | 0.000 | 0.000 | 54.907 | 0.000 | 0.000 | 0.000 | 0.000 | 0.000 | 0.000 | 45.093 | 0.000 | 0.000 | 0.000 |
| BRHIP3011082 | 0.000 | 0.000 | 0.000 | 0.000 | 0.000 | 0.000 | 0.000 | 0.000 | 0.000 | 100.000 | 0.000 | 0.000 | 0.000 |
| BRHIP3011269 | 0.000 | 0.000 | 0.000 | 0.000 | 0.000 | 0.000 | 0.000 | 0.000 | 0.000 | 100.000 | 0.000 | 0.000 | 0.000 |
| BRHIP3011460 | 0.000 | 0.000 | 0.000 | 0.000 | 0.000 | 0.000 | 0.000 | 0.000 | 0.000 | 100.000 | 0.000 | 0.000 | 0.000 |
| BRHIP3011567 | 0.000 | 0.000 | 0.000 | 0.000 | 0.000 | 0.000 | 0.000 | 0.000 | 0.000 | 100.000 | 0.000 | 0.000 | 0.000 |
| BRHIP3011831 | 0.000 | 0.000 | 0.000 | 0.000 | 0.000 | 0.000 | 0.000 | 0.000 | 0.000 | 100.000 | 0.000 | 0.000 | 0.000 |
| BRHIP3012185 | 0.000 | 0.000 | 0.000 | 0.000 | 0.000 | 0.000 | 0.000 | 0.000 | 0.000 | 100.000 | 0.000 | 0.000 | 0.000 |
| BRHIP3012289 | 0.000 | 0.000 | 0.000 | 0.000 | 0.000 | 0.000 | 0.000 | 0.000 | 0.000 | 100.000 | 0.000 | 0.000 | 0.000 |
| BRHIP3012357 | 0.000 | 0.000 | 0.000 | 0.000 | 0.000 | 0.000 | 0.000 | 0.000 | 0.000 | 100.000 | 0.000 | 0.000 | 0.000 |
| BRHIP3012736 | 0.000 | 0.000 | 0.000 | 0.000 | 0.000 | 66.389 | 0.000 | 0.000 | 0.000 | 33.611 | 0.000 | 0.000 | 0.000 |
| BRHIP3012997 | 1.712 | 2.310 | 0.000 | 0.000 | 0.000 | 0.000 | 0.000 | 0.000 | 0.000 | 2.837 | 0.000 | 0.000 | 0.000 |
| BRHIP3013078 | 0.000 | 0.000 | 0.000 | 0.000 | 0.000 | 0.000 | 0.000 | 0.000 | 0.000 | 100.000 | 0.000 | 0.000 | 0.000 |
| BRHIP3013588 | 0.000 | 0.000 | 0.000 | 0.000 | 0.000 | 0.000 | 0.000 | 0.000 | 0.000 | 60.949 | 0.000 | 0.000 | 0.000 |
| BRHIP3013698 | 0.000 | 0.000 | 0.000 | 0.000 | 0.000 | 0.000 | 0.000 | 0.000 | 0.000 | 100.000 | 0.000 | 0.000 | 0.000 |
| BRHIP3014675 | 0.000 | 0.000 | 0.000 | 26.918 | 0.000 | 0.000 | 37.925 | 0.000 | 0.000 | 19.346 | 0.000 | 0.000 | 0.000 |
| BRHIP3015854 | 0.000 | 0.000 | 0.000 | 0.000 | 0.000 | 0.000 | 0.000 | 0.000 | 0.000 | 100.000 | 0.000 | 0.000 | 0.000 |
| BRHIP3016032 | 0.000 | 0.000 | 0.000 | 0.000 | 0.000 | 0.000 | 0.000 | 0.000 | 0.000 | 100.000 | 0.000 | 0.000 | 0.000 |
| BRHIP3016421 | 0.000 | 0.000 | 0.000 | 0.000 | 0.000 | 0.000 | 0.000 | 0.000 | 0.000 | 100.000 | 0.000 | 0.000 | 0.000 |
| BRHIP3017109 | 0.000 | 0.000 | 0.000 | 0.000 | 0.000 | 0.000 | 0.000 | 0.000 | 0.000 | 100.000 | 0.000 | 0.000 | 0.000 |
| BRHIP3017146 | 0.000 | 0.000 | 0.000 | 0.000 | 0.000 | 33.057 | 0.000 | 0.000 | 0.000 | 66.943 | 0.000 | 0.000 | 0.000 |
| BRHIP3017256 | 0.000 | 0.000 | 0.000 | 0.000 | 0.000 | 0.000 | 0.000 | 0.000 | 0.000 | 100.000 | 0.000 | 0.000 | 0.000 |
| BRHIP3017558 | 0.000 | 0.000 | 0.000 | 0.000 | 0.000 | 0.000 | 0.000 | 0.000 | 0.000 | 100.000 | 0.000 | 0.000 | 0.000 |
| BRHIP3017855 | 0.000 | 9.545 | 0.000 | 13.588 | 0.000 | 0.000 | 15.316 | 0.000 | 0.000 | 11.720 | 0.000 | 0.000 | 4.246 |
| BRHIP3018784 | 0.000 | 0.000 | 4.305 | 0.000 | 0.000 | 0.000 | 6.930 | 0.000 | 12.276 | 3.535 | 0.000 | 0.000 | 0.000 |
| BRHIP3019643 | 0.000 | 0.000 | 0.000 | 0.000 | 0.000 | 0.000 | 0.000 | 0.000 | 0.000 | 100.000 | 0.000 | 0.000 | 0.000 |
| BRHIP3019824 | 0.000 | 0.000 | 0.000 | 0.000 | 0.000 | 0.000 | 0.000 | 0.000 | 0.000 | 100.000 | 0.000 | 0.000 | 0.000 |
| BRHIP3019880 | 0.000 | 0.000 | 0.000 | 0.000 | 0.000 | 0.000 | 0.000 | 0.000 | 0.000 | 100.000 | 0.000 | 0.000 | 0.000 |
| BRHIP3019956 | 0.000 | 0.000 | 0.000 | 0.000 | 0.000 | 0.000 | 0.000 | 0.000 | 0.000 | 100.000 | 0.000 | 0.000 | 0.000 |
| BRHIP3020046 | 0.000 | 0.000 | 0.000 | 0.000 | 0.000 | 1.021 | 0.000 | 0.000 | 0.000 | 2.067 | 3.770 | 0.000 | 1.123 |
| BRHIP3020155 | 0.000 | 0.000 | 0.000 | 0.000 | 0.000 | 0.000 | 0.000 | 0.000 | 0.000 | 100.000 | 0.000 | 0.000 | 0.000 |
| BRHIP3020733 | 0.000 | 0.000 | 0.000 | 0.000 | 0.000 | 0.000 | 0.000 | 0.000 | 0.000 | 55.026 | 0.000 | 0.000 | 0.000 |
| BRHIP3021019 | 14.308 | 19.306 | 28.863 | 0.000 | 0.000 | 7.803 | 7.745 | 0.000 | 0.000 | 7.901 | 0.000 | 0.000 | 0.000 |
| BRHIP3021499 | 0.000 | 0.000 | 0.000 | 0.000 | 0.000 | 0.000 | 0.000 | 0.000 | 0.000 | 100.000 | 0.000 | 0.000 | 0.000 |
| BRHIP3021987 | 0.000 | 0.000 | 0.000 | 0.000 | 0.000 | 0.000 | 0.000 | 0.000 | 0.000 | 36.438 | 0.000 | 0.000 | 0.000 |
| BRHIP3022656 | 0.000 | 0.000 | 0.000 | 0.000 | 0.000 | 0.000 | 0.000 | 0.000 | 0.000 | 100.000 | 0.000 | 0.000 | 0.000 |
| BRHIP3023922 | 0.000 | 0.000 | 0.000 | 0.000 | 0.000 | 0.000 | 0.000 | 0.000 | 0.000 | 100.000 | 0.000 | 0.000 | 0.000 |
| BRHIP3024703 | 0.000 | 0.000 | 0.000 | 0.000 | 0.000 | 0.000 | 0.000 | 0.000 | 0.000 | 100.000 | 0.000 | 0.000 | 0.000 |
| BRHIP3024820 | 0.000 | 0.000 | 0.000 | 0.000 | 0.000 | 0.000 | 0.000 | 0.000 | 0.000 | 100.000 | 0.000 | 0.000 | 0.000 |
| BRHIP3025795 | 0.000 | 0.000 | 0.000 | 0.000 | 0.000 | 0.000 | 0.000 | 0.000 | 0.000 | 100.000 | 0.000 | 0.000 | 0.000 |
| BRHIP3025844 | 0.000 | 0.000 | 0.000 | 0.000 | 0.000 | 0.000 | 0.000 | 0.000 | 0.000 | 100.000 | 0.000 | 0.000 | 0.000 |
| BRHIP3026231 | 0.000 | 0.000 | 0.000 | 0.000 | 0.000 | 0.000 | 0.000 | 0.000 | 0.000 | 100.000 | 0.000 | 0.000 | 0.000 |
| BRHIP3026651 | 0.000 | 0.000 | 0.000 | 0.000 | 0.000 | 0.000 | 0.000 | 0.000 | 0.000 | 100.000 | 0.000 | 0.000 | 0.000 |
| BRHIP3027160 | 0.000 | 0.000 | 0.000 | 0.000 | 0.000 | 0.000 | 0.000 | 0.000 | 0.000 | 100.000 | 0.000 | 0.000 | 0.000 |
| BRHIP3027191 | 0.000 | 0.000 | 0.000 | 0.000 | 0.000 | 0.000 | 0.000 | 0.000 | 0.000 | 100.000 | 0.000 | 0.000 | 0.000 |
| BRHIP3027651 | 0.000 | 0.000 | 0.000 | 0.000 | 0.000 | 0.000 | 0.000 | 0.000 | 0.000 | 100.000 | 0.000 | 0.000 | 0.000 |
| BRHIP3027947 | 0.000 | 0.000 | 0.000 | 0.000 | 0.000 | 0.000 | 0.000 | 0.000 | 0.000 | 100.000 | 0.000 | 0.000 | 0.000 |
| BRHIP3028246 | 0.000 | 0.000 | 0.000 | 0.000 | 0.000 | 22.315 | 22.147 | 0.000 | 0.000 | 22.595 | 0.000 | 0.000 | 0.000 |
| BRHIP3028570 | 0.000 | 0.000 | 0.000 | 0.000 | 0.000 | 0.000 | 31.957 | 0.000 | 0.000 | 32.604 | 0.000 | 0.000 | 35.439 |
| BRHIP3028742 | 0.000 | 0.000 | 0.000 | 0.000 | 0.000 | 0.000 | 0.000 | 0.000 | 0.000 | 100.000 | 0.000 | 0.000 | 0.000 |
| BRSSN2004303 | 0.000 | 0.000 | 0.000 | 0.000 | 0.000 | 0.000 | 0.000 | 0.000 | 0.000 | 0.000 | 100.000 | 0.000 | 0.000 |
| BRSSN2004710 | 0.000 | 0.000 | 0.000 | 0.000 | 0.000 | 0.000 | 0.000 | 0.000 | 0.000 | 0.000 | 100.000 | 0.000 | 0.000 |
| BRSSN2008464 | 0.000 | 0.000 | 0.000 | 0.000 | 0.000 | 0.000 | 0.000 | 0.000 | 0.000 | 0.000 | 100.000 | 0.000 | 0.000 |
| BRSSN2011843 | 22.111 | 0.000 | 14.868 | 8.495 | 0.000 | 0.000 | 0.000 | 0.000 | 0.000 | 0.000 | 44.546 | 0.000 | 0.000 |
| BRSSN2012157 | 0.000 | 0.000 | 0.000 | 0.000 | 0.000 | 0.000 | 0.000 | 0.000 | 0.000 | 0.000 | 100.000 | 0.000 | 0.000 |
| BRSSN2012198 | 0.000 | 0.000 | 0.000 | 0.000 | 0.000 | 0.000 | 0.000 | 0.000 | 0.000 | 0.000 | 100.000 | 0.000 | 0.000 |
| BRSSN2013696 | 0.000 | 0.000 | 0.000 | 12.675 | 0.000 | 0.000 | 0.000 | 0.000 | 0.000 | 0.000 | 13.293 | 0.000 | 0.000 |
| BRSSN2015497 | 0.000 | 0.000 | 0.000 | 0.000 | 0.000 | 0.000 | 0.000 | 0.000 | 0.000 | 0.000 | 26.619 | 0.000 | 7.931 |
| BRSSN2018218 | 0.000 | 0.000 | 0.000 | 0.000 | 0.000 | 0.000 | 0.000 | 0.000 | 0.000 | 0.000 | 100.000 | 0.000 | 0.000 |
| BRSTN2000312 | 0.000 | 0.000 | 0.000 | 0.000 | 0.000 | 0.000 | 0.000 | 0.000 | 0.000 | 0.000 | 0.000 | 100.000 | 0.000 |
| BRSTN2006466 | 0.000 | 0.000 | 0.000 | 0.000 | 0.000 | 0.000 | 0.000 | 0.000 | 0.000 | 0.000 | 0.000 | 100.000 | 0.000 |
| BRSTN2006638 | 0.000 | 0.000 | 0.000 | 0.000 | 0.000 | 0.000 | 0.000 | 0.000 | 0.000 | 0.000 | 0.000 | 100.000 | 0.000 |
| BRSTN2008475 | 0.000 | 0.000 | 0.000 | 0.000 | 0.000 | 0.000 | 0.000 | 0.000 | 0.000 | 0.000 | 0.000 | 100.000 | 0.000 |
| BRSTN2009247 | 0.000 | 0.000 | 0.000 | 0.000 | 0.000 | 0.000 | 0.000 | 0.000 | 0.000 | 0.000 | 0.000 | 100.000 | 0.000 |
| BRSTN2010089 | 0.000 | 16.447 | 0.000 | 4.683 | 0.000 | 0.000 | 6.598 | 0.000 | 23.372 | 0.000 | 0.000 | 23.789 | 0.000 |
| BRSTN2010416 | 0.000 | 0.000 | 0.000 | 0.000 | 0.000 | 0.000 | 0.000 | 0.000 | 0.000 | 0.000 | 0.000 | 100.000 | 0.000 |
| BRSTN2011688 | 0.000 | 0.000 | 0.000 | 0.000 | 0.000 | 0.000 | 0.000 | 0.000 | 0.000 | 0.000 | 0.000 | 100.000 | 0.000 |
| BRSTN2011961 | 0.000 | 0.722 | 0.000 | 3.083 | 0.000 | 0.000 | 0.000 | 0.000 | 1.026 | 0.000 | 1.078 | 1.044 | 1.285 |
| BRSTN2012069 | 0.157 | 0.401 | 0.047 | 0.517 | 0.718 | 0.029 | 0.047 | 0.391 | 0.101 | 0.000 | 0.000 | 0.853 | 0.000 |
| BRSTN2016892 | 0.000 | 7.439 | 0.000 | 0.000 | 0.000 | 0.000 | 0.000 | 0.000 | 0.000 | 0.000 | 0.000 | 10.759 | 0.000 |
| BRSTN2016918 | 0.000 | 0.000 | 0.000 | 0.000 | 0.000 | 0.000 | 0.000 | 0.000 | 0.000 | 0.000 | 0.000 | 100.000 | 0.000 |
| BRSTN2016992 | 0.000 | 0.000 | 0.611 | 5.588 | 40.898 | 4.958 | 1.476 | 3.387 | 1.743 | 2.510 | 5.495 | 15.970 | 1.091 |
| BRSTN2017104 | 0.000 | 0.000 | 0.000 | 0.000 | 0.000 | 0.000 | 0.000 | 8.946 | 0.000 | 0.000 | 7.257 | 7.030 | 0.000 |
| BRSTN2017151 | 0.000 | 0.000 | 0.000 | 0.000 | 0.000 | 0.000 | 0.000 | 0.000 | 0.000 | 0.000 | 0.000 | 100.000 | 0.000 |
| BRSTN2018712 | 0.000 | 0.000 | 0.000 | 0.000 | 0.000 | 0.000 | 0.000 | 0.000 | 0.000 | 0.000 | 0.000 | 100.000 | 0.000 |
| BRTHA2000969 | 0.000 | 0.000 | 0.000 | 0.000 | 0.000 | 0.000 | 0.000 | 0.000 | 0.000 | 0.000 | 0.000 | 0.000 | 100.000 |
| BRTHA2001304 | 0.000 | 0.000 | 0.000 | 0.000 | 0.000 | 0.000 | 0.000 | 0.000 | 0.000 | 0.000 | 0.000 | 0.000 | 100.000 |
| BRTHA2001953 | 0.000 | 0.000 | 11.892 | 0.000 | 0.000 | 0.000 | 0.000 | 0.000 | 0.000 | 9.766 | 0.000 | 0.000 | 10.615 |
| BRTHA2002091 | 0.000 | 0.000 | 0.000 | 0.000 | 0.000 | 0.000 | 0.000 | 0.000 | 0.000 | 0.000 | 0.000 | 0.000 | 100.000 |
| BRTHA2003759 | 0.000 | 0.000 | 0.000 | 0.000 | 0.000 | 0.000 | 0.000 | 0.000 | 0.000 | 0.000 | 0.000 | 0.000 | 100.000 |
| BRTHA2005448 | 0.000 | 0.000 | 0.000 | 0.000 | 0.000 | 0.000 | 0.000 | 0.000 | 0.000 | 0.000 | 0.000 | 0.000 | 100.000 |
| BRTHA2006720 | 0.000 | 0.000 | 0.000 | 0.000 | 0.000 | 0.000 | 0.000 | 0.000 | 0.000 | 0.000 | 0.000 | 0.000 | 100.000 |
| BRTHA2008502 | 0.000 | 53.934 | 0.000 | 0.000 | 0.000 | 0.000 | 0.000 | 0.000 | 0.000 | 22.073 | 0.000 | 0.000 | 23.993 |
| BRTHA2008598 | 0.000 | 0.000 | 0.000 | 0.000 | 0.000 | 0.000 | 0.000 | 0.000 | 0.000 | 0.000 | 0.000 | 0.000 | 100.000 |
| BRTHA2010672 | 0.000 | 0.000 | 0.000 | 0.000 | 0.000 | 0.000 | 0.000 | 0.000 | 0.000 | 0.000 | 0.000 | 0.000 | 100.000 |
| BRTHA2012189 | 0.000 | 0.000 | 0.000 | 0.000 | 0.000 | 0.000 | 0.000 | 0.000 | 0.000 | 0.000 | 0.000 | 0.000 | 100.000 |
| BRTHA2014647 | 0.000 | 0.000 | 0.000 | 0.000 | 0.000 | 0.000 | 0.000 | 0.000 | 0.000 | 0.000 | 0.000 | 0.000 | 100.000 |
| BRTHA2018304 | 0.000 | 0.000 | 0.000 | 0.000 | 0.000 | 0.000 | 0.000 | 0.000 | 0.000 | 0.000 | 0.000 | 0.000 | 100.000 |
| BRTHA2019726 | 0.000 | 0.000 | 0.000 | 0.000 | 0.000 | 0.000 | 0.000 | 0.000 | 0.000 | 0.000 | 0.000 | 0.000 | 100.000 |
| BRTHA2019743 | 0.000 | 0.000 | 0.000 | 0.000 | 0.000 | 0.000 | 0.000 | 0.000 | 0.000 | 0.000 | 0.000 | 0.000 | 100.000 |
| BRTHA2020400 | 0.000 | 0.000 | 0.000 | 0.000 | 0.000 | 0.000 | 0.000 | 0.000 | 0.000 | 0.000 | 0.000 | 0.000 | 100.000 |
| BRTHA2020566 | 0.000 | 0.000 | 0.000 | 0.000 | 0.000 | 0.000 | 0.000 | 0.000 | 0.000 | 0.000 | 0.000 | 0.000 | 100.000 |
| BRTHA2020642 | 0.000 | 0.000 | 0.000 | 0.000 | 0.000 | 0.000 | 0.000 | 0.000 | 0.000 | 0.000 | 0.000 | 0.000 | 100.000 |
| BRTHA2020695 | 0.000 | 0.000 | 0.000 | 0.000 | 0.000 | 0.000 | 0.000 | 0.000 | 0.000 | 0.000 | 0.000 | 0.000 | 100.000 |
| BRTHA2020721 | 0.000 | 0.000 | 0.000 | 0.000 | 0.000 | 0.000 | 0.000 | 0.000 | 0.000 | 0.000 | 0.000 | 0.000 | 100.000 |
| BRTHA2020781 | 0.000 | 0.000 | 0.000 | 0.000 | 0.000 | 0.000 | 0.000 | 0.000 | 0.000 | 0.000 | 0.000 | 0.000 | 100.000 |
| BRTHA2020910 | 0.000 | 0.000 | 0.000 | 0.000 | 0.000 | 0.000 | 0.000 | 0.000 | 0.000 | 0.000 | 0.000 | 0.000 | 100.000 |
| BRTHA2021212 | 0.000 | 0.000 | 0.000 | 0.000 | 0.000 | 0.000 | 0.000 | 0.000 | 0.000 | 0.000 | 0.000 | 0.000 | 100.000 |
| BRTHA2021440 | 0.000 | 0.000 | 0.000 | 0.000 | 0.000 | 0.000 | 0.000 | 0.000 | 0.000 | 0.000 | 0.000 | 0.000 | 57.080 |
| BRTHA2021450 | 0.000 | 0.000 | 0.000 | 0.000 | 0.000 | 0.000 | 0.000 | 0.000 | 0.000 | 0.000 | 0.000 | 0.000 | 100.000 |
| BRTHA2022074 | 0.000 | 0.000 | 0.000 | 0.000 | 0.000 | 0.000 | 0.000 | 0.000 | 0.000 | 0.000 | 0.000 | 0.000 | 100.000 |
| BRTHA2022914 | 0.000 | 0.000 | 0.000 | 0.000 | 0.000 | 0.000 | 0.000 | 0.000 | 0.000 | 0.000 | 0.000 | 0.000 | 100.000 |
| BRTHA2022968 | 0.000 | 0.000 | 0.000 | 0.000 | 0.000 | 0.000 | 0.000 | 0.000 | 0.000 | 0.000 | 0.000 | 0.000 | 100.000 |
| BRTHA2023402 | 0.000 | 0.000 | 0.000 | 0.000 | 0.000 | 0.000 | 0.000 | 0.000 | 0.000 | 0.000 | 0.000 | 0.000 | 100.000 |
| BRTHA2023437 | 0.000 | 0.000 | 0.000 | 0.000 | 0.000 | 0.000 | 0.000 | 0.000 | 0.000 | 0.000 | 0.000 | 0.000 | 100.000 |
| BRTHA2024177 | 0.000 | 0.000 | 0.000 | 0.000 | 0.000 | 0.000 | 0.000 | 0.000 | 0.000 | 0.000 | 0.000 | 0.000 | 100.000 |
| BRTHA2024354 | 0.000 | 0.000 | 0.000 | 0.000 | 0.000 | 0.000 | 0.000 | 0.000 | 0.000 | 0.000 | 0.000 | 0.000 | 100.000 |
| BRTHA2024712 | 0.000 | 0.000 | 0.000 | 0.000 | 0.000 | 0.000 | 0.000 | 0.000 | 0.000 | 0.000 | 0.000 | 0.000 | 100.000 |
| BRTHA2025869 | 0.000 | 0.000 | 0.000 | 0.000 | 0.000 | 0.000 | 0.000 | 0.000 | 0.000 | 0.000 | 0.000 | 0.000 | 100.000 |
| BRTHA2026071 | 0.000 | 0.000 | 0.000 | 0.000 | 0.000 | 12.368 | 0.000 | 0.000 | 0.000 | 0.000 | 0.000 | 0.000 | 13.612 |
| BRTHA2026290 | 0.000 | 0.000 | 0.000 | 0.000 | 0.000 | 0.000 | 0.000 | 0.000 | 0.000 | 0.000 | 0.000 | 0.000 | 100.000 |
| BRTHA2026311 | 0.000 | 0.000 | 0.000 | 0.000 | 0.000 | 0.000 | 0.000 | 0.000 | 0.000 | 0.000 | 0.000 | 0.000 | 100.000 |
| BRTHA2027227 | 0.000 | 0.000 | 0.000 | 0.000 | 0.000 | 0.000 | 0.000 | 0.000 | 0.000 | 0.000 | 0.000 | 0.000 | 100.000 |
| BRTHA2027229 | 1.691 | 0.000 | 0.000 | 0.000 | 0.000 | 0.000 | 0.000 | 0.000 | 0.000 | 0.000 | 0.000 | 0.000 | 2.030 |
| BRTHA2027250 | 0.000 | 0.000 | 0.000 | 0.000 | 0.000 | 0.000 | 0.000 | 0.000 | 0.000 | 0.000 | 0.000 | 0.000 | 100.000 |
| BRTHA2028297 | 0.000 | 0.000 | 0.000 | 0.000 | 0.000 | 0.000 | 0.000 | 0.000 | 0.000 | 0.000 | 0.000 | 0.000 | 100.000 |
| BRTHA2029969 | 0.000 | 0.000 | 0.000 | 0.000 | 0.000 | 0.000 | 0.000 | 0.000 | 0.000 | 0.000 | 0.000 | 0.000 | 100.000 |
| BRTHA2030036 | 0.000 | 0.000 | 0.000 | 0.000 | 0.000 | 0.000 | 0.000 | 0.000 | 0.000 | 0.000 | 0.000 | 0.000 | 100.000 |
| BRTHA2030213 | 0.000 | 0.000 | 0.000 | 0.000 | 0.000 | 0.000 | 0.000 | 0.000 | 0.000 | 0.000 | 0.000 | 0.000 | 100.000 |
| BRTHA2031517 | 0.000 | 0.000 | 0.000 | 0.000 | 0.000 | 0.000 | 0.000 | 0.000 | 0.000 | 47.917 | 0.000 | 0.000 | 52.083 |
| BRTHA2031917 | 0.000 | 0.000 | 0.000 | 0.000 | 0.000 | 0.000 | 0.000 | 0.000 | 0.000 | 0.000 | 0.000 | 0.000 | 100.000 |
| BRTHA2032763 | 0.000 | 0.000 | 0.000 | 0.000 | 0.000 | 0.000 | 0.000 | 0.000 | 0.000 | 0.000 | 0.000 | 0.000 | 100.000 |
| BRTHA2033122 | 0.000 | 0.000 | 0.000 | 0.000 | 0.000 | 0.000 | 0.000 | 0.000 | 0.000 | 0.000 | 0.000 | 0.000 | 100.000 |
| BRTHA2033155 | 0.000 | 10.602 | 21.134 | 9.056 | 0.000 | 4.285 | 4.253 | 9.757 | 0.000 | 0.000 | 15.830 | 0.000 | 9.433 |
| BRTHA2033320 | 0.000 | 0.000 | 0.000 | 0.000 | 0.000 | 0.000 | 0.000 | 0.000 | 0.000 | 0.000 | 0.000 | 0.000 | 100.000 |
| BRTHA2033469 | 0.000 | 0.000 | 0.000 | 0.000 | 0.000 | 0.000 | 0.000 | 0.000 | 0.000 | 0.000 | 0.000 | 0.000 | 38.930 |
| BRTHA2033683 | 0.000 | 0.000 | 0.000 | 0.000 | 0.000 | 0.000 | 0.000 | 0.000 | 0.000 | 0.000 | 0.000 | 0.000 | 100.000 |
| BRTHA2034281 | 0.000 | 0.000 | 0.000 | 0.000 | 0.000 | 0.000 | 0.000 | 0.000 | 0.000 | 0.000 | 0.000 | 0.000 | 100.000 |
| BRTHA2034576 | 0.000 | 0.000 | 0.000 | 0.000 | 0.000 | 0.000 | 0.000 | 0.000 | 0.000 | 0.000 | 0.000 | 0.000 | 100.000 |
| BRTHA2035743 | 0.000 | 0.000 | 0.000 | 4.816 | 0.000 | 0.000 | 0.000 | 0.000 | 0.000 | 34.617 | 0.000 | 0.000 | 22.576 |
| BRTHA2036055 | 0.000 | 0.000 | 0.000 | 0.000 | 0.000 | 0.000 | 0.000 | 0.000 | 0.000 | 0.000 | 0.000 | 0.000 | 100.000 |
| BRTHA2036295 | 0.000 | 0.000 | 0.000 | 0.000 | 0.000 | 0.000 | 0.000 | 0.000 | 0.000 | 0.000 | 0.000 | 0.000 | 100.000 |
| BRTHA2037247 | 0.000 | 0.000 | 0.000 | 0.000 | 0.000 | 0.000 | 0.000 | 0.000 | 0.000 | 0.000 | 0.000 | 0.000 | 100.000 |
| BRTHA2038279 | 0.000 | 0.000 | 0.000 | 0.000 | 0.000 | 0.000 | 0.000 | 0.000 | 0.000 | 0.000 | 0.000 | 0.000 | 100.000 |
| BRTHA2038345 | 0.000 | 0.000 | 0.000 | 0.000 | 0.000 | 0.000 | 0.000 | 0.000 | 0.000 | 0.000 | 0.000 | 0.000 | 100.000 |
| BRTHA2038353 | 0.000 | 0.000 | 0.000 | 0.000 | 0.000 | 0.000 | 0.000 | 0.000 | 0.000 | 0.000 | 0.000 | 0.000 | 100.000 |
| BRTHA3000456 | 0.000 | 0.000 | 0.000 | 0.000 | 0.000 | 0.000 | 0.000 | 0.000 | 0.000 | 0.000 | 0.000 | 0.000 | 62.915 |
| BRTHA3002411 | 0.000 | 0.000 | 0.000 | 0.000 | 0.000 | 0.000 | 0.000 | 0.000 | 0.000 | 0.000 | 0.000 | 0.000 | 100.000 |
| BRTHA3003225 | 0.000 | 0.000 | 52.835 | 0.000 | 0.000 | 0.000 | 0.000 | 0.000 | 0.000 | 0.000 | 0.000 | 0.000 | 47.165 |
| BRTHA3003417 | 0.000 | 0.000 | 0.000 | 0.000 | 0.000 | 0.000 | 0.000 | 0.000 | 0.000 | 31.398 | 0.000 | 0.000 | 34.129 |
| BRTHA3003736 | 0.000 | 0.000 | 8.017 | 1.527 | 0.000 | 0.000 | 4.302 | 0.000 | 0.000 | 6.584 | 0.000 | 0.000 | 2.385 |
| BRTHA3005988 | 0.000 | 0.000 | 0.000 | 0.000 | 0.000 | 0.000 | 31.076 | 0.000 | 0.000 | 0.000 | 0.000 | 0.000 | 68.924 |
| BRTHA3006593 | 0.000 | 0.000 | 0.000 | 0.000 | 0.000 | 0.000 | 0.000 | 0.000 | 0.000 | 0.000 | 0.000 | 0.000 | 100.000 |
| BRTHA3007469 | 0.000 | 0.000 | 0.000 | 0.000 | 0.000 | 0.000 | 0.000 | 0.000 | 0.000 | 0.000 | 0.000 | 0.000 | 100.000 |
| BRTHA3007662 | 0.000 | 0.000 | 0.000 | 0.000 | 0.000 | 0.000 | 0.000 | 0.000 | 0.000 | 64.789 | 0.000 | 0.000 | 35.211 |
| BRTHA3009858 | 0.000 | 57.818 | 0.000 | 16.462 | 0.000 | 0.000 | 0.000 | 0.000 | 0.000 | 0.000 | 0.000 | 0.000 | 25.720 |
| BRTHA3010135 | 0.000 | 0.000 | 0.000 | 0.000 | 0.000 | 0.000 | 20.010 | 0.000 | 0.000 | 0.000 | 0.000 | 0.000 | 44.380 |
| BRTHA3010212 | 10.206 | 0.000 | 6.863 | 0.000 | 0.000 | 5.567 | 5.525 | 0.000 | 19.571 | 0.000 | 0.000 | 0.000 | 6.127 |
| BRTHA3010469 | 0.000 | 0.000 | 0.000 | 0.000 | 0.000 | 0.000 | 0.000 | 0.000 | 0.000 | 0.000 | 0.000 | 0.000 | 100.000 |
| BRTHA3010530 | 25.829 | 0.000 | 0.000 | 19.846 | 0.000 | 0.000 | 0.000 | 0.000 | 0.000 | 0.000 | 0.000 | 0.000 | 31.009 |
| BRTHA3010540 | 0.000 | 0.000 | 0.000 | 0.000 | 0.000 | 0.000 | 0.000 | 0.000 | 0.000 | 0.000 | 0.000 | 0.000 | 7.466 |
| BRTHA3010717 | 0.000 | 0.000 | 0.000 | 0.000 | 0.000 | 0.000 | 0.000 | 0.000 | 0.000 | 0.000 | 0.000 | 0.000 | 100.000 |
| BRTHA3011187 | 0.000 | 0.000 | 0.000 | 0.000 | 0.000 | 0.000 | 0.000 | 0.000 | 0.000 | 0.000 | 0.000 | 0.000 | 100.000 |
| BRTHA3011194 | 6.530 | 8.811 | 13.172 | 0.000 | 0.000 | 0.000 | 3.534 | 0.000 | 0.000 | 10.818 | 0.000 | 0.000 | 3.920 |
| BRTHA3011229 | 0.000 | 0.000 | 0.000 | 0.000 | 0.000 | 0.000 | 0.000 | 0.000 | 0.000 | 0.000 | 0.000 | 0.000 | 100.000 |
| BRTHA3011265 | 0.000 | 0.000 | 0.000 | 0.000 | 0.000 | 0.000 | 25.596 | 0.000 | 0.000 | 0.000 | 0.000 | 0.000 | 18.923 |
| BRTHA3011306 | 0.000 | 0.000 | 0.000 | 0.000 | 0.000 | 0.000 | 0.000 | 0.000 | 0.000 | 0.000 | 0.000 | 0.000 | 13.657 |
| BRTHA3011361 | 0.000 | 0.000 | 0.000 | 0.000 | 0.000 | 0.000 | 0.000 | 0.000 | 0.000 | 0.000 | 0.000 | 0.000 | 62.915 |
| BRTHA3011510 | 0.000 | 0.000 | 0.000 | 0.000 | 0.000 | 0.000 | 0.000 | 0.000 | 0.000 | 0.000 | 0.000 | 0.000 | 100.000 |
| BRTHA3011892 | 0.000 | 0.000 | 0.000 | 0.000 | 0.000 | 0.000 | 0.000 | 0.000 | 0.000 | 0.000 | 0.000 | 0.000 | 100.000 |
| BRTHA3011998 | 0.000 | 0.000 | 0.000 | 56.141 | 0.000 | 0.000 | 0.000 | 0.000 | 0.000 | 0.000 | 0.000 | 0.000 | 43.859 |
| BRTHA3012265 | 0.000 | 0.000 | 0.000 | 0.000 | 0.000 | 0.000 | 0.000 | 0.000 | 0.000 | 64.789 | 0.000 | 0.000 | 35.211 |
| BRTHA3013860 | 0.000 | 0.000 | 0.000 | 0.000 | 0.000 | 0.000 | 0.000 | 0.000 | 0.000 | 0.000 | 0.000 | 0.000 | 100.000 |
| BRTHA3013882 | 0.000 | 0.000 | 0.000 | 0.000 | 0.000 | 0.000 | 0.000 | 0.000 | 0.000 | 0.000 | 0.000 | 0.000 | 100.000 |
| BRTHA3014000 | 0.000 | 0.000 | 0.000 | 0.000 | 0.000 | 0.000 | 0.000 | 0.000 | 0.000 | 0.000 | 0.000 | 0.000 | 100.000 |
| BRTHA3014105 | 0.000 | 0.000 | 0.000 | 0.000 | 0.000 | 0.000 | 0.000 | 0.000 | 0.000 | 0.000 | 0.000 | 0.000 | 100.000 |
| BRTHA3014507 | 0.000 | 0.000 | 0.000 | 0.000 | 0.000 | 0.000 | 0.000 | 0.000 | 0.000 | 0.000 | 0.000 | 0.000 | 100.000 |
| BRTHA3014547 | 0.000 | 0.000 | 0.000 | 0.000 | 0.000 | 0.000 | 0.000 | 0.000 | 0.000 | 0.000 | 0.000 | 0.000 | 100.000 |
| BRTHA3014835 | 0.000 | 0.000 | 0.000 | 0.000 | 0.000 | 0.000 | 0.000 | 0.000 | 0.000 | 0.000 | 0.000 | 0.000 | 100.000 |
| BRTHA3014854 | 0.000 | 0.000 | 0.000 | 0.000 | 0.000 | 0.000 | 0.000 | 0.000 | 0.000 | 0.000 | 0.000 | 0.000 | 100.000 |
| BRTHA3014920 | 0.000 | 0.000 | 0.000 | 0.000 | 0.000 | 0.000 | 0.000 | 0.000 | 0.000 | 0.000 | 0.000 | 0.000 | 100.000 |
| BRTHA3016616 | 0.000 | 0.000 | 0.000 | 0.000 | 0.000 | 0.000 | 0.000 | 0.000 | 0.000 | 0.000 | 0.000 | 0.000 | 100.000 |
| BRTHA3017791 | 0.000 | 8.841 | 7.343 | 9.229 | 4.271 | 5.956 | 11.821 | 0.000 | 0.000 | 4.824 | 0.000 | 0.000 | 5.244 |
| BRTHA3018409 | 0.000 | 0.000 | 0.000 | 0.000 | 0.000 | 0.000 | 0.000 | 0.000 | 0.000 | 0.000 | 0.000 | 0.000 | 100.000 |
| BRTHA3018623 | 0.000 | 0.000 | 0.000 | 0.000 | 0.000 | 0.000 | 0.000 | 0.000 | 0.000 | 0.000 | 0.000 | 0.000 | 100.000 |
| BRTHA3019183 | 0.000 | 0.000 | 0.000 | 0.000 | 0.000 | 0.000 | 0.000 | 0.000 | 0.000 | 0.000 | 0.000 | 0.000 | 100.000 |
| BRTHA3020369 | 0.000 | 0.000 | 0.000 | 0.000 | 0.000 | 0.000 | 0.000 | 0.000 | 0.000 | 0.000 | 0.000 | 0.000 | 100.000 |
| BRTHA3020771 | 0.000 | 0.000 | 0.000 | 0.000 | 0.000 | 0.000 | 31.957 | 0.000 | 0.000 | 32.604 | 0.000 | 0.000 | 35.439 |
| BRTHA3021569 | 0.000 | 0.000 | 0.000 | 0.000 | 0.000 | 0.000 | 0.000 | 0.000 | 0.000 | 0.000 | 0.000 | 0.000 | 100.000 |
| BRTHA3021708 | 0.000 | 0.000 | 0.000 | 39.025 | 0.000 | 0.000 | 0.000 | 0.000 | 0.000 | 0.000 | 0.000 | 0.000 | 60.975 |
| BRTHA3021786 | 0.000 | 0.000 | 0.000 | 0.000 | 0.000 | 0.000 | 0.000 | 0.000 | 0.000 | 0.000 | 0.000 | 0.000 | 100.000 |
| BRTHA3021971 | 0.000 | 0.000 | 2.411 | 0.000 | 0.000 | 1.956 | 1.941 | 0.000 | 6.876 | 1.980 | 0.000 | 0.000 | 4.305 |
| BRTHA3022641 | 32.682 | 0.000 | 0.000 | 0.000 | 0.000 | 0.000 | 0.000 | 0.000 | 0.000 | 0.000 | 0.000 | 0.000 | 19.618 |
| BRTHA3023403 | 0.000 | 0.000 | 27.684 | 0.000 | 0.000 | 7.485 | 14.857 | 0.000 | 0.000 | 15.157 | 0.000 | 0.000 | 8.238 |
| BRTHA3023590 | 0.000 | 0.000 | 0.000 | 0.000 | 0.000 | 0.000 | 0.000 | 0.000 | 0.000 | 0.000 | 0.000 | 0.000 | 100.000 |
| BRTHA3023929 | 0.000 | 0.000 | 0.000 | 0.000 | 0.000 | 0.000 | 0.000 | 0.000 | 0.000 | 0.000 | 0.000 | 0.000 | 100.000 |
| BRTHA3024600 | 0.000 | 0.000 | 0.000 | 0.000 | 0.000 | 0.000 | 0.000 | 0.000 | 0.000 | 0.000 | 0.000 | 0.000 | 100.000 |
| BRTHA3025073 | 0.000 | 0.000 | 0.000 | 0.000 | 0.000 | 0.000 | 0.000 | 0.000 | 0.000 | 0.000 | 0.000 | 0.000 | 100.000 |
| BRTHA3026161 | 0.000 | 0.000 | 0.000 | 0.000 | 0.000 | 0.000 | 0.000 | 0.000 | 0.000 | 0.000 | 0.000 | 0.000 | 100.000 |
| BRTHA3026180 | 0.000 | 0.000 | 0.000 | 0.000 | 0.000 | 0.000 | 0.000 | 0.000 | 0.000 | 0.000 | 0.000 | 0.000 | 100.000 |
| BRTHA3026556 | 0.000 | 0.000 | 0.000 | 0.000 | 0.000 | 0.000 | 0.000 | 0.000 | 0.000 | 0.000 | 0.000 | 0.000 | 100.000 |
| BRTHA3026916 | 0.000 | 0.000 | 0.000 | 0.000 | 0.000 | 47.605 | 0.000 | 0.000 | 0.000 | 0.000 | 0.000 | 0.000 | 52.395 |
| BRTHA3027171 | 0.000 | 0.000 | 0.000 | 0.000 | 0.000 | 0.000 | 0.000 | 0.000 | 0.000 | 0.000 | 0.000 | 0.000 | 100.000 |
| BRTHA3027318 | 0.000 | 0.000 | 0.000 | 0.000 | 0.000 | 0.000 | 0.000 | 0.000 | 0.000 | 0.000 | 0.000 | 0.000 | 100.000 |
| BRTHA3027638 | 0.000 | 0.000 | 0.000 | 0.000 | 0.000 | 0.000 | 0.000 | 0.000 | 0.000 | 0.000 | 0.000 | 0.000 | 100.000 |
| BRTHA3027820 | 0.000 | 0.000 | 0.000 | 0.000 | 0.000 | 0.000 | 0.000 | 0.000 | 0.000 | 0.000 | 0.000 | 0.000 | 100.000 |
| BRTHA3027879 | 0.000 | 0.000 | 0.000 | 0.000 | 0.000 | 0.000 | 0.000 | 0.000 | 0.000 | 0.000 | 0.000 | 0.000 | 48.181 |
| BRTHA3027957 | 0.000 | 0.000 | 0.000 | 0.000 | 0.000 | 0.000 | 0.000 | 0.000 | 0.000 | 0.000 | 0.000 | 0.000 | 100.000 |
| BRTHA3028339 | 0.000 | 0.000 | 0.000 | 0.000 | 0.000 | 0.000 | 0.000 | 0.000 | 0.000 | 0.000 | 0.000 | 0.000 | 100.000 |
| BRTHA3028505 | 0.000 | 0.000 | 0.000 | 0.000 | 0.000 | 0.000 | 0.000 | 0.000 | 0.000 | 0.000 | 0.000 | 0.000 | 100.000 |
| CHONS2002829 | 0.000 | 0.000 | 0.000 | 1.160 | 0.000 | 1.646 | 0.000 | 0.000 | 0.000 | 11.668 | 0.000 | 0.000 | 1.812 |
| CTONG2001932 | 0.000 | 0.000 | 12.834 | 0.000 | 0.000 | 0.000 | 0.000 | 0.000 | 0.000 | 0.000 | 0.000 | 0.000 | 0.000 |
| CTONG2006235 | 3.026 | 4.084 | 2.035 | 1.163 | 5.919 | 4.952 | 9.828 | 0.000 | 11.606 | 5.014 | 6.097 | 0.000 | 5.450 |
| CTONG2009033 | 0.000 | 0.000 | 0.000 | 0.000 | 0.000 | 0.000 | 25.755 | 0.000 | 0.000 | 26.276 | 0.000 | 0.000 | 0.000 |
| CTONG2011801 | 16.411 | 7.381 | 11.035 | 0.000 | 0.000 | 0.000 | 0.000 | 0.000 | 0.000 | 0.000 | 11.021 | 0.000 | 3.284 |
| CTONG2020582 | 3.545 | 0.000 | 0.000 | 1.362 | 0.000 | 3.867 | 9.594 | 0.000 | 0.000 | 1.958 | 0.000 | 0.000 | 4.256 |
| CTONG2027959 | 0.000 | 0.000 | 0.000 | 27.592 | 0.000 | 0.000 | 0.000 | 0.000 | 0.000 | 0.000 | 0.000 | 0.000 | 0.000 |
| D90ST2003106 | 0.000 | 0.000 | 0.000 | 0.000 | 0.000 | 0.000 | 6.904 | 0.000 | 0.000 | 0.000 | 0.000 | 0.000 | 0.000 |
| DFNES2001829 | 0.000 | 0.000 | 0.000 | 6.550 | 0.000 | 0.000 | 9.228 | 0.000 | 0.000 | 18.830 | 0.000 | 0.000 | 0.000 |
| FCBBF3001018 | 100.000 | 0.000 | 0.000 | 0.000 | 0.000 | 0.000 | 0.000 | 0.000 | 0.000 | 0.000 | 0.000 | 0.000 | 0.000 |
| FCBBF3002188 | 100.000 | 0.000 | 0.000 | 0.000 | 0.000 | 0.000 | 0.000 | 0.000 | 0.000 | 0.000 | 0.000 | 0.000 | 0.000 |
| FCBBF3005160 | 100.000 | 0.000 | 0.000 | 0.000 | 0.000 | 0.000 | 0.000 | 0.000 | 0.000 | 0.000 | 0.000 | 0.000 | 0.000 |
| FCBBF3012443 | 50.412 | 0.000 | 0.000 | 0.000 | 0.000 | 0.000 | 0.000 | 0.000 | 0.000 | 0.000 | 0.000 | 0.000 | 0.000 |
| FCBBF3020030 | 100.000 | 0.000 | 0.000 | 0.000 | 0.000 | 0.000 | 0.000 | 0.000 | 0.000 | 0.000 | 0.000 | 0.000 | 0.000 |
| FCBBF3021191 | 34.251 | 0.000 | 0.000 | 0.000 | 0.000 | 0.000 | 0.000 | 0.000 | 0.000 | 0.000 | 0.000 | 0.000 | 0.000 |
| FCBBF3024911 | 100.000 | 0.000 | 0.000 | 0.000 | 0.000 | 0.000 | 0.000 | 0.000 | 0.000 | 0.000 | 0.000 | 0.000 | 0.000 |
| FCBBF5000384 | 100.000 | 0.000 | 0.000 | 0.000 | 0.000 | 0.000 | 0.000 | 0.000 | 0.000 | 0.000 | 0.000 | 0.000 | 0.000 |
| FEBRA2000805 | 0.000 | 100.000 | 0.000 | 0.000 | 0.000 | 0.000 | 0.000 | 0.000 | 0.000 | 0.000 | 0.000 | 0.000 | 0.000 |
| FEBRA2002260 | 0.000 | 100.000 | 0.000 | 0.000 | 0.000 | 0.000 | 0.000 | 0.000 | 0.000 | 0.000 | 0.000 | 0.000 | 0.000 |
| FEBRA2012625 | 0.000 | 100.000 | 0.000 | 0.000 | 0.000 | 0.000 | 0.000 | 0.000 | 0.000 | 0.000 | 0.000 | 0.000 | 0.000 |
| FEBRA2013069 | 0.000 | 100.000 | 0.000 | 0.000 | 0.000 | 0.000 | 0.000 | 0.000 | 0.000 | 0.000 | 0.000 | 0.000 | 0.000 |
| FEBRA2013570 | 0.000 | 27.839 | 0.000 | 0.000 | 0.000 | 0.000 | 0.000 | 0.000 | 0.000 | 0.000 | 0.000 | 0.000 | 0.000 |
| FEBRA2017736 | 0.000 | 100.000 | 0.000 | 0.000 | 0.000 | 0.000 | 0.000 | 0.000 | 0.000 | 0.000 | 0.000 | 0.000 | 0.000 |
| FEBRA2017811 | 0.000 | 100.000 | 0.000 | 0.000 | 0.000 | 0.000 | 0.000 | 0.000 | 0.000 | 0.000 | 0.000 | 0.000 | 0.000 |
| FEBRA2023498 | 0.000 | 100.000 | 0.000 | 0.000 | 0.000 | 0.000 | 0.000 | 0.000 | 0.000 | 0.000 | 0.000 | 0.000 | 0.000 |
| FEBRA2026582 | 0.000 | 57.838 | 0.000 | 0.000 | 0.000 | 0.000 | 0.000 | 0.000 | 0.000 | 0.000 | 0.000 | 0.000 | 0.000 |
| FEBRA2026977 | 0.000 | 100.000 | 0.000 | 0.000 | 0.000 | 0.000 | 0.000 | 0.000 | 0.000 | 0.000 | 0.000 | 0.000 | 0.000 |
| FEBRA2028222 | 0.000 | 100.000 | 0.000 | 0.000 | 0.000 | 0.000 | 0.000 | 0.000 | 0.000 | 0.000 | 0.000 | 0.000 | 0.000 |
| FEBRA2028457 | 0.000 | 100.000 | 0.000 | 0.000 | 0.000 | 0.000 | 0.000 | 0.000 | 0.000 | 0.000 | 0.000 | 0.000 | 0.000 |
| JCMLC2000273 | 0.000 | 0.000 | 0.000 | 0.000 | 0.000 | 0.000 | 0.000 | 7.090 | 0.000 | 0.000 | 0.000 | 0.000 | 0.000 |
| KIDNE2010049 | 0.000 | 0.000 | 0.000 | 0.000 | 0.000 | 0.000 | 3.438 | 0.000 | 0.000 | 0.000 | 0.000 | 0.000 | 0.000 |
| KIDNE2017153 | 0.000 | 0.000 | 0.000 | 16.915 | 0.000 | 0.000 | 0.000 | 0.000 | 0.000 | 0.000 | 0.000 | 0.000 | 0.000 |
| LIVER2008465 | 0.000 | 0.000 | 0.000 | 4.697 | 0.000 | 0.000 | 0.000 | 0.000 | 0.000 | 6.752 | 0.000 | 0.000 | 7.339 |
| MESAN2017133 | 0.000 | 0.000 | 10.900 | 0.000 | 31.703 | 0.000 | 17.548 | 0.000 | 0.000 | 0.000 | 0.000 | 0.000 | 0.000 |
| NOVAR2000783 | 0.000 | 0.000 | 4.698 | 2.684 | 0.000 | 0.000 | 0.000 | 0.000 | 0.000 | 0.000 | 0.000 | 0.000 | 0.000 |
| NT2NE2011107 | 0.000 | 0.000 | 14.940 | 0.000 | 0.000 | 0.000 | 0.000 | 0.000 | 0.000 | 0.000 | 0.000 | 0.000 | 0.000 |
| NT2RI2009233 | 4.167 | 0.000 | 5.604 | 1.601 | 0.000 | 4.545 | 6.767 | 5.175 | 7.991 | 0.000 | 0.000 | 8.133 | 2.501 |
| NT2RI2010795 | 0.000 | 0.000 | 0.000 | 0.000 | 0.000 | 16.619 | 0.000 | 0.000 | 0.000 | 16.827 | 0.000 | 0.000 | 36.581 |
| NT2RI2015533 | 5.742 | 0.000 | 3.861 | 3.309 | 5.616 | 12.527 | 6.216 | 7.131 | 0.000 | 1.586 | 0.000 | 5.604 | 12.064 |
| NT2RI3005923 | 0.000 | 0.000 | 0.000 | 0.000 | 0.000 | 0.000 | 19.493 | 0.000 | 0.000 | 0.000 | 0.000 | 0.000 | 0.000 |
| NT2RI3009524 | 0.000 | 0.000 | 0.000 | 0.000 | 0.000 | 0.000 | 35.496 | 0.000 | 0.000 | 0.000 | 0.000 | 0.000 | 0.000 |
| NT2RP7007387 | 7.584 | 5.117 | 5.100 | 0.000 | 0.000 | 0.000 | 6.158 | 4.709 | 0.000 | 2.094 | 0.000 | 0.000 | 2.276 |
| NT2RP8001604 | 0.000 | 17.297 | 0.000 | 0.000 | 0.000 | 0.000 | 0.000 | 0.000 | 0.000 | 0.000 | 0.000 | 0.000 | 0.000 |
| NT2RP8001605 | 0.000 | 0.000 | 0.000 | 0.000 | 0.000 | 0.000 | 29.324 | 0.000 | 0.000 | 0.000 | 0.000 | 0.000 | 0.000 |
| NT2RP8007920 | 10.963 | 0.000 | 31.946 | 1.404 | 0.000 | 0.000 | 1.978 | 0.000 | 0.000 | 0.000 | 7.363 | 0.000 | 0.000 |
| NT2RP8009119 | 0.000 | 0.000 | 0.000 | 3.276 | 0.000 | 0.000 | 0.000 | 0.000 | 0.000 | 0.000 | 0.000 | 0.000 | 0.000 |
| NTONG2008483 | 1.476 | 1.992 | 1.985 | 0.000 | 0.000 | 0.000 | 2.397 | 1.833 | 5.661 | 0.815 | 0.000 | 5.761 | 1.772 |
| NTONG2009468 | 0.000 | 0.000 | 0.000 | 13.482 | 0.000 | 0.000 | 0.000 | 0.000 | 0.000 | 0.000 | 0.000 | 0.000 | 0.000 |
| OCBBF2000831 | 17.790 | 0.000 | 47.849 | 0.000 | 0.000 | 9.702 | 0.000 | 0.000 | 0.000 | 9.824 | 0.000 | 0.000 | 0.000 |
| OCBBF2003518 | 0.000 | 2.570 | 1.281 | 0.000 | 0.000 | 1.039 | 2.062 | 0.000 | 0.000 | 0.000 | 0.000 | 0.000 | 0.000 |
| OCBBF2004478 | 0.000 | 0.000 | 100.000 | 0.000 | 0.000 | 0.000 | 0.000 | 0.000 | 0.000 | 0.000 | 0.000 | 0.000 | 0.000 |
| OCBBF2007039 | 0.000 | 0.000 | 100.000 | 0.000 | 0.000 | 0.000 | 0.000 | 0.000 | 0.000 | 0.000 | 0.000 | 0.000 | 0.000 |
| OCBBF2009536 | 0.000 | 0.000 | 52.835 | 0.000 | 0.000 | 0.000 | 0.000 | 0.000 | 0.000 | 0.000 | 0.000 | 0.000 | 47.165 |
| OCBBF2014745 | 0.000 | 0.000 | 63.640 | 36.360 | 0.000 | 0.000 | 0.000 | 0.000 | 0.000 | 0.000 | 0.000 | 0.000 | 0.000 |
| OCBBF2016928 | 5.059 | 0.000 | 13.608 | 0.000 | 0.000 | 0.000 | 0.000 | 0.000 | 0.000 | 0.000 | 0.000 | 0.000 | 0.000 |
| OCBBF2018229 | 0.000 | 0.000 | 100.000 | 0.000 | 0.000 | 0.000 | 0.000 | 0.000 | 0.000 | 0.000 | 0.000 | 0.000 | 0.000 |
| OCBBF2018618 | 0.000 | 0.000 | 40.294 | 0.000 | 0.000 | 16.341 | 16.218 | 0.000 | 0.000 | 16.546 | 0.000 | 0.000 | 0.000 |
| OCBBF2019761 | 0.000 | 0.000 | 100.000 | 0.000 | 0.000 | 0.000 | 0.000 | 0.000 | 0.000 | 0.000 | 0.000 | 0.000 | 0.000 |
| OCBBF2024589 | 0.000 | 0.000 | 100.000 | 0.000 | 0.000 | 0.000 | 0.000 | 0.000 | 0.000 | 0.000 | 0.000 | 0.000 | 0.000 |
| OCBBF2024779 | 0.000 | 0.000 | 100.000 | 0.000 | 0.000 | 0.000 | 0.000 | 0.000 | 0.000 | 0.000 | 0.000 | 0.000 | 0.000 |
| OCBBF2025631 | 0.000 | 0.000 | 100.000 | 0.000 | 0.000 | 0.000 | 0.000 | 0.000 | 0.000 | 0.000 | 0.000 | 0.000 | 0.000 |
| OCBBF2030927 | 0.000 | 0.000 | 55.216 | 0.000 | 0.000 | 44.784 | 0.000 | 0.000 | 0.000 | 0.000 | 0.000 | 0.000 | 0.000 |
| OCBBF2036019 | 0.000 | 0.000 | 100.000 | 0.000 | 0.000 | 0.000 | 0.000 | 0.000 | 0.000 | 0.000 | 0.000 | 0.000 | 0.000 |
| OCBBF3000743 | 0.000 | 0.000 | 100.000 | 0.000 | 0.000 | 0.000 | 0.000 | 0.000 | 0.000 | 0.000 | 0.000 | 0.000 | 0.000 |
| OCBBF3000830 | 0.000 | 0.000 | 100.000 | 0.000 | 0.000 | 0.000 | 0.000 | 0.000 | 0.000 | 0.000 | 0.000 | 0.000 | 0.000 |
| OCBBF3001076 | 0.000 | 0.000 | 100.000 | 0.000 | 0.000 | 0.000 | 0.000 | 0.000 | 0.000 | 0.000 | 0.000 | 0.000 | 0.000 |
| OCBBF3001202 | 0.000 | 0.000 | 100.000 | 0.000 | 0.000 | 0.000 | 0.000 | 0.000 | 0.000 | 0.000 | 0.000 | 0.000 | 0.000 |
| OCBBF3001333 | 0.000 | 0.000 | 11.974 | 4.561 | 0.000 | 6.475 | 9.639 | 0.000 | 0.000 | 0.000 | 0.000 | 0.000 | 0.000 |
| OCBBF3001616 | 0.000 | 0.000 | 100.000 | 0.000 | 0.000 | 0.000 | 0.000 | 0.000 | 0.000 | 0.000 | 0.000 | 0.000 | 0.000 |
| OCBBF3003745 | 0.000 | 0.000 | 100.000 | 0.000 | 0.000 | 0.000 | 0.000 | 0.000 | 0.000 | 0.000 | 0.000 | 0.000 | 0.000 |
| OCBBF3004487 | 0.000 | 0.000 | 11.257 | 6.432 | 0.000 | 4.565 | 4.531 | 0.000 | 0.000 | 4.622 | 0.000 | 0.000 | 0.000 |
| OCBBF3004908 | 0.000 | 47.686 | 11.882 | 0.000 | 0.000 | 0.000 | 0.000 | 0.000 | 0.000 | 0.000 | 0.000 | 0.000 | 0.000 |
| OCBBF3005330 | 0.000 | 0.000 | 100.000 | 0.000 | 0.000 | 0.000 | 0.000 | 0.000 | 0.000 | 0.000 | 0.000 | 0.000 | 0.000 |
| OCBBF3005843 | 0.000 | 0.000 | 100.000 | 0.000 | 0.000 | 0.000 | 0.000 | 0.000 | 0.000 | 0.000 | 0.000 | 0.000 | 0.000 |
| OCBBF3006986 | 0.000 | 0.000 | 100.000 | 0.000 | 0.000 | 0.000 | 0.000 | 0.000 | 0.000 | 0.000 | 0.000 | 0.000 | 0.000 |
| OCBBF3007078 | 0.000 | 0.000 | 100.000 | 0.000 | 0.000 | 0.000 | 0.000 | 0.000 | 0.000 | 0.000 | 0.000 | 0.000 | 0.000 |
| OCBBF3007704 | 0.000 | 0.000 | 100.000 | 0.000 | 0.000 | 0.000 | 0.000 | 0.000 | 0.000 | 0.000 | 0.000 | 0.000 | 0.000 |
| OCBBF3008392 | 0.000 | 0.000 | 100.000 | 0.000 | 0.000 | 0.000 | 0.000 | 0.000 | 0.000 | 0.000 | 0.000 | 0.000 | 0.000 |
| OCBBF3008835 | 0.000 | 0.000 | 52.835 | 0.000 | 0.000 | 0.000 | 0.000 | 0.000 | 0.000 | 0.000 | 0.000 | 0.000 | 47.165 |
| OCBBF3009244 | 0.000 | 0.000 | 42.785 | 0.000 | 0.000 | 34.702 | 0.000 | 0.000 | 0.000 | 0.000 | 0.000 | 0.000 | 0.000 |
| PLACE5000492 | 0.000 | 0.000 | 0.000 | 0.000 | 0.000 | 0.000 | 0.000 | 56.315 | 0.000 | 0.000 | 0.000 | 0.000 | 0.000 |
| PLACE6003004 | 0.000 | 0.000 | 0.000 | 0.000 | 0.000 | 0.000 | 0.000 | 0.000 | 0.000 | 0.000 | 0.000 | 0.000 | 38.390 |
| PLACE6008315 | 0.000 | 0.000 | 1.730 | 0.000 | 0.000 | 1.403 | 0.000 | 0.000 | 4.933 | 0.000 | 0.000 | 5.021 | 0.000 |
| PLACE6010936 | 0.000 | 0.000 | 0.000 | 0.000 | 0.000 | 12.399 | 0.000 | 0.000 | 0.000 | 0.000 | 0.000 | 0.000 | 0.000 |
| PLACE7004103 | 0.000 | 0.000 | 1.607 | 0.918 | 0.000 | 1.303 | 3.880 | 0.000 | 0.000 | 5.278 | 0.000 | 0.000 | 4.302 |
| PLACE7006240 | 0.000 | 0.000 | 0.000 | 0.000 | 0.000 | 0.000 | 25.174 | 0.000 | 0.000 | 0.000 | 0.000 | 0.000 | 0.000 |
| PROST2007444 | 0.000 | 5.452 | 4.075 | 5.433 | 0.000 | 1.102 | 4.374 | 0.000 | 0.000 | 5.578 | 8.140 | 0.000 | 3.638 |
| PROST2017910 | 0.000 | 0.000 | 0.000 | 0.000 | 37.758 | 0.000 | 0.000 | 0.000 | 0.000 | 0.000 | 0.000 | 0.000 | 0.000 |
| SMINT2009292 | 0.000 | 0.000 | 4.406 | 0.000 | 0.000 | 0.000 | 0.000 | 8.138 | 12.565 | 0.000 | 13.202 | 0.000 | 3.933 |
| SMINT2012179 | 0.000 | 0.000 | 0.000 | 0.000 | 0.000 | 0.000 | 0.000 | 0.000 | 0.000 | 18.954 | 0.000 | 0.000 | 0.000 |
| SPLEN2012571 | 0.000 | 7.925 | 0.000 | 0.000 | 0.000 | 3.203 | 0.000 | 0.000 | 11.262 | 0.000 | 0.000 | 0.000 | 0.000 |
| SYNOV4004210 | 0.000 | 0.000 | 0.000 | 0.000 | 0.000 | 0.952 | 0.000 | 2.167 | 0.000 | 1.927 | 0.000 | 0.000 | 0.000 |
| SYNOV4009575 | 0.000 | 0.000 | 0.000 | 0.000 | 0.000 | 4.828 | 0.000 | 0.000 | 0.000 | 0.000 | 0.000 | 17.216 | 0.000 |
| T1ESE2000609 | 0.000 | 5.666 | 0.000 | 0.000 | 0.000 | 0.000 | 0.000 | 0.000 | 0.000 | 0.000 | 0.000 | 0.000 | 0.000 |
| T1ESE2000904 | 0.000 | 5.755 | 0.000 | 0.000 | 0.000 | 0.000 | 0.000 | 0.000 | 0.000 | 0.000 | 8.593 | 0.000 | 0.000 |
| TBAES2007428 | 0.000 | 0.000 | 0.000 | 0.000 | 0.000 | 0.000 | 5.371 | 0.000 | 19.027 | 0.000 | 0.000 | 0.000 | 0.000 |
| TESTI2005112 | 0.000 | 0.000 | 0.000 | 0.000 | 0.000 | 0.000 | 19.455 | 0.000 | 0.000 | 0.000 | 0.000 | 0.000 | 0.000 |
| TESTI2005564 | 0.000 | 9.129 | 0.000 | 0.000 | 0.000 | 0.000 | 0.000 | 8.402 | 0.000 | 3.736 | 0.000 | 0.000 | 0.000 |
| TESTI2009497 | 0.000 | 0.000 | 65.522 | 0.000 | 0.000 | 0.000 | 0.000 | 0.000 | 0.000 | 0.000 | 0.000 | 0.000 | 0.000 |
| TESTI2018867 | 0.000 | 0.000 | 0.000 | 4.042 | 0.000 | 0.000 | 0.000 | 0.000 | 0.000 | 0.000 | 0.000 | 0.000 | 0.000 |
| TESTI2021654 | 0.000 | 0.000 | 0.000 | 0.000 | 0.000 | 9.847 | 9.773 | 0.000 | 0.000 | 0.000 | 0.000 | 0.000 | 10.838 |
| TESTI2039342 | 0.000 | 0.000 | 0.000 | 0.000 | 0.000 | 0.000 | 0.000 | 0.000 | 0.000 | 0.000 | 0.000 | 0.000 | 77.236 |
| TESTI4001569 | 0.000 | 0.000 | 0.000 | 0.000 | 0.000 | 0.000 | 0.000 | 0.000 | 0.000 | 43.832 | 0.000 | 0.000 | 0.000 |
| TESTI4002072 | 6.169 | 0.000 | 4.148 | 11.850 | 0.000 | 3.364 | 16.696 | 0.000 | 0.000 | 20.440 | 0.000 | 0.000 | 11.109 |
| TESTI4002195 | 0.000 | 0.000 | 0.000 | 0.000 | 0.000 | 0.000 | 0.000 | 0.000 | 23.701 | 0.000 | 0.000 | 0.000 | 0.000 |
| TESTI4002774 | 0.000 | 0.000 | 5.097 | 0.000 | 0.000 | 0.000 | 4.103 | 0.000 | 0.000 | 4.186 | 0.000 | 0.000 | 0.000 |
| TESTI4002799 | 0.000 | 0.000 | 1.646 | 0.627 | 0.000 | 0.000 | 1.767 | 0.000 | 0.000 | 2.703 | 0.000 | 1.592 | 1.469 |
| TESTI4003602 | 0.000 | 0.000 | 0.000 | 18.431 | 0.000 | 0.000 | 25.967 | 0.000 | 0.000 | 0.000 | 0.000 | 0.000 | 0.000 |
| TESTI4003703 | 8.175 | 22.061 | 0.000 | 6.281 | 0.000 | 4.458 | 0.000 | 0.000 | 0.000 | 4.514 | 0.000 | 0.000 | 4.907 |
| TESTI4003944 | 0.000 | 0.000 | 0.000 | 0.000 | 0.000 | 0.000 | 0.000 | 0.000 | 0.000 | 35.590 | 0.000 | 0.000 | 0.000 |
| TESTI4004210 | 0.000 | 0.000 | 0.000 | 0.000 | 0.000 | 0.000 | 36.051 | 0.000 | 0.000 | 0.000 | 0.000 | 0.000 | 0.000 |
| TESTI4004695 | 0.000 | 0.000 | 0.000 | 0.000 | 0.000 | 0.000 | 0.000 | 0.000 | 0.000 | 0.000 | 0.000 | 0.000 | 36.122 |
| TESTI4005013 | 0.000 | 0.000 | 0.000 | 11.599 | 0.000 | 0.000 | 0.000 | 0.000 | 0.000 | 0.000 | 0.000 | 0.000 | 0.000 |
| TESTI4005399 | 0.000 | 0.000 | 9.686 | 11.068 | 0.000 | 15.713 | 7.797 | 0.000 | 0.000 | 15.910 | 0.000 | 0.000 | 0.000 |
| TESTI4005653 | 7.348 | 0.000 | 9.265 | 1.059 | 0.000 | 3.507 | 1.989 | 1.141 | 0.000 | 3.551 | 0.000 | 0.000 | 0.551 |
| TESTI4006441 | 0.000 | 0.000 | 0.000 | 0.000 | 0.000 | 0.000 | 60.471 | 0.000 | 0.000 | 0.000 | 0.000 | 0.000 | 0.000 |
| TESTI4007965 | 0.000 | 0.000 | 0.000 | 0.000 | 0.000 | 0.000 | 0.000 | 0.000 | 0.000 | 0.000 | 0.000 | 0.000 | 20.014 |
| TESTI4010979 | 0.000 | 48.982 | 0.000 | 0.000 | 0.000 | 0.000 | 0.000 | 0.000 | 0.000 | 0.000 | 0.000 | 0.000 | 21.790 |
| TESTI4012960 | 0.000 | 0.000 | 18.497 | 0.000 | 0.000 | 0.000 | 0.000 | 0.000 | 0.000 | 0.000 | 0.000 | 0.000 | 0.000 |
| TESTI4013474 | 0.000 | 0.000 | 0.000 | 0.000 | 3.733 | 0.000 | 0.000 | 0.000 | 0.000 | 0.000 | 0.000 | 0.000 | 2.292 |
| TESTI4014908 | 0.000 | 0.000 | 0.000 | 0.000 | 0.000 | 0.000 | 36.051 | 0.000 | 0.000 | 0.000 | 0.000 | 0.000 | 0.000 |
| TESTI4020596 | 0.000 | 0.000 | 65.522 | 0.000 | 0.000 | 0.000 | 0.000 | 0.000 | 0.000 | 0.000 | 0.000 | 0.000 | 0.000 |
| TESTI4022158 | 0.000 | 0.000 | 0.000 | 9.473 | 0.000 | 0.000 | 53.386 | 0.000 | 0.000 | 13.617 | 0.000 | 0.000 | 14.801 |
| TESTI4029297 | 8.175 | 22.061 | 0.000 | 6.281 | 0.000 | 4.458 | 0.000 | 0.000 | 0.000 | 4.514 | 0.000 | 0.000 | 4.907 |
| TESTI4032913 | 0.000 | 0.000 | 0.000 | 5.753 | 0.000 | 8.167 | 0.000 | 0.000 | 0.000 | 0.000 | 0.000 | 0.000 | 8.989 |
| TESTI4035770 | 0.000 | 0.000 | 65.522 | 0.000 | 0.000 | 0.000 | 0.000 | 0.000 | 0.000 | 0.000 | 0.000 | 0.000 | 0.000 |
| TESTI4043223 | 0.000 | 0.000 | 34.381 | 19.643 | 0.000 | 27.886 | 0.000 | 0.000 | 0.000 | 0.000 | 0.000 | 0.000 | 0.000 |
| TESTI4046073 | 0.000 | 0.000 | 0.000 | 0.000 | 0.000 | 19.130 | 0.000 | 0.000 | 0.000 | 0.000 | 0.000 | 68.459 | 0.000 |
| THYMU3000776 | 0.000 | 0.000 | 0.000 | 22.150 | 0.000 | 0.000 | 15.604 | 0.000 | 0.000 | 0.000 | 0.000 | 0.000 | 0.000 |
| THYMU3002887 | 0.000 | 1.945 | 2.907 | 7.197 | 0.000 | 3.930 | 4.680 | 0.000 | 0.000 | 6.367 | 2.903 | 2.813 | 3.460 |
| THYMU3003007 | 0.000 | 0.000 | 0.000 | 0.000 | 0.000 | 0.000 | 0.000 | 0.000 | 0.000 | 19.391 | 0.000 | 0.000 | 0.000 |
| THYMU3003350 | 0.000 | 0.000 | 0.000 | 0.000 | 0.000 | 0.000 | 54.530 | 0.000 | 0.000 | 0.000 | 0.000 | 0.000 | 0.000 |
| THYMU3007308 | 0.000 | 0.000 | 0.000 | 27.684 | 0.000 | 0.000 | 0.000 | 0.000 | 0.000 | 39.793 | 0.000 | 0.000 | 0.000 |
| THYMU3008105 | 0.000 | 0.000 | 25.159 | 0.000 | 0.000 | 20.406 | 0.000 | 0.000 | 0.000 | 20.662 | 0.000 | 0.000 | 0.000 |
| THYMU3019476 | 0.000 | 0.000 | 0.000 | 0.000 | 0.000 | 54.718 | 0.000 | 0.000 | 0.000 | 0.000 | 0.000 | 0.000 | 0.000 |
| THYMU3021586 | 0.000 | 0.000 | 0.000 | 0.000 | 0.000 | 4.162 | 20.651 | 0.000 | 14.632 | 16.855 | 0.000 | 0.000 | 4.580 |
| THYMU3026000 | 0.000 | 0.000 | 30.477 | 0.000 | 0.000 | 0.000 | 49.066 | 0.000 | 0.000 | 0.000 | 0.000 | 0.000 | 0.000 |
| THYMU3026306 | 0.000 | 0.000 | 0.000 | 0.000 | 0.000 | 0.000 | 46.281 | 0.000 | 0.000 | 0.000 | 0.000 | 0.000 | 0.000 |
| THYMU3026350 | 0.000 | 0.000 | 0.000 | 0.000 | 0.000 | 14.400 | 14.291 | 0.000 | 0.000 | 14.581 | 0.000 | 0.000 | 15.849 |
| THYMU3032798 | 0.000 | 0.000 | 4.804 | 10.979 | 0.000 | 1.948 | 9.668 | 0.000 | 0.000 | 0.000 | 0.000 | 0.000 | 4.289 |
| THYMU3032867 | 0.000 | 0.000 | 0.000 | 9.135 | 0.000 | 0.000 | 12.871 | 0.000 | 0.000 | 0.000 | 0.000 | 0.000 | 0.000 |
| THYMU3033626 | 10.384 | 0.000 | 6.982 | 7.979 | 0.000 | 0.000 | 0.000 | 0.000 | 0.000 | 0.000 | 0.000 | 0.000 | 0.000 |
| THYMU3034671 | 0.000 | 0.000 | 5.926 | 5.078 | 0.000 | 0.000 | 0.000 | 0.000 | 0.000 | 4.866 | 0.000 | 0.000 | 0.000 |
| THYMU3037827 | 0.000 | 0.000 | 0.000 | 0.000 | 0.000 | 0.000 | 54.530 | 0.000 | 0.000 | 0.000 | 0.000 | 0.000 | 0.000 |
| THYMU3038214 | 0.000 | 0.000 | 0.000 | 27.904 | 0.000 | 0.000 | 39.314 | 0.000 | 0.000 | 0.000 | 0.000 | 0.000 | 0.000 |
| THYMU3041428 | 0.000 | 0.000 | 0.000 | 0.000 | 0.000 | 0.000 | 0.000 | 0.000 | 0.903 | 0.000 | 0.000 | 0.000 | 0.000 |
| THYMU3044075 | 0.000 | 0.000 | 0.000 | 26.918 | 0.000 | 0.000 | 37.925 | 0.000 | 0.000 | 19.346 | 0.000 | 0.000 | 0.000 |
| TKIDN2000319 | 0.000 | 0.000 | 0.000 | 0.000 | 0.000 | 0.000 | 0.000 | 0.000 | 0.000 | 21.607 | 0.000 | 0.000 | 0.000 |
| TLIVE2007736 | 0.000 | 0.000 | 0.000 | 9.358 | 0.000 | 0.000 | 0.000 | 0.000 | 0.000 | 0.000 | 0.000 | 0.000 | 0.000 |
| TRACH2013585 | 0.000 | 0.000 | 0.000 | 0.000 | 0.000 | 0.000 | 23.471 | 0.000 | 0.000 | 23.946 | 0.000 | 0.000 | 0.000 |
| TRACH3002752 | 9.436 | 0.000 | 0.000 | 3.625 | 0.000 | 0.000 | 10.215 | 0.000 | 0.000 | 10.422 | 19.010 | 0.000 | 0.000 |
| TRACH3003037 | 0.000 | 0.000 | 0.000 | 0.000 | 0.000 | 0.000 | 64.100 | 0.000 | 0.000 | 0.000 | 0.000 | 0.000 | 0.000 |
| TRACH3003872 | 0.000 | 0.000 | 0.000 | 0.000 | 0.000 | 2.765 | 2.745 | 0.000 | 0.000 | 5.600 | 10.216 | 0.000 | 0.000 |
| TRACH3004424 | 0.000 | 0.000 | 0.000 | 0.000 | 0.000 | 0.000 | 17.006 | 0.000 | 0.000 | 0.000 | 0.000 | 0.000 | 18.859 |
| TRACH3006717 | 0.000 | 0.000 | 4.558 | 10.418 | 0.000 | 3.697 | 18.347 | 0.000 | 0.000 | 11.231 | 0.000 | 0.000 | 0.000 |
| TRACH3007625 | 0.000 | 0.000 | 4.381 | 2.503 | 0.000 | 3.553 | 1.175 | 5.394 | 8.329 | 10.794 | 0.000 | 0.000 | 3.911 |
| TRACH3007689 | 0.000 | 0.000 | 0.000 | 0.000 | 0.000 | 0.000 | 47.167 | 0.000 | 0.000 | 0.000 | 0.000 | 0.000 | 0.000 |
| TRACH3007995 | 0.000 | 0.000 | 0.000 | 38.787 | 0.000 | 0.000 | 0.000 | 0.000 | 0.000 | 0.000 | 0.000 | 0.000 | 0.000 |
| TRACH3008508 | 0.000 | 0.000 | 0.000 | 0.000 | 0.000 | 0.000 | 0.000 | 0.000 | 0.000 | 0.000 | 0.000 | 0.000 | 21.245 |
| TRACH3008632 | 0.000 | 0.000 | 0.000 | 11.995 | 0.000 | 0.000 | 25.351 | 0.000 | 0.000 | 8.621 | 0.000 | 0.000 | 9.371 |
| TRACH3009008 | 0.000 | 0.000 | 0.000 | 0.000 | 0.000 | 0.000 | 24.495 | 0.000 | 0.000 | 0.000 | 0.000 | 0.000 | 0.000 |
| TRACH3010079 | 0.000 | 0.000 | 0.000 | 0.000 | 0.000 | 0.000 | 48.305 | 0.000 | 0.000 | 24.641 | 0.000 | 0.000 | 0.000 |
| TRACH3016805 | 0.000 | 0.000 | 11.187 | 3.196 | 0.000 | 0.000 | 4.502 | 0.000 | 0.000 | 0.000 | 0.000 | 0.000 | 0.000 |
| TRACH3016885 | 0.000 | 9.917 | 4.942 | 5.647 | 0.000 | 12.025 | 3.978 | 0.000 | 0.000 | 4.059 | 0.000 | 0.000 | 0.000 |
| TRACH3021544 | 0.000 | 0.000 | 52.585 | 0.000 | 0.000 | 0.000 | 0.000 | 0.000 | 0.000 | 0.000 | 0.000 | 0.000 | 0.000 |
| TRACH3022109 | 0.000 | 0.000 | 52.585 | 0.000 | 0.000 | 0.000 | 0.000 | 0.000 | 0.000 | 0.000 | 0.000 | 0.000 | 0.000 |
| TRACH3022198 | 0.000 | 0.000 | 0.000 | 0.000 | 0.000 | 0.000 | 0.000 | 0.000 | 0.000 | 8.480 | 30.935 | 0.000 | 0.000 |
| TRACH3024342 | 0.000 | 0.000 | 0.000 | 0.000 | 0.000 | 0.000 | 47.167 | 0.000 | 0.000 | 0.000 | 0.000 | 0.000 | 0.000 |
| TRACH3024671 | 0.000 | 0.000 | 0.000 | 0.000 | 0.000 | 0.000 | 47.167 | 0.000 | 0.000 | 0.000 | 0.000 | 0.000 | 0.000 |
| TRACH3025316 | 0.000 | 0.000 | 0.000 | 0.000 | 0.000 | 0.000 | 0.000 | 0.000 | 0.000 | 31.291 | 0.000 | 0.000 | 0.000 |
| TRACH3026303 | 0.000 | 0.000 | 20.888 | 0.000 | 0.000 | 0.000 | 5.605 | 0.000 | 0.000 | 11.436 | 0.000 | 0.000 | 0.000 |
| TRACH3026676 | 0.000 | 0.000 | 0.000 | 0.000 | 0.000 | 0.000 | 11.631 | 26.685 | 0.000 | 0.000 | 0.000 | 0.000 | 12.899 |
| TRACH3028855 | 0.000 | 0.000 | 27.714 | 0.000 | 0.000 | 0.000 | 22.309 | 0.000 | 0.000 | 0.000 | 0.000 | 0.000 | 0.000 |
| TRACH3032570 | 0.000 | 0.000 | 0.000 | 0.000 | 0.000 | 0.000 | 47.167 | 0.000 | 0.000 | 0.000 | 0.000 | 0.000 | 0.000 |
| TRACH3036932 | 0.000 | 0.000 | 0.000 | 10.405 | 0.000 | 0.000 | 14.659 | 0.000 | 0.000 | 14.956 | 0.000 | 0.000 | 16.256 |
| TRACH3038399 | 0.000 | 0.000 | 0.000 | 8.826 | 0.000 | 0.000 | 12.435 | 0.000 | 0.000 | 0.000 | 0.000 | 0.000 | 13.790 |
| TSTOM2000235 | 0.000 | 0.000 | 0.000 | 0.000 | 0.000 | 0.000 | 0.000 | 0.000 | 0.000 | 4.535 | 0.000 | 0.000 | 0.000 |
| UTERU2000300 | 9.112 | 0.000 | 6.127 | 0.000 | 0.000 | 0.000 | 0.000 | 0.000 | 0.000 | 0.000 | 0.000 | 0.000 | 0.000 |
| UTERU2027369 | 60.769 | 0.000 | 0.000 | 0.000 | 0.000 | 0.000 | 0.000 | 0.000 | 0.000 | 0.000 | 0.000 | 0.000 | 0.000 |
| UTERU3000670 | 0.000 | 0.000 | 0.000 | 16.553 | 0.000 | 0.000 | 0.000 | 0.000 | 0.000 | 0.000 | 0.000 | 0.000 | 0.000 |
| UTERU3005422 | 0.000 | 0.000 | 0.000 | 0.000 | 0.000 | 0.000 | 0.000 | 0.000 | 0.000 | 21.641 | 0.000 | 0.000 | 0.000 |
| UTERU3010409 | 0.000 | 0.000 | 8.599 | 17.196 | 0.000 | 0.000 | 3.461 | 0.000 | 0.000 | 7.062 | 0.000 | 0.000 | 0.000 |
| UTERU3012414 | 0.000 | 0.000 | 0.000 | 0.000 | 0.000 | 0.000 | 0.000 | 0.000 | 0.000 | 0.000 | 0.000 | 0.000 | 48.181 |
| UTERU3013167 | 0.000 | 0.000 | 0.000 | 0.000 | 0.000 | 0.000 | 45.606 | 0.000 | 0.000 | 0.000 | 0.000 | 0.000 | 0.000 |
| UTERU3015011 | 0.000 | 17.593 | 0.000 | 5.009 | 0.000 | 0.000 | 0.000 | 0.000 | 0.000 | 0.000 | 0.000 | 0.000 | 0.000 |
| UTERU3016273 | 0.000 | 0.000 | 0.000 | 0.000 | 0.000 | 0.000 | 0.000 | 0.000 | 0.000 | 46.104 | 0.000 | 0.000 | 0.000 |
| UTERU3017995 | 0.000 | 0.000 | 0.000 | 0.000 | 0.000 | 0.000 | 0.000 | 0.000 | 0.000 | 0.000 | 0.000 | 0.000 | 12.128 |
| UTERU3018172 | 0.000 | 0.000 | 0.000 | 0.000 | 0.000 | 0.000 | 0.000 | 0.000 | 0.000 | 0.000 | 0.000 | 0.000 | 35.368 |
| BRACE3002184 | 0.000 | 0.000 | 33.290 | 19.020 | 0.000 | 0.000 | 0.000 | 0.000 | 0.000 | 0.000 | 0.000 | 0.000 | 0.000 |
| BRACE3026993 | 0.000 | 0.000 | 0.000 | 100.000 | 0.000 | 0.000 | 0.000 | 0.000 | 0.000 | 0.000 | 0.000 | 0.000 | 0.000 |
| BRACE3046450 | 0.000 | 0.000 | 0.000 | 78.016 | 0.000 | 0.000 | 21.984 | 0.000 | 0.000 | 0.000 | 0.000 | 0.000 | 0.000 |
| BRAMY3008096 | 0.000 | 0.000 | 0.000 | 41.329 | 0.000 | 58.671 | 0.000 | 0.000 | 0.000 | 0.000 | 0.000 | 0.000 | 0.000 |
| BRAWH3013197 | 0.000 | 0.000 | 0.000 | 0.000 | 0.000 | 0.000 | 100.000 | 0.000 | 0.000 | 0.000 | 0.000 | 0.000 | 0.000 |
| BRAWH3028645 | 0.000 | 0.000 | 0.000 | 0.000 | 0.000 | 0.000 | 100.000 | 0.000 | 0.000 | 0.000 | 0.000 | 0.000 | 0.000 |
| BRTHA3004432 | 0.000 | 0.000 | 0.000 | 0.000 | 0.000 | 32.330 | 32.081 | 0.000 | 0.000 | 0.000 | 0.000 | 0.000 | 35.583 |
| BRTHA3024233 | 0.000 | 0.000 | 0.000 | 0.000 | 0.000 | 0.000 | 0.000 | 0.000 | 0.000 | 0.000 | 0.000 | 0.000 | 100.000 |
| CTONG2002832 | 0.000 | 0.000 | 27.853 | 0.000 | 0.000 | 0.000 | 0.000 | 0.000 | 0.000 | 0.000 | 0.000 | 0.000 | 12.432 |
| TESTI4002988 | 0.000 | 0.000 | 0.000 | 15.392 | 0.000 | 21.851 | 0.000 | 0.000 | 0.000 | 0.000 | 0.000 | 0.000 | 0.000 |
| THYMU3046350 | 0.000 | 0.000 | 0.000 | 0.000 | 0.000 | 6.960 | 0.000 | 0.000 | 24.471 | 0.000 | 0.000 | 0.000 | 15.320 |
| TRACH1000193 | 0.000 | 0.000 | 0.000 | 15.417 | 0.000 | 0.000 | 21.722 | 0.000 | 0.000 | 0.000 | 0.000 | 0.000 | 0.000 |
| TRACH3019290 | 0.000 | 0.000 | 0.000 | 0.000 | 0.000 | 27.871 | 0.000 | 0.000 | 0.000 | 0.000 | 0.000 | 0.000 | 0.000 |

[0659] The result of comparative analysis of cDNA libraries derived from fetal heart (FEHRT) and adult heart (HEART) showed the following genes whose expression levels differed between the two.

TABLE 22

| Clone ID | HEART | FEHRT |
|---|---|---|
| BRACE2012528 | 6.328 | 0.000 |
| BRACE3004371 | 25.063 | 0.000 |
| BRCAN2003814 | 0.000 | 90.076 |
| BRSTN2011961 | 1.932 | 0.000 |
| BRSTN2012069 | 1.641 | 0.394 |
| BRSTN2016992 | 6.566 | 0.000 |
| HEART2002531 | 100.000 | 0.000 |
| NTONG2008483 | 5.330 | 0.000 |
| PROST2002078 | 16.213 | 0.000 |
| T1ESE2000609 | 15.163 | 0.000 |

[0660] The result of comparative analysis of cDNA libraries derived from fetal kidney (FEKID) and adult kidney (KIDNE) showed the following genes whose expression levels differed between the two.

TABLE 23

| Clone ID | KIDNE | FEKID |
|---|---|---|
| BRACE3004371 | 13.097 | 0.000 |
| BRAMY2039630 | 60.511 | 0.000 |
| BRAMY3004364 | 23.683 | 0.000 |
| BRAWH2004078 | 18.371 | 0.000 |
| BRHIP3002000 | 10.458 | 0.000 |
| BRSTN2011961 | 0.000 | 6.265 |
| BRSTN2012069 | 0.429 | 1.841 |
| BRTHA2027229 | 0.000 | 19.799 |
| KIDNE2004531 | 80.699 | 0.000 |
| KIDNE2010049 | 11.987 | 0.000 |
| KIDNE2014496 | 100.000 | 0.000 |
| KIDNE2015987 | 100.000 | 0.000 |
| KIDNE2016464 | 100.000 | 0.000 |
| KIDNE2017153 | 83.085 | 0.000 |
| KIDNE2018268 | 100.000 | 0.000 |
| NT2RP7007387 | 7.156 | 0.000 |
| TESTI2005112 | 67.827 | 0.000 |
| TESTI4002799 | 0.000 | 9.553 |
| THYMU3001776 | 22.094 | 0.000 |
| THYMU3029795 | 37.093 | 0.000 |
| THYMU3032867 | 44.871 | 0.000 |

[0661] The result of comparative analysis of cDNA libraries derived from fetal lung (FELNG) and adult lung (HLUNG) showed the following genes whose expression levels differed between the two.

TABLE 24

| Clone ID | HLUNG | FELNG |
|---|---|---|
| BRACE3036283 | 27.376 | 0.000 |
| BRAMY2031516 | 27.091 | 0.000 |
| BRSTN2011961 | 2.124 | 0.000 |
| BRSTN2012069 | 0.763 | 2.238 |
| HLUNG2012600 | 100.000 | 0.000 |
| MESAN2009156 | 38.142 | 0.000 |
| NTONG2008483 | 2.930 | 0.000 |
| PROST2007444 | 4.011 | 0.000 |
| TESTI4003703 | 16.229 | 0.000 |
| TESTI4005653 | 1.824 | 0.000 |
| TESTI4013474 | 3.790 | 0.000 |
| TESTI4029297 | 16.229 | 0.000 |
| THYMU3001776 | 11.622 | 0.000 |
| THYMU3033626 | 20.615 | 0.000 |
| THYMU3034671 | 8.747 | 0.000 |
| THYMU3041428 | 0.935 | 0.000 |
| THYMU3044188 | 0.000 | 96.268 |
| TRACH3022198 | 30.484 | 0.000 |

### EXAMPLE 9

### In-Silico Expression Frequency Analysis Based on Large-Scale Analysis Data for 5′-End Sequences

[0662] Analyzing the expression level of a gene in various organs, tissues or cells is an exceedingly important step in clarifying the function of that organ, tissue, or cell, as well as in clarifying gene networks and in studying a causative gene of a morbid state. For example, if the expression level of a gene differs between a normal tissue and a malignant tissue, there is a possibility that that gene is involved in cancer. If tissue canceration can be suppressed by downregulating the expression of that gene, a compound comprising such downregulating activity can be used as an anticancer drug.

[0663] Various methods for analyzing gene expression frequency have been developed. For example, wet-type experiment-based methods include Northern blotting and RT-PCR, and of the use of gene chips and microarrays, where target samples synthesized from tissue or cell-derived RNA are hybridized to polynucleotides that comprise partial gene sequences synthesized on a base, or cDNA clones attached as plasmids directly to a base, and then signals are detected (Experiment Medicine, Vol. 17, No. 8, 980-1056 (1999), Eds., Muramatsu and Nawa, Cell Technology, Suppl. “DNA Microarray and New PCR Methods” (Shujunsha, 2000)). A method called “ATAC-PCR” is also available (Kato. K (1997) Nucleic Acids Res. 25, 4694-6), which comprises the steps of cleaving cDNA synthesized from tissue or cell-derived RNA, attaching adapters of different length depending on the type of tissue or cell, carrying out competitive PCR using a primer which contains a fluorescent dye and a sequence complementary to the adapter, and a primer specific to the gene, and then analyzing the expression level of the gene. In addition, an in-silico analysis-based method using sequence data is available. A database called BODYMAP (http://bodymap.ims.u-tokyo.ac.jp/) has been constructed by randomly extracting gene clones from cDNA libraries of various tissues and cells, combining clones homologous to one another as a cluster, classifying the genes in each cluster unit based on homology information on the nucleotide sequences of cDNA 3′ ends, and then obtaining information on gene expression frequency by comparing the number of clones in respective clusters.

[0664] Both experiment-based and in-silico analysis-based methods are widely accepted methods of gene expression analysis. These methods, and almost all other established methods for analyzing the frequency of gene expression, are based on analysis of 3′-end gene sequences. In human genes the 3′-untranslated regions (3′-UTR) are usually long, and thus there is controversy as to whether the results of such methods directly correspond to gene expression frequency and polypeptide expression pattern. However, the analysis method for gene expression frequency of the present invention is based on 5′-end gene sequences, and thus the expression pattern of each gene is a more accurate and faithful reproduction of the original in vivo pattern.

[0665] cDNA libraries in which the probability of cDNA completeness is exceedingly high were prepared from various tissues and cells as described in Example 1. cDNA clones were randomly selected from each library, the cDNA 5′-end sequences were determined, and a sequence database was constructed using this data. This database contains the nucleotide sequences of 1,402,069 clones, a sufficiently large population for analysis. The libraries used in the analysis, the number of cDNA clones whose 5′-end sequences were determined, and the weighted value for a single sequence in each library (100 divided by the number of sequences analyzed in each library) are described below.

TABLE 25

| | | Weighted values |
|---|---|---|
| | Number of clones | for single sequences |
| Library | whose 5′ ends | (100/Number |
| Names | were analyzed | of sequences) |
| 3NB69 | 8182 | 0.012221951 |
| ACTVT | 684 | 0.14619883 |
| ADIPS | 614 | 0.16286645 |
| ADRGL | 10300 | 0.009708738 |
| AHMSC | 671 | 0.149031297 |
| ASTRO | 17226 | 0.005805178 |
| BEAST | 2736 | 0.036549708 |
| BGGI1 | 1904 | 0.052521008 |
| BLADE | 8503 | 0.011760555 |
| BNGH4 | 7739 | 0.012921566 |
| BRACE | 84087 | 0.001189244 |
| BRALZ | 16517 | 0.006054368 |
| BRAMY | 59232 | 0.001688277 |
| BRASW | 158 | 0.632911392 |
| BRAWH | 59682 | 0.001675547 |
| BRCAN | 26014 | 0.003844084 |
| BRCOC | 16847 | 0.005935775 |
| BRHIP | 58498 | 0.00170946 |
| BRSSN | 16035 | 0.006236358 |
| BRSTN | 16552 | 0.006041566 |
| BRTHA | 53818 | 0.001858114 |
| CD34C | 1421 | 0.070372977 |
| CERVX | 2888 | 0.034626039 |
| CHONS | 2694 | 0.037119525 |
| COLON | 8501 | 0.011763322 |
| CORDB | 711 | 0.140646976 |
| CTONG | 32043 | 0.003120806 |
| D3OST | 5112 | 0.019561815 |
| D6OST | 889 | 0.112485939 |
| D9OST | 4426 | 0.022593764 |
| DFNES | 10126 | 0.009874593 |
| ERLTF | 2178 | 0.045913682 |
| FCBBF | 32305 | 0.003095496 |
| FEBRA | 23941 | 0.004176935 |
| FEHRT | 2866 | 0.034891835 |
| FEKID | 2759 | 0.036245016 |
| FELIV | 186 | 0.537634409 |
| FELNG | 2775 | 0.036036036 |
| HCASM | 8989 | 0.011124708 |
| HCHON | 9432 | 0.010602205 |
| HEART | 8946 | 0.01117818 |
| HELAC | 680 | 0.147058824 |
| HHDPC | 8476 | 0.011798018 |
| HLUNG | 16272 | 0.006145526 |
| HSYRA | 7985 | 0.012523482 |
| IMR32 | 16914 | 0.005912262 |
| JCMLC | 2171 | 0.046061723 |
| KIDNE | 17119 | 0.005841463 |
| LIVER | 6885 | 0.014524328 |
| LYMPB | 2630 | 0.038022814 |
| MAMGL | 184 | 0.543478261 |
| MESAN | 16095 | 0.00621311 |
| MESTC | 691 | 0.1447178 |
| N1ESE | 2628 | 0.03805175 |
| NB9N4 | 1764 | 0.056689342 |
| NCRRM | 703 | 0.142247511 |
| NCRRP | 699 | 0.143061516 |
| NESOP | 2805 | 0.035650624 |
| NETRP | 9236 | 0.010827198 |
| NHNPC | 2392 | 0.04180602 |
| NOVAR | 2504 | 0.039936102 |
| NT2NE | 16468 | 0.006072383 |
| NT2RI | 32842 | 0.003044882 |
| NT2RM | 2074 | 0.048216008 |
| NT2RP | 24763 | 0.004038283 |
| NTISM | 181 | 0.552486188 |
| NTONG | 8098 | 0.012348728 |
| OCBBF | 48042 | 0.002081512 |
| PANCR | 182 | 0.549450549 |
| PEBLM | 7940 | 0.012594458 |
| PERIC | 8860 | 0.011286682 |
| PLACE | 33535 | 0.002981959 |
| PROST | 16829 | 0.005942124 |
| PUAEN | 10577 | 0.009454477 |
| RECTM | 2743 | 0.036456435 |
| SALGL | 185 | 0.540540541 |
| SKMUS | 8470 | 0.011806375 |
| SKNMC | 7656 | 0.013061651 |
| SKNSH | 8692 | 0.011504832 |
| SMINT | 16913 | 0.005912612 |
| SPLEN | 34307 | 0.002914857 |
| STOMA | 8770 | 0.011402509 |
| SYNOV | 27671 | 0.003613892 |
| T1ESE | 2687 | 0.037216226 |
| TBAES | 8484 | 0.011786893 |
| TCERX | 2828 | 0.035360679 |
| TCOLN | 2815 | 0.035523979 |
| TESOP | 8723 | 0.011463946 |
| TESTI | 91301 | 0.001095278 |
| THYMU | 71574 | 0.001397155 |
| TKIDN | 16123 | 0.00620232 |
| TLIVE | 8681 | 0.01151941 |
| TLUNG | 2884 | 0.034674064 |
| TOVAR | 2740 | 0.03649635 |
| TRACH | 53281 | 0.001876842 |
| TSTOM | 2779 | 0.035984167 |
| TUTER | 2678 | 0.037341299 |
| UMVEN | 633 | 0.157977883 |
| UTERU | 50040 | 0.001998401 |

[0666] Using a nucleotide sequence homology search program, the nucleotide sequences of respective clones in this database were categorized (clustered) into groups, each of which contained homologous sequences. Cluster members (the number of clones whose 5′ ends were analyzed) were totalized and normalized for each library, resulting in an abundance ratio of genes in the cDNA library. In addition, 17,547 genes, including full-length cDNAs of the present invention, were assigned to a cluster using a nucleotide sequence homology search program.

[0667] In addition to the abundance ratio of the assigned genes in cDNA libraries, the sums of the weighted values for single sequences in each library were also calculated. For example, the expression of the clone BRACE2000753 was detectable in the BRACE, SPLEN, and THYMU libraries, based on expression analysis results. The single-sequence weighted values for these libraries are 0.001189244, 0.002914857, and 0.001397155 respectively, as seen in Table 1. Thus, their sum is 0.005501257. This parameter serves as an index for gene expression frequency in entire libraries. The higher this value, the greater the gene expression level. Listed below are the clone names of the 17,176 genes assigned to clusters, the number of cDNA clones whose 5′ end sequences were determined, and the sum of the weighted values for single sequences, cluster names, and the number of clones whose 5′ ends were analyzed.

LENGTHY TABLE REFERENCED HERE
US20070048740A1-20070301-T00001
Please refer to the end of the specification for access instructions.

[0668] This analysis yielded information on the expression frequencies of the 17,176 genes that include the cDNAs of the present invention, in all tissues and cells used as sources of the respective cDNA libraries and described in Example 1.

[0669] Of the 17,176 genes that include the cDNAs of the present invention, genes whose expression levels were high enough to detect in each of the 3NB69, ACTVT, ADIPS, ADRGL, AHMSC, ASTRO, and BEAST libraries were analyzed for expression frequency. The analysis results are described below. Each is a relative value, where the expression level over all tissues is taken as 100. The higher this value, the greater the level of expression.

| Clone Name | 3NB69 | ACTVT | ADIPS | ADRGL | AHMSC | ASTRO | BEAST |
|---|---|---|---|---|---|---|---|
| 3NB691000018 | 67.798 | 0 | 0 | 0 | 0 | 32.202 | 0 |
| 3NB692000281 | 1.606 | 0 | 0 | 0 | 19.579 | 0.763 | 0 |
| 3NB692000330 | 6.435 | 0 | 0 | 0 | 39.233 | 1.528 | 0 |
| 3NB692000374 | 15.821 | 0 | 0 | 0 | 0 | 3.757 | 0 |
| 3NB692000912 | 3.427 | 0 | 0 | 5.445 | 0 | 0 | 0 |
| 3NB692001022 | 18.151 | 0 | 0 | 0 | 0 | 4.311 | 0 |
| 3NB692001538 | 28.982 | 0 | 0 | 11.511 | 0 | 0 | 0 |
| ACTVT2000380 | 0 | 100 | 0 | 0 | 0 | 0 | 0 |
| ADIPS1000064 | 0 | 0 | 100 | 0 | 0 | 0 | 0 |
| ADIPS2000069 | 0 | 0 | 100 | 0 | 0 | 0 | 0 |
| ADIPS2000088 | 0 | 0 | 100 | 0 | 0 | 0 | 0 |
| ADIPS2000245 | 0 | 0 | 100 | 0 | 0 | 0 | 0 |
| ADIPS2000425 | 0 | 0 | 75.455 | 0 | 0 | 0 | 0 |
| ADRGL1000002 | 0 | 0 | 0 | 9.541 | 0 | 0 | 0 |
| ADRGL1000018 | 0 | 0 | 0 | 28.021 | 0 | 0 | 0 |
| ADRGL1000033 | 27.851 | 0 | 0 | 22.124 | 0 | 0 | 0 |
| ADRGL1000038 | 0 | 0 | 0 | 100 | 0 | 0 | 0 |
| ADRGL1000065 | 0 | 0 | 0 | 32.676 | 0 | 0 | 0 |
| ADRGL1000067 | 0 | 0 | 0 | 100 | 0 | 0 | 0 |
| ADRGL1000111 | 0 | 0 | 0 | 87.420 | 0 | 0 | 0 |
| ADRGL1000144 | 0 | 0 | 0 | 19.366 | 0 | 0 | 0 |
| ADRGL1000147 | 0 | 0 | 0 | 100 | 0 | 0 | 0 |
| ADRGL1000160 | 0 | 0 | 0 | 100 | 0 | 0 | 0 |
| ADRGL1000165 | 0 | 0 | 0 | 100 | 0 | 0 | 0 |
| ADRGL1000182 | 0 | 0 | 0 | 100 | 0 | 0 | 0 |
| ADRGL2000006 | 0 | 0 | 0 | 6.024 | 0 | 3.602 | 0 |
| ADRGL2000042 | 0 | 0 | 0 | 29.430 | 0 | 0 | 0 |
| ADRGL2000056 | 0 | 0 | 0 | 87.420 | 0 | 0 | 0 |
| ADRGL2000064 | 0 | 0 | 0 | 100 | 0 | 0 | 0 |
| ADRGL2000074 | 0 | 0 | 0 | 85.187 | 0 | 0 | 0 |
| ADRGL2000085 | 0 | 0 | 0 | 100 | 0 | 0 | 0 |
| ADRGL2000097 | 0 | 0 | 0 | 12.882 | 0 | 0 | 0 |
| ADRGL2000117 | 0 | 0 | 0 | 49.455 | 0 | 0 | 0 |
| ADRGL2000142 | 0 | 0 | 0 | 100 | 0 | 0 | 0 |
| ADRGL2000172 | 0 | 0 | 0 | 100 | 0 | 0 | 0 |
| ADRGL2000248 | 0 | 0 | 0 | 100 | 0 | 0 | 0 |
| ADRGL2000261 | 0 | 0 | 0 | 100 | 0 | 0 | 0 |
| ADRGL2000323 | 0 | 0 | 0 | 76.909 | 0 | 0 | 0 |
| ADRGL2000328 | 0 | 0 | 0 | 78.014 | 0 | 0 | 0 |
| ADRGL2000353 | 0 | 0 | 0 | 100 | 0 | 0 | 0 |
| ADRGL2000384 | 0 | 0 | 0 | 100 | 0 | 0 | 0 |
| ADRGL2000428 | 0 | 0 | 0 | 100 | 0 | 0 | 0 |
| ADRGL2000636 | 0 | 0 | 0 | 100 | 0 | 0 | 0 |
| ADRGL2000644 | 0 | 0 | 0 | 61.592 | 0 | 0 | 0 |
| ADRGL2000968 | 0 | 0 | 0 | 100 | 0 | 0 | 0 |
| ADRGL2001119 | 0 | 0 | 0 | 100 | 0 | 0 | 0 |
| ADRGL2001229 | 0 | 0 | 0 | 100 | 0 | 0 | 0 |
| ADRGL2001287 | 0 | 0 | 0 | 100 | 0 | 0 | 0 |
| ADRGL2001301 | 0 | 0 | 0 | 100 | 0 | 0 | 0 |
| ADRGL2001354 | 0 | 0 | 0 | 100 | 0 | 0 | 0 |
| ADRGL2001554 | 0 | 0 | 0 | 100 | 0 | 0 | 0 |
| ADRGL2001651 | 0 | 0 | 0 | 100 | 0 | 0 | 0 |
| ADRGL2001756 | 0 | 0 | 0 | 100 | 0 | 0 | 0 |
| ADRGL2001830 | 0 | 0 | 0 | 69.255 | 0 | 0 | 0 |
| ADRGL2001836 | 0 | 0 | 0 | 100 | 0 | 0 | 0 |
| ADRGL2001854 | 0 | 0 | 0 | 100 | 0 | 0 | 0 |
| ADRGL2002013 | 0 | 0 | 0 | 52.125 | 0 | 0 | 0 |
| ADRGL2002029 | 0 | 0 | 0 | 100 | 0 | 0 | 0 |
| ADRGL2002191 | 0 | 0 | 0 | 74.076 | 0 | 0 | 0 |
| ADRGL2002260 | 0 | 0 | 0 | 87.420 | 0 | 0 | 0 |
| ADRGL2002392 | 0 | 0 | 0 | 100 | 0 | 0 | 0 |
| ADRGL2002477 | 0 | 0 | 0 | 9.857 | 0 | 0 | 0 |
| ADRGL2002679 | 0 | 0 | 0 | 72.099 | 0 | 0 | 0 |
| ADRGL2002753 | 0 | 0 | 0 | 100 | 0 | 0 | 0 |
| ADRGL2002857 | 0 | 0 | 0 | 100 | 0 | 0 | 0 |
| ADRGL2003017 | 0 | 0 | 0 | 100 | 0 | 0 | 0 |
| ADRGL2003329 | 0 | 0 | 0 | 100 | 0 | 0 | 0 |
| ADRGL2003552 | 0 | 0 | 0 | 100 | 0 | 0 | 0 |
| ADRGL2003585 | 0 | 0 | 0 | 100 | 0 | 0 | 0 |
| ADRGL2003638 | 0 | 0 | 0 | 100 | 0 | 0 | 0 |
| ADRGL2003684 | 0 | 0 | 0 | 100 | 0 | 0 | 0 |
| ADRGL2003773 | 0 | 0 | 0 | 100 | 0 | 0 | 0 |
| ADRGL2003785 | 0 | 0 | 0 | 85.029 | 0 | 0 | 0 |
| ADRGL2004031 | 0 | 0 | 0 | 100 | 0 | 0 | 0 |
| ADRGL2004077 | 0 | 0 | 0 | 100 | 0 | 0 | 0 |
| ADRGL2004451 | 0 | 0 | 0 | 100 | 0 | 0 | 0 |
| ADRGL2004459 | 0 | 0 | 0 | 100 | 0 | 0 | 0 |
| ADRGL2004676 | 0 | 0 | 0 | 50.515 | 0 | 0 | 0 |
| ADRGL2004708 | 0 | 0 | 0 | 100 | 0 | 0 | 0 |
| ADRGL2004724 | 0 | 0 | 0 | 100 | 0 | 0 | 0 |
| ADRGL2004749 | 0 | 0 | 0 | 100 | 0 | 0 | 0 |
| ADRGL2004770 | 0 | 0 | 0 | 100 | 0 | 0 | 0 |
| ADRGL2004777 | 0 | 0 | 0 | 100 | 0 | 0 | 0 |
| ADRGL2004833 | 0 | 0 | 0 | 100 | 0 | 0 | 0 |
| ADRGL2005336 | 0 | 0 | 0 | 100 | 0 | 0 | 0 |
| ADRGL2005564 | 0 | 0 | 0 | 100 | 0 | 0 | 0 |
| ADRGL2005756 | 0 | 0 | 0 | 100 | 0 | 0 | 0 |
| ADRGL2005838 | 0 | 0 | 0 | 61.237 | 0 | 0 | 0 |
| ADRGL2005926 | 0 | 0 | 0 | 100 | 0 | 0 | 0 |
| ADRGL2005961 | 0 | 0 | 0 | 100 | 0 | 0 | 0 |
| ADRGL2006034 | 0 | 0 | 0 | 100 | 0 | 0 | 0 |
| ADRGL2006124 | 0 | 0 | 0 | 100 | 0 | 0 | 0 |
| ADRGL2006177 | 0 | 0 | 0 | 100 | 0 | 0 | 0 |
| ADRGL2006193 | 0 | 0 | 0 | 100 | 0 | 0 | 0 |
| ADRGL2006377 | 0 | 0 | 0 | 100 | 0 | 0 | 0 |
| ADRGL2006677 | 0 | 0 | 0 | 100 | 0 | 0 | 0 |
| ADRGL2006732 | 0 | 0 | 0 | 100 | 0 | 0 | 0 |
| ADRGL2006767 | 0 | 0 | 0 | 100 | 0 | 0 | 0 |
| ADRGL2006817 | 0 | 0 | 0 | 100 | 0 | 0 | 0 |
| ADRGL2006846 | 0 | 0 | 0 | 100 | 0 | 0 | 0 |
| ADRGL2006886 | 0 | 0 | 0 | 100 | 0 | 0 | 0 |
| ADRGL2007080 | 0 | 0 | 0 | 100 | 0 | 0 | 0 |
| ADRGL2007125 | 0 | 0 | 0 | 100 | 0 | 0 | 0 |
| ADRGL2007283 | 0 | 0 | 0 | 100 | 0 | 0 | 0 |
| ADRGL2007313 | 0 | 0 | 0 | 56.775 | 0 | 0 | 0 |
| ADRGL2007357 | 0 | 0 | 0 | 100 | 0 | 0 | 0 |
| ADRGL2007636 | 0 | 0 | 0 | 100 | 0 | 0 | 0 |
| ADRGL2007651 | 0 | 0 | 0 | 100 | 0 | 0 | 0 |
| ADRGL2007810 | 0 | 0 | 0 | 100 | 0 | 0 | 0 |
| ADRGL2007877 | 0 | 0 | 0 | 100 | 0 | 0 | 0 |
| ADRGL2007906 | 0 | 0 | 0 | 52.219 | 0 | 0 | 0 |
| ADRGL2007974 | 0 | 0 | 0 | 85.187 | 0 | 0 | 0 |
| ADRGL2008023 | 0 | 0 | 0 | 100 | 0 | 0 | 0 |
| ADRGL2008331 | 0 | 0 | 0 | 100 | 0 | 0 | 0 |
| ADRGL2008337 | 0 | 0 | 0 | 100 | 0 | 0 | 0 |
| ADRGL2008535 | 0 | 0 | 0 | 87.420 | 0 | 0 | 0 |
| ADRGL2008966 | 0 | 0 | 0 | 85.187 | 0 | 0 | 0 |
| ADRGL2009146 | 0 | 0 | 0 | 89.087 | 0 | 0 | 0 |
| ADRGL2009273 | 0 | 0 | 0 | 8.049 | 0 | 0 | 0 |
| ADRGL2009324 | 0 | 0 | 0 | 100 | 0 | 0 | 0 |
| ADRGL2009489 | 0 | 0 | 0 | 100 | 0 | 0 | 0 |
| ADRGL2009533 | 0 | 0 | 0 | 100 | 0 | 0 | 0 |
| ADRGL2009691 | 0 | 0 | 0 | 100 | 0 | 0 | 0 |
| ADRGL2009755 | 0 | 0 | 0 | 100 | 0 | 0 | 0 |
| ADRGL2010152 | 0 | 0 | 0 | 33.564 | 0 | 0 | 0 |
| ADRGL2010315 | 0 | 0 | 0 | 100 | 0 | 0 | 0 |
| ADRGL2010594 | 0 | 0 | 0 | 100 | 0 | 0 | 0 |
| ADRGL2010860 | 0 | 0 | 0 | 100 | 0 | 0 | 0 |
| ADRGL2010974 | 0 | 0 | 0 | 100 | 0 | 0 | 0 |
| ADRGL2011190 | 0 | 0 | 0 | 100 | 0 | 0 | 0 |
| ADRGL2011330 | 0 | 0 | 0 | 87.420 | 0 | 0 | 0 |
| ADRGL2012038 | 0 | 0 | 0 | 11.911 | 0 | 0 | 0 |
| ADRGL2012179 | 0 | 0 | 0 | 82.345 | 0 | 0 | 0 |
| AHMSC1000138 | 0 | 0 | 0 | 0 | 100 | 0 | 0 |
| ASTRO1000009 | 0 | 0 | 0 | 0 | 0 | 9.047 | 0 |
| ASTRO1000018 | 0 | 0 | 0 | 0 | 0 | 100 | 0 |
| ASTRO1000029 | 0 | 0 | 0 | 0 | 0 | 100 | 0 |
| ASTRO1000096 | 0 | 0 | 0 | 0 | 0 | 34.903 | 0 |
| ASTRO1000165 | 0 | 0 | 0 | 0 | 0 | 7.679 | 0 |
| ASTRO2000011 | 0 | 0 | 0 | 0 | 0 | 100 | 0 |
| ASTRO2000014 | 0 | 0 | 0 | 0 | 0 | 1.423 | 0 |
| ASTRO2000046 | 0 | 0 | 0 | 0 | 0 | 12.724 | 0 |
| ASTRO2000095 | 0 | 0 | 0 | 0 | 0 | 100 | 0 |
| ASTRO2000141 | 0 | 0 | 0 | 0 | 0 | 5.262 | 0 |
| ASTRO2000191 | 0 | 0 | 0 | 0 | 0 | 100 | 0 |
| ASTRO2000278 | 0 | 0 | 0 | 0 | 0 | 67.506 | 0 |
| ASTRO2000372 | 0 | 0 | 0 | 0 | 0 | 77.252 | 0 |
| ASTRO2000381 | 0 | 0 | 0 | 0 | 0 | 21.758 | 0 |
| ASTRO2000403 | 0 | 0 | 0 | 0 | 0 | 100 | 0 |
| ASTRO2000417 | 0 | 0 | 0 | 0 | 0 | 100 | 0 |
| ASTRO2000480 | 0 | 0 | 0 | 0 | 0 | 9.809 | 0 |
| ASTRO2000482 | 0 | 0 | 0 | 0 | 0 | 77.602 | 0 |
| ASTRO2000533 | 0 | 0 | 0 | 0 | 0 | 100 | 0 |
| ASTRO2000653 | 0 | 0 | 0 | 0 | 0 | 100 | 0 |
| ASTRO2000662 | 0 | 0 | 0 | 0 | 0 | 27.944 | 0 |
| ASTRO2000725 | 0 | 0 | 0 | 0 | 0 | 100 | 0 |
| ASTRO2000801 | 0 | 0 | 0 | 0 | 0 | 3.534 | 0 |
| ASTRO2000914 | 0 | 0 | 0 | 0 | 0 | 6.744 | 0 |
| ASTRO2001001 | 0 | 0 | 0 | 0 | 0 | 100 | 0 |
| ASTRO2001008 | 0 | 0 | 0 | 0 | 0 | 100 | 0 |
| ASTRO2001029 | 0 | 0 | 0 | 0 | 0 | 4.345 | 0 |
| ASTRO2001076 | 0 | 0 | 0 | 0 | 0 | 4.924 | 0 |
| ASTRO2001088 | 0 | 0 | 0 | 0 | 0 | 100 | 0 |
| ASTRO2001107 | 0 | 0 | 0 | 0 | 0 | 25.307 | 0 |
| ASTRO2001122 | 0 | 0 | 0 | 0 | 0 | 100 | 0 |
| ASTRO2001227 | 0 | 0 | 0 | 0 | 0 | 100 | 0 |
| ASTRO2001249 | 0 | 0 | 0 | 0 | 0 | 32.962 | 0 |
| ASTRO2001480 | 0 | 0 | 0 | 0 | 0 | 100 | 0 |
| ASTRO2001806 | 0 | 0 | 0 | 0 | 0 | 19.827 | 0 |
| ASTRO2001823 | 0 | 0 | 0 | 0 | 0 | 5.029 | 0 |
| ASTRO2002024 | 0 | 0 | 0 | 0 | 0 | 45.423 | 0 |
| ASTRO2002035 | 0 | 0 | 0 | 0 | 0 | 37.605 | 0 |
| ASTRO2002064 | 0 | 0 | 0 | 0 | 0 | 48.346 | 0 |
| ASTRO2002202 | 0 | 0 | 0 | 0 | 0 | 23.952 | 0 |
| ASTRO2002459 | 0 | 0 | 0 | 5.072 | 77.860 | 3.033 | 0 |
| ASTRO2002571 | 0 | 0 | 0 | 0 | 0 | 100 | 0 |
| ASTRO2002632 | 0 | 0 | 0 | 0 | 0 | 100 | 0 |
| ASTRO2002659 | 0 | 0 | 0 | 0 | 0 | 100 | 0 |
| ASTRO2002693 | 0 | 0 | 0 | 0 | 0 | 24.559 | 0 |
| ASTRO2002720 | 0 | 0 | 0 | 0 | 0 | 84.127 | 0 |
| ASTRO2002733 | 0 | 0 | 0 | 0 | 0 | 53.302 | 0 |
| ASTRO2002743 | 0 | 0 | 0 | 0 | 0 | 100 | 0 |
| ASTRO2002842 | 0 | 0 | 0 | 0 | 0 | 32.999 | 0 |
| ASTRO2003024 | 0 | 0 | 0 | 0 | 0 | 6.568 | 0 |
| ASTRO2003212 | 0 | 0 | 0 | 0 | 0 | 51.901 | 0 |
| ASTRO2003316 | 0 | 0 | 0 | 0 | 0 | 30.661 | 0 |
| ASTRO2003461 | 0 | 0 | 0 | 0 | 0 | 41.276 | 0 |
| ASTRO2003574 | 0 | 0 | 0 | 0 | 0 | 51.689 | 0 |
| ASTRO2003581 | 0 | 0 | 0 | 0 | 0 | 100 | 0 |
| ASTRO2003632 | 0 | 0 | 0 | 2.407 | 0 | 8.636 | 0 |
| ASTRO2003740 | 0 | 0 | 0 | 0 | 0 | 60.162 | 0 |
| ASTRO2003840 | 0 | 0 | 0 | 0 | 0 | 21.461 | 0 |
| ASTRO2003925 | 0 | 0 | 0 | 0 | 0 | 74.391 | 0 |
| ASTRO2003960 | 0 | 0 | 0 | 0 | 0 | 82.997 | 0 |
| ASTRO2004032 | 0 | 0 | 0 | 0 | 0 | 21.115 | 0 |
| ASTRO2004051 | 0 | 0 | 0 | 0 | 0 | 100 | 0 |
| ASTRO2004177 | 0 | 0 | 0 | 0 | 0 | 82.997 | 0 |
| ASTRO2004217 | 0 | 0 | 0 | 0 | 0 | 100 | 0 |
| ASTRO2004297 | 0 | 0 | 0 | 0 | 0 | 100 | 0 |
| ASTRO2004584 | 0 | 0 | 0 | 0 | 0 | 100 | 0 |
| ASTRO2004628 | 0 | 0 | 0 | 0 | 0 | 30.838 | 0 |
| ASTRO2004751 | 0 | 0 | 0 | 0 | 0 | 100 | 0 |
| ASTRO2004877 | 0 | 0 | 0 | 0 | 0 | 100 | 0 |
| ASTRO2004974 | 0 | 0 | 0 | 0 | 0 | 6.732 | 0 |
| ASTRO2005008 | 0 | 0 | 0 | 0 | 0 | 100 | 0 |
| ASTRO2005081 | 0 | 0 | 0 | 0 | 0 | 100 | 0 |
| ASTRO2005096 | 0 | 0 | 0 | 0 | 0 | 100 | 0 |
| ASTRO2005242 | 0 | 0 | 0 | 0 | 0 | 31.985 | 0 |
| ASTRO2005273 | 0 | 0 | 0 | 0 | 0 | 100 | 0 |
| ASTRO2005343 | 0 | 0 | 0 | 0 | 0 | 100 | 0 |
| ASTRO2005360 | 0 | 0 | 0 | 0 | 0 | 20.669 | 0 |
| ASTRO2005413 | 0 | 0 | 0 | 0 | 0 | 100 | 0 |
| ASTRO2005423 | 0 | 0 | 0 | 0 | 0 | 11.930 | 0 |
| ASTRO2005553 | 0 | 0 | 0 | 0 | 0 | 8.978 | 0 |
| ASTRO2005557 | 0 | 0 | 0 | 0 | 0 | 100 | 0 |
| ASTRO2005575 | 0 | 0 | 0 | 0 | 0 | 100 | 0 |
| ASTRO2005593 | 0 | 0 | 0 | 0 | 0 | 48.346 | 0 |
| ASTRO2005687 | 0 | 0 | 0 | 0 | 0 | 11.585 | 0 |
| ASTRO2005726 | 0 | 0 | 0 | 0 | 0 | 100 | 0 |
| ASTRO2005863 | 0 | 0 | 0 | 0 | 0 | 26.342 | 0 |
| ASTRO2005896 | 0 | 0 | 0 | 0 | 0 | 30.769 | 0 |
| ASTRO2005902 | 0 | 0 | 0 | 0 | 0 | 100 | 0 |
| ASTRO2006356 | 0 | 0 | 0 | 0 | 0 | 100 | 0 |
| ASTRO2006475 | 0 | 0 | 0 | 0 | 0 | 25.805 | 0 |
| ASTRO2006732 | 0 | 0 | 0 | 0 | 0 | 53.140 | 0 |
| ASTRO2006747 | 0 | 0 | 0 | 0 | 0 | 100 | 0 |
| ASTRO2006920 | 0 | 0 | 0 | 0 | 0 | 20.786 | 0 |
| ASTRO2006952 | 0 | 0 | 0 | 0 | 0 | 100 | 0 |
| ASTRO2007047 | 0 | 0 | 0 | 0 | 0 | 7.241 | 0 |
| ASTRO2007221 | 0 | 0 | 0 | 0 | 0 | 65.037 | 0 |
| ASTRO2007377 | 0 | 0 | 0 | 0 | 0 | 100 | 0 |
| ASTRO2007515 | 0 | 0 | 0 | 0 | 0 | 100 | 0 |
| ASTRO2007578 | 0 | 0 | 0 | 0 | 0 | 100 | 0 |
| ASTRO2007643 | 0 | 0 | 0 | 0 | 0 | 100 | 0 |
| ASTRO2007666 | 0 | 0 | 0 | 0 | 0 | 100 | 0 |
| ASTRO2007948 | 0 | 0 | 0 | 0 | 0 | 8.677 | 0 |
| ASTRO2007956 | 0 | 0 | 0 | 0 | 0 | 100 | 0 |
| ASTRO2007962 | 0 | 0 | 0 | 0 | 0 | 100 | 0 |
| ASTRO2008040 | 0 | 0 | 0 | 0 | 0 | 41.505 | 0 |
| ASTRO2008216 | 0 | 0 | 0 | 0 | 0 | 11.056 | 0 |
| ASTRO2008239 | 0 | 0 | 0 | 0 | 0 | 100 | 0 |
| ASTRO2008409 | 0 | 0 | 0 | 0 | 0 | 45.042 | 0 |
| ASTRO2008425 | 0 | 0 | 0 | 0 | 0 | 100 | 0 |
| ASTRO2008508 | 0 | 0 | 0 | 0 | 0 | 31.159 | 0 |
| ASTRO2008777 | 0 | 0 | 0 | 0 | 0 | 100 | 0 |
| ASTRO2008895 | 0 | 0 | 0 | 0 | 0 | 100 | 0 |
| ASTRO2008960 | 0 | 0 | 0 | 0 | 0 | 100 | 0 |
| ASTRO2008972 | 0 | 0 | 0 | 0 | 0 | 53.958 | 0 |
| ASTRO2009068 | 0 | 0 | 0 | 0 | 0 | 19.605 | 0 |
| ASTRO2009118 | 0 | 0 | 0 | 0 | 0 | 54.118 | 0 |
| ASTRO2009177 | 0 | 0 | 0 | 0 | 0 | 100 | 0 |
| ASTRO2009333 | 0 | 0 | 0 | 0 | 0 | 100 | 0 |
| ASTRO2009458 | 0 | 0 | 0 | 0 | 0 | 100 | 0 |
| ASTRO2009526 | 0 | 0 | 0 | 0 | 0 | 100 | 0 |
| ASTRO2009879 | 0 | 0 | 0 | 0 | 0 | 100 | 0 |
| ASTRO2010072 | 0 | 0 | 0 | 0 | 0 | 60.162 | 0 |
| ASTRO2010582 | 0 | 0 | 0 | 0 | 0 | 59.968 | 0 |
| ASTRO2010615 | 0 | 0 | 0 | 0 | 0 | 100 | 0 |
| ASTRO2010799 | 0 | 0 | 0 | 0 | 0 | 49.444 | 0 |
| ASTRO2010819 | 0 | 0 | 0 | 3.899 | 0 | 2.331 | 0 |
| ASTRO2010962 | 0 | 0 | 0 | 0 | 0 | 100 | 0 |
| ASTRO2010996 | 0 | 0 | 0 | 0 | 0 | 65.595 | 0 |
| ASTRO2011149 | 0 | 0 | 0 | 0 | 0 | 100 | 0 |
| ASTRO2011422 | 0 | 0 | 0 | 0 | 0 | 25.135 | 0 |
| ASTRO2011426 | 0 | 0 | 0 | 0 | 0 | 100 | 0 |
| ASTRO2011437 | 0 | 0 | 0 | 0 | 0 | 100 | 0 |
| ASTRO2011461 | 0 | 0 | 0 | 0 | 0 | 100 | 0 |
| ASTRO2011834 | 0 | 0 | 0 | 0 | 0 | 100 | 0 |
| ASTRO2011893 | 0 | 0 | 0 | 0 | 0 | 100 | 0 |
| ASTRO2012552 | 0 | 0 | 0 | 0 | 0 | 10.242 | 0 |
| ASTRO2013124 | 0 | 0 | 0 | 0 | 0 | 100 | 0 |
| ASTRO2013585 | 7.112 | 0 | 0 | 0 | 0 | 1.689 | 0 |
| ASTRO2013671 | 0 | 0 | 0 | 0 | 0 | 80.601 | 0 |
| ASTRO2013802 | 0 | 0 | 0 | 0 | 0 | 100 | 0 |
| ASTRO2014135 | 0 | 0 | 0 | 0 | 0 | 12.035 | 0 |
| ASTRO2014174 | 0 | 0 | 0 | 0 | 0 | 77.252 | 0 |
| ASTRO2014211 | 0 | 0 | 0 | 0 | 0 | 100 | 0 |
| ASTRO2014363 | 0 | 0 | 0 | 0 | 0 | 100 | 0 |
| ASTRO2014392 | 0 | 0 | 0 | 0 | 0 | 51.203 | 0 |
| ASTRO2014498 | 0 | 0 | 0 | 0 | 0 | 61.936 | 0 |
| ASTRO2014561 | 0 | 0 | 0 | 0 | 0 | 30.533 | 0 |
| ASTRO2014576 | 0 | 0 | 0 | 0 | 0 | 39.158 | 0 |
| ASTRO2014863 | 0 | 0 | 0 | 0 | 0 | 11.705 | 0 |
| ASTRO2014923 | 0 | 0 | 0 | 0 | 0 | 100 | 0 |
| ASTRO2014961 | 0 | 0 | 0 | 0 | 0 | 100 | 0 |
| ASTRO2015162 | 0 | 0 | 0 | 0 | 0 | 100 | 0 |
| ASTRO2015185 | 0 | 0 | 0 | 0 | 0 | 100 | 0 |
| ASTRO2015328 | 0 | 0 | 0 | 0 | 0 | 39.556 | 0 |
| ASTRO2015529 | 0 | 0 | 0 | 0 | 0 | 6.419 | 0 |
| ASTRO2015987 | 0 | 0 | 0 | 0 | 0 | 9.099 | 0 |
| ASTRO2016044 | 0 | 0 | 0 | 0 | 0 | 100 | 0 |
| ASTRO2016114 | 0 | 0 | 0 | 0 | 0 | 50.227 | 0 |
| ASTRO2016148 | 0 | 0 | 0 | 0 | 0 | 73.607 | 0 |
| ASTRO2016491 | 0 | 0 | 0 | 2.918 | 0 | 1.745 | 0 |
| ASTRO2016681 | 0 | 0 | 0 | 0 | 0 | 100 | 0 |
| ASTRO2016819 | 0 | 0 | 0 | 0 | 0 | 22.357 | 0 |
| ASTRO2016847 | 0 | 0 | 0 | 0 | 0 | 100 | 0 |
| ASTRO2016892 | 0 | 0 | 0 | 0 | 0 | 100 | 0 |
| ASTRO2017348 | 0 | 0 | 0 | 0 | 0 | 100 | 0 |
| ASTRO2017627 | 0 | 0 | 0 | 0 | 0 | 100 | 0 |
| ASTRO2018169 | 0 | 0 | 0 | 0 | 0 | 3.272 | 0 |
| ASTRO2018373 | 0 | 0 | 0 | 0 | 0 | 48.346 | 0 |
| ASTRO2018540 | 0 | 0 | 0 | 0 | 0 | 5.388 | 0 |
| ASTRO2019039 | 0 | 0 | 0 | 0 | 0 | 100 | 0 |
| ASTRO2019171 | 0 | 0 | 0 | 0 | 0 | 61.936 | 0 |
| ASTRO3000154 | 0 | 0 | 0 | 0 | 0 | 100 | 0 |
| ASTRO3000172 | 0 | 0 | 0 | 0 | 0 | 100 | 0 |
| ASTRO3000177 | 0 | 0 | 0 | 0 | 0 | 100 | 0 |
| ASTRO3000301 | 0 | 0 | 0 | 0 | 0 | 100 | 0 |
| ASTRO3000474 | 0 | 0 | 0 | 0 | 0 | 100 | 0 |
| ASTRO3000482 | 0 | 0 | 0 | 0 | 0 | 75.753 | 0 |
| BEAST2000454 | 0 | 0 | 0 | 0 | 0 | 0 | 100 |
| BGGI12000054 | 0 | 0 | 0 | 2.729 | 0 | 0.816 | 5.137 |
| BGGI12000616 | 0 | 0 | 0 | 5.181 | 0 | 0 | 0 |
| BGGI12001097 | 0 | 0 | 0 | 6.512 | 0 | 0 | 0 |
| BLADE2006830 | 0 | 0 | 0 | 0 | 0 | 5.824 | 0 |
| BNGH41000190 | 0 | 0 | 0 | 0 | 0 | 8.767 | 0 |
| BNGH41000198 | 0 | 0 | 0 | 24.076 | 0 | 0 | 0 |
| BNGH42000360 | 1.147 | 0 | 0 | 0.911 | 0 | 0 | 10.293 |
| BNGH42007460 | 0 | 0 | 0 | 5.839 | 0 | 0 | 0 |
| BNGH42007709 | 1.679 | 0 | 0 | 0 | 0 | 0.797 | 0 |
| BNGH42007788 | 0 | 0 | 0 | 0 | 0 | 10.666 | 0 |
| BRACE1000132 | 0 | 0 | 0 | 0 | 0 | 49.767 | 0 |
| BRACE2000148 | 0 | 0 | 0 | 20.686 | 0 | 0 | 0 |
| BRACE2000307 | 0 | 0 | 0 | 0 | 0 | 4.081 | 0 |
| BRACE2001143 | 0 | 0 | 0 | 8.607 | 0 | 0 | 0 |
| BRACE2001151 | 0 | 0 | 0 | 37.402 | 0 | 0 | 0 |
| BRACE2001692 | 0 | 0 | 58.856 | 0 | 0 | 0 | 0 |
| BRACE2002392 | 0 | 0 | 0 | 0 | 0 | 5.972 | 0 |
| BRACE2002441 | 0 | 0 | 0 | 0 | 0 | 11.706 | 0 |
| BRACE2002752 | 0 | 0 | 0 | 89.087 | 0 | 0 | 0 |
| BRACE2002860 | 0 | 0 | 0 | 14.588 | 0 | 0 | 0 |
| BRACE2003217 | 0 | 0 | 0 | 0 | 0 | 14.934 | 0 |
| BRACE2003254 | 0 | 0 | 0 | 0 | 0 | 3.137 | 0 |
| BRACE2003628 | 0 | 0 | 0 | 39.531 | 0 | 0 | 0 |
| BRACE2003785 | 0 | 0 | 0 | 0 | 0 | 3.367 | 0 |
| BRACE2003827 | 0 | 0 | 0 | 0 | 0 | 3.035 | 0 |
| BRACE2005151 | 0 | 0 | 0 | 12.175 | 0 | 0 | 0 |
| BRACE2005434 | 5.029 | 60.155 | 0 | 3.995 | 0 | 0 | 0 |
| BRACE2006537 | 0 | 0 | 0 | 6.236 | 0 | 0 | 0 |
| BRACE2006871 | 0 | 87.244 | 0 | 0 | 0 | 0 | 0 |
| BRACE2007089 | 0 | 0 | 0 | 4.906 | 0 | 0 | 0 |
| BRACE2007191 | 0 | 0 | 0 | 0 | 61.094 | 0 | 0 |
| BRACE2007671 | 0 | 0 | 0 | 0 | 0 | 5.357 | 0 |
| BRACE2007708 | 0 | 0 | 0 | 0 | 0 | 7.362 | 0 |
| BRACE2008097 | 0 | 0 | 0 | 27.819 | 0 | 0 | 0 |
| BRACE2008399 | 0 | 0 | 0 | 32.070 | 0 | 0 | 0 |
| BRACE2008402 | 0 | 0 | 0 | 24.298 | 0 | 0 | 0 |
| BRACE2008653 | 0 | 0 | 0 | 3.056 | 0 | 0 | 0 |
| BRACE2008706 | 0 | 0 | 0 | 19.039 | 0 | 0 | 0 |
| BRACE2008881 | 0 | 0 | 0 | 80.322 | 0 | 0 | 0 |
| BRACE2008968 | 4.241 | 0 | 0 | 3.369 | 0 | 0 | 0 |
| BRACE2009291 | 0 | 0 | 0 | 7.665 | 0 | 4.583 | 0 |
| BRACE2009517 | 0 | 0 | 0 | 0 | 0 | 9.397 | 0 |
| BRACE2009721 | 0 | 0 | 0 | 0 | 0 | 82.997 | 0 |
| BRACE2010642 | 0 | 0 | 0 | 89.087 | 0 | 0 | 0 |
| BRACE2013911 | 0 | 0 | 0 | 43.556 | 0 | 0 | 0 |
| BRACE2015412 | 0 | 0 | 0 | 70.543 | 0 | 0 | 0 |
| BRACE2017934 | 0 | 0 | 0 | 53.554 | 0 | 0 | 0 |
| BRACE2022638 | 5.437 | 0 | 0 | 0 | 0 | 2.582 | 0 |
| BRACE2028171 | 0 | 0 | 0 | 89.087 | 0 | 0 | 0 |
| BRACE2039624 | 0 | 0 | 0 | 5.606 | 0 | 6.704 | 0 |
| BRACE3010438 | 0 | 0 | 0 | 0 | 0 | 6.204 | 0 |
| BRALZ2009482 | 0 | 0 | 0 | 0 | 0 | 2.575 | 0 |
| BRALZ2014054 | 0 | 0 | 0 | 61.592 | 0 | 0 | 0 |
| BRAMY2000893 | 0 | 0 | 0 | 0 | 0 | 5.272 | 0 |
| BRAMY2000987 | 0 | 0 | 0 | 0 | 0 | 58.805 | 0 |
| BRAMY2004363 | 0 | 0 | 0 | 0 | 0 | 7.083 | 0 |
| BRAMY2004521 | 0 | 0 | 0 | 0 | 0 | 8.212 | 0 |
| BRAMY2012536 | 0 | 50.363 | 0 | 0 | 0 | 0 | 0 |
| BRAMY2016706 | 0 | 0 | 0 | 0 | 0 | 34.345 | 0 |
| BRAMY2019554 | 0 | 0 | 0 | 4.624 | 0 | 0 | 0 |
| BRAMY2022786 | 0 | 0 | 0 | 7.230 | 0 | 8.647 | 0 |
| BRAMY2028740 | 0 | 0 | 0 | 0 | 0 | 6.451 | 0 |
| BRAMY2030545 | 0 | 0 | 0 | 0 | 0 | 77.470 | 0 |
| BRAMY2032087 | 0 | 0 | 0 | 0 | 0 | 4.196 | 0 |
| BRAMY2040095 | 0 | 0 | 0 | 1.981 | 0 | 1.184 | 0 |
| BRAMY3002991 | 0 | 0 | 0 | 22.719 | 0 | 0 | 0 |
| BRAMY3010008 | 0 | 0 | 0 | 0 | 0 | 2.016 | 0 |
| BRAMY4000089 | 0 | 0 | 0 | 29.487 | 0 | 0 | 0 |
| BRAWH1000040 | 0 | 0 | 0 | 0 | 0 | 4.768 | 0 |
| BRAWH1000083 | 0 | 0 | 0 | 0 | 0 | 15.698 | 0 |
| BRAWH2000460 | 0 | 0 | 0 | 7.073 | 0 | 2.115 | 0 |
| BRAWH2000588 | 0 | 0 | 0 | 7.269 | 0 | 8.693 | 0 |
| BRAWH2000697 | 0 | 0 | 0 | 0 | 0 | 3.505 | 0 |
| BRAWH2000839 | 0 | 0 | 0 | 0 | 0 | 1.423 | 0 |
| BRAWH2000924 | 0 | 0 | 0 | 1.663 | 0 | 0.994 | 0 |
| BRAWH2001092 | 0 | 0 | 0 | 5.092 | 0 | 0.609 | 0 |
| BRAWH2004078 | 0 | 0 | 0 | 61.066 | 0 | 0 | 0 |
| BRAWH2005661 | 0 | 0 | 0 | 9.263 | 0 | 0 | 0 |
| BRAWH2009227 | 0 | 0 | 0 | 0 | 0 | 54.758 | 0 |
| BRAWH2010536 | 0 | 0 | 0 | 85.282 | 0 | 0 | 0 |
| BRAWH2017379 | 0 | 0 | 0 | 0 | 0 | 52.645 | 0 |
| BRAWH2017685 | 0 | 0 | 0 | 0 | 0 | 3.517 | 0 |
| BRAWH2018526 | 4.489 | 0 | 0 | 0 | 0 | 3.199 | 0 |
| BRAWH3000088 | 0 | 0 | 0 | 0 | 0 | 4.008 | 0 |
| BRAWH3002574 | 0 | 0 | 0 | 0 | 0 | 22.906 | 0 |
| BRAWH3002853 | 0 | 0 | 0 | 0 | 0 | 2.563 | 0 |
| BRAWH3008931 | 0 | 0 | 0 | 20.069 | 0 | 0 | 0 |
| BRCAN2003944 | 0 | 0 | 0 | 0 | 25.048 | 2.927 | 0 |
| BRCAN2011946 | 0 | 0 | 0 | 36.641 | 0 | 0 | 0 |
| BRCAN2016174 | 0 | 0 | 0 | 62.999 | 0 | 0 | 0 |
| BRCAN2026197 | 0 | 0 | 0 | 0 | 0 | 5.409 | 0 |
| BRCAN2028036 | 0 | 0 | 0 | 13.990 | 0 | 8.365 | 0 |
| BRHIP1000104 | 0 | 0 | 0 | 0 | 0 | 2.265 | 0 |
| BRHIP2000534 | 0 | 0 | 0 | 0 | 0 | 1.186 | 0 |
| BRHIP2000553 | 0 | 0 | 0 | 0 | 0 | 8.903 | 0 |
| BRHIP2007741 | 0 | 0 | 0 | 0 | 0 | 6.014 | 0 |
| BRHIP2023272 | 0 | 0 | 0 | 0 | 0 | 11.694 | 0 |
| BRHIP2023888 | 0 | 0 | 0 | 2.132 | 0 | 3.824 | 0 |
| BRHIP2027077 | 0 | 0 | 0 | 0 | 0 | 6.998 | 0 |
| BRHIP3000111 | 0 | 0 | 0 | 5.932 | 0 | 0 | 0 |
| BRHIP3020046 | 0 | 0 | 0 | 0 | 0 | 3.509 | 0 |
| BRSSN2001869 | 0 | 0 | 0 | 0 | 0 | 10.458 | 0 |
| BRSSN2011262 | 0 | 0 | 0 | 0 | 0 | 0 | 61.476 |
| BRSSN2014299 | 0 | 0 | 0 | 64.234 | 0 | 0 | 0 |
| BRSTN2001067 | 0 | 0 | 0 | 35.873 | 0 | 0 | 0 |
| BRSTN2011961 | 0 | 0 | 0 | 0 | 0 | 0 | 6.317 |
| BRSTN2012069 | 3.312 | 0.825 | 0.919 | 1.699 | 0 | 0.459 | 0 |
| BRSTN2012451 | 0 | 0 | 0 | 0 | 73.463 | 0 | 0 |
| BRSTN2013171 | 0 | 0 | 0 | 40.158 | 0 | 0 | 0 |
| BRSTN2013931 | 0 | 84.303 | 0 | 0 | 0 | 0 | 0 |
| BRSTN2016470 | 0 | 19.098 | 0 | 0 | 0 | 0 | 0 |
| BRTHA2005864 | 0 | 0 | 0 | 0 | 0 | 5.622 | 0 |
| BRTHA3003023 | 0 | 0 | 0 | 0 | 0 | 7.002 | 0 |
| BRTHA3003490 | 0 | 0 | 0 | 0 | 0 | 11.249 | 0 |
| BRTHA3003736 | 0 | 0 | 0 | 0 | 0 | 7.453 | 0 |
| BRTHA3007472 | 0 | 0 | 0 | 0 | 0 | 13.519 | 0 |
| CD34C3000252 | 0 | 0 | 0 | 0 | 0 | 2.844 | 0 |
| CTONG1000087 | 0 | 0 | 0 | 6.059 | 0 | 0 | 0 |
| CTONG1000094 | 2.841 | 0 | 0 | 0 | 0 | 1.349 | 0 |
| CTONG2000469 | 0 | 0 | 0 | 16.920 | 0 | 0 | 0 |
| CTONG2000561 | 0 | 0 | 0 | 0 | 0 | 12.572 | 0 |
| CTONG2002903 | 0 | 0 | 0 | 0 | 0 | 10.672 | 0 |
| CTONG2003094 | 0 | 0 | 0 | 0 | 0 | 12.696 | 0 |
| CTONG2003298 | 0 | 0 | 0 | 0 | 0 | 7.543 | 0 |
| CTONG2003764 | 0 | 0 | 0 | 75.675 | 0 | 0 | 0 |
| CTONG2004115 | 0 | 0 | 0 | 69.255 | 0 | 0 | 0 |
| CTONG2005278 | 0 | 0 | 0 | 0 | 0 | 19.970 | 0 |
| CTONG2005553 | 0 | 0 | 0 | 0 | 0 | 2.481 | 0 |
| CTONG2006932 | 0 | 0 | 0 | 0 | 0 | 3.813 | 0 |
| CTONG2008269 | 0 | 0 | 0 | 39.422 | 0 | 0 | 0 |
| CTONG2008506 | 0 | 0 | 0 | 0 | 0 | 3.260 | 0 |
| CTONG2010348 | 0 | 0 | 0 | 10.260 | 0 | 0 | 0 |
| CTONG2010649 | 0 | 0 | 0 | 0 | 0 | 5.418 | 0 |
| CTONG2011801 | 0 | 0 | 0 | 17.157 | 0 | 0 | 0 |
| CTONG2012452 | 2.597 | 0 | 0 | 2.063 | 0 | 2.467 | 0 |
| CTONG2012453 | 0 | 0 | 0 | 43.638 | 0 | 0 | 0 |
| CTONG2014705 | 0 | 0 | 0 | 0 | 0 | 65.037 | 0 |
| CTONG2015091 | 0 | 0 | 0 | 4.706 | 0 | 0 | 0 |
| CTONG2016185 | 0 | 0 | 0 | 0 | 0 | 9.007 | 0 |
| CTONG2016575 | 3.627 | 0 | 0 | 0 | 0 | 3.445 | 0 |
| CTONG2018383 | 0 | 0 | 0 | 0 | 0 | 15.662 | 0 |
| CTONG2018739 | 0 | 0 | 0 | 0 | 0 | 13.427 | 0 |
| CTONG2018898 | 0 | 0 | 0 | 0 | 0 | 1.669 | 0 |
| CTONG2020484 | 0 | 0 | 0 | 0 | 0 | 2.037 | 0 |
| CTONG2020560 | 0 | 0 | 0 | 0 | 0 | 10.395 | 0 |
| CTONG3009239 | 0 | 0 | 0 | 0 | 0 | 5.002 | 0 |
| D30ST2001670 | 0 | 0 | 0 | 21.620 | 0 | 0 | 0 |
| DFNES2000153 | 0 | 0 | 0 | 18.552 | 0 | 0 | 0 |
| DFNES2000292 | 0 | 0 | 0 | 0 | 0 | 13.003 | 0 |
| DFNES2000443 | 0 | 0 | 0 | 0 | 0 | 2.352 | 0 |
| DFNES2000526 | 0 | 0 | 0 | 0 | 0 | 28.724 | 0 |
| DFNES2001091 | 0 | 0 | 0 | 0 | 0 | 29.734 | 0 |
| DFNES2004371 | 0 | 0 | 0 | 0 | 0 | 5.466 | 0 |
| DFNES2007641 | 0 | 0 | 0 | 0 | 0 | 37.023 | 0 |
| FCBBF1000023 | 0 | 0 | 0 | 0 | 0 | 24.372 | 0 |
| FCBBF1000025 | 0 | 0 | 0 | 0 | 0 | 11.087 | 0 |
| FCBBF1000063 | 0 | 0 | 0 | 0 | 0 | 20.721 | 0 |
| FCBBF1000367 | 0 | 0 | 0 | 8.803 | 0 | 5.263 | 0 |
| FCBBF1000466 | 0 | 0 | 0 | 0 | 0 | 2.206 | 0 |
| FCBBF1000760 | 0 | 0 | 0 | 0 | 58.246 | 0 | 0 |
| FCBBF2000087 | 0 | 0 | 0 | 0 | 0 | 9.995 | 0 |
| FCBBF2000502 | 0 | 0 | 0 | 38.225 | 0 | 0 | 0 |
| FCBBF2000591 | 0 | 0 | 0 | 0 | 0 | 0.993 | 0 |
| FCBBF2000885 | 0 | 0 | 0 | 0 | 0 | 5.318 | 0 |
| FCBBF2001105 | 0 | 0 | 0 | 17.589 | 0 | 0 | 0 |
| FCBBF3001632 | 0 | 0 | 0 | 0 | 0 | 5.348 | 0 |
| FCBBF3003800 | 2.873 | 0 | 0 | 0 | 0 | 1.365 | 0 |
| FCBBF3004473 | 0 | 0 | 0 | 0 | 0 | 3.980 | 0 |
| FCBBF3005320 | 0 | 0 | 0 | 0 | 0 | 9.451 | 0 |
| FCBBF3005497 | 0 | 0 | 0 | 0 | 0 | 2.724 | 0 |
| FCBBF3016928 | 0 | 0 | 0 | 0 | 0 | 3.036 | 0 |
| FCBBF3019839 | 0 | 0 | 0 | 0 | 0 | 12.975 | 0 |
| FCBBF3023667 | 3.875 | 11.587 | 0 | 1.539 | 11.811 | 0 | 0 |
| FCBBF4000446 | 0 | 0 | 0 | 0 | 0 | 5.205 | 0 |
| FEBRA1000057 | 0 | 0 | 0 | 0 | 0 | 6.015 | 0 |
| FEBRA2000129 | 0 | 0 | 0 | 15.063 | 0 | 0 | 0 |
| FEBRA2000438 | 0 | 0 | 0 | 51.194 | 0 | 0 | 0 |
| FEBRA2000733 | 1.229 | 0 | 0 | 1.953 | 0 | 0.584 | 0 |
| FEBRA2000762 | 0 | 0 | 0 | 36.045 | 0 | 0 | 0 |
| FEBRA2000772 | 0 | 0 | 0 | 49.565 | 0 | 0 | 0 |
| FEBRA2000881 | 0 | 0 | 0 | 18.341 | 0 | 0 | 0 |
| FEBRA2001245 | 0 | 0 | 0 | 0 | 0 | 8.739 | 0 |
| FEBRA2001294 | 0 | 0 | 0 | 0 | 0 | 8.373 | 0 |
| FEBRA2001828 | 0 | 0 | 0 | 31.524 | 0 | 0 | 0 |
| FEBRA2002352 | 0 | 0 | 0 | 0 | 0 | 12.027 | 0 |
| FEBRA2002707 | 0 | 0 | 0 | 20.879 | 0 | 0 | 0 |
| FEBRA2002933 | 0 | 0 | 0 | 2.144 | 0 | 1.282 | 0 |
| FEBRA2003100 | 0 | 0 | 0 | 0 | 0 | 2.282 | 0 |
| FEBRA2003726 | 0 | 0 | 0 | 0 | 0 | 3.450 | 0 |
| FEBRA2003750 | 0 | 0 | 0 | 0 | 0 | 6.325 | 0 |
| FEBRA2003926 | 0 | 0 | 0 | 4.045 | 0 | 2.419 | 0 |
| FEBRA2004224 | 0 | 0 | 0 | 13.416 | 0 | 4.011 | 0 |
| FEBRA2004325 | 0 | 0 | 0 | 0 | 0 | 12.203 | 0 |
| FEBRA2004628 | 0 | 0 | 0 | 16.528 | 0 | 0 | 0 |
| FEBRA2005416 | 0 | 0 | 0 | 0 | 0 | 3.721 | 0 |
| FEBRA2005824 | 0 | 0 | 0 | 2.161 | 0 | 0 | 0 |
| FEBRA2006092 | 0 | 0 | 0 | 0 | 55.306 | 0 | 0 |
| FEBRA2006372 | 0 | 0 | 0 | 0 | 0 | 4.653 | 0 |
| FEBRA2006401 | 0 | 0 | 0 | 0 | 0 | 0.870 | 0 |
| FEBRA2006485 | 0 | 0 | 0 | 0 | 0 | 10.539 | 0 |
| FEBRA2006873 | 0 | 0 | 0 | 0 | 0 | 31.115 | 0 |
| FEBRA2007818 | 40.789 | 0 | 0 | 32.401 | 0 | 0 | 0 |
| FEBRA2008081 | 0 | 0 | 0 | 0 | 0 | 2.453 | 0 |
| FEBRA2008087 | 0 | 0 | 0 | 2.077 | 0 | 0.621 | 0 |
| FEBRA2008302 | 0 | 0 | 0 | 0 | 0 | 3.687 | 0 |
| FEBRA2008341 | 0 | 0 | 0 | 38.062 | 0 | 0 | 0 |
| FEBRA2008583 | 0.964 | 0 | 0 | 0 | 0 | 1.832 | 0 |
| FEBRA2014417 | 0 | 0 | 0 | 3.129 | 0 | 1.871 | 0 |
| FEBRA2018476 | 0 | 0 | 0 | 6.331 | 0 | 0 | 0 |
| FEBRA2022504 | 0 | 0 | 0 | 0 | 0 | 5.690 | 0 |
| FEBRA2025838 | 0 | 0 | 0 | 0 | 0 | 2.846 | 0 |
| FEBRA2028516 | 0 | 0 | 0 | 6.628 | 0 | 0 | 0 |
| FELIV1000153 | 1.203 | 0 | 0 | 0 | 0 | 0.571 | 0 |
| HCASM2005388 | 0 | 0 | 0 | 0 | 0 | 12.254 | 0 |
| HCASM2009588 | 0 | 0 | 0 | 0 | 93.054 | 0 | 0 |
| HCHON1000030 | 0 | 0 | 0 | 2.102 | 0 | 0.628 | 0 |
| HCHON1000131 | 0 | 0 | 0 | 23.773 | 0 | 0 | 0 |
| HCHON1000191 | 0 | 0 | 0 | 0 | 0 | 10.041 | 0 |
| HCHON2000056 | 0 | 0 | 0 | 3.287 | 0 | 0.983 | 0 |
| HCHON2000062 | 0 | 0 | 0 | 24.285 | 0 | 0 | 0 |
| HCHON2000295 | 0 | 0 | 0 | 0 | 0 | 3.035 | 0 |
| HCHON2000323 | 0 | 0 | 0 | 0 | 0 | 6.418 | 0 |
| HCHON2000373 | 0 | 0 | 0 | 0 | 0 | 35.114 | 0 |
| HCHON2000676 | 0 | 0 | 0 | 0 | 0 | 10.330 | 0 |
| HCHON2000698 | 0 | 0 | 0 | 0 | 0 | 9.931 | 0 |
| HCHON2000826 | 0 | 0 | 0 | 0 | 0 | 4.959 | 0 |
| HCHON2001039 | 0 | 0 | 0 | 0 | 0 | 3.866 | 0 |
| HCHON2001050 | 0 | 0 | 0 | 8.398 | 0 | 0 | 0 |
| HCHON2001110 | 0 | 0 | 0 | 47.801 | 0 | 0 | 0 |
| HCHON2001200 | 0 | 0 | 0 | 0 | 0 | 2.997 | 0 |
| HCHON2001217 | 0 | 0 | 0 | 0 | 0 | 3.606 | 0 |
| HCHON2001407 | 0 | 0 | 0 | 0 | 0 | 2.736 | 0 |
| HCHON2001434 | 0 | 0 | 0 | 0 | 0 | 5.293 | 0 |
| HEART1000074 | 11.074 | 0 | 0 | 4.399 | 0 | 0 | 0 |
| HEART1000149 | 0 | 0 | 0 | 5.441 | 0 | 0 | 0 |
| HHDPC1000083 | 0 | 0 | 0 | 0 | 0 | 6.782 | 0 |
| HHDPC1000163 | 0 | 0 | 0 | 0 | 0 | 8.714 | 0 |
| HHDPC2000102 | 0 | 0 | 0 | 0 | 0 | 16.450 | 0 |
| HHDPC2000115 | 0 | 0 | 0 | 15.158 | 0 | 0 | 0 |
| HHDPC2000455 | 0 | 0 | 0 | 0 | 0 | 1.904 | 0 |
| HHDPC2000456 | 0 | 0 | 0 | 0 | 0 | 5.379 | 0 |
| HHDPC2000656 | 0 | 0 | 0 | 0 | 0 | 29.616 | 0 |
| HHDPC2003439 | 1.855 | 0 | 0 | 0 | 0 | 3.525 | 0 |
| HHDPC2003983 | 2.031 | 0 | 0 | 0 | 0 | 2.894 | 0 |
| HHDPC2006862 | 0 | 0 | 0 | 0 | 0 | 25.931 | 0 |
| HLUNG1000055 | 0 | 0 | 0 | 0 | 0 | 1.875 | 0 |
| HLUNG1000076 | 0 | 0 | 0 | 4.875 | 0 | 0 | 0 |
| HLUNG1000105 | 0 | 0 | 0 | 61.237 | 0 | 0 | 0 |
| HLUNG2001439 | 0 | 0 | 0 | 0 | 0 | 3.055 | 0 |
| HLUNG2001507 | 0 | 0 | 0 | 0 | 0 | 52.047 | 0 |
| HLUNG2001518 | 7.976 | 0 | 0 | 6.336 | 0 | 0 | 0 |
| HLUNG2002648 | 0 | 0 | 0 | 20.943 | 0 | 0 | 0 |
| HLUNG2002916 | 0 | 0 | 0 | 49.989 | 0 | 0 | 0 |
| HSYRA1000062 | 0 | 0 | 0 | 0 | 0 | 1.484 | 0 |
| HSYRA1000119 | 0 | 0 | 0 | 5.328 | 0 | 1.593 | 0 |
| HSYRA1000148 | 0 | 0 | 0 | 38.210 | 0 | 0 | 0 |
| HSYRA2000135 | 0 | 0 | 0 | 0 | 0 | 13.703 | 0 |
| HSYRA2000159 | 0.879 | 0 | 0 | 0 | 0 | 2.089 | 0 |
| HSYRA2000232 | 0 | 0 | 0 | 8.569 | 0 | 0 | 0 |
| HSYRA2000248 | 0 | 0 | 0 | 3.938 | 0 | 2.355 | 0 |
| HSYRA2000828 | 0 | 0 | 0 | 0 | 0 | 4.936 | 0 |
| HSYRA2000925 | 0 | 0 | 0 | 1.284 | 0 | 0 | 0 |
| HSYRA2001003 | 0 | 0 | 0 | 0 | 0 | 29.743 | 0 |
| HSYRA2001138 | 0 | 0 | 0 | 0 | 22.675 | 4.416 | 0 |
| HSYRA2001153 | 0 | 0 | 0 | 0 | 0 | 31.673 | 0 |
| HSYRA2001232 | 0 | 0 | 0 | 0 | 0 | 13.403 | 0 |
| HSYRA2001476 | 0 | 0 | 0 | 0 | 0 | 1.673 | 0 |
| HSYRA2001595 | 0 | 0 | 0 | 0 | 0 | 1.974 | 0 |
| HSYRA2001631 | 0 | 0 | 0 | 0 | 0 | 20.202 | 0 |
| HSYRA2001638 | 0 | 0 | 0 | 0 | 0 | 7.836 | 0 |
| IMR321000158 | 5.552 | 0 | 0 | 0 | 0 | 2.637 | 0 |
| IMR321000219 | 2.047 | 0 | 0 | 0 | 0 | 2.917 | 0 |
| IMR321000266 | 0 | 0 | 0 | 0 | 0 | 19.609 | 0 |
| IMR322000730 | 2.000 | 0 | 0 | 1.588 | 0 | 0 | 0 |
| IMR322000791 | 0 | 0 | 0 | 30.062 | 0 | 0 | 0 |
| IMR322000973 | 0 | 0 | 0 | 0 | 0 | 8.381 | 0 |
| IMR322001435 | 0 | 0 | 0 | 0 | 0 | 3.255 | 0 |
| IMR322001600 | 0 | 0 | 0 | 0 | 0 | 1.116 | 0 |
| IMR322012529 | 0 | 0 | 0 | 0 | 0 | 16.315 | 0 |
| KIDNE2000085 | 0 | 0 | 0 | 5.958 | 0 | 0 | 0 |
| KIDNE2000574 | 0 | 0 | 0 | 0 | 0 | 2.593 | 0 |
| KIDNE2000665 | 0 | 0 | 0 | 11.217 | 0 | 0 | 0 |
| KIDNE2000909 | 0 | 0 | 0 | 0 | 0 | 7.113 | 0 |
| KIDNE2000947 | 0 | 0 | 0 | 0 | 0 | 8.756 | 0 |
| KIDNE2001467 | 0 | 0 | 0 | 0 | 0 | 3.612 | 0 |
| KIDNE2002839 | 0 | 0 | 0 | 0 | 0 | 25.434 | 0 |
| KIDNE2003941 | 0 | 0 | 0 | 0 | 0 | 1.748 | 0 |
| KIDNE2004054 | 0 | 0 | 0 | 0 | 0 | 45.226 | 0 |
| KIDNE2004534 | 0 | 0 | 0 | 0 | 0 | 12.932 | 0 |
| KIDNE2005676 | 0 | 0 | 0 | 0 | 0 | 4.874 | 0 |
| KIDNE2006030 | 0 | 0 | 0 | 0 | 0 | 14.787 | 0 |
| KIDNE2007352 | 0 | 0 | 0 | 2.409 | 0 | 1.440 | 0 |
| KIDNE2007811 | 0 | 0 | 0 | 0 | 0 | 29.682 | 0 |
| KIDNE2008048 | 0 | 0 | 0 | 0 | 0 | 1.859 | 0 |
| KIDNE2012440 | 0 | 0 | 0 | 0 | 0 | 6.133 | 0 |
| KIDNE2013845 | 0 | 0 | 0 | 0 | 0 | 3.872 | 0 |
| KIDNE2015710 | 0 | 0 | 0 | 0 | 0 | 0 | 40.832 |
| KIDNE2018352 | 0 | 0 | 0 | 0 | 0 | 12.355 | 0 |
| LIVER1000017 | 0 | 0 | 0 | 0 | 0 | 0 | 25.940 |
| LIVER1000067 | 0 | 0 | 0 | 0 | 0 | 0 | 30.284 |
| LIVER1000079 | 0 | 0 | 0 | 10.153 | 0 | 0 | 0 |
| LIVER1000104 | 0 | 0 | 0 | 0 | 0 | 0 | 26.973 |
| LIVER1000111 | 0 | 0 | 0 | 0 | 0 | 21.880 | 0 |
| LIVER1000132 | 0 | 0 | 0 | 0 | 0 | 5.201 | 0 |
| LIVER1000542 | 0 | 0 | 0 | 0 | 0 | 0 | 64.596 |
| LIVER2000037 | 0 | 0 | 0 | 0 | 0 | 0 | 78.666 |
| LIVER2000158 | 0 | 0 | 0 | 40.064 | 0 | 0 | 0 |
| LIVER2001608 | 0 | 0 | 0 | 0 | 0 | 4.550 | 0 |
| LIVER2002842 | 0 | 0 | 0 | 11.062 | 0 | 0 | 0 |
| LIVER2003800 | 0 | 0 | 0 | 0 | 0 | 0 | 90.963 |
| LIVER2006006 | 0 | 0 | 0 | 0 | 0 | 4.928 | 0 |
| MAMGL1000032 | 0 | 0 | 0 | 0 | 0 | 0.558 | 0 |
| MAMGL1000035 | 0 | 0 | 0 | 0 | 0 | 0.698 | 0 |
| MAMGL1000100 | 0 | 0 | 0 | 1.711 | 0 | 0 | 0 |
| MAMGL1000173 | 0 | 0 | 0 | 3.072 | 0 | 0 | 0 |
| MESAN1000050 | 0 | 0 | 0 | 0 | 0 | 11.124 | 0 |
| MESAN1000080 | 0 | 0 | 0 | 0 | 0 | 9.893 | 0 |
| MESAN2000149 | 0 | 0 | 0 | 0 | 0 | 8.511 | 0 |
| MESAN2000267 | 5.974 | 0 | 0 | 0 | 0 | 4.256 | 0 |
| MESAN2000572 | 7.457 | 0 | 0 | 0 | 0 | 10.626 | 0 |
| MESAN2000608 | 0 | 0 | 0 | 0 | 0 | 2.724 | 0 |
| MESAN2002086 | 0 | 0 | 0 | 2.412 | 0 | 5.769 | 0 |
| MESAN2002940 | 0 | 0 | 0 | 0 | 0 | 11.019 | 0 |
| MESAN2003444 | 0 | 0 | 0 | 0 | 0 | 12.906 | 0 |
| MESAN2003622 | 0 | 0 | 0 | 6.964 | 0 | 0 | 0 |
| MESAN2005766 | 0 | 0 | 0 | 0 | 0 | 3.417 | 0 |
| MESAN2006743 | 0 | 0 | 0 | 0 | 0 | 13.355 | 0 |
| MESAN2006953 | 0 | 0 | 0 | 0 | 0 | 47.513 | 0 |
| MESAN2008334 | 0 | 0 | 0 | 47.634 | 0 | 0 | 0 |
| MESAN2009580 | 0 | 0 | 0 | 0 | 0 | 3.848 | 0 |
| MESAN2013284 | 0 | 0 | 0 | 0 | 0 | 4.255 | 0 |
| MESAN2013845 | 0 | 0 | 0 | 0 | 0 | 19.332 | 0 |
| MESAN2018576 | 0 | 0 | 0 | 60.977 | 0 | 0 | 0 |
| NB9N41000340 | 0 | 0 | 0 | 8.403 | 0 | 0 | 0 |
| NHNPC2000062 | 0 | 0 | 0 | 12.143 | 0 | 0 | 0 |
| NHNPC2000187 | 3.301 | 0 | 0 | 0 | 0 | 1.568 | 0 |
| NHNPC2000206 | 0 | 0 | 0 | 0 | 0 | 4.758 | 0 |
| NHNPC2001931 | 0 | 0 | 0 | 0 | 0 | 3.307 | 0 |
| NOVAR1000091 | 0 | 0 | 0 | 0 | 0 | 6.709 | 0 |
| NOVAR2000038 | 0 | 0 | 0 | 3.599 | 0 | 0 | 0 |
| NT2NE1000163 | 0 | 0 | 39.372 | 0 | 0 | 2.807 | 0 |
| NT2NE2000056 | 0 | 0 | 0 | 0 | 0 | 2.722 | 0 |
| NT2NE2000174 | 2.783 | 0 | 0 | 0 | 33.939 | 0 | 0 |
| NT2NE2000259 | 0 | 0 | 0 | 16.299 | 0 | 9.746 | 0 |
| NT2NE2000260 | 0 | 0 | 0 | 0 | 0 | 0.419 | 0 |
| NT2NE2000383 | 0 | 0 | 0 | 0 | 0 | 5.265 | 0 |
| NT2NE2000384 | 0 | 0 | 0 | 0 | 0 | 15.948 | 0 |
| NT2NE2000575 | 5.261 | 0 | 0 | 2.786 | 0 | 0 | 0 |
| NT2NE2000636 | 0 | 0 | 0 | 0 | 0 | 25.020 | 0 |
| NT2NE2000707 | 0 | 0 | 0 | 0 | 0 | 2.319 | 0 |
| NT2NE2000809 | 0 | 0 | 0 | 19.640 | 0 | 0 | 0 |
| NT2NE2000963 | 0 | 0 | 0 | 0 | 0 | 0.795 | 0 |
| NT2NE2001000 | 0 | 0 | 0 | 4.987 | 0 | 0 | 0 |
| NT2NE2001048 | 0 | 0 | 0 | 8.673 | 0 | 0 | 0 |
| NT2NE2005688 | 0 | 0 | 0 | 0 | 0 | 2.587 | 0 |
| NT2NE2006458 | 0 | 0 | 0 | 0 | 0 | 4.897 | 0 |
| NT2NE2010842 | 0 | 0 | 0 | 0 | 0 | 3.267 | 0 |
| NT2NE2014104 | 0 | 0 | 0 | 0 | 0 | 5.815 | 0 |
| NT2RI1000035 | 0 | 0 | 0 | 0 | 0 | 65.595 | 0 |
| NT2RI1000048 | 0 | 0 | 0 | 0 | 0 | 2.942 | 0 |
| NT2RI2000064 | 0 | 0 | 0 | 6.238 | 0 | 0 | 0 |
| NT2RI2000282 | 4.618 | 0 | 0 | 0 | 0 | 3.290 | 0 |
| NT2RI2000284 | 0 | 39.777 | 0 | 5.283 | 0 | 0 | 0 |
| NT2RI2000578 | 2.439 | 0 | 0 | 1.938 | 0 | 0 | 0 |
| NT2RI2000671 | 0 | 0 | 0 | 6.095 | 0 | 0 | 0 |
| NT2RI2000727 | 0 | 0 | 0 | 0 | 0 | 0.896 | 0 |
| NT2RI2000974 | 0 | 0 | 0 | 0 | 0 | 7.473 | 0 |
| NT2RI2001054 | 0 | 0 | 0 | 0 | 52.921 | 0 | 0 |
| NT2RI2001342 | 0 | 0 | 0 | 0 | 0 | 5.469 | 0 |
| NT2RI2001385 | 0 | 0 | 0 | 22.829 | 0 | 0 | 0 |
| NT2RI2001540 | 2.076 | 0 | 5.533 | 2.639 | 0 | 0.394 | 0 |
| NT2RI2002091 | 0.978 | 1.170 | 0 | 1.554 | 4.772 | 2.091 | 0 |
| NT2RI2002117 | 0 | 0 | 0 | 27.298 | 0 | 0 | 0 |
| NT2RI2002152 | 0 | 0 | 0 | 0 | 0 | 4.357 | 0 |
| NT2RI2002316 | 0 | 0 | 0 | 0 | 0 | 2.778 | 0 |
| NT2RI2002654 | 0 | 0 | 0 | 0 | 0 | 2.035 | 0 |
| NT2RI2002822 | 0 | 0 | 0 | 0 | 0 | 34.766 | 0 |
| NT2RI2002958 | 0 | 0 | 0 | 0 | 0 | 3.336 | 0 |
| NT2RI2003051 | 0 | 0 | 0 | 5.932 | 0 | 3.547 | 0 |
| NT2RI2003304 | 0 | 0 | 0 | 0 | 0 | 1.818 | 0 |
| NT2RI2003338 | 0 | 0 | 0 | 0 | 0 | 3.508 | 0 |
| NT2RI2003407 | 0 | 0 | 0 | 0 | 0 | 4.193 | 0 |
| NT2RI2003420 | 0 | 0 | 0 | 0 | 0 | 5.335 | 0 |
| NT2RI2003556 | 0 | 33.196 | 0 | 2.204 | 0 | 1.318 | 0 |
| NT2RI2003678 | 0 | 0 | 0 | 0 | 0 | 6.597 | 0 |
| NT2RI2003738 | 2.552 | 15.264 | 0 | 1.014 | 0 | 0.606 | 0 |
| NT2RI2003751 | 0 | 0 | 0 | 0 | 0 | 4.800 | 0 |
| NT2RI2003993 | 0 | 0 | 0 | 21.997 | 0 | 13.153 | 0 |
| NT2RI2004230 | 0 | 0 | 0 | 0 | 0 | 3.975 | 0 |
| NT2RI2004535 | 0 | 0 | 0 | 0 | 0 | 13.264 | 0 |
| NT2RI2004884 | 0 | 0 | 0 | 0 | 0 | 2.677 | 0 |
| NT2RI2005335 | 0 | 0 | 0 | 0 | 0 | 2.682 | 0 |
| NT2RI2005353 | 0 | 0 | 0 | 0 | 0 | 3.991 | 0 |
| NT2RI2005405 | 0 | 0 | 0 | 0 | 0 | 3.890 | 0 |
| NT2RI2005710 | 0 | 0 | 0 | 0 | 0 | 18.085 | 0 |
| NT2RI2005723 | 0 | 0 | 0 | 0 | 0 | 1.739 | 0 |
| NT2RI2005814 | 0 | 0 | 0 | 0 | 0 | 4.512 | 0 |
| NT2RI2005818 | 0 | 0 | 0 | 0 | 0 | 8.824 | 0 |
| NT2RI2006072 | 0 | 0 | 0 | 0 | 0 | 2.651 | 0 |
| NT2RI2007054 | 0 | 0 | 0 | 0 | 0 | 0 | 28.320 |
| NT2RI2007084 | 0 | 0 | 0 | 6.304 | 0 | 0 | 0 |
| NT2RI2007384 | 0 | 0 | 0 | 0 | 0 | 4.501 | 0 |
| NT2RI2007445 | 0 | 0 | 0 | 0 | 0 | 6.212 | 0 |
| NT2RI2007572 | 0 | 0 | 0 | 0 | 0 | 2.589 | 0 |
| NT2RI2007593 | 0 | 0 | 0 | 0 | 0 | 22.830 | 0 |
| NT2RI2007629 | 0 | 0 | 0 | 11.680 | 0 | 6.984 | 0 |
| NT2RI2007879 | 0 | 0 | 0 | 0 | 0 | 5.499 | 0 |
| NT2RI2008045 | 5.664 | 0 | 0 | 0 | 0 | 5.380 | 0 |
| NT2RI2008141 | 0 | 0 | 0 | 0 | 0 | 7.408 | 0 |
| NT2RI2008233 | 0 | 0 | 0 | 0 | 0 | 65.595 | 0 |
| NT2RI2008396 | 0 | 0 | 0 | 2.554 | 0 | 4.582 | 0 |
| NT2RI2008526 | 0 | 0 | 0 | 0 | 0 | 5.313 | 0 |
| NT2RI2008598 | 0 | 0 | 0 | 0 | 0 | 29.063 | 0 |
| NT2RI2008656 | 0 | 0 | 0 | 0 | 0 | 9.409 | 0 |
| NT2RI2008724 | 0 | 0 | 0 | 0 | 0 | 6.363 | 0 |
| NT2RI2008749 | 0 | 0 | 0 | 3.276 | 0 | 0 | 0 |
| NT2RI2008791 | 0 | 0 | 0 | 20.281 | 0 | 0 | 0 |
| NT2RI2009194 | 0 | 0 | 0 | 0 | 0 | 3.405 | 0 |
| NT2RI2009233 | 0 | 0 | 0 | 0 | 0 | 7.815 | 0 |
| NT2RI2009269 | 0 | 0 | 0 | 0 | 0 | 3.424 | 0 |
| NT2RI2009583 | 0 | 0 | 0 | 0 | 0 | 0 | 4.881 |
| NT2RI2012350 | 0 | 0 | 0 | 2.319 | 0 | 0 | 0 |
| NT2RI3007543 | 0 | 0 | 0 | 0 | 0 | 2.940 | 0 |
| NT2RP6000123 | 5.711 | 0 | 0 | 0 | 0 | 1.356 | 0 |
| NT2RP7000906 | 0 | 0 | 0 | 0 | 0 | 4.520 | 0 |
| NT2RP7002028 | 0 | 0 | 0 | 0 | 0 | 6.962 | 0 |
| NT2RP7003319 | 0 | 0 | 0 | 0 | 0 | 3.161 | 0 |
| NT2RP7003632 | 0 | 0 | 0 | 0 | 0 | 0 | 35.519 |
| NT2RP7003960 | 0 | 0 | 0 | 0 | 0 | 5.740 | 0 |
| NT2RP7004123 | 0 | 0 | 0 | 0 | 0 | 6.649 | 0 |
| NT2RP7004173 | 5.571 | 0 | 0 | 4.425 | 0 | 0 | 0 |
| NT2RP7004204 | 0 | 0 | 0 | 0 | 0 | 5.908 | 0 |
| NT2RP7004373 | 0 | 0 | 0 | 6.820 | 0 | 0 | 0 |
| NT2RP7004428 | 0 | 0 | 0 | 0 | 0 | 11.684 | 0 |
| NT2RP7004728 | 0 | 0 | 0 | 9.107 | 0 | 0 | 0 |
| NT2RP7004751 | 0 | 0 | 0 | 0 | 0 | 1.622 | 0 |
| NT2RP7004790 | 0 | 0 | 0 | 0 | 0 | 27.039 | 0 |
| NT2RP7004946 | 0 | 0 | 0 | 0 | 0 | 5.965 | 0 |
| NT2RP7006075 | 0 | 0 | 0 | 15.181 | 0 | 0 | 0 |
| NT2RP7006141 | 0 | 0 | 0 | 0 | 0 | 0 | 16.109 |
| NT2RP7006263 | 0 | 0 | 0 | 0 | 0 | 13.951 | 0 |
| NT2RP7006619 | 0 | 0 | 0 | 25.579 | 0 | 0 | 0 |
| NT2RP7006717 | 0 | 0 | 0 | 0 | 0 | 4.559 | 0 |
| NT2RP7006986 | 0 | 0 | 0 | 0 | 0 | 13.015 | 0 |
| NT2RP7007154 | 0 | 0 | 0 | 0 | 50.720 | 1.976 | 0 |
| NT2RP7007177 | 0 | 0 | 0 | 0 | 0 | 4.718 | 0 |
| NT2RP7007387 | 0 | 0 | 0 | 0 | 0 | 7.111 | 0 |
| NT2RP7008190 | 0 | 0 | 0 | 0 | 0 | 4.596 | 0 |
| NT2RP7009097 | 0 | 0 | 0 | 0 | 0 | 6.229 | 0 |
| NT2RP7009259 | 0 | 0 | 0 | 3.255 | 0 | 3.893 | 0 |
| NT2RP7009481 | 0 | 0 | 0 | 23.730 | 0 | 0 | 0 |
| NT2RP7014910 | 8.721 | 0 | 0 | 0 | 0 | 4.142 | 0 |
| NT2RP7015512 | 0 | 0 | 0 | 0 | 0 | 22.394 | 0 |
| NT2RP7019835 | 0 | 0 | 0 | 0 | 92.689 | 0 | 0 |
| NT2RP8001604 | 0 | 0 | 0 | 0 | 0 | 24.040 | 0 |
| NTONG1000047 | 0 | 0 | 0 | 34.814 | 0 | 0 | 0 |
| NTONG1000098 | 0 | 0 | 0 | 0 | 0 | 4.415 | 0 |
| NTONG2000499 | 0 | 0 | 0 | 0 | 0 | 31.978 | 0 |
| NTONG2000876 | 10.157 | 0 | 0 | 0 | 0 | 4.824 | 0 |
| NTONG2000977 | 0 | 0 | 0 | 0 | 0 | 3.406 | 0 |
| NTONG2001550 | 0 | 0 | 0 | 0 | 0 | 24.117 | 0 |
| NTONG2001567 | 0 | 0 | 0 | 0 | 0 | 1.062 | 0 |
| NTONG2003839 | 0 | 0 | 0 | 0 | 0 | 18.168 | 0 |
| NTONG2004614 | 0 | 0 | 0 | 34.313 | 0 | 0 | 0 |
| NTONG2008483 | 0 | 0 | 0 | 0 | 0 | 5.536 | 0 |
| OCBBF1000114 | 0 | 0 | 0 | 14.771 | 0 | 0 | 0 |
| OCBBF2000013 | 0 | 0 | 0 | 0 | 0 | 6.742 | 0 |
| OCBBF2000522 | 0 | 0 | 0 | 0 | 0 | 8.761 | 0 |
| OCBBF2000846 | 0 | 0 | 0 | 0 | 0 | 2.535 | 0 |
| OCBBF2001492 | 0 | 0 | 0 | 0 | 0 | 2.377 | 0 |
| OCBBF2004418 | 0 | 0 | 0 | 82.345 | 0 | 0 | 0 |
| OCBBF2005476 | 0 | 0 | 0 | 54.176 | 0 | 0 | 0 |
| OCBBF2007354 | 0 | 0 | 0 | 0 | 0 | 3.481 | 0 |
| OCBBF2007829 | 0 | 0 | 0 | 3.181 | 0 | 0 | 0 |
| OCBBF2007892 | 0 | 0 | 0 | 0 | 0 | 14.759 | 0 |
| OCBBF2009301 | 0 | 0 | 0 | 0 | 0 | 7.182 | 0 |
| OCBBF2009772 | 0 | 0 | 0 | 0 | 0 | 4.080 | 0 |
| OCBBF2011914 | 0 | 0 | 0 | 21.128 | 0 | 12.633 | 0 |
| OCBBF2014064 | 0 | 0 | 0 | 15.828 | 0 | 0 | 0 |
| OCBBF2014292 | 0 | 0 | 0 | 0 | 0 | 7.177 | 0 |
| OCBBF2016729 | 0 | 0 | 0 | 0 | 0 | 31.583 | 0 |
| OCBBF2018707 | 0 | 0 | 0 | 0 | 0 | 7.792 | 0 |
| OCBBF2018956 | 0 | 0 | 0 | 0 | 0 | 5.864 | 0 |
| OCBBF2035226 | 0 | 51.258 | 0 | 0 | 0 | 0 | 0 |
| OCBBF2038317 | 0 | 0 | 0 | 57.112 | 0 | 0 | 0 |
| PEBLM2000147 | 0 | 0 | 0 | 0 | 0 | 8.840 | 0 |
| PEBLM2000308 | 0 | 0 | 0 | 0 | 0 | 13.737 | 0 |
| PEBLM2000395 | 0 | 0 | 0 | 0 | 0 | 3.153 | 0 |
| PEBLM2007774 | 0 | 0 | 0 | 1.745 | 0 | 2.087 | 0 |
| PERIC2007068 | 0 | 0 | 0 | 0 | 0 | 5.346 | 0 |
| PLACE6000145 | 0 | 0 | 0 | 6.005 | 0 | 3.591 | 0 |
| PLACE6000263 | 0 | 0 | 0 | 26.429 | 0 | 5.268 | 0 |
| PLACE6000348 | 0 | 0 | 0 | 0 | 0 | 49.326 | 0 |
| PLACE6000379 | 0 | 0 | 0 | 0 | 0 | 2.448 | 0 |
| PLACE6001064 | 0 | 0 | 0 | 0 | 0 | 1.988 | 0 |
| PLACE6001923 | 0 | 0 | 0 | 0 | 0 | 21.777 | 0 |
| PLACE6002084 | 0 | 0 | 0 | 10.700 | 0 | 5.118 | 0 |
| PLACE6002668 | 0 | 0 | 0 | 62.541 | 0 | 0 | 0 |
| PLACE6004005 | 0 | 0 | 0 | 5.721 | 0 | 0 | 0 |
| PLACE6004578 | 0 | 0 | 0 | 50.277 | 0 | 0 | 0 |
| PLACE6004993 | 0 | 0 | 0 | 0 | 0 | 66.064 | 0 |
| PLACE6006042 | 0 | 0 | 0 | 0 | 0 | 18.861 | 0 |
| PLACE6006549 | 0 | 0 | 0 | 0 | 0 | 2.767 | 0 |
| PLACE6007925 | 0 | 0 | 0 | 58.717 | 0 | 0 | 0 |
| PLACE6008793 | 0 | 0 | 0 | 9.187 | 0 | 0 | 0 |
| PLACE6010077 | 0 | 0 | 0 | 0 | 0 | 9.050 | 0 |
| PLACE6018487 | 0 | 0 | 64.866 | 0 | 0 | 0 | 0 |
| PLACE6020145 | 0 | 0 | 0 | 0 | 0 | 29.076 | 0 |
| PLACE7004103 | 0 | 0 | 0 | 0 | 0 | 4.481 | 0 |
| PROST1000085 | 0 | 0 | 0 | 0 | 0 | 23.969 | 0 |
| PROST1000120 | 0 | 0 | 0 | 0 | 0 | 11.425 | 0 |
| PROST1000526 | 0 | 0 | 0 | 0 | 0 | 17.507 | 0 |
| PROST1000564 | 0 | 0 | 0 | 0 | 0 | 9.315 | 0 |
| PROST2000138 | 0 | 0 | 0 | 0 | 0 | 0.300 | 0 |
| PROST2000176 | 0 | 0 | 0 | 0 | 0 | 0 | 55.365 |
| PROST2000760 | 0 | 0 | 0 | 0 | 0 | 9.719 | 0 |
| PROST2001739 | 0 | 0 | 0 | 76.613 | 0 | 0 | 0 |
| PROST2002927 | 0 | 0 | 0 | 62.033 | 0 | 0 | 0 |
| PROST2003232 | 0 | 59.533 | 0 | 7.907 | 0 | 0 | 0 |
| PROST2003517 | 0 | 0 | 0 | 15.255 | 0 | 9.121 | 0 |
| PROST2004095 | 0 | 0 | 0 | 0 | 0 | 3.243 | 0 |
| PROST2006536 | 0 | 0 | 0 | 0 | 0 | 7.688 | 0 |
| PROST2006737 | 0 | 0 | 0 | 14.044 | 0 | 0 | 0 |
| PROST2007612 | 23.293 | 0 | 0 | 0 | 0 | 11.064 | 0 |
| PROST2008489 | 0 | 0 | 0 | 3.753 | 0 | 4.488 | 0 |
| PROST2008770 | 0 | 0 | 0 | 4.520 | 0 | 0 | 0 |
| PROST2012007 | 0 | 0 | 0 | 0 | 0 | 7.864 | 0 |
| PROST2015710 | 0 | 0 | 0 | 0 | 0 | 42.668 | 0 |
| PROST2017203 | 0 | 0 | 0 | 7.524 | 0 | 0 | 0 |
| PROST2017692 | 0 | 0 | 0 | 0 | 0 | 2.553 | 0 |
| PUAEN1000057 | 0 | 0 | 0 | 11.896 | 0 | 0 | 0 |
| PUAEN1000065 | 0 | 0 | 0 | 11.643 | 0 | 0 | 0 |
| PUAEN1000161 | 0 | 0 | 0 | 0 | 0 | 19.985 | 0 |
| PUAEN1000322 | 9.325 | 0 | 0 | 0 | 0 | 4.429 | 0 |
| PUAEN2000374 | 2.335 | 0 | 0 | 0 | 0 | 1.109 | 0 |
| PUAEN2000497 | 0 | 0 | 0 | 0 | 0 | 8.932 | 0 |
| PUAEN2000535 | 0 | 0 | 0 | 0 | 0 | 2.786 | 0 |
| PUAEN2001882 | 0 | 0 | 0 | 0 | 0 | 38.043 | 0 |
| PUAEN2007044 | 0 | 0 | 0 | 8.305 | 0 | 0 | 0 |
| SALGL1000157 | 0 | 0 | 0 | 1.507 | 0 | 0 | 0 |
| SKMUS1000138 | 0 | 0 | 56.007 | 0 | 0 | 0 | 0 |
| SKMUS2000020 | 0 | 0 | 0 | 21.341 | 0 | 0 | 0 |
| SKMUS2000780 | 0 | 0 | 0 | 0 | 0 | 32.962 | 0 |
| SKMUS2000931 | 0 | 0 | 0 | 0 | 0 | 3.771 | 0 |
| SKMUS2000933 | 0 | 0 | 0 | 35.951 | 0 | 0 | 0 |
| SKMUS2001454 | 0 | 29.449 | 0 | 0 | 0 | 1.169 | 0 |
| SKNMC1000137 | 0 | 0 | 0 | 24.569 | 0 | 0 | 0 |
| SKNMC2000097 | 6.502 | 38.890 | 0 | 2.583 | 0 | 3.088 | 0 |
| SKNMC2000635 | 0 | 0 | 0 | 2.079 | 0 | 5.593 | 0 |
| SKNMC2000649 | 0 | 0 | 0 | 0 | 0 | 6.322 | 0 |
| SKNMC2000698 | 0 | 0 | 0 | 0 | 0 | 7.156 | 0 |
| SKNMC2000877 | 0 | 0 | 0 | 0 | 0 | 8.211 | 0 |
| SKNMC2001324 | 0 | 0 | 0 | 37.417 | 0 | 0 | 0 |
| SKNMC2001503 | 0 | 0 | 0 | 0 | 0 | 10.744 | 0 |
| SKNSH1000101 | 0 | 56.047 | 0 | 0 | 0 | 0 | 0 |
| SKNSH2000319 | 0 | 0 | 0 | 0 | 0 | 24.846 | 0 |
| SKNSH2001875 | 0 | 0 | 0 | 37.625 | 0 | 0 | 0 |
| SKNSH2002325 | 0 | 0 | 0 | 0 | 0 | 13.226 | 0 |
| SKNSH2002768 | 0 | 0 | 0 | 13.719 | 0 | 8.203 | 0 |
| SKNSH2008940 | 0 | 0 | 0 | 0 | 0 | 6.644 | 0 |
| SMINT1000117 | 0 | 0 | 0 | 7.621 | 0 | 0 | 0 |
| SMINT2000441 | 0 | 0 | 0 | 2.615 | 0 | 0 | 0 |
| SMINT2000468 | 0 | 0 | 0 | 0 | 0 | 15.854 | 0 |
| SMINT2000602 | 0 | 0 | 53.428 | 0 | 0 | 0 | 0 |
| SMINT2000659 | 0 | 0 | 0 | 1.610 | 0 | 0 | 0 |
| SMINT2002976 | 0 | 0 | 0 | 30.224 | 0 | 0 | 0 |
| SMINT2003074 | 9.999 | 0 | 0 | 7.943 | 0 | 0 | 0 |
| SMINT2003169 | 0 | 0 | 0 | 8.176 | 0 | 1.630 | 0 |
| SMINT2003340 | 0 | 0 | 0 | 17.024 | 0 | 0 | 0 |
| SMINT2004023 | 0 | 0 | 0 | 8.837 | 0 | 0 | 0 |
| SMINT2004144 | 0 | 0 | 0 | 0 | 0 | 0 | 9.901 |
| SMINT2004872 | 0 | 0 | 0 | 24.508 | 0 | 0 | 0 |
| SMINT2005368 | 0 | 0 | 0 | 6.805 | 0 | 4.069 | 0 |
| SMINT2005688 | 0 | 0 | 0 | 28.923 | 0 | 0 | 0 |
| SMINT2008960 | 4.990 | 0 | 0 | 3.964 | 0 | 0 | 0 |
| SMINT2011567 | 0 | 0 | 0 | 0 | 0 | 32.872 | 0 |
| SPLEN1000106 | 0 | 0 | 0 | 0 | 0 | 8.064 | 0 |
| SPLEN1000116 | 0 | 0 | 0 | 5.735 | 0 | 1.715 | 0 |
| SPLEN2000210 | 0 | 0 | 0 | 76.909 | 0 | 0 | 0 |
| SPLEN2000255 | 0 | 0 | 0 | 8.899 | 0 | 0 | 0 |
| SPLEN2000310 | 0 | 0 | 0 | 76.909 | 0 | 0 | 0 |
| SPLEN2000348 | 0 | 0 | 0 | 16.209 | 0 | 0 | 0 |
| SPLEN2000414 | 0 | 0 | 0 | 76.909 | 0 | 0 | 0 |
| SPLEN2000505 | 0 | 0 | 0 | 2.442 | 0 | 0 | 0 |
| SPLEN2000874 | 0 | 0 | 47.377 | 0 | 0 | 0 | 10.632 |
| SPLEN2002477 | 0 | 0 | 0 | 9.415 | 0 | 0 | 0 |
| SPLEN2004555 | 0 | 0 | 0 | 0 | 0 | 3.688 | 0 |
| SPLEN2006122 | 0 | 0 | 0 | 0 | 0 | 2.918 | 0 |
| SPLEN2006133 | 0 | 0 | 0 | 5.497 | 0 | 0 | 0 |
| SPLEN2006374 | 0 | 0 | 0 | 17.614 | 0 | 0 | 0 |
| SPLEN2008496 | 0 | 0 | 0 | 0 | 0 | 26.824 | 0 |
| SPLEN2009512 | 0 | 0 | 0 | 0 | 0 | 57.379 | 0 |
| SPLEN2010195 | 0 | 0 | 0 | 0 | 34.507 | 0 | 0 |
| SPLEN2015310 | 4.181 | 50.011 | 0 | 0 | 0 | 0 | 0 |
| SPLEN2017620 | 0 | 0 | 0 | 0 | 0 | 53.276 | 0 |
| SPLEN2017918 | 0 | 0 | 0 | 0 | 0 | 3.159 | 0 |
| SPLEN2019405 | 0 | 0 | 0 | 8.298 | 0 | 0 | 0 |
| SPLEN2019446 | 0 | 0 | 0 | 60.294 | 0 | 0 | 0 |
| SPLEN2019774 | 0 | 0 | 0 | 51.478 | 0 | 0 | 0 |
| SPLEN2031424 | 0 | 0 | 0 | 44.123 | 0 | 0 | 0 |
| SPLEN2031547 | 0 | 0 | 0 | 0 | 0 | 5.455 | 0 |
| SPLEN2032157 | 0 | 0 | 0 | 33.110 | 0 | 0 | 0 |
| SPLEN2032356 | 0 | 0 | 0 | 0 | 0 | 66.573 | 0 |
| SPLEN2039379 | 0 | 0 | 0 | 16.781 | 0 | 0 | 0 |
| SPLEN2042535 | 0 | 0 | 0 | 0 | 0 | 24.667 | 0 |
| STOMA1000047 | 0 | 0 | 0 | 18.360 | 0 | 0 | 0 |
| STOMA2006780 | 0 | 0 | 0 | 0 | 0 | 30.095 | 0 |
| SYNOV2001144 | 0 | 0 | 0 | 0 | 0 | 4.900 | 0 |
| SYNOV2001239 | 0 | 0 | 0 | 5.454 | 0 | 0 | 0 |
| SYNOV2001374 | 0 | 0 | 0 | 10.613 | 0 | 0 | 0 |
| SYNOV2009172 | 0 | 45.405 | 0 | 3.015 | 0 | 0 | 0 |
| TBAES2009387 | 0 | 0 | 0 | 3.097 | 0 | 0 | 0 |
| TESTI1000101 | 0 | 0 | 0 | 0 | 0 | 29.680 | 0 |
| TESTI2001099 | 0 | 0 | 0 | 0 | 0 | 1.698 | 0 |
| TESTI2001153 | 0 | 0 | 0 | 2.307 | 0 | 0 | 0 |
| TESTI2001269 | 0 | 0 | 0 | 0 | 0 | 5.674 | 0 |
| TESTI2001829 | 0 | 0 | 0 | 4.920 | 0 | 0 | 0 |
| TESTI2002149 | 0 | 0 | 0 | 0 | 0 | 5.795 | 0 |
| TESTI2003071 | 0 | 0 | 0 | 0 | 0 | 12.088 | 0 |
| TESTI2004031 | 2.924 | 0 | 0 | 2.323 | 0 | 2.778 | 0 |
| TESTI2004737 | 0 | 0 | 0 | 10.264 | 0 | 0 | 0 |
| TESTI2006051 | 0 | 0 | 41.159 | 0 | 0 | 0 | 0 |
| TESTI2006588 | 0 | 0 | 0 | 6.274 | 0 | 0 | 0 |
| TESTI2006872 | 0 | 0 | 0 | 0 | 0 | 19.038 | 0 |
| TESTI2007311 | 0 | 0 | 0 | 0 | 0 | 13.329 | 0 |
| TESTI2007998 | 0 | 0 | 0 | 0 | 0 | 5.478 | 0 |
| TESTI2008240 | 1.824 | 0 | 0 | 5.796 | 0 | 1.733 | 0 |
| TESTI2009577 | 0 | 0 | 0 | 0 | 0 | 6.123 | 0 |
| TESTI2009987 | 0 | 0 | 0 | 0 | 0 | 17.673 | 0 |
| TESTI2012778 | 2.696 | 0 | 0 | 0 | 0 | 1.920 | 0 |
| TESTI2013295 | 0 | 0 | 0 | 0 | 0 | 9.228 | 0 |
| TESTI2015213 | 3.744 | 0 | 0 | 0 | 0 | 1.778 | 0 |
| TESTI2017954 | 0 | 0 | 0 | 0 | 0 | 2.295 | 0 |
| TESTI2025422 | 0 | 0 | 0 | 28.764 | 0 | 0 | 0 |
| TESTI2026525 | 0 | 0 | 0 | 0 | 0 | 15.074 | 0 |
| TESTI2026647 | 0 | 0 | 0 | 68.465 | 0 | 0 | 0 |
| TESTI2027271 | 0 | 0 | 0 | 30.596 | 0 | 0 | 0 |
| TESTI2033441 | 0 | 0 | 0 | 6.358 | 0 | 0 | 0 |
| TESTI2046456 | 0 | 0 | 0 | 0 | 0 | 3.207 | 0 |
| TESTI4002799 | 0 | 0 | 0 | 0 | 0 | 1.530 | 0 |
| TESTI4013441 | 0 | 0 | 0 | 0.909 | 0 | 2.174 | 0 |
| TESTI4037156 | 0 | 0 | 0 | 0 | 0 | 1.917 | 0 |
| TESTI4043140 | 0 | 0 | 0 | 16.066 | 0 | 19.213 | 0 |
| THYMU1000002 | 0 | 0 | 0 | 0 | 0 | 2.051 | 0 |
| THYMU1000016 | 0 | 0 | 0 | 0 | 0 | 1.339 | 0 |
| THYMU1000374 | 0 | 0 | 0 | 8.679 | 0 | 0 | 0 |
| THYMU1000428 | 0 | 49.596 | 0 | 6.587 | 0 | 0 | 0 |
| THYMU2000382 | 0 | 0 | 0 | 0 | 0 | 4.200 | 0 |
| THYMU2000436 | 0 | 0 | 0 | 5.339 | 0 | 0 | 0 |
| THYMU2002023 | 0 | 0 | 0 | 77.651 | 0 | 0 | 0 |
| THYMU2002583 | 0 | 0 | 0 | 0 | 0 | 1.796 | 0 |
| THYMU2003419 | 0 | 0 | 0 | 2.910 | 0 | 0 | 0 |
| THYMU2003440 | 0 | 0 | 0 | 0 | 0 | 80.601 | 0 |
| THYMU2003542 | 0 | 0 | 0 | 12.522 | 0 | 0 | 0 |
| THYMU2003891 | 0 | 25.462 | 0 | 0 | 0 | 0 | 0 |
| THYMU2004344 | 0 | 0 | 0 | 7.402 | 0 | 0 | 0 |
| THYMU2005546 | 0 | 0 | 0 | 0 | 48.649 | 1.895 | 0 |
| THYMU2009658 | 2.555 | 30.564 | 0 | 4.059 | 0 | 1.214 | 0 |
| THYMU2010161 | 0 | 0 | 0 | 87.420 | 0 | 0 | 0 |
| THYMU2013136 | 0 | 0 | 0 | 0 | 0 | 2.834 | 0 |
| THYMU2013916 | 0 | 0 | 0 | 0 | 0 | 3.843 | 0 |
| THYMU2014067 | 0 | 0 | 0 | 87.420 | 0 | 0 | 0 |
| THYMU2015762 | 7.231 | 0 | 0 | 0 | 0 | 0 | 43.251 |
| THYMU2018126 | 0 | 63.479 | 0 | 0 | 0 | 0 | 0 |
| THYMU2033308 | 0 | 0 | 0 | 0 | 0 | 48.382 | 0 |
| THYMU2035735 | 0 | 0 | 0 | 0 | 0 | 4.571 | 0 |
| THYMU2039334 | 0 | 99.053 | 0 | 0 | 0 | 0 | 0 |
| THYMU3034671 | 0 | 0 | 0 | 13.819 | 0 | 0 | 0 |
| TKIDN1000001 | 0 | 0 | 0 | 0 | 0 | 38.560 | 0 |
| TKIDN2002738 | 0 | 0 | 40.764 | 0 | 0 | 0 | 0 |
| TKIDN2015423 | 0 | 0 | 0 | 0 | 0 | 2.206 | 0 |
| TLIVE2002046 | 0 | 0 | 0 | 10.517 | 0 | 0 | 0 |
| TRACH1000063 | 0 | 0 | 0 | 12.462 | 0 | 0 | 0 |
| TRACH1000181 | 0 | 0 | 0 | 0 | 0 | 16.414 | 0 |
| TRACH1000205 | 0 | 0 | 0 | 0 | 0 | 13.635 | 0 |
| TRACH2000079 | 3.951 | 0 | 0 | 3.139 | 0 | 9.384 | 0 |
| TRACH2000248 | 0 | 0 | 0 | 8.085 | 0 | 0 | 0 |
| TRACH2000321 | 0 | 0 | 0 | 5.694 | 0 | 1.702 | 0 |
| TRACH2000472 | 0 | 0 | 0 | 4.948 | 0 | 0 | 0 |
| TRACH2000972 | 0 | 0 | 0 | 10.302 | 0 | 0 | 0 |
| TRACH2001289 | 0 | 0 | 0 | 1.969 | 0 | 1.178 | 0 |
| TRACH2001432 | 0 | 0 | 0 | 0 | 0 | 11.562 | 0 |
| TRACH2001463 | 0 | 0 | 0 | 0 | 0 | 10.608 | 0 |
| TRACH2001523 | 0 | 0 | 0 | 9.851 | 0 | 5.890 | 0 |
| TRACH2001607 | 0 | 0 | 0 | 0 | 0 | 3.480 | 0 |
| TRACH2002092 | 0 | 0 | 0 | 16.265 | 0 | 0 | 0 |
| TRACH2002333 | 0 | 0 | 0 | 0 | 0 | 50.930 | 0 |
| TRACH2002537 | 0 | 0 | 0 | 0 | 0 | 3.213 | 0 |
| TRACH2003323 | 0 | 0 | 0 | 10.312 | 0 | 0 | 0 |
| TRACH2004499 | 0 | 0 | 0 | 0 | 0 | 10.181 | 0 |
| TRACH2007399 | 0 | 0 | 0 | 2.729 | 41.897 | 1.632 | 0 |
| TRACH2007969 | 0 | 0 | 0 | 29.409 | 0 | 0 | 0 |
| TRACH2012497 | 0 | 0 | 0 | 75.015 | 0 | 0 | 0 |
| TRACH2014077 | 0 | 0 | 0 | 0 | 0 | 11.785 | 0 |
| TRACH2014442 | 0 | 0 | 0 | 0 | 0 | 15.600 | 0 |
| TRACH2015823 | 0 | 0 | 0 | 0 | 0 | 7.579 | 0 |
| TRACH2015824 | 0 | 0 | 0 | 26.932 | 0 | 0 | 0 |
| TRACH2016835 | 0 | 0 | 0 | 0 | 0 | 63.939 | 0 |
| TRACH2018317 | 0 | 0 | 0 | 0 | 0 | 20.300 | 0 |
| TRACH2018446 | 0 | 0 | 0 | 0 | 0 | 14.489 | 0 |
| TRACH2025535 | 0 | 0 | 0 | 3.364 | 0 | 0 | 0 |
| TRACH3000692 | 0 | 0 | 0 | 0 | 0 | 16.238 | 0 |
| TRACH3004721 | 0 | 0 | 0 | 0 | 0 | 20.144 | 0 |
| TRACH3007625 | 8.574 | 0 | 0 | 6.811 | 0 | 4.073 | 0 |
| UMVEN2000133 | 0 | 0 | 0 | 0 | 0 | 2.031 | 0 |
| UMVEN2000354 | 0 | 0 | 0 | 0 | 0 | 5.708 | 0 |
| UMVEN2000453 | 0 | 0 | 0 | 3.025 | 0 | 0 | 0 |
| UTERU2000095 | 0 | 0 | 0 | 0 | 36.813 | 0 | 0 |
| UTERU2000263 | 0 | 0 | 0 | 0 | 0 | 3.550 | 0 |
| UTERU2000424 | 0 | 0 | 0 | 4.921 | 0 | 2.943 | 0 |
| UTERU2000541 | 0 | 0 | 0 | 36.544 | 0 | 0 | 0 |
| UTERU2001607 | 0 | 0 | 0 | 0 | 0 | 5.111 | 0 |
| UTERU2002662 | 0 | 0 | 0 | 0 | 0 | 6.164 | 0 |
| UTERU2004037 | 15.993 | 0 | 0 | 12.704 | 0 | 0 | 0 |
| UTERU2004197 | 0 | 0 | 0 | 0 | 0 | 6.967 | 0 |
| UTERU2005593 | 0 | 0 | 0 | 0 | 0 | 7.777 | 0 |
| UTERU2005621 | 0 | 0 | 0 | 0 | 0 | 7.810 | 0 |
| UTERU2007724 | 0 | 0 | 0 | 38.068 | 0 | 0 | 0 |
| UTERU2008085 | 1.976 | 0 | 0 | 1.570 | 0 | 0.313 | 1.970 |
| UTERU2010417 | 0 | 27.509 | 0 | 0 | 0 | 6.554 | 0 |
| UTERU2012252 | 0 | 0 | 0 | 0 | 0 | 74.391 | 0 |
| UTERU2013586 | 0 | 0 | 0 | 0 | 0 | 22.827 | 0 |
| UTERU2015062 | 0 | 0 | 0 | 82.930 | 0 | 0 | 0 |
| UTERU2015108 | 0 | 0 | 0 | 0 | 0 | 21.862 | 0 |
| UTERU2015653 | 0 | 0 | 0 | 0 | 51.890 | 2.021 | 0 |
| UTERU2024969 | 0 | 0 | 0 | 0 | 0 | 11.126 | 0 |

[0670] Genes whose expression levels were negligibly low in each of the above-described libraries are shown with their clone names below.

[0671] 3NB691000085, 3NB691000113, 3NB691000116, 3NB691000129, 3NB691000173, 3NB691000191, 3NB692000012, 3NB692000029, 3NB692000102, 3NB692000154, 3NB692000276, 3NB692000305, 3NB692000429, 3NB692000484, 3NB692000529, 3NB692000545, 3NB692000973, 3NB692001002, 3NB692001034, 3NB692001040, 3NB692001123, 3NB692001267, 3NB692001288, 3NB692001334, 3NB692001339, 3NB692001349, 3NB692001366, 3NB692001408, 3NB692001433, 3NB692001442, 3NB692001459, 3NB692001471, 3NB692001496, 3NB692001501, 3NB692001507, 3NB692001511, 3NB692001519, 3NB692001520, 3NB692001528, 3NB692001548, 3NB692001557, 3NB692001637, 3NB692001719, 3NB692001853, 3NB692001861, 3NB692002051, 3NB692002365, 3NB692002685, 3NB692002806, 3NB692003538, 3NB692004045, 3NB692004724, 3NB692005439, 3NB692006952, 3NB692008178, 3NB692008729, BGGI11000123, BGGI11000193, BGGI11000285, BGGI12000022, BGGI12000067, BGGI12000161, BGGI12000533, BGGI12000544, BGGI12000684, BGGI12000693, BGGI12000839, BGGI12001002, BGGI12001075, BGGI12001241, BGGI12001247, BGGI12001682, BGGI12001714, BLADE1000176, BLADE2000181, BLADE2000256, BLADE2000340, BLADE2000389, BLADE2000463, BLADE2000492, BLADE2000579, BLADE2000640, BLADE2000866, BLADE2000938, BLADE2001031, BLADE2001133, BLADE2001138, BLADE2001141, BLADE2001371, BLADE2001458, BLADE2001575, BLADE2001753, BLADE2001935, BLADE2001940, BLADE2001987, BLADE2002073, BLADE2002310, BLADE2002730, BLADE2002738, BLADE2002744, BLADE2002782, BLADE2002947, BLADE2002972, BLADE2003474, BLADE2003916, BLADE2004089, BLADE2004345, BLADE2004389, BLADE2004462, BLADE2004628, BLADE2004670, BLADE2004722, BLADE2004849, BLADE2005036, BLADE2005038, BLADE2005229, BLADE2005459, BLADE2005792, BLADE2006043, BLADE2006412, BLADE2006415, BLADE2006607, BLADE2006826, BLADE2006849, BLADE2006947, BLADE2007033, BLADE2007043, BLADE2007589, BLADE2007666, BLADE2007722, BLADE2007735, BLADE2007744, BLADE2007799, BLADE2007923, BLADE2007935, BLADE2007958, BLADE2008281, BLADE2008398, BLADE2008454, BLADE2008461, BLADE2008479, BLADE2008539, BLADE2008809, BLADE2008995, BLADE2009452, BLADE2009479, BLADE2009593, BNGH41000098, BNGH41000104, BNGH41000118, BNGH41000137, BNGH41000153, BNGH41000169, BNGH41000177, BNGH41000216, BNGH41000235, BNGH42000130, BNGH42000132, BNGH42000405, BNGH42000532, BNGH42000675, BNGH42000739, BNGH42000791, BNGH42000815, BNGH42000994, BNGH42001247, BNGH42001406, BNGH42001576, BNGH42001724, BNGH42002168, BNGH42002244, BNGH42002387, BNGH42002487, BNGH42002489, BNGH42003529, BNGH42003570, BNGH42003641, BNGH42004076, BNGH42004291, BNGH42004538, BNGH42004679, BNGH42005017, BNGH42005235, BNGH42005504, BNGH42005968, BNGH42006135, BNGH42006226, BNGH42006234, BNGH42007037, BNGH42007366, BNGH42007594, BNGH42007798, BNGH42008199, BNGH42008510, BNGH42008603, BNGH42008649, BNGH42008743, BNGH42008832, BNGH42008850, BNGH42008943, BNGH42009021, BNGH42009025, BRACE1000020, BRACE1000042, BRACE1000047, BRACE1000051, BRACE1000065, BRACE1000070, BRACE1000073, BRACE1000084, BRACE1000087, BRACE1000092, BRACE1000093, BRACE1000101, BRACE1000114, BRACE1000115, BRACE1000124, BRACE1000131, BRACE1000159, BRACE1000166, BRACE1000169, BRACE1000186, BRACE1000187, BRACE1000239, BRACE1000258, BRACE1000451, BRACE1000475, BRACE1000572, BRACE2000061, BRACE2000077, BRACE2000078, BRACE2000100, BRACE2000109, BRACE2000141, BRACE2000183, BRACE2000229, BRACE2000232, BRACE2000245, BRACE2000256, BRACE2000266, BRACE2000267, BRACE2000280, BRACE2000300, BRACE2000331, BRACE2000332, BRACE2000347, BRACE2000351, BRACE2000368, BRACE2000392, BRACE2000441, BRACE2000487, BRACE2000489, BRACE2000505, BRACE2000525, BRACE2000526, BRACE2000531, BRACE2000545, BRACE2000553, BRACE2000565, BRACE2000577, BRACE2000640, BRACE2000650, BRACE2000677, BRACE2000698, BRACE2000718, BRACE2000733, BRACE2000743, BRACE2000750, BRACE2000753, BRACE2000815, BRACE2000864, BRACE2000885, BRACE2000893, BRACE2000905, BRACE2000936, BRACE2000947, BRACE2000965, BRACE2000969, BRACE2000975, BRACE2000988, BRACE2001017, BRACE2001065, BRACE2001070, BRACE2001094, BRACE2001107, BRACE2001117, BRACE2001154, BRACE2001188, BRACE2001191, BRACE2001197, BRACE2001236, BRACE2001239, BRACE2001269, BRACE2001312, BRACE2001313, BRACE2001330, BRACE2001340, BRACE2001352, BRACE2001353, BRACE2001374, BRACE2001375, BRACE2001423, BRACE2001424, BRACE2001445, BRACE2001453, BRACE2001455, BRACE2001477, BRACE2001492, BRACE2001496, BRACE2001497, BRACE2001508, BRACE2001534, BRACE2001543, BRACE2001564, BRACE2001588, BRACE2001607, BRACE2001626, BRACE2001673, BRACE2001677, BRACE2001705, BRACE2001709, BRACE2001711, BRACE2001726, BRACE2001733, BRACE2001737, BRACE2001742, BRACE2001777, BRACE2001779, BRACE2001834, BRACE2001855, BRACE2001859, BRACE2001865, BRACE2001872, BRACE2001881, BRACE2001892, BRACE2001898, BRACE2001923, BRACE2001942, BRACE2001944, BRACE2001954, BRACE2001971, BRACE2001972, BRACE2001973, BRACE2002026, BRACE2002034, BRACE2002050, BRACE2002081, BRACE2002091, BRACE2002139, BRACE2002142, BRACE2002151, BRACE2002157, BRACE2002176, BRACE2002202, BRACE2002206, BRACE2002227, BRACE2002260, BRACE2002297, BRACE2002304, BRACE2002356, BRACE2002394, BRACE2002409, BRACE2002431, BRACE2002444, BRACE2002458, BRACE2002467, BRACE2002468, BRACE2002478, BRACE2002495, BRACE2002582, BRACE2002585, BRACE2002589, BRACE2002590, BRACE2002606, BRACE2002613, BRACE2002614, BRACE2002617, BRACE2002623, BRACE2002635, BRACE2002649, BRACE2002661, BRACE2002676, BRACE2002677, BRACE2002682, BRACE2002685, BRACE2002695, BRACE2002707, BRACE2002736, BRACE2002755, BRACE2002762, BRACE2002772, BRACE2002792, BRACE2002796, BRACE2002803, BRACE2002807, BRACE2002812, BRACE2002834, BRACE2002849, BRACE2002857, BRACE2002861, BRACE2002884, BRACE2002896, BRACE2002948, BRACE2003037, BRACE2003078, BRACE2003097, BRACE2003110, BRACE2003168, BRACE2003172, BRACE2003199, BRACE2003210, BRACE2003269, BRACE2003285, BRACE2003304, BRACE2003319, BRACE2003398, BRACE2003420, BRACE2003428, BRACE2003431, BRACE2003512, BRACE2003516, BRACE2003527, BRACE2003539, BRACE2003540, BRACE2003594, BRACE2003598, BRACE2003609, BRACE2003614, BRACE2003639, BRACE2003700, BRACE2003713, BRACE2003766, BRACE2003788, BRACE2003800, BRACE2003802, BRACE2003825, BRACE2003845, BRACE2003846, BRACE2003847, BRACE2003848, BRACE2003873, BRACE2003885, BRACE2003887, BRACE2003892, BRACE2003904, BRACE2003905, BRACE2003928, BRACE2003944, BRACE2003954, BRACE2003982, BRACE2003987, BRACE2005034, BRACE2005047, BRACE2005063, BRACE2005083, BRACE2005087, BRACE2005090, BRACE2005099, BRACE2005118, BRACE2005124, BRACE2005138, BRACE2005160, BRACE2005169, BRACE2005189, BRACE2005193, BRACE2005196, BRACE2005198, BRACE2005216, BRACE2005231, BRACE2005243, BRACE2005251, BRACE2005253, BRACE2005290, BRACE2005298, BRACE2005328, BRACE2005329, BRACE2005337, BRACE2005348, BRACE2005363, BRACE2005395, BRACE2005408, BRACE2005433, BRACE2005448, BRACE2005450, BRACE2005453, BRACE2005457, BRACE2005460, BRACE2005489, BRACE2005518, BRACE2005556, BRACE2005562, BRACE2005624, BRACE2005642, BRACE2005661, BRACE2005667, BRACE2005681, BRACE2005719, BRACE2005731, BRACE2005742, BRACE2005762, BRACE2005773, BRACE2005787, BRACE2005795, BRACE2005800, BRACE2005858, BRACE2005869, BRACE2005875, BRACE2005881, BRACE2005898, BRACE2005904, BRACE2005906, BRACE2005907, BRACE2005911, BRACE2005937, BRACE2005949, BRACE2005981, BRACE2005991, BRACE2006055, BRACE2006072, BRACE2006075, BRACE2006084, BRACE2006089, BRACE2006102, BRACE2006105, BRACE2006122, BRACE2006137, BRACE2006143, BRACE2006162, BRACE2006167, BRACE2006174, BRACE2006240, BRACE2006245, BRACE2006249, BRACE2006258, BRACE2006264, BRACE2006274, BRACE2006281, BRACE2006298, BRACE2006319, BRACE2006344, BRACE2006354, BRACE2006363, BRACE2006378, BRACE2006380, BRACE2006393, BRACE2006397, BRACE2006413, BRACE2006417, BRACE2006453, BRACE2006459, BRACE2006488, BRACE2006514, BRACE2006534, BRACE2006540, BRACE2006547, BRACE2006564, BRACE2006587, BRACE2006598, BRACE2006636, BRACE2006685, BRACE2006703, BRACE2006743, BRACE2006753, BRACE2006783, BRACE2006821, BRACE2006833, BRACE2006859, BRACE2006900, BRACE2006909, BRACE2006911, BRACE2006924, BRACE2006935, BRACE2006937, BRACE2006944, BRACE2006951, BRACE2006982, BRACE2006986, BRACE2007013, BRACE2007064, BRACE2007068, BRACE2007087, BRACE2007109, BRACE2007138, BRACE2007174, BRACE2007197, BRACE2007201, BRACE2007203, BRACE2007232, BRACE2007254, BRACE2007262, BRACE2007274, BRACE2007281, BRACE2007295, BRACE2007358, BRACE2007396, BRACE2007398, BRACE2007401, BRACE2007411, BRACE2007447, BRACE2007477, BRACE2007502, BRACE2007503, BRACE2007518, BRACE2007522, BRACE2007527, BRACE2007538, BRACE2007563, BRACE2007567, BRACE2007577, BRACE2007621, BRACE2007640, BRACE2007641, BRACE2007646, BRACE2007663, BRACE2007682, BRACE2007685, BRACE2007727, BRACE2007749, BRACE2007760, BRACE2007761, BRACE2007764, BRACE2007767, BRACE2007768, BRACE2007769, BRACE2007784, BRACE2007786, BRACE2007798, BRACE2007799, BRACE2007801, BRACE2007832, BRACE2007836, BRACE2007868, BRACE2007882, BRACE2007888, BRACE2007902, BRACE2007920, BRACE2007937, BRACE2007944, BRACE2007952, BRACE2008008, BRACE2008015, BRACE2008021, BRACE2008102, BRACE2008114, BRACE2008144, BRACE2008172, BRACE2008216, BRACE2008218, BRACE2008251, BRACE2008276, BRACE2008295, BRACE2008308, BRACE2008336, BRACE2008358, BRACE2008361, BRACE2008380, BRACE2008385, BRACE2008401, BRACE2008410, BRACE2008420, BRACE2008443, BRACE2008473, BRACE2008480, BRACE2008481, BRACE2008488, BRACE2008495, BRACE2008500, BRACE2008553, BRACE2008594, BRACE2008604, BRACE2008615, BRACE2008622, BRACE2008629, BRACE2008655, BRACE2008656, BRACE2008708, BRACE2008710, BRACE2008754, BRACE2008797, BRACE2008847, BRACE2008857, BRACE2008861, BRACE2008867, BRACE2008883, BRACE2008917, BRACE2008919, BRACE2008941, BRACE2008948, BRACE2008960, BRACE2008999, BRACE2009014, BRACE2009016, BRACE2009031, BRACE2009037, BRACE2009044, BRACE2009045, BRACE2009053, BRACE2009122, BRACE2009131, BRACE2009185, BRACE2009188, BRACE2009212, BRACE2009221, BRACE2009235, BRACE2009238, BRACE2009255, BRACE2009270, BRACE2009272, BRACE2009274, BRACE2009275, BRACE2009293, BRACE2009307, BRACE2009311, BRACE2009318, BRACE2009323, BRACE2009366, BRACE2009421, BRACE2009428, BRACE2009434, BRACE2009437, BRACE2009483, BRACE2009533, BRACE2009558, BRACE2009566, BRACE2009591, BRACE2009620, BRACE2009654, BRACE2009732, BRACE2009754, BRACE2009828, BRACE2009886, BRACE2009907, BRACE2009957, BRACE2010170, BRACE2010171, BRACE2010203, BRACE2010208, BRACE2010336, BRACE2010348, BRACE2010440, BRACE2010444, BRACE2010477, BRACE2010489, BRACE2010535, BRACE2010550, BRACE2010598, BRACE2010632, BRACE2010651, BRACE2010669, BRACE2010684, BRACE2010753, BRACE2010813, BRACE2010828, BRACE2010837, BRACE2010888, BRACE2010937, BRACE2010983, BRACE2011007, BRACE2011025, BRACE2011183, BRACE2011199, BRACE2011265, BRACE2011389, BRACE2011478, BRACE2011545, BRACE2011592, BRACE2011611, BRACE2011646, BRACE2011677, BRACE2011703, BRACE2011747, BRACE2011838, BRACE2011892, BRACE2011904, BRACE2011947, BRACE2012061, BRACE2012062, BRACE2012185, BRACE2012222, BRACE2012232, BRACE2012291, BRACE2012317, BRACE2012510, BRACE2012528, BRACE2012625, BRACE2012653, BRACE2012814, BRACE2012833, BRACE2012838, BRACE2012936, BRACE2012947, BRACE2013009, BRACE2013010, BRACE2013126, BRACE2013132, BRACE2013149, BRACE2013369, BRACE2013806, BRACE2013855, BRACE2014108, BRACE2014161, BRACE2014232, BRACE2014257, BRACE2014268, BRACE2014306, BRACE2014475, BRACE2014657, BRACE2014746, BRACE2014780, BRACE2014818, BRACE2014821, BRACE2014824, BRACE2014850, BRACE2014854, BRACE2015031, BRACE2015058, BRACE2015132, BRACE2015262, BRACE2015270, BRACE2015287, BRACE2015314, BRACE2015352, BRACE2015368, BRACE2015436, BRACE2015741, BRACE2015756, BRACE2015969, BRACE2015995, BRACE2016058, BRACE2016194, BRACE2016315, BRACE2016325, BRACE2016335, BRACE2016362, BRACE2016366, BRACE2016465, BRACE2016516, BRACE2016583, BRACE2016708, BRACE2016821, BRACE2016896, BRACE2016981, BRACE2017108, BRACE2017124, BRACE2017298, BRACE2017359, BRACE2017397, BRACE2017410, BRACE2017438, BRACE2017574, BRACE2017580, BRACE2017587, BRACE2017720, BRACE2017844, BRACE2017872, BRACE2017929, BRACE2017985, BRACE2017992, BRACE2018337, BRACE2018443, BRACE2018448, BRACE2018568, BRACE2018700, BRACE2018727, BRACE2018736, BRACE2018759, BRACE2018762, BRACE2018782, BRACE2018847, BRACE2019004, BRACE2019044, BRACE2019147, BRACE2019244, BRACE2019258, BRACE2019327, BRACE2019348, BRACE2019371, BRACE2019467, BRACE2019510, BRACE2019519, BRACE2019528, BRACE2019618, BRACE2019696, BRACE2019703, BRACE2019843, BRACE2019865, BRACE2019872, BRACE2019877, BRACE2020028, BRACE2020077, BRACE2020097, BRACE2020157, BRACE2020278, BRACE2020358, BRACE2020467, BRACE2020584, BRACE2020652, BRACE2020709, BRACE2020742, BRACE2020756, BRACE2020863, BRACE2020982, BRACE2021014, BRACE2021143, BRACE2021148, BRACE2021245, BRACE2021254, BRACE2021264, BRACE2021344, BRACE2021433, BRACE2021478, BRACE2021541, BRACE2021670, BRACE2021695, BRACE2021708, BRACE2021721, BRACE2021932, BRACE2021936, BRACE2022030, BRACE2022158, BRACE2022196, BRACE2022270, BRACE2022328, BRACE2022333, BRACE2022389, BRACE2022394, BRACE2022435, BRACE2022448, BRACE2022450, BRACE2022549, BRACE2022633, BRACE2022693, BRACE2022848, BRACE2022928, BRACE2022990, BRACE2023069, BRACE2023070, BRACE2023223, BRACE2023268, BRACE2023284, BRACE2023404, BRACE2023451, BRACE2023540, BRACE2023633, BRACE2023718, BRACE2023727, BRACE2023744, BRACE2023800, BRACE2023801, BRACE2024074, BRACE2024222, BRACE2024610, BRACE2024627, BRACE2024781, BRACE2024826, BRACE2025018, BRACE2025316, BRACE2025333, BRACE2025437, BRACE2025452, BRACE2025492, BRACE2025710, BRACE2025796, BRACE2025992, BRACE2026054, BRACE2026131, BRACE2026141, BRACE2026142, BRACE2026293, BRACE2026294, BRACE2026404, BRACE2026675, BRACE2026725, BRACE2026836, BRACE2026920, BRACE2026971, BRACE2027018, BRACE2027221, BRACE2027258, BRACE2027312, BRACE2027382, BRACE2027389, BRACE2027408, BRACE2027643, BRACE2027767, BRACE2027770, BRACE2027879, BRACE2027896, BRACE2027970, BRACE2028392, BRACE2028410, BRACE2028636, BRACE2028741, BRACE2028956, BRACE2028970, BRACE2029112, BRACE2029356, BRACE2029396, BRACE2029581, BRACE2029644, BRACE2029849, BRACE2030039, BRACE2030096, BRACE2030323, BRACE2030326, BRACE2030341, BRACE2030345, BRACE2030736, BRACE2030883, BRACE2030884, BRACE2031154, BRACE2031232, BRACE2031527, BRACE2031531, BRACE2031553, BRACE2031899, BRACE2032044, BRACE2032090, BRACE2032134, BRACE2032148, BRACE2032182, BRACE2032329, BRACE2032385, BRACE2032436, BRACE2032477, BRACE2032502, BRACE2032538, BRACE2032584, BRACE2032823, BRACE2033128, BRACE2033394, BRACE2033478, BRACE2033720, BRACE2033786, BRACE2034434, BRACE2034523, BRACE2034616, BRACE2034622, BRACE2034870, BRACE2035003, BRACE2035120, BRACE2035124, BRACE2035191, BRACE2035278, BRACE2035381, BRACE2035441, BRACE2035485, BRACE2036005, BRACE2036096, BRACE2036743, BRACE2036830, BRACE2036834, BRACE2036900, BRACE2037132, BRACE2037294, BRACE2037295, BRACE2037299, BRACE2037310, BRACE2037431, BRACE2037692, BRACE2037847, BRACE2038114, BRACE2038269, BRACE2038271, BRACE2038329, BRACE2038492, BRACE2038551, BRACE2038618, BRACE2039009, BRACE2039128, BRACE2039170, BRACE2039249, BRACE2039286, BRACE2039297, BRACE2039327, BRACE2039362, BRACE2039475, BRACE2039600, BRACE2039607, BRACE2039734, BRACE2039823, BRACE2039832, BRACE2039893, BRACE2039986, BRACE2040138, BRACE2040325, BRACE2040514, BRACE2040640, BRACE2040987, BRACE2041009, BRACE2041095, BRACE2041200, BRACE2041264, BRACE2041890, BRACE2041898, BRACE2042394, BRACE2042398, BRACE2042550, BRACE2042620, BRACE2042628, BRACE2042873, BRACE2043036, BRACE2043105, BRACE2043142, BRACE2043248, BRACE2043349, BRACE2043381, BRACE2043774, BRACE2043942, BRACE2044057, BRACE2044105, BRACE2044263, BRACE2044286, BRACE2044304, BRACE2044473, BRACE2044510, BRACE2044640, BRACE2044816, BRACE2044946, BRACE2044949, BRACE2045300, BRACE2045428, BRACE2045445, BRACE2045596, BRACE2045772, BRACE2045947, BRACE2045954, BRACE2046251, BRACE2046295, BRACE2046976, BRACE2047011, BRACE2047232, BRACE2047350, BRACE2047377, BRACE2047385, BRACE2047492, BRACE2047558, BRACE2047573, BRACE2047835, BRACE2047893, BRACE2047975, BRACE3000071, BRACE3000404, BRACE3000520, BRACE3000697, BRACE3000840, BRACE3000973, BRACE3001002, BRACE3001058, BRACE3001066, BRACE3001113, BRACE3001217, BRACE3001299, BRACE3001384, BRACE3001391, BRACE3001403, BRACE3001595, BRACE3001754, BRACE3001948, BRACE3001973, BRACE3002184, BRACE3002298, BRACE3002344, BRACE3002390, BRACE3002420, BRACE3002508, BRACE3002541, BRACE3002756, BRACE3003004, BRACE3003026, BRACE3003053, BRACE3003192, BRACE3003413, BRACE3003595, BRACE3003698, BRACE3003866, BRACE3003920, BRACE3004046, BRACE3004058, BRACE3004113, BRACE3004150, BRACE3004205, BRACE3004358, BRACE3004371, BRACE3004435, BRACE3004477, BRACE3004767, BRACE3004772, BRACE3004783, BRACE3004843, BRACE3004862, BRACE3004880, BRACE3004887, BRACE3004981, BRACE3004996, BRACE3004998, BRACE3005103, BRACE3005127, BRACE3005145, BRACE3005217, BRACE3005225, BRACE3005430, BRACE3005499, BRACE3005760, BRACE3005870, BRACE3005903, BRACE3005938, BRACE3005989, BRACE3006113, BRACE3006185, BRACE3006226, BRACE3006462, BRACE3006463, BRACE3006553, BRACE3006872, BRACE3006917, BRACE3007058, BRACE3007084, BRACE3007085, BRACE3007258, BRACE3007322, BRACE3007472, BRACE3007480, BRACE3007559, BRACE3007625, BRACE3007642, BRACE3007649, BRACE3007767, BRACE3007869, BRACE3008036, BRACE3008066, BRACE3008092, BRACE3008095, BRACE3008137, BRACE3008255, BRACE3008337, BRACE3008384, BRACE3008720, BRACE3008772, BRACE3009044, BRACE3009075, BRACE3009090, BRACE3009127, BRACE3009197, BRACE3009237, BRACE3009265, BRACE3009297, BRACE3009377, BRACE3009392, BRACE3009416, BRACE3009539, BRACE3009574, BRACE3009701, BRACE3009708, BRACE3009724, BRACE3009993, BRACE3010076, BRACE3010079, BRACE3010086, BRACE3010221, BRACE3010283, BRACE3010315, BRACE3010397, BRACE3010416, BRACE3010428, BRACE3010435, BRACE3010702, BRACE3010862, BRACE3011271, BRACE3011421, BRACE3011447, BRACE3011505, BRACE3011634, BRACE3011774, BRACE3012357, BRACE3012574, BRACE3012806, BRACE3012930, BRACE3013119, BRACE3013418, BRACE3013576, BRACE3013740, BRACE3013780, BRACE3013874, BRACE3013936, BRACE3013986, BRACE3014005, BRACE3014068, BRACE3014231, BRACE3014290, BRACE3014317, BRACE3014523, BRACE3014714, BRACE3014807, BRACE3014942, BRACE3015090, BRACE3015121, BRACE3015262, BRACE3015521, BRACE3015808, BRACE3015829, BRACE3015894, BRACE3015898, BRACE3016020, BRACE3016122, BRACE3016167, BRACE3016170, BRACE3016580, BRACE3016788, BRACE3016810, BRACE3016862, BRACE3016884, BRACE3017083, BRACE3017253, BRACE3018083, BRACE3018308, BRACE3018963, BRACE3019055, BRACE3019071, BRACE3019084, BRACE3019570, BRACE3019611, BRACE3019817, BRACE3019828, BRACE3019941, BRACE3020151, BRACE3020194, BRACE3020286, BRACE3020356, BRACE3020594, BRACE3020669, BRACE3020671, BRACE3020890, BRACE3021148, BRACE3021430, BRACE3021517, BRACE3021805, BRACE3022051, BRACE3022303, BRACE3022312, BRACE3022340, BRACE3022847, BRACE3023604, BRACE3023912, BRACE3024073, BRACE3024359, BRACE3024379, BRACE3024444, BRACE3024497, BRACE3024537, BRACE3024659, BRACE3024662, BRACE3024879, BRACE3025153, BRACE3025302, BRACE3025457, BRACE3025531, BRACE3025627, BRACE3025630, BRACE3025719, BRACE3026008, BRACE3026075, BRACE3026161, BRACE3026290, BRACE3026345, BRACE3026456, BRACE3026735, BRACE3026802, BRACE3026844, BRACE3026947, BRACE3026993, BRACE3027242, BRACE3027256, BRACE3027326, BRACE3027478, BRACE3027480, BRACE3027931, BRACE3027976, BRACE3028214, BRACE3028241, BRACE3028360, BRACE3028895, BRACE3028998, BRACE3029005, BRACE3029021, BRACE3029205, BRACE3029447, BRACE3030057, BRACE3030103, BRACE3030538, BRACE3030748, BRACE3030866, BRACE3031161, BRACE3031184, BRACE3031185, BRACE3031315, BRACE3031372, BRACE3031579, BRACE3031728, BRACE3031838, BRACE3031843, BRACE3032427, BRACE3032455, BRACE3032537, BRACE3032538, BRACE3032631, BRACE3032771, BRACE3032980, BRACE3032983, BRACE3033525, BRACE3034159, BRACE3034183, BRACE3034389, BRACE3034964, BRACE3034993, BRACE3035168, BRACE3035227, BRACE3036156, BRACE3036271, BRACE3037612, BRACE3037637, BRACE3037803, BRACE3038012, BRACE3038030, BRACE3038569, BRACE3038570, BRACE3038687, BRACE3038760, BRACE3039288, BRACE3039358, BRACE3039378, BRACE3039454, BRACE3040012, BRACE3040239, BRACE3040504, BRACE3040644, BRACE3040856, BRACE3040863, BRACE3041059, BRACE3041162, BRACE3041827, BRACE3042046, BRACE3042210, BRACE3042326, BRACE3042409, BRACE3042432, BRACE3042594, BRACE3043597, BRACE3044090, BRACE3044172, BRACE3044247, BRACE3044377, BRACE3044389, BRACE3044495, BRACE3045011, BRACE3045033, BRACE3045078, BRACE3045145, BRACE3045424, BRACE3045708, BRACE3045981, BRACE3046049, BRACE3046152, BRACE3046294, BRACE3046450, BRACE3046466, BRACE3046491, BRACE3046609, BRACE3046762, BRACE3046837, BRACE3046855, BRACE3046966, BRACE3047018, BRACE3047482, BRACE3047801, BRALZ1000047, BRALZ1000103, BRALZ2000189, BRALZ2000263, BRALZ2000988, BRALZ2001038, BRALZ2001279, BRALZ2001350, BRALZ2001445, BRALZ2001559, BRALZ2001743, BRALZ2001834, BRALZ2002174, BRALZ2002418, BRALZ2002477, BRALZ2003119, BRALZ2003330, BRALZ2003453, BRALZ2003525, BRALZ2004397, BRALZ2005467, BRALZ2005471, BRALZ2005888, BRALZ2005950, BRALZ2005992, BRALZ2006288, BRALZ2006474, BRALZ2006560, BRALZ2006734, BRALZ2006800, BRALZ2006976, BRALZ2007376, BRALZ2007545, BRALZ2007576, BRALZ2007661, BRALZ2007790, BRALZ2007793, BRALZ2007952, BRALZ2008031, BRALZ2008166, BRALZ2008462, BRALZ2008617, BRALZ2008696, BRALZ2008763, BRALZ2008869, BRALZ2008930, BRALZ2009446, BRALZ2009486, BRALZ2010186, BRALZ2010842, BRALZ2011337, BRALZ2011796, BRALZ2011880, BRALZ2012050, BRALZ2012183, BRALZ2012848, BRALZ2013621, BRALZ2013690, BRALZ2014316, BRALZ2014484, BRALZ2014951, BRALZ2015168, BRALZ2015811, BRALZ2016085, BRALZ2016498, BRALZ2017359, BRALZ2017531, BRALZ2017607, BRALZ2017620, BRALZ2017844, BRALZ2018342, BRALZ2018492, BRALZ2018834, BRALZ2019047, BRAMY1000095, BRAMY1000098, BRAMY1000130, BRAMY1000157, BRAMY1000173, BRAMY2000021, BRAMY2000025, BRAMY2000052, BRAMY2000076, BRAMY2000086, BRAMY2000151, BRAMY2000181, BRAMY2000196, BRAMY2000231, BRAMY2000277, BRAMY2000354, BRAMY2000388, BRAMY2000411, BRAMY2000508, BRAMY2000562, BRAMY2000585, BRAMY2000653, BRAMY2000814, BRAMY2000946, BRAMY2000981, BRAMY2001068, BRAMY2001114, BRAMY2001203, BRAMY2001282, BRAMY2001367, BRAMY2001427, BRAMY2001473, BRAMY2001678, BRAMY2002005, BRAMY2002044, BRAMY2002072, BRAMY2002158, BRAMY2002311, BRAMY2002339, BRAMY2002364, BRAMY2002369, BRAMY2002479, BRAMY2002493, BRAMY2002525, BRAMY2002584, BRAMY2002604, BRAMY2002621, BRAMY2002638, BRAMY2002739, BRAMY2002799, BRAMY2002853, BRAMY2002862, BRAMY2002956, BRAMY2003008, BRAMY2003037, BRAMY2003117, BRAMY2003287, BRAMY2003325, BRAMY2003529, BRAMY2003538, BRAMY2003585, BRAMY2003634, BRAMY2003653, BRAMY2003681, BRAMY2003893, BRAMY2003897, BRAMY2003898, BRAMY2003904, BRAMY2003926, BRAMY2003929, BRAMY2004031, BRAMY2004058, BRAMY2004183, BRAMY2004335, BRAMY2004351, BRAMY2004352, BRAMY2004387, BRAMY2004492, BRAMY2004524, BRAMY2004537, BRAMY2004542, BRAMY2004756, BRAMY2004771, BRAMY2005052, BRAMY2005064, BRAMY2005094, BRAMY2005151, BRAMY2005182, BRAMY2005244, BRAMY2005391, BRAMY2005488, BRAMY2005576, BRAMY2005648, BRAMY2005662, BRAMY2005708, BRAMY2005711, BRAMY2006092, BRAMY2006118, BRAMY2006149, BRAMY2006366, BRAMY2006375, BRAMY2006397, BRAMY2006411, BRAMY2006459, BRAMY2006466, BRAMY2006659, BRAMY2006779, BRAMY2006809, BRAMY2006879, BRAMY2007043, BRAMY2007078, BRAMY2007110, BRAMY2007185, BRAMY2007244, BRAMY2007249, BRAMY2007255, BRAMY2007287, BRAMY2007308, BRAMY2007411, BRAMY2007458, BRAMY2007486, BRAMY2007546, BRAMY2007567, BRAMY2007594, BRAMY2007610, BRAMY2007613, BRAMY2007653, BRAMY2007753, BRAMY2007859, BRAMY2008333, BRAMY2008382, BRAMY2008563, BRAMY2008583, BRAMY2008977, BRAMY2008979, BRAMY2009013, BRAMY2009023, BRAMY2009034, BRAMY2009105, BRAMY2009123, BRAMY2009192, BRAMY2009344, BRAMY2009349, BRAMY2009394, BRAMY2009489, BRAMY2009508, BRAMY2009528, BRAMY2009557, BRAMY2009612, BRAMY2009693, BRAMY2009934, BRAMY2010068, BRAMY2010135, BRAMY2010145, BRAMY2010171, BRAMY2010208, BRAMY2010239, BRAMY2010272, BRAMY2010290, BRAMY2010357, BRAMY2010366, BRAMY2010395, BRAMY2010441, BRAMY2010442, BRAMY2010464, BRAMY2010581, BRAMY2010798, BRAMY2010808, BRAMY2010919, BRAMY2011064, BRAMY2011105, BRAMY2011178, BRAMY2011196, BRAMY2011216, BRAMY2011253, BRAMY2011446, BRAMY2011480, BRAMY2011639, BRAMY2011679, BRAMY2011811, BRAMY2011841, BRAMY2011846, BRAMY2011849, BRAMY2011872, BRAMY2011961, BRAMY2012017, BRAMY2012091, BRAMY2012119, BRAMY2012162, BRAMY2012163, BRAMY2012277, BRAMY2012340, BRAMY2012426, BRAMY2012497, BRAMY2012517, BRAMY2012555, BRAMY2012568, BRAMY2012581, BRAMY2012691, BRAMY2012721, BRAMY2012731, BRAMY2012776, BRAMY2012880, BRAMY2012881, BRAMY2013169, BRAMY2013200, BRAMY2013216, BRAMY2013405, BRAMY2013414, BRAMY2013572, BRAMY2013590, BRAMY2013621, BRAMY2013659, BRAMY2013722, BRAMY2013736, BRAMY2013756, BRAMY2013944, BRAMY2013975, BRAMY2014019, BRAMY2014205, BRAMY2014387, BRAMY2014462, BRAMY2014469, BRAMY2014541, BRAMY2014754, BRAMY2014813, BRAMY2015211, BRAMY2015251, BRAMY2015311, BRAMY2015420, BRAMY2015503, BRAMY2015516, BRAMY2015550, BRAMY2015551, BRAMY2015559, BRAMY2015688, BRAMY2015705, BRAMY2015782, BRAMY2015833, BRAMY2015855, BRAMY2015890, BRAMY2015911, BRAMY2015925, BRAMY2016002, BRAMY2016009, BRAMY2016020, BRAMY2016070, BRAMY2016251, BRAMY2016325, BRAMY2016327, BRAMY2016386, BRAMY2016771, BRAMY2016892, BRAMY2016938, BRAMY2016953, BRAMY2017014, BRAMY2017249, BRAMY2017348, BRAMY2017450, BRAMY2017455, BRAMY2017528, BRAMY2017864, BRAMY2018027, BRAMY2018106, BRAMY2018122, BRAMY2018126, BRAMY2018272, BRAMY2018273, BRAMY2018279, BRAMY2018295, BRAMY2018308, BRAMY2018396, BRAMY2018467, BRAMY2018635, BRAMY2018785, BRAMY2019055, BRAMY2019111, BRAMY2019277, BRAMY2019300, BRAMY2019468, BRAMY2019509, BRAMY2019600, BRAMY2019643, BRAMY2019710, BRAMY2019963, BRAMY2019985, BRAMY2019989, BRAMY2020050, BRAMY2020058, BRAMY2020106, BRAMY2020270, BRAMY2020354, BRAMY2020355, BRAMY2020412, BRAMY2020427, BRAMY2020445, BRAMY2020466, BRAMY2020520, BRAMY2020574, BRAMY2020634, BRAMY2020713, BRAMY2021040, BRAMY2021063, BRAMY2021098, BRAMY2021139, BRAMY2021142, BRAMY2021276, BRAMY2021310, BRAMY2021388, BRAMY2021498, BRAMY2021523, BRAMY2021710, BRAMY2021732, BRAMY2021746, BRAMY2021825, BRAMY2021867, BRAMY2021962, BRAMY2021982, BRAMY2022052, BRAMY2022160, BRAMY2022168, BRAMY2022263, BRAMY2022301, BRAMY2022320, BRAMY2022383, BRAMY2022445, BRAMY2022454, BRAMY2022493, BRAMY2022525, BRAMY2022532, BRAMY2022723, BRAMY2022796, BRAMY2022929, BRAMY2022980, BRAMY2022984, BRAMY2023060, BRAMY2023110, BRAMY2023115, BRAMY2023161, BRAMY2023172, BRAMY2023238, BRAMY2023327, BRAMY2023358, BRAMY2023406, BRAMY2023482, BRAMY2023514, BRAMY2023719, BRAMY2023729, BRAMY2023786, BRAMY2023852, BRAMY2023863, BRAMY2023939, BRAMY2024004, BRAMY2024073, BRAMY2024312, BRAMY2024374, BRAMY2024390, BRAMY2024416, BRAMY2024449, BRAMY2024489, BRAMY2024497, BRAMY2024514, BRAMY2024530, BRAMY2024535, BRAMY2024545, BRAMY2024576, BRAMY2024593, BRAMY2024711, BRAMY2024715, BRAMY2024728, BRAMY2024827, BRAMY2024849, BRAMY2025024, BRAMY2025032, BRAMY2025121, BRAMY2025175, BRAMY2025218, BRAMY2025230, BRAMY2025272, BRAMY2025277, BRAMY2025495, BRAMY2025812, BRAMY2025996, BRAMY2026009, BRAMY2026091, BRAMY2026168, BRAMY2026300, BRAMY2026347, BRAMY2026395, BRAMY2026405, BRAMY2026533, BRAMY2026538, BRAMY2026685, BRAMY2026713, BRAMY2026778, BRAMY2026824, BRAMY2026899, BRAMY2026902, BRAMY2026904, BRAMY2026976, BRAMY2027073, BRAMY2027114, BRAMY2027140, BRAMY2027242, BRAMY2027396, BRAMY2027451, BRAMY2027461, BRAMY2027467, BRAMY2027587, BRAMY2027714, BRAMY2027717, BRAMY2027739, BRAMY2027752, BRAMY2027782, BRAMY2028072, BRAMY2028183, BRAMY2028188, BRAMY2028269, BRAMY2028282, BRAMY2028472, BRAMY2028491, BRAMY2028516, BRAMY2028565, BRAMY2028593, BRAMY2028682, BRAMY2028783, BRAMY2028796, BRAMY2028856, BRAMY2028914, BRAMY2029204, BRAMY2029602, BRAMY2029988, BRAMY2030098, BRAMY2030109, BRAMY2030206, BRAMY2030477, BRAMY2030607, BRAMY2030702, BRAMY2030703, BRAMY2030768, BRAMY2030799, BRAMY2030859, BRAMY2030915, BRAMY2031317, BRAMY2031377, BRAMY2031442, BRAMY2031516, BRAMY2032014, BRAMY2032231, BRAMY2032242, BRAMY2032290, BRAMY2032311, BRAMY2032317, BRAMY2032344, BRAMY2032589, BRAMY2032678, BRAMY2032696, BRAMY2032777, BRAMY2032994, BRAMY2033003, BRAMY2033116, BRAMY2033240, BRAMY2033267, BRAMY2033316, BRAMY2033332, BRAMY2033506, BRAMY2033594, BRAMY2033895, BRAMY2033914, BRAMY2034072, BRAMY2034185, BRAMY2034187, BRAMY2034305, BRAMY2034561, BRAMY2034920, BRAMY2034993, BRAMY2035070, BRAMY2035449, BRAMY2035545, BRAMY2035606, BRAMY2035718, BRAMY2035719, BRAMY2035801, BRAMY2035869, BRAMY2035923, BRAMY2036076, BRAMY2036079, BRAMY2036254, BRAMY2036266, BRAMY2036387, BRAMY2036396, BRAMY2036459, BRAMY2036567, BRAMY2036615, BRAMY2036699, BRAMY2036913, BRAMY2036918, BRAMY2036968, BRAMY2037147, BRAMY2037328, BRAMY2037609, BRAMY2037629, BRAMY2037800, BRAMY2037823, BRAMY2037971, BRAMY2038100, BRAMY2038128, BRAMY2038317, BRAMY2038475, BRAMY2038484, BRAMY2038516, BRAMY2038832, BRAMY2038846, BRAMY2038887, BRAMY2038904, BRAMY2039287, BRAMY2039300, BRAMY2039314, BRAMY2039341, BRAMY2039630, BRAMY2039695, BRAMY2039728, BRAMY2039872, BRAMY2040051, BRAMY2040159, BRAMY2040214, BRAMY2040478, BRAMY2040592, BRAMY2040915, BRAMY2041261, BRAMY2041347, BRAMY2041378, BRAMY2041384, BRAMY2041434, BRAMY2041507, BRAMY2041542, BRAMY2041738, BRAMY2042122, BRAMY2042131, BRAMY2042178, BRAMY2042195, BRAMY2042244, BRAMY2042549, BRAMY2042596, BRAMY2042612, BRAMY2042641, BRAMY2042711, BRAMY2042760, BRAMY2042804, BRAMY2042899, BRAMY2042918, BRAMY2043069, BRAMY2043103, BRAMY2043314, BRAMY2043345, BRAMY2044246, BRAMY2044317, BRAMY2044349, BRAMY2044686, BRAMY2044838, BRAMY2045036, BRAMY2045299, BRAMY2045471, BRAMY2045530, BRAMY2046109, BRAMY2046478, BRAMY2046489, BRAMY2046537, BRAMY2046667, BRAMY2046742, BRAMY2046871, BRAMY2046984, BRAMY2046989, BRAMY2047169, BRAMY2047280, BRAMY2047420, BRAMY2047676, BRAMY2047692, BRAMY2047746, BRAMY2047751, BRAMY2047765, BRAMY2047884, BRAMY2047948, BRAMY3000206, BRAMY3000210, BRAMY3000213, BRAMY3000224, BRAMY3000254, BRAMY3000307, BRAMY3000692, BRAMY3001356, BRAMY3001401, BRAMY3001409, BRAMY3001794, BRAMY3002120, BRAMY3002312, BRAMY3002329, BRAMY3002458, BRAMY3002508, BRAMY3002620, BRAMY3002803, BRAMY3002805, BRAMY3002886, BRAMY3003026, BRAMY3003109, BRAMY3003205, BRAMY3003310, BRAMY3003566, BRAMY3003723, BRAMY3004126, BRAMY3004224, BRAMY3004364, BRAMY3004377, BRAMY3004672, BRAMY3004800, BRAMY3004900, BRAMY3004919, BRAMY3005091, BRAMY3005184, BRAMY3005656, BRAMY3005912, BRAMY3005932, BRAMY3006032, BRAMY3006297, BRAMY3006761, BRAMY3007078, BRAMY3007206, BRAMY3007311, BRAMY3007350, BRAMY3007449, BRAMY3007471, BRAMY3007609, BRAMY3007723, BRAMY3007968, BRAMY3008044, BRAMY3008088, BRAMY3008096, BRAMY3008335, BRAMY3008466, BRAMY3008505, BRAMY3008650, BRAMY3008937, BRAMY3009158, BRAMY3009207, BRAMY3009491, BRAMY3009556, BRAMY3009782, BRAMY3009811, BRAMY3009904, BRAMY3010264, BRAMY3010321, BRAMY3010411, BRAMY3010492, BRAMY3010603, BRAMY3010654, BRAMY4000095, BRAMY4000229, BRAMY4000277, BRAMY4000915, BRAMY4000962, BRAMY4001173, BRAMY4001200, BRAMY4001234, BRAMY4001449, BRAMY4001652, BRAMY4001863, BRAMY4001913, BRAMY4002575, BRAMY4002628, BRASW1000053, BRASW1000125, BRAWH1000001, BRAWH1000002, BRAWH1000007, BRAWH1000037, BRAWH1000045, BRAWH1000093, BRAWH1000094, BRAWH1000116, BRAWH1000127, BRAWH1000130, BRAWH1000157, BRAWH1000162, BRAWH1000164, BRAWH1000168, BRAWH1000174, BRAWH1000180, BRAWH1000369, BRAWH2000034, BRAWH2000048, BRAWH2000071, BRAWH2000082, BRAWH2000093, BRAWH2000109, BRAWH2000131, BRAWH2000142, BRAWH2000169, BRAWH2000177, BRAWH2000218, BRAWH2000232, BRAWH2000248, BRAWH2000256, BRAWH2000274, BRAWH2000323, BRAWH2000353, BRAWH2000370, BRAWH2000409, BRAWH2000417, BRAWH2000443, BRAWH2000471, BRAWH2000476, BRAWH2000482, BRAWH2000488, BRAWH2000494, BRAWH2000500, BRAWH2000503, BRAWH2000522, BRAWH2000554, BRAWH2000595, BRAWH2000633, BRAWH2000636, BRAWH2000643, BRAWH2000651, BRAWH2000682, BRAWH2000686, BRAWH2000752, BRAWH2000859, BRAWH2000866, BRAWH2000892, BRAWH2000901, BRAWH2000926, BRAWH2000944, BRAWH2000984, BRAWH2001019, BRAWH2001037, BRAWH2001052, BRAWH2001103, BRAWH2001129, BRAWH2001137, BRAWH2001141, BRAWH2001159, BRAWH2001166, BRAWH2001171, BRAWH2001186, BRAWH2001203, BRAWH2001238, BRAWH2001239, BRAWH2001255, BRAWH2001321, BRAWH2001355, BRAWH2001378, BRAWH2001395, BRAWH2001406, BRAWH2001412, BRAWH2001418, BRAWH2001424, BRAWH2001436, BRAWH2001438, BRAWH2001439, BRAWH2001459, BRAWH2001461, BRAWH2001484, BRAWH2001492, BRAWH2001503, BRAWH2001519, BRAWH2001530, BRAWH2001535, BRAWH2001589, BRAWH2001662, BRAWH2001666, BRAWH2001671, BRAWH2001679, BRAWH2001686, BRAWH2001701, BRAWH2001842, BRAWH2001862, BRAWH2001873, BRAWH2001940, BRAWH2001973, BRAWH2002047, BRAWH2002060, BRAWH2002062, BRAWH2002125, BRAWH2002191, BRAWH2002318, BRAWH2002333, BRAWH2002352, BRAWH2002383, BRAWH2002549, BRAWH2002560, BRAWH2002601, BRAWH2002623, BRAWH2002630, BRAWH2002635, BRAWH2002662, BRAWH2002679, BRAWH2002725, BRAWH2002761, BRAWH2002811, BRAWH2002861, BRAWH2002911, BRAWH2002963, BRAWH2002967, BRAWH2002976, BRAWH2003000, BRAWH2003025, BRAWH2003135, BRAWH2003240, BRAWH2003307, BRAWH2003355, BRAWH2003366, BRAWH2003662, BRAWH2003689, BRAWH2003693, BRAWH2003818, BRAWH2003832, BRAWH2003948, BRAWH2003964, BRAWH2004044, BRAWH2004068, BRAWH2004095, BRAWH2004136, BRAWH2004217, BRAWH2004580, BRAWH2004731, BRAWH2004779, BRAWH2004842, BRAWH2004884, BRAWH2004923, BRAWH2005008, BRAWH2005068, BRAWH2005074, BRAWH2005225, BRAWH2005315, BRAWH2005517, BRAWH2005524, BRAWH2005533, BRAWH2005578, BRAWH2005812, BRAWH2005974, BRAWH2005998, BRAWH2006044, BRAWH2006083, BRAWH2006207, BRAWH2006301, BRAWH2006395, BRAWH2006405, BRAWH2006450, BRAWH2006493, BRAWH2006526, BRAWH2006543, BRAWH2006622, BRAWH2006760, BRAWH2006960, BRAWH2006989, BRAWH2006996, BRAWH2007069, BRAWH2007308, BRAWH2007406, BRAWH2007550, BRAWH2007570, BRAWH2007591, BRAWH2007605, BRAWH2007658, BRAWH2007664, BRAWH2007800, BRAWH2007808, BRAWH2007825, BRAWH2007862, BRAWH2007890, BRAWH2008058, BRAWH2008128, BRAWH2008219, BRAWH2008255, BRAWH2008292, BRAWH2008297, BRAWH2008366, BRAWH2008380, BRAWH2008540, BRAWH2008577, BRAWH2008706, BRAWH2008790, BRAWH2008903, BRAWH2008956, BRAWH2008993, BRAWH2009112, BRAWH2009238, BRAWH2009261, BRAWH2009263, BRAWH2009298, BRAWH2009304, BRAWH2009307, BRAWH2009360, BRAWH2009393, BRAWH2009485, BRAWH2009490, BRAWH2009558, BRAWH2009590, BRAWH2009626, BRAWH2009678, BRAWH2009695, BRAWH2009907, BRAWH2010000, BRAWH2010069, BRAWH2010084, BRAWH2010136, BRAWH2010318, BRAWH2010329, BRAWH2010354, BRAWH2010364, BRAWH2010552, BRAWH2010584, BRAWH2010618, BRAWH2010619, BRAWH2010754, BRAWH2010980, BRAWH2011066, BRAWH2011079, BRAWH2011096, BRAWH2011155, BRAWH2011166, BRAWH2011204, BRAWH2011286, BRAWH2011294, BRAWH2011343, BRAWH2011400, BRAWH2011762, BRAWH2011795, BRAWH2011796, BRAWH2011812, BRAWH2011823, BRAWH2011860, BRAWH2011920, BRAWH2011958, BRAWH2012054, BRAWH2012077, BRAWH2012161, BRAWH2012162, BRAWH2012164, BRAWH2012258, BRAWH2012277, BRAWH2012326, BRAWH2012538, BRAWH2012540, BRAWH2012619, BRAWH2012698, BRAWH2012749, BRAWH2012827, BRAWH2012866, BRAWH2012963, BRAWH2013047, BRAWH2013219, BRAWH2013294, BRAWH2013748, BRAWH2013866, BRAWH2013871, BRAWH2013914, BRAWH2013941, BRAWH2013955, BRAWH2014053, BRAWH2014188, BRAWH2014234, BRAWH2014379, BRAWH2014414, BRAWH2014473, BRAWH2014511, BRAWH2014645, BRAWH2014662, BRAWH2014717, BRAWH2014729, BRAWH2014876, BRAWH2014934, BRAWH2014954, BRAWH2015247, BRAWH2015349, BRAWH2015375, BRAWH2015385, BRAWH2015595, BRAWH2015728, BRAWH2015853, BRAWH2015866, BRAWH2016028, BRAWH2016106, BRAWH2016160, BRAWH2016166, BRAWH2016209, BRAWH2016221, BRAWH2016223, BRAWH2016269, BRAWH2016305, BRAWH2016439, BRAWH2016446, BRAWH2016514, BRAWH2016562, BRAWH2016655, BRAWH2016679, BRAWH2016702, BRAWH2016724, BRAWH2016785, BRAWH2016792, BRAWH2016800, BRAWH2017002, BRAWH2017103, BRAWH2017250, BRAWH2017294, BRAWH2017304, BRAWH2017305, BRAWH2017407, BRAWH2017433, BRAWH2017523, BRAWH2017534, BRAWH2017542, BRAWH2017635, BRAWH2017913, BRAWH2018206, BRAWH2018267, BRAWH2018282, BRAWH2018317, BRAWH2018506, BRAWH2018514, BRAWH2018527, BRAWH2018601, BRAWH2018729, BRAWH2018745, BRAWH2018875, BRAWH2019053, BRAWH2019055, BRAWH2019198, BRAWH3000078, BRAWH3000100, BRAWH3000166, BRAWH3000314, BRAWH3000329, BRAWH3000410, BRAWH3000446, BRAWH3000491, BRAWH3000604, BRAWH3000884, BRAWH3001053, BRAWH3001319, BRAWH3001326, BRAWH3001475, BRAWH3001636, BRAWH3001638, BRAWH3001712, BRAWH3001760, BRAWH3001783, BRAWH3001833, BRAWH3001879, BRAWH3001891, BRAWH3001918, BRAWH3002433, BRAWH3002467, BRAWH3002513, BRAWH3002600, BRAWH3002819, BRAWH3003019, BRAWH3003136, BRAWH3003244, BRAWH3003343, BRAWH3003411, BRAWH3003522, BRAWH3003573, BRAWH3003598, BRAWH3003727, BRAWH3003801, BRAWH3003975, BRAWH3004222, BRAWH3004335, BRAWH3004350, BRAWH3004453, BRAWH3004530, BRAWH3004666, BRAWH3005037, BRAWH3005047, BRAWH3005132, BRAWH3005146, BRAWH3005292, BRAWH3005300, BRAWH3005422, BRAWH3005534, BRAWH3005886, BRAWH3005892, BRAWH3005896, BRAWH3005912, BRAWH3005981, BRAWH3006547, BRAWH3006548, BRAWH3006761, BRAWH3006792, BRAWH3007129, BRAWH3007221, BRAWH3007441, BRAWH3007455, BRAWH3007506, BRAWH3007726, BRAWH3007783, BRAWH3008167, BRAWH3008341, BRAWH3008559, BRAWH3008697, BRAWH3008867, BRAWH3009017, BRAWH3009285, BRAWH3009297, BRAWH3009546, BRAWH3009961, BRAWH3010461, BRAWH3010560, BRAWH3010602, BRAWH3010657, BRAWH3010726, BRAWH3010833, BRAWH3011101, BRAWH3011331, BRAWH3011402, BRAWH3011577, BRAWH3011623, BRAWH3011637, BRAWH3011685, BRAWH3011907, BRAWH3011929, BRAWH3012005, BRAWH3012662, BRAWH3012779, BRAWH3013009, BRAWH3013049, BRAWH3013197, BRAWH3013264, BRAWH3013508, BRAWH3014609, BRAWH3014639, BRAWH3015017, BRAWH3015175, BRAWH3015260, BRAWH3015610, BRAWH3015825, BRAWH3016123, BRAWH3016271, BRAWH3016715, BRAWH3017259, BRAWH3017260, BRAWH3017477, BRAWH3017537, BRAWH3017980, BRAWH3018063, BRAWH3018369, BRAWH3018548, BRAWH3018969, BRAWH3019026, BRAWH3019529, BRAWH3019594, BRAWH3019629, BRAWH3019820, BRAWH3020200, BRAWH3020318, BRAWH3020486, BRAWH3020884, BRAWH3020928, BRAWH3021012, BRAWH3021545, BRAWH3021574, BRAWH3021580, BRAWH3021641, BRAWH3021643, BRAWH3021724, BRAWH3022347, BRAWH3022431, BRAWH3022459, BRAWH3022542, BRAWH3022719, BRAWH3022866, BRAWH3022900, BRAWH3023156, BRAWH3023168, BRAWH3023172, BRAWH3023274, BRAWH3023421, BRAWH3024231, BRAWH3024242, BRAWH3024469, BRAWH3024506, BRAWH3024613, BRAWH3024989, BRAWH3026349, BRAWH3026394, BRAWH3026529, BRAWH3027420, BRAWH3027440, BRAWH3027533, BRAWH3027574, BRAWH3027607, BRAWH3027616, BRAWH3027675, BRAWH3027806, BRAWH3027880, BRAWH3027927, BRAWH3028202, BRAWH3028223, BRAWH3028306, BRAWH3028461, BRAWH3028645, BRAWH3028754, BRAWH3028796, BRAWH3029254, BRAWH3029313, BRAWH3029538, BRAWH3029556, BRAWH3029806, BRAWH3030613, BRAWH3030772, BRAWH3030810, BRAWH3030892, BRAWH3030910, BRAWH3030950, BRAWH3031054, BRAWH3031710, BRAWH3031902, BRAWH3032298, BRAWH3032340, BRAWH3032571, BRAWH3032620, BRAWH3032930, BRAWH3033117, BRAWH3033293, BRAWH3033448, BRAWH3033513, BRAWH3034097, BRAWH3034114, BRAWH3034134, BRAWH3034668, BRAWH3034743, BRAWH3034775, BRAWH3034890, BRAWH3035154, BRAWH3035403, BRAWH3035904, BRAWH3035914, BRAWH3035936, BRAWH3036077, BRAWH3036247, BRAWH3036270, BRAWH3036561, BRAWH3036738, BRAWH3036951, BRAWH3037265, BRAWH3037394, BRAWH3037533, BRAWH3037979, BRAWH3038055, BRAWH3038230, BRAWH3038252, BRAWH3038324, BRCAN1000065, BRCAN1000076, BRCAN1000105, BRCAN1000149, BRCAN1000168, BRCAN2000148, BRCAN2000149, BRCAN2000209, BRCAN2000239, BRCAN2000346, BRCAN2000364, BRCAN2000383, BRCAN2000418, BRCAN2000523, BRCAN2000541, BRCAN2000563, BRCAN2000577, BRCAN2000620, BRCAN2000639, BRCAN2000763, BRCAN2000832, BRCAN2000923, BRCAN2001223, BRCAN2001866, BRCAN2002173, BRCAN2002416, BRCAN2002473, BRCAN2002562, BRCAN2002662, BRCAN2002826, BRCAN2002854, BRCAN2002856, BRCAN2002892, BRCAN2002944, BRCAN2002948, BRCAN2003070, BRCAN2003269, BRCAN2003389, BRCAN2003628, BRCAN2003703, BRCAN2003746, BRCAN2003814, BRCAN2003987, BRCAN2004173, BRCAN2004355, BRCAN2004371, BRCAN2004653, BRCAN2004699, BRCAN2005436, BRCAN2005449, BRCAN2006019, BRCAN2006051, BRCAN2006063, BRCAN2006117, BRCAN2006174, BRCAN2006290, BRCAN2006297, BRCAN2006323, BRCAN2006401, BRCAN2006411, BRCAN2006450, BRCAN2006955, BRCAN2007119, BRCAN2007144, BRCAN2007409, BRCAN2007426, BRCAN2007525, BRCAN2007700, BRCAN2008494, BRCAN2008528, BRCAN2008701, BRCAN2008894, BRCAN2009156, BRCAN2009168, BRCAN2009203, BRCAN2009432, BRCAN2010374, BRCAN2010376, BRCAN2010547, BRCAN2010581, BRCAN2010665, BRCAN2011254, BRCAN2011316, BRCAN2011602, BRCAN2012110, BRCAN2012355, BRCAN2012402, BRCAN2012408, BRCAN2012481, BRCAN2012613, BRCAN2012713, BRCAN2012929, BRCAN2013655, BRCAN2013660, BRCAN2014143, BRCAN2014229, BRCAN2014370, BRCAN2014602, BRCAN2014652, BRCAN2014788, BRCAN2014881, BRCAN2014952, BRCAN2015371, BRCAN2015402, BRCAN2015464, BRCAN2015719, BRCAN2015757, BRCAN2015886, BRCAN2016025, BRCAN2016046, BRCAN2016433, BRCAN2016619, BRCAN2016762, BRCAN2016814, BRCAN2017442, BRCAN2017905, BRCAN2018240, BRCAN2018269, BRCAN2018490, BRCAN2018566, BRCAN2018667, BRCAN2018748, BRCAN2018935, BRCAN2019002, BRCAN2019387, BRCAN2019653, BRCAN2019773, BRCAN2019907, BRCAN2020234, BRCAN2020331, BRCAN2020412, BRCAN2020467, BRCAN2020710, BRCAN2020880, BRCAN2021024, BRCAN2021028, BRCAN2021325, BRCAN2021452, BRCAN2021669, BRCAN2021718, BRCAN2022126, BRCAN2022191, BRCAN2022472, BRCAN2022474, BRCAN2023347, BRCAN2023724, BRCAN2024451, BRCAN2024563, BRCAN2024572, BRCAN2025009, BRCAN2025093, BRCAN2025349, BRCAN2025368, BRCAN2025712, BRCAN2025982, BRCAN2026117, BRCAN2026340, BRCAN2026711, BRCAN2027150, BRCAN2027310, BRCAN2027334, BRCAN2027355, BRCAN2027364, BRCAN2027513, BRCAN2027593, BRCAN2027970, BRCAN2028021, BRCAN2028040, BRCAN2028319, BRCAN2028338, BRCAN2028355, BRCAN2028378, BRCAN2028460, BRCAN2028545, BRCAN2028634, BRCAN2028702, BRCOC1000040, BRCOC1000087, BRCOC1000094, BRCOC2000004, BRCOC2000047, BRCOC2000152, BRCOC2000184, BRCOC2000186, BRCOC2000333, BRCOC2000360, BRCOC2000404, BRCOC2000487, BRCOC2000637, BRCOC2000670, BRCOC2000816, BRCOC2000850, BRCOC2001355, BRCOC2002085, BRCOC2002155, BRCOC2002323, BRCOC2002659, BRCOC2002664, BRCOC2002686, BRCOC2002751, BRCOC2002756, BRCOC2002777, BRCOC2002835, BRCOC2003100, BRCOC2003125, BRCOC2003187, BRCOC2003213, BRCOC2003513, BRCOC2003732, BRCOC2003740, BRCOC2004036, BRCOC2004175, BRCOC2004354, BRCOC2004455, BRCOC2004950, BRCOC2005542, BRCOC2005903, BRCOC2005951, BRCOC2006164, BRCOC2006189, BRCOC2006243, BRCOC2006270, BRCOC2006639, BRCOC2006942, BRCOC2007034, BRCOC2007593, BRCOC2007733, BRCOC2007769, BRCOC2008064, BRCOC2008225, BRCOC2008642, BRCOC2008993, BRCOC2009052, BRCOC2009196, BRCOC2009380, BRCOC2009638, BRCOC2009937, BRCOC2010115, BRCOC2010123, BRCOC2010510, BRCOC2010730, BRCOC2010980, BRCOC2010994, BRCOC2011010, BRCOC2011398, BRCOC2011418, BRCOC2011506, BRCOC2011769, BRCOC2011996, BRCOC2012172, BRCOC2012229, BRCOC2012386, BRCOC2012551, BRCOC2012813, BRCOC2013448, BRCOC2013573, BRCOC2013675, BRCOC2013780, BRCOC2014013, BRCOC2014033, BRCOC2014400, BRCOC2014748, BRCOC2014833, BRCOC2015597, BRCOC2015824, BRCOC2015908, BRCOC2015944, BRCOC2016525, BRCOC2016661, BRCOC2017061, BRCOC2017652, BRCOC2017856, BRCOC2018775, BRCOC2018877, BRCOC2019255, BRCOC2019549, BRCOC2019841, BRCOC2019896, BRCOC2019903, BRCOC2019910, BRCOC2019934, BRCOC2020122, BRCOC2020142, BRHIP1000058, BRHIP1000072, BRHIP1000108, BRHIP1000129, BRHIP1000174, BRHIP1000258, BRHIP2000021, BRHIP2000079, BRHIP2000087, BRHIP2000163, BRHIP2000210, BRHIP2000239, BRHIP2000245, BRHIP2000312, BRHIP2000359, BRHIP2000445, BRHIP2000506, BRHIP2000532, BRHIP2000621, BRHIP2000691, BRHIP2000819, BRHIP2000826, BRHIP2000920, BRHIP2001074, BRHIP2001099, BRHIP2001686, BRHIP2001782, BRHIP2001802, BRHIP2001805, BRHIP2001886, BRHIP2001927, BRHIP2002122, BRHIP2002143, BRHIP2002172, BRHIP2002339, BRHIP2002346, BRHIP2002510, BRHIP2002664, BRHIP2002722, BRHIP2002929, BRHIP2003048, BRHIP2003062, BRHIP2003242, BRHIP2003272, BRHIP2003748, BRHIP2003786, BRHIP2003828, BRHIP2003917, BRHIP2004312, BRHIP2004355, BRHIP2004359, BRHIP2004814, BRHIP2004883, BRHIP2004902, BRHIP20050100, BRHIP2005236, BRHIP2005271, BRHIP2005354, BRHIP2005600, BRHIP2005719, BRHIP2005724, BRHIP2005752, BRHIP2005932, BRHIP2006617, BRHIP2006782, BRHIP2006800, BRHIP2006819, BRHIP2006921, BRHIP2007305, BRHIP2007307, BRHIP2007616, BRHIP2007690, BRHIP2007928, BRHIP2007969, BRHIP2008269, BRHIP2008389, BRHIP2008607, BRHIP2008756, BRHIP2008909, BRHIP2009019, BRHIP2009177, BRHIP2009340, BRHIP2009351, BRHIP2009414, BRHIP2009474, BRHIP2009617, BRHIP2009685, BRHIP2010217, BRHIP2010309, BRHIP2010444, BRHIP2010487, BRHIP2010571, BRHIP2010593, BRHIP2010610, BRHIP2010723, BRHIP2010744, BRHIP2011080, BRHIP2011120, BRHIP2011199, BRHIP2011491, BRHIP2011508, BRHIP2011576, BRHIP2011616, BRHIP2011783, BRHIP2011838, BRHIP2011891, BRHIP2011933, BRHIP2012054, BRHIP2012059, BRHIP2012141, BRHIP2012314, BRHIP2012360, BRHIP2012545, BRHIP2012580, BRHIP2012627, BRHIP2012642, BRHIP2012750, BRHIP2012922, BRHIP2012923, BRHIP2012972, BRHIP2013286, BRHIP2013447, BRHIP2013510, BRHIP2013699, BRHIP2013723, BRHIP2013958, BRHIP2013972, BRHIP2014063, BRHIP2014228, BRHIP2014285, BRHIP2014291, BRHIP2014373, BRHIP2014386, BRHIP2014387, BRHIP2014954, BRHIP2015153, BRHIP2015224, BRHIP2015245, BRHIP2015356, BRHIP2015360, BRHIP2015679, BRHIP2016005, BRHIP2016125, BRHIP2016788, BRHIP2016968, BRHIP2016990, BRHIP2017010, BRHIP2017315, BRHIP2017385, BRHIP2017404, BRHIP2017542, BRHIP2017553, BRHIP2017642, BRHIP2017714, BRHIP2017780, BRHIP2017945, BRHIP2018014, BRHIP2018369, BRHIP2018612, BRHIP2018635, BRHIP2018650, BRHIP2018712, BRHIP2018719, BRHIP2018805, BRHIP2018998, BRHIP2019007, BRHIP2019047, BRHIP2019149, BRHIP2019177, BRHIP2019186, BRHIP2019291, BRHIP2019494, BRHIP2019589, BRHIP2019641, BRHIP2019819, BRHIP2019884, BRHIP2019972, BRHIP2020182, BRHIP2020509, BRHIP2020573, BRHIP2020622, BRHIP2020695, BRHIP2020743, BRHIP2020799, BRHIP2020842, BRHIP2020859, BRHIP2020930, BRHIP2021102, BRHIP2021289, BRHIP2021495, BRHIP2021615, BRHIP2021744, BRHIP2021762, BRHIP2021858, BRHIP2021870, BRHIP2021929, BRHIP2022006, BRHIP2022054, BRHIP2022221, BRHIP2022228, BRHIP2022298, BRHIP2022326, BRHIP2022467, BRHIP2022708, BRHIP2022986, BRHIP2023071, BRHIP2023229, BRHIP2023292, BRHIP2023309, BRHIP2023369, BRHIP2023438, BRHIP2023695, BRHIP2023735, BRHIP2023762, BRHIP2023773, BRHIP2023860, BRHIP2023869, BRHIP2024046, BRHIP2024165, BRHIP2024201, BRHIP2024347, BRHIP2024398, BRHIP2024549, BRHIP2024742, BRHIP2024789, BRHIP2024911, BRHIP2024941, BRHIP2025245, BRHIP2025366, BRHIP2025448, BRHIP2025679, BRHIP2025739, BRHIP2025797, BRHIP2026021, BRHIP2026061, BRHIP2026155, BRHIP2026214, BRHIP2026288, BRHIP2026346, BRHIP2026557, BRHIP2026723, BRHIP2026877, BRHIP2027017, BRHIP2027054, BRHIP2027563, BRHIP2027685, BRHIP2027762, BRHIP2028187, BRHIP2028303, BRHIP2028330, BRHIP2028480, BRHIP2028583, BRHIP2028593, BRHIP2029176, BRHIP2029283, BRHIP2029393, BRHIP2029529, BRHIP2029643, BRHIP2029663, BRHIP3000017, BRHIP3000060, BRHIP3000070, BRHIP3000081, BRHIP3000131, BRHIP3000240, BRHIP3000377, BRHIP3000457, BRHIP3000475, BRHIP3000488, BRHIP3000526, BRHIP3000626, BRHIP3000859, BRHIP3000907, BRHIP3001076, BRHIP3001079, BRHIP3001141, BRHIP3001283, BRHIP3001338, BRHIP3001360, BRHIP3001481, BRHIP3001878, BRHIP3001964, BRHIP3002114, BRHIP3002124, BRHIP3002141, BRHIP3002363, BRHIP3002691, BRHIP3002920, BRHIP3002931, BRHIP3003063, BRHIP3003126, BRHIP3003306, BRHIP3003340, BRHIP3003395, BRHIP3003484, BRHIP3003644, BRHIP3003688, BRHIP3003795, BRHIP3003961, BRHIP3003984, BRHIP3004193, BRHIP3004215, BRHIP3004416, BRHIP3004710, BRHIP3004725, BRHIP3004774, BRHIP3004786, BRHIP3004863, BRHIP3004968, BRHIP3005037, BRHIP3005137, BRHIP3005142, BRHIP3005231, BRHIP3005307, BRHIP3005574, BRHIP3005673, BRHIP3005768, BRHIP3005801, BRHIP3005944, BRHIP3006279, BRHIP3006294, BRHIP3006390, BRHIP3006449, BRHIP3006683, BRHIP3006717, BRHIP3006786, BRHIP3006950, BRHIP3007172, BRHIP3007183, BRHIP3007195, BRHIP3007223, BRHIP3007239, BRHIP3007291, BRHIP3007409, BRHIP3007424, BRHIP3007483, BRHIP3007586, BRHIP3007609, BRHIP3007640, BRHIP3007960, BRHIP3008082, BRHIP3008183, BRHIP3008314, BRHIP3008320, BRHIP3008344, BRHIP3008405, BRHIP3008565, BRHIP3008598, BRHIP3008606, BRHIP3008691, BRHIP3008714, BRHIP3008997, BRHIP3009099, BRHIP3009140, BRHIP3009181, BRHIP3009318, BRHIP3009427, BRHIP3009448, BRHIP3009672, BRHIP3009753, BRHIP3010135, BRHIP3010289, BRHIP3010529, BRHIP3011082, BRHIP3011241, BRHIP3011269, BRHIP3011460, BRHIP3011567, BRHIP3011831, BRHIP3012185, BRHIP3012289, BRHIP3012357, BRHIP3012736, BRHIP3012745, BRHIP3012868, BRHIP3012997, BRHIP3013078, BRHIP3013271, BRHIP3013588, BRHIP3013698, BRHIP3013765, BRHIP3013897, BRHIP3014237, BRHIP3014675, BRHIP3015620, BRHIP3015751, BRHIP3015854, BRHIP3016032, BRHIP3016213, BRHIP3016302, BRHIP3016421, BRHIP3017109, BRHIP3017146, BRHIP3017256, BRHIP3017325, BRHIP3017558, BRHIP3017637, BRHIP3017855, BRHIP3018278, BRHIP3018784, BRHIP3019643, BRHIP3019824, BRHIP3019880, BRHIP3019956, BRHIP3020155, BRHIP3020182, BRHIP3020733, BRHIP3021019, BRHIP3021499, BRHIP3021534, BRHIP3021778, BRHIP3021987, BRHIP3022656, BRHIP3023922, BRHIP3024118, BRHIP3024533, BRHIP3024703, BRHIP3024725, BRHIP3024820, BRHIP3025161, BRHIP3025702, BRHIP3025795, BRHIP3025844, BRHIP3026052, BRHIP3026097, BRHIP3026231, BRHIP3026335, BRHIP3026651, BRHIP3027105, BRHIP3027137, BRHIP3027160, BRHIP3027191, BRHIP3027501, BRHIP3027594, BRHIP3027651, BRHIP3027854, BRHIP3027947, BRHIP3028570, BRHIP3028742, BRSSN1000056, BRSSN1000059, BRSSN1000092, BRSSN1000153, BRSSN2000097, BRSSN2000175, BRSSN2000197, BRSSN2000244, BRSSN2000293, BRSSN2000295, BRSSN2000312, BRSSN2000498, BRSSN2000518, BRSSN2000561, BRSSN2000566, BRSSN2000684, BRSSN2000715, BRSSN2000832, BRSSN2001213, BRSSN2001275, BRSSN2001342, BRSSN2001426, BRSSN2001503, BRSSN2001579, BRSSN2001758, BRSSN2001810, BRSSN2002857, BRSSN2002859, BRSSN2003012, BRSSN2003086, BRSSN2003093, BRSSN2003820, BRSSN2003841, BRSSN2003937, BRSSN2004142, BRSSN2004303, BRSSN2004304, BRSSN2004496, BRSSN2004657, BRSSN2004679, BRSSN2004686, BRSSN2004710, BRSSN2004719, BRSSN2005847, BRSSN2006133, BRSSN2006390, BRSSN2006575, BRSSN2006611, BRSSN2006644, BRSSN2006892, BRSSN2007076, BRSSN2007168, BRSSN2007202, BRSSN2007338, BRSSN2007464, BRSSN2007504, BRSSN2007819, BRSSN2008125, BRSSN2008419, BRSSN2008464, BRSSN2008549, BRSSN2008797, BRSSN2009119, BRSSN2009378, BRSSN2009389, BRSSN2009395, BRSSN2009518, BRSSN2009627, BRSSN2009630, BRSSN2009702, BRSSN2010019, BRSSN2010110, BRSSN2010587, BRSSN2010596, BRSSN2010830, BRSSN2011653, BRSSN2011738, BRSSN2011843, BRSSN2012081, BRSSN2012103, BRSSN2012157, BRSSN2012198, BRSSN2012254, BRSSN2012439, BRSSN2012622, BRSSN2012691, BRSSN2012838, BRSSN2013095, BRSSN2013544, BRSSN2013696, BRSSN2013702, BRSSN2013733, BRSSN2013753, BRSSN2013874, BRSSN2014112, BRSSN2014294, BRSSN2014424, BRSSN2014513, BRSSN2014556, BRSSN2014573, BRSSN2014610, BRSSN2014636, BRSSN2014685, BRSSN2015199, BRSSN2015238, BRSSN2015369, BRSSN2015493, BRSSN2015497, BRSSN2015554, BRSSN2015707, BRSSN2015773, BRSSN2015907, BRSSN2015982, BRSSN2016589, BRSSN2016768, BRSSN2016905, BRSSN2017297, BRSSN2017422, BRSSN2017530, BRSSN2017682, BRSSN2017757, BRSSN2018218, BRSSN2018440, BRSSN2018447, BRSSN2018581, BRSSN2018731, BRSSN2018771, BRSSN2018925, BRSTN1000083, BRSTN1000097, BRSTN2000058, BRSTN2000070, BRSTN2000220, BRSTN2000312, BRSTN2000367, BRSTN2000536, BRSTN2000872, BRSTN2001613, BRSTN2001801, BRSTN2002105, BRSTN2002400, BRSTN2002532, BRSTN2002691, BRSTN2003590, BRSTN2003835, BRSTN2004863, BRSTN2004869, BRSTN2004987, BRSTN2005721, BRSTN2006306, BRSTN2006466, BRSTN2006580, BRSTN2006583, BRSTN2006638, BRSTN2006865, BRSTN2007000, BRSTN2007118, BRSTN2007284, BRSTN2007765, BRSTN2008052, BRSTN2008283, BRSTN2008367, BRSTN2008418, BRSTN2008457, BRSTN2008475, BRSTN2008930, BRSTN2009247, BRSTN2010089, BRSTN2010107, BRSTN2010363, BRSTN2010416, BRSTN2010500, BRSTN2010569, BRSTN2010750, BRSTN2010923, BRSTN2011211, BRSTN2011597, BRSTN2011688, BRSTN2011799, BRSTN2012089, BRSTN2012174, BRSTN2012284, BRSTN2012320, BRSTN2012380, BRSTN2013354, BRSTN2013502, BRSTN2014490, BRSTN2014633, BRSTN2014751, BRSTN2014770, BRSTN2015015, BRSTN2015889, BRSTN2015978, BRSTN2016066, BRSTN2016335, BRSTN2016678, BRSTN2016892, BRSTN2016918, BRSTN2016992, BRSTN2017104, BRSTN2017151, BRSTN2017237, BRSTN2017379, BRSTN2017761, BRSTN2017771, BRSTN2017995, BRSTN2018077, BRSTN2018083, BRSTN2018596, BRSTN2018692, BRSTN2018712, BRSTN2019079, BRSTN2019129, BRTHA1000021, BRTHA1000063, BRTHA1000311, BRTHA2000057, BRTHA2000474, BRTHA2000514, BRTHA2000574, BRTHA2000855, BRTHA2000969, BRTHA2000972, BRTHA2001304, BRTHA2001370, BRTHA2001462, BRTHA2001717, BRTHA2001812, BRTHA2002091, BRTHA2002115, BRTHA2002133, BRTHA2002281, BRTHA2002376, BRTHA2002442, BRTHA2002493, BRTHA2002565, BRTHA2002608, BRTHA2002702, BRTHA2002721, BRTHA2002726, BRTHA2002741, BRTHA2002808, BRTHA2002896, BRTHA2002903, BRTHA2003030, BRTHA2003110, BRTHA2003116, BRTHA2003436, BRTHA2003759, BRTHA2003794, BRTHA2004361, BRTHA2004371, BRTHA2004582, BRTHA2004629, BRTHA2004639, BRTHA2004642, BRTHA2004812, BRTHA2004821, BRTHA2004978, BRTHA2004992, BRTHA2005005, BRTHA2005013, BRTHA2005448, BRTHA2005579, BRTHA2005831, BRTHA2005942, BRTHA2005956, BRTHA2006075, BRTHA2006146, BRTHA2006194, BRTHA2006232, BRTHA2006720, BRTHA2006735, BRTHA2006974, BRTHA2006975, BRTHA2007060, BRTHA2007122, BRTHA2007422, BRTHA2007603, BRTHA2007665, BRTHA2007998, BRTHA2008316, BRTHA2008335, BRTHA2008502, BRTHA2008513, BRTHA2008527, BRTHA2008535, BRTHA2008598, BRTHA2008669, BRTHA2008955, BRTHA2009311, BRTHA2009349, BRTHA2009486, BRTHA2009803, BRTHA2009846, BRTHA2009886, BRTHA2009972, BRTHA2010008, BRTHA2010033, BRTHA2010073, BRTHA2010097, BRTHA2010191, BRTHA2010397, BRTHA2010608, BRTHA2010672, BRTHA2010884, BRTHA2010907, BRTHA2011062, BRTHA2011194, BRTHA2011321, BRTHA2011351, BRTHA2011500, BRTHA2011641, BRTHA2011691, BRTHA2012129, BRTHA2012183, BRTHA2012189, BRTHA2012351, BRTHA2012392, BRTHA2012466, BRTHA2012555, BRTHA2012562, BRTHA2012714, BRTHA2012980, BRTHA2013054, BRTHA2013262, BRTHA2013275, BRTHA2013426, BRTHA2013460, BRTHA2013515, BRTHA2013540, BRTHA2013595, BRTHA2013610, BRTHA2013707, BRTHA2013942, BRTHA2014287, BRTHA2014334, BRTHA2014381, BRTHA2014578, BRTHA2014647, BRTHA2014663, BRTHA2014792, BRTHA2014828, BRTHA2014909, BRTHA2014975, BRTHA2014997, BRTHA2015406, BRTHA2015478, BRTHA2015696, BRTHA2015700, BRTHA2015853, BRTHA2015878, BRTHA2016179, BRTHA2016215, BRTHA2016267, BRTHA2016318, BRTHA2016496, BRTHA2016543, BRTHA2016552, BRTHA2016577, BRTHA2016765, BRTHA2016918, BRTHA2017178, BRTHA2017353, BRTHA2017364, BRTHA2017972, BRTHA2017985, BRTHA2018011, BRTHA2018129, BRTHA2018165, BRTHA2018304, BRTHA2018344, BRTHA2018420, BRTHA2018443, BRTHA2018504, BRTHA2018558, BRTHA2018591, BRTHA2018624, BRTHA2018706, BRTHA2018707, BRTHA2019014, BRTHA2019022, BRTHA2019048, BRTHA2019073, BRTHA2019726, BRTHA2019743, BRTHA2020400, BRTHA2020566, BRTHA2020642, BRTHA2020695, BRTHA2020721, BRTHA2020781, BRTHA2020811, BRTHA2020910, BRTHA2021212, BRTHA2021440, BRTHA2021450, BRTHA2022074, BRTHA2022914, BRTHA2022968, BRTHA2023402, BRTHA2023437, BRTHA2024177, BRTHA2024354, BRTHA2024712, BRTHA2025869, BRTHA2026071, BRTHA2026290, BRTHA2026311, BRTHA2027227, BRTHA2027229, BRTHA2027250, BRTHA2027546, BRTHA2028297, BRTHA2029969, BRTHA2030036, BRTHA2030213, BRTHA2031517, BRTHA2031800, BRTHA2031917, BRTHA2032763, BRTHA2032845, BRTHA2033122, BRTHA2033155, BRTHA2033264, BRTHA2033320, BRTHA2033469, BRTHA2033683, BRTHA2034281, BRTHA2034576, BRTHA2034874, BRTHA2035448, BRTHA2035743, BRTHA2036055, BRTHA2036295, BRTHA2036660, BRTHA2037247, BRTHA2038279, BRTHA2038345, BRTHA2038353, BRTHA2038396, BRTHA3000252, BRTHA3000273, BRTHA3000296, BRTHA3000297, BRTHA3000325, BRTHA3000456, BRTHA3000633, BRTHA3000789, BRTHA3001221, BRTHA3001623, BRTHA3002265, BRTHA3002401, BRTHA3002411, BRTHA3002427, BRTHA3002864, BRTHA3002933, BRTHA3002955, BRTHA3003000, BRTHA3003074, BRTHA3003225, BRTHA3003339, BRTHA3003343, BRTHA3003417, BRTHA3003449, BRTHA3003474, BRTHA3003704, BRTHA3004307, BRTHA3004432, BRTHA3004475, BRTHA3004502, BRTHA3004610, BRTHA3005046, BRTHA3005735, BRTHA3005988, BRTHA3006318, BRTHA3006593, BRTHA3006856, BRTHA3007113, BRTHA3007130, BRTHA3007148, BRTHA3007319, BRTHA3007469, BRTHA3007532, BRTHA3007662, BRTHA3007685, BRTHA3007769, BRTHA3007922, BRTHA3008143, BRTHA3008293, BRTHA3008310, BRTHA3008386, BRTHA3008520, BRTHA3008608, BRTHA3008694, BRTHA3008778, BRTHA3008826, BRTHA3009037, BRTHA3009090, BRTHA3009291, BRTHA3009858, BRTHA3010135, BRTHA3010366, BRTHA3010469, BRTHA3010530, BRTHA3010540, BRTHA3010717, BRTHA3011149, BRTHA3011187, BRTHA3011194, BRTHA3011229, BRTHA3011265, BRTHA3011361, BRTHA3011510, BRTHA3011892, BRTHA3012265, BRTHA3013860, BRTHA3013882, BRTHA3013884, BRTHA3013981, BRTHA3014000, BRTHA3014105, BRTHA3014507, BRTHA3014547, BRTHA3014691, BRTHA3014835, BRTHA3014854, BRTHA3014908, BRTHA3014920, BRTHA3015815, BRTHA3016616, BRTHA3016835, BRTHA3016845, BRTHA3016917, BRTHA3017047, BRTHA3017589, BRTHA3017848, BRTHA3018409, BRTHA3018514, BRTHA3018617, BRTHA3018623, BRTHA3018656, BRTHA3019048, BRTHA3019105, BRTHA3019183, BRTHA3020000, BRTHA3020314, BRTHA3020369, BRTHA3021569, BRTHA3021708, BRTHA3021786, BRTHA3021971, BRTHA3022641, BRTHA3023403, BRTHA3023523, BRTHA3023590, BRTHA3023929, BRTHA3024233, BRTHA3024600, BRTHA3025073, BRTHA3025789, BRTHA3025826, BRTHA3026161, BRTHA3026180, BRTHA3026507, BRTHA3026556, BRTHA3026916, BRTHA3027171, BRTHA3027318, BRTHA3027638, BRTHA3027820, BRTHA3027879, BRTHA3027957, BRTHA3028339, BRTHA3028505, BRTHA3028782, CD34C2000051, CD34C2000152, CD34C2000175, CD34C2000443, CD34C3000125, CD34C3000314, CD34C3000424, CD34C3000494, CERVX1000042, CERVX2000812, CERVX2000968, CERVX2002006, CERVX2002013, CERVX2002430, CERVX2002770, CHONS1000058, CHONS2000172, CHONS2000797, CHONS2001287, CHONS2001382, CHONS2001797, CHONS2001834, CHONS2002419, CHONS2002829, COLON1000030, COLON1000084, COLON1000135, COLON2000470, COLON2000557, COLON2000568, COLON2001721, COLON2001829, COLON2001866, COLON2002443, COLON2002520, COLON2003043, COLON2003529, COLON2004318, COLON2004351, COLON2004478, COLON2004911, COLON2005126, COLON2005623, COLON2005735, COLON2005772, COLON2006263, COLON2006282, COLON2006417, COLON2007274, COLON2007733, COLON2008105, COLON2009337, COLON2009499, CORDB1000140, CORDB2000061, CORDB2000127, CORDB2000541, CTONG1000009, CTONG1000010, CTONG1000020, CTONG1000022, CTONG1000040, CTONG1000052, CTONG1000056, CTONG1000062, CTONG1000086, CTONG1000088, CTONG1000093, CTONG1000097, CTONG1000113, CTONG1000137, CTONG1000165, CTONG1000175, CTONG1000180, CTONG1000181, CTONG1000218, CTONG1000220, CTONG1000241, CTONG1000277, CTONG1000283, CTONG1000288, CTONG1000302, CTONG1000341, CTONG1000467, CTONG1000476, CTONG1000488, CTONG1000508, CTONG1000540, CTONG2000031, CTONG2000034, CTONG2000042, CTONG2000063, CTONG2000201, CTONG2000218, CTONG2000279, CTONG2000303, CTONG2000330, CTONG2000395, CTONG2000411, CTONG2000452, CTONG2000465, CTONG2000480, CTONG2000508, CTONG2000589, CTONG2000766, CTONG2000771, CTONG2000819, CTONG2000827, CTONG2000846, CTONG2000855, CTONG2000977, CTONG2001139, CTONG2001226, CTONG2001320, CTONG2001366, CTONG2001413, CTONG2001428, CTONG2001513, CTONG2001524, CTONG2001533, CTONG2001598, CTONG2001681, CTONG2001724, CTONG2001748, CTONG2001749, CTONG2001800, CTONG2001820, CTONG2001858, CTONG2001877, CTONG2001911, CTONG2001932, CTONG2001955, CTONG2002066, CTONG2002073, CTONG2002095, CTONG2002143, CTONG2002270, CTONG2002395, CTONG2002417, CTONG2002418, CTONG2002453, CTONG2002520, CTONG2002558, CTONG2002590, CTONG2002709, CTONG2002721, CTONG2002744, CTONG2002766, CTONG2002803, CTONG2002816, CTONG2002820, CTONG2002832, CTONG2002841, CTONG2002965, CTONG2002999, CTONG2003028, CTONG2003100, CTONG2003115, CTONG2003189, CTONG2003245, CTONG2003293, CTONG2003348, CTONG2003350, CTONG2003361, CTONG2003372, CTONG2003375, CTONG2003427, CTONG2003517, CTONG2003524, CTONG2003599, CTONG2003680, CTONG2003699, CTONG2003782, CTONG2003889, CTONG2003937, CTONG2003945, CTONG2004000, CTONG2004062, CTONG2004126, CTONG2004264, CTONG2004305, CTONG2004397, CTONG2004423, CTONG2004454, CTONG2004487, CTONG2004550, CTONG2004669, CTONG2004716, CTONG2004912, CTONG2004941, CTONG2004948, CTONG2005028, CTONG2005049, CTONG2005110, CTONG2005145, CTONG2005265, CTONG2005290, CTONG2005374, CTONG2005399, CTONG2005468, CTONG2005567, CTONG2005585, CTONG2005615, CTONG2005635, CTONG2005775, CTONG2005795, CTONG2005890, CTONG2005904, CTONG2005913, CTONG2006004, CTONG2006129, CTONG2006223, CTONG2006235, CTONG2006273, CTONG2006310, CTONG2006377, CTONG2006393, CTONG2006412, CTONG2006449, CTONG2006515, CTONG2006524, CTONG2006562, CTONG2006568, CTONG2006611, CTONG2006620, CTONG2006666, CTONG2006691, CTONG2006709, CTONG2006798, CTONG2006836, CTONG2006942, CTONG2006964, CTONG2007007, CTONG2007009, CTONG2007072, CTONG2007078, CTONG2007091, CTONG2007104, CTONG2007168, CTONG2007175, CTONG2007259, CTONG2007272, CTONG2007293, CTONG2007297, CTONG2007399, CTONG2007400, CTONG2007417, CTONG2007441, CTONG2007474, CTONG2007500, CTONG2007586, CTONG2007613, CTONG2007623, CTONG2007681, CTONG2007776, CTONG2007779, CTONG2007898, CTONG2007959, CTONG2007970, CTONG2008014, CTONG2008184, CTONG2008262, CTONG2008321, CTONG2008343, CTONG2008398, CTONG2008402, CTONG2008405, CTONG2008466, CTONG2008518, CTONG2008521, CTONG2008562, CTONG2008577, CTONG2008595, CTONG2008621, CTONG2008689, CTONG2008720, CTONG2008721, CTONG2008773, CTONG2008792, CTONG2008989, CTONG2009033, CTONG2009108, CTONG2009132, CTONG2009156, CTONG2009181, CTONG2009257, CTONG2009258, CTONG2009268, CTONG2009270, CTONG2009395, CTONG2009423, CTONG2009440, CTONG2009527, CTONG2009529, CTONG2009531, CTONG2009534, CTONG2009570, CTONG2009572, CTONG2009604, CTONG2009643, CTONG2009675, CTONG2009689, CTONG2009725, CTONG2009766, CTONG2009768, CTONG2009844, CTONG2009871, CTONG2009887, CTONG2009891, CTONG2009923, CTONG2009938, CTONG2009955, CTONG2009958, CTONG2009963, CTONG2010018, CTONG2010024, CTONG2010116, CTONG2010133, CTONG2010148, CTONG2010276, CTONG2010330, CTONG2010408, CTONG2010508, CTONG2010566, CTONG2010623, CTONG2010652, CTONG2010803, CTONG2010821, CTONG2011188, CTONG2011429, CTONG2011474, CTONG2011676, CTONG2011716, CTONG2011765, CTONG2011779, CTONG2011815, CTONG2011822, CTONG2011825, CTONG2011920, CTONG2011985, CTONG2012001, CTONG2012029, CTONG2012050, CTONG2012077, CTONG2012101, CTONG2012123, CTONG2012158, CTONG2012230, CTONG2012401, CTONG2012422, CTONG2012425, CTONG2012447, CTONG2012473, CTONG2012476, CTONG2012533, CTONG2012554, CTONG2012564, CTONG2012607, CTONG2012661, CTONG2012724, CTONG2012738, CTONG2012745, CTONG2012758, CTONG2012843, CTONG2012847, CTONG2012879, CTONG2012901, CTONG2012996, CTONG2013128, CTONG2013149, CTONG2013156, CTONG2013178, CTONG2013222, CTONG2013284, CTONG2013339, CTONG2013348, CTONG2013352, CTONG2013381, CTONG2013393, CTONG2013511, CTONG2013630, CTONG2013803, CTONG2013907, CTONG2013934, CTONG2013985, CTONG2013986, CTONG2014032, CTONG2014058, CTONG2014119, CTONG2014165, CTONG2014191, CTONG2014206, CTONG2014234, CTONG2014264, CTONG2014280, CTONG2014369, CTONG2014389, CTONG2014491, CTONG2014630, CTONG2014635, CTONG2014646, CTONG2014898, CTONG2014946, CTONG2014954, CTONG2014959, CTONG2014966, CTONG2014995, CTONG2015204, CTONG2015316, CTONG2015330, CTONG2015345, CTONG2015358, CTONG2015434, CTONG2015518, CTONG2015540, CTONG2015596, CTONG2015633, CTONG2015678, CTONG2015717, CTONG2015804, CTONG2015815, CTONG2015866, CTONG2015914, CTONG2015953, CTONG2016056, CTONG2016217, CTONG2016355, CTONG2016408, CTONG2016499, CTONG2016505, CTONG2016559, CTONG2016658, CTONG2016775, CTONG2016797, CTONG2016824, CTONG2016846, CTONG2016869, CTONG2016904, CTONG2016931, CTONG2016942, CTONG2016953, CTONG2017021, CTONG2017094, CTONG2017292, CTONG2017409, CTONG2017429, CTONG2017444, CTONG2017458, CTONG2017500, CTONG2017604, CTONG2017650, CTONG2017798, CTONG2017804, CTONG2017814, CTONG2017910, CTONG2017939, CTONG2017989, CTONG2017998, CTONG2018062, CTONG2018069, CTONG2018147, CTONG2018211, CTONG2018217, CTONG2018279, CTONG2018334, CTONG2018343, CTONG2018379, CTONG2018413, CTONG2018483, CTONG2018629, CTONG2018632, CTONG2018637, CTONG2018652, CTONG2018653, CTONG2018655, CTONG2018735, CTONG2018808, CTONG2018843, CTONG2018900, CTONG2018976, CTONG2019029, CTONG2019063, CTONG2019144, CTONG2019232, CTONG2019248, CTONG2019400, CTONG2019590, CTONG2019652, CTONG2019704, CTONG2019788, CTONG2019822, CTONG2019833, CTONG2020031, CTONG2020108, CTONG2020127, CTONG2020171, CTONG2020374, CTONG2020378, CTONG2020411, CTONG2020445, CTONG2020522, CTONG2020582, CTONG2020638, CTONG2020806, CTONG2020831, CTONG2020974, CTONG2021024, CTONG2021132, CTONG2021168, CTONG2021289, CTONG2022153, CTONG2022601, CTONG2022835, CTONG2023021, CTONG2023449, CTONG2023512, CTONG2024031, CTONG2024206, CTONG2024614, CTONG2024749, CTONG2025496, CTONG2025513, CTONG2025516, CTONG2025610, CTONG2025900, CTONG2026513, CTONG2026770, CTONG2026920, CTONG2026987, CTONG2027150, CTONG2027263, CTONG2027327, CTONG2027361, CTONG2027591, CTONG2027736, CTONG2027783, CTONG2027828, CTONG2027959, CTONG2028097, CTONG2028124, CTONG2028208, CTONG2028309, CTONG2028486, CTONG2028518, CTONG2028687, CTONG2028758, CTONG3000657, CTONG3000686, CTONG3000707, CTONG3000896, CTONG3001123, CTONG3001420, CTONG3001501, CTONG3001560, CTONG3001605, CTONG3001746, CTONG3002020, CTONG3002127, CTONG3002370, CTONG3002412, CTONG3002433, CTONG3002518, CTONG3002552, CTONG3002588, CTONG3002674, CTONG3002728, CTONG3002835, CTONG3002909, CTONG3002947, CTONG3002983, CTONG3003165, CTONG3003179, CTONG3003483, CTONG3003553, CTONG3003598, CTONG3003652, CTONG3003654, CTONG3003669, CTONG3003737, CTONG3003905, CTONG3003972, CTONG3004072, CTONG3004317, CTONG3004397, CTONG3004550, CTONG3004576, CTONG3004607, CTONG3004712, CTONG3004726, CTONG3005325, CTONG3005648, CTONG3005713, CTONG3005803, CTONG3005813, CTONG3006067, CTONG3006073, CTONG3006186, CTONG3006629, CTONG3006650, CTONG3006659, CTONG3007244, CTONG3007444, CTONG3007528, CTONG3007586, CTONG3007870, CTONG3008223, CTONG3008252, CTONG3008258, CTONG3008457, CTONG3008496, CTONG3008566, CTONG3008639, CTONG3008831, CTONG3008894, CTONG3008951, CTONG3008959, CTONG3009028, CTONG3009227, CTONG3009287, CTONG3009328, CTONG3009385, D30ST1000066, D30ST1000109, D30ST1000238, D30ST1000267, D30ST1000270, D30ST2000184, D30ST2000618, D30ST2000654, D30ST2000734, D30ST2001328, D30ST2001669, D30ST2001788, D30ST2002068, D30ST2002182, D30ST2002223, D30ST2002262, D30ST2002272, D30ST2002417, D30ST2002436, D30ST2002648, D30ST2003024, D30ST2003331, D30ST2003607, D30ST2003797, D30ST2004637, D30ST3000169, D30ST3000195, D30ST3000258, D30ST3000291, D30ST3000388, D30ST3000493, D60ST2000127, D60ST2000169, D60ST2000245, D60ST2000358, D60ST2000464, D60ST2000507, D90ST2000031, D90ST2000278, D90ST2000440, D90ST2000869, D90ST2001319, D90ST2001433, D90ST2002397, D90ST2002608, D90ST2002673, D90ST2003106, D90ST2003108, D90ST2003137, D90ST2003397, D90ST2003580, D90ST2003594, D90ST2003762, D90ST2003791, D90ST2003989, D90ST2004018, D90ST2004073, D90ST2004417, DFNES1000003, DFNES1000083, DFNES1000107, DFNES1000150, DFNES1000185, DFNES2000011, DFNES2000143, DFNES2000146, DFNES2000212, DFNES2000268, DFNES2000335, DFNES2000426, DFNES2000432, DFNES2000457, DFNES2000471, DFNES2000913, DFNES2001096, DFNES2001108, DFNES2001177, DFNES2001404, DFNES2001564, DFNES2001565, DFNES2001647, DFNES2001800, DFNES2001829, DFNES2002220, DFNES2002509, DFNES2002550, DFNES2002588, DFNES2002817, DFNES2002966, DFNES2003081, DFNES2003192, DFNES2003255, DFNES2003742, DFNES2004346, DFNES2004354, DFNES2004383, DFNES2004608, DFNES2004684, DFNES2005266, DFNES2005527, DFNES2005540, DFNES2005690, DFNES2005766, DFNES2005779, DFNES2005875, DFNES2006346, DFNES2006944, DFNES2007113, DFNES2007299, DFNES2007332, DFNES2007634, DFNES2007757, DFNES2008088, DFNES2008160, DFNES2008280, DFNES2008881, DFNES2009482, DFNES2010502, DFNES2011192, DFNES2011221, DFNES2011239, DFNES2011245, DFNES2011380, DFNES2011499, ERLTF1000021, ERLTF2000324, ERLTF2000465, FCBBF1000024, FCBBF1000027, FCBBF1000038, FCBBF1000053, FCBBF1000061, FCBBF1000069, FCBBF1000077, FCBBF1000115, FCBBF1000117, FCBBF1000118, FCBBF1000121, FCBBF1000125, FCBBF1000131, FCBBF1000139, FCBBF1000155, FCBBF1000157, FCBBF1000171, FCBBF1000174, FCBBF1000182, FCBBF1000197, FCBBF1000198, FCBBF1000206, FCBBF1000220, FCBBF1000232, FCBBF1000233, FCBBF1000243, FCBBF1000270, FCBBF1000272, FCBBF1000280, FCBBF1000294, FCBBF1000297, FCBBF1000305, FCBBF1000314, FCBBF1000322, FCBBF1000349, FCBBF1000374, FCBBF1000376, FCBBF1000377, FCBBF1000395, FCBBF1000397, FCBBF1000403, FCBBF1000412, FCBBF1000425, FCBBF1000437, FCBBF1000449, FCBBF1000476, FCBBF1000506, FCBBF1000509, FCBBF1000546, FCBBF1000550, FCBBF1000556, FCBBF1000563, FCBBF1000574, FCBBF1000581, FCBBF1000582, FCBBF1000598, FCBBF1000604, FCBBF1000618, FCBBF1000627, FCBBF1000671, FCBBF1000675, FCBBF1000684, FCBBF1000686, FCBBF1000687, FCBBF1000691, FCBBF1000732, FCBBF1000748, FCBBF2000038, FCBBF2000094, FCBBF2000105, FCBBF2000123, FCBBF2000195, FCBBF2000199, FCBBF2000214, FCBBF2000232, FCBBF2000259, FCBBF2000276, FCBBF2000291, FCBBF2000362, FCBBF2000379, FCBBF2000473, FCBBF2000566, FCBBF2000576, FCBBF2000677, FCBBF2000678, FCBBF2000685, FCBBF2000733, FCBBF2000782, FCBBF2000808, FCBBF2000815, FCBBF2000825, FCBBF2000940, FCBBF2000951, FCBBF2001001, FCBBF2001088, FCBBF2001116, FCBBF2001183, FCBBF2001188, FCBBF2001211, FCBBF2001238, FCBBF2001243, FCBBF2001291, FCBBF2001299, FCBBF2001309, FCBBF2001400, FCBBF2001427, FCBBF2001480, FCBBF2001529, FCBBF2001538, FCBBF2001594, FCBBF2001672, FCBBF2001675, FCBBF2001718, FCBBF2001720, FCBBF2001817, FCBBF2001868, FCBBF2002044, FCBBF2002111, FCBBF2002281, FCBBF2002349, FCBBF2002370, FCBBF2002541, FCBBF2002626, FCBBF2002801, FCBBF2002897, FCBBF2002898, FCBBF2002904, FCBBF2002928, FCBBF2002953, FCBBF2003083, FCBBF2003102, FCBBF2003269, FCBBF2003293, FCBBF2003297, FCBBF2003395, FCBBF2003528, FCBBF2003543, FCBBF2003549, FCBBF2003567, FCBBF2003636, FCBBF2003823, FCBBF2003895, FCBBF2004066, FCBBF2004090, FCBBF2004138, FCBBF2004217, FCBBF2004256, FCBBF2004373, FCBBF2004448, FCBBF2004671, FCBBF2004707, FCBBF2004788, FCBBF2005069, FCBBF2005122, FCBBF2005428, FCBBF2005439, FCBBF2005538, FCBBF2005637, FCBBF2005645, FCBBF2005658, FCBBF2005733, FCBBF2005909, FCBBF2005966, FCBBF2006131, FCBBF2006380, FCBBF2006418, FCBBF2006452, FCBBF2006634, FCBBF2006781, FCBBF2007012, FCBBF2007186, FCBBF2007265, FCBBF2007302, FCBBF2007556, FCBBF2007610, FCBBF2007633, FCBBF2007840, FCBBF3000102, FCBBF3000110, FCBBF3000115, FCBBF3000120, FCBBF3000168, FCBBF3000175, FCBBF3000227, FCBBF3000228, FCBBF3000229, FCBBF3000233, FCBBF3000269, FCBBF3000361, FCBBF3000367, FCBBF3000388, FCBBF3000434, FCBBF3000462, FCBBF3000473, FCBBF3000501, FCBBF3000518, FCBBF3000536, FCBBF3000550, FCBBF3000847, FCBBF3001018, FCBBF3001020, FCBBF3001081, FCBBF3001235, FCBBF3001281, FCBBF3001302, FCBBF3001377, FCBBF3001470, FCBBF3001594, FCBBF3001657, FCBBF3001818, FCBBF3001855, FCBBF3001890, FCBBF3001912, FCBBF3001914, FCBBF3001918, FCBBF3001924, FCBBF3001977, FCBBF3002163, FCBBF3002188, FCBBF3002190, FCBBF3002268, FCBBF3002475, FCBBF3002556, FCBBF3002592, FCBBF3002658, FCBBF3002782, FCBBF3002818, FCBBF3002925, FCBBF3003216, FCBBF3003305, FCBBF3003373, FCBBF3003435, FCBBF3003475, FCBBF3003481, FCBBF3003557, FCBBF3003787, FCBBF3003902, FCBBF3004021, FCBBF3004041, FCBBF3004261, FCBBF3004323, FCBBF3004390, FCBBF3004409, FCBBF3004502, FCBBF3004715, FCBBF3004842, FCBBF3004847, FCBBF3004955, FCBBF3005160, FCBBF3005218, FCBBF3005330, FCBBF3005444, FCBBF3005698, FCBBF3005729, FCBBF3006171, FCBBF3006249, FCBBF3006288, FCBBF3006399, FCBBF3006628, FCBBF3006821, FCBBF3007077, FCBBF3007150, FCBBF3007152, FCBBF3007242, FCBBF3007244, FCBBF3007248, FCBBF3007453, FCBBF3007462, FCBBF3007540, FCBBF3007597, FCBBF3007604, FCBBF3007631, FCBBF3007829, FCBBF3007855, FCBBF3007859, FCBBF3007860, FCBBF3008073, FCBBF3008100, FCBBF3008153, FCBBF3008159, FCBBF3008251, FCBBF3008311, FCBBF3008362, FCBBF3008382, FCBBF3008475, FCBBF3008556, FCBBF3008644, FCBBF3008689, FCBBF3008748, FCBBF3008870, FCBBF3008938, FCBBF3008944, FCBBF3009069, FCBBF3009101, FCBBF3009152, FCBBF3009256, FCBBF3009317, FCBBF3009428, FCBBF3009464, FCBBF3009479, FCBBF3009526, FCBBF3009541, FCBBF3009703, FCBBF3009717, FCBBF3009888, FCBBF3009949, FCBBF3009978, FCBBF3010008, FCBBF3010012, FCBBF3010124, FCBBF3010130, FCBBF3010142, FCBBF3010149, FCBBF3010211, FCBBF3010361, FCBBF3010508, FCBBF3010544, FCBBF3010586, FCBBF3010601, FCBBF3010665, FCBBF3010695, FCBBF3010729, FCBBF3010733, FCBBF3011003, FCBBF3011418, FCBBF3011485, FCBBF3011523, FCBBF3011570, FCBBF3011592, FCBBF3011867, FCBBF3011889, FCBBF3012170, FCBBF3012182, FCBBF3012288, FCBBF3012332, FCBBF3012347, FCBBF3012443, FCBBF3012588, FCBBF3012667, FCBBF3012842, FCBBF3012901, FCBBF3013041, FCBBF3013058, FCBBF3013205, FCBBF3013266, FCBBF3013307, FCBBF3013341, FCBBF3013506, FCBBF3013589, FCBBF3013623, FCBBF3013800, FCBBF3013846, FCBBF3014229, FCBBF3014260, FCBBF3014355, FCBBF3014567, FCBBF3014770, FCBBF3015100, FCBBF3015119, FCBBF3015131, FCBBF3015317, FCBBF3015727, FCBBF3015758, FCBBF3015809, FCBBF3015870, FCBBF3016018, FCBBF3016134, FCBBF3016178, FCBBF3016451, FCBBF3016618, FCBBF3016622, FCBBF3016644, FCBBF3016667, FCBBF3016987, FCBBF3017024, FCBBF3017059, FCBBF3017071, FCBBF3017123, FCBBF3017233, FCBBF3017255, FCBBF3017288, FCBBF3017396, FCBBF3017531, FCBBF3017535, FCBBF3017681, FCBBF3017729, FCBBF3017873, FCBBF3017918, FCBBF3017974, FCBBF3018067, FCBBF3018173, FCBBF3018453, FCBBF3018591, FCBBF3018753, FCBBF3018796, FCBBF3018826, FCBBF3018949, FCBBF3019085, FCBBF3019320, FCBBF3019437, FCBBF3019455, FCBBF3019564, FCBBF3019569, FCBBF3019570, FCBBF3019663, FCBBF3019714, FCBBF3019716, FCBBF3019784, FCBBF3019867, FCBBF3019961, FCBBF3020030, FCBBF3020138, FCBBF3020140, FCBBF3020163, FCBBF3020232, FCBBF3020599, FCBBF3021026, FCBBF3021191, FCBBF3021221, FCBBF3021501, FCBBF3021506, FCBBF3021524, FCBBF3021807, FCBBF3021940, FCBBF3021985, FCBBF3022005, FCBBF3022291, FCBBF3022311, FCBBF3022504, FCBBF3022566, FCBBF3022593, FCBBF3022765, FCBBF3022767, FCBBF3022894, FCBBF3023061, FCBBF3023078, FCBBF3023368, FCBBF3023372, FCBBF3023443, FCBBF3023599, FCBBF3023704, FCBBF3023887, FCBBF3023895, FCBBF3024002, FCBBF3024096, FCBBF3024225, FCBBF3024266, FCBBF3024364, FCBBF3024623, FCBBF3024793, FCBBF3024911, FCBBF3025098, FCBBF3025252, FCBBF3025280, FCBBF3025285, FCBBF3025417, FCBBF3025528, FCBBF3025568, FCBBF3025650, FCBBF3025674, FCBBF3025730, FCBBF3025737, FCBBF3025905, FCBBF3026021, FCBBF3026048, FCBBF3026251, FCBBF3026308, FCBBF3026651, FCBBF3026678, FCBBF3026692, FCBBF3027104, FCBBF3027199, FCBBF3027328, FCBBF3027559, FCBBF3027717, FCBBF3027755, FCBBF3027768, FCBBF3027854, FCBBF3027863, FCBBF3027903, FCBBF3028102, FCBBF3028143, FCBBF3028188, FCBBF3028202, FCBBF3028244, FCBBF3028472, FCBBF3028528, FCBBF3028582, FCBBF3028593, FCBBF3028671, FCBBF3028794, FCBBF4000017, FCBBF4000061, FCBBF4000076, FCBBF4000142, FCBBF4000173, FCBBF4000192, FCBBF4000193, FCBBF4000268, FCBBF4000282, FCBBF4000399, FCBBF4000415, FCBBF4000500, FCBBF4000529, FCBBF4000548, FCBBF5000041, FCBBF5000061, FCBBF5000165, FCBBF5000261, FCBBF5000325, FCBBF5000353, FCBBF5000384, FCBBF5000483, FCBBF5000495, FEBRA1000005, FEBRA1000008, FEBRA1000022, FEBRA1000030, FEBRA1000088, FEBRA1000138, FEBRA1000148, FEBRA1000149, FEBRA1000183, FEBRA1000188, FEBRA1000189, FEBRA1000190, FEBRA2000007, FEBRA2000021, FEBRA2000035, FEBRA2000053, FEBRA2000105, FEBRA2000126, FEBRA2000210, FEBRA2000220, FEBRA2000228, FEBRA2000253, FEBRA2000282, FEBRA2000286, FEBRA2000297, FEBRA2000311, FEBRA2000321, FEBRA2000333, FEBRA2000377, FEBRA2000378, FEBRA2000391, FEBRA2000394, FEBRA2000397, FEBRA2000399, FEBRA2000402, FEBRA2000404, FEBRA2000409, FEBRA2000415, FEBRA2000436, FEBRA2000452, FEBRA2000454, FEBRA2000462, FEBRA2000468, FEBRA2000491, FEBRA2000504, FEBRA2000510, FEBRA2000532, FEBRA2000536, FEBRA2000538, FEBRA2000575, FEBRA2000581, FEBRA2000656, FEBRA2000659, FEBRA2000680, FEBRA2000690, FEBRA2000727, FEBRA2000734, FEBRA2000740, FEBRA2000757, FEBRA2000771, FEBRA2000782, FEBRA2000787, FEBRA2000790, FEBRA2000793, FEBRA2000803, FEBRA2000805, FEBRA2000809, FEBRA2000815, FEBRA2000856, FEBRA2000862, FEBRA2000877, FEBRA2000880, FEBRA2000901, FEBRA2000909, FEBRA2000917, FEBRA2000928, FEBRA2000936, FEBRA2000937, FEBRA2000959, FEBRA2000972, FEBRA2001004, FEBRA2001012, FEBRA2001020, FEBRA2001093, FEBRA2001124, FEBRA2001133, FEBRA2001146, FEBRA2001161, FEBRA2001175, FEBRA2001197, FEBRA2001217, FEBRA2001227, FEBRA2001267, FEBRA2001334, FEBRA2001351, FEBRA2001383, FEBRA2001438, FEBRA2001440′, FEBRA2001487, FEBRA2001492, FEBRA2001523, FEBRA2001561, FEBRA2001571, FEBRA2001581, FEBRA2001584, FEBRA2001590, FEBRA2001591, FEBRA2001610, FEBRA2001620, FEBRA2001659, FEBRA2001669, FEBRA2001698, FEBRA2001705, FEBRA2001706, FEBRA2001715, FEBRA2001745, FEBRA2001752, FEBRA2001772, FEBRA2001790, FEBRA2001814, FEBRA2001867, FEBRA2001914, FEBRA2001974, FEBRA2001989, FEBRA2001990, FEBRA2002009, FEBRA2002027, FEBRA2002086, FEBRA2002109, FEBRA2002191, FEBRA2002260, FEBRA2002399, FEBRA2002410, FEBRA2002429, FEBRA2002442, FEBRA2002456, FEBRA2002508, FEBRA2002525, FEBRA2002527, FEBRA2002552, FEBRA2002574, FEBRA2002601, FEBRA2002611, FEBRA2002628, FEBRA2002662, FEBRA2002682, FEBRA2002727, FEBRA2002781, FEBRA2002783, FEBRA2002792, FEBRA2002818, FEBRA2002858, FEBRA2002882, FEBRA2002897, FEBRA2002908, FEBRA2002931, FEBRA2002962, FEBRA2002986, FEBRA2003054, FEBRA2003115, FEBRA2003128, FEBRA2003155, FEBRA2003163, FEBRA2003181, FEBRA2003198, FEBRA2003253, FEBRA2003258, FEBRA2003275, FEBRA2003308, FEBRA2003327, FEBRA2003429, FEBRA2003436, FEBRA2003454, FEBRA2003468, FEBRA2003470, FEBRA2003520, FEBRA2003524, FEBRA2003541, FEBRA2003675, FEBRA2003707, FEBRA2003711, FEBRA2003822, FEBRA2003833, FEBRA2003897, FEBRA2003907, FEBRA2003930, FEBRA2004023, FEBRA2004026, FEBRA2004029, FEBRA2004042, FEBRA2004053, FEBRA2004056, FEBRA2004091, FEBRA2004110, FEBRA2004191, FEBRA2004202, FEBRA2004219, FEBRA2004237, FEBRA2004268, FEBRA2004293, FEBRA2004329, FEBRA2004331, FEBRA2004412, FEBRA2004443, FEBRA2004485, FEBRA2004490, FEBRA2004538, FEBRA2004592, FEBRA2004620, FEBRA2004651, FEBRA2004767, FEBRA2004813, FEBRA2004818, FEBRA2004840, FEBRA2004852, FEBRA2004867, FEBRA2004914, FEBRA2004933, FEBRA2004987, FEBRA2005014, FEBRA2005036, FEBRA2005079, FEBRA2005114, FEBRA2005216, FEBRA2005291, FEBRA2005361, FEBRA2005377, FEBRA2005380, FEBRA2005427, FEBRA2005458, FEBRA2005476, FEBRA2005572, FEBRA2005701, FEBRA2005726, FEBRA2005734, FEBRA2005752, FEBRA2005778, FEBRA2005787, FEBRA2005788, FEBRA2005995, FEBRA2005998, FEBRA2006055, FEBRA2006061, FEBRA2006112, FEBRA2006150, FEBRA2006165, FEBRA2006255, FEBRA2006270, FEBRA2006315, FEBRA2006346, FEBRA2006354, FEBRA2006357, FEBRA2006368, FEBRA2006370, FEBRA2006379, FEBRA2006396, FEBRA2006409, FEBRA2006418, FEBRA2006427, FEBRA2006476, FEBRA2006491, FEBRA2006519, FEBRA2006521, FEBRA2006553, FEBRA2006627, FEBRA2006664, FEBRA2006667, FEBRA2006726, FEBRA2006736, FEBRA2006793, FEBRA2006808, FEBRA2006817, FEBRA2006890, FEBRA2006942, FEBRA2006977, FEBRA2007017, FEBRA2007176, FEBRA2007200, FEBRA2007212, FEBRA2007247, FEBRA2007280, FEBRA2007414, FEBRA2007436, FEBRA2007449, FEBRA2007458, FEBRA2007534, FEBRA2007544, FEBRA2007551, FEBRA2007566, FEBRA2007589, FEBRA2007613, FEBRA2007620, FEBRA2007622, FEBRA2007708, FEBRA2007714, FEBRA2007793, FEBRA2007801, FEBRA2007823, FEBRA2007880, FEBRA2007900, FEBRA2007901, FEBRA2007931, FEBRA2007957, FEBRA2008009, FEBRA2008036, FEBRA2008086, FEBRA2008134, FEBRA2008135, FEBRA2008159, FEBRA2008165, FEBRA2008172, FEBRA2008201, FEBRA2008210, FEBRA2008255; FEBRA2008265, FEBRA2008266, FEBRA2008282, FEBRA2008287, FEBRA2008311, FEBRA2008360, FEBRA2008459, FEBRA2008468, FEBRA2008475, FEBRA2008481, FEBRA2008542, FEBRA2008660, FEBRA2008662, FEBRA2008681, FEBRA2008692, FEBRA2008741, FEBRA2008755, FEBRA2008836, FEBRA2008859, FEBRA2008861, FEBRA2008866, FEBRA2008881, FEBRA2008928, FEBRA2008983, FEBRA2009016, FEBRA2009022, FEBRA2009029, FEBRA2009074, FEBRA2009117, FEBRA2009120, FEBRA2009162, FEBRA2009185, FEBRA2009240, FEBRA2009265, FEBRA2009276, FEBRA2009289, FEBRA2009327, FEBRA2009328, FEBRA2009352, FEBRA2009362, FEBRA2009385, FEBRA2009416, FEBRA2009419, FEBRA2009437, FEBRA2009478, FEBRA2009507, FEBRA2009514, FEBRA2009541, FEBRA2009567, FEBRA2009588, FEBRA2009731, FEBRA2009754, FEBRA2009780, FEBRA2009846, FEBRA2009986, FEBRA2010141, FEBRA2010299, FEBRA2010484, FEBRA2010719, FEBRA2010746, FEBRA2010768, FEBRA2010802, FEBRA2011063, FEBRA2011090, FEBRA2011356, FEBRA2011392, FEBRA2011414, FEBRA2011593, FEBRA2011665, FEBRA2012090, FEBRA2012120, FEBRA2012181, FEBRA2012195, FEBRA2012397, FEBRA2012418, FEBRA2012507, FEBRA2012625, FEBRA2013019, FEBRA2013069, FEBRA2013274, FEBRA2013465, FEBRA2013570, FEBRA2013699, FEBRA2013905, FEBRA2013951, FEBRA2014010, FEBRA2014122, FEBRA2014198, FEBRA2014213, FEBRA2014297, FEBRA2014443, FEBRA2014578, FEBRA2014939, FEBRA2015076, FEBRA2015085, FEBRA2015175, FEBRA2015292, FEBRA2015588, FEBRA2016112, FEBRA2016398, FEBRA2016572, FEBRA2016583, FEBRA2016621, FEBRA2016654, FEBRA2016739, FEBRA2017024, FEBRA2017098, FEBRA2017138, FEBRA2017154, FEBRA2017200, FEBRA2017223, FEBRA2017333, FEBRA2017502, FEBRA2017533, FEBRA2017680, FEBRA2017736, FEBRA2017780, FEBRA2017811, FEBRA2017850, FEBRA2018051, FEBRA2018203, FEBRA2018407, FEBRA2018433, FEBRA2018746, FEBRA2019172, FEBRA2019242, FEBRA2019298, FEBRA2019389, FEBRA2019457, FEBRA2019519, FEBRA2019582, FEBRA2019637, FEBRA2019663, FEBRA2019690, FEBRA2019711, FEBRA2019867, FEBRA2020406, FEBRA2020566, FEBRA2020582, FEBRA2020668, FEBRA2020801, FEBRA2020845, FEBRA2020886, FEBRA2020977, FEBRA2021032, FEBRA2021134, FEBRA2021171, FEBRA2021339, FEBRA2021431, FEBRA2021497, FEBRA2021550, FEBRA2021571, FEBRA2021636, FEBRA2021864, FEBRA2021892, FEBRA2021908, FEBRA2021966, FEBRA2022013, FEBRA2022055, FEBRA2022148, FEBRA2022204, FEBRA2022255, FEBRA2022322, FEBRA2022601, FEBRA2022696, FEBRA2022729, FEBRA2022787, FEBRA2022911, FEBRA2022956, FEBRA2022963, FEBRA2022972, FEBRA2023227, FEBRA2023285, FEBRA2023351, FEBRA2023377, FEBRA2023399, FEBRA2023498, FEBRA2023550, FEBRA2023721, FEBRA2023927, FEBRA2023989, FEBRA2023990, FEBRA2024019, FEBRA2024136, FEBRA2024150, FEBRA2024343, FEBRA2024570, FEBRA2024693, FEBRA2024727, FEBRA2024744, FEBRA2024797, FEBRA2024987, FEBRA2025249, FEBRA2025427, FEBRA2025463, FEBRA2025477, FEBRA2026474, FEBRA2026582, FEBRA2026629, FEBRA2026769, FEBRA2026879, FEBRA2026890, FEBRA2026977, FEBRA2026984, FEBRA2027082, FEBRA2027297, FEBRA2027352, FEBRA2027364, FEBRA2027609, FEBRA2028158, FEBRA2028222, FEBRA2028366, FEBRA2028457, FEBRA2028477, FEBRA2028503, FEHRT2000325, FEHRT2000364, FEKID1000018, FELIV1000101, FELIV1000137, FELIV1000164, FELNG2000241, HCASM1000021, HCASM1000050, HCASM1000061, HCASM1000115, HCASM1000130, HCASM2000016, HCASM2000138, HCASM2000156, HCASM2000202, HCASM2000214, HCASM2000266, HCASM2000307, HCASM2000363, HCASM2000534, HCASM2000536, HCASM2000560, HCASM2000871, HCASM2001285, HCASM2001810, HCASM2001866, HCASM2001890, HCASM2002148, HCASM2002502, HCASM2002754, HCASM2002918, HCASM2003018, HCASM2003076, HCASM2003099, HCASM2003212, HCASM2003237, HCASM2003357, HCASM2003415, HCASM2005484, HCASM2006131, HCASM2006338, HCASM2006359, HCASM2006632, HCASM2007047, HCASM2007317, HCASM2007737, HCASM2007773, HCASM2008154, HCASM2008536, HCASM2009405, HCASM2009424, HCASM2009463, HCHON1000015, HCHON1000142, HCHON1000166, HCHON1000176, HCHON2000028, HCHON2000038, HCHON2000087, HCHON2000100, HCHON2000156, HCHON2000160, HCHON2000199, HCHON2000212, HCHON2000226, HCHON2000244, HCHON2000265, HCHON2000271, HCHON2000315, HCHON2000322, HCHON2000344, HCHON2000364, HCHON2000395, HCHON2000417, HCHON2000418, HCHON2000473, HCHON2000475, HCHON2000503, HCHON2000508, HCHON2000626, HCHON2000660, HCHON2000663, HCHON2000673, HCHON2000699, HCHON2000705, HCHON2000738, HCHON2000743, HCHON2000751, HCHON2000815, HCHON2000817, HCHON2000818, HCHON2000819, HCHON2000832, HCHON2000851, HCHON2000898, HCHON2000935, HCHON2000942, HCHON2000956, HCHON2000994, HCHON2001084, HCHON2001099, HCHON2001108, HCHON2001116, HCHON2001161, HCHON2001214, HCHON2001233, HCHON2001269, HCHON2001359, HCHON2001450, HCHON2001453, HCHON2001497, HCHON2001505, HCHON2001519, HCHON2001523, HCHON2001535, HCHON2001546, HCHON2001548, HCHON2001577, HCHON2001598, HCHON2001604, HCHON2001607, HCHON2001646, HCHON2001665, HCHON2001712, HCHON2001768, HCHON2001801, HCHON2001853, HCHON2002123, HCHON2002194, HCHON2002241, HCHON2002247, HCHON2002354, HCHON2002496, HCHON2002676, HCHON2002770, HCHON2002964, HCHON2002971, HCHON2003131, HCHON2003134, HCHON2003327, HCHON2003513, HCHON2003532, HCHON2003642, HCHON2003659, HCHON2003676, HCHON2004002, HCHON2004007, HCHON2004279, HCHON2004359, HCHON2004531, HCHON2004776, HCHON2004858, HCHON2005048, HCHON2005118, HCHON2005166, HCHON2005802, HCHON2005921, HCHON2005987, HCHON2006250, HCHON2006459, HCHON2006714, HCHON2006722, HCHON2006770, HCHON2006786, HCHON2006841, HCHON2006871, HCHON2007046, HCHON2007482, HCHON2007650, HCHON2007674, HCHON2007774, HCHON2007881, HCHON2008112, HCHON2008239, HCHON2008444, HCHON2008582, HCHON2008672, HCHON2008856, HCHON2008871, HCHON2008989, HCHON2009191, HCHON2009384, HCHON2009749, HCHON2009766, HCHON2009795, HCHON2010074, HCHON2010543, HEART1000010, HEART1000088, HEART1000099, HEART1000102, HEART1000118, HEART1000132, HEART1000139, HEART1000142, HEART1000151, HEART1000173, HEART1000185, HEART2000024, HEART2000035, HEART2000099, HEART2000298, HEART2000306, HEART2000309, HEART2000411, HEART2000418, HEART2000444, HEART2000448, HEART2000492, HEART2000506, HEART2000520, HEART2000541, HEART2000568, HEART2000611, HEART2000959, HEART2001680, HEART2001756, HEART2002129, HEART2002184, HEART2002220, HEART2002432, HEART2002531, HEART2002598, HEART2002717, HEART2003027, HEART2003168, HEART2003432, HEART2003440, HEART2003781, HEART2003836, HEART2003852, HEART2004570, HEART2004764, HEART2004931, HEART2004940, HEART2004941, HEART2004980, HEART2005244, HEART2005310, HEART2005581, HEART2005610, HEART2006131, HEART2006195, HEART2006310, HEART2006334, HEART2006487, HEART2006521, HEART2006557, HEART2006787, HEART2006789, HEART2006909, HEART2007031, HEART2007231, HEART2007443, HEART2007696, HEART2007767, HEART2008108, HEART2008111, HEART2008257, HEART2008509, HEART2008994, HEART2009000, HEART2009599, HEART2009680, HEART2010391, HEART2010492, HEART2010495, HELAC2000158, HELAC2000301, HHDPC1000001, HHDPC1000065, HHDPC1000114, HHDPC1000118, HHDPC2000055, HHDPC2000070, HHDPC2000104, HHDPC2000149, HHDPC2000258, HHDPC2000315, HHDPC2000462, HHDPC2000572, HHDPC2000692, HHDPC2001337, HHDPC2001432, HHDPC2001896, HHDPC2002963, HHDPC2003049, HHDPC2003113, HHDPC2003381, HHDPC2003472, HHDPC2004757, HHDPC2005185, HHDPC2005513, HHDPC2005742, HHDPC2005794, HHDPC2006460, HHDPC2006927, HHDPC2007267, HHDPC2007302, HHDPC2007775, HHDPC2008123, HHDPC2008185, HHDPC2008279, HHDPC2008297, HHDPC2008414, HHDPC2008474, HHDPC2008816, HHDPC2008843, HHDPC2009114, HHDPC2009178, HHDPC2009208, HHDPC2009272, HHDPC2009528, HLUNG1000017, HLUNG1000024, HLUNG1000030, HLUNG1000034, HLUNG1000037, HLUNG1000053, HLUNG1000064, HLUNG1000084, HLUNG1000091, HLUNG1000099, HLUNG1000104, HLUNG1000110, HLUNG1000151, HLUNG1000169, HLUNG2000004, HLUNG2000014, HLUNG2000027, HLUNG2000063, HLUNG2000068, HLUNG2000116, HLUNG2000125, HLUNG2000130, HLUNG2000142, HLUNG2000174, HLUNG2000176, HLUNG2000217, HLUNG2000232, HLUNG2000255, HLUNG2000281, HLUNG2000314, HLUNG2000315, HLUNG2000340, HLUNG2000362, HLUNG2000363, HLUNG2000412, HLUNG2000431, HLUNG2000480, HLUNG2000489, HLUNG2000501, HLUNG2000549, HLUNG2000557, HLUNG2000570, HLUNG2000751, HLUNG2000761, HLUNG2000777, HLUNG2000846, HLUNG2000870, HLUNG2000884, HLUNG2000926, HLUNG2000950, HLUNG2000955, HLUNG2000970, HLUNG2001013, HLUNG2001126, HLUNG2001144, HLUNG2001146, HLUNG2001214, HLUNG2001459, HLUNG2001633, HLUNG2001677, HLUNG2001712, HLUNG2001814, HLUNG2001996, HLUNG2002006, HLUNG2002050, HLUNG2002059, HLUNG2002085, HLUNG2002145, HLUNG2002295, HLUNG2002303, HLUNG2002334, HLUNG2002405, HLUNG2002429, HLUNG2002465, HLUNG2002562, HLUNG2002659, HLUNG2002707, HLUNG2002811, HLUNG2002942, HLUNG2002949, HLUNG2002958, HLUNG2002982, HLUNG2003003, HLUNG2003042, HLUNG2003049, HLUNG2003061, HLUNG2003162, HLUNG2003246, HLUNG2003306, HLUNG2003331, HLUNG2003335, HLUNG2003378, HLUNG2003497, HLUNG2003691, HLUNG2003710, HLUNG2003714, HLUNG2003716, HLUNG2003778, HLUNG2003833, HLUNG2003872, HLUNG2003918, HLUNG2003991, HLUNG2004014, HLUNG2004037, HLUNG2004067, HLUNG2004154, HLUNG2004159, HLUNG2004170, HLUNG2004217, HLUNG2004273, HLUNG2004388, HLUNG2004416, HLUNG2004521, HLUNG2004534, HLUNG2004684, HLUNG2004707, HLUNG2004774, HLUNG2004775, HLUNG2005012, HLUNG2005030, HLUNG2005045, HLUNG2005076, HLUNG2005133, HLUNG2005203, HLUNG2005230, HLUNG2005479, HLUNG2005524, HLUNG2005656, HLUNG2005738, HLUNG2005774, HLUNG2005813, HLUNG2005924, HLUNG2006026, HLUNG2006067, HLUNG2006094, HLUNG2006370, HLUNG2006397, HLUNG2006570, HLUNG2006599, HLUNG2006614, HLUNG2006671, HLUNG2006781, HLUNG2006812, HLUNG2006843, HLUNG2006852, HLUNG2006935, HLUNG2007041, HLUNG2007163, HLUNG2007210, HLUNG2007219, HLUNG2007245, HLUNG2007433, HLUNG2007931, HLUNG2008066, HLUNG2008139, HLUNG2008153, HLUNG2008225, HLUNG2008235, HLUNG2008247, HLUNG2008333, HLUNG2008348, HLUNG2008384, HLUNG2008396, HLUNG2008439, HLUNG2008479, HLUNG2008480, HLUNG2008521, HLUNG2008637, HLUNG2008833, HLUNG2008875, HLUNG2008885, HLUNG2008958, HLUNG2008959, HLUNG2009067, HLUNG2009215, HLUNG2009225, HLUNG2009253, HLUNG2009303, HLUNG2009413, HLUNG2009729, HLUNG2010181, HLUNG2010464, HLUNG2010562, HLUNG2010845, HLUNG2011041, HLUNG2011298, HLUNG2011461, HLUNG2011833, HLUNG2012049, HLUNG2012287, HLUNG2012315, HLUNG2012546, HLUNG2012600, HLUNG2012727, HLUNG2013097, HLUNG2013204, HLUNG2013304, HLUNG2013350, HLUNG2013622, HLUNG2013643, HLUNG2013784, HLUNG2013851, HLUNG2014262, HLUNG2014288, HLUNG2014449, HLUNG2014821, HLUNG2015184, HLUNG2015418, HLUNG2015548, HLUNG2015578, HLUNG2015617, HLUNG2016022, HLUNG2016862, HLUNG2017262, HLUNG2017286, HLUNG2017307, HLUNG2017350, HLUNG2017546, HLUNG2017806, HLUNG2018029, HLUNG2018282, HLUNG2018626, HLUNG2019058, HSYRA1000131, HSYRA1000137, HSYRA1000152, HSYRA1000178, HSYRA2000044, HSYRA2000137, HSYRA2000190, HSYRA2000221, HSYRA2000224, HSYRA2000237, HSYRA2000253, HSYRA2000255, HSYRA2000332, HSYRA2000371, HSYRA2000424, HSYRA2000507, HSYRA2000510, HSYRA2000605, HSYRA2000629, HSYRA2000640, HSYRA2000706, HSYRA2000743, HSYRA2000760, HSYRA2000787, HSYRA2000792, HSYRA2000832, HSYRA2000927, HSYRA2001103, HSYRA2001105, HSYRA2001142, HSYRA2001225, HSYRA2001255, HSYRA2001332, HSYRA2001353, HSYRA2001396, HSYRA2001420, HSYRA2001484, HSYRA2001552, HSYRA2001567, HSYRA2001574, HSYRA2001580, HSYRA2001615, HSYRA2001621, HSYRA2001983, HSYRA2002103, HSYRA2002590, HSYRA2002741, HSYRA2003168, HSYRA2004550, HSYRA2004858, HSYRA2005456, HSYRA2005496, HSYRA2005628, HSYRA2005970, HSYRA2006049, HSYRA2006873, HSYRA2007241, HSYRA2007338, HSYRA2007650, HSYRA2007667, HSYRA2008154, HSYRA2008714, HSYRA2009102, IMR321000155, IMR321000161, IMR321000165, IMR321000193, IMR321000207, IMR321000210, IMR321000230, IMR321000242, IMR321000253, IMR322000010, IMR322000072, IMR322000107, IMR322000121, IMR322000127, IMR322000144, IMR322000152, IMR322000164, IMR322000178, IMR322000223, IMR322000243, IMR322000302, IMR322000316, IMR322000374, IMR322000379, IMR322000383, IMR322000418, IMR322000518, IMR322000555, IMR322000604, IMR322000609, IMR322000656, IMR322000672, IMR322000742, IMR322000775, IMR322000811, IMR322000819, IMR322000838, IMR322000859, IMR322000863, IMR322000917, IMR322000918, IMR322000919, IMR322000935, IMR322000953, IMR322000984, IMR322001018, IMR322001049, IMR322001167, IMR322001185, IMR322001218, IMR322001245, IMR322001317, IMR322001318, IMR322001322, IMR322001332, IMR322001380, IMR322001438, IMR322001452, IMR322001491, IMR322001534, IMR322001541, IMR322001584, IMR322001665, IMR322001670, IMR322001710, IMR322001724, IMR322001879, IMR322002035, IMR322002110, IMR322002470, IMR322002993, IMR322003675, IMR322004768, IMR322005293, IMR322005833, IMR322006012, IMR322006222, IMR322006495, IMR322006520, IMR322006886, IMR322006947, IMR322007078, IMR322007225, IMR322007704, IMR322008651, IMR322009710, IMR322009807, IMR322010295, IMR322010953, IMR322011689, IMR322012314, IMR322013053, IMR322013396, IMR322013731, IMR322013805, IMR322015523, IMR322016146, IMR322017049, IMR322018117, IMR322018192, IMR322019070, JCMLC2000273, KIDNE1000008, KIDNE1000012, KIDNE1000015, KIDNE1000028, KIDNE1000036, KIDNE1000064, KIDNE1000104, KIDNE1000121, KIDNE1000143, KIDNE1000145, KIDNE1000152, KIDNE2000026, KIDNE2000041, KIDNE2000046, KIDNE2000051, KIDNE2000070, KIDNE2000167, KIDNE2000174, KIDNE2000192, KIDNE2000227, KIDNE2000244, KIDNE2000245, KIDNE2000252, KIDNE2000266, KIDNE2000287, KIDNE2000315, KIDNE2000317, KIDNE2000328, KIDNE2000330, KIDNE2000335, KIDNE2000349, KIDNE2000375, KIDNE2000383, KIDNE2000394, KIDNE2000403, KIDNE2000422, KIDNE2000493, KIDNE2000497, KIDNE2000510, KIDNE2000513, KIDNE2000517, KIDNE2000519, KIDNE2000555, KIDNE2000624, KIDNE2000678, KIDNE2000717, KIDNE2000721, KIDNE2000722, KIDNE2000777, KIDNE2000801, KIDNE2000832, KIDNE2000833, KIDNE2000846, KIDNE2000867, KIDNE2001117, KIDNE2001140, KIDNE2001162, KIDNE2001269, KIDNE2001361, KIDNE2001373, KIDNE2001636, KIDNE2001713, KIDNE2001802, KIDNE2001840, KIDNE2001847, KIDNE2001857, KIDNE2001873, KIDNE2001897, KIDNE2001931, KIDNE2001979, KIDNE2002015, KIDNE2002162, KIDNE2002168, KIDNE2002191, KIDNE2002198, KIDNE2002252, KIDNE2002262, KIDNE2002265, KIDNE2002438, KIDNE2002483, KIDNE2002725, KIDNE2002768, KIDNE2002795, KIDNE2002798, KIDNE2002845, KIDNE2002872, KIDNE2002882, KIDNE2002883, KIDNE2002980, KIDNE2002991, KIDNE2003185, KIDNE2003188, KIDNE2003233, KIDNE2003305, KIDNE2003316, KIDNE2003335, KIDNE2003357, KIDNE2003373, KIDNE2003377, KIDNE2003507, KIDNE2003752, KIDNE2003764, KIDNE2003837, KIDNE2003994, KIDNE2004034, KIDNE2004084, KIDNE2004095, KIDNE2004115, KIDNE2004233, KIDNE2004262, KIDNE2004279, KIDNE2004294, KIDNE2004295, KIDNE2004305, KIDNE2004344, KIDNE2004394, KIDNE2004411, KIDNE2004475, KIDNE2004519, KIDNE2004520, KIDNE2004531, KIDNE2004562, KIDNE2004579, KIDNE2004626, KIDNE2004681, KIDNE2004828, KIDNE2004846, KIDNE2004864, KIDNE2004879, KIDNE2004981, KIDNE2004985, KIDNE2004999, KIDNE2005038, KIDNE2005042, KIDNE2005062, KIDNE2005266, KIDNE2005296, KIDNE2005321, KIDNE2005327, KIDNE2005336, KIDNE2005400, KIDNE2005424, KIDNE2005477, KIDNE2005526, KIDNE2005543, KIDNE2005603, KIDNE2005629, KIDNE2005781, KIDNE2005798, KIDNE2005854, KIDNE2005908, KIDNE2005937, KIDNE2006009, KIDNE2006014, KIDNE2006039, KIDNE2006053, KIDNE2006062, KIDNE2006092, KIDNE2006145, KIDNE2006149, KIDNE2006210, KIDNE2006248, KIDNE2006299, KIDNE2006334, KIDNE2006353, KIDNE2006376, KIDNE2006378, KIDNE2006465, KIDNE2006580, KIDNE2006652, KIDNE2006687, KIDNE2006733, KIDNE2006760, KIDNE2006775, KIDNE2006811, KIDNE2006820, KIDNE2006880, KIDNE2007005, KIDNE2007040, KIDNE2007077, KIDNE2007186, KIDNE2007222, KIDNE2007328, KIDNE2007356, KIDNE2007422, KIDNE2007569, KIDNE2007810, KIDNE2007910, KIDNE2007944, KIDNE2007954, KIDNE2008022, KIDNE2008069, KIDNE2008072, KIDNE2008116, KIDNE2008117, KIDNE2008218, KIDNE2008315, KIDNE2008362, KIDNE2008378, KIDNE2008403, KIDNE2008404, KIDNE2008446, KIDNE2008473, KIDNE2008480, KIDNE2008649, KIDNE2008666, KIDNE2008697, KIDNE2008758, KIDNE2008788, KIDNE2008795, KIDNE2008824, KIDNE2008832, KIDNE2008869, KIDNE2008914, KIDNE2008975, KIDNE2008987, KIDNE2009019, KIDNE2009109, KIDNE2009180, KIDNE2009191, KIDNE2009332, KIDNE2009367, KIDNE2009426, KIDNE2009467, KIDNE2009490, KIDNE2009553, KIDNE2009605, KIDNE2009628, KIDNE2009647, KIDNE2009676, KIDNE2009723, KIDNE2010007, KIDNE2010049, KIDNE2010052, KIDNE2010084, KIDNE2010137, KIDNE2010151, KIDNE2010264, KIDNE2010265, KIDNE2010271, KIDNE2010419, KIDNE2010430, KIDNE2010574, KIDNE2010674, KIDNE2010739, KIDNE2010750, KIDNE2010762, KIDNE2010863, KIDNE2010973, KIDNE2010989, KIDNE2011200, KIDNE2011314, KIDNE2011508, KIDNE2011532, KIDNE2011635, KIDNE2011752, KIDNE2011782, KIDNE2011858, KIDNE2012009, KIDNE2012025, KIDNE2012188, KIDNE2012291, KIDNE2012316, KIDNE2012361, KIDNE2012453, KIDNE2012563, KIDNE2012601, KIDNE2012613, KIDNE2012710, KIDNE2012745, KIDNE2012775, KIDNE2012784, KIDNE2012945, KIDNE2013045, KIDNE2013095, KIDNE2013158, KIDNE2013218, KIDNE2013263, KIDNE2013346, KIDNE2013388, KIDNE2013413, KIDNE2013489, KIDNE2013639, KIDNE2013731, KIDNE2013734, KIDNE2013775, KIDNE2013801, KIDNE2013866, KIDNE2014087, KIDNE2014112, KIDNE2014119, KIDNE2014170, KIDNE2014184, KIDNE2014268, KIDNE2014290, KIDNE2014298, KIDNE2014320, KIDNE2014325, KIDNE2014415, KIDNE2014489, KIDNE2014496, KIDNE2014661, KIDNE2014717, KIDNE2014789, KIDNE2014808, KIDNE2014890, KIDNE2014978, KIDNE2015073, KIDNE2015221, KIDNE2015244, KIDNE2015313, KIDNE2015433, KIDNE2015445, KIDNE2015483, KIDNE2015515, KIDNE2015546, KIDNE2015556, KIDNE2015598, KIDNE2015660, KIDNE2015987, KIDNE2016000, KIDNE2016036, KIDNE2016096, KIDNE2016101, KIDNE2016142, KIDNE2016188, KIDNE2016327, KIDNE2016371, KIDNE2016388, KIDNE2016464, KIDNE2016539, KIDNE2016570, KIDNE2016918, KIDNE2017007, KIDNE2017040, KIDNE2017052, KIDNE2017151, KIDNE2017153, KIDNE2017315, KIDNE2017332, KIDNE2017343, KIDNE2017454, KIDNE2017603, KIDNE2017956, KIDNE2018071, KIDNE2018166, KIDNE2018167, KIDNE2018217, KIDNE2018254, KIDNE2018268, KIDNE2018269, KIDNE2018287, KIDNE2018294, KIDNE2018462, KIDNE2018493, KIDNE2018617, KIDNE2018678, KIDNE2018727, KIDNE2018863, KIDNE2018891, KIDNE2018989, KIDNE2018996, KIDNE2019074, KIDNE2019187, LIVER1000050, LIVER1000055, LIVER1000058, LIVER1000063, LIVER1000073, LIVER1000082, LIVER1000099, LIVER1000126, LIVER1000139, LIVER1000155, LIVER1000165, LIVER1000175, LIVER1000224, LIVER1000230, LIVER1000278, LIVER1000303, LIVER1000397, LIVER1000421, LIVER1000433, LIVER1000479, LIVER1000482, LIVER2000003, LIVER2000033, LIVER2000216, LIVER2000237, LIVER2000247, LIVER2000360, LIVER2000416, LIVER2000446, LIVER2000515, LIVER2000592, LIVER2000626, LIVER2000682, LIVER2000769, LIVER2000775, LIVER2001051, LIVER2001076, LIVER2001099, LIVER2001113, LIVER2001164, LIVER2001191, LIVER2001265, LIVER2001329, LIVER2001389, LIVER2001461, LIVER2001539, LIVER2001835, LIVER2002638, LIVER2002644, LIVER2002660, LIVER2002702, LIVER2003008, LIVER2003065, LIVER2003234, LIVER2003511, LIVER2003524, LIVER2003568, LIVER2003581, LIVER2003854, LIVER2004074, LIVER2004392, LIVER2004514, LIVER2004565, LIVER2005028, LIVER2005198, LIVER2005218, LIVER2005376, LIVER2005385, LIVER2005512, LIVER2005520, LIVER2005527, LIVER2005544, LIVER2005625, LIVER2005728, LIVER2005789, LIVER2005973, LIVER2005981, LIVER2006251, LIVER2006410, LIVER2006469, LIVER2006644, LIVER2006764, LIVER2007415, LIVER2007548, LIVER2007568, LIVER2007721, LIVER2007783, LIVER2008053, LIVER2008465, LIVER2008473, LIVER2008580, LIVER2008706, LIVER2008751, LIVER2008945, LIVER2008998, LIVER2009110, LIVER2009118, LIVER2009554, LYMPB1000141, LYMPB1000158, LYMPB2000083, MAMGL1000017, MAMGL1000083, MAMGL1000096, MAMGL1000132, MAMGL1000151, MAMGL1000178, MAMGL1000182, MAMGL1000184, MESAN1000032, MESAN1000035, MESAN1000079, MESAN1000101, MESAN1000121, MESAN1000126, MESAN1000147, MESAN1000180, MESAN2000023, MESAN2000026, MESAN2000067, MESAN2000092, MESAN2000167, MESAN2000264, MESAN2000291, MESAN2000337, MESAN2000434, MESAN2000457, MESAN2000462, MESAN2000501, MESAN2000620, MESAN2000711, MESAN2000815, MESAN2000894, MESAN2000909, MESAN2001154, MESAN2001450, MESAN2001627, MESAN2001770, MESAN2001979, MESAN2001980, MESAN2002113, MESAN2002122, MESAN2002147, MESAN2002186, MESAN2002424, MESAN2002519, MESAN2002687, MESAN2002709, MESAN2002724, MESAN2002790, MESAN2002844, MESAN2002978, MESAN2003035, MESAN2003037, MESAN2003039, MESAN2003058, MESAN2003101, MESAN2003190, MESAN2003322, MESAN2003490, MESAN2003529, MESAN2003646, MESAN2003662, MESAN2003709, MESAN2003851, MESAN2004138, MESAN2004288, MESAN2004575, MESAN2005284, MESAN2005303, MESAN2005371, MESAN2005633, MESAN2005689, MESAN2005724, MESAN2005808, MESAN2005811, MESAN2005957, MESAN2005958, MESAN2006022, MESAN2006043, MESAN2006328, MESAN2006401, MESAN2006563, MESAN2006580, MESAN2006599, MESAN2006971, MESAN2007032, MESAN2007440, MESAN2007597, MESAN2007755, MESAN2008222, MESAN2008415, MESAN2008460, MESAN2008536, MESAN2008679, MESAN2008729, MESAN2008821, MESAN2008926, MESAN2008936, MESAN2009019, MESAN2009081, MESAN2009105, MESAN2009311, MESAN2009418, MESAN2009503, MESAN2009522, MESAN2010031, MESAN2010114, MESAN2010312, MESAN2010321, MESAN2010664, MESAN2010681, MESAN2011545, MESAN2011597, MESAN2011627, MESAN2011632, MESAN2011977, MESAN2011984, MESAN2012054, MESAN2012113, MESAN2012586, MESAN2012708, MESAN2012735, MESAN2013019, MESAN2013022, MESAN2013183, MESAN2013211, MESAN2013283, MESAN2013611, MESAN2013674, MESAN2013908, MESAN2013936, MESAN2014192, MESAN2014295, MESAN2014298, MESAN2014412, MESAN2014624, MESAN2015277, MESAN2015365, MESAN2015391, MESAN2015401, MESAN2015501, MESAN2015515, MESAN2015708, MESAN2016159, MESAN2016304, MESAN2016409, MESAN2016552, MESAN2016965, MESAN2017133, MESAN2017152, MESAN2017373, MESAN2017417, MESAN2018209, MESAN2018670, MESAN2018699, MESTC1000042, MESTC1000147, MESTC2000150, MESTC2000153, MESTC2000170, N1ESE2000698, NB9N41000011, NB9N41000047, NB9N41000121, NB9N41000135, NB9N41000142, NB9N41000146, NB9N42000104, NB9N42000122, NB9N42000196, NB9N42000281, NB9N42000314, NB9N42000342, NB9N42000430, NB9N42000495, NB9N42001300, NCRRP1000129, NESOP1000010, NESOP1000087, NESOP1000108, NESOP2000231, NESOP2000452, NESOP2000499, NESOP2000504, NESOP2000744, NESOP2001144, NESOP2001433, NESOP2001656, NESOP2001694, NESOP2001752, NESOP2002352, NESOP2002418, NESOP2002487, NESOP2002738, NESOP2002780, NETRP1000034, NETRP1000082, NETRP2000086, NETRP2000182, NETRP2000439, NHNPC1000034, NHNPC1000037, NHNPC1000084, NHNPC1000101, NHNPC1000124, NHNPC2000212, NHNPC2000606, NHNPC2000877, NHNPC2001108, NHNPC2001223, NHNPC2001312, NHNPC2001816, NHNPC2002565, NHNPC2002749, NOVAR1000015, NOVAR1000102, NOVAR2000136, NOVAR2000352, NOVAR2000412, NOVAR2000710, NOVAR2000783, NOVAR2000962, NOVAR2001108, NOVAR2001620, NOVAR2001783, NOVAR2001876, NOVAR2002039, NT2NE1000004, NT2NE1000014, NT2NE1000018, NT2NE1000023, NT2NE1000024, NT2NE1000059, NT2NE1000063, NT2NE1000073, NT2NE1000083, NT2NE1000120, NT2NE1000122, NT2NE1000175, NT2NE1000181, NT2NE1000185, NT2NE2000038, NT2NE2000054, NT2NE2000057, NT2NE2000064, NT2NE2000109, NT2NE2000137, NT2NE2000156, NT2NE2000195, NT2NE2000222, NT2NE2000284, NT2NE2000299, NT2NE2000327, NT2NE2000353, NT2NE2000356, NT2NE2000369, NT2NE2000374, NT2NE2000386, NT2NE2000390, NT2NE2000392, NT2NE2000455, NT2NE2000470, NT2NE2000488, NT2NE2000517, NT2NE2000536, NT2NE2000546, NT2NE2000548, NT2NE2000550, NT2NE2000586, NT2NE2000612, NT2NE2000658, NT2NE2000706, NT2NE2000763, NT2NE2000802, NT2NE2000808, NT2NE2000864, NT2NE2000909, NT2NE2000913, NT2NE2000950, NT2NE2000951, NT2NE2000980, NT2NE2001005, NT2NE2001021, NT2NE2001040, NT2NE2001049, NT2NE2001142, NT2NE2001156, NT2NE2001176, NT2NE2001180, NT2NE2001181, NT2NE2001188, NT2NE2001191, NT2NE2001247, NT2NE2001252, NT2NE2001324, NT2NE2001326, NT2NE2001337, NT2NE2001364, NT2NE2001372, NT2NE2001397, NT2NE2001403, NT2NE2001428, NT2NE2001432, NT2NE2001435, NT2NE2001442, NT2NE2001524, NT2NE2001530, NT2NE2001545, NT2NE2001598, NT2NE2001617, NT2NE2001623, NT2NE2001626, NT2NE2001634, NT2NE2001648, NT2NE2001655, NT2NE2001660, NT2NE2001666, NT2NE2001677, NT2NE2001697, NT2NE2001698, NT2NE2001723, NT2NE2001725, NT2NE2001793, NT2NE2001874, NT2NE2001889, NT2NE2001923, NT2NE2002100, NT2NE2002162, NT2NE2002186, NT2NE2002285, NT2NE2002311, NT2NE2002620, NT2NE2002651, NT2NE2002732, NT2NE2002768, NT2NE2002791, NT2NE2002856, NT2NE2002870, NT2NE2003150, NT2NE2003185, NT2NE2003252, NT2NE2003280, NT2NE2003308, NT2NE2003309, NT2NE2003315, NT2NE2003393, NT2NE2003408, NT2NE2003457, NT2NE2003485, NT2NE2003540, NT2NE2003569, NT2NE2003571, NT2NE2003705, NT2NE2003752, NT2NE2003887, NT2NE2003921, NT2NE2004255, NT2NE2004378, NT2NE2004490, NT2NE2004519, NT2NE2004606, NT2NE2004716, NT2NE2004740, NT2NE2004787, NT2NE2004916, NT2NE2005035, NT2NE2005223, NT2NE2005276, NT2NE2005317, NT2NE2005323, NT2NE2005358, NT2NE2005371, NT2NE2005395, NT2NE2005419, NT2NE2005441, NT2NE2005517, NT2NE2005537, NT2NE2005555, NT2NE2005588, NT2NE2005676, NT2NE2005720, NT2NE2005784, NT2NE2005804, NT2NE2005821, NT2NE2005876, NT2NE2005890, NT2NE2005921, NT2NE2005968, NT2NE2006075, NT2NE2006087, NT2NE2006103, NT2NE2006217, NT2NE2006288, NT2NE2006382, NT2NE2006387, NT2NE2006427, NT2NE2006432, NT2NE2006478, NT2NE2006531, NT2NE2006659, NT2NE2006784, NT2NE2006813, NT2NE2006894, NT2NE2006909, NT2NE2006942, NT2NE2006958, NT2NE2007052, NT2NE2007220, NT2NE2007425, NT2NE2007725, NT2NE2007727, NT2NE2007786, NT2NE2007877, NT2NE2007967, NT2NE2008017, NT2NE2008060, NT2NE2008077, NT2NE2008213, NT2NE2008260, NT2NE2008378, NT2NE2008607, NT2NE2008639, NT2NE2008727, NT2NE2008783, NT2NE2008785, NT2NE2008803, NT2NE2008867, NT2NE2008961, NT2NE2008997, NT2NE2009138, NT2NE2009295, NT2NE2009426, NT2NE2009523, NT2NE2009608, NT2NE2009691, NT2NE2010056, NT2NE2010105, NT2NE2010150, NT2NE2010400, NT2NE2010632, NT2NE2010633, NT2NE2010654, NT2NE2010688, NT2NE2010781, NT2NE2010854, NT2NE2011033, NT2NE2011036, NT2NE2011107, NT2NE2011119, NT2NE2011154, NT2NE2011221, NT2NE2011411, NT2NE2011485, NT2NE2011650, NT2NE2011684, NT2NE2011687, NT2NE2011691, NT2NE2011758, NT2NE2011823, NT2NE2011896, NT2NE2011998, NT2NE2012113, NT2NE2012199, NT2NE2012243, NT2NE2012361, NT2NE2012448, NT2NE2012457, NT2NE2012493, NT2NE2012505, NT2NE2012533, NT2NE2012603, NT2NE2012747, NT2NE2012790, NT2NE2012847, NT2NE2012928, NT2NE2013019, NT2NE2013081, NT2NE2013189, NT2NE2013217, NT2NE2013547, NT2NE2014013, NT2NE2014028, NT2NE2014113, NT2NE2014176, NT2NE2014221, NT2NE2014525, NT2NE2014650, NT2NE2014651, NT2NE2014681, NT2NE2014758, NT2NE2014869, NT2NE2014950, NT2NE2015061, NT2NE2015262, NT2NE2015275, NT2NE2015362, NT2NE2015480, NT2NE2015511, NT2NE2015565, NT2NE2015626, NT2NE2015747, NT2NE2015860, NT2NE2015885, NT2NE2015904, NT2NE2015974, NT2NE2016041, NT2NE2016387, NT2NE2016419, NT2NE2016519, NT2NE2016608, NT2NE2016766, NT2NE2016774, NT2NE2016971, NT2NE2017259, NT2NE2017332, NT2NE2017397, NT2NE2017480, NT2NE2017492, NT2NE2017508, NT2NE2017562, NT2NE2017590, NT2NE2017612, NT2NE2017721, NT2NE2017752, NT2NE2017792, NT2NE2017982, NT2NE2018165, NT2NE2018176, NT2NE2018180, NT2NE2018273, NT2NE2018376, NT2NE2018472, NT2NE2018490, NT2NE2018594, NT2NE2018739, NT2NE2018916, NT2NE2019056, NT2NE2019076, NT2NE2019091, NT2NE2019099, NT2RI1000016, NT2RI1000027, NT2RI1000127, NT2RI1000164, NT2RI1000172, NT2RI2000004, NT2RI2000007, NT2RI2000107, NT2RI2000116, NT2RI2000117, NT2RI2000128, NT2RI2000133, NT2RI2000167, NT2RI2000173, NT2RI2000187, NT2RI2000255, NT2RI2000263, NT2RI2000270, NT2RI2000276, NT2RI2000294, NT2RI2000313, NT2RI2000341, NT2RI2000344, NT2RI2000348, NT2RI2000412, NT2RI2000421, NT2RI2000480, NT2RI2000575, NT2RI2000588, NT2RI2000597, NT2RI2000669, NT2RI2000685, NT2RI2000688, NT2RI2000689, NT2RI2000704, NT2RI2000738, NT2RI2000775, NT2RI2000822, NT2RI2000829, NT2RI2000841, NT2RI2000865, NT2RI2000932, NT2RI2000987, NT2RI2001010, NT2RI2001017, NT2RI2001030, NT2RI2001083, NT2RI2001091, NT2RI2001167, NT2RI2001178, NT2RI2001230, NT2RI2001235, NT2RI2001244, NT2RI2001307, NT2RI2001409, NT2RI2001410, NT2RI2001422, NT2RI2001425, NT2RI2001449, NT2RI2001450, NT2RI2001474, NT2RI2001519, NT2RI2001595, NT2RI2001621, NT2RI2001624, NT2RI2001657, NT2RI2001726, NT2RI2001731, NT2RI2001769, NT2RI2001782, NT2RI2001836, NT2RI2001846, NT2RI2001859, NT2RI2001866, NT2RI2001910, NT2RI2001952, NT2RI2002022, NT2RI2002041, NT2RI2002120, NT2RI2002153, NT2RI2002179, NT2RI2002243, NT2RI2002252, NT2RI2002260, NT2RI2002266, NT2RI2002270, NT2RI2002334, NT2RI2002359, NT2RI2002391, NT2RI2002447, NT2RI2002481, NT2RI2002507, NT2RI2002517, NT2RI2002530, NT2RI2002540, NT2RI2002549, NT2RI2002554, NT2RI2002564, NT2RI2002585, NT2RI2002592, NT2RI2002602, NT2RI2002699, NT2RI2002729, NT2RI2002802, NT2RI2002819, NT2RI2002847, NT2RI2002852, NT2RI2002865, NT2RI2002923, NT2RI2002926, NT2RI2002970, NT2RI2003011, NT2RI2003019, NT2RI2003067, NT2RI2003184, NT2RI2003205, NT2RI2003222, NT2RI2003301, NT2RI2003317, NT2RI2003344, NT2RI2003360, NT2RI2003361, NT2RI2003383, NT2RI2003392, NT2RI2003399, NT2RI2003419, NT2RI2003481, NT2RI2003487, NT2RI2003655, NT2RI2003667, NT2RI2003695, NT2RI2003884, NT2RI2003921, NT2RI2003973, NT2RI2004059, NT2RI2004078, NT2RI2004079, NT2RI2004093, NT2RI2004136, NT2RI2004157, NT2RI2004188, NT2RI2004190, NT2RI2004209, NT2RI2004284, NT2RI2004290, NT2RI2004304, NT2RI2004312, NT2RI2004381, NT2RI2004398, NT2RI2004410, NT2RI2004442, NT2RI2004468, NT2RI2004606, NT2RI2004608, NT2RI2004618, NT2RI2004783, NT2RI2004818, NT2RI2004840, NT2RI2004916, NT2RI2004962, NT2RI2004984, NT2RI2004985, NT2RI2005048, NT2RI2005061, NT2RI2005069, NT2RI2005087, NT2RI2005096, NT2RI2005115, NT2RI2005116, NT2RI2005130, NT2RI2005150, NT2RI2005166, NT2RI2005239, NT2RI2005246, NT2RI2005315, NT2RI2005358, NT2RI2005368, NT2RI2005382, NT2RI2005473, NT2RI2005520, NT2RI2005564, NT2RI2005579, NT2RI2005621, NT2RI2005628, NT2RI2005647, NT2RI2005670, NT2RI2005713, NT2RI2005772, NT2RI2005811, NT2RI2005816, NT2RI2005851, NT2RI2005966, NT2RI2006070, NT2RI2006071, NT2RI2006081, NT2RI2006126, NT2RI2006127, NT2RI2006183, NT2RI2006257, NT2RI2006271, NT2RI2006294, NT2RI2006345, NT2RI2006403, NT2RI2006412, NT2RI2006445, NT2RI2006487, NT2RI2006506, NT2RI2006553, NT2RI2006565, NT2RI2006640, NT2RI2006647, NT2RI2006659, NT2RI2006662, NT2RI2006667, NT2RI2006679, NT2RI2006682, NT2RI2006686, NT2RI2006703, NT2RI2006716, NT2RI2006735, NT2RI2006762, NT2RI2006788, NT2RI2006825, NT2RI2006838, NT2RI2006853, NT2RI2006855, NT2RI2006856, NT2RI2006943, NT2RI2006973, NT2RI2007046, NT2RI2007048, NT2RI2007096, NT2RI2007116, NT2RI2007133, NT2RI2007148, NT2RI2007214, NT2RI2007277, NT2RI2007303, NT2RI2007334, NT2RI2007377, NT2RI2007386, NT2RI2007406, NT2RI2007439, NT2RI2007468, NT2RI2007469, NT2RI2007498, NT2RI2007507, NT2RI2007589, NT2RI2007723, NT2RI2007729, NT2RI2007751, NT2RI2007754, NT2RI2007827, NT2RI2007853, NT2RI2007877, NT2RI2007884, NT2RI2007891, NT2RI2007956, NT2RI2007965, NT2RI2007987, NT2RI2008007, NT2RI2008050, NT2RI2008171, NT2RI2008188, NT2RI2008204, NT2RI2008221, NT2RI2008336, NT2RI2008455, NT2RI2008481, NT2RI2008502, NT2RI2008566, NT2RI2008622, NT2RI2008714, NT2RI2008801, NT2RI2008808, NT2RI2008812, NT2RI2008841, NT2RI2008942, NT2RI2008952, NT2RI2009005, NT2RI2009037, NT2RI2009065, NT2RI2009066, NT2RI2009083, NT2RI2009101, NT2RI2009103, NT2RI2009144, NT2RI2009151, NT2RI2009173, NT2RI2009215, NT2RI2009239, NT2RI2009259, NT2RI2009281, NT2RI2009289, NT2RI2009301, NT2RI2009402, NT2RI2009406, NT2RI2009517, NT2RI2009585, NT2RI2009595, NT2RI2009855, NT2RI2010283, NT2RI2010508, NT2RI2010795, NT2RI2011422, NT2RI2011450, NT2RI2011683, NT2RI2011803, NT2RI2012659, NT2RI2012726, NT2RI2012990, NT2RI2013345, NT2RI2013357, NT2RI2013373, NT2RI2014247, NT2RI2014551, NT2RI2014683, NT2RI2014733, NT2RI2015239, NT2RI2015342, NT2RI2015533, NT2RI2016128, NT2RI2016134, NT2RI2017529, NT2RI2018311, NT2RI2018363, NT2RI2018448, NT2RI2018883, NT2RI2018950, NT2RI2019751, NT2RI2019826, NT2RI2020390, NT2RI2020703, NT2RI2021463, NT2RI2021625, NT2RI2022468, NT2RI2022584, NT2RI2023303, NT2RI2023671, NT2RI2024008, NT2RI2024313, NT2RI2024460, NT2RI2024496, NT2RI2024935, NT2RI2025075, NT2RI2025255, NT2RI2025564, NT2RI2025565, NT2RI2025909, NT2RI2025957, NT2RI2025976, NT2RI2026758, NT2RI2027081, NT2RI2027157, NT2RI2027224, NT2RI2027323, NT2RI2027396, NT2RI2027484, NT2RI2027975, NT2RI2028213, NT2RI2028222, NT2RI2028537, NT2RI2028642, NT2RI3000174, NT2RI3000213, NT2RI3000423, NT2RI3000622, NT2RI3001132, NT2RI3001263, NT2RI3001279, NT2RI3001348, NT2RI3001445, NT2RI3001458, NT2RI3001515, NT2RI3001573, NT2RI3001967, NT2RI3002303, NT2RI3002557, NT2RI3002842, NT2RI3003027, NT2RI3003031, NT2RI3003095, NT2RI3003104, NT2RI3003162, NT2RI3003362, NT2RI3003382, NT2RI3003409, NT2RI3003738, NT2RI3003925, NT2RI3004133, NT2RI3004381, NT2RI3004510, NT2RI3005202, NT2RI3005403, NT2RI3005416, NT2RI3005724, NT2RI3005861, NT2RI3005923, NT2RI3005928, NT2RI3006132, NT2RI3006171, NT2RI3006284, NT2RI3006340, NT2RI3006376, NT2RI3006666, NT2RI3006673, NT2RI3006796, NT2RI3007065, NT2RI3007095, NT2RI3007158, NT2RI3007167, NT2RI3007213, NT2RI3007291, NT2RI3007443, NT2RI3007684, NT2RI3007757, NT2RI3007878, NT2RI3007978, NT2RI3008055, NT2RI3008162, NT2RI3008179, NT2RI3008228, NT2RI3008442, NT2RI3008652, NT2RI3008697, NT2RI3008974, NT2RI3009158, NT2RI3009480, NT2RI3009524, NT2RP6000005, NT2RP6000008, NT2RP6000017, NT2RP6000032, NT2RP6000033, NT2RP6000039, NT2RP6000043, NT2RP6000059, NT2RP6000060, NT2RP6000072, NT2RP6000077, NT2RP6000078, NT2RP6000085, NT2RP6000086, NT2RP6000100, NT2RP6000109, NT2RP6000110, NT2RP6000119, NT2RP6000127, NT2RP6000130, NT2RP6000140, NT2RP6000150, NT2RP7000041, NT2RP7000069, NT2RP7000076, NT2RP7000086, NT2RP7000109, NT2RP7000112, NT2RP7000173, NT2RP7000238, NT2RP7000259, NT2RP7000271, NT2RP7000311, NT2RP7000359, NT2RP7000364, NT2RP7000380, NT2RP7000391, NT2RP7000425, NT2RP7000477, NT2RP7000579, NT2RP7000586, NT2RP7000600, NT2RP7000624, NT2RP7000812, NT2RP7000926, NT2RP7001074, NT2RP7001080, NT2RP7001156, NT2RP7001166, NT2RP7001231, NT2RP7001283, NT2RP7001306, NT2RP7001319, NT2RP7001335, NT2RP7001364, NT2RP7001475, NT2RP7001532, NT2RP7001591, NT2RP7001602, NT2RP7001678, NT2RP7001856, NT2RP7001962, NT2RP7002064, NT2RP7002151, NT2RP7002163, NT2RP7002243, NT2RP7002282, NT2RP7002376, NT2RP7002379, NT2RP7002449, NT2RP7002450, NT2RP7002478, NT2RP7002554, NT2RP7002594, NT2RP7002603, NT2RP7002619, NT2RP7002650, NT2RP7002738, NT2RP7002779, NT2RP7002802, NT2RP7002829, NT2RP7002841, NT2RP7002875, NT2RP7002906, NT2RP7002978, NT2RP7002982, NT2RP7003025, NT2RP7003050, NT2RP7003055, NT2RP7003084, NT2RP7003091, NT2RP7003107, NT2RP7003134, NT2RP7003148, NT2RP7003203, NT2RP7003261, NT2RP7003439, NT2RP7003511, NT2RP7003629, NT2RP7003647, NT2RP7003680, NT2RP7003688, NT2RP7003724, NT2RP7004027, NT2RP7004080, NT2RP7004114, NT2RP7004196, NT2RP7004233, NT2RP7004260, NT2RP7004348, NT2RP7004352, NT2RP7004358, NT2RP7004396, NT2RP7004481, NT2RP7004541, NT2RP7004559, NT2RP7004641, NT2RP7004656, NT2RP7004687, NT2RP7004722, NT2RP7004766, NT2RP7004884, NT2RP7004911, NT2RP7004915, NT2RP7004925, NT2RP7004961, NT2RP7004964, NT2RP7004975, NT2RP7005118, NT2RP7005205, NT2RP7005219, NT2RP7005323, NT2RP7005468, NT2RP7005493, NT2RP7005513, NT2RP7005529, NT2RP7005629, NT2RP7005631, NT2RP7005669, NT2RP7005675, NT2RP7005750, NT2RP7005846, NT2RP7006033, NT2RP7006160, NT2RP7006162, NT2RP7006188, NT2RP7006223, NT2RP7006296, NT2RP7006304, NT2RP7006374, NT2RP7006395, NT2RP7006408, NT2RP7006457, NT2RP7006490, NT2RP7006539, NT2RP7006547, NT2RP7006601, NT2RP7006621, NT2RP7006636, NT2RP7006701, NT2RP7006853, NT2RP7006886, NT2RP7006887, NT2RP7006980, NT2RP7006995, NT2RP7007114, NT2RP7007221, NT2RP7007226, NT2RP7007252, NT2RP7007269, NT2RP7007310, NT2RP7007359, NT2RP7007381, NT2RP7007406, NT2RP7007480, NT2RP7007504, NT2RP7007530, NT2RP7007537, NT2RP7007580, NT2RP7007594, NT2RP7007610, NT2RP7007617, NT2RP7007643, NT2RP7007766, NT2RP7007842, NT2RP7007925, NT2RP7007930, NT2RP7007975, NT2RP7008013, NT2RP7008015, NT2RP7008133, NT2RP7008137, NT2RP7008142, NT2RP7008144, NT2RP7008161, NT2RP7008167, NT2RP7008315, NT2RP7008360, NT2RP7008396, NT2RP7008406, NT2RP7008435, NT2RP7008441, NT2RP7008454, NT2RP7008487, NT2RP7008543, NT2RP7008544, NT2RP7008550, NT2RP7008557, NT2RP7008623, NT2RP7008657, NT2RP7008714, NT2RP7008720, NT2RP7008855, NT2RP7008863, NT2RP7009012, NT2RP7009019, NT2RP7009030, NT2RP7009087, NT2RP7009108, NT2RP7009147, NT2RP7009149, NT2RP7009168, NT2RP7009215, NT2RP7009225, NT2RP7009236, NT2RP7009253, NT2RP7009267, NT2RP7009322, NT2RP7009363, NT2RP7009370, NT2RP7009373, NT2RP7009394, NT2RP7009397, NT2RP7009429, NT2RP7009439, NT2RP7009466, NT2RP7009482, NT2RP7009498, NT2RP7009502, NT2RP7009507, NT2RP7009577, NT2RP7009743, NT2RP7009867, NT2RP7010109, NT2RP7010128, NT2RP7010235, NT2RP7010275, NT2RP7010521, NT2RP7010599, NT2RP7010612, NT2RP7010817, NT2RP7011086, NT2RP7011132, NT2RP7011268, NT2RP7011318, NT2RP7011452, NT2RP7011570, NT2RP7011721, NT2RP7011909, NT2RP7012291, NT2RP7012516, NT2RP7012776, NT2RP7013002, NT2RP7013374, NT2RP7013499, NT2RP7013573, NT2RP7013729, NT2RP7013764, NT2RP7013795, NT2RP7013999, NT2RP7014005, NT2RP7014178, NT2RP7014348, NT2RP7014420, NT2RP7014583, NT2RP7014721, NT2RP7014743, NT2RP7014778, NT2RP7014906, NT2RP7015080, NT2RP7015431, NT2RP7015503, NT2RP7015676, NT2RP7015789, NT2RP7015996, NT2RP7016508, NT2RP7016574, NT2RP7016622, NT2RP7016911, NT2RP7017139, NT2RP7017284, NT2RP7017365, NT2RP7017474, NT2RP7017546, NT2RP7017567, NT2RP7017795, NT2RP7017971, NT2RP7018032, NT2RP7018126, NT2RP7018197, NT2RP7018206, NT2RP7018340, NT2RP7018586, NT2RP7018802, NT2RP7018871, NT2RP7019064, NT2RP7019135, NT2RP7019273, NT2RP7019367, NT2RP7019401, NT2RP7019445, NT2RP7019543, NT2RP7019682, NT2RP7020112, NT2RP7020123, NT2RP7020343, NT2RP7020379, NT2RP8000137, NT2RP8000296, NT2RP8000435, NT2RP8000483, NT2RP8000521, NT2RP8000633, NT2RP8001363, NT2RP8001407, NT2RP8001584, NT2RP8001605, NT2RP8003490, NT2RP8003657, NT2RP8003787, NT2RP8004306, NT2RP8005546, NT2RP8006452, NT2RP8006521, NT2RP8007416, NT2RP8007503, NT2RP8007715, NT2RP8007920, NT2RP8008057, NT2RP8009248, NTONG1000006, NTONG1000033, NTONG1000052, NTONG1000075, NTONG1000087, NTONG1000123, NTONG1000130, NTONG1000161, NTONG1000172, NTONG1000182, NTONG1000213, NTONG1000214, NTONG1000246, NTONG1000247, NTONG1000257, NTONG1000264, NTONG2000040, NTONG2000107, NTONG2000231, NTONG2000265, NTONG2000334, NTONG2000363, NTONG2000413, NTONG2000492, NTONG2000531, NTONG2000583, NTONG2000800, NTONG2000858, NTONG2000878, NTONG2000966, NTONG2000985, NTONG2001014, NTONG2001079, NTONG2001137, NTONG2001157, NTONG2001173, NTONG2001220, NTONG2001222, NTONG2001362, NTONG2001428, NTONG2001532, NTONG2001587, NTONG2001612, NTONG2001619, NTONG2001642, NTONG2001657, NTONG2001676, NTONG2001762, NTONG2002278, NTONG2002582, NTONG2002807, NTONG2002948, NTONG2002970, NTONG2002985, NTONG2003158, NTONG2003210, NTONG2003316, NTONG2003409, NTONG2003454, NTONG2003515, NTONG2003805, NTONG2003852, NTONG2003897, NTONG2003928, NTONG2004095, NTONG2004308, NTONG2004521, NTONG2004690, NTONG2004806, NTONG2004829, NTONG2004844, NTONG2004918, NTONG2004991, NTONG2005062, NTONG2005086, NTONG2005137, NTONG2005153, NTONG2005265, NTONG2005277, NTONG2005363, NTONG2005373, NTONG2005391, NTONG2005480, NTONG2005497, NTONG2005520, NTONG2005577, NTONG2005657, NTONG2005801, NTONG2005822, NTONG2005897, NTONG2005969, NTONG2006099, NTONG2006187, NTONG2006301, NTONG2006324, NTONG2006354, NTONG2006440, NTONG2006484, NTONG2006501, NTONG2006646, NTONG2006709, NTONG2006783, NTONG2007020, NTONG2007028, NTONG2007034, NTONG2007249, NTONG2007517, NTONG2007522, NTONG2007658, NTONG2007693, NTONG2007756, NTONG2008088, NTONG2008093, NTONG2008143, NTONG2008365, NTONG2008522, NTONG2008672, NTONG2008862, NTONG2008939, NTONG2008944, NTONG2009060, NTONG2009068, NTONG2009229, NTONG2009233, NTONG2009468, NTONG2009576, OCBBF1000016, OCBBF1000030, OCBBF1000042, OCBBF1000049, OCBBF1000054, OCBBF1000067, OCBBF1000080, OCBBF1000085, OCBBF1000086, OCBBF1000091, OCBBF1000104, OCBBF1000118, OCBBF1000119, OCBBF1000122, OCBBF1000130, OCBBF1000138, OCBBF1000145, OCBBF1000146, OCBBF1000153, OCBBF1000175, OCBBF1000185, OCBBF1000188, OCBBF1000192, OCBBF1000254, OCBBF1000315, OCBBF2000015, OCBBF2000126, OCBBF2000178, OCBBF2000231, OCBBF2000277, OCBBF2000287, OCBBF2000323, OCBBF2000452, OCBBF2000467, OCBBF2000677, OCBBF2000703, OCBBF2000712, OCBBF2000719, OCBBF2000824, OCBBF2000831, OCBBF2000904, OCBBF2000982, OCBBF2000986, OCBBF2000998, OCBBF2001075, OCBBF2001101, OCBBF2001124, OCBBF2001140, OCBBF2001166, OCBBF2001176, OCBBF2001186, OCBBF2001196, OCBBF2001210, OCBBF2001252, OCBBF2001307, OCBBF2001323, OCBBF2001389, OCBBF2001402, OCBBF2001408, OCBBF2001416, OCBBF2001473, OCBBF2001494, OCBBF2001527, OCBBF2001528, OCBBF2001586, OCBBF2001639, OCBBF2001681, OCBBF2001687, OCBBF2001706, OCBBF2001749, OCBBF2001794, OCBBF2001910, OCBBF2001931, OCBBF2001961, OCBBF2001983, OCBBF2002015, OCBBF2002083, OCBBF2002086, OCBBF2002124, OCBBF2002161, OCBBF2002290, OCBBF2002357, OCBBF2002376, OCBBF2002615, OCBBF2002626, OCBBF2002656, OCBBF2002663, OCBBF2002805, OCBBF2002865, OCBBF2002920, OCBBF2002980, OCBBF2003028, OCBBF2003052, OCBBF2003091, OCBBF2003246, OCBBF2003327, OCBBF2003518, OCBBF2003543, OCBBF2003593, OCBBF2003744, OCBBF2003819, OCBBF2003925, OCBBF2004038, OCBBF2004104, OCBBF2004147, OCBBF2004168, OCBBF2004235, OCBBF2004259, OCBBF2004273, OCBBF2004385, OCBBF2004478, OCBBF2004482, OCBBF2004533, OCBBF2004567, OCBBF2004612, OCBBF2004647, OCBBF2004669, OCBBF2004757, OCBBF2004826, OCBBF2004866, OCBBF2004883, OCBBF2004889, OCBBF2004930, OCBBF2004984, OCBBF2005066, OCBBF2005077, OCBBF2005161, OCBBF2005343, OCBBF2005349, OCBBF2005373, OCBBF2005420, OCBBF2005428, OCBBF2005433, OCBBF2005546, OCBBF2005843, OCBBF2005901, OCBBF2005956, OCBBF2006005, OCBBF2006030, OCBBF2006058, OCBBF2006113, OCBBF2006148, OCBBF2006151, OCBBF2006154, OCBBF2006172, OCBBF2006214, OCBBF2006241, OCBBF2006313, OCBBF2006388, OCBBF2006438, OCBBF2006567, OCBBF2006624, OCBBF2006639, OCBBF2006660, OCBBF2006764, OCBBF2006849, OCBBF2006859, OCBBF2006972, OCBBF2006987, OCBBF2007028, OCBBF2007039, OCBBF2007051, OCBBF2007068, OCBBF2007114, OCBBF2007121, OCBBF2007184, OCBBF2007194, OCBBF2007196, OCBBF2007224, OCBBF2007238, OCBBF2007414, OCBBF2007415, OCBBF2007428, OCBBF2007478, OCBBF2007485, OCBBF2007520, OCBBF2007555, OCBBF2007610, OCBBF2007622, OCBBF2007756, OCBBF2007762, OCBBF2007931, OCBBF2007946, OCBBF2008005, OCBBF2008041, OCBBF2008116, OCBBF2008138, OCBBF2008144, OCBBF2008283, OCBBF2008330, OCBBF2008340, OCBBF2008366, OCBBF2008466, OCBBF2008483, OCBBF2008511, OCBBF2008520, OCBBF2008569, OCBBF2008586, OCBBF2008640, OCBBF2008691, OCBBF2008701, OCBBF2008724, OCBBF2008760, OCBBF2008768, OCBBF2008770, OCBBF2008775, OCBBF2008790, OCBBF2008814, OCBBF2008822, OCBBF2009095, OCBBF2009115, OCBBF2009242, OCBBF2009352, OCBBF2009391, OCBBF2009424, OCBBF2009536, OCBBF2009571, OCBBF2009583, OCBBF2009603, OCBBF2009788, OCBBF2009836, OCBBF2009920, OCBBF2009926, OCBBF2010040, OCBBF2010140, OCBBF2010281, OCBBF2010313, OCBBF2010404, OCBBF2010416, OCBBF2010420, OCBBF2010557, OCBBF2010604, OCBBF2010709, OCBBF2010792, OCBBF2010819, OCBBF2010830, OCBBF2010841, OCBBF2010843, OCBBF2010858, OCBBF2010863, OCBBF2010871, OCBBF2010931, OCBBF2010945, OCBBF2010978, OCBBF2010989, OCBBF2011021, OCBBF2011073, OCBBF2011137, OCBBF2011160, OCBBF2011177, OCBBF2011228, OCBBF2011232, OCBBF2011283, OCBBF2011311, OCBBF2011536, OCBBF2011625, OCBBF2011669, OCBBF2011685, OCBBF2011706, OCBBF2011722, OCBBF2011759, OCBBF2011767, OCBBF2011855, OCBBF2011872, OCBBF2011887, OCBBF2011897, OCBBF2011960, OCBBF2011981, OCBBF2012001, OCBBF2012028, OCBBF2012039, OCBBF2012095, OCBBF2012139, OCBBF2012191, OCBBF2012262, OCBBF2012320, OCBBF2012436, OCBBF2012525, OCBBF2012553, OCBBF2012678, OCBBF2012704, OCBBF2012714, OCBBF2012755, OCBBF2012812, OCBBF2012821, OCBBF2012881, OCBBF2012908, OCBBF2012936, OCBBF2012990, OCBBF2013011, OCBBF2013049, OCBBF2013091, OCBBF2013123, OCBBF2013127, OCBBF2013149, OCBBF2013208, OCBBF2013285, OCBBF2013319, OCBBF2013324, OCBBF2013366, OCBBF2013481, OCBBF2013507, OCBBF2013721, OCBBF2013789, OCBBF2013843, OCBBF2013883, OCBBF2013926, OCBBF2014052, OCBBF2014089, OCBBF2014322, OCBBF2014386, OCBBF2014541, OCBBF2014576, OCBBF2014707, OCBBF2014745, OCBBF2014828, OCBBF2014873, OCBBF2014880, OCBBF2014928, OCBBF2015031, OCBBF2015081, OCBBF2015115, OCBBF2015232, OCBBF2015233, OCBBF2015285, OCBBF2015334, OCBBF2015335, OCBBF2015503, OCBBF2015506, OCBBF2015599, OCBBF2015645, OCBBF2015659, OCBBF2015751, OCBBF2015797, OCBBF2015931, OCBBF2015980, OCBBF2016038, OCBBF2016405, OCBBF2016467, OCBBF2016590, OCBBF2016591, OCBBF2016612, OCBBF2016689, OCBBF2016690, OCBBF2016841, OCBBF2016928, OCBBF2017035, OCBBF2017055, OCBBF2017069, OCBBF2017306, OCBBF2017325, OCBBF2017398, OCBBF2017458, OCBBF2017489, OCBBF2017516, OCBBF2017665, OCBBF2017754, OCBBF2017791, OCBBF2017815, OCBBF2017882, OCBBF2017888, OCBBF2017893, OCBBF2017920, OCBBF2018012, OCBBF2018014, OCBBF2018084, OCBBF2018167, OCBBF2018206, OCBBF2018229, OCBBF2018234, OCBBF2018362, OCBBF2018380, OCBBF2018563, OCBBF2018581, OCBBF2018618, OCBBF2018663, OCBBF2018687, OCBBF2018827, OCBBF2018828, OCBBF2018873, OCBBF2018934, OCBBF2019108, OCBBF2019195, OCBBF2019327, OCBBF2019684, OCBBF2019761, OCBBF2019823, OCBBF2019950, OCBBF2020048, OCBBF2020318, OCBBF2020343, OCBBF2020453, OCBBF2020741, OCBBF2020801, OCBBF2020825, OCBBF2020838, OCBBF2021020, OCBBF2021214, OCBBF2021286, OCBBF2021323, OCBBF2021518, OCBBF2021788, OCBBF2021833, OCBBF2022351, OCBBF2022573, OCBBF2022574, OCBBF2023162, OCBBF2023598, OCBBF2023643, OCBBF2024463, OCBBF2024589, OCBBF2024719, OCBBF2024779, OCBBF2024781, OCBBF2024850, OCBBF2025028, OCBBF2025115, OCBBF2025198, OCBBF2025451, OCBBF2025458, OCBBF2025527, OCBBF2025631, OCBBF2025730, OCBBF2026025, OCBBF2026035, OCBBF2026144, OCBBF2026368, OCBBF2026645, OCBBF2026649, OCBBF2026690, OCBBF2026981, OCBBF2027148, OCBBF2027197, OCBBF2027354, OCBBF2027423, OCBBF2027478, OCBBF2027481, OCBBF2027511, OCBBF2027661, OCBBF2027728, OCBBF2027782, OCBBF2027868, OCBBF2028055, OCBBF2028173, OCBBF2028421, OCBBF2029471, OCBBF2029901, OCBBF2030116, OCBBF2030329, OCBBF2030354, OCBBF2030517, OCBBF2030574, OCBBF2030708, OCBBF2030927, OCBBF2030963, OCBBF2031167, OCBBF2031198, OCBBF2031366, OCBBF2031561, OCBBF2032152, OCBBF2032274, OCBBF2032539, OCBBF2032590, OCBBF2032599, OCBBF2032611, OCBBF2032671, OCBBF2033295, OCBBF2033413, OCBBF2033869, OCBBF2033948, OCBBF2034333, OCBBF2034529, OCBBF2034637, OCBBF2034906, OCBBF2035110, OCBBF2035214, OCBBF2035390, OCBBF2035564, OCBBF2035658, OCBBF2035823, OCBBF2035885, OCBBF2035916, OCBBF2036019, OCBBF2036031, OCBBF2036225, OCBBF2036476, OCBBF2036743, OCBBF2036752, OCBBF2037068, OCBBF2037340, OCBBF2037398, OCBBF2037464, OCBBF2037547, OCBBF2037598, OCBBF2037638, OCBBF2038238, OCBBF2038285, OCBBF3000097, OCBBF3000213, OCBBF3000296, OCBBF3000323, OCBBF3000372, OCBBF3000380, OCBBF3000743, OCBBF3000830, OCBBF3001076, OCBBF3001202, OCBBF3001333, OCBBF3001616, OCBBF3002553, OCBBF3002600, OCBBF3002654, OCBBF3003103, OCBBF3003209, OCBBF3003592, OCBBF3003745, OCBBF3003761, OCBBF3004264, OCBBF3004314, OCBBF3004487, OCBBF3004972, OCBBF3005330, OCBBF3005597, OCBBF3005843, OCBBF3006802, OCBBF3006986, OCBBF3007078, OCBBF3007704, OCBBF3008230, OCBBF3008392, OCBBF3008835, OCBBF3009192, OCBBF3009244, OCBBF3009279, PANCR1000012, PANCR1000021, PANCR1000081, PANCR1000086, PANCR1000091, PANCR1000185, PEBLM1000024, PEBLM1000029, PEBLM1000034, PEBLM1000062, PEBLM1000066, PEBLM1000068, PEBLM1000071, PEBLM1000083, PEBLM1000144, PEBLM1000147, PEBLM1000174, PEBLM1000180, PEBLM2000030, PEBLM2000112, PEBLM2000126, PEBLM2000170, PEBLM2000180, PEBLM2000213, PEBLM2000222, PEBLM2000248, PEBLM2000267, PEBLM2000270, PEBLM2000321, PEBLM2000326, PEBLM2000333, PEBLM2000338, PEBLM2000479, PEBLM2000502, PEBLM2001072, PEBLM2001312, PEBLM2001465, PEBLM2001488, PEBLM2001803, PEBLM2002432, PEBLM2002455, PEBLM2002594, PEBLM2002749, PEBLM2002887, PEBLM2003426, PEBLM2003765, PEBLM2003914, PEBLM2003935, PEBLM2004015, PEBLM2004216, PEBLM2004290, PEBLM2004452, PEBLM2004497, PEBLM2004666, PEBLM2004733, PEBLM2005282, PEBLM2005615, PEBLM2005632, PEBLM2005697, PEBLM2006031, PEBLM2006036, PEBLM2006049, PEBLM2006113, PEBLM2006135, PEBLM2006215, PEBLM2006283, PEBLM2006298, PEBLM2006366, PEBLM2006709, PEBLM2006912, PEBLM2007112, PEBLM2007140, PEBLM2007188, PEBLM2007296, PEBLM2007437, PEBLM2007447, PEBLM2007598, PEBLM2007832, PEBLM2007834, PEBLM2008106, PEBLM2008576, PEBLM2008605, PEBLM2008826, PEBLM2008861, PERIC1000025, PERIC1000147, PERIC2000180, PERIC2000214, PERIC2000386, PERIC2000387, PERIC2000422, PERIC2000473, PERIC2000478, PERIC2000889, PERIC2000914, PERIC2001227, PERIC2001228, PERIC2001379, PERIC2001504, PERIC2001703, PERIC2001764, PERIC2002243, PERIC2002272, PERIC2002452, PERIC2002766, PERIC2003001, PERIC2003090, PERIC2003287, PERIC2003349, PERIC2003452, PERIC2003699, PERIC2003720, PERIC2003794, PERIC2003834, PERIC2003919, PERIC2003957, PERIC2004028, PERIC2004131, PERIC2004259, PERIC2004379, PERIC2004429, PERIC2004510, PERIC2004613, PERIC2004909, PERIC2005111, PERIC2005117, PERIC2005305, PERIC2005347, PERIC2005370, PERIC2005936, PERIC2006035, PERIC2006121, PERIC2006443, PERIC2006945, PERIC2006960, PERIC2007439, PERIC2007914, PERIC2008008, PERIC2008385, PERIC2009001, PERIC2009086, PERIC2009329, PERIC2009566, PLACE5000001, PLACE5000013, PLACE5000037, PLACE5000058, PLACE5000066, PLACE5000067, PLACE5000068, PLACE5000070, PLACE5000080, PLACE5000105, PLACE5000113, PLACE5000115, PLACE5000116, PLACE5000129, PLACE5000139, PLACE5000153, PLACE5000159, PLACE5000170, PLACE5000171, PLACE5000172, PLACE5000178, PLACE5000245, PLACE5000260, PLACE5000282, PLACE5000297, PLACE5000372, PLACE5000492, PLACE5000522, PLACE5000527, PLACE6000012, PLACE6000044, PLACE6000055, PLACE6000070, PLACE6000137, PLACE6000191, PLACE6000205, PLACE6000231, PLACE6000296, PLACE6000314, PLACE6000325, PLACE6000371, PLACE6000414, PLACE6000424, PLACE6000426, PLACE6000429, PLACE6000450, PLACE6000463, PLACE6000523, PLACE6000550, PLACE6000552, PLACE6000555, PLACE6000619, PLACE6000630, PLACE6000953, PLACE6001118, PLACE6001153, PLACE6001185, PLACE6001262, PLACE6001281, PLACE6001294, PLACE6001443, PLACE6001536, PLACE6001557, PLACE6001712, PLACE6001740, PLACE6001823, PLACE6001886, PLACE6001925, PLACE6001933, PLACE6002011, PLACE6002016, PLACE6002056, PLACE6002102, PLACE6002157, PLACE6002312, PLACE6002323, PLACE6002345, PLACE6002419, PLACE6002462, PLACE6002647, PLACE6002692, PLACE6002699, PLACE6002710, PLACE6002871, PLACE6002949, PLACE6002960, PLACE6003004, PLACE6003038, PLACE6003077, PLACE6003094, PLACE6003109, PLACE6003204, PLACE6003218, PLACE6003372, PLACE6003383, PLACE6003393, PLACE6003399, PLACE6003539, PLACE6003621, PLACE6003705, PLACE6003740, PLACE6003745, PLACE6003771, PLACE6003796, PLACE6003839, PLACE6003850, PLACE6004101, PLACE6004219, PLACE6004312, PLACE6004336, PLACE6004368, PLACE6004380, PLACE6004396, PLACE6004397, PLACE6004454, PLACE6004464, PLACE6004491, PLACE6004663, PLACE6004687, PLACE6004738, PLACE6004931, PLACE6004966, PLACE6005007, PLACE6005029, PLACE6005108, PLACE6005231, PLACE6005234, PLACE6005283, PLACE6005294, PLACE6005328, PLACE6005351, PLACE6005423, PLACE6005482, PLACE6005487, PLACE6005535, PLACE6005546, PLACE6005559, PLACE6005579, PLACE6005691, PLACE6005786, PLACE6006077, PLACE6006137, PLACE6006158, PLACE6006186, PLACE6006217, PLACE6006222, PLACE6006266, PLACE6006287, PLACE6006394, PLACE6006418, PLACE6006474, PLACE6006566, PLACE6006697, PLACE6006822, PLACE6006871, PLACE6006905, PLACE6006988, PLACE6007050, PLACE6007180, PLACE6007239, PLACE6007242, PLACE6007309, PLACE6007373, PLACE6007380, PLACE6007433, PLACE6007436, PLACE6007482, PLACE6007687, PLACE6007787, PLACE6007798, PLACE6007807, PLACE6008036, PLACE6008094, PLACE6008126, PLACE6008285, PLACE6008444, PLACE6008453, PLACE6008640, PLACE6008750, PLACE6008768, PLACE6008775, PLACE6008824, PLACE6008989, PLACE6009006, PLACE6009008, PLACE6009228, PLACE6009237, PLACE6009338, PLACE6009419, PLACE6009430, PLACE6009482, PLACE6009524, PLACE6009527, PLACE6009560, PLACE6009590, PLACE6009821, PLACE6009835, PLACE6009853, PLACE6010463, PLACE6010484, PLACE6010485, PLACE6010568, PLACE6010701, PLACE6010704, PLACE6010732, PLACE6010765, PLACE6010848, PLACE6010925, PLACE6010936, PLACE6010991, PLACE6011041, PLACE6011057, PLACE6011102, PLACE6011156, PLACE6011211, PLACE6011260, PLACE6011334, PLACE6011627, PLACE6011774, PLACE6011881, PLACE6011907, PLACE6011970, PLACE6011975, PLACE6012028, PLACE6012108, PLACE6012168, PLACE6012297, PLACE6012308, PLACE6012574, PLACE6012908, PLACE6012936, PLACE6012942, PLACE6013222, PLACE6013232, PLACE6013288, PLACE6013386, PLACE6013400, PLACE6013650, PLACE6013672, PLACE6013883, PLACE6013884, PLACE6013885, PLACE6014043, PLACE6014064, PLACE6014516, PLACE6014882, PLACE6015051, PLACE6015211, PLACE6015322, PLACE6015445, PLACE6015460, PLACE6015513, PLACE6015591, PLACE6015729, PLACE6015731, PLACE6015939, PLACE6016030, PLACE6016093, PLACE6016105, PLACE6016160, PLACE6016210, PLACE6016254, PLACE6016383, PLACE6016942, PLACE6016984, PLACE6017002, PLACE6017431, PLACE6017564, PLACE6017578, PLACE6017626, PLACE6017701, PLACE6017714, PLACE6017788, PLACE6017791, PLACE6018031, PLACE6018107, PLACE6018187, PLACE6018235, PLACE6018287, PLACE6018441, PLACE6018497, PLACE6018769, PLACE6018834, PLACE6018843, PLACE6018863, PLACE6018938, PLACE6019195, PLACE6019385, PLACE6019542, PLACE6019600, PLACE6019674, PLACE6019676, PLACE6019701, PLACE6019932, PLACE6020031, PLACE7000167, PLACE7000170, PLACE7000266, PLACE7000333, PLACE7000410, PLACE7000502, PLACE7000707, PLACE7001022, PLACE7001544, PLACE7001759, PLACE7001936, PLACE7002303, PLACE7002641, PLACE7003639, PLACE7003657, PLACE7003684, PLACE7003985, PLACE7004961, PLACE7005169, PLACE7005671, PLACE7005840, PLACE7006051, PLACE7006090, PLACE7006240, PLACE7006268, PLACE7006275, PLACE7006498, PLACE7006540, PLACE7007379, PLACE7007644, PLACE7007973, PLACE7008136, PLACE7008261, PLACE7008431, PLACE7008623, PLACE7008766, PLACE7009563, PROST1000033, PROST1000039, PROST1000065, PROST1000083, PROST1000097, PROST1000110, PROST1000123, PROST1000136, PROST1000144, PROST1000145, PROST1000152, PROST1000167, PROST1000184, PROST1000199, PROST1000215, PROST1000217, PROST1000220, PROST1000226, PROST1000246, PROST1000262, PROST1000272, PROST1000298, PROST1000322, PROST1000334, PROST1000343, PROST1000362, PROST1000377, PROST1000383, PROST1000412, PROST1000419, PROST1000451, PROST1000480, PROST1000485, PROST1000493, PROST1000512, PROST1000527, PROST1000528, PROST1000536, PROST1000559, PROST1000575, PROST2000036, PROST2000053, PROST2000067, PROST2000079, PROST2000105, PROST2000143, PROST2000162, PROST2000165, PROST2000203, PROST2000206, PROST2000212, PROST2000241, PROST2000267, PROST2000273, PROST2000274, PROST2000277, PROST2000284, PROST2000325, PROST2000337, PROST2000432, PROST2000452, PROST2000463, PROST2000470, PROST2000505, PROST2000567, PROST2000572, PROST2000717, PROST2000761, PROST2000835, PROST2000893, PROST2000961, PROST2001002, PROST2001116, PROST2001138, PROST2001180, PROST2001213, PROST2001283, PROST2001414, PROST2001415, PROST2001465, PROST2001521, PROST2001540, PROST2001552, PROST2001599, PROST2001611, PROST2001636, PROST2001796, PROST2001805, PROST2001823, PROST2001883, PROST2001899, PROST2001997, PROST2001998, PROST2002078, PROST2002101, PROST2002162, PROST2002212, PROST2002227, PROST2002338, PROST2002425, PROST2002488, PROST2002489, PROST2002527, PROST2002591, PROST2002602, PROST2002633, PROST2002651, PROST2002682, PROST2002685, PROST2002722, PROST2002736, PROST2002842, PROST2002897, PROST2002906, PROST2002960, PROST2003102, PROST2003117, PROST2003210, PROST2003302, PROST2003303, PROST2003324, PROST2003338, PROST2003340, PROST2003396, PROST2003428, PROST2003472, PROST2003537, PROST2003563, PROST2003577, PROST2003583, PROST2003586, PROST2003628, PROST2003635, PROST2003674, PROST2003676, PROST2003725, PROST2003732, PROST2003775, PROST2003922, PROST2003930, PROST2004115, PROST2004142, PROST2004146, PROST2004161, PROST2004251, PROST2004258, PROST2004270, PROST2004332, PROST2004416, PROST2004481, PROST2004526, PROST2004570, PROST2004727, PROST2004739, PROST2004742, PROST2004744, PROST2004817, PROST2005039, PROST2005067, PROST2005076, PROST2005093, PROST2005121, PROST2005131, PROST2005143, PROST2005228, PROST2005272, PROST2005285, PROST2005426, PROST2005466, PROST2005604, PROST2005630, PROST2005683, PROST2005788, PROST2005793, PROST2005880, PROST2005886, PROST2005904, PROST2005919, PROST2005943, PROST2006008, PROST2006020, PROST2006030, PROST2006060, PROST2006196, PROST2006201, PROST2006260, PROST2006282, PROST2006343, PROST2006450, PROST2006491, PROST2006510, PROST2006579, PROST2006688, PROST2006766, PROST2006782, PROST2006933, PROST2006988, PROST2007122, PROST2007200, PROST2007237, PROST2007248, PROST2007289, PROST2007317, PROST2007328, PROST2007382, PROST2007389, PROST2007416, PROST2007528, PROST2007818, PROST2007871, PROST2007950, PROST2007956, PROST2007974, PROST2007988, PROST2008079, PROST2008088, PROST2008243, PROST2008245, PROST2008268, PROST2008271, PROST2008360, PROST2008447, PROST2008468, PROST2008472, PROST2008516, PROST2008724, PROST2008835, PROST2008993, PROST2009022, PROST2009208, PROST2009222, PROST2009254, PROST2009273, PROST2009320, PROST2009347, PROST2009365, PROST2009388, PROST2009400, PROST2009470, PROST2009483, PROST2009571, PROST2009731, PROST2009736, PROST2009795, PROST2009901, PROST2009909, PROST2010046, PROST2010219, PROST2010250, PROST2010318, PROST2010326, PROST2010382, PROST2010400, PROST2010545, PROST2010579, PROST2010606, PROST2010782, PROST2010885, PROST2011012, PROST2011038, PROST2011105, PROST2011297, PROST2011410, PROST2011439, PROST2011482, PROST2011577, PROST2011631, PROST2011660, PROST2012005, PROST2012016, PROST2012088, PROST2012140, PROST2012157, PROST2012190, PROST2012249, PROST2012353, PROST2012400, PROST2012448, PROST2012504, PROST2012542, PROST2012550, PROST2012740, PROST2012745, PROST2012780, PROST2012888, PROST2012890, PROST2013032, PROST2013053, PROST2013121, PROST2013260, PROST2013327, PROST2013531, PROST2013605, PROST2013627, PROST2013873, PROST2013880, PROST2014422, PROST2014585, PROST2014601, PROST2014659, PROST2014862, PROST2014916, PROST2014925, PROST2015124, PROST2015137, PROST2015198, PROST2015243, PROST2015246, PROST2015251, PROST2015287, PROST2015332, PROST2015457, PROST2015464, PROST2015537, PROST2015545, PROST2015551, PROST2015636, PROST2015756, PROST2015877, PROST2015900, PROST2015924, PROST2015932, PROST2016195, PROST2016246, PROST2016351, PROST2016379, PROST2016444, PROST2016462, PROST2016499, PROST2016512, PROST2016566, PROST2016582, PROST2016668, PROST2016684, PROST2016777, PROST2016829, PROST2016860, PROST2016918, PROST2016980, PROST2017098, PROST2017128, PROST2017367, PROST2017413, PROST2017441, PROST2017529, PROST2017578, PROST2017612, PROST2017617, PROST2017700, PROST2017701, PROST2017729, PROST2017836, PROST2017910, PROST2017972, PROST2018030, PROST2018090, PROST2018235, PROST2018437, PROST2018487, PROST2018511, PROST2018583, PROST2018588, PROST2018607, PROST2018788, PROST2018902, PROST2018922, PROST2018977, PROST2019164, PROST2019253, PROST2019296, PROST2019398, PROST2019487, PROST2019781, PUAEN1000039, PUAEN1000081, PUAEN1000085, PUAEN1000087, PUAEN1000121, PUAEN1000147, PUAEN1000164, PUAEN1000175, PUAEN1000239, PUAEN1000275, PUAEN1000276, PUAEN1000288, PUAEN2000080, PUAEN2000152, PUAEN2000175, PUAEN2000247, PUAEN2000312, PUAEN2000394, PUAEN2000594, PUAEN2000684, PUAEN2000942, PUAEN2001260, PUAEN2001345, PUAEN2001526, PUAEN2001586, PUAEN2002473, PUAEN2002489, PUAEN2002552, PUAEN2002568, PUAEN2002616, PUAEN2002758, PUAEN2003018, PUAEN2003079, PUAEN2003116, PUAEN2003408, PUAEN2003517, PUAEN2003954, PUAEN2004067, PUAEN2004083, PUAEN2004400, PUAEN2004511, PUAEN2004525, PUAEN2004875, PUAEN2005110, PUAEN2005247, PUAEN2005502, PUAEN2005588, PUAEN2005930, PUAEN2006029, PUAEN2006328, PUAEN2006335, PUAEN2006578, PUAEN2006639, PUAEN2006761, PUAEN2007350, PUAEN2007785, PUAEN2007898, PUAEN2008123, PUAEN2008228, PUAEN2008314, PUAEN2008515, PUAEN2008815, PUAEN2008939, PUAEN2008980, PUAEN2008985, PUAEN2009174, PUAEN2009348, PUAEN2009534, PUAEN2009655, PUAEN2009795, PUAEN2009852, PUAEN2010346, PUAEN2010824, RECTM1000051, RECTM1000141, RECTM2000220, RECTM2000349, RECTM2000433, RECTM2000510, RECTM2001307, RECTM2001347, RECTM2001519, RECTM2001666, RECTM2001691, RECTM2001749, RECTM2002172, RECTM2002602, RECTM2002632, SALGL1000005, SALGL1000024, SALGL1000028, SALGL1000047, SALGL1000065, SALGL1000107, SALGL1000171, SKMUS1000014, SKMUS1000022, SKMUS1000030, SKMUS1000064, SKMUS1000067, SKMUS1000084, SKMUS1000102, SKMUS1000104, SKMUS1000110, SKMUS1000118, SKMUS1000124, SKMUS1000129, SKMUS1000176, SKMUS1000177, SKMUS1000186, SKMUS2000061, SKMUS2000074, SKMUS2000078, SKMUS2000117, SKMUS2000137, SKMUS2000198, SKMUS2000243, SKMUS2000271, SKMUS2000287, SKMUS2000317, SKMUS2000330, SKMUS2000339, SKMUS2000343, SKMUS2000361, SKMUS2000365, SKMUS2000380, SKMUS2000390, SKMUS2000416, SKMUS2000458, SKMUS2000467, SKMUS2000468, SKMUS2000484, SKMUS2000515, SKMUS2000679, SKMUS2000690, SKMUS2000701, SKMUS2000705, SKMUS2000710, SKMUS2000724, SKMUS2000726, SKMUS2000757, SKMUS2000774, SKMUS2000821, SKMUS2000847, SKMUS2000863, SKMUS2000873, SKMUS2000894, SKMUS2000898, SKMUS2000902, SKMUS2000945, SKMUS2000954, SKMUS2000961, SKMUS2000973, SKMUS2000980, SKMUS2001008, SKMUS2001014, SKMUS2001129, SKMUS2001147, SKMUS2001157, SKMUS2001164, SKMUS2001199, SKMUS2001201, SKMUS2001215, SKMUS2001247, SKMUS2001254, SKMUS2001271, SKMUS2001287, SKMUS2001323, SKMUS2001364, SKMUS2001398, SKMUS2001402, SKMUS2001412, SKMUS2001492, SKMUS2001501, SKMUS2001528, SKMUS2001543, SKMUS2001580, SKMUS2001585, SKMUS2001608, SKMUS2001631, SKMUS2001634, SKMUS2001662, SKMUS2001663, SKMUS2001668, SKMUS2001671, SKMUS2001683, SKMUS2001693, SKMUS2001695, SKMUS2001703, SKMUS2001740, SKMUS2001742, SKMUS2001823, SKMUS2001850, SKMUS2002077, SKMUS2002084, SKMUS2002153, SKMUS2002475, SKMUS2002602, SKMUS2002634, SKMUS2002693, SKMUS2002821, SKMUS2002840, SKMUS2002920, SKMUS2003034, SKMUS2003074, SKMUS2003168, SKMUS2003194, SKMUS2003744, SKMUS2004044, SKMUS2004047, SKMUS2004483, SKMUS2004667, SKMUS2004897, SKMUS2004903, SKMUS2004908, SKMUS2005428, SKMUS2006394, SKMUS2006481, SKMUS2006755, SKMUS2007315, SKMUS2007359, SKMUS2007568, SKMUS2007740, SKMUS2007816, SKMUS2007915, SKMUS2008338, SKMUS2008407, SKMUS2008474, SKMUS2008585, SKMUS2008607, SKMUS2009190, SKMUS2009232, SKMUS2009479, SKMUS2009557, SKNMC1000110, SKNMC1000123, SKNMC1000124, SKNMC1000159, SKNMC1000168, SKNMC1000229, SKNMC1000251, SKNMC1000264, SKNMC2000065, SKNMC2000224, SKNMC2000256, SKNMC2000305, SKNMC2000322, SKNMC2000356, SKNMC2000374, SKNMC2000583, SKNMC2000593, SKNMC2000612, SKNMC2000622, SKNMC2000966, SKNMC2001113, SKNMC2001555, SKNMC2001596, SKNMC2001623, SKNMC2002402, SKNMC2003639, SKNMC2003924, SKNMC2003987, SKNMC2004457, SKNMC2004643, SKNMC2004651, SKNMC2005772, SKNMC2006173, SKNMC2006327, SKNMC2006998, SKNMC2007134, SKNMC2007502, SKNMC2007504, SKNMC2007961, SKNMC2009450, SKNSH1000002, SKNSH1000086, SKNSH1000174, SKNSH1000301, SKNSH1000308, SKNSH1000416, SKNSH2000051, SKNSH2000101, SKNSH2000151, SKNSH2000163, SKNSH2000250, SKNSH2000347, SKNSH2000482, SKNSH2000516, SKNSH2000550, SKNSH2000716, SKNSH2000819, SKNSH2000971, SKNSH2001222, SKNSH2001931, SKNSH2002054, SKNSH2002866, SKNSH2003064, SKNSH2003174, SKNSH2003422, SKNSH2003466, SKNSH2003483, SKNSH2003528, SKNSH2003633, SKNSH2004039, SKNSH2005061, SKNSH2005120, SKNSH2005194, SKNSH2005240, SKNSH2005792, SKNSH2005816, SKNSH2005981, SKNSH2006234, SKNSH2006304, SKNSH2006432, SKNSH2006822, SKNSH2007142, SKNSH2007149, SKNSH2007429, SKNSH2007739, SKNSH2008043, SKNSH2008969, SKNSH2009197, SKNSH2009357, SKNSH2009435, SKNSH2009991, SKNSH2010015, SMINT1000012, SMINT1000016, SMINT1000039, SMINT1000042, SMINT1000048, SMINT1000051, SMINT1000054, SMINT1000057, SMINT1000071, SMINT1000075, SMINT1000078, SMINT1000091, SMINT1000100, SMINT1000103, SMINT1000118, SMINT1000131, SMINT1000137, SMINT1000192, SMINT2000007, SMINT2000018, SMINT2000032, SMINT2000040, SMINT2000060, SMINT2000073, SMINT2000084, SMINT2000145, SMINT2000159, SMINT2000176, SMINT2000185, SMINT2000227, SMINT2000229, SMINT2000232, SMINT2000239, SMINT2000267, SMINT2000277, SMINT2000396, SMINT2000400, SMINT2000454, SMINT2000518, SMINT2000529, SMINT2000530, SMINT2000537, SMINT2000538, SMINT2000541, SMINT2000545, SMINT2000558, SMINT2000562, SMINT2000568, SMINT2000609, SMINT2000629, SMINT2000694, SMINT2000747, SMINT2000811, SMINT2000824, SMINT2000933, SMINT2000984, SMINT2001114, SMINT2001158, SMINT2001183, SMINT2001199, SMINT2001222, SMINT2001348, SMINT2001397, SMINT2001458, SMINT2001461, SMINT2001535, SMINT2001559, SMINT2001609, SMINT2001615, SMINT2001683, SMINT2001731, SMINT2001812, SMINT2001818, SMINT2001950, SMINT2002126, SMINT2002159, SMINT2002202, SMINT2002210, SMINT2002224, SMINT2002281, SMINT2002311, SMINT2002314, SMINT2002328, SMINT2002414, SMINT2002457, SMINT2002620, SMINT2002689, SMINT2002743, SMINT2002778, SMINT2002880, SMINT2002882, SMINT2002884, SMINT2002899, SMINT2002974, SMINT2003003, SMINT2003128, SMINT2003150, SMINT2003317, SMINT2003386, SMINT2003423, SMINT2003505, SMINT2003551, SMINT2003569, SMINT2003641, SMINT2003644, SMINT2003866, SMINT2003905, SMINT2004037, SMINT2004047, SMINT2004086, SMINT2004280, SMINT2004299, SMINT2004339, SMINT2004350, SMINT2004414, SMINT2004473, SMINT2004547, SMINT2004583, SMINT2004589, SMINT2004729, SMINT2004781, SMINT2004891, SMINT2004909, SMINT2004972, SMINT2004992, SMINT2005075, SMINT2005161, SMINT2005174, SMINT2005213, SMINT2005330, SMINT2005387, SMINT2005402, SMINT2005405, SMINT2005621, SMINT2005623, SMINT2005624, SMINT2005800, SMINT2005956, SMINT2006078, SMINT2006205, SMINT2006331, SMINT2006596, SMINT2006641, SMINT2006648, SMINT2006708, SMINT2006716, SMINT2006801, SMINT2007062, SMINT2007101, SMINT2007140, SMINT2007187, SMINT2007219, SMINT2007294, SMINT2007365, SMINT2007391, SMINT2007433, SMINT2007508, SMINT2007526, SMINT2007579, SMINT2007647, SMINT2007729, SMINT2007790, SMINT2007792, SMINT2007796, SMINT2007867, SMINT2007932, SMINT2008042, SMINT2008054, SMINT2008133, SMINT2008277, SMINT2008329, SMINT2008455, SMINT2008491, SMINT2008531, SMINT2008545, SMINT2008558, SMINT2008590, SMINT2008625, SMINT2008672, SMINT2008690, SMINT2008715, SMINT2008720, SMINT2008817, SMINT2008844, SMINT2008869, SMINT2008917, SMINT2008921, SMINT2009119, SMINT2009121, SMINT2009212, SMINT2009216, SMINT2009233, SMINT2009259, SMINT2009272, SMINT2009292, SMINT2009363, SMINT2009415, SMINT2009468, SMINT2009505, SMINT2009529, SMINT2009832, SMINT2009895, SMINT2009902, SMINT2009973, SMINT2010015, SMINT2010068, SMINT2010076, SMINT2010084, SMINT2010144, SMINT2010200, SMINT2010278, SMINT2010324, SMINT2010326, SMINT2010369, SMINT2010426, SMINT2010500, SMINT2010533, SMINT2010629, SMINT2010639, SMINT2010672, SMINT2010753, SMINT2010853, SMINT2010897, SMINT2010901, SMINT2010959, SMINT2010997, SMINT2011033, SMINT2011066, SMINT2011273, SMINT2011311, SMINT2011406, SMINT2011509, SMINT2011588, SMINT2011656, SMINT2011888, SMINT2011958, SMINT2012040, SMINT2012122, SMINT2012179, SMINT2012195, SMINT2012285, SMINT2012291, SMINT2012501, SMINT2012734, SMINT2012793, SMINT2013031, SMINT2013032, SMINT2013129, SMINT2013170, SMINT2013181, SMINT2013228, SMINT2013613, SMINT2013626, SMINT2013695, SMINT2013833, SMINT2013890, SMINT2014166, SMINT2014282, SMINT2014443, SMINT2014480, SMINT2014489, SMINT2014721, SMINT2015006, SMINT2015294, SMINT2015306, SMINT2015326, SMINT2015353, SMINT2015454, SMINT2015518, SMINT2015745, SMINT2015787, SMINT2015810, SMINT2016122, SMINT2016146, SMINT2016286, SMINT2016313, SMINT2016396, SMINT2016412, SMINT2016440, SMINT2016477, SMINT2016544, SMINT2016857, SMINT2017134, SMINT2017319, SMINT2017324, SMINT2017410, SMINT2017431, SMINT2017432, SMINT2017436, SMINT2017599, SMINT2017659, SMINT2017736, SMINT2017781, SMINT2017855, SMINT2017884, SMINT2017964, SMINT2017974, SMINT2018343, SMINT2018353, SMINT2018592, SMINT2018681, SMINT2019017, SMINT2019105, SMINT2019142, SMINT2019153, SMINT2019200, SPLEN1000013, SPLEN1000041, SPLEN1000049, SPLEN1000056, SPLEN1000087, SPLEN1000089, SPLEN1000091, SPLEN1000134, SPLEN1000139, SPLEN1000143, SPLEN1000144, SPLEN1000145, SPLEN1000156, SPLEN1000163, SPLEN1000165, SPLEN1000166, SPLEN1000178, SPLEN2000020, SPLEN2000047, SPLEN2000064, SPLEN2000072, SPLEN2000098, SPLEN2000126, SPLEN2000134, SPLEN2000143, SPLEN2000189, SPLEN2000197, SPLEN2000205, SPLEN2000222, SPLEN2000242, SPLEN2000243, SPLEN2000247, SPLEN2000258, SPLEN2000267, SPLEN2000270, SPLEN2000307, SPLEN2000341, SPLEN2000350, SPLEN2000357, SPLEN2000364, SPLEN2000402, SPLEN2000420, SPLEN2000443, SPLEN2000448, SPLEN2000450, SPLEN2000464, SPLEN2000496, SPLEN2000515, SPLEN2000516, SPLEN2000537, SPLEN2000541, SPLEN2000607, SPLEN2000630, SPLEN2000695, SPLEN2000698, SPLEN2000839, SPLEN2000882, SPLEN2001135, SPLEN2001141, SPLEN2001157, SPLEN2001176, SPLEN2001227, SPLEN2001245, SPLEN2001278, SPLEN2001354, SPLEN2001367, SPLEN2001383, SPLEN2001476, SPLEN2001503, SPLEN2001510, SPLEN2001599, SPLEN2001626, SPLEN2001650, SPLEN2001689, SPLEN2001710, SPLEN2001761, SPLEN2001781, SPLEN2001881, SPLEN2001912, SPLEN2001945, SPLEN2002007, SPLEN2002053, SPLEN2002133, SPLEN2002147, SPLEN2002166, SPLEN2002175, SPLEN2002223, SPLEN2002272, SPLEN2002314, SPLEN2002335, SPLEN2002343, SPLEN2002354, SPLEN2002385, SPLEN2002419, SPLEN2002451, SPLEN2002462, SPLEN2002463, SPLEN2002467, SPLEN2002493, SPLEN2002662, SPLEN2002695, SPLEN2002707, SPLEN2002744, SPLEN2002917, SPLEN2002931, SPLEN2002957, SPLEN2003160, SPLEN2003204, SPLEN2003219, SPLEN2003297, SPLEN2003396, SPLEN2003678, SPLEN2003878, SPLEN2003918, SPLEN2003924, SPLEN2004060, SPLEN2004078, SPLEN2004124, SPLEN2004148, SPLEN2004181, SPLEN2004220, SPLEN2004343, SPLEN2004346, SPLEN2004368, SPLEN2004611, SPLEN2004662, SPLEN2004773, SPLEN2004844, SPLEN2004880, SPLEN2004984, SPLEN2005009, SPLEN2005227, SPLEN2005272, SPLEN2005342, SPLEN2005416, SPLEN2005429, SPLEN2005450, SPLEN2005474, SPLEN2005560, SPLEN2005727, SPLEN2005783, SPLEN2005790, SPLEN2005806, SPLEN2005818, SPLEN2005838, SPLEN2005869, SPLEN2005927, SPLEN2005939, SPLEN2006143, SPLEN2006232, SPLEN2006268, SPLEN2006283, SPLEN2006305, SPLEN2006325, SPLEN2006389, SPLEN2006425, SPLEN2006671, SPLEN2006701, SPLEN2006785, SPLEN2006875, SPLEN2007182, SPLEN2007276, SPLEN2007314, SPLEN2007326, SPLEN2007350, SPLEN2007388, SPLEN2007498, SPLEN2007619, SPLEN2007653, SPLEN2007689, SPLEN2007695, SPLEN2007739, SPLEN2007750, SPLEN2007794, SPLEN2007879, SPLEN2007926, SPLEN2007951, SPLEN2008007, SPLEN2008135, SPLEN2008164, SPLEN2008317, SPLEN2008460, SPLEN2008591, SPLEN2008786, SPLEN2009081, SPLEN2009088, SPLEN2009163, SPLEN2009315, SPLEN2009340, SPLEN2009513, SPLEN2009541, SPLEN2009548, SPLEN2009555, SPLEN2009581, SPLEN2009733, SPLEN2009803, SPLEN2009884, SPLEN2009918, SPLEN2009970, SPLEN2010004, SPLEN2010015, SPLEN2010112, SPLEN2010119, SPLEN2010146, SPLEN2010187, SPLEN2010350, SPLEN2010395, SPLEN2010415, SPLEN2010447, SPLEN2010469, SPLEN2010510, SPLEN2010530, SPLEN2010534, SPLEN2010588, SPLEN2010625, SPLEN2010800, SPLEN2010846, SPLEN2010847, SPLEN2010862, SPLEN2010912, SPLEN2010978, SPLEN2010986, SPLEN2011018, SPLEN2011021, SPLEN2011025, SPLEN2011086, SPLEN2011139, SPLEN2011145, SPLEN2011248, SPLEN2011252, SPLEN2011419, SPLEN2011422, SPLEN2011672, SPLEN2011678, SPLEN2011737, SPLEN2011758, SPLEN2011766, SPLEN2011805, SPLEN2011820, SPLEN2011830, SPLEN2011931, SPLEN2011981, SPLEN2012115, SPLEN2012175, SPLEN2012179, SPLEN2012185, SPLEN2012234, SPLEN2012453, SPLEN2012523, SPLEN2012524, SPLEN2012525, SPLEN2012571, SPLEN2012606, SPLEN2012611, SPLEN2012619, SPLEN2012624, SPLEN2012725, SPLEN2012743, SPLEN2012756, SPLEN2012800, SPLEN2012846, SPLEN2012889, SPLEN2012961, SPLEN2013108, SPLEN2013195, SPLEN2013503, SPLEN2013644, SPLEN2013648, SPLEN2013670, SPLEN2013673, SPLEN2013690, SPLEN2013714, SPLEN2013753, SPLEN2013821, SPLEN2013857, SPLEN2013860, SPLEN2013910, SPLEN2013923, SPLEN2013936, SPLEN2014041, SPLEN2014063, SPLEN2014073, SPLEN2014080, SPLEN2014119, SPLEN2014136, SPLEN2014199, SPLEN2014210, SPLEN2014293, SPLEN2014318, SPLEN2014381, SPLEN2014452, SPLEN2014454, SPLEN2014486, SPLEN2014543, SPLEN2014572, SPLEN2014645, SPLEN2014669, SPLEN2014711, SPLEN2014739, SPLEN2014860, SPLEN2014865, SPLEN2014911, SPLEN2014919, SPLEN2014920, SPLEN2014924, SPLEN2014937, SPLEN2014946, SPLEN2015031, SPLEN2015094, SPLEN2015121, SPLEN2015129, SPLEN2015158, SPLEN2015166, SPLEN2015216, SPLEN2015258, SPLEN2015261, SPLEN2015267, SPLEN2015276, SPLEN2015415, SPLEN2015433, SPLEN2015593, SPLEN2015674, SPLEN2015679, SPLEN2015707, SPLEN2015730, SPLEN2015746, SPLEN2015788, SPLEN2015815, SPLEN2015890, SPLEN2015891, SPLEN2015899, SPLEN2016045, SPLEN2016053, SPLEN2016069, SPLEN2016098, SPLEN2016135, SPLEN2016139, SPLEN2016241, SPLEN2016250, SPLEN2016268, SPLEN2016304, SPLEN2016356, SPLEN2016421, SPLEN2016480, SPLEN2016531, SPLEN2016533, SPLEN2016541, SPLEN2016552, SPLEN2016554, SPLEN2016602, SPLEN2016627, SPLEN2016678, SPLEN2016743, SPLEN2016773, SPLEN2016781, SPLEN2016840, SPLEN2016863, SPLEN2016922, SPLEN2016932, SPLEN2016972, SPLEN2016973, SPLEN2017043, SPLEN2017104, SPLEN2017121, SPLEN2017147, SPLEN2017187, SPLEN2017189, SPLEN2017212, SPLEN2017318, SPLEN2017351, SPLEN2017426, SPLEN2017452, SPLEN2017538, SPLEN2017592, SPLEN2017613, SPLEN2017643, SPLEN2017687, SPLEN2017740, SPLEN2017781, SPLEN2017999, SPLEN2018098, SPLEN2018112, SPLEN2018157, SPLEN2018159, SPLEN2018180, SPLEN2018181, SPLEN2018280, SPLEN2018285, SPLEN2018299, SPLEN2018302, SPLEN2018364, SPLEN2018395, SPLEN2018643, SPLEN2018683, SPLEN2018732, SPLEN2018749, SPLEN2018933, SPLEN2019008, SPLEN2019043, SPLEN2019077, SPLEN2019092, SPLEN2019102, SPLEN2019131, SPLEN2019169, SPLEN2019257, SPLEN2019311, SPLEN2019323, SPLEN2019349, SPLEN2019375, SPLEN2019379, SPLEN2019471, SPLEN2019480, SPLEN2019505, SPLEN2019571, SPLEN2019575, SPLEN2019709, SPLEN2019793, SPLEN2019811, SPLEN2019839, SPLEN2019956, SPLEN2019985, SPLEN2020007, SPLEN2020034, SPLEN2020153, SPLEN2020154, SPLEN2020166, SPLEN2020183, SPLEN2020223, SPLEN2020359, SPLEN2020417, SPLEN2020427, SPLEN2020467, SPLEN2020512, SPLEN2020608, SPLEN2020777, SPLEN2020805, SPLEN2021057, SPLEN2021122, SPLEN2021157, SPLEN2021194, SPLEN2021231, SPLEN2021273, SPLEN2021295, SPLEN2021298, SPLEN2021383, SPLEN2021417, SPLEN2021440, SPLEN2021458, SPLEN2021463, SPLEN2021560, SPLEN2021701, SPLEN2021795, SPLEN2021983, SPLEN2021991, SPLEN2022040, SPLEN2022162, SPLEN2022227, SPLEN2022522, SPLEN2022591, SPLEN2022785, SPLEN2022920, SPLEN2023024, SPLEN2023118, SPLEN2023160, SPLEN2023423, SPLEN2023710, SPLEN2023733, SPLEN2023791, SPLEN2023977, SPLEN2024070, SPLEN2024127, SPLEN2024232, SPLEN2024273, SPLEN2024383, SPLEN2024489, SPLEN2024530, SPLEN2024571, SPLEN2024577, SPLEN2024617, SPLEN2024737, SPLEN2024922, SPLEN2024956, SPLEN2024990, SPLEN2025012, SPLEN2025017, SPLEN2025039, SPLEN2025219, SPLEN2025491, SPLEN2025626, SPLEN2025820, SPLEN2026144, SPLEN2026411, SPLEN2026765, SPLEN2027113, SPLEN2027157, SPLEN2027395, SPLEN2027488, SPLEN2027780, SPLEN2027852, SPLEN2027868, SPLEN2027995, SPLEN2028046, SPLEN2028066, SPLEN2028138, SPLEN2028365, SPLEN2028417, SPLEN2028424, SPLEN2028466, SPLEN2028593, SPLEN2028844, SPLEN2028914, SPLEN2028994, SPLEN2029051, SPLEN2029176, SPLEN2029295, SPLEN2029380, SPLEN2029522, SPLEN2029683, SPLEN2029727, SPLEN2029904, SPLEN2029912, SPLEN2030250, SPLEN2030335, SPLEN2030371, SPLEN2030397, SPLEN2030479, SPLEN2030495, SPLEN2030562, SPLEN2030763, SPLEN2030847, SPLEN2031004, SPLEN2031125, SPLEN2031674, SPLEN2031724, SPLEN2031780, SPLEN2032036, SPLEN2032112, SPLEN2032154, SPLEN2032321, SPLEN2032677, SPLEN2032813, SPLEN2032924, SPLEN2033098, SPLEN2033153, SPLEN2033333, SPLEN2033490, SPLEN2033539, SPLEN2033921, SPLEN2033996, SPLEN2034021, SPLEN2034081, SPLEN2034252, SPLEN2034448, SPLEN2034551, SPLEN2034601, SPLEN2034678, SPLEN2034781, SPLEN2034864, SPLEN2034934, SPLEN2035318, SPLEN2035615, SPLEN2036076, SPLEN2036103, SPLEN2036326, SPLEN2036475, SPLEN2036501, SPLEN2036579, SPLEN2036608, SPLEN2036702, SPLEN2036712, SPLEN2036821, SPLEN2036932, SPLEN2036953, SPLEN2037077, SPLEN2037194, SPLEN2037319, SPLEN2037444, SPLEN2037580, SPLEN2037630, SPLEN2037678, SPLEN2037722, SPLEN2037891, SPLEN2038055, SPLEN2038180, SPLEN2038345, SPLEN2038407, SPLEN2038473, SPLEN2038834, SPLEN2039311, SPLEN2039672, SPLEN2039697, SPLEN2039845, SPLEN2039936, SPLEN2040222, SPLEN2040237, SPLEN2040824, SPLEN2041304, SPLEN2041306, SPLEN2041310, SPLEN2041585, SPLEN2041645, SPLEN2041700, SPLEN2041720, SPLEN2041977, SPLEN2042051, SPLEN2042303, SPLEN2042521, SPLEN2042598, SPLEN2042714, SPLEN2042920, STOMA1000013, STOMA1000052, STOMA1000074, STOMA1000091, STOMA1000117, STOMA1000133, STOMA1000175, STOMA1000186, STOMA1000189, STOMA1000190, STOMA1000191, STOMA2000032, STOMA2000072, STOMA2000088, STOMA2000104, STOMA2000121, STOMA2000148, STOMA2000168, STOMA2000183, STOMA2000188, STOMA2000257, STOMA2000279, STOMA2000289, STOMA2000383, STOMA2000386, STOMA2000395, STOMA2000396, STOMA2000478, STOMA2000482, STOMA2000529, STOMA2000539, STOMA2000567, STOMA2000640, STOMA2000678, STOMA2000686, STOMA2000888, STOMA2001025, STOMA2001389, STOMA2002052, STOMA2002141, STOMA2002166, STOMA2002367, STOMA2002688, STOMA2002828, STOMA2003158, STOMA2003289, STOMA2003444, STOMA2003477, STOMA2003646, STOMA2003716, STOMA2003781, STOMA2003894, STOMA2004194, STOMA2004294, STOMA2004663, STOMA2004668, STOMA2004852, STOMA2004873, STOMA2004884, STOMA2004893, STOMA2004925, STOMA2005120, STOMA2005664, STOMA2005667, STOMA2005746, STOMA2005782, STOMA2006181, STOMA2006213, STOMA2006229, STOMA2006325, STOMA2006330, STOMA2006398, STOMA2006447, STOMA2006904, STOMA2007269, STOMA2007680, STOMA2007745, STOMA2008050, STOMA2008361, STOMA2008546, STOMA2008614, STOMA2008638, STOMA2008838, STOMA2009250, STOMA2009253, STOMA2009256, STOMA2009289, SYNOV1000045, SYNOV1000049, SYNOV1000118, SYNOV1000124, SYNOV1000128, SYNOV1000164, SYNOV1000190, SYNOV1000256, SYNOV1000374, SYNOV2000152, SYNOV2000171, SYNOV2000173, SYNOV2000177, SYNOV2000178, SYNOV2000193, SYNOV2000251, SYNOV2000279, SYNOV2000291, SYNOV2000297, SYNOV2000397, SYNOV2000426, SYNOV2000601, SYNOV2000700, SYNOV2000820, SYNOV2000824, SYNOV2000923, SYNOV2001014, SYNOV2001033, SYNOV2001035, SYNOV2001088, SYNOV2001111, SYNOV2001212, SYNOV2001251, SYNOV2001262, SYNOV2001300, SYNOV2001356, SYNOV2001390, SYNOV2001451, SYNOV2001457, SYNOV2001468, SYNOV2001581, SYNOV2001648, SYNOV2001660, SYNOV2003326, SYNOV2005216, SYNOV2005448, SYNOV2005541, SYNOV2005673, SYNOV2005817, SYNOV2005962, SYNOV2006430, SYNOV2006620, SYNOV2007758, SYNOV2007965, SYNOV2008765, SYNOV2011233, SYNOV2012326, SYNOV2013365, SYNOV2013637, SYNOV2014157, SYNOV2014364, SYNOV2016124, SYNOV2016837, SYNOV2017055, SYNOV2017179, SYNOV2018921, SYNOV2019280, SYNOV2020085, SYNOV2020463, SYNOV2021320, SYNOV2021953, SYNOV3000184, SYNOV3000231, SYNOV3000302, SYNOV3000345, SYNOV4000249, SYNOV4000472, SYNOV4000598, SYNOV4000706, SYNOV4001153, SYNOV4001224, SYNOV4001326, SYNOV4001342, SYNOV4001395, SYNOV4002001, SYNOV4002392, SYNOV4002875, SYNOV4002883, SYNOV4003174, SYNOV4003322, SYNOV4003681, SYNOV4003981, SYNOV4004184, SYNOV4004741, SYNOV4004823, SYNOV4004914, SYNOV4005256, SYNOV4005570, SYNOV4005739, SYNOV4005889, SYNOV4005981, SYNOV4005989, SYNOV4006256, SYNOV4006327, SYNOV4006542, SYNOV4007012, SYNOV4007215, SYNOV4007360, SYNOV4007430, SYNOV4007521, SYNOV4007553, SYNOV4007671, SYNOV4007711, SYNOV4008245, SYNOV4008336, SYNOV4009129, SYNOV4009139, SYNOV4009298, SYNOV4009575, T1ESE2000116, T1ESE2000609, T1ESE2000904, T1ESE2002665, TBAES2000004, TBAES2000059, TBAES2000116, TBAES2000255, TBAES2000315, TBAES2000352, TBAES2000932, TBAES2001171, TBAES2001220, TBAES2001229, TBAES2001258, TBAES2001296, TBAES2001492, TBAES2001553, TBAES2001751, TBAES2003435, TBAES2003492, TBAES2003550, TBAES2003702, TBAES2003917, TBAES2004055, TBAES2004105, TBAES2004939, TBAES2005157, TBAES2005361, TBAES2005543, TBAES2006568, TBAES2006881, TBAES2007379, TBAES2007428, TBAES2007481, TBAES2007504, TBAES2007548, TBAES2007697, TBAES2007862, TBAES2007964, TBAES2008133, TCERX2000171, TCERX2000431, TCERX2000613, TCERX2000998, TCERX2002644, TCOLN1000037, TCOLN1000180, TCOLN2000139, TCOLN2000236, TCOLN2000641, TCOLN2001268, TCOLN2002047, TCOLN2002278, TESOP1000035, TESOP1000127, TESOP1000160, TESOP2000083, TESOP2000090, TESOP2000205, TESOP2000312, TESOP2000390, TESOP2000400, TESOP2000510, TESOP2000527, TESOP2000569, TESOP2000739, TESOP2000801, TESOP2001122, TESOP2001166, TESOP2001345, TESOP2001474, TESOP2001796, TESOP2001818, TESOP2001849, TESOP2001865, TESOP2001901, TESOP2001953, TESOP2002005, TESOP2002110, TESOP2002150, TESOP2002273, TESOP2002451, TESOP2002489, TESOP2002539, TESOP2002545, TESOP2002804, TESOP2002950, TESOP2003273, TESOP2003308, TESOP2003553, TESOP2003753, TESOP2004110, TESOP2004114, TESOP2004173, TESOP2004214, TESOP2005199, TESOP2005285, TESOP2005485, TESOP2005498, TESOP2005579, TESOP2006041, TESOP2006053, TESOP2006060, TESOP2006068, TESOP2006110, TESOP2006398, TESOP2006670, TESOP2006704, TESOP2006746, TESOP2006865, TESOP2006893, TESOP2007041, TESOP2007052, TESOP2007262, TESOP2007384, TESOP2007636, TESOP2007674, TESOP2007688, TESOP2007725, TESOP2007912, TESOP2007978, TESOP2008127, TESOP2008552, TESOP2008556, TESOP2008563, TESOP2008820, TESOP2009121, TESOP2009201, TESOP2009247, TESOP2009555, TESTI1000018, TESTI1000019, TESTI1000023, TESTI1000025, TESTI1000029, TESTI1000030, TESTI1000042, TESTI1000045, TESTI1000051, TESTI1000055, TESTI1000064, TESTI1000070, TESTI1000085, TESTI1000088, TESTI1000093, TESTI1000094, TESTI1000096, TESTI1000109, TESTI1000125, TESTI1000127, TESTI1000128, TESTI1000131, TESTI1000138, TESTI1000142, TESTI1000157, TESTI1000163, TESTI1000168, TESTI1000169, TESTI1000179, TESTI1000183, TESTI1000191, TESTI1000257, TESTI1000266, TESTI1000319, TESTI1000330, TESTI1000348, TESTI1000390, TESTI1000391, TESTI1000459, TESTI1000491, TESTI1000545, TESTI2000006, TESTI2000018, TESTI2000044, TESTI2000100, TESTI2000117, TESTI2000120, TESTI2000147, TESTI2000154, TESTI2000172, TESTI2000177, TESTI2000179, TESTI2000184, TESTI2000207, TESTI2000208, TESTI2000221, TESTI2000238, TESTI2000253, TESTI2000272, TESTI2000278, TESTI2000349, TESTI2000356, TESTI2000358, TESTI2000372, TESTI2000427, TESTI2000431, TESTI2000435, TESTI2000443, TESTI2000452, TESTI2000462, TESTI2000489, TESTI2000520, TESTI2000571, TESTI2000591, TESTI2000598, TESTI2000600, TESTI2000616, TESTI2000627, TESTI2000644, TESTI2000671, TESTI2000683, TESTI2000689, TESTI2000695, TESTI2000699, TESTI2000707, TESTI2000745, TESTI2000756, TESTI2000762, TESTI2000784, TESTI2000808, TESTI2000819, TESTI2000830, TESTI2000840, TESTI2000849, TESTI2000850, TESTI2000874, TESTI2000883, TESTI2000909, TESTI2000951, TESTI2000970, TESTI2000981, TESTI2001008, TESTI2001049, TESTI2001082, TESTI2001120, TESTI2001134, TESTI2001141, TESTI2001180, TESTI2001208, TESTI2001229, TESTI2001236, TESTI2001237, TESTI2001306, TESTI2001313, TESTI2001330, TESTI2001339, TESTI2001345, TESTI2001352, TESTI2001364, TESTI2001412, TESTI2001420, TESTI2001498, TESTI2001511, TESTI2001512, TESTI2001518, TESTI2001556, TESTI2001593, TESTI2001613, TESTI2001621, TESTI2001661, TESTI2001665, TESTI2001671, TESTI2001697, TESTI2001725, TESTI2001758, TESTI2001766, TESTI2001792, TESTI2001793, TESTI2001795, TESTI2001812, TESTI2001815, TESTI2001823, TESTI2001826, TESTI2001827, TESTI2001852, TESTI2001862, TESTI2001869, TESTI2001879, TESTI2001894, TESTI2001898, TESTI2001915, TESTI2001950, TESTI2001959, TESTI2001968, TESTI2001985, TESTI2001991, TESTI2002002, TESTI2002012, TESTI2002036, TESTI2002048, TESTI2002057, TESTI2002081, TESTI2002090, TESTI2002105, TESTI2002216, TESTI2002223, TESTI2002245, TESTI2002251, TESTI2002256, TESTI2002264, TESTI2002282, TESTI2002293, TESTI2002294, TESTI2002326, TESTI2002351, TESTI2002361, TESTI2002365, TESTI2002369, TESTI2002406, TESTI2002415, TESTI2002423, TESTI2002453, TESTI2002461, TESTI2002465, TESTI2002467, TESTI2002498, TESTI2002516, TESTI2002544, TESTI2002578, TESTI2002580, TESTI2002618, TESTI2002632, TESTI2002676, TESTI2002690, TESTI2002696, TESTI2002698, TESTI2002700, TESTI2002707, TESTI2002724, TESTI2002729, TESTI2002752, TESTI2002753, TESTI2002789, TESTI2002802, TESTI2002806, TESTI2002840, TESTI2002866, TESTI2002877, TESTI2002910, TESTI2002912, TESTI2002928, TESTI2002937, TESTI2002965, TESTI2002993, TESTI2003005, TESTI2003020, TESTI2003031, TESTI2003037, TESTI2003044, TESTI2003059, TESTI2003061, TESTI2003074, TESTI2003089, TESTI2003104, TESTI2003109, TESTI2003117, TESTI2003127, TESTI2003130, TESTI2003131, TESTI2003139, TESTI2003141, TESTI2003152, TESTI2003181, TESTI2003193, TESTI2003196, TESTI2003228, TESTI2003236, TESTI2003255, TESTI2003258, TESTI2003277, TESTI2003280, TESTI2003299, TESTI2003311, TESTI2003321, TESTI2003325, TESTI2003327, TESTI2003330, TESTI2003347, TESTI2003354, TESTI2003356, TESTI2003372, TESTI2003376, TESTI2003413, TESTI2003418, TESTI2003419, TESTI2003432, TESTI2003454, TESTI2003475, TESTI2003476, TESTI2003498, TESTI2003512, TESTI2003533, TESTI2003539, TESTI2003541, TESTI2003545, TESTI2003551, TESTI2003574, TESTI2003579, TESTI2003580, TESTI2003589, TESTI2003596, TESTI2003598, TESTI2003615, TESTI2003625, TESTI2003638, TESTI2003649, TESTI2003692, TESTI2003718, TESTI2003727, TESTI2003756, TESTI2003768, TESTI2003781, TESTI2003787, TESTI2003824, TESTI2003827, TESTI2003894, TESTI2003911, TESTI2003914, TESTI2003940, TESTI2003962, TESTI2003998, TESTI2004000, TESTI2004073, TESTI2004080, TESTI2004085, TESTI2004089, TESTI2004111, TESTI2004119, TESTI2004122, TESTI2004153, TESTI2004163, TESTI2004169, TESTI2004207, TESTI2004215, TESTI2004227, TESTI2004229, TESTI2004243, TESTI2004255, TESTI2004287, TESTI2004295, TESTI2004313, TESTI2004318, TESTI2004322, TESTI2004391, TESTI2004399, TESTI2004423, TESTI2004431, TESTI2004432, TESTI2004452, TESTI2004459, TESTI2004490, TESTI2004539, TESTI2004552, TESTI2004560, TESTI2004574, TESTI2004601, TESTI2004611, TESTI2004649, TESTI2004654, TESTI2004675, TESTI2004687, TESTI2004689, TESTI2004700, TESTI2004706, TESTI2004712, TESTI2004734, TESTI2004783, TESTI2004791, TESTI2004793, TESTI2004860, TESTI2004906, TESTI2004920, TESTI2004929, TESTI2004936, TESTI2004941, TESTI2004971, TESTI2004982, TESTI2004993, TESTI2004994, TESTI2004999, TESTI2005017, TESTI2005025, TESTI2005040, TESTI2005060, TESTI2005072, TESTI2005085, TESTI2005112, TESTI2005120, TESTI2005153, TESTI2005155, TESTI2005173, TESTI2005267, TESTI2005268, TESTI2005280, TESTI2005307, TESTI2005326, TESTI2005363, TESTI2005376, TESTI2005378, TESTI2005380, TESTI2005391, TESTI2005395, TESTI2005396, TESTI2005408, TESTI2005415, TESTI2005470, TESTI2005492, TESTI2005564, TESTI2005568, TESTI2005584, TESTI2005588, TESTI2005590, TESTI2005603, TESTI2005609, TESTI2005610, TESTI2005630, TESTI2005672, TESTI2005683, TESTI2005690, TESTI2005692, TESTI2005703, TESTI2005720, TESTI2005731, TESTI2005739, TESTI2005742, TESTI2005743, TESTI2005759, TESTI2005767, TESTI2005775, TESTI2005784, TESTI2005788, TESTI2005827, TESTI2005835, TESTI2005860, TESTI2005892, TESTI2005908, TESTI2005911, TESTI2005933, TESTI2005937, TESTI2005948, TESTI2005979, TESTI2005981, TESTI2005982, TESTI2005984, TESTI2005986, TESTI2005987, TESTI2006007, TESTI2006008, TESTI2006015, TESTI2006016, TESTI2006035, TESTI2006040, TESTI2006041, TESTI2006045, TESTI2006067, TESTI2006083, TESTI2006097, TESTI2006109, TESTI2006111, TESTI2006120, TESTI2006125, TESTI2006179, TESTI2006209, TESTI2006210, TESTI2006212, TESTI2006218, TESTI2006238, TESTI2006255, TESTI2006258, TESTI2006278, TESTI2006333, TESTI2006341, TESTI2006360, TESTI2006383, TESTI2006409, TESTI2006425, TESTI2006437, TESTI2006453, TESTI2006457, TESTI2006460, TESTI2006465, TESTI2006483, TESTI2006499, TESTI2006523, TESTI2006543, TESTI2006565, TESTI2006572, TESTI2006615, TESTI2006617, TESTI2006624, TESTI2006628, TESTI2006633, TESTI2006643, TESTI2006648, TESTI2006659, TESTI2006660, TESTI2006665, TESTI2006667, TESTI2006677, TESTI2006720, TESTI2006735, TESTI2006744, TESTI2006748, TESTI2006774, TESTI2006853, TESTI2006866, TESTI2006877, TESTI2006879, TESTI2006894, TESTI2006940, TESTI2006955, TESTI2006978, TESTI2006979, TESTI2006990, TESTI2007040, TESTI2007074, TESTI2007078, TESTI2007113, TESTI2007152, TESTI2007163, TESTI2007183, TESTI2007211, TESTI2007220, TESTI2007234, TESTI2007320, TESTI2007346, TESTI2007358, TESTI2007402, TESTI2007405, TESTI2007407, TESTI2007422, TESTI2007452, TESTI2007464, TESTI2007466, TESTI2007480, TESTI2007490, TESTI2007502, TESTI2007524, TESTI2007533, TESTI2007576, TESTI2007613, TESTI2007657, TESTI2007685, TESTI2007692, TESTI2007749, TESTI2007750, TESTI2007808, TESTI2007814, TESTI2007829, TESTI2007864, TESTI2007867, TESTI2007872, TESTI2007906, TESTI2007922, TESTI2007951, TESTI2007972, TESTI2007973, TESTI2008014, TESTI2008020, TESTI2008032, TESTI2008033, TESTI2008046, TESTI2008081, TESTI2008099, TESTI2008139, TESTI2008144, TESTI2008161, TESTI2008189, TESTI2008204, TESTI2008219, TESTI2008233, TESTI2008234, TESTI2008237, TESTI2008278, TESTI2008320, TESTI2008331, TESTI2008343, TESTI2008387, TESTI2008389, TESTI2008394, TESTI2008405, TESTI2008420, TESTI2008425, TESTI2008440, TESTI2008567, TESTI2008595, TESTI2008621, TESTI2008636, TESTI2008657, TESTI2008684, TESTI2008699, TESTI2008715, TESTI2008762, TESTI2008774, TESTI2008786, TESTI2008822, TESTI2008835, TESTI2008840, TESTI2008847, TESTI2008884, TESTI2008901, TESTI2008929, TESTI2008946, TESTI2008960, TESTI2009018, TESTI2009091, TESTI2009097, TESTI2009136, TESTI2009185, TESTI2009190, TESTI2009217, TESTI2009239, TESTI2009325, TESTI2009388, TESTI2009390, TESTI2009400, TESTI2009402, TESTI2009412, TESTI2009423, TESTI2009447, TESTI2009462, TESTI2009474, TESTI2009477, TESTI2009497, TESTI2009502, TESTI2009511, TESTI2009520, TESTI2009544, TESTI2009545, TESTI2009551, TESTI2009585, TESTI2009588, TESTI2009683, TESTI2009727, TESTI2009739, TESTI2009785, TESTI2009812, TESTI2009835, TESTI2009853, TESTI2009935, TESTI2009977, TESTI2010009, TESTI2010154, TESTI2010180, TESTI2010239, TESTI2010280, TESTI2010354, TESTI2010396, TESTI2010400, TESTI2010409, TESTI2010513, TESTI2010572, TESTI2010587, TESTI2010591, TESTI2010617, TESTI2010682, TESTI2010724, TESTI2010732, TESTI2010734, TESTI2010755, TESTI2010793, TESTI2010806, TESTI2010833, TESTI2010872, TESTI2011009, TESTI2011020, TESTI2011028, TESTI2011033, TESTI2011254, TESTI2011286, TESTI2011294, TESTI2011314, TESTI2011315, TESTI2011394, TESTI2011407, TESTI2011448, TESTI2011480, TESTI2011549, TESTI2011575, TESTI2011605, TESTI2011612, TESTI2011665, TESTI2011680, TESTI2011683, TESTI2011712, TESTI2011750, TESTI2011840, TESTI2011846, TESTI2011915, TESTI2011928, TESTI2011971, TESTI2012019, TESTI2012050, TESTI2012090, TESTI2012095, TESTI2012104, TESTI2012152, TESTI2012155, TESTI2012171, TESTI2012207, TESTI2012231, TESTI2012244, TESTI2012289, TESTI2012308, TESTI2012356, TESTI2012387, TESTI2012394, TESTI2012444, TESTI2012511, TESTI2012528, TESTI2012544, TESTI2012550, TESTI2012571, TESTI2012592, TESTI2012617, TESTI2012628, TESTI2012812, TESTI2012834, TESTI2012835, TESTI2012861, TESTI2012900, TESTI2012915, TESTI2012922, TESTI2013001, TESTI2013012, TESTI2013053, TESTI2013144, TESTI2013163, TESTI2013169, TESTI2013212, TESTI2013231, TESTI2013257, TESTI2013264, TESTI2013268, TESTI2013322, TESTI2013381, TESTI2013382, TESTI2013401, TESTI2013427, TESTI2013468, TESTI2013497, TESTI2013545, TESTI2013546, TESTI2013566, TESTI2013601, TESTI2013604, TESTI2013607, TESTI2013610, TESTI2013691, TESTI2013699, TESTI2013737, TESTI2013767, TESTI2013832, TESTI2013873, TESTI2013889, TESTI2014007, TESTI2014036, TESTI2014097, TESTI2014160, TESTI2014248, TESTI2014254, TESTI2014269, TESTI2014274, TESTI2014318, TESTI2014324, TESTI2014339, TESTI2014362, TESTI2014385, TESTI2014415, TESTI2014439, TESTI2014474, TESTI2014505, TESTI2014577, TESTI2014578, TESTI2014716, TESTI2014780, TESTI2014800, TESTI2014838, TESTI2014843, TESTI2014979, TESTI2014988, TESTI2015042, TESTI2015092, TESTI2015105, TESTI2015180, TESTI2015246, TESTI2015249, TESTI2015327, TESTI2015331, TESTI2015335, TESTI2015350, TESTI2015375, TESTI2015437, TESTI2015590, TESTI2015610, TESTI2015626, TESTI2015647, TESTI2015675, TESTI2015710, TESTI2015752, TESTI2015830, TESTI2015914, TESTI2015938, TESTI2015947, TESTI2015962, TESTI2015987, TESTI2016033, TESTI2016046, TESTI2016101, TESTI2016162, TESTI2016197, TESTI2016278, TESTI2016298, TESTI2016331, TESTI2016337, TESTI2016410, TESTI2016421, TESTI2016509, TESTI2016568, TESTI2016583, TESTI2016599, TESTI2016629, TESTI2016663, TESTI2016667, TESTI2016688, TESTI2016701, TESTI2016758, TESTI2016848, TESTI2016863, TESTI2016888, TESTI2016896, TESTI2016922, TESTI2016942, TESTI2016950, TESTI2016996, TESTI2017017, TESTI2017028, TESTI2017035, TESTI2017069, TESTI2017089, TESTI2017102, TESTI2017107, TESTI2017113, TESTI2017125, TESTI2017256, TESTI2017305, TESTI2017311, TESTI2017396, TESTI2017507, TESTI2017537, TESTI2017582, TESTI2017584, TESTI2017645, TESTI2017727, TESTI2017740, TESTI2017775, TESTI2017816, TESTI2017832, TESTI2017923, TESTI2017932, TESTI2017951, TESTI2018014, TESTI2018031, TESTI2018035, TESTI2018060, TESTI2018083, TESTI2018178, TESTI2018221, TESTI2018276, TESTI2018290, TESTI2018335, TESTI2018337, TESTI2018368, TESTI2018421, TESTI2018428, TESTI2018462, TESTI2018475, TESTI2018482, TESTI2018521, TESTI2018565, TESTI2018581, TESTI2018611, TESTI2018687, TESTI2018697, TESTI2018838, TESTI2018867, TESTI2018941, TESTI2018957, TESTI2018974, TESTI2018975, TESTI2018997, TESTI2019042, TESTI2019077, TESTI2019228, TESTI2019257, TESTI2019280, TESTI2019282, TESTI2019308, TESTI2019336, TESTI2019352, TESTI2019406, TESTI2019430, TESTI2019455, TESTI2019481, TESTI2019488, TESTI2019501, TESTI2019648, TESTI2019669, TESTI2019697, TESTI2019729, TESTI2019760, TESTI2019787, TESTI2019794, TESTI2019854, TESTI2019859, TESTI2019860, TESTI2019872, TESTI2019911, TESTI2019917, TESTI2019975, TESTI2019998, TESTI2020012, TESTI2020026, TESTI2020029, TESTI2020071, TESTI2020084, TESTI2020265, TESTI2020283, TESTI2020316, TESTI2020344, TESTI2020379, TESTI2020426, TESTI2020445, TESTI2020510, TESTI2020515, TESTI2020525, TESTI2020579, TESTI2020717, TESTI2020840, TESTI2020871, TESTI2020905, TESTI2020906, TESTI2020946, TESTI2020956, TESTI2020981, TESTI2020999, TESTI2021003, TESTI2021038, TESTI2021057, TESTI2021077, TESTI2021112, TESTI2021114, TESTI2021116, TESTI2021118, TESTI2021122, TESTI2021124, TESTI2021138, TESTI2021297, TESTI2021315, TESTI2021358, TESTI2021425, TESTI2021447, TESTI2021463, TESTI2021531, TESTI2021599, TESTI2021637, TESTI2021654, TESTI2021667, TESTI2021736, TESTI2021785, TESTI2021819, TESTI2021851, TESTI2021895, TESTI2021911, TESTI2021939, TESTI2021999, TESTI2022010, TESTI2022023, TESTI2022065, TESTI2022086, TESTI2022179, TESTI2022203, TESTI2022246, TESTI2022323, TESTI2022338, TESTI2022400, TESTI2022462, TESTI2022495, TESTI2022623, TESTI2022649, TESTI2022652, TESTI2022738, TESTI2022798, TESTI2022812, TESTI2022814, TESTI2022874, TESTI2022940, TESTI2022952, TESTI2023025, TESTI2023033, TESTI2023053, TESTI2023085, TESTI2023192, TESTI2023194, TESTI2023214, TESTI2023254, TESTI2023386, TESTI2023414, TESTI2023427, TESTI2023436, TESTI2023599, TESTI2023752, TESTI2023800, TESTI2023861, TESTI2023903, TESTI2023942, TESTI2023947, TESTI2023951, TESTI2023968, TESTI2024009, TESTI2024090, TESTI2024125, TESTI2024153, TESTI2024192, TESTI2024267, TESTI2024283, TESTI2024299, TESTI2024419, TESTI2024422, TESTI2024443, TESTI2024446, TESTI2024473, TESTI2024476, TESTI2024498, TESTI2024560, TESTI2024567, TESTI2024586, TESTI2024598, TESTI2024641, TESTI2024648, TESTI2024718, TESTI2024744, TESTI2024844, TESTI2024864, TESTI2024885, TESTI2024936, TESTI2024978, TESTI2024999, TESTI2025006, TESTI2025013, TESTI2025022, TESTI2025063, TESTI2025117, TESTI2025144, TESTI2025161, TESTI2025174, TESTI2025229, TESTI2025269, TESTI2025365, TESTI2025403, TESTI2025409, TESTI2025448, TESTI2025454, TESTI2025486, TESTI2025546, TESTI2025582, TESTI2025609, TESTI2025656, TESTI2025757, TESTI2025791, TESTI2025846, TESTI2025872, TESTI2025879, TESTI2025911, TESTI2025920, TESTI2025924, TESTI2026014, TESTI2026024, TESTI2026064, TESTI2026077, TESTI2026104, TESTI2026116, TESTI2026134, TESTI2026168, TESTI2026196, TESTI2026215, TESTI2026218, TESTI2026233, TESTI2026291, TESTI2026294, TESTI2026401, TESTI2026403, TESTI2026453, TESTI2026461, TESTI2026491, TESTI2026505, TESTI2026515, TESTI2026534, TESTI2026537, TESTI2026589, TESTI2026597, TESTI2026605, TESTI2026674, TESTI2026794, TESTI2026824, TESTI2026854, TESTI2026925, TESTI2026936, TESTI2026957, TESTI2027013, TESTI2027019, TESTI2027108, TESTI2027165, TESTI2027171, TESTI2027173, TESTI2027179, TESTI2027185, TESTI2027206, TESTI2027238, TESTI2027239, TESTI2027243, TESTI2027296, TESTI2027378, TESTI2027411, TESTI2027450, TESTI2027496, TESTI2027503, TESTI2027562, TESTI2027615, TESTI2027645, TESTI2027730, TESTI2027736, TESTI2027791, TESTI2027820, TESTI2027828, TESTI2027840, TESTI2027909, TESTI2028098, TESTI2028151, TESTI2028242, TESTI2028253, TESTI2028254, TESTI2028269, TESTI2028290, TESTI2028296, TESTI2028384, TESTI2028426, TESTI2028488, TESTI2028523, TESTI2028583, TESTI2028613, TESTI2028659, TESTI2028662, TESTI2028670, TESTI2028705, TESTI2028776, TESTI2028811, TESTI2028891, TESTI2028985, TESTI2028997, TESTI2029131, TESTI2029162, TESTI2029196, TESTI2029201, TESTI2029227, TESTI2029244, TESTI2029249, TESTI2029252, TESTI2029259, TESTI2029264, TESTI2029470, TESTI2029672, TESTI2029785, TESTI2029880, TESTI2030136, TESTI2030322, TESTI2030336, TESTI2030342, TESTI2030519, TESTI2030554, TESTI2030556, TESTI2030728, TESTI2030754, TESTI2030770, TESTI2030860, TESTI2030901, TESTI2030917, TESTI2030930, TESTI2031006, TESTI2031007, TESTI2031060, TESTI2031129, TESTI2031356, TESTI2031418, TESTI2031504, TESTI2031529, TESTI2031687, TESTI2031760, TESTI2031809, TESTI2031919, TESTI2031935, TESTI2031986, TESTI2032044, TESTI2032067, TESTI2032079, TESTI2032643, TESTI2032681, TESTI2032761, TESTI2032768, TESTI2032774, TESTI2032828, TESTI2033031, TESTI2033242, TESTI2033254, TESTI2033300, TESTI2033395, TESTI2033453, TESTI2033505, TESTI2033520, TESTI2033641, TESTI2033710, TESTI2033905, TESTI2034187, TESTI2034243, TESTI2034249, TESTI2034307, TESTI2034357, TESTI2034401, TESTI2034407, TESTI2034506, TESTI2034520, TESTI2034718, TESTI2034730, TESTI2034749, TESTI2034767, TESTI2034774, TESTI2034777, TESTI2034785, TESTI2034799, TESTI2034847, TESTI2034913, TESTI2034916, TESTI2034931, TESTI2034940, TESTI2034953, TESTI2034997, TESTI2035003, TESTI2035078, TESTI2035084, TESTI2035107, TESTI2035121, TESTI2035124, TESTI2035183, TESTI2035236, TESTI2035262, TESTI2035309, TESTI2035688, TESTI2035775, TESTI2035793, TESTI2035898, TESTI2035962, TESTI2035981, TESTI2035997, TESTI2036114, TESTI2036129, TESTI2036285, TESTI2036288, TESTI2036513, TESTI2036589, TESTI2036650, TESTI2036684, TESTI2036691, TESTI2036736, TESTI2036822, TESTI2036833, TESTI2036913, TESTI2036922, TESTI2036951, TESTI2036965, TESTI2036969, TESTI2037002, TESTI2037055, TESTI2037081, TESTI2037085, TESTI2037103, TESTI2037106, TESTI2037111, TESTI2037209, TESTI2037255, TESTI2037359, TESTI2037375, TESTI2037382, TESTI2037534, TESTI2037569, TESTI2037572, TESTI2037643, TESTI2037657, TESTI2037673, TESTI2037723, TESTI2037819, TESTI2037830, TESTI2037845, TESTI2037877, TESTI2037976, TESTI2038048, TESTI2038065, TESTI2038104, TESTI2038275, TESTI2038388, TESTI2038573, TESTI2038596, TESTI2038623, TESTI2038644, TESTI2038733, TESTI2038858, TESTI2038958, TESTI2039025, TESTI2039026, TESTI2039038, TESTI2039041, TESTI2039060, TESTI2039113, TESTI2039121, TESTI2039177, TESTI2039209, TESTI2039225, TESTI2039227, TESTI2039276, TESTI2039342, TESTI2039353, TESTI2039544, TESTI2039613, TESTI2039707, TESTI2039732, TESTI2039738, TESTI2039776, TESTI2039867, TESTI2039908, TESTI2040018, TESTI2040094, TESTI2040102, TESTI2040128, TESTI2040143, TESTI2040297, TESTI2040372, TESTI2040377, TESTI2040424, TESTI2040642, TESTI2040815, TESTI2040897, TESTI2040944, TESTI2040964, TESTI2040983, TESTI2040989, TESTI2041330, TESTI2041362, TESTI2041517, TESTI2041564, TESTI2041664, TESTI2041730, TESTI2041734, TESTI2041778, TESTI2041800, TESTI2041947, TESTI2041956, TESTI2041976, TESTI2042062, TESTI2042149, TESTI2042264, TESTI2042295, TESTI2042302, TESTI2042326, TESTI2042400, TESTI2042450, TESTI2042473, TESTI2042507, TESTI2042508, TESTI2042750, TESTI2042783, TESTI2042806, TESTI2042928, TESTI2042946, TESTI2042958, TESTI2043275, TESTI2043277, TESTI2043282, TESTI2043313, TESTI2043477, TESTI2043585, TESTI2043758, TESTI2043817, TESTI2043857, TESTI2043866, TESTI2043869, TESTI2044064, TESTI2044118, TESTI2044194, TESTI2044276, TESTI2044306, TESTI2044309, TESTI2044413, TESTI2044418, TESTI2044754, TESTI2044788, TESTI2044796, TESTI2044833, TESTI2044892, TESTI2044920, TESTI2044968, TESTI2045139, TESTI2045155, TESTI2045171, TESTI2045199, TESTI2045353, TESTI2045509, TESTI2045562, TESTI2045611, TESTI2045819, TESTI2045850, TESTI2045920, TESTI2045964, TESTI2045983, TESTI2046100, TESTI2046188, TESTI2046347, TESTI2046352, TESTI2046358, TESTI2046439, TESTI2046535, TESTI2046536, TESTI2046552, TESTI2046569, TESTI2046686, TESTI2046721, TESTI2046732, TESTI2046786, TESTI2046797, TESTI2046863, TESTI2046872, TESTI2047071, TESTI2047141, TESTI2047147, TESTI2047153, TESTI2047212, TESTI2047342, TESTI2047383, TESTI2047605, TESTI2047792, TESTI2047801, TESTI2047818, TESTI2047824, TESTI2047885, TESTI2047930, TESTI2048105, TESTI2048109, TESTI2048465, TESTI2048603, TESTI2048898, TESTI2049041, TESTI2049062, TESTI2049206, TESTI2049246, TESTI2049277, TESTI2049422, TESTI2049452, TESTI2049469, TESTI2049553, TESTI2049576, TESTI2049857, TESTI2049956, TESTI2050137, TESTI2050681, TESTI2050780, TESTI2050987, TESTI2051148, TESTI2051177, TESTI2051279, TESTI2051488, TESTI2051543, TESTI2051627, TESTI2051742, TESTI2051767, TESTI2051791, TESTI2051806, TESTI2051867, TESTI2051873, TESTI2052110, TESTI2052202, TESTI2052211, TESTI2052256, TESTI2052288, TESTI2052525, TESTI2052670, TESTI2052693, TESTI2052698, TESTI2052799, TESTI2052822, TESTI2052985, TESTI2053151, TESTI2053242, TESTI2053399, TESTI2053526, TESTI2053561, TESTI2053621, TESTI2053667, TESTI2053723, TESTI3000002, TESTI3000005, TESTI4000014, TESTI4000068, TESTI4000079, TESTI4000093, TESTI4000134, TESTI4000137, TESTI4000153, TESTI4000155, TESTI4000157, TESTI4000183, TESTI4000214, TESTI4000215, TESTI4000228, TESTI4000250, TESTI4000288, TESTI4000319, TESTI4000349, TESTI4000370, TESTI4000394, TESTI4000434, TESTI4000462, TESTI4000530, TESTI4000534, TESTI4000598, TESTI4000600, TESTI4000621, TESTI4000703, TESTI4000724, TESTI4000957, TESTI4000970, TESTI4001036, TESTI4001037, TESTI4001060, TESTI4001106, TESTI4001148, TESTI4001176, TESTI4001195, TESTI4001201, TESTI4001206, TESTI4001348, TESTI4001441, TESTI4001467, TESTI4001473, TESTI4001517, TESTI4001527, TESTI4001561, TESTI4001569, TESTI4001604, TESTI4001665, TESTI4001679, TESTI4001795, TESTI4001923, TESTI4001925, TESTI4001984, TESTI4002003, TESTI4002072, TESTI4002141, TESTI4002195, TESTI4002202, TESTI4002290, TESTI4002319, TESTI4002491, TESTI4002520, TESTI4002552, TESTI4002647, TESTI4002703, TESTI4002754, TESTI4002868, TESTI4002878, TESTI4002889, TESTI4002988, TESTI4003150, TESTI4003179, TESTI4003279, TESTI4003319, TESTI4003404, TESTI4003565, TESTI4003574, TESTI4003579, TESTI4003602, TESTI4003703, TESTI4003733, TESTI4003796, TESTI4003944, TESTI4004003, TESTI4004031, TESTI4004200, TESTI4004210, TESTI4004539, TESTI4004626, TESTI4004653, TESTI4004695, TESTI4004722, TESTI4004887, TESTI4004917, TESTI4005015, TESTI4005039, TESTI4005133, TESTI4005158, TESTI4005317, TESTI4005322, TESTI4005399, TESTI4005470, TESTI4005500, TESTI4005534, TESTI4005543, TESTI4005628, TESTI4005801, TESTI4005805, TESTI4005857, TESTI4005961, TESTI4006053, TESTI4006079, TESTI4006112, TESTI4006137, TESTI4006148, TESTI4006219, TESTI4006234, TESTI4006308, TESTI4006326, TESTI4006393, TESTI4006407, TESTI4006412, TESTI4006420, TESTI4006441, TESTI4006473, TESTI4006539, TESTI4006546, TESTI4006567, TESTI4006704, TESTI4006728, TESTI4006802, TESTI4006819, TESTI4007064, TESTI4007163, TESTI4007176, TESTI4007203, TESTI4007239, TESTI4007369, TESTI4007373, TESTI4007382, TESTI4007404, TESTI4007489, TESTI4007565, TESTI4007671, TESTI4007775, TESTI4007778, TESTI4007799, TESTI4007810, TESTI4007816, TESTI4007965, TESTI4008007, TESTI4008018, TESTI4008050, TESTI4008058, TESTI4008086, TESTI4008097, TESTI4008176, TESTI4008209, TESTI4008219, TESTI4008250, TESTI4008302, TESTI4008305, TESTI4008401, TESTI4008417, TESTI4008429, TESTI4008573, TESTI4008797, TESTI4008816, TESTI4008840, TESTI4008935, TESTI4008993, TESTI4009022, TESTI4009028, TESTI4009034, TESTI4009123, TESTI4009160, TESTI4009215, TESTI4009283, TESTI4009286, TESTI4009306, TESTI4009374, TESTI4009406, TESTI4009454, TESTI4009457, TESTI4009501, TESTI4009563, TESTI4009608, TESTI4009638, TESTI4009752, TESTI4009881, TESTI4009886, TESTI4009928, TESTI4010076, TESTI4010082, TESTI4010095, TESTI4010211, TESTI4010377, TESTI4010475, TESTI4010544, TESTI4010713, TESTI4010721, TESTI4010789, TESTI4010817, TESTI4010831, TESTI4010851, TESTI4010902, TESTI4010928, TESTI4010979, TESTI4011070, TESTI4011072, TESTI4011084, TESTI4011118, TESTI4011246, TESTI4011484, TESTI4011505, TESTI4011532, TESTI4011616, TESTI4011744, TESTI4011745, TESTI4011829, TESTI4011926, TESTI4011956, TESTI4012010, TESTI4012086, TESTI4012258, TESTI4012293, TESTI4012329, TESTI4012382, TESTI4012406, TESTI4012448, TESTI4012451, TESTI4012505, TESTI4012556, TESTI4012623, TESTI4012646, TESTI4012679, TESTI4012911, TESTI4012956, TESTI4012960, TESTI4013365, TESTI4013369, TESTI4013410, TESTI4013474, TESTI4013602, TESTI4013667, TESTI4013675, TESTI4013685, TESTI4013735, TESTI4013742, TESTI4013774, TESTI4013817, TESTI4013830, TESTI4013852, TESTI4013894, TESTI4013924, TESTI4013960, TESTI4013962, TESTI4014159, TESTI4014175, TESTI4014265, TESTI4014276, TESTI4014306, TESTI4014392, TESTI4014415, TESTI4014445, TESTI4014553, TESTI4014661, TESTI4014694, TESTI4014801, TESTI4014818, TESTI4014891, TESTI4014908, TESTI4014924, TESTI4014932, TESTI4014971, TESTI4015012, TESTI4015129, TESTI4015145, TESTI4015204, TESTI4015263, TESTI4015293, TESTI4015299, TESTI4015339, TESTI4015398, TESTI4015442, TESTI4015471, TESTI4015477, TESTI4015600, TESTI4015646, TESTI4015681, TESTI4015688, TESTI4015790, TESTI4016110, TESTI4016238, TESTI4016551, TESTI4016812, TESTI4016822, TESTI4016865, TESTI4016882, TESTI4016925, TESTI4017001, TESTI4017116, TESTI4017137, TESTI4017229, TESTI4017254, TESTI4017269, TESTI4017380, TESTI4017382, TESTI4017543, TESTI4017575, TESTI4017647, TESTI4017714, TESTI4017763, TESTI4017848, TESTI4017854, TESTI4017901, TESTI4017961, TESTI4017984, TESTI4018101, TESTI4018152, TESTI4018208, TESTI4018382, TESTI4018436, TESTI4018506, TESTI4018555, TESTI4018751, TESTI4018806, TESTI4018835, TESTI4018859, TESTI4018881, TESTI4018886, TESTI4018938, TESTI4019140, TESTI4019149, TESTI4019299, TESTI4019417, TESTI4019440, TESTI4019566, TESTI4019657, TESTI4019756, TESTI4019843, TESTI4020092, TESTI4020102, TESTI4020342, TESTI4020460, TESTI4020596, TESTI4020806, TESTI4020819, TESTI4020920, TESTI4021129, TESTI4021197, TESTI4021294, TESTI4021377, TESTI4021456, TESTI4021491, TESTI4021569, TESTI4021713, TESTI4021821, TESTI4022158, TESTI4022577, TESTI4022716, TESTI4022873, TESTI4023096, TESTI4023172, TESTI4023546, TESTI4023555, TESTI4023654, TESTI4023722, TESTI4023762, TESTI4023942, TESTI4024096, TESTI4024240, TESTI4024245, TESTI4024294, TESTI4024344, TESTI4024387, TESTI4024420, TESTI4024494, TESTI4024740, TESTI4024874, TESTI4024890, TESTI4024907, TESTI4024930, TESTI4025062, TESTI4025268, TESTI4025401, TESTI4025494, TESTI4025547, TESTI4025731, TESTI4025797, TESTI4025865, TESTI4025908, TESTI4025920, TESTI4026079, TESTI4026080, TESTI4026192, TESTI4026207, TESTI4026295, TESTI4026390, TESTI4026456, TESTI4026510, TESTI4026524, TESTI4026680, TESTI4026700, TESTI4026762, TESTI4026785, TESTI4027139, TESTI4027170, TESTI4027262, TESTI4027516, TESTI4027557, TESTI4027660, TESTI4027821, TESTI4027969, TESTI4028042, TESTI4028059, TESTI4028062, TESTI4028182, TESTI4028429, TESTI4028612, TESTI4028692, TESTI4028809, TESTI4028823, TESTI4028880, TESTI4028904, TESTI4028938, TESTI4028958, TESTI4028983, TESTI4029023, TESTI4029348, TESTI4029370, TESTI4029528, TESTI4029651, TESTI4029671, TESTI4029676, TESTI4029690, TESTI4029731, TESTI4029743, TESTI4030069, TESTI4030159, TESTI4030319, TESTI4030505, TESTI4030603, TESTI4030669, TESTI4030673, TESTI4030864, TESTI4031066, TESTI4031173, TESTI4031335, TESTI4031745, TESTI4031818, TESTI4032090, TESTI4032112, TESTI4032128, TESTI4032270, TESTI4032375, TESTI4032834, TESTI4032856, TESTI4032895, TESTI4032913, TESTI4033146, TESTI4033177, TESTI4033433, TESTI4033690, TESTI4034172, TESTI4034212, TESTI4034432, TESTI4034495, TESTI4034632, TESTI4034633, TESTI4034912, TESTI4034973, TESTI4035063, TESTI4035065, TESTI4035498, TESTI4035508, TESTI4035581, TESTI4035602, TESTI4035637, TESTI4035649, TESTI4035770, TESTI4035872, TESTI4035895, TESTI4035898, TESTI4035989, TESTI4036012, TESTI4036042, TESTI4036048, TESTI4036315, TESTI4036319, TESTI4036449, TESTI4036767, TESTI4036909, TESTI4037066, TESTI4037188, TESTI4037228, TESTI4037244, TESTI4037727, TESTI4037949, TESTI4038047, TESTI4038099, TESTI4038156, TESTI4038223, TESTI4038258, TESTI4038284, TESTI4038339, TESTI4038492, TESTI4038721, TESTI4038758, TESTI4038779, TESTI4038818, TESTI4039038, TESTI4039086, TESTI4039451, TESTI4039575, TESTI4039659, TESTI4039744, TESTI4039904, TESTI4040197, TESTI4040363, TESTI4040535, TESTI4040559, TESTI4040598, TESTI4040800, TESTI4040804, TESTI4040939, TESTI4040956, TESTI4041049, TESTI4041053, TESTI4041086, TESTI4041099, TESTI4041143, TESTI4041482, TESTI4041519, TESTI4041624, TESTI4041629, TESTI4041832, TESTI4041844, TESTI4041903, TESTI4041954, TESTI4041984, TESTI4041985, TESTI4041986, TESTI4042098, TESTI4042420, TESTI4042440, TESTI4042444, TESTI4042711, TESTI4042846, TESTI4043067, TESTI4043129, TESTI4043166, TESTI4043203, TESTI4043223, TESTI4043371, TESTI4043378, TESTI4043512, TESTI4043551, TESTI4043710, TESTI4043947, TESTI4044035, TESTI4044076, TESTI4044084, TESTI4044123, TESTI4044186, TESTI4044234, TESTI4044291, TESTI4044296, TESTI4044300, TESTI4044682, TESTI4044704, TESTI4044770, TESTI4045168, TESTI4045312, TESTI4045330, TESTI4045470, TESTI4045701, TESTI4045908, TESTI4045955, TESTI4045982, TESTI4046073, TESTI4046090, TESTI4046240, TESTI4046245, TESTI4046253, TESTI4046282, TESTI4046328, TESTI4046450, TESTI4046457, TESTI4046487, TESTI4046502, TESTI4046523, TESTI4046819, TESTI4046873, TESTI4046884, TESTI4046896, TESTI4046903, TESTI4046962, TESTI4047069, TESTI4047119, TESTI4047305, TESTI4047328, TESTI4047437, TESTI4047569, TESTI4047746, TESTI4047808, THYMU1000010, THYMU1000017, THYMU1000025, THYMU1000029, THYMU1000032, THYMU1000033, THYMU1000041, THYMU1000060, THYMU1000074, THYMU1000083, THYMU1000098, THYMU1000103, THYMU1000105, THYMU1000109, THYMU1000136, THYMU1000142, THYMU1000144, THYMU1000158, THYMU1000176, THYMU1000179, THYMU1000191, THYMU1000198, THYMU1000217, THYMU1000240, THYMU1000242, THYMU1000291, THYMU1000316, THYMU1000318, THYMU1000329, THYMU1000331, THYMU1000336, THYMU1000359, THYMU1000366, THYMU1000382, THYMU1000393, THYMU1000394, THYMU1000399, THYMU1000426, THYMU1000440, THYMU1000459, THYMU1000473, THYMU1000490, THYMU1000491, THYMU1000496, THYMU1000499, THYMU1000527, THYMU1000532, THYMU1000536, THYMU1000554, THYMU1000558, THYMU1000576, THYMU1000600, THYMU1000677, THYMU1000692, THYMU2000022, THYMU2000032, THYMU2000057, THYMU2000120, THYMU2000138, THYMU2000140, THYMU2000155, THYMU2000162, THYMU2000171, THYMU2000176, THYMU2000179, THYMU2000231, THYMU2000236, THYMU2000276, THYMU2000280, THYMU2000300, THYMU2000317, THYMU2000368, THYMU2000369, THYMU2000418, THYMU2000440, THYMU2000489, THYMU2000492, THYMU2000519, THYMU2000570, THYMU2000602, THYMU2000660, THYMU2000671, THYMU2000672, THYMU2000684, THYMU2000702, THYMU2000767, THYMU2000775, THYMU2000800, THYMU2000879, THYMU2000932, THYMU2000946, THYMU2000950, THYMU2000971, THYMU2000982, THYMU2000990, THYMU2001007, THYMU2001018, THYMU2001053, THYMU2001071, THYMU2001090, THYMU2001139, THYMU2001195, THYMU2001202, THYMU2001203, THYMU2001256, THYMU2001270, THYMU2001291, THYMU2001314, THYMU2001325, THYMU2001357, THYMU2001381, THYMU2001422, THYMU2001443, THYMU2001515, THYMU2001521, THYMU2001556, THYMU2001622, THYMU2001727, THYMU2001819, THYMU2001825, THYMU2001839, THYMU2001868, THYMU2001898, THYMU2001900, THYMU2001916, THYMU2001926, THYMU2001989, THYMU2002037, THYMU2002080, THYMU2002109, THYMU2002147, THYMU2002154, THYMU2002157, THYMU2002162, THYMU2002177, THYMU2002203, THYMU2002229, THYMU2002242, THYMU2002338, THYMU2002356, THYMU2002376, THYMU2002384, THYMU2002450, THYMU2002490, THYMU2002548, THYMU2002695, THYMU2002745, THYMU2002756, THYMU2002789, THYMU2002792, THYMU2002815, THYMU2002841, THYMU2002852, THYMU2002910, THYMU2002950, THYMU2002983, THYMU2003012, THYMU2003046, THYMU2003069, THYMU2003107, THYMU2003124, THYMU2003133, THYMU2003166, THYMU2003232, THYMU2003242, THYMU2003249, THYMU2003270, THYMU2003282, THYMU2003287, THYMU2003336, THYMU2003366, THYMU2003397, THYMU2003446, THYMU2003470, THYMU2003479, THYMU2003499, THYMU2003632, THYMU2003650, THYMU2003700, THYMU2003760, THYMU2003803, THYMU2003855, THYMU2003907, THYMU2003932, THYMU2003981, THYMU2004003, THYMU2004008, THYMU2004042, THYMU2004108, THYMU2004111, THYMU2004123, THYMU2004139, THYMU2004152, THYMU2004169, THYMU2004284, THYMU2004320, THYMU2004336, THYMU2004356, THYMU2004410, THYMU2004452, THYMU2004508, THYMU2004512, THYMU2004635, THYMU2004639, THYMU2004668, THYMU2004677, THYMU2004688, THYMU2004693, THYMU2004733, THYMU2004835, THYMU2004843, THYMU2004906, THYMU2004916, THYMU2004986, THYMU2005001, THYMU2005003, THYMU2005046, THYMU2005134, THYMU2005156, THYMU2005190, THYMU2005225, THYMU2005240, THYMU2005246, THYMU2005270, THYMU2005283, THYMU2005303, THYMU2005321, THYMU2005356, THYMU2005369, THYMU2005439, THYMU2005480, THYMU2005482, THYMU2005507, THYMU2005545, THYMU2005574, THYMU2005576, THYMU2005748, THYMU2005759, THYMU2005807, THYMU2005815, THYMU2005855, THYMU2005881, THYMU2005948, THYMU2005980, THYMU2005997, THYMU2006001, THYMU2006048, THYMU2006098, THYMU2006160, THYMU2006170, THYMU2006252, THYMU2006261, THYMU2006277, THYMU2006303, THYMU2006324, THYMU2006350, THYMU2006357, THYMU2006365, THYMU2006420, THYMU2006468, THYMU2006505, THYMU2006610, THYMU2006666, THYMU2006712, THYMU2006813, THYMU2006913, THYMU2006946, THYMU2006965, THYMU2007025, THYMU2007036, THYMU2007060, THYMU2007065, THYMU2007095, THYMU2007112, THYMU2007146, THYMU2007179, THYMU2007258, THYMU2007307, THYMU2007308, THYMU2007339, THYMU2007350, THYMU2007384, THYMU2007415, THYMU2007467, THYMU2007493, THYMU2007521, THYMU2007528, THYMU2007530, THYMU2007532, THYMU2007561, THYMU2007571, THYMU2007635, THYMU2007658, THYMU2007667, THYMU2007694, THYMU2007725, THYMU2007729, THYMU2007802, THYMU2007824, THYMU2007854, THYMU2007886, THYMU2007952, THYMU2007969, THYMU2008035, THYMU2008036, THYMU2008049, THYMU2008072, THYMU2008111, THYMU2008145, THYMU2008149, THYMU2008185, THYMU2008191, THYMU2008207, THYMU2008226, THYMU2008282, THYMU2008321, THYMU2008339, THYMU2008350, THYMU2008351, THYMU2008383, THYMU2008452, THYMU2008643, THYMU2008686, THYMU2008691, THYMU2008714, THYMU2008725, THYMU2008727, THYMU2008781, THYMU2008799, THYMU2008876, THYMU2008910, THYMU2008917, THYMU2008928, THYMU2008990, THYMU2008994, THYMU2009023, THYMU2009046, THYMU2009101, THYMU2009104, THYMU2009134, THYMU2009157, THYMU2009181, THYMU2009186, THYMU2009338, THYMU2009425, THYMU2009516, THYMU2009526, THYMU2009546, THYMU2009592, THYMU2009596, THYMU2009792, THYMU2009835, THYMU2009906, THYMU2009948, THYMU2010030, THYMU2010041, THYMU2010046, THYMU2010059, THYMU2010082, THYMU2010094, THYMU2010192, THYMU2010448, THYMU2010519, THYMU2010637, THYMU2010671, THYMU2010699, THYMU2010705, THYMU2010779, THYMU2010816, THYMU2010831, THYMU2010848, THYMU2011053, THYMU2011063, THYMU2011072, THYMU2011096, THYMU2011118, THYMU2011142, THYMU2011183, THYMU2011257, THYMU2011259, THYMU2011295, THYMU2011308, THYMU2011390, THYMU2011431, THYMU2011447, THYMU2011482, THYMU2011538, THYMU2011548, THYMU2011551, THYMU2011564, THYMU2011573, THYMU2011585, THYMU2011621, THYMU2011666, THYMU2011736, THYMU2011785, THYMU2011806, THYMU2011852, THYMU2011875, THYMU2011881, THYMU2011937, THYMU2011939, THYMU2012002, THYMU2012024, THYMU2012073, THYMU2012104, THYMU2012113, THYMU2012273, THYMU2012401, THYMU2012492, THYMU2012507, THYMU2012565, THYMU2012574, THYMU2012625, THYMU2012631, THYMU2012665, THYMU2012690, THYMU2012701, THYMU2012807, THYMU2012826, THYMU2012882, THYMU2012891, THYMU2012902, THYMU2012919, THYMU2013023, THYMU2013047, THYMU2013051, THYMU2013089, THYMU2013170, THYMU2013364, THYMU2013386, THYMU2013426, THYMU2013578, THYMU2013648, THYMU2013705, THYMU2013757, THYMU2013779, THYMU2013863, THYMU2013950, THYMU2013981, THYMU2014068, THYMU2014167, THYMU2014183, THYMU2014204, THYMU2014297, THYMU2014323, THYMU2014327, THYMU2014353, THYMU2014492, THYMU2014500, THYMU2014599, THYMU2014762, THYMU2014777, THYMU2014801, THYMU2014901, THYMU2014923, THYMU2015019, THYMU2015161, THYMU2015316, THYMU2015321, THYMU2015439, THYMU2015441, THYMU2015479, THYMU2015775, THYMU2015825, THYMU2015918, THYMU2015943, THYMU2015984, THYMU2016113, THYMU2016164, THYMU2016204, THYMU2016219, THYMU2016360, THYMU2016496, THYMU2016523, THYMU2016840, THYMU2016968, THYMU2017008, THYMU2017010, THYMU2017023, THYMU2017085, THYMU2017099, THYMU2017158, THYMU2017162, THYMU2017215, THYMU2017362, THYMU2017366, THYMU2017398, THYMU2017449, THYMU2017479, THYMU2017522, THYMU2017526, THYMU2017601, THYMU2017675, THYMU2017707, THYMU2017831, THYMU2017844, THYMU2017878, THYMU2017948, THYMU2018028, THYMU2018071, THYMU2018189, THYMU2018197, THYMU2018384, THYMU2018455, THYMU2018547, THYMU2018565, THYMU2018639, THYMU2018673, THYMU2018721, THYMU2018772, THYMU2018819, THYMU2018841, THYMU2018997, THYMU2019021, THYMU2019054, THYMU2019197, THYMU2019210, THYMU2019364, THYMU2019436, THYMU2019442, THYMU2019587, THYMU2019599, THYMU2019686, THYMU2019813, THYMU2020198, THYMU2020289, THYMU2020416, THYMU2020491, THYMU2020499, THYMU2020560, THYMU2020667, THYMU2020830, THYMU2020883, THYMU2020959, THYMU2021361, THYMU2021509, THYMU2021597, THYMU2021684, THYMU2021714, THYMU2022213, THYMU2022289, THYMU2022660, THYMU2022854, THYMU2022922, THYMU2023209, THYMU2023264, THYMU2023576, THYMU2023711, THYMU2023900, THYMU2023943, THYMU2023967, THYMU2024071, THYMU2024121, THYMU2024185, THYMU2024207, THYMU2024616, THYMU2024684, THYMU2024748, THYMU2025042, THYMU2025189, THYMU2025319, THYMU2025325, THYMU2025406, THYMU2025557, THYMU2025572, THYMU2025707, THYMU2025849, THYMU2025909, THYMU2025939, THYMU2026182, THYMU2026350, THYMU2026530, THYMU2026531, THYMU2026835, THYMU2026904, THYMU2027053, THYMU2027125, THYMU2027168, THYMU2027249, THYMU2027282, THYMU2027497, THYMU2027695, THYMU2027734, THYMU2027894, THYMU2027975, THYMU2027996, THYMU2028041, THYMU2028368, THYMU2028379, THYMU2028394, THYMU2028412, THYMU2028629, THYMU2028632, THYMU2028724, THYMU2028739, THYMU2028942, THYMU2028978, THYMU2029134, THYMU2029578, THYMU2029676, THYMU2029688, THYMU2029788, THYMU2030068, THYMU2030226, THYMU2030264, THYMU2030462, THYMU2030543, THYMU2030637, THYMU2030655, THYMU2030796, THYMU2030912, THYMU2030982, THYMU2031046, THYMU2031139, THYMU2031218, THYMU2031249, THYMU2031258, THYMU2031341, THYMU2031368, THYMU2031579, THYMU2031847, THYMU2031890, THYMU2031994, THYMU2032014, THYMU2032035, THYMU2032080, THYMU2032150, THYMU2032155, THYMU2032358, THYMU2032437, THYMU2032601, THYMU2032655, THYMU2032696, THYMU2032715, THYMU2032732, THYMU2032825, THYMU2032976, THYMU2033053, THYMU2033059, THYMU2033070, THYMU2033079, THYMU2033085, THYMU2033104, THYMU2033227, THYMU2033263, THYMU2033401, THYMU2033583, THYMU2033755, THYMU2033787, THYMU2033816, THYMU2034182, THYMU2034279, THYMU2034314, THYMU2034338, THYMU2034374, THYMU2034647, THYMU2034917, THYMU2035064, THYMU2035078, THYMU2035101, THYMU2035319, THYMU2035321, THYMU2035388, THYMU2035400, THYMU2035554, THYMU2035710, THYMU2036058, THYMU2036105, THYMU2036207, THYMU2036215, THYMU2036252, THYMU2036265, THYMU2036366, THYMU2036459, THYMU2036461, THYMU2036604, THYMU2036653, THYMU2037081, THYMU2037208, THYMU2037226, THYMU2037233, THYMU2037234, THYMU2037348, THYMU2037406, THYMU2037965, THYMU2038058, THYMU2038189, THYMU2038199, THYMU2038220, THYMU2038301, THYMU2038369, THYMU2038389, THYMU2038615, THYMU2038636, THYMU2038739, THYMU2038772, THYMU2038797, THYMU2038906, THYMU2039305, THYMU2039315, THYMU2039350, THYMU2039411, THYMU2039634, THYMU2039719, THYMU2039780, THYMU2039788, THYMU2039989, THYMU2040029, THYMU2040110, THYMU2040114, THYMU2040140, THYMU2040412, THYMU2040427, THYMU2040824, THYMU2040925, THYMU2041007, THYMU2041015, THYMU2041252, THYMU3000028, THYMU3000036, THYMU3000037, THYMU3000082, THYMU3000194, THYMU3000224, THYMU3000269, THYMU3000306, THYMU3000360, THYMU3000390, THYMU3000420, THYMU3000490, THYMU3000504, THYMU3000542, THYMU3000655, THYMU3000776, THYMU3000826, THYMU3000841, THYMU3001077, THYMU3001082, THYMU3001083, THYMU3001133, THYMU3001151, THYMU3001379, THYMU3001472, THYMU3001593, THYMU3001883, THYMU3001939, THYMU3001991, THYMU3002452, THYMU3002578, THYMU3002661, THYMU3003007, THYMU3003092, THYMU3003212, THYMU3003309, THYMU3003350, THYMU3003403, THYMU3003565, THYMU3003763, THYMU3003865, THYMU3003958, THYMU3003965, THYMU3004157, THYMU3004628, THYMU3004632, THYMU3004835, THYMU3004866, THYMU3005050, THYMU3005378, THYMU3005407, THYMU3005415, THYMU3005427, THYMU3005482, THYMU3005491, THYMU3005629, THYMU3005696, THYMU3006118, THYMU3006132, THYMU3006168, THYMU3006172, THYMU3006371, THYMU3006485, THYMU3006640, THYMU3006767, THYMU3006811, THYMU3006963, THYMU3007137, THYMU3007308, THYMU3007368, THYMU3007423, THYMU3007559, THYMU3007845, THYMU3008060, THYMU3008105, THYMU3008136, THYMU3008171, THYMU3008216, THYMU3008436, THYMU3008672, THYMU3008883, THYMU3008935, THYMU3009006, THYMU3009255, THYMU3009391, THYMU3009643, THYMU3009755, THYMU3010247, THYMU3011012, THYMU3011081, THYMU3011244, THYMU3011360, THYMU3011534, THYMU3011543, THYMU3011556, THYMU3011717, THYMU3011827, THYMU3012402, THYMU3012907, THYMU3012983, THYMU3013114, THYMU3013197, THYMU3013241, THYMU3013386, THYMU3013470, THYMU3013785, THYMU3013897, THYMU3014038, THYMU3014173, THYMU3014372, THYMU3014555, THYMU3014620, THYMU3014701, THYMU3015042, THYMU3015457, THYMU3015571, THYMU3015592, THYMU3015625, THYMU3015647, THYMU3015759, THYMU3015962, THYMU3016022, THYMU3016518, THYMU3016797, THYMU3016822, THYMU3016850, THYMU3017562, THYMU3017688, THYMU3017689, THYMU3017761, THYMU3018151, THYMU3018896, THYMU3019095, THYMU3019476, THYMU3019605, THYMU3019916, THYMU3020221, THYMU3020595, THYMU3020713, THYMU3020856, THYMU3020869, THYMU3020970, THYMU3021404, THYMU3021586, THYMU3021755, THYMU3021900, THYMU3022211, THYMU3022434, THYMU3022528, THYMU3022668, THYMU3022982, THYMU3023107, THYMU3023211, THYMU3023216, THYMU3023394, THYMU3023400, THYMU3023797, THYMU3024164, THYMU3024339, THYMU3024602, THYMU3024879, THYMU3025118, THYMU3025313, THYMU3025642, THYMU3025683, THYMU3025772, THYMU3025865, THYMU3026000, THYMU3026350, THYMU3026479, THYMU3026532, THYMU3026783, THYMU3026869, THYMU3027251, THYMU3027540, THYMU3027655, THYMU3027671, THYMU3028075, THYMU3028410, THYMU3028461, THYMU3028702, THYMU3029188, THYMU3029318, THYMU3029421, THYMU3029719, THYMU3029774, THYMU3029832, THYMU3030072, THYMU3030231, THYMU3030706, THYMU3030710, THYMU3030752, THYMU3031146, THYMU3031402, THYMU3031610, THYMU3031612, THYMU3031868, THYMU3031878, THYMU3032032, THYMU3032798, THYMU3032867, THYMU3033402, THYMU3033626, THYMU3033630, THYMU3033649, THYMU3033754, THYMU3033759, THYMU3034078, THYMU3034099, THYMU3034453, THYMU3034616, THYMU3034853, THYMU3034867, THYMU3034983, THYMU3036200, THYMU3036310, THYMU3036934, THYMU3036953, THYMU3037052, THYMU3037192, THYMU3037617, THYMU3037772, THYMU3037827, THYMU3037836, THYMU3037856, THYMU3037867, THYMU3037909, THYMU3037980, THYMU3038158, THYMU3038167, THYMU3038214, THYMU3038266, THYMU3038328, THYMU3038347, THYMU3038375, THYMU3038603, THYMU3038687, THYMU3038759, THYMU3038879, THYMU3038970, THYMU3039807, THYMU3039846, THYMU3040068, THYMU3040126, THYMU3040146, THYMU3040168, THYMU3040172, THYMU3040725, THYMU3040746, THYMU3040816, THYMU3040829, THYMU3040830, THYMU3040986, THYMU3041354, THYMU3041386, THYMU3041428, THYMU3041573, THYMU3041603, THYMU3041736, THYMU3041918, THYMU3042075, THYMU3042321, THYMU3042372, THYMU3042758, THYMU3042929, THYMU3043200, THYMU3043327, THYMU3043482, THYMU3043597, THYMU3043688, THYMU3043779, THYMU3043883, THYMU3043993, THYMU3044175, THYMU3044188, THYMU3044441, THYMU3044445, THYMU3045510, THYMU3045673, THYMU3045692, THYMU3045704, THYMU3046140, THYMU3046350, THYMU3046360, THYMU3046856, THYMU3047115, THYMU3047144, THYMU3047156, THYMU3047366, THYMU3047513, THYMU3047542, THYMU3047760, THYMU3047891, TKIDN1000044, TKIDN1000062, TKIDN1000066, TKIDN1000164, TKIDN1000171, TKIDN1000192, TKIDN2000127, TKIDN2000240, TKIDN2000246, TKIDN2000319, TKIDN2000464, TKIDN2000521, TKIDN2000701, TKIDN2001529, TKIDN2001662, TKIDN2002318, TKIDN2002329, TKIDN2002424, TKIDN2002632, TKIDN2003044, TKIDN2003059, TKIDN2003062, TKIDN2003078, TKIDN2003366, TKIDN2003396, TKIDN2003413, TKIDN2003597, TKIDN2003601, TKIDN2004185, TKIDN2004386, TKIDN2004458, TKIDN2004748, TKIDN2005487, TKIDN2005721, TKIDN2005934, TKIDN2005947, TKIDN2005956, TKIDN2006525, TKIDN2006761, TKIDN2006852, TKIDN2007605, TKIDN2007667, TKIDN2007828, TKIDN2008176, TKIDN2008778, TKIDN2009092, TKIDN2009330, TKIDN2009481, TKIDN2009641, TKIDN2009794, TKIDN2009889, TKIDN2010200, TKIDN2010232, TKIDN2010278, TKIDN2010602, TKIDN2010812, TKIDN2010934, TKIDN2011051, TKIDN2011160, TKIDN2011289, TKIDN2011324, TKIDN2012034, TKIDN2012771, TKIDN2012824, TKIDN2013134, TKIDN2013287, TKIDN2014570, TKIDN2014757, TKIDN2014771, TKIDN2014964, TKIDN2015025, TKIDN2015071, TKIDN2015161, TKIDN2015263, TKIDN2015285, TKIDN2015788, TKIDN2016309, TKIDN2016399, TKIDN2016846, TKIDN2018926, TKIDN2019116, TLIVE2000023, TLIVE2000142, TLIVE2000292, TLIVE2000762, TLIVE2000979, TLIVE2001327, TLIVE2001616, TLIVE2001684, TLIVE2001828, TLIVE2001927, TLIVE2002336, TLIVE2002338, TLIVE2002562, TLIVE2002690, TLIVE2002882, TLIVE2003197, TLIVE2003200, TLIVE2003225, TLIVE2003381, TLIVE2003737, TLIVE2003961, TLIVE2003970, TLIVE2004110, TLIVE2004320, TLIVE2004331, TLIVE2004601, TLIVE2005180, TLIVE2005390, TLIVE2005516, TLIVE2005731, TLIVE2005866, TLIVE2006236, TLIVE2006359, TLIVE2006529, TLIVE2006621, TLIVE2006733, TLIVE2007000, TLIVE2007016, TLIVE2007132, TLIVE2007192, TLIVE2007528, TLIVE2007607, TLIVE2007736, TLIVE2007816, TLIVE2007919, TLIVE2008083, TLIVE2008213, TLIVE2008221, TLIVE2008229, TLIVE2008712, TLIVE2008797, TLIVE2009087, TLIVE2009163, TLIVE2009489, TLIVE2009541, TLUNG2000179, TOVAR2000476, TOVAR2000575, TOVAR2000649, TOVAR2000904, TOVAR2001281, TOVAR2001556, TOVAR2001730, TOVAR2002247, TOVAR2002514, TOVAR2002549, TOVAR2002800, TRACH1000011, TRACH1000018, TRACH1000030, TRACH1000038, TRACH1000057, TRACH1000074, TRACH1000100, TRACH1000106, TRACH1000125, TRACH1000140, TRACH1000144, TRACH1000193, TRACH1000212, TRACH1000240, TRACH2000002, TRACH2000015, TRACH2000024, TRACH2000032, TRACH2000045, TRACH2000047, TRACH2000081, TRACH2000083, TRACH2000148, TRACH2000185, TRACH2000196, TRACH2000235, TRACH2000237, TRACH2000243, TRACH2000250, TRACH2000259, TRACH2000272, TRACH2000282, TRACH2000287, TRACH2000289, TRACH2000306, TRACH2000312, TRACH2000336, TRACH2000359, TRACH2000393, TRACH2000411, TRACH2000420, TRACH2000461, TRACH2000496, TRACH2000497, TRACH2000502, TRACH2000522, TRACH2000540, TRACH2000559, TRACH2000660, TRACH2000665, TRACH2000675, TRACH2000677, TRACH2000702, TRACH2000703, TRACH2000767, TRACH2000775, TRACH2000780, TRACH2000807, TRACH2000862, TRACH2000873, TRACH2000894, TRACH2000898, TRACH2000920, TRACH2000923, TRACH2000926, TRACH2000944, TRACH2000959, TRACH2000981, TRACH2000986, TRACH2001021, TRACH2001037, TRACH2001060, TRACH2001085, TRACH2001101, TRACH2001109, TRACH2001121, TRACH2001147, TRACH2001154, TRACH2001188, TRACH2001192, TRACH2001249, TRACH2001275, TRACH2001314, TRACH2001335, TRACH2001339, TRACH2001341, TRACH2001347, TRACH2001395, TRACH2001400, TRACH2001403, TRACH2001416, TRACH2001428, TRACH2001443, TRACH2001474, TRACH2001478, TRACH2001525, TRACH2001532, TRACH2001549, TRACH2001592, TRACH2001596, TRACH2001612, TRACH2001621, TRACH2001646, TRACH2001651, TRACH2001684, TRACH2001810, TRACH2001898, TRACH2001933, TRACH2001968, TRACH2001996, TRACH2002043, TRACH2002054, TRACH2002100, TRACH2002138, TRACH2002664, TRACH2002784, TRACH2002803, TRACH2002840, TRACH2002847, TRACH2002853, TRACH2002862, TRACH2002954, TRACH2002960, TRACH2002988, TRACH2003070, TRACH2003272, TRACH2003347, TRACH2003484, TRACH2003516, TRACH2003605, TRACH2003736, TRACH2003759, TRACH2003941, TRACH2004039, TRACH2004054, TRACH2004087, TRACH2004109, TRACH2004170, TRACH2004183, TRACH2004251, TRACH2004292, TRACH2004336, TRACH2004399, TRACH2004428, TRACH2004458, TRACH2004521, TRACH2004570, TRACH2004845, TRACH2004887, TRACH2004950, TRACH2005004, TRACH2005017, TRACH2005066, TRACH2005159, TRACH2005314, TRACH2005444, TRACH2005541, TRACH2005666, TRACH2005698, TRACH2005710, TRACH2005720, TRACH2005769, TRACH2005796, TRACH2005800, TRACH2005811, TRACH2006015, TRACH2006049, TRACH2006097, TRACH2006194, TRACH2006327, TRACH2006331, TRACH2006378, TRACH2006387, TRACH2006528, TRACH2006670, TRACH2006762, TRACH2006866, TRACH2006870, TRACH2006918, TRACH2007059, TRACH2007324, TRACH2007358, TRACH2007483, TRACH2007542, TRACH2007577, TRACH2007674, TRACH2007676, TRACH2007688, TRACH2007733, TRACH2007754, TRACH2007816, TRACH2007894, TRACH2007988, TRACH2008081, TRACH2008112, TRACH2008113, TRACH2008127, TRACH2008130, TRACH2008278, TRACH2008300, TRACH2008472, TRACH2008478, TRACH2008540, TRACH2008583, TRACH2008597, TRACH2008716, TRACH2008820, TRACH2008891, TRACH2008921, TRACH2009006, TRACH2009060, TRACH2009107, TRACH2009123, TRACH2009268, TRACH2009291, TRACH2009310, TRACH2009340, TRACH2009348, TRACH2009358, TRACH2009661, TRACH2009730, TRACH2009743, TRACH2009754, TRACH2009851, TRACH2009862, TRACH2009934, TRACH2010159, TRACH2010218, TRACH2010251, TRACH2010272, TRACH2010317, TRACH2010419, TRACH2010451, TRACH2010505, TRACH2010587, TRACH2010600, TRACH2010634, TRACH2010639, TRACH2010677, TRACH2010698, TRACH2010771, TRACH2010824, TRACH2010883, TRACH2010965, TRACH2010974, TRACH2011057, TRACH2011093, TRACH2011113, TRACH2011290, TRACH2011293, TRACH2011302, TRACH2011500, TRACH2011574, TRACH2011894, TRACH2011956, TRACH2012000, TRACH2012138, TRACH2012242, TRACH2012298, TRACH2012370, TRACH2012376, TRACH2012387, TRACH2012536, TRACH2012562, TRACH2012742, TRACH2012811, TRACH2012823, TRACH2012918, TRACH2013081, TRACH2013123, TRACH2013265, TRACH2013369, TRACH2013450, TRACH2013495, TRACH2013552, TRACH2013585, TRACH2013671, TRACH2013726, TRACH2013902, TRACH2013928, TRACH2013982, TRACH2013991, TRACH2014018, TRACH2014045, TRACH2014046, TRACH2014082, TRACH2014124, TRACH2014268, TRACH2014284, TRACH2014337, TRACH2014356, TRACH2014371, TRACH2014483, TRACH2014495, TRACH2014544, TRACH2014573, TRACH2014725, TRACH2014760, TRACH2014815, TRACH2014839, TRACH2014938, TRACH2014950, TRACH2014972, TRACH2014974, TRACH2014997, TRACH2015180, TRACH2015243, TRACH2015316, TRACH2015381, TRACH2015486, TRACH2015654, TRACH2015939, TRACH2015987, TRACH2016080, TRACH2016131, TRACH2016286, TRACH2016317, TRACH2016347, TRACH2016380, TRACH2016384, TRACH2016410, TRACH2016481, TRACH2016498, TRACH2016533, TRACH2016551, TRACH2016554, TRACH2016651, TRACH2016690, TRACH2016709, TRACH2016722, TRACH2016980, TRACH2017086, TRACH2017368, TRACH2017498, TRACH2017609, TRACH2017949, TRACH2017965, TRACH2017980, TRACH2018034, TRACH2018084, TRACH2018262, TRACH2018273, TRACH2018278, TRACH2018345, TRACH2018380, TRACH2018449, TRACH2018512, TRACH2018646, TRACH2018663, TRACH2018718, TRACH2018835, TRACH2018882, TRACH2018914, TRACH2018950, TRACH2019024, TRACH2019046, TRACH2019080, TRACH2019151, TRACH2019154, TRACH2019176, TRACH2019248, TRACH2019309, TRACH2019425, TRACH2019473, TRACH2019602, TRACH2019661, TRACH2019672, TRACH2019673, TRACH2019844, TRACH2019879, TRACH2020048, TRACH2020336, TRACH2020525, TRACH2021398, TRACH2021622, TRACH2021635, TRACH2021964, TRACH2022042, TRACH2022113, TRACH2022253, TRACH2022425, TRACH2022553, TRACH2022649, TRACH2022839, TRACH2023246, TRACH2023299, TRACH2023306, TRACH2023416, TRACH2023479, TRACH2023684, TRACH2023860, TRACH2023876, TRACH2024139, TRACH2024187, TRACH2024271, TRACH2024293, TRACH2024408, TRACH2024512, TRACH2024559, TRACH2024647, TRACH2024651, TRACH2024730, TRACH2024735, TRACH2024749, TRACH2024821, TRACH2025057, TRACH2025084, TRACH2025155, TRACH2025224, TRACH2025344, TRACH2025379, TRACH2025507, TRACH2025569, TRACH2025705, TRACH2025749, TRACH2025753, TRACH2025810, TRACH2025853, TRACH2025911, TRACH2025932, TRACH3000014, TRACH3000017, TRACH3000043, TRACH3000134, TRACH3000180, TRACH3000342, TRACH3000420, TRACH3000515, TRACH3000530, TRACH3000548, TRACH3000558, TRACH3000586, TRACH3000780, TRACH3000892, TRACH3000926, TRACH3001119, TRACH3001443, TRACH3001550, TRACH3001759, TRACH3002064, TRACH3002107, TRACH3002168, TRACH3002188, TRACH3002192, TRACH3002245, TRACH3002293, TRACH3002533, TRACH3002561, TRACH3002567, TRACH3002605, TRACH3002650, TRACH3002752, TRACH3002866, TRACH3002871, TRACH3002876, TRACH3002890, TRACH3003009, TRACH3003037, TRACH3003357, TRACH3003379, TRACH3003547, TRACH3003586, TRACH3003683, TRACH3003780, TRACH3003805, TRACH3003832, TRACH3003872, TRACH3004068, TRACH3004113, TRACH3004288, TRACH3004303, TRACH3004412, TRACH3004424, TRACH3004456, TRACH3004537, TRACH3004596, TRACH3004651, TRACH3004652, TRACH3004671, TRACH3004747, TRACH3004760, TRACH3004783, TRACH3004786, TRACH3004840, TRACH3004931, TRACH3004934, TRACH3005072, TRACH3005085, TRACH3005102, TRACH3005173, TRACH3005191, TRACH3005211, TRACH3005274, TRACH3005294, TRACH3005479, TRACH3005549, TRACH3005699, TRACH3005702, TRACH3005808, TRACH3005852, TRACH3005896, TRACH3006038, TRACH3006149, TRACH3006228, TRACH3006264, TRACH3006336, TRACH3006379, TRACH3006392, TRACH3006395, TRACH3006397, TRACH3006412, TRACH3006470, TRACH3006589, TRACH3006626, TRACH3006699, TRACH3006717, TRACH3006800, TRACH3006889, TRACH3006985, TRACH3007097, TRACH3007268, TRACH3007274, TRACH3007277, TRACH3007391, TRACH3007479, TRACH3007541, TRACH3007595, TRACH3007627, TRACH3007689, TRACH3007766, TRACH3007866, TRACH3007995, TRACH3008042, TRACH3008061, TRACH3008093, TRACH3008201, TRACH3008508, TRACH3008535, TRACH3008629, TRACH3008632, TRACH3008688, TRACH3008697, TRACH3008713, TRACH3008887, TRACH3008902, TRACH3008990, TRACH3009001, TRACH3009008, TRACH3009059, TRACH3009061, TRACH3009148, TRACH3009455, TRACH3009701, TRACH3009715, TRACH3009894, TRACH3009956, TRACH3010079, TRACH3010167, TRACH3010331, TRACH3010342, TRACH3010382, TRACH3010757, TRACH3010901, TRACH3011004, TRACH3011082, TRACH3011184, TRACH3011282, TRACH3011313, TRACH3011454, TRACH3611485, TRACH3011503, TRACH3011538, TRACH3011542, TRACH3012106, TRACH3012161, TRACH3012232, TRACH3012261, TRACH3012445, TRACH3012460, TRACH3012659, TRACH3012718, TRACH3012864, TRACH3012891, TRACH3012942, TRACH3013043, TRACH3013072, TRACH3013426, TRACH3013454, TRACH3013558, TRACH3013684, TRACH3013693, TRACH3013700, TRACH3013766, TRACH3013900, TRACH3013926, TRACH3014063, TRACH3014183, TRACH3014215, TRACH3014316, TRACH3014415, TRACH3014580, TRACH3014641, TRACH3014885, TRACH3015136, TRACH3015336, TRACH3015346, TRACH3015354, TRACH3015467, TRACH3015626, TRACH3015951, TRACH3016051, TRACH3016120, TRACH3016264, TRACH3016277, TRACH3016368, TRACH3016455, TRACH3016614, TRACH3016805, TRACH3016992, TRACH3017171, TRACH3017409, TRACH3017934, TRACH3018108, TRACH3018191, TRACH3018240, TRACH3018261, TRACH3018519, TRACH3018524, TRACH3018606, TRACH3018783, TRACH3018907, TRACH3018933, TRACH3018943, TRACH3019018, TRACH3019058, TRACH3019142, TRACH3019290, TRACH3019347, TRACH3019370, TRACH3019447, TRACH3019598, TRACH3019621, TRACH3019662, TRACH3019807, TRACH3019924, TRACH3019977, TRACH3020137, TRACH3020410, TRACH3020563, TRACH3020605, TRACH3020750, TRACH3020769, TRACH3020928, TRACH3020930, TRACH3021023, TRACH3021066, TRACH3021212, TRACH3021335, TRACH3021373, TRACH3021544, TRACH3021778, TRACH3021834, TRACH3021883, TRACH3022170, TRACH3022198, TRACH3022296, TRACH3022482, TRACH3022732, TRACH3022758, TRACH3022875, TRACH3022910, TRACH3022960, TRACH3023063, TRACH3023203, TRACH3023242, TRACH3023373, TRACH3023516, TRACH3023752, TRACH3023945, TRACH3023960, TRACH3024020, TRACH3024081, TRACH3024342, TRACH3024423, TRACH3024428, TRACH3024512, TRACH3024671, TRACH3024823, TRACH3025302, TRACH3025316, TRACH3025346, TRACH3025520, TRACH3026148, TRACH3026283, TRACH3026299, TRACH3026303, TRACH3026542, TRACH3026650, TRACH3026676, TRACH3026744, TRACH3026949, TRACH3027229, TRACH3027527, TRACH3027681, TRACH3027701, TRACH3027885, TRACH3028031, TRACH3028164, TRACH3028180, TRACH3028195, TRACH3028441, TRACH3028597, TRACH3028678, TRACH3028837, TRACH3028847, TRACH3028855, TRACH3029139, TRACH3029329, TRACH3029451, TRACH3029462, TRACH3029520, TRACH3029592, TRACH3029629, TRACH3029665, TRACH3029670, TRACH3029800, TRACH3030111, TRACH3030130, TRACH3030176, TRACH3030252, TRACH3030725, TRACH3030855, TRACH3030883, TRACH3031316, TRACH3031400, TRACH3031463, TRACH3031479, TRACH3031518, TRACH3031660, TRACH3031678, TRACH3031936, TRACH3032044, TRACH3032065, TRACH3032150, TRACH3032372, TRACH3032480, TRACH3032570, TRACH3032755, TRACH3032827, TRACH3032873, TRACH3033535, TRACH3033680, TRACH3033868, TRACH3034145, TRACH3034414, TRACH3034488, TRACH3034680, TRACH3034731, TRACH3034745, TRACH3034762, TRACH3034903, TRACH3035187, TRACH3035199, TRACH3035235, TRACH3035451, TRACH3035482, TRACH3035526, TRACH3036004, TRACH3036103, TRACH3036193, TRACH3036207, TRACH3036278, TRACH3036309, TRACH3036456, TRACH3036609, TRACH3036638, TRACH3036683, TRACH3036750, TRACH3036792, TRACH3036843, TRACH3036897, TRACH3036932, TRACH3036942, TRACH3036997, TRACH3037063, TRACH3037067, TRACH3037267, TRACH3037288, TRACH3037505, TRACH3037573, TRACH3037696, TRACH3037897, TRACH3038086, TRACH3038399, TSTOM1000135, TSTOM1000186, TSTOM2000139, TSTOM2000235, TSTOM2000315, TSTOM2000442, TSTOM2000553, TSTOM2000569, TSTOM2000588, TSTOM2001195, TSTOM2001274, TSTOM2001571, TSTOM2001996, TSTOM2002265, TSTOM2002505, TSTOM2002561, TSTOM2002611, TSTOM2002672, TSTOM2002682, TUTER1000014, TUTER1000122, TUTER1000137, TUTER2000057, TUTER2000283, TUTER2000425, TUTER2000904, TUTER2000916, TUTER2001286, TUTER2001341, TUTER2001387, TUTER2001433, TUTER2001461, TUTER2002028, TUTER2002074, TUTER2002158, TUTER2002228, TUTER2002323, TUTER2002356, TUTER2002729, UMVEN1000122, UMVEN1000143, UMVEN1000156, UMVEN1000186, UMVEN2000046, UMVEN2000069, UMVEN2000121, UMVEN2000152, UTERU1000008, UTERU1000015, UTERU1000024, UTERU1000031, UTERU1000032, UTERU1000057, UTERU1000065, UTERU1000077, UTERU1000093, UTERU1000096, UTERU1000106, UTERU1000109, UTERU1000131, UTERU1000138, UTERU1000148, UTERU1000160, UTERU1000182, UTERU1000183, UTERU1000187, UTERU1000192, UTERU1000249, UTERU1000337, UTERU1000339, UTERU1000384, UTERU2000023, UTERU2000047, UTERU2000074, UTERU2000099, UTERU2000154, UTERU2000197, UTERU2000218, UTERU2000238, UTERU2000243, UTERU2000260, UTERU2000300, UTERU2000329, UTERU2000332, UTERU2000338, UTERU2000349, UTERU2000377, UTERU2000393, UTERU2000418, UTERU2000465, UTERU20000485, UTERU2000517, UTERU2000524, UTERU2000537, UTERU2000539, UTERU2000542, UTERU2000546, UTERU2000550, UTERU2000569, UTERU2000607, UTERU2000629, UTERU2000649, UTERU2000663, UTERU2000696, UTERU2000794, UTERU2000830, UTERU2000844, UTERU2000922, UTERU2000925, UTERU2001024, UTERU2001110, UTERU2001176, UTERU2001281, UTERU2001389, UTERU2001409, UTERU2001412, UTERU2001504, UTERU2001658, UTERU2001747, UTERU2001876, UTERU2002001, UTERU2002011, UTERU2002176, UTERU2002198, UTERU2002294, UTERU2002332, UTERU2002410, UTERU2002473, UTERU2002547, UTERU2002693, UTERU2002733, UTERU2002736, UTERU2002737, UTERU2002826, UTERU2002841, UTERU2002964, UTERU2002993, UTERU2003035, UTERU2003057, UTERU2003126, UTERU2003135, UTERU2003321, UTERU2003399, UTERU2003411, UTERU2003456, UTERU2003577, UTERU2003704, UTERU2003926, UTERU2003973, UTERU2004015, UTERU2004039, UTERU2004061, UTERU2004073, UTERU2004163, UTERU2004299, UTERU2004461, UTERU2004520, UTERU2004564, UTERU2004664, UTERU2004688, UTERU2004698, UTERU2004807, UTERU2004861, UTERU2004929, UTERU2005004, UTERU2005050, UTERU2005069, UTERU2005074, UTERU2005179, UTERU2005292, UTERU2005346, UTERU2005354, UTERU2005446, UTERU2005449, UTERU2005450, UTERU2005533, UTERU2005601, UTERU2005664, UTERU2005822, UTERU2005903, UTERU2005905, UTERU2006103, UTERU2006115, UTERU2006137, UTERU2006182, UTERU2006400, UTERU2006412, UTERU2006429, UTERU2006486, UTERU2006524, UTERU2006547, UTERU2006568, UTERU2006593, UTERU2006643, UTERU2006651, UTERU2006705, UTERU2006899, UTERU2007004, UTERU2007075, UTERU2007081, UTERU2007128, UTERU2007253, UTERU2007267, UTERU2007444, UTERU2007499, UTERU2007639, UTERU2007924, UTERU2007942, UTERU2008018, UTERU2008019, UTERU2008027, UTERU2008040, UTERU2008077, UTERU2008130, UTERU2008302, UTERU2008347, UTERU2008426, UTERU2008516, UTERU2008561, UTERU2008653, UTERU2008705, UTERU2008707, UTERU2008747, UTERU2008785, UTERU2008845, UTERU2008901, UTERU2008930, UTERU2008938, UTERU2008939, UTERU2008962, UTERU2009094, UTERU2009120, UTERU2009131, UTERU2009147, UTERU2009206, UTERU2009283, UTERU2009335, UTERU2009414, UTERU2009435, UTERU2009483, UTERU2009510, UTERU2009538, UTERU2009540, UTERU2009776, UTERU2009904, UTERU2009951, UTERU2009972, UTERU2010115, UTERU2010124, UTERU2010164, UTERU2010226, UTERU2010231, UTERU2010304, UTERU2010320, UTERU2010431, UTERU2010525, UTERU2010651, UTERU2010724, UTERU2010747, UTERU2011195, UTERU2011199, UTERU2011220, UTERU2011261, UTERU2011287, UTERU2011410, UTERU2011574, UTERU2011621, UTERU2011657, UTERU2011741, UTERU2011806, UTERU2011811, UTERU2011897, UTERU2011906, UTERU2011962, UTERU2011968, UTERU2012031, UTERU2012101, UTERU2012114, UTERU2012230, UTERU2012286, UTERU2012333, UTERU2012407, UTERU2012526, UTERU2012581, UTERU2012610, UTERU2012615, UTERU2012688, UTERU2012703, UTERU2012715, UTERU2012741, UTERU2012767, UTERU2012786, UTERU2012856, UTERU2012890, UTERU2012938, UTERU2012976, UTERU2013048, UTERU2013078, UTERU2013231, UTERU2013262, UTERU2013280, UTERU2013322, UTERU2013483, UTERU2013491, UTERU2013502, UTERU2013926, UTERU2013976, UTERU2014001, UTERU2014024, UTERU2014167, UTERU2014223, UTERU2014398, UTERU2014464, UTERU2014548, UTERU2014601, UTERU2014631, UTERU2014668, UTERU2014678, UTERU2014728, UTERU2014898, UTERU2014998, UTERU2015087, UTERU2015190, UTERU2015198, UTERU2015202, UTERU2015405, UTERU2015640, UTERU2015830, UTERU2015880, UTERU2016147, UTERU2016157, UTERU2016426, UTERU2016464, UTERU2016669, UTERU2016757, UTERU2016761, UTERU2016799, UTERU2016822, UTERU2016896, UTERU2016902, UTERU2016979, UTERU2016981, UTERU2017123, UTERU2017303, UTERU2017421, UTERU2017492, UTERU2017613, UTERU2017623, UTERU2017632, UTERU2017761, UTERU2017762, UTERU2017810, UTERU2017988, UTERU2018127, UTERU2018180, UTERU2018200, UTERU2018333, UTERU2018364, UTERU2018514, UTERU2018522, UTERU2018523, UTERU2018544, UTERU2018566, UTERU2018609, UTERU2018674, UTERU2018712, UTERU2018784, UTERU2018789, UTERU2018811, UTERU2018867, UTERU2018881, UTERU2018884, UTERU2018955, UTERU2019005, UTERU2019038, UTERU2019096, UTERU2019163, UTERU2019257, UTERU2019453, UTERU2019491, UTERU2019534, UTERU2019681, UTERU2019706, UTERU2019710, UTERU2019940, UTERU2019959, UTERU2019964, UTERU2020226, UTERU2020242, UTERU2020292, UTERU2020351, UTERU2020491, UTERU2020718, UTERU2021163, UTERU2021380, UTERU2021649, UTERU2021820, UTERU2022020, UTERU2022773, UTERU2022955, UTERU2022981, UTERU2023039, UTERU2023045, UTERU2023175, UTERU2023262, UTERU2023550, UTERU2023651, UTERU2023687, UTERU2023712, UTERU2023941, UTERU2024002, UTERU2024042, UTERU2024141, UTERU2024481, UTERU2024656, UTERU2024758, UTERU2024820, UTERU2024881, UTERU2025025, UTERU2025041, UTERU2025301, UTERU2025366, UTERU2025415, UTERU2025579, UTERU2025645, UTERU2025891, UTERU2026025, UTERU2026090, UTERU2026142, UTERU2026203, UTERU2026775, UTERU2027023, UTERU2027369, UTERU2027591, UTERU2027616, UTERU2027941, UTERU2028377, UTERU2028734, UTERU2029503, UTERU2029660, UTERU2029742, UTERU2029953, UTERU2030213, UTERU2030270, UTERU2030280, UTERU2031060, UTERU2031084, UTERU2031268, UTERU2031295, UTERU2031521, UTERU2031611, UTERU2031703, UTERU2031834, UTERU2031851, UTERU2032075, UTERU2032220, UTERU2032279, UTERU2032726, UTERU2033172, UTERU2033375, UTERU2033382, UTERU2033420, UTERU2033530, UTERU2033577, UTERU2034053, UTERU2034147, UTERU2034695, UTERU2035114, UTERU2035187, UTERU2035231, UTERU2035306, UTERU2035323, UTERU2035328, UTERU2035331, UTERU2035452, UTERU2035469, UTERU2035503, UTERU2035745, UTERU2035908, UTERU2035926, UTERU2035978, UTERU2036089, UTERU2036347, UTERU2036507, UTERU2036512, UTERU2036530, UTERU2036623, UTERU2036690, UTERU2037224, UTERU2037361, UTERU2037423, UTERU2037577, UTERU2037674, UTERU2037791, UTERU2037843, UTERU2038171, UTERU2038251, UTERU3000226, UTERU3000298, UTERU3000402, UTERU3000645, UTERU3000665, UTERU3000670, UTERU3000727, UTERU3000738, UTERU3000828, UTERU3000844, UTERU3000899, UTERU3000959, UTERU3001029, UTERU3001053, UTERU3001059, UTERU3001158, UTERU3001240, UTERU3001394, UTERU3001542, UTERU3001558, UTERU3001571, UTERU3001585, UTERU3001632, UTERU3001652, UTERU3001766, UTERU3001988, UTERU3002209, UTERU3002218, UTERU3002383, UTERU3002600, UTERU3002620, UTERU3002667, UTERU3002701, UTERU3002731, UTERU3002768, UTERU3002786, UTERU3002993, UTERU3003116, UTERU3003135, UTERU3003178, UTERU3003465, UTERU3003495, UTERU3003523, UTERU3003660, UTERU3003774, UTERU3003776, UTERU3004384, UTERU3004418, UTERU3004477, UTERU3004523, UTERU3004616, UTERU3004635, UTERU3004709, UTERU3004938, UTERU3004992, UTERU3005049, UTERU3005159, UTERU3005205, UTERU3005230, UTERU3005264, UTERU3005422, UTERU3005460, UTERU3005536, UTERU3005585, UTERU3005767, UTERU3005907, UTERU3005970, UTERU3006008, UTERU3006228, UTERU3006308, UTERU3006538, UTERU3006640, UTERU3006687, UTERU3006720, UTERU3006798, UTERU3006884, UTERU3007021, UTERU3007104, UTERU3007108, UTERU3007134, UTERU3007419, UTERU3007640, UTERU3007731, UTERU3007913, UTERU3008280, UTERU3008463, UTERU3008660, UTERU3008671, UTERU3008722, UTERU3008917, UTERU3009259, UTERU3009490, UTERU3009517, UTERU3009690, UTERU3009775, UTERU3009871, UTERU3009979, UTERU3009987, UTERU3010029, UTERU3010409, UTERU3010526, UTERU3010604, UTERU3010892, UTERU3010919, UTERU3011063, UTERU3011092, UTERU3011273, UTERU3011398, UTERU3011558, UTERU3011579, UTERU3011795, UTERU3011837, UTERU3012293, UTERU3012414, UTERU3012476, UTERU3012599, UTERU3012999, UTERU3013167, UTERU3013302, UTERU3013781, UTERU3014274, UTERU3014446, UTERU3014611, UTERU3014647, UTERU3014791, UTERU3014906, UTERU3015011, UTERU3015086, UTERU3015299, UTERU3015412, UTERU3015500, UTERU3015647, UTERU3015844, UTERU3016070, UTERU3016273, UTERU3016274, UTERU3016308, UTERU3016789, UTERU3017176, UTERU3017441, UTERU3017626, UTERU3017995, UTERU3018154, UTERU3018172, UTERU3018255, UTERU3018616, UTERU3018711, UTERU3019078

[0672] Of the 17,176 genes that include the cDNAs of the present invention, genes whose expression levels were high enough to detect in each of the BGGI1, BLADE, BNGH4, BRACE, BRALZ, BRAMY, and BRASW libraries were analyzed for expression frequency. The analysis results are described below. Each is a relative value, where the expression level over all tissues is taken as 100. The larger this value, the greater the level of expression.

TABLE 27

| Clone Name | BGGI1 | BLADE | BNGH4 | BRACE | BRALZ | BRAMY | BRASW |
|---|---|---|---|---|---|---|---|
| 3NB691000085 | 0 | 0 | 0 | 6.145 | 0 | 0 | 0 |
| 3NB691000116 | 0 | 0 | 0 | 0 | 0 | 1.639 | 0 |
| 3NB691000173 | 0 | 5.542 | 0 | 0 | 5.706 | 0 | 0 |
| 3NB692000281 | 0 | 0 | 0 | 0 | 0 | 0.444 | 0 |
| 3NB692000330 | 0 | 0 | 0 | 0.626 | 0 | 0 | 0 |
| 3NB692000374 | 0 | 0 | 0 | 2.309 | 3.919 | 2.185 | 0 |
| 3NB692000545 | 0 | 0 | 0 | 2.002 | 0 | 0 | 0 |
| 3NB692000912 | 0 | 0 | 0 | 1.667 | 0 | 0.947 | 0 |
| 3NB692001022 | 0 | 8.733 | 0 | 2.649 | 4.496 | 0 | 0 |
| 3NB692001288 | 0 | 0 | 0 | 2.127 | 10.827 | 3.019 | 0 |
| 3NB692001334 | 0 | 0 | 0 | 1.334 | 9.699 | 0.270 | 0 |
| 3NB692001442 | 0 | 0 | 0 | 0.857 | 0 | 0 | 0 |
| 3NB692001496 | 0 | 0 | 0 | 10.926 | 0 | 0 | 0 |
| 3NB692001719 | 0 | 0 | 0 | 9.777 | 0 | 0 | 0 |
| 3NB692001853 | 0 | 0 | 0 | 1.859 | 0 | 0 | 0 |
| 3NB692002051 | 0 | 0 | 0 | 6.063 | 0 | 0 | 0 |
| ADRGL1000002 | 0 | 0 | 0 | 3.506 | 0 | 1.659 | 0 |
| ADRGL1000018 | 0 | 0 | 0 | 17.162 | 0 | 0 | 0 |
| ADRGL1000033 | 0 | 0 | 29.445 | 0 | 0 | 0 | 0 |
| ADRGL1000065 | 0 | 0 | 0 | 4.003 | 0 | 5.682 | 0 |
| ADRGL2000006 | 0 | 0 | 0 | 4.427 | 0 | 0 | 0 |
| ADRGL2000042 | 0 | 0 | 19.585 | 7.210 | 0 | 5.118 | 0 |
| ADRGL2000074 | 0 | 0 | 0 | 0 | 0 | 14.813 | 0 |
| ADRGL2000097 | 0 | 0 | 0 | 0 | 0 | 2.240 | 0 |
| ADRGL2000328 | 0 | 0 | 0 | 9.556 | 0 | 0 | 0 |
| ADRGL2000644 | 0 | 0 | 0 | 0 | 38.408 | 0 | 0 |
| ADRGL2001830 | 0 | 0 | 0 | 8.483 | 0 | 0 | 0 |
| ADRGL2002013 | 0 | 0 | 0 | 19.155 | 0 | 0 | 0 |
| ADRGL2002191 | 0 | 0 | 0 | 0 | 0 | 12.881 | 0 |
| ADRGL2002477 | 0 | 0 | 0 | 0 | 0 | 1.714 | 0 |
| ADRGL2007313 | 0 | 0 | 0 | 6.955 | 0 | 0 | 0 |
| ADRGL2007906 | 0 | 0 | 0 | 0 | 0 | 9.081 | 0 |
| ADRGL2007974 | 0 | 0 | 0 | 0 | 0 | 14.813 | 0 |
| ADRGL2008966 | 0 | 0 | 0 | 0 | 0 | 14.813 | 0 |
| ADRGL2009146 | 0 | 0 | 0 | 10.913 | 0 | 0 | 0 |
| ADRGL2009273 | 0 | 0 | 0 | 1.972 | 0 | 0 | 0 |
| ADRGL2010152 | 0 | 0 | 0 | 8.223 | 0 | 0 | 0 |
| ADRGL2012038 | 0 | 0 | 0 | 1.459 | 0 | 0 | 0 |
| ASTRO2000014 | 0 | 0 | 0 | 0.291 | 0 | 0.828 | 0 |
| ASTRO2000046 | 0 | 0 | 0 | 0.579 | 0 | 3.289 | 0 |
| ASTRO2000141 | 0 | 0 | 0 | 0 | 0 | 3.060 | 0 |
| ASTRO2000381 | 0 | 0 | 48.430 | 0 | 0 | 0 | 0 |
| ASTRO2000480 | 0 | 0 | 0 | 8.038 | 0 | 0 | 0 |
| ASTRO2001029 | 0 | 0 | 0 | 0.890 | 0 | 2.527 | 0 |
| ASTRO2001107 | 0 | 0 | 0 | 5.184 | 0 | 14.720 | 0 |
| ASTRO2001806 | 0 | 20.083 | 0 | 2.031 | 0 | 0 | 0 |
| ASTRO2001823 | 0 | 0 | 0 | 2.061 | 0 | 2.925 | 0 |
| ASTRO2002024 | 0 | 0 | 0 | 0 | 0 | 13.210 | 0 |
| ASTRO2002459 | 0 | 0 | 0 | 0.621 | 0 | 0.882 | 0 |
| ASTRO2002693 | 0 | 49.753 | 0 | 0 | 0 | 0 | 0 |
| ASTRO2002733 | 0 | 0 | 0 | 0 | 0 | 31.003 | 0 |
| ASTRO2003024 | 0 | 0 | 0 | 0.673 | 3.425 | 2.865 | 0 |
| ASTRO2003212 | 0 | 0 | 0 | 10.632 | 0 | 0 | 0 |
| ASTRO2003316 | 0 | 0 | 0 | 2.094 | 0 | 0 | 0 |
| ASTRO2003461 | 0 | 0 | 0 | 4.228 | 0 | 0 | 0 |
| ASTRO2003840 | 0 | 0 | 47.769 | 4.396 | 0 | 6.241 | 0 |
| ASTRO2003960 | 0 | 0 | 0 | 17.003 | 0 | 0 | 0 |
| ASTRO2004032 | 0 | 0 | 0 | 4.326 | 0 | 0 | 0 |
| ASTRO2004177 | 0 | 0 | 0 | 17.003 | 0 | 0 | 0 |
| ASTRO2004974 | 0 | 0 | 0 | 2.758 | 0 | 1.958 | 0 |
| ASTRO2005423 | 0 | 0 | 0 | 4.888 | 0 | 6.939 | 0 |
| ASTRO2005553 | 0 | 0 | 0 | 0 | 0 | 2.611 | 0 |
| ASTRO2006475 | 0 | 0 | 0 | 0 | 0 | 7.505 | 0 |
| ASTRO2007047 | 0 | 0 | 0 | 4.450 | 0 | 2.106 | 0 |
| ASTRO2007948 | 0 | 0 | 0 | 3.555 | 0 | 2.523 | 0 |
| ASTRO2008216 | 0 | 0 | 0 | 0 | 0 | 3.215 | 0 |
| ASTRO2010819 | 0 | 0 | 0 | 6.686 | 0 | 3.390 | 0 |
| ASTRO2011422 | 0 | 0 | 0 | 5.149 | 0 | 0 | 0 |
| ASTRO2012552 | 0 | 0 | 0 | 1.049 | 0 | 0 | 0 |
| ASTRO2013585 | 0 | 3.422 | 3.759 | 0.346 | 0 | 0.491 | 0 |
| ASTRO2014392 | 0 | 0 | 0 | 0 | 0 | 14.891 | 0 |
| ASTRO2014498 | 0 | 0 | 0 | 38.064 | 0 | 0 | 0 |
| ASTRO2014561 | 0 | 0 | 0 | 0 | 0 | 8.880 | 0 |
| ASTRO2014576 | 0 | 0 | 0 | 0 | 0 | 11.388 | 0 |
| ASTRO2014863 | 0 | 23.712 | 0 | 2.398 | 0 | 0 | 0 |
| ASTRO2015328 | 0 | 0 | 0 | 2.701 | 0 | 3.835 | 0 |
| ASTRO2016491 | 0 | 0 | 0 | 0.357 | 0 | 2.030 | 0 |
| ASTRO2016819 | 0 | 0 | 0 | 4.580 | 0 | 0 | 0 |
| ASTRO2018169 | 0 | 0 | 0 | 0 | 0 | 0.952 | 0 |
| ASTRO2018540 | 0 | 0 | 0 | 0 | 0 | 1.567 | 0 |
| ASTRO2019171 | 0 | 0 | 0 | 38.064 | 0 | 0 | 0 |
| BGGI11000123 | 21.967 | 0 | 0 | 1.492 | 0 | 0.706 | 0 |
| BGGI11000193 | 93.562 | 0 | 0 | 0 | 0 | 0 | 0 |
| BGGI11000285 | 100 | 0 | 0 | 0 | 0 | 0 | 0 |
| BGGI12000022 | 100 | 0 | 0 | 0 | 0 | 0 | 0 |
| BGGI12000054 | 7.382 | 0 | 0 | 0.167 | 2.553 | 1.187 | 0 |
| BGGI12000067 | 100 | 0 | 0 | 0 | 0 | 0 | 0 |
| BGGI12000161 | 100 | 0 | 0 | 0 | 0 | 0 | 0 |
| BGGI12000533 | 70.764 | 0 | 0 | 0 | 0 | 0 | 0 |
| BGGI12000544 | 100 | 0 | 0 | 0 | 0 | 0 | 0 |
| BGGI12000616 | 28.025 | 0 | 0 | 1.269 | 0 | 0.901 | 0 |
| BGGI12000684 | 77.334 | 0 | 0 | 0 | 0 | 0 | 0 |
| BGGI12000693 | 59.168 | 0 | 0 | 0 | 0 | 0 | 0 |
| BGGI12000839 | 23.115 | 0 | 0 | 0 | 7.994 | 0 | 0 |
| BGGI12001002 | 55.645 | 0 | 0 | 0 | 6.414 | 0 | 0 |
| BGGI12001075 | 62.049 | 0 | 0 | 0 | 0 | 0 | 0 |
| BGGI12001097 | 35.225 | 0 | 17.333 | 0 | 0 | 1.132 | 0 |
| BGGI12001241 | 100 | 0 | 0 | 0 | 0 | 0 | 0 |
| BGGI12001247 | 100 | 0 | 0 | 0 | 0 | 0 | 0 |
| BGGI12001682 | 32.371 | 0 | 0 | 3.665 | 3.732 | 3.122 | 0 |
| BGGI12001714 | 79.939 | 0 | 0 | 0 | 0 | 0 | 0 |
| BLADE1000176 | 0 | 83.178 | 0 | 16.822 | 0 | 0 | 0 |
| BLADE2000181 | 0 | 100 | 0 | 0 | 0 | 0 | 0 |
| BLADE2000256 | 0 | 80.138 | 0 | 0 | 0 | 0 | 0 |
| BLADE2000340 | 0 | 100 | 0 | 0 | 0 | 0 | 0 |
| BLADE2000389 | 0 | 100 | 0 | 0 | 0 | 0 | 0 |
| BLADE2000463 | 0 | 100 | 0 | 0 | 0 | 0 | 0 |
| BLADE2000492 | 0 | 24.632 | 0 | 0 | 0 | 0 | 0 |
| BLADE2000579 | 0 | 100 | 0 | 0 | 0 | 0 | 0 |
| BLADE2000640 | 0 | 100 | 0 | 0 | 0 | 0 | 0 |
| BLADE2000866 | 0 | 100 | 0 | 0 | 0 | 0 | 0 |
| BLADE2000938 | 0 | 100 | 0 | 0 | 0 | 0 | 0 |
| BLADE2001031 | 0 | 100 | 0 | 0 | 0 | 0 | 0 |
| BLADE2001133 | 0 | 100 | 0 | 0 | 0 | 0 | 0 |
| BLADE2001138 | 0 | 100 | 0 | 0 | 0 | 0 | 0 |
| BLADE2001141 | 0 | 100 | 0 | 0 | 0 | 0 | 0 |
| BLADE2001371 | 0 | 87.309 | 0 | 0 | 0 | 0 | 0 |
| BLADE2001458 | 0 | 100 | 0 | 0 | 0 | 0 | 0 |
| BLADE2001575 | 0 | 66.545 | 0 | 0 | 0 | 0 | 0 |
| BLADE2001753 | 0 | 100 | 0 | 0 | 0 | 0 | 0 |
| BLADE2001935 | 0 | 100 | 0 | 0 | 0 | 0 | 0 |
| BLADE2001940 | 0 | 100 | 0 | 0 | 0 | 0 | 0 |
| BLADE2001987 | 0 | 100 | 0 | 0 | 0 | 0 | 0 |
| BLADE2002073 | 0 | 100 | 0 | 0 | 0 | 0 | 0 |
| BLADE2002310 | 0 | 100 | 0 | 0 | 0 | 0 | 0 |
| BLADE2002730 | 0 | 91.480 | 0 | 0 | 0 | 0 | 0 |
| BLADE2002738 | 0 | 86.356 | 0 | 0 | 0 | 0 | 0 |
| BLADE2002744 | 0 | 17.131 | 0 | 0 | 0 | 0 | 0 |
| BLADE2002782 | 0 | 100 | 0 | 0 | 0 | 0 | 0 |
| BLADE2002947 | 0 | 100 | 0 | 0 | 0 | 0 | 0 |
| BLADE2002972 | 0 | 100 | 0 | 0 | 0 | 0 | 0 |
| BLADE2003474 | 0 | 100 | 0 | 0 | 0 | 0 | 0 |
| BLADE2003916 | 0 | 100 | 0 | 0 | 0 | 0 | 0 |
| BLADE2004089 | 0 | 69.556 | 0 | 7.034 | 0 | 0 | 0 |
| BLADE2004345 | 0 | 100 | 0 | 0 | 0 | 0 | 0 |
| BLADE2004389 | 0 | 100 | 0 | 0 | 0 | 0 | 0 |
| BLADE2004462 | 0 | 100 | 0 | 0 | 0 | 0 | 0 |
| BLADE2004628 | 0 | 100 | 0 | 0 | 0 | 0 | 0 |
| BLADE2004670 | 0 | 100 | 0 | 0 | 0 | 0 | 0 |
| BLADE2004722 | 0 | 70.250 | 0 | 0 | 0 | 0 | 0 |
| BLADE2004849 | 0 | 52.024 | 0 | 0 | 0 | 0 | 0 |
| BLADE2005036 | 0 | 100 | 0 | 0 | 0 | 0 | 0 |
| BLADE2005038 | 0 | 100 | 0 | 0 | 0 | 0 | 0 |
| BLADE2005229 | 0 | 100 | 0 | 0 | 0 | 0 | 0 |
| BLADE2005459 | 0 | 100 | 0 | 0 | 0 | 0 | 0 |
| BLADE2005792 | 0 | 100 | 0 | 0 | 0 | 0 | 0 |
| BLADE2006043 | 0 | 100 | 0 | 0 | 0 | 0 | 0 |
| BLADE2006412 | 0 | 42.615 | 0 | 4.309 | 0 | 0 | 0 |
| BLADE2006415 | 0 | 100 | 0 | 0 | 0 | 0 | 0 |
| BLADE2006607 | 0 | 100 | 0 | 0 | 0 | 0 | 0 |
| BLADE2006826 | 0 | 100 | 0 | 0 | 0 | 0 | 0 |
| BLADE2006830 | 0 | 11.799 | 0 | 2.386 | 0 | 0 | 0 |
| BLADE2006849 | 0 | 100 | 0 | 0 | 0 | 0 | 0 |
| BLADE2006947 | 0 | 100 | 0 | 0 | 0 | 0 | 0 |
| BLADE2007033 | 0 | 100 | 0 | 0 | 0 | 0 | 0 |
| BLADE2007043 | 0 | 87.530 | 0 | 0 | 0 | 0 | 0 |
| BLADE2007589 | 0 | 34.697 | 0 | 0 | 0 | 0 | 0 |
| BLADE2007666 | 0 | 23.913 | 0 | 0 | 0 | 0 | 0 |
| BLADE2007722 | 0 | 100 | 0 | 0 | 0 | 0 | 0 |
| BLADE2007735 | 0 | 100 | 0 | 0 | 0 | 0 | 0 |
| BLADE2007744 | 0 | 100 | 0 | 0 | 0 | 0 | 0 |
| BLADE2007799 | 0 | 100 | 0 | 0 | 0 | 0 | 0 |
| BLADE2007923 | 0 | 100 | 0 | 0 | 0 | 0 | 0 |
| BLADE2007935 | 0 | 87.309 | 0 | 0 | 0 | 0 | 0 |
| BLADE2007958 | 0 | 100 | 0 | 0 | 0 | 0 | 0 |
| BLADE2008281 | 0 | 100 | 0 | 0 | 0 | 0 | 0 |
| BLADE2008398 | 0 | 43.522 | 0 | 4.401 | 0 | 0 | 0 |
| BLADE2008454 | 0 | 100 | 0 | 0 | 0 | 0 | 0 |
| BLADE2008461 | 0 | 17.399 | 0 | 0 | 0 | 2.498 | 0 |
| BLADE2008479 | 0 | 100 | 0 | 0 | 0 | 0 | 0 |
| BLADE2008539 | 0 | 100 | 0 | 0 | 0 | 0 | 0 |
| BLADE2008809 | 0 | 100 | 0 | 0 | 0 | 0 | 0 |
| BLADE2008995 | 0 | 100 | 0 | 0 | 0 | 0 | 0 |
| BLADE2009452 | 0 | 100 | 0 | 0 | 0 | 0 | 0 |
| BLADE2009479 | 0 | 100 | 0 | 0 | 0 | 0 | 0 |
| BLADE2009593 | 0 | 100 | 0 | 0 | 0 | 0 | 0 |
| BNGH41000098 | 0 | 0 | 19.548 | 0 | 0 | 2.554 | 0 |
| BNGH41000104 | 0 | 0 | 57.747 | 0 | 0 | 0 | 0 |
| BNGH41000118 | 0 | 0 | 100 | 0 | 0 | 0 | 0 |
| BNGH41000137 | 0 | 0 | 33.459 | 3.079 | 0 | 8.743 | 0 |
| BNGH41000153 | 0 | 0 | 36.238 | 0 | 0 | 4.735 | 0 |
| BNGH41000169 | 0 | 0 | 100 | 0 | 0 | 0 | 0 |
| BNGH41000177 | 0 | 0 | 53.617 | 0 | 0 | 0 | 0 |
| BNGH41000190 | 0 | 0 | 19.514 | 3.592 | 0 | 0 | 0 |
| BNGH41000198 | 0 | 0 | 16.022 | 0 | 0 | 2.093 | 0 |
| BNGH41000216 | 0 | 0 | 100 | 0 | 0 | 0 | 0 |
| BNGH41000235 | 0 | 0 | 50.263 | 0 | 0 | 0 | 0 |
| BNGH42000130 | 0 | 0 | 8.077 | 0 | 0 | 0 | 0 |
| BNGH42000132 | 0 | 0 | 100 | 0 | 0 | 0 | 0 |
| BNGH42000360 | 0 | 0 | 2.426 | 0.223 | 2.273 | 0.158 | 0 |
| BNGH42000405 | 0 | 0 | 100 | 0 | 0 | 0 | 0 |
| BNGH42000532 | 0 | 0 | 72.929 | 0 | 0 | 0 | 0 |
| BNGH42000675 | 0 | 0 | 100 | 0 | 0 | 0 | 0 |
| BNGH42000739 | 0 | 0 | 4.798 | 10.598 | 2.248 | 6.896 | 0 |
| BNGH42000791 | 0 | 0 | 100 | 0 | 0 | 0 | 0 |
| BNGH42000815 | 0 | 0 | 67.530 | 0 | 0 | 0 | 0 |
| BNGH42000994 | 0 | 0 | 100 | 0 | 0 | 0 | 0 |
| BNGH42001247 | 0 | 0 | 40.570 | 3.734 | 0 | 0 | 0 |
| BNGH42001406 | 0 | 0 | 52.989 | 0 | 0 | 0 | 0 |
| BNGH42001576 | 0 | 0 | 37.628 | 0 | 0 | 0 | 0 |
| BNGH42001724 | 0 | 0 | 100 | 0 | 0 | 0 | 0 |
| BNGH42002168 | 0 | 9.339 | 10.261 | 0.944 | 0 | 1.341 | 0 |
| BNGH42002244 | 0 | 0 | 100 | 0 | 0 | 0 | 0 |
| BNGH42002387 | 0 | 0 | 81.396 | 0 | 0 | 0 | 0 |
| BNGH42002487 | 0 | 0 | 72.180 | 0 | 0 | 0 | 0 |
| BNGH42002489 | 0 | 0 | 100 | 0 | 0 | 0 | 0 |
| BNGH42003529 | 0 | 0 | 100 | 0 | 0 | 0 | 0 |
| BNGH42003570 | 0 | 0 | 100 | 0 | 0 | 0 | 0 |
| BNGH42003641 | 0 | 0 | 100 | 0 | 0 | 0 | 0 |
| BNGH42004076 | 0 | 0 | 100 | 0 | 0 | 0 | 0 |
| BNGH42004291 | 0 | 0 | 100 | 0 | 0 | 0 | 0 |
| BNGH42004538 | 0 | 0 | 100 | 0 | 0 | 0 | 0 |
| BNGH42004679 | 0 | 0 | 92.186 | 0 | 0 | 0 | 0 |
| BNGH42005017 | 0 | 0 | 67.530 | 0 | 0 | 0 | 0 |
| BNGH42005235 | 0 | 0 | 100 | 0 | 0 | 0 | 0 |
| BNGH42005504 | 0 | 0 | 100 | 0 | 0 | 0 | 0 |
| BNGH42005968 | 0 | 0 | 17.713 | 0 | 0 | 0 | 0 |
| BNGH42006135 | 0 | 0 | 5.091 | 3.749 | 0 | 2.661 | 0 |
| BNGH42006226 | 0 | 0 | 88.444 | 0 | 0 | 11.556 | 0 |
| BNGH42006234 | 0 | 0 | 100 | 0 | 0 | 0 | 0 |
| BNGH42007037 | 0 | 0 | 95.934 | 0 | 0 | 0 | 0 |
| BNGH42007366 | 0 | 0 | 49.317 | 0 | 0 | 0 | 0 |
| BNGH42007460 | 31.586 | 0 | 7.771 | 2.861 | 0 | 3.046 | 0 |
| BNGH42007594 | 0 | 0 | 100 | 0 | 0 | 0 | 0 |
| BNGH42007709 | 7.215 | 1.616 | 1.775 | 0 | 3.327 | 0.464 | 0 |
| BNGH42007788 | 0 | 0 | 23.740 | 0 | 0 | 0 | 0 |
| BNGH42007798 | 0 | 0 | 75.734 | 0 | 0 | 0 | 0 |
| BNGH42008199 | 0 | 0 | 100 | 0 | 0 | 0 | 0 |
| BNGH42008510 | 0 | 0 | 100 | 0 | 0 | 0 | 0 |
| BNGH42008603 | 0 | 0 | 11.154 | 3.080 | 0 | 5.829 | 0 |
| BNGH42008649 | 0 | 0 | 100 | 0 | 0 | 0 | 0 |
| BNGH42008743 | 0 | 0 | 11.872 | 2.185 | 0 | 0 | 0 |
| BNGH42008832 | 0 | 0 | 100 | 0 | 0 | 0 | 0 |
| BNGH42008850 | 0 | 0 | 81.250 | 0 | 0 | 0 | 0 |
| BNGH42008943 | 0 | 0 | 64.079 | 5.898 | 30.024 | 0 | 0 |
| BNGH42009021 | 0 | 0 | 100 | 0 | 0 | 0 | 0 |
| BNGH42009025 | 0 | 0 | 10.751 | 3.958 | 0 | 1.405 | 0 |
| BRACE1000020 | 0 | 0 | 0 | 7.989 | 0 | 0 | 0 |
| BRACE1000042 | 0 | 0 | 0 | 5.402 | 0 | 6.135 | 0 |
| BRACE1000047 | 0 | 0 | 0 | 100 | 0 | 0 | 0 |
| BRACE1000051 | 0 | 0 | 0 | 50.891 | 0 | 0 | 0 |
| BRACE1000065 | 0 | 0 | 0 | 56.141 | 0 | 0 | 0 |
| BRACE1000070 | 0 | 0 | 0 | 1.269 | 0 | 0 | 0 |
| BRACE1000073 | 0 | 0 | 0 | 5.985 | 15.235 | 0 | 0 |
| BRACE1000084 | 0 | 0 | 0 | 100 | 0 | 0 | 0 |
| BRACE1000087 | 0 | 0 | 0 | 10.415 | 0 | 0 | 0 |
| BRACE1000092 | 0 | 0 | 0 | 100 | 0 | 0 | 0 |
| BRACE1000093 | 0 | 0 | 0 | 27.755 | 0 | 0 | 0 |
| BRACE1000101 | 0 | 0 | 0 | 7.942 | 40.434 | 11.275 | 0 |
| BRACE1000114 | 0 | 0 | 0 | 100 | 0 | 0 | 0 |
| BRACE1000115 | 0 | 0 | 0 | 2.790 | 6.764 | 0.754 | 70.707 |
| BRACE1000124 | 0 | 0 | 0 | 100 | 0 | 0 | 0 |
| BRACE1000131 | 0 | 0 | 0 | 1.479 | 0 | 0 | 0 |
| BRACE1000132 | 0 | 0 | 0 | 10.195 | 0 | 14.473 | 0 |
| BRACE1000159 | 0 | 0 | 0 | 5.242 | 13.343 | 0 | 0 |
| BRACE1000166 | 0 | 0 | 0 | 45.981 | 0 | 0 | 0 |
| BRACE1000169 | 0 | 0 | 0 | 28.778 | 0 | 0 | 0 |
| BRACE1000186 | 0 | 0 | 0 | 1.535 | 0 | 0 | 0 |
| BRACE1000187 | 0 | 0 | 0 | 9.578 | 9.752 | 0 | 0 |
| BRACE1000239 | 0 | 0 | 0 | 28.128 | 0 | 0 | 0 |
| BRACE1000258 | 0 | 0 | 0 | 68.044 | 0 | 0 | 0 |
| BRACE1000451 | 0 | 0 | 0 | 100 | 0 | 0 | 0 |
| BRACE1000475 | 0 | 0 | 0 | 100 | 0 | 0 | 0 |
| BRACE1000572 | 0 | 0 | 0 | 100 | 0 | 0 | 0 |
| BRACE2000061 | 0 | 0 | 0 | 27.821 | 0 | 39.495 | 0 |
| BRACE2000077 | 0 | 0 | 0 | 68.470 | 0 | 0 | 0 |
| BRACE2000078 | 0 | 0 | 0 | 3.177 | 0 | 0 | 0 |
| BRACE2000100 | 0 | 0 | 0 | 100 | 0 | 0 | 0 |
| BRACE2000109 | 0 | 0 | 0 | 39.025 | 0 | 0 | 0 |
| BRACE2000141 | 0 | 0 | 0 | 12.327 | 0 | 17.500 | 0 |
| BRACE2000148 | 0 | 0 | 0 | 2.534 | 0 | 0 | 0 |
| BRACE2000183 | 0 | 0 | 0 | 3.254 | 0 | 0 | 0 |
| BRACE2000229 | 0 | 0 | 0 | 9.165 | 0 | 0 | 0 |
| BRACE2000232 | 0 | 0 | 0 | 100 | 0 | 0 | 0 |
| BRACE2000245 | 0 | 0 | 0 | 6.277 | 0 | 8.911 | 0 |
| BRACE2000256 | 0 | 0 | 0 | 100 | 0 | 0 | 0 |
| BRACE2000266 | 0 | 0 | 0 | 100 | 0 | 0 | 0 |
| BRACE2000267 | 0 | 0 | 0 | 28.458 | 48.292 | 0 | 0 |
| BRACE2000280 | 0 | 0 | 0 | 13.302 | 0 | 0 | 0 |
| BRACE2000300 | 0 | 0 | 0 | 3.773 | 0 | 5.356 | 0 |
| BRACE2000307 | 0 | 0 | 0 | 20.064 | 0 | 0 | 0 |
| BRACE2000331 | 0 | 0 | 0 | 41.512 | 0 | 0 | 0 |
| BRACE2000332 | 0 | 19.052 | 0 | 3.853 | 0 | 0 | 0 |
| BRACE2000347 | 0 | 0 | 0 | 3.670 | 0 | 2.605 | 0 |
| BRACE2000351 | 0 | 0 | 0 | 100 | 0 | 0 | 0 |
| BRACE2000368 | 0 | 0 | 0 | 100 | 0 | 0 | 0 |
| BRACE2000392 | 0 | 0 | 0 | 100 | 0 | 0 | 0 |
| BRACE2000441 | 0 | 0 | 0 | 100 | 0 | 0 | 0 |
| BRACE2000487 | 0 | 57.595 | 0 | 5.824 | 0 | 0 | 0 |
| BRACE2000489 | 0 | 0 | 0 | 100 | 0 | 0 | 0 |
| BRACE2000505 | 0 | 0 | 0 | 8.673 | 0 | 0 | 0 |
| BRACE2000525 | 0 | 0 | 0 | 8.072 | 5.871 | 1.637 | 0 |
| BRACE2000526 | 0 | 0 | 0 | 100 | 0 | 0 | 0 |
| BRACE2000531 | 0 | 0 | 0 | 100 | 0 | 0 | 0 |
| BRACE2000545 | 0 | 0 | 0 | 100 | 0 | 0 | 0 |
| BRACE2000553 | 0 | 0 | 0 | 100 | 0 | 0 | 0 |
| BRACE2000565 | 0 | 0 | 0 | 15.271 | 0 | 7.226 | 0 |
| BRACE2000577 | 0 | 0 | 0 | 52.057 | 0 | 0 | 0 |
| BRACE2000640 | 0 | 0 | 0 | 100 | 0 | 0 | 0 |
| BRACE2000650 | 0 | 0 | 0 | 100 | 0 | 0 | 0 |
| BRACE2000677 | 0 | 0 | 0 | 100 | 0 | 0 | 0 |
| BRACE2000698 | 0 | 0 | 0 | 6.107 | 0 | 0 | 0 |
| BRACE2000718 | 0 | 0 | 0 | 100 | 0 | 0 | 0 |
| BRACE2000733 | 0 | 0 | 0 | 12.509 | 0 | 0 | 0 |
| BRACE2000743 | 0 | 0 | 0 | 100 | 0 | 0 | 0 |
| BRACE2000750 | 0 | 0 | 0 | 14.608 | 0 | 0 | 0 |
| BRACE2000753 | 0 | 0 | 0 | 21.618 | 0 | 0 | 0 |
| BRACE2000815 | 0 | 0 | 0 | 100 | 0 | 0 | 0 |
| BRACE2000864 | 0 | 0 | 0 | 2.997 | 0 | 4.254 | 0 |
| BRACE2000885 | 0 | 0 | 0 | 52.057 | 0 | 0 | 0 |
| BRACE2000893 | 0 | 0 | 0 | 35.283 | 0 | 0 | 0 |
| BRACE2000905 | 0 | 0 | 0 | 100 | 0 | 0 | 0 |
| BRACE2000936 | 0 | 0 | 0 | 100 | 0 | 0 | 0 |
| BRACE2000947 | 0 | 0 | 0 | 100 | 0 | 0 | 0 |
| BRACE2000965 | 0 | 0 | 0 | 100 | 0 | 0 | 0 |
| BRACE2000969 | 0 | 0 | 0 | 16.214 | 0 | 0 | 0 |
| BRACE2000975 | 0 | 0 | 0 | 15.004 | 0 | 7.100 | 0 |
| BRACE2000988 | 0 | 0 | 0 | 100 | 0 | 0 | 0 |
| BRACE2001017 | 0 | 0 | 0 | 100 | 0 | 0 | 0 |
| BRACE2001065 | 0 | 0 | 0 | 4.713 | 47.986 | 0 | 0 |
| BRACE2001070 | 0 | 0 | 0 | 16.015 | 0 | 0 | 0 |
| BRACE2001094 | 0 | 0 | 0 | 100 | 0 | 0 | 0 |
| BRACE2001107 | 0 | 0 | 0 | 10.447 | 53.184 | 0 | 0 |
| BRACE2001117 | 0 | 0 | 0 | 3.904 | 9.938 | 0 | 0 |
| BRACE2001143 | 0 | 0 | 0 | 3.163 | 0 | 2.994 | 0 |
| BRACE2001151 | 0 | 0 | 0 | 4.581 | 0 | 0 | 0 |
| BRACE2001154 | 0 | 0 | 0 | 7.541 | 0 | 0 | 0 |
| BRACE2001188 | 0 | 19.813 | 0 | 2.004 | 10.200 | 0 | 0 |
| BRACE2001191 | 0 | 0 | 0 | 100 | 0 | 0 | 0 |
| BRACE2001197 | 0 | 0 | 0 | 41.027 | 0 | 0 | 0 |
| BRACE2001236 | 0 | 0 | 0 | 12.771 | 0 | 0 | 0 |
| BRACE2001239 | 0 | 0 | 0 | 100 | 0 | 0 | 0 |
| BRACE2001269 | 0 | 0 | 0 | 100 | 0 | 0 | 0 |
| BRACE2001312 | 0 | 0 | 0 | 100 | 0 | 0 | 0 |
| BRACE2001313 | 0 | 0 | 0 | 21.618 | 0 | 0 | 0 |
| BRACE2001330 | 0 | 0 | 0 | 100 | 0 | 0 | 0 |
| BRACE2001340 | 0 | 0 | 0 | 100 | 0 | 0 | 0 |
| BRACE2001352 | 0 | 0 | 0 | 100 | 0 | 0 | 0 |
| BRACE2001353 | 0 | 0 | 0 | 100 | 0 | 0 | 0 |
| BRACE2001374 | 0 | 0 | 0 | 41.329 | 0 | 58.671 | 0 |
| BRACE2001375 | 0 | 0 | 0 | 100 | 0 | 0 | 0 |
| BRACE2001423 | 0 | 0 | 0 | 100 | 0 | 0 | 0 |
| BRACE2001424 | 0 | 0 | 0 | 100 | 0 | 0 | 0 |
| BRACE2001445 | 0 | 0 | 0 | 100 | 0 | 0 | 0 |
| BRACE2001453 | 0 | 0 | 0 | 100 | 0 | 0 | 0 |
| BRACE2001455 | 0 | 0 | 0 | 100 | 0 | 0 | 0 |
| BRACE2001477 | 0 | 0 | 0 | 4.882 | 0 | 6.931 | 0 |
| BRACE2001492 | 0 | 0 | 0 | 100 | 0 | 0 | 0 |
| BRACE2001496 | 0 | 0 | 0 | 6.887 | 17.530 | 4.888 | 0 |
| BRACE2001497 | 0 | 0 | 0 | 2.645 | 0 | 3.755 | 0 |
| BRACE2001508 | 0 | 0 | 0 | 12.511 | 0 | 0 | 0 |
| BRACE2001534 | 0 | 0 | 0 | 4.379 | 0 | 0 | 0 |
| BRACE2001543 | 0 | 0 | 0 | 100 | 0 | 0 | 0 |
| BRACE2001564 | 0 | 0 | 0 | 68.470 | 0 | 0 | 0 |
| BRACE2001588 | 0 | 0 | 0 | 100 | 0 | 0 | 0 |
| BRACE2001607 | 0 | 0 | 0 | 100 | 0 | 0 | 0 |
| BRACE2001626 | 0 | 0 | 0 | 100 | 0 | 0 | 0 |
| BRACE2001673 | 0 | 0 | 0 | 1.498 | 2.541 | 0.236 | 88.558 |
| BRACE2001677 | 0 | 0 | 0 | 100 | 0 | 0 | 0 |
| BRACE2001692 | 0 | 0 | 0 | 0.860 | 0 | 0 | 0 |
| BRACE2001705 | 0 | 0 | 0 | 100 | 0 | 0 | 0 |
| BRACE2001709 | 0 | 0 | 0 | 4.607 | 11.727 | 0 | 0 |
| BRACE2001711 | 0 | 0 | 0 | 8.283 | 0 | 0 | 0 |
| BRACE2001726 | 0 | 0 | 0 | 25.113 | 0 | 35.650 | 0 |
| BRACE2001733 | 0 | 0 | 0 | 100 | 0 | 0 | 0 |
| BRACE2001737 | 0 | 0 | 0 | 100 | 0 | 0 | 0 |
| BRACE2001742 | 0 | 0 | 0 | 100 | 0 | 0 | 0 |
| BRACE2001777 | 0 | 0 | 0 | 100 | 0 | 0 | 0 |
| BRACE2001779 | 0 | 0 | 0 | 100 | 0 | 0 | 0 |
| BRACE2001834 | 0 | 0 | 0 | 10.775 | 0 | 7.648 | 0 |
| BRACE2001855 | 0 | 0 | 0 | 0.817 | 0 | 0 | 0 |
| BRACE2001859 | 0 | 0 | 0 | 9.658 | 0 | 0 | 0 |
| BRACE2001865 | 0 | 0 | 0 | 100 | 0 | 0 | 0 |
| BRACE2001872 | 0 | 0 | 0 | 100 | 0 | 0 | 0 |
| BRACE2001881 | 0 | 0 | 0 | 16.377 | 0 | 0 | 0 |
| BRACE2001892 | 0 | 0 | 0 | 7.525 | 1.095 | 8.546 | 0 |
| BRACE2001898 | 0 | 0 | 0 | 100 | 0 | 0 | 0 |
| BRACE2001923 | 0 | 0 | 0 | 100 | 0 | 0 | 0 |
| BRACE2001942 | 0 | 0 | 0 | 45.981 | 0 | 0 | 0 |
| BRACE2001944 | 0 | 0 | 0 | 8.905 | 22.667 | 0 | 0 |
| BRACE2001954 | 0 | 0 | 0 | 100 | 0 | 0 | 0 |
| BRACE2001971 | 0 | 0 | 17.297 | 4.776 | 8.105 | 0 | 0 |
| BRACE2001972 | 0 | 0 | 0 | 100 | 0 | 0 | 0 |
| BRACE2001973 | 0 | 0 | 0 | 100 | 0 | 0 | 0 |
| BRACE2002026 | 0 | 0 | 0 | 100 | 0 | 0 | 0 |
| BRACE2002034 | 0 | 0 | 0 | 100 | 0 | 0 | 0 |
| BRACE2002050 | 0 | 0 | 0 | 14.407 | 0 | 14.609 | 0 |
| BRACE2002081 | 0 | 0 | 0 | 13.619 | 0 | 0 | 0 |
| BRACE2002091 | 0 | 0 | 0 | 1.499 | 0 | 2.128 | 0 |
| BRACE2002139 | 0 | 0 | 0 | 100 | 0 | 0 | 0 |
| BRACE2002142 | 0 | 0 | 0 | 100 | 0 | 0 | 0 |
| BRACE2002151 | 0 | 0 | 0 | 100 | 0 | 0 | 0 |
| BRACE2002157 | 0 | 0 | 0 | 100 | 0 | 0 | 0 |
| BRACE2002176 | 0 | 0 | 0 | 37.308 | 0 | 0 | 0 |
| BRACE2002202 | 0 | 0 | 0 | 76.511 | 0 | 0 | 0 |
| BRACE2002206 | 0 | 0 | 0 | 100 | 0 | 0 | 0 |
| BRACE2002227 | 0 | 0 | 0 | 100 | 0 | 0 | 0 |
| BRACE2002260 | 0 | 0 | 0 | 100 | 0 | 0 | 0 |
| BRACE2002297 | 0 | 0 | 0 | 100 | 0 | 0 | 0 |
| BRACE2002304 | 0 | 0 | 0 | 100 | 0 | 0 | 0 |
| BRACE2002356 | 0 | 0 | 0 | 25.793 | 0 | 0 | 0 |
| BRACE2002392 | 0 | 0 | 0 | 3.670 | 18.684 | 5.210 | 0 |
| BRACE2002394 | 0 | 0 | 0 | 100 | 0 | 0 | 0 |
| BRACE2002409 | 0 | 0 | 0 | 37.308 | 0 | 0 | 0 |
| BRACE2002431 | 0 | 0 | 0 | 100 | 0 | 0 | 0 |
| BRACE2002441 | 0 | 0 | 0 | 0.799 | 0 | 4.539 | 0 |
| BRACE2002444 | 0 | 0 | 0 | 100 | 0 | 0 | 0 |
| BRACE2002458 | 0 | 0 | 0 | 100 | 0 | 0 | 0 |
| BRACE2002467 | 0 | 0 | 0 | 4.639 | 0 | 0 | 0 |
| BRACE2002468 | 0 | 0 | 0 | 100 | 0 | 0 | 0 |
| BRACE2002478 | 0 | 0 | 0 | 41.149 | 0 | 0 | 0 |
| BRACE2002495 | 0 | 0 | 0 | 16.447 | 0 | 0 | 0 |
| BRACE2002582 | 0 | 0 | 0 | 9.274 | 0 | 0 | 0 |
| BRACE2002585 | 0 | 0 | 0 | 17.693 | 0 | 25.117 | 0 |
| BRACE2002589 | 0 | 0 | 0 | 100 | 0 | 0 | 0 |
| BRACE2002590 | 0 | 0 | 0 | 100 | 0 | 0 | 0 |
| BRACE2002606 | 0 | 0 | 0 | 3.804 | 0 | 0 | 0 |
| BRACE2002613 | 0 | 0 | 0 | 100 | 0 | 0 | 0 |
| BRACE2002614 | 0 | 0 | 0 | 100 | 0 | 0 | 0 |
| BRACE2002617 | 0 | 0 | 0 | 100 | 0 | 0 | 0 |
| BRACE2002623 | 0 | 0 | 0 | 100 | 0 | 0 | 0 |
| BRACE2002635 | 0 | 0 | 0 | 41.329 | 0 | 58.671 | 0 |
| BRACE2002649 | 0 | 0 | 0 | 15.030 | 0 | 0 | 0 |
| BRACE2002661 | 0 | 0 | 0 | 2.044 | 0 | 0 | 0 |
| BRACE2002676 | 0 | 0 | 0 | 100 | 0 | 0 | 0 |
| BRACE2002677 | 0 | 0 | 0 | 1.370 | 0 | 0 | 0 |
| BRACE2002682 | 0 | 0 | 0 | 13.590 | 0 | 0 | 0 |
| BRACE2002685 | 0 | 0 | 0 | 2.433 | 0 | 0 | 0 |
| BRACE2002695 | 0 | 0 | 0 | 100 | 0 | 0 | 0 |
| BRACE2002707 | 0 | 0 | 0 | 100 | 0 | 0 | 0 |
| BRACE2002736 | 0 | 0 | 0 | 100 | 0 | 0 | 0 |
| BRACE2002752 | 0 | 0 | 0 | 10.913 | 0 | 0 | 0 |
| BRACE2002755 | 0 | 0 | 0 | 38.787 | 0 | 0 | 0 |
| BRACE2002762 | 0 | 0 | 0 | 100 | 0 | 0 | 0 |
| BRACE2002772 | 0 | 0 | 0 | 100 | 0 | 0 | 0 |
| BRACE2002792 | 0 | 0 | 0 | 100 | 0 | 0 | 0 |
| BRACE2002796 | 0 | 0 | 0 | 36.360 | 0 | 0 | 0 |
| BRACE2002803 | 0 | 0 | 0 | 38.798 | 0 | 18.360 | 0 |
| BRACE2002807 | 0 | 0 | 0 | 22.873 | 0 | 0 | 0 |
| BRACE2002812 | 0 | 0 | 0 | 25.026 | 0 | 5.921 | 0 |
| BRACE2002834 | 0 | 0 | 0 | 100 | 0 | 0 | 0 |
| BRACE2002849 | 0 | 0 | 0 | 100 | 0 | 0 | 0 |
| BRACE2002857 | 0 | 0 | 0 | 100 | 0 | 0 | 0 |
| BRACE2002860 | 0 | 0 | 0 | 7.148 | 0 | 0 | 0 |
| BRACE2002861 | 0 | 18.215 | 0 | 9.209 | 0 | 0 | 0 |
| BRACE2002884 | 0 | 0 | 0 | 100 | 0 | 0 | 0 |
| BRACE2002896 | 0 | 0 | 0 | 31.914 | 0 | 0 | 0 |
| BRACE2002948 | 0 | 0 | 0 | 100 | 0 | 0 | 0 |
| BRACE2003037 | 0 | 0 | 0 | 3.065 | 23.406 | 10.878 | 0 |
| BRACE2003078 | 0 | 0 | 0 | 11.488 | 0 | 0 | 0 |
| BRACE2003097 | 0 | 0 | 0 | 41.027 | 0 | 0 | 0 |
| BRACE2003110 | 0 | 0 | 0 | 9.561 | 0 | 0 | 0 |
| BRACE2003168 | 0 | 0 | 0 | 100 | 0 | 0 | 0 |
| BRACE2003172 | 0 | 0 | 0 | 5.536 | 2.349 | 1.637 | 0 |
| BRACE2003199 | 0 | 0 | 0 | 100 | 0 | 0 | 0 |
| BRACE2003210 | 0 | 0 | 0 | 100 | 0 | 0 | 0 |
| BRACE2003217 | 0 | 0 | 0 | 6.119 | 0 | 8.686 | 0 |
| BRACE2003254 | 0 | 6.355 | 0 | 1.928 | 0 | 2.737 | 0 |
| BRACE2003269 | 0 | 0 | 0 | 100 | 0 | 0 | 0 |
| BRACE2003285 | 0 | 0 | 0 | 100 | 0 | 0 | 0 |
| BRACE2003304 | 0 | 0 | 0 | 3.103 | 0 | 0 | 0 |
| BRACE2003319 | 0 | 0 | 0 | 1.626 | 0 | 0 | 0 |
| BRACE2003398 | 0 | 0 | 0 | 16.418 | 83.582 | 0 | 0 |
| BRACE2003420 | 0 | 0 | 0 | 100 | 0 | 0 | 0 |
| BRACE2003428 | 0 | 0 | 0 | 100 | 0 | 0 | 0 |
| BRACE2003431 | 0 | 0 | 0 | 100 | 0 | 0 | 0 |
| BRACE2003512 | 0 | 0 | 0 | 22.932 | 0 | 0 | 0 |
| BRACE2003516 | 0 | 0 | 0 | 37.308 | 0 | 0 | 0 |
| BRACE2003527 | 0 | 0 | 0 | 3.659 | 0 | 0 | 0 |
| BRACE2003539 | 0 | 0 | 0 | 39.025 | 0 | 0 | 0 |
| BRACE2003540 | 0 | 0 | 0 | 100 | 0 | 0 | 0 |
| BRACE2003594 | 0 | 0 | 0 | 8.288 | 0 | 0 | 0 |
| BRACE2003598 | 0 | 0 | 0 | 39.025 | 0 | 0 | 0 |
| BRACE2003609 | 0 | 0 | 0 | 6.452 | 0 | 18.317 | 0 |
| BRACE2003614 | 0 | 0 | 0 | 100 | 0 | 0 | 0 |
| BRACE2003628 | 0 | 0 | 0 | 9.684 | 0 | 0 | 0 |
| BRACE2003639 | 0 | 0 | 0 | 100 | 0 | 0 | 0 |
| BRACE2003700 | 0 | 0 | 0 | 29.243 | 0 | 41.515 | 0 |
| BRACE2003713 | 0 | 0 | 0 | 16.418 | 83.582 | 0 | 0 |
| BRACE2003766 | 0 | 0 | 0 | 100 | 0 | 0 | 0 |
| BRACE2003785 | 0 | 0 | 0 | 6.207 | 0 | 10.770 | 0 |
| BRACE2003788 | 0 | 0 | 0 | 27.684 | 0 | 0 | 0 |
| BRACE2003800 | 0 | 0 | 0 | 38.906 | 0 | 0 | 0 |
| BRACE2003802 | 0 | 0 | 0 | 100 | 0 | 0 | 0 |
| BRACE2003825 | 0 | 0 | 0 | 9.658 | 0 | 0 | 0 |
| BRACE2003827 | 0 | 0 | 0 | 5.597 | 3.166 | 0 | 0 |
| BRACE2003845 | 0 | 0 | 0 | 6.468 | 0 | 0 | 0 |
| BRACE2003846 | 0 | 0 | 0 | 1.850 | 0 | 0.657 | 0 |
| BRACE2003847 | 0 | 0 | 0 | 100 | 0 | 0 | 0 |
| BRACE2003848 | 0 | 0 | 0 | 38.787 | 0 | 0 | 0 |
| BRACE2003873 | 0 | 0 | 0 | 100 | 0 | 0 | 0 |
| BRACE2003885 | 0 | 0 | 0 | 100 | 0 | 0 | 0 |
| BRACE2003887 | 0 | 0 | 0 | 100 | 0 | 0 | 0 |
| BRACE2003892 | 0 | 0 | 0 | 6.196 | 0 | 6.597 | 0 |
| BRACE2003904 | 0 | 0 | 0 | 3.680 | 9.367 | 0 | 0 |
| BRACE2003905 | 0 | 0 | 0 | 44.896 | 0 | 0 | 0 |
| BRACE2003928 | 0 | 0 | 0 | 100 | 0 | 0 | 0 |
| BRACE2003944 | 0 | 0 | 0 | 0.367 | 0 | 2.086 | 0 |
| BRACE2003954 | 0 | 0 | 0 | 16.746 | 0 | 0 | 0 |
| BRACE2003982 | 0 | 0 | 0 | 2.921 | 14.870 | 8.293 | 0 |
| BRACE2003987 | 0 | 0 | 0 | 100 | 0 | 0 | 0 |
| BRACE2005034 | 0 | 0 | 0 | 100 | 0 | 0 | 0 |
| BRACE2005047 | 0 | 0 | 0 | 100 | 0 | 0 | 0 |
| BRACE2005063 | 0 | 0 | 0 | 100 | 0 | 0 | 0 |
| BRACE2005083 | 0 | 0 | 0 | 51.220 | 0 | 24.238 | 0 |
| BRACE2005087 | 0 | 0 | 0 | 6.626 | 0 | 3.136 | 0 |
| BRACE2005090 | 0 | 0 | 0 | 52.057 | 0 | 0 | 0 |
| BRACE2005099 | 0 | 0 | 0 | 14.152 | 0 | 1.339 | 0 |
| BRACE2005118 | 0 | 0 | 0 | 100 | 0 | 0 | 0 |
| BRACE2005124 | 0 | 0 | 0 | 100 | 0 | 0 | 0 |
| BRACE2005138 | 0 | 0 | 0 | 100 | 0 | 0 | 0 |
| BRACE2005151 | 0 | 0 | 0 | 7.457 | 0 | 0 | 0 |
| BRACE2005160 | 0 | 0 | 0 | 100 | 0 | 0 | 0 |
| BRACE2005169 | 0 | 0 | 0 | 100 | 0 | 0 | 0 |
| BRACE2005189 | 0 | 0 | 0 | 53.953 | 0 | 0 | 0 |
| BRACE2005193 | 0 | 0 | 0 | 41.027 | 0 | 0 | 0 |
| BRACE2005196 | 0 | 0 | 0 | 22.570 | 0 | 0 | 0 |
| BRACE2005198 | 0 | 0 | 0 | 100 | 0 | 0 | 0 |
| BRACE2005216 | 0 | 0 | 0 | 100 | 0 | 0 | 0 |
| BRACE2005231 | 0 | 22.408 | 0 | 9.064 | 11.536 | 9.650 | 0 |
| BRACE2005243 | 0 | 0 | 0 | 100 | 0 | 0 | 0 |
| BRACE2005251 | 0 | 0 | 0 | 52.513 | 0 | 0 | 0 |
| BRACE2005253 | 0 | 0 | 0 | 39.025 | 0 | 0 | 0 |
| BRACE2005290 | 0 | 0 | 0 | 18.059 | 0 | 25.637 | 0 |
| BRACE2005298 | 0 | 0 | 0 | 21.618 | 0 | 0 | 0 |
| BRACE2005328 | 0 | 0 | 0 | 100 | 0 | 0 | 0 |
| BRACE2005329 | 0 | 0 | 0 | 100 | 0 | 0 | 0 |
| BRACE2005337 | 0 | 0 | 0 | 100 | 0 | 0 | 0 |
| BRACE2005348 | 0 | 0 | 0 | 100 | 0 | 0 | 0 |
| BRACE2005363 | 0 | 0 | 0 | 10.086 | 0 | 0 | 0 |
| BRACE2005395 | 0 | 0 | 0 | 20.076 | 0 | 0 | 0 |
| BRACE2005408 | 0 | 0 | 0 | 6.751 | 0 | 0 | 0 |
| BRACE2005433 | 0 | 0 | 0 | 8.197 | 0 | 0 | 0 |
| BRACE2005434 | 0 | 0 | 0 | 1.468 | 2.491 | 0 | 0 |
| BRACE2005448 | 0 | 0 | 0 | 9.653 | 0 | 0 | 0 |
| BRACE2005450 | 0 | 0 | 0 | 100 | 0 | 0 | 0 |
| BRACE2005453 | 0 | 0 | 0 | 9.182 | 0 | 0 | 0 |
| BRACE2005457 | 0 | 0 | 0 | 41.512 | 0 | 0 | 0 |
| BRACE2005460 | 0 | 0 | 0 | 100 | 0 | 0 | 0 |
| BRACE2005489 | 0 | 0 | 0 | 100 | 0 | 0 | 0 |
| BRACE2005518 | 0 | 0 | 0 | 100 | 0 | 0 | 0 |
| BRACE2005556 | 0 | 0 | 0 | 100 | 0 | 0 | 0 |
| BRACE2005562 | 0 | 0 | 0 | 100 | 0 | 0 | 0 |
| BRACE2005624 | 0 | 0 | 0 | 100 | 0 | 0 | 0 |
| BRACE2005642 | 0 | 0 | 0 | 25.930 | 0 | 7.362 | 0 |
| BRACE2005661 | 0 | 0 | 0 | 100 | 0 | 0 | 0 |
| BRACE2005667 | 0 | 0 | 0 | 100 | 0 | 0 | 0 |
| BRACE2005681 | 0 | 0 | 0 | 14.879 | 0 | 13.076 | 0 |
| BRACE2005719 | 0 | 0 | 0 | 6.324 | 32.194 | 5.985 | 0 |
| BRACE2005731 | 0 | 0 | 0 | 41.329 | 0 | 58.671 | 0 |
| BRACE2005742 | 0 | 0 | 0 | 100 | 0 | 0 | 0 |
| BRACE2005762 | 0 | 0 | 0 | 100 | 0 | 0 | 0 |
| BRACE2005773 | 0 | 0 | 0 | 100 | 0 | 0 | 0 |
| BRACE2005787 | 0 | 0 | 0 | 100 | 0 | 0 | 0 |
| BRACE2005795 | 0 | 0 | 0 | 100 | 0 | 0 | 0 |
| BRACE2005800 | 0 | 0 | 0 | 100 | 0 | 0 | 0 |
| BRACE2005858 | 0 | 0 | 0 | 14.668 | 0 | 0 | 0 |
| BRACE2005869 | 0 | 0 | 0 | 100 | 0 | 0 | 0 |
| BRACE2005875 | 0 | 0 | 0 | 3.056 | 0 | 0 | 0 |
| BRACE2005881 | 0 | 0 | 0 | 100 | 0 | 0 | 0 |
| BRACE2005898 | 0 | 0 | 0 | 100 | 0 | 0 | 0 |
| BRACE2005904 | 0 | 0 | 0 | 100 | 0 | 0 | 0 |
| BRACE2005906 | 0 | 0 | 0 | 100 | 0 | 0 | 0 |
| BRACE2005907 | 0 | 0 | 0 | 100 | 0 | 0 | 0 |
| BRACE2005911 | 0 | 0 | 0 | 100 | 0 | 0 | 0 |
| BRACE2005937 | 0 | 0 | 0 | 8.574 | 0 | 0 | 0 |
| BRACE2005949 | 0 | 0 | 0 | 100 | 0 | 0 | 0 |
| BRACE2005981 | 0 | 0 | 0 | 100 | 0 | 0 | 0 |
| BRACE2005991 | 0 | 0 | 0 | 100 | 0 | 0 | 0 |
| BRACE2006055 | 0 | 0 | 0 | 4.259 | 0 | 2.016 | 0 |
| BRACE2006072 | 0 | 0 | 0 | 13.990 | 0 | 0 | 0 |
| BRACE2006075 | 0 | 0 | 0 | 11.517 | 0 | 0 | 0 |
| BRACE2006084 | 0 | 0 | 0 | 2.179 | 0 | 3.093 | 0 |
| BRACE2006089 | 0 | 0 | 0 | 54.983 | 0 | 0 | 0 |
| BRACE2006102 | 0 | 0 | 0 | 29.854 | 0 | 0 | 0 |
| BRACE2006105 | 0 | 0 | 0 | 15.058 | 0 | 0 | 0 |
| BRACE2006122 | 0 | 0 | 0 | 100 | 0 | 0 | 0 |
| BRACE2006137 | 0 | 0 | 0 | 41.329 | 0 | 58.671 | 0 |
| BRACE2006143 | 0 | 0 | 0 | 100 | 0 | 0 | 0 |
| BRACE2006162 | 0 | 0 | 0 | 1.098 | 0 | 0 | 0 |
| BRACE2006167 | 0 | 0 | 0 | 10.473 | 15.234 | 14.868 | 0 |
| BRACE2006174 | 0 | 0 | 0 | 100 | 0 | 0 | 0 |
| BRACE2006240 | 0 | 0 | 0 | 100 | 0 | 0 | 0 |
| BRACE2006245 | 0 | 0 | 0 | 100 | 0 | 0 | 0 |
| BRACE2006249 | 0 | 0 | 0 | 45.981 | 0 | 0 | 0 |
| BRACE2006258 | 0 | 0 | 0 | 1.744 | 2.960 | 0 | 0 |
| BRACE2006264 | 0 | 0 | 0 | 5.990 | 0 | 0 | 0 |
| BRACE2006274 | 0 | 0 | 0 | 41.329 | 0 | 58.671 | 0 |
| BRACE2006281 | 0 | 0 | 0 | 2.145 | 0 | 0 | 0 |
| BRACE2006298 | 0 | 0 | 0 | 100 | 0 | 0 | 0 |
| BRACE2006319 | 0 | 0 | 0 | 4.977 | 0 | 3.532 | 0 |
| BRACE2006344 | 0 | 0 | 0 | 2.537 | 0 | 0 | 0 |
| BRACE2006354 | 0 | 0 | 0 | 4.417 | 22.485 | 0 | 0 |
| BRACE2006363 | 0 | 0 | 0 | 26.312 | 0 | 9.338 | 0 |
| BRACE2006378 | 0 | 0 | 0 | 38.787 | 0 | 0 | 0 |
| BRACE2006380 | 0 | 0 | 0 | 58.183 | 0 | 0 | 0 |
| BRACE2006393 | 0 | 0 | 0 | 100 | 0 | 0 | 0 |
| BRACE2006397 | 0 | 4.144 | 0 | 0.838 | 5.333 | 0.297 | 0 |
| BRACE2006413 | 0 | 0 | 0 | 100 | 0 | 0 | 0 |
| BRACE2006417 | 0 | 0 | 0 | 100 | 0 | 0 | 0 |
| BRACE2006453 | 0 | 0 | 0 | 100 | 0 | 0 | 0 |
| BRACE2006459 | 0 | 0 | 0 | 28.977 | 0 | 0 | 0 |
| BRACE2006488 | 0 | 0 | 0 | 100 | 0 | 0 | 0 |
| BRACE2006514 | 0 | 0 | 0 | 3.700 | 0 | 3.501 | 0 |
| BRACE2006534 | 0 | 0 | 0 | 100 | 0 | 0 | 0 |
| BRACE2006537 | 0 | 0 | 0 | 1.528 | 0 | 2.169 | 0 |
| BRACE2006540 | 0 | 0 | 0 | 100 | 0 | 0 | 0 |
| BRACE2006547 | 0 | 0 | 0 | 10.619 | 0 | 0 | 0 |
| BRACE2006564 | 0 | 0 | 0 | 29.854 | 0 | 0 | 0 |
| BRACE2006587 | 0 | 0 | 0 | 100 | 0 | 0 | 0 |
| BRACE2006598 | 0 | 0 | 0 | 20.531 | 0 | 29.147 | 0 |
| BRACE2006636 | 0 | 0 | 0 | 9.731 | 0 | 0 | 0 |
| BRACE2006685 | 0 | 0 | 0 | 100 | 0 | 0 | 0 |
| BRACE2006703 | 0 | 0 | 0 | 100 | 0 | 0 | 0 |
| BRACE2006743 | 0 | 0 | 0 | 15.779 | 0 | 4.480 | 0 |
| BRACE2006753 | 0 | 0 | 0 | 4.364 | 0 | 0 | 0 |
| BRACE2006783 | 0 | 0 | 0 | 100 | 0 | 0 | 0 |
| BRACE2006821 | 0 | 0 | 0 | 1.311 | 20.016 | 0 | 0 |
| BRACE2006833 | 0 | 0 | 0 | 53.329 | 0 | 0 | 0 |
| BRACE2006859 | 0 | 0 | 0 | 7.211 | 0 | 0 | 0 |
| BRACE2006871 | 0 | 0 | 0 | 0.710 | 0 | 3.022 | 0 |
| BRACE2006900 | 0 | 0 | 0 | 2.191 | 0 | 0 | 0 |
| BRACE2006909 | 0 | 0 | 0 | 100 | 0 | 0 | 0 |
| BRACE2006911 | 0 | 0 | 0 | 13.180 | 0 | 18.711 | 0 |
| BRACE2006924 | 0 | 0 | 0 | 100 | 0 | 0 | 0 |
| BRACE2006935 | 0 | 0 | 0 | 16.418 | 83.582 | 0 | 0 |
| BRACE2006937 | 0 | 0 | 0 | 4.750 | 4.836 | 0 | 0 |
| BRACE2006944 | 0 | 0 | 0 | 8.278 | 0 | 0 | 0 |
| BRACE2006951 | 0 | 0 | 0 | 100 | 0 | 0 | 0 |
| BRACE2006982 | 0 | 0 | 0 | 3.683 | 51.560 | 0 | 0 |
| BRACE2006986 | 0 | 0 | 0 | 100 | 0 | 0 | 0 |
| BRACE2007013 | 0 | 0 | 0 | 21.832 | 0 | 20.662 | 0 |
| BRACE2007064 | 0 | 11.405 | 0 | 3.460 | 0 | 3.274 | 0 |
| BRACE2007068 | 0 | 0 | 0 | 35.550 | 0 | 0 | 0 |
| BRACE2007087 | 0 | 0 | 0 | 100 | 0 | 0 | 0 |
| BRACE2007089 | 0 | 0 | 0 | 0.601 | 0 | 0.853 | 0 |
| BRACE2007109 | 0 | 0 | 0 | 25.067 | 3.449 | 5.771 | 0 |
| BRACE2007138 | 0 | 0 | 0 | 100 | 0 | 0 | 0 |
| BRACE2007174 | 0 | 0 | 0 | 11.088 | 0 | 0 | 0 |
| BRACE2007191 | 0 | 0 | 0 | 2.438 | 0 | 0.692 | 0 |
| BRACE2007197 | 0 | 0 | 0 | 100 | 0 | 0 | 0 |
| BRACE2007201 | 0 | 0 | 0 | 41.027 | 0 | 0 | 0 |
| BRACE2007203 | 0 | 0 | 0 | 100 | 0 | 0 | 0 |
| BRACE2007232 | 0 | 0 | 0 | 100 | 0 | 0 | 0 |
| BRACE2007254 | 0 | 0 | 0 | 5.283 | 0 | 0 | 0 |
| BRACE2007262 | 0 | 0 | 0 | 100 | 0 | 0 | 0 |
| BRACE2007274 | 0 | 0 | 0 | 100 | 0 | 0 | 0 |
| BRACE2007281 | 0 | 0 | 0 | 100 | 0 | 0 | 0 |
| BRACE2007295 | 0 | 0 | 0 | 26.697 | 0 | 0 | 0 |
| BRACE2007358 | 0 | 0 | 0 | 100 | 0 | 0 | 0 |
| BRACE2007396 | 0 | 0 | 0 | 100 | 0 | 0 | 0 |
| BRACE2007398 | 0 | 0 | 0 | 100 | 0 | 0 | 0 |
| BRACE2007401 | 0 | 0 | 0 | 7.783 | 6.604 | 7.366 | 0 |
| BRACE2007411 | 0 | 0 | 0 | 100 | 0 | 0 | 0 |
| BRACE2007447 | 0 | 0 | 0 | 100 | 0 | 0 | 0 |
| BRACE2007477 | 0 | 0 | 0 | 100 | 0 | 0 | 0 |
| BRACE2007502 | 0 | 0 | 0 | 100 | 0 | 0 | 0 |
| BRACE2007503 | 0 | 0 | 0 | 100 | 0 | 0 | 0 |
| BRACE2007518 | 0 | 0 | 0 | 12.887 | 0 | 9.147 | 0 |
| BRACE2007522 | 0 | 0 | 0 | 41.027 | 0 | 0 | 0 |
| BRACE2007527 | 0 | 0 | 0 | 100 | 0 | 0 | 0 |
| BRACE2007538 | 0 | 0 | 0 | 100 | 0 | 0 | 0 |
| BRACE2007563 | 0 | 0 | 0 | 100 | 0 | 0 | 0 |
| BRACE2007567 | 0 | 0 | 0 | 1.970 | 0 | 2.796 | 0 |
| BRACE2007577 | 0 | 0 | 0 | 2.085 | 0 | 0 | 0 |
| BRACE2007621 | 0 | 0 | 0 | 100 | 0 | 0 | 0 |
| BRACE2007640 | 0 | 0 | 0 | 100 | 0 | 0 | 0 |
| BRACE2007641 | 0 | 0 | 0 | 10.014 | 5.664 | 3.159 | 0 |
| BRACE2007646 | 0 | 0 | 0 | 41.329 | 0 | 58.671 | 0 |
| BRACE2007663 | 0 | 0 | 0 | 67.607 | 0 | 0 | 0 |
| BRACE2007671 | 0 | 0 | 0 | 1.097 | 0 | 0 | 0 |
| BRACE2007682 | 0 | 0 | 0 | 100 | 0 | 0 | 0 |
| BRACE2007685 | 0 | 0 | 0 | 100 | 0 | 0 | 0 |
| BRACE2007708 | 0 | 0 | 0 | 3.017 | 0 | 2.141 | 0 |
| BRACE2007727 | 0 | 0 | 0 | 100 | 0 | 0 | 0 |
| BRACE2007749 | 0 | 0 | 0 | 100 | 0 | 0 | 0 |
| BRACE2007760 | 0 | 0 | 0 | 83.719 | 0 | 0 | 0 |
| BRACE2007761 | 0 | 0 | 0 | 100 | 0 | 0 | 0 |
| BRACE2007764 | 0 | 0 | 0 | 41.329 | 0 | 58.671 | 0 |
| BRACE2007767 | 0 | 0 | 0 | 2.210 | 0 | 0 | 0 |
| BRACE2007768 | 0 | 0 | 0 | 6.791 | 0 | 0 | 0 |
| BRACE2007769 | 0 | 0 | 0 | 100 | 0 | 0 | 0 |
| BRACE2007784 | 0 | 0 | 0 | 100 | 0 | 0 | 0 |
| BRACE2007786 | 0 | 0 | 0 | 100 | 0 | 0 | 0 |
| BRACE2007798 | 0 | 0 | 0 | 2.937 | 7.475 | 4.169 | 0 |
| BRACE2007799 | 0 | 0 | 0 | 100 | 0 | 0 | 0 |
| BRACE2007801 | 0 | 0 | 0 | 52.057 | 0 | 0 | 0 |
| BRACE2007832 | 0 | 0 | 0 | 17.815 | 0 | 25.291 | 0 |
| BRACE2007836 | 0 | 0 | 0 | 100 | 0 | 0 | 0 |
| BRACE2007868 | 0 | 0 | 0 | 100 | 0 | 0 | 0 |
| BRACE2007882 | 0 | 0 | 0 | 32.721 | 0 | 6.636 | 0 |
| BRACE2007888 | 0 | 0 | 0 | 100 | 0 | 0 | 0 |
| BRACE2007902 | 0 | 0 | 0 | 22.750 | 0 | 0 | 0 |
| BRACE2007920 | 0 | 0 | 0 | 100 | 0 | 0 | 0 |
| BRACE2007937 | 0 | 0 | 0 | 5.408 | 0 | 7.677 | 0 |
| BRACE2007944 | 0 | 0 | 0 | 100 | 0 | 0 | 0 |
| BRACE2007952 | 0 | 0 | 0 | 8.604 | 8.761 | 9.772 | 0 |
| BRACE2008008 | 0 | 0 | 0 | 100 | 0 | 0 | 0 |
| BRACE2008015 | 0 | 0 | 0 | 100 | 0 | 0 | 0 |
| BRACE2008021 | 0 | 0 | 0 | 100 | 0 | 0 | 0 |
| BRACE2008097 | 0 | 0 | 0 | 3.408 | 0 | 0 | 0 |
| BRACE2008102 | 0 | 0 | 0 | 16.858 | 0 | 23.932 | 0 |
| BRACE2008114 | 0 | 0 | 0 | 100 | 0 | 0 | 0 |
| BRACE2008144 | 0 | 0 | 0 | 100 | 0 | 0 | 0 |
| BRACE2008172 | 0 | 0 | 0 | 100 | 0 | 0 | 0 |
| BRACE2008216 | 0 | 0 | 0 | 9.397 | 0 | 0 | 0 |
| BRACE2008218 | 0 | 0 | 0 | 100 | 0 | 0 | 0 |
| BRACE2008251 | 0 | 0 | 0 | 19.231 | 0 | 0 | 0 |
| BRACE2008276 | 0 | 0 | 0 | 100 | 0 | 0 | 0 |
| BRACE2008295 | 0 | 0 | 0 | 100 | 0 | 0 | 0 |
| BRACE2008308 | 0 | 0 | 0 | 100 | 0 | 0 | 0 |
| BRACE2008336 | 0 | 0 | 0 | 100 | 0 | 0 | 0 |
| BRACE2008358 | 0 | 0 | 0 | 3.217 | 0 | 6.850 | 0 |
| BRACE2008361 | 0 | 0 | 0 | 100 | 0 | 0 | 0 |
| BRACE2008380 | 0 | 0 | 0 | 1.387 | 14.119 | 5.906 | 0 |
| BRACE2008385 | 0 | 0 | 0 | 2.965 | 0 | 0 | 0 |
| BRACE2008399 | 0 | 0 | 0 | 3.928 | 0 | 0 | 0 |
| BRACE2008401 | 0 | 0 | 0 | 100 | 0 | 0 | 0 |
| BRACE2008402 | 0 | 0 | 0 | 5.953 | 0 | 0 | 0 |
| BRACE2008410 | 0 | 0 | 0 | 100 | 0 | 0 | 0 |
| BRACE2008420 | 0 | 0 | 0 | 100 | 0 | 0 | 0 |
| BRACE2008443 | 0 | 0 | 0 | 100 | 0 | 0 | 0 |
| BRACE2008473 | 0 | 0 | 0 | 100 | 0 | 0 | 0 |
| BRACE2008480 | 0 | 0 | 0 | 100 | 0 | 0 | 0 |
| BRACE2008481 | 0 | 0 | 0 | 3.963 | 10.087 | 2.813 | 0 |
| BRACE2008488 | 0 | 0 | 0 | 100 | 0 | 0 | 0 |
| BRACE2008495 | 0 | 0 | 0 | 16.214 | 0 | 0 | 0 |
| BRACE2008500 | 0 | 0 | 0 | 100 | 0 | 0 | 0 |
| BRACE2008553 | 0 | 0 | 0 | 2.952 | 0 | 4.191 | 0 |
| BRACE2008594 | 0 | 0 | 0 | 100 | 0 | 0 | 0 |
| BRACE2008604 | 0 | 0 | 0 | 100 | 0 | 0 | 0 |
| BRACE2008615 | 0 | 0 | 0 | 100 | 0 | 0 | 0 |
| BRACE2008622 | 0 | 0 | 0 | 100 | 0 | 0 | 0 |
| BRACE2008629 | 0 | 0 | 0 | 100 | 0 | 0 | 0 |
| BRACE2008653 | 0 | 0 | 4.067 | 8.610 | 0 | 2.126 | 0 |
| BRACE2008655 | 0 | 0 | 0 | 100 | 0 | 0 | 0 |
| BRACE2008656 | 0 | 0 | 0 | 100 | 0 | 0 | 0 |
| BRACE2008706 | 0 | 0 | 0 | 11.660 | 0 | 0 | 0 |
| BRACE2008708 | 0 | 0 | 0 | 49.602 | 0 | 0 | 0 |
| BRACE2008710 | 0 | 0 | 0 | 100 | 0 | 0 | 0 |
| BRACE2008754 | 0 | 0 | 0 | 100 | 0 | 0 | 0 |
| BRACE2008797 | 0 | 0 | 0 | 44.047 | 0 | 25.012 | 0 |
| BRACE2008847 | 0 | 0 | 0 | 100 | 0 | 0 | 0 |
| BRACE2008857 | 0 | 0 | 0 | 41.512 | 0 | 0 | 0 |
| BRACE2008861 | 0 | 0 | 0 | 100 | 0 | 0 | 0 |
| BRACE2008867 | 0 | 0 | 0 | 100 | 0 | 0 | 0 |
| BRACE2008881 | 0 | 0 | 0 | 19.678 | 0 | 0 | 0 |
| BRACE2008883 | 0 | 0 | 0 | 100 | 0 | 0 | 0 |
| BRACE2008917 | 0 | 0 | 0 | 100 | 0 | 0 | 0 |
| BRACE2008919 | 0 | 0 | 0 | 100 | 0 | 0 | 0 |
| BRACE2008941 | 0 | 0 | 0 | 14.187 | 0 | 0 | 0 |
| BRACE2008948 | 0 | 0 | 0 | 100 | 0 | 0 | 0 |
| BRACE2008960 | 0 | 0 | 0 | 100 | 0 | 0 | 0 |
| BRACE2008968 | 18.226 | 0 | 0 | 2.476 | 0 | 0.586 | 0 |
| BRACE2008999 | 0 | 0 | 0 | 24.977 | 25.431 | 0 | 0 |
| BRACE2009014 | 0 | 0 | 0 | 100 | 0 | 0 | 0 |
| BRACE2009016 | 0 | 0 | 0 | 100 | 0 | 0 | 0 |
| BRACE2009031 | 0 | 0 | 0 | 100 | 0 | 0 | 0 |
| BRACE2009037 | 0 | 0 | 2.252 | 0.829 | 0 | 0.883 | 0 |
| BRACE2009044 | 0 | 0 | 0 | 7.121 | 0 | 0 | 0 |
| BRACE2009045 | 0 | 0 | 0 | 8.547 | 0 | 6.067 | 0 |
| BRACE2009053 | 0 | 0 | 0 | 100 | 0 | 0 | 0 |
| BRACE2009122 | 0 | 0 | 0 | 100 | 0 | 0 | 0 |
| BRACE2009131 | 0 | 0 | 0 | 100 | 0 | 0 | 0 |
| BRACE2009185 | 0 | 0 | 0 | 100 | 0 | 0 | 0 |
| BRACE2009188 | 0 | 0 | 0 | 100 | 0 | 0 | 0 |
| BRACE2009212 | 0 | 0 | 0 | 100 | 0 | 0 | 0 |
| BRACE2009221 | 0 | 0 | 0 | 100 | 0 | 0 | 0 |
| BRACE2009235 | 0 | 0 | 0 | 100 | 0 | 0 | 0 |
| BRACE2009238 | 0 | 0 | 0 | 100 | 0 | 0 | 0 |
| BRACE2009255 | 0 | 0 | 0 | 16.858 | 0 | 23.932 | 0 |
| BRACE2009270 | 0 | 0 | 0 | 100 | 0 | 0 | 0 |
| BRACE2009272 | 0 | 0 | 0 | 100 | 0 | 0 | 0 |
| BRACE2009274 | 0 | 0 | 0 | 100 | 0 | 0 | 0 |
| BRACE2009275 | 0 | 0 | 0 | 100 | 0 | 0 | 0 |
| BRACE2009291 | 0 | 0 | 0 | 1.878 | 0 | 0 | 0 |
| BRACE2009293 | 0 | 0 | 0 | 100 | 0 | 0 | 0 |
| BRACE2009307 | 0 | 0 | 0 | 21.024 | 0 | 0 | 0 |
| BRACE2009311 | 0 | 0 | 0 | 41.329 | 0 | 58.671 | 0 |
| BRACE2009318 | 0 | 0 | 0 | 100 | 0 | 0 | 0 |
| BRACE2009323 | 0 | 0 | 0 | 100 | 0 | 0 | 0 |
| BRACE2009366 | 0 | 0 | 0 | 2.564 | 0 | 0 | 0 |
| BRACE2009421 | 0 | 0 | 0 | 100 | 0 | 0 | 0 |
| BRACE2009428 | 0 | 0 | 0 | 100 | 0 | 0 | 0 |
| BRACE2009434 | 0 | 0 | 0 | 100 | 0 | 0 | 0 |
| BRACE2009437 | 0 | 0 | 0 | 100 | 0 | 0 | 0 |
| BRACE2009483 | 0 | 61.671 | 0 | 12.473 | 0 | 0 | 0 |
| BRACE2009517 | 0 | 0 | 0 | 3.850 | 0 | 2.733 | 0 |
| BRACE2009533 | 0 | 0 | 0 | 100 | 0 | 0 | 0 |
| BRACE2009558 | 0 | 0 | 0 | 4.082 | 0 | 2.897 | 0 |
| BRACE2009566 | 0 | 0 | 0 | 13.461 | 0 | 0 | 0 |
| BRACE2009591 | 0 | 0 | 0 | 100 | 0 | 0 | 0 |
| BRACE2009620 | 0 | 0 | 0 | 13.619 | 0 | 0 | 0 |
| BRACE2009654 | 0 | 0 | 0 | 100 | 0 | 0 | 0 |
| BRACE2009721 | 0 | 0 | 0 | 17.003 | 0 | 0 | 0 |
| BRACE2009732 | 0 | 0 | 0 | 100 | 0 | 0 | 0 |
| BRACE2009754 | 0 | 0 | 0 | 100 | 0 | 0 | 0 |
| BRACE2009828 | 0 | 0 | 0 | 26.047 | 0 | 73.953 | 0 |
| BRACE2009886 | 0 | 0 | 0 | 100 | 0 | 0 | 0 |
| BRACE2009907 | 0 | 0 | 0 | 100 | 0 | 0 | 0 |
| BRACE2009957 | 0 | 0 | 0 | 27.755 | 0 | 0 | 0 |
| BRACE2010170 | 0 | 0 | 0 | 100 | 0 | 0 | 0 |
| BRACE2010171 | 0 | 0 | 0 | 100 | 0 | 0 | 0 |
| BRACE2010203 | 0 | 0 | 0 | 100 | 0 | 0 | 0 |
| BRACE2010208 | 0 | 0 | 0 | 100 | 0 | 0 | 0 |
| BRACE2010336 | 0 | 0 | 0 | 9.658 | 0 | 0 | 0 |
| BRACE2010348 | 0 | 0 | 0 | 100 | 0 | 0 | 0 |
| BRACE2010440 | 0 | 0 | 0 | 100 | 0 | 0 | 0 |
| BRACE2010444 | 0 | 0 | 0 | 100 | 0 | 0 | 0 |
| BRACE2010477 | 0 | 0 | 0 | 100 | 0 | 0 | 0 |
| BRACE2010489 | 0 | 0 | 0 | 15.026 | 0 | 10.665 | 0 |
| BRACE2010535 | 0 | 0 | 0 | 100 | 0 | 0 | 0 |
| BRACE2010550 | 0 | 0 | 0 | 100 | 0 | 0 | 0 |
| BRACE2010598 | 0 | 0 | 0 | 100 | 0 | 0 | 0 |
| BRACE2010632 | 0 | 0 | 0 | 100 | 0 | 0 | 0 |
| BRACE2010642 | 0 | 0 | 0 | 10.913 | 0 | 0 | 0 |
| BRACE2010651 | 0 | 0 | 0 | 13.116 | 0 | 0 | 0 |
| BRACE2010669 | 0 | 0 | 0 | 9.049 | 0 | 0 | 0 |
| BRACE2010684 | 0 | 0 | 0 | 38.787 | 0 | 0 | 0 |
| BRACE2010753 | 0 | 0 | 0 | 13.239 | 0 | 0 | 0 |
| BRACE2010813 | 0 | 0 | 0 | 100 | 0 | 0 | 0 |
| BRACE2010828 | 0 | 0 | 0 | 27.755 | 0 | 0 | 0 |
| BRACE2010837 | 0 | 0 | 0 | 100 | 0 | 0 | 0 |
| BRACE2010888 | 0 | 0 | 0 | 100 | 0 | 0 | 0 |
| BRACE2010937 | 0 | 0 | 0 | 100 | 0 | 0 | 0 |
| BRACE2010983 | 0 | 0 | 0 | 100 | 0 | 0 | 0 |
| BRACE2011007 | 0 | 0 | 0 | 100 | 0 | 0 | 0 |
| BRACE2011025 | 0 | 0 | 0 | 100 | 0 | 0 | 0 |
| BRACE2011183 | 0 | 0 | 0 | 22.812 | 0 | 6.477 | 0 |
| BRACE2011199 | 0 | 0 | 0 | 100 | 0 | 0 | 0 |
| BRACE2011265 | 0 | 0 | 0 | 2.633 | 0 | 0 | 0 |
| BRACE2011389 | 0 | 0 | 0 | 100 | 0 | 0 | 0 |
| BRACE2011478 | 0 | 0 | 0 | 100 | 0 | 0 | 0 |
| BRACE2011545 | 0 | 0 | 0 | 100 | 0 | 0 | 0 |
| BRACE2011592 | 0 | 0 | 0 | 100 | 0 | 0 | 0 |
| BRACE2011611 | 0 | 0 | 0 | 100 | 0 | 0 | 0 |
| BRACE2011646 | 0 | 0 | 0 | 100 | 0 | 0 | 0 |
| BRACE2011677 | 0 | 0 | 0 | 100 | 0 | 0 | 0 |
| BRACE2011703 | 0 | 0 | 0 | 28.977 | 0 | 0 | 0 |
| BRACE2011747 | 0 | 0 | 0 | 100 | 0 | 0 | 0 |
| BRACE2011838 | 0 | 0 | 0 | 100 | 0 | 0 | 0 |
| BRACE2011892 | 0 | 0 | 0 | 100 | 0 | 0 | 0 |
| BRACE2011904 | 0 | 0 | 0 | 100 | 0 | 0 | 0 |
| BRACE2011947 | 0 | 0 | 0 | 100 | 0 | 0 | 0 |
| BRACE2012061 | 0 | 0 | 0 | 11.958 | 0 | 0 | 0 |
| BRACE2012062 | 0 | 0 | 0 | 100 | 0 | 0 | 0 |
| BRACE2012185 | 0 | 0 | 0 | 100 | 0 | 0 | 0 |
| BRACE2012222 | 0 | 0 | 0 | 60.579 | 0 | 0 | 0 |
| BRACE2012232 | 0 | 0 | 0 | 41.329 | 0 | 58.671 | 0 |
| BRACE2012291 | 0 | 0 | 0 | 27.755 | 0 | 0 | 0 |
| BRACE2012317 | 0 | 0 | 0 | 13.150 | 0 | 13.828 | 0 |
| BRACE2012510 | 0 | 0 | 0 | 100 | 0 | 0 | 0 |
| BRACE2012528 | 0 | 0 | 0 | 15.820 | 1.714 | 10.512 | 0 |
| BRACE2012625 | 0 | 0 | 0 | 100 | 0 | 0 | 0 |
| BRACE2012653 | 0 | 0 | 0 | 41.329 | 0 | 58.671 | 0 |
| BRACE2012814 | 0 | 0 | 0 | 8.707 | 0 | 1.545 | 0 |
| BRACE2012833 | 0 | 0 | 0 | 100 | 0 | 0 | 0 |
| BRACE2012838 | 0 | 0 | 0 | 100 | 0 | 0 | 0 |
| BRACE2012936 | 0 | 0 | 0 | 100 | 0 | 0 | 0 |
| BRACE2012947 | 0 | 0 | 0 | 100 | 0 | 0 | 0 |
| BRACE2013009 | 0 | 0 | 0 | 100 | 0 | 0 | 0 |
| BRACE2013010 | 0 | 0 | 0 | 100 | 0 | 0 | 0 |
| BRACE2013126 | 0 | 0 | 0 | 100 | 0 | 0 | 0 |
| BRACE2013132 | 0 | 0 | 0 | 100 | 0 | 0 | 0 |
| BRACE2013149 | 0 | 0 | 0 | 100 | 0 | 0 | 0 |
| BRACE2013369 | 0 | 0 | 0 | 22.162 | 0 | 0 | 0 |
| BRACE2013806 | 0 | 0 | 0 | 100 | 0 | 0 | 0 |
| BRACE2013855 | 0 | 0 | 0 | 11.386 | 0 | 0 | 0 |
| BRACE2013911 | 0 | 0 | 0 | 5.335 | 0 | 7.574 | 0 |
| BRACE2014108 | 0 | 0 | 0 | 100 | 0 | 0 | 0 |
| BRACE2014161 | 0 | 0 | 0 | 100 | 0 | 0 | 0 |
| BRACE2014232 | 0 | 0 | 0 | 100 | 0 | 0 | 0 |
| BRACE2014257 | 0 | 0 | 0 | 44.008 | 0 | 0 | 0 |
| BRACE2014268 | 0 | 0 | 0 | 100 | 0 | 0 | 0 |
| BRACE2014306 | 0 | 0 | 0 | 6.909 | 0 | 0 | 0 |
| BRACE2014475 | 0 | 0 | 0 | 100 | 0 | 0 | 0 |
| BRACE2014657 | 0 | 0 | 0 | 76.765 | 0 | 7.784 | 0 |
| BRACE2014746 | 0 | 0 | 0 | 9.906 | 25.214 | 7.031 | 0 |
| BRACE2014780 | 0 | 0 | 0 | 100 | 0 | 0 | 0 |
| BRACE2014818 | 0 | 0 | 0 | 28.977 | 0 | 0 | 0 |
| BRACE2014821 | 0 | 0 | 0 | 100 | 0 | 0 | 0 |
| BRACE2014824 | 0 | 0 | 0 | 100 | 0 | 0 | 0 |
| BRACE2014850 | 0 | 52.642 | 0 | 15.970 | 0 | 0 | 0 |
| BRACE2014854 | 0 | 0 | 0 | 100 | 0 | 0 | 0 |
| BRACE2015031 | 0 | 0 | 0 | 100 | 0 | 0 | 0 |
| BRACE2015058 | 0 | 0 | 0 | 6.224 | 0 | 8.836 | 0 |
| BRACE2015132 | 0 | 0 | 0 | 11.694 | 0 | 0 | 0 |
| BRACE2015262 | 0 | 0 | 0 | 100 | 0 | 0 | 0 |
| BRACE2015270 | 0 | 0 | 0 | 100 | 0 | 0 | 0 |
| BRACE2015287 | 0 | 0 | 0 | 1.630 | 0 | 0 | 0 |
| BRACE2015314 | 0 | 0 | 0 | 100 | 0 | 0 | 0 |
| BRACE2015352 | 0 | 0 | 0 | 100 | 0 | 0 | 0 |
| BRACE2015368 | 0 | 0 | 0 | 41.512 | 0 | 0 | 0 |
| BRACE2015412 | 0 | 0 | 0 | 17.282 | 0 | 0 | 0 |
| BRACE2015436 | 0 | 0 | 0 | 100 | 0 | 0 | 0 |
| BRACE2015741 | 0 | 0 | 0 | 100 | 0 | 0 | 0 |
| BRACE2015756 | 0 | 0 | 0 | 100 | 0 | 0 | 0 |
| BRACE2015969 | 0 | 0 | 0 | 28.977 | 0 | 0 | 0 |
| BRACE2015995 | 0 | 0 | 0 | 100 | 0 | 0 | 0 |
| BRACE2016058 | 0 | 0 | 0 | 100 | 0 | 0 | 0 |
| BRACE2016194 | 0 | 0 | 0 | 23.627 | 0 | 0 | 0 |
| BRACE2016315 | 0 | 0 | 0 | 100 | 0 | 0 | 0 |
| BRACE2016325 | 0 | 0 | 0 | 100 | 0 | 0 | 0 |
| BRACE2016335 | 0 | 0 | 0 | 9.897 | 0 | 0 | 0 |
| BRACE2016362 | 0 | 0 | 0 | 32.824 | 0 | 15.533 | 0 |
| BRACE2016366 | 0 | 0 | 0 | 12.062 | 30.702 | 0 | 0 |
| BRACE2016465 | 0 | 0 | 0 | 100 | 0 | 0 | 0 |
| BRACE2016516 | 0 | 0 | 0 | 100 | 0 | 0 | 0 |
| BRACE2016583 | 0 | 0 | 0 | 100 | 0 | 0 | 0 |
| BRACE2016708 | 0 | 0 | 0 | 100 | 0 | 0 | 0 |
| BRACE2016821 | 0 | 0 | 0 | 100 | 0 | 0 | 0 |
| BRACE2016896 | 0 | 0 | 0 | 100 | 0 | 0 | 0 |
| BRACE2016981 | 0 | 0 | 0 | 16.089 | 0 | 0 | 0 |
| BRACE2017108 | 0 | 0 | 0 | 100 | 0 | 0 | 0 |
| BRACE2017124 | 0 | 0 | 0 | 100 | 0 | 0 | 0 |
| BRACE2017298 | 0 | 0 | 0 | 100 | 0 | 0 | 0 |
| BRACE2017359 | 0 | 0 | 0 | 58.183 | 0 | 0 | 0 |
| BRACE2017397 | 0 | 0 | 0 | 3.348 | 0 | 2.376 | 0 |
| BRACE2017410 | 0 | 0 | 0 | 100 | 0 | 0 | 0 |
| BRACE2017438 | 0 | 0 | 0 | 58.486 | 0 | 41.514 | 0 |
| BRACE2017574 | 0 | 0 | 0 | 7.273 | 0 | 0 | 0 |
| BRACE2017580 | 0 | 0 | 0 | 100 | 0 | 0 | 0 |
| BRACE2017587 | 0 | 0 | 0 | 100 | 0 | 0 | 0 |
| BRACE2017720 | 0 | 0 | 0 | 100 | 0 | 0 | 0 |
| BRACE2017844 | 0 | 0 | 0 | 29.179 | 0 | 15.534 | 0 |
| BRACE2017872 | 0 | 0 | 0 | 100 | 0 | 0 | 0 |
| BRACE2017929 | 0 | 0 | 0 | 100 | 0 | 0 | 0 |
| BRACE2017934 | 0 | 0 | 0 | 13.120 | 0 | 0 | 0 |
| BRACE2017985 | 0 | 0 | 0 | 38.787 | 0 | 0 | 0 |
| BRACE2017992 | 0 | 0 | 0 | 100 | 0 | 0 | 0 |
| BRACE2018337 | 0 | 0 | 0 | 1.691 | 0 | 0 | 0 |
| BRACE2018443 | 0 | 0 | 0 | 45.981 | 0 | 0 | 0 |
| BRACE2018448 | 0 | 0 | 0 | 100 | 0 | 0 | 0 |
| BRACE2018568 | 0 | 0 | 0 | 100 | 0 | 0 | 0 |
| BRACE2018700 | 0 | 0 | 0 | 100 | 0 | 0 | 0 |
| BRACE2018727 | 0 | 0 | 0 | 100 | 0 | 0 | 0 |
| BRACE2018736 | 0 | 0 | 0 | 28.707 | 0 | 0 | 0 |
| BRACE2018759 | 0 | 0 | 0 | 100 | 0 | 0 | 0 |
| BRACE2018762 | 0 | 0 | 0 | 41.027 | 0 | 0 | 0 |
| BRACE2018782 | 0 | 0 | 0 | 100 | 0 | 0 | 0 |
| BRACE2018847 | 0 | 0 | 0 | 13.846 | 0 | 0 | 0 |
| BRACE2019004 | 0 | 0 | 0 | 39.025 | 0 | 0 | 0 |
| BRACE2019044 | 0 | 0 | 0 | 100 | 0 | 0 | 0 |
| BRACE2019147 | 0 | 0 | 0 | 1.520 | 0 | 0 | 0 |
| BRACE2019244 | 0 | 0 | 0 | 28.977 | 0 | 0 | 0 |
| BRACE2019258 | 0 | 0 | 0 | 100 | 0 | 0 | 0 |
| BRACE2019327 | 0 | 0 | 0 | 6.360 | 0 | 0 | 0 |
| BRACE2019348 | 0 | 0 | 0 | 74.228 | 0 | 0 | 0 |
| BRACE2019371 | 0 | 0 | 0 | 21.225 | 0 | 0 | 0 |
| BRACE2019467 | 0 | 0 | 0 | 100 | 0 | 0 | 0 |
| BRACE2019510 | 0 | 0 | 0 | 100 | 0 | 0 | 0 |
| BRACE2019519 | 0 | 0 | 0 | 13.211 | 0 | 0 | 0 |
| BRACE2019528 | 0 | 0 | 0 | 100 | 0 | 0 | 0 |
| BRACE2019618 | 0 | 0 | 0 | 100 | 0 | 0 | 0 |
| BRACE2019696 | 0 | 0 | 0 | 100 | 0 | 0 | 0 |
| BRACE2019703 | 0 | 0 | 0 | 100 | 0 | 0 | 0 |
| BRACE2019843 | 0 | 0 | 0 | 100 | 0 | 0 | 0 |
| BRACE2019865 | 0 | 0 | 0 | 100 | 0 | 0 | 0 |
| BRACE2019872 | 0 | 0 | 0 | 100 | 0 | 0 | 0 |
| BRACE2019877 | 0 | 0 | 0 | 8.622 | 0 | 6.120 | 0 |
| BRACE2020028 | 0 | 0 | 0 | 100 | 0 | 0 | 0 |
| BRACE2020077 | 0 | 0 | 0 | 100 | 0 | 0 | 0 |
| BRACE2020097 | 0 | 0 | 0 | 100 | 0 | 0 | 0 |
| BRACE2020157 | 0 | 0 | 0 | 100 | 0 | 0 | 0 |
| BRACE2020278 | 0 | 0 | 0 | 100 | 0 | 0 | 0 |
| BRACE2020358 | 0 | 0 | 0 | 100 | 0 | 0 | 0 |
| BRACE2020467 | 0 | 0 | 0 | 100 | 0 | 0 | 0 |
| BRACE2020584 | 0 | 0 | 0 | 37.308 | 0 | 0 | 0 |
| BRACE2020652 | 0 | 0 | 0 | 100 | 0 | 0 | 0 |
| BRACE2020709 | 0 | 0 | 0 | 100 | 0 | 0 | 0 |
| BRACE2020742 | 0 | 0 | 0 | 100 | 0 | 0 | 0 |
| BRACE2020756 | 0 | 0 | 0 | 100 | 0 | 0 | 0 |
| BRACE2020863 | 0 | 0 | 0 | 100 | 0 | 0 | 0 |
| BRACE2020982 | 0 | 0 | 0 | 100 | 0 | 0 | 0 |
| BRACE2021014 | 0 | 0 | 0 | 4.205 | 0 | 0 | 0 |
| BRACE2021143 | 0 | 0 | 0 | 11.233 | 0 | 0 | 0 |
| BRACE2021148 | 0 | 0 | 0 | 100 | 0 | 0 | 0 |
| BRACE2021245 | 0 | 0 | 0 | 100 | 0 | 0 | 0 |
| BRACE2021254 | 0 | 0 | 0 | 100 | 0 | 0 | 0 |
| BRACE2021264 | 0 | 0 | 0 | 100 | 0 | 0 | 0 |
| BRACE2021344 | 0 | 0 | 0 | 22.162 | 0 | 0 | 0 |
| BRACE2021433 | 0 | 0 | 0 | 100 | 0 | 0 | 0 |
| BRACE2021478 | 0 | 0 | 0 | 9.188 | 0 | 0 | 0 |
| BRACE2021541 | 0 | 0 | 0 | 11.299 | 0 | 32.080 | 0 |
| BRACE2021670 | 0 | 0 | 0 | 100 | 0 | 0 | 0 |
| BRACE2021695 | 0 | 0 | 0 | 100 | 0 | 0 | 0 |
| BRACE2021708 | 0 | 0 | 0 | 21.015 | 0 | 0 | 0 |
| BRACE2021721 | 0 | 0 | 0 | 100 | 0 | 0 | 0 |
| BRACE2021932 | 0 | 0 | 0 | 41.027 | 0 | 0 | 0 |
| BRACE2021936 | 0 | 0 | 0 | 100 | 0 | 0 | 0 |
| BRACE2022030 | 0 | 0 | 0 | 100 | 0 | 0 | 0 |
| BRACE2022158 | 0 | 0 | 0 | 100 | 0 | 0 | 0 |
| BRACE2022196 | 0 | 0 | 0 | 100 | 0 | 0 | 0 |
| BRACE2022270 | 0 | 0 | 0 | 100 | 0 | 0 | 0 |
| BRACE2022328 | 0 | 0 | 0 | 100 | 0 | 0 | 0 |
| BRACE2022333 | 0 | 0 | 0 | 12.602 | 0 | 0 | 0 |
| BRACE2022389 | 0 | 0 | 0 | 7.542 | 0 | 0 | 0 |
| BRACE2022394 | 0 | 0 | 0 | 100 | 0 | 0 | 0 |
| BRACE2022435 | 0 | 0 | 0 | 100 | 0 | 0 | 0 |
| BRACE2022448 | 0 | 0 | 0 | 100 | 0 | 0 | 0 |
| BRACE2022450 | 0 | 0 | 0 | 100 | 0 | 0 | 0 |
| BRACE2022549 | 0 | 0 | 0 | 36.360 | 0 | 0 | 0 |
| BRACE2022633 | 0 | 0 | 0 | 100 | 0 | 0 | 0 |
| BRACE2022638 | 23.363 | 0 | 0 | 4.761 | 0 | 0.751 | 0 |
| BRACE2022693 | 0 | 0 | 0 | 100 | 0 | 0 | 0 |
| BRACE2022848 | 0 | 0 | 0 | 100 | 0 | 0 | 0 |
| BRACE2022928 | 0 | 0 | 0 | 100 | 0 | 0 | 0 |
| BRACE2022990 | 0 | 0 | 0 | 41.329 | 0 | 58.671 | 0 |
| BRACE2023069 | 0 | 0 | 0 | 100 | 0 | 0 | 0 |
| BRACE2023070 | 0 | 0 | 0 | 100 | 0 | 0 | 0 |
| BRACE2023223 | 0 | 0 | 0 | 25.927 | 0 | 36.806 | 0 |
| BRACE2023268 | 0 | 0 | 0 | 100 | 0 | 0 | 0 |
| BRACE2023284 | 0 | 0 | 0 | 100 | 0 | 0 | 0 |
| BRACE2023404 | 0 | 0 | 0 | 100 | 0 | 0 | 0 |
| BRACE2023451 | 0 | 0 | 0 | 100 | 0 | 0 | 0 |
| BRACE2023540 | 0 | 0 | 0 | 100 | 0 | 0 | 0 |
| BRACE2023633 | 0 | 0 | 0 | 100 | 0 | 0 | 0 |
| BRACE2023718 | 0 | 0 | 0 | 11.391 | 0 | 0 | 0 |
| BRACE2023727 | 0 | 0 | 0 | 14.013 | 0 | 0 | 0 |
| BRACE2023744 | 0 | 0 | 0 | 100 | 0 | 0 | 0 |
| BRACE2023800 | 0 | 0 | 0 | 100 | 0 | 0 | 0 |
| BRACE2023801 | 0 | 0 | 0 | 26.645 | 0 | 0 | 0 |
| BRACE2024074 | 0 | 0 | 0 | 45.981 | 0 | 0 | 0 |
| BRACE2024222 | 0 | 0 | 0 | 100 | 0 | 0 | 0 |
| BRACE2024610 | 0 | 0 | 0 | 100 | 0 | 0 | 0 |
| BRACE2024627 | 0 | 0 | 0 | 8.689 | 0 | 0 | 0 |
| BRACE2024781 | 0 | 0 | 0 | 41.512 | 0 | 0 | 0 |
| BRACE2024826 | 0 | 0 | 0 | 100 | 0 | 0 | 0 |
| BRACE2025018 | 0 | 0 | 0 | 100 | 0 | 0 | 0 |
| BRACE2025316 | 0 | 0 | 0 | 100 | 0 | 0 | 0 |
| BRACE2025333 | 0 | 0 | 0 | 100 | 0 | 0 | 0 |
| BRACE2025437 | 0 | 0 | 0 | 2.167 | 0 | 0 | 0 |
| BRACE2025452 | 0 | 0 | 0 | 100 | 0 | 0 | 0 |
| BRACE2025492 | 0 | 0 | 0 | 18.680 | 0 | 0 | 0 |
| BRACE2025710 | 0 | 0 | 0 | 100 | 0 | 0 | 0 |
| BRACE2025796 | 0 | 0 | 0 | 22.162 | 0 | 0 | 0 |
| BRACE2025992 | 0 | 0 | 0 | 100 | 0 | 0 | 0 |
| BRACE2026054 | 0 | 0 | 0 | 16.225 | 0 | 0 | 0 |
| BRACE2026131 | 0 | 0 | 0 | 52.057 | 0 | 0 | 0 |
| BRACE2026141 | 0 | 0 | 0 | 27.755 | 0 | 0 | 0 |
| BRACE2026142 | 0 | 0 | 0 | 16.015 | 0 | 0 | 0 |
| BRACE2026293 | 0 | 0 | 0 | 100 | 0 | 0 | 0 |
| BRACE2026294 | 0 | 0 | 0 | 100 | 0 | 0 | 0 |
| BRACE2026404 | 0 | 0 | 0 | 100 | 0 | 0 | 0 |
| BRACE2026675 | 0 | 0 | 0 | 100 | 0 | 0 | 0 |
| BRACE2026725 | 0 | 0 | 0 | 13.014 | 0 | 0 | 0 |
| BRACE2026836 | 0 | 0 | 0 | 4.898 | 0 | 0 | 0 |
| BRACE2026920 | 0 | 0 | 0 | 100 | 0 | 0 | 0 |
| BRACE2026971 | 0 | 0 | 0 | 100 | 0 | 0 | 0 |
| BRACE2027018 | 0 | 0 | 0 | 16.691 | 0 | 0 | 0 |
| BRACE2027221 | 0 | 0 | 0 | 100 | 0 | 0 | 0 |
| BRACE2027258 | 0 | 0 | 0 | 23.981 | 0 | 34.044 | 0 |
| BRACE2027312 | 0 | 0 | 0 | 100 | 0 | 0 | 0 |
| BRACE2027382 | 0 | 0 | 0 | 100 | 0 | 0 | 0 |
| BRACE2027389 | 0 | 0 | 0 | 100 | 0 | 0 | 0 |
| BRACE2027408 | 0 | 0 | 0 | 100 | 0 | 0 | 0 |
| BRACE2027643 | 0 | 0 | 0 | 10.223 | 0 | 0 | 0 |
| BRACE2027767 | 0 | 0 | 0 | 41.512 | 0 | 0 | 0 |
| BRACE2027770 | 0 | 0 | 0 | 100 | 0 | 0 | 0 |
| BRACE2027879 | 0 | 0 | 0 | 100 | 0 | 0 | 0 |
| BRACE2027896 | 0 | 0 | 0 | 18.152 | 0 | 25.769 | 0 |
| BRACE2027970 | 0 | 0 | 0 | 45.981 | 0 | 0 | 0 |
| BRACE2028171 | 0 | 0 | 0 | 10.913 | 0 | 0 | 0 |
| BRACE2028392 | 0 | 0 | 0 | 7.236 | 0 | 0 | 0 |
| BRACE2028410 | 0 | 0 | 0 | 100 | 0 | 0 | 0 |
| BRACE2028636 | 0 | 0 | 0 | 37.993 | 48.354 | 0 | 0 |
| BRACE2028741 | 0 | 0 | 0 | 100 | 0 | 0 | 0 |
| BRACE2028956 | 0 | 0 | 0 | 100 | 0 | 0 | 0 |
| BRACE2028970 | 0 | 0 | 0 | 100 | 0 | 0 | 0 |
| BRACE2029112 | 0 | 0 | 0 | 100 | 0 | 0 | 0 |
| BRACE2029356 | 0 | 0 | 0 | 45.981 | 0 | 0 | 0 |
| BRACE2029396 | 0 | 0 | 0 | 100 | 0 | 0 | 0 |
| BRACE2029581 | 0 | 0 | 0 | 100 | 0 | 0 | 0 |
| BRACE2029644 | 0 | 0 | 0 | 45.981 | 0 | 0 | 0 |
| BRACE2029849 | 0 | 0 | 0 | 100 | 0 | 0 | 0 |
| BRACE2030039 | 0 | 0 | 0 | 100 | 0 | 0 | 0 |
| BRACE2030096 | 0 | 0 | 0 | 100 | 0 | 0 | 0 |
| BRACE2030323 | 0 | 0 | 0 | 33.350 | 0 | 31.563 | 0 |
| BRACE2030326 | 0 | 0 | 0 | 100 | 0 | 0 | 0 |
| BRACE2030341 | 0 | 0 | 0 | 4.909 | 0 | 6.969 | 0 |
| BRACE2030345 | 0 | 0 | 0 | 45.981 | 0 | 0 | 0 |
| BRACE2030736 | 0 | 0 | 0 | 100 | 0 | 0 | 0 |
| BRACE2030883 | 0 | 0 | 0 | 100 | 0 | 0 | 0 |
| BRACE2030884 | 0 | 0 | 0 | 100 | 0 | 0 | 0 |
| BRACE2031154 | 0 | 0 | 0 | 39.025 | 0 | 0 | 0 |
| BRACE2031232 | 0 | 0 | 0 | 100 | 0 | 0 | 0 |
| BRACE2031527 | 0 | 0 | 0 | 100 | 0 | 0 | 0 |
| BRACE2031531 | 0 | 0 | 0 | 100 | 0 | 0 | 0 |
| BRACE2031553 | 0 | 0 | 0 | 100 | 0 | 0 | 0 |
| BRACE2031899 | 0 | 0 | 0 | 100 | 0 | 0 | 0 |
| BRACE2032044 | 0 | 0 | 0 | 100 | 0 | 0 | 0 |
| BRACE2032090 | 0 | 0 | 0 | 100 | 0 | 0 | 0 |
| BRACE2032134 | 0 | 0 | 0 | 100 | 0 | 0 | 0 |
| BRACE2032148 | 0 | 0 | 0 | 100 | 0 | 0 | 0 |
| BRACE2032182 | 0 | 0 | 0 | 100 | 0 | 0 | 0 |
| BRACE2032329 | 0 | 0 | 0 | 100 | 0 | 0 | 0 |
| BRACE2032385 | 0 | 0 | 0 | 100 | 0 | 0 | 0 |
| BRACE2032436 | 0 | 0 | 0 | 100 | 0 | 0 | 0 |
| BRACE2032477 | 0 | 0 | 0 | 7.910 | 0 | 0 | 0 |
| BRACE2032502 | 0 | 0 | 0 | 39.025 | 0 | 0 | 0 |
| BRACE2032538 | 0 | 0 | 0 | 100 | 0 | 0 | 0 |
| BRACE2032584 | 0 | 0 | 0 | 100 | 0 | 0 | 0 |
| BRACE2032823 | 0 | 0 | 0 | 100 | 0 | 0 | 0 |
| BRACE2033128 | 0 | 0 | 0 | 100 | 0 | 0 | 0 |
| BRACE2033394 | 0 | 0 | 0 | 100 | 0 | 0 | 0 |
| BRACE2033478 | 0 | 0 | 0 | 100 | 0 | 0 | 0 |
| BRACE2033720 | 0 | 0 | 0 | 100 | 0 | 0 | 0 |
| BRACE2033786 | 0 | 0 | 0 | 100 | 0 | 0 | 0 |
| BRACE2034434 | 0 | 0 | 0 | 100 | 0 | 0 | 0 |
| BRACE2034523 | 0 | 0 | 0 | 100 | 0 | 0 | 0 |
| BRACE2034616 | 0 | 0 | 0 | 100 | 0 | 0 | 0 |
| BRACE2034622 | 0 | 0 | 0 | 100 | 0 | 0 | 0 |
| BRACE2034870 | 0 | 0 | 0 | 100 | 0 | 0 | 0 |
| BRACE2035003 | 0 | 0 | 0 | 100 | 0 | 0 | 0 |
| BRACE2035120 | 0 | 0 | 0 | 100 | 0 | 0 | 0 |
| BRACE2035124 | 0 | 0 | 0 | 100 | 0 | 0 | 0 |
| BRACE2035191 | 0 | 0 | 0 | 100 | 0 | 0 | 0 |
| BRACE2035278 | 0 | 0 | 0 | 53.329 | 0 | 0 | 0 |
| BRACE2035381 | 0 | 0 | 0 | 36.117 | 0 | 10.254 | 0 |
| BRACE2035441 | 0 | 0 | 0 | 100 | 0 | 0 | 0 |
| BRACE2035485 | 0 | 0 | 0 | 100 | 0 | 0 | 0 |
| BRACE2036005 | 0 | 0 | 0 | 100 | 0 | 0 | 0 |
| BRACE2036096 | 0 | 0 | 0 | 100 | 0 | 0 | 0 |
| BRACE2036743 | 0 | 0 | 0 | 100 | 0 | 0 | 0 |
| BRACE2036830 | 0 | 0 | 0 | 100 | 0 | 0 | 0 |
| BRACE2036834 | 0 | 0 | 0 | 100 | 0 | 0 | 0 |
| BRACE2036900 | 0 | 0 | 0 | 100 | 0 | 0 | 0 |
| BRACE2037132 | 0 | 0 | 0 | 41.512 | 0 | 0 | 0 |
| BRACE2037294 | 0 | 0 | 0 | 100 | 0 | 0 | 0 |
| BRACE2037295 | 0 | 0 | 0 | 2.328 | 0 | 0 | 0 |
| BRACE2037299 | 0 | 0 | 0 | 100 | 0 | 0 | 0 |
| BRACE2037310 | 0 | 0 | 0 | 27.851 | 0 | 0 | 0 |
| BRACE2037431 | 0 | 0 | 0 | 100 | 0 | 0 | 0 |
| BRACE2037692 | 0 | 0 | 0 | 100 | 0 | 0 | 0 |
| BRACE2037847 | 0 | 0 | 0 | 100 | 0 | 0 | 0 |
| BRACE2038114 | 0 | 0 | 0 | 100 | 0 | 0 | 0 |
| BRACE2038269 | 0 | 0 | 0 | 52.057 | 0 | 0 | 0 |
| BRACE2038271 | 0 | 0 | 0 | 100 | 0 | 0 | 0 |
| BRACE2038329 | 0 | 0 | 0 | 100 | 0 | 0 | 0 |
| BRACE2038492 | 0 | 0 | 0 | 100 | 0 | 0 | 0 |
| BRACE2038551 | 0 | 0 | 0 | 100 | 0 | 0 | 0 |
| BRACE2038618 | 0 | 0 | 0 | 100 | 0 | 0 | 0 |
| BRACE2039009 | 0 | 0 | 0 | 100 | 0 | 0 | 0 |
| BRACE2039128 | 0 | 0 | 0 | 100 | 0 | 0 | 0 |
| BRACE2039170 | 0 | 0 | 0 | 100 | 0 | 0 | 0 |
| BRACE2039249 | 0 | 0 | 0 | 100 | 0 | 0 | 0 |
| BRACE2039286 | 0 | 0 | 0 | 100 | 0 | 0 | 0 |
| BRACE2039297 | 0 | 0 | 0 | 100 | 0 | 0 | 0 |
| BRACE2039327 | 0 | 0 | 0 | 100 | 0 | 0 | 0 |
| BRACE2039362 | 0 | 0 | 0 | 100 | 0 | 0 | 0 |
| BRACE2039475 | 0 | 0 | 0 | 100 | 0 | 0 | 0 |
| BRACE2039600 | 0 | 0 | 0 | 100 | 0 | 0 | 0 |
| BRACE2039607 | 0 | 0 | 0 | 100 | 0 | 0 | 0 |
| BRACE2039624 | 0 | 0 | 0 | 0.687 | 0 | 1.950 | 0 |
| BRACE2039734 | 0 | 0 | 0 | 100 | 0 | 0 | 0 |
| BRACE2039823 | 0 | 0 | 0 | 41.329 | 0 | 58.671 | 0 |
| BRACE2039832 | 0 | 0 | 0 | 100 | 0 | 0 | 0 |
| BRACE2039893 | 0 | 0 | 0 | 100 | 0 | 0 | 0 |
| BRACE2039986 | 0 | 0 | 81.787 | 7.527 | 0 | 10.686 | 0 |
| BRACE2040138 | 0 | 0 | 0 | 100 | 0 | 0 | 0 |
| BRACE2040325 | 0 | 0 | 0 | 100 | 0 | 0 | 0 |
| BRACE2040514 | 0 | 0 | 0 | 100 | 0 | 0 | 0 |
| BRACE2040640 | 0 | 0 | 0 | 100 | 0 | 0 | 0 |
| BRACE2040987 | 0 | 0 | 0 | 100 | 0 | 0 | 0 |
| BRACE2041009 | 0 | 0 | 0 | 100 | 0 | 0 | 0 |
| BRACE2041095 | 0 | 0 | 0 | 100 | 0 | 0 | 0 |
| BRACE2041200 | 0 | 0 | 0 | 38.787 | 0 | 0 | 0 |
| BRACE2041264 | 0 | 0 | 0 | 100 | 0 | 0 | 0 |
| BRACE2041890 | 0 | 0 | 0 | 100 | 0 | 0 | 0 |
| BRACE2041898 | 0 | 0 | 0 | 100 | 0 | 0 | 0 |
| BRACE2042394 | 0 | 0 | 0 | 100 | 0 | 0 | 0 |
| BRACE2042398 | 0 | 0 | 0 | 100 | 0 | 0 | 0 |
| BRACE2042550 | 0 | 0 | 0 | 100 | 0 | 0 | 0 |
| BRACE2042620 | 0 | 0 | 0 | 100 | 0 | 0 | 0 |
| BRACE2042628 | 0 | 0 | 0 | 100 | 0 | 0 | 0 |
| BRACE2042873 | 0 | 0 | 0 | 100 | 0 | 0 | 0 |
| BRACE2043036 | 0 | 0 | 0 | 100 | 0 | 0 | 0 |
| BRACE2043105 | 0 | 0 | 0 | 100 | 0 | 0 | 0 |
| BRACE2043142 | 0 | 0 | 0 | 52.057 | 0 | 0 | 0 |
| BRACE2043248 | 0 | 0 | 0 | 100 | 0 | 0 | 0 |
| BRACE2043349 | 0 | 0 | 0 | 100 | 0 | 0 | 0 |
| BRACE2043381 | 0 | 0 | 0 | 7.639 | 0 | 0 | 0 |
| BRACE2043774 | 0 | 0 | 0 | 100 | 0 | 0 | 0 |
| BRACE2043942 | 0 | 0 | 0 | 100 | 0 | 0 | 0 |
| BRACE2044057 | 0 | 0 | 0 | 100 | 0 | 0 | 0 |
| BRACE2044105 | 0 | 0 | 0 | 14.283 | 0 | 0 | 0 |
| BRACE2044263 | 0 | 0 | 0 | 100 | 0 | 0 | 0 |
| BRACE2044286 | 0 | 0 | 0 | 26.499 | 0 | 0 | 0 |
| BRACE2044304 | 0 | 0 | 0 | 100 | 0 | 0 | 0 |
| BRACE2044473 | 0 | 0 | 0 | 100 | 0 | 0 | 0 |
| BRACE2044510 | 0 | 0 | 0 | 100 | 0 | 0 | 0 |
| BRACE2044640 | 0 | 0 | 0 | 100 | 0 | 0 | 0 |
| BRACE2044816 | 0 | 0 | 0 | 100 | 0 | 0 | 0 |
| BRACE2044946 | 0 | 0 | 0 | 100 | 0 | 0 | 0 |
| BRACE2044949 | 0 | 0 | 0 | 2.766 | 0 | 0 | 0 |
| BRACE2045300 | 0 | 0 | 0 | 100 | 0 | 0 | 0 |
| BRACE2045428 | 0 | 0 | 0 | 100 | 0 | 0 | 0 |
| BRACE2045445 | 0 | 0 | 0 | 37.308 | 0 | 0 | 0 |
| BRACE2045596 | 0 | 0 | 0 | 100 | 0 | 0 | 0 |
| BRACE2045772 | 0 | 0 | 0 | 2.055 | 0 | 0 | 0 |
| BRACE2045947 | 0 | 0 | 0 | 100 | 0 | 0 | 0 |
| BRACE2045954 | 0 | 0 | 0 | 38.766 | 0 | 0 | 0 |
| BRACE2046251 | 0 | 0 | 0 | 100 | 0 | 0 | 0 |
| BRACE2046295 | 0 | 0 | 0 | 100 | 0 | 0 | 0 |
| BRACE2046976 | 0 | 0 | 0 | 100 | 0 | 0 | 0 |
| BRACE2047011 | 0 | 0 | 0 | 100 | 0 | 0 | 0 |
| BRACE2047232 | 0 | 0 | 0 | 100 | 0 | 0 | 0 |
| BRACE2047350 | 0 | 0 | 0 | 45.981 | 0 | 0 | 0 |
| BRACE2047377 | 0 | 0 | 0 | 100 | 0 | 0 | 0 |
| BRACE2047385 | 0 | 0 | 0 | 100 | 0 | 0 | 0 |
| BRACE2047492 | 0 | 0 | 0 | 41.329 | 0 | 58.671 | 0 |
| BRACE2047558 | 0 | 0 | 0 | 100 | 0 | 0 | 0 |
| BRACE2047573 | 0 | 0 | 0 | 100 | 0 | 0 | 0 |
| BRACE2047835 | 0 | 0 | 0 | 100 | 0 | 0 | 0 |
| BRACE2047893 | 0 | 0 | 0 | 100 | 0 | 0 | 0 |
| BRACE2047975 | 0 | 0 | 0 | 100 | 0 | 0 | 0 |
| BRACE3000071 | 0 | 0 | 0 | 9.532 | 0 | 0 | 0 |
| BRACE3000404 | 0 | 0 | 0 | 100 | 0 | 0 | 0 |
| BRACE3000520 | 0 | 0 | 0 | 100 | 0 | 0 | 0 |
| BRACE3000697 | 0 | 0 | 0 | 100 | 0 | 0 | 0 |
| BRACE3000840 | 0 | 0 | 0 | 100 | 0 | 0 | 0 |
| BRACE3000973 | 0 | 0 | 0 | 28.699 | 0 | 13.581 | 0 |
| BRACE3001002 | 0 | 0 | 0 | 100 | 0 | 0 | 0 |
| BRACE3001058 | 0 | 0 | 0 | 100 | 0 | 0 | 0 |
| BRACE3001066 | 0 | 0 | 0 | 27.592 | 0 | 0 | 0 |
| BRACE3001113 | 0 | 0 | 0 | 18.680 | 0 | 0 | 0 |
| BRACE3001217 | 0 | 0 | 0 | 100 | 0 | 0 | 0 |
| BRACE3001299 | 0 | 0 | 0 | 100 | 0 | 0 | 0 |
| BRACE3001384 | 0 | 0 | 0 | 100 | 0 | 0 | 0 |
| BRACE3001391 | 0 | 0 | 0 | 100 | 0 | 0 | 0 |
| BRACE3001403 | 0 | 0 | 0 | 100 | 0 | 0 | 0 |
| BRACE3001595 | 0 | 0 | 0 | 100 | 0 | 0 | 0 |
| BRACE3001754 | 0 | 0 | 0 | 38.787 | 0 | 0 | 0 |
| BRACE3001948 | 0 | 0 | 0 | 100 | 0 | 0 | 0 |
| BRACE3001973 | 0 | 0 | 0 | 36.360 | 0 | 0 | 0 |
| BRACE3002184 | 0 | 0 | 0 | 19.020 | 0 | 0 | 0 |
| BRACE3002298 | 0 | 0 | 0 | 100 | 0 | 0 | 0 |
| BRACE3002344 | 0 | 0 | 0 | 100 | 0 | 0 | 0 |
| BRACE3002390 | 0 | 0 | 0 | 100 | 0 | 0 | 0 |
| BRACE3002420 | 0 | 0 | 0 | 100 | 0 | 0 | 0 |
| BRACE3002508 | 0 | 0 | 0 | 100 | 0 | 0 | 0 |
| BRACE3002541 | 0 | 0 | 0 | 100 | 0 | 0 | 0 |
| BRACE3002756 | 0 | 0 | 0 | 100 | 0 | 0 | 0 |
| BRACE3003004 | 0 | 0 | 0 | 100 | 0 | 0 | 0 |
| BRACE3003026 | 0 | 0 | 0 | 11.590 | 0 | 0 | 0 |
| BRACE3003053 | 0 | 0 | 0 | 36.360 | 0 | 0 | 0 |
| BRACE3003192 | 0 | 0 | 0 | 41.512 | 0 | 0 | 0 |
| BRACE3003413 | 0 | 0 | 0 | 45.981 | 0 | 0 | 0 |
| BRACE3003595 | 0 | 0 | 0 | 100 | 0 | 0 | 0 |
| BRACE3003698 | 0 | 0 | 0 | 45.981 | 0 | 0 | 0 |
| BRACE3003866 | 0 | 0 | 0 | 100 | 0 | 0 | 0 |
| BRACE3003920 | 0 | 0 | 0 | 100 | 0 | 0 | 0 |
| BRACE3004046 | 0 | 0 | 0 | 41.027 | 0 | 0 | 0 |
| BRACE3004058 | 0 | 0 | 0 | 100 | 0 | 0 | 0 |
| BRACE3004113 | 0 | 0 | 0 | 100 | 0 | 0 | 0 |
| BRACE3004150 | 0 | 0 | 0 | 2.757 | 0 | 0 | 0 |
| BRACE3004205 | 0 | 0 | 0 | 68.470 | 0 | 0 | 0 |
| BRACE3004358 | 0 | 0 | 0 | 100 | 0 | 0 | 0 |
| BRACE3004371 | 0 | 0 | 0 | 10.666 | 0 | 7.571 | 0 |
| BRACE3004435 | 0 | 0 | 0 | 100 | 0 | 0 | 0 |
| BRACE3004477 | 0 | 0 | 0 | 100 | 0 | 0 | 0 |
| BRACE3004767 | 0 | 0 | 0 | 41.512 | 0 | 0 | 0 |
| BRACE3004772 | 0 | 0 | 0 | 100 | 0 | 0 | 0 |
| BRACE3004783 | 0 | 0 | 0 | 100 | 0 | 0 | 0 |
| BRACE3004843 | 0 | 0 | 0 | 22.581 | 0 | 0 | 0 |
| BRACE3004862 | 0 | 0 | 0 | 38.787 | 0 | 0 | 0 |
| BRACE3004880 | 0 | 0 | 0 | 100 | 0 | 0 | 0 |
| BRACE3004887 | 0 | 0 | 0 | 100 | 0 | 0 | 0 |
| BRACE3004981 | 0 | 0 | 0 | 100 | 0 | 0 | 0 |
| BRACE3004996 | 0 | 0 | 0 | 100 | 0 | 0 | 0 |
| BRACE3004998 | 0 | 0 | 0 | 100 | 0 | 0 | 0 |
| BRACE3005103 | 0 | 0 | 0 | 100 | 0 | 0 | 0 |
| BRACE3005127 | 0 | 0 | 0 | 100 | 0 | 0 | 0 |
| BRACE3005145 | 0 | 0 | 0 | 100 | 0 | 0 | 0 |
| BRACE3005217 | 0 | 0 | 0 | 100 | 0 | 0 | 0 |
| BRACE3005225 | 0 | 0 | 0 | 100 | 0 | 0 | 0 |
| BRACE3005430 | 0 | 0 | 0 | 100 | 0 | 0 | 0 |
| BRACE3005499 | 0 | 0 | 0 | 22.199 | 0 | 0 | 0 |
| BRACE3005760 | 0 | 0 | 0 | 31.973 | 0 | 0 | 0 |
| BRACE3005870 | 0 | 0 | 0 | 100 | 0 | 0 | 0 |
| BRACE3005903 | 0 | 0 | 0 | 100 | 0 | 0 | 0 |
| BRACE3005938 | 0 | 0 | 0 | 3.908 | 0 | 1.110 | 0 |
| BRACE3005989 | 0 | 0 | 0 | 0.498 | 8.447 | 0 | 88.305 |
| BRACE3006113 | 0 | 0 | 0 | 100 | 0 | 0 | 0 |
| BRACE3006185 | 0 | 0 | 0 | 100 | 0 | 0 | 0 |
| BRACE3006226 | 0 | 0 | 0 | 100 | 0 | 0 | 0 |
| BRACE3006462 | 0 | 0 | 0 | 100 | 0 | 0 | 0 |
| BRACE3006463 | 0 | 0 | 0 | 100 | 0 | 0 | 0 |
| BRACE3006553 | 0 | 0 | 0 | 18.271 | 0 | 0 | 0 |
| BRACE3006872 | 0 | 0 | 0 | 100 | 0 | 0 | 0 |
| BRACE3006917 | 0 | 0 | 0 | 100 | 0 | 0 | 0 |
| BRACE3007058 | 0 | 0 | 0 | 52.057 | 0 | 0 | 0 |
| BRACE3007084 | 0 | 0 | 0 | 100 | 0 | 0 | 0 |
| BRACE3007085 | 0 | 0 | 0 | 100 | 0 | 0 | 0 |
| BRACE3007258 | 0 | 0 | 0 | 18.473 | 0 | 0 | 0 |
| BRACE3007322 | 0 | 0 | 0 | 100 | 0 | 0 | 0 |
| BRACE3007472 | 0 | 0 | 0 | 100 | 0 | 0 | 0 |
| BRACE3007480 | 0 | 0 | 0 | 13.820 | 0 | 6.540 | 0 |
| BRACE3007559 | 0 | 0 | 0 | 100 | 0 | 0 | 0 |
| BRACE3007625 | 0 | 0 | 0 | 100 | 0 | 0 | 0 |
| BRACE3007642 | 0 | 0 | 0 | 100 | 0 | 0 | 0 |
| BRACE3007649 | 0 | 0 | 0 | 100 | 0 | 0 | 0 |
| BRACE3007767 | 0 | 0 | 0 | 100 | 0 | 0 | 0 |
| BRACE3007869 | 0 | 0 | 0 | 100 | 0 | 0 | 0 |
| BRACE3008036 | 0 | 0 | 0 | 13.098 | 0 | 18.594 | 0 |
| BRACE3008066 | 0 | 0 | 0 | 100 | 0 | 0 | 0 |
| BRACE3008092 | 0 | 0 | 0 | 100 | 0 | 0 | 0 |
| BRACE3008095 | 0 | 0 | 0 | 45.981 | 0 | 0 | 0 |
| BRACE3008137 | 0 | 0 | 0 | 100 | 0 | 0 | 0 |
| BRACE3008255 | 0 | 0 | 0 | 100 | 0 | 0 | 0 |
| BRACE3008337 | 0 | 0 | 0 | 100 | 0 | 0 | 0 |
| BRACE3008384 | 0 | 0 | 0 | 56.141 | 0 | 0 | 0 |
| BRACE3008720 | 0 | 0 | 0 | 100 | 0 | 0 | 0 |
| BRACE3008772 | 0 | 0 | 0 | 37.308 | 0 | 0 | 0 |
| BRACE3009044 | 0 | 0 | 0 | 100 | 0 | 0 | 0 |
| BRACE3009075 | 0 | 0 | 0 | 100 | 0 | 0 | 0 |
| BRACE3009090 | 0 | 0 | 0 | 100 | 0 | 0 | 0 |
| BRACE3009127 | 0 | 0 | 0 | 100 | 0 | 0 | 0 |
| BRACE3009197 | 0 | 0 | 0 | 100 | 0 | 0 | 0 |
| BRACE3009237 | 0 | 0 | 0 | 12.875 | 0 | 0 | 0 |
| BRACE3009265 | 0 | 0 | 0 | 100 | 0 | 0 | 0 |
| BRACE3009297 | 0 | 0 | 0 | 100 | 0 | 0 | 0 |
| BRACE3009377 | 0 | 0 | 0 | 100 | 0 | 0 | 0 |
| BRACE3009392 | 0 | 0 | 0 | 100 | 0 | 0 | 0 |
| BRACE3009416 | 0 | 0 | 0 | 20.257 | 0 | 0 | 0 |
| BRACE3009539 | 0 | 0 | 0 | 100 | 0 | 0 | 0 |
| BRACE3009574 | 0 | 0 | 0 | 100 | 0 | 0 | 0 |
| BRACE3009701 | 0 | 0 | 0 | 100 | 0 | 0 | 0 |
| BRACE3009708 | 0 | 0 | 0 | 100 | 0 | 0 | 0 |
| BRACE3009724 | 0 | 0 | 0 | 41.512 | 0 | 0 | 0 |
| BRACE3009993 | 0 | 0 | 0 | 100 | 0 | 0 | 0 |
| BRACE3010076 | 0 | 0 | 0 | 100 | 0 | 0 | 0 |
| BRACE3010079 | 0 | 0 | 0 | 100 | 0 | 0 | 0 |
| BRACE3010086 | 0 | 0 | 0 | 100 | 0 | 0 | 0 |
| BRACE3010221 | 0 | 0 | 0 | 100 | 0 | 0 | 0 |
| BRACE3010283 | 0 | 0 | 0 | 38.787 | 0 | 0 | 0 |
| BRACE3010315 | 0 | 0 | 0 | 100 | 0 | 0 | 0 |
| BRACE3010397 | 0 | 0 | 0 | 24.243 | 0 | 0 | 0 |
| BRACE3010416 | 0 | 0 | 0 | 100 | 0 | 0 | 0 |
| BRACE3010428 | 0 | 0 | 0 | 3.250 | 0 | 3.460 | 0 |
| BRACE3010435 | 0 | 0 | 0 | 100 | 0 | 0 | 0 |
| BRACE3010438 | 0 | 0 | 0 | 5.084 | 0 | 1.804 | 0 |
| BRACE3010702 | 0 | 0 | 0 | 100 | 0 | 0 | 0 |
| BRACE3010862 | 0 | 0 | 0 | 100 | 0 | 0 | 0 |
| BRACE3011271 | 0 | 0 | 0 | 39.165 | 0 | 11.120 | 0 |
| BRACE3011421 | 0 | 0 | 0 | 40.103 | 0 | 0 | 0 |
| BRACE3011447 | 0 | 0 | 0 | 100 | 0 | 0 | 0 |
| BRACE3011505 | 0 | 0 | 0 | 100 | 0 | 0 | 0 |
| BRACE3011634 | 0 | 0 | 0 | 100 | 0 | 0 | 0 |
| BRACE3011774 | 0 | 0 | 0 | 100 | 0 | 0 | 0 |
| BRACE3012357 | 0 | 0 | 0 | 100 | 0 | 0 | 0 |
| BRACE3012574 | 0 | 0 | 0 | 100 | 0 | 0 | 0 |
| BRACE3012806 | 0 | 0 | 0 | 45.981 | 0 | 0 | 0 |
| BRACE3012930 | 0 | 0 | 0 | 38.787 | 0 | 0 | 0 |
| BRACE3013119 | 0 | 0 | 0 | 100 | 0 | 0 | 0 |
| BRACE3013418 | 0 | 0 | 0 | 100 | 0 | 0 | 0 |
| BRACE3013576 | 0 | 0 | 0 | 100 | 0 | 0 | 0 |
| BRACE3013740 | 0 | 0 | 0 | 100 | 0 | 0 | 0 |
| BRACE3013780 | 0 | 0 | 0 | 3.404 | 0 | 4.833 | 0 |
| BRACE3013874 | 0 | 0 | 0 | 100 | 0 | 0 | 0 |
| BRACE3013936 | 0 | 0 | 0 | 43.251 | 0 | 0 | 0 |
| BRACE3013986 | 0 | 0 | 0 | 100 | 0 | 0 | 0 |
| BRACE3014005 | 0 | 0 | 0 | 100 | 0 | 0 | 0 |
| BRACE3014068 | 0 | 0 | 0 | 100 | 0 | 0 | 0 |
| BRACE3014231 | 0 | 0 | 0 | 100 | 0 | 0 | 0 |
| BRACE3014290 | 0 | 0 | 0 | 100 | 0 | 0 | 0 |
| BRACE3014317 | 0 | 0 | 0 | 100 | 0 | 0 | 0 |
| BRACE3014523 | 0 | 0 | 0 | 100 | 0 | 0 | 0 |
| BRACE3014714 | 0 | 0 | 0 | 100 | 0 | 0 | 0 |
| BRACE3014807 | 0 | 0 | 0 | 100 | 0 | 0 | 0 |
| BRACE3014942 | 0 | 0 | 0 | 100 | 0 | 0 | 0 |
| BRACE3015090 | 0 | 0 | 0 | 100 | 0 | 0 | 0 |
| BRACE3015121 | 0 | 0 | 0 | 100 | 0 | 0 | 0 |
| BRACE3015262 | 0 | 0 | 0 | 100 | 0 | 0 | 0 |
| BRACE3015521 | 0 | 0 | 0 | 100 | 0 | 0 | 0 |
| BRACE3015808 | 0 | 0 | 0 | 100 | 0 | 0 | 0 |
| BRACE3015829 | 0 | 0 | 0 | 100 | 0 | 0 | 0 |
| BRACE3015894 | 0 | 0 | 0 | 100 | 0 | 0 | 0 |
| BRACE3015898 | 0 | 0 | 0 | 100 | 0 | 0 | 0 |
| BRACE3016020 | 0 | 0 | 0 | 100 | 0 | 0 | 0 |
| BRACE3016122 | 0 | 0 | 0 | 41.512 | 0 | 0 | 0 |
| BRACE3016167 | 0 | 0 | 0 | 100 | 0 | 0 | 0 |
| BRACE3016170 | 0 | 0 | 0 | 100 | 0 | 0 | 0 |
| BRACE3016580 | 0 | 0 | 0 | 100 | 0 | 0 | 0 |
| BRACE3016788 | 0 | 0 | 0 | 100 | 0 | 0 | 0 |
| BRACE3016810 | 0 | 0 | 0 | 100 | 0 | 0 | 0 |
| BRACE3016862 | 0 | 0 | 0 | 100 | 0 | 0 | 0 |
| BRACE3016884 | 0 | 0 | 0 | 9.165 | 0 | 0 | 0 |
| BRACE3017083 | 0 | 0 | 0 | 100 | 0 | 0 | 0 |
| BRACE3017253 | 0 | 0 | 0 | 55.894 | 0 | 0 | 0 |
| BRACE3018083 | 0 | 0 | 0 | 100 | 0 | 0 | 0 |
| BRACE3018308 | 0 | 0 | 0 | 100 | 0 | 0 | 0 |
| BRACE3018963 | 0 | 0 | 0 | 41.027 | 0 | 0 | 0 |
| BRACE3019055 | 0 | 0 | 0 | 100 | 0 | 0 | 0 |
| BRACE3019071 | 0 | 0 | 0 | 40.231 | 0 | 0 | 0 |
| BRACE3019084 | 0 | 0 | 0 | 100 | 0 | 0 | 0 |
| BRACE3019570 | 0 | 0 | 0 | 100 | 0 | 0 | 0 |
| BRACE3019611 | 0 | 0 | 0 | 100 | 0 | 0 | 0 |
| BRACE3019817 | 0 | 0 | 0 | 100 | 0 | 0 | 0 |
| BRACE3019828 | 0 | 0 | 0 | 100 | 0 | 0 | 0 |
| BRACE3019941 | 0 | 0 | 0 | 2.074 | 0 | 0 | 0 |
| BRACE3020151 | 0 | 0 | 0 | 100 | 0 | 0 | 0 |
| BRACE3020194 | 0 | 0 | 0 | 100 | 0 | 0 | 0 |
| BRACE3020286 | 0 | 0 | 0 | 100 | 0 | 0 | 0 |
| BRACE3020356 | 0 | 0 | 0 | 100 | 0 | 0 | 0 |
| BRACE3020594 | 0 | 0 | 0 | 100 | 0 | 0 | 0 |
| BRACE3020669 | 0 | 0 | 0 | 38.787 | 0 | 0 | 0 |
| BRACE3020671 | 0 | 0 | 0 | 100 | 0 | 0 | 0 |
| BRACE3020890 | 0 | 0 | 0 | 100 | 0 | 0 | 0 |
| BRACE3021148 | 0 | 0 | 0 | 100 | 0 | 0 | 0 |
| BRACE3021430 | 0 | 83.734 | 0 | 8.467 | 0 | 0 | 0 |
| BRACE3021517 | 0 | 0 | 0 | 100 | 0 | 0 | 0 |
| BRACE3021805 | 0 | 0 | 0 | 100 | 0 | 0 | 0 |
| BRACE3022051 | 0 | 0 | 0 | 100 | 0 | 0 | 0 |
| BRACE3022303 | 0 | 0 | 0 | 100 | 0 | 0 | 0 |
| BRACE3022312 | 0 | 0 | 0 | 24.151 | 0 | 0 | 0 |
| BRACE3022340 | 0 | 0 | 0 | 41.512 | 0 | 0 | 0 |
| BRACE3022847 | 0 | 0 | 0 | 100 | 0 | 0 | 0 |
| BRACE3023604 | 0 | 0 | 0 | 100 | 0 | 0 | 0 |
| BRACE3023912 | 0 | 0 | 0 | 100 | 0 | 0 | 0 |
| BRACE3024073 | 0 | 0 | 0 | 100 | 0 | 0 | 0 |
| BRACE3024359 | 0 | 0 | 0 | 100 | 0 | 0 | 0 |
| BRACE3024379 | 0 | 0 | 0 | 100 | 0 | 0 | 0 |
| BRACE3024444 | 0 | 0 | 0 | 100 | 0 | 0 | 0 |
| BRACE3024497 | 0 | 0 | 0 | 100 | 0 | 0 | 0 |
| BRACE3024537 | 0 | 0 | 0 | 100 | 0 | 0 | 0 |
| BRACE3024659 | 0 | 0 | 0 | 100 | 0 | 0 | 0 |
| BRACE3024662 | 0 | 0 | 0 | 100 | 0 | 0 | 0 |
| BRACE3024879 | 0 | 0 | 0 | 100 | 0 | 0 | 0 |
| BRACE3025153 | 0 | 0 | 0 | 100 | 0 | 0 | 0 |
| BRACE3025302 | 0 | 0 | 0 | 100 | 0 | 0 | 0 |
| BRACE3025457 | 0 | 0 | 0 | 100 | 0 | 0 | 0 |
| BRACE3025531 | 0 | 0 | 0 | 100 | 0 | 0 | 0 |
| BRACE3025627 | 0 | 0 | 0 | 100 | 0 | 0 | 0 |
| BRACE3025630 | 0 | 0 | 0 | 100 | 0 | 0 | 0 |
| BRACE3025719 | 0 | 0 | 0 | 12.784 | 0 | 0 | 0 |
| BRACE3026008 | 0 | 0 | 0 | 100 | 0 | 0 | 0 |
| BRACE3026075 | 0 | 0 | 0 | 100 | 0 | 0 | 0 |
| BRACE3026161 | 0 | 0 | 0 | 100 | 0 | 0 | 0 |
| BRACE3026290 | 0 | 0 | 0 | 100 | 0 | 0 | 0 |
| BRACE3026345 | 0 | 0 | 0 | 100 | 0 | 0 | 0 |
| BRACE3026456 | 0 | 0 | 0 | 100 | 0 | 0 | 0 |
| BRACE3026735 | 0 | 0 | 0 | 51.471 | 0 | 24.356 | 0 |
| BRACE3026802 | 0 | 0 | 0 | 36.390 | 0 | 0 | 0 |
| BRACE3026844 | 0 | 0 | 0 | 100 | 0 | 0 | 0 |
| BRACE3026947 | 0 | 0 | 0 | 100 | 0 | 0 | 0 |
| BRACE3026993 | 0 | 0 | 0 | 100 | 0 | 0 | 0 |
| BRACE3027242 | 0 | 0 | 0 | 100 | 0 | 0 | 0 |
| BRACE3027256 | 0 | 0 | 0 | 100 | 0 | 0 | 0 |
| BRACE3027326 | 0 | 0 | 0 | 100 | 0 | 0 | 0 |
| BRACE3027478 | 0 | 0 | 0 | 11.360 | 0 | 16.126 | 0 |
| BRACE3027480 | 0 | 0 | 0 | 100 | 0 | 0 | 0 |
| BRACE3027931 | 0 | 0 | 0 | 23.879 | 0 | 0 | 0 |
| BRACE3027976 | 0 | 0 | 0 | 45.981 | 0 | 0 | 0 |
| BRACE3028214 | 0 | 0 | 0 | 100 | 0 | 0 | 0 |
| BRACE3028241 | 0 | 0 | 0 | 100 | 0 | 0 | 0 |
| BRACE3028360 | 0 | 0 | 0 | 100 | 0 | 0 | 0 |
| BRACE3028895 | 0 | 0 | 0 | 32.302 | 0 | 0 | 0 |
| BRACE3028998 | 0 | 0 | 0 | 100 | 0 | 0 | 0 |
| BRACE3029005 | 0 | 0 | 0 | 100 | 0 | 0 | 0 |
| BRACE3029021 | 0 | 0 | 0 | 25.807 | 0 | 0 | 0 |
| BRACE3029205 | 0 | 0 | 0 | 100 | 0 | 0 | 0 |
| BRACE3029447 | 0 | 0 | 0 | 100 | 0 | 0 | 0 |
| BRACE3030057 | 0 | 0 | 0 | 100 | 0 | 0 | 0 |
| BRACE3030103 | 0 | 0 | 0 | 100 | 0 | 0 | 0 |
| BRACE3030538 | 0 | 0 | 0 | 36.360 | 0 | 0 | 0 |
| BRACE3030748 | 0 | 0 | 0 | 100 | 0 | 0 | 0 |
| BRACE3030866 | 0 | 0 | 0 | 41.512 | 0 | 0 | 0 |
| BRACE3031161 | 0 | 0 | 0 | 100 | 0 | 0 | 0 |
| BRACE3031184 | 0 | 0 | 0 | 100 | 0 | 0 | 0 |
| BRACE3031185 | 0 | 0 | 0 | 41.512 | 0 | 0 | 0 |
| BRACE3031315 | 0 | 0 | 0 | 41.329 | 0 | 58.671 | 0 |
| BRACE3031372 | 0 | 0 | 0 | 100 | 0 | 0 | 0 |
| BRACE3031579 | 0 | 0 | 0 | 100 | 0 | 0 | 0 |
| BRACE3031728 | 0 | 0 | 0 | 100 | 0 | 0 | 0 |
| BRACE3031838 | 0 | 0 | 0 | 41.512 | 0 | 0 | 0 |
| BRACE3031843 | 0 | 0 | 0 | 100 | 0 | 0 | 0 |
| BRACE3032427 | 0 | 0 | 0 | 41.512 | 0 | 0 | 0 |
| BRACE3032455 | 0 | 0 | 0 | 100 | 0 | 0 | 0 |
| BRACE3032537 | 0 | 0 | 0 | 100 | 0 | 0 | 0 |
| BRACE3032538 | 0 | 0 | 0 | 100 | 0 | 0 | 0 |
| BRACE3032631 | 0 | 0 | 0 | 8.951 | 0 | 0 | 0 |
| BRACE3032771 | 0 | 0 | 0 | 100 | 0 | 0 | 0 |
| BRACE3032980 | 0 | 0 | 0 | 100 | 0 | 0 | 0 |
| BRACE3032983 | 0 | 0 | 0 | 100 | 0 | 0 | 0 |
| BRACE3033525 | 0 | 0 | 0 | 100 | 0 | 0 | 0 |
| BRACE3034159 | 0 | 0 | 0 | 100 | 0 | 0 | 0 |
| BRACE3034183 | 0 | 0 | 0 | 100 | 0 | 0 | 0 |
| BRACE3034389 | 0 | 0 | 0 | 100 | 0 | 0 | 0 |
| BRACE3034964 | 0 | 0 | 0 | 100 | 0 | 0 | 0 |
| BRACE3034993 | 0 | 0 | 0 | 100 | 0 | 0 | 0 |
| BRACE3035168 | 0 | 0 | 0 | 29.854 | 0 | 0 | 0 |
| BRACE3035227 | 0 | 0 | 0 | 100 | 0 | 0 | 0 |
| BRACE3036156 | 0 | 0 | 0 | 31.069 | 0 | 0 | 0 |
| BRACE3036271 | 0 | 0 | 0 | 100 | 0 | 0 | 0 |
| BRACE3037612 | 0 | 0 | 0 | 100 | 0 | 0 | 0 |
| BRACE3037637 | 0 | 0 | 0 | 100 | 0 | 0 | 0 |
| BRACE3037803 | 0 | 0 | 0 | 100 | 0 | 0 | 0 |
| BRACE3038012 | 0 | 0 | 0 | 100 | 0 | 0 | 0 |
| BRACE3038030 | 0 | 0 | 0 | 100 | 0 | 0 | 0 |
| BRACE3038569 | 0 | 0 | 0 | 100 | 0 | 0 | 0 |
| BRACE3038570 | 0 | 0 | 0 | 100 | 0 | 0 | 0 |
| BRACE3038687 | 0 | 0 | 0 | 100 | 0 | 0 | 0 |
| BRACE3038760 | 0 | 0 | 0 | 100 | 0 | 0 | 0 |
| BRACE3039288 | 0 | 0 | 0 | 100 | 0 | 0 | 0 |
| BRACE3039358 | 0 | 0 | 0 | 14.668 | 0 | 0 | 0 |
| BRACE3039378 | 0 | 0 | 0 | 100 | 0 | 0 | 0 |
| BRACE3039454 | 0 | 0 | 0 | 100 | 0 | 0 | 0 |
| BRACE3040012 | 0 | 0 | 0 | 100 | 0 | 0 | 0 |
| BRACE3040239 | 0 | 0 | 0 | 100 | 0 | 0 | 0 |
| BRACE3040504 | 0 | 0 | 0 | 100 | 0 | 0 | 0 |
| BRACE3040644 | 0 | 0 | 0 | 100 | 0 | 0 | 0 |
| BRACE3040856 | 0 | 0 | 0 | 100 | 0 | 0 | 0 |
| BRACE3040863 | 0 | 0 | 0 | 12.696 | 0 | 0 | 0 |
| BRACE3041059 | 0 | 0 | 0 | 100 | 0 | 0 | 0 |
| BRACE3041162 | 0 | 0 | 0 | 100 | 0 | 0 | 0 |
| BRACE3041827 | 0 | 0 | 0 | 100 | 0 | 0 | 0 |
| BRACE3042046 | 0 | 0 | 0 | 100 | 0 | 0 | 0 |
| BRACE3042210 | 0 | 0 | 0 | 100 | 0 | 0 | 0 |
| BRACE3042326 | 0 | 0 | 0 | 24.903 | 0 | 0 | 0 |
| BRACE3042409 | 0 | 0 | 0 | 100 | 0 | 0 | 0 |
| BRACE3042432 | 0 | 0 | 0 | 41.512 | 0 | 0 | 0 |
| BRACE3042594 | 0 | 0 | 0 | 100 | 0 | 0 | 0 |
| BRACE3043597 | 0 | 0 | 0 | 100 | 0 | 0 | 0 |
| BRACE3044090 | 0 | 0 | 0 | 100 | 0 | 0 | 0 |
| BRACE3044172 | 0 | 0 | 0 | 100 | 0 | 0 | 0 |
| BRACE3044247 | 0 | 0 | 0 | 100 | 0 | 0 | 0 |
| BRACE3044377 | 0 | 0 | 0 | 100 | 0 | 0 | 0 |
| BRACE3044389 | 0 | 0 | 0 | 100 | 0 | 0 | 0 |
| BRACE3044495 | 0 | 0 | 0 | 100 | 0 | 0 | 0 |
| BRACE3045011 | 0 | 0 | 0 | 100 | 0 | 0 | 0 |
| BRACE3045033 | 0 | 0 | 0 | 100 | 0 | 0 | 0 |
| BRACE3045078 | 0 | 0 | 0 | 58.183 | 0 | 0 | 0 |
| BRACE3045145 | 0 | 0 | 0 | 100 | 0 | 0 | 0 |
| BRACE3045424 | 0 | 0 | 0 | 100 | 0 | 0 | 0 |
| BRACE3045708 | 0 | 0 | 0 | 100 | 0 | 0 | 0 |
| BRACE3045981 | 0 | 0 | 0 | 56.286 | 0 | 0 | 0 |
| BRACE3046049 | 0 | 0 | 0 | 100 | 0 | 0 | 0 |
| BRACE3046152 | 0 | 0 | 0 | 100 | 0 | 0 | 0 |
| BRACE3046294 | 0 | 0 | 0 | 100 | 0 | 0 | 0 |
| BRACE3046450 | 0 | 0 | 0 | 78.016 | 0 | 0 | 0 |
| BRACE3046466 | 0 | 0 | 0 | 100 | 0 | 0 | 0 |
| BRACE3046491 | 0 | 0 | 0 | 100 | 0 | 0 | 0 |
| BRACE3046609 | 0 | 0 | 0 | 100 | 0 | 0 | 0 |
| BRACE3046762 | 0 | 0 | 0 | 100 | 0 | 0 | 0 |
| BRACE3046837 | 0 | 0 | 0 | 100 | 0 | 0 | 0 |
| BRACE3046855 | 0 | 0 | 0 | 100 | 0 | 0 | 0 |
| BRACE3046966 | 0 | 0 | 0 | 100 | 0 | 0 | 0 |
| BRACE3047018 | 0 | 0 | 0 | 100 | 0 | 0 | 0 |
| BRACE3047482 | 0 | 0 | 0 | 100 | 0 | 0 | 0 |
| BRACE3047801 | 0 | 0 | 0 | 100 | 0 | 0 | 0 |
| BRALZ1000047 | 0 | 0 | 0 | 0 | 100 | 0 | 0 |
| BRALZ1000103 | 0 | 0 | 0 | 0 | 100 | 0 | 0 |
| BRALZ2000189 | 0 | 0 | 0 | 0 | 100 | 0 | 0 |
| BRALZ2000263 | 0 | 0 | 0 | 16.418 | 83.582 | 0 | 0 |
| BRALZ2000988 | 0 | 0 | 0 | 25.787 | 18.754 | 0 | 0 |
| BRALZ2001038 | 0 | 0 | 0 | 23.070 | 58.725 | 0 | 0 |
| BRALZ2001279 | 0 | 0 | 0 | 0 | 100 | 0 | 0 |
| BRALZ2001350 | 0 | 0 | 0 | 0 | 100 | 0 | 0 |
| BRALZ2001445 | 0 | 0 | 0 | 0 | 100 | 0 | 0 |
| BRALZ2001559 | 0 | 0 | 0 | 0 | 100 | 0 | 0 |
| BRALZ2001743 | 0 | 0 | 0 | 0 | 100 | 0 | 0 |
| BRALZ2001834 | 0 | 0 | 0 | 0 | 76.517 | 0 | 0 |
| BRALZ2002174 | 0 | 0 | 0 | 0 | 100 | 0 | 0 |
| BRALZ2002418 | 0 | 0 | 0 | 0 | 78.195 | 21.805 | 0 |
| BRALZ2002477 | 0 | 0 | 0 | 0 | 100 | 0 | 0 |
| BRALZ2003119 | 0 | 0 | 0 | 0 | 100 | 0 | 0 |
| BRALZ2003330 | 0 | 0 | 0 | 0 | 100 | 0 | 0 |
| BRALZ2003453 | 0 | 0 | 0 | 0 | 100 | 0 | 0 |
| BRALZ2003525 | 0 | 0 | 0 | 0 | 100 | 0 | 0 |
| BRALZ2004397 | 0 | 0 | 0 | 0 | 100 | 0 | 0 |
| BRALZ2005467 | 0 | 0 | 0 | 0 | 100 | 0 | 0 |
| BRALZ2005471 | 0 | 0 | 0 | 0 | 100 | 0 | 0 |
| BRALZ2005888 | 0 | 0 | 0 | 0 | 100 | 0 | 0 |
| BRALZ2005950 | 0 | 0 | 0 | 0 | 100 | 0 | 0 |
| BRALZ2005992 | 0 | 0 | 0 | 0 | 100 | 0 | 0 |
| BRALZ2006288 | 0 | 0 | 0 | 0 | 39.404 | 10.988 | 0 |
| BRALZ2006474 | 0 | 0 | 0 | 0 | 100 | 0 | 0 |
| BRALZ2006560 | 0 | 0 | 0 | 0 | 100 | 0 | 0 |
| BRALZ2006734 | 0 | 0 | 0 | 0 | 100 | 0 | 0 |
| BRALZ2006800 | 0 | 0 | 0 | 0 | 100 | 0 | 0 |
| BRALZ2006976 | 0 | 0 | 0 | 0 | 100 | 0 | 0 |
| BRALZ2007376 | 0 | 0 | 0 | 0 | 100 | 0 | 0 |
| BRALZ2007545 | 0 | 0 | 0 | 0 | 100 | 0 | 0 |
| BRALZ2007576 | 0 | 0 | 0 | 0 | 100 | 0 | 0 |
| BRALZ2007661 | 0 | 0 | 0 | 0 | 100 | 0 | 0 |
| BRALZ2007790 | 0 | 0 | 0 | 0 | 100 | 0 | 0 |
| BRALZ2007793 | 0 | 0 | 0 | 0 | 100 | 0 | 0 |
| BRALZ2007952 | 0 | 0 | 0 | 0 | 100 | 0 | 0 |
| BRALZ2008031 | 0 | 0 | 0 | 0 | 100 | 0 | 0 |
| BRALZ2008166 | 0 | 0 | 0 | 0 | 66.169 | 0 | 0 |
| BRALZ2008462 | 0 | 0 | 0 | 0 | 100 | 0 | 0 |
| BRALZ2008617 | 0 | 56.870 | 0 | 5.751 | 29.277 | 0 | 0 |
| BRALZ2008696 | 0 | 0 | 0 | 0 | 78.324 | 0 | 0 |
| BRALZ2008763 | 0 | 0 | 0 | 0 | 100 | 0 | 0 |
| BRALZ2008869 | 0 | 0 | 0 | 0 | 100 | 0 | 0 |
| BRALZ2008930 | 0 | 0 | 0 | 0 | 100 | 0 | 0 |
| BRALZ2009446 | 0 | 32.727 | 0 | 0 | 16.848 | 0 | 0 |
| BRALZ2009482 | 0 | 2.608 | 0 | 0.528 | 1.343 | 1.123 | 0 |
| BRALZ2009486 | 0 | 0 | 0 | 0 | 75.903 | 0 | 0 |
| BRALZ2010186 | 0 | 0 | 0 | 0 | 100 | 0 | 0 |
| BRALZ2010842 | 0 | 0 | 0 | 0 | 100 | 0 | 0 |
| BRALZ2011337 | 0 | 0 | 0 | 0 | 100 | 0 | 0 |
| BRALZ2011796 | 0 | 0 | 0 | 3.912 | 39.830 | 0 | 0 |
| BRALZ2011880 | 0 | 21.400 | 0 | 2.164 | 22.034 | 3.072 | 0 |
| BRALZ2012050 | 0 | 0 | 0 | 0 | 100 | 0 | 0 |
| BRALZ2012183 | 0 | 0 | 0 | 0 | 100 | 0 | 0 |
| BRALZ2012848 | 0 | 0 | 0 | 0 | 100 | 0 | 0 |
| BRALZ2013621 | 0 | 0 | 0 | 0 | 100 | 0 | 0 |
| BRALZ2013690 | 0 | 0 | 0 | 0 | 100 | 0 | 0 |
| BRALZ2014054 | 0 | 0 | 0 | 0 | 38.408 | 0 | 0 |
| BRALZ2014316 | 0 | 0 | 0 | 0 | 100 | 0 | 0 |
| BRALZ2014484 | 0 | 0 | 0 | 0 | 100 | 0 | 0 |
| BRALZ2014951 | 0 | 0 | 0 | 0 | 100 | 0 | 0 |
| BRALZ2015168 | 0 | 0 | 0 | 0 | 100 | 0 | 0 |
| BRALZ2015811 | 0 | 0 | 0 | 0 | 100 | 0 | 0 |
| BRALZ2016085 | 0 | 0 | 0 | 0 | 100 | 0 | 0 |
| BRALZ2016498 | 0 | 0 | 0 | 0 | 100 | 0 | 0 |
| BRALZ2017359 | 0 | 0 | 0 | 0 | 75.184 | 0 | 0 |
| BRALZ2017531 | 0 | 0 | 0 | 0 | 100 | 0 | 0 |
| BRALZ2017607 | 0 | 0 | 0 | 0 | 100 | 0 | 0 |
| BRALZ2017620 | 0 | 0 | 0 | 0 | 100 | 0 | 0 |
| BRALZ2017844 | 0 | 0 | 0 | 0 | 49.396 | 0 | 0 |
| BRALZ2018342 | 0 | 0 | 0 | 0 | 100 | 0 | 0 |
| BRALZ2018492 | 0 | 0 | 0 | 16.418 | 83.582 | 0 | 0 |
| BRALZ2018834 | 0 | 0 | 0 | 0 | 22.547 | 6.287 | 0 |
| BRALZ2019047 | 0 | 0 | 0 | 0 | 76.517 | 0 | 0 |
| BRAMY1000095 | 0 | 0 | 0 | 0 | 0 | 100 | 0 |
| BRAMY1000098 | 0 | 0 | 0 | 0 | 0 | 100 | 0 |
| BRAMY1000130 | 0 | 0 | 0 | 0 | 0 | 12.137 | 0 |
| BRAMY1000157 | 0 | 0 | 0 | 0 | 0 | 100 | 0 |
| BRAMY1000173 | 0 | 0 | 0 | 0 | 0 | 21.311 | 0 |
| BRAMY2000021 | 0 | 0 | 0 | 0 | 0 | 100 | 0 |
| BRAMY2000025 | 0 | 0 | 0 | 0 | 0 | 47.699 | 0 |
| BRAMY2000052 | 0 | 0 | 0 | 0 | 39.130 | 21.823 | 0 |
| BRAMY2000076 | 0 | 0 | 0 | 0 | 0 | 100 | 0 |
| BRAMY2000086 | 0 | 0 | 0 | 0 | 0 | 100 | 0 |
| BRAMY2000151 | 0 | 0 | 0 | 0 | 0 | 22.213 | 0 |
| BRAMY2000181 | 0 | 0 | 0 | 0 | 0 | 35.292 | 0 |
| BRAMY2000196 | 0 | 0 | 0 | 0 | 0 | 100 | 0 |
| BRAMY2000231 | 0 | 0 | 0 | 0 | 0 | 36.677 | 0 |
| BRAMY2000277 | 0 | 0 | 0 | 0 | 0 | 100 | 0 |
| BRAMY2000354 | 0 | 0 | 0 | 1.951 | 0 | 2.769 | 0 |
| BRAMY2000388 | 0 | 0 | 0 | 8.685 | 0 | 12.329 | 0 |
| BRAMY2000411 | 0 | 0 | 0 | 4.399 | 0 | 18.735 | 0 |
| BRAMY2000508 | 0 | 0 | 0 | 0 | 0 | 35.461 | 0 |
| BRAMY2000562 | 0 | 0 | 0 | 1.364 | 6.944 | 9.681 | 0 |
| BRAMY2000585 | 0 | 0 | 0 | 0 | 0 | 2.475 | 0 |
| BRAMY2000653 | 0 | 0 | 0 | 0 | 0 | 100 | 0 |
| BRAMY2000814 | 0 | 0 | 0 | 0 | 0 | 21.396 | 0 |
| BRAMY2000893 | 0 | 10.681 | 0 | 0 | 0 | 1.533 | 0 |
| BRAMY2000946 | 0 | 0 | 0 | 0 | 0 | 100 | 0 |
| BRAMY2000981 | 0 | 0 | 0 | 0 | 0 | 100 | 0 |
| BRAMY2000987 | 0 | 0 | 0 | 24.093 | 0 | 17.102 | 0 |
| BRAMY2001068 | 0 | 0 | 0 | 0 | 0 | 100 | 0 |
| BRAMY2001114 | 0 | 0 | 0 | 0 | 0 | 100 | 0 |
| BRAMY2001203 | 0 | 0 | 0 | 0 | 0 | 100 | 0 |
| BRAMY2001282 | 0 | 0 | 0 | 0 | 0 | 100 | 0 |
| BRAMY2001367 | 0 | 0 | 0 | 0 | 0 | 100 | 0 |
| BRAMY2001427 | 0 | 0 | 0 | 0 | 0 | 100 | 0 |
| BRAMY2001473 | 0 | 0 | 0 | 0 | 0 | 100 | 0 |
| BRAMY2001678 | 0 | 0 | 0 | 0 | 0 | 37.663 | 0 |
| BRAMY2002005 | 0 | 0 | 0 | 0 | 0 | 100 | 0 |
| BRAMY2002044 | 0 | 0 | 0 | 0 | 0 | 100 | 0 |
| BRAMY2002072 | 0 | 0 | 0 | 0 | 0 | 100 | 0 |
| BRAMY2002158 | 0 | 0 | 0 | 0 | 0 | 100 | 0 |
| BRAMY2002311 | 0 | 0 | 0 | 0 | 0 | 100 | 0 |
| BRAMY2002339 | 0 | 0 | 0 | 0 | 0 | 100 | 0 |
| BRAMY2002364 | 0 | 0 | 0 | 0 | 0 | 100 | 0 |
| BRAMY2002369 | 0 | 0 | 0 | 0 | 0 | 8.220 | 0 |
| BRAMY2002479 | 0 | 0 | 0 | 0 | 0 | 21.841 | 0 |
| BRAMY2002493 | 0 | 0 | 0 | 0 | 0 | 100 | 0 |
| BRAMY2002525 | 0 | 0 | 0 | 41.329 | 0 | 58.671 | 0 |
| BRAMY2002584 | 0 | 0 | 0 | 0 | 0 | 100 | 0 |
| BRAMY2002604 | 0 | 0 | 0 | 0 | 0 | 100 | 0 |
| BRAMY2002621 | 0 | 0 | 0 | 25.113 | 0 | 35.650 | 0 |
| BRAMY2002638 | 0 | 0 | 0 | 0 | 0 | 100 | 0 |
| BRAMY2002739 | 0 | 0 | 0 | 0 | 0 | 100 | 0 |
| BRAMY2002799 | 0 | 0 | 0 | 0 | 0 | 50.189 | 0 |
| BRAMY2002853 | 0 | 0 | 0 | 0 | 0 | 100 | 0 |
| BRAMY2002862 | 0 | 0 | 0 | 0 | 0 | 100 | 0 |
| BRAMY2002956 | 0 | 0 | 0 | 0 | 0 | 100 | 0 |
| BRAMY2003008 | 0 | 0 | 0 | 0 | 0 | 26.646 | 0 |
| BRAMY2003037 | 0 | 0 | 0 | 0 | 0 | 100 | 0 |
| BRAMY2003117 | 0 | 0 | 0 | 0 | 0 | 100 | 0 |
| BRAMY2003287 | 0 | 0 | 0 | 0 | 0 | 100 | 0 |
| BRAMY2003325 | 0 | 0 | 0 | 0 | 0 | 12.511 | 0 |
| BRAMY2003529 | 0 | 0 | 0 | 0 | 0 | 100 | 0 |
| BRAMY2003538 | 0 | 0 | 0 | 26.047 | 0 | 73.953 | 0 |
| BRAMY2003585 | 0 | 0 | 0 | 0 | 0 | 100 | 0 |
| BRAMY2003634 | 0 | 0 | 0 | 0 | 0 | 100 | 0 |
| BRAMY2003653 | 0 | 0 | 0 | 0 | 0 | 100 | 0 |
| BRAMY2003681 | 0 | 0 | 0 | 0 | 0 | 100 | 0 |
| BRAMY2003893 | 0 | 0 | 0 | 0 | 0 | 100 | 0 |
| BRAMY2003897 | 0 | 0 | 0 | 0 | 0 | 100 | 0 |
| BRAMY2003898 | 0 | 0 | 0 | 0 | 0 | 100 | 0 |
| BRAMY2003904 | 0 | 0 | 0 | 0 | 0 | 100 | 0 |
| BRAMY2003926 | 0 | 0 | 0 | 0 | 0 | 100 | 0 |
| BRAMY2003929 | 0 | 0 | 0 | 0 | 0 | 21.427 | 0 |
| BRAMY2004031 | 0 | 0 | 0 | 0 | 0 | 12.812 | 0 |
| BRAMY2004058 | 0 | 0 | 0 | 0 | 0 | 100 | 0 |
| BRAMY2004183 | 0 | 0 | 0 | 0 | 0 | 100 | 0 |
| BRAMY2004335 | 0 | 0 | 0 | 0 | 0 | 100 | 0 |
| BRAMY2004351 | 0 | 0 | 0 | 0 | 0 | 100 | 0 |
| BRAMY2004352 | 0 | 0 | 0 | 0 | 0 | 100 | 0 |
| BRAMY2004363 | 0 | 0 | 0 | 1.451 | 0 | 4.120 | 0 |
| BRAMY2004387 | 0 | 0 | 0 | 0 | 0 | 30.516 | 0 |
| BRAMY2004492 | 0 | 0 | 0 | 0 | 0 | 100 | 0 |
| BRAMY2004521 | 0 | 0 | 0 | 1.682 | 0 | 7.165 | 0 |
| BRAMY2004524 | 0 | 0 | 0 | 0 | 0 | 21.841 | 0 |
| BRAMY2004537 | 0 | 0 | 0 | 0 | 0 | 100 | 0 |
| BRAMY2004542 | 0 | 0 | 0 | 0 | 0 | 100 | 0 |
| BRAMY2004756 | 0 | 0 | 0 | 0 | 0 | 100 | 0 |
| BRAMY2004771 | 0 | 0 | 0 | 0 | 0 | 100 | 0 |
| BRAMY2005052 | 0 | 0 | 0 | 8.242 | 0 | 46.801 | 0 |
| BRAMY2005064 | 0 | 0 | 0 | 0 | 0 | 100 | 0 |
| BRAMY2005094 | 0 | 0 | 0 | 0 | 0 | 100 | 0 |
| BRAMY2005151 | 0 | 0 | 0 | 0 | 0 | 100 | 0 |
| BRAMY2005182 | 0 | 0 | 0 | 0 | 0 | 100 | 0 |
| BRAMY2005244 | 0 | 0 | 0 | 0 | 0 | 100 | 0 |
| BRAMY2005391 | 0 | 0 | 0 | 0 | 0 | 100 | 0 |
| BRAMY2005488 | 0 | 0 | 0 | 8.088 | 0 | 22.964 | 0 |
| BRAMY2005576 | 0 | 0 | 0 | 0 | 0 | 21.396 | 0 |
| BRAMY2005648 | 0 | 0 | 0 | 0 | 0 | 100 | 0 |
| BRAMY2005662 | 0 | 0 | 0 | 0 | 0 | 100 | 0 |
| BRAMY2005708 | 0 | 0 | 0 | 0 | 0 | 100 | 0 |
| BRAMY2005711 | 0 | 0 | 0 | 0 | 0 | 100 | 0 |
| BRAMY2006092 | 0 | 0 | 0 | 0 | 0 | 100 | 0 |
| BRAMY2006118 | 0 | 0 | 0 | 0 | 0 | 100 | 0 |
| BRAMY2006149 | 0 | 0 | 0 | 0 | 0 | 100 | 0 |
| BRAMY2006366 | 0 | 0 | 0 | 0 | 0 | 9.282 | 0 |
| BRAMY2006375 | 0 | 0 | 0 | 16.823 | 0 | 23.883 | 0 |
| BRAMY2006397 | 0 | 0 | 0 | 0 | 0 | 2.830 | 0 |
| BRAMY2006411 | 0 | 0 | 0 | 0 | 0 | 100 | 0 |
| BRAMY2006459 | 0 | 0 | 0 | 0 | 0 | 100 | 0 |
| BRAMY2006466 | 0 | 0 | 0 | 0 | 0 | 100 | 0 |
| BRAMY2006659 | 0 | 0 | 0 | 0 | 0 | 100 | 0 |
| BRAMY2006779 | 0 | 0 | 0 | 0 | 0 | 100 | 0 |
| BRAMY2006809 | 0 | 0 | 0 | 0 | 0 | 100 | 0 |
| BRAMY2006879 | 0 | 0 | 0 | 0 | 0 | 100 | 0 |
| BRAMY2007043 | 0 | 0 | 0 | 0 | 0 | 100 | 0 |
| BRAMY2007078 | 0 | 0 | 0 | 0 | 0 | 3.832 | 0 |
| BRAMY2007110 | 0 | 0 | 0 | 0 | 0 | 100 | 0 |
| BRAMY2007185 | 0 | 0 | 0 | 0 | 0 | 100 | 0 |
| BRAMY2007244 | 0 | 0 | 0 | 8.319 | 0 | 23.618 | 0 |
| BRAMY2007249 | 0 | 0 | 0 | 0 | 0 | 100 | 0 |
| BRAMY2007255 | 0 | 0 | 0 | 0 | 0 | 59.700 | 0 |
| BRAMY2007287 | 0 | 0 | 0 | 0 | 0 | 10.796 | 0 |
| BRAMY2007308 | 0 | 0 | 0 | 0 | 0 | 100 | 0 |
| BRAMY2007411 | 0 | 0 | 0 | 0 | 0 | 100 | 0 |
| BRAMY2007458 | 0 | 0 | 0 | 0 | 0 | 100 | 0 |
| BRAMY2007486 | 0 | 0 | 0 | 0 | 0 | 100 | 0 |
| BRAMY2007546 | 0 | 0 | 0 | 0 | 0 | 100 | 0 |
| BRAMY2007567 | 0 | 0 | 0 | 16.522 | 0 | 23.456 | 0 |
| BRAMY2007594 | 0 | 0 | 0 | 0 | 0 | 31.238 | 0 |
| BRAMY2007610 | 0 | 0 | 0 | 0 | 0 | 100 | 0 |
| BRAMY2007613 | 0 | 0 | 0 | 3.803 | 4.840 | 9.448 | 0 |
| BRAMY2007653 | 0 | 0 | 0 | 0 | 0 | 100 | 0 |
| BRAMY2007753 | 0 | 0 | 0 | 0 | 0 | 100 | 0 |
| BRAMY2007859 | 0 | 0 | 0 | 0 | 0 | 100 | 0 |
| BRAMY2008333 | 0 | 0 | 0 | 0 | 0 | 100 | 0 |
| BRAMY2008382 | 0 | 0 | 0 | 0 | 0 | 15.624 | 0 |
| BRAMY2008563 | 0 | 0 | 0 | 0 | 0 | 49.688 | 0 |
| BRAMY2008583 | 0 | 0 | 0 | 0 | 0 | 100 | 0 |
| BRAMY2008977 | 0 | 0 | 0 | 0 | 0 | 5.095 | 0 |
| BRAMY2008979 | 0 | 0 | 0 | 0 | 0 | 100 | 0 |
| BRAMY2009013 | 0 | 0 | 0 | 0 | 0 | 6.137 | 0 |
| BRAMY2009023 | 0 | 0 | 0 | 0 | 0 | 13.358 | 0 |
| BRAMY2009034 | 0 | 0 | 0 | 0 | 0 | 100 | 0 |
| BRAMY2009105 | 0 | 0 | 0 | 0 | 0 | 100 | 0 |
| BRAMY2009123 | 0 | 0 | 0 | 0 | 0 | 45.794 | 0 |
| BRAMY2009192 | 0 | 0 | 0 | 0 | 0 | 100 | 0 |
| BRAMY2009344 | 0 | 0 | 0 | 0 | 0 | 100 | 0 |
| BRAMY2009349 | 0 | 0 | 0 | 0 | 0 | 100 | 0 |
| BRAMY2009394 | 0 | 0 | 0 | 0 | 0 | 100 | 0 |
| BRAMY2009489 | 0 | 0 | 0 | 25.513 | 0 | 36.219 | 0 |
| BRAMY2009508 | 0 | 0 | 0 | 31.931 | 0 | 22.665 | 0 |
| BRAMY2009528 | 0 | 0 | 0 | 0 | 0 | 100 | 0 |
| BRAMY2009557 | 0 | 0 | 0 | 0 | 0 | 49.688 | 0 |
| BRAMY2009612 | 0 | 0 | 0 | 0 | 0 | 13.638 | 0 |
| BRAMY2009693 | 0 | 0 | 0 | 0 | 0 | 100 | 0 |
| BRAMY2009934 | 0 | 0 | 0 | 0 | 0 | 5.956 | 0 |
| BRAMY2010068 | 0 | 0 | 0 | 0 | 0 | 100 | 0 |
| BRAMY2010135 | 0 | 0 | 0 | 0 | 0 | 100 | 0 |
| BRAMY2010145 | 0 | 0 | 0 | 0 | 0 | 100 | 0 |
| BRAMY2010171 | 0 | 0 | 0 | 0 | 0 | 100 | 0 |
| BRAMY2010208 | 0 | 0 | 0 | 0 | 0 | 36.630 | 0 |
| BRAMY2010239 | 0 | 0 | 0 | 0 | 0 | 100 | 0 |
| BRAMY2010272 | 0 | 0 | 0 | 0 | 0 | 50.189 | 0 |
| BRAMY2010290 | 0 | 0 | 0 | 0 | 0 | 100 | 0 |
| BRAMY2010357 | 0 | 0 | 0 | 21.196 | 0 | 30.090 | 0 |
| BRAMY2010366 | 0 | 0 | 0 | 0 | 0 | 100 | 0 |
| BRAMY2010395 | 0 | 0 | 0 | 0 | 0 | 100 | 0 |
| BRAMY2010441 | 0 | 0 | 0 | 0 | 0 | 100 | 0 |
| BRAMY2010442 | 0 | 0 | 0 | 0 | 0 | 47.605 | 0 |
| BRAMY2010464 | 0 | 0 | 0 | 15.639 | 0 | 33.302 | 0 |
| BRAMY2010581 | 0 | 0 | 0 | 0 | 0 | 100 | 0 |
| BRAMY2010798 | 0 | 0 | 0 | 0 | 0 | 100 | 0 |
| BRAMY2010808 | 0 | 0 | 0 | 0 | 0 | 100 | 0 |
| BRAMY2010919 | 0 | 0 | 0 | 0 | 0 | 100 | 0 |
| BRAMY2011064 | 0 | 0 | 0 | 0 | 0 | 100 | 0 |
| BRAMY2011105 | 0 | 0 | 0 | 0 | 0 | 3.052 | 0 |
| BRAMY2011178 | 0 | 0 | 0 | 0 | 0 | 100 | 0 |
| BRAMY2011196 | 0 | 0 | 0 | 0 | 0 | 100 | 0 |
| BRAMY2011216 | 0 | 0 | 0 | 0 | 0 | 100 | 0 |
| BRAMY2011253 | 0 | 0 | 0 | 0 | 0 | 100 | 0 |
| BRAMY2011446 | 0 | 0 | 0 | 25.113 | 0 | 35.650 | 0 |
| BRAMY2011480 | 0 | 0 | 0 | 0 | 0 | 100 | 0 |
| BRAMY2011639 | 0 | 0 | 0 | 0 | 0 | 100 | 0 |
| BRAMY2011679 | 0 | 0 | 0 | 0 | 0 | 100 | 0 |
| BRAMY2011811 | 0 | 0 | 0 | 0 | 0 | 100 | 0 |
| BRAMY2011841 | 0 | 0 | 0 | 0 | 0 | 11.118 | 0 |
| BRAMY2011846 | 0 | 0 | 0 | 0 | 0 | 100 | 0 |
| BRAMY2011849 | 0 | 0 | 0 | 0 | 0 | 49.688 | 0 |
| BRAMY2011872 | 0 | 0 | 0 | 0 | 0 | 100 | 0 |
| BRAMY2011961 | 0 | 0 | 0 | 0 | 0 | 100 | 0 |
| BRAMY2012017 | 0 | 0 | 0 | 0 | 0 | 100 | 0 |
| BRAMY2012091 | 0 | 0 | 0 | 0 | 0 | 5.983 | 0 |
| BRAMY2012119 | 0 | 0 | 0 | 0 | 0 | 100 | 0 |
| BRAMY2012162 | 0 | 0 | 0 | 0 | 0 | 100 | 0 |
| BRAMY2012163 | 0 | 0 | 0 | 0 | 0 | 7.967 | 0 |
| BRAMY2012277 | 0 | 0 | 0 | 0 | 0 | 100 | 0 |
| BRAMY2012340 | 0 | 0 | 0 | 0 | 0 | 49.688 | 0 |
| BRAMY2012426 | 0 | 0 | 47.668 | 0 | 0 | 6.228 | 0 |
| BRAMY2012497 | 0 | 0 | 0 | 0 | 0 | 100 | 0 |
| BRAMY2012517 | 0 | 0 | 0 | 0 | 0 | 100 | 0 |
| BRAMY2012536 | 0 | 0 | 0 | 0.410 | 0 | 2.326 | 0 |
| BRAMY2012555 | 0 | 0 | 0 | 0 | 0 | 100 | 0 |
| BRAMY2012568 | 0 | 0 | 0 | 0 | 0 | 100 | 0 |
| BRAMY2012581 | 0 | 0 | 0 | 0 | 0 | 46.034 | 0 |
| BRAMY2012691 | 0 | 0 | 0 | 0 | 0 | 100 | 0 |
| BRAMY2012721 | 0 | 0 | 0 | 0 | 0 | 100 | 0 |
| BRAMY2012731 | 0 | 0 | 0 | 0 | 0 | 100 | 0 |
| BRAMY2012776 | 0 | 0 | 0 | 0 | 0 | 100 | 0 |
| BRAMY2012880 | 0 | 0 | 0 | 0 | 0 | 100 | 0 |
| BRAMY2012881 | 0 | 0 | 0 | 0 | 0 | 47.605 | 0 |
| BRAMY2013169 | 0 | 0 | 0 | 8.071 | 0 | 11.457 | 0 |
| BRAMY2013200 | 0 | 0 | 0 | 0 | 0 | 100 | 0 |
| BRAMY2013216 | 0 | 0 | 0 | 0 | 0 | 100 | 0 |
| BRAMY2013405 | 0 | 0 | 0 | 0 | 0 | 100 | 0 |
| BRAMY2013414 | 0 | 0 | 0 | 0 | 0 | 100 | 0 |
| BRAMY2013572 | 0 | 0 | 0 | 0 | 0 | 100 | 0 |
| BRAMY2013590 | 0 | 0 | 0 | 0 | 0 | 43.537 | 0 |
| BRAMY2013621 | 0 | 0 | 0 | 0 | 0 | 29.482 | 0 |
| BRAMY2013659 | 0 | 0 | 0 | 0 | 0 | 29.269 | 0 |
| BRAMY2013722 | 0 | 0 | 0 | 0 | 0 | 100 | 0 |
| BRAMY2013736 | 0 | 0 | 0 | 0 | 0 | 47.605 | 0 |
| BRAMY2013756 | 0 | 0 | 0 | 0 | 0 | 19.026 | 0 |
| BRAMY2013944 | 0 | 0 | 0 | 0 | 0 | 100 | 0 |
| BRAMY2013975 | 0 | 0 | 0 | 0 | 0 | 100 | 0 |
| BRAMY2014019 | 0 | 0 | 0 | 0 | 0 | 100 | 0 |
| BRAMY2014205 | 0 | 0 | 0 | 0 | 0 | 28.873 | 0 |
| BRAMY2014387 | 0 | 0 | 0 | 0 | 0 | 100 | 0 |
| BRAMY2014462 | 0 | 0 | 0 | 0 | 0 | 49.688 | 0 |
| BRAMY2014469 | 0 | 0 | 0 | 0 | 0 | 100 | 0 |
| BRAMY2014541 | 0 | 0 | 0 | 0 | 0 | 100 | 0 |
| BRAMY2014754 | 0 | 0 | 0 | 5.965 | 5.061 | 4.234 | 0 |
| BRAMY2014813 | 0 | 0 | 0 | 0 | 0 | 19.441 | 0 |
| BRAMY2015211 | 0 | 0 | 0 | 0 | 0 | 13.088 | 0 |
| BRAMY2015251 | 0 | 0 | 0 | 0 | 0 | 15.426 | 0 |
| BRAMY2015311 | 0 | 0 | 0 | 0 | 0 | 100 | 0 |
| BRAMY2015420 | 0 | 0 | 0 | 15.046 | 0 | 21.359 | 0 |
| BRAMY2015503 | 0 | 0 | 0 | 0 | 0 | 100 | 0 |
| BRAMY2015516 | 0 | 0 | 0 | 0 | 0 | 100 | 0 |
| BRAMY2015550 | 0 | 0 | 0 | 0 | 0 | 34.151 | 0 |
| BRAMY2015551 | 0 | 0 | 0 | 0 | 0 | 100 | 0 |
| BRAMY2015559 | 0 | 0 | 0 | 0 | 0 | 100 | 0 |
| BRAMY2015688 | 0 | 0 | 0 | 0 | 0 | 100 | 0 |
| BRAMY2015705 | 0 | 0 | 0 | 0 | 0 | 29.482 | 0 |
| BRAMY2015782 | 0 | 0 | 0 | 0 | 0 | 7.891 | 0 |
| BRAMY2015833 | 0 | 0 | 0 | 9.815 | 0 | 4.645 | 0 |
| BRAMY2015855 | 0 | 0 | 0 | 41.329 | 0 | 58.671 | 0 |
| BRAMY2015890 | 0 | 0 | 0 | 0 | 0 | 100 | 0 |
| BRAMY2015911 | 0 | 0 | 0 | 0 | 0 | 15.012 | 0 |
| BRAMY2015925 | 0 | 0 | 0 | 0 | 0 | 100 | 0 |
| BRAMY2016002 | 0 | 0 | 0 | 0 | 0 | 100 | 0 |
| BRAMY2016009 | 0 | 0 | 0 | 3.712 | 0 | 10.538 | 0 |
| BRAMY2016020 | 0 | 0 | 0 | 0 | 0 | 100 | 0 |
| BRAMY2016070 | 0 | 0 | 0 | 0 | 0 | 100 | 0 |
| BRAMY2016251 | 0 | 0 | 0 | 5.104 | 25.986 | 43.477 | 0 |
| BRAMY2016325 | 0 | 0 | 0 | 0 | 0 | 3.796 | 0 |
| BRAMY2016327 | 0 | 0 | 0 | 0 | 0 | 100 | 0 |
| BRAMY2016386 | 0 | 0 | 0 | 0 | 0 | 54.718 | 0 |
| BRAMY2016706 | 0 | 0 | 0 | 0 | 0 | 4.994 | 0 |
| BRAMY2016771 | 0 | 0 | 0 | 0 | 0 | 100 | 0 |
| BRAMY2016892 | 0 | 0 | 0 | 10.306 | 0 | 14.630 | 0 |
| BRAMY2016938 | 0 | 0 | 0 | 0 | 0 | 100 | 0 |
| BRAMY2016953 | 0 | 0 | 0 | 0 | 0 | 100 | 0 |
| BRAMY2017014 | 0 | 0 | 0 | 0 | 0 | 100 | 0 |
| BRAMY2017249 | 0 | 0 | 0 | 0 | 0 | 100 | 0 |
| BRAMY2017348 | 0 | 0 | 0 | 0 | 0 | 100 | 0 |
| BRAMY2017450 | 0 | 0 | 0 | 0 | 0 | 100 | 0 |
| BRAMY2017455 | 0 | 0 | 0 | 0 | 0 | 100 | 0 |
| BRAMY2017528 | 0 | 0 | 0 | 0 | 0 | 100 | 0 |
| BRAMY2017864 | 0 | 0 | 0 | 0 | 0 | 13.922 | 0 |
| BRAMY2018027 | 0 | 0 | 0 | 0 | 0 | 100 | 0 |
| BRAMY2018106 | 0 | 0 | 0 | 0 | 0 | 100 | 0 |
| BRAMY2018122 | 0 | 0 | 0 | 0 | 0 | 12.783 | 0 |
| BRAMY2018126 | 0 | 0 | 0 | 0 | 0 | 100 | 0 |
| BRAMY2018272 | 0 | 0 | 0 | 0 | 0 | 100 | 0 |
| BRAMY2018273 | 0 | 0 | 0 | 0 | 0 | 100 | 0 |
| BRAMY2018279 | 0 | 0 | 0 | 0 | 0 | 100 | 0 |
| BRAMY2018295 | 0 | 0 | 0 | 0 | 0 | 18.088 | 0 |
| BRAMY2018308 | 0 | 0 | 0 | 0 | 0 | 100 | 0 |
| BRAMY2018396 | 0 | 0 | 0 | 0 | 0 | 100 | 0 |
| BRAMY2018467 | 0 | 0 | 0 | 0 | 0 | 100 | 0 |
| BRAMY2018635 | 0 | 0 | 0 | 0 | 0 | 27.369 | 0 |
| BRAMY2018785 | 0 | 0 | 0 | 0 | 0 | 27.408 | 0 |
| BRAMY2019055 | 0 | 0 | 0 | 0 | 0 | 100 | 0 |
| BRAMY2019111 | 0 | 0 | 0 | 0 | 0 | 30.516 | 0 |
| BRAMY2019277 | 0 | 0 | 0 | 0 | 0 | 100 | 0 |
| BRAMY2019300 | 0 | 0 | 0 | 0 | 0 | 50.189 | 0 |
| BRAMY2019468 | 0 | 0 | 0 | 13.480 | 0 | 11.482 | 0 |
| BRAMY2019509 | 0 | 0 | 0 | 0 | 0 | 100 | 0 |
| BRAMY2019554 | 0 | 0 | 0 | 1.133 | 0 | 4.020 | 0 |
| BRAMY2019600 | 0 | 0 | 0 | 0 | 0 | 8.135 | 0 |
| BRAMY2019643 | 0 | 0 | 0 | 0 | 0 | 60.652 | 0 |
| BRAMY2019710 | 0 | 0 | 0 | 0 | 0 | 47.605 | 0 |
| BRAMY2019963 | 0 | 0 | 0 | 0 | 0 | 6.861 | 0 |
| BRAMY2019985 | 0 | 0 | 0 | 0 | 0 | 100 | 0 |
| BRAMY2019989 | 0 | 0 | 0 | 12.319 | 0 | 5.829 | 0 |
| BRAMY2020050 | 0 | 0 | 0 | 0 | 0 | 100 | 0 |
| BRAMY2020058 | 0 | 0 | 0 | 19.826 | 0 | 28.146 | 0 |
| BRAMY2020106 | 0 | 0 | 0 | 0 | 0 | 11.264 | 0 |
| BRAMY2020270 | 0 | 0 | 0 | 0 | 0 | 100 | 0 |
| BRAMY2020354 | 0 | 0 | 0 | 0 | 0 | 60.652 | 0 |
| BRAMY2020355 | 0 | 0 | 0 | 0 | 0 | 100 | 0 |
| BRAMY2020412 | 0 | 0 | 0 | 0 | 0 | 10.816 | 0 |
| BRAMY2020427 | 0 | 0 | 0 | 1.261 | 2.140 | 1.790 | 0 |
| BRAMY2020445 | 0 | 0 | 0 | 0 | 0 | 100 | 0 |
| BRAMY2020466 | 0 | 0 | 0 | 0 | 0 | 100 | 0 |
| BRAMY2020520 | 0 | 0 | 0 | 0 | 0 | 100 | 0 |
| BRAMY2020574 | 0 | 0 | 0 | 0 | 0 | 100 | 0 |
| BRAMY2020634 | 0 | 0 | 0 | 0 | 0 | 100 | 0 |
| BRAMY2020713 | 0 | 0 | 0 | 18.320 | 0 | 26.008 | 0 |
| BRAMY2021040 | 0 | 0 | 0 | 0 | 0 | 100 | 0 |
| BRAMY2021063 | 0 | 0 | 0 | 0 | 0 | 100 | 0 |
| BRAMY2021098 | 0 | 0 | 0 | 0 | 0 | 100 | 0 |
| BRAMY2021139 | 0 | 0 | 0 | 0 | 0 | 25.787 | 0 |
| BRAMY2021142 | 0 | 0 | 0 | 38.011 | 0 | 26.981 | 0 |
| BRAMY2021276 | 0 | 0 | 0 | 0 | 0 | 47.605 | 0 |
| BRAMY2021310 | 0 | 0 | 0 | 0 | 0 | 12.518 | 0 |
| BRAMY2021388 | 0 | 0 | 0 | 0 | 0 | 100 | 0 |
| BRAMY2021498 | 0 | 0 | 0 | 0 | 0 | 100 | 0 |
| BRAMY2021523 | 0 | 0 | 0 | 0 | 0 | 21.367 | 0 |
| BRAMY2021710 | 0 | 52.794 | 0 | 0 | 0 | 7.579 | 0 |
| BRAMY2021732 | 0 | 0 | 0 | 0 | 0 | 100 | 0 |
| BRAMY2021746 | 0 | 0 | 0 | 0 | 0 | 100 | 0 |
| BRAMY2021825 | 0 | 0 | 0 | 0 | 0 | 66.389 | 0 |
| BRAMY2021867 | 0 | 0 | 0 | 25.113 | 0 | 35.650 | 0 |
| BRAMY2021962 | 0 | 0 | 0 | 0 | 0 | 100 | 0 |
| BRAMY2021982 | 0 | 0 | 0 | 0 | 0 | 100 | 0 |
| BRAMY2022052 | 0 | 0 | 0 | 0 | 0 | 100 | 0 |
| BRAMY2022160 | 0 | 0 | 0 | 0 | 0 | 38.082 | 0 |
| BRAMY2022168 | 0 | 0 | 0 | 0 | 0 | 13.630 | 0 |
| BRAMY2022263 | 0 | 0 | 0 | 0 | 0 | 100 | 0 |
| BRAMY2022301 | 0 | 0 | 0 | 0 | 0 | 100 | 0 |
| BRAMY2022320 | 0 | 0 | 0 | 0 | 0 | 100 | 0 |
| BRAMY2022383 | 0 | 0 | 0 | 26.047 | 0 | 73.953 | 0 |
| BRAMY2022445 | 0 | 0 | 0 | 0 | 0 | 47.355 | 0 |
| BRAMY2022454 | 0 | 0 | 0 | 0 | 0 | 100 | 0 |
| BRAMY2022493 | 0 | 0 | 0 | 1.883 | 0 | 5.346 | 0 |
| BRAMY2022525 | 0 | 0 | 0 | 15.652 | 0 | 22.220 | 0 |
| BRAMY2022532 | 0 | 0 | 0 | 0 | 0 | 100 | 0 |
| BRAMY2022723 | 0 | 0 | 0 | 25.113 | 0 | 35.650 | 0 |
| BRAMY2022786 | 0 | 0 | 0 | 0.886 | 4.509 | 13.830 | 0 |
| BRAMY2022796 | 0 | 0 | 0 | 0 | 0 | 100 | 0 |
| BRAMY2022929 | 0 | 0 | 0 | 0 | 0 | 100 | 0 |
| BRAMY2022980 | 0 | 0 | 0 | 0 | 0 | 15.383 | 0 |
| BRAMY2022984 | 0 | 0 | 0 | 0 | 0 | 100 | 0 |
| BRAMY2023060 | 0 | 0 | 0 | 0 | 0 | 100 | 0 |
| BRAMY2023110 | 0 | 0 | 0 | 0 | 0 | 100 | 0 |
| BRAMY2023115 | 0 | 0 | 0 | 0 | 0 | 49.688 | 0 |
| BRAMY2023161 | 0 | 0 | 0 | 0 | 0 | 100 | 0 |
| BRAMY2023172 | 0 | 0 | 0 | 0 | 0 | 100 | 0 |
| BRAMY2023238 | 0 | 0 | 0 | 0 | 0 | 100 | 0 |
| BRAMY2023327 | 0 | 0 | 0 | 0 | 0 | 100 | 0 |
| BRAMY2023358 | 0 | 0 | 0 | 0 | 0 | 100 | 0 |
| BRAMY2023406 | 0 | 0 | 0 | 0 | 0 | 6.652 | 0 |
| BRAMY2023482 | 0 | 0 | 0 | 0 | 0 | 100 | 0 |
| BRAMY2023514 | 0 | 0 | 0 | 0 | 0 | 100 | 0 |
| BRAMY2023719 | 0 | 0 | 0 | 0 | 0 | 6.024 | 0 |
| BRAMY2023729 | 0 | 0 | 0 | 0 | 0 | 47.355 | 0 |
| BRAMY2023786 | 0 | 0 | 0 | 0 | 0 | 100 | 0 |
| BRAMY2023852 | 0 | 0 | 0 | 0 | 0 | 100 | 0 |
| BRAMY2023863 | 0 | 0 | 0 | 0 | 0 | 35.669 | 0 |
| BRAMY2023939 | 0 | 0 | 0 | 0 | 0 | 6.159 | 0 |
| BRAMY2024004 | 0 | 0 | 0 | 1.963 | 0 | 2.787 | 0 |
| BRAMY2024073 | 0 | 0 | 0 | 0 | 0 | 100 | 0 |
| BRAMY2024312 | 0 | 0 | 0 | 0 | 0 | 49.688 | 0 |
| BRAMY2024374 | 0 | 0 | 0 | 0 | 0 | 100 | 0 |
| BRAMY2024390 | 0 | 0 | 0 | 0 | 0 | 35.210 | 0 |
| BRAMY2024416 | 0 | 0 | 0 | 3.212 | 0 | 22.796 | 0 |
| BRAMY2024449 | 0 | 0 | 0 | 0 | 0 | 100 | 0 |
| BRAMY2024489 | 0 | 0 | 0 | 0 | 0 | 100 | 0 |
| BRAMY2024497 | 0 | 0 | 0 | 0 | 0 | 100 | 0 |
| BRAMY2024514 | 0 | 0 | 0 | 0 | 0 | 100 | 0 |
| BRAMY2024530 | 0 | 0 | 0 | 0 | 0 | 100 | 0 |
| BRAMY2024535 | 0 | 0 | 0 | 0 | 0 | 100 | 0 |
| BRAMY2024545 | 0 | 0 | 0 | 0 | 0 | 100 | 0 |
| BRAMY2024576 | 0 | 0 | 0 | 0 | 0 | 100 | 0 |
| BRAMY2024593 | 0 | 0 | 0 | 0 | 0 | 25.978 | 0 |
| BRAMY2024711 | 0 | 0 | 0 | 0 | 0 | 12.354 | 0 |
| BRAMY2024715 | 0 | 0 | 0 | 0 | 0 | 12.836 | 0 |
| BRAMY2024728 | 0 | 0 | 0 | 0 | 0 | 100 | 0 |
| BRAMY2024827 | 0 | 0 | 0 | 0 | 0 | 4.020 | 0 |
| BRAMY2024849 | 0 | 0 | 0 | 0 | 0 | 100 | 0 |
| BRAMY2025024 | 0 | 0 | 0 | 0 | 0 | 100 | 0 |
| BRAMY2025032 | 0 | 0 | 0 | 0 | 0 | 100 | 0 |
| BRAMY2025121 | 0 | 0 | 0 | 11.752 | 0 | 33.367 | 0 |
| BRAMY2025175 | 0 | 0 | 0 | 0 | 0 | 100 | 0 |
| BRAMY2025218 | 0 | 0 | 0 | 0 | 0 | 100 | 0 |
| BRAMY2025230 | 0 | 0 | 0 | 6.959 | 0 | 19.758 | 0 |
| BRAMY2025272 | 0 | 0 | 0 | 0 | 0 | 47.605 | 0 |
| BRAMY2025277 | 0 | 0 | 0 | 0 | 0 | 100 | 0 |
| BRAMY2025495 | 0 | 0 | 0 | 0 | 0 | 100 | 0 |
| BRAMY2025812 | 0 | 0 | 0 | 0 | 0 | 100 | 0 |
| BRAMY2025996 | 0 | 0 | 0 | 0 | 0 | 100 | 0 |
| BRAMY2026009 | 0 | 0 | 0 | 0 | 0 | 44.952 | 0 |
| BRAMY2026091 | 0 | 0 | 0 | 0 | 0 | 100 | 0 |
| BRAMY2026168 | 0 | 0 | 0 | 0 | 0 | 32.330 | 0 |
| BRAMY2026300 | 0 | 0 | 0 | 0 | 0 | 100 | 0 |
| BRAMY2026347 | 0 | 0 | 0 | 0 | 0 | 100 | 0 |
| BRAMY2026395 | 0 | 0 | 0 | 0 | 0 | 100 | 0 |
| BRAMY2026405 | 0 | 0 | 0 | 0 | 0 | 100 | 0 |
| BRAMY2026533 | 0 | 0 | 0 | 0 | 0 | 18.861 | 0 |
| BRAMY2026538 | 0 | 0 | 0 | 0 | 0 | 100 | 0 |
| BRAMY2026685 | 0 | 34.791 | 0 | 0 | 0 | 2.497 | 0 |
| BRAMY2026713 | 0 | 0 | 0 | 0 | 0 | 100 | 0 |
| BRAMY2026778 | 0 | 34.006 | 0 | 0 | 0 | 4.882 | 0 |
| BRAMY2026824 | 0 | 0 | 0 | 0 | 0 | 100 | 0 |
| BRAMY2026899 | 0 | 0 | 0 | 0 | 0 | 100 | 0 |
| BRAMY2026902 | 0 | 0 | 0 | 0 | 0 | 100 | 0 |
| BRAMY2026904 | 0 | 0 | 0 | 0 | 0 | 100 | 0 |
| BRAMY2026976 | 0 | 0 | 0 | 0 | 0 | 100 | 0 |
| BRAMY2027073 | 0 | 0 | 0 | 0 | 0 | 100 | 0 |
| BRAMY2027114 | 0 | 0 | 0 | 0 | 0 | 17.318 | 0 |
| BRAMY2027140 | 0 | 0 | 0 | 0 | 0 | 51.968 | 0 |
| BRAMY2027242 | 0 | 0 | 0 | 0 | 0 | 100 | 0 |
| BRAMY2027396 | 0 | 0 | 0 | 0 | 0 | 100 | 0 |
| BRAMY2027451 | 0 | 0 | 0 | 0 | 0 | 100 | 0 |
| BRAMY2027461 | 0 | 0 | 0 | 0 | 0 | 100 | 0 |
| BRAMY2027467 | 0 | 0 | 0 | 0 | 0 | 100 | 0 |
| BRAMY2027587 | 0 | 0 | 0 | 9.477 | 0 | 26.909 | 0 |
| BRAMY2027714 | 0 | 0 | 0 | 0 | 0 | 100 | 0 |
| BRAMY2027717 | 0 | 0 | 0 | 0 | 0 | 16.593 | 0 |
| BRAMY2027739 | 0 | 0 | 0 | 0 | 0 | 1.356 | 0 |
| BRAMY2027752 | 0 | 0 | 0 | 0 | 0 | 100 | 0 |
| BRAMY2027782 | 0 | 0 | 0 | 0 | 0 | 100 | 0 |
| BRAMY2028072 | 0 | 0 | 0 | 0 | 0 | 100 | 0 |
| BRAMY2028183 | 0 | 0 | 0 | 13.334 | 0 | 18.929 | 0 |
| BRAMY2028188 | 0 | 0 | 0 | 0 | 0 | 100 | 0 |
| BRAMY2028269 | 0 | 0 | 0 | 0 | 0 | 32.892 | 0 |
| BRAMY2028282 | 0 | 0 | 0 | 0 | 0 | 24.592 | 0 |
| BRAMY2028472 | 0 | 0 | 0 | 0 | 0 | 100 | 0 |
| BRAMY2028491 | 0 | 0 | 0 | 0 | 0 | 36.150 | 0 |
| BRAMY2028516 | 0 | 0 | 0 | 0 | 0 | 3.974 | 0 |
| BRAMY2028565 | 0 | 0 | 0 | 0 | 0 | 100 | 0 |
| BRAMY2028593 | 0 | 0 | 0 | 0 | 0 | 100 | 0 |
| BRAMY2028682 | 0 | 0 | 0 | 0 | 0 | 21.396 | 0 |
| BRAMY2028740 | 0 | 0 | 0 | 1.322 | 10.092 | 2.814 | 0 |
| BRAMY2028783 | 0 | 0 | 0 | 0 | 0 | 100 | 0 |
| BRAMY2028796 | 0 | 10.433 | 0 | 0 | 0 | 4.493 | 0 |
| BRAMY2028856 | 0 | 0 | 0 | 0 | 0 | 100 | 0 |
| BRAMY2028914 | 0 | 0 | 0 | 0 | 0 | 17.849 | 0 |
| BRAMY2029204 | 0 | 0 | 0 | 0 | 0 | 100 | 0 |
| BRAMY2029602 | 0 | 0 | 0 | 0 | 0 | 100 | 0 |
| BRAMY2029988 | 0 | 0 | 0 | 8.360 | 0 | 23.737 | 0 |
| BRAMY2030098 | 0 | 0 | 0 | 29.935 | 0 | 42.496 | 0 |
| BRAMY2030109 | 0 | 0 | 0 | 0 | 0 | 100 | 0 |
| BRAMY2030206 | 0 | 0 | 0 | 0 | 0 | 100 | 0 |
| BRAMY2030477 | 0 | 0 | 0 | 0 | 0 | 100 | 0 |
| BRAMY2030545 | 0 | 0 | 0 | 0 | 0 | 22.530 | 0 |
| BRAMY2030607 | 0 | 0 | 0 | 0 | 0 | 100 | 0 |
| BRAMY2030702 | 0 | 0 | 0 | 0 | 0 | 100 | 0 |
| BRAMY2030703 | 0 | 0 | 0 | 0 | 0 | 100 | 0 |
| BRAMY2030768 | 0 | 0 | 0 | 0 | 0 | 100 | 0 |
| BRAMY2030799 | 0 | 0 | 0 | 0 | 0 | 100 | 0 |
| BRAMY2030859 | 0 | 0 | 0 | 0 | 0 | 100 | 0 |
| BRAMY2030915 | 0 | 0 | 0 | 0 | 0 | 100 | 0 |
| BRAMY2031317 | 0 | 0 | 0 | 33.400 | 0 | 15.805 | 0 |
| BRAMY2031377 | 0 | 0 | 0 | 0 | 0 | 100 | 0 |
| BRAMY2031442 | 0 | 0 | 0 | 0 | 0 | 100 | 0 |
| BRAMY2031516 | 0 | 0 | 0 | 0 | 0 | 7.442 | 0 |
| BRAMY2032014 | 0 | 0 | 0 | 0 | 0 | 100 | 0 |
| BRAMY2032087 | 0 | 17.000 | 0 | 0 | 0 | 2.440 | 0 |
| BRAMY2032231 | 0 | 0 | 0 | 0 | 0 | 100 | 0 |
| BRAMY2032242 | 0 | 0 | 0 | 0 | 0 | 100 | 0 |
| BRAMY2032290 | 0 | 0 | 0 | 0 | 0 | 100 | 0 |
| BRAMY2032311 | 0 | 0 | 0 | 0 | 0 | 100 | 0 |
| BRAMY2032317 | 0 | 0 | 0 | 0 | 0 | 60.652 | 0 |
| BRAMY2032344 | 0 | 0 | 0 | 0 | 0 | 100 | 0 |
| BRAMY2032589 | 0 | 0 | 0 | 0 | 0 | 100 | 0 |
| BRAMY2032678 | 0 | 0 | 0 | 0 | 0 | 100 | 0 |
| BRAMY2032696 | 0 | 0 | 0 | 0 | 0 | 21.396 | 0 |
| BRAMY2032777 | 0 | 0 | 0 | 0 | 0 | 100 | 0 |
| BRAMY2032994 | 0 | 0 | 0 | 0 | 0 | 100 | 0 |
| BRAMY2033003 | 0 | 0 | 0 | 0 | 0 | 100 | 0 |
| BRAMY2033116 | 0 | 0 | 0 | 0 | 0 | 100 | 0 |
| BRAMY2033240 | 0 | 0 | 0 | 0 | 0 | 100 | 0 |
| BRAMY2033267 | 0 | 0 | 0 | 0 | 0 | 100 | 0 |
| BRAMY2033316 | 0 | 0 | 0 | 0 | 0 | 54.718 | 0 |
| BRAMY2033332 | 0 | 0 | 0 | 0 | 0 | 100 | 0 |
| BRAMY2033506 | 0 | 0 | 0 | 0 | 0 | 100 | 0 |
| BRAMY2033594 | 0 | 0 | 0 | 0 | 0 | 100 | 0 |
| BRAMY2033895 | 0 | 0 | 0 | 0 | 0 | 100 | 0 |
| BRAMY2033914 | 0 | 0 | 0 | 0 | 0 | 50.189 | 0 |
| BRAMY2034072 | 0 | 0 | 0 | 0 | 0 | 100 | 0 |
| BRAMY2034185 | 0 | 0 | 0 | 0 | 0 | 100 | 0 |
| BRAMY2034187 | 0 | 0 | 0 | 0 | 0 | 12.529 | 0 |
| BRAMY2034305 | 0 | 0 | 0 | 0 | 0 | 100 | 0 |
| BRAMY2034561 | 0 | 0 | 0 | 0 | 0 | 100 | 0 |
| BRAMY2034920 | 0 | 0 | 0 | 0 | 0 | 100 | 0 |
| BRAMY2034993 | 0 | 0 | 0 | 0 | 0 | 100 | 0 |
| BRAMY2035070 | 0 | 0 | 0 | 0 | 0 | 54.718 | 0 |
| BRAMY2035449 | 0 | 0 | 0 | 0 | 0 | 100 | 0 |
| BRAMY2035545 | 0 | 0 | 0 | 41.329 | 0 | 58.671 | 0 |
| BRAMY2035606 | 0 | 0 | 0 | 0 | 0 | 100 | 0 |
| BRAMY2035718 | 0 | 0 | 0 | 0 | 0 | 100 | 0 |
| BRAMY2035719 | 0 | 0 | 0 | 0 | 0 | 15.304 | 0 |
| BRAMY2035801 | 0 | 0 | 0 | 0 | 0 | 100 | 0 |
| BRAMY2035869 | 0 | 0 | 0 | 0 | 0 | 60.652 | 0 |
| BRAMY2035923 | 0 | 0 | 0 | 0 | 0 | 100 | 0 |
| BRAMY2036076 | 0 | 0 | 0 | 15.354 | 0 | 21.797 | 0 |
| BRAMY2036079 | 0 | 0 | 0 | 0 | 0 | 100 | 0 |
| BRAMY2036254 | 0 | 0 | 0 | 0 | 0 | 100 | 0 |
| BRAMY2036266 | 0 | 0 | 0 | 0 | 0 | 100 | 0 |
| BRAMY2036387 | 0 | 0 | 0 | 0 | 0 | 13.490 | 0 |
| BRAMY2036396 | 0 | 0 | 0 | 0 | 0 | 100 | 0 |
| BRAMY2036459 | 0 | 0 | 0 | 0 | 0 | 3.798 | 0 |
| BRAMY2036567 | 0 | 0 | 0 | 26.525 | 0 | 22.594 | 0 |
| BRAMY2036615 | 0 | 0 | 0 | 0 | 0 | 100 | 0 |
| BRAMY2036699 | 0 | 0 | 0 | 0 | 0 | 100 | 0 |
| BRAMY2036913 | 0 | 0 | 0 | 0 | 0 | 100 | 0 |
| BRAMY2036918 | 0 | 0 | 0 | 0 | 0 | 100 | 0 |
| BRAMY2036968 | 0 | 0 | 0 | 0 | 0 | 100 | 0 |
| BRAMY2037147 | 0 | 0 | 0 | 0 | 0 | 36.150 | 0 |
| BRAMY2037328 | 0 | 0 | 0 | 0 | 0 | 100 | 0 |
| BRAMY2037609 | 0 | 0 | 0 | 0 | 0 | 100 | 0 |
| BRAMY2037629 | 0 | 0 | 0 | 0 | 0 | 100 | 0 |
| BRAMY2037800 | 0 | 0 | 0 | 0 | 0 | 100 | 0 |
| BRAMY2037823 | 0 | 0 | 0 | 21.055 | 0 | 29.890 | 0 |
| BRAMY2037971 | 0 | 0 | 0 | 0 | 0 | 100 | 0 |
| BRAMY2038100 | 0 | 0 | 0 | 0 | 0 | 100 | 0 |
| BRAMY2038128 | 0 | 0 | 0 | 0 | 0 | 100 | 0 |
| BRAMY2038317 | 0 | 0 | 0 | 0 | 0 | 100 | 0 |
| BRAMY2038475 | 0 | 0 | 0 | 0 | 0 | 100 | 0 |
| BRAMY2038484 | 0 | 0 | 0 | 0 | 0 | 100 | 0 |
| BRAMY2038516 | 0 | 0 | 0 | 0 | 0 | 12.770 | 0 |
| BRAMY2038832 | 0 | 0 | 0 | 0 | 0 | 12.282 | 0 |
| BRAMY2038846 | 0 | 0 | 0 | 0 | 0 | 47.355 | 0 |
| BRAMY2038887 | 0 | 0 | 0 | 0 | 0 | 100 | 0 |
| BRAMY2038904 | 0 | 0 | 0 | 0 | 0 | 60.652 | 0 |
| BRAMY2039287 | 0 | 0 | 0 | 0 | 0 | 100 | 0 |
| BRAMY2039300 | 0 | 0 | 0 | 0 | 0 | 100 | 0 |
| BRAMY2039314 | 0 | 0 | 0 | 0 | 0 | 100 | 0 |
| BRAMY2039341 | 0 | 0 | 0 | 0 | 0 | 100 | 0 |
| BRAMY2039630 | 0 | 0 | 0 | 0 | 0 | 8.744 | 0 |
| BRAMY2039695 | 0 | 0 | 0 | 0 | 0 | 100 | 0 |
| BRAMY2039728 | 0 | 0 | 0 | 25.927 | 0 | 36.806 | 0 |
| BRAMY2039872 | 0 | 0 | 0 | 14.071 | 0 | 19.976 | 0 |
| BRAMY2040051 | 0 | 0 | 0 | 0 | 0 | 100 | 0 |
| BRAMY2040095 | 0 | 0 | 10.544 | 3.154 | 0 | 2.755 | 0 |
| BRAMY2040159 | 0 | 0 | 0 | 0 | 0 | 100 | 0 |
| BRAMY2040214 | 0 | 0 | 0 | 10.294 | 0 | 29.228 | 0 |
| BRAMY2040478 | 0 | 0 | 0 | 0 | 0 | 100 | 0 |
| BRAMY2040592 | 0 | 0 | 0 | 0 | 12.582 | 7.017 | 0 |
| BRAMY2040915 | 0 | 0 | 0 | 0 | 0 | 100 | 0 |
| BRAMY2041261 | 0 | 0 | 0 | 0 | 0 | 100 | 0 |
| BRAMY2041347 | 0 | 0 | 0 | 0 | 0 | 100 | 0 |
| BRAMY2041378 | 0 | 0 | 0 | 0 | 0 | 100 | 0 |
| BRAMY2041384 | 0 | 0 | 0 | 0 | 0 | 100 | 0 |
| BRAMY2041434 | 0 | 0 | 0 | 0 | 0 | 100 | 0 |
| BRAMY2041507 | 0 | 0 | 0 | 0 | 0 | 100 | 0 |
| BRAMY2041542 | 0 | 0 | 0 | 0 | 0 | 100 | 0 |
| BRAMY2041738 | 0 | 0 | 0 | 0 | 0 | 100 | 0 |
| BRAMY2042122 | 0 | 0 | 0 | 0 | 0 | 100 | 0 |
| BRAMY2042131 | 0 | 0 | 0 | 0 | 0 | 100 | 0 |
| BRAMY2042178 | 0 | 0 | 0 | 0 | 0 | 100 | 0 |
| BRAMY2042195 | 0 | 0 | 0 | 0 | 0 | 30.516 | 0 |
| BRAMY2042244 | 0 | 0 | 0 | 0 | 0 | 100 | 0 |
| BRAMY2042549 | 0 | 0 | 0 | 0 | 0 | 100 | 0 |
| BRAMY2042596 | 0 | 0 | 0 | 0 | 0 | 100 | 0 |
| BRAMY2042612 | 0 | 0 | 0 | 0 | 0 | 100 | 0 |
| BRAMY2042641 | 0 | 0 | 0 | 0 | 0 | 100 | 0 |
| BRAMY2042711 | 0 | 0 | 0 | 0 | 0 | 100 | 0 |
| BRAMY2042760 | 0 | 0 | 0 | 0 | 0 | 100 | 0 |
| BRAMY2042804 | 0 | 0 | 0 | 41.329 | 0 | 58.671 | 0 |
| BRAMY2042899 | 0 | 0 | 0 | 0 | 0 | 100 | 0 |
| BRAMY2042918 | 0 | 0 | 0 | 0 | 0 | 100 | 0 |
| BRAMY2043069 | 0 | 0 | 0 | 0 | 0 | 21.396 | 0 |
| BRAMY2043103 | 0 | 0 | 0 | 0 | 0 | 100 | 0 |
| BRAMY2043314 | 0 | 0 | 0 | 0 | 0 | 100 | 0 |
| BRAMY2043345 | 0 | 0 | 0 | 0 | 0 | 100 | 0 |
| BRAMY2044246 | 0 | 0 | 0 | 0 | 0 | 100 | 0 |
| BRAMY2044317 | 0 | 0 | 0 | 0 | 0 | 100 | 0 |
| BRAMY2044349 | 0 | 0 | 0 | 0 | 0 | 100 | 0 |
| BRAMY2044686 | 0 | 0 | 0 | 0 | 0 | 100 | 0 |
| BRAMY2044838 | 0 | 0 | 0 | 0 | 0 | 31.238 | 0 |
| BRAMY2045036 | 0 | 0 | 0 | 0 | 0 | 100 | 0 |
| BRAMY2045299 | 0 | 0 | 0 | 0 | 0 | 100 | 0 |
| BRAMY2045471 | 0 | 0 | 0 | 0 | 0 | 100 | 0 |
| BRAMY2045530 | 0 | 66.216 | 0 | 0 | 0 | 9.506 | 0 |
| BRAMY2046109 | 0 | 0 | 0 | 0 | 0 | 100 | 0 |
| BRAMY2046478 | 0 | 0 | 0 | 0 | 0 | 100 | 0 |
| BRAMY2046489 | 0 | 0 | 0 | 0 | 0 | 100 | 0 |
| BRAMY2046537 | 0 | 0 | 0 | 0 | 0 | 100 | 0 |
| BRAMY2046667 | 0 | 0 | 0 | 0 | 0 | 100 | 0 |
| BRAMY2046742 | 0 | 0 | 0 | 0 | 0 | 100 | 0 |
| BRAMY2046871 | 0 | 0 | 0 | 0 | 0 | 66.835 | 0 |
| BRAMY2046984 | 0 | 0 | 0 | 0 | 0 | 100 | 0 |
| BRAMY2046989 | 0 | 0 | 0 | 0 | 0 | 100 | 0 |
| BRAMY2047169 | 0 | 0 | 0 | 0 | 0 | 100 | 0 |
| BRAMY2047280 | 0 | 0 | 0 | 0 | 0 | 100 | 0 |
| BRAMY2047420 | 0 | 0 | 0 | 0.719 | 0 | 2.041 | 0 |
| BRAMY2047676 | 0 | 0 | 0 | 0 | 0 | 100 | 0 |
| BRAMY2047692 | 0 | 0 | 0 | 0 | 0 | 100 | 0 |
| BRAMY2047746 | 0 | 0 | 0 | 0 | 0 | 100 | 0 |
| BRAMY2047751 | 0 | 0 | 0 | 0 | 0 | 100 | 0 |
| BRAMY2047765 | 0 | 0 | 0 | 0 | 0 | 100 | 0 |
| BRAMY2047884 | 0 | 0 | 0 | 0 | 0 | 100 | 0 |
| BRAMY2047948 | 0 | 0 | 0 | 0 | 0 | 100 | 0 |
| BRAMY3000206 | 0 | 0 | 0 | 0 | 0 | 100 | 0 |
| BRAMY3000210 | 0 | 0 | 0 | 0 | 0 | 100 | 0 |
| BRAMY3000213 | 0 | 0 | 0 | 0 | 0 | 100 | 0 |
| BRAMY3000224 | 0 | 0 | 0 | 0 | 0 | 28.785 | 0 |
| BRAMY3000254 | 0 | 0 | 0 | 0 | 0 | 100 | 0 |
| BRAMY3000307 | 0 | 0 | 0 | 0 | 0 | 100 | 0 |
| BRAMY3000692 | 0 | 0 | 0 | 0 | 0 | 100 | 0 |
| BRAMY3001356 | 0 | 0 | 0 | 0 | 0 | 100 | 0 |
| BRAMY3001401 | 0 | 0 | 0 | 0 | 0 | 100 | 0 |
| BRAMY3001409 | 0 | 0 | 0 | 0 | 0 | 100 | 0 |
| BRAMY3001794 | 0 | 0 | 0 | 0 | 0 | 100 | 0 |
| BRAMY3002120 | 0 | 0 | 0 | 0 | 0 | 54.718 | 0 |
| BRAMY3002312 | 0 | 0 | 0 | 0 | 0 | 100 | 0 |
| BRAMY3002329 | 0 | 0 | 0 | 9.616 | 0 | 20.478 | 0 |
| BRAMY3002458 | 0 | 0 | 0 | 0 | 0 | 12.509 | 0 |
| BRAMY3002508 | 0 | 0 | 0 | 0 | 0 | 100 | 0 |
| BRAMY3002620 | 0 | 0 | 0 | 41.329 | 0 | 58.671 | 0 |
| BRAMY3002803 | 0 | 0 | 0 | 0 | 0 | 14.538 | 0 |
| BRAMY3002805 | 0 | 0 | 0 | 0 | 0 | 100 | 0 |
| BRAMY3002886 | 0 | 0 | 0 | 0 | 0 | 100 | 0 |
| BRAMY3002991 | 0 | 0 | 0 | 0 | 0 | 3.951 | 0 |
| BRAMY3003026 | 0 | 0 | 0 | 0 | 0 | 44.784 | 0 |
| BRAMY3003109 | 0 | 0 | 0 | 0 | 0 | 100 | 0 |
| BRAMY3003205 | 0 | 0 | 0 | 0 | 0 | 48.484 | 0 |
| BRAMY3003310 | 0 | 0 | 0 | 0 | 0 | 54.718 | 0 |
| BRAMY3003566 | 0 | 0 | 0 | 0 | 0 | 100 | 0 |
| BRAMY3003723 | 0 | 0 | 0 | 0 | 0 | 100 | 0 |
| BRAMY3004126 | 0 | 0 | 0 | 0 | 0 | 50.189 | 0 |
| BRAMY3004224 | 0 | 0 | 0 | 0 | 0 | 33.278 | 0 |
| BRAMY3004364 | 0 | 0 | 0 | 4.821 | 0 | 13.689 | 0 |
| BRAMY3004377 | 0 | 0 | 0 | 1.766 | 0 | 3.343 | 0 |
| BRAMY3004672 | 0 | 0 | 0 | 0 | 0 | 100 | 0 |
| BRAMY3004800 | 0 | 0 | 0 | 0 | 0 | 15.340 | 0 |
| BRAMY3004900 | 0 | 0 | 0 | 0 | 0 | 100 | 0 |
| BRAMY3004919 | 0 | 0 | 0 | 0 | 0 | 100 | 0 |
| BRAMY3005091 | 0 | 0 | 0 | 13.622 | 0 | 19.339 | 0 |
| BRAMY3005184 | 0 | 0 | 0 | 0 | 0 | 22.578 | 0 |
| BRAMY3005656 | 0 | 0 | 0 | 0 | 0 | 100 | 0 |
| BRAMY3005912 | 0 | 0 | 0 | 30.401 | 0 | 21.579 | 0 |
| BRAMY3005932 | 0 | 0 | 0 | 41.329 | 0 | 58.671 | 0 |
| BRAMY3006032 | 0 | 0 | 0 | 0 | 0 | 100 | 0 |
| BRAMY3006297 | 0 | 0 | 0 | 0 | 0 | 100 | 0 |
| BRAMY3006761 | 0 | 0 | 0 | 0 | 0 | 11.062 | 0 |
| BRAMY3007078 | 0 | 0 | 0 | 0 | 0 | 49.688 | 0 |
| BRAMY3007206 | 0 | 0 | 0 | 0 | 0 | 100 | 0 |
| BRAMY3007311 | 0 | 0 | 0 | 5.576 | 0 | 23.748 | 0 |
| BRAMY3007350 | 0 | 0 | 0 | 0 | 0 | 100 | 0 |
| BRAMY3007449 | 0 | 0 | 0 | 0 | 0 | 100 | 0 |
| BRAMY3007471 | 0 | 0 | 0 | 0 | 0 | 100 | 0 |
| BRAMY3007609 | 0 | 0 | 0 | 0 | 0 | 100 | 0 |
| BRAMY3007723 | 0 | 0 | 0 | 0 | 0 | 100 | 0 |
| BRAMY3007968 | 0 | 0 | 0 | 0 | 0 | 100 | 0 |
| BRAMY3008044 | 0 | 0 | 0 | 0 | 0 | 16.267 | 0 |
| BRAMY3008088 | 0 | 0 | 0 | 0 | 0 | 100 | 0 |
| BRAMY3008096 | 0 | 0 | 0 | 41.329 | 0 | 58.671 | 0 |
| BRAMY3008335 | 0 | 0 | 0 | 37.822 | 0 | 17.898 | 0 |
| BRAMY3008466 | 0 | 0 | 0 | 0 | 0 | 100 | 0 |
| BRAMY3008505 | 0 | 0 | 0 | 0 | 0 | 100 | 0 |
| BRAMY3008650 | 0 | 0 | 0 | 0 | 0 | 100 | 0 |
| BRAMY3008937 | 0 | 0 | 0 | 0 | 0 | 100 | 0 |
| BRAMY3009158 | 0 | 0 | 0 | 0 | 0 | 100 | 0 |
| BRAMY3009207 | 0 | 0 | 0 | 0 | 0 | 100 | 0 |
| BRAMY3009491 | 0 | 0 | 0 | 22.146 | 0 | 31.439 | 0 |
| BRAMY3009556 | 0 | 0 | 0 | 0 | 0 | 47.605 | 0 |
| BRAMY3009782 | 0 | 0 | 0 | 0 | 0 | 47.605 | 0 |
| BRAMY3009811 | 0 | 0 | 0 | 0 | 0 | 33.057 | 0 |
| BRAMY3009904 | 0 | 0 | 0 | 0 | 0 | 100 | 0 |
| BRAMY3010008 | 0 | 0 | 0 | 0 | 0 | 1.173 | 0 |
| BRAMY3010264 | 0 | 0 | 0 | 0 | 0 | 50.189 | 0 |
| BRAMY3010321 | 0 | 0 | 0 | 0 | 0 | 100 | 0 |
| BRAMY3010411 | 0 | 0 | 0 | 0 | 0 | 100 | 0 |
| BRAMY3010492 | 0 | 0 | 0 | 0 | 0 | 5.803 | 0 |
| BRAMY3010603 | 0 | 0 | 0 | 0 | 0 | 100 | 0 |
| BRAMY3010654 | 0 | 0 | 0 | 0 | 0 | 47.605 | 0 |
| BRAMY4000089 | 0 | 0 | 0 | 3.612 | 0 | 10.255 | 0 |
| BRAMY4000095 | 0 | 0 | 0 | 0 | 0 | 14.721 | 0 |
| BRAMY4000229 | 0 | 0 | 0 | 25.113 | 0 | 35.650 | 0 |
| BRAMY4000277 | 0 | 0 | 0 | 0 | 0 | 100 | 0 |
| BRAMY4000915 | 0 | 0 | 0 | 0 | 0 | 49.688 | 0 |
| BRAMY4000962 | 0 | 0 | 0 | 0 | 0 | 100 | 0 |
| BRAMY4001173 | 0 | 0 | 0 | 0 | 0 | 100 | 0 |
| BRAMY4001200 | 0 | 0 | 0 | 0 | 0 | 100 | 0 |
| BRAMY4001234 | 0 | 0 | 0 | 0 | 0 | 54.718 | 0 |
| BRAMY4001449 | 0 | 0 | 0 | 0 | 0 | 100 | 0 |
| BRAMY4001652 | 0 | 0 | 0 | 0 | 0 | 100 | 0 |
| BRAMY4001863 | 0 | 0 | 0 | 0 | 0 | 15.094 | 0 |
| BRAMY4001913 | 0 | 0 | 0 | 0 | 0 | 100 | 0 |
| BRAMY4002575 | 0 | 0 | 0 | 0 | 0 | 100 | 0 |
| BRAMY4002628 | 0 | 0 | 0 | 0 | 0 | 7.157 | 0 |
| BRASW1000053 | 0 | 0 | 0 | 0 | 0 | 0 | 100 |
| BRASW1000125 | 0 | 0 | 0 | 0 | 0 | 0 | 99.054 |
| BRAWH1000001 | 0 | 0 | 0 | 4.724 | 12.024 | 0 | 0 |
| BRAWH1000037 | 0 | 0 | 0 | 2.588 | 0 | 1.837 | 0 |
| BRAWH1000040 | 0 | 0 | 0 | 0 | 0 | 2.773 | 0 |
| BRAWH1000045 | 0 | 0 | 0 | 0.710 | 0 | 16.138 | 0 |
| BRAWH1000083 | 0 | 31.801 | 0 | 3.216 | 0 | 4.565 | 0 |
| BRAWH1000093 | 0 | 0 | 0 | 0.655 | 0 | 0 | 0 |
| BRAWH1000094 | 0 | 0 | 0 | 11.953 | 0 | 4.242 | 0 |
| BRAWH1000127 | 0 | 0 | 0 | 4.538 | 0 | 9.663 | 0 |
| BRAWH1000162 | 0 | 0 | 0 | 5.181 | 6.594 | 9.194 | 0 |
| BRAWH1000174 | 0 | 0 | 0 | 0 | 0 | 8.660 | 0 |
| BRAWH2000082 | 0 | 0 | 0 | 1.634 | 5.544 | 12.368 | 0 |
| BRAWH2000131 | 0 | 0 | 0 | 0 | 78.324 | 0 | 0 |
| BRAWH2000177 | 0 | 0 | 0 | 11.350 | 0 | 0 | 0 |
| BRAWH2000274 | 0 | 0 | 0 | 30.824 | 0 | 9.945 | 0 |
| BRAWH2000353 | 0 | 0 | 0 | 41.512 | 0 | 0 | 0 |
| BRAWH2000417 | 0 | 0 | 0 | 0 | 20.093 | 28.015 | 0 |
| BRAWH2000443 | 0 | 0 | 0 | 0 | 0 | 22.835 | 0 |
| BRAWH2000460 | 0 | 0 | 0 | 9.097 | 0 | 1.230 | 0 |
| BRAWH2000482 | 0 | 0 | 0 | 0 | 0 | 4.588 | 0 |
| BRAWH2000494 | 0 | 0 | 0 | 6.452 | 0 | 0 | 0 |
| BRAWH2000500 | 0 | 0 | 0 | 41.512 | 0 | 0 | 0 |
| BRAWH2000522 | 0 | 0 | 0 | 0 | 6.549 | 3.653 | 0 |
| BRAWH2000595 | 0 | 87.530 | 0 | 0 | 0 | 0 | 0 |
| BRAWH2000633 | 41.554 | 0 | 10.223 | 0 | 0 | 1.336 | 0 |
| BRAWH2000636 | 0 | 0 | 0 | 1.125 | 3.819 | 8.519 | 0 |
| BRAWH2000686 | 0 | 0 | 0 | 10.411 | 4.417 | 4.927 | 0 |
| BRAWH2000697 | 0 | 0 | 0 | 4.308 | 7.310 | 1.019 | 0 |
| BRAWH2000839 | 0 | 2.883 | 0 | 1.749 | 1.484 | 8.277 | 0 |
| BRAWH2000924 | 0 | 0 | 0 | 1.222 | 8.296 | 4.048 | 0 |
| BRAWH2001019 | 0 | 0 | 0 | 0 | 0 | 11.490 | 0 |
| BRAWH2001037 | 0 | 0 | 0 | 0 | 0 | 4.041 | 0 |
| BRAWH2001092 | 0 | 0 | 2.711 | 1.247 | 0 | 0.531 | 0 |
| BRAWH2001141 | 0 | 0 | 0 | 10.821 | 0 | 5.121 | 0 |
| BRAWH2001166 | 0 | 0 | 24.344 | 0 | 0 | 0 | 0 |
| BRAWH2001171 | 0 | 0 | 4.763 | 9.644 | 0 | 9.334 | 0 |
| BRAWH2001186 | 0 | 0 | 0 | 0 | 0 | 2.871 | 0 |
| BRAWH2001238 | 0 | 0 | 0 | 42.908 | 0 | 0 | 0 |
| BRAWH2001321 | 0 | 0 | 0 | 3.656 | 0 | 15.569 | 0 |
| BRAWH2001395 | 0 | 0 | 0 | 3.580 | 3.037 | 2.541 | 0 |
| BRAWH2001418 | 0 | 0 | 0 | 3.661 | 9.319 | 2.599 | 0 |
| BRAWH2001439 | 0 | 0 | 0 | 2.921 | 0 | 0 | 0 |
| BRAWH2001459 | 0 | 0 | 0 | 5.208 | 0 | 0 | 0 |
| BRAWH2001461 | 0 | 0 | 0 | 0 | 0 | 3.582 | 0 |
| BRAWH2001535 | 0 | 0 | 0 | 0 | 5.352 | 6.965 | 0 |
| BRAWH2001662 | 0 | 0 | 0 | 3.263 | 0 | 0 | 0 |
| BRAWH2001671 | 0 | 0 | 0 | 8.097 | 0 | 0 | 0 |
| BRAWH2002047 | 0 | 0 | 0 | 41.512 | 0 | 0 | 0 |
| BRAWH2002060 | 0 | 0 | 0 | 41.512 | 0 | 0 | 0 |
| BRAWH2002318 | 0 | 0 | 0 | 0 | 0 | 26.889 | 0 |
| BRAWH2002549 | 0 | 0 | 0 | 0 | 0 | 18.154 | 0 |
| BRAWH2002560 | 0 | 0 | 0 | 0 | 0 | 6.503 | 0 |
| BRAWH2002601 | 0 | 0 | 0 | 3.530 | 0 | 0 | 0 |
| BRAWH2002811 | 0 | 0 | 0 | 0 | 31.162 | 17.379 | 0 |
| BRAWH2002911 | 0 | 0 | 0 | 16.889 | 0 | 0 | 0 |
| BRAWH2002963 | 0 | 0 | 0 | 8.469 | 0 | 0 | 0 |
| BRAWH2003000 | 0 | 0 | 0 | 41.512 | 0 | 0 | 0 |
| BRAWH2003025 | 0 | 0 | 0 | 0 | 10.956 | 3.055 | 0 |
| BRAWH2003355 | 0 | 0 | 0 | 0 | 78.324 | 0 | 0 |
| BRAWH2003662 | 0 | 0 | 0 | 8.798 | 0 | 18.734 | 0 |
| BRAWH2004078 | 0 | 0 | 0 | 3.740 | 0 | 0 | 0 |
| BRAWH2004095 | 0 | 0 | 0 | 9.229 | 4.271 | 5.956 | 0 |
| BRAWH2004779 | 0 | 0 | 0 | 0 | 0 | 50.189 | 0 |
| BRAWH2004842 | 0 | 0 | 0 | 11.316 | 0 | 8.032 | 0 |
| BRAWH2005008 | 0 | 0 | 0 | 11.719 | 0 | 0 | 0 |
| BRAWH2005068 | 12.608 | 0 | 0 | 0.571 | 1.453 | 0.405 | 0 |
| BRAWH2005661 | 0 | 11.221 | 0 | 2.269 | 0 | 0 | 0 |
| BRAWH2006044 | 0 | 0 | 0 | 12.487 | 0 | 0 | 0 |
| BRAWH2006207 | 0 | 0 | 0 | 9.187 | 0 | 0 | 0 |
| BRAWH2006301 | 0 | 0 | 0 | 41.512 | 0 | 0 | 0 |
| BRAWH2006493 | 0 | 0 | 0 | 3.610 | 0 | 10.250 | 0 |
| BRAWH2006543 | 0 | 0 | 0 | 9.340 | 0 | 4.420 | 0 |
| BRAWH2006622 | 0 | 0 | 0 | 23.488 | 0 | 0 | 0 |
| BRAWH2006989 | 0 | 0 | 0 | 17.726 | 0 | 0 | 0 |
| BRAWH2006996 | 0 | 0 | 0 | 7.243 | 0 | 0 | 0 |
| BRAWH2007591 | 0 | 0 | 0 | 22.274 | 0 | 6.324 | 0 |
| BRAWH2007605 | 0 | 0 | 15.818 | 11.647 | 0 | 0 | 0 |
| BRAWH2007664 | 0 | 0 | 0 | 0 | 0 | 10.310 | 0 |
| BRAWH2007825 | 0 | 0 | 0 | 41.512 | 0 | 0 | 0 |
| BRAWH2008255 | 0 | 0 | 0 | 0 | 0 | 4.257 | 0 |
| BRAWH2008706 | 0 | 0 | 0 | 0 | 0 | 5.795 | 0 |
| BRAWH2008903 | 0 | 0 | 0 | 0 | 0 | 4.260 | 0 |
| BRAWH2008956 | 0 | 0 | 0 | 22.103 | 0 | 0 | 0 |
| BRAWH2008993 | 0 | 0 | 0 | 0 | 0 | 50.189 | 0 |
| BRAWH2009238 | 0 | 0 | 0 | 7.400 | 0 | 5.253 | 0 |
| BRAWH2009307 | 0 | 0 | 0 | 4.240 | 0 | 0 | 0 |
| BRAWH2009695 | 0 | 0 | 0 | 18.990 | 0 | 26.958 | 0 |
| BRAWH2010136 | 0 | 0 | 0 | 0 | 0 | 26.605 | 0 |
| BRAWH2010329 | 0 | 0 | 0 | 21.311 | 0 | 10.085 | 0 |
| BRAWH2010354 | 0 | 0 | 0 | 9.211 | 0 | 0 | 0 |
| BRAWH2010364 | 0 | 0 | 0 | 36.692 | 0 | 0 | 0 |
| BRAWH2010552 | 0 | 0 | 0 | 41.512 | 0 | 0 | 0 |
| BRAWH2010754 | 0 | 0 | 0 | 7.940 | 0 | 0 | 0 |
| BRAWH2011204 | 0 | 0 | 0 | 0 | 0 | 50.189 | 0 |
| BRAWH2011343 | 0 | 0 | 0 | 9.958 | 0 | 0 | 0 |
| BRAWH2011812 | 0 | 0 | 0 | 0 | 0 | 13.646 | 0 |
| BRAWH2011920 | 0 | 0 | 0 | 0 | 0 | 38.183 | 0 |
| BRAWH2012164 | 0 | 0 | 0 | 14.788 | 0 | 0 | 0 |
| BRAWH2012538 | 0 | 35.605 | 0 | 0 | 0 | 0 | 0 |
| BRAWH2012698 | 0 | 0 | 0 | 0 | 0 | 57.958 | 0 |
| BRAWH2012827 | 0 | 0 | 0 | 0 | 0 | 9.061 | 0 |
| BRAWH2012866 | 0 | 0 | 0 | 3.017 | 0 | 14.993 | 0 |
| BRAWH2013047 | 0 | 0 | 0 | 13.334 | 67.880 | 0 | 0 |
| BRAWH2013219 | 0 | 0 | 0 | 0 | 35.004 | 9.761 | 0 |
| BRAWH2013294 | 0 | 0 | 0 | 13.997 | 0 | 0 | 0 |
| BRAWH2013748 | 0 | 0 | 0 | 0 | 0 | 8.068 | 0 |
| BRAWH2014053 | 0 | 0 | 0 | 16.482 | 0 | 0 | 0 |
| BRAWH2014188 | 0 | 0 | 0 | 0 | 0 | 2.164 | 0 |
| BRAWH2014414 | 0 | 0 | 0 | 0 | 0 | 54.002 | 0 |
| BRAWH2014511 | 0 | 0 | 0 | 3.050 | 0 | 12.988 | 0 |
| BRAWH2014645 | 0 | 7.420 | 0 | 3.751 | 0 | 2.130 | 0 |
| BRAWH2014662 | 0 | 0 | 0 | 11.016 | 0 | 0 | 0 |
| BRAWH2014876 | 0 | 0 | 0 | 7.433 | 0 | 0 | 0 |
| BRAWH2014954 | 0 | 0 | 0 | 41.512 | 0 | 0 | 0 |
| BRAWH2015247 | 0 | 0 | 0 | 7.410 | 37.723 | 0 | 0 |
| BRAWH2015385 | 0 | 0 | 0 | 41.512 | 0 | 0 | 0 |
| BRAWH2015728 | 0 | 0 | 0 | 0 | 0 | 50.189 | 0 |
| BRAWH2016028 | 0 | 0 | 0 | 0 | 0 | 50.189 | 0 |
| BRAWH2016166 | 0 | 0 | 0 | 5.368 | 0 | 7.620 | 0 |
| BRAWH2016209 | 0 | 0 | 0 | 11.791 | 0 | 0 | 0 |
| BRAWH2016269 | 0 | 0 | 0 | 0.936 | 0 | 1.328 | 0 |
| BRAWH2016679 | 0 | 0 | 0 | 6.839 | 0 | 0 | 0 |
| BRAWH2016702 | 0 | 0 | 0 | 26.193 | 0 | 0 | 0 |
| BRAWH2017002 | 0 | 0 | 0 | 1.766 | 0 | 15.044 | 0 |
| BRAWH2017304 | 0 | 0 | 0 | 23.571 | 0 | 0 | 0 |
| BRAWH2017379 | 0 | 0 | 0 | 0 | 0 | 15.310 | 0 |
| BRAWH2017685 | 0 | 0 | 3.914 | 1.081 | 0 | 1.534 | 0 |
| BRAWH2018267 | 0 | 0 | 0 | 14.668 | 0 | 0 | 0 |
| BRAWH2018526 | 0 | 2.160 | 2.373 | 0.218 | 1.112 | 1.550 | 0 |
| BRAWH2018875 | 0 | 0 | 0 | 18.805 | 0 | 0 | 0 |
| BRAWH3000088 | 0 | 0 | 0 | 0 | 0 | 15.152 | 0 |
| BRAWH3001319 | 0 | 0 | 0 | 19.373 | 0 | 0 | 0 |
| BRAWH3001891 | 0 | 0 | 0 | 36.772 | 0 | 17.401 | 0 |
| BRAWH3001918 | 0 | 0 | 0 | 39.423 | 0 | 0 | 0 |
| BRAWH3002600 | 0 | 0 | 0 | 26.120 | 0 | 37.080 | 0 |
| BRAWH3002853 | 0 | 0 | 5.704 | 2.100 | 0 | 2.236 | 0 |
| BRAWH3003573 | 0 | 0 | 0 | 14.310 | 0 | 0 | 0 |
| BRAWH3003727 | 0 | 0 | 0 | 21.411 | 0 | 0 | 0 |
| BRAWH3004530 | 0 | 0 | 0 | 25.041 | 0 | 0 | 0 |
| BRAWH3005132 | 0 | 0 | 0 | 0 | 0 | 50.189 | 0 |
| BRAWH3005146 | 0 | 0 | 0 | 3.594 | 0 | 0 | 0 |
| BRAWH3006761 | 0 | 0 | 0 | 0 | 0 | 21.430 | 0 |
| BRAWH3007129 | 0 | 0 | 0 | 13.969 | 35.557 | 0 | 0 |
| BRAWH3008931 | 0 | 0 | 0 | 4.916 | 0 | 6.980 | 0 |
| BRAWH3009285 | 0 | 0 | 0 | 26.193 | 0 | 0 | 0 |
| BRAWH3009297 | 0 | 0 | 0 | 41.512 | 0 | 0 | 0 |
| BRAWH3010461 | 0 | 0 | 0 | 10.207 | 0 | 14.490 | 0 |
| BRAWH3016271 | 0 | 0 | 0 | 0 | 0 | 5.435 | 0 |
| BRAWH3017259 | 0 | 0 | 0 | 4.967 | 0 | 0 | 0 |
| BRAWH3017980 | 0 | 0 | 0 | 0 | 0 | 50.189 | 0 |
| BRAWH3018063 | 0 | 0 | 0 | 0 | 0 | 7.978 | 0 |
| BRAWH3021545 | 0 | 0 | 0 | 2.589 | 0 | 0 | 0 |
| BRAWH3021574 | 0 | 0 | 0 | 3.336 | 0 | 0 | 0 |
| BRAWH3027440 | 0 | 0 | 0 | 41.512 | 0 | 0 | 0 |
| BRAWH3029556 | 0 | 0 | 0 | 0 | 0 | 19.615 | 0 |
| BRAWH3029806 | 0 | 0 | 0 | 0 | 0 | 8.979 | 0 |
| BRAWH3030810 | 0 | 0 | 0 | 67.989 | 0 | 10.724 | 0 |
| BRAWH3034743 | 0 | 0 | 0 | 5.913 | 0 | 12.592 | 0 |
| BRAWH3035403 | 0 | 0 | 0 | 25.081 | 0 | 0 | 0 |
| BRCAN1000076 | 0 | 0 | 90.793 | 0 | 0 | 0 | 0 |
| BRCAN1000168 | 0 | 0 | 0 | 1.001 | 0 | 11.371 | 0 |
| BRCAN2001223 | 0 | 0 | 0 | 0 | 0 | 23.313 | 0 |
| BRCAN2002173 | 0 | 0 | 0 | 2.823 | 7.185 | 2.004 | 0 |
| BRCAN2003944 | 0 | 1.977 | 0 | 0 | 5.088 | 0.851 | 0 |
| BRCAN2006019 | 0 | 0 | 0 | 2.666 | 13.575 | 0 | 0 |
| BRCAN2006117 | 0 | 0 | 0 | 17.693 | 0 | 25.117 | 0 |
| BRCAN2006401 | 0 | 0 | 0 | 0 | 0 | 22.844 | 0 |
| BRCAN2007700 | 0 | 0 | 0 | 8.632 | 0 | 0 | 0 |
| BRCAN2008894 | 0 | 0 | 0 | 0 | 82.533 | 0 | 0 |
| BRCAN2009432 | 0 | 0 | 0 | 1.869 | 0 | 0 | 0 |
| BRCAN2010374 | 0 | 0 | 0 | 0 | 0 | 30.516 | 0 |
| BRCAN2010376 | 0 | 0 | 0 | 23.627 | 0 | 0 | 0 |
| BRCAN2010665 | 0 | 0 | 0 | 0 | 0 | 9.879 | 0 |
| BRCAN2014881 | 0 | 0 | 0 | 0 | 0 | 30.516 | 0 |
| BRCAN2015371 | 0 | 0 | 0 | 15.560 | 0 | 0 | 0 |
| BRCAN2015719 | 0 | 0 | 0 | 12.858 | 0 | 0 | 0 |
| BRCAN2016046 | 0 | 0 | 0 | 0 | 0 | 30.516 | 0 |
| BRCAN2019653 | 0 | 0 | 0 | 0 | 22.535 | 0 | 0 |
| BRCAN2020710 | 0 | 0 | 0 | 7.714 | 0 | 0 | 0 |
| BRCAN2022126 | 0 | 0 | 0 | 3.446 | 0 | 14.677 | 0 |
| BRCAN2024572 | 0 | 0 | 0 | 0 | 0 | 5.504 | 0 |
| BRCAN2025368 | 0 | 0 | 0 | 0 | 61.165 | 0 | 0 |
| BRCAN2026197 | 0 | 0 | 0 | 5.541 | 0 | 4.719 | 0 |
| BRCAN2026340 | 0 | 0 | 0 | 10.726 | 54.604 | 0 | 0 |
| BRCAN2027334 | 0 | 0 | 0 | 0 | 0 | 30.516 | 0 |
| BRCAN2027364 | 0 | 0 | 0 | 0 | 10.731 | 5.985 | 0 |
| BRCAN2028036 | 0 | 0 | 0 | 0 | 8.724 | 4.865 | 0 |
| BRCAN2028355 | 46.308 | 0 | 0 | 0 | 0 | 0 | 0 |
| BRCOC1000040 | 0 | 0 | 0 | 0 | 0 | 5.943 | 0 |
| BRCOC1000094 | 0 | 0 | 0 | 0.676 | 17.202 | 3.838 | 0 |
| BRCOC2000004 | 0 | 0 | 0 | 0 | 0 | 9.069 | 0 |
| BRCOC2000047 | 0 | 0 | 0 | 0 | 50.495 | 0 | 0 |
| BRCOC2000186 | 0 | 0 | 0 | 4.222 | 0 | 0 | 0 |
| BRCOC2000333 | 0 | 0 | 0 | 0 | 43.281 | 0 | 0 |
| BRCOC2000670 | 0 | 0 | 0 | 0 | 0 | 22.144 | 0 |
| BRCOC2003100 | 0 | 0 | 0 | 16.691 | 0 | 0 | 0 |
| BRCOC2003187 | 0 | 0 | 0 | 0.558 | 0 | 0 | 0 |
| BRCOC2003213 | 0 | 0 | 0 | 7.368 | 0 | 0 | 0 |
| BRCOC2004036 | 0 | 0 | 0 | 0 | 50.495 | 0 | 0 |
| BRCOC2005542 | 0 | 0 | 0 | 0 | 0 | 17.805 | 0 |
| BRCOC2005903 | 0 | 0 | 0 | 0 | 0 | 8.845 | 0 |
| BRCOC2006189 | 0 | 0 | 0 | 0 | 11.994 | 6.689 | 0 |
| BRCOC2006270 | 0 | 0 | 0 | 0 | 50.495 | 0 | 0 |
| BRCOC2007034 | 0 | 0 | 0 | 16.691 | 0 | 0 | 0 |
| BRCOC2009937 | 0 | 0 | 0 | 0 | 0 | 16.189 | 0 |
| BRCOC2011506 | 0 | 0 | 0 | 0 | 0 | 0.959 | 0 |
| BRCOC2012172 | 0 | 0 | 0 | 1.996 | 0 | 0 | 0 |
| BRCOC2012551 | 0 | 0 | 0 | 5.119 | 0 | 7.267 | 0 |
| BRCOC2013780 | 0 | 0 | 0 | 0 | 50.495 | 0 | 0 |
| BRCOC2019841 | 0 | 0 | 0 | 16.691 | 0 | 0 | 0 |
| BRCOC2019896 | 0 | 0 | 0 | 0 | 0 | 22.144 | 0 |
| BRCOC2019910 | 0 | 0 | 0 | 15.968 | 2.258 | 8.816 | 0 |
| BRHIP1000104 | 0 | 0 | 5.041 | 2.320 | 9.447 | 5.928 | 0 |
| BRHIP1000108 | 0 | 0 | 0 | 0 | 15.572 | 4.342 | 0 |
| BRHIP1000129 | 0 | 0 | 0 | 0 | 0 | 49.688 | 0 |
| BRHIP1000174 | 0 | 0 | 0 | 3.598 | 0 | 5.108 | 0 |
| BRHIP2000087 | 0 | 0 | 0 | 0 | 23.781 | 6.632 | 0 |
| BRHIP2000210 | 0 | 0 | 0 | 41.027 | 0 | 0 | 0 |
| BRHIP2000312 | 0 | 0 | 0 | 9.205 | 0 | 6.534 | 0 |
| BRHIP2000534 | 0 | 2.402 | 0 | 0 | 0 | 0 | 0 |
| BRHIP2000553 | 0 | 0 | 0 | 1.824 | 0 | 2.589 | 0 |
| BRHIP2000920 | 0 | 0 | 0 | 25.999 | 0 | 0 | 0 |
| BRHIP2001099 | 0 | 0 | 0 | 4.920 | 0 | 0 | 0 |
| BRHIP2001886 | 0 | 0 | 0 | 0 | 0 | 49.688 | 0 |
| BRHIP2002143 | 0 | 0 | 0 | 41.027 | 0 | 0 | 0 |
| BRHIP2002339 | 0 | 0 | 0 | 0 | 0 | 15.815 | 0 |
| BRHIP2003062 | 0 | 0 | 0 | 6.742 | 0 | 0 | 0 |
| BRHIP2004359 | 0 | 0 | 0 | 34.560 | 0 | 0 | 0 |
| BRHIP2005010 | 0 | 0 | 0 | 11.189 | 56.963 | 0 | 0 |
| BRHIP2005271 | 0 | 0 | 0 | 0 | 0 | 7.137 | 0 |
| BRHIP2005752 | 0 | 0 | 0 | 41.027 | 0 | 0 | 0 |
| BRHIP2007305 | 0 | 7.946 | 0 | 0 | 0 | 3.422 | 0 |
| BRHIP2007741 | 0 | 0 | 0 | 3.696 | 0 | 8.745 | 0 |
| BRHIP2008607 | 0 | 0 | 0 | 25.490 | 0 | 0 | 0 |
| BRHIP2009019 | 0 | 0 | 0 | 41.027 | 0 | 0 | 0 |
| BRHIP2010217 | 0 | 0 | 0 | 0 | 0 | 5.627 | 0 |
| BRHIP2010487 | 0 | 0 | 0 | 0 | 0 | 4.144 | 0 |
| BRHIP2010571 | 0 | 0 | 0 | 21.859 | 0 | 15.515 | 0 |
| BRHIP2010723 | 0 | 0 | 0 | 0 | 0 | 49.688 | 0 |
| BRHIP2011120 | 0 | 0 | 0 | 32.686 | 0 | 7.734 | 0 |
| BRHIP2011491 | 0 | 0 | 0 | 0 | 8.960 | 0 | 0 |
| BRHIP2011576 | 0 | 0 | 0 | 13.607 | 0 | 0 | 0 |
| BRHIP2013699 | 0 | 0 | 0 | 15.145 | 0 | 0 | 0 |
| BRHIP2014228 | 0 | 0 | 0 | 10.447 | 0 | 0 | 0 |
| BRHIP2015153 | 0 | 0 | 0 | 14.222 | 0 | 10.095 | 0 |
| BRHIP2015224 | 0 | 0 | 0 | 0 | 0 | 9.167 | 0 |
| BRHIP2015245 | 0 | 0 | 0 | 5.055 | 0 | 2.392 | 0 |
| BRHIP2015679 | 0 | 0 | 0 | 3.561 | 0 | 0 | 0 |
| BRHIP2017642 | 0 | 0 | 0 | 0 | 0 | 13.013 | 0 |
| BRHIP2017945 | 0 | 22.622 | 0 | 0 | 0 | 0 | 0 |
| BRHIP2018712 | 0 | 0 | 0 | 0 | 0 | 6.122 | 0 |
| BRHIP2018719 | 0 | 0 | 0 | 0 | 0 | 49.688 | 0 |
| BRHIP2019186 | 0 | 0 | 0 | 0 | 0 | 3.977 | 0 |
| BRHIP2019494 | 0 | 0 | 0 | 25.807 | 0 | 0 | 0 |
| BRHIP2019819 | 0 | 0 | 0 | 30.770 | 0 | 0 | 0 |
| BRHIP2020573 | 0 | 0 | 0 | 6.423 | 0 | 0 | 0 |
| BRHIP2020622 | 0 | 0 | 0 | 0 | 0 | 23.313 | 0 |
| BRHIP2020799 | 0 | 0 | 0 | 3.592 | 0 | 15.298 | 0 |
| BRHIP2021495 | 0 | 0 | 0 | 4.552 | 46.351 | 0 | 0 |
| BRHIP2021762 | 0 | 19.554 | 0 | 7.910 | 0 | 0 | 0 |
| BRHIP2021858 | 0 | 0 | 0 | 4.750 | 0 | 3.372 | 0 |
| BRHIP2021870 | 0 | 0 | 0 | 9.454 | 0 | 0 | 0 |
| BRHIP2022054 | 0 | 0 | 0 | 1.748 | 0 | 0 | 0 |
| BRHIP2022326 | 0 | 0 | 0 | 1.811 | 0 | 1.714 | 0 |
| BRHIP2022986 | 0 | 0 | 0 | 4.039 | 0 | 0 | 0 |
| BRHIP2023071 | 0 | 0 | 0 | 0 | 0 | 49.688 | 0 |
| BRHIP2023309 | 0 | 0 | 0 | 8.280 | 0 | 0 | 0 |
| BRHIP2023762 | 0 | 0 | 0 | 0 | 8.623 | 7.214 | 0 |
| BRHIP2023888 | 0 | 2.583 | 2.838 | 2.089 | 0 | 1.854 | 0 |
| BRHIP2024398 | 0 | 0 | 0 | 11.952 | 0 | 0 | 0 |
| BRHIP2024742 | 0 | 8.754 | 0 | 1.770 | 0 | 1.257 | 0 |
| BRHIP2025448 | 0 | 0 | 0 | 0 | 0 | 30.812 | 0 |
| BRHIP2025679 | 0 | 0 | 0 | 41.027 | 0 | 0 | 0 |
| BRHIP2026061 | 0 | 0 | 0 | 0 | 0 | 30.812 | 0 |
| BRHIP2026288 | 0 | 0 | 0 | 0 | 77.982 | 0 | 0 |
| BRHIP2027077 | 0 | 0 | 0 | 0 | 0 | 2.035 | 0 |
| BRHIP2027685 | 0 | 0 | 0 | 0 | 0 | 49.688 | 0 |
| BRHIP2028187 | 0 | 0 | 0 | 25.807 | 0 | 0 | 0 |
| BRHIP2028583 | 0 | 87.309 | 0 | 0 | 0 | 0 | 0 |
| BRHIP2029643 | 0 | 0 | 0 | 10.603 | 0 | 0 | 0 |
| BRHIP3000111 | 0 | 0 | 0 | 0.727 | 3.699 | 2.063 | 0 |
| BRHIP3000131 | 0 | 0 | 0 | 5.213 | 0 | 0 | 0 |
| BRHIP3000240 | 0 | 0 | 0 | 67.607 | 0 | 0 | 0 |
| BRHIP3000377 | 0 | 80.864 | 0 | 0 | 0 | 0 | 0 |
| BRHIP3000457 | 0 | 0 | 0 | 38.553 | 0 | 0 | 0 |
| BRHIP3001283 | 0 | 0 | 0 | 0 | 0 | 49.688 | 0 |
| BRHIP3001360 | 0 | 0 | 0 | 41.027 | 0 | 0 | 0 |
| BRHIP3002114 | 0 | 0 | 0 | 27.684 | 0 | 0 | 0 |
| BRHIP3002691 | 0 | 0 | 0 | 0 | 0 | 8.357 | 0 |
| BRHIP3003063 | 0 | 0 | 0 | 0 | 0 | 33.130 | 0 |
| BRHIP3003126 | 0 | 0 | 0 | 25.807 | 0 | 0 | 0 |
| BRHIP3003961 | 0 | 0 | 0 | 13.462 | 0 | 0 | 0 |
| BRHIP3003984 | 0 | 0 | 0 | 29.254 | 0 | 0 | 0 |
| BRHIP3004215 | 0 | 0 | 0 | 9.636 | 0 | 13.679 | 0 |
| BRHIP3004968 | 0 | 0 | 0 | 23.879 | 0 | 0 | 0 |
| BRHIP3005574 | 0 | 0 | 0 | 10 | 0 | 0 | 0 |
| BRHIP3005673 | 0 | 0 | 0 | 0 | 0 | 25.956 | 0 |
| BRHIP3005801 | 0 | 0 | 0 | 13.302 | 0 | 0 | 0 |
| BRHIP3006717 | 0 | 0 | 0 | 0 | 6.150 | 5.145 | 0 |
| BRHIP3007223 | 0 | 0 | 0 | 1.431 | 0 | 0 | 0 |
| BRHIP3007586 | 0 | 0 | 0 | 7.348 | 0 | 3.477 | 0 |
| BRHIP3007640 | 0 | 0 | 0 | 31.684 | 0 | 0 | 0 |
| BRHIP3008405 | 0 | 0 | 0 | 12.487 | 0 | 0 | 0 |
| BRHIP3012736 | 0 | 0 | 0 | 0 | 0 | 66.389 | 0 |
| BRHIP3014675 | 0 | 0 | 0 | 26.918 | 0 | 0 | 0 |
| BRHIP3017146 | 0 | 0 | 0 | 0 | 0 | 33.057 | 0 |
| BRHIP3017855 | 0 | 0 | 0 | 13.588 | 0 | 0 | 0 |
| BRHIP3018278 | 0 | 0 | 0 | 27.684 | 0 | 0 | 0 |
| BRHIP3020046 | 0 | 0 | 0 | 0 | 0 | 1.021 | 0 |
| BRHIP3021019 | 0 | 0 | 0 | 0 | 0 | 7.803 | 0 |
| BRHIP3026052 | 0 | 0 | 0 | 0 | 54.140 | 0 | 0 |
| BRHIP3027594 | 0 | 0 | 0 | 0 | 0 | 39.173 | 0 |
| BRSSN2000097 | 0 | 48.599 | 0 | 0 | 0 | 0 | 0 |
| BRSSN2000293 | 0 | 0 | 0 | 2.328 | 0 | 3.304 | 0 |
| BRSSN2000295 | 0 | 0 | 0 | 9.831 | 0 | 0 | 0 |
| BRSSN2000312 | 0 | 0 | 0 | 7.636 | 0 | 21.682 | 0 |
| BRSSN2000498 | 0 | 7.680 | 0 | 1.553 | 3.954 | 4.410 | 0 |
| BRSSN2000561 | 0 | 0 | 0 | 0 | 0 | 12.636 | 0 |
| BRSSN2000566 | 0 | 0 | 0 | 6.905 | 17.576 | 9.802 | 0 |
| BRSSN2000832 | 0 | 0 | 0 | 8.545 | 0 | 0 | 0 |
| BRSSN2001758 | 0 | 0 | 0 | 0 | 33.969 | 9.472 | 0 |
| BRSSN2001869 | 0 | 0 | 0 | 2.142 | 0 | 0 | 0 |
| BRSSN2003012 | 0 | 0 | 0 | 0 | 15.631 | 0 | 0 |
| BRSSN2004496 | 0 | 0 | 0 | 0 | 0 | 21.304 | 0 |
| BRSSN2006611 | 0 | 0 | 0 | 0 | 0 | 21.304 | 0 |
| BRSSN2006892 | 0 | 0 | 0 | 10.990 | 0 | 0 | 0 |
| BRSSN2007338 | 0 | 0 | 0 | 0 | 26.707 | 0 | 0 |
| BRSSN2009518 | 0 | 0 | 0 | 0 | 0 | 1.736 | 0 |
| BRSSN2010587 | 0 | 0 | 0 | 16.015 | 0 | 0 | 0 |
| BRSSN2010596 | 0 | 0 | 0 | 0 | 43.310 | 12.077 | 0 |
| BRSSN2011262 | 0 | 0 | 0 | 2.000 | 0 | 0 | 0 |
| BRSSN2011738 | 0 | 0 | 0 | 7.465 | 0 | 0 | 0 |
| BRSSN2011843 | 0 | 0 | 0 | 8.495 | 0 | 0 | 0 |
| BRSSN2013696 | 0 | 0 | 0 | 12.675 | 0 | 0 | 0 |
| BRSSN2013733 | 0 | 0 | 0 | 0 | 0 | 21.304 | 0 |
| BRSSN2014294 | 0 | 65.348 | 0 | 0 | 0 | 0 | 0 |
| BRSSN2014299 | 0 | 0 | 0 | 2.623 | 0 | 0 | 0 |
| BRSSN2014610 | 0 | 0 | 0 | 5.068 | 0 | 3.597 | 0 |
| BRSSN2014685 | 0 | 0 | 0 | 0 | 0 | 14.308 | 0 |
| BRSSN2015199 | 0 | 0 | 0 | 16.015 | 0 | 0 | 0 |
| BRSSN2015238 | 0 | 0 | 0 | 4.859 | 0 | 0 | 0 |
| BRSSN2015493 | 0 | 0 | 0 | 7.783 | 0 | 0 | 0 |
| BRSSN2018447 | 0 | 0 | 0 | 4.638 | 0 | 6.585 | 0 |
| BRSTN1000083 | 0 | 0 | 0 | 1.360 | 0 | 1.930 | 0 |
| BRSTN2000058 | 0 | 0 | 0 | 3.424 | 0 | 2.431 | 0 |
| BRSTN2000220 | 0 | 0 | 0 | 0 | 0 | 20.742 | 0 |
| BRSTN2006580 | 0 | 0 | 0 | 16.447 | 0 | 0 | 0 |
| BRSTN2008052 | 0 | 0 | 0 | 15.541 | 0 | 0 | 0 |
| BRSTN2010089 | 0 | 0 | 0 | 4.683 | 0 | 0 | 0 |
| BRSTN2010107 | 0 | 0 | 0 | 0.950 | 6.044 | 6.067 | 0 |
| BRSTN2010750 | 0 | 0 | 0 | 7.220 | 0 | 30.747 | 0 |
| BRSTN2011597 | 0 | 0 | 0 | 16.447 | 0 | 0 | 0 |
| BRSTN2011961 | 0 | 0 | 2.233 | 3.083 | 0 | 0 | 0 |
| BRSTN2012069 | 1.482 | 2.124 | 0.073 | 0.517 | 0.718 | 0.029 | 7.145 |
| BRSTN2012089 | 0 | 0 | 0 | 4.117 | 20.959 | 5.845 | 0 |
| BRSTN2012174 | 0 | 2.839 | 0 | 1.292 | 0.731 | 0.611 | 0 |
| BRSTN2012451 | 0 | 0 | 0 | 0 | 0 | 0.832 | 0 |
| BRSTN2013502 | 0 | 0 | 0 | 6.900 | 0 | 0 | 0 |
| BRSTN2013931 | 0 | 0 | 0 | 0.686 | 0 | 1.947 | 0 |
| BRSTN2015015 | 0 | 0 | 0 | 19.897 | 0 | 0 | 0 |
| BRSTN2015889 | 0 | 27.188 | 0 | 5.499 | 0 | 7.806 | 0 |
| BRSTN2015978 | 0 | 0 | 0 | 0.991 | 5.372 | 3.057 | 22.920 |
| BRSTN2016470 | 0 | 0 | 3.376 | 7.146 | 7.909 | 0.441 | 0 |
| BRSTN2016992 | 0 | 3.454 | 0 | 5.588 | 40.898 | 4.958 | 0 |
| BRTHA1000021 | 0 | 0 | 0 | 24.379 | 0 | 0 | 0 |
| BRTHA1000311 | 0 | 0 | 0 | 10.472 | 0 | 14.866 | 0 |
| BRTHA2001812 | 0 | 59.819 | 0 | 0 | 0 | 0 | 0 |
| BRTHA2005013 | 0 | 78.321 | 0 | 0 | 0 | 0 | 0 |
| BRTHA2005864 | 0 | 0 | 0 | 3.455 | 0 | 0 | 0 |
| BRTHA2007998 | 0 | 0 | 0 | 0 | 0 | 1.738 | 0 |
| BRTHA2008955 | 0 | 0 | 0 | 39.025 | 0 | 0 | 0 |
| BRTHA2009486 | 0 | 76.725 | 0 | 0 | 0 | 0 | 0 |
| BRTHA2011194 | 0 | 0 | 0 | 39.025 | 0 | 0 | 0 |
| BRTHA2011641 | 0 | 0 | 0 | 0 | 0 | 47.605 | 0 |
| BRTHA2013054 | 0 | 0 | 0 | 4.264 | 0 | 6.053 | 0 |
| BRTHA2013540 | 0 | 0 | 0 | 0 | 0 | 34.151 | 0 |
| BRTHA2016577 | 0 | 0 | 0 | 0 | 0 | 4.755 | 0 |
| BRTHA2026071 | 0 | 0 | 0 | 0 | 0 | 12.368 | 0 |
| BRTHA2033155 | 0 | 0 | 0 | 9.056 | 0 | 4.285 | 0 |
| BRTHA2035743 | 0 | 0 | 0 | 4.816 | 0 | 0 | 0 |
| BRTHA3000789 | 0 | 0 | 0 | 25.001 | 0 | 0 | 0 |
| BRTHA3002427 | 0 | 0 | 0 | 2.029 | 0 | 5.761 | 0 |
| BRTHA3003023 | 0 | 0 | 0 | 0 | 0 | 4.073 | 0 |
| BRTHA3003490 | 0 | 0 | 0 | 2.304 | 0 | 0 | 0 |
| BRTHA3003704 | 0 | 0 | 0 | 39.025 | 0 | 0 | 0 |
| BRTHA3003736 | 0 | 0 | 0 | 1.527 | 0 | 0 | 0 |
| BRTHA3004307 | 0 | 0 | 0 | 10.691 | 0 | 6.071 | 0 |
| BRTHA3004432 | 0 | 0 | 0 | 0 | 0 | 32.330 | 0 |
| BRTHA3004475 | 0 | 0 | 0 | 0 | 0 | 47.605 | 0 |
| BRTHA3007685 | 0 | 0 | 0 | 39.025 | 0 | 0 | 0 |
| BRTHA3009090 | 0 | 0 | 0 | 8.354 | 0 | 11.859 | 0 |
| BRTHA3009858 | 0 | 0 | 0 | 16.462 | 0 | 0 | 0 |
| BRTHA3010530 | 0 | 0 | 0 | 19.846 | 0 | 0 | 0 |
| BRTHA3021708 | 0 | 0 | 0 | 39.025 | 0 | 0 | 0 |
| BRTHA3021971 | 0 | 0 | 0 | 0 | 0 | 1.956 | 0 |
| BRTHA3023403 | 0 | 0 | 0 | 0 | 0 | 7.485 | 0 |
| BRTHA3026507 | 0 | 0 | 0 | 4.960 | 0 | 0 | 0 |
| BRTHA3026916 | 0 | 0 | 0 | 0 | 0 | 47.605 | 0 |
| CD34C3000252 | 0 | 5.761 | 0 | 0.583 | 0 | 1.654 | 0 |
| CHONS2000172 | 0 | 0 | 0 | 0 | 13.499 | 0 | 0 |
| CHONS2002829 | 0 | 0 | 0 | 1.160 | 0 | 1.646 | 0 |
| COLON2000470 | 0 | 49.994 | 0 | 0 | 0 | 0 | 0 |
| COLON2001721 | 0 | 0 | 0 | 19.633 | 0 | 11.149 | 0 |
| CTONG1000010 | 0 | 0 | 0 | 0 | 0 | 6.532 | 0 |
| CTONG1000052 | 0 | 0 | 0 | 0.858 | 0 | 1.218 | 0 |
| CTONG1000087 | 0 | 0 | 0 | 0 | 0 | 3.161 | 0 |
| CTONG1000088 | 91.578 | 0 | 0 | 0 | 0 | 0 | 0 |
| CTONG1000094 | 0 | 0 | 0 | 1.106 | 1.407 | 2.747 | 0 |
| CTONG1000175 | 0 | 11.817 | 0 | 0 | 0 | 0 | 0 |
| CTONG1000218 | 0 | 0 | 0 | 1.025 | 1.740 | 0.970 | 0 |
| CTONG1000241 | 0 | 0 | 0 | 0 | 0 | 4.275 | 0 |
| CTONG2000063 | 0 | 0 | 0 | 1.519 | 0 | 4.314 | 0 |
| CTONG2000201 | 0 | 27.210 | 0 | 0 | 0 | 0 | 0 |
| CTONG2000508 | 0 | 11.086 | 0 | 1.682 | 0 | 3.183 | 0 |
| CTONG2001598 | 0 | 0 | 0 | 27.592 | 0 | 0 | 0 |
| CTONG2001748 | 0 | 0 | 0 | 1.484 | 0 | 6.319 | 0 |
| CTONG2002270 | 0 | 0 | 0 | 5.647 | 0 | 1.603 | 0 |
| CTONG2002520 | 0 | 0 | 0 | 0 | 0 | 8.898 | 0 |
| CTONG2002709 | 0 | 0 | 16.709 | 1.538 | 0 | 0 | 0 |
| CTONG2002744 | 0 | 0 | 0 | 0.836 | 0 | 1.187 | 0 |
| CTONG2002766 | 0 | 0 | 0 | 16.772 | 0 | 11.905 | 0 |
| CTONG2002803 | 0 | 0 | 0 | 2.090 | 0 | 2.967 | 0 |
| CTONG2002841 | 0 | 0 | 0 | 15.036 | 0 | 0 | 0 |
| CTONG2003094 | 0 | 0 | 0 | 1.300 | 0 | 3.692 | 0 |
| CTONG2003298 | 0 | 0 | 0 | 0.515 | 0 | 2.194 | 0 |
| CTONG2003524 | 0 | 0 | 0 | 3.431 | 0 | 3.247 | 0 |
| CTONG2003699 | 0 | 0 | 0 | 0 | 0 | 35.106 | 0 |
| CTONG2004115 | 0 | 0 | 0 | 8.483 | 0 | 0 | 0 |
| CTONG2004423 | 0 | 0 | 0 | 8.156 | 0 | 0 | 0 |
| CTONG2004487 | 0 | 0 | 0 | 6.714 | 0 | 4.765 | 0 |
| CTONG2005028 | 0 | 0 | 0 | 14.575 | 0 | 0 | 0 |
| CTONG2005553 | 0 | 0 | 0 | 0.508 | 0 | 0.722 | 0 |
| CTONG2005615 | 0 | 0 | 0 | 3.375 | 0 | 0 | 0 |
| CTONG2006004 | 0 | 7.408 | 0 | 0.749 | 0 | 0 | 0 |
| CTONG2006235 | 0 | 0 | 0 | 1.163 | 5.919 | 4.952 | 0 |
| CTONG2006562 | 0 | 0 | 0 | 4.969 | 0 | 1.411 | 0 |
| CTONG2006611 | 0 | 0 | 0 | 0 | 0 | 7.276 | 0 |
| CTONG2006709 | 0 | 0 | 0 | 1.835 | 0 | 0 | 0 |
| CTONG2006932 | 0 | 0 | 0 | 0.781 | 0 | 1.109 | 0 |
| CTONG2007007 | 0 | 0 | 0 | 0 | 3.364 | 0 | 0 |
| CTONG2007072 | 0 | 0 | 0 | 0 | 7.773 | 0 | 0 |
| CTONG2007078 | 0 | 0 | 0 | 5.442 | 0 | 1.288 | 0 |
| CTONG2007168 | 0 | 0 | 0 | 12.872 | 0 | 0 | 0 |
| CTONG2007400 | 0 | 0 | 0 | 0 | 0 | 11.594 | 0 |
| CTONG2007474 | 0 | 0 | 0 | 7.539 | 0 | 0 | 0 |
| CTONG2007500 | 0 | 5.278 | 0 | 0 | 0 | 5.304 | 0 |
| CTONG2007681 | 0 | 0 | 0 | 26.233 | 0 | 0 | 0 |
| CTONG2007776 | 0 | 0 | 0 | 6.038 | 0 | 0 | 0 |
| CTONG2008398 | 0 | 5.366 | 0 | 0.543 | 0 | 2.311 | 0 |
| CTONG2008405 | 0 | 0 | 0 | 0 | 0 | 22.174 | 0 |
| CTONG2008506 | 0 | 0 | 0 | 3.339 | 0 | 2.844 | 0 |
| CTONG2008689 | 0 | 0 | 0 | 14.832 | 0 | 0 | 0 |
| CTONG2008720 | 0 | 0 | 0 | 0 | 0 | 27.203 | 0 |
| CTONG2009534 | 0 | 0 | 0 | 16.375 | 0 | 0 | 0 |
| CTONG2010348 | 0 | 0 | 0 | 7.541 | 0 | 1.784 | 0 |
| CTONG2010408 | 0 | 0 | 0 | 12.163 | 0 | 0 | 0 |
| CTONG2010803 | 0 | 79.029 | 0 | 0 | 0 | 0 | 0 |
| CTONG2010821 | 0 | 0 | 0 | 3.550 | 0 | 1.440 | 0 |
| CTONG2011825 | 0 | 0 | 0 | 6.093 | 0 | 0 | 0 |
| CTONG2012001 | 0 | 0 | 0 | 0 | 0 | 14.410 | 0 |
| CTONG2012101 | 0 | 0 | 0 | 0 | 0 | 15.907 | 0 |
| CTONG2012401 | 0 | 0 | 0 | 0 | 0 | 4.239 | 0 |
| CTONG2012452 | 0 | 2.499 | 2.746 | 1.516 | 3.860 | 1.435 | 0 |
| CTONG2012453 | 0 | 0 | 0 | 5.345 | 0 | 0 | 0 |
| CTONG2012745 | 0 | 38.932 | 0 | 0 | 0 | 0 | 0 |
| CTONG2012847 | 0 | 0 | 0 | 1.222 | 0 | 0 | 0 |
| CTONG2012879 | 0 | 11.934 | 0 | 0 | 0 | 0 | 0 |
| CTONG2013348 | 0 | 0 | 0 | 0 | 0 | 5.543 | 0 |
| CTONG2013907 | 0 | 0 | 0 | 4.591 | 0 | 2.172 | 0 |
| CTONG2013934 | 0 | 0 | 0 | 24.615 | 0 | 0 | 0 |
| CTONG2014280 | 0 | 0 | 0 | 0 | 0 | 25.331 | 0 |
| CTONG2014369 | 0 | 0 | 0 | 2.954 | 0 | 0 | 0 |
| CTONG2014898 | 0 | 0 | 0 | 4.094 | 0 | 0 | 0 |
| CTONG2015091 | 0 | 0 | 0 | 0.576 | 0 | 0 | 0 |
| CTONG2015815 | 0 | 0 | 0 | 6.244 | 0 | 0 | 0 |
| CTONG2016185 | 0 | 0 | 0 | 3.690 | 0 | 2.619 | 0 |
| CTONG2016575 | 0 | 0 | 0 | 1.059 | 0 | 3.507 | 0 |
| CTONG2016824 | 0 | 0 | 0 | 3.021 | 0 | 0 | 0 |
| CTONG2016869 | 0 | 0 | 0 | 5.624 | 0 | 2.661 | 0 |
| CTONG2016931 | 0 | 0 | 0 | 2.166 | 0 | 0 | 0 |
| CTONG2017094 | 0 | 0 | 0 | 9.521 | 0 | 0 | 0 |
| CTONG2017500 | 0 | 0 | 0 | 0 | 0 | 2.669 | 0 |
| CTONG2017998 | 0 | 35.166 | 0 | 3.556 | 0 | 0 | 0 |
| CTONG2018211 | 0 | 0 | 0 | 14.524 | 0 | 0 | 0 |
| CTONG2018343 | 0 | 0 | 0 | 0 | 0 | 15.348 | 0 |
| CTONG2018632 | 0 | 0 | 0 | 5.677 | 0 | 0 | 0 |
| CTONG2018637 | 0 | 0 | 0 | 13.969 | 0 | 0 | 0 |
| CTONG2018739 | 0 | 0 | 0 | 24.755 | 0 | 3.905 | 0 |
| CTONG2018843 | 0 | 0 | 0 | 0 | 0 | 11.186 | 0 |
| CTONG2018898 | 0 | 0 | 0 | 0.684 | 0 | 5.338 | 0 |
| CTONG2019029 | 0 | 0 | 0 | 0 | 0 | 8.154 | 0 |
| CTONG2020374 | 0 | 0 | 0 | 11.030 | 0 | 0 | 0 |
| CTONG2020484 | 0 | 0 | 0 | 0 | 2.124 | 5.923 | 0 |
| CTONG2020582 | 0 | 0 | 0 | 1.362 | 0 | 3.867 | 0 |
| CTONG2021289 | 0 | 0 | 0 | 0 | 0 | 10.367 | 0 |
| CTONG2022835 | 0 | 0 | 0 | 1.218 | 0 | 0 | 0 |
| CTONG2024031 | 0 | 0 | 0 | 3.669 | 0 | 0 | 0 |
| CTONG2027263 | 0 | 0 | 0 | 11.688 | 0 | 0 | 0 |
| CTONG2027959 | 0 | 0 | 0 | 27.592 | 0 | 0 | 0 |
| CTONG2028124 | 0 | 0 | 0 | 2.854 | 0 | 0.506 | 0 |
| CTONG2028208 | 0 | 0 | 0 | 0 | 12.795 | 0 | 0 |
| CTONG2028309 | 0 | 0 | 0 | 10.419 | 0 | 0 | 0 |
| CTONG3000657 | 0 | 0 | 0 | 5.508 | 0 | 0 | 0 |
| CTONG3001746 | 0 | 0 | 0 | 0 | 0 | 14.414 | 0 |
| CTONG3002835 | 0 | 7.711 | 0 | 1.560 | 0 | 1.107 | 0 |
| CTONG3005813 | 0 | 0 | 0 | 27.592 | 0 | 0 | 0 |
| CTONG3008894 | 0 | 0 | 0 | 1.032 | 0 | 4.395 | 0 |
| CTONG3009239 | 0 | 0 | 0 | 0 | 0 | 4.364 | 0 |
| CTONG3009328 | 0 | 0 | 0 | 0 | 43.334 | 0 | 0 |
| D30ST1000270 | 0 | 0 | 0 | 0 | 0 | 7.810 | 0 |
| D60ST2000358 | 0 | 0 | 0 | 0 | 0 | 1.432 | 0 |
| D60ST2000464 | 0 | 0 | 0 | 0 | 0 | 2.208 | 0 |
| D90ST2002608 | 0 | 0 | 0 | 4.744 | 0 | 0 | 0 |
| D90ST2003108 | 0 | 34.233 | 0 | 0 | 0 | 0 | 0 |
| D90ST2003580 | 0 | 0 | 0 | 0 | 0 | 6.953 | 0 |
| DFNES1000083 | 0 | 0 | 0 | 0 | 8.128 | 0 | 0 |
| DFNES2000212 | 0 | 0 | 0 | 0 | 0 | 14.601 | 0 |
| DFNES2000268 | 0 | 7.750 | 0 | 0 | 0 | 0 | 0 |
| DFNES2000335 | 0 | 0 | 0 | 3.363 | 0 | 0 | 0 |
| DFNES2000457 | 0 | 0 | 0 | 6.304 | 0 | 0 | 0 |
| DFNES2000526 | 0 | 0 | 0 | 1.961 | 0 | 2.785 | 0 |
| DFNES2001096 | 0 | 0 | 0 | 0 | 27.690 | 0 | 0 |
| DFNES2001829 | 0 | 0 | 0 | 6.550 | 0 | 0 | 0 |
| DFNES2003192 | 0 | 0 | 0 | 0 | 0 | 3.018 | 0 |
| DFNES2004371 | 0 | 0 | 0 | 1.120 | 0 | 1.590 | 0 |
| DFNES2005540 | 0 | 0 | 23.312 | 0 | 0 | 0 | 0 |
| DFNES2005690 | 0 | 0 | 0 | 3.603 | 0 | 10.231 | 0 |
| DFNES2007634 | 0 | 0 | 0 | 2.523 | 0 | 6.269 | 0 |
| DFNES2008088 | 0 | 0 | 20.274 | 0 | 0 | 0 | 0 |
| DFNES2008160 | 0 | 0 | 0 | 19.078 | 0 | 4.514 | 0 |
| DFNES2009482 | 0 | 0 | 0 | 1.007 | 0 | 1.429 | 0 |
| DFNES2011380 | 0 | 0 | 0 | 0 | 0 | 11.778 | 0 |
| DFNES2011499 | 0 | 0 | 0 | 4.403 | 0 | 0 | 0 |
| FCBBF1000024 | 0 | 0 | 0 | 0 | 0 | 6.637 | 0 |
| FCBBF1000027 | 0 | 0 | 0 | 0.520 | 1.324 | 1.845 | 0 |
| FCBBF1000053 | 0 | 0 | 0 | 0 | 0 | 2.727 | 0 |
| FCBBF1000063 | 0 | 0 | 0 | 0 | 0 | 6.026 | 0 |
| FCBBF1000077 | 0 | 0 | 0 | 0 | 0 | 0.816 | 0 |
| FCBBF1000115 | 0 | 0 | 0 | 14.427 | 0 | 0 | 0 |
| FCBBF1000121 | 0 | 0 | 0 | 0 | 0 | 10.010 | 0 |
| FCBBF1000125 | 0 | 0 | 0 | 11.056 | 0 | 31.390 | 0 |
| FCBBF1000139 | 0 | 0 | 0 | 3.722 | 0 | 1.761 | 0 |
| FCBBF1000197 | 0 | 0 | 0 | 3.033 | 0 | 4.305 | 0 |
| FCBBF1000280 | 0 | 0 | 43.560 | 0 | 0 | 0 | 0 |
| FCBBF1000294 | 0 | 0 | 8.303 | 5.349 | 0 | 1.085 | 0 |
| FCBBF1000367 | 0 | 0 | 0 | 0 | 0 | 1.531 | 0 |
| FCBBF1000403 | 0 | 0 | 0 | 0 | 0 | 8.451 | 0 |
| FCBBF1000466 | 0 | 0 | 0 | 3.164 | 0 | 0.642 | 0 |
| FCBBF1000476 | 0 | 0 | 0 | 6.164 | 0 | 0 | 0 |
| FCBBF1000509 | 0 | 0 | 0 | 0 | 0 | 13.160 | 0 |
| FCBBF1000556 | 0 | 0 | 0 | 8.323 | 3.852 | 4.296 | 0 |
| FCBBF1000563 | 0 | 0 | 0 | 2.132 | 0 | 4.540 | 0 |
| FCBBF1000574 | 0 | 0 | 0 | 2.947 | 0 | 10.458 | 0 |
| FCBBF1000671 | 0 | 0 | 0 | 9.717 | 0 | 0 | 0 |
| FCBBF1000675 | 0 | 0 | 0 | 9.013 | 0 | 12.795 | 0 |
| FCBBF1000687 | 0 | 0 | 0 | 18.394 | 0 | 8.704 | 0 |
| FCBBF1000732 | 0 | 19.654 | 0 | 1.987 | 0 | 0 | 0 |
| FCBBF1000760 | 0 | 4.596 | 0 | 0.465 | 0 | 0 | 0 |
| FCBBF2000038 | 0 | 0 | 0 | 0.953 | 9.707 | 2.707 | 0 |
| FCBBF2000199 | 0 | 0 | 0 | 3.971 | 0 | 2.819 | 0 |
| FCBBF2000362 | 0 | 0 | 0 | 11.882 | 0 | 16.868 | 0 |
| FCBBF2000566 | 0 | 0 | 0 | 0 | 0 | 3.745 | 0 |
| FCBBF2000733 | 0 | 0 | 0 | 0 | 0 | 7.986 | 0 |
| FCBBF2000885 | 0 | 0 | 0 | 0 | 0 | 3.093 | 0 |
| FCBBF2001183 | 0 | 0 | 0 | 5.869 | 5.975 | 9.998 | 0 |
| FCBBF2001211 | 0 | 0 | 0 | 0 | 0 | 6.457 | 0 |
| FCBBF2001291 | 0 | 0 | 0 | 2.701 | 0 | 0 | 0 |
| FCBBF2001299 | 0 | 0 | 0 | 16.114 | 0 | 0 | 0 |
| FCBBF2001538 | 0 | 0 | 0 | 4.326 | 0 | 4.606 | 0 |
| FCBBF2001594 | 0 | 0 | 0 | 21.593 | 0 | 7.664 | 0 |
| FCBBF2002349 | 0 | 0 | 0 | 2.802 | 0 | 0 | 0 |
| FCBBF2002626 | 0 | 0 | 0 | 27.755 | 0 | 0 | 0 |
| FCBBF2002801 | 0 | 0 | 0 | 1.842 | 0 | 2.615 | 0 |
| FCBBF2003567 | 0 | 0 | 0 | 0 | 23.554 | 13.136 | 0 |
| FCBBF2004066 | 0 | 0 | 0 | 5.723 | 21.853 | 6.094 | 0 |
| FCBBF2005428 | 0 | 0 | 0 | 27.755 | 0 | 0 | 0 |
| FCBBF2005909 | 0 | 0 | 0 | 4.430 | 0 | 0 | 0 |
| FCBBF2005966 | 0 | 0 | 0 | 13.444 | 0 | 0 | 0 |
| FCBBF2006781 | 0 | 44.415 | 0 | 0 | 0 | 6.376 | 0 |
| FCBBF2007556 | 0 | 64.144 | 0 | 0 | 0 | 0 | 0 |
| FCBBF2007840 | 0 | 0 | 0 | 8.840 | 0 | 0 | 0 |
| FCBBF3000115 | 0 | 0 | 0 | 14.163 | 0 | 4.021 | 0 |
| FCBBF3000168 | 0 | 0 | 0 | 5.779 | 0 | 0 | 0 |
| FCBBF3000175 | 0 | 0 | 0 | 0 | 15.172 | 12.693 | 0 |
| FCBBF3000228 | 0 | 0 | 0 | 6.361 | 0 | 0 | 0 |
| FCBBF3000269 | 0 | 0 | 0 | 43.451 | 0 | 0 | 0 |
| FCBBF3000388 | 0 | 0 | 0 | 0 | 0 | 2.489 | 0 |
| FCBBF3000434 | 0 | 0 | 0 | 14.454 | 6.690 | 3.731 | 0 |
| FCBBF3001081 | 0 | 0 | 0 | 1.864 | 9.488 | 2.646 | 0 |
| FCBBF3001470 | 0 | 9.528 | 0 | 0 | 0 | 0 | 0 |
| FCBBF3001632 | 0 | 0 | 0 | 1.096 | 0 | 0 | 0 |
| FCBBF3001657 | 0 | 0 | 0 | 11.720 | 0 | 4.754 | 0 |
| FCBBF3001818 | 0 | 0 | 0 | 6.465 | 0 | 0 | 0 |
| FCBBF3001855 | 0 | 0 | 0 | 1.988 | 0 | 0 | 0 |
| FCBBF3001977 | 0 | 0 | 0 | 10.573 | 0 | 15.010 | 0 |
| FCBBF3003800 | 0 | 0 | 0 | 5.871 | 0 | 1.985 | 0 |
| FCBBF3004323 | 0 | 0 | 0 | 0 | 0 | 5.551 | 0 |
| FCBBF3004473 | 0 | 0 | 0 | 0 | 0 | 1.158 | 0 |
| FCBBF3005330 | 0 | 0 | 0 | 2.458 | 0 | 0 | 0 |
| FCBBF3006821 | 0 | 0 | 0 | 8.115 | 0 | 5.760 | 0 |
| FCBBF3007631 | 0 | 0 | 0 | 15.506 | 0 | 0 | 0 |
| FCBBF3007859 | 0 | 0 | 0 | 13.832 | 0 | 13.091 | 0 |
| FCBBF3007860 | 0 | 0 | 0 | 0 | 0 | 20.391 | 0 |
| FCBBF3008100 | 0 | 0 | 0 | 0 | 53.906 | 0 | 0 |
| FCBBF3008153 | 0 | 0 | 0 | 7.766 | 0 | 5.513 | 0 |
| FCBBF3008689 | 0 | 65.513 | 0 | 0 | 0 | 0 | 0 |
| FCBBF3009069 | 0 | 0 | 0 | 6.357 | 0 | 22.561 | 0 |
| FCBBF3009526 | 0 | 0 | 0 | 0 | 0 | 23.808 | 0 |
| FCBBF3009541 | 0 | 2.893 | 0 | 0.293 | 0 | 0.415 | 0 |
| FCBBF3010012 | 0 | 0 | 0 | 4.893 | 8.303 | 0 | 0 |
| FCBBF3010142 | 0 | 0 | 0 | 10.244 | 0 | 0 | 0 |
| FCBBF3010508 | 0 | 79.163 | 0 | 0 | 0 | 0 | 0 |
| FCBBF3010695 | 0 | 0 | 0 | 1.760 | 0 | 0 | 0 |
| FCBBF3012182 | 0 | 0 | 0 | 0 | 0 | 0 | 99.513 |
| FCBBF3012667 | 0 | 0 | 0 | 0 | 0 | 24.592 | 0 |
| FCBBF3013506 | 0 | 0 | 0 | 16.855 | 0 | 0 | 0 |
| FCBBF3014260 | 0 | 0 | 0 | 0 | 0 | 6.825 | 0 |
| FCBBF3015100 | 0 | 0 | 0 | 14.166 | 0 | 5.028 | 0 |
| FCBBF3016928 | 0 | 0 | 0 | 1.866 | 3.166 | 1.766 | 0 |
| FCBBF3017396 | 0 | 0 | 0 | 4.347 | 0 | 2.057 | 0 |
| FCBBF3017531 | 0 | 22.507 | 0 | 0 | 5.793 | 0 | 0 |
| FCBBF3017918 | 0 | 0 | 0 | 4.647 | 0 | 0 | 0 |
| FCBBF3018453 | 0 | 0 | 0 | 3.279 | 0 | 0 | 0 |
| FCBBF3018796 | 0 | 0 | 0 | 2.203 | 0 | 0 | 0 |
| FCBBF3018826 | 0 | 0 | 0 | 0 | 0 | 9.829 | 0 |
| FCBBF3019320 | 0 | 0 | 0 | 14.030 | 0 | 0 | 0 |
| FCBBF3019569 | 0 | 0 | 0 | 27.755 | 0 | 0 | 0 |
| FCBBF3019714 | 0 | 0 | 0 | 0 | 7.401 | 0 | 0 |
| FCBBF3019839 | 0 | 0 | 0 | 5.316 | 0 | 3.773 | 0 |
| FCBBF3021807 | 0 | 0 | 0 | 0 | 31.333 | 0 | 0 |
| FCBBF3022291 | 0 | 0 | 0 | 27.755 | 0 | 0 | 0 |
| FCBBF3022311 | 0 | 0 | 0 | 16.114 | 0 | 0 | 0 |
| FCBBF3022593 | 0 | 0 | 0 | 0 | 0 | 6.981 | 0 |
| FCBBF3022765 | 0 | 0 | 0 | 0 | 0 | 35.292 | 0 |
| FCBBF3023667 | 0 | 0 | 7.169 | 0.189 | 0 | 1.338 | 0 |
| FCBBF3024002 | 0 | 0 | 0 | 16.112 | 0 | 5.718 | 0 |
| FCBBF3024266 | 0 | 0 | 0 | 0 | 0 | 19.712 | 0 |
| FCBBF3024793 | 0 | 0 | 0 | 11.340 | 0 | 0 | 0 |
| FCBBF3025417 | 0 | 0 | 0 | 0 | 0 | 17.298 | 0 |
| FCBBF3025905 | 0 | 0 | 0 | 11.354 | 0 | 0 | 0 |
| FCBBF3026651 | 0 | 0 | 0 | 5.179 | 0 | 0 | 0 |
| FCBBF3026692 | 0 | 0 | 0 | 11.517 | 0 | 0 | 0 |
| FCBBF3028244 | 0 | 0 | 0 | 3.295 | 3.355 | 3.742 | 0 |
| FCBBF4000017 | 0 | 0 | 0 | 0 | 0 | 8.949 | 0 |
| FCBBF4000142 | 0 | 0 | 0 | 18.164 | 0 | 11.051 | 0 |
| FCBBF4000446 | 0 | 0 | 5.793 | 0 | 0 | 3.027 | 0 |
| FCBBF4000548 | 0 | 0 | 0 | 10.374 | 0 | 14.727 | 0 |
| FCBBF5000165 | 0 | 0 | 0 | 11.682 | 0 | 16.583 | 0 |
| FCBBF5000325 | 0 | 0 | 0 | 0 | 0 | 10.186 | 0 |
| FCBBF5000353 | 0 | 0 | 0 | 0 | 0 | 35.292 | 0 |
| FEBRA1000022 | 0 | 0 | 0 | 11.207 | 0 | 0 | 0 |
| FEBRA1000057 | 0 | 0 | 0 | 4.929 | 6.273 | 0 | 0 |
| FEBRA1000088 | 0 | 0 | 0 | 0 | 0 | 4.300 | 0 |
| FEBRA1000188 | 0 | 0 | 0 | 0 | 0 | 2.109 | 0 |
| FEBRA1000189 | 0 | 0 | 0 | 28.778 | 0 | 0 | 0 |
| FEBRA2000007 | 0 | 0 | 0 | 16.808 | 0 | 0 | 0 |
| FEBRA2000105 | 0 | 0 | 0 | 0.509 | 0 | 0.723 | 0 |
| FEBRA2000129 | 0 | 0 | 0 | 0 | 9.393 | 0 | 0 |
| FEBRA2000210 | 0 | 4.962 | 0 | 0 | 0 | 0 | 0 |
| FEBRA2000377 | 0 | 0 | 0 | 7.100 | 0 | 10.080 | 0 |
| FEBRA2000402 | 0 | 0 | 0 | 0 | 0 | 5.585 | 0 |
| FEBRA2000404 | 0 | 0 | 0 | 7.141 | 0 | 0 | 0 |
| FEBRA2000438 | 0 | 0 | 0 | 6.271 | 0 | 0 | 0 |
| FEBRA2000452 | 0 | 0 | 0 | 4.271 | 0 | 2.021 | 0 |
| FEBRA2000462 | 0 | 0 | 0 | 28.049 | 0 | 0 | 0 |
| FEBRA2000536 | 0 | 0 | 0 | 13.414 | 0 | 15.869 | 0 |
| FEBRA2000581 | 0 | 0 | 0 | 1.694 | 0 | 13.626 | 0 |
| FEBRA2000680 | 0 | 0 | 0 | 33.354 | 0 | 0 | 0 |
| FEBRA2000733 | 5.282 | 2.366 | 0 | 1.316 | 1.218 | 0.340 | 0 |
| FEBRA2000740 | 0 | 7.938 | 0 | 2.408 | 0 | 1.140 | 0 |
| FEBRA2000757 | 0 | 0 | 0 | 0 | 0 | 9.257 | 0 |
| FEBRA2000771 | 0 | 0 | 0 | 0 | 0 | 21.859 | 0 |
| FEBRA2000782 | 0 | 0 | 0 | 36.283 | 0 | 0 | 0 |
| FEBRA2000787 | 0 | 0 | 0 | 2.804 | 0 | 5.971 | 0 |
| FEBRA2000793 | 0 | 0 | 0 | 2.722 | 0 | 0 | 0 |
| FEBRA2000815 | 0 | 0 | 0 | 5.132 | 0 | 3.643 | 0 |
| FEBRA2000877 | 0 | 0 | 0 | 20.195 | 0 | 14.335 | 0 |
| FEBRA2000880 | 0 | 0 | 0 | 7.521 | 0 | 10.677 | 0 |
| FEBRA2000881 | 0 | 0 | 0 | 2.247 | 0 | 0 | 0 |
| FEBRA2000972 | 0 | 0 | 0 | 10.751 | 0 | 0 | 0 |
| FEBRA2001004 | 0 | 0 | 0 | 0 | 0 | 22.288 | 0 |
| FEBRA2001146 | 0 | 0 | 0 | 15.874 | 0 | 0 | 0 |
| FEBRA2001197 | 0 | 0 | 0 | 0 | 0 | 14.203 | 0 |
| FEBRA2001245 | 0 | 0 | 0 | 3.581 | 0 | 10.166 | 0 |
| FEBRA2001294 | 0 | 0 | 0 | 0 | 0 | 2.435 | 0 |
| FEBRA2001334 | 0 | 0 | 0 | 24.490 | 20.779 | 0 | 0 |
| FEBRA2001383 | 0 | 0 | 0 | 7.404 | 0 | 10.511 | 0 |
| FEBRA2001492 | 0 | 0 | 0 | 6.892 | 0 | 3.261 | 0 |
| FEBRA2001571 | 0 | 0 | 0 | 4.465 | 0 | 4.226 | 0 |
| FEBRA2001669 | 0 | 0 | 0 | 2.281 | 0 | 6.476 | 0 |
| FEBRA2001715 | 0 | 0 | 0 | 9.908 | 0 | 4.019 | 0 |
| FEBRA2001745 | 0 | 0 | 0 | 4.447 | 0 | 0 | 0 |
| FEBRA2001752 | 0 | 0 | 0 | 11.179 | 0 | 0 | 0 |
| FEBRA2001814 | 0 | 0 | 0 | 7.512 | 14.341 | 14.663 | 0 |
| FEBRA2001828 | 0 | 0 | 0 | 3.861 | 0 | 0 | 0 |
| FEBRA2001974 | 0 | 0 | 0 | 0 | 0 | 11.740 | 0 |
| FEBRA2001990 | 0 | 0 | 0 | 15.453 | 0 | 7.313 | 0 |
| FEBRA2002027 | 0 | 0 | 0 | 1.798 | 0 | 17.869 | 0 |
| FEBRA2002191 | 0 | 0 | 0 | 0 | 0 | 5.919 | 0 |
| FEBRA2002352 | 0 | 0 | 0 | 4.928 | 0 | 3.498 | 0 |
| FEBRA2002456 | 0 | 0 | 0 | 3.871 | 3.941 | 7.693 | 0 |
| FEBRA2002527 | 0 | 0 | 0 | 0 | 0 | 2.886 | 0 |
| FEBRA2002781 | 0 | 0 | 0 | 43.707 | 0 | 6.894 | 0 |
| FEBRA2002792 | 0 | 0 | 0 | 7.600 | 4.836 | 6.743 | 0 |
| FEBRA2002931 | 0 | 0 | 0 | 1.553 | 0 | 9.924 | 0 |
| FEBRA2002933 | 0 | 0 | 2.854 | 0.263 | 1.337 | 0 | 0 |
| FEBRA2003100 | 0 | 0 | 0 | 0.935 | 0 | 0.664 | 0 |
| FEBRA2003128 | 0 | 0 | 0 | 6.194 | 0 | 2.931 | 0 |
| FEBRA2003258 | 0 | 0 | 0 | 2.008 | 10.223 | 0 | 0 |
| FEBRA2003436 | 0 | 0 | 0 | 0 | 0 | 5.601 | 0 |
| FEBRA2003470 | 0 | 0 | 0 | 0 | 0 | 14.706 | 0 |
| FEBRA2003541 | 0 | 0 | 0 | 0 | 0 | 3.075 | 0 |
| FEBRA2003726 | 0 | 0 | 0 | 0.707 | 3.598 | 1.003 | 0 |
| FEBRA2003750 | 0 | 0 | 0 | 2.591 | 0 | 1.839 | 0 |
| FEBRA2003833 | 0 | 0 | 0 | 7.364 | 0 | 1.742 | 0 |
| FEBRA2003907 | 0 | 0 | 0 | 22.162 | 0 | 0 | 0 |
| FEBRA2003926 | 0 | 0 | 0 | 0.495 | 0 | 1.407 | 0 |
| FEBRA2004042 | 0 | 0 | 0 | 1.506 | 0 | 2.137 | 0 |
| FEBRA2004091 | 0 | 0 | 0 | 15.001 | 0 | 10.648 | 0 |
| FEBRA2004224 | 0 | 0 | 0 | 1.643 | 4.183 | 1.167 | 0 |
| FEBRA2004237 | 0 | 0 | 0 | 53.246 | 0 | 0 | 0 |
| FEBRA2004268 | 0 | 0 | 0 | 12.462 | 0 | 0 | 0 |
| FEBRA2004293 | 0 | 0 | 0 | 1.887 | 0 | 2.679 | 0 |
| FEBRA2004412 | 0 | 0 | 0 | 2.084 | 0 | 0 | 0 |
| FEBRA2004485 | 0 | 0 | 0 | 0 | 25.077 | 6.993 | 0 |
| FEBRA2004620 | 0 | 0 | 75.571 | 0 | 0 | 0 | 0 |
| FEBRA2004628 | 0 | 0 | 0 | 6.074 | 0 | 2.874 | 0 |
| FEBRA2004767 | 0 | 0 | 0 | 36.283 | 0 | 0 | 0 |
| FEBRA2004818 | 0 | 0 | 0 | 6.765 | 4.920 | 10.976 | 0 |
| FEBRA2005079 | 0 | 0 | 0 | 0 | 0 | 16.812 | 0 |
| FEBRA2005114 | 0 | 0 | 0 | 9.525 | 0 | 0 | 0 |
| FEBRA2005361 | 0 | 0 | 0 | 0.497 | 7.592 | 13.408 | 0 |
| FEBRA2005416 | 33.661 | 0 | 0 | 0 | 0 | 0 | 0 |
| FEBRA2005476 | 0 | 0 | 0 | 0 | 0 | 2.624 | 0 |
| FEBRA2005572 | 0 | 0 | 0 | 2.529 | 0 | 0 | 0 |
| FEBRA2005734 | 0 | 0 | 0 | 1.798 | 0 | 0 | 0 |
| FEBRA2005752 | 0 | 0 | 0 | 2.954 | 15.040 | 4.194 | 0 |
| FEBRA2005788 | 0 | 0 | 0 | 0 | 0 | 4.973 | 0 |
| FEBRA2005824 | 0 | 0 | 0 | 1.588 | 16.173 | 4.886 | 0 |
| FEBRA2006092 | 0 | 0 | 0 | 2.648 | 2.247 | 1.880 | 0 |
| FEBRA2006112 | 0 | 0 | 0 | 4.685 | 0 | 13.301 | 0 |
| FEBRA2006255 | 0 | 0 | 0 | 0 | 0 | 5.252 | 0 |
| FEBRA2006270 | 0 | 0 | 0 | 0.830 | 0 | 1.178 | 0 |
| FEBRA2006346 | 0 | 0 | 0 | 10.544 | 0 | 0 | 0 |
| FEBRA2006357 | 0 | 0 | 0 | 13.633 | 0 | 12.680 | 0 |
| FEBRA2006368 | 0 | 0 | 0 | 4.411 | 11.228 | 6.262 | 0 |
| FEBRA2006372 | 0 | 0 | 0 | 0.953 | 0 | 1.353 | 0 |
| FEBRA2006396 | 0 | 0 | 0 | 5.705 | 0 | 0 | 0 |
| FEBRA2006401 | 0 | 0 | 0 | 0 | 0 | 0.759 | 0 |
| FEBRA2006485 | 0 | 0 | 0 | 0 | 0 | 3.065 | 0 |
| FEBRA2006519 | 0 | 0 | 0 | 25.320 | 0 | 11.982 | 0 |
| FEBRA2006521 | 0 | 0 | 0 | 10.857 | 0 | 7.706 | 0 |
| FEBRA2006553 | 0 | 0 | 0 | 2.808 | 0 | 0 | 0 |
| FEBRA2006736 | 0 | 0 | 0 | 10.544 | 0 | 0 | 0 |
| FEBRA2006808 | 0 | 0 | 0 | 0 | 0 | 8.272 | 0 |
| FEBRA2006873 | 0 | 0 | 34.629 | 0 | 0 | 0 | 0 |
| FEBRA2007017 | 0 | 0 | 0 | 0 | 59.175 | 0 | 0 |
| FEBRA2007212 | 0 | 0 | 0 | 11.144 | 0 | 0 | 0 |
| FEBRA2007534 | 0 | 0 | 0 | 0 | 0 | 18.185 | 0 |
| FEBRA2007544 | 0 | 0 | 0 | 41.703 | 0 | 0 | 0 |
| FEBRA2007589 | 0 | 0 | 0 | 19.411 | 0 | 13.778 | 0 |
| FEBRA2007613 | 0 | 0 | 0 | 4.711 | 0 | 3.344 | 0 |
| FEBRA2007622 | 0 | 0 | 0 | 0 | 0 | 1.040 | 0 |
| FEBRA2007708 | 0 | 0 | 0 | 6.066 | 0 | 0 | 0 |
| FEBRA2007714 | 0 | 0 | 0 | 5.922 | 0 | 16.815 | 0 |
| FEBRA2007801 | 0 | 0 | 0 | 1.752 | 0 | 0 | 0 |
| FEBRA2007880 | 0 | 0 | 0 | 0 | 0 | 3.792 | 0 |
| FEBRA2007900 | 0 | 0 | 0 | 11.003 | 0 | 0 | 0 |
| FEBRA2007901 | 0 | 0 | 0 | 0 | 0 | 3.734 | 0 |
| FEBRA2008036 | 0 | 0 | 0 | 9.124 | 0 | 4.318 | 0 |
| FEBRA2008081 | 0 | 0 | 0 | 1.508 | 0 | 2.141 | 0 |
| FEBRA2008087 | 0 | 1.258 | 1.382 | 0.382 | 0 | 0.181 | 0 |
| FEBRA2008134 | 0 | 0 | 0 | 0 | 0 | 28.785 | 0 |
| FEBRA2008159 | 0 | 0 | 0 | 22.162 | 0 | 0 | 0 |
| FEBRA2008201 | 0 | 16.832 | 0 | 0 | 0 | 0 | 0 |
| FEBRA2008210 | 0 | 0 | 0 | 4.761 | 0 | 6.758 | 0 |
| FEBRA2008255 | 0 | 0 | 0 | 7.183 | 18.284 | 5.099 | 0 |
| FEBRA2008265 | 0 | 0 | 0 | 0 | 59.175 | 0 | 0 |
| FEBRA2008287 | 0 | 0 | 0 | 4.184 | 0 | 2.970 | 0 |
| FEBRA2008302 | 0 | 7.470 | 0 | 0 | 3.845 | 3.217 | 0 |
| FEBRA2008459 | 0 | 0 | 0 | 0 | 0 | 28.785 | 0 |
| FEBRA2008583 | 0 | 0 | 0 | 1.313 | 3.821 | 1.332 | 0 |
| FEBRA2008662 | 0 | 0 | 0 | 5.633 | 0 | 6.397 | 0 |
| FEBRA2008859 | 0 | 0 | 0 | 22.162 | 0 | 0 | 0 |
| FEBRA2008861 | 0 | 0 | 0 | 4.147 | 0 | 3.925 | 0 |
| FEBRA2008928 | 0 | 0 | 0 | 22.162 | 0 | 0 | 0 |
| FEBRA2009022 | 0 | 0 | 0 | 7.111 | 0 | 3.365 | 0 |
| FEBRA2009185 | 0 | 0 | 0 | 12.897 | 0 | 26.548 | 0 |
| FEBRA2009289 | 0 | 0 | 0 | 0 | 50.703 | 0 | 0 |
| FEBRA2009328 | 0 | 0 | 0 | 3.517 | 0 | 0 | 0 |
| FEBRA2009419 | 0 | 0 | 0 | 3.751 | 0 | 3.994 | 0 |
| FEBRA2009514 | 0 | 0 | 0 | 0 | 0 | 3.338 | 0 |
| FEBRA2010719 | 0 | 0 | 0 | 0 | 0 | 17.484 | 0 |
| FEBRA2010746 | 0 | 0 | 0 | 6.089 | 0 | 0 | 0 |
| FEBRA2012181 | 0 | 0 | 0 | 11.719 | 0 | 0 | 0 |
| FEBRA2012507 | 0 | 0 | 0 | 0 | 26.964 | 0 | 0 |
| FEBRA2013699 | 0 | 0 | 0 | 0 | 0 | 7.211 | 0 |
| FEBRA2014297 | 0 | 0 | 0 | 0 | 7.723 | 4.307 | 0 |
| FEBRA2014417 | 0 | 0 | 0 | 0.766 | 0 | 3.264 | 0 |
| FEBRA2014939 | 0 | 0 | 0 | 11.858 | 0 | 0 | 0 |
| FEBRA2015085 | 0 | 0 | 0 | 2.164 | 0 | 7.681 | 0 |
| FEBRA2017024 | 0 | 0 | 0 | 6.848 | 0 | 0 | 0 |
| FEBRA2017533 | 0 | 0 | 0 | 15.488 | 0 | 5.497 | 0 |
| FEBRA2017680 | 0 | 0 | 0 | 0 | 0 | 9.581 | 0 |
| FEBRA2018203 | 0 | 0 | 0 | 0 | 0 | 15.289 | 0 |
| FEBRA2018433 | 0 | 0 | 0 | 22.162 | 0 | 0 | 0 |
| FEBRA2018476 | 0 | 7.669 | 0 | 0 | 0 | 1.101 | 0 |
| FEBRA2018746 | 0 | 0 | 0 | 5.308 | 0 | 0 | 0 |
| FEBRA2019242 | 0 | 0 | 0 | 5.758 | 0 | 0 | 0 |
| FEBRA2019389 | 0 | 0 | 0 | 0 | 59.175 | 0 | 0 |
| FEBRA2021032 | 0 | 0 | 0 | 0 | 0 | 5.402 | 0 |
| FEBRA2021171 | 0 | 0 | 0 | 0 | 0 | 10.719 | 0 |
| FEBRA2021550 | 0 | 0 | 0 | 22.162 | 0 | 0 | 0 |
| FEBRA2021636 | 0 | 0 | 0 | 14.361 | 0 | 0 | 0 |
| FEBRA2021864 | 0 | 0 | 0 | 22.162 | 0 | 0 | 0 |
| FEBRA2021966 | 0 | 0 | 0 | 3.062 | 0 | 0 | 0 |
| FEBRA2022055 | 0 | 0 | 0 | 0.378 | 0 | 0 | 0 |
| FEBRA2022601 | 0 | 0 | 0 | 22.162 | 0 | 0 | 0 |
| FEBRA2023377 | 0 | 0 | 0 | 0 | 28.030 | 0 | 0 |
| FEBRA2023399 | 0 | 0 | 0 | 6.230 | 0 | 0 | 0 |
| FEBRA2023550 | 0 | 0 | 0 | 0 | 59.175 | 0 | 0 |
| FEBRA2023927 | 0 | 0 | 0 | 8.672 | 0 | 0 | 0 |
| FEBRA2024019 | 0 | 0 | 0 | 0 | 0 | 8.107 | 0 |
| FEBRA2024987 | 0 | 69.047 | 0 | 0 | 0 | 0 | 0 |
| FEBRA2025427 | 0 | 0 | 0 | 0 | 0 | 4.995 | 0 |
| FEBRA2025838 | 0 | 0 | 0 | 0 | 0 | 1.655 | 0 |
| FEBRA2026984 | 0 | 0 | 0 | 12.446 | 0 | 0 | 0 |
| FEBRA2028503 | 0 | 0 | 0 | 0 | 0 | 14.089 | 0 |
| FEBRA2028516 | 0 | 0 | 0 | 1.624 | 0 | 2.305 | 0 |
| FELIV1000137 | 0 | 0 | 0 | 0.220 | 0 | 0 | 0 |
| FELIV1000153 | 5.170 | 0 | 0 | 0.234 | 0 | 0.166 | 0 |
| HCASM1000115 | 0 | 0 | 0 | 1.471 | 0 | 2.089 | 0 |
| HCASM2000016 | 0 | 15.716 | 0 | 0 | 0 | 1.504 | 0 |
| HCASM2000138 | 0 | 0 | 0 | 8.993 | 0 | 4.256 | 0 |
| HCASM2000156 | 0 | 0 | 0 | 0 | 0 | 13.176 | 0 |
| HCASM2000214 | 0 | 0 | 0 | 0 | 0 | 9.530 | 0 |
| HCASM2003415 | 52.578 | 0 | 0 | 0 | 0 | 0 | 0 |
| HCASM2005388 | 0 | 0 | 0 | 2.510 | 0 | 0 | 0 |
| HCHON1000015 | 0 | 0 | 0 | 1.106 | 0 | 1.571 | 0 |
| HCHON1000030 | 0 | 0 | 2.798 | 0.772 | 0 | 1.828 | 0 |
| HCHON1000166 | 0 | 0 | 0 | 0 | 0 | 3.031 | 0 |
| HCHON1000191 | 0 | 0 | 3.725 | 0 | 0 | 0 | 0 |
| HCHON2000056 | 0 | 1.991 | 2.187 | 1.007 | 0 | 1.143 | 0 |
| HCHON2000062 | 0 | 29.418 | 0 | 2.975 | 0 | 0 | 0 |
| HCHON2000160 | 0 | 0 | 0 | 1.429 | 3.637 | 1.014 | 0 |
| HCHON2000226 | 0 | 0 | 0 | 1.431 | 0 | 0 | 0 |
| HCHON2000244 | 0 | 0 | 0 | 0.934 | 0 | 0.663 | 0 |
| HCHON2000265 | 0 | 0 | 0 | 2.872 | 0 | 0 | 0 |
| HCHON2000295 | 0 | 0 | 0 | 0.311 | 0 | 0.883 | 0 |
| HCHON2000323 | 0 | 13.002 | 0 | 0 | 0 | 0 | 0 |
| HCHON2000473 | 0 | 0 | 0 | 8.309 | 0 | 0 | 0 |
| HCHON2000475 | 0 | 0 | 0 | 0 | 0 | 2.682 | 0 |
| HCHON2000508 | 0 | 0 | 0 | 0 | 0 | 0.376 | 0 |
| HCHON2000626 | 0 | 0 | 0 | 0.834 | 0 | 0 | 0 |
| HCHON2000676 | 0 | 0 | 0 | 2.116 | 0 | 0 | 0 |
| HCHON2000698 | 0 | 0 | 0 | 0 | 0 | 5.776 | 0 |
| HCHON2000743 | 0 | 0 | 0 | 8.667 | 0 | 0 | 0 |
| HCHON2000815 | 0 | 0 | 0 | 0 | 0 | 2.814 | 0 |
| HCHON2000819 | 0 | 0 | 0 | 0 | 26.473 | 0 | 0 |
| HCHON2000826 | 0 | 0 | 0 | 1.524 | 0 | 0 | 0 |
| HCHON2001039 | 0 | 0 | 0 | 2.376 | 0 | 0 | 0 |
| HCHON2001050 | 45.433 | 0 | 0 | 0 | 0 | 0 | 0 |
| HCHON2001108 | 0 | 0 | 0 | 1.516 | 0 | 0 | 0 |
| HCHON2001161 | 0 | 0 | 0 | 7.642 | 0 | 10.849 | 0 |
| HCHON2001200 | 0 | 0 | 0 | 0.307 | 0 | 0.872 | 0 |
| HCHON2001217 | 0 | 0 | 0 | 2.216 | 0 | 0 | 0 |
| HCHON2001359 | 0 | 5.976 | 6.566 | 1.813 | 0 | 0.858 | 0 |
| HCHON2001407 | 24.752 | 0 | 0 | 0 | 0 | 0.796 | 0 |
| HCHON2001434 | 0 | 0 | 0 | 4.337 | 5.520 | 4.618 | 0 |
| HCHON2001497 | 0 | 52.590 | 0 | 0 | 0 | 0 | 0 |
| HCHON2001505 | 0 | 0 | 0 | 3.189 | 0 | 0 | 0 |
| HCHON2001665 | 0 | 0 | 0 | 2.191 | 0 | 9.329 | 0 |
| HCHON2001853 | 0 | 0 | 0 | 7.950 | 0 | 0 | 0 |
| HCHON2002247 | 0 | 19.705 | 0 | 1.993 | 10.144 | 0 | 0 |
| HCHON2002354 | 0 | 0 | 0 | 9.017 | 0 | 0 | 0 |
| HCHON2004002 | 0 | 0 | 0 | 0 | 0 | 1.582 | 0 |
| HCHON2005921 | 0 | 0 | 0 | 2.944 | 0 | 0 | 0 |
| HCHON2008112 | 0 | 0 | 0 | 0 | 0 | 13.736 | 0 |
| HCHON2010543 | 0 | 0 | 0 | 6.367 | 0 | 0 | 0 |
| HEART1000010 | 0 | 23.980 | 0 | 0 | 0 | 0 | 0 |
| HEART1000074 | 0 | 5.328 | 5.854 | 1.078 | 0 | 0 | 0 |
| HEART1000149 | 0 | 0 | 0 | 1.333 | 0 | 0 | 0 |
| HEART1000173 | 0 | 0 | 0 | 0 | 0 | 2.645 | 0 |
| HEART2000306 | 0 | 0 | 0 | 9.616 | 0 | 0 | 0 |
| HEART2000506 | 0 | 0 | 0 | 0 | 0 | 1.767 | 0 |
| HEART2000520 | 0 | 0 | 0 | 0 | 0 | 1.453 | 0 |
| HEART2000959 | 0 | 0 | 0 | 8.360 | 0 | 0 | 0 |
| HEART2003852 | 0 | 0 | 0 | 0 | 14.078 | 3.926 | 0 |
| HEART2005310 | 0 | 48.933 | 0 | 0 | 0 | 0 | 0 |
| HEART2006487 | 0 | 0 | 0 | 0 | 35.133 | 0 | 0 |
| HEART2006521 | 0 | 0 | 0 | 3.395 | 0 | 2.410 | 0 |
| HEART2007231 | 0 | 0 | 0 | 0 | 0 | 4.881 | 0 |
| HEART2009000 | 0 | 0 | 0 | 7.336 | 0 | 0 | 0 |
| HHDPC1000083 | 0 | 0 | 0 | 1.389 | 0 | 1.972 | 0 |
| HHDPC1000114 | 0 | 0 | 0 | 1.547 | 0 | 0.732 | 0 |
| HHDPC1000163 | 0 | 0 | 0 | 0 | 0 | 1.267 | 0 |
| HHDPC2000055 | 0 | 0 | 0 | 0 | 0 | 1.842 | 0 |
| HHDPC2000104 | 0 | 0 | 0 | 1.313 | 0 | 0 | 0 |
| HHDPC2000115 | 0 | 0 | 0 | 0 | 0 | 2.636 | 0 |
| HHDPC2000149 | 0 | 0 | 0 | 3.171 | 0 | 0 | 0 |
| HHDPC2000455 | 0 | 0 | 0 | 0.390 | 0 | 0.554 | 0 |
| HHDPC2000456 | 0 | 0 | 0 | 0 | 0 | 1.564 | 0 |
| HHDPC2003439 | 0 | 1.785 | 1.961 | 1.625 | 0 | 0.513 | 0 |
| HHDPC2003983 | 0 | 0 | 2.147 | 0.791 | 1.006 | 0.842 | 0 |
| HHDPC2005794 | 0 | 0 | 0 | 0 | 0 | 8.015 | 0 |
| HHDPC2006862 | 0 | 0 | 0 | 0 | 0 | 7.541 | 0 |
| HHDPC2007267 | 0 | 0 | 0 | 0 | 0 | 0.492 | 0 |
| HHDPC2009528 | 0 | 0 | 0 | 4.613 | 0 | 0 | 0 |
| HLUNG1000055 | 0 | 3.799 | 0 | 0 | 0 | 0 | 0 |
| HLUNG1000064 | 0 | 0 | 0 | 4.833 | 0 | 0 | 0 |
| HLUNG2000232 | 0 | 0 | 0 | 17.890 | 0 | 0 | 0 |
| HLUNG2000314 | 0 | 0 | 0 | 0 | 0 | 2.472 | 0 |
| HLUNG2000412 | 0 | 0 | 0 | 7.602 | 0 | 2.698 | 0 |
| HLUNG2000501 | 0 | 0 | 0 | 0 | 6.199 | 0 | 0 |
| HLUNG2000846 | 0 | 0 | 0 | 0 | 0 | 4.552 | 0 |
| HLUNG2001146 | 0 | 0 | 0 | 3.721 | 0 | 0 | 0 |
| HLUNG2001507 | 0 | 0 | 0 | 0 | 0 | 5.046 | 0 |
| HLUNG2001518 | 0 | 0 | 0 | 5.433 | 0 | 1.102 | 0 |
| HLUNG2001712 | 0 | 0 | 0 | 0 | 35.740 | 0 | 0 |
| HLUNG2002465 | 0 | 0 | 0 | 0 | 0 | 4.875 | 0 |
| HLUNG2002648 | 0 | 0 | 0 | 0 | 0 | 3.642 | 0 |
| HLUNG2002811 | 0 | 0 | 0 | 6.918 | 0 | 4.910 | 0 |
| HLUNG2003378 | 0 | 0 | 0 | 6.571 | 0 | 0 | 0 |
| HLUNG2003716 | 0 | 0 | 0 | 16.214 | 0 | 0 | 0 |
| HLUNG2004067 | 0 | 0 | 0 | 7.815 | 0 | 0 | 0 |
| HLUNG2004159 | 0 | 0 | 0 | 0 | 0 | 1.827 | 0 |
| HLUNG2004170 | 0 | 0 | 0 | 0 | 0 | 6.209 | 0 |
| HLUNG2005656 | 0 | 0 | 0 | 16.214 | 0 | 0 | 0 |
| HLUNG2006812 | 0 | 0 | 0 | 2.099 | 0 | 0 | 0 |
| HLUNG2007163 | 0 | 0 | 0 | 0 | 0 | 27.149 | 0 |
| HLUNG2008139 | 0 | 0 | 0 | 8.134 | 0 | 0 | 0 |
| HLUNG2008153 | 0 | 0 | 0 | 0 | 0 | 20.576 | 0 |
| HLUNG2008348 | 0 | 0 | 0 | 9.019 | 0 | 12.803 | 0 |
| HLUNG2008637 | 0 | 11.856 | 0 | 0 | 0 | 0 | 0 |
| HLUNG2008885 | 0 | 0 | 0 | 7.662 | 0 | 0 | 0 |
| HLUNG2009225 | 0 | 0 | 0 | 4.282 | 0 | 3.039 | 0 |
| HLUNG2017262 | 0 | 0 | 0 | 4.502 | 0 | 0 | 0 |
| HSYRA1000062 | 0 | 0 | 16.516 | 0.608 | 0 | 0.432 | 0 |
| HSYRA1000119 | 0 | 0 | 3.546 | 1.305 | 1.661 | 0.463 | 0 |
| HSYRA1000137 | 0 | 0 | 0 | 0 | 0 | 3.755 | 0 |
| HSYRA1000152 | 0 | 0 | 0 | 0 | 0 | 4.807 | 0 |
| HSYRA1000178 | 0 | 0 | 0 | 1.780 | 0 | 5.053 | 0 |
| HSYRA2000137 | 0 | 0 | 0 | 0 | 8.190 | 0 | 0 |
| HSYRA2000159 | 0 | 0.846 | 1.860 | 2.653 | 1.743 | 6.803 | 0 |
| HSYRA2000190 | 0 | 16.670 | 0 | 1.686 | 0 | 0 | 0 |
| HSYRA2000224 | 0 | 0 | 0 | 0 | 0 | 3.624 | 0 |
| HSYRA2000232 | 0 | 0 | 0 | 3.149 | 2.672 | 3.725 | 0 |
| HSYRA2000248 | 0 | 0 | 5.241 | 0.965 | 0 | 2.054 | 0 |
| HSYRA2000255 | 0 | 0 | 0 | 0 | 0 | 0.452 | 0 |
| HSYRA2000629 | 0 | 0 | 0 | 2.369 | 0 | 0 | 0 |
| HSYRA2000640 | 0 | 0 | 0 | 0 | 0 | 6.009 | 0 |
| HSYRA2000706 | 0 | 0 | 0 | 8.673 | 0 | 0 | 0 |
| HSYRA2000743 | 0 | 0 | 5.968 | 1.648 | 0 | 1.560 | 0 |
| HSYRA2000787 | 0 | 0 | 0 | 2.208 | 0 | 0 | 0 |
| HSYRA2000828 | 0 | 9.999 | 0 | 0 | 0 | 4.306 | 0 |
| HSYRA2000925 | 0 | 0 | 0 | 0.472 | 0.801 | 0 | 83.696 |
| HSYRA2001003 | 0 | 0 | 0 | 6.093 | 0 | 0 | 0 |
| HSYRA2001105 | 0 | 0 | 0 | 5.867 | 0 | 2.776 | 0 |
| HSYRA2001138 | 0 | 0 | 0 | 1.267 | 0 | 3.082 | 0 |
| HSYRA2001225 | 0 | 0 | 0 | 0.525 | 0 | 0 | 0 |
| HSYRA2001396 | 0 | 0 | 0 | 1.078 | 0 | 1.531 | 0 |
| HSYRA2001476 | 0 | 0 | 0 | 0 | 0 | 1.946 | 0 |
| HSYRA2001567 | 0 | 0 | 0 | 1.591 | 0 | 0 | 0 |
| HSYRA2001574 | 0 | 5.281 | 0 | 0 | 0 | 0.758 | 0 |
| HSYRA2001595 | 0 | 0 | 0 | 0.809 | 2.058 | 1.722 | 0 |
| HSYRA2001615 | 0 | 0 | 0 | 7.360 | 0 | 8.359 | 0 |
| HSYRA2001621 | 0 | 0 | 0 | 0 | 3.315 | 1.294 | 0 |
| HSYRA2001983 | 0 | 0 | 0 | 6.851 | 0 | 0 | 0 |
| IMR321000158 | 0 | 0 | 0 | 0 | 0 | 0.767 | 0 |
| IMR321000193 | 0 | 0 | 0 | 0 | 0 | 4.422 | 0 |
| IMR321000210 | 0 | 0 | 0 | 2.158 | 0 | 0 | 0 |
| IMR321000219 | 0 | 0 | 0 | 1.594 | 0 | 3.959 | 0 |
| IMR321000242 | 0 | 0 | 0 | 3.991 | 0 | 0 | 0 |
| IMR321000266 | 0 | 0 | 0 | 2.009 | 0 | 2.851 | 0 |
| IMR322000072 | 25.151 | 0 | 0 | 0 | 0 | 0 | 0 |
| IMR322000121 | 0 | 0 | 0 | 0.791 | 0 | 4.493 | 0 |
| IMR322000127 | 0 | 10.873 | 0 | 4.398 | 5.597 | 10.926 | 0 |
| IMR322000223 | 0 | 0 | 0 | 0.966 | 2.460 | 0 | 0 |
| IMR322000243 | 0 | 0 | 0 | 1.218 | 0 | 1.729 | 0 |
| IMR322000316 | 0 | 0 | 0 | 3.534 | 4.498 | 6.272 | 0 |
| IMR322000518 | 0 | 0 | 0 | 6.540 | 11.097 | 0 | 0 |
| IMR322000555 | 0 | 0 | 0 | 4.234 | 0 | 0 | 0 |
| IMR322000730 | 4.296 | 0.962 | 0 | 0 | 1.486 | 0 | 0 |
| IMR322000742 | 0 | 0 | 0 | 2.351 | 5.983 | 1.668 | 0 |
| IMR322000775 | 0 | 0 | 0 | 2.943 | 0 | 0 | 0 |
| IMR322000819 | 0 | 0 | 0 | 0 | 0 | 4.295 | 0 |
| IMR322000859 | 0 | 0 | 0 | 28.688 | 0 | 0 | 0 |
| IMR322000863 | 0 | 0 | 0 | 4.788 | 0 | 0 | 0 |
| IMR322000918 | 0 | 0 | 0 | 4.161 | 0 | 2.953 | 0 |
| IMR322000973 | 25.275 | 0 | 6.218 | 0 | 0 | 0 | 0 |
| IMR322001049 | 0 | 0 | 0 | 0 | 20.931 | 0 | 0 |
| IMR322001218 | 0 | 0 | 0 | 0.795 | 0 | 0 | 0 |
| IMR322001317 | 0 | 0 | 0 | 2.802 | 5.707 | 0 | 0 |
| IMR322001318 | 0 | 0 | 0 | 0 | 0 | 22.213 | 0 |
| IMR322001322 | 0 | 0 | 0 | 0 | 0 | 22.213 | 0 |
| IMR322001332 | 0 | 0 | 0 | 3.779 | 0 | 0 | 0 |
| IMR322001380 | 0 | 0 | 0 | 2.814 | 7.163 | 11.984 | 0 |
| IMR322001435 | 0 | 0 | 0 | 1.334 | 0 | 0.947 | 0 |
| IMR322001438 | 0 | 0 | 0 | 5.898 | 0 | 0 | 0 |
| IMR322001534 | 0 | 0 | 0 | 5.865 | 0 | 0 | 0 |
| IMR322001541 | 0 | 0 | 0 | 2.401 | 0 | 0 | 0 |
| IMR322001584 | 0 | 0 | 0 | 1.772 | 0 | 2.516 | 0 |
| IMR322001600 | 0 | 0 | 0 | 0 | 0 | 0.487 | 0 |
| IMR322001670 | 0 | 0 | 0 | 9.714 | 0 | 18.387 | 0 |
| IMR322009710 | 0 | 0 | 0 | 16.746 | 0 | 0 | 0 |
| IMR322019070 | 0 | 0 | 0 | 0 | 19.335 | 0 | 0 |
| KIDNE1000104 | 0 | 0 | 0 | 11.771 | 0 | 0 | 0 |
| KIDNE1000145 | 0 | 19.410 | 0 | 0 | 0 | 0 | 0 |
| KIDNE2000085 | 0 | 0 | 7.930 | 0.730 | 0 | 0 | 0 |
| KIDNE2000252 | 0 | 0 | 6.591 | 1.213 | 0 | 3.444 | 0 |
| KIDNE2000266 | 0 | 0 | 0 | 5.977 | 0 | 4.242 | 0 |
| KIDNE2000349 | 0 | 0 | 14.632 | 0 | 0 | 0 | 0 |
| KIDNE2000383 | 0 | 0 | 0 | 0 | 0 | 4.962 | 0 |
| KIDNE2000574 | 0 | 5.254 | 0 | 1.063 | 2.705 | 1.508 | 0 |
| KIDNE2000665 | 0 | 0 | 0 | 1.374 | 0 | 1.951 | 0 |
| KIDNE2000909 | 0 | 0 | 0 | 1.457 | 0 | 4.137 | 0 |
| KIDNE2000947 | 0 | 0 | 19.491 | 0 | 9.132 | 0 | 0 |
| KIDNE2001162 | 0 | 0 | 10.798 | 0.994 | 0 | 0.941 | 0 |
| KIDNE2001467 | 0 | 0 | 0 | 0.740 | 0 | 2.364 | 0 |
| KIDNE2002191 | 0 | 0 | 0 | 15.177 | 0 | 0 | 0 |
| KIDNE2002265 | 0 | 0 | 0 | 0 | 0 | 1.833 | 0 |
| KIDNE2002725 | 0 | 0 | 0 | 7.303 | 0 | 0 | 0 |
| KIDNE2003233 | 0 | 0 | 0 | 16.915 | 0 | 0 | 0 |
| KIDNE2003305 | 0 | 17.723 | 0 | 0.597 | 0 | 0 | 0 |
| KIDNE2003764 | 0 | 0 | 0 | 22.937 | 0 | 0 | 0 |
| KIDNE2003941 | 15.810 | 0 | 0 | 0 | 0 | 1.016 | 0 |
| KIDNE2004054 | 0 | 0 | 0 | 9.265 | 0 | 0 | 0 |
| KIDNE2004115 | 0 | 0 | 0 | 16.915 | 0 | 0 | 0 |
| KIDNE2004475 | 0 | 0 | 0 | 1.827 | 0 | 0 | 0 |
| KIDNE2005676 | 0 | 0 | 0 | 5.991 | 0 | 0 | 0 |
| KIDNE2006248 | 0 | 2.182 | 0 | 0 | 0 | 0.940 | 0 |
| KIDNE2006465 | 0 | 0 | 0 | 10.981 | 0 | 3.118 | 0 |
| KIDNE2006580 | 0 | 0 | 0 | 14.933 | 0 | 7.066 | 0 |
| KIDNE2006760 | 0 | 0 | 0 | 0 | 24.375 | 0 | 0 |
| KIDNE2006775 | 0 | 0 | 70.644 | 1.300 | 0 | 0 | 0 |
| KIDNE2006880 | 0 | 0 | 0 | 0 | 0 | 3.235 | 0 |
| KIDNE2007352 | 0 | 2.918 | 0 | 2.950 | 0 | 0.838 | 0 |
| KIDNE2007954 | 0 | 0 | 0 | 7.481 | 0 | 0 | 0 |
| KIDNE2008048 | 0 | 0 | 0 | 1.904 | 0 | 1.081 | 0 |
| KIDNE2008069 | 0 | 0 | 0 | 3.314 | 12.653 | 9.409 | 0 |
| KIDNE2008362 | 0 | 0 | 0 | 0 | 16.499 | 0 | 0 |
| KIDNE2008403 | 0 | 0 | 0 | 9.653 | 0 | 19.184 | 0 |
| KIDNE2009367 | 0 | 0 | 0 | 7.489 | 2.723 | 6.075 | 0 |
| KIDNE2011752 | 0 | 0 | 0 | 16.915 | 0 | 0 | 0 |
| KIDNE2012009 | 0 | 66.814 | 0 | 0 | 0 | 0 | 0 |
| KIDNE2012291 | 0 | 0 | 0 | 16.915 | 0 | 0 | 0 |
| KIDNE2012440 | 0 | 0 | 0 | 2.513 | 0 | 0 | 0 |
| KIDNE2013845 | 0 | 0 | 0 | 0.793 | 0 | 0 | 0 |
| KIDNE2014290 | 0 | 0 | 0 | 0 | 0 | 0.706 | 0 |
| KIDNE2014978 | 0 | 0 | 0 | 0 | 0 | 22.421 | 0 |
| KIDNE2015710 | 0 | 13.138 | 0 | 0 | 0 | 0 | 0 |
| KIDNE2016101 | 0 | 0 | 0 | 16.915 | 0 | 0 | 0 |
| KIDNE2016371 | 0 | 0 | 0 | 0 | 0 | 9.078 | 0 |
| KIDNE2017040 | 0 | 0 | 0 | 2.387 | 0 | 0 | 0 |
| KIDNE2017153 | 0 | 0 | 0 | 16.915 | 0 | 0 | 0 |
| KIDNE2018071 | 0 | 0 | 0 | 0 | 50.895 | 0 | 0 |
| KIDNE2018217 | 0 | 0 | 0 | 4.307 | 0 | 0 | 0 |
| KIDNE2018493 | 0 | 0 | 0 | 0 | 0 | 3.590 | 0 |
| KIDNE2018891 | 0 | 0 | 0 | 0 | 22.035 | 0 | 0 |
| LIVER1000079 | 0 | 0 | 0 | 2.487 | 0 | 5.297 | 0 |
| LIVER1000104 | 0 | 0 | 0 | 0 | 0 | 0.208 | 0 |
| LIVER1000132 | 0 | 3.512 | 0 | 0 | 0 | 0 | 0 |
| LIVER1000230 | 0 | 0 | 0 | 8.232 | 0 | 0 | 0 |
| LIVER2000033 | 0 | 0 | 0 | 0 | 0 | 1.394 | 0 |
| LIVER2000037 | 0 | 0 | 0 | 0 | 0.229 | 0 | 0 |
| LIVER2001265 | 0 | 0 | 0 | 0 | 0 | 10.413 | 0 |
| LIVER2002842 | 0 | 0 | 0 | 0 | 0 | 1.924 | 0 |
| LIVER2003008 | 0 | 0 | 0 | 0 | 0 | 10.413 | 0 |
| LIVER2006006 | 0 | 0 | 5.484 | 0 | 0 | 0 | 0 |
| LIVER2007783 | 0 | 0 | 0 | 1.456 | 0 | 2.067 | 0 |
| LIVER2008465 | 0 | 0 | 0 | 4.697 | 0 | 0 | 0 |
| MAMGL1000032 | 0 | 2.262 | 0 | 0.114 | 0.582 | 0.487 | 0 |
| MAMGL1000035 | 0 | 0 | 0 | 0.143 | 0 | 0.203 | 0 |
| MAMGL1000083 | 0 | 0 | 0 | 0.206 | 0 | 0 | 0 |
| MAMGL1000100 | 0 | 0 | 0 | 0.210 | 0 | 0 | 0 |
| MAMGL1000173 | 0 | 1.860 | 0 | 0 | 0 | 0 | 0 |
| MESAN1000050 | 0 | 0 | 0 | 0 | 0 | 3.235 | 0 |
| MESAN1000080 | 0 | 0 | 0 | 0 | 0 | 1.439 | 0 |
| MESAN1000101 | 0 | 0 | 0 | 4.097 | 0 | 0 | 0 |
| MESAN1000126 | 0 | 0 | 0 | 7.605 | 0 | 0 | 0 |
| MESAN2000267 | 0 | 0 | 0 | 1.744 | 1.480 | 2.888 | 0 |
| MESAN2000501 | 0 | 0 | 0 | 0 | 0 | 3.023 | 0 |
| MESAN2000572 | 0 | 0 | 0 | 0 | 0 | 1.030 | 0 |
| MESAN2000608 | 0 | 0 | 6.064 | 1.116 | 0 | 0.792 | 0 |
| MESAN2001154 | 0 | 0 | 0 | 4.728 | 0 | 0 | 0 |
| MESAN2001450 | 0 | 0 | 0 | 6.141 | 0 | 0 | 0 |
| MESAN2002086 | 0 | 2.922 | 0 | 0 | 1.504 | 0 | 0 |
| MESAN2002122 | 0 | 0 | 0 | 6.296 | 0 | 0 | 0 |
| MESAN2002186 | 0 | 0 | 16.905 | 0 | 0 | 0 | 0 |
| MESAN2002519 | 0 | 0 | 0 | 0 | 0 | 4.673 | 0 |
| MESAN2002724 | 0 | 0 | 0 | 0 | 0 | 1.858 | 0 |
| MESAN2003622 | 18.837 | 4.218 | 0 | 1.280 | 0 | 0 | 0 |
| MESAN2003709 | 0 | 0 | 0 | 0 | 29.970 | 0 | 0 |
| MESAN2005689 | 0 | 0 | 0 | 0 | 11.210 | 3.126 | 0 |
| MESAN2005766 | 0 | 0 | 0 | 2.100 | 0 | 4.968 | 0 |
| MESAN2005957 | 0 | 0 | 0 | 7.009 | 0 | 0 | 0 |
| MESAN2005958 | 0 | 0 | 0 | 3.823 | 9.731 | 0 | 0 |
| MESAN2006401 | 0 | 0 | 0 | 0 | 0 | 10.937 | 0 |
| MESAN2006563 | 0 | 0 | 0 | 1.470 | 0 | 0 | 0 |
| MESAN2008334 | 0 | 0 | 0 | 11.670 | 0 | 0 | 0 |
| MESAN2008729 | 0 | 0 | 0 | 16.066 | 0 | 0 | 0 |
| MESAN2008936 | 0 | 0 | 0 | 5.647 | 0 | 12.025 | 0 |
| MESAN2010664 | 0 | 0 | 0 | 6.160 | 0 | 0 | 0 |
| MESAN2011984 | 0 | 0 | 0 | 0 | 0 | 1.719 | 0 |
| MESAN2012054 | 0 | 0 | 0 | 5.432 | 0 | 0 | 0 |
| MESAN2013284 | 0 | 0 | 0 | 2.615 | 0 | 6.187 | 0 |
| MESAN2015365 | 0 | 0 | 0 | 16.066 | 0 | 0 | 0 |
| MESAN2015515 | 0 | 0 | 20.486 | 0 | 0 | 2.677 | 0 |
| MESAN2017133 | 0 | 0 | 0 | 0 | 31.703 | 0 | 0 |
| MESAN2017373 | 0 | 0 | 0 | 0 | 0 | 3.529 | 0 |
| MESAN2018699 | 0 | 0 | 0 | 0 | 0 | 15.512 | 0 |
| MESTC1000042 | 0 | 0 | 0 | 0.797 | 0 | 0 | 0 |
| NB9N41000011 | 0 | 0 | 0 | 4.532 | 0 | 0 | 0 |
| NB9N41000121 | 0 | 0 | 5.791 | 0 | 0 | 0 | 0 |
| NB9N41000135 | 0 | 0 | 0 | 1.574 | 0 | 0 | 0 |
| NB9N41000340 | 0 | 0 | 11.184 | 2.059 | 0 | 0 | 0 |
| NB9N42000196 | 31.658 | 0 | 0 | 0 | 0 | 0 | 0 |
| NESOP2001752 | 0 | 0 | 0 | 3.228 | 0 | 0 | 0 |
| NHNPC1000034 | 0 | 0 | 0 | 0 | 0 | 3.882 | 0 |
| NHNPC2000062 | 0 | 0 | 0 | 0 | 0 | 2.112 | 0 |
| NHNPC2000187 | 0 | 0 | 0 | 0.321 | 0 | 1.824 | 0 |
| NHNPC2000206 | 0 | 0 | 0 | 3.412 | 0 | 0.692 | 0 |
| NHNPC2001931 | 0 | 3.350 | 0 | 0 | 0 | 0.481 | 0 |
| NOVAR2000038 | 0 | 0 | 0 | 3.968 | 15.711 | 0.626 | 0 |
| NOVAR2000783 | 0 | 0 | 0 | 2.684 | 0 | 0 | 0 |
| NT2NE1000014 | 0 | 0 | 0 | 6.170 | 0 | 0 | 0 |
| NT2NE1000018 | 0 | 0 | 19.177 | 1.765 | 0 | 10.022 | 0 |
| NT2NE1000163 | 0 | 0 | 0 | 4.025 | 1.464 | 1.224 | 0 |
| NT2NE2000056 | 0 | 2.757 | 3.029 | 1.115 | 0 | 5.541 | 0 |
| NT2NE2000174 | 0 | 0 | 5.885 | 0.271 | 0 | 0.384 | 0 |
| NT2NE2000195 | 0 | 0 | 0 | 2.182 | 5.554 | 1.549 | 0 |
| NT2NE2000259 | 0 | 0 | 0 | 1.996 | 0 | 2.834 | 0 |
| NT2NE2000260 | 0 | 4.239 | 0 | 0 | 2.182 | 0.852 | 0 |
| NT2NE2000327 | 0 | 0 | 0 | 5.357 | 0 | 0 | 0 |
| NT2NE2000383 | 0 | 0 | 0 | 3.236 | 5.491 | 1.531 | 0 |
| NT2NE2000384 | 0 | 0 | 0 | 1.634 | 0 | 2.319 | 0 |
| NT2NE2000392 | 0 | 0 | 0 | 3.168 | 0 | 3.598 | 0 |
| NT2NE2000517 | 0 | 0 | 0 | 0 | 0 | 14.309 | 0 |
| NT2NE2000575 | 0 | 1.687 | 0 | 1.706 | 0.869 | 1.453 | 0 |
| NT2NE2000707 | 0 | 4.698 | 0 | 1.188 | 0 | 2.697 | 0 |
| NT2NE2000763 | 0 | 0 | 0 | 0 | 0 | 2.418 | 0 |
| NT2NE2000864 | 0 | 0 | 0 | 16.377 | 0 | 0 | 0 |
| NT2NE2000909 | 0 | 0 | 0 | 0 | 11.828 | 13.193 | 0 |
| NT2NE2000913 | 0 | 0 | 0 | 5.235 | 0 | 0 | 0 |
| NT2NE2000963 | 0 | 3.220 | 0 | 0.814 | 3.316 | 0 | 0 |
| NT2NE2001000 | 26.976 | 0 | 0 | 1.222 | 0 | 0.867 | 0 |
| NT2NE2001040 | 0 | 0 | 0 | 11.003 | 0 | 15.621 | 0 |
| NT2NE2001048 | 0 | 10.506 | 0 | 2.125 | 10.817 | 1.508 | 0 |
| NT2NE2001156 | 0 | 0 | 0 | 0 | 20.308 | 0 | 0 |
| NT2NE2001176 | 0 | 0 | 0 | 1.621 | 4.127 | 6.905 | 0 |
| NT2NE2001324 | 0 | 0 | 0 | 16.377 | 0 | 0 | 0 |
| NT2NE2001337 | 0 | 0 | 0 | 6.451 | 0 | 0 | 0 |
| NT2NE2001364 | 0 | 0 | 0 | 0 | 0 | 10.772 | 0 |
| NT2NE2001397 | 0 | 0 | 0 | 0 | 0 | 13.252 | 0 |
| NT2NE2001403 | 0 | 0 | 0 | 3.682 | 0 | 0 | 0 |
| NT2NE2001435 | 0 | 0 | 0 | 6.037 | 3.841 | 4.285 | 0 |
| NT2NE2001442 | 0 | 35.075 | 0 | 0 | 0 | 0 | 0 |
| NT2NE2001545 | 0 | 0 | 0 | 0 | 0 | 3.611 | 0 |
| NT2NE2001655 | 0 | 0 | 0 | 0 | 5.059 | 1.411 | 0 |
| NT2NE2001697 | 0 | 0 | 0 | 0 | 0 | 5.501 | 0 |
| NT2NE2001793 | 0 | 0 | 0 | 2.945 | 0 | 4.180 | 0 |
| NT2NE2003185 | 0 | 0 | 0 | 2.690 | 13.697 | 0 | 0 |
| NT2NE2003485 | 0 | 0 | 0 | 1.652 | 0 | 0 | 0 |
| NT2NE2003569 | 0 | 0 | 0 | 1.232 | 0 | 1.749 | 0 |
| NT2NE2003921 | 0 | 0 | 0 | 4.330 | 0 | 0 | 0 |
| NT2NE2004519 | 0 | 0 | 0 | 0 | 0 | 1.806 | 0 |
| NT2NE2005317 | 0 | 0 | 0 | 9.025 | 0 | 0 | 0 |
| NT2NE2005419 | 0 | 0 | 0 | 0 | 0 | 11.667 | 0 |
| NT2NE2005688 | 0 | 0 | 0 | 0.530 | 0 | 0 | 0 |
| NT2NE2005876 | 0 | 0 | 0 | 5.235 | 0 | 2.973 | 0 |
| NT2NE2005890 | 0 | 0 | 0 | 0 | 0 | 35.735 | 0 |
| NT2NE2006458 | 0 | 0 | 0 | 2.006 | 0 | 1.424 | 0 |
| NT2NE2006659 | 0 | 0 | 0 | 12.843 | 0 | 0 | 0 |
| NT2NE2006909 | 0 | 0 | 0 | 0 | 0 | 0.287 | 0 |
| NT2NE2008803 | 0 | 0 | 0 | 16.377 | 0 | 0 | 0 |
| NT2NE2009523 | 0 | 0 | 0 | 0 | 0 | 15.659 | 0 |
| NT2NE2010056 | 0 | 0 | 0 | 17.062 | 0 | 16.148 | 0 |
| NT2NE2010842 | 0 | 0 | 0 | 0.669 | 0 | 3.800 | 0 |
| NT2NE2011119 | 0 | 0 | 0 | 0 | 0 | 4.665 | 0 |
| NT2NE2012199 | 0 | 0 | 0 | 0 | 0 | 12.205 | 0 |
| NT2NE2012505 | 0 | 0 | 0 | 13.014 | 0 | 0 | 0 |
| NT2NE2012928 | 0 | 0 | 0 | 6.179 | 0 | 0 | 0 |
| NT2NE2014104 | 0 | 23.562 | 0 | 0 | 0 | 1.691 | 0 |
| NT2NE2015362 | 0 | 0 | 0 | 13.014 | 0 | 0 | 0 |
| NT2NE2015974 | 0 | 0 | 0 | 21.687 | 0 | 7.697 | 0 |
| NT2NE2017792 | 0 | 0 | 0 | 13.288 | 0 | 18.864 | 0 |
| NT2NE2018180 | 0 | 0 | 0 | 2.669 | 0 | 0 | 0 |
| NT2NE2019091 | 0 | 0 | 0 | 0 | 0 | 1.907 | 0 |
| NT2RI1000027 | 0 | 0 | 0 | 1.435 | 0 | 1.019 | 0 |
| NT2RI1000127 | 0 | 0 | 0 | 1.288 | 0 | 0 | 0 |
| NT2RI2000064 | 0 | 3.778 | 8.302 | 0.382 | 0 | 0.542 | 0 |
| NT2RI2000107 | 0 | 0 | 0 | 0 | 0 | 2.334 | 0 |
| NT2RI2000116 | 0 | 0 | 0 | 1.238 | 0 | 2.344 | 0 |
| NT2RI2000133 | 0 | 0 | 0 | 1.819 | 0 | 0 | 0 |
| NT2RI2000167 | 0 | 0 | 0 | 0 | 0 | 11.641 | 0 |
| NT2RI2000255 | 0 | 0 | 9.231 | 0 | 0 | 2.412 | 0 |
| NT2RI2000263 | 0 | 0 | 0 | 1.214 | 0 | 0 | 0 |
| NT2RI2000282 | 9.921 | 0 | 9.764 | 0.449 | 0 | 0 | 0 |
| NT2RI2000284 | 0 | 0 | 0 | 0.324 | 1.647 | 0.919 | 0 |
| NT2RI2000294 | 0 | 0 | 0 | 1.343 | 0 | 3.814 | 0 |
| NT2RI2000344 | 0 | 0 | 0 | 1.149 | 0 | 0.816 | 0 |
| NT2RI2000412 | 0 | 0 | 0 | 0 | 0 | 23.298 | 0 |
| NT2RI2000578 | 0 | 0 | 0 | 0 | 0 | 0.674 | 0 |
| NT2RI2000671 | 0 | 0 | 0 | 0 | 0 | 1.060 | 0 |
| NT2RI2000685 | 0 | 0 | 0 | 2.813 | 0 | 2.995 | 0 |
| NT2RI2000727 | 0 | 1.816 | 3.990 | 0.184 | 0 | 2.607 | 0 |
| NT2RI2000829 | 0 | 0 | 0 | 8.133 | 13.801 | 0 | 0 |
| NT2RI2001054 | 0 | 0 | 4.588 | 0.845 | 0 | 1.199 | 0 |
| NT2RI2001091 | 0 | 24.677 | 0 | 2.495 | 0 | 0 | 0 |
| NT2RI2001230 | 0 | 5.414 | 0 | 0 | 0 | 0.777 | 0 |
| NT2RI2001342 | 0 | 11.079 | 0 | 0 | 0 | 0 | 0 |
| NT2RI2001385 | 0 | 0 | 0 | 0 | 14.236 | 0 | 0 |
| NT2RI2001422 | 0 | 0 | 0 | 5.277 | 0 | 0 | 0 |
| NT2RI2001450 | 0 | 0 | 0 | 2.515 | 0 | 16.068 | 0 |
| NT2RI2001540 | 0 | 1.998 | 0.439 | 1.333 | 0.617 | 0.229 | 0 |
| NT2RI2001621 | 0 | 0 | 0 | 2.173 | 0 | 0 | 0 |
| NT2RI2001731 | 0 | 0 | 0 | 1.344 | 0 | 0 | 0 |
| NT2RI2001769 | 0 | 0 | 17.143 | 0 | 0 | 0 | 0 |
| NT2RI2001859 | 0 | 0 | 0 | 0.689 | 0 | 1.956 | 0 |
| NT2RI2001866 | 0 | 0 | 0 | 10.300 | 0 | 0 | 0 |
| NT2RI2002091 | 1.261 | 0.659 | 2.586 | 0.048 | 0.097 | 0.176 | 0 |
| NT2RI2002152 | 0 | 0 | 0 | 0.893 | 0 | 2.534 | 0 |
| NT2RI2002243 | 0 | 0 | 0 | 0 | 0 | 3.314 | 0 |
| NT2RI2002266 | 0 | 0 | 0 | 0 | 0 | 2.525 | 0 |
| NT2RI2002316 | 0 | 0 | 0 | 0.569 | 0 | 0 | 0 |
| NT2RI2002391 | 0 | 0 | 0 | 0 | 0 | 4.086 | 0 |
| NT2RI2002540 | 0 | 0 | 0 | 1.227 | 0 | 6.967 | 0 |
| NT2RI2002554 | 0 | 12.727 | 0 | 0 | 0 | 1.827 | 0 |
| NT2RI2002585 | 0 | 0 | 0 | 9.228 | 0 | 0 | 0 |
| NT2RI2002654 | 0 | 0 | 0 | 1.668 | 0 | 1.184 | 0 |
| NT2RI2002699 | 0 | 0 | 0 | 0 | 0 | 11.520 | 0 |
| NT2RI2002802 | 0 | 0 | 0 | 0 | 0 | 28.966 | 0 |
| NT2RI2002819 | 0 | 0 | 0 | 0 | 0 | 3.751 | 0 |
| NT2RI2002847 | 0 | 0 | 0 | 0 | 0 | 1.265 | 0 |
| NT2RI2002958 | 0 | 0 | 0 | 0 | 0 | 2.910 | 0 |
| NT2RI2003011 | 0 | 0 | 0 | 2.451 | 0 | 3.479 | 0 |
| NT2RI2003051 | 0 | 0 | 0 | 3.633 | 0 | 2.063 | 0 |
| NT2RI2003205 | 0 | 0 | 0 | 0 | 0 | 3.244 | 0 |
| NT2RI2003222 | 0 | 0 | 0 | 0 | 0 | 25.614 | 0 |
| NT2RI2003301 | 0 | 0 | 0 | 0 | 0 | 5.719 | 0 |
| NT2RI2003304 | 0 | 0 | 2.024 | 0 | 0 | 0.529 | 0 |
| NT2RI2003317 | 0 | 11.064 | 0 | 0 | 0 | 4.765 | 0 |
| NT2RI2003338 | 0 | 0 | 0 | 0 | 0 | 3.061 | 0 |
| NT2RI2003344 | 0 | 0 | 0 | 9.675 | 0 | 1.962 | 0 |
| NT2RI2003361 | 0 | 0 | 0 | 3.505 | 0 | 0 | 0 |
| NT2RI2003407 | 0 | 0 | 0 | 0.859 | 0 | 1.220 | 0 |
| NT2RI2003420 | 0 | 0 | 0 | 2.186 | 0 | 1.552 | 0 |
| NT2RI2003481 | 0 | 0 | 0 | 8.223 | 13.955 | 5.837 | 0 |
| NT2RI2003556 | 0 | 0 | 0 | 0.270 | 1.375 | 0.767 | 0 |
| NT2RI2003655 | 0 | 0 | 0 | 0 | 0 | 19.683 | 0 |
| NT2RI2003678 | 0 | 0 | 0 | 0 | 0 | 3.837 | 0 |
| NT2RI2003695 | 0 | 0 | 12.145 | 0 | 0 | 5.554 | 0 |
| NT2RI2003738 | 0 | 0 | 0 | 0.124 | 0.632 | 0.529 | 0 |
| NT2RI2003921 | 0 | 0 | 0 | 0 | 0 | 1.911 | 0 |
| NT2RI2004059 | 0 | 0 | 0 | 0 | 24.622 | 0 | 0 |
| NT2RI2004284 | 0 | 0 | 0 | 1.141 | 0 | 3.239 | 0 |
| NT2RI2004290 | 0 | 0 | 0 | 0 | 0 | 21.496 | 0 |
| NT2RI2004304 | 0 | 0 | 0 | 5.911 | 0 | 4.196 | 0 |
| NT2RI2004398 | 0 | 34.966 | 0 | 3.536 | 0 | 5.020 | 0 |
| NT2RI2004410 | 0 | 0 | 0 | 5.311 | 18.024 | 5.026 | 0 |
| NT2RI2004535 | 0 | 0 | 0 | 2.717 | 0 | 3.857 | 0 |
| NT2RI2004608 | 0 | 25.968 | 0 | 0 | 0 | 0 | 0 |
| NT2RI2005115 | 0 | 0 | 0 | 4.337 | 0 | 6.157 | 0 |
| NT2RI2005116 | 0 | 8.972 | 0 | 1.815 | 0 | 1.288 | 0 |
| NT2RI2005150 | 0 | 0 | 0 | 0.489 | 0 | 4.860 | 0 |
| NT2RI2005166 | 0 | 0 | 0 | 18.511 | 0 | 0 | 0 |
| NT2RI2005239 | 0 | 0 | 0 | 0 | 0 | 7.947 | 0 |
| NT2RI2005246 | 0 | 0 | 71.596 | 0 | 0 | 0 | 0 |
| NT2RI2005335 | 12.134 | 0 | 0 | 5.495 | 0 | 2.730 | 0 |
| NT2RI2005353 | 0 | 0 | 0 | 0.818 | 0 | 2.321 | 0 |
| NT2RI2005405 | 0 | 0 | 0 | 0.199 | 0 | 0 | 0 |
| NT2RI2005473 | 0 | 22.924 | 0 | 0 | 0 | 0 | 0 |
| NT2RI2005564 | 0 | 0 | 0 | 6.323 | 0 | 0 | 0 |
| NT2RI2005713 | 0 | 0 | 0 | 0 | 5.344 | 2.980 | 0 |
| NT2RI2005723 | 0 | 0 | 0 | 1.781 | 0 | 1.011 | 0 |
| NT2RI2005811 | 0 | 10.753 | 0 | 0 | 0 | 3.087 | 0 |
| NT2RI2005816 | 0 | 0 | 0 | 0 | 0 | 6.440 | 0 |
| NT2RI2005851 | 0 | 0 | 0 | 5.290 | 0 | 11.265 | 0 |
| NT2RI2006070 | 0 | 0 | 0 | 0 | 0 | 2.071 | 0 |
| NT2RI2006071 | 0 | 0 | 0 | 64.115 | 0 | 0 | 0 |
| NT2RI2006072 | 0 | 0 | 0 | 0 | 0 | 0.771 | 0 |
| NT2RI2006271 | 0 | 0 | 0 | 1.982 | 0 | 0 | 0 |
| NT2RI2006412 | 0 | 0 | 0 | 4.654 | 0 | 18.171 | 0 |
| NT2RI2006640 | 0 | 0 | 0 | 0 | 0 | 12.665 | 0 |
| NT2RI2006647 | 0 | 0 | 0 | 3.255 | 0 | 0 | 0 |
| NT2RI2006682 | 0 | 0 | 0 | 0 | 0 | 2.479 | 0 |
| NT2RI2006825 | 0 | 0 | 0 | 0 | 0 | 2.762 | 0 |
| NT2RI2006856 | 0 | 0 | 3.612 | 0.665 | 1.692 | 0.472 | 0 |
| NT2RI2006943 | 0 | 0 | 0 | 1.726 | 0 | 4.902 | 0 |
| NT2RI2007054 | 0 | 0 | 0 | 2.764 | 0 | 0 | 0 |
| NT2RI2007084 | 0 | 0 | 0 | 0.772 | 0 | 1.096 | 0 |
| NT2RI2007096 | 0 | 0 | 0 | 0 | 18.731 | 0 | 0 |
| NT2RI2007148 | 0 | 0 | 0 | 0.670 | 0 | 0.952 | 0 |
| NT2RI2007377 | 0 | 0 | 0 | 2.494 | 0 | 11.801 | 0 |
| NT2RI2007384 | 0 | 0 | 0 | 0 | 0 | 1.745 | 0 |
| NT2RI2007445 | 0 | 0 | 0 | 1.273 | 0 | 0 | 0 |
| NT2RI2007468 | 0 | 0 | 0 | 2.966 | 0 | 0 | 0 |
| NT2RI2007498 | 0 | 0 | 3.145 | 0 | 0 | 0 | 0 |
| NT2RI2007572 | 0 | 0 | 0 | 1.061 | 0 | 0 | 0 |
| NT2RI2007589 | 0 | 0 | 0 | 1.516 | 0 | 1.076 | 0 |
| NT2RI2007593 | 0 | 0 | 0 | 2.338 | 11.905 | 0 | 0 |
| NT2RI2007629 | 0 | 0 | 0 | 1.431 | 0 | 4.062 | 0 |
| NT2RI2007723 | 0 | 0 | 27.282 | 0 | 0 | 3.565 | 0 |
| NT2RI2007879 | 49.750 | 0 | 12.240 | 0 | 0 | 0 | 0 |
| NT2RI2007884 | 0 | 0 | 0 | 1.802 | 0 | 0 | 0 |
| NT2RI2007987 | 0 | 0 | 0 | 1.278 | 0 | 3.628 | 0 |
| NT2RI2008045 | 0 | 0 | 0 | 1.102 | 0 | 0 | 0 |
| NT2RI2008141 | 0 | 0 | 0 | 0 | 0 | 2.155 | 0 |
| NT2RI2008171 | 0 | 0 | 0 | 3.152 | 0 | 4.474 | 0 |
| NT2RI2008188 | 0 | 0 | 0 | 0 | 0 | 28.966 | 0 |
| NT2RI2008336 | 0 | 2.812 | 0 | 0.853 | 0 | 0.404 | 0 |
| NT2RI2008396 | 0 | 0 | 0 | 0.313 | 0 | 1.777 | 0 |
| NT2RI2008481 | 0 | 0 | 0 | 0 | 0 | 0.745 | 0 |
| NT2RI2008526 | 0 | 0 | 5.913 | 0 | 0 | 0 | 0 |
| NT2RI2008566 | 0 | 0 | 0 | 0 | 0 | 9.477 | 0 |
| NT2RI2008714 | 0 | 0 | 0 | 0 | 0 | 29.569 | 0 |
| NT2RI2008724 | 0 | 0 | 0 | 0 | 0 | 1.850 | 0 |
| NT2RI2008749 | 0 | 0 | 0 | 0.401 | 0 | 0.570 | 0 |
| NT2RI2008791 | 0 | 0 | 0 | 0.828 | 0 | 0 | 0 |
| NT2RI2008808 | 0 | 0 | 0 | 3.218 | 0 | 4.568 | 0 |
| NT2RI2008812 | 0 | 0 | 0 | 0 | 0 | 7.295 | 0 |
| NT2RI2008942 | 0 | 0 | 0 | 1.489 | 0 | 1.057 | 0 |
| NT2RI2009037 | 0 | 5.917 | 6.501 | 1.795 | 0 | 1.699 | 0 |
| NT2RI2009065 | 0 | 0 | 0 | 0.994 | 3.375 | 0.941 | 0 |
| NT2RI2009066 | 0 | 0 | 0 | 1.945 | 0 | 0 | 0 |
| NT2RI2009083 | 0 | 0 | 0 | 0 | 0 | 10.331 | 0 |
| NT2RI2009173 | 0 | 0 | 0 | 0 | 0 | 1.124 | 0 |
| NT2RI2009194 | 0 | 0 | 0 | 0 | 0 | 0.990 | 0 |
| NT2RI2009233 | 0 | 0 | 0 | 1.601 | 0 | 4.545 | 0 |
| NT2RI2009239 | 0 | 0 | 0 | 2.976 | 0 | 0 | 0 |
| NT2RI2009269 | 0 | 0 | 0 | 2.104 | 7.141 | 4.978 | 0 |
| NT2RI2009281 | 0 | 0 | 0 | 0.999 | 0 | 4.254 | 0 |
| NT2RI2009402 | 0 | 0 | 0 | 2.226 | 11.333 | 6.320 | 0 |
| NT2RI2009406 | 0 | 0 | 0 | 1.997 | 0 | 0 | 0 |
| NT2RI2009583 | 0 | 0 | 3.451 | 5.399 | 0.808 | 0.902 | 0 |
| NT2RI2010795 | 0 | 0 | 0 | 0 | 0 | 16.619 | 0 |
| NT2RI2012350 | 0 | 2.809 | 0 | 0 | 0 | 0 | 0 |
| NT2RI2012659 | 0 | 0 | 0 | 48.128 | 0 | 13.665 | 0 |
| NT2RI2012726 | 0 | 0 | 0 | 3.293 | 0 | 0 | 0 |
| NT2RI2015342 | 0 | 0 | 0 | 2.135 | 0 | 0 | 0 |
| NT2RI2015533 | 0 | 0 | 0 | 3.309 | 5.616 | 12.527 | 0 |
| NT2RI2019751 | 0 | 0 | 0 | 28.087 | 0 | 0 | 0 |
| NT2RI2025075 | 0 | 0 | 0 | 12.033 | 0 | 0 | 0 |
| NT2RI2027975 | 0 | 0 | 0 | 28.087 | 0 | 0 | 0 |
| NT2RI3001348 | 0 | 0 | 0 | 7.418 | 0 | 0 | 0 |
| NT2RI3001445 | 0 | 0 | 0 | 4.495 | 0 | 0 | 0 |
| NT2RI3001515 | 0 | 0 | 0 | 0 | 0 | 21.825 | 0 |
| NT2RI3003382 | 0 | 0 | 0 | 28.087 | 0 | 0 | 0 |
| NT2RI3004510 | 0 | 0 | 0 | 20.009 | 0 | 0 | 0 |
| NT2RI3005724 | 0 | 0 | 0 | 42.065 | 0 | 5.972 | 0 |
| NT2RI3006284 | 0 | 0 | 0 | 1.469 | 0 | 0 | 0 |
| NT2RI3006673 | 0 | 0 | 0 | 0 | 0 | 10.055 | 0 |
| NT2RI3007213 | 0 | 0 | 0 | 28.087 | 0 | 0 | 0 |
| NT2RI3007291 | 0 | 0 | 0 | 35.535 | 0 | 0 | 0 |
| NT2RI3007543 | 0 | 0 | 0 | 1.204 | 0 | 0.855 | 0 |
| NT2RI3008055 | 0 | 0 | 0 | 15.678 | 0 | 0 | 0 |
| NT2RP6000005 | 0 | 0 | 0 | 1.561 | 0 | 0 | 0 |
| NT2RP6000008 | 0 | 0 | 0 | 22.750 | 0 | 0 | 0 |
| NT2RP6000017 | 0 | 0 | 0 | 3.186 | 0 | 1.508 | 0 |
| NT2RP6000032 | 0 | 0 | 0 | 0 | 0 | 7.902 | 0 |
| NT2RP6000039 | 0 | 0 | 0 | 6.364 | 0 | 1.807 | 0 |
| NT2RP6000059 | 0 | 0 | 0 | 0 | 0 | 21.855 | 0 |
| NT2RP6000072 | 0 | 0 | 12.461 | 0 | 0 | 0 | 0 |
| NT2RP6000078 | 0 | 0 | 0 | 0.255 | 0 | 1.449 | 0 |
| NT2RP6000085 | 0 | 0 | 0 | 3.283 | 0 | 4.660 | 0 |
| NT2RP6000086 | 0 | 0 | 0 | 22.750 | 0 | 0 | 0 |
| NT2RP6000109 | 0 | 0 | 0 | 1.356 | 0 | 3.849 | 0 |
| NT2RP6000110 | 0 | 0 | 0 | 1.944 | 0 | 13.796 | 0 |
| NT2RP6000123 | 0 | 0 | 0 | 0.278 | 2.829 | 0.394 | 0 |
| NT2RP6000130 | 0 | 56.184 | 0 | 0 | 0 | 0 | 0 |
| NT2RP7000069 | 0 | 0 | 0 | 9.563 | 0 | 0 | 0 |
| NT2RP7000076 | 0 | 0 | 0 | 0 | 0 | 1.228 | 0 |
| NT2RP7000086 | 0 | 0 | 0 | 18.153 | 0 | 12.885 | 0 |
| NT2RP7000173 | 0 | 0 | 0 | 1.973 | 0 | 0.560 | 0 |
| NT2RP7000238 | 0 | 0 | 0 | 5.513 | 0 | 1.304 | 0 |
| NT2RP7000271 | 0 | 0 | 0 | 0 | 0 | 3.056 | 0 |
| NT2RP7000477 | 0 | 0 | 0 | 1.404 | 0 | 0 | 0 |
| NT2RP7000579 | 0 | 0 | 0 | 12.835 | 0 | 0 | 0 |
| NT2RP7000586 | 0 | 0 | 0 | 0 | 0 | 11.071 | 0 |
| NT2RP7000600 | 0 | 0 | 0 | 6.291 | 0 | 8.931 | 0 |
| NT2RP7000624 | 0 | 0 | 0 | 21.677 | 0 | 0 | 0 |
| NT2RP7000812 | 0 | 0 | 61.537 | 0 | 0 | 0 | 0 |
| NT2RP7000906 | 0 | 9.156 | 0 | 2.778 | 0 | 5.258 | 0 |
| NT2RP7001166 | 0 | 0 | 11.535 | 1.062 | 0 | 0.754 | 0 |
| NT2RP7001231 | 0 | 0 | 0 | 0 | 0 | 4.161 | 0 |
| NT2RP7001283 | 0 | 0 | 4.341 | 0.400 | 0 | 0 | 0 |
| NT2RP7001364 | 0 | 0 | 0 | 0 | 0 | 29.482 | 0 |
| NT2RP7001475 | 0 | 0 | 0 | 24.938 | 0 | 0 | 0 |
| NT2RP7001962 | 0 | 18.645 | 0 | 1.885 | 0 | 5.353 | 0 |
| NT2RP7002379 | 0 | 0 | 0 | 2.144 | 0 | 3.043 | 0 |
| NT2RP7002449 | 0 | 0 | 0 | 5.735 | 0 | 6.107 | 0 |
| NT2RP7002594 | 0 | 0 | 0 | 0 | 0 | 13.764 | 0 |
| NT2RP7002619 | 0 | 0 | 0 | 0.773 | 0 | 1.098 | 0 |
| NT2RP7002738 | 0 | 0 | 0 | 4.086 | 0 | 0 | 0 |
| NT2RP7002802 | 0 | 0 | 0 | 2.594 | 0 | 0 | 0 |
| NT2RP7002829 | 0 | 0 | 0 | 6.206 | 0 | 0 | 0 |
| NT2RP7002875 | 0 | 0 | 0 | 3.930 | 3.334 | 6.508 | 0 |
| NT2RP7002906 | 0 | 0 | 0 | 3.980 | 0 | 8.475 | 0 |
| NT2RP7003055 | 0 | 0 | 0 | 0 | 0 | 10.632 | 0 |
| NT2RP7003203 | 0 | 0 | 0 | 2.622 | 0 | 0 | 0 |
| NT2RP7003319 | 0 | 0 | 0 | 1.943 | 3.297 | 0.919 | 0 |
| NT2RP7003511 | 0 | 0 | 25.483 | 0 | 0 | 0 | 0 |
| NT2RP7003632 | 0 | 0 | 0 | 3.467 | 0 | 4.922 | 0 |
| NT2RP7003647 | 0 | 0 | 0 | 8.353 | 0 | 4.743 | 0 |
| NT2RP7003688 | 0 | 0 | 0 | 4.193 | 0 | 6.696 | 0 |
| NT2RP7003724 | 0 | 0 | 0 | 26.217 | 0 | 0 | 0 |
| NT2RP7003960 | 0 | 0 | 0 | 2.352 | 0 | 0 | 0 |
| NT2RP7004114 | 0 | 0 | 0 | 7.915 | 0 | 0 | 0 |
| NT2RP7004123 | 0 | 13.469 | 0 | 1.362 | 0 | 0 | 0 |
| NT2RP7004173 | 0 | 0 | 0 | 2.710 | 2.760 | 3.078 | 0 |
| NT2RP7004196 | 0 | 0 | 0 | 3.720 | 4.734 | 5.281 | 0 |
| NT2RP7004352 | 0 | 0 | 0 | 4.822 | 0 | 1.711 | 0 |
| NT2RP7004373 | 0 | 0 | 0 | 1.671 | 0 | 3.558 | 0 |
| NT2RP7004428 | 0 | 0 | 0 | 7.181 | 0 | 6.796 | 0 |
| NT2RP7004481 | 0 | 0 | 0 | 3.817 | 0 | 0 | 0 |
| NT2RP7004728 | 0 | 0 | 0 | 2.231 | 0 | 4.751 | 0 |
| NT2RP7004751 | 0 | 0 | 0 | 0 | 1.691 | 0.943 | 0 |
| NT2RP7004790 | 0 | 0 | 0 | 11.078 | 0 | 0 | 0 |
| NT2RP7004884 | 0 | 0 | 0 | 11.691 | 0 | 2.766 | 0 |
| NT2RP7004911 | 0 | 0 | 0 | 1.251 | 0 | 0 | 0 |
| NT2RP7004915 | 0 | 0 | 0 | 10.538 | 0 | 7.480 | 0 |
| NT2RP7004925 | 0 | 0 | 0 | 4.481 | 0 | 1.272 | 0 |
| NT2RP7004946 | 0 | 0 | 0 | 3.666 | 0 | 0 | 0 |
| NT2RP7005219 | 0 | 0 | 0 | 37.067 | 0 | 0 | 0 |
| NT2RP7005493 | 0 | 0 | 0 | 0 | 43.725 | 0 | 0 |
| NT2RP7005513 | 0 | 0 | 0 | 0 | 0 | 1.703 | 0 |
| NT2RP7005529 | 0 | 0 | 0 | 5.240 | 0 | 7.439 | 0 |
| NT2RP7005675 | 0 | 0 | 0 | 8.256 | 0 | 5.861 | 0 |
| NT2RP7005750 | 0 | 0 | 0 | 5.079 | 0 | 0 | 0 |
| NT2RP7006162 | 0 | 0 | 0 | 22.750 | 0 | 0 | 0 |
| NT2RP7006188 | 0 | 0 | 0 | 0 | 0 | 2.623 | 0 |
| NT2RP7006223 | 0 | 0 | 0 | 17.994 | 0 | 0 | 0 |
| NT2RP7006263 | 0 | 0 | 31.053 | 8.574 | 0 | 0 | 0 |
| NT2RP7006490 | 0 | 0 | 0 | 1.523 | 0 | 0 | 0 |
| NT2RP7006619 | 0 | 0 | 0 | 1.567 | 7.976 | 0 | 0 |
| NT2RP7006701 | 0 | 0 | 38.773 | 7.137 | 0 | 5.066 | 0 |
| NT2RP7006717 | 0 | 0 | 10.147 | 1.401 | 0 | 0 | 0 |
| NT2RP7007154 | 0 | 0 | 0 | 0.809 | 0 | 0 | 0 |
| NT2RP7007177 | 0 | 0 | 0 | 0 | 0 | 2.744 | 0 |
| NT2RP7007252 | 0 | 0 | 0 | 9.748 | 0 | 6.919 | 0 |
| NT2RP7007530 | 0 | 0 | 0 | 1.556 | 0 | 2.209 | 0 |
| NT2RP7007537 | 0 | 8.631 | 0 | 5.236 | 0 | 1.239 | 0 |
| NT2RP7007610 | 0 | 0 | 0 | 6.162 | 0 | 0 | 0 |
| NT2RP7007842 | 0 | 0 | 0 | 4.084 | 6.930 | 0 | 0 |
| NT2RP7007975 | 0 | 0 | 0 | 21.309 | 0 | 1.375 | 0 |
| NT2RP7008161 | 0 | 0 | 0 | 4.456 | 0 | 0 | 0 |
| NT2RP7008167 | 0 | 0 | 0 | 1.288 | 0 | 0 | 0 |
| NT2RP7008190 | 0 | 9.311 | 0 | 0.941 | 0 | 0 | 0 |
| NT2RP7008396 | 0 | 0 | 0 | 0 | 0 | 12.403 | 0 |
| NT2RP7008441 | 0 | 0 | 0 | 14.289 | 0 | 0 | 0 |
| NT2RP7008543 | 0 | 19.310 | 0 | 0 | 0 | 2.772 | 0 |
| NT2RP7008714 | 0 | 0 | 0 | 8.258 | 0 | 23.445 | 0 |
| NT2RP7009012 | 0 | 0 | 0 | 8.047 | 0 | 0 | 0 |
| NT2RP7009087 | 0 | 0 | 0 | 1.724 | 0 | 2.448 | 0 |
| NT2RP7009097 | 0 | 0 | 0 | 0 | 6.496 | 0 | 0 |
| NT2RP7009108 | 0 | 0 | 0 | 0.631 | 12.846 | 8.060 | 0 |
| NT2RP7009149 | 0 | 0 | 0 | 0 | 4.323 | 1.205 | 0 |
| NT2RP7009259 | 0 | 0 | 4.333 | 2.393 | 0 | 4.529 | 0 |
| NT2RP7009373 | 0 | 0 | 0 | 8.554 | 0 | 0 | 0 |
| NT2RP7009394 | 0 | 0 | 0 | 0.858 | 4.369 | 1.218 | 0 |
| NT2RP7009481 | 0 | 0 | 0 | 2.907 | 0 | 4.127 | 0 |
| NT2RP7009482 | 0 | 0 | 0 | 2.631 | 0 | 0.467 | 0 |
| NT2RP7009498 | 0 | 0 | 0 | 0 | 0 | 1.015 | 0 |
| NT2RP7010109 | 0 | 0 | 0 | 11.153 | 0 | 0 | 0 |
| NT2RP7010599 | 0 | 0 | 0 | 22.750 | 0 | 0 | 0 |
| NT2RP7013573 | 0 | 0 | 0 | 5.114 | 0 | 0 | 0 |
| NT2RP7014910 | 0 | 0 | 0 | 0.849 | 0 | 1.205 | 0 |
| NT2RP7015503 | 0 | 0 | 0 | 2.247 | 0 | 0 | 0 |
| NT2RP7016574 | 0 | 0 | 0 | 0 | 0 | 22.259 | 0 |
| NT2RP7017474 | 0 | 0 | 0 | 13.360 | 0 | 0 | 0 |
| NT2RP7019543 | 0 | 0 | 0 | 0 | 38.221 | 0 | 0 |
| NT2RP8000521 | 0 | 0 | 0 | 37.067 | 0 | 0 | 0 |
| NT2RP8007715 | 0 | 0 | 0 | 44.589 | 0 | 0 | 0 |
| NT2RP8007920 | 0 | 0 | 0 | 1.404 | 0 | 0 | 0 |
| NTONG1000033 | 0 | 0 | 0 | 3.478 | 0 | 0 | 0 |
| NTONG1000098 | 0 | 0 | 0 | 4.070 | 0 | 1.284 | 0 |
| NTONG1000182 | 0 | 0 | 0 | 0 | 0 | 1.247 | 0 |
| NTONG1000246 | 0 | 0 | 12.058 | 0 | 0 | 0 | 0 |
| NTONG1000264 | 0 | 0 | 0 | 0 | 0 | 6.874 | 0 |
| NTONG2000107 | 0 | 0 | 0 | 0 | 0 | 10.745 | 0 |
| NTONG2000265 | 0 | 0 | 6.574 | 6.656 | 0 | 1.718 | 0 |
| NTONG2000334 | 0 | 0 | 0 | 1.451 | 7.388 | 0 | 0 |
| NTONG2000876 | 0 | 0 | 21.476 | 0 | 0 | 1.403 | 0 |
| NTONG2001428 | 0 | 0 | 0 | 0 | 0 | 10.621 | 0 |
| NTONG2001550 | 0 | 0 | 0 | 2.470 | 0 | 0 | 0 |
| NTONG2001612 | 0 | 7.879 | 0 | 0.797 | 0 | 0 | 0 |
| NTONG2001657 | 0 | 0 | 51.133 | 0 | 0 | 0 | 0 |
| NTONG2001676 | 0 | 0 | 0 | 5.063 | 0 | 0 | 0 |
| NTONG2001762 | 0 | 0 | 0 | 2.560 | 0 | 9.085 | 0 |
| NTONG2003454 | 0 | 0 | 0 | 0 | 0 | 3.004 | 0 |
| NTONG2004844 | 0 | 11.375 | 12.498 | 1.150 | 0 | 1.633 | 0 |
| NTONG2005391 | 0 | 0 | 0 | 1.655 | 0 | 4.698 | 0 |
| NTONG2005520 | 0 | 14.017 | 0 | 1.890 | 0 | 1.341 | 0 |
| NTONG2005801 | 0 | 0 | 0 | 3.793 | 0 | 1.795 | 0 |
| NTONG2005969 | 0 | 0 | 0 | 4.560 | 11.607 | 6.473 | 0 |
| NTONG2006484 | 0 | 0 | 0 | 3.068 | 0 | 0 | 0 |
| NTONG2006783 | 0 | 0 | 0 | 0 | 0 | 2.853 | 0 |
| NTONG2007658 | 0 | 0 | 0 | 4.261 | 0 | 0 | 0 |
| NTONG2007756 | 0 | 0 | 0 | 4.791 | 0 | 0 | 0 |
| NTONG2009468 | 0 | 0 | 0 | 13.482 | 0 | 0 | 0 |
| NTONG2009576 | 0 | 0 | 0 | 10.086 | 0 | 7.159 | 0 |
| OCBBF1000049 | 0 | 0 | 0 | 0 | 0 | 5.007 | 0 |
| OCBBF1000086 | 0 | 0 | 0 | 2.173 | 0 | 0 | 0 |
| OCBBF1000114 | 0 | 0 | 0 | 0 | 0 | 2.569 | 0 |
| OCBBF1000146 | 0 | 0 | 0 | 0 | 0 | 0.869 | 0 |
| OCBBF1000175 | 0 | 0 | 0 | 5.112 | 0 | 7.258 | 0 |
| OCBBF1000188 | 32.641 | 0 | 0 | 0.739 | 0 | 1.049 | 0 |
| OCBBF1000254 | 0 | 0 | 0 | 0 | 0 | 44.784 | 0 |
| OCBBF2000015 | 0 | 0 | 0 | 5.615 | 0 | 3.986 | 0 |
| OCBBF2000126 | 0 | 0 | 0 | 2.759 | 0 | 3.916 | 0 |
| OCBBF2000178 | 0 | 0 | 0 | 3.095 | 3.940 | 6.591 | 0 |
| OCBBF2000231 | 0 | 0 | 0 | 0 | 0 | 3.947 | 0 |
| OCBBF2000277 | 0 | 0 | 0 | 10.429 | 0 | 7.403 | 0 |
| OCBBF2000323 | 0 | 0 | 0 | 0 | 0 | 15.289 | 0 |
| OCBBF2000467 | 0 | 14.157 | 0 | 0 | 0 | 2.032 | 0 |
| OCBBF2000522 | 0 | 0 | 0 | 0 | 0 | 5.096 | 0 |
| OCBBF2000677 | 0 | 0 | 0 | 0 | 0 | 16.413 | 0 |
| OCBBF2000712 | 0 | 0 | 0 | 0.671 | 0 | 0 | 0 |
| OCBBF2000824 | 0 | 0 | 0 | 0 | 0 | 6.055 | 0 |
| OCBBF2000831 | 0 | 0 | 0 | 0 | 0 | 9.702 | 0 |
| OCBBF2000846 | 0 | 0 | 0 | 1.039 | 0 | 0.737 | 0 |
| OCBBF2000982 | 0 | 0 | 0 | 1.238 | 0 | 0.879 | 0 |
| OCBBF2000986 | 0 | 0 | 0 | 0.684 | 0 | 0.971 | 0 |
| OCBBF2001140 | 0 | 0 | 0 | 0 | 0 | 11.393 | 0 |
| OCBBF2001166 | 0 | 0 | 0 | 15.560 | 0 | 0 | 0 |
| OCBBF2001186 | 0 | 0 | 0 | 0 | 0 | 17.837 | 0 |
| OCBBF2001196 | 0 | 0 | 0 | 11.240 | 0 | 0 | 0 |
| OCBBF2001210 | 0 | 0 | 0 | 0 | 0 | 14.613 | 0 |
| OCBBF2001307 | 0 | 0 | 0 | 2.361 | 0 | 10.055 | 0 |
| OCBBF2001492 | 0 | 0 | 0 | 4.383 | 0 | 3.457 | 0 |
| OCBBF2001639 | 0 | 0 | 0 | 6.675 | 0 | 0 | 0 |
| OCBBF2001687 | 0 | 0 | 0 | 0 | 0 | 1.938 | 0 |
| OCBBF2001794 | 0 | 0 | 0 | 0 | 0 | 4.764 | 0 |
| OCBBF2001931 | 0 | 0 | 0 | 0 | 0 | 16.872 | 0 |
| OCBBF2002015 | 0 | 0 | 0 | 9.817 | 0 | 0 | 0 |
| OCBBF2002086 | 0 | 0 | 0 | 4.573 | 0 | 0 | 0 |
| OCBBF2002290 | 0 | 0 | 0 | 0 | 0 | 20.324 | 0 |
| OCBBF2002376 | 0 | 0 | 0 | 0 | 0 | 7.671 | 0 |
| OCBBF2002626 | 0 | 0 | 0 | 2.398 | 0 | 1.702 | 0 |
| OCBBF2002656 | 0 | 11.610 | 0 | 7.044 | 0 | 3.333 | 0 |
| OCBBF2003052 | 0 | 0 | 0 | 0 | 0 | 7.654 | 0 |
| OCBBF2003246 | 0 | 0 | 0 | 0 | 0 | 9.861 | 0 |
| OCBBF2003518 | 0 | 0 | 0 | 0 | 0 | 1.039 | 0 |
| OCBBF2003819 | 0 | 0 | 0 | 14.955 | 0 | 0 | 0 |
| OCBBF2003925 | 0 | 0 | 0 | 0 | 3.011 | 1.679 | 0 |
| OCBBF2004104 | 0 | 0 | 0 | 0 | 4.949 | 4.140 | 0 |
| OCBBF2004235 | 0 | 0 | 0 | 0 | 43.096 | 0 | 0 |
| OCBBF2004273 | 0 | 0 | 0 | 1.909 | 0 | 0 | 0 |
| OCBBF2004757 | 0 | 0 | 0 | 3.518 | 8.955 | 2.497 | 0 |
| OCBBF2005476 | 0 | 0 | 0 | 0 | 0 | 4.710 | 0 |
| OCBBF2005956 | 0 | 0 | 0 | 6.045 | 10.258 | 5.721 | 0 |
| OCBBF2006113 | 0 | 0 | 0 | 18.680 | 0 | 0 | 0 |
| OCBBF2006151 | 0 | 0 | 0 | 4.092 | 0 | 0 | 0 |
| OCBBF2006172 | 0 | 0 | 0 | 0 | 0 | 5.283 | 0 |
| OCBBF2006313 | 0 | 0 | 0 | 8.105 | 0 | 0 | 0 |
| OCBBF2006764 | 0 | 0 | 0 | 21.782 | 0 | 15.461 | 0 |
| OCBBF2007028 | 0 | 0 | 0 | 8.820 | 0 | 6.956 | 0 |
| OCBBF2007114 | 0 | 0 | 0 | 0 | 38.623 | 21.540 | 0 |
| OCBBF2007224 | 0 | 0 | 0 | 6.702 | 0 | 0 | 0 |
| OCBBF2007354 | 31.490 | 0 | 0 | 0.713 | 0 | 1.012 | 0 |
| OCBBF2007415 | 0 | 0 | 0 | 3.410 | 0 | 4.841 | 0 |
| OCBBF2007622 | 0 | 0 | 0 | 2.606 | 0 | 0 | 0 |
| OCBBF2007762 | 0 | 0 | 0 | 0 | 0 | 15.843 | 0 |
| OCBBF2007829 | 0 | 0 | 0 | 5.846 | 0 | 1.106 | 0 |
| OCBBF2008005 | 0 | 11.145 | 0 | 6.762 | 0 | 6.399 | 0 |
| OCBBF2008144 | 0 | 0 | 0 | 4.094 | 0 | 2.906 | 0 |
| OCBBF2008340 | 0 | 0 | 0 | 0 | 0 | 7.778 | 0 |
| OCBBF2008511 | 0 | 0 | 0 | 7.836 | 39.893 | 11.124 | 0 |
| OCBBF2008701 | 0 | 0 | 0 | 0 | 0 | 10.920 | 0 |
| OCBBF2008775 | 0 | 0 | 0 | 0 | 0 | 44.784 | 0 |
| OCBBF2009095 | 0 | 0 | 0 | 4.665 | 23.748 | 6.622 | 0 |
| OCBBF2009242 | 0 | 0 | 0 | 6.029 | 10.231 | 0 | 0 |
| OCBBF2009301 | 0 | 0 | 0 | 0 | 0 | 4.177 | 0 |
| OCBBF2009352 | 0 | 0 | 0 | 0 | 40.679 | 28.358 | 0 |
| OCBBF2009772 | 0 | 0 | 0 | 6.686 | 0 | 7.119 | 0 |
| OCBBF2009836 | 0 | 0 | 0 | 8.725 | 0 | 4.129 | 0 |
| OCBBF2010313 | 0 | 0 | 0 | 0 | 49.562 | 0 | 0 |
| OCBBF2010557 | 0 | 0 | 0 | 13.005 | 0 | 0 | 0 |
| OCBBF2010819 | 0 | 0 | 0 | 8.903 | 0 | 0 | 0 |
| OCBBF2010858 | 0 | 0 | 0 | 4.728 | 0 | 0 | 0 |
| OCBBF2010863 | 0 | 0 | 0 | 0 | 0 | 44.784 | 0 |
| OCBBF2010871 | 0 | 0 | 0 | 3.244 | 0 | 13.817 | 0 |
| OCBBF2011021 | 0 | 0 | 0 | 6.155 | 0 | 8.738 | 0 |
| OCBBF2011073 | 0 | 0 | 0 | 26.641 | 0 | 0 | 0 |
| OCBBF2011232 | 0 | 0 | 0 | 5.687 | 0 | 8.073 | 0 |
| OCBBF2011536 | 0 | 0 | 0 | 2.832 | 0 | 2.010 | 0 |
| OCBBF2011669 | 0 | 0 | 0 | 36.360 | 0 | 0 | 0 |
| OCBBF2011759 | 0 | 0 | 0 | 8.623 | 0 | 2.825 | 0 |
| OCBBF2011887 | 0 | 0 | 0 | 6.676 | 0 | 0 | 0 |
| OCBBF2011897 | 0 | 0 | 0 | 0 | 0 | 17.395 | 0 |
| OCBBF2011914 | 0 | 0 | 0 | 2.588 | 13.175 | 3.674 | 0 |
| OCBBF2012039 | 0 | 0 | 0 | 3.266 | 0 | 7.727 | 0 |
| OCBBF2012525 | 0 | 0 | 0 | 15.998 | 0 | 0 | 0 |
| OCBBF2012553 | 0 | 0 | 0 | 0 | 4.238 | 1.182 | 0 |
| OCBBF2012678 | 0 | 0 | 0 | 29.374 | 0 | 0 | 0 |
| OCBBF2012704 | 0 | 0 | 0 | 14.819 | 0 | 0 | 0 |
| OCBBF2012714 | 0 | 0 | 0 | 4.120 | 0 | 0 | 0 |
| OCBBF2012812 | 0 | 0 | 0 | 0 | 74.416 | 0 | 0 |
| OCBBF2012821 | 0 | 0 | 0 | 0 | 0 | 2.521 | 0 |
| OCBBF2012881 | 0 | 0 | 0 | 0 | 0 | 44.784 | 0 |
| OCBBF2012908 | 0 | 0 | 0 | 0 | 0 | 9.905 | 0 |
| OCBBF2013011 | 0 | 0 | 0 | 0 | 0 | 22.823 | 0 |
| OCBBF2013149 | 0 | 10.886 | 0 | 3.303 | 5.604 | 14.065 | 0 |
| OCBBF2013285 | 0 | 0 | 0 | 36.360 | 0 | 0 | 0 |
| OCBBF2013324 | 0 | 0 | 0 | 53.329 | 0 | 0 | 0 |
| OCBBF2013366 | 0 | 0 | 0 | 1.916 | 0 | 0 | 0 |
| OCBBF2013481 | 0 | 0 | 0 | 3.880 | 0 | 5.509 | 0 |
| OCBBF2013843 | 0 | 0 | 0 | 3.413 | 0 | 2.154 | 0 |
| OCBBF2014064 | 0 | 0 | 0 | 0 | 0 | 1.376 | 0 |
| OCBBF2014089 | 0 | 0 | 0 | 0 | 0 | 19.885 | 0 |
| OCBBF2014292 | 0 | 0 | 0 | 0 | 0 | 1.044 | 0 |
| OCBBF2014576 | 0 | 0 | 0 | 2.593 | 0 | 0 | 0 |
| OCBBF2014745 | 0 | 0 | 0 | 36.360 | 0 | 0 | 0 |
| OCBBF2015115 | 0 | 0 | 0 | 12.664 | 0 | 0 | 0 |
| OCBBF2015233 | 0 | 0 | 0 | 22.219 | 0 | 0 | 0 |
| OCBBF2015751 | 0 | 0 | 0 | 0 | 0 | 8.566 | 0 |
| OCBBF2016689 | 0 | 0 | 0 | 22.219 | 0 | 0 | 0 |
| OCBBF2016729 | 0 | 0 | 0 | 0 | 0 | 27.555 | 0 |
| OCBBF2017035 | 0 | 17.018 | 0 | 2.581 | 13.142 | 1.222 | 0 |
| OCBBF2017055 | 0 | 0 | 0 | 12.735 | 0 | 18.079 | 0 |
| OCBBF2017398 | 0 | 9.029 | 0 | 1.826 | 0 | 3.888 | 0 |
| OCBBF2017458 | 0 | 0 | 0 | 7.903 | 0 | 5.609 | 0 |
| OCBBF2017754 | 0 | 0 | 0 | 7.995 | 0 | 0 | 0 |
| OCBBF2017791 | 0 | 0 | 0 | 10 | 0 | 3.872 | 0 |
| OCBBF2017882 | 0 | 0 | 0 | 0 | 0 | 7.189 | 0 |
| OCBBF2017893 | 0 | 12.175 | 0 | 0 | 0 | 0 | 0 |
| OCBBF2018012 | 0 | 0 | 0 | 0 | 0 | 2.828 | 0 |
| OCBBF2018084 | 0 | 30.950 | 0 | 9.389 | 0 | 4.443 | 0 |
| OCBBF2018234 | 0 | 0 | 0 | 9.194 | 0 | 19.579 | 0 |
| OCBBF2018581 | 0 | 30.197 | 0 | 0 | 0 | 8.670 | 0 |
| OCBBF2018618 | 0 | 0 | 0 | 0 | 0 | 16.341 | 0 |
| OCBBF2018707 | 0 | 0 | 0 | 1.596 | 16.252 | 2.266 | 0 |
| OCBBF2018827 | 0 | 0 | 0 | 3.483 | 0 | 4.944 | 0 |
| OCBBF2018956 | 0 | 0 | 0 | 3.604 | 0 | 1.705 | 0 |
| OCBBF2020343 | 0 | 0 | 0 | 36.360 | 0 | 0 | 0 |
| OCBBF2020741 | 0 | 0 | 0 | 20.028 | 0 | 0 | 0 |
| OCBBF2021286 | 0 | 0 | 0 | 6.550 | 0 | 0 | 0 |
| OCBBF2022351 | 0 | 0 | 0 | 36.360 | 0 | 0 | 0 |
| OCBBF2023162 | 0 | 0 | 0 | 0 | 37.152 | 31.080 | 0 |
| OCBBF2024850 | 0 | 0 | 0 | 1.577 | 0 | 2.239 | 0 |
| OCBBF2025527 | 0 | 0 | 0 | 36.360 | 0 | 0 | 0 |
| OCBBF2026368 | 0 | 0 | 0 | 5.865 | 0 | 8.326 | 0 |
| OCBBF2026649 | 0 | 0 | 0 | 36.360 | 0 | 0 | 0 |
| OCBBF2027197 | 0 | 0 | 0 | 36.360 | 0 | 0 | 0 |
| OCBBF2027661 | 0 | 0 | 0 | 53.329 | 0 | 0 | 0 |
| OCBBF2030329 | 0 | 0 | 0 | 0 | 0 | 44.784 | 0 |
| OCBBF2030927 | 0 | 0 | 0 | 0 | 0 | 44.784 | 0 |
| OCBBF2033295 | 0 | 0 | 0 | 7.464 | 0 | 0 | 0 |
| OCBBF2035214 | 0 | 0 | 0 | 0 | 0 | 44.784 | 0 |
| OCBBF2035226 | 0 | 0 | 0 | 0.417 | 0 | 0 | 0 |
| OCBBF2036743 | 0 | 0 | 0 | 15.690 | 0 | 11.137 | 0 |
| OCBBF3000323 | 0 | 0 | 0 | 7.082 | 0 | 3.351 | 0 |
| OCBBF3001333 | 0 | 0 | 0 | 4.561 | 0 | 6.475 | 0 |
| OCBBF3004487 | 0 | 0 | 0 | 6.432 | 0 | 4.565 | 0 |
| OCBBF3009244 | 0 | 0 | 0 | 0 | 0 | 34.702 | 0 |
| PANCR1000091 | 0 | 0 | 0 | 0.214 | 0 | 0 | 0 |
| PEBLM1000174 | 0 | 0 | 0 | 3.394 | 0 | 0 | 0 |
| PEBLM2000147 | 0 | 0 | 0 | 1.811 | 0 | 10.283 | 0 |
| PEBLM2000222 | 0 | 0 | 0 | 0 | 0 | 0.585 | 0 |
| PEBLM2000267 | 0 | 0 | 0 | 1.996 | 25.404 | 2.834 | 0 |
| PEBLM2000326 | 0 | 0 | 0 | 7.705 | 0 | 0 | 0 |
| PEBLM2001072 | 0 | 0 | 0 | 5.148 | 0 | 1.827 | 0 |
| PEBLM2003914 | 0 | 14.913 | 0 | 3.016 | 7.677 | 4.282 | 0 |
| PEBLM2004452 | 0 | 0 | 0 | 1.916 | 0 | 2.720 | 0 |
| PEBLM2004666 | 0 | 0 | 0 | 0 | 0 | 3.744 | 0 |
| PEBLM2005282 | 0 | 0 | 0 | 0 | 0 | 11.820 | 0 |
| PEBLM2007437 | 0 | 0 | 0 | 0 | 21.543 | 0 | 0 |
| PEBLM2007774 | 0 | 0 | 0 | 0.214 | 0 | 0 | 0 |
| PERIC2000478 | 0 | 0 | 0 | 7.727 | 0 | 0 | 0 |
| PERIC2000889 | 0 | 0 | 0 | 6.314 | 0 | 8.963 | 0 |
| PERIC2003720 | 0 | 0 | 0 | 0 | 0 | 13.012 | 0 |
| PERIC2005117 | 0 | 0 | 0 | 1.525 | 0 | 2.164 | 0 |
| PERIC2006443 | 0 | 34.088 | 0 | 0 | 0 | 0 | 0 |
| PERIC2007068 | 0 | 0 | 0 | 8.761 | 0 | 0 | 0 |
| PLACE5000066 | 0 | 0 | 0 | 0 | 0 | 18.438 | 0 |
| PLACE5000113 | 0 | 0 | 0 | 6.106 | 0 | 1.734 | 0 |
| PLACE5000159 | 0 | 0 | 0 | 0 | 0 | 2.290 | 0 |
| PLACE5000170 | 0 | 0 | 0 | 0 | 0 | 3.503 | 0 |
| PLACE5000172 | 0 | 0 | 0 | 4.613 | 0 | 2.619 | 0 |
| PLACE6000145 | 0 | 7.274 | 0 | 0 | 0 | 0 | 0 |
| PLACE6000263 | 0 | 0 | 11.725 | 2.158 | 0 | 4.596 | 0 |
| PLACE6000379 | 0 | 2.479 | 1.362 | 1.003 | 0.638 | 0.712 | 0 |
| PLACE6000414 | 0 | 0 | 9.882 | 0 | 0 | 0 | 0 |
| PLACE6000619 | 0 | 0 | 0 | 0 | 0 | 36.150 | 0 |
| PLACE6001064 | 0 | 0 | 0 | 4.479 | 2.073 | 1.156 | 0 |
| PLACE6001185 | 0 | 0 | 0 | 15.159 | 0 | 0 | 0 |
| PLACE6001262 | 0 | 0 | 0 | 6.202 | 0 | 0 | 0 |
| PLACE6001281 | 0 | 0 | 0 | 2.443 | 0 | 0 | 0 |
| PLACE6001443 | 0 | 0 | 15.148 | 0 | 0 | 0 | 0 |
| PLACE6001823 | 0 | 0 | 0 | 20.223 | 0 | 0 | 0 |
| PLACE6002084 | 0 | 0 | 2.848 | 0.262 | 0 | 1.116 | 0 |
| PLACE6002102 | 0 | 0 | 0 | 2.005 | 0 | 1.423 | 0 |
| PLACE6002419 | 0 | 0 | 0 | 0 | 0 | 10.504 | 0 |
| PLACE6002692 | 0 | 0 | 0 | 0 | 0 | 36.150 | 0 |
| PLACE6003038 | 0 | 0 | 0 | 2.561 | 0 | 0 | 0 |
| PLACE6003621 | 0 | 0 | 0 | 28.511 | 0 | 0 | 0 |
| PLACE6004005 | 0 | 0 | 0 | 7.708 | 3.568 | 3.979 | 0 |
| PLACE6004312 | 0 | 0 | 0 | 0.856 | 0 | 1.823 | 0 |
| PLACE6004397 | 0 | 0 | 0 | 1.305 | 13.283 | 1.852 | 0 |
| PLACE6004578 | 0 | 0 | 0 | 1.760 | 0 | 1.249 | 0 |
| PLACE6005231 | 0 | 0 | 0 | 31.356 | 0 | 0 | 0 |
| PLACE6005482 | 0 | 0 | 0 | 0 | 0 | 2.664 | 0 |
| PLACE6005691 | 0 | 0 | 0 | 0 | 0 | 36.150 | 0 |
| PLACE6006137 | 0 | 0 | 0 | 2.424 | 12.342 | 6.883 | 0 |
| PLACE6006549 | 0 | 5.605 | 0 | 0.567 | 0 | 0 | 0 |
| PLACE6007180 | 0 | 0 | 0 | 15.213 | 0 | 32.395 | 0 |
| PLACE6007373 | 89.702 | 0 | 0 | 2.031 | 0 | 0 | 0 |
| PLACE6007436 | 0 | 0 | 0 | 5.100 | 0 | 7.240 | 0 |
| PLACE6008444 | 0 | 0 | 0 | 0 | 0 | 36.150 | 0 |
| PLACE6008775 | 0 | 0 | 0 | 5.233 | 0 | 14.857 | 0 |
| PLACE6009338 | 0 | 0 | 0 | 0 | 0 | 25.317 | 0 |
| PLACE6010484 | 0 | 10.849 | 0 | 1.097 | 0 | 3.115 | 0 |
| PLACE6010936 | 0 | 0 | 0 | 0 | 0 | 12.399 | 0 |
| PLACE6011041 | 0 | 0 | 0 | 1.931 | 0 | 0 | 0 |
| PLACE6011057 | 0 | 0 | 0 | 1.600 | 8.144 | 0 | 0 |
| PLACE6012028 | 0 | 0 | 0 | 0 | 0 | 12.650 | 0 |
| PLACE6013672 | 0 | 0 | 0 | 0 | 0 | 27.825 | 0 |
| PLACE6014064 | 0 | 21.482 | 0 | 0 | 0 | 3.084 | 0 |
| PLACE6015051 | 0 | 32.356 | 0 | 0 | 0 | 0 | 0 |
| PLACE6015445 | 0 | 0 | 0 | 0 | 40.154 | 0 | 0 |
| PLACE6015729 | 0 | 0 | 0 | 0 | 0 | 36.150 | 0 |
| PLACE6016942 | 0 | 0 | 0 | 0 | 0 | 3.942 | 0 |
| PLACE6018031 | 0 | 0 | 0 | 4.772 | 0 | 0 | 0 |
| PLACE6019195 | 0 | 0 | 0 | 6.023 | 0 | 0 | 0 |
| PLACE7004103 | 0 | 0 | 0 | 0.918 | 0 | 1.303 | 0 |
| PLACE7008261 | 0 | 0 | 0 | 20.223 | 0 | 0 | 0 |
| PROST1000097 | 0 | 4.127 | 0 | 3.339 | 2.125 | 1.185 | 0 |
| PROST1000199 | 0 | 5.128 | 0 | 0.519 | 0 | 0 | 0 |
| PROST1000215 | 0 | 0 | 0 | 3.630 | 0 | 5.154 | 0 |
| PROST1000220 | 0 | 0 | 0 | 0.482 | 0 | 0 | 0 |
| PROST1000226 | 0 | 0 | 27.595 | 0 | 0 | 0 | 0 |
| PROST1000272 | 0 | 0 | 0 | 0 | 0 | 3.179 | 0 |
| PROST1000526 | 0 | 0 | 0 | 1.793 | 0 | 2.546 | 0 |
| PROST1000564 | 0 | 0 | 0 | 0.954 | 0 | 0 | 0 |
| PROST2000138 | 0 | 1.825 | 0 | 0.185 | 0 | 0.611 | 0 |
| PROST2000176 | 0 | 17.815 | 0 | 0 | 0 | 0 | 0 |
| PROST2000284 | 0 | 0 | 0 | 4.971 | 12.653 | 0 | 0 |
| PROST2000567 | 0 | 0 | 0 | 0 | 0 | 14.432 | 0 |
| PROST2000761 | 0 | 66.434 | 0 | 0 | 0 | 0 | 0 |
| PROST2001002 | 0 | 0 | 0 | 13.944 | 0 | 0 | 0 |
| PROST2001180 | 0 | 0 | 0 | 7.049 | 0 | 2.502 | 0 |
| PROST2001283 | 0 | 0 | 0 | 0 | 7.688 | 2.144 | 0 |
| PROST2001521 | 0 | 8.528 | 0 | 0 | 0 | 0 | 0 |
| PROST2001883 | 0 | 0 | 0 | 0.634 | 0 | 0 | 0 |
| PROST2001997 | 0 | 0 | 0 | 12.414 | 0 | 0 | 0 |
| PROST2002162 | 0 | 0 | 0 | 0 | 0 | 3.901 | 0 |
| PROST2002227 | 0 | 17.841 | 0 | 0 | 0 | 0 | 0 |
| PROST2002425 | 0 | 0 | 0 | 0 | 0 | 16.010 | 0 |
| PROST2002651 | 0 | 0 | 0 | 0 | 10.806 | 0 | 0 |
| PROST2003232 | 0 | 0 | 0 | 4.843 | 0 | 2.750 | 0 |
| PROST2003338 | 0 | 7.856 | 0 | 3.972 | 4.044 | 1.128 | 0 |
| PROST2003396 | 0 | 0 | 0 | 4.240 | 0 | 6.020 | 0 |
| PROST2004095 | 0 | 0 | 0 | 8.969 | 0 | 2.830 | 0 |
| PROST2004270 | 0 | 0 | 0 | 0.835 | 0 | 2.370 | 0 |
| PROST2004416 | 21.314 | 0 | 0 | 0 | 0 | 0.685 | 0 |
| PROST2004570 | 0 | 0 | 0 | 5.320 | 27.085 | 0 | 0 |
| PROST2004739 | 0 | 0 | 0 | 10.556 | 0 | 0 | 0 |
| PROST2004744 | 0 | 37.106 | 0 | 0 | 0 | 0 | 0 |
| PROST2005067 | 0 | 0 | 0 | 11.450 | 0 | 0 | 0 |
| PROST2005093 | 0 | 0 | 0 | 16.676 | 0 | 0 | 0 |
| PROST2005143 | 0 | 0 | 0 | 4.815 | 0 | 0 | 0 |
| PROST2005285 | 0 | 0 | 0 | 5.298 | 0 | 0 | 0 |
| PROST2005466 | 0 | 0 | 0 | 16.676 | 0 | 0 | 0 |
| PROST2005604 | 0 | 0 | 0 | 2.208 | 0 | 0 | 0 |
| PROST2005683 | 0 | 0 | 0 | 6.457 | 0 | 0 | 0 |
| PROST2005793 | 0 | 27.525 | 0 | 0 | 0 | 0 | 0 |
| PROST2006030 | 0 | 0 | 0 | 13.428 | 0 | 0 | 0 |
| PROST2006060 | 0 | 0 | 0 | 9.478 | 0 | 0 | 0 |
| PROST2006260 | 0 | 0 | 0 | 5.780 | 0 | 0 | 0 |
| PROST2006737 | 0 | 0 | 0 | 0 | 8.758 | 4.884 | 0 |
| PROST2006988 | 0 | 0 | 0 | 0 | 0 | 14.713 | 0 |
| PROST2007248 | 0 | 0 | 0 | 13.229 | 0 | 0 | 0 |
| PROST2008271 | 0 | 0 | 0 | 11.126 | 0 | 3.949 | 0 |
| PROST2008360 | 0 | 0 | 0 | 2.555 | 0 | 0 | 0 |
| PROST2008489 | 0 | 0 | 4.994 | 0 | 0 | 0.653 | 0 |
| PROST2008770 | 0 | 0 | 0 | 7.197 | 0 | 3.930 | 0 |
| PROST2009347 | 0 | 0 | 0 | 13.452 | 0 | 0 | 0 |
| PROST2010382 | 0 | 0 | 0 | 0 | 0 | 3.153 | 0 |
| PROST2011105 | 0 | 0 | 0 | 25.260 | 0 | 0 | 0 |
| PROST2011410 | 0 | 0 | 0 | 0 | 0 | 3.995 | 0 |
| PROST2011577 | 0 | 0 | 0 | 5.843 | 0 | 0 | 0 |
| PROST2011660 | 0 | 0 | 0 | 16.676 | 0 | 0 | 0 |
| PROST2012007 | 0 | 0 | 0 | 0.806 | 4.101 | 0 | 0 |
| PROST2012016 | 0 | 0 | 0 | 0 | 0 | 22.126 | 0 |
| PROST2012745 | 0 | 0 | 0 | 0 | 0 | 7.793 | 0 |
| PROST2013121 | 0 | 0 | 0 | 7.634 | 0 | 0 | 0 |
| PROST2014862 | 0 | 0 | 0 | 0 | 0 | 16.010 | 0 |
| PROST2015332 | 0 | 0 | 0 | 27.441 | 0 | 2.597 | 0 |
| PROST2015900 | 0 | 0 | 0 | 16.676 | 0 | 0 | 0 |
| PROST2016351 | 0 | 0 | 0 | 0 | 0 | 8.925 | 0 |
| PROST2016918 | 0 | 0 | 0 | 4.511 | 22.963 | 0 | 0 |
| PROST2017128 | 0 | 0 | 0 | 0 | 0 | 8.119 | 0 |
| PROST2017203 | 0 | 0 | 0 | 9.217 | 0 | 0 | 0 |
| PROST2017529 | 0 | 0 | 0 | 1.802 | 0 | 0 | 0 |
| PROST2017692 | 23.099 | 0 | 0 | 0 | 0 | 0.742 | 0 |
| PROST2017910 | 0 | 0 | 0 | 0 | 37.758 | 0 | 0 |
| PROST2019164 | 0 | 25.881 | 0 | 0 | 0 | 0 | 0 |
| PROST2019253 | 0 | 0 | 0 | 0 | 0 | 1.693 | 0 |
| PROST2019296 | 0 | 79.832 | 0 | 0 | 0 | 0 | 0 |
| PUAEN1000057 | 0 | 0 | 0 | 1.457 | 0 | 0 | 0 |
| PUAEN1000065 | 0 | 0 | 0 | 2.377 | 2.420 | 0.675 | 0 |
| PUAEN1000147 | 0 | 0 | 0 | 0 | 0 | 9.395 | 0 |
| PUAEN1000164 | 0 | 0 | 3.070 | 0.848 | 0 | 0.401 | 0 |
| PUAEN1000322 | 0 | 0 | 0 | 0 | 9.239 | 0 | 0 |
| PUAEN2000152 | 0 | 0 | 0 | 0 | 0 | 5.980 | 0 |
| PUAEN2000374 | 0 | 0 | 0 | 0.909 | 1.156 | 0.322 | 0 |
| PUAEN2001586 | 0 | 0 | 0 | 2.027 | 0 | 0 | 0 |
| PUAEN2002489 | 0 | 0 | 0 | 9.262 | 0 | 0 | 0 |
| PUAEN2004400 | 0 | 0 | 0 | 0 | 0 | 7.259 | 0 |
| PUAEN2007044 | 0 | 0 | 0 | 5.087 | 0 | 1.444 | 0 |
| PUAEN2007898 | 0 | 0 | 0 | 0 | 39.038 | 0 | 0 |
| PUAEN2008515 | 0 | 0 | 0 | 13.781 | 0 | 0 | 0 |
| PUAEN2009174 | 0 | 0 | 0 | 0 | 0 | 2.856 | 0 |
| PUAEN2010824 | 0 | 0 | 0 | 11.155 | 0 | 26.393 | 0 |
| SALGL1000047 | 0 | 0 | 0 | 0.421 | 0 | 0.298 | 0 |
| SALGL1000157 | 0 | 0 | 0 | 0.185 | 0.940 | 0.655 | 0 |
| SKMUS1000022 | 0 | 0 | 0 | 0.886 | 0 | 0.839 | 0 |
| SKMUS1000084 | 0 | 0 | 0 | 2.186 | 0 | 1.552 | 0 |
| SKMUS1000110 | 0 | 0 | 0 | 5.229 | 0 | 7.423 | 0 |
| SKMUS1000177 | 0 | 0 | 0 | 0 | 0 | 2.379 | 0 |
| SKMUS1000186 | 0 | 0 | 0 | 0.855 | 0 | 2.022 | 0 |
| SKMUS2000020 | 0 | 25.852 | 0 | 0 | 0 | 0 | 0 |
| SKMUS2000074 | 0 | 0 | 0 | 0 | 18.480 | 0 | 0 |
| SKMUS2000117 | 0 | 0 | 0 | 0 | 30.703 | 0 | 0 |
| SKMUS2000243 | 0 | 0 | 0 | 7.160 | 0 | 0 | 0 |
| SKMUS2000271 | 0 | 0 | 0 | 9.055 | 0 | 0 | 0 |
| SKMUS2000343 | 0 | 0 | 0 | 10.937 | 0 | 7.763 | 0 |
| SKMUS2000361 | 0 | 7.506 | 0 | 0 | 0 | 1.077 | 0 |
| SKMUS2000380 | 0 | 0 | 0 | 1.539 | 0 | 0 | 0 |
| SKMUS2000484 | 0 | 0 | 0 | 13.710 | 6.345 | 3.539 | 0 |
| SKMUS2000873 | 0 | 0 | 0 | 0.390 | 0 | 0 | 0 |
| SKMUS2000902 | 0 | 0 | 0 | 0 | 0 | 5.450 | 0 |
| SKMUS2000931 | 0 | 0 | 0 | 1.931 | 0 | 0.548 | 0 |
| SKMUS2000954 | 0 | 0 | 0 | 1.206 | 0 | 3.425 | 0 |
| SKMUS2001008 | 0 | 0 | 0 | 0.336 | 0 | 0 | 0 |
| SKMUS2001129 | 0 | 0 | 0 | 3.609 | 0 | 5.124 | 0 |
| SKMUS2001201 | 0 | 0 | 0 | 0 | 0 | 1.795 | 0 |
| SKMUS2001254 | 0 | 0 | 0 | 0 | 0 | 12.511 | 0 |
| SKMUS2001402 | 0 | 0 | 0 | 2.992 | 0 | 0 | 0 |
| SKMUS2001412 | 0 | 0 | 0 | 0 | 0 | 12.511 | 0 |
| SKMUS2001454 | 0 | 0 | 0 | 0.958 | 1.220 | 2.380 | 0 |
| SKMUS2001501 | 0 | 0 | 0 | 3.094 | 0 | 0 | 0 |
| SKMUS2001528 | 0 | 0 | 0 | 0.891 | 13.606 | 0 | 0 |
| SKMUS2001543 | 0 | 0 | 0 | 23.206 | 0 | 0 | 0 |
| SKMUS2001634 | 0 | 0 | 0 | 0.929 | 4.731 | 1.319 | 0 |
| SKMUS2004908 | 0 | 0 | 0 | 9.325 | 0 | 6.619 | 0 |
| SKNMC1000168 | 0 | 0 | 6.458 | 0 | 0 | 0.844 | 0 |
| SKNMC1000251 | 0 | 0 | 0 | 4.978 | 0 | 0 | 0 |
| SKNMC1000264 | 0 | 36.814 | 0 | 0 | 0 | 5.285 | 0 |
| SKNMC2000065 | 0 | 0 | 0 | 3.831 | 0 | 1.088 | 0 |
| SKNMC2000097 | 0 | 0 | 6.874 | 1.898 | 0 | 0 | 0 |
| SKNMC2000224 | 0 | 0 | 0 | 0 | 0 | 6.311 | 0 |
| SKNMC2000305 | 0 | 0 | 0 | 2.500 | 0 | 10.647 | 0 |
| SKNMC2000322 | 0 | 0 | 0 | 2.005 | 0 | 0 | 0 |
| SKNMC2000635 | 5.623 | 1.259 | 2.767 | 0.127 | 0.648 | 0.181 | 0 |
| SKNMC2000649 | 0 | 0 | 0 | 1.295 | 3.297 | 0 | 0 |
| SKNMC2000698 | 0 | 0 | 0 | 0 | 0 | 2.081 | 0 |
| SKNMC2000877 | 0 | 0 | 0 | 0 | 0 | 3.582 | 0 |
| SKNMC2000966 | 0 | 0 | 0 | 0 | 0 | 8.159 | 0 |
| SKNMC2001113 | 0 | 0 | 0 | 6.928 | 0 | 0 | 0 |
| SKNMC2001503 | 0 | 0 | 0 | 0 | 0 | 6.249 | 0 |
| SKNMC2002402 | 0 | 0 | 0 | 0 | 0 | 7.428 | 0 |
| SKNSH1000002 | 0 | 10.089 | 0 | 1.020 | 0 | 1.448 | 0 |
| SKNSH1000101 | 0 | 0 | 0 | 0.912 | 2.321 | 0.647 | 0 |
| SKNSH2000101 | 0 | 0 | 0 | 4.677 | 0 | 6.640 | 0 |
| SKNSH2000151 | 0 | 0 | 0 | 15.445 | 0 | 5.482 | 0 |
| SKNSH2000163 | 0 | 0 | 0 | 7.532 | 0 | 0 | 0 |
| SKNSH2000250 | 0 | 0 | 0 | 8.000 | 0 | 8.517 | 0 |
| SKNSH2000319 | 0 | 0 | 0 | 0 | 25.913 | 0 | 0 |
| SKNSH2000347 | 0 | 0 | 0 | 0 | 0 | 2.261 | 0 |
| SKNSH2000482 | 0 | 0 | 0 | 0 | 0 | 9.821 | 0 |
| SKNSH2000819 | 0 | 0 | 0 | 1.767 | 8.994 | 12.539 | 0 |
| SKNSH2002325 | 0 | 0 | 0 | 5.419 | 0 | 0 | 0 |
| SKNSH2002768 | 0 | 0 | 0 | 1.680 | 0 | 0 | 0 |
| SKNSH2003064 | 0 | 0 | 0 | 0 | 28.287 | 0 | 0 |
| SKNSH2003528 | 0 | 0 | 0 | 0 | 0 | 3.059 | 0 |
| SKNSH2003633 | 0 | 0 | 0 | 0 | 0 | 6.759 | 0 |
| SKNSH2005061 | 0 | 0 | 0 | 3.610 | 0 | 1.708 | 0 |
| SKNSH2006234 | 0 | 0 | 0 | 0 | 0 | 3.527 | 0 |
| SMINT1000100 | 0 | 0 | 0 | 3.952 | 0 | 2.805 | 0 |
| SMINT1000117 | 0 | 0 | 10.143 | 1.867 | 0 | 1.325 | 0 |
| SMINT1000131 | 0 | 6.428 | 0 | 0 | 0 | 0 | 0 |
| SMINT1000192 | 0 | 0 | 22.965 | 0 | 0 | 0 | 0 |
| SMINT2000018 | 0 | 0 | 0 | 0 | 0 | 4.242 | 0 |
| SMINT2000073 | 0 | 0 | 0 | 6.157 | 0 | 0 | 0 |
| SMINT2000232 | 0 | 0 | 0 | 20.208 | 0 | 0 | 0 |
| SMINT2000277 | 0 | 12.725 | 0 | 0 | 0 | 0 | 0 |
| SMINT2000441 | 0 | 0 | 6.962 | 1.922 | 0 | 2.274 | 0 |
| SMINT2000454 | 0 | 0 | 0 | 6.343 | 0 | 0 | 0 |
| SMINT2000468 | 0 | 0 | 0 | 0 | 0 | 4.611 | 0 |
| SMINT2000602 | 0 | 0 | 0 | 0 | 0 | 1.108 | 0 |
| SMINT2000629 | 0 | 18.850 | 0 | 1.906 | 9.704 | 8.118 | 0 |
| SMINT2000659 | 0 | 0 | 0 | 0.197 | 0 | 0 | 0 |
| SMINT2000694 | 0 | 8.343 | 0 | 0.844 | 4.295 | 0 | 0 |
| SMINT2000933 | 0 | 7.153 | 0 | 0.723 | 0 | 0 | 0 |
| SMINT2001183 | 0 | 0 | 0 | 38.669 | 0 | 9.149 | 0 |
| SMINT2001818 | 0 | 0 | 0 | 0 | 3.387 | 0 | 0 |
| SMINT2002159 | 0 | 0 | 0 | 4.866 | 0 | 0 | 0 |
| SMINT2002689 | 0 | 0 | 0 | 10.012 | 0 | 1.184 | 0 |
| SMINT2003003 | 0 | 0 | 0 | 13.993 | 0 | 0 | 0 |
| SMINT2003150 | 0 | 0 | 0 | 0 | 0 | 22.212 | 0 |
| SMINT2003169 | 29.487 | 6.603 | 7.255 | 0 | 0 | 0.474 | 0 |
| SMINT2003340 | 0 | 0 | 0 | 0 | 0 | 2.960 | 0 |
| SMINT2004299 | 0 | 0 | 0 | 6.406 | 0 | 0 | 0 |
| SMINT2004350 | 0 | 0 | 0 | 0 | 0 | 26.332 | 0 |
| SMINT2004414 | 0 | 0 | 0 | 16.746 | 0 | 0 | 0 |
| SMINT2004583 | 0 | 0 | 0 | 0 | 0 | 3.903 | 0 |
| SMINT2004589 | 0 | 0 | 0 | 0 | 0 | 4.038 | 0 |
| SMINT2004872 | 0 | 0 | 0 | 6.004 | 0 | 0 | 0 |
| SMINT2004972 | 0 | 0 | 0 | 5.622 | 0 | 0 | 0 |
| SMINT2005368 | 0 | 0 | 0 | 1.667 | 4.243 | 0 | 0 |
| SMINT2005402 | 0 | 0 | 0 | 16.746 | 0 | 0 | 0 |
| SMINT2005956 | 0 | 18.474 | 0 | 0 | 0 | 0 | 0 |
| SMINT2007187 | 0 | 0 | 0 | 14.294 | 0 | 0 | 0 |
| SMINT2007647 | 0 | 0 | 0 | 0 | 0 | 22.212 | 0 |
| SMINT2007729 | 0 | 40.363 | 0 | 0 | 0 | 0 | 0 |
| SMINT2007792 | 0 | 0 | 0 | 5.932 | 0 | 0 | 0 |
| SMINT2008133 | 0 | 0 | 0 | 16.746 | 0 | 0 | 0 |
| SMINT2008672 | 0 | 0 | 0 | 19.291 | 0 | 0 | 0 |
| SMINT2008921 | 0 | 0 | 0 | 1.575 | 0 | 0 | 0 |
| SMINT2008960 | 0 | 4.802 | 0 | 0.971 | 0 | 3.447 | 0 |
| SMINT2009233 | 0 | 0 | 0 | 16.746 | 0 | 0 | 0 |
| SMINT2010084 | 0 | 0 | 0 | 4.878 | 0 | 0 | 0 |
| SMINT2010639 | 0 | 0 | 0 | 9.613 | 0 | 0 | 0 |
| SMINT2011656 | 0 | 0 | 0 | 16.746 | 0 | 0 | 0 |
| SMINT2012195 | 0 | 0 | 0 | 16.746 | 0 | 0 | 0 |
| SMINT2012291 | 0 | 0 | 0 | 6.546 | 0 | 0 | 0 |
| SMINT2012501 | 0 | 55.814 | 0 | 0 | 0 | 8.012 | 0 |
| SMINT2013032 | 0 | 0 | 0 | 0 | 0 | 12.051 | 0 |
| SMINT2013181 | 0 | 0 | 0 | 0 | 0 | 22.212 | 0 |
| SMINT2017884 | 0 | 0 | 0 | 16.746 | 0 | 0 | 0 |
| SPLEN1000106 | 0 | 0 | 0 | 4.956 | 0 | 0 | 0 |
| SPLEN1000116 | 0 | 3.474 | 0 | 1.054 | 0 | 0 | 0 |
| SPLEN1000165 | 0 | 0 | 0 | 0 | 0 | 10.057 | 0 |
| SPLEN1000166 | 0 | 0 | 0 | 0.802 | 0 | 2.278 | 0 |
| SPLEN2000098 | 0 | 0 | 0 | 17.098 | 0 | 36.410 | 0 |
| SPLEN2000255 | 0 | 0 | 0 | 2.180 | 5.549 | 0 | 0 |
| SPLEN2000267 | 0 | 0 | 0 | 0 | 0 | 5.882 | 0 |
| SPLEN2000341 | 0 | 0 | 0 | 0 | 0 | 13.644 | 0 |
| SPLEN2000348 | 0 | 0 | 0 | 0 | 0 | 2.819 | 0 |
| SPLEN2000443 | 0 | 0 | 0 | 0 | 0 | 22.258 | 0 |
| SPLEN2000505 | 0 | 0 | 0 | 0.598 | 0 | 4.671 | 0 |
| SPLEN2000698 | 0 | 0 | 0 | 0 | 0 | 2.137 | 0 |
| SPLEN2000874 | 15.278 | 0 | 0 | 0 | 1.761 | 0 | 0 |
| SPLEN2001141 | 0 | 0 | 0 | 0.670 | 0 | 0 | 0 |
| SPLEN2001157 | 0 | 0 | 0 | 1.952 | 0 | 2.771 | 0 |
| SPLEN2001599 | 0 | 0 | 0 | 0 | 0 | 7.190 | 0 |
| SPLEN2001761 | 0 | 0 | 0 | 0 | 0 | 21.443 | 0 |
| SPLEN2002007 | 0 | 0 | 0 | 0 | 0 | 19.229 | 0 |
| SPLEN2002335 | 0 | 7.107 | 7.809 | 1.437 | 0 | 3.061 | 0 |
| SPLEN2002463 | 0 | 0 | 0 | 16.124 | 0 | 0 | 0 |
| SPLEN2002467 | 0 | 0 | 0 | 0 | 0 | 6.565 | 0 |
| SPLEN2002493 | 0 | 0 | 0 | 22.112 | 0 | 5.232 | 0 |
| SPLEN2004343 | 0 | 0 | 0 | 12.769 | 0 | 0 | 0 |
| SPLEN2004555 | 0 | 0 | 0 | 0 | 3.846 | 1.072 | 0 |
| SPLEN2004662 | 0 | 0 | 0 | 13.369 | 0 | 0 | 0 |
| SPLEN2004773 | 0 | 0 | 0 | 0 | 7.715 | 3.585 | 0 |
| SPLEN2004844 | 0 | 80.138 | 0 | 0 | 0 | 0 | 0 |
| SPLEN2005429 | 0 | 0 | 0 | 5.201 | 0 | 0 | 0 |
| SPLEN2005783 | 0 | 0 | 0 | 9.254 | 0 | 0 | 0 |
| SPLEN2005806 | 0 | 0 | 0 | 0 | 0 | 0.616 | 0 |
| SPLEN2006133 | 0 | 6.658 | 0 | 1.347 | 3.428 | 0.956 | 0 |
| SPLEN2006143 | 0 | 0 | 0 | 1.588 | 0 | 0 | 0 |
| SPLEN2006305 | 0 | 0 | 4.871 | 1.345 | 0 | 0.636 | 0 |
| SPLEN2006374 | 0 | 0 | 0 | 7.552 | 0 | 1.532 | 0 |
| SPLEN2006671 | 0 | 0 | 0 | 0 | 67.502 | 0 | 0 |
| SPLEN2007498 | 0 | 0 | 0 | 1.857 | 9.456 | 2.637 | 0 |
| SPLEN2007739 | 0 | 0 | 0 | 4.310 | 0 | 0 | 0 |
| SPLEN2008496 | 0 | 0 | 59.707 | 0 | 0 | 0 | 0 |
| SPLEN2009513 | 0 | 0 | 0 | 4.400 | 0 | 0 | 0 |
| SPLEN2010015 | 0 | 0 | 0 | 11.034 | 0 | 0 | 0 |
| SPLEN2010195 | 0 | 0 | 0 | 0.826 | 1.402 | 1.564 | 0 |
| SPLEN2010847 | 0 | 0 | 0 | 11.707 | 59.599 | 0 | 0 |
| SPLEN2010912 | 0 | 0 | 0 | 26.371 | 0 | 0 | 0 |
| SPLEN2010986 | 0 | 0 | 0 | 14.293 | 0 | 0 | 0 |
| SPLEN2011419 | 0 | 0 | 18.428 | 0 | 0 | 2.408 | 0 |
| SPLEN2011737 | 0 | 0 | 0 | 5.548 | 0 | 0 | 0 |
| SPLEN2011758 | 0 | 0 | 40.503 | 0 | 0 | 0 | 0 |
| SPLEN2012453 | 0 | 0 | 0 | 28.977 | 0 | 0 | 0 |
| SPLEN2012571 | 0 | 0 | 0 | 0 | 0 | 3.203 | 0 |
| SPLEN2012624 | 0 | 0 | 0 | 7.178 | 0 | 0 | 0 |
| SPLEN2013195 | 0 | 0 | 0 | 28.977 | 0 | 0 | 0 |
| SPLEN2013670 | 0 | 0 | 0 | 16.644 | 0 | 0 | 0 |
| SPLEN2014080 | 0 | 0 | 0 | 3.363 | 0 | 0 | 0 |
| SPLEN2014119 | 0 | 0 | 0 | 11.845 | 0 | 0 | 0 |
| SPLEN2014911 | 0 | 0 | 0 | 0.749 | 0 | 0 | 0 |
| SPLEN2015310 | 0 | 0 | 0 | 0.814 | 0 | 1.733 | 0 |
| SPLEN2015788 | 0 | 0 | 0 | 3.436 | 0 | 0 | 0 |
| SPLEN2015890 | 0 | 0 | 0 | 28.977 | 0 | 0 | 0 |
| SPLEN2016139 | 0 | 8.993 | 0 | 0.909 | 0 | 0 | 0 |
| SPLEN2016268 | 0 | 3.032 | 0 | 0.307 | 0 | 0.435 | 0 |
| SPLEN2016773 | 0 | 0 | 0 | 28.977 | 0 | 0 | 0 |
| SPLEN2016972 | 0 | 0 | 0 | 2.878 | 0 | 0 | 0 |
| SPLEN2017121 | 0 | 0 | 0 | 0 | 0 | 15.624 | 0 |
| SPLEN2017318 | 0 | 0 | 0 | 3.601 | 0 | 0 | 0 |
| SPLEN2017351 | 0 | 0 | 0 | 2.135 | 0 | 0 | 0 |
| SPLEN2017592 | 0 | 0 | 0 | 28.977 | 0 | 0 | 0 |
| SPLEN2017781 | 0 | 0 | 0 | 28.977 | 0 | 0 | 0 |
| SPLEN2017918 | 0 | 6.399 | 7.031 | 0 | 0 | 0 | 0 |
| SPLEN2019169 | 0 | 0 | 0 | 24.109 | 0 | 0 | 0 |
| SPLEN2019257 | 0 | 0 | 0 | 28.977 | 0 | 0 | 0 |
| SPLEN2019379 | 0 | 80.138 | 0 | 0 | 0 | 0 | 0 |
| SPLEN2019405 | 0 | 10.051 | 0 | 1.016 | 0 | 7.215 | 0 |
| SPLEN2019956 | 0 | 0 | 0 | 21.618 | 0 | 0 | 0 |
| SPLEN2020007 | 0 | 0 | 0 | 0 | 67.502 | 0 | 0 |
| SPLEN2020417 | 0 | 0 | 0 | 9.907 | 0 | 0 | 0 |
| SPLEN2024489 | 0 | 0 | 0 | 7.755 | 0 | 0 | 0 |
| SPLEN2025039 | 0 | 0 | 0 | 28.977 | 0 | 0 | 0 |
| SPLEN2027113 | 0 | 0 | 0 | 4.646 | 0 | 0 | 0 |
| SPLEN2028466 | 0 | 0 | 3.190 | 1.174 | 0 | 5.002 | 0 |
| SPLEN2029912 | 0 | 0 | 0 | 0 | 0 | 1.646 | 0 |
| SPLEN2030763 | 0 | 0 | 0 | 7.475 | 0 | 0 | 0 |
| SPLEN2031424 | 0 | 0 | 0 | 5.405 | 0 | 0 | 0 |
| SPLEN2031547 | 0 | 0 | 0 | 5.587 | 5.689 | 4.759 | 0 |
| SPLEN2034448 | 0 | 0 | 0 | 0 | 0 | 5.224 | 0 |
| SPLEN2036932 | 0 | 0 | 0 | 2.081 | 0 | 0 | 0 |
| SPLEN2037194 | 0 | 0 | 0 | 28.977 | 0 | 0 | 0 |
| SPLEN2038345 | 0 | 0 | 0 | 0 | 0 | 29.627 | 0 |
| SPLEN2039379 | 0 | 0 | 0 | 10.278 | 0 | 11.672 | 0 |
| SPLEN2040237 | 0 | 0 | 0 | 28.977 | 0 | 0 | 0 |
| SPLEN2042535 | 0 | 0 | 0 | 0 | 0 | 7.174 | 0 |
| STOMA2000289 | 0 | 0 | 0 | 5.801 | 9.844 | 5.490 | 0 |
| STOMA2000395 | 0 | 14.983 | 0 | 3.030 | 0 | 4.302 | 0 |
| STOMA2000396 | 0 | 0 | 0 | 3.658 | 0 | 0 | 0 |
| STOMA2000482 | 0 | 0 | 0 | 2.736 | 0 | 3.884 | 0 |
| STOMA2002052 | 0 | 0 | 0 | 3.948 | 0 | 5.604 | 0 |
| STOMA2002166 | 0 | 0 | 0 | 0.415 | 0 | 0.589 | 0 |
| STOMA2009289 | 0 | 0 | 0 | 4.072 | 0 | 0 | 0 |
| SYNOV1000124 | 0 | 0 | 0 | 1.184 | 4.020 | 11.209 | 0 |
| SYNOV2000820 | 0 | 0 | 0 | 24.760 | 0 | 0 | 0 |
| SYNOV2001033 | 0 | 0 | 0 | 0.426 | 2.166 | 0.604 | 0 |
| SYNOV2001144 | 0 | 0 | 0 | 0 | 0 | 1.425 | 0 |
| SYNOV2001239 | 0 | 2.202 | 0 | 0.445 | 3.401 | 0.316 | 0 |
| SYNOV2001262 | 0 | 14.644 | 0 | 1.481 | 0 | 2.102 | 0 |
| SYNOV2009172 | 0 | 0 | 0 | 1.108 | 1.880 | 0 | 0 |
| SYNOV2021953 | 0 | 0 | 0 | 6.793 | 0 | 0 | 0 |
| SYNOV4001153 | 0 | 0 | 0 | 14.816 | 0 | 2.337 | 0 |
| SYNOV4007671 | 0 | 0 | 0 | 0.520 | 2.649 | 0.739 | 0 |
| SYNOV4008245 | 0 | 0 | 0 | 6.557 | 0 | 0 | 0 |
| SYNOV4009575 | 0 | 0 | 0 | 0 | 0 | 4.828 | 0 |
| TBAES2001296 | 0 | 0 | 0 | 0 | 0 | 11.352 | 0 |
| TBAES2009387 | 0 | 0 | 0 | 1.518 | 0 | 0 | 0 |
| TCERX2000431 | 0 | 0 | 0 | 0 | 0 | 2.117 | 0 |
| TCERX2002644 | 0 | 0 | 0 | 0 | 0 | 3.457 | 0 |
| TCOLN1000180 | 0 | 17.184 | 0 | 1.738 | 8.846 | 4.934 | 0 |
| TESOP2000312 | 0 | 33.903 | 0 | 0 | 0 | 0 | 0 |
| TESOP2002273 | 0 | 0 | 0 | 2.881 | 14.666 | 0 | 0 |
| TESOP2002451 | 0 | 0 | 0 | 3.372 | 0 | 0 | 0 |
| TESOP2002950 | 0 | 0 | 0 | 9.399 | 0 | 0 | 0 |
| TESTI1000023 | 0 | 0 | 0 | 0.595 | 0 | 6.760 | 0 |
| TESTI1000070 | 0 | 0 | 0 | 0 | 0 | 3.638 | 0 |
| TESTI1000096 | 0 | 0 | 0 | 12.416 | 0 | 0 | 0 |
| TESTI1000168 | 0 | 0 | 0 | 0 | 0 | 6.315 | 0 |
| TESTI1000330 | 0 | 0 | 0 | 52.057 | 0 | 0 | 0 |
| TESTI2000100 | 0 | 0 | 0 | 0 | 0 | 39.041 | 0 |
| TESTI2000184 | 0 | 0 | 0 | 4.012 | 0 | 1.139 | 0 |
| TESTI2000272 | 0 | 0 | 0 | 6.872 | 0 | 0 | 0 |
| TESTI2000356 | 0 | 0 | 0 | 12.446 | 0 | 0 | 0 |
| TESTI2000598 | 0 | 0 | 0 | 3.565 | 0 | 5.061 | 0 |
| TESTI2000627 | 0 | 0 | 0 | 14.955 | 0 | 0 | 0 |
| TESTI2000909 | 0 | 91.480 | 0 | 0 | 0 | 0 | 0 |
| TESTI2000970 | 0 | 0 | 0 | 0 | 17.565 | 4.898 | 0 |
| TESTI2001099 | 0 | 0 | 3.779 | 0.696 | 0 | 0.987 | 0 |
| TESTI2001153 | 0 | 0 | 0 | 0 | 0 | 0.802 | 0 |
| TESTI2001269 | 0 | 0 | 0 | 1.162 | 1.972 | 1.100 | 0 |
| TESTI2001511 | 0 | 0 | 0 | 0 | 0 | 1.763 | 0 |
| TESTI2001613 | 0 | 0 | 0 | 9.696 | 0 | 0 | 0 |
| TESTI2001829 | 0 | 0 | 0 | 0.603 | 0 | 0 | 0 |
| TESTI2001862 | 0 | 0 | 0 | 3.753 | 0 | 0 | 0 |
| TESTI2001985 | 0 | 0 | 0 | 4.166 | 0 | 0 | 0 |
| TESTI2002365 | 0 | 0 | 0 | 0 | 0 | 1.100 | 0 |
| TESTI2002707 | 0 | 0 | 0 | 3.528 | 5.987 | 1.669 | 0 |
| TESTI2003005 | 0 | 0 | 0 | 2.156 | 0 | 0 | 0 |
| TESTI2003071 | 0 | 0 | 0 | 2.476 | 0 | 0 | 0 |
| TESTI2003127 | 0 | 0 | 0 | 0 | 0 | 10.759 | 0 |
| TESTI2003141 | 0 | 0 | 0 | 0 | 0 | 11.370 | 0 |
| TESTI2003280 | 0 | 0 | 0 | 8.734 | 29.644 | 0 | 0 |
| TESTI2003325 | 0 | 0 | 0 | 6.008 | 0 | 0 | 0 |
| TESTI2003533 | 0 | 0 | 0 | 0.615 | 0 | 0.874 | 0 |
| TESTI2003541 | 0 | 0 | 0 | 0 | 0 | 29.428 | 0 |
| TESTI2003625 | 0 | 0 | 0 | 0 | 0 | 7.712 | 0 |
| TESTI2004031 | 0 | 2.814 | 0 | 0.285 | 0 | 0 | 0 |
| TESTI2004080 | 0 | 34.254 | 0 | 0 | 0 | 0 | 0 |
| TESTI2004122 | 0 | 0 | 0 | 2.167 | 0 | 0 | 0 |
| TESTI2004153 | 0 | 0 | 0 | 6.158 | 0 | 0 | 0 |
| TESTI2004295 | 0 | 0 | 0 | 0 | 0 | 8.251 | 0 |
| TESTI2004737 | 0 | 0 | 13.660 | 2.514 | 0 | 0 | 0 |
| TESTI2004929 | 0 | 0 | 0 | 0 | 0 | 2.861 | 0 |
| TESTI2005072 | 0 | 0 | 0 | 3.282 | 0 | 0 | 0 |
| TESTI2005408 | 0 | 0 | 0 | 0 | 0 | 1.785 | 0 |
| TESTI2005742 | 0 | 0 | 0 | 0 | 0 | 20.548 | 0 |
| TESTI2005743 | 0 | 0 | 0 | 4.677 | 0 | 0 | 0 |
| TESTI2005759 | 58.629 | 0 | 0 | 0 | 0 | 0 | 0 |
| TESTI2005767 | 0 | 0 | 0 | 1.941 | 0 | 0 | 0 |
| TESTI2005784 | 0 | 0 | 0 | 0 | 0 | 2.997 | 0 |
| TESTI2005788 | 0 | 0 | 0 | 0 | 0 | 4.660 | 0 |
| TESTI2005908 | 0 | 0 | 0 | 1.118 | 17.069 | 1.587 | 0 |
| TESTI2005981 | 0 | 0 | 0 | 22.105 | 0 | 0 | 0 |
| TESTI2006051 | 0 | 0 | 0 | 0.301 | 0 | 0.427 | 0 |
| TESTI2006097 | 0 | 0 | 0 | 7.478 | 0 | 0 | 0 |
| TESTI2006111 | 0 | 0 | 0 | 14.633 | 0 | 0 | 0 |
| TESTI2006120 | 0 | 0 | 0 | 0 | 0 | 4.890 | 0 |
| TESTI2006210 | 0 | 0 | 66.287 | 0 | 0 | 0 | 0 |
| TESTI2006341 | 0 | 0 | 0 | 14.508 | 0 | 0 | 0 |
| TESTI2006383 | 0 | 0 | 0 | 0 | 0 | 4.084 | 0 |
| TESTI2006453 | 0 | 0 | 0 | 0.597 | 0 | 4.240 | 0 |
| TESTI2006588 | 0 | 0 | 0 | 2.305 | 3.912 | 0.545 | 0 |
| TESTI2006615 | 0 | 0 | 0 | 3.276 | 0 | 0 | 0 |
| TESTI2006748 | 0 | 0 | 0 | 4.883 | 0 | 0 | 0 |
| TESTI2006774 | 0 | 0 | 0 | 52.057 | 0 | 0 | 0 |
| TESTI2007163 | 0 | 0 | 0 | 52.057 | 0 | 0 | 0 |
| TESTI2007211 | 0 | 23.183 | 0 | 2.344 | 11.934 | 0 | 0 |
| TESTI2007311 | 0 | 0 | 0 | 2.731 | 0 | 3.876 | 0 |
| TESTI2007407 | 0 | 0 | 0 | 6.536 | 11.091 | 0 | 0 |
| TESTI2007998 | 0 | 0 | 0 | 0 | 0 | 1.593 | 0 |
| TESTI2008240 | 0 | 1.755 | 0 | 5.502 | 0 | 3.779 | 0 |
| TESTI2008847 | 0 | 0 | 0 | 0 | 0 | 43.525 | 0 |
| TESTI2009239 | 0 | 0 | 0 | 52.057 | 0 | 0 | 0 |
| TESTI2009388 | 0 | 0 | 0 | 14.231 | 0 | 0 | 0 |
| TESTI2009402 | 0 | 0 | 0 | 0 | 0 | 9.237 | 0 |
| TESTI2009474 | 0 | 0 | 0 | 0 | 0 | 2.036 | 0 |
| TESTI2009520 | 0 | 0 | 0 | 0.532 | 2.710 | 0.756 | 0 |
| TESTI2009683 | 0 | 0 | 0 | 0 | 0 | 60.652 | 0 |
| TESTI2009785 | 0 | 0 | 0 | 1.018 | 0 | 1.446 | 0 |
| TESTI2009987 | 0 | 0 | 0 | 10.862 | 0 | 10.280 | 0 |
| TESTI2010513 | 0 | 0 | 0 | 2.510 | 2.839 | 1.979 | 0 |
| TESTI2010617 | 0 | 0 | 0 | 0 | 0 | 7.017 | 0 |
| TESTI2011549 | 0 | 0 | 0 | 0 | 0 | 60.652 | 0 |
| TESTI2011605 | 0 | 50.596 | 0 | 0 | 0 | 0 | 0 |
| TESTI2012104 | 0 | 0 | 0 | 6.910 | 0 | 0 | 0 |
| TESTI2012289 | 0 | 0 | 0 | 6.126 | 0 | 0 | 0 |
| TESTI2012511 | 0 | 0 | 0 | 0 | 0 | 4.326 | 0 |
| TESTI2012778 | 5.792 | 0 | 4.275 | 0 | 0 | 0.186 | 0 |
| TESTI2013231 | 0 | 0 | 0 | 1.412 | 0 | 0 | 0 |
| TESTI2013295 | 0 | 0 | 0 | 1.890 | 0 | 0 | 0 |
| TESTI2014318 | 0 | 0 | 0 | 0 | 0 | 28.966 | 0 |
| TESTI2014838 | 0 | 0 | 0 | 0 | 0 | 1.335 | 0 |
| TESTI2015092 | 0 | 0 | 0 | 0 | 11.971 | 0 | 0 |
| TESTI2015213 | 0 | 0 | 3.958 | 0.729 | 0 | 0.517 | 0 |
| TESTI2015246 | 0 | 0 | 0 | 8.403 | 0 | 0 | 0 |
| TESTI2015626 | 0 | 4.617 | 2.536 | 0.467 | 0 | 0.331 | 0 |
| TESTI2015962 | 0 | 0 | 0 | 14.078 | 0 | 15.988 | 0 |
| TESTI2016583 | 0 | 0 | 0 | 12.766 | 0 | 0 | 0 |
| TESTI2016701 | 0 | 0 | 0 | 52.057 | 0 | 0 | 0 |
| TESTI2017035 | 0 | 0 | 0 | 29.776 | 0 | 0 | 0 |
| TESTI2017107 | 0 | 0 | 0 | 0 | 0 | 60.652 | 0 |
| TESTI2017954 | 0 | 0 | 0 | 0.470 | 0 | 0 | 0 |
| TESTI2018014 | 0 | 0 | 0 | 10.943 | 0 | 0 | 0 |
| TESTI2018462 | 0 | 0 | 0 | 0 | 0 | 5.695 | 0 |
| TESTI2018867 | 0 | 0 | 0 | 4.042 | 0 | 0 | 0 |
| TESTI2018997 | 0 | 0 | 0 | 0 | 0 | 2.099 | 0 |
| TESTI2019760 | 0 | 0 | 0 | 32.302 | 0 | 0 | 0 |
| TESTI2020840 | 0 | 0 | 0 | 11.599 | 0 | 0 | 0 |
| TESTI2021038 | 0 | 0 | 0 | 30.031 | 0 | 0 | 0 |
| TESTI2021124 | 0 | 0 | 0 | 0 | 0 | 5.759 | 0 |
| TESTI2021425 | 0 | 0 | 0 | 1.222 | 0 | 0 | 0 |
| TESTI2021531 | 0 | 0 | 0 | 11.875 | 0 | 16.859 | 0 |
| TESTI2021654 | 0 | 0 | 0 | 0 | 0 | 9.847 | 0 |
| TESTI2021851 | 0 | 0 | 0 | 0 | 0 | 19.064 | 0 |
| TESTI2023414 | 0 | 0 | 0 | 2.889 | 0 | 0 | 0 |
| TESTI2025422 | 0 | 0 | 0 | 1.762 | 0 | 0 | 0 |
| TESTI2025846 | 0 | 0 | 0 | 43.347 | 0 | 0 | 0 |
| TESTI2026116 | 0 | 0 | 0 | 10.586 | 0 | 0 | 0 |
| TESTI2026525 | 0 | 0 | 0 | 3.088 | 0 | 0 | 0 |
| TESTI2026647 | 0 | 0 | 0 | 0 | 0 | 23.811 | 0 |
| TESTI2026936 | 0 | 0 | 0 | 0 | 0 | 60.652 | 0 |
| TESTI2028296 | 0 | 0 | 0 | 1.750 | 17.820 | 0 | 0 |
| TESTI2028659 | 0 | 0 | 0 | 21.395 | 0 | 0 | 0 |
| TESTI2029227 | 0 | 0 | 0 | 0 | 0 | 11.962 | 0 |
| TESTI2033441 | 0 | 0 | 8.462 | 0 | 0 | 0 | 0 |
| TESTI2034916 | 0 | 0 | 0 | 10.791 | 0 | 0 | 0 |
| TESTI2034940 | 0 | 0 | 0 | 2.589 | 1.883 | 0 | 0 |
| TESTI2035003 | 0 | 0 | 0 | 52.057 | 0 | 0 | 0 |
| TESTI2035236 | 0 | 0 | 0 | 0 | 0 | 25.974 | 0 |
| TESTI2036650 | 0 | 0 | 0 | 0 | 0 | 60.652 | 0 |
| TESTI2036969 | 0 | 0 | 0 | 2.550 | 0 | 0 | 0 |
| TESTI2039177 | 0 | 0 | 0 | 5.883 | 0 | 0 | 0 |
| TESTI2043275 | 0 | 0 | 0 | 0 | 31.972 | 0 | 0 |
| TESTI2045155 | 0 | 0 | 0 | 0 | 0 | 11.606 | 0 |
| TESTI2046456 | 0 | 0 | 0 | 0.657 | 1.673 | 0.466 | 0 |
| TESTI2053723 | 0 | 0 | 0 | 6.426 | 0 | 4.561 | 0 |
| TESTI4000014 | 0 | 0 | 0 | 2.028 | 0 | 1.799 | 0 |
| TESTI4000349 | 0 | 0 | 0 | 36.899 | 0 | 0 | 0 |
| TESTI4000434 | 0 | 0 | 0 | 9.280 | 0 | 0 | 0 |
| TESTI4001467 | 0 | 38.859 | 0 | 0 | 0 | 0 | 0 |
| TESTI4001561 | 0 | 0 | 0 | 28.578 | 0 | 0 | 0 |
| TESTI4002072 | 0 | 0 | 0 | 11.850 | 0 | 3.364 | 0 |
| TESTI4002195 | 0 | 0 | 51.594 | 0 | 0 | 0 | 0 |
| TESTI4002202 | 0 | 0 | 0 | 7.059 | 0 | 0 | 0 |
| TESTI4002799 | 0 | 0 | 0 | 0.627 | 0 | 0 | 0 |
| TESTI4002988 | 0 | 0 | 0 | 15.392 | 0 | 21.851 | 0 |
| TESTI4003150 | 0 | 0 | 0 | 10.540 | 0 | 0 | 0 |
| TESTI4003602 | 0 | 0 | 0 | 18.431 | 0 | 0 | 0 |
| TESTI4003703 | 0 | 0 | 0 | 6.281 | 0 | 4.458 | 0 |
| TESTI4004626 | 0 | 0 | 0 | 11.685 | 0 | 0 | 0 |
| TESTI4005133 | 0 | 0 | 0 | 16.927 | 0 | 12.015 | 0 |
| TESTI4005399 | 0 | 0 | 0 | 11.068 | 0 | 15.713 | 0 |
| TESTI4007369 | 0 | 91.480 | 0 | 0 | 0 | 0 | 0 |
| TESTI4009454 | 0 | 0 | 0 | 0 | 29.045 | 8.099 | 0 |
| TESTI4010851 | 0 | 0 | 0 | 2.716 | 0 | 2.203 | 0 |
| TESTI4013441 | 4.916 | 1.101 | 1.210 | 0.223 | 0 | 0.316 | 0 |
| TESTI4013474 | 0 | 0 | 0 | 0 | 3.733 | 0 | 0 |
| TESTI4013675 | 0 | 0 | 0 | 14.015 | 0 | 0 | 0 |
| TESTI4013817 | 0 | 0 | 0 | 0 | 0 | 27.369 | 0 |
| TESTI4013894 | 0 | 0 | 0 | 19.881 | 0 | 14.112 | 0 |
| TESTI4014159 | 0 | 0 | 0 | 16.638 | 0 | 11.810 | 0 |
| TESTI4014306 | 0 | 0 | 0 | 52.057 | 0 | 0 | 0 |
| TESTI4014553 | 0 | 0 | 0 | 68.470 | 0 | 0 | 0 |
| TESTI4014694 | 0 | 0 | 0 | 0.791 | 0 | 0 | 0 |
| TESTI4017984 | 0 | 0 | 0 | 35.187 | 0 | 0 | 0 |
| TESTI4022158 | 0 | 0 | 0 | 9.473 | 0 | 0 | 0 |
| TESTI4024740 | 0 | 0 | 0 | 0 | 0 | 18.126 | 0 |
| TESTI4026390 | 0 | 0 | 0 | 52.057 | 0 | 0 | 0 |
| TESTI4032913 | 0 | 0 | 0 | 5.753 | 0 | 8.167 | 0 |
| TESTI4037156 | 0 | 0 | 12.804 | 0.982 | 0 | 1.394 | 0 |
| TESTI4037188 | 0 | 0 | 0 | 0 | 0 | 60.652 | 0 |
| TESTI4038099 | 0 | 0 | 0 | 15.656 | 0 | 0 | 0 |
| TESTI4038284 | 0 | 0 | 0 | 7.843 | 0 | 0 | 0 |
| TESTI4043140 | 0 | 0 | 0 | 0 | 10.019 | 0 | 0 |
| TESTI4043223 | 0 | 0 | 0 | 19.643 | 0 | 27.886 | 0 |
| TESTI4044704 | 0 | 0 | 0 | 7.235 | 0 | 0 | 0 |
| TESTI4046073 | 0 | 0 | 0 | 0 | 0 | 19.130 | 0 |
| TESTI4046819 | 0 | 0 | 0 | 14.013 | 0 | 0 | 0 |
| THYMU1000002 | 0 | 0 | 0 | 0 | 0 | 0.596 | 0 |
| THYMU1000016 | 0 | 2.712 | 0 | 0 | 0 | 0 | 0 |
| THYMU1000032 | 0 | 5.479 | 0 | 0 | 0 | 0 | 0 |
| THYMU1000041 | 0 | 0 | 0 | 3.375 | 0 | 2.396 | 0 |
| THYMU1000083 | 0 | 0 | 0 | 0 | 0 | 3.021 | 0 |
| THYMU1000103 | 0 | 0 | 0 | 0 | 0 | 7.106 | 0 |
| THYMU1000109 | 0 | 0 | 0 | 1.676 | 8.532 | 0 | 0 |
| THYMU1000144 | 0 | 0 | 0 | 6.426 | 0 | 3.909 | 0 |
| THYMU1000198 | 0 | 0 | 0 | 0 | 0 | 54.718 | 0 |
| THYMU1000331 | 0 | 0 | 0 | 32.302 | 0 | 0 | 0 |
| THYMU1000359 | 0 | 0 | 0 | 0 | 0 | 0.540 | 0 |
| THYMU1000374 | 0 | 0 | 0 | 2.126 | 0 | 0 | 0 |
| THYMU2000162 | 0 | 0 | 0 | 45.981 | 0 | 0 | 0 |
| THYMU2000382 | 0 | 4.254 | 0 | 0.430 | 0 | 0 | 0 |
| THYMU2000436 | 0 | 6.467 | 0 | 1.962 | 0 | 0 | 0 |
| THYMU2000489 | 0 | 0 | 0 | 0 | 0 | 54.718 | 0 |
| THYMU2000684 | 0 | 0 | 0 | 0 | 0 | 4.195 | 0 |
| THYMU2000946 | 0 | 10.155 | 0 | 1.027 | 0 | 1.458 | 0 |
| THYMU2001007 | 0 | 0 | 0 | 0 | 0 | 2.733 | 0 |
| THYMU2001839 | 0 | 0 | 0 | 0 | 0 | 15.764 | 0 |
| THYMU2002162 | 0 | 0 | 0 | 0 | 0 | 10.985 | 0 |
| THYMU2002583 | 0 | 0 | 3.997 | 2.575 | 0 | 0.522 | 0 |
| THYMU2002841 | 0 | 20.370 | 0 | 0 | 0 | 2.924 | 0 |
| THYMU2002983 | 0 | 21.005 | 0 | 0 | 0 | 0 | 0 |
| THYMU2003012 | 0 | 0 | 0 | 0.622 | 3.167 | 0.883 | 0 |
| THYMU2003046 | 0 | 0 | 0 | 1.364 | 0 | 0 | 0 |
| THYMU2003133 | 0 | 24.353 | 0 | 0 | 0 | 0 | 0 |
| THYMU2003419 | 0 | 0 | 0 | 2.495 | 0 | 2.024 | 0 |
| THYMU2003446 | 0 | 0 | 0 | 3.386 | 0 | 4.806 | 0 |
| THYMU2003542 | 0 | 15.168 | 0 | 0 | 0 | 0 | 0 |
| THYMU2003891 | 0 | 1.024 | 0 | 0.104 | 0 | 0 | 0 |
| THYMU2004152 | 0 | 6.969 | 0 | 0 | 3.588 | 0 | 0 |
| THYMU2004284 | 0 | 0 | 0 | 4.768 | 0 | 0 | 0 |
| THYMU2004344 | 0 | 0 | 0 | 0 | 0 | 2.574 | 0 |
| THYMU2004410 | 0 | 0 | 0 | 5.440 | 0 | 0 | 0 |
| THYMU2004508 | 0 | 0 | 0 | 45.981 | 0 | 0 | 0 |
| THYMU2004733 | 0 | 0 | 0 | 3.975 | 0 | 0 | 0 |
| THYMU2005574 | 0 | 0 | 0 | 45.981 | 0 | 0 | 0 |
| THYMU2005807 | 0 | 0 | 0 | 45.981 | 0 | 0 | 0 |
| THYMU2006505 | 0 | 9.582 | 0 | 1.938 | 0 | 4.126 | 0 |
| THYMU2006813 | 0 | 22.213 | 0 | 4.492 | 5.718 | 0 | 0 |
| THYMU2007036 | 0 | 0 | 0 | 0 | 0 | 7.780 | 0 |
| THYMU2007065 | 0 | 0 | 0 | 2.878 | 0 | 4.086 | 0 |
| THYMU2007415 | 0 | 16.985 | 0 | 1.718 | 0 | 0 | 0 |
| THYMU2007467 | 0 | 0 | 0 | 5.734 | 0 | 0 | 0 |
| THYMU2007532 | 0 | 0 | 0 | 0 | 56.448 | 0 | 0 |
| THYMU2007694 | 0 | 0 | 0 | 0 | 0 | 20.890 | 0 |
| THYMU2007729 | 0 | 0 | 0 | 3.469 | 0 | 0 | 0 |
| THYMU2007886 | 0 | 0 | 0 | 0 | 5.003 | 0 | 0 |
| THYMU2008036 | 0 | 0 | 0 | 0 | 0 | 54.718 | 0 |
| THYMU2008321 | 0 | 0 | 0 | 2.052 | 0 | 5.826 | 0 |
| THYMU2009592 | 0 | 0 | 0 | 19.608 | 0 | 0 | 0 |
| THYMU2009658 | 0 | 2.459 | 0 | 0.746 | 0 | 0.353 | 0 |
| THYMU2010041 | 0 | 0 | 0 | 0 | 0 | 18.787 | 0 |
| THYMU2010448 | 0 | 0 | 0 | 0 | 0 | 5.335 | 0 |
| THYMU2010779 | 0 | 0 | 0 | 29.854 | 0 | 0 | 0 |
| THYMU2010816 | 0 | 0 | 0 | 0 | 0 | 26.271 | 0 |
| THYMU2011063 | 0 | 0 | 81.157 | 0 | 0 | 5.302 | 0 |
| THYMU2011482 | 0 | 0 | 0 | 0 | 22.183 | 0 | 0 |
| THYMU2011939 | 0 | 0 | 0 | 45.981 | 0 | 0 | 0 |
| THYMU2012024 | 0 | 0 | 0 | 2.115 | 0 | 0 | 0 |
| THYMU2012690 | 0 | 0 | 0 | 0 | 0 | 3.915 | 0 |
| THYMU2012826 | 0 | 0 | 0 | 0 | 0 | 22.315 | 0 |
| THYMU2013136 | 0 | 0 | 0 | 0.581 | 0 | 0.824 | 0 |
| THYMU2013916 | 0 | 0 | 0 | 1.574 | 0 | 2.235 | 0 |
| THYMU2014323 | 0 | 0 | 0 | 0 | 0 | 54.718 | 0 |
| THYMU2014353 | 0 | 0 | 0 | 0 | 0 | 37.663 | 0 |
| THYMU2015441 | 0 | 0 | 0 | 0 | 81.250 | 0 | 0 |
| THYMU2016523 | 0 | 0 | 0 | 23.416 | 0 | 0 | 0 |
| THYMU2016840 | 0 | 0 | 0 | 0 | 81.250 | 0 | 0 |
| THYMU2017601 | 0 | 0 | 0 | 5.012 | 0 | 0 | 0 |
| THYMU2017878 | 0 | 0 | 0 | 45.981 | 0 | 0 | 0 |
| THYMU2018126 | 0 | 0 | 0 | 0 | 0 | 0.733 | 0 |
| THYMU2019021 | 0 | 0 | 0 | 0 | 0 | 4.897 | 0 |
| THYMU2019364 | 0 | 0 | 0 | 29.854 | 0 | 0 | 0 |
| THYMU2020959 | 0 | 0 | 0 | 7.868 | 0 | 0 | 0 |
| THYMU2023264 | 0 | 0 | 0 | 0 | 0 | 54.718 | 0 |
| THYMU2023967 | 0 | 0 | 0 | 43.363 | 0 | 0 | 0 |
| THYMU2024071 | 0 | 0 | 0 | 0 | 0 | 33.209 | 0 |
| THYMU2025325 | 0 | 0 | 0 | 0 | 0 | 13.123 | 0 |
| THYMU2027125 | 5.611 | 0 | 0 | 2.287 | 2.587 | 0.902 | 0 |
| THYMU2029578 | 0 | 48.262 | 0 | 4.880 | 0 | 0 | 0 |
| THYMU2030264 | 0 | 0 | 0 | 45.981 | 0 | 0 | 0 |
| THYMU2034917 | 0 | 0 | 0 | 13.791 | 0 | 0 | 0 |
| THYMU2035735 | 0 | 0 | 0 | 0.936 | 0 | 0 | 0 |
| THYMU2037226 | 0 | 0 | 0 | 0 | 0 | 17.265 | 0 |
| THYMU2038220 | 0 | 0 | 0 | 0 | 0 | 20.354 | 0 |
| THYMU2039780 | 0 | 0 | 0 | 45.981 | 0 | 0 | 0 |
| THYMU2040427 | 0 | 0 | 0 | 45.981 | 0 | 0 | 0 |
| THYMU2040925 | 0 | 0 | 0 | 45.981 | 0 | 0 | 0 |
| THYMU3000360 | 0 | 0 | 0 | 27.904 | 0 | 0 | 0 |
| THYMU3000420 | 0 | 0 | 0 | 27.904 | 0 | 0 | 0 |
| THYMU3000776 | 0 | 0 | 0 | 22.150 | 0 | 0 | 0 |
| THYMU3001083 | 0 | 0 | 0 | 45.981 | 0 | 0 | 0 |
| THYMU3001379 | 0 | 0 | 0 | 0 | 0 | 25.376 | 0 |
| THYMU3003309 | 0 | 0 | 0 | 20.635 | 0 | 0 | 0 |
| THYMU3004835 | 0 | 0 | 0 | 0 | 0 | 19.793 | 0 |
| THYMU3005629 | 0 | 0 | 0 | 0 | 0 | 15.225 | 0 |
| THYMU3006485 | 0 | 0 | 0 | 45.981 | 0 | 0 | 0 |
| THYMU3007308 | 0 | 0 | 0 | 27.684 | 0 | 0 | 0 |
| THYMU3007423 | 0 | 0 | 0 | 13.957 | 0 | 0 | 0 |
| THYMU3008105 | 0 | 0 | 0 | 0 | 0 | 20.406 | 0 |
| THYMU3008171 | 0 | 0 | 0 | 14.316 | 0 | 0 | 0 |
| THYMU3013386 | 0 | 0 | 0 | 1.063 | 2.705 | 0 | 0 |
| THYMU3015571 | 0 | 73.725 | 0 | 0 | 0 | 0 | 0 |
| THYMU3015759 | 0 | 0 | 8.683 | 0.799 | 0 | 0 | 0 |
| THYMU3019476 | 0 | 0 | 0 | 0 | 0 | 54.718 | 0 |
| THYMU3021586 | 0 | 0 | 0 | 0 | 0 | 4.162 | 0 |
| THYMU3026350 | 0 | 0 | 0 | 0 | 0 | 14.400 | 0 |
| THYMU3032798 | 0 | 0 | 0 | 10.979 | 0 | 1.948 | 0 |
| THYMU3032867 | 0 | 0 | 0 | 9.135 | 0 | 0 | 0 |
| THYMU3033626 | 0 | 0 | 0 | 7.979 | 0 | 0 | 0 |
| THYMU3034671 | 0 | 0 | 0 | 5.078 | 0 | 0 | 0 |
| THYMU3038214 | 0 | 0 | 0 | 27.904 | 0 | 0 | 0 |
| THYMU3041428 | 0 | 0 | 0 | 0 | 0 | 0 | 96.263 |
| THYMU3046350 | 0 | 0 | 0 | 0 | 0 | 6.960 | 0 |
| TKIDN1000001 | 0 | 0 | 0 | 7.899 | 0 | 0 | 0 |
| TKIDN1000164 | 0 | 0 | 0 | 4.388 | 0 | 6.230 | 0 |
| TKIDN1000192 | 0 | 0 | 0 | 0 | 0 | 5.567 | 0 |
| TKIDN2000246 | 0 | 0 | 0 | 0.864 | 12.091 | 2.759 | 0 |
| TKIDN2002318 | 0 | 0 | 0 | 0 | 19.380 | 16.212 | 0 |
| TKIDN2002738 | 0 | 0 | 0 | 0.298 | 0 | 0.845 | 0 |
| TKIDN2003601 | 0 | 0 | 0 | 13.531 | 0 | 0 | 0 |
| TKIDN2005487 | 0 | 0 | 0 | 0.510 | 0 | 0 | 0 |
| TKIDN2006761 | 0 | 0 | 0 | 0 | 0 | 21.396 | 0 |
| TKIDN2007605 | 0 | 0 | 0 | 8.866 | 0 | 0 | 0 |
| TKIDN2007828 | 0 | 0 | 0 | 0 | 0 | 6.723 | 0 |
| TKIDN2008176 | 0 | 0 | 0 | 0 | 0 | 21.396 | 0 |
| TKIDN2009641 | 0 | 0 | 0 | 4.104 | 0 | 5.826 | 0 |
| TKIDN2011289 | 0 | 0 | 0 | 0 | 0 | 6.023 | 0 |
| TKIDN2015071 | 0 | 0 | 0 | 0 | 0 | 13.070 | 0 |
| TKIDN2015285 | 0 | 0 | 0 | 0 | 0 | 10.003 | 0 |
| TKIDN2015423 | 0 | 0 | 0 | 13.555 | 0 | 16.678 | 0 |
| TKIDN2015788 | 0 | 0 | 0 | 0 | 9.505 | 5.301 | 0 |
| TKIDN2016846 | 0 | 0 | 0 | 16.089 | 0 | 0 | 0 |
| TKIDN2018926 | 0 | 0 | 0 | 0 | 0 | 21.396 | 0 |
| TLIVE2002046 | 0 | 0 | 0 | 7.729 | 0 | 10.972 | 0 |
| TLIVE2004320 | 0 | 0 | 0 | 0 | 0 | 12.783 | 0 |
| TLIVE2007736 | 0 | 0 | 0 | 9.358 | 0 | 0 | 0 |
| TLUNG2000179 | 0 | 0 | 0 | 3.316 | 0 | 0 | 0 |
| TRACH1000011 | 0 | 0 | 0 | 5.224 | 0 | 0 | 0 |
| TRACH1000030 | 0 | 0 | 0 | 8.324 | 0 | 1.390 | 0 |
| TRACH1000181 | 0 | 0 | 0 | 0 | 0 | 4.774 | 0 |
| TRACH1000193 | 0 | 0 | 0 | 15.417 | 0 | 0 | 0 |
| TRACH1000205 | 0 | 0 | 0 | 8.380 | 0 | 3.965 | 0 |
| TRACH2000045 | 0 | 0 | 0 | 19.517 | 0 | 8.312 | 0 |
| TRACH2000047 | 0 | 0 | 0 | 26.609 | 0 | 0 | 0 |
| TRACH2000079 | 0 | 0 | 0 | 0.769 | 0 | 3.275 | 0 |
| TRACH2000248 | 0 | 0 | 0 | 2.971 | 0 | 0.703 | 0 |
| TRACH2000321 | 0 | 0 | 0 | 1.744 | 1.775 | 0.495 | 0 |
| TRACH2000393 | 0 | 0 | 0 | 24.151 | 0 | 0 | 0 |
| TRACH2000420 | 0 | 0 | 0 | 0 | 0 | 3.379 | 0 |
| TRACH2000461 | 0 | 0 | 0 | 2.434 | 0 | 6.910 | 0 |
| TRACH2000472 | 0 | 0 | 0 | 0 | 0 | 0.860 | 0 |
| TRACH2000660 | 0 | 0 | 0 | 27.005 | 0 | 0 | 0 |
| TRACH2000677 | 0 | 0 | 0 | 40.018 | 0 | 28.405 | 0 |
| TRACH2000702 | 0 | 0 | 0 | 5.573 | 0 | 0 | 0 |
| TRACH2000780 | 0 | 0 | 0 | 0.620 | 0 | 2.642 | 0 |
| TRACH2000873 | 0 | 0 | 0 | 0 | 0 | 47.355 | 0 |
| TRACH2000920 | 0 | 0 | 0 | 4.706 | 0 | 0 | 0 |
| TRACH2000926 | 0 | 0 | 0 | 1.980 | 0 | 0 | 0 |
| TRACH2000959 | 0 | 0 | 0 | 0.347 | 0 | 0.492 | 92.224 |
| TRACH2000972 | 0 | 4.160 | 0 | 0.421 | 8.566 | 0.597 | 0 |
| TRACH2001021 | 0 | 5.878 | 0 | 0 | 1.513 | 0 | 0 |
| TRACH2001109 | 0 | 0 | 0 | 2.080 | 6.050 | 13.074 | 0 |
| TRACH2001249 | 0 | 0 | 0 | 0 | 0 | 9.240 | 0 |
| TRACH2001289 | 0 | 0 | 0 | 0.241 | 1.228 | 0.685 | 0 |
| TRACH2001314 | 0 | 0 | 0 | 3.892 | 0 | 1.842 | 0 |
| TRACH2001341 | 0 | 44.736 | 0 | 0 | 0 | 0 | 0 |
| TRACH2001432 | 0 | 7.808 | 0 | 0 | 8.039 | 1.121 | 0 |
| TRACH2001478 | 0 | 0 | 0 | 1.648 | 2.098 | 2.340 | 0 |
| TRACH2001523 | 0 | 0 | 0 | 2.413 | 0 | 0 | 0 |
| TRACH2001549 | 0 | 0 | 0 | 0 | 0 | 4.260 | 0 |
| TRACH2001607 | 0 | 0 | 23.236 | 3.564 | 0 | 2.024 | 0 |
| TRACH2001612 | 0 | 28.037 | 0 | 2.835 | 0 | 0 | 0 |
| TRACH2001646 | 0 | 0 | 0 | 0 | 0 | 22.786 | 0 |
| TRACH2001684 | 0 | 0 | 0 | 0 | 0 | 17.948 | 0 |
| TRACH2001810 | 0 | 0 | 0 | 1.102 | 2.806 | 0.782 | 0 |
| TRACH2002537 | 0 | 0 | 0 | 1.975 | 3.351 | 0 | 0 |
| TRACH2002664 | 0 | 42.726 | 0 | 1.080 | 0 | 0 | 0 |
| TRACH2002803 | 0 | 0 | 0 | 2.958 | 0 | 4.199 | 0 |
| TRACH2003272 | 0 | 0 | 0 | 2.630 | 0 | 11.200 | 0 |
| TRACH2003323 | 0 | 0 | 0 | 0 | 0 | 7.173 | 0 |
| TRACH2003347 | 0 | 0 | 0 | 0 | 0 | 1.601 | 0 |
| TRACH2003484 | 0 | 0 | 0 | 38.787 | 0 | 0 | 0 |
| TRACH2004399 | 0 | 0 | 0 | 42.079 | 0 | 0 | 0 |
| TRACH2004458 | 0 | 0 | 0 | 0 | 76.336 | 0 | 0 |
| TRACH2005800 | 0 | 0 | 0 | 0 | 0 | 1.212 | 0 |
| TRACH2007399 | 0 | 0 | 0 | 0.334 | 0 | 0 | 0 |
| TRACH2008113 | 0 | 0 | 0 | 13.211 | 0 | 0 | 0 |
| TRACH2008300 | 0 | 0 | 0 | 3.615 | 6.135 | 11.974 | 0 |
| TRACH2008472 | 0 | 0 | 0 | 1.114 | 0 | 0 | 0 |
| TRACH2008716 | 0 | 0 | 0 | 0 | 0 | 5.111 | 0 |
| TRACH2008891 | 0 | 0 | 0 | 15.398 | 0 | 0 | 0 |
| TRACH2009006 | 0 | 0 | 0 | 0 | 0 | 3.536 | 0 |
| TRACH2010824 | 0 | 0 | 0 | 0 | 64.903 | 0 | 0 |
| TRACH2011113 | 0 | 0 | 0 | 3.351 | 0 | 0 | 0 |
| TRACH2011894 | 0 | 0 | 0 | 0 | 0 | 8.960 | 0 |
| TRACH2012376 | 0 | 18.838 | 0 | 0 | 0 | 0 | 0 |
| TRACH2012811 | 0 | 0 | 0 | 5.533 | 28.170 | 0 | 0 |
| TRACH2013552 | 0 | 0 | 0 | 7.374 | 0 | 0 | 0 |
| TRACH2014077 | 0 | 0 | 0 | 2.414 | 0 | 0 | 0 |
| TRACH2014124 | 0 | 0 | 0 | 1.465 | 0 | 4.160 | 0 |
| TRACH2014997 | 0 | 0 | 0 | 12.555 | 0 | 0 | 0 |
| TRACH2015823 | 0 | 0 | 0 | 3.105 | 0 | 0 | 0 |
| TRACH2016533 | 0 | 0 | 0 | 10.173 | 0 | 0 | 0 |
| TRACH2018950 | 0 | 0 | 0 | 5.331 | 0 | 0 | 0 |
| TRACH2025344 | 0 | 69.123 | 0 | 0 | 0 | 19.846 | 0 |
| TRACH2025535 | 0 | 0 | 4.477 | 2.472 | 0 | 0 | 0 |
| TRACH2025911 | 0 | 0 | 0 | 0 | 0 | 47.355 | 0 |
| TRACH3002192 | 0 | 0 | 0 | 3.541 | 2.253 | 1.885 | 0 |
| TRACH3002752 | 0 | 35.850 | 0 | 3.625 | 0 | 0 | 0 |
| TRACH3003547 | 0 | 0 | 0 | 3.002 | 15.280 | 0 | 0 |
| TRACH3003872 | 0 | 0 | 0 | 0 | 0 | 2.765 | 0 |
| TRACH3004068 | 0 | 0 | 0 | 0 | 5.150 | 1.436 | 0 |
| TRACH3004721 | 0 | 0 | 0 | 4.127 | 0 | 5.858 | 0 |
| TRACH3006038 | 0 | 0 | 0 | 38.787 | 0 | 0 | 0 |
| TRACH3006412 | 0 | 0 | 0 | 38.787 | 0 | 0 | 0 |
| TRACH3006717 | 0 | 0 | 0 | 10.418 | 0 | 3.697 | 0 |
| TRACH3007479 | 0 | 0 | 0 | 0 | 0 | 1.084 | 0 |
| TRACH3007625 | 0 | 0 | 0 | 2.503 | 0 | 3.553 | 0 |
| TRACH3007995 | 0 | 0 | 0 | 38.787 | 0 | 0 | 0 |
| TRACH3008093 | 0 | 0 | 0 | 3.477 | 0 | 0 | 0 |
| TRACH3008632 | 0 | 0 | 0 | 11.995 | 0 | 0 | 0 |
| TRACH3009001 | 0 | 0 | 0 | 0 | 0 | 23.608 | 0 |
| TRACH3009956 | 0 | 0 | 0 | 55.894 | 0 | 0 | 0 |
| TRACH3013558 | 0 | 0 | 0 | 38.787 | 0 | 0 | 0 |
| TRACH3016805 | 0 | 0 | 0 | 3.196 | 0 | 0 | 0 |
| TRACH3019290 | 0 | 0 | 0 | 0 | 0 | 27.871 | 0 |
| TRACH3036932 | 0 | 0 | 0 | 10.405 | 0 | 0 | 0 |
| TRACH3036942 | 0 | 0 | 0 | 0 | 0 | 0 | 92.165 |
| TRACH3037067 | 0 | 0 | 0 | 0 | 0 | 1.620 | 0 |
| TRACH3038399 | 0 | 0 | 0 | 8.826 | 0 | 0 | 0 |
| TSTOM2000553 | 0 | 11.832 | 0 | 0 | 0 | 0 | 0 |
| TUTER2000904 | 0 | 0 | 0 | 5.944 | 0 | 2.813 | 0 |
| TUTER2002323 | 0 | 0 | 0 | 2.312 | 0 | 0 | 0 |
| UMVEN1000122 | 0 | 6.860 | 0 | 0 | 0 | 0 | 0 |
| UMVEN2000133 | 0 | 0 | 0 | 0 | 0 | 0.591 | 0 |
| UMVEN2000152 | 0 | 0 | 0 | 0.559 | 0 | 0 | 0 |
| UMVEN2000453 | 0 | 0 | 0 | 0.371 | 0 | 1.052 | 0 |
| UTERU1000182 | 0 | 0 | 0 | 0.576 | 2.931 | 0.817 | 0 |
| UTERU1000384 | 0 | 0 | 0 | 5.059 | 0 | 0 | 0 |
| UTERU2000023 | 0 | 0 | 0 | 29.063 | 0 | 10.315 | 0 |
| UTERU2000074 | 0 | 0 | 0 | 37.308 | 0 | 0 | 0 |
| UTERU2000095 | 0 | 2.905 | 3.192 | 0.881 | 0 | 2.919 | 0 |
| UTERU2000263 | 0 | 0 | 0 | 0 | 1.851 | 0 | 0 |
| UTERU2000424 | 0 | 5.961 | 0 | 3.014 | 3.069 | 0.856 | 0 |
| UTERU2001607 | 0 | 0 | 0 | 2.094 | 0 | 0 | 0 |
| UTERU2002410 | 0 | 0 | 0 | 0.417 | 0 | 0.592 | 0 |
| UTERU2002662 | 0 | 0 | 0 | 0 | 0 | 1.793 | 0 |
| UTERU2002826 | 0 | 0 | 0 | 0 | 13.337 | 0 | 0 |
| UTERU2003057 | 0 | 0 | 0 | 1.836 | 0 | 0 | 0 |
| UTERU2003456 | 0 | 0 | 0 | 0 | 0 | 10.897 | 0 |
| UTERU2003704 | 0 | 0 | 0 | 12.217 | 0 | 17.343 | 0 |
| UTERU2004197 | 0 | 0 | 0 | 1.427 | 0 | 4.052 | 0 |
| UTERU2004664 | 0 | 0 | 26.172 | 0 | 0 | 1.710 | 0 |
| UTERU2004861 | 0 | 0 | 0 | 0 | 0 | 23.838 | 0 |
| UTERU2004929 | 0 | 0 | 0 | 0 | 0 | 11.697 | 0 |
| UTERU2005354 | 0 | 0 | 0 | 4.658 | 0 | 0 | 0 |
| UTERU2005446 | 0 | 0 | 0 | 0 | 75.184 | 0 | 0 |
| UTERU2005449 | 0 | 0 | 0 | 0 | 0 | 16.496 | 0 |
| UTERU2005593 | 0 | 0 | 0 | 1.593 | 0 | 3.393 | 0 |
| UTERU2005621 | 0 | 0 | 0 | 0 | 8.145 | 0 | 0 |
| UTERU2006115 | 0 | 0 | 0 | 5.563 | 0 | 0 | 0 |
| UTERU2006593 | 0 | 0 | 0 | 1.048 | 0 | 5.951 | 0 |
| UTERU2007924 | 0 | 0 | 0 | 0 | 9.664 | 0 | 0 |
| UTERU2008040 | 0 | 0 | 0 | 8.353 | 0 | 11.858 | 0 |
| UTERU2008085 | 2.831 | 0 | 0.696 | 0.961 | 0.979 | 0.819 | 0 |
| UTERU2008302 | 0 | 0 | 0 | 0 | 0 | 4.038 | 0 |
| UTERU2008938 | 0 | 0 | 0 | 0 | 0 | 4.959 | 0 |
| UTERU2009335 | 0 | 0 | 0 | 0 | 0 | 3.056 | 0 |
| UTERU2009435 | 0 | 0 | 0 | 0 | 0 | 5.388 | 0 |
| UTERU2009510 | 0 | 0 | 0 | 0 | 54.308 | 0 | 0 |
| UTERU2010226 | 0 | 0 | 0 | 5.599 | 0 | 0 | 0 |
| UTERU2010417 | 0 | 2.213 | 0 | 0.224 | 0 | 1.271 | 0 |
| UTERU2010747 | 0 | 0 | 0 | 37.308 | 0 | 0 | 0 |
| UTERU2011220 | 0 | 0 | 0 | 1.389 | 0 | 0 | 0 |
| UTERU2011621 | 0 | 0 | 0 | 28.191 | 0 | 0 | 0 |
| UTERU2011906 | 0 | 0 | 0 | 0 | 0 | 13.742 | 0 |
| UTERU2012230 | 0 | 0 | 0 | 9.992 | 0 | 1.773 | 0 |
| UTERU2012286 | 0 | 0 | 0 | 1.798 | 0 | 0 | 0 |
| UTERU2012407 | 0 | 0 | 0 | 0 | 0 | 24.800 | 0 |
| UTERU2012526 | 0 | 0 | 0 | 0 | 66.732 | 0 | 0 |
| UTERU2012856 | 0 | 0 | 0 | 2.504 | 0 | 7.110 | 0 |
| UTERU2014024 | 0 | 0 | 0 | 9.198 | 0 | 0 | 0 |
| UTERU2014167 | 0 | 0 | 0 | 0 | 0 | 0.918 | 0 |
| UTERU2014601 | 0 | 0 | 0 | 4.916 | 0 | 13.956 | 0 |
| UTERU2014898 | 0 | 0 | 0 | 2.160 | 0 | 0 | 0 |
| UTERU2016799 | 0 | 20.409 | 0 | 8.255 | 0 | 0 | 0 |
| UTERU2016822 | 0 | 0 | 0 | 0 | 0 | 4.050 | 0 |
| UTERU2017761 | 0 | 0 | 0 | 37.308 | 0 | 0 | 0 |
| UTERU2018200 | 0 | 0 | 0 | 17.226 | 0 | 0 | 0 |
| UTERU2018566 | 0 | 0 | 0 | 12.651 | 0 | 0 | 0 |
| UTERU2018712 | 0 | 0 | 0 | 0 | 0 | 45.794 | 0 |
| UTERU2018884 | 0 | 0 | 0 | 1.100 | 0 | 1.561 | 0 |
| UTERU2019005 | 0 | 0 | 0 | 4.584 | 0 | 6.508 | 0 |
| UTERU2019096 | 0 | 0 | 0 | 4.905 | 8.323 | 2.321 | 0 |
| UTERU2021820 | 0 | 0 | 0 | 17.694 | 0 | 0 | 0 |
| UTERU2024969 | 0 | 22.540 | 0 | 0 | 0 | 0 | 0 |
| UTERU2025301 | 0 | 0 | 0 | 3.085 | 0 | 0 | 0 |
| UTERU3000226 | 0 | 0 | 0 | 37.308 | 0 | 0 | 0 |
| UTERU3000298 | 0 | 0 | 0 | 13.135 | 0 | 13.985 | 0 |
| UTERU3000670 | 0 | 0 | 0 | 16.553 | 0 | 0 | 0 |
| UTERU3000727 | 0 | 0 | 0 | 32.047 | 0 | 0 | 0 |
| UTERU3001158 | 0 | 0 | 0 | 23.569 | 0 | 0 | 0 |
| UTERU3001766 | 0 | 0 | 0 | 0 | 0 | 45.794 | 0 |
| UTERU3003660 | 0 | 0 | 0 | 5.226 | 0 | 14.837 | 0 |
| UTERU3005230 | 0 | 0 | 0 | 17.332 | 0 | 0 | 0 |
| UTERU3005460 | 0 | 0 | 0 | 37.308 | 0 | 0 | 0 |
| UTERU3005536 | 0 | 0 | 0 | 37.308 | 0 | 0 | 0 |
| UTERU3005767 | 0 | 8.354 | 0 | 0 | 0 | 2.398 | 0 |
| UTERU3005970 | 0 | 0 | 0 | 37.308 | 0 | 0 | 0 |
| UTERU3006308 | 0 | 0 | 0 | 37.308 | 0 | 0 | 0 |
| UTERU3007419 | 0 | 0 | 0 | 37.308 | 0 | 0 | 0 |
| UTERU3007913 | 0 | 0 | 0 | 12.951 | 0 | 0 | 0 |
| UTERU3009517 | 0 | 0 | 0 | 0 | 0 | 45.794 | 0 |
| UTERU3010409 | 0 | 0 | 0 | 17.196 | 0 | 0 | 0 |
| UTERU3015011 | 0 | 0 | 0 | 5.009 | 0 | 0 | 0 |

[0673] Genes whose expression levels were negligibly low in each of the above-described libraries are shown with their clone names below.

[0674] 3NB691000018, 3NB691000113, 3NB691000129, 3NB691000191, 3NB692000012, 3NB692000029, 3NB692000102, 3NB692000154, 3NB692000276, 3NB692000305, 3NB692000429, 3NB692000484, 3NB692000529, 3NB692000973, 3NB692001002, 3NB692001034, 3NB692001040, 3NB692001123, 3NB692001267, 3NB692001339, 3NB692001349, 3NB692001366, 3NB692001408, 3NB692001433, 3NB692001459, 3NB692001471, 3NB692001501, 3NB692001507, 3NB692001511, 3NB692001519, 3NB692001520, 3NB692001528, 3NB692001538, 3NB692001548, 3NB692001557, 3NB692001637, 3NB692001861, 3NB692002365, 3NB692002685, 3NB692002806, 3NB692003538, 3NB692004045, 3NB692004724, 3NB692005439, 3NB692006952, 3NB692008178, 3NB692008729, ACTVT2000380, ADIPS1000064, ADIPS2000069, ADIPS2000088, ADIPS2000245, ADIPS2000425, ADRGL1000038, ADRGL1000067, ADRGL1000111, ADRGL1000144, ADRGL1000147, ADRGL1000160, ADRGL1000165, ADRGL1000182, ADRGL2000056, ADRGL2000064, ADRGL2000085, ADRGL2000117, ADRGL2000142, ADRGL2000172, ADRGL2000248, ADRGL2000261, ADRGL2000323, ADRGL2000353, ADRGL2000384, ADRGL2000428, ADRGL2000636, ADRGL2000968, ADRGL2001119, ADRGL2001229, ADRGL2001287, ADRGL2001301, ADRGL2001354, ADRGL2001554, ADRGL2001651, ADRGL2001756, ADRGL2001836, ADRGL2001854, ADRGL2002029, ADRGL2002260, ADRGL2002392, ADRGL2002679, ADRGL2002753, ADRGL2002857, ADRGL2003017, ADRGL2003329, ADRGL2003552, ADRGL2003585, ADRGL2003638, ADRGL2003684, ADRGL2003773, ADRGL2003785, ADRGL2004031, ADRGL2004077, ADRGL2004451, ADRGL2004459, ADRGL2004676, ADRGL2004708, ADRGL2004724, ADRGL2004749, ADRGL2004770, ADRGL2004777, ADRGL2004833, ADRGL2005336, ADRGL2005564, ADRGL2005756, ADRGL2005838, ADRGL2005926, ADRGL2005961, ADRGL2006034, ADRGL2006124, ADRGL2006177, ADRGL2006193, ADRGL2006377, ADRGL2006677, ADRGL2006732, ADRGL2006767, ADRGL2006817, ADRGL2006846, ADRGL2006886, ADRGL2007080, ADRGL2007125, ADRGL2007283, ADRGL2007357, ADRGL2007636, ADRGL2007651, ADRGL2007810, ADRGL2007877, ADRGL2008023, ADRGL2008331, ADRGL2008337, ADRGL2008535, ADRGL2009324, ADRGL2009489, ADRGL2009533, ADRGL2009691, ADRGL2009755, ADRGL2010315, ADRGL2010594, ADRGL2010860, ADRGL2010974, ADRGL2011190, ADRGL2011330, ADRGL2012179, AHMSC1000138, ASTRO1000009, ASTRO1000018, ASTRO1000029, ASTRO1000096, ASTRO1000165, ASTRO2000011, ASTRO2000095, ASTRO2000191, ASTRO2000278, ASTRO2000372, ASTRO2000403, ASTRO2000417, ASTRO2000482, ASTRO2000533, ASTRO2000653, ASTRO2000662, ASTRO2000725, ASTRO2000801, ASTRO2000914, ASTRO2001001, ASTRO2001008, ASTRO2001076, ASTRO2001088, ASTRO2001122, ASTRO2001227, ASTRO2001249, ASTRO2001480, ASTRO2002035, ASTRO2002064, ASTRO2002202, ASTRO2002571, ASTRO2002632, ASTRO2002659, ASTRO2002720, ASTRO2002743, ASTRO2002842, ASTRO2003574, ASTRO2003581, ASTRO2003632, ASTRO2003740, ASTRO2003925, ASTRO2004051, ASTRO2004217, ASTRO2004297, ASTRO2004584, ASTRO2004628, ASTRO2004751, ASTRO2004877, ASTRO2005008, ASTRO2005081, ASTRO2005096, ASTRO2005242, ASTRO2005273, ASTRO2005343, ASTRO2005360, ASTRO2005413, ASTRO2005557, ASTRO2005575, ASTRO2005593, ASTRO2005687, ASTRO2005726, ASTRO2005863, ASTRO2005896, ASTRO2005902, ASTRO2006356, ASTRO2006732, ASTRO2006747, ASTRO2006920, ASTRO2006952, ASTRO2007221, ASTRO2007377, ASTRO2007515, ASTRO2007578, ASTRO2007643, ASTRO2007666, ASTRO2007956, ASTRO2007962, ASTRO2008040, ASTRO2008239, ASTRO2008409, ASTRO2008425, ASTRO2008508, ASTRO2008777, ASTRO2008895, ASTRO2008960, ASTRO2008972, ASTRO2009068, ASTRO2009118, ASTRO2009177, ASTRO2009333, ASTRO2009458, ASTRO2009526, ASTRO2009879, ASTRO2010072, ASTRO2010582, ASTRO2010615, ASTRO2010799, ASTRO2010962, ASTRO2010996, ASTRO2011149, ASTRO2011426, ASTRO2011437, ASTRO2011461, ASTRO2011834, ASTRO2011893, ASTRO2013124, ASTRO2013671, ASTRO2013802, ASTRO2014135, ASTRO2014174, ASTRO2014211, ASTRO2014363, ASTRO2014923, ASTRO2014961, ASTRO2015162, ASTRO2015185, ASTRO2015529, ASTRO2015987, ASTRO2016044, ASTRO2016114, ASTRO2016148, ASTRO2016681, ASTRO2016847, ASTRO2016892, ASTRO2017348, ASTRO2017627, ASTRO2018373, ASTRO2019039, ASTRO3000154, ASTRO3000172, ASTRO3000177, ASTRO3000301, ASTRO3000474, ASTRO3000482, BEAST2000454, BRAWH1000002, BRAWH1000007, BRAWH1000116, BRAWH1000130, BRAWH1000157, BRAWH1000164, BRAWH1000168, BRAWH1000180, BRAWH1000369, BRAWH2000034, BRAWH2000048, BRAWH2000071, BRAWH2000093, BRAWH2000109, BRAWH2000142, BRAWH2000169, BRAWH2000218, BRAWH2000232, BRAWH2000248, BRAWH2000256, BRAWH2000323, BRAWH2000370, BRAWH2000409, BRAWH2000471, BRAWH2000476, BRAWH2000488, BRAWH2000503, BRAWH2000554, BRAWH2000588, BRAWH2000643, BRAWH2000651, BRAWH2000682, BRAWH2000752, BRAWH2000859, BRAWH2000866, BRAWH2000892, BRAWH2000901, BRAWH2000926, BRAWH2000944, BRAWH2000984, BRAWH2001052, BRAWH2001103, BRAWH2001129, BRAWH2001137, BRAWH2001159, BRAWH2001203, BRAWH2001239, BRAWH2001255, BRAWH2001355, BRAWH2001378, BRAWH2001406, BRAWH2001412, BRAWH2001424, BRAWH2001436, BRAWH2001438, BRAWH2001484, BRAWH2001492, BRAWH2001503, BRAWH2001519, BRAWH2001530, BRAWH2001589, BRAWH2001666, BRAWH2001679, BRAWH2001686, BRAWH2001701, BRAWH2001842, BRAWH2001862, BRAWH2001873, BRAWH2001940, BRAWH2001973, BRAWH2002062, BRAWH2002125, BRAWH2002191, BRAWH2002333, BRAWH2002352, BRAWH2002383, BRAWH2002623, BRAWH2002630, BRAWH2002635, BRAWH2002662, BRAWH2002679, BRAWH2002725, BRAWH2002761, BRAWH2002861, BRAWH2002967, BRAWH2002976, BRAWH2003135, BRAWH2003240, BRAWH2003307, BRAWH2003366, BRAWH2003689, BRAWH2003693, BRAWH2003818, BRAWH2003832, BRAWH2003948, BRAWH2003964, BRAWH2004044, BRAWH2004068, BRAWH2004136, BRAWH2004217, BRAWH2004580, BRAWH2004731, BRAWH2004884, BRAWH2004923, BRAWH2005074, BRAWH2005225, BRAWH2005315, BRAWH2005517, BRAWH2005524, BRAWH2005533, BRAWH2005578, BRAWH2005812, BRAWH2005974, BRAWH2005998, BRAWH2006083, BRAWH2006395, BRAWH2006405, BRAWH2006450, BRAWH2006526, BRAWH2006760, BRAWH2006960, BRAWH2007069, BRAWH2007308, BRAWH2007406, BRAWH2007550, BRAWH2007570, BRAWH2007658, BRAWH2007800, BRAWH2007808, BRAWH2007862, BRAWH2007890, BRAWH2008058, BRAWH2008128, BRAWH2008219, BRAWH2008292, BRAWH2008297, BRAWH2008366, BRAWH2008380, BRAWH2008540, BRAWH2008577, BRAWH2008790, BRAWH2009112, BRAWH2009227, BRAWH2009261, BRAWH2009263, BRAWH2009298, BRAWH2009304, BRAWH2009360, BRAWH2009393, BRAWH2009485, BRAWH2009490, BRAWH2009558, BRAWH2009590, BRAWH2009626, BRAWH2009678, BRAWH2009907, BRAWH2010000, BRAWH2010069, BRAWH2010084, BRAWH2010318, BRAWH2010536, BRAWH2010584, BRAWH2010618, BRAWH2010619, BRAWH2010980, BRAWH2011066, BRAWH2011079, BRAWH2011096, BRAWH2011155, BRAWH2011166, BRAWH2011286, BRAWH2011294, BRAWH2011400, BRAWH2011762, BRAWH2011795, BRAWH2011796, BRAWH2011823, BRAWH2011860, BRAWH2011958, BRAWH2012054, BRAWH2012077, BRAWH2012161, BRAWH2012162, BRAWH2012258, BRAWH2012277, BRAWH2012326, BRAWH2012540, BRAWH2012619, BRAWH2012749, BRAWH2012963, BRAWH2013866, BRAWH2013871, BRAWH2013914, BRAWH2013941, BRAWH2013955, BRAWH2014234, BRAWH2014379, BRAWH2014473, BRAWH2014717, BRAWH2014729, BRAWH2014934, BRAWH2015349, BRAWH2015375, BRAWH2015595, BRAWH2015853, BRAWH2015866, BRAWH2016106, BRAWH2016160, BRAWH2016221, BRAWH2016223, BRAWH2016305, BRAWH2016439, BRAWH2016446, BRAWH2016514, BRAWH2016562, BRAWH2016655, BRAWH2016724, BRAWH2016785, BRAWH2016792, BRAWH2016800, BRAWH2017103, BRAWH2017250, BRAWH2017294, BRAWH2017305, BRAWH2017407, BRAWH2017433, BRAWH2017523, BRAWH2017534, BRAWH2017542, BRAWH2017635, BRAWH2017913, BRAWH2018206, BRAWH2018282, BRAWH2018317, BRAWH2018506, BRAWH2018514, BRAWH2018527, BRAWH2018601, BRAWH2018729, BRAWH2018745, BRAWH2019053, BRAWH2019055, BRAWH2019198, BRAWH3000078, BRAWH3000100, BRAWH3000166, BRAWH3000314, BRAWH3000329, BRAWH3000410, BRAWH3000446, BRAWH3000491, BRAWH3000604, BRAWH3000884, BRAWH3001053, BRAWH3001326, BRAWH3001475, BRAWH3001636, BRAWH3001638, BRAWH3001712, BRAWH3001760, BRAWH3001783, BRAWH3001833, BRAWH3001879, BRAWH3002433, BRAWH3002467, BRAWH3002513, BRAWH3002574, BRAWH3002819, BRAWH3003019, BRAWH3003136, BRAWH3003244, BRAWH3003343, BRAWH3003411, BRAWH3003522, BRAWH3003598, BRAWH3003801, BRAWH3003975, BRAWH3004222, BRAWH3004335, BRAWH3004350, BRAWH3004453, BRAWH3004666, BRAWH3005037, BRAWH3005047, BRAWH3005292, BRAWH3005300, BRAWH3005422, BRAWH3005534, BRAWH3005886, BRAWH3005892, BRAWH3005896, BRAWH3005912, BRAWH3005981, BRAWH3006547, BRAWH3006548, BRAWH3006792, BRAWH3007221, BRAWH3007441, BRAWH3007455, BRAWH3007506, BRAWH3007726, BRAWH3007783, BRAWH3008167, BRAWH3008341, BRAWH3008559, BRAWH3008697, BRAWH3008867, BRAWH3009017, BRAWH3009546, BRAWH3009961, BRAWH3010560, BRAWH3010602, BRAWH3010657, BRAWH3010726, BRAWH3010833, BRAWH3011101, BRAWH3011331, BRAWH3011402, BRAWH3011577, BRAWH3011623, BRAWH3011637, BRAWH3011685, BRAWH3011907, BRAWH3011929, BRAWH3012005, BRAWH3012662, BRAWH3012779, BRAWH3013009, BRAWH3013049, BRAWH3013197, BRAWH3013264, BRAWH3013508, BRAWH3014609, BRAWH3014639, BRAWH3015017, BRAWH3015175, BRAWH3015260, BRAWH3015610, BRAWH3015825, BRAWH3016123, BRAWH3016715, BRAWH3017260, BRAWH3017477, BRAWH3017537, BRAWH3018369, BRAWH3018548, BRAWH3018969, BRAWH3019026, BRAWH3019529, BRAWH3019594, BRAWH3019629, BRAWH3019820, BRAWH3020200, BRAWH3020318, BRAWH3020486, BRAWH3020884, BRAWH3020928, BRAWH3021012, BRAWH3021580, BRAWH3021641, BRAWH3021643, BRAWH3021724, BRAWH3022347, BRAWH3022431, BRAWH3022459, BRAWH3022542, BRAWH3022719, BRAWH3022866, BRAWH3022900, BRAWH3023156, BRAWH3023168, BRAWH3023172, BRAWH3023274, BRAWH3023421, BRAWH3024231, BRAWH3024242, BRAWH3024469, BRAWH3024506, BRAWH3024613, BRAWH3024989, BRAWH3026349, BRAWH3026394, BRAWH3026529, BRAWH3027420, BRAWH3027533, BRAWH3027574, BRAWH3027607, BRAWH3027616, BRAWH3027675, BRAWH3027806, BRAWH3027880, BRAWH3027927, BRAWH3028202, BRAWH3028223, BRAWH3028306, BRAWH3028461, BRAWH3028645, BRAWH3028754, BRAWH3028796, BRAWH3029254, BRAWH3029313, BRAWH3029538, BRAWH3030613, BRAWH3030772, BRAWH3030892, BRAWH3030910, BRAWH3030950, BRAWH3031054, BRAWH3031710, BRAWH3031902, BRAWH3032298, BRAWH3032340, BRAWH3032571, BRAWH3032620, BRAWH3032930, BRAWH3033117, BRAWH3033293, BRAWH3033448, BRAWH3033513, BRAWH3034097, BRAWH3034114, BRAWH3034134, BRAWH3034668, BRAWH3034775, BRAWH3034890, BRAWH3035154, BRAWH3035904, BRAWH3035914, BRAWH3035936, BRAWH3036077, BRAWH3036247, BRAWH3036270, BRAWH3036561, BRAWH3036738, BRAWH3036951, BRAWH3037265, BRAWH3037394, BRAWH3037533, BRAWH3037979, BRAWH3038055, BRAWH3038230, BRAWH3038252, BRAWH3038324, BRCAN1000065, BRCAN1000105, BRCAN1000149, BRCAN2000148, BRCAN2000149, BRCAN2000209, BRCAN2000239, BRCAN2000346, BRCAN2000364, BRCAN2000383, BRCAN2000418, BRCAN2000523, BRCAN2000541, BRCAN2000563, BRCAN2000577, BRCAN2000620, BRCAN2000639, BRCAN2000763, BRCAN2000832, BRCAN2000923, BRCAN2001866, BRCAN2002416, BRCAN2002473, BRCAN2002562, BRCAN2002662, BRCAN2002826, BRCAN2002854, BRCAN2002856, BRCAN2002892, BRCAN2002944, BRCAN2002948, BRCAN2003070, BRCAN2003269, BRCAN2003389, BRCAN2003628, BRCAN2003703, BRCAN2003746, BRCAN2003814, BRCAN2003987, BRCAN2004173, BRCAN2004355, BRCAN2004371, BRCAN2004653, BRCAN2004699, BRCAN2005436, BRCAN2005449, BRCAN2006051, BRCAN2006063, BRCAN2006174, BRCAN2006290, BRCAN2006297, BRCAN2006323, BRCAN2006411, BRCAN2006450, BRCAN2006955, BRCAN2007119, BRCAN2007144, BRCAN2007409, BRCAN2007426, BRCAN2007525, BRCAN2008494, BRCAN2008528, BRCAN2008701, BRCAN2009156, BRCAN2009168, BRCAN2009203, BRCAN2010547, BRCAN2010581, BRCAN2011254, BRCAN2011316, BRCAN2011602, BRCAN2011946, BRCAN2012110, BRCAN2012355, BRCAN2012402, BRCAN2012408, BRCAN2012481, BRCAN2012613, BRCAN2012713, BRCAN2012929, BRCAN2013655, BRCAN2013660, BRCAN2014143, BRCAN2014229, BRCAN2014370, BRCAN2014602, BRCAN2014652, BRCAN2014788, BRCAN2014952, BRCAN2015402, BRCAN2015464, BRCAN2015757, BRCAN2015886, BRCAN2016025, BRCAN2016174, BRCAN2016433, BRCAN2016619, BRCAN2016762, BRCAN2016814, BRCAN2017442, BRCAN2017905, BRCAN2018240, BRCAN2018269, BRCAN2018490, BRCAN2018566, BRCAN2018667, BRCAN2018748, BRCAN2018935, BRCAN2019002, BRCAN2019387, BRCAN2019773, BRCAN2019907, BRCAN2020234, BRCAN2020331, BRCAN2020412, BRCAN2020467, BRCAN2020880, BRCAN2021024, BRCAN2021028, BRCAN2021325, BRCAN2021452, BRCAN2021669, BRCAN2021718, BRCAN2022191, BRCAN2022472, BRCAN2022474, BRCAN2023347, BRCAN2023724, BRCAN2024451, BRCAN2024563, BRCAN2025009, BRCAN2025093, BRCAN2025349, BRCAN2025712, BRCAN2025982, BRCAN2026117, BRCAN2026711, BRCAN2027150, BRCAN2027310, BRCAN2027355, BRCAN2027513, BRCAN2027593, BRCAN2027970, BRCAN2028021, BRCAN2028040, BRCAN2028319, BRCAN2028338, BRCAN2028378, BRCAN2028460, BRCAN2028545, BRCAN2028634, BRCAN2028702, BRCOC1000087, BRCOC2000152, BRCOC2000184, BRCOC2000360, BRCOC2000404, BRCOC2000487, BRCOC2000637, BRCOC2000816, BRCOC2000850, BRCOC2001355, BRCOC2002085, BRCOC2002155, BRCOC2002323, BRCOC2002659, BRCOC2002664, BRCOC2002686, BRCOC2002751, BRCOC2002756, BRCOC2002777, BRCOC2002835, BRCOC2003125, BRCOC2003513, BRCOC2003732, BRCOC2003740, BRCOC2004175, BRCOC2004354, BRCOC2004455, BRCOC2004950, BRCOC2005951, BRCOC2006164, BRCOC2006243, BRCOC2006639, BRCOC2006942, BRCOC2007593, BRCOC2007733, BRCOC2007769, BRCOC2008064, BRCOC2008225, BRCOC2008642, BRCOC2008993, BRCOC2009052, BRCOC2009196, BRCOC2009380, BRCOC2009638, BRCOC2010115, BRCOC2010123, BRCOC2010510, BRCOC2010730, BRCOC2010980, BRCOC2010994, BRCOC2011010, BRCOC2011398, BRCOC2011418, BRCOC2011769, BRCOC2011996, BRCOC2012229, BRCOC2012386, BRCOC2012813, BRCOC2013448, BRCOC2013573, BRCOC2013675, BRCOC2014013, BRCOC2014033, BRCOC2014400, BRCOC2014748, BRCOC2014833, BRCOC2015597, BRCOC2015824, BRCOC2015908, BRCOC2015944, BRCOC2016525, BRCOC2016661, BRCOC2017061, BRCOC2017652, BRCOC2017856, BRCOC2018775, BRCOC2018877, BRCOC2019255, BRCOC2019549, BRCOC2019903, BRCOC2019934, BRCOC2020122, BRCOC2020142, BRHIP1000058, BRHIP1000072, BRHIP1000258, BRHIP2000021, BRHIP2000079, BRHIP2000163, BRHIP2000239, BRHIP2000245, BRHIP2000359, BRHIP2000445, BRHIP2000506, BRHIP2000532, BRHIP2000621, BRHIP2000691, BRHIP2000819, BRHIP2000826, BRHIP2001074, BRHIP2001686, BRHIP2001782, BRHIP2001802, BRHIP2001805, BRHIP2001927, BRHIP2002122, BRHIP2002172, BRHIP2002346, BRHIP2002510, BRHIP2002664, BRHIP2002722, BRHIP2002929, BRHIP2003048, BRHIP2003242, BRHIP2003272, BRHIP2003748, BRHIP2003786, BRHIP2003828, BRHIP2003917, BRHIP2004312, BRHIP2004355, BRHIP2004814, BRHIP2004883, BRHIP2004902, BRHIP2005236, BRHIP2005354, BRHIP2005600, BRHIP2005719, BRHIP2005724, BRHIP2005932, BRHIP2006617, BRHIP2006782, BRHIP2006800, BRHIP2006819, BRHIP2006921, BRHIP2007307, BRHIP2007616, BRHIP2007690, BRHIP2007928, BRHIP2007969, BRHIP2008269, BRHIP2008389, BRHIP2008756, BRHIP2008909, BRHIP2009177, BRHIP2009340, BRHIP2009351, BRHIP2009414, BRHIP2009474, BRHIP2009617, BRHIP2009685, BRHIP2010309, BRHIP2010444, BRHIP2010593, BRHIP2010610, BRHIP2010744, BRHIP2011080, BRHIP2011199, BRHIP2011508, BRHIP2011616, BRHIP2011783, BRHIP2011838, BRHIP2011891, BRHIP2011933, BRHIP2012054, BRHIP2012059, BRHIP2012141, BRHIP2012314, BRHIP2012360, BRHIP2012545, BRHIP2012580, BRHIP2012627, BRHIP2012642, BRHIP2012750, BRHIP2012922, BRHIP2012923, BRHIP2012972, BRHIP2013286, BRHIP2013447, BRHIP2013510, BRHIP2013723, BRHIP2013958, BRHIP2013972, BRHIP2014063, BRHIP2014285, BRHIP2014291, BRHIP2014373, BRHIP2014386, BRHIP2014387, BRHIP2014954, BRHIP2015356, BRHIP2015360, BRHIP2016005, BRHIP2016125, BRHIP2016788, BRHIP2016968, BRHIP2016990, BRHIP2017010, BRHIP2017315, BRHIP2017385, BRHIP2017404, BRHIP2017542, BRHIP2017553, BRHIP2017714, BRHIP2017780, BRHIP2018014, BRHIP2018369, BRHIP2018612, BRHIP2018635, BRHIP2018650, BRHIP2018805, BRHIP2018998, BRHIP2019007, BRHIP2019047, BRHIP2019149, BRHIP2019177, BRHIP2019291, BRHIP2019589, BRHIP2019641, BRHIP2019884, BRHIP2019972, BRHIP2020182, BRHIP2020509, BRHIP2020695, BRHIP2020743, BRHIP2020842, BRHIP2020859, BRHIP2020930, BRHIP2021102, BRHIP2021289, BRHIP2021615, BRHIP2021744, BRHIP2021929, BRHIP2022006, BRHIP2022221, BRHIP2022228, BRHIP2022298, BRHIP2022467, BRHIP2022708, BRHIP2023229, BRHIP2023272, BRHIP2023292, BRHIP2023369, BRHIP2023438, BRHIP2023695, BRHIP2023735, BRHIP2023773, BRHIP2023860, BRHIP2023869, BRHIP2024046, BRHIP2024165, BRHIP2024201, BRHIP2024347, BRHIP2024549, BRHIP2024789, BRHIP2024911, BRHIP2024941, BRHIP2025245, BRHIP2025366, BRHIP2025739, BRHIP2025797, BRHIP2026021, BRHIP2026155, BRHIP2026214, BRHIP2026346, BRHIP2026557, BRHIP2026723, BRHIP2026877, BRHIP2027017, BRHIP2027054, BRHIP2027563, BRHIP2027762, BRHIP2028303, BRHIP2028330, BRHIP2028480, BRHIP2028593, BRHIP2029176, BRHIP2029283, BRHIP2029393, BRHIP2029529, BRHIP2029663, BRHIP3000017, BRHIP3000060, BRHIP3000070, BRHIP3000081, BRHIP3000475, BRHIP3000488, BRHIP3000526, BRHIP3000626, BRHIP3000859, BRHIP3000907, BRHIP3001076, BRHIP3001079, BRHIP3001141, BRHIP3001338, BRHIP3001481, BRHIP3001878, BRHIP3001964, BRHIP3002124, BRHIP3002141, BRHIP3002363, BRHIP3002920, BRHIP3002931, BRHIP3003306, BRHIP3003340, BRHIP3003395, BRHIP3003484, BRHIP3003644, BRHIP3003688, BRHIP3003795, BRHIP3004193, BRHIP3004416, BRHIP3004710, BRHIP3004725, BRHIP3004774, BRHIP3004786, BRHIP3004863, BRHIP3005037, BRHIP3005137, BRHIP3005142, BRHIP3005231, BRHIP3005307, BRHIP3005768, BRHIP3005944, BRHIP3006279, BRHIP3006294, BRHIP3006390, BRHIP3006449, BRHIP3006683, BRHIP3006786, BRHIP3006950, BRHIP3007172, BRHIP3007183, BRHIP3007195, BRHIP3007239, BRHIP3007291, BRHIP3007409, BRHIP3007424, BRHIP3007483, BRHIP3007609, BRHIP3007960, BRHIP3008082, BRHIP3008183, BRHIP3008314, BRHIP3008320, BRHIP3008344, BRHIP3008565, BRHIP3008598, BRHIP3008606, BRHIP3008691, BRHIP3008714, BRHIP3008997, BRHIP3009099, BRHIP3009140, BRHIP3009181, BRHIP3009318, BRHIP3009427, BRHIP3009448, BRHIP3009672, BRHIP3009753, BRHIP3010135, BRHIP3010289, BRHIP3010529, BRHIP3011082, BRHIP3011241, BRHIP3011269, BRHIP3011460, BRHIP3011567, BRHIP3011831, BRHIP3012185, BRHIP3012289, BRHIP3012357, BRHIP3012745, BRHIP3012868, BRHIP3012997, BRHIP3013078, BRHIP3013271, BRHIP3013588, BRHIP3013698, BRHIP3013765, BRHIP3013897, BRHIP3014237, BRHIP3015620, BRHIP3015751, BRHIP3015854, BRHIP3016032, BRHIP3016213, BRHIP3016302, BRHIP3016421, BRHIP3017109, BRHIP3017256, BRHIP3017325, BRHIP3017558, BRHIP3017637, BRHIP3018784, BRHIP3019643, BRHIP3019824, BRHIP3019880, BRHIP3019956, BRHIP3020155, BRHIP3020182, BRHIP3020733, BRHIP3021499, BRHIP3021534, BRHIP3021778, BRHIP3021987, BRHIP3022656, BRHIP3023922, BRHIP3024118, BRHIP3024533, BRHIP3024703, BRHIP3024725, BRHIP3024820, BRHIP3025161, BRHIP3025702, BRHIP3025795, BRHIP3025844, BRHIP3026097, BRHIP3026231, BRHIP3026335, BRHIP3026651, BRHIP3027105, BRHIP3027137, BRHIP3027160, BRHIP3027191, BRHIP3027501, BRHIP3027651, BRHIP3027854, BRHIP3027947, BRHIP3028570, BRHIP3028742, BRSSN1000056, BRSSN1000059, BRSSN1000092, BRSSN1000153, BRSSN2000175, BRSSN2000197, BRSSN2000244, BRSSN2000518, BRSSN2000684, BRSSN2000715, BRSSN2001213, BRSSN2001275, BRSSN2001342, BRSSN2001426, BRSSN2001503, BRSSN2001579, BRSSN2001810, BRSSN2002857, BRSSN2002859, BRSSN2003086, BRSSN2003093, BRSSN2003820, BRSSN2003841, BRSSN2003937, BRSSN2004142, BRSSN2004303, BRSSN2004304, BRSSN2004657, BRSSN2004679, BRSSN2004686, BRSSN2004710, BRSSN2004719, BRSSN2005847, BRSSN2006133, BRSSN2006390, BRSSN2006575, BRSSN2006644, BRSSN2007076, BRSSN2007168, BRSSN2007202, BRSSN2007464, BRSSN2007504, BRSSN2007819, BRSSN2008125, BRSSN2008419, BRSSN2008464, BRSSN2008549, BRSSN2008797, BRSSN2009119, BRSSN2009378, BRSSN2009389, BRSSN2009395, BRSSN2009627, BRSSN2009630, BRSSN2009702, BRSSN2010019, BRSSN2010110, BRSSN2010830, BRSSN2011653, BRSSN2012081, BRSSN2012103, BRSSN2012157, BRSSN2012198, BRSSN2012254, BRSSN2012439, BRSSN2012622, BRSSN2012691, BRSSN2012838, BRSSN2013095, BRSSN2013544, BRSSN2013702, BRSSN2013753, BRSSN2013874, BRSSN2014112, BRSSN2014424, BRSSN2014513, BRSSN2014556, BRSSN2014573, BRSSN2014636, BRSSN2015369, BRSSN2015497, BRSSN2015554, BRSSN2015707, BRSSN2015773, BRSSN2015907, BRSSN2015982, BRSSN2016589, BRSSN2016768, BRSSN2016905, BRSSN2017297, BRSSN2017422, BRSSN2017530, BRSSN2017682, BRSSN2017757, BRSSN2018218, BRSSN2018440, BRSSN2018581, BRSSN2018731, BRSSN2018771, BRSSN2018925, BRSTN1000097, BRSTN2000070, BRSTN2000312, BRSTN2000367, BRSTN2000536, BRSTN2000872, BRSTN2001067, BRSTN2001613, BRSTN2001801, BRSTN2002105, BRSTN2002400, BRSTN2002532, BRSTN2002691, BRSTN2003590, BRSTN2003835, BRSTN2004863, BRSTN2004869, BRSTN2004987, BRSTN2005721, BRSTN2006306, BRSTN2006466, BRSTN2006583, BRSTN2006638, BRSTN2006865, BRSTN2007000, BRSTN2007118, BRSTN2007284, BRSTN2007765, BRSTN2008283, BRSTN2008367, BRSTN2008418, BRSTN2008457, BRSTN2008475, BRSTN2008930, BRSTN2009247, BRSTN2010363, BRSTN2010416, BRSTN2010500, BRSTN2010569, BRSTN2010923, BRSTN2011211, BRSTN2011688, BRSTN2011799, BRSTN2012284, BRSTN2012320, BRSTN2012380, BRSTN2013171, BRSTN2013354, BRSTN2014490, BRSTN2014633, BRSTN2014751, BRSTN2014770, BRSTN2016066, BRSTN2016335, BRSTN2016678, BRSTN2016892, BRSTN2016918, BRSTN2017104, BRSTN2017151, BRSTN2017237, BRSTN2017379, BRSTN2017761, BRSTN2017771, BRSTN2017995, BRSTN2018077, BRSTN2018083, BRSTN2018596, BRSTN2018692, BRSTN2018712, BRSTN2019079, BRSTN2019129, BRTHA1000063, BRTHA2000057, BRTHA2000474, BRTHA2000514, BRTHA2000574, BRTHA2000855, BRTHA2000969, BRTHA2000972, BRTHA2001304, BRTHA2001370, BRTHA2001462, BRTHA2001717, BRTHA2002091, BRTHA2002115, BRTHA2002133, BRTHA2002281, BRTHA2002376, BRTHA2002442, BRTHA2002493, BRTHA2002565, BRTHA2002608, BRTHA2002702, BRTHA2002721, BRTHA2002726, BRTHA2002741, BRTHA2002808, BRTHA2002896, BRTHA2002903, BRTHA2003030, BRTHA2003110, BRTHA2003116, BRTHA2003436, BRTHA2003759, BRTHA2003794, BRTHA2004361, BRTHA2004371, BRTHA2004582, BRTHA2004629, BRTHA2004639, BRTHA2004642, BRTHA2004812, BRTHA2004821, BRTHA2004978, BRTHA2004992, BRTHA2005005, BRTHA2005448, BRTHA2005579, BRTHA2005831, BRTHA2005942, BRTHA2005956, BRTHA2006075, BRTHA2006146, BRTHA2006194, BRTHA2006232, BRTHA2006720, BRTHA2006735, BRTHA2006974, BRTHA2006975, BRTHA2007060, BRTHA2007122, BRTHA2007422, BRTHA2007603, BRTHA2007665, BRTHA2008316, BRTHA2008335, BRTHA2008502, BRTHA2008513, BRTHA2008527, BRTHA2008535, BRTHA2008598, BRTHA2008669, BRTHA2009311, BRTHA2009349, BRTHA2009803, BRTHA2009846, BRTHA2009886, BRTHA2009972, BRTHA2010008, BRTHA2010033, BRTHA2010073, BRTHA2010097, BRTHA2010191, BRTHA2010397, BRTHA2010608, BRTHA2010672, BRTHA2010884, BRTHA2010907, BRTHA2011062, BRTHA2011321, BRTHA2011351, BRTHA2011500, BRTHA2011691, BRTHA2012129, BRTHA2012183, BRTHA2012189, BRTHA2012351, BRTHA2012392, BRTHA2012466, BRTHA2012555, BRTHA2012562, BRTHA2012714, BRTHA2012980, BRTHA2013262, BRTHA2013275, BRTHA2013426, BRTHA2013460, BRTHA2013515, BRTHA2013595, BRTHA2013610, BRTHA2013707, BRTHA2013942, BRTHA2014287, BRTHA2014334, BRTHA2014381, BRTHA2014578, BRTHA2014647, BRTHA2014663, BRTHA2014792, BRTHA2014828, BRTHA2014909, BRTHA2014975, BRTHA2014997, BRTHA2015406, BRTHA2015478, BRTHA2015696, BRTHA2015700, BRTHA2015853, BRTHA2015878, BRTHA2016179, BRTHA2016215, BRTHA2016267, BRTHA2016318, BRTHA2016496, BRTHA2016543, BRTHA2016552, BRTHA2016765, BRTHA2016918, BRTHA2017178, BRTHA2017353, BRTHA2017364, BRTHA2017972, BRTHA2017985, BRTHA2018011, BRTHA2018129, BRTHA2018165, BRTHA2018304, BRTHA2018344, BRTHA2018420, BRTHA2018443, BRTHA2018504, BRTHA2018558, BRTHA2018591, BRTHA2018624, BRTHA2018706, BRTHA2018707, BRTHA2019014, BRTHA2019022, BRTHA2019048, BRTHA2019073, BRTHA2019726, BRTHA2019743, BRTHA2020400, BRTHA2020566, BRTHA2020642, BRTHA2020695, BRTHA2020721, BRTHA2020781, BRTHA2020811, BRTHA2020910, BRTHA2021212, BRTHA2021440, BRTHA2021450, BRTHA2022074, BRTHA2022914, BRTHA2022968, BRTHA2023402, BRTHA2023437, BRTHA2024177, BRTHA2024354, BRTHA2024712, BRTHA2025869, BRTHA2026290, BRTHA2026311, BRTHA2027227, BRTHA2027229, BRTHA2027250, BRTHA2027546, BRTHA2028297, BRTHA2029969, BRTHA2030036, BRTHA2030213, BRTHA2031517, BRTHA2031800, BRTHA2031917, BRTHA2032763, BRTHA2032845, BRTHA2033122, BRTHA2033264, BRTHA2033320, BRTHA2033469, BRTHA2033683, BRTHA2034281, BRTHA2034576, BRTHA2034874, BRTHA2035448, BRTHA2036055, BRTHA2036295, BRTHA2036660, BRTHA2037247, BRTHA2038279, BRTHA2038345, BRTHA2038353, BRTHA2038396, BRTHA3000252, BRTHA3000273, BRTHA3000296, BRTHA3000297, BRTHA3000325, BRTHA3000456, BRTHA3000633, BRTHA3001221, BRTHA3001623, BRTHA3002265, BRTHA3002401, BRTHA3002411, BRTHA3002864, BRTHA3002933, BRTHA3002955, BRTHA3003000, BRTHA3003074, BRTHA3003225, BRTHA3003339, BRTHA3003343, BRTHA3003417, BRTHA3003449, BRTHA3003474, BRTHA3004502, BRTHA3004610, BRTHA3005046, BRTHA3005735, BRTHA3005988, BRTHA3006318, BRTHA3006593, BRTHA3006856, BRTHA3007113, BRTHA3007130, BRTHA3007148, BRTHA3007319, BRTHA3007469, BRTHA3007472, BRTHA3007532, BRTHA3007662, BRTHA3007769, BRTHA3007922, BRTHA3008143, BRTHA3008293, BRTHA3008310, BRTHA3008386, BRTHA3008520, BRTHA3008608, BRTHA3008694, BRTHA3008778, BRTHA3008826, BRTHA3009037, BRTHA3009291, BRTHA3010135, BRTHA3010366, BRTHA3010469, BRTHA3010540, BRTHA3010717, BRTHA3011149, BRTHA3011187, BRTHA3011194, BRTHA3011229, BRTHA3011265, BRTHA3011361, BRTHA3011510, BRTHA3011892, BRTHA3012265, BRTHA3013860, BRTHA3013882, BRTHA3013884, BRTHA3013981, BRTHA3014000, BRTHA3014105, BRTHA3014507, BRTHA3014547, BRTHA3014691, BRTHA3014835, BRTHA3014854, BRTHA3014908, BRTHA3014920, BRTHA3015815, BRTHA3016616, BRTHA3016835, BRTHA3016845, BRTHA3016917, BRTHA3017047, BRTHA3017589, BRTHA3017848, BRTHA3018409, BRTHA3018514, BRTHA3018617, BRTHA3018623, BRTHA3018656, BRTHA3019048, BRTHA3019105, BRTHA3019183, BRTHA3020000, BRTHA3020314, BRTHA3020369, BRTHA3021569, BRTHA3021786, BRTHA3022641, BRTHA3023523, BRTHA3023590, BRTHA3023929, BRTHA3024233, BRTHA3024600, BRTHA3025073, BRTHA3025789, BRTHA3025826, BRTHA3026161, BRTHA3026180, BRTHA3026556, BRTHA3027171, BRTHA3027318, BRTHA3027638, BRTHA3027820, BRTHA3027879, BRTHA3027957, BRTHA3028339, BRTHA3028505, BRTHA3028782, CD34C2000051, CD34C2000152, CD34C2000175, CD34C2000443, CD34C3000125, CD34C3000314, CD34C3000424, CD34C3000494, CERVX1000042, CERVX2000812, CERVX2000968, CERVX2002006, CERVX2002013, CERVX2002430, CERVX2002770, CHONS1000058, CHONS2000797, CHONS2001287, CHONS2001382, CHONS2001797, CHONS2001834, CHONS2002419, COLON1000030, COLON1000084, COLON1000135, COLON2000557, COLON2000568, COLON2001829, COLON2001866, COLON2002443, COLON2002520, COLON2003043, COLON2003529, COLON2004318, COLON2004351, COLON2004478, COLON2004911, COLON2005126, COLON2005623, COLON2005735, COLON2005772, COLON2006263, COLON2006282, COLON2006417, COLON2007274, COLON2007733, COLON2008105, COLON2009337, COLON2009499, CORDB1000140, CORDB2000061, CORDB2000127, CORDB2000541, CTONG1000009, CTONG1000020, CTONG1000022, CTONG1000040, CTONG1000056, CTONG1000062, CTONG1000086, CTONG1000093, CTONG1000097, CTONG1000113, CTONG1000137, CTONG1000165, CTONG1000180, CTONG1000181, CTONG1000220, CTONG1000277, CTONG1000283, CTONG1000288, CTONG1000302, CTONG1000341, CTONG1000467, CTONG1000476, CTONG1000488, CTONG1000508, CTONG1000540, CTONG2000031, CTONG2000034, CTONG2000042, CTONG2000218, CTONG2000279, CTONG2000303, CTONG2000330, CTONG2000395, CTONG2000411, CTONG2000452, CTONG2000465, CTONG2000469, CTONG2000480, CTONG2000561, CTONG2000589, CTONG2000766, CTONG2000771, CTONG2000819, CTONG2000827, CTONG2000846, CTONG2000855, CTONG2000977, CTONG2001139, CTONG2001226, CTONG2001320, CTONG2001366, CTONG2001413, CTONG2001428, CTONG2001513, CTONG2001524, CTONG2001533, CTONG2001681, CTONG2001724, CTONG2001749, CTONG2001800, CTONG2001820, CTONG2001858, CTONG2001877, CTONG2001911, CTONG2001932, CTONG2001955, CTONG2002066, CTONG2002073, CTONG2002095, CTONG2002143, CTONG2002395, CTONG2002417, CTONG2002418, CTONG2002453, CTONG2002558, CTONG2002590, CTONG2002721, CTONG2002816, CTONG2002820, CTONG2002832, CTONG2002903, CTONG2002965, CTONG2002999, CTONG2003028, CTONG2003100, CTONG2003115, CTONG2003189, CTONG2003245, CTONG2003293, CTONG2003348, CTONG2003350, CTONG2003361, CTONG2003372, CTONG2003375, CTONG2003427, CTONG2003517, CTONG2003599, CTONG2003680, CTONG2003764, CTONG2003782, CTONG2003889, CTONG2003937, CTONG2003945, CTONG2004000, CTONG2004062, CTONG2004126, CTONG2004264, CTONG2004305, CTONG2004397, CTONG2004454, CTONG2004550, CTONG2004669, CTONG2004716, CTONG2004912, CTONG2004941, CTONG2004948, CTONG2005049, CTONG2005110, CTONG2005145, CTONG2005265, CTONG2005278, CTONG2005290, CTONG2005374, CTONG20005399, CTONG2005468, CTONG2005567, CTONG2005585, CTONG2005635, CTONG2005775, CTONG2005795, CTONG2005890, CTONG2005904, CTONG2005913, CTONG2006129, CTONG2006223, CTONG2006273, CTONG2006310, CTONG2006377, CTONG2006393, CTONG2006412, CTONG2006449, CTONG2006515, CTONG2006524, CTONG2006568, CTONG2006620, CTONG2006666, CTONG2006691, CTONG2006798, CTONG2006836, CTONG2006942, CTONG2006964, CTONG2007009, CTONG2007091, CTONG2007104, CTONG2007175, CTONG2007259, CTONG2007272, CTONG2007293, CTONG2007297, CTONG2007399, CTONG2007417, CTONG2007441, CTONG2007586, CTONG2007613, CTONG2007623, CTONG2007779, CTONG2007898, CTONG2007959, CTONG2007970, CTONG2008014, CTONG2008184, CTONG2008262, CTONG2008269, CTONG2008321, CTONG2008343, CTONG2008402, CTONG2008466, CTONG2008518, CTONG2008521, CTONG2008562, CTONG2008577, CTONG2008595, CTONG2008621, CTONG2008721, CTONG2008773, CTONG2008792, CTONG2008989, CTONG2009033, CTONG2009108, CTONG2009132, CTONG2009156, CTONG2009181, CTONG2009257, CTONG2009258, CTONG2009268, CTONG2009270, CTONG2009395, CTONG2009423, CTONG2009440, CTONG2009527, CTONG2009529, CTONG2009531, CTONG2009570, CTONG2009572, CTONG2009604, CTONG2009643, CTONG2009675, CTONG2009689, CTONG2009725, CTONG2009766, CTONG2009768, CTONG2009844, CTONG2009871, CTONG2009887, CTONG2009891, CTONG2009923, CTONG2009938, CTONG2009955, CTONG2009958, CTONG2009963, CTONG2010018, CTONG2010024, CTONG2010116, CTONG2010133, CTONG2010148, CTONG2010276, CTONG2010330, CTONG2010508, CTONG2010566, CTONG2010623, CTONG2010649, CTONG2010652, CTONG2011188, CTONG2011429, CTONG2011474, CTONG2011676, CTONG2011716, CTONG2011765, CTONG2011779, CTONG2011801, CTONG2011815, CTONG2011822, CTONG2011920, CTONG2011985, CTONG2012029, CTONG2012050, CTONG2012077, CTONG2012123, CTONG2012158, CTONG2012230, CTONG2012422, CTONG2012425, CTONG2012447, CTONG2012473, CTONG2012476, CTONG2012533, CTONG2012554, CTONG2012564, CTONG2012607, CTONG2012661, CTONG2012724, CTONG2012738, CTONG2012758, CTONG2012843, CTONG2012901, CTONG2012996, CTONG2013128, CTONG2013149, CTONG2013156, CTONG2013178, CTONG2013222, CTONG2013284, CTONG2013339, CTONG2013352, CTONG2013381, CTONG2013393, CTONG2013511, CTONG2013630, CTONG2013803, CTONG2013985, CTONG2013986, CTONG2014032, CTONG2014058, CTONG2014119, CTONG2014165, CTONG2014191, CTONG2014206, CTONG2014234, CTONG2014264, CTONG2014389, CTONG2014491, CTONG2014630, CTONG2014635, CTONG2014646, CTONG2014705, CTONG2014946, CTONG2014954, CTONG2014959, CTONG2014966, CTONG2014995, CTONG2015204, CTONG2015316, CTONG2015330, CTONG2015345, CTONG2015358, CTONG2015434, CTONG2015518, CTONG2015540, CTONG2015596, CTONG2015633, CTONG2015678, CTONG2015717, CTONG2015804, CTONG2015866, CTONG2015914, CTONG2015953, CTONG2016056, CTONG2016217, CTONG2016355, CTONG2016408, CTONG2016499, CTONG2016505, CTONG2016559, CTONG2016658, CTONG2016775, CTONG2016797, CTONG2016846, CTONG2016904, CTONG2016942, CTONG2016953, CTONG2017021, CTONG2017292, CTONG2017409, CTONG2017429, CTONG2017444, CTONG2017458, CTONG2017604, CTONG2017650, CTONG2017798, CTONG2017804, CTONG2017814, CTONG2017910, CTONG2017939, CTONG2017989, CTONG2018062, CTONG2018069, CTONG2018147, CTONG2018217, CTONG2018279, CTONG2018334, CTONG2018379, CTONG2018383, CTONG2018413, CTONG2018483, CTONG2018629, CTONG2018652, CTONG2018653, CTONG2018655, CTONG2018735, CTONG2018808, CTONG2018900, CTONG2018976, CTONG2019063, CTONG2019144, CTONG2019232, CTONG2019248, CTONG2019400, CTONG2019590, CTONG2019652, CTONG2019704, CTONG2019788, CTONG2019822, CTONG2019833, CTONG2020031, CTONG2020108, CTONG2020127, CTONG2020171, CTONG2020378, CTONG2020411, CTONG2020445, CTONG2020522, CTONG2020560, CTONG2020638, CTONG2020806, CTONG2020831, CTONG2020974, CTONG2021024, CTONG2021132, CTONG2021168, CTONG2022153, CTONG2022601, CTONG2023021, CTONG2023449, CTONG2023512, CTONG2024206, CTONG2024614, CTONG2024749, CTONG2025496, CTONG2025513, CTONG2025516, CTONG2025610, CTONG2025900, CTONG2026513, CTONG2026770, CTONG2026920, CTONG2026987, CTONG2027150, CTONG2027327, CTONG2027361, CTONG2027591, CTONG2027736, CTONG2027783, CTONG2027828, CTONG2028097, CTONG2028486, CTONG2028518, CTONG2028687, CTONG2028758, CTONG3000686, CTONG3000707, CTONG3000896, CTONG3001123, CTONG3001420, CTONG3001501, CTONG3001560, CTONG3001605, CTONG3002020, CTONG3002127, CTONG3002370, CTONG3002412, CTONG3002433, CTONG3002518, CTONG3002552, CTONG3002588, CTONG3002674, CTONG3002728, CTONG3002909, CTONG3002947, CTONG3002983, CTONG3003165, CTONG3003179, CTONG3003483, CTONG3003553, CTONG3003598, CTONG3003652, CTONG3003654, CTONG3003669, CTONG3003737, CTONG3003905, CTONG3003972, CTONG3004072, CTONG3004317, CTONG3004397, CTONG3004550, CTONG3004576, CTONG3004607, CTONG3004712, CTONG3004726, CTONG3005325, CTONG3005648, CTONG3005713, CTONG3005803, CTONG3006067, CTONG3006073, CTONG3006186, CTONG3006629, CTONG3006650, CTONG3006659, CTONG3007244, CTONG3007444, CTONG3007528, CTONG3007586, CTONG3007870, CTONG3008223, CTONG3008252, CTONG3008258, CTONG3008457, CTONG3008496, CTONG3008566, CTONG3008639, CTONG3008831, CTONG3008951, CTONG3008959, CTONG3009028, CTONG3009227, CTONG3009287, CTONG3009385, D30ST1000066, D30ST1000109, D30ST1000238, D30ST1000267, D30ST2000184, D30ST2000618, D30ST2000654, D30ST2000734, D30ST2001328, D30ST2001669, D30ST2001670, D30ST2001788, D30ST2002068, D30ST2002182, D30ST2002223, D30ST2002262, D30ST2002272, D30ST2002417, D30ST2002436, D30ST2002648, D30ST2003024, D30ST2003331, D30ST2003607, D30ST2003797, D30ST2004637, D30ST3000169, D30ST3000195, D30ST3000258, D30ST3000291, D30ST3000388, D30ST3000493, D60ST2000127, D60ST2000169, D60ST2000245, D60ST2000507, D90ST2000031, D90ST2000278, D90ST2000440, D90ST2000869, D90ST2001319, D90ST2001433, D90ST2002397, D90ST2002673, D90ST2003106, D90ST2003137, D90ST2003397, D90ST2003594, D90ST2003762, D90ST2003791, D90ST2003989, D90ST2004018, D90ST2004073, D90ST2004417, DFNES1000003, DFNES1000107, DFNES1000150, DFNES1000185, DFNES2000011, DFNES2000143, DFNES2000146, DFNES2000153, DFNES2000292, DFNES2000426, DFNES2000432, DFNES2000443, DFNES2000471, DFNES2000913, DFNES2001091, DFNES2001108, DFNES2001177, DFNES2001404, DFNES2001564, DFNES2001565, DFNES2001647, DFNES2001800, DFNES2002220, DFNES2002509, DFNES2002550, DFNES2002588, DFNES2002817, DFNES2002966, DFNES2003081, DFNES2003255, DFNES2003742, DFNES2004346, DFNES2004354, DFNES2004383, DFNES2004608, DFNES2004684, DFNES2005266, DFNES2005527, DFNES2005766, DFNES2005779, DFNES2005875, DFNES2006346, DFNES2006944, DFNES2007113, DFNES2007299, DFNES2007332, DFNES2007641, DFNES2007757, DFNES2008280, DFNES2008881, DFNES2010502, DFNES2011192, DFNES2011221, DFNES2011239, DFNES2011245, ERLTF1000021, ERLTF2000324, ERLTF2000465, FCBBF1000023, FCBBF1000025, FCBBF1000038, FCBBF1000061, FCBBF1000069, FCBBF1000117, FCBBF1000118, FCBBF1000131, FCBBF1000155, FCBBF1000157, FCBBF1000171, FCBBF1000174, FCBBF1000182, FCBBF1000198, FCBBF1000206, FCBBF1000220, FCBBF1000232, FCBBF1000233, FCBBF1000243, FCBBF1000270, FCBBF1000272, FCBBF1000297, FCBBF1000305, FCBBF1000314, FCBBF1000322, FCBBF1000349, FCBBF1000374, FCBBF100076, FCBBF1000377, FCBBF1000395, FCBBF1000397, FCBBF1000412, FCBBF1000425, FCBBF1000437, FCBBF1000449, FCBBF1000506, FCBBF1000546, FCBBF1000550, FCBBF1000581, FCBBF1000582, FCBBF1000598, FCBBF1000604, FCBBF1000618, FCBBF1000627, FCBBF1000684, FCBBF1000686, FCBBF1000691, FCBBF1000748, FCBBF2000087, FCBBF2000094, FCBBF2000105, FCBBF2000123, FCBBF2000195, FCBBF2000214, FCBBF2000232, FCBBF2000259, FCBBF2000276, FCBBF2000291, FCBBF2000379, FCBBF2000473, FCBBF2000502, FCBBF2000576, FCBBF2000591, FCBBF2000677, FCBBF2000678, FCBBF2000685, FCBBF2000782, FCBBF2000808, FCBBF2000815, FCBBF2000825, FCBBF2000940, FCBBF2000951, FCBBF2001001, FCBBF2001088, FCBBF2001105, FCBBF2001116, FCBBF2001188, FCBBF2001238, FCBBF2001243, FCBBF2001309, FCBBF2001400, FCBBF2001427, FCBBF2001480, FCBBF2001529, FCBBF2001672, FCBBF2001675, FCBBF2001718, FCBBF2001720, FCBBF2001817, FCBBF2001868, FCBBF2002044, FCBBF2002111, FCBBF2002281, FCBBF2002370, FCBBF2002541, FCBBF2002897, FCBBF2002898, FCBBF2002904, FCBBF2002928, FCBBF2002953, FCBBF2003083, FCBBF2003102, FCBBF2003269, FCBBF2003293, FCBBF2003297, FCBBF2003395, FCBBF2003528, FCBBF2003543, FCBBF2003549, FCBBF2003636, FCBBF2003823, FCBBF2003895, FCBBF2004090, FCBBF2004138, FCBBF2004217, FCBBF2004256, FCBBF2004373, FCBBF2004448, FCBBF2004671, FCBBF2004707, FCBBF2004788, FCBBF2005069, FCBBF2005122, FCBBF2005439, FCBBF2005538, FCBBF2005637, FCBBF2005645, FCBBF2005658, FCBBF2005733, FCBBF2006131, FCBBF2006380, FCBBF2006418, FCBBF2006452, FCBBF2006634, FCBBF2007012, FCBBF2007186, FCBBF2007265, FCBBF2007302, FCBBF2007610, FCBBF2007633, FCBBF3000102, FCBBF3000110, FCBBF3000120, FCBBF3000227, FCBBF3000229, FCBBF3000233, FCBBF3000361, FCBBF3000367, FCBBF3000462, FCBBF3000473, FCBBF3000501, FCBBF3000518, FCBBF3000536, FCBBF3000550, FCBBF3000847, FCBBF3001018, FCBBF3001020, FCBBF3001235, FCBBF3001281, FCBBF3001302, FCBBF3001377, FCBBF3001594, FCBBF3001890, FCBBF3001912, FCBBF3001914, FCBBF3001918, FCBBF3001924, FCBBF3002163, FCBBF3002188, FCBBF3002190, FCBBF3002268, FCBBF3002475, FCBBF3002556, FCBBF3002592, FCBBF3002658, FCBBF3002782, FCBBF3002818, FCBBF3002925, FCBBF3003216, FCBBF3003305, FCBBF3003373, FCBBF3003435, FCBBF3003475, FCBBF3003481, FCBBF3003557, FCBBF3003787, FCBBF3003902, FCBBF3004021, FCBBF3004041, FCBBF3004261, FCBBF3004390, FCBBF3004409, FCBBF3004502, FCBBF3004715, FCBBF3004842, FCBBF3004847, FCBBF3004955, FCBBF3005160, FCBBF3005218, FCBBF3005320, FCBBF3005444, FCBBF3005497, FCBBF3005698, FCBBF3005729, FCBBF3006171, FCBBF3006249, FCBBF3006288, FCBBF3006399, FCBBF3006628, FCBBF3007077, FCBBF3007150, FCBBF3007152, FCBBF3007242, FCBBF3007244, FCBBF3007248, FCBBF3007453, FCBBF3007462, FCBBF3007540, FCBBF3007597, FCBBF3007604, FCBBF3007829, FCBBF3007855, FCBBF3008073, FCBBF3008159, FCBBF3008251, FCBBF3008311, FCBBF3008362, FCBBF3008382, FCBBF3008475, FCBBF3008556, FCBBF3008644, FCBBF3008748, FCBBF3008870, FCBBF3008938, FCBBF3008944, FCBBF3009101, FCBBF3009152, FCBBF3009256, FCBBF3009317, FCBBF3009428, FCBBF3009464, FCBBF3009479, FCBBF3009703, FCBBF3009717, FCBBF3009888, FCBBF3009949, FCBBF3009978, FCBBF3010008, FCBBF3010124, FCBBF3010130, FCBBF3010149, FCBBF3010211, FCBBF3010361, FCBBF3010544, FCBBF3010586, FCBBF3010601, FCBBF3010665, FCBBF3010729, FCBBF3010733, FCBBF3011003, FCBBF3011418, FCBBF3011485, FCBBF3011523, FCBBF3011570, FCBBF3011592, FCBBF3011867, FCBBF3011889, FCBBF3012170, FCBBF3012288, FCBBF3012332, FCBBF3012347, FCBBF3012443, FCBBF3012588, FCBBF3012842, FCBBF3012901, FCBBF3013041, FCBBF3013058, FCBBF3013205, FCBBF3013266, FCBBF3013307, FCBBF3013341, FCBBF3013589, FCBBF3013623, FCBBF3013800, FCBBF3013846, FCBBF3014229, FCBBF3014355, FCBBF3014567, FCBBF3014770, FCBBF3015119, FCBBF3015131, FCBBF3015317, FCBBF3015727, FCBBF3015758, FCBBF3015809, FCBBF3015870, FCBBF3016018, FCBBF3016134, FCBBF3016178, FCBBF3016451, FCBBF3016618, FCBBF3016622, FCBBF3016644, FCBBF3016667, FCBBF3016987, FCBBF3017024, FCBBF3017059, FCBBF3017071, FCBBF3017123, FCBBF3017233, FCBBF3017255, FCBBF3017288, FCBBF3017535, FCBBF3017681, FCBBF3017729, FCBBF3017873, FCBBF3017974, FCBBF3018067, FCBBF3018173, FCBBF3018591, FCBBF3018753, FCBBF3018949, FCBBF3019085, FCBBF3019437, FCBBF3019455, FCBBF3019564, FCBBF3019570, FCBBF3019663, FCBBF3019716, FCBBF3019784, FCBBF3019867, FCBBF3019961, FCBBF3020030, FCBBF3020138, FCBBF3020140, FCBBF3020163, FCBBF3020232, FCBBF3020599, FCBBF3021026, FCBBF3021191, FCBBF3021221, FCBBF3021501, FCBBF3021506, FCBBF3021524, FCBBF3021940, FCBBF3021985, FCBBF3022005, FCBBF3022504, FCBBF3022566, FCBBF3022767, FCBBF3022894, FCBBF3023061, FCBBF3023078, FCBBF3023368, FCBBF3023372, FCBBF3023443, FCBBF3023599, FCBBF3023704, FCBBF3023887, FCBBF3023895, FCBBF3024096, FCBBF3024225, FCBBF3024364, FCBBF3024623, FCBBF3024911, FCBBF3025098, FCBBF3025252, FCBBF3025280, FCBBF3025285, FCBBF3025528, FCBBF3025568, FCBBF3025650, FCBBF3025674, FCBBF3025730, FCBBF3025737, FCBBF3026021, FCBBF3026048, FCBBF3026251, FCBBF3026308, FCBBF3026678, FCBBF3027104, FCBBF3027199, FCBBF3027328, FCBBF3027559, FCBBF3027717, FCBBF3027755, FCBBF3027768, FCBBF3027854, FCBBF3027863, FCBBF3027903, FCBBF3028102, FCBBF3028143, FCBBF3028188, FCBBF3028202, FCBBF3028472, FCBBF3028528, FCBBF3028582, FCBBF3028593, FCBBF3028671, FCBBF3028794, FCBBF4000061, FCBBF4000076, FCBBF4000173, FCBBF4000192, FCBBF4000193, FCBBF4000268, FCBBF4000282, FCBBF4000399, FCBBF4000415, FCBBF4000500, FCBBF4000529, FCBBF5000041, FCBBF5000061, FCBBF5000261, FCBBF5000384, FCBBF5000483, FCBBF5000495, FEBRA1000005, FEBRA1000008, FEBRA1000030, FEBRA1000138, FEBRA1000148, FEBRA1000149, FEBRA1000183, FEBRA1000190, FEBRA2000021, FEBRA2000035, FEBRA2000053, FEBRA2000126, FEBRA2000220, FEBRA2000228, FEBRA2000253, FEBRA2000282, FEBRA2000286, FEBRA2000297, FEBRA2000311, FEBRA2000321, FEBRA2000333, FEBRA2000378, FEBRA2000391, FEBRA2000394, FEBRA2000397, FEBRA2000399, FEBRA2000409, FEBRA2000415, FEBRA2000436, FEBRA2000454, FEBRA2000468, FEBRA2000491, FEBRA2000504, FEBRA2000510, FEBRA2000532, FEBRA2000538, FEBRA2000575, FEBRA2000656, FEBRA2000659, FEBRA2000690, FEBRA2000727, FEBRA2000734, FEBRA2000762, FEBRA2000772, FEBRA2000790, FEBRA2000803, FEBRA2000805, FEBRA2000809, FEBRA2000856, FEBRA2000862, FEBRA2000901, FEBRA2000909, FEBRA2000917, FEBRA2000928, FEBRA2000936, FEBRA2000937, FEBRA2000959, FEBRA2001012, FEBRA2001020, FEBRA2001093, FEBRA2001124, FEBRA2001133, FEBRA2001161, FEBRA2001175, FEBRA2001217, FEBRA2001227, FEBRA2001267, FEBRA2001351, FEBRA2001438, FEBRA2001440, FEBRA2001487, FEBRA2001523, FEBRA2001561, FEBRA2001581, FEBRA2001584, FEBRA2001590, FEBRA2001591, FEBRA2001610, FEBRA2001620, FEBRA2001659, FEBRA2001698, FEBRA2001705, FEBRA2001706, FEBRA2001772, FEBRA2001790, FEBRA2001867, FEBRA2001914, FEBRA2001989, FEBRA2002009, FEBRA2002086, FEBRA2002109, FEBRA2002260, FEBRA2002399, FEBRA2002410, FEBRA2002429, FEBRA2002442, FEBRA2002508, FEBRA2002525, FEBRA2002552, FEBRA2002574, FEBRA2002601, FEBRA2002611, FEBRA2002628, FEBRA2002662, FEBRA2002682, FEBRA2002707, FEBRA2002727, FEBRA2002783, FEBRA2002818, FEBRA2002858, FEBRA2002882, FEBRA2002897, FEBRA2002908, FEBRA2002962, FEBRA2002986, FEBRA2003054, FEBRA2003115, FEBRA2003155, FEBRA2003163, FEBRA2003181, FEBRA2003198, FEBRA2003253, FEBRA2003275, FEBRA2003308, FEBRA2003327, FEBRA2003429, FEBRA2003454, FEBRA2003468, FEBRA2003520, FEBRA2003524, FEBRA2003675, FEBRA2003707, FEBRA2003711, FEBRA2003822, FEBRA2003897, FEBRA2003930, FEBRA2004023, FEBRA2004026, FEBRA2004029, FEBRA2004053, FEBRA2004056, FEBRA2004110, FEBRA2004191, FEBRA2004202, FEBRA2004219, FEBRA2004325, FEBRA2004329, FEBRA2004331, FEBRA2004443, FEBRA2004490, FEBRA2004538, FEBRA2004592, FEBRA2004651, FEBRA2004813, FEBRA2004840, FEBRA2004852, FEBRA2004867, FEBRA2004914, FEBRA2004933, FEBRA2004987, FEBRA2005014, FEBRA2005036, FEBRA2005216, FEBRA2005291, FEBRA2005377, FEBRA2005380, FEBRA2005427, FEBRA2005458, FEBRA2005701, FEBRA2005726, FEBRA2005778, FEBRA2005787, FEBRA2005995, FEBRA2005998, FEBRA2006055, FEBRA2006061, FEBRA2006150, FEBRA2006165, FEBRA2006315, FEBRA2006354, FEBRA2006370, FEBRA2006379, FEBRA2006409, FEBRA2006418, FEBRA2006427, FEBRA2006476, FEBRA2006491, FEBRA2006627, FEBRA2006664, FEBRA2006667, FEBRA2006726, FEBRA2006793, FEBRA2006817, FEBRA2006890, FEBRA2006942, FEBRA2006977, FEBRA2007176, FEBRA2007200, FEBRA2007247, FEBRA2007280, FEBRA2007414, FEBRA2007436, FEBRA2007449, FEBRA2007458, FEBRA2007551, FEBRA2007566, FEBRA2007620, FEBRA2007793, FEBRA2007818, FEBRA2007823, FEBRA2007931, FEBRA2007957, FEBRA2008009, FEBRA2008086, FEBRA2008135, FEBRA2008165, FEBRA2008172, FEBRA2008266, FEBRA2008282, FEBRA2008311, FEBRA2008341, FEBRA2008360, FEBRA2008468, FEBRA2008475, FEBRA2008481, FEBRA2008542, FEBRA2008660, FEBRA2008681, FEBRA2008692, FEBRA2008741, FEBRA2008755, FEBRA2008836, FEBRA2008866, FEBRA2008881, FEBRA2008983, FEBRA2009016, FEBRA2009029, FEBRA2009074, FEBRA2009117, FEBRA2009120, FEBRA2009162, FEBRA2009240, FEBRA2009265, FEBRA2009276, FEBRA2009327, FEBRA2009352, FEBRA2009362, FEBRA2009385, FEBRA2009416, FEBRA2009437, FEBRA2009478, FEBRA2009507, FEBRA2009541, FEBRA2009567, FEBRA2009588, FEBRA2009731, FEBRA2009754, FEBRA2009780, FEBRA2009846, FEBRA2009986, FEBRA2010141, FEBRA2010299, FEBRA2010484, FEBRA2010768, FEBRA2010802, FEBRA2011063, FEBRA2011090, FEBRA2011356, FEBRA2011392, FEBRA2011414, FEBRA2011593, FEBRA2011665, FEBRA2012090, FEBRA2012120, FEBRA2012195, FEBRA2012397, FEBRA2012418, FEBRA2012625, FEBRA2013019, FEBRA2013069, FEBRA2013274, FEBRA2013465, FEBRA2013570, FEBRA2013905, FEBRA2013951, FEBRA2014010, FEBRA2014122, FEBRA2014198, FEBRA2014213, FEBRA2014443, FEBRA2014578, FEBRA2015076, FEBRA2015175, FEBRA2015292, FEBRA2015588, FEBRA2016112, FEBRA2016398, FEBRA2016572, FEBRA2016583, FEBRA2016621, FEBRA2016654, FEBRA2016739, FEBRA2017098, FEBRA2017138, FEBRA2017154, FEBRA2017200, FEBRA2017223, FEBRA2017333, FEBRA2017502, FEBRA2017736, FEBRA2017780, FEBRA2017811, FEBRA2017850, FEBRA2018051, FEBRA2018407, FEBRA2019172, FEBRA2019298, FEBRA2019457, FEBRA2019519, FEBRA2019582, FEBRA2019637, FEBRA2019663, FEBRA2019690, FEBRA2019711, FEBRA2019867, FEBRA2020406, FEBRA2020566, FEBRA2020582, FEBRA2020668, FEBRA2020801, FEBRA2020845, FEBRA2020886, FEBRA2020977, FEBRA2021134, FEBRA2021339, FEBRA2021431, FEBRA2021497, FEBRA2021571, FEBRA2021892, FEBRA2021908, FEBRA2022013, FEBRA2022148, FEBRA2022204, FEBRA2022255, FEBRA2022322, FEBRA2022504, FEBRA2022696, FEBRA2022729, FEBRA2022787, FEBRA2022911, FEBRA2022956, FEBRA2022963, FEBRA2022972, FEBRA2023227, FEBRA2023285, FEBRA2023351, FEBRA2023498, FEBRA2023721, FEBRA2023989, FEBRA2023990, FEBRA2024136, FEBRA2024150, FEBRA2024343, FEBRA2024570, FEBRA2024693, FEBRA2024727, FEBRA2024744, FEBRA2024797, FEBRA2025249, FEBRA2025463, FEBRA2025477, FEBRA2026474, FEBRA2026582, FEBRA2026629, FEBRA2026769, FEBRA2026879, FEBRA2026890, FEBRA2026977, FEBRA2027082, FEBRA2027297, FEBRA2027352, FEBRA2027364, FEBRA2027609, FEBRA2028158, FEBRA2028222, FEBRA2028366, FEBRA2028457, FEBRA2028477, FEHRT2000325, FEHRT2000364, FEKID1000018, FELIV1000101, FELIV1000164, FELNG2000241, HCASM1000021, HCASM1000050, HCASM1000061, HCASM1000130, HCASM2000202, HCASM2000266, HCASM2000307, HCASM2000363, HCASM2000534, HCASM2000536, HCASM2000560, HCASM2000871, HCASM2001285, HCASM2001810, HCASM2001866, HCASM2001890, HCASM2002148, HCASM2002502, HCASM2002754, HCASM2002918, HCASM2003018, HCASM2003076, HCASM2003099, HCASM2003212, HCASM2003237, HCASM2003357, HCASM2005484, HCASM2006131, HCASM2006338, HCASM2006359, HCASM2006632, HCASM2007047, HCASM2007317, HCASM2007737, HCASM2007773, HCASM2008154, HCASM2008536, HCASM2009405, HCASM2009424, HCASM2009463, HCASM2009588, HCHON1000131, HCHON1000142, HCHON1000176, HCHON2000028, HCHON2000038, HCHON2000087, HCHON2000100, HCHON2000156, HCHON2000199, HCHON2000212, HCHON2000271, HCHON2000315, HCHON2000322, HCHON2000344, HCHON2000364, HCHON2000373, HCHON2000395, HCHON2000417, HCHON2000418, HCHON2000503, HCHON2000660, HCHON2000663, HCHON2000673, HCHON2000699, HCHON2000705, HCHON2000738, HCHON2000751, HCHON2000817, HCHON2000818, HCHON2000832, HCHON2000851, HCHON2000898, HCHON2000935, HCHON2000942, HCHON2000956, HCHON2000994, HCHON2001084, HCHON2001099, HCHON2001110, HCHON2001116, HCHON2001214, HCHON2001233, HCHON2001269, HCHON2001450, HCHON2001453, HCHON2001519, HCHON2001523, HCHON2001535, HCHON2001546, HCHON2001548, HCHON2001577, HCHON2001598, HCHON2001604, HCHON2001607, HCHON2001646, HCHON2001712, HCHON2001768, HCHON2001801, HCHON2002123, HCHON2002194, HCHON2002241, HCHON2002496, HCHON2002676, HCHON2002770, HCHON2002964, HCHON2002971, HCHON2003131, HCHON2003134, HCHON2003327, HCHON2003513, HCHON2003532, HCHON2003642, HCHON2003659, HCHON2003676, HCHON2004007, HCHON2004279, HCHON2004359, HCHON2004531, HCHON2004776, HCHON2004858, HCHON2005048, HCHON2005118, HCHON2005166, HCHON2005802, HCHON2005987, HCHON2006250, HCHON2006459, HCHON2006714, HCHON2006722, HCHON2006770, HCHON2006786, HCHON2006841, HCHON2006871, HCHON2007046, HCHON2007482, HCHON2007650, HCHON2007674, HCHON2007774, HCHON2007881, HCHON2008239, HCHON2008444, HCHON2008582, HCHON2008672, HCHON2008856, HCHON2008871, HCHON2008989, HCHON2009191, HCHON2009384, HCHON2009749, HCHON2009766, HCHON2009795, HCHON2010074, HEART1000088, HEART1000099, HEART1000102, HEART1000118, HEART1000132, HEART1000139, HEART1000142, HEART1000151, HEART1000185, HEART2000024, HEART2000035, HEART2000099, HEART2000298, HEART2000309, HEART2000411, HEART2000418, HEART2000444, HEART2000448, HEART2000492, HEART2000541, HEART2000568, HEART2000611, HEART2001680, HEART2001756, HEART2002129, HEART2002184, HEART2002220, HEART2002432, HEART2002531, HEART2002598, HEART2002717, HEART2003027, HEART2003168, HEART2003432, HEART2003440, HEART2003781, HEART2003836, HEART2004570, HEART2004764, HEART2004931, HEART2004940, HEART2004941, HEART2004980, HEART2005244, HEART2005581, HEART2005610, HEART2006131, HEART2006195, HEART2006310, HEART2006334, HEART2006557, HEART2006787, HEART2006789, HEART2006909, HEART2007031, HEART2007443, HEART2007696, HEART2007767, HEART2008108, HEART2008111, HEART2008257, HEART2008509, HEART2008994, HEART2009599, HEART2009680, HEART2010391, HEART2010492, HEART2010495, HELAC2000158, HELAC2000301, HHDPC1000001, HHDPC1000065, HHDPC1000118, HHDPC2000070, HHDPC2000102, HHDPC2000258, HHDPC2000315, HHDPC2000462, HHDPC2000572, HHDPC2000656, HHDPC2000692, HHDPC2001337, HHDPC2001432, HHDPC2001896, HHDPC2002963, HHDPC2003049, HHDPC2003113, HHDPC2003381, HHDPC2003472, HHDPC2004757, HHDPC2005185, HHDPC2005513, HHDPC2005742, HHDPC2006460, HHDPC2006927, HHDPC2007302, HHDPC2007775, HHDPC2008123, HHDPC2008185, HHDPC2008279, HHDPC2008297, HHDPC2008414, HHDPC2008474, HHDPC2008816, HHDPC2008843, HHDPC2009114, HHDPC2009178, HHDPC2009208, HHDPC2009272, HLUNG1000017, HLUNG1000024, HLUNG1000030, HLUNG1000034, HLUNG1000037, HLUNG1000053, HLUNG1000076, HLUNG1000084, HLUNG1000091, HLUNG1000099, HLUNG1000104, HLUNG1000105, HLUNG1000110, HLUNG1000151, HLUNG1000169, HLUNG2000004, HLUNG2000014, HLUNG2000027, HLUNG2000063, HLUNG2000068, HLUNG2000116, HLUNG2000125, HLUNG2000130, HLUNG2000142, HLUNG2000174, HLUNG2000176, HLUNG2000217, HLUNG2000255, HLUNG2000281, HLUNG2000315, HLUNG2000340, HLUNG2000362, HLUNG2000363, HLUNG2000431, HLUNG2000480, HLUNG2000489, HLUNG2000549, HLUNG2000557, HLUNG2000570, HLUNG2000751, HLUNG2000761, HLUNG2000777, HLUNG2000870, HLUNG2000884, HLUNG2000926, HLUNG2000950, HLUNG2000955, HLUNG2000970, HLUNG2001013, HLUNG2001126, HLUNG2001144, HLUNG2001214, HLUNG2001439, HLUNG2001459, HLUNG2001633, HLUNG2001677, HLUNG2001814, HLUNG2001996, HLUNG2002006, HLUNG2002050, HLUNG2002059, HLUNG2002085, HLUNG2002145, HLUNG2002295, HLUNG2002303, HLUNG2002334, HLUNG2002405, HLUNG2002429, HLUNG2002562, HLUNG2002659, HLUNG2002707, HLUNG2002916, HLUNG2002942, HLUNG2002949, HLUNG2002958, HLUNG2002982, HLUNG2003003, HLUNG2003042, HLUNG2003049, HLUNG2003061, HLUNG2003162, HLUNG2003246, HLUNG2003306, HLUNG2003331, HLUNG2003335, HLUNG2003497, HLUNG2003691, HLUNG2003710, HLUNG2003714, HLUNG2003778, HLUNG2003833, HLUNG2003872, HLUNG2003918, HLUNG2003991, HLUNG2004014, HLUNG2004037, HLUNG2004154, HLUNG2004217, HLUNG2004273, HLUNG2004388, HLUNG2004416, HLUNG2004521, HLUNG2004534, HLUNG2004684, HLUNG2004707, HLUNG2004774, HLUNG2004775, HLUNG2005012, HLUNG2005030, HLUNG2005045, HLUNG2005076, HLUNG2005133, HLUNG2005203, HLUNG2005230, HLUNG2005479, HLUNG2005524, HLUNG2005738, HLUNG2005774, HLUNG2005813, HLUNG2005924, HLUNG2006026, HLUNG2006067, HLUNG2006094, HLUNG2006370, HLUNG2006397, HLUNG2006570, HLUNG2006599, HLUNG2006614, HLUNG2006671, HLUNG2006781, HLUNG2006843, HLUNG2006852, HLUNG2006935, HLUNG2007041, HLUNG2007210, HLUNG2007219, HLUNG2007245, HLUNG2007433, HLUNG2007931, HLUNG2008066, HLUNG2008225, HLUNG2008235, HLUNG2008247, HLUNG2008333, HLUNG2008384, HLUNG2008396, HLUNG2008439, HLUNG2008479, HLUNG2008480, HLUNG2008521, HLUNG2008833, HLUNG2008875, HLUNG2008958, HLUNG2008959, HLUNG2009067, HLUNG2009215, HLUNG2009253, HLUNG2009303, HLUNG2009413, HLUNG2009729, HLUNG2010181, HLUNG2010464, HLUNG2010562, HLUNG2010845, HLUNG2011041, HLUNG2011298, HLUNG2011461, HLUNG2011833, HLUNG2012049, HLUNG2012287, HLUNG2012315, HLUNG2012546, HLUNG2012600, HLUNG2012727, HLUNG2013097, HLUNG2013204, HLUNG2013304, HLUNG2013350, HLUNG2013622, HLUNG2013643, HLUNG2013784, HLUNG2013851, HLUNG2014262, HLUNG2014288, HLUNG2014449, HLUNG2014821, HLUNG2015184, HLUNG2015418, HLUNG2015548, HLUNG2015578, HLUNG2015617, HLUNG2016022, HLUNG2016862, HLUNG2017286, HLUNG2017307, HLUNG2017350, HLUNG2017546, HLUNG2017806, HLUNG2018029, HLUNG2018282, HLUNG2018626, HLUNG2019058, HSYRA1000131, HSYRA1000148, HSYRA2000044, HSYRA2000135, HSYRA2000221, HSYRA2000237, HSYRA2000253, HSYRA2000332, HSYRA2000371, HSYRA2000424, HSYRA2000507, HSYRA2000510, HSYRA2000605, HSYRA2000760, HSYRA2000792, HSYRA2000832, HSYRA2000927, HSYRA2001103, HSYRA2001142, HSYRA2001153, HSYRA2001232, HSYRA2001255, HSYRA2001332, HSYRA2001353, HSYRA2001420, HSYRA2001484, HSYRA2001552, HSYRA2001580, HSYRA2001631, HSYRA2001638, HSYRA2002103, HSYRA2002590, HSYRA2002741, HSYRA2003168, HSYRA2004550, HSYRA2004858, HSYRA2005456, HSYRA2005496, HSYRA2005628, HSYRA2005970, HSYRA2006049, HSYRA2006873, HSYRA2007241, HSYRA2007338, HSYRA2007650, HSYRA2007667, HSYRA2008154, HSYRA2008714, HSYRA2009102, IMR321000155, IMR321000161, IMR321000165, IMR321000207, IMR321000230, IMR321000253, IMR322000010, IMR322000107, IMR322000144, IMR322000152, IMR322000164, IMR322000178, IMR322000302, IMR322000374, IMR322000379, IMR322000383, IMR322000418, IMR322000604, IMR322000609, IMR322000656, IMR322000672, IMR322000791, IMR322000811, IMR322000838, IMR322000917, IMR322000919, IMR322000935, IMR322000953, IMR322000984, IMR322001018, IMR322001167, IMR322001185, IMR322001245, IMR322001452, IMR322001491, IMR322001665, IMR322001710, IMR322001724, IMR322001879, IMR322002035, IMR322002110, IMR322002470, IMR322002993, IMR322003675, IMR322004768, IMR322005293, IMR322005833, IMR322006012, IMR322006222, IMR322006495, IMR322006520, IMR322006886, IMR322006947, IMR322007078, IMR322007225, IMR322007704, IMR322008651, IMR322009807, IMR322010295, IMR322010953, IMR322011689, IMR322012314, IMR322012529, IMR322013053, IMR322013396, IMR322013731, IMR322013805, IMR322015523, IMR322016146, IMR322017049, IMR322018117, IMR322018192, JCMLC2000273, KIDNE1000008, KIDNE100012, KIDNE1000015, KIDNE1000028, KIDNE1000036, KIDNE1000064, KIDNE1000121, KIDNE1000143, KIDNE1000152, KIDNE2000026, KIDNE2000041, KIDNE2000046, KIDNE2000051, KIDNE2000070, KIDNE2000167, KIDNE2000174, KIDNE2000192, KIDNE2000227, KIDNE2000244, KIDNE2000245, KIDNE2000287, KIDNE2000315, KIDNE2000317, KIDNE2000328, KIDNE2000330, KIDNE2000335, KIDNE2000375, KIDNE2000394, KIDNE2000403, KIDNE2000422, KIDNE2000493, KIDNE2000497, KIDNE2000510, KIDNE2000513, KIDNE2000517, KIDNE2000519, KIDNE2000555, KIDNE2000624, KIDNE2000678, KIDNE2000717, KIDNE2000721, KIDNE2000722, KIDNE2000777, KIDNE2000801, KIDNE2000832, KIDNE2000833, KIDNE2000846, KIDNE2000867, KIDNE2001117, KIDNE2001140, KIDNE2001269, KIDNE2001361, KIDNE2001373, KIDNE2001636, KIDNE2001713, KIDNE2001802, KIDNE2001840, KIDNE2001847, KIDNE2001857, KIDNE2001873, KIDNE2001897, KIDNE2001931, KIDNE2001979, KIDNE2002015, KIDNE2002162, KIDNE2002168, KIDNE2002198, KIDNE2002252, KIDNE2002262, KIDNE2002438, KIDNE2002483, KIDNE2002768, KIDNE2002795, KIDNE2002798, KIDNE2002839, KIDNE2002845, KIDNE2002872, KIDNE2002882, KIDNE2002883, KIDNE2002980, KIDNE2002991, KIDNE2003185, KIDNE2003188, KIDNE2003316, KIDNE2003335, KIDNE2003357, KIDNE2003373, KIDNE2003377, KIDNE2003507, KIDNE2003752, KIDNE2003837, KIDNE2003994, KIDNE2004034, KIDNE2004084, KIDNE2004095, KIDNE2004233, KIDNE2004262, KIDNE2004279, KIDNE2004294, KIDNE2004295, KIDNE2004305, KIDNE2004344, KIDNE2004394, KIDNE2004411, KIDNE2004519, KIDNE2004520, KIDNE2004531, KIDNE2004534, KIDNE2004562, KIDNE2004579, KIDNE2004626, KIDNE2004681, KIDNE2004828, KIDNE2004846, KIDNE2004864, KIDNE2004879, KIDNE2004981, KIDNE2004985, KIDNE2004999, KIDNE2005038, KIDNE2005042, KIDNE2005062, KIDNE2005266, KIDNE2005296, KIDNE2005321, KIDNE2005327, KIDNE2005336, KIDNE2005400, KIDNE2005424, KIDNE2005477, KIDNE2005526, KIDNE2005543, KIDNE2005603, KIDNE2005629, KIDNE2005781, KIDNE2005798, KIDNE2005854, KIDNE2005908, KIDNE2005937, KIDNE2006009, KIDNE2006014, KIDNE2006030, KIDNE2006039, KIDNE2006053, KIDNE2006062, KIDNE2006092, KIDNE2006145, KIDNE2006149, KIDNE2006210, KIDNE2006299, KIDNE2006334, KIDNE2006353, KIDNE2006376, KIDNE2006378, KIDNE2006652, KIDNE2006687, KIDNE2006733, KIDNE2006811, KIDNE2006820, KIDNE2007005, KIDNE2007040, KIDNE2007077, KIDNE2007186, KIDNE2007222, KIDNE2007328, KIDNE2007356, KIDNE2007422, KIDNE2007569, KIDNE2007810, KIDNE2007811, KIDNE2007910, KIDNE2007944, KIDNE2008022, KIDNE2008072, KIDNE2008116, KIDNE2008117, KIDNE2008218, KIDNE2008315, KIDNE2008378, KIDNE2008404, KIDNE2008446, KIDNE2008473, KIDNE2008480, KIDNE2008649, KIDNE2008666, KIDNE2008697, KIDNE2008758, KIDNE2008788, KIDNE2008795, KIDNE2008824, KIDNE2008832, KIDNE2008869, KIDNE2008914, KIDNE2008975, KIDNE2008987, KIDNE2009019, KIDNE2009109, KIDNE2009180, KIDNE2009191, KIDNE2009332, KIDNE2009426, KIDNE2009467, KIDNE2009490, KIDNE2009553, KIDNE2009605, KIDNE2009628, KIDNE2009647, KIDNE2009676, KIDNE2009723, KIDNE2010007, KIDNE2010049, KIDNE2010052, KIDNE2010084, KIDNE2010137, KIDNE2010151, KIDNE2010264, KIDNE2010265, KIDNE2010271, KIDNE2010419, KIDNE2010430, KIDNE2010574, KIDNE2010674, KIDNE2010739, KIDNE2010750, KIDNE2010762, KIDNE2010863, KIDNE2010973, KIDNE2010989, KIDNE2011200, KIDNE2011314, KIDNE2011508, KIDNE2011532, KIDNE2011635, KIDNE2011782, KIDNE2011858, KIDNE2012025, KIDNE2012188, KIDNE2012316, KIDNE2012361, KIDNE2012453, KIDNE2012563, KIDNE2012601, KIDNE2012613, KIDNE2012710, KIDNE2012745, KIDNE2012775, KIDNE2012784, KIDNE2012945, KIDNE2013045, KIDNE2013095, KIDNE2013158, KIDNE2013218, KIDNE2013263, KIDNE2013346, KIDNE2013388, KIDNE2013413, KIDNE2013489, KIDNE2013639, KIDNE2013731, KIDNE2013734, KIDNE2013775, KIDNE2013801, KIDNE2013866, KIDNE2014087, KIDNE2014112, KIDNE2014119, KIDNE2014170, KIDNE2014184, KIDNE2014268, KIDNE2014298, KIDNE2014320, KIDNE2014325, KIDNE2014415, KIDNE2014489, KIDNE2014496, KIDNE2014661, KIDNE2014717, KIDNE2014789, KIDNE2014808, KIDNE2014890, KIDNE2015073, KIDNE2015221, KIDNE2015244, KIDNE2015313, KIDNE2015433, KIDNE2015445, KIDNE2015483, KIDNE2015515, KIDNE2015546, KIDNE2015556, KIDNE2015598, KIDNE2015660, KIDNE2015987, KIDNE2016000, KIDNE2016036, KIDNE2016096, KIDNE2016142, KIDNE2016188, KIDNE2016327, KIDNE2016388, KIDNE2016464, KIDNE2016539, KIDNE2016570, KIDNE2016918, KIDNE2017007, KIDNE2017052, KIDNE2017151, KIDNE2017315, KIDNE2017332, KIDNE2017343, KIDNE2017454, KIDNE2017603, KIDNE2017956, KIDNE2018166, KIDNE2018167, KIDNE2018254, KIDNE2018268, KIDNE2018269, KIDNE2018287, KIDNE2018294, KIDNE2018352, KIDNE2018462, KIDNE2018617, KIDNE2018678, KIDNE2018727, KIDNE2018863, KIDNE2018989, KIDNE2018996, KIDNE2019074, KIDNE2019187, LIVER1000017, LIVER1000050, LIVER1000055, LIVER1000058, LIVER1000063, LIVER1000067, LIVER1000073, LIVER1000082, LIVER1000099, LIVER1000111, LIVER1000126, LIVER1000139, LIVER1000155, LIVER1000165, LIVER1000175, LIVER1000224, LIVER1000278, LIVER1000303, LIVER1000397, LIVER1000421, LIVER1000433, LIVER1000479, LIVER1000482, LIVER1000542, LIVER2000003, LIVER2000158, LIVER2000216, LIVER2000237, LIVER2000247, LIVER2000360, LIVER2000416, LIVER2000446, LIVER2000515, LIVER2000592, LIVER2000626, LIVER2000682, LIVER2000769, LIVER2000775, LIVER2001051, LIVER2001076, LIVER2001099, LIVER2001113, LIVER2001164, LIVER2001191, LIVER2001329, LIVER2001389, LIVER2001461, LIVER2001539, LIVER2001608, LIVER2001835, LIVER2002638, LIVER2002644, LIVER2002660, LIVER2002702, LIVER2003065, LIVER2003234, LIVER2003511, LIVER2003524, LIVER2003568, LIVER2003581, LIVER2003800, LIVER2003854, LIVER2004074, LIVER2004392, LIVER2004514, LIVER2004565, LIVER2005028, LIVER2005198, LIVER2005218, LIVER2005376, LIVER2005385, LIVER2005512, LIVER2005520, LIVER2005527, LIVER2005544, LIVER2005625, LIVER2005728, LIVER2005789, LIVER2005973, LIVER2005981, LIVER2006251, LIVER2006410, LIVER2006469, LIVER2006644, LIVER2006764, LIVER2007415, LIVER2007548, LIVER2007568, LIVER2007721, LIVER2008053, LIVER2008473, LIVER2008580, LIVER2008706, LIVER2008751, LIVER2008945, LIVER2008998, LIVER2009110, LIVER2009118, LIVER2009554, LYMPB1000141, LYMPB1000158, LYMPB2000083, MAMGL1000017, MAMGL1000096, MAMGL1000132, MAMGL1000151, MAMGL1000178, MAMGL1000182, MAMGL1000184, MESAN1000032, MESAN1000035, MESAN1000079, MESAN1000121, MESAN1000147, MESAN1000180, MESAN2000023, MESAN2000026, MESAN2000067, MESAN2000092, MESAN2000149, MESAN2000167, MESAN2000264, MESAN2000291, MESAN2000337, MESAN2000434, MESAN2000457, MESAN2000462, MESAN2000620, MESAN2000711, MESAN2000815, MESAN2000894, MESAN2000909, MESAN2001627, MESAN2001770, MESAN2001979, MESAN2001980, MESAN2002113, MESAN2002147, MESAN2002424, MESAN2002687, MESAN2002709, MESAN2002790, MESAN2002844, MESAN2002940, MESAN2002978, MESAN2003035, MESAN2003037, MESAN2003039, MESAN2003058, MESAN2003101, MESAN2003190, MESAN2003322, MESAN2003444, MESAN2003490, MESAN2003529, MESAN2003646, MESAN2003662, MESAN2003851, MESAN2004138, MESAN2004288, MESAN2004575, MESAN2005284, MESAN2005303, MESAN2005371, MESAN2005633, MESAN2005724, MESAN2005808, MESAN2005811, MESAN2006022, MESAN2006043, MESAN2006328, MESAN2006580, MESAN2006599, MESAN2006743, MESAN2006953, MESAN2006971, MESAN2007032, MESAN2007440, MESAN2007597, MESAN2007755, MESAN2008222, MESAN2008415, MESAN2008460, MESAN2008536, MESAN2008679, MESAN2008821, MESAN2008926, MESAN2009019, MESAN2009081, MESAN2009105, MESAN2009311, MESAN2009418, MESAN2009503, MESAN2009522, MESAN2009580, MESAN2010031, MESAN2010114, MESAN2010312, MESAN2010321, MESAN2010681, MESAN2011545, MESAN2011597, MESAN2011627, MESAN2011632, MESAN2011977, MESAN2012113, MESAN2012586, MESAN2012708, MESAN2012735, MESAN2013019, MESAN2013022, MESAN2013183, MESAN2013211, MESAN2013283, MESAN2013611, MESAN2013674, MESAN2013845, MESAN2013908, MESAN2013936, MESAN2014192, MESAN2014295, MESAN2014298, MESAN2014412, MESAN2014624, MESAN2015277, MESAN2015391, MESAN2015401, MESAN2015501, MESAN2015708, MESAN2016159, MESAN2016304, MESAN2016409, MESAN2016552, MESAN2016965, MESAN2017152, MESAN2017417, MESAN2018209, MESAN2018576, MESAN2018670, MESTC1000147, MESTC2000150, MESTC2000153, MESTC2000170, N1ESE2000698, NB9N41000047, NB9N41000142, NB9N41000146, NB9N42000104, NB9N42000122, NB9N42000281, NB9N42000314, NB9N42000342, NB9N42000430, NB9N42000495, NB9N42001300, NCRRP1000129, NESOP1000010, NESOP1000087, NESOP1000108, NESOP2000231, NESOP2000452, NESOP2000499, NESOP2000504, NESOP2000744, NESOP2001144, NESOP2001433, NESOP2001656, NESOP2001694, NESOP2002352, NESOP2002418, NESOP2002487, NESOP2002738, NESOP2002780, NETRP1000034, NETRP1000082, NETRP2000086, NETRP2000182, NETRP2000439, NHNPC1000037, NHNPC1000084, NHNPC1000101, NHNPC1000124, NHNPC2000212, NHNPC2000606, NHNPC2000877, NHNPC2001108, NHNPC2001223, NHNPC2001312, NHNPC2001816, NHNPC2002565, NHNPC2002749, NOVAR1000015, NOVAR1000091, NOVAR1000102, NOVAR2000136, NOVAR2000352, NOVAR2000412, NOVAR2000710, NOVAR2000962, NOVAR2001108, NOVAR2001620, NOVAR2001783, NOVAR2001876, NOVAR2002039, NT2NE1000004, NT2NE1000023, NT2NE1000024, NT2NE1000059, NT2NE1000063, NT2NE1000073, NT2NE1000083, NT2NE1000120, NT2NE1000122, NT2NE1000175, NT2NE1000181, NT2NE1000185, NT2NE2000038, NT2NE2000054, NT2NE2000057, NT2NE2000064, NT2NE2000109, NT2NE2000137, NT2NE2000156, NT2NE2000222, NT2NE2000284, NT2NE2000299, NT2NE2000353, NT2NE2000356, NT2NE2000369, NT2NE2000374, NT2NE2000386, NT2NE2000390, NT2NE2000455, NT2NE2000470, NT2NE2000488, NT2NE2000536, NT2NE2000546, NT2NE2000548, NT2NE2000550, NT2NE2000586, NT2NE2000612, NT2NE2000636, NT2NE2000658, NT2NE2000706, NT2NE2000802, NT2NE2000808, NT2NE2000809, NT2NE2000950, NT2NE2000951, NT2NE2000980, NT2NE2001005, NT2NE2001021, NT2NE2001049, NT2NE2001142, NT2NE2001180, NT2NE2001181, NT2NE2001188, NT2NE2001191, NT2NE2001247, NT2NE2001252, NT2NE2001326, NT2NE2001372, NT2NE2001428, NT2NE2001432, NT2NE2001524, NT2NE2001530, NT2NE2001598, NT2NE2001617, NT2NE2001623, NT2NE2001626, NT2NE2001634, NT2NE2001648, NT2NE2001660, NT2NE2001666, NT2NE2001677, NT2NE2001698, NT2NE2001723, NT2NE2001725, NT2NE2001874, NT2NE2001889, NT2NE2001923, NT2NE2002100, NT2NE2002162, NT2NE2002186, NT2NE2002285, NT2NE2002311, NT2NE2002620, NT2NE2002651, NT2NE2002732, NT2NE2002768, NT2NE2002791, NT2NE2002856, NT2NE2002870, NT2NE2003150, NT2NE2003252, NT2NE2003280, NT2NE2003308, NT2NE2003309, NT2NE2003315, NT2NE2003393, NT2NE2003408, NT2NE2003457, NT2NE2003540, NT2NE2003571, NT2NE2003705, NT2NE2003752, NT2NE2003887, NT2NE2004255, NT2NE2004378, NT2NE2004490, NT2NE2004606, NT2NE2004716, NT2NE2004740, NT2NE2004787, NT2NE2004916, NT2NE2005035, NT2NE2005223, NT2NE2005276, NT2NE2005323, NT2NE2005358, NT2NE2005371, NT2NE2005395, NT2NE2005441, NT2NE2005517, NT2NE2005537, NT2NE2005555, NT2NE2005588, NT2NE2005676, NT2NE2005720, NT2NE2005784, NT2NE2005804, NT2NE2005821, NT2NE2005921, NT2NE2005968, NT2NE2006075, NT2NE2006087, NT2NE2006103, NT2NE2006217, NT2NE2006288, NT2NE2006382, NT2NE2006387, NT2NE2006427, NT2NE2006432, NT2NE2006478, NT2NE2006531, NT2NE2006784, NT2NE2006813, NT2NE2006894, NT2NE2006942, NT2NE2006958, NT2NE2007052, NT2NE2007220, NT2NE2007425, NT2NE2007725, NT2NE2007727, NT2NE2007786, NT2NE2007877, NT2NE2007967, NT2NE2008017, NT2NE2008060, NT2NE2008077, NT2NE2008213, NT2NE2008260, NT2NE2008378, NT2NE2008607, NT2NE2008639, NT2NE2008727, NT2NE2008783, NT2NE2008785, NT2NE2008867, NT2NE2008961, NT2NE2008997, NT2NE2009138, NT2NE2009295, NT2NE2009426, NT2NE2009608, NT2NE2009691, NT2NE2010105, NT2NE2010150, NT2NE2010400, NT2NE2010632, NT2NE2010633, NT2NE2010654, NT2NE2010688, NT2NE2010781, NT2NE2010854, NT2NE2011033, NT2NE2011036, NT2NE2011107, NT2NE2011154, NT2NE2011221, NT2NE2011411, NT2NE2011485, NT2NE2011650, NT2NE2011684, NT2NE2011687, NT2NE2011691, NT2NE2011758, NT2NE2011823, NT2NE2011896, NT2NE2011998, NT2NE2012113, NT2NE2012243, NT2NE2012361, NT2NE2012448, NT2NE2012457, NT2NE2012493, NT2NE2012533, NT2NE2012603, NT2NE2012747, NT2NE2012790, NT2NE2012847, NT2NE2013019, NT2NE2013081, NT2NE2013189, NT2NE2013217, NT2NE2013547, NT2NE2014013, NT2NE2014028, NT2NE2014113, NT2NE2014176, NT2NE2014221, NT2NE2014525, NT2NE2014650, NT2NE2014651, NT2NE2014681, NT2NE2014758, NT2NE2014869, NT2NE2014950, NT2NE2015061, NT2NE2015262, NT2NE2015275, NT2NE2015480, NT2NE2015511, NT2NE2015565, NT2NE2015626, NT2NE2015747, NT2NE2015860, NT2NE2015885, NT2NE2015904, NT2NE2016041, NT2NE2016387, NT2NE2016419, NT2NE2016519, NT2NE2016608, NT2NE2016766, NT2NE2016774, NT2NE2016971, NT2NE2017259, NT2NE2017332, NT2NE2017397, NT2NE2017480, NT2NE2017492, NT2NE2017508, NT2NE2017562, NT2NE2017590, NT2NE2017612, NT2NE2017721, NT2NE2017752, NT2NE2017982, NT2NE2018165, NT2NE2018176, NT2NE2018273, NT2NE2018376, NT2NE2018472, NT2NE2018490, NT2NE2018594, NT2NE2018739, NT2NE2018916, NT2NE2019056, NT2NE2019076, NT2NE2019099, NT2RI1000016, NT2RI1000035, NT2RI1000048, NT2RI1000164, NT2RI1000172, NT2RI2000004, NT2RI2000007, NT2RI2000117, NT2RI2000128, NT2RI2000173, NT2RI2000187, NT2RI2000270, NT2RI2000276, NT2RI2000313, NT2RI2000341, NT2RI2000348, NT2RI2000421, NT2RI2000480, NT2RI2000575, NT2RI2000588, NT2RI2000597, NT2RI2000669, NT2RI2000688, NT2RI2000689, NT2RI2000704, NT2RI2000738, NT2RI2000775, NT2RI2000822, NT2RI2000841, NT2RI2000865, NT2RI2000932, NT2RI2000974, NT2RI2000987, NT2RI2001010, NT2RI2001017, NT2RI2001030, NT2RI2001083, NT2RI2001167, NT2RI2001178, NT2RI2001235, NT2RI2001244, NT2RI2001307, NT2RI2001409, NT2RI2001410, NT2RI2001425, NT2RI2001449, NT2RI2001474, NT2RI2001519, NT2RI2001595, NT2RI2001624, NT2RI2001657, NT2RI2001726, NT2RI2001782, NT2RI2001836, NT2RI2001846, NT2RI2001910, NT2RI2001952, NT2RI2002022, NT2RI2002041, NT2RI2002117, NT2RI2002120, NT2RI2002153, NT2RI2002179, NT2RI2002252, NT2RI2002260, NT2RI2002270, NT2RI2002334, NT2RI2002359, NT2RI2002447, NT2RI2002481, NT2RI2002507, NT2RI2002517, NT2RI2002530, NT2RI2002549, NT2RI2002564, NT2RI2002592, NT2RI2002602, NT2RI2002729, NT2RI2002822, NT2RI2002852, NT2RI2002865, NT2RI2002923, NT2RI2002926, NT2RI2002970, NT2RI2003019, NT2RI2003067, NT2RI2003184, NT2RI2003360, NT2RI2003383, NT2RI2003392, NT2RI2003399, NT2RI2003419, NT2RI2003487, NT2RI2003667, NT2RI2003751, NT2RI2003884, NT2RI2003973, NT2RI2003993, NT2RI2004078, NT2RI2004079, NT2RI2004093, NT2RI2004136, NT2RI2004157, NT2RI2004188, NT2RI2004190, NT2RI2004209, NT2RI2004230, NT2RI2004312, NT2RI2004381, NT2RI2004442, NT2RI2004468, NT2RI2004606, NT2RI2004618, NT2RI2004783, NT2RI2004818, NT2RI2004840, NT2RI2004884, NT2RI2004916, NT2RI2004962, NT2RI2004984, NT2RI2004985, NT2RI2005048, NT2RI2005061, NT2RI2005069, NT2RI2005087, NT2RI2005096, NT2RI2005130, NT2RI2005315, NT2RI2005358, NT2RI2005368, NT2RI2005382, NT2RI2005520, NT2RI2005579, NT2RI2005621, NT2RI2005628, NT2RI2005647, NT2RI2005670, NT2RI2005710, NT2RI2005772, NT2RI2005814, NT2RI2005818, NT2RI2005966, NT2RI2006081, NT2RI2006126, NT2RI2006127, NT2RI2006183, NT2RI2006257, NT2RI2006294, NT2RI2006345, NT2RI2006403, NT2RI2006445, NT2RI2006487, NT2RI2006506, NT2RI2006553, NT2RI2006565, NT2RI2006659, NT2RI2006662, NT2RI2006667, NT2RI2006679, NT2RI2006686, NT2RI2006703, NT2RI2006716, NT2RI2006735, NT2RI2006762, NT2RI2006788, NT2RI2006838, NT2RI2006853, NT2RI2006855, NT2RI2006973, NT2RI2007046, NT2RI2007048, NT2RI2007116, NT2RI2007133, NT2RI2007214, NT2RI2007277, NT2RI2007303, NT2RI2007334, NT2RI2007386, NT2RI2007406, NT2RI2007439, NT2RI2007469, NT2RI2007507, NT2RI2007729, NT2RI2007751, NT2RI2007754, NT2RI2007827, NT2RI2007853, NT2RI2007877, NT2RI2007891, NT2RI2007956, NT2RI2007965, NT2RI2008007, NT2RI2008050, NT2RI2008204, NT2RI2008221, NT2RI2008233, NT2RI2008455, NT2RI2008502, NT2RI2008598, NT2RI2008622, NT2RI2008656, NT2RI2008801, NT2RI2008841, NT2RI2008952, NT2RI2009005, NT2RI2009101, NT2RI2009103, NT2RI2009144, NT2RI2009151, NT2RI2009215, NT2RI2009259, NT2RI2009289, NT2RI2009301, NT2RI2009517, NT2RI2009585, NT2RI2009595, NT2RI2009855, NT2RI2010283, NT2RI2010508, NT2RI2011422, NT2RI2011450, NT2RI2011683, NT2RI2011803, NT2RI2012990, NT2RI2013345, NT2RI2013357, NT2RI2013373, NT2RI2014247, NT2RI2014551, NT2RI2014683, NT2RI2014733, NT2RI2015239, NT2RI2016128, NT2RI2016134, NT2RI2017529, NT2RI2018311, NT2RI2018363, NT2RI2018448, NT2RI2018883, NT2RI2018950, NT2RI2019826, NT2RI2020390, NT2RI2020703, NT2RI2021463, NT2RI2021625, NT2RI2022468, NT2RI2022584, NT2RI2023303, NT2RI2023671, NT2RI2024008, NT2RI2024313, NT2RI2024460, NT2RI2024496, NT2RI2024935, NT2RI2025255, NT2RI2025564, NT2RI2025565, NT2RI2025909, NT2RI2025957, NT2RI2025976, NT2RI2026758, NT2RI2027081, NT2RI2027157, NT2RI2027224, NT2RI2027323, NT2RI2027396, NT2RI2027484, NT2RI2028213, NT2RI2028222, NT2RI2028537, NT2RI2028642, NT2RI3000174, NT2RI3000213, NT2RI3000423, NT2RI3000622, NT2RI3001132, NT2RI3001263, NT2RI3001279, NT2RI3001458, NT2RI3001573, NT2RI3001967, NT2RI3002303, NT2RI3002557, NT2RI3002842, NT2RI3003027, NT2RI3003031, NT2RI3003095, NT2RI3003104, NT2RI3003162, NT2RI3003362, NT2RI3003409, NT2RI3003738, NT2RI3003925, NT2RI3004133, NT2RI3004381, NT2RI3005202, NT2RI3005403, NT2RI3005416, NT2RI3005861, NT2RI3005923, NT2RI3005928, NT2RI3006132, NT2RI3006171, NT2RI3006340, NT2RI3006376, NT2RI3006666, NT2RI3006796, NT2RI3007065, NT2RI3007095, NT2RI3007158, NT2RI3007167, NT2RI3007443, NT2RI3007684, NT2RI3007757, NT2RI3007878, NT2RI3007978, NT2RI3008162, NT2RI3008179, NT2RI3008228, NT2RI3008442, NT2RI3008652, NT2RI3008697, NT2RI3008974, NT2RI3009158, NT2RI3009480, NT2RI3009524, NT2RP6000033, NT2RP6000043, NT2RP6000060, NT2RP6000077, NT2RP6000100, NT2RP6000119, NT2RP6000127, NT2RP6000140, NT2RP6000150, NT2RP7000041, NT2RP7000109, NT2RP7000112, NT2RP7000259, NT2RP7000311, NT2RP7000359, NT2RP7000364, NT2RP7000380, NT2RP7000391, NT2RP7000425, NT2RP7000926, NT2RP7001074, NT2RP7001080, NT2RP7001156, NT2RP7001306, NT2RP7001319, NT2RP7001335, NT2RP7001532, NT2RP7001591, NT2RP7001602, NT2RP7001678, NT2RP7001856, NT2RP7002028, NT2RP7002064, NT2RP7002151, NT2RP7002163, NT2RP7002243, NT2RP7002282, NT2RP7002376, NT2RP7002450, NT2RP7002478, NT2RP7002554, NT2RP7002603, NT2RP7002650, NT2RP7002779, NT2RP7002841, NT2RP7002978, NT2RP7002982, NT2RP7003025, NT2RP7003050, NT2RP7003084, NT2RP7003091, NT2RP7003107, NT2RP7003134, NT2RP7003148, NT2RP7003261, NT2RP7003439, NT2RP7003629, NT2RP7003680, NT2RP7004027, NT2RP7004080, NT2RP7004204, NT2RP7004233, NT2RP7004260, NT2RP7004348, NT2RP7004358, NT2RP7004396, NT2RP7004541, NT2RP7004559, NT2RP7004641, NT2RP7004656, NT2RP7004687, NT2RP7004722, NT2RP7004766, NT2RP7004961, NT2RP7004964, NT2RP7004975, NT2RP7005118, NT2RP7005205, NT2RP7005323, NT2RP7005468, NT2RP7005629, NT2RP7005631, NT2RP7005669, NT2RP7005846, NT2RP7006033, NT2RP7006075, NT2RP7006141, NT2RP7006160, NT2RP7006296, NT2RP7006304, NT2RP7006374, NT2RP7006395, NT2RP7006408, NT2RP7006457, NT2RP7006539, NT2RP7006547, NT2RP7006601, NT2RP7006621, NT2RP7006636, NT2RP7006853, NT2RP7006886, NT2RP7006887, NT2RP7006980, NT2RP7006986, NT2RP7006995, NT2RP7007114, NT2RP7007221, NT2RP7007226, NT2RP7007269, NT2RP7007310, NT2RP7007359, NT2RP7007381, NT2RP7007387, NT2RP7007406, NT2RP7007480, NT2RP7007504, NT2RP7007580, NT2RP7007594, NT2RP7007617, NT2RP7007643, NT2RP7007766, NT2RP7007925, NT2RP7007930, NT2RP7008013, NT2RP7008015, NT2RP7008133, NT2RP7008137, NT2RP7008142, NT2RP7008144, NT2RP7008315, NT2RP7008360, NT2RP7008406, NT2RP7008435, NT2RP7008454, NT2RP7008487, NT2RP7008544, NT2RP7008550, NT2RP7008557, NT2RP7008623, NT2RP7008657, NT2RP7008720, NT2RP7008855, NT2RP7008863, NT2RP7009019, NT2RP7009030, NT2RP7009147, NT2RP7009168, NT2RP7009215, NT2RP7009225, NT2RP7009236, NT2RP7009253, NT2RP7009267, NT2RP7009322, NT2RP7009363, NT2RP7009370, NT2RP7009397, NT2RP7009429, NT2RP7009439, NT2RP7009466, NT2RP7009502, NT2RP7009507, NT2RP7009577, NT2RP7009743, NT2RP7009867, NT2RP7010128, NT2RP7010235, NT2RP7010275, NT2RP7010521, NT2RP7010612, NT2RP7010817, NT2RP7011086, NT2RP7011132, NT2RP7011268, NT2RP7011318, NT2RP7011452, NT2RP7011570, NT2RP7011721, NT2RP7011909, NT2RP7012291, NT2RP7012516, NT2RP7012776, NT2RP7013002, NT2RP7013374, NT2RP7013499, NT2RP7013729, NT2RP7013764, NT2RP7013795, NT2RP7013999, NT2RP7014005, NT2RP7014178, NT2RP7014348, NT2RP7014420, NT2RP7014583, NT2RP7014721, NT2RP7014743, NT2RP7014778, NT2RP7014906, NT2RP7015080, NT2RP7015431, NT2RP7015512, NT2RP7015676, NT2RP7015789, NT2RP7015996, NT2RP7016508, NT2RP7016622, NT2RP7016911, NT2RP7017139, NT2RP7017284, NT2RP7017365, NT2RP7017546, NT2RP7017567, NT2RP7017795, NT2RP7017971, NT2RP7018032, NT2RP7018126, NT2RP7018197, NT2RP7018206, NT2RP7018340, NT2RP7018586, NT2RP7018802, NT2RP7018871, NT2RP7019064, NT2RP7019135, NT2RP7019273, NT2RP7019367, NT2RP7019401, NT2RP7019445, NT2RP7019682, NT2RP7019835, NT2RP7020112, NT2RP7020123, NT2RP7020343, NT2RP7020379, NT2RP8000137, NT2RP8000296, NT2RP8000435, NT2RP8000483, NT2RP8000633, NT2RP8001363, NT2RP8001407, NT2RP8001584, NT2RP8001604, NT2RP8001605, NT2RP8003490, NT2RP8003657, NT2RP8003787, NT2RP8004306, NT2RP8005546, NT2RP8006452, NT2RP8006521, NT2RP8007416, NT2RP8007503, NT2RP8008057, NT2RP8009248, NTONG1000006, NTONG1000047, NTONG1000052, NTONG1000075, NTONG1000087, NTONG1000123, NTONG1000130, NTONG1000161, NTONG1000172, NTONG1000213, NTONG1000214, NTONG1000247, NTONG1000257, NTONG2000040, NTONG2000231, NTONG2000363, NTONG2000413, NTONG2000492, NTONG2000499, NTONG2000531, NTONG2000583, NTONG2000800, NTONG2000858, NTONG2000878, NTONG2000966, NTONG2000977, NTONG2000985, NTONG2001014, NTONG2001079, NTONG2001137, NTONG2001157, NTONG2001173, NTONG2001220, NTONG2001222, NTONG2001362, NTONG2001532, NTONG2001567, NTONG2001587, NTONG2001619, NTONG2001642, NTONG2002278, NTONG2002582, NTONG2002807, NTONG2002948, NTONG2002970, NTONG2002985, NTONG2003158, NTONG2003210, NTONG2003316, NTONG2003409, NTONG2003515, NTONG2003805, NTONG2003839, NTONG2003852, NTONG2003897, NTONG2003928, NTONG2004095, NTONG2004308, NTONG2004521, NTONG2004614, NTONG2004690, NTONG2004806, NTONG2004829, NTONG2004918, NTONG2004991, NTONG2005062, NTONG2005086, NTONG2005137, NTONG2005153, NTONG2005265, NTONG2005277, NTONG2005363, NTONG2005373, NTONG2005480, NTONG2005497, NTONG2005577, NTONG2005657, NTONG2005822, NTONG2005897, NTONG2006099, NTONG2006187, NTONG2006301, NTONG2006324, NTONG2006354, NTONG2006440, NTONG2006501, NTONG2006646, NTONG2006709, NTONG2007020, NTONG2007028, NTONG2007034, NTONG2007249, NTONG2007517, NTONG2007522, NTONG2007693, NTONG2008088, NTONG2008093, NTONG2008143, NTONG2008365, NTONG2008483, NTONG2008522, NTONG2008672, NTONG2008862, NTONG2008939, NTONG2008944, NTONG2009060, NTONG2009068, NTONG2009229, NTONG2009233, OCBBF1000016, OCBBF1000030, OCBBF1000042, OCBBF1000054, OCBBF1000067, OCBBF1000080, OCBBF1000085, OCBBF1000091, OCBBF1000104, OCBBF1000118, OCBBF1000119, OCBBF1000122, OCBBF1000130, OCBBF1000138, OCBBF1000145, OCBBF1000153, OCBBF1000185, OCBBF1000192, OCBBF1000315, OCBBF2000013, OCBBF2000287, OCBBF2000452, OCBBF2000703, OCBBF2000719, OCBBF2000904, OCBBF2000998, OCBBF2001075, OCBBF2001101, OCBBF2001124, OCBBF2001176, OCBBF2001252, OCBBF2001323, OCBBF2001389, OCBBF2001402, OCBBF2001408, OCBBF2001416, OCBBF2001473, OCBBF2001494, OCBBF2001527, OCBBF2001528, OCBBF2001586, OCBBF2001681, OCBBF2001706, OCBBF2001749, OCBBF2001910, OCBBF2001961, OCBBF2001983, OCBBF2002083, OCBBF2002124, OCBBF2002161, OCBBF2002357, OCBBF2002615, OCBBF2002663, OCBBF2002805, OCBBF2002865, OCBBF2002920, OCBBF2002980, OCBBF2003028, OCBBF2003091, OCBBF2003327, OCBBF2003543, OCBBF2003593, OCBBF2003744, OCBBF2004038, OCBBF2004147, OCBBF2004168, OCBBF2004259, OCBBF2004385, OCBBF2004418, OCBBF2004478, OCBBF2004482, OCBBF2004533, OCBBF2004567, OCBBF2004612, OCBBF2004647, OCBBF2004669, OCBBF2004826, OCBBF2004866, OCBBF2004883, OCBBF2004889, OCBBF2004930, OCBBF2004984, OCBBF2005066, OCBBF2005077, OCBBF2005161, OCBBF2005343, OCBBF2005349, OCBBF2005373, OCBBF2005420, OCBBF2005428, OCBBF2005433, OCBBF2005546, OCBBF2005843, OCBBF2005901, OCBBF2006005, OCBBF2006030, OCBBF2006058, OCBBF2006148, OCBBF2006154, OCBBF2006214, OCBBF2006241, OCBBF2006388, OCBBF2006438, OCBBF2006567, OCBBF2006624, OCBBF2006639, OCBBF2006660, OCBBF2006849, OCBBF2006859, OCBBF2006972, OCBBF2006987, OCBBF2007039, OCBBF2007051, OCBBF2007068, OCBBF2007121, OCBBF2007184, OCBBF2007194, OCBBF2007196, OCBBF2007238, OCBBF2007414, OCBBF2007428, OCBBF2007478, OCBBF2007485, OCBBF2007520, OCBBF2007555, OCBBF2007610, OCBBF2007756, OCBBF2007892, OCBBF2007931, OCBBF2007946, OCBBF2008041, OCBBF2008116, OCBBF2008138, OCBBF2008283, OCBBF2008330, OCBBF2008366, OCBBF2008466, OCBBF2008483, OCBBF2008520, OCBBF2008569, OCBBF2008586, OCBBF2008640, OCBBF2008691, OCBBF2008724, OCBBF2008760, OCBBF2008768, OCBBF2008770, OCBBF2008790, OCBBF2008814, OCBBF2008822, OCBBF2009115, OCBBF2009391, OCBBF2009424, OCBBF2009536, OCBBF2009571, OCBBF2009583, OCBBF2009603, OCBBF2009788, OCBBF2009920, OCBBF2009926, OCBBF2010040, OCBBF2010140, OCBBF2010281, OCBBF2010404, OCBBF2010416, OCBBF2010420, OCBBF2010604, OCBBF2010709, OCBBF2010792, OCBBF2010830, OCBBF2010841, OCBBF2010843, OCBBF2010931, OCBBF2010945, OCBBF2010978, OCBBF2010989, OCBBF2011137, OCBBF2011160, OCBBF2011177, OCBBF2011228, OCBBF2011283, OCBBF2011311, OCBBF2011625, OCBBF2011685, OCBBF2011706, OCBBF2011722, OCBBF2011767, OCBBF2011855, OCBBF2011872, OCBBF2011960, OCBBF2011981, OCBBF2012001, OCBBF2012028, OCBBF2012095, OCBBF2012139, OCBBF2012191, OCBBF2012262, OCBBF2012320, OCBBF2012436, OCBBF2012755, OCBBF2012936, OCBBF2012990, OCBBF2013049, OCBBF2013091, OCBBF2013123, OCBBF2013127, OCBBF2013208, OCBBF2013319, OCBBF2013507, OCBBF2013721, OCBBF2013789, OCBBF2013883, OCBBF2013926, OCBBF2014052, OCBBF2014322, OCBBF2014386, OCBBF2014541, OCBBF2014707, OCBBF2014828, OCBBF2014873, OCBBF2014880, OCBBF2014928, OCBBF2015031, OCBBF2015081, OCBBF2015232, OCBBF2015285, OCBBF2015334, OCBBF2015335, OCBBF2015503, OCBBF2015506, OCBBF2015599, OCBBF2015645, OCBBF2015659, OCBBF2015797, OCBBF2015931, OCBBF2015980, OCBBF2016038, OCBBF2016405, OCBBF2016467, OCBBF2016590, OCBBF2016591, OCBBF2016612, OCBBF2016690, OCBBF2016841, OCBBF2016928, OCBBF2017069, OCBBF2017306, OCBBF2017325, OCBBF2017489, OCBBF2017516, OCBBF2017665, OCBBF2017815, OCBBF2017888, OCBBF2017920, OCBBF2018014, OCBBF2018167, OCBBF2018206, OCBBF2018229, OCBBF2018362, OCBBF2018380, OCBBF2018563, OCBBF2018663, OCBBF2018687, OCBBF2018828, OCBBF2018873, OCBBF2018934, OCBBF2019108, OCBBF2019195, OCBBF2019327, OCBBF2019684, OCBBF2019761, OCBBF2019823, OCBBF2019950, OCBBF2020048, OCBBF2020318, OCBBF2020453, OCBBF2020801, OCBBF2020825, OCBBF2020838, OCBBF2021020, OCBBF2021214, OCBBF2021323, OCBBF2021518, OCBBF2021788, OCBBF2021833, OCBBF2022573, OCBBF2022574, OCBBF2023598, OCBBF2023643, OCBBF2024463, OCBBF2024589, OCBBF2024719, OCBBF2024779, OCBBF2024781, OCBBF2025028, OCBBF2025115, OCBBF2025198, OCBBF2025451, OCBBF2025458, OCBBF2025631, OCBBF2025730, OCBBF2026025, OCBBF2026035, OCBBF2026144, OCBBF2026645, OCBBF2026690, OCBBF2026981, OCBBF2027148, OCBBF2027354, OCBBF2027423, OCBBF2027478, OCBBF2027481, OCBBF2027511, OCBBF2027728, OCBBF2027782, OCBBF2027868, OCBBF2028055, OCBBF2028173, OCBBF2028421, OCBBF2029471, OCBBF2029901, OCBBF2030116, OCBBF2030354, OCBBF2030517, OCBBF2030574, OCBBF2030708, OCBBF2030963, OCBBF2031167, OCBBF2031198, OCBBF2031366, OCBBF2031561, OCBBF2032152, OCBBF2032274, OCBBF2032539, OCBBF2032590, OCBBF2032599, OCBBF2032611, OCBBF2032671, OCBBF2033413, OCBBF2033869, OCBBF2033948, OCBBF2034333, OCBBF2034529, OCBBF2034637, OCBBF2034906, OCBBF2035110, OCBBF2035390, OCBBF2035564, OCBBF2035658, OCBBF2035823, OCBBF2035885, OCBBF2035916, OCBBF2036019, OCBBF2036031, OCBBF2036225, OCBBF2036476, OCBBF2036752, OCBBF2037068, OCBBF2037340, OCBBF2037398, OCBBF2037464, OCBBF2037547, OCBBF2037598, OCBBF2037638, OCBBF2038238, OCBBF2038285, OCBBF2038317, OCBBF3000097, OCBBF3000213, OCBBF3000296, OCBBF3000372, OCBBF3000380, OCBBF3000743, OCBBF3000830, OCBBF3001076, OCBBF3001202, OCBBF3001616, OCBBF3002553, OCBBF3002600, OCBBF3002654, OCBBF3003103, OCBBF3003209, OCBBF3003592, OCBBF3003745, OCBBF3003761, OCBBF3004264, OCBBF3004314, OCBBF3004972, OCBBF3005330, OCBBF3005597, OCBBF3005843, OCBBF3006802, OCBBF3006986, OCBBF3007078, OCBBF3007704, OCBBF3008230, OCBBF3008392, OCBBF3008835, OCBBF3009192, OCBBF3009279, PANCR1000012, PANCR1000021, PANCR1000081, PANCR1000086, PANCR1000185, PEBLM1000024, PEBLM1000029, PEBLM1000034, PEBLM1000062, PEBLM1000066, PEBLM1000068, PEBLM1000071, PEBLM1000083, PEBLM1000144, PEBLM1000147, PEBLM1000180, PEBLM2000030, PEBLM2000112, PEBLM2000126, PEBLM2000170, PEBLM2000180, PEBLM2000213, PEBLM2000248, PEBLM2000270, PEBLM2000308, PEBLM2000321, PEBLM2000333, PEBLM2000338, PEBLM2000395, PEBLM2000479, PEBLM2000502, PEBLM2001312, PEBLM2001465, PEBLM2001488, PEBLM2001803, PEBLM2002432, PEBLM2002455, PEBLM2002594, PEBLM2002749, PEBLM2002887, PEBLM2003426, PEBLM2003765, PEBLM2003935, PEBLM2004015, PEBLM2004216, PEBLM2004290, PEBLM2004497, PEBLM2004733, PEBLM2005615, PEBLM2005632, PEBLM2005697, PEBLM2006031, PEBLM2006036, PEBLM2006049, PEBLM2006113, PEBLM2006135, PEBLM2006215, PEBLM2006283, PEBLM2006298, PEBLM2006366, PEBLM2006709, PEBLM2006912, PEBLM2007112, PEBLM2007140, PEBLM2007188, PEBLM2007296, PEBLM2007447, PEBLM2007598, PEBLM2007832, PEBLM2007834, PEBLM2008106, PEBLM2008576, PEBLM2008605, PEBLM2008826, PEBLM2008861, PERIC1000025, PERIC1000147, PERIC2000180, PERIC2000214, PERIC2000386, PERIC2000387, PERIC2000422, PERIC2000473, PERIC2000914, PERIC2001227, PERIC2001228, PERIC2001379, PERIC2001504, PERIC2001703, PERIC2001764, PERIC2002243, PERIC2002272, PERIC2002452, PERIC2002766, PERIC2003001, PERIC2003090, PERIC2003287, PERIC2003349, PERIC2003452, PERIC2003699, PERIC2003794, PERIC2003834, PERIC2003919, PERIC2003957, PERIC2004028, PERIC2004131, PERIC2004259, PERIC2004379, PERIC2004429, PERIC2004510, PERIC2004613, PERIC2004909, PERIC2005111, PERIC2005305, PERIC2005347, PERIC2005370, PERIC2005936, PERIC2006035, PERIC2006121, PERIC2006945, PERIC2006960, PERIC2007439, PERIC2007914, PERIC2008008, PERIC2008385, PERIC2009001, PERIC2009086, PERIC2009329, PERIC2009566, PLACE5000001, PLACE5000013, PLACE5000037, PLACE5000058, PLACE5000067, PLACE5000068, PLACE5000070, PLACE5000080, PLACE5000105, PLACE5000115, PLACE5000116, PLACE5000129, PLACE5000139, PLACE5000153, PLACE5000171, PLACE5000178, PLACE5000245, PLACE5000260, PLACE5000282, PLACE5000297, PLACE5000372, PLACE5000492, PLACE5000522, PLACE5000527, PLACE6000012, PLACE6000044, PLACE6000055, PLACE6000070, PLACE6000137, PLACE6000191, PLACE6000205, PLACE6000231, PLACE6000296, PLACE6000314, PLACE6000325, PLACE6000348, PLACE6000371, PLACE6000424, PLACE6000426, PLACE6000429, PLACE6000450, PLACE6000463, PLACE6000523, PLACE6000550, PLACE6000552, PLACE6000555, PLACE6000630, PLACE6000953, PLACE6001118, PLACE6001153, PLACE6001294, PLACE6001536, PLACE6001557, PLACE6001712, PLACE6001740, PLACE6001886, PLACE6001923, PLACE6001925, PLACE6001933, PLACE6002011, PLACE6002016, PLACE6002056, PLACE6002157, PLACE6002312, PLACE6002323, PLACE6002345, PLACE6002462, PLACE6002647, PLACE6002668, PLACE6002699, PLACE6002710, PLACE6002871, PLACE6002949, PLACE6002960, PLACE6003004, PLACE6003077, PLACE6003094, PLACE6003109, PLACE6003204, PLACE6003218, PLACE6003372, PLACE6003383, PLACE6003393, PLACE6003399, PLACE6003539, PLACE6003705, PLACE6003740, PLACE6003745, PLACE6003771, PLACE6003796, PLACE6003839, PLACE6003850, PLACE6004101, PLACE6004219, PLACE6004336, PLACE6004368, PLACE6004380, PLACE6004396, PLACE6004454, PLACE6004464, PLACE6004491, PLACE6004663, PLACE6004687, PLACE6004738, PLACE6004931, PLACE6004966, PLACE6004993, PLACE6005007, PLACE6005029, PLACE6005108, PLACE6005234, PLACE6005283, PLACE6005294, PLACE6005328, PLACE6005351, PLACE6005423, PLACE6005487, PLACE6005535, PLACE6005546, PLACE6005559, PLACE6005579, PLACE6005786, PLACE6006042, PLACE6006077, PLACE6006158, PLACE6006186, PLACE6006217, PLACE6006222, PLACE6006266, PLACE6006287, PLACE6006394, PLACE6006418, PLACE6006474, PLACE6006566, PLACE6006697, PLACE6006822, PLACE6006871, PLACE6006905, PLACE6006988, PLACE6007050, PLACE6007239, PLACE6007242, PLACE6007309, PLACE6007380, PLACE6007433, PLACE6007482, PLACE6007687, PLACE6007787, PLACE6007798, PLACE6007807, PLACE6007925, PLACE6008036, PLACE6008094, PLACE6008126, PLACE6008285, PLACE6008453, PLACE6008640, PLACE6008750, PLACE6008768, PLACE6008793, PLACE6008824, PLACE6008989, PLACE6009006, PLACE6009008, PLACE6009228, PLACE6009237, PLACE6009419, PLACE6009430, PLACE6009482, PLACE6009524, PLACE6009527, PLACE6009560, PLACE6009590, PLACE6009821, PLACE6009835, PLACE6009853, PLACE6010077, PLACE6010463, PLACE6010485, PLACE6010568, PLACE6010701, PLACE6010704, PLACE6010732, PLACE6010765, PLACE6010848, PLACE6010925, PLACE6010991, PLACE6011102, PLACE6011156, PLACE6011211, PLACE6011260, PLACE6011334, PLACE6011627, PLACE6011774, PLACE6011881, PLACE6011907, PLACE6011970, PLACE6011975, PLACE6012108, PLACE6012168, PLACE6012297, PLACE6012308, PLACE6012574, PLACE6012908, PLACE6012936, PLACE6012942, PLACE6013222, PLACE6013232, PLACE6013288, PLACE6013386, PLACE6013400, PLACE6013650, PLACE6013883, PLACE6013884, PLACE6013885, PLACE6014043, PLACE6014516, PLACE6014882, PLACE6015211, PLACE6015322, PLACE6015460, PLACE6015513, PLACE6015591, PLACE6015731, PLACE6015939, PLACE6016030, PLACE6016093, PLACE6016105, PLACE6016160, PLACE6016210, PLACE6016254, PLACE6016383, PLACE6016984, PLACE6017002, PLACE6017431, PLACE6017564, PLACE6017578, PLACE6017626, PLACE6017701, PLACE6017714, PLACE6017788, PLACE6017791, PLACE6018107, PLACE6018187, PLACE6018235, PLACE6018287, PLACE6018441, PLACE6018487, PLACE6018497, PLACE6018769, PLACE6018834, PLACE6018843, PLACE6018863, PLACE6018938, PLACE6019385, PLACE6019542, PLACE6019600, PLACE6019674, PLACE6019676, PLACE6019701, PLACE6019932, PLACE6020031, PLACE6020145, PLACE7000167, PLACE7000170, PLACE7000266, PLACE7000333, PLACE7000410, PLACE7000502, PLACE7000707, PLACE7001022, PLACE7001544, PLACE7001759, PLACE7001936, PLACE7002303, PLACE7002641, PLACE7003639, PLACE7003657, PLACE7003684, PLACE7003985, PLACE7004961, PLACE7005169, PLACE7005671, PLACE7005840, PLACE7006051, PLACE7006090, PLACE7006240, PLACE7006268, PLACE7006275, PLACE7006498, PLACE7006540, PLACE7007379, PLACE7007644, PLACE7007973, PLACE7008136, PLACE7008431, PLACE7008623, PLACE7008766, PLACE7009563, PROST1000033, PROST1000039, PROST1000065, PROST1000083, PROST1000085, PROST1000110, PROST1000120, PROST1000123, PROST1000136, PROST1000144, PROST1000145, PROST1000152, PROST1000167, PROST1000184, PROST1000217, PROST1000246, PROST1000262, PROST1000298, PROST1000322, PROST1000334, PROST1000343, PROST1000362, PROST1000377, PROST1000383, PROST1000412, PROST1000419, PROST1000451, PROST1000480, PROST1000485, PROST1000493, PROST1000512, PROST1000527, PROST1000528, PROST1000536, PROST1000559, PROST1000575, PROST2000036, PROST2000053, PROST2000067, PROST2000079, PROST2000105, PROST2000143, PROST2000162, PROST2000165, PROST2000203, PROST2000206, PROST2000212, PROST2000241, PROST2000267, PROST2000273, PROST2000274, PROST2000277, PROST2000325, PROST2000337, PROST2000432, PROST2000452, PROST2000463, PROST2000470, PROST2000505, PROST2000572, PROST2000717, PROST2000760, PROST2000835, PROST2000893, PROST2000961, PROST2001116, PROST2001138, PROST2001213, PROST2001414, PROST2001415, PROST2001465, PROST2001540, PROST2001552, PROST2001599, PROST2001611, PROST2001636, PROST2001739, PROST2001796, PROST2001805, PROST2001823, PROST2001899, PROST2001998, PROST2002078, PROST2002101, PROST2002212, PROST2002338, PROST2002488, PROST2002489, PROST2002527, PROST2002591, PROST2002602, PROST2002633, PROST2002682, PROST2002685, PROST2002722, PROST2002736, PROST2002842, PROST2002897, PROST2002906, PROST2002927, PROST2002960, PROST2003102, PROST2003117, PROST2003210, PROST2003302, PROST2003303, PROST2003324, PROST2003340, PROST2003428, PROST2003472, PROST2003517, PROST2003537, PROST2003563, PROST2003577, PROST2003583, PROST2003586, PROST2003628, PROST2003635, PROST2003674, PROST2003676, PROST2003725, PROST2003732, PROST2003775, PROST2003922, PROST2003930, PROST2004115, PROST2004142, PROST2004146, PROST2004161, PROST2004251, PROST2004258, PROST2004332, PROST2004481, PROST2004526, PROST2004727, PROST2004742, PROST2004817, PROST2005039, PROST2005076, PROST2005121, PROST2005131, PROST2005228, PROST2005272, PROST2005426, PROST2005630, PROST2005788, PROST2005880, PROST2005886, PROST2005904, PROST2005919, PROST2005943, PROST2006008, PROST2006020, PROST2006196, PROST2006201, PROST2006282, PROST2006343, PROST2006450, PROST2006491, PROST2006510, PROST2006536, PROST2006579, PROST2006688, PROST2006766, PROST2006782, PROST2006933, PROST2007122, PROST2007200, PROST2007237, PROST2007289, PROST2007317, PROST2007328, PROST2007382, PROST2007389, PROST2007416, PROST2007528, PROST2007612, PROST2007818, PROST2007871, PROST2007950, PROST2007956, PROST2007974, PROST2007988, PROST2008079, PROST2008088, PROST2008243, PROST2008245, PROST2008268, PROST2008447, PROST2008468, PROST2008472, PROST2008516, PROST2008724, PROST2008835, PROST2008993, PROST2009022, PROST2009208, PROST2009222, PROST2009254, PROST2009273, PROST2009320, PROST2009365, PROST2009388, PROST2009400, PROST2009470, PROST2009483, PROST2009571, PROST2009731, PROST2009736, PROST2009795, PROST2009901, PROST2009909, PROST2010046, PROST2010219, PROST2010250, PROST2010318, PROST2010326, PROST2010400, PROST2010545, PROST2010579, PROST2010606, PROST2010782, PROST2010885, PROST2011012, PROST2011038, PROST2011297, PROST2011439, PROST2011482, PROST2011631, PROST2012005, PROST2012088, PROST2012140, PROST2012157, PROST2012190, PROST2012249, PROST2012353, PROST2012400, PROST2012448, PROST2012504, PROST2012542, PROST2012550, PROST2012740, PROST2012780, PROST2012888, PROST2012890, PROST2013032, PROST2013053, PROST2013260, PROST2013327, PROST2013531, PROST2013605, PROST2013627, PROST2013873, PROST2013880, PROST2014422, PROST2014585, PROST2014601, PROST2014659, PROST2014916, PROST2014925, PROST2015124, PROST2015137, PROST2015198, PROST2015243, PROST2015246, PROST2015251, PROST2015287, PROST2015457, PROST2015464, PROST2015537, PROST2015545, PROST2015551, PROST2015636, PROST2015710, PROST2015756, PROST2015877, PROST2015924, PROST2015932, PROST2016195, PROST2016246, PROST2016379, PROST2016444, PROST2016462, PROST2016499, PROST2016512, PROST2016566, PROST2016582, PROST2016668, PROST2016684, PROST2016777, PROST2016829, PROST2016860, PROST2016980, PROST2017098, PROST2017367, PROST2017413, PROST2017441, PROST2017578, PROST2017612, PROST2017617, PROST2017700, PROST2017701, PROST2017729, PROST2017836, PROST2017972, PROST2018030, PROST2018090, PROST2018235, PROST2018437, PROST2018487, PROST2018511, PROST2018583, PROST2018588, PROST2018607, PROST2018788, PROST2018902, PROST2018922, PROST2018977, PROST2019398, PROST2019487, PROST2019781, PUAEN1000039, PUAEN1000081, PUAEN1000085, PUAEN1000087, PUAEN1000121, PUAEN1000161, PUAEN1000175, PUAEN1000239, PUAEN1000275, PUAEN1000276, PUAEN1000288, PUAEN2000080, PUAEN2000175, PUAEN2000247, PUAEN2000312, PUAEN2000394, PUAEN2000497, PUAEN2000535, PUAEN2000594, PUAEN2000684, PUAEN2000942, PUAEN2001260, PUAEN2001345, PUAEN2001526, PUAEN2001882, PUAEN2002473, PUAEN2002552, PUAEN2002568, PUAEN2002616, PUAEN2002758, PUAEN2003018, PUAEN2003079, PUAEN2003116, PUAEN2003408, PUAEN2003517, PUAEN2003954, PUAEN2004067, PUAEN2004083, PUAEN2004511, PUAEN2004525, PUAEN2004875, PUAEN2005110, PUAEN2005247, PUAEN2005502, PUAEN2005588, PUAEN2005930, PUAEN2006029, PUAEN2006328, PUAEN2006335, PUAEN2006578, PUAEN2006639, PUAEN2006761, PUAEN2007350, PUAEN2007785, PUAEN2008123, PUAEN2008228, PUAEN2008314, PUAEN2008815, PUAEN2008939, PUAEN2008980, PUAEN2008985, PUAEN2009348, PUAEN2009534, PUAEN2009655, PUAEN2009795, PUAEN2009852, PUAEN2010346, RECTM1000051, RECTM1000141, RECTM2000220, RECTM2000349, RECTM2000433, RECTM2000510, RECTM2001307, RECTM2001347, RECTM2001519, RECTM2001666, RECTM2001691, RECTM2001749, RECTM2002172, RECTM2002602, RECTM2002632, SALGL1000005, SALGL1000024, SALGL1000028, SALGL1000065, SALGL1000107, SALGL1000171, SKMUS1000014, SKMUS1000030, SKMUS1000064, SKMUS1000067, SKMUS1000102, SKMUS1000104, SKMUS1000118, SKMUS1000124, SKMUS1000129, SKMUS1000138, SKMUS1000176, SKMUS2000061, SKMUS2000078, SKMUS2000137, SKMUS2000198, SKMUS2000287, SKMUS2000317, SKMUS2000330, SKMUS2000339, SKMUS2000365, SKMUS2000390, SKMUS2000416, SKMUS2000458, SKMUS2000467, SKMUS2000468, SKMUS2000515, SKMUS2000679, SKMUS2000690, SKMUS2000701, SKMUS2000705, SKMUS2000710, SKMUS2000724, SKMUS2000726, SKMUS2000757, SKMUS2000774, SKMUS2000780, SKMUS2000821, SKMUS2000847, SKMUS2000863, SKMUS2000894, SKMUS2000898, SKMUS2000933, SKMUS2000945, SKMUS2000961, SKMUS2000973, SKMUS2000980, SKMUS2001014, SKMUS2001147, SKMUS2001157, SKMUS2001164, SKMUS2001199, SKMUS2001215, SKMUS2001247, SKMUS2001271, SKMUS2001287, SKMUS2001323, SKMUS2001364, SKMUS2001398, SKMUS2001492, SKMUS2001580, SKMUS2001585, SKMUS2001608, SKMUS2001631, SKMUS2001662, SKMUS2001663, SKMUS2001668, SKMUS2001671, SKMUS2001683, SKMUS2001693, SKMUS2001695, SKMUS2001703, SKMUS2001740, SKMUS2001742, SKMUS2001823, SKMUS2001850, SKMUS2002077, SKMUS2002084, SKMUS2002153, SKMUS2002475, SKMUS2002602, SKMUS2002634, SKMUS2002693, SKMUS2002821, SKMUS2002840, SKMUS2002920, SKMUS2003034, SKMUS2003074, SKMUS2003168, SKMUS2003194, SKMUS2003744, SKMUS2004044, SKMUS2004047, SKMUS2004483, SKMUS2004667, SKMUS2004897, SKMUS2004903, SKMUS2005428, SKMUS2006394, SKMUS2006481, SKMUS2006755, SKMUS2007315, SKMUS2007359, SKMUS2007568, SKMUS2007740, SKMUS2007816, SKMUS2007915, SKMUS2008338, SKMUS2008407, SKMUS2008474, SKMUS2008585, SKMUS2008607, SKMUS2009190, SKMUS2009232, SKMUS2009479, SKMUS2009557, SKNMC1000110, SKNMC1000123, SKNMC1000124, SKNMC1000137, SKNMC1000159, SKNMC1000229, SKNMC2000256, SKNMC2000356, SKNMC2000374, SKNMC2000583, SKNMC2000593, SKNMC2000612, SKNMC2000622, SKNMC2001324, SKNMC2001555, SKNMC2001596, SKNMC2001623, SKNMC2003639, SKNMC2003924, SKNMC2003987, SKNMC2004457, SKNMC2004643, SKNMC2004651, SKNMC2005772, SKNMC2006173, SKNMC2006327, SKNMC2006998, SKNMC2007134, SKNMC2007502, SKNMC2007504, SKNMC2007961, SKNMC2009450, SKNSH1000086, SKNSH1000174, SKNSH1000301, SKNSH1000308, SKNSH1000416, SKNSH2000051, SKNSH2000516, SKNSH2000550, SKNSH2000716, SKNSH2000971, SKNSH2001222, SKNSH2001875, SKNSH2001931, SKNSH2002054, SKNSH2002866, SKNSH2003174, SKNSH2003422, SKNSH2003466, SKNSH2003483, SKNSH2004039, SKNSH2005120, SKNSH2005194, SKNSH2005240, SKNSH2005792, SKNSH2005816, SKNSH2005981, SKNSH2006304, SKNSH2006432, SKNSH2006822, SKNSH2007142, SKNSH2007149, SKNSH2007429, SKNSH2007739, SKNSH2008043, SKNSH2008940, SKNSH2008969, SKNSH2009197, SKNSH2009357, SKNSH2009435, SKNSH2009991, SKNSH2010015, SMINT1000012, SMINT1000016, SMINT1000039, SMINT1000042, SMINT1000048, SMINT1000051, SMINT1000054, SMINT1000057, SMINT1000071, SMINT1000075, SMINT1000078, SMINT1000091, SMINT1000103, SMINT1000118, SMINT1000137, SMINT2000007, SMINT2000032, SMINT2000040, SMINT2000060, SMINT2000084, SMINT2000145, SMINT2000159, SMINT2000176, SMINT2000185, SMINT2000227, SMINT2000229, SMINT2000239, SMINT2000267, SMINT2000396, SMINT2000400, SMINT2000518, SMINT2000529, SMINT2000530, SMINT2000537, SMINT2000538, SMINT2000541, SMINT2000545, SMINT2000558, SMINT2000562, SMINT2000568, SMINT2000609, SMINT2000747, SMINT2000811, SMINT2000824, SMINT2000984, SMINT2001114, SMINT2001158, SMINT2001199, SMINT2001222, SMINT2001348, SMINT2001397, SMINT2001458, SMINT2001461, SMINT2001535, SMINT2001559, SMINT2001609, SMINT2001615, SMINT2001683, SMINT2001731, SMINT2001812, SMINT2001950, SMINT2002126, SMINT2002202, SMINT2002210, SMINT2002224, SMINT2002281, SMINT2002311, SMINT2002314, SMINT2002328, SMINT2002414, SMINT2002457, SMINT2002620, SMINT2002743, SMINT2002778, SMINT2002880, SMINT2002882, SMINT2002884, SMINT2002899, SMINT2002974, SMINT2002976, SMINT2003074, SMINT2003128, SMINT2003317, SMINT2003386, SMINT2003423, SMINT2003505, SMINT2003551, SMINT2003569, SMINT2003641, SMINT2003644, SMINT2003866, SMINT2003905, SMINT2004023, SMINT2004037, SMINT2004047, SMINT2004086, SMINT2004144, SMINT2004280, SMINT2004339, SMINT2004473, SMINT2004547, SMINT2004729, SMINT2004781, SMINT2004891, SMINT2004909, SMINT2004992, SMINT2005075, SMINT2005161, SMINT2005174, SMINT2005213, SMINT2005330, SMINT2005387, SMINT2005405, SMINT2005621, SMINT2005623, SMINT2005624, SMINT2005688, SMINT2005800, SMINT2006078, SMINT2006205, SMINT2006331, SMINT2006596, SMINT2006641, SMINT2006648, SMINT2006708, SMINT2006716, SMINT2006801, SMINT2007062, SMINT2007101, SMINT2007140, SMINT2007219, SMINT2007294, SMINT2007365, SMINT2007391, SMINT2007433, SMINT2007508, SMINT2007526, SMINT2007579, SMINT2007790, SMINT2007796, SMINT2007867, SMINT2007932, SMINT2008042, SMINT2008054, SMINT2008277, SMINT2008329, SMINT2008455, SMINT2008491, SMINT2008531, SMINT2008545, SMINT2008558, SMINT2008590, SMINT2008625, SMINT2008690, SMINT2008715, SMINT2008720, SMINT2008817, SMINT2008844, SMINT2008869, SMINT2008917, SMINT2009119, SMINT2009121, SMINT2009212, SMINT2009216, SMINT2009259, SMINT2009272, SMINT2009292, SMINT2009363, SMINT2009415, SMINT2009468, SMINT2009505, SMINT2009529, SMINT2009832, SMINT2009895, SMINT2009902, SMINT2009973, SMINT2010015, SMINT2010068, SMINT2010076, SMINT2010144, SMINT2010200, SMINT2010278, SMINT2010324, SMINT2010326, SMINT2010369, SMINT2010426, SMINT2010500, SMINT2010533, SMINT2010629, SMINT2010672, SMINT2010753, SMINT2010853, SMINT2010897, SMINT2010901, SMINT2010959, SMINT2010997, SMINT2011033, SMINT2011066, SMINT2011273, SMINT2011311, SMINT2011406, SMINT2011509, SMINT2011567, SMINT2011588, SMINT2011888, SMINT2011958, SMINT2012040, SMINT2012122, SMINT2012179, SMINT2012285, SMINT2012734, SMINT2012793, SMINT2013031, SMINT2013129, SMINT2013170, SMINT2013228, SMINT2013613, SMINT2013626, SMINT2013695, SMINT2013833, SMINT2013890, SMINT2014166, SMINT2014282, SMINT2014443, SMINT2014480, SMINT2014489, SMINT2014721, SMINT2015006, SMINT2015294, SMINT2015306, SMINT2015326, SMINT2015353, SMINT2015454, SMINT2015518, SMINT2015745, SMINT2015787, SMINT2015810, SMINT2016122, SMINT2016146, SMINT2016286, SMINT2016313, SMINT2016396, SMINT2016412, SMINT2016440, SMINT2016477, SMINT2016544, SMINT2016857, SMINT2017134, SMINT2017319, SMINT2017324, SMINT2017410, SMINT2017431, SMINT2017432, SMINT2017436, SMINT2017599, SMINT2017659, SMINT2017736, SMINT2017781, SMINT2017855, SMINT2017964, SMINT2017974, SMINT2018343, SMINT2018353, SMINT2018592, SMINT2018681, SMINT2019017, SMINT2019105, SMINT2019142, SMINT2019153, SMINT2019200, SPLEN1000013, SPLEN1000041, SPLEN1000049, SPLEN1000056, SPLEN1000087, SPLEN1000089, SPLEN1000091, SPLEN1000134, SPLEN1000139, SPLEN1000143, SPLEN1000144, SPLEN1000145, SPLEN1000156, SPLEN1000163, SPLEN1000178, SPLEN2000020, SPLEN2000047, SPLEN2000064, SPLEN2000072, SPLEN2000126, SPLEN2000134, SPLEN2000143, SPLEN2000189, SPLEN2000197, SPLEN2000205, SPLEN2000210, SPLEN2000222, SPLEN2000242, SPLEN2000243, SPLEN2000247, SPLEN2000258, SPLEN2000270, SPLEN2000307, SPLEN2000310, SPLEN2000350, SPLEN2000357, SPLEN2000364, SPLEN2000402, SPLEN2000414, SPLEN2000420, SPLEN2000448, SPLEN2000450, SPLEN2000464, SPLEN2000496, SPLEN2000515, SPLEN2000516, SPLEN2000537, SPLEN2000541, SPLEN2000607, SPLEN2000630, SPLEN2000695, SPLEN2000839, SPLEN2000882, SPLEN2001135, SPLEN2001176, SPLEN2001227, SPLEN2001245, SPLEN2001278, SPLEN2001354, SPLEN2001367, SPLEN2001383, SPLEN2001476, SPLEN2001503, SPLEN2001510, SPLEN2001626, SPLEN2001650, SPLEN2001689, SPLEN2001710, SPLEN2001781, SPLEN2001881, SPLEN2001912, SPLEN2001945, SPLEN2002053, SPLEN2002133, SPLEN2002147, SPLEN2002166, SPLEN2002175, SPLEN2002223, SPLEN2002272, SPLEN2002314, SPLEN2002343, SPLEN2002354, SPLEN2002385, SPLEN2002419, SPLEN2002451, SPLEN2002462, SPLEN2002477, SPLEN2002662, SPLEN2002695, SPLEN2002707, SPLEN2002744, SPLEN2002917, SPLEN2002931, SPLEN2002957, SPLEN2003160, SPLEN2003204, SPLEN2003219, SPLEN2003297, SPLEN2003396, SPLEN2003678, SPLEN2003878, SPLEN2003918, SPLEN2003924, SPLEN2004060, SPLEN2004078, SPLEN2004124, SPLEN2004148, SPLEN2004181, SPLEN2004220, SPLEN2004346, SPLEN2004368, SPLEN2004611, SPLEN2004880, SPLEN2004984, SPLEN2005009, SPLEN2005227, SPLEN2005272, SPLEN2005342, SPLEN2005416, SPLEN2005450, SPLEN2005474, SPLEN2005560, SPLEN2005727, SPLEN2005790, SPLEN2005818, SPLEN2005838, SPLEN2005869, SPLEN2005927, SPLEN2005939, SPLEN2006122, SPLEN2006232, SPLEN2006268, SPLEN2006283, SPLEN2006325, SPLEN2006389, SPLEN2006425, SPLEN2006701, SPLEN2006785, SPLEN2006875, SPLEN2007182, SPLEN2007276, SPLEN2007314, SPLEN2007326, SPLEN2007350, SPLEN2007388, SPLEN2007619, SPLEN2007653, SPLEN2007689, SPLEN2007695, SPLEN2007750, SPLEN2007794, SPLEN2007879, SPLEN2007926, SPLEN2007951, SPLEN2008007, SPLEN2008135, SPLEN2008164, SPLEN2008317, SPLEN2008460, SPLEN2008591, SPLEN2008786, SPLEN2009081, SPLEN2009088, SPLEN2009163, SPLEN2009315, SPLEN2009340, SPLEN2009512, SPLEN2009541, SPLEN2009548, SPLEN2009555, SPLEN2009581, SPLEN2009733, SPLEN2009803, SPLEN2009884, SPLEN2009918, SPLEN2009970, SPLEN2010004, SPLEN2010112, SPLEN2010119, SPLEN2010146, SPLEN2010187, SPLEN2010350, SPLEN2010395, SPLEN2010415, SPLEN2010447, SPLEN2010469, SPLEN2010510, SPLEN2010530, SPLEN2010534, SPLEN2010588, SPLEN2010625, SPLEN2010800, SPLEN2010846, SPLEN2010862, SPLEN2010978, SPLEN2011018, SPLEN2011021, SPLEN2011025, SPLEN2011086, SPLEN2011139, SPLEN2011145, SPLEN2011248, SPLEN2011252, SPLEN2011422, SPLEN2011672, SPLEN2011678, SPLEN2011766, SPLEN2011805, SPLEN2011820, SPLEN2011830, SPLEN2011931, SPLEN2011981, SPLEN2012115, SPLEN2012175, SPLEN2012179, SPLEN2012185, SPLEN2012234, SPLEN2012523, SPLEN2012524, SPLEN2012525, SPLEN2012606, SPLEN2012611, SPLEN2012619, SPLEN2012725, SPLEN2012743, SPLEN2012756, SPLEN2012800, SPLEN2012846, SPLEN2012889, SPLEN2012961, SPLEN2013108, SPLEN2013503, SPLEN2013644, SPLEN2013648, SPLEN2013673, SPLEN2013690, SPLEN2013714, SPLEN2013753, SPLEN2013821, SPLEN2013857, SPLEN2013860, SPLEN2013910, SPLEN2013923, SPLEN2013936, SPLEN2014041, SPLEN2014063, SPLEN2014073, SPLEN2014136, SPLEN2014199, SPLEN2014210, SPLEN2014293, SPLEN2014318, SPLEN2014381, SPLEN2014452, SPLEN2014454, SPLEN2014486, SPLEN2014543, SPLEN2014572, SPLEN2014645, SPLEN2014669, SPLEN2014711, SPLEN2014739, SPLEN2014860, SPLEN2014865, SPLEN2014919, SPLEN2014920, SPLEN2014924, SPLEN2014937, SPLEN2014946, SPLEN2015031, SPLEN2015094, SPLEN2015121, SPLEN2015129, SPLEN2015158, SPLEN2015166, SPLEN2015216, SPLEN2015258, SPLEN2015261, SPLEN2015267, SPLEN2015276, SPLEN2015415, SPLEN2015433; SPLEN2015593, SPLEN2015674, SPLEN2015679, SPLEN2015707, SPLEN2015730, SPLEN2015746, SPLEN2015815, SPLEN2015891, SPLEN2015899, SPLEN2016045, SPLEN2016053, SPLEN2016069, SPLEN2016098, SPLEN2016135, SPLEN2016241, SPLEN2016250, SPLEN2016304, SPLEN2016356, SPLEN2016421, SPLEN2016480, SPLEN2016531, SPLEN2016533, SPLEN2016541, SPLEN2016552, SPLEN2016554, SPLEN2016602, SPLEN2016627, SPLEN2016678, SPLEN2016743, SPLEN2016781, SPLEN2016840, SPLEN2016863, SPLEN2016922, SPLEN2016932, SPLEN2016973, SPLEN2017043, SPLEN2017104, SPLEN2017147, SPLEN2017187, SPLEN2017189, SPLEN2017212, SPLEN2017426, SPLEN2017452, SPLEN2017538, SPLEN2017613, SPLEN2017620, SPLEN2017643, SPLEN2017687, SPLEN2017740, SPLEN2017999, SPLEN2018098, SPLEN2018112, SPLEN2018157, SPLEN2018159, SPLEN2018180, SPLEN2018181, SPLEN2018280, SPLEN2018285, SPLEN2018299, SPLEN2018302, SPLEN2018364, SPLEN2018395, SPLEN2018643, SPLEN2018683, SPLEN2018732, SPLEN2018749, SPLEN2018933, SPLEN2019008, SPLEN2019043, SPLEN2019077, SPLEN2019092, SPLEN2019102, SPLEN2019131, SPLEN2019311, SPLEN2019323, SPLEN2019349, SPLEN2019375, SPLEN2019446, SPLEN2019471, SPLEN2019480, SPLEN2019505, SPLEN2019571, SPLEN2019575, SPLEN2019709, SPLEN2019774, SPLEN2019793, SPLEN2019811, SPLEN2019839, SPLEN2019985, SPLEN2020034, SPLEN2020153, SPLEN2020154, SPLEN2020166, SPLEN2020183, SPLEN2020223, SPLEN2020359, SPLEN2020427, SPLEN2020467, SPLEN2020512, SPLEN2020608, SPLEN2020777, SPLEN2020805, SPLEN2021057, SPLEN2021122, SPLEN2021157, SPLEN2021194, SPLEN2021231, SPLEN2021273, SPLEN2021295, SPLEN2021298, SPLEN2021383, SPLEN2021417, SPLEN2021440, SPLEN2021458, SPLEN2021463, SPLEN2021560, SPLEN2021701, SPLEN2021795, SPLEN2021983, SPLEN2021991, SPLEN2022040, SPLEN2022162, SPLEN2022227, SPLEN2022522, SPLEN2022591, SPLEN2022785, SPLEN2022920, SPLEN2023024, SPLEN2023118, SPLEN2023160, SPLEN2023423, SPLEN2023710, SPLEN2023733, SPLEN2023791, SPLEN2023977, SPLEN2024070, SPLEN2024127, SPLEN2024232, SPLEN2024273, SPLEN2024383, SPLEN2024530, SPLEN2024571, SPLEN2024577, SPLEN2024617, SPLEN2024737, SPLEN2024922, SPLEN2024956, SPLEN2024990, SPLEN2025012, SPLEN2025017, SPLEN2025219, SPLEN2025491, SPLEN2025626, SPLEN2025820, SPLEN2026144, SPLEN2026411, SPLEN2026765, SPLEN2027157, SPLEN2027395, SPLEN2027488, SPLEN2027780, SPLEN2027852, SPLEN2027868, SPLEN2027995, SPLEN2028046, SPLEN2028066, SPLEN2028138, SPLEN2028365, SPLEN2028417, SPLEN2028424, SPLEN2028593, SPLEN2028844, SPLEN2028914, SPLEN2028994, SPLEN2029051, SPLEN2029176, SPLEN2029295, SPLEN2029380, SPLEN2029522, SPLEN2029683, SPLEN2029727, SPLEN2029904, SPLEN2030250, SPLEN2030335, SPLEN2030371, SPLEN2030397, SPLEN2030479, SPLEN2030495, SPLEN2030562, SPLEN2030847, SPLEN2031004, SPLEN2031125, SPLEN2031674, SPLEN2031724, SPLEN2031780, SPLEN2032036, SPLEN2032112, SPLEN2032154, SPLEN2032157, SPLEN2032321, SPLEN2032356, SPLEN2032677, SPLEN2032813, SPLEN2032924, SPLEN2033098, SPLEN2033153, SPLEN2033333, SPLEN2033490, SPLEN2033539, SPLEN2033921, SPLEN2033996, SPLEN2034021, SPLEN2034081, SPLEN2034252, SPLEN2034551, SPLEN2034601, SPLEN2034678, SPLEN2034781, SPLEN2034864, SPLEN2034934, SPLEN2035318, SPLEN2035615, SPLEN2036076, SPLEN2036103, SPLEN2036326, SPLEN2036475, SPLEN2036501, SPLEN2036579, SPLEN2036608, SPLEN2036702, SPLEN2036712, SPLEN2036821, SPLEN2036953, SPLEN2037077, SPLEN2037319, SPLEN2037444, SPLEN2037580, SPLEN2037630, SPLEN2037678, SPLEN2037722, SPLEN2037891, SPLEN2038055, SPLEN2038180, SPLEN2038407, SPLEN2038473, SPLEN2038834, SPLEN2039311, SPLEN2039672, SPLEN2039697, SPLEN2039845, SPLEN2039936, SPLEN2040222, SPLEN2040824, SPLEN2041304, SPLEN2041306, SPLEN2041310, SPLEN2041585, SPLEN2041645, SPLEN2041700, SPLEN2041720, SPLEN2041977, SPLEN2042051, SPLEN2042303, SPLEN2042521, SPLEN2042598, SPLEN2042714, SPLEN2042920, STOMA1000013, STOMA1000047, STOMA1000052, STOMA1000074, STOMA1000091, STOMA1000117, STOMA1000133, STOMA1000175, STOMA1000186, STOMA1000189, STOMA1000190, STOMA1000191, STOMA2000032, STOMA2000072, STOMA2000088, STOMA2000104, STOMA2000121, STOMA2000148, STOMA2000168, STOMA2000183, STOMA2000188, STOMA2000257, STOMA2000279, STOMA2000383, STOMA2000386, STOMA2000478, STOMA2000529, STOMA2000539, STOMA2000567, STOMA2000640, STOMA2000678, STOMA2000686, STOMA2000888, STOMA2001025, STOMA2001389, STOMA2002141, STOMA2002367, STOMA2002688, STOMA2002828, STOMA2003158, STOMA2003289, STOMA2003444, STOMA2003477, STOMA2003646, STOMA2003716, STOMA2003781, STOMA2003894, STOMA2004194, STOMA2004294, STOMA2004663, STOMA2004668, STOMA2004852, STOMA2004873, STOMA2004884, STOMA2004893, STOMA2004925, STOMA2005120, STOMA2005664, STOMA2005667, STOMA2005746, STOMA2005782, STOMA2006181, STOMA2006213, STOMA2006229, STOMA2006325, STOMA2006330, STOMA2006398, STOMA2006447, STOMA2006780, STOMA2006904, STOMA2007269, STOMA2007680, STOMA2007745, STOMA2008050, STOMA2008361, STOMA2008546, STOMA2008614, STOMA2008638, STOMA2008838, STOMA2009250, STOMA2009253, STOMA2009256, SYNOV1000045, SYNOV1000049, SYNOV1000118, SYNOV1000128, SYNOV1000164, SYNOV1000190, SYNOV1000256, SYNOV1000374, SYNOV2000152, SYNOV2000171, SYNOV2000173, SYNOV2000177, SYNOV2000178, SYNOV2000193, SYNOV2000251, SYNOV2000279, SYNOV2000291, SYNOV2000297, SYNOV2000397, SYNOV2000426, SYNOV2000601, SYNOV2000700, SYNOV2000824, SYNOV2000923, SYNOV2001014, SYNOV2001035, SYNOV2001088, SYNOV2001111, SYNOV2001212, SYNOV2001251, SYNOV2001300, SYNOV2001356, SYNOV2001374, SYNOV2001390, SYNOV2001451, SYNOV2001457, SYNOV2001468, SYNOV2001581, SYNOV2001648, SYNOV2001660, SYNOV2003326, SYNOV2005216, SYNOV2005448, SYNOV2005541, SYNOV2005673, SYNOV2005817, SYNOV2005962, SYNOV2006430, SYNOV2006620, SYNOV2007758, SYNOV2007965, SYNOV2008765, SYNOV2011233, SYNOV2012326, SYNOV2013365, SYNOV2013637, SYNOV2014157, SYNOV2014364, SYNOV2016124, SYNOV2016837, SYNOV2017055, SYNOV2017179, SYNOV2018921, SYNOV2019280, SYNOV2020085, SYNOV2020463, SYNOV2021320, SYNOV3000184, SYNOV3000231, SYNOV3000302, SYNOV3000345, SYNOV4000249, SYNOV4000472, SYNOV4000598, SYNOV4000706, SYNOV4001224, SYNOV4001326, SYNOV4001342, SYNOV4001395, SYNOV4002001, SYNOV4002392, SYNOV4002875, SYNOV4002883, SYNOV4003174, SYNOV4003322, SYNOV4003681, SYNOV4003981, SYNOV4004184, SYNOV4004741, SYNOV4004823, SYNOV4004914, SYNOV4005256, SYNOV4005570, SYNOV4005739, SYNOV4005889, SYNOV4005981, SYNOV4005989, SYNOV4006256, SYNOV4006327, SYNOV4006542, SYNOV4007012, SYNOV4007215, SYNOV4007360, SYNOV4007430, SYNOV4007521, SYNOV4007553, SYNOV4007711, SYNOV4008336, SYNOV4009129, SYNOV4009139, SYNOV4009298, T1ESE2000116, T1ESE2000609, T1ESE2000904, T1ESE2002665, TBAES2000004, TBAES2000059, TBAES2000116, TBAES2000255, TBAES2000315, TBAES2000352, TBAES2000932, TBAES2001171, TBAES2001220, TBAES2001229, TBAES2001258, TBAES2001492, TBAES2001553, TBAES2001751, TBAES2003435, TBAES2003492, TBAES2003550, TBAES2003702, TBAES2003917, TBAES2004055, TBAES2004105, TBAES2004939, TBAES2005157, TBAES2005361, TBAES2005543, TBAES2006568, TBAES2006881, TBAES2007379, TBAES2007428, TBAES2007481, TBAES2007504, TBAES2007548, TBAES2007697, TBAES2007862, TBAES2007964, TBAES2008133, TCERX2000171, TCERX2000613, TCERX2000998, TCOLN1000037, TCOLN2000139, TCOLN2000236, TCOLN2000641, TCOLN2001268, TCOLN2002047, TCOLN2002278, TESOP1000035, TESOP1000127, TESOP1000160, TESOP2000083, TESOP2000090, TESOP2000205, TESOP2000390, TESOP2000400, TESOP2000510, TESOP2000527, TESOP2000569, TESOP2000739, TESOP2000801, TESOP2001122, TESOP2001166, TESOP2001345, TESOP2001474, TESOP2001796, TESOP2001818, TESOP2001849, TESOP2001865, TESOP2001901, TESOP2001953, TESOP2002005, TESOP2002110, TESOP2002150, TESOP2002489, TESOP2002539, TESOP2002545, TESOP2002804, TESOP2003273, TESOP2003308, TESOP2003553, TESOP2003753, TESOP2004110, TESOP2004114, TESOP2004173, TESOP2004214, TESOP2005199, TESOP2005285, TESOP2005485, TESOP2005498, TESOP2005579, TESOP2006041, TESOP2006053, TESOP2006060, TESOP2006068, TESOP2006110, TESOP2006398, TESOP2006670, TESOP2006704, TESOP2006746, TESOP2006865, TESOP2006893, TESOP2007041, TESOP2007052, TESOP2007262, TESOP2007384, TESOP2007636, TESOP2007674, TESOP2007688, TESOP2007725, TESOP2007912, TESOP2007978, TESOP2008127, TESOP2008552, TESOP2008556, TESOP2008563, TESOP2008820, TESOP2009121, TESOP2009201, TESOP2009247, TESOP2009555, TESTI1000018, TESTI1000019, TESTI1000025, TESTI1000029, TESTI1000030, TESTI1000042, TESTI1000045, TESTI1000051, TESTI1000055, TESTI1000064, TESTI1000085, TESTI1000088, TESTI1000093, TESTI1000094, TESTI1000101, TESTI1000109, TESTI1000125, TESTI1000127, TESTI1000128, TESTI1000131, TESTI1000138, TESTI1000142, TESTI1000157, TESTI1000163, TESTI1000169, TESTI1000179, TESTI1000183, TESTI1000191, TESTI1000257, TESTI1000266, TESTI1000319, TESTI1000348, TESTI1000390, TESTI1000391, TESTI1000459, TESTI1000491, TESTI1000545, TESTI2000006, TESTI2000018, TESTI2000044, TESTI2000117, TESTI2000120, TESTI2000147, TESTI2000154, TESTI2000172, TESTI2000177, TESTI2000179, TESTI2000207, TESTI2000208, TESTI2000221, TESTI2000238, TESTI2000253, TESTI2000278, TESTI2000349, TESTI2000358, TESTI2000372, TESTI2000427, TESTI2000431, TESTI2000435, TESTI2000443, TESTI2000452, TESTI2000462, TESTI2000489, TESTI2000520, TESTI2000571, TESTI2000591, TESTI2000600, TESTI2000616, TESTI2000644, TESTI2000671, TESTI2000683, TESTI2000689, TESTI2000695, TESTI2000699, TESTI2000707, TESTI2000745, TESTI2000756, TESTI2000762, TESTI2000784, TESTI2000808, TESTI2000819, TESTI2000830, TESTI2000840, TESTI2000849, TESTI2000850, TESTI2000874, TESTI2000883, TESTI2000951, TESTI2000981, TESTI2001008, TESTI2001049, TESTI2001082, TESTI2001120, TESTI2001134, TESTI2001141, TESTI2001180, TESTI2001208, TESTI2001229, TESTI2001236, TESTI2001237, TESTI2001306, TESTI2001313, TESTI2001330, TESTI2001339, TESTI2001345, TESTI2001352, TESTI2001364, TESTI2001412, TESTI2001420, TESTI2001498, TESTI2001512, TESTI2001518, TESTI2001556, TESTI2001593, TESTI2001621, TESTI2001661, TESTI2001665, TESTI2001671, TESTI2001697, TESTI2001725, TESTI2001758, TESTI2001766, TESTI2001792, TESTI2001793, TESTI2001795, TESTI2001812, TESTI2001815, TESTI2001823, TESTI2001826, TESTI2001827, TESTI2001852, TESTI2001869, TESTI2001879, TESTI2001894, TESTI2001898, TESTI2001915, TESTI2001950, TESTI2001959, TESTI2001968, TESTI2001991, TESTI2002002, TESTI2002012, TESTI2002036, TESTI2002048, TESTI2002057, TESTI2002081, TESTI2002090, TESTI2002105, TESTI2002149, TESTI2002216, TESTI2002223, TESTI2002245, TESTI2002251, TESTI2002256, TESTI2002264, TESTI2002282, TESTI2002293, TESTI2002294, TESTI2002326, TESTI2002351, TESTI2002361, TESTI2002369, TESTI2002406, TESTI2002415, TESTI2002423, TESTI2002453, TESTI2002461, TESTI2002465, TESTI2002467, TESTI2002498, TESTI2002516, TESTI2002544, TESTI2002578, TESTI2002580, TESTI2002618, TESTI2002632, TESTI2002676, TESTI2002690, TESTI2002696, TESTI2002698, TESTI2002700, TESTI2002724, TESTI2002729, TESTI2002752, TESTI2002753, TESTI2002789, TESTI2002802, TESTI2002806, TESTI2002840, TESTI2002866, TESTI2002877, TESTI2002910, TESTI2002912, TESTI2002928, TESTI2002937, TESTI2002965, TESTI2002993, TESTI2003020, TESTI2003031, TESTI2003037, TESTI2003044, TESTI2003059, TESTI2003061, TESTI2003074, TESTI2003089, TESTI2003104, TESTI2003109, TESTI2003117, TESTI2003130, TESTI2003131, TESTI2003139, TESTI2003152, TESTI2003181, TESTI2003193, TESTI2003196, TESTI2003228, TESTI2003236, TESTI2003255, TESTI2003258, TESTI2003277, TESTI2003299, TESTI2003311, TESTI2003321, TESTI2003327, TESTI2003330, TESTI2003347, TESTI2003354, TESTI2003356, TESTI2003372, TESTI2003376, TESTI2003413, TESTI2003418, TESTI2003419, TESTI2003432, TESTI2003454, TESTI2003475, TESTI2003476, TESTI2003498, TESTI2003512, TESTI2003539, TESTI2003545, TESTI2003551, TESTI2003574, TESTI2003579, TESTI2003580, TESTI2003589, TESTI2003596, TESTI2003598, TESTI2003615, TESTI2003638, TESTI2003649, TESTI2003692, TESTI2003718, TESTI2003727, TESTI2003756, TESTI2003768, TESTI2003781, TESTI2003787, TESTI2003824, TESTI2003827, TESTI2003894, TESTI2003911, TESTI2003914, TESTI2003940, TESTI2003962, TESTI2003998, TESTI2004000, TESTI2004073, TESTI2004085, TESTI2004089, TESTI2004111, TESTI2004119, TESTI2004163, TESTI2004169, TESTI2004207, TESTI2004215, TESTI2004227, TESTI2004229, TESTI2004243, TESTI2004255, TESTI2004287, TESTI2004313, TESTI2004318, TESTI2004322, TESTI2004391, TESTI2004399, TESTI2004423, TESTI2004431, TESTI2004432, TESTI2004452, TESTI2004459, TESTI2004490, TESTI2004539, TESTI2004552, TESTI2004560, TESTI2004574, TESTI2004601, TESTI2004611, TESTI2004649, TESTI2004654, TESTI2004675, TESTI2004687, TESTI2004689, TESTI2004700, TESTI2004706, TESTI2004712, TESTI2004734, TESTI2004783, TESTI2004791, TESTI2004793, TESTI2004860, TESTI2004906, TESTI2004920, TESTI2004936, TESTI2004941, TESTI2004971, TESTI2004982, TESTI2004993, TESTI2004994, TESTI2004999, TESTI2005017, TESTI2005025, TESTI2005040, TESTI2005060, TESTI2005085, TESTI2005112, TESTI2005120, TESTI2005153, TESTI2005155, TESTI2005173, TESTI2005267, TESTI2005268, TESTI2005280, TESTI2005307, TESTI2005326, TESTI2005363, TESTI2005376, TESTI2005378, TESTI2005380, TESTI2005391, TESTI2005395, TESTI2005396, TESTI2005415, TESTI2005470, TESTI2005492, TESTI2005564, TESTI2005568, TESTI2005584, TESTI2005588, TESTI2005590, TESTI2005603, TESTI2005609, TESTI2005610, TESTI2005630, TESTI2005672, TESTI2005683, TESTI2005690, TESTI2005692, TESTI2005703, TESTI2005720, TESTI2005731, TESTI2005739, TESTI2005775, TESTI2005827, TESTI2005835, TESTI2005860, TESTI2005892, TESTI2005911, TESTI2005933, TESTI2005937, TESTI2005948, TESTI2005979, TESTI2005982, TESTI2005984, TESTI2005986, TESTI2005987, TESTI2006007, TESTI2006008, TESTI2006015, TESTI2006016, TESTI2006035, TESTI2006040, TESTI2006041, TESTI2006045, TESTI2006067, TESTI2006083, TESTI2006109, TESTI2006125, TESTI2006179, TESTI2006209, TESTI2006212, TESTI2006218, TESTI2006238, TESTI2006255, TESTI2006258, TESTI2006278, TESTI2006333, TESTI2006360, TESTI2006409, TESTI2006425, TESTI2006437, TESTI2006457, TESTI2006460, TESTI2006465, TESTI2006483, TESTI2006499, TESTI2006523, TESTI2006543, TESTI2006565, TESTI2006572, TESTI2006617, TESTI2006624, TESTI2006628, TESTI2006633, TESTI2006643, TESTI2006648, TESTI2006659, TESTI2006660, TESTI2006665, TESTI2006667, TESTI2006677, TESTI2006720, TESTI2006735, TESTI2006744, TESTI2006853, TESTI2006866, TESTI2006872, TESTI2006877, TESTI2006879, TESTI2006894, TESTI2006940, TESTI2006955, TESTI2006978, TESTI2006979, TESTI2006990, TESTI2007040, TESTI2007074, TESTI2007078, TESTI2007113, TESTI2007152, TESTI2007183, TESTI2007220, TESTI2007234, TESTI2007320, TESTI2007346, TESTI2007358, TESTI2007402, TESTI2007405, TESTI2007422, TESTI2007452, TESTI2007464, TESTI2007466, TESTI2007480, TESTI2007490, TESTI2007502, TESTI2007524, TESTI2007533, TESTI2007576, TESTI2007613, TESTI2007657, TESTI2007685, TESTI2007692, TESTI2007749, TESTI2007750, TESTI2007808, TESTI2007814, TESTI2007829, TESTI2007864, TESTI2007867, TESTI2007872, TESTI2007906, TESTI2007922, TESTI2007951, TESTI2007972, TESTI2007973, TESTI2008014, TESTI2008020, TESTI2008032, TESTI2008033, TESTI2008046, TESTI2008081, TESTI2008099, TESTI2008139, TESTI2008144, TESTI2008161, TESTI2008189, TESTI2008204, TESTI2008219, TESTI2008233, TESTI2008234, TESTI2008237, TESTI2008278, TESTI2008320, TESTI2008331, TESTI2008343, TESTI2008387, TESTI2008389, TESTI2008394, TESTI2008405, TESTI2008420, TESTI2008425, TESTI2008440, TESTI2008567, TESTI2008595, TESTI2008621, TESTI2008636, TESTI2008657, TESTI2008684, TESTI2008699, TESTI2008715, TESTI2008762, TESTI2008774, TESTI2008786, TESTI2008822, TESTI2008835, TESTI2008840, TESTI2008884, TESTI2008901, TESTI2008929, TESTI2008946, TESTI2008960, TESTI2009018, TESTI2009091, TESTI2009097, TESTI2009136, TESTI2009185, TESTI2009190, TESTI2009217, TESTI2009325, TESTI2009390, TESTI2009400, TESTI2009412, TESTI2009423, TESTI2009447, TESTI2009462, TESTI2009477, TESTI2009497, TESTI2009502, TESTI2009511, TESTI2009544, TESTI2009545, TESTI2009551, TESTI2009577, TESTI2009585, TESTI2009588, TESTI2009727, TESTI2009739, TESTI2009812, TESTI2009835, TESTI2009853, TESTI2009935, TESTI2009977, TESTI2010009, TESTI2010154, TESTI2010180, TESTI2010239, TESTI2010280, TESTI2010354, TESTI2010396, TESTI2010400, TESTI2010409, TESTI2010572, TESTI2010587, TESTI2010591, TESTI2010682, TESTI2010724, TESTI2010732, TESTI2010734, TESTI2010755, TESTI2010793, TESTI2010806, TESTI2010833, TESTI2010872, TESTI2011009, TESTI2011020, TESTI2011028, TESTI2011033, TESTI2011254, TESTI2011286, TESTI2011294, TESTI2011314, TESTI2011315, TESTI2011394, TESTI2011407, TESTI2011448, TESTI2011480, TESTI2011575, TESTI2011612, TESTI2011665, TESTI2011680, TESTI2011683, TESTI2011712, TESTI2011750, TESTI2011840, TESTI2011846, TESTI2011915, TESTI2011928, TESTI2011971, TESTI2012019, TESTI2012050, TESTI2012090, TESTI2012095, TESTI2012152, TESTI2012155, TESTI2012171, TESTI2012207, TESTI2012231, TESTI2012244, TESTI2012308, TESTI2012356, TESTI2012387, TESTI2012394, TESTI2012444, TESTI2012528, TESTI2012544, TESTI2012550, TESTI2012571, TESTI2012592, TESTI2012617, TESTI2012628, TESTI2012812, TESTI2012834, TESTI2012835, TESTI2012861, TESTI2012900, TESTI2012915, TESTI2012922, TESTI2013001, TESTI2013012, TESTI2013053, TESTI2013144, TESTI2013163, TESTI2013169, TESTI2013212, TESTI2013257, TESTI2013264, TESTI2013268, TESTI2013322, TESTI2013381, TESTI2013382, TESTI2013401, TESTI2013427, TESTI2013468, TESTI2013497, TESTI2013545, TESTI2013546, TESTI2013566, TESTI2013601, TESTI2013604, TESTI2013607, TESTI2013610, TESTI2013691, TESTI2013699, TESTI2013737, TESTI2013767, TESTI2013832, TESTI2013873, TESTI2013889, TESTI2014007, TESTI2014036, TESTI2014097, TESTI2014160, TESTI2014248, TESTI2014254, TESTI2014269, TESTI2014274, TESTI2014324, TESTI2014339, TESTI2014362, TESTI2014385, TESTI2014415, TESTI2014439, TESTI2014474, TESTI2014505, TESTI2014577, TESTI2014578, TESTI2014716, TESTI2014780, TESTI2014800, TESTI2014843, TESTI2014979, TESTI2014988, TESTI2015042, TESTI2015105, TESTI2015180, TESTI2015249, TESTI2015327, TESTI2015331, TESTI2015335, TESTI2015350, TESTI2015375, TESTI2015437, TESTI2015590, TESTI2015610, TESTI2015647, TESTI2015675, TESTI2015710, TESTI2015752, TESTI2015830, TESTI2015914, TESTI2015938, TESTI2015947, TESTI2015987, TESTI2016033, TESTI2016046, TESTI2016101, TESTI2016162, TESTI2016197, TESTI2016278, TESTI2016298, TESTI2016331, TESTI2016337, TESTI2016410, TESTI2016421, TESTI2016509, TESTI2016568, TESTI2016599, TESTI2016629, TESTI2016663, TESTI2016667, TESTI2016688, TESTI2016758, TESTI2016848, TESTI2016863, TESTI2016888, TESTI2016896, TESTI2016922, TESTI2016942, TESTI2016950, TESTI2016996, TESTI2017017, TESTI2017028, TESTI2017069, TESTI2017089, TESTI2017102, TESTI2017113, TESTI2017125, TESTI2017256, TESTI2017305, TESTI2017311, TESTI2017396, TESTI2017507, TESTI2017537, TESTI2017582, TESTI2017584, TESTI2017645, TESTI2017727, TESTI2017740, TESTI2017775, TESTI2017816, TESTI2017832, TESTI2017923, TESTI2017932, TESTI2017951, TESTI2018031, TESTI2018035, TESTI2018060, TESTI2018083, TESTI2018178, TESTI2018221, TESTI2018276, TESTI2018290, TESTI2018335, TESTI2018337, TESTI2018368, TESTI2018421, TESTI2018428, TESTI2018475, TESTI2018482, TESTI2018521, TESTI2018565, TESTI2018581, TESTI2018611, TESTI2018687, TESTI2018697, TESTI2018838, TESTI2018941, TESTI2018957, TESTI2018974, TESTI2018975, TESTI2019042, TESTI2019077, TESTI2019228, TESTI2019257, TESTI2019280, TESTI2019282, TESTI2019308, TESTI2019336, TESTI2019352, TESTI2019406, TESTI2019430, TESTI2019455, TESTI2019481, TESTI2019488, TESTI2019501, TESTI2019648, TESTI2019669, TESTI2019697, TESTI2019729, TESTI2019787, TESTI2019794, TESTI2019854, TESTI2019859, TESTI2019860, TESTI2019872, TESTI2019911, TESTI2019917, TESTI2019975, TESTI2019998, TESTI2020012, TESTI2020026, TESTI2020029, TESTI2020071, TESTI2020084, TESTI2020265, TESTI2020283, TESTI2020316, TESTI2020344, TESTI2020379, TESTI2020426, TESTI2020445, TESTI2020510, TESTI2020515, TESTI2020525, TESTI2020579, TESTI2020717, TESTI2020871, TESTI2020905, TESTI2020906, TESTI2020946, TESTI2020956, TESTI2020981, TESTI2020999, TESTI2021003, TESTI2021057, TESTI2021077, TESTI2021112, TESTI2021114, TESTI2021116, TESTI2021118, TESTI2021122, TESTI2021138, TESTI2021297, TESTI2021315, TESTI2021358, TESTI2021447, TESTI2021463, TESTI2021599, TESTI2021637, TESTI2021667, TESTI2021736, TESTI2021785, TESTI2021819, TESTI2021895, TESTI2021911, TESTI2021939, TESTI2021999, TESTI2022010, TESTI2022023, TESTI2022065, TESTI2022086, TESTI2022179, TESTI2022203, TESTI2022246, TESTI2022323, TESTI2022338, TESTI2022400, TESTI2022462, TESTI2022495, TESTI2022623, TESTI2022649, TESTI2022652, TESTI2022738, TESTI2022798, TESTI2022812, TESTI2022814, TESTI2022874, TESTI2022940, TESTI2022952, TESTI2023025, TESTI2023033, TESTI2023053, TESTI2023085, TESTI2023192, TESTI2023194, TESTI2023214, TESTI2023254, TESTI2023386, TESTI2023427, TESTI2023436, TESTI2023599, TESTI2023752, TESTI2023800, TESTI2023861, TESTI2023903, TESTI2023942, TESTI2023947, TESTI2023951, TESTI2023968, TESTI2024009, TESTI2024090, TESTI2024125, TESTI2024153, TESTI2024192, TESTI2024267, TESTI2024283, TESTI2024299, TESTI2024419, TESTI2024422, TESTI2024443, TESTI2024446, TESTI2024473, TESTI2024476, TESTI2024498, TESTI2024560, TESTI2024567, TESTI2024586, TESTI2024598, TESTI2024641, TESTI2024648, TESTI2024718, TESTI2024744, TESTI2024844, TESTI2024864, TESTI2024885, TESTI2024936, TESTI2024978, TESTI2024999, TESTI2025006, TESTI2025013, TESTI2025022, TESTI2025063, TESTI2025117, TESTI2025144, TESTI2025161, TESTI2025174, TESTI2025229, TESTI2025269, TESTI2025365, TESTI2025403, TESTI2025409, TESTI2025448, TESTI2025454, TESTI2025486, TESTI2025546, TESTI2025582, TESTI2025609, TESTI2025656, TESTI2025757, TESTI2025791, TESTI2025872, TESTI2025879, TESTI2025911, TESTI2025920, TESTI2025924, TESTI2026014, TESTI2026024, TESTI2026064, TESTI2026077, TESTI2026104, TESTI2026134, TESTI2026168, TESTI2026196, TESTI2026215, TESTI2026218, TESTI2026233, TESTI2026291, TESTI2026294, TESTI2026401, TESTI2026403, TESTI2026453, TESTI2026461, TESTI2026491, TESTI2026505, TESTI2026515, TESTI2026534, TESTI2026537, TESTI2026589, TESTI2026597, TESTI2026605, TESTI2026674, TESTI2026794, TESTI2026824, TESTI2026854, TESTI2026925, TESTI2026957, TESTI2027013, TESTI2027019, TESTI2027108, TESTI2027165, TESTI2027171, TESTI2027173, TESTI2027179, TESTI2027185, TESTI2027206, TESTI2027238, TESTI2027239, TESTI2027243, TESTI2027271, TESTI2027296, TESTI2027378, TESTI2027411, TESTI2027450, TESTI2027496, TESTI2027503, TESTI2027562, TESTI2027615, TESTI2027645, TESTI2027730, TESTI2027736, TESTI2027791, TESTI2027820, TESTI2027828, TESTI2027840, TESTI2027909, TESTI2028098, TESTI2028151, TESTI2028242, TESTI2028253, TESTI2028254, TESTI2028269, TESTI2028290, TESTI2028384, TESTI2028426, TESTI2028488, TESTI2028523, TESTI2028583, TESTI2028613, TESTI2028662, TESTI2028670, TESTI2028705, TESTI2028776, TESTI2028811, TESTI2028891, TESTI2028985, TESTI2028997, TESTI2029131, TESTI2029162, TESTI2029196, TESTI2029201, TESTI2029244, TESTI2029249, TESTI2029252, TESTI2029259, TESTI2029264, TESTI2029470, TESTI2029672, TESTI2029785, TESTI2029880, TESTI2030136, TESTI2030322, TESTI2030336, TESTI2030342, TESTI2030519, TESTI2030554, TESTI2030556, TESTI2030728, TESTI2030754, TESTI2030770, TESTI2030860, TESTI2030901, TESTI2030917, TESTI2030930, TESTI2031006, TESTI2031007, TESTI2031060, TESTI2031129, TESTI2031356, TESTI2031418, TESTI2031504, TESTI2031529, TESTI2031687, TESTI2031760, TESTI2031809, TESTI2031919, TESTI2031935, TESTI2031986, TESTI2032044, TESTI2032067, TESTI2032079, TESTI2032643, TESTI2032681, TESTI2032761, TESTI2032768, TESTI2032774, TESTI2032828, TESTI2033031, TESTI2033242, TESTI2033254, TESTI2033300, TESTI2033395, TESTI2033453, TESTI2033505, TESTI2033520, TESTI2033641, TESTI2033710, TESTI2033905, TESTI2034187, TESTI2034243, TESTI2034249, TESTI2034307, TESTI2034357, TESTI2034401, TESTI2034407, TESTI2034506, TESTI2034520, TESTI2034718, TESTI2034730, TESTI2034749, TESTI2034767, TESTI2034774, TESTI2034777, TESTI2034785, TESTI2034799, TESTI2034847, TESTI2034913, TESTI2034931, TESTI2034953, TESTI2034997, TESTI2035078, TESTI2035084, TESTI2035107, TESTI2035121, TESTI2035124, TESTI2035183, TESTI2035262, TESTI2035309, TESTI2035688, TESTI2035775, TESTI2035793, TESTI2035898, TESTI2035962, TESTI2035981, TESTI2035997, TESTI2036114, TESTI2036129, TESTI2036285, TESTI2036288, TESTI2036513, TESTI2036589, TESTI2036684, TESTI2036691, TESTI2036736, TESTI2036822, TESTI2036833, TESTI2036913, TESTI2036922, TESTI2036951, TESTI2036965, TESTI2037002, TESTI2037055, TESTI2037081, TESTI2037085, TESTI2037103, TESTI2037106, TESTI2037111, TESTI2037209, TESTI2037255, TESTI2037359, TESTI2037375, TESTI2037382, TESTI2037534, TESTI2037569, TESTI2037572, TESTI2037643, TESTI2037657, TESTI2037673, TESTI2037723, TESTI2037819, TESTI2037830, TESTI2037845, TESTI2037877, TESTI2037976, TESTI2038048, TESTI2038065, TESTI2038104, TESTI2038275, TESTI2038388, TESTI2038573, TESTI2038596, TESTI2038623, TESTI2038644, TESTI2038733, TESTI2038858, TESTI2038958, TESTI2039025, TESTI2039026, TESTI2039038, TESTI2039041, TESTI2039060, TESTI2039113, TESTI2039121, TESTI2039209, TESTI2039225, TESTI2039227, TESTI2039276, TESTI2039342, TESTI2039353, TESTI2039544, TESTI2039613, TESTI2039707, TESTI2039732, TESTI2039738, TESTI2039776, TESTI2039867, TESTI2039908, TESTI2040018, TESTI2040094, TESTI2040102, TESTI2040128, TESTI2040143, TESTI2040297, TESTI2040372, TESTI2040377, TESTI2040424, TESTI2040642, TESTI2040815, TESTI2040897, TESTI2040944, TESTI2040964, TESTI2040983, TESTI2040989, TESTI2041330, TESTI2041362, TESTI2041517, TESTI2041564, TESTI2041664, TESTI2041730, TESTI2041734, TESTI2041778, TESTI2041800, TESTI2041947, TESTI2041956, TESTI2041976, TESTI2042062, TESTI2042149, TESTI2042264, TESTI2042295, TESTI2042302, TESTI2042326, TESTI2042400, TESTI2042450, TESTI2042473, TESTI2042507, TESTI2042508, TESTI2042750, TESTI2042783, TESTI2042806, TESTI2042928, TESTI2042946, TESTI2042958, TESTI2043277, TESTI2043282, TESTI2043313, TESTI2043477, TESTI2043585, TESTI2043758, TESTI2043817, TESTI2043857, TESTI2043866, TESTI2043869, TESTI2044064, TESTI2044118, TESTI2044194, TESTI2044276, TESTI2044306, TESTI2044309, TESTI2044413, TESTI2044418, TESTI2044754, TESTI2044788, TESTI2044796, TESTI2044833, TESTI2044892, TESTI2044920, TESTI2044968, TESTI2045139, TESTI2045171, TESTI2045199, TESTI2045353, TESTI2045509, TESTI2045562, TESTI2045611, TESTI2045819, TESTI2045850, TESTI2045920, TESTI2045964, TESTI2045983, TESTI2046100, TESTI2046188, TESTI2046347, TESTI2046352, TESTI2046358, TESTI2046439, TESTI2046535, TESTI2046536, TESTI2046552, TESTI2046569, TESTI2046686, TESTI2046721, TESTI2046732, TESTI2046786, TESTI2046797, TESTI2046863, TESTI2046872, TESTI2047071, TESTI2047141, TESTI2047147, TESTI2047153, TESTI2047212, TESTI2047342, TESTI2047383, TESTI2047605, TESTI2047792, TESTI2047801, TESTI2047818, TESTI2047824, TESTI2047885, TESTI2047930, TESTI2048105, TESTI2048109, TESTI2048465, TESTI2048603, TESTI2048898, TESTI2049041, TESTI2049062, TESTI2049206, TESTI2049246, TESTI2049277, TESTI2049422, TESTI2049452, TESTI2049469, TESTI2049553, TESTI2049576, TESTI2049857, TESTI2049956, TESTI2050137, TESTI2050681, TESTI2050780, TESTI2050987, TESTI2051148, TESTI2051177, TESTI2051279, TESTI2051488, TESTI2051543, TESTI2051627, TESTI2051742, TESTI2051767, TESTI2051791, TESTI2051806, TESTI2051867, TESTI2051873, TESTI2052110, TESTI2052202, TESTI2052211, TESTI2052256, TESTI2052288, TESTI2052525, TESTI2052670, TESTI2052693, TESTI2052698, TESTI2052799, TESTI2052822, TESTI2052985, TESTI2053151, TESTI2053242, TESTI2053399, TESTI2053526, TESTI2053561, TESTI2053621, TESTI2053667, TESTI3000002, TESTI3000005, TESTI4000068, TESTI4000079, TESTI4000093, TESTI4000134, TESTI4000137, TESTI4000153, TESTI4000155, TESTI4000157, TESTI4000183, TESTI4000214, TESTI4000215, TESTI4000228, TESTI4000250, TESTI4000288, TESTI4000319, TESTI4000370, TESTI4000394, TESTI4000462, TESTI4000530, TESTI4000534, TESTI4000598, TESTI4000600, TESTI4000621, TESTI4000703, TESTI4000724, TESTI4000957, TESTI4000970, TESTI4001036, TESTI4001037, TESTI4001060, TESTI4001106, TESTI4001148, TESTI4001176, TESTI4001195, TESTI4001201, TESTI4001206, TESTI4001348, TESTI4001441, TESTI4001473, TESTI4001517, TESTI4001527, TESTI4001569, TESTI4001604, TESTI4001665, TESTI4001679, TESTI4001795, TESTI4001923, TESTI4001925, TESTI4001984, TESTI4002003, TESTI4002141, TESTI4002290, TESTI4002319, TESTI4002491, TESTI4002520, TESTI4002552, TESTI4002647, TESTI4002703, TESTI4002754, TESTI4002868, TESTI4002878, TESTI4002889, TESTI4003179, TESTI4003279, TESTI4003319, TESTI4003404, TESTI4003565, TESTI4003574, TESTI4003579, TESTI4003733, TESTI4003796, TESTI4003944, TESTI4004003, TESTI4004031, TESTI4004200, TESTI4004210, TESTI4004539, TESTI4004653, TESTI4004695, TESTI4004722, TESTI4004887, TESTI4004917, TESTI4005015, TESTI4005039, TESTI4005158, TESTI4005317, TESTI4005322, TESTI4005470, TESTI4005500, TESTI4005534, TESTI4005543, TESTI4005628, TESTI4005801, TESTI4005805, TESTI4005857, TESTI4005961, TESTI4006053, TESTI4006079, TESTI4006112, TESTI4006137, TESTI4006148, TESTI4006219, TESTI4006234, TESTI4006308, TESTI4006326, TESTI4006393, TESTI4006407, TESTI4006412, TESTI4006420, TESTI4006441, TESTI4006473, TESTI4006539, TESTI4006546, TESTI4006567, TESTI4006704, TESTI4006728, TESTI4006802, TESTI4006819, TESTI4007064, TESTI4007163, TESTI4007176, TESTI4007203, TESTI4007239, TESTI4007373, TESTI4007382, TESTI4007404, TESTI4007489, TESTI4007565, TESTI4007671, TESTI4007775, TESTI4007778, TESTI4007799, TESTI4007810, TESTI4007816, TESTI4007965, TESTI4008007, TESTI4008018, TESTI4008050, TESTI4008058, TESTI4008086, TESTI4008097, TESTI4008176, TESTI4008209, TESTI4008219, TESTI4008250, TESTI4008302, TESTI4008305, TESTI4008401, TESTI4008417, TESTI4008429, TESTI4008573, TESTI4008797, TESTI4008816, TESTI4008840, TESTI4008935, TESTI4008993, TESTI4009022, TESTI4009028, TESTI4009034, TESTI4009123, TESTI4009160, TESTI4009215, TESTI4009283, TESTI4009286, TESTI4009306, TESTI4009374, TESTI4009406, TESTI4009457, TESTI4009501, TESTI4009563, TESTI4009608, TESTI4009638, TESTI4009752, TESTI4009881, TESTI4009886, TESTI4009928, TESTI4010076, TESTI4010082, TESTI4010095, TESTI4010211, TESTI4010377, TESTI4010475, TESTI4010544, TESTI4010713, TESTI4010721, TESTI4010789, TESTI4010817, TESTI4010831, TESTI4010902, TESTI4010928, TESTI4010979, TESTI4011070, TESTI4011072, TESTI4011084, TESTI4011118, TESTI4011246, TESTI4011484, TESTI4011505, TESTI4011532, TESTI4011616, TESTI4011744, TESTI4011745, TESTI4011829, TESTI4011926, TESTI4011956, TESTI4012010, TESTI4012086, TESTI4012258, TESTI4012293, TESTI4012329, TESTI4012382, TESTI4012406, TESTI4012448, TESTI4012451, TESTI4012505, TESTI4012556, TESTI4012623, TESTI4012646, TESTI4012679, TESTI4012911, TESTI4012956, TESTI4012960, TESTI4013365, TESTI4013369, TESTI4013410, TESTI4013602, TESTI4013667, TESTI4013685, TESTI4013735, TESTI4013742, TESTI4013774, TESTI4013830, TESTI4013852, TESTI4013924, TESTI4013960, TESTI4013962, TESTI4014175, TESTI4014265, TESTI4014276, TESTI4014392, TESTI4014415, TESTI4014445, TESTI4014661, TESTI4014801, TESTI4014818, TESTI4014891, TESTI4014908, TESTI4014924, TESTI4014932, TESTI4014977, TESTI4015012, TESTI4015129, TESTI4015145, TESTI4015204, TESTI4015263, TESTI4015293, TESTI4015299, TESTI4015339, TESTI4015398, TESTI4015442, TESTI4015471, TESTI4015477, TESTI4015600, TESTI4015646, TESTI4015681, TESTI4015688, TESTI4015790, TESTI4016110, TESTI4016238, TESTI4016551, TESTI4016812, TESTI4016822, TESTI4016865, TESTI4016882, TESTI4016925, TESTI4017001, TESTI4017116, TESTI4017137, TESTI4017229, TESTI4017254, TESTI4017269, TESTI4017380, TESTI4017382, TESTI4017543, TESTI4017575, TESTI4017647, TESTI4017714, TESTI4017763, TESTI4017848, TESTI4017854, TESTI4017901, TESTI4017961, TESTI4018101, TESTI4018152, TESTI4018208, TESTI4018382, TESTI4018436, TESTI4018506, TESTI4018555, TESTI4018751, TESTI4018806, TESTI4018835, TESTI4018859, TESTI4018881, TESTI4018886, TESTI4018938, TESTI4019140, TESTI4019149, TESTI4019299, TESTI4019417, TESTI4019440, TESTI4019566, TESTI4019657, TESTI4019756, TESTI4019843, TESTI4020092, TESTI4020102, TESTI4020342, TESTI4020460, TESTI4020596, TESTI4020806, TESTI4020819, TESTI4020920, TESTI4021129, TESTI4021197, TESTI4021294, TESTI4021377, TESTI4021456, TESTI4021491, TESTI4021569, TESTI4021713, TESTI4021821, TESTI4022577, TESTI4022716, TESTI4022873, TESTI4023096, TESTI4023172, TESTI4023546, TESTI4023555, TESTI4023654, TESTI4023722, TESTI4023762, TESTI4023942, TESTI4024096, TESTI4024240, TESTI4024245, TESTI4024294, TESTI4024344, TESTI4024387, TESTI4024420, TESTI4024494, TESTI4024874, TESTI4024890, TESTI4024907, TESTI4024930, TESTI4025062, TESTI4025268, TESTI4025401, TESTI4025494, TESTI4025547, TESTI4025731, TESTI4025797, TESTI4025865, TESTI4025908, TESTI4025920, TESTI4026079, TESTI4026080, TESTI4026192, TESTI4026207, TESTI4026295, TESTI4026456, TESTI4026510, TESTI4026524, TESTI4026680, TESTI4026700, TESTI4026762, TESTI4026785, TESTI4027139, TESTI4027170, TESTI4027262, TESTI4027516, TESTI4027557, TESTI4027660, TESTI4027821, TESTI4027969, TESTI4028042, TESTI4028059, TESTI4028062, TESTI4028182, TESTI4028429, TESTI4028612, TESTI4028692, TESTI4028809, TESTI4028823, TESTI4028880, TESTI4028904, TESTI4028938, TESTI4028958, TESTI4028983, TESTI4029023, TESTI4029348, TESTI4029370, TESTI4029528, TESTI4029651, TESTI4029671, TESTI4029676, TESTI4029690, TESTI4029731, TESTI4029743, TESTI4030069, TESTI4030159, TESTI4030319, TESTI4030505, TESTI4030603, TESTI4030669, TESTI4030673, TESTI4030864, TESTI4031066, TESTI4031173, TESTI4031335, TESTI4031745, TESTI4031818, TESTI4032090, TESTI4032112, TESTI4032128, TESTI4032270, TESTI4032375, TESTI4032834, TESTI4032856, TESTI4032895, TESTI4033146, TESTI4033177, TESTI4033433, TESTI4033690, TESTI4034172, TESTI4034212, TESTI4034432, TESTI4034495, TESTI4034632, TESTI4034633, TESTI4034912, TESTI4034973, TESTI4035063, TESTI4035065, TESTI4035498, TESTI4035508, TESTI4035581, TESTI4035602, TESTI4035637, TESTI4035649, TESTI4035770, TESTI4035872, TESTI4035895, TESTI4035898, TESTI4035989, TESTI4036012, TESTI4036042, TESTI4036048, TESTI4036315, TESTI4036319, TESTI4036449, TESTI4036767, TESTI4036909, TESTI4037066, TESTI4037228, TESTI4037244, TESTI4037727, TESTI4037949, TESTI4038047, TESTI4038156, TESTI4038223, TESTI4038258, TESTI4038339, TESTI4038492, TESTI4038721, TESTI4038758, TESTI4038779, TESTI4038818, TESTI4039038, TESTI4039086, TESTI4039451, TESTI4039575, TESTI4039659, TESTI4039744, TESTI4039904, TESTI4040197, TESTI4040363, TESTI4040535, TESTI4040559, TESTI4040598, TESTI4040800, TESTI4040804, TESTI4040939, TESTI4040956, TESTI4041049, TESTI4041053, TESTI4041086, TESTI4041099, TESTI4041143, TESTI4041482, TESTI4041519, TESTI4041624, TESTI4041629, TESTI4041832, TESTI4041844, TESTI4041903, TESTI4041954, TESTI4041984, TESTI4041985, TESTI4041986, TESTI4042098, TESTI4042420, TESTI4042440, TESTI4042444, TESTI4042711, TESTI4042846, TESTI4043067, TESTI4043129, TESTI4043166, TESTI4043203, TESTI4043371, TESTI4043378, TESTI4043512, TESTI4043551, TESTI4043710, TESTI4043947, TESTI4044035, TESTI4044076, TESTI4044084, TESTI4044123, TESTI4044186, TESTI4044234, TESTI4044291, TESTI4044296, TESTI4044300, TESTI4044682, TESTI4044770, TESTI4045168, TESTI4045312, TESTI4045330, TESTI4045470, TESTI4045701, TESTI4045908, TESTI4045955, TESTI4045982, TESTI4046090, TESTI4046240, TESTI4046245, TESTI4046253, TESTI4046282, TESTI4046328, TESTI4046450, TESTI4046457, TESTI4046487, TESTI4046502, TESTI4046523, TESTI4046873, TESTI4046884, TESTI4046896, TESTI4046903, TESTI4046962, TESTI4047069, TESTI4047119, TESTI4047305, TESTI4047328, TESTI4047437, TESTI4047569, TESTI4047746, TESTI4047808, THYMU1000010, THYMU1000017, THYMU1000025, THYMU1000029, THYMU1000033, THYMU1000060, THYMU1000074, THYMU1000098, THYMU1000105, THYMU1000136, THYMU1000142, THYMU1000158, THYMU1000176, THYMU1000179, THYMU1000191, THYMU1000217, THYMU1000240, THYMU1000242, THYMU1000291, THYMU1000316, THYMU1000318, THYMU1000329, THYMU1000336, THYMU1000366, THYMU1000382, THYMU1000393, THYMU1000394, THYMU1000399, THYMU1000426, THYMU1000428, THYMU1000440, THYMU1000459, THYMU1000473, THYMU1000490, THYMU1000491, THYMU1000496, THYMU1000499, THYMU1000527, THYMU1000532, THYMU1000536, THYMU1000554, THYMU1000558, THYMU1000576, THYMU1000600, THYMU1000677, THYMU1000692, THYMU2000022, THYMU2000032, THYMU2000057, THYMU2000120, THYMU2000138, THYMU2000140, THYMU2000155, THYMU2000171, THYMU2000176, THYMU2000179, THYMU2000231, THYMU2000236, THYMU2000276, THYMU2000280, THYMU2000300, THYMU2000317, THYMU2000368, THYMU2000369, THYMU2000418, THYMU2000440, THYMU2000492, THYMU2000519, THYMU2000570, THYMU2000602, THYMU2000660, THYMU2000671, THYMU2000672, THYMU2000702, THYMU2000767, THYMU2000775, THYMU2000800, THYMU2000879, THYMU2000932, THYMU2000950, THYMU2000971, THYMU2000982, THYMU2000990, THYMU2001018, THYMU2001053, THYMU2001071, THYMU2001090, THYMU2001139, THYMU2001195, THYMU2001202, THYMU2001203, THYMU2001256, THYMU2001270, THYMU2001291, THYMU2001314, THYMU2001325, THYMU2001357, THYMU2001381, THYMU2001422, THYMU2001443, THYMU2001515, THYMU2001521, THYMU2001556, THYMU2001622, THYMU2001727, THYMU2001819, THYMU2001825, THYMU2001868, THYMU2001898, THYMU2001900, THYMU2001916, THYMU2001926, THYMU2001989, THYMU2002023, THYMU2002037, THYMU2002080, THYMU2002109, THYMU2002147, THYMU2002154, THYMU2002157, THYMU2002177, THYMU2002203, THYMU2002229, THYMU2002242, THYMU2002338, THYMU2002356, THYMU2002376, THYMU2002384, THYMU2002450, THYMU2002490, THYMU2002548, THYMU2002695, THYMU2002745, THYMU2002756, THYMU2002789, THYMU2002792, THYMU2002815, THYMU2002852, THYMU2002910, THYMU2002950, THYMU2003069, THYMU2003107, THYMU2003124, THYMU2003166, THYMU2003232, THYMU2003242, THYMU2003249, THYMU2003270, THYMU2003282, THYMU2003287, THYMU2003336, THYMU2003366, THYMU2003397, THYMU2003440, THYMU2003470, THYMU2003479, THYMU2003499, THYMU2003632, THYMU2003650, THYMU2003700, THYMU2003760, THYMU2003803, THYMU2003855, THYMU2003907, THYMU2003932, THYMU2003981, THYMU2004003, THYMU2004008, THYMU2004042, THYMU2004108, THYMU2004111, THYMU2004123, THYMU2004139, THYMU2004169, THYMU2004320, THYMU2004336, THYMU2004356, THYMU2004452, THYMU2004512, THYMU2004635, THYMU2004639, THYMU2004668, THYMU2004677, THYMU2004688, THYMU2004693, THYMU2004835, THYMU2004843, THYMU2004906, THYMU2004916, THYMU2004986, THYMU2005001, THYMU2005003, THYMU2005046, THYMU2005134, THYMU2005156, THYMU2005190, THYMU2005225, THYMU2005240, THYMU2005246, THYMU2005270, THYMU2005283, THYMU2005303, THYMU2005321, THYMU2005356, THYMU2005369, THYMU2005439, THYMU2005480, THYMU2005482, THYMU2005507, THYMU2005545, THYMU2005546, THYMU2005576, THYMU2005748, THYMU2005759, THYMU2005815, THYMU2005855, THYMU2005881, THYMU2005948, THYMU2005980, THYMU2005997, THYMU2006001, THYMU2006048, THYMU2006098, THYMU2006160, THYMU2006170, THYMU2006252, THYMU2006261, THYMU2006277, THYMU2006303, THYMU2006324, THYMU2006350, THYMU2006357, THYMU2006365, THYMU2006420, THYMU2006468, THYMU2006610, THYMU2006666, THYMU2006712, THYMU2006913, THYMU2006946, THYMU2006965, THYMU2007025, THYMU2007060, THYMU2007095, THYMU2007112, THYMU2007146, THYMU2007179, THYMU2007258, THYMU2007307, THYMU2007308, THYMU2007339, THYMU2007350, THYMU2007384, THYMU2007493, THYMU2007521, THYMU2007528, THYMU2007530, THYMU2007561, THYMU2007571, THYMU2007635, THYMU2007658, THYMU2007667, THYMU2007725, THYMU2007802, THYMU2007824, THYMU2007854, THYMU2007952, THYMU2007969, THYMU2008035, THYMU2008049, THYMU2008072, THYMU2008111, THYMU2008145, THYMU2008149, THYMU2008185, THYMU2008191, THYMU2008207, THYMU2008226, THYMU2008282, THYMU2008339, THYMU2008350, THYMU2008351, THYMU2008383, THYMU2008452, THYMU2008643, THYMU2008686, THYMU2008691, THYMU2008714, THYMU2008725, THYMU2008727, THYMU2008781, THYMU2008799, THYMU2008876, THYMU2008910, THYMU2008917, THYMU2008928, THYMU2008990, THYMU2008994, THYMU2009023, THYMU2009046, THYMU2009101, THYMU2009104, THYMU2009134, THYMU2009157, THYMU2009181, THYMU2009186, THYMU2009338, THYMU2009425, THYMU2009516, THYMU2009526, THYMU2009546, THYMU2009596, THYMU2009792, THYMU2009835, THYMU2009906, THYMU2009948, THYMU2010030, THYMU2010046, THYMU2010059, THYMU2010082, THYMU2010094, THYMU2010161, THYMU2010192, THYMU2010519, THYMU2010637, THYMU2010671, THYMU2010699, THYMU2010705, THYMU2010831, THYMU2010848, THYMU2011053, THYMU2011072, THYMU2011096, THYMU2011118, THYMU2011142, THYMU2011183, THYMU2011257, THYMU2011259, THYMU2011295, THYMU2011308, THYMU2011390, THYMU2011431, THYMU2011447, THYMU2011538, THYMU2011548, THYMU2011551, THYMU2011564, THYMU2011573, THYMU2011585, THYMU2011621, THYMU2011666, THYMU2011736, THYMU2011785, THYMU2011806, THYMU2011852, THYMU2011875, THYMU2011881, THYMU2011937, THYMU2012002, THYMU2012073, THYMU2012104, THYMU2012113, THYMU2012273, THYMU2012401, THYMU2012492, THYMU2012507, THYMU2012565, THYMU2012574, THYMU2012625, THYMU2012631, THYMU2012665, THYMU2012701, THYMU2012807, THYMU2012882, THYMU2012891, THYMU2012902, THYMU2012919, THYMU2013023, THYMU2013047, THYMU2013051, THYMU2013089, THYMU2013170, THYMU2013364, THYMU2013386, THYMU2013426, THYMU2013578, THYMU2013648, THYMU2013705, THYMU2013757, THYMU2013779, THYMU2013863, THYMU2013950, THYMU2013981, THYMU2014067, THYMU2014068, THYMU2014167, THYMU2014183, THYMU2014204, THYMU2014297, THYMU2014327, THYMU2014492, THYMU2014500, THYMU2014599, THYMU2014762, THYMU2014777, THYMU2014801, THYMU2014901, THYMU2014923, THYMU2015019, THYMU2015161, THYMU2015316, THYMU2015321, THYMU2015439, THYMU2015479, THYMU2015762, THYMU2015775, THYMU2015825, THYMU2015918, THYMU2015943, THYMU2015984, THYMU2016113, THYMU2016164, THYMU2016204, THYMU2016219, THYMU2016360, THYMU2016496, THYMU2016968, THYMU2017008, THYMU2017010, THYMU2017023, THYMU2017085, THYMU2017099, THYMU2017158, THYMU2017162, THYMU2017215, THYMU2017362, THYMU2017366, THYMU2017398, THYMU2017449, THYMU2017479, THYMU2017522, THYMU2017526, THYMU2017675, THYMU2017707, THYMU2017831, THYMU2017844, THYMU2017948, THYMU2018028, THYMU2018071, THYMU2018189, THYMU2018197, THYMU2018384, THYMU2018455, THYMU2018547, THYMU2018565, THYMU2018639, THYMU2018673, THYMU2018721, THYMU2018772, THYMU2018819, THYMU2018841, THYMU2018997, THYMU2019054, THYMU2019197, THYMU2019210, THYMU2019436, THYMU2019442, THYMU2019587, THYMU2019599, THYMU2019686, THYMU2019813, THYMU2020198, THYMU2020289, THYMU2020416, THYMU2020491, THYMU2020499, THYMU2020560, THYMU2020667, THYMU2020830, THYMU2020883, THYMU2021361, THYMU2021509, THYMU2021597, THYMU2021684, THYMU2021714, THYMU2022213, THYMU2022289, THYMU2022660, THYMU2022854, THYMU2022922, THYMU2023209, THYMU2023576, THYMU2023711, THYMU2023900, THYMU2023943, THYMU2024121, THYMU2024185, THYMU2024207, THYMU2024616, THYMU2024684, THYMU2024748, THYMU2025042, THYMU2025189, THYMU2025319, THYMU2025406, THYMU2025557, THYMU2025572, THYMU2025707, THYMU2025849, THYMU2025909, THYMU2025939, THYMU2026182, THYMU2026350, THYMU2026530, THYMU2026531, THYMU2026835, THYMU2026904, THYMU2027053, THYMU2027168, THYMU2027249, THYMU2027282, THYMU2027497, THYMU2027695, THYMU2027734, THYMU2027894, THYMU2027975, THYMU2027996, THYMU2028041, THYMU2028368, THYMU2028379, THYMU2028394, THYMU2028412, THYMU2028629, THYMU2028632, THYMU2028724, THYMU2028739, THYMU2028942, THYMU2028978, THYMU2029134, THYMU2029676, THYMU2029688, THYMU2029788, THYMU2030068, THYMU2030226, THYMU2030462, THYMU2030543, THYMU2030637, THYMU2030655, THYMU2030796, THYMU2030912, THYMU2030982, THYMU2031046, THYMU2031139, THYMU2031218, THYMU2031249, THYMU2031258, THYMU2031341, THYMU2031368, THYMU2031579, THYMU2031847, THYMU2031890, THYMU2031994, THYMU2032014, THYMU2032035, THYMU2032080, THYMU2032150, THYMU2032155, THYMU2032358, THYMU2032437, THYMU2032601, THYMU2032655, THYMU2032696, THYMU2032715, THYMU2032732, THYMU2032825, THYMU2032976, THYMU2033053, THYMU2033059, THYMU2033070, THYMU2033079, THYMU2033085, THYMU2033104, THYMU2033227, THYMU2033263, THYMU2033308, THYMU2033401, THYMU2033583, THYMU2033755, THYMU2033787, THYMU2033816, THYMU2034182, THYMU2034279, THYMU2034314, THYMU2034338, THYMU2034374, THYMU2034647, THYMU2035064, THYMU2035078, THYMU2035101, THYMU2035319, THYMU2035321, THYMU2035388, THYMU2035400, THYMU2035554, THYMU2035710, THYMU2036058, THYMU2036105, THYMU2036207, THYMU2036215, THYMU2036252, THYMU2036265, THYMU2036366, THYMU2036459, THYMU2036461, THYMU2036604, THYMU2036653, THYMU2037081, THYMU2037208, THYMU2037233, THYMU2037234, THYMU2037348, THYMU2037406, THYMU2037965, THYMU2038058, THYMU2038189, THYMU2038199, THYMU2038301, THYMU2038369, THYMU2038389, THYMU2038615, THYMU2038636, THYMU2038739, THYMU2038772, THYMU2038797, THYMU2038906, THYMU2039305, THYMU2039315, THYMU2039334, THYMU2039350, THYMU2039411, THYMU2039634, THYMU2039719, THYMU2039788, THYMU2039989, THYMU2040029, THYMU2040110, THYMU2040114, THYMU2040140, THYMU2040412, THYMU2040824, THYMU2041007, THYMU2041015, THYMU2041252, THYMU3000028, THYMU3000036, THYMU3000037, THYMU3000082, THYMU3000194, THYMU3000224, THYMU3000269, THYMU3000306, THYMU3000390, THYMU3000490, THYMU3000504, THYMU3000542, THYMU3000655, THYMU3000826, THYMU3000841, THYMU3001077, THYMU3001082, THYMU3001133, THYMU3001151, THYMU3001472, THYMU3001593, THYMU3001883, THYMU3001939, THYMU3001991, THYMU3002452, THYMU3002578, THYMU3002661, THYMU3003007, THYMU3003092, THYMU3003212, THYMU3003350, THYMU3003403, THYMU3003565, THYMU3003763, THYMU3003865, THYMU3003958, THYMU3003965, THYMU3004157, THYMU3004628, THYMU3004632, THYMU3004866, THYMU3005050, THYMU3005378, THYMU3005407, THYMU3005415, THYMU3005427, THYMU3005482, THYMU3005491, THYMU3005696, THYMU3006118, THYMU3006132, THYMU3006168, THYMU3006172, THYMU3006371, THYMU3006640, THYMU3006767, THYMU3006811, THYMU3006963, THYMU3007137, THYMU3007368, THYMU3007559, THYMU3007845, THYMU3008060, THYMU3008136, THYMU3008216, THYMU3008436, THYMU3008672, THYMU3008883, THYMU3008935, THYMU3009006, THYMU3009255, THYMU3009391, THYMU3009643, THYMU3009755, THYMU3010247, THYMU3011012, THYMU3011081, THYMU3011244, THYMU3011360, THYMU3011534, THYMU3011543, THYMU3011556, THYMU3011717, THYMU3011827, THYMU3012402, THYMU3012907, THYMU3012983, THYMU3013114, THYMU3013197, THYMU3013241, THYMU3013470, THYMU3013785, THYMU3013897, THYMU3014038, THYMU3014173, THYMU3014372, THYMU3014555, THYMU3014620, THYMU3014701, THYMU3015042, THYMU3015457, THYMU3015592, THYMU3015625, THYMU3015647, THYMU3015962, THYMU3016022, THYMU3016518, THYMU3016797, THYMU3016822, THYMU3016850, THYMU3017562, THYMU3017688, THYMU3017689, THYMU3017761, THYMU3018151, THYMU3018896, THYMU3019095, THYMU3019605, THYMU3019916, THYMU3020221, THYMU3020595, THYMU3020713, THYMU3020856, THYMU3020869, THYMU3020970, THYMU3021404, THYMU3021755, THYMU3021900, THYMU3022211, THYMU3022434, THYMU3022528, THYMU3022668, THYMU3022982, THYMU3023107, THYMU3023211, THYMU3023216, THYMU3023394, THYMU3023400, THYMU3023797, THYMU3024164, THYMU3024339, THYMU3024602, THYMU3024879, THYMU3025118, THYMU3025313, THYMU3025642, THYMU3025683, THYMU3025772, THYMU3025865, THYMU3026000, THYMU3026479, THYMU3026532, THYMU3026783, THYMU3026869, THYMU3027251, THYMU3027540, THYMU3027655, THYMU3027671, THYMU3028075, THYMU3028410, THYMU3028461, THYMU3028702, THYMU3029188, THYMU3029318, THYMU3029421, THYMU3029719, THYMU3029774, THYMU3029832, THYMU3030072, THYMU3030231, THYMU3030706, THYMU3030710, THYMU3030752, THYMU3031146, THYMU3031402, THYMU3031610, THYMU3031612, THYMU3031868, THYMU3031878, THYMU3032032, THYMU3033402, THYMU3033630, THYMU3033649, THYMU3033754, THYMU3033759, THYMU3034078, THYMU3034099, THYMU3034453, THYMU3034616, THYMU3034853, THYMU3034867, THYMU3034983, THYMU3036200, THYMU3036310, THYMU3036934, THYMU3036953, THYMU3037052, THYMU3037192, THYMU3037617, THYMU3037772, THYMU3037827, THYMU3037836, THYMU3037856, THYMU3037867, THYMU3037909, THYMU3037980, THYMU3038158, THYMU3038167, THYMU3038266, THYMU3038328, THYMU3038347, THYMU3038375, THYMU3038603, THYMU3038687, THYMU3038759, THYMU3038879, THYMU3038970, THYMU3039807, THYMU3039846, THYMU3040068, THYMU3040126, THYMU3040146, THYMU3040168, THYMU3040172, THYMU3040725, THYMU3040746, THYMU3040816, THYMU3040829, THYMU3040830, THYMU3040986, THYMU3041354, THYMU3041386, THYMU3041573, THYMU3041603, THYMU3041736, THYMU3041918, THYMU3042075, THYMU3042321, THYMU3042372, THYMU3042758, THYMU3042929, THYMU3043200, THYMU3043327, THYMU3043482, THYMU3043597, THYMU3043688, THYMU3043779, THYMU3043883, THYMU3043993, THYMU3044175, THYMU3044188, THYMU3044441, THYMU3044445, THYMU3045510, THYMU3045673, THYMU3045692, THYMU3045704, THYMU3046140, THYMU3046360, THYMU3046856, THYMU3047115, THYMU3047144, THYMU3047156, THYMU3047366, THYMU3047513, THYMU3047542, THYMU3047760, THYMU3047891, TKIDN1000044, TKIDN1000062, TKIDN1000066, TKIDN1000171, TKIDN2000127, TKIDN2000240, TKIDN2000319, TKIDN2000464, TKIDN2000521, TKIDN2000701, TKIDN2001529, TKIDN2001662, TKIDN2002329, TKIDN2002424, TKIDN2002632, TKIDN2003044, TKIDN2003059, TKIDN2003062, TKIDN2003078, TKIDN2003366, TKIDN2003396, TKIDN2003413, TKIDN2003597, TKIDN2004185, TKIDN2004386, TKIDN2004458, TKIDN2004748, TKIDN2005721, TKIDN2005934, TKIDN2005947, TKIDN2005956, TKIDN2006525, TKIDN2006852, TKIDN2007667, TKIDN2008778, TKIDN2009092, TKIDN2009330, TKIDN2009481, TKIDN2009794, TKIDN2009889, TKIDN2010200, TKIDN2010232, TKIDN2010278, TKIDN2010602, TKIDN2010812, TKIDN2010934, TKIDN2011051, TKIDN2011160, TKIDN2011324, TKIDN2012034, TKIDN2012771, TKIDN2012824, TKIDN2013134, TKIDN2013287, TKIDN2014570, TKIDN2014757, TKIDN2014771, TKIDN2014964, TKIDN2015025, TKIDN2015161, TKIDN2015263, TKIDN2016309, TKIDN2016399, TKIDN2019116, TLIVE2000023, TLIVE2000142, TLIVE2000292, TLIVE2000762, TLIVE2000979, TLIVE2001327, TLIVE2001616, TLIVE2001684, TLIVE2001828, TLIVE2001927, TLIVE2002336, TLIVE2002338, TLIVE2002562, TLIVE2002690, TLIVE2002882, TLIVE2003197, TLIVE2003200, TLIVE2003225, TLIVE2003381, TLIVE2003737, TLIVE2003961, TLIVE2003970, TLIVE2004110, TLIVE2004331, TLIVE2004601, TLIVE2005180, TLIVE2005390, TLIVE2005516, TLIVE2005731, TLIVE2005866, TLIVE2006236, TLIVE2006359, TLIVE2006529, TLIVE2006621, TLIVE2006733, TLIVE2007000, TLIVE2007016, TLIVE2007132, TLIVE2007192, TLIVE2007528, TLIVE2007607, TLIVE2007816, TLIVE2007919, TLIVE2008083, TLIVE2008213, TLIVE2008221, TLIVE2008229, TLIVE2008712, TLIVE2008797, TLIVE2009087, TLIVE2009163, TLIVE2009489, TLIVE2009541, TOVAR2000476, TOVAR2000575, TOVAR2000649, TOVAR2000904, TOVAR2001281, TOVAR2001556, TOVAR2001730, TOVAR2002247, TOVAR2002514, TOVAR2002549, TOVAR2002800, TRACH1000018, TRACH1000038, TRACH1000057, TRACH1000063, TRACH1000074, TRACH1000100, TRACH1000106, TRACH1000125, TRACH1000140, TRACH1000144, TRACH1000212, TRACH1000240, TRACH2000002, TRACH2000015, TRACH2000024, TRACH2000032, TRACH2000081, TRACH2000083, TRACH2000148, TRACH2000185, TRACH2000196, TRACH2000235, TRACH2000237, TRACH2000243, TRACH2000250, TRACH2000259, TRACH2000272, TRACH2000282, TRACH2000287, TRACH2000289, TRACH2000306, TRACH2000312, TRACH2000336, TRACH2000359, TRACH2000411, TRACH2000496, TRACH2000497, TRACH2000502, TRACH2000522, TRACH2000540, TRACH2000559, TRACH2000665, TRACH2000675, TRACH2000703, TRACH2000767, TRACH2000775, TRACH2000807, TRACH2000862, TRACH2000894, TRACH2000898, TRACH2000923, TRACH2000944, TRACH2000981, TRACH2000986, TRACH2001037, TRACH2001060, TRACH2001085, TRACH2001101, TRACH2001121, TRACH2001147, TRACH2001154, TRACH2001188, TRACH2001192, TRACH2001275, TRACH2001335, TRACH2001339, TRACH2001347, TRACH2001395, TRACH2001400, TRACH2001403, TRACH2001416, TRACH2001428, TRACH2001443, TRACH2001463, TRACH2001474, TRACH2001525, TRACH2001532, TRACH2001592, TRACH2001596, TRACH2001621, TRACH2001651, TRACH2001898, TRACH2001933, TRACH2001968, TRACH2001996, TRACH2002043, TRACH2002054, TRACH2002092, TRACH2002100, TRACH2002138, TRACH2002333, TRACH2002784, TRACH2002840, TRACH2002847, TRACH2002853, TRACH2002862, TRACH2002954, TRACH2002960, TRACH2002988, TRACH2003070, TRACH2003516, TRACH2003605, TRACH2003736, TRACH2003759, TRACH2003941, TRACH2004039, TRACH2004054, TRACH2004087, TRACH2004109, TRACH2004170, TRACH2004183, TRACH2004251, TRACH2004292, TRACH2004336, TRACH2004428, TRACH2004499, TRACH2004521, TRACH2004570, TRACH2004845, TRACH2004887, TRACH2004950, TRACH2005004, TRACH2005017, TRACH2005066, TRACH2005159, TRACH2005314, TRACH2005444, TRACH2005541, TRACH2005666, TRACH2005698, TRACH2005710, TRACH2005720, TRACH2005769, TRACH2005796, TRACH2005811, TRACH2006015, TRACH2006049, TRACH2006097, TRACH2006194, TRACH2006327, TRACH2006331, TRACH2006378, TRACH2006387, TRACH2006528, TRACH2006670, TRACH2006762, TRACH2006866, TRACH2006870, TRACH2006918, TRACH2007059, TRACH2007324, TRACH2007358, TRACH2007483, TRACH2007542, TRACH2007577, TRACH2007674, TRACH2007676, TRACH2007688, TRACH2007733, TRACH2007754, TRACH2007816, TRACH2007894, TRACH2007969, TRACH2007988, TRACH2008081, TRACH2008112, TRACH2008127, TRACH2008130, TRACH2008278, TRACH2008478, TRACH2008540, TRACH2008583, TRACH2008597, TRACH2008820, TRACH2008921, TRACH2009060, TRACH2009107, TRACH2009123, TRACH2009268, TRACH2009291, TRACH2009310, TRACH2009340, TRACH2009348, TRACH2009358, TRACH2009661, TRACH2009730, TRACH2009743, TRACH2009754, TRACH2009851, TRACH2009862, TRACH2009934, TRACH2010159, TRACH2010218, TRACH2010251, TRACH2010272, TRACH2010317, TRACH2010419, TRACH2010451, TRACH2010505, TRACH2010587, TRACH2010600, TRACH2010634, TRACH2010639, TRACH2010677, TRACH2010698, TRACH2010771, TRACH2010883, TRACH2010965, TRACH2010974, TRACH2011057, TRACH2011093, TRACH2011290, TRACH2011293, TRACH2011302, TRACH2011500, TRACH2011574, TRACH2011956, TRACH2012000, TRACH2012138, TRACH2012242, TRACH2012298, TRACH2012370, TRACH2012387, TRACH2012497, TRACH2012536, TRACH2012562, TRACH2012742, TRACH2012823, TRACH2012918, TRACH2013081, TRACH2013123, TRACH2013265, TRACH2013369, TRACH2013450, TRACH2013495, TRACH2013585, TRACH2013671, TRACH2013726, TRACH2013902, TRACH2013928, TRACH2013982, TRACH2013991, TRACH2014018, TRACH2014045, TRACH2014046, TRACH2014082, TRACH2014268, TRACH2014284, TRACH2014337, TRACH2014356, TRACH2014371, TRACH2014442, TRACH2014483, TRACH2014495, TRACH2014544, TRACH2014573, TRACH2014725, TRACH2014760, TRACH2014815, TRACH2014839, TRACH2014938, TRACH2014950, TRACH2014972, TRACH2014974, TRACH2015180, TRACH2015243, TRACH2015316, TRACH2015381, TRACH2015486, TRACH2015654, TRACH2015824, TRACH2015939, TRACH2015987, TRACH2016080, TRACH2016131, TRACH2016286, TRACH2016317, TRACH2016347, TRACH2016380, TRACH2016384, TRACH2016410, TRACH2016481, TRACH2016498, TRACH2016551, TRACH2016554, TRACH2016651, TRACH2016690, TRACH2016709, TRACH2016722, TRACH2016835, TRACH2016980, TRACH2017086, TRACH2017368, TRACH2017498, TRACH2017609, TRACH2017949, TRACH2017965, TRACH2017980, TRACH2018034, TRACH2018084, TRACH2018262, TRACH2018273, TRACH2018278, TRACH2018317, TRACH2018345, TRACH2018380, TRACH2018446, TRACH2018449, TRACH2018512, TRACH2018646, TRACH2018663, TRACH2018718, TRACH2018835, TRACH2018882, TRACH2018914, TRACH2019024, TRACH2019046, TRACH2019080, TRACH2019151, TRACH2019154, TRACH2019176, TRACH2019248, TRACH2019309, TRACH2019425, TRACH2019473, TRACH2019602, TRACH2019661, TRACH2019672, TRACH2019673, TRACH2019844, TRACH2019879, TRACH2020048, TRACH2020336, TRACH2020525, TRACH2021398, TRACH2021622, TRACH2021635, TRACH2021964, TRACH2022042, TRACH2022113, TRACH2022253, TRACH2022425, TRACH2022553, TRACH2022649, TRACH2022839, TRACH2023246, TRACH2023299, TRACH2023306, TRACH2023416, TRACH2023479, TRACH2023684, TRACH2023860, TRACH2023876, TRACH2024139, TRACH2024187, TRACH2024271, TRACH2024293, TRACH2024408, TRACH2024512, TRACH2024559, TRACH2024647, TRACH2024651, TRACH2024730, TRACH2024735, TRACH2024749, TRACH2024821, TRACH2025057, TRACH2025084, TRACH2025155, TRACH2025224, TRACH2025379, TRACH2025507, TRACH2025569, TRACH2025705, TRACH2025749, TRACH2025753, TRACH2025810, TRACH2025853, TRACH2025932, TRACH3000014, TRACH3000017, TRACH3000043, TRACH3000134, TRACH3000180, TRACH3000342, TRACH3000420, TRACH3000515, TRACH3000530, TRACH3000548, TRACH3000558, TRACH3000586, TRACH3000692, TRACH3000780, TRACH3000892, TRACH3000926, TRACH3001119, TRACH3001443, TRACH3001550, TRACH3001759, TRACH3002064, TRACH3002107, TRACH3002168, TRACH3002188, TRACH3002245, TRACH3002293, TRACH3002533, TRACH3002561, TRACH3002567, TRACH3002605, TRACH3002650, TRACH3002866, TRACH3002871, TRACH3002876, TRACH3002890, TRACH3003009, TRACH3003037, TRACH3003357, TRACH3003379, TRACH3003586, TRACH3003683, TRACH3003780, TRACH3003805, TRACH3003832, TRACH3004113, TRACH3004288, TRACH3004303, TRACH3004412, TRACH3004424, TRACH3004456, TRACH3004537, TRACH3004596, TRACH3004651, TRACH3004652, TRACH3004671, TRACH3004747, TRACH3004760, TRACH3004783, TRACH3004786, TRACH3004840, TRACH3004931, TRACH3004934, TRACH3005072, TRACH3005085, TRACH3005102, TRACH3005173, TRACH3005191, TRACH3005211, TRACH3005274, TRACH3005294, TRACH3005479, TRACH3005549, TRACH3005699, TRACH3005702, TRACH3005808, TRACH3005852, TRACH3005896, TRACH3006149, TRACH3006228, TRACH3006264, TRACH3006336, TRACH3006379, TRACH3006392, TRACH3006395, TRACH3006397, TRACH3006470, TRACH3006589, TRACH3006626, TRACH3006699, TRACH3006800, TRACH3006889, TRACH3006985, TRACH3007097, TRACH3007268, TRACH3007274, TRACH3007277, TRACH3007391, TRACH3007541, TRACH3007595, TRACH3007627, TRACH3007689, TRACH3007766, TRACH3007866, TRACH3008042, TRACH3008061, TRACH3008201, TRACH3008508, TRACH3008535, TRACH3008629, TRACH3008688, TRACH3008697, TRACH3008713, TRACH3008887, TRACH3008902, TRACH3008990, TRACH3009008, TRACH3009059, TRACH3009061, TRACH3009148, TRACH3009455, TRACH3009701, TRACH3009715, TRACH3009894, TRACH3010079, TRACH3010167, TRACH3010331, TRACH3010342, TRACH3010382, TRACH3010757, TRACH3010901, TRACH3011004, TRACH3011082, TRACH3011184, TRACH3011282, TRACH3011313, TRACH3011454, TRACH3011485, TRACH3011503, TRACH3011538, TRACH3011542, TRACH3012106, TRACH3012161, TRACH3012232, TRACH3012261, TRACH3012445, TRACH3012460, TRACH3012659, TRACH3012718, TRACH3012864, TRACH3012891, TRACH3012942, TRACH3013043, TRACH3013072, TRACH3013426, TRACH3013454, TRACH3013684, TRACH3013693, TRACH3013700, TRACH3013766, TRACH3013900, TRACH3013926, TRACH3014063, TRACH3014183, TRACH3014215, TRACH3014316, TRACH3014415, TRACH3014580, TRACH3014641, TRACH3014885, TRACH3015136, TRACH3015336, TRACH3015346, TRACH3015354, TRACH3015467, TRACH3015626, TRACH3015951, TRACH3016051, TRACH3016120, TRACH3016264, TRACH3016277, TRACH3016368, TRACH3016455, TRACH3016614, TRACH3016992, TRACH3017171, TRACH3017409, TRACH3017934, TRACH3018108, TRACH3018191, TRACH3018240, TRACH3018261, TRACH3018519, TRACH3018524, TRACH3018606, TRACH3018783, TRACH3018907, TRACH3018933, TRACH3018943, TRACH3019018, TRACH3019058, TRACH3019142, TRACH3019347, TRACH3019370, TRACH3019447, TRACH3019598, TRACH3019621, TRACH3019662, TRACH3019807, TRACH3019924, TRACH3019977, TRACH3020137, TRACH3020410, TRACH3020563, TRACH3020605, TRACH3020750, TRACH3020769, TRACH3020928, TRACH3020930, TRACH3021023, TRACH3021066, TRACH3021212, TRACH3021335, TRACH3021373, TRACH3021544, TRACH3021778, TRACH3021834, TRACH3021883, TRACH3022170, TRACH3022198, TRACH3022296, TRACH3022482, TRACH3022732, TRACH3022758, TRACH3022875, TRACH3022910, TRACH3022960, TRACH3023063, TRACH3023203, TRACH3023242, TRACH3023373, TRACH3023516, TRACH3023752, TRACH3023945, TRACH3023960, TRACH3024020, TRACH3024081, TRACH3024342, TRACH3024423, TRACH3024428, TRACH3024512, TRACH3024671, TRACH3024823, TRACH3025302, TRACH3025316, TRACH3025346, TRACH3025520, TRACH3026148, TRACH3026283, TRACH3026299, TRACH3026303, TRACH3026542, TRACH3026650, TRACH3026676, TRACH3026744, TRACH3026949, TRACH3027229, TRACH3027527, TRACH3027681, TRACH3027701, TRACH3027885, TRACH3028031, TRACH3028164, TRACH3028180, TRACH3028195, TRACH3028441, TRACH3028597, TRACH3028678, TRACH3028837, TRACH3028847, TRACH3028855, TRACH3029139, TRACH3029329, TRACH3029451, TRACH3029462, TRACH3029520, TRACH3029592, TRACH3029629, TRACH3029665, TRACH3029670, TRACH3029800, TRACH3030111, TRACH3030130, TRACH3030176, TRACH3030252, TRACH3030725, TRACH3030855, TRACH3030883, TRACH3031316, TRACH3031400, TRACH3031463, TRACH3031479, TRACH3031518, TRACH3031660, TRACH3031678, TRACH3031936, TRACH3032044, TRACH3032065, TRACH3032150, TRACH3032372, TRACH3032480, TRACH3032570, TRACH3032755, TRACH3032827, TRACH3032873, TRACH3033535, TRACH3033680, TRACH3033868, TRACH3034145, TRACH3034414, TRACH3034488, TRACH3034680, TRACH3034731, TRACH3034745, TRACH3034762, TRACH3034903, TRACH3035187, TRACH3035199, TRACH3035235, TRACH3035451, TRACH3035482, TRACH3035526, TRACH3036004, TRACH3036103, TRACH3036193, TRACH3036207, TRACH3036278, TRACH3036309, TRACH3036456, TRACH3036609, TRACH3036638, TRACH3036683, TRACH3036750, TRACH3036792, TRACH3036843, TRACH3036897, TRACH3036997, TRACH3037063, TRACH3037267, TRACH3037288, TRACH3037505, TRACH3037573, TRACH3037696, TRACH3037897, TRACH3038086, TSTOM1000135, TSTOM1000186, TSTOM2000139, TSTOM2000235, TSTOM2000315, TSTOM2000442, TSTOM2000569, TSTOM2000588, TSTOM2001195, TSTOM2001274, TSTOM2001571, TSTOM2001996, TSTOM2002265, TSTOM2002505, TSTOM2002561, TSTOM2002611, TSTOM2002672, TSTOM2002682, TUTER1000014, TUTER1000122, TUTER1000137, TUTER2000057, TUTER2000283, TUTER2000425, TUTER2000916, TUTER2001286, TUTER2001341, TUTER2001387, TUTER2001433, TUTER2001461, TUTER2002028, TUTER2002074, TUTER2002158, TUTER2002228, TUTER2002356, TUTER2002729, UMVEN1000143, UMVEN1000156, UMVEN1000186, UMVEN2000046, UMVEN2000069, UMVEN2000121, UMVEN2000354, UTERU1000008, UTERU1000015, UTERU1000024, UTERU1000031, UTERU1000032, UTERU1000057, UTERU1000065, UTERU1000077, UTERU1000093, UTERU1000096, UTERU1000106, UTERU1000109, UTERU1000131, UTERU1000138, UTERU1000148, UTERU1000160, UTERU1000183, UTERU1000187, UTERU1000192, UTERU1000249, UTERU1000337, UTERU1000339, UTERU2000047, UTERU2000099, UTERU2000154, UTERU2000197, UTERU2000218, UTERU2000238, UTERU2000243, UTERU2000260, UTERU2000300, UTERU2000329, UTERU2000332, UTERU2000338, UTERU2000349, UTERU2000377, UTERU2000393, UTERU2000418, UTERU2000465, UTERU2000485, UTERU2000517, UTERU2000524, UTERU2000537, UTERU2000539, UTERU2000541, UTERU2000542, UTERU2000546, UTERU2000550, UTERU2000569, UTERU2000607, UTERU2000629, UTERU2000649, UTERU2000663, UTERU2000696, UTERU2000794, UTERU2000830, UTERU2000844, UTERU2000922, UTERU2000925, UTERU2001024, UTERU2001110, UTERU2001176, UTERU2001281, UTERU2001389, UTERU2001409, UTERU2001412, UTERU2001504, UTERU2001658, UTERU2001747, UTERU2001876, UTERU2002001, UTERU2002011, UTERU2002176, UTERU2002198, UTERU2002294, UTERU2002332, UTERU2002473, UTERU2002547, UTERU2002693, UTERU2002733, UTERU2002736, UTERU2002737, UTERU2002841, UTERU2002964, UTERU2002993, UTERU2003035, UTERU2003126, UTERU2003135, UTERU2003321, UTERU2003399, UTERU2003411, UTERU2003577, UTERU2003926, UTERU2003973, UTERU2004015, UTERU2004037, UTERU2004039, UTERU2004061, UTERU2004073, UTERU2004163, UTERU2004299, UTERU2004461, UTERU2004520, UTERU2004564, UTERU2004688, UTERU2004698, UTERU2004807, UTERU2005004, UTERU2005050, UTERU2005069, UTERU2005074, UTERU2005179, UTERU2005292, UTERU2005346, UTERU2005450, UTERU2005533, UTERU2005601, UTERU2005664, UTERU2005822, UTERU2005903, UTERU2005905, UTERU2006103, UTERU2006137, UTERU2006182, UTERU2006400, UTERU2006412, UTERU2006429, UTERU2006486, UTERU2006524, UTERU2006547, UTERU2006568, UTERU2006643, UTERU2006651, UTERU2006705, UTERU2006899, UTERU2007004, UTERU2007075, UTERU2007081, UTERU2007128, UTERU2007253, UTERU2007267, UTERU2007444, UTERU2007499, UTERU2007639, UTERU2007724, UTERU2007942, UTERU2008018, UTERU2008019, UTERU2008027, UTERU2008077, UTERU2008130, UTERU2008347, UTERU2008426, UTERU2008516, UTERU2008561, UTERU2008653, UTERU2008705, UTERU2008707, UTERU2008747, UTERU2008785, UTERU2008845, UTERU2008901, UTERU2008930, UTERU2008939, UTERU2008962, UTERU2009094, UTERU2009120, UTERU2009131, UTERU2009147, UTERU2009206, UTERU2009283, UTERU2009414, UTERU2009483, UTERU2009538, UTERU2009540, UTERU2009776, UTERU2009904, UTERU2009951, UTERU2009972, UTERU2010115, UTERU2010124, UTERU2010164, UTERU2010231, UTERU2010304, UTERU2010320, UTERU2010431, UTERU2010525, UTERU2010651, UTERU2010724, UTERU2011195, UTERU2011199, UTERU2011261, UTERU2011287, UTERU2011410, UTERU2011574, UTERU2011657, UTERU2011741, UTERU2011806, UTERU2011811, UTERU2011897, UTERU2011962, UTERU2011968, UTERU2012031, UTERU2012101, UTERU2012114, UTERU2012252, UTERU2012333, UTERU2012581, UTERU2012610, UTERU2012615, UTERU2012688, UTERU2012703, UTERU2012715, UTERU2012741, UTERU2012767, UTERU2012786, UTERU2012890, UTERU2012938, UTERU2012976, UTERU2013048, UTERU2013078, UTERU2013231, UTERU2013262, UTERU2013280, UTERU2013322, UTERU2013483, UTERU2013491, UTERU2013502, UTERU2013586, UTERU2013926, UTERU2013976, UTERU2014001, UTERU2014223, UTERU2014398, UTERU2014464, UTERU2014548, UTERU2014631, UTERU2014668, UTERU2014678, UTERU2014728, UTERU2014998, UTERU2015062, UTERU2015087, UTERU2015108, UTERU2015190, UTERU2015198, UTERU2015202, UTERU2015405, UTERU2015640, UTERU2015653, UTERU2015830, UTERU2015880, UTERU2016147, UTERU2016157, UTERU2016426, UTERU2016464, UTERU2016669, UTERU2016757, UTERU2016761, UTERU2016896, UTERU2016902, UTERU2016979, UTERU2016981, UTERU2017123, UTERU2017303, UTERU2017421, UTERU2017492, UTERU2017613, UTERU2017623, UTERU2017632, UTERU2017762, UTERU2017810, UTERU2017988, UTERU2018127, UTERU2018180, UTERU2018333, UTERU2018364, UTERU2018514, UTERU2018522, UTERU2018523, UTERU2018544, UTERU2018609, UTERU2018674, UTERU2018784, UTERU2018789, UTERU2018811, UTERU2018867, UTERU2018881, UTERU2018955, UTERU2019038, UTERU2019163, UTERU2019257, UTERU2019453, UTERU2019491, UTERU2019534, UTERU2019681, UTERU2019706, UTERU2019710, UTERU2019940, UTERU2019959, UTERU2019964, UTERU2020226, UTERU2020242, UTERU2020292, UTERU2020351, UTERU2020491, UTERU2020718, UTERU2021163, UTERU2021380, UTERU2021649, UTERU2022020, UTERU2022773, UTERU2022955, UTERU2022981, UTERU2023039, UTERU2023045, UTERU2023175, UTERU2023262, UTERU2023550, UTERU2023651, UTERU2023687, UTERU2023712, UTERU2023941, UTERU2024002, UTERU2024042, UTERU2024141, UTERU2024481, UTERU2024656, UTERU2024758, UTERU2024820, UTERU2024881, UTERU2025025, UTERU2025041, UTERU2025366, UTERU2025415, UTERU2025579, UTERU2025645, UTERU2025891, UTERU2026025, UTERU2026090, UTERU2026142, UTERU2026203, UTERU2026775, UTERU2027023, UTERU2027369, UTERU2027591, UTERU2027616, UTERU2027941, UTERU2028377, UTERU2028734, UTERU2029503, UTERU2029660, UTERU2029742, UTERU2029953, UTERU2030213, UTERU2030270, UTERU2030280, UTERU2031060, UTERU2031084, UTERU2031268, UTERU2031295, UTERU2031521, UTERU2031611, UTERU2031703, UTERU2031834, UTERU2031851, UTERU2032075, UTERU2032220, UTERU2032279, UTERU2032726, UTERU2033172, UTERU2033375, UTERU2033382, UTERU2033420, UTERU2033530, UTERU2033577, UTERU2034053, UTERU2034147, UTERU2034695, UTERU2035114, UTERU2035187, UTERU2035231, UTERU2035306, UTERU2035323, UTERU2035328, UTERU2035331, UTERU2035452, UTERU2035469, UTERU2035503, UTERU2035745, UTERU2035908, UTERU2035926, UTERU2035978, UTERU2036089, UTERU2036347, UTERU2036507, UTERU2036512, UTERU2036530, UTERU2036623, UTERU2036690, UTERU2037224, UTERU2037361, UTERU2037423, UTERU2037577, UTERU2037674, UTERU2037791, UTERU2037843, UTERU2038171, UTERU2038251, UTERU3000402, UTERU3000645, UTERU3000665, UTERU3000738, UTERU3000828, UTERU3000844, UTERU3000899, UTERU3000959, UTERU3001029, UTERU3001053, UTERU3001059, UTERU3001240, UTERU3001394, UTERU3001542, UTERU3001558, UTERU3001571, UTERU3001585, UTERU3001632, UTERU3001652, UTERU3001988, UTERU3002209, UTERU3002218, UTERU3002383, UTERU3002600, UTERU3002620, UTERU3002667, UTERU3002701, UTERU3002731, UTERU3002768, UTERU3002786, UTERU3002993, UTERU3003116, UTERU3003135, UTERU3003178, UTERU3003465, UTERU3003495, UTERU3003523, UTERU3003774, UTERU3003776, UTERU3004384, UTERU3004418, UTERU3004477, UTERU3004523, UTERU3004616, UTERU3004635, UTERU3004709, UTERU3004938, UTERU3004992, UTERU3005049, UTERU3005159, UTERU3005205, UTERU3005264, UTERU3005422, UTERU3005585, UTERU3005907, UTERU3006008, UTERU3006228, UTERU3006538, UTERU3006640, UTERU3006687, UTERU3006720, UTERU3006798, UTERU3006884, UTERU3007021, UTERU3007104, UTERU3007108, UTERU3007134, UTERU3007640, UTERU3007731, UTERU3008280, UTERU3008463, UTERU3008660, UTERU3008671, UTERU3008722, UTERU3008917, UTERU3009259, UTERU3009490, UTERU3009690, UTERU3009775, UTERU3009871, UTERU3009979, UTERU3009987, UTERU3010029, UTERU3010526, UTERU3010604, UTERU3010892, UTERU3010919, UTERU3011063, UTERU3011092, UTERU3011273, UTERU3011398, UTERU3011558, UTERU3011579, UTERU3011795, UTERU3011837, UTERU3012293, UTERU3012414, UTERU3012476, UTERU3012599, UTERU3012999, UTERU3013167, UTERU3013302, UTERU3013781, UTERU3014274, UTERU3014446, UTERU3014611, UTERU3014647, UTERU3014791, UTERU3014906, UTERU3015086, UTERU3015299, UTERU3015412, UTERU3015500, UTERU3015647, UTERU3015844, UTERU3016070, UTERU3016273, UTERU3016274, UTERU3016308, UTERU3016789, UTERU3017176, UTERU3017441, UTERU3017626, UTERU3017995, UTERU3018154, UTERU3018172, UTERU3018255, UTERU3018616, UTERU3018711, UTERU3019078

[0675] Of the 17,176 genes that include the cDNAs of the present invention, genes whose expression levels were high enough to detect in each of the BRAWH, BRCAN, BRCOC, BRHIP, BRSSN, BRSTN, and BRTHA libraries were analyzed for expression frequency. The analysis results are described below. Each is a relative value, where the expression level over all tissues is taken as 100. The larger this value, the greater the level of expression.

TABLE 28

| Clone Name | BRAWH | BRCAN | BRCOC | BRHIP | BRSSN | BRSTN | BRTHA |
|---|---|---|---|---|---|---|---|
| 3NB691000116 | 1.626 | 3.731 | 0 | 0 | 0 | 0 | 1.803 |
| 3NB691000173 | 0 | 0 | 0 | 0.806 | 0 | 2.847 | 0 |
| 3NB691000191 | 6.122 | 0 | 0 | 6.246 | 0 | 0 | 0 |
| 3NB692000281 | 0 | 1.010 | 0 | 0.225 | 0 | 0 | 0.244 |
| 3NB692000330 | 0 | 0 | 0 | 0 | 1.642 | 1.590 | 0.978 |
| 3NB692000374 | 2.169 | 0 | 0 | 3.319 | 8.073 | 0 | 2.405 |
| 3NB692000529 | 0 | 0 | 0 | 11.376 | 0 | 0 | 0 |
| 3NB692000912 | 0 | 1.078 | 0 | 0 | 1.749 | 0 | 0 |
| 3NB692001022 | 0 | 0 | 0 | 1.269 | 4.631 | 0 | 0 |
| 3NB692001288 | 0 | 13.749 | 10.615 | 0 | 5.576 | 0 | 1.661 |
| 3NB692001334 | 0.268 | 0.616 | 2.853 | 0 | 1.998 | 8.711 | 0.595 |
| 3NB692001433 | 0 | 0 | 0 | 0 | 0 | 0 | 3.815 |
| 3NB692001442 | 0 | 5.543 | 0 | 0 | 0 | 0 | 1.340 |
| 3NB692001528 | 2.352 | 0 | 0 | 0 | 0 | 0 | 0 |
| 3NB692001557 | 0 | 0 | 0 | 6.189 | 0 | 0 | 0 |
| 3NB692001719 | 0 | 0 | 24.400 | 7.027 | 0 | 0 | 0 |
| ADIPS2000425 | 1.553 | 0 | 0 | 1.584 | 0 | 0 | 0 |
| ADRGL1000002 | 1.647 | 0 | 0 | 6.720 | 0 | 0 | 5.478 |
| ADRGL1000018 | 9.672 | 11.095 | 0 | 14.801 | 0 | 0 | 0 |
| ADRGL1000033 | 0 | 0 | 13.526 | 0 | 0 | 0 | 0 |
| ADRGL1000065 | 0 | 0 | 0 | 5.753 | 0 | 0 | 6.254 |
| ADRGL1000144 | 0 | 0 | 0 | 3.410 | 0 | 12.051 | 0 |
| ADRGL2000006 | 4.158 | 0 | 0 | 3.182 | 0 | 0 | 2.306 |
| ADRGL2000042 | 2.540 | 0 | 0 | 0 | 18.905 | 0 | 0 |
| ADRGL2000097 | 0 | 0 | 0 | 0 | 0 | 8.016 | 0 |
| ADRGL2002013 | 17.992 | 0 | 0 | 0 | 0 | 0 | 0 |
| ADRGL2002191 | 0 | 0 | 0 | 13.043 | 0 | 0 | 0 |
| ADRGL2002477 | 3.402 | 3.903 | 0 | 3.471 | 0 | 12.268 | 3.773 |
| ADRGL2002679 | 12.443 | 0 | 0 | 0 | 0 | 0 | 0 |
| ADRGL2003785 | 0 | 0 | 0 | 14.971 | 0 | 0 | 0 |
| ADRGL2007906 | 18.024 | 20.676 | 0 | 0 | 0 | 0 | 0 |
| ADRGL2009273 | 2.778 | 0 | 0 | 7.086 | 5.170 | 0 | 4.621 |
| ADRGL2010152 | 0 | 0 | 0 | 0 | 21.560 | 0 | 0 |
| ASTRO1000009 | 2.611 | 0 | 0 | 0 | 0 | 0 | 0 |
| ASTRO2000014 | 1.232 | 0 | 0 | 0.419 | 0 | 1.481 | 0.911 |
| ASTRO2000046 | 5.305 | 0 | 0 | 11.240 | 0 | 0 | 4.525 |
| ASTRO2000372 | 0 | 0 | 0 | 22.748 | 0 | 0 | 0 |
| ASTRO2000381 | 0 | 0 | 0 | 6.407 | 0 | 0 | 0 |
| ASTRO2000480 | 0 | 0 | 0 | 2.888 | 0 | 0 | 0 |
| ASTRO2000482 | 22.398 | 0 | 0 | 0 | 0 | 0 | 0 |
| ASTRO2000662 | 0 | 18.504 | 0 | 0 | 0 | 0 | 0 |
| ASTRO2000914 | 1.947 | 0 | 0 | 0 | 0 | 0 | 0 |
| ASTRO2001029 | 0 | 2.877 | 0 | 0 | 0 | 0 | 4.172 |
| ASTRO2001076 | 0 | 0 | 5.035 | 2.900 | 0 | 0 | 1.576 |
| ASTRO2001107 | 14.609 | 0 | 0 | 14.905 | 0 | 0 | 16.201 |
| ASTRO2001823 | 0 | 0 | 0 | 1.481 | 0 | 0 | 0 |
| ASTRO2002035 | 0 | 0 | 0 | 22.147 | 0 | 0 | 0 |
| ASTRO2002202 | 2.304 | 0 | 0 | 0 | 0 | 0 | 0 |
| ASTRO2002733 | 0 | 0 | 0 | 15.696 | 0 | 0 | 0 |
| ASTRO2003024 | 0.948 | 4.349 | 3.358 | 0 | 0 | 0 | 2.102 |
| ASTRO2003316 | 2.950 | 0 | 0 | 0 | 0 | 0 | 0 |
| ASTRO2003461 | 5.957 | 0 | 0 | 0 | 0 | 0 | 0 |
| ASTRO2003574 | 0 | 0 | 0 | 15.221 | 0 | 0 | 33.089 |
| ASTRO2003740 | 0 | 39.838 | 0 | 0 | 0 | 0 | 0 |
| ASTRO2003840 | 0 | 0 | 0 | 0 | 0 | 0 | 6.869 |
| ASTRO2004628 | 26.702 | 0 | 0 | 0 | 0 | 0 | 0 |
| ASTRO2004974 | 1.943 | 0 | 0 | 1.982 | 7.232 | 0 | 0 |
| ASTRO2005360 | 5.966 | 0 | 0 | 0 | 0 | 0 | 6.616 |
| ASTRO2005423 | 6.886 | 0 | 0 | 17.565 | 0 | 0 | 11.455 |
| ASTRO2005863 | 7.603 | 0 | 0 | 0 | 0 | 0 | 0 |
| ASTRO2006475 | 0 | 0 | 0 | 0 | 0 | 0 | 16.519 |
| ASTRO2007948 | 5.009 | 0 | 0 | 2.555 | 0 | 0 | 0 |
| ASTRO2008040 | 23.959 | 0 | 0 | 12.222 | 0 | 0 | 0 |
| ASTRO2008216 | 0 | 0 | 0 | 3.256 | 0 | 0 | 0 |
| ASTRO2008972 | 0 | 0 | 0 | 0 | 0 | 0 | 17.271 |
| ASTRO2009068 | 5.658 | 0 | 0 | 0 | 21.061 | 0 | 0 |
| ASTRO2010072 | 0 | 39.838 | 0 | 0 | 0 | 0 | 0 |
| ASTRO2010799 | 0 | 0 | 50.556 | 0 | 0 | 0 | 0 |
| ASTRO2010819 | 4.037 | 0 | 2.384 | 4.119 | 0 | 0 | 0 |
| ASTRO2011422 | 0 | 0 | 0 | 7.401 | 0 | 0 | 0 |
| ASTRO2012552 | 0 | 0 | 0 | 0 | 0 | 0 | 1.639 |
| ASTRO2013585 | 1.462 | 0 | 0 | 0.995 | 0 | 0 | 0 |
| ASTRO2014135 | 0 | 0 | 12.305 | 0 | 0 | 0 | 0 |
| ASTRO2014174 | 0 | 0 | 0 | 22.748 | 0 | 0 | 0 |
| ASTRO2014392 | 0 | 33.906 | 0 | 0 | 0 | 0 | 0 |
| ASTRO2014576 | 0 | 0 | 0 | 0 | 42.066 | 0 | 0 |
| ASTRO2014863 | 0 | 0 | 11.968 | 0 | 12.574 | 0 | 0 |
| ASTRO2015328 | 7.611 | 0 | 0 | 3.883 | 0 | 0 | 4.220 |
| ASTRO2016114 | 14.497 | 0 | 0 | 0 | 0 | 0 | 0 |
| ASTRO2016491 | 2.014 | 1.155 | 10.704 | 4.110 | 5.623 | 3.632 | 1.117 |
| ASTRO2018169 | 0 | 2.167 | 0 | 1.927 | 0 | 0 | 0 |
| ASTRO2018540 | 0 | 0 | 0 | 1.587 | 0 | 0 | 0 |
| ASTRO3000482 | 0 | 0 | 0 | 0 | 0 | 0 | 24.247 |
| BGGI11000123 | 0.701 | 0 | 0 | 0.715 | 0 | 0 | 0.777 |
| BGGI12000054 | 0.236 | 3.782 | 3.337 | 0.240 | 0.877 | 0 | 1.045 |
| BGGI12000616 | 0 | 2.051 | 0 | 0 | 0 | 3.224 | 0.991 |
| BGGI12000839 | 0.737 | 0 | 0 | 0.752 | 0 | 0 | 0 |
| BGGI12001002 | 0 | 0 | 0 | 1.811 | 6.607 | 0 | 0 |
| BGGI12001075 | 0 | 0 | 0 | 2.020 | 0 | 0 | 0 |
| BGGI12001682 | 2.065 | 16.585 | 7.317 | 0 | 3.844 | 7.447 | 2.290 |
| BGGI12001714 | 2.550 | 0 | 0 | 0 | 0 | 0 | 0 |
| BLADE2001371 | 0 | 0 | 0 | 12.691 | 0 | 0 | 0 |
| BLADE2002738 | 0 | 0 | 0 | 0 | 0 | 0 | 13.644 |
| BLADE2004849 | 0 | 0 | 0 | 0 | 0 | 0 | 8.220 |
| BLADE2006412 | 12.143 | 0 | 0 | 6.194 | 0 | 0 | 0 |
| BLADE2006830 | 1.681 | 0 | 0 | 0 | 0 | 0 | 0 |
| BLADE2007043 | 12.470 | 0 | 0 | 0 | 0 | 0 | 0 |
| BLADE2007589 | 0 | 0 | 0 | 0 | 0 | 0 | 5.482 |
| BLADE2007935 | 0 | 0 | 0 | 12.691 | 0 | 0 | 0 |
| BLADE2008398 | 12.401 | 0 | 0 | 18.978 | 0 | 0 | 13.752 |
| BNGH41000098 | 7.604 | 0 | 8.980 | 5.172 | 0 | 0 | 16.866 |
| BNGH41000137 | 13.016 | 0 | 0 | 0 | 0 | 0 | 9.623 |
| BNGH41000190 | 0 | 0 | 0 | 0 | 0 | 0 | 2.806 |
| BNGH41000198 | 0 | 0 | 0 | 2.120 | 0 | 14.982 | 2.304 |
| BNGH42000360 | 0 | 0 | 0 | 0 | 0 | 1.134 | 0 |
| BNGH42000532 | 9.457 | 0 | 0 | 0 | 0 | 0 | 0 |
| BNGH42000739 | 12.444 | 2.855 | 6.612 | 26.026 | 0 | 0 | 5.520 |
| BNGH42001247 | 0 | 0 | 0 | 0 | 0 | 18.969 | 0 |
| BNGH42002168 | 0 | 0 | 0 | 1.357 | 0 | 0 | 1.475 |
| BNGH42002387 | 0 | 0 | 0 | 0 | 0 | 0 | 11.705 |
| BNGH42005968 | 0 | 0 | 0 | 0 | 0 | 0 | 2.547 |
| BNGH42006135 | 6.602 | 0 | 0 | 8.083 | 0 | 0 | 4.393 |
| BNGH42007460 | 4.031 | 0 | 3.570 | 1.028 | 0 | 0 | 0 |
| BNGH42007709 | 0.230 | 2.112 | 3.262 | 0.470 | 0.857 | 4.150 | 0 |
| BNGH42007788 | 0 | 0 | 0 | 3.141 | 0 | 0 | 0 |
| BNGH42008603 | 13.017 | 6.637 | 0 | 5.903 | 5.383 | 0 | 1.604 |
| BNGH42008743 | 0 | 0 | 0 | 3.141 | 0 | 0 | 0 |
| BNGH42009025 | 0 | 0 | 0 | 0 | 10.378 | 0 | 0 |
| BRACE1000020 | 0 | 0 | 0 | 11.484 | 0 | 0 | 0 |
| BRACE1000042 | 0 | 0 | 5.393 | 6.212 | 5.666 | 0 | 1.688 |
| BRACE1000051 | 17.925 | 0 | 0 | 0 | 0 | 0 | 0 |
| BRACE1000065 | 0 | 0 | 0 | 0 | 0 | 0 | 43.859 |
| BRACE1000070 | 7.151 | 4.101 | 0 | 0 | 0 | 0 | 1.982 |
| BRACE1000073 | 0 | 0 | 44.809 | 0 | 0 | 0 | 0 |
| BRACE1000101 | 0 | 0 | 0 | 0 | 0 | 40.349 | 0 |
| BRACE1000115 | 0.562 | 1.718 | 0.663 | 0 | 2.787 | 1.350 | 0 |
| BRACE1000131 | 0 | 0 | 3.690 | 1.063 | 3.877 | 0 | 2.310 |
| BRACE1000159 | 0 | 8.472 | 0 | 0 | 0 | 0 | 2.048 |
| BRACE1000169 | 0 | 0 | 0 | 20.683 | 0 | 0 | 0 |
| BRACE1000186 | 4.324 | 0 | 0 | 2.206 | 0 | 7.796 | 0 |
| BRACE1000187 | 10.796 | 0 | 0 | 8.261 | 0 | 0 | 17.958 |
| BRACE1000258 | 31.956 | 0 | 0 | 0 | 0 | 0 | 0 |
| BRACE2000109 | 0 | 0 | 0 | 0 | 0 | 0 | 60.975 |
| BRACE2000141 | 34.735 | 0 | 0 | 35.438 | 0 | 0 | 0 |
| BRACE2000245 | 0 | 0 | 0 | 0 | 0 | 0 | 39.230 |
| BRACE2000280 | 0 | 0 | 0 | 19.121 | 0 | 67.577 | 0 |
| BRACE2000300 | 15.947 | 0 | 18.831 | 10.846 | 0 | 0 | 5.895 |
| BRACE2000307 | 1.178 | 2.702 | 0 | 2.403 | 0 | 0 | 1.306 |
| BRACE2000331 | 58.488 | 0 | 0 | 0 | 0 | 0 | 0 |
| BRACE2000332 | 0 | 0 | 0 | 0 | 0 | 0 | 6.020 |
| BRACE2000347 | 0 | 5.931 | 0 | 0 | 9.622 | 0 | 0 |
| BRACE2000525 | 0 | 7.455 | 5.756 | 3.315 | 0 | 0 | 3.604 |
| BRACE2000565 | 0 | 16.454 | 0 | 0 | 0 | 0 | 7.953 |
| BRACE2000698 | 0 | 0 | 30.481 | 0 | 0 | 0 | 0 |
| BRACE2000733 | 0 | 0 | 0 | 0 | 65.597 | 0 | 0 |
| BRACE2000750 | 0 | 0 | 0 | 0 | 0 | 0 | 22.823 |
| BRACE2000864 | 1.055 | 2.422 | 3.739 | 0.538 | 1.964 | 9.515 | 0 |
| BRACE2000893 | 4.519 | 0 | 0 | 0 | 0 | 0 | 5.012 |
| BRACE2000975 | 13.452 | 1.470 | 2.269 | 11.110 | 2.384 | 4.619 | 12.787 |
| BRACE2001065 | 0 | 0 | 0 | 0 | 0 | 0 | 7.364 |
| BRACE2001070 | 0 | 0 | 0 | 0 | 83.985 | 0 | 0 |
| BRACE2001143 | 0 | 0 | 0 | 0 | 0 | 5.356 | 0 |
| BRACE2001154 | 0 | 0 | 0 | 10.840 | 0 | 0 | 0 |
| BRACE2001188 | 0 | 0 | 0 | 0 | 0 | 0 | 3.130 |
| BRACE2001197 | 0 | 0 | 0 | 58.973 | 0 | 0 | 0 |
| BRACE2001236 | 0 | 0 | 0 | 0 | 0 | 64.877 | 0 |
| BRACE2001477 | 6.878 | 0 | 0 | 10.526 | 0 | 0 | 11.442 |
| BRACE2001496 | 0 | 0 | 17.187 | 0 | 18.057 | 17.493 | 0 |
| BRACE2001497 | 3.727 | 0 | 0 | 7.604 | 0 | 0 | 6.199 |
| BRACE2001534 | 0 | 7.077 | 0 | 3.147 | 0 | 0 | 0 |
| BRACE2001673 | 0 | 1.076 | 0 | 0 | 0 | 2.536 | 0.260 |
| BRACE2001692 | 1.817 | 0 | 0 | 0 | 0 | 0 | 0 |
| BRACE2001709 | 0 | 7.445 | 0 | 0 | 12.079 | 23.403 | 3.599 |
| BRACE2001711 | 3.890 | 0 | 0 | 0 | 0 | 0 | 0 |
| BRACE2001726 | 0 | 0 | 0 | 0 | 0 | 0 | 39.237 |
| BRACE2001834 | 7.591 | 0 | 26.891 | 19.361 | 0 | 13.685 | 0 |
| BRACE2001892 | 7.573 | 4.865 | 2.146 | 12.053 | 4.510 | 2.184 | 9.742 |
| BRACE2001944 | 6.273 | 0 | 0 | 0 | 23.348 | 0 | 0 |
| BRACE2001971 | 2.243 | 10.292 | 15.892 | 0 | 0 | 0 | 2.487 |
| BRACE2002050 | 5.800 | 6.653 | 10.273 | 5.917 | 0 | 0 | 6.432 |
| BRACE2002091 | 2.112 | 0 | 0 | 2.154 | 0 | 0 | 0 |
| BRACE2002356 | 0 | 0 | 0 | 18.538 | 0 | 0 | 0 |
| BRACE2002392 | 0 | 15.817 | 12.212 | 5.275 | 0 | 6.215 | 1.911 |
| BRACE2002478 | 0 | 0 | 0 | 14.787 | 0 | 0 | 0 |
| BRACE2002495 | 0 | 0 | 0 | 0 | 0 | 83.553 | 0 |
| BRACE2002582 | 6.533 | 0 | 0 | 13.331 | 0 | 47.115 | 0 |
| BRACE2002585 | 0 | 57.190 | 0 | 0 | 0 | 0 | 0 |
| BRACE2002606 | 0 | 0 | 0 | 5.468 | 0 | 0 | 0 |
| BRACE2002677 | 0 | 0 | 0 | 0 | 0 | 6.961 | 0 |
| BRACE2002682 | 19.147 | 0 | 0 | 19.534 | 0 | 0 | 0 |
| BRACE2002803 | 0 | 0 | 0 | 0 | 0 | 0 | 20.206 |
| BRACE2002812 | 5.877 | 0 | 0 | 0 | 21.873 | 0 | 19.551 |
| BRACE2002860 | 0 | 0 | 0 | 0 | 0 | 0 | 2.792 |
| BRACE2002896 | 14.988 | 0 | 53.097 | 0 | 0 | 0 | 0 |
| BRACE2003037 | 4.318 | 9.907 | 15.298 | 6.609 | 0 | 0 | 2.394 |
| BRACE2003078 | 0 | 0 | 0 | 0 | 0 | 58.364 | 0 |
| BRACE2003097 | 0 | 0 | 0 | 58.973 | 0 | 0 | 0 |
| BRACE2003172 | 0 | 0.746 | 2.303 | 0.663 | 0 | 1.172 | 1.442 |
| BRACE2003217 | 0 | 0 | 15.270 | 0 | 0 | 0 | 0 |
| BRACE2003254 | 0 | 0 | 0 | 0 | 0 | 3.264 | 4.016 |
| BRACE2003527 | 0 | 5.914 | 0 | 0 | 9.594 | 0 | 0 |
| BRACE2003539 | 0 | 0 | 0 | 0 | 0 | 0 | 60.975 |
| BRACE2003598 | 0 | 0 | 0 | 0 | 0 | 0 | 60.975 |
| BRACE2003609 | 9.090 | 0 | 0 | 0 | 0 | 0 | 0 |
| BRACE2003700 | 0 | 0 | 0 | 14.012 | 0 | 0 | 15.230 |
| BRACE2003785 | 0.972 | 6.688 | 0 | 6.940 | 0 | 0 | 0 |
| BRACE2003788 | 0 | 0 | 0 | 39.793 | 0 | 0 | 0 |
| BRACE2003800 | 0 | 0 | 0 | 0 | 0 | 0 | 30.394 |
| BRACE2003827 | 0 | 0 | 0 | 0.894 | 3.261 | 0 | 0 |
| BRACE2003845 | 0 | 0 | 0 | 4.648 | 0 | 0 | 0 |
| BRACE2003846 | 3.259 | 0 | 0 | 0.665 | 2.426 | 0 | 0 |
| BRACE2003892 | 2.182 | 0 | 0 | 2.227 | 0 | 0 | 2.420 |
| BRACE2003904 | 0 | 0 | 0 | 0 | 0 | 9.348 | 0 |
| BRACE2003905 | 15.814 | 0 | 0 | 0 | 0 | 0 | 0 |
| BRACE2003944 | 0.518 | 1.188 | 1.834 | 0 | 1.927 | 1.867 | 0 |
| BRACE2003982 | 0 | 9.441 | 14.578 | 4.198 | 0 | 0 | 0 |
| BRACE2005083 | 0 | 0 | 0 | 24.542 | 0 | 0 | 0 |
| BRACE2005087 | 2.075 | 0 | 0 | 6.350 | 0 | 0 | 0 |
| BRACE2005099 | 2.659 | 12.199 | 9.418 | 2.712 | 9.895 | 19.172 | 4.422 |
| BRACE2005151 | 2.101 | 0 | 0 | 0 | 0 | 0 | 4.660 |
| BRACE2005193 | 0 | 0 | 0 | 58.973 | 0 | 0 | 0 |
| BRACE2005231 | 6.385 | 0 | 0 | 9.771 | 0 | 0 | 3.540 |
| BRACE2005251 | 21.139 | 0 | 0 | 0 | 0 | 0 | 0 |
| BRACE2005253 | 0 | 0 | 0 | 0 | 0 | 0 | 60.975 |
| BRACE2005290 | 0 | 0 | 0 | 25.958 | 0 | 0 | 0 |
| BRACE2005395 | 0 | 0 | 0 | 0 | 0 | 0 | 10.456 |
| BRACE2005408 | 0 | 21.821 | 0 | 9.704 | 0 | 0 | 0 |
| BRACE2005434 | 0 | 0 | 0 | 0 | 0 | 4.972 | 0 |
| BRACE2005448 | 6.800 | 0 | 0 | 0 | 0 | 0 | 0 |
| BRACE2005457 | 58.488 | 0 | 0 | 0 | 0 | 0 | 0 |
| BRACE2005642 | 7.307 | 0 | 0 | 0 | 0 | 0 | 8.103 |
| BRACE2005681 | 16.971 | 4.581 | 0 | 20.370 | 7.431 | 7.199 | 3.321 |
| BRACE2005719 | 0 | 6.814 | 0 | 3.030 | 11.054 | 0 | 0 |
| BRACE2005858 | 41.331 | 0 | 0 | 21.084 | 0 | 0 | 22.917 |
| BRACE2006055 | 4.001 | 0 | 0 | 0 | 0 | 0 | 2.218 |
| BRACE2006075 | 0 | 0 | 0 | 0 | 0 | 58.507 | 0 |
| BRACE2006084 | 0 | 14.084 | 0 | 0 | 0 | 11.067 | 0 |
| BRACE2006089 | 16.309 | 0 | 0 | 0 | 0 | 0 | 0 |
| BRACE2006167 | 8.432 | 9.673 | 22.404 | 4.301 | 0 | 7.601 | 7.013 |
| BRACE2006258 | 0.819 | 3.758 | 5.804 | 0 | 6.097 | 0 | 0 |
| BRACE2006264 | 0 | 0 | 29.900 | 0 | 0 | 0 | 9.360 |
| BRACE2006281 | 0 | 0 | 0 | 0 | 0 | 10.896 | 0 |
| BRACE2006344 | 0 | 8.201 | 0 | 0 | 0 | 0 | 0 |
| BRACE2006354 | 0 | 14.276 | 0 | 12.697 | 0 | 0 | 0 |
| BRACE2006363 | 0 | 21.263 | 0 | 0 | 0 | 0 | 0 |
| BRACE2006380 | 0 | 0 | 0 | 41.817 | 0 | 0 | 0 |
| BRACE2006397 | 0.295 | 0.677 | 0 | 0 | 0 | 1.064 | 0.327 |
| BRACE2006514 | 13.031 | 0 | 0 | 5.318 | 3.233 | 3.132 | 5.780 |
| BRACE2006537 | 0 | 7.407 | 3.813 | 1.098 | 4.006 | 3.881 | 2.387 |
| BRACE2006636 | 13.710 | 0 | 0 | 27.974 | 0 | 0 | 15.203 |
| BRACE2006743 | 8.892 | 0 | 0 | 4.536 | 33.098 | 0 | 0 |
| BRACE2006753 | 0 | 14.107 | 0 | 12.547 | 0 | 0 | 0 |
| BRACE2006821 | 0 | 72.016 | 0 | 0 | 0 | 6.658 | 0 |
| BRACE2006859 | 0 | 0 | 0 | 0 | 0 | 0 | 11.267 |
| BRACE2006871 | 0 | 0 | 3.542 | 0 | 0 | 0 | 0 |
| BRACE2006937 | 4.015 | 3.070 | 0 | 1.365 | 4.981 | 4.826 | 1.484 |
| BRACE2006982 | 0 | 11.904 | 9.191 | 0 | 4.828 | 14.032 | 0 |
| BRACE2007013 | 0 | 47.046 | 0 | 10.461 | 0 | 0 | 0 |
| BRACE2007064 | 6.500 | 3.728 | 0 | 4.973 | 0 | 5.859 | 5.406 |
| BRACE2007089 | 0 | 1.943 | 0 | 0 | 0 | 0 | 0 |
| BRACE2007109 | 1.909 | 19.709 | 0 | 0.974 | 3.553 | 3.442 | 0 |
| BRACE2007191 | 0.687 | 1.576 | 0 | 0.701 | 0 | 0 | 3.809 |
| BRACE2007201 | 0 | 0 | 0 | 58.973 | 0 | 0 | 0 |
| BRACE2007254 | 0 | 17.078 | 0 | 0 | 0 | 0 | 0 |
| BRACE2007401 | 9.138 | 4.193 | 6.474 | 1.865 | 0 | 0 | 0 |
| BRACE2007518 | 9.078 | 0 | 0 | 2.315 | 0 | 0 | 10.067 |
| BRACE2007522 | 0 | 0 | 0 | 58.973 | 0 | 0 | 0 |
| BRACE2007567 | 0 | 0 | 0 | 2.831 | 0 | 5.003 | 0 |
| BRACE2007577 | 0.979 | 0 | 0 | 0.999 | 0 | 0 | 1.086 |
| BRACE2007641 | 3.135 | 3.596 | 0 | 4.798 | 5.835 | 0 | 3.477 |
| BRACE2007663 | 0 | 0 | 0 | 32.393 | 0 | 0 | 0 |
| BRACE2007671 | 0 | 0 | 16.431 | 0 | 11.509 | 5.575 | 0 |
| BRACE2007708 | 6.375 | 9.751 | 15.056 | 0 | 0 | 0 | 2.357 |
| BRACE2007767 | 0 | 0 | 0 | 0 | 0 | 0 | 3.452 |
| BRACE2007768 | 0 | 0 | 0 | 9.762 | 0 | 0 | 0 |
| BRACE2007798 | 2.069 | 9.492 | 7.329 | 2.111 | 19.249 | 18.648 | 0 |
| BRACE2007832 | 0 | 0 | 0 | 25.608 | 0 | 0 | 0 |
| BRACE2007882 | 13.172 | 0 | 0 | 6.719 | 0 | 0 | 0 |
| BRACE2007937 | 12.699 | 0 | 0 | 2.591 | 0 | 9.158 | 2.817 |
| BRACE2007952 | 14.547 | 0 | 0 | 19.789 | 18.048 | 0 | 5.378 |
| BRACE2008097 | 0 | 0 | 17.008 | 0 | 0 | 0 | 0 |
| BRACE2008216 | 0 | 30.375 | 0 | 13.508 | 0 | 0 | 0 |
| BRACE2008251 | 0 | 31.081 | 0 | 0 | 0 | 0 | 0 |
| BRACE2008358 | 0 | 0 | 0 | 2.312 | 0 | 0 | 0 |
| BRACE2008380 | 0 | 8.965 | 13.843 | 0 | 14.544 | 21.134 | 0 |
| BRACE2008385 | 0 | 0 | 7.399 | 0 | 0 | 7.531 | 0 |
| BRACE2008399 | 0 | 0 | 0 | 5.647 | 0 | 0 | 0 |
| BRACE2008402 | 0 | 0 | 0 | 4.278 | 0 | 0 | 0 |
| BRACE2008553 | 0 | 0 | 0 | 0 | 0 | 14.996 | 0 |
| BRACE2008653 | 9.493 | 2.420 | 0 | 5.381 | 0 | 0 | 5.849 |
| BRACE2008706 | 0 | 0 | 0 | 0 | 0 | 0 | 3.644 |
| BRACE2008708 | 0 | 0 | 0 | 0 | 0 | 50.398 | 0 |
| BRACE2008857 | 58.488 | 0 | 0 | 0 | 0 | 0 | 0 |
| BRACE2008941 | 19.988 | 0 | 0 | 0 | 0 | 0 | 0 |
| BRACE2008968 | 0 | 0 | 0 | 1.186 | 0 | 2.097 | 0.645 |
| BRACE2009037 | 0.584 | 2.680 | 0 | 0.894 | 0 | 0 | 1.295 |
| BRACE2009045 | 0 | 0 | 0 | 12.286 | 0 | 0 | 13.354 |
| BRACE2009291 | 1.323 | 3.035 | 0 | 0 | 0 | 0 | 0 |
| BRACE2009307 | 0 | 0 | 0 | 15.110 | 0 | 0 | 16.424 |
| BRACE2009366 | 0 | 0 | 12.799 | 3.686 | 0 | 0 | 0 |
| BRACE2009483 | 8.786 | 0 | 0 | 0 | 0 | 0 | 9.744 |
| BRACE2009517 | 0 | 0 | 0 | 2.767 | 0 | 0 | 0 |
| BRACE2009566 | 0 | 0 | 67.189 | 19.350 | 0 | 0 | 0 |
| BRACE2010489 | 63.510 | 0 | 0 | 10.799 | 0 | 0 | 0 |
| BRACE2010651 | 18.479 | 0 | 0 | 0 | 0 | 0 | 0 |
| BRACE2010669 | 19.124 | 0 | 0 | 6.504 | 0 | 0 | 7.069 |
| BRACE2010753 | 0 | 0 | 66.077 | 0 | 0 | 0 | 20.684 |
| BRACE2011183 | 0 | 0 | 0 | 13.116 | 0 | 0 | 14.257 |
| BRACE2012317 | 23.331 | 0 | 0 | 34.304 | 0 | 0 | 3.805 |
| BRACE2012528 | 3.794 | 7.616 | 0 | 4.354 | 0 | 6.840 | 13.673 |
| BRACE2012814 | 3.067 | 0 | 0 | 0 | 0 | 0 | 1.701 |
| BRACE2013855 | 0 | 0 | 28.415 | 0 | 0 | 0 | 0 |
| BRACE2013911 | 7.517 | 0 | 0 | 0 | 0 | 0 | 16.672 |
| BRACE2014257 | 12.401 | 0 | 0 | 0 | 0 | 0 | 0 |
| BRACE2014306 | 0 | 0 | 34.486 | 0 | 0 | 17.550 | 5.398 |
| BRACE2014657 | 15.451 | 0 | 0 | 0 | 0 | 0 | 0 |
| BRACE2014746 | 0 | 32.019 | 0 | 0 | 0 | 0 | 0 |
| BRACE2014850 | 7.500 | 0 | 0 | 0 | 0 | 0 | 8.317 |
| BRACE2015058 | 0 | 0 | 0 | 8.947 | 0 | 0 | 19.449 |
| BRACE2015132 | 0 | 0 | 58.366 | 0 | 0 | 0 | 0 |
| BRACE2015287 | 0 | 0 | 8.135 | 0 | 0 | 0 | 2.547 |
| BRACE2015368 | 58.488 | 0 | 0 | 0 | 0 | 0 | 0 |
| BRACE2015412 | 12.174 | 0 | 0 | 0 | 0 | 0 | 0 |
| BRACE2016194 | 0 | 76.373 | 0 | 0 | 0 | 0 | 0 |
| BRACE2017359 | 0 | 0 | 0 | 41.817 | 0 | 0 | 0 |
| BRACE2017397 | 0 | 0 | 0 | 4.813 | 0 | 0 | 0 |
| BRACE2017574 | 0 | 0 | 0 | 0 | 0 | 0 | 5.682 |
| BRACE2017844 | 0 | 11.790 | 0 | 5.243 | 38.254 | 0 | 0 |
| BRACE2017934 | 0 | 0 | 0 | 0 | 0 | 33.326 | 0 |
| BRACE2018337 | 9.527 | 0 | 0 | 2.430 | 8.865 | 25.764 | 0 |
| BRACE2018736 | 0 | 0 | 0 | 0 | 0 | 0 | 44.853 |
| BRACE2018762 | 0 | 0 | 0 | 58.973 | 0 | 0 | 0 |
| BRACE2018847 | 39.016 | 0 | 0 | 0 | 0 | 0 | 21.634 |
| BRACE2019004 | 0 | 0 | 0 | 0 | 0 | 0 | 60.975 |
| BRACE2019147 | 0 | 0 | 0 | 2.185 | 7.971 | 0 | 0 |
| BRACE2019327 | 0 | 20.559 | 0 | 0 | 0 | 0 | 9.938 |
| BRACE2019348 | 0 | 0 | 0 | 0 | 0 | 0 | 25.772 |
| BRACE2019519 | 0 | 0 | 65.939 | 0 | 0 | 0 | 0 |
| BRACE2019877 | 0 | 13.934 | 0 | 0 | 0 | 21.900 | 6.735 |
| BRACE2021014 | 17.772 | 0 | 0 | 18.132 | 0 | 0 | 0 |
| BRACE2021708 | 29.608 | 0 | 0 | 0 | 0 | 0 | 0 |
| BRACE2021932 | 0 | 0 | 0 | 58.973 | 0 | 0 | 0 |
| BRACE2022333 | 17.756 | 0 | 0 | 18.115 | 0 | 0 | 19.690 |
| BRACE2022638 | 1.491 | 1.710 | 0 | 0.760 | 0 | 2.687 | 0.827 |
| BRACE2023223 | 0 | 0 | 0 | 37.268 | 0 | 0 | 0 |
| BRACE2023718 | 32.097 | 0 | 0 | 16.373 | 0 | 0 | 0 |
| BRACE2024781 | 58.488 | 0 | 0 | 0 | 0 | 0 | 0 |
| BRACE2025437 | 0 | 0 | 0 | 0 | 0 | 11.008 | 0 |
| BRACE2026142 | 0 | 0 | 0 | 0 | 83.985 | 0 | 0 |
| BRACE2027018 | 0 | 0 | 83.309 | 0 | 0 | 0 | 0 |
| BRACE2027643 | 0 | 33.045 | 0 | 0 | 0 | 0 | 0 |
| BRACE2027767 | 58.488 | 0 | 0 | 0 | 0 | 0 | 0 |
| BRACE2027896 | 25.575 | 0 | 0 | 0 | 0 | 0 | 0 |
| BRACE2028392 | 0 | 0 | 18.058 | 0 | 37.945 | 36.760 | 0 |
| BRACE2028636 | 0 | 0 | 0 | 13.653 | 0 | 0 | 0 |
| BRACE2030341 | 0 | 0 | 0 | 7.057 | 0 | 0 | 0 |
| BRACE2031154 | 0 | 0 | 0 | 0 | 0 | 0 | 60.975 |
| BRACE2032477 | 0 | 0 | 0 | 5.685 | 0 | 0 | 0 |
| BRACE2032502 | 0 | 0 | 0 | 0 | 0 | 0 | 60.975 |
| BRACE2035381 | 10.177 | 0 | 0 | 20.766 | 0 | 0 | 11.286 |
| BRACE2037132 | 58.488 | 0 | 0 | 0 | 0 | 0 | 0 |
| BRACE2037295 | 3.280 | 0 | 0 | 0 | 12.209 | 0 | 0 |
| BRACE2039624 | 0.967 | 0 | 0 | 0.987 | 3.601 | 3.488 | 1.073 |
| BRACE2044105 | 0 | 0 | 0 | 0 | 0 | 72.562 | 0 |
| BRACE2044286 | 18.667 | 0 | 0 | 0 | 0 | 0 | 0 |
| BRACE2045954 | 27.309 | 0 | 0 | 0 | 0 | 0 | 0 |
| BRACE3003192 | 58.488 | 0 | 0 | 0 | 0 | 0 | 0 |
| BRACE3004046 | 0 | 0 | 0 | 58.973 | 0 | 0 | 0 |
| BRACE3004371 | 11.270 | 0 | 0 | 7.666 | 0 | 0 | 4.166 |
| BRACE3004767 | 58.488 | 0 | 0 | 0 | 0 | 0 | 0 |
| BRACE3005499 | 31.276 | 0 | 0 | 0 | 0 | 0 | 0 |
| BRACE3005760 | 45.047 | 0 | 0 | 22.980 | 0 | 0 | 0 |
| BRACE3005938 | 1.101 | 0 | 3.901 | 4.494 | 4.099 | 0 | 4.885 |
| BRACE3005989 | 0 | 0.536 | 0 | 0.239 | 0.870 | 0.843 | 0 |
| BRACE3007258 | 13.014 | 0 | 0 | 13.277 | 0 | 0 | 28.863 |
| BRACE3007480 | 19.471 | 0 | 0 | 52.973 | 0 | 0 | 7.197 |
| BRACE3008384 | 0 | 0 | 0 | 0 | 0 | 0 | 43.859 |
| BRACE3009237 | 18.139 | 0 | 0 | 37.013 | 0 | 0 | 20.116 |
| BRACE3009416 | 0 | 0 | 0 | 29.118 | 0 | 0 | 0 |
| BRACE3009724 | 58.488 | 0 | 0 | 0 | 0 | 0 | 0 |
| BRACE3010397 | 0 | 0 | 0 | 0 | 0 | 0 | 75.757 |
| BRACE3010428 | 6.868 | 0 | 0 | 2.336 | 4.261 | 0 | 2.539 |
| BRACE3010438 | 5.372 | 0 | 0 | 0 | 0 | 0 | 3.971 |
| BRACE3011271 | 11.036 | 0 | 0 | 11.259 | 0 | 0 | 0 |
| BRACE3011421 | 28.251 | 0 | 0 | 0 | 0 | 0 | 0 |
| BRACE3013780 | 0 | 0 | 0 | 0 | 17.852 | 0 | 0 |
| BRACE3016122 | 58.488 | 0 | 0 | 0 | 0 | 0 | 0 |
| BRACE3018963 | 0 | 0 | 0 | 58.973 | 0 | 0 | 0 |
| BRACE3019071 | 28.341 | 0 | 0 | 0 | 0 | 0 | 31.429 |
| BRACE3019941 | 0 | 0 | 0 | 0 | 0 | 0 | 6.480 |
| BRACE3022312 | 0 | 0 | 0 | 0 | 0 | 0 | 37.734 |
| BRACE3022340 | 58.488 | 0 | 0 | 0 | 0 | 0 | 0 |
| BRACE3025719 | 0 | 0 | 0 | 0 | 67.040 | 0 | 0 |
| BRACE3026735 | 24.173 | 0 | 0 | 0 | 0 | 0 | 0 |
| BRACE3026802 | 0 | 0 | 0 | 0 | 63.610 | 0 | 0 |
| BRACE3027478 | 0 | 0 | 0 | 0 | 0 | 0 | 35.497 |
| BRACE3027931 | 0 | 0 | 0 | 34.325 | 0 | 0 | 0 |
| BRACE3029021 | 0 | 0 | 0 | 74.193 | 0 | 0 | 0 |
| BRACE3030866 | 58.488 | 0 | 0 | 0 | 0 | 0 | 0 |
| BRACE3031185 | 58.488 | 0 | 0 | 0 | 0 | 0 | 0 |
| BRACE3031838 | 58.488 | 0 | 0 | 0 | 0 | 0 | 0 |
| BRACE3032427 | 58.488 | 0 | 0 | 0 | 0 | 0 | 0 |
| BRACE3032631 | 12.612 | 0 | 0 | 0 | 0 | 45.475 | 0 |
| BRACE3036156 | 0 | 0 | 0 | 44.660 | 0 | 0 | 24.272 |
| BRACE3039358 | 41.331 | 0 | 0 | 21.084 | 0 | 0 | 22.917 |
| BRACE3040863 | 17.888 | 0 | 0 | 18.250 | 0 | 0 | 0 |
| BRACE3042326 | 0 | 0 | 0 | 35.796 | 0 | 0 | 0 |
| BRACE3042432 | 58.488 | 0 | 0 | 0 | 0 | 0 | 0 |
| BRACE3045078 | 0 | 0 | 0 | 41.817 | 0 | 0 | 0 |
| BRACE3045981 | 26.434 | 0 | 0 | 0 | 0 | 0 | 0 |
| BRACE3046450 | 21.984 | 0 | 0 | 0 | 0 | 0 | 0 |
| BRALZ2000988 | 15.571 | 0 | 0 | 10.591 | 0 | 0 | 5.756 |
| BRALZ2001834 | 0 | 0 | 0 | 0 | 0 | 0 | 23.483 |
| BRALZ2006288 | 0 | 0 | 0 | 11.126 | 0 | 0 | 0 |
| BRALZ2008617 | 8.102 | 0 | 0 | 0 | 0 | 0 | 0 |
| BRALZ2008696 | 21.676 | 0 | 0 | 0 | 0 | 0 | 0 |
| BRALZ2009446 | 0 | 10.697 | 0 | 0 | 17.354 | 16.812 | 0 |
| BRALZ2009482 | 0 | 0 | 1.316 | 0 | 0 | 0 | 3.297 |
| BRALZ2009486 | 0 | 24.097 | 0 | 0 | 0 | 0 | 0 |
| BRALZ2011796 | 5.511 | 0 | 19.525 | 0 | 20.514 | 0 | 6.112 |
| BRALZ2011880 | 3.049 | 0 | 0 | 0 | 0 | 0 | 0 |
| BRALZ2018834 | 0 | 0 | 22.106 | 6.366 | 0 | 0 | 0 |
| BRALZ2019047 | 0 | 0 | 0 | 0 | 0 | 0 | 23.483 |
| BRAMY1000173 | 21.150 | 0 | 0 | 0 | 0 | 0 | 11.727 |
| BRAMY2000025 | 0 | 36.202 | 0 | 16.099 | 0 | 0 | 0 |
| BRAMY2000052 | 0 | 0 | 0 | 0 | 0 | 39.047 | 0 |
| BRAMY2000354 | 0 | 0 | 0 | 1.402 | 0 | 0 | 0 |
| BRAMY2000388 | 6.118 | 0 | 0 | 6.242 | 0 | 0 | 0 |
| BRAMY2000411 | 0 | 0 | 0 | 12.647 | 23.069 | 0 | 0 |
| BRAMY2000508 | 35.193 | 0 | 0 | 0 | 0 | 0 | 0 |
| BRAMY2000562 | 3.843 | 0 | 0 | 9.803 | 0 | 0 | 6.393 |
| BRAMY2000585 | 0 | 0 | 0 | 0 | 0 | 0 | 2.724 |
| BRAMY2000893 | 0 | 0 | 0 | 0 | 5.664 | 0 | 0 |
| BRAMY2002369 | 24.474 | 0 | 0 | 24.970 | 0 | 0 | 27.141 |
| BRAMY2002479 | 0 | 0 | 0 | 0 | 0 | 78.159 | 0 |
| BRAMY2002621 | 0 | 0 | 0 | 0 | 0 | 0 | 39.237 |
| BRAMY2002799 | 49.811 | 0 | 0 | 0 | 0 | 0 | 0 |
| BRAMY2003008 | 26.445 | 0 | 0 | 0 | 0 | 0 | 0 |
| BRAMY2004031 | 0 | 29.171 | 45.044 | 12.972 | 0 | 0 | 0 |
| BRAMY2004363 | 12.266 | 0 | 0 | 6.257 | 0 | 0 | 2.267 |
| BRAMY2004387 | 0 | 69.484 | 0 | 0 | 0 | 0 | 0 |
| BRAMY2004521 | 2.370 | 0 | 0 | 2.418 | 0 | 0 | 5.257 |
| BRAMY2004524 | 0 | 0 | 0 | 0 | 0 | 78.159 | 0 |
| BRAMY2005052 | 11.612 | 0 | 0 | 0 | 0 | 0 | 25.755 |
| BRAMY2005488 | 0 | 0 | 40.370 | 11.626 | 0 | 0 | 0 |
| BRAMY2006397 | 0 | 6.443 | 0 | 2.865 | 10.452 | 0 | 0 |
| BRAMY2007078 | 0 | 0 | 0 | 0 | 0 | 0 | 8.434 |
| BRAMY2007244 | 0 | 26.889 | 0 | 11.957 | 0 | 0 | 0 |
| BRAMY2007255 | 0 | 0 | 0 | 40.300 | 0 | 0 | 0 |
| BRAMY2007287 | 10.715 | 0 | 0 | 0 | 0 | 0 | 0 |
| BRAMY2007567 | 31.038 | 0 | 0 | 0 | 0 | 0 | 0 |
| BRAMY2007594 | 0 | 0 | 0 | 0 | 0 | 0 | 68.762 |
| BRAMY2007613 | 30.810 | 0 | 0 | 9.567 | 0 | 4.830 | 10.399 |
| BRAMY2008563 | 0 | 0 | 0 | 50.312 | 0 | 0 | 0 |
| BRAMY2008977 | 5.056 | 0 | 0 | 5.158 | 0 | 0 | 5.607 |
| BRAMY2009013 | 6.091 | 0 | 0 | 0 | 0 | 0 | 0 |
| BRAMY2009023 | 26.514 | 0 | 0 | 0 | 0 | 0 | 0 |
| BRAMY2009489 | 0 | 0 | 0 | 18.337 | 0 | 0 | 19.931 |
| BRAMY2009508 | 7.498 | 0 | 0 | 7.650 | 0 | 0 | 16.630 |
| BRAMY2009557 | 0 | 0 | 0 | 50.312 | 0 | 0 | 0 |
| BRAMY2009612 | 0 | 0 | 0 | 27.617 | 0 | 0 | 0 |
| BRAMY2009934 | 0 | 0 | 0 | 6.031 | 0 | 0 | 0 |
| BRAMY2010272 | 49.811 | 0 | 0 | 0 | 0 | 0 | 0 |
| BRAMY2010357 | 14.931 | 0 | 0 | 15.234 | 0 | 0 | 0 |
| BRAMY2010442 | 0 | 0 | 0 | 0 | 0 | 0 | 52.395 |
| BRAMY2010464 | 11.017 | 0 | 0 | 0 | 0 | 0 | 0 |
| BRAMY2011105 | 0 | 6.950 | 0 | 0 | 11.275 | 0 | 0 |
| BRAMY2011446 | 0 | 0 | 0 | 0 | 0 | 0 | 39.237 |
| BRAMY2011841 | 0 | 0 | 0 | 11.258 | 0 | 0 | 0 |
| BRAMY2011849 | 0 | 0 | 0 | 50.312 | 0 | 0 | 0 |
| BRAMY2012163 | 0 | 0 | 28.009 | 0 | 58.856 | 0 | 0 |
| BRAMY2012340 | 0 | 0 | 0 | 50.312 | 0 | 0 | 0 |
| BRAMY2012536 | 0 | 1.324 | 6.134 | 0.589 | 0 | 0 | 0 |
| BRAMY2012881 | 0 | 0 | 0 | 0 | 0 | 0 | 52.395 |
| BRAMY2013169 | 0 | 0 | 0 | 0 | 0 | 41.000 | 12.610 |
| BRAMY2013736 | 0 | 0 | 0 | 0 | 0 | 0 | 52.395 |
| BRAMY2014205 | 0 | 0 | 0 | 0 | 53.328 | 0 | 0 |
| BRAMY2014462 | 0 | 0 | 0 | 50.312 | 0 | 0 | 0 |
| BRAMY2014754 | 5.603 | 12.854 | 9.924 | 27.152 | 10.427 | 0 | 12.427 |
| BRAMY2015251 | 3.062 | 21.075 | 21.695 | 3.124 | 0 | 11.041 | 0 |
| BRAMY2015420 | 63.595 | 0 | 0 | 0 | 0 | 0 | 0 |
| BRAMY2015550 | 0 | 0 | 0 | 0 | 0 | 0 | 37.587 |
| BRAMY2015833 | 4.610 | 0 | 0 | 4.703 | 0 | 16.621 | 5.112 |
| BRAMY2015911 | 0 | 0 | 0 | 0 | 0 | 0 | 33.045 |
| BRAMY2016009 | 10.459 | 11.998 | 0 | 16.006 | 0 | 0 | 5.799 |
| BRAMY2016251 | 0 | 16.499 | 0 | 0 | 0 | 0 | 0 |
| BRAMY2016325 | 11.304 | 0 | 0 | 3.844 | 0 | 0 | 4.178 |
| BRAMY2016892 | 14.520 | 0 | 0 | 44.442 | 0 | 0 | 16.102 |
| BRAMY2017864 | 0 | 0 | 0 | 14.097 | 51.427 | 0 | 0 |
| BRAMY2018295 | 0 | 0 | 63.596 | 18.315 | 0 | 0 | 0 |
| BRAMY2018635 | 27.163 | 0 | 0 | 27.712 | 0 | 0 | 0 |
| BRAMY2018785 | 0 | 0 | 24.091 | 6.938 | 0 | 0 | 0 |
| BRAMY2019111 | 0 | 69.484 | 0 | 0 | 0 | 0 | 0 |
| BRAMY2019300 | 49.811 | 0 | 0 | 0 | 0 | 0 | 0 |
| BRAMY2019468 | 34.185 | 0 | 0 | 23.251 | 0 | 0 | 12.637 |
| BRAMY2019554 | 1.596 | 0 | 0 | 4.885 | 2.970 | 0 | 0.885 |
| BRAMY2019600 | 16.148 | 0 | 0 | 0 | 0 | 0 | 8.954 |
| BRAMY2019710 | 0 | 0 | 0 | 0 | 0 | 0 | 52.395 |
| BRAMY2019963 | 20.428 | 0 | 0 | 6.947 | 0 | 0 | 7.551 |
| BRAMY2019989 | 11.571 | 0 | 0 | 10.821 | 0 | 0 | 4.277 |
| BRAMY2020106 | 0 | 0 | 0 | 0 | 0 | 40.308 | 0 |
| BRAMY2020427 | 0.592 | 1.358 | 0 | 1.812 | 0 | 4.270 | 1.313 |
| BRAMY2021276 | 0 | 0 | 0 | 0 | 0 | 0 | 52.395 |
| BRAMY2021825 | 0 | 0 | 0 | 33.611 | 0 | 0 | 0 |
| BRAMY2021867 | 0 | 0 | 0 | 0 | 0 | 0 | 39.237 |
| BRAMY2022160 | 0 | 0 | 0 | 51.413 | 0 | 0 | 0 |
| BRAMY2022168 | 0 | 0 | 0 | 13.801 | 0 | 0 | 30.003 |
| BRAMY2022493 | 2.653 | 0 | 0 | 2.707 | 0 | 0 | 0 |
| BRAMY2022525 | 22.053 | 0 | 0 | 0 | 0 | 0 | 0 |
| BRAMY2022723 | 0 | 0 | 0 | 0 | 0 | 0 | 39.237 |
| BRAMY2022786 | 3.743 | 2.863 | 4.421 | 1.273 | 4.644 | 8.999 | 0 |
| BRAMY2022980 | 30.533 | 0 | 54.084 | 0 | 0 | 0 | 0 |
| BRAMY2023115 | 0 | 0 | 0 | 50.312 | 0 | 0 | 0 |
| BRAMY2023406 | 0 | 0 | 23.388 | 0 | 24.572 | 0 | 0 |
| BRAMY2024004 | 0 | 6.346 | 9.799 | 0 | 0 | 0 | 3.067 |
| BRAMY2024312 | 0 | 0 | 0 | 50.312 | 0 | 0 | 0 |
| BRAMY2024390 | 0 | 0 | 0 | 35.652 | 0 | 0 | 0 |
| BRAMY2024416 | 4.525 | 0 | 0 | 9.233 | 0 | 0 | 35.125 |
| BRAMY2024593 | 12.891 | 0 | 0 | 13.152 | 47.980 | 0 | 0 |
| BRAMY2024711 | 0 | 0 | 43.436 | 0 | 0 | 44.210 | 0 |
| BRAMY2024827 | 0 | 0 | 0 | 4.071 | 0 | 0 | 0 |
| BRAMY2025121 | 0 | 37.987 | 0 | 16.893 | 0 | 0 | 0 |
| BRAMY2025272 | 0 | 0 | 0 | 0 | 0 | 0 | 52.395 |
| BRAMY2026168 | 32.087 | 0 | 0 | 0 | 0 | 0 | 35.583 |
| BRAMY2026533 | 0 | 42.945 | 0 | 38.195 | 0 | 0 | 0 |
| BRAMY2027114 | 0 | 0 | 0 | 0 | 0 | 0 | 19.060 |
| BRAMY2027587 | 0 | 0 | 0 | 13.623 | 0 | 0 | 0 |
| BRAMY2027717 | 20.585 | 0 | 0 | 12.601 | 0 | 0 | 50.221 |
| BRAMY2027739 | 0 | 0 | 0 | 0 | 0 | 4.852 | 0 |
| BRAMY2028183 | 0 | 0 | 0 | 0 | 0 | 67.737 | 0 |
| BRAMY2028269 | 0 | 37.447 | 0 | 0 | 0 | 0 | 0 |
| BRAMY2028516 | 0 | 0 | 0 | 0 | 14.680 | 0 | 0 |
| BRAMY2028740 | 4.655 | 2.136 | 9.895 | 4.749 | 0 | 0 | 5.162 |
| BRAMY2028796 | 0 | 0 | 0 | 1.517 | 0 | 0 | 0 |
| BRAMY2028914 | 0 | 0 | 0 | 0 | 0 | 0 | 19.645 |
| BRAMY2029988 | 0 | 0 | 0 | 12.017 | 0 | 0 | 13.062 |
| BRAMY2031317 | 0 | 0 | 0 | 16.004 | 0 | 0 | 34.791 |
| BRAMY2031516 | 14.772 | 0 | 0 | 7.536 | 0 | 0 | 0 |
| BRAMY2032087 | 2.422 | 0 | 0 | 1.236 | 0 | 0 | 2.686 |
| BRAMY2033914 | 49.811 | 0 | 0 | 0 | 0 | 0 | 0 |
| BRAMY2035719 | 0 | 0 | 0 | 15.497 | 56.534 | 0 | 0 |
| BRAMY2036076 | 10.816 | 0 | 0 | 0 | 0 | 0 | 11.995 |
| BRAMY2036459 | 1.885 | 0 | 0 | 1.923 | 0 | 0 | 0 |
| BRAMY2036567 | 7.474 | 17.148 | 0 | 7.626 | 0 | 0 | 0 |
| BRAMY2037823 | 29.664 | 0 | 0 | 0 | 0 | 0 | 0 |
| BRAMY2038516 | 0 | 87.230 | 0 | 0 | 0 | 0 | 0 |
| BRAMY2039630 | 0 | 0 | 30.744 | 0 | 0 | 0 | 0 |
| BRAMY2039728 | 0 | 0 | 0 | 37.268 | 0 | 0 | 0 |
| BRAMY2040095 | 1.709 | 0.784 | 1.211 | 2.092 | 0 | 0 | 1.516 |
| BRAMY2040214 | 0 | 0 | 0 | 44.393 | 0 | 0 | 16.084 |
| BRAMY2040592 | 3.482 | 0 | 0 | 7.105 | 0 | 0 | 0 |
| BRAMY2042195 | 0 | 69.484 | 0 | 0 | 0 | 0 | 0 |
| BRAMY2044838 | 0 | 0 | 0 | 0 | 0 | 0 | 68.762 |
| BRAMY2046871 | 33.165 | 0 | 0 | 0 | 0 | 0 | 0 |
| BRAMY2047420 | 0 | 0 | 0 | 0 | 3.770 | 0 | 0 |
| BRAMY3002329 | 20.323 | 0 | 0 | 34.558 | 0 | 0 | 15.025 |
| BRAMY3002458 | 0 | 0 | 0 | 50.663 | 0 | 0 | 0 |
| BRAMY3002803 | 14.428 | 0 | 0 | 44.161 | 0 | 0 | 0 |
| BRAMY3002991 | 0 | 8.995 | 0 | 0 | 0 | 0 | 4.348 |
| BRAMY3004126 | 49.811 | 0 | 0 | 0 | 0 | 0 | 0 |
| BRAMY3004224 | 33.027 | 0 | 0 | 33.695 | 0 | 0 | 0 |
| BRAMY3004377 | 3.317 | 0 | 0 | 0.846 | 0 | 2.990 | 0.920 |
| BRAMY3004800 | 38.061 | 0 | 0 | 46.598 | 0 | 0 | 0 |
| BRAMY3005091 | 19.193 | 0 | 0 | 0 | 0 | 0 | 0 |
| BRAMY3005184 | 0 | 0 | 0 | 22.861 | 0 | 0 | 0 |
| BRAMY3005912 | 21.416 | 0 | 0 | 0 | 0 | 0 | 0 |
| BRAMY3006761 | 32.935 | 0 | 0 | 56.003 | 0 | 0 | 0 |
| BRAMY3007078 | 0 | 0 | 0 | 50.312 | 0 | 0 | 0 |
| BRAMY3007311 | 23.569 | 18.024 | 0 | 0 | 0 | 0 | 0 |
| BRAMY3008044 | 7.175 | 8.231 | 6.355 | 3.660 | 0 | 0 | 3.979 |
| BRAMY3009556 | 0 | 0 | 0 | 0 | 0 | 0 | 52.395 |
| BRAMY3009782 | 0 | 0 | 0 | 0 | 0 | 0 | 52.395 |
| BRAMY3009811 | 0 | 0 | 0 | 66.943 | 0 | 0 | 0 |
| BRAMY3010008 | 0 | 0 | 2.062 | 0 | 0 | 0 | 0 |
| BRAMY3010264 | 49.811 | 0 | 0 | 0 | 0 | 0 | 0 |
| BRAMY3010492 | 5.759 | 0 | 0 | 0 | 21.436 | 0 | 6.387 |
| BRAMY3010654 | 0 | 0 | 0 | 0 | 0 | 0 | 52.395 |
| BRAMY4000089 | 5.089 | 0 | 0 | 15.576 | 0 | 0 | 0 |
| BRAMY4000095 | 0 | 33.520 | 51.759 | 0 | 0 | 0 | 0 |
| BRAMY4000229 | 0 | 0 | 0 | 0 | 0 | 0 | 39.237 |
| BRAMY4000915 | 0 | 0 | 0 | 50.312 | 0 | 0 | 0 |
| BRAMY4001863 | 0 | 0 | 0 | 0 | 0 | 0 | 16.612 |
| BRASW1000125 | 0 | 0 | 0 | 0 | 0 | 0.946 | 0 |
| BRAWH1000001 | 16.638 | 7.634 | 11.788 | 13.580 | 12.385 | 0 | 18.451 |
| BRAWH1000002 | 100 | 0 | 0 | 0 | 0 | 0 | 0 |
| BRAWH1000007 | 8.986 | 0 | 0 | 0 | 0 | 0 | 0 |
| BRAWH1000037 | 5.470 | 12.550 | 6.460 | 1.860 | 13.574 | 0 | 6.066 |
| BRAWH1000040 | 1.376 | 3.157 | 0 | 2.106 | 0 | 0 | 0.763 |
| BRAWH1000045 | 13.013 | 2.297 | 14.184 | 10.213 | 0 | 7.219 | 2.220 |
| BRAWH1000083 | 4.531 | 0 | 0 | 0 | 0 | 0 | 0 |
| BRAWH1000093 | 0.461 | 0 | 0 | 0 | 1.717 | 0 | 0.511 |
| BRAWH1000094 | 8.420 | 0 | 0 | 0 | 31.340 | 15.181 | 14.007 |
| BRAWH1000116 | 100 | 0 | 0 | 0 | 0 | 0 | 0 |
| BRAWH1000127 | 15.983 | 0 | 0 | 3.261 | 35.693 | 0 | 7.090 |
| BRAWH1000130 | 100 | 0 | 0 | 0 | 0 | 0 | 0 |
| BRAWH1000157 | 100 | 0 | 0 | 0 | 0 | 0 | 0 |
| BRAWH1000162 | 5.475 | 0 | 6.465 | 1.862 | 20.378 | 0 | 12.143 |
| BRAWH1000164 | 100 | 0 | 0 | 0 | 0 | 0 | 0 |
| BRAWH1000168 | 100 | 0 | 0 | 0 | 0 | 0 | 0 |
| BRAWH1000174 | 17.190 | 19.718 | 10.149 | 14.615 | 0 | 0 | 19.063 |
| BRAWH1000180 | 100 | 0 | 0 | 0 | 0 | 0 | 0 |
| BRAWH1000369 | 100 | 0 | 0 | 0 | 0 | 0 | 0 |
| BRAWH2000034 | 100 | 0 | 0 | 0 | 0 | 0 | 0 |
| BRAWH2000048 | 100 | 0 | 0 | 0 | 0 | 0 | 0 |
| BRAWH2000071 | 100 | 0 | 0 | 0 | 0 | 0 | 0 |
| BRAWH2000082 | 9.973 | 3.520 | 13.589 | 9.001 | 8.566 | 4.149 | 9.784 |
| BRAWH2000093 | 100 | 0 | 0 | 0 | 0 | 0 | 0 |
| BRAWH2000109 | 100 | 0 | 0 | 0 | 0 | 0 | 0 |
| BRAWH2000131 | 21.676 | 0 | 0 | 0 | 0 | 0 | 0 |
| BRAWH2000142 | 30.475 | 0 | 53.980 | 15.546 | 0 | 0 | 0 |
| BRAWH2000169 | 10.541 | 0 | 0 | 0 | 0 | 0 | 0 |
| BRAWH2000177 | 15.991 | 0 | 0 | 8.157 | 0 | 0 | 0 |
| BRAWH2000218 | 47.417 | 0 | 0 | 0 | 0 | 0 | 52.583 |
| BRAWH2000232 | 100 | 0 | 0 | 0 | 0 | 0 | 0 |
| BRAWH2000248 | 100 | 0 | 0 | 0 | 0 | 0 | 0 |
| BRAWH2000256 | 100 | 0 | 0 | 0 | 0 | 0 | 0 |
| BRAWH2000274 | 7.896 | 4.529 | 6.993 | 2.014 | 0 | 0 | 2.189 |
| BRAWH2000323 | 100 | 0 | 0 | 0 | 0 | 0 | 0 |
| BRAWH2000353 | 58.488 | 0 | 0 | 0 | 0 | 0 | 0 |
| BRAWH2000370 | 100 | 0 | 0 | 0 | 0 | 0 | 0 |
| BRAWH2000409 | 100 | 0 | 0 | 0 | 0 | 0 | 0 |
| BRAWH2000417 | 7.414 | 11.340 | 4.378 | 2.521 | 4.599 | 0 | 0 |
| BRAWH2000443 | 5.666 | 12.999 | 20.071 | 17.341 | 21.088 | 0 | 0 |
| BRAWH2000460 | 1.831 | 1.400 | 2.162 | 1.245 | 4.543 | 0 | 4.061 |
| BRAWH2000471 | 100 | 0 | 0 | 0 | 0 | 0 | 0 |
| BRAWH2000476 | 24.100 | 0 | 0 | 49.175 | 0 | 0 | 26.726 |
| BRAWH2000482 | 1.518 | 38.304 | 48.392 | 1.549 | 5.649 | 0 | 0 |
| BRAWH2000488 | 10.082 | 0 | 0 | 0 | 0 | 0 | 0 |
| BRAWH2000494 | 18.182 | 41.714 | 0 | 0 | 0 | 0 | 0 |
| BRAWH2000500 | 58.488 | 0 | 0 | 0 | 0 | 0 | 0 |
| BRAWH2000503 | 20.746 | 0 | 0 | 42.332 | 0 | 0 | 0 |
| BRAWH2000522 | 1.813 | 4.158 | 0 | 3.698 | 6.746 | 0 | 0 |
| BRAWH2000554 | 100 | 0 | 0 | 0 | 0 | 0 | 0 |
| BRAWH2000588 | 6.273 | 0 | 0 | 2.560 | 0 | 0 | 2.783 |
| BRAWH2000595 | 12.470 | 0 | 0 | 0 | 0 | 0 | 0 |
| BRAWH2000633 | 1.326 | 0 | 0 | 2.705 | 0 | 0 | 0 |
| BRAWH2000636 | 13.739 | 0 | 1.872 | 4.852 | 1.967 | 0 | 14.650 |
| BRAWH2000643 | 100 | 0 | 0 | 0 | 0 | 0 | 0 |
| BRAWH2000651 | 100 | 0 | 0 | 0 | 0 | 0 | 0 |
| BRAWH2000682 | 100 | 0 | 0 | 0 | 0 | 0 | 0 |
| BRAWH2000686 | 1.222 | 5.609 | 8.661 | 1.247 | 4.550 | 4.407 | 6.778 |
| BRAWH2000697 | 3.035 | 2.321 | 10.750 | 4.128 | 7.530 | 7.295 | 5.609 |
| BRAWH2000752 | 100 | 0 | 0 | 0 | 0 | 0 | 0 |
| BRAWH2000839 | 6.982 | 3.769 | 2.910 | 4.609 | 3.057 | 1.481 | 5.465 |
| BRAWH2000859 | 47.167 | 0 | 0 | 0 | 0 | 0 | 0 |
| BRAWH2000866 | 100 | 0 | 0 | 0 | 0 | 0 | 0 |
| BRAWH2000892 | 100 | 0 | 0 | 0 | 0 | 0 | 0 |
| BRAWH2000901 | 100 | 0 | 0 | 0 | 0 | 0 | 0 |
| BRAWH2000924 | 8.897 | 4.609 | 9.150 | 7.320 | 10.682 | 10.348 | 6.047 |
| BRAWH2000926 | 4.218 | 0 | 0 | 0 | 0 | 0 | 0 |
| BRAWH2000944 | 5.217 | 0 | 0 | 0 | 0 | 0 | 0 |
| BRAWH2000984 | 100 | 0 | 0 | 0 | 0 | 0 | 0 |
| BRAWH2001019 | 2.281 | 15.697 | 16.159 | 9.307 | 16.977 | 0 | 2.529 |
| BRAWH2001037 | 4.010 | 0 | 0 | 0 | 0 | 0 | 0 |
| BRAWH2001052 | 100 | 0 | 0 | 0 | 0 | 0 | 0 |
| BRAWH2001092 | 2.109 | 0.403 | 0.623 | 1.434 | 0 | 0 | 0.975 |
| BRAWH2001103 | 13.143 | 0 | 0 | 6.704 | 0 | 0 | 0 |
| BRAWH2001129 | 47.167 | 0 | 0 | 0 | 0 | 0 | 0 |
| BRAWH2001137 | 100 | 0 | 0 | 0 | 0 | 0 | 0 |
| BRAWH2001141 | 5.082 | 0 | 0 | 0 | 0 | 0 | 0 |
| BRAWH2001159 | 100 | 0 | 0 | 0 | 0 | 0 | 0 |
| BRAWH2001166 | 3.157 | 0 | 0 | 0 | 0 | 0 | 3.501 |
| BRAWH2001171 | 6.176 | 1.417 | 0 | 1.890 | 2.299 | 0 | 4.794 |
| BRAWH2001186 | 2.849 | 0 | 0 | 0 | 0 | 0 | 0 |
| BRAWH2001203 | 100 | 0 | 0 | 0 | 0 | 0 | 0 |
| BRAWH2001238 | 12.091 | 0 | 0 | 0 | 45.001 | 0 | 0 |
| BRAWH2001239 | 7.296 | 0 | 0 | 0 | 27.156 | 0 | 8.091 |
| BRAWH2001255 | 100 | 0 | 0 | 0 | 0 | 0 | 0 |
| BRAWH2001321 | 6.868 | 1.969 | 3.041 | 10.510 | 3.195 | 3.095 | 6.664 |
| BRAWH2001355 | 100 | 0 | 0 | 0 | 0 | 0 | 0 |
| BRAWH2001378 | 100 | 0 | 0 | 0 | 0 | 0 | 0 |
| BRAWH2001395 | 14.290 | 5.785 | 10.422 | 22.297 | 12.514 | 4.546 | 11.652 |
| BRAWH2001406 | 3.385 | 0 | 0 | 3.454 | 12.600 | 0 | 0 |
| BRAWH2001412 | 15.036 | 0 | 0 | 0 | 0 | 0 | 0 |
| BRAWH2001418 | 5.158 | 17.751 | 18.274 | 2.631 | 9.600 | 18.599 | 2.860 |
| BRAWH2001424 | 5.091 | 0 | 0 | 0 | 0 | 0 | 5.646 |
| BRAWH2001436 | 100 | 0 | 0 | 0 | 0 | 0 | 0 |
| BRAWH2001438 | 100 | 0 | 0 | 0 | 0 | 0 | 0 |
| BRAWH2001439 | 4.116 | 0 | 7.290 | 9.448 | 0 | 0 | 3.423 |
| BRAWH2001459 | 4.891 | 0 | 8.664 | 2.495 | 9.103 | 0 | 51.532 |
| BRAWH2001461 | 3.555 | 0 | 0 | 0 | 0 | 0 | 3.942 |
| BRAWH2001484 | 10.625 | 0 | 37.639 | 0 | 0 | 0 | 0 |
| BRAWH2001492 | 100 | 0 | 0 | 0 | 0 | 0 | 0 |
| BRAWH2001503 | 100 | 0 | 0 | 0 | 0 | 0 | 0 |
| BRAWH2001519 | 100 | 0 | 0 | 0 | 0 | 0 | 0 |
| BRAWH2001530 | 7.633 | 17.512 | 0 | 0 | 56.821 | 0 | 0 |
| BRAWH2001535 | 1.975 | 15.859 | 5.247 | 10.075 | 16.539 | 14.243 | 10.951 |
| BRAWH2001589 | 100 | 0 | 0 | 0 | 0 | 0 | 0 |
| BRAWH2001662 | 4.598 | 0 | 16.288 | 0 | 0 | 0 | 5.099 |
| BRAWH2001666 | 100 | 0 | 0 | 0 | 0 | 0 | 0 |
| BRAWH2001671 | 7.605 | 0 | 0 | 11.638 | 0 | 0 | 12.650 |
| BRAWH2001679 | 100 | 0 | 0 | 0 | 0 | 0 | 0 |
| BRAWH2001686 | 100 | 0 | 0 | 0 | 0 | 0 | 0 |
| BRAWH2001701 | 100 | 0 | 0 | 0 | 0 | 0 | 0 |
| BRAWH2001842 | 100 | 0 | 0 | 0 | 0 | 0 | 0 |
| BRAWH2001862 | 3.358 | 0 | 0 | 0 | 0 | 0 | 0 |
| BRAWH2001873 | 100 | 0 | 0 | 0 | 0 | 0 | 0 |
| BRAWH2001940 | 37.398 | 0 | 0 | 38.155 | 0 | 0 | 0 |
| BRAWH2001973 | 37.398 | 0 | 0 | 38.155 | 0 | 0 | 0 |
| BRAWH2002047 | 58.488 | 0 | 0 | 0 | 0 | 0 | 0 |
| BRAWH2002060 | 58.488 | 0 | 0 | 0 | 0 | 0 | 0 |
| BRAWH2002062 | 54.530 | 0 | 0 | 0 | 0 | 0 | 0 |
| BRAWH2002125 | 100 | 0 | 0 | 0 | 0 | 0 | 0 |
| BRAWH2002191 | 100 | 0 | 0 | 0 | 0 | 0 | 0 |
| BRAWH2002318 | 26.686 | 0 | 0 | 0 | 0 | 0 | 0 |
| BRAWH2002333 | 100 | 0 | 0 | 0 | 0 | 0 | 0 |
| BRAWH2002352 | 100 | 0 | 0 | 0 | 0 | 0 | 0 |
| BRAWH2002383 | 100 | 0 | 0 | 0 | 0 | 0 | 0 |
| BRAWH2002549 | 18.017 | 0 | 63.828 | 0 | 0 | 0 | 0 |
| BRAWH2002560 | 6.454 | 0 | 0 | 3.292 | 12.010 | 11.635 | 0 |
| BRAWH2002601 | 4.974 | 11.411 | 17.620 | 5.074 | 0 | 17.934 | 0 |
| BRAWH2002623 | 100 | 0 | 0 | 0 | 0 | 0 | 0 |
| BRAWH2002630 | 100 | 0 | 0 | 0 | 0 | 0 | 0 |
| BRAWH2002635 | 100 | 0 | 0 | 0 | 0 | 0 | 0 |
| BRAWH2002662 | 100 | 0 | 0 | 0 | 0 | 0 | 0 |
| BRAWH2002679 | 9.467 | 21.720 | 0 | 0 | 35.237 | 0 | 0 |
| BRAWH2002725 | 100 | 0 | 0 | 0 | 0 | 0 | 0 |
| BRAWH2002761 | 100 | 0 | 0 | 0 | 0 | 0 | 0 |
| BRAWH2002811 | 8.624 | 0 | 0 | 17.598 | 0 | 0 | 9.564 |
| BRAWH2002861 | 100 | 0 | 0 | 0 | 0 | 0 | 0 |
| BRAWH2002911 | 23.795 | 0 | 0 | 0 | 0 | 0 | 0 |
| BRAWH2002963 | 11.932 | 0 | 0 | 0 | 0 | 0 | 0 |
| BRAWH2002967 | 44.597 | 0 | 0 | 0 | 0 | 0 | 0 |
| BRAWH2002976 | 100 | 0 | 0 | 0 | 0 | 0 | 0 |
| BRAWH2003000 | 58.488 | 0 | 0 | 0 | 0 | 0 | 0 |
| BRAWH2003025 | 6.064 | 0 | 0 | 0 | 11.285 | 0 | 0 |
| BRAWH2003135 | 34.934 | 0 | 0 | 0 | 0 | 0 | 0 |
| BRAWH2003240 | 7.848 | 0 | 0 | 8.007 | 0 | 0 | 0 |
| BRAWH2003307 | 100 | 0 | 0 | 0 | 0 | 0 | 0 |
| BRAWH2003355 | 21.676 | 0 | 0 | 0 | 0 | 0 | 0 |
| BRAWH2003366 | 100 | 0 | 0 | 0 | 0 | 0 | 0 |
| BRAWH2003662 | 12.395 | 0 | 21.955 | 18.969 | 0 | 0 | 0 |
| BRAWH2003689 | 47.167 | 0 | 0 | 0 | 0 | 0 | 0 |
| BRAWH2003693 | 13.685 | 0 | 0 | 6.981 | 12.734 | 0 | 3.794 |
| BRAWH2003818 | 3.027 | 0 | 0 | 0 | 0 | 0 | 0 |
| BRAWH2003832 | 100 | 0 | 0 | 0 | 0 | 0 | 0 |
| BRAWH2003948 | 100 | 0 | 0 | 0 | 0 | 0 | 0 |
| BRAWH2003964 | 49.499 | 0 | 0 | 50.501 | 0 | 0 | 0 |
| BRAWH2004044 | 100 | 0 | 0 | 0 | 0 | 0 | 0 |
| BRAWH2004068 | 100 | 0 | 0 | 0 | 0 | 0 | 0 |
| BRAWH2004078 | 10.539 | 0 | 0 | 0 | 0 | 0 | 0 |
| BRAWH2004095 | 11.821 | 0 | 0 | 4.824 | 0 | 0 | 5.244 |
| BRAWH2004136 | 15.911 | 36.504 | 0 | 0 | 0 | 0 | 0 |
| BRAWH2004217 | 54.530 | 0 | 0 | 0 | 0 | 0 | 0 |
| BRAWH2004580 | 18.183 | 0 | 0 | 18.551 | 0 | 0 | 0 |
| BRAWH2004731 | 100 | 0 | 0 | 0 | 0 | 0 | 0 |
| BRAWH2004779 | 49.811 | 0 | 0 | 0 | 0 | 0 | 0 |
| BRAWH2004842 | 43.845 | 9.145 | 0 | 4.067 | 0 | 0 | 8.840 |
| BRAWH2004884 | 100 | 0 | 0 | 0 | 0 | 0 | 0 |
| BRAWH2004923 | 100 | 0 | 0 | 0 | 0 | 0 | 0 |
| BRAWH2005008 | 16.511 | 0 | 0 | 16.845 | 0 | 0 | 0 |
| BRAWH2005068 | 0.402 | 0 | 0 | 0 | 0 | 4.351 | 0 |
| BRAWH2005074 | 35.119 | 0 | 0 | 0 | 0 | 0 | 0 |
| BRAWH2005225 | 5.797 | 0 | 0 | 0 | 0 | 0 | 0 |
| BRAWH2005315 | 100 | 0 | 0 | 0 | 0 | 0 | 0 |
| BRAWH2005517 | 44.597 | 0 | 0 | 0 | 0 | 0 | 0 |
| BRAWH2005524 | 100 | 0 | 0 | 0 | 0 | 0 | 0 |
| BRAWH2005533 | 100 | 0 | 0 | 0 | 0 | 0 | 0 |
| BRAWH2005578 | 26.802 | 0 | 0 | 27.344 | 0 | 0 | 14.861 |
| BRAWH2005661 | 3.197 | 3.668 | 0 | 6.524 | 0 | 0 | 3.546 |
| BRAWH2005812 | 100 | 0 | 0 | 0 | 0 | 0 | 0 |
| BRAWH2005974 | 100 | 0 | 0 | 0 | 0 | 0 | 0 |
| BRAWH2005998 | 30.356 | 69.644 | 0 | 0 | 0 | 0 | 0 |
| BRAWH2006044 | 17.594 | 0 | 0 | 0 | 0 | 0 | 0 |
| BRAWH2006083 | 100 | 0 | 0 | 0 | 0 | 0 | 0 |
| BRAWH2006207 | 12.943 | 29.695 | 0 | 0 | 48.175 | 0 | 0 |
| BRAWH2006301 | 58.488 | 0 | 0 | 0 | 0 | 0 | 0 |
| BRAWH2006395 | 12.446 | 0 | 0 | 0 | 0 | 0 | 0 |
| BRAWH2006405 | 12.977 | 0 | 0 | 13.240 | 0 | 0 | 0 |
| BRAWH2006450 | 20.085 | 11.520 | 0 | 0 | 0 | 0 | 22.274 |
| BRAWH2006493 | 5.086 | 11.669 | 0 | 0 | 18.931 | 0 | 22.562 |
| BRAWH2006526 | 54.530 | 0 | 0 | 0 | 0 | 0 | 0 |
| BRAWH2006543 | 30.705 | 10.063 | 0 | 0 | 0 | 0 | 24.322 |
| BRAWH2006622 | 16.546 | 0 | 0 | 0 | 0 | 0 | 0 |
| BRAWH2006760 | 100 | 0 | 0 | 0 | 0 | 0 | 0 |
| BRAWH2006960 | 100 | 0 | 0 | 0 | 0 | 0 | 0 |
| BRAWH2006989 | 24.975 | 57.298 | 0 | 0 | 0 | 0 | 0 |
| BRAWH2006996 | 10.204 | 0 | 0 | 0 | 0 | 0 | 3.772 |
| BRAWH2007069 | 100 | 0 | 0 | 0 | 0 | 0 | 0 |
| BRAWH2007308 | 100 | 0 | 0 | 0 | 0 | 0 | 0 |
| BRAWH2007406 | 100 | 0 | 0 | 0 | 0 | 0 | 0 |
| BRAWH2007550 | 100 | 0 | 0 | 0 | 0 | 0 | 0 |
| BRAWH2007570 | 100 | 0 | 0 | 0 | 0 | 0 | 0 |
| BRAWH2007591 | 40.796 | 0 | 11.117 | 16.008 | 0 | 0 | 3.480 |
| BRAWH2007605 | 6.154 | 0 | 0 | 6.278 | 0 | 0 | 9.099 |
| BRAWH2007658 | 58.101 | 0 | 0 | 0 | 0 | 41.899 | 0 |
| BRAWH2007664 | 10.232 | 23.474 | 0 | 0 | 0 | 0 | 0 |
| BRAWH2007800 | 2.349 | 0 | 0 | 0 | 0 | 0 | 2.605 |
| BRAWH2007808 | 37.485 | 0 | 0 | 0 | 0 | 0 | 0 |
| BRAWH2007825 | 58.488 | 0 | 0 | 0 | 0 | 0 | 0 |
| BRAWH2007862 | 100 | 0 | 0 | 0 | 0 | 0 | 0 |
| BRAWH2007890 | 100 | 0 | 0 | 0 | 0 | 0 | 0 |
| BRAWH2008058 | 23.426 | 0 | 0 | 0 | 0 | 0 | 0 |
| BRAWH2008128 | 22.081 | 0 | 0 | 0 | 0 | 0 | 0 |
| BRAWH2008219 | 14.410 | 0 | 0 | 0 | 0 | 0 | 0 |
| BRAWH2008255 | 4.225 | 0 | 0 | 0 | 0 | 0 | 0 |
| BRAWH2008292 | 36.501 | 0 | 0 | 0 | 0 | 0 | 0 |
| BRAWH2008297 | 100 | 0 | 0 | 0 | 0 | 0 | 0 |
| BRAWH2008366 | 12.752 | 0 | 0 | 0 | 0 | 0 | 0 |
| BRAWH2008380 | 100 | 0 | 0 | 0 | 0 | 0 | 0 |
| BRAWH2008540 | 54.530 | 0 | 0 | 0 | 0 | 0 | 0 |
| BRAWH2008577 | 3.555 | 0 | 0 | 0 | 0 | 0 | 0 |
| BRAWH2008706 | 28.755 | 0 | 0 | 14.668 | 0 | 0 | 3.189 |
| BRAWH2008790 | 100 | 0 | 0 | 0 | 0 | 0 | 0 |
| BRAWH2008903 | 16.913 | 19.401 | 0 | 12.941 | 0 | 0 | 28.133 |
| BRAWH2008956 | 15.570 | 0 | 0 | 15.885 | 0 | 0 | 0 |
| BRAWH2008993 | 49.811 | 0 | 0 | 0 | 0 | 0 | 0 |
| BRAWH2009112 | 100 | 0 | 0 | 0 | 0 | 0 | 0 |
| BRAWH2009227 | 15.805 | 0 | 0 | 0 | 0 | 0 | 0 |
| BRAWH2009238 | 26.065 | 0 | 0 | 21.274 | 0 | 0 | 17.343 |
| BRAWH2009261 | 100 | 0 | 0 | 0 | 0 | 0 | 0 |
| BRAWH2009263 | 100 | 0 | 0 | 0 | 0 | 0 | 0 |
| BRAWH2009298 | 100 | 0 | 0 | 0 | 0 | 0 | 0 |
| BRAWH2009304 | 3.922 | 0 | 13.895 | 0 | 0 | 0 | 8.699 |
| BRAWH2009307 | 3.982 | 0 | 0 | 2.031 | 0 | 0 | 4.416 |
| BRAWH2009360 | 8.653 | 0 | 30.656 | 0 | 0 | 0 | 0 |
| BRAWH2009393 | 100 | 0 | 0 | 0 | 0 | 0 | 0 |
| BRAWH2009485 | 100 | 0 | 0 | 0 | 0 | 0 | 0 |
| BRAWH2009490 | 3.383 | 0 | 0 | 0 | 0 | 12.199 | 0 |
| BRAWH2009558 | 100 | 0 | 0 | 0 | 0 | 0 | 0 |
| BRAWH2009590 | 100 | 0 | 0 | 0 | 0 | 0 | 0 |
| BRAWH2009626 | 44.597 | 0 | 0 | 0 | 0 | 0 | 0 |
| BRAWH2009678 | 21.269 | 0 | 0 | 0 | 0 | 0 | 0 |
| BRAWH2009695 | 26.755 | 0 | 0 | 27.297 | 0 | 0 | 0 |
| BRAWH2009907 | 100 | 0 | 0 | 0 | 0 | 0 | 0 |
| BRAWH2010000 | 18.745 | 43.006 | 0 | 38.249 | 0 | 0 | 0 |
| BRAWH2010069 | 100 | 0 | 0 | 0 | 0 | 0 | 0 |
| BRAWH2010084 | 100 | 0 | 0 | 0 | 0 | 0 | 0 |
| BRAWH2010136 | 26.404 | 0 | 0 | 0 | 0 | 0 | 0 |
| BRAWH2010318 | 100 | 0 | 0 | 0 | 0 | 0 | 0 |
| BRAWH2010329 | 20.017 | 0 | 0 | 15.317 | 0 | 0 | 11.099 |
| BRAWH2010354 | 12.977 | 29.773 | 0 | 0 | 0 | 0 | 0 |
| BRAWH2010364 | 34.464 | 0 | 0 | 17.581 | 0 | 0 | 0 |
| BRAWH2010536 | 14.718 | 0 | 0 | 0 | 0 | 0 | 0 |
| BRAWH2010552 | 58.488 | 0 | 0 | 0 | 0 | 0 | 0 |
| BRAWH2010584 | 30.356 | 69.644 | 0 | 0 | 0 | 0 | 0 |
| BRAWH2010618 | 100 | 0 | 0 | 0 | 0 | 0 | 0 |
| BRAWH2010619 | 100 | 0 | 0 | 0 | 0 | 0 | 0 |
| BRAWH2010754 | 11.186 | 0 | 0 | 0 | 0 | 40.334 | 0 |
| BRAWH2010980 | 7.066 | 0 | 0 | 0 | 0 | 0 | 0 |
| BRAWH2011066 | 21.178 | 0 | 0 | 0 | 78.822 | 0 | 0 |
| BRAWH2011079 | 100 | 0 | 0 | 0 | 0 | 0 | 0 |
| BRAWH2011096 | 54.530 | 0 | 0 | 0 | 0 | 0 | 0 |
| BRAWH2011155 | 100 | 0 | 0 | 0 | 0 | 0 | 0 |
| BRAWH2011166 | 100 | 0 | 0 | 0 | 0 | 0 | 0 |
| BRAWH2011204 | 49.811 | 0 | 0 | 0 | 0 | 0 | 0 |
| BRAWH2011286 | 8.924 | 0 | 0 | 0 | 0 | 0 | 0 |
| BRAWH2011294 | 100 | 0 | 0 | 0 | 0 | 0 | 0 |
| BRAWH2011343 | 7.015 | 0 | 0 | 7.157 | 0 | 0 | 7.779 |
| BRAWH2011400 | 100 | 0 | 0 | 0 | 0 | 0 | 0 |
| BRAWH2011762 | 100 | 0 | 0 | 0 | 0 | 0 | 0 |
| BRAWH2011795 | 100 | 0 | 0 | 0 | 0 | 0 | 0 |
| BRAWH2011796 | 100 | 0 | 0 | 0 | 0 | 0 | 0 |
| BRAWH2011812 | 13.544 | 0 | 0 | 0 | 0 | 0 | 0 |
| BRAWH2011823 | 21.626 | 0 | 0 | 0 | 0 | 0 | 0 |
| BRAWH2011860 | 100 | 0 | 0 | 0 | 0 | 0 | 0 |
| BRAWH2011920 | 18.948 | 0 | 0 | 19.331 | 0 | 0 | 0 |
| BRAWH2011958 | 100 | 0 | 0 | 0 | 0 | 0 | 0 |
| BRAWH2012054 | 100 | 0 | 0 | 0 | 0 | 0 | 0 |
| BRAWH2012077 | 12.529 | 0 | 0 | 0 | 0 | 0 | 0 |
| BRAWH2012161 | 3.850 | 0 | 0 | 0 | 0 | 0 | 0 |
| BRAWH2012162 | 36.060 | 0 | 0 | 0 | 0 | 0 | 0 |
| BRAWH2012164 | 20.835 | 0 | 0 | 0 | 0 | 0 | 0 |
| BRAWH2012258 | 100 | 0 | 0 | 0 | 0 | 0 | 0 |
| BRAWH2012277 | 28.630 | 0 | 0 | 0 | 0 | 0 | 0 |
| BRAWH2012326 | 100 | 0 | 0 | 0 | 0 | 0 | 0 |
| BRAWH2012538 | 10.145 | 0 | 0 | 0 | 18.880 | 0 | 0 |
| BRAWH2012540 | 100 | 0 | 0 | 0 | 0 | 0 | 0 |
| BRAWH2012619 | 100 | 0 | 0 | 0 | 0 | 0 | 0 |
| BRAWH2012698 | 19.174 | 0 | 0 | 0 | 0 | 0 | 0 |
| BRAWH2012749 | 100 | 0 | 0 | 0 | 0 | 0 | 0 |
| BRAWH2012827 | 8.993 | 0 | 31.859 | 0 | 33.472 | 0 | 0 |
| BRAWH2012866 | 8.503 | 0 | 0 | 4.337 | 0 | 7.665 | 11.786 |
| BRAWH2012963 | 100 | 0 | 0 | 0 | 0 | 0 | 0 |
| BRAWH2013047 | 18.786 | 0 | 0 | 0 | 0 | 0 | 0 |
| BRAWH2013219 | 19.375 | 0 | 0 | 0 | 0 | 0 | 0 |
| BRAWH2013294 | 39.442 | 0 | 0 | 10.060 | 0 | 0 | 0 |
| BRAWH2013748 | 2.669 | 6.123 | 9.455 | 2.723 | 9.934 | 0 | 2.960 |
| BRAWH2013866 | 100 | 0 | 0 | 0 | 0 | 0 | 0 |
| BRAWH2013871 | 37.485 | 0 | 0 | 0 | 0 | 0 | 0 |
| BRAWH2013914 | 47.417 | 0 | 0 | 0 | 0 | 0 | 52.583 |
| BRAWH2013941 | 100 | 0 | 0 | 0 | 0 | 0 | 0 |
| BRAWH2013955 | 100 | 0 | 0 | 0 | 0 | 0 | 0 |
| BRAWH2014053 | 23.222 | 0 | 0 | 0 | 0 | 0 | 25.752 |
| BRAWH2014188 | 2.148 | 0 | 0 | 3.652 | 0 | 0 | 0.794 |
| BRAWH2014234 | 100 | 0 | 0 | 0 | 0 | 0 | 0 |
| BRAWH2014379 | 62.276 | 0 | 0 | 0 | 0 | 0 | 0 |
| BRAWH2014414 | 17.865 | 0 | 0 | 18.227 | 0 | 0 | 9.906 |
| BRAWH2014473 | 45.606 | 0 | 0 | 0 | 0 | 0 | 0 |
| BRAWH2014511 | 4.297 | 9.858 | 30.443 | 0 | 0 | 15.493 | 0 |
| BRAWH2014645 | 4.228 | 0 | 3.745 | 1.078 | 0 | 0 | 1.172 |
| BRAWH2014662 | 15.521 | 0 | 0 | 0 | 0 | 0 | 17.212 |
| BRAWH2014717 | 100 | 0 | 0 | 0 | 0 | 0 | 0 |
| BRAWH2014729 | 100 | 0 | 0 | 0 | 0 | 0 | 0 |
| BRAWH2014876 | 10.473 | 24.026 | 0 | 0 | 0 | 0 | 58.068 |
| BRAWH2014934 | 35.975 | 0 | 0 | 0 | 0 | 0 | 0 |
| BRAWH2014954 | 58.488 | 0 | 0 | 0 | 0 | 0 | 0 |
| BRAWH2015247 | 10.440 | 0 | 0 | 0 | 0 | 0 | 11.577 |
| BRAWH2015349 | 21.997 | 0 | 0 | 0 | 0 | 39.658 | 0 |
| BRAWH2015375 | 100 | 0 | 0 | 0 | 0 | 0 | 0 |
| BRAWH2015385 | 58.488 | 0 | 0 | 0 | 0 | 0 | 0 |
| BRAWH2015595 | 100 | 0 | 0 | 0 | 0 | 0 | 0 |
| BRAWH2015728 | 49.811 | 0 | 0 | 0 | 0 | 0 | 0 |
| BRAWH2015853 | 100 | 0 | 0 | 0 | 0 | 0 | 0 |
| BRAWH2015866 | 100 | 0 | 0 | 0 | 0 | 0 | 0 |
| BRAWH2016028 | 49.811 | 0 | 0 | 0 | 0 | 0 | 0 |
| BRAWH2016106 | 36.501 | 0 | 0 | 0 | 0 | 0 | 0 |
| BRAWH2016160 | 100 | 0 | 0 | 0 | 0 | 0 | 0 |
| BRAWH2016166 | 22.688 | 0 | 0 | 7.716 | 0 | 0 | 0 |
| BRAWH2016209 | 8.306 | 0 | 0 | 0 | 0 | 0 | 0 |
| BRAWH2016221 | 47.417 | 0 | 0 | 0 | 0 | 0 | 52.583 |
| BRAWH2016223 | 100 | 0 | 0 | 0 | 0 | 0 | 0 |
| BRAWH2016269 | 1.318 | 3.025 | 4.670 | 0 | 4.907 | 0 | 0 |
| BRAWH2016305 | 4.308 | 0 | 0 | 0 | 0 | 0 | 0 |
| BRAWH2016439 | 100 | 0 | 0 | 0 | 0 | 0 | 0 |
| BRAWH2016446 | 8.700 | 0 | 0 | 0 | 0 | 0 | 0 |
| BRAWH2016514 | 35.037 | 0 | 0 | 35.747 | 0 | 0 | 0 |
| BRAWH2016562 | 49.499 | 0 | 0 | 50.501 | 0 | 0 | 0 |
| BRAWH2016655 | 100 | 0 | 0 | 0 | 0 | 0 | 0 |
| BRAWH2016679 | 9.636 | 0 | 0 | 0 | 0 | 0 | 0 |
| BRAWH2016702 | 73.807 | 0 | 0 | 0 | 0 | 0 | 0 |
| BRAWH2016724 | 35.119 | 0 | 0 | 0 | 0 | 0 | 0 |
| BRAWH2016785 | 100 | 0 | 0 | 0 | 0 | 0 | 0 |
| BRAWH2016792 | 100 | 0 | 0 | 0 | 0 | 0 | 0 |
| BRAWH2016800 | 100 | 0 | 0 | 0 | 0 | 0 | 0 |
| BRAWH2017002 | 2.488 | 0 | 0 | 2.539 | 0 | 8.973 | 0 |
| BRAWH2017103 | 100 | 0 | 0 | 0 | 0 | 0 | 0 |
| BRAWH2017250 | 100 | 0 | 0 | 0 | 0 | 0 | 0 |
| BRAWH2017294 | 47.417 | 0 | 0 | 0 | 0 | 0 | 52.583 |
| BRAWH2017304 | 16.605 | 0 | 0 | 0 | 0 | 0 | 0 |
| BRAWH2017305 | 100 | 0 | 0 | 0 | 0 | 0 | 0 |
| BRAWH2017379 | 15.195 | 0 | 0 | 0 | 0 | 0 | 16.850 |
| BRAWH2017407 | 100 | 0 | 0 | 0 | 0 | 0 | 0 |
| BRAWH2017433 | 100 | 0 | 0 | 0 | 0 | 0 | 0 |
| BRAWH2017523 | 100 | 0 | 0 | 0 | 0 | 0 | 0 |
| BRAWH2017534 | 100 | 0 | 0 | 0 | 0 | 0 | 0 |
| BRAWH2017542 | 35.119 | 0 | 0 | 0 | 0 | 0 | 0 |
| BRAWH2017635 | 100 | 0 | 0 | 0 | 0 | 0 | 0 |
| BRAWH2017685 | 1.522 | 1.164 | 0 | 0.518 | 0 | 0 | 1.126 |
| BRAWH2017913 | 100 | 0 | 0 | 0 | 0 | 0 | 0 |
| BRAWH2018206 | 11.051 | 0 | 0 | 11.275 | 0 | 0 | 36.766 |
| BRAWH2018267 | 41.331 | 0 | 0 | 21.084 | 0 | 0 | 22.917 |
| BRAWH2018282 | 100 | 0 | 0 | 0 | 0 | 0 | 0 |
| BRAWH2018317 | 100 | 0 | 0 | 0 | 0 | 0 | 0 |
| BRAWH2018506 | 100 | 0 | 0 | 0 | 0 | 0 | 0 |
| BRAWH2018514 | 100 | 0 | 0 | 0 | 0 | 0 | 0 |
| BRAWH2018526 | 0.615 | 1.412 | 2.180 | 0.628 | 0 | 0 | 0.341 |
| BRAWH2018527 | 8.512 | 0 | 0 | 0 | 0 | 0 | 0 |
| BRAWH2018601 | 100 | 0 | 0 | 0 | 0 | 0 | 0 |
| BRAWH2018729 | 2.980 | 0 | 0 | 0 | 0 | 0 | 0 |
| BRAWH2018745 | 45.606 | 0 | 0 | 0 | 0 | 0 | 0 |
| BRAWH2018875 | 52.989 | 0 | 0 | 13.515 | 0 | 0 | 14.691 |
| BRAWH2019053 | 100 | 0 | 0 | 0 | 0 | 0 | 0 |
| BRAWH2019055 | 100 | 0 | 0 | 0 | 0 | 0 | 0 |
| BRAWH2019198 | 100 | 0 | 0 | 0 | 0 | 0 | 0 |
| BRAWH3000078 | 100 | 0 | 0 | 0 | 0 | 0 | 0 |
| BRAWH3000088 | 5.784 | 0 | 4.098 | 4.721 | 4.306 | 4.171 | 10.263 |
| BRAWH3000100 | 100 | 0 | 0 | 0 | 0 | 0 | 0 |
| BRAWH3000166 | 100 | 0 | 0 | 0 | 0 | 0 | 0 |
| BRAWH3000314 | 71.553 | 0 | 0 | 0 | 0 | 0 | 0 |
| BRAWH3000329 | 100 | 0 | 0 | 0 | 0 | 0 | 0 |
| BRAWH3000410 | 100 | 0 | 0 | 0 | 0 | 0 | 0 |
| BRAWH3000446 | 100 | 0 | 0 | 0 | 0 | 0 | 0 |
| BRAWH3000491 | 100 | 0 | 0 | 0 | 0 | 0 | 0 |
| BRAWH3000604 | 54.530 | 0 | 0 | 0 | 0 | 0 | 0 |
| BRAWH3000884 | 100 | 0 | 0 | 0 | 0 | 0 | 0 |
| BRAWH3001053 | 100 | 0 | 0 | 0 | 0 | 0 | 0 |
| BRAWH3001319 | 27.294 | 0 | 0 | 0 | 0 | 0 | 0 |
| BRAWH3001326 | 45.606 | 0 | 0 | 0 | 0 | 0 | 0 |
| BRAWH3001475 | 100 | 0 | 0 | 0 | 0 | 0 | 0 |
| BRAWH3001636 | 100 | 0 | 0 | 0 | 0 | 0 | 0 |
| BRAWH3001638 | 100 | 0 | 0 | 0 | 0 | 0 | 0 |
| BRAWH3001712 | 49.499 | 0 | 0 | 50.501 | 0 | 0 | 0 |
| BRAWH3001760 | 100 | 0 | 0 | 0 | 0 | 0 | 0 |
| BRAWH3001783 | 100 | 0 | 0 | 0 | 0 | 0 | 0 |
| BRAWH3001833 | 100 | 0 | 0 | 0 | 0 | 0 | 0 |
| BRAWH3001879 | 100 | 0 | 0 | 0 | 0 | 0 | 0 |
| BRAWH3001891 | 34.539 | 0 | 0 | 0 | 0 | 0 | 0 |
| BRAWH3001918 | 27.772 | 0 | 0 | 0 | 0 | 0 | 0 |
| BRAWH3002433 | 47.417 | 0 | 0 | 0 | 0 | 0 | 52.583 |
| BRAWH3002467 | 36.501 | 0 | 0 | 0 | 0 | 0 | 0 |
| BRAWH3002513 | 100 | 0 | 0 | 0 | 0 | 0 | 0 |
| BRAWH3002574 | 13.222 | 0 | 0 | 0 | 0 | 0 | 0 |
| BRAWH3002600 | 36.800 | 0 | 0 | 0 | 0 | 0 | 0 |
| BRAWH3002819 | 100 | 0 | 0 | 0 | 0 | 0 | 0 |
| BRAWH3002853 | 2.959 | 0 | 2.620 | 1.509 | 2.753 | 0 | 4.922 |
| BRAWH3003019 | 100 | 0 | 0 | 0 | 0 | 0 | 0 |
| BRAWH3003136 | 100 | 0 | 0 | 0 | 0 | 0 | 0 |
| BRAWH3003244 | 100 | 0 | 0 | 0 | 0 | 0 | 0 |
| BRAWH3003343 | 100 | 0 | 0 | 0 | 0 | 0 | 0 |
| BRAWH3003411 | 46.281 | 0 | 0 | 0 | 0 | 0 | 0 |
| BRAWH3003522 | 100 | 0 | 0 | 0 | 0 | 0 | 0 |
| BRAWH3003573 | 20.162 | 0 | 0 | 0 | 0 | 0 | 22.358 |
| BRAWH3003598 | 100 | 0 | 0 | 0 | 0 | 0 | 0 |
| BRAWH3003727 | 10.055 | 0 | 0 | 10.259 | 0 | 0 | 0 |
| BRAWH3003801 | 100 | 0 | 0 | 0 | 0 | 0 | 0 |
| BRAWH3003975 | 100 | 0 | 0 | 0 | 0 | 0 | 0 |
| BRAWH3004222 | 44.597 | 0 | 0 | 0 | 0 | 0 | 0 |
| BRAWH3004335 | 100 | 0 | 0 | 0 | 0 | 0 | 0 |
| BRAWH3004350 | 16.580 | 0 | 0 | 0 | 0 | 0 | 18.386 |
| BRAWH3004453 | 100 | 0 | 0 | 0 | 0 | 0 | 0 |
| BRAWH3004530 | 17.640 | 0 | 0 | 17.997 | 0 | 0 | 19.562 |
| BRAWH3004666 | 49.499 | 0 | 0 | 50.501 | 0 | 0 | 0 |
| BRAWH3005037 | 100 | 0 | 0 | 0 | 0 | 0 | 0 |
| BRAWH3005047 | 100 | 0 | 0 | 0 | 0 | 0 | 0 |
| BRAWH3005132 | 49.811 | 0 | 0 | 0 | 0 | 0 | 0 |
| BRAWH3005146 | 10.127 | 0 | 0 | 10.331 | 0 | 0 | 5.615 |
| BRAWH3005292 | 100 | 0 | 0 | 0 | 0 | 0 | 0 |
| BRAWH3005300 | 47.167 | 0 | 0 | 0 | 0 | 0 | 0 |
| BRAWH3005422 | 100 | 0 | 0 | 0 | 0 | 0 | 0 |
| BRAWH3005534 | 100 | 0 | 0 | 0 | 0 | 0 | 0 |
| BRAWH3005886 | 100 | 0 | 0 | 0 | 0 | 0 | 0 |
| BRAWH3005892 | 100 | 0 | 0 | 0 | 0 | 0 | 0 |
| BRAWH3005896 | 100 | 0 | 0 | 0 | 0 | 0 | 0 |
| BRAWH3005912 | 100 | 0 | 0 | 0 | 0 | 0 | 0 |
| BRAWH3005981 | 29.324 | 0 | 0 | 0 | 0 | 0 | 0 |
| BRAWH3006547 | 100 | 0 | 0 | 0 | 0 | 0 | 0 |
| BRAWH3006548 | 71.018 | 0 | 0 | 28.982 | 0 | 0 | 0 |
| BRAWH3006761 | 21.269 | 0 | 0 | 43.398 | 0 | 0 | 0 |
| BRAWH3006792 | 49.499 | 0 | 0 | 50.501 | 0 | 0 | 0 |
| BRAWH3007129 | 29.521 | 0 | 0 | 10.040 | 0 | 0 | 10.913 |
| BRAWH3007221 | 100 | 0 | 0 | 0 | 0 | 0 | 0 |
| BRAWH3007441 | 100 | 0 | 0 | 0 | 0 | 0 | 0 |
| BRAWH3007455 | 100 | 0 | 0 | 0 | 0 | 0 | 0 |
| BRAWH3007506 | 100 | 0 | 0 | 0 | 0 | 0 | 0 |
| BRAWH3007726 | 54.530 | 0 | 0 | 0 | 0 | 0 | 0 |
| BRAWH3007783 | 100 | 0 | 0 | 0 | 0 | 0 | 0 |
| BRAWH3008167 | 100 | 0 | 0 | 0 | 0 | 0 | 0 |
| BRAWH3008341 | 100 | 0 | 0 | 0 | 0 | 0 | 0 |
| BRAWH3008559 | 100 | 0 | 0 | 0 | 0 | 0 | 0 |
| BRAWH3008697 | 100 | 0 | 0 | 0 | 0 | 0 | 0 |
| BRAWH3008867 | 100 | 0 | 0 | 0 | 0 | 0 | 0 |
| BRAWH3008931 | 3.463 | 15.892 | 0 | 10.601 | 12.891 | 0 | 0 |
| BRAWH3009017 | 100 | 0 | 0 | 0 | 0 | 0 | 0 |
| BRAWH3009285 | 73.807 | 0 | 0 | 0 | 0 | 0 | 0 |
| BRAWH3009297 | 58.488 | 0 | 0 | 0 | 0 | 0 | 0 |
| BRAWH3009546 | 70.717 | 0 | 0 | 0 | 0 | 0 | 0 |
| BRAWH3009961 | 47.417 | 0 | 0 | 0 | 0 | 0 | 52.583 |
| BRAWH3010461 | 16.435 | 0 | 7.278 | 8.384 | 7.646 | 0 | 11.391 |
| BRAWH3010560 | 100 | 0 | 0 | 0 | 0 | 0 | 0 |
| BRAWH3010602 | 100 | 0 | 0 | 0 | 0 | 0 | 0 |
| BRAWH3010657 | 100 | 0 | 0 | 0 | 0 | 0 | 0 |
| BRAWH3010726 | 100 | 0 | 0 | 0 | 0 | 0 | 0 |
| BRAWH3010833 | 100 | 0 | 0 | 0 | 0 | 0 | 0 |
| BRAWH3011101 | 100 | 0 | 0 | 0 | 0 | 0 | 0 |
| BRAWH3011331 | 100 | 0 | 0 | 0 | 0 | 0 | 0 |
| BRAWH3011402 | 100 | 0 | 0 | 0 | 0 | 0 | 0 |
| BRAWH3011577 | 100 | 0 | 0 | 0 | 0 | 0 | 0 |
| BRAWH3011623 | 100 | 0 | 0 | 0 | 0 | 0 | 0 |
| BRAWH3011637 | 30.862 | 0 | 0 | 0 | 0 | 0 | 0 |
| BRAWH3011685 | 100 | 0 | 0 | 0 | 0 | 0 | 0 |
| BRAWH3011907 | 47.417 | 0 | 0 | 0 | 0 | 0 | 52.583 |
| BRAWH3011929 | 100 | 0 | 0 | 0 | 0 | 0 | 0 |
| BRAWH3012005 | 100 | 0 | 0 | 0 | 0 | 0 | 0 |
| BRAWH3012662 | 33.972 | 0 | 0 | 11.553 | 0 | 0 | 12.558 |
| BRAWH3012779 | 100 | 0 | 0 | 0 | 0 | 0 | 0 |
| BRAWH3013009 | 100 | 0 | 0 | 0 | 0 | 0 | 0 |
| BRAWH3013049 | 100 | 0 | 0 | 0 | 0 | 0 | 0 |
| BRAWH3013197 | 100 | 0 | 0 | 0 | 0 | 0 | 0 |
| BRAWH3013264 | 100 | 0 | 0 | 0 | 0 | 0 | 0 |
| BRAWH3013508 | 100 | 0 | 0 | 0 | 0 | 0 | 0 |
| BRAWH3014609 | 44.597 | 0 | 0 | 0 | 0 | 0 | 0 |
| BRAWH3014639 | 100 | 0 | 0 | 0 | 0 | 0 | 0 |
| BRAWH3015017 | 100 | 0 | 0 | 0 | 0 | 0 | 0 |
| BRAWH3015175 | 100 | 0 | 0 | 0 | 0 | 0 | 0 |
| BRAWH3015260 | 100 | 0 | 0 | 0 | 0 | 0 | 0 |
| BRAWH3015610 | 100 | 0 | 0 | 0 | 0 | 0 | 0 |
| BRAWH3015825 | 100 | 0 | 0 | 0 | 0 | 0 | 0 |
| BRAWH3016123 | 100 | 0 | 0 | 0 | 0 | 0 | 0 |
| BRAWH3016271 | 5.394 | 12.374 | 0 | 0 | 0 | 0 | 0 |
| BRAWH3016715 | 100 | 0 | 0 | 0 | 0 | 0 | 0 |
| BRAWH3017259 | 13.996 | 0 | 0 | 0 | 0 | 0 | 0 |
| BRAWH3017260 | 100 | 0 | 0 | 0 | 0 | 0 | 0 |
| BRAWH3017477 | 100 | 0 | 0 | 0 | 0 | 0 | 0 |
| BRAWH3017537 | 100 | 0 | 0 | 0 | 0 | 0 | 0 |
| BRAWH3017980 | 49.811 | 0 | 0 | 0 | 0 | 0 | 0 |
| BRAWH3018063 | 15.836 | 0 | 0 | 0 | 0 | 0 | 0 |
| BRAWH3018369 | 100 | 0 | 0 | 0 | 0 | 0 | 0 |
| BRAWH3018548 | 100 | 0 | 0 | 0 | 0 | 0 | 0 |
| BRAWH3018969 | 100 | 0 | 0 | 0 | 0 | 0 | 0 |
| BRAWH3019026 | 100 | 0 | 0 | 0 | 0 | 0 | 0 |
| BRAWH3019529 | 100 | 0 | 0 | 0 | 0 | 0 | 0 |
| BRAWH3019594 | 100 | 0 | 0 | 0 | 0 | 0 | 0 |
| BRAWH3019629 | 100 | 0 | 0 | 0 | 0 | 0 | 0 |
| BRAWH3019820 | 100 | 0 | 0 | 0 | 0 | 0 | 0 |
| BRAWH3020200 | 100 | 0 | 0 | 0 | 0 | 0 | 0 |
| BRAWH3020318 | 100 | 0 | 0 | 0 | 0 | 0 | 0 |
| BRAWH3020486 | 100 | 0 | 0 | 0 | 0 | 0 | 0 |
| BRAWH3020884 | 100 | 0 | 0 | 0 | 0 | 0 | 0 |
| BRAWH3020928 | 49.499 | 0 | 0 | 50.501 | 0 | 0 | 0 |
| BRAWH3021012 | 100 | 0 | 0 | 0 | 0 | 0 | 0 |
| BRAWH3021545 | 7.296 | 0 | 0 | 3.722 | 0 | 0 | 0 |
| BRAWH3021574 | 9.400 | 0 | 0 | 0 | 17.492 | 0 | 0 |
| BRAWH3021580 | 100 | 0 | 0 | 0 | 0 | 0 | 0 |
| BRAWH3021641 | 100 | 0 | 0 | 0 | 0 | 0 | 0 |
| BRAWH3021643 | 100 | 0 | 0 | 0 | 0 | 0 | 0 |
| BRAWH3021724 | 100 | 0 | 0 | 0 | 0 | 0 | 0 |
| BRAWH3022347 | 100 | 0 | 0 | 0 | 0 | 0 | 0 |
| BRAWH3022431 | 100 | 0 | 0 | 0 | 0 | 0 | 0 |
| BRAWH3022459 | 100 | 0 | 0 | 0 | 0 | 0 | 0 |
| BRAWH3022542 | 100 | 0 | 0 | 0 | 0 | 0 | 0 |
| BRAWH3022719 | 100 | 0 | 0 | 0 | 0 | 0 | 0 |
| BRAWH3022866 | 100 | 0 | 0 | 0 | 0 | 0 | 0 |
| BRAWH3022900 | 100 | 0 | 0 | 0 | 0 | 0 | 0 |
| BRAWH3023156 | 100 | 0 | 0 | 0 | 0 | 0 | 0 |
| BRAWH3023168 | 100 | 0 | 0 | 0 | 0 | 0 | 0 |
| BRAWH3023172 | 0.916 | 2.101 | 0 | 1.869 | 0 | 3.302 | 2.031 |
| BRAWH3023274 | 100 | 0 | 0 | 0 | 0 | 0 | 0 |
| BRAWH3023421 | 100 | 0 | 0 | 0 | 0 | 0 | 0 |
| BRAWH3024231 | 100 | 0 | 0 | 0 | 0 | 0 | 0 |
| BRAWH3024242 | 31.843 | 0 | 0 | 32.488 | 0 | 0 | 0 |
| BRAWH3024469 | 100 | 0 | 0 | 0 | 0 | 0 | 0 |
| BRAWH3024506 | 100 | 0 | 0 | 0 | 0 | 0 | 0 |
| BRAWH3024613 | 100 | 0 | 0 | 0 | 0 | 0 | 0 |
| BRAWH3024989 | 2.369 | 0 | 0 | 4.834 | 0 | 0 | 0 |
| BRAWH3026349 | 100 | 0 | 0 | 0 | 0 | 0 | 0 |
| BRAWH3026394 | 100 | 0 | 0 | 0 | 0 | 0 | 0 |
| BRAWH3026529 | 45.606 | 0 | 0 | 0 | 0 | 0 | 0 |
| BRAWH3027420 | 100 | 0 | 0 | 0 | 0 | 0 | 0 |
| BRAWH3027440 | 58.488 | 0 | 0 | 0 | 0 | 0 | 0 |
| BRAWH3027533 | 11.008 | 0 | 0 | 0 | 0 | 0 | 0 |
| BRAWH3027574 | 47.417 | 0 | 0 | 0 | 0 | 0 | 52.583 |
| BRAWH3027607 | 100 | 0 | 0 | 0 | 0 | 0 | 0 |
| BRAWH3027616 | 100 | 0 | 0 | 0 | 0 | 0 | 0 |
| BRAWH3027675 | 100 | 0 | 0 | 0 | 0 | 0 | 0 |
| BRAWH3027806 | 100 | 0 | 0 | 0 | 0 | 0 | 0 |
| BRAWH3027880 | 100 | 0 | 0 | 0 | 0 | 0 | 0 |
| BRAWH3027927 | 100 | 0 | 0 | 0 | 0 | 0 | 0 |
| BRAWH3028202 | 100 | 0 | 0 | 0 | 0 | 0 | 0 |
| BRAWH3028223 | 100 | 0 | 0 | 0 | 0 | 0 | 0 |
| BRAWH3028306 | 100 | 0 | 0 | 0 | 0 | 0 | 0 |
| BRAWH3028461 | 100 | 0 | 0 | 0 | 0 | 0 | 0 |
| BRAWH3028645 | 100 | 0 | 0 | 0 | 0 | 0 | 0 |
| BRAWH3028754 | 100 | 0 | 0 | 0 | 0 | 0 | 0 |
| BRAWH3028796 | 100 | 0 | 0 | 0 | 0 | 0 | 0 |
| BRAWH3029254 | 100 | 0 | 0 | 0 | 0 | 0 | 0 |
| BRAWH3029313 | 100 | 0 | 0 | 0 | 0 | 0 | 0 |
| BRAWH3029538 | 100 | 0 | 0 | 0 | 0 | 0 | 0 |
| BRAWH3029556 | 38.935 | 0 | 0 | 19.861 | 0 | 0 | 21.589 |
| BRAWH3029806 | 26.735 | 0 | 0 | 0 | 0 | 0 | 9.883 |
| BRAWH3030613 | 100 | 0 | 0 | 0 | 0 | 0 | 0 |
| BRAWH3030772 | 100 | 0 | 0 | 0 | 0 | 0 | 0 |
| BRAWH3030810 | 21.287 | 0 | 0 | 0 | 0 | 0 | 0 |
| BRAWH3030892 | 100 | 0 | 0 | 0 | 0 | 0 | 0 |
| BRAWH3030910 | 100 | 0 | 0 | 0 | 0 | 0 | 0 |
| BRAWH3030950 | 100 | 0 | 0 | 0 | 0 | 0 | 0 |
| BRAWH3031054 | 100 | 0 | 0 | 0 | 0 | 0 | 0 |
| BRAWH3031710 | 100 | 0 | 0 | 0 | 0 | 0 | 0 |
| BRAWH3031902 | 100 | 0 | 0 | 0 | 0 | 0 | 0 |
| BRAWH3032298 | 100 | 0 | 0 | 0 | 0 | 0 | 0 |
| BRAWH3032340 | 100 | 0 | 0 | 0 | 0 | 0 | 0 |
| BRAWH3032571 | 100 | 0 | 0 | 0 | 0 | 0 | 0 |
| BRAWH3032620 | 100 | 0 | 0 | 0 | 0 | 0 | 0 |
| BRAWH3032930 | 100 | 0 | 0 | 0 | 0 | 0 | 0 |
| BRAWH3033117 | 100 | 0 | 0 | 0 | 0 | 0 | 0 |
| BRAWH3033293 | 100 | 0 | 0 | 0 | 0 | 0 | 0 |
| BRAWH3033448 | 100 | 0 | 0 | 0 | 0 | 0 | 0 |
| BRAWH3033513 | 100 | 0 | 0 | 0 | 0 | 0 | 0 |
| BRAWH3034097 | 100 | 0 | 0 | 0 | 0 | 0 | 0 |
| BRAWH3034114 | 100 | 0 | 0 | 0 | 0 | 0 | 0 |
| BRAWH3034134 | 100 | 0 | 0 | 0 | 0 | 0 | 0 |
| BRAWH3034668 | 100 | 0 | 0 | 0 | 0 | 0 | 0 |
| BRAWH3034743 | 16.662 | 0 | 14.757 | 21.249 | 0 | 0 | 18.478 |
| BRAWH3034775 | 100 | 0 | 0 | 0 | 0 | 0 | 0 |
| BRAWH3034890 | 100 | 0 | 0 | 0 | 0 | 0 | 0 |
| BRAWH3035154 | 100 | 0 | 0 | 0 | 0 | 0 | 0 |
| BRAWH3035403 | 35.337 | 0 | 0 | 0 | 0 | 0 | 0 |
| BRAWH3035904 | 100 | 0 | 0 | 0 | 0 | 0 | 0 |
| BRAWH3035914 | 100 | 0 | 0 | 0 | 0 | 0 | 0 |
| BRAWH3035936 | 70.575 | 0 | 0 | 0 | 0 | 0 | 0 |
| BRAWH3036077 | 100 | 0 | 0 | 0 | 0 | 0 | 0 |
| BRAWH3036247 | 54.530 | 0 | 0 | 0 | 0 | 0 | 0 |
| BRAWH3036270 | 100 | 0 | 0 | 0 | 0 | 0 | 0 |
| BRAWH3036561 | 100 | 0 | 0 | 0 | 0 | 0 | 0 |
| BRAWH3036738 | 100 | 0 | 0 | 0 | 0 | 0 | 0 |
| BRAWH3036951 | 100 | 0 | 0 | 0 | 0 | 0 | 0 |
| BRAWH3037265 | 44.597 | 0 | 0 | 0 | 0 | 0 | 0 |
| BRAWH3037394 | 100 | 0 | 0 | 0 | 0 | 0 | 0 |
| BRAWH3037533 | 100 | 0 | 0 | 0 | 0 | 0 | 0 |
| BRAWH3037979 | 100 | 0 | 0 | 0 | 0 | 0 | 0 |
| BRAWH3038055 | 100 | 0 | 0 | 0 | 0 | 0 | 0 |
| BRAWH3038230 | 100 | 0 | 0 | 0 | 0 | 0 | 0 |
| BRAWH3038252 | 100 | 0 | 0 | 0 | 0 | 0 | 0 |
| BRAWH3038324 | 100 | 0 | 0 | 0 | 0 | 0 | 0 |
| BRCAN1000065 | 0 | 100 | 0 | 0 | 0 | 0 | 0 |
| BRCAN1000076 | 0 | 6.753 | 0 | 0 | 0 | 0 | 0 |
| BRCAN1000105 | 0 | 100 | 0 | 0 | 0 | 0 | 0 |
| BRCAN1000149 | 0 | 56.874 | 0 | 0 | 0 | 0 | 0 |
| BRCAN1000168 | 5.643 | 9.709 | 0 | 17.271 | 5.250 | 10.173 | 7.822 |
| BRCAN2000148 | 0 | 100 | 0 | 0 | 0 | 0 | 0 |
| BRCAN2000149 | 0 | 100 | 0 | 0 | 0 | 0 | 0 |
| BRCAN2000209 | 0 | 38.263 | 0 | 0 | 0 | 0 | 0 |
| BRCAN2000239 | 0 | 100 | 0 | 0 | 0 | 0 | 0 |
| BRCAN2000346 | 0 | 100 | 0 | 0 | 0 | 0 | 0 |
| BRCAN2000364 | 0 | 100 | 0 | 0 | 0 | 0 | 0 |
| BRCAN2000383 | 0 | 100 | 0 | 0 | 0 | 0 | 0 |
| BRCAN2000418 | 0 | 100 | 0 | 0 | 0 | 0 | 0 |
| BRCAN2000523 | 0 | 100 | 0 | 0 | 0 | 0 | 0 |
| BRCAN2000541 | 0 | 100 | 0 | 0 | 0 | 0 | 0 |
| BRCAN2000563 | 13.150 | 30.170 | 0 | 0 | 0 | 0 | 0 |
| BRCAN2000577 | 0 | 100 | 0 | 0 | 0 | 0 | 0 |
| BRCAN2000620 | 0 | 100 | 0 | 0 | 0 | 0 | 0 |
| BRCAN2000639 | 0 | 38.481 | 0 | 0 | 0 | 0 | 0 |
| BRCAN2000763 | 0 | 100 | 0 | 0 | 0 | 0 | 0 |
| BRCAN2000832 | 0 | 100 | 0 | 0 | 0 | 0 | 0 |
| BRCAN2000923 | 0 | 2.660 | 0 | 0 | 0 | 0 | 0 |
| BRCAN2001223 | 0 | 53.082 | 0 | 23.605 | 0 | 0 | 0 |
| BRCAN2001866 | 0 | 100 | 0 | 0 | 0 | 0 | 0 |
| BRCAN2002173 | 0 | 9.124 | 7.044 | 0 | 7.401 | 0 | 0 |
| BRCAN2002416 | 0 | 100 | 0 | 0 | 0 | 0 | 0 |
| BRCAN2002473 | 0 | 100 | 0 | 0 | 0 | 0 | 0 |
| BRCAN2002562 | 0 | 100 | 0 | 0 | 0 | 0 | 0 |
| BRCAN2002662 | 0 | 100 | 0 | 0 | 0 | 0 | 0 |
| BRCAN2002826 | 0 | 100 | 0 | 0 | 0 | 0 | 0 |
| BRCAN2002854 | 0 | 100 | 0 | 0 | 0 | 0 | 0 |
| BRCAN2002856 | 0 | 39.306 | 60.694 | 0 | 0 | 0 | 0 |
| BRCAN2002892 | 0 | 67.414 | 0 | 0 | 0 | 0 | 32.586 |
| BRCAN2002944 | 0 | 73.343 | 0 | 0 | 0 | 0 | 0 |
| BRCAN2002948 | 0 | 100 | 0 | 0 | 0 | 0 | 0 |
| BRCAN2003070 | 0 | 100 | 0 | 0 | 0 | 0 | 0 |
| BRCAN2003269 | 0 | 100 | 0 | 0 | 0 | 0 | 0 |
| BRCAN2003389 | 0 | 6.976 | 0 | 0 | 0 | 0 | 0 |
| BRCAN2003628 | 0 | 100 | 0 | 0 | 0 | 0 | 0 |
| BRCAN2003703 | 0 | 100 | 0 | 0 | 0 | 0 | 0 |
| BRCAN2003746 | 0 | 100 | 0 | 0 | 0 | 0 | 0 |
| BRCAN2003814 | 0 | 9.924 | 0 | 0 | 0 | 0 | 0 |
| BRCAN2003944 | 0.282 | 3.230 | 0.998 | 0 | 1.048 | 2.031 | 0.625 |
| BRCAN2003987 | 0 | 100 | 0 | 0 | 0 | 0 | 0 |
| BRCAN2004173 | 0 | 100 | 0 | 0 | 0 | 0 | 0 |
| BRCAN2004355 | 0 | 100 | 0 | 0 | 0 | 0 | 0 |
| BRCAN2004371 | 0 | 100 | 0 | 0 | 0 | 0 | 0 |
| BRCAN2004653 | 0 | 77.826 | 0 | 0 | 0 | 0 | 0 |
| BRCAN2004699 | 0 | 100 | 0 | 0 | 0 | 0 | 0 |
| BRCAN2005436 | 0 | 100 | 0 | 0 | 0 | 0 | 0 |
| BRCAN2005449 | 0 | 100 | 0 | 0 | 0 | 0 | 0 |
| BRCAN2006019 | 0 | 25.857 | 26.617 | 3.833 | 0 | 13.546 | 0 |
| BRCAN2006051 | 0 | 100 | 0 | 0 | 0 | 0 | 0 |
| BRCAN2006063 | 0 | 100 | 0 | 0 | 0 | 0 | 0 |
| BRCAN2006117 | 0 | 57.190 | 0 | 0 | 0 | 0 | 0 |
| BRCAN2006174 | 0 | 100 | 0 | 0 | 0 | 0 | 0 |
| BRCAN2006290 | 0 | 100 | 0 | 0 | 0 | 0 | 0 |
| BRCAN2006297 | 0 | 33.031 | 51.004 | 0 | 0 | 0 | 15.966 |
| BRCAN2006323 | 0 | 100 | 0 | 0 | 0 | 0 | 0 |
| BRCAN2006401 | 0 | 52.014 | 0 | 0 | 0 | 0 | 25.142 |
| BRCAN2006411 | 0 | 100 | 0 | 0 | 0 | 0 | 0 |
| BRCAN2006450 | 0 | 100 | 0 | 0 | 0 | 0 | 0 |
| BRCAN2006955 | 0 | 100 | 0 | 0 | 0 | 0 | 0 |
| BRCAN2007119 | 0 | 38.885 | 0 | 0 | 0 | 61.115 | 0 |
| BRCAN2007144 | 0 | 100 | 0 | 0 | 0 | 0 | 0 |
| BRCAN2007409 | 0 | 6.883 | 10.629 | 0 | 0 | 0 | 0 |
| BRCAN2007426 | 0 | 100 | 0 | 0 | 0 | 0 | 0 |
| BRCAN2007525 | 0 | 100 | 0 | 0 | 0 | 0 | 0 |
| BRCAN2007700 | 0 | 27.900 | 0 | 0 | 0 | 0 | 0 |
| BRCAN2008494 | 0 | 100 | 0 | 0 | 0 | 0 | 0 |
| BRCAN2008528 | 0 | 100 | 0 | 0 | 0 | 0 | 0 |
| BRCAN2008701 | 0 | 100 | 0 | 0 | 0 | 0 | 0 |
| BRCAN2008894 | 0 | 17.467 | 0 | 0 | 0 | 0 | 0 |
| BRCAN2009156 | 0 | 100 | 0 | 0 | 0 | 0 | 0 |
| BRCAN2009168 | 0 | 100 | 0 | 0 | 0 | 0 | 0 |
| BRCAN2009203 | 0 | 100 | 0 | 0 | 0 | 0 | 0 |
| BRCAN2009432 | 0 | 3.021 | 0 | 0 | 0 | 0 | 0 |
| BRCAN2010374 | 0 | 69.484 | 0 | 0 | 0 | 0 | 0 |
| BRCAN2010376 | 0 | 76.373 | 0 | 0 | 0 | 0 | 0 |
| BRCAN2010547 | 0 | 100 | 0 | 0 | 0 | 0 | 0 |
| BRCAN2010581 | 0 | 100 | 0 | 0 | 0 | 0 | 0 |
| BRCAN2010665 | 19.610 | 29.993 | 0 | 13.338 | 0 | 11.785 | 7.249 |
| BRCAN2011254 | 0 | 100 | 0 | 0 | 0 | 0 | 0 |
| BRCAN2011316 | 0 | 100 | 0 | 0 | 0 | 0 | 0 |
| BRCAN2011602 | 0 | 100 | 0 | 0 | 0 | 0 | 0 |
| BRCAN2011946 | 0 | 14.508 | 0 | 0 | 23.536 | 0 | 0 |
| BRCAN2012110 | 0 | 100 | 0 | 0 | 0 | 0 | 0 |
| BRCAN2012355 | 0 | 100 | 0 | 0 | 0 | 0 | 0 |
| BRCAN2012402 | 0 | 100 | 0 | 0 | 0 | 0 | 0 |
| BRCAN2012408 | 0 | 100 | 0 | 0 | 0 | 0 | 0 |
| BRCAN2012481 | 0 | 100 | 0 | 0 | 0 | 0 | 0 |
| BRCAN2012613 | 0 | 100 | 0 | 0 | 0 | 0 | 0 |
| BRCAN2012713 | 0 | 100 | 0 | 0 | 0 | 0 | 0 |
| BRCAN2012929 | 0 | 55.996 | 0 | 0 | 0 | 44.004 | 0 |
| BRCAN2013655 | 0 | 100 | 0 | 0 | 0 | 0 | 0 |
| BRCAN2013660 | 0 | 100 | 0 | 0 | 0 | 0 | 0 |
| BRCAN2014143 | 0 | 100 | 0 | 0 | 0 | 0 | 0 |
| BRCAN2014229 | 0 | 100 | 0 | 0 | 0 | 0 | 0 |
| BRCAN2014370 | 0 | 100 | 0 | 0 | 0 | 0 | 0 |
| BRCAN2014602 | 0 | 100 | 0 | 0 | 0 | 0 | 0 |
| BRCAN2014652 | 0 | 100 | 0 | 0 | 0 | 0 | 0 |
| BRCAN2014788 | 0 | 100 | 0 | 0 | 0 | 0 | 0 |
| BRCAN2014881 | 0 | 69.484 | 0 | 0 | 0 | 0 | 0 |
| BRCAN2014952 | 0 | 100 | 0 | 0 | 0 | 0 | 0 |
| BRCAN2015371 | 0 | 25.149 | 0 | 0 | 0 | 0 | 0 |
| BRCAN2015402 | 0 | 100 | 0 | 0 | 0 | 0 | 0 |
| BRCAN2015464 | 0 | 100 | 0 | 0 | 0 | 0 | 0 |
| BRCAN2015719 | 3.019 | 6.927 | 0 | 0 | 0 | 0 | 3.348 |
| BRCAN2015757 | 0 | 100 | 0 | 0 | 0 | 0 | 0 |
| BRCAN2015886 | 0 | 100 | 0 | 0 | 0 | 0 | 0 |
| BRCAN2016025 | 0 | 100 | 0 | 0 | 0 | 0 | 0 |
| BRCAN2016046 | 0 | 69.484 | 0 | 0 | 0 | 0 | 0 |
| BRCAN2016174 | 0 | 24.944 | 0 | 0 | 0 | 0 | 12.057 |
| BRCAN2016433 | 0 | 100 | 0 | 0 | 0 | 0 | 0 |
| BRCAN2016619 | 0 | 30.224 | 0 | 0 | 0 | 0 | 0 |
| BRCAN2016762 | 0 | 100 | 0 | 0 | 0 | 0 | 0 |
| BRCAN2016814 | 0 | 67.414 | 0 | 0 | 0 | 0 | 32.586 |
| BRCAN2017442 | 0 | 100 | 0 | 0 | 0 | 0 | 0 |
| BRCAN2017905 | 0 | 100 | 0 | 0 | 0 | 0 | 0 |
| BRCAN2018240 | 0 | 100 | 0 | 0 | 0 | 0 | 0 |
| BRCAN2018269 | 0 | 100 | 0 | 0 | 0 | 0 | 0 |
| BRCAN2018490 | 0 | 100 | 0 | 0 | 0 | 0 | 0 |
| BRCAN2018566 | 0 | 56.874 | 0 | 0 | 0 | 0 | 0 |
| BRCAN2018667 | 0 | 100 | 0 | 0 | 0 | 0 | 0 |
| BRCAN2018748 | 0 | 100 | 0 | 0 | 0 | 0 | 0 |
| BRCAN2018935 | 0 | 20.928 | 0 | 0 | 0 | 0 | 0 |
| BRCAN2019002 | 0 | 100 | 0 | 0 | 0 | 0 | 0 |
| BRCAN2019387 | 0 | 100 | 0 | 0 | 0 | 0 | 0 |
| BRCAN2019653 | 0 | 57.233 | 0 | 0 | 0 | 0 | 0 |
| BRCAN2019773 | 0 | 100 | 0 | 0 | 0 | 0 | 0 |
| BRCAN2019907 | 0 | 100 | 0 | 0 | 0 | 0 | 0 |
| BRCAN2020234 | 0 | 56.552 | 0 | 0 | 0 | 0 | 27.335 |
| BRCAN2020331 | 0 | 100 | 0 | 0 | 0 | 0 | 0 |
| BRCAN2020412 | 0 | 25.021 | 0 | 0 | 0 | 0 | 0 |
| BRCAN2020467 | 0 | 100 | 0 | 0 | 0 | 0 | 0 |
| BRCAN2020710 | 0 | 49.868 | 0 | 22.176 | 0 | 0 | 0 |
| BRCAN2020880 | 0 | 100 | 0 | 0 | 0 | 0 | 0 |
| BRCAN2021024 | 10.255 | 23.527 | 0 | 10.462 | 0 | 0 | 22.744 |
| BRCAN2021028 | 0 | 24.138 | 37.272 | 0 | 0 | 0 | 0 |
| BRCAN2021325 | 0 | 100 | 0 | 0 | 0 | 0 | 0 |
| BRCAN2021452 | 0 | 100 | 0 | 0 | 0 | 0 | 0 |
| BRCAN2021669 | 0 | 100 | 0 | 0 | 0 | 0 | 0 |
| BRCAN2021718 | 0 | 100 | 0 | 0 | 0 | 0 | 0 |
| BRCAN2022126 | 4.855 | 22.279 | 17.201 | 4.954 | 0 | 0 | 0 |
| BRCAN2022191 | 0 | 100 | 0 | 0 | 0 | 0 | 0 |
| BRCAN2022472 | 0 | 100 | 0 | 0 | 0 | 0 | 0 |
| BRCAN2022474 | 0 | 100 | 0 | 0 | 0 | 0 | 0 |
| BRCAN2023347 | 0 | 100 | 0 | 0 | 0 | 0 | 0 |
| BRCAN2023724 | 0 | 100 | 0 | 0 | 0 | 0 | 0 |
| BRCAN2024451 | 0 | 100 | 0 | 0 | 0 | 0 | 0 |
| BRCAN2024563 | 0 | 100 | 0 | 0 | 0 | 0 | 0 |
| BRCAN2024572 | 0 | 6.266 | 0 | 2.786 | 10.165 | 0 | 6.057 |
| BRCAN2025009 | 0 | 100 | 0 | 0 | 0 | 0 | 0 |
| BRCAN2025093 | 21.732 | 49.857 | 0 | 0 | 0 | 0 | 0 |
| BRCAN2025349 | 0 | 100 | 0 | 0 | 0 | 0 | 0 |
| BRCAN2025368 | 0 | 38.835 | 0 | 0 | 0 | 0 | 0 |
| BRCAN2025712 | 0 | 100 | 0 | 0 | 0 | 0 | 0 |
| BRCAN2025982 | 0 | 69.219 | 0 | 30.781 | 0 | 0 | 0 |
| BRCAN2026117 | 0 | 100 | 0 | 0 | 0 | 0 | 0 |
| BRCAN2026197 | 6.245 | 3.582 | 0 | 6.371 | 0 | 5.629 | 8.657 |
| BRCAN2026340 | 0 | 34.670 | 0 | 0 | 0 | 0 | 0 |
| BRCAN2026711 | 0 | 100 | 0 | 0 | 0 | 0 | 0 |
| BRCAN2027150 | 0 | 23.385 | 0 | 0 | 0 | 0 | 0 |
| BRCAN2027310 | 0 | 100 | 0 | 0 | 0 | 0 | 0 |
| BRCAN2027334 | 0 | 69.484 | 0 | 0 | 0 | 0 | 0 |
| BRCAN2027355 | 0 | 100 | 0 | 0 | 0 | 0 | 0 |
| BRCAN2027364 | 2.970 | 20.440 | 21.042 | 0 | 11.054 | 0 | 13.174 |
| BRCAN2027513 | 0 | 100 | 0 | 0 | 0 | 0 | 0 |
| BRCAN2027593 | 0 | 100 | 0 | 0 | 0 | 0 | 0 |
| BRCAN2027970 | 0 | 100 | 0 | 0 | 0 | 0 | 0 |
| BRCAN2028021 | 0 | 100 | 0 | 0 | 0 | 0 | 0 |
| BRCAN2028036 | 0 | 5.539 | 0 | 2.463 | 0 | 0 | 0 |
| BRCAN2028040 | 0 | 60.666 | 0 | 0 | 0 | 0 | 0 |
| BRCAN2028319 | 0 | 29.858 | 0 | 0 | 48.439 | 0 | 0 |
| BRCAN2028338 | 0 | 100 | 0 | 0 | 0 | 0 | 0 |
| BRCAN2028355 | 0 | 3.389 | 0 | 1.507 | 0 | 0 | 0 |
| BRCAN2028378 | 0 | 100 | 0 | 0 | 0 | 0 | 0 |
| BRCAN2028460 | 0 | 100 | 0 | 0 | 0 | 0 | 0 |
| BRCAN2028545 | 0 | 38.885 | 0 | 0 | 0 | 61.115 | 0 |
| BRCAN2028634 | 0 | 67.414 | 0 | 0 | 0 | 0 | 32.586 |
| BRCAN2028702 | 0 | 100 | 0 | 0 | 0 | 0 | 0 |
| BRCOC1000040 | 0 | 0 | 10.447 | 9.026 | 0 | 0 | 6.541 |
| BRCOC1000087 | 0 | 0 | 100 | 0 | 0 | 0 | 0 |
| BRCOC1000094 | 0.952 | 8.738 | 16.865 | 4.857 | 21.263 | 3.433 | 5.280 |
| BRCOC2000004 | 1.800 | 20.649 | 12.754 | 5.509 | 20.099 | 12.981 | 5.989 |
| BRCOC2000047 | 0 | 0 | 49.505 | 0 | 0 | 0 | 0 |
| BRCOC2000152 | 0 | 0 | 74.037 | 0 | 0 | 0 | 0 |
| BRCOC2000184 | 0 | 0 | 29.688 | 8.550 | 0 | 0 | 0 |
| BRCOC2000186 | 0 | 0 | 10.537 | 0 | 0 | 0 | 0 |
| BRCOC2000333 | 0 | 0 | 42.433 | 0 | 0 | 0 | 0 |
| BRCOC2000360 | 17.976 | 0 | 63.683 | 18.340 | 0 | 0 | 0 |
| BRCOC2000404 | 0 | 0 | 100 | 0 | 0 | 0 | 0 |
| BRCOC2000487 | 0 | 0.665 | 1.026 | 0 | 0 | 0 | 0.643 |
| BRCOC2000637 | 0 | 0 | 100 | 0 | 0 | 0 | 0 |
| BRCOC2000670 | 0 | 0 | 77.856 | 0 | 0 | 0 | 0 |
| BRCOC2000816 | 22.014 | 0 | 77.986 | 0 | 0 | 0 | 0 |
| BRCOC2000850 | 0 | 0 | 100 | 0 | 0 | 0 | 0 |
| BRCOC2001355 | 0 | 0 | 100 | 0 | 0 | 0 | 0 |
| BRCOC2002085 | 0 | 0 | 100 | 0 | 0 | 0 | 0 |
| BRCOC2002155 | 0 | 0 | 75.977 | 0 | 0 | 0 | 0 |
| BRCOC2002323 | 0 | 0 | 100 | 0 | 0 | 0 | 0 |
| BRCOC2002659 | 0 | 0 | 100 | 0 | 0 | 0 | 0 |
| BRCOC2002664 | 0 | 0 | 100 | 0 | 0 | 0 | 0 |
| BRCOC2002686 | 0 | 0 | 100 | 0 | 0 | 0 | 0 |
| BRCOC2002751 | 0 | 0 | 100 | 0 | 0 | 0 | 0 |
| BRCOC2002756 | 0 | 0 | 100 | 0 | 0 | 0 | 0 |
| BRCOC2002777 | 0 | 0 | 100 | 0 | 0 | 0 | 0 |
| BRCOC2002835 | 0 | 0 | 100 | 0 | 0 | 0 | 0 |
| BRCOC2003100 | 0 | 0 | 83.309 | 0 | 0 | 0 | 0 |
| BRCOC2003125 | 0 | 0 | 20.131 | 0 | 0 | 0 | 0 |
| BRCOC2003187 | 0.786 | 1.804 | 2.786 | 0 | 5.854 | 2.836 | 0 |
| BRCOC2003213 | 10.381 | 0 | 36.777 | 0 | 0 | 0 | 0 |
| BRCOC2003513 | 0 | 0 | 100 | 0 | 0 | 0 | 0 |
| BRCOC2003732 | 0 | 0 | 75.977 | 0 | 0 | 0 | 0 |
| BRCOC2003740 | 0 | 0 | 100 | 0 | 0 | 0 | 0 |
| BRCOC2004036 | 0 | 0 | 49.505 | 0 | 0 | 0 | 0 |
| BRCOC2004175 | 0 | 0 | 34.465 | 0 | 0 | 0 | 0 |
| BRCOC2004354 | 0 | 0 | 100 | 0 | 0 | 0 | 0 |
| BRCOC2004455 | 0 | 0 | 100 | 0 | 0 | 0 | 0 |
| BRCOC2004950 | 0 | 0 | 100 | 0 | 0 | 0 | 0 |
| BRCOC2005542 | 0 | 0 | 62.599 | 0 | 0 | 0 | 19.596 |
| BRCOC2005903 | 0 | 0 | 31.097 | 0 | 0 | 0 | 0 |
| BRCOC2005951 | 0 | 0 | 100 | 0 | 0 | 0 | 0 |
| BRCOC2006164 | 0 | 0 | 51.486 | 0 | 0 | 0 | 32.234 |
| BRCOC2006189 | 6.639 | 15.231 | 23.518 | 3.387 | 0 | 11.969 | 18.405 |
| BRCOC2006243 | 0 | 0 | 100 | 0 | 0 | 0 | 0 |
| BRCOC2006270 | 0 | 0 | 49.505 | 0 | 0 | 0 | 0 |
| BRCOC2006639 | 0 | 0 | 100 | 0 | 0 | 0 | 0 |
| BRCOC2006942 | 0 | 0 | 100 | 0 | 0 | 0 | 0 |
| BRCOC2007034 | 0 | 0 | 83.309 | 0 | 0 | 0 | 0 |
| BRCOC2007593 | 0 | 0 | 100 | 0 | 0 | 0 | 0 |
| BRCOC2007733 | 0 | 0 | 100 | 0 | 0 | 0 | 0 |
| BRCOC2007769 | 0 | 0 | 100 | 0 | 0 | 0 | 0 |
| BRCOC2008064 | 0 | 0 | 100 | 0 | 0 | 0 | 0 |
| BRCOC2008225 | 0 | 0 | 100 | 0 | 0 | 0 | 0 |
| BRCOC2008642 | 0 | 0 | 100 | 0 | 0 | 0 | 0 |
| BRCOC2008993 | 0 | 0 | 100 | 0 | 0 | 0 | 0 |
| BRCOC2009052 | 0 | 0 | 100 | 0 | 0 | 0 | 0 |
| BRCOC2009196 | 0 | 0 | 100 | 0 | 0 | 0 | 0 |
| BRCOC2009380 | 0 | 0 | 100 | 0 | 0 | 0 | 0 |
| BRCOC2009638 | 0 | 0 | 100 | 0 | 0 | 0 | 0 |
| BRCOC2009937 | 0 | 0 | 56.917 | 16.392 | 0 | 0 | 0 |
| BRCOC2010115 | 0 | 0 | 100 | 0 | 0 | 0 | 0 |
| BRCOC2010123 | 0 | 2.513 | 3.881 | 0 | 0 | 0 | 0 |
| BRCOC2010510 | 0 | 0 | 85.082 | 0 | 0 | 0 | 0 |
| BRCOC2010730 | 0 | 0 | 38.292 | 0 | 0 | 0 | 11.987 |
| BRCOC2010980 | 0 | 0 | 100 | 0 | 0 | 0 | 0 |
| BRCOC2010994 | 0 | 0 | 100 | 0 | 0 | 0 | 0 |
| BRCOC2011010 | 0 | 0 | 100 | 0 | 0 | 0 | 0 |
| BRCOC2011398 | 0 | 0 | 100 | 0 | 0 | 0 | 0 |
| BRCOC2011418 | 0 | 0 | 100 | 0 | 0 | 0 | 0 |
| BRCOC2011506 | 3.806 | 2.183 | 3.371 | 1.942 | 0 | 0 | 4.221 |
| BRCOC2011769 | 0 | 0 | 100 | 0 | 0 | 0 | 0 |
| BRCOC2011996 | 0 | 0 | 100 | 0 | 0 | 0 | 0 |
| BRCOC2012172 | 0 | 0 | 9.965 | 2.870 | 0 | 0 | 3.119 |
| BRCOC2012229 | 0 | 0 | 100 | 0 | 0 | 0 | 0 |
| BRCOC2012386 | 11.403 | 0 | 40.395 | 0 | 0 | 0 | 0 |
| BRCOC2012551 | 7.213 | 0 | 25.551 | 0 | 0 | 0 | 15.997 |
| BRCOC2012813 | 0 | 39.306 | 60.694 | 0 | 0 | 0 | 0 |
| BRCOC2013448 | 0 | 0 | 100 | 0 | 0 | 0 | 0 |
| BRCOC2013573 | 0 | 0 | 100 | 0 | 0 | 0 | 0 |
| BRCOC2013675 | 0 | 0 | 100 | 0 | 0 | 0 | 0 |
| BRCOC2013780 | 0 | 0 | 49.505 | 0 | 0 | 0 | 0 |
| BRCOC2014013 | 0 | 0 | 19.212 | 0 | 0 | 0 | 0 |
| BRCOC2014033 | 15.633 | 0 | 55.382 | 15.950 | 0 | 0 | 0 |
| BRCOC2014400 | 0 | 0 | 59.512 | 0 | 0 | 0 | 0 |
| BRCOC2014748 | 0 | 0 | 100 | 0 | 0 | 0 | 0 |
| BRCOC2014833 | 0 | 0 | 100 | 0 | 0 | 0 | 0 |
| BRCOC2015597 | 0 | 0 | 74.813 | 0 | 0 | 0 | 0 |
| BRCOC2015824 | 0 | 0 | 100 | 0 | 0 | 0 | 0 |
| BRCOC2015908 | 0 | 0 | 67.066 | 0 | 0 | 0 | 0 |
| BRCOC2015944 | 0 | 0 | 100 | 0 | 0 | 0 | 0 |
| BRCOC2016525 | 0 | 0 | 100 | 0 | 0 | 0 | 0 |
| BRCOC2016661 | 0 | 0 | 100 | 0 | 0 | 0 | 0 |
| BRCOC2017061 | 0 | 0 | 100 | 0 | 0 | 0 | 0 |
| BRCOC2017652 | 0 | 0 | 48.902 | 0 | 0 | 0 | 0 |
| BRCOC2017856 | 0 | 0 | 100 | 0 | 0 | 0 | 0 |
| BRCOC2018775 | 0 | 0 | 35.892 | 0 | 0 | 0 | 0 |
| BRCOC2018877 | 0 | 0 | 67.066 | 0 | 0 | 0 | 0 |
| BRCOC2019255 | 0 | 39.250 | 30.303 | 0 | 0 | 0 | 0 |
| BRCOC2019549 | 0 | 0 | 100 | 0 | 0 | 0 | 0 |
| BRCOC2019841 | 0 | 0 | 83.309 | 0 | 0 | 0 | 0 |
| BRCOC2019896 | 0 | 0 | 77.856 | 0 | 0 | 0 | 0 |
| BRCOC2019903 | 0 | 0 | 56.781 | 0 | 0 | 0 | 0 |
| BRCOC2019910 | 36.872 | 0 | 4.428 | 3.188 | 4.652 | 4.507 | 6.930 |
| BRCOC2019934 | 0 | 0 | 100 | 0 | 0 | 0 | 0 |
| BRCOC2020122 | 0 | 0 | 100 | 0 | 0 | 0 | 0 |
| BRCOC2020142 | 22.014 | 0 | 77.986 | 0 | 0 | 0 | 0 |
| BRHIP1000058 | 0 | 0 | 0 | 100 | 0 | 0 | 0 |
| BRHIP1000072 | 0 | 0 | 0 | 100 | 0 | 0 | 0 |
| BRHIP1000104 | 3.922 | 14.996 | 13.894 | 4.001 | 7.299 | 4.714 | 5.074 |
| BRHIP1000108 | 12.929 | 0 | 0 | 17.587 | 0 | 0 | 9.558 |
| BRHIP1000129 | 0 | 0 | 0 | 50.312 | 0 | 0 | 0 |
| BRHIP1000174 | 0 | 0 | 17.961 | 5.173 | 0 | 18.281 | 5.622 |
| BRHIP1000258 | 25.855 | 0 | 0 | 26.379 | 0 | 0 | 0 |
| BRHIP2000021 | 0 | 0 | 0 | 11.573 | 0 | 0 | 0 |
| BRHIP2000079 | 0 | 0 | 0 | 100 | 0 | 0 | 0 |
| BRHIP2000087 | 0 | 0 | 0 | 13.429 | 24.496 | 0 | 7.299 |
| BRHIP2000163 | 37.398 | 0 | 0 | 38.155 | 0 | 0 | 0 |
| BRHIP2000210 | 0 | 0 | 0 | 58.973 | 0 | 0 | 0 |
| BRHIP2000239 | 0 | 0 | 0 | 47.666 | 0 | 0 | 0 |
| BRHIP2000245 | 0 | 0 | 0 | 55.026 | 0 | 0 | 0 |
| BRHIP2000312 | 32.424 | 0 | 0 | 13.232 | 0 | 0 | 14.383 |
| BRHIP2000359 | 0 | 0 | 0 | 100 | 0 | 0 | 0 |
| BRHIP2000445 | 0 | 0 | 0 | 100 | 0 | 0 | 0 |
| BRHIP2000506 | 0 | 0 | 0 | 100 | 0 | 0 | 0 |
| BRHIP2000532 | 0 | 0 | 0 | 100 | 0 | 0 | 0 |
| BRHIP2000534 | 0.342 | 0 | 0 | 0.349 | 0 | 0 | 0 |
| BRHIP2000553 | 2.570 | 0 | 0 | 5.243 | 0 | 0 | 2.850 |
| BRHIP2000621 | 0 | 0 | 0 | 100 | 0 | 0 | 0 |
| BRHIP2000691 | 0 | 0 | 0 | 100 | 0 | 0 | 0 |
| BRHIP2000819 | 0 | 0 | 0 | 2.204 | 0 | 0 | 4.791 |
| BRHIP2000826 | 0 | 0 | 0 | 100 | 0 | 0 | 0 |
| BRHIP2000920 | 36.630 | 0 | 0 | 37.371 | 0 | 0 | 0 |
| BRHIP2001074 | 0 | 0 | 0 | 39.976 | 0 | 0 | 0 |
| BRHIP2001099 | 0 | 0 | 0 | 7.072 | 0 | 0 | 0 |
| BRHIP2001686 | 0 | 0 | 0 | 100 | 0 | 0 | 0 |
| BRHIP2001782 | 0 | 0 | 0 | 100 | 0 | 0 | 0 |
| BRHIP2001802 | 0 | 0 | 0 | 100 | 0 | 0 | 0 |
| BRHIP2001805 | 0 | 0 | 0 | 14.757 | 0 | 0 | 0 |
| BRHIP2001886 | 0 | 0 | 0 | 50.312 | 0 | 0 | 0 |
| BRHIP2001927 | 0 | 0 | 0 | 100 | 0 | 0 | 0 |
| BRHIP2002122 | 0 | 0 | 0 | 100 | 0 | 0 | 0 |
| BRHIP2002143 | 0 | 0 | 0 | 58.973 | 0 | 0 | 0 |
| BRHIP2002172 | 0 | 0 | 0 | 100 | 0 | 0 | 0 |
| BRHIP2002339 | 7.848 | 0 | 0 | 24.020 | 0 | 0 | 8.703 |
| BRHIP2002346 | 0 | 0 | 0 | 100 | 0 | 0 | 0 |
| BRHIP2002510 | 0 | 0 | 0 | 100 | 0 | 0 | 0 |
| BRHIP2002664 | 0 | 0 | 0 | 100 | 0 | 0 | 0 |
| BRHIP2002722 | 0 | 0 | 0 | 100 | 0 | 0 | 0 |
| BRHIP2002929 | 0 | 0 | 0 | 100 | 0 | 0 | 0 |
| BRHIP2003048 | 0 | 0 | 0 | 100 | 0 | 0 | 0 |
| BRHIP2003062 | 18.998 | 0 | 0 | 9.691 | 0 | 0 | 0 |
| BRHIP2003242 | 0 | 0 | 0 | 100 | 0 | 0 | 0 |
| BRHIP2003272 | 0 | 0 | 0 | 100 | 0 | 0 | 0 |
| BRHIP2003748 | 0 | 0 | 0 | 100 | 0 | 0 | 0 |
| BRHIP2003786 | 0 | 0 | 0 | 100 | 0 | 0 | 0 |
| BRHIP2003828 | 0 | 0 | 0 | 100 | 0 | 0 | 0 |
| BRHIP2003917 | 0 | 0 | 0 | 11.981 | 0 | 0 | 0 |
| BRHIP2004312 | 0 | 0 | 0 | 100 | 0 | 0 | 0 |
| BRHIP2004355 | 0 | 0 | 0 | 100 | 0 | 0 | 0 |
| BRHIP2004359 | 0 | 0 | 0 | 24.839 | 0 | 0 | 0 |
| BRHIP2004814 | 0 | 0 | 0 | 35.391 | 0 | 0 | 0 |
| BRHIP2004883 | 0 | 0 | 0 | 100 | 0 | 0 | 0 |
| BRHIP2004902 | 0 | 0 | 0 | 100 | 0 | 0 | 0 |
| BRHIP2005010 | 15.764 | 0 | 0 | 16.084 | 0 | 0 | 0 |
| BRHIP2005236 | 0 | 0 | 0 | 100 | 0 | 0 | 0 |
| BRHIP2005271 | 7.083 | 0 | 0 | 14.453 | 0 | 0 | 7.855 |
| BRHIP2005354 | 0 | 0 | 0 | 100 | 0 | 0 | 0 |
| BRHIP2005600 | 0 | 0 | 0 | 100 | 0 | 0 | 0 |
| BRHIP2005719 | 49.499 | 0 | 0 | 50.501 | 0 | 0 | 0 |
| BRHIP2005724 | 0 | 0 | 0 | 100 | 0 | 0 | 0 |
| BRHIP2005752 | 0 | 0 | 0 | 58.973 | 0 | 0 | 0 |
| BRHIP2005932 | 0 | 0 | 0 | 100 | 0 | 0 | 0 |
| BRHIP2006617 | 0 | 0 | 0 | 100 | 0 | 0 | 0 |
| BRHIP2006782 | 0 | 0 | 0 | 100 | 0 | 0 | 0 |
| BRHIP2006800 | 0 | 0 | 0 | 100 | 0 | 0 | 0 |
| BRHIP2006819 | 0 | 0 | 0 | 100 | 0 | 0 | 0 |
| BRHIP2006921 | 0 | 0 | 0 | 100 | 0 | 0 | 0 |
| BRHIP2007305 | 1.132 | 0 | 0 | 1.155 | 0 | 0 | 0 |
| BRHIP2007307 | 0 | 0 | 0 | 29.041 | 0 | 0 | 0 |
| BRHIP2007616 | 0 | 0 | 0 | 100 | 0 | 0 | 0 |
| BRHIP2007690 | 0 | 0 | 0 | 100 | 0 | 0 | 0 |
| BRHIP2007741 | 6.943 | 0 | 0 | 3.542 | 0 | 0 | 5.775 |
| BRHIP2007928 | 0 | 0 | 0 | 100 | 0 | 0 | 0 |
| BRHIP2007969 | 0 | 0 | 0 | 100 | 0 | 0 | 0 |
| BRHIP2008269 | 0 | 0 | 0 | 28.389 | 0 | 0 | 0 |
| BRHIP2008389 | 0 | 0 | 0 | 100 | 0 | 0 | 0 |
| BRHIP2008607 | 17.957 | 0 | 0 | 36.640 | 0 | 0 | 19.913 |
| BRHIP2008756 | 0 | 0 | 0 | 100 | 0 | 0 | 0 |
| BRHIP2008909 | 0 | 0 | 0 | 100 | 0 | 0 | 0 |
| BRHIP2009019 | 0 | 0 | 0 | 58.973 | 0 | 0 | 0 |
| BRHIP2009177 | 0 | 0 | 0 | 100 | 0 | 0 | 0 |
| BRHIP2009340 | 0 | 0 | 0 | 100 | 0 | 0 | 0 |
| BRHIP2009351 | 0 | 0 | 0 | 100 | 0 | 0 | 0 |
| BRHIP2009414 | 0 | 0 | 0 | 100 | 0 | 0 | 0 |
| BRHIP2009474 | 0 | 0 | 0 | 47.917 | 0 | 0 | 52.083 |
| BRHIP2009617 | 0 | 0 | 0 | 100 | 0 | 0 | 0 |
| BRHIP2009685 | 7.124 | 0 | 0 | 7.269 | 0 | 0 | 7.901 |
| BRHIP2010217 | 0 | 0 | 0 | 11.396 | 0 | 0 | 18.580 |
| BRHIP2010309 | 0 | 0 | 0 | 100 | 0 | 0 | 0 |
| BRHIP2010444 | 0 | 0 | 0 | 47.917 | 0 | 0 | 52.083 |
| BRHIP2010487 | 0 | 0 | 0 | 4.196 | 0 | 0 | 0 |
| BRHIP2010571 | 0 | 0 | 0 | 31.420 | 0 | 0 | 0 |
| BRHIP2010593 | 0 | 0 | 0 | 3.573 | 0 | 0 | 0 |
| BRHIP2010610 | 0 | 0 | 0 | 100 | 0 | 0 | 0 |
| BRHIP2010723 | 0 | 0 | 0 | 50.312 | 0 | 0 | 0 |
| BRHIP2010744 | 0 | 0 | 0 | 100 | 0 | 0 | 0 |
| BRHIP2011080 | 0 | 0 | 0 | 35.577 | 0 | 0 | 0 |
| BRHIP2011120 | 15.351 | 0 | 0 | 15.661 | 28.568 | 0 | 0 |
| BRHIP2011199 | 0 | 0 | 0 | 55.026 | 0 | 0 | 0 |
| BRHIP2011491 | 0 | 0 | 0 | 0.843 | 0 | 8.941 | 0 |
| BRHIP2011508 | 0 | 0 | 0 | 22.032 | 0 | 0 | 23.948 |
| BRHIP2011576 | 0 | 0 | 0 | 19.559 | 0 | 0 | 0 |
| BRHIP2011616 | 0 | 0 | 0 | 46.104 | 0 | 0 | 0 |
| BRHIP2011783 | 0 | 0 | 0 | 100 | 0 | 0 | 0 |
| BRHIP2011838 | 0 | 0 | 0 | 100 | 0 | 0 | 0 |
| BRHIP2011891 | 0 | 0 | 0 | 60.949 | 0 | 0 | 0 |
| BRHIP2011933 | 0 | 0 | 0 | 100 | 0 | 0 | 0 |
| BRHIP2012054 | 0 | 0 | 0 | 29.041 | 0 | 0 | 0 |
| BRHIP2012059 | 0 | 0 | 0 | 100 | 0 | 0 | 0 |
| BRHIP2012141 | 0 | 0 | 0 | 47.917 | 0 | 0 | 52.083 |
| BRHIP2012314 | 0 | 0 | 0 | 100 | 0 | 0 | 0 |
| BRHIP2012360 | 0 | 0 | 0 | 100 | 0 | 0 | 0 |
| BRHIP2012545 | 0 | 0 | 0 | 100 | 0 | 0 | 0 |
| BRHIP2012580 | 0 | 0 | 0 | 100 | 0 | 0 | 0 |
| BRHIP2012627 | 0 | 0 | 0 | 16.026 | 0 | 0 | 0 |
| BRHIP2012642 | 0 | 0 | 0 | 100 | 0 | 0 | 0 |
| BRHIP2012750 | 0 | 0 | 0 | 100 | 0 | 0 | 0 |
| BRHIP2012922 | 0 | 0 | 0 | 100 | 0 | 0 | 0 |
| BRHIP2012923 | 0 | 69.219 | 0 | 30.781 | 0 | 0 | 0 |
| BRHIP2012972 | 0 | 0 | 0 | 47.917 | 0 | 0 | 52.083 |
| BRHIP2013286 | 0 | 0 | 0 | 17.468 | 0 | 0 | 0 |
| BRHIP2013447 | 0 | 0 | 0 | 100 | 0 | 0 | 0 |
| BRHIP2013510 | 0 | 0 | 0 | 100 | 0 | 0 | 0 |
| BRHIP2013699 | 0 | 0 | 0 | 21.770 | 0 | 0 | 23.663 |
| BRHIP2013723 | 0 | 0 | 0 | 100 | 0 | 0 | 0 |
| BRHIP2013958 | 0 | 0 | 0 | 36.661 | 0 | 0 | 39.849 |
| BRHIP2013972 | 0 | 0 | 0 | 100 | 0 | 0 | 0 |
| BRHIP2014063 | 0 | 0 | 0 | 36.967 | 0 | 0 | 0 |
| BRHIP2014228 | 29.439 | 0 | 0 | 15.017 | 0 | 0 | 0 |
| BRHIP2014285 | 0 | 0 | 0 | 100 | 0 | 0 | 0 |
| BRHIP2014291 | 0 | 0 | 0 | 100 | 0 | 0 | 0 |
| BRHIP2014373 | 0 | 0 | 0 | 34.432 | 0 | 0 | 37.426 |
| BRHIP2014386 | 0 | 0 | 0 | 55.026 | 0 | 0 | 0 |
| BRHIP2014387 | 0 | 0 | 0 | 100 | 0 | 0 | 0 |
| BRHIP2014954 | 0 | 0 | 0 | 100 | 0 | 0 | 0 |
| BRHIP2015153 | 20.038 | 0 | 0 | 20.443 | 0 | 0 | 0 |
| BRHIP2015224 | 22.746 | 0 | 0 | 13.924 | 0 | 0 | 20.179 |
| BRHIP2015245 | 14.244 | 0 | 0 | 19.377 | 0 | 0 | 13.164 |
| BRHIP2015356 | 0 | 0 | 0 | 100 | 0 | 0 | 0 |
| BRHIP2015360 | 0 | 0 | 0 | 100 | 0 | 0 | 0 |
| BRHIP2015679 | 2.509 | 0 | 0 | 5.119 | 0 | 0 | 0 |
| BRHIP2016005 | 0 | 0 | 0 | 100 | 0 | 0 | 0 |
| BRHIP2016125 | 0 | 0 | 0 | 100 | 0 | 0 | 0 |
| BRHIP2016788 | 0 | 0 | 0 | 100 | 0 | 0 | 0 |
| BRHIP2016968 | 0 | 0 | 0 | 100 | 0 | 0 | 0 |
| BRHIP2016990 | 0 | 0 | 0 | 100 | 0 | 0 | 0 |
| BRHIP2017010 | 0 | 0 | 0 | 14.025 | 0 | 0 | 0 |
| BRHIP2017315 | 0 | 0 | 0 | 100 | 0 | 0 | 0 |
| BRHIP2017385 | 0 | 0 | 0 | 100 | 0 | 0 | 0 |
| BRHIP2017404 | 0 | 0 | 0 | 100 | 0 | 0 | 0 |
| BRHIP2017542 | 0 | 0 | 0 | 100 | 0 | 0 | 0 |
| BRHIP2017553 | 0 | 0 | 0 | 100 | 0 | 0 | 0 |
| BRHIP2017642 | 12.915 | 0 | 0 | 26.353 | 0 | 0 | 0 |
| BRHIP2017714 | 0 | 0 | 0 | 100 | 0 | 0 | 0 |
| BRHIP2017780 | 0 | 0 | 0 | 100 | 0 | 0 | 0 |
| BRHIP2017945 | 0 | 0 | 0 | 3.288 | 0 | 0 | 0 |
| BRHIP2018014 | 0 | 0 | 0 | 100 | 0 | 0 | 0 |
| BRHIP2018369 | 0 | 0 | 0 | 100 | 0 | 0 | 0 |
| BRHIP2018612 | 0 | 0 | 0 | 100 | 0 | 0 | 0 |
| BRHIP2018635 | 0 | 0 | 0 | 60.949 | 0 | 0 | 0 |
| BRHIP2018650 | 0 | 0 | 0 | 100 | 0 | 0 | 0 |
| BRHIP2018712 | 4.050 | 0 | 0 | 4.132 | 0 | 0 | 0 |
| BRHIP2018719 | 0 | 0 | 0 | 50.312 | 0 | 0 | 0 |
| BRHIP2018805 | 0 | 0 | 0 | 100 | 0 | 0 | 0 |
| BRHIP2018998 | 0 | 0 | 0 | 100 | 0 | 0 | 0 |
| BRHIP2019007 | 0 | 0 | 0 | 100 | 0 | 0 | 0 |
| BRHIP2019047 | 0 | 0 | 0 | 100 | 0 | 0 | 0 |
| BRHIP2019149 | 0 | 0 | 0 | 11.267 | 0 | 0 | 0 |
| BRHIP2019177 | 0 | 0 | 0 | 100 | 0 | 0 | 0 |
| BRHIP2019186 | 0 | 0 | 0 | 4.027 | 0 | 0 | 0 |
| BRHIP2019291 | 0 | 0 | 0 | 100 | 0 | 0 | 0 |
| BRHIP2019494 | 0 | 0 | 0 | 74.193 | 0 | 0 | 0 |
| BRHIP2019589 | 0 | 0 | 0 | 100 | 0 | 0 | 0 |
| BRHIP2019641 | 0 | 0 | 0 | 100 | 0 | 0 | 0 |
| BRHIP2019819 | 8.671 | 0 | 0 | 17.692 | 0 | 0 | 0 |
| BRHIP2019884 | 0 | 0 | 0 | 100 | 0 | 0 | 0 |
| BRHIP2019972 | 0 | 0 | 0 | 100 | 0 | 0 | 0 |
| BRHIP2020182 | 0 | 0 | 0 | 100 | 0 | 0 | 0 |
| BRHIP2020509 | 0 | 0 | 0 | 19.104 | 0 | 0 | 0 |
| BRHIP2020573 | 9.050 | 0 | 0 | 18.466 | 0 | 0 | 0 |
| BRHIP2020622 | 0 | 53.082 | 0 | 23.605 | 0 | 0 | 0 |
| BRHIP2020695 | 49.499 | 0 | 0 | 50.501 | 0 | 0 | 0 |
| BRHIP2020743 | 0 | 0 | 0 | 100 | 0 | 0 | 0 |
| BRHIP2020799 | 5.061 | 0 | 0 | 36.143 | 0 | 0 | 5.612 |
| BRHIP2020842 | 0 | 0 | 0 | 100 | 0 | 0 | 0 |
| BRHIP2020859 | 0 | 0 | 0 | 100 | 0 | 0 | 0 |
| BRHIP2020930 | 0 | 0 | 0 | 100 | 0 | 0 | 0 |
| BRHIP2021102 | 0 | 0 | 0 | 100 | 0 | 0 | 0 |
| BRHIP2021289 | 0 | 0 | 0 | 100 | 0 | 0 | 0 |
| BRHIP2021495 | 0 | 14.715 | 0 | 6.544 | 0 | 0 | 0 |
| BRHIP2021615 | 0 | 0 | 0 | 100 | 0 | 0 | 0 |
| BRHIP2021744 | 0 | 0 | 0 | 100 | 0 | 0 | 0 |
| BRHIP2021762 | 8.358 | 0 | 0 | 11.369 | 0 | 0 | 3.090 |
| BRHIP2021858 | 3.346 | 0 | 0 | 3.414 | 0 | 0 | 0 |
| BRHIP2021870 | 0 | 10.186 | 0 | 4.530 | 0 | 0 | 4.924 |
| BRHIP2021929 | 0 | 0 | 0 | 100 | 0 | 0 | 0 |
| BRHIP2022006 | 0 | 0 | 0 | 100 | 0 | 0 | 0 |
| BRHIP2022054 | 0 | 16.949 | 17.448 | 2.512 | 0 | 0 | 5.462 |
| BRHIP2022221 | 0 | 0 | 0 | 47.917 | 0 | 0 | 52.083 |
| BRHIP2022228 | 9.138 | 20.964 | 0 | 9.323 | 0 | 0 | 0 |
| BRHIP2022298 | 0 | 0 | 0 | 100 | 0 | 0 | 0 |
| BRHIP2022326 | 1.701 | 1.952 | 0 | 3.472 | 0 | 0 | 0 |
| BRHIP2022467 | 0 | 32.605 | 0 | 14.499 | 52.896 | 0 | 0 |
| BRHIP2022708 | 0 | 0 | 0 | 100 | 0 | 0 | 0 |
| BRHIP2022986 | 2.845 | 0 | 0 | 5.806 | 0 | 0 | 0 |
| BRHIP2023071 | 0 | 0 | 0 | 50.312 | 0 | 0 | 0 |
| BRHIP2023229 | 0 | 0 | 0 | 15.312 | 0 | 0 | 0 |
| BRHIP2023272 | 0 | 0 | 0 | 3.443 | 0 | 0 | 0 |
| BRHIP2023292 | 0 | 0 | 0 | 35.577 | 0 | 0 | 0 |
| BRHIP2023309 | 11.666 | 0 | 0 | 23.804 | 0 | 0 | 0 |
| BRHIP2023369 | 17.477 | 0 | 0 | 17.830 | 0 | 0 | 0 |
| BRHIP2023438 | 0 | 0 | 0 | 26.026 | 0 | 0 | 0 |
| BRHIP2023695 | 0 | 0 | 0 | 36.438 | 0 | 0 | 0 |
| BRHIP2023735 | 0 | 0 | 0 | 100 | 0 | 0 | 0 |
| BRHIP2023762 | 2.386 | 0 | 0 | 2.435 | 0 | 0 | 2.646 |
| BRHIP2023773 | 0 | 0 | 0 | 29.041 | 0 | 0 | 0 |
| BRHIP2023860 | 0 | 0 | 0 | 100 | 0 | 0 | 0 |
| BRHIP2023869 | 0 | 0 | 0 | 36.661 | 0 | 0 | 39.849 |
| BRHIP2023888 | 2.208 | 1.688 | 1.303 | 0.751 | 1.369 | 2.653 | 4.488 |
| BRHIP2024046 | 0 | 0 | 0 | 31.291 | 0 | 0 | 0 |
| BRHIP2024165 | 0 | 0 | 0 | 100 | 0 | 0 | 0 |
| BRHIP2024201 | 0 | 0 | 0 | 100 | 0 | 0 | 0 |
| BRHIP2024347 | 0 | 0 | 0 | 100 | 0 | 0 | 0 |
| BRHIP2024398 | 0 | 0 | 0 | 8.590 | 0 | 0 | 0 |
| BRHIP2024549 | 0 | 0 | 0 | 100 | 0 | 0 | 0 |
| BRHIP2024742 | 8.730 | 0 | 4.418 | 7.635 | 0 | 0 | 8.298 |
| BRHIP2024789 | 0 | 0 | 0 | 100 | 0 | 0 | 0 |
| BRHIP2024911 | 0 | 0 | 0 | 9.456 | 0 | 0 | 0 |
| BRHIP2024941 | 0 | 0 | 0 | 100 | 0 | 0 | 0 |
| BRHIP2025245 | 0 | 0 | 0 | 47.666 | 0 | 0 | 0 |
| BRHIP2025366 | 0 | 0 | 0 | 100 | 0 | 0 | 0 |
| BRHIP2025448 | 0 | 0 | 0 | 31.199 | 0 | 0 | 0 |
| BRHIP2025679 | 0 | 0 | 0 | 58.973 | 0 | 0 | 0 |
| BRHIP2025739 | 0 | 0 | 0 | 100 | 0 | 0 | 0 |
| BRHIP2025797 | 0 | 0 | 0 | 100 | 0 | 0 | 0 |
| BRHIP2026021 | 0 | 0 | 0 | 100 | 0 | 0 | 0 |
| BRHIP2026061 | 0 | 0 | 0 | 31.199 | 0 | 0 | 0 |
| BRHIP2026155 | 0 | 0 | 0 | 100 | 0 | 0 | 0 |
| BRHIP2026214 | 0 | 0 | 0 | 35.577 | 0 | 0 | 0 |
| BRHIP2026288 | 0 | 0 | 0 | 22.018 | 0 | 0 | 0 |
| BRHIP2026346 | 0 | 0 | 0 | 100 | 0 | 0 | 0 |
| BRHIP2026557 | 0 | 0 | 0 | 100 | 0 | 0 | 0 |
| BRHIP2026723 | 0 | 0 | 0 | 100 | 0 | 0 | 0 |
| BRHIP2026877 | 0 | 69.219 | 0 | 30.781 | 0 | 0 | 0 |
| BRHIP2027017 | 0 | 26.410 | 0 | 11.745 | 0 | 0 | 0 |
| BRHIP2027054 | 0 | 0 | 0 | 100 | 0 | 0 | 0 |
| BRHIP2027077 | 2.020 | 0 | 0 | 2.061 | 0 | 0 | 0 |
| BRHIP2027563 | 0 | 0 | 0 | 100 | 0 | 0 | 0 |
| BRHIP2027685 | 0 | 0 | 0 | 50.312 | 0 | 0 | 0 |
| BRHIP2027762 | 0 | 0 | 0 | 100 | 0 | 0 | 0 |
| BRHIP2028187 | 0 | 0 | 0 | 74.193 | 0 | 0 | 0 |
| BRHIP2028303 | 0 | 0 | 0 | 100 | 0 | 0 | 0 |
| BRHIP2028330 | 0 | 0 | 0 | 100 | 0 | 0 | 0 |
| BRHIP2028480 | 0 | 0 | 0 | 100 | 0 | 0 | 0 |
| BRHIP2028583 | 0 | 0 | 0 | 12.691 | 0 | 0 | 0 |
| BRHIP2028593 | 0 | 0 | 0 | 100 | 0 | 0 | 0 |
| BRHIP2029176 | 0 | 0 | 0 | 100 | 0 | 0 | 0 |
| BRHIP2029283 | 0 | 0 | 0 | 100 | 0 | 0 | 0 |
| BRHIP2029393 | 0 | 0 | 0 | 100 | 0 | 0 | 0 |
| BRHIP2029529 | 0 | 0 | 0 | 100 | 0 | 0 | 0 |
| BRHIP2029643 | 0 | 0 | 0 | 15.240 | 55.599 | 0 | 0 |
| BRHIP2029663 | 0 | 0 | 0 | 45.093 | 0 | 0 | 0 |
| BRHIP3000017 | 8.819 | 0 | 15.620 | 4.499 | 0 | 0 | 0 |
| BRHIP3000060 | 0 | 0 | 0 | 47.917 | 0 | 0 | 52.083 |
| BRHIP3000070 | 0 | 0 | 0 | 100 | 0 | 0 | 0 |
| BRHIP3000081 | 0 | 0 | 0 | 100 | 0 | 0 | 0 |
| BRHIP3000111 | 0 | 2.349 | 3.627 | 3.133 | 3.810 | 3.691 | 3.406 |
| BRHIP3000131 | 7.345 | 0 | 13.009 | 14.986 | 0 | 0 | 12.217 |
| BRHIP3000240 | 0 | 0 | 0 | 32.393 | 0 | 0 | 0 |
| BRHIP3000377 | 0 | 0 | 0 | 5.877 | 0 | 0 | 6.388 |
| BRHIP3000457 | 0 | 0 | 0 | 27.708 | 0 | 0 | 0 |
| BRHIP3000475 | 0 | 0 | 0 | 22.059 | 0 | 0 | 0 |
| BRHIP3000488 | 0 | 0 | 0 | 100 | 0 | 0 | 0 |
| BRHIP3000526 | 0 | 0 | 0 | 100 | 0 | 0 | 0 |
| BRHIP3000626 | 0 | 0 | 0 | 100 | 0 | 0 | 0 |
| BRHIP3000859 | 0 | 0 | 0 | 100 | 0 | 0 | 0 |
| BRHIP3000907 | 0 | 0 | 0 | 100 | 0 | 0 | 0 |
| BRHIP3001076 | 0 | 0 | 0 | 46.104 | 0 | 0 | 0 |
| BRHIP3001079 | 0 | 0 | 0 | 100 | 0 | 0 | 0 |
| BRHIP3001141 | 0 | 0 | 0 | 100 | 0 | 0 | 0 |
| BRHIP3001283 | 0 | 0 | 0 | 50.312 | 0 | 0 | 0 |
| BRHIP3001338 | 0 | 0 | 0 | 100 | 0 | 0 | 0 |
| BRHIP3001360 | 0 | 0 | 0 | 58.973 | 0 | 0 | 0 |
| BRHIP3001481 | 0 | 0 | 0 | 38.435 | 0 | 0 | 0 |
| BRHIP3001878 | 0 | 0 | 0 | 100 | 0 | 0 | 0 |
| BRHIP3001964 | 0 | 0 | 0 | 100 | 0 | 0 | 0 |
| BRHIP3002114 | 0 | 0 | 0 | 39.793 | 0 | 0 | 0 |
| BRHIP3002124 | 0 | 0 | 0 | 100 | 0 | 0 | 0 |
| BRHIP3002141 | 0 | 0 | 0 | 16.008 | 0 | 0 | 0 |
| BRHIP3002363 | 0 | 0 | 0 | 100 | 0 | 0 | 0 |
| BRHIP3002691 | 0 | 0 | 0 | 16.923 | 0 | 0 | 18.395 |
| BRHIP3002920 | 0 | 0 | 0 | 64.789 | 0 | 0 | 35.211 |
| BRHIP3002931 | 0 | 0 | 0 | 100 | 0 | 0 | 0 |
| BRHIP3003063 | 10.960 | 0 | 0 | 55.910 | 0 | 0 | 0 |
| BRHIP3003126 | 0 | 0 | 0 | 74.193 | 0 | 0 | 0 |
| BRHIP3003306 | 0 | 0 | 0 | 60.949 | 0 | 0 | 0 |
| BRHIP3003340 | 0 | 0 | 0 | 100 | 0 | 0 | 0 |
| BRHIP3003395 | 0 | 0 | 0 | 100 | 0 | 0 | 0 |
| BRHIP3003484 | 0 | 0 | 0 | 100 | 0 | 0 | 0 |
| BRHIP3003644 | 0 | 0 | 0 | 100 | 0 | 0 | 0 |
| BRHIP3003688 | 0 | 0 | 0 | 100 | 0 | 0 | 0 |
| BRHIP3003795 | 0 | 0 | 0 | 45.093 | 0 | 0 | 0 |
| BRHIP3003961 | 0 | 0 | 0 | 19.351 | 0 | 0 | 21.034 |
| BRHIP3003984 | 27.477 | 0 | 0 | 28.033 | 0 | 0 | 15.236 |
| BRHIP3004193 | 0 | 0 | 0 | 100 | 0 | 0 | 0 |
| BRHIP3004215 | 0 | 0 | 0 | 13.851 | 0 | 0 | 15.055 |
| BRHIP3004416 | 0 | 0 | 0 | 100 | 0 | 0 | 0 |
| BRHIP3004710 | 0 | 0 | 0 | 100 | 0 | 0 | 0 |
| BRHIP3004725 | 0 | 0 | 0 | 100 | 0 | 0 | 0 |
| BRHIP3004774 | 39.520 | 0 | 0 | 60.480 | 0 | 0 | 0 |
| BRHIP3004786 | 0 | 0 | 0 | 100 | 0 | 0 | 0 |
| BRHIP3004863 | 0 | 0 | 0 | 100 | 0 | 0 | 0 |
| BRHIP3004968 | 0 | 0 | 0 | 34.325 | 0 | 0 | 0 |
| BRHIP3005037 | 0 | 0 | 0 | 82.401 | 0 | 0 | 0 |
| BRHIP3005137 | 0 | 0 | 0 | 100 | 0 | 0 | 0 |
| BRHIP3005142 | 0 | 0 | 0 | 60.949 | 0 | 0 | 0 |
| BRHIP3005231 | 0 | 0 | 0 | 100 | 0 | 0 | 0 |
| BRHIP3005307 | 0 | 0 | 0 | 46.104 | 0 | 0 | 0 |
| BRHIP3005574 | 0 | 0 | 0 | 43.125 | 0 | 0 | 46.875 |
| BRHIP3005673 | 0 | 0 | 0 | 52.564 | 0 | 0 | 0 |
| BRHIP3005768 | 0 | 0 | 0 | 47.917 | 0 | 0 | 52.083 |
| BRHIP3005801 | 0 | 0 | 0 | 19.121 | 0 | 67.577 | 0 |
| BRHIP3005944 | 0 | 0 | 0 | 100 | 0 | 0 | 0 |
| BRHIP3006279 | 0 | 0 | 0 | 100 | 0 | 0 | 0 |
| BRHIP3006294 | 0 | 0 | 0 | 40.683 | 0 | 0 | 0 |
| BRHIP3006390 | 49.499 | 0 | 0 | 50.501 | 0 | 0 | 0 |
| BRHIP3006449 | 0 | 0 | 0 | 100 | 0 | 0 | 0 |
| BRHIP3006683 | 24.100 | 0 | 0 | 49.175 | 0 | 0 | 26.726 |
| BRHIP3006717 | 15.318 | 0 | 0 | 10.419 | 6.335 | 0 | 5.662 |
| BRHIP3006786 | 0 | 0 | 0 | 100 | 0 | 0 | 0 |
| BRHIP3006950 | 0 | 0 | 0 | 100 | 0 | 0 | 0 |
| BRHIP3007172 | 0 | 0 | 0 | 100 | 0 | 0 | 0 |
| BRHIP3007183 | 0 | 31.449 | 0 | 13.985 | 0 | 0 | 45.605 |
| BRHIP3007195 | 0 | 0 | 0 | 75.737 | 0 | 0 | 0 |
| BRHIP3007223 | 2.016 | 0 | 0 | 2.057 | 0 | 0 | 4.472 |
| BRHIP3007239 | 0 | 0 | 0 | 100 | 0 | 0 | 0 |
| BRHIP3007291 | 0 | 0 | 0 | 100 | 0 | 0 | 0 |
| BRHIP3007409 | 31.957 | 0 | 0 | 32.604 | 0 | 0 | 35.439 |
| BRHIP3007424 | 0 | 0 | 0 | 100 | 0 | 0 | 0 |
| BRHIP3007483 | 0 | 0 | 0 | 100 | 0 | 0 | 0 |
| BRHIP3007586 | 17.255 | 0 | 0 | 24.645 | 0 | 0 | 11.481 |
| BRHIP3007609 | 0 | 0 | 0 | 100 | 0 | 0 | 0 |
| BRHIP3007640 | 0 | 0 | 0 | 68.316 | 0 | 0 | 0 |
| BRHIP3007960 | 0 | 0 | 0 | 100 | 0 | 0 | 0 |
| BRHIP3008082 | 0 | 0 | 0 | 45.093 | 0 | 0 | 0 |
| BRHIP3008183 | 0 | 0 | 0 | 100 | 0 | 0 | 0 |
| BRHIP3008314 | 0 | 0 | 0 | 100 | 0 | 0 | 0 |
| BRHIP3008320 | 23.349 | 0 | 0 | 47.644 | 0 | 0 | 0 |
| BRHIP3008344 | 0 | 0 | 0 | 46.104 | 0 | 0 | 0 |
| BRHIP3008405 | 35.187 | 0 | 0 | 17.949 | 0 | 0 | 0 |
| BRHIP3008565 | 0 | 0 | 0 | 46.104 | 0 | 0 | 0 |
| BRHIP3008598 | 0 | 0 | 0 | 100 | 0 | 0 | 0 |
| BRHIP3008606 | 0 | 0 | 0 | 100 | 0 | 0 | 0 |
| BRHIP3008691 | 49.499 | 0 | 0 | 50.501 | 0 | 0 | 0 |
| BRHIP3008714 | 0 | 0 | 0 | 100 | 0 | 0 | 0 |
| BRHIP3008997 | 0 | 0 | 0 | 100 | 0 | 0 | 0 |
| BRHIP3009099 | 0 | 0 | 0 | 35.577 | 0 | 0 | 0 |
| BRHIP3009140 | 0 | 0 | 0 | 100 | 0 | 0 | 0 |
| BRHIP3009181 | 0 | 0 | 0 | 100 | 0 | 0 | 0 |
| BRHIP3009318 | 0 | 0 | 0 | 100 | 0 | 0 | 0 |
| BRHIP3009427 | 0 | 0 | 0 | 100 | 0 | 0 | 0 |
| BRHIP3009448 | 0 | 0 | 0 | 100 | 0 | 0 | 0 |
| BRHIP3009672 | 0 | 0 | 0 | 100 | 0 | 0 | 0 |
| BRHIP3009753 | 0 | 0 | 0 | 1.187 | 0 | 0 | 0 |
| BRHIP3010135 | 0 | 0 | 0 | 100 | 0 | 0 | 0 |
| BRHIP3010289 | 0 | 0 | 0 | 100 | 0 | 0 | 0 |
| BRHIP3010529 | 0 | 0 | 0 | 100 | 0 | 0 | 0 |
| BRHIP3011082 | 0 | 0 | 0 | 100 | 0 | 0 | 0 |
| BRHIP3011241 | 0 | 0 | 0 | 100 | 0 | 0 | 0 |
| BRHIP3011269 | 0 | 0 | 0 | 100 | 0 | 0 | 0 |
| BRHIP3011460 | 0 | 0 | 0 | 100 | 0 | 0 | 0 |
| BRHIP3011567 | 0 | 0 | 0 | 100 | 0 | 0 | 0 |
| BRHIP3011831 | 0 | 0 | 0 | 100 | 0 | 0 | 0 |
| BRHIP3012185 | 0 | 0 | 0 | 100 | 0 | 0 | 0 |
| BRHIP3012289 | 0 | 0 | 0 | 100 | 0 | 0 | 0 |
| BRHIP3012357 | 0 | 0 | 0 | 100 | 0 | 0 | 0 |
| BRHIP3012736 | 0 | 0 | 0 | 33.611 | 0 | 0 | 0 |
| BRHIP3012745 | 0 | 0 | 0 | 100 | 0 | 0 | 0 |
| BRHIP3012868 | 0 | 0 | 0 | 100 | 0 | 0 | 0 |
| BRHIP3012997 | 0 | 0 | 0 | 2.837 | 0 | 0 | 0 |
| BRHIP3013078 | 0 | 0 | 0 | 100 | 0 | 0 | 0 |
| BRHIP3013271 | 0 | 0 | 0 | 100 | 0 | 0 | 0 |
| BRHIP3013588 | 0 | 0 | 0 | 60.949 | 0 | 0 | 0 |
| BRHIP3013698 | 0 | 0 | 0 | 100 | 0 | 0 | 0 |
| BRHIP3013765 | 0 | 0 | 0 | 100 | 0 | 0 | 0 |
| BRHIP3013897 | 0 | 0 | 0 | 100 | 0 | 0 | 0 |
| BRHIP3014237 | 0 | 0 | 0 | 100 | 0 | 0 | 0 |
| BRHIP3014675 | 37.925 | 0 | 0 | 19.346 | 0 | 0 | 0 |
| BRHIP3015620 | 0 | 0 | 0 | 100 | 0 | 0 | 0 |
| BRHIP3015751 | 0 | 0 | 0 | 100 | 0 | 0 | 0 |
| BRHIP3015854 | 0 | 0 | 0 | 100 | 0 | 0 | 0 |
| BRHIP3016032 | 0 | 0 | 0 | 100 | 0 | 0 | 0 |
| BRHIP3016213 | 0 | 0 | 0 | 100 | 0 | 0 | 0 |
| BRHIP3016302 | 0 | 0 | 0 | 100 | 0 | 0 | 0 |
| BRHIP3016421 | 0 | 0 | 0 | 100 | 0 | 0 | 0 |
| BRHIP3017109 | 0 | 0 | 0 | 100 | 0 | 0 | 0 |
| BRHIP3017146 | 0 | 0 | 0 | 66.943 | 0 | 0 | 0 |
| BRHIP3017256 | 0 | 0 | 0 | 100 | 0 | 0 | 0 |
| BRHIP3017325 | 0 | 0 | 0 | 100 | 0 | 0 | 0 |
| BRHIP3017558 | 0 | 0 | 0 | 100 | 0 | 0 | 0 |
| BRHIP3017637 | 0 | 0 | 0 | 100 | 0 | 0 | 0 |
| BRHIP3017855 | 15.316 | 0 | 0 | 11.720 | 0 | 0 | 4.246 |
| BRHIP3018278 | 0 | 0 | 0 | 39.793 | 0 | 0 | 0 |
| BRHIP3018784 | 6.930 | 0 | 12.276 | 3.535 | 0 | 0 | 0 |
| BRHIP3019643 | 0 | 0 | 0 | 100 | 0 | 0 | 0 |
| BRHIP3019824 | 0 | 0 | 0 | 100 | 0 | 0 | 0 |
| BRHIP3019880 | 0 | 0 | 0 | 100 | 0 | 0 | 0 |
| BRHIP3019956 | 0 | 0 | 0 | 100 | 0 | 0 | 0 |
| BRHIP3020046 | 0 | 0 | 0 | 2.067 | 3.770 | 0 | 1.123 |
| BRHIP3020155 | 0 | 0 | 0 | 100 | 0 | 0 | 0 |
| BRHIP3020182 | 0 | 0 | 0 | 100 | 0 | 0 | 0 |
| BRHIP3020733 | 0 | 0 | 0 | 55.026 | 0 | 0 | 0 |
| BRHIP3021019 | 7.745 | 0 | 0 | 7.901 | 0 | 0 | 0 |
| BRHIP3021499 | 0 | 0 | 0 | 100 | 0 | 0 | 0 |
| BRHIP3021534 | 0 | 0 | 0 | 100 | 0 | 0 | 0 |
| BRHIP3021778 | 0 | 0 | 0 | 100 | 0 | 0 | 0 |
| BRHIP3021987 | 0 | 0 | 0 | 36.438 | 0 | 0 | 0 |
| BRHIP3022656 | 0 | 0 | 0 | 100 | 0 | 0 | 0 |
| BRHIP3023922 | 0 | 0 | 0 | 100 | 0 | 0 | 0 |
| BRHIP3024118 | 0 | 0 | 0 | 100 | 0 | 0 | 0 |
| BRHIP3024533 | 0 | 0 | 0 | 100 | 0 | 0 | 0 |
| BRHIP3024703 | 0 | 0 | 0 | 100 | 0 | 0 | 0 |
| BRHIP3024725 | 0 | 0 | 0 | 100 | 0 | 0 | 0 |
| BRHIP3024820 | 0 | 0 | 0 | 100 | 0 | 0 | 0 |
| BRHIP3025161 | 0 | 0 | 0 | 100 | 0 | 0 | 0 |
| BRHIP3025702 | 0 | 0 | 0 | 100 | 0 | 0 | 0 |
| BRHIP3025795 | 0 | 0 | 0 | 100 | 0 | 0 | 0 |
| BRHIP3025844 | 0 | 0 | 0 | 100 | 0 | 0 | 0 |
| BRHIP3026052 | 0 | 0 | 0 | 45.860 | 0 | 0 | 0 |
| BRHIP3026097 | 0 | 0 | 0 | 100 | 0 | 0 | 0 |
| BRHIP3026231 | 0 | 0 | 0 | 100 | 0 | 0 | 0 |
| BRHIP3026335 | 0 | 0 | 0 | 100 | 0 | 0 | 0 |
| BRHIP3026651 | 0 | 0 | 0 | 100 | 0 | 0 | 0 |
| BRHIP3027105 | 49.499 | 0 | 0 | 50.501 | 0 | 0 | 0 |
| BRHIP3027137 | 0 | 0 | 0 | 100 | 0 | 0 | 0 |
| BRHIP3027160 | 0 | 0 | 0 | 100 | 0 | 0 | 0 |
| BRHIP3027191 | 0 | 0 | 0 | 100 | 0 | 0 | 0 |
| BRHIP3027501 | 0 | 0 | 0 | 100 | 0 | 0 | 0 |
| BRHIP3027594 | 19.439 | 0 | 0 | 19.832 | 0 | 0 | 21.557 |
| BRHIP3027651 | 0 | 0 | 0 | 100 | 0 | 0 | 0 |
| BRHIP3027854 | 0 | 0 | 0 | 100 | 0 | 0 | 0 |
| BRHIP3027947 | 0 | 0 | 0 | 100 | 0 | 0 | 0 |
| BRHIP3028570 | 31.957 | 0 | 0 | 32.604 | 0 | 0 | 35.439 |
| BRHIP3028742 | 0 | 0 | 0 | 100 | 0 | 0 | 0 |
| BRSSN1000056 | 0 | 0 | 0 | 0 | 22.550 | 0 | 6.719 |
| BRSSN1000059 | 0 | 0 | 0 | 0 | 50.093 | 0 | 0 |
| BRSSN1000092 | 0 | 0 | 0 | 0 | 100 | 0 | 0 |
| BRSSN1000153 | 0 | 0 | 0 | 0 | 100 | 0 | 0 |
| BRSSN2000097 | 0 | 0 | 0 | 0 | 25.771 | 0 | 0 |
| BRSSN2000175 | 0 | 0 | 0 | 0 | 100 | 0 | 0 |
| BRSSN2000197 | 0 | 0 | 0 | 0 | 81.697 | 0 | 0 |
| BRSSN2000244 | 0 | 0 | 0 | 0 | 50.137 | 0 | 0 |
| BRSSN2000293 | 0 | 7.523 | 23.234 | 3.346 | 36.616 | 23.648 | 0 |
| BRSSN2000295 | 6.926 | 15.889 | 0 | 0 | 25.777 | 0 | 7.680 |
| BRSSN2000312 | 10.759 | 0 | 0 | 0 | 40.045 | 0 | 0 |
| BRSSN2000498 | 4.377 | 0 | 3.876 | 1.116 | 12.218 | 0 | 1.213 |
| BRSSN2000518 | 0 | 0 | 0 | 0 | 100 | 0 | 0 |
| BRSSN2000561 | 0 | 0 | 0 | 0 | 23.338 | 0 | 13.907 |
| BRSSN2000566 | 4.864 | 0 | 0 | 9.925 | 18.104 | 0 | 5.394 |
| BRSSN2000684 | 23.433 | 0 | 0 | 19.126 | 17.444 | 0 | 10.395 |
| BRSSN2000715 | 0 | 0 | 0 | 0 | 100 | 0 | 0 |
| BRSSN2000832 | 12.039 | 0 | 0 | 24.566 | 44.810 | 0 | 0 |
| BRSSN2001213 | 0 | 0 | 0 | 0 | 75.732 | 0 | 0 |
| BRSSN2001275 | 0 | 38.134 | 0 | 0 | 61.866 | 0 | 0 |
| BRSSN2001342 | 0 | 0 | 0 | 0 | 100 | 0 | 0 |
| BRSSN2001426 | 0 | 0 | 0 | 0 | 100 | 0 | 0 |
| BRSSN2001503 | 0 | 0 | 0 | 0 | 100 | 0 | 0 |
| BRSSN2001579 | 0 | 0 | 0 | 0 | 50.137 | 0 | 0 |
| BRSSN2001758 | 0 | 21.568 | 0 | 0 | 34.990 | 0 | 0 |
| BRSSN2001810 | 0 | 0 | 0 | 0 | 100 | 0 | 0 |
| BRSSN2001869 | 0 | 6.925 | 0 | 0 | 11.235 | 0 | 6.695 |
| BRSSN2002857 | 0 | 0 | 0 | 0 | 100 | 0 | 0 |
| BRSSN2002859 | 0 | 0 | 0 | 0 | 100 | 0 | 0 |
| BRSSN2003012 | 0 | 0 | 0 | 0 | 16.101 | 0 | 0 |
| BRSSN2003086 | 0 | 0 | 0 | 0 | 100 | 0 | 0 |
| BRSSN2003093 | 0 | 0 | 0 | 0 | 100 | 0 | 0 |
| BRSSN2003820 | 0 | 0 | 0 | 0 | 100 | 0 | 0 |
| BRSSN2003841 | 0 | 0 | 0 | 0 | 100 | 0 | 0 |
| BRSSN2003937 | 0 | 0 | 0 | 0 | 100 | 0 | 0 |
| BRSSN2004142 | 0 | 0 | 0 | 0 | 100 | 0 | 0 |
| BRSSN2004303 | 0 | 0 | 0 | 0 | 100 | 0 | 0 |
| BRSSN2004304 | 0 | 0 | 0 | 0 | 100 | 0 | 0 |
| BRSSN2004496 | 0 | 0 | 0 | 0 | 78.696 | 0 | 0 |
| BRSSN2004657 | 0 | 0 | 0 | 0 | 85.061 | 0 | 0 |
| BRSSN2004679 | 0 | 0 | 0 | 0 | 56.646 | 0 | 16.878 |
| BRSSN2004686 | 0 | 0 | 0 | 0 | 100 | 0 | 0 |
| BRSSN2004710 | 0 | 0 | 0 | 0 | 100 | 0 | 0 |
| BRSSN2004719 | 0 | 12.020 | 0 | 10.691 | 39.002 | 18.892 | 0 |
| BRSSN2005847 | 0 | 0 | 0 | 0 | 81.697 | 0 | 0 |
| BRSSN2006133 | 0 | 0 | 0 | 0 | 100 | 0 | 0 |
| BRSSN2006390 | 0 | 0 | 0 | 0 | 100 | 0 | 0 |
| BRSSN2006575 | 0 | 0 | 0 | 0 | 100 | 0 | 0 |
| BRSSN2006611 | 0 | 0 | 0 | 0 | 78.696 | 0 | 0 |
| BRSSN2006644 | 0 | 0 | 0 | 0 | 100 | 0 | 0 |
| BRSSN2006892 | 0 | 0 | 0 | 0 | 57.631 | 0 | 0 |
| BRSSN2007076 | 0 | 0 | 0 | 0 | 100 | 0 | 0 |
| BRSSN2007168 | 0 | 0 | 0 | 0 | 100 | 0 | 0 |
| BRSSN2007202 | 0 | 38.134 | 0 | 0 | 61.866 | 0 | 0 |
| BRSSN2007338 | 0 | 0 | 0 | 0 | 27.509 | 0 | 0 |
| BRSSN2007464 | 0 | 0 | 0 | 0 | 15.231 | 0 | 0 |
| BRSSN2007504 | 0 | 0 | 0 | 0 | 100 | 0 | 0 |
| BRSSN2007819 | 0 | 0 | 0 | 0 | 100 | 0 | 0 |
| BRSSN2008125 | 0 | 0 | 0 | 0 | 100 | 0 | 0 |
| BRSSN2008419 | 0 | 0 | 0 | 0 | 100 | 0 | 0 |
| BRSSN2008464 | 0 | 0 | 0 | 0 | 100 | 0 | 0 |
| BRSSN2008549 | 0 | 0 | 0 | 17.436 | 63.611 | 0 | 18.953 |
| BRSSN2008797 | 0 | 0 | 0 | 0 | 77.045 | 0 | 22.955 |
| BRSSN2009119 | 0 | 0 | 0 | 0 | 68.148 | 0 | 0 |
| BRSSN2009378 | 0 | 0 | 0 | 0 | 100 | 0 | 0 |
| BRSSN2009389 | 0 | 0 | 0 | 0 | 100 | 0 | 0 |
| BRSSN2009395 | 0 | 0 | 0 | 0 | 100 | 0 | 0 |
| BRSSN2009518 | 1.722 | 0 | 6.102 | 1.757 | 6.411 | 0 | 0 |
| BRSSN2009627 | 0 | 0 | 0 | 0 | 100 | 0 | 0 |
| BRSSN2009630 | 0 | 0 | 0 | 0 | 100 | 0 | 0 |
| BRSSN2009702 | 0 | 0 | 0 | 0 | 100 | 0 | 0 |
| BRSSN2010019 | 0 | 0 | 0 | 0 | 43.197 | 0 | 0 |
| BRSSN2010110 | 0 | 0 | 0 | 0 | 100 | 0 | 0 |
| BRSSN2010587 | 0 | 0 | 0 | 0 | 83.985 | 0 | 0 |
| BRSSN2010596 | 0 | 0 | 0 | 0 | 44.612 | 0 | 0 |
| BRSSN2010830 | 0 | 0 | 0 | 0 | 100 | 0 | 0 |
| BRSSN2011262 | 0 | 0 | 0 | 0 | 10.489 | 0 | 0 |
| BRSSN2011653 | 0 | 0 | 0 | 0 | 18.443 | 0 | 0 |
| BRSSN2011738 | 31.553 | 0 | 0 | 0 | 39.146 | 0 | 0 |
| BRSSN2011843 | 0 | 0 | 0 | 0 | 44.546 | 0 | 0 |
| BRSSN2012081 | 0 | 0 | 0 | 0 | 100 | 0 | 0 |
| BRSSN2012103 | 0 | 0 | 0 | 0 | 100 | 0 | 0 |
| BRSSN2012157 | 0 | 0 | 0 | 0 | 100 | 0 | 0 |
| BRSSN2012198 | 0 | 0 | 0 | 0 | 100 | 0 | 0 |
| BRSSN2012254 | 0 | 0 | 0 | 0 | 100 | 0 | 0 |
| BRSSN2012439 | 0 | 0 | 0 | 0 | 81.697 | 0 | 0 |
| BRSSN2012622 | 0 | 0 | 0 | 0 | 100 | 0 | 0 |
| BRSSN2012691 | 0 | 0 | 0 | 0 | 100 | 0 | 0 |
| BRSSN2012838 | 0 | 0 | 0 | 0 | 100 | 0 | 0 |
| BRSSN2013095 | 0 | 0 | 0 | 21.514 | 78.486 | 0 | 0 |
| BRSSN2013544 | 0 | 0 | 0 | 0 | 100 | 0 | 0 |
| BRSSN2013696 | 0 | 0 | 0 | 0 | 13.293 | 0 | 0 |
| BRSSN2013702 | 0 | 0 | 33.606 | 0 | 35.308 | 0 | 0 |
| BRSSN2013733 | 0 | 0 | 0 | 0 | 78.696 | 0 | 0 |
| BRSSN2013753 | 0 | 0 | 0 | 0 | 54.884 | 0 | 0 |
| BRSSN2013874 | 0 | 0 | 0 | 0 | 100 | 0 | 0 |
| BRSSN2014112 | 0 | 0 | 0 | 0 | 100 | 0 | 0 |
| BRSSN2014294 | 0 | 0 | 0 | 0 | 34.652 | 0 | 0 |
| BRSSN2014299 | 3.695 | 0 | 0 | 3.770 | 13.753 | 0 | 0 |
| BRSSN2014424 | 0 | 38.134 | 0 | 0 | 61.866 | 0 | 0 |
| BRSSN2014513 | 0 | 0 | 0 | 0 | 100 | 0 | 0 |
| BRSSN2014556 | 0 | 0 | 0 | 0 | 100 | 0 | 0 |
| BRSSN2014573 | 0 | 0 | 0 | 0 | 100 | 0 | 0 |
| BRSSN2014610 | 0 | 0 | 0 | 10.927 | 13.288 | 0 | 11.878 |
| BRSSN2014636 | 0 | 0 | 0 | 0 | 100 | 0 | 0 |
| BRSSN2014685 | 0 | 0 | 0 | 0 | 52.851 | 0 | 0 |
| BRSSN2015199 | 0 | 0 | 0 | 0 | 83.985 | 0 | 0 |
| BRSSN2015238 | 10.270 | 0 | 0 | 6.985 | 12.742 | 0 | 0 |
| BRSSN2015369 | 0 | 0 | 0 | 0 | 100 | 0 | 0 |
| BRSSN2015493 | 0 | 0 | 0 | 0 | 13.605 | 0 | 0 |
| BRSSN2015497 | 0 | 0 | 0 | 0 | 26.619 | 0 | 7.931 |
| BRSSN2015554 | 0 | 0 | 48.765 | 0 | 51.235 | 0 | 0 |
| BRSSN2015707 | 0 | 0 | 0 | 0 | 100 | 0 | 0 |
| BRSSN2015773 | 0 | 0 | 0 | 0 | 100 | 0 | 0 |
| BRSSN2015907 | 0 | 0 | 0 | 0 | 100 | 0 | 0 |
| BRSSN2015982 | 0 | 0 | 0 | 0 | 60.467 | 0 | 0 |
| BRSSN2016589 | 0 | 0 | 0 | 0 | 100 | 0 | 0 |
| BRSSN2016768 | 0 | 0 | 0 | 0 | 100 | 0 | 0 |
| BRSSN2016905 | 0 | 0 | 0 | 0 | 100 | 0 | 0 |
| BRSSN2017297 | 0 | 0 | 0 | 0 | 100 | 0 | 0 |
| BRSSN2017422 | 0 | 0 | 0 | 29.338 | 53.514 | 0 | 0 |
| BRSSN2017530 | 0 | 0 | 0 | 0 | 100 | 0 | 0 |
| BRSSN2017682 | 0 | 0 | 0 | 0 | 100 | 0 | 0 |
| BRSSN2017757 | 0 | 0 | 0 | 0 | 100 | 0 | 0 |
| BRSSN2018218 | 0 | 0 | 0 | 0 | 100 | 0 | 0 |
| BRSSN2018440 | 0 | 0 | 0 | 0 | 74.975 | 0 | 0 |
| BRSSN2018447 | 19.606 | 0 | 0 | 13.335 | 24.324 | 0 | 0 |
| BRSSN2018581 | 0 | 0 | 0 | 0 | 50.137 | 0 | 0 |
| BRSSN2018731 | 0 | 0 | 0 | 0 | 100 | 0 | 0 |
| BRSSN2018771 | 0 | 0 | 0 | 0 | 100 | 0 | 0 |
| BRSSN2018925 | 0 | 0 | 0 | 0 | 100 | 0 | 0 |
| BRSTN1000083 | 0.638 | 0 | 2.262 | 1.303 | 0 | 2.302 | 0 |
| BRSTN1000097 | 0 | 0 | 0 | 0 | 0 | 100 | 0 |
| BRSTN2000058 | 0 | 33.205 | 25.637 | 0 | 8.978 | 17.396 | 0 |
| BRSTN2000070 | 0 | 0 | 0 | 22.055 | 0 | 77.945 | 0 |
| BRSTN2000220 | 0 | 7.871 | 0 | 10.501 | 0 | 37.113 | 15.219 |
| BRSTN2000312 | 0 | 0 | 0 | 0 | 0 | 100 | 0 |
| BRSTN2000367 | 0 | 0 | 0 | 0 | 0 | 84.653 | 0 |
| BRSTN2000536 | 0 | 0 | 0 | 22.055 | 0 | 77.945 | 0 |
| BRSTN2000872 | 0 | 0 | 0 | 0 | 0 | 100 | 0 |
| BRSTN2001067 | 0 | 0 | 0 | 0 | 0 | 44.646 | 0 |
| BRSTN2001613 | 0 | 0 | 0 | 0 | 0 | 100 | 0 |
| BRSTN2001801 | 0 | 0 | 0 | 0 | 0 | 100 | 0 |
| BRSTN2002105 | 0 | 0 | 0 | 0 | 0 | 100 | 0 |
| BRSTN2002400 | 0 | 0 | 0 | 0 | 0 | 100 | 0 |
| BRSTN2002532 | 0 | 0 | 0 | 0 | 0 | 100 | 0 |
| BRSTN2002691 | 0 | 0 | 0 | 0 | 0 | 100 | 0 |
| BRSTN2003590 | 0 | 0 | 0 | 0 | 0 | 100 | 0 |
| BRSTN2003835 | 0 | 0 | 0 | 0 | 0 | 100 | 0 |
| BRSTN2004863 | 0 | 0 | 35.295 | 0 | 0 | 35.924 | 11.049 |
| BRSTN2004869 | 0 | 0 | 0 | 0 | 0 | 76.298 | 0 |
| BRSTN2004987 | 0 | 0 | 0 | 0 | 0 | 100 | 0 |
| BRSTN2005721 | 0 | 0 | 0 | 0 | 0 | 100 | 0 |
| BRSTN2006306 | 0 | 0 | 0 | 0 | 0 | 100 | 0 |
| BRSTN2006466 | 0 | 0 | 0 | 0 | 0 | 100 | 0 |
| BRSTN2006580 | 0 | 0 | 0 | 0 | 0 | 83.553 | 0 |
| BRSTN2006583 | 0 | 0 | 0 | 0 | 0 | 76.479 | 23.521 |
| BRSTN2006638 | 0 | 0 | 0 | 0 | 0 | 100 | 0 |
| BRSTN2006865 | 0 | 0 | 0 | 0 | 0 | 100 | 0 |
| BRSTN2007000 | 0 | 0 | 0 | 0 | 0 | 100 | 0 |
| BRSTN2007118 | 0 | 0 | 0 | 0 | 0 | 100 | 0 |
| BRSTN2007284 | 0 | 38.885 | 0 | 0 | 0 | 61.115 | 0 |
| BRSTN2007765 | 0 | 0 | 0 | 0 | 0 | 100 | 0 |
| BRSTN2008052 | 32.844 | 0 | 0 | 0 | 0 | 39.475 | 12.141 |
| BRSTN2008283 | 0 | 0 | 0 | 0 | 0 | 100 | 0 |
| BRSTN2008367 | 0 | 0 | 0 | 0 | 0 | 100 | 0 |
| BRSTN2008418 | 0 | 0 | 0 | 0 | 0 | 100 | 0 |
| BRSTN2008457 | 0 | 0 | 0 | 0 | 0 | 100 | 0 |
| BRSTN2008475 | 0 | 0 | 0 | 0 | 0 | 100 | 0 |
| BRSTN2008930 | 0 | 0 | 0 | 0 | 0 | 100 | 0 |
| BRSTN2009247 | 0 | 0 | 0 | 0 | 0 | 100 | 0 |
| BRSTN2010089 | 6.598 | 0 | 23.372 | 0 | 0 | 23.789 | 0 |
| BRSTN2010107 | 1.338 | 13.047 | 16.591 | 5.802 | 11.205 | 6.031 | 8.161 |
| BRSTN2010363 | 0 | 0 | 0 | 0 | 0 | 100 | 0 |
| BRSTN2010416 | 0 | 0 | 0 | 0 | 0 | 100 | 0 |
| BRSTN2010500 | 0 | 0 | 0 | 0 | 0 | 100 | 0 |
| BRSTN2010569 | 0 | 0 | 0 | 0 | 0 | 100 | 0 |
| BRSTN2010750 | 0 | 0 | 0 | 0 | 0 | 36.677 | 0 |
| BRSTN2010923 | 0 | 0 | 0 | 0 | 0 | 100 | 0 |
| BRSTN2011211 | 0 | 0 | 0 | 0 | 0 | 100 | 0 |
| BRSTN2011597 | 0 | 0 | 0 | 0 | 0 | 83.553 | 0 |
| BRSTN2011688 | 0 | 0 | 0 | 0 | 0 | 100 | 0 |
| BRSTN2011799 | 0 | 0 | 0 | 0 | 0 | 100 | 0 |
| BRSTN2011961 | 0 | 0 | 1.026 | 0 | 1.078 | 1.044 | 1.285 |
| BRSTN2012069 | 0.047 | 0.391 | 0.101 | 0 | 0 | 0.853 | 0 |
| BRSTN2012089 | 5.800 | 0 | 0 | 0 | 0 | 20.915 | 6.432 |
| BRSTN2012174 | 0.202 | 0.928 | 0.717 | 0 | 1.506 | 3.646 | 0.224 |
| BRSTN2012284 | 0 | 0 | 0 | 0 | 0 | 100 | 0 |
| BRSTN2012320 | 0 | 0 | 0 | 0 | 0 | 100 | 0 |
| BRSTN2012380 | 0 | 0 | 0 | 0 | 0 | 100 | 0 |
| BRSTN2012451 | 0 | 0 | 0 | 0.843 | 0 | 5.956 | 0.916 |
| BRSTN2013171 | 0 | 15.900 | 0 | 0 | 0 | 12.495 | 0 |
| BRSTN2013354 | 0 | 0 | 0 | 0 | 0 | 100 | 0 |
| BRSTN2013502 | 0 | 0 | 0 | 0 | 0 | 17.527 | 2.695 |
| BRSTN2013931 | 2.899 | 0 | 0 | 0 | 0 | 3.484 | 2.143 |
| BRSTN2014490 | 0 | 0 | 0 | 0 | 0 | 33.221 | 0 |
| BRSTN2014633 | 0 | 0 | 0 | 0 | 0 | 100 | 0 |
| BRSTN2014751 | 0 | 0 | 0 | 0 | 0 | 100 | 0 |
| BRSTN2014770 | 0 | 0 | 0 | 0 | 0 | 100 | 0 |
| BRSTN2015015 | 14.017 | 0 | 0 | 0 | 0 | 50.541 | 15.544 |
| BRSTN2015889 | 0 | 0 | 0 | 3.952 | 0 | 13.967 | 8.591 |
| BRSTN2015978 | 1.881 | 14.547 | 14.724 | 3.002 | 19.309 | 3.719 | 0.370 |
| BRSTN2016066 | 0 | 0 | 0 | 0 | 0 | 100 | 0 |
| BRSTN2016335 | 0 | 0 | 0 | 0 | 0 | 100 | 0 |
| BRSTN2016470 | 0.438 | 1.004 | 0 | 0.447 | 0 | 5.524 | 0 |
| BRSTN2016678 | 0 | 0 | 0 | 0 | 0 | 33.084 | 0 |
| BRSTN2016892 | 0 | 0 | 0 | 0 | 0 | 10.759 | 0 |
| BRSTN2016918 | 0 | 0 | 0 | 0 | 0 | 100 | 0 |
| BRSTN2016992 | 1.476 | 3.387 | 1.743 | 2.510 | 5.495 | 15.970 | 1.091 |
| BRSTN2017104 | 0 | 8.946 | 0 | 0 | 7.257 | 7.030 | 0 |
| BRSTN2017151 | 0 | 0 | 0 | 0 | 0 | 100 | 0 |
| BRSTN2017237 | 0 | 0 | 0 | 0 | 0 | 100 | 0 |
| BRSTN2017379 | 0 | 0 | 0 | 0 | 0 | 100 | 0 |
| BRSTN2017761 | 0 | 0 | 0 | 0 | 0 | 76.298 | 0 |
| BRSTN2017771 | 0 | 0 | 0 | 0 | 0 | 100 | 0 |
| BRSTN2017995 | 0 | 0 | 0 | 0 | 0 | 100 | 0 |
| BRSTN2018077 | 0 | 38.885 | 0 | 0 | 0 | 61.115 | 0 |
| BRSTN2018083 | 0 | 0 | 0 | 22.055 | 0 | 77.945 | 0 |
| BRSTN2018596 | 0 | 0 | 0 | 0 | 0 | 100 | 0 |
| BRSTN2018692 | 0 | 0 | 0 | 0 | 0 | 100 | 0 |
| BRSTN2018712 | 0 | 0 | 0 | 0 | 0 | 100 | 0 |
| BRSTN2019079 | 0 | 0 | 0 | 0 | 0 | 100 | 0 |
| BRSTN2019129 | 0 | 0 | 0 | 0 | 0 | 100 | 0 |
| BRTHA1000021 | 17.174 | 39.401 | 0 | 0 | 0 | 0 | 19.045 |
| BRTHA1000063 | 0 | 0 | 0 | 0 | 0 | 0 | 100 |
| BRTHA1000311 | 11.803 | 6.770 | 0 | 6.021 | 10.982 | 0 | 9.817 |
| BRTHA2000057 | 0 | 0 | 0 | 0 | 0 | 0 | 48.181 |
| BRTHA2000474 | 0 | 0 | 0 | 0 | 0 | 0 | 100 |
| BRTHA2000514 | 0 | 0 | 0 | 0 | 0 | 0 | 100 |
| BRTHA2000574 | 0 | 0 | 0 | 0 | 0 | 0 | 100 |
| BRTHA2000855 | 0 | 0 | 0 | 0 | 0 | 0 | 100 |
| BRTHA2000969 | 0 | 0 | 0 | 0 | 0 | 0 | 100 |
| BRTHA2000972 | 0 | 0 | 0 | 0 | 0 | 0 | 100 |
| BRTHA2001304 | 0 | 0 | 0 | 0 | 0 | 0 | 100 |
| BRTHA2001370 | 0 | 0 | 0 | 0 | 0 | 0 | 100 |
| BRTHA2001462 | 0 | 0 | 0 | 0 | 0 | 0 | 100 |
| BRTHA2001717 | 0 | 0 | 0 | 0 | 0 | 0 | 100 |
| BRTHA2001812 | 0 | 0 | 0 | 0 | 0 | 30.730 | 9.451 |
| BRTHA2002091 | 0 | 0 | 0 | 0 | 0 | 0 | 100 |
| BRTHA2002115 | 0 | 0 | 0 | 0 | 0 | 0 | 100 |
| BRTHA2002133 | 0 | 0 | 0 | 0 | 0 | 0 | 100 |
| BRTHA2002281 | 0 | 0 | 0 | 0 | 0 | 0 | 100 |
| BRTHA2002376 | 0 | 0 | 0 | 0 | 0 | 0 | 100 |
| BRTHA2002442 | 0 | 0 | 0 | 31.507 | 0 | 0 | 68.493 |
| BRTHA2002493 | 0 | 0 | 0 | 0 | 0 | 0 | 100 |
| BRTHA2002565 | 0 | 0 | 0 | 0 | 0 | 0 | 100 |
| BRTHA2002608 | 0 | 0 | 0 | 0 | 0 | 0 | 100 |
| BRTHA2002702 | 0 | 0 | 0 | 0 | 0 | 0 | 100 |
| BRTHA2002721 | 0 | 0 | 0 | 0 | 0 | 0 | 100 |
| BRTHA2002726 | 0 | 0 | 0 | 0 | 0 | 0 | 23.821 |
| BRTHA2002741 | 0 | 0 | 0 | 0 | 0 | 0 | 100 |
| BRTHA2002808 | 0 | 0 | 0 | 0 | 0 | 0 | 12.857 |
| BRTHA2002896 | 0 | 0 | 0 | 0 | 0 | 0 | 100 |
| BRTHA2002903 | 0 | 0 | 0 | 0 | 0 | 0 | 100 |
| BRTHA2003030 | 0 | 0 | 0 | 0 | 0 | 0 | 100 |
| BRTHA2003110 | 0 | 0 | 0 | 0 | 0 | 0 | 100 |
| BRTHA2003116 | 0 | 0 | 0 | 0 | 0 | 0 | 100 |
| BRTHA2003436 | 0 | 0 | 0 | 0 | 0 | 0 | 100 |
| BRTHA2003759 | 0 | 0 | 0 | 0 | 0 | 0 | 100 |
| BRTHA2003794 | 0 | 0 | 0 | 0 | 0 | 0 | 100 |
| BRTHA2004361 | 0 | 0 | 0 | 0 | 0 | 0 | 48.181 |
| BRTHA2004371 | 0 | 0 | 0 | 0 | 0 | 0 | 100 |
| BRTHA2004582 | 0 | 0 | 0 | 0 | 0 | 0 | 100 |
| BRTHA2004629 | 0 | 0 | 0 | 0 | 0 | 0 | 100 |
| BRTHA2004639 | 0 | 0 | 0 | 0 | 0 | 0 | 100 |
| BRTHA2004642 | 0 | 0 | 0 | 0 | 0 | 0 | 100 |
| BRTHA2004812 | 0 | 0 | 0 | 0 | 0 | 0 | 100 |
| BRTHA2004821 | 0 | 0 | 0 | 0 | 0 | 0 | 100 |
| BRTHA2004978 | 0 | 0 | 0 | 0 | 0 | 0 | 100 |
| BRTHA2004992 | 0 | 0 | 0 | 0 | 0 | 0 | 100 |
| BRTHA2005005 | 0 | 0 | 0 | 0 | 0 | 0 | 100 |
| BRTHA2005013 | 0 | 0 | 0 | 0 | 0 | 0 | 12.374 |
| BRTHA2005448 | 0 | 0 | 0 | 0 | 0 | 0 | 100 |
| BRTHA2005579 | 0 | 0 | 0 | 0 | 0 | 0 | 100 |
| BRTHA2005831 | 0 | 0 | 0 | 0 | 0 | 0 | 48.181 |
| BRTHA2005864 | 1.623 | 0 | 0 | 0 | 0 | 0 | 3.599 |
| BRTHA2005942 | 0 | 0 | 0 | 0 | 0 | 0 | 100 |
| BRTHA2005956 | 0 | 0 | 0 | 0 | 0 | 0 | 100 |
| BRTHA2006075 | 0 | 0 | 0 | 0 | 0 | 0 | 100 |
| BRTHA2006146 | 0 | 0 | 0 | 0 | 0 | 0 | 100 |
| BRTHA2006194 | 0 | 0 | 0 | 0 | 0 | 0 | 100 |
| BRTHA2006232 | 0 | 0 | 0 | 0 | 0 | 0 | 100 |
| BRTHA2006720 | 0 | 0 | 0 | 0 | 0 | 0 | 100 |
| BRTHA2006735 | 0 | 0 | 0 | 0 | 0 | 0 | 100 |
| BRTHA2006974 | 0 | 0 | 0 | 0 | 0 | 0 | 100 |
| BRTHA2006975 | 0 | 0 | 0 | 0 | 0 | 0 | 2.521 |
| BRTHA2007060 | 0 | 0 | 0 | 0 | 0 | 0 | 100 |
| BRTHA2007122 | 0 | 0 | 0 | 0 | 0 | 0 | 100 |
| BRTHA2007422 | 0 | 0 | 0 | 0 | 0 | 0 | 100 |
| BRTHA2007603 | 0 | 0 | 0 | 0 | 0 | 0 | 100 |
| BRTHA2007665 | 0 | 0 | 0 | 0 | 0 | 0 | 100 |
| BRTHA2007998 | 0 | 1.978 | 0 | 0.880 | 3.210 | 6.219 | 1.913 |
| BRTHA2008316 | 0 | 0 | 0 | 0 | 0 | 0 | 100 |
| BRTHA2008335 | 16.281 | 0 | 0 | 8.305 | 0 | 0 | 9.028 |
| BRTHA2008502 | 0 | 0 | 0 | 22.073 | 0 | 0 | 23.993 |
| BRTHA2008513 | 0 | 0 | 0 | 47.917 | 0 | 0 | 52.083 |
| BRTHA2008527 | 0 | 0 | 0 | 0 | 0 | 0 | 100 |
| BRTHA2008535 | 0 | 0 | 0 | 0 | 0 | 0 | 100 |
| BRTHA2008598 | 0 | 0 | 0 | 0 | 0 | 0 | 100 |
| BRTHA2008669 | 0 | 0 | 0 | 0 | 0 | 0 | 100 |
| BRTHA2008955 | 0 | 0 | 0 | 0 | 0 | 0 | 60.975 |
| BRTHA2009311 | 0 | 0 | 0 | 0 | 0 | 0 | 100 |
| BRTHA2009349 | 0 | 0 | 0 | 0 | 0 | 0 | 100 |
| BRTHA2009486 | 0 | 0 | 0 | 11.152 | 0 | 0 | 12.122 |
| BRTHA2009803 | 0 | 0 | 0 | 0 | 0 | 0 | 100 |
| BRTHA2009846 | 0 | 0 | 0 | 0 | 0 | 0 | 100 |
| BRTHA2009886 | 0 | 0 | 0 | 0 | 0 | 0 | 23.052 |
| BRTHA2009972 | 0 | 0 | 0 | 0 | 0 | 0 | 100 |
| BRTHA2010008 | 0 | 0 | 0 | 0 | 0 | 0 | 100 |
| BRTHA2010033 | 0 | 0 | 0 | 0 | 0 | 0 | 100 |
| BRTHA2010073 | 0 | 0 | 0 | 0 | 0 | 0 | 100 |
| BRTHA2010097 | 0 | 0 | 0 | 0 | 0 | 0 | 4.656 |
| BRTHA2010191 | 0 | 0 | 0 | 0 | 0 | 0 | 100 |
| BRTHA2010397 | 0 | 0 | 0 | 0 | 0 | 0 | 100 |
| BRTHA2010608 | 0 | 0 | 0 | 0 | 0 | 0 | 48.181 |
| BRTHA2010672 | 0 | 0 | 0 | 0 | 0 | 0 | 100 |
| BRTHA2010884 | 0 | 0 | 0 | 0 | 0 | 0 | 100 |
| BRTHA2010907 | 0 | 0 | 0 | 0 | 0 | 0 | 100 |
| BRTHA2011062 | 0 | 0 | 0 | 0 | 0 | 0 | 100 |
| BRTHA2011194 | 0 | 0 | 0 | 0 | 0 | 0 | 60.975 |
| BRTHA2011321 | 0 | 0 | 0 | 0 | 0 | 0 | 100 |
| BRTHA2011351 | 0 | 0 | 0 | 0 | 0 | 0 | 100 |
| BRTHA2011500 | 0 | 0 | 0 | 0 | 0 | 0 | 100 |
| BRTHA2011641 | 0 | 0 | 0 | 0 | 0 | 0 | 52.395 |
| BRTHA2011691 | 0 | 0 | 0 | 0 | 0 | 0 | 57.080 |
| BRTHA2012129 | 0 | 0 | 0 | 0 | 0 | 0 | 100 |
| BRTHA2012183 | 0 | 0 | 0 | 0 | 0 | 0 | 48.181 |
| BRTHA2012189 | 0 | 0 | 0 | 0 | 0 | 0 | 100 |
| BRTHA2012351 | 0 | 0 | 0 | 0 | 0 | 0 | 100 |
| BRTHA2012392 | 0 | 0 | 0 | 0 | 0 | 0 | 38.390 |
| BRTHA2012466 | 0 | 0 | 0 | 0 | 0 | 0 | 100 |
| BRTHA2012555 | 0 | 0 | 0 | 0 | 0 | 0 | 100 |
| BRTHA2012562 | 0 | 0 | 0 | 0 | 0 | 0 | 100 |
| BRTHA2012714 | 1.253 | 0 | 0 | 0 | 0 | 0 | 11.120 |
| BRTHA2012980 | 0 | 0 | 0 | 0 | 0 | 0 | 13.890 |
| BRTHA2013054 | 24.028 | 0 | 0 | 0 | 0 | 0 | 13.323 |
| BRTHA2013262 | 0 | 0 | 0 | 0 | 0 | 0 | 100 |
| BRTHA2013275 | 0 | 0 | 0 | 0 | 0 | 0 | 49.749 |
| BRTHA2013426 | 0 | 0 | 0 | 0 | 0 | 0 | 100 |
| BRTHA2013460 | 0 | 0 | 0 | 0 | 0 | 0 | 100 |
| BRTHA2013515 | 47.417 | 0 | 0 | 0 | 0 | 0 | 52.583 |
| BRTHA2013540 | 0 | 0 | 0 | 0 | 0 | 0 | 37.587 |
| BRTHA2013595 | 0 | 0 | 0 | 0 | 0 | 0 | 100 |
| BRTHA2013610 | 0 | 0 | 0 | 0 | 0 | 0 | 100 |
| BRTHA2013707 | 0 | 0 | 0 | 0 | 0 | 0 | 100 |
| BRTHA2013942 | 0 | 0 | 0 | 0 | 0 | 0 | 100 |
| BRTHA2014287 | 0 | 0 | 0 | 0 | 0 | 0 | 100 |
| BRTHA2014334 | 0 | 0 | 0 | 0 | 0 | 0 | 100 |
| BRTHA2014381 | 0 | 0 | 0 | 0 | 0 | 0 | 100 |
| BRTHA2014578 | 0 | 0 | 0 | 0 | 0 | 0 | 100 |
| BRTHA2014647 | 0 | 0 | 0 | 0 | 0 | 0 | 100 |
| BRTHA2014663 | 0 | 0 | 0 | 0 | 0 | 0 | 19.647 |
| BRTHA2014792 | 0 | 0 | 0 | 0 | 0 | 0 | 100 |
| BRTHA2014828 | 0 | 0 | 0 | 0 | 0 | 0 | 100 |
| BRTHA2014909 | 0 | 0 | 0 | 0 | 0 | 0 | 100 |
| BRTHA2014975 | 0 | 0 | 0 | 0 | 0 | 0 | 100 |
| BRTHA2014997 | 0 | 0 | 0 | 0 | 0 | 0 | 57.080 |
| BRTHA2015406 | 0 | 0 | 0 | 0 | 0 | 0 | 100 |
| BRTHA2015478 | 0 | 0 | 0 | 0 | 0 | 0 | 100 |
| BRTHA2015696 | 0 | 0 | 0 | 0 | 0 | 0 | 100 |
| BRTHA2015700 | 0 | 0 | 0 | 0 | 0 | 0 | 100 |
| BRTHA2015853 | 0 | 0 | 0 | 0 | 0 | 0 | 100 |
| BRTHA2015878 | 0 | 0 | 0 | 0 | 0 | 0 | 100 |
| BRTHA2016179 | 0 | 0 | 0 | 0 | 0 | 0 | 100 |
| BRTHA2016215 | 0 | 0 | 0 | 0 | 0 | 0 | 38.930 |
| BRTHA2016267 | 0 | 0 | 0 | 0 | 0 | 0 | 100 |
| BRTHA2016318 | 0 | 0 | 0 | 0 | 0 | 0 | 100 |
| BRTHA2016496 | 0 | 0 | 0 | 0 | 0 | 0 | 100 |
| BRTHA2016543 | 0 | 0 | 0 | 0 | 0 | 0 | 100 |
| BRTHA2016552 | 0 | 0 | 0 | 0 | 0 | 0 | 100 |
| BRTHA2016577 | 0 | 0 | 0 | 0 | 0 | 0 | 2.617 |
| BRTHA2016765 | 0 | 0 | 0 | 0 | 0 | 0 | 13.048 |
| BRTHA2016918 | 0 | 0 | 0 | 0 | 0 | 0 | 32.610 |
| BRTHA2017178 | 0 | 0 | 0 | 0 | 0 | 0 | 48.181 |
| BRTHA2017353 | 0 | 0 | 0 | 0 | 0 | 0 | 100 |
| BRTHA2017364 | 0 | 0 | 0 | 0 | 0 | 0 | 100 |
| BRTHA2017972 | 0 | 0 | 0 | 0 | 0 | 0 | 37.427 |
| BRTHA2017985 | 0 | 0 | 0 | 0 | 0 | 0 | 49.749 |
| BRTHA2018011 | 0 | 0 | 0 | 0 | 0 | 0 | 100 |
| BRTHA2018129 | 0 | 0 | 0 | 0 | 0 | 0 | 100 |
| BRTHA2018165 | 0 | 0 | 0 | 0 | 0 | 0 | 100 |
| BRTHA2018304 | 0 | 0 | 0 | 0 | 0 | 0 | 100 |
| BRTHA2018344 | 0 | 0 | 0 | 0 | 0 | 0 | 100 |
| BRTHA2018420 | 0 | 0 | 0 | 0 | 0 | 0 | 100 |
| BRTHA2018443 | 22.098 | 0 | 0 | 0 | 0 | 0 | 49.012 |
| BRTHA2018504 | 33.981 | 0 | 0 | 0 | 0 | 0 | 37.684 |
| BRTHA2018558 | 0 | 0 | 0 | 0 | 0 | 0 | 100 |
| BRTHA2018591 | 0 | 0 | 0 | 0 | 0 | 0 | 100 |
| BRTHA2018624 | 0 | 0 | 0 | 0 | 0 | 0 | 100 |
| BRTHA2018706 | 0 | 0 | 0 | 0 | 0 | 0 | 100 |
| BRTHA2018707 | 0 | 0 | 0 | 0 | 0 | 0 | 57.080 |
| BRTHA2019014 | 0 | 0 | 0 | 0 | 0 | 0 | 100 |
| BRTHA2019022 | 0 | 0 | 0 | 0 | 0 | 0 | 100 |
| BRTHA2019048 | 0 | 0 | 0 | 0 | 0 | 0 | 100 |
| BRTHA2019073 | 0 | 0 | 0 | 0 | 0 | 0 | 57.080 |
| BRTHA2019726 | 0 | 0 | 0 | 0 | 0 | 0 | 100 |
| BRTHA2019743 | 0 | 0 | 0 | 0 | 0 | 0 | 100 |
| BRTHA2020400 | 0 | 0 | 0 | 0 | 0 | 0 | 100 |
| BRTHA2020566 | 0 | 0 | 0 | 0 | 0 | 0 | 100 |
| BRTHA2020642 | 0 | 0 | 0 | 0 | 0 | 0 | 100 |
| BRTHA2020695 | 0 | 0 | 0 | 0 | 0 | 0 | 100 |
| BRTHA2020721 | 0 | 0 | 0 | 0 | 0 | 0 | 100 |
| BRTHA2020781 | 0 | 0 | 0 | 0 | 0 | 0 | 100 |
| BRTHA2020811 | 0 | 0 | 0 | 0 | 0 | 0 | 100 |
| BRTHA2020910 | 0 | 0 | 0 | 0 | 0 | 0 | 100 |
| BRTHA2021212 | 0 | 0 | 0 | 0 | 0 | 0 | 100 |
| BRTHA2021440 | 0 | 0 | 0 | 0 | 0 | 0 | 57.080 |
| BRTHA2021450 | 0 | 0 | 0 | 0 | 0 | 0 | 100 |
| BRTHA2022074 | 0 | 0 | 0 | 0 | 0 | 0 | 100 |
| BRTHA2022914 | 0 | 0 | 0 | 0 | 0 | 0 | 100 |
| BRTHA2022968 | 0 | 0 | 0 | 0 | 0 | 0 | 100 |
| BRTHA2023402 | 0 | 0 | 0 | 0 | 0 | 0 | 100 |
| BRTHA2023437 | 0 | 0 | 0 | 0 | 0 | 0 | 100 |
| BRTHA2024177 | 0 | 0 | 0 | 0 | 0 | 0 | 100 |
| BRTHA2024354 | 0 | 0 | 0 | 0 | 0 | 0 | 100 |
| BRTHA2024712 | 0 | 0 | 0 | 0 | 0 | 0 | 100 |
| BRTHA2025869 | 0 | 0 | 0 | 0 | 0 | 0 | 100 |
| BRTHA2026071 | 0 | 0 | 0 | 0 | 0 | 0 | 13.612 |
| BRTHA2026290 | 0 | 0 | 0 | 0 | 0 | 0 | 100 |
| BRTHA2026311 | 0 | 0 | 0 | 0 | 0 | 0 | 100 |
| BRTHA2027227 | 0 | 0 | 0 | 0 | 0 | 0 | 100 |
| BRTHA2027229 | 0 | 0 | 0 | 0 | 0 | 0 | 2.030 |
| BRTHA2027250 | 0 | 0 | 0 | 0 | 0 | 0 | 100 |
| BRTHA2027546 | 0 | 0 | 0 | 0 | 0 | 0 | 100 |
| BRTHA2028297 | 0 | 0 | 0 | 0 | 0 | 0 | 100 |
| BRTHA2029969 | 0 | 0 | 0 | 0 | 0 | 0 | 100 |
| BRTHA2030036 | 0 | 0 | 0 | 0 | 0 | 0 | 100 |
| BRTHA2030213 | 0 | 0 | 0 | 0 | 0 | 0 | 100 |
| BRTHA2031517 | 0 | 0 | 0 | 47.917 | 0 | 0 | 52.083 |
| BRTHA2031800 | 0 | 0 | 0 | 0 | 0 | 0 | 100 |
| BRTHA2031917 | 0 | 0 | 0 | 0 | 0 | 0 | 100 |
| BRTHA2032763 | 0 | 0 | 0 | 0 | 0 | 0 | 100 |
| BRTHA2032845 | 0 | 0 | 0 | 0 | 0 | 0 | 100 |
| BRTHA2033122 | 0 | 0 | 0 | 0 | 0 | 0 | 100 |
| BRTHA2033155 | 4.253 | 9.757 | 0 | 0 | 15.830 | 0 | 9.433 |
| BRTHA2033264 | 0 | 67.414 | 0 | 0 | 0 | 0 | 32.586 |
| BRTHA2033320 | 0 | 0 | 0 | 0 | 0 | 0 | 100 |
| BRTHA2033469 | 0 | 0 | 0 | 0 | 0 | 0 | 38.930 |
| BRTHA2033683 | 0 | 0 | 0 | 0 | 0 | 0 | 100 |
| BRTHA2034281 | 0 | 0 | 0 | 0 | 0 | 0 | 100 |
| BRTHA2034576 | 0 | 0 | 0 | 0 | 0 | 0 | 100 |
| BRTHA2034874 | 0 | 0 | 0 | 0 | 0 | 0 | 100 |
| BRTHA2035448 | 0 | 0 | 0 | 0 | 0 | 0 | 100 |
| BRTHA2035743 | 0 | 0 | 0 | 34.617 | 0 | 0 | 22.576 |
| BRTHA2036055 | 0 | 0 | 0 | 0 | 0 | 0 | 100 |
| BRTHA2036295 | 0 | 0 | 0 | 0 | 0 | 0 | 100 |
| BRTHA2036660 | 0 | 0 | 0 | 0 | 0 | 0 | 100 |
| BRTHA2037247 | 0 | 0 | 0 | 0 | 0 | 0 | 100 |
| BRTHA2038279 | 0 | 0 | 0 | 0 | 0 | 0 | 100 |
| BRTHA2038345 | 0 | 0 | 0 | 0 | 0 | 0 | 100 |
| BRTHA2038353 | 0 | 0 | 0 | 0 | 0 | 0 | 100 |
| BRTHA2038396 | 0 | 0 | 0 | 0 | 0 | 0 | 100 |
| BRTHA3000252 | 0 | 0 | 0 | 0 | 0 | 0 | 100 |
| BRTHA3000273 | 0 | 0 | 0 | 0 | 0 | 0 | 57.080 |
| BRTHA3000296 | 0 | 0 | 0 | 0 | 0 | 0 | 100 |
| BRTHA3000297 | 0 | 0 | 0 | 47.917 | 0 | 0 | 52.083 |
| BRTHA3000325 | 0 | 0 | 0 | 0 | 0 | 0 | 100 |
| BRTHA3000456 | 0 | 0 | 0 | 0 | 0 | 0 | 62.915 |
| BRTHA3000633 | 0 | 0 | 0 | 0 | 0 | 0 | 37.898 |
| BRTHA3000789 | 0 | 0 | 0 | 35.937 | 0 | 0 | 39.062 |
| BRTHA3001221 | 0 | 0 | 0 | 0 | 0 | 0 | 100 |
| BRTHA3001623 | 0 | 0 | 0 | 0 | 0 | 0 | 100 |
| BRTHA3002265 | 0 | 0 | 0 | 0 | 0 | 0 | 100 |
| BRTHA3002401 | 0 | 0 | 0 | 0 | 0 | 0 | 100 |
| BRTHA3002411 | 0 | 0 | 0 | 0 | 0 | 0 | 100 |
| BRTHA3002427 | 8.577 | 0 | 10.128 | 2.917 | 10.641 | 10.308 | 15.852 |
| BRTHA3002864 | 0 | 0 | 0 | 0 | 0 | 0 | 57.080 |
| BRTHA3002933 | 0 | 0 | 0 | 0 | 0 | 0 | 100 |
| BRTHA3002955 | 0 | 0 | 0 | 0 | 0 | 0 | 100 |
| BRTHA3003000 | 17.150 | 0 | 0 | 0 | 63.832 | 0 | 19.019 |
| BRTHA3003023 | 0 | 4.637 | 7.160 | 2.062 | 0 | 7.287 | 4.483 |
| BRTHA3003074 | 0 | 0 | 0 | 0 | 0 | 0 | 37.459 |
| BRTHA3003225 | 0 | 0 | 0 | 0 | 0 | 0 | 47.165 |
| BRTHA3003339 | 0 | 0 | 0 | 0 | 0 | 0 | 100 |
| BRTHA3003343 | 0 | 0 | 0 | 0 | 0 | 0 | 100 |
| BRTHA3003417 | 0 | 0 | 0 | 31.398 | 0 | 0 | 34.129 |
| BRTHA3003449 | 0 | 0 | 0 | 0 | 0 | 0 | 100 |
| BRTHA3003474 | 0 | 0 | 0 | 0 | 0 | 0 | 100 |
| BRTHA3003490 | 1.623 | 3.724 | 0 | 0 | 0 | 0 | 1.800 |
| BRTHA3003704 | 0 | 0 | 0 | 0 | 0 | 0 | 60.975 |
| BRTHA3003736 | 4.302 | 0 | 0 | 6.584 | 0 | 0 | 2.385 |
| BRTHA3004307 | 9.037 | 0 | 0 | 24.587 | 0 | 0 | 6.681 |
| BRTHA3004432 | 32.087 | 0 | 0 | 0 | 0 | 0 | 35.583 |
| BRTHA3004475 | 0 | 0 | 0 | 0 | 0 | 0 | 52.395 |
| BRTHA3004502 | 0 | 0 | 0 | 0 | 0 | 0 | 100 |
| BRTHA3004610 | 0 | 0 | 0 | 0 | 0 | 0 | 100 |
| BRTHA3005046 | 0 | 0 | 0 | 47.917 | 0 | 0 | 52.083 |
| BRTHA3005735 | 0 | 0 | 0 | 0 | 0 | 0 | 100 |
| BRTHA3005988 | 31.076 | 0 | 0 | 0 | 0 | 0 | 68.924 |
| BRTHA3006318 | 0 | 0 | 0 | 0 | 0 | 0 | 100 |
| BRTHA3006593 | 0 | 0 | 0 | 0 | 0 | 0 | 100 |
| BRTHA3006856 | 0 | 0 | 0 | 0 | 0 | 0 | 100 |
| BRTHA3007113 | 0 | 0 | 0 | 0 | 0 | 0 | 100 |
| BRTHA3007130 | 0 | 0 | 0 | 0 | 0 | 0 | 100 |
| BRTHA3007148 | 0 | 0 | 0 | 0 | 0 | 0 | 100 |
| BRTHA3007319 | 0 | 0 | 0 | 0 | 0 | 0 | 100 |
| BRTHA3007469 | 0 | 0 | 0 | 0 | 0 | 0 | 100 |
| BRTHA3007472 | 0 | 0 | 0 | 7.962 | 0 | 0 | 4.327 |
| BRTHA3007532 | 0 | 0 | 0 | 0 | 0 | 0 | 100 |
| BRTHA3007662 | 0 | 0 | 0 | 64.789 | 0 | 0 | 35.211 |
| BRTHA3007685 | 0 | 0 | 0 | 0 | 0 | 0 | 60.975 |
| BRTHA3007769 | 0 | 0 | 0 | 0 | 0 | 0 | 100 |
| BRTHA3007922 | 0 | 0 | 0 | 0 | 0 | 0 | 34.613 |
| BRTHA3008143 | 0 | 0 | 0 | 0 | 0 | 0 | 100 |
| BRTHA3008293 | 0 | 0 | 0 | 0 | 0 | 0 | 100 |
| BRTHA3008310 | 0 | 0 | 0 | 0 | 0 | 0 | 100 |
| BRTHA3008386 | 0 | 0 | 0 | 0 | 0 | 0 | 100 |
| BRTHA3008520 | 47.417 | 0 | 0 | 0 | 0 | 0 | 52.583 |
| BRTHA3008608 | 0 | 0 | 0 | 0 | 0 | 0 | 100 |
| BRTHA3008694 | 0 | 0 | 0 | 0 | 0 | 0 | 100 |
| BRTHA3008778 | 0 | 0 | 0 | 25.346 | 0 | 0 | 27.551 |
| BRTHA3008826 | 0 | 0 | 0 | 0 | 0 | 0 | 100 |
| BRTHA3009037 | 0 | 0 | 0 | 0 | 0 | 0 | 100 |
| BRTHA3009090 | 0 | 0 | 0 | 12.008 | 0 | 0 | 13.052 |
| BRTHA3009291 | 0 | 0 | 0 | 0 | 0 | 0 | 100 |
| BRTHA3009858 | 0 | 0 | 0 | 0 | 0 | 0 | 25.720 |
| BRTHA3010135 | 20.010 | 0 | 0 | 0 | 0 | 0 | 44.380 |
| BRTHA3010366 | 0 | 0 | 0 | 0 | 0 | 0 | 100 |
| BRTHA3010469 | 0 | 0 | 0 | 0 | 0 | 0 | 100 |
| BRTHA3010530 | 0 | 0 | 0 | 0 | 0 | 0 | 31.009 |
| BRTHA3010540 | 0 | 0 | 0 | 0 | 0 | 0 | 7.466 |
| BRTHA3010717 | 0 | 0 | 0 | 0 | 0 | 0 | 100 |
| BRTHA3011149 | 0 | 0 | 0 | 0 | 0 | 0 | 100 |
| BRTHA3011187 | 0 | 0 | 0 | 0 | 0 | 0 | 100 |
| BRTHA3011194 | 3.534 | 0 | 0 | 10.818 | 0 | 0 | 3.920 |
| BRTHA3011229 | 0 | 0 | 0 | 0 | 0 | 0 | 100 |
| BRTHA3011265 | 25.596 | 0 | 0 | 0 | 0 | 0 | 18.923 |
| BRTHA3011361 | 0 | 0 | 0 | 0 | 0 | 0 | 62.915 |
| BRTHA3011510 | 0 | 0 | 0 | 0 | 0 | 0 | 100 |
| BRTHA3011892 | 0 | 0 | 0 | 0 | 0 | 0 | 100 |
| BRTHA3012265 | 0 | 0 | 0 | 64.789 | 0 | 0 | 35.211 |
| BRTHA3013860 | 0 | 0 | 0 | 0 | 0 | 0 | 100 |
| BRTHA3013882 | 0 | 0 | 0 | 0 | 0 | 0 | 100 |
| BRTHA3013884 | 0 | 0 | 0 | 0 | 0 | 0 | 100 |
| BRTHA3013981 | 0 | 0 | 0 | 0 | 0 | 0 | 100 |
| BRTHA3014000 | 0 | 0 | 0 | 0 | 0 | 0 | 100 |
| BRTHA3014105 | 0 | 0 | 0 | 0 | 0 | 0 | 100 |
| BRTHA3014507 | 0 | 0 | 0 | 0 | 0 | 0 | 100 |
| BRTHA3014547 | 0 | 0 | 0 | 0 | 0 | 0 | 100 |
| BRTHA3014691 | 0 | 0 | 0 | 0 | 0 | 0 | 100 |
| BRTHA3014835 | 0 | 0 | 0 | 0 | 0 | 0 | 100 |
| BRTHA3014854 | 0 | 0 | 0 | 0 | 0 | 0 | 100 |
| BRTHA3014908 | 0 | 0 | 0 | 0 | 0 | 0 | 100 |
| BRTHA3014920 | 0 | 0 | 0 | 0 | 0 | 0 | 100 |
| BRTHA3015815 | 0 | 0 | 0 | 0 | 0 | 0 | 100 |
| BRTHA3016616 | 0 | 0 | 0 | 0 | 0 | 0 | 100 |
| BRTHA3016835 | 0 | 0 | 0 | 0 | 0 | 0 | 100 |
| BRTHA3016845 | 0 | 0 | 0 | 0 | 0 | 0 | 100 |
| BRTHA3016917 | 0 | 0 | 0 | 0 | 0 | 0 | 100 |
| BRTHA3017047 | 0 | 0 | 0 | 0 | 0 | 0 | 100 |
| BRTHA3017589 | 0 | 0 | 0 | 0 | 0 | 0 | 100 |
| BRTHA3017848 | 47.417 | 0 | 0 | 0 | 0 | 0 | 52.583 |
| BRTHA3018409 | 0 | 0 | 0 | 0 | 0 | 0 | 100 |
| BRTHA3018514 | 0 | 0 | 0 | 0 | 0 | 0 | 100 |
| BRTHA3018617 | 0 | 0 | 0 | 0 | 0 | 0 | 100 |
| BRTHA3018623 | 0 | 0 | 0 | 0 | 0 | 0 | 100 |
| BRTHA3018656 | 0 | 0 | 0 | 0 | 0 | 0 | 100 |
| BRTHA3019048 | 0 | 0 | 0 | 0 | 0 | 0 | 100 |
| BRTHA3019105 | 0 | 0 | 0 | 0 | 0 | 0 | 100 |
| BRTHA3019183 | 0 | 0 | 0 | 0 | 0 | 0 | 100 |
| BRTHA3020000 | 0 | 0 | 0 | 0 | 0 | 0 | 100 |
| BRTHA3020314 | 10.182 | 0 | 0 | 0 | 0 | 0 | 22.584 |
| BRTHA3020369 | 0 | 0 | 0 | 0 | 0 | 0 | 100 |
| BRTHA3021569 | 0 | 0 | 0 | 0 | 0 | 0 | 100 |
| BRTHA3021708 | 0 | 0 | 0 | 0 | 0 | 0 | 60.975 |
| BRTHA3021786 | 0 | 0 | 0 | 0 | 0 | 0 | 100 |
| BRTHA3021971 | 1.941 | 0 | 6.876 | 1.980 | 0 | 0 | 4.305 |
| BRTHA3022641 | 0 | 0 | 0 | 0 | 0 | 0 | 19.618 |
| BRTHA3023403 | 14.857 | 0 | 0 | 15.157 | 0 | 0 | 8.238 |
| BRTHA3023523 | 0 | 0 | 0 | 0 | 0 | 0 | 100 |
| BRTHA3023590 | 0 | 0 | 0 | 0 | 0 | 0 | 100 |
| BRTHA3023929 | 0 | 0 | 0 | 0 | 0 | 0 | 100 |
| BRTHA3024233 | 0 | 0 | 0 | 0 | 0 | 0 | 100 |
| BRTHA3024600 | 0 | 0 | 0 | 0 | 0 | 0 | 100 |
| BRTHA3025073 | 0 | 0 | 0 | 0 | 0 | 0 | 100 |
| BRTHA3025789 | 0 | 0 | 0 | 0 | 0 | 0 | 100 |
| BRTHA3025826 | 0 | 0 | 0 | 0 | 0 | 0 | 100 |
| BRTHA3026161 | 0 | 0 | 0 | 0 | 0 | 0 | 100 |
| BRTHA3026180 | 0 | 0 | 0 | 0 | 0 | 0 | 100 |
| BRTHA3026507 | 10.482 | 0 | 12.377 | 7.129 | 13.004 | 0 | 38.746 |
| BRTHA3026556 | 0 | 0 | 0 | 0 | 0 | 0 | 100 |
| BRTHA3026916 | 0 | 0 | 0 | 0 | 0 | 0 | 52.395 |
| BRTHA3027171 | 0 | 0 | 0 | 0 | 0 | 0 | 100 |
| BRTHA3027318 | 0 | 0 | 0 | 0 | 0 | 0 | 100 |
| BRTHA3027638 | 0 | 0 | 0 | 0 | 0 | 0 | 100 |
| BRTHA3027820 | 0 | 0 | 0 | 0 | 0 | 0 | 100 |
| BRTHA3027879 | 0 | 0 | 0 | 0 | 0 | 0 | 48.181 |
| BRTHA3027957 | 0 | 0 | 0 | 0 | 0 | 0 | 100 |
| BRTHA3028339 | 0 | 0 | 0 | 0 | 0 | 0 | 100 |
| BRTHA3028505 | 0 | 0 | 0 | 0 | 0 | 0 | 100 |
| BRTHA3028782 | 0 | 0 | 0 | 0 | 0 | 0 | 100 |
| CD34C3000125 | 0 | 0 | 0 | 2.372 | 0 | 0 | 0 |
| CD34C3000252 | 0 | 0 | 0 | 0.837 | 0 | 0 | 0.910 |
| CD34C3000424 | 0 | 0 | 0 | 2.336 | 0 | 0 | 0 |
| CHONS2000172 | 3.736 | 0 | 0 | 0 | 0 | 0 | 0 |
| CHONS2002829 | 0 | 0 | 0 | 11.668 | 0 | 0 | 1.812 |
| COLON2001721 | 11.065 | 0 | 0 | 5.644 | 0 | 0 | 0 |
| COLON2007733 | 12.468 | 0 | 0 | 0 | 0 | 0 | 0 |
| CTONG1000010 | 0 | 0 | 0 | 0 | 0 | 0 | 7.190 |
| CTONG1000052 | 4.834 | 0 | 0 | 1.849 | 2.249 | 4.357 | 1.340 |
| CTONG1000087 | 0 | 2.399 | 0 | 1.067 | 0 | 0 | 3.479 |
| CTONG1000088 | 0 | 0 | 0 | 2.981 | 0 | 0 | 0 |
| CTONG1000094 | 0 | 1.787 | 4.139 | 2.781 | 1.450 | 0 | 0.864 |
| CTONG1000180 | 0 | 0 | 0 | 0 | 0 | 0 | 26.631 |
| CTONG1000218 | 0 | 1.105 | 0 | 0.491 | 1.792 | 0 | 0.534 |
| CTONG1000241 | 4.243 | 0 | 0 | 8.657 | 0 | 0 | 4.705 |
| CTONG1000467 | 0 | 0 | 30.440 | 8.766 | 0 | 0 | 0 |
| CTONG2000031 | 34.934 | 0 | 0 | 0 | 0 | 0 | 0 |
| CTONG2000042 | 0 | 0 | 0 | 3.574 | 0 | 0 | 0 |
| CTONG2000063 | 2.141 | 0 | 0 | 0 | 0 | 0 | 4.748 |
| CTONG2000411 | 5.755 | 0 | 0 | 0 | 0 | 0 | 6.382 |
| CTONG2000452 | 0 | 0 | 0 | 2.971 | 0 | 0 | 0 |
| CTONG2000469 | 0 | 0 | 10.345 | 0 | 0 | 0 | 0 |
| CTONG2000508 | 7.107 | 1.812 | 2.798 | 1.611 | 0 | 0 | 1.751 |
| CTONG2000827 | 0 | 0 | 0 | 0 | 0 | 0 | 37.320 |
| CTONG2001226 | 0 | 0 | 0 | 7.744 | 0 | 0 | 0 |
| CTONG2001320 | 0 | 0 | 0 | 0 | 19.622 | 0 | 0 |
| CTONG2001533 | 0 | 0 | 0 | 35.391 | 0 | 0 | 0 |
| CTONG2001748 | 2.090 | 0 | 0 | 0 | 0 | 0 | 0 |
| CTONG2001800 | 0 | 0 | 0 | 28.849 | 0 | 0 | 0 |
| CTONG2001911 | 0 | 0 | 0 | 15.416 | 0 | 0 | 0 |
| CTONG2002073 | 0 | 6.721 | 5.189 | 0 | 0 | 0 | 0 |
| CTONG2002095 | 7.003 | 0 | 0 | 7.145 | 0 | 0 | 0 |
| CTONG2002270 | 14.322 | 0 | 0 | 14.611 | 0 | 0 | 8.235 |
| CTONG2002744 | 4.711 | 2.702 | 0 | 2.403 | 4.384 | 6.370 | 5.225 |
| CTONG2002766 | 0 | 0 | 0 | 12.054 | 0 | 0 | 0 |
| CTONG2002803 | 10.307 | 3.378 | 0 | 15.022 | 0 | 0 | 3.266 |
| CTONG2002832 | 0 | 0 | 0 | 0 | 0 | 0 | 12.432 |
| CTONG2002841 | 21.185 | 0 | 0 | 10.807 | 0 | 0 | 0 |
| CTONG2003094 | 5.497 | 0 | 6.491 | 5.608 | 0 | 6.606 | 10.159 |
| CTONG2003298 | 1.451 | 1.665 | 2.571 | 2.221 | 0 | 0 | 0.805 |
| CTONG2003524 | 6.445 | 0 | 0 | 1.644 | 0 | 0 | 0 |
| CTONG2004305 | 34.934 | 0 | 0 | 0 | 0 | 0 | 0 |
| CTONG2004423 | 22.982 | 0 | 0 | 0 | 0 | 0 | 0 |
| CTONG2004487 | 10.405 | 0 | 3.351 | 14.475 | 0 | 0 | 3.147 |
| CTONG2005028 | 6.845 | 0 | 0 | 0 | 0 | 0 | 7.591 |
| CTONG2005145 | 0 | 0 | 0 | 25.034 | 0 | 0 | 0 |
| CTONG2005278 | 0 | 0 | 0 | 2.940 | 0 | 0 | 0 |
| CTONG2005553 | 1.432 | 0 | 0 | 3.653 | 0 | 0 | 1.588 |
| CTONG2005795 | 0 | 0 | 0 | 35.391 | 0 | 0 | 0 |
| CTONG2006004 | 1.055 | 0 | 0 | 0 | 0 | 0 | 1.170 |
| CTONG2006235 | 9.828 | 0 | 11.606 | 5.014 | 6.097 | 0 | 5.450 |
| CTONG2006377 | 11.740 | 0 | 0 | 0 | 0 | 0 | 0 |
| CTONG2006393 | 34.934 | 0 | 0 | 0 | 0 | 0 | 0 |
| CTONG2006412 | 6.207 | 0 | 0 | 6.333 | 23.104 | 0 | 6.884 |
| CTONG2006449 | 0 | 0 | 31.141 | 8.969 | 0 | 0 | 0 |
| CTONG2006562 | 4.200 | 0 | 0 | 1.428 | 0 | 0 | 1.553 |
| CTONG2006709 | 15.516 | 0 | 0 | 7.915 | 9.625 | 0 | 0 |
| CTONG2007072 | 0 | 4.936 | 0 | 0 | 8.007 | 0 | 0 |
| CTONG2007078 | 2.556 | 0 | 0 | 2.608 | 0 | 0 | 1.417 |
| CTONG2007104 | 0 | 14.269 | 0 | 0 | 46.299 | 0 | 0 |
| CTONG2007168 | 24.181 | 0 | 0 | 24.670 | 0 | 0 | 6.704 |
| CTONG2007293 | 0 | 0 | 0 | 0 | 0 | 0 | 37.320 |
| CTONG2007399 | 16.311 | 0 | 0 | 0 | 0 | 0 | 0 |
| CTONG2007400 | 0 | 0 | 0 | 11.740 | 0 | 0 | 0 |
| CTONG2007417 | 0 | 0 | 0 | 0 | 0 | 0 | 23.904 |
| CTONG2007500 | 1.504 | 1.725 | 0 | 0.767 | 0 | 2.712 | 2.502 |
| CTONG2007586 | 0 | 0 | 21.292 | 0 | 0 | 0 | 0 |
| CTONG2007613 | 0 | 0 | 0 | 0 | 0 | 0 | 9.707 |
| CTONG2007681 | 0 | 0 | 0 | 18.854 | 0 | 0 | 20.493 |
| CTONG2007776 | 8.506 | 0 | 15.067 | 4.339 | 0 | 0 | 9.433 |
| CTONG2007779 | 0 | 0 | 0 | 0 | 0 | 0 | 37.320 |
| CTONG2008014 | 0 | 0 | 0 | 15.447 | 56.353 | 0 | 0 |
| CTONG2008321 | 0 | 0 | 53.293 | 0 | 0 | 0 | 0 |
| CTONG2008398 | 2.294 | 0 | 2.708 | 1.560 | 0 | 0 | 1.696 |
| CTONG2008405 | 0 | 0 | 0 | 22.452 | 0 | 0 | 0 |
| CTONG2008506 | 3.764 | 0 | 0 | 3.840 | 0 | 0 | 2.087 |
| CTONG2008518 | 7.703 | 0 | 0 | 3.929 | 0 | 0 | 4.271 |
| CTONG2008521 | 0 | 0 | 0 | 15.511 | 0 | 0 | 0 |
| CTONG2008689 | 0 | 0 | 0 | 21.321 | 0 | 0 | 0 |
| CTONG2008721 | 0 | 0 | 0 | 0 | 0 | 0 | 37.320 |
| CTONG2009033 | 25.755 | 0 | 0 | 26.276 | 0 | 0 | 0 |
| CTONG2009108 | 0 | 0 | 0 | 0 | 0 | 0 | 26.317 |
| CTONG2009423 | 0 | 0 | 0 | 35.391 | 0 | 0 | 0 |
| CTONG2009529 | 0 | 14.506 | 0 | 0 | 0 | 0 | 0 |
| CTONG2009534 | 0 | 0 | 0 | 23.537 | 28.623 | 0 | 8.528 |
| CTONG2009938 | 0 | 0 | 0 | 0 | 0 | 0 | 22.188 |
| CTONG2010348 | 3.542 | 4.063 | 0 | 1.807 | 6.591 | 0 | 3.927 |
| CTONG2010408 | 17.136 | 0 | 0 | 0 | 0 | 0 | 0 |
| CTONG2010652 | 0 | 0 | 0 | 0 | 0 | 0 | 35.648 |
| CTONG2010821 | 1.429 | 0 | 0 | 2.187 | 0 | 0 | 3.170 |
| CTONG2011188 | 0 | 0 | 0 | 21.500 | 0 | 0 | 0 |
| CTONG2011801 | 0 | 0 | 0 | 0 | 11.021 | 0 | 3.284 |
| CTONG2012001 | 0 | 0 | 0 | 7.295 | 0 | 0 | 0 |
| CTONG2012050 | 7.104 | 0 | 0 | 0 | 0 | 0 | 0 |
| CTONG2012452 | 0.712 | 4.085 | 1.261 | 0 | 0 | 0 | 0.790 |
| CTONG2012607 | 0 | 0 | 0 | 0 | 0 | 0 | 5.754 |
| CTONG2012745 | 0 | 0 | 0 | 5.659 | 0 | 0 | 0 |
| CTONG2012847 | 3.444 | 0 | 0 | 0 | 0 | 0 | 1.910 |
| CTONG2012879 | 0 | 0 | 0 | 0 | 0 | 0 | 1.886 |
| CTONG2012996 | 2.920 | 0 | 0 | 0 | 0 | 0 | 6.476 |
| CTONG2013348 | 5.501 | 0 | 0 | 0 | 0 | 0 | 12.201 |
| CTONG2013381 | 6.274 | 7.197 | 0 | 0 | 11.676 | 0 | 0 |
| CTONG2013907 | 2.156 | 0 | 0 | 0 | 0 | 0 | 2.391 |
| CTONG2013934 | 6.936 | 0 | 0 | 7.077 | 0 | 0 | 7.692 |
| CTONG2014119 | 0 | 0 | 0 | 0 | 0 | 0 | 8.988 |
| CTONG2014165 | 0 | 0 | 0 | 0 | 0 | 0 | 5.339 |
| CTONG2014369 | 0 | 0 | 0 | 4.246 | 0 | 0 | 0 |
| CTONG2014389 | 0 | 0 | 0 | 2.695 | 0 | 0 | 2.929 |
| CTONG2014898 | 5.768 | 13.233 | 0 | 0 | 0 | 0 | 6.396 |
| CTONG2015091 | 0 | 0 | 0 | 0 | 0 | 0 | 1.801 |
| CTONG2015204 | 0 | 0 | 0 | 15.475 | 0 | 0 | 0 |
| CTONG2015330 | 28.439 | 0 | 0 | 0 | 0 | 0 | 0 |
| CTONG2015345 | 0 | 0 | 0 | 0 | 31.774 | 0 | 0 |
| CTONG2015518 | 26.559 | 0 | 0 | 0 | 0 | 0 | 0 |
| CTONG2015815 | 8.797 | 0 | 0 | 0 | 0 | 0 | 0 |
| CTONG2016056 | 3.977 | 0 | 0 | 0 | 0 | 0 | 0 |
| CTONG2016408 | 0 | 0 | 0 | 3.777 | 0 | 0 | 4.106 |
| CTONG2016499 | 34.934 | 0 | 0 | 0 | 0 | 0 | 0 |
| CTONG2016575 | 1.989 | 1.141 | 0 | 3.551 | 0 | 0 | 0.551 |
| CTONG2016869 | 2.641 | 0 | 0 | 0 | 0 | 0 | 0 |
| CTONG2016931 | 3.052 | 7.001 | 0 | 12.454 | 0 | 0 | 3.384 |
| CTONG2017094 | 11.178 | 0 | 0 | 0 | 0 | 0 | 0 |
| CTONG2017409 | 0 | 0 | 0 | 0 | 0 | 0 | 37.320 |
| CTONG2017500 | 2.649 | 0 | 0 | 0 | 0 | 0 | 2.938 |
| CTONG2017998 | 2.505 | 0 | 0 | 5.112 | 9.324 | 0 | 0 |
| CTONG2018211 | 13.642 | 0 | 0 | 13.918 | 0 | 0 | 3.782 |
| CTONG2018383 | 0 | 0 | 0 | 0 | 0 | 0 | 5.013 |
| CTONG2018413 | 25.179 | 0 | 0 | 0 | 0 | 0 | 27.923 |
| CTONG2018637 | 0 | 0 | 0 | 6.693 | 0 | 0 | 0 |
| CTONG2018739 | 3.875 | 0 | 0 | 0 | 0 | 0 | 0 |
| CTONG2018898 | 7.706 | 0 | 1.706 | 6.388 | 0 | 5.210 | 5.341 |
| CTONG2019029 | 8.092 | 0 | 0 | 0 | 0 | 0 | 0 |
| CTONG2019063 | 21.231 | 0 | 0 | 0 | 0 | 0 | 0 |
| CTONG2019590 | 0 | 0 | 0 | 0 | 0 | 0 | 11.933 |
| CTONG2019788 | 0 | 0 | 0 | 3.120 | 0 | 0 | 3.391 |
| CTONG2020374 | 31.081 | 0 | 0 | 0 | 0 | 0 | 0 |
| CTONG2020378 | 16.140 | 0 | 0 | 16.467 | 0 | 0 | 0 |
| CTONG2020445 | 0 | 0 | 0 | 0 | 0 | 0 | 23.341 |
| CTONG2020484 | 0 | 0 | 0 | 0.600 | 0 | 2.120 | 0.652 |
| CTONG2020560 | 18.002 | 0 | 0 | 4.591 | 0 | 0 | 3.327 |
| CTONG2020582 | 9.594 | 0 | 0 | 1.958 | 0 | 0 | 4.256 |
| CTONG2020831 | 0 | 0 | 0 | 0 | 0 | 0 | 37.320 |
| CTONG2023021 | 0 | 0 | 0 | 0 | 0 | 0 | 37.320 |
| CTONG2024031 | 2.584 | 0 | 0 | 0 | 0 | 0 | 0 |
| CTONG2027263 | 16.468 | 0 | 0 | 0 | 0 | 0 | 0 |
| CTONG2028124 | 0.503 | 2.306 | 1.780 | 1.026 | 0 | 0 | 1.672 |
| CTONG2028208 | 0 | 0 | 0 | 0 | 0 | 0 | 3.927 |
| CTONG2028309 | 0 | 0 | 0 | 0 | 0 | 0 | 8.140 |
| CTONG2028486 | 0 | 0 | 0 | 35.391 | 0 | 0 | 0 |
| CTONG3000657 | 3.880 | 8.901 | 0 | 11.875 | 0 | 0 | 8.605 |
| CTONG3001123 | 7.847 | 0 | 0 | 0 | 0 | 0 | 0 |
| CTONG3001746 | 42.917 | 0 | 0 | 0 | 0 | 0 | 0 |
| CTONG3002412 | 0 | 0 | 0 | 10.918 | 0 | 0 | 0 |
| CTONG3002835 | 0 | 2.521 | 0 | 4.483 | 0 | 0 | 0 |
| CTONG3004072 | 0 | 0 | 0 | 19.915 | 0 | 0 | 0 |
| CTONG3004726 | 0 | 0 | 0 | 17.278 | 0 | 0 | 0 |
| CTONG3008894 | 0 | 0 | 0 | 2.966 | 0 | 0 | 2.418 |
| CTONG3009028 | 0 | 0 | 0 | 0 | 0 | 0 | 1.785 |
| CTONG3009239 | 0 | 0 | 5.115 | 2.946 | 0 | 0 | 1.601 |
| CTONG3009328 | 11.993 | 0 | 0 | 0 | 0 | 0 | 0 |
| D30ST1000267 | 0 | 9.907 | 0 | 0 | 0 | 15.570 | 0 |
| D30ST1000270 | 0 | 0 | 9.153 | 0 | 0 | 0 | 0 |
| D60ST2000358 | 0 | 0 | 0 | 0 | 0 | 0 | 1.576 |
| D60ST2000464 | 0 | 0 | 0 | 1.118 | 4.078 | 0 | 0 |
| D90ST2000031 | 0 | 0 | 16.736 | 0 | 0 | 0 | 0 |
| D90ST2002608 | 6.684 | 0 | 0 | 4.546 | 0 | 0 | 2.471 |
| D90ST2003106 | 6.904 | 0 | 0 | 0 | 0 | 0 | 0 |
| D90ST2003762 | 0 | 0 | 0 | 0 | 8.112 | 0 | 0 |
| DFNES1000083 | 2.249 | 0 | 15.938 | 2.295 | 0 | 0 | 0 |
| DFNES1000150 | 0 | 0 | 0 | 1.139 | 0 | 0 | 1.238 |
| DFNES2000011 | 0 | 1.255 | 0 | 0 | 2.035 | 3.943 | 0 |
| DFNES2000153 | 0 | 0 | 0 | 0 | 0 | 0 | 3.551 |
| DFNES2000268 | 0 | 2.533 | 0 | 1.127 | 0 | 0 | 0 |
| DFNES2000292 | 0 | 8.610 | 0 | 0 | 0 | 0 | 0 |
| DFNES2000335 | 0 | 0 | 16.783 | 4.833 | 0 | 0 | 0 |
| DFNES2000443 | 0 | 0 | 2.405 | 0 | 0 | 0 | 0.753 |
| DFNES2000457 | 0 | 0 | 0 | 0 | 0 | 0 | 9.850 |
| DFNES2000526 | 0 | 0 | 0 | 0 | 0 | 0 | 3.065 |
| DFNES2001091 | 0 | 19.689 | 0 | 0 | 0 | 0 | 0 |
| DFNES2001096 | 0 | 0 | 27.148 | 0 | 0 | 0 | 0 |
| DFNES2001829 | 9.228 | 0 | 0 | 18.830 | 0 | 0 | 0 |
| DFNES2004371 | 4.733 | 0 | 0 | 0 | 0 | 0 | 1.750 |
| DFNES2005690 | 5.077 | 0 | 0 | 15.539 | 0 | 0 | 11.260 |
| DFNES2007113 | 0 | 0 | 0 | 0 | 0 | 0 | 7.411 |
| DFNES2007634 | 0 | 6.118 | 6.298 | 0.907 | 3.308 | 0 | 4.928 |
| DFNES2008088 | 0 | 6.031 | 0 | 2.682 | 0 | 0 | 2.915 |
| DFNES2008160 | 4.480 | 0 | 0 | 4.571 | 0 | 16.153 | 9.936 |
| DFNES2009482 | 1.418 | 0 | 0 | 0 | 0 | 0 | 1.573 |
| DFNES2011245 | 0 | 0 | 0 | 14.757 | 0 | 0 | 0 |
| DFNES2011380 | 11.690 | 0 | 0 | 0 | 0 | 0 | 0 |
| DFNES2011499 | 0 | 0 | 0 | 6.330 | 0 | 0 | 0 |
| FCBBF1000024 | 6.587 | 0 | 0 | 6.720 | 0 | 7.916 | 0 |
| FCBBF1000025 | 0 | 7.342 | 0 | 6.530 | 11.911 | 0 | 0 |
| FCBBF1000027 | 0.733 | 2.521 | 2.595 | 1.495 | 2.727 | 3.962 | 1.625 |
| FCBBF1000061 | 7.056 | 5.396 | 0 | 2.399 | 0 | 0 | 7.824 |
| FCBBF1000063 | 11.962 | 0 | 0 | 6.102 | 0 | 0 | 0 |
| FCBBF1000077 | 0 | 0 | 0 | 0 | 0 | 0 | 0.898 |
| FCBBF1000118 | 0 | 0 | 0 | 15.471 | 0 | 0 | 0 |
| FCBBF1000121 | 0 | 0 | 35.196 | 0 | 0 | 0 | 0 |
| FCBBF1000139 | 3.496 | 0 | 0 | 1.784 | 0 | 0 | 0 |
| FCBBF1000197 | 4.273 | 0 | 3.784 | 7.629 | 0 | 0 | 3.554 |
| FCBBF1000272 | 0 | 0 | 0 | 35.577 | 0 | 0 | 0 |
| FCBBF1000294 | 0 | 0 | 0 | 2.197 | 4.007 | 0 | 1.194 |
| FCBBF1000367 | 0 | 0 | 0 | 1.550 | 0 | 0 | 0 |
| FCBBF1000376 | 21.300 | 0 | 0 | 0 | 0 | 0 | 0 |
| FCBBF1000403 | 0 | 0 | 0 | 0 | 31.217 | 0 | 0 |
| FCBBF1000412 | 5.806 | 0 | 0 | 0 | 0 | 0 | 2.146 |
| FCBBF1000449 | 13.371 | 0 | 0 | 0 | 0 | 0 | 7.414 |
| FCBBF1000466 | 1.911 | 0 | 0 | 0.650 | 0 | 0 | 5.650 |
| FCBBF1000476 | 26.054 | 0 | 0 | 8.860 | 0 | 0 | 0 |
| FCBBF1000509 | 3.732 | 17.123 | 19.830 | 5.711 | 6.945 | 6.728 | 6.208 |
| FCBBF1000556 | 9.594 | 9.783 | 15.106 | 9.788 | 3.968 | 7.687 | 16.550 |
| FCBBF1000563 | 0 | 0 | 0 | 1.532 | 11.180 | 0 | 6.662 |
| FCBBF1000574 | 8.303 | 0 | 7.354 | 6.353 | 0 | 0 | 4.604 |
| FCBBF1000671 | 0 | 0 | 0 | 13.968 | 0 | 0 | 0 |
| FCBBF1000684 | 0 | 0 | 0 | 0 | 66.829 | 0 | 0 |
| FCBBF1000748 | 0 | 0 | 0 | 0 | 0 | 0 | 37.510 |
| FCBBF1000760 | 0.655 | 0 | 0 | 0 | 0 | 0 | 1.452 |
| FCBBF2000038 | 0 | 3.082 | 0 | 0 | 0 | 4.843 | 0 |
| FCBBF2000087 | 0 | 0 | 0 | 0 | 0 | 10.402 | 0 |
| FCBBF2000199 | 11.190 | 0 | 0 | 2.854 | 0 | 0 | 6.205 |
| FCBBF2000362 | 8.370 | 0 | 0 | 17.080 | 0 | 0 | 0 |
| FCBBF2000566 | 0 | 8.527 | 0 | 0 | 0 | 0 | 0 |
| FCBBF2000591 | 0.287 | 0 | 0 | 0.292 | 0 | 0 | 0.318 |
| FCBBF2000685 | 0 | 15.608 | 0 | 0 | 25.321 | 0 | 0 |
| FCBBF2000733 | 31.702 | 0 | 0 | 16.172 | 29.499 | 0 | 0 |
| FCBBF2000885 | 9.210 | 0 | 0 | 6.264 | 0 | 0 | 1.702 |
| FCBBF2000940 | 0 | 0 | 0 | 0 | 0 | 0 | 37.510 |
| FCBBF2001001 | 19.115 | 0 | 0 | 0 | 0 | 34.461 | 0 |
| FCBBF2001105 | 3.035 | 0 | 10.753 | 0 | 0 | 0 | 0 |
| FCBBF2001183 | 16.537 | 3.794 | 0 | 11.810 | 6.155 | 0 | 9.169 |
| FCBBF2001211 | 25.634 | 14.703 | 0 | 0 | 0 | 0 | 7.107 |
| FCBBF2001291 | 1.902 | 0 | 0 | 1.941 | 0 | 0 | 0 |
| FCBBF2001400 | 0 | 0 | 0 | 0 | 0 | 0 | 22.584 |
| FCBBF2001480 | 0 | 55.394 | 0 | 0 | 0 | 0 | 0 |
| FCBBF2001538 | 0.762 | 1.748 | 0 | 2.332 | 5.672 | 0 | 3.380 |
| FCBBF2001594 | 7.606 | 0 | 0 | 11.640 | 0 | 0 | 21.086 |
| FCBBF2001817 | 0 | 55.394 | 0 | 0 | 0 | 0 | 0 |
| FCBBF2002349 | 0 | 0 | 13.985 | 4.028 | 0 | 0 | 0 |
| FCBBF2002801 | 5.191 | 0 | 9.194 | 2.648 | 0 | 0 | 0 |
| FCBBF2002928 | 0 | 0 | 0 | 3.174 | 0 | 0 | 0 |
| FCBBF2003293 | 0 | 0 | 0 | 0 | 0 | 66.122 | 0 |
| FCBBF2003543 | 35.119 | 0 | 0 | 0 | 0 | 0 | 0 |
| FCBBF2003567 | 0 | 0 | 0 | 19.952 | 0 | 0 | 7.229 |
| FCBBF2004066 | 4.032 | 0 | 7.142 | 6.170 | 0 | 29.076 | 11.178 |
| FCBBF2005909 | 6.241 | 0 | 0 | 19.102 | 0 | 0 | 6.921 |
| FCBBF2006634 | 0 | 10.829 | 0 | 0 | 0 | 0 | 0 |
| FCBBF2006781 | 0 | 0 | 0 | 0 | 0 | 0 | 7.017 |
| FCBBF3000115 | 11.973 | 0 | 0 | 8.143 | 0 | 0 | 0 |
| FCBBF3000168 | 8.142 | 18.679 | 0 | 8.306 | 0 | 0 | 9.029 |
| FCBBF3000228 | 0 | 0 | 0 | 9.143 | 0 | 0 | 0 |
| FCBBF3000229 | 0 | 22.152 | 0 | 0 | 35.938 | 0 | 0 |
| FCBBF3000388 | 9.880 | 11.334 | 0 | 0 | 0 | 17.812 | 0 |
| FCBBF3000434 | 1.851 | 8.495 | 0 | 11.333 | 6.891 | 0 | 0 |
| FCBBF3000536 | 0 | 0 | 9.443 | 0 | 0 | 0 | 0 |
| FCBBF3001081 | 0 | 0 | 0 | 0 | 0 | 0 | 5.824 |
| FCBBF3001377 | 10.297 | 0 | 0 | 0 | 0 | 0 | 0 |
| FCBBF3001470 | 0 | 0 | 0 | 0 | 0 | 0 | 3.011 |
| FCBBF3001632 | 0 | 3.542 | 0 | 0 | 0 | 0 | 0 |
| FCBBF3001657 | 11.795 | 0 | 0 | 9.627 | 8.780 | 0 | 5.232 |
| FCBBF3001890 | 0 | 0 | 19.489 | 0 | 0 | 0 | 3.050 |
| FCBBF3001977 | 7.448 | 0 | 0 | 7.599 | 0 | 0 | 0 |
| FCBBF3002818 | 35.119 | 0 | 0 | 0 | 0 | 0 | 0 |
| FCBBF3003557 | 35.119 | 0 | 0 | 0 | 0 | 0 | 0 |
| FCBBF3003787 | 9.787 | 0 | 0 | 0 | 0 | 0 | 0 |
| FCBBF3003800 | 2.363 | 1.807 | 1.395 | 2.813 | 2.932 | 1.420 | 1.310 |
| FCBBF3004323 | 5.510 | 0 | 0 | 0 | 0 | 0 | 0 |
| FCBBF3004473 | 2.298 | 0 | 0 | 1.172 | 0 | 0 | 2.548 |
| FCBBF3004715 | 3.745 | 0 | 0 | 0 | 0 | 0 | 0 |
| FCBBF3004955 | 0 | 0 | 0 | 23.589 | 0 | 0 | 0 |
| FCBBF3005320 | 0 | 0 | 0 | 5.566 | 0 | 0 | 0 |
| FCBBF3005330 | 2.771 | 0 | 2.454 | 2.827 | 0 | 0 | 1.536 |
| FCBBF3006821 | 5.716 | 0 | 0 | 5.832 | 0 | 0 | 0 |
| FCBBF3007462 | 0 | 0 | 0 | 35.577 | 0 | 0 | 0 |
| FCBBF3007631 | 21.846 | 0 | 0 | 22.288 | 0 | 0 | 0 |
| FCBBF3007859 | 12.992 | 0 | 0 | 13.255 | 0 | 0 | 7.204 |
| FCBBF3007860 | 50.592 | 0 | 0 | 10.323 | 0 | 0 | 0 |
| FCBBF3008153 | 10.942 | 0 | 0 | 0 | 0 | 0 | 6.067 |
| FCBBF3008159 | 0 | 0 | 0 | 21.128 | 0 | 0 | 0 |
| FCBBF3008644 | 8.616 | 0 | 0 | 0 | 0 | 0 | 0 |
| FCBBF3009069 | 17.913 | 0 | 0 | 4.569 | 0 | 0 | 34.763 |
| FCBBF3009101 | 35.119 | 0 | 0 | 0 | 0 | 0 | 0 |
| FCBBF3009152 | 19.020 | 0 | 0 | 0 | 0 | 0 | 0 |
| FCBBF3009479 | 0 | 0 | 0 | 0 | 0 | 0 | 10.970 |
| FCBBF3009526 | 11.814 | 0 | 0 | 0 | 0 | 0 | 13.101 |
| FCBBF3009541 | 0 | 0 | 0 | 1.262 | 0 | 0 | 0.914 |
| FCBBF3009978 | 0 | 0 | 65.725 | 0 | 0 | 0 | 0 |
| FCBBF3010012 | 6.894 | 5.272 | 0 | 2.344 | 0 | 8.285 | 0 |
| FCBBF3010142 | 14.433 | 0 | 0 | 14.725 | 0 | 0 | 16.005 |
| FCBBF3010695 | 4.960 | 0 | 0 | 0 | 0 | 0 | 2.750 |
| FCBBF3012332 | 21.300 | 0 | 0 | 0 | 0 | 0 | 0 |
| FCBBF3012347 | 0 | 0 | 7.775 | 0 | 8.169 | 0 | 2.434 |
| FCBBF3013266 | 0 | 0 | 0 | 0 | 0 | 0 | 23.444 |
| FCBBF3013506 | 23.748 | 0 | 0 | 0 | 0 | 0 | 0 |
| FCBBF3013800 | 0 | 0 | 0 | 35.577 | 0 | 0 | 0 |
| FCBBF3014260 | 2.258 | 0 | 7.999 | 11.518 | 0 | 0 | 0 |
| FCBBF3015100 | 4.990 | 0 | 17.676 | 0 | 0 | 0 | 5.533 |
| FCBBF3016622 | 35.119 | 0 | 0 | 0 | 0 | 0 | 0 |
| FCBBF3016667 | 0 | 0 | 0 | 13.060 | 0 | 0 | 0 |
| FCBBF3016928 | 2.629 | 0 | 0 | 1.788 | 0 | 0 | 3.887 |
| FCBBF3017255 | 0 | 0 | 0 | 35.577 | 0 | 0 | 0 |
| FCBBF3017396 | 0 | 0 | 0 | 6.248 | 0 | 0 | 0 |
| FCBBF3017531 | 3.207 | 3.678 | 0 | 0 | 0 | 0 | 3.556 |
| FCBBF3017918 | 6.547 | 0 | 0 | 0 | 0 | 0 | 0 |
| FCBBF3018067 | 0 | 0 | 0 | 0 | 0 | 66.122 | 0 |
| FCBBF3018173 | 0 | 0 | 0 | 35.577 | 0 | 0 | 0 |
| FCBBF3018796 | 0 | 7.122 | 0 | 0 | 0 | 0 | 6.886 |
| FCBBF3018949 | 0 | 0 | 0 | 14.438 | 0 | 0 | 15.693 |
| FCBBF3019839 | 14.980 | 0 | 0 | 11.462 | 0 | 0 | 4.153 |
| FCBBF3021026 | 0 | 55.394 | 0 | 0 | 0 | 0 | 0 |
| FCBBF3021807 | 0 | 0 | 0 | 0 | 0 | 15.634 | 0 |
| FCBBF3022566 | 35.119 | 0 | 0 | 0 | 0 | 0 | 0 |
| FCBBF3022593 | 0 | 0 | 0 | 0 | 0 | 0 | 7.683 |
| FCBBF3022767 | 0 | 0 | 0 | 0 | 0 | 0 | 22.584 |
| FCBBF3023368 | 7.361 | 0 | 0 | 2.503 | 0 | 0 | 2.721 |
| FCBBF3023667 | 0 | 0.305 | 0 | 0 | 0 | 0 | 0.736 |
| FCBBF3024002 | 5.675 | 0 | 0 | 0 | 0 | 0 | 0 |
| FCBBF3024266 | 9.782 | 0 | 0 | 9.980 | 0 | 0 | 0 |
| FCBBF3024623 | 0 | 0 | 0 | 0 | 0 | 0 | 12.426 |
| FCBBF3025285 | 0 | 55.394 | 0 | 0 | 0 | 0 | 0 |
| FCBBF3025417 | 0 | 0 | 0 | 0 | 31.948 | 0 | 19.038 |
| FCBBF3025528 | 0 | 0 | 0 | 4.926 | 0 | 0 | 0 |
| FCBBF3025568 | 16.446 | 0 | 0 | 33.557 | 0 | 0 | 0 |
| FCBBF3025650 | 0 | 0 | 0 | 25.656 | 0 | 0 | 27.887 |
| FCBBF3025737 | 0 | 0 | 0 | 0 | 0 | 11.719 | 3.604 |
| FCBBF3026308 | 0 | 29.322 | 0 | 0 | 0 | 0 | 14.174 |
| FCBBF3026651 | 14.594 | 0 | 0 | 22.334 | 0 | 0 | 8.092 |
| FCBBF3026692 | 0 | 0 | 0 | 0 | 0 | 58.507 | 0 |
| FCBBF3027559 | 35.119 | 0 | 0 | 0 | 0 | 0 | 0 |
| FCBBF3028244 | 5.571 | 2.130 | 3.289 | 2.842 | 0 | 3.348 | 1.030 |
| FCBBF3028593 | 0 | 0 | 0 | 0 | 0 | 0 | 8.955 |
| FCBBF4000142 | 3.656 | 0 | 0 | 0 | 0 | 0 | 4.054 |
| FCBBF4000268 | 0 | 0 | 0 | 35.577 | 0 | 0 | 0 |
| FCBBF4000446 | 2.253 | 1.723 | 0 | 0.766 | 0 | 2.708 | 0 |
| FCBBF5000061 | 0 | 0 | 0 | 0 | 0 | 0 | 23.231 |
| FCBBF5000165 | 9.875 | 0 | 0 | 23.508 | 0 | 0 | 0 |
| FCBBF5000261 | 0 | 0 | 0 | 0 | 0 | 0 | 11.516 |
| FCBBF5000325 | 0 | 23.194 | 0 | 10.314 | 37.628 | 0 | 0 |
| FEBRA1000022 | 0 | 0 | 0 | 10.739 | 0 | 0 | 0 |
| FEBRA1000057 | 1.736 | 7.966 | 6.150 | 3.542 | 6.461 | 0 | 1.925 |
| FEBRA1000088 | 0 | 9.791 | 0 | 0 | 0 | 0 | 0 |
| FEBRA1000188 | 0 | 0 | 0 | 2.135 | 0 | 0 | 0 |
| FEBRA1000189 | 0 | 0 | 0 | 20.683 | 0 | 0 | 0 |
| FEBRA1000190 | 0 | 18.233 | 0 | 0 | 0 | 0 | 0 |
| FEBRA2000007 | 0 | 0 | 0 | 24.160 | 0 | 0 | 0 |
| FEBRA2000053 | 21.156 | 0 | 0 | 7.195 | 0 | 0 | 23.461 |
| FEBRA2000105 | 0.717 | 1.645 | 0 | 0 | 0 | 0 | 4.772 |
| FEBRA2000129 | 5.199 | 5.964 | 0 | 0 | 0 | 0 | 2.883 |
| FEBRA2000210 | 0.707 | 0 | 0 | 0.721 | 0 | 0 | 0 |
| FEBRA2000253 | 0 | 0 | 0 | 14.934 | 0 | 0 | 0 |
| FEBRA2000297 | 0 | 18.194 | 0 | 0 | 0 | 0 | 8.794 |
| FEBRA2000333 | 0 | 0 | 0 | 0 | 0 | 0 | 30.789 |
| FEBRA2000402 | 0 | 0 | 0 | 5.655 | 0 | 0 | 0 |
| FEBRA2000452 | 4.012 | 0 | 0 | 2.046 | 0 | 0 | 3.337 |
| FEBRA2000462 | 31.051 | 0 | 0 | 8.640 | 0 | 0 | 6.261 |
| FEBRA2000536 | 0 | 0 | 0 | 3.214 | 0 | 0 | 3.493 |
| FEBRA2000538 | 0 | 0 | 0 | 0 | 59.888 | 0 | 0 |
| FEBRA2000581 | 21.479 | 0 | 0 | 15.421 | 0 | 0 | 7.940 |
| FEBRA2000680 | 0 | 0 | 0 | 9.589 | 0 | 0 | 0 |
| FEBRA2000733 | 0.506 | 0.387 | 1.194 | 0.860 | 1.254 | 0 | 0.934 |
| FEBRA2000740 | 2.262 | 0 | 0 | 1.154 | 0 | 0 | 1.254 |
| FEBRA2000757 | 12.249 | 0 | 0 | 21.870 | 0 | 0 | 6.792 |
| FEBRA2000762 | 0 | 0 | 0 | 0 | 0 | 22.430 | 0 |
| FEBRA2000771 | 0 | 0 | 0 | 0 | 0 | 0 | 24.058 |
| FEBRA2000772 | 0 | 19.625 | 0 | 0 | 0 | 0 | 9.486 |
| FEBRA2000787 | 0 | 0 | 6.997 | 0 | 0 | 0 | 2.190 |
| FEBRA2000793 | 0 | 0 | 0 | 0 | 0 | 0 | 4.253 |
| FEBRA2000815 | 0 | 0 | 12.807 | 0 | 0 | 0 | 0 |
| FEBRA2000877 | 14.227 | 0 | 0 | 0 | 0 | 0 | 15.777 |
| FEBRA2000880 | 0 | 24.311 | 0 | 0 | 0 | 0 | 0 |
| FEBRA2000901 | 0 | 0 | 0 | 0 | 0 | 37.454 | 0 |
| FEBRA2001004 | 0 | 0 | 0 | 22.568 | 0 | 0 | 0 |
| FEBRA2001146 | 11.183 | 0 | 0 | 0 | 0 | 0 | 0 |
| FEBRA2001197 | 0 | 0 | 0 | 0 | 0 | 0 | 15.632 |
| FEBRA2001227 | 3.697 | 0 | 13.098 | 11.316 | 0 | 0 | 12.300 |
| FEBRA2001245 | 12.612 | 0 | 8.936 | 10.293 | 0 | 0 | 8.391 |
| FEBRA2001294 | 0 | 0 | 8.561 | 0 | 0 | 0 | 2.680 |
| FEBRA2001334 | 11.501 | 0 | 0 | 5.867 | 0 | 0 | 0 |
| FEBRA2001440 | 0 | 0 | 0 | 0 | 0 | 41.969 | 0 |
| FEBRA2001492 | 22.656 | 0 | 0 | 6.604 | 0 | 0 | 14.357 |
| FEBRA2001571 | 0 | 0 | 0 | 2.140 | 0 | 0 | 4.651 |
| FEBRA2001581 | 0 | 9.407 | 0 | 0 | 15.261 | 0 | 0 |
| FEBRA2001591 | 0 | 0 | 0 | 0 | 0 | 0 | 11.328 |
| FEBRA2001669 | 17.140 | 0 | 0 | 20.766 | 0 | 0 | 4.752 |
| FEBRA2001698 | 12.173 | 0 | 0 | 12.420 | 0 | 0 | 0 |
| FEBRA2001706 | 28.630 | 0 | 0 | 0 | 0 | 0 | 0 |
| FEBRA2001715 | 3.989 | 0 | 0 | 25.433 | 0 | 0 | 6.635 |
| FEBRA2001745 | 0 | 0 | 4.440 | 0 | 0 | 0 | 0 |
| FEBRA2001814 | 3.969 | 3.035 | 0 | 2.700 | 0 | 0 | 1.467 |
| FEBRA2001867 | 0 | 0 | 13.129 | 0 | 0 | 0 | 12.330 |
| FEBRA2001974 | 0 | 26.731 | 0 | 0 | 0 | 0 | 0 |
| FEBRA2001990 | 18.144 | 16.650 | 0 | 7.404 | 0 | 0 | 8.048 |
| FEBRA2002027 | 2.533 | 0 | 0 | 2.585 | 9.430 | 9.135 | 0 |
| FEBRA2002352 | 0 | 0 | 12.297 | 3.542 | 0 | 0 | 0 |
| FEBRA2002442 | 0 | 47.925 | 0 | 0 | 0 | 0 | 0 |
| FEBRA2002456 | 13.088 | 0 | 0 | 8.902 | 0 | 0 | 14.515 |
| FEBRA2002611 | 21.730 | 0 | 0 | 0 | 0 | 0 | 24.098 |
| FEBRA2002707 | 3.603 | 0 | 0 | 0 | 0 | 0 | 0 |
| FEBRA2002781 | 6.842 | 0 | 0 | 0 | 0 | 0 | 0 |
| FEBRA2002792 | 8.031 | 9.212 | 0 | 10.925 | 9.964 | 4.826 | 16.328 |
| FEBRA2002931 | 18.604 | 0 | 3.877 | 16.748 | 0 | 0 | 15.777 |
| FEBRA2002933 | 0 | 0 | 0 | 0.755 | 2.755 | 0 | 0.821 |
| FEBRA2003100 | 0.659 | 0 | 0 | 2.016 | 0 | 0 | 4.382 |
| FEBRA2003115 | 21.678 | 0 | 0 | 0 | 0 | 0 | 0 |
| FEBRA2003128 | 31.997 | 0 | 0 | 14.839 | 0 | 0 | 6.452 |
| FEBRA2003258 | 0 | 0 | 0 | 2.886 | 0 | 10.201 | 6.275 |
| FEBRA2003436 | 0 | 0 | 39.387 | 0 | 0 | 0 | 0 |
| FEBRA2003470 | 14.595 | 0 | 0 | 0 | 0 | 0 | 16.185 |
| FEBRA2003707 | 0 | 47.925 | 0 | 0 | 0 | 0 | 0 |
| FEBRA2003726 | 0 | 2.285 | 0 | 0 | 0 | 0 | 1.104 |
| FEBRA2003750 | 0 | 0 | 12.934 | 1.862 | 0 | 0 | 6.073 |
| FEBRA2003833 | 5.187 | 0 | 6.126 | 7.057 | 0 | 0 | 1.918 |
| FEBRA2003926 | 0 | 0 | 2.473 | 0.712 | 0 | 2.517 | 0.774 |
| FEBRA2003930 | 0 | 0 | 0 | 0 | 6.689 | 0 | 1.993 |
| FEBRA2004042 | 0 | 0 | 0 | 2.164 | 0 | 0 | 0 |
| FEBRA2004091 | 10.568 | 0 | 37.438 | 0 | 0 | 0 | 0 |
| FEBRA2004219 | 0 | 0 | 0 | 29.041 | 0 | 0 | 0 |
| FEBRA2004224 | 5.789 | 0 | 0 | 7.087 | 8.618 | 8.349 | 2.568 |
| FEBRA2004293 | 0 | 6.099 | 0 | 0 | 0 | 19.171 | 2.948 |
| FEBRA2004325 | 0 | 0 | 0 | 0 | 0 | 0 | 7.812 |
| FEBRA2004485 | 0 | 0 | 0 | 0 | 0 | 0 | 7.696 |
| FEBRA2004490 | 14.095 | 0 | 0 | 0 | 0 | 0 | 15.631 |
| FEBRA2004592 | 0 | 0 | 0 | 0 | 59.888 | 0 | 0 |
| FEBRA2004628 | 0 | 0 | 0 | 0 | 31.851 | 0 | 0 |
| FEBRA2004818 | 0 | 6.248 | 0 | 0 | 5.068 | 0 | 0 |
| FEBRA2005291 | 0 | 0 | 0 | 0 | 0 | 13.076 | 0 |
| FEBRA2005361 | 8.405 | 19.282 | 12.406 | 2.858 | 5.214 | 0 | 0.777 |
| FEBRA2005416 | 2.148 | 0 | 3.804 | 1.096 | 3.997 | 0 | 2.382 |
| FEBRA2005427 | 28.630 | 0 | 0 | 0 | 0 | 0 | 0 |
| FEBRA2005476 | 0 | 0 | 0 | 0 | 0 | 0 | 2.888 |
| FEBRA2005572 | 1.782 | 0 | 0 | 0 | 0 | 0 | 5.928 |
| FEBRA2005752 | 0 | 0 | 0 | 0 | 0 | 15.008 | 0 |
| FEBRA2005788 | 24.677 | 0 | 0 | 5.035 | 0 | 0 | 0 |
| FEBRA2005824 | 3.730 | 1.711 | 9.249 | 12.558 | 13.883 | 4.035 | 8.686 |
| FEBRA2005995 | 2.804 | 0 | 4.966 | 0 | 0 | 0 | 6.218 |
| FEBRA2006055 | 0 | 6.060 | 0 | 0 | 0 | 0 | 0 |
| FEBRA2006092 | 3.109 | 1.427 | 0 | 0.634 | 0 | 0 | 1.379 |
| FEBRA2006255 | 14.333 | 0 | 4.616 | 9.306 | 4.850 | 4.698 | 10.115 |
| FEBRA2006270 | 0 | 0 | 0 | 0 | 0 | 0 | 1.296 |
| FEBRA2006357 | 11.922 | 0 | 0 | 34.464 | 2.465 | 0 | 4.407 |
| FEBRA2006368 | 3.107 | 14.258 | 0 | 3.170 | 0 | 0 | 3.446 |
| FEBRA2006370 | 0 | 0 | 0 | 14.576 | 0 | 0 | 0 |
| FEBRA2006372 | 0 | 0 | 0 | 1.370 | 0 | 0 | 1.489 |
| FEBRA2006401 | 0.502 | 0 | 0 | 0 | 0 | 0 | 0.557 |
| FEBRA2006485 | 3.042 | 0 | 0 | 0 | 0 | 10.968 | 0 |
| FEBRA2006519 | 11.891 | 0 | 0 | 0 | 0 | 0 | 0 |
| FEBRA2006521 | 7.648 | 0 | 0 | 0 | 0 | 0 | 16.963 |
| FEBRA2006553 | 3.956 | 0 | 0 | 0 | 0 | 0 | 0 |
| FEBRA2006627 | 0 | 0 | 0 | 10.526 | 0 | 0 | 0 |
| FEBRA2006808 | 0 | 0 | 14.542 | 8.376 | 0 | 0 | 0 |
| FEBRA2006817 | 0 | 0 | 0 | 0 | 0 | 59.124 | 0 |
| FEBRA2006890 | 44.515 | 0 | 0 | 0 | 0 | 0 | 0 |
| FEBRA2007176 | 28.630 | 0 | 0 | 0 | 0 | 0 | 0 |
| FEBRA2007212 | 0 | 0 | 0 | 16.019 | 0 | 0 | 4.353 |
| FEBRA2007534 | 0 | 0 | 0 | 36.825 | 0 | 0 | 0 |
| FEBRA2007544 | 14.689 | 0 | 0 | 4.995 | 0 | 0 | 2.715 |
| FEBRA2007551 | 0 | 0 | 0 | 0 | 0 | 0 | 30.789 |
| FEBRA2007589 | 13.674 | 0 | 0 | 20.927 | 0 | 0 | 15.164 |
| FEBRA2007613 | 3.318 | 0 | 11.756 | 6.771 | 12.351 | 11.965 | 0 |
| FEBRA2007622 | 0 | 0 | 0 | 1.053 | 3.840 | 0 | 0 |
| FEBRA2007801 | 4.937 | 0 | 8.745 | 7.556 | 0 | 0 | 5.475 |
| FEBRA2007818 | 0 | 0 | 0 | 0 | 0 | 0 | 6.201 |
| FEBRA2007823 | 28.630 | 0 | 0 | 0 | 0 | 0 | 0 |
| FEBRA2007880 | 0 | 0 | 0 | 3.840 | 0 | 0 | 4.174 |
| FEBRA2007900 | 7.751 | 0 | 0 | 0 | 0 | 0 | 8.595 |
| FEBRA2007901 | 0 | 8.503 | 0 | 7.562 | 0 | 0 | 0 |
| FEBRA2007957 | 54.616 | 0 | 0 | 0 | 0 | 0 | 0 |
| FEBRA2008036 | 4.285 | 3.277 | 0 | 4.372 | 5.316 | 0 | 4.752 |
| FEBRA2008081 | 2.124 | 3.249 | 0 | 0.722 | 2.636 | 0 | 0 |
| FEBRA2008086 | 0 | 0 | 0 | 0 | 0 | 0 | 30.789 |
| FEBRA2008087 | 0.358 | 0.822 | 0.635 | 0 | 0.667 | 0 | 0.596 |
| FEBRA2008201 | 2.398 | 0 | 0 | 0 | 0 | 0 | 2.659 |
| FEBRA2008210 | 0 | 0 | 23.761 | 0 | 0 | 0 | 0 |
| FEBRA2008255 | 0 | 23.219 | 0 | 0 | 0 | 0 | 0 |
| FEBRA2008266 | 0 | 0 | 0 | 0 | 0 | 0 | 10.077 |
| FEBRA2008287 | 0 | 0 | 0 | 3.007 | 0 | 0 | 6.537 |
| FEBRA2008302 | 0 | 7.325 | 0 | 1.086 | 0 | 11.512 | 3.540 |
| FEBRA2008360 | 0 | 0 | 0 | 0 | 0 | 0 | 11.338 |
| FEBRA2008583 | 0.925 | 0.606 | 0.936 | 1.483 | 0.984 | 1.430 | 3.371 |
| FEBRA2008662 | 11.110 | 0 | 0 | 3.239 | 0 | 11.446 | 1.760 |
| FEBRA2008755 | 0 | 0 | 5.819 | 0 | 0 | 0 | 0 |
| FEBRA2008861 | 21.424 | 0 | 0 | 3.974 | 0 | 7.023 | 4.320 |
| FEBRA2009022 | 0 | 0 | 0 | 0 | 12.430 | 0 | 0 |
| FEBRA2009185 | 4.543 | 6.253 | 3.219 | 8.342 | 10.145 | 3.276 | 0 |
| FEBRA2009289 | 0 | 0 | 0 | 14.316 | 0 | 0 | 0 |
| FEBRA2009328 | 4.955 | 11.368 | 0 | 0 | 0 | 0 | 0 |
| FEBRA2009352 | 0 | 0 | 0 | 29.041 | 0 | 0 | 0 |
| FEBRA2009362 | 7.614 | 0 | 26.973 | 0 | 0 | 27.453 | 0 |
| FEBRA2009419 | 5.285 | 3.031 | 0 | 2.696 | 0 | 0 | 4.396 |
| FEBRA2009514 | 0 | 0 | 0 | 3.379 | 0 | 0 | 0 |
| FEBRA2009588 | 19.382 | 0 | 0 | 0 | 0 | 0 | 5.373 |
| FEBRA2009846 | 0 | 0 | 0 | 0 | 0 | 0 | 22.893 |
| FEBRA2009986 | 6.427 | 0 | 0 | 19.673 | 0 | 0 | 7.128 |
| FEBRA2010719 | 0 | 0 | 0 | 17.703 | 0 | 0 | 0 |
| FEBRA2010746 | 8.579 | 0 | 0 | 0 | 0 | 0 | 0 |
| FEBRA2010768 | 0 | 0 | 0 | 0 | 0 | 59.124 | 0 |
| FEBRA2012181 | 16.511 | 0 | 0 | 16.845 | 0 | 0 | 0 |
| FEBRA2013699 | 7.157 | 0 | 0 | 7.301 | 0 | 0 | 0 |
| FEBRA2013951 | 0 | 0 | 0 | 0 | 0 | 59.124 | 0 |
| FEBRA2014297 | 0 | 14.710 | 7.571 | 2.180 | 0 | 7.706 | 0 |
| FEBRA2014417 | 7.559 | 6.194 | 3.826 | 3.856 | 4.019 | 5.841 | 1.198 |
| FEBRA2015085 | 1.525 | 0 | 0 | 1.556 | 0 | 5.498 | 5.072 |
| FEBRA2016398 | 17.280 | 39.644 | 0 | 0 | 0 | 0 | 0 |
| FEBRA2016572 | 0 | 0 | 0 | 0 | 0 | 0 | 21.790 |
| FEBRA2016583 | 0 | 0 | 0 | 29.041 | 0 | 0 | 0 |
| FEBRA2017024 | 0 | 0 | 0 | 0 | 0 | 0 | 21.399 |
| FEBRA2017533 | 5.455 | 0 | 0 | 5.566 | 0 | 0 | 0 |
| FEBRA2017680 | 0 | 21.815 | 0 | 9.701 | 0 | 0 | 0 |
| FEBRA2019242 | 0 | 0 | 0 | 8.277 | 0 | 0 | 0 |
| FEBRA2019711 | 0 | 4.851 | 0 | 0 | 0 | 0 | 2.345 |
| FEBRA2019867 | 0 | 0 | 0 | 0 | 0 | 0 | 30.789 |
| FEBRA2020845 | 28.630 | 0 | 0 | 0 | 0 | 0 | 0 |
| FEBRA2020886 | 12.124 | 0 | 0 | 12.369 | 0 | 0 | 0 |
| FEBRA2020977 | 0 | 0 | 0 | 5.376 | 19.613 | 0 | 0 |
| FEBRA2021171 | 0 | 24.406 | 0 | 0 | 0 | 38.357 | 0 |
| FEBRA2022013 | 0 | 0 | 0 | 0 | 0 | 0 | 10.426 |
| FEBRA2022055 | 0 | 1.221 | 0 | 0 | 0 | 0 | 0 |
| FEBRA2022504 | 0 | 3.768 | 11.636 | 0 | 0 | 0 | 0 |
| FEBRA2022696 | 0 | 47.925 | 0 | 0 | 0 | 0 | 0 |
| FEBRA2023227 | 0 | 0 | 0 | 0 | 0 | 0 | 5.680 |
| FEBRA2023377 | 15.515 | 0 | 27.481 | 0 | 0 | 0 | 0 |
| FEBRA2023927 | 4.073 | 0 | 0 | 8.311 | 0 | 0 | 9.033 |
| FEBRA2024019 | 5.364 | 6.153 | 4.751 | 4.105 | 14.974 | 9.671 | 2.974 |
| FEBRA2024136 | 0 | 0 | 0 | 0 | 42.701 | 0 | 0 |
| FEBRA2024570 | 0 | 0 | 0 | 0 | 74.913 | 0 | 0 |
| FEBRA2025427 | 0 | 0 | 0 | 0 | 9.226 | 0 | 0 |
| FEBRA2025838 | 0.821 | 1.885 | 0 | 2.514 | 0 | 2.962 | 0.911 |
| FEBRA2028503 | 0 | 0 | 0 | 0 | 52.044 | 0 | 7.753 |
| FEBRA2028516 | 8.007 | 0 | 0 | 4.668 | 0 | 0 | 1.268 |
| FELIV1000153 | 0 | 0.378 | 0 | 0.168 | 0 | 0 | 0.183 |
| HCASM1000115 | 2.073 | 0 | 0 | 5.287 | 0 | 0 | 0 |
| HCASM2000016 | 1.493 | 3.425 | 0 | 2.284 | 0 | 0 | 1.655 |
| HCASM2000138 | 12.671 | 0 | 0 | 4.309 | 0 | 0 | 4.684 |
| HCASM2000214 | 0 | 0 | 0 | 0 | 0 | 0 | 10.488 |
| HCASM2000363 | 0 | 1.560 | 0 | 0 | 0 | 2.452 | 3.017 |
| HCASM2003076 | 0 | 0 | 0 | 0 | 0 | 0 | 6.314 |
| HCASM2005388 | 3.537 | 0 | 0 | 3.609 | 0 | 0 | 0 |
| HCASM2005484 | 0 | 0 | 0 | 0 | 0 | 0 | 14.312 |
| HCASM2007047 | 3.431 | 0 | 0 | 0 | 0 | 0 | 0 |
| HCHON1000015 | 0 | 0 | 0 | 1.590 | 0 | 0 | 0 |
| HCHON1000030 | 0.726 | 0.832 | 0.643 | 0.555 | 2.025 | 0.654 | 0.603 |
| HCHON1000131 | 4.103 | 0 | 0 | 4.186 | 0 | 0 | 0 |
| HCHON1000166 | 0 | 0 | 10.657 | 0 | 0 | 0 | 3.336 |
| HCHON1000191 | 0 | 0 | 0 | 0 | 0 | 0 | 1.071 |
| HCHON2000028 | 0 | 0 | 5.620 | 1.619 | 0 | 0 | 5.278 |
| HCHON2000056 | 0.567 | 1.301 | 0 | 0 | 0 | 3.068 | 2.202 |
| HCHON2000062 | 0 | 0 | 0 | 0 | 0 | 0 | 4.648 |
| HCHON2000087 | 0.619 | 0 | 0 | 0 | 0 | 0 | 0.686 |
| HCHON2000160 | 0 | 6.928 | 0 | 2.054 | 0 | 0 | 2.233 |
| HCHON2000212 | 0 | 0 | 0 | 0 | 0 | 0 | 19.062 |
| HCHON2000226 | 0.403 | 0.925 | 2.857 | 0.411 | 0 | 1.454 | 0 |
| HCHON2000244 | 0.658 | 0 | 0 | 0.671 | 0 | 0 | 0 |
| HCHON2000295 | 0 | 1.005 | 0 | 0.447 | 0 | 0 | 0 |
| HCHON2000322 | 10.980 | 0 | 0 | 0 | 0 | 0 | 0 |
| HCHON2000364 | 0 | 0 | 0 | 0 | 0 | 0 | 0.493 |
| HCHON2000473 | 0 | 0 | 0 | 5.972 | 0 | 0 | 6.491 |
| HCHON2000475 | 0 | 3.054 | 0 | 0 | 0 | 0 | 1.476 |
| HCHON2000626 | 2.351 | 8.091 | 4.164 | 0 | 4.375 | 0 | 1.304 |
| HCHON2000663 | 0 | 0 | 0 | 8.703 | 0 | 0 | 18.920 |
| HCHON2000698 | 0 | 13.152 | 0 | 2.924 | 0 | 0 | 3.179 |
| HCHON2000738 | 0 | 0 | 0 | 0 | 11.082 | 0 | 0 |
| HCHON2000743 | 6.105 | 0 | 0 | 0 | 0 | 0 | 6.771 |
| HCHON2000751 | 3.570 | 0 | 0 | 0 | 0 | 0 | 3.959 |
| HCHON2000815 | 2.793 | 0 | 0 | 0 | 10.394 | 0 | 0 |
| HCHON2000826 | 3.578 | 0 | 0 | 3.651 | 2.664 | 0 | 3.968 |
| HCHON2001039 | 1.116 | 0 | 0 | 2.277 | 4.153 | 0 | 1.237 |
| HCHON2001084 | 0 | 5.268 | 0 | 0 | 0 | 0 | 2.546 |
| HCHON2001099 | 0 | 0 | 0 | 2.783 | 0 | 0 | 3.025 |
| HCHON2001108 | 0 | 4.899 | 0 | 0 | 0 | 0 | 0 |
| HCHON2001200 | 0.433 | 0 | 0 | 1.324 | 0 | 0 | 1.919 |
| HCHON2001217 | 3.123 | 0 | 0 | 2.124 | 0 | 0 | 5.771 |
| HCHON2001359 | 1.703 | 0 | 3.016 | 2.606 | 0 | 0 | 0.944 |
| HCHON2001407 | 0 | 1.812 | 0 | 0 | 2.939 | 0 | 1.751 |
| HCHON2001434 | 13.748 | 3.505 | 5.412 | 1.558 | 0 | 5.508 | 5.082 |
| HCHON2001535 | 18.444 | 0 | 0 | 0 | 0 | 0 | 0 |
| HCHON2001665 | 0 | 0 | 0 | 6.297 | 0 | 0 | 0 |
| HCHON2001801 | 0 | 0 | 35.892 | 0 | 0 | 0 | 0 |
| HCHON2001853 | 0 | 0 | 0 | 11.428 | 0 | 0 | 0 |
| HCHON2002247 | 5.615 | 0 | 9.945 | 2.864 | 0 | 0 | 9.340 |
| HCHON2002676 | 13.647 | 0 | 0 | 0 | 0 | 0 | 0 |
| HCHON2004002 | 0 | 0 | 0 | 0 | 0 | 0 | 1.741 |
| HCHON2005921 | 0 | 0 | 0 | 12.694 | 0 | 0 | 9.198 |
| HCHON2006250 | 1.565 | 0 | 0 | 0 | 0 | 0 | 1.735 |
| HCHON2006722 | 0 | 0 | 35.892 | 0 | 0 | 0 | 0 |
| HCHON2006770 | 2.822 | 0 | 0 | 0 | 0 | 0 | 0 |
| HCHON2006786 | 0 | 0 | 0 | 13.885 | 0 | 0 | 0 |
| HCHON2010543 | 0 | 0 | 0 | 9.152 | 0 | 0 | 0 |
| HEART1000074 | 0.759 | 1.742 | 0 | 0 | 0 | 0 | 0 |
| HEART1000118 | 0 | 0 | 0 | 0 | 0 | 0 | 12.291 |
| HEART1000142 | 0 | 0 | 0 | 1.819 | 0 | 0 | 0 |
| HEART1000149 | 0 | 0 | 0 | 0.958 | 0 | 0 | 1.041 |
| HEART1000185 | 0.791 | 0 | 0 | 0 | 0 | 0 | 0 |
| HEART2000444 | 0 | 0 | 0 | 8.592 | 0 | 0 | 0 |
| HEART2000541 | 0 | 3.070 | 4.740 | 0 | 0 | 0 | 0 |
| HEART2000959 | 0 | 0 | 0 | 0 | 0 | 0 | 13.062 |
| HEART2003168 | 0 | 0 | 0 | 0 | 0 | 0 | 14.253 |
| HEART2003852 | 0 | 0 | 0 | 0 | 14.501 | 14.048 | 0 |
| HEART2006195 | 0 | 0 | 0 | 9.669 | 0 | 0 | 0 |
| HEART2006521 | 0 | 5.487 | 0 | 0 | 0 | 0 | 2.652 |
| HEART2007031 | 0 | 0 | 0 | 11.593 | 0 | 0 | 12.601 |
| HEART2007231 | 0 | 0 | 0 | 4.942 | 0 | 0 | 0 |
| HEART2007696 | 0 | 0 | 0 | 0 | 0 | 17.959 | 0 |
| HEART2008509 | 0 | 0 | 0 | 0 | 0 | 21.275 | 0 |
| HEART2009000 | 0 | 23.712 | 0 | 0 | 0 | 0 | 0 |
| HHDPC1000065 | 0 | 0 | 0 | 27.988 | 0 | 0 | 0 |
| HHDPC1000083 | 0 | 2.246 | 0 | 0 | 3.643 | 0 | 2.171 |
| HHDPC1000114 | 2.906 | 0 | 0 | 1.483 | 2.704 | 0 | 3.223 |
| HHDPC1000118 | 2.096 | 0 | 0 | 6.415 | 0 | 0 | 0 |
| HHDPC1000163 | 0 | 0 | 4.455 | 0 | 0 | 4.534 | 0 |
| HHDPC2000055 | 0 | 0 | 6.478 | 1.866 | 0 | 0 | 0 |
| HHDPC2000104 | 0 | 0 | 0 | 0 | 0 | 0 | 2.052 |
| HHDPC2000115 | 0 | 6.002 | 0 | 0 | 0 | 0 | 2.901 |
| HHDPC2000149 | 0 | 0 | 0 | 0 | 0 | 0 | 4.955 |
| HHDPC2000258 | 0 | 0 | 33.472 | 0 | 0 | 0 | 0 |
| HHDPC2000455 | 0 | 0 | 0 | 1.121 | 0 | 0 | 0 |
| HHDPC2000456 | 0 | 0 | 0 | 1.584 | 0 | 5.598 | 0 |
| HHDPC2003439 | 1.780 | 0 | 0 | 1.816 | 0.947 | 0 | 0.846 |
| HHDPC2003983 | 1.671 | 0 | 0.986 | 0.852 | 0 | 0 | 1.544 |
| HHDPC2005794 | 0 | 0 | 0 | 8.116 | 0 | 0 | 8.821 |
| HHDPC2007267 | 0 | 0 | 0 | 0 | 0 | 0 | 1.083 |
| HHDPC2007775 | 0 | 0 | 0 | 11.025 | 0 | 0 | 0 |
| HHDPC2008816 | 0 | 0 | 0 | 0 | 0 | 0 | 13.606 |
| HHDPC2009528 | 0 | 0 | 0 | 6.631 | 0 | 0 | 14.415 |
| HLUNG1000055 | 0 | 0 | 1.918 | 1.105 | 4.029 | 1.952 | 1.201 |
| HLUNG2000063 | 2.466 | 0 | 0 | 2.516 | 0 | 0 | 2.735 |
| HLUNG2000232 | 12.603 | 0 | 0 | 0 | 0 | 0 | 0 |
| HLUNG2000314 | 0 | 0 | 0 | 5.006 | 0 | 8.846 | 0 |
| HLUNG2000315 | 0 | 0 | 0 | 0 | 0 | 0 | 16.914 |
| HLUNG2000412 | 0 | 0 | 0 | 0 | 0 | 0 | 2.969 |
| HLUNG2000501 | 0.858 | 5.904 | 0 | 1.750 | 3.193 | 3.093 | 0 |
| HLUNG2000751 | 17.277 | 0 | 0 | 0 | 0 | 0 | 0 |
| HLUNG2000846 | 22.589 | 0 | 0 | 32.264 | 0 | 0 | 5.010 |
| HLUNG2000884 | 0 | 0 | 15.166 | 2.184 | 0 | 7.718 | 0 |
| HLUNG2001146 | 5.242 | 12.026 | 0 | 0 | 0 | 0 | 5.813 |
| HLUNG2001439 | 0 | 0 | 0 | 0 | 0 | 0 | 2.934 |
| HLUNG2001459 | 0 | 15.036 | 0 | 0 | 0 | 0 | 0 |
| HLUNG2001518 | 4.374 | 0 | 0 | 5.578 | 8.140 | 0 | 3.638 |
| HLUNG2001996 | 0 | 0 | 0 | 0 | 0 | 0 | 23.216 |
| HLUNG2002465 | 1.209 | 2.775 | 4.285 | 3.702 | 0 | 0 | 1.341 |
| HLUNG2002648 | 0 | 8.292 | 0 | 0 | 0 | 0 | 8.016 |
| HLUNG2002811 | 7.310 | 0 | 0 | 2.486 | 0 | 0 | 2.702 |
| HLUNG2002916 | 0 | 0 | 0 | 8.802 | 0 | 0 | 9.567 |
| HLUNG2003003 | 0 | 0 | 0 | 16.306 | 0 | 0 | 0 |
| HLUNG2003042 | 0 | 0 | 0 | 2.429 | 0 | 0 | 0 |
| HLUNG2004037 | 0 | 0 | 0 | 15.575 | 0 | 0 | 0 |
| HLUNG2004067 | 0 | 25.262 | 0 | 0 | 0 | 0 | 0 |
| HLUNG2004159 | 0 | 4.159 | 0 | 0 | 0 | 0 | 2.011 |
| HLUNG2004170 | 12.324 | 0 | 0 | 0 | 0 | 0 | 0 |
| HLUNG2004534 | 0 | 0 | 0 | 2.959 | 0 | 0 | 0 |
| HLUNG2005230 | 0 | 0 | 0 | 0 | 0 | 0 | 7.605 |
| HLUNG2006570 | 0 | 0 | 0 | 0 | 0 | 0 | 7.167 |
| HLUNG2006812 | 0 | 0 | 0 | 0 | 0 | 0 | 6.558 |
| HLUNG2008139 | 11.461 | 0 | 0 | 23.386 | 0 | 0 | 0 |
| HLUNG2008153 | 0 | 0 | 24.114 | 0 | 0 | 0 | 0 |
| HLUNG2009067 | 0 | 0 | 0 | 0 | 0 | 0 | 23.216 |
| HLUNG2009225 | 6.033 | 0 | 0 | 1.539 | 11.226 | 0 | 5.017 |
| HLUNG2011461 | 21.423 | 0 | 0 | 0 | 0 | 0 | 0 |
| HLUNG2015184 | 0 | 0 | 0 | 0 | 0 | 0 | 14.521 |
| HLUNG2017262 | 1.586 | 0 | 0 | 6.472 | 0 | 0 | 5.276 |
| HSYRA1000062 | 0.857 | 0 | 0 | 0 | 3.188 | 0 | 0.950 |
| HSYRA1000119 | 1.839 | 2.110 | 1.629 | 2.815 | 3.423 | 0 | 0 |
| HSYRA1000152 | 1.193 | 0 | 0 | 1.217 | 0 | 0 | 1.323 |
| HSYRA1000178 | 0 | 0 | 0 | 2.558 | 0 | 0 | 2.781 |
| HSYRA2000137 | 0 | 0 | 0 | 0 | 16.873 | 16.346 | 0 |
| HSYRA2000159 | 9.163 | 2.489 | 1.281 | 7.011 | 1.346 | 1.304 | 3.343 |
| HSYRA2000190 | 0 | 0 | 0 | 0 | 0 | 8.564 | 0 |
| HSYRA2000224 | 5.394 | 0 | 0 | 3.669 | 0 | 0 | 0 |
| HSYRA2000232 | 2.958 | 1.696 | 5.239 | 0 | 0 | 0 | 0 |
| HSYRA2000248 | 0.680 | 0 | 0 | 1.387 | 0 | 0 | 3.768 |
| HSYRA2000255 | 0 | 0 | 0 | 0.458 | 0 | 0 | 0 |
| HSYRA2000332 | 0 | 0 | 0 | 0.796 | 0 | 0 | 0 |
| HSYRA2000629 | 0 | 7.657 | 0 | 0 | 0 | 0 | 0 |
| HSYRA2000640 | 0 | 0 | 0 | 2.607 | 0 | 0 | 3.779 |
| HSYRA2000743 | 4.643 | 0 | 0 | 5.527 | 2.880 | 0 | 4.291 |
| HSYRA2000787 | 0 | 7.136 | 0 | 0 | 11.577 | 11.215 | 3.449 |
| HSYRA2000828 | 1.425 | 3.268 | 0 | 1.453 | 0 | 5.137 | 0 |
| HSYRA2000925 | 0.443 | 0.508 | 0 | 0.226 | 0 | 0 | 0.737 |
| HSYRA2001105 | 16.531 | 0 | 0 | 0 | 10.255 | 0 | 3.055 |
| HSYRA2001138 | 1.020 | 1.755 | 1.806 | 1.040 | 5.693 | 0.919 | 2.262 |
| HSYRA2001232 | 0 | 0 | 0 | 0 | 0 | 0 | 4.290 |
| HSYRA2001353 | 0 | 0 | 0 | 0 | 18.885 | 0 | 5.627 |
| HSYRA2001396 | 1.519 | 0 | 5.382 | 1.550 | 0 | 5.478 | 3.370 |
| HSYRA2001476 | 0 | 0 | 1.710 | 0 | 0 | 0 | 0.535 |
| HSYRA2001484 | 0 | 0 | 0 | 0 | 0 | 32.543 | 0 |
| HSYRA2001574 | 0.752 | 0 | 2.666 | 0.768 | 2.800 | 0 | 0 |
| HSYRA2001595 | 0.570 | 1.307 | 0 | 0 | 0 | 2.054 | 0 |
| HSYRA2001615 | 4.148 | 0 | 0 | 4.232 | 0 | 0 | 2.300 |
| HSYRA2001621 | 0 | 4.210 | 0.650 | 0 | 2.049 | 1.323 | 0.203 |
| HSYRA2001638 | 0 | 0 | 0 | 2.307 | 0 | 8.155 | 0 |
| HSYRA2001983 | 0 | 0 | 0 | 0 | 0 | 0 | 5.352 |
| HSYRA2005628 | 0 | 0 | 0 | 0 | 0 | 0 | 7.437 |
| IMR321000158 | 0 | 3.493 | 0 | 0.777 | 2.833 | 2.745 | 1.688 |
| IMR321000210 | 1.014 | 4.651 | 0 | 1.034 | 0 | 0 | 1.124 |
| IMR321000219 | 5.894 | 0 | 0 | 8.877 | 2.089 | 0 | 3.113 |
| IMR321000242 | 0 | 0 | 0 | 0 | 20.930 | 0 | 0 |
| IMR321000253 | 0 | 0 | 3.608 | 0 | 0 | 0 | 1.129 |
| IMR321000266 | 5.660 | 6.492 | 0 | 0 | 0 | 0 | 0 |
| IMR322000072 | 0.802 | 0 | 0 | 0 | 0 | 2.893 | 0 |
| IMR322000121 | 0 | 0 | 0 | 1.137 | 4.149 | 0 | 0 |
| IMR322000127 | 3.098 | 0 | 5.488 | 3.161 | 0 | 0 | 0 |
| IMR322000144 | 0 | 0 | 0 | 0 | 6.071 | 5.881 | 0 |
| IMR322000152 | 0 | 0 | 0 | 8.265 | 0 | 0 | 0 |
| IMR322000223 | 0.681 | 0 | 0 | 0 | 0 | 2.455 | 0 |
| IMR322000243 | 0 | 0 | 0 | 2.626 | 0 | 0 | 0.951 |
| IMR322000302 | 0 | 0 | 0 | 6.053 | 0 | 0 | 0 |
| IMR322000316 | 5.394 | 0.952 | 0 | 5.080 | 1.544 | 8.977 | 4.602 |
| IMR322000518 | 6.142 | 0 | 0 | 0 | 0 | 22.148 | 0 |
| IMR322000555 | 5.966 | 0 | 0 | 0 | 0 | 0 | 6.616 |
| IMR322000604 | 22.082 | 0 | 0 | 0 | 0 | 0 | 0 |
| IMR322000609 | 22.082 | 0 | 0 | 0 | 0 | 0 | 0 |
| IMR322000730 | 0 | 0.943 | 0 | 0.140 | 0 | 0.494 | 0.456 |
| IMR322000775 | 4.146 | 0 | 0 | 0 | 0 | 0 | 18.391 |
| IMR322000819 | 0 | 0 | 0 | 0 | 15.864 | 0 | 0 |
| IMR322000838 | 0 | 0 | 0 | 0 | 0 | 0 | 23.913 |
| IMR322000918 | 0 | 0 | 10.384 | 2.991 | 10.910 | 0 | 0 |
| IMR322000935 | 0 | 0 | 0 | 4.582 | 16.717 | 0 | 0 |
| IMR322001185 | 0 | 0 | 0 | 0 | 0 | 50.541 | 0 |
| IMR322001218 | 0 | 0 | 0 | 0 | 0 | 4.037 | 0 |
| IMR322001317 | 0.790 | 1.812 | 0 | 0 | 0 | 11.389 | 0 |
| IMR322001332 | 0 | 0 | 0 | 0 | 0 | 9.600 | 0 |
| IMR322001380 | 0 | 9.096 | 0 | 2.022 | 0 | 21.443 | 2.198 |
| IMR322001435 | 0.939 | 2.155 | 0 | 0.958 | 0 | 0 | 3.126 |
| IMR322001541 | 1.692 | 0 | 0 | 0 | 0 | 6.100 | 0 |
| IMR322001584 | 2.497 | 0 | 0 | 1.274 | 0 | 0 | 0 |
| IMR322001600 | 0 | 0 | 0 | 0.329 | 0 | 0.581 | 0 |
| IMR322001710 | 1.939 | 4.450 | 0 | 0 | 0 | 0 | 0 |
| IMR322001879 | 9.638 | 0 | 0 | 9.833 | 0 | 0 | 0 |
| IMR322002035 | 36.176 | 0 | 0 | 0 | 0 | 0 | 0 |
| IMR322002993 | 15.565 | 0 | 0 | 0 | 0 | 0 | 0 |
| IMR322013805 | 13.508 | 0 | 0 | 27.563 | 0 | 0 | 0 |
| IMR322019070 | 0 | 0 | 0 | 8.189 | 0 | 0 | 2.967 |
| JCMLC2000273 | 0 | 7.090 | 0 | 0 | 0 | 0 | 0 |
| KIDNE1000104 | 16.584 | 0 | 0 | 0 | 0 | 0 | 0 |
| KIDNE1000145 | 2.765 | 0 | 0 | 0 | 0 | 0 | 0 |
| KIDNE2000085 | 1.028 | 0 | 0 | 0 | 3.827 | 0 | 0 |
| KIDNE2000252 | 6.837 | 0 | 6.055 | 3.488 | 0 | 3.082 | 2.843 |
| KIDNE2000266 | 4.210 | 0 | 0 | 4.296 | 0 | 0 | 0 |
| KIDNE2000315 | 6.829 | 0 | 0 | 0 | 0 | 0 | 0 |
| KIDNE2000317 | 0 | 0 | 50.400 | 0 | 0 | 0 | 0 |
| KIDNE2000330 | 0 | 0 | 0 | 0 | 0 | 0 | 3.786 |
| KIDNE2000383 | 0 | 0 | 17.446 | 5.024 | 0 | 0 | 5.461 |
| KIDNE2000403 | 0.826 | 0 | 0 | 0 | 0 | 0 | 0 |
| KIDNE2000422 | 22.290 | 0 | 0 | 0 | 0 | 0 | 0 |
| KIDNE2000497 | 0 | 0 | 0 | 0 | 0 | 0 | 3.477 |
| KIDNE2000517 | 0 | 7.186 | 16.644 | 4.793 | 0 | 11.294 | 0 |
| KIDNE2000574 | 0.749 | 0 | 2.652 | 2.291 | 0 | 8.097 | 0 |
| KIDNE2000909 | 0 | 4.710 | 0 | 0 | 0 | 0 | 2.277 |
| KIDNE2000947 | 2.527 | 0 | 0 | 0 | 0 | 0 | 2.803 |
| KIDNE2001117 | 22.290 | 0 | 0 | 0 | 0 | 0 | 0 |
| KIDNE2001162 | 1.400 | 2.142 | 0 | 0 | 1.737 | 1.683 | 0 |
| KIDNE2001467 | 1.825 | 1.196 | 0 | 2.659 | 0.970 | 0.940 | 3.179 |
| KIDNE2001636 | 0 | 0 | 0 | 0 | 0 | 0 | 5.240 |
| KIDNE2002191 | 0 | 0 | 0 | 0 | 0 | 0 | 7.905 |
| KIDNE2002252 | 0 | 0 | 0 | 0 | 0 | 0 | 2.417 |
| KIDNE2002725 | 10.289 | 23.605 | 0 | 0 | 0 | 0 | 11.410 |
| KIDNE2002798 | 0 | 0 | 0 | 0 | 0 | 0 | 13.421 |
| KIDNE2002883 | 0 | 5.203 | 0 | 0 | 8.442 | 8.178 | 0 |
| KIDNE2003305 | 0 | 0 | 0 | 0 | 0 | 0 | 0.933 |
| KIDNE2003941 | 0.504 | 0 | 0 | 0.515 | 1.877 | 0 | 0.559 |
| KIDNE2004475 | 0 | 0 | 0 | 2.626 | 0 | 9.281 | 0 |
| KIDNE2005042 | 8.051 | 0 | 28.522 | 16.428 | 0 | 0 | 8.928 |
| KIDNE2005543 | 0 | 0 | 0 | 18.168 | 0 | 0 | 19.748 |
| KIDNE2005676 | 9.848 | 0 | 0 | 1.435 | 0 | 0 | 1.560 |
| KIDNE2005937 | 0 | 0 | 0 | 5.529 | 0 | 0 | 0 |
| KIDNE2006009 | 0 | 0 | 0 | 0 | 0 | 13.293 | 0 |
| KIDNE2006014 | 0 | 0 | 0 | 3.029 | 0 | 0 | 0 |
| KIDNE2006030 | 8.536 | 4.896 | 15.120 | 6.532 | 0 | 0 | 9.466 |
| KIDNE2006039 | 0 | 0 | 0 | 0 | 0 | 0 | 17.506 |
| KIDNE2006248 | 0.311 | 0.713 | 1.101 | 0 | 0 | 2.242 | 1.034 |
| KIDNE2006465 | 3.094 | 0 | 0 | 0 | 0 | 0 | 3.431 |
| KIDNE2006580 | 7.013 | 0 | 0 | 14.310 | 0 | 0 | 7.777 |
| KIDNE2006760 | 0 | 15.476 | 0 | 0 | 0 | 0 | 7.481 |
| KIDNE2007328 | 0.885 | 0 | 0 | 4.513 | 0 | 0 | 0.981 |
| KIDNE2007352 | 5.404 | 0.954 | 1.473 | 2.121 | 0 | 0 | 0.922 |
| KIDNE2007954 | 6.324 | 0 | 0 | 0 | 0 | 7.601 | 4.675 |
| KIDNE2008048 | 2.682 | 0 | 1.900 | 4.378 | 0 | 0 | 2.380 |
| KIDNE2008069 | 2.334 | 5.356 | 24.810 | 3.573 | 26.066 | 8.417 | 0 |
| KIDNE2008362 | 4.566 | 0 | 0 | 13.976 | 0 | 32.928 | 0 |
| KIDNE2008403 | 23.120 | 3.120 | 0 | 22.200 | 0 | 0 | 1.508 |
| KIDNE2008404 | 0 | 0 | 0 | 0 | 0 | 0 | 5.142 |
| KIDNE2008666 | 22.290 | 0 | 0 | 0 | 0 | 0 | 0 |
| KIDNE2008758 | 0 | 0 | 0 | 0 | 0 | 0 | 24.133 |
| KIDNE2008914 | 0 | 0 | 0 | 17.747 | 0 | 0 | 0 |
| KIDNE2008987 | 0 | 6.609 | 0 | 0 | 0 | 0 | 0 |
| KIDNE2009367 | 12.812 | 1.729 | 0 | 19.992 | 2.805 | 0 | 10.030 |
| KIDNE2009605 | 0 | 0 | 0 | 0 | 0 | 0 | 16.747 |
| KIDNE2010049 | 3.438 | 0 | 0 | 0 | 0 | 0 | 0 |
| KIDNE2010265 | 2.363 | 0 | 0 | 0 | 0 | 0 | 0 |
| KIDNE2010430 | 0 | 21.878 | 0 | 0 | 0 | 0 | 10.575 |
| KIDNE2010750 | 0 | 0 | 0 | 0 | 0 | 0 | 11.811 |
| KIDNE2011314 | 0 | 0 | 0 | 0 | 0 | 0 | 24.133 |
| KIDNE2012440 | 0 | 0 | 0 | 3.612 | 6.588 | 0 | 3.926 |
| KIDNE2012710 | 0 | 0 | 0 | 0 | 0 | 0 | 10.501 |
| KIDNE2013845 | 2.235 | 0 | 0 | 1.140 | 4.160 | 0 | 2.479 |
| KIDNE2014290 | 0 | 0 | 0 | 0 | 0 | 0 | 0.777 |
| KIDNE2014320 | 0 | 0 | 0 | 0 | 0 | 0 | 24.133 |
| KIDNE2015433 | 26.508 | 0 | 0 | 0 | 32.888 | 0 | 9.799 |
| KIDNE2015445 | 0 | 0 | 12.171 | 3.505 | 0 | 0 | 0 |
| KIDNE2016327 | 0 | 0 | 0 | 0 | 0 | 0 | 19.403 |
| KIDNE2016371 | 0 | 0 | 0 | 9.192 | 0 | 0 | 9.991 |
| KIDNE2017040 | 0 | 0 | 0 | 6.861 | 0 | 0 | 0 |
| KIDNE2017343 | 0 | 0 | 0 | 0 | 0 | 0 | 7.325 |
| KIDNE2018352 | 0 | 0 | 0 | 3.638 | 0 | 0 | 11.864 |
| KIDNE2018493 | 0 | 0 | 0 | 0 | 13.262 | 0 | 0 |
| LIVER1000017 | 0 | 0 | 0.527 | 0 | 0 | 0 | 0 |
| LIVER1000079 | 0 | 0 | 0 | 0 | 6.522 | 0 | 0 |
| LIVER1000104 | 0 | 0 | 0.730 | 0 | 0 | 0 | 0.457 |
| LIVER1000126 | 0 | 0 | 0 | 0 | 28.534 | 0 | 0 |
| LIVER1000132 | 0 | 0 | 0 | 0 | 1.862 | 0 | 3.330 |
| LIVER1000230 | 0 | 0 | 20.544 | 0 | 0 | 0 | 0 |
| LIVER2000033 | 0 | 0 | 4.901 | 0 | 5.149 | 0 | 0 |
| LIVER2000416 | 2.263 | 0 | 0 | 2.308 | 0 | 8.158 | 0 |
| LIVER2001608 | 0 | 0 | 0 | 0 | 0 | 0 | 2.913 |
| LIVER2001835 | 0 | 0 | 29.011 | 0 | 0 | 0 | 0 |
| LIVER2002638 | 0 | 0 | 0 | 0 | 0 | 29.377 | 0 |
| LIVER2002842 | 0 | 4.380 | 0 | 0 | 0 | 0 | 6.351 |
| LIVER2005028 | 0 | 0 | 0 | 7.709 | 0 | 0 | 0 |
| LIVER2005789 | 0 | 0 | 0 | 0 | 0 | 0 | 4.992 |
| LIVER2005973 | 0 | 0 | 0 | 10.530 | 0 | 0 | 0 |
| LIVER2006410 | 0 | 0 | 0 | 0 | 0 | 0 | 11.342 |
| LIVER2008465 | 0 | 0 | 0 | 6.752 | 0 | 0 | 7.339 |
| LIVER2008751 | 0 | 0 | 0 | 0 | 0 | 0 | 9.629 |
| MAMGL1000017 | 0 | 0 | 0 | 0 | 1.132 | 0 | 0 |
| MAMGL1000032 | 0 | 0.370 | 0.571 | 0.164 | 0 | 0.581 | 0.179 |
| MAMGL1000035 | 0.201 | 0 | 0 | 0 | 0 | 0 | 0 |
| MAMGL1000083 | 0 | 0 | 0 | 0.296 | 0 | 0 | 0.321 |
| MAMGL1000100 | 0 | 0 | 0 | 0 | 0 | 2.129 | 0 |
| MESAN1000032 | 0 | 0 | 0 | 0 | 0 | 0 | 23.021 |
| MESAN1000050 | 4.816 | 0 | 0 | 0 | 0 | 0 | 3.560 |
| MESAN1000079 | 0 | 0 | 0 | 14.664 | 0 | 0 | 15.939 |
| MESAN1000080 | 0 | 0 | 0 | 0 | 0 | 0 | 1.583 |
| MESAN1000101 | 0 | 0 | 0 | 0 | 0 | 0 | 6.401 |
| MESAN1000126 | 1.786 | 0 | 0 | 3.644 | 0 | 0 | 1.980 |
| MESAN2000092 | 8.849 | 0 | 0 | 0 | 0 | 0 | 9.813 |
| MESAN2000149 | 0 | 0 | 17.405 | 0 | 9.143 | 0 | 5.448 |
| MESAN2000264 | 0 | 4.521 | 0 | 0 | 0 | 0 | 0 |
| MESAN2000267 | 1.638 | 0.939 | 0 | 2.089 | 0 | 0 | 2.725 |
| MESAN2000501 | 0 | 0 | 0 | 0 | 0 | 0 | 3.327 |
| MESAN2000572 | 0 | 2.346 | 0 | 1.043 | 0 | 3.686 | 3.401 |
| MESAN2000608 | 0.786 | 0 | 0 | 0.802 | 2.927 | 0 | 0.872 |
| MESAN2001154 | 1.332 | 0 | 0 | 0 | 9.918 | 0 | 0 |
| MESAN2001627 | 13.080 | 0 | 0 | 0 | 0 | 0 | 0 |
| MESAN2002086 | 0 | 0 | 0 | 0.849 | 0 | 0 | 1.847 |
| MESAN2002122 | 8.870 | 0 | 0 | 9.050 | 0 | 0 | 9.836 |
| MESAN2002186 | 0 | 0 | 0 | 0 | 0 | 7.904 | 0 |
| MESAN2002519 | 0 | 0 | 0 | 4.732 | 0 | 0 | 5.143 |
| MESAN2002724 | 0.922 | 0 | 0 | 1.882 | 0 | 0 | 0 |
| MESAN2002844 | 0 | 0 | 0 | 7.393 | 0 | 0 | 8.036 |
| MESAN2002940 | 3.180 | 0 | 0 | 0 | 0 | 0 | 0 |
| MESAN2003190 | 0 | 0 | 0 | 0 | 0 | 0 | 19.624 |
| MESAN2003444 | 3.725 | 0 | 0 | 3.801 | 0 | 13.432 | 0 |
| MESAN2003622 | 0 | 0 | 0 | 0 | 0 | 0 | 1.999 |
| MESAN2003646 | 0 | 0 | 0 | 0 | 0 | 0 | 23.021 |
| MESAN2003709 | 0 | 0 | 29.383 | 0 | 0 | 0 | 0 |
| MESAN2005284 | 0 | 0 | 0 | 0 | 0 | 0 | 10.755 |
| MESAN2005689 | 0 | 0 | 0 | 3.165 | 0 | 0 | 10.321 |
| MESAN2005766 | 0 | 2.262 | 0 | 0 | 0 | 0 | 5.468 |
| MESAN2005957 | 0 | 0 | 0 | 10.074 | 0 | 0 | 0 |
| MESAN2005958 | 5.386 | 0 | 0 | 2.748 | 10.023 | 0 | 2.986 |
| MESAN2006043 | 0 | 0 | 0 | 8.126 | 0 | 0 | 8.833 |
| MESAN2006401 | 3.618 | 12.451 | 6.409 | 5.537 | 13.467 | 6.523 | 4.012 |
| MESAN2006563 | 0.691 | 0 | 0 | 0 | 2.570 | 0 | 1.532 |
| MESAN2006743 | 0 | 0 | 0 | 0 | 0 | 0 | 8.549 |
| MESAN2006953 | 0 | 0 | 0 | 6.996 | 0 | 0 | 7.604 |
| MESAN2007755 | 0 | 0 | 0 | 9.333 | 0 | 0 | 0 |
| MESAN2008926 | 3.192 | 0 | 0 | 0 | 0 | 0 | 0 |
| MESAN2008936 | 3.978 | 0 | 0 | 4.059 | 0 | 0 | 0 |
| MESAN2009081 | 0 | 10.799 | 0 | 9.604 | 17.519 | 0 | 0 |
| MESAN2009503 | 0 | 38.222 | 0 | 0 | 0 | 0 | 0 |
| MESAN2009580 | 0 | 2.548 | 0 | 1.133 | 4.133 | 0 | 1.232 |
| MESAN2010664 | 0 | 19.910 | 0 | 0 | 0 | 0 | 9.624 |
| MESAN2011632 | 0 | 0 | 0 | 21.577 | 0 | 0 | 0 |
| MESAN2011984 | 0 | 0 | 6.044 | 1.741 | 6.350 | 0 | 1.892 |
| MESAN2012054 | 12.754 | 0 | 0 | 15.615 | 0 | 0 | 0 |
| MESAN2012113 | 0 | 0 | 0 | 6.019 | 0 | 0 | 6.543 |
| MESAN2013283 | 0 | 38.222 | 0 | 0 | 0 | 0 | 0 |
| MESAN2013284 | 2.456 | 0 | 0 | 5.012 | 0 | 0 | 1.362 |
| MESAN2016409 | 0 | 38.222 | 0 | 0 | 0 | 0 | 0 |
| MESAN2017133 | 17.548 | 0 | 0 | 0 | 0 | 0 | 0 |
| MESTC1000042 | 2.245 | 0 | 0 | 0 | 0 | 0 | 0 |
| NB9N41000011 | 2.128 | 0 | 0 | 0 | 0 | 0 | 2.360 |
| NB9N41000047 | 0 | 0 | 0 | 0 | 0 | 0 | 2.915 |
| NB9N41000142 | 0 | 0 | 0 | 0 | 0 | 0 | 2.969 |
| NB9N41000340 | 0 | 0 | 0 | 0 | 0 | 5.229 | 0 |
| NB9N42000281 | 1.912 | 4.387 | 0 | 0 | 0 | 6.894 | 0 |
| NB9N42000342 | 0 | 1.654 | 0 | 0.736 | 0 | 0 | 3.198 |
| NB9N42000430 | 0 | 6.350 | 0 | 0 | 0 | 0 | 0 |
| NB9N42001300 | 5.414 | 0 | 0 | 0 | 0 | 0 | 3.002 |
| NHNPC2000062 | 0 | 0 | 0 | 0 | 0 | 0 | 2.324 |
| NHNPC2000206 | 0 | 1.575 | 2.433 | 0.701 | 0 | 0 | 3.046 |
| NHNPC2001931 | 0.477 | 0 | 0 | 0 | 0 | 0 | 0.529 |
| NOVAR1000015 | 0 | 0 | 10.757 | 0 | 0 | 0 | 0 |
| NOVAR2000038 | 1.242 | 4.275 | 6.602 | 0 | 9.248 | 17.918 | 0 |
| NOVAR2001783 | 4.027 | 0 | 0 | 0 | 0 | 0 | 0 |
| NT2NE1000004 | 0 | 0 | 0 | 0 | 0 | 0 | 9.158 |
| NT2NE1000018 | 0 | 5.705 | 0 | 5.074 | 0 | 0 | 2.758 |
| NT2NE1000073 | 7.963 | 0 | 0 | 0 | 0 | 0 | 0 |
| NT2NE1000163 | 8.911 | 0.929 | 0 | 10.745 | 0 | 0 | 2.246 |
| NT2NE1000181 | 0 | 0 | 0 | 18.624 | 0 | 0 | 0 |
| NT2NE2000056 | 6.285 | 0.901 | 0 | 7.615 | 4.386 | 1.416 | 3.921 |
| NT2NE2000174 | 0 | 0.875 | 1.352 | 0 | 0 | 0 | 0.423 |
| NT2NE2000195 | 0 | 0 | 0 | 1.568 | 5.721 | 0 | 0 |
| NT2NE2000260 | 0 | 0 | 1.284 | 0.246 | 0.450 | 0.871 | 0.804 |
| NT2NE2000327 | 2.516 | 0 | 0 | 0 | 0 | 0 | 2.790 |
| NT2NE2000383 | 0 | 0 | 5.383 | 3.101 | 0 | 5.479 | 6.740 |
| NT2NE2000384 | 6.905 | 0 | 0 | 4.696 | 0 | 0 | 10.210 |
| NT2NE2000386 | 15.452 | 0 | 0 | 0 | 0 | 0 | 0 |
| NT2NE2000392 | 0.893 | 2.048 | 0 | 6.376 | 3.323 | 3.219 | 3.960 |
| NT2NE2000548 | 0 | 0 | 0 | 0 | 0 | 0 | 23.430 |
| NT2NE2000575 | 0.721 | 2.206 | 0.852 | 0.736 | 0 | 1.734 | 2.133 |
| NT2NE2000636 | 7.222 | 0 | 0 | 11.052 | 0 | 0 | 0 |
| NT2NE2000707 | 2.342 | 1.535 | 4.742 | 3.073 | 4.982 | 4.826 | 0.371 |
| NT2NE2000763 | 1.200 | 0 | 4.251 | 2.449 | 0 | 4.327 | 3.993 |
| NT2NE2000809 | 0 | 0 | 0 | 0 | 12.616 | 0 | 0 |
| NT2NE2000909 | 0 | 0 | 0 | 6.679 | 0 | 0 | 0 |
| NT2NE2000963 | 0 | 2.631 | 1.625 | 0 | 0.854 | 1.654 | 1.018 |
| NT2NE2000980 | 0 | 0 | 0 | 0 | 0 | 0 | 16.930 |
| NT2NE2001000 | 0.861 | 1.974 | 6.098 | 1.756 | 6.406 | 0 | 0 |
| NT2NE2001040 | 0 | 0 | 0 | 0 | 0 | 0 | 17.192 |
| NT2NE2001048 | 1.497 | 0 | 0 | 4.581 | 5.571 | 0 | 3.320 |
| NT2NE2001049 | 0 | 0 | 0 | 0 | 0 | 31.686 | 0 |
| NT2NE2001156 | 0 | 0 | 0 | 5.734 | 0 | 0 | 0 |
| NT2NE2001176 | 7.995 | 0 | 4.046 | 2.331 | 0 | 12.355 | 2.533 |
| NT2NE2001180 | 0 | 0 | 49.431 | 0 | 0 | 0 | 0 |
| NT2NE2001337 | 4.544 | 0 | 0 | 0 | 0 | 0 | 0 |
| NT2NE2001364 | 10.691 | 0 | 0 | 0 | 39.792 | 0 | 0 |
| NT2NE2001397 | 0 | 0 | 0 | 0 | 0 | 0 | 14.585 |
| NT2NE2001403 | 10.376 | 0 | 0 | 0 | 19.310 | 0 | 5.753 |
| NT2NE2001435 | 5.316 | 0 | 0 | 11.931 | 0 | 0 | 2.358 |
| NT2NE2001442 | 4.997 | 0 | 0 | 15.295 | 0 | 0 | 11.083 |
| NT2NE2001545 | 12.542 | 0 | 0 | 5.484 | 0 | 0 | 1.987 |
| NT2NE2001598 | 0 | 0 | 0 | 0 | 0 | 45.737 | 0 |
| NT2NE2001648 | 0 | 0 | 30.746 | 0 | 0 | 0 | 0 |
| NT2NE2001655 | 0 | 9.636 | 4.960 | 2.857 | 10.422 | 5.048 | 0 |
| NT2NE2001660 | 7.832 | 0 | 0 | 7.991 | 0 | 0 | 8.686 |
| NT2NE2001793 | 11.409 | 0 | 0 | 7.408 | 0 | 0 | 2.300 |
| NT2NE2002162 | 0 | 0 | 0 | 0 | 45.501 | 0 | 0 |
| NT2NE2003185 | 0 | 17.393 | 0 | 0 | 0 | 0 | 4.204 |
| NT2NE2003280 | 7.277 | 0 | 25.781 | 0 | 0 | 0 | 0 |
| NT2NE2003485 | 2.328 | 0 | 0 | 0 | 0 | 0 | 5.163 |
| NT2NE2003569 | 3.471 | 0 | 0 | 0 | 0 | 0 | 7.698 |
| NT2NE2003887 | 6.241 | 0 | 0 | 0 | 0 | 0 | 0 |
| NT2NE2003921 | 0 | 0 | 0 | 0 | 0 | 0 | 6.765 |
| NT2NE2004255 | 0 | 0 | 0 | 0 | 0 | 0 | 6.605 |
| NT2NE2004519 | 0 | 0 | 0 | 0 | 6.669 | 0 | 3.974 |
| NT2NE2005419 | 11.579 | 0 | 0 | 0 | 0 | 0 | 12.840 |
| NT2NE2005588 | 0 | 38.765 | 0 | 0 | 0 | 0 | 0 |
| NT2NE2005688 | 1.493 | 0 | 0 | 0 | 0 | 0 | 0.828 |
| NT2NE2005876 | 1.475 | 3.384 | 0 | 1.505 | 0 | 0 | 1.636 |
| NT2NE2006075 | 0 | 0 | 0 | 0 | 0 | 28.404 | 0 |
| NT2NE2006478 | 0 | 0 | 0 | 10.962 | 0 | 0 | 11.916 |
| NT2NE2006909 | 0.285 | 1.964 | 0 | 0 | 0 | 0 | 0 |
| NT2NE2008213 | 0 | 19.092 | 0 | 0 | 0 | 30.005 | 0 |
| NT2NE2009295 | 0 | 0 | 0 | 2.035 | 0 | 7.194 | 2.212 |
| NT2NE2009523 | 0 | 0 | 0 | 0 | 0 | 28.018 | 0 |
| NT2NE2010056 | 0 | 0 | 0 | 0 | 0 | 0 | 17.773 |
| NT2NE2010688 | 21.626 | 0 | 0 | 0 | 0 | 0 | 0 |
| NT2NE2010842 | 3.771 | 2.163 | 3.340 | 1.924 | 0 | 0 | 1.046 |
| NT2NE2011119 | 0 | 10.623 | 0 | 0 | 0 | 0 | 0 |
| NT2NE2011221 | 0 | 0 | 0 | 0 | 0 | 0 | 47.862 |
| NT2NE2011485 | 18.947 | 0 | 0 | 0 | 0 | 0 | 0 |
| NT2NE2012243 | 0 | 0 | 0 | 0 | 0 | 0 | 23.430 |
| NT2NE2012928 | 0 | 0 | 0 | 0 | 0 | 31.392 | 0 |
| NT2NE2014104 | 3.357 | 3.851 | 0 | 0 | 0 | 0 | 0 |
| NT2NE2015904 | 0 | 0 | 0 | 21.967 | 0 | 0 | 0 |
| NT2NE2015974 | 0 | 0 | 0 | 0 | 0 | 0 | 8.471 |
| NT2NE2016387 | 21.626 | 0 | 0 | 0 | 0 | 0 | 0 |
| NT2NE2017492 | 0 | 0 | 0 | 0 | 0 | 0 | 18.714 |
| NT2NE2018594 | 0 | 38.765 | 0 | 0 | 0 | 0 | 0 |
| NT2NE2019091 | 5.679 | 0 | 13.413 | 0 | 7.046 | 0 | 0 |
| NT2RI1000016 | 0 | 0 | 0 | 25.779 | 0 | 0 | 0 |
| NT2RI1000048 | 0 | 0 | 0 | 0 | 0 | 0 | 1.883 |
| NT2RI1000127 | 5.445 | 0 | 0 | 0 | 6.755 | 0 | 0 |
| NT2RI2000064 | 0.538 | 0 | 0 | 0.549 | 0 | 0 | 0.597 |
| NT2RI2000107 | 0 | 5.314 | 0 | 0 | 0 | 0 | 0 |
| NT2RI2000116 | 4.071 | 0 | 0 | 3.560 | 0 | 0 | 1.935 |
| NT2RI2000167 | 0 | 0 | 0 | 11.787 | 0 | 0 | 12.812 |
| NT2RI2000255 | 0 | 2.746 | 0 | 0 | 0 | 0 | 1.327 |
| NT2RI2000263 | 3.421 | 0 | 0 | 3.490 | 0 | 0 | 0 |
| NT2RI2000284 | 2.279 | 1.046 | 0 | 0 | 0 | 1.644 | 0 |
| NT2RI2000294 | 1.893 | 0 | 0 | 1.931 | 0 | 0 | 2.099 |
| NT2RI2000344 | 0 | 0 | 0 | 0 | 3.013 | 0 | 1.796 |
| NT2RI2000578 | 0 | 0 | 0 | 0.341 | 0 | 0 | 0 |
| NT2RI2000671 | 0 | 0 | 0 | 0 | 3.915 | 0 | 0 |
| NT2RI2000685 | 0 | 2.273 | 0 | 0 | 3.688 | 0 | 0 |
| NT2RI2000727 | 1.552 | 1.187 | 0 | 1.848 | 1.926 | 1.866 | 0.861 |
| NT2RI2000775 | 0 | 0 | 0 | 0 | 0 | 0 | 18.913 |
| NT2RI2000829 | 3.819 | 0 | 0 | 3.897 | 0 | 0 | 0 |
| NT2RI2000974 | 2.157 | 4.949 | 0 | 2.201 | 0 | 0 | 4.784 |
| NT2RI2001054 | 0.595 | 1.365 | 2.108 | 0 | 2.215 | 0 | 0.660 |
| NT2RI2001230 | 0 | 0 | 0 | 0.787 | 0 | 0 | 0.855 |
| NT2RI2001422 | 0 | 8.529 | 0 | 0 | 0 | 0 | 0 |
| NT2RI2001450 | 3.544 | 12.195 | 6.277 | 10.846 | 0 | 0 | 5.895 |
| NT2RI2001540 | 0 | 0.522 | 0.403 | 0 | 1.271 | 0.616 | 0.063 |
| NT2RI2001621 | 3.061 | 0 | 0 | 0 | 11.393 | 0 | 0 |
| NT2RI2001657 | 0 | 0 | 1.895 | 0 | 0 | 0 | 1.780 |
| NT2RI2001726 | 10.559 | 0 | 0 | 10.773 | 0 | 0 | 0 |
| NT2RI2001731 | 0 | 0 | 0 | 1.932 | 7.049 | 0 | 0 |
| NT2RI2001846 | 9.856 | 0 | 0 | 0 | 0 | 0 | 0 |
| NT2RI2001859 | 2.911 | 0 | 0 | 1.980 | 0 | 0 | 1.076 |
| NT2RI2001910 | 0 | 0 | 0 | 0 | 0 | 26.931 | 0 |
| NT2RI2001952 | 0 | 0 | 0 | 0 | 0 | 0 | 23.231 |
| NT2RI2002091 | 0.040 | 0.369 | 0.475 | 0.055 | 0.150 | 0.097 | 0.476 |
| NT2RI2002152 | 0 | 0 | 0 | 1.283 | 4.681 | 0 | 0 |
| NT2RI2002243 | 0 | 0 | 0 | 0 | 0 | 0 | 3.648 |
| NT2RI2002266 | 0 | 0 | 0 | 2.557 | 0 | 0 | 0 |
| NT2RI2002316 | 0 | 0 | 2.840 | 0.818 | 0 | 0 | 0.889 |
| NT2RI2002359 | 8.230 | 0 | 0 | 0 | 0 | 0 | 0 |
| NT2RI2002391 | 0 | 1.860 | 0 | 0 | 0 | 0 | 1.799 |
| NT2RI2002530 | 0 | 13.848 | 0 | 0 | 0 | 0 | 0 |
| NT2RI2002540 | 6.915 | 7.932 | 0 | 5.291 | 6.434 | 24.933 | 1.917 |
| NT2RI2002549 | 0 | 0 | 0 | 0 | 0 | 0 | 7.641 |
| NT2RI2002592 | 0 | 0 | 0 | 0 | 0 | 66.490 | 0 |
| NT2RI2002602 | 0 | 0 | 0 | 0 | 29.147 | 0 | 0 |
| NT2RI2002654 | 0.587 | 0 | 0 | 1.199 | 2.186 | 2.118 | 1.303 |
| NT2RI2002699 | 0 | 26.231 | 0 | 0 | 0 | 0 | 0 |
| NT2RI2002819 | 7.446 | 0 | 13.189 | 0 | 13.857 | 0 | 4.129 |
| NT2RI2002822 | 5.017 | 0 | 0 | 10.238 | 0 | 0 | 22.256 |
| NT2RI2002847 | 0 | 0 | 0 | 1.281 | 0 | 0 | 2.784 |
| NT2RI2002926 | 0 | 0 | 0 | 0 | 0 | 28.456 | 0 |
| NT2RI2002958 | 3.851 | 0 | 3.411 | 2.947 | 3.583 | 3.471 | 10.677 |
| NT2RI2003011 | 0 | 0 | 0 | 0 | 0 | 0 | 3.829 |
| NT2RI2003051 | 9.214 | 0 | 3.627 | 4.178 | 0 | 0 | 3.406 |
| NT2RI2003205 | 0 | 0 | 0 | 3.284 | 0 | 0 | 0 |
| NT2RI2003222 | 0 | 0 | 0 | 0 | 0 | 0 | 28.191 |
| NT2RI2003301 | 17.027 | 0 | 0 | 0 | 0 | 0 | 0 |
| NT2RI2003304 | 0.525 | 0 | 0 | 1.606 | 0.977 | 0 | 0.873 |
| NT2RI2003317 | 9.458 | 3.616 | 0 | 3.216 | 0 | 0 | 1.748 |
| NT2RI2003338 | 6.075 | 0 | 0 | 3.099 | 0 | 0 | 3.369 |
| NT2RI2003344 | 11.684 | 0 | 0 | 19.868 | 0 | 0 | 8.638 |
| NT2RI2003361 | 4.939 | 22.661 | 0 | 0 | 0 | 17.808 | 0 |
| NT2RI2003420 | 9.240 | 0 | 0 | 4.713 | 0 | 0 | 1.708 |
| NT2RI2003481 | 3.862 | 0 | 0 | 5.910 | 0 | 0 | 0 |
| NT2RI2003556 | 0 | 0 | 0 | 0 | 0 | 0 | 0.422 |
| NT2RI2003655 | 0 | 44.817 | 0 | 0 | 0 | 0 | 0 |
| NT2RI2003695 | 1.575 | 5.420 | 0 | 0 | 0 | 0 | 2.620 |
| NT2RI2003738 | 0.175 | 0 | 0 | 0 | 0.651 | 0.631 | 0 |
| NT2RI2003751 | 1.385 | 3.178 | 0 | 0 | 5.156 | 0 | 0 |
| NT2RI2003921 | 0.474 | 0 | 0 | 0.484 | 0 | 0 | 0 |
| NT2RI2004078 | 35.496 | 0 | 0 | 0 | 0 | 0 | 0 |
| NT2RI2004188 | 0 | 0 | 0 | 0 | 0 | 10.353 | 0 |
| NT2RI2004230 | 0 | 7.897 | 0 | 0 | 0 | 0 | 0 |
| NT2RI2004304 | 8.329 | 0 | 0 | 4.249 | 0 | 0 | 9.236 |
| NT2RI2004398 | 4.982 | 0 | 0 | 0 | 0 | 0 | 5.525 |
| NT2RI2004410 | 4.988 | 0 | 0 | 7.634 | 0 | 8.993 | 2.766 |
| NT2RI2004535 | 7.657 | 0 | 0 | 0 | 0 | 0 | 10.614 |
| NT2RI2004606 | 35.496 | 0 | 0 | 0 | 0 | 0 | 0 |
| NT2RI2004608 | 0 | 8.488 | 0 | 0 | 0 | 0 | 0 |
| NT2RI2004783 | 21.577 | 0 | 0 | 0 | 0 | 0 | 0 |
| NT2RI2004884 | 0 | 0 | 0 | 0.788 | 2.876 | 0 | 0 |
| NT2RI2005116 | 0 | 0 | 4.528 | 0 | 0 | 0 | 1.418 |
| NT2RI2005150 | 2.756 | 0 | 0 | 4.218 | 2.565 | 0 | 0 |
| NT2RI2005239 | 0 | 9.048 | 0 | 12.070 | 0 | 0 | 4.373 |
| NT2RI2005335 | 3.871 | 0 | 0 | 1.975 | 0 | 0 | 3.005 |
| NT2RI2005353 | 0 | 0 | 0 | 5.876 | 0 | 4.153 | 1.277 |
| NT2RI2005368 | 0 | 0 | 7.158 | 4.123 | 0 | 0 | 0 |
| NT2RI2005382 | 0 | 0 | 0 | 20.181 | 0 | 0 | 43.872 |
| NT2RI2005405 | 0.561 | 0 | 0 | 0.573 | 3.134 | 0 | 1.245 |
| NT2RI2005564 | 8.908 | 0 | 0 | 13.633 | 0 | 0 | 0 |
| NT2RI2005579 | 0 | 0 | 0 | 19.149 | 0 | 0 | 0 |
| NT2RI2005713 | 2.958 | 6.786 | 0 | 1.509 | 0 | 0 | 3.280 |
| NT2RI2005723 | 1.505 | 3.454 | 0 | 1.024 | 1.868 | 3.619 | 1.113 |
| NT2RI2005811 | 0 | 0 | 5.427 | 0 | 0 | 0 | 0 |
| NT2RI2005814 | 0 | 0 | 0 | 0 | 0 | 4.696 | 0 |
| NT2RI2005816 | 0 | 0 | 0 | 0 | 0 | 0 | 7.088 |
| NT2RI2005818 | 0 | 0 | 0 | 2.598 | 0 | 0 | 0 |
| NT2RI2005851 | 3.727 | 0 | 0 | 3.802 | 0 | 0 | 0 |
| NT2RI2006071 | 16.937 | 0 | 0 | 0 | 0 | 0 | 0 |
| NT2RI2006072 | 0.765 | 3.511 | 0 | 0.781 | 0 | 2.759 | 0.848 |
| NT2RI2006271 | 2.793 | 0 | 0 | 0 | 0 | 0 | 0 |
| NT2RI2006412 | 6.558 | 9.403 | 5.808 | 4.181 | 0 | 2.956 | 0 |
| NT2RI2006553 | 0 | 8.485 | 0 | 0 | 0 | 0 | 0 |
| NT2RI2006640 | 6.285 | 0 | 0 | 12.824 | 0 | 0 | 6.970 |
| NT2RI2006647 | 0 | 10.520 | 0 | 0 | 0 | 0 | 0 |
| NT2RI2006703 | 0 | 0 | 0 | 0 | 0 | 0 | 17.973 |
| NT2RI2006735 | 15.739 | 0 | 0 | 16.057 | 0 | 0 | 0 |
| NT2RI2006825 | 2.742 | 0 | 0 | 0 | 0 | 0 | 3.040 |
| NT2RI2006856 | 0 | 1.075 | 0 | 0.478 | 3.487 | 0 | 0.519 |
| NT2RI2006943 | 0 | 2.790 | 0 | 1.241 | 0 | 13.156 | 0 |
| NT2RI2007054 | 1.298 | 0 | 0 | 0 | 0 | 0 | 1.440 |
| NT2RI2007084 | 0 | 0 | 3.854 | 0 | 0 | 0 | 3.619 |
| NT2RI2007096 | 10.368 | 0 | 0 | 10.578 | 0 | 0 | 5.749 |
| NT2RI2007133 | 0.392 | 0 | 0 | 0 | 0 | 0 | 0 |
| NT2RI2007148 | 0 | 0 | 0 | 0 | 0 | 0 | 1.047 |
| NT2RI2007277 | 0 | 0 | 0 | 3.001 | 0 | 0 | 5.436 |
| NT2RI2007377 | 3.514 | 5.374 | 0 | 1.195 | 0 | 4.223 | 0 |
| NT2RI2007384 | 0 | 2.981 | 0 | 0 | 1.612 | 0 | 0 |
| NT2RI2007445 | 0 | 0 | 0 | 0 | 6.674 | 6.465 | 3.977 |
| NT2RI2007468 | 0 | 0 | 0 | 0 | 0 | 0 | 4.634 |
| NT2RI2007498 | 0 | 0 | 0 | 0 | 0 | 0 | 0.452 |
| NT2RI2007572 | 1.494 | 3.428 | 0 | 1.525 | 0 | 2.694 | 0.829 |
| NT2RI2007589 | 3.204 | 4.900 | 3.783 | 0 | 7.950 | 0 | 0 |
| NT2RI2007593 | 0 | 0 | 0 | 0 | 0 | 0 | 3.654 |
| NT2RI2007884 | 0 | 5.824 | 8.994 | 0 | 0 | 9.154 | 5.631 |
| NT2RI2007987 | 1.801 | 0 | 0 | 1.837 | 0 | 0 | 1.997 |
| NT2RI2008045 | 2.329 | 0 | 2.751 | 0 | 0 | 0 | 0 |
| NT2RI2008141 | 0 | 0 | 0 | 0 | 0 | 0 | 2.371 |
| NT2RI2008171 | 0 | 10.187 | 0 | 0 | 0 | 0 | 0 |
| NT2RI2008336 | 0 | 0.919 | 0 | 1.226 | 0 | 0 | 0.889 |
| NT2RI2008396 | 0.441 | 1.011 | 0 | 0.450 | 0 | 0 | 2.444 |
| NT2RI2008481 | 0 | 0 | 0 | 0.755 | 0 | 0 | 1.640 |
| NT2RI2008526 | 0 | 0 | 0 | 0.782 | 0 | 0 | 0 |
| NT2RI2008566 | 0 | 0 | 0 | 9.596 | 0 | 0 | 20.861 |
| NT2RI2008622 | 0 | 0 | 0 | 0 | 0 | 0 | 6.999 |
| NT2RI2008656 | 2.716 | 0 | 0 | 0 | 0 | 0 | 3.012 |
| NT2RI2008724 | 1.836 | 0 | 0 | 1.874 | 0 | 0 | 4.073 |
| NT2RI2008749 | 0.565 | 1.297 | 0 | 0 | 2.104 | 0 | 1.254 |
| NT2RI2008791 | 0 | 5.353 | 0 | 1.190 | 0 | 0 | 1.294 |
| NT2RI2008812 | 0 | 0 | 0 | 0 | 0 | 26.104 | 0 |
| NT2RI2008942 | 0 | 0 | 0 | 3.210 | 0 | 0 | 0 |
| NT2RI2009037 | 0.843 | 0 | 0 | 1.720 | 0 | 0 | 0 |
| NT2RI2009065 | 1.401 | 0 | 1.655 | 0 | 1.738 | 0 | 0.518 |
| NT2RI2009066 | 0 | 6.288 | 0 | 8.389 | 0 | 0 | 0 |
| NT2RI2009173 | 0 | 0 | 0 | 1.138 | 0 | 0 | 1.237 |
| NT2RI2009194 | 1.965 | 0 | 0 | 1.003 | 0 | 0 | 0 |
| NT2RI2009233 | 6.767 | 5.175 | 7.991 | 0 | 0 | 8.133 | 2.501 |
| NT2RI2009239 | 1.398 | 0 | 0 | 0 | 0 | 0 | 0 |
| NT2RI2009269 | 1.976 | 0 | 0 | 1.008 | 0 | 7.126 | 1.096 |
| NT2RI2009281 | 1.407 | 6.458 | 0 | 1.436 | 0 | 0 | 0 |
| NT2RI2009402 | 6.273 | 7.196 | 0 | 3.200 | 11.674 | 0 | 3.478 |
| NT2RI2009406 | 0 | 0 | 0 | 2.870 | 0 | 10.144 | 0 |
| NT2RI2009583 | 0.224 | 1.540 | 0.793 | 0.228 | 1.665 | 1.613 | 1.489 |
| NT2RI2010795 | 0 | 0 | 0 | 16.827 | 0 | 0 | 36.581 |
| NT2RI2011450 | 25.398 | 0 | 0 | 0 | 0 | 0 | 0 |
| NT2RI2012659 | 13.562 | 0 | 0 | 0 | 0 | 0 | 0 |
| NT2RI2012726 | 23.195 | 0 | 0 | 0 | 0 | 0 | 10.289 |
| NT2RI2013345 | 9.458 | 0 | 0 | 9.649 | 0 | 0 | 0 |
| NT2RI2014733 | 24.938 | 0 | 0 | 0 | 0 | 0 | 0 |
| NT2RI2015342 | 1.504 | 0 | 0 | 1.535 | 11.198 | 0 | 5.005 |
| NT2RI2015533 | 6.216 | 7.131 | 0 | 1.586 | 0 | 5.604 | 12.064 |
| NT2RI2018311 | 0 | 0 | 0 | 21.918 | 0 | 0 | 0 |
| NT2RI2021625 | 0 | 0 | 0 | 19.442 | 0 | 0 | 0 |
| NT2RI2024313 | 0 | 0 | 0 | 14.948 | 0 | 0 | 0 |
| NT2RI2025075 | 0 | 0 | 0 | 17.297 | 0 | 0 | 18.801 |
| NT2RI2025255 | 0 | 0 | 0 | 0 | 0 | 0 | 37.898 |
| NT2RI3001445 | 0 | 0 | 0 | 19.385 | 0 | 22.837 | 21.071 |
| NT2RI3001515 | 0 | 0 | 0 | 11.050 | 0 | 0 | 0 |
| NT2RI3002842 | 0 | 0 | 0 | 0 | 0 | 0 | 20.781 |
| NT2RI3003738 | 18.137 | 0 | 0 | 0 | 0 | 0 | 0 |
| NT2RI3003925 | 0 | 0 | 0 | 35.956 | 0 | 0 | 0 |
| NT2RI3004510 | 0 | 0 | 0 | 28.761 | 0 | 0 | 0 |
| NT2RI3005403 | 0 | 0 | 0 | 0 | 0 | 0 | 37.898 |
| NT2RI3005724 | 0 | 0 | 0 | 12.093 | 0 | 0 | 0 |
| NT2RI3005923 | 19.493 | 0 | 0 | 0 | 0 | 0 | 0 |
| NT2RI3006284 | 4.138 | 0 | 0 | 0 | 0 | 0 | 0 |
| NT2RI3006673 | 19.959 | 0 | 0 | 10.182 | 0 | 0 | 0 |
| NT2RI3007291 | 0 | 0 | 0 | 12.770 | 0 | 0 | 0 |
| NT2RI3007543 | 1.697 | 0 | 0 | 0.866 | 0 | 3.059 | 0 |
| NT2RI3008055 | 44.179 | 0 | 0 | 0 | 0 | 0 | 0 |
| NT2RI3009524 | 35.496 | 0 | 0 | 0 | 0 | 0 | 0 |
| NT2RP6000017 | 2.992 | 0 | 0 | 1.526 | 0 | 0 | 0 |
| NT2RP6000039 | 8.966 | 0 | 0 | 3.659 | 0 | 0 | 0 |
| NT2RP6000043 | 3.798 | 0 | 13.455 | 3.875 | 0 | 13.695 | 4.212 |
| NT2RP6000072 | 0 | 0 | 5.724 | 0 | 0 | 0 | 0 |
| NT2RP6000077 | 0 | 0 | 0 | 0 | 0 | 0 | 7.128 |
| NT2RP6000078 | 1.079 | 0 | 0 | 0.734 | 0 | 0 | 0.399 |
| NT2RP6000085 | 4.625 | 0 | 0 | 0 | 0 | 0 | 5.129 |
| NT2RP6000109 | 0 | 0 | 0 | 0 | 0 | 0 | 2.118 |
| NT2RP6000110 | 2.738 | 0 | 0 | 0 | 0 | 0 | 18.220 |
| NT2RP6000123 | 0 | 2.694 | 1.387 | 0.399 | 0 | 0 | 0 |
| NT2RP7000069 | 10.105 | 0 | 0 | 3.437 | 0 | 0 | 0 |
| NT2RP7000076 | 0.609 | 1.398 | 4.318 | 0 | 0 | 0 | 1.352 |
| NT2RP7000173 | 2.224 | 0 | 1.969 | 2.836 | 0 | 0 | 0.617 |
| NT2RP7000238 | 0 | 0 | 0 | 1.321 | 0 | 0 | 1.436 |
| NT2RP7000259 | 13.372 | 30.679 | 0 | 0 | 0 | 0 | 0 |
| NT2RP7000271 | 6.066 | 0 | 10.744 | 6.188 | 0 | 10.936 | 0 |
| NT2RP7000477 | 7.914 | 4.539 | 0 | 6.055 | 0 | 0 | 4.388 |
| NT2RP7000586 | 10.987 | 0 | 0 | 11.209 | 0 | 0 | 0 |
| NT2RP7000600 | 6.648 | 0 | 0 | 13.565 | 0 | 0 | 7.372 |
| NT2RP7000624 | 8.726 | 0 | 0 | 0 | 0 | 15.732 | 0 |
| NT2RP7000906 | 10.436 | 0 | 0 | 2.662 | 0 | 4.704 | 7.233 |
| NT2RP7001080 | 3.347 | 0 | 0 | 0 | 0 | 0 | 0 |
| NT2RP7001166 | 2.992 | 1.716 | 0 | 1.526 | 0 | 0 | 3.318 |
| NT2RP7001231 | 4.130 | 0 | 0 | 4.213 | 0 | 0 | 13.739 |
| NT2RP7001283 | 0 | 0 | 1.994 | 1.149 | 0 | 4.059 | 0.624 |
| NT2RP7001306 | 0 | 0 | 25.768 | 0 | 0 | 0 | 0 |
| NT2RP7001335 | 0 | 19.172 | 14.802 | 10.657 | 7.776 | 0 | 6.950 |
| NT2RP7001962 | 5.313 | 0 | 0 | 0 | 0 | 0 | 2.946 |
| NT2RP7002064 | 22.128 | 0 | 0 | 0 | 0 | 0 | 24.539 |
| NT2RP7002376 | 0 | 0 | 0 | 0 | 0 | 0 | 13.455 |
| NT2RP7002379 | 2.014 | 0 | 0 | 2.054 | 1.874 | 0 | 3.908 |
| NT2RP7002449 | 6.061 | 0 | 0 | 6.183 | 0 | 0 | 4.481 |
| NT2RP7002450 | 0 | 0 | 0 | 5.446 | 0 | 0 | 0 |
| NT2RP7002478 | 0 | 0 | 0 | 29.741 | 0 | 0 | 0 |
| NT2RP7002594 | 0 | 0 | 0 | 27.872 | 0 | 0 | 0 |
| NT2RP7002738 | 5.756 | 0 | 0 | 5.873 | 0 | 0 | 6.384 |
| NT2RP7002802 | 0 | 0 | 0 | 3.728 | 0 | 0 | 0 |
| NT2RP7002875 | 9.228 | 0 | 0 | 0.941 | 3.434 | 0 | 6.140 |
| NT2RP7002906 | 5.607 | 6.432 | 0 | 5.721 | 10.435 | 0 | 6.218 |
| NT2RP7003203 | 5.541 | 0 | 0 | 3.769 | 0 | 6.660 | 4.097 |
| NT2RP7003319 | 0 | 2.093 | 3.232 | 4.654 | 0 | 0 | 1.012 |
| NT2RP7003629 | 0 | 0 | 0 | 23.088 | 0 | 0 | 0 |
| NT2RP7003632 | 0 | 0 | 0 | 3.323 | 0 | 0 | 0 |
| NT2RP7003647 | 4.708 | 0 | 4.169 | 15.609 | 0 | 0 | 2.610 |
| NT2RP7003680 | 22.379 | 0 | 0 | 0 | 0 | 0 | 0 |
| NT2RP7003688 | 3.692 | 0 | 0 | 0 | 0 | 0 | 4.913 |
| NT2RP7003960 | 0 | 0 | 0 | 1.690 | 0 | 0 | 1.837 |
| NT2RP7004123 | 0 | 4.403 | 0 | 0 | 0 | 0 | 2.128 |
| NT2RP7004173 | 2.291 | 3.504 | 0 | 1.558 | 0 | 5.507 | 0.847 |
| NT2RP7004196 | 2.620 | 9.018 | 4.641 | 2.673 | 0 | 0 | 0 |
| NT2RP7004204 | 0 | 3.912 | 0 | 5.219 | 6.347 | 0 | 5.673 |
| NT2RP7004233 | 0 | 27.433 | 0 | 0 | 0 | 0 | 13.260 |
| NT2RP7004348 | 0 | 0 | 8.006 | 0 | 0 | 0 | 0 |
| NT2RP7004352 | 3.397 | 0 | 0 | 0 | 0 | 0 | 7.534 |
| NT2RP7004373 | 0 | 0 | 0 | 3.602 | 4.381 | 0 | 5.221 |
| NT2RP7004428 | 16.862 | 0 | 0 | 6.881 | 0 | 0 | 0 |
| NT2RP7004481 | 5.378 | 0 | 0 | 5.487 | 0 | 0 | 0 |
| NT2RP7004559 | 0 | 0 | 0 | 0 | 0 | 0 | 9.452 |
| NT2RP7004728 | 4.715 | 0 | 0 | 4.811 | 0 | 5.667 | 1.743 |
| NT2RP7004751 | 0 | 0 | 0 | 0 | 0 | 1.688 | 0 |
| NT2RP7004790 | 15.609 | 0 | 0 | 0 | 0 | 0 | 8.655 |
| NT2RP7004884 | 13.727 | 0 | 0 | 5.602 | 0 | 0 | 0 |
| NT2RP7004911 | 5.288 | 0 | 0 | 7.193 | 0 | 0 | 5.864 |
| NT2RP7004915 | 7.424 | 0 | 0 | 7.574 | 0 | 0 | 0 |
| NT2RP7004925 | 5.051 | 0 | 0 | 2.576 | 0 | 0 | 0 |
| NT2RP7004946 | 6.026 | 1.975 | 0 | 2.635 | 0 | 0 | 0.955 |
| NT2RP7005513 | 0 | 0 | 0 | 1.724 | 0 | 0 | 0 |
| NT2RP7005529 | 14.766 | 0 | 0 | 15.065 | 0 | 0 | 0 |
| NT2RP7005675 | 11.633 | 0 | 0 | 8.901 | 0 | 0 | 3.225 |
| NT2RP7006033 | 0 | 17.637 | 0 | 0 | 0 | 0 | 17.050 |
| NT2RP7006075 | 0 | 0 | 0 | 0 | 0 | 0 | 5.811 |
| NT2RP7006141 | 0 | 0 | 0 | 0.753 | 0 | 0 | 4.095 |
| NT2RP7006188 | 5.207 | 0 | 0 | 0 | 0 | 0 | 5.774 |
| NT2RP7006223 | 4.225 | 0 | 0 | 8.622 | 15.726 | 0 | 0 |
| NT2RP7006263 | 0 | 0 | 0 | 0 | 0 | 0 | 4.465 |
| NT2RP7006395 | 0 | 0 | 0 | 17.468 | 0 | 0 | 0 |
| NT2RP7006490 | 2.146 | 0 | 0 | 0 | 0 | 7.740 | 2.380 |
| NT2RP7006539 | 0 | 13.349 | 0 | 0 | 10.828 | 0 | 0 |
| NT2RP7006619 | 0 | 0 | 7.819 | 2.252 | 0 | 7.959 | 4.895 |
| NT2RP7006701 | 0 | 0 | 0 | 5.129 | 0 | 0 | 0 |
| NT2RP7006717 | 1.974 | 0 | 0 | 0.671 | 2.449 | 0 | 0.730 |
| NT2RP7006886 | 0 | 0 | 0 | 9.704 | 0 | 0 | 0 |
| NT2RP7006986 | 0 | 0 | 0 | 11.498 | 0 | 0 | 0 |
| NT2RP7007154 | 0 | 1.308 | 0 | 1.164 | 2.122 | 2.056 | 0.632 |
| NT2RP7007177 | 0 | 0 | 0 | 1.389 | 0 | 0 | 0 |
| NT2RP7007252 | 6.867 | 0 | 0 | 7.006 | 0 | 0 | 0 |
| NT2RP7007381 | 15.682 | 0 | 0 | 0 | 0 | 0 | 0 |
| NT2RP7007387 | 6.158 | 4.709 | 0 | 2.094 | 0 | 0 | 2.276 |
| NT2RP7007530 | 0 | 0 | 0 | 2.237 | 0 | 0 | 0 |
| NT2RP7007537 | 1.230 | 0 | 0 | 2.509 | 0 | 0 | 2.727 |
| NT2RP7007610 | 5.788 | 6.640 | 0 | 8.858 | 0 | 0 | 3.209 |
| NT2RP7007617 | 0 | 0 | 0 | 16.050 | 0 | 0 | 17.446 |
| NT2RP7007842 | 0 | 0 | 0 | 1.957 | 7.139 | 0 | 2.127 |
| NT2RP7007975 | 2.729 | 0 | 0 | 1.392 | 0 | 0 | 0 |
| NT2RP7008161 | 0 | 0 | 0 | 6.405 | 0 | 0 | 0 |
| NT2RP7008167 | 2.723 | 0 | 0 | 0.926 | 0 | 0 | 2.013 |
| NT2RP7008190 | 0 | 0 | 0 | 0 | 0 | 0 | 1.471 |
| NT2RP7008315 | 0 | 0 | 0 | 7.656 | 0 | 0 | 0 |
| NT2RP7008396 | 0 | 0 | 0 | 0 | 0 | 0 | 13.651 |
| NT2RP7008487 | 0 | 0 | 0 | 15.611 | 0 | 0 | 0 |
| NT2RP7008543 | 0 | 0 | 0 | 0 | 0 | 0 | 3.051 |
| NT2RP7008714 | 0 | 0 | 0 | 0 | 0 | 0 | 4.301 |
| NT2RP7009012 | 11.338 | 0 | 0 | 11.567 | 0 | 0 | 0 |
| NT2RP7009087 | 2.429 | 0 | 0 | 0 | 0 | 0 | 0 |
| NT2RP7009108 | 4.444 | 8.156 | 0 | 2.720 | 6.616 | 9.614 | 2.957 |
| NT2RP7009147 | 14.337 | 0 | 5.643 | 1.625 | 0 | 0 | 3.533 |
| NT2RP7009149 | 2.393 | 0 | 0 | 6.102 | 0 | 4.313 | 1.327 |
| NT2RP7009225 | 2.813 | 12.906 | 19.929 | 8.609 | 0 | 0 | 0 |
| NT2RP7009259 | 6.180 | 0 | 0 | 5.159 | 0 | 0 | 2.492 |
| NT2RP7009373 | 8.034 | 0 | 0 | 4.098 | 0 | 0 | 17.820 |
| NT2RP7009394 | 13.301 | 0 | 8.567 | 2.467 | 4.501 | 0 | 8.046 |
| NT2RP7009481 | 0 | 0 | 0 | 4.178 | 0 | 0 | 0 |
| NT2RP7009482 | 5.098 | 0 | 0 | 6.619 | 0 | 0 | 3.598 |
| NT2RP7009498 | 0 | 0 | 0 | 0 | 0 | 0 | 2.235 |
| NT2RP7009507 | 29.324 | 0 | 0 | 0 | 0 | 0 | 0 |
| NT2RP7010612 | 0 | 0 | 0 | 22.069 | 0 | 0 | 0 |
| NT2RP7012776 | 0 | 0 | 0 | 0 | 0 | 0 | 9.320 |
| NT2RP7013573 | 0 | 0 | 25.527 | 7.352 | 0 | 0 | 7.991 |
| NT2RP7013764 | 0 | 0 | 0 | 11.583 | 0 | 0 | 0 |
| NT2RP7014005 | 5.818 | 0 | 0 | 0 | 0 | 0 | 0 |
| NT2RP7014910 | 5.978 | 0 | 0 | 6.099 | 0 | 0 | 3.978 |
| NT2RP7015503 | 0 | 0 | 0 | 3.231 | 0 | 11.418 | 0 |
| NT2RP7016574 | 0 | 0 | 0 | 0 | 0 | 0 | 24.498 |
| NT2RP7017474 | 18.823 | 0 | 0 | 0 | 0 | 0 | 0 |
| NT2RP7019135 | 29.324 | 0 | 0 | 0 | 0 | 0 | 0 |
| NT2RP7019401 | 0 | 0 | 0 | 10.593 | 0 | 0 | 0 |
| NT2RP7019543 | 0 | 0 | 0 | 10.792 | 0 | 0 | 0 |
| NT2RP7019835 | 1.042 | 0 | 0 | 0 | 0 | 3.758 | 0 |
| NT2RP8001605 | 29.324 | 0 | 0 | 0 | 0 | 0 | 0 |
| NT2RP8007715 | 25.129 | 0 | 0 | 0 | 0 | 0 | 0 |
| NT2RP8007920 | 1.978 | 0 | 0 | 0 | 7.363 | 0 | 0 |
| NTONG1000033 | 4.901 | 0 | 0 | 7.500 | 0 | 0 | 2.717 |
| NTONG1000098 | 3.823 | 0 | 0 | 3.900 | 0 | 0 | 4.239 |
| NTONG1000182 | 1.238 | 0 | 8.771 | 3.789 | 4.608 | 4.464 | 1.373 |
| NTONG1000264 | 3.899 | 0 | 0 | 4.972 | 0 | 0 | 2.162 |
| NTONG2000107 | 10.664 | 0 | 0 | 0 | 0 | 0 | 0 |
| NTONG2000265 | 7.672 | 1.956 | 3.020 | 13.916 | 0 | 0 | 2.836 |
| NTONG2000876 | 0 | 0 | 4.933 | 0 | 0 | 5.021 | 0 |
| NTONG2000878 | 0 | 0 | 4.183 | 1.205 | 0 | 0 | 2.619 |
| NTONG2000977 | 0 | 2.255 | 3.482 | 0 | 0 | 0 | 0 |
| NTONG2001137 | 1.144 | 2.626 | 0 | 0 | 0 | 0 | 0 |
| NTONG2001428 | 0 | 0 | 0 | 0 | 0 | 0 | 11.690 |
| NTONG2001550 | 3.481 | 0 | 0 | 3.551 | 0 | 0 | 0 |
| NTONG2001567 | 0 | 0 | 0 | 0 | 0 | 0 | 0.340 |
| NTONG2001612 | 1.123 | 2.575 | 3.977 | 0 | 0 | 8.095 | 0 |
| NTONG2001762 | 1.803 | 0 | 6.388 | 9.199 | 6.712 | 0 | 2.000 |
| NTONG2002807 | 0 | 0 | 0 | 0 | 0 | 0 | 13.079 |
| NTONG2002985 | 11.947 | 0 | 0 | 0 | 0 | 0 | 0 |
| NTONG2003454 | 2.981 | 0 | 0 | 18.249 | 0 | 0 | 0 |
| NTONG2003515 | 0 | 0 | 0 | 0 | 0 | 0 | 10.852 |
| NTONG2004095 | 0 | 0 | 0 | 9.367 | 0 | 0 | 0 |
| NTONG2004614 | 0 | 0 | 0 | 0 | 0 | 0 | 6.567 |
| NTONG2005373 | 0 | 0 | 0 | 0 | 0 | 0 | 6.535 |
| NTONG2005391 | 4.662 | 0 | 0 | 14.270 | 0 | 0 | 2.585 |
| NTONG2005520 | 2.663 | 0 | 4.716 | 1.358 | 0 | 0 | 2.953 |
| NTONG2005801 | 14.252 | 0 | 0 | 1.818 | 0 | 0 | 3.951 |
| NTONG2005897 | 0 | 0 | 0 | 7.003 | 0 | 0 | 0 |
| NTONG2005969 | 0 | 14.740 | 0 | 0 | 0 | 0 | 3.562 |
| NTONG2007028 | 11.947 | 0 | 0 | 0 | 0 | 0 | 0 |
| NTONG2007658 | 0 | 0 | 0 | 0 | 0 | 7.216 | 0 |
| NTONG2008088 | 0 | 0 | 0 | 0 | 0 | 0 | 11.332 |
| NTONG2008143 | 10.865 | 0 | 0 | 0 | 0 | 0 | 0 |
| NTONG2008483 | 2.397 | 1.833 | 5.661 | 0.815 | 0 | 5.761 | 1.772 |
| NTONG2008944 | 5.840 | 0 | 0 | 2.979 | 0 | 0 | 3.238 |
| NTONG2009576 | 7.105 | 0 | 0 | 0 | 0 | 0 | 0 |
| OCBBF1000030 | 0 | 0 | 0 | 45.093 | 0 | 0 | 0 |
| OCBBF1000049 | 9.939 | 0 | 0 | 5.070 | 0 | 0 | 0 |
| OCBBF1000080 | 0 | 0 | 0 | 19.507 | 0 | 0 | 0 |
| OCBBF1000086 | 2.296 | 3.512 | 5.423 | 1.562 | 0 | 0 | 0.849 |
| OCBBF1000114 | 0 | 0 | 9.031 | 2.601 | 0 | 0 | 0 |
| OCBBF1000145 | 0 | 0 | 0 | 0 | 0 | 0 | 47.165 |
| OCBBF1000146 | 0.863 | 1.979 | 0 | 0 | 0 | 0 | 1.913 |
| OCBBF1000185 | 4.210 | 0 | 0 | 0 | 0 | 0 | 0 |
| OCBBF1000188 | 1.041 | 0 | 7.378 | 3.187 | 3.876 | 0 | 0 |
| OCBBF1000315 | 0 | 0 | 0 | 8.926 | 0 | 0 | 0 |
| OCBBF2000015 | 9.494 | 0 | 0 | 7.264 | 0 | 0 | 4.387 |
| OCBBF2000126 | 3.887 | 8.917 | 13.769 | 0 | 14.466 | 14.014 | 0 |
| OCBBF2000178 | 4.361 | 0 | 0 | 3.337 | 4.058 | 7.862 | 3.627 |
| OCBBF2000231 | 3.917 | 17.974 | 0 | 7.993 | 0 | 0 | 13.032 |
| OCBBF2000277 | 7.347 | 0 | 0 | 0 | 0 | 0 | 16.294 |
| OCBBF2000522 | 0 | 0 | 0 | 0 | 0 | 0 | 2.804 |
| OCBBF2000712 | 0 | 0 | 0 | 0.964 | 0 | 0 | 1.048 |
| OCBBF2000824 | 0 | 0 | 0 | 6.131 | 0 | 0 | 6.664 |
| OCBBF2000831 | 0 | 0 | 0 | 9.824 | 0 | 0 | 0 |
| OCBBF2000846 | 0 | 3.358 | 5.185 | 0.747 | 2.724 | 0 | 0.812 |
| OCBBF2000904 | 0 | 0 | 14.319 | 4.124 | 0 | 0 | 0 |
| OCBBF2000982 | 0.872 | 0 | 3.089 | 1.779 | 0 | 0 | 1.934 |
| OCBBF2000986 | 1.927 | 2.211 | 0 | 0 | 0 | 0 | 0 |
| OCBBF2001140 | 16.961 | 0 | 0 | 23.073 | 0 | 0 | 12.540 |
| OCBBF2001166 | 16.442 | 0 | 0 | 5.592 | 0 | 0 | 0 |
| OCBBF2001210 | 7.252 | 0 | 0 | 22.195 | 0 | 0 | 0 |
| OCBBF2001307 | 11.643 | 0 | 11.784 | 27.151 | 0 | 0 | 25.823 |
| OCBBF2001408 | 0 | 0 | 0 | 39.401 | 0 | 0 | 0 |
| OCBBF2001416 | 20.868 | 0 | 0 | 0 | 0 | 0 | 0 |
| OCBBF2001492 | 4.117 | 1.574 | 2.431 | 0 | 0 | 2.474 | 6.087 |
| OCBBF2001586 | 3.586 | 0 | 0 | 3.658 | 0 | 0 | 3.976 |
| OCBBF2001639 | 0 | 10.788 | 0 | 4.798 | 0 | 16.956 | 5.215 |
| OCBBF2001687 | 3.847 | 0 | 6.814 | 1.962 | 0 | 0 | 0 |
| OCBBF2001794 | 4.728 | 0 | 0 | 0 | 0 | 0 | 0 |
| OCBBF2001931 | 0 | 0 | 0 | 0 | 62.325 | 0 | 0 |
| OCBBF2002015 | 0 | 0 | 0 | 0 | 0 | 0 | 15.338 |
| OCBBF2002083 | 0 | 25.211 | 0 | 0 | 0 | 0 | 0 |
| OCBBF2002086 | 3.222 | 0 | 0 | 0 | 0 | 0 | 0 |
| OCBBF2002290 | 0 | 0 | 0 | 0 | 0 | 0 | 11.184 |
| OCBBF2002626 | 1.689 | 0 | 0 | 2.585 | 0 | 0 | 0 |
| OCBBF2002656 | 1.654 | 0 | 0 | 1.688 | 6.157 | 0 | 0 |
| OCBBF2002980 | 0 | 0 | 0 | 45.093 | 0 | 0 | 0 |
| OCBBF2003052 | 11.395 | 0 | 0 | 7.750 | 0 | 0 | 0 |
| OCBBF2003246 | 9.786 | 0 | 0 | 19.969 | 0 | 0 | 0 |
| OCBBF2003518 | 2.062 | 0 | 0 | 0 | 0 | 0 | 0 |
| OCBBF2003593 | 44.597 | 0 | 0 | 0 | 0 | 0 | 0 |
| OCBBF2003819 | 0 | 0 | 0 | 21.496 | 0 | 0 | 0 |
| OCBBF2003925 | 0 | 0 | 0 | 0 | 0 | 3.004 | 0 |
| OCBBF2004104 | 5.478 | 3.142 | 0 | 0 | 5.098 | 0 | 3.038 |
| OCBBF2004259 | 0 | 0 | 0 | 0 | 0 | 0 | 47.165 |
| OCBBF2004273 | 0 | 0 | 0 | 3.658 | 0 | 0 | 0.994 |
| OCBBF2004533 | 0 | 0 | 0 | 0 | 74.975 | 0 | 0 |
| OCBBF2004669 | 0 | 0 | 0 | 45.093 | 0 | 0 | 0 |
| OCBBF2004757 | 0 | 5.686 | 0 | 0 | 0 | 0 | 0 |
| OCBBF2004889 | 44.597 | 0 | 0 | 0 | 0 | 0 | 0 |
| OCBBF2004930 | 0 | 23.811 | 0 | 0 | 0 | 37.423 | 0 |
| OCBBF2004984 | 0 | 0 | 0 | 0 | 0 | 0 | 26.412 |
| OCBBF2005161 | 0 | 0 | 0 | 45.093 | 0 | 0 | 0 |
| OCBBF2005420 | 21.156 | 0 | 0 | 0 | 0 | 0 | 0 |
| OCBBF2005428 | 0 | 7.563 | 0 | 0 | 0 | 0 | 0 |
| OCBBF2005546 | 0 | 0 | 0 | 45.093 | 0 | 0 | 0 |
| OCBBF2005956 | 0 | 6.513 | 0 | 0 | 10.566 | 0 | 3.148 |
| OCBBF2006005 | 9.535 | 0 | 0 | 9.728 | 0 | 0 | 21.147 |
| OCBBF2006148 | 0 | 0 | 0 | 0 | 0 | 0 | 7.510 |
| OCBBF2006151 | 0 | 0 | 20.423 | 11.764 | 0 | 0 | 0 |
| OCBBF2006172 | 0 | 12.029 | 18.574 | 0 | 19.515 | 0 | 0 |
| OCBBF2006313 | 0 | 13.100 | 0 | 0 | 0 | 0 | 0 |
| OCBBF2006660 | 0 | 0 | 0 | 15.400 | 0 | 0 | 0 |
| OCBBF2006764 | 15.345 | 0 | 0 | 0 | 0 | 0 | 0 |
| OCBBF2006972 | 44.597 | 0 | 0 | 0 | 0 | 0 | 0 |
| OCBBF2006987 | 0 | 0 | 0 | 13.187 | 0 | 0 | 0 |
| OCBBF2007028 | 9.665 | 0 | 0 | 11.269 | 0 | 0 | 18.374 |
| OCBBF2007051 | 0 | 0 | 0 | 45.093 | 0 | 0 | 0 |
| OCBBF2007068 | 0 | 0 | 0 | 45.093 | 0 | 0 | 0 |
| OCBBF2007224 | 9.442 | 0 | 0 | 0 | 0 | 0 | 0 |
| OCBBF2007354 | 3.014 | 2.305 | 0 | 0 | 0 | 0 | 1.114 |
| OCBBF2007415 | 4.004 | 9.185 | 0 | 7.353 | 2.980 | 0 | 10.656 |
| OCBBF2007762 | 0 | 0 | 0 | 16.042 | 0 | 0 | 0 |
| OCBBF2007829 | 10.981 | 0 | 1.945 | 8.963 | 2.044 | 0 | 3.653 |
| OCBBF2007892 | 0 | 0 | 0 | 0 | 0 | 15.360 | 0 |
| OCBBF2008005 | 0 | 0 | 0 | 1.620 | 0 | 0 | 0 |
| OCBBF2008041 | 4.180 | 0 | 0 | 0 | 0 | 0 | 0 |
| OCBBF2008144 | 5.768 | 0 | 0 | 2.942 | 0 | 0 | 3.198 |
| OCBBF2008340 | 0 | 0 | 0 | 15.751 | 0 | 0 | 0 |
| OCBBF2008466 | 0 | 0 | 0 | 0 | 31.840 | 0 | 0 |
| OCBBF2008483 | 0 | 0 | 0 | 0 | 0 | 31.388 | 0 |
| OCBBF2008701 | 21.675 | 0 | 0 | 0 | 0 | 0 | 0 |
| OCBBF2009095 | 19.717 | 0 | 0 | 0 | 0 | 0 | 0 |
| OCBBF2009242 | 2.831 | 0 | 0 | 8.666 | 10.539 | 0 | 12.560 |
| OCBBF2009301 | 0 | 0 | 0 | 2.115 | 0 | 0 | 0 |
| OCBBF2009352 | 0 | 0 | 0 | 11.486 | 0 | 0 | 12.484 |
| OCBBF2009536 | 0 | 0 | 0 | 0 | 0 | 0 | 47.165 |
| OCBBF2009772 | 9.420 | 2.702 | 4.172 | 12.014 | 0 | 4.246 | 1.306 |
| OCBBF2009836 | 4.098 | 0 | 0 | 4.180 | 0 | 0 | 4.544 |
| OCBBF2009920 | 0 | 0 | 0 | 45.093 | 0 | 0 | 0 |
| OCBBF2010140 | 32.508 | 0 | 0 | 0 | 0 | 0 | 0 |
| OCBBF2010819 | 0 | 0 | 0 | 0 | 0 | 0 | 13.910 |
| OCBBF2010830 | 0 | 0 | 0 | 0.898 | 0 | 0 | 0.976 |
| OCBBF2010841 | 6.216 | 0 | 0 | 6.342 | 0 | 0 | 6.893 |
| OCBBF2010858 | 13.322 | 0 | 0 | 20.388 | 0 | 0 | 0 |
| OCBBF2010871 | 9.142 | 0 | 0 | 9.327 | 0 | 0 | 5.069 |
| OCBBF2011021 | 27.462 | 0 | 0 | 19.170 | 0 | 0 | 1.603 |
| OCBBF2011073 | 6.824 | 0 | 0 | 3.481 | 0 | 0 | 3.784 |
| OCBBF2011160 | 17.456 | 0 | 0 | 0 | 0 | 0 | 0 |
| OCBBF2011228 | 21.380 | 0 | 0 | 0 | 0 | 0 | 0 |
| OCBBF2011232 | 8.012 | 0 | 0 | 0 | 0 | 0 | 8.885 |
| OCBBF2011283 | 5.923 | 0 | 0 | 0 | 0 | 0 | 13.137 |
| OCBBF2011536 | 1.995 | 4.577 | 0 | 0 | 0 | 0 | 0 |
| OCBBF2011759 | 11.214 | 0 | 0 | 24.789 | 0 | 0 | 19.690 |
| OCBBF2011767 | 29.740 | 0 | 0 | 0 | 0 | 0 | 0 |
| OCBBF2011887 | 0 | 0 | 0 | 4.798 | 17.504 | 0 | 5.215 |
| OCBBF2011897 | 0 | 0 | 61.158 | 0 | 0 | 0 | 0 |
| OCBBF2011914 | 3.646 | 0 | 0 | 0 | 0 | 0 | 0 |
| OCBBF2012001 | 24.900 | 0 | 0 | 0 | 0 | 0 | 0 |
| OCBBF2012039 | 26.074 | 0 | 0 | 31.296 | 0 | 0 | 22.111 |
| OCBBF2012095 | 0 | 0 | 0 | 15.612 | 0 | 0 | 0 |
| OCBBF2012262 | 29.008 | 0 | 0 | 0 | 0 | 0 | 0 |
| OCBBF2012553 | 0 | 2.691 | 0 | 2.393 | 4.365 | 4.229 | 0 |
| OCBBF2012678 | 6.898 | 0 | 0 | 0 | 0 | 0 | 0 |
| OCBBF2012704 | 0 | 0 | 0 | 21.301 | 0 | 0 | 0 |
| OCBBF2012908 | 3.277 | 0 | 0 | 6.686 | 12.196 | 11.816 | 0 |
| OCBBF2012936 | 44.597 | 0 | 0 | 0 | 0 | 0 | 0 |
| OCBBF2013011 | 0 | 0 | 0 | 7.703 | 0 | 0 | 0 |
| OCBBF2013123 | 22.817 | 0 | 0 | 23.279 | 0 | 0 | 0 |
| OCBBF2013149 | 3.102 | 0 | 0 | 6.330 | 0 | 5.593 | 5.160 |
| OCBBF2013366 | 0 | 0 | 0 | 2.754 | 0 | 0 | 2.993 |
| OCBBF2013481 | 21.868 | 0 | 0 | 11.155 | 40.696 | 0 | 0 |
| OCBBF2013789 | 0 | 34.623 | 0 | 0 | 0 | 0 | 0 |
| OCBBF2013843 | 5.343 | 1.226 | 0 | 5.451 | 1.989 | 0 | 6.518 |
| OCBBF2014064 | 0 | 0 | 0 | 4.180 | 10.167 | 4.925 | 0 |
| OCBBF2014089 | 19.735 | 0 | 0 | 0 | 0 | 0 | 0 |
| OCBBF2014292 | 0 | 0 | 0 | 0 | 0 | 0 | 2.297 |
| OCBBF2014322 | 0 | 0 | 0 | 0 | 0 | 0 | 22.893 |
| OCBBF2014541 | 3.921 | 0 | 0 | 0 | 0 | 0 | 0 |
| OCBBF2014576 | 0 | 0 | 0 | 3.728 | 0 | 0 | 4.052 |
| OCBBF2014873 | 28.366 | 0 | 0 | 0 | 0 | 0 | 0 |
| OCBBF2015503 | 0 | 0 | 0 | 0 | 0 | 0 | 8.322 |
| OCBBF2015931 | 0 | 0 | 0 | 0 | 74.975 | 0 | 0 |
| OCBBF2016729 | 9.116 | 0 | 0 | 0 | 0 | 0 | 0 |
| OCBBF2017035 | 0 | 2.781 | 0 | 3.711 | 4.512 | 4.371 | 5.378 |
| OCBBF2017306 | 44.597 | 0 | 0 | 0 | 0 | 0 | 0 |
| OCBBF2017398 | 9.005 | 0 | 4.557 | 6.562 | 4.788 | 0 | 4.280 |
| OCBBF2017754 | 0 | 0 | 0 | 7.661 | 0 | 0 | 0 |
| OCBBF2017791 | 1.281 | 2.939 | 0 | 5.227 | 0 | 0 | 5.682 |
| OCBBF2017882 | 7.135 | 0 | 0 | 7.279 | 53.111 | 0 | 7.912 |
| OCBBF2017888 | 17.037 | 0 | 0 | 0 | 0 | 0 | 0 |
| OCBBF2017893 | 0 | 0 | 0 | 0 | 12.912 | 0 | 0 |
| OCBBF2017920 | 0 | 0 | 0 | 0 | 0 | 0 | 28.558 |
| OCBBF2018084 | 4.410 | 0 | 0 | 0 | 0 | 0 | 0 |
| OCBBF2018206 | 0 | 0 | 0 | 45.093 | 0 | 0 | 0 |
| OCBBF2018234 | 19.431 | 0 | 0 | 0 | 0 | 0 | 0 |
| OCBBF2018581 | 0 | 0 | 0 | 0 | 16.013 | 0 | 0 |
| OCBBF2018618 | 16.218 | 0 | 0 | 16.546 | 0 | 0 | 0 |
| OCBBF2018707 | 0 | 0 | 0 | 0 | 0 | 16.218 | 0 |
| OCBBF2018827 | 9.813 | 0 | 0 | 15.018 | 0 | 0 | 5.441 |
| OCBBF2018873 | 1.386 | 0 | 0 | 2.828 | 0 | 0 | 4.610 |
| OCBBF2018956 | 0 | 0 | 0 | 0 | 0 | 0 | 1.877 |
| OCBBF2019950 | 0 | 0 | 0 | 45.093 | 0 | 0 | 0 |
| OCBBF2020741 | 0 | 0 | 0 | 28.789 | 0 | 0 | 0 |
| OCBBF2021286 | 18.456 | 0 | 0 | 18.829 | 0 | 0 | 10.233 |
| OCBBF2021833 | 14.503 | 0 | 0 | 0 | 0 | 0 | 32.166 |
| OCBBF2024719 | 0 | 0 | 0 | 30.261 | 0 | 0 | 32.892 |
| OCBBF2024850 | 4.445 | 0 | 0 | 4.535 | 0 | 8.013 | 7.393 |
| OCBBF2028055 | 44.597 | 0 | 0 | 0 | 0 | 0 | 0 |
| OCBBF2030116 | 0 | 0 | 0 | 45.093 | 0 | 0 | 0 |
| OCBBF2031561 | 0 | 0 | 0 | 0 | 0 | 0 | 34.817 |
| OCBBF2033295 | 10.516 | 0 | 0 | 10.729 | 0 | 0 | 0 |
| OCBBF2035226 | 0 | 0 | 0 | 0.599 | 0 | 4.236 | 0 |
| OCBBF2036743 | 11.053 | 0 | 0 | 0 | 0 | 0 | 12.257 |
| OCBBF2038317 | 19.713 | 0 | 0 | 0 | 0 | 0 | 10.930 |
| OCBBF3000296 | 0 | 0 | 0 | 19.328 | 0 | 0 | 0 |
| OCBBF3000323 | 0 | 0 | 0 | 3.393 | 0 | 0 | 0 |
| OCBBF3001333 | 9.639 | 0 | 0 | 0 | 0 | 0 | 0 |
| OCBBF3003103 | 44.597 | 0 | 0 | 0 | 0 | 0 | 0 |
| OCBBF3004487 | 4.531 | 0 | 0 | 4.622 | 0 | 0 | 0 |
| OCBBF3008230 | 29.840 | 0 | 0 | 0 | 0 | 0 | 33.091 |
| OCBBF3008835 | 0 | 0 | 0 | 0 | 0 | 0 | 47.165 |
| PEBLM1000144 | 5.997 | 0 | 0 | 0 | 0 | 0 | 0 |
| PEBLM2000030 | 0 | 0 | 0 | 0 | 0 | 0 | 4.081 |
| PEBLM2000147 | 0 | 2.927 | 0 | 1.302 | 0 | 0 | 1.415 |
| PEBLM2000222 | 0 | 1.333 | 2.058 | 0 | 0 | 0 | 0.644 |
| PEBLM2000267 | 2.812 | 0 | 0 | 1.435 | 0 | 20.280 | 1.559 |
| PEBLM2000308 | 1.982 | 9.096 | 0 | 0 | 0 | 0 | 0 |
| PEBLM2000326 | 10.856 | 0 | 0 | 0 | 0 | 0 | 0 |
| PEBLM2000395 | 0.910 | 0 | 0 | 0 | 0 | 0 | 1.009 |
| PEBLM2001072 | 10.881 | 4.160 | 0 | 1.850 | 0 | 0 | 2.011 |
| PEBLM2002455 | 0 | 0 | 0 | 0 | 33.118 | 0 | 0 |
| PEBLM2003914 | 2.125 | 0 | 7.527 | 2.168 | 0 | 7.661 | 2.356 |
| PEBLM2004452 | 10.797 | 0 | 0 | 12.393 | 0 | 0 | 5.987 |
| PEBLM2004666 | 3.715 | 0 | 0 | 0 | 0 | 0 | 0 |
| PEBLM2004733 | 0 | 21.924 | 0 | 0 | 0 | 0 | 0 |
| PEBLM2006283 | 0 | 0 | 0 | 11.951 | 0 | 0 | 0 |
| PEBLM2006366 | 0 | 6.350 | 0 | 0 | 10.301 | 0 | 0 |
| PEBLM2007774 | 0.301 | 0.691 | 0 | 0.307 | 1.121 | 0 | 0 |
| PEBLM2008826 | 0 | 0 | 0 | 0 | 0 | 0 | 10.285 |
| PERIC2000473 | 6.277 | 0 | 44.476 | 0 | 0 | 0 | 6.961 |
| PERIC2007068 | 3.086 | 7.080 | 0 | 4.723 | 0 | 0 | 1.711 |
| PLACE5000013 | 0 | 0 | 0 | 0 | 0 | 0 | 1.760 |
| PLACE5000058 | 0 | 0 | 0 | 0 | 0 | 0 | 38.390 |
| PLACE5000066 | 0 | 0 | 0 | 0 | 0 | 32.991 | 0 |
| PLACE5000113 | 6.882 | 0 | 0 | 3.511 | 0 | 0 | 1.908 |
| PLACE5000159 | 6.818 | 0 | 0 | 13.912 | 0 | 0 | 2.520 |
| PLACE5000170 | 0 | 0 | 0 | 3.547 | 0 | 0 | 7.711 |
| PLACE5000172 | 6.499 | 0 | 0 | 11.935 | 0 | 0 | 7.207 |
| PLACE5000178 | 35.975 | 0 | 0 | 0 | 0 | 0 | 0 |
| PLACE5000297 | 0 | 0 | 0 | 36.438 | 0 | 0 | 0 |
| PLACE5000492 | 0 | 56.315 | 0 | 0 | 0 | 0 | 0 |
| PLACE6000263 | 1.520 | 0 | 5.386 | 9.307 | 0 | 0 | 3.372 |
| PLACE6000314 | 0 | 0 | 0 | 0 | 0 | 0 | 16.914 |
| PLACE6000325 | 0 | 18.585 | 0 | 0 | 0 | 0 | 8.984 |
| PLACE6000379 | 0.177 | 0.405 | 1.251 | 0.901 | 0 | 1.274 | 0.783 |
| PLACE6000414 | 0 | 0 | 0 | 0 | 0 | 0 | 1.421 |
| PLACE6000463 | 0 | 17.901 | 0 | 0 | 0 | 0 | 0 |
| PLACE6001064 | 4.590 | 0 | 0 | 7.609 | 0 | 2.069 | 3.181 |
| PLACE6001185 | 21.358 | 0 | 0 | 0 | 0 | 0 | 0 |
| PLACE6001281 | 3.443 | 0 | 0 | 7.024 | 0 | 0 | 3.818 |
| PLACE6001443 | 0 | 0 | 0 | 2.004 | 0 | 0 | 2.178 |
| PLACE6001823 | 0 | 0 | 0 | 29.069 | 0 | 0 | 0 |
| PLACE6002084 | 0 | 0.847 | 0 | 1.130 | 0 | 0 | 0 |
| PLACE6002102 | 4.237 | 3.240 | 0 | 12.968 | 0 | 0 | 7.831 |
| PLACE6002668 | 0 | 0 | 0 | 0 | 0 | 0 | 5.985 |
| PLACE6003004 | 0 | 0 | 0 | 0 | 0 | 0 | 38.390 |
| PLACE6003204 | 21.933 | 0 | 0 | 0 | 0 | 0 | 0 |
| PLACE6003218 | 14.551 | 0 | 0 | 0 | 0 | 0 | 0 |
| PLACE6003383 | 1.194 | 0 | 0 | 0 | 0 | 0 | 0 |
| PLACE6003745 | 0 | 0 | 0 | 5.361 | 0 | 0 | 5.827 |
| PLACE6003850 | 0 | 0 | 0 | 0 | 0 | 40.449 | 0 |
| PLACE6004005 | 2.962 | 0 | 0 | 2.015 | 0 | 0 | 1.095 |
| PLACE6004312 | 1.206 | 0 | 0 | 1.231 | 0 | 2.175 | 0 |
| PLACE6004397 | 1.838 | 8.434 | 13.023 | 0 | 6.841 | 0 | 2.038 |
| PLACE6004578 | 0 | 0 | 0 | 0 | 4.614 | 0 | 0 |
| PLACE6005231 | 0 | 25.339 | 0 | 0 | 0 | 0 | 0 |
| PLACE6005294 | 0 | 0 | 42.656 | 0 | 0 | 0 | 0 |
| PLACE6005482 | 2.644 | 6.066 | 0 | 5.395 | 9.842 | 0 | 2.932 |
| PLACE6006137 | 10.247 | 7.836 | 0 | 17.423 | 0 | 0 | 7.575 |
| PLACE6006186 | 0 | 0 | 0 | 7.379 | 0 | 0 | 0 |
| PLACE6006222 | 8.355 | 0 | 29.599 | 17.049 | 0 | 30.127 | 0 |
| PLACE6006418 | 0 | 0 | 0 | 0 | 0 | 0 | 6.149 |
| PLACE6007180 | 21.434 | 0 | 0 | 0 | 0 | 0 | 11.885 |
| PLACE6007309 | 0 | 0 | 0 | 0 | 67.652 | 0 | 0 |
| PLACE6007373 | 0 | 0 | 0 | 0 | 0 | 0 | 3.174 |
| PLACE6007436 | 0 | 0 | 12.727 | 3.665 | 0 | 0 | 0 |
| PLACE6007925 | 0 | 23.248 | 0 | 0 | 0 | 0 | 0 |
| PLACE6008775 | 3.686 | 0 | 6.529 | 16.924 | 0 | 0 | 8.176 |
| PLACE6009821 | 0 | 0 | 0 | 0 | 0 | 55.521 | 17.076 |
| PLACE6010077 | 0 | 0 | 0 | 0 | 0 | 0 | 0.966 |
| PLACE6010484 | 0 | 0 | 0 | 0 | 0 | 5.573 | 0 |
| PLACE6010704 | 35.975 | 0 | 0 | 0 | 0 | 0 | 0 |
| PLACE6010732 | 0 | 56.315 | 0 | 0 | 0 | 0 | 0 |
| PLACE6011057 | 4.508 | 0 | 0 | 2.299 | 8.389 | 0 | 0 |
| PLACE6011156 | 0 | 29.874 | 0 | 0 | 0 | 46.952 | 0 |
| PLACE6012028 | 0 | 0 | 0 | 0 | 0 | 0 | 6.961 |
| PLACE6013883 | 0 | 0 | 0 | 0 | 0 | 0 | 38.390 |
| PLACE6014064 | 0 | 0 | 0 | 0 | 0 | 0 | 3.394 |
| PLACE6015051 | 0 | 0 | 0 | 0 | 17.157 | 0 | 0 |
| PLACE6015445 | 0 | 0 | 0 | 0 | 0 | 40.069 | 0 |
| PLACE6015731 | 0 | 0 | 54.376 | 0 | 0 | 0 | 0 |
| PLACE6016942 | 3.912 | 8.975 | 13.858 | 0 | 14.560 | 0 | 4.338 |
| PLACE6016984 | 0 | 0 | 0 | 18.846 | 0 | 0 | 0 |
| PLACE6017701 | 0 | 56.315 | 0 | 0 | 0 | 0 | 0 |
| PLACE6018031 | 0 | 0 | 0 | 0 | 0 | 0 | 7.456 |
| PLACE6019195 | 8.485 | 0 | 0 | 8.657 | 31.582 | 0 | 0 |
| PLACE7000410 | 0 | 0 | 0 | 0 | 0 | 0 | 38.390 |
| PLACE7004103 | 3.880 | 0 | 0 | 5.278 | 0 | 0 | 4.302 |
| PLACE7006240 | 25.174 | 0 | 0 | 0 | 0 | 0 | 0 |
| PLACE7008261 | 0 | 0 | 0 | 29.069 | 0 | 0 | 0 |
| PROST1000085 | 0 | 0 | 0 | 0 | 51.498 | 0 | 0 |
| PROST1000097 | 5.292 | 0 | 0 | 6.599 | 4.377 | 0 | 1.956 |
| PROST1000144 | 1.568 | 0 | 0 | 0 | 0 | 0 | 0 |
| PROST1000199 | 0 | 0 | 0 | 0.745 | 0 | 0 | 1.621 |
| PROST1000383 | 0 | 0 | 0 | 0 | 0 | 0 | 23.821 |
| PROST1000526 | 5.053 | 5.796 | 0 | 0 | 0 | 0 | 2.802 |
| PROST1000564 | 2.688 | 0 | 0 | 0 | 0 | 0 | 0 |
| PROST2000138 | 0.087 | 0 | 0.614 | 0.177 | 0.323 | 0 | 0.096 |
| PROST2000206 | 0 | 0 | 0 | 22.341 | 0 | 0 | 0 |
| PROST2000463 | 0 | 39.281 | 0 | 0 | 0 | 0 | 0 |
| PROST2000760 | 0 | 0 | 0 | 0 | 0 | 0 | 6.222 |
| PROST2001180 | 9.932 | 5.696 | 0 | 2.533 | 9.241 | 0 | 2.753 |
| PROST2001283 | 0 | 0 | 0 | 0 | 0 | 7.672 | 0 |
| PROST2001997 | 5.830 | 13.376 | 0 | 0 | 0 | 0 | 0 |
| PROST2002651 | 0 | 0 | 0 | 0 | 11.130 | 0 | 0 |
| PROST2003232 | 2.047 | 0 | 2.417 | 2.088 | 0 | 0 | 1.513 |
| PROST2003324 | 17.682 | 0 | 0 | 0 | 0 | 0 | 19.609 |
| PROST2003338 | 2.239 | 7.704 | 0 | 1.142 | 0 | 0 | 2.483 |
| PROST2003396 | 5.974 | 0 | 0 | 0 | 0 | 0 | 0 |
| PROST2003517 | 2.633 | 0 | 0 | 0 | 0 | 0 | 0 |
| PROST2004095 | 9.361 | 2.148 | 0 | 5.253 | 1.742 | 1.688 | 3.114 |
| PROST2004258 | 0 | 0 | 13.516 | 0 | 0 | 0 | 0 |
| PROST2004270 | 0.588 | 2.698 | 0 | 1.200 | 0 | 0 | 1.304 |
| PROST2004416 | 0 | 0 | 0 | 0 | 0 | 0 | 2.262 |
| PROST2004739 | 0 | 0 | 0 | 7.587 | 0 | 0 | 0 |
| PROST2005067 | 0 | 0 | 0 | 0 | 0 | 0 | 17.889 |
| PROST2005076 | 0 | 0 | 0 | 0 | 0 | 25.962 | 0 |
| PROST2005272 | 8.212 | 0 | 0 | 0 | 0 | 0 | 0 |
| PROST2005604 | 6.221 | 0 | 0 | 3.173 | 0 | 0 | 0 |
| PROST2005793 | 0 | 0 | 0 | 0 | 0 | 0 | 4.349 |
| PROST2006030 | 15.135 | 0 | 0 | 0 | 0 | 0 | 4.196 |
| PROST2006260 | 4.072 | 0 | 0 | 0 | 0 | 0 | 4.516 |
| PROST2006988 | 0 | 33.501 | 0 | 0 | 0 | 0 | 0 |
| PROST2007248 | 0 | 0 | 0 | 0 | 0 | 0 | 20.670 |
| PROST2007612 | 3.193 | 0 | 0 | 0 | 0 | 0 | 3.541 |
| PROST2008271 | 0 | 0 | 0 | 7.997 | 0 | 0 | 0 |
| PROST2008360 | 1.800 | 0 | 0 | 1.836 | 0 | 0 | 3.992 |
| PROST2008489 | 0 | 0 | 2.294 | 0 | 0 | 0 | 0.718 |
| PROST2008770 | 4.680 | 0 | 0 | 6.367 | 2.903 | 2.813 | 3.460 |
| PROST2009347 | 0 | 0 | 0 | 19.336 | 0 | 0 | 0 |
| PROST2009731 | 0 | 2.488 | 0 | 0 | 0 | 0 | 0 |
| PROST2010782 | 0.243 | 0 | 0 | 0 | 0 | 0 | 0 |
| PROST2011038 | 0 | 27.530 | 0 | 0 | 0 | 0 | 0 |
| PROST2011577 | 4.116 | 2.361 | 0 | 1.050 | 3.830 | 0 | 0 |
| PROST2012007 | 1.135 | 5.208 | 0 | 0 | 0 | 0 | 0 |
| PROST2012353 | 0 | 0 | 0 | 0 | 0 | 33.893 | 0 |
| PROST2012448 | 16.318 | 0 | 0 | 0 | 0 | 0 | 0 |
| PROST2012745 | 0 | 0 | 13.700 | 0 | 0 | 0 | 0 |
| PROST2015251 | 0 | 0 | 0 | 0 | 0 | 0 | 23.821 |
| PROST2015332 | 10.310 | 0 | 18.262 | 5.259 | 0 | 0 | 0 |
| PROST2015464 | 0 | 0 | 0 | 0 | 0 | 0 | 5.706 |
| PROST2015710 | 0 | 0 | 0 | 0 | 0 | 0 | 13.657 |
| PROST2016195 | 0 | 0 | 0 | 0 | 0 | 21.086 | 0 |
| PROST2016918 | 6.355 | 0 | 0 | 6.484 | 0 | 0 | 14.095 |
| PROST2017529 | 0 | 0 | 0 | 0 | 0 | 0 | 2.815 |
| PROST2017692 | 0 | 0 | 0 | 0.752 | 0 | 2.657 | 0 |
| PROST2017972 | 12.094 | 0 | 0 | 0 | 45.015 | 0 | 0 |
| PROST2018583 | 0 | 0 | 0 | 0 | 0 | 33.325 | 0 |
| PROST2018588 | 0 | 30.107 | 0 | 0 | 0 | 0 | 0 |
| PROST2018977 | 0 | 0 | 0 | 0 | 0 | 0 | 14.411 |
| PROST2019164 | 3.687 | 0 | 0 | 0 | 0 | 0 | 0 |
| PROST2019253 | 0 | 0 | 0 | 0 | 0 | 0 | 1.863 |
| PUAEN1000057 | 2.053 | 4.710 | 0 | 0 | 0 | 7.403 | 11.384 |
| PUAEN1000065 | 0.670 | 6.146 | 2.373 | 0 | 2.493 | 0 | 0 |
| PUAEN1000147 | 9.325 | 0 | 0 | 0 | 0 | 0 | 0 |
| PUAEN1000161 | 5.768 | 0 | 0 | 0 | 0 | 0 | 0 |
| PUAEN1000164 | 0.398 | 0 | 0 | 0 | 0 | 0 | 1.324 |
| PUAEN1000239 | 0 | 0 | 0 | 3.163 | 0 | 0 | 0 |
| PUAEN1000322 | 0 | 0 | 4.529 | 0 | 0 | 0 | 0 |
| PUAEN2000152 | 0 | 0 | 0 | 6.055 | 0 | 0 | 6.582 |
| PUAEN2000312 | 0 | 0 | 0 | 0 | 0 | 0 | 9.818 |
| PUAEN2000374 | 2.240 | 0 | 0 | 0.653 | 0 | 0 | 1.775 |
| PUAEN2000535 | 0.804 | 0 | 0 | 0 | 0 | 0 | 0 |
| PUAEN2001345 | 0 | 0 | 0 | 0 | 0 | 0 | 3.247 |
| PUAEN2001586 | 0 | 0 | 0 | 2.913 | 0 | 0 | 0 |
| PUAEN2002489 | 0 | 0 | 0 | 0 | 0 | 0 | 21.707 |
| PUAEN2003018 | 0 | 0 | 0 | 0 | 0 | 12.086 | 3.717 |
| PUAEN2003408 | 0 | 6.909 | 0 | 0 | 0 | 0 | 0 |
| PUAEN2005930 | 18.362 | 0 | 0 | 9.367 | 0 | 0 | 10.181 |
| PUAEN2006335 | 12.682 | 0 | 0 | 0 | 0 | 0 | 0 |
| PUAEN2007044 | 8.600 | 0 | 0 | 0 | 0 | 0 | 1.590 |
| PUAEN2008515 | 0 | 0 | 0 | 9.905 | 0 | 0 | 21.533 |
| PUAEN2008985 | 4.437 | 0 | 0 | 4.527 | 0 | 0 | 0 |
| PUAEN2009655 | 18.275 | 0 | 0 | 7.458 | 0 | 0 | 0 |
| PUAEN2010346 | 0 | 0 | 35.358 | 0 | 0 | 0 | 0 |
| PUAEN2010824 | 5.239 | 0 | 0 | 16.034 | 0 | 0 | 11.619 |
| RECTM2001347 | 0 | 0 | 0 | 0 | 0 | 0 | 4.600 |
| SALGL1000005 | 0 | 0 | 0 | 0 | 0 | 1.093 | 0 |
| SALGL1000047 | 0.296 | 0 | 0 | 0.302 | 0 | 0 | 0 |
| SALGL1000157 | 0 | 0 | 0.461 | 0.265 | 0.968 | 0 | 0.577 |
| SKMUS1000014 | 7.356 | 0 | 0 | 0 | 0 | 0 | 0 |
| SKMUS1000022 | 0.832 | 1.910 | 2.949 | 0 | 0 | 0 | 0 |
| SKMUS1000084 | 1.540 | 3.533 | 0 | 3.142 | 5.732 | 0 | 0 |
| SKMUS1000102 | 9.671 | 22.187 | 0 | 0 | 0 | 0 | 0 |
| SKMUS1000110 | 0 | 0 | 0 | 0 | 0 | 0 | 8.170 |
| SKMUS1000176 | 0 | 0 | 0 | 0 | 3.211 | 0 | 0 |
| SKMUS1000177 | 2.361 | 0 | 0 | 2.409 | 0 | 0 | 0 |
| SKMUS1000186 | 0.803 | 1.842 | 1.422 | 0.819 | 1.494 | 1.447 | 0 |
| SKMUS2000020 | 0 | 0 | 0 | 0 | 0 | 13.280 | 0 |
| SKMUS2000117 | 0 | 0 | 0 | 0 | 0 | 0 | 9.423 |
| SKMUS2000271 | 0 | 0 | 0 | 0 | 0 | 45.999 | 0 |
| SKMUS2000361 | 0 | 2.453 | 0 | 0 | 0 | 0 | 0 |
| SKMUS2000380 | 0 | 4.975 | 0 | 0 | 0 | 0 | 0 |
| SKMUS2000484 | 0 | 0 | 0 | 1.792 | 0 | 0 | 1.947 |
| SKMUS2000757 | 0 | 0 | 0 | 0 | 0 | 0 | 5.480 |
| SKMUS2000873 | 1.100 | 0 | 0 | 0.561 | 0 | 0 | 0 |
| SKMUS2000931 | 1.632 | 1.248 | 0 | 0.555 | 0 | 0 | 4.827 |
| SKMUS2000954 | 0 | 3.899 | 0 | 0 | 0 | 0 | 0 |
| SKMUS2000961 | 0 | 0 | 0 | 0 | 0 | 0 | 7.301 |
| SKMUS2001147 | 2.772 | 0 | 0 | 2.828 | 0 | 0 | 3.074 |
| SKMUS2001454 | 2.025 | 0.774 | 0 | 0.689 | 2.512 | 1.217 | 2.620 |
| SKMUS2001528 | 0 | 0 | 0 | 0 | 9.344 | 0 | 0 |
| SKMUS2001634 | 1.309 | 0 | 0 | 0 | 0 | 0 | 1.452 |
| SKMUS2004908 | 6.569 | 0 | 0 | 3.351 | 0 | 0 | 7.285 |
| SKNMC1000110 | 0 | 0 | 0 | 0 | 0 | 0 | 4.015 |
| SKNMC1000159 | 0 | 0 | 0 | 10.774 | 0 | 0 | 0 |
| SKNMC1000168 | 1.675 | 0 | 0 | 0 | 0 | 0 | 0 |
| SKNMC2000065 | 3.239 | 0 | 0 | 1.101 | 4.018 | 0 | 10.774 |
| SKNMC2000097 | 0 | 0 | 0 | 0.455 | 0 | 0 | 0.494 |
| SKNMC2000305 | 0 | 0 | 0 | 14.374 | 0 | 0 | 7.812 |
| SKNMC2000322 | 1.412 | 0 | 0 | 0 | 0 | 0 | 0 |
| SKNMC2000635 | 0 | 0.412 | 0 | 0 | 0 | 0 | 0.796 |
| SKNMC2000649 | 0 | 0 | 0 | 0.931 | 0 | 0 | 0 |
| SKNMC2000877 | 1.185 | 0 | 0 | 2.418 | 0 | 8.545 | 0 |
| SKNMC2001503 | 0 | 0 | 0 | 0 | 11.542 | 11.182 | 3.439 |
| SKNMC2006173 | 0 | 0 | 0 | 7.851 | 0 | 0 | 0 |
| SKNSH1000002 | 1.437 | 0 | 0 | 0 | 0 | 0 | 0 |
| SKNSH1000101 | 1.285 | 1.474 | 0 | 1.966 | 2.391 | 0 | 0 |
| SKNSH2000101 | 13.179 | 0 | 0 | 0 | 0 | 0 | 7.308 |
| SKNSH2000250 | 14.088 | 9.697 | 0 | 15.811 | 15.731 | 5.080 | 4.687 |
| SKNSH2000347 | 4.487 | 0 | 0 | 4.578 | 0 | 0 | 4.976 |
| SKNSH2000716 | 0 | 3.976 | 0 | 1.768 | 6.451 | 0 | 0 |
| SKNSH2000819 | 2.489 | 0 | 0 | 0 | 0 | 0 | 8.280 |
| SKNSH2001222 | 0 | 0 | 0 | 0 | 24.304 | 23.545 | 0 |
| SKNSH2001875 | 6.493 | 0 | 0 | 0 | 0 | 0 | 0 |
| SKNSH2002325 | 3.817 | 8.758 | 0 | 0 | 0 | 0 | 0 |
| SKNSH2003064 | 0 | 17.960 | 0 | 0 | 0 | 0 | 0 |
| SKNSH2005061 | 1.695 | 0 | 0 | 5.189 | 0 | 0 | 1.880 |
| SKNSH2009357 | 0 | 0 | 0 | 0 | 0 | 0 | 10.594 |
| SMINT1000048 | 7.876 | 0 | 0 | 8.036 | 0 | 0 | 0 |
| SMINT1000100 | 0 | 6.387 | 0 | 0 | 0 | 0 | 0 |
| SMINT1000117 | 7.892 | 0 | 0 | 4.026 | 0 | 0 | 2.917 |
| SMINT1000131 | 0 | 0 | 0 | 0 | 0 | 0 | 1.016 |
| SMINT2000073 | 0 | 0 | 0 | 0 | 0 | 0 | 9.621 |
| SMINT2000239 | 0 | 0 | 0 | 0 | 0 | 30.243 | 0 |
| SMINT2000267 | 0 | 0 | 0 | 0 | 0 | 0 | 23.912 |
| SMINT2000396 | 0 | 0 | 0 | 0 | 0 | 0 | 1.357 |
| SMINT2000400 | 6.689 | 0 | 0 | 0 | 0 | 0 | 0 |
| SMINT2000441 | 0.451 | 1.036 | 1.599 | 1.381 | 1.680 | 0 | 3.504 |
| SMINT2000454 | 0 | 20.504 | 0 | 0 | 0 | 0 | 9.911 |
| SMINT2000468 | 9.152 | 0 | 0 | 9.337 | 0 | 0 | 5.074 |
| SMINT2000545 | 2.371 | 0 | 0 | 2.419 | 0 | 0 | 0 |
| SMINT2000629 | 2.686 | 0 | 0 | 5.480 | 9.996 | 9.683 | 0 |
| SMINT2000659 | 0 | 0.637 | 0 | 0 | 0 | 0 | 0.616 |
| SMINT2000694 | 0 | 2.727 | 0 | 0 | 0 | 0 | 0 |
| SMINT2000933 | 0 | 0 | 0 | 0 | 0 | 3.675 | 1.130 |
| SMINT2001183 | 0 | 0 | 0 | 0 | 0 | 0 | 20.139 |
| SMINT2001348 | 0 | 0 | 32.864 | 0 | 0 | 0 | 0 |
| SMINT2001950 | 0 | 0 | 0 | 0 | 0 | 0 | 11.849 |
| SMINT2002159 | 0 | 0 | 0 | 6.995 | 0 | 0 | 0 |
| SMINT2002224 | 0 | 29.044 | 0 | 0 | 0 | 0 | 0 |
| SMINT2002620 | 0 | 0 | 8.026 | 9.246 | 0 | 0 | 2.512 |
| SMINT2002689 | 4.702 | 0 | 0 | 0 | 0 | 0 | 1.304 |
| SMINT2002976 | 10.432 | 0 | 0 | 5.322 | 0 | 0 | 0 |
| SMINT2003169 | 0.470 | 0 | 0 | 0.480 | 0 | 0 | 0 |
| SMINT2003423 | 0 | 0 | 0 | 0 | 40.436 | 0 | 0 |
| SMINT2003905 | 0.774 | 1.776 | 0 | 0 | 0 | 0 | 0.859 |
| SMINT2004023 | 0 | 0 | 5.403 | 0 | 0 | 0 | 0 |
| SMINT2004350 | 13.067 | 0 | 0 | 0 | 0 | 0 | 14.491 |
| SMINT2004589 | 0 | 0 | 0 | 4.089 | 0 | 0 | 0 |
| SMINT2004872 | 0 | 4.852 | 7.492 | 0 | 0 | 0 | 0 |
| SMINT2005330 | 0 | 0 | 0 | 0 | 51.332 | 0 | 0 |
| SMINT2005368 | 0 | 0 | 0 | 2.396 | 4.371 | 4.234 | 1.302 |
| SMINT2005956 | 0 | 0 | 0 | 2.685 | 0 | 0 | 17.513 |
| SMINT2007101 | 0 | 0 | 0 | 0 | 0 | 0 | 23.912 |
| SMINT2007792 | 0 | 0 | 29.610 | 0 | 0 | 0 | 9.269 |
| SMINT2008590 | 0 | 0 | 0 | 9.766 | 0 | 0 | 10.615 |
| SMINT2008869 | 0 | 0 | 50.098 | 0 | 0 | 0 | 0 |
| SMINT2008921 | 1.110 | 0 | 0 | 1.132 | 8.259 | 0 | 1.230 |
| SMINT2008960 | 1.368 | 4.709 | 2.424 | 0.698 | 5.093 | 12.334 | 0.759 |
| SMINT2009292 | 0 | 8.138 | 12.565 | 0 | 13.202 | 0 | 3.933 |
| SMINT2009415 | 0 | 0 | 0 | 0 | 0 | 0 | 23.912 |
| SMINT2010084 | 6.872 | 7.883 | 0 | 7.011 | 12.789 | 12.389 | 0 |
| SMINT2010144 | 0 | 0 | 0 | 0 | 0 | 0 | 23.912 |
| SMINT2010324 | 0 | 0 | 0 | 0 | 0 | 0 | 23.912 |
| SMINT2010639 | 2.709 | 18.644 | 0 | 0 | 0 | 29.302 | 0 |
| SMINT2010901 | 0 | 0 | 0 | 0 | 13.071 | 0 | 3.895 |
| SMINT2012122 | 0 | 0 | 12.384 | 0 | 0 | 0 | 3.877 |
| SMINT2012179 | 0 | 0 | 0 | 18.954 | 0 | 0 | 0 |
| SMINT2012501 | 0 | 0 | 0 | 8.113 | 0 | 0 | 0 |
| SMINT2013031 | 0 | 0 | 0 | 3.166 | 0 | 0 | 0 |
| SMINT2014480 | 0 | 0 | 5.628 | 0 | 5.913 | 0 | 0 |
| SMINT2016146 | 0 | 39.399 | 0 | 0 | 0 | 0 | 0 |
| SMINT2016396 | 0 | 0 | 50.098 | 0 | 0 | 0 | 0 |
| SMINT2017134 | 0 | 0 | 0 | 0 | 0 | 0 | 23.912 |
| SPLEN1000013 | 0 | 0 | 0 | 9.928 | 0 | 0 | 0 |
| SPLEN1000049 | 21.800 | 0 | 0 | 0 | 0 | 0 | 0 |
| SPLEN1000106 | 2.328 | 0 | 0 | 0 | 0 | 0 | 0 |
| SPLEN1000116 | 0.990 | 0 | 0 | 0 | 0 | 0 | 0 |
| SPLEN1000144 | 0 | 0 | 0 | 5.333 | 0 | 0 | 0 |
| SPLEN1000165 | 4.990 | 0 | 0 | 0 | 0 | 0 | 0 |
| SPLEN1000166 | 3.391 | 0 | 0 | 3.460 | 0 | 0 | 2.507 |
| SPLEN2000098 | 12.045 | 0 | 0 | 0 | 0 | 0 | 0 |
| SPLEN2000134 | 0 | 12.019 | 0 | 0 | 0 | 0 | 5.810 |
| SPLEN2000197 | 0 | 0 | 0 | 0 | 0 | 0 | 38.930 |
| SPLEN2000222 | 12.214 | 0 | 0 | 0 | 0 | 0 | 0 |
| SPLEN2000255 | 3.071 | 0 | 5.441 | 0 | 5.716 | 0 | 0 |
| SPLEN2000258 | 0 | 0 | 0 | 0 | 0 | 0 | 9.710 |
| SPLEN2000267 | 17.514 | 0 | 0 | 5.956 | 0 | 0 | 6.474 |
| SPLEN2000341 | 0 | 0 | 0 | 0 | 0 | 0 | 15.016 |
| SPLEN2000348 | 2.797 | 12.836 | 0 | 0 | 0 | 0 | 0 |
| SPLEN2000505 | 0.421 | 0 | 1.493 | 1.290 | 1.569 | 1.520 | 2.337 |
| SPLEN2000537 | 36.501 | 0 | 0 | 0 | 0 | 0 | 0 |
| SPLEN2000698 | 0 | 0 | 0 | 2.163 | 7.892 | 0 | 2.351 |
| SPLEN2000874 | 0.487 | 0 | 0 | 0 | 0 | 0 | 0 |
| SPLEN2000882 | 0 | 0 | 0 | 0 | 0 | 0 | 1.948 |
| SPLEN2001141 | 0 | 0 | 0 | 0.963 | 0 | 0 | 2.094 |
| SPLEN2001157 | 2.751 | 0 | 0 | 0 | 0 | 0 | 3.050 |
| SPLEN2001626 | 0 | 0 | 0 | 0 | 0 | 67.455 | 0 |
| SPLEN2002053 | 36.501 | 0 | 0 | 0 | 0 | 0 | 0 |
| SPLEN2002272 | 0 | 0 | 0 | 0 | 0 | 67.455 | 0 |
| SPLEN2002335 | 2.025 | 0 | 0 | 3.099 | 0 | 0 | 3.369 |
| SPLEN2002463 | 7.573 | 0 | 0 | 30.903 | 0 | 0 | 8.398 |
| SPLEN2002493 | 13.846 | 0 | 0 | 3.532 | 0 | 0 | 19.194 |
| SPLEN2002744 | 2.230 | 0 | 7.901 | 0 | 0 | 0 | 0 |
| SPLEN2002931 | 4.078 | 0 | 0 | 0 | 0 | 0 | 0 |
| SPLEN2003396 | 0 | 0 | 0 | 0 | 0 | 67.455 | 0 |
| SPLEN2003678 | 0 | 0 | 0 | 0 | 0 | 0 | 38.930 |
| SPLEN2004343 | 35.982 | 0 | 0 | 0 | 0 | 0 | 19.951 |
| SPLEN2004555 | 4.258 | 0 | 0 | 1.086 | 0 | 0 | 3.541 |
| SPLEN2004773 | 2.847 | 0 | 0 | 2.178 | 10.596 | 0 | 2.368 |
| SPLEN2004880 | 0 | 0.676 | 0 | 0 | 0 | 0 | 0 |
| SPLEN2004984 | 0 | 0 | 9.305 | 0 | 0 | 0 | 2.913 |
| SPLEN2005009 | 8.597 | 0 | 0 | 0 | 0 | 0 | 19.067 |
| SPLEN2005342 | 0 | 0 | 0 | 5.443 | 0 | 0 | 0 |
| SPLEN2005429 | 0 | 0 | 0 | 3.738 | 0 | 0 | 4.063 |
| SPLEN2005560 | 0 | 0 | 3.729 | 0 | 0 | 0 | 0 |
| SPLEN2005783 | 19.557 | 14.956 | 0 | 0 | 0 | 0 | 7.229 |
| SPLEN2005806 | 0 | 0 | 0 | 0 | 0 | 4.410 | 0 |
| SPLEN2005838 | 0 | 0 | 0 | 36.967 | 0 | 0 | 0 |
| SPLEN2005927 | 0 | 9.879 | 0 | 0 | 0 | 0 | 0 |
| SPLEN2006122 | 0 | 0 | 0 | 0 | 0 | 0 | 0.934 |
| SPLEN2006133 | 1.897 | 0 | 0 | 2.904 | 0 | 0 | 0 |
| SPLEN2006143 | 2.237 | 0 | 0 | 2.283 | 8.327 | 0 | 2.481 |
| SPLEN2006305 | 0.632 | 1.449 | 2.238 | 0 | 0 | 0 | 0.700 |
| SPLEN2006374 | 6.080 | 0 | 0 | 0 | 5.657 | 10.961 | 3.371 |
| SPLEN2007182 | 0 | 0 | 0 | 0 | 47.571 | 0 | 0 |
| SPLEN2007276 | 0 | 6.084 | 9.395 | 0 | 9.871 | 0 | 0 |
| SPLEN2007498 | 5.234 | 0 | 0 | 10.680 | 0 | 0 | 2.902 |
| SPLEN2007739 | 12.144 | 0 | 0 | 0 | 0 | 0 | 26.935 |
| SPLEN2008460 | 0 | 0 | 0 | 2.673 | 0 | 0 | 0 |
| SPLEN2009081 | 0 | 0 | 22.928 | 0 | 0 | 0 | 0 |
| SPLEN2009555 | 0 | 0 | 0 | 0 | 0 | 0 | 9.419 |
| SPLEN2009970 | 0 | 0 | 0 | 5.203 | 0 | 0 | 0 |
| SPLEN2010015 | 0 | 0 | 0 | 31.720 | 0 | 0 | 17.239 |
| SPLEN2010195 | 6.207 | 0 | 0 | 3.562 | 0 | 0 | 3.012 |
| SPLEN2010469 | 0 | 56.874 | 0 | 0 | 0 | 0 | 0 |
| SPLEN2010912 | 0 | 0 | 0 | 12.636 | 0 | 0 | 13.734 |
| SPLEN2011419 | 0 | 0 | 0 | 2.438 | 0 | 8.616 | 0 |
| SPLEN2011678 | 0 | 0 | 0 | 0 | 0 | 0 | 1.264 |
| SPLEN2011737 | 5.211 | 5.977 | 0 | 10.632 | 0 | 9.394 | 0 |
| SPLEN2012523 | 0 | 0 | 0 | 0 | 0 | 0 | 1.184 |
| SPLEN2012571 | 0 | 0 | 11.262 | 0 | 0 | 0 | 0 |
| SPLEN2012619 | 36.501 | 0 | 0 | 0 | 0 | 0 | 0 |
| SPLEN2012624 | 0 | 0 | 0 | 10.317 | 0 | 0 | 0 |
| SPLEN2012800 | 0 | 0.784 | 0 | 0 | 0 | 0 | 0.379 |
| SPLEN2013503 | 0 | 5.758 | 0 | 0 | 0 | 0 | 0 |
| SPLEN2013857 | 36.501 | 0 | 0 | 0 | 0 | 0 | 0 |
| SPLEN2013936 | 0 | 0 | 0 | 0 | 0 | 0 | 7.399 |
| SPLEN2014119 | 0 | 0 | 59.122 | 0 | 0 | 0 | 0 |
| SPLEN2014572 | 0 | 0 | 22.047 | 0 | 0 | 0 | 6.902 |
| SPLEN2014645 | 0 | 0 | 0 | 0 | 68.148 | 0 | 0 |
| SPLEN2014711 | 2.652 | 0 | 0 | 0 | 0 | 0 | 0 |
| SPLEN2014911 | 0 | 0 | 0 | 0 | 0 | 0 | 2.340 |
| SPLEN2015129 | 36.501 | 0 | 0 | 0 | 0 | 0 | 0 |
| SPLEN2015310 | 1.146 | 2.630 | 2.030 | 0 | 0 | 0 | 1.271 |
| SPLEN2015788 | 0 | 0 | 0 | 0 | 0 | 0 | 5.368 |
| SPLEN2016139 | 1.281 | 0 | 0 | 0 | 0 | 0 | 1.421 |
| SPLEN2016268 | 0 | 0 | 0 | 0 | 0 | 1.558 | 0.479 |
| SPLEN2016421 | 0 | 0 | 0 | 0 | 0 | 0 | 9.189 |
| SPLEN2016533 | 0 | 0 | 0 | 0 | 0 | 0 | 38.930 |
| SPLEN2016743 | 5.733 | 0 | 0 | 0 | 0 | 0 | 0 |
| SPLEN2016932 | 0 | 0 | 0 | 0 | 0 | 0 | 38.930 |
| SPLEN2016972 | 0 | 0 | 0 | 2.069 | 0 | 0 | 0 |
| SPLEN2017121 | 7.753 | 0 | 0 | 0 | 0 | 0 | 8.598 |
| SPLEN2017318 | 5.074 | 0 | 0 | 0 | 0 | 0 | 11.254 |
| SPLEN2017351 | 9.023 | 0 | 0 | 0 | 11.195 | 0 | 6.671 |
| SPLEN2017918 | 0 | 0 | 3.230 | 0 | 0 | 0 | 0 |
| SPLEN2018157 | 0 | 0 | 0 | 2.461 | 0 | 0 | 2.675 |
| SPLEN2018159 | 0 | 0 | 0 | 0 | 0 | 0 | 10.502 |
| SPLEN2018299 | 41.154 | 0 | 0 | 0 | 0 | 0 | 0 |
| SPLEN2018302 | 0 | 0 | 0 | 6.204 | 0 | 0 | 0 |
| SPLEN2018643 | 36.501 | 0 | 0 | 0 | 0 | 0 | 0 |
| SPLEN2019169 | 5.661 | 0 | 0 | 0 | 0 | 0 | 0 |
| SPLEN2019349 | 0 | 0 | 0 | 36.967 | 0 | 0 | 0 |
| SPLEN2019405 | 1.432 | 6.571 | 5.073 | 1.461 | 0 | 0 | 1.588 |
| SPLEN2019774 | 0 | 0 | 0 | 0 | 33.067 | 0 | 0 |
| SPLEN2020034 | 0 | 56.874 | 0 | 0 | 0 | 0 | 0 |
| SPLEN2020417 | 0 | 0 | 0 | 0 | 0 | 50.331 | 15.479 |
| SPLEN2021122 | 0 | 0 | 0 | 33.279 | 0 | 0 | 18.087 |
| SPLEN2021194 | 3.373 | 0 | 0 | 0 | 0 | 0 | 0 |
| SPLEN2021273 | 14.747 | 0 | 0 | 0 | 0 | 0 | 16.354 |
| SPLEN2021458 | 0 | 0 | 0 | 0 | 0 | 0 | 38.930 |
| SPLEN2023118 | 0 | 0 | 39.433 | 0 | 0 | 0 | 0 |
| SPLEN2023160 | 0 | 0 | 0 | 40.108 | 0 | 0 | 0 |
| SPLEN2024489 | 0 | 0 | 38.706 | 22.294 | 0 | 0 | 0 |
| SPLEN2024922 | 0 | 0 | 0 | 26.295 | 0 | 0 | 0 |
| SPLEN2025491 | 0 | 0 | 0 | 0 | 0 | 0 | 38.930 |
| SPLEN2027113 | 1.636 | 0 | 0 | 0 | 0 | 0 | 1.815 |
| SPLEN2028466 | 0.414 | 0 | 4.396 | 4.642 | 6.159 | 5.966 | 3.211 |
| SPLEN2028914 | 2.792 | 0 | 0 | 0 | 0 | 0 | 0 |
| SPLEN2031424 | 15.229 | 0 | 0 | 0 | 0 | 0 | 8.444 |
| SPLEN2031547 | 1.574 | 0 | 0 | 11.244 | 0 | 0 | 1.746 |
| SPLEN2031674 | 0 | 0 | 0 | 0 | 0 | 0 | 24.555 |
| SPLEN2032154 | 0 | 0 | 0 | 0 | 0 | 0 | 38.930 |
| SPLEN2034448 | 5.185 | 0 | 0 | 5.290 | 0 | 0 | 0 |
| SPLEN2034781 | 27.984 | 0 | 0 | 0 | 0 | 0 | 0 |
| SPLEN2036076 | 0 | 0 | 0 | 1.676 | 0 | 0 | 0 |
| SPLEN2036821 | 0 | 0 | 0 | 0 | 0 | 0 | 38.930 |
| SPLEN2036932 | 2.932 | 6.726 | 31.158 | 5.982 | 0 | 0 | 0 |
| SPLEN2039379 | 5.792 | 0 | 0 | 8.864 | 0 | 0 | 3.212 |
| SPLEN2040824 | 41.249 | 0 | 0 | 0 | 0 | 0 | 22.872 |
| SPLEN2042535 | 0 | 0 | 0 | 7.264 | 0 | 0 | 0 |
| STOMA1000091 | 0 | 0 | 0 | 0 | 0 | 0 | 7.714 |
| STOMA2000257 | 0 | 0 | 0 | 0 | 7.347 | 0 | 0 |
| STOMA2000289 | 0 | 6.250 | 9.651 | 0 | 10.140 | 0 | 0 |
| STOMA2000396 | 0 | 0 | 0 | 5.258 | 0 | 0 | 5.715 |
| STOMA2000482 | 0 | 0 | 0 | 0 | 0 | 0 | 4.275 |
| STOMA2002052 | 5.562 | 0 | 0 | 5.674 | 0 | 0 | 0 |
| STOMA2002166 | 0 | 0 | 0 | 0 | 0 | 2.109 | 0 |
| STOMA2005120 | 0 | 0 | 0 | 0 | 0 | 0 | 14.012 |
| STOMA2006229 | 6.012 | 0 | 0 | 0 | 0 | 0 | 0 |
| STOMA2009289 | 5.737 | 0 | 0 | 0 | 0 | 0 | 0 |
| SYNOV1000124 | 5.006 | 1.276 | 0 | 6.810 | 6.211 | 0 | 0.617 |
| SYNOV1000128 | 0 | 0 | 0 | 0 | 0 | 0 | 16.279 |
| SYNOV1000374 | 0 | 0 | 0 | 0 | 0 | 0 | 22.005 |
| SYNOV2000291 | 0 | 0 | 0 | 32.112 | 0 | 0 | 0 |
| SYNOV2000397 | 0 | 0 | 0 | 48.614 | 0 | 0 | 0 |
| SYNOV2001033 | 0 | 0 | 0 | 0.612 | 0 | 2.162 | 0 |
| SYNOV2001144 | 0 | 3.245 | 0 | 0 | 5.264 | 0 | 3.137 |
| SYNOV2001239 | 0 | 0 | 1.112 | 0 | 0 | 0 | 1.044 |
| SYNOV2001262 | 2.086 | 4.787 | 0 | 0 | 0 | 7.523 | 4.627 |
| SYNOV2001581 | 0 | 6.042 | 0 | 0 | 0 | 0 | 0 |
| SYNOV2001648 | 0 | 0 | 0 | 0 | 0 | 0 | 1.202 |
| SYNOV2006620 | 0 | 0 | 0 | 0 | 0 | 0 | 33.957 |
| SYNOV2007758 | 19.566 | 0 | 0 | 0 | 0 | 0 | 0 |
| SYNOV4000249 | 0 | 0 | 0 | 48.614 | 0 | 0 | 0 |
| SYNOV4001153 | 2.319 | 0 | 0 | 26.029 | 0 | 0 | 7.716 |
| SYNOV4002883 | 23.940 | 0 | 0 | 24.425 | 0 | 0 | 0 |
| SYNOV4005989 | 0 | 0 | 0 | 21.059 | 0 | 0 | 0 |
| SYNOV4006542 | 0 | 0 | 0 | 3.782 | 0 | 0 | 4.111 |
| SYNOV4007430 | 31.677 | 0 | 0 | 0 | 0 | 0 | 0 |
| SYNOV4007671 | 0 | 0 | 0 | 0 | 0 | 0 | 0.813 |
| SYNOV4008245 | 9.239 | 0 | 0 | 28.277 | 0 | 0 | 10.245 |
| SYNOV4009129 | 7.763 | 17.811 | 0 | 0 | 0 | 0 | 0 |
| SYNOV4009575 | 0 | 0 | 0 | 0 | 0 | 17.276 | 0 |
| T1ESE2000904 | 0 | 0 | 0 | 0 | 8.593 | 0 | 0 |
| TBAES2007428 | 5.371 | 0 | 19.027 | 0 | 0 | 0 | 0 |
| TBAES2009387 | 0 | 0 | 1.894 | 0 | 0 | 0 | 0.593 |
| TCOLN1000180 | 0 | 0 | 0 | 0 | 0 | 8.828 | 0 |
| TESOP1000035 | 0 | 10.147 | 0 | 0 | 0 | 15.948 | 4.905 |
| TESOP2000527 | 0 | 0 | 0 | 0 | 0 | 0 | 11.444 |
| TESOP2002451 | 2.375 | 0 | 0 | 0 | 0 | 0 | 0 |
| TESOP2006893 | 0 | 0 | 0 | 0 | 0 | 30.976 | 0 |
| TESTI1000023 | 15.934 | 1.924 | 0 | 7.700 | 0 | 3.024 | 3.720 |
| TESTI1000051 | 0 | 0 | 0 | 10.627 | 0 | 0 | 0 |
| TESTI1000070 | 0 | 0 | 0 | 3.684 | 0 | 0 | 0 |
| TESTI1000094 | 0 | 22.629 | 0 | 0 | 0 | 0 | 0 |
| TESTI1000096 | 0 | 0 | 0 | 0 | 0 | 0 | 19.400 |
| TESTI1000101 | 0 | 9.827 | 0 | 8.740 | 0 | 0 | 0 |
| TESTI1000163 | 4.120 | 0 | 0 | 0 | 0 | 0 | 0 |
| TESTI1000168 | 0 | 0 | 11.102 | 0 | 0 | 0 | 0 |
| TESTI2000006 | 0 | 0 | 0 | 0 | 0 | 0 | 10.966 |
| TESTI2000172 | 0 | 0 | 0 | 0 | 0 | 0 | 9.487 |
| TESTI2000177 | 0 | 0 | 0 | 24.875 | 0 | 0 | 0 |
| TESTI2000184 | 4.522 | 0 | 0 | 3.460 | 0 | 4.076 | 3.761 |
| TESTI2000435 | 19.231 | 0 | 0 | 0 | 0 | 0 | 0 |
| TESTI2000489 | 0 | 0 | 0 | 0 | 0 | 57.966 | 0 |
| TESTI2000520 | 0 | 0 | 0 | 0 | 0 | 13.565 | 0 |
| TESTI2000600 | 0 | 0 | 0 | 75.737 | 0 | 0 | 0 |
| TESTI2000627 | 0 | 0 | 0 | 21.496 | 0 | 0 | 0 |
| TESTI2000784 | 2.273 | 0 | 0 | 2.319 | 0 | 0 | 0 |
| TESTI2000849 | 0 | 0 | 0 | 0 | 0 | 0 | 29.781 |
| TESTI2000874 | 0 | 0 | 0 | 0 | 46.526 | 0 | 0 |
| TESTI2000883 | 7.291 | 0 | 25.830 | 0 | 0 | 52.580 | 0 |
| TESTI2000970 | 0 | 0 | 17.221 | 0 | 18.093 | 0 | 0 |
| TESTI2001099 | 1.470 | 1.124 | 0 | 1.500 | 0 | 0 | 1.087 |
| TESTI2001120 | 0 | 0 | 0 | 0.986 | 0 | 0 | 0 |
| TESTI2001141 | 0 | 0 | 0 | 9.634 | 0 | 0 | 0 |
| TESTI2001153 | 0.398 | 0 | 1.411 | 0 | 0 | 0 | 0 |
| TESTI2001269 | 2.183 | 0 | 0 | 2.785 | 0 | 0 | 2.421 |
| TESTI2001613 | 13.661 | 0 | 0 | 41.812 | 0 | 0 | 0 |
| TESTI2001829 | 0 | 1.948 | 0 | 0 | 0 | 0 | 0.942 |
| TESTI2001862 | 0 | 6.066 | 0 | 0 | 0 | 9.534 | 2.932 |
| TESTI2001869 | 0 | 54.752 | 0 | 0 | 0 | 0 | 0 |
| TESTI2001898 | 0 | 0 | 0 | 60.949 | 0 | 0 | 0 |
| TESTI2001985 | 5.870 | 0 | 0 | 0 | 0 | 0 | 0 |
| TESTI2002256 | 0 | 0 | 0 | 0 | 0 | 0 | 38.468 |
| TESTI2002365 | 0 | 2.505 | 0 | 0 | 0 | 0 | 2.422 |
| TESTI2002467 | 0 | 0 | 0 | 0 | 0 | 84.653 | 0 |
| TESTI2002632 | 0 | 0 | 0 | 0 | 40.298 | 0 | 0 |
| TESTI2002707 | 13.255 | 7.603 | 17.609 | 11.833 | 6.167 | 0 | 7.350 |
| TESTI2003141 | 0 | 0 | 0 | 0 | 0 | 40.686 | 0 |
| TESTI2003280 | 0 | 18.822 | 0 | 0 | 0 | 0 | 0 |
| TESTI2003413 | 2.604 | 0 | 9.224 | 0 | 0 | 0 | 2.887 |
| TESTI2003454 | 0 | 0 | 0 | 5.418 | 0 | 0 | 0 |
| TESTI2003533 | 0.867 | 1.989 | 0 | 0 | 0 | 0 | 0.961 |
| TESTI2003541 | 0 | 0 | 0 | 0 | 0 | 0 | 32.389 |
| TESTI2003596 | 0 | 0 | 14.759 | 0 | 0 | 0 | 0 |
| TESTI2003625 | 0 | 0 | 0 | 0 | 28.488 | 0 | 0 |
| TESTI2003692 | 0 | 0 | 0 | 60.949 | 0 | 0 | 0 |
| TESTI2003756 | 0 | 0 | 0 | 0 | 0 | 0 | 11.634 |
| TESTI2004031 | 0 | 0 | 0 | 0 | 1.492 | 0 | 0 |
| TESTI2004080 | 0 | 0 | 0 | 0 | 0 | 0 | 10.824 |
| TESTI2004153 | 0 | 0 | 0 | 4.426 | 0 | 15.643 | 0 |
| TESTI2004295 | 8.188 | 0 | 0 | 8.354 | 0 | 0 | 0 |
| TESTI2004431 | 8.365 | 0 | 0 | 0 | 0 | 0 | 0 |
| TESTI2004734 | 0 | 0 | 0 | 34.985 | 0 | 0 | 0 |
| TESTI2004737 | 1.771 | 0 | 6.275 | 3.614 | 0 | 0 | 1.964 |
| TESTI2004929 | 0 | 6.514 | 0 | 0 | 0 | 0 | 0 |
| TESTI2005112 | 19.455 | 0 | 0 | 0 | 0 | 0 | 0 |
| TESTI2005408 | 0 | 4.065 | 6.276 | 3.615 | 6.594 | 0 | 0 |
| TESTI2005564 | 0 | 8.402 | 0 | 3.736 | 0 | 0 | 0 |
| TESTI2005731 | 0 | 0 | 0 | 3.371 | 0 | 0 | 0 |
| TESTI2005742 | 40.787 | 0 | 0 | 0 | 0 | 0 | 0 |
| TESTI2005743 | 0 | 5.040 | 0 | 0 | 0 | 0 | 0 |
| TESTI2005759 | 0 | 0 | 3.313 | 0 | 0 | 0 | 0 |
| TESTI2005784 | 5.949 | 6.824 | 0 | 21.241 | 0 | 0 | 9.895 |
| TESTI2005788 | 0 | 0 | 0 | 4.718 | 0 | 0 | 0 |
| TESTI2005835 | 0 | 0 | 0 | 0 | 0 | 0 | 13.362 |
| TESTI2005908 | 0 | 3.613 | 5.578 | 0 | 0 | 0 | 0 |
| TESTI2006051 | 0 | 0 | 0 | 0 | 1.576 | 1.527 | 0 |
| TESTI2006111 | 0 | 47.300 | 0 | 0 | 0 | 0 | 0 |
| TESTI2006258 | 10.254 | 0 | 36.326 | 0 | 38.166 | 0 | 0 |
| TESTI2006383 | 0 | 0 | 0 | 4.135 | 0 | 0 | 0 |
| TESTI2006409 | 0 | 0 | 0 | 60.949 | 0 | 0 | 0 |
| TESTI2006453 | 1.683 | 3.861 | 0 | 0.859 | 0 | 0 | 2.800 |
| TESTI2006588 | 1.083 | 1.242 | 1.918 | 1.105 | 0 | 1.952 | 1.201 |
| TESTI2006748 | 0 | 7.892 | 0 | 0 | 0 | 0 | 0 |
| TESTI2007211 | 0 | 0 | 0 | 0 | 0 | 0 | 3.663 |
| TESTI2007311 | 0 | 0 | 0 | 3.925 | 0 | 41.615 | 4.266 |
| TESTI2007407 | 0 | 0 | 0 | 0 | 0 | 0 | 3.404 |
| TESTI2007998 | 1.581 | 10.883 | 0 | 1.613 | 0 | 0 | 1.753 |
| TESTI2008020 | 3.835 | 0 | 0 | 0 | 0 | 0 | 0 |
| TESTI2008240 | 1.500 | 0.574 | 0 | 1.531 | 0.931 | 6.312 | 0 |
| TESTI2008621 | 0 | 0 | 35.791 | 0 | 0 | 0 | 0 |
| TESTI2009520 | 4.500 | 0 | 2.657 | 3.826 | 5.583 | 5.408 | 0.832 |
| TESTI2009577 | 0 | 0 | 0 | 1.803 | 0 | 0 | 1.960 |
| TESTI2009785 | 1.435 | 0 | 5.083 | 1.464 | 0 | 0 | 0 |
| TESTI2009987 | 10.202 | 0 | 0 | 5.204 | 0 | 0 | 0 |
| TESTI2010180 | 0 | 0 | 0 | 0 | 0 | 0 | 38.468 |
| TESTI2010513 | 7.465 | 0.901 | 0 | 8.017 | 0 | 0 | 2.178 |
| TESTI2010617 | 6.964 | 0 | 0 | 21.314 | 0 | 0 | 0 |
| TESTI2011605 | 0 | 0 | 0 | 0 | 0 | 0 | 3.997 |
| TESTI2011680 | 7.481 | 0 | 0 | 0 | 0 | 0 | 0 |
| TESTI2012155 | 6.408 | 0 | 0 | 6.538 | 0 | 0 | 7.106 |
| TESTI2012571 | 0 | 0 | 36.286 | 0 | 0 | 36.932 | 0 |
| TESTI2013231 | 1.990 | 0 | 0 | 0 | 0 | 0 | 0 |
| TESTI2013295 | 2.664 | 0 | 0 | 0 | 0 | 0 | 0 |
| TESTI2014780 | 0 | 0 | 0 | 28.973 | 0 | 0 | 0 |
| TESTI2014838 | 3.975 | 0 | 0 | 0 | 0 | 0 | 1.469 |
| TESTI2015042 | 0 | 0 | 0 | 43.832 | 0 | 0 | 0 |
| TESTI2015092 | 0 | 0 | 11.736 | 0 | 12.331 | 0 | 7.348 |
| TESTI2015213 | 0 | 0 | 1.818 | 0.524 | 0 | 0 | 0 |
| TESTI2015626 | 0 | 0.754 | 1.165 | 0.336 | 1.224 | 2.372 | 0 |
| TESTI2015962 | 11.900 | 9.101 | 0 | 8.094 | 14.764 | 0 | 8.798 |
| TESTI2016278 | 0 | 0 | 0 | 0 | 0 | 0 | 62.915 |
| TESTI2016583 | 0 | 0 | 63.719 | 0 | 0 | 0 | 0 |
| TESTI2016896 | 0 | 0 | 0 | 43.832 | 0 | 0 | 0 |
| TESTI2017035 | 0 | 0 | 0 | 42.801 | 0 | 0 | 0 |
| TESTI2017645 | 0 | 0 | 0 | 0 | 0 | 0 | 36.905 |
| TESTI2017954 | 0.662 | 0 | 0 | 0 | 0 | 0 | 0.735 |
| TESTI2018014 | 7.709 | 0 | 0 | 0 | 0 | 0 | 0 |
| TESTI2018421 | 0 | 0 | 0 | 0 | 0 | 84.653 | 0 |
| TESTI2018462 | 2.826 | 0 | 0 | 0 | 0 | 0 | 9.401 |
| TESTI2018611 | 0 | 2.410 | 0 | 0 | 0 | 0 | 0 |
| TESTI2018997 | 0 | 0 | 7.378 | 0 | 0 | 0 | 0 |
| TESTI2020012 | 0 | 0 | 0 | 0 | 85.061 | 0 | 0 |
| TESTI2020956 | 0 | 0 | 0 | 0 | 0 | 0 | 4.772 |
| TESTI2021038 | 42.311 | 0 | 0 | 0 | 0 | 0 | 0 |
| TESTI2021124 | 17.146 | 0 | 0 | 11.662 | 0 | 0 | 0 |
| TESTI2021297 | 0 | 0 | 0 | 0 | 0 | 0 | 7.613 |
| TESTI2021358 | 0 | 0 | 0 | 0 | 0 | 0 | 37.524 |
| TESTI2021425 | 1.722 | 0 | 0 | 0 | 0 | 0 | 1.909 |
| TESTI2021531 | 0 | 0 | 0 | 0 | 0 | 60.329 | 0 |
| TESTI2021654 | 9.773 | 0 | 0 | 0 | 0 | 0 | 10.838 |
| TESTI2022179 | 0 | 24.096 | 0 | 0 | 0 | 0 | 0 |
| TESTI2023033 | 0 | 0 | 0 | 0 | 0 | 0 | 15.227 |
| TESTI2024598 | 0 | 0 | 0 | 60.949 | 0 | 0 | 0 |
| TESTI2025013 | 0 | 0 | 0 | 0 | 0 | 12.834 | 0 |
| TESTI2025454 | 0 | 0 | 0 | 0 | 0 | 0 | 12.490 |
| TESTI2025757 | 33.912 | 0 | 0 | 0 | 0 | 0 | 0 |
| TESTI2025846 | 0 | 0 | 0 | 20.770 | 0 | 0 | 22.576 |
| TESTI2026116 | 0 | 34.218 | 0 | 0 | 0 | 0 | 0 |
| TESTI2026215 | 6.927 | 0 | 0 | 7.067 | 0 | 0 | 0 |
| TESTI2026525 | 0 | 0 | 0 | 0 | 16.193 | 0 | 0 |
| TESTI2026534 | 0 | 0 | 0 | 60.949 | 0 | 0 | 0 |
| TESTI2027496 | 0 | 0 | 33.283 | 9.585 | 0 | 0 | 10.419 |
| TESTI2028296 | 0 | 0 | 0 | 2.516 | 0 | 8.891 | 0 |
| TESTI2029227 | 0 | 0 | 0 | 6.056 | 0 | 21.404 | 6.583 |
| TESTI2029259 | 6.619 | 0 | 0 | 3.377 | 0 | 0 | 3.670 |
| TESTI2033031 | 0 | 0 | 0 | 0 | 0 | 0 | 34.120 |
| TESTI2033441 | 0 | 0 | 0 | 0 | 0 | 0 | 2.434 |
| TESTI2034916 | 7.602 | 0 | 0 | 0 | 0 | 0 | 0 |
| TESTI2034940 | 0 | 2.391 | 0 | 0 | 0 | 0.939 | 0 |
| TESTI2035236 | 0 | 0 | 0 | 0 | 0 | 0 | 57.175 |
| TESTI2035309 | 0 | 0 | 0 | 0 | 0 | 73.390 | 0 |
| TESTI2036691 | 0 | 0 | 0 | 0 | 0 | 84.653 | 0 |
| TESTI2036969 | 7.186 | 0 | 0 | 3.666 | 0 | 0 | 3.984 |
| TESTI2039177 | 16.578 | 0 | 0 | 21.141 | 0 | 0 | 18.384 |
| TESTI2039342 | 0 | 0 | 0 | 0 | 0 | 0 | 77.236 |
| TESTI2044276 | 0 | 10.879 | 0 | 0 | 0 | 0 | 10.517 |
| TESTI2045562 | 0 | 0 | 0 | 0 | 0 | 84.653 | 0 |
| TESTI2046456 | 0 | 1.062 | 0 | 0.944 | 0 | 1.669 | 1.540 |
| TESTI2049246 | 0 | 0 | 0 | 53.653 | 0 | 0 | 29.159 |
| TESTI2053723 | 0 | 0 | 0 | 4.619 | 0 | 0 | 10.040 |
| TESTI4000014 | 1.964 | 0 | 0 | 2.551 | 0.665 | 0.644 | 1.188 |
| TESTI4000214 | 0 | 0 | 0 | 7.979 | 0 | 0 | 0 |
| TESTI4001467 | 0 | 0 | 0 | 0 | 0 | 0 | 6.140 |
| TESTI4001569 | 0 | 0 | 0 | 43.832 | 0 | 0 | 0 |
| TESTI4001604 | 0 | 0 | 0 | 29.688 | 0 | 0 | 32.269 |
| TESTI4001984 | 60.471 | 0 | 0 | 0 | 0 | 0 | 0 |
| TESTI4002072 | 16.696 | 0 | 0 | 20.440 | 0 | 0 | 11.109 |
| TESTI4002195 | 0 | 0 | 23.701 | 0 | 0 | 0 | 0 |
| TESTI4002202 | 9.946 | 0 | 11.744 | 0 | 0 | 0 | 0 |
| TESTI4002290 | 0 | 0 | 0 | 0 | 0 | 0 | 62.915 |
| TESTI4002799 | 1.767 | 0 | 0 | 2.703 | 0 | 1.592 | 1.469 |
| TESTI4003150 | 14.850 | 0 | 0 | 15.151 | 0 | 0 | 0 |
| TESTI4003602 | 25.967 | 0 | 0 | 0 | 0 | 0 | 0 |
| TESTI4003703 | 0 | 0 | 0 | 4.514 | 0 | 0 | 4.907 |
| TESTI4003944 | 0 | 0 | 0 | 35.590 | 0 | 0 | 0 |
| TESTI4004210 | 36.051 | 0 | 0 | 0 | 0 | 0 | 0 |
| TESTI4004626 | 0 | 0 | 0 | 0 | 0 | 0 | 36.513 |
| TESTI4004695 | 0 | 0 | 0 | 0 | 0 | 0 | 36.122 |
| TESTI4005133 | 11.925 | 0 | 0 | 0 | 0 | 0 | 13.224 |
| TESTI4005399 | 7.797 | 0 | 0 | 15.910 | 0 | 0 | 0 |
| TESTI4006137 | 25.755 | 0 | 0 | 0 | 0 | 0 | 28.561 |
| TESTI4006407 | 0 | 0 | 0 | 0 | 0 | 0 | 62.915 |
| TESTI4006441 | 60.471 | 0 | 0 | 0 | 0 | 0 | 0 |
| TESTI4007965 | 0 | 0 | 0 | 0 | 0 | 0 | 20.014 |
| TESTI4008058 | 8.814 | 20.221 | 0 | 0 | 0 | 31.781 | 0 |
| TESTI4008097 | 60.471 | 0 | 0 | 0 | 0 | 0 | 0 |
| TESTI4008797 | 12.429 | 0 | 0 | 12.681 | 0 | 0 | 27.567 |
| TESTI4009286 | 1.450 | 0 | 0 | 1.479 | 0 | 0 | 0.804 |
| TESTI4009454 | 8.038 | 0 | 0 | 0 | 0 | 0 | 8.914 |
| TESTI4010377 | 0 | 0 | 0 | 60.949 | 0 | 0 | 0 |
| TESTI4010851 | 3.280 | 0 | 0 | 3.904 | 2.035 | 0 | 3.031 |
| TESTI4010928 | 0 | 0 | 0 | 34.221 | 0 | 0 | 0 |
| TESTI4010979 | 0 | 0 | 0 | 0 | 0 | 0 | 21.790 |
| TESTI4011084 | 0 | 0 | 0 | 60.949 | 0 | 0 | 0 |
| TESTI4012451 | 0 | 0 | 0 | 0 | 0 | 0 | 62.915 |
| TESTI4012646 | 60.471 | 0 | 0 | 0 | 0 | 0 | 0 |
| TESTI4013441 | 0 | 0 | 0 | 0.160 | 1.168 | 0.566 | 0.174 |
| TESTI4013474 | 0 | 0 | 0 | 0 | 0 | 0 | 2.292 |
| TESTI4013817 | 27.163 | 0 | 0 | 27.712 | 0 | 0 | 0 |
| TESTI4013894 | 0 | 0 | 0 | 14.289 | 0 | 0 | 0 |
| TESTI4014159 | 0 | 0 | 0 | 23.916 | 0 | 0 | 25.996 |
| TESTI4014694 | 2.229 | 0 | 0 | 0 | 0 | 0 | 0 |
| TESTI4014818 | 0 | 0 | 0 | 60.949 | 0 | 0 | 0 |
| TESTI4014908 | 36.051 | 0 | 0 | 0 | 0 | 0 | 0 |
| TESTI4018938 | 0 | 0 | 0 | 35.331 | 0 | 0 | 0 |
| TESTI4022158 | 53.386 | 0 | 0 | 13.617 | 0 | 0 | 14.801 |
| TESTI4024420 | 37.398 | 0 | 0 | 38.155 | 0 | 0 | 0 |
| TESTI4025268 | 60.471 | 0 | 0 | 0 | 0 | 0 | 0 |
| TESTI4025547 | 0 | 0 | 0 | 60.949 | 0 | 0 | 0 |
| TESTI4026207 | 0 | 0 | 0 | 60.949 | 0 | 0 | 0 |
| TESTI4027821 | 60.471 | 0 | 0 | 0 | 0 | 0 | 0 |
| TESTI4032090 | 60.471 | 0 | 0 | 0 | 0 | 0 | 0 |
| TESTI4032913 | 0 | 0 | 0 | 0 | 0 | 0 | 8.989 |
| TESTI4037156 | 0 | 0 | 0.980 | 0.282 | 2.060 | 0.998 | 0.307 |
| TESTI4038284 | 7.367 | 0 | 0 | 5.637 | 0 | 0 | 0 |
| TESTI4043140 | 0 | 0 | 0 | 2.829 | 10.320 | 0 | 0 |
| TESTI4044704 | 10.194 | 0 | 0 | 0 | 0 | 0 | 0 |
| TESTI4046073 | 0 | 0 | 0 | 0 | 0 | 68.459 | 0 |
| TESTI4046502 | 43.339 | 0 | 0 | 0 | 0 | 0 | 0 |
| THYMU1000002 | 0.592 | 0 | 0 | 1.812 | 0 | 0 | 0 |
| THYMU1000016 | 1.159 | 0 | 4.107 | 0.394 | 0 | 0 | 0 |
| THYMU1000029 | 0 | 0 | 0 | 55.026 | 0 | 0 | 0 |
| THYMU1000041 | 9.511 | 0 | 0 | 2.426 | 0 | 0 | 7.911 |
| THYMU1000083 | 0 | 0 | 0 | 6.119 | 0 | 0 | 0 |
| THYMU1000103 | 10.578 | 20.224 | 6.246 | 12.591 | 0 | 6.357 | 0 |
| THYMU1000105 | 0 | 0 | 0 | 15.308 | 0 | 0 | 16.639 |
| THYMU1000109 | 0 | 0 | 0 | 0 | 0 | 5.676 | 0 |
| THYMU1000144 | 9.053 | 2.967 | 0 | 1.319 | 0 | 0 | 1.434 |
| THYMU1000329 | 0 | 0 | 0 | 0 | 19.836 | 0 | 0 |
| THYMU1000359 | 0 | 0 | 0 | 0 | 0 | 1.933 | 0 |
| THYMU1000374 | 1.498 | 6.872 | 0 | 0 | 0 | 5.401 | 1.661 |
| THYMU1000490 | 5.734 | 0 | 0 | 5.850 | 0 | 0 | 0 |
| THYMU2000057 | 0 | 0 | 0 | 0 | 0 | 0 | 1.504 |
| THYMU2000138 | 0 | 0 | 0 | 0 | 0 | 0 | 46.995 |
| THYMU2000155 | 0 | 0 | 0 | 0 | 0 | 0 | 57.080 |
| THYMU2000236 | 0 | 0 | 0 | 0 | 81.697 | 0 | 0 |
| THYMU2000382 | 0 | 1.391 | 0 | 0.618 | 0 | 0 | 2.016 |
| THYMU2000436 | 0 | 4.228 | 0 | 0 | 3.429 | 6.645 | 0 |
| THYMU2000684 | 0 | 0 | 0 | 4.248 | 0 | 0 | 9.234 |
| THYMU2000775 | 0 | 0 | 0 | 0 | 0 | 33.759 | 0 |
| THYMU2000946 | 4.340 | 0 | 5.125 | 4.428 | 5.385 | 0 | 3.209 |
| THYMU2000971 | 0 | 0 | 0 | 0 | 0 | 0 | 57.080 |
| THYMU2001007 | 0 | 6.224 | 0 | 0 | 0 | 9.782 | 9.025 |
| THYMU2001018 | 9.032 | 0 | 0 | 0 | 0 | 0 | 0 |
| THYMU2001090 | 21.252 | 0 | 0 | 0 | 0 | 0 | 47.135 |
| THYMU2001422 | 0 | 28.575 | 0 | 0 | 0 | 0 | 0 |
| THYMU2001515 | 0 | 0 | 0 | 14.878 | 0 | 0 | 0 |
| THYMU2001868 | 0 | 73.343 | 0 | 0 | 0 | 0 | 0 |
| THYMU2002080 | 0 | 0 | 0 | 0 | 0 | 0 | 33.007 |
| THYMU2002583 | 3.628 | 0 | 0 | 0 | 1.929 | 0 | 2.299 |
| THYMU2002815 | 33.041 | 0 | 0 | 0 | 0 | 0 | 0 |
| THYMU2003012 | 2.629 | 4.021 | 3.105 | 6.259 | 9.785 | 0 | 3.887 |
| THYMU2003046 | 0 | 0 | 0 | 1.961 | 0 | 0 | 2.132 |
| THYMU2003133 | 0 | 0 | 0 | 0 | 0 | 0 | 3.848 |
| THYMU2003419 | 1.507 | 1.152 | 0 | 0 | 0 | 0 | 0 |
| THYMU2003446 | 14.310 | 5.472 | 0 | 9.733 | 0 | 0 | 18.514 |
| THYMU2003542 | 0 | 0 | 7.656 | 0 | 8.043 | 0 | 2.397 |
| THYMU2003891 | 0 | 0.335 | 0.517 | 0 | 0 | 0.526 | 0.324 |
| THYMU2003907 | 0 | 0 | 0 | 0 | 0 | 0 | 12.576 |
| THYMU2003932 | 0 | 0 | 0 | 0 | 0 | 0 | 21.450 |
| THYMU2003981 | 0.522 | 0 | 1.850 | 2.664 | 0 | 0 | 0.579 |
| THYMU2004152 | 0.993 | 0 | 3.517 | 0 | 0 | 0 | 1.101 |
| THYMU2004344 | 3.832 | 0 | 4.526 | 5.213 | 4.755 | 0 | 7.083 |
| THYMU2004410 | 3.832 | 4.396 | 0 | 0 | 0 | 0 | 4.250 |
| THYMU2004452 | 23.112 | 0 | 0 | 0 | 0 | 0 | 0 |
| THYMU2004635 | 0 | 0 | 0 | 55.026 | 0 | 0 | 0 |
| THYMU2004733 | 0 | 0 | 0 | 0 | 0 | 0 | 6.211 |
| THYMU2004906 | 0 | 0 | 44.401 | 0 | 0 | 0 | 0 |
| THYMU2005546 | 0 | 0 | 0 | 0.558 | 0 | 3.944 | 0.607 |
| THYMU2005997 | 16.102 | 0 | 57.044 | 0 | 0 | 0 | 0 |
| THYMU2006505 | 5.460 | 3.132 | 0 | 0 | 5.081 | 4.922 | 0 |
| THYMU2006610 | 0 | 0 | 0 | 0 | 0 | 0 | 30.115 |
| THYMU2006813 | 3.165 | 0 | 0 | 1.614 | 5.890 | 0 | 7.019 |
| THYMU2007036 | 0 | 0 | 0 | 0 | 0 | 0 | 8.562 |
| THYMU2007112 | 4.573 | 0 | 0 | 0 | 0 | 0 | 0 |
| THYMU2007467 | 4.039 | 0 | 0 | 0 | 0 | 0 | 0 |
| THYMU2007729 | 0 | 0 | 0 | 0 | 18.191 | 17.622 | 5.420 |
| THYMU2007886 | 0 | 3.177 | 4.905 | 0 | 0 | 0 | 3.071 |
| THYMU2008035 | 54.530 | 0 | 0 | 0 | 0 | 0 | 0 |
| THYMU2008049 | 0 | 0 | 0 | 0 | 0 | 0 | 25.048 |
| THYMU2008149 | 0 | 0 | 0 | 0 | 0 | 0 | 6.532 |
| THYMU2008321 | 2.891 | 13.264 | 10.241 | 2.949 | 0 | 0 | 9.617 |
| THYMU2008686 | 0 | 0 | 0 | 0 | 0 | 43.941 | 0 |
| THYMU2009338 | 0 | 0 | 0 | 0 | 0 | 0 | 57.080 |
| THYMU2009658 | 0.701 | 1.607 | 0 | 0 | 1.304 | 1.263 | 0 |
| THYMU2010041 | 0 | 0 | 0 | 19.023 | 0 | 0 | 0 |
| THYMU2010192 | 0 | 0 | 0 | 0 | 0 | 0 | 57.080 |
| THYMU2010831 | 54.530 | 0 | 0 | 0 | 0 | 0 | 0 |
| THYMU2011482 | 3.070 | 0 | 0 | 0 | 0 | 11.068 | 6.808 |
| THYMU2012024 | 2.980 | 0 | 0 | 0 | 0 | 0 | 0 |
| THYMU2012104 | 27.053 | 0 | 0 | 0 | 0 | 0 | 0 |
| THYMU2012625 | 0 | 2.383 | 0 | 0 | 3.866 | 0 | 0 |
| THYMU2012826 | 22.147 | 0 | 0 | 22.595 | 0 | 0 | 0 |
| THYMU2013051 | 0 | 0 | 0 | 0 | 0 | 81.218 | 0 |
| THYMU2013136 | 0.818 | 0 | 0 | 0 | 0 | 0 | 0 |
| THYMU2013916 | 1.109 | 2.545 | 3.929 | 3.395 | 0 | 3.999 | 3.690 |
| THYMU2014167 | 0 | 0 | 0 | 0 | 0 | 19.814 | 6.094 |
| THYMU2014183 | 0 | 0 | 0 | 0 | 0 | 0 | 10.774 |
| THYMU2015762 | 0 | 2.274 | 0 | 1.011 | 0 | 3.575 | 0 |
| THYMU2015918 | 0 | 0 | 0 | 55.026 | 0 | 0 | 0 |
| THYMU2016968 | 0 | 0 | 0 | 7.541 | 0 | 0 | 0 |
| THYMU2019021 | 14.579 | 0 | 17.216 | 4.958 | 0 | 0 | 0 |
| THYMU2020883 | 0 | 0 | 0 | 0 | 0 | 0 | 57.080 |
| THYMU2020959 | 11.085 | 25.432 | 0 | 0 | 0 | 0 | 12.293 |
| THYMU2023576 | 15.940 | 0 | 0 | 0 | 0 | 57.476 | 0 |
| THYMU2023943 | 54.530 | 0 | 0 | 0 | 0 | 0 | 0 |
| THYMU2023967 | 0 | 0 | 0 | 31.165 | 0 | 0 | 0 |
| THYMU2025319 | 33.041 | 0 | 0 | 0 | 0 | 0 | 0 |
| THYMU2025325 | 0 | 29.879 | 46.138 | 0 | 0 | 0 | 0 |
| THYMU2025707 | 0 | 0 | 0 | 9.440 | 0 | 0 | 20.521 |
| THYMU2026835 | 0 | 0 | 0 | 55.026 | 0 | 0 | 0 |
| THYMU2027125 | 0.179 | 0.411 | 0 | 0 | 0 | 4.518 | 0.198 |
| THYMU2028629 | 0 | 0 | 0 | 0 | 0 | 0 | 20.303 |
| THYMU2031341 | 0 | 0 | 0 | 7.040 | 0 | 0 | 0 |
| THYMU2031890 | 0 | 0 | 0 | 0 | 0 | 64.019 | 0 |
| THYMU2032696 | 0 | 2.411 | 0 | 0 | 0 | 3.789 | 0 |
| THYMU2032825 | 0 | 0 | 0 | 0 | 0 | 0 | 20.620 |
| THYMU2033263 | 0 | 0 | 0 | 0 | 0 | 0 | 12.337 |
| THYMU2033308 | 13.964 | 0 | 0 | 0 | 0 | 0 | 0 |
| THYMU2033787 | 0 | 0 | 0 | 0 | 0 | 0 | 57.080 |
| THYMU2035735 | 1.319 | 3.027 | 0 | 2.692 | 0 | 0 | 0 |
| THYMU2036215 | 0 | 0 | 0 | 23.470 | 0 | 0 | 0 |
| THYMU2036461 | 0 | 0 | 0 | 15.474 | 0 | 0 | 0 |
| THYMU2037226 | 0 | 0 | 0 | 34.964 | 0 | 0 | 0 |
| THYMU2038220 | 40.401 | 0 | 0 | 0 | 0 | 0 | 22.401 |
| THYMU2039315 | 54.530 | 0 | 0 | 0 | 0 | 0 | 0 |
| THYMU2039634 | 54.530 | 0 | 0 | 0 | 0 | 0 | 0 |
| THYMU2040114 | 0 | 73.343 | 0 | 0 | 0 | 0 | 0 |
| THYMU3000360 | 39.314 | 0 | 0 | 0 | 0 | 0 | 0 |
| THYMU3000420 | 39.314 | 0 | 0 | 0 | 0 | 0 | 0 |
| THYMU3000776 | 15.604 | 0 | 0 | 0 | 0 | 0 | 0 |
| THYMU3001379 | 0 | 0 | 0 | 25.695 | 0 | 0 | 27.929 |
| THYMU3003007 | 0 | 0 | 0 | 19.391 | 0 | 0 | 0 |
| THYMU3003350 | 54.530 | 0 | 0 | 0 | 0 | 0 | 0 |
| THYMU3003965 | 0 | 0 | 0 | 55.026 | 0 | 0 | 0 |
| THYMU3004835 | 0 | 0 | 0 | 20.041 | 0 | 0 | 21.784 |
| THYMU3005427 | 0 | 54.147 | 0 | 0 | 0 | 0 | 26.173 |
| THYMU3005491 | 0 | 0 | 0 | 0 | 0 | 0 | 57.080 |
| THYMU3005629 | 0 | 0 | 0 | 0 | 0 | 0 | 16.756 |
| THYMU3007137 | 0 | 0 | 0 | 37.956 | 0 | 0 | 0 |
| THYMU3007308 | 0 | 0 | 0 | 39.793 | 0 | 0 | 0 |
| THYMU3007423 | 29.497 | 0 | 0 | 10.031 | 0 | 0 | 10.904 |
| THYMU3008105 | 0 | 0 | 0 | 20.662 | 0 | 0 | 0 |
| THYMU3008171 | 20.170 | 0 | 0 | 20.579 | 0 | 0 | 0 |
| THYMU3009006 | 0 | 0 | 0 | 0 | 0 | 0 | 20.574 |
| THYMU3011827 | 0 | 0 | 0 | 0 | 0 | 0 | 25.758 |
| THYMU3013386 | 0.749 | 3.435 | 0 | 0.764 | 2.786 | 2.699 | 1.660 |
| THYMU3015759 | 1.126 | 0 | 0 | 1.149 | 0 | 0 | 0 |
| THYMU3021586 | 20.651 | 0 | 14.632 | 16.855 | 0 | 0 | 4.580 |
| THYMU3026000 | 49.066 | 0 | 0 | 0 | 0 | 0 | 0 |
| THYMU3026350 | 14.291 | 0 | 0 | 14.581 | 0 | 0 | 15.849 |
| THYMU3032798 | 9.668 | 0 | 0 | 0 | 0 | 0 | 4.289 |
| THYMU3032867 | 12.871 | 0 | 0 | 0 | 0 | 0 | 0 |
| THYMU3034671 | 0 | 0 | 0 | 4.866 | 0 | 0 | 0 |
| THYMU3037827 | 54.530 | 0 | 0 | 0 | 0 | 0 | 0 |
| THYMU3038214 | 39.314 | 0 | 0 | 0 | 0 | 0 | 0 |
| THYMU3041428 | 0 | 0 | 0.903 | 0 | 0 | 0 | 0 |
| THYMU3046350 | 0 | 0 | 24.471 | 0 | 0 | 0 | 15.320 |
| TKIDN1000001 | 0 | 0 | 0 | 0 | 0 | 0 | 12.342 |
| TKIDN1000044 | 0 | 0 | 0 | 9.554 | 0 | 33.765 | 10.385 |
| TKIDN1000164 | 0 | 0 | 0 | 6.308 | 0 | 0 | 13.713 |
| TKIDN1000192 | 5.525 | 0 | 19.571 | 0 | 0 | 0 | 6.127 |
| TKIDN2000246 | 3.042 | 11.166 | 16.165 | 5.897 | 10.190 | 6.581 | 7.759 |
| TKIDN2000319 | 0 | 0 | 0 | 21.607 | 0 | 0 | 0 |
| TKIDN2000521 | 29.753 | 0 | 0 | 15.178 | 0 | 0 | 0 |
| TKIDN2001662 | 10.906 | 0 | 0 | 11.127 | 0 | 0 | 0 |
| TKIDN2002318 | 5.363 | 0 | 0 | 0 | 0 | 19.339 | 0 |
| TKIDN2002738 | 0.419 | 0 | 0 | 0 | 0 | 1.512 | 0 |
| TKIDN2003059 | 0 | 0 | 0 | 21.607 | 0 | 0 | 0 |
| TKIDN2003078 | 0 | 0 | 0 | 0 | 0 | 0 | 15.358 |
| TKIDN2003597 | 0 | 0 | 0 | 39.852 | 0 | 0 | 17.327 |
| TKIDN2007605 | 0 | 0 | 0 | 12.745 | 0 | 0 | 0 |
| TKIDN2007828 | 0 | 0 | 23.636 | 0 | 0 | 0 | 0 |
| TKIDN2009330 | 0 | 0 | 0 | 0 | 0 | 0 | 23.052 |
| TKIDN2009641 | 5.782 | 0 | 0 | 0 | 21.519 | 0 | 12.823 |
| TKIDN2009794 | 14.428 | 0 | 0 | 0 | 0 | 0 | 16.001 |
| TKIDN2009889 | 35.077 | 0 | 0 | 0 | 0 | 0 | 0 |
| TKIDN2010812 | 0 | 0 | 0 | 0 | 0 | 0 | 47.291 |
| TKIDN2014570 | 21.269 | 0 | 0 | 0 | 0 | 0 | 0 |
| TKIDN2014964 | 0 | 0 | 0 | 0 | 0 | 39.516 | 0 |
| TKIDN2015071 | 38.914 | 0 | 0 | 0 | 0 | 0 | 0 |
| TKIDN2015423 | 18.462 | 1.461 | 0 | 9.742 | 2.369 | 0 | 9.884 |
| TKIDN2015788 | 5.261 | 0 | 0 | 2.684 | 0 | 0 | 2.917 |
| TLIVE2001327 | 0 | 0 | 0 | 0 | 0 | 0 | 5.201 |
| TLIVE2002046 | 5.445 | 4.164 | 0 | 1.852 | 0 | 0 | 12.076 |
| TLIVE2003200 | 0 | 0 | 0 | 12.922 | 0 | 0 | 0 |
| TOVAR2000904 | 0 | 0 | 0 | 4.474 | 0 | 0 | 0 |
| TRACH1000011 | 0 | 0 | 26.076 | 7.510 | 0 | 26.541 | 0 |
| TRACH1000018 | 0 | 0 | 0 | 0 | 76.867 | 0 | 0 |
| TRACH1000030 | 2.759 | 0 | 0 | 2.815 | 5.135 | 0 | 11.476 |
| TRACH1000181 | 4.738 | 0 | 0 | 0 | 0 | 0 | 10.507 |
| TRACH1000193 | 21.722 | 0 | 0 | 0 | 0 | 0 | 0 |
| TRACH1000205 | 19.677 | 0 | 0 | 4.015 | 0 | 0 | 0 |
| TRACH2000045 | 8.249 | 0 | 19.483 | 5.611 | 0 | 0 | 18.297 |
| TRACH2000047 | 0 | 0 | 0 | 0 | 0 | 0 | 11.879 |
| TRACH2000079 | 1.625 | 1.243 | 1.919 | 0.553 | 2.016 | 0 | 1.802 |
| TRACH2000237 | 0 | 0 | 0 | 5.485 | 0 | 0 | 5.962 |
| TRACH2000248 | 2.791 | 1.601 | 0 | 2.135 | 0 | 0 | 0.774 |
| TRACH2000321 | 0.983 | 0 | 0 | 1.003 | 0 | 0 | 0 |
| TRACH2000359 | 0 | 0 | 0 | 3.042 | 0 | 0 | 0 |
| TRACH2000393 | 0 | 0 | 0 | 0 | 0 | 0 | 37.734 |
| TRACH2000420 | 0 | 0 | 0 | 3.421 | 0 | 0 | 0 |
| TRACH2000461 | 12.002 | 0 | 6.074 | 8.746 | 0 | 0 | 3.803 |
| TRACH2000472 | 1.708 | 0 | 0 | 0.871 | 0 | 0 | 0.947 |
| TRACH2000502 | 47.167 | 0 | 0 | 0 | 0 | 0 | 0 |
| TRACH2000540 | 0 | 0 | 0 | 0 | 0 | 0 | 3.160 |
| TRACH2000780 | 6.118 | 0 | 3.096 | 0.892 | 0 | 0 | 0.969 |
| TRACH2000920 | 0 | 0 | 0 | 0 | 12.339 | 11.954 | 3.676 |
| TRACH2000926 | 0 | 0 | 0 | 2.847 | 10.384 | 0 | 0 |
| TRACH2000959 | 0 | 0.560 | 0 | 0 | 0 | 0 | 0.271 |
| TRACH2000972 | 0 | 2.719 | 2.099 | 0 | 0 | 0 | 1.314 |
| TRACH2001021 | 0 | 0 | 1.483 | 0 | 0 | 0 | 1.393 |
| TRACH2001085 | 0 | 0 | 0 | 0 | 76.867 | 0 | 0 |
| TRACH2001109 | 29.509 | 3.361 | 2.224 | 22.633 | 2.337 | 0 | 5.802 |
| TRACH2001289 | 1.360 | 0.780 | 0 | 0.694 | 2.530 | 1.226 | 0.377 |
| TRACH2001314 | 16.450 | 0 | 0 | 14.918 | 0 | 0 | 4.054 |
| TRACH2001339 | 0 | 67.193 | 0 | 0 | 0 | 0 | 0 |
| TRACH2001341 | 6.374 | 0 | 0 | 6.503 | 0 | 0 | 0 |
| TRACH2001428 | 2.524 | 0 | 0 | 0 | 0 | 0 | 0 |
| TRACH2001432 | 1.112 | 2.552 | 0 | 0 | 0 | 4.011 | 3.701 |
| TRACH2001463 | 3.062 | 0 | 0 | 3.124 | 0 | 0 | 0 |
| TRACH2001478 | 2.902 | 0 | 2.056 | 1.184 | 0 | 0 | 0.644 |
| TRACH2001549 | 8.457 | 0 | 0 | 21.569 | 0 | 0 | 4.689 |
| TRACH2001607 | 2.009 | 6.913 | 0 | 2.049 | 3.738 | 3.621 | 1.114 |
| TRACH2001612 | 0 | 0 | 0 | 4.075 | 0 | 0 | 4.430 |
| TRACH2001646 | 0 | 51.883 | 0 | 0 | 0 | 0 | 0 |
| TRACH2001810 | 1.553 | 0 | 2.751 | 2.377 | 2.890 | 5.600 | 2.584 |
| TRACH2001898 | 0 | 2.339 | 0 | 0 | 0 | 0 | 1.131 |
| TRACH2001996 | 0 | 67.193 | 0 | 0 | 0 | 0 | 0 |
| TRACH2002100 | 0 | 0 | 0 | 0 | 0 | 0 | 38.037 |
| TRACH2002333 | 0 | 0 | 0 | 0 | 0 | 0 | 32.604 |
| TRACH2002537 | 0.927 | 2.128 | 0 | 0.946 | 3.452 | 0 | 6.171 |
| TRACH2002664 | 0 | 0 | 0 | 0 | 0 | 0 | 1.688 |
| TRACH2002803 | 0 | 0 | 0 | 0 | 23.268 | 7.514 | 0 |
| TRACH2003272 | 3.705 | 8.500 | 13.125 | 3.780 | 0 | 0 | 4.109 |
| TRACH2003323 | 7.119 | 0 | 0 | 9.079 | 0 | 0 | 3.947 |
| TRACH2003347 | 0 | 0 | 0 | 0 | 0 | 5.728 | 1.762 |
| TRACH2005541 | 0 | 0 | 0 | 9.921 | 0 | 0 | 10.783 |
| TRACH2005796 | 0 | 0 | 0 | 0 | 0 | 0 | 49.749 |
| TRACH2005811 | 2.109 | 2.419 | 0 | 2.152 | 0 | 0 | 3.508 |
| TRACH2006049 | 47.167 | 0 | 0 | 0 | 0 | 0 | 0 |
| TRACH2006378 | 8.938 | 0 | 0 | 0 | 0 | 0 | 0 |
| TRACH2007399 | 0 | 0 | 0 | 0.481 | 0 | 1.698 | 1.045 |
| TRACH2007969 | 2.538 | 0 | 0 | 0 | 0 | 0 | 0 |
| TRACH2008113 | 0 | 0 | 65.939 | 0 | 0 | 0 | 0 |
| TRACH2008300 | 10.186 | 3.895 | 6.014 | 13.857 | 0 | 12.243 | 11.296 |
| TRACH2008472 | 0 | 0 | 5.558 | 0 | 0 | 0 | 8.700 |
| TRACH2008478 | 17.859 | 0 | 0 | 0 | 0 | 0 | 0 |
| TRACH2008716 | 0 | 11.638 | 0 | 0 | 0 | 0 | 0 |
| TRACH2008891 | 21.694 | 0 | 0 | 0 | 0 | 0 | 0 |
| TRACH2009006 | 0 | 0 | 0 | 0 | 0 | 0 | 3.892 |
| TRACH2011113 | 0 | 0 | 0 | 4.817 | 0 | 0 | 5.236 |
| TRACH2011500 | 13.502 | 0 | 0 | 0 | 0 | 0 | 0 |
| TRACH2011894 | 0 | 0 | 0 | 0 | 0 | 32.063 | 0 |
| TRACH2012298 | 0 | 3.256 | 0 | 0 | 0 | 0 | 0 |
| TRACH2012376 | 0 | 6.157 | 0 | 0 | 0 | 9.677 | 2.976 |
| TRACH2012497 | 6.473 | 0 | 0 | 0 | 0 | 0 | 0 |
| TRACH2012811 | 0 | 17.886 | 0 | 0 | 0 | 0 | 34.582 |
| TRACH2013552 | 10.389 | 0 | 0 | 31.797 | 0 | 0 | 0 |
| TRACH2013585 | 23.471 | 0 | 0 | 23.946 | 0 | 0 | 0 |
| TRACH2014077 | 3.402 | 0 | 0 | 6.941 | 0 | 0 | 7.545 |
| TRACH2014124 | 2.064 | 0 | 3.657 | 0 | 0 | 0 | 3.434 |
| TRACH2014997 | 14.151 | 0 | 0 | 7.219 | 0 | 0 | 0 |
| TRACH2015823 | 2.188 | 0 | 0 | 4.464 | 0 | 0 | 2.426 |
| TRACH2015939 | 0 | 12.887 | 0 | 5.731 | 0 | 0 | 6.229 |
| TRACH2016131 | 0 | 67.193 | 0 | 0 | 0 | 0 | 0 |
| TRACH2018034 | 0 | 0 | 0 | 0 | 0 | 0 | 49.749 |
| TRACH2018317 | 2.930 | 0 | 0 | 0 | 0 | 0 | 0 |
| TRACH2018446 | 0 | 0 | 0 | 0 | 0 | 0 | 9.275 |
| TRACH2018950 | 0 | 17.231 | 0 | 0 | 0 | 0 | 0 |
| TRACH2023299 | 0 | 0 | 0 | 0 | 0 | 0 | 14.157 |
| TRACH2025535 | 5.806 | 1.332 | 0 | 2.369 | 0 | 0 | 1.288 |
| TRACH3000014 | 0 | 0 | 0 | 18.547 | 0 | 0 | 0 |
| TRACH3000134 | 36.165 | 0 | 0 | 0 | 0 | 0 | 0 |
| TRACH3000780 | 0 | 0 | 0 | 47.666 | 0 | 0 | 0 |
| TRACH3001550 | 0 | 0 | 0 | 47.666 | 0 | 0 | 0 |
| TRACH3002192 | 4.989 | 2.861 | 0 | 6.999 | 2.321 | 0 | 2.766 |
| TRACH3002605 | 0 | 0 | 0 | 47.666 | 0 | 0 | 0 |
| TRACH3002752 | 10.215 | 0 | 0 | 10.422 | 19.010 | 0 | 0 |
| TRACH3003037 | 64.100 | 0 | 0 | 0 | 0 | 0 | 0 |
| TRACH3003547 | 4.229 | 0 | 0 | 0 | 0 | 0 | 0 |
| TRACH3003872 | 2.745 | 0 | 0 | 5.600 | 10.216 | 0 | 0 |
| TRACH3004068 | 0 | 0 | 0 | 0 | 0 | 5.139 | 1.581 |
| TRACH3004424 | 17.006 | 0 | 0 | 0 | 0 | 0 | 18.859 |
| TRACH3004721 | 8.721 | 6.669 | 0 | 2.966 | 0 | 0 | 3.224 |
| TRACH3005294 | 7.428 | 0 | 0 | 0 | 0 | 0 | 0 |
| TRACH3006717 | 18.347 | 0 | 0 | 11.231 | 0 | 0 | 0 |
| TRACH3007479 | 1.075 | 0 | 0 | 0 | 0 | 0 | 0 |
| TRACH3007625 | 1.175 | 5.394 | 8.329 | 10.794 | 0 | 0 | 3.911 |
| TRACH3007689 | 47.167 | 0 | 0 | 0 | 0 | 0 | 0 |
| TRACH3008093 | 2.449 | 5.619 | 0 | 0 | 0 | 0 | 2.716 |
| TRACH3008201 | 47.167 | 0 | 0 | 0 | 0 | 0 | 0 |
| TRACH3008508 | 0 | 0 | 0 | 0 | 0 | 0 | 21.245 |
| TRACH3008632 | 25.351 | 0 | 0 | 8.621 | 0 | 0 | 9.371 |
| TRACH3009001 | 0 | 0 | 0 | 23.904 | 0 | 0 | 0 |
| TRACH3009008 | 24.495 | 0 | 0 | 0 | 0 | 0 | 0 |
| TRACH3009148 | 17.939 | 0 | 0 | 0 | 0 | 0 | 0 |
| TRACH3009455 | 47.167 | 0 | 0 | 0 | 0 | 0 | 0 |
| TRACH3010079 | 48.305 | 0 | 0 | 24.641 | 0 | 0 | 0 |
| TRACH3016805 | 4.502 | 0 | 0 | 0 | 0 | 0 | 0 |
| TRACH3022198 | 0 | 0 | 0 | 8.480 | 30.935 | 0 | 0 |
| TRACH3024342 | 47.167 | 0 | 0 | 0 | 0 | 0 | 0 |
| TRACH3024671 | 47.167 | 0 | 0 | 0 | 0 | 0 | 0 |
| TRACH3025316 | 0 | 0 | 0 | 31.291 | 0 | 0 | 0 |
| TRACH3026303 | 5.605 | 0 | 0 | 11.436 | 0 | 0 | 0 |
| TRACH3026676 | 11.631 | 26.685 | 0 | 0 | 0 | 0 | 12.899 |
| TRACH3028855 | 22.309 | 0 | 0 | 0 | 0 | 0 | 0 |
| TRACH3032570 | 47.167 | 0 | 0 | 0 | 0 | 0 | 0 |
| TRACH3036932 | 14.659 | 0 | 0 | 14.956 | 0 | 0 | 16.256 |
| TRACH3036942 | 0.244 | 0 | 0.864 | 0 | 0 | 0 | 0 |
| TRACH3037067 | 0 | 3.688 | 0 | 0 | 0 | 0 | 0 |
| TRACH3038399 | 12.435 | 0 | 0 | 0 | 0 | 0 | 13.790 |
| TSTOM1000135 | 0 | 0 | 0 | 0 | 0 | 0 | 9.361 |
| TSTOM2000235 | 0 | 0 | 0 | 4.535 | 0 | 0 | 0 |
| TUTER1000122 | 0 | 0 | 0 | 3.330 | 0 | 0 | 0 |
| TUTER1000137 | 4.294 | 0 | 0 | 0 | 0 | 0 | 0 |
| TUTER2000904 | 0 | 0 | 0 | 5.697 | 0 | 0 | 3.096 |
| UMVEN1000122 | 0 | 0 | 0 | 0.997 | 0 | 0 | 0 |
| UMVEN1000143 | 0 | 0 | 2.909 | 0 | 0 | 0 | 0 |
| UMVEN1000186 | 0 | 0.606 | 0 | 0 | 0 | 0 | 0 |
| UMVEN2000121 | 0 | 0 | 0 | 0 | 0 | 0 | 1.149 |
| UMVEN2000133 | 1.758 | 0 | 0 | 0.598 | 0 | 0 | 0.650 |
| UMVEN2000152 | 0 | 1.807 | 0 | 0 | 0 | 0 | 0.873 |
| UMVEN2000354 | 0 | 1.890 | 2.918 | 0 | 0 | 2.970 | 0.913 |
| UMVEN2000453 | 0.522 | 2.396 | 0 | 0.533 | 0 | 1.883 | 0 |
| UTERU1000096 | 0 | 0 | 0 | 0 | 75.732 | 0 | 0 |
| UTERU1000106 | 0 | 13.221 | 0 | 0 | 0 | 0 | 0 |
| UTERU1000384 | 7.127 | 0 | 0 | 0 | 0 | 0 | 7.904 |
| UTERU2000023 | 0 | 0 | 0 | 10.444 | 0 | 0 | 0 |
| UTERU2000095 | 2.069 | 0 | 1.466 | 0 | 1.540 | 0 | 1.836 |
| UTERU2000260 | 0 | 0 | 0 | 0 | 0 | 0 | 23.088 |
| UTERU2000329 | 0 | 0 | 0 | 0 | 0 | 0 | 31.736 |
| UTERU2000332 | 0 | 0 | 0 | 0 | 0 | 0 | 5.244 |
| UTERU2000418 | 0 | 65.795 | 0 | 0 | 0 | 0 | 0 |
| UTERU2000424 | 1.699 | 3.897 | 3.009 | 0 | 0 | 3.062 | 0 |
| UTERU2000541 | 31.534 | 0 | 0 | 6.434 | 0 | 0 | 6.994 |
| UTERU2000925 | 0 | 0 | 0 | 10.625 | 38.760 | 0 | 0 |
| UTERU2001110 | 0 | 0 | 0 | 0 | 75.732 | 0 | 0 |
| UTERU2001607 | 1.475 | 3.384 | 0 | 3.010 | 0 | 0 | 3.272 |
| UTERU2001658 | 0 | 0 | 0 | 9.037 | 0 | 0 | 0 |
| UTERU2002294 | 1.815 | 0 | 0 | 0 | 0 | 0 | 4.026 |
| UTERU2002410 | 0 | 2.694 | 2.080 | 0 | 0 | 2.117 | 1.302 |
| UTERU2002662 | 1.779 | 0 | 0 | 0 | 0 | 0 | 3.946 |
| UTERU2002964 | 0 | 0 | 74.813 | 0 | 0 | 0 | 0 |
| UTERU2003057 | 0 | 0 | 0 | 0 | 0 | 9.326 | 0 |
| UTERU2004037 | 0 | 0 | 0 | 0 | 0 | 0 | 2.431 |
| UTERU2004664 | 1.697 | 0 | 0 | 0 | 0 | 0 | 1.882 |
| UTERU2004807 | 0 | 2.305 | 0 | 1.025 | 0 | 0 | 0 |
| UTERU2004929 | 0 | 0 | 0 | 11.843 | 0 | 0 | 0 |
| UTERU2005074 | 0 | 0 | 0 | 0 | 0 | 0 | 12.593 |
| UTERU2005354 | 4.375 | 0 | 7.749 | 0 | 0 | 0 | 4.852 |
| UTERU2005593 | 4.490 | 0 | 0 | 0 | 4.178 | 4.047 | 4.979 |
| UTERU2005601 | 0 | 5.848 | 0 | 2.601 | 0 | 0 | 0 |
| UTERU2005621 | 0 | 0 | 15.971 | 0 | 0 | 8.128 | 0 |
| UTERU2005664 | 0 | 0 | 0 | 11.401 | 0 | 0 | 0 |
| UTERU2006115 | 7.837 | 0 | 0 | 0 | 0 | 0 | 17.383 |
| UTERU2006486 | 0 | 0 | 0 | 0 | 0 | 0 | 48.181 |
| UTERU2006524 | 0 | 0 | 0 | 46.104 | 0 | 0 | 0 |
| UTERU2006547 | 0 | 0 | 0 | 0 | 75.732 | 0 | 0 |
| UTERU2006593 | 2.953 | 0 | 0 | 1.506 | 0 | 0 | 3.275 |
| UTERU2006643 | 0 | 0 | 30.082 | 0 | 0 | 0 | 0 |
| UTERU2007004 | 0 | 0 | 0 | 0 | 0 | 75.144 | 0 |
| UTERU2007253 | 0 | 0 | 0 | 0 | 0 | 0 | 11.427 |
| UTERU2007924 | 0 | 0 | 0 | 0 | 9.955 | 9.644 | 0 |
| UTERU2008018 | 0 | 0 | 0 | 0 | 0 | 75.144 | 0 |
| UTERU2008040 | 0 | 0 | 0 | 24.014 | 0 | 0 | 0 |
| UTERU2008085 | 0.271 | 1.243 | 0.960 | 0.276 | 1.345 | 2.605 | 0.300 |
| UTERU2008130 | 0 | 0 | 0 | 46.104 | 0 | 0 | 0 |
| UTERU2008302 | 2.672 | 3.065 | 4.733 | 1.363 | 4.972 | 4.817 | 1.482 |
| UTERU2008426 | 0 | 0 | 0 | 0 | 0 | 0 | 24.416 |
| UTERU2008747 | 0 | 0 | 0 | 0 | 32.895 | 0 | 19.602 |
| UTERU2008938 | 4.922 | 0 | 0 | 22.598 | 9.160 | 0 | 5.458 |
| UTERU2008939 | 14.854 | 0 | 0 | 15.154 | 0 | 0 | 0 |
| UTERU2009335 | 0 | 0 | 0 | 3.094 | 0 | 21.872 | 0 |
| UTERU2009435 | 26.737 | 0 | 0 | 16.367 | 0 | 0 | 5.930 |
| UTERU2009972 | 3.543 | 0 | 0 | 3.614 | 0 | 0 | 0 |
| UTERU2010320 | 0 | 0 | 74.813 | 0 | 0 | 0 | 0 |
| UTERU2010417 | 0.315 | 0.723 | 0 | 0 | 0 | 1.137 | 0.699 |
| UTERU2011287 | 0 | 0 | 0 | 33.486 | 0 | 0 | 0 |
| UTERU2011621 | 9.930 | 0 | 0 | 10.131 | 0 | 0 | 11.011 |
| UTERU2011806 | 0 | 0 | 0 | 0 | 0 | 50.193 | 0 |
| UTERU2011906 | 13.639 | 0 | 0 | 0 | 0 | 0 | 0 |
| UTERU2012031 | 0 | 0 | 0 | 46.104 | 0 | 0 | 0 |
| UTERU2012230 | 8.799 | 4.037 | 0 | 16.159 | 0 | 0 | 13.661 |
| UTERU2012286 | 0 | 0 | 0 | 0 | 0 | 0 | 2.810 |
| UTERU2012715 | 0 | 65.795 | 0 | 0 | 0 | 0 | 0 |
| UTERU2013078 | 0 | 0 | 0 | 0 | 0 | 49.453 | 0 |
| UTERU2013586 | 0 | 0 | 23.341 | 13.444 | 0 | 0 | 0 |
| UTERU2014024 | 0 | 0 | 0 | 13.222 | 0 | 0 | 0 |
| UTERU2014167 | 0 | 0 | 0 | 0 | 0 | 0 | 1.011 |
| UTERU2014464 | 0 | 0 | 0 | 0 | 50.246 | 0 | 0 |
| UTERU2014601 | 0 | 15.889 | 0 | 0 | 0 | 0 | 0 |
| UTERU2014898 | 0 | 0 | 0 | 1.552 | 0 | 0 | 0 |
| UTERU2015108 | 0 | 0 | 0 | 6.438 | 0 | 0 | 0 |
| UTERU2015653 | 0 | 0 | 0 | 0 | 0 | 0 | 0.647 |
| UTERU2016426 | 12.709 | 0 | 0 | 0 | 0 | 0 | 14.093 |
| UTERU2016757 | 45.606 | 0 | 0 | 0 | 0 | 0 | 0 |
| UTERU2016799 | 0 | 0 | 0 | 2.967 | 0 | 0 | 6.449 |
| UTERU2016822 | 10.050 | 0 | 0 | 6.152 | 0 | 0 | 0 |
| UTERU2018200 | 0 | 0 | 0 | 0 | 0 | 0 | 53.828 |
| UTERU2018364 | 0 | 0 | 0 | 46.104 | 0 | 0 | 0 |
| UTERU2019005 | 0 | 0 | 0 | 0 | 0 | 0 | 7.162 |
| UTERU2019096 | 13.821 | 0 | 8.160 | 2.350 | 0 | 0 | 5.109 |
| UTERU2019706 | 45.606 | 0 | 0 | 0 | 0 | 0 | 0 |
| UTERU2019940 | 0 | 0 | 0 | 0 | 0 | 0 | 48.181 |
| UTERU2021163 | 0 | 0 | 0 | 46.104 | 0 | 0 | 0 |
| UTERU2021820 | 24.929 | 0 | 0 | 0 | 0 | 0 | 27.645 |
| UTERU2023039 | 45.606 | 0 | 0 | 0 | 0 | 0 | 0 |
| UTERU2023175 | 0 | 0 | 0 | 0 | 0 | 5.368 | 1.651 |
| UTERU2026203 | 45.606 | 0 | 0 | 0 | 0 | 0 | 0 |
| UTERU2028734 | 21.953 | 0 | 0 | 0 | 0 | 0 | 0 |
| UTERU2030213 | 0 | 0 | 0 | 25.133 | 0 | 0 | 0 |
| UTERU2030280 | 0 | 0 | 0 | 0 | 0 | 0 | 48.181 |
| UTERU3000298 | 4.627 | 0 | 0 | 18.881 | 0 | 0 | 5.131 |
| UTERU3000899 | 0 | 0 | 0 | 0 | 0 | 0 | 31.292 |
| UTERU3001158 | 0 | 0 | 0 | 0 | 0 | 0 | 36.825 |
| UTERU3001571 | 0 | 0 | 0 | 0 | 0 | 0 | 48.181 |
| UTERU3003135 | 0 | 0 | 0 | 33.486 | 0 | 0 | 0 |
| UTERU3003660 | 7.363 | 0 | 0 | 7.512 | 0 | 0 | 16.330 |
| UTERU3004384 | 0 | 0 | 0 | 46.104 | 0 | 0 | 0 |
| UTERU3004418 | 29.112 | 0 | 0 | 0 | 0 | 0 | 0 |
| UTERU3004709 | 0 | 0 | 0 | 0 | 0 | 0 | 48.181 |
| UTERU3005159 | 0 | 0 | 0 | 35.590 | 0 | 0 | 0 |
| UTERU3005230 | 24.419 | 0 | 0 | 0 | 0 | 0 | 0 |
| UTERU3005422 | 0 | 0 | 0 | 21.641 | 0 | 0 | 0 |
| UTERU3005767 | 1.190 | 0 | 0 | 0 | 4.430 | 0 | 2.640 |
| UTERU3005907 | 0 | 0 | 0 | 0 | 0 | 0 | 14.514 |
| UTERU3007640 | 45.606 | 0 | 0 | 0 | 0 | 0 | 0 |
| UTERU3008280 | 31.124 | 0 | 0 | 31.754 | 0 | 0 | 0 |
| UTERU3009259 | 0 | 0 | 0 | 46.104 | 0 | 0 | 0 |
| UTERU3009871 | 36.230 | 0 | 0 | 18.482 | 0 | 0 | 0 |
| UTERU3010409 | 3.461 | 0 | 0 | 7.062 | 0 | 0 | 0 |
| UTERU3012414 | 0 | 0 | 0 | 0 | 0 | 0 | 48.181 |
| UTERU3013167 | 45.606 | 0 | 0 | 0 | 0 | 0 | 0 |
| UTERU3016273 | 0 | 0 | 0 | 46.104 | 0 | 0 | 0 |
| UTERU3017995 | 0 | 0 | 0 | 0 | 0 | 0 | 12.128 |
| UTERU3018172 | 0 | 0 | 0 | 0 | 0 | 0 | 35.368 |

[0676] Genes whose expression levels were negligibly low in each of the above-described libraries are shown with their clone names below.

[0677] 3NB691000018, 3NB691000085, 3NB691000113, 3NB691000129, 3NB692000012, 3NB692000029, 3NB692000102, 3NB692000154, 3NB692000276, 3NB692000305, 3NB692000429, 3NB692000484, 3NB692000545, 3NB692000973, 3NB692001002, 3NB692001034, 3NB692001040, 3NB692001123, 3NB692001267, 3NB692001339, 3NB692001349, 3NB692001366, 3NB692001408, 3NB692001459, 3NB692001471, 3NB692001496, 3NB692001501, 3NB692001507, 3NB692001511, 3NB692001519, 3NB692001520, 3NB692001538, 3NB692001548, 3NB692001637, 3NB692001853, 3NB692001861, 3NB692002051, 3NB692002365, 3NB692002685, 3NB692002806, 3NB692003538, 3NB692004045, 3NB692004724, 3NB692005439, 3NB692006952, 3NB692008178, 3NB692008729, ACTVT2000380, ADIPS1000064, ADIPS2000069, ADIPS2000088, ADIPS2000245, ADRGL1000038, ADRGL1000067, ADRGL1000111, ADRGL1000147, ADRGL1000160, ADRGL1000165, ADRGL1000182, ADRGL2000056, ADRGL2000064, ADRGL2000074, ADRGL2000085, ADRGL2000117, ADRGL2000142, ADRGL2000172, ADRGL2000248, ADRGL2000261, ADRGL2000323, ADRGL2000328, ADRGL2000353, ADRGL2000384, ADRGL2000428, ADRGL2000636, ADRGL2000644, ADRGL2000968, ADRGL2001119, ADRGL2001229, ADRGL2001287, ADRGL2001301, ADRGL2001354, ADRGL2001554, ADRGL2001651, ADRGL2001756, ADRGL2001830, ADRGL2001836, ADRGL2001854, ADRGL2002029, ADRGL2002260, ADRGL2002392, ADRGL2002753, ADRGL2002857, ADRGL2003017, ADRGL2003329, ADRGL2003552, ADRGL2003585, ADRGL2003638, ADRGL2003684, ADRGL2003773, ADRGL2004031, ADRGL2004077, ADRGL2004451, ADRGL2004459, ADRGL2004676, ADRGL2004708, ADRGL2004724, ADRGL2004749, ADRGL2004770, ADRGL2004777, ADRGL2004833, ADRGL2005336, ADRGL2005564, ADRGL2005756, ADRGL2005838, ADRGL2005926, ADRGL2005961, ADRGL2006034, ADRGL2006124, ADRGL2006177, ADRGL2006193, ADRGL2006377, ADRGL2006677, ADRGL2006732, ADRGL2006767, ADRGL2006817, ADRGL2006846, ADRGL2006886, ADRGL2007080, ADRGL2007125, ADRGL2007283, ADRGL2007313, ADRGL2007357, ADRGL2007636, ADRGL2007651, ADRGL2007810, ADRGL2007877, ADRGL2007974, ADRGL2008023, ADRGL2008331, ADRGL2008337, ADRGL2008535, ADRGL2008966, ADRGL2009146, ADRGL2009324, ADRGL2009489, ADRGL2009533, ADRGL2009691, ADRGL2009755, ADRGL2010315, ADRGL2010594, ADRGL2010860, ADRGL2010974, ADRGL2011190, ADRGL2011330, ADRGL2012038, ADRGL2012179, AHMSC1000138, ASTRO1000018, ASTRO1000029, ASTRO1000096, ASTRO1000165, ASTRO2000011, ASTRO2000095, ASTRO2000141, ASTRO2000191, ASTRO2000278, ASTRO2000403, ASTRO2000417, ASTRO2000533, ASTRO2000653, ASTRO2000725, ASTRO2000801, ASTRO2001001, ASTRO2001008, ASTRO2001088, ASTRO2001122, ASTRO2001227, ASTRO2001249, ASTRO2001480, ASTRO2001806, ASTRO2002024, ASTRO2002064, ASTRO2002459, ASTRO2002571, ASTRO2002632, ASTRO2002659, ASTRO2002693, ASTRO2002720, ASTRO2002743, ASTRO2002842, ASTRO2003212, ASTRO2003581, ASTRO2003632, ASTRO2003925, ASTRO2003960, ASTRO2004032, ASTRO2004051, ASTRO2004177, ASTRO2004217, ASTRO2004297, ASTRO2004584, ASTRO2004751, ASTRO2004877, ASTRO2005008, ASTRO2005081, ASTRO2005096, ASTRO2005242, ASTRO2005273, ASTRO2005343, ASTRO2005413, ASTRO2005553, ASTRO2005557, ASTRO2005575, ASTRO2005593, ASTRO2005687, ASTRO2005726, ASTRO2005896, ASTRO2005902, ASTRO2006356, ASTRO2006732, ASTRO2006747, ASTRO2006920, ASTRO2006952, ASTRO2007047, ASTRO2007221, ASTRO2007377, ASTRO2007515, ASTRO2007578, ASTRO2007643, ASTRO2007666, ASTRO2007956, ASTRO2007962, ASTRO2008239, ASTRO2008409, ASTRO2008425, ASTRO2008508, ASTRO2008777, ASTRO2008895, ASTRO2008960, ASTRO2009118, ASTRO2009177, ASTRO2009333, ASTRO2009458, ASTRO2009526, ASTRO2009879, ASTRO2010582, ASTRO2010615, ASTRO2010962, ASTRO2010996, ASTRO2011149, ASTRO2011426, ASTRO2011437, ASTRO2011461, ASTRO2011834, ASTRO2011893, ASTRO2013124, ASTRO2013671, ASTRO2013802, ASTRO2014211, ASTRO2014363, ASTRO2014498, ASTRO2014561, ASTRO2014923, ASTRO2014961, ASTRO2015162, ASTRO2015185, ASTRO2015529, ASTRO2015987, ASTRO2016044, ASTRO2016148, ASTRO2016681, ASTRO2016819, ASTRO2016847, ASTRO2016892, ASTRO2017348, ASTRO2017627, ASTRO2018373, ASTRO2019039, ASTRO2019171, ASTRO3000154, ASTRO3000172, ASTRO3000177, ASTRO3000301, ASTRO3000474, BEAST2000454, BGGI11000193, BGGI11000285, BGGI12000022, BGGI12000067, BGGI12000161, BGGI12000533, BGGI12000544, BGGI12000684, BGGI12000693, BGGI12001097, BGGI12001241, BGGI12001247, BLADE1000176, BLADE2000181, BLADE2000256, BLADE2000340, BLADE2000389, BLADE2000463, BLADE2000492, BLADE2000579, BLADE2000640, BLADE2000866, BLADE2000938, BLADE2001031, BLADE2001133, BLADE2001138, BLADE2001141, BLADE2001458, BLADE2001575, BLADE2001753, BLADE2001935, BLADE2001940, BLADE2001987, BLADE2002073, BLADE2002310, BLADE2002730, BLADE2002744, BLADE2002782, BLADE2002947, BLADE2002972, BLADE2003474, BLADE2003916, BLADE2004089, BLADE2004345, BLADE2004389, BLADE2004462, BLADE2004628, BLADE2004670, BLADE2004722, BLADE2005036, BLADE2005038, BLADE2005229, BLADE2005459, BLADE2005792, BLADE2006043, BLADE2006415, BLADE2006607, BLADE2006826, BLADE2006849, BLADE2006947, BLADE2007033, BLADE2007666, BLADE2007722, BLADE2007735, BLADE2007744, BLADE2007799, BLADE2007923, BLADE2007958, BLADE2008281, BLADE2008454, BLADE2008461, BLADE2008479, BLADE2008539, BLADE2008809, BLADE2008995, BLADE2009452, BLADE2009479, BLADE2009593, BNGH41000104, BNGH41000118, BNGH41000153, BNGH41000169, BNGH41000177, BNGH41000216, BNGH41000235, BNGH42000130, BNGH42000132, BNGH42000405, BNGH42000675, BNGH42000791, BNGH42000815, BNGH42000994, BNGH42001406, BNGH42001576, BNGH42001724, BNGH42002244, BNGH42002487, BNGH42002489, BNGH42003529, BNGH42003570, BNGH42003641, BNGH42004076, BNGH42004291, BNGH42004538, BNGH42004679, BNGH42005017, BNGH42005235, BNGH42005504, BNGH42006226, BNGH42006234, BNGH42007037, BNGH42007366, BNGH42007594, BNGH42007798, BNGH42008199, BNGH42008510, BNGH42008649, BNGH42008832, BNGH42008850, BNGH42008943, BNGH42009021, BRACE1000047, BRACE1000084, BRACE1000087, BRACE1000092, BRACE1000093, BRACE1000114, BRACE1000124, BRACE1000132, BRACE1000166, BRACE1000239, BRACE1000451, BRACE1000475, BRACE1000572, BRACE2000061, BRACE2000077, BRACE2000078, BRACE2000100, BRACE2000148, BRACE2000183, BRACE2000229, BRACE2000232, BRACE2000256, BRACE2000266, BRACE2000267, BRACE2000351, BRACE2000368, BRACE2000392, BRACE2000441, BRACE2000487, BRACE2000489, BRACE2000505, BRACE2000526, BRACE2000531, BRACE2000545, BRACE2000553, BRACE2000577, BRACE2000640, BRACE2000650, BRACE2000677, BRACE2000718, BRACE2000743, BRACE2000753, BRACE2000815, BRACE2000885, BRACE2000905, BRACE2000936, BRACE2000947, BRACE2000965, BRACE2000969, BRACE2000988, BRACE2001017, BRACE2001094, BRACE2001107, BRACE2001117, BRACE2001151, BRACE2001191, BRACE2001239, BRACE2001269, BRACE2001312, BRACE2001313, BRACE2001330, BRACE2001340, BRACE2001352, BRACE2001353, BRACE2001374, BRACE2001375, BRACE2001423, BRACE2001424, BRACE2001445, BRACE2001453, BRACE2001455, BRACE2001492, BRACE2001508, BRACE2001543, BRACE2001564, BRACE2001588, BRACE2001607, BRACE2001626, BRACE2001677, BRACE2001705, BRACE2001733, BRACE2001737, BRACE2001742, BRACE2001777, BRACE2001779, BRACE2001855, BRACE2001859, BRACE2001865, BRACE2001872, BRACE2001881, BRACE2001898, BRACE2001923, BRACE2001942, BRACE2001954, BRACE2001972, BRACE2001973, BRACE2002026, BRACE2002034, BRACE2002081, BRACE2002139, BRACE2002142, BRACE2002151, BRACE2002157, BRACE2002176, BRACE2002202, BRACE2002206, BRACE2002227, BRACE2002260, BRACE2002297, BRACE2002304, BRACE2002394, BRACE2002409, BRACE2002431, BRACE2002441, BRACE2002444, BRACE2002458, BRACE2002467, BRACE2002468, BRACE2002589, BRACE2002590, BRACE2002613, BRACE2002614, BRACE2002617, BRACE2002623, BRACE2002635, BRACE2002649, BRACE2002661, BRACE2002676, BRACE2002685, BRACE2002695, BRACE2002707, BRACE2002736, BRACE2002752, BRACE2002755, BRACE2002762, BRACE2002772, BRACE2002792, BRACE2002796, BRACE2002807, BRACE2002834, BRACE2002849, BRACE2002857, BRACE2002861, BRACE2002884, BRACE2002948, BRACE2003110, BRACE2003168, BRACE2003199, BRACE2003210, BRACE2003269, BRACE2003285, BRACE2003304, BRACE2003319, BRACE2003398, BRACE2003420, BRACE2003428, BRACE2003431, BRACE2003512, BRACE2003516, BRACE2003540, BRACE2003594, BRACE2003614, BRACE2003628, BRACE2003639, BRACE2003713, BRACE2003766, BRACE2003802, BRACE2003825, BRACE2003847, BRACE2003848, BRACE2003873, BRACE2003885, BRACE2003887, BRACE2003928, BRACE2003954, BRACE2003987, BRACE2005034, BRACE2005047, BRACE2005063, BRACE2005090, BRACE2005118, BRACE2005124, BRACE2005138, BRACE2005160, BRACE2005169, BRACE2005189, BRACE2005196, BRACE2005198, BRACE2005216, BRACE2005243, BRACE2005298, BRACE2005328, BRACE2005329, BRACE2005337, BRACE2005348, BRACE2005363, BRACE2005433, BRACE2005450, BRACE2005453, BRACE2005460, BRACE2005489, BRACE2005518, BRACE2005556, BRACE2005562, BRACE2005624, BRACE2005661, BRACE2005667, BRACE2005731, BRACE2005742, BRACE2005762, BRACE2005773, BRACE2005787, BRACE2005795, BRACE2005800, BRACE2005869, BRACE2005875, BRACE2005881, BRACE2005898, BRACE2005904, BRACE2005906, BRACE2005907, BRACE2005911, BRACE2005937, BRACE2005949, BRACE2005981, BRACE2005991, BRACE2006072, BRACE2006102, BRACE2006105, BRACE2006122, BRACE2006137, BRACE2006143, BRACE2006162, BRACE2006174, BRACE2006240, BRACE2006245, BRACE2006249, BRACE2006274, BRACE2006298, BRACE2006319, BRACE2006378, BRACE2006393, BRACE2006413, BRACE2006417, BRACE2006453, BRACE2006459, BRACE2006488, BRACE2006534, BRACE2006540, BRACE2006547, BRACE2006564, BRACE2006587, BRACE2006598, BRACE2006685, BRACE2006703, BRACE2006783, BRACE2006833, BRACE2006900, BRACE2006909, BRACE2006911, BRACE2006924, BRACE2006935, BRACE2006944, BRACE2006951, BRACE2006986, BRACE2007068, BRACE2007087, BRACE2007138, BRACE2007174, BRACE2007197, BRACE2007203, BRACE2007232, BRACE2007262, BRACE2007274, BRACE2007281, BRACE2007295, BRACE2007358, BRACE2007396, BRACE2007398, BRACE2007411, BRACE2007447, BRACE2007477, BRACE2007502, BRACE2007503, BRACE2007527, BRACE2007538, BRACE2007563, BRACE2007621, BRACE2007640, BRACE2007646, BRACE2007682, BRACE2007685, BRACE2007727, BRACE2007749, BRACE2007760, BRACE2007761, BRACE2007764, BRACE2007769, BRACE2007784, BRACE2007786, BRACE2007799, BRACE2007801, BRACE2007836, BRACE2007868, BRACE2007888, BRACE2007902, BRACE2007920, BRACE2007944, BRACE2008008, BRACE2008015, BRACE2008021, BRACE2008102, BRACE2008114, BRACE2008144, BRACE2008172, BRACE2008218, BRACE2008276, BRACE2008295, BRACE2008308, BRACE2008336, BRACE2008361, BRACE2008401, BRACE2008410, BRACE2008420, BRACE2008443, BRACE2008473, BRACE2008480, BRACE2008481, BRACE2008488, BRACE2008495, BRACE2008500, BRACE2008594, BRACE2008604, BRACE2008615, BRACE2008622, BRACE2008629, BRACE2008655, BRACE2008656, BRACE2008710, BRACE2008754, BRACE2008797, BRACE2008847, BRACE2008861, BRACE2008867, BRACE2008881, BRACE2008883, BRACE2008917, BRACE2008919, BRACE2008948, BRACE2008960, BRACE2008999, BRACE2009014, BRACE2009016, BRACE2009031, BRACE2009044, BRACE2009053, BRACE2009122, BRACE2009131, BRACE2009185, BRACE2009188, BRACE2009212, BRACE2009221, BRACE2009235, BRACE2009238, BRACE2009255, BRACE2009270, BRACE2009272, BRACE2009274, BRACE2009275, BRACE2009293, BRACE2009311, BRACE2009318, BRACE2009323, BRACE2009421, BRACE2009428, BRACE2009434, BRACE2009437, BRACE2009533, BRACE2009558, BRACE2009591, BRACE2009620, BRACE2009654, BRACE2009721, BRACE2009732, BRACE2009754, BRACE2009828, BRACE2009886, BRACE2009907, BRACE2009957, BRACE2010170, BRACE2010171, BRACE2010203, BRACE2010208, BRACE2010336, BRACE2010348, BRACE2010440, BRACE2010444, BRACE2010477, BRACE2010535, BRACE2010550, BRACE2010598, BRACE2010632, BRACE2010642, BRACE2010684, BRACE2010813, BRACE2010828, BRACE2010837, BRACE2010888, BRACE2010937, BRACE2010983, BRACE2011007, BRACE2011025, BRACE2011199, BRACE2011265, BRACE2011389, BRACE2011478, BRACE2011545, BRACE2011592, BRACE2011611, BRACE2011646, BRACE2011677, BRACE2011703, BRACE2011747, BRACE2011838, BRACE2011892, BRACE2011904, BRACE2011947, BRACE2012061, BRACE2012062, BRACE2012185, BRACE2012222, BRACE2012232, BRACE2012291, BRACE2012510, BRACE2012625, BRACE2012653, BRACE2012833, BRACE2012838, BRACE2012936, BRACE2012947, BRACE2013009, BRACE2013010, BRACE2013126, BRACE2013132, BRACE2013149, BRACE2013369, BRACE2013806, BRACE2014108, BRACE2014161, BRACE2014232, BRACE2014268, BRACE2014475, BRACE2014780, BRACE2014818, BRACE2014821, BRACE2014824, BRACE2014854, BRACE2015031, BRACE2015262, BRACE2015270, BRACE2015314, BRACE2015352, BRACE2015436, BRACE2015741, BRACE2015756, BRACE2015969, BRACE2015995, BRACE2016058, BRACE2016315, BRACE2016325, BRACE2016335, BRACE2016362, BRACE2016366, BRACE2016465, BRACE2016516, BRACE2016583, BRACE2016708, BRACE2016821, BRACE2016896, BRACE2016981, BRACE2017108, BRACE2017124, BRACE2017298, BRACE2017410, BRACE2017438, BRACE2017580, BRACE2017587, BRACE2017720, BRACE2017872, BRACE2017929, BRACE2017985, BRACE2017992, BRACE2018443, BRACE2018448, BRACE2018568, BRACE2018700, BRACE2018727, BRACE2018759, BRACE2018782, BRACE2019044, BRACE2019244, BRACE2019258, BRACE2019371, BRACE2019467, BRACE2019510, BRACE2019528, BRACE2019618, BRACE2019696, BRACE2019703, BRACE2019843, BRACE2019865, BRACE2019872, BRACE2020028, BRACE2020077, BRACE2020097, BRACE2020157, BRACE2020278, BRACE2020358, BRACE2020467, BRACE2020584, BRACE2020652, BRACE2020709, BRACE2020742, BRACE2020756, BRACE2020863, BRACE2020982, BRACE2021143, BRACE2021148, BRACE2021245, BRACE2021254, BRACE2021264, BRACE2021344, BRACE2021433, BRACE2021478, BRACE2021541, BRACE2021670, BRACE2021695, BRACE2021721, BRACE2021936, BRACE2022030, BRACE2022158, BRACE2022196, BRACE2022270, BRACE2022328, BRACE2022389, BRACE2022394, BRACE2022435, BRACE2022448, BRACE2022450, BRACE2022549, BRACE2022633, BRACE2022693, BRACE2022848, BRACE2022928, BRACE2022990, BRACE2023069, BRACE2023070, BRACE2023268, BRACE2023284, BRACE2023404, BRACE2023451, BRACE2023540, BRACE2023633, BRACE2023727, BRACE2023744, BRACE2023800, BRACE2023801, BRACE2024074, BRACE2024222, BRACE2024610, BRACE2024627, BRACE2024826, BRACE2025018, BRACE2025316, BRACE2025333, BRACE2025452, BRACE2025492, BRACE2025710, BRACE2025796, BRACE2025992, BRACE2026054, BRACE2026131, BRACE2026141, BRACE2026293, BRACE2026294, BRACE2026404, BRACE2026675, BRACE2026725, BRACE2026836, BRACE2026920, BRACE2026971, BRACE2027221, BRACE2027258, BRACE2027312, BRACE2027382, BRACE2027389, BRACE2027408, BRACE2027770, BRACE2027879, BRACE2027970, BRACE2028171, BRACE2028410, BRACE2028741, BRACE2028956, BRACE2028970, BRACE2029112, BRACE2029356, BRACE2029396, BRACE2029581, BRACE2029644, BRACE2029849, BRACE2030039, BRACE2030096, BRACE2030323, BRACE2030326, BRACE2030345, BRACE2030736, BRACE2030883, BRACE2030884, BRACE2031232, BRACE2031527, BRACE2031531, BRACE2031553, BRACE2031899, BRACE2032044, BRACE2032090, BRACE2032134, BRACE2032148, BRACE2032182, BRACE2032329, BRACE2032385, BRACE2032436, BRACE2032538, BRACE2032584, BRACE2032823, BRACE2033128, BRACE2033394, BRACE2033478, BRACE2033720, BRACE2033786, BRACE2034434, BRACE2034523, BRACE2034616, BRACE2034622, BRACE2034870, BRACE2035003, BRACE2035120, BRACE2035124, BRACE2035191, BRACE2035278, BRACE2035441, BRACE2035485, BRACE2036005, BRACE2036096, BRACE2036743, BRACE2036830, BRACE2036834, BRACE2036900, BRACE2037294, BRACE2037299, BRACE2037310, BRACE2037431, BRACE2037692, BRACE2037847, BRACE2038114, BRACE2038269, BRACE2038271, BRACE2038329, BRACE2038492, BRACE2038551, BRACE2038618, BRACE2039009, BRACE2039128, BRACE2039170, BRACE2039249, BRACE2039286, BRACE2039297, BRACE2039327, BRACE2039362, BRACE2039475, BRACE2039600, BRACE2039607, BRACE2039734, BRACE2039823, BRACE2039832, BRACE2039893, BRACE2039986, BRACE2040138, BRACE2040325, BRACE2040514, BRACE2040640, BRACE2040987, BRACE2041009, BRACE2041095, BRACE2041200, BRACE2041264, BRACE2041890, BRACE2041898, BRACE2042394, BRACE2042398, BRACE2042550, BRACE2042620, BRACE2042628, BRACE2042873, BRACE2043036, BRACE2043105, BRACE2043142, BRACE2043248, BRACE2043349, BRACE2043381, BRACE2043774, BRACE2043942, BRACE2044057, BRACE2044263, BRACE2044304, BRACE2044473, BRACE2044510, BRACE2044640, BRACE2044816, BRACE2044946, BRACE2044949, BRACE2045300, BRACE2045428, BRACE2045445, BRACE2045596, BRACE2045772, BRACE2045947, BRACE2046251, BRACE2046295, BRACE2046976, BRACE2047011, BRACE2047232, BRACE2047350, BRACE2047377, BRACE2047385, BRACE2047492, BRACE2047558, BRACE2047573, BRACE2047835, BRACE2047893, BRACE2047975, BRACE3000071, BRACE3000404, BRACE3000520, BRACE3000697, BRACE3000840, BRACE3000973, BRACE3001002, BRACE3001058, BRACE3001066, BRACE3001113, BRACE3001217, BRACE3001299, BRACE3001384, BRACE3001391, BRACE3001403, BRACE3001595, BRACE3001754, BRACE3001948, BRACE3001973, BRACE3002184, BRACE3002298, BRACE3002344, BRACE3002390, BRACE3002420, BRACE3002508, BRACE3002541, BRACE3002756, BRACE3003004, BRACE3003026, BRACE3003053, BRACE3003413, BRACE3003595, BRACE3003698, BRACE3003866, BRACE3003920, BRACE3004058, BRACE3004113, BRACE3004150, BRACE3004205, BRACE3004358, BRACE3004435, BRACE3004477, BRACE3004772, BRACE3004783, BRACE3004843, BRACE3004862, BRACE3004880, BRACE3004887, BRACE3004981, BRACE3004996, BRACE3004998, BRACE3005103, BRACE3005127, BRACE3005145, BRACE3005217, BRACE3005225, BRACE3005430, BRACE3005870, BRACE3005903, BRACE3006113, BRACE3006185, BRACE3006226, BRACE3006462, BRACE3006463, BRACE3006553, BRACE3006872, BRACE3006917, BRACE3007058, BRACE3007084, BRACE3007085, BRACE3007322, BRACE3007472, BRACE3007559, BRACE3007625, BRACE3007642, BRACE3007649, BRACE3007767, BRACE3007869, BRACE3008036, BRACE3008066, BRACE3008092, BRACE3008095, BRACE3008137, BRACE3008255, BRACE3008337, BRACE3008720, BRACE3008772, BRACE3009044, BRACE3009075, BRACE3009090, BRACE3009127, BRACE3009197, BRACE3009265, BRACE3009297, BRACE3009377, BRACE3009392, BRACE3009539, BRACE3009574, BRACE3009701, BRACE3009708, BRACE3009993, BRACE3010076, BRACE3010079, BRACE3010086, BRACE3010221, BRACE3010283, BRACE3010315, BRACE3010416, BRACE3010435, BRACE3010702, BRACE3010862, BRACE3011447, BRACE3011505, BRACE3011634, BRACE3011774, BRACE3012357, BRACE3012574, BRACE3012806, BRACE3012930, BRACE3013119, BRACE3013418, BRACE3013576, BRACE3013740, BRACE3013874, BRACE3013936, BRACE3013986, BRACE3014005, BRACE3014068, BRACE3014231, BRACE3014290, BRACE3014317, BRACE3014523, BRACE3014714, BRACE3014807, BRACE3014942, BRACE3015090, BRACE3015121, BRACE3015262, BRACE3015521, BRACE3015808, BRACE3015829, BRACE3015894, BRACE3015898, BRACE3016020, BRACE3016167, BRACE3016170, BRACE3016580, BRACE3016788, BRACE3016810, BRACE3016862, BRACE3016884, BRACE3017083, BRACE3017253, BRACE3018083, BRACE3018308, BRACE3019055, BRACE3019084, BRACE3019570, BRACE3019611, BRACE3019817, BRACE3019828, BRACE3020151, BRACE3020194, BRACE3020286, BRACE3020356, BRACE3020594, BRACE3020669, BRACE3020671, BRACE3020890, BRACE3021148, BRACE3021430, BRACE3021517, BRACE3021805, BRACE3022051, BRACE3022303, BRACE3022847, BRACE3023604, BRACE3023912, BRACE3024073, BRACE3024359, BRACE3024379, BRACE3024444, BRACE3024497, BRACE3024537, BRACE3024659, BRACE3024662, BRACE3024879, BRACE3025153, BRACE3025302, BRACE3025457, BRACE3025531, BRACE3025627, BRACE3025630, BRACE3026008, BRACE3026075, BRACE3026161, BRACE3026290, BRACE3026345, BRACE3026456, BRACE3026844, BRACE3026947, BRACE3026993, BRACE3027242, BRACE3027256, BRACE3027326, BRACE3027480, BRACE3027976, BRACE3028214, BRACE3028241, BRACE3028360, BRACE3028895, BRACE3028998, BRACE3029005, BRACE3029205, BRACE3029447, BRACE3030057, BRACE3030103, BRACE3030538, BRACE3030748, BRACE3031161, BRACE3031184, BRACE3031315, BRACE3031372, BRACE3031579, BRACE3031728, BRACE3031843, BRACE3032455, BRACE3032537, BRACE3032538, BRACE3032771, BRACE3032980, BRACE3032983, BRACE3033525, BRACE3034159, BRACE3034183, BRACE3034389, BRACE3034964, BRACE3034993, BRACE3035168, BRACE3035227, BRACE3036271, BRACE3037612, BRACE3037637, BRACE3037803, BRACE3038012, BRACE3038030, BRACE3038569, BRACE3038570, BRACE3038687, BRACE3038760, BRACE3039288, BRACE3039378, BRACE3039454, BRACE3040012, BRACE3040239, BRACE3040504, BRACE3040644, BRACE3040856, BRACE3041059, BRACE3041162, BRACE3041827, BRACE3042046, BRACE3042210, BRACE3042409, BRACE3042594, BRACE3043597, BRACE3044090, BRACE3044172, BRACE3044247, BRACE3044377, BRACE3044389, BRACE3044495, BRACE3045011, BRACE3045033, BRACE3045145, BRACE3045424, BRACE3045708, BRACE3046049, BRACE3046152, BRACE3046294, BRACE3046466, BRACE3046491, BRACE3046609, BRACE3046762, BRACE3046837, BRACE3046855, BRACE3046966, BRACE3047018, BRACE3047482, BRACE3047801, BRALZ1000047, BRALZ1000103, BRALZ2000189, BRALZ2000263, BRALZ2001038, BRALZ2001279, BRALZ2001350, BRALZ2001445, BRALZ2001559, BRALZ2001743, BRALZ2002174, BRALZ2002418, BRALZ2002477, BRALZ2003119, BRALZ2003330, BRALZ2003453, BRALZ2003525, BRALZ2004397, BRALZ2005467, BRALZ2005471, BRALZ2005888, BRALZ2005950, BRALZ2005992, BRALZ2006474, BRALZ2006560, BRALZ2006734, BRALZ2006800, BRALZ2006976, BRALZ2007376, BRALZ2007545, BRALZ2007576, BRALZ2007661, BRALZ2007790, BRALZ2007793, BRALZ2007952, BRALZ2008031, BRALZ2008166, BRALZ2008462, BRALZ2008763, BRALZ2008869, BRALZ2008930, BRALZ2010186, BRALZ2010842, BRALZ2011337, BRALZ2012050, BRALZ2012183, BRALZ2012848, BRALZ2013621, BRALZ2013690, BRALZ2014054, BRALZ2014316, BRALZ2014484, BRALZ2014951, BRALZ2015168, BRALZ2015811, BRALZ2016085, BRALZ2016498, BRALZ2017359, BRALZ2017531, BRALZ2017607, BRALZ2017620, BRALZ2017844, BRALZ2018342, BRALZ2018492, BRAMY1000095, BRAMY1000098, BRAMY1000130, BRAMY1000157, BRAMY2000021, BRAMY2000076, BRAMY2000086, BRAMY2000151, BRAMY2000181, BRAMY2000196, BRAMY2000231, BRAMY2000277, BRAMY2000653, BRAMY2000814, BRAMY2000946, BRAMY2000981, BRAMY2000987, BRAMY2001068, BRAMY2001114, BRAMY2001203, BRAMY2001282, BRAMY2001367, BRAMY2001427, BRAMY2001473, BRAMY2001678, BRAMY2002005, BRAMY2002044, BRAMY2002072, BRAMY2002158, BRAMY2002311, BRAMY2002339, BRAMY2002364, BRAMY2002493, BRAMY2002525, BRAMY2002584, BRAMY2002604, BRAMY2002638, BRAMY2002739, BRAMY2002853, BRAMY2002862, BRAMY2002956, BRAMY2003037, BRAMY2003117, BRAMY2003287, BRAMY2003325, BRAMY2003529, BRAMY2003538, BRAMY2003585, BRAMY2003634, BRAMY2003653, BRAMY2003681, BRAMY2003893, BRAMY2003897, BRAMY2003898, BRAMY2003904, BRAMY2003926, BRAMY2003929, BRAMY2004058, BRAMY2004183, BRAMY2004335, BRAMY2004351, BRAMY2004352, BRAMY2004492, BRAMY2004537, BRAMY2004542, BRAMY2004756, BRAMY2004771, BRAMY2005064, BRAMY2005094, BRAMY2005151, BRAMY2005182, BRAMY2005244, BRAMY2005391, BRAMY2005576, BRAMY2005648, BRAMY2005662, BRAMY2005708, BRAMY2005711, BRAMY2006092, BRAMY2006118, BRAMY2006149, BRAMY2006366, BRAMY2006375, BRAMY2006411, BRAMY2006459, BRAMY2006466, BRAMY2006659, BRAMY2006779, BRAMY2006809, BRAMY2006879, BRAMY2007043, BRAMY2007110, BRAMY2007185, BRAMY2007249, BRAMY2007308, BRAMY2007411, BRAMY2007458, BRAMY2007486, BRAMY2007546, BRAMY2007610, BRAMY2007653, BRAMY2007753, BRAMY2007859, BRAMY2008333, BRAMY2008382, BRAMY2008583, BRAMY2008979, BRAMY2009034, BRAMY2009105, BRAMY2009123, BRAMY2009192, BRAMY2009344, BRAMY2009349, BRAMY2009394, BRAMY2009528, BRAMY2009693, BRAMY2010068, BRAMY2010135, BRAMY2010145, BRAMY2010171, BRAMY2010208, BRAMY2010239, BRAMY2010290, BRAMY2010366, BRAMY2010395, BRAMY2010441, BRAMY2010581, BRAMY2010798, BRAMY2010808, BRAMY2010919, BRAMY2011064, BRAMY2011178, BRAMY2011196, BRAMY2011216, BRAMY2011253, BRAMY2011480, BRAMY2011639, BRAMY2011679, BRAMY2011811, BRAMY2011846, BRAMY2011872, BRAMY2011961, BRAMY2012017, BRAMY2012091, BRAMY2012119, BRAMY2012162, BRAMY2012277, BRAMY2012426, BRAMY2012497, BRAMY2012517, BRAMY2012555, BRAMY2012568, BRAMY2012581, BRAMY2012691, BRAMY2012721, BRAMY2012731, BRAMY2012776, BRAMY2012880, BRAMY2013200, BRAMY2013216, BRAMY2013405, BRAMY2013414, BRAMY2013572, BRAMY2013590, BRAMY2013621, BRAMY2013659, BRAMY2013722, BRAMY2013756, BRAMY2013944, BRAMY2013975, BRAMY2014019, BRAMY2014387, BRAMY2014469, BRAMY2014541, BRAMY2014813, BRAMY2015211, BRAMY2015311, BRAMY2015503, BRAMY2015516, BRAMY2015551, BRAMY2015559, BRAMY2015688, BRAMY2015705, BRAMY2015782, BRAMY2015855, BRAMY2015890, BRAMY2015925, BRAMY2016002, BRAMY2016020, BRAMY2016070, BRAMY2016327, BRAMY2016386, BRAMY2016706, BRAMY2016771, BRAMY2016938, BRAMY2016953, BRAMY2017014, BRAMY2017249, BRAMY2017348, BRAMY2017450, BRAMY2017455, BRAMY2017528, BRAMY2018027, BRAMY2018106, BRAMY2018122, BRAMY2018126, BRAMY2018272, BRAMY2018273, BRAMY2018279, BRAMY2018308, BRAMY2018396, BRAMY2018467, BRAMY2019055, BRAMY2019277, BRAMY2019509, BRAMY2019643, BRAMY2019985, BRAMY2020050, BRAMY2020058, BRAMY2020270, BRAMY2020354, BRAMY2020355, BRAMY2020412, BRAMY2020445, BRAMY2020466, BRAMY2020520, BRAMY2020574, BRAMY2020634, BRAMY2020713, BRAMY2021040, BRAMY2021063, BRAMY2021098, BRAMY2021139, BRAMY2021142, BRAMY2021310, BRAMY2021388, BRAMY2021498, BRAMY2021523, BRAMY2021710, BRAMY2021732, BRAMY2021746, BRAMY2021962, BRAMY2021982, BRAMY2022052, BRAMY2022263, BRAMY2022301, BRAMY2022320, BRAMY2022383, BRAMY2022445, BRAMY2022454, BRAMY2022532, BRAMY2022796, BRAMY2022929, BRAMY2022984, BRAMY2023060, BRAMY2023110, BRAMY2023161, BRAMY2023172, BRAMY2023238, BRAMY2023327, BRAMY2023358, BRAMY2023482, BRAMY2023514, BRAMY2023719, BRAMY2023729, BRAMY2023786, BRAMY2023852, BRAMY2023863, BRAMY2023939, BRAMY2024073, BRAMY2024374, BRAMY2024449, BRAMY2024489, BRAMY2024497, BRAMY2024514, BRAMY2024530, BRAMY2024535, BRAMY2024545, BRAMY2024576, BRAMY2024715, BRAMY2024728, BRAMY2024849, BRAMY2025024, BRAMY2025032, BRAMY2025175, BRAMY2025218, BRAMY2025230, BRAMY2025277, BRAMY2025495, BRAMY2025812, BRAMY2025996, BRAMY2026009, BRAMY2026091, BRAMY2026300, BRAMY2026347, BRAMY2026395, BRAMY2026405, BRAMY2026538, BRAMY2026685, BRAMY2026713, BRAMY2026778, BRAMY2026824, BRAMY2026899, BRAMY2026902, BRAMY2026904, BRAMY2026976, BRAMY2027073, BRAMY2027140, BRAMY2027242, BRAMY2027396, BRAMY2027451, BRAMY2027461, BRAMY2027467, BRAMY2027714, BRAMY2027752, BRAMY2027782, BRAMY2028072, BRAMY2028188, BRAMY2028282, BRAMY2028472, BRAMY2028491, BRAMY2028565, BRAMY2028593, BRAMY2028682, BRAMY2028783, BRAMY2028856, BRAMY2029204, BRAMY2029602, BRAMY2030098, BRAMY2030109, BRAMY2030206, BRAMY2030477, BRAMY2030545, BRAMY2030607, BRAMY2030702, BRAMY2030703, BRAMY2030768, BRAMY2030799, BRAMY2030859, BRAMY2030915, BRAMY2031377, BRAMY2031442, BRAMY2032014, BRAMY2032231, BRAMY2032242, BRAMY2032290, BRAMY2032311, BRAMY2032317, BRAMY2032344, BRAMY2032589, BRAMY2032678, BRAMY2032696, BRAMY2032777, BRAMY2032994, BRAMY2033003, BRAMY2033116, BRAMY2033240, BRAMY2033267, BRAMY2033316, BRAMY2033332, BRAMY2033506, BRAMY2033594, BRAMY2033895, BRAMY2034072, BRAMY2034185, BRAMY2034187, BRAMY2034305, BRAMY2034561, BRAMY2034920, BRAMY2034993, BRAMY2035070, BRAMY2035449, BRAMY2035545, BRAMY2035606, BRAMY2035718, BRAMY2035801, BRAMY2035869, BRAMY2035923, BRAMY2036079, BRAMY2036254, BRAMY2036266, BRAMY2036387, BRAMY2036396, BRAMY2036615, BRAMY2036699, BRAMY2036913, BRAMY2036918, BRAMY2036968, BRAMY2037147, BRAMY2037328, BRAMY2037609, BRAMY2037629, BRAMY2037800, BRAMY2037971, BRAMY2038100, BRAMY2038128, BRAMY2038317, BRAMY2038475, BRAMY2038484, BRAMY2038832, BRAMY2038846, BRAMY2038887, BRAMY2038904, BRAMY2039287, BRAMY2039300, BRAMY2039314, BRAMY2039341, BRAMY2039695, BRAMY2039872, BRAMY2040051, BRAMY2040159, BRAMY2040478, BRAMY2040915, BRAMY2041261, BRAMY2041347, BRAMY2041378, BRAMY2041384, BRAMY2041434, BRAMY2041507, BRAMY2041542, BRAMY2041738, BRAMY2042122, BRAMY2042131, BRAMY2042178, BRAMY2042244, BRAMY2042549, BRAMY2042596, BRAMY2042612, BRAMY2042641, BRAMY2042711, BRAMY2042760, BRAMY2042804, BRAMY2042899, BRAMY2042918, BRAMY2043069, BRAMY2043103, BRAMY2043314, BRAMY2043345, BRAMY2044246, BRAMY2044317, BRAMY2044349, BRAMY2044686, BRAMY2045036, BRAMY2045299, BRAMY2045471, BRAMY2045530, BRAMY2046109, BRAMY2046478, BRAMY2046489, BRAMY2046537, BRAMY2046667, BRAMY2046742, BRAMY2046984, BRAMY2046989, BRAMY2047169, BRAMY2047280, BRAMY2047676, BRAMY2047692, BRAMY2047746, BRAMY2047751, BRAMY2047765, BRAMY2047884, BRAMY2047948, BRAMY3000206, BRAMY3000210, BRAMY3000213, BRAMY3000224, BRAMY3000254, BRAMY3000307, BRAMY3000692, BRAMY3001356, BRAMY3001401, BRAMY3001409, BRAMY3001794, BRAMY3002120, BRAMY3002312, BRAMY3002508, BRAMY3002620, BRAMY3002805, BRAMY3002886, BRAMY3003026, BRAMY3003109, BRAMY3003205, BRAMY3003310, BRAMY3003566, BRAMY3003723, BRAMY3004364, BRAMY3004672, BRAMY3004900, BRAMY3004919, BRAMY3005656, BRAMY3005932, BRAMY3006032, BRAMY3006297, BRAMY3007206, BRAMY3007350, BRAMY3007449, BRAMY3007471, BRAMY3007609, BRAMY3007723, BRAMY3007968, BRAMY3008088, BRAMY3008096, BRAMY3008335, BRAMY3008466, BRAMY3008505, BRAMY3008650, BRAMY3008937, BRAMY3009158, BRAMY3009207, BRAMY3009491, BRAMY3009904, BRAMY3010321, BRAMY3010411, BRAMY3010603, BRAMY4000277, BRAMY4000962, BRAMY4001173, BRAMY4001200, BRAMY4001234, BRAMY4001449, BRAMY4001652, BRAMY4001913, BRAMY4002575, BRAMY4002628, BRASW1000053, CD34C2000051, CD34C2000152, CD34C2000175, CD34C2000443, CD34C3000314, CD34C3000494, CERVX1000042, CERVX2000812, CERVX2000968, CERVX2002006, CERVX2002013, CERVX2002430, CERVX2002770, CHONS1000058, CHONS2000797, CHONS2001287, CHONS2001382, CHONS2001797, CHONS2001834, CHONS2002419, COLON1000030, COLON1000084, COLON1000135, COLON2000470, COLON2000557, COLON2000568, COLON2001829, COLON2001866, COLON2002443, COLON2002520, COLON2003043, COLON2003529, COLON2004318, COLON2004351, COLON2004478, COLON2004911, COLON2005126, COLON2005623, COLON2005735, COLON2005772, COLON2006263, COLON2006282, COLON2006417, COLON2007274, COLON2008105, COLON2009337, COLON2009499, CORDB1000140, CORDB2000061, CORDB2000127, CORDB2000541, CTONG1000009, CTONG1000020, CTONG1000022, CTONG1000040, CTONG1000056, CTONG1000062, CTONG1000086, CTONG1000093, CTONG1000097, CTONG1000113, CTONG1000137, CTONG1000165, CTONG1000175, CTONG1000181, CTONG1000220, CTONG1000277, CTONG1000283, CTONG1000288, CTONG1000302, CTONG1000341, CTONG1000476, CTONG1000488, CTONG1000508, CTONG1000540, CTONG2000034, CTONG2000201, CTONG2000218, CTONG2000279, CTONG2000303, CTONG2000330, CTONG2000395, CTONG2000465, CTONG2000480, CTONG2000561, CTONG2000589, CTONG2000766, CTONG2000771, CTONG2000819, CTONG2000846, CTONG2000855, CTONG2000977, CTONG2001139, CTONG2001366, CTONG2001413, CTONG2001428, CTONG2001513, CTONG2001524, CTONG2001598, CTONG2001681, CTONG2001724, CTONG2001749, CTONG2001820, CTONG2001858, CTONG2001877, CTONG2001932, CTONG2001955, CTONG2002066, CTONG2002143, CTONG2002395, CTONG2002417, CTONG2002418, CTONG2002453, CTONG2002520, CTONG2002558, CTONG2002590, CTONG2002709, CTONG2002721, CTONG2002816, CTONG2002820, CTONG2002903, CTONG2002965, CTONG2002999, CTONG2003028, CTONG2003100, CTONG2003115, CTONG2003189, CTONG2003245, CTONG2003293, CTONG2003348, CTONG2003350, CTONG2003361, CTONG2003372, CTONG2003375, CTONG2003427, CTONG2003517, CTONG2003599, CTONG2003680, CTONG2003699, CTONG2003764, CTONG2003782, CTONG2003889, CTONG2003937, CTONG2003945, CTONG2004000, CTONG2004062, CTONG2004115, CTONG2004126, CTONG2004264, CTONG2004397, CTONG2004454, CTONG2004550, CTONG2004669, CTONG2004716, CTONG2004912, CTONG2004941, CTONG2004948, CTONG2005049, CTONG2005110, CTONG2005265, CTONG2005290, CTONG2005374, CTONG2005399, CTONG2005468, CTONG2005567, CTONG2005585, CTONG2005615, CTONG2005635, CTONG2005775, CTONG2005890, CTONG2005904, CTONG2005913, CTONG2006129, CTONG2006223, CTONG2006273, CTONG2006310, CTONG2006515, CTONG2006524, CTONG2006568, CTONG2006611, CTONG2006620, CTONG2006666, CTONG2006691, CTONG2006798, CTONG2006836, CTONG2006932, CTONG2006942, CTONG2006964, CTONG2007007, CTONG2007009, CTONG2007091, CTONG2007175, CTONG2007259, CTONG2007272, CTONG2007297, CTONG2007441, CTONG2007474, CTONG2007623, CTONG2007898, CTONG2007959, CTONG2007970, CTONG2008184, CTONG2008262, CTONG2008269, CTONG2008343, CTONG2008402, CTONG2008466, CTONG2008562, CTONG2008577, CTONG2008595, CTONG2008621, CTONG2008720, CTONG2008773, CTONG2008792, CTONG2008989, CTONG2009132, CTONG2009156, CTONG2009181, CTONG2009257, CTONG2009258, CTONG2009268, CTONG2009270, CTONG2009395, CTONG2009440, CTONG2009527, CTONG2009531, CTONG2009570, CTONG2009572, CTONG2009604, CTONG2009643, CTONG2009675, CTONG2009689, CTONG2009725, CTONG2009766, CTONG2009768, CTONG2009844, CTONG2009871, CTONG2009887, CTONG2009891, CTONG2009923, CTONG2009955, CTONG2009958, CTONG2009963, CTONG2010018, CTONG2010024, CTONG2010116, CTONG2010133, CTONG2010148, CTONG2010276, CTONG2010330, CTONG2010508, CTONG2010566, CTONG2010623, CTONG2010649, CTONG2010803, CTONG2011429, CTONG2011474, CTONG2011676, CTONG2011716, CTONG2011765, CTONG2011779, CTONG2011815, CTONG2011822, CTONG2011825, CTONG2011920, CTONG2011985, CTONG2012029, CTONG2012077, CTONG2012101, CTONG2012123, CTONG2012158, CTONG2012230, CTONG2012401, CTONG2012422, CTONG2012425, CTONG2012447, CTONG2012453, CTONG2012473, CTONG2012476, CTONG2012533, CTONG2012554, CTONG2012564, CTONG2012661, CTONG2012724, CTONG2012738, CTONG2012758, CTONG2012843, CTONG2012901, CTONG2013128, CTONG2013149, CTONG2013156, CTONG2013178, CTONG2013222, CTONG2013284, CTONG2013339, CTONG2013352, CTONG2013393, CTONG2013511, CTONG2013630, CTONG2013803, CTONG2013985, CTONG2013986, CTONG2014032, CTONG2014058, CTONG2014191, CTONG2014206, CTONG2014234, CTONG2014264, CTONG2014280, CTONG2014491, CTONG2014630, CTONG2014635, CTONG2014646, CTONG2014705, CTONG2014946, CTONG2014954, CTONG2014959, CTONG2014966, CTONG2014995, CTONG2015316, CTONG2015358, CTONG2015434, CTONG2015540, CTONG2015596, CTONG2015633, CTONG2015678, CTONG2015717, CTONG2015804, CTONG2015866, CTONG2015914, CTONG2015953, CTONG2016185, CTONG2016217, CTONG2016355, CTONG2016505, CTONG2016559, CTONG2016658, CTONG2016775, CTONG2016797, CTONG2016824, CTONG2016846, CTONG2016904, CTONG2016942, CTONG2016953, CTONG2017021, CTONG2017292, CTONG2017429, CTONG2017444, CTONG2017458, CTONG2017604, CTONG2017650, CTONG2017798, CTONG2017804, CTONG2017814, CTONG2017910, CTONG2017939, CTONG2017989, CTONG2018062, CTONG2018069, CTONG2018147, CTONG2018217, CTONG2018279, CTONG2018334, CTONG2018343, CTONG2018379, CTONG2018483, CTONG2018629, CTONG2018632, CTONG2018652, CTONG2018653, CTONG2018655, CTONG2018735, CTONG2018808, CTONG2018843, CTONG2018900, CTONG2018976, CTONG2019144, CTONG2019232, CTONG2019248, CTONG2019400, CTONG2019652, CTONG2019704, CTONG2019822, CTONG2019833, CTONG2020031, CTONG2020108, CTONG2020127, CTONG2020171, CTONG2020411, CTONG2020522, CTONG2020638, CTONG2020806, CTONG2020974, CTONG2021024, CTONG2021132, CTONG2021168, CTONG2021289, CTONG2022153, CTONG2022601, CTONG2022835, CTONG2023449, CTONG2023512, CTONG2024206, CTONG2024614, CTONG2024749, CTONG2025496, CTONG2025513, CTONG2025516, CTONG2025610, CTONG2025900, CTONG2026513, CTONG2026770, CTONG2026920, CTONG2026987, CTONG2027150, CTONG2027327, CTONG2027361, CTONG2027591, CTONG2027736, CTONG2027783, CTONG2027828, CTONG2027959, CTONG2028097, CTONG2028518, CTONG2028687, CTONG2028758, CTONG3000686, CTONG3000707, CTONG3000896, CTONG3001420, CTONG3001501, CTONG3001560, CTONG3001605, CTONG3002020, CTONG3002127, CTONG3002370, CTONG3002433, CTONG3002518, CTONG3002552, CTONG3002588, CTONG3002674, CTONG3002728, CTONG3002909, CTONG3002947, CTONG3002983, CTONG3003165, CTONG3003179, CTONG3003483, CTONG3003553, CTONG3003598, CTONG3003652, CTONG3003654, CTONG3003669, CTONG3003737, CTONG3003905, CTONG3003972, CTONG3004317, CTONG3004397, CTONG3004550, CTONG3004576, CTONG3004607, CTONG3004712, CTONG3005325, CTONG3005648, CTONG3005713, CTONG3005803, CTONG3005813, CTONG3006067, CTONG3006073, CTONG3006186, CTONG3006629, CTONG3006650, CTONG3006659, CTONG3007244, CTONG3007444, CTONG3007528, CTONG3007586, CTONG3007870, CTONG3008223, CTONG3008252, CTONG3008258, CTONG3008457, CTONG3008496, CTONG3008566, CTONG3008639, CTONG3008831, CTONG3008951, CTONG3008959, CTONG3009227, CTONG3009287, CTONG3009385, D30ST1000066, D30ST1000109, D30ST1000238, D30ST2000184, D30ST2000618, D30ST2000654, D30ST2000734, D30ST2001328, D30ST2001669, D30ST2001670, D30ST2001788, D30ST2002068, D30ST2002182, D30ST2002223, D30ST2002262, D30ST2002272, D30ST2002417, D30ST2002436, D30ST2002648, D30ST2003024, D30ST2003331, D30ST2003607, D30ST2003797, D30ST2004637, D30ST3000169, D30ST3000195, D30ST3000258, D30ST3000291, D30ST3000388, D30ST3000493, D60ST2000127, D60ST2000169, D60ST2000245, D60ST2000507, D90ST2000278, D90ST2000440, D90ST2000869, D90ST2001319, D90ST2001433, D90ST2002397, D90ST2002673, D90ST2003108, D90ST2003137, D90ST2003397, D90ST2003580, D90ST2003594, D90ST2003791, D90ST2003989, D90ST2004018, D90ST2004073, D90ST2004417, DFNES1000003, DFNES1000107, DFNES1000185, DFNES2000143, DFNES2000146, DFNES2000212, DFNES2000426, DFNES2000432, DFNES2000471, DFNES2000913, DFNES2001108, DFNES2001177, DFNES2001404, DFNES2001564, DFNES2001565, DFNES2001647, DFNES2001800, DFNES2002220, DFNES2002509, DFNES2002550, DFNES2002588, DFNES2002817, DFNES2002966, DFNES2003081, DFNES2003192, DFNES2003255, DFNES2003742, DFNES2004346, DFNES2004354, DFNES2004383, DFNES2004608, DFNES2004684, DFNES2005266, DFNES2005527, DFNES2005540, DFNES2005766, DFNES2005779, DFNES2005875, DFNES2006346, DFNES2006944, DFNES2007299, DFNES2007332, DFNES2007641, DFNES2007757, DFNES2008280, DFNES2008881, DFNES2010502, DFNES2011192, DFNES2011221, DFNES2011239, ERLTF1000021, ERLTF2000324, ERLTF2000465, FCBBF1000023, FCBBF1000038, FCBBF1000053, FCBBF1000069, FCBBF1000115, FCBBF1000117, FCBBF1000125, FCBBF1000131, FCBBF1000155, FCBBF1000157, FCBBF1000171, FCBBF1000174, FCBBF1000182, FCBBF1000198, FCBBF1000206, FCBBF1000220, FCBBF1000232, FCBBF1000233, FCBBF1000243, FCBBF1000270, FCBBF1000280, FCBBF1000297, FCBBF1000305, FCBBF1000314, FCBBF1000322, FCBBF1000349, FCBBF1000374, FCBBF1000377, FCBBF1000395, FCBBF1000397, FCBBF1000425, FCBBF1000437, FCBBF1000506, FCBBF1000546, FCBBF1000550, FCBBF1000581, FCBBF1000582, FCBBF1000598, FCBBF1000604, FCBBF1000618, FCBBF1000627, FCBBF1000675, FCBBF1000686, FCBBF1000687, FCBBF1000691, FCBBF1000732, FCBBF2000094, FCBBF2000105, FCBBF2000123, FCBBF2000195, FCBBF2000214, FCBBF2000232, FCBBF2000259, FCBBF2000276, FCBBF2000291, FCBBF2000379, FCBBF2000473, FCBBF2000502, FCBBF2000576, FCBBF2000677, FCBBF2000678, FCBBF2000782, FCBBF2000808, FCBBF2000815, FCBBF2000825, FCBBF2000951, FCBBF2001088, FCBBF2001116, FCBBF2001188, FCBBF2001238, FCBBF2001243, FCBBF2001299, FCBBF2001309, FCBBF2001427, FCBBF2001529, FCBBF2001672, FCBBF2001675, FCBBF2001718, FCBBF2001720, FCBBF2001868, FCBBF2002044, FCBBF2002111, FCBBF2002281, FCBBF2002370, FCBBF2002541, FCBBF2002626, FCBBF2002897, FCBBF2002898, FCBBF2002904, FCBBF2002953, FCBBF2003083, FCBBF2003102, FCBBF2003269, FCBBF2003297, FCBBF2003395, FCBBF2003528, FCBBF2003549, FCBBF2003636, FCBBF2003823, FCBBF2003895, FCBBF2004090, FCBBF2004138, FCBBF2004217, FCBBF2004256, FCBBF2004373, FCBBF2004448, FCBBF2004671, FCBBF2004707, FCBBF2004788, FCBBF2005069, FCBBF2005122, FCBBF2005428, FCBBF2005439, FCBBF2005538, FCBBF2005637, FCBBF2005645, FCBBF2005658, FCBBF2005733, FCBBF2005966, FCBBF2006131, FCBBF2006380, FCBBF2006418, FCBBF2006452, FCBBF2007012, FCBBF2007186, FCBBF2007265, FCBBF2007302, FCBBF2007556, FCBBF2007610, FCBBF2007633, FCBBF2007840, FCBBF3000102, FCBBF3000110, FCBBF3000120, FCBBF3000175, FCBBF3000227, FCBBF3000233, FCBBF3000269, FCBBF3000361, FCBBF3000367, FCBBF3000462, FCBBF3000473, FCBBF3000501, FCBBF3000518, FCBBF3000550, FCBBF3000847, FCBBF3001018, FCBBF3001020, FCBBF3001235, FCBBF3001281, FCBBF3001302, FCBBF3001594, FCBBF3001818, FCBBF3001855, FCBBF3001912, FCBBF3001914, FCBBF3001918, FCBBF3001924, FCBBF3002163, FCBBF3002188, FCBBF3002190, FCBBF3002268, FCBBF3002475, FCBBF3002556, FCBBF3002592, FCBBF3002658, FCBBF3002782, FCBBF3002925, FCBBF3003216, FCBBF3003305, FCBBF3003373, FCBBF3003435, FCBBF3003475, FCBBF3003481, FCBBF3003902, FCBBF3004021, FCBBF3004041, FCBBF3004261, FCBBF3004390, FCBBF3004409, FCBBF3004502, FCBBF3004842, FCBBF3004847, FCBBF3005160, FCBBF3005218, FCBBF3005444, FCBBF3005497, FCBBF3005698, FCBBF3005729, FCBBF3006171, FCBBF3006249, FCBBF3006288, FCBBF3006399, FCBBF3006628, FCBBF3007077, FCBBF3007150, FCBBF3007152, FCBBF3007242, FCBBF3007244, FCBBF3007248, FCBBF3007453, FCBBF3007540, FCBBF3007597, FCBBF3007604, FCBBF3007829, FCBBF3007855, FCBBF3008073, FCBBF3008100, FCBBF3008251, FCBBF3008311, FCBBF3008362, FCBBF3008382, FCBBF3008475, FCBBF3008556, FCBBF3008689, FCBBF3008748, FCBBF3008870, FCBBF3008938, FCBBF3008944, FCBBF3009256, FCBBF3009317, FCBBF3009428, FCBBF3009464, FCBBF3009703, FCBBF3009717, FCBBF3009888, FCBBF3009949, FCBBF3010008, FCBBF3010124, FCBBF3010130, FCBBF3010149, FCBBF3010211, FCBBF3010361, FCBBF3010508, FCBBF3010544, FCBBF3010586, FCBBF3010601, FCBBF3010665, FCBBF3010729, FCBBF3010733, FCBBF3011003, FCBBF3011418, FCBBF3011485, FCBBF3011523, FCBBF3011570, FCBBF3011592, FCBBF3011867, FCBBF3011889, FCBBF3012170, FCBBF3012182, FCBBF3012288, FCBBF3012443, FCBBF3012588, FCBBF3012667, FCBBF3012842, FCBBF3012901, FCBBF3013041, FCBBF3013058, FCBBF3013205, FCBBF3013307, FCBBF3013341, FCBBF3013589, FCBBF3013623, FCBBF3013846, FCBBF3014229, FCBBF3014355, FCBBF3014567, FCBBF3014770, FCBBF3015119, FCBBF3015131, FCBBF3015317, FCBBF3015727, FCBBF3015758, FCBBF3015809, FCBBF3015870, FCBBF3016018, FCBBF3016134, FCBBF3016178, FCBBF3016451, FCBBF3016618, FCBBF3016644, FCBBF3016987, FCBBF3017024, FCBBF3017059, FCBBF3017071, FCBBF3017123, FCBBF3017233, FCBBF3017288, FCBBF3017535, FCBBF3017681, FCBBF3017729, FCBBF3017873, FCBBF3017974, FCBBF3018453, FCBBF3018591, FCBBF3018753, FCBBF3018826, FCBBF3019085, FCBBF3019320, FCBBF3019437, FCBBF3019455, FCBBF3019564, FCBBF3019569, FCBBF3019570, FCBBF3019663, FCBBF3019714, FCBBF3019716, FCBBF3019784, FCBBF3019867, FCBBF3019961, FCBBF3020030, FCBBF3020138, FCBBF3020140, FCBBF3020163, FCBBF3020232, FCBBF3020599, FCBBF3021191, FCBBF3021221, FCBBF3021501, FCBBF3021506, FCBBF3021524, FCBBF3021940, FCBBF3021985, FCBBF3022005, FCBBF3022291, FCBBF3022311, FCBBF3022504, FCBBF3022765, FCBBF3022894, FCBBF3023061, FCBBF3023078, FCBBF3023372, FCBBF3023443, FCBBF3023599, FCBBF3023704, FCBBF3023887, FCBBF3023895, FCBBF3024096, FCBBF3024225, FCBBF3024364, FCBBF3024793, FCBBF3024911, FCBBF3025098, FCBBF3025252, FCBBF3025280, FCBBF3025674, FCBBF3025730, FCBBF3025905, FCBBF3026021, FCBBF3026048, FCBBF3026251, FCBBF3026678, FCBBF3027104, FCBBF3027199, FCBBF3027328, FCBBF3027717, FCBBF3027755, FCBBF3027768, FCBBF3027854, FCBBF3027863, FCBBF3027903, FCBBF3028102, FCBBF3028143, FCBBF3028188, FCBBF3028202, FCBBF3028472, FCBBF3028528, FCBBF3028582, FCBBF3028671, FCBBF3028794, FCBBF4000017, FCBBF4000061, FCBBF4000076, FCBBF4000173, FCBBF4000192, FCBBF4000193, FCBBF4000282, FCBBF4000399, FCBBF4000415, FCBBF4000500, FCBBF4000529, FCBBF4000548, FCBBF5000041, FCBBF5000353, FCBBF5000384, FCBBF5000483, FCBBF5000495, FEBRA1000005, FEBRA1000008, FEBRA1000030, FEBRA1000138, FEBRA1000148, FEBRA1000149, FEBRA1000183, FEBRA2000021, FEBRA2000035, FEBRA2000126, FEBRA2000220, FEBRA2000228, FEBRA2000282, FEBRA2000286, FEBRA2000311, FEBRA2000321, FEBRA2000377, FEBRA2000378, FEBRA2000391, FEBRA2000394, FEBRA2000397, FEBRA2000399, FEBRA2000404, FEBRA2000409, FEBRA2000415, FEBRA2000436, FEBRA2000438, FEBRA2000454, FEBRA2000468, FEBRA2000491, FEBRA2000504, FEBRA2000510, FEBRA2000532, FEBRA2000575, FEBRA2000656, FEBRA2000659, FEBRA2000690, FEBRA2000727, FEBRA2000734, FEBRA2000782, FEBRA2000790, FEBRA2000803, FEBRA2000805, FEBRA2000809, FEBRA2000856, FEBRA2000862, FEBRA2000881, FEBRA2000909, FEBRA2000917, FEBRA2000928, FEBRA2000936, FEBRA2000937, FEBRA2000959, FEBRA2000972, FEBRA2001012, FEBRA2001020, FEBRA2001093, FEBRA2001124, FEBRA2001133, FEBRA2001161, FEBRA2001175, FEBRA2001217, FEBRA2001267, FEBRA2001351, FEBRA2001383, FEBRA2001438, FEBRA2001487, FEBRA2001523, FEBRA2001561, FEBRA2001584, FEBRA2001590, FEBRA2001610, FEBRA2001620, FEBRA2001659, FEBRA2001705, FEBRA2001752, FEBRA2001772, FEBRA2001790, FEBRA2001828, FEBRA2001914, FEBRA2001989, FEBRA2002009, FEBRA2002086, FEBRA2002109, FEBRA2002191, FEBRA2002260, FEBRA2002399, FEBRA2002410, FEBRA2002429, FEBRA2002508, FEBRA2002525, FEBRA2002527, FEBRA2002552, FEBRA2002574, FEBRA2002601, FEBRA2002628, FEBRA2002662, FEBRA2002682, FEBRA2002727, FEBRA2002783, FEBRA2002818, FEBRA2002858, FEBRA2002882, FEBRA2002897, FEBRA2002908, FEBRA2002962, FEBRA2002986, FEBRA2003054, FEBRA2003155, FEBRA2003163, FEBRA2003181, FEBRA2003198, FEBRA2003253, FEBRA2003275, FEBRA2003308, FEBRA2003327, FEBRA2003429, FEBRA2003454, FEBRA2003468, FEBRA2003520, FEBRA2003524, FEBRA2003541, FEBRA2003675, FEBRA2003711, FEBRA2003822, FEBRA2003897, FEBRA2003907, FEBRA2004023, FEBRA2004026, FEBRA2004029, FEBRA2004053, FEBRA2004056, FEBRA2004110, FEBRA2004191, FEBRA2004202, FEBRA2004237, FEBRA2004268, FEBRA2004329, FEBRA2004331, FEBRA2004412, FEBRA2004443, FEBRA2004538, FEBRA2004620, FEBRA2004651, FEBRA2004767, FEBRA2004813, FEBRA2004840, FEBRA2004852, FEBRA2004867, FEBRA2004914, FEBRA2004933, FEBRA2004987, FEBRA2005014, FEBRA2005036, FEBRA2005079, FEBRA2005114, FEBRA2005216, FEBRA2005377, FEBRA2005380, FEBRA2005458, FEBRA2005701, FEBRA2005726, FEBRA2005734, FEBRA2005778, FEBRA2005787, FEBRA2005998, FEBRA2006061, FEBRA2006112, FEBRA2006150, FEBRA2006165, FEBRA2006315, FEBRA2006346, FEBRA2006354, FEBRA2006379, FEBRA2006396, FEBRA2006409, FEBRA2006418, FEBRA2006427, FEBRA2006476, FEBRA2006491, FEBRA2006664, FEBRA2006667, FEBRA2006726, FEBRA2006736, FEBRA2006793, FEBRA2006873, FEBRA2006942, FEBRA2006977, FEBRA2007017, FEBRA2007200, FEBRA2007247, FEBRA2007280, FEBRA2007414, FEBRA2007436, FEBRA2007449, FEBRA2007458, FEBRA2007566, FEBRA2007620, FEBRA2007708, FEBRA2007714, FEBRA2007793, FEBRA2007931, FEBRA2008009, FEBRA2008134, FEBRA2008135, FEBRA2008159, FEBRA2008165, FEBRA2008172, FEBRA2008265, FEBRA2008282, FEBRA2008311, FEBRA2008341, FEBRA2008459, FEBRA2008468, FEBRA2008475, FEBRA2008481, FEBRA2008542, FEBRA2008660, FEBRA2008681, FEBRA2008692, FEBRA2008741, FEBRA2008836, FEBRA2008859, FEBRA2008866, FEBRA2008881, FEBRA2008928, FEBRA2008983, FEBRA2009016, FEBRA2009029, FEBRA2009074, FEBRA2009117, FEBRA2009120, FEBRA2009162, FEBRA2009240, FEBRA2009265, FEBRA2009276, FEBRA2009327, FEBRA2009385, FEBRA2009416, FEBRA2009437, FEBRA2009478, FEBRA2009507, FEBRA2009541, FEBRA2009567, FEBRA2009731, FEBRA2009754, FEBRA2009780, FEBRA2010141, FEBRA2010299, FEBRA2010484, FEBRA2010802, FEBRA2011063, FEBRA2011090, FEBRA2011356, FEBRA2011392, FEBRA2011414, FEBRA2011593, FEBRA2011665, FEBRA2012090, FEBRA2012120, FEBRA2012195, FEBRA2012397, FEBRA2012418, FEBRA2012507, FEBRA2012625, FEBRA2013019, FEBRA2013069, FEBRA2013274, FEBRA2013465, FEBRA2013570, FEBRA2013905, FEBRA2014010, FEBRA2014122, FEBRA2014198, FEBRA2014213, FEBRA2014443, FEBRA2014578, FEBRA2014939, FEBRA2015076, FEBRA2015175, FEBRA2015292, FEBRA2015588, FEBRA2016112, FEBRA2016621, FEBRA2016654, FEBRA2016739, FEBRA2017098, FEBRA2017138, FEBRA2017154, FEBRA2017200, FEBRA2017223, FEBRA2017333, FEBRA2017502, FEBRA2017736, FEBRA2017780, FEBRA2017811, FEBRA2017850, FEBRA2018051, FEBRA2018203, FEBRA2018407, FEBRA2018433, FEBRA2018476, FEBRA2018746, FEBRA2019172, FEBRA2019298, FEBRA2019389, FEBRA2019457, FEBRA2019519, FEBRA2019582, FEBRA2019637, FEBRA2019663, FEBRA2019690, FEBRA2020406, FEBRA2020566, FEBRA2020582, FEBRA2020668, FEBRA2020801, FEBRA2021032, FEBRA2021134, FEBRA2021339, FEBRA2021431, FEBRA2021497, FEBRA2021550, FEBRA2021571, FEBRA2021636, FEBRA2021864, FEBRA2021892, FEBRA2021908, FEBRA2021966, FEBRA2022148, FEBRA2022204, FEBRA2022255, FEBRA2022322, FEBRA2022601, FEBRA2022729, FEBRA2022787, FEBRA2022911, FEBRA2022956, FEBRA2022963, FEBRA2022972, FEBRA2023285, FEBRA2023351, FEBRA2023399, FEBRA2023498, FEBRA2023550, FEBRA2023721, FEBRA2023989, FEBRA2023990, FEBRA2024150, FEBRA2024343, FEBRA2024693, FEBRA2024727, FEBRA2024744, FEBRA2024797, FEBRA2024987, FEBRA2025249, FEBRA2025463, FEBRA2025477, FEBRA2026474, FEBRA2026582, FEBRA2026629, FEBRA2026769, FEBRA2026879, FEBRA2026890, FEBRA2026977, FEBRA2026984, FEBRA2027082, FEBRA2027297, FEBRA2027352, FEBRA2027364, FEBRA2027609, FEBRA2028158, FEBRA2028222, FEBRA2028366, FEBRA2028457, FEBRA2028477, FEHRT2000325, FEHRT2000364, FEKID1000018, FELIV1000101, FELIV1000137, FELIV1000164, FELNG2000241, HCASM1000021, HCASM1000050, HCASM1000061, HCASM1000130, HCASM2000156, HCASM2000202, HCASM2000266, HCASM2000307, HCASM2000534, HCASM2000536, HCASM2000560, HCASM2000871, HCASM2001285, HCASM2001810, HCASM2001866, HCASM2001890, HCASM2002148, HCASM2002502, HCASM2002754, HCASM2002918, HCASM2003018, HCASM2003099, HCASM2003212, HCASM2003237, HCASM2003357, HCASM2003415, HCASM2006131, HCASM2006338, HCASM2006359, HCASM2006632, HCASM2007317, HCASM2007737, HCASM2007773, HCASM2008154, HCASM2008536, HCASM2009405, HCASM2009424, HCASM2009463, HCASM2009588, HCHON1000142, HCHON1000176, HCHON2000038, HCHON2000100, HCHON2000156, HCHON2000199, HCHON2000265, HCHON2000271, HCHON2000315, HCHON2000323, HCHON2000344, HCHON2000373, HCHON2000395, HCHON2000417, HCHON2000418, HCHON2000503, HCHON2000508, HCHON2000660, HCHON2000673, HCHON2000676, HCHON2000699, HCHON2000705, HCHON2000817, HCHON2000818, HCHON2000819, HCHON2000832, HCHON2000851, HCHON2000898, HCHON2000935, HCHON2000942, HCHON2000956, HCHON2000994, HCHON2001050, HCHON2001110, HCHON2001116, HCHON2001161, HCHON2001214, HCHON2001233, HCHON2001269, HCHON2001450, HCHON2001453, HCHON2001497, HCHON2001505, HCHON2001519, HCHON2001523, HCHON2001546, HCHON2001548, HCHON2001577, HCHON2001598, HCHON2001604, HCHON2001607, HCHON2001646, HCHON2001712, HCHON2001768, HCHON2002123, HCHON2002194, HCHON2002241, HCHON2002354, HCHON2002496, HCHON2002770, HCHON2002964, HCHON2002971, HCHON2003131, HCHON2003134, HCHON2003327, HCHON2003513, HCHON2003532, HCHON2003642, HCHON2003659, HCHON2003676, HCHON2004007, HCHON2004279, HCHON2004359, HCHON2004531, HCHON2004776, HCHON2004858, HCHON2005048, HCHON2005118, HCHON2005166, HCHON2005802, HCHON2005987, HCHON2006459, HCHON2006714, HCHON2006841, HCHON2006871, HCHON2007046, HCHON2007482, HCHON2007650, HCHON2007674, HCHON2007774, HCHON2007881, HCHON2008112, HCHON2008239, HCHON2008444, HCHON2008582, HCHON2008672, HCHON2008856, HCHON2008871, HCHON2008989, HCHON2009191, HCHON2009384, HCHON2009749, HCHON2009766, HCHON2009795, HCHON2010074, HEART1000010, HEART1000088, HEART1000099, HEART1000102, HEART1000132, HEART1000139, HEART1000151, HEART1000173, HEART2000024, HEART2000035, HEART2000099, HEART2000298, HEART2000306, HEART2000309, HEART2000411, HEART2000418, HEART2000448, HEART2000492, HEART2000506, HEART2000520, HEART2000568, HEART2000611, HEART2001680, HEART2001756, HEART2002129, HEART2002184, HEART2002220, HEART2002432, HEART2002531, HEART2002598, HEART2002717, HEART2003027, HEART2003432, HEART2003440, HEART2003781, HEART2003836, HEART2004570, HEART2004764, HEART2004931, HEART2004940, HEART2004941, HEART2004980, HEART2005244, HEART2005310, HEART2005581, HEART2005610, HEART2006131, HEART2006310, HEART2006334, HEART2006487, HEART2006557, HEART2006787, HEART2006789, HEART2006909, HEART2007443, HEART2007767, HEART2008108, HEART2008111, HEART2008257, HEART2008994, HEART2009599, HEART2009680, HEART2010391, HEART2010492, HEART2010495, HELAC2000158, HELAC2000301, HHDPC1000001, HHDPC2000070, HHDPC2000102, HHDPC2000315, HHDPC2000462, HHDPC2000572, HHDPC2000656, HHDPC2000692, HHDPC2001337, HHDPC2001432, HHDPC2001896, HHDPC2002963, HHDPC2003049, HHDPC2003113, HHDPC2003381, HHDPC2003472, HHDPC2004757, HHDPC2005185, HHDPC2005513, HHDPC2005742, HHDPC2006460, HHDPC2006862, HHDPC2006927, HHDPC2007302, HHDPC2008123, HHDPC2008185, HHDPC2008279, HHDPC2008297, HHDPC2008414, HHDPC2008474, HHDPC2008843, HHDPC2009114, HHDPC2009178, HHDPC2009208, HHDPC2009272, HLUNG1000017, HLUNG1000024, HLUNG1000030, HLUNG1000034, HLUNG1000037, HLUNG1000053, HLUNG1000064, HLUNG1000076, HLUNG1000084, HLUNG1000091, HLUNG1000099, HLUNG1000104, HLUNG1000105, HLUNG1000110, HLUNG1000151, HLUNG1000169, HLUNG2000004, HLUNG2000014, HLUNG2000027, HLUNG2000068, HLUNG2000116, HLUNG2000125, HLUNG2000130, HLUNG2000142, HLUNG2000174, HLUNG2000176, HLUNG2000217, HLUNG2000255, HLUNG2000281, HLUNG2000340, HLUNG2000362, HLUNG2000363, HLUNG2000431, HLUNG2000480, HLUNG2000489, HLUNG2000549, HLUNG2000557, HLUNG2000570, HLUNG2000761, HLUNG2000777, HLUNG2000870, HLUNG2000926, HLUNG2000950, HLUNG2000955, HLUNG2000970, HLUNG2001013, HLUNG2001126, HLUNG2001144, HLUNG2001214, HLUNG2001507, HLUNG2001633, HLUNG2001677, HLUNG2001712, HLUNG2001814, HLUNG2002006, HLUNG2002050, HLUNG2002059, HLUNG2002085, HLUNG2002145, HLUNG2002295, HLUNG2002303, HLUNG2002334, HLUNG2002405, HLUNG2002429, HLUNG2002562, HLUNG2002659, HLUNG2002707, HLUNG2002942, HLUNG2002949, HLUNG2002958, HLUNG2002982, HLUNG2003049, HLUNG2003061, HLUNG2003162, HLUNG2003246, HLUNG2003306, HLUNG2003331, HLUNG2003335, HLUNG2003378, HLUNG2003497, HLUNG2003691, HLUNG2003710, HLUNG2003714, HLUNG2003716, HLUNG2003778, HLUNG2003833, HLUNG2003872, HLUNG2003918, HLUNG2003991, HLUNG2004014, HLUNG2004154, HLUNG2004217, HLUNG2004273, HLUNG2004388, HLUNG2004416, HLUNG2004521, HLUNG2004684, HLUNG2004707, HLUNG2004774, HLUNG2004775, HLUNG2005012, HLUNG2005030, HLUNG2005045, HLUNG2005076, HLUNG2005133, HLUNG2005203, HLUNG2005479, HLUNG2005524, HLUNG2005656, HLUNG2005738, HLUNG2005774, HLUNG2005813, HLUNG2005924, HLUNG2006026, HLUNG2006067, HLUNG2006094, HLUNG2006370, HLUNG2006397, HLUNG2006599, HLUNG2006614, HLUNG2006671, HLUNG2006781, HLUNG2006843, HLUNG2006852, HLUNG2006935, HLUNG2007041, HLUNG2007163, HLUNG2007210, HLUNG2007219, HLUNG2007245, HLUNG2007433, HLUNG2007931, HLUNG2008066, HLUNG2008225, HLUNG2008235, HLUNG2008247, HLUNG2008333, HLUNG2008348, HLUNG2008384, HLUNG2008396, HLUNG2008439, HLUNG2008479, HLUNG2008480, HLUNG2008521, HLUNG2008637, HLUNG2008833, HLUNG2008875, HLUNG2008885, HLUNG2008958, HLUNG2008959, HLUNG2009215, HLUNG2009253, HLUNG2009303, HLUNG2009413, HLUNG2009729, HLUNG2010181, HLUNG2010464, HLUNG2010562, HLUNG2010845, HLUNG2011041, HLUNG2011298, HLUNG2011833, HLUNG2012049, HLUNG2012287, HLUNG2012315, HLUNG2012546, HLUNG2012600, HLUNG2012727, HLUNG2013097, HLUNG2013204, HLUNG2013304, HLUNG2013350, HLUNG2013622, HLUNG2013643, HLUNG2013784, HLUNG2013851, HLUNG2014262, HLUNG2014288, HLUNG2014449, HLUNG2014821, HLUNG2015418, HLUNG2015548, HLUNG2015578, HLUNG2015617, HLUNG2016022, HLUNG2016862, HLUNG2017286, HLUNG2017307, HLUNG2017350, HLUNG2017546, HLUNG2017806, HLUNG2018029, HLUNG2018282, HLUNG2018626, HLUNG2019058, HSYRA1000131, HSYRA1000137, HSYRA1000148, HSYRA2000044, HSYRA2000135, HSYRA2000221, HSYRA2000237, HSYRA2000253, HSYRA2000371, HSYRA2000424, HSYRA2000507, HSYRA2000510, HSYRA2000605, HSYRA2000706, HSYRA2000760, HSYRA2000792, HSYRA2000832, HSYRA2000927, HSYRA2001003, HSYRA2001103, HSYRA2001142, HSYRA2001153, HSYRA2001225, HSYRA2001255, HSYRA2001332, HSYRA2001420, HSYRA2001552, HSYRA2001567, HSYRA2001580, HSYRA2001631, HSYRA2002103, HSYRA2002590, HSYRA2002741, HSYRA2003168, HSYRA2004550, HSYRA2004858, HSYRA2005456, HSYRA2005496, HSYRA2005970, HSYRA2006049, HSYRA2006873, HSYRA2007241, HSYRA2007338, HSYRA2007650, HSYRA2007667, HSYRA2008154, HSYRA2008714, HSYRA2009102, IMR321000155, IMR321000161, IMR321000165, IMR321000193, IMR321000207, IMR321000230, IMR322000010, IMR322000107, IMR322000164, IMR322000178, IMR322000374, IMR322000379, IMR322000383, IMR322000418, IMR322000656, IMR322000672, IMR322000742, IMR322000791, IMR322000811, IMR322000859, IMR322000863, IMR322000917, IMR322000919, IMR322000953, IMR322000973, IMR322000984, IMR322001018, IMR322001049, IMR322001167, IMR322001245, IMR322001318, IMR322001322, IMR322001438, IMR322001452, IMR322001491, IMR322001534, IMR322001665, IMR322001670, IMR322001724, IMR322002110, IMR322002470, IMR322003675, IMR322004768, IMR322005293, IMR322005833, IMR322006012, IMR322006222, IMR322006495, IMR322006520, IMR322006886, IMR322006947, IMR322007078, IMR322007225, IMR322007704, IMR322008651, IMR322009710, IMR322009807, IMR322010295, IMR322010953, IMR322011689, IMR322012314, IMR322012529, IMR322013053, IMR322013396, IMR322013731, IMR322015523, IMR322016146, IMR322017049, IMR322018117, IMR322018192, KIDNE1000008, KIDNE1000012, KIDNE1000015, KIDNE1000028, KIDNE1000036, KIDNE1000064, KIDNE1000121, KIDNE1000143, KIDNE1000152, KIDNE2000026, KIDNE2000041, KIDNE2000046, KIDNE2000051, KIDNE2000070, KIDNE2000167, KIDNE2000174, KIDNE2000192, KIDNE2000227, KIDNE2000244, KIDNE2000245, KIDNE2000287, KIDNE2000328, KIDNE2000335, KIDNE2000349, KIDNE2000375, KIDNE2000394, KIDNE2000493, KIDNE2000510, KIDNE2000513, KIDNE2000519, KIDNE2000555, KIDNE2000624, KIDNE2000665, KIDNE2000678, KIDNE2000717, KIDNE2000721, KIDNE2000722, KIDNE2000777, KIDNE2000801, KIDNE2000832, KIDNE2000833, KIDNE2000846, KIDNE2000867, KIDNE2001140, KIDNE2001269, KIDNE2001361, KIDNE2001373, KIDNE2001713, KIDNE2001802, KIDNE2001840, KIDNE2001847, KIDNE2001857, KIDNE2001873, KIDNE2001897, KIDNE2001931, KIDNE2001979, KIDNE2002015, KIDNE2002162, KIDNE2002168, KIDNE2002198, KIDNE2002262, KIDNE2002265, KIDNE2002438, KIDNE2002483, KIDNE2002768, KIDNE2002795, KIDNE2002839, KIDNE2002845, KIDNE2002872, KIDNE2002882, KIDNE2002980, KIDNE2002991, KIDNE2003185, KIDNE2003188, KIDNE2003233, KIDNE2003316, KIDNE2003335, KIDNE2003357, KIDNE2003373, KIDNE2003377, KIDNE2003507, KIDNE2003752, KIDNE2003764, KIDNE2003837, KIDNE2003994, KIDNE2004034, KIDNE2004054, KIDNE2004084, KIDNE2004095, KIDNE2004115, KIDNE2004233, KIDNE2004262, KIDNE2004279, KIDNE2004294, KIDNE2004295, KIDNE2004305, KIDNE2004344, KIDNE2004394, KIDNE2004411, KIDNE2004519, KIDNE2004520, KIDNE2004531, KIDNE2004534, KIDNE2004562, KIDNE2004579, KIDNE2004626, KIDNE2004681, KIDNE2004828, KIDNE2004846, KIDNE2004864, KIDNE2004879, KIDNE2004981, KIDNE2004985, KIDNE2004999, KIDNE2005038, KIDNE2005062, KIDNE2005266, KIDNE2005296, KIDNE2005321, KIDNE2005327, KIDNE2005336, KIDNE2005400, KIDNE2005424, KIDNE2005477, KIDNE2005526, KIDNE2005603, KIDNE2005629, KIDNE2005781, KIDNE2005798, KIDNE2005854, KIDNE2005908, KIDNE2006053, KIDNE2006062, KIDNE2006092, KIDNE2006145, KIDNE2006149, KIDNE2006210, KIDNE2006299, KIDNE2006334, KIDNE2006353, KIDNE2006376, KIDNE2006378, KIDNE2006652, KIDNE2006687, KIDNE2006733, KIDNE2006775, KIDNE2006811, KIDNE2006820, KIDNE2006880, KIDNE2007005, KIDNE2007040, KIDNE2007077, KIDNE2007186, KIDNE2007222, KIDNE2007356, KIDNE2007422, KIDNE2007569, KIDNE2007810, KIDNE2007811, KIDNE2007910, KIDNE2007944, KIDNE2008022, KIDNE2008072, KIDNE2008116, KIDNE2008117, KIDNE2008218, KIDNE2008315, KIDNE2008378, KIDNE2008446, KIDNE2008473, KIDNE2008480, KIDNE2008649, KIDNE2008697, KIDNE2008788, KIDNE2008795, KIDNE2008824, KIDNE2008832, KIDNE2008869, KIDNE2008975, KIDNE2009019, KIDNE2009109, KIDNE2009180, KIDNE2009191, KIDNE2009332, KIDNE2009426, KIDNE2009467, KIDNE2009490, KIDNE2009553, KIDNE2009628, KIDNE2009647, KIDNE2009676, KIDNE2009723, KIDNE2010007, KIDNE2010052, KIDNE2010084, KIDNE2010137, KIDNE2010151, KIDNE2010264, KIDNE2010271, KIDNE2010419, KIDNE2010574, KIDNE2010674, KIDNE2010739, KIDNE2010762, KIDNE2010863, KIDNE2010973, KIDNE2010989, KIDNE2011200, KIDNE2011508, KIDNE2011532, KIDNE2011635, KIDNE2011752, KIDNE2011782, KIDNE2011858, KIDNE2012009, KIDNE2012025, KIDNE2012188, KIDNE2012291, KIDNE2012316, KIDNE2012361, KIDNE2012453, KIDNE2012563, KIDNE2012601, KIDNE2012613, KIDNE2012745, KIDNE2012775, KIDNE2012784, KIDNE2012945, KIDNE2013045, KIDNE2013095, KIDNE2013158, KIDNE2013218, KIDNE2013263, KIDNE2013346, KIDNE2013388, KIDNE2013413, KIDNE2013489, KIDNE2013639, KIDNE2013731, KIDNE2013734, KIDNE2013775, KIDNE2013801, KIDNE2013866, KIDNE2014087, KIDNE2014112, KIDNE2014119, KIDNE2014170, KIDNE2014184, KIDNE2014268, KIDNE2014298, KIDNE2014325, KIDNE2014415, KIDNE2014489, KIDNE2014496, KIDNE2014661, KIDNE2014717, KIDNE2014789, KIDNE2014808, KIDNE2014890, KIDNE2014978, KIDNE2015073, KIDNE2015221, KIDNE2015244, KIDNE2015313, KIDNE2015483, KIDNE2015515, KIDNE2015546, KIDNE2015556, KIDNE2015598, KIDNE2015660, KIDNE2015710, KIDNE2015987, KIDNE2016000, KIDNE2016036, KIDNE2016096, KIDNE2016101, KIDNE2016142, KIDNE2016188, KIDNE2016388, KIDNE2016464, KIDNE2016539, KIDNE2016570, KIDNE2016918, KIDNE2017007, KIDNE2017052, KIDNE2017151, KIDNE2017153, KIDNE2017315, KIDNE2017332, KIDNE2017454, KIDNE2017603, KIDNE2017956, KIDNE2018071, KIDNE2018166, KIDNE2018167, KIDNE2018217, KIDNE2018254, KIDNE2018268, KIDNE2018269, KIDNE2018287, KIDNE2018294, KIDNE2018462, KIDNE2018617, KIDNE2018678, KIDNE2018727, KIDNE2018863, KIDNE2018891, KIDNE2018989, KIDNE2018996, KIDNE2019074, KIDNE2019187, LIVER1000050, LIVER1000055, LIVER1000058, LIVER1000063, LIVER1000067, LIVER1000073, LIVER1000082, LIVER1000099, LIVER1000111, LIVER1000139, LIVER1000155, LIVER1000165, LIVER1000175, LIVER1000224, LIVER1000278, LIVER1000303, LIVER1000397, LIVER1000421, LIVER1000433, LIVER1000479, LIVER1000482, LIVER1000542, LIVER2000003, LIVER2000037, LIVER2000158, LIVER2000216, LIVER2000237, LIVER2000247, LIVER2000360, LIVER2000446, LIVER2000515, LIVER2000592, LIVER2000626, LIVER2000682, LIVER2000769, LIVER2000775, LIVER2001051, LIVER2001076, LIVER2001099, LIVER2001113, LIVER2001164, LIVER2001191, LIVER2001265, LIVER2001329, LIVER2001389, LIVER2001461, LIVER2001539, LIVER2002644, LIVER2002660, LIVER2002702, LIVER2003008, LIVER2003065, LIVER2003234, LIVER2003511, LIVER2003524, LIVER2003568, LIVER2003581, LIVER2003800, LIVER2003854, LIVER2004074, LIVER2004392, LIVER2004514, LIVER2004565, LIVER2005198, LIVER2005218, LIVER2005376, LIVER2005385, LIVER2005512, LIVER2005520, LIVER2005527, LIVER2005544, LIVER2005625, LIVER2005728, LIVER2005981, LIVER2006006, LIVER2006251, LIVER2006469, LIVER2006644, LIVER2006764, LIVER2007415, LIVER2007548, LIVER2007568, LIVER2007721, LIVER2007783, LIVER2008053, LIVER2008473, LIVER2008580, LIVER2008706, LIVER2008945, LIVER2008998, LIVER2009110, LIVER2009118, LIVER2009554, LYMPB1000141, LYMPB1000158, LYMPB2000083, MAMGL1000096, MAMGL1000132, MAMGL1000151, MAMGL1000173, MAMGL1000178, MAMGL1000182, MAMGL1000184, MESAN1000035, MESAN1000121, MESAN1000147, MESAN1000180, MESAN2000023, MESAN2000026, MESAN2000067, MESAN2000167, MESAN2000291, MESAN2000337, MESAN2000434, MESAN2000457, MESAN2000462, MESAN2000620, MESAN2000711, MESAN2000815, MESAN2000894, MESAN2000909, MESAN2001450, MESAN2001770, MESAN2001979, MESAN2001980, MESAN2002113, MESAN2002147, MESAN2002424, MESAN2002687, MESAN2002709, MESAN2002790, MESAN2002978, MESAN2003035, MESAN2003037, MESAN2003039, MESAN2003058, MESAN2003101, MESAN2003322, MESAN2003490, MESAN2003529, MESAN2003662, MESAN2003851, MESAN2004138, MESAN2004288, MESAN2004575, MESAN2005303, MESAN2005371, MESAN2005633, MESAN2005724, MESAN2005808, MESAN2005811, MESAN2006022, MESAN2006328, MESAN2006580, MESAN2006599, MESAN2006971, MESAN2007032, MESAN2007440, MESAN2007597, MESAN2008222, MESAN2008334, MESAN2008415, MESAN2008460, MESAN2008536, MESAN2008679, MESAN2008729, MESAN2008821, MESAN2009019, MESAN2009105, MESAN2009311, MESAN2009418, MESAN2009522, MESAN2010031, MESAN2010114, MESAN2010312, MESAN2010321, MESAN2010681, MESAN2011545, MESAN2011597, MESAN2011627, MESAN2011977, MESAN2012586, MESAN2012708, MESAN2012735, MESAN2013019, MESAN2013022, MESAN2013183, MESAN2013211, MESAN2013611, MESAN2013674, MESAN2013845, MESAN2013908, MESAN2013936, MESAN2014192, MESAN2014295, MESAN2014298, MESAN2014412, MESAN2014624, MESAN2015277, MESAN2015365, MESAN2015391, MESAN2015401, MESAN2015501, MESAN2015515, MESAN2015708, MESAN2016159, MESAN2016304, MESAN2016552, MESAN2016965, MESAN2017152, MESAN2017373, MESAN2017417, MESAN2018209, MESAN2018576, MESAN2018670, MESAN2018699, MESTC1000147, MESTC2000150, MESTC2000153, MESTC2000170, N1ESE2000698, NB9N41000121, NB9N41000135, NB9N41000146, NB9N42000104, NB9N42000122, NB9N42000196, NB9N42000314, NB9N42000495, NCRRP1000129, NESOP1000010, NESOP1000087, NESOP1000108, NESOP2000231, NESOP2000452, NESOP2000499, NESOP2000504, NESOP2000744, NESOP2001144, NESOP2001433, NESOP2001656, NESOP2001694, NESOP2001752, NESOP2002352, NESOP2002418, NESOP2002487, NESOP2002738, NESOP2002780, NETRP1000034, NETRP1000082, NETRP2000086, NETRP2000182, NETRP2000439, NHNPC1000034, NHNPC1000037, NHNPC1000084, NHNPC1000101, NHNPC1000124, NHNPC2000187, NHNPC2000212, NHNPC2000606, NHNPC2000877, NHNPC2001108, NHNPC2001223, NHNPC2001312, NHNPC2001816, NHNPC2002565, NHNPC2002749, NOVAR1000091, NOVAR1000102, NOVAR2000136, NOVAR2000352, NOVAR2000412, NOVAR2000710, NOVAR2000783, NOVAR2000962, NOVAR2001108, NOVAR2001620, NOVAR2001876, NOVAR2002039, NT2NE1000014, NT2NE1000023, NT2NE1000024, NT2NE1000059, NT2NE1000063, NT2NE1000083, NT2NE1000120, NT2NE1000122, NT2NE1000175, NT2NE1000185, NT2NE2000038, NT2NE2000054, NT2NE2000057, NT2NE2000064, NT2NE2000109, NT2NE2000137, NT2NE2000156, NT2NE2000222, NT2NE2000259, NT2NE2000284, NT2NE2000299, NT2NE2000353, NT2NE2000356, NT2NE2000369, NT2NE2000374, NT2NE2000390, NT2NE2000455, NT2NE2000470, NT2NE2000488, NT2NE2000517, NT2NE2000536, NT2NE2000546, NT2NE2000550, NT2NE2000586, NT2NE2000612, NT2NE2000658, NT2NE2000706, NT2NE2000802, NT2NE2000808, NT2NE2000864, NT2NE2000913, NT2NE2000950, NT2NE2000951, NT2NE2001005, NT2NE2001021, NT2NE2001142, NT2NE2001181, NT2NE2001188, NT2NE2001191, NT2NE2001247, NT2NE2001252, NT2NE2001324, NT2NE2001326, NT2NE2001372, NT2NE2001428, NT2NE2001432, NT2NE2001524, NT2NE2001530, NT2NE2001617, NT2NE2001623, NT2NE2001626, NT2NE2001634, NT2NE2001666, NT2NE2001677, NT2NE2001697, NT2NE2001698, NT2NE2001723, NT2NE2001725, NT2NE2001874, NT2NE2001889, NT2NE2001923, NT2NE2002100, NT2NE2002186, NT2NE2002285, NT2NE2002311, NT2NE2002620, NT2NE2002651, NT2NE2002732, NT2NE2002768, NT2NE2002791, NT2NE2002856, NT2NE2002870, NT2NE2003150, NT2NE2003252, NT2NE2003308, NT2NE2003309, NT2NE2003315, NT2NE2003393, NT2NE2003408, NT2NE2003457, NT2NE2003540, NT2NE2003571, NT2NE2003705, NT2NE2003752, NT2NE2004378, NT2NE2004490, NT2NE2004606, NT2NE2004716, NT2NE2004740, NT2NE2004787, NT2NE2004916, NT2NE2005035, NT2NE2005223, NT2NE2005276, NT2NE2005317, NT2NE2005323, NT2NE2005358, NT2NE2005371, NT2NE2005395, NT2NE2005441, NT2NE2005517, NT2NE2005537, NT2NE2005555, NT2NE2005676, NT2NE2005720, NT2NE2005784, NT2NE2005804, NT2NE2005821, NT2NE2005890, NT2NE2005921, NT2NE2005968, NT2NE2006087, NT2NE2006103, NT2NE2006217, NT2NE2006288, NT2NE2006382, NT2NE2006387, NT2NE2006427, NT2NE2006432, NT2NE2006458, NT2NE2006531, NT2NE2006659, NT2NE2006784, NT2NE2006813, NT2NE2006894, NT2NE2006942, NT2NE2006958, NT2NE2007052, NT2NE2007220, NT2NE2007425, NT2NE2007725, NT2NE2007727, NT2NE2007786, NT2NE2007877, NT2NE2007967, NT2NE2008017, NT2NE2008060, NT2NE2008077, NT2NE2008260, NT2NE2008378, NT2NE2008607, NT2NE2008639, NT2NE2008727, NT2NE2008783, NT2NE2008785, NT2NE2008803, NT2NE2008867, NT2NE2008961, NT2NE2008997, NT2NE2009138, NT2NE2009426, NT2NE2009608, NT2NE2009691, NT2NE2010105, NT2NE2010150, NT2NE2010400, NT2NE2010632, NT2NE2010633, NT2NE2010654, NT2NE2010781, NT2NE2010854, NT2NE2011033, NT2NE2011036, NT2NE2011107, NT2NE2011154, NT2NE2011411, NT2NE2011650, NT2NE2011684, NT2NE2011687, NT2NE2011691, NT2NE2011758, NT2NE2011823, NT2NE2011896, NT2NE2011998, NT2NE2012113, NT2NE2012199, NT2NE2012361, NT2NE2012448, NT2NE2012457, NT2NE2012493, NT2NE2012505, NT2NE2012533, NT2NE2012603, NT2NE2012747, NT2NE2012790, NT2NE2012847, NT2NE2013019, NT2NE2013081, NT2NE2013189, NT2NE2013217, NT2NE2013547, NT2NE2014013, NT2NE2014028, NT2NE2014113, NT2NE2014176, NT2NE2014221, NT2NE2014525, NT2NE2014650, NT2NE2014651, NT2NE2014681, NT2NE2014758, NT2NE2014869, NT2NE2014950, NT2NE2015061, NT2NE2015262, NT2NE2015275, NT2NE2015362, NT2NE2015480, NT2NE2015511, NT2NE2015565, NT2NE2015626, NT2NE2015747, NT2NE2015860, NT2NE2015885, NT2NE2016041, NT2NE2016419, NT2NE2016519, NT2NE2016608, NT2NE2016766, NT2NE2016774, NT2NE2016971, NT2NE2017259, NT2NE2017332, NT2NE2017397, NT2NE2017480, NT2NE2017508, NT2NE2017562, NT2NE2017590, NT2NE2017612, NT2NE2017721, NT2NE2017752, NT2NE2017792, NT2NE2017982, NT2NE2018165, NT2NE2018176, NT2NE2018180, NT2NE2018273, NT2NE2018376, NT2NE2018472, NT2NE2018490, NT2NE2018739, NT2NE2018916, NT2NE2019056, NT2NE2019076, NT2NE2019099, NT2RI1000027, NT2RI1000035, NT2RI1000164, NT2RI1000172, NT2RI2000004, NT2RI2000007, NT2RI2000117, NT2RI2000128, NT2RI2000133, NT2RI2000173, NT2RI2000187, NT2RI2000270, NT2RI2000276, NT2RI2000282, NT2RI2000313, NT2RI2000341, NT2RI2000348, NT2RI2000412, NT2RI2000421, NT2RI2000480, NT2RI2000575, NT2RI2000588, NT2RI2000597, NT2RI2000669, NT2RI2000688, NT2RI2000689, NT2RI2000704, NT2RI2000738, NT2RI2000822, NT2RI2000841, NT2RI2000865, NT2RI2000932, NT2RI2000987, NT2RI2001010, NT2RI2001017, NT2RI2001030, NT2RI2001083, NT2RI2001091, NT2RI2001167, NT2RI2001178, NT2RI2001235, NT2RI2001244, NT2RI2001307, NT2RI2001342, NT2RI2001385, NT2RI2001409, NT2RI2001410, NT2RI2001425, NT2RI2001449, NT2RI2001474, NT2RI2001519, NT2RI2001595, NT2RI2001624, NT2RI2001769, NT2RI2001782, NT2RI2001836, NT2RI2001866, NT2RI2002022, NT2RI2002041, NT2RI2002117, NT2RI2002120, NT2RI2002153, NT2RI2002179, NT2RI2002252, NT2RI2002260, NT2RI2002270, NT2RI2002334, NT2RI2002447, NT2RI2002481, NT2RI2002507, NT2RI2002517, NT2RI2002554, NT2RI2002564, NT2RI2002585, NT2RI2002729, NT2RI2002802, NT2RI2002852, NT2RI2002865, NT2RI2002923, NT2RI2002970, NT2RI2003019, NT2RI2003067, NT2RI2003184, NT2RI2003360, NT2RI2003383, NT2RI2003392, NT2RI2003399, NT2RI2003407, NT2RI2003419, NT2RI2003487, NT2RI2003667, NT2RI2003678, NT2RI2003884, NT2RI2003973, NT2RI2003993, NT2RI2004059, NT2RI2004079, NT2RI2004093, NT2RI2004136, NT2RI2004157, NT2RI2004190, NT2RI2004209, NT2RI2004284, NT2RI2004290, NT2RI2004312, NT2RI2004381, NT2RI2004442, NT2RI2004468, NT2RI2004618, NT2RI2004818, NT2RI2004840, NT2RI2004916, NT2RI2004962, NT2RI2004984, NT2RI2004985, NT2RI2005048, NT2RI2005061, NT2RI2005069, NT2RI2005087, NT2RI2005096, NT2RI2005115, NT2RI2005130, NT2RI2005166, NT2RI2005246, NT2RI2005315, NT2RI2005358, NT2RI2005473, NT2RI2005520, NT2RI2005621, NT2RI2005628, NT2RI2005647, NT2RI2005670, NT2RI2005710, NT2RI2005772, NT2RI2005966, NT2RI2006070, NT2RI2006081, NT2RI2006126, NT2RI2006127, NT2RI2006183, NT2RI2006257, NT2RI2006294, NT2RI2006345, NT2RI2006403, NT2RI2006445, NT2RI2006487, NT2RI2006506, NT2RI2006565, NT2RI2006659, NT2RI2006662, NT2RI2006667, NT2RI2006679, NT2RI2006682, NT2RI2006686, NT2RI2006716, NT2RI2006762, NT2RI2006788, NT2RI2006838, NT2RI2006853, NT2RI2006855, NT2RI2006973, NT2RI2007046, NT2RI2007048, NT2RI2007116, NT2RI2007214, NT2RI2007303, NT2RI2007334, NT2RI2007386, NT2RI2007406, NT2RI2007439, NT2RI2007469, NT2RI2007507, NT2RI2007629, NT2RI2007723, NT2RI2007729, NT2RI2007751, NT2RI2007754, NT2RI2007827, NT2RI2007853, NT2RI2007877, NT2RI2007879, NT2RI2007891, NT2RI2007956, NT2RI2007965, NT2RI2008007, NT2RI2008050, NT2RI2008188, NT2RI2008204, NT2RI2008221, NT2RI2008233, NT2RI2008455, NT2RI2008502, NT2RI2008598, NT2RI2008714, NT2RI2008801, NT2RI2008808, NT2RI2008841, NT2RI2008952, NT2RI2009005, NT2RI2009083, NT2RI2009101, NT2RI2009103, NT2RI2009144, NT2RI2009151, NT2RI2009215, NT2RI2009259, NT2RI2009289, NT2RI2009301, NT2RI2009517, NT2RI2009585, NT2RI2009595, NT2RI2009855, NT2RI2010283, NT2RI2010508, NT2RI2011422, NT2RI2011683, NT2RI2011803, NT2RI2012350, NT2RI2012990, NT2RI2013357, NT2RI2013373, NT2RI2014247, NT2RI2014551, NT2RI2014683, NT2RI2015239, NT2RI2016128, NT2RI2016134, NT2RI2017529, NT2RI2018363, NT2RI2018448, NT2RI2018883, NT2RI2018950, NT2RI2019751, NT2RI2019826, NT2RI2020390, NT2RI2020703, NT2RI2021463, NT2RI2022468, NT2RI2022584, NT2RI2023303, NT2RI2023671, NT2RI2024008, NT2RI2024460, NT2RI2024496, NT2RI2024935, NT2RI2025564, NT2RI2025565, NT2RI2025909, NT2RI2025957, NT2RI2025976, NT2RI2026758, NT2RI2027081, NT2RI2027157, NT2RI2027224, NT2RI2027323, NT2RI2027396, NT2RI2027484, NT2RI2027975, NT2RI2028213, NT2RI2028222, NT2RI2028537, NT2RI2028642, NT2RI3000174, NT2RI3000213, NT2RI3000423, NT2RI3000622, NT2RI3001132, NT2RI3001263, NT2RI3001279, NT2RI3001348, NT2RI3001458, NT2RI3001573, NT2RI3001967, NT2RI3002303, NT2RI3002557, NT2RI3003027, NT2RI3003031, NT2RI3003095, NT2RI3003104, NT2RI3003162, NT2RI3003362, NT2RI3003382, NT2RI3003409, NT2RI3004133, NT2RI3004381, NT2RI3005202, NT2RI3005416, NT2RI3005861, NT2RI3005928, NT2RI3006132, NT2RI3006171, NT2RI3006340, NT2RI3006376, NT2RI3006666, NT2RI3006796, NT2RI3007065, NT2RI3007095, NT2RI3007158, NT2RI3007167, NT2RI3007213, NT2RI3007443, NT2RI3007684, NT2RI3007757, NT2RI3007878, NT2RI3007978, NT2RI3008162, NT2RI3008179, NT2RI3008228, NT2RI3008442, NT2RI3008652, NT2RI3008697, NT2RI3008974, NT2RI3009158, NT2RI3009480, NT2RP6000005, NT2RP6000008, NT2RP6000032, NT2RP6000033, NT2RP6000059, NT2RP6000060, NT2RP6000086, NT2RP6000100, NT2RP6000119, NT2RP6000127, NT2RP6000130, NT2RP6000140, NT2RP6000150, NT2RP7000041, NT2RP7000086, NT2RP7000109, NT2RP7000112, NT2RP7000311, NT2RP7000359, NT2RP7000364, NT2RP7000380, NT2RP7000391, NT2RP7000425, NT2RP7000579, NT2RP7000812, NT2RP7000926, NT2RP7001074, NT2RP7001156, NT2RP7001319, NT2RP7001364, NT2RP7001475, NT2RP7001532, NT2RP7001591, NT2RP7001602, NT2RP7001678, NT2RP7001856, NT2RP7002028, NT2RP7002151, NT2RP7002163, NT2RP7002243, NT2RP7002282, NT2RP7002554, NT2RP7002603, NT2RP7002619, NT2RP7002650, NT2RP7002779, NT2RP7002829, NT2RP7002841, NT2RP7002978, NT2RP7002982, NT2RP7003025, NT2RP7003050, NT2RP7003055, NT2RP7003084, NT2RP7003091, NT2RP7003107, NT2RP7003134, NT2RP7003148, NT2RP7003261, NT2RP7003439, NT2RP7003511, NT2RP7003724, NT2RP7004027, NT2RP7004080, NT2RP7004114, NT2RP7004260, NT2RP7004358, NT2RP7004396, NT2RP7004541, NT2RP7004641, NT2RP7004656, NT2RP7004687, NT2RP7004722, NT2RP7004766, NT2RP7004961, NT2RP7004964, NT2RP7004975, NT2RP7005118, NT2RP7005205, NT2RP7005219, NT2RP7005323, NT2RP7005468, NT2RP7005493, NT2RP7005629, NT2RP7005631, NT2RP7005669, NT2RP7005750, NT2RP7005846, NT2RP7006160, NT2RP7006162, NT2RP7006296, NT2RP7006304, NT2RP7006374, NT2RP7006408, NT2RP7006457, NT2RP7006547, NT2RP7006601, NT2RP7006621, NT2RP7006636, NT2RP7006853, NT2RP7006887, NT2RP7006980, NT2RP7006995, NT2RP7007114, NT2RP7007221, NT2RP7007226, NT2RP7007269, NT2RP7007310, NT2RP7007359, NT2RP7007406, NT2RP7007480, NT2RP7007504, NT2RP7007580, NT2RP7007594, NT2RP7007643, NT2RP7007766, NT2RP7007925, NT2RP7007930, NT2RP7008013, NT2RP7008015, NT2RP7008133, NT2RP7008137, NT2RP7008142, NT2RP7008144, NT2RP7008360, NT2RP7008406, NT2RP7008435, NT2RP7008441, NT2RP7008454, NT2RP7008544, NT2RP7008550, NT2RP7008557, NT2RP7008623, NT2RP7008657, NT2RP7008720, NT2RP7008855, NT2RP7008863, NT2RP7009019, NT2RP7009030, NT2RP7009097, NT2RP7009168, NT2RP7009215, NT2RP7009236, NT2RP7009253, NT2RP7009267, NT2RP7009322, NT2RP7009363, NT2RP7009370, NT2RP7009397, NT2RP7009429, NT2RP7009439, NT2RP7009466, NT2RP7009502, NT2RP7009577, NT2RP7009743, NT2RP7009867, NT2RP7010109, NT2RP7010128, NT2RP7010235, NT2RP7010275, NT2RP7010521, NT2RP7010599, NT2RP7010817, NT2RP7011086, NT2RP7011132, NT2RP7011268, NT2RP7011318, NT2RP7011452, NT2RP7011570, NT2RP7011721, NT2RP7011909, NT2RP7012291, NT2RP7012516, NT2RP7013002, NT2RP7013374, NT2RP7013499, NT2RP7013729, NT2RP7013795, NT2RP7013999, NT2RP7014178, NT2RP7014348, NT2RP7014420, NT2RP7014583, NT2RP7014721, NT2RP7014743, NT2RP7014778, NT2RP7014906, NT2RP7015080, NT2RP7015431, NT2RP7015512, NT2RP7015676, NT2RP7015789, NT2RP7015996, NT2RP7016508, NT2RP7016622, NT2RP7016911, NT2RP7017139, NT2RP7017284, NT2RP7017365, NT2RP7017546, NT2RP7017567, NT2RP7017795, NT2RP7017971, NT2RP7018032, NT2RP7018126, NT2RP7018197, NT2RP7018206, NT2RP7018340, NT2RP7018586, NT2RP7018802, NT2RP7018871, NT2RP7019064, NT2RP7019273, NT2RP7019367, NT2RP7019445, NT2RP7019682, NT2RP7020112, NT2RP7020123, NT2RP7020343, NT2RP7020379, NT2RP8000137, NT2RP8000296, NT2RP8000435, NT2RP8000483, NT2RP8000521, NT2RP8000633, NT2RP8001363, NT2RP8001407, NT2RP8001584, NT2RP8001604, NT2RP8003490, NT2RP8003657, NT2RP8003787, NT2RP8004306, NT2RP8005546, NT2RP8006452, NT2RP8006521, NT2RP8007416, NT2RP8007503, NT2RP8008057, NT2RP8009248, NTONG1000006, NTONG1000047, NTONG1000052, NTONG1000075, NTONG1000087, NTONG1000123, NTONG1000130, NTONG1000161, NTONG1000172, NTONG1000213, NTONG1000214, NTONG1000246, NTONG1000247, NTONG1000257, NTONG2000040, NTONG2000231, NTONG2000334, NTONG2000363, NTONG2000413, NTONG2000492, NTONG2000499, NTONG2000531, NTONG2000583, NTONG2000800, NTONG2000858, NTONG2000966, NTONG2000985, NTONG2001014, NTONG2001079, NTONG2001157, NTONG2001173, NTONG2001220, NTONG2001222, NTONG2001362, NTONG2001532, NTONG2001587, NTONG2001619, NTONG2001642, NTONG2001657, NTONG2001676, NTONG2002278, NTONG2002582, NTONG2002948, NTONG2002970, NTONG2003158, NTONG2003210, NTONG2003316, NTONG2003409, NTONG2003805, NTONG2003839, NTONG2003852, NTONG2003897, NTONG2003928, NTONG2004308, NTONG2004521, NTONG2004690, NTONG2004806, NTONG2004829, NTONG2004844, NTONG2004918, NTONG2004991, NTONG2005062, NTONG2005086, NTONG2005137, NTONG2005153, NTONG2005265, NTONG2005277, NTONG2005363, NTONG2005480, NTONG2005497, NTONG2005577, NTONG2005657, NTONG2005822, NTONG2006099, NTONG2006187, NTONG2006301, NTONG2006324, NTONG2006354, NTONG2006440, NTONG2006484, NTONG2006501, NTONG2006646, NTONG2006709, NTONG2006783, NTONG2007020, NTONG2007034, NTONG2007249, NTONG2007517, NTONG2007522, NTONG2007693, NTONG2007756, NTONG2008093, NTONG2008365, NTONG2008522, NTONG2008672, NTONG2008862, NTONG2008939, NTONG2009060, NTONG2009068, NTONG2009229, NTONG2009233, NTONG2009468, OCBBF1000016, OCBBF1000042, OCBBF1000054, OCBBF1000067, OCBBF1000085, OCBBF1000091, OCBBF1000104, OCBBF1000118, OCBBF1000119, OCBBF1000122, OCBBF1000130, OCBBF1000138, OCBBF1000153, OCBBF1000175, OCBBF1000192, OCBBF1000254, OCBBF2000013, OCBBF2000287, OCBBF2000323, OCBBF2000452, OCBBF2000467, OCBBF2000677, OCBBF2000703, OCBBF2000719, OCBBF2000998, OCBBF2001075, OCBBF2001101, OCBBF2001124, OCBBF2001176, OCBBF2001186, OCBBF2001196, OCBBF2001252, OCBBF2001323, OCBBF2001389, OCBBF2001402, OCBBF2001473, OCBBF2001494, OCBBF2001527, OCBBF2001528, OCBBF2001681, OCBBF2001706, OCBBF2001749, OCBBF2001910, OCBBF2001961, OCBBF2001983, OCBBF2002124, OCBBF2002161, OCBBF2002357, OCBBF2002376, OCBBF2002615, OCBBF2002663, OCBBF2002805, OCBBF2002865, OCBBF2002920, OCBBF2003028, OCBBF2003091, OCBBF2003327, OCBBF2003543, OCBBF2003744, OCBBF2004038, OCBBF2004147, OCBBF2004168, OCBBF2004235, OCBBF2004385, OCBBF2004418, OCBBF2004478, OCBBF2004482, OCBBF2004567, OCBBF2004612, OCBBF2004647, OCBBF2004826, OCBBF2004866, OCBBF2004883, OCBBF2005066, OCBBF2005077, OCBBF2005343, OCBBF2005349, OCBBF2005373, OCBBF2005433, OCBBF2005476, OCBBF2005843, OCBBF2005901, OCBBF2006030, OCBBF2006058, OCBBF2006113, OCBBF2006154, OCBBF2006214, OCBBF2006241, OCBBF2006388, OCBBF2006438, OCBBF2006567, OCBBF2006624, OCBBF2006639, OCBBF2006849, OCBBF2006859, OCBBF2007039, OCBBF2007114, OCBBF2007121, OCBBF2007184, OCBBF2007194, OCBBF2007196, OCBBF2007238, OCBBF2007414, OCBBF2007428, OCBBF2007478, OCBBF2007485, OCBBF2007520, OCBBF2007555, OCBBF2007610, OCBBF2007622, OCBBF2007756, OCBBF2007931, OCBBF2007946, OCBBF2008116, OCBBF2008138, OCBBF2008283, OCBBF2008330, OCBBF2008366, OCBBF2008511, OCBBF2008520, OCBBF2008569, OCBBF2008586, OCBBF2008640, OCBBF2008691, OCBBF2008724, OCBBF2008760, OCBBF2008768, OCBBF2008770, OCBBF2008775, OCBBF2008790, OCBBF2008814, OCBBF2008822, OCBBF2009115, OCBBF2009391, OCBBF2009424, OCBBF2009571, OCBBF2009583, OCBBF2009603, OCBBF2009788, OCBBF2009926, OCBBF2010040, OCBBF2010281, OCBBF2010313, OCBBF2010404, OCBBF2010416, OCBBF2010420, OCBBF2010557, OCBBF2010604, OCBBF2010709, OCBBF2010792, OCBBF2010843, OCBBF2010863, OCBBF2010931, OCBBF2010945, OCBBF2010978, OCBBF2010989, OCBBF2011137, OCBBF2011177, OCBBF2011311, OCBBF2011625, OCBBF2011669, OCBBF2011685, OCBBF2011706, OCBBF2011722, OCBBF2011855, OCBBF2011872, OCBBF2011960, OCBBF2011981, OCBBF2012028, OCBBF2012139, OCBBF2012191, OCBBF2012320, OCBBF2012436, OCBBF2012525, OCBBF2012714, OCBBF2012755, OCBBF2012812, OCBBF2012821, OCBBF2012881, OCBBF2012990, OCBBF2013049, OCBBF2013091, OCBBF2013127, OCBBF2013208, OCBBF2013285, OCBBF2013319, OCBBF2013324, OCBBF2013507, OCBBF2013721, OCBBF2013883, OCBBF2013926, OCBBF2014052, OCBBF2014386, OCBBF2014707, OCBBF2014745, OCBBF2014828, OCBBF2014880, OCBBF2014928, OCBBF2015031, OCBBF2015081, OCBBF2015115, OCBBF2015232, OCBBF2015233, OCBBF2015285, OCBBF2015334, OCBBF2015335, OCBBF2015506, OCBBF2015599, OCBBF2015645, OCBBF2015659, OCBBF2015751, OCBBF2015797, OCBBF2015980, OCBBF2016038, OCBBF2016405, OCBBF2016467, OCBBF2016590, OCBBF2016591, OCBBF2016612, OCBBF2016689, OCBBF2016690, OCBBF2016841, OCBBF2016928, OCBBF2017055, OCBBF2017069, OCBBF2017325, OCBBF2017458, OCBBF2017489, OCBBF2017516, OCBBF2017665, OCBBF2017815, OCBBF2018012, OCBBF2018014, OCBBF2018167, OCBBF2018229, OCBBF2018362, OCBBF2018380, OCBBF2018563, OCBBF2018663, OCBBF2018687, OCBBF2018828, OCBBF2018934, OCBBF2019108, OCBBF2019195, OCBBF2019327, OCBBF2019684, OCBBF2019761, OCBBF2019823, OCBBF2020048, OCBBF2020318, OCBBF2020343, OCBBF2020453, OCBBF2020801, OCBBF2020825, OCBBF2020838, OCBBF2021020, OCBBF2021214, OCBBF2021323, OCBBF2021518, OCBBF2021788, OCBBF2022351, OCBBF2022573, OCBBF2022574, OCBBF2023162, OCBBF2023598, OCBBF2023643, OCBBF2024463, OCBBF2024589, OCBBF2024779, OCBBF2024781, OCBBF2025028, OCBBF2025115, OCBBF2025198, OCBBF2025451, OCBBF2025458, OCBBF2025527, OCBBF2025631, OCBBF2025730, OCBBF2026025, OCBBF2026035, OCBBF2026144, OCBBF2026368, OCBBF2026645, OCBBF2026649, OCBBF2026690, OCBBF2026981, OCBBF2027148, OCBBF2027197, OCBBF2027354, OCBBF2027423, OCBBF2027478, OCBBF2027481, OCBBF2027511, OCBBF2027661, OCBBF2027728, OCBBF2027782, OCBBF2027868, OCBBF2028173, OCBBF2028421, OCBBF2029471, OCBBF2029901, OCBBF2030329, OCBBF2030354, OCBBF2030517, OCBBF2030574, OCBBF2030708, OCBBF2030927, OCBBF2030963, OCBBF2031167, OCBBF2031198, OCBBF2031366, OCBBF2032152, OCBBF2032274, OCBBF2032539, OCBBF2032590, OCBBF2032599, OCBBF2032611, OCBBF2032671, OCBBF2033413, OCBBF2033869, OCBBF2033948, OCBBF2034333, OCBBF2034529, OCBBF2034637, OCBBF2034906, OCBBF2035110, OCBBF2035214, OCBBF2035390, OCBBF2035564, OCBBF2035658, OCBBF2035823, OCBBF2035885, OCBBF2035916, OCBBF2036019, OCBBF2036031, OCBBF2036225, OCBBF2036476, OCBBF2036752, OCBBF2037068, OCBBF2037340, OCBBF2037398, OCBBF2037464, OCBBF2037547, OCBBF2037598, OCBBF2037638, OCBBF2038238, OCBBF2038285, OCBBF3000097, OCBBF3000213, OCBBF3000372, OCBBF3000380, OCBBF3000743, OCBBF3000830, OCBBF3001076, OCBBF3001202, OCBBF3001616, OCBBF3002553, OCBBF3002600, OCBBF3002654, OCBBF3003209, OCBBF3003592, OCBBF3003745, OCBBF3003761, OCBBF3004264, OCBBF3004314, OCBBF3004972, OCBBF3005330, OCBBF3005597, OCBBF3005843, OCBBF3006802, OCBBF3006986, OCBBF3007078, OCBBF3007704, OCBBF3008392, OCBBF3009192, OCBBF3009244, OCBBF3009279, PANCR1000012, PANCR1000021, PANCR1000081, PANCR1000086, PANCR1000091, PANCR1000185, PEBLM1000024, PEBLM1000029, PEBLM1000034, PEBLM1000062, PEBLM1000066, PEBLM1000068, PEBLM1000071, PEBLM1000083, PEBLM1000147, PEBLM1000174, PEBLM1000180, PEBLM2000112, PEBLM2000126, PEBLM2000170, PEBLM2000180, PEBLM2000213, PEBLM2000248, PEBLM2000270, PEBLM2000321, PEBLM2000333, PEBLM2000338, PEBLM2000479, PEBLM2000502, PEBLM2001312, PEBLM2001465, PEBLM2001488, PEBLM2001803, PEBLM2002432, PEBLM2002594, PEBLM2002749, PEBLM2002887, PEBLM2003426, PEBLM2003765, PEBLM2003935, PEBLM2004015, PEBLM2004216, PEBLM2004290, PEBLM2004497, PEBLM2005282, PEBLM2005615, PEBLM2005632, PEBLM2005697, PEBLM2006031, PEBLM2006036, PEBLM2006049, PEBLM2006113, PEBLM2006135, PEBLM2006215, PEBLM2006298, PEBLM2006709, PEBLM2006912, PEBLM2007112, PEBLM2007140, PEBLM2007188, PEBLM2007296, PEBLM2007437, PEBLM2007447, PEBLM2007598, PEBLM2007832, PEBLM2007834, PEBLM2008106, PEBLM2008576, PEBLM2008605, PEBLM2008861, PERIC1000025, PERIC1000147, PERIC2000180, PERIC2000214, PERIC2000386, PERIC2000387, PERIC2000422, PERIC2000478, PERIC2000889, PERIC2000914, PERIC2001227, PERIC2001228, PERIC2001379, PERIC2001504, PERIC2001703, PERIC2001764, PERIC2002243, PERIC2002272, PERIC2002452, PERIC2002766, PERIC2003001, PERIC2003090, PERIC2003287, PERIC2003349, PERIC2003452, PERIC2003699, PERIC2003720, PERIC2003794, PERIC2003834, PERIC2003919, PERIC2003957, PERIC2004028, PERIC2004131, PERIC2004259, PERIC2004379, PERIC2004429, PERIC2004510, PERIC2004613, PERIC2004909, PERIC2005111, PERIC2005117, PERIC2005305, PERIC2005347, PERIC2005370, PERIC2005936, PERIC2006035, PERIC2006121, PERIC2006443, PERIC2006945, PERIC2006960, PERIC2007439, PERIC2007914, PERIC2008008, PERIC2008385, PERIC2009001, PERIC2009086, PERIC2009329, PERIC2009566, PLACE5000001, PLACE5000037, PLACE5000067, PLACE5000068, PLACE5000070, PLACE5000080, PLACE5000105, PLACE5000115, PLACE5000116, PLACE5000129, PLACE5000139, PLACE5000153, PLACE5000171, PLACE5000245, PLACE5000260, PLACE5000282, PLACE5000372, PLACE5000522, PLACE5000527, PLACE6000012, PLACE6000044, PLACE6000055, PLACE6000070, PLACE6000137, PLACE6000145, PLACE6000191, PLACE6000205, PLACE6000231, PLACE6000296, PLACE6000348, PLACE6000371, PLACE6000424, PLACE6000426, PLACE6000429, PLACE6000450, PLACE6000523, PLACE6000550, PLACE6000552, PLACE6000555, PLACE6000619, PLACE6000630, PLACE6000953, PLACE6001118, PLACE6001153, PLACE6001262, PLACE6001294, PLACE6001536, PLACE6001557, PLACE6001712, PLACE6001740, PLACE6001886, PLACE6001923, PLACE6001925, PLACE6001933, PLACE6002011, PLACE6002016, PLACE6002056, PLACE6002157, PLACE6002312, PLACE6002323, PLACE6002345, PLACE6002419, PLACE6002462, PLACE6002647, PLACE6002692, PLACE6002699, PLACE6002710, PLACE6002871, PLACE6002949, PLACE6002960, PLACE6003038, PLACE6003077, PLACE6003094, PLACE6003109, PLACE6003372, PLACE6003393, PLACE6003399, PLACE6003539, PLACE6003621, PLACE6003705, PLACE6003740, PLACE6003771, PLACE6003796, PLACE6003839, PLACE6004101, PLACE6004219, PLACE6004336, PLACE6004368, PLACE6004380, PLACE6004396, PLACE6004454, PLACE6004464, PLACE6004491, PLACE6004663, PLACE6004687, PLACE6004738, PLACE6004931, PLACE6004966, PLACE6004993, PLACE6005007, PLACE6005029, PLACE6005108, PLACE6005234, PLACE6005283, PLACE6005328, PLACE6005351, PLACE6005423, PLACE6005487, PLACE6005535, PLACE6005546, PLACE6005559, PLACE6005579, PLACE6005691, PLACE6005786, PLACE6006042, PLACE6006077, PLACE6006158, PLACE6006217, PLACE6006266, PLACE6006287, PLACE6006394, PLACE6006474, PLACE6006549, PLACE6006566, PLACE6006697, PLACE6006822, PLACE6006871, PLACE6006905, PLACE6006988, PLACE6007050, PLACE6007239, PLACE6007242, PLACE6007380, PLACE6007433, PLACE6007482, PLACE6007687, PLACE6007787, PLACE6007798, PLACE6007807, PLACE6008036, PLACE6008094, PLACE6008126, PLACE6008285, PLACE6008444, PLACE6008453, PLACE6008640, PLACE6008750, PLACE6008768, PLACE6008793, PLACE6008824, PLACE6008989, PLACE6009006, PLACE6009008, PLACE6009228, PLACE6009237, PLACE6009338, PLACE6009419, PLACE6009430, PLACE6009482, PLACE6009524, PLACE6009527, PLACE6009560, PLACE6009590, PLACE6009835, PLACE6009853, PLACE6010463, PLACE6010485, PLACE6010568, PLACE6010701, PLACE6010765, PLACE6010848, PLACE6010925, PLACE6010936, PLACE6010991, PLACE6011041, PLACE6011102, PLACE6011211, PLACE6011260, PLACE6011334, PLACE6011627, PLACE6011774, PLACE6011881, PLACE6011907, PLACE6011970, PLACE6011975, PLACE6012108, PLACE6012168, PLACE6012297, PLACE6012308, PLACE6012574, PLACE6012908, PLACE6012936, PLACE6012942, PLACE6013222, PLACE6013232, PLACE6013288, PLACE6013386, PLACE6013400, PLACE6013650, PLACE6013672, PLACE6013884, PLACE6013885, PLACE6014043, PLACE6014516, PLACE6014882, PLACE6015211, PLACE6015322, PLACE6015460, PLACE6015513, PLACE6015591, PLACE6015729, PLACE6015939, PLACE6016030, PLACE6016093, PLACE6016105, PLACE6016160, PLACE6016210, PLACE6016254, PLACE6016383, PLACE6017002, PLACE6017431, PLACE6017564, PLACE6017578, PLACE6017626, PLACE6017714, PLACE6017788, PLACE6017791, PLACE6018107, PLACE6018187, PLACE6018235, PLACE6018287, PLACE6018441, PLACE6018487, PLACE6018497, PLACE6018769, PLACE6018834, PLACE6018843, PLACE6018863, PLACE6018938, PLACE6019385, PLACE6019542, PLACE6019600, PLACE6019674, PLACE6019676, PLACE6019701, PLACE6019932, PLACE6020031, PLACE6020145, PLACE7000167, PLACE7000170, PLACE7000266, PLACE7000333, PLACE7000502, PLACE7000707, PLACE7001022, PLACE7001544, PLACE7001759, PLACE7001936, PLACE7002303, PLACE7002641, PLACE7003639, PLACE7003657, PLACE7003684, PLACE7003985, PLACE7004961, PLACE7005169, PLACE7005671, PLACE7005840, PLACE7006051, PLACE7006090, PLACE7006268, PLACE7006275, PLACE7006498, PLACE7006540, PLACE7007379, PLACE7007644, PLACE7007973, PLACE7008136, PLACE7008431, PLACE7008623, PLACE7008766, PLACE7009563, PROST1000033, PROST1000039, PROST1000065, PROST1000083, PROST1000110, PROST1000120, PROST1000123, PROST1000136, PROST1000145, PROST1000152, PROST1000167, PROST1000184, PROST1000215, PROST1000217, PROST1000220, PROST1000226, PROST1000246, PROST1000262, PROST1000272, PROST1000298, PROST1000322, PROST1000334, PROST1000343, PROST1000362, PROST1000377, PROST1000412, PROST1000419, PROST1000451, PROST1000480, PROST1000485, PROST1000493, PROST1000512, PROST1000527, PROST1000528, PROST1000536, PROST1000559, PROST1000575, PROST2000036, PROST2000053, PROST2000067, PROST2000079, PROST2000105, PROST2000143, PROST2000162, PROST2000165, PROST2000176, PROST2000203, PROST2000212, PROST2000241, PROST2000267, PROST2000273, PROST2000274, PROST2000277, PROST2000284, PROST2000325, PROST2000337, PROST2000432, PROST2000452, PROST2000470, PROST2000505, PROST2000567, PROST2000572, PROST2000717, PROST2000761, PROST2000835, PROST2000893, PROST2000961, PROST2001002, PROST2001116, PROST2001138, PROST2001213, PROST2001414, PROST2001415, PROST2001465, PROST2001521, PROST2001540, PROST2001552, PROST2001599, PROST2001611, PROST2001636, PROST2001739, PROST2001796, PROST2001805, PROST2001823, PROST2001883, PROST2001899, PROST2001998, PROST2002078, PROST2002101, PROST2002162, PROST2002212, PROST2002227, PROST2002338, PROST2002425, PROST2002488, PROST2002489, PROST2002527, PROST2002591, PROST2002602, PROST2002633, PROST2002682, PROST2002685, PROST2002722, PROST2002736, PROST2002842, PROST2002897, PROST2002906, PROST2002927, PROST2002960, PROST2003102, PROST2003117, PROST2003210, PROST2003302, PROST2003303, PROST2003340, PROST2003428, PROST2003472, PROST2003537, PROST2003563, PROST2003577, PROST2003583, PROST2003586, PROST2003628, PROST2003635, PROST2003674, PROST2003676, PROST2003725, PROST2003732, PROST2003775, PROST2003922, PROST2003930, PROST2004115, PROST2004142, PROST2004146, PROST2004161, PROST2004251, PROST2004332, PROST2004481, PROST2004526, PROST2004570, PROST2004727, PROST2004742, PROST2004744, PROST2004817, PROST2005039, PROST2005093, PROST2005121, PROST2005131, PROST2005143, PROST2005228, PROST2005285, PROST2005426, PROST2005466, PROST2005630, PROST2005683, PROST2005788, PROST2005880, PROST2005886, PROST2005904, PROST2005919, PROST2005943, PROST2006008, PROST2006020, PROST2006060, PROST2006196, PROST2006201, PROST2006282, PROST2006343, PROST2006450, PROST2006491, PROST2006510, PROST2006536, PROST2006579, PROST2006688, PROST2006737, PROST2006766, PROST2006782, PROST2006933, PROST2007122, PROST2007200, PROST2007237, PROST2007289, PROST2007317, PROST2007328, PROST2007382, PROST2007389, PROST2007416, PROST2007528, PROST2007818, PROST2007871, PROST2007950, PROST2007956, PROST2007974, PROST2007988, PROST2008079, PROST2008088, PROST2008243, PROST2008245, PROST2008268, PROST2008447, PROST2008468, PROST2008472, PROST2008516, PROST2008724, PROST2008835, PROST2008993, PROST2009022, PROST2009208, PROST2009222, PROST2009254, PROST2009273, PROST2009320, PROST2009365, PROST2009388, PROST2009400, PROST2009470, PROST2009483, PROST2009571, PROST2009736, PROST2009795, PROST2009901, PROST2009909, PROST2010046, PROST2010219, PROST2010250, PROST2010318, PROST2010326, PROST2010382, PROST2010400, PROST2010545, PROST2010579, PROST2010606, PROST2010885, PROST2011012, PROST2011105, PROST2011297, PROST2011410, PROST2011439, PROST2011482, PROST2011631, PROST2011660, PROST2012005, PROST2012016, PROST2012088, PROST2012140, PROST2012157, PROST2012190, PROST2012249, PROST2012400, PROST2012504, PROST2012542, PROST2012550, PROST2012740, PROST2012780, PROST2012888, PROST2012890, PROST2013032, PROST2013053, PROST2013121, PROST2013260, PROST2013327, PROST2013531, PROST2013605, PROST2013627, PROST2013873, PROST2013880, PROST2014422, PROST2014585, PROST2014601, PROST2014659, PROST2014862, PROST2014916, PROST2014925, PROST2015124, PROST2015137, PROST2015198, PROST2015243, PROST2015246, PROST2015287, PROST2015457, PROST2015537, PROST2015545, PROST2015551, PROST2015636, PROST2015756, PROST2015877, PROST2015900, PROST2015924, PROST2015932, PROST2016246, PROST2016351, PROST2016379, PROST2016444, PROST2016462, PROST2016499, PROST2016512, PROST2016566, PROST2016582, PROST2016668, PROST2016684, PROST2016777, PROST2016829, PROST2016860, PROST2016980, PROST2017098, PROST2017128, PROST2017203, PROST2017367, PROST2017413, PROST2017441, PROST2017578, PROST2017612, PROST2017617, PROST2017700, PROST2017701, PROST2017729, PROST2017836, PROST2017910, PROST2018030, PROST2018090, PROST2018235, PROST2018437, PROST2018487, PROST2018511, PROST2018607, PROST2018788, PROST2018902, PROST2018922, PROST2019296, PROST2019398, PROST2019487, PROST2019781, PUAEN1000039, PUAEN1000081, PUAEN1000085, PUAEN1000087, PUAEN1000121, PUAEN1000175, PUAEN1000275, PUAEN1000276, PUAEN1000288, PUAEN2000080, PUAEN2000175, PUAEN2000247, PUAEN2000394, PUAEN2000497, PUAEN2000594, PUAEN2000684, PUAEN2000942, PUAEN2001260, PUAEN2001526, PUAEN2001882, PUAEN2002473, PUAEN2002552, PUAEN2002568, PUAEN2002616, PUAEN2002758, PUAEN2003079, PUAEN2003116, PUAEN2003517, PUAEN2003954, PUAEN2004067, PUAEN2004083, PUAEN2004400, PUAEN2004511, PUAEN2004525, PUAEN2004875, PUAEN2005110, PUAEN2005247, PUAEN2005502, PUAEN2005588, PUAEN2006029, PUAEN2006328, PUAEN2006578, PUAEN2006639, PUAEN2006761, PUAEN2007350, PUAEN2007785, PUAEN2007898, PUAEN2008123, PUAEN2008228, PUAEN2008314, PUAEN2008815, PUAEN2008939, PUAEN2008980, PUAEN2009174, PUAEN2009348, PUAEN2009534, PUAEN2009795, PUAEN2009852, RECTM1000051, RECTM1000141, RECTM2000220, RECTM2000349, RECTM2000433, RECTM2000510, RECTM2001307, RECTM2001519, RECTM2001666, RECTM2001691, RECTM2001749, RECTM2002172, RECTM2002602, RECTM2002632, SALGL1000024, SALGL1000028, SALGL1000065, SALGL1000107, SALGL1000171, SKMUS1000030, SKMUS1000064, SKMUS1000067, SKMUS1000104, SKMUS1000118, SKMUS1000124, SKMUS1000129, SKMUS1000138, SKMUS2000061, SKMUS2000074, SKMUS2000078, SKMUS2000137, SKMUS2000198, SKMUS2000243, SKMUS2000287, SKMUS2000317, SKMUS2000330, SKMUS2000339, SKMUS2000343, SKMUS2000365, SKMUS2000390, SKMUS2000416, SKMUS2000458, SKMUS2000467, SKMUS2000468, SKMUS2000515, SKMUS2000679, SKMUS2000690, SKMUS2000701, SKMUS2000705, SKMUS2000710, SKMUS2000724, SKMUS2000726, SKMUS2000774, SKMUS2000780, SKMUS2000821, SKMUS2000847, SKMUS2000863, SKMUS2000894, SKMUS2000898, SKMUS2000902, SKMUS2000933, SKMUS2000945, SKMUS2000973, SKMUS2000980, SKMUS2001008, SKMUS2001014, SKMUS2001129, SKMUS2001157, SKMUS2001164, SKMUS2001199, SKMUS2001201, SKMUS2001215, SKMUS2001247, SKMUS2001254, SKMUS2001271, SKMUS2001287, SKMUS2001323, SKMUS2001364, SKMUS2001398, SKMUS2001402, SKMUS2001412, SKMUS2001492, SKMUS2001501, SKMUS2001543, SKMUS2001580, SKMUS2001585, SKMUS2001608, SKMUS2001631, SKMUS2001662, SKMUS2001663, SKMUS2001668, SKMUS2001671, SKMUS2001683, SKMUS2001693, SKMUS2001695, SKMUS2001703, SKMUS2001740, SKMUS2001742, SKMUS2001823, SKMUS2001850, SKMUS2002077, SKMUS2002084, SKMUS2002153, SKMUS2002475, SKMUS2002602, SKMUS2002634, SKMUS2002693, SKMUS2002821, SKMUS2002840, SKMUS2002920, SKMUS2003034, SKMUS2003074, SKMUS2003168, SKMUS2003194, SKMUS2003744, SKMUS2004044, SKMUS2004047, SKMUS2004483, SKMUS2004667, SKMUS2004897, SKMUS2004903, SKMUS2005428, SKMUS2006394, SKMUS2006481, SKMUS2006755, SKMUS2007315, SKMUS2007359, SKMUS2007568, SKMUS2007740, SKMUS2007816, SKMUS2007915, SKMUS2008338, SKMUS2008407, SKMUS2008474, SKMUS2008585, SKMUS2008607, SKMUS2009190, SKMUS2009232, SKMUS2009479, SKMUS2009557, SKNMC1000123, SKNMC1000124, SKNMC1000137, SKNMC1000229, SKNMC1000251, SKNMC1000264, SKNMC2000224, SKNMC2000256, SKNMC2000356, SKNMC2000374, SKNMC2000583, SKNMC2000593, SKNMC2000612, SKNMC2000622, SKNMC2000698, SKNMC2000966, SKNMC2001113, SKNMC2001324, SKNMC2001555, SKNMC2001596, SKNMC2001623, SKNMC2002402, SKNMC2003639, SKNMC2003924, SKNMC2003987, SKNMC2004457, SKNMC2004643, SKNMC2004651, SKNMC2005772, SKNMC2006327, SKNMC2006998, SKNMC2007134, SKNMC2007502, SKNMC2007504, SKNMC2007961, SKNMC2009450, SKNSH1000086, SKNSH1000174, SKNSH1000301, SKNSH1000308, SKNSH1000416, SKNSH2000051, SKNSH2000151, SKNSH2000163, SKNSH2000319, SKNSH2000482, SKNSH2000516, SKNSH2000550, SKNSH2000971, SKNSH2001931, SKNSH2002054, SKNSH2002768, SKNSH2002866, SKNSH2003174, SKNSH2003422, SKNSH2003466, SKNSH2003483, SKNSH2003528, SKNSH2003633, SKNSH2004039, SKNSH2005120, SKNSH2005194, SKNSH2005240, SKNSH2005792, SKNSH2005816, SKNSH2005981, SKNSH2006234, SKNSH2006304, SKNSH2006432, SKNSH2006822, SKNSH2007142, SKNSH2007149, SKNSH2007429, SKNSH2007739, SKNSH2008043, SKNSH2008940, SKNSH2008969, SKNSH2009197, SKNSH2009435, SKNSH2009991, SKNSH2010015, SMINT1000012, SMINT1000016, SMINT1000039, SMINT1000042, SMINT1000051, SMINT1000054, SMINT1000057, SMINT1000071, SMINT1000075, SMINT1000078, SMINT1000091, SMINT1000103, SMINT1000118, SMINT1000137, SMINT1000192, SMINT2000007, SMINT2000018, SMINT2000032, SMINT2000040, SMINT2000060, SMINT2000084, SMINT2000145, SMINT2000159, SMINT2000176, SMINT2000185, SMINT2000227, SMINT2000229, SMINT2000232, SMINT2000277, SMINT2000518, SMINT2000529, SMINT2000530, SMINT2000537, SMINT2000538, SMINT2000541, SMINT2000558, SMINT2000562, SMINT2000568, SMINT2000602, SMINT2000609, SMINT2000747, SMINT2000811, SMINT2000824, SMINT2000984, SMINT2001114, SMINT2001158, SMINT2001199, SMINT2001222, SMINT2001397, SMINT2001458, SMINT2001461, SMINT2001535, SMINT2001559, SMINT2001609, SMINT2001615, SMINT2001683, SMINT2001731, SMINT2001812, SMINT2001818, SMINT2002126, SMINT2002202, SMINT2002210, SMINT2002281, SMINT2002311, SMINT2002314, SMINT2002328, SMINT2002414, SMINT2002457, SMINT2002743, SMINT2002778, SMINT2002880, SMINT2002882, SMINT2002884, SMINT2002899, SMINT2002974, SMINT2003003, SMINT2003074, SMINT2003128, SMINT2003150, SMINT2003317, SMINT2003340, SMINT2003386, SMINT2003505, SMINT2003551, SMINT2003569, SMINT2003641, SMINT2003644, SMINT2003866, SMINT2004037, SMINT2004047, SMINT2004086, SMINT2004144, SMINT2004280, SMINT2004299, SMINT2004339, SMINT2004414, SMINT2004473, SMINT2004547, SMINT2004583, SMINT2004729, SMINT2004781, SMINT2004891, SMINT2004909, SMINT2004972, SMINT2004992, SMINT2005075, SMINT2005161, SMINT2005174, SMINT2005213, SMINT2005387, SMINT2005402, SMINT2005405, SMINT2005621, SMINT2005623, SMINT2005624, SMINT2005688, SMINT2005800, SMINT2006078, SMINT2006205, SMINT2006331, SMINT2006596, SMINT2006641, SMINT2006648, SMINT2006708, SMINT2006716, SMINT2006801, SMINT2007062, SMINT2007140, SMINT2007187, SMINT2007219, SMINT2007294, SMINT2007365, SMINT2007391, SMINT2007433, SMINT2007508, SMINT2007526, SMINT2007579, SMINT2007647, SMINT2007729, SMINT2007790, SMINT2007796, SMINT2007867, SMINT2007932, SMINT2008042, SMINT2008054, SMINT2008133, SMINT2008277, SMINT2008329, SMINT2008455, SMINT2008491, SMINT2008531, SMINT2008545, SMINT2008558, SMINT2008625, SMINT2008672, SMINT2008690, SMINT2008715, SMINT2008720, SMINT2008817, SMINT2008844, SMINT2008917, SMINT2009119, SMINT2009121, SMINT2009212, SMINT2009216, SMINT2009233, SMINT2009259, SMINT2009272, SMINT2009363, SMINT2009468, SMINT2009505, SMINT2009529, SMINT2009832, SMINT2009895, SMINT2009902, SMINT2009973, SMINT2010015, SMINT2010068, SMINT2010076, SMINT2010200, SMINT2010278, SMINT2010326, SMINT2010369, SMINT2010426, SMINT2010500, SMINT2010533, SMINT2010629, SMINT2010672, SMINT2010753, SMINT2010853, SMINT2010897, SMINT2010959, SMINT2010997, SMINT2011033, SMINT2011066, SMINT2011273, SMINT2011311, SMINT2011406, SMINT2011509, SMINT2011567, SMINT2011588, SMINT2011656, SMINT2011888, SMINT2011958, SMINT2012040, SMINT2012195, SMINT2012285, SMINT2012291, SMINT2012734, SMINT2012793, SMINT2013032, SMINT2013129, SMINT2013170, SMINT2013181, SMINT2013228, SMINT2013613, SMINT2013626, SMINT2013695, SMINT2013833, SMINT2013890, SMINT2014166, SMINT2014282, SMINT2014443, SMINT2014489, SMINT2014721, SMINT2015006, SMINT2015294, SMINT2015306, SMINT2015326, SMINT2015353, SMINT2015454, SMINT2015518, SMINT2015745, SMINT2015787, SMINT2015810, SMINT2016122, SMINT2016286, SMINT2016313, SMINT2016412, SMINT2016440, SMINT2016477, SMINT2016544, SMINT2016857, SMINT2017319, SMINT2017324, SMINT2017410, SMINT2017431, SMINT2017432, SMINT2017436, SMINT2017599, SMINT2017659, SMINT2017736, SMINT2017781, SMINT2017855, SMINT2017884, SMINT2017964, SMINT2017974, SMINT2018343, SMINT2018353, SMINT2018592, SMINT2018681, SMINT2019017, SMINT2019105, SMINT2019142, SMINT2019153, SMINT2019200, SPLEN1000041, SPLEN1000056, SPLEN1000087, SPLEN1000089, SPLEN1000091, SPLEN1000134, SPLEN1000139, SPLEN1000143, SPLEN1000145, SPLEN1000156, SPLEN1000163, SPLEN1000178, SPLEN2000020, SPLEN2000047, SPLEN2000064, SPLEN2000072, SPLEN2000126, SPLEN2000143, SPLEN2000189, SPLEN2000205, SPLEN2000210, SPLEN2000242, SPLEN2000243, SPLEN2000247, SPLEN2000270, SPLEN2000307, SPLEN2000310, SPLEN2000350, SPLEN2000357, SPLEN2000364, SPLEN2000402, SPLEN2000414, SPLEN2000420, SPLEN2000443, SPLEN2000448, SPLEN2000450, SPLEN2000464, SPLEN2000496, SPLEN2000515, SPLEN2000516, SPLEN2000541, SPLEN2000607, SPLEN2000630, SPLEN2000695, SPLEN2000839, SPLEN2001135, SPLEN2001176, SPLEN2001227, SPLEN2001245, SPLEN2001278, SPLEN2001354, SPLEN2001367, SPLEN2001383, SPLEN2001476, SPLEN2001503, SPLEN2001510, SPLEN2001599, SPLEN2001650, SPLEN2001689, SPLEN2001710, SPLEN2001761, SPLEN2001781, SPLEN2001881, SPLEN2001912, SPLEN2001945, SPLEN2002007, SPLEN2002133, SPLEN2002147, SPLEN2002166, SPLEN2002175, SPLEN2002223, SPLEN2002314, SPLEN2002343, SPLEN2002354, SPLEN2002385, SPLEN2002419, SPLEN2002451, SPLEN2002462, SPLEN2002467, SPLEN2002477, SPLEN2002662, SPLEN2002695, SPLEN2002707, SPLEN2002917, SPLEN2002957, SPLEN2003160, SPLEN2003204, SPLEN2003219, SPLEN2003297, SPLEN2003878, SPLEN2003918, SPLEN2003924, SPLEN2004060, SPLEN2004078, SPLEN2004124, SPLEN2004148, SPLEN2004181, SPLEN2004220, SPLEN2004346, SPLEN2004368, SPLEN2004611, SPLEN2004662, SPLEN2004844, SPLEN2005227, SPLEN2005272, SPLEN2005416, SPLEN2005450, SPLEN2005474, SPLEN2005727, SPLEN2005790, SPLEN2005818, SPLEN2005869, SPLEN2005939, SPLEN2006232, SPLEN2006268, SPLEN2006283, SPLEN2006325, SPLEN2006389, SPLEN2006425, SPLEN2006671, SPLEN2006701, SPLEN2006785, SPLEN2006875, SPLEN2007314, SPLEN2007326, SPLEN2007350, SPLEN2007388, SPLEN2007619, SPLEN2007653, SPLEN2007689, SPLEN2007695, SPLEN2007750, SPLEN2007794, SPLEN2007879, SPLEN2007926, SPLEN2007951, SPLEN2008007, SPLEN2008135, SPLEN2008164, SPLEN2008317, SPLEN2008496, SPLEN2008591, SPLEN2008786, SPLEN2009088, SPLEN2009163, SPLEN2009315, SPLEN2009340, SPLEN2009512, SPLEN2009513, SPLEN2009541, SPLEN2009548, SPLEN2009581, SPLEN2009733, SPLEN2009803, SPLEN2009884, SPLEN2009918, SPLEN2010004, SPLEN2010112, SPLEN2010119, SPLEN2010146, SPLEN2010187, SPLEN2010350, SPLEN2010395, SPLEN2010415, SPLEN2010447, SPLEN2010510, SPLEN2010530, SPLEN2010534, SPLEN2010588, SPLEN2010625, SPLEN2010800, SPLEN2010846, SPLEN2010847, SPLEN2010862, SPLEN2010978, SPLEN2010986, SPLEN2011018, SPLEN2011021, SPLEN2011025, SPLEN2011086, SPLEN2011139, SPLEN2011145, SPLEN2011248, SPLEN2011252, SPLEN2011422, SPLEN2011672, SPLEN2011758, SPLEN2011766, SPLEN2011805, SPLEN2011820, SPLEN2011830, SPLEN2011931, SPLEN2011981, SPLEN2012115, SPLEN2012175, SPLEN2012179, SPLEN2012185, SPLEN2012234, SPLEN2012453, SPLEN2012524, SPLEN2012525, SPLEN2012606, SPLEN2012611, SPLEN2012725, SPLEN2012743, SPLEN2012756, SPLEN2012846, SPLEN2012889, SPLEN2012961, SPLEN2013108, SPLEN2013195, SPLEN2013644, SPLEN2013648, SPLEN2013670, SPLEN2013673, SPLEN2013690, SPLEN2013714, SPLEN2013753, SPLEN2013821, SPLEN2013860, SPLEN2013910, SPLEN2013923, SPLEN2014041, SPLEN2014063, SPLEN2014073, SPLEN2014080, SPLEN2014136, SPLEN2014199, SPLEN2014210, SPLEN2014293, SPLEN2014318, SPLEN2014381, SPLEN2014452, SPLEN2014454, SPLEN2014486, SPLEN2014543, SPLEN2014669, SPLEN2014739, SPLEN2014860, SPLEN2014865, SPLEN2014919, SPLEN2014920, SPLEN2014924, SPLEN2014937, SPLEN2014946, SPLEN2015031, SPLEN2015094, SPLEN2015121, SPLEN2015158, SPLEN2015166, SPLEN2015216, SPLEN2015258, SPLEN2015261, SPLEN2015267, SPLEN2015276, SPLEN2015415, SPLEN2015433, SPLEN2015593, SPLEN2015674, SPLEN2015679, SPLEN2015707, SPLEN2015730, SPLEN2015746, SPLEN2015815, SPLEN2015890, SPLEN2015891, SPLEN2015899, SPLEN2016045, SPLEN2016053, SPLEN2016069, SPLEN2016098, SPLEN2016135, SPLEN2016241, SPLEN2016250, SPLEN2016304, SPLEN2016356, SPLEN2016480, SPLEN2016531, SPLEN2016541, SPLEN2016552, SPLEN2016554, SPLEN2016602, SPLEN2016627, SPLEN2016678, SPLEN2016773, SPLEN2016781, SPLEN2016840, SPLEN2016863, SPLEN2016922, SPLEN2016973, SPLEN2017043, SPLEN2017104, SPLEN2017147, SPLEN2017187, SPLEN2017189, SPLEN2017212, SPLEN2017426, SPLEN2017452, SPLEN2017538, SPLEN2017592, SPLEN2017613, SPLEN2017620, SPLEN2017643, SPLEN2017687, SPLEN2017740, SPLEN2017781, SPLEN2017999, SPLEN2018098, SPLEN2018112, SPLEN2018180, SPLEN2018181, SPLEN2018280, SPLEN2018285, SPLEN2018364, SPLEN2018395, SPLEN2018683, SPLEN2018732, SPLEN2018749, SPLEN2018933, SPLEN2019008, SPLEN2019043, SPLEN2019077, SPLEN2019092, SPLEN2019102, SPLEN2019131, SPLEN2019257, SPLEN2019311, SPLEN2019323, SPLEN2019375, SPLEN2019379, SPLEN2019446, SPLEN2019471, SPLEN2019480, SPLEN2019505, SPLEN2019571, SPLEN2019575, SPLEN2019709, SPLEN2019793, SPLEN2019811, SPLEN2019839, SPLEN2019956, SPLEN2019985, SPLEN2020007, SPLEN2020153, SPLEN2020154, SPLEN2020166, SPLEN2020183, SPLEN2020223, SPLEN2020359, SPLEN2020427, SPLEN2020467, SPLEN2020512, SPLEN2020608, SPLEN2020777, SPLEN2020805, SPLEN2021057, SPLEN2021157, SPLEN2021231, SPLEN2021295, SPLEN2021298, SPLEN2021383, SPLEN2021417, SPLEN2021440, SPLEN2021463, SPLEN2021560, SPLEN2021701, SPLEN2021795, SPLEN2021983, SPLEN2021991, SPLEN2022040, SPLEN2022162, SPLEN2022227, SPLEN2022522, SPLEN2022591, SPLEN2022785, SPLEN2022920, SPLEN2023024, SPLEN2023423, SPLEN2023710, SPLEN2023733, SPLEN2023791, SPLEN2023977, SPLEN2024070, SPLEN2024127, SPLEN2024232, SPLEN2024273, SPLEN2024383, SPLEN2024530, SPLEN2024571, SPLEN2024577, SPLEN2024617, SPLEN2024737, SPLEN2024956, SPLEN2024990, SPLEN2025012, SPLEN2025017, SPLEN2025039, SPLEN2025219, SPLEN2025626, SPLEN2025820, SPLEN2026144, SPLEN2026411, SPLEN2026765, SPLEN2027157, SPLEN2027395, SPLEN2027488, SPLEN2027780, SPLEN2027852, SPLEN2027868, SPLEN2027995, SPLEN2028046, SPLEN2028066, SPLEN2028138, SPLEN2028365, SPLEN2028417, SPLEN2028424, SPLEN2028593, SPLEN2028844, SPLEN2028994, SPLEN2029051, SPLEN2029176, SPLEN2029295, SPLEN2029380, SPLEN2029522, SPLEN2029683, SPLEN2029727, SPLEN2029904, SPLEN2029912, SPLEN2030250, SPLEN2030335, SPLEN2030371, SPLEN2030397, SPLEN2030479, SPLEN2030495, SPLEN2030562, SPLEN2030763, SPLEN2030847, SPLEN2031004, SPLEN2031125, SPLEN2031724, SPLEN2031780, SPLEN2032036, SPLEN2032112, SPLEN2032157, SPLEN2032321, SPLEN2032356, SPLEN2032677, SPLEN2032813, SPLEN2032924, SPLEN2033098, SPLEN2033153, SPLEN2033333, SPLEN2033490, SPLEN2033539, SPLEN2033921, SPLEN2033996, SPLEN2034021, SPLEN2034081, SPLEN2034252, SPLEN2034551, SPLEN2034601, SPLEN2034678, SPLEN2034864, SPLEN2034934, SPLEN2035318, SPLEN2035615, SPLEN2036103, SPLEN2036326, SPLEN2036475, SPLEN2036501, SPLEN2036579, SPLEN2036608, SPLEN2036702, SPLEN2036712, SPLEN2036953, SPLEN2037077, SPLEN2037194, SPLEN2037319, SPLEN2037444, SPLEN2037580, SPLEN2037630, SPLEN2037678, SPLEN2037722, SPLEN2037891, SPLEN2038055, SPLEN2038180, SPLEN2038345, SPLEN2038407, SPLEN2038473, SPLEN2038834, SPLEN2039311, SPLEN2039672, SPLEN2039697, SPLEN2039845, SPLEN2039936, SPLEN2040222, SPLEN2040237, SPLEN2041304, SPLEN2041306, SPLEN2041310, SPLEN2041585, SPLEN2041645, SPLEN2041700, SPLEN2041720, SPLEN2041977, SPLEN2042051, SPLEN2042303, SPLEN2042521, SPLEN2042598, SPLEN2042714, SPLEN2042920, STOMA1000013, STOMA1000047, STOMA1000052, STOMA1000074, STOMA1000117, STOMA1000133, STOMA1000175, STOMA1000186, STOMA1000189, STOMA1000190, STOMA1000191, STOMA2000032, STOMA2000072, STOMA2000088, STOMA2000104, STOMA2000121, STOMA2000148, STOMA2000168, STOMA2000183, STOMA2000188, STOMA2000279, STOMA2000383, STOMA2000386, STOMA2000395, STOMA2000478, STOMA2000529, STOMA2000539, STOMA2000567, STOMA2000640, STOMA2000678, STOMA2000686, STOMA2000888, STOMA2001025, STOMA2001389, STOMA2002141, STOMA2002367, STOMA2002688, STOMA2002828, STOMA2003158, STOMA2003289, STOMA2003444, STOMA2003477, STOMA2003646, STOMA2003716, STOMA2003781, STOMA2003894, STOMA2004194, STOMA2004294, STOMA2004663, STOMA2004668, STOMA2004852, STOMA2004873, STOMA2004884, STOMA2004893, STOMA2004925, STOMA2005664, STOMA2005667, STOMA2005746, STOMA2005782, STOMA2006181, STOMA2006213, STOMA2006325, STOMA2006330, STOMA2006398, STOMA2006447, STOMA2006780, STOMA2006904, STOMA2007269, STOMA2007680, STOMA2007745, STOMA2008050, STOMA2008361, STOMA2008546, STOMA2008614, STOMA2008638, STOMA2008838, STOMA2009250, STOMA2009253, STOMA2009256, SYNOV1000045, SYNOV1000049, SYNOV1000118, SYNOV1000164, SYNOV1000190, SYNOV1000256, SYNOV2000152, SYNOV2000171, SYNOV2000173, SYNOV2000177, SYNOV2000178, SYNOV2000193, SYNOV2000251, SYNOV2000279, SYNOV2000297, SYNOV2000426, SYNOV2000601, SYNOV2000700, SYNOV2000820, SYNOV2000824, SYNOV2000923, SYNOV2001014, SYNOV2001035, SYNOV2001088, SYNOV2001111, SYNOV2001212, SYNOV2001251, SYNOV2001300, SYNOV2001356, SYNOV2001374, SYNOV2001390, SYNOV2001451, SYNOV2001457, SYNOV2001468, SYNOV2001660, SYNOV2003326, SYNOV2005216, SYNOV2005448, SYNOV2005541, SYNOV2005673, SYNOV2005817, SYNOV2005962, SYNOV2006430, SYNOV2007965, SYNOV2008765, SYNOV2009172, SYNOV2011233, SYNOV2012326, SYNOV2013365, SYNOV2013637, SYNOV2014157, SYNOV2014364, SYNOV2016124, SYNOV2016837, SYNOV2017055, SYNOV2017179, SYNOV2018921, SYNOV2019280, SYNOV2020085, SYNOV2020463, SYNOV2021320, SYNOV2021953, SYNOV3000184, SYNOV3000231, SYNOV3000302, SYNOV3000345, SYNOV4000472, SYNOV4000598, SYNOV4000706, SYNOV4001224, SYNOV4001326, SYNOV4001342, SYNOV4001395, SYNOV4002001, SYNOV4002392, SYNOV4002875, SYNOV4003174, SYNOV4003322, SYNOV4003681, SYNOV4003981, SYNOV4004184, SYNOV4004741, SYNOV4004823, SYNOV4004914, SYNOV4005256, SYNOV4005570, SYNOV4005739, SYNOV4005889, SYNOV4005981, SYNOV4006256, SYNOV4006327, SYNOV4007012, SYNOV4007215, SYNOV4007360, SYNOV4007521, SYNOV4007553, SYNOV4007711, SYNOV4008336, SYNOV4009139, SYNOV4009298, T1ESE2000116, T1ESE2000609, T1ESE2002665, TBAES2000004, TBAES2000059, TBAES2000116, TBAES2000255, TBAES2000315, TBAES2000352, TBAES2000932, TBAES2001171, TBAES2001220, TBAES2001229, TBAES2001258, TBAES2001296, TBAES2001492, TBAES2001553, TBAES2001751, TBAES2003435, TBAES2003492, TBAES2003550, TBAES2003702, TBAES2003917, TBAES2004055, TBAES2004105, TBAES2004939, TBAES2005157, TBAES2005361, TBAES2005543, TBAES2006568, TBAES2006881, TBAES2007379, TBAES2007481, TBAES2007504, TBAES2007548, TBAES2007697, TBAES2007862, TBAES2007964, TBAES2008133, TCERX2000171, TCERX2000431, TCERX2000613, TCERX2000998, TCERX2002644, TCOLN1000037, TCOLN2000139, TCOLN2000236, TCOLN2000641, TCOLN2001268, TCOLN2002047, TCOLN2002278, TESOP1000127, TESOP1000160, TESOP2000083, TESOP2000090, TESOP2000205, TESOP2000312, TESOP2000390, TESOP2000400, TESOP2000510, TESOP2000569, TESOP2000739, TESOP2000801, TESOP2001122, TESOP2001166, TESOP2001345, TESOP2001474, TESOP2001796, TESOP2001818, TESOP2001849, TESOP2001865, TESOP2001901, TESOP2001953, TESOP2002005, TESOP2002110, TESOP2002150, TESOP2002273, TESOP2002489, TESOP2002539, TESOP2002545, TESOP2002804, TESOP2002950, TESOP2003273, TESOP2003308, TESOP2003553, TESOP2003753, TESOP2004110, TESOP2004114, TESOP2004173, TESOP2004214, TESOP2005199, TESOP2005285, TESOP2005485, TESOP2005498, TESOP2005579, TESOP2006041, TESOP2006053, TESOP2006060, TESOP2006068, TESOP2006110, TESOP2006398, TESOP2006670, TESOP2006704, TESOP2006746, TESOP2006865, TESOP2007041, TESOP2007052, TESOP2007262, TESOP2007384, TESOP2007636, TESOP2007674, TESOP2007688, TESOP2007725, TESOP2007912, TESOP2007978, TESOP2008127, TESOP2008552, TESOP2008556, TESOP2008563, TESOP2008820, TESOP2009121, TESOP2009201, TESOP2009247, TESOP2009555, TESTI1000018, TESTI1000019, TESTI1000025, TESTI1000029, TESTI1000030, TESTI1000042, TESTI1000045, TESTI1000055, TESTI1000064, TESTI1000085, TESTI1000088, TESTI1000093, TESTI1000109, TESTI1000125, TESTI1000127, TESTI1000128, TESTI1000131, TESTI1000138, TESTI1000142, TESTI1000157, TESTI1000169, TESTI1000179, TESTI1000183, TESTI1000191, TESTI1000257, TESTI1000266, TESTI1000319, TESTI1000330, TESTI1000348, TESTI1000390, TESTI1000391, TESTI1000459, TESTI1000491, TESTI1000545, TESTI2000018, TESTI2000044, TESTI2000100, TESTI2000117, TESTI2000120, TESTI2000147, TESTI2000154, TESTI2000179, TESTI2000207, TESTI2000208, TESTI2000221, TESTI2000238, TESTI2000253, TESTI2000272, TESTI2000278, TESTI2000349, TESTI2000356, TESTI2000358, TESTI2000372, TESTI2000427, TESTI2000431, TESTI2000443, TESTI2000452, TESTI2000462, TESTI2000571, TESTI2000591, TESTI2000598, TESTI2000616, TESTI2000644, TESTI2000671, TESTI2000683, TESTI2000689, TESTI2000695, TESTI2000699, TESTI2000707, TESTI2000745, TESTI2000756, TESTI2000762, TESTI2000808, TESTI2000819, TESTI2000830, TESTI2000840, TESTI2000850, TESTI2000909, TESTI2000951, TESTI2000981, TESTI2001008, TESTI2001049, TESTI2001082, TESTI2001134, TESTI2001180, TESTI2001208, TESTI2001229, TESTI2001236, TESTI2001237, TESTI2001306, TESTI2001313, TESTI2001330, TESTI2001339, TESTI2001345, TESTI2001352, TESTI2001364, TESTI2001412, TESTI2001420, TESTI2001498, TESTI2001511, TESTI2001512, TESTI2001518, TESTI2001556, TESTI2001593, TESTI2001621, TESTI2001661, TESTI2001665, TESTI2001671, TESTI2001697, TESTI2001725, TESTI2001758, TESTI2001766, TESTI2001792, TESTI2001793, TESTI2001795, TESTI2001812, TESTI2001815, TESTI2001823, TESTI2001826, TESTI2001827, TESTI2001852, TESTI2001879, TESTI2001894, TESTI2001915, TESTI2001950, TESTI2001959, TESTI2001968, TESTI2001991, TESTI2002002, TESTI2002012, TESTI2002036, TESTI2002048, TESTI2002057, TESTI2002081, TESTI2002090, TESTI2002105, TESTI2002149, TESTI2002216, TESTI2002223, TESTI2002245, TESTI2002251, TESTI2002264, TESTI2002282, TESTI2002293, TESTI2002294, TESTI2002326, TESTI2002351, TESTI2002361, TESTI2002369, TESTI2002406, TESTI2002415, TESTI2002423, TESTI2002453, TESTI2002461, TESTI2002465, TESTI2002498, TESTI2002516, TESTI2002544, TESTI2002578, TESTI2002580, TESTI2002618, TESTI2002676, TESTI2002690, TESTI2002696, TESTI2002698, TESTI2002700, TESTI2002724, TESTI2002729, TESTI2002752, TESTI2002753, TESTI2002789, TESTI2002802, TESTI2002806, TESTI2002840, TESTI2002866, TESTI2002877, TESTI2002910, TESTI2002912, TESTI2002928, TESTI2002937, TESTI2002965, TESTI2002993, TESTI2003005, TESTI2003020, TESTI2003031, TESTI2003037, TESTI2003044, TESTI2003059, TESTI2003061, TESTI2003071, TESTI2003074, TESTI2003089, TESTI2003104, TESTI2003109, TESTI2003117, TESTI2003127, TESTI2003130, TESTI2003131, TESTI2003139, TESTI2003152, TESTI2003181, TESTI2003193, TESTI2003196, TESTI2003228, TESTI2003236, TESTI2003255, TESTI2003258, TESTI2003277, TESTI2003299, TESTI2003311, TESTI2003321, TESTI2003325, TESTI2003327, TESTI2003330, TESTI2003347, TESTI2003354, TESTI2003356, TESTI2003372, TESTI2003376, TESTI2003418, TESTI2003419, TESTI2003432, TESTI2003475, TESTI2003476, TESTI2003498, TESTI2003512, TESTI2003539, TESTI2003545, TESTI2003551, TESTI2003574, TESTI2003579, TESTI2003580, TESTI2003589, TESTI2003598, TESTI2003615, TESTI2003638, TESTI2003649, TESTI2003718, TESTI2003727, TESTI2003768, TESTI2003781, TESTI2003787, TESTI2003824, TESTI2003827, TESTI2003894, TESTI2003911, TESTI2003914, TESTI2003940, TESTI2003962, TESTI2003998, TESTI2004000, TESTI2004073, TESTI2004085, TESTI2004089, TESTI2004111, TESTI2004119, TESTI2004122, TESTI2004163, TESTI2004169, TESTI2004207, TESTI2004215, TESTI2004227, TESTI2004229, TESTI2004243, TESTI2004255, TESTI2004287, TESTI2004313, TESTI2004318, TESTI2004322, TESTI2004391, TESTI2004399, TESTI2004423, TESTI2004432, TESTI2004452, TESTI2004459, TESTI2004490, TESTI2004539, TESTI2004552, TESTI2004560, TESTI2004574, TESTI2004601, TESTI2004611, TESTI2004649, TESTI2004654, TESTI2004675, TESTI2004687, TESTI2004689, TESTI2004700, TESTI2004706, TESTI2004712, TESTI2004783, TESTI2004791, TESTI2004793, TESTI2004860, TESTI2004906, TESTI2004920, TESTI2004936, TESTI2004941, TESTI2004971, TESTI2004982, TESTI2004993, TESTI2004994, TESTI2004999, TESTI2005017, TESTI2005025, TESTI2005040, TESTI2005060, TESTI2005072, TESTI2005085, TESTI2005120, TESTI2005153, TESTI2005155, TESTI2005173, TESTI2005267, TESTI2005268, TESTI2005280, TESTI2005307, TESTI2005326, TESTI2005363, TESTI2005376, TESTI2005378, TESTI2005380, TESTI2005391, TESTI2005395, TESTI2005396, TESTI2005415, TESTI2005470, TESTI2005492, TESTI2005568, TESTI2005584, TESTI2005588, TESTI2005590, TESTI2005603, TESTI2005609, TESTI2005610, TESTI2005630, TESTI2005672, TESTI2005683, TESTI2005690, TESTI2005692, TESTI2005703, TESTI2005720, TESTI2005739, TESTI2005767, TESTI2005775, TESTI2005827, TESTI2005860, TESTI2005892, TESTI2005911, TESTI2005933, TESTI2005937, TESTI2005948, TESTI2005979, TESTI2005981, TESTI2005982, TESTI2005984, TESTI2005986, TESTI2005987, TESTI2006007, TESTI2006008, TESTI2006015, TESTI2006016, TESTI2006035, TESTI2006040, TESTI2006041, TESTI2006045, TESTI2006067, TESTI2006083, TESTI2006097, TESTI2006109, TESTI2006120, TESTI2006125, TESTI2006179, TESTI2006209, TESTI2006210, TESTI2006212, TESTI2006218, TESTI2006238, TESTI2006255, TESTI2006278, TESTI2006333, TESTI2006341, TESTI2006360, TESTI2006425, TESTI2006437, TESTI2006457, TESTI2006460, TESTI2006465, TESTI2006483, TESTI2006499, TESTI2006523, TESTI2006543, TESTI2006565, TESTI2006572, TESTI2006615, TESTI2006617, TESTI2006624, TESTI2006628, TESTI2006633, TESTI2006643, TESTI2006648, TESTI2006659, TESTI2006660, TESTI2006665, TESTI2006667, TESTI2006677, TESTI2006720, TESTI2006735, TESTI2006744, TESTI2006774, TESTI2006853, TESTI2006866, TESTI2006872, TESTI2006877, TESTI2006879, TESTI2006894, TESTI2006940, TESTI2006955, TESTI2006978, TESTI2006979, TESTI2006990, TESTI2007040, TESTI2007074, TESTI2007078, TESTI2007113, TESTI2007152, TESTI2007163, TESTI2007183, TESTI2007220, TESTI2007234, TESTI2007320, TESTI2007346, TESTI2007358, TESTI2007402, TESTI2007405, TESTI2007422, TESTI2007452, TESTI2007464, TESTI2007466, TESTI2007480, TESTI2007490, TESTI2007502, TESTI2007524, TESTI2007533, TESTI2007576, TESTI2007613, TESTI2007657, TESTI2007685, TESTI2007692, TESTI2007749, TESTI2007750, TESTI2007808, TESTI2007814, TESTI2007829, TESTI2007864, TESTI2007867, TESTI2007872, TESTI2007906, TESTI2007922, TESTI2007951, TESTI2007972, TESTI2007973, TESTI2008014, TESTI2008032, TESTI2008033, TESTI2008046, TESTI2008081, TESTI2008099, TESTI2008139, TESTI2008144, TESTI2008161, TESTI2008189, TESTI2008204, TESTI2008219, TESTI2008233, TESTI2008234, TESTI2008237, TESTI2008278, TESTI2008320, TESTI2008331, TESTI2008343, TESTI2008387, TESTI2008389, TESTI2008394, TESTI2008405, TESTI2008420, TESTI2008425, TESTI2008440, TESTI2008567, TESTI2008595, TESTI2008636, TESTI2008657, TESTI2008684, TESTI2008699, TESTI2008715, TESTI2008762, TESTI2008774, TESTI2008786, TESTI2008822, TESTI2008835, TESTI2008840, TESTI2008847, TESTI2008884, TESTI2008901, TESTI2008929, TESTI2008946, TESTI2008960, TESTI2009018, TESTI2009091, TESTI2009097, TESTI2009136, TESTI2009185, TESTI2009190, TESTI2009217, TESTI2009239, TESTI2009325, TESTI2009388, TESTI2009390, TESTI2009400, TESTI2009402, TESTI2009412, TESTI2009423, TESTI2009447, TESTI2009462, TESTI2009474, TESTI2009477, TESTI2009497, TESTI2009502, TESTI2009511, TESTI2009544, TESTI2009545, TESTI2009551, TESTI2009585, TESTI2009588, TESTI2009683, TESTI2009727, TESTI2009739, TESTI2009812, TESTI2009835, TESTI2009853, TESTI2009935, TESTI2009977, TESTI2010009, TESTI2010154, TESTI2010239, TESTI2010280, TESTI2010354, TESTI2010396, TESTI2010400, TESTI2010409, TESTI2010572, TESTI2010587, TESTI2010591, TESTI2010682, TESTI2010724, TESTI2010732, TESTI2010734, TESTI2010755, TESTI2010793, TESTI2010806, TESTI2010833, TESTI2010872, TESTI2011009, TESTI2011020, TESTI2011028, TESTI2011033, TESTI2011254, TESTI2011286, TESTI2011294, TESTI2011314, TESTI2011315, TESTI2011394, TESTI2011407, TESTI2011448, TESTI2011480, TESTI2011549, TESTI2011575, TESTI2011612, TESTI2011665, TESTI2011683, TESTI2011712, TESTI2011750, TESTI2011840, TESTI2011846, TESTI2011915, TESTI2011928, TESTI2011971, TESTI2012019, TESTI2012050, TESTI2012090, TESTI2012095, TESTI2012104, TESTI2012152, TESTI2012171, TESTI2012207, TESTI2012231, TESTI2012244, TESTI2012289, TESTI2012308, TESTI2012356, TESTI2012387, TESTI2012394, TESTI2012444, TESTI2012511, TESTI2012528, TESTI2012544, TESTI2012550, TESTI2012592, TESTI2012617, TESTI2012628, TESTI2012778, TESTI2012812, TESTI2012834, TESTI2012835, TESTI2012861, TESTI2012900, TESTI2012915, TESTI2012922, TESTI2013001, TESTI2013012, TESTI2013053, TESTI2013144, TESTI2013163, TESTI2013169, TESTI2013212, TESTI2013257, TESTI2013264, TESTI2013268, TESTI2013322, TESTI2013381, TESTI2013382, TESTI2013401, TESTI2013427, TESTI2013468, TESTI2013497, TESTI2013545, TESTI2013546, TESTI2013566, TESTI2013601, TESTI2013604, TESTI2013607, TESTI2013610, TESTI2013691, TESTI2013699, TESTI2013737, TESTI2013767, TESTI2013832, TESTI2013873, TESTI2013889, TESTI2014007, TESTI2014036, TESTI2014097, TESTI2014160, TESTI2014248, TESTI2014254, TESTI2014269, TESTI2014274, TESTI2014318, TESTI2014324, TESTI2014339, TESTI2014362, TESTI2014385, TESTI2014415, TESTI2014439, TESTI2014474, TESTI2014505, TESTI2014577, TESTI2014578, TESTI2014716, TESTI2014800, TESTI2014843, TESTI2014979, TESTI2014988, TESTI2015105, TESTI2015180, TESTI2015246, TESTI2015249, TESTI2015327, TESTI2015331, TESTI2015335, TESTI2015350, TESTI2015375, TESTI2015437, TESTI2015590, TESTI2015610, TESTI2015647, TESTI2015675, TESTI2015710, TESTI2015752, TESTI2015830, TESTI2015914, TESTI2015938, TESTI2015947, TESTI2015987, TESTI2016033, TESTI2016046, TESTI2016101, TESTI2016162, TESTI2016197, TESTI2016298, TESTI2016331, TESTI2016337, TESTI2016410, TESTI2016421, TESTI2016509, TESTI2016568, TESTI2016599, TESTI2016629, TESTI2016663, TESTI2016667, TESTI2016688, TESTI2016701, TESTI2016758, TESTI2016848, TESTI2016863, TESTI2016888, TESTI2016922, TESTI2016942, TESTI2016950, TESTI2016996, TESTI2017017, TESTI2017028, TESTI2017069, TESTI2017089, TESTI2017102, TESTI2017107, TESTI2017113, TESTI2017125, TESTI2017256, TESTI2017305, TESTI2017311, TESTI2017396, TESTI2017507, TESTI2017537, TESTI2017582, TESTI2017584, TESTI2017727, TESTI2017740, TESTI2017775, TESTI2017816, TESTI2017832, TESTI2017923, TESTI2017932, TESTI2017951, TESTI2018031, TESTI2018035, TESTI2018060, TESTI2018083, TESTI2018178, TESTI2018221, TESTI2018276, TESTI2018290, TESTI2018335, TESTI2018337, TESTI2018368, TESTI2018428, TESTI2018475, TESTI2018482, TESTI2018521, TESTI2018565, TESTI2018581, TESTI2018687, TESTI2018697, TESTI2018838, TESTI2018867, TESTI2018941, TESTI2018957, TESTI2018974, TESTI2018975, TESTI2019042, TESTI2019077, TESTI2019228, TESTI2019257, TESTI2019280, TESTI2019282, TESTI2019308, TESTI2019336, TESTI2019352, TESTI2019406, TESTI2019430, TESTI2019455, TESTI2019481, TESTI2019488, TESTI2019501, TESTI2019648, TESTI2019669, TESTI2019697, TESTI2019729, TESTI2019760, TESTI2019787, TESTI2019794, TESTI2019854, TESTI2019859, TESTI2019860, TESTI2019872, TESTI2019911, TESTI2019917, TESTI2019975, TESTI2019998, TESTI2020026, TESTI2020029, TESTI2020071, TESTI2020084, TESTI2020265, TESTI2020283, TESTI2020316, TESTI2020344, TESTI2020379, TESTI2020426, TESTI2020445, TESTI2020510, TESTI2020515, TESTI2020525, TESTI2020579, TESTI2020717, TESTI2020840, TESTI2020871, TESTI2020905, TESTI2020906, TESTI2020946, TESTI2020981, TESTI2020999, TESTI2021003, TESTI2021057, TESTI2021077, TESTI2021112, TESTI2021114, TESTI2021116, TESTI2021118, TESTI2021122, TESTI2021138, TESTI2021315, TESTI2021447, TESTI2021463, TESTI2021599, TESTI2021637, TESTI2021667, TESTI2021736, TESTI2021785, TESTI2021819, TESTI2021851, TESTI2021895, TESTI2021911, TESTI2021939, TESTI2021999, TESTI2022010, TESTI2022023, TESTI2022065, TESTI2022086, TESTI2022203, TESTI2022246, TESTI2022323, TESTI2022338, TESTI2022400, TESTI2022462, TESTI2022495, TESTI2022623, TESTI2022649, TESTI2022652, TESTI2022738, TESTI2022798, TESTI2022812, TESTI2022814, TESTI2022874, TESTI2022940, TESTI2022952, TESTI2023025, TESTI2023053, TESTI2023085, TESTI2023192, TESTI2023194, TESTI2023214, TESTI2023254, TESTI2023386, TESTI2023414, TESTI2023427, TESTI2023436, TESTI2023599, TESTI2023752, TESTI2023800, TESTI2023861, TESTI2023903, TESTI2023942, TESTI2023947, TESTI2023951, TESTI2023968, TESTI2024009, TESTI2024090, TESTI2024125, TESTI2024153, TESTI2024192, TESTI2024267, TESTI2024283, TESTI2024299, TESTI2024419, TESTI2024422, TESTI2024443, TESTI2024446, TESTI2024473, TESTI2024476, TESTI2024498, TESTI2024560, TESTI2024567, TESTI2024586, TESTI2024641, TESTI2024648, TESTI2024718, TESTI2024744, TESTI2024844, TESTI2024864, TESTI2024885, TESTI2024936, TESTI2024978, TESTI2024999, TESTI2025006, TESTI2025022, TESTI2025063, TESTI2025117, TESTI2025144, TESTI2025161, TESTI2025174, TESTI2025229, TESTI2025269, TESTI2025365, TESTI2025403, TESTI2025409, TESTI2025422, TESTI2025448, TESTI2025486, TESTI2025546, TESTI2025582, TESTI2025609, TESTI2025656, TESTI2025791, TESTI2025872, TESTI2025879, TESTI2025911, TESTI2025920, TESTI2025924, TESTI2026014, TESTI2026024, TESTI2026064, TESTI2026077, TESTI2026104, TESTI2026134, TESTI2026168, TESTI2026196, TESTI2026218, TESTI2026233, TESTI2026291, TESTI2026294, TESTI2026401, TESTI2026403, TESTI2026453, TESTI2026461, TESTI2026491, TESTI2026505, TESTI2026515, TESTI2026537, TESTI2026589, TESTI2026597, TESTI2026605, TESTI2026647, TESTI2026674, TESTI2026794, TESTI2026824, TESTI2026854, TESTI2026925, TESTI2026936, TESTI2026957, TESTI2027013, TESTI2027019, TESTI2027108, TESTI2027165, TESTI2027171, TESTI2027173, TESTI2027179, TESTI2027185, TESTI2027206, TESTI2027238, TESTI2027239, TESTI2027243, TESTI2027271, TESTI2027296, TESTI2027378, TESTI2027411, TESTI2027450, TESTI2027503, TESTI2027562, TESTI2027615, TESTI2027645, TESTI2027730, TESTI2027736, TESTI2027791, TESTI2027820, TESTI2027828, TESTI2027840, TESTI2027909, TESTI2028098, TESTI2028151, TESTI2028242, TESTI2028253, TESTI2028254, TESTI2028269, TESTI2028290, TESTI2028384, TESTI2028426, TESTI2028488, TESTI2028523, TESTI2028583, TESTI2028613, TESTI2028659, TESTI2028662, TESTI2028670, TESTI2028705, TESTI2028776, TESTI2028811, TESTI2028891, TESTI2028985, TESTI2028997, TESTI2029131, TESTI2029162, TESTI2029196, TESTI2029201, TESTI2029244, TESTI2029249, TESTI2029252, TESTI2029264, TESTI2029470, TESTI2029672, TESTI2029785, TESTI2029880, TESTI2030136, TESTI2030322, TESTI2030336, TESTI2030342, TESTI2030519, TESTI2030554, TESTI2030556, TESTI2030728, TESTI2030754, TESTI2030770, TESTI2030860, TESTI2030901, TESTI2030917, TESTI2030930, TESTI2031006, TESTI2031007, TESTI2031060, TESTI2031129, TESTI2031356, TESTI2031418, TESTI2031504, TESTI2031529, TESTI2031687, TESTI2031760, TESTI2031809, TESTI2031919, TESTI2031935, TESTI2031986, TESTI2032044, TESTI2032067, TESTI2032079, TESTI2032643, TESTI2032681, TESTI2032761, TESTI2032768, TESTI2032774, TESTI2032828, TESTI2033242, TESTI2033254, TESTI2033300, TESTI2033395, TESTI2033453, TESTI2033505, TESTI2033520, TESTI2033641, TESTI2033710, TESTI2033905, TESTI2034187, TESTI2034243, TESTI2034249, TESTI2034307, TESTI2034357, TESTI2034401, TESTI2034407, TESTI2034506, TESTI2034520, TESTI2034718, TESTI2034730, TESTI2034749, TESTI2034767, TESTI2034774, TESTI2034777, TESTI2034785, TESTI2034799, TESTI2034847, TESTI2034913, TESTI2034931, TESTI2034953, TESTI2034997, TESTI2035003, TESTI2035078, TESTI2035084, TESTI2035107, TESTI2035121, TESTI2035124, TESTI2035183, TESTI2035262, TESTI2035688, TESTI2035775, TESTI2035793, TESTI2035898, TESTI2035962, TESTI2035981, TESTI2035997, TESTI2036114, TESTI2036129, TESTI2036285, TESTI2036288, TESTI2036513, TESTI2036589, TESTI2036650, TESTI2036684, TESTI2036736, TESTI2036822, TESTI2036833, TESTI2036913, TESTI2036922, TESTI2036951, TESTI2036965, TESTI2037002, TESTI2037055, TESTI2037081, TESTI2037085, TESTI2037103, TESTI2037106, TESTI2037111, TESTI2037209, TESTI2037255, TESTI2037359, TESTI2037375, TESTI2037382, TESTI2037534, TESTI2037569, TESTI2037572, TESTI2037643, TESTI2037657, TESTI2037673, TESTI2037723, TESTI2037819, TESTI2037830, TESTI2037845, TESTI2037877, TESTI2037976, TESTI2038048, TESTI2038065, TESTI2038104, TESTI2038275, TESTI2038388, TESTI2038573, TESTI2038596, TESTI2038623, TESTI2038644, TESTI2038733, TESTI2038858, TESTI2038958, TESTI2039025, TESTI2039026, TESTI2039038, TESTI2039041, TESTI2039060, TESTI2039113, TESTI2039121, TESTI2039209, TESTI2039225, TESTI2039227, TESTI2039276, TESTI2039353, TESTI2039544, TESTI2039613, TESTI2039707, TESTI2039732, TESTI2039738, TESTI2039776, TESTI2039867, TESTI2039908, TESTI2040018, TESTI2040094, TESTI2040102, TESTI2040128, TESTI2040143, TESTI2040297, TESTI2040372, TESTI2040377, TESTI2040424, TESTI2040642, TESTI2040815, TESTI2040897, TESTI2040944, TESTI2040964, TESTI2040983, TESTI2040989, TESTI2041330, TESTI2041362, TESTI2041517, TESTI2041564, TESTI2041664, TESTI2041730, TESTI2041734, TESTI2041778, TESTI2041800, TESTI2041947, TESTI2041956, TESTI2041976, TESTI2042062, TESTI2042149, TESTI2042264, TESTI2042295, TESTI2042302, TESTI2042326, TESTI2042400, TESTI2042450, TESTI2042473, TESTI2042507, TESTI2042508, TESTI2042750, TESTI2042783, TESTI2042806, TESTI2042928, TESTI2042946, TESTI2042958, TESTI2043275, TESTI2043277, TESTI2043282, TESTI2043313, TESTI2043477, TESTI2043585, TESTI2043758, TESTI2043817, TESTI2043857, TESTI2043866, TESTI2043869, TESTI2044064, TESTI2044118, TESTI2044194, TESTI2044306, TESTI2044309, TESTI2044413, TESTI2044418, TESTI2044754, TESTI2044788, TESTI2044796, TESTI2044833, TESTI2044892, TESTI2044920, TESTI2044968, TESTI2045139, TESTI2045155, TESTI2045171, TESTI2045199, TESTI2045353, TESTI2045509, TESTI2045611, TESTI2045819, TESTI2045850, TESTI2045920, TESTI2045964, TESTI2045983, TESTI2046100, TESTI2046188, TESTI2046347, TESTI2046352, TESTI2046358, TESTI2046439, TESTI2046535, TESTI2046536, TESTI2046552, TESTI2046569, TESTI2046686, TESTI2046721, TESTI2046732, TESTI2046786, TESTI2046797, TESTI2046863, TESTI2046872, TESTI2047071, TESTI2047141, TESTI2047147, TESTI2047153, TESTI2047212, TESTI2047342, TESTI2047383, TESTI2047605, TESTI2047792, TESTI2047801, TESTI2047818, TESTI2047824, TESTI2047885, TESTI2047930, TESTI2048105, TESTI2048109, TESTI2048465, TESTI2048603, TESTI2048898, TESTI2049041, TESTI2049062, TESTI2049206, TESTI2049277, TESTI2049422, TESTI2049452, TESTI2049469, TESTI2049553, TESTI2049576, TESTI2049857, TESTI2049956, TESTI2050137, TESTI2050681, TESTI2050780, TESTI2050987, TESTI2051148, TESTI2051177, TESTI2051279, TESTI2051488, TESTI2051543, TESTI2051627, TESTI2051742, TESTI2051767, TESTI2051791, TESTI2051806, TESTI2051867, TESTI2051873, TESTI2052110, TESTI2052202, TESTI2052211, TESTI2052256, TESTI2052288, TESTI2052525, TESTI2052670, TESTI2052693, TESTI2052698, TESTI2052799, TESTI2052822, TESTI2052985, TESTI2053151, TESTI2053242, TESTI2053399, TESTI2053526, TESTI2053561, TESTI2053621, TESTI2053667, TESTI3000002, TESTI3000005, TESTI4000068, TESTI4000079, TESTI4000093, TESTI4000134, TESTI4000137, TESTI4000153, TESTI4000155, TESTI4000157, TESTI4000183, TESTI4000215, TESTI4000228, TESTI4000250, TESTI4000288, TESTI4000319, TESTI4000349, TESTI4000370, TESTI4000394, TESTI4000434, TESTI4000462, TESTI4000530, TESTI4000534, TESTI4000598, TESTI4000600, TESTI4000621, TESTI4000703, TESTI4000724, TESTI4000957, TESTI4000970, TESTI4001036, TESTI4001037, TESTI4001060, TESTI4001106, TESTI4001148, TESTI4001176, TESTI4001195, TESTI4001201, TESTI4001206, TESTI4001348, TESTI4001441, TESTI4001473, TESTI4001517, TESTI4001527, TESTI4001561, TESTI4001665, TESTI4001679, TESTI4001795, TESTI4001923, TESTI4001925, TESTI4002003, TESTI4002141, TESTI4002319, TESTI4002491, TESTI4002520, TESTI4002552, TESTI4002647, TESTI4002703, TESTI4002754, TESTI4002868, TESTI4002878, TESTI4002889, TESTI4002988, TESTI4003179, TESTI4003279, TESTI4003319, TESTI4003404, TESTI4003565, TESTI4003574, TESTI4003579, TESTI4003733, TESTI4003796, TESTI4004003, TESTI4004031, TESTI4004200, TESTI4004539, TESTI4004653, TESTI4004722, TESTI4004887, TESTI4004917, TESTI4005015, TESTI4005039, TESTI4005158, TESTI4005317, TESTI4005322, TESTI4005470, TESTI4005500, TESTI4005534, TESTI4005543, TESTI4005628, TESTI4005801, TESTI4005805, TESTI4005857, TESTI4005961, TESTI4006053, TESTI4006079, TESTI4006112, TESTI4006148, TESTI4006219, TESTI4006234, TESTI4006308, TESTI4006326, TESTI4006393, TESTI4006412, TESTI4006420, TESTI4006473, TESTI4006539, TESTI4006546, TESTI4006567, TESTI4006704, TESTI4006728, TESTI4006802, TESTI4006819, TESTI4007064, TESTI4007163, TESTI4007176, TESTI4007203, TESTI4007239, TESTI4007369, TESTI4007373, TESTI4007382, TESTI4007404, TESTI4007489, TESTI4007565, TESTI4007671, TESTI4007775, TESTI4007778, TESTI4007799, TESTI4007810, TESTI4007816, TESTI4008007, TESTI4008018, TESTI4008050, TESTI4008086, TESTI4008176, TESTI4008209, TESTI4008219, TESTI4008250, TESTI4008302, TESTI4008305, TESTI4008401, TESTI4008417, TESTI4008429, TESTI4008573, TESTI4008816, TESTI4008840, TESTI4008935, TESTI4008993, TESTI4009022, TESTI4009028, TESTI4009034, TESTI4009123, TESTI4009160, TESTI4009215, TESTI4009283, TESTI4009306, TESTI4009374, TESTI4009406, TESTI4009457, TESTI4009501, TESTI4009563, TESTI4009608, TESTI4009638, TESTI4009752, TESTI4009881, TESTI4009886, TESTI4009928, TESTI4010076, TESTI4010082, TESTI4010095, TESTI4010211, TESTI4010475, TESTI4010544, TESTI4010713, TESTI4010721, TESTI4010789, TESTI4010817, TESTI4010831, TESTI4010902, TESTI4011070, TESTI4011072, TESTI4011118, TESTI4011246, TESTI4011484, TESTI4011505, TESTI4011532, TESTI4011616, TESTI4011744, TESTI4011745, TESTI4011829, TESTI4011926, TESTI4011956, TESTI4012010, TESTI4012086, TESTI4012258, TESTI4012293, TESTI4012329, TESTI4012382, TESTI4012406, TESTI4012448, TESTI4012505, TESTI4012556, TESTI4012623, TESTI4012679, TESTI4012911, TESTI4012956, TESTI4012960, TESTI4013365, TESTI4013369, TESTI4013410, TESTI4013602, TESTI4013667, TESTI4013675, TESTI4013685, TESTI4013735, TESTI4013742, TESTI4013774, TESTI4013830, TESTI4013852, TESTI4013924, TESTI4013960, TESTI4013962, TESTI4014175, TESTI4014265, TESTI4014276, TESTI4014306, TESTI4014392, TESTI4014415, TESTI4014445, TESTI4014553, TESTI4014661, TESTI4014801, TESTI4014891, TESTI4014924, TESTI4014932, TESTI4014977, TESTI4015012, TESTI4015129, TESTI4015145, TESTI4015204, TESTI4015263, TESTI4015293, TESTI4015299, TESTI4015339, TESTI4015398, TESTI4015442, TESTI4015471, TESTI4015477, TESTI4015600, TESTI4015646, TESTI4015681, TESTI4015688, TESTI4015790, TESTI4016110, TESTI4016238, TESTI4016551, TESTI4016812, TESTI4016822, TESTI4016865, TESTI4016882, TESTI4016925, TESTI4017001, TESTI4017116, TESTI4017137, TESTI4017229, TESTI4017254, TESTI4017269, TESTI4017380, TESTI4017382, TESTI4017543, TESTI4017575, TESTI4017647, TESTI4017714, TESTI4017763, TESTI4017848, TESTI4017854, TESTI4017901, TESTI4017961, TESTI4017984, TESTI4018101, TESTI4018152, TESTI4018208, TESTI4018382, TESTI4018436, TESTI4018506, TESTI4018555, TESTI4018751, TESTI4018806, TESTI4018835, TESTI4018859, TESTI4018881, TESTI4018886, TESTI4019140, TESTI4019149, TESTI4019299, TESTI4019417, TESTI4019440, TESTI4019566, TESTI4019657, TESTI4019756, TESTI4019843, TESTI4020092, TESTI4020102, TESTI4020342, TESTI4020460, TESTI4020596, TESTI4020806, TESTI4020819, TESTI4020920, TESTI4021129, TESTI4021197, TESTI4021294, TESTI4021377, TESTI4021456, TESTI4021491, TESTI4021569, TESTI4021713, TESTI4021821, TESTI4022577, TESTI4022716, TESTI4022873, TESTI4023096, TESTI4023172, TESTI4023546, TESTI4023555, TESTI4023654, TESTI4023722, TESTI4023762, TESTI4023942, TESTI4024096, TESTI4024240, TESTI4024245, TESTI4024294, TESTI4024344, TESTI4024387, TESTI4024494, TESTI4024740, TESTI4024874, TESTI4024890, TESTI4024907, TESTI4024930, TESTI4025062, TESTI4025401, TESTI4025494, TESTI4025731, TESTI4025797, TESTI4025865, TESTI4025908, TESTI4025920, TESTI4026079, TESTI4026080, TESTI4026192, TESTI4026295, TESTI4026390, TESTI4026456, TESTI4026510, TESTI4026524, TESTI4026680, TESTI4026700, TESTI4026762, TESTI4026785, TESTI4027139, TESTI4027170, TESTI4027262, TESTI4027516, TESTI4027557, TESTI4027660, TESTI4027969, TESTI4028042, TESTI4028059, TESTI4028062, TESTI4028182, TESTI4028429, TESTI4028612, TESTI4028692, TESTI4028809, TESTI4028823, TESTI4028880, TESTI4028904, TESTI4028938, TESTI4028958, TESTI4028983, TESTI4029023, TESTI4029348, TESTI4029370, TESTI4029528, TESTI4029651, TESTI4029671, TESTI4029676, TESTI4029690, TESTI4029731, TESTI4029743, TESTI4030069, TESTI4030159, TESTI4030319, TESTI4030505, TESTI4030603, TESTI4030669, TESTI4030673, TESTI4030864, TESTI4031066, TESTI4031173, TESTI4031335, TESTI4031745, TESTI4031818, TESTI4032112, TESTI4032128, TESTI4032270, TESTI4032375, TESTI4032834, TESTI4032856, TESTI4032895, TESTI4033146, TESTI4033177, TESTI4033433, TESTI4033690, TESTI4034172, TESTI4034212, TESTI4034432, TESTI4034495, TESTI4034632, TESTI4034633, TESTI4034912, TESTI4034973, TESTI4035063, TESTI4035065, TESTI4035498, TESTI4035508, TESTI4035581, TESTI4035602, TESTI4035637, TESTI4035649, TESTI4035770, TESTI4035872, TESTI4035895, TESTI4035898, TESTI4035989, TESTI4036012, TESTI4036042, TESTI4036048, TESTI4036315, TESTI4036319, TESTI4036449, TESTI4036767, TESTI4036909, TESTI4037066, TESTI4037188, TESTI4037228, TESTI4037244, TESTI4037727, TESTI4037949, TESTI4038047, TESTI4038099, TESTI4038156, TESTI4038223, TESTI4038258, TESTI4038339, TESTI4038492, TESTI4038721, TESTI4038758, TESTI4038779, TESTI4038818, TESTI4039038, TESTI4039086, TESTI4039451, TESTI4039575, TESTI4039659, TESTI4039744, TESTI4039904, TESTI4040197, TESTI4040363, TESTI4040535, TESTI4040559, TESTI4040598, TESTI4040800, TESTI4040804, TESTI4040939, TESTI4040956, TESTI4041049, TESTI4041053, TESTI4041086, TESTI4041099, TESTI4041143, TESTI4041482, TESTI4041519, TESTI4041624, TESTI4041629, TESTI4041832, TESTI4041844, TESTI4041903, TESTI4041954, TESTI4041984, TESTI4041985, TESTI4041986, TESTI4042098, TESTI4042420, TESTI4042440, TESTI4042444, TESTI4042711, TESTI4042846, TESTI4043067, TESTI4043129, TESTI4043166, TESTI4043203, TESTI4043223, TESTI4043371, TESTI4043378, TESTI4043512, TESTI4043551, TESTI4043710, TESTI4043947, TESTI4044035, TESTI4044076, TESTI4044084, TESTI4044123, TESTI4044186, TESTI4044234, TESTI4044291, TESTI4044296, TESTI4044300, TESTI4044682, TESTI4044770, TESTI4045168, TESTI4045312, TESTI4045330, TESTI4045470, TESTI4045701, TESTI4045908, TESTI4045955, TESTI4045982, TESTI4046090, TESTI4046240, TESTI4046245, TESTI4046253, TESTI4046282, TESTI4046328, TESTI4046450, TESTI4046457, TESTI4046487, TESTI4046523, TESTI4046819, TESTI4046873, TESTI4046884, TESTI4046896, TESTI4046903, TESTI4046962, TESTI4047069, TESTI4047119, TESTI4047305, TESTI4047328, TESTI4047437, TESTI4047569, TESTI4047746, TESTI4047808, THYMU1000010, THYMU1000017, THYMU1000025, THYMU1000032, THYMU1000033, THYMU1000060, THYMU1000074, THYMU1000098, THYMU1000136, THYMU1000142, THYMU1000158, THYMU1000176, THYMU1000179, THYMU1000191, THYMU1000198, THYMU1000217, THYMU1000240, THYMU1000242, THYMU1000291, THYMU1000316, THYMU1000318, THYMU1000331, THYMU1000336, THYMU1000366, THYMU1000382, THYMU1000393, THYMU1000394, THYMU1000399, THYMU1000426, THYMU1000428, THYMU1000440, THYMU1000459, THYMU1000473, THYMU1000491, THYMU1000496, THYMU1000499, THYMU1000527, THYMU1000532, THYMU1000536, THYMU1000554, THYMU1000558, THYMU1000576, THYMU1000600, THYMU1000677, THYMU1000692, THYMU2000022, THYMU2000032, THYMU2000120, THYMU2000140, THYMU2000162, THYMU2000171, THYMU2000176, THYMU2000179, THYMU2000231, THYMU2000276, THYMU2000280, THYMU2000300, THYMU2000317, THYMU2000368, THYMU2000369, THYMU2000418, THYMU2000440, THYMU2000489, THYMU2000492, THYMU2000519, THYMU2000570, THYMU2000602, THYMU2000660, THYMU2000671, THYMU2000672, THYMU2000702, THYMU2000767, THYMU2000800, THYMU2000879, THYMU2000932, THYMU2000950, THYMU2000982, THYMU2000990, THYMU2001053, THYMU2001071, THYMU2001139, THYMU2001195, THYMU2001202, THYMU2001203, THYMU2001256, THYMU2001270, THYMU2001291, THYMU2001314, THYMU2001325, THYMU2001357, THYMU2001381, THYMU2001443, THYMU2001521, THYMU2001556, THYMU2001622, THYMU2001727, THYMU2001819, THYMU2001825, THYMU2001839, THYMU2001898, THYMU2001900, THYMU2001916, THYMU2001926, THYMU2001989, THYMU2002023, THYMU2002037, THYMU2002109, THYMU2002147, THYMU2002154, THYMU2002157, THYMU2002162, THYMU2002177, THYMU2002203, THYMU2002229, THYMU2002242, THYMU2002338, THYMU2002356, THYMU2002376, THYMU2002384, THYMU2002450, THYMU2002490, THYMU2002548, THYMU2002695, THYMU2002745, THYMU2002756, THYMU2002789, THYMU2002792, THYMU2002841, THYMU2002852, THYMU2002910, THYMU2002950, THYMU2002983, THYMU2003069, THYMU2003107, THYMU2003124, THYMU2003166, THYMU2003232, THYMU2003242, THYMU2003249, THYMU2003270, THYMU2003282, THYMU2003287, THYMU2003336, THYMU2003366, THYMU2003397, THYMU2003440, THYMU2003470, THYMU2003479, THYMU2003499, THYMU2003632, THYMU2003650, THYMU2003700, THYMU2003760, THYMU2003803, THYMU2003855, THYMU2004003, THYMU2004008, THYMU2004042, THYMU2004108, THYMU2004111, THYMU2004123, THYMU2004139, THYMU2004169, THYMU2004284, THYMU2004320, THYMU2004336, THYMU2004356, THYMU2004508, THYMU2004512, THYMU2004639, THYMU2004668, THYMU2004677, THYMU2004688, THYMU2004693, THYMU2004835, THYMU2004843, THYMU2004916, THYMU2004986, THYMU2005001, THYMU2005003, THYMU2005046, THYMU2005134, THYMU2005156, THYMU2005190, THYMU2005225, THYMU2005240, THYMU2005246, THYMU2005270, THYMU2005283, THYMU2005303, THYMU2005321, THYMU2005356, THYMU2005369, THYMU2005439, THYMU2005480, THYMU2005482, THYMU2005507, THYMU2005545, THYMU2005574, THYMU2005576, THYMU2005748, THYMU2005759, THYMU2005807, THYMU2005815, THYMU2005855, THYMU2005881, THYMU2005948, THYMU2005980, THYMU2006001, THYMU2006048, THYMU2006098, THYMU2006160, THYMU2006170, THYMU2006252, THYMU2006261, THYMU2006277, THYMU2006303, THYMU2006324, THYMU2006350, THYMU2006357, THYMU2006365, THYMU2006420, THYMU2006468, THYMU2006666, THYMU2006712, THYMU2006913, THYMU2006946, THYMU2006965, THYMU2007025, THYMU2007060, THYMU2007065, THYMU2007095, THYMU2007146, THYMU2007179, THYMU2007258, THYMU2007307, THYMU2007308, THYMU2007339, THYMU2007350, THYMU2007384, THYMU2007415, THYMU2007493, THYMU2007521, THYMU2007528, THYMU2007530, THYMU2007532, THYMU2007561, THYMU2007571, THYMU2007635, THYMU2007658, THYMU2007667, THYMU2007694, THYMU2007725, THYMU2007802, THYMU2007824, THYMU2007854, THYMU2007952, THYMU2007969, THYMU2008036, THYMU2008072, THYMU2008111, THYMU2008145, THYMU2008185, THYMU2008191, THYMU2008207, THYMU2008226, THYMU2008282, THYMU2008339, THYMU2008350, THYMU2008351, THYMU2008383, THYMU2008452, THYMU2008643, THYMU2008691, THYMU2008714, THYMU2008725, THYMU2008727, THYMU2008781, THYMU2008799, THYMU2008876, THYMU2008910, THYMU2008917, THYMU2008928, THYMU2008990, THYMU2008994, THYMU2009023, THYMU2009046, THYMU2009101, THYMU2009104, THYMU2009134, THYMU2009157, THYMU2009181, THYMU2009186, THYMU2009425, THYMU2009516, THYMU2009526, THYMU2009546, THYMU2009592, THYMU2009596, THYMU2009792, THYMU2009835, THYMU2009906, THYMU2009948, THYMU2010030, THYMU2010046, THYMU2010059, THYMU2010082, THYMU2010094, THYMU2010161, THYMU2010448, THYMU2010519, THYMU2010637, THYMU2010671, THYMU2010699, THYMU2010705, THYMU2010779, THYMU2010816, THYMU2010848, THYMU2011053, THYMU2011063, THYMU2011072, THYMU2011096, THYMU2011118, THYMU2011142, THYMU2011183, THYMU2011257, THYMU2011259, THYMU2011295, THYMU2011308, THYMU2011390, THYMU2011431, THYMU2011447, THYMU2011538, THYMU2011548, THYMU2011551, THYMU2011564, THYMU2011573, THYMU2011585, THYMU2011621, THYMU2011666, THYMU2011736, THYMU2011785, THYMU2011806, THYMU2011852, THYMU2011875, THYMU2011881, THYMU2011937, THYMU2011939, THYMU2012002, THYMU2012073, THYMU2012113, THYMU2012273, THYMU2012401, THYMU2012492, THYMU2012507, THYMU2012565, THYMU2012574, THYMU2012631, THYMU2012665, THYMU2012690, THYMU2012701, THYMU2012807, THYMU2012882, THYMU2012891, THYMU2012902, THYMU2012919, THYMU2013023, THYMU2013047, THYMU2013089, THYMU2013170, THYMU2013364, THYMU2013386, THYMU2013426, THYMU2013578, THYMU2013648, THYMU2013705, THYMU2013757, THYMU2013779, THYMU2013863, THYMU2013950, THYMU2013981, THYMU2014067, THYMU2014068, THYMU2014204, THYMU2014297, THYMU2014323, THYMU2014327, THYMU2014353, THYMU2014492, THYMU2014500, THYMU2014599, THYMU2014762, THYMU2014777, THYMU2014801, THYMU2014901, THYMU2014923, THYMU2015019, THYMU2015161, THYMU2015316, THYMU2015321, THYMU2015439, THYMU2015441, THYMU2015479, THYMU2015775, THYMU2015825, THYMU2015943, THYMU2015984, THYMU2016113, THYMU2016164, THYMU2016204, THYMU2016219, THYMU2016360, THYMU2016496, THYMU2016523, THYMU2016840, THYMU2017008, THYMU2017010, THYMU2017023, THYMU2017085, THYMU2017099, THYMU2017158, THYMU2017162, THYMU2017215, THYMU2017362, THYMU2017366, THYMU2017398, THYMU2017449, THYMU2017479, THYMU2017522, THYMU2017526, THYMU2017601, THYMU2017675, THYMU2017707, THYMU2017831, THYMU2017844, THYMU2017878, THYMU2017948, THYMU2018028, THYMU2018071, THYMU2018126, THYMU2018189, THYMU2018197, THYMU2018384, THYMU2018455, THYMU2018547, THYMU2018565, THYMU2018639, THYMU2018673, THYMU2018721, THYMU2018772, THYMU2018819, THYMU2018841, THYMU2018997, THYMU2019054, THYMU2019197, THYMU2019210, THYMU2019364, THYMU2019436, THYMU2019442, THYMU2019587, THYMU2019599, THYMU2019686, THYMU2019813, THYMU2020198, THYMU2020289, THYMU2020416, THYMU2020491, THYMU2020499, THYMU2020560, THYMU2020667, THYMU2020830, THYMU2021361, THYMU2021509, THYMU2021597, THYMU2021684, THYMU2021714, THYMU2022213, THYMU2022289, THYMU2022660, THYMU2022854, THYMU2022922, THYMU2023209, THYMU2023264, THYMU2023711, THYMU2023900, THYMU2024071, THYMU2024121, THYMU2024185, THYMU2024207, THYMU2024616, THYMU2024684, THYMU2024748, THYMU2025042, THYMU2025189, THYMU2025406, THYMU2025557, THYMU2025572, THYMU2025849, THYMU2025909, THYMU2025939, THYMU2026182, THYMU2026350, THYMU2026530, THYMU2026531, THYMU2026904, THYMU2027053, THYMU2027168, THYMU2027249, THYMU2027282, THYMU2027497, THYMU2027695, THYMU2027734, THYMU2027894, THYMU2027975, THYMU2027996, THYMU2028041, THYMU2028368, THYMU2028379, THYMU2028394, THYMU2028412, THYMU2028632, THYMU2028724, THYMU2028739, THYMU2028942, THYMU2028978, THYMU2029134, THYMU2029578, THYMU2029676, THYMU2029688, THYMU2029788, THYMU2030068, THYMU2030226, THYMU2030264, THYMU2030462, THYMU2030543, THYMU2030637, THYMU2030655, THYMU2030796, THYMU2030912, THYMU2030982, THYMU2031046, THYMU2031139, THYMU2031218, THYMU2031249, THYMU2031258, THYMU2031368, THYMU2031579, THYMU2031847, THYMU2031994, THYMU2032014, THYMU2032035, THYMU2032080, THYMU2032150, THYMU2032155, THYMU2032358, THYMU2032437, THYMU2032601, THYMU2032655, THYMU2032715, THYMU2032732, THYMU2032976, THYMU2033053, THYMU2033059, THYMU2033070, THYMU2033079, THYMU2033085, THYMU2033104, THYMU2033227, THYMU2033401, THYMU2033583, THYMU2033755, THYMU2033816, THYMU2034182, THYMU2034279, THYMU2034314, THYMU2034338, THYMU2034374, THYMU2034647, THYMU2034917, THYMU2035064, THYMU2035078, THYMU2035101, THYMU2035319, THYMU2035321, THYMU2035388, THYMU2035400, THYMU2035554, THYMU2035710, THYMU2036058, THYMU2036105, THYMU2036207, THYMU2036252, THYMU2036265, THYMU2036366, THYMU2036459, THYMU2036604, THYMU2036653, THYMU2037081, THYMU2037208, THYMU2037233, THYMU2037234, THYMU2037348, THYMU2037406, THYMU2037965, THYMU2038058, THYMU2038189, THYMU2038199, THYMU2038301, THYMU2038369, THYMU2038389, THYMU2038615, THYMU2038636, THYMU2038739, THYMU2038772, THYMU2038797, THYMU2038906, THYMU2039305, THYMU2039334, THYMU2039350, THYMU2039411, THYMU2039719, THYMU2039780, THYMU2039788, THYMU2039989, THYMU2040029, THYMU2040110, THYMU2040140, THYMU2040412, THYMU2040427, THYMU2040824, THYMU2040925, THYMU2041007, THYMU2041015, THYMU2041252, THYMU3000028, THYMU3000036, THYMU3000037, THYMU3000082, THYMU3000194, THYMU3000224, THYMU3000269, THYMU3000306, THYMU3000390, THYMU3000490, THYMU3000504, THYMU3000542, THYMU3000655, THYMU3000826, THYMU3000841, THYMU3001077, THYMU3001082, THYMU3001083, THYMU3001133, THYMU3001151, THYMU3001472, THYMU3001593, THYMU3001883, THYMU3001939, THYMU3001991, THYMU3002452, THYMU3002578, THYMU3002661, THYMU3003092, THYMU3003212, THYMU3003309, THYMU3003403, THYMU3003565, THYMU3003763, THYMU3003865, THYMU3003958, THYMU3004157, THYMU3004628, THYMU3004632, THYMU3004866, THYMU3005050, THYMU3005378, THYMU3005407, THYMU3005415, THYMU3005482, THYMU3005696, THYMU3006118, THYMU3006132, THYMU3006168, THYMU3006172, THYMU3006371, THYMU3006485, THYMU3006640, THYMU3006767, THYMU3006811, THYMU3006963, THYMU3007368, THYMU3007559, THYMU3007845, THYMU3008060, THYMU3008136, THYMU3008216, THYMU3008436, THYMU3008672, THYMU3008883, THYMU3008935, THYMU3009255, THYMU3009391, THYMU3009643, THYMU3009755, THYMU3010247, THYMU3011012, THYMU3011081, THYMU3011244, THYMU3011360, THYMU3011534, THYMU3011543, THYMU3011556, THYMU3011717, THYMU3012402, THYMU3012907, THYMU3012983, THYMU3013114, THYMU3013197, THYMU3013241, THYMU3013470, THYMU3013785, THYMU3013897, THYMU3014038, THYMU3014173, THYMU3014372, THYMU3014555, THYMU3014620, THYMU3014701, THYMU3015042, THYMU3015457, THYMU3015571, THYMU3015592, THYMU3015625, THYMU3015647, THYMU3015962, THYMU3016022, THYMU3016518, THYMU3016797, THYMU3016822, THYMU3016850, THYMU3017562, THYMU3017688, THYMU3017689, THYMU3017761, THYMU3018151, THYMU3018896, THYMU3019095, THYMU3019476, THYMU3019605, THYMU3019916, THYMU3020221, THYMU3020595, THYMU3020713, THYMU3020856, THYMU3020869, THYMU3020970, THYMU3021404, THYMU3021755, THYMU3021900, THYMU3022211, THYMU3022434, THYMU3022528, THYMU3022668, THYMU3022982, THYMU3023107, THYMU3023211, THYMU3023216, THYMU3023394, THYMU3023400, THYMU3023797, THYMU3024164, THYMU3024339, THYMU3024602, THYMU3024879, THYMU3025118, THYMU3025313, THYMU3025642, THYMU3025683, THYMU3025772, THYMU3025865, THYMU3026479, THYMU3026532, THYMU3026783, THYMU3026869, THYMU3027251, THYMU3027540, THYMU3027655, THYMU3027671, THYMU3028075, THYMU3028410, THYMU3028461, THYMU3028702, THYMU3029188, THYMU3029318, THYMU3029421, THYMU3029719, THYMU3029774, THYMU3029832, THYMU3030072, THYMU3030231, THYMU3030706, THYMU3030710, THYMU3030752, THYMU3031146, THYMU3031402, THYMU3031610, THYMU3031612, THYMU3031868, THYMU3031878, THYMU3032032, THYMU3033402, THYMU3033626, THYMU3033630, THYMU3033649, THYMU3033754, THYMU3033759, THYMU3034078, THYMU3034099, THYMU3034453, THYMU3034616, THYMU3034853, THYMU3034867, THYMU3034983, THYMU3036200, THYMU3036310, THYMU3036934, THYMU3036953, THYMU3037052, THYMU3037192, THYMU3037617, THYMU3037772, THYMU3037836, THYMU3037856, THYMU3037867, THYMU3037909, THYMU3037980, THYMU3038158, THYMU3038167, THYMU3038266, THYMU3038328, THYMU3038347, THYMU3038375, THYMU3038603, THYMU3038687, THYMU3038759, THYMU3038879, THYMU3038970, THYMU3039807, THYMU3039846, THYMU3040068, THYMU3040126, THYMU3040146, THYMU3040168, THYMU3040172, THYMU3040725, THYMU3040746, THYMU3040816, THYMU3040829, THYMU3040830, THYMU3040986, THYMU3041354, THYMU3041386, THYMU3041573, THYMU3041603, THYMU3041736, THYMU3041918, THYMU3042075, THYMU3042321, THYMU3042372, THYMU3042758, THYMU3042929, THYMU3043200, THYMU3043327, THYMU3043482, THYMU3043597, THYMU3043688, THYMU3043779, THYMU3043883, THYMU3043993, THYMU3044175, THYMU3044188, THYMU3044441, THYMU3044445, THYMU3045510, THYMU3045673, THYMU3045692, THYMU3045704, THYMU3046140, THYMU3046360, THYMU3046856, THYMU3047115, THYMU3047144, THYMU3047156, THYMU3047366, THYMU3047513, THYMU3047542, THYMU3047760, THYMU3047891, TKIDN1000062, TKIDN1000066, TKIDN1000171, TKIDN2000127, TKIDN2000240, TKIDN2000464, TKIDN2000701, TKIDN2001529, TKIDN2002329, TKIDN2002424, TKIDN2002632, TKIDN2003044, TKIDN2003062, TKIDN2003366, TKIDN2003396, TKIDN2003413, TKIDN2003601, TKIDN2004185, TKIDN2004386, TKIDN2004458, TKIDN2004748, TKIDN2005487, TKIDN2005721, TKIDN2005934, TKIDN2005947, TKIDN2005956, TKIDN2006525, TKIDN2006761, TKIDN2006852, TKIDN2007667, TKIDN2008176, TKIDN2008778, TKIDN2009092, TKIDN2009481, TKIDN2010200, TKIDN2010232, TKIDN2010278, TKIDN2010602, TKIDN2010934, TKIDN2011051, TKIDN2011160, TKIDN2011289, TKIDN2011324, TKIDN2012034, TKIDN2012771, TKIDN2012824, TKIDN2013134, TKIDN2013287, TKIDN2014757, TKIDN2014771, TKIDN2015025, TKIDN2015161, TKIDN2015263, TKIDN2015285, TKIDN2016309, TKIDN2016399, TKIDN2016846, TKIDN2018926, TKIDN2019116, TLIVE2000023, TLIVE2000142, TLIVE2000292, TLIVE2000762, TLIVE2000979, TLIVE2001616, TLIVE2001684, TLIVE2001828, TLIVE2001927, TLIVE2002336, TLIVE2002338, TLIVE2002562, TLIVE2002690, TLIVE2002882, TLIVE2003197, TLIVE2003225, TLIVE2003381, TLIVE2003737, TLIVE2003961, TLIVE2003970, TLIVE2004110, TLIVE2004320, TLIVE2004331, TLIVE2004601, TLIVE2005180, TLIVE2005390, TLIVE2005516, TLIVE2005731, TLIVE2005866, TLIVE2006236, TLIVE2006359, TLIVE2006529, TLIVE2006621, TLIVE2006733, TLIVE2007000, TLIVE2007016, TLIVE2007132, TLIVE2007192, TLIVE2007528, TLIVE2007607, TLIVE2007736, TLIVE2007816, TLIVE2007919, TLIVE2008083, TLIVE2008213, TLIVE2008221, TLIVE2008229, TLIVE2008712, TLIVE2008797, TLIVE2009087, TLIVE2009163, TLIVE2009489, TLIVE2009541, TLUNG2000179, TOVAR2000476, TOVAR2000575, TOVAR2000649, TOVAR2001281, TOVAR2001556, TOVAR2001730, TOVAR2002247, TOVAR2002514, TOVAR2002549, TOVAR2002800, TRACH1000038, TRACH1000057, TRACH1000063, TRACH1000074, TRACH1000100, TRACH1000106, TRACH1000125, TRACH1000140, TRACH1000144, TRACH1000212, TRACH1000240, TRACH2000002, TRACH2000015, TRACH2000024, TRACH2000032, TRACH2000081, TRACH2000083, TRACH2000148, TRACH2000185, TRACH2000196, TRACH2000235, TRACH2000243, TRACH2000250, TRACH2000259, TRACH2000272, TRACH2000282, TRACH2000287, TRACH2000289, TRACH2000306, TRACH2000312, TRACH2000336, TRACH2000411, TRACH2000496, TRACH2000497, TRACH2000522, TRACH2000559, TRACH2000660, TRACH2000665, TRACH2000675, TRACH2000677, TRACH2000702, TRACH2000703, TRACH2000767, TRACH2000775, TRACH2000807, TRACH2000862, TRACH2000873, TRACH2000894, TRACH2000898, TRACH2000923, TRACH2000944, TRACH2000981, TRACH2000986, TRACH2001037, TRACH2001060, TRACH2001101, TRACH2001121, TRACH2001147, TRACH2001154, TRACH2001188, TRACH2001192, TRACH2001249, TRACH2001275, TRACH2001335, TRACH2001347, TRACH2001395, TRACH2001400, TRACH2001403, TRACH2001416, TRACH2001443, TRACH2001474, TRACH2001523, TRACH2001525, TRACH2001532, TRACH2001592, TRACH2001596, TRACH2001621, TRACH2001651, TRACH2001684, TRACH2001933, TRACH2001968, TRACH2002043, TRACH2002054, TRACH2002092, TRACH2002138, TRACH2002784, TRACH2002840, TRACH2002847, TRACH2002853, TRACH2002862, TRACH2002954, TRACH2002960, TRACH2002988, TRACH2003070, TRACH2003484, TRACH2003516, TRACH2003605, TRACH2003736, TRACH2003759, TRACH2003941, TRACH2004039, TRACH2004054, TRACH2004087, TRACH2004109, TRACH2004170, TRACH2004183, TRACH2004251, TRACH2004292, TRACH2004336, TRACH2004399, TRACH2004428, TRACH2004458, TRACH2004499, TRACH2004521, TRACH2004570, TRACH2004845, TRACH2004887, TRACH2004950, TRACH2005004, TRACH2005017, TRACH2005066, TRACH2005159, TRACH2005314, TRACH2005444, TRACH2005666, TRACH2005698, TRACH2005710, TRACH2005720, TRACH2005769, TRACH2005800, TRACH2006015, TRACH2006097, TRACH2006194, TRACH2006327, TRACH2006331, TRACH2006387, TRACH2006528, TRACH2006670, TRACH2006762, TRACH2006866, TRACH2006870, TRACH2006918, TRACH2007059, TRACH2007324, TRACH2007358, TRACH2007483, TRACH2007542, TRACH2007577, TRACH2007674, TRACH2007676, TRACH2007688, TRACH2007733, TRACH2007754, TRACH2007816, TRACH2007894, TRACH2007988, TRACH2008081, TRACH2008112, TRACH2008127, TRACH2008130, TRACH2008278, TRACH2008540, TRACH2008583, TRACH2008597, TRACH2008820, TRACH2008921, TRACH2009060, TRACH2009107, TRACH2009123, TRACH2009268, TRACH2009291, TRACH2009310, TRACH2009340, TRACH2009348, TRACH2009358, TRACH2009661, TRACH2009730, TRACH2009743, TRACH2009754, TRACH2009851, TRACH2009862, TRACH2009934, TRACH2010159, TRACH2010218, TRACH2010251, TRACH2010272, TRACH2010317, TRACH2010419, TRACH2010451, TRACH2010505, TRACH2010587, TRACH2010600, TRACH2010634, TRACH2010639, TRACH2010677, TRACH2010698, TRACH2010771, TRACH2010824, TRACH2010883, TRACH2010965, TRACH2010974, TRACH2011057, TRACH2011093, TRACH2011290, TRACH2011293, TRACH2011302, TRACH2011574, TRACH2011956, TRACH2012000, TRACH2012138, TRACH2012242, TRACH2012370, TRACH2012387, TRACH2012536, TRACH2012562, TRACH2012742, TRACH2012823, TRACH2012918, TRACH2013081, TRACH2013123, TRACH2013265, TRACH2013369, TRACH2013450, TRACH2013495, TRACH2013671, TRACH2013726, TRACH2013902, TRACH2013928, TRACH2013982, TRACH2013991, TRACH2014018, TRACH2014045, TRACH2014046, TRACH2014082, TRACH2014268, TRACH2014284, TRACH2014337, TRACH2014356, TRACH2014371, TRACH2014442, TRACH2014483, TRACH2014495, TRACH2014544, TRACH2014573, TRACH2014725, TRACH2014760, TRACH2014815, TRACH2014839, TRACH2014938, TRACH2014950, TRACH2014972, TRACH2014974, TRACH2015180, TRACH2015243, TRACH2015316, TRACH2015381, TRACH2015486, TRACH2015654, TRACH2015824, TRACH2015987, TRACH2016080, TRACH2016286, TRACH2016317, TRACH2016347, TRACH2016380, TRACH2016384, TRACH2016410, TRACH2016481, TRACH2016498, TRACH2016533, TRACH2016551, TRACH2016554, TRACH2016651, TRACH2016690, TRACH2016709, TRACH2016722, TRACH2016835, TRACH2016980, TRACH2017086, TRACH2017368, TRACH2017498, TRACH2017609, TRACH2017949, TRACH2017965, TRACH2017980, TRACH2018084, TRACH2018262, TRACH2018273, TRACH2018278, TRACH2018345, TRACH2018380, TRACH2018449, TRACH2018512, TRACH2018646, TRACH2018663, TRACH2018718, TRACH2018835, TRACH2018882, TRACH2018914, TRACH2019024, TRACH2019046, TRACH2019080, TRACH2019151, TRACH2019154, TRACH2019176, TRACH2019248, TRACH2019309, TRACH2019425, TRACH2019473, TRACH2019602, TRACH2019661, TRACH2019672, TRACH2019673, TRACH2019844, TRACH2019879, TRACH2020048, TRACH2020336, TRACH2020525, TRACH2021398, TRACH2021622, TRACH2021635, TRACH2021964, TRACH2022042, TRACH2022113, TRACH2022253, TRACH2022425, TRACH2022553, TRACH2022649, TRACH2022839, TRACH2023246, TRACH2023306, TRACH2023416, TRACH2023479, TRACH2023684, TRACH2023860, TRACH2023876, TRACH2024139, TRACH2024187, TRACH2024271, TRACH2024293, TRACH2024408, TRACH2024512, TRACH2024559, TRACH2024647, TRACH2024651, TRACH2024730, TRACH2024735, TRACH2024749, TRACH2024821, TRACH2025057, TRACH2025084, TRACH2025155, TRACH2025224, TRACH2025344, TRACH2025379, TRACH2025507, TRACH2025569, TRACH2025705, TRACH2025749, TRACH2025753, TRACH2025810, TRACH2025853, TRACH2025911, TRACH2025932, TRACH3000017, TRACH3000043, TRACH3000180, TRACH3000342, TRACH3000420, TRACH3000515, TRACH3000530, TRACH3000548, TRACH3000558, TRACH3000586, TRACH3000692, TRACH3000892, TRACH3000926, TRACH3001119, TRACH3001443, TRACH3001759, TRACH3002064, TRACH3002107, TRACH3002168, TRACH3002188, TRACH3002245, TRACH3002293, TRACH3002533, TRACH3002561, TRACH3002567, TRACH3002650, TRACH3002866, TRACH3002871, TRACH3002876, TRACH3002890, TRACH3003009, TRACH3003357, TRACH3003379, TRACH3003586, TRACH3003683, TRACH3003780, TRACH3003805, TRACH3003832, TRACH3004113, TRACH3004288, TRACH3004303, TRACH3004412, TRACH3004456, TRACH3004537, TRACH3004596, TRACH3004651, TRACH3004652, TRACH3004671, TRACH3004747, TRACH3004760, TRACH3004783, TRACH3004786, TRACH3004840, TRACH3004931, TRACH3004934, TRACH3005072, TRACH3005085, TRACH3005102, TRACH3005173, TRACH3005191, TRACH3005211, TRACH3005274, TRACH3005479, TRACH3005549, TRACH3005699, TRACH3005702, TRACH3005808, TRACH3005852, TRACH3005896, TRACH3006038, TRACH3006149, TRACH3006228, TRACH3006264, TRACH3006336, TRACH3006379, TRACH3006392, TRACH3006395, TRACH3006397, TRACH3006412, TRACH3006470, TRACH3006589, TRACH3006626, TRACH3006699, TRACH3006800, TRACH3006889, TRACH3006985, TRACH3007097, TRACH3007268, TRACH3007274, TRACH3007277, TRACH3007391, TRACH3007541, TRACH3007595, TRACH3007627, TRACH3007766, TRACH3007866, TRACH3007995, TRACH3008042, TRACH3008061, TRACH3008535, TRACH3008629, TRACH3008688, TRACH3008697, TRACH3008713, TRACH3008887, TRACH3008902, TRACH3008990, TRACH3009059, TRACH3009061, TRACH3009701, TRACH3009715, TRACH3009894, TRACH3009956, TRACH3010167, TRACH3010331, TRACH3010342, TRACH3010382, TRACH3010757, TRACH3010901, TRACH3011004, TRACH3011082, TRACH3011184, TRACH3011282, TRACH3011313, TRACH3011454, TRACH3011485, TRACH3011503, TRACH3011538, TRACH3011542, TRACH3012106, TRACH3012161, TRACH3012232, TRACH3012261, TRACH3012445, TRACH3012460, TRACH3012659, TRACH3012718, TRACH3012864, TRACH3012891, TRACH3012942, TRACH3013043, TRACH3013072, TRACH3013426, TRACH3013454, TRACH3013558, TRACH3013684, TRACH3013693, TRACH3013700, TRACH3013766, TRACH3013900, TRACH3013926, TRACH3014063, TRACH3014183, TRACH3014215, TRACH3014316, TRACH3014415, TRACH3014580, TRACH3014641, TRACH3014885, TRACH3015136, TRACH3015336, TRACH3015346, TRACH3015354, TRACH3015467, TRACH3015626, TRACH3015951, TRACH3016051, TRACH3016120, TRACH3016264, TRACH3016277, TRACH3016368, TRACH3016455, TRACH3016614, TRACH3016992, TRACH3017171, TRACH3017409, TRACH3017934, TRACH3018108, TRACH3018191, TRACH3018240, TRACH3018261, TRACH3018519, TRACH3018524, TRACH3018606, TRACH3018783, TRACH3018907, TRACH3018933, TRACH3018943, TRACH3019018, TRACH3019058, TRACH3019142, TRACH3019290, TRACH3019347, TRACH3019370, TRACH3019447, TRACH3019598, TRACH3019621, TRACH3019662, TRACH3019807, TRACH3019924, TRACH3019977, TRACH3020137, TRACH3020410, TRACH3020563, TRACH3020605, TRACH3020750, TRACH3020769, TRACH3020928, TRACH3020930, TRACH3021023, TRACH3021066, TRACH3021212, TRACH3021335, TRACH3021373, TRACH3021544, TRACH3021778, TRACH3021834, TRACH3021883, TRACH3022170, TRACH3022296, TRACH3022482, TRACH3022732, TRACH3022758, TRACH3022875, TRACH3022910, TRACH3022960, TRACH3023063, TRACH3023203, TRACH3023242, TRACH3023373, TRACH3023516, TRACH3023752, TRACH3023945, TRACH3023960, TRACH3024020, TRACH3024081, TRACH3024423, TRACH3024428, TRACH3024512, TRACH3024823, TRACH3025302, TRACH3025346, TRACH3025520, TRACH3026148, TRACH3026283, TRACH3026299, TRACH3026542, TRACH3026650, TRACH3026744, TRACH3026949, TRACH3027229, TRACH3027527, TRACH3027681, TRACH3027701, TRACH3027885, TRACH3028031, TRACH3028164, TRACH3028180, TRACH3028195, TRACH3028441, TRACH3028597, TRACH3028678, TRACH3028837, TRACH3028847, TRACH3029139, TRACH3029329, TRACH3029451, TRACH3029462, TRACH3029520, TRACH3029592, TRACH3029629, TRACH3029665, TRACH3029670, TRACH3029800, TRACH3030111, TRACH3030130, TRACH3030176, TRACH3030252, TRACH3030725, TRACH3030855, TRACH3030883, TRACH3031316, TRACH3031400, TRACH3031463, TRACH3031479, TRACH3031518, TRACH3031660, TRACH3031678, TRACH3031936, TRACH3032044, TRACH3032065, TRACH3032150, TRACH3032372, TRACH3032480, TRACH3032755, TRACH3032827, TRACH3032873, TRACH3033535, TRACH3033680, TRACH3033868, TRACH3034145, TRACH3034414, TRACH3034488, TRACH3034680, TRACH3034731, TRACH3034745, TRACH3034762, TRACH3034903, TRACH3035187, TRACH3035199, TRACH3035235, TRACH3035451, TRACH3035482, TRACH3035526, TRACH3036004, TRACH3036103, TRACH3036193, TRACH3036207, TRACH3036278, TRACH3036309, TRACH3036456, TRACH3036609, TRACH3036638, TRACH3036683, TRACH3036750, TRACH3036792, TRACH3036843, TRACH3036897, TRACH3036997, TRACH3037063, TRACH3037267, TRACH3037288, TRACH3037505, TRACH3037573, TRACH3037696, TRACH3037897, TRACH3038086, TSTOM1000186, TSTOM2000139, TSTOM2000315, TSTOM2000442, TSTOM2000553, TSTOM2000569, TSTOM2000588, TSTOM2001195, TSTOM2001274, TSTOM2001571, TSTOM2001996, TSTOM2002265, TSTOM2002505, TSTOM2002561, TSTOM2002611, TSTOM2002672, TSTOM2002682, TUTER1000014, TUTER2000057, TUTER2000283, TUTER2000425, TUTER2000916, TUTER2001286, TUTER2001341, TUTER2001387, TUTER2001433, TUTER2001461, TUTER2002028, TUTER2002074, TUTER2002158, TUTER2002228, TUTER2002323, TUTER2002356, TUTER2002729, UMVEN1000156, UMVEN2000046, UMVEN2000069, UTERU1000008, UTERU1000015, UTERU1000024, UTERU1000031, UTERU1000032, UTERU1000057, UTERU1000065, UTERU1000077, UTERU1000093, UTERU1000109, UTERU1000131, UTERU1000138, UTERU1000148, UTERU1000160, UTERU1000182, UTERU1000183, UTERU1000187, UTERU1000192, UTERU1000249, UTERU1000337, UTERU1000339, UTERU2000047, UTERU2000074, UTERU2000099, UTERU2000154, UTERU2000197, UTERU2000218, UTERU2000238, UTERU2000243, UTERU2000263, UTERU2000300, UTERU2000338, UTERU2000349, UTERU2000377, UTERU2000393, UTERU2000465, UTERU2000485, UTERU2000517, UTERU2000524, UTERU2000537, UTERU2000539, UTERU2000542, UTERU2000546, UTERU2000550, UTERU2000569, UTERU2000607, UTERU2000629, UTERU2000649, UTERU2000663, UTERU2000696, UTERU2000794, UTERU2000830, UTERU2000844, UTERU2000922, UTERU2001024, UTERU2001176, UTERU2001281, UTERU2001389, UTERU2001409, UTERU2001412, UTERU2001504, UTERU2001747, UTERU2001876, UTERU2002001, UTERU2002011, UTERU2002176, UTERU2002198, UTERU2002332, UTERU2002473, UTERU2002547, UTERU2002693, UTERU2002733, UTERU2002736, UTERU2002737, UTERU2002826, UTERU2002841, UTERU2002993, UTERU2003035, UTERU2003126, UTERU2003135, UTERU2003321, UTERU2003399, UTERU2003411, UTERU2003456, UTERU2003577, UTERU2003704, UTERU2003926, UTERU2003973, UTERU2004015, UTERU2004039, UTERU2004061, UTERU2004073, UTERU2004163, UTERU2004197, UTERU2004299, UTERU2004461, UTERU2004520, UTERU2004564, UTERU2004688, UTERU2004698, UTERU2004861, UTERU2005004, UTERU2005050, UTERU2005069, UTERU2005179, UTERU2005292, UTERU2005346, UTERU2005446, UTERU2005449, UTERU2005450, UTERU2005533, UTERU2005822, UTERU2005903, UTERU2005905, UTERU2006103, UTERU2006137, UTERU2006182, UTERU2006400, UTERU2006412, UTERU2006429, UTERU2006568, UTERU2006651, UTERU2006705, UTERU2006899, UTERU2007075, UTERU2007081, UTERU2007128, UTERU2007267, UTERU2007444, UTERU2007499, UTERU2007639, UTERU2007724, UTERU2007942, UTERU2008019, UTERU2008027, UTERU2008077, UTERU2008347, UTERU2008516, UTERU2008561, UTERU2008653, UTERU2008705, UTERU2008707, UTERU2008785, UTERU2008845, UTERU2008901, UTERU2008930, UTERU2008962, UTERU2009094, UTERU2009120, UTERU2009131, UTERU2009147, UTERU2009206, UTERU2009283, UTERU2009414, UTERU2009483, UTERU2009510, UTERU2009538, UTERU2009540, UTERU2009776, UTERU2009904, UTERU2009951, UTERU2010115, UTERU2010124, UTERU2010164, UTERU2010226, UTERU2010231, UTERU2010304, UTERU2010431, UTERU2010525, UTERU2010651, UTERU2010724, UTERU2010747, UTERU2011195, UTERU2011199, UTERU2011220, UTERU2011261, UTERU2011410, UTERU2011574, UTERU2011657, UTERU2011741, UTERU2011811, UTERU2011897, UTERU2011962, UTERU2011968, UTERU2012101, UTERU2012114, UTERU2012252, UTERU2012333, UTERU2012407, UTERU2012526, UTERU2012581, UTERU2012610, UTERU2012615, UTERU2012688, UTERU2012703, UTERU2012741, UTERU2012767, UTERU2012786, UTERU2012856, UTERU2012890, UTERU2012938, UTERU2012976, UTERU2013048, UTERU2013231, UTERU2013262, UTERU2013280, UTERU2013322, UTERU2013483, UTERU2013491, UTERU2013502, UTERU2013926, UTERU2013976, UTERU2014001, UTERU2014223, UTERU2014398, UTERU2014548, UTERU2014631, UTERU2014668, UTERU2014678, UTERU2014728, UTERU2014998, UTERU2015062, UTERU2015087, UTERU2015190, UTERU2015198, UTERU2015202, UTERU2015405, UTERU2015640, UTERU2015830, UTERU2015880, UTERU2016147, UTERU2016157, UTERU2016464, UTERU2016669, UTERU2016761, UTERU2016896, UTERU2016902, UTERU2016979, UTERU2016981, UTERU2017123, UTERU2017303, UTERU2017421, UTERU2017492, UTERU2017613, UTERU2017623, UTERU2017632, UTERU2017761, UTERU2017762, UTERU2017810, UTERU2017988, UTERU2018127, UTERU2018180, UTERU2018333, UTERU2018514, UTERU2018522, UTERU2018523, UTERU2018544, UTERU2018566, UTERU2018609, UTERU2018674, UTERU2018712, UTERU2018784, UTERU2018789, UTERU2018811, UTERU2018867, UTERU2018881, UTERU2018884, UTERU2018955, UTERU2019038, UTERU2019163, UTERU2019257, UTERU2019453, UTERU2019491, UTERU2019534, UTERU2019681, UTERU2019710, UTERU2019959, UTERU2019964, UTERU2020226, UTERU2020242, UTERU2020292, UTERU2020351, UTERU2020491, UTERU2020718, UTERU2021380, UTERU2021649, UTERU2022020, UTERU2022773, UTERU2022955, UTERU2022981, UTERU2023045, UTERU2023262, UTERU2023550, UTERU2023651, UTERU2023687, UTERU2023712, UTERU2023941, UTERU2024002, UTERU2024042, UTERU2024141, UTERU2024481, UTERU2024656, UTERU2024758, UTERU2024820, UTERU2024881, UTERU2024969, UTERU2025025, UTERU2025041, UTERU2025301, UTERU2025366, UTERU2025415, UTERU2025579, UTERU2025645, UTERU2025891, UTERU2026025, UTERU2026090, UTERU2026142, UTERU2026775, UTERU2027023, UTERU2027369, UTERU2027591, UTERU2027616, UTERU2027941, UTERU2028377, UTERU2029503, UTERU2029660, UTERU2029742, UTERU2029953, UTERU2030270, UTERU2031060, UTERU2031084, UTERU2031268, UTERU2031295, UTERU2031521, UTERU2031611, UTERU2031703, UTERU2031834, UTERU2031851, UTERU2032075, UTERU2032220, UTERU2032279, UTERU2032726, UTERU2033172, UTERU2033375, UTERU2033382, UTERU2033420, UTERU2033530, UTERU2033577, UTERU2034053, UTERU2034147, UTERU2034695, UTERU2035114, UTERU2035187, UTERU2035231, UTERU2035306, UTERU2035323, UTERU2035328, UTERU2035331, UTERU2035452, UTERU2035469, UTERU2035503, UTERU2035745, UTERU2035908, UTERU2035926, UTERU2035978, UTERU2036089, UTERU2036347, UTERU2036507, UTERU2036512, UTERU2036530, UTERU2036623, UTERU2036690, UTERU2037224, UTERU2037361, UTERU2037423, UTERU2037577, UTERU2037674, UTERU2037791, UTERU2037843, UTERU2038171, UTERU2038251, UTERU3000226, UTERU3000402, UTERU3000645, UTERU3000665, UTERU3000670, UTERU3000727, UTERU3000738, UTERU3000828, UTERU3000844, UTERU3000959, UTERU3001029, UTERU3001053, UTERU3001059, UTERU3001240, UTERU3001394, UTERU3001542, UTERU3001558, UTERU3001585, UTERU3001632, UTERU3001652, UTERU3001766, UTERU3001988, UTERU3002209, UTERU3002218, UTERU3002383, UTERU3002600, UTERU3002620, UTERU3002667, UTERU3002701, UTERU3002731, UTERU3002768, UTERU3002786, UTERU3002993, UTERU3003116, UTERU3003178, UTERU3003465, UTERU3003495, UTERU3003523, UTERU3003774, UTERU3003776, UTERU3004477, UTERU3004523, UTERU3004616, UTERU3004635, UTERU3004938, UTERU3004992, UTERU3005049, UTERU3005205, UTERU3005264, UTERU3005460, UTERU3005536, UTERU3005585, UTERU3005970, UTERU3006008, UTERU3006228, UTERU3006308, UTERU3006538, UTERU3006640, UTERU3006687, UTERU3006720, UTERU3006798, UTERU3006884, UTERU3007021, UTERU3007104, UTERU3007108, UTERU3007134, UTERU3007419, UTERU3007731, UTERU3007913, UTERU3008463, UTERU3008660, UTERU3008671, UTERU3008722, UTERU3008917, UTERU3009490, UTERU3009517, UTERU3009690, UTERU3009775, UTERU3009979, UTERU3009987, UTERU3010029, UTERU3010526, UTERU3010604, UTERU3010892, UTERU3010919, UTERU3011063, UTERU3011092, UTERU3011273, UTERU3011398, UTERU3011558, UTERU3011579, UTERU3011795, UTERU3011837, UTERU3012293, UTERU3012476, UTERU3012599, UTERU3012999, UTERU3013302, UTERU3013781, UTERU3014274, UTERU3014446, UTERU3014611, UTERU3014647, UTERU3014791, UTERU3014906, UTERU3015011, UTERU3015086, UTERU3015299, UTERU3015412, UTERU3015500, UTERU3015647, UTERU3015844, UTERU3016070, UTERU3016274, UTERU3016308, UTERU3016789, UTERU3017176, UTERU3017441, UTERU3017626, UTERU3018154, UTERU3018255, UTERU3018616, UTERU3018711, UTERU3019078

[0678] Of the 17,176 genes that include the cDNAs of the present invention, genes whose expression levels were high enough to detect in each of the CD34C, CERVX, CHONS, COLON, CORDB, and CTONG libraries were analyzed for expression frequency. The analysis results are described below. Each is a relative value, where the expression level over all tissues is taken as 100. The larger this value, the greater the level of expression.

TABLE 29

| Clone Name | CD34C | CERVX | CHONS | COLON | CORDB | CTONG |
|---|---|---|---|---|---|---|
| 3NB691000116 | 0 | 0 | 0 | 0 | 0 | 6.058 |
| 3NB691000173 | 0 | 0 | 17.493 | 0 | 0 | 1.471 |
| 3NB691000191 | 0 | 0 | 0 | 42.978 | 0 | 0 |
| 3NB692000281 | 0 | 0 | 0 | 1.545 | 0 | 0 |
| 3NB692000912 | 0 | 0 | 0 | 3.299 | 0 | 0 |
| 3NB692001334 | 0 | 0 | 0 | 0 | 0 | 0.500 |
| 3NB692001339 | 0 | 0 | 0 | 16.465 | 0 | 0 |
| 3NB692001433 | 0 | 71.092 | 0 | 0 | 0 | 0 |
| ADRGL2000006 | 0 | 0 | 0 | 7.298 | 0 | 1.936 |
| ADRGL2001830 | 0 | 0 | 0 | 0 | 0 | 22.262 |
| ADRGL2002477 | 0 | 0 | 0 | 0 | 0 | 3.169 |
| ASTRO2000014 | 0 | 0 | 0 | 0 | 0 | 1.530 |
| ASTRO2000046 | 0 | 0 | 0 | 0 | 0 | 5.320 |
| ASTRO2001029 | 0 | 0 | 0 | 0 | 0 | 2.336 |
| ASTRO2001076 | 0 | 0 | 0 | 9.979 | 0 | 2.647 |
| ASTRO2001823 | 0 | 0 | 32.157 | 0 | 0 | 0 |
| ASTRO2003024 | 0 | 19.587 | 0 | 6.654 | 0 | 1.765 |
| ASTRO2003461 | 0 | 0 | 0 | 0 | 0 | 11.095 |
| ASTRO2003632 | 0 | 0 | 0 | 2.917 | 0 | 0.774 |
| ASTRO2004032 | 0 | 0 | 0 | 0 | 0 | 11.351 |
| ASTRO2005242 | 0 | 0 | 0 | 0 | 0 | 51.585 |
| ASTRO2005863 | 0 | 0 | 0 | 0 | 0 | 14.161 |
| ASTRO2006732 | 0 | 0 | 0 | 0 | 0 | 28.567 |
| ASTRO2007221 | 0 | 0 | 0 | 0 | 0 | 34.963 |
| ASTRO2007948 | 0 | 0 | 0 | 0 | 0 | 4.665 |
| ASTRO2008040 | 0 | 0 | 0 | 0 | 0 | 22.313 |
| ASTRO2008216 | 0 | 0 | 0 | 0 | 0 | 5.943 |
| ASTRO2010819 | 0 | 0 | 0 | 0 | 0 | 5.013 |
| ASTRO2015529 | 0 | 0 | 0 | 0 | 0 | 3.451 |
| ASTRO2015987 | 0 | 0 | 58.183 | 0 | 0 | 0 |
| ASTRO2016491 | 0 | 0 | 0 | 0 | 0 | 6.566 |
| BLADE2007666 | 0 | 70.405 | 0 | 0 | 0 | 0 |
| BNGH41000190 | 0 | 0 | 0 | 0 | 0 | 18.852 |
| BNGH41000198 | 0 | 0 | 0 | 0 | 0 | 3.870 |
| BNGH42000360 | 0 | 0 | 0 | 8.834 | 0 | 0 |
| BNGH42000532 | 0 | 0 | 0 | 0 | 0 | 17.614 |
| BNGH42002168 | 0 | 0 | 0 | 0 | 0 | 4.956 |
| BNGH42006135 | 0 | 0 | 0 | 0 | 0 | 1.230 |
| BNGH42007460 | 0 | 0 | 0 | 0 | 0 | 5.630 |
| BNGH42007709 | 0 | 4.757 | 0 | 0 | 0 | 0.429 |
| BNGH42007788 | 0 | 0 | 0 | 0 | 0 | 5.734 |
| BNGH42008743 | 0 | 0 | 0 | 0 | 0 | 2.867 |
| BRACE1000131 | 0 | 0 | 0 | 0 | 0 | 5.820 |
| BRACE2000307 | 0 | 0 | 0 | 0 | 0 | 2.194 |
| BRACE2000864 | 0 | 0 | 0 | 0 | 44.299 | 0.983 |
| BRACE2001117 | 0 | 0 | 0 | 19.309 | 0 | 0 |
| BRACE2001477 | 0 | 0 | 0 | 0 | 0 | 6.406 |
| BRACE2001534 | 0 | 63.743 | 0 | 21.655 | 0 | 0 |
| BRACE2001709 | 0 | 0 | 0 | 0 | 0 | 6.045 |
| BRACE2002091 | 0 | 0 | 0 | 0 | 0 | 3.933 |
| BRACE2002441 | 0 | 0 | 0 | 0 | 0 | 2.098 |
| BRACE2002649 | 0 | 0 | 0 | 0 | 0 | 19.720 |
| BRACE2002677 | 0 | 0 | 0 | 0 | 0 | 3.596 |
| BRACE2003078 | 0 | 0 | 0 | 0 | 0 | 30.148 |
| BRACE2003254 | 0 | 0 | 20.057 | 0 | 0 | 8.431 |
| BRACE2003304 | 0 | 0 | 0 | 0 | 0 | 12.216 |
| BRACE2003594 | 0 | 0 | 0 | 81.976 | 0 | 0 |
| BRACE2003785 | 0 | 40.163 | 0 | 0 | 0 | 0 |
| BRACE2003845 | 0 | 0 | 0 | 0 | 0 | 8.486 |
| BRACE2003846 | 0 | 0 | 0 | 0 | 0 | 1.214 |
| BRACE2003892 | 0 | 0 | 0 | 0 | 0 | 20.325 |
| BRACE2003904 | 0 | 0 | 0 | 0 | 0 | 4.829 |
| BRACE2005087 | 0 | 0 | 0 | 0 | 0 | 11.592 |
| BRACE2005448 | 0 | 0 | 0 | 47.739 | 0 | 0 |
| BRACE2005453 | 0 | 0 | 0 | 90.818 | 0 | 0 |
| BRACE2005642 | 0 | 0 | 0 | 51.298 | 0 | 0 |
| BRACE2006072 | 0 | 0 | 0 | 0 | 0 | 36.712 |
| BRACE2006105 | 0 | 0 | 0 | 0 | 0 | 39.515 |
| BRACE2006162 | 0 | 0 | 0 | 0 | 0 | 2.882 |
| BRACE2006319 | 0 | 0 | 0 | 0 | 0 | 6.530 |
| BRACE2006397 | 12.397 | 0 | 0 | 10.361 | 0 | 0.550 |
| BRACE2006514 | 0 | 0 | 0 | 0 | 0 | 1.618 |
| BRACE2006900 | 0 | 0 | 0 | 7.225 | 0 | 0 |
| BRACE2006937 | 0 | 27.657 | 0 | 0 | 0 | 0 |
| BRACE2007401 | 0 | 0 | 0 | 0 | 0 | 3.404 |
| BRACE2007518 | 0 | 0 | 0 | 15.934 | 0 | 0 |
| BRACE2007577 | 0 | 0 | 0 | 0 | 0 | 1.824 |
| BRACE2007671 | 0 | 0 | 0 | 0 | 0 | 2.880 |
| BRACE2008481 | 0 | 0 | 61.843 | 0 | 0 | 0 |
| BRACE2008653 | 0 | 0 | 0 | 0 | 0 | 6.876 |
| BRACE2009037 | 0 | 0 | 0 | 0 | 24.511 | 1.088 |
| BRACE2009366 | 0 | 74.665 | 0 | 0 | 0 | 0 |
| BRACE2009517 | 0 | 0 | 0 | 0 | 0 | 10.103 |
| BRACE2012528 | 0 | 0 | 0 | 0 | 0 | 0.883 |
| BRACE2016362 | 0 | 0 | 0 | 0 | 0 | 28.712 |
| BRACE2017397 | 0 | 48.741 | 0 | 0 | 0 | 0 |
| BRACE2021014 | 0 | 0 | 0 | 0 | 0 | 11.034 |
| BRACE2022638 | 0 | 0 | 0 | 0 | 0 | 1.388 |
| BRACE2027643 | 0 | 0 | 0 | 0 | 0 | 26.828 |
| BRACE2032477 | 0 | 0 | 0 | 0 | 0 | 10.379 |
| BRACE3001066 | 0 | 0 | 0 | 0 | 0 | 72.408 |
| BRACE3010428 | 0 | 0 | 0 | 0 | 0 | 6.396 |
| BRACE3013936 | 0 | 0 | 0 | 0 | 0 | 56.749 |
| BRALZ2009482 | 0 | 0 | 0 | 0 | 0 | 1.384 |
| BRAMY2000585 | 0 | 0 | 0 | 17.243 | 0 | 0 |
| BRAMY2002369 | 0 | 0 | 0 | 0 | 0 | 15.195 |
| BRAMY2004363 | 0 | 0 | 0 | 0 | 0 | 3.808 |
| BRAMY2004521 | 0 | 0 | 0 | 0 | 0 | 4.415 |
| BRAMY2007078 | 0 | 0 | 0 | 0 | 0 | 7.083 |
| BRAMY2007613 | 0 | 0 | 0 | 0 | 0 | 2.495 |
| BRAMY2009934 | 0 | 0 | 0 | 41.502 | 0 | 0 |
| BRAMY2012091 | 0 | 0 | 0 | 41.689 | 0 | 0 |
| BRAMY2015211 | 0 | 0 | 0 | 0 | 0 | 24.194 |
| BRAMY2019554 | 0 | 0 | 0 | 0 | 0 | 2.973 |
| BRAMY2020058 | 0 | 0 | 0 | 0 | 0 | 52.028 |
| BRAMY2020427 | 0 | 0 | 0 | 0 | 0 | 2.206 |
| BRAMY2022493 | 0 | 0 | 58.772 | 0 | 0 | 4.941 |
| BRAMY2026685 | 0 | 0 | 0 | 0 | 0 | 4.616 |
| BRAMY2026778 | 0 | 0 | 0 | 0 | 0 | 18.048 |
| BRAMY2027140 | 0 | 0 | 0 | 0 | 0 | 48.032 |
| BRAMY2027739 | 0 | 27.810 | 0 | 0 | 0 | 0 |
| BRAMY2028740 | 0 | 0 | 0 | 0 | 0 | 3.468 |
| BRAMY2032087 | 0 | 0 | 0 | 0 | 0 | 2.256 |
| BRAMY2040095 | 0 | 0 | 0 | 4.800 | 0 | 0 |
| BRAMY2040592 | 0 | 0 | 0 | 24.447 | 0 | 0 |
| BRAMY2047420 | 42.545 | 0 | 0 | 0 | 0 | 0 |
| BRAMY3002803 | 0 | 0 | 0 | 0 | 0 | 26.873 |
| BRAMY3004377 | 0 | 0 | 0 | 0 | 0 | 1.545 |
| BRAMY3010008 | 0 | 0 | 0 | 0 | 0 | 1.084 |
| BRAMY3010492 | 0 | 0 | 0 | 0 | 0 | 10.727 |
| BRAMY4001863 | 0 | 0 | 0 | 0 | 0 | 55.803 |
| BRAWH1000093 | 0 | 0 | 0 | 0 | 0 | 3.436 |
| BRAWH2000460 | 0 | 0 | 0 | 4.285 | 0 | 1.137 |
| BRAWH2000633 | 0 | 0 | 0 | 9.307 | 0 | 0 |
| BRAWH2000839 | 0 | 0 | 0 | 0 | 0 | 1.530 |
| BRAWH2001092 | 0 | 0 | 0 | 1.234 | 0 | 0.982 |
| BRAWH2001171 | 0 | 0 | 13.682 | 0 | 0 | 0 |
| BRAWH2001321 | 0 | 0 | 0 | 0 | 0 | 1.599 |
| BRAWH2001671 | 0 | 0 | 0 | 0 | 0 | 7.082 |
| BRAWH2003135 | 0 | 0 | 0 | 0 | 0 | 65.066 |
| BRAWH2003240 | 0 | 0 | 0 | 55.096 | 0 | 0 |
| BRAWH2005068 | 0 | 0 | 0 | 2.824 | 0 | 0 |
| BRAWH2005661 | 0 | 0 | 0 | 0 | 0 | 8.933 |
| BRAWH2008577 | 0 | 73.471 | 0 | 0 | 0 | 0 |
| BRAWH2008956 | 0 | 0 | 0 | 0 | 0 | 29.001 |
| BRAWH2009227 | 0 | 0 | 0 | 0 | 0 | 29.437 |
| BRAWH2009304 | 0 | 0 | 0 | 0 | 0 | 7.305 |
| BRAWH2014188 | 0 | 0 | 0 | 0 | 0 | 5.334 |
| BRAWH2014645 | 0 | 0 | 0 | 0 | 0 | 1.969 |
| BRAWH2017685 | 0 | 0 | 0 | 0 | 0 | 0.945 |
| BRAWH3002574 | 0 | 0 | 0 | 0 | 0 | 12.314 |
| BRAWH3002853 | 0 | 0 | 0 | 0 | 0 | 6.888 |
| BRAWH3021545 | 0 | 0 | 0 | 0 | 0 | 6.795 |
| BRAWH3021574 | 0 | 0 | 0 | 0 | 0 | 17.507 |
| BRCAN2000923 | 0 | 0 | 0 | 0 | 97.340 | 0 |
| BRCAN2003944 | 0 | 0 | 6.239 | 0 | 0 | 0 |
| BRCAN2009432 | 0 | 0 | 0 | 0 | 0 | 4.905 |
| BRCAN2015371 | 0 | 0 | 0 | 0 | 0 | 20.417 |
| BRCAN2015719 | 0 | 0 | 0 | 0 | 0 | 5.624 |
| BRCAN2020710 | 0 | 0 | 0 | 0 | 0 | 20.242 |
| BRCAN2024572 | 0 | 0 | 0 | 0 | 0 | 10.174 |
| BRCAN2026197 | 0 | 0 | 0 | 0 | 0 | 2.908 |
| BRCAN2028036 | 0 | 0 | 0 | 0 | 0 | 4.497 |
| BRCOC1000040 | 0 | 0 | 0 | 0 | 0 | 5.493 |
| BRCOC2000487 | 0 | 0 | 0 | 0 | 0 | 0.540 |
| BRCOC2003125 | 0 | 0 | 0 | 39.895 | 0 | 0 |
| BRCOC2003187 | 0 | 0 | 0 | 11.042 | 0 | 0 |
| BRCOC2010123 | 46.010 | 0 | 0 | 0 | 0 | 0 |
| BRCOC2019903 | 0 | 0 | 0 | 0 | 0 | 29.854 |
| BRHIP2000534 | 0 | 0 | 0 | 0 | 0 | 5.100 |
| BRHIP2000553 | 0 | 0 | 0 | 0 | 0 | 4.786 |
| BRHIP2002339 | 0 | 0 | 0 | 0 | 0 | 14.617 |
| BRHIP2004814 | 0 | 0 | 0 | 0 | 0 | 64.609 |
| BRHIP2007305 | 0 | 0 | 0 | 0 | 0 | 10.542 |
| BRHIP2017945 | 0 | 0 | 71.402 | 0 | 0 | 0 |
| BRHIP2022326 | 0 | 0 | 0 | 0 | 0 | 12.676 |
| BRHIP2023888 | 0 | 0 | 0 | 0 | 0 | 2.741 |
| BRHIP2024742 | 0 | 0 | 0 | 0 | 0 | 4.646 |
| BRHIP2027077 | 0 | 41.741 | 0 | 0 | 0 | 3.762 |
| BRHIP3000017 | 0 | 0 | 0 | 0 | 0 | 8.213 |
| BRHIP3007223 | 0 | 0 | 0 | 0 | 0 | 3.755 |
| BRHIP3012997 | 0 | 0 | 0 | 0 | 0 | 1.726 |
| BRHIP3020046 | 0 | 0 | 0 | 0 | 0 | 3.773 |
| BRSSN2000498 | 0 | 0 | 0 | 0 | 0 | 2.038 |
| BRSSN2009518 | 0 | 0 | 0 | 0 | 0 | 6.416 |
| BRSSN2013696 | 0 | 0 | 0 | 0 | 0 | 6.652 |
| BRSSN2014610 | 0 | 0 | 0 | 0 | 0 | 6.650 |
| BRSTN1000083 | 0 | 0 | 0 | 0 | 0 | 4.757 |
| BRSTN2011961 | 0 | 5.985 | 0 | 0 | 0 | 0.539 |
| BRSTN2012069 | 2.383 | 5.668 | 0.629 | 1.726 | 0.794 | 0.018 |
| BRSTN2012174 | 0 | 4.180 | 0 | 2.840 | 0 | 0 |
| BRSTN2013502 | 0 | 0 | 0 | 0 | 0 | 4.527 |
| BRSTN2016470 | 0 | 0 | 0 | 6.147 | 0 | 0 |
| BRTHA2006975 | 0 | 46.982 | 0 | 0 | 0 | 0 |
| BRTHA2007998 | 0 | 0 | 0 | 0 | 0 | 1.606 |
| BRTHA2016577 | 0 | 48.760 | 0 | 0 | 0 | 0 |
| BRTHA2027229 | 0 | 0 | 0 | 0 | 0 | 3.410 |
| BRTHA2033155 | 0 | 0 | 0 | 0 | 0 | 7.921 |
| BRTHA3011194 | 0 | 0 | 0 | 0 | 0 | 6.583 |
| BRTHA3020314 | 0 | 0 | 0 | 0 | 0 | 18.965 |
| BRTHA3022641 | 0 | 0 | 0 | 0 | 0 | 32.949 |
| CD34C2000051 | 100 | 0 | 0 | 0 | 0 | 0 |
| CD34C2000152 | 100 | 0 | 0 | 0 | 0 | 0 |
| CD34C2000175 | 100 | 0 | 0 | 0 | 0 | 0 |
| CD34C2000443 | 100 | 0 | 0 | 0 | 0 | 0 |
| CD34C3000125 | 97.628 | 0 | 0 | 0 | 0 | 0 |
| CD34C3000252 | 34.472 | 0 | 0 | 0 | 0 | 4.586 |
| CD34C3000314 | 100 | 0 | 0 | 0 | 0 | 0 |
| CD34C3000424 | 96.167 | 0 | 0 | 0 | 0 | 0 |
| CD34C3000494 | 100 | 0 | 0 | 0 | 0 | 0 |
| CERVX1000042 | 0 | 100 | 0 | 0 | 0 | 0 |
| CERVX2000812 | 0 | 100 | 0 | 0 | 0 | 0 |
| CERVX2000968 | 0 | 100 | 0 | 0 | 0 | 0 |
| CERVX2002006 | 0 | 100 | 0 | 0 | 0 | 0 |
| CERVX2002013 | 0 | 100 | 0 | 0 | 0 | 0 |
| CERVX2002430 | 0 | 100 | 0 | 0 | 0 | 0 |
| CERVX2002770 | 0 | 48.712 | 0 | 0 | 0 | 0 |
| CHONS1000058 | 0 | 0 | 100 | 0 | 0 | 0 |
| CHONS2000172 | 0 | 0 | 82.765 | 0 | 0 | 0 |
| CHONS2000797 | 0 | 0 | 96.373 | 0 | 0 | 0 |
| CHONS2001287 | 0 | 0 | 100 | 0 | 0 | 0 |
| CHONS2001382 | 0 | 0 | 100 | 0 | 0 | 0 |
| CHONS2001797 | 0 | 0 | 100 | 0 | 0 | 0 |
| CHONS2001834 | 0 | 0 | 100 | 0 | 0 | 0 |
| CHONS2002419 | 0 | 0 | 100 | 0 | 0 | 0 |
| CHONS2002829 | 0 | 0 | 36.193 | 0 | 0 | 0 |
| COLON1000030 | 0 | 0 | 0 | 100 | 0 | 0 |
| COLON1000084 | 0 | 0 | 0 | 100 | 0 | 0 |
| COLON1000135 | 0 | 0 | 0 | 100 | 0 | 0 |
| COLON2000470 | 0 | 0 | 0 | 50.006 | 0 | 0 |
| COLON2000557 | 0 | 0 | 0 | 100 | 0 | 0 |
| COLON2000568 | 0 | 0 | 0 | 100 | 0 | 0 |
| COLON2001721 | 0 | 0 | 0 | 38.840 | 0 | 0 |
| COLON2001829 | 0 | 0 | 0 | 100 | 0 | 0 |
| COLON2001866 | 0 | 0 | 0 | 100 | 0 | 0 |
| COLON2002443 | 0 | 0 | 0 | 31.658 | 0 | 0 |
| COLON2002520 | 0 | 0 | 0 | 100 | 0 | 0 |
| COLON2003043 | 0 | 0 | 0 | 100 | 0 | 0 |
| COLON2003529 | 0 | 0 | 0 | 100 | 0 | 0 |
| COLON2004318 | 0 | 0 | 0 | 100 | 0 | 0 |
| COLON2004351 | 0 | 0 | 0 | 100 | 0 | 0 |
| COLON2004478 | 0 | 0 | 0 | 100 | 0 | 0 |
| COLON2004911 | 0 | 0 | 0 | 100 | 0 | 0 |
| COLON2005126 | 0 | 0 | 0 | 100 | 0 | 0 |
| COLON2005623 | 0 | 0 | 0 | 100 | 0 | 0 |
| COLON2005735 | 0 | 0 | 0 | 100 | 0 | 0 |
| COLON2005772 | 0 | 0 | 0 | 100 | 0 | 0 |
| COLON2006263 | 0 | 0 | 0 | 100 | 0 | 0 |
| COLON2006282 | 0 | 0 | 0 | 100 | 0 | 0 |
| COLON2006417 | 0 | 0 | 0 | 100 | 0 | 0 |
| COLON2007274 | 0 | 0 | 0 | 100 | 0 | 0 |
| COLON2007733 | 0 | 0 | 0 | 87.532 | 0 | 0 |
| COLON2008105 | 0 | 0 | 0 | 100 | 0 | 0 |
| COLON2009337 | 0 | 0 | 0 | 100 | 0 | 0 |
| COLON2009499 | 0 | 0 | 0 | 100 | 0 | 0 |
| CORDB1000140 | 0 | 0 | 0 | 0 | 100 | 0 |
| CORDB2000061 | 0 | 0 | 0 | 0 | 100 | 0 |
| CORDB2000127 | 0 | 0 | 0 | 0 | 100 | 0 |
| CORDB2000541 | 0 | 0 | 0 | 0 | 100 | 0 |
| CTONG1000009 | 0 | 0 | 0 | 0 | 0 | 72.374 |
| CTONG1000010 | 0 | 0 | 0 | 0 | 0 | 12.075 |
| CTONG1000020 | 0 | 0 | 0 | 0 | 0 | 100 |
| CTONG1000022 | 0 | 0 | 0 | 0 | 0 | 100 |
| CTONG1000040 | 0 | 0 | 0 | 0 | 0 | 100 |
| CTONG1000052 | 0 | 0 | 0 | 0 | 0 | 5.627 |
| CTONG1000056 | 0 | 0 | 0 | 0 | 0 | 100 |
| CTONG1000062 | 0 | 0 | 0 | 0 | 0 | 100 |
| CTONG1000086 | 0 | 0 | 0 | 0 | 0 | 100 |
| CTONG1000087 | 0 | 0 | 0 | 0 | 0 | 3.895 |
| CTONG1000088 | 0 | 0 | 0 | 0 | 0 | 5.442 |
| CTONG1000093 | 0 | 0 | 0 | 0 | 0 | 74.021 |
| CTONG1000094 | 0 | 0 | 0 | 0 | 0 | 0.725 |
| CTONG1000097 | 0 | 0 | 0 | 0 | 0 | 100 |
| CTONG1000113 | 0 | 0 | 0 | 79.033 | 0 | 20.967 |
| CTONG1000137 | 0 | 0 | 0 | 0 | 0 | 60.963 |
| CTONG1000165 | 0 | 0 | 0 | 0 | 0 | 100 |
| CTONG1000175 | 0 | 0 | 0 | 0 | 0 | 15.679 |
| CTONG1000180 | 0 | 0 | 0 | 0 | 0 | 44.728 |
| CTONG1000181 | 0 | 0 | 0 | 0 | 0 | 100 |
| CTONG1000218 | 0 | 0 | 0 | 0 | 0 | 1.794 |
| CTONG1000220 | 0 | 0 | 0 | 0 | 0 | 24.817 |
| CTONG1000241 | 0 | 0 | 0 | 0 | 0 | 11.853 |
| CTONG1000277 | 0 | 0 | 0 | 0 | 0 | 38.523 |
| CTONG1000283 | 0 | 0 | 0 | 0 | 0 | 100 |
| CTONG1000288 | 0 | 0 | 0 | 0 | 0 | 84.986 |
| CTONG1000302 | 0 | 0 | 0 | 0 | 0 | 100 |
| CTONG1000341 | 0 | 0 | 0 | 0 | 0 | 51.706 |
| CTONG1000467 | 0 | 0 | 0 | 0 | 0 | 16.004 |
| CTONG1000476 | 0 | 0 | 0 | 0 | 0 | 100 |
| CTONG1000488 | 0 | 0 | 0 | 0 | 0 | 100 |
| CTONG1000508 | 0 | 0 | 0 | 0 | 0 | 100 |
| CTONG1000540 | 0 | 0 | 0 | 0 | 0 | 100 |
| CTONG2000031 | 0 | 0 | 0 | 0 | 0 | 65.066 |
| CTONG2000034 | 0 | 0 | 0 | 0 | 0 | 33.574 |
| CTONG2000042 | 0 | 0 | 0 | 0 | 0 | 65.252 |
| CTONG2000063 | 0 | 0 | 0 | 0 | 0 | 35.886 |
| CTONG2000201 | 0 | 0 | 0 | 13.608 | 0 | 21.662 |
| CTONG2000218 | 0 | 0 | 0 | 0 | 0 | 100 |
| CTONG2000279 | 0 | 0 | 0 | 0 | 0 | 100 |
| CTONG2000303 | 0 | 0 | 0 | 0 | 0 | 100 |
| CTONG2000330 | 0 | 0 | 0 | 0 | 0 | 100 |
| CTONG2000395 | 0 | 0 | 0 | 0 | 0 | 100 |
| CTONG2000411 | 0 | 0 | 0 | 0 | 0 | 64.312 |
| CTONG2000452 | 0 | 0 | 0 | 0 | 0 | 5.425 |
| CTONG2000465 | 0 | 0 | 0 | 0 | 0 | 69.076 |
| CTONG2000469 | 0 | 0 | 0 | 0 | 0 | 5.439 |
| CTONG2000480 | 0 | 0 | 0 | 0 | 0 | 100 |
| CTONG2000508 | 0 | 0 | 0 | 0 | 0 | 25.005 |
| CTONG2000561 | 0 | 0 | 0 | 0 | 0 | 40.551 |
| CTONG2000589 | 0 | 0 | 0 | 0 | 0 | 20.768 |
| CTONG2000766 | 0 | 0 | 0 | 0 | 0 | 100 |
| CTONG2000771 | 0 | 0 | 0 | 0 | 0 | 100 |
| CTONG2000819 | 0 | 0 | 0 | 0 | 0 | 100 |
| CTONG2000827 | 0 | 0 | 0 | 0 | 0 | 62.680 |
| CTONG2000846 | 0 | 0 | 0 | 0 | 0 | 100 |
| CTONG2000855 | 0 | 0 | 0 | 0 | 0 | 100 |
| CTONG2000977 | 0 | 0 | 0 | 0 | 0 | 100 |
| CTONG2001139 | 0 | 0 | 0 | 0 | 0 | 50.204 |
| CTONG2001226 | 0 | 0 | 0 | 0 | 0 | 14.138 |
| CTONG2001320 | 0 | 0 | 0 | 0 | 0 | 9.819 |
| CTONG2001366 | 0 | 0 | 0 | 0 | 0 | 28.875 |
| CTONG2001413 | 0 | 0 | 0 | 0 | 0 | 100 |
| CTONG2001428 | 0 | 0 | 0 | 0 | 0 | 62.446 |
| CTONG2001513 | 0 | 0 | 0 | 0 | 0 | 51.138 |
| CTONG2001524 | 0 | 0 | 0 | 0 | 0 | 100 |
| CTONG2001533 | 0 | 0 | 0 | 0 | 0 | 64.609 |
| CTONG2001598 | 0 | 0 | 0 | 0 | 0 | 72.408 |
| CTONG2001681 | 0 | 0 | 0 | 0 | 0 | 100 |
| CTONG2001724 | 0 | 0 | 0 | 0 | 0 | 100 |
| CTONG2001748 | 0 | 0 | 0 | 0 | 0 | 15.573 |
| CTONG2001749 | 0 | 0 | 0 | 0 | 0 | 100 |
| CTONG2001800 | 0 | 0 | 0 | 0 | 0 | 52.667 |
| CTONG2001820 | 0 | 0 | 0 | 0 | 0 | 50.616 |
| CTONG2001858 | 0 | 0 | 0 | 0 | 0 | 41.238 |
| CTONG2001877 | 0 | 0 | 0 | 0 | 0 | 100 |
| CTONG2001911 | 0 | 0 | 0 | 0 | 0 | 28.144 |
| CTONG2001932 | 0 | 0 | 0 | 0 | 0 | 38.485 |
| CTONG2001955 | 0 | 0 | 0 | 0 | 0 | 100 |
| CTONG2002066 | 0 | 0 | 0 | 79.033 | 0 | 20.967 |
| CTONG2002073 | 0 | 0 | 0 | 0 | 0 | 2.728 |
| CTONG2002095 | 0 | 0 | 0 | 0 | 0 | 26.088 |
| CTONG2002143 | 0 | 0 | 0 | 0 | 0 | 74.021 |
| CTONG2002270 | 0 | 0 | 0 | 0 | 0 | 12.843 |
| CTONG2002395 | 0 | 0 | 0 | 0 | 0 | 69.076 |
| CTONG2002417 | 0 | 0 | 0 | 0 | 0 | 100 |
| CTONG2002418 | 0 | 0 | 0 | 0 | 0 | 100 |
| CTONG2002453 | 0 | 0 | 0 | 0 | 0 | 14.460 |
| CTONG2002520 | 0 | 60.835 | 0 | 0 | 0 | 5.483 |
| CTONG2002558 | 0 | 0 | 0 | 0 | 0 | 51.706 |
| CTONG2002590 | 0 | 0 | 0 | 0 | 0 | 100 |
| CTONG2002709 | 0 | 0 | 0 | 0 | 0 | 4.036 |
| CTONG2002721 | 0 | 0 | 0 | 0 | 0 | 69.076 |
| CTONG2002744 | 0 | 0 | 13.047 | 0 | 0 | 9.872 |
| CTONG2002766 | 0 | 0 | 0 | 0 | 0 | 22.007 |
| CTONG2002803 | 0 | 0 | 0 | 0 | 0 | 2.742 |
| CTONG2002816 | 0 | 0 | 0 | 0 | 0 | 100 |
| CTONG2002820 | 0 | 0 | 0 | 0 | 0 | 41.898 |
| CTONG2002832 | 0 | 0 | 0 | 0 | 0 | 20.880 |
| CTONG2002841 | 0 | 0 | 0 | 0 | 0 | 19.729 |
| CTONG2002903 | 0 | 0 | 0 | 0 | 0 | 34.423 |
| CTONG2002965 | 0 | 0 | 0 | 0 | 0 | 100 |
| CTONG2002999 | 0 | 0 | 0 | 0 | 0 | 100 |
| CTONG2003028 | 0 | 0 | 0 | 0 | 0 | 100 |
| CTONG2003094 | 0 | 0 | 0 | 0 | 0 | 3.413 |
| CTONG2003100 | 0 | 0 | 0 | 0 | 0 | 7.981 |
| CTONG2003115 | 0 | 0 | 0 | 0 | 0 | 100 |
| CTONG2003189 | 0 | 0 | 0 | 0 | 0 | 74.021 |
| CTONG2003245 | 0 | 0 | 0 | 0 | 0 | 100 |
| CTONG2003293 | 0 | 0 | 0 | 0 | 0 | 17.217 |
| CTONG2003298 | 0 | 0 | 0 | 0 | 0 | 8.110 |
| CTONG2003348 | 0 | 0 | 0 | 0 | 0 | 60.963 |
| CTONG2003350 | 0 | 0 | 0 | 0 | 0 | 100 |
| CTONG2003361 | 0 | 0 | 0 | 0 | 0 | 43.764 |
| CTONG2003372 | 0 | 0 | 0 | 0 | 0 | 100 |
| CTONG2003375 | 0 | 0 | 0 | 0 | 0 | 100 |
| CTONG2003427 | 0 | 0 | 0 | 0 | 0 | 100 |
| CTONG2003517 | 0 | 0 | 0 | 0 | 0 | 20.880 |
| CTONG2003524 | 0 | 0 | 0 | 0 | 0 | 3.001 |
| CTONG2003599 | 0 | 0 | 0 | 0 | 0 | 100 |
| CTONG2003680 | 0 | 0 | 0 | 0 | 0 | 19.285 |
| CTONG2003699 | 0 | 0 | 0 | 0 | 0 | 64.894 |
| CTONG2003764 | 0 | 0 | 0 | 0 | 0 | 24.325 |
| CTONG2003782 | 0 | 0 | 0 | 0 | 0 | 100 |
| CTONG2003889 | 0 | 0 | 0 | 0 | 0 | 100 |
| CTONG2003937 | 0 | 0 | 0 | 0 | 0 | 34.822 |
| CTONG2003945 | 0 | 0 | 0 | 0 | 0 | 19.903 |
| CTONG2004000 | 0 | 0 | 0 | 0 | 0 | 100 |
| CTONG2004062 | 0 | 0 | 0 | 0 | 0 | 100 |
| CTONG2004115 | 0 | 0 | 0 | 0 | 0 | 22.262 |
| CTONG2004126 | 0 | 0 | 0 | 0 | 0 | 100 |
| CTONG2004264 | 0 | 0 | 0 | 0 | 0 | 100 |
| CTONG2004305 | 0 | 0 | 0 | 0 | 0 | 65.066 |
| CTONG2004397 | 0 | 0 | 0 | 0 | 0 | 51.706 |
| CTONG2004423 | 0 | 0 | 0 | 0 | 0 | 21.403 |
| CTONG2004454 | 0 | 0 | 0 | 0 | 0 | 100 |
| CTONG2004487 | 0 | 0 | 0 | 0 | 0 | 10.571 |
| CTONG2004550 | 0 | 0 | 0 | 0 | 0 | 34.822 |
| CTONG2004669 | 0 | 0 | 0 | 0 | 0 | 100 |
| CTONG2004716 | 0 | 0 | 0 | 0 | 0 | 100 |
| CTONG2004912 | 0 | 0 | 0 | 0 | 0 | 100 |
| CTONG2004941 | 0 | 0 | 0 | 0 | 0 | 100 |
| CTONG2004948 | 0 | 0 | 0 | 0 | 0 | 100 |
| CTONG2005028 | 0 | 0 | 0 | 0 | 0 | 25.499 |
| CTONG2005049 | 0 | 0 | 0 | 0 | 0 | 100 |
| CTONG2005110 | 0 | 0 | 0 | 0 | 0 | 100 |
| CTONG2005145 | 0 | 0 | 0 | 0 | 0 | 45.702 |
| CTONG2005265 | 0 | 0 | 0 | 0 | 0 | 34.822 |
| CTONG2005278 | 0 | 0 | 0 | 0 | 0 | 10.736 |
| CTONG2005290 | 0 | 0 | 0 | 0 | 0 | 42.764 |
| CTONG2005374 | 0 | 0 | 0 | 0 | 0 | 100 |
| CTONG2005399 | 0 | 0 | 0 | 0 | 0 | 100 |
| CTONG2005468 | 0 | 0 | 0 | 0 | 0 | 83.301 |
| CTONG2005553 | 0 | 0 | 0 | 0 | 0 | 9.337 |
| CTONG2005567 | 0 | 0 | 0 | 0 | 0 | 100 |
| CTONG2005585 | 0 | 0 | 0 | 0 | 0 | 5.218 |
| CTONG2005615 | 0 | 0 | 0 | 0 | 0 | 17.713 |
| CTONG2005635 | 0 | 0 | 0 | 0 | 0 | 100 |
| CTONG2005775 | 0 | 0 | 0 | 0 | 0 | 100 |
| CTONG2005795 | 0 | 0 | 0 | 0 | 0 | 64.609 |
| CTONG2005890 | 0 | 0 | 0 | 0 | 0 | 100 |
| CTONG2005904 | 0 | 0 | 0 | 0 | 0 | 100 |
| CTONG2005913 | 0 | 0 | 0 | 0 | 0 | 49.868 |
| CTONG2006004 | 0 | 0 | 0 | 0 | 0 | 3.932 |
| CTONG2006129 | 0 | 0 | 0 | 0 | 0 | 100 |
| CTONG2006223 | 0 | 0 | 0 | 0 | 0 | 100 |
| CTONG2006235 | 0 | 0 | 0 | 0 | 0 | 3.051 |
| CTONG2006273 | 0 | 0 | 0 | 0 | 0 | 100 |
| CTONG2006310 | 0 | 0 | 0 | 0 | 0 | 100 |
| CTONG2006377 | 0 | 0 | 0 | 0 | 0 | 21.867 |
| CTONG2006393 | 0 | 0 | 0 | 0 | 0 | 65.066 |
| CTONG2006412 | 0 | 0 | 0 | 0 | 0 | 11.562 |
| CTONG2006449 | 0 | 0 | 0 | 0 | 0 | 16.373 |
| CTONG2006515 | 0 | 0 | 0 | 0 | 0 | 100 |
| CTONG2006524 | 0 | 0 | 0 | 0 | 0 | 100 |
| CTONG2006562 | 0 | 0 | 0 | 0 | 0 | 7.823 |
| CTONG2006568 | 0 | 0 | 0 | 0 | 0 | 100 |
| CTONG2006611 | 0 | 0 | 0 | 0 | 0 | 26.900 |
| CTONG2006620 | 0 | 0 | 0 | 0 | 0 | 100 |
| CTONG2006666 | 0 | 0 | 0 | 0 | 0 | 48.802 |
| CTONG2006691 | 0 | 0 | 0 | 0 | 0 | 100 |
| CTONG2006709 | 0 | 0 | 0 | 0 | 0 | 9.633 |
| CTONG2006798 | 0 | 0 | 0 | 0 | 0 | 17.972 |
| CTONG2006836 | 0 | 0 | 0 | 0 | 0 | 100 |
| CTONG2006932 | 0 | 0 | 24.378 | 0 | 0 | 4.099 |
| CTONG2006942 | 0 | 0 | 0 | 0 | 0 | 100 |
| CTONG2006964 | 0 | 0 | 0 | 0 | 0 | 100 |
| CTONG2007007 | 0 | 0 | 0 | 0 | 0 | 69.356 |
| CTONG2007009 | 0 | 0 | 0 | 0 | 0 | 100 |
| CTONG2007072 | 0 | 0 | 0 | 0 | 0 | 12.021 |
| CTONG2007078 | 0 | 0 | 0 | 0 | 0 | 2.380 |
| CTONG2007091 | 0 | 0 | 0 | 0 | 0 | 100 |
| CTONG2007104 | 0 | 0 | 0 | 0 | 0 | 23.169 |
| CTONG2007168 | 0 | 0 | 0 | 0 | 0 | 11.259 |
| CTONG2007175 | 0 | 0 | 0 | 0 | 0 | 100 |
| CTONG2007259 | 0 | 0 | 0 | 0 | 0 | 100 |
| CTONG2007272 | 0 | 0 | 0 | 0 | 0 | 100 |
| CTONG2007293 | 0 | 0 | 0 | 0 | 0 | 62.680 |
| CTONG2007297 | 0 | 0 | 0 | 0 | 0 | 100 |
| CTONG2007399 | 0 | 0 | 0 | 0 | 0 | 30.379 |
| CTONG2007400 | 0 | 0 | 0 | 0 | 0 | 42.865 |
| CTONG2007417 | 0 | 0 | 0 | 0 | 0 | 40.148 |
| CTONG2007441 | 0 | 0 | 0 | 0 | 0 | 76.882 |
| CTONG2007474 | 0 | 0 | 0 | 0 | 0 | 19.785 |
| CTONG2007500 | 0 | 0 | 0 | 5.280 | 0 | 2.801 |
| CTONG2007586 | 0 | 0 | 0 | 0 | 0 | 11.194 |
| CTONG2007613 | 0 | 0 | 0 | 0 | 0 | 16.303 |
| CTONG2007623 | 0 | 0 | 0 | 0 | 0 | 100 |
| CTONG2007681 | 0 | 0 | 0 | 0 | 0 | 34.420 |
| CTONG2007776 | 0 | 0 | 0 | 0 | 0 | 7.922 |
| CTONG2007779 | 0 | 0 | 0 | 0 | 0 | 62.680 |
| CTONG2007898 | 0 | 0 | 0 | 0 | 0 | 100 |
| CTONG2007959 | 0 | 0 | 0 | 0 | 0 | 33.883 |
| CTONG2007970 | 0 | 0 | 0 | 0 | 0 | 100 |
| CTONG2008014 | 0 | 0 | 0 | 0 | 0 | 28.200 |
| CTONG2008184 | 0 | 0 | 0 | 0 | 0 | 100 |
| CTONG2008262 | 0 | 0 | 0 | 0 | 0 | 100 |
| CTONG2008269 | 0 | 0 | 0 | 0 | 0 | 12.672 |
| CTONG2008321 | 0 | 0 | 0 | 0 | 0 | 28.019 |
| CTONG2008343 | 0 | 0 | 0 | 0 | 0 | 60.963 |
| CTONG2008398 | 32.111 | 0 | 0 | 0 | 0 | 1.424 |
| CTONG2008402 | 0 | 0 | 0 | 0 | 0 | 100 |
| CTONG2008405 | 0 | 0 | 0 | 0 | 0 | 40.989 |
| CTONG2008466 | 0 | 0 | 0 | 0 | 0 | 14.562 |
| CTONG2008506 | 0 | 0 | 0 | 0 | 0 | 3.505 |
| CTONG2008518 | 0 | 0 | 0 | 0 | 0 | 21.520 |
| CTONG2008521 | 0 | 0 | 0 | 0 | 0 | 28.316 |
| CTONG2008562 | 0 | 0 | 0 | 0 | 0 | 100 |
| CTONG2008577 | 0 | 0 | 0 | 0 | 0 | 100 |
| CTONG2008595 | 0 | 0 | 0 | 0 | 0 | 100 |
| CTONG2008621 | 0 | 0 | 0 | 0 | 0 | 62.446 |
| CTONG2008689 | 0 | 0 | 0 | 0 | 0 | 38.923 |
| CTONG2008720 | 0 | 0 | 0 | 0 | 0 | 50.285 |
| CTONG2008721 | 0 | 0 | 0 | 0 | 0 | 62.680 |
| CTONG2008773 | 0 | 0 | 0 | 0 | 0 | 100 |
| CTONG2008792 | 0 | 0 | 0 | 0 | 0 | 13.686 |
| CTONG2008989 | 0 | 0 | 0 | 0 | 0 | 100 |
| CTONG2009033 | 0 | 0 | 0 | 0 | 0 | 47.970 |
| CTONG2009108 | 0 | 0 | 0 | 0 | 0 | 44.201 |
| CTONG2009132 | 0 | 0 | 0 | 0 | 0 | 100 |
| CTONG2009156 | 0 | 0 | 0 | 0 | 0 | 100 |
| CTONG2009181 | 0 | 0 | 0 | 0 | 0 | 100 |
| CTONG2009257 | 0 | 0 | 0 | 0 | 0 | 100 |
| CTONG2009258 | 0 | 0 | 0 | 0 | 0 | 100 |
| CTONG2009268 | 0 | 0 | 0 | 0 | 0 | 100 |
| CTONG2009270 | 0 | 0 | 0 | 0 | 0 | 100 |
| CTONG2009395 | 0 | 0 | 0 | 0 | 0 | 100 |
| CTONG2009423 | 0 | 0 | 0 | 0 | 0 | 64.609 |
| CTONG2009440 | 0 | 0 | 0 | 0 | 0 | 100 |
| CTONG2009527 | 0 | 0 | 0 | 0 | 0 | 100 |
| CTONG2009529 | 0 | 0 | 0 | 0 | 0 | 11.777 |
| CTONG2009531 | 0 | 0 | 0 | 0 | 0 | 100 |
| CTONG2009534 | 0 | 0 | 0 | 0 | 0 | 14.323 |
| CTONG2009570 | 0 | 0 | 0 | 0 | 0 | 100 |
| CTONG2009572 | 0 | 0 | 0 | 0 | 0 | 100 |
| CTONG2009604 | 0 | 0 | 0 | 0 | 0 | 100 |
| CTONG2009643 | 0 | 0 | 0 | 0 | 0 | 100 |
| CTONG2009675 | 0 | 0 | 0 | 0 | 0 | 100 |
| CTONG2009689 | 0 | 0 | 0 | 0 | 0 | 100 |
| CTONG2009725 | 0 | 0 | 0 | 0 | 0 | 100 |
| CTONG2009766 | 0 | 0 | 0 | 0 | 0 | 100 |
| CTONG2009768 | 0 | 0 | 0 | 0 | 0 | 100 |
| CTONG2009844 | 0 | 0 | 0 | 0 | 0 | 33.474 |
| CTONG2009871 | 0 | 0 | 0 | 0 | 0 | 100 |
| CTONG2009887 | 0 | 0 | 0 | 0 | 0 | 100 |
| CTONG2009891 | 0 | 0 | 0 | 0 | 0 | 100 |
| CTONG2009923 | 0 | 0 | 0 | 0 | 0 | 60.963 |
| CTONG2009938 | 0 | 0 | 0 | 0 | 0 | 37.266 |
| CTONG2009955 | 0 | 0 | 0 | 0 | 0 | 100 |
| CTONG2009958 | 0 | 0 | 0 | 0 | 0 | 100 |
| CTONG2009963 | 0 | 0 | 0 | 0 | 0 | 38.502 |
| CTONG2010018 | 0 | 0 | 0 | 0 | 0 | 100 |
| CTONG2010024 | 0 | 0 | 0 | 0 | 0 | 100 |
| CTONG2010116 | 0 | 0 | 0 | 0 | 0 | 100 |
| CTONG2010133 | 0 | 0 | 0 | 0 | 0 | 100 |
| CTONG2010148 | 0 | 0 | 0 | 0 | 0 | 100 |
| CTONG2010276 | 0 | 0 | 0 | 0 | 0 | 100 |
| CTONG2010330 | 0 | 0 | 0 | 0 | 0 | 100 |
| CTONG2010348 | 0 | 0 | 0 | 0 | 0 | 13.193 |
| CTONG2010408 | 0 | 0 | 0 | 0 | 0 | 15.959 |
| CTONG2010508 | 0 | 84.727 | 0 | 0 | 0 | 15.273 |
| CTONG2010566 | 0 | 0 | 0 | 0 | 0 | 25.256 |
| CTONG2010623 | 0 | 0 | 0 | 0 | 0 | 100 |
| CTONG2010649 | 0 | 32.315 | 0 | 0 | 0 | 8.737 |
| CTONG2010652 | 0 | 0 | 0 | 0 | 0 | 29.937 |
| CTONG2010803 | 0 | 0 | 0 | 0 | 0 | 20.971 |
| CTONG2010821 | 0 | 0 | 0 | 0 | 0 | 2.662 |
| CTONG2011188 | 0 | 0 | 0 | 0 | 0 | 78.500 |
| CTONG2011429 | 0 | 0 | 0 | 0 | 0 | 100 |
| CTONG2011474 | 0 | 0 | 0 | 0 | 0 | 100 |
| CTONG2011676 | 0 | 0 | 0 | 0 | 0 | 100 |
| CTONG2011716 | 0 | 0 | 0 | 0 | 0 | 51.706 |
| CTONG2011765 | 0 | 0 | 0 | 0 | 0 | 100 |
| CTONG2011779 | 0 | 0 | 0 | 0 | 0 | 100 |
| CTONG2011801 | 0 | 0 | 0 | 0 | 0 | 5.515 |
| CTONG2011815 | 0 | 0 | 0 | 0 | 0 | 100 |
| CTONG2011822 | 0 | 0 | 0 | 0 | 0 | 100 |
| CTONG2011825 | 0 | 0 | 0 | 0 | 0 | 15.991 |
| CTONG2011920 | 0 | 0 | 0 | 0 | 0 | 100 |
| CTONG2011985 | 0 | 0 | 0 | 0 | 0 | 100 |
| CTONG2012001 | 0 | 0 | 0 | 0 | 0 | 13.318 |
| CTONG2012029 | 0 | 0 | 0 | 0 | 0 | 34.822 |
| CTONG2012050 | 0 | 0 | 0 | 0 | 0 | 13.231 |
| CTONG2012077 | 0 | 0 | 0 | 0 | 0 | 100 |
| CTONG2012101 | 0 | 0 | 0 | 0 | 0 | 29.404 |
| CTONG2012123 | 0 | 0 | 0 | 0 | 0 | 100 |
| CTONG2012158 | 0 | 0 | 0 | 0 | 0 | 33.983 |
| CTONG2012230 | 0 | 0 | 0 | 0 | 0 | 100 |
| CTONG2012401 | 0 | 0 | 0 | 0 | 0 | 7.835 |
| CTONG2012422 | 0 | 0 | 0 | 0 | 0 | 69.076 |
| CTONG2012425 | 0 | 0 | 0 | 0 | 0 | 51.706 |
| CTONG2012447 | 0 | 0 | 0 | 0 | 0 | 100 |
| CTONG2012452 | 0 | 0 | 0 | 0 | 0 | 1.326 |
| CTONG2012453 | 0 | 0 | 0 | 0 | 0 | 14.027 |
| CTONG2012473 | 0 | 0 | 0 | 0 | 0 | 100 |
| CTONG2012476 | 0 | 0 | 0 | 0 | 0 | 100 |
| CTONG2012533 | 0 | 0 | 0 | 0 | 0 | 100 |
| CTONG2012554 | 0 | 0 | 0 | 0 | 0 | 100 |
| CTONG2012564 | 0 | 0 | 0 | 0 | 0 | 7.359 |
| CTONG2012607 | 0 | 0 | 0 | 0 | 0 | 3.221 |
| CTONG2012661 | 0 | 0 | 0 | 0 | 0 | 39.027 |
| CTONG2012724 | 0 | 0 | 0 | 0 | 0 | 100 |
| CTONG2012738 | 0 | 0 | 0 | 0 | 0 | 100 |
| CTONG2012745 | 0 | 0 | 0 | 0 | 0 | 10.331 |
| CTONG2012758 | 0 | 0 | 0 | 0 | 0 | 100 |
| CTONG2012843 | 0 | 0 | 0 | 0 | 0 | 33.574 |
| CTONG2012847 | 0 | 0 | 0 | 0 | 0 | 9.622 |
| CTONG2012879 | 0 | 0 | 0 | 0 | 0 | 19.002 |
| CTONG2012901 | 0 | 0 | 0 | 0 | 0 | 100 |
| CTONG2012996 | 0 | 0 | 0 | 0 | 0 | 32.630 |
| CTONG2013128 | 0 | 0 | 0 | 0 | 0 | 60.963 |
| CTONG2013149 | 0 | 0 | 0 | 0 | 0 | 24.817 |
| CTONG2013156 | 0 | 0 | 0 | 0 | 0 | 38.523 |
| CTONG2013178 | 0 | 0 | 0 | 0 | 0 | 35.252 |
| CTONG2013222 | 0 | 0 | 0 | 0 | 0 | 6.999 |
| CTONG2013284 | 0 | 0 | 0 | 0 | 0 | 100 |
| CTONG2013339 | 0 | 0 | 0 | 0 | 0 | 100 |
| CTONG2013348 | 0 | 0 | 0 | 0 | 0 | 10.246 |
| CTONG2013352 | 0 | 0 | 0 | 0 | 0 | 50.616 |
| CTONG2013381 | 0 | 0 | 0 | 0 | 0 | 29.215 |
| CTONG2013393 | 0 | 0 | 0 | 0 | 0 | 100 |
| CTONG2013511 | 0 | 0 | 0 | 0 | 0 | 100 |
| CTONG2013630 | 0 | 0 | 0 | 0 | 0 | 100 |
| CTONG2013803 | 0 | 0 | 0 | 0 | 0 | 100 |
| CTONG2013907 | 0 | 0 | 0 | 0 | 0 | 8.031 |
| CTONG2013934 | 0 | 0 | 0 | 0 | 0 | 12.919 |
| CTONG2013985 | 0 | 0 | 0 | 0 | 0 | 21.815 |
| CTONG2013986 | 0 | 0 | 0 | 0 | 0 | 100 |
| CTONG2014032 | 0 | 0 | 0 | 0 | 0 | 100 |
| CTONG2014058 | 0 | 0 | 0 | 0 | 0 | 100 |
| CTONG2014119 | 0 | 0 | 0 | 0 | 0 | 30.190 |
| CTONG2014165 | 0 | 0 | 0 | 0 | 0 | 8.968 |
| CTONG2014191 | 0 | 0 | 0 | 0 | 0 | 100 |
| CTONG2014206 | 0 | 0 | 0 | 0 | 0 | 100 |
| CTONG2014234 | 0 | 0 | 0 | 0 | 0 | 100 |
| CTONG2014264 | 0 | 0 | 0 | 0 | 0 | 100 |
| CTONG2014280 | 0 | 0 | 0 | 0 | 0 | 23.412 |
| CTONG2014369 | 0 | 0 | 0 | 0 | 0 | 23.253 |
| CTONG2014389 | 0 | 0 | 0 | 0 | 0 | 4.920 |
| CTONG2014491 | 0 | 0 | 0 | 0 | 0 | 62.446 |
| CTONG2014630 | 0 | 0 | 0 | 0 | 0 | 100 |
| CTONG2014635 | 0 | 0 | 0 | 0 | 0 | 100 |
| CTONG2014646 | 0 | 0 | 0 | 0 | 0 | 100 |
| CTONG2014705 | 0 | 0 | 0 | 0 | 0 | 34.963 |
| CTONG2014898 | 0 | 0 | 0 | 0 | 0 | 10.743 |
| CTONG2014946 | 0 | 0 | 0 | 0 | 0 | 100 |
| CTONG2014954 | 0 | 0 | 0 | 0 | 0 | 22.772 |
| CTONG2014959 | 0 | 0 | 0 | 0 | 0 | 100 |
| CTONG2014966 | 0 | 0 | 0 | 0 | 0 | 100 |
| CTONG2014995 | 0 | 0 | 0 | 0 | 0 | 100 |
| CTONG2015091 | 0 | 0 | 0 | 0 | 0 | 3.025 |
| CTONG2015204 | 0 | 0 | 0 | 0 | 0 | 56.503 |
| CTONG2015316 | 0 | 0 | 0 | 0 | 0 | 100 |
| CTONG2015330 | 0 | 0 | 0 | 0 | 0 | 52.970 |
| CTONG2015345 | 0 | 0 | 0 | 0 | 0 | 31.801 |
| CTONG2015358 | 0 | 0 | 0 | 0 | 0 | 74.021 |
| CTONG2015434 | 0 | 0 | 0 | 0 | 0 | 100 |
| CTONG2015518 | 0 | 0 | 0 | 0 | 0 | 24.734 |
| CTONG2015540 | 0 | 0 | 0 | 0 | 0 | 100 |
| CTONG2015596 | 0 | 0 | 0 | 0 | 0 | 100 |
| CTONG2015633 | 0 | 0 | 0 | 0 | 0 | 100 |
| CTONG2015678 | 0 | 0 | 0 | 0 | 0 | 62.446 |
| CTONG2015717 | 0 | 0 | 0 | 0 | 0 | 100 |
| CTONG2015804 | 0 | 0 | 0 | 0 | 0 | 100 |
| CTONG2015815 | 0 | 0 | 0 | 0 | 0 | 16.385 |
| CTONG2015866 | 0 | 0 | 0 | 0 | 0 | 100 |
| CTONG2015914 | 0 | 0 | 0 | 0 | 0 | 100 |
| CTONG2015953 | 0 | 0 | 0 | 0 | 0 | 100 |
| CTONG2016056 | 0 | 0 | 0 | 0 | 0 | 3.704 |
| CTONG2016185 | 0 | 0 | 0 | 0 | 0 | 19.368 |
| CTONG2016217 | 0 | 0 | 0 | 0 | 0 | 100 |
| CTONG2016355 | 0 | 0 | 0 | 0 | 0 | 100 |
| CTONG2016408 | 0 | 0 | 0 | 0 | 0 | 6.896 |
| CTONG2016499 | 0 | 0 | 0 | 0 | 0 | 65.066 |
| CTONG2016505 | 0 | 0 | 0 | 0 | 0 | 33.474 |
| CTONG2016559 | 0 | 0 | 0 | 0 | 0 | 100 |
| CTONG2016575 | 0 | 0 | 0 | 0 | 0 | 7.408 |
| CTONG2016658 | 0 | 0 | 0 | 0 | 0 | 100 |
| CTONG2016775 | 0 | 0 | 0 | 0 | 0 | 100 |
| CTONG2016797 | 0 | 0 | 0 | 0 | 0 | 100 |
| CTONG2016824 | 0 | 0 | 0 | 0 | 0 | 7.928 |
| CTONG2016846 | 0 | 0 | 0 | 0 | 0 | 100 |
| CTONG2016869 | 0 | 0 | 0 | 0 | 0 | 29.516 |
| CTONG2016904 | 0 | 0 | 0 | 0 | 0 | 100 |
| CTONG2016931 | 0 | 0 | 0 | 0 | 0 | 11.368 |
| CTONG2016942 | 0 | 0 | 0 | 0 | 0 | 21.398 |
| CTONG2016953 | 0 | 0 | 0 | 0 | 0 | 100 |
| CTONG2017021 | 0 | 0 | 0 | 0 | 0 | 100 |
| CTONG2017094 | 0 | 0 | 0 | 0 | 0 | 70.789 |
| CTONG2017292 | 0 | 0 | 0 | 0 | 0 | 100 |
| CTONG2017409 | 0 | 0 | 0 | 0 | 0 | 62.680 |
| CTONG2017429 | 0 | 0 | 0 | 0 | 0 | 40.325 |
| CTONG2017444 | 0 | 0 | 0 | 0 | 0 | 34.294 |
| CTONG2017458 | 0 | 0 | 0 | 0 | 0 | 100 |
| CTONG2017500 | 0 | 0 | 0 | 0 | 0 | 4.934 |
| CTONG2017604 | 0 | 0 | 0 | 0 | 0 | 22.375 |
| CTONG2017650 | 0 | 0 | 0 | 0 | 0 | 100 |
| CTONG2017798 | 0 | 0 | 0 | 0 | 0 | 37.119 |
| CTONG2017804 | 0 | 0 | 0 | 0 | 0 | 100 |
| CTONG2017814 | 0 | 0 | 0 | 0 | 0 | 100 |
| CTONG2017910 | 0 | 0 | 0 | 0 | 0 | 100 |
| CTONG2017939 | 0 | 0 | 0 | 0 | 0 | 100 |
| CTONG2017989 | 0 | 0 | 0 | 0 | 0 | 100 |
| CTONG2017998 | 0 | 0 | 0 | 0 | 0 | 4.666 |
| CTONG2018062 | 0 | 0 | 0 | 0 | 0 | 100 |
| CTONG2018069 | 0 | 0 | 0 | 0 | 0 | 100 |
| CTONG2018147 | 0 | 0 | 0 | 0 | 0 | 100 |
| CTONG2018211 | 0 | 0 | 0 | 0 | 0 | 6.352 |
| CTONG2018217 | 0 | 0 | 0 | 0 | 0 | 100 |
| CTONG2018279 | 0 | 0 | 0 | 0 | 0 | 100 |
| CTONG2018334 | 0 | 0 | 0 | 51.354 | 0 | 13.624 |
| CTONG2018343 | 0 | 0 | 0 | 0 | 0 | 28.371 |
| CTONG2018379 | 0 | 0 | 0 | 0 | 0 | 100 |
| CTONG2018383 | 0 | 0 | 0 | 0 | 0 | 16.839 |
| CTONG2018413 | 0 | 0 | 0 | 0 | 0 | 46.898 |
| CTONG2018483 | 0 | 0 | 0 | 0 | 0 | 100 |
| CTONG2018629 | 0 | 0 | 0 | 0 | 0 | 76.882 |
| CTONG2018632 | 0 | 0 | 0 | 0 | 0 | 14.897 |
| CTONG2018637 | 0 | 0 | 0 | 0 | 0 | 12.219 |
| CTONG2018652 | 0 | 0 | 0 | 0 | 0 | 74.021 |
| CTONG2018653 | 0 | 0 | 0 | 0 | 0 | 100 |
| CTONG2018655 | 0 | 0 | 0 | 0 | 0 | 100 |
| CTONG2018735 | 0 | 0 | 0 | 0 | 0 | 69.076 |
| CTONG2018739 | 0 | 0 | 0 | 0 | 0 | 7.218 |
| CTONG2018808 | 0 | 0 | 0 | 0 | 0 | 14.670 |
| CTONG2018843 | 0 | 0 | 0 | 0 | 0 | 20.678 |
| CTONG2018898 | 0 | 0 | 0 | 0 | 0 | 0.897 |
| CTONG2018900 | 0 | 0 | 0 | 0 | 0 | 7.970 |
| CTONG2018976 | 0 | 0 | 0 | 0 | 0 | 69.076 |
| CTONG2019029 | 0 | 0 | 0 | 0 | 0 | 60.288 |
| CTONG2019063 | 0 | 0 | 0 | 0 | 0 | 39.545 |
| CTONG2019144 | 0 | 0 | 0 | 0 | 0 | 100 |
| CTONG2019232 | 0 | 0 | 0 | 0 | 0 | 100 |
| CTONG2019248 | 0 | 0 | 0 | 0 | 0 | 28.179 |
| CTONG2019400 | 0 | 0 | 0 | 0 | 0 | 36.767 |
| CTONG2019590 | 0 | 0 | 0 | 0 | 0 | 20.042 |
| CTONG2019652 | 0 | 0 | 0 | 0 | 0 | 100 |
| CTONG2019704 | 0 | 0 | 0 | 0 | 0 | 62.446 |
| CTONG2019788 | 0 | 0 | 0 | 0 | 0 | 11.390 |
| CTONG2019822 | 0 | 0 | 0 | 0 | 0 | 12.111 |
| CTONG2019833 | 0 | 0 | 0 | 0 | 0 | 100 |
| CTONG2020031 | 0 | 0 | 0 | 0 | 0 | 100 |
| CTONG2020108 | 0 | 0 | 0 | 0 | 0 | 69.076 |
| CTONG2020127 | 0 | 0 | 0 | 0 | 0 | 100 |
| CTONG2020171 | 0 | 0 | 0 | 0 | 0 | 100 |
| CTONG2020374 | 0 | 0 | 0 | 0 | 0 | 57.889 |
| CTONG2020378 | 0 | 0 | 0 | 0 | 0 | 30.063 |
| CTONG2020411 | 0 | 0 | 0 | 0 | 0 | 12.823 |
| CTONG2020445 | 0 | 0 | 0 | 0 | 0 | 39.202 |
| CTONG2020484 | 0 | 0 | 0 | 0 | 0 | 1.095 |
| CTONG2020522 | 0 | 0 | 0 | 0 | 0 | 42.683 |
| CTONG2020560 | 0 | 0 | 0 | 0 | 0 | 2.794 |
| CTONG2020582 | 0 | 0 | 0 | 0 | 0 | 21.442 |
| CTONG2020638 | 0 | 0 | 0 | 0 | 0 | 23.060 |
| CTONG2020806 | 0 | 0 | 0 | 0 | 0 | 100 |
| CTONG2020831 | 0 | 0 | 0 | 0 | 0 | 62.680 |
| CTONG2020974 | 0 | 0 | 0 | 0 | 0 | 74.021 |
| CTONG2021024 | 0 | 0 | 0 | 0 | 0 | 62.446 |
| CTONG2021132 | 0 | 0 | 0 | 0 | 0 | 100 |
| CTONG2021168 | 0 | 0 | 0 | 0 | 0 | 100 |
| CTONG2021289 | 0 | 0 | 0 | 0 | 0 | 19.164 |
| CTONG2022153 | 0 | 0 | 0 | 0 | 0 | 100 |
| CTONG2022601 | 0 | 0 | 0 | 0 | 0 | 100 |
| CTONG2022835 | 72.054 | 0 | 0 | 0 | 0 | 3.195 |
| CTONG2023021 | 0 | 0 | 0 | 0 | 0 | 62.680 |
| CTONG2023449 | 0 | 0 | 0 | 0 | 0 | 21.398 |
| CTONG2023512 | 0 | 0 | 0 | 0 | 0 | 100 |
| CTONG2024031 | 0 | 0 | 0 | 0 | 0 | 19.255 |
| CTONG2024206 | 0 | 0 | 0 | 0 | 0 | 100 |
| CTONG2024614 | 0 | 0 | 0 | 0 | 0 | 100 |
| CTONG2024749 | 0 | 0 | 0 | 0 | 0 | 100 |
| CTONG2025496 | 0 | 0 | 0 | 0 | 0 | 100 |
| CTONG2025513 | 0 | 0 | 0 | 0 | 0 | 100 |
| CTONG2025516 | 0 | 0 | 0 | 0 | 0 | 100 |
| CTONG2025610 | 0 | 0 | 0 | 0 | 0 | 100 |
| CTONG2025900 | 0 | 0 | 0 | 0 | 0 | 100 |
| CTONG2026513 | 0 | 0 | 0 | 0 | 0 | 100 |
| CTONG2026770 | 0 | 0 | 0 | 0 | 0 | 100 |
| CTONG2026920 | 0 | 0 | 0 | 0 | 0 | 100 |
| CTONG2026987 | 0 | 0 | 0 | 0 | 0 | 100 |
| CTONG2027150 | 0 | 0 | 0 | 0 | 0 | 100 |
| CTONG2027263 | 0 | 0 | 0 | 0 | 0 | 30.673 |
| CTONG2027327 | 0 | 0 | 0 | 0 | 0 | 52.760 |
| CTONG2027361 | 0 | 0 | 0 | 0 | 0 | 100 |
| CTONG2027591 | 0 | 0 | 0 | 0 | 0 | 100 |
| CTONG2027736 | 0 | 0 | 0 | 0 | 0 | 100 |
| CTONG2027783 | 0 | 0 | 0 | 0 | 0 | 100 |
| CTONG2027828 | 0 | 0 | 0 | 0 | 0 | 100 |
| CTONG2027959 | 0 | 0 | 0 | 0 | 0 | 72.408 |
| CTONG2028097 | 0 | 0 | 0 | 0 | 0 | 100 |
| CTONG2028124 | 0 | 0 | 0 | 0 | 0 | 0.936 |
| CTONG2028208 | 0 | 0 | 0 | 0 | 0 | 6.596 |
| CTONG2028309 | 0 | 0 | 0 | 0 | 0 | 13.671 |
| CTONG2028486 | 0 | 0 | 0 | 0 | 0 | 64.609 |
| CTONG2028518 | 0 | 0 | 0 | 0 | 0 | 100 |
| CTONG2028687 | 0 | 0 | 0 | 0 | 0 | 100 |
| CTONG2028758 | 0 | 0 | 0 | 0 | 0 | 29.955 |
| CTONG3000657 | 0 | 0 | 0 | 0 | 0 | 7.226 |
| CTONG3000686 | 0 | 0 | 0 | 0 | 0 | 100 |
| CTONG3000707 | 0 | 0 | 0 | 0 | 0 | 100 |
| CTONG3000896 | 0 | 0 | 0 | 0 | 0 | 100 |
| CTONG3001123 | 0 | 0 | 0 | 0 | 0 | 14.616 |
| CTONG3001420 | 0 | 0 | 0 | 0 | 0 | 51.138 |
| CTONG3001501 | 0 | 0 | 0 | 0 | 0 | 100 |
| CTONG3001560 | 0 | 0 | 0 | 0 | 0 | 100 |
| CTONG3001605 | 0 | 0 | 0 | 0 | 0 | 100 |
| CTONG3001746 | 0 | 0 | 0 | 0 | 0 | 26.645 |
| CTONG3002020 | 0 | 0 | 0 | 0 | 0 | 100 |
| CTONG3002127 | 0 | 0 | 0 | 0 | 0 | 62.446 |
| CTONG3002370 | 0 | 0 | 0 | 0 | 0 | 100 |
| CTONG3002412 | 0 | 0 | 0 | 0 | 0 | 19.932 |
| CTONG3002433 | 0 | 0 | 0 | 0 | 0 | 100 |
| CTONG3002518 | 0 | 0 | 0 | 0 | 0 | 15.716 |
| CTONG3002552 | 0 | 0 | 0 | 0 | 0 | 100 |
| CTONG3002588 | 0 | 0 | 0 | 0 | 0 | 100 |
| CTONG3002674 | 0 | 0 | 0 | 0 | 0 | 41.611 |
| CTONG3002728 | 0 | 0 | 0 | 0 | 0 | 100 |
| CTONG3002835 | 0 | 0 | 0 | 7.713 | 0 | 4.093 |
| CTONG3002909 | 0 | 0 | 0 | 0 | 0 | 100 |
| CTONG3002947 | 0 | 0 | 0 | 0 | 0 | 100 |
| CTONG3002983 | 0 | 0 | 0 | 0 | 0 | 100 |
| CTONG3003165 | 0 | 0 | 0 | 0 | 0 | 100 |
| CTONG3003179 | 0 | 0 | 0 | 0 | 0 | 100 |
| CTONG3003483 | 0 | 0 | 0 | 0 | 0 | 100 |
| CTONG3003553 | 0 | 0 | 0 | 0 | 0 | 100 |
| CTONG3003598 | 0 | 0 | 0 | 0 | 0 | 100 |
| CTONG3003652 | 0 | 0 | 0 | 0 | 0 | 100 |
| CTONG3003654 | 0 | 0 | 0 | 0 | 0 | 100 |
| CTONG3003669 | 0 | 0 | 0 | 0 | 0 | 100 |
| CTONG3003737 | 0 | 0 | 0 | 0 | 0 | 100 |
| CTONG3003905 | 0 | 0 | 0 | 0 | 0 | 36.474 |
| CTONG3003972 | 0 | 0 | 0 | 0 | 0 | 51.706 |
| CTONG3004072 | 0 | 0 | 0 | 0 | 0 | 36.356 |
| CTONG3004317 | 0 | 0 | 0 | 0 | 0 | 60.963 |
| CTONG3004397 | 0 | 0 | 0 | 0 | 0 | 100 |
| CTONG3004550 | 0 | 0 | 0 | 0 | 0 | 100 |
| CTONG3004576 | 0 | 0 | 0 | 0 | 0 | 62.446 |
| CTONG3004607 | 0 | 0 | 0 | 0 | 0 | 100 |
| CTONG3004712 | 0 | 0 | 0 | 0 | 0 | 100 |
| CTONG3004726 | 0 | 0 | 0 | 0 | 0 | 31.543 |
| CTONG3005325 | 0 | 0 | 0 | 0 | 0 | 100 |
| CTONG3005648 | 0 | 0 | 0 | 0 | 0 | 100 |
| CTONG3005713 | 0 | 0 | 0 | 0 | 0 | 100 |
| CTONG3005803 | 0 | 0 | 0 | 0 | 0 | 100 |
| CTONG3005813 | 0 | 0 | 0 | 0 | 0 | 72.408 |
| CTONG3006067 | 0 | 0 | 0 | 0 | 0 | 74.021 |
| CTONG3006073 | 0 | 0 | 0 | 0 | 0 | 100 |
| CTONG3006186 | 0 | 0 | 0 | 0 | 0 | 100 |
| CTONG3006629 | 0 | 0 | 0 | 0 | 0 | 59.989 |
| CTONG3006650 | 0 | 0 | 0 | 0 | 0 | 100 |
| CTONG3006659 | 0 | 0 | 0 | 0 | 0 | 100 |
| CTONG3007244 | 0 | 0 | 0 | 0 | 0 | 100 |
| CTONG3007444 | 0 | 0 | 0 | 0 | 0 | 100 |
| CTONG3007528 | 0 | 0 | 0 | 0 | 0 | 100 |
| CTONG3007586 | 0 | 0 | 0 | 0 | 0 | 100 |
| CTONG3007870 | 0 | 0 | 0 | 0 | 0 | 100 |
| CTONG3008223 | 0 | 0 | 0 | 0 | 0 | 100 |
| CTONG3008252 | 0 | 0 | 0 | 0 | 0 | 100 |
| CTONG3008258 | 0 | 0 | 0 | 0 | 0 | 100 |
| CTONG3008457 | 0 | 0 | 0 | 0 | 0 | 100 |
| CTONG3008496 | 0 | 0 | 0 | 0 | 0 | 100 |
| CTONG3008566 | 0 | 0 | 0 | 0 | 0 | 100 |
| CTONG3008639 | 0 | 0 | 0 | 0 | 0 | 100 |
| CTONG3008831 | 0 | 0 | 0 | 0 | 0 | 100 |
| CTONG3008894 | 0 | 0 | 0 | 0 | 0 | 2.708 |
| CTONG3008951 | 0 | 0 | 0 | 0 | 0 | 100 |
| CTONG3008959 | 0 | 0 | 0 | 0 | 0 | 100 |
| CTONG3009028 | 0 | 0 | 0 | 0 | 0 | 5.995 |
| CTONG3009227 | 0 | 0 | 0 | 0 | 0 | 100 |
| CTONG3009239 | 0 | 0 | 0 | 0 | 0 | 5.378 |
| CTONG3009287 | 0 | 0 | 0 | 0 | 0 | 100 |
| CTONG3009328 | 0 | 0 | 0 | 0 | 0 | 44.674 |
| CTONG3009385 | 0 | 0 | 0 | 0 | 0 | 100 |
| D30ST2002068 | 0 | 0 | 0 | 1.508 | 0 | 0 |
| D30ST3000169 | 20.553 | 0 | 0 | 0 | 0 | 0 |
| D90ST2002397 | 0 | 0 | 62.163 | 0 | 0 | 0 |
| DFNES1000150 | 0 | 0 | 0 | 0 | 0 | 2.080 |
| DFNES1000185 | 55.393 | 0 | 0 | 0 | 0 | 0 |
| DFNES2000011 | 0 | 11.300 | 0 | 0 | 0 | 0 |
| DFNES2000335 | 0 | 0 | 0 | 0 | 0 | 8.824 |
| DFNES2004371 | 0 | 0 | 0 | 0 | 0 | 5.877 |
| DFNES2005690 | 0 | 0 | 0 | 0 | 0 | 9.456 |
| DFNES2005766 | 0 | 0 | 0 | 12.871 | 0 | 0 |
| DFNES2007299 | 0 | 0 | 0 | 0 | 0 | 6.117 |
| DFNES2007634 | 0 | 18.368 | 0 | 0 | 0 | 0 |
| DFNES2007757 | 0 | 77.810 | 0 | 0 | 0 | 0 |
| FCBBF1000023 | 0 | 0 | 0 | 0 | 0 | 13.102 |
| FCBBF1000024 | 0 | 0 | 0 | 0 | 0 | 12.268 |
| FCBBF1000027 | 0 | 0 | 0 | 0 | 0 | 2.047 |
| FCBBF1000053 | 0 | 0 | 0 | 0 | 0 | 5.041 |
| FCBBF1000061 | 0 | 0 | 0 | 0 | 0 | 8.761 |
| FCBBF1000197 | 0 | 0 | 0 | 0 | 0 | 9.948 |
| FCBBF1000294 | 0 | 0 | 0 | 0 | 0 | 4.011 |
| FCBBF1000466 | 0 | 0 | 0 | 0 | 0 | 5.931 |
| FCBBF1000574 | 0 | 0 | 0 | 0 | 0 | 3.866 |
| FCBBF2000259 | 0 | 0 | 0 | 0 | 0 | 11.138 |
| FCBBF2000885 | 0 | 0 | 0 | 0 | 0 | 17.154 |
| FCBBF3000110 | 0 | 0 | 0 | 0 | 0 | 12.029 |
| FCBBF3001470 | 0 | 28.053 | 0 | 0 | 0 | 2.528 |
| FCBBF3001818 | 0 | 0 | 0 | 0 | 0 | 16.966 |
| FCBBF3003800 | 0 | 0 | 0 | 0 | 0 | 1.467 |
| FCBBF3004261 | 0 | 0 | 0 | 0 | 0 | 16.849 |
| FCBBF3004473 | 0 | 0 | 0 | 0 | 0 | 4.280 |
| FCBBF3005320 | 0 | 0 | 0 | 0 | 0 | 5.081 |
| FCBBF3005497 | 0 | 0 | 0 | 0 | 0 | 1.464 |
| FCBBF3012347 | 0 | 0 | 0 | 0 | 0 | 4.088 |
| FCBBF3016134 | 0 | 0 | 0 | 0 | 0 | 19.389 |
| FCBBF3017024 | 0 | 0 | 0 | 0 | 0 | 9.546 |
| FCBBF3023368 | 0 | 0 | 0 | 0 | 0 | 9.140 |
| FCBBF3023667 | 0 | 0 | 8.826 | 0.932 | 0 | 0 |
| FCBBF3028244 | 0 | 0 | 0 | 0 | 0 | 1.729 |
| FCBBF4000446 | 0 | 0 | 0 | 0 | 0 | 2.798 |
| FCBBF4000500 | 0 | 0 | 0 | 0 | 0 | 16.324 |
| FEBRA2000105 | 0 | 0 | 0 | 15.106 | 0 | 1.336 |
| FEBRA2000210 | 0 | 0 | 0 | 4.963 | 59.337 | 0 |
| FEBRA2000228 | 0 | 0 | 0 | 0 | 0 | 7.357 |
| FEBRA2000377 | 0 | 0 | 0 | 0 | 0 | 18.632 |
| FEBRA2000510 | 0 | 0 | 0 | 0 | 0 | 6.872 |
| FEBRA2000733 | 0 | 0 | 3.733 | 0 | 0 | 0 |
| FEBRA2000740 | 0 | 23.371 | 0 | 0 | 0 | 6.319 |
| FEBRA2001294 | 0 | 0 | 0 | 0 | 0 | 4.501 |
| FEBRA2001581 | 0 | 0 | 0 | 0 | 0 | 7.637 |
| FEBRA2002527 | 0 | 0 | 0 | 0 | 0 | 5.334 |
| FEBRA2002933 | 0 | 0 | 0 | 0 | 0 | 0.689 |
| FEBRA2003100 | 0 | 0 | 0 | 0 | 0 | 1.227 |
| FEBRA2003750 | 0 | 0 | 0 | 0 | 0 | 6.800 |
| FEBRA2003822 | 0 | 0 | 0 | 38.613 | 0 | 0 |
| FEBRA2003833 | 0 | 0 | 0 | 0 | 0 | 6.441 |
| FEBRA2004042 | 0 | 0 | 0 | 0 | 0 | 3.951 |
| FEBRA2004224 | 0 | 0 | 0 | 8.128 | 0 | 0 |
| FEBRA2004412 | 0 | 0 | 0 | 0 | 0 | 10.937 |
| FEBRA2004818 | 0 | 28.140 | 0 | 0 | 0 | 0 |
| FEBRA2005416 | 0 | 0 | 0 | 0 | 0 | 2.000 |
| FEBRA2005476 | 0 | 0 | 0 | 0 | 0 | 14.554 |
| FEBRA2005824 | 0 | 0 | 0 | 0 | 0 | 1.389 |
| FEBRA2005995 | 0 | 0 | 0 | 0 | 0 | 2.611 |
| FEBRA2006112 | 0 | 0 | 0 | 0 | 0 | 12.294 |
| FEBRA2006270 | 0 | 0 | 0 | 0 | 0 | 6.532 |
| FEBRA2006372 | 0 | 0 | 0 | 0 | 0 | 2.501 |
| FEBRA2006401 | 0 | 0 | 5.560 | 0 | 0 | 0 |
| FEBRA2006485 | 0 | 0 | 0 | 21.356 | 0 | 5.666 |
| FEBRA2007544 | 0 | 0 | 0 | 0 | 0 | 4.560 |
| FEBRA2007622 | 0 | 0 | 0 | 0 | 0 | 3.843 |
| FEBRA2007801 | 0 | 0 | 0 | 0 | 0 | 4.598 |
| FEBRA2007880 | 0 | 0 | 0 | 0 | 0 | 7.010 |
| FEBRA2007900 | 0 | 0 | 0 | 0 | 0 | 14.437 |
| FEBRA2008081 | 0 | 0 | 0 | 0 | 0 | 1.319 |
| FEBRA2008087 | 0 | 0 | 0 | 1.258 | 0 | 0 |
| FEBRA2008201 | 0 | 0 | 0 | 16.836 | 0 | 0 |
| FEBRA2008692 | 0 | 0 | 0 | 0 | 0 | 13.709 |
| FEBRA2009022 | 0 | 0 | 0 | 0 | 0 | 12.440 |
| FEBRA2009419 | 0 | 0 | 0 | 0 | 0 | 7.383 |
| FEBRA2013699 | 0 | 0 | 0 | 0 | 0 | 26.659 |
| FEBRA2015085 | 0 | 0 | 0 | 0 | 0 | 5.680 |
| FEBRA2018407 | 0 | 0 | 0 | 0 | 0 | 30.174 |
| FEBRA2019711 | 0 | 0 | 0 | 29.691 | 0 | 0 |
| FEBRA2022055 | 0 | 0 | 0 | 3.736 | 0 | 0 |
| FEBRA2023399 | 0 | 0 | 0 | 0 | 0 | 16.349 |
| FEBRA2025427 | 0 | 0 | 0 | 0 | 0 | 9.234 |
| FEBRA2028516 | 0 | 0 | 0 | 0 | 0 | 4.261 |
| FELIV1000153 | 0 | 0 | 0 | 0 | 0 | 0.614 |
| HCASM1000115 | 0 | 0 | 0 | 0 | 0 | 1.931 |
| HCASM2000016 | 31.346 | 0 | 0 | 0 | 0 | 1.390 |
| HCASM2000363 | 0 | 0 | 15.065 | 0 | 0 | 1.267 |
| HCHON1000030 | 0 | 0 | 0 | 2.547 | 0 | 2.365 |
| HCHON2000028 | 0 | 0 | 0 | 0 | 0 | 2.955 |
| HCHON2000056 | 0 | 0 | 0 | 0 | 0 | 0.528 |
| HCHON2000087 | 0 | 12.785 | 0 | 0 | 0 | 0 |
| HCHON2000160 | 0 | 0 | 0 | 0 | 0 | 3.750 |
| HCHON2000226 | 0 | 0 | 0 | 0 | 0 | 1.502 |
| HCHON2000295 | 0 | 0 | 0 | 0 | 0 | 0.816 |
| HCHON2000364 | 0 | 0 | 9.849 | 0 | 0 | 0 |
| HCHON2000473 | 0 | 0 | 0 | 0 | 0 | 21.805 |
| HCHON2000475 | 0 | 27.507 | 0 | 0 | 0 | 4.958 |
| HCHON2000508 | 0 | 0 | 0 | 0 | 0 | 9.042 |
| HCHON2000626 | 0 | 0 | 26.041 | 0 | 0 | 0 |
| HCHON2000738 | 0 | 0 | 0 | 0 | 0 | 5.546 |
| HCHON2000751 | 0 | 0 | 0 | 0 | 0 | 6.650 |
| HCHON2000826 | 0 | 0 | 0 | 0 | 0 | 1.333 |
| HCHON2001039 | 0 | 0 | 0 | 0 | 0 | 2.078 |
| HCHON2001050 | 0 | 0 | 0 | 0 | 0 | 5.399 |
| HCHON2001200 | 0 | 0 | 0 | 0 | 0 | 4.028 |
| HCHON2001217 | 0 | 0 | 0 | 0 | 0 | 3.877 |
| HCHON2001359 | 0 | 17.594 | 18.861 | 0 | 0 | 4.757 |
| HCHON2001407 | 0 | 0 | 0 | 0 | 0 | 4.412 |
| HCHON2001535 | 0 | 0 | 0 | 0 | 0 | 17.176 |
| HCHON2001598 | 0 | 50.212 | 0 | 0 | 0 | 0 |
| HCHON2004002 | 0 | 0 | 17.393 | 0 | 0 | 1.462 |
| HHDPC1000118 | 0 | 0 | 0 | 0 | 0 | 3.904 |
| HHDPC2000070 | 0 | 0 | 0 | 0 | 0 | 17.924 |
| HHDPC2000149 | 0 | 0 | 0 | 0 | 0 | 8.322 |
| HHDPC2000456 | 0 | 0 | 34.395 | 0 | 0 | 5.784 |
| HHDPC2000572 | 0 | 0 | 0 | 0 | 0 | 12.194 |
| HHDPC2003439 | 21.364 | 0 | 0 | 0 | 0 | 0.474 |
| HHDPC2003983 | 0 | 5.755 | 0 | 0 | 0 | 1.037 |
| HHDPC2007267 | 0 | 0 | 0 | 0 | 0 | 4.547 |
| HLUNG1000055 | 0 | 0 | 0 | 0 | 0 | 2.016 |
| HLUNG1000076 | 0 | 0 | 0 | 5.906 | 0 | 0 |
| HLUNG1000099 | 0 | 0 | 0 | 0 | 0 | 20.103 |
| HLUNG2000004 | 0 | 0 | 0 | 17.758 | 0 | 0 |
| HLUNG2000412 | 0 | 0 | 0 | 0 | 0 | 4.987 |
| HLUNG2001146 | 0 | 0 | 0 | 0 | 0 | 19.527 |
| HLUNG2002811 | 0 | 50.355 | 0 | 0 | 0 | 4.538 |
| HLUNG2004037 | 0 | 0 | 0 | 0 | 0 | 28.434 |
| HLUNG2004159 | 0 | 0 | 0 | 0 | 0 | 10.131 |
| HLUNG2008479 | 0 | 0 | 0 | 0 | 0 | 33.679 |
| HLUNG2008637 | 0 | 34.908 | 0 | 0 | 0 | 0 |
| HLUNG2009225 | 0 | 0 | 0 | 0 | 0 | 14.045 |
| HLUNG2017262 | 0 | 0 | 0 | 0 | 0 | 5.907 |
| HSYRA1000062 | 0 | 0 | 0 | 0 | 0 | 5.585 |
| HSYRA1000119 | 0 | 0 | 0 | 0 | 0 | 1.713 |
| HSYRA1000152 | 0 | 0 | 0 | 0 | 0 | 4.443 |
| HSYRA2000135 | 0 | 0 | 0 | 0 | 0 | 7.367 |
| HSYRA2000159 | 0 | 0 | 0 | 0 | 10.120 | 0.898 |
| HSYRA2000248 | 0 | 0 | 0 | 0 | 0 | 1.266 |
| HSYRA2000255 | 0 | 0 | 0 | 0 | 0 | 2.507 |
| HSYRA2000743 | 0 | 0 | 0 | 0 | 0 | 1.441 |
| HSYRA2001138 | 0 | 0 | 0 | 1.790 | 0 | 0 |
| HSYRA2001225 | 0 | 0 | 0 | 0 | 0 | 2.754 |
| HSYRA2001476 | 0 | 0 | 0 | 3.389 | 0 | 1.798 |
| HSYRA2001567 | 0 | 0 | 0 | 0 | 0 | 4.174 |
| HSYRA2001574 | 0 | 0 | 0 | 5.282 | 0 | 0 |
| HSYRA2001595 | 0 | 0 | 0 | 0 | 0 | 4.244 |
| HSYRA2001621 | 0 | 3.792 | 0 | 0 | 30.806 | 0 |
| HSYRA2001631 | 0 | 0 | 0 | 0 | 0 | 10.860 |
| HSYRA2007650 | 0 | 0 | 0 | 33.393 | 0 | 0 |
| IMR321000193 | 0 | 0 | 0 | 30.814 | 0 | 0 |
| IMR321000219 | 0 | 5.800 | 0 | 0 | 0 | 1.568 |
| IMR321000253 | 0 | 0 | 0 | 0 | 0 | 3.794 |
| IMR322000518 | 0 | 0 | 0 | 21.562 | 0 | 0 |
| IMR322000730 | 0 | 2.832 | 0 | 7.698 | 0 | 0 |
| IMR322000935 | 0 | 0 | 0 | 0 | 0 | 2.789 |
| IMR322001049 | 0 | 0 | 0 | 0 | 0 | 10.789 |
| IMR322001218 | 0 | 0 | 0 | 0 | 0 | 2.085 |
| IMR322001332 | 0 | 0 | 0 | 18.692 | 0 | 0 |
| IMR322001435 | 0 | 0 | 0 | 0 | 0 | 3.500 |
| IMR322001584 | 0 | 0 | 0 | 8.764 | 0 | 0 |
| IMR322001600 | 0 | 0 | 0 | 0 | 0 | 0.300 |
| KIDNE2000085 | 0 | 0 | 0 | 0 | 0 | 1.915 |
| KIDNE2000252 | 0 | 0 | 0 | 0 | 0 | 3.184 |
| KIDNE2000266 | 0 | 0 | 0 | 0 | 0 | 15.685 |
| KIDNE2000403 | 34.697 | 0 | 0 | 0 | 0 | 4.616 |
| KIDNE2000574 | 0 | 0 | 0 | 0 | 0 | 1.394 |
| KIDNE2000777 | 0 | 0 | 0 | 53.588 | 0 | 0 |
| KIDNE2000947 | 0 | 0 | 0 | 0 | 0 | 9.415 |
| KIDNE2001373 | 0 | 0 | 0 | 50.020 | 0 | 0 |
| KIDNE2001467 | 0 | 0 | 0 | 0 | 0 | 2.913 |
| KIDNE2001847 | 0 | 0 | 0 | 0 | 0 | 6.778 |
| KIDNE2002252 | 0 | 0 | 0 | 0 | 0 | 4.060 |
| KIDNE2003316 | 0 | 0 | 0 | 0 | 0 | 14.092 |
| KIDNE2004411 | 0 | 0 | 0 | 0 | 0 | 15.872 |
| KIDNE2005676 | 0 | 0 | 0 | 0 | 0 | 10.481 |
| KIDNE2006014 | 0 | 0 | 0 | 0 | 0 | 5.530 |
| KIDNE2006248 | 0 | 0 | 0 | 0 | 0 | 1.737 |
| KIDNE2007328 | 37.159 | 0 | 0 | 0 | 0 | 3.296 |
| KIDNE2007910 | 0 | 0 | 0 | 0 | 0 | 16.879 |
| KIDNE2008048 | 0 | 0 | 0 | 0 | 0 | 1.998 |
| KIDNE2009367 | 0 | 0 | 0 | 0 | 0 | 2.808 |
| KIDNE2011508 | 0 | 0 | 0 | 0 | 0 | 34.822 |
| KIDNE2012710 | 0 | 0 | 0 | 0 | 0 | 35.274 |
| KIDNE2013845 | 0 | 0 | 0 | 0 | 0 | 2.082 |
| KIDNE2014290 | 0 | 0 | 0 | 0 | 0 | 9.140 |
| KIDNE2014325 | 0 | 0 | 0 | 0 | 0 | 7.046 |
| KIDNE2016371 | 0 | 0 | 0 | 0 | 0 | 16.781 |
| KIDNE2017040 | 0 | 0 | 0 | 23.608 | 0 | 0 |
| LIVER2000446 | 0 | 0 | 0 | 28.879 | 0 | 0 |
| LIVER2002842 | 0 | 0 | 0 | 0 | 0 | 3.556 |
| LIVER2006006 | 0 | 0 | 0 | 0 | 0 | 2.649 |
| MAMGL1000032 | 0 | 0 | 3.569 | 0 | 0 | 0 |
| MAMGL1000035 | 0 | 0 | 0 | 1.414 | 0 | 1.500 |
| MESAN1000080 | 0 | 0 | 31.630 | 0 | 0 | 0 |
| MESAN1000126 | 0 | 0 | 39.561 | 0 | 0 | 0 |
| MESAN2000092 | 0 | 0 | 0 | 0 | 0 | 16.482 |
| MESAN2000149 | 0 | 0 | 0 | 0 | 0 | 4.575 |
| MESAN2000267 | 0 | 8.462 | 9.072 | 0 | 0 | 0 |
| MESAN2000337 | 0 | 0 | 0 | 0 | 0 | 14.768 |
| MESAN2000572 | 0 | 0 | 0 | 0 | 0 | 7.617 |
| MESAN2000815 | 0 | 0 | 0 | 0 | 0 | 29.082 |
| MESAN2001154 | 55.958 | 0 | 0 | 0 | 0 | 0 |
| MESAN2002086 | 0 | 0 | 0 | 0 | 0 | 0.775 |
| MESAN2002790 | 0 | 0 | 0 | 0 | 0 | 9.111 |
| MESAN2002940 | 0 | 0 | 0 | 0 | 0 | 5.924 |
| MESAN2005633 | 0 | 0 | 0 | 0 | 0 | 31.974 |
| MESAN2005766 | 0 | 0 | 0 | 0 | 0 | 1.837 |
| MESAN2005958 | 0 | 0 | 0 | 0 | 0 | 5.016 |
| MESAN2006401 | 0 | 0 | 0 | 0 | 0 | 3.369 |
| MESAN2006563 | 0 | 14.270 | 0 | 0 | 0 | 2.572 |
| MESAN2009019 | 0 | 0 | 0 | 0 | 0 | 14.550 |
| MESAN2011627 | 0 | 0 | 0 | 0 | 0 | 7.010 |
| MESAN2013284 | 0 | 0 | 0 | 0 | 0 | 4.575 |
| MESAN2015515 | 0 | 0 | 58.849 | 0 | 0 | 0 |
| NB9N41000047 | 0 | 0 | 0 | 0 | 0 | 4.895 |
| NB9N41000135 | 0 | 0 | 0 | 0 | 0 | 4.131 |
| NHNPC2000187 | 0 | 0 | 10.025 | 0 | 0 | 0 |
| NHNPC2000206 | 0 | 0 | 0 | 0 | 0 | 8.953 |
| NHNPC2001931 | 0 | 19.725 | 0 | 0 | 0 | 0 |
| NT2NE1000024 | 0 | 0 | 0 | 26.952 | 0 | 7.150 |
| NT2NE1000163 | 0 | 0 | 0 | 0 | 0 | 1.509 |
| NT2NE2000056 | 0 | 0 | 0 | 0 | 0 | 5.122 |
| NT2NE2000174 | 0 | 0 | 0 | 2.679 | 0 | 0 |
| NT2NE2000260 | 0 | 7.489 | 2.676 | 6.785 | 10.140 | 0 |
| NT2NE2000327 | 0 | 0 | 0 | 0 | 0 | 14.057 |
| NT2NE2000384 | 0 | 0 | 0 | 0 | 0 | 4.287 |
| NT2NE2000575 | 10.097 | 0 | 5.326 | 0 | 0 | 1.343 |
| NT2NE2000707 | 0 | 0 | 0 | 0 | 0 | 1.247 |
| NT2NE2000763 | 0 | 0 | 0 | 0 | 0 | 4.470 |
| NT2NE2000913 | 0 | 0 | 0 | 0 | 0 | 13.739 |
| NT2NE2000963 | 0 | 4.741 | 0 | 3.221 | 0 | 0 |
| NT2NE2001176 | 0 | 23.604 | 0 | 0 | 0 | 0 |
| NT2NE2001397 | 0 | 0 | 0 | 0 | 0 | 24.497 |
| NT2NE2001617 | 0 | 0 | 0 | 31.851 | 0 | 0 |
| NT2NE2001793 | 0 | 0 | 0 | 0 | 0 | 5.796 |
| NT2NE2004716 | 0 | 39.665 | 0 | 0 | 0 | 0 |
| NT2NE2005688 | 0 | 0 | 0 | 0 | 0 | 2.782 |
| NT2NE2005720 | 0 | 0 | 0 | 65.954 | 0 | 0 |
| NT2NE2006075 | 0 | 0 | 0 | 0 | 0 | 29.344 |
| NT2NE2016971 | 0 | 0 | 0 | 0 | 0 | 25.501 |
| NT2RI1000048 | 0 | 17.547 | 0 | 0 | 0 | 0 |
| NT2RI1000127 | 0 | 0 | 0 | 0 | 0 | 3.381 |
| NT2RI2000255 | 0 | 0 | 26.517 | 0 | 0 | 2.229 |
| NT2RI2000263 | 0 | 0 | 0 | 0 | 0 | 3.186 |
| NT2RI2000344 | 0 | 0 | 0 | 0 | 0 | 1.508 |
| NT2RI2000578 | 0 | 0 | 0 | 2.348 | 0 | 0.623 |
| NT2RI2000671 | 0 | 0 | 0 | 7.384 | 0 | 1.959 |
| NT2RI2000727 | 10.866 | 0 | 0 | 0 | 0 | 2.891 |
| NT2RI2001342 | 0 | 0 | 0 | 0 | 0 | 2.940 |
| NT2RI2001540 | 4.782 | 4.705 | 1.261 | 1.599 | 0 | 0.106 |
| NT2RI2001657 | 0 | 0 | 0 | 0 | 0 | 0.997 |
| NT2RI2001859 | 0 | 0 | 0 | 0 | 0 | 3.615 |
| NT2RI2002091 | 0.563 | 0.554 | 1.783 | 0.847 | 0 | 1.224 |
| NT2RI2002117 | 0 | 0 | 0 | 0 | 0 | 8.775 |
| NT2RI2002243 | 0 | 0 | 72.871 | 0 | 0 | 0 |
| NT2RI2002316 | 0 | 0 | 0 | 0 | 0 | 1.493 |
| NT2RI2002391 | 0 | 0 | 0 | 0 | 0 | 1.510 |
| NT2RI2002530 | 0 | 0 | 0 | 0 | 0 | 11.243 |
| NT2RI2002654 | 0 | 0 | 0 | 4.124 | 0 | 0 |
| NT2RI2002729 | 0 | 0 | 0 | 0 | 0 | 3.917 |
| NT2RI2002865 | 0 | 0 | 0 | 47.605 | 0 | 0 |
| NT2RI2003019 | 0 | 0 | 0 | 0 | 0 | 19.482 |
| NT2RI2003051 | 0 | 0 | 0 | 0 | 0 | 3.814 |
| NT2RI2003304 | 0 | 0 | 5.814 | 0 | 0 | 4.399 |
| NT2RI2003407 | 0 | 0 | 0 | 0 | 0 | 2.254 |
| NT2RI2003420 | 0 | 0 | 0 | 0 | 0 | 2.868 |
| NT2RI2003695 | 0 | 0 | 0 | 0 | 0 | 2.933 |
| NT2RI2003738 | 0 | 0 | 0 | 0 | 0 | 4.887 |
| NT2RI2004290 | 0 | 0 | 0 | 0 | 0 | 39.735 |
| NT2RI2004304 | 0 | 0 | 0 | 0 | 0 | 7.756 |
| NT2RI2004884 | 0 | 0 | 0 | 0 | 64.855 | 0 |
| NT2RI2005116 | 0 | 0 | 0 | 0 | 0 | 4.762 |
| NT2RI2005315 | 0 | 0 | 0 | 0 | 0 | 50.616 |
| NT2RI2005335 | 0 | 0 | 0 | 0 | 0 | 4.326 |
| NT2RI2005353 | 48.380 | 0 | 0 | 0 | 0 | 0 |
| NT2RI2005358 | 0 | 0 | 0 | 0 | 0 | 38.226 |
| NT2RI2005647 | 0 | 0 | 0 | 0 | 0 | 6.158 |
| NT2RI2005713 | 0 | 30.561 | 0 | 0 | 0 | 5.509 |
| NT2RI2005851 | 0 | 0 | 0 | 0 | 0 | 6.941 |
| NT2RI2006506 | 0 | 0 | 0 | 0 | 0 | 25.091 |
| NT2RI2006647 | 0 | 0 | 0 | 0 | 0 | 8.541 |
| NT2RI2006735 | 0 | 0 | 0 | 0 | 0 | 29.314 |
| NT2RI2006825 | 0 | 0 | 0 | 0 | 0 | 10.213 |
| NT2RI2006853 | 0 | 0 | 0 | 15.747 | 0 | 12.533 |
| NT2RI2006856 | 0 | 0 | 0 | 0 | 39.317 | 0 |
| NT2RI2007133 | 0 | 0 | 8.691 | 0 | 0 | 0 |
| NT2RI2007384 | 0 | 0 | 0 | 0 | 0 | 0.807 |
| NT2RI2007498 | 0 | 0 | 9.034 | 0 | 0 | 0 |
| NT2RI2007572 | 0 | 0 | 0 | 5.246 | 0 | 4.175 |
| NT2RI2007589 | 0 | 0 | 0 | 7.497 | 0 | 0 |
| NT2RI2007593 | 0 | 0 | 0 | 0 | 0 | 6.137 |
| NT2RI2008141 | 0 | 0 | 0 | 0 | 0 | 3.983 |
| NT2RI2008336 | 16.825 | 0 | 0 | 0 | 0 | 0.746 |
| NT2RI2008396 | 0 | 0 | 0 | 0 | 0 | 4.105 |
| NT2RI2008481 | 0 | 0 | 0 | 5.192 | 0 | 0 |
| NT2RI2008714 | 0 | 0 | 0 | 0 | 0 | 27.330 |
| NT2RI2008724 | 0 | 0 | 0 | 0 | 0 | 3.421 |
| NT2RI2008749 | 0 | 0 | 0 | 0 | 0 | 1.053 |
| NT2RI2008942 | 0 | 0 | 0 | 0 | 0 | 1.953 |
| NT2RI2009037 | 0 | 0 | 0 | 0 | 0 | 3.140 |
| NT2RI2009173 | 46.845 | 0 | 0 | 0 | 0 | 4.155 |
| NT2RI2009233 | 0 | 0 | 0 | 0 | 0 | 8.402 |
| NT2RI2009239 | 58.704 | 0 | 0 | 0 | 0 | 0 |
| NT2RI2009406 | 0 | 0 | 0 | 0 | 0 | 5.240 |
| NT2RI2009583 | 0 | 0 | 0 | 0 | 0 | 0.833 |
| NT2RI2012350 | 0 | 0 | 0 | 0 | 33.597 | 0 |
| NT2RI2015342 | 0 | 0 | 0 | 0 | 0 | 14.010 |
| NT2RI2018448 | 0 | 0 | 0 | 44.206 | 0 | 0 |
| NT2RI2018883 | 0 | 0 | 0 | 0 | 0 | 50.616 |
| NT2RI3003738 | 0 | 0 | 0 | 0 | 0 | 33.781 |
| NT2RI3006284 | 0 | 0 | 0 | 0 | 0 | 3.854 |
| NT2RI3006673 | 0 | 0 | 0 | 0 | 0 | 18.588 |
| NT2RI3007543 | 0 | 0 | 0 | 0 | 0 | 7.901 |
| NT2RI3007757 | 0 | 0 | 0 | 0 | 0 | 23.555 |
| NT2RP6000005 | 0 | 0 | 0 | 0 | 0 | 8.193 |
| NT2RP6000017 | 0 | 0 | 0 | 0 | 0 | 2.787 |
| NT2RP6000109 | 0 | 39.469 | 0 | 0 | 0 | 0 |
| NT2RP6000123 | 0 | 0 | 8.672 | 2.748 | 0 | 2.187 |
| NT2RP7000076 | 0 | 0 | 0 | 0 | 0 | 9.081 |
| NT2RP7000086 | 0 | 0 | 0 | 0 | 0 | 23.818 |
| NT2RP7000173 | 0 | 0 | 0 | 0 | 0 | 5.177 |
| NT2RP7000271 | 0 | 0 | 0 | 0 | 0 | 5.649 |
| NT2RP7000477 | 0 | 0 | 0 | 0 | 0 | 18.424 |
| NT2RP7000600 | 0 | 0 | 0 | 0 | 0 | 4.127 |
| NT2RP7000906 | 0 | 0 | 0 | 0 | 0 | 2.430 |
| NT2RP7001166 | 0 | 0 | 0 | 5.251 | 0 | 4.179 |
| NT2RP7001283 | 0 | 0 | 0 | 0 | 0 | 3.145 |
| NT2RP7001475 | 0 | 0 | 0 | 0 | 0 | 32.721 |
| NT2RP7001591 | 0 | 0 | 0 | 0 | 0 | 9.685 |
| NT2RP7001678 | 0 | 0 | 0 | 0 | 0 | 28.969 |
| NT2RP7002376 | 0 | 0 | 0 | 0 | 0 | 22.598 |
| NT2RP7002379 | 0 | 0 | 11.152 | 0 | 0 | 4.688 |
| NT2RP7002449 | 0 | 0 | 0 | 0 | 0 | 3.763 |
| NT2RP7002450 | 0 | 0 | 0 | 0 | 0 | 4.971 |
| NT2RP7002594 | 0 | 0 | 0 | 0 | 0 | 25.442 |
| NT2RP7002619 | 0 | 0 | 0 | 0 | 0 | 4.059 |
| NT2RP7002802 | 0 | 0 | 0 | 0 | 0 | 6.807 |
| NT2RP7002982 | 0 | 0 | 0 | 0 | 0 | 7.240 |
| NT2RP7003261 | 0 | 0 | 0 | 0 | 0 | 27.835 |
| NT2RP7003319 | 0 | 18.855 | 0 | 0 | 0 | 0 |
| NT2RP7003632 | 0 | 0 | 0 | 0 | 0 | 24.263 |
| NT2RP7003647 | 0 | 0 | 0 | 0 | 0 | 6.576 |
| NT2RP7003688 | 0 | 0 | 0 | 0 | 0 | 16.504 |
| NT2RP7003960 | 0 | 0 | 0 | 0 | 0 | 3.086 |
| NT2RP7004123 | 0 | 0 | 0 | 0 | 0 | 3.574 |
| NT2RP7004173 | 0 | 0 | 0 | 5.362 | 0 | 0 |
| NT2RP7004196 | 0 | 0 | 0 | 0 | 0 | 2.440 |
| NT2RP7004348 | 0 | 0 | 0 | 0 | 0 | 4.209 |
| NT2RP7004352 | 0 | 0 | 0 | 0 | 0 | 12.653 |
| NT2RP7004373 | 0 | 0 | 0 | 0 | 0 | 2.192 |
| NT2RP7004559 | 0 | 0 | 0 | 59.840 | 0 | 0 |
| NT2RP7004751 | 0 | 0 | 0 | 0 | 0 | 0.872 |
| NT2RP7004911 | 0 | 0 | 0 | 0 | 0 | 3.283 |
| NT2RP7004925 | 0 | 0 | 0 | 0 | 0 | 2.352 |
| NT2RP7004946 | 0 | 0 | 0 | 0 | 0 | 3.207 |
| NT2RP7005750 | 0 | 0 | 0 | 0 | 0 | 6.664 |
| NT2RP7006075 | 0 | 0 | 0 | 0 | 0 | 4.880 |
| NT2RP7006141 | 0 | 0 | 0 | 5.185 | 0 | 0 |
| NT2RP7006188 | 0 | 0 | 0 | 0 | 0 | 19.396 |
| NT2RP7006490 | 0 | 0 | 0 | 0 | 0 | 3.998 |
| NT2RP7006701 | 0 | 0 | 0 | 0 | 0 | 9.364 |
| NT2RP7006717 | 0 | 0 | 0 | 0 | 0 | 8.578 |
| NT2RP7007154 | 0 | 11.784 | 0 | 0 | 0 | 0 |
| NT2RP7007177 | 0 | 0 | 0 | 0 | 0 | 7.609 |
| NT2RP7007610 | 0 | 0 | 0 | 0 | 0 | 5.390 |
| NT2RP7007842 | 0 | 0 | 0 | 0 | 0 | 3.572 |
| NT2RP7007975 | 0 | 0 | 0 | 0 | 0 | 7.625 |
| NT2RP7008161 | 0 | 0 | 0 | 0 | 0 | 11.694 |
| NT2RP7008167 | 38.118 | 0 | 0 | 0 | 0 | 0 |
| NT2RP7008190 | 0 | 0 | 0 | 0 | 0 | 2.471 |
| NT2RP7008487 | 0 | 0 | 0 | 0 | 0 | 28.500 |
| NT2RP7008543 | 0 | 0 | 0 | 0 | 0 | 10.248 |
| NT2RP7009012 | 0 | 0 | 0 | 0 | 0 | 21.118 |
| NT2RP7009087 | 0 | 0 | 0 | 0 | 0 | 9.049 |
| NT2RP7009108 | 0 | 0 | 19.689 | 0 | 0 | 8.277 |
| NT2RP7009147 | 0 | 0 | 0 | 0 | 0 | 2.967 |
| NT2RP7009149 | 0 | 0 | 26.502 | 0 | 0 | 0 |
| NT2RP7009259 | 0 | 0 | 0 | 0 | 0 | 20.929 |
| NT2RP7009373 | 0 | 0 | 0 | 0 | 0 | 14.964 |
| NT2RP7009482 | 0 | 0 | 0 | 0 | 0 | 2.590 |
| NT2RP7011909 | 0 | 5.857 | 0 | 0 | 0 | 0 |
| NT2RP7014005 | 0 | 0 | 0 | 0 | 0 | 10.836 |
| NTONG1000033 | 0 | 0 | 0 | 0 | 0 | 22.820 |
| NTONG1000098 | 0 | 0 | 0 | 0 | 0 | 3.560 |
| NTONG1000257 | 0 | 0 | 0 | 0 | 0 | 10.249 |
| NTONG1000264 | 0 | 0 | 0 | 0 | 0 | 1.815 |
| NTONG2000265 | 0 | 0 | 0 | 0 | 0 | 3.176 |
| NTONG2000977 | 0 | 0 | 21.778 | 0 | 0 | 0 |
| NTONG2001137 | 0 | 23.650 | 0 | 8.035 | 0 | 0 |
| NTONG2001222 | 0 | 17.136 | 0 | 0 | 0 | 0 |
| NTONG2001550 | 0 | 0 | 0 | 0 | 0 | 6.483 |
| NTONG2001567 | 0 | 0 | 6.793 | 6.458 | 0 | 2.856 |
| NTONG2001587 | 0 | 0 | 0 | 0 | 0 | 0.554 |
| NTONG2004918 | 0 | 0 | 0 | 0 | 0 | 12.061 |
| NTONG2005497 | 0 | 0 | 6.071 | 0 | 0 | 0 |
| NTONG2005520 | 0 | 0 | 0 | 0 | 0 | 6.199 |
| NTONG2008483 | 0 | 0 | 0 | 0 | 0 | 2.976 |
| NTONG2008522 | 0 | 0 | 0 | 0 | 0 | 7.299 |
| OCBBF1000086 | 0 | 0 | 0 | 0 | 64.252 | 0 |
| OCBBF1000146 | 0 | 0 | 0 | 0 | 0 | 25.706 |
| OCBBF1000188 | 0 | 0 | 23.069 | 0 | 0 | 3.879 |
| OCBBF1000315 | 0 | 0 | 0 | 0 | 0 | 16.296 |
| OCBBF2000015 | 0 | 0 | 0 | 0 | 0 | 1.474 |
| OCBBF2000522 | 0 | 0 | 0 | 0 | 0 | 4.710 |
| OCBBF2000677 | 0 | 0 | 0 | 0 | 0 | 30.340 |
| OCBBF2000846 | 30.735 | 0 | 0 | 0 | 0 | 0 |
| OCBBF2000986 | 0 | 0 | 21.349 | 0 | 0 | 1.795 |
| OCBBF2001140 | 0 | 0 | 0 | 0 | 0 | 10.530 |
| OCBBF2001492 | 0 | 0 | 15.200 | 0 | 0 | 1.278 |
| OCBBF2001687 | 0 | 39.751 | 0 | 0 | 0 | 0 |
| OCBBF2002086 | 0 | 0 | 0 | 0 | 0 | 6.001 |
| OCBBF2005956 | 0 | 0 | 0 | 0 | 0 | 5.287 |
| OCBBF2006148 | 0 | 0 | 0 | 0 | 0 | 12.613 |
| OCBBF2006151 | 0 | 0 | 0 | 0 | 0 | 10.738 |
| OCBBF2007354 | 0 | 0 | 0 | 0 | 0 | 1.871 |
| OCBBF2007829 | 0 | 0 | 0 | 0 | 0 | 1.023 |
| OCBBF2007892 | 0 | 0 | 0 | 29.908 | 0 | 0 |
| OCBBF2008366 | 0 | 0 | 0 | 84.965 | 0 | 0 |
| OCBBF2009242 | 0 | 0 | 0 | 0 | 0 | 5.274 |
| OCBBF2009424 | 0 | 0 | 0 | 0 | 0 | 13.516 |
| OCBBF2010830 | 0 | 0 | 0 | 0 | 0 | 8.194 |
| OCBBF2010858 | 0 | 0 | 0 | 0 | 0 | 12.407 |
| OCBBF2011073 | 0 | 0 | 0 | 0 | 0 | 6.355 |
| OCBBF2011759 | 0 | 0 | 0 | 0 | 0 | 1.741 |
| OCBBF2013843 | 0 | 0 | 0 | 0 | 0 | 0.995 |
| OCBBF2017791 | 0 | 0 | 0 | 0 | 0 | 2.386 |
| OCBBF2018012 | 0 | 0 | 62.179 | 0 | 0 | 0 |
| OCBBF2018362 | 0 | 0 | 0 | 0 | 0 | 42.846 |
| OCBBF2018827 | 0 | 0 | 0 | 0 | 0 | 9.139 |
| OCBBF2018873 | 0 | 0 | 0 | 0 | 0 | 2.581 |
| OCBBF2027148 | 0 | 0 | 0 | 0 | 0 | 43.340 |
| OCBBF3001333 | 0 | 0 | 0 | 22.556 | 0 | 0 |
| OCBBF3004487 | 0 | 0 | 0 | 0 | 0 | 8.439 |
| PEBLM1000174 | 0 | 0 | 0 | 0 | 0 | 8.907 |
| PEBLM2000222 | 0 | 12.004 | 0 | 0 | 0 | 0 |
| PEBLM2000395 | 0 | 0 | 0 | 0 | 0 | 3.390 |
| PEBLM2004452 | 0 | 0 | 0 | 0 | 0 | 15.083 |
| PEBLM2004666 | 0 | 0 | 0 | 0 | 0 | 6.920 |
| PEBLM2007188 | 0 | 0 | 0 | 0 | 0 | 16.259 |
| PEBLM2007774 | 0 | 0 | 0 | 4.229 | 0 | 0 |
| PEBLM2008106 | 0 | 0 | 0 | 0 | 0 | 19.858 |
| PERIC2007068 | 0 | 0 | 0 | 0 | 0 | 2.874 |
| PLACE5000013 | 0 | 0 | 35.166 | 0 | 0 | 0 |
| PLACE5000159 | 0 | 0 | 0 | 0 | 0 | 4.233 |
| PLACE6000145 | 0 | 0 | 22.959 | 0 | 0 | 0 |
| PLACE6000379 | 0 | 0 | 0 | 2.480 | 0 | 1.645 |
| PLACE6000414 | 0 | 0 | 0 | 0 | 0 | 14.320 |
| PLACE6001064 | 0 | 0 | 0 | 0 | 0 | 1.069 |
| PLACE6001281 | 0 | 0 | 0 | 0 | 0 | 6.412 |
| PLACE6002084 | 15.511 | 0 | 0 | 0 | 0 | 1.376 |
| PLACE6002102 | 0 | 0 | 0 | 0 | 0 | 7.892 |
| PLACE6003383 | 0 | 0 | 26.442 | 0 | 0 | 0 |
| PLACE6003393 | 0 | 0 | 0 | 0 | 0 | 14.143 |
| PLACE6003745 | 0 | 0 | 0 | 0 | 0 | 9.787 |
| PLACE6004101 | 0 | 92.071 | 0 | 0 | 0 | 0 |
| PLACE6004312 | 0 | 12.463 | 0 | 0 | 0 | 1.123 |
| PLACE6005294 | 0 | 0 | 0 | 0 | 0 | 22.427 |
| PLACE6006418 | 0 | 0 | 0 | 38.926 | 0 | 10.327 |
| PLACE6006549 | 0 | 16.501 | 0 | 0 | 0 | 0 |
| PLACE6010077 | 0 | 0 | 19.288 | 0 | 0 | 0 |
| PLACE6013222 | 0 | 0 | 0 | 0 | 0 | 9.178 |
| PLACE6018487 | 0 | 0 | 0 | 4.685 | 0 | 0 |
| PLACE7004103 | 0 | 0 | 0 | 0 | 0 | 12.044 |
| PROST1000033 | 0 | 0 | 0 | 0 | 0 | 20.520 |
| PROST1000097 | 0 | 0 | 0 | 0 | 0 | 1.095 |
| PROST1000199 | 0 | 15.099 | 0 | 0 | 0 | 0 |
| PROST1000220 | 0 | 14.031 | 0 | 0 | 0 | 1.265 |
| PROST1000226 | 0 | 0 | 0 | 0 | 0 | 3.332 |
| PROST1000272 | 0 | 0 | 69.900 | 0 | 0 | 0 |
| PROST1000343 | 0 | 0 | 0 | 0 | 0 | 10.582 |
| PROST1000526 | 0 | 0 | 0 | 0 | 0 | 4.706 |
| PROST2000138 | 0 | 1.791 | 3.840 | 1.217 | 0 | 2.906 |
| PROST2000165 | 0 | 0 | 0 | 0 | 0 | 17.008 |
| PROST2000176 | 0 | 0 | 0 | 17.819 | 0 | 0 |
| PROST2000284 | 0 | 0 | 0 | 0 | 0 | 13.045 |
| PROST2001521 | 0 | 0 | 0 | 8.530 | 0 | 0 |
| PROST2002651 | 0 | 0 | 0 | 0 | 0 | 5.570 |
| PROST2003232 | 0 | 0 | 0 | 0 | 0 | 1.271 |
| PROST2004095 | 0 | 0 | 0 | 0 | 0 | 3.487 |
| PROST2004270 | 0 | 12.152 | 0 | 0 | 0 | 4.381 |
| PROST2004416 | 0 | 0 | 0 | 4.774 | 0 | 1.266 |
| PROST2005039 | 0 | 0 | 0 | 0 | 0 | 25.668 |
| PROST2005604 | 0 | 0 | 0 | 0 | 0 | 17.381 |
| PROST2006060 | 0 | 0 | 0 | 46.875 | 0 | 0 |
| PROST2006260 | 0 | 0 | 0 | 0 | 0 | 30.337 |
| PROST2007612 | 0 | 0 | 0 | 0 | 0 | 5.948 |
| PROST2008271 | 0 | 0 | 0 | 0 | 0 | 7.299 |
| PROST2008360 | 0 | 0 | 0 | 12.636 | 0 | 0 |
| PROST2008489 | 0 | 0 | 14.347 | 0 | 0 | 0 |
| PROST2010782 | 0 | 0 | 0 | 0 | 0 | 0.453 |
| PROST2011410 | 0 | 81.943 | 0 | 0 | 0 | 0 |
| PROST2011577 | 0 | 0 | 22.797 | 0 | 0 | 0 |
| PROST2012140 | 0 | 0 | 0 | 0 | 0 | 34.435 |
| PROST2017529 | 0 | 52.453 | 0 | 0 | 0 | 0 |
| PROST2017692 | 0 | 0 | 0 | 0 | 0 | 1.373 |
| PROST2018090 | 0 | 44.955 | 0 | 0 | 0 | 0 |
| PUAEN1000065 | 0 | 0 | 0 | 4.702 | 0 | 0 |
| PUAEN1000081 | 0 | 0 | 0 | 0 | 0 | 24.817 |
| PUAEN1000164 | 0 | 0 | 0 | 0 | 0 | 2.224 |
| PUAEN2000312 | 0 | 0 | 0 | 0 | 0 | 16.489 |
| PUAEN2000374 | 0 | 0 | 0 | 0 | 0 | 1.788 |
| PUAEN2000535 | 0 | 0 | 0 | 0 | 0 | 2.996 |
| PUAEN2003018 | 0 | 0 | 0 | 0 | 0 | 6.243 |
| PUAEN2009174 | 0 | 0 | 62.793 | 0 | 0 | 0 |
| PUAEN2009348 | 0 | 0 | 0 | 55.441 | 0 | 0 |
| RECTM2000433 | 0 | 0 | 0 | 24.395 | 0 | 0 |
| SKMUS1000022 | 17.481 | 0 | 0 | 0 | 0 | 1.550 |
| SKMUS1000138 | 0 | 0 | 0 | 0.674 | 0 | 0 |
| SKMUS1000176 | 0 | 0 | 0 | 0 | 72.419 | 0 |
| SKMUS1000177 | 0 | 0 | 0 | 16.579 | 0 | 8.797 |
| SKMUS1000186 | 0 | 0 | 0 | 0 | 0 | 1.495 |
| SKMUS2000361 | 44.913 | 0 | 0 | 0 | 0 | 0 |
| SKMUS2000821 | 0 | 16.403 | 0 | 0 | 0 | 0 |
| SKMUS2000954 | 0 | 0 | 0 | 0 | 0 | 3.166 |
| SKMUS2001454 | 0 | 0 | 0 | 0 | 0 | 0.629 |
| SKMUS2001528 | 0 | 0 | 0 | 8.812 | 0 | 0 |
| SKMUS2001634 | 0 | 0 | 0 | 0 | 0 | 7.315 |
| SKNMC1000168 | 0 | 0 | 0 | 0 | 0 | 1.560 |
| SKNMC1000229 | 0 | 0 | 0 | 0 | 0 | 19.583 |
| SKNMC1000251 | 0 | 0 | 0 | 0 | 0 | 26.129 |
| SKNMC2000065 | 0 | 0 | 0 | 0 | 0 | 4.021 |
| SKNMC2000097 | 0 | 0 | 0 | 0 | 0 | 1.660 |
| SKNMC2000305 | 0 | 0 | 0 | 0 | 0 | 6.561 |
| SKNMC2000322 | 0 | 29.184 | 0 | 0 | 0 | 0 |
| SKNMC2000635 | 0 | 0 | 11.921 | 0 | 0 | 1.670 |
| SKNMC2000649 | 0 | 0 | 0 | 0 | 0 | 1.699 |
| SKNMC2000698 | 0 | 0 | 0 | 0 | 0 | 11.541 |
| SKNMC2000877 | 0 | 0 | 0 | 0 | 0 | 8.828 |
| SKNMC2003639 | 0 | 0 | 0 | 0 | 0 | 19.285 |
| SKNSH2000347 | 0 | 0 | 0 | 0 | 0 | 8.358 |
| SKNSH2000716 | 0 | 0 | 0 | 0 | 0 | 3.228 |
| SKNSH2000819 | 0 | 0 | 0 | 0 | 0 | 4.636 |
| SKNSH2002325 | 0 | 0 | 0 | 26.801 | 0 | 0 |
| SKNSH2005061 | 71.198 | 0 | 0 | 0 | 0 | 0 |
| SMINT1000131 | 0 | 0 | 20.288 | 0 | 0 | 0 |
| SMINT2000018 | 0 | 0 | 0 | 0 | 0 | 15.683 |
| SMINT2000441 | 0 | 0 | 0 | 0 | 0 | 4.203 |
| SMINT2000468 | 0 | 0 | 0 | 0 | 0 | 12.784 |
| SMINT2001222 | 0 | 85.415 | 0 | 0 | 0 | 0 |
| SMINT2002328 | 0 | 0 | 0 | 0 | 0 | 34.547 |
| SMINT2003074 | 0 | 0 | 0 | 0 | 0 | 5.106 |
| SMINT2003551 | 0 | 0 | 0 | 0 | 0 | 25.838 |
| SMINT2008917 | 0 | 0 | 0 | 0 | 0 | 20.839 |
| SMINT2008921 | 0 | 0 | 0 | 0 | 0 | 2.067 |
| SMINT2009216 | 0 | 0 | 0 | 38.861 | 0 | 0 |
| SMINT2010200 | 0 | 0 | 0 | 66.550 | 0 | 0 |
| SMINT2012291 | 0 | 0 | 0 | 0 | 0 | 8.589 |
| SMINT2017964 | 0 | 0 | 0 | 34.030 | 0 | 0 |
| SPLEN1000166 | 0 | 0 | 0 | 0 | 0 | 2.105 |
| SPLEN2000072 | 0 | 0 | 0 | 42.162 | 0 | 0 |
| SPLEN2000505 | 0 | 0 | 0 | 0 | 0 | 1.570 |
| SPLEN2001141 | 0 | 0 | 0 | 6.630 | 0 | 0 |
| SPLEN2002467 | 0 | 0 | 0 | 0 | 0 | 6.068 |
| SPLEN2002493 | 0 | 0 | 0 | 0 | 0 | 3.224 |
| SPLEN2004078 | 0 | 0 | 0 | 0 | 0 | 27.833 |
| SPLEN2004555 | 0 | 0 | 0 | 0 | 0 | 7.930 |
| SPLEN2004773 | 0 | 0 | 0 | 0 | 0 | 2.651 |
| SPLEN2006133 | 0 | 0 | 0 | 0 | 0 | 3.534 |
| SPLEN2006374 | 0 | 0 | 0 | 0 | 0 | 2.831 |
| SPLEN2007498 | 0 | 0 | 0 | 0 | 0 | 4.874 |
| SPLEN2009970 | 0 | 0 | 0 | 0 | 0 | 9.499 |
| SPLEN2010195 | 0 | 0 | 0 | 0 | 0 | 4.336 |
| SPLEN2010986 | 0 | 0 | 0 | 0 | 0 | 37.509 |
| SPLEN2011758 | 0 | 0 | 0 | 0 | 0 | 9.782 |
| SPLEN2012523 | 44.843 | 0 | 0 | 0 | 0 | 0 |
| SPLEN2012571 | 0 | 0 | 0 | 0 | 0 | 5.921 |
| SPLEN2014911 | 0 | 0 | 0 | 0 | 0 | 3.930 |
| SPLEN2016139 | 53.814 | 0 | 0 | 0 | 0 | 0 |
| SPLEN2017918 | 0 | 0 | 0 | 0 | 0 | 5.094 |
| SPLEN2019077 | 0 | 0 | 0 | 37.244 | 0 | 0 |
| SPLEN2019092 | 0 | 0 | 0 | 0 | 0 | 51.706 |
| SPLEN2019169 | 0 | 0 | 0 | 0 | 0 | 10.544 |
| SPLEN2022522 | 59.537 | 0 | 0 | 0 | 0 | 0 |
| SPLEN2027780 | 0 | 0 | 0 | 0 | 0 | 51.706 |
| SPLEN2028466 | 0 | 17.097 | 0 | 0 | 0 | 2.311 |
| SPLEN2029912 | 0 | 0 | 0 | 0 | 0 | 6.085 |
| SPLEN2031547 | 0 | 0 | 0 | 0 | 0 | 2.932 |
| SPLEN2034448 | 0 | 0 | 0 | 0 | 0 | 9.657 |
| SPLEN2038473 | 0 | 0 | 0 | 0 | 0 | 25.620 |
| SPLEN2038834 | 0 | 0 | 0 | 0 | 0 | 8.628 |
| STOMA2000121 | 0 | 25.183 | 0 | 0 | 0 | 0 |
| STOMA2000482 | 0 | 0 | 0 | 0 | 0 | 7.180 |
| STOMA2002052 | 0 | 0 | 0 | 0 | 0 | 10.359 |
| STOMA2002166 | 0 | 0 | 0 | 4.107 | 0 | 0 |
| SYNOV1000124 | 0 | 0 | 0 | 0 | 0 | 1.036 |
| SYNOV2001212 | 0 | 0 | 0 | 76.498 | 0 | 0 |
| SYNOV2001239 | 0 | 0 | 6.951 | 2.203 | 0 | 0 |
| SYNOV2001468 | 0 | 0 | 0 | 64.073 | 0 | 0 |
| SYNOV2020463 | 0 | 90.549 | 0 | 0 | 0 | 0 |
| SYNOV4001153 | 0 | 0 | 0 | 0 | 0 | 4.320 |
| SYNOV4007671 | 0 | 0 | 0 | 5.146 | 0 | 1.365 |
| SYNOV4009575 | 0 | 0 | 0 | 0 | 0 | 8.924 |
| T1ESE2000904 | 0 | 0 | 0 | 0 | 0 | 4.300 |
| TBAES2000352 | 0 | 0 | 0 | 49.950 | 0 | 0 |
| TBAES2009387 | 0 | 0 | 0 | 3.753 | 0 | 0 |
| TESOP2002273 | 0 | 0 | 0 | 0 | 0 | 7.560 |
| TESOP2007384 | 0 | 0 | 0 | 0 | 0 | 37.388 |
| TESTI1000023 | 0 | 0 | 0 | 0 | 0 | 4.686 |
| TESTI1000138 | 0 | 0 | 0 | 0 | 0 | 55.597 |
| TESTI1000168 | 0 | 0 | 0 | 0 | 0 | 5.837 |
| TESTI2000184 | 0 | 0 | 0 | 0 | 0 | 8.422 |
| TESTI2000784 | 0 | 0 | 0 | 0 | 0 | 8.466 |
| TESTI2001099 | 0 | 0 | 0 | 0 | 0 | 12.778 |
| TESTI2001269 | 0 | 0 | 0 | 0 | 0 | 2.033 |
| TESTI2001511 | 0 | 0 | 38.759 | 0 | 0 | 0 |
| TESTI2002223 | 0 | 0 | 0 | 0 | 0 | 51.220 |
| TESTI2002365 | 0 | 0 | 0 | 0 | 0 | 4.068 |
| TESTI2003005 | 0 | 0 | 0 | 0 | 0 | 5.659 |
| TESTI2003413 | 0 | 0 | 0 | 0 | 0 | 9.699 |
| TESTI2004080 | 0 | 0 | 0 | 0 | 0 | 18.180 |
| TESTI2004295 | 0 | 0 | 0 | 0 | 0 | 30.503 |
| TESTI2004737 | 0 | 0 | 0 | 0 | 0 | 3.299 |
| TESTI2005564 | 0 | 0 | 0 | 0 | 0 | 6.821 |
| TESTI2005743 | 0 | 0 | 0 | 0 | 0 | 4.091 |
| TESTI2005767 | 0 | 0 | 0 | 0 | 0 | 5.094 |
| TESTI2005784 | 0 | 0 | 0 | 0 | 0 | 5.540 |
| TESTI2005788 | 0 | 0 | 0 | 0 | 0 | 8.614 |
| TESTI2006051 | 0 | 0 | 0 | 5.946 | 0 | 0 |
| TESTI2006453 | 0 | 0 | 0 | 0 | 0 | 6.270 |
| TESTI2006872 | 0 | 0 | 0 | 0 | 0 | 10.235 |
| TESTI2007211 | 0 | 0 | 0 | 0 | 0 | 6.152 |
| TESTI2007311 | 0 | 0 | 0 | 0 | 0 | 14.331 |
| TESTI2007998 | 0 | 0 | 0 | 0 | 0 | 5.890 |
| TESTI2008240 | 0 | 0 | 11.080 | 0 | 0 | 0.466 |
| TESTI2009402 | 0 | 0 | 0 | 0 | 0 | 17.075 |
| TESTI2009423 | 0 | 0 | 0 | 0 | 0 | 30.119 |
| TESTI2009474 | 0 | 0 | 0 | 0 | 0 | 3.763 |
| TESTI2009520 | 0 | 0 | 0 | 0 | 0 | 12.571 |
| TESTI2009577 | 0 | 0 | 0 | 0 | 0 | 9.876 |
| TESTI2010513 | 0 | 0 | 0 | 0 | 0 | 4.391 |
| TESTI2012104 | 0 | 0 | 0 | 0 | 0 | 18.132 |
| TESTI2012778 | 0 | 0 | 0 | 0 | 0 | 2.409 |
| TESTI2015246 | 0 | 0 | 0 | 0 | 0 | 22.051 |
| TESTI2015626 | 0 | 0 | 0 | 2.309 | 0 | 0 |
| TESTI2017954 | 0 | 0 | 0 | 0 | 0 | 2.468 |
| TESTI2018014 | 0 | 0 | 0 | 0 | 0 | 7.179 |
| TESTI2018462 | 0 | 0 | 0 | 0 | 0 | 5.263 |
| TESTI2018611 | 0 | 0 | 0 | 0 | 0 | 1.957 |
| TESTI2019729 | 0 | 0 | 0 | 0 | 0 | 74.021 |
| TESTI2021124 | 0 | 0 | 0 | 0 | 0 | 10.645 |
| TESTI2024844 | 48.116 | 23.675 | 0 | 0 | 0 | 0 |
| TESTI2025422 | 0 | 51.293 | 0 | 0 | 0 | 0 |
| TESTI2028296 | 0 | 50.959 | 0 | 0 | 0 | 0 |
| TESTI2034940 | 0 | 0 | 0 | 0 | 21.867 | 0 |
| TESTI2044276 | 0 | 0 | 0 | 0 | 0 | 8.832 |
| TESTI2045155 | 0 | 0 | 0 | 80.865 | 0 | 0 |
| TESTI2046456 | 19.441 | 0 | 10.254 | 0 | 0 | 4.311 |
| TESTI2052693 | 0 | 0 | 0 | 23.507 | 0 | 0 |
| TESTI4000014 | 7.500 | 0 | 0 | 0 | 0 | 0.665 |
| TESTI4002202 | 0 | 0 | 0 | 0 | 0 | 6.175 |
| TESTI4002799 | 0 | 0 | 0 | 0 | 0 | 1.645 |
| TESTI4003150 | 0 | 0 | 0 | 0 | 0 | 27.660 |
| TESTI4008018 | 0 | 0 | 0 | 0 | 0 | 74.021 |
| TESTI4009286 | 0 | 0 | 0 | 0 | 0 | 1.350 |
| TESTI4010851 | 0 | 0 | 0 | 0 | 0 | 1.018 |
| TESTI4013441 | 0 | 0 | 10.424 | 0 | 0 | 0.876 |
| TESTI4013474 | 43.396 | 0 | 0 | 0 | 0 | 0 |
| TESTI4013675 | 0 | 0 | 0 | 0 | 0 | 18.389 |
| TESTI4037156 | 0 | 0 | 0 | 1.943 | 0 | 0 |
| TESTI4038099 | 0 | 0 | 0 | 0 | 0 | 41.085 |
| TESTI4038284 | 0 | 0 | 0 | 0 | 0 | 3.430 |
| THYMU1000002 | 0 | 0 | 0 | 4.155 | 0 | 1.102 |
| THYMU1000016 | 0 | 7.986 | 0 | 0 | 0 | 0.720 |
| THYMU1000041 | 0 | 0 | 0 | 0 | 0 | 13.287 |
| THYMU1000109 | 0 | 0 | 0 | 5.525 | 0 | 0 |
| THYMU1000329 | 0 | 0 | 0 | 0 | 0 | 9.927 |
| THYMU1000374 | 0 | 0 | 0 | 0 | 0 | 2.790 |
| THYMU1000428 | 0 | 0 | 0 | 0 | 0 | 1.059 |
| THYMU1000490 | 0 | 0 | 0 | 0 | 0 | 32.041 |
| THYMU2000382 | 0 | 12.526 | 0 | 0 | 0 | 0 |
| THYMU2000684 | 0 | 0 | 0 | 0 | 0 | 7.755 |
| THYMU2000946 | 0 | 0 | 0 | 0 | 0 | 5.390 |
| THYMU2001018 | 0 | 0 | 0 | 0 | 0 | 16.822 |
| THYMU2002583 | 0 | 0 | 0 | 0 | 0 | 1.931 |
| THYMU2003012 | 0 | 0 | 0 | 0 | 0 | 6.529 |
| THYMU2003046 | 0 | 0 | 0 | 0 | 0 | 3.580 |
| THYMU2003419 | 0 | 0 | 0 | 0 | 42.154 | 3.741 |
| THYMU2003542 | 0 | 44.660 | 0 | 0 | 0 | 0 |
| THYMU2003891 | 6.128 | 0 | 0 | 0 | 0 | 0 |
| THYMU2003981 | 0 | 0 | 0 | 0 | 0 | 0.973 |
| THYMU2004344 | 0 | 0 | 0 | 0 | 0 | 2.379 |
| THYMU2004410 | 0 | 0 | 0 | 0 | 0 | 3.569 |
| THYMU2004906 | 0 | 0 | 0 | 0 | 0 | 23.344 |
| THYMU2005546 | 0 | 0 | 0 | 0 | 0 | 2.037 |
| THYMU2006505 | 0 | 0 | 0 | 0 | 0 | 2.543 |
| THYMU2006813 | 0 | 0 | 0 | 0 | 0 | 2.947 |
| THYMU2009658 | 0 | 0 | 0 | 2.459 | 0 | 0 |
| THYMU2010094 | 0 | 0 | 0 | 0 | 0 | 10.849 |
| THYMU2011308 | 0 | 0 | 92.999 | 0 | 0 | 0 |
| THYMU2012002 | 0 | 0 | 0 | 0 | 0 | 47.289 |
| THYMU2012104 | 0 | 0 | 0 | 0 | 0 | 50.388 |
| THYMU2012690 | 0 | 0 | 86.085 | 0 | 0 | 0 |
| THYMU2013916 | 0 | 0 | 0 | 0 | 0 | 8.263 |
| THYMU2014599 | 0 | 0 | 0 | 0 | 0 | 52.760 |
| THYMU2018126 | 0 | 0 | 0 | 5.108 | 0 | 0 |
| THYMU2027125 | 0 | 3.699 | 0 | 1.257 | 15.025 | 0 |
| THYMU2027975 | 0 | 82.600 | 0 | 0 | 0 | 0 |
| THYMU2031341 | 0 | 71.304 | 0 | 0 | 0 | 0 |
| THYMU2031847 | 0 | 0 | 0 | 0 | 0 | 69.076 |
| THYMU2033308 | 0 | 0 | 0 | 0 | 0 | 26.010 |
| THYMU3013386 | 0 | 0 | 0 | 0 | 62.834 | 0 |
| THYMU3021586 | 0 | 0 | 0 | 0 | 0 | 7.693 |
| TKIDN2015423 | 0 | 0 | 0 | 0 | 0 | 1.186 |
| TLIVE2002046 | 0 | 0 | 0 | 0 | 0 | 3.380 |
| TRACH2000079 | 0 | 0 | 0 | 0 | 0 | 1.009 |
| TRACH2000248 | 0 | 28.835 | 0 | 0 | 0 | 1.299 |
| TRACH2000321 | 0 | 0 | 0 | 0 | 0 | 1.830 |
| TRACH2000461 | 0 | 0 | 0 | 0 | 0 | 6.387 |
| TRACH2000472 | 0 | 0 | 0 | 11.989 | 0 | 1.590 |
| TRACH2000862 | 0 | 0 | 0 | 0 | 0 | 53.910 |
| TRACH2000926 | 0 | 0 | 0 | 0 | 0 | 5.197 |
| TRACH2000972 | 0 | 0 | 0 | 0 | 0 | 1.104 |
| TRACH2001021 | 0 | 8.653 | 0 | 0 | 0 | 0 |
| TRACH2001060 | 0 | 0 | 0 | 0 | 0 | 62.446 |
| TRACH2001101 | 0 | 0 | 0 | 0 | 0 | 19.803 |
| TRACH2001289 | 0 | 0 | 0 | 0 | 0 | 1.899 |
| TRACH2001341 | 0 | 0 | 0 | 0 | 0 | 11.871 |
| TRACH2001428 | 0 | 0 | 0 | 0 | 0 | 4.701 |
| TRACH2001432 | 0 | 22.988 | 0 | 0 | 0 | 0 |
| TRACH2001607 | 0 | 0 | 0 | 0 | 0 | 3.741 |
| TRACH2001612 | 0 | 0 | 0 | 0 | 0 | 7.440 |
| TRACH2001810 | 0 | 0 | 0 | 0 | 0 | 2.893 |
| TRACH2002537 | 0 | 0 | 0 | 0 | 0 | 5.182 |
| TRACH2002803 | 0 | 0 | 0 | 0 | 0 | 11.644 |
| TRACH2003323 | 0 | 0 | 0 | 0 | 0 | 13.259 |
| TRACH2005811 | 0 | 0 | 0 | 0 | 0 | 3.928 |
| TRACH2006866 | 0 | 0 | 0 | 34.834 | 0 | 0 |
| TRACH2007059 | 0 | 0 | 0 | 0 | 0 | 62.446 |
| TRACH2007399 | 0 | 0 | 10.435 | 0 | 0 | 0 |
| TRACH2007816 | 0 | 0 | 0 | 0 | 0 | 18.594 |
| TRACH2008472 | 0 | 0 | 0 | 11.015 | 0 | 0 |
| TRACH2009851 | 0 | 0 | 0 | 0 | 0 | 28.006 |
| TRACH2014077 | 0 | 0 | 0 | 0 | 0 | 6.336 |
| TRACH2014124 | 0 | 0 | 0 | 0 | 0 | 1.923 |
| TRACH2015823 | 0 | 0 | 0 | 0 | 0 | 12.223 |
| TRACH2025535 | 0 | 0 | 0 | 16.304 | 0 | 2.163 |
| TRACH3006717 | 0 | 0 | 0 | 0 | 0 | 13.669 |
| TRACH3007479 | 0 | 0 | 47.650 | 0 | 0 | 0 |
| TRACH3007625 | 0 | 0 | 0 | 0 | 0 | 4.379 |
| TRACH3016805 | 0 | 0 | 0 | 0 | 0 | 8.386 |
| TRACH3036932 | 0 | 0 | 0 | 0 | 0 | 27.304 |
| TRACH3038399 | 0 | 0 | 0 | 0 | 0 | 23.161 |
| TSTOM2000315 | 0 | 0 | 0 | 0 | 0 | 4.245 |
| TSTOM2000553 | 0 | 0 | 0 | 0 | 0 | 12.559 |
| UMVEN2000152 | 0 | 16.277 | 0 | 0 | 0 | 0 |
| UMVEN2000453 | 0 | 0 | 0 | 0 | 0 | 2.917 |
| UTERU2000023 | 0 | 0 | 0 | 0 | 0 | 19.067 |
| UTERU2000095 | 0 | 0 | 0 | 0 | 0 | 2.313 |
| UTERU2000263 | 0 | 10.589 | 11.351 | 0 | 0 | 0 |
| UTERU2000300 | 0 | 0 | 0 | 0 | 0 | 9.187 |
| UTERU2000424 | 0 | 0 | 0 | 0 | 0 | 1.582 |
| UTERU2001607 | 0 | 0 | 0 | 0 | 0 | 2.748 |
| UTERU2001658 | 0 | 0 | 0 | 0 | 0 | 16.498 |
| UTERU2003057 | 0 | 0 | 57.297 | 0 | 0 | 0 |
| UTERU2004037 | 0 | 0 | 0 | 15.393 | 0 | 0 |
| UTERU2004197 | 0 | 0 | 0 | 0 | 0 | 7.490 |
| UTERU2004520 | 0 | 0 | 0 | 0 | 0 | 60.963 |
| UTERU2004688 | 0 | 22.977 | 0 | 0 | 0 | 0 |
| UTERU2005593 | 0 | 0 | 0 | 0 | 0 | 2.091 |
| UTERU2005621 | 0 | 0 | 0 | 0 | 0 | 8.397 |
| UTERU2006593 | 0 | 0 | 0 | 0 | 0 | 2.750 |
| UTERU2008085 | 0 | 1.866 | 0 | 6.340 | 0 | 0.168 |
| UTERU2008938 | 0 | 0 | 0 | 0 | 0 | 4.584 |
| UTERU2010417 | 0 | 0 | 0 | 0 | 0 | 2.936 |
| UTERU2011906 | 0 | 0 | 0 | 0 | 0 | 12.702 |
| UTERU2012407 | 0 | 0 | 0 | 0 | 0 | 45.844 |
| UTERU2014898 | 0 | 31.445 | 0 | 0 | 0 | 0 |
| UTERU2015653 | 0 | 0 | 12.924 | 0 | 0 | 0 |
| UTERU2017762 | 0 | 0 | 0 | 0 | 0 | 60.963 |
| UTERU2019096 | 0 | 0 | 0 | 0 | 0 | 4.290 |
| UTERU2023175 | 0 | 0 | 0 | 0 | 0 | 2.773 |
| UTERU2024969 | 0 | 0 | 0 | 0 | 0 | 5.981 |
| UTERU3000298 | 0 | 0 | 0 | 0 | 0 | 8.617 |
| UTERU3005767 | 0 | 24.596 | 0 | 8.356 | 0 | 0 |

[0679] Genes whose expression levels were negligibly low in each of the above-described libraries are shown with their clone names below.

[0680] 3NB691000018, 3NB691000085, 3NB691000113, 3NB691000129, 3NB692000012, 3NB692000029, 3NB692000102, 3NB692000154, 3NB692000276, 3NB692000305, 3NB692000330, 3NB692000374, 3NB692000429, 3NB692000484, 3NB692000529, 3NB692000545, 3NB692000973, 3NB692001002, 3NB692001022, 3NB692001034, 3NB692001040, 3NB692001123, 3NB692001267, 3NB692001288, 3NB692001349, 3NB692001366, 3NB692001408, 3NB692001442, 3NB692001459, 3NB692001471, 3NB692001496, 3NB692001501, 3NB692001507, 3NB692001511, 3NB692001519, 3NB692001520, 3NB692001528, 3NB692001538, 3NB692001548, 3NB692001557, 3NB692001637, 3NB692001719, 3NB692001853, 3NB692001861, 3NB692002051, 3NB692002365, 3NB692002685, 3NB692002806, 3NB692003538, 3NB692004045, 3NB692004724, 3NB692005439, 3NB692006952, 3NB692008178, 3NB692008729, ACTVT2000380, ADIPS1000064, ADIPS2000069, ADIPS2000088, ADIPS2000245, ADIPS2000425, ADRGL1000002, ADRGL1000018, ADRGL1000033, ADRGL1000038, ADRGL1000065, ADRGL1000067, ADRGL1000111, ADRGL1000144, ADRGL1000147, ADRGL1000160, ADRGL1000165, ADRGL1000182, ADRGL2000042, ADRGL2000056, ADRGL2000064, ADRGL2000074, ADRGL2000085, ADRGL2000097, ADRGL2000117, ADRGL2000142, ADRGL2000172, ADRGL2000248, ADRGL2000261, ADRGL2000323, ADRGL2000328, ADRGL2000353, ADRGL2000384, ADRGL2000428, ADRGL2000636, ADRGL2000644, ADRGL2000968, ADRGL2001119, ADRGL2001229, ADRGL2001287, ADRGL2001301, ADRGL2001354, ADRGL2001554, ADRGL2001651, ADRGL2001756, ADRGL2001836, ADRGL2001854, ADRGL2002013, ADRGL2002029, ADRGL2002191, ADRGL2002260, ADRGL2002392, ADRGL2002679, ADRGL2002753, ADRGL2002857, ADRGL2003017, ADRGL2003329, ADRGL2003552, ADRGL2003585, ADRGL2003638, ADRGL2003684, ADRGL2003773, ADRGL2003785, ADRGL2004031, ADRGL2004077, ADRGL2004451, ADRGL2004459, ADRGL2004676, ADRGL2004708, ADRGL2004724, ADRGL2004749, ADRGL2004770, ADRGL2004777, ADRGL2004833, ADRGL2005336, ADRGL2005564, ADRGL2005756, ADRGL2005838, ADRGL2005926, ADRGL2005961, ADRGL2006034, ADRGL2006124, ADRGL2006177, ADRGL2006193, ADRGL2006377, ADRGL2006677, ADRGL2006732, ADRGL2006767, ADRGL2006817, ADRGL2006846, ADRGL2006886, ADRGL2007080, ADRGL2007125, ADRGL2007283, ADRGL2007313, ADRGL2007357, ADRGL2007636, ADRGL2007651, ADRGL2007810, ADRGL2007877, ADRGL2007906, ADRGL2007974, ADRGL2008023, ADRGL2008331, ADRGL2008337, ADRGL2008535, ADRGL2008966, ADRGL2009146, ADRGL2009273, ADRGL2009324, ADRGL2009489, ADRGL2009533, ADRGL2009691, ADRGL2009755, ADRGL2010152, ADRGL2010315, ADRGL2010594, ADRGL2010860, ADRGL2010974, ADRGL2011190, ADRGL2011330, ADRGL2012038, ADRGL2012179, AHMSC1000138, ASTRO1000009, ASTRO1000018, ASTRO1000029, ASTRO1000096, ASTRO1000165, ASTRO2000011, ASTRO2000095, ASTRO2000141, ASTRO2000191, ASTRO2000278, ASTRO2000372, ASTRO2000381, ASTRO2000403, ASTRO2000417, ASTRO2000480, ASTRO2000482, ASTRO2000533, ASTRO2000653, ASTRO2000662, ASTRO2000725, ASTRO2000801, ASTRO2000914, ASTRO2001001, ASTRO2001008, ASTRO2001088, ASTRO2001107, ASTRO2001122, ASTRO2001227, ASTRO2001249, ASTRO2001480, ASTRO2001806, ASTRO2002024, ASTRO2002035, ASTRO2002064, ASTRO2002202, ASTRO2002459, ASTRO2002571, ASTRO2002632, ASTRO2002659, ASTRO2002693, ASTRO2002720, ASTRO2002733, ASTRO2002743, ASTRO2002842, ASTRO2003212, ASTRO2003316, ASTRO2003574, ASTRO2003581, ASTRO2003740, ASTRO2003840, ASTRO2003925, ASTRO2003960, ASTRO2004051, ASTRO2004177, ASTRO2004217, ASTRO2004297, ASTRO2004584, ASTRO2004628, ASTRO2004751, ASTRO2004877, ASTRO2004974, ASTRO2005008, ASTRO2005081, ASTRO2005096, ASTRO2005273, ASTRO2005343, ASTRO2005360, ASTRO2005413, ASTRO2005423, ASTRO2005553, ASTRO2005557, ASTRO2005575, ASTRO2005593, ASTRO2005687, ASTRO2005726, ASTRO2005896, ASTRO2005902, ASTRO2006356, ASTRO2006475, ASTRO2006747, ASTRO2006920, ASTRO2006952, ASTRO2007047, ASTRO2007377, ASTRO2007515, ASTRO2007578, ASTRO2007643, ASTRO2007666, ASTRO2007956, ASTRO2007962, ASTRO2008239, ASTRO2008409, ASTRO2008425, ASTRO2008508, ASTRO2008777, ASTRO2008895, ASTRO2008960, ASTRO2008972, ASTRO2009068, ASTRO2009118, ASTRO2009177, ASTRO2009333, ASTRO2009458, ASTRO2009526, ASTRO2009879, ASTRO2010072, ASTRO2010582, ASTRO2010615, ASTRO2010799, ASTRO2010962, ASTRO2010996, ASTRO2011149, ASTRO2011422, ASTRO2011426, ASTRO2011437, ASTRO2011461, ASTRO2011834, ASTRO2011893, ASTRO2012552, ASTRO2013124, ASTRO2013585, ASTRO2013671, ASTRO2013802, ASTRO2014135, ASTRO2014174, ASTRO2014211, ASTRO2014363, ASTRO2014392, ASTRO2014498, ASTRO2014561, ASTRO2014576, ASTRO2014863, ASTRO2014923, ASTRO2014961, ASTRO2015162, ASTRO2015185, ASTRO2015328, ASTRO2016044, ASTRO2016114, ASTRO2016148, ASTRO2016681, ASTRO2016819, ASTRO2016847, ASTRO2016892, ASTRO2017348, ASTRO2017627, ASTRO2018169, ASTRO2018373, ASTRO2018540, ASTRO2019039, ASTRO2019171, ASTRO3000154, ASTRO3000172, ASTRO3000177, ASTRO3000301, ASTRO3000474, ASTRO3000482, BEAST2000454, BGGI11000123, BGGI11000193, BGGI11000285, BGGI12000022, BGGI12000054, BGGI12000067, BGGI12000161, BGGI12000533, BGGI12000544, BGGI12000616, BGGI12000684, BGGI12000693, BGGI12000839, BGGI12001002, BGGI12001075, BGGI12001097, BGGI12001241, BGGI12001247, BGGI12001682, BGGI12001714, BLADE1000176, BLADE2000181, BLADE2000256, BLADE2000340, BLADE2000389, BLADE2000463, BLADE2000492, BLADE2000579, BLADE2000640, BLADE2000866, BLADE2000938, BLADE2001031, BLADE2001133, BLADE2001138, BLADE2001141, BLADE2001371, BLADE2001458, BLADE2001575, BLADE2001753, BLADE2001935, BLADE2001940, BLADE2001987, BLADE2002073, BLADE2002310, BLADE2002730, BLADE2002738, BLADE2002744, BLADE2002782, BLADE2002947, BLADE2002972, BLADE2003474, BLADE2003916, BLADE2004089, BLADE2004345, BLADE2004389, BLADE2004462, BLADE2004628, BLADE2004670, BLADE2004722, BLADE2004849, BLADE2005036, BLADE2005038, BLADE2005229, BLADE2005459, BLADE2005792, BLADE2006043, BLADE2006412, BLADE2006415, BLADE2006607, BLADE2006826, BLADE2006830, BLADE2006849, BLADE2006947, BLADE2007033, BLADE2007043, BLADE2007589, BLADE2007722, BLADE2007735, BLADE2007744, BLADE2007799, BLADE2007923, BLADE2007935, BLADE2007958, BLADE2008281, BLADE2008398, BLADE2008454, BLADE2008461, BLADE2008479, BLADE2008539, BLADE2008809, BLADE2008995, BLADE2009452, BLADE2009479, BLADE2009593, BNGH41000098, BNGH41000104, BNGH41000118, BNGH41000137, BNGH41000153, BNGH41000169, BNGH41000177, BNGH41000216, BNGH41000235, BNGH42000130, BNGH42000132, BNGH42000405, BNGH42000675, BNGH42000739, BNGH42000791, BNGH42000815, BNGH42000994, BNGH42001247, BNGH42001406, BNGH42001576, BNGH42001724, BNGH42002244, BNGH42002387, BNGH42002487, BNGH42002489, BNGH42003529, BNGH42003570, BNGH42003641, BNGH42004076, BNGH42004291, BNGH42004538, BNGH42004679, BNGH42005017, BNGH42005235, BNGH42005504, BNGH42005968, BNGH42006226, BNGH42006234, BNGH42007037, BNGH42007366, BNGH42007594, BNGH42007798, BNGH42008199, BNGH42008510, BNGH42008603, BNGH42008649, BNGH42008832, BNGH42008850, BNGH42008943, BNGH42009021, BNGH42009025, BRACE1000020, BRACE1000042, BRACE1000047, BRACE1000051, BRACE1000065, BRACE1000070, BRACE1000073, BRACE1000084, BRACE1000087, BRACE1000092, BRACE1000093, BRACE1000101, BRACE1000114, BRACE1000115, BRACE1000124, BRACE1000132, BRACE1000159, BRACE1000166, BRACE1000169, BRACE1000186, BRACE1000187, BRACE1000239, BRACE1000258, BRACE1000451, BRACE1000475, BRACE1000572, BRACE2000061, BRACE2000077, BRACE2000078, BRACE2000100, BRACE2000109, BRACE2000141, BRACE2000148, BRACE2000183, BRACE2000229, BRACE2000232, BRACE2000245, BRACE2000256, BRACE2000266, BRACE2000267, BRACE2000280, BRACE2000300, BRACE2000331, BRACE2000332, BRACE2000347, BRACE2000351, BRACE2000368, BRACE2000392, BRACE2000441, BRACE2000487, BRACE2000489, BRACE2000505, BRACE2000525, BRACE2000526, BRACE2000531, BRACE2000545, BRACE2000553, BRACE2000565, BRACE2000577, BRACE2000640, BRACE2000650, BRACE2000677, BRACE2000698, BRACE2000718, BRACE2000733, BRACE2000743, BRACE2000750, BRACE2000753, BRACE2000815, BRACE2000885, BRACE2000893, BRACE2000905, BRACE2000936, BRACE2000947, BRACE2000965, BRACE2000969, BRACE2000975, BRACE2000988, BRACE2001017, BRACE2001065, BRACE2001070, BRACE2001094, BRACE2001107, BRACE2001143, BRACE2001151, BRACE2001154, BRACE2001188, BRACE2001191, BRACE2001197, BRACE2001236, BRACE2001239, BRACE2001269, BRACE2001312, BRACE2001313, BRACE2001330, BRACE2001340, BRACE2001352, BRACE2001353, BRACE2001374, BRACE2001375, BRACE2001423, BRACE2001424, BRACE2001445, BRACE2001453, BRACE2001455, BRACE2001492, BRACE2001496, BRACE2001497, BRACE2001508, BRACE2001543, BRACE2001564, BRACE2001588, BRACE2001607, BRACE2001626, BRACE2001673, BRACE2001677, BRACE2001692, BRACE2001705, BRACE2001711, BRACE2001726, BRACE2001733, BRACE2001737, BRACE2001742, BRACE2001777, BRACE2001779, BRACE2001834, BRACE2001855, BRACE2001859, BRACE2001865, BRACE2001872, BRACE2001881, BRACE2001892, BRACE2001898, BRACE2001923, BRACE2001942, BRACE2001944, BRACE2001954, BRACE2001971, BRACE2001972, BRACE2001973, BRACE2002026, BRACE2002034, BRACE2002050, BRACE2002081, BRACE2002139, BRACE2002142, BRACE2002151, BRACE2002157, BRACE2002176, BRACE2002202, BRACE2002206, BRACE2002227, BRACE2002260, BRACE2002297, BRACE2002304, BRACE2002356, BRACE2002392, BRACE2002394, BRACE2002409, BRACE2002431, BRACE2002444, BRACE2002458, BRACE2002467, BRACE2002468, BRACE2002478, BRACE2002495, BRACE2002582, BRACE2002585, BRACE2002589, BRACE2002590, BRACE2002606, BRACE2002613, BRACE2002614, BRACE2002617, BRACE2002623, BRACE2002635, BRACE2002661, BRACE2002676, BRACE2002682, BRACE2002685, BRACE2002695, BRACE2002707, BRACE2002736, BRACE2002752, BRACE2002755, BRACE2002762, BRACE2002772, BRACE2002792, BRACE2002796, BRACE2002803, BRACE2002807, BRACE2002812, BRACE2002834, BRACE2002849, BRACE2002857, BRACE2002860, BRACE2002861, BRACE2002884, BRACE2002896, BRACE2002948, BRACE2003037, BRACE2003097, BRACE2003110, BRACE2003168, BRACE2003172, BRACE2003199, BRACE2003210, BRACE2003217, BRACE2003269, BRACE2003285, BRACE2003319, BRACE2003398, BRACE2003420, BRACE2003428, BRACE2003431, BRACE2003512, BRACE2003516, BRACE2003527, BRACE2003539, BRACE2003540, BRACE2003598, BRACE2003609, BRACE2003614, BRACE2003628, BRACE2003639, BRACE2003700, BRACE2003713, BRACE2003766, BRACE2003788, BRACE2003800, BRACE2003802, BRACE2003825, BRACE2003827, BRACE2003847, BRACE2003848, BRACE2003873, BRACE2003885, BRACE2003887, BRACE2003905, BRACE2003928, BRACE2003944, BRACE2003954, BRACE2003982, BRACE2003987, BRACE2005034, BRACE2005047, BRACE2005063, BRACE2005083, BRACE2005090, BRACE2005099, BRACE2005118, BRACE2005124, BRACE2005138, BRACE2005151, BRACE2005160, BRACE2005169, BRACE2005189, BRACE2005193, BRACE2005196, BRACE2005198, BRACE2005216, BRACE2005231, BRACE2005243, BRACE2005251, BRACE2005253, BRACE2005290, BRACE2005298, BRACE2005328, BRACE2005329, BRACE2005337, BRACE2005348, BRACE2005363, BRACE2005395, BRACE2005408, BRACE2005433, BRACE2005434, BRACE2005450, BRACE2005457, BRACE2005460, BRACE2005489, BRACE2005518, BRACE2005556, BRACE2005562, BRACE2005624, BRACE2005661, BRACE2005667, BRACE2005681, BRACE2005719, BRACE2005731, BRACE2005742, BRACE2005762, BRACE2005773, BRACE2005787, BRACE2005795, BRACE2005800, BRACE2005858, BRACE2005869, BRACE2005875, BRACE2005881, BRACE2005898, BRACE2005904, BRACE2005906, BRACE2005907, BRACE2005911, BRACE2005937, BRACE2005949, BRACE2005981, BRACE2005991, BRACE2006055, BRACE2006075, BRACE2006084, BRACE2006089, BRACE2006102, BRACE2006122, BRACE2006137, BRACE2006143, BRACE2006167, BRACE2006174, BRACE2006240, BRACE2006245, BRACE2006249, BRACE2006258, BRACE2006264, BRACE2006274, BRACE2006281, BRACE2006298, BRACE2006344, BRACE2006354, BRACE2006363, BRACE2006378, BRACE2006380, BRACE2006393, BRACE2006413, BRACE2006417, BRACE2006453, BRACE2006459, BRACE2006488, BRACE2006534, BRACE2006537, BRACE2006540, BRACE2006547, BRACE2006564, BRACE2006587, BRACE2006598, BRACE2006636, BRACE2006685, BRACE2006703, BRACE2006743, BRACE2006753, BRACE2006783, BRACE2006821, BRACE2006833, BRACE2006859, BRACE2006871, BRACE2006909, BRACE2006911, BRACE2006924, BRACE2006935, BRACE2006944, BRACE2006951, BRACE2006982, BRACE2006986, BRACE2007013, BRACE2007064, BRACE2007068, BRACE2007087, BRACE2007089, BRACE2007109, BRACE2007138, BRACE2007174, BRACE2007191, BRACE2007197, BRACE2007201, BRACE2007203, BRACE2007232, BRACE2007254, BRACE2007262, BRACE2007274, BRACE2007281, BRACE2007295, BRACE2007358, BRACE2007396, BRACE2007398, BRACE2007411, BRACE2007447, BRACE2007477, BRACE2007502, BRACE2007503, BRACE2007522, BRACE2007527, BRACE2007538, BRACE2007563, BRACE2007567, BRACE2007621, BRACE2007640, BRACE2007641, BRACE2007646, BRACE2007663, BRACE2007682, BRACE2007685, BRACE2007708, BRACE2007727, BRACE2007749, BRACE2007760, BRACE2007761, BRACE2007764, BRACE2007767, BRACE2007768, BRACE2007769, BRACE2007784, BRACE2007786, BRACE2007798, BRACE2007799, BRACE2007801, BRACE2007832, BRACE2007836, BRACE2007868, BRACE2007882, BRACE2007888, BRACE2007902, BRACE2007920, BRACE2007937, BRACE2007944, BRACE2007952, BRACE2008008, BRACE2008015, BRACE2008021, BRACE2008097, BRACE2008102, BRACE2008114, BRACE2008144, BRACE2008172, BRACE2008216, BRACE2008218, BRACE2008251, BRACE2008276, BRACE2008295, BRACE2008308, BRACE2008336, BRACE2008358, BRACE2008361, BRACE2008380, BRACE2008385, BRACE2008399, BRACE2008401, BRACE2008402, BRACE2008410, BRACE2008420, BRACE2008443, BRACE2008473, BRACE2008480, BRACE2008488, BRACE2008495, BRACE2008500, BRACE2008553, BRACE2008594, BRACE2008604, BRACE2008615, BRACE2008622, BRACE2008629, BRACE2008655, BRACE2008656, BRACE2008706, BRACE2008708, BRACE2008710, BRACE2008754, BRACE2008797, BRACE2008847, BRACE2008857, BRACE2008861, BRACE2008867, BRACE2008881, BRACE2008883, BRACE2008917, BRACE2008919, BRACE2008941, BRACE2008948, BRACE2008960, BRACE2008968, BRACE2008999, BRACE2009014, BRACE2009016, BRACE2009031, BRACE2009044, BRACE2009045, BRACE2009053, BRACE2009122, BRACE2009131, BRACE2009185, BRACE2009188, BRACE2009212, BRACE2009221, BRACE2009235, BRACE2009238, BRACE2009255, BRACE2009270, BRACE2009272, BRACE2009274, BRACE2009275, BRACE2009291, BRACE2009293, BRACE2009307, BRACE2009311, BRACE2009318, BRACE2009323, BRACE2009421, BRACE2009428, BRACE2009434, BRACE2009437, BRACE2009483, BRACE2009533, BRACE2009558, BRACE2009566, BRACE2009591, BRACE2009620, BRACE2009654, BRACE2009721, BRACE2009732, BRACE2009754, BRACE2009828, BRACE2009886, BRACE2009907, BRACE2009957, BRACE2010170, BRACE2010171, BRACE2010203, BRACE2010208, BRACE2010336, BRACE2010348, BRACE2010440, BRACE2010444, BRACE2010477, BRACE2010489, BRACE2010535, BRACE2010550, BRACE2010598, BRACE2010632, BRACE2010642, BRACE2010651, BRACE2010669, BRACE2010684, BRACE2010753, BRACE2010813, BRACE2010828, BRACE2010837, BRACE2010888, BRACE2010937, BRACE2010983, BRACE2011007, BRACE2011025, BRACE2011183, BRACE2011199, BRACE2011265, BRACE2011389, BRACE2011478, BRACE2011545, BRACE2011592, BRACE2011611, BRACE2011646, BRACE2011677, BRACE2011703, BRACE2011747, BRACE2011838, BRACE2011892, BRACE2011904, BRACE2011947, BRACE2012061, BRACE2012062, BRACE2012185, BRACE2012222, BRACE2012232, BRACE2012291, BRACE2012317, BRACE2012510, BRACE2012625, BRACE2012653, BRACE2012814, BRACE2012833, BRACE2012838, BRACE2012936, BRACE2012947, BRACE2013009, BRACE2013010, BRACE2013126, BRACE2013132, BRACE2013149, BRACE2013369, BRACE2013806, BRACE2013855, BRACE2013911, BRACE2014108, BRACE2014161, BRACE2014232, BRACE2014257, BRACE2014268, BRACE2014306, BRACE2014475, BRACE2014657, BRACE2014746, BRACE2014780, BRACE2014818, BRACE2014821, BRACE2014824, BRACE2014850, BRACE2014854, BRACE2015031, BRACE2015058, BRACE2015132, BRACE2015262, BRACE2015270, BRACE2015287, BRACE2015314, BRACE2015352, BRACE2015368, BRACE2015412, BRACE2015436, BRACE2015741, BRACE2015756, BRACE2015969, BRACE2015995, BRACE2016058, BRACE2016194, BRACE2016315, BRACE2016325, BRACE2016335, BRACE2016366, BRACE2016465, BRACE2016516, BRACE2016583, BRACE2016708, BRACE2016821, BRACE2016896, BRACE2016981, BRACE2017108, BRACE2017124, BRACE2017298, BRACE2017359, BRACE2017410, BRACE2017438, BRACE2017574, BRACE2017580, BRACE2017587, BRACE2017720, BRACE2017844, BRACE2017872, BRACE2017929, BRACE2017934, BRACE2017985, BRACE2017992, BRACE2018337, BRACE2018443, BRACE2018448, BRACE2018568, BRACE2018700, BRACE2018727, BRACE2018736, BRACE2018759, BRACE2018762, BRACE2018782, BRACE2018847, BRACE2019004, BRACE2019044, BRACE2019147, BRACE2019244, BRACE2019258, BRACE2019327, BRACE2019348, BRACE2019371, BRACE2019467, BRACE2019510, BRACE2019519, BRACE2019528, BRACE2019618, BRACE2019696, BRACE2019703, BRACE2019843, BRACE2019865, BRACE2019872, BRACE2019877, BRACE2020028, BRACE2020077, BRACE2020097, BRACE2020157, BRACE2020278, BRACE2020358, BRACE2020467, BRACE2020584, BRACE2020652, BRACE2020709, BRACE2020742, BRACE2020756, BRACE2020863, BRACE2020982, BRACE2021143, BRACE2021148, BRACE2021245, BRACE2021254, BRACE2021264, BRACE2021344, BRACE2021433, BRACE2021478, BRACE2021541, BRACE2021670, BRACE2021695, BRACE2021708, BRACE2021721, BRACE2021932, BRACE2021936, BRACE2022030, BRACE2022158, BRACE2022196, BRACE2022270, BRACE2022328, BRACE2022333, BRACE2022389, BRACE2022394, BRACE2022435, BRACE2022448, BRACE2022450, BRACE2022549, BRACE2022633, BRACE2022693, BRACE2022848, BRACE2022928, BRACE2022990, BRACE2023069, BRACE2023070, BRACE2023223, BRACE2023268, BRACE2023284, BRACE2023404, BRACE2023451, BRACE2023540, BRACE2023633, BRACE2023718, BRACE2023727, BRACE2023744, BRACE2023800, BRACE2023801, BRACE2024074, BRACE2024222, BRACE2024610, BRACE2024627, BRACE2024781, BRACE2024826, BRACE2025018, BRACE2025316, BRACE2025333, BRACE2025437, BRACE2025452, BRACE2025492, BRACE2025710, BRACE2025796, BRACE2025992, BRACE2026054, BRACE2026131, BRACE2026141, BRACE2026142, BRACE2026293, BRACE2026294, BRACE2026404, BRACE2026675, BRACE2026725, BRACE2026836, BRACE2026920, BRACE2026971, BRACE2027018, BRACE2027221, BRACE2027258, BRACE2027312, BRACE2027382, BRACE2027389, BRACE2027408, BRACE2027767, BRACE2027770, BRACE2027879, BRACE2027896, BRACE2027970, BRACE2028171, BRACE2028392, BRACE2028410, BRACE2028636, BRACE2028741, BRACE2028956, BRACE2028970, BRACE2029112, BRACE2029356, BRACE2029396, BRACE2029581, BRACE2029644, BRACE2029849, BRACE2030039, BRACE2030096, BRACE2030323, BRACE2030326, BRACE2030341, BRACE2030345, BRACE2030736, BRACE2030883, BRACE2030884, BRACE2031154, BRACE2031232, BRACE2031527, BRACE2031531, BRACE2031553, BRACE2031899, BRACE2032044, BRACE2032090, BRACE2032134, BRACE2032148, BRACE2032182, BRACE2032329, BRACE2032385, BRACE2032436, BRACE2032502, BRACE2032538, BRACE2032584, BRACE2032823, BRACE2033128, BRACE2033394, BRACE2033478, BRACE2033720, BRACE2033786, BRACE2034434, BRACE2034523, BRACE2034616, BRACE2034622, BRACE2034870, BRACE2035003, BRACE2035120, BRACE2035124, BRACE2035191, BRACE2035278, BRACE2035381, BRACE2035441, BRACE2035485, BRACE2036005, BRACE2036096, BRACE2036743, BRACE2036830, BRACE2036834, BRACE2036900, BRACE2037132, BRACE2037294, BRACE2037295, BRACE2037299, BRACE2037310, BRACE2037431, BRACE2037692, BRACE2037847, BRACE2038114, BRACE2038269, BRACE2038271, BRACE2038329, BRACE2038492, BRACE2038551, BRACE2038618, BRACE2039009, BRACE2039128, BRACE2039170, BRACE2039249, BRACE2039286, BRACE2039297, BRACE2039327, BRACE2039362, BRACE2039475, BRACE2039600, BRACE2039607, BRACE2039624, BRACE2039734, BRACE2039823, BRACE2039832, BRACE2039893, BRACE2039986, BRACE2040138, BRACE2040325, BRACE2040514, BRACE2040640, BRACE2040987, BRACE2041009, BRACE2041095, BRACE2041200, BRACE2041264, BRACE2041890, BRACE2041898, BRACE2042394, BRACE2042398, BRACE2042550, BRACE2042620, BRACE2042628, BRACE2042873, BRACE2043036, BRACE2043105, BRACE2043142, BRACE2043248, BRACE2043349, BRACE2043381, BRACE2043774, BRACE2043942, BRACE2044057, BRACE2044105, BRACE2044263, BRACE2044286, BRACE2044304, BRACE2044473, BRACE2044510, BRACE2044640, BRACE2044816, BRACE2044946, BRACE2044949, BRACE2045300, BRACE2045428, BRACE2045445, BRACE2045596, BRACE2045772, BRACE2045947, BRACE2045954, BRACE2046251, BRACE2046295, BRACE2046976, BRACE2047011, BRACE2047232, BRACE2047350, BRACE2047377, BRACE2047385, BRACE2047492, BRACE2047558, BRACE2047573, BRACE2047835, BRACE2047893, BRACE2047975, BRACE3000071, BRACE3000404, BRACE3000520, BRACE3000697, BRACE3000840, BRACE3000973, BRACE3001002, BRACE3001058, BRACE3001113, BRACE3001217, BRACE3001299, BRACE3001384, BRACE3001391, BRACE3001403, BRACE3001595, BRACE3001754, BRACE3001948, BRACE3001973, BRACE3002184, BRACE3002298, BRACE3002344, BRACE3002390, BRACE3002420, BRACE3002508, BRACE3002541, BRACE3002756, BRACE3003004, BRACE3003026, BRACE3003053, BRACE3003192, BRACE3003413, BRACE3003595, BRACE3003698, BRACE3003866, BRACE3003920, BRACE3004046, BRACE3004058, BRACE3004113, BRACE3004150, BRACE3004205, BRACE3004358, BRACE3004371, BRACE3004435, BRACE3004477, BRACE3004767, BRACE3004772, BRACE3004783, BRACE3004843, BRACE3004862, BRACE3004880, BRACE3004887, BRACE3004981, BRACE3004996, BRACE3004998, BRACE3005103, BRACE3005127, BRACE3005145, BRACE3005217, BRACE3005225, BRACE3005430, BRACE3005499, BRACE3005760, BRACE3005870, BRACE3005903, BRACE3005938, BRACE3005989, BRACE3006113, BRACE3006185, BRACE3006226, BRACE3006462, BRACE3006463, BRACE3006553, BRACE3006872, BRACE3006917, BRACE3007058, BRACE3007084, BRACE3007085, BRACE3007258, BRACE3007322, BRACE3007472, BRACE3007480, BRACE3007559, BRACE3007625, BRACE3007642, BRACE3007649, BRACE3007767, BRACE3007869, BRACE3008036, BRACE3008066, BRACE3008092, BRACE3008095, BRACE3008137, BRACE3008255, BRACE3008337, BRACE3008384, BRACE3008720, BRACE3008772, BRACE3009044, BRACE3009075, BRACE3009090, BRACE3009127, BRACE3009197, BRACE3009237, BRACE3009265, BRACE3009297, BRACE3009377, BRACE3009392, BRACE3009416, BRACE3009539, BRACE3009574, BRACE3009701, BRACE3009708, BRACE3009724, BRACE3009993, BRACE3010076, BRACE3010079, BRACE3010086, BRACE3010221, BRACE3010283, BRACE3010315, BRACE3010397, BRACE3010416, BRACE3010435, BRACE3010438, BRACE3010702, BRACE3010862, BRACE3011271, BRACE3011421, BRACE3011447, BRACE3011505, BRACE3011634, BRACE3011774, BRACE3012357, BRACE3012574, BRACE3012806, BRACE3012930, BRACE3013119, BRACE3013418, BRACE3013576, BRACE3013740, BRACE3013780, BRACE3013874, BRACE3013986, BRACE3014005, BRACE3014068, BRACE3014231, BRACE3014290, BRACE3014317, BRACE3014523, BRACE3014714, BRACE3014807, BRACE3014942, BRACE3015090, BRACE3015121, BRACE3015262, BRACE3015521, BRACE3015808, BRACE3015829, BRACE3015894, BRACE3015898, BRACE3016020, BRACE3016122, BRACE3016167, BRACE3016170, BRACE3016580, BRACE3016788, BRACE3016810, BRACE3016862, BRACE3016884, BRACE3017083, BRACE3017253, BRACE3018083, BRACE3018308, BRACE3018963, BRACE3019055, BRACE3019071, BRACE3019084, BRACE3019570, BRACE3019611, BRACE3019817, BRACE3019828, BRACE3019941, BRACE3020151, BRACE3020194, BRACE3020286, BRACE3020356, BRACE3020594, BRACE3020669, BRACE3020671, BRACE3020890, BRACE3021148, BRACE3021430, BRACE3021517, BRACE3021805, BRACE3022051, BRACE3022303, BRACE3022312, BRACE3022340, BRACE3022847, BRACE3023604, BRACE3023912, BRACE3024073, BRACE3024359, BRACE3024379, BRACE3024444, BRACE3024497, BRACE3024537, BRACE3024659, BRACE3024662, BRACE3024879, BRACE3025153, BRACE3025302, BRACE3025457, BRACE3025531, BRACE3025627, BRACE3025630, BRACE3025719, BRACE3026008, BRACE3026075, BRACE3026161, BRACE3026290, BRACE3026345, BRACE3026456, BRACE3026735, BRACE3026802, BRACE3026844, BRACE3026947, BRACE3026993, BRACE3027242, BRACE3027256, BRACE3027326, BRACE3027478, BRACE3027480, BRACE3027931, BRACE3027976, BRACE3028214, BRACE3028241, BRACE3028360, BRACE3028895, BRACE3028998, BRACE3029005, BRACE3029021, BRACE3029205, BRACE3029447, BRACE3030057, BRACE3030103, BRACE3030538, BRACE3030748, BRACE3030866, BRACE3031161, BRACE3031184, BRACE3031185, BRACE3031315, BRACE3031372, BRACE3031579, BRACE3031728, BRACE3031838, BRACE3031843, BRACE3032427, BRACE3032455, BRACE3032537, BRACE3032538, BRACE3032631, BRACE3032771, BRACE3032980, BRACE3032983, BRACE3033525, BRACE3034159, BRACE3034183, BRACE3034389, BRACE3034964, BRACE3034993, BRACE3035168, BRACE3035227, BRACE3036156, BRACE3036271, BRACE3037612, BRACE3037637, BRACE3037803, BRACE3038012, BRACE3038030, BRACE3038569, BRACE3038570, BRACE3038687, BRACE3038760, BRACE3039288, BRACE3039358, BRACE3039378, BRACE3039454, BRACE3040012, BRACE3040239, BRACE3040504, BRACE3040644, BRACE3040856, BRACE3040863, BRACE3041059, BRACE3041162, BRACE3041827, BRACE3042046, BRACE3042210, BRACE3042326, BRACE3042409, BRACE3042432, BRACE3042594, BRACE3043597, BRACE3044090, BRACE3044172, BRACE3044247, BRACE3044377, BRACE3044389, BRACE3044495, BRACE3045011, BRACE3045033, BRACE3045078, BRACE3045145, BRACE3045424, BRACE3045708, BRACE3045981, BRACE3046049, BRACE3046152, BRACE3046294, BRACE3046450, BRACE3046466, BRACE3046491, BRACE3046609, BRACE3046762, BRACE3046837, BRACE3046855, BRACE3046966, BRACE3047018, BRACE3047482, BRACE3047801, BRALZ1000047, BRALZ1000103, BRALZ2000189, BRALZ2000263, BRALZ2000988, BRALZ2001038, BRALZ2001279, BRALZ2001350, BRALZ2001445, BRALZ2001559, BRALZ2001743, BRALZ2001834, BRALZ2002174, BRALZ2002418, BRALZ2002477, BRALZ2003119, BRALZ2003330, BRALZ2003453, BRALZ2003525, BRALZ2004397, BRALZ2005467, BRALZ2005471, BRALZ2005888, BRALZ2005950, BRALZ2005992, BRALZ2006288, BRALZ2006474, BRALZ2006560, BRALZ2006734, BRALZ2006800, BRALZ2006976, BRALZ2007376, BRALZ2007545, BRALZ2007576, BRALZ2007661, BRALZ2007790, BRALZ2007793, BRALZ2007952, BRALZ2008031, BRALZ2008166, BRALZ2008462, BRALZ2008617, BRALZ2008696, BRALZ2008763, BRALZ2008869, BRALZ2008930, BRALZ2009446, BRALZ2009486, BRALZ2010186, BRALZ2010842, BRALZ2011337, BRALZ2011796, BRALZ2011880, BRALZ2012050, BRALZ2012183, BRALZ2012848, BRALZ2013621, BRALZ2013690, BRALZ2014054, BRALZ2014316, BRALZ2014484, BRALZ2014951, BRALZ2015168, BRALZ2015811, BRALZ2016085, BRALZ2016498, BRALZ2017359, BRALZ2017531, BRALZ2017607, BRALZ2017620, BRALZ2017844, BRALZ2018342, BRALZ2018492, BRALZ2018834, BRALZ2019047, BRAMY1000095, BRAMY1000098, BRAMY1000130, BRAMY1000157, BRAMY1000173, BRAMY2000021, BRAMY2000025, BRAMY2000052, BRAMY2000076, BRAMY2000086, BRAMY2000151, BRAMY2000181, BRAMY2000196, BRAMY2000231, BRAMY2000277, BRAMY2000354, BRAMY2000388, BRAMY2000411, BRAMY2000508, BRAMY2000562, BRAMY2000653, BRAMY2000814, BRAMY2000893, BRAMY2000946, BRAMY2000981, BRAMY2000987, BRAMY2001068, BRAMY2001114, BRAMY2001203, BRAMY2001282, BRAMY2001367, BRAMY2001427, BRAMY2001473, BRAMY2001678, BRAMY2002005, BRAMY2002044, BRAMY2002072, BRAMY2002158, BRAMY2002311, BRAMY2002339, BRAMY2002364, BRAMY2002479, BRAMY2002493, BRAMY2002525, BRAMY2002584, BRAMY2002604, BRAMY2002621, BRAMY2002638, BRAMY2002739, BRAMY2002799, BRAMY2002853, BRAMY2002862, BRAMY2002956, BRAMY2003008, BRAMY2003037, BRAMY2003117, BRAMY2003287, BRAMY2003325, BRAMY2003529, BRAMY2003538, BRAMY2003585, BRAMY2003634, BRAMY2003653, BRAMY2003681, BRAMY2003893, BRAMY2003897, BRAMY2003898, BRAMY2003904, BRAMY2003926, BRAMY2003929, BRAMY2004031, BRAMY2004058, BRAMY2004183, BRAMY2004335, BRAMY2004351, BRAMY2004352, BRAMY2004387, BRAMY2004492, BRAMY2004524, BRAMY2004537, BRAMY2004542, BRAMY2004756, BRAMY2004771, BRAMY2005052, BRAMY2005064, BRAMY2005094, BRAMY2005151, BRAMY2005182, BRAMY2005244, BRAMY2005391, BRAMY2005488, BRAMY2005576, BRAMY2005648, BRAMY2005662, BRAMY2005708, BRAMY2005711, BRAMY2006092, BRAMY2006118, BRAMY2006149, BRAMY2006366, BRAMY2006375, BRAMY2006397, BRAMY2006411, BRAMY2006459, BRAMY2006466, BRAMY2006659, BRAMY2006779, BRAMY2006809, BRAMY2006879, BRAMY2007043, BRAMY2007110, BRAMY2007185, BRAMY2007244, BRAMY2007249, BRAMY2007255, BRAMY2007287, BRAMY2007308, BRAMY2007411, BRAMY2007458, BRAMY2007486, BRAMY2007546, BRAMY2007567, BRAMY2007594, BRAMY2007610, BRAMY2007653, BRAMY2007753, BRAMY2007859, BRAMY2008333, BRAMY2008382, BRAMY2008563, BRAMY2008583, BRAMY2008977, BRAMY2008979, BRAMY2009013, BRAMY2009023, BRAMY2009034, BRAMY2009105, BRAMY2009123, BRAMY2009192, BRAMY2009344, BRAMY2009349, BRAMY2009394, BRAMY2009489, BRAMY2009508, BRAMY2009528, BRAMY2009557, BRAMY2009612, BRAMY2009693, BRAMY2010068, BRAMY2010135, BRAMY2010145, BRAMY2010171, BRAMY2010208, BRAMY2010239, BRAMY2010272, BRAMY2010290, BRAMY2010357, BRAMY2010366, BRAMY2010395, BRAMY2010441, BRAMY2010442, BRAMY2010464, BRAMY2010581, BRAMY2010798, BRAMY2010808, BRAMY2010919, BRAMY2011064, BRAMY2011105, BRAMY2011178, BRAMY2011196, BRAMY2011216, BRAMY2011253, BRAMY2011446, BRAMY2011480, BRAMY2011639, BRAMY2011679, BRAMY2011811, BRAMY2011841, BRAMY2011846, BRAMY2011849, BRAMY2011872, BRAMY2011961, BRAMY2012017, BRAMY2012119, BRAMY2012162, BRAMY2012163, BRAMY2012277, BRAMY2012340, BRAMY2012426, BRAMY2012497, BRAMY2012517, BRAMY2012536, BRAMY2012555, BRAMY2012568, BRAMY2012581, BRAMY2012691, BRAMY2012721, BRAMY2012731, BRAMY2012776, BRAMY2012880, BRAMY2012881, BRAMY2013169, BRAMY2013200, BRAMY2013216, BRAMY2013405, BRAMY2013414, BRAMY2013572, BRAMY2013590, BRAMY2013621, BRAMY2013659, BRAMY2013722, BRAMY2013736, BRAMY2013756, BRAMY2013944, BRAMY2013975, BRAMY2014019, BRAMY2014205, BRAMY2014387, BRAMY2014462, BRAMY2014469, BRAMY2014541, BRAMY2014754, BRAMY2014813, BRAMY2015251, BRAMY2015311, BRAMY2015420, BRAMY2015503, BRAMY2015516, BRAMY2015550, BRAMY2015551, BRAMY2015559, BRAMY2015688, BRAMY2015705, BRAMY2015782, BRAMY2015833, BRAMY2015855, BRAMY2015890, BRAMY2015911, BRAMY2015925, BRAMY2016002, BRAMY2016009, BRAMY2016020, BRAMY2016070, BRAMY2016251, BRAMY2016325, BRAMY2016327, BRAMY2016386, BRAMY2016706, BRAMY2016771, BRAMY2016892, BRAMY2016938, BRAMY2016953, BRAMY2017014, BRAMY2017249, BRAMY2017348, BRAMY2017450, BRAMY2017455, BRAMY2017528, BRAMY2017864, BRAMY2018027, BRAMY2018106, BRAMY2018122, BRAMY2018126, BRAMY2018272, BRAMY2018273, BRAMY2018279, BRAMY2018295, BRAMY2018308, BRAMY2018396, BRAMY2018467, BRAMY2018635, BRAMY2018785, BRAMY2019055, BRAMY2019111, BRAMY2019277, BRAMY2019300, BRAMY2019468, BRAMY2019509, BRAMY2019600, BRAMY2019643, BRAMY2019710, BRAMY2019963, BRAMY2019985, BRAMY2019989, BRAMY2020050, BRAMY2020106, BRAMY2020270, BRAMY2020354, BRAMY2020355, BRAMY2020412, BRAMY2020445, BRAMY2020466, BRAMY2020520, BRAMY2020574, BRAMY2020634, BRAMY2020713, BRAMY2021040, BRAMY2021063, BRAMY2021098, BRAMY2021139, BRAMY2021142, BRAMY2021276, BRAMY2021310, BRAMY2021388, BRAMY2021498, BRAMY2021523, BRAMY2021710, BRAMY2021732, BRAMY2021746, BRAMY2021825, BRAMY2021867, BRAMY2021962, BRAMY2021982, BRAMY2022052, BRAMY2022160, BRAMY2022168, BRAMY2022263, BRAMY2022301, BRAMY2022320, BRAMY2022383, BRAMY2022445, BRAMY2022454, BRAMY2022525, BRAMY2022532, BRAMY2022723, BRAMY2022786, BRAMY2022796, BRAMY2022929, BRAMY2022980, BRAMY2022984, BRAMY2023060, BRAMY2023110, BRAMY2023115, BRAMY2023161, BRAMY2023172, BRAMY2023238, BRAMY2023327, BRAMY2023358, BRAMY2023406, BRAMY2023482, BRAMY2023514, BRAMY2023719, BRAMY2023729, BRAMY2023786, BRAMY2023852, BRAMY2023863, BRAMY2023939, BRAMY2024004, BRAMY2024073, BRAMY2024312, BRAMY2024374, BRAMY2024390, BRAMY2024416, BRAMY2024449, BRAMY2024489, BRAMY2024497, BRAMY2024514, BRAMY2024530, BRAMY2024535, BRAMY2024545, BRAMY2024576, BRAMY2024593, BRAMY2024711, BRAMY2024715, BRAMY2024728, BRAMY2024827, BRAMY2024849, BRAMY2025024, BRAMY2025032, BRAMY2025121, BRAMY2025175, BRAMY2025218, BRAMY2025230, BRAMY2025272, BRAMY2025277, BRAMY2025495, BRAMY2025812, BRAMY2025996, BRAMY2026009, BRAMY2026091, BRAMY2026168, BRAMY2026300, BRAMY2026347, BRAMY2026395, BRAMY2026405, BRAMY2026533, BRAMY2026538, BRAMY2026713, BRAMY2026824, BRAMY2026899, BRAMY2026902, BRAMY2026904, BRAMY2026976, BRAMY2027073, BRAMY2027114, BRAMY2027242, BRAMY2027396, BRAMY2027451, BRAMY2027461, BRAMY2027467, BRAMY2027587, BRAMY2027714, BRAMY2027717, BRAMY2027752, BRAMY2027782, BRAMY2028072, BRAMY2028183, BRAMY2028188, BRAMY2028269, BRAMY2028282, BRAMY2028472, BRAMY2028491, BRAMY2028516, BRAMY2028565, BRAMY2028593, BRAMY2028682, BRAMY2028783, BRAMY2028796, BRAMY2028856, BRAMY2028914, BRAMY2029204, BRAMY2029602, BRAMY2029988, BRAMY2030098, BRAMY2030109, BRAMY2030206, BRAMY2030477, BRAMY2030545, BRAMY2030607, BRAMY2030702, BRAMY2030703, BRAMY2030768, BRAMY2030799, BRAMY2030859, BRAMY2030915, BRAMY2031317, BRAMY2031377, BRAMY2031442, BRAMY2031516, BRAMY2032014, BRAMY2032231, BRAMY2032242, BRAMY2032290, BRAMY2032311, BRAMY2032317, BRAMY2032344, BRAMY2032589, BRAMY2032678, BRAMY2032696, BRAMY2032777, BRAMY2032994, BRAMY2033003, BRAMY2033116, BRAMY2033240, BRAMY2033267, BRAMY2033316, BRAMY2033332, BRAMY2033506, BRAMY2033594, BRAMY2033895, BRAMY2033914, BRAMY2034072, BRAMY2034185, BRAMY2034187, BRAMY2034305, BRAMY2034561, BRAMY2034920, BRAMY2034993, BRAMY2035070, BRAMY2035449, BRAMY2035545, BRAMY2035606, BRAMY2035718, BRAMY2035719, BRAMY2035801, BRAMY2035869, BRAMY2035923, BRAMY2036076, BRAMY2036079, BRAMY2036254, BRAMY2036266, BRAMY2036387, BRAMY2036396, BRAMY2036459, BRAMY2036567, BRAMY2036615, BRAMY2036699, BRAMY2036913, BRAMY2036918, BRAMY2036968, BRAMY2037147, BRAMY2037328, BRAMY2037609, BRAMY2037629, BRAMY2037800, BRAMY2037823, BRAMY2037971, BRAMY2038100, BRAMY2038128, BRAMY2038317, BRAMY2038475, BRAMY2038484, BRAMY2038516, BRAMY2038832, BRAMY2038846, BRAMY2038887, BRAMY2038904, BRAMY2039287, BRAMY2039300, BRAMY2039314, BRAMY2039341, BRAMY2039630, BRAMY2039695, BRAMY2039728, BRAMY2039872, BRAMY2040051, BRAMY2040159, BRAMY2040214, BRAMY2040478, BRAMY2040915, BRAMY2041261, BRAMY2041347, BRAMY2041378, BRAMY2041384, BRAMY2041434, BRAMY2041507, BRAMY2041542, BRAMY2041738, BRAMY2042122, BRAMY2042131, BRAMY2042178, BRAMY2042195, BRAMY2042244, BRAMY2042549, BRAMY2042596, BRAMY2042612, BRAMY2042641, BRAMY2042711, BRAMY2042760, BRAMY2042804, BRAMY2042899, BRAMY2042918, BRAMY2043069, BRAMY2043103, BRAMY2043314, BRAMY2043345, BRAMY2044246, BRAMY2044317, BRAMY2044349, BRAMY2044686, BRAMY2044838, BRAMY2045036, BRAMY2045299, BRAMY2045471, BRAMY2045530, BRAMY2046109, BRAMY2046478, BRAMY2046489, BRAMY2046537, BRAMY2046667, BRAMY2046742, BRAMY2046871, BRAMY2046984, BRAMY2046989, BRAMY2047169, BRAMY2047280, BRAMY2047676, BRAMY2047692, BRAMY2047746, BRAMY2047751, BRAMY2047765, BRAMY2047884, BRAMY2047948, BRAMY3000206, BRAMY3000210, BRAMY3000213, BRAMY3000224, BRAMY3000254, BRAMY3000307, BRAMY3000692, BRAMY3001356, BRAMY3001401, BRAMY3001409, BRAMY3001794, BRAMY3002120, BRAMY3002312, BRAMY3002329, BRAMY3002458, BRAMY3002508, BRAMY3002620, BRAMY3002805, BRAMY3002886, BRAMY3002991, BRAMY3003026, BRAMY3003109, BRAMY3003205, BRAMY3003310, BRAMY3003566, BRAMY3003723, BRAMY3004126, BRAMY3004224, BRAMY3004364, BRAMY3004672, BRAMY3004800, BRAMY3004900, BRAMY3004919, BRAMY3005091, BRAMY3005184, BRAMY3005656, BRAMY3005912, BRAMY3005932, BRAMY3006032, BRAMY3006297, BRAMY3006761, BRAMY3007078, BRAMY3007206, BRAMY3007311, BRAMY3007350, BRAMY3007449, BRAMY3007471, BRAMY3007609, BRAMY3007723, BRAMY3007968, BRAMY3008044, BRAMY3008088, BRAMY3008096, BRAMY3008335, BRAMY3008466, BRAMY3008505, BRAMY3008650, BRAMY3008937, BRAMY3009158, BRAMY3009207, BRAMY3009491, BRAMY3009556, BRAMY3009782, BRAMY3009811, BRAMY3009904, BRAMY3010264, BRAMY3010321, BRAMY3010411, BRAMY3010603, BRAMY3010654, BRAMY4000089, BRAMY4000095, BRAMY4000229, BRAMY4000277, BRAMY4000915, BRAMY4000962, BRAMY4001173, BRAMY4001200, BRAMY4001234, BRAMY4001449, BRAMY4001652, BRAMY4001913, BRAMY4002575, BRAMY4002628, BRASW1000053, BRASW1000125, BRAWH1000001, BRAWH1000002, BRAWH1000007, BRAWH1000037, BRAWH1000040, BRAWH1000045, BRAWH1000083, BRAWH1000094, BRAWH1000116, BRAWH1000127, BRAWH1000130, BRAWH1000157, BRAWH1000162, BRAWH1000164, BRAWH1000168, BRAWH1000174, BRAWH1000180, BRAWH1000369, BRAWH2000034, BRAWH2000048, BRAWH2000071, BRAWH2000082, BRAWH2000093, BRAWH2000109, BRAWH2000131, BRAWH2000142, BRAWH2000169, BRAWH2000177, BRAWH2000218, BRAWH2000232, BRAWH2000248, BRAWH2000256, BRAWH2000274, BRAWH2000323, BRAWH2000353, BRAWH2000370, BRAWH2000409, BRAWH2000417, BRAWH2000443, BRAWH2000471, BRAWH2000476, BRAWH2000482, BRAWH2000488, BRAWH2000494, BRAWH2000500, BRAWH2000503, BRAWH2000522, BRAWH2000554, BRAWH2000588, BRAWH2000595, BRAWH2000636, BRAWH2000643, BRAWH2000651, BRAWH2000682, BRAWH2000686, BRAWH2000697, BRAWH2000752, BRAWH2000859, BRAWH2000866, BRAWH2000892, BRAWH2000901, BRAWH2000924, BRAWH2000926, BRAWH2000944, BRAWH2000984, BRAWH2001019, BRAWH2001037, BRAWH2001052, BRAWH2001103, BRAWH2001129, BRAWH2001137, BRAWH2001141, BRAWH2001159, BRAWH2001166, BRAWH2001186, BRAWH2001203, BRAWH2001238, BRAWH2001239, BRAWH2001255, BRAWH2001355, BRAWH2001378, BRAWH2001395, BRAWH2001406, BRAWH2001412, BRAWH2001418, BRAWH2001424, BRAWH2001436, BRAWH2001438, BRAWH2001439, BRAWH2001459, BRAWH2001461, BRAWH2001484, BRAWH2001492, BRAWH2001503, BRAWH2001519, BRAWH2001530, BRAWH2001535, BRAWH2001589, BRAWH2001662, BRAWH2001666, BRAWH2001679, BRAWH2001686, BRAWH2001701, BRAWH2001842, BRAWH2001862, BRAWH2001873, BRAWH2001940, BRAWH2001973, BRAWH2002047, BRAWH2002060, BRAWH2002062, BRAWH2002125, BRAWH2002191, BRAWH2002318, BRAWH2002333, BRAWH2002352, BRAWH2002383, BRAWH2002549, BRAWH2002560, BRAWH2002601, BRAWH2002623, BRAWH2002630, BRAWH2002635, BRAWH2002662, BRAWH2002679, BRAWH2002725, BRAWH2002761, BRAWH2002811, BRAWH2002861, BRAWH2002911, BRAWH2002963, BRAWH2002967, BRAWH2002976, BRAWH2003000, BRAWH2003025, BRAWH2003307, BRAWH2003355, BRAWH2003366, BRAWH2003662, BRAWH2003689, BRAWH2003693, BRAWH2003818, BRAWH2003832, BRAWH2003948, BRAWH2003964, BRAWH2004044, BRAWH2004068, BRAWH2004078, BRAWH2004095, BRAWH2004136, BRAWH2004217, BRAWH2004580, BRAWH2004731, BRAWH2004779, BRAWH2004842, BRAWH2004884, BRAWH2004923, BRAWH2005008, BRAWH2005074, BRAWH2005225, BRAWH2005315, BRAWH2005517, BRAWH2005524, BRAWH2005533, BRAWH2005578, BRAWH2005812, BRAWH2005974, BRAWH2005998, BRAWH2006044, BRAWH2006083, BRAWH2006207, BRAWH2006301, BRAWH2006395, BRAWH2006405, BRAWH2006450, BRAWH2006493, BRAWH2006526, BRAWH2006543, BRAWH2006622, BRAWH2006760, BRAWH2006960, BRAWH2006989, BRAWH2006996, BRAWH2007069, BRAWH2007308, BRAWH2007406, BRAWH2007550, BRAWH2007570, BRAWH2007591, BRAWH2007605, BRAWH2007658, BRAWH2007664, BRAWH2007800, BRAWH2007808, BRAWH2007825, BRAWH2007862, BRAWH2007890, BRAWH2008058, BRAWH2008128, BRAWH2008219, BRAWH2008255, BRAWH2008292, BRAWH2008297, BRAWH2008366, BRAWH2008380, BRAWH2008540, BRAWH2008706, BRAWH2008790, BRAWH2008903, BRAWH2008993, BRAWH2009112, BRAWH2009238, BRAWH2009261, BRAWH2009263, BRAWH2009298, BRAWH2009307, BRAWH2009360, BRAWH2009393, BRAWH2009485, BRAWH2009490, BRAWH2009558, BRAWH2009590, BRAWH2009626, BRAWH2009678, BRAWH2009695, BRAWH2009907, BRAWH2010000, BRAWH2010069, BRAWH2010084, BRAWH2010136, BRAWH2010318, BRAWH2010329, BRAWH2010354, BRAWH2010364, BRAWH2010536, BRAWH2010552, BRAWH2010584, BRAWH2010618, BRAWH2010619, BRAWH2010754, BRAWH2010980, BRAWH2011066, BRAWH2011079, BRAWH2011096, BRAWH2011155, BRAWH2011166, BRAWH2011204, BRAWH2011286, BRAWH2011294, BRAWH2011343, BRAWH2011400, BRAWH2011762, BRAWH2011795, BRAWH2011796, BRAWH2011812, BRAWH2011823, BRAWH2011860, BRAWH2011920, BRAWH2011958, BRAWH2012054, BRAWH2012077, BRAWH2012161, BRAWH2012162, BRAWH2012164, BRAWH2012258, BRAWH2012277, BRAWH2012326, BRAWH2012538, BRAWH2012540, BRAWH2012619, BRAWH2012698, BRAWH2012749, BRAWH2012827, BRAWH2012866, BRAWH2012963, BRAWH2013047, BRAWH2013219, BRAWH2013294, BRAWH2013748, BRAWH2013866, BRAWH2013871, BRAWH2013914, BRAWH2013941, BRAWH2013955, BRAWH2014053, BRAWH2014234, BRAWH2014379, BRAWH2014414, BRAWH2014473, BRAWH2014511, BRAWH2014662, BRAWH2014717, BRAWH2014729, BRAWH2014876, BRAWH2014934, BRAWH2014954, BRAWH2015247, BRAWH2015349, BRAWH2015375, BRAWH2015385, BRAWH2015595, BRAWH2015728, BRAWH2015853, BRAWH2015866, BRAWH2016028, BRAWH2016106, BRAWH2016160, BRAWH2016166, BRAWH2016209, BRAWH2016221, BRAWH2016223, BRAWH2016269, BRAWH2016305, BRAWH2016439, BRAWH2016446, BRAWH2016514, BRAWH2016562, BRAWH2016655, BRAWH2016679, BRAWH2016702, BRAWH2016724, BRAWH2016785, BRAWH2016792, BRAWH2016800, BRAWH2017002, BRAWH2017103, BRAWH2017250, BRAWH2017294, BRAWH2017304, BRAWH2017305, BRAWH2017379, BRAWH2017407, BRAWH2017433, BRAWH2017523, BRAWH2017534, BRAWH2017542, BRAWH2017635, BRAWH2017913, BRAWH2018206, BRAWH2018267, BRAWH2018282, BRAWH2018317, BRAWH2018506, BRAWH2018514, BRAWH2018526, BRAWH2018527, BRAWH2018601, BRAWH2018729, BRAWH2018745, BRAWH2018875, BRAWH2019053, BRAWH2019055, BRAWH2019198, BRAWH3000078, BRAWH3000088, BRAWH3000100, BRAWH3000166, BRAWH3000314, BRAWH3000329, BRAWH3000410, BRAWH3000446, BRAWH3000491, BRAWH3000604, BRAWH3000884, BRAWH3001053, BRAWH3001319, BRAWH3001326, BRAWH3001475, BRAWH3001636, BRAWH3001638, BRAWH3001712, BRAWH3001760, BRAWH3001783, BRAWH3001833, BRAWH3001879, BRAWH3001891, BRAWH3001918, BRAWH3002433, BRAWH3002467, BRAWH3002513, BRAWH3002600, BRAWH3002819, BRAWH3003019, BRAWH3003136, BRAWH3003244, BRAWH3003343, BRAWH3003411, BRAWH3003522, BRAWH3003573, BRAWH3003598, BRAWH3003727, BRAWH3003801, BRAWH3003975, BRAWH3004222, BRAWH3004335, BRAWH3004350, BRAWH3004453, BRAWH3004530, BRAWH3004666, BRAWH3005037, BRAWH3005047, BRAWH3005132, BRAWH3005146, BRAWH3005292, BRAWH3005300, BRAWH3005422, BRAWH3005534, BRAWH3005886, BRAWH3005892, BRAWH3005896, BRAWH3005912, BRAWH3005981, BRAWH3006547, BRAWH3006548, BRAWH3006761, BRAWH3006792, BRAWH3007129, BRAWH3007221, BRAWH3007441, BRAWH3007455, BRAWH3007506, BRAWH3007726, BRAWH3007783, BRAWH3008167, BRAWH3008341, BRAWH3008559, BRAWH3008697, BRAWH3008867, BRAWH3008931, BRAWH3009017, BRAWH3009285, BRAWH3009297, BRAWH3009546, BRAWH3009961, BRAWH3010461, BRAWH3010560, BRAWH3010602, BRAWH3010657, BRAWH3010726, BRAWH3010833, BRAWH3011101, BRAWH3011331, BRAWH3011402, BRAWH3011577, BRAWH3011623, BRAWH3011637, BRAWH3011685, BRAWH3011907, BRAWH3011929, BRAWH3012005, BRAWH3012662, BRAWH3012779, BRAWH3013009, BRAWH3013049, BRAWH3013197, BRAWH3013264, BRAWH3013508, BRAWH3014609, BRAWH3014639, BRAWH3015017, BRAWH3015175, BRAWH3015260, BRAWH3015610, BRAWH3015825, BRAWH3016123, BRAWH3016271, BRAWH3016715, BRAWH3017259, BRAWH3017260, BRAWH3017477, BRAWH3017537, BRAWH3017980, BRAWH3018063, BRAWH3018369, BRAWH3018548, BRAWH3018969, BRAWH3019026, BRAWH3019529, BRAWH3019594, BRAWH3019629, BRAWH3019820, BRAWH3020200, BRAWH3020318, BRAWH3020486, BRAWH3020884, BRAWH3020928, BRAWH3021012, BRAWH3021580, BRAWH3021641, BRAWH3021643, BRAWH3021724, BRAWH3022347, BRAWH3022431, BRAWH3022459, BRAWH3022542, BRAWH3022719, BRAWH3022866, BRAWH3022900, BRAWH3023156, BRAWH3023168, BRAWH3023172, BRAWH3023274, BRAWH3023421, BRAWH3024231, BRAWH3024242, BRAWH3024469, BRAWH3024506, BRAWH3024613, BRAWH3024989, BRAWH3026349, BRAWH3026394, BRAWH3026529, BRAWH3027420, BRAWH3027440, BRAWH3027533, BRAWH3027574, BRAWH3027607, BRAWH3027616, BRAWH3027675, BRAWH3027806, BRAWH3027880, BRAWH3027927, BRAWH3028202, BRAWH3028223, BRAWH3028306, BRAWH3028461, BRAWH3028645, BRAWH3028754, BRAWH3028796, BRAWH3029254, BRAWH3029313, BRAWH3029538, BRAWH3029556, BRAWH3029806, BRAWH3030613, BRAWH3030772, BRAWH3030810, BRAWH3030892, BRAWH3030910, BRAWH3030950, BRAWH3031054, BRAWH3031710, BRAWH3031902, BRAWH3032298, BRAWH3032340, BRAWH3032571, BRAWH3032620, BRAWH3032930, BRAWH3033117, BRAWH3033293, BRAWH3033448, BRAWH3033513, BRAWH3034097, BRAWH3034114, BRAWH3034134, BRAWH3034668, BRAWH3034743, BRAWH3034775, BRAWH3034890, BRAWH3035154, BRAWH3035403, BRAWH3035904, BRAWH3035914, BRAWH3035936, BRAWH3036077, BRAWH3036247, BRAWH3036270, BRAWH3036561, BRAWH3036738, BRAWH3036951, BRAWH3037265, BRAWH3037394, BRAWH3037533, BRAWH3037979, BRAWH3038055, BRAWH3038230, BRAWH3038252, BRAWH3038324, BRCAN1000065, BRCAN1000076, BRCAN1000105, BRCAN1000149, BRCAN1000168, BRCAN2000148, BRCAN2000149, BRCAN2000209, BRCAN2000239, BRCAN2000346, BRCAN2000364, BRCAN2000383, BRCAN2000418, BRCAN2000523, BRCAN2000541, BRCAN2000563, BRCAN2000577, BRCAN2000620, BRCAN2000639, BRCAN2000763, BRCAN2000832, BRCAN2001223, BRCAN2001866, BRCAN2002173, BRCAN2002416, BRCAN2002473, BRCAN2002562, BRCAN2002662, BRCAN2002826, BRCAN2002854, BRCAN2002856, BRCAN2002892, BRCAN2002944, BRCAN2002948, BRCAN2003070, BRCAN2003269, BRCAN2003389, BRCAN2003628, BRCAN2003703, BRCAN2003746, BRCAN2003814, BRCAN2003987, BRCAN2004173, BRCAN2004355, BRCAN2004371, BRCAN2004653, BRCAN2004699, BRCAN2005436, BRCAN2005449, BRCAN2006019, BRCAN2006051, BRCAN2006063, BRCAN2006117, BRCAN2006174, BRCAN2006290, BRCAN2006297, BRCAN2006323, BRCAN2006401, BRCAN2006411, BRCAN2006450, BRCAN2006955, BRCAN2007119, BRCAN2007144, BRCAN2007409, BRCAN2007426, BRCAN2007525, BRCAN2007700, BRCAN2008494, BRCAN2008528, BRCAN2008701, BRCAN2008894, BRCAN2009156, BRCAN2009168, BRCAN2009203, BRCAN2010374, BRCAN2010376, BRCAN2010547, BRCAN2010581, BRCAN2010665, BRCAN2011254, BRCAN2011316, BRCAN2011602, BRCAN2011946, BRCAN2012110, BRCAN2012355, BRCAN2012402, BRCAN2012408, BRCAN2012481, BRCAN2012613, BRCAN2012713, BRCAN2012929, BRCAN2013655, BRCAN2013660, BRCAN2014143, BRCAN2014229, BRCAN2014370, BRCAN2014602, BRCAN2014652, BRCAN2014788, BRCAN2014881, BRCAN2014952, BRCAN2015402, BRCAN2015464, BRCAN2015757, BRCAN2015886, BRCAN2016025, BRCAN2016046, BRCAN2016174, BRCAN2016433, BRCAN2016619, BRCAN2016762, BRCAN2016814, BRCAN2017442, BRCAN2017905, BRCAN2018240, BRCAN2018269, BRCAN2018490, BRCAN2018566, BRCAN2018667, BRCAN2018748, BRCAN2018935, BRCAN2019002, BRCAN2019387, BRCAN2019653, BRCAN2019773, BRCAN2019907, BRCAN2020234, BRCAN2020331, BRCAN2020412, BRCAN2020467, BRCAN2020880, BRCAN2021024, BRCAN2021028, BRCAN2021325, BRCAN2021452, BRCAN2021669, BRCAN2021718, BRCAN2022126, BRCAN2022191, BRCAN2022472, BRCAN2022474, BRCAN2023347, BRCAN2023724, BRCAN2024451, BRCAN2024563, BRCAN2025009, BRCAN2025093, BRCAN2025349, BRCAN2025368, BRCAN2025712, BRCAN2025982, BRCAN2026117, BRCAN2026340, BRCAN2026711, BRCAN2027150, BRCAN2027310, BRCAN2027334, BRCAN2027355, BRCAN2027364, BRCAN2027513, BRCAN2027593, BRCAN2027970, BRCAN2028021, BRCAN2028040, BRCAN2028319, BRCAN2028338, BRCAN2028355, BRCAN2028378, BRCAN2028460, BRCAN2028545, BRCAN2028634, BRCAN2028702, BRCOC1000087, BRCOC1000094, BRCOC2000004, BRCOC2000047, BRCOC2000152, BRCOC2000184, BRCOC2000186, BRCOC2000333, BRCOC2000360, BRCOC2000404, BRCOC2000637, BRCOC2000670, BRCOC2000816, BRCOC2000850, BRCOC2001355, BRCOC2002085, BRCOC2002155, BRCOC2002323, BRCOC2002659, BRCOC2002664, BRCOC2002686, BRCOC2002751, BRCOC2002756, BRCOC2002777, BRCOC2002835, BRCOC2003100, BRCOC2003213, BRCOC2003513, BRCOC2003732, BRCOC2003740, BRCOC2004036, BRCOC2004175, BRCOC2004354, BRCOC2004455, BRCOC2004950, BRCOC2005542, BRCOC2005903, BRCOC2005951, BRCOC2006164, BRCOC2006189, BRCOC2006243, BRCOC2006270, BRCOC2006639, BRCOC2006942, BRCOC2007034, BRCOC2007593, BRCOC2007733, BRCOC2007769, BRCOC2008064, BRCOC2008225, BRCOC2008642, BRCOC2008993, BRCOC2009052, BRCOC2009196, BRCOC2009380, BRCOC2009638, BRCOC2009937, BRCOC2010115, BRCOC2010510, BRCOC2010730, BRCOC2010980, BRCOC2010994, BRCOC2011010, BRCOC2011398, BRCOC2011418, BRCOC2011506, BRCOC2011769, BRCOC2011996, BRCOC2012172, BRCOC2012229, BRCOC2012386, BRCOC2012551, BRCOC2012813, BRCOC2013448, BRCOC2013573, BRCOC2013675, BRCOC2013780, BRCOC2014013, BRCOC2014033, BRCOC2014400, BRCOC2014748, BRCOC2014833, BRCOC2015597, BRCOC2015824, BRCOC2015908, BRCOC2015944, BRCOC2016525, BRCOC2016661, BRCOC2017061, BRCOC2017652, BRCOC2017856, BRCOC2018775, BRCOC2018877, BRCOC2019255, BRCOC2019549, BRCOC2019841, BRCOC2019896, BRCOC2019910, BRCOC2019934, BRCOC2020122, BRCOC2020142, BRHIP1000058, BRHIP1000072, BRHIP1000104, BRHIP1000108, BRHIP1000129, BRHIP1000174, BRHIP1000258, BRHIP2000021, BRHIP2000079, BRHIP2000087, BRHIP2000163, BRHIP2000210, BRHIP2000239, BRHIP2000245, BRHIP2000312, BRHIP2000359, BRHIP2000445, BRHIP2000506, BRHIP2000532, BRHIP2000621, BRHIP2000691, BRHIP2000819, BRHIP2000826, BRHIP2000920, BRHIP2001074, BRHIP2001099, BRHIP2001686, BRHIP2001782, BRHIP2001802, BRHIP2001805, BRHIP2001886, BRHIP2001927, BRHIP2002122, BRHIP2002143, BRHIP2002172, BRHIP2002346, BRHIP2002510, BRHIP2002664, BRHIP2002722, BRHIP2002929, BRHIP2003048, BRHIP2003062, BRHIP2003242, BRHIP2003272, BRHIP2003748, BRHIP2003786, BRHIP2003828, BRHIP2003917, BRHIP2004312, BRHIP2004355, BRHIP2004359, BRHIP2004883, BRHIP2004902, BRHIP2005010, BRHIP2005236, BRHIP2005271, BRHIP2005354, BRHIP2005600, BRHIP2005719, BRHIP2005724, BRHIP2005752, BRHIP2005932, BRHIP2006617, BRHIP2006782, BRHIP2006800, BRHIP2006819, BRHIP2006921, BRHIP2007307, BRHIP2007616, BRHIP2007690, BRHIP2007741, BRHIP2007928, BRHIP2007969, BRHIP2008269, BRHIP2008389, BRHIP2008607, BRHIP2008756, BRHIP2008909, BRHIP2009019, BRHIP2009177, BRHIP2009340, BRHIP2009351, BRHIP2009414, BRHIP2009474, BRHIP2009617, BRHIP2009685, BRHIP2010217, BRHIP2010309, BRHIP2010444, BRHIP2010487, BRHIP2010571, BRHIP2010593, BRHIP2010610, BRHIP2010723, BRHIP2010744, BRHIP2011080, BRHIP2011120, BRHIP2011199, BRHIP2011491, BRHIP2011508, BRHIP2011576, BRHIP2011616, BRHIP2011783, BRHIP2011838, BRHIP2011891, BRHIP2011933, BRHIP2012054, BRHIP2012059, BRHIP2012141, BRHIP2012314, BRHIP2012360, BRHIP2012545, BRHIP2012580, BRHIP2012627, BRHIP2012642, BRHIP2012750, BRHIP2012922, BRHIP2012923, BRHIP2012972, BRHIP2013286, BRHIP2013447, BRHIP2013510, BRHIP2013699, BRHIP2013723, BRHIP2013958, BRHIP2013972, BRHIP2014063, BRHIP2014228, BRHIP2014285, BRHIP2014291, BRHIP2014373, BRHIP2014386, BRHIP2014387, BRHIP2014954, BRHIP2015153, BRHIP2015224, BRHIP2015245, BRHIP2015356, BRHIP2015360, BRHIP2015679, BRHIP2016005, BRHIP2016125, BRHIP2016788, BRHIP2016968, BRHIP2016990, BRHIP2017010, BRHIP2017315, BRHIP2017385, BRHIP2017404, BRHIP2017542, BRHIP2017553, BRHIP2017642, BRHIP2017714, BRHIP2017780, BRHIP2018014, BRHIP2018369, BRHIP2018612, BRHIP2018635, BRHIP2018650, BRHIP2018712, BRHIP2018719, BRHIP2018805, BRHIP2018998, BRHIP2019007, BRHIP2019047, BRHIP2019149, BRHIP2019177, BRHIP2019186, BRHIP2019291, BRHIP2019494, BRHIP2019589, BRHIP2019641, BRHIP2019819, BRHIP2019884, BRHIP2019972, BRHIP2020182, BRHIP2020509, BRHIP2020573, BRHIP2020622, BRHIP2020695, BRHIP2020743, BRHIP2020799, BRHIP2020842, BRHIP2020859, BRHIP2020930, BRHIP2021102, BRHIP2021289, BRHIP2021495, BRHIP2021615, BRHIP2021744, BRHIP2021762, BRHIP2021858, BRHIP2021870, BRHIP2021929, BRHIP2022006, BRHIP2022054, BRHIP2022221, BRHIP2022228, BRHIP2022298, BRHIP2022467, BRHIP2022708, BRHIP2022986, BRHIP2023071, BRHIP2023229, BRHIP2023272, BRHIP2023292, BRHIP2023309, BRHIP2023369, BRHIP2023438, BRHIP2023695, BRHIP2023735, BRHIP2023762, BRHIP2023773, BRHIP2023860, BRHIP2023869, BRHIP2024046, BRHIP2024165, BRHIP2024201, BRHIP2024347, BRHIP2024398, BRHIP2024549, BRHIP2024789, BRHIP2024911, BRHIP2024941, BRHIP2025245, BRHIP2025366, BRHIP2025448, BRHIP2025679, BRHIP2025739, BRHIP2025797, BRHIP2026021, BRHIP2026061, BRHIP2026155, BRHIP2026214, BRHIP2026288, BRHIP2026346, BRHIP2026557, BRHIP2026723, BRHIP2026877, BRHIP2027017, BRHIP2027054, BRHIP2027563, BRHIP2027685, BRHIP2027762, BRHIP2028187, BRHIP2028303, BRHIP2028330, BRHIP2028480, BRHIP2028583, BRHIP2028593, BRHIP2029176, BRHIP2029283, BRHIP2029393, BRHIP2029529, BRHIP2029643, BRHIP2029663, BRHIP3000060, BRHIP3000070, BRHIP3000081, BRHIP3000111, BRHIP3000131, BRHIP3000240, BRHIP3000377, BRHIP3000457, BRHIP3000475, BRHIP3000488, BRHIP3000526, BRHIP3000626, BRHIP3000859, BRHIP3000907, BRHIP3001076, BRHIP3001079, BRHIP3001141, BRHIP3001283, BRHIP3001338, BRHIP3001360, BRHIP3001481, BRHIP3001878, BRHIP3001964, BRHIP3002114, BRHIP3002124, BRHIP3002141, BRHIP3002363, BRHIP3002691, BRHIP3002920, BRHIP3002931, BRHIP3003063, BRHIP3003126, BRHIP3003306, BRHIP3003340, BRHIP3003395, BRHIP3003484, BRHIP3003644, BRHIP3003688, BRHIP3003795, BRHIP3003961, BRHIP3003984, BRHIP3004193, BRHIP3004215, BRHIP3004416, BRHIP3004710, BRHIP3004725, BRHIP3004774, BRHIP3004786, BRHIP3004863, BRHIP3004968, BRHIP3005037, BRHIP3005137, BRHIP3005142, BRHIP3005231, BRHIP3005307, BRHIP3005574, BRHIP3005673, BRHIP3005768, BRHIP3005801, BRHIP3005944, BRHIP3006279, BRHIP3006294, BRHIP3006390, BRHIP3006449, BRHIP3006683, BRHIP3006717, BRHIP3006786, BRHIP3006950, BRHIP3007172, BRHIP3007183, BRHIP3007195, BRHIP3007239, BRHIP3007291, BRHIP3007409, BRHIP3007424, BRHIP3007483, BRHIP3007586, BRHIP3007609, BRHIP3007640, BRHIP3007960, BRHIP3008082, BRHIP3008183, BRHIP3008314, BRHIP3008320, BRHIP3008344, BRHIP3008405, BRHIP3008565, BRHIP3008598, BRHIP3008606, BRHIP3008691, BRHIP3008714, BRHIP3008997, BRHIP3009099, BRHIP3009140, BRHIP3009181, BRHIP3009318, BRHIP3009427, BRHIP3009448, BRHIP3009672, BRHIP3009753, BRHIP3010135, BRHIP3010289, BRHIP3010529, BRHIP3011082, BRHIP3011241, BRHIP3011269, BRHIP3011460, BRHIP3011567, BRHIP3011831, BRHIP3012185, BRHIP3012289, BRHIP3012357, BRHIP3012736, BRHIP3012745, BRHIP3012868, BRHIP3013078, BRHIP3013271, BRHIP3013588, BRHIP3013698, BRHIP3013765, BRHIP3013897, BRHIP3014237, BRHIP3014675, BRHIP3015620, BRHIP3015751, BRHIP3015854, BRHIP3016032, BRHIP3016213, BRHIP3016302, BRHIP3016421, BRHIP3017109, BRHIP3017146, BRHIP3017256, BRHIP3017325, BRHIP3017558, BRHIP3017637, BRHIP3017855, BRHIP3018278, BRHIP3018784, BRHIP3019643, BRHIP3019824, BRHIP3019880, BRHIP3019956, BRHIP3020155, BRHIP3020182, BRHIP3020733, BRHIP3021019, BRHIP3021499, BRHIP3021534, BRHIP3021778, BRHIP3021987, BRHIP3022656, BRHIP3023922, BRHIP3024118, BRHIP3024533, BRHIP3024703, BRHIP3024725, BRHIP3024820, BRHIP3025161, BRHIP3025702, BRHIP3025795, BRHIP3025844, BRHIP3026052, BRHIP3026097, BRHIP3026231, BRHIP3026335, BRHIP3026651, BRHIP3027105, BRHIP3027137, BRHIP3027160, BRHIP3027191, BRHIP3027501, BRHIP3027594, BRHIP3027651, BRHIP3027854, BRHIP3027947, BRHIP3028570, BRHIP3028742, BRSSN1000056, BRSSN1000059, BRSSN1000092, BRSSN1000153, BRSSN2000097, BRSSN2000175, BRSSN2000197, BRSSN2000244, BRSSN2000293, BRSSN2000295, BRSSN2000312, BRSSN2000518, BRSSN2000561, BRSSN2000566, BRSSN2000684, BRSSN2000715, BRSSN2000832, BRSSN2001213, BRSSN2001275, BRSSN2001342, BRSSN2001426, BRSSN2001503, BRSSN2001579, BRSSN2001758, BRSSN2001810, BRSSN2001869, BRSSN2002857, BRSSN2002859, BRSSN2003012, BRSSN2003086, BRSSN2003093, BRSSN2003820, BRSSN2003841, BRSSN2003937, BRSSN2004142, BRSSN2004303, BRSSN2004304, BRSSN2004496, BRSSN2004657, BRSSN2004679, BRSSN2004686, BRSSN2004710, BRSSN2004719, BRSSN2005847, BRSSN2006133, BRSSN2006390, BRSSN2006575, BRSSN2006611, BRSSN2006644, BRSSN2006892, BRSSN2007076, BRSSN2007168, BRSSN2007202, BRSSN2007338, BRSSN2007464, BRSSN2007504, BRSSN2007819, BRSSN2008125, BRSSN2008419, BRSSN2008464, BRSSN2008549, BRSSN2008797, BRSSN2009119, BRSSN2009378, BRSSN2009389, BRSSN2009395, BRSSN2009627, BRSSN2009630, BRSSN2009702, BRSSN2010019, BRSSN2010110, BRSSN2010587, BRSSN2010596, BRSSN2010830, BRSSN2011262, BRSSN2011653, BRSSN2011738, BRSSN2011843, BRSSN2012081, BRSSN2012103, BRSSN2012157, BRSSN2012198, BRSSN2012254, BRSSN2012439, BRSSN2012622, BRSSN2012691, BRSSN2012838, BRSSN2013095, BRSSN2013544, BRSSN2013702, BRSSN2013733, BRSSN2013753, BRSSN2013874, BRSSN2014112, BRSSN2014294, BRSSN2014299, BRSSN2014424, BRSSN2014513, BRSSN2014556, BRSSN2014573, BRSSN2014636, BRSSN2014685, BRSSN2015199, BRSSN2015238, BRSSN2015369, BRSSN2015493, BRSSN2015497, BRSSN2015554, BRSSN2015707, BRSSN2015773, BRSSN2015907, BRSSN2015982, BRSSN2016589, BRSSN2016768, BRSSN2016905, BRSSN2017297, BRSSN2017422, BRSSN2017530, BRSSN2017682, BRSSN2017757, BRSSN2018218, BRSSN2018440, BRSSN2018447, BRSSN2018581, BRSSN2018731, BRSSN2018771, BRSSN2018925, BRSTN1000097, BRSTN2000058, BRSTN2000070, BRSTN2000220, BRSTN2000312, BRSTN2000367, BRSTN2000536, BRSTN2000872, BRSTN2001067, BRSTN2001613, BRSTN2001801, BRSTN2002105, BRSTN2002400, BRSTN2002532, BRSTN2002691, BRSTN2003590, BRSTN2003835, BRSTN2004863, BRSTN2004869, BRSTN2004987, BRSTN2005721, BRSTN2006306, BRSTN2006466, BRSTN2006580, BRSTN2006583, BRSTN2006638, BRSTN2006865, BRSTN2007000, BRSTN2007118, BRSTN2007284, BRSTN2007765, BRSTN2008052, BRSTN2008283, BRSTN2008367, BRSTN2008418, BRSTN2008457, BRSTN2008475, BRSTN2008930, BRSTN2009247, BRSTN2010089, BRSTN2010107, BRSTN2010363, BRSTN2010416, BRSTN2010500, BRSTN2010569, BRSTN2010750, BRSTN2010923, BRSTN2011211, BRSTN2011597, BRSTN2011688, BRSTN2011799, BRSTN2012089, BRSTN2012284, BRSTN2012320, BRSTN2012380, BRSTN2012451, BRSTN2013171, BRSTN2013354, BRSTN2013931, BRSTN2014490, BRSTN2014633, BRSTN2014751, BRSTN2014770, BRSTN2015015, BRSTN2015889, BRSTN2015978, BRSTN2016066, BRSTN2016335, BRSTN2016678, BRSTN2016892, BRSTN2016918, BRSTN2016992, BRSTN2017104, BRSTN2017151, BRSTN2017237, BRSTN2017379, BRSTN2017761, BRSTN2017771, BRSTN2017995, BRSTN2018077, BRSTN2018083, BRSTN2018596, BRSTN2018692, BRSTN2018712, BRSTN2019079, BRSTN2019129, BRTHA1000021, BRTHA1000063, BRTHA1000311, BRTHA2000057, BRTHA2000474, BRTHA2000514, BRTHA2000574, BRTHA2000855, BRTHA2000969, BRTHA2000972, BRTHA2001304, BRTHA2001370, BRTHA2001462, BRTHA2001717, BRTHA2001812, BRTHA2002091, BRTHA2002115, BRTHA2002133, BRTHA2002281, BRTHA2002376, BRTHA2002442, BRTHA2002493, BRTHA2002565, BRTHA2002608, BRTHA2002702, BRTHA2002721, BRTHA2002726, BRTHA2002741, BRTHA2002808, BRTHA2002896, BRTHA2002903, BRTHA2003030, BRTHA2003110, BRTHA2003116, BRTHA2003436, BRTHA2003759, BRTHA2003794, BRTHA2004361, BRTHA2004371, BRTHA2004582, BRTHA2004629, BRTHA2004639, BRTHA2004642, BRTHA2004812, BRTHA2004821, BRTHA2004978, BRTHA2004992, BRTHA2005005, BRTHA2005013, BRTHA2005448, BRTHA2005579, BRTHA2005831, BRTHA2005864, BRTHA2005942, BRTHA2005956, BRTHA2006075, BRTHA2006146, BRTHA2006194, BRTHA2006232, BRTHA2006720, BRTHA2006735, BRTHA2006974, BRTHA2007060, BRTHA2007122, BRTHA2007422, BRTHA2007603, BRTHA2007665, BRTHA2008316, BRTHA2008335, BRTHA2008502, BRTHA2008513, BRTHA2008527, BRTHA2008535, BRTHA2008598, BRTHA2008669, BRTHA2008955, BRTHA2009311, BRTHA2009349, BRTHA2009486, BRTHA2009803, BRTHA2009846, BRTHA2009886, BRTHA2009972, BRTHA2010008, BRTHA2010033, BRTHA2010073, BRTHA2010097, BRTHA2010191, BRTHA2010397, BRTHA2010608, BRTHA2010672, BRTHA2010884, BRTHA2010907, BRTHA2011062, BRTHA2011194, BRTHA2011321, BRTHA2011351, BRTHA2011500, BRTHA2011641, BRTHA2011691, BRTHA2012129, BRTHA2012183, BRTHA2012189, BRTHA2012351, BRTHA2012392, BRTHA2012466, BRTHA2012555, BRTHA2012562, BRTHA2012714, BRTHA2012980, BRTHA2013054, BRTHA2013262, BRTHA2013275, BRTHA2013426, BRTHA2013460, BRTHA2013515, BRTHA2013540, BRTHA2013595, BRTHA2013610, BRTHA2013707, BRTHA2013942, BRTHA2014287, BRTHA2014334, BRTHA2014381, BRTHA2014578, BRTHA2014647, BRTHA2014663, BRTHA2014792, BRTHA2014828, BRTHA2014909, BRTHA2014975, BRTHA2014997, BRTHA2015406, BRTHA2015478, BRTHA2015696, BRTHA2015700, BRTHA2015853, BRTHA2015878, BRTHA2016179, BRTHA2016215, BRTHA2016267, BRTHA2016318, BRTHA2016496, BRTHA2016543, BRTHA2016552, BRTHA2016765, BRTHA2016918, BRTHA2017178, BRTHA2017353, BRTHA2017364, BRTHA2017972, BRTHA2017985, BRTHA2018011, BRTHA2018129, BRTHA2018165, BRTHA2018304, BRTHA2018344, BRTHA2018420, BRTHA2018443, BRTHA2018504, BRTHA2018558, BRTHA2018591, BRTHA2018624, BRTHA2018706, BRTHA2018707, BRTHA2019014, BRTHA2019022, BRTHA2019048, BRTHA2019073, BRTHA2019726, BRTHA2019743, BRTHA2020400, BRTHA2020566, BRTHA2020642, BRTHA2020695, BRTHA2020721, BRTHA2020781, BRTHA2020811, BRTHA2020910, BRTHA2021212, BRTHA2021440, BRTHA2021450, BRTHA2022074, BRTHA2022914, BRTHA2022968, BRTHA2023402, BRTHA2023437, BRTHA2024177, BRTHA2024354, BRTHA2024712, BRTHA2025869, BRTHA2026071, BRTHA2026290, BRTHA2026311, BRTHA2027227, BRTHA2027250, BRTHA2027546, BRTHA2028297, BRTHA2029969, BRTHA2030036, BRTHA2030213, BRTHA2031517, BRTHA2031800, BRTHA2031917, BRTHA2032763, BRTHA2032845, BRTHA2033122, BRTHA2033264, BRTHA2033320, BRTHA2033469, BRTHA2033683, BRTHA2034281, BRTHA2034576, BRTHA2034874, BRTHA2035448, BRTHA2035743, BRTHA2036055, BRTHA2036295, BRTHA2036660, BRTHA2037247, BRTHA2038279, BRTHA2038345, BRTHA2038353, BRTHA2038396, BRTHA3000252, BRTHA3000273, BRTHA3000296, BRTHA3000297, BRTHA3000325, BRTHA3000456, BRTHA3000633, BRTHA3000789, BRTHA3001221, BRTHA3001623, BRTHA3002265, BRTHA3002401, BRTHA3002411, BRTHA3002427, BRTHA3002864, BRTHA3002933, BRTHA3002955, BRTHA3003000, BRTHA3003023, BRTHA3003074, BRTHA3003225, BRTHA3003339, BRTHA3003343, BRTHA3003417, BRTHA3003449, BRTHA3003474, BRTHA3003490, BRTHA3003704, BRTHA3003736, BRTHA3004307, BRTHA3004432, BRTHA3004475, BRTHA3004502, BRTHA3004610, BRTHA3005046, BRTHA3005735, BRTHA3005988, BRTHA3006318, BRTHA3006593, BRTHA3006856, BRTHA3007113, BRTHA3007130, BRTHA3007148, BRTHA3007319, BRTHA3007469, BRTHA3007472, BRTHA3007532, BRTHA3007662, BRTHA3007685, BRTHA3007769, BRTHA3007922, BRTHA3008143, BRTHA3008293, BRTHA3008310, BRTHA3008386, BRTHA3008520, BRTHA3008608, BRTHA3008694, BRTHA3008778, BRTHA3008826, BRTHA3009037, BRTHA3009090, BRTHA3009291, BRTHA3009858, BRTHA3010135, BRTHA3010366, BRTHA3010469, BRTHA3010530, BRTHA3010540, BRTHA3010717, BRTHA3011149, BRTHA3011187, BRTHA3011229, BRTHA3011265, BRTHA3011361, BRTHA3011510, BRTHA3011892, BRTHA3012265, BRTHA3013860, BRTHA3013882, BRTHA3013884, BRTHA3013981, BRTHA3014000, BRTHA3014105, BRTHA3014507, BRTHA3014547, BRTHA3014691, BRTHA3014835, BRTHA3014854, BRTHA3014908, BRTHA3014920, BRTHA3015815, BRTHA3016616, BRTHA3016835, BRTHA3016845, BRTHA3016917, BRTHA3017047, BRTHA3017589, BRTHA3017848, BRTHA3018409, BRTHA3018514, BRTHA3018617, BRTHA3018623, BRTHA3018656, BRTHA3019048, BRTHA3019105, BRTHA3019183, BRTHA3020000, BRTHA3020369, BRTHA3021569, BRTHA3021708, BRTHA3021786, BRTHA3021971, BRTHA3023403, BRTHA3023523, BRTHA3023590, BRTHA3023929, BRTHA3024233, BRTHA3024600, BRTHA3025073, BRTHA3025789, BRTHA3025826, BRTHA3026161, BRTHA3026180, BRTHA3026507, BRTHA3026556, BRTHA3026916, BRTHA3027171, BRTHA3027318, BRTHA3027638, BRTHA3027820, BRTHA3027879, BRTHA3027957, BRTHA3028339, BRTHA3028505, BRTHA3028782, D30ST1000066, D30ST1000109, D30ST1000238, D30ST1000267, D30ST1000270, D30ST2000184, D30ST2000618, D30ST2000654, D30ST2000734, D30ST2001328, D30ST2001669, D30ST2001670, D30ST2001788, D30ST2002182, D30ST2002223, D30ST2002262, D30ST2002272, D30ST2002417, D30ST2002436, D30ST2002648, D30ST2003024, D30ST2003331, D30ST2003607, D30ST2003797, D30ST2004637, D30ST3000195, D30ST3000258, D30ST3000291, D30ST3000388, D30ST3000493, D60ST2000127, D60ST2000169, D60ST2000245, D60ST2000358, D60ST2000464, D60ST2000507, D90ST2000031, D90ST2000278, D90ST2000440, D90ST2000869, D90ST2001319, D90ST2001433, D90ST2002608, D90ST2002673, D90ST2003106, D90ST2003108, D90ST2003137, D90ST2003397, D90ST2003580, D90ST2003594, D90ST2003762, D90ST2003791, D90ST2003989, D90ST2004018, D90ST2004073, D90ST2004417, DFNES1000003, DFNES1000083, DFNES1000107, DFNES2000143, DFNES2000146, DFNES2000153, DFNES2000212, DFNES2000268, DFNES2000292, DFNES2000426, DFNES2000432, DFNES2000443, DFNES2000457, DFNES2000471, DFNES2000526, DFNES2000913, DFNES2001091, DFNES2001096, DFNES2001108, DFNES2001177, DFNES2001404, DFNES2001564, DFNES2001565, DFNES2001647, DFNES2001800, DFNES2001829, DFNES2002220, DFNES2002509, DFNES2002550, DFNES2002588, DFNES2002817, DFNES2002966, DFNES2003081, DFNES2003192, DFNES2003255, DFNES2003742, DFNES2004346, DFNES2004354, DFNES2004383, DFNES2004608, DFNES2004684, DFNES2005266, DFNES2005527, DFNES2005540, DFNES2005779, DFNES2005875, DFNES2006346, DFNES2006944, DFNES2007113, DFNES2007332, DFNES2007641, DFNES2008088, DFNES2008160, DFNES2008280, DFNES2008881, DFNES2009482, DFNES2010502, DFNES2011192, DFNES2011221, DFNES2011239, DFNES2011245, DFNES2011380, DFNES2011499, ERLTF1000021, ERLTF2000324, ERLTF2000465, FCBBF1000025, FCBBF1000038, FCBBF1000063, FCBBF1000069, FCBBF1000077, FCBBF1000115, FCBBF1000117, FCBBF1000118, FCBBF1000121, FCBBF1000125, FCBBF1000131, FCBBF1000139, FCBBF1000155, FCBBF1000157, FCBBF1000171, FCBBF1000174, FCBBF1000182, FCBBF1000198, FCBBF1000206, FCBBF1000220, FCBBF1000232, FCBBF1000233, FCBBF1000243, FCBBF1000270, FCBBF1000272, FCBBF1000280, FCBBF1000297, FCBBF1000305, FCBBF1000314, FCBBF1000322, FCBBF1000349, FCBBF1000367, FCBBF1000374, FCBBF1000376, FCBBF1000377, FCBBF1000395, FCBBF1000397, FCBBF1000403, FCBBF1000412, FCBBF1000425, FCBBF1000437, FCBBF1000449, FCBBF1000476, FCBBF1000506, FCBBF1000509, FCBBF1000546, FCBBF1000550, FCBBF1000556, FCBBF1000563, FCBBF1000581, FCBBF1000582, FCBBF1000598, FCBBF1000604, FCBBF1000618, FCBBF1000627, FCBBF1000671, FCBBF1000675, FCBBF1000684, FCBBF1000686, FCBBF1000687, FCBBF1000691, FCBBF1000732, FCBBF1000748, FCBBF1000760, FCBBF2000038, FCBBF2000087, FCBBF2000094, FCBBF2000105, FCBBF2000123, FCBBF2000195, FCBBF2000199, FCBBF2000214, FCBBF2000232, FCBBF2000276, FCBBF2000291, FCBBF2000362, FCBBF2000379, FCBBF2000473, FCBBF2000502, FCBBF2000566, FCBBF2000576, FCBBF2000591, FCBBF2000677, FCBBF2000678, FCBBF2000685, FCBBF2000733, FCBBF2000782, FCBBF2000808, FCBBF2000815, FCBBF2000825, FCBBF2000940, FCBBF2000951, FCBBF2001001, FCBBF2001088, FCBBF2001105, FCBBF2001116, FCBBF2001183, FCBBF2001188, FCBBF2001211, FCBBF2001238, FCBBF2001243, FCBBF2001291, FCBBF2001299, FCBBF2001309, FCBBF2001400, FCBBF2001427, FCBBF2001480, FCBBF2001529, FCBBF2001538, FCBBF2001594, FCBBF2001672, FCBBF2001675, FCBBF2001718, FCBBF2001720, FCBBF2001817, FCBBF2001868, FCBBF2002044, FCBBF2002111, FCBBF2002281, FCBBF2002349, FCBBF2002370, FCBBF2002541, FCBBF2002626, FCBBF2002801, FCBBF2002897, FCBBF2002898, FCBBF2002904, FCBBF2002928, FCBBF2002953, FCBBF2003083, FCBBF2003102, FCBBF2003269, FCBBF2003293, FCBBF2003297, FCBBF2003395, FCBBF2003528, FCBBF2003543, FCBBF2003549, FCBBF2003567, FCBBF2003636, FCBBF2003823, FCBBF2003895, FCBBF2004066, FCBBF2004090, FCBBF2004138, FCBBF2004217, FCBBF2004256, FCBBF2004373, FCBBF2004448, FCBBF2004671, FCBBF2004707, FCBBF2004788, FCBBF2005069, FCBBF2005122, FCBBF2005428, FCBBF2005439, FCBBF2005538, FCBBF2005637, FCBBF2005645, FCBBF2005658, FCBBF2005733, FCBBF2005909, FCBBF2005966, FCBBF2006131, FCBBF2006380, FCBBF2006418, FCBBF2006452, FCBBF2006634, FCBBF2006781, FCBBF2007012, FCBBF2007186, FCBBF2007265, FCBBF2007302, FCBBF2007556, FCBBF2007610, FCBBF2007633, FCBBF2007840, FCBBF3000102, FCBBF3000115, FCBBF3000120, FCBBF3000168, FCBBF3000175, FCBBF3000227, FCBBF3000228, FCBBF3000229, FCBBF3000233, FCBBF3000269, FCBBF3000361, FCBBF3000367, FCBBF3000388, FCBBF3000434, FCBBF3000462, FCBBF3000473, FCBBF3000501, FCBBF3000518, FCBBF3000536, FCBBF3000550, FCBBF3000847, FCBBF3001018, FCBBF3001020, FCBBF3001081, FCBBF3001235, FCBBF3001281, FCBBF3001302, FCBBF3001377, FCBBF3001594, FCBBF3001632, FCBBF3001657, FCBBF3001855, FCBBF3001890, FCBBF3001912, FCBBF3001914, FCBBF3001918, FCBBF3001924, FCBBF3001977, FCBBF3002163, FCBBF3002188, FCBBF3002190, FCBBF3002268, FCBBF3002475, FCBBF3002556, FCBBF3002592, FCBBF3002658, FCBBF3002782, FCBBF3002818, FCBBF3002925, FCBBF3003216, FCBBF3003305, FCBBF3003373, FCBBF3003435, FCBBF3003475, FCBBF3003481, FCBBF3003557, FCBBF3003787, FCBBF3003902, FCBBF3004021, FCBBF3004041, FCBBF3004323, FCBBF3004390, FCBBF3004409, FCBBF3004502, FCBBF3004715, FCBBF3004842, FCBBF3004847, FCBBF3004955, FCBBF3005160, FCBBF3005218, FCBBF3005330, FCBBF3005444, FCBBF3005698, FCBBF3005729, FCBBF3006171, FCBBF3006249, FCBBF3006288, FCBBF3006399, FCBBF3006628, FCBBF3006821, FCBBF3007077, FCBBF3007150, FCBBF3007152, FCBBF3007242, FCBBF3007244, FCBBF3007248, FCBBF3007453, FCBBF3007462, FCBBF3007540, FCBBF3007597, FCBBF3007604, FCBBF3007631, FCBBF3007829, FCBBF3007855, FCBBF3007859, FCBBF3007860, FCBBF3008073, FCBBF3008100, FCBBF3008153, FCBBF3008159, FCBBF3008251, FCBBF3008311, FCBBF3008362, FCBBF3008382, FCBBF3008475, FCBBF3008556, FCBBF3008644, FCBBF3008689, FCBBF3008748, FCBBF3008870, FCBBF3008938, FCBBF3008944, FCBBF3009069, FCBBF3009101, FCBBF3009152, FCBBF3009256, FCBBF3009317, FCBBF3009428, FCBBF3009464, FCBBF3009479, FCBBF3009526, FCBBF3009541, FCBBF3009703, FCBBF3009717, FCBBF3009888, FCBBF3009949, FCBBF3009978, FCBBF3010008, FCBBF3010012, FCBBF3010124, FCBBF3010130, FCBBF3010142, FCBBF3010149, FCBBF3010211, FCBBF3010361, FCBBF3010508, FCBBF3010544, FCBBF3010586, FCBBF3010601, FCBBF3010665, FCBBF3010695, FCBBF3010729, FCBBF3010733, FCBBF3011003, FCBBF3011418, FCBBF3011485, FCBBF3011523, FCBBF3011570, FCBBF3011592, FCBBF3011867, FCBBF3011889, FCBBF3012170, FCBBF3012182, FCBBF3012288, FCBBF3012332, FCBBF3012443, FCBBF3012588, FCBBF3012667, FCBBF3012842, FCBBF3012901, FCBBF3013041, FCBBF3013058, FCBBF3013205, FCBBF3013266, FCBBF3013307, FCBBF3013341, FCBBF3013506, FCBBF3013589, FCBBF3013623, FCBBF3013800, FCBBF3013846, FCBBF3014229, FCBBF3014260, FCBBF3014355, FCBBF3014567, FCBBF3014770, FCBBF3015100, FCBBF3015119, FCBBF3015131, FCBBF3015317, FCBBF3015727, FCBBF3015758, FCBBF3015809, FCBBF3015870, FCBBF3016018, FCBBF3016178, FCBBF3016451, FCBBF3016618, FCBBF3016622, FCBBF3016644, FCBBF3016667, FCBBF3016928, FCBBF3016987, FCBBF3017059, FCBBF3017071, FCBBF3017123, FCBBF3017233, FCBBF3017255, FCBBF3017288, FCBBF3017396, FCBBF3017531, FCBBF3017535, FCBBF3017681, FCBBF3017729, FCBBF3017873, FCBBF3017918, FCBBF3017974, FCBBF3018067, FCBBF3018173, FCBBF3018453, FCBBF3018591, FCBBF3018753, FCBBF3018796, FCBBF3018826, FCBBF3018949, FCBBF3019085, FCBBF3019320, FCBBF3019437, FCBBF3019455, FCBBF3019564, FCBBF3019569, FCBBF3019570, FCBBF3019663, FCBBF3019714, FCBBF3019716, FCBBF3019784, FCBBF3019839, FCBBF3019867, FCBBF3019961, FCBBF3020030, FCBBF3020138, FCBBF3020140, FCBBF3020163, FCBBF3020232, FCBBF3020599, FCBBF3021026, FCBBF3021191, FCBBF3021221, FCBBF3021501, FCBBF3021506, FCBBF3021524, FCBBF3021807, FCBBF3021940, FCBBF3021985, FCBBF3022005, FCBBF3022291, FCBBF3022311, FCBBF3022504, FCBBF3022566, FCBBF3022593, FCBBF3022765, FCBBF3022767, FCBBF3022894, FCBBF3023061, FCBBF3023078, FCBBF3023372, FCBBF3023443, FCBBF3023599, FCBBF3023704, FCBBF3023887, FCBBF3023895, FCBBF3024002, FCBBF3024096, FCBBF3024225, FCBBF3024266, FCBBF3024364, FCBBF3024623, FCBBF3024793, FCBBF3024911, FCBBF3025098, FCBBF3025252, FCBBF3025280, FCBBF3025285, FCBBF3025417, FCBBF3025528, FCBBF3025568, FCBBF3025650, FCBBF3025674, FCBBF3025730, FCBBF3025737, FCBBF3025905, FCBBF3026021, FCBBF3026048, FCBBF3026251, FCBBF3026308, FCBBF3026651, FCBBF3026678, FCBBF3026692, FCBBF3027104, FCBBF3027199, FCBBF3027328, FCBBF3027559, FCBBF3027717, FCBBF3027755, FCBBF3027768, FCBBF3027854, FCBBF3027863, FCBBF3027903, FCBBF3028102, FCBBF3028143, FCBBF3028188, FCBBF3028202, FCBBF3028472, FCBBF3028528, FCBBF3028582, FCBBF3028593, FCBBF3028671, FCBBF3028794, FCBBF4000017, FCBBF4000061, FCBBF4000076, FCBBF4000142, FCBBF4000173, FCBBF4000192, FCBBF4000193, FCBBF4000268, FCBBF4000282, FCBBF4000399, FCBBF4000415, FCBBF4000529, FCBBF4000548, FCBBF5000041, FCBBF5000061, FCBBF5000165, FCBBF5000261, FCBBF5000325, FCBBF5000353, FCBBF5000384, FCBBF5000483, FCBBF5000495, FEBRA1000005, FEBRA1000008, FEBRA1000022, FEBRA1000030, FEBRA1000057, FEBRA1000088, FEBRA1000138, FEBRA1000148, FEBRA1000149, FEBRA1000183, FEBRA1000188, FEBRA1000189, FEBRA1000190, FEBRA2000007, FEBRA2000021, FEBRA2000035, FEBRA2000053, FEBRA2000126, FEBRA2000129, FEBRA2000220, FEBRA2000253, FEBRA2000282, FEBRA2000286, FEBRA2000297, FEBRA2000311, FEBRA2000321, FEBRA2000333, FEBRA2000378, FEBRA2000391, FEBRA2000394, FEBRA2000397, FEBRA2000399, FEBRA2000402, FEBRA2000404, FEBRA2000409, FEBRA2000415, FEBRA2000436, FEBRA2000438, FEBRA2000452, FEBRA2000454, FEBRA2000462, FEBRA2000468, FEBRA2000491, FEBRA2000504, FEBRA2000532, FEBRA2000536, FEBRA2000538, FEBRA2000575, FEBRA2000581, FEBRA2000656, FEBRA2000659, FEBRA2000680, FEBRA2000690, FEBRA2000727, FEBRA2000734, FEBRA2000757, FEBRA2000762, FEBRA2000771, FEBRA2000772, FEBRA2000782, FEBRA2000787, FEBRA2000790, FEBRA2000793, FEBRA2000803, FEBRA2000805, FEBRA2000809, FEBRA2000815, FEBRA2000856, FEBRA2000862, FEBRA2000877, FEBRA2000880, FEBRA2000881, FEBRA2000901, FEBRA2000909, FEBRA2000917, FEBRA2000928, FEBRA2000936, FEBRA2000937, FEBRA2000959, FEBRA2000972, FEBRA2001004, FEBRA2001012, FEBRA2001020, FEBRA2001093, FEBRA2001124, FEBRA2001133, FEBRA2001146, FEBRA2001161, FEBRA2001175, FEBRA2001197, FEBRA2001217, FEBRA2001227, FEBRA2001245, FEBRA2001267, FEBRA2001334, FEBRA2001351, FEBRA2001383, FEBRA2001438, FEBRA2001440, FEBRA2001487, FEBRA2001492, FEBRA2001523, FEBRA2001561, FEBRA2001571, FEBRA2001584, FEBRA2001590, FEBRA2001591, FEBRA2001610, FEBRA2001620, FEBRA2001659, FEBRA2001669, FEBRA2001698, FEBRA2001705, FEBRA2001706, FEBRA2001715, FEBRA2001745, FEBRA2001752, FEBRA2001772, FEBRA2001790, FEBRA2001814, FEBRA2001828, FEBRA2001867, FEBRA2001914, FEBRA2001974, FEBRA2001989, FEBRA2001990, FEBRA2002009, FEBRA2002027, FEBRA2002086, FEBRA2002109, FEBRA2002191, FEBRA2002260, FEBRA2002352, FEBRA2002399, FEBRA2002410, FEBRA2002429, FEBRA2002442, FEBRA2002456, FEBRA2002508, FEBRA2002525, FEBRA2002552, FEBRA2002574, FEBRA2002601, FEBRA2002611, FEBRA2002628, FEBRA2002662, FEBRA2002682, FEBRA2002707, FEBRA2002727, FEBRA2002781, FEBRA2002783, FEBRA2002792, FEBRA2002818, FEBRA2002858, FEBRA2002882, FEBRA2002897, FEBRA2002908, FEBRA2002931, FEBRA2002962, FEBRA2002986, FEBRA2003054, FEBRA2003115, FEBRA2003128, FEBRA2003155, FEBRA2003163, FEBRA2003181, FEBRA2003198, FEBRA2003253, FEBRA2003258, FEBRA2003275, FEBRA2003308, FEBRA2003327, FEBRA2003429, FEBRA2003436, FEBRA2003454, FEBRA2003468, FEBRA2003470, FEBRA2003520, FEBRA2003524, FEBRA2003541, FEBRA2003675, FEBRA2003707, FEBRA2003711, FEBRA2003726, FEBRA2003897, FEBRA2003907, FEBRA2003926, FEBRA2003930, FEBRA2004023, FEBRA2004026, FEBRA2004029, FEBRA2004053, FEBRA2004056, FEBRA2004091, FEBRA2004110, FEBRA2004191, FEBRA2004202, FEBRA2004219, FEBRA2004237, FEBRA2004268, FEBRA2004293, FEBRA2004325, FEBRA2004329, FEBRA2004331, FEBRA2004443, FEBRA2004485, FEBRA2004490, FEBRA2004538, FEBRA2004592, FEBRA2004620, FEBRA2004628, FEBRA2004651, FEBRA2004767, FEBRA2004813, FEBRA2004840, FEBRA2004852, FEBRA2004867, FEBRA2004914, FEBRA2004933, FEBRA2004987, FEBRA2005014, FEBRA2005036, FEBRA2005079, FEBRA2005114, FEBRA2005216, FEBRA2005291, FEBRA2005361, FEBRA2005377, FEBRA2005380, FEBRA2005427, FEBRA2005458, FEBRA2005572, FEBRA2005701, FEBRA2005726, FEBRA2005734, FEBRA2005752, FEBRA2005778, FEBRA2005787, FEBRA2005788, FEBRA2005998, FEBRA2006055, FEBRA2006061, FEBRA2006092, FEBRA2006150, FEBRA2006165, FEBRA2006255, FEBRA2006315, FEBRA2006346, FEBRA2006354, FEBRA2006357, FEBRA2006368, FEBRA2006370, FEBRA2006379, FEBRA2006396, FEBRA2006409, FEBRA2006418, FEBRA2006427, FEBRA2006476, FEBRA2006491, FEBRA2006519, FEBRA2006521, FEBRA2006553, FEBRA2006627, FEBRA2006664, FEBRA2006667, FEBRA2006726, FEBRA2006736, FEBRA2006793, FEBRA2006808, FEBRA2006817, FEBRA2006873, FEBRA2006890, FEBRA2006942, FEBRA2006977, FEBRA2007017, FEBRA2007176, FEBRA2007200, FEBRA2007212, FEBRA2007247, FEBRA2007280, FEBRA2007414, FEBRA2007436, FEBRA2007449, FEBRA2007458, FEBRA2007534, FEBRA2007551, FEBRA2007566, FEBRA2007589, FEBRA2007613, FEBRA2007620, FEBRA2007708, FEBRA2007714, FEBRA2007793, FEBRA2007818, FEBRA2007823, FEBRA2007901, FEBRA2007931, FEBRA2007957, FEBRA2008009, FEBRA2008036, FEBRA2008086, FEBRA2008134, FEBRA2008135, FEBRA2008159, FEBRA2008165, FEBRA2008172, FEBRA2008210, FEBRA2008255, FEBRA2008265, FEBRA2008266, FEBRA2008282, FEBRA2008287, FEBRA2008302, FEBRA2008311, FEBRA2008341, FEBRA2008360, FEBRA2008459, FEBRA2008468, FEBRA2008475, FEBRA2008481, FEBRA2008542, FEBRA2008583, FEBRA2008660, FEBRA2008662, FEBRA2008681, FEBRA2008741, FEBRA2008755, FEBRA2008836, FEBRA2008859, FEBRA2008861, FEBRA2008866, FEBRA2008881, FEBRA2008928, FEBRA2008983, FEBRA2009016, FEBRA2009029, FEBRA2009074, FEBRA2009117, FEBRA2009120, FEBRA2009162, FEBRA2009185, FEBRA2009240, FEBRA2009265, FEBRA2009276, FEBRA2009289, FEBRA2009327, FEBRA2009328, FEBRA2009352, FEBRA2009362, FEBRA2009385, FEBRA2009416, FEBRA2009437, FEBRA2009478, FEBRA2009507, FEBRA2009514, FEBRA2009541, FEBRA2009567, FEBRA2009588, FEBRA2009731, FEBRA2009754, FEBRA2009780, FEBRA2009846, FEBRA2009986, FEBRA2010141, FEBRA2010299, FEBRA2010484, FEBRA2010719, FEBRA2010746, FEBRA2010768, FEBRA2010802, FEBRA2011063, FEBRA2011090, FEBRA2011356, FEBRA2011392, FEBRA2011414, FEBRA2011593, FEBRA2011665, FEBRA2012090, FEBRA2012120, FEBRA2012181, FEBRA2012195, FEBRA2012397, FEBRA2012418, FEBRA2012507, FEBRA2012625, FEBRA2013019, FEBRA2013069, FEBRA2013274, FEBRA2013465, FEBRA2013570, FEBRA2013905, FEBRA2013951, FEBRA2014010, FEBRA2014122, FEBRA2014198, FEBRA2014213, FEBRA2014297, FEBRA2014417, FEBRA2014443, FEBRA2014578, FEBRA2014939, FEBRA2015076, FEBRA2015175, FEBRA2015292, FEBRA2015588, FEBRA2016112, FEBRA2016398, FEBRA2016572, FEBRA2016583, FEBRA2016621, FEBRA2016654, FEBRA2016739, FEBRA2017024, FEBRA2017098, FEBRA2017138, FEBRA2017154, FEBRA2017200, FEBRA2017223, FEBRA2017333, FEBRA2017502, FEBRA2017533, FEBRA2017680, FEBRA2017736, FEBRA2017780, FEBRA2017811, FEBRA2017850, FEBRA2018051, FEBRA2018203, FEBRA2018433, FEBRA2018476, FEBRA2018746, FEBRA2019172, FEBRA2019242, FEBRA2019298, FEBRA2019389, FEBRA2019457, FEBRA2019519, FEBRA2019582, FEBRA2019637, FEBRA2019663, FEBRA2019690, FEBRA2019867, FEBRA2020406, FEBRA2020566, FEBRA2020582, FEBRA2020668, FEBRA2020801, FEBRA2020845, FEBRA2020886, FEBRA2020977, FEBRA2021032, FEBRA2021134, FEBRA2021171, FEBRA2021339, FEBRA2021431, FEBRA2021497, FEBRA2021550, FEBRA2021571, FEBRA2021636, FEBRA2021864, FEBRA2021892, FEBRA2021908, FEBRA2021966, FEBRA2022013, FEBRA2022148, FEBRA2022204, FEBRA2022255, FEBRA2022322, FEBRA2022504, FEBRA2022601, FEBRA2022696, FEBRA2022729, FEBRA2022787, FEBRA2022911, FEBRA2022956, FEBRA2022963, FEBRA2022972, FEBRA2023227, FEBRA2023285, FEBRA2023351, FEBRA2023377, FEBRA2023498, FEBRA2023550, FEBRA2023721, FEBRA2023927, FEBRA2023989, FEBRA2023990, FEBRA2024019, FEBRA2024136, FEBRA2024150, FEBRA2024343, FEBRA2024570, FEBRA2024693, FEBRA2024727, FEBRA2024744, FEBRA2024797, FEBRA2024987, FEBRA2025249, FEBRA2025463, FEBRA2025477, FEBRA2025838, FEBRA2026474, FEBRA2026582, FEBRA2026629, FEBRA2026769, FEBRA2026879, FEBRA2026890, FEBRA2026977, FEBRA2026984, FEBRA2027082, FEBRA2027297, FEBRA2027352, FEBRA2027364, FEBRA2027609, FEBRA2028158, FEBRA2028222, FEBRA2028366, FEBRA2028457, FEBRA2028477, FEBRA2028503, FEHRT2000325, FEHRT2000364, FEKID1000018, FELIV1000101, FELIV1000137, FELIV1000164, FELNG2000241, HCASM1000021, HCASM1000050, HCASM1000061, HCASM1000130, HCASM2000138, HCASM2000156, HCASM2000202, HCASM2000214, HCASM2000266, HCASM2000307, HCASM2000534, HCASM2000536, HCASM2000560, HCASM2000871, HCASM2001285, HCASM2001810, HCASM2001866, HCASM2001890, HCASM2002148, HCASM2002502, HCASM2002754, HCASM2002918, HCASM2003018, HCASM2003076, HCASM2003099, HCASM2003212, HCASM2003237, HCASM2003357, HCASM2003415, HCASM2005388, HCASM2005484, HCASM2006131, HCASM2006338, HCASM2006359, HCASM2006632, HCASM2007047, HCASM2007317, HCASM2007737, HCASM2007773, HCASM2008154, HCASM2008536, HCASM2009405, HCASM2009424, HCASM2009463, HCASM2009588, HCHON1000015, HCHON1000131, HCHON1000142, HCHON1000166, HCHON1000176, HCHON1000191, HCHON2000038, HCHON2000062, HCHON2000100, HCHON2000156, HCHON2000199, HCHON2000212, HCHON2000244, HCHON2000265, HCHON2000271, HCHON2000315, HCHON2000322, HCHON2000323, HCHON2000344, HCHON2000373, HCHON2000395, HCHON2000417, HCHON2000418, HCHON2000503, HCHON2000660, HCHON2000663, HCHON2000673, HCHON2000676, HCHON2000698, HCHON2000699, HCHON2000705, HCHON2000743, HCHON2000815, HCHON2000817, HCHON2000818, HCHON2000819, HCHON2000832, HCHON2000851, HCHON2000898, HCHON2000935, HCHON2000942, HCHON2000956, HCHON2000994, HCHON2001084, HCHON2001099, HCHON2001108, HCHON2001110, HCHON2001116, HCHON2001161, HCHON2001214, HCHON2001233, HCHON2001269, HCHON2001434, HCHON2001450, HCHON2001453, HCHON2001497, HCHON2001505, HCHON2001519, HCHON2001523, HCHON2001546, HCHON2001548, HCHON2001577, HCHON2001604, HCHON2001607, HCHON2001646, HCHON2001665, HCHON2001712, HCHON2001768, HCHON2001801, HCHON2001853, HCHON2002123, HCHON2002194, HCHON2002241, HCHON2002247, HCHON2002354, HCHON2002496, HCHON2002676, HCHON2002770, HCHON2002964, HCHON2002971, HCHON2003131, HCHON2003134, HCHON2003327, HCHON2003513, HCHON2003532, HCHON2003642, HCHON2003659, HCHON2003676, HCHON2004007, HCHON2004279, HCHON2004359, HCHON2004531, HCHON2004776, HCHON2004858, HCHON2005048, HCHON2005118, HCHON2005166, HCHON2005802, HCHON2005921, HCHON2005987, HCHON2006250, HCHON2006459, HCHON2006714, HCHON2006722, HCHON2006770, HCHON2006786, HCHON2006841, HCHON2006871, HCHON2007046, HCHON2007482, HCHON2007650, HCHON2007674, HCHON2007774, HCHON2007881, HCHON2008112, HCHON2008239, HCHON2008444, HCHON2008582, HCHON2008672, HCHON2008856, HCHON2008871, HCHON2008989, HCHON2009191, HCHON2009384, HCHON2009749, HCHON2009766, HCHON2009795, HCHON2010074, HCHON2010543, HEART1000010, HEART1000074, HEART1000088, HEART1000099, HEART1000102, HEART1000118, HEART1000132, HEART1000139, HEART1000142, HEART1000149, HEART1000151, HEART1000173, HEART1000185, HEART2000024, HEART2000035, HEART2000099, HEART2000298, HEART2000306, HEART2000309, HEART2000411, HEART2000418, HEART2000444, HEART2000448, HEART2000492, HEART2000506, HEART2000520, HEART2000541, HEART2000568, HEART2000611, HEART2000959, HEART2001680, HEART2001756, HEART2002129, HEART2002184, HEART2002220, HEART2002432, HEART2002531, HEART2002598, HEART2002717, HEART2003027, HEART2003168, HEART2003432, HEART2003440, HEART2003781, HEART2003836, HEART2003852, HEART2004570, HEART2004764, HEART2004931, HEART2004940, HEART2004941, HEART2004980, HEART2005244, HEART2005310, HEART2005581, HEART2005610, HEART2006131, HEART2006195, HEART2006310, HEART2006334, HEART2006487, HEART2006521, HEART2006557, HEART2006787, HEART2006789, HEART2006909, HEART2007031, HEART2007231, HEART2007443, HEART2007696, HEART2007767, HEART2008108, HEART2008111, HEART2008257, HEART2008509, HEART2008994, HEART2009000, HEART2009599, HEART2009680, HEART2010391, HEART2010492, HEART2010495, HELAC2000158, HELAC2000301, HHDPC1000001, HHDPC1000065, HHDPC1000083, HHDPC1000114, HHDPC1000163, HHDPC2000055, HHDPC2000102, HHDPC2000104, HHDPC2000115, HHDPC2000258, HHDPC2000315, HHDPC2000455, HHDPC2000462, HHDPC2000656, HHDPC2000692, HHDPC2001337, HHDPC2001432, HHDPC2001896, HHDPC2002963, HHDPC2003049, HHDPC2003113, HHDPC2003381, HHDPC2003472, HHDPC2004757, HHDPC2005185, HHDPC2005513, HHDPC2005742, HHDPC2005794, HHDPC2006460, HHDPC2006862, HHDPC2006927, HHDPC2007302, HHDPC2007775, HHDPC2008123, HHDPC2008185, HHDPC2008279, HHDPC2008297, HHDPC2008414, HHDPC2008474, HHDPC2008816, HHDPC2008843, HHDPC2009114, HHDPC2009178, HHDPC2009208, HHDPC2009272, HHDPC2009528, HLUNG1000017, HLUNG1000024, HLUNG1000030, HLUNG1000034, HLUNG1000037, HLUNG1000053, HLUNG1000064, HLUNG1000084, HLUNG1000091, HLUNG1000104, HLUNG1000105, HLUNG1000110, HLUNG1000151, HLUNG1000169, HLUNG2000014, HLUNG2000027, HLUNG2000063, HLUNG2000068, HLUNG2000116, HLUNG2000125, HLUNG2000130, HLUNG2000142, HLUNG2000174, HLUNG2000176, HLUNG2000217, HLUNG2000232, HLUNG2000255, HLUNG2000281, HLUNG2000314, HLUNG2000315, HLUNG2000340, HLUNG2000362, HLUNG2000363, HLUNG2000431, HLUNG2000480, HLUNG2000489, HLUNG2000501, HLUNG2000549, HLUNG2000557, HLUNG2000570, HLUNG2000751, HLUNG2000761, HLUNG2000777, HLUNG2000846, HLUNG2000870, HLUNG2000884, HLUNG2000926, HLUNG2000950, HLUNG2000955, HLUNG2000970, HLUNG2001013, HLUNG2001126, HLUNG2001144, HLUNG2001214, HLUNG2001439, HLUNG2001459, HLUNG2001507, HLUNG2001518, HLUNG2001633, HLUNG2001677, HLUNG2001712, HLUNG2001814, HLUNG2001996, HLUNG2002006, HLUNG2002050, HLUNG2002059, HLUNG2002085, HLUNG2002145, HLUNG2002295, HLUNG2002303, HLUNG2002334, HLUNG2002405, HLUNG2002429, HLUNG2002465, HLUNG2002562, HLUNG2002648, HLUNG2002659, HLUNG2002707, HLUNG2002916, HLUNG2002942, HLUNG2002949, HLUNG2002958, HLUNG2002982, HLUNG2003003, HLUNG2003042, HLUNG2003049, HLUNG2003061, HLUNG2003162, HLUNG2003246, HLUNG2003306, HLUNG2003331, HLUNG2003335, HLUNG2003378, HLUNG2003497, HLUNG2003691, HLUNG2003710, HLUNG2003714, HLUNG2003716, HLUNG2003778, HLUNG2003833, HLUNG2003872, HLUNG2003918, HLUNG2003991, HLUNG2004014, HLUNG2004067, HLUNG2004154, HLUNG2004170, HLUNG2004217, HLUNG2004273, HLUNG2004388, HLUNG2004416, HLUNG2004521, HLUNG2004534, HLUNG2004684, HLUNG2004707, HLUNG2004774, HLUNG2004775, HLUNG2005012, HLUNG2005030, HLUNG2005045, HLUNG2005076, HLUNG2005133, HLUNG2005203, HLUNG2005230, HLUNG2005479, HLUNG2005524, HLUNG2005656, HLUNG2005738, HLUNG2005774, HLUNG2005813, HLUNG2005924, HLUNG2006026, HLUNG2006067, HLUNG2006094, HLUNG2006370, HLUNG2006397, HLUNG2006570, HLUNG2006599, HLUNG2006614, HLUNG2006671, HLUNG2006781, HLUNG2006812, HLUNG2006843, HLUNG2006852, HLUNG2006935, HLUNG2007041, HLUNG2007163, HLUNG2007210, HLUNG2007219, HLUNG2007245, HLUNG2007433, HLUNG2007931, HLUNG2008066, HLUNG2008139, HLUNG2008153, HLUNG2008225, HLUNG2008235, HLUNG2008247, HLUNG2008333, HLUNG2008348, HLUNG2008384, HLUNG2008396, HLUNG2008439, HLUNG2008480, HLUNG2008521, HLUNG2008833, HLUNG2008875, HLUNG2008885, HLUNG2008958, HLUNG2008959, HLUNG2009067, HLUNG2009215, HLUNG2009253, HLUNG2009303, HLUNG2009413, HLUNG2009729, HLUNG2010181, HLUNG2010464, HLUNG2010562, HLUNG2010845, HLUNG2011041, HLUNG2011298, HLUNG2011461, HLUNG2011833, HLUNG2012049, HLUNG2012287, HLUNG2012315, HLUNG2012546, HLUNG2012600, HLUNG2012727, HLUNG2013097, HLUNG2013204, HLUNG2013304, HLUNG2013350, HLUNG2013622, HLUNG2013643, HLUNG2013784, HLUNG2013851, HLUNG2014262, HLUNG2014288, HLUNG2014449, HLUNG2014821, HLUNG2015184, HLUNG2015418, HLUNG2015548, HLUNG2015578, HLUNG2015617, HLUNG2016022, HLUNG2016862, HLUNG2017286, HLUNG2017307, HLUNG2017350, HLUNG2017546, HLUNG2017806, HLUNG2018029, HLUNG2018282, HLUNG2018626, HLUNG2019058, HSYRA1000131, HSYRA1000137, HSYRA1000148, HSYRA1000178, HSYRA2000044, HSYRA2000137, HSYRA2000190, HSYRA2000221, HSYRA2000224, HSYRA2000232, HSYRA2000237, HSYRA2000253, HSYRA2000332, HSYRA2000371, HSYRA2000424, HSYRA2000507, HSYRA2000510, HSYRA2000605, HSYRA2000629, HSYRA2000640, HSYRA2000706, HSYRA2000760, HSYRA2000787, HSYRA2000792, HSYRA2000828, HSYRA2000832, HSYRA2000925, HSYRA2000927, HSYRA2001003, HSYRA2001103, HSYRA2001105, HSYRA2001142, HSYRA2001153, HSYRA2001232, HSYRA2001255, HSYRA2001332, HSYRA2001353, HSYRA2001396, HSYRA2001420, HSYRA2001484, HSYRA2001552, HSYRA2001580, HSYRA2001615, HSYRA2001638, HSYRA2001983, HSYRA2002103, HSYRA2002590, HSYRA2002741, HSYRA2003168, HSYRA2004550, HSYRA2004858, HSYRA2005456, HSYRA2005496, HSYRA2005628, HSYRA2005970, HSYRA2006049, HSYRA2006873, HSYRA2007241, HSYRA2007338, HSYRA2007667, HSYRA2008154, HSYRA2008714, HSYRA2009102, IMR321000155, IMR321000158, IMR321000161, IMR321000165, IMR321000207, IMR321000210, IMR321000230, IMR321000242, IMR321000266, IMR322000010, IMR322000072, IMR322000107, IMR322000121, IMR322000127, IMR322000144, IMR322000152, IMR322000164, IMR322000178, IMR322000223, IMR322000243, IMR322000302, IMR322000316, IMR322000374, IMR322000379, IMR322000383, IMR322000418, IMR322000555, IMR322000604, IMR322000609, IMR322000656, IMR322000672, IMR322000742, IMR322000775, IMR322000791, IMR322000811, IMR322000819, IMR322000838, IMR322000859, IMR322000863, IMR322000917, IMR322000918, IMR322000919, IMR322000953, IMR322000973, IMR322000984, IMR322001018, IMR322001167, IMR322001185, IMR322001245, IMR322001317, IMR322001318, IMR322001322, IMR322001380, IMR322001438, IMR322001452, IMR322001491, IMR322001534, IMR322001541, IMR322001665, IMR322001670, IMR322001710, IMR322001724, IMR322001879, IMR322002035, IMR322002110, IMR322002470, IMR322002993, IMR322003675, IMR322004768, IMR322005293, IMR322005833, IMR322006012, IMR322006222, IMR322006495, IMR322006520, IMR322006886, IMR322006947, IMR322007078, IMR322007225, IMR322007704, IMR322008651, IMR322009710, IMR322009807, IMR322010295, IMR322010953, IMR322011689, IMR322012314, IMR322012529, IMR322013053, IMR322013396, IMR322013731, IMR322013805, IMR322015523, IMR322016146, IMR322017049, IMR322018117, IMR322018192, IMR322019070, JCMLC2000273, KIDNE1000008, KIDNE1000012, KIDNE1000015, KIDNE1000028, KIDNE1000036, KIDNE1000064, KIDNE1000104, KIDNE1000121, KIDNE1000143, KIDNE1000145, KIDNE1000152, KIDNE2000026, KIDNE2000041, KIDNE2000046, KIDNE2000051, KIDNE2000070, KIDNE2000167, KIDNE2000174, KIDNE2000192, KIDNE2000227, KIDNE2000244, KIDNE2000245, KIDNE2000287, KIDNE2000315, KIDNE2000317, KIDNE2000328, KIDNE2000330, KIDNE2000335, KIDNE2000349, KIDNE2000375, KIDNE2000383, KIDNE2000394, KIDNE2000422, KIDNE2000493, KIDNE2000497, KIDNE2000510, KIDNE2000513, KIDNE2000517, KIDNE2000519, KIDNE2000555, KIDNE2000624, KIDNE2000665, KIDNE2000678, KIDNE2000717, KIDNE2000721, KIDNE2000722, KIDNE2000801, KIDNE2000832, KIDNE2000833, KIDNE2000846, KIDNE2000867, KIDNE2000909, KIDNE2001117, KIDNE2001140, KIDNE2001162, KIDNE2001269, KIDNE2001361, KIDNE2001636, KIDNE2001713, KIDNE2001802, KIDNE2001840, KIDNE2001857, KIDNE2001873, KIDNE2001897, KIDNE2001931, KIDNE2001979, KIDNE2002015, KIDNE2002162, KIDNE2002168, KIDNE2002191, KIDNE2002198, KIDNE2002262, KIDNE2002265, KIDNE2002438, KIDNE2002483, KIDNE2002725, KIDNE2002768, KIDNE2002795, KIDNE2002798, KIDNE2002839, KIDNE2002845, KIDNE2002872, KIDNE2002882, KIDNE2002883, KIDNE2002980, KIDNE2002991, KIDNE2003185, KIDNE2003188, KIDNE2003233, KIDNE2003305, KIDNE2003335, KIDNE2003357, KIDNE2003373, KIDNE2003377, KIDNE2003507, KIDNE2003752, KIDNE2003764, KIDNE2003837, KIDNE2003941, KIDNE2003994, KIDNE2004034, KIDNE2004054, KIDNE2004084, KIDNE2004095, KIDNE2004115, KIDNE2004233, KIDNE2004262, KIDNE2004279, KIDNE2004294, KIDNE2004295, KIDNE2004305, KIDNE2004344, KIDNE2004394, KIDNE2004475, KIDNE2004519, KIDNE2004520, KIDNE2004531, KIDNE2004534, KIDNE2004562, KIDNE2004579, KIDNE2004626, KIDNE2004681, KIDNE2004828, KIDNE2004846, KIDNE2004864, KIDNE2004879, KIDNE2004981, KIDNE2004985, KIDNE2004999, KIDNE2005038, KIDNE2005042, KIDNE2005062, KIDNE2005266, KIDNE2005296, KIDNE2005321, KIDNE2005327, KIDNE2005336, KIDNE2005400, KIDNE2005424, KIDNE2005477, KIDNE2005526, KIDNE2005543, KIDNE2005603, KIDNE2005629, KIDNE2005781, KIDNE2005798, KIDNE2005854, KIDNE2005908, KIDNE2005937, KIDNE2006009, KIDNE2006030, KIDNE2006039, KIDNE2006053, KIDNE2006062, KIDNE2006092, KIDNE2006145, KIDNE2006149, KIDNE2006210, KIDNE2006299, KIDNE2006334, KIDNE2006353, KIDNE2006376, KIDNE2006378, KIDNE2006465, KIDNE2006580, KIDNE2006652, KIDNE2006687, KIDNE2006733, KIDNE2006760, KIDNE2006775, KIDNE2006811, KIDNE2006820, KIDNE2006880, KIDNE2007005, KIDNE2007040, KIDNE2007077, KIDNE2007186, KIDNE2007222, KIDNE2007352, KIDNE2007356, KIDNE2007422, KIDNE2007569, KIDNE2007810, KIDNE2007811, KIDNE2007944, KIDNE2007954, KIDNE2008022, KIDNE2008069, KIDNE2008072, KIDNE2008116, KIDNE2008117, KIDNE2008218, KIDNE2008315, KIDNE2008362, KIDNE2008378, KIDNE2008403, KIDNE2008404, KIDNE2008446, KIDNE2008473, KIDNE2008480, KIDNE2008649, KIDNE2008666, KIDNE2008697, KIDNE2008758, KIDNE2008788, KIDNE2008795, KIDNE2008824, KIDNE2008832, KIDNE2008869, KIDNE2008914, KIDNE2008975, KIDNE2008987, KIDNE2009019, KIDNE2009109, KIDNE2009180, KIDNE2009191, KIDNE2009332, KIDNE2009426, KIDNE2009467, KIDNE2009490, KIDNE2009553, KIDNE2009605, KIDNE2009628, KIDNE2009647, KIDNE2009676, KIDNE2009723, KIDNE2010007, KIDNE2010049, KIDNE2010052, KIDNE2010084, KIDNE2010137, KIDNE2010151, KIDNE2010264, KIDNE2010265, KIDNE2010271, KIDNE2010419, KIDNE2010430, KIDNE2010574, KIDNE2010674, KIDNE2010739, KIDNE2010750, KIDNE2010762, KIDNE2010863, KIDNE2010973, KIDNE2010989, KIDNE2011200, KIDNE2011314, KIDNE2011532, KIDNE2011635, KIDNE2011752, KIDNE2011782, KIDNE2011858, KIDNE2012009, KIDNE2012025, KIDNE2012188, KIDNE2012291, KIDNE2012316, KIDNE2012361, KIDNE2012440, KIDNE2012453, KIDNE2012563, KIDNE2012601, KIDNE2012613, KIDNE2012745, KIDNE2012775, KIDNE2012784, KIDNE2012945, KIDNE2013045, KIDNE2013095, KIDNE2013158, KIDNE2013218, KIDNE2013263, KIDNE2013346, KIDNE2013388, KIDNE2013413, KIDNE2013489, KIDNE2013639, KIDNE2013731, KIDNE2013734, KIDNE2013775, KIDNE2013801, KIDNE2013866, KIDNE2014087, KIDNE2014112, KIDNE2014119, KIDNE2014170, KIDNE2014184, KIDNE2014268, KIDNE2014298, KIDNE2014320, KIDNE2014415, KIDNE2014489, KIDNE2014496, KIDNE2014661, KIDNE2014717, KIDNE2014789, KIDNE2014808, KIDNE2014890, KIDNE2014978, KIDNE2015073, KIDNE2015221, KIDNE2015244, KIDNE2015313, KIDNE2015433, KIDNE2015445, KIDNE2015483, KIDNE2015515, KIDNE2015546, KIDNE2015556, KIDNE2015598, KIDNE2015660, KIDNE2015710, KIDNE2015987, KIDNE2016000, KIDNE2016036, KIDNE2016096, KIDNE2016101, KIDNE2016142, KIDNE2016188, KIDNE2016327, KIDNE2016388, KIDNE2016464, KIDNE2016539, KIDNE2016570, KIDNE2016918, KIDNE2017007, KIDNE2017052, KIDNE2017151, KIDNE2017153, KIDNE2017315, KIDNE2017332, KIDNE2017343, KIDNE2017454, KIDNE2017603, KIDNE2017956, KIDNE2018071, KIDNE2018166, KIDNE2018167, KIDNE2018217, KIDNE2018254, KIDNE2018268, KIDNE2018269, KIDNE2018287, KIDNE2018294, KIDNE2018352, KIDNE2018462, KIDNE2018493, KIDNE2018617, KIDNE2018678, KIDNE2018727, KIDNE2018863, KIDNE2018891, KIDNE2018989, KIDNE2018996, KIDNE2019074, KIDNE2019187, LIVER1000017, LIVER1000050, LIVER1000055, LIVER1000058, LIVER1000063, LIVER1000067, LIVER1000073, LIVER1000079, LIVER1000082, LIVER1000099, LIVER1000104, LIVER1000111, LIVER1000126, LIVER1000132, LIVER1000139, LIVER1000155, LIVER1000165, LIVER1000175, LIVER1000224, LIVER1000230, LIVER1000278, LIVER1000303, LIVER1000397, LIVER1000421, LIVER1000433, LIVER1000479, LIVER1000482, LIVER1000542, LIVER2000003, LIVER2000033, LIVER2000037, LIVER2000158, LIVER2000216, LIVER2000237, LIVER2000247, LIVER2000360, LIVER2000416, LIVER2000515, LIVER2000592, LIVER2000626, LIVER2000682, LIVER2000769, LIVER2000775, LIVER2001051, LIVER2001076, LIVER2001099, LIVER2001113, LIVER2001164, LIVER2001191, LIVER2001265, LIVER2001329, LIVER2001389, LIVER2001461, LIVER2001539, LIVER2001608, LIVER2001835, LIVER2002638, LIVER2002644, LIVER2002660, LIVER2002702, LIVER2003008, LIVER2003065, LIVER2003234, LIVER2003511, LIVER2003524, LIVER2003568, LIVER2003581, LIVER2003800, LIVER2003854, LIVER2004074, LIVER2004392, LIVER2004514, LIVER2004565, LIVER2005028, LIVER2005198, LIVER2005218, LIVER2005376, LIVER2005385, LIVER2005512, LIVER2005520, LIVER2005527, LIVER2005544, LIVER2005625, LIVER2005728, LIVER2005789, LIVER2005973, LIVER2005981, LIVER2006251, LIVER2006410, LIVER2006469, LIVER2006644, LIVER2006764, LIVER2007415, LIVER2007548, LIVER2007568, LIVER2007721, LIVER2007783, LIVER2008053, LIVER2008465, LIVER2008473, LIVER2008580, LIVER2008706, LIVER2008751, LIVER2008945, LIVER2008998, LIVER2009110, LIVER2009118, LIVER2009554, LYMPB1000141, LYMPB1000158, LYMPB2000083, MAMGL1000017, MAMGL1000083, MAMGL1000096, MAMGL1000100, MAMGL1000132, MAMGL1000151, MAMGL1000173, MAMGL1000178, MAMGL1000182, MAMGL1000184, MESAN1000032, MESAN1000035, MESAN1000050, MESAN1000079, MESAN1000101, MESAN1000121, MESAN1000147, MESAN1000180, MESAN2000023, MESAN2000026, MESAN2000067, MESAN2000167, MESAN2000264, MESAN2000291, MESAN2000434, MESAN2000457, MESAN2000462, MESAN2000501, MESAN2000608, MESAN2000620, MESAN2000711, MESAN2000894, MESAN2000909, MESAN2001450, MESAN2001627, MESAN2001770, MESAN2001979, MESAN2001980, MESAN2002113, MESAN2002122, MESAN2002147, MESAN2002186, MESAN2002424, MESAN2002519, MESAN2002687, MESAN2002709, MESAN2002724, MESAN2002844, MESAN2002978, MESAN2003035, MESAN2003037, MESAN2003039, MESAN2003058, MESAN2003101, MESAN2003190, MESAN2003322, MESAN2003444, MESAN2003490, MESAN2003529, MESAN2003622, MESAN2003646, MESAN2003662, MESAN2003709, MESAN2003851, MESAN2004138, MESAN2004288, MESAN2004575, MESAN2005284, MESAN2005303, MESAN2005371, MESAN2005689, MESAN2005724, MESAN2005808, MESAN2005811, MESAN2005957, MESAN2006022, MESAN2006043, MESAN2006328, MESAN2006580, MESAN2006599, MESAN2006743, MESAN2006953, MESAN2006971, MESAN2007032, MESAN2007440, MESAN2007597, MESAN2007755, MESAN2008222, MESAN2008334, MESAN2008415, MESAN2008460, MESAN2008536, MESAN2008679, MESAN2008729, MESAN2008821, MESAN2008926, MESAN2008936, MESAN2009081, MESAN2009105, MESAN2009311, MESAN2009418, MESAN2009503, MESAN2009522, MESAN2009580, MESAN2010031, MESAN2010114, MESAN2010312, MESAN2010321, MESAN2010664, MESAN2010681, MESAN2011545, MESAN2011597, MESAN2011632, MESAN2011977, MESAN2011984, MESAN2012054, MESAN2012113, MESAN2012586, MESAN2012708, MESAN2012735, MESAN2013019, MESAN2013022, MESAN2013183, MESAN2013211, MESAN2013283, MESAN2013611, MESAN2013674, MESAN2013845, MESAN2013908, MESAN2013936, MESAN2014192, MESAN2014295, MESAN2014298, MESAN2014412, MESAN2014624, MESAN2015277, MESAN2015365, MESAN2015391, MESAN2015401, MESAN2015501, MESAN2015708, MESAN2016159, MESAN2016304, MESAN2016409, MESAN2016552, MESAN2016965, MESAN2017133, MESAN2017152, MESAN2017373, MESAN2017417, MESAN2018209, MESAN2018576, MESAN2018670, MESAN2018699, MESTC1000042, MESTC1000147, MESTC2000150, MESTC2000153, MESTC2000170, N1ESE2000698, NB9N41000011, NB9N41000121, NB9N41000142, NB9N41000146, NB9N41000340, NB9N42000104, NB9N42000122, NB9N42000196, NB9N42000281, NB9N42000314, NB9N42000342, NB9N42000430, NB9N42000495, NB9N42001300, NCRRP1000129, NESOP1000010, NESOP1000087, NESOP1000108, NESOP2000231, NESOP2000452, NESOP2000499, NESOP2000504, NESOP2000744, NESOP2001144, NESOP2001433, NESOP2001656, NESOP2001694, NESOP2001752, NESOP2002352, NESOP2002418, NESOP2002487, NESOP2002738, NESOP2002780, NETRP1000034, NETRP1000082, NETRP2000086, NETRP2000182, NETRP2000439, NHNPC1000034, NHNPC1000037, NHNPC1000084, NHNPC1000101, NHNPC1000124, NHNPC2000062, NHNPC2000212, NHNPC2000606, NHNPC2000877, NHNPC2001108, NHNPC2001223, NHNPC2001312, NHNPC2001816, NHNPC2002565, NHNPC2002749, NOVAR1000015, NOVAR1000091, NOVAR1000102, NOVAR2000038, NOVAR2000136, NOVAR2000352, NOVAR2000412, NOVAR2000710, NOVAR2000783, NOVAR2000962, NOVAR2001108, NOVAR2001620, NOVAR2001783, NOVAR2001876, NOVAR2002039, NT2NE1000004, NT2NE1000014, NT2NE1000018, NT2NE1000023, NT2NE1000059, NT2NE1000063, NT2NE1000073, NT2NE1000083, NT2NE1000120, NT2NE1000122, NT2NE1000175, NT2NE1000181, NT2NE1000185, NT2NE2000038, NT2NE2000054, NT2NE2000057, NT2NE2000064, NT2NE2000109, NT2NE2000137, NT2NE2000156, NT2NE2000195, NT2NE2000222, NT2NE2000259, NT2NE2000284, NT2NE2000299, NT2NE2000353, NT2NE2000356, NT2NE2000369, NT2NE2000374, NT2NE2000383, NT2NE2000386, NT2NE2000390, NT2NE2000392, NT2NE2000455, NT2NE2000470, NT2NE2000488, NT2NE2000517, NT2NE2000536, NT2NE2000546, NT2NE2000548, NT2NE2000550, NT2NE2000586, NT2NE2000612, NT2NE2000636, NT2NE2000658, NT2NE2000706, NT2NE2000802, NT2NE2000808, NT2NE2000809, NT2NE2000864, NT2NE2000909, NT2NE2000950, NT2NE2000951, NT2NE2000980, NT2NE2001000, NT2NE2001005, NT2NE2001021, NT2NE2001040, NT2NE2001048, NT2NE2001049, NT2NE2001142, NT2NE2001156, NT2NE2001180, NT2NE2001181, NT2NE2001188, NT2NE2001191, NT2NE2001247, NT2NE2001252, NT2NE2001324, NT2NE2001326, NT2NE2001337, NT2NE2001364, NT2NE2001372, NT2NE2001403, NT2NE2001428, NT2NE2001432, NT2NE2001435, NT2NE2001442, NT2NE2001524, NT2NE2001530, NT2NE2001545, NT2NE2001598, NT2NE2001623, NT2NE2001626, NT2NE2001634, NT2NE2001648, NT2NE2001655, NT2NE2001660, NT2NE2001666, NT2NE2001677, NT2NE2001697, NT2NE2001698, NT2NE2001723, NT2NE2001725, NT2NE2001874, NT2NE2001889, NT2NE2001923, NT2NE2002100, NT2NE2002162, NT2NE2002186, NT2NE2002285, NT2NE2002311, NT2NE2002620, NT2NE2002651, NT2NE2002732, NT2NE2002768, NT2NE2002791, NT2NE2002856, NT2NE2002870, NT2NE2003150, NT2NE2003185, NT2NE2003252, NT2NE2003280, NT2NE2003308, NT2NE2003309, NT2NE2003315, NT2NE2003393, NT2NE2003408, NT2NE2003457, NT2NE2003485, NT2NE2003540, NT2NE2003569, NT2NE2003571, NT2NE2003705, NT2NE2003752, NT2NE2003887, NT2NE2003921, NT2NE2004255, NT2NE2004378, NT2NE2004490, NT2NE2004519, NT2NE2004606, NT2NE2004740, NT2NE2004787, NT2NE2004916, NT2NE2005035, NT2NE2005223, NT2NE2005276, NT2NE2005317, NT2NE2005323, NT2NE2005358, NT2NE2005371, NT2NE2005395, NT2NE2005419, NT2NE2005441, NT2NE2005517, NT2NE2005537, NT2NE2005555, NT2NE2005588, NT2NE2005676, NT2NE2005784, NT2NE2005804, NT2NE2005821, NT2NE2005876, NT2NE2005890, NT2NE2005921, NT2NE2005968, NT2NE2006087, NT2NE2006103, NT2NE2006217, NT2NE2006288, NT2NE2006382, NT2NE2006387, NT2NE2006427, NT2NE2006432, NT2NE2006458, NT2NE2006478, NT2NE2006531, NT2NE2006659, NT2NE2006784, NT2NE2006813, NT2NE2006894, NT2NE2006909, NT2NE2006942, NT2NE2006958, NT2NE2007052, NT2NE2007220, NT2NE2007425, NT2NE2007725, NT2NE2007727, NT2NE2007786, NT2NE2007877, NT2NE2007967, NT2NE2008017, NT2NE2008060, NT2NE2008077, NT2NE2008213, NT2NE2008260, NT2NE2008378, NT2NE2008607, NT2NE2008639, NT2NE2008727, NT2NE2008783, NT2NE2008785, NT2NE2008803, NT2NE2008867, NT2NE2008961, NT2NE2008997, NT2NE2009138, NT2NE2009295, NT2NE2009426, NT2NE2009523, NT2NE2009608, NT2NE2009691, NT2NE2010056, NT2NE2010105, NT2NE2010150, NT2NE2010400, NT2NE2010632, NT2NE2010633, NT2NE2010654, NT2NE2010688, NT2NE2010781, NT2NE2010842, NT2NE2010854, NT2NE2011033, NT2NE2011036, NT2NE2011107, NT2NE2011119, NT2NE2011154, NT2NE2011221, NT2NE2011411, NT2NE2011485, NT2NE2011650, NT2NE2011684, NT2NE2011687, NT2NE2011691, NT2NE2011758, NT2NE2011823, NT2NE2011896, NT2NE2011998, NT2NE2012113, NT2NE2012199, NT2NE2012243, NT2NE2012361, NT2NE2012448, NT2NE2012457, NT2NE2012493, NT2NE2012505, NT2NE2012533, NT2NE2012603, NT2NE2012747, NT2NE2012790, NT2NE2012847, NT2NE2012928, NT2NE2013019, NT2NE2013081, NT2NE2013189, NT2NE2013217, NT2NE2013547, NT2NE2014013, NT2NE2014028, NT2NE2014104, NT2NE2014113, NT2NE2014176, NT2NE2014221, NT2NE2014525, NT2NE2014650, NT2NE2014651, NT2NE2014681, NT2NE2014758, NT2NE2014869, NT2NE2014950, NT2NE2015061, NT2NE2015262, NT2NE2015275, NT2NE2015362, NT2NE2015480, NT2NE2015511, NT2NE2015565, NT2NE2015626, NT2NE2015747, NT2NE2015860, NT2NE2015885, NT2NE2015904, NT2NE2015974, NT2NE2016041, NT2NE2016387, NT2NE2016419, NT2NE2016519, NT2NE2016608, NT2NE2016766, NT2NE2016774, NT2NE2017259, NT2NE2017332, NT2NE2017397, NT2NE2017480, NT2NE2017492, NT2NE2017508, NT2NE2017562, NT2NE2017590, NT2NE2017612, NT2NE2017721, NT2NE2017752, NT2NE2017792, NT2NE2017982, NT2NE2018165, NT2NE2018176, NT2NE2018180, NT2NE2018273, NT2NE2018376, NT2NE2018472, NT2NE2018490, NT2NE2018594, NT2NE2018739, NT2NE2018916, NT2NE2019056, NT2NE2019076, NT2NE2019091, NT2NE2019099, NT2RI1000016, NT2RI1000027, NT2RI1000035, NT2RI1000164, NT2RI1000172, NT2RI2000004, NT2RI2000007, NT2RI2000064, NT2RI2000107, NT2RI2000116, NT2RI2000117, NT2RI2000128, NT2RI2000133, NT2RI2000167, NT2RI2000173, NT2RI2000187, NT2RI2000270, NT2RI2000276, NT2RI2000282, NT2RI2000284, NT2RI2000294, NT2RI2000313, NT2RI2000341, NT2RI2000348, NT2RI2000412, NT2RI2000421, NT2RI2000480, NT2RI2000575, NT2RI2000588, NT2RI2000597, NT2RI2000669, NT2RI2000685, NT2RI2000688, NT2RI2000689, NT2RI2000704, NT2RI2000738, NT2RI2000775, NT2RI2000822, NT2RI2000829, NT2RI2000841, NT2RI2000865, NT2RI2000932, NT2RI2000974, NT2RI2000987, NT2RI2001010, NT2RI2001017, NT2RI2001030, NT2RI2001054, NT2RI2001083, NT2RI2001091, NT2RI2001167, NT2RI2001178, NT2RI2001230, NT2RI2001235, NT2RI2001244, NT2RI2001307, NT2RI2001385, NT2RI2001409, NT2RI2001410, NT2RI2001422, NT2RI2001425, NT2RI2001449, NT2RI2001450, NT2RI2001474, NT2RI2001519, NT2RI2001595, NT2RI2001621, NT2RI2001624, NT2RI2001726, NT2RI2001731, NT2RI2001769, NT2RI2001782, NT2RI2001836, NT2RI2001846, NT2RI2001866, NT2RI2001910, NT2RI2001952, NT2RI2002022, NT2RI2002041, NT2RI2002120, NT2RI2002152, NT2RI2002153, NT2RI2002179, NT2RI2002252, NT2RI2002260, NT2RI2002266, NT2RI2002270, NT2RI2002334, NT2RI2002359, NT2RI2002447, NT2RI2002481, NT2RI2002507, NT2RI2002517, NT2RI2002540, NT2RI2002549, NT2RI2002554, NT2RI2002564, NT2RI2002585, NT2RI2002592, NT2RI2002602, NT2RI2002699, NT2RI2002802, NT2RI2002819, NT2RI2002822, NT2RI2002847, NT2RI2002852, NT2RI2002923, NT2RI2002926, NT2RI2002958, NT2RI2002970, NT2RI2003011, NT2RI2003067, NT2RI2003184, NT2RI2003205, NT2RI2003222, NT2RI2003301, NT2RI2003317, NT2RI2003338, NT2RI2003344, NT2RI2003360, NT2RI2003361, NT2RI2003383, NT2RI2003392, NT2RI2003399, NT2RI2003419, NT2RI2003481, NT2RI2003487, NT2RI2003556, NT2RI2003655, NT2RI2003667, NT2RI2003678, NT2RI2003751, NT2RI2003884, NT2RI2003921, NT2RI2003973, NT2RI2003993, NT2RI2004059, NT2RI2004078, NT2RI2004079, NT2RI2004093, NT2RI2004136, NT2RI2004157, NT2RI2004188, NT2RI2004190, NT2RI2004209, NT2RI2004230, NT2RI2004284, NT2RI2004312, NT2RI2004381, NT2RI2004398, NT2RI2004410, NT2RI2004442, NT2RI2004468, NT2RI2004535, NT2RI2004606, NT2RI2004608, NT2RI2004618, NT2RI2004783, NT2RI2004818, NT2RI2004840, NT2RI2004916, NT2RI2004962, NT2RI2004984, NT2RI2004985, NT2RI2005048, NT2RI2005061, NT2RI2005069, NT2RI2005087, NT2RI2005096, NT2RI2005115, NT2RI2005130, NT2RI2005150, NT2RI2005166, NT2RI2005239, NT2RI2005246, NT2RI2005368, NT2RI2005382, NT2RI2005405, NT2RI2005473, NT2RI2005520, NT2RI2005564, NT2RI2005579, NT2RI2005621, NT2RI2005628, NT2RI2005670, NT2RI2005710, NT2RI2005723, NT2RI2005772, NT2RI2005811, NT2RI2005814, NT2RI2005816, NT2RI2005818, NT2RI2005966, NT2RI2006070, NT2RI2006071, NT2RI2006072, NT2RI2006081, NT2RI2006126, NT2RI2006127, NT2RI2006183, NT2RI2006257, NT2RI2006271, NT2RI2006294, NT2RI2006345, NT2RI2006403, NT2RI2006412, NT2RI2006445, NT2RI2006487, NT2RI2006553, NT2RI2006565, NT2RI2006640, NT2RI2006659, NT2RI2006662, NT2RI2006667, NT2RI2006679, NT2RI2006682, NT2RI2006686, NT2RI2006703, NT2RI2006716, NT2RI2006762, NT2RI2006788, NT2RI2006838, NT2RI2006855, NT2RI2006943, NT2RI2006973, NT2RI2007046, NT2RI2007048, NT2RI2007054, NT2RI2007084, NT2RI2007096, NT2RI2007116, NT2RI2007148, NT2RI2007214, NT2RI2007277, NT2RI2007303, NT2RI2007334, NT2RI2007377, NT2RI2007386, NT2RI2007406, NT2RI2007439, NT2RI2007445, NT2RI2007468, NT2RI2007469, NT2RI2007507, NT2RI2007629, NT2RI2007723, NT2RI2007729, NT2RI2007751, NT2RI2007754, NT2RI2007827, NT2RI2007853, NT2RI2007877, NT2RI2007879, NT2RI2007884, NT2RI2007891, NT2RI2007956, NT2RI2007965, NT2RI2007987, NT2RI2008007, NT2RI2008045, NT2RI2008050, NT2RI2008171, NT2RI2008188, NT2RI2008204, NT2RI2008221, NT2RI2008233, NT2RI2008455, NT2RI2008502, NT2RI2008526, NT2RI2008566, NT2RI2008598, NT2RI2008622, NT2RI2008656, NT2RI2008791, NT2RI2008801, NT2RI2008808, NT2RI2008812, NT2RI2008841, NT2RI2008952, NT2RI2009005, NT2RI2009065, NT2RI2009066, NT2RI2009083, NT2RI2009101, NT2RI2009103, NT2RI2009144, NT2RI2009151, NT2RI2009194, NT2RI2009215, NT2RI2009259, NT2RI2009269, NT2RI2009281, NT2RI2009289, NT2RI2009301, NT2RI2009402, NT2RI2009517, NT2RI2009585, NT2RI2009595, NT2RI2009855, NT2RI2010283, NT2RI2010508, NT2RI2010795, NT2RI2011422, NT2RI2011450, NT2RI2011683, NT2RI2011803, NT2RI2012659, NT2RI2012726, NT2RI2012990, NT2RI2013345, NT2RI2013357, NT2RI2013373, NT2RI2014247, NT2RI2014551, NT2RI2014683, NT2RI2014733, NT2RI2015239, NT2RI2015533, NT2RI2016128, NT2RI2016134, NT2RI2017529, NT2RI2018311, NT2RI2018363, NT2RI2018950, NT2RI2019751, NT2RI2019826, NT2RI2020390, NT2RI2020703, NT2RI2021463, NT2RI2021625, NT2RI2022468, NT2RI2022584, NT2RI2023303, NT2RI2023671, NT2RI2024008, NT2RI2024313, NT2RI2024460, NT2RI2024496, NT2RI2024935, NT2RI2025075, NT2RI2025255, NT2RI2025564, NT2RI2025565, NT2RI2025909, NT2RI2025957, NT2RI2025976, NT2RI2026758, NT2RI2027081, NT2RI2027157, NT2RI2027224, NT2RI2027323, NT2RI2027396, NT2RI2027484, NT2RI2027975, NT2RI2028213, NT2RI2028222, NT2RI2028537, NT2RI2028642, NT2RI3000174, NT2RI3000213, NT2RI3000423, NT2RI3000622, NT2RI3001132, NT2RI3001263, NT2RI3001279, NT2RI3001348, NT2RI3001445, NT2RI3001458, NT2RI3001515, NT2RI3001573, NT2RI3001967, NT2RI3002303, NT2RI3002557, NT2RI3002842, NT2RI3003027, NT2RI3003031, NT2RI3003095, NT2RI3003104, NT2RI3003162, NT2RI3003362, NT2RI3003382, NT2RI3003409, NT2RI3003925, NT2RI3004133, NT2RI3004381, NT2RI3004510, NT2RI3005202, NT2RI3005403, NT2RI3005416, NT2RI3005724, NT2RI3005861, NT2RI3005923, NT2RI3005928, NT2RI3006132, NT2RI3006171, NT2RI3006340, NT2RI3006376, NT2RI3006666, NT2RI3006796, NT2RI3007065, NT2RI3007095, NT2RI3007158, NT2RI3007167, NT2RI3007213, NT2RI3007291, NT2RI3007443, NT2RI3007684, NT2RI3007878, NT2RI3007978, NT2RI3008055, NT2RI3008162, NT2RI3008179, NT2RI3008228, NT2RI3008442, NT2RI3008652, NT2RI3008697, NT2RI3008974, NT2RI3009158, NT2RI3009480, NT2RI3009524, NT2RP6000008, NT2RP6000032, NT2RP6000033, NT2RP6000039, NT2RP6000043, NT2RP6000059, NT2RP6000060, NT2RP6000072, NT2RP6000077, NT2RP6000078, NT2RP6000085, NT2RP6000086, NT2RP6000100, NT2RP6000110, NT2RP6000119, NT2RP6000127, NT2RP6000130, NT2RP6000140, NT2RP6000150, NT2RP7000041, NT2RP7000069, NT2RP7000109, NT2RP7000112, NT2RP7000238, NT2RP7000259, NT2RP7000311, NT2RP7000359, NT2RP7000364, NT2RP7000380, NT2RP7000391, NT2RP7000425, NT2RP7000579, NT2RP7000586, NT2RP7000624, NT2RP7000812, NT2RP7000926, NT2RP7001074, NT2RP7001080, NT2RP7001156, NT2RP7001231, NT2RP7001306, NT2RP7001319, NT2RP7001335, NT2RP7001364, NT2RP7001532, NT2RP7001602, NT2RP7001856, NT2RP7001962, NT2RP7002028, NT2RP7002064, NT2RP7002151, NT2RP7002163, NT2RP7002243, NT2RP7002282, NT2RP7002478, NT2RP7002554, NT2RP7002603, NT2RP7002650, NT2RP7002738, NT2RP7002779, NT2RP7002829, NT2RP7002841, NT2RP7002875, NT2RP7002906, NT2RP7002978, NT2RP7003025, NT2RP7003050, NT2RP7003055, NT2RP7003084, NT2RP7003091, NT2RP7003107, NT2RP7003134, NT2RP7003148, NT2RP7003203, NT2RP7003439, NT2RP7003511, NT2RP7003629, NT2RP7003680, NT2RP7003724, NT2RP7004027, NT2RP7004080, NT2RP7004114, NT2RP7004204, NT2RP7004233, NT2RP7004260, NT2RP7004358, NT2RP7004396, NT2RP7004428, NT2RP7004481, NT2RP7004541, NT2RP7004641, NT2RP7004656, NT2RP7004687, NT2RP7004722, NT2RP7004728, NT2RP7004766, NT2RP7004790, NT2RP7004884, NT2RP7004915, NT2RP7004961, NT2RP7004964, NT2RP7004975, NT2RP7005118, NT2RP7005205, NT2RP7005219, NT2RP7005323, NT2RP7005468, NT2RP7005493, NT2RP7005513, NT2RP7005529, NT2RP7005629, NT2RP7005631, NT2RP7005669, NT2RP7005675, NT2RP7005846, NT2RP7006033, NT2RP7006160, NT2RP7006162, NT2RP7006223, NT2RP7006263, NT2RP7006296, NT2RP7006304, NT2RP7006374, NT2RP7006395, NT2RP7006408, NT2RP7006457, NT2RP7006539, NT2RP7006547, NT2RP7006601, NT2RP7006619, NT2RP7006621, NT2RP7006636, NT2RP7006853, NT2RP7006886, NT2RP7006887, NT2RP7006980, NT2RP7006986, NT2RP7006995, NT2RP7007114, NT2RP7007221, NT2RP7007226, NT2RP7007252, NT2RP7007269, NT2RP7007310, NT2RP7007359, NT2RP7007381, NT2RP7007387, NT2RP7007406, NT2RP7007480, NT2RP7007504, NT2RP7007530, NT2RP7007537, NT2RP7007580, NT2RP7007594, NT2RP7007617, NT2RP7007643, NT2RP7007766, NT2RP7007925, NT2RP7007930, NT2RP7008013, NT2RP7008015, NT2RP7008133, NT2RP7008137, NT2RP7008142, NT2RP7008144, NT2RP7008315, NT2RP7008360, NT2RP7008396, NT2RP7008406, NT2RP7008435, NT2RP7008441, NT2RP7008454, NT2RP7008544, NT2RP7008550, NT2RP7008557, NT2RP7008623, NT2RP7008657, NT2RP7008714, NT2RP7008720, NT2RP7008855, NT2RP7008863, NT2RP7009019, NT2RP7009030, NT2RP7009097, NT2RP7009168, NT2RP7009215, NT2RP7009225, NT2RP7009236, NT2RP7009253, NT2RP7009267, NT2RP7009322, NT2RP7009363, NT2RP7009370, NT2RP7009394, NT2RP7009397, NT2RP7009429, NT2RP7009439, NT2RP7009466, NT2RP7009481, NT2RP7009498, NT2RP7009502, NT2RP7009507, NT2RP7009577, NT2RP7009743, NT2RP7009867, NT2RP7010109, NT2RP7010128, NT2RP7010235, NT2RP7010275, NT2RP7010521, NT2RP7010599, NT2RP7010612, NT2RP7010817, NT2RP7011086, NT2RP7011132, NT2RP7011268, NT2RP7011318, NT2RP7011452, NT2RP7011570, NT2RP7011721, NT2RP7012291, NT2RP7012516, NT2RP7012776, NT2RP7013002, NT2RP7013374, NT2RP7013499, NT2RP7013573, NT2RP7013729, NT2RP7013764, NT2RP7013795, NT2RP7013999, NT2RP7014178, NT2RP7014348, NT2RP7014420, NT2RP7014583, NT2RP7014721, NT2RP7014743, NT2RP7014778, NT2RP7014906, NT2RP7014910, NT2RP7015080, NT2RP7015431, NT2RP7015503, NT2RP7015512, NT2RP7015676, NT2RP7015789, NT2RP7015996, NT2RP7016508, NT2RP7016574, NT2RP7016622, NT2RP7016911, NT2RP7017139, NT2RP7017284, NT2RP7017365, NT2RP7017474, NT2RP7017546, NT2RP7017567, NT2RP7017795, NT2RP7017971, NT2RP7018032, NT2RP7018126, NT2RP7018197, NT2RP7018206, NT2RP7018340, NT2RP7018586, NT2RP7018802, NT2RP7018871, NT2RP7019064, NT2RP7019135, NT2RP7019273, NT2RP7019367, NT2RP7019401, NT2RP7019445, NT2RP7019543, NT2RP7019682, NT2RP7019835, NT2RP7020112, NT2RP7020123, NT2RP7020343, NT2RP7020379, NT2RP8000137, NT2RP8000296, NT2RP8000435, NT2RP8000483, NT2RP8000521, NT2RP8000633, NT2RP8001363, NT2RP8001407, NT2RP8001584, NT2RP8001604, NT2RP8001605, NT2RP8003490, NT2RP8003657, NT2RP8003787, NT2RP8004306, NT2RP8005546, NT2RP8006452, NT2RP8006521, NT2RP8007416, NT2RP8007503, NT2RP8007715, NT2RP8007920, NT2RP8008057, NT2RP8009248, NTONG1000006, NTONG1000047, NTONG1000052, NTONG1000075, NTONG1000087, NTONG1000123, NTONG1000130, NTONG1000161, NTONG1000172, NTONG1000182, NTONG1000213, NTONG1000214, NTONG1000246, NTONG1000247, NTONG2000040, NTONG2000107, NTONG2000231, NTONG2000334, NTONG2000363, NTONG2000413, NTONG2000492, NTONG2000499, NTONG2000531, NTONG2000583, NTONG2000800, NTONG2000858, NTONG2000876, NTONG2000878, NTONG2000966, NTONG2000985, NTONG2001014, NTONG2001079, NTONG2001157, NTONG2001173, NTONG2001220, NTONG2001362, NTONG2001428, NTONG2001532, NTONG2001612, NTONG2001619, NTONG2001642, NTONG2001657, NTONG2001676, NTONG2001762, NTONG2002278, NTONG2002582, NTONG2002807, NTONG2002948, NTONG2002970, NTONG2002985, NTONG2003158, NTONG2003210, NTONG2003316, NTONG2003409, NTONG2003454, NTONG2003515, NTONG2003805, NTONG2003839, NTONG2003852, NTONG2003897, NTONG2003928, NTONG2004095, NTONG2004308, NTONG2004521, NTONG2004614, NTONG2004690, NTONG2004806, NTONG2004829, NTONG2004844, NTONG2004991, NTONG2005062, NTONG2005086, NTONG2005137, NTONG2005153, NTONG2005265, NTONG2005277, NTONG2005363, NTONG2005373, NTONG2005391, NTONG2005480, NTONG2005577, NTONG2005657, NTONG2005801, NTONG2005822, NTONG2005897, NTONG2005969, NTONG2006099, NTONG2006187, NTONG2006301, NTONG2006324, NTONG2006354, NTONG2006440, NTONG2006484, NTONG2006501, NTONG2006646, NTONG2006709, NTONG2006783, NTONG2007020, NTONG2007028, NTONG2007034, NTONG2007249, NTONG2007517, NTONG2007522, NTONG2007658, NTONG2007693, NTONG2007756, NTONG2008088, NTONG2008093, NTONG2008143, NTONG2008365, NTONG2008672, NTONG2008862, NTONG2008939, NTONG2008944, NTONG2009060, NTONG2009068, NTONG2009229, NTONG2009233, NTONG2009468, NTONG2009576, OCBBF1000016, OCBBF1000030, OCBBF1000042, OCBBF1000049, OCBBF1000054, OCBBF1000067, OCBBF1000080, OCBBF1000085, OCBBF1000091, OCBBF1000104, OCBBF1000114, OCBBF1000118, OCBBF1000119, OCBBF1000122, OCBBF1000130, OCBBF1000138, OCBBF1000145, OCBBF1000153, OCBBF1000175, OCBBF1000185, OCBBF1000192, OCBBF1000254, OCBBF2000013, OCBBF2000126, OCBBF2000178, OCBBF2000231, OCBBF2000277, OCBBF2000287, OCBBF2000323, OCBBF2000452, OCBBF2000467, OCBBF2000703, OCBBF2000712, OCBBF2000719, OCBBF2000824, OCBBF2000831, OCBBF2000904, OCBBF2000982, OCBBF2000998, OCBBF2001075, OCBBF2001101, OCBBF2001124, OCBBF2001166, OCBBF2001176, OCBBF2001186, OCBBF2001196, OCBBF2001210, OCBBF2001252, OCBBF2001307, OCBBF2001323, OCBBF2001389, OCBBF2001402, OCBBF2001408, OCBBF2001416, OCBBF2001473, OCBBF2001494, OCBBF2001527, OCBBF2001528, OCBBF2001586, OCBBF2001639, OCBBF2001681, OCBBF2001706, OCBBF2001749, OCBBF2001794, OCBBF2001910, OCBBF2001931, OCBBF2001961, OCBBF2001983, OCBBF2002015, OCBBF2002083, OCBBF2002124, OCBBF2002161, OCBBF2002290, OCBBF2002357, OCBBF2002376, OCBBF2002615, OCBBF2002626, OCBBF2002656, OCBBF2002663, OCBBF2002805, OCBBF2002865, OCBBF2002920, OCBBF2002980, OCBBF2003028, OCBBF2003052, OCBBF2003091, OCBBF2003246, OCBBF2003327, OCBBF2003518, OCBBF2003543, OCBBF2003593, OCBBF2003744, OCBBF2003819, OCBBF2003925, OCBBF2004038, OCBBF2004104, OCBBF2004147, OCBBF2004168, OCBBF2004235, OCBBF2004259, OCBBF2004273, OCBBF2004385, OCBBF2004418, OCBBF2004478, OCBBF2004482, OCBBF2004533, OCBBF2004567, OCBBF2004612, OCBBF2004647, OCBBF2004669, OCBBF2004757, OCBBF2004826, OCBBF2004866, OCBBF2004883, OCBBF2004889, OCBBF2004930, OCBBF2004984, OCBBF2005066, OCBBF2005077, OCBBF2005161, OCBBF2005343, OCBBF2005349, OCBBF2005373, OCBBF2005420, OCBBF2005428, OCBBF2005433, OCBBF2005476, OCBBF2005546, OCBBF2005843, OCBBF2005901, OCBBF2006005, OCBBF2006030, OCBBF2006058, OCBBF2006113, OCBBF2006154, OCBBF2006172, OCBBF2006214, OCBBF2006241, OCBBF2006313, OCBBF2006388, OCBBF2006438, OCBBF2006567, OCBBF2006624, OCBBF2006639, OCBBF2006660, OCBBF2006764, OCBBF2006849, OCBBF2006859, OCBBF2006972, OCBBF2006987, OCBBF2007028, OCBBF2007039, OCBBF2007051, OCBBF2007068, OCBBF2007114, OCBBF2007121, OCBBF2007184, OCBBF2007194, OCBBF2007196, OCBBF2007224, OCBBF2007238, OCBBF2007414, OCBBF2007415, OCBBF2007428, OCBBF2007478, OCBBF2007485, OCBBF2007520, OCBBF2007555, OCBBF2007610, OCBBF2007622, OCBBF2007756, OCBBF2007762, OCBBF2007931, OCBBF2007946, OCBBF2008005, OCBBF2008041, OCBBF2008116, OCBBF2008138, OCBBF2008144, OCBBF2008283, OCBBF2008330, OCBBF2008340, OCBBF2008466, OCBBF2008483, OCBBF2008511, OCBBF2008520, OCBBF2008569, OCBBF2008586, OCBBF2008640, OCBBF2008691, OCBBF2008701, OCBBF2008724, OCBBF2008760, OCBBF2008768, OCBBF2008770, OCBBF2008775, OCBBF2008790, OCBBF2008814, OCBBF2008822, OCBBF2009095, OCBBF2009115, OCBBF2009301, OCBBF2009352, OCBBF2009391, OCBBF2009536, OCBBF2009571, OCBBF2009583, OCBBF2009603, OCBBF2009772, OCBBF2009788, OCBBF2009836, OCBBF2009920, OCBBF2009926, OCBBF2010040, OCBBF2010140, OCBBF2010281, OCBBF2010313, OCBBF2010404, OCBBF2010416, OCBBF2010420, OCBBF2010557, OCBBF2010604, OCBBF2010709, OCBBF2010792, OCBBF2010819, OCBBF2010841, OCBBF2010843, OCBBF2010863, OCBBF2010871, OCBBF2010931, OCBBF2010945, OCBBF2010978, OCBBF2010989, OCBBF2011021, OCBBF2011137, OCBBF2011160, OCBBF2011177, OCBBF2011228, OCBBF2011232, OCBBF2011283, OCBBF2011311, OCBBF2011536, OCBBF2011625, OCBBF2011669, OCBBF2011685, OCBBF2011706, OCBBF2011722, OCBBF2011767, OCBBF2011855, OCBBF2011872, OCBBF2011887, OCBBF2011897, OCBBF2011914, OCBBF2011960, OCBBF2011981, OCBBF2012001, OCBBF2012028, OCBBF2012039, OCBBF2012095, OCBBF2012139, OCBBF2012191, OCBBF2012262, OCBBF2012320, OCBBF2012436, OCBBF2012525, OCBBF2012553, OCBBF2012678, OCBBF2012704, OCBBF2012714, OCBBF2012755, OCBBF2012812, OCBBF2012821, OCBBF2012881, OCBBF2012908, OCBBF2012936, OCBBF2012990, OCBBF2013011, OCBBF2013049, OCBBF2013091, OCBBF2013123, OCBBF2013127, OCBBF2013149, OCBBF2013208, OCBBF2013285, OCBBF2013319, OCBBF2013324, OCBBF2013366, OCBBF2013481, OCBBF2013507, OCBBF2013721, OCBBF2013789, OCBBF2013883, OCBBF2013926, OCBBF2014052, OCBBF2014064, OCBBF2014089, OCBBF2014292, OCBBF2014322, OCBBF2014386, OCBBF2014541, OCBBF2014576, OCBBF2014707, OCBBF2014745, OCBBF2014828, OCBBF2014873, OCBBF2014880, OCBBF2014928, OCBBF2015031, OCBBF2015081, OCBBF2015115, OCBBF2015232, OCBBF2015233, OCBBF2015285, OCBBF2015334, OCBBF2015335, OCBBF2015503, OCBBF2015506, OCBBF2015599, OCBBF2015645, OCBBF2015659, OCBBF2015751, OCBBF2015797, OCBBF2015931, OCBBF2015980, OCBBF2016038, OCBBF2016405, OCBBF2016467, OCBBF2016590, OCBBF2016591, OCBBF2016612, OCBBF2016689, OCBBF2016690, OCBBF2016729, OCBBF2016841, OCBBF2016928, OCBBF2017035, OCBBF2017055, OCBBF2017069, OCBBF2017306, OCBBF2017325, OCBBF2017398, OCBBF2017458, OCBBF2017489, OCBBF2017516, OCBBF2017665, OCBBF2017754, OCBBF2017815, OCBBF2017882, OCBBF2017888, OCBBF2017893, OCBBF2017920, OCBBF2018014, OCBBF2018084, OCBBF2018167, OCBBF2018206, OCBBF2018229, OCBBF2018234, OCBBF2018380, OCBBF2018563, OCBBF2018581, OCBBF2018618, OCBBF2018663, OCBBF2018687, OCBBF2018707, OCBBF2018828, OCBBF2018934, OCBBF2018956, OCBBF2019108, OCBBF2019195, OCBBF2019327, OCBBF2019684, OCBBF2019761, OCBBF2019823, OCBBF2019950, OCBBF2020048, OCBBF2020318, OCBBF2020343, OCBBF2020453, OCBBF2020741, OCBBF2020801, OCBBF2020825, OCBBF2020838, OCBBF2021020, OCBBF2021214, OCBBF2021286, OCBBF2021323, OCBBF2021518, OCBBF2021788, OCBBF2021833, OCBBF2022351, OCBBF2022573, OCBBF2022574, OCBBF2023162, OCBBF2023598, OCBBF2023643, OCBBF2024463, OCBBF2024589, OCBBF2024719, OCBBF2024779, OCBBF2024781, OCBBF2024850, OCBBF2025028, OCBBF2025115, OCBBF2025198, OCBBF2025451, OCBBF2025458, OCBBF2025527, OCBBF2025631, OCBBF2025730, OCBBF2026025, OCBBF2026035, OCBBF2026144, OCBBF2026368, OCBBF2026645, OCBBF2026649, OCBBF2026690, OCBBF2026981, OCBBF2027197, OCBBF2027354, OCBBF2027423, OCBBF2027478, OCBBF2027481, OCBBF2027511, OCBBF2027661, OCBBF2027728, OCBBF2027782, OCBBF2027868, OCBBF2028055, OCBBF2028173, OCBBF2028421, OCBBF2029471, OCBBF2029901, OCBBF2030116, OCBBF2030329, OCBBF2030354, OCBBF2030517, OCBBF2030574, OCBBF2030708, OCBBF2030927, OCBBF2030963, OCBBF2031167, OCBBF2031198, OCBBF2031366, OCBBF2031561, OCBBF2032152, OCBBF2032274, OCBBF2032539, OCBBF2032590, OCBBF2032599, OCBBF2032611, OCBBF2032671, OCBBF2033295, OCBBF2033413, OCBBF2033869, OCBBF2033948, OCBBF2034333, OCBBF2034529, OCBBF2034637, OCBBF2034906, OCBBF2035110, OCBBF2035214, OCBBF2035226, OCBBF2035390, OCBBF2035564, OCBBF2035658, OCBBF2035823, OCBBF2035885, OCBBF2035916, OCBBF2036019, OCBBF2036031, OCBBF2036225, OCBBF2036476, OCBBF2036743, OCBBF2036752, OCBBF2037068, OCBBF2037340, OCBBF2037398, OCBBF2037464, OCBBF2037547, OCBBF2037598, OCBBF2037638, OCBBF2038238, OCBBF2038285, OCBBF2038317, OCBBF3000097, OCBBF3000213, OCBBF3000296, OCBBF3000323, OCBBF3000372, OCBBF3000380, OCBBF3000743, OCBBF3000830, OCBBF3001076, OCBBF3001202, OCBBF3001616, OCBBF3002553, OCBBF3002600, OCBBF3002654, OCBBF3003103, OCBBF3003209, OCBBF3003592, OCBBF3003745, OCBBF3003761, OCBBF3004264, OCBBF3004314, OCBBF3004972, OCBBF3005330, OCBBF3005597, OCBBF3005843, OCBBF3006802, OCBBF3006986, OCBBF3007078, OCBBF3007704, OCBBF3008230, OCBBF3008392, OCBBF3008835, OCBBF3009192, OCBBF3009244, OCBBF3009279, PANCR1000012, PANCR1000021, PANCR1000081, PANCR1000086, PANCR1000091, PANCR1000185, PEBLM1000024, PEBLM1000029, PEBLM1000034, PEBLM1000062, PEBLM1000066, PEBLM1000068, PEBLM1000071, PEBLM1000083, PEBLM1000144, PEBLM1000147, PEBLM1000180, PEBLM2000030, PEBLM2000112, PEBLM2000126, PEBLM2000147, PEBLM2000170, PEBLM2000180, PEBLM2000213, PEBLM2000248, PEBLM2000267, PEBLM2000270, PEBLM2000308, PEBLM2000321, PEBLM2000326, PEBLM2000333, PEBLM2000338, PEBLM2000479, PEBLM2000502, PEBLM2001072, PEBLM2001312, PEBLM2001465, PEBLM2001488, PEBLM2001803, PEBLM2002432, PEBLM2002455, PEBLM2002594, PEBLM2002749, PEBLM2002887, PEBLM2003426, PEBLM2003765, PEBLM2003914, PEBLM2003935, PEBLM2004015, PEBLM2004216, PEBLM2004290, PEBLM2004497, PEBLM2004733, PEBLM2005282, PEBLM2005615, PEBLM2005632, PEBLM2005697, PEBLM2006031, PEBLM2006036, PEBLM2006049, PEBLM2006113, PEBLM2006135, PEBLM2006215, PEBLM2006283, PEBLM2006298, PEBLM2006366, PEBLM2006709, PEBLM2006912, PEBLM2007112, PEBLM2007140, PEBLM2007296, PEBLM2007437, PEBLM2007447, PEBLM2007598, PEBLM2007832, PEBLM2007834, PEBLM2008576, PEBLM2008605, PEBLM2008826, PEBLM2008861, PERIC1000025, PERIC1000147, PERIC2000180, PERIC2000214, PERIC2000386, PERIC2000387, PERIC2000422, PERIC2000473, PERIC2000478, PERIC2000889, PERIC2000914, PERIC2001227, PERIC2001228, PERIC2001379, PERIC2001504, PERIC2001703, PERIC2001764, PERIC2002243, PERIC2002272, PERIC2002452, PERIC2002766, PERIC2003001, PERIC2003090, PERIC2003287, PERIC2003349, PERIC2003452, PERIC2003699, PERIC2003720, PERIC2003794, PERIC2003834, PERIC2003919, PERIC2003957, PERIC2004028, PERIC2004131, PERIC2004259, PERIC2004379, PERIC2004429, PERIC2004510, PERIC2004613, PERIC2004909, PERIC2005111, PERIC2005117, PERIC2005305, PERIC2005347, PERIC2005370, PERIC2005936, PERIC2006035, PERIC2006121, PERIC2006443, PERIC2006945, PERIC2006960, PERIC2007439, PERIC2007914, PERIC2008008, PERIC2008385, PERIC2009001, PERIC2009086, PERIC2009329, PERIC2009566, PLACE5000001, PLACE5000037, PLACE5000058, PLACE5000066, PLACE5000067, PLACE5000068, PLACE5000070, PLACE5000080, PLACE5000105, PLACE5000113, PLACE5000115, PLACE5000116, PLACE5000129, PLACE5000139, PLACE5000153, PLACE5000170, PLACE5000171, PLACE5000172, PLACE5000178, PLACE5000245, PLACE5000260, PLACE5000282, PLACE5000297, PLACE5000372, PLACE5000492, PLACE5000522, PLACE5000527, PLACE6000012, PLACE6000044, PLACE6000055, PLACE6000070, PLACE6000137, PLACE6000191, PLACE6000205, PLACE6000231, PLACE6000263, PLACE6000296, PLACE6000314, PLACE6000325, PLACE6000348, PLACE6000371, PLACE6000424, PLACE6000426, PLACE6000429, PLACE6000450, PLACE6000463, PLACE6000523, PLACE6000550, PLACE6000552, PLACE6000555, PLACE6000619, PLACE6000630, PLACE6000953, PLACE6001118, PLACE6001153, PLACE6001185, PLACE6001262, PLACE6001294, PLACE6001443, PLACE6001536, PLACE6001557, PLACE6001712, PLACE6001740, PLACE6001823, PLACE6001886, PLACE6001923, PLACE6001925, PLACE6001933, PLACE6002011, PLACE6002016, PLACE6002056, PLACE6002157, PLACE6002312, PLACE6002323, PLACE6002345, PLACE6002419, PLACE6002462, PLACE6002647, PLACE6002668, PLACE6002692, PLACE6002699, PLACE6002710, PLACE6002871, PLACE6002949, PLACE6002960, PLACE6003004, PLACE6003038, PLACE6003077, PLACE6003094, PLACE6003109, PLACE6003204, PLACE6003218, PLACE6003372, PLACE6003399, PLACE6003539, PLACE6003621, PLACE6003705, PLACE6003740, PLACE6003771, PLACE6003796, PLACE6003839, PLACE6003850, PLACE6004005, PLACE6004219, PLACE6004336, PLACE6004368, PLACE6004380, PLACE6004396, PLACE6004397, PLACE6004454, PLACE6004464, PLACE6004491, PLACE6004578, PLACE6004663, PLACE6004687, PLACE6004738, PLACE6004931, PLACE6004966, PLACE6004993, PLACE6005007, PLACE6005029, PLACE6005108, PLACE6005231, PLACE6005234, PLACE6005283, PLACE6005328, PLACE6005351, PLACE6005423, PLACE6005482, PLACE6005487, PLACE6005535, PLACE6005546, PLACE6005559, PLACE6005579, PLACE6005691, PLACE6005786, PLACE6006042, PLACE6006077, PLACE6006137, PLACE6006158, PLACE6006186, PLACE6006217, PLACE6006222, PLACE6006266, PLACE6006287, PLACE6006394, PLACE6006474, PLACE6006566, PLACE6006697, PLACE6006822, PLACE6006871, PLACE6006905, PLACE6006988, PLACE6007050, PLACE6007180, PLACE6007239, PLACE6007242, PLACE6007309, PLACE6007373, PLACE6007380, PLACE6007433, PLACE6007436, PLACE6007482, PLACE6007687, PLACE6007787, PLACE6007798, PLACE6007807, PLACE6007925, PLACE6008036, PLACE6008094, PLACE6008126, PLACE6008285, PLACE6008444, PLACE6008453, PLACE6008640, PLACE6008750, PLACE6008768, PLACE6008775, PLACE6008793, PLACE6008824, PLACE6008989, PLACE6009006, PLACE6009008, PLACE6009228, PLACE6009237, PLACE6009338, PLACE6009419, PLACE6009430, PLACE6009482, PLACE6009524, PLACE6009527, PLACE6009560, PLACE6009590, PLACE6009821, PLACE6009835, PLACE6009853, PLACE6010463, PLACE6010484, PLACE6010485, PLACE6010568, PLACE6010701, PLACE6010704, PLACE6010732, PLACE6010765, PLACE6010848, PLACE6010925, PLACE6010936, PLACE6010991, PLACE6011041, PLACE6011057, PLACE6011102, PLACE6011156, PLACE6011211, PLACE6011260, PLACE6011334, PLACE6011627, PLACE6011774, PLACE6011881, PLACE6011907, PLACE6011970, PLACE6011975, PLACE6012028, PLACE6012108, PLACE6012168, PLACE6012297, PLACE6012308, PLACE6012574, PLACE6012908, PLACE6012936, PLACE6012942, PLACE6013232, PLACE6013288, PLACE6013386, PLACE6013400, PLACE6013650, PLACE6013672, PLACE6013883, PLACE6013884, PLACE6013885, PLACE6014043, PLACE6014064, PLACE6014516, PLACE6014882, PLACE6015051, PLACE6015211, PLACE6015322, PLACE6015445, PLACE6015460, PLACE6015513, PLACE6015591, PLACE6015729, PLACE6015731, PLACE6015939, PLACE6016030, PLACE6016093, PLACE6016105, PLACE6016160, PLACE6016210, PLACE6016254, PLACE6016383, PLACE6016942, PLACE6016984, PLACE6017002, PLACE6017431, PLACE6017564, PLACE6017578, PLACE6017626, PLACE6017701, PLACE6017714, PLACE6017788, PLACE6017791, PLACE6018031, PLACE6018107, PLACE6018187, PLACE6018235, PLACE6018287, PLACE6018441, PLACE6018497, PLACE6018769, PLACE6018834, PLACE6018843, PLACE6018863, PLACE6018938, PLACE6019195, PLACE6019385, PLACE6019542, PLACE6019600, PLACE6019674, PLACE6019676, PLACE6019701, PLACE6019932, PLACE6020031, PLACE6020145, PLACE7000167, PLACE7000170, PLACE7000266, PLACE7000333, PLACE7000410, PLACE7000502, PLACE7000707, PLACE7001022, PLACE7001544, PLACE7001759, PLACE7001936, PLACE7002303, PLACE7002641, PLACE7003639, PLACE7003657, PLACE7003684, PLACE7003985, PLACE7004961, PLACE7005169, PLACE7005671, PLACE7005840, PLACE7006051, PLACE7006090, PLACE7006240, PLACE7006268, PLACE7006275, PLACE7006498, PLACE7006540, PLACE7007379, PLACE7007644, PLACE7007973, PLACE7008136, PLACE7008261, PLACE7008431, PLACE7008623, PLACE7008766, PLACE7009563, PROST1000039, PROST1000065, PROST1000083, PROST1000085, PROST1000110, PROST1000120, PROST1000123, PROST1000136, PROST1000144, PROST1000145, PROST1000152, PROST1000167, PROST1000184, PROST1000215, PROST1000217, PROST1000246, PROST1000262, PROST1000298, PROST1000322, PROST1000334, PROST1000362, PROST1000377, PROST1000383, PROST1000412, PROST1000419, PROST1000451, PROST1000480, PROST1000485, PROST1000493, PROST1000512, PROST1000527, PROST1000528, PROST1000536, PROST1000559, PROST1000564, PROST1000575, PROST2000036, PROST2000053, PROST2000067, PROST2000079, PROST2000105, PROST2000143, PROST2000162, PROST2000203, PROST2000206, PROST2000212, PROST2000241, PROST2000267, PROST2000273, PROST2000274, PROST2000277, PROST2000325, PROST2000337, PROST2000432, PROST2000452, PROST2000463, PROST2000470, PROST2000505, PROST2000567, PROST2000572, PROST2000717, PROST2000760, PROST2000761, PROST2000835, PROST2000893, PROST2000961, PROST2001002, PROST2001116, PROST2001138, PROST2001180, PROST2001213, PROST2001283, PROST2001414, PROST2001415, PROST2001465, PROST2001540, PROST2001552, PROST2001599, PROST2001611, PROST2001636, PROST2001739, PROST2001796, PROST2001805, PROST2001823, PROST2001883, PROST2001899, PROST2001997, PROST2001998, PROST2002078, PROST2002101, PROST2002162, PROST2002212, PROST2002227, PROST2002338, PROST2002425, PROST2002488, PROST2002489, PROST2002527, PROST2002591, PROST2002602, PROST2002633, PROST2002682, PROST2002685, PROST2002722, PROST2002736, PROST2002842, PROST2002897, PROST2002906, PROST2002927, PROST2002960, PROST2003102, PROST2003117, PROST2003210, PROST2003302, PROST2003303, PROST2003324, PROST2003338, PROST2003340, PROST2003396, PROST2003428, PROST2003472, PROST2003517, PROST2003537, PROST2003563, PROST2003577, PROST2003583, PROST2003586, PROST2003628, PROST2003635, PROST2003674, PROST2003676, PROST2003725, PROST2003732, PROST2003775, PROST2003922, PROST2003930, PROST2004115, PROST2004142, PROST2004146, PROST2004161, PROST2004251, PROST2004258, PROST2004332, PROST2004481, PROST2004526, PROST2004570, PROST2004727, PROST2004739, PROST2004742, PROST2004744, PROST2004817, PROST2005067, PROST2005076, PROST2005093, PROST2005121, PROST2005131, PROST2005143, PROST2005228, PROST2005272, PROST2005285, PROST2005426, PROST2005466, PROST2005630, PROST2005683, PROST2005788, PROST2005793, PROST2005880, PROST2005886, PROST2005904, PROST2005919, PROST2005943, PROST2006008, PROST2006020, PROST2006030, PROST2006196, PROST2006201, PROST2006282, PROST2006343, PROST2006450, PROST2006491, PROST2006510, PROST2006536, PROST2006579, PROST2006688, PROST2006737, PROST2006766, PROST2006782, PROST2006933, PROST2006988, PROST2007122, PROST2007200, PROST2007237, PROST2007248, PROST2007289, PROST2007317, PROST2007328, PROST2007382, PROST2007389, PROST2007416, PROST2007528, PROST2007818, PROST2007871, PROST2007950, PROST2007956, PROST2007974, PROST2007988, PROST2008079, PROST2008088, PROST2008243, PROST2008245, PROST2008268, PROST2008447, PROST2008468, PROST2008472, PROST2008516, PROST2008724, PROST2008770, PROST2008835, PROST2008993, PROST2009022, PROST2009208, PROST2009222, PROST2009254, PROST2009273, PROST2009320, PROST2009347, PROST2009365, PROST2009388, PROST2009400, PROST2009470, PROST2009483, PROST2009571, PROST2009731, PROST2009736, PROST2009795, PROST2009901, PROST2009909, PROST2010046, PROST2010219, PROST2010250, PROST2010318, PROST2010326, PROST2010382, PROST2010400, PROST2010545, PROST2010579, PROST2010606, PROST2010885, PROST2011012, PROST2011038, PROST2011105, PROST2011297, PROST2011439, PROST2011482, PROST2011631, PROST2011660, PROST2012005, PROST2012007, PROST2012016, PROST2012088, PROST2012157, PROST2012190, PROST2012249, PROST2012353, PROST2012400, PROST2012448, PROST2012504, PROST2012542, PROST2012550, PROST2012740, PROST2012745, PROST2012780, PROST2012888, PROST2012890, PROST2013032, PROST2013053, PROST2013121, PROST2013260, PROST2013327, PROST2013531, PROST2013605, PROST2013627, PROST2013873, PROST2013880, PROST2014422, PROST2014585, PROST2014601, PROST2014659, PROST2014862, PROST2014916, PROST2014925, PROST2015124, PROST2015137, PROST2015198, PROST2015243, PROST2015246, PROST2015251, PROST2015287, PROST2015332, PROST2015457, PROST2015464, PROST2015537, PROST2015545, PROST2015551, PROST2015636, PROST2015710, PROST2015756, PROST2015877, PROST2015900, PROST2015924, PROST2015932, PROST2016195, PROST2016246, PROST2016351, PROST2016379, PROST2016444, PROST2016462, PROST2016499, PROST2016512, PROST2016566, PROST2016582, PROST2016668, PROST2016684, PROST2016777, PROST2016829, PROST2016860, PROST2016918, PROST2016980, PROST2017098, PROST2017128, PROST2017203, PROST2017367, PROST2017413, PROST2017441, PROST2017578, PROST2017612, PROST2017617, PROST2017700, PROST2017701, PROST2017729, PROST2017836, PROST2017910, PROST2017972, PROST2018030, PROST2018235, PROST2018437, PROST2018487, PROST2018511, PROST2018583, PROST2018588, PROST2018607, PROST2018788, PROST2018902, PROST2018922, PROST2018977, PROST2019164, PROST2019253, PROST2019296, PROST2019398, PROST2019487, PROST2019781, PUAEN1000039, PUAEN1000057, PUAEN1000085, PUAEN1000087, PUAEN1000121, PUAEN1000147, PUAEN1000161, PUAEN1000175, PUAEN1000239, PUAEN1000275, PUAEN1000276, PUAEN1000288, PUAEN1000322, PUAEN2000080, PUAEN2000152, PUAEN2000175, PUAEN2000247, PUAEN2000394, PUAEN2000497, PUAEN2000594, PUAEN2000684, PUAEN2000942, PUAEN2001260, PUAEN2001345, PUAEN2001526, PUAEN2001586, PUAEN2001882, PUAEN2002473, PUAEN2002489, PUAEN2002552, PUAEN2002568, PUAEN2002616, PUAEN2002758, PUAEN2003079, PUAEN2003116, PUAEN2003408, PUAEN2003517, PUAEN2003954, PUAEN2004067, PUAEN2004083, PUAEN2004400, PUAEN2004511, PUAEN2004525, PUAEN2004875, PUAEN2005110, PUAEN2005247, PUAEN2005502, PUAEN2005588, PUAEN2005930, PUAEN2006029, PUAEN2006328, PUAEN2006335, PUAEN2006578, PUAEN2006639, PUAEN2006761, PUAEN2007044, PUAEN2007350, PUAEN2007785, PUAEN2007898, PUAEN2008123, PUAEN2008228, PUAEN2008314, PUAEN2008515, PUAEN2008815, PUAEN2008939, PUAEN2008980, PUAEN2008985, PUAEN2009534, PUAEN2009655, PUAEN2009795, PUAEN2009852, PUAEN2010346, PUAEN2010824, RECTM1000051, RECTM1000141, RECTM2000220, RECTM2000349, RECTM2000510, RECTM2001307, RECTM2001347, RECTM2001519, RECTM2001666, RECTM2001691, RECTM2001749, RECTM2002172, RECTM2002602, RECTM2002632, SALGL1000005, SALGL1000024, SALGL1000028, SALGL1000047, SALGL1000065, SALGL1000107, SALGL1000157, SALGL1000171, SKMUS1000014, SKMUS1000030, SKMUS1000064, SKMUS1000067, SKMUS1000084, SKMUS1000102, SKMUS1000104, SKMUS1000110, SKMUS1000118, SKMUS1000124, SKMUS1000129, SKMUS2000020, SKMUS2000061, SKMUS2000074, SKMUS2000078, SKMUS2000117, SKMUS2000137, SKMUS2000198, SKMUS2000243, SKMUS2000271, SKMUS2000287, SKMUS2000317, SKMUS2000330, SKMUS2000339, SKMUS2000343, SKMUS2000365, SKMUS2000380, SKMUS2000390, SKMUS2000416, SKMUS2000458, SKMUS2000467, SKMUS2000468, SKMUS2000484, SKMUS2000515, SKMUS2000679, SKMUS2000690, SKMUS2000701, SKMUS2000705, SKMUS2000710, SKMUS2000724, SKMUS2000726, SKMUS2000757, SKMUS2000774, SKMUS2000780, SKMUS2000847, SKMUS2000863, SKMUS2000873, SKMUS2000894, SKMUS2000898, SKMUS2000902, SKMUS2000931, SKMUS2000933, SKMUS2000945, SKMUS2000961, SKMUS2000973, SKMUS2000980, SKMUS2001008, SKMUS2001014, SKMUS2001129, SKMUS2001147, SKMUS2001157, SKMUS2001164, SKMUS2001199, SKMUS2001201, SKMUS2001215, SKMUS2001247, SKMUS2001254, SKMUS2001271, SKMUS2001287, SKMUS2001323, SKMUS2001364, SKMUS2001398, SKMUS2001402, SKMUS2001412, SKMUS2001492, SKMUS2001501, SKMUS2001543, SKMUS2001580, SKMUS2001585, SKMUS2001608, SKMUS2001631, SKMUS2001662, SKMUS2001663, SKMUS2001668, SKMUS2001671, SKMUS2001683, SKMUS2001693, SKMUS2001695, SKMUS2001703, SKMUS2001740, SKMUS2001742, SKMUS2001823, SKMUS2001850, SKMUS2002077, SKMUS2002084, SKMUS2002153, SKMUS2002475, SKMUS2002602, SKMUS2002634, SKMUS2002693, SKMUS2002821, SKMUS2002840, SKMUS2002920, SKMUS2003034, SKMUS2003074, SKMUS2003168, SKMUS2003194, SKMUS2003744, SKMUS2004044, SKMUS2004047, SKMUS2004483, SKMUS2004667, SKMUS2004897, SKMUS2004903, SKMUS2004908, SKMUS2005428, SKMUS2006394, SKMUS2006481, SKMUS2006755, SKMUS2007315, SKMUS2007359, SKMUS2007568, SKMUS2007740, SKMUS2007816, SKMUS2007915, SKMUS2008338, SKMUS2008407, SKMUS2008474, SKMUS2008585, SKMUS2008607, SKMUS2009190, SKMUS2009232, SKMUS2009479, SKMUS2009557, SKNMC1000110, SKNMC1000123, SKNMC1000124, SKNMC1000137, SKNMC1000159, SKNMC1000264, SKNMC2000224, SKNMC2000256, SKNMC2000356, SKNMC2000374, SKNMC2000583, SKNMC2000593, SKNMC2000612, SKNMC2000622, SKNMC2000966, SKNMC2001113, SKNMC2001324, SKNMC2001503, SKNMC2001555, SKNMC2001596, SKNMC2001623, SKNMC2002402, SKNMC2003924, SKNMC2003987, SKNMC2004457, SKNMC2004643, SKNMC2004651, SKNMC2005772, SKNMC2006173, SKNMC2006327, SKNMC2006998, SKNMC2007134, SKNMC2007502, SKNMC2007504, SKNMC2007961, SKNMC2009450, SKNSH1000002, SKNSH1000086, SKNSH1000101, SKNSH1000174, SKNSH1000301, SKNSH1000308, SKNSH1000416, SKNSH2000051, SKNSH2000101, SKNSH2000151, SKNSH2000163, SKNSH2000250, SKNSH2000319, SKNSH2000482, SKNSH2000516, SKNSH2000550, SKNSH2000971, SKNSH2001222, SKNSH2001875, SKNSH2001931, SKNSH2002054, SKNSH2002768, SKNSH2002866, SKNSH2003064, SKNSH2003174, SKNSH2003422, SKNSH2003466, SKNSH2003483, SKNSH2003528, SKNSH2003633, SKNSH2004039, SKNSH2005120, SKNSH2005194, SKNSH2005240, SKNSH2005792, SKNSH2005816, SKNSH2005981, SKNSH2006234, SKNSH2006304, SKNSH2006432, SKNSH2006822, SKNSH2007142, SKNSH2007149, SKNSH2007429, SKNSH2007739, SKNSH2008043, SKNSH2008940, SKNSH2008969, SKNSH2009197, SKNSH2009357, SKNSH2009435, SKNSH2009991, SKNSH2010015, SMINT1000012, SMINT1000016, SMINT1000039, SMINT1000042, SMINT1000048, SMINT1000051, SMINT1000054, SMINT1000057, SMINT1000071, SMINT1000075, SMINT1000078, SMINT1000091, SMINT1000100, SMINT1000103, SMINT1000117, SMINT1000118, SMINT1000137, SMINT1000192, SMINT2000007, SMINT2000032, SMINT2000040, SMINT2000060, SMINT2000073, SMINT2000084, SMINT2000145, SMINT2000159, SMINT2000176, SMINT2000185, SMINT2000227, SMINT2000229, SMINT2000232, SMINT2000239, SMINT2000267, SMINT2000277, SMINT2000396, SMINT2000400, SMINT2000454, SMINT2000518, SMINT2000529, SMINT2000530, SMINT2000537, SMINT2000538, SMINT2000541, SMINT2000545, SMINT2000558, SMINT2000562, SMINT2000568, SMINT2000602, SMINT2000609, SMINT2000629, SMINT2000659, SMINT2000694, SMINT2000747, SMINT2000811, SMINT2000824, SMINT2000933, SMINT2000984, SMINT2001114, SMINT2001158, SMINT2001183, SMINT2001199, SMINT2001348, SMINT2001397, SMINT2001458, SMINT2001461, SMINT2001535, SMINT2001559, SMINT2001609, SMINT2001615, SMINT2001683, SMINT2001731, SMINT2001812, SMINT2001818, SMINT2001950, SMINT2002126, SMINT2002159, SMINT2002202, SMINT2002210, SMINT2002224, SMINT2002281, SMINT2002311, SMINT2002314, SMINT2002414, SMINT2002457, SMINT2002620, SMINT2002689, SMINT2002743, SMINT2002778, SMINT2002880, SMINT2002882, SMINT2002884, SMINT2002899, SMINT2002974, SMINT2002976, SMINT2003003, SMINT2003128, SMINT2003150, SMINT2003169, SMINT2003317, SMINT2003340, SMINT2003386, SMINT2003423, SMINT2003505, SMINT2003569, SMINT2003641, SMINT2003644, SMINT2003866, SMINT2003905, SMINT2004023, SMINT2004037, SMINT2004047, SMINT2004086, SMINT2004144, SMINT2004280, SMINT2004299, SMINT2004339, SMINT2004350, SMINT2004414, SMINT2004473, SMINT2004547, SMINT2004583, SMINT2004589, SMINT2004729, SMINT2004781, SMINT2004872, SMINT2004891, SMINT2004909, SMINT2004972, SMINT2004992, SMINT2005075, SMINT2005161, SMINT2005174, SMINT2005213, SMINT2005330, SMINT2005368, SMINT2005387, SMINT2005402, SMINT2005405, SMINT2005621, SMINT2005623, SMINT2005624, SMINT2005688, SMINT2005800, SMINT2005956, SMINT2006078, SMINT2006205, SMINT2006331, SMINT2006596, SMINT2006641, SMINT2006648, SMINT2006708, SMINT2006716, SMINT2006801, SMINT2007062, SMINT2007101, SMINT2007140, SMINT2007187, SMINT2007219, SMINT2007294, SMINT2007365, SMINT2007391, SMINT2007433, SMINT2007508, SMINT2007526, SMINT2007579, SMINT2007647, SMINT2007729, SMINT2007790, SMINT2007792, SMINT2007796, SMINT2007867, SMINT2007932, SMINT2008042, SMINT2008054, SMINT2008133, SMINT2008277, SMINT2008329, SMINT2008455, SMINT2008491, SMINT2008531, SMINT2008545, SMINT2008558, SMINT2008590, SMINT2008625, SMINT2008672, SMINT2008690, SMINT2008715, SMINT2008720, SMINT2008817, SMINT2008844, SMINT2008869, SMINT2008960, SMINT2009119, SMINT2009121, SMINT2009212, SMINT2009233, SMINT2009259, SMINT2009272, SMINT2009292, SMINT2009363, SMINT2009415, SMINT2009468, SMINT2009505, SMINT2009529, SMINT2009832, SMINT2009895, SMINT2009902, SMINT2009973, SMINT2010015, SMINT2010068, SMINT2010076, SMINT2010084, SMINT2010144, SMINT2010278, SMINT2010324, SMINT2010326, SMINT2010369, SMINT2010426, SMINT2010500, SMINT2010533, SMINT2010629, SMINT2010639, SMINT2010672, SMINT2010753, SMINT2010853, SMINT2010897, SMINT2010901, SMINT2010959, SMINT2010997, SMINT2011033, SMINT2011066, SMINT2011273, SMINT2011311, SMINT2011406, SMINT2011509, SMINT2011567, SMINT2011588, SMINT2011656, SMINT2011888, SMINT2011958, SMINT2012040, SMINT2012122, SMINT2012179, SMINT2012195, SMINT2012285, SMINT2012501, SMINT2012734, SMINT2012793, SMINT2013031, SMINT2013032, SMINT2013129, SMINT2013170, SMINT2013181, SMINT2013228, SMINT2013613, SMINT2013626, SMINT2013695, SMINT2013833, SMINT2013890, SMINT2014166, SMINT2014282, SMINT2014443, SMINT2014480, SMINT2014489, SMINT2014721, SMINT2015006, SMINT2015294, SMINT2015306, SMINT2015326, SMINT2015353, SMINT2015454, SMINT2015518, SMINT2015745, SMINT2015787, SMINT2015810, SMINT2016122, SMINT2016146, SMINT2016286, SMINT2016313, SMINT2016396, SMINT2016412, SMINT2016440, SMINT2016477, SMINT2016544, SMINT2016857, SMINT2017134, SMINT2017319, SMINT2017324, SMINT2017410, SMINT2017431, SMINT2017432, SMINT2017436, SMINT2017599, SMINT2017659, SMINT2017736, SMINT2017781, SMINT2017855, SMINT2017884, SMINT2017974, SMINT2018343, SMINT2018353, SMINT2018592, SMINT2018681, SMINT2019017, SMINT2019105, SMINT2019142, SMINT2019153, SMINT2019200, SPLEN1000013, SPLEN1000041, SPLEN1000049, SPLEN1000056, SPLEN1000087, SPLEN1000089, SPLEN1000091, SPLEN1000106, SPLEN1000116, SPLEN1000134, SPLEN1000139, SPLEN1000143, SPLEN1000144, SPLEN1000145, SPLEN1000156, SPLEN1000163, SPLEN1000165, SPLEN1000178, SPLEN2000020, SPLEN2000047, SPLEN2000064, SPLEN2000098, SPLEN2000126, SPLEN2000134, SPLEN2000143, SPLEN2000189, SPLEN2000197, SPLEN2000205, SPLEN2000210, SPLEN2000222, SPLEN2000242, SPLEN2000243, SPLEN2000247, SPLEN2000255, SPLEN2000258, SPLEN2000267, SPLEN2000270, SPLEN2000307, SPLEN2000310, SPLEN2000341, SPLEN2000348, SPLEN2000350, SPLEN2000357, SPLEN2000364, SPLEN2000402, SPLEN2000414, SPLEN2000420, SPLEN2000443, SPLEN2000448, SPLEN2000450, SPLEN2000464, SPLEN2000496, SPLEN2000515, SPLEN2000516, SPLEN2000537, SPLEN2000541, SPLEN2000607, SPLEN2000630, SPLEN2000695, SPLEN2000698, SPLEN2000839, SPLEN2000874, SPLEN2000882, SPLEN2001135, SPLEN2001157, SPLEN2001176, SPLEN2001227, SPLEN2001245, SPLEN2001278, SPLEN2001354, SPLEN2001367, SPLEN2001383, SPLEN2001476, SPLEN2001503, SPLEN2001510, SPLEN2001599, SPLEN2001626, SPLEN2001650, SPLEN2001689, SPLEN2001710, SPLEN2001761, SPLEN2001781, SPLEN2001881, SPLEN2001912, SPLEN2001945, SPLEN2002007, SPLEN2002053, SPLEN2002133, SPLEN2002147, SPLEN2002166, SPLEN2002175, SPLEN2002223, SPLEN2002272, SPLEN2002314, SPLEN2002335, SPLEN2002343, SPLEN2002354, SPLEN2002385, SPLEN2002419, SPLEN2002451, SPLEN2002462, SPLEN2002463, SPLEN2002477, SPLEN2002662, SPLEN2002695, SPLEN2002707, SPLEN2002744, SPLEN2002917, SPLEN2002931, SPLEN2002957, SPLEN2003160, SPLEN2003204, SPLEN2003219, SPLEN2003297, SPLEN2003396, SPLEN2003678, SPLEN2003878, SPLEN2003918, SPLEN2003924, SPLEN2004060, SPLEN2004124, SPLEN2004148, SPLEN2004181, SPLEN2004220, SPLEN2004343, SPLEN2004346, SPLEN2004368, SPLEN2004611, SPLEN2004662, SPLEN2004844, SPLEN2004880, SPLEN2004984, SPLEN2005009, SPLEN2005227, SPLEN2005272, SPLEN2005342, SPLEN2005416, SPLEN2005429, SPLEN2005450, SPLEN2005474, SPLEN2005560, SPLEN2005727, SPLEN2005783, SPLEN2005790, SPLEN2005806, SPLEN2005818, SPLEN2005838, SPLEN2005869, SPLEN2005927, SPLEN2005939, SPLEN2006122, SPLEN2006143, SPLEN2006232, SPLEN2006268, SPLEN2006283, SPLEN2006305, SPLEN2006325, SPLEN2006389, SPLEN2006425, SPLEN2006671, SPLEN2006701, SPLEN2006785, SPLEN2006875, SPLEN2007182, SPLEN2007276, SPLEN2007314, SPLEN2007326, SPLEN2007350, SPLEN2007388, SPLEN2007619, SPLEN2007653, SPLEN2007689, SPLEN2007695, SPLEN2007739, SPLEN2007750, SPLEN2007794, SPLEN2007879, SPLEN2007926, SPLEN2007951, SPLEN2008007, SPLEN2008135, SPLEN2008164, SPLEN2008317, SPLEN2008460, SPLEN2008496, SPLEN2008591, SPLEN2008786, SPLEN2009081, SPLEN2009088, SPLEN2009163, SPLEN2009315, SPLEN2009340, SPLEN2009512, SPLEN2009513, SPLEN2009541, SPLEN2009548, SPLEN2009555, SPLEN2009581, SPLEN2009733, SPLEN2009803, SPLEN2009884, SPLEN2009918, SPLEN2010004, SPLEN2010015, SPLEN2010112, SPLEN2010119, SPLEN2010146, SPLEN2010187, SPLEN2010350, SPLEN2010395, SPLEN2010415, SPLEN2010447, SPLEN2010469, SPLEN2010510, SPLEN2010530, SPLEN2010534, SPLEN2010588, SPLEN2010625, SPLEN2010800, SPLEN2010846, SPLEN2010847, SPLEN2010862, SPLEN2010912, SPLEN2010978, SPLEN2011018, SPLEN2011021, SPLEN2011025, SPLEN2011086, SPLEN2011139, SPLEN2011145, SPLEN2011248, SPLEN2011252, SPLEN2011419, SPLEN2011422, SPLEN2011672, SPLEN2011678, SPLEN2011737, SPLEN2011766, SPLEN2011805, SPLEN2011820, SPLEN2011830, SPLEN2011931, SPLEN2011981, SPLEN2012115, SPLEN2012175, SPLEN2012179, SPLEN2012185, SPLEN2012234, SPLEN2012453, SPLEN2012524, SPLEN2012525, SPLEN2012606, SPLEN2012611, SPLEN2012619, SPLEN2012624, SPLEN2012725, SPLEN2012743, SPLEN2012756, SPLEN2012800, SPLEN2012846, SPLEN2012889, SPLEN2012961, SPLEN2013108, SPLEN2013195, SPLEN2013503, SPLEN2013644, SPLEN2013648, SPLEN2013670, SPLEN2013673, SPLEN2013690, SPLEN2013714, SPLEN2013753, SPLEN2013821, SPLEN2013857, SPLEN2013860, SPLEN2013910, SPLEN2013923, SPLEN2013936, SPLEN2014041, SPLEN2014063, SPLEN2014073, SPLEN2014080, SPLEN2014119, SPLEN2014136, SPLEN2014199, SPLEN2014210, SPLEN2014293, SPLEN2014318, SPLEN2014381, SPLEN2014452, SPLEN2014454, SPLEN2014486, SPLEN2014543, SPLEN2014572, SPLEN2014645, SPLEN2014669, SPLEN2014711, SPLEN2014739, SPLEN2014860, SPLEN2014865, SPLEN2014919, SPLEN2014920, SPLEN2014924, SPLEN2014937, SPLEN2014946, SPLEN2015031, SPLEN2015094, SPLEN2015121, SPLEN2015129, SPLEN2015158, SPLEN2015166, SPLEN2015216, SPLEN2015258, SPLEN2015261, SPLEN2015267, SPLEN2015276, SPLEN2015310, SPLEN2015415, SPLEN2015433, SPLEN2015593, SPLEN2015674, SPLEN2015679, SPLEN2015707, SPLEN2015730, SPLEN2015746, SPLEN2015788, SPLEN2015815, SPLEN2015890, SPLEN2015891, SPLEN2015899, SPLEN2016045, SPLEN2016053, SPLEN2016069, SPLEN2016098, SPLEN2016135, SPLEN2016241, SPLEN2016250, SPLEN2016268, SPLEN2016304, SPLEN2016356, SPLEN2016421, SPLEN2016480, SPLEN2016531, SPLEN2016533, SPLEN2016541, SPLEN2016552, SPLEN2016554, SPLEN2016602, SPLEN2016627, SPLEN2016678, SPLEN2016743, SPLEN2016773, SPLEN2016781, SPLEN2016840, SPLEN2016863, SPLEN2016922, SPLEN2016932, SPLEN2016972, SPLEN2016973, SPLEN2017043, SPLEN2017104, SPLEN2017121, SPLEN2017147, SPLEN2017187, SPLEN2017189, SPLEN2017212, SPLEN2017318, SPLEN2017351, SPLEN2017426, SPLEN2017452, SPLEN2017538, SPLEN2017592, SPLEN2017613, SPLEN2017620, SPLEN2017643, SPLEN2017687, SPLEN2017740, SPLEN2017781, SPLEN2017999, SPLEN2018098, SPLEN2018112, SPLEN2018157, SPLEN2018159, SPLEN2018180, SPLEN2018181, SPLEN2018280, SPLEN2018285, SPLEN2018299, SPLEN2018302, SPLEN2018364, SPLEN2018395, SPLEN2018643, SPLEN2018683, SPLEN2018732, SPLEN2018749, SPLEN2018933, SPLEN2019008, SPLEN2019043, SPLEN2019102, SPLEN2019131, SPLEN2019257, SPLEN2019311, SPLEN2019323, SPLEN2019349, SPLEN2019375, SPLEN2019379, SPLEN2019405, SPLEN2019446, SPLEN2019471, SPLEN2019480, SPLEN2019505, SPLEN2019571, SPLEN2019575, SPLEN2019709, SPLEN2019774, SPLEN2019793, SPLEN2019811, SPLEN2019839, SPLEN2019956, SPLEN2019985, SPLEN2020007, SPLEN2020034, SPLEN2020153, SPLEN2020154, SPLEN2020166, SPLEN2020183, SPLEN2020223, SPLEN2020359, SPLEN2020417, SPLEN2020427, SPLEN2020467, SPLEN2020512, SPLEN2020608, SPLEN2020777, SPLEN2020805, SPLEN2021057, SPLEN2021122, SPLEN2021157, SPLEN2021194, SPLEN2021231, SPLEN2021273, SPLEN2021295, SPLEN2021298, SPLEN2021383, SPLEN2021417, SPLEN2021440, SPLEN2021458, SPLEN2021463, SPLEN2021560, SPLEN2021701, SPLEN2021795, SPLEN2021983, SPLEN2021991, SPLEN2022040, SPLEN2022162, SPLEN2022227, SPLEN2022591, SPLEN2022785, SPLEN2022920, SPLEN2023024, SPLEN2023118, SPLEN2023160, SPLEN2023423, SPLEN2023710, SPLEN2023733, SPLEN2023791, SPLEN2023977, SPLEN2024070, SPLEN2024127, SPLEN2024232, SPLEN2024273, SPLEN2024383, SPLEN2024489, SPLEN2024530, SPLEN2024571, SPLEN2024577, SPLEN2024617, SPLEN2024737, SPLEN2024922, SPLEN2024956, SPLEN2024990, SPLEN2025012, SPLEN2025017, SPLEN2025039, SPLEN2025219, SPLEN2025491, SPLEN2025626, SPLEN2025820, SPLEN2026144, SPLEN2026411, SPLEN2026765, SPLEN2027113, SPLEN2027157, SPLEN2027395, SPLEN2027488, SPLEN2027852, SPLEN2027868, SPLEN2027995, SPLEN2028046, SPLEN2028066, SPLEN2028138, SPLEN2028365, SPLEN2028417, SPLEN2028424, SPLEN2028593, SPLEN2028844, SPLEN2028914, SPLEN2028994, SPLEN2029051, SPLEN2029176, SPLEN2029295, SPLEN2029380, SPLEN2029522, SPLEN2029683, SPLEN2029727, SPLEN2029904, SPLEN2030250, SPLEN2030335, SPLEN2030371, SPLEN2030397, SPLEN2030479, SPLEN2030495, SPLEN2030562, SPLEN2030763, SPLEN2030847, SPLEN2031004, SPLEN2031125, SPLEN2031424, SPLEN2031674, SPLEN2031724, SPLEN2031780, SPLEN2032036, SPLEN2032112, SPLEN2032154, SPLEN2032157, SPLEN2032321, SPLEN2032356, SPLEN2032677, SPLEN2032813, SPLEN2032924, SPLEN2033098, SPLEN2033153, SPLEN2033333, SPLEN2033490, SPLEN2033539, SPLEN2033921, SPLEN2033996, SPLEN2034021, SPLEN2034081, SPLEN2034252, SPLEN2034551, SPLEN2034601, SPLEN2034678, SPLEN2034781, SPLEN2034864, SPLEN2034934, SPLEN2035318, SPLEN2035615, SPLEN2036076, SPLEN2036103, SPLEN2036326, SPLEN2036475, SPLEN2036501, SPLEN2036579, SPLEN2036608, SPLEN2036702, SPLEN2036712, SPLEN2036821, SPLEN2036932, SPLEN2036953, SPLEN2037077, SPLEN2037194, SPLEN2037319, SPLEN2037444, SPLEN2037580, SPLEN2037630, SPLEN2037678, SPLEN2037722, SPLEN2037891, SPLEN2038055, SPLEN2038180, SPLEN2038345, SPLEN2038407, SPLEN2039311, SPLEN2039379, SPLEN2039672, SPLEN2039697, SPLEN2039845, SPLEN2039936, SPLEN2040222, SPLEN2040237, SPLEN2040824, SPLEN2041304, SPLEN2041306, SPLEN2041310, SPLEN2041585, SPLEN2041645, SPLEN2041700, SPLEN2041720, SPLEN2041977, SPLEN2042051, SPLEN2042303, SPLEN2042521, SPLEN2042535, SPLEN2042598, SPLEN2042714, SPLEN2042920, STOMA1000013, STOMA1000047, STOMA1000052, STOMA1000074, STOMA1000091, STOMA1000117, STOMA1000133, STOMA1000175, STOMA1000186, STOMA1000189, STOMA1000190, STOMA1000191, STOMA2000032, STOMA2000072, STOMA2000088, STOMA2000104, STOMA2000148, STOMA2000168, STOMA2000183, STOMA2000188, STOMA2000257, STOMA2000279, STOMA2000289, STOMA2000383, STOMA2000386, STOMA2000395, STOMA2000396, STOMA2000478, STOMA2000529, STOMA2000539, STOMA2000567, STOMA2000640, STOMA2000678, STOMA2000686, STOMA2000888, STOMA2001025, STOMA2001389, STOMA2002141, STOMA2002367, STOMA2002688, STOMA2002828, STOMA2003158, STOMA2003289, STOMA2003444, STOMA2003477, STOMA2003646, STOMA2003716, STOMA2003781, STOMA2003894, STOMA2004194, STOMA2004294, STOMA2004663, STOMA2004668, STOMA2004852, STOMA2004873, STOMA2004884, STOMA2004893, STOMA2004925, STOMA2005120, STOMA2005664, STOMA2005667, STOMA2005746, STOMA2005782, STOMA2006181, STOMA2006213, STOMA2006229, STOMA2006325, STOMA2006330, STOMA2006398, STOMA2006447, STOMA2006780, STOMA2006904, STOMA2007269, STOMA2007680, STOMA2007745, STOMA2008050, STOMA2008361, STOMA2008546, STOMA2008614, STOMA2008638, STOMA2008838, STOMA2009250, STOMA2009253, STOMA2009256, STOMA2009289, SYNOV1000045, SYNOV1000049, SYNOV1000118, SYNOV1000128, SYNOV1000164, SYNOV1000190, SYNOV1000256, SYNOV1000374, SYNOV2000152, SYNOV2000171, SYNOV2000173, SYNOV2000177, SYNOV2000178, SYNOV2000193, SYNOV2000251, SYNOV2000279, SYNOV2000291, SYNOV2000297, SYNOV2000397, SYNOV2000426, SYNOV2000601, SYNOV2000700, SYNOV2000820, SYNOV2000824, SYNOV2000923, SYNOV2001014, SYNOV2001033, SYNOV2001035, SYNOV2001088, SYNOV2001111, SYNOV2001144, SYNOV2001251, SYNOV2001262, SYNOV2001300, SYNOV2001356, SYNOV2001374, SYNOV2001390, SYNOV2001451, SYNOV2001457, SYNOV2001581, SYNOV2001648, SYNOV2001660, SYNOV2003326, SYNOV2005216, SYNOV2005448, SYNOV2005541, SYNOV2005673, SYNOV2005817, SYNOV2005962, SYNOV2006430, SYNOV2006620, SYNOV2007758, SYNOV2007965, SYNOV2008765, SYNOV2009172, SYNOV2011233, SYNOV2012326, SYNOV2013365, SYNOV2013637, SYNOV2014157, SYNOV2014364, SYNOV2016124, SYNOV2016837, SYNOV2017055, SYNOV2017179, SYNOV2018921, SYNOV2019280, SYNOV2020085, SYNOV2021320, SYNOV2021953, SYNOV3000184, SYNOV3000231, SYNOV3000302, SYNOV3000345, SYNOV4000249, SYNOV4000472, SYNOV4000598, SYNOV4000706, SYNOV4001224, SYNOV4001326, SYNOV4001342, SYNOV4001395, SYNOV4002001, SYNOV4002392, SYNOV4002875, SYNOV4002883, SYNOV4003174, SYNOV4003322, SYNOV4003681, SYNOV4003981, SYNOV4004184, SYNOV4004741, SYNOV4004823, SYNOV4004914, SYNOV4005256, SYNOV4005570, SYNOV4005739, SYNOV4005889, SYNOV4005981, SYNOV4005989, SYNOV4006256, SYNOV4006327, SYNOV4006542, SYNOV4007012, SYNOV4007215; SYNOV4007360, SYNOV4007430, SYNOV4007521, SYNOV4007553, SYNOV4007711, SYNOV4008245, SYNOV4008336, SYNOV4009129, SYNOV4009139, SYNOV4009298, T1ESE2000116, T1ESE2000609, T1ESE2002665, TBAES2000004, TBAES2000059, TBAES2000116, TBAES2000255, TBAES2000315, TBAES2000932, TBAES2001171, TBAES2001220, TBAES2001229, TBAES2001258, TBAES2001296, TBAES2001492, TBAES2001553, TBAES2001751, TBAES2003435, TBAES2003492, TBAES2003550, TBAES2003702, TBAES2003917, TBAES2004055, TBAES2004105, TBAES2004939, TBAES2005157, TBAES2005361, TBAES2005543, TBAES2006568, TBAES2006881, TBAES2007379, TBAES2007428, TBAES2007481, TBAES2007504, TBAES2007548, TBAES2007697, TBAES2007862, TBAES2007964, TBAES2008133, TCERX2000171, TCERX2000431, TCERX2000613, TCERX2000998, TCERX2002644, TCOLN1000037, TCOLN1000180, TCOLN2000139, TCOLN2000236, TCOLN2000641, TCOLN2001268, TCOLN2002047, TCOLN2002278, TESOP1000035, TESOP1000127, TESOP1000160, TESOP2000083, TESOP2000090, TESOP2000205, TESOP2000312, TESOP2000390, TESOP2000400, TESOP2000510, TESOP2000527, TESOP2000569, TESOP2000739, TESOP2000801, TESOP2001122, TESOP2001166, TESOP2001345, TESOP2001474, TESOP2001796, TESOP2001818, TESOP2001849, TESOP2001865, TESOP2001901, TESOP2001953, TESOP2002005, TESOP2002110, TESOP2002150, TESOP2002451, TESOP2002489, TESOP2002539, TESOP2002545, TESOP2002804, TESOP2002950, TESOP2003273, TESOP2003308, TESOP2003553, TESOP2003753, TESOP2004110, TESOP2004114, TESOP2004173, TESOP2004214, TESOP2005199, TESOP2005285, TESOP2005485, TESOP2005498, TESOP2005579, TESOP2006041, TESOP2006053, TESOP2006060, TESOP2006068, TESOP2006110, TESOP2006398, TESOP2006670, TESOP2006704, TESOP2006746, TESOP2006865, TESOP2006893, TESOP2007041, TESOP2007052, TESOP2007262, TESOP2007636, TESOP2007674, TESOP2007688, TESOP2007725, TESOP2007912, TESOP2007978, TESOP2008127, TESOP2008552, TESOP2008556, TESOP2008563, TESOP2008820, TESOP2009121, TESOP2009201, TESOP2009247, TESOP2009555, TESTI1000018, TESTI1000019, TESTI1000025, TESTI1000029, TESTI1000030, TESTI1000042, TESTI1000045, TESTI1000051, TESTI1000055, TESTI1000064, TESTI1000070, TESTI1000085, TESTI1000088, TESTI1000093, TESTI1000094, TESTI1000096, TESTI1000101, TESTI1000109, TESTI1000125, TESTI1000127, TESTI1000128, TESTI1000131, TESTI1000142, TESTI1000157, TESTI1000163, TESTI1000169, TESTI1000179, TESTI1000183, TESTI1000191, TESTI1000257, TESTI1000266, TESTI1000319, TESTI1000330, TESTI1000348, TESTI1000390, TESTI1000391, TESTI1000459, TESTI1000491, TESTI1000545, TESTI2000006, TESTI2000018, TESTI2000044, TESTI2000100, TESTI2000117, TESTI2000120, TESTI2000147, TESTI2000154, TESTI2000172, TESTI2000177, TESTI2000179, TESTI2000207, TESTI2000208, TESTI2000221, TESTI2000238, TESTI2000253, TESTI2000272, TESTI2000278, TESTI2000349, TESTI2000356, TESTI2000358, TESTI2000372, TESTI2000427, TESTI2000431, TESTI2000435, TESTI2000443, TESTI2000452, TESTI2000462, TESTI2000489, TESTI2000520, TESTI2000571, TESTI2000591, TESTI2000598, TESTI2000600, TESTI2000616, TESTI2000627, TESTI2000644, TESTI2000671, TESTI2000683, TESTI2000689, TESTI2000695, TESTI2000699, TESTI2000707, TESTI2000745, TESTI2000756, TESTI2000762, TESTI2000808, TESTI2000819, TESTI2000830, TESTI2000840, TESTI2000849, TESTI2000850, TESTI2000874, TESTI2000883, TESTI2000909, TESTI2000951, TESTI2000970, TESTI2000981, TESTI2001008, TESTI2001049, TESTI2001082, TESTI2001120, TESTI2001134, TESTI2001141, TESTI2001153, TESTI2001180, TESTI2001208, TESTI2001229, TESTI2001236, TESTI2001237, TESTI2001306, TESTI2001313, TESTI2001330, TESTI2001339, TESTI2001345, TESTI2001352, TESTI2001364, TESTI2001412, TESTI2001420, TESTI2001498, TESTI2001512, TESTI2001518, TESTI2001556, TESTI2001593, TESTI2001613, TESTI2001621, TESTI2001661, TESTI2001665, TESTI2001671, TESTI2001697, TESTI2001725, TESTI2001758, TESTI2001766, TESTI2001792, TESTI2001793, TESTI2001795, TESTI2001812, TESTI2001815, TESTI2001823, TESTI2001826, TESTI2001827, TESTI2001829, TESTI2001852, TESTI2001862, TESTI2001869, TESTI2001879, TESTI2001894, TESTI2001898, TESTI2001915, TESTI2001950, TESTI2001959, TESTI2001968, TESTI2001985, TESTI2001991, TESTI2002002, TESTI2002012, TESTI2002036, TESTI2002048, TESTI2002057, TESTI2002081, TESTI2002090, TESTI2002105, TESTI2002149, TESTI2002216, TESTI2002245, TESTI2002251, TESTI2002256, TESTI2002264, TESTI2002282, TESTI2002293, TESTI2002294, TESTI2002326, TESTI2002351, TESTI2002361, TESTI2002369, TESTI2002406, TESTI2002415, TESTI2002423, TESTI2002453, TESTI2002461, TESTI2002465, TESTI2002467, TESTI2002498, TESTI2002516, TESTI2002544, TESTI2002578, TESTI2002580, TESTI2002618, TESTI2002632, TESTI2002676, TESTI2002690, TESTI2002696, TESTI2002698, TESTI2002700, TESTI2002707, TESTI2002724, TESTI2002729, TESTI2002752, TESTI2002753, TESTI2002789, TESTI2002802, TESTI2002806, TESTI2002840, TESTI2002866, TESTI2002877, TESTI2002910, TESTI2002912, TESTI2002928, TESTI2002937, TESTI2002965, TESTI2002993, TESTI2003020, TESTI2003031, TESTI2003037, TESTI2003044, TESTI2003059, TESTI2003061, TESTI2003071, TESTI2003074, TESTI2003089, TESTI2003104, TESTI2003109, TESTI2003117, TESTI2003127, TESTI2003130, TESTI2003131, TESTI2003139, TESTI2003141, TESTI2003152, TESTI2003181, TESTI2003193, TESTI2003196, TESTI2003228, TESTI2003236, TESTI2003255, TESTI2003258, TESTI2003277, TESTI2003280, TESTI2003299, TESTI2003311, TESTI2003321, TESTI2003325, TESTI2003327, TESTI2003330, TESTI2003347, TESTI2003354, TESTI2003356, TESTI2003372, TESTI2003376, TESTI2003418, TESTI2003419, TESTI2003432, TESTI2003454, TESTI2003475, TESTI2003476, TESTI2003498, TESTI2003512, TESTI2003533, TESTI2003539, TESTI2003541, TESTI2003545, TESTI2003551, TESTI2003574, TESTI2003579, TESTI2003580, TESTI2003589, TESTI2003596, TESTI2003598, TESTI2003615, TESTI2003625, TESTI2003638, TESTI2003649, TESTI2003692, TESTI2003718, TESTI2003727, TESTI2003756, TESTI2003768, TESTI2003781, TESTI2003787, TESTI2003824, TESTI2003827, TESTI2003894, TESTI2003911, TESTI2003914, TESTI2003940, TESTI2003962, TESTI2003998, TESTI2004000, TESTI2004031, TESTI2004073, TESTI2004085, TESTI2004089, TESTI2004111, TESTI2004119, TESTI2004122, TESTI2004153, TESTI2004163, TESTI2004169, TESTI2004207, TESTI2004215, TESTI2004227, TESTI2004229, TESTI2004243, TESTI2004255, TESTI2004287, TESTI2004313, TESTI2004318, TESTI2004322, TESTI2004391, TESTI2004399, TESTI2004423, TESTI2004431, TESTI2004432, TESTI2004452, TESTI2004459, TESTI2004490, TESTI2004539, TESTI2004552, TESTI2004560, TESTI2004574, TESTI2004601, TESTI2004611, TESTI2004649, TESTI2004654, TESTI2004675, TESTI2004687, TESTI2004689, TESTI2004700, TESTI2004706, TESTI2004712, TESTI2004734, TESTI2004783, TESTI2004791, TESTI2004793, TESTI2004860, TESTI2004906, TESTI2004920, TESTI2004929, TESTI2004936, TESTI2004941, TESTI2004971, TESTI2004982, TESTI2004993, TESTI2004994, TESTI2004999, TESTI2005017, TESTI2005025, TESTI2005040, TESTI2005060, TESTI2005072, TESTI2005085, TESTI2005112, TESTI2005120, TESTI2005153, TESTI2005155, TESTI2005173, TESTI2005267, TESTI2005268, TESTI2005280, TESTI2005307, TESTI2005326, TESTI2005363, TESTI2005376, TESTI2005378, TESTI2005380, TESTI2005391, TESTI2005395, TESTI2005396, TESTI2005408, TESTI2005415, TESTI2005470, TESTI2005492, TESTI2005568, TESTI2005584, TESTI2005588, TESTI2005590, TESTI2005603, TESTI2005609, TESTI2005610, TESTI2005630, TESTI2005672, TESTI2005683, TESTI2005690, TESTI2005692, TESTI2005703, TESTI2005720, TESTI2005731, TESTI2005739, TESTI2005742, TESTI2005759, TESTI2005775, TESTI2005827, TESTI2005835, TESTI2005860, TESTI2005892, TESTI2005908, TESTI2005911, TESTI2005933, TESTI2005937, TESTI2005948, TESTI2005979, TESTI2005981, TESTI2005982, TESTI2005984, TESTI2005986, TESTI2005987, TESTI2006007, TESTI2006008, TESTI2006015, TESTI2006016, TESTI2006035, TESTI2006040, TESTI2006041, TESTI2006045, TESTI2006067, TESTI2006083, TESTI2006097, TESTI2006109, TESTI2006111, TESTI2006120, TESTI2006125, TESTI2006179, TESTI2006209, TESTI2006210, TESTI2006212, TESTI2006218, TESTI2006238, TESTI2006255, TESTI2006258, TESTI2006278, TESTI2006333, TESTI2006341, TESTI2006360, TESTI2006383, TESTI2006409, TESTI2006425, TESTI2006437, TESTI2006457, TESTI2006460, TESTI2006465, TESTI2006483, TESTI2006499, TESTI2006523, TESTI2006543, TESTI2006565, TESTI2006572, TESTI2006588, TESTI2006615, TESTI2006617, TESTI2006624, TESTI2006628, TESTI2006633, TESTI2006643, TESTI2006648, TESTI2006659, TESTI2006660, TESTI2006665, TESTI2006667, TESTI2006677, TESTI2006720, TESTI2006735, TESTI2006744, TESTI2006748, TESTI2006774, TESTI2006853, TESTI2006866, TESTI2006877, TESTI2006879, TESTI2006894, TESTI2006940, TESTI2006955, TESTI2006978, TESTI2006979, TESTI2006990, TESTI2007040, TESTI2007074, TESTI2007078, TESTI2007113, TESTI2007152, TESTI2007163, TESTI2007183, TESTI2007220, TESTI2007234, TESTI2007320, TESTI2007346, TESTI2007358, TESTI2007402, TESTI2007405, TESTI2007407, TESTI2007422, TESTI2007452, TESTI2007464, TESTI2007466, TESTI2007480, TESTI2007490, TESTI2007502, TESTI2007524, TESTI2007533, TESTI2007576, TESTI2007613, TESTI2007657, TESTI2007685, TESTI2007692, TESTI2007749, TESTI2007750, TESTI2007808, TESTI2007814, TESTI2007829, TESTI2007864, TESTI2007867, TESTI2007872, TESTI2007906, TESTI2007922, TESTI2007951, TESTI2007972, TESTI2007973, TESTI2008014, TESTI2008020, TESTI2008032, TESTI2008033, TESTI2008046, TESTI2008081, TESTI2008099, TESTI2008139, TESTI2008144, TESTI2008161, TESTI2008189, TESTI2008204, TESTI2008219, TESTI2008233, TESTI2008234, TESTI2008237, TESTI2008278, TESTI2008320, TESTI2008331, TESTI2008343, TESTI2008387, TESTI2008389, TESTI2008394, TESTI2008405, TESTI2008420, TESTI2008425, TESTI2008440, TESTI2008567, TESTI2008595, TESTI2008621, TESTI2008636, TESTI2008657, TESTI2008684, TESTI2008699, TESTI2008715, TESTI2008762, TESTI2008774, TESTI2008786, TESTI2008822, TESTI2008835, TESTI2008840, TESTI2008847, TESTI2008884, TESTI2008901, TESTI2008929, TESTI2008946, TESTI2008960, TESTI2009018, TESTI2009091, TESTI2009097, TESTI2009136, TESTI2009185, TESTI2009190, TESTI2009217, TESTI2009239, TESTI2009325, TESTI2009388, TESTI2009390, TESTI2009400, TESTI2009412, TESTI2009447, TESTI2009462, TESTI2009477, TESTI2009497, TESTI2009502, TESTI2009511, TESTI2009544, TESTI2009545, TESTI2009551, TESTI2009585, TESTI2009588, TESTI2009683, TESTI2009727, TESTI2009739, TESTI2009785, TESTI2009812, TESTI2009835, TESTI2009853, TESTI2009935, TESTI2009977, TESTI2009987, TESTI2010009, TESTI2010154, TESTI2010180, TESTI2010239, TESTI2010280, TESTI2010354, TESTI2010396, TESTI2010400, TESTI2010409, TESTI2010572, TESTI2010587, TESTI2010591, TESTI2010617, TESTI2010682, TESTI2010724, TESTI2010732, TESTI2010734, TESTI2010755, TESTI2010793, TESTI2010806, TESTI2010833, TESTI2010872, TESTI2011009, TESTI2011020, TESTI2011028, TESTI2011033, TESTI2011254, TESTI2011286, TESTI2011294, TESTI2011314, TESTI2011315, TESTI2011394, TESTI2011407, TESTI2011448, TESTI2011480, TESTI2011549, TESTI2011575, TESTI2011605, TESTI2011612, TESTI2011665, TESTI2011680, TESTI2011683, TESTI2011712, TESTI2011750, TESTI2011840, TESTI2011846, TESTI2011915, TESTI2011928, TESTI2011971, TESTI2012019, TESTI2012050, TESTI2012090, TESTI2012095, TESTI2012152, TESTI2012155, TESTI2012171, TESTI2012207, TESTI2012231, TESTI2012244, TESTI2012289, TESTI2012308, TESTI2012356, TESTI2012387, TESTI2012394, TESTI2012444, TESTI2012511, TESTI2012528, TESTI2012544, TESTI2012550, TESTI2012571, TESTI2012592, TESTI2012617, TESTI2012628, TESTI2012812, TESTI2012834, TESTI2012835, TESTI2012861, TESTI2012900, TESTI2012915, TESTI2012922, TESTI2013001, TESTI2013012, TESTI2013053, TESTI2013144, TESTI2013163, TESTI2013169, TESTI2013212, TESTI2013231, TESTI2013257, TESTI2013264, TESTI2013268, TESTI2013295, TESTI2013322, TESTI2013381, TESTI2013382, TESTI2013401, TESTI2013427, TESTI2013468, TESTI2013497, TESTI2013545, TESTI2013546, TESTI2013566, TESTI2013601, TESTI2013604, TESTI2013607, TESTI2013610, TESTI2013691, TESTI2013699, TESTI2013737, TESTI2013767, TESTI2013832, TESTI2013873, TESTI2013889, TESTI2014007, TESTI2014036, TESTI2014097, TESTI2014160, TESTI2014248, TESTI2014254, TESTI2014269, TESTI2014274, TESTI2014318, TESTI2014324, TESTI2014339, TESTI2014362, TESTI2014385, TESTI2014415, TESTI2014439, TESTI2014474, TESTI2014505, TESTI2014577, TESTI2014578, TESTI2014716, TESTI2014780, TESTI2014800, TESTI2014838, TESTI2014843, TESTI2014979, TESTI2014988, TESTI2015042, TESTI2015092, TESTI2015105, TESTI2015180, TESTI2015213, TESTI2015249, TESTI2015327, TESTI2015331, TESTI2015335, TESTI2015350, TESTI2015375, TESTI2015437, TESTI2015590, TESTI2015610, TESTI2015647, TESTI2015675, TESTI2015710, TESTI2015752, TESTI2015830, TESTI2015914, TESTI2015938, TESTI2015947, TESTI2015962, TESTI2015987, TESTI2016033, TESTI2016046, TESTI2016101, TESTI2016162, TESTI2016197, TESTI2016278, TESTI2016298, TESTI2016331, TESTI2016337, TESTI2016410, TESTI2016421, TESTI2016509, TESTI2016568, TESTI2016583, TESTI2016599, TESTI2016629, TESTI2016663, TESTI2016667, TESTI2016688, TESTI2016701, TESTI2016758, TESTI2016848, TESTI2016863, TESTI2016888, TESTI2016896, TESTI2016922, TESTI2016942, TESTI2016950, TESTI2016996, TESTI2017017, TESTI2017028, TESTI2017035, TESTI2017069, TESTI2017089, TESTI2017102, TESTI2017107, TESTI2017113, TESTI2017125, TESTI2017256, TESTI2017305, TESTI2017311, TESTI2017396, TESTI2017507, TESTI2017537, TESTI2017582, TESTI2017584, TESTI2017645, TESTI2017727, TESTI2017740, TESTI2017775, TESTI2017816, TESTI2017832, TESTI2017923, TESTI2017932, TESTI2017951, TESTI2018031, TESTI2018035, TESTI2018060, TESTI2018083, TESTI2018178, TESTI2018221, TESTI2018276, TESTI2018290, TESTI2018335, TESTI2018337, TESTI2018368, TESTI2018421, TESTI2018428, TESTI2018475, TESTI2018482, TESTI2018521, TESTI2018565, TESTI2018581, TESTI2018687, TESTI2018697, TESTI2018838, TESTI2018867, TESTI2018941, TESTI2018957, TESTI2018974, TESTI2018975, TESTI2018997, TESTI2019042, TESTI2019077, TESTI2019228, TESTI2019257, TESTI2019280, TESTI2019282, TESTI2019308, TESTI2019336, TESTI2019352, TESTI2019406, TESTI2019430, TESTI2019455, TESTI2019481, TESTI2019488, TESTI2019501, TESTI2019648, TESTI2019669, TESTI2019697, TESTI2019760, TESTI2019787, TESTI2019794, TESTI2019854, TESTI2019859, TESTI2019860, TESTI2019872, TESTI2019911, TESTI2019917, TESTI2019975, TESTI2019998, TESTI2020012, TESTI2020026, TESTI2020029, TESTI2020071, TESTI2020084, TESTI2020265, TESTI2020283, TESTI2020316, TESTI2020344, TESTI2020379, TESTI2020426, TESTI2020445, TESTI2020510, TESTI2020515, TESTI2020525, TESTI2020579, TESTI2020717, TESTI2020840, TESTI2020871, TESTI2020905, TESTI2020906, TESTI2020946, TESTI2020956, TESTI2020981, TESTI2020999, TESTI2021003, TESTI2021038, TESTI2021057, TESTI2021077, TESTI2021112, TESTI2021114, TESTI2021116, TESTI2021118, TESTI2021122, TESTI2021138, TESTI2021297, TESTI2021315, TESTI2021358, TESTI2021425, TESTI2021447, TESTI2021463, TESTI2021531, TESTI2021599, TESTI2021637, TESTI2021654, TESTI2021667, TESTI2021736, TESTI2021785, TESTI2021819, TESTI2021851, TESTI2021895, TESTI2021911, TESTI2021939, TESTI2021999, TESTI2022010, TESTI2022023, TESTI2022065, TESTI2022086, TESTI2022179, TESTI2022203, TESTI2022246, TESTI2022323, TESTI2022338, TESTI2022400, TESTI2022462, TESTI2022495, TESTI2022623, TESTI2022649, TESTI2022652, TESTI2022738, TESTI2022798, TESTI2022812, TESTI2022814, TESTI2022874, TESTI2022940, TESTI2022952, TESTI2023025, TESTI2023033, TESTI2023053, TESTI2023085, TESTI2023192, TESTI2023194, TESTI2023214, TESTI2023254, TESTI2023386, TESTI2023414, TESTI2023427, TESTI2023436, TESTI2023599, TESTI2023752, TESTI2023800, TESTI2023861, TESTI2023903, TESTI2023942, TESTI2023947, TESTI2023951, TESTI2023968, TESTI2024009, TESTI2024090, TESTI2024125, TESTI2024153, TESTI2024192, TESTI2024267, TESTI2024283, TESTI2024299, TESTI2024419, TESTI2024422, TESTI2024443, TESTI2024446, TESTI2024473, TESTI2024476, TESTI2024498, TESTI2024560, TESTI2024567, TESTI2024586, TESTI2024598, TESTI2024641, TESTI2024648, TESTI2024718, TESTI2024744, TESTI2024864, TESTI2024885, TESTI2024936, TESTI2024978, TESTI2024999, TESTI2025006, TESTI2025013, TESTI2025022, TESTI2025063, TESTI2025117, TESTI2025144, TESTI2025161, TESTI2025174, TESTI2025229, TESTI2025269, TESTI2025365, TESTI2025403, TESTI2025409, TESTI2025448, TESTI2025454, TESTI2025486, TESTI2025546, TESTI2025582, TESTI2025609, TESTI2025656, TESTI2025757, TESTI2025791, TESTI2025846, TESTI2025872, TESTI2025879, TESTI2025911, TESTI2025920, TESTI2025924, TESTI2026014, TESTI2026024, TESTI2026064, TESTI2026077, TESTI2026104, TESTI2026116, TESTI2026134, TESTI2026168, TESTI2026196, TESTI2026215, TESTI2026218, TESTI2026233, TESTI2026291, TESTI2026294, TESTI2026401, TESTI2026403, TESTI2026453, TESTI2026461, TESTI2026491, TESTI2026505, TESTI2026515, TESTI2026525, TESTI2026534, TESTI2026537, TESTI2026589, TESTI2026597, TESTI2026605, TESTI2026647, TESTI2026674, TESTI2026794, TESTI2026824, TESTI2026854, TESTI2026925, TESTI2026936, TESTI2026957, TESTI2027013, TESTI2027019, TESTI2027108, TESTI2027165, TESTI2027171, TESTI2027173, TESTI2027179, TESTI2027185, TESTI2027206, TESTI2027238, TESTI2027239, TESTI2027243, TESTI2027271, TESTI2027296, TESTI2027378, TESTI2027411, TESTI2027450, TESTI2027496, TESTI2027503, TESTI2027562, TESTI2027615, TESTI2027645, TESTI2027730, TESTI2027736, TESTI2027791, TESTI2027820, TESTI2027828, TESTI2027840, TESTI2027909, TESTI2028098, TESTI2028151, TESTI2028242, TESTI2028253, TESTI2028254, TESTI2028269, TESTI2028290, TESTI2028384, TESTI2028426, TESTI2028488, TESTI2028523, TESTI2028583, TESTI2028613, TESTI2028659, TESTI2028662, TESTI2028670, TESTI2028705, TESTI2028776, TESTI2028811, TESTI2028891, TESTI2028985, TESTI2028997, TESTI2029131, TESTI2029162, TESTI2029196, TESTI2029201, TESTI2029227, TESTI2029244, TESTI2029249, TESTI2029252, TESTI2029259, TESTI2029264, TESTI2029470, TESTI2029672, TESTI2029785, TESTI2029880, TESTI2030136, TESTI2030322, TESTI2030336, TESTI2030342, TESTI2030519, TESTI2030554, TESTI2030556, TESTI2030728, TESTI2030754, TESTI2030770, TESTI2030860, TESTI2030901, TESTI2030917, TESTI2030930, TESTI2031006, TESTI2031007, TESTI2031060, TESTI2031129, TESTI2031356, TESTI2031418, TESTI2031504, TESTI2031529, TESTI2031687, TESTI2031760, TESTI2031809, TESTI2031919, TESTI2031935, TESTI2031986, TESTI2032044, TESTI2032067, TESTI2032079, TESTI2032643, TESTI2032681, TESTI2032761, TESTI2032768, TESTI2032774, TESTI2032828, TESTI2033031, TESTI2033242, TESTI2033254, TESTI2033300, TESTI2033395, TESTI2033441, TESTI2033453, TESTI2033505, TESTI2033520, TESTI2033641, TESTI2033710, TESTI2033905, TESTI2034187, TESTI2034243, TESTI2034249, TESTI2034307, TESTI2034357, TESTI2034401, TESTI2034407, TESTI2034506, TESTI2034520, TESTI2034718, TESTI2034730, TESTI2034749, TESTI2034767, TESTI2034774, TESTI2034777, TESTI2034785, TESTI2034799, TESTI2034847, TESTI2034913, TESTI2034916, TESTI2034931, TESTI2034953, TESTI2034997, TESTI2035003, TESTI2035078, TESTI2035084, TESTI2035107, TESTI2035121, TESTI2035124, TESTI2035183, TESTI2035236, TESTI2035262, TESTI2035309, TESTI2035688, TESTI2035775, TESTI2035793, TESTI2035898, TESTI2035962, TESTI2035981, TESTI2035997, TESTI2036114, TESTI2036129, TESTI2036285, TESTI2036288, TESTI2036513, TESTI2036589, TESTI2036650, TESTI2036684, TESTI2036691, TESTI2036736, TESTI2036822, TESTI2036833, TESTI2036913, TESTI2036922, TESTI2036951, TESTI2036965, TESTI2036969, TESTI2037002, TESTI2037055, TESTI2037081, TESTI2037085, TESTI2037103, TESTI2037106, TESTI2037111, TESTI2037209, TESTI2037255, TESTI2037359, TESTI2037375, TESTI2037382, TESTI2037534, TESTI2037569, TESTI2037572, TESTI2037643, TESTI2037657, TESTI2037673, TESTI2037723, TESTI2037819, TESTI2037830, TESTI2037845, TESTI2037877, TESTI2037976, TESTI2038048, TESTI2038065, TESTI2038104, TESTI2038275, TESTI2038388, TESTI2038573, TESTI2038596, TESTI2038623, TESTI2038644, TESTI2038733, TESTI2038858, TESTI2038958, TESTI2039025, TESTI2039026, TESTI2039038, TESTI2039041, TESTI2039060, TESTI2039113, TESTI2039121, TESTI2039177, TESTI2039209, TESTI2039225, TESTI2039227, TESTI2039276, TESTI2039342, TESTI2039353, TESTI2039544, TESTI2039613, TESTI2039707, TESTI2039732, TESTI2039738, TESTI2039776, TESTI2039867, TESTI2039908, TESTI2040018, TESTI2040094, TESTI2040102, TESTI2040128, TESTI2040143, TESTI2040297, TESTI2040372, TESTI2040377, TESTI2040424, TESTI2040642, TESTI2040815, TESTI2040897, TESTI2040944, TESTI2040964, TESTI2040983, TESTI2040989, TESTI2041330, TESTI2041362, TESTI2041517, TESTI2041564, TESTI2041664, TESTI2041730, TESTI2041734, TESTI2041778, TESTI2041800, TESTI2041947, TESTI2041956, TESTI2041976, TESTI2042062, TESTI2042149, TESTI2042264, TESTI2042295, TESTI2042302, TESTI2042326, TESTI2042400, TESTI2042450, TESTI2042473, TESTI2042507, TESTI2042508, TESTI2042750, TESTI2042783, TESTI2042806, TESTI2042928, TESTI2042946, TESTI2042958, TESTI2043275, TESTI2043277, TESTI2043282, TESTI2043313, TESTI2043477, TESTI2043585, TESTI2043758, TESTI2043817, TESTI2043857, TESTI2043866, TESTI2043869, TESTI2044064, TESTI2044118, TESTI2044194, TESTI2044306, TESTI2044309, TESTI2044413, TESTI2044418, TESTI2044754, TESTI2044788, TESTI2044796, TESTI2044833, TESTI2044892, TESTI2044920, TESTI2044968, TESTI2045139, TESTI2045171, TESTI2045199, TESTI2045353, TESTI2045509, TESTI2045562, TESTI2045611, TESTI2045819, TESTI2045850, TESTI2045920, TESTI2045964, TESTI2045983, TESTI2046100, TESTI2046188, TESTI2046347, TESTI2046352, TESTI2046358, TESTI2046439, TESTI2046535, TESTI2046536, TESTI2046552, TESTI2046569, TESTI2046686, TESTI2046721, TESTI2046732, TESTI2046786, TESTI2046797, TESTI2046863, TESTI2046872, TESTI2047071, TESTI2047141, TESTI2047147, TESTI2047153, TESTI2047212, TESTI2047342, TESTI2047383, TESTI2047605, TESTI2047792, TESTI2047801, TESTI2047818, TESTI2047824, TESTI2047885, TESTI2047930, TESTI2048105, TESTI2048109, TESTI2048465, TESTI2048603, TESTI2048898, TESTI2049041, TESTI2049062, TESTI2049206, TESTI2049246, TESTI2049277, TESTI2049422, TESTI2049452, TESTI2049469, TESTI2049553, TESTI2049576, TESTI2049857, TESTI2049956, TESTI2050137, TESTI2050681, TESTI2050780, TESTI2050987, TESTI2051148, TESTI2051177, TESTI2051279, TESTI2051488, TESTI2051543, TESTI2051627, TESTI2051742, TESTI2051767, TESTI2051791, TESTI2051806, TESTI2051867, TESTI2051873, TESTI2052110, TESTI2052202, TESTI2052211, TESTI2052256, TESTI2052288, TESTI2052525, TESTI2052670, TESTI2052698, TESTI2052799, TESTI2052822, TESTI2052985, TESTI2053151, TESTI2053242, TESTI2053399, TESTI2053526, TESTI2053561, TESTI2053621, TESTI2053667, TESTI2053723, TESTI3000002, TESTI3000005, TESTI4000068, TESTI4000079, TESTI4000093, TESTI4000134, TESTI4000137, TESTI4000153, TESTI4000155, TESTI4000157, TESTI4000183, TESTI4000214, TESTI4000215, TESTI4000228, TESTI4000250, TESTI4000288, TESTI4000319, TESTI4000349, TESTI4000370, TESTI4000394, TESTI4000434, TESTI4000462, TESTI4000530, TESTI4000534, TESTI4000598, TESTI4000600, TESTI4000621, TESTI4000703, TESTI4000724, TESTI4000957, TESTI4000970, TESTI4001036, TESTI4001037, TESTI4001060, TESTI4001106, TESTI4001148, TESTI4001176, TESTI4001195, TESTI4001201, TESTI4001206, TESTI4001348, TESTI4001441, TESTI4001467, TESTI4001473, TESTI4001517, TESTI4001527, TESTI4001561, TESTI4001569, TESTI4001604, TESTI4001665, TESTI4001679, TESTI4001795, TESTI4001923, TESTI4001925, TESTI4001984, TESTI4002003, TESTI4002072, TESTI4002141, TESTI4002195, TESTI4002290, TESTI4002319, TESTI4002491, TESTI4002520, TESTI4002552, TESTI4002647, TESTI4002703, TESTI4002754, TESTI4002868, TESTI4002878, TESTI4002889, TESTI4002988, TESTI4003179, TESTI4003279, TESTI4003319, TESTI4003404, TESTI4003565, TESTI4003574, TESTI4003579, TESTI4003602, TESTI4003703, TESTI4003733, TESTI4003796, TESTI4003944, TESTI4004003, TESTI4004031, TESTI4004200, TESTI4004210, TESTI4004539, TESTI4004626, TESTI4004653, TESTI4004695, TESTI4004722, TESTI4004887, TESTI4004917, TESTI4005015, TESTI4005039, TESTI4005133, TESTI4005158, TESTI4005317, TESTI4005322, TESTI4005399, TESTI4005470, TESTI4005500, TESTI4005534, TESTI4005543, TESTI4005628, TESTI4005801, TESTI4005805, TESTI4005857, TESTI4005961, TESTI4006053, TESTI4006079, TESTI4006112, TESTI4006137, TESTI4006148, TESTI4006219, TESTI4006234, TESTI4006308, TESTI4006326, TESTI4006393, TESTI4006407, TESTI4006412, TESTI4006420, TESTI4006441, TESTI4006473, TESTI4006539, TESTI4006546, TESTI4006567, TESTI4006704, TESTI4006728, TESTI4006802, TESTI4006819, TESTI4007064, TESTI4007163, TESTI4007176, TESTI4007203, TESTI4007239, TESTI4007369, TESTI4007373, TESTI4007382, TESTI4007404, TESTI4007489, TESTI4007565, TESTI4007671, TESTI4007775, TESTI4007778, TESTI4007799, TESTI4007810, TESTI4007816, TESTI4007965, TESTI4008007, TESTI4008050, TESTI4008058, TESTI4008086, TESTI4008097, TESTI4008176, TESTI4008209, TESTI4008219, TESTI4008250, TESTI4008302, TESTI4008305, TESTI4008401, TESTI4008417, TESTI4008429, TESTI4008573, TESTI4008797, TESTI4008816, TESTI4008840, TESTI4008935, TESTI4008993, TESTI4009022, TESTI4009028, TESTI4009034, TESTI4009123, TESTI4009160, TESTI4009215, TESTI4009283, TESTI4009306, TESTI4009374, TESTI4009406, TESTI4009454, TESTI4009457, TESTI4009501, TESTI4009563, TESTI4009608, TESTI4009638, TESTI4009752, TESTI4009881, TESTI4009886, TESTI4009928, TESTI4010076, TESTI4010082, TESTI4010095, TESTI4010211, TESTI4010377, TESTI4010475, TESTI4010544, TESTI4010713, TESTI4010721, TESTI4010789, TESTI4010817, TESTI4010831, TESTI4010902, TESTI4010928, TESTI4010979, TESTI4011070, TESTI4011072, TESTI4011084, TESTI4011118, TESTI4011246, TESTI4011484, TESTI4011505, TESTI4011532, TESTI4011616, TESTI4011744, TESTI4011745, TESTI4011829, TESTI4011926, TESTI4011956, TESTI4012010, TESTI4012086, TESTI4012258, TESTI4012293, TESTI4012329, TESTI4012382, TESTI4012406, TESTI4012448, TESTI4012451, TESTI4012505, TESTI4012556, TESTI4012623, TESTI4012646, TESTI4012679, TESTI4012911, TESTI4012956, TESTI4012960, TESTI4013365, TESTI4013369, TESTI4013410, TESTI4013602, TESTI4013667, TESTI4013685, TESTI4013735, TESTI4013742, TESTI4013774, TESTI4013817, TESTI4013830, TESTI4013852, TESTI4013894, TESTI4013924, TESTI4013960, TESTI4013962, TESTI4014159, TESTI4014175, TESTI4014265, TESTI4014276, TESTI4014306, TESTI4014392, TESTI4014415, TESTI4014445, TESTI4014553, TESTI4014661, TESTI4014694, TESTI4014801, TESTI4014818, TESTI4014891, TESTI4014908, TESTI4014924, TESTI4014932, TESTI4014977, TESTI4015012, TESTI4015129, TESTI4015145, TESTI4015204, TESTI4015263, TESTI4015293, TESTI4015299, TESTI4015339, TESTI4015398, TESTI4015442, TESTI4015471, TESTI4015477, TESTI4015600, TESTI4015646, TESTI4015681, TESTI4015688, TESTI4015790, TESTI4016110, TESTI4016238, TESTI4016551, TESTI4016812, TESTI4016822, TESTI4016865, TESTI4016882, TESTI4016925, TESTI4017001, TESTI4017116, TESTI4017137, TESTI4017229, TESTI4017254, TESTI4017269, TESTI4017380, TESTI4017382, TESTI4017543, TESTI4017575, TESTI4017647, TESTI4017714, TESTI4017763, TESTI4017848, TESTI4017854, TESTI4017901, TESTI4017961, TESTI4017984, TESTI4018101, TESTI4018152, TESTI4018208, TESTI4018382, TESTI4018436, TESTI4018506, TESTI4018555, TESTI4018751, TESTI4018806, TESTI4018835, TESTI4018859, TESTI4018881, TESTI4018886, TESTI4018938, TESTI4019140, TESTI4019149′, TESTI4019299, TESTI4019417, TESTI4019440, TESTI4019566, TESTI4019657, TESTI4019756, TESTI4019843, TESTI4020092, TESTI4020102, TESTI4020342, TESTI4020460, TESTI4020596, TESTI4020806, TESTI4020819, TESTI4020920, TESTI4021129, TESTI4021197, TESTI4021294, TESTI4021377, TESTI4021456, TESTI4021491, TESTI4021569, TESTI4021713, TESTI4021821, TESTI4022158, TESTI4022577, TESTI4022716, TESTI4022873, TESTI4023096, TESTI4023172, TESTI4023546, TESTI4023555, TESTI4023654, TESTI4023722, TESTI4023762, TESTI4023942, TESTI4024096, TESTI4024240, TESTI4024245, TESTI4024294, TESTI4024344, TESTI4024387, TESTI4024420, TESTI4024494, TESTI4024740, TESTI4024874, TESTI4024890, TESTI4024907, TESTI4024930, TESTI4025062, TESTI4025268, TESTI4025401, TESTI4025494, TESTI4025547, TESTI4025731, TESTI4025797, TESTI4025865, TESTI4025908, TESTI4025920, TESTI4026079, TESTI4026080, TESTI4026192, TESTI4026207, TESTI4026295, TESTI4026390, TESTI4026456, TESTI4026510, TESTI4026524, TESTI4026680, TESTI4026700, TESTI4026762, TESTI4026785, TESTI4027139, TESTI4027170, TESTI4027262, TESTI4027516, TESTI4027557, TESTI4027660, TESTI4027821, TESTI4027969, TESTI4028042, TESTI4028059, TESTI4028062, TESTI4028182, TESTI4028429, TESTI4028612, TESTI4028692, TESTI4028809, TESTI4028823, TESTI4028880, TESTI4028904, TESTI4028938, TESTI4028958, TESTI4028983, TESTI4029023, TESTI4029348, TESTI4029370, TESTI4029528, TESTI4029651, TESTI4029671, TESTI4029676, TESTI4029690, TESTI4029731, TESTI4029743, TESTI4030069, TESTI4030159, TESTI4030319, TESTI4030505, TESTI4030603, TESTI4030669, TESTI4030673, TESTI4030864, TESTI4031066, TESTI4031173, TESTI4031335, TESTI4031745, TESTI4031818, TESTI4032090, TESTI4032112, TESTI4032128, TESTI4032270, TESTI4032375, TESTI4032834, TESTI4032856, TESTI4032895, TESTI4032913, TESTI4033146, TESTI4033177, TESTI4033433, TESTI4033690, TESTI4034172, TESTI4034212, TESTI4034432, TESTI4034495, TESTI4034632, TESTI4034633, TESTI4034912, TESTI4034973, TESTI4035063, TESTI4035065, TESTI4035498, TESTI4035508, TESTI4035581, TESTI4035602, TESTI4035637, TESTI4035649, TESTI4035770, TESTI4035872, TESTI4035895, TESTI4035898, TESTI4035989, TESTI4036012, TESTI4036042, TESTI4036048, TESTI4036315, TESTI4036319, TESTI4036449, TESTI4036767, TESTI4036909, TESTI4037066, TESTI4037188, TESTI4037228, TESTI4037244, TESTI4037727, TESTI4037949, TESTI4038047, TESTI4038156, TESTI4038223, TESTI4038258, TESTI4038339, TESTI4038492, TESTI4038721, TESTI4038758, TESTI4038779, TESTI4038818, TESTI4039038, TESTI4039086, TESTI4039451, TESTI4039575, TESTI4039659, TESTI4039744, TESTI4039904, TESTI4040197, TESTI4040363, TESTI4040535, TESTI4040559, TESTI4040598, TESTI4040800, TESTI4040804, TESTI4040939, TESTI4040956, TESTI4041049, TESTI4041053, TESTI4041086, TESTI4041099, TESTI4041143, TESTI4041482, TESTI4041519, TESTI4041624, TESTI4041629, TESTI4041832, TESTI4041844, TESTI4041903, TESTI4041954, TESTI4041984, TESTI4041985, TESTI4041986, TESTI4042098, TESTI4042420, TESTI4042440, TESTI4042444, TESTI4042711, TESTI4042846, TESTI4043067, TESTI4043129, TESTI4043140, TESTI4043166, TESTI4043203, TESTI4043223, TESTI4043371, TESTI4043378, TESTI4043512, TESTI4043551, TESTI4043710, TESTI4043947, TESTI4044035, TESTI4044076, TESTI4044084, TESTI4044123, TESTI4044186, TESTI4044234, TESTI4044291, TESTI4044296, TESTI4044300, TESTI4044682, TESTI4044704, TESTI4044770, TESTI4045168, TESTI4045312, TESTI4045330, TESTI4045470, TESTI4045701, TESTI4045908, TESTI4045955, TESTI4045982, TESTI4046073, TESTI4046090, TESTI4046240, TESTI4046245, TESTI4046253, TESTI4046282, TESTI4046328, TESTI4046450, TESTI4046457, TESTI4046487, TESTI4046502, TESTI4046523, TESTI4046819, TESTI4046873, TESTI4046884, TESTI4046896, TESTI4046903, TESTI4046962, TESTI4047069, TESTI4047119, TESTI4047305, TESTI4047328, TESTI4047437, TESTI4047569, TESTI4047746, TESTI4047808, THYMU1000010, THYMU1000017, THYMU1000025, THYMU1000029, THYMU1000032, THYMU1000033, THYMU1000060, THYMU1000074, THYMU1000083, THYMU1000098, THYMU1000103, THYMU1000105, THYMU1000136, THYMU1000142, THYMU1000144, THYMU1000158, THYMU1000176, THYMU1000179, THYMU1000191, THYMU1000198, THYMU1000217, THYMU1000240, THYMU1000242, THYMU1000291, THYMU1000316, THYMU1000318, THYMU1000331, THYMU1000336, THYMU1000359, THYMU1000366, THYMU1000382, THYMU1000393, THYMU1000394, THYMU1000399, THYMU1000426, THYMU1000440, THYMU1000459, THYMU1000473, THYMU1000491, THYMU1000496, THYMU1000499, THYMU1000527, THYMU1000532, THYMU1000536, THYMU1000554, THYMU1000558, THYMU1000576, THYMU1000600, THYMU1000677, THYMU1000692, THYMU2000022, THYMU2000032, THYMU2000057, THYMU2000120, THYMU2000138, THYMU2000140, THYMU2000155, THYMU2000162, THYMU2000171, THYMU2000176, THYMU2000179, THYMU2000231, THYMU2000236, THYMU2000276, THYMU2000280, THYMU2000300, THYMU2000317, THYMU2000368, THYMU2000369, THYMU2000418, THYMU2000436, THYMU2000440, THYMU2000489, THYMU2000492, THYMU2000519, THYMU2000570, THYMU2000602, THYMU2000660, THYMU2000671, THYMU2000672, THYMU2000702, THYMU2000767, THYMU2000775, THYMU2000800, THYMU2000879, THYMU2000932, THYMU2000950, THYMU2000971, THYMU2000982, THYMU2000990, THYMU2001007, THYMU2001053, THYMU2001071, THYMU2001090, THYMU2001139, THYMU2001195, THYMU2001202, THYMU2001203, THYMU2001256, THYMU2001270, THYMU2001291, THYMU2001314, THYMU2001325, THYMU2001357, THYMU2001381, THYMU2001422, THYMU2001443, THYMU2001515, THYMU2001521, THYMU2001556, THYMU2001622, THYMU2001727, THYMU2001819, THYMU2001825, THYMU2001839, THYMU2001868, THYMU2001898, THYMU2001900, THYMU2001916, THYMU2001926, THYMU2001989, THYMU2002023, THYMU2002037, THYMU2002080, THYMU2002109, THYMU2002147, THYMU2002154, THYMU2002157, THYMU2002162, THYMU2002177, THYMU2002203, THYMU2002229, THYMU2002242, THYMU2002338, THYMU2002356, THYMU2002376, THYMU2002384, THYMU2002450, THYMU2002490, THYMU2002548, THYMU2002695, THYMU2002745, THYMU2002756, THYMU2002789, THYMU2002792, THYMU2002815, THYMU2002841, THYMU2002852, THYMU2002910, THYMU2002950, THYMU2002983, THYMU2003069, THYMU2003107, THYMU2003124, THYMU2003133, THYMU2003166, THYMU2003232, THYMU2003242, THYMU2003249, THYMU2003270, THYMU2003282, THYMU2003287, THYMU2003336, THYMU2003366, THYMU2003397, THYMU2003440, THYMU2003446, THYMU2003470, THYMU2003479, THYMU2003499, THYMU2003632, THYMU2003650, THYMU2003700, THYMU2003760, THYMU2003803, THYMU2003855, THYMU2003907, THYMU2003932, THYMU2004003, THYMU2004008, THYMU2004042, THYMU2004108, THYMU2004111, THYMU2004123, THYMU2004139, THYMU2004152, THYMU2004169, THYMU2004284, THYMU2004320, THYMU2004336, THYMU2004356, THYMU2004452, THYMU2004508, THYMU2004512, THYMU2004635, THYMU2004639, THYMU2004668, THYMU2004677, THYMU2004688, THYMU2004693, THYMU2004733, THYMU2004835, THYMU2004843, THYMU2004916, THYMU2004986, THYMU2005001, THYMU2005003, THYMU2005046, THYMU2005134, THYMU2005156, THYMU2005190, THYMU2005225, THYMU2005240, THYMU2005246, THYMU2005270, THYMU2005283, THYMU2005303, THYMU2005321, THYMU2005356, THYMU2005369, THYMU2005439, THYMU2005480, THYMU2005482, THYMU2005507, THYMU2005545, THYMU2005574, THYMU2005576, THYMU2005748, THYMU2005759, THYMU2005807, THYMU2005815, THYMU2005855, THYMU2005881, THYMU2005948, THYMU2005980, THYMU2005997, THYMU2006001, THYMU2006048, THYMU2006098, THYMU2006160, THYMU2006170, THYMU2006252, THYMU2006261, THYMU2006277, THYMU2006303, THYMU2006324, THYMU2006350, THYMU2006357, THYMU2006365, THYMU2006420, THYMU2006468, THYMU2006610, THYMU2006666, THYMU2006712, THYMU2006913, THYMU2006946, THYMU2006965, THYMU2007025, THYMU2007036, THYMU2007060, THYMU2007065, THYMU2007095, THYMU2007112, THYMU2007146, THYMU2007179, THYMU2007258, THYMU2007307, THYMU2007308, THYMU2007339, THYMU2007350, THYMU2007384, THYMU2007415, THYMU2007467, THYMU2007493, THYMU2007521, THYMU2007528, THYMU2007530, THYMU2007532, THYMU2007561, THYMU2007571, THYMU2007635, THYMU2007658, THYMU2007667, THYMU2007694, THYMU2007725, THYMU2007729, THYMU2007802, THYMU2007824, THYMU2007854, THYMU2007886, THYMU2007952, THYMU2007969, THYMU2008035, THYMU2008036, THYMU2008049, THYMU2008072, THYMU2008111, THYMU2008145, THYMU2008149, THYMU2008185, THYMU2008191, THYMU2008207, THYMU2008226, THYMU2008282, THYMU2008321, THYMU2008339, THYMU2008350, THYMU2008351, THYMU2008383, THYMU2008452, THYMU2008643, THYMU2008686, THYMU2008691, THYMU2008714, THYMU2008725, THYMU2008727, THYMU2008781, THYMU2008799, THYMU2008876, THYMU2008910, THYMU2008917, THYMU2008928, THYMU2008990, THYMU2008994, THYMU2009023, THYMU2009046, THYMU2009101, THYMU2009104, THYMU2009134, THYMU2009157, THYMU2009181, THYMU2009186, THYMU2009338, THYMU2009425, THYMU2009516, THYMU2009526, THYMU2009546, THYMU2009592, THYMU2009596, THYMU2009792, THYMU2009835, THYMU2009906, THYMU2009948, THYMU2010030, THYMU2010041, THYMU2010046, THYMU2010059, THYMU2010082, THYMU2010161, THYMU2010192, THYMU2010448, THYMU2010519, THYMU2010637, THYMU2010671, THYMU2010699, THYMU2010705, THYMU2010779, THYMU2010816, THYMU2010831, THYMU2010848, THYMU2011053, THYMU2011063, THYMU2011072, THYMU2011096, THYMU2011118, THYMU2011142, THYMU2011183, THYMU2011257, THYMU2011259, THYMU2011295, THYMU2011390, THYMU2011431, THYMU2011447, THYMU2011482, THYMU2011538, THYMU2011548, THYMU2011551, THYMU2011564, THYMU2011573, THYMU2011585, THYMU2011621, THYMU2011666, THYMU2011736, THYMU2011785, THYMU2011806, THYMU2011852, THYMU2011875, THYMU2011881, THYMU2011937, THYMU2011939, THYMU2012024, THYMU2012073, THYMU2012113, THYMU2012273, THYMU2012401, THYMU2012492, THYMU2012507, THYMU2012565, THYMU2012574, THYMU2012625, THYMU2012631, THYMU2012665, THYMU2012701, THYMU2012807, THYMU2012826, THYMU2012882, THYMU2012891, THYMU2012902, THYMU2012919, THYMU2013023, THYMU2013047, THYMU2013051, THYMU2013089, THYMU2013136, THYMU2013170, THYMU2013364, THYMU2013386, THYMU2013426, THYMU2013578, THYMU2013648, THYMU2013705, THYMU2013757, THYMU2013779, THYMU2013863, THYMU2013950, THYMU2013981, THYMU2014067, THYMU2014068, THYMU2014167, THYMU2014183, THYMU2014204, THYMU2014297, THYMU2014323, THYMU2014327, THYMU2014353, THYMU2014492, THYMU2014500, THYMU2014762, THYMU2014777, THYMU2014801, THYMU2014901, THYMU2014923, THYMU2015019, THYMU2015161, THYMU2015316, THYMU2015321, THYMU2015439, THYMU2015441, THYMU2015479, THYMU2015762, THYMU2015775, THYMU2015825, THYMU2015918, THYMU2015943, THYMU2015984, THYMU2016113, THYMU2016164, THYMU2016204, THYMU2016219, THYMU2016360, THYMU2016496, THYMU2016523, THYMU2016840, THYMU2016968, THYMU2017008, THYMU2017010, THYMU2017023, THYMU2017085, THYMU2017099, THYMU2017158, THYMU2017162, THYMU2017215, THYMU2017362, THYMU2017366, THYMU2017398, THYMU2017449, THYMU2017479, THYMU2017522, THYMU2017526, THYMU2017601, THYMU2017675, THYMU2017707, THYMU2017831, THYMU2017844, THYMU2017878, THYMU2017948, THYMU2018028, THYMU2018071, THYMU2018189, THYMU2018197, THYMU2018384, THYMU2018455, THYMU2018547, THYMU2018565, THYMU2018639, THYMU2018673, THYMU2018721, THYMU2018772, THYMU2018819, THYMU2018841, THYMU2018997, THYMU2019021, THYMU2019054, THYMU2019197, THYMU2019210, THYMU2019364, THYMU2019436, THYMU2019442, THYMU2019587, THYMU2019599, THYMU2019686, THYMU2019813, THYMU2020198, THYMU2020289, THYMU2020416, THYMU2020491, THYMU2020499, THYMU2020560, THYMU2020667, THYMU2020830, THYMU2020883, THYMU2020959, THYMU2021361, THYMU2021509, THYMU2021597, THYMU2021684, THYMU2021714, THYMU2022213, THYMU2022289, THYMU2022660, THYMU2022854, THYMU2022922, THYMU2023209, THYMU2023264, THYMU2023576, THYMU2023711, THYMU2023900, THYMU2023943, THYMU2023967, THYMU2024071, THYMU2024121, THYMU2024185, THYMU2024207, THYMU2024616, THYMU2024684, THYMU2024748, THYMU2025042, THYMU2025189, THYMU2025319, THYMU2025325, THYMU2025406, THYMU2025557, THYMU2025572, THYMU2025707, THYMU2025849, THYMU2025909, THYMU2025939, THYMU2026182, THYMU2026350, THYMU2026530, THYMU2026531, THYMU2026835, THYMU2026904, THYMU2027053, THYMU2027168, THYMU2027249, THYMU2027282, THYMU2027497, THYMU2027695, THYMU2027734, THYMU2027894, THYMU2027996, THYMU2028041, THYMU2028368, THYMU2028379, THYMU2028394, THYMU2028412, THYMU2028629, THYMU2028632, THYMU2028724, THYMU2028739, THYMU2028942, THYMU2028978, THYMU2029134, THYMU2029578, THYMU2029676, THYMU2029688, THYMU2029788, THYMU2030068, THYMU2030226, THYMU2030264, THYMU2030462, THYMU2030543, THYMU2030637, THYMU2030655, THYMU2030796, THYMU2030912, THYMU2030982, THYMU2031046, THYMU2031139, THYMU2031218, THYMU2031249, THYMU2031258, THYMU2031368, THYMU2031579, THYMU2031890, THYMU2031994, THYMU2032014, THYMU2032035, THYMU2032080, THYMU2032150, THYMU2032155, THYMU2032358, THYMU2032437, THYMU2032601, THYMU2032655, THYMU2032696, THYMU2032715, THYMU2032732, THYMU2032825, THYMU2032976, THYMU2033053, THYMU2033059, THYMU2033070, THYMU2033079, THYMU2033085, THYMU2033104, THYMU2033227, THYMU2033263, THYMU2033401, THYMU2033583, THYMU2033755, THYMU2033787, THYMU2033816, THYMU2034182, THYMU2034279, THYMU2034314, THYMU2034338, THYMU2034374, THYMU2034647, THYMU2034917, THYMU2035064, THYMU2035078, THYMU2035101, THYMU2035319, THYMU2035321, THYMU2035388, THYMU2035400, THYMU2035554, THYMU2035710, THYMU2035735, THYMU2036058, THYMU2036105, THYMU2036207, THYMU2036215, THYMU2036252, THYMU2036265, THYMU2036366, THYMU2036459, THYMU2036461, THYMU2036604, THYMU2036653, THYMU2037081, THYMU2037208, THYMU2037226, THYMU2037233, THYMU2037234, THYMU2037348, THYMU2037406, THYMU2037965, THYMU2038058, THYMU2038189, THYMU2038199, THYMU2038220, THYMU2038301, THYMU2038369, THYMU2038389, THYMU2038615, THYMU2038636, THYMU2038739, THYMU2038772, THYMU2038797, THYMU2038906, THYMU2039305, THYMU2039315, THYMU2039334, THYMU2039350, THYMU2039411, THYMU2039634, THYMU2039719, THYMU2039780, THYMU2039788, THYMU2039989, THYMU2040029, THYMU2040110, THYMU2040114, THYMU2040140, THYMU2040412, THYMU2040427, THYMU2040824, THYMU2040925, THYMU2041007, THYMU2041015, THYMU2041252, THYMU3000028, THYMU3000036, THYMU3000037, THYMU3000082, THYMU3000194, THYMU3000224, THYMU3000269, THYMU3000306, THYMU3000360, THYMU3000390, THYMU3000420, THYMU3000490, THYMU3000504, THYMU3000542, THYMU3000655, THYMU3000776, THYMU3000826, THYMU3000841, THYMU3001077, THYMU3001082, THYMU3001083, THYMU3001133, THYMU3001151, THYMU3001379, THYMU3001472, THYMU3001593, THYMU3001883, THYMU3001939, THYMU3001991, THYMU3002452, THYMU3002578, THYMU3002661, THYMU3003007, THYMU3003092, THYMU3003212, THYMU3003309, THYMU3003350, THYMU3003403, THYMU3003565, THYMU3003763, THYMU3003865, THYMU3003958, THYMU3003965, THYMU3004157, THYMU3004628, THYMU3004632, THYMU3004835, THYMU3004866, THYMU3005050, THYMU3005378, THYMU3005407, THYMU3005415, THYMU3005427, THYMU3005482, THYMU3005491, THYMU3005629, THYMU3005696, THYMU3006118, THYMU3006132, THYMU3006168, THYMU3006172, THYMU3006371, THYMU3006485, THYMU3006640, THYMU3006767, THYMU3006811, THYMU3006963, THYMU3007137, THYMU3007308, THYMU3007368, THYMU3007423, THYMU3007559, THYMU3007845, THYMU3008060, THYMU3008105, THYMU3008136, THYMU3008171, THYMU3008216, THYMU3008436, THYMU3008672, THYMU3008883, THYMU3008935, THYMU3009006, THYMU3009255, THYMU3009391, THYMU3009643, THYMU3009755, THYMU3010247, THYMU3011012, THYMU3011081, THYMU3011244, THYMU3011360, THYMU3011534, THYMU3011543, THYMU3011556, THYMU3011717, THYMU3011827, THYMU3012402, THYMU3012907, THYMU3012983, THYMU3013114, THYMU3013197, THYMU3013241, THYMU3013470, THYMU3013785, THYMU3013897, THYMU3014038, THYMU3014173, THYMU3014372, THYMU3014555, THYMU3014620, THYMU3014701, THYMU3015042, THYMU3015457, THYMU3015571, THYMU3015592, THYMU3015625, THYMU3015647, THYMU3015759, THYMU3015962, THYMU3016022, THYMU3016518, THYMU3016797, THYMU3016822, THYMU3016850, THYMU3017562, THYMU3017688, THYMU3017689, THYMU3017761, THYMU3018151, THYMU3018896, THYMU3019095, THYMU3019476, THYMU3019605, THYMU3019916, THYMU3020221, THYMU3020595, THYMU3020713, THYMU3020856, THYMU3020869, THYMU3020970, THYMU3021404, THYMU3021755, THYMU3021900, THYMU3022211, THYMU3022434, THYMU3022528, THYMU3022668, THYMU3022982, THYMU3023107, THYMU3023211, THYMU3023216, THYMU3023394, THYMU3023400, THYMU3023797, THYMU3024164, THYMU3024339, THYMU3024602, THYMU3024879, THYMU3025118, THYMU3025313, THYMU3025642, THYMU3025683, THYMU3025772, THYMU3025865, THYMU3026000, THYMU3026350, THYMU3026479, THYMU3026532, THYMU3026783, THYMU3026869, THYMU3027251, THYMU3027540, THYMU3027655, THYMU3027671, THYMU3028075, THYMU3028410, THYMU3028461, THYMU3028702, THYMU3029188, THYMU3029318, THYMU3029421, THYMU3029719, THYMU3029774, THYMU3029832, THYMU3030072, THYMU3030231, THYMU3030706, THYMU3030710, THYMU3030752, THYMU3031146, THYMU3031402, THYMU3031610, THYMU3031612, THYMU3031868, THYMU3031878, THYMU3032032, THYMU3032798, THYMU3032867, THYMU3033402, THYMU3033626, THYMU3033630, THYMU3033649, THYMU3033754, THYMU3033759, THYMU3034078, THYMU3034099, THYMU3034453, THYMU3034616, THYMU3034671, THYMU3034853, THYMU3034867, THYMU3034983, THYMU3036200, THYMU3036310, THYMU3036934, THYMU3036953, THYMU3037052, THYMU3037192, THYMU3037617, THYMU3037772, THYMU3037827, THYMU3037836, THYMU3037856, THYMU3037867, THYMU3037909, THYMU3037980, THYMU3038158, THYMU3038167, THYMU3038214, THYMU3038266, THYMU3038328, THYMU3038347, THYMU3038375, THYMU3038603, THYMU3038687, THYMU3038759, THYMU3038879, THYMU3038970, THYMU3039807, THYMU3039846, THYMU3040068, THYMU3040126, THYMU3040146, THYMU3040168, THYMU3040172, THYMU3040725, THYMU3040746, THYMU3040816, THYMU3040829, THYMU3040830, THYMU3040986, THYMU3041354, THYMU3041386, THYMU3041428, THYMU3041573, THYMU3041603, THYMU3041736, THYMU3041918, THYMU3042075, THYMU3042321, THYMU3042372, THYMU3042758, THYMU3042929, THYMU3043200, THYMU3043327, THYMU3043482, THYMU3043597, THYMU3043688, THYMU3043779, THYMU3043883, THYMU3043993, THYMU3044175, THYMU3044188, THYMU3044441, THYMU3044445, THYMU3045510, THYMU3045673, THYMU3045692, THYMU3045704, THYMU3046140, THYMU3046350, THYMU3046360, THYMU3046856, THYMU3047115, THYMU3047144, THYMU3047156, THYMU3047366, THYMU3047513, THYMU3047542, THYMU3047760, THYMU3047891, TKIDN1000001, TKIDN1000044, TKIDN1000062, TKIDN1000066, TKIDN1000164, TKIDN1000171, TKIDN1000192, TKIDN2000127, TKIDN2000240, TKIDN2000246, TKIDN2000319, TKIDN2000464, TKIDN2000521, TKIDN2000701, TKIDN2001529, TKIDN2001662, TKIDN2002318, TKIDN2002329, TKIDN2002424, TKIDN2002632, TKIDN2002738, TKIDN2003044, TKIDN2003059, TKIDN2003062, TKIDN2003078, TKIDN2003366, TKIDN2003396, TKIDN2003413, TKIDN2003597, TKIDN2003601, TKIDN2004185, TKIDN2004386, TKIDN2004458, TKIDN2004748, TKIDN2005487, TKIDN2005721, TKIDN2005934, TKIDN2005947, TKIDN2005956, TKIDN2006525, TKIDN2006761, TKIDN2006852, TKIDN2007605, TKIDN2007667, TKIDN2007828, TKIDN2008176, TKIDN2008778, TKIDN2009092, TKIDN2009330, TKIDN2009481, TKIDN2009641, TKIDN2009794, TKIDN2009889, TKIDN2010200, TKIDN2010232, TKIDN2010278, TKIDN2010602, TKIDN2010812, TKIDN2010934, TKIDN2011051, TKIDN2011160, TKIDN2011289, TKIDN2011324, TKIDN2012034, TKIDN2012771, TKIDN2012824, TKIDN2013134, TKIDN2013287, TKIDN2014570, TKIDN2014757, TKIDN2014771, TKIDN2014964, TKIDN2015025, TKIDN2015071, TKIDN2015161, TKIDN2015263, TKIDN2015285, TKIDN2015788, TKIDN2016309, TKIDN2016399, TKIDN2016846, TKIDN2018926, TKIDN2019116, TLIVE2000023, TLIVE2000142, TLIVE2000292, TLIVE2000762, TLIVE2000979, TLIVE2001327, TLIVE2001616, TLIVE2001684, TLIVE2001828, TLIVE2001927, TLIVE2002336, TLIVE2002338, TLIVE2002562, TLIVE2002690, TLIVE2002882, TLIVE2003197, TLIVE2003200, TLIVE2003225, TLIVE2003381, TLIVE2003737, TLIVE2003961, TLIVE2003970, TLIVE2004110, TLIVE2004320, TLIVE2004331, TLIVE2004601, TLIVE2005180, TLIVE2005390, TLIVE2005516, TLIVE2005731, TLIVE2005866, TLIVE2006236, TLIVE2006359, TLIVE2006529, TLIVE2006621, TLIVE2006733, TLIVE2007000, TLIVE2007016, TLIVE2007132, TLIVE2007192, TLIVE2007528, TLIVE2007607, TLIVE2007736, TLIVE2007816, TLIVE2007919, TLIVE2008083, TLIVE2008213, TLIVE2008221, TLIVE2008229, TLIVE2008712, TLIVE2008797, TLIVE2009087, TLIVE2009163, TLIVE2009489, TLIVE2009541, TLUNG2000179, TOVAR2000476, TOVAR2000575, TOVAR2000649, TOVAR2000904, TOVAR2001281, TOVAR2001556, TOVAR2001730, TOVAR2002247, TOVAR2002514, TOVAR2002549, TOVAR2002800, TRACH1000011, TRACH1000018, TRACH1000030, TRACH1000038, TRACH1000057, TRACH1000063, TRACH1000074, TRACH1000100, TRACH1000106, TRACH1000125, TRACH1000140, TRACH1000144, TRACH1000181, TRACH1000193, TRACH1000205, TRACH1000212, TRACH1000240, TRACH2000002, TRACH2000015, TRACH2000024, TRACH2000032, TRACH2000045, TRACH2000047, TRACH2000081, TRACH2000083, TRACH2000148, TRACH2000185, TRACH2000196, TRACH2000235, TRACH2000237, TRACH2000243, TRACH2000250, TRACH2000259, TRACH2000272, TRACH2000282, TRACH2000287, TRACH2000289, TRACH2000306, TRACH2000312, TRACH2000336, TRACH2000359, TRACH2000393, TRACH2000411, TRACH2000420, TRACH2000496, TRACH2000497, TRACH2000502, TRACH2000522, TRACH2000540, TRACH2000559, TRACH2000660, TRACH2000665, TRACH2000675, TRACH2000677, TRACH2000702, TRACH2000703, TRACH2000767, TRACH2000775, TRACH2000780, TRACH2000807, TRACH2000873, TRACH2000894, TRACH2000898, TRACH2000920, TRACH2000923, TRACH2000944, TRACH2000959, TRACH2000981, TRACH2000986, TRACH2001037, TRACH2001085, TRACH2001109, TRACH2001121, TRACH2001147, TRACH2001154, TRACH2001188, TRACH2001192, TRACH2001249, TRACH2001275, TRACH2001314, TRACH2001335, TRACH2001339, TRACH2001347, TRACH2001395, TRACH2001400, TRACH2001403, TRACH2001416, TRACH2001443, TRACH2001463, TRACH2001474, TRACH2001478, TRACH2001523, TRACH2001525, TRACH2001532, TRACH2001549, TRACH2001592, TRACH2001596, TRACH2001621, TRACH2001646, TRACH2001651, TRACH2001684, TRACH2001898, TRACH2001933, TRACH2001968, TRACH2001996, TRACH2002043, TRACH2002054, TRACH2002092, TRACH2002100, TRACH2002138, TRACH2002333, TRACH2002664, TRACH2002784, TRACH2002840, TRACH2002847, TRACH2002853, TRACH2002862, TRACH2002954, TRACH2002960, TRACH2002988, TRACH2003070, TRACH2003272, TRACH2003347, TRACH2003484, TRACH2003516, TRACH2003605, TRACH2003736, TRACH2003759, TRACH2003941, TRACH2004039, TRACH2004054, TRACH2004087, TRACH2004109, TRACH2004170, TRACH2004183, TRACH2004251, TRACH2004292, TRACH2004336, TRACH2004399, TRACH2004428, TRACH2004458, TRACH2004499, TRACH2004521, TRACH2004570, TRACH2004845, TRACH2004887, TRACH2004950, TRACH2005004, TRACH2005017, TRACH2005066, TRACH2005159, TRACH2005314, TRACH2005444, TRACH2005541, TRACH2005666, TRACH2005698, TRACH2005710, TRACH2005720, TRACH2005769, TRACH2005796, TRACH2005800, TRACH2006015, TRACH2006049, TRACH2006097, TRACH2006194, TRACH2006327, TRACH2006331, TRACH2006378, TRACH2006387, TRACH2006528, TRACH2006670, TRACH2006762, TRACH2006870, TRACH2006918, TRACH2007324, TRACH2007358, TRACH2007483, TRACH2007542, TRACH2007577, TRACH2007674, TRACH2007676, TRACH2007688, TRACH2007733, TRACH2007754, TRACH2007894, TRACH2007969, TRACH2007988, TRACH2008081, TRACH2008112, TRACH2008113, TRACH2008127, TRACH2008130, TRACH2008278, TRACH2008300, TRACH2008478, TRACH2008540, TRACH2008583, TRACH2008597, TRACH2008716, TRACH2008820, TRACH2008891, TRACH2008921, TRACH2009006, TRACH2009060, TRACH2009107, TRACH2009123, TRACH2009268, TRACH2009291, TRACH2009310, TRACH2009340, TRACH2009348, TRACH2009358, TRACH2009661, TRACH2009730, TRACH2009743, TRACH2009754, TRACH2009862, TRACH2009934, TRACH2010159, TRACH2010218, TRACH2010251, TRACH2010272, TRACH2010317, TRACH2010419, TRACH2010451, TRACH2010505, TRACH2010587, TRACH2010600, TRACH2010634, TRACH2010639, TRACH2010677, TRACH2010698, TRACH2010771, TRACH2010824, TRACH2010883, TRACH2010965, TRACH2010974, TRACH2011057, TRACH2011093, TRACH2011113, TRACH2011290, TRACH2011293, TRACH2011302, TRACH2011500, TRACH2011574, TRACH2011894, TRACH2011956, TRACH2012000, TRACH2012138, TRACH2012242, TRACH2012298, TRACH2012370, TRACH2012376, TRACH2012387, TRACH2012497, TRACH2012536, TRACH2012562, TRACH2012742, TRACH2012811, TRACH2012823, TRACH2012918, TRACH2013081, TRACH2013123, TRACH2013265, TRACH2013369, TRACH2013450, TRACH2013495, TRACH2013552, TRACH2013585, TRACH2013671, TRACH2013726, TRACH2013902, TRACH2013928, TRACH2013982, TRACH2013991, TRACH2014018, TRACH2014045, TRACH2014046, TRACH2014082, TRACH2014268, TRACH2014284, TRACH2014337, TRACH2014356, TRACH2014371, TRACH2014442, TRACH2014483, TRACH2014495, TRACH2014544, TRACH2014573, TRACH2014725, TRACH2014760, TRACH2014815, TRACH2014839, TRACH2014938, TRACH2014950, TRACH2014972, TRACH2014974, TRACH2014997, TRACH2015180, TRACH2015243, TRACH2015316, TRACH2015381, TRACH2015486, TRACH2015654, TRACH2015824, TRACH2015939, TRACH2015987, TRACH2016080, TRACH2016131, TRACH2016286, TRACH2016317, TRACH2016347, TRACH2016380, TRACH2016384, TRACH2016410, TRACH2016481, TRACH2016498, TRACH2016533, TRACH2016551, TRACH2016554, TRACH2016651, TRACH2016690, TRACH2016709, TRACH2016722, TRACH2016835, TRACH2016980, TRACH2017086, TRACH2017368, TRACH2017498, TRACH2017609, TRACH2017949, TRACH2017965, TRACH2017980, TRACH2018034, TRACH2018084, TRACH2018262, TRACH2018273, TRACH2018278, TRACH2018317, TRACH2018345, TRACH2018380, TRACH2018446, TRACH2018449, TRACH2018512, TRACH2018646, TRACH2018663, TRACH2018718, TRACH2018835, TRACH2018882, TRACH2018914, TRACH2018950, TRACH2019024, TRACH2019046, TRACH2019080, TRACH2019151, TRACH2019154, TRACH2019176, TRACH2019248, TRACH2019309, TRACH2019425, TRACH2019473, TRACH2019602, TRACH2019661, TRACH2019672, TRACH2019673, TRACH2019844, TRACH2019879, TRACH2020048, TRACH2020336, TRACH2020525, TRACH2021398, TRACH2021622, TRACH2021635, TRACH2021964, TRACH2022042, TRACH2022113, TRACH2022253, TRACH2022425, TRACH2022553, TRACH2022649, TRACH2022839, TRACH2023246, TRACH2023299, TRACH2023306, TRACH2023416, TRACH2023479, TRACH2023684, TRACH2023860, TRACH2023876, TRACH2024139, TRACH2024187, TRACH2024271, TRACH2024293, TRACH2024408, TRACH2024512, TRACH2024559, TRACH2024647, TRACH2024651, TRACH2024730, TRACH2024735, TRACH2024749, TRACH2024821, TRACH2025057, TRACH2025084, TRACH2025155, TRACH2025224, TRACH2025344, TRACH2025379, TRACH2025507, TRACH2025569, TRACH2025705, TRACH2025749, TRACH2025753, TRACH2025810, TRACH2025853, TRACH2025911, TRACH2025932, TRACH3000014, TRACH3000017, TRACH3000043, TRACH3000134, TRACH3000180, TRACH3000342, TRACH3000420, TRACH3000515, TRACH3000530, TRACH3000548, TRACH3000558, TRACH3000586, TRACH3000692, TRACH3000780, TRACH3000892, TRACH3000926, TRACH3001119, TRACH3001443, TRACH3001550, TRACH3001759, TRACH3002064, TRACH3002107, TRACH3002168, TRACH3002188, TRACH3002192, TRACH3002245, TRACH3002293, TRACH3002533, TRACH3002561, TRACH3002567, TRACH3002605, TRACH3002650, TRACH3002752, TRACH3002866, TRACH3002871, TRACH3002876, TRACH3002890, TRACH3003009, TRACH3003037, TRACH3003357, TRACH3003379, TRACH3003547, TRACH3003586, TRACH3003683, TRACH3003780, TRACH3003805, TRACH3003832, TRACH3003872, TRACH3004068, TRACH3004113, TRACH3004288, TRACH3004303, TRACH3004412, TRACH3004424, TRACH3004456, TRACH3004537, TRACH3004596, TRACH3004651, TRACH3004652, TRACH3004671, TRACH3004721, TRACH3004747, TRACH3004760, TRACH3004783, TRACH3004786, TRACH3004840, TRACH3004931, TRACH3004934, TRACH3005072, TRACH3005085, TRACH3005102, TRACH3005173, TRACH3005191, TRACH3005211, TRACH3005274, TRACH3005294, TRACH3005479, TRACH3005549, TRACH3005699, TRACH3005702, TRACH3005808, TRACH3005852, TRACH3005896, TRACH3006038, TRACH3006149, TRACH3006228, TRACH3006264, TRACH3006336, TRACH3006379, TRACH3006392, TRACH3006395, TRACH3006397, TRACH3006412, TRACH3006470, TRACH3006589, TRACH3006626, TRACH3006699, TRACH3006800, TRACH3006889, TRACH3006985, TRACH3007097, TRACH3007268, TRACH3007274, TRACH3007277, TRACH3007391, TRACH3007541, TRACH3007595, TRACH3007627, TRACH3007689, TRACH3007766, TRACH3007866, TRACH3007995, TRACH3008042, TRACH3008061, TRACH3008093, TRACH3008201, TRACH3008508, TRACH3008535, TRACH3008629, TRACH3008632, TRACH3008688, TRACH3008697, TRACH3008713, TRACH3008887, TRACH3008902, TRACH3008990, TRACH3009001, TRACH3009008, TRACH3009059, TRACH3009061, TRACH3009148, TRACH3009455, TRACH3009701, TRACH3009715, TRACH3009894, TRACH3009956, TRACH3010079, TRACH3010167, TRACH3010331, TRACH3010342, TRACH3010382, TRACH3010757, TRACH3010901, TRACH3011004, TRACH3011082, TRACH3011184, TRACH3011282, TRACH3011313, TRACH3011454, TRACH3011485, TRACH3011503, TRACH3011538, TRACH3011542, TRACH3012106, TRACH3012161, TRACH3012232, TRACH3012261, TRACH3012445, TRACH3012460, TRACH3012659, TRACH3012718, TRACH3012864, TRACH3012891, TRACH3012942, TRACH3013043, TRACH3013072, TRACH3013426, TRACH3013454, TRACH3013558, TRACH3013684, TRACH3013693, TRACH3013700, TRACH3013766, TRACH3013900, TRACH3013926, TRACH3014063, TRACH3014183, TRACH3014215, TRACH3014316, TRACH3014415, TRACH3014580, TRACH3014641, TRACH3014885, TRACH3015136, TRACH3015336, TRACH3015346, TRACH3015354, TRACH3015467, TRACH3015626, TRACH3015951, TRACH3016051, TRACH3016120, TRACH3016264, TRACH3016277, TRACH3016368, TRACH3016455, TRACH3016614, TRACH3016992, TRACH3017171, TRACH3017409, TRACH3017934, TRACH3018108, TRACH3018191, TRACH3018240, TRACH3018261, TRACH3018519, TRACH3018524, TRACH3018606, TRACH3018783, TRACH3018907, TRACH3018933, TRACH3018943, TRACH3019018, TRACH3019058, TRACH3019142, TRACH3019290, TRACH3019347, TRACH3019370, TRACH3019447, TRACH3019598, TRACH3019621, TRACH3019662, TRACH3019807, TRACH3019924, TRACH3019977, TRACH3020137, TRACH3020410, TRACH3020563, TRACH3020605, TRACH3020750, TRACH3020769, TRACH3020928, TRACH3020930, TRACH3021023, TRACH3021066, TRACH3021212, TRACH3021335, TRACH3021373, TRACH3021544, TRACH3021778, TRACH3021834, TRACH3021883, TRACH3022170, TRACH3022198, TRACH3022296, TRACH3022482, TRACH3022732, TRACH3022758, TRACH3022875, TRACH3022910, TRACH3022960, TRACH3023063, TRACH3023203, TRACH3023242, TRACH3023373, TRACH3023516, TRACH3023752, TRACH3023945, TRACH3023960, TRACH3024020, TRACH3024081, TRACH3024342, TRACH3024423, TRACH3024428, TRACH3024512, TRACH3024671, TRACH3024823, TRACH3025302, TRACH3025316, TRACH3025346, TRACH3025520, TRACH3026148, TRACH3026283, TRACH3026299, TRACH3026303, TRACH3026542, TRACH3026650, TRACH3026676, TRACH3026744, TRACH3026949, TRACH3027229, TRACH3027527, TRACH3027681, TRACH3027701, TRACH3027885, TRACH3028031, TRACH3028164, TRACH3028180, TRACH3028195, TRACH3028441, TRACH3028597, TRACH3028678, TRACH3028837, TRACH3028847, TRACH3028855, TRACH3029139, TRACH3029329, TRACH3029451, TRACH3029462, TRACH3029520, TRACH3029592, TRACH3029629, TRACH3029665, TRACH3029670, TRACH3029800, TRACH3030111, TRACH3030130, TRACH3030176, TRACH3030252, TRACH3030725, TRACH3030855, TRACH3030883, TRACH3031316, TRACH3031400, TRACH3031463, TRACH3031479, TRACH3031518, TRACH3031660, TRACH3031678, TRACH3031936, TRACH3032044, TRACH3032065, TRACH3032150, TRACH3032372, TRACH3032480, TRACH3032570, TRACH3032755, TRACH3032827, TRACH3032873, TRACH3033535, TRACH3033680, TRACH3033868, TRACH3034145, TRACH3034414, TRACH3034488, TRACH3034680, TRACH3034731, TRACH3034745, TRACH3034762, TRACH3034903, TRACH3035187, TRACH3035199, TRACH3035235, TRACH3035451, TRACH3035482, TRACH3035526, TRACH3036004, TRACH3036103, TRACH3036193, TRACH3036207, TRACH3036278, TRACH3036309, TRACH3036456, TRACH3036609, TRACH3036638, TRACH3036683, TRACH3036750, TRACH3036792, TRACH3036843, TRACH3036897, TRACH3036942, TRACH3036997, TRACH3037063, TRACH3037067, TRACH3037267, TRACH3037288, TRACH3037505, TRACH3037573, TRACH3037696, TRACH3037897, TRACH3038086, TSTOM1000135, TSTOM1000186, TSTOM2000139, TSTOM2000235, TSTOM2000442, TSTOM2000569, TSTOM2000588, TSTOM2001195, TSTOM2001274, TSTOM2001571, TSTOM2001996, TSTOM2002265, TSTOM2002505, TSTOM2002561, TSTOM2002611, TSTOM2002672, TSTOM2002682, TUTER1000014, TUTER1000122, TUTER1000137, TUTER2000057, TUTER2000283, TUTER2000425, TUTER2000904, TUTER2000916, TUTER2001286, TUTER2001341, TUTER2001387, TUTER2001433, TUTER2001461, TUTER2002028, TUTER2002074, TUTER2002158, TUTER2002228, TUTER2002323, TUTER2002356, TUTER2002729, UMVEN1000122, UMVEN1000143, UMVEN1000156, UMVEN1000186, UMVEN2000046, UMVEN2000069, UMVEN2000121, UMVEN2000133, UMVEN2000354, UTERU1000008, UTERU1000015, UTERU1000024, UTERU1000031, UTERU1000032, UTERU1000057, UTERU1000065, UTERU1000077, UTERU1000093, UTERU1000096, UTERU1000106, UTERU1000109, UTERU1000131, UTERU1000138, UTERU1000148, UTERU1000160, UTERU1000182, UTERU1000183, UTERU1000187, UTERU1000192, UTERU1000249, UTERU1000337, UTERU1000339, UTERU1000384, UTERU2000047, UTERU2000074, UTERU2000099, UTERU2000154, UTERU2000197, UTERU2000218, UTERU2000238, UTERU2000243, UTERU2000260, UTERU2000329, UTERU2000332, UTERU2000338, UTERU2000349, UTERU2000377, UTERU2000393, UTERU2000418, UTERU2000465, UTERU2000485, UTERU2000517, UTERU2000524, UTERU2000537, UTERU2000539, UTERU2000541, UTERU2000542, UTERU2000546, UTERU2000550, UTERU2000569, UTERU2000607, UTERU2000629, UTERU2000649, UTERU2000663, UTERU2000696, UTERU2000794, UTERU2000830, UTERU2000844, UTERU2000922, UTERU2000925, UTERU2001024, UTERU2001110, UTERU2001176, UTERU2001281, UTERU2001389, UTERU2001409, UTERU2001412, UTERU2001504, UTERU2001747, UTERU2001876, UTERU2002001, UTERU2002011, UTERU2002176, UTERU2002198, UTERU2002294, UTERU2002332, UTERU2002410, UTERU2002473, UTERU2002547, UTERU2002662, UTERU2002693, UTERU2002733, UTERU2002736, UTERU2002737, UTERU2002826, UTERU2002841, UTERU2002964, UTERU2002993, UTERU2003035, UTERU2003126, UTERU2003135, UTERU2003321, UTERU2003399, UTERU2003411, UTERU2003456, UTERU2003577, UTERU2003704, UTERU2003926, UTERU2003973, UTERU2004015, UTERU2004039, UTERU2004061, UTERU2004073, UTERU2004163, UTERU2004299, UTERU2004461, UTERU2004564, UTERU2004664, UTERU2004698, UTERU2004807, UTERU2004861, UTERU2004929, UTERU2005004, UTERU2005050, UTERU2005069, UTERU2005074, UTERU2005179, UTERU2005292, UTERU2005346, UTERU2005354, UTERU2005446, UTERU2005449, UTERU2005450, UTERU2005533, UTERU2005601, UTERU2005664, UTERU2005822, UTERU2005903, UTERU2005905, UTERU2006103, UTERU2006115, UTERU2006137, UTERU2006182, UTERU2006400, UTERU2006412, UTERU2006429, UTERU2006486, UTERU2006524, UTERU2006547, UTERU2006568, UTERU2006643, UTERU2006651, UTERU2006705, UTERU2006899, UTERU2007004, UTERU2007075, UTERU2007081, UTERU2007128, UTERU2007253, UTERU2007267, UTERU2007444, UTERU2007499, UTERU2007639, UTERU2007724, UTERU2007924, UTERU2007942, UTERU2008018, UTERU2008019, UTERU2008027, UTERU2008040, UTERU2008077, UTERU2008130, UTERU2008302, UTERU2008347, UTERU2008426, UTERU2008516, UTERU2008561, UTERU2008653, UTERU2008705, UTERU2008707, UTERU2008747, UTERU2008785, UTERU2008845, UTERU2008901, UTERU2008930, UTERU2008939, UTERU2008962, UTERU2009094, UTERU2009120, UTERU2009131, UTERU2009147, UTERU2009206, UTERU2009283, UTERU2009335, UTERU2009414, UTERU2009435, UTERU2009483, UTERU2009510, UTERU2009538, UTERU2009540, UTERU2009776, UTERU2009904, UTERU2009951, UTERU2009972, UTERU2010115, UTERU2010124, UTERU2010164, UTERU2010226, UTERU2010231, UTERU2010304, UTERU2010320, UTERU2010431, UTERU2010525, UTERU2010651, UTERU2010724, UTERU2010747, UTERU2011195, UTERU2011199, UTERU2011220, UTERU2011261, UTERU2011287, UTERU2011410, UTERU2011574, UTERU2011621, UTERU2011657, UTERU2011741, UTERU2011806, UTERU2011811, UTERU2011897, UTERU2011962, UTERU2011968, UTERU2012031, UTERU2012101, UTERU2012114, UTERU2012230, UTERU2012252, UTERU2012286, UTERU2012333, UTERU2012526, UTERU2012581, UTERU2012610, UTERU2012615, UTERU2012688, UTERU2012703, UTERU2012715, UTERU2012741, UTERU2012767, UTERU2012786, UTERU2012856, UTERU2012890, UTERU2012938, UTERU2012976, UTERU2013048, UTERU2013078, UTERU2013231, UTERU2013262, UTERU2013280, UTERU2013322, UTERU2013483, UTERU2013491, UTERU2013502, UTERU2013586, UTERU2013926, UTERU2013976, UTERU2014001, UTERU2014024, UTERU2014167, UTERU2014223, UTERU2014398, UTERU2014464, UTERU2014548, UTERU2014601, UTERU2014631, UTERU2014668, UTERU2014678, UTERU2014728, UTERU2014998, UTERU2015062, UTERU2015087, UTERU2015108, UTERU2015190, UTERU2015198, UTERU2015202, UTERU2015405, UTERU2015640, UTERU2015830, UTERU2015880, UTERU2016147, UTERU2016157, UTERU2016426, UTERU2016464, UTERU2016669, UTERU2016757, UTERU2016761, UTERU2016799, UTERU2016822, UTERU2016896, UTERU2016902, UTERU2016979, UTERU2016981, UTERU2017123, UTERU2017303, UTERU2017421, UTERU2017492, UTERU2017613, UTERU2017623, UTERU2017632, UTERU2017761, UTERU2017810, UTERU2017988, UTERU2018127, UTERU2018180, UTERU2018200, UTERU2018333, UTERU2018364, UTERU2018514, UTERU2018522, UTERU2018523, UTERU2018544, UTERU2018566, UTERU2018609, UTERU2018674, UTERU2018712, UTERU2018784, UTERU2018789, UTERU2018811, UTERU2018867, UTERU2018881, UTERU2018884, UTERU2018955, UTERU2019005, UTERU2019038, UTERU2019163, UTERU2019257, UTERU2019453, UTERU2019491, UTERU2019534, UTERU2019681, UTERU2019706, UTERU2019710, UTERU2019940, UTERU2019959, UTERU2019964, UTERU2020226, UTERU2020242, UTERU2020292, UTERU2020351, UTERU2020491, UTERU2020718, UTERU2021163, UTERU2021380, UTERU2021649, UTERU2021820, UTERU2022020, UTERU2022773, UTERU2022955, UTERU2022981, UTERU2023039, UTERU2023045, UTERU2023262, UTERU2023550, UTERU2023651, UTERU2023687, UTERU2023712, UTERU2023941, UTERU2024002, UTERU2024042, UTERU2024141, UTERU2024481, UTERU2024656, UTERU2024758, UTERU2024820, UTERU2024881, UTERU2025025, UTERU2025041, UTERU2025301, UTERU2025366, UTERU2025415, UTERU2025579, UTERU2025645, UTERU2025891, UTERU2026025, UTERU2026090, UTERU2026142, UTERU2026203, UTERU2026775, UTERU2027023, UTERU2027369, UTERU2027591, UTERU2027616, UTERU2027941, UTERU2028377, UTERU2028734, UTERU2029503, UTERU2029660, UTERU2029742, UTERU2029953, UTERU2030213, UTERU2030270, UTERU2030280, UTERU2031060, UTERU2031084, UTERU2031268, UTERU2031295, UTERU2031521, UTERU2031611, UTERU2031703, UTERU2031834, UTERU2031851, UTERU2032075, UTERU2032220, UTERU2032279, UTERU2032726, UTERU2033172, UTERU2033375, UTERU2033382, UTERU2033420, UTERU2033530, UTERU2033577, UTERU2034053, UTERU2034147, UTERU2034695, UTERU2035114, UTERU2035187, UTERU2035231, UTERU2035306, UTERU2035323, UTERU2035328, UTERU2035331, UTERU2035452, UTERU2035469, UTERU2035503, UTERU2035745, UTERU2035908, UTERU2035926, UTERU2035978, UTERU2036089, UTERU2036347, UTERU2036507, UTERU2036512, UTERU2036530, UTERU2036623, UTERU2036690, UTERU2037224, UTERU2037361, UTERU2037423, UTERU2037577, UTERU2037674, UTERU2037791, UTERU2037843, UTERU2038171, UTERU2038251, UTERU3000226, UTERU3000402, UTERU3000645, UTERU3000665, UTERU3000670, UTERU3000727, UTERU3000738, UTERU3000828, UTERU3000844, UTERU3000899, UTERU3000959, UTERU3001029, UTERU3001053, UTERU3001059, UTERU3001158, UTERU3001240, UTERU3001394, UTERU3001542, UTERU3001558, UTERU3001571, UTERU3001585, UTERU3001632, UTERU3001652, UTERU3001766, UTERU3001988, UTERU3002209, UTERU3002218, UTERU3002383, UTERU3002600, UTERU3002620, UTERU3002667, UTERU3002701, UTERU3002731, UTERU3002768, UTERU3002786, UTERU3002993, UTERU3003116, UTERU3003135, UTERU3003178, UTERU3003465, UTERU3003495, UTERU3003523, UTERU3003660, UTERU3003774, UTERU3003776, UTERU3004384, UTERU3004418, UTERU3004477, UTERU3004523, UTERU3004616, UTERU3004635, UTERU3004709, UTERU3004938, UTERU3004992, UTERU3005049, UTERU3005159, UTERU3005205, UTERU3005230, UTERU3005264, UTERU3005422, UTERU3005460, UTERU3005536, UTERU3005585, UTERU3005907, UTERU3005970, UTERU3006008, UTERU3006228, UTERU3006308, UTERU3006538, UTERU3006640, UTERU3006687, UTERU3006720, UTERU3006798, UTERU3006884, UTERU3007021, UTERU3007104, UTERU3007108, UTERU3007134, UTERU3007419, UTERU3007640, UTERU3007731, UTERU3007913, UTERU3008280, UTERU3008463, UTERU3008660, UTERU3008671, UTERU3008722, UTERU3008917, UTERU3009259, UTERU3009490, UTERU3009517, UTERU3009690, UTERU3009775, UTERU3009871, UTERU3009979, UTERU3009987, UTERU3010029, UTERU3010409, UTERU3010526, UTERU3010604, UTERU3010892, UTERU3010919, UTERU3011063, UTERU3011092, UTERU3011273, UTERU3011398, UTERU3011558, UTERU3011579, UTERU3011795, UTERU3011837, UTERU3012293, UTERU3012414, UTERU3012476, UTERU3012599, UTERU3012999, UTERU3013167, UTERU3013302, UTERU3013781, UTERU3014274, UTERU3014446, UTERU3014611, UTERU3014647, UTERU3014791, UTERU3014906, UTERU3015011, UTERU3015086, UTERU3015299, UTERU3015412, UTERU3015500, UTERU3015647, UTERU3015844, UTERU3016070, UTERU3016273, UTERU3016274, UTERU3016308, UTERU3016789, UTERU3017176, UTERU3017441, UTERU3017626, UTERU3017995, UTERU3018154, UTERU3018172, UTERU3018255, UTERU3018616, UTERU3018711, UTERU3019078

[0681] Of the 17,176 genes that include the cDNAs of the present invention, genes whose expression levels were high enough to detect in each of the D30ST, D60ST, D90ST, DFNES, ERLTF, FCBBF, and FEBRA libraries were analyzed for expression frequency. The analysis results are described below. Each is a relative value, where the expression level over all tissues is taken as 100. The larger this value, the greater the level of expression.

TABLE 30

| Clone Name | D30ST | D60ST | D90ST | DFNES | ERLTF | FCBBF | FEBRA |
|---|---|---|---|---|---|---|---|
| 3NB691000173 | 0 | 0 | 0 | 4.654 | 0 | 0 | 0 |
| 3NB692000281 | 0 | 0 | 2.968 | 1.297 | 0 | 0 | 0 |
| 3NB692000330 | 0 | 0 | 0 | 0 | 0 | 0 | 2.199 |
| 3NB692000374 | 0 | 0 | 0 | 0 | 0 | 4.007 | 0 |
| 3NB692000484 | 0 | 0 | 0 | 0 | 0 | 0 | 25.471 |
| 3NB692000545 | 0 | 0 | 0 | 0 | 0 | 5.212 | 7.033 |
| 3NB692000912 | 0 | 0 | 0 | 2.769 | 0 | 0.868 | 1.171 |
| 3NB692001022 | 0 | 0 | 0 | 0 | 0 | 0 | 3.102 |
| 3NB692001334 | 0 | 0 | 0 | 0 | 0 | 0.992 | 0.669 |
| 3NB692006952 | 0 | 0 | 0 | 0 | 0 | 0 | 14.594 |
| ADIPS2000425 | 0 | 0 | 0 | 0 | 0 | 1.434 | 0 |
| ADRGL1000002 | 0 | 0 | 0 | 0 | 0 | 12.168 | 0 |
| ADRGL1000018 | 0 | 0 | 0 | 0 | 0 | 0 | 12.055 |
| ADRGL1000033 | 0 | 0 | 0 | 0 | 0 | 7.054 | 0 |
| ADRGL1000065 | 0 | 0 | 0 | 0 | 0 | 31.255 | 0 |
| ADRGL2000006 | 0 | 0 | 0 | 0 | 0 | 3.841 | 0 |
| ADRGL2000097 | 0 | 0 | 0 | 39.306 | 0 | 0 | 0 |
| ADRGL2002477 | 0 | 0 | 0 | 0 | 0 | 15.715 | 0 |
| ADRGL2004676 | 0 | 0 | 0 | 0 | 0 | 8.053 | 32.599 |
| ADRGL2009273 | 0 | 0 | 0 | 8.187 | 0 | 7.699 | 0 |
| ASTRO1000165 | 0 | 0 | 0 | 0 | 0 | 4.095 | 0 |
| ASTRO2000014 | 0 | 0 | 5.538 | 0 | 0 | 3.035 | 0 |
| ASTRO2000046 | 0 | 0 | 5.502 | 2.405 | 0 | 0 | 0 |
| ASTRO2000141 | 17.731 | 0 | 20.479 | 0 | 0 | 0 | 0 |
| ASTRO2001029 | 14.640 | 0 | 0 | 0 | 0 | 4.633 | 0 |
| ASTRO2001823 | 0 | 0 | 0 | 0 | 0 | 8.045 | 0 |
| ASTRO2002202 | 0 | 0 | 0 | 0 | 0 | 4.257 | 0 |
| ASTRO2003212 | 0 | 0 | 0 | 0 | 0 | 27.675 | 0 |
| ASTRO2003461 | 0 | 0 | 0 | 0 | 0 | 11.005 | 0 |
| ASTRO2004032 | 0 | 0 | 0 | 0 | 0 | 11.259 | 15.193 |
| ASTRO2004974 | 0 | 0 | 0 | 0 | 0 | 3.590 | 0 |
| ASTRO2005553 | 0 | 0 | 0 | 0 | 71.006 | 0 | 6.460 |
| ASTRO2005687 | 0 | 0 | 0 | 13.138 | 0 | 0 | 0 |
| ASTRO2006920 | 0 | 0 | 0 | 35.357 | 0 | 0 | 0 |
| ASTRO2007047 | 0 | 0 | 0 | 0 | 0 | 3.861 | 0 |
| ASTRO2007948 | 0 | 0 | 0 | 0 | 0 | 4.627 | 6.243 |
| ASTRO2008972 | 0 | 0 | 0 | 0 | 0 | 28.772 | 0 |
| ASTRO2010819 | 0 | 0 | 0 | 0 | 0 | 6.215 | 3.355 |
| ASTRO2011422 | 0 | 0 | 0 | 0 | 0 | 26.805 | 0 |
| ASTRO2012552 | 0 | 0 | 0 | 8.711 | 0 | 2.731 | 0 |
| ASTRO2013585 | 0 | 0 | 6.573 | 0 | 13.358 | 0.901 | 3.646 |
| ASTRO2014863 | 0 | 0 | 0 | 0 | 0 | 12.483 | 0 |
| ASTRO2015529 | 21.631 | 0 | 0 | 0 | 0 | 0 | 9.237 |
| ASTRO2016491 | 0 | 0 | 6.790 | 2.968 | 0 | 1.861 | 2.511 |
| BGGI12000054 | 0 | 0 | 0 | 0 | 0 | 0.435 | 1.761 |
| BGGI12001075 | 0 | 0 | 0 | 0 | 0 | 3.657 | 0 |
| BGGI12001097 | 0 | 0 | 0 | 0 | 0 | 2.076 | 0 |
| BGGI12001682 | 0 | 0 | 0 | 0 | 0 | 0 | 5.149 |
| BLADE2006412 | 0 | 0 | 0 | 0 | 0 | 22.434 | 0 |
| BLADE2008461 | 0 | 0 | 0 | 0 | 67.927 | 0 | 0 |
| BNGH41000098 | 0 | 0 | 0 | 0 | 0 | 4.683 | 0 |
| BNGH42000739 | 0 | 0 | 0 | 0 | 0 | 2.299 | 3.102 |
| BNGH42005968 | 0 | 0 | 0 | 0 | 0 | 4.243 | 0 |
| BNGH42006135 | 0 | 0 | 0 | 0 | 0 | 1.220 | 0 |
| BNGH42007460 | 0 | 0 | 0 | 0 | 0 | 1.862 | 0 |
| BNGH42007709 | 5.375 | 15.453 | 3.104 | 0 | 0 | 0.425 | 0 |
| BNGH42007788 | 0 | 0 | 0 | 0 | 0 | 5.687 | 0 |
| BNGH42008603 | 0 | 0 | 0 | 8.524 | 0 | 0 | 0 |
| BNGH42009025 | 0 | 0 | 0 | 8.216 | 0 | 0 | 3.475 |
| BRACE1000042 | 0 | 0 | 0 | 0 | 0 | 2.812 | 0 |
| BRACE1000087 | 0 | 0 | 0 | 0 | 0 | 54.219 | 0 |
| BRACE1000093 | 0 | 0 | 0 | 0 | 0 | 72.245 | 0 |
| BRACE1000115 | 0 | 0 | 0 | 0 | 0 | 0 | 2.333 |
| BRACE1000159 | 0 | 0 | 0 | 0 | 0 | 0 | 4.603 |
| BRACE1000169 | 0 | 0 | 0 | 0 | 0 | 0 | 50.538 |
| BRACE1000187 | 0 | 0 | 0 | 0 | 0 | 0 | 20.185 |
| BRACE1000239 | 0 | 0 | 0 | 0 | 0 | 36.607 | 0 |
| BRACE2000307 | 0 | 0 | 0 | 0 | 0 | 6.528 | 2.936 |
| BRACE2000750 | 0 | 0 | 0 | 0 | 0 | 38.022 | 0 |
| BRACE2000975 | 0 | 0 | 0 | 0 | 0 | 3.550 | 1.597 |
| BRACE2001117 | 0 | 0 | 0 | 16.209 | 0 | 0 | 0 |
| BRACE2001154 | 0 | 0 | 0 | 0 | 0 | 0 | 26.486 |
| BRACE2001497 | 0 | 0 | 0 | 0 | 0 | 3.443 | 0 |
| BRACE2001892 | 0 | 0 | 0 | 0 | 0 | 7.835 | 9.817 |
| BRACE2002050 | 0 | 0 | 0 | 0 | 0 | 5.357 | 0 |
| BRACE2002091 | 0 | 0 | 0 | 0 | 0 | 3.901 | 0 |
| BRACE2002441 | 0 | 0 | 0 | 6.637 | 0 | 2.081 | 0 |
| BRACE2002478 | 0 | 0 | 0 | 0 | 0 | 26.777 | 0 |
| BRACE2002682 | 0 | 0 | 0 | 0 | 0 | 0 | 47.730 |
| BRACE2002860 | 0 | 0 | 33.949 | 0 | 0 | 4.651 | 6.276 |
| BRACE2002861 | 0 | 0 | 0 | 0 | 0 | 4.794 | 0 |
| BRACE2003037 | 0 | 0 | 0 | 0 | 0 | 0 | 10.765 |
| BRACE2003110 | 0 | 0 | 0 | 0 | 0 | 24.886 | 0 |
| BRACE2003172 | 3.794 | 0 | 0 | 0 | 0 | 9.006 | 4.051 |
| BRACE2003217 | 0 | 0 | 0 | 0 | 0 | 0 | 10.745 |
| BRACE2003254 | 0 | 0 | 0 | 0 | 0 | 1.673 | 0 |
| BRACE2003527 | 0 | 0 | 34.759 | 0 | 0 | 9.524 | 0 |
| BRACE2003785 | 0 | 0 | 0 | 0 | 0 | 3.590 | 2.422 |
| BRACE2003827 | 0 | 0 | 0 | 0 | 0 | 0 | 4.368 |
| BRACE2003892 | 0 | 0 | 0 | 0 | 0 | 0 | 16.322 |
| BRACE2003904 | 0 | 0 | 0 | 0 | 0 | 4.789 | 0 |
| BRACE2003944 | 0 | 0 | 0 | 6.101 | 0 | 0 | 0 |
| BRACE2005087 | 0 | 0 | 0 | 0 | 0 | 3.833 | 2.586 |
| BRACE2005151 | 0 | 0 | 0 | 0 | 57.578 | 3.882 | 0 |
| BRACE2005231 | 0 | 0 | 0 | 0 | 0 | 0 | 7.959 |
| BRACE2005251 | 0 | 0 | 0 | 0 | 0 | 0 | 26.348 |
| BRACE2005681 | 0 | 0 | 0 | 0 | 0 | 3.689 | 0 |
| BRACE2005719 | 0 | 0 | 0 | 0 | 0 | 5.487 | 14.807 |
| BRACE2005937 | 0 | 0 | 0 | 0 | 0 | 22.318 | 0 |
| BRACE2006055 | 0 | 0 | 0 | 0 | 0 | 7.391 | 4.987 |
| BRACE2006072 | 0 | 0 | 0 | 0 | 0 | 36.414 | 0 |
| BRACE2006075 | 0 | 0 | 0 | 0 | 0 | 29.977 | 0 |
| BRACE2006258 | 0 | 0 | 0 | 0 | 0 | 1.513 | 14.294 |
| BRACE2006264 | 0 | 0 | 0 | 0 | 0 | 15.593 | 0 |
| BRACE2006319 | 0 | 0 | 0 | 0 | 0 | 6.477 | 17.479 |
| BRACE2006344 | 0 | 0 | 0 | 0 | 0 | 13.207 | 0 |
| BRACE2006354 | 0 | 0 | 0 | 0 | 0 | 0 | 15.512 |
| BRACE2006514 | 0 | 0 | 11.715 | 0 | 0 | 1.605 | 2.166 |
| BRACE2006743 | 0 | 0 | 0 | 0 | 0 | 0 | 22.168 |
| BRACE2006900 | 6.007 | 0 | 0 | 0 | 0 | 0 | 0 |
| BRACE2006937 | 0 | 0 | 0 | 0 | 0 | 9.890 | 13.345 |
| BRACE2007064 | 0 | 0 | 0 | 0 | 0 | 6.004 | 12.152 |
| BRACE2007089 | 0 | 0 | 0 | 0 | 0 | 1.564 | 0 |
| BRACE2007109 | 0 | 0 | 0 | 0 | 0 | 0 | 4.759 |
| BRACE2007174 | 0 | 0 | 0 | 0 | 0 | 28.862 | 0 |
| BRACE2007518 | 0 | 0 | 0 | 0 | 0 | 0 | 5.658 |
| BRACE2007641 | 0 | 0 | 0 | 0 | 0 | 11.584 | 15.631 |
| BRACE2007671 | 0 | 0 | 0 | 0 | 0 | 2.856 | 0 |
| BRACE2007768 | 0 | 0 | 0 | 0 | 0 | 0 | 71.560 |
| BRACE2007832 | 0 | 0 | 0 | 0 | 0 | 0 | 31.286 |
| BRACE2007882 | 0 | 0 | 0 | 0 | 0 | 24.334 | 16.418 |
| BRACE2007937 | 0 | 0 | 0 | 0 | 0 | 23.461 | 6.331 |
| BRACE2007952 | 0 | 0 | 0 | 0 | 0 | 0 | 12.088 |
| BRACE2008102 | 0 | 0 | 0 | 0 | 0 | 0 | 59.210 |
| BRACE2008358 | 0 | 0 | 0 | 0 | 0 | 4.186 | 11.298 |
| BRACE2008481 | 0 | 0 | 0 | 0 | 0 | 5.157 | 0 |
| BRACE2008553 | 48.556 | 0 | 0 | 0 | 0 | 0 | 0 |
| BRACE2008653 | 0 | 0 | 0 | 0 | 14.452 | 0 | 0 |
| BRACE2008797 | 0 | 0 | 0 | 0 | 0 | 0 | 30.941 |
| BRACE2008941 | 0 | 0 | 0 | 0 | 0 | 18.463 | 0 |
| BRACE2009037 | 3.409 | 19.603 | 3.937 | 0 | 0 | 0.539 | 0.728 |
| BRACE2009044 | 0 | 0 | 0 | 0 | 0 | 18.536 | 0 |
| BRACE2009045 | 0 | 0 | 0 | 0 | 0 | 33.371 | 0 |
| BRACE2009255 | 0 | 0 | 0 | 0 | 0 | 0 | 59.210 |
| BRACE2009517 | 0 | 0 | 0 | 0 | 0 | 0 | 6.761 |
| BRACE2009957 | 0 | 0 | 0 | 0 | 0 | 72.245 | 0 |
| BRACE2010669 | 0 | 0 | 0 | 0 | 0 | 11.777 | 0 |
| BRACE2010828 | 0 | 0 | 0 | 0 | 0 | 72.245 | 0 |
| BRACE2011183 | 0 | 0 | 0 | 0 | 0 | 11.876 | 0 |
| BRACE2012222 | 0 | 0 | 0 | 0 | 0 | 39.421 | 0 |
| BRACE2012291 | 0 | 0 | 0 | 0 | 0 | 72.245 | 0 |
| BRACE2012317 | 0 | 0 | 0 | 0 | 0 | 1.268 | 0 |
| BRACE2012528 | 0 | 0 | 0 | 0 | 0 | 0.876 | 5.911 |
| BRACE2012814 | 0 | 0 | 0 | 0 | 0 | 0 | 7.645 |
| BRACE2013369 | 0 | 0 | 0 | 0 | 0 | 0 | 77.838 |
| BRACE2014257 | 0 | 0 | 0 | 0 | 0 | 22.910 | 0 |
| BRACE2015058 | 0 | 0 | 0 | 0 | 0 | 24.301 | 0 |
| BRACE2017574 | 0 | 0 | 0 | 0 | 0 | 9.465 | 0 |
| BRACE2019147 | 0 | 0 | 0 | 0 | 0 | 7.913 | 5.339 |
| BRACE2019877 | 0 | 0 | 0 | 0 | 0 | 0 | 15.141 |
| BRACE2021014 | 0 | 0 | 0 | 0 | 0 | 10.945 | 0 |
| BRACE2021344 | 0 | 0 | 0 | 0 | 0 | 0 | 77.838 |
| BRACE2022638 | 0 | 0 | 0 | 0 | 0 | 5.508 | 0 |
| BRACE2023718 | 0 | 0 | 0 | 0 | 0 | 29.649 | 0 |
| BRACE2025492 | 0 | 0 | 0 | 0 | 0 | 48.624 | 0 |
| BRACE2025796 | 0 | 0 | 0 | 0 | 0 | 0 | 77.838 |
| BRACE2026054 | 0 | 0 | 0 | 0 | 0 | 42.233 | 0 |
| BRACE2026141 | 0 | 0 | 0 | 0 | 0 | 72.245 | 0 |
| BRACE2030341 | 0 | 0 | 0 | 0 | 0 | 0 | 17.242 |
| BRACE2037295 | 0 | 0 | 0 | 0 | 0 | 0 | 8.177 |
| BRACE2039624 | 11.295 | 0 | 0 | 0 | 0 | 3.575 | 0 |
| BRACE3001113 | 0 | 0 | 0 | 0 | 0 | 48.624 | 0 |
| BRACE3004150 | 0 | 0 | 0 | 45.779 | 0 | 7.175 | 0 |
| BRACE3005938 | 0 | 0 | 0 | 6.490 | 0 | 2.034 | 0 |
| BRACE3010428 | 0 | 0 | 0 | 13.492 | 0 | 6.344 | 2.854 |
| BRACE3010438 | 0 | 0 | 0 | 0 | 0 | 6.616 | 8.928 |
| BRACE3013780 | 55.996 | 0 | 0 | 0 | 0 | 0 | 11.957 |
| BRALZ2008166 | 0 | 0 | 0 | 0 | 0 | 33.831 | 0 |
| BRALZ2009482 | 0 | 0 | 0 | 2.190 | 0 | 0 | 0 |
| BRALZ2011880 | 35.596 | 0 | 0 | 0 | 0 | 0 | 7.601 |
| BRAMY1000173 | 0 | 0 | 0 | 0 | 0 | 19.537 | 0 |
| BRAMY2000181 | 0 | 0 | 0 | 0 | 0 | 64.708 | 0 |
| BRAMY2000354 | 0 | 0 | 0 | 0 | 0 | 5.077 | 3.426 |
| BRAMY2000562 | 0 | 0 | 25.913 | 0 | 0 | 3.550 | 4.791 |
| BRAMY2000893 | 0 | 0 | 41.040 | 0 | 0 | 0 | 0 |
| BRAMY2003929 | 0 | 0 | 0 | 0 | 0 | 78.573 | 0 |
| BRAMY2004363 | 0 | 0 | 0 | 0 | 0 | 3.777 | 0 |
| BRAMY2004521 | 0 | 0 | 0 | 13.969 | 0 | 0 | 0 |
| BRAMY2007078 | 0 | 0 | 0 | 22.410 | 0 | 0 | 0 |
| BRAMY2007244 | 0 | 0 | 0 | 0 | 0 | 0 | 29.217 |
| BRAMY2007567 | 0 | 0 | 0 | 0 | 0 | 0 | 19.344 |
| BRAMY2007613 | 0 | 0 | 0 | 0 | 0 | 4.950 | 3.339 |
| BRAMY2008977 | 0 | 0 | 68.179 | 0 | 0 | 0 | 0 |
| BRAMY2009612 | 0 | 0 | 0 | 0 | 0 | 25.005 | 33.740 |
| BRAMY2009934 | 0 | 0 | 0 | 0 | 0 | 0 | 14.737 |
| BRAMY2015251 | 0 | 0 | 0 | 0 | 0 | 16.971 | 0 |
| BRAMY2019554 | 0 | 0 | 0 | 0 | 0 | 7.371 | 1.989 |
| BRAMY2019989 | 0 | 0 | 0 | 0 | 0 | 0 | 2.404 |
| BRAMY2020106 | 0 | 0 | 0 | 0 | 0 | 20.653 | 0 |
| BRAMY2020427 | 0 | 0 | 0 | 0 | 16.225 | 0 | 0 |
| BRAMY2022493 | 0 | 0 | 0 | 0 | 0 | 0 | 6.613 |
| BRAMY2022786 | 0 | 0 | 0 | 0 | 0 | 2.305 | 6.221 |
| BRAMY2023939 | 0 | 0 | 0 | 0 | 0 | 11.292 | 15.237 |
| BRAMY2024416 | 0 | 0 | 0 | 0 | 0 | 8.359 | 0 |
| BRAMY2024827 | 0 | 0 | 0 | 0 | 0 | 3.686 | 0 |
| BRAMY2026778 | 0 | 0 | 0 | 0 | 0 | 8.951 | 0 |
| BRAMY2028282 | 0 | 0 | 0 | 0 | 0 | 45.089 | 0 |
| BRAMY2028740 | 0 | 0 | 0 | 5.487 | 0 | 1.720 | 6.963 |
| BRAMY2032087 | 0 | 0 | 0 | 0 | 0 | 4.475 | 0 |
| BRAMY2036459 | 0 | 0 | 0 | 0 | 0 | 3.482 | 0 |
| BRAMY2036567 | 0 | 0 | 0 | 0 | 0 | 0 | 18.633 |
| BRAMY2039872 | 0 | 0 | 0 | 0 | 0 | 0 | 49.422 |
| BRAMY2040095 | 0 | 0 | 0 | 0 | 0 | 0 | 2.556 |
| BRAMY3000224 | 0 | 0 | 0 | 0 | 0 | 0 | 71.215 |
| BRAMY3002991 | 45.776 | 0 | 0 | 0 | 0 | 0 | 0 |
| BRAMY3004377 | 0 | 0 | 0 | 0 | 0 | 1.532 | 2.068 |
| BRAMY3005091 | 0 | 0 | 0 | 0 | 0 | 0 | 47.846 |
| BRAMY3008044 | 0 | 0 | 0 | 0 | 0 | 9.942 | 8.944 |
| BRAMY3008335 | 0 | 0 | 0 | 0 | 0 | 0 | 44.280 |
| BRAMY3010492 | 0 | 0 | 0 | 0 | 0 | 0 | 14.357 |
| BRAWH1000037 | 0 | 0 | 0 | 0 | 0 | 0 | 4.546 |
| BRAWH1000040 | 0 | 0 | 0 | 8.110 | 0 | 3.813 | 10.292 |
| BRAWH1000045 | 0 | 0 | 0 | 0 | 0 | 3.699 | 12.477 |
| BRAWH1000093 | 0 | 0 | 6.219 | 2.718 | 0 | 0 | 1.150 |
| BRAWH1000127 | 0 | 0 | 0 | 0 | 0 | 0 | 7.969 |
| BRAWH1000162 | 0 | 0 | 0 | 0 | 0 | 3.372 | 0 |
| BRAWH2000082 | 0 | 0 | 0 | 0 | 0 | 0.709 | 3.825 |
| BRAWH2000169 | 0 | 0 | 0 | 0 | 0 | 19.474 | 0 |
| BRAWH2000274 | 0 | 0 | 0 | 0 | 0 | 3.647 | 24.605 |
| BRAWH2000460 | 0 | 0 | 0 | 0 | 16.724 | 2.255 | 1.521 |
| BRAWH2000522 | 0 | 0 | 0 | 0 | 0 | 3.349 | 4.518 |
| BRAWH2000588 | 0 | 0 | 0 | 0 | 0 | 0 | 12.510 |
| BRAWH2000636 | 0 | 0 | 0 | 0 | 0 | 4.881 | 1.317 |
| BRAWH2000686 | 0 | 0 | 0 | 0 | 0 | 9.033 | 12.189 |
| BRAWH2000839 | 0 | 0 | 0 | 0 | 0 | 3.035 | 2.048 |
| BRAWH2000924 | 0 | 0 | 0 | 0 | 0 | 0.530 | 1.431 |
| BRAWH2001037 | 0 | 0 | 0 | 0 | 0 | 37.045 | 29.993 |
| BRAWH2001092 | 0 | 0 | 0 | 0 | 0 | 1.299 | 3.067 |
| BRAWH2001141 | 0 | 0 | 0 | 0 | 0 | 9.389 | 12.669 |
| BRAWH2001171 | 0 | 0 | 0 | 3.640 | 0 | 3.423 | 4.619 |
| BRAWH2001321 | 0 | 0 | 0 | 0 | 0 | 1.586 | 10.700 |
| BRAWH2001424 | 0 | 0 | 0 | 0 | 0 | 9.406 | 0 |
| BRAWH2001439 | 0 | 0 | 0 | 0 | 0 | 17.108 | 12.825 |
| BRAWH2001484 | 0 | 0 | 0 | 0 | 0 | 19.629 | 0 |
| BRAWH2001662 | 0 | 0 | 0 | 0 | 0 | 8.494 | 34.385 |
| BRAWH2002560 | 0 | 0 | 0 | 0 | 0 | 11.923 | 24.132 |
| BRAWH2002911 | 0 | 0 | 0 | 0 | 0 | 0 | 59.317 |
| BRAWH2003025 | 0 | 0 | 0 | 0 | 0 | 0 | 7.559 |
| BRAWH2003662 | 0 | 0 | 0 | 0 | 0 | 11.450 | 0 |
| BRAWH2003818 | 0 | 0 | 0 | 0 | 0 | 11.183 | 0 |
| BRAWH2004095 | 0 | 0 | 0 | 0 | 0 | 0 | 8.841 |
| BRAWH2005008 | 0 | 0 | 0 | 0 | 0 | 0 | 41.159 |
| BRAWH2005068 | 4.696 | 27.003 | 0 | 0 | 0 | 0 | 0 |
| BRAWH2005074 | 0 | 0 | 0 | 0 | 0 | 64.881 | 0 |
| BRAWH2005661 | 0 | 0 | 0 | 0 | 0 | 0 | 3.985 |
| BRAWH2006450 | 0 | 0 | 0 | 0 | 0 | 0 | 12.517 |
| BRAWH2006493 | 0 | 0 | 0 | 0 | 0 | 0 | 12.680 |
| BRAWH2006996 | 0 | 0 | 0 | 0 | 0 | 6.284 | 0 |
| BRAWH2007605 | 0 | 0 | 0 | 0 | 0 | 0 | 10.227 |
| BRAWH2007664 | 0 | 0 | 0 | 0 | 0 | 18.903 | 0 |
| BRAWH2007800 | 0 | 0 | 0 | 0 | 0 | 4.340 | 0 |
| BRAWH2008255 | 0 | 0 | 0 | 0 | 0 | 7.805 | 0 |
| BRAWH2008706 | 0 | 0 | 0 | 0 | 0 | 0 | 7.168 |
| BRAWH2008903 | 0 | 0 | 0 | 0 | 0 | 7.811 | 10.540 |
| BRAWH2009360 | 0 | 0 | 0 | 50.998 | 0 | 0 | 0 |
| BRAWH2010329 | 0 | 0 | 0 | 0 | 0 | 13.868 | 0 |
| BRAWH2010980 | 0 | 0 | 0 | 0 | 0 | 0 | 17.615 |
| BRAWH2011343 | 0 | 0 | 0 | 0 | 0 | 0 | 17.488 |
| BRAWH2011812 | 0 | 0 | 0 | 0 | 0 | 25.021 | 0 |
| BRAWH2012161 | 0 | 0 | 0 | 0 | 0 | 14.227 | 0 |
| BRAWH2012164 | 0 | 0 | 0 | 0 | 0 | 38.493 | 0 |
| BRAWH2012277 | 0 | 0 | 0 | 0 | 0 | 0 | 71.370 |
| BRAWH2012827 | 0 | 0 | 0 | 0 | 0 | 16.614 | 0 |
| BRAWH2012866 | 0 | 0 | 0 | 0 | 0 | 15.708 | 0 |
| BRAWH2014188 | 0 | 0 | 0 | 0 | 0 | 2.645 | 0 |
| BRAWH2014511 | 0 | 0 | 0 | 0 | 0 | 7.938 | 0 |
| BRAWH2014645 | 0 | 0 | 0 | 0 | 0 | 0 | 2.635 |
| BRAWH2015247 | 0 | 0 | 0 | 0 | 0 | 0 | 26.025 |
| BRAWH2016724 | 0 | 0 | 0 | 0 | 0 | 64.881 | 0 |
| BRAWH2017002 | 0 | 0 | 0 | 0 | 0 | 22.987 | 6.203 |
| BRAWH2017542 | 0 | 0 | 0 | 0 | 0 | 64.881 | 0 |
| BRAWH2017685 | 0 | 0 | 0 | 0 | 0 | 1.875 | 2.530 |
| BRAWH2018526 | 0 | 0 | 0 | 0 | 0 | 0 | 0.767 |
| BRAWH3000088 | 0 | 0 | 0 | 0 | 0 | 19.234 | 0 |
| BRAWH3002853 | 0 | 0 | 0 | 0 | 0 | 1.367 | 1.844 |
| BRAWH3005146 | 0 | 0 | 0 | 0 | 0 | 9.354 | 12.622 |
| BRAWH3010461 | 0 | 0 | 0 | 0 | 0 | 0 | 5.121 |
| BRAWH3016271 | 0 | 0 | 0 | 0 | 0 | 19.929 | 0 |
| BRAWH3017259 | 0 | 0 | 0 | 0 | 0 | 12.928 | 0 |
| BRAWH3018063 | 30.813 | 0 | 0 | 0 | 0 | 0 | 0 |
| BRAWH3021574 | 0 | 0 | 0 | 0 | 0 | 8.683 | 0 |
| BRCAN1000168 | 0 | 0 | 0 | 0 | 0 | 0 | 3.517 |
| BRCAN2000563 | 0 | 0 | 0 | 0 | 0 | 0 | 32.782 |
| BRCAN2003944 | 0 | 0 | 0 | 1.660 | 0 | 0 | 1.404 |
| BRCAN2009432 | 0 | 0 | 0 | 7.760 | 36.081 | 0 | 0 |
| BRCAN2010665 | 0 | 0 | 0 | 0 | 0 | 0 | 8.147 |
| BRCAN2024572 | 0 | 0 | 0 | 0 | 0 | 10.091 | 20.425 |
| BRCAN2026197 | 0 | 0 | 0 | 0 | 0 | 2.884 | 0 |
| BRCAN2028036 | 0 | 0 | 0 | 0 | 0 | 4.460 | 0 |
| BRCOC2000004 | 0 | 0 | 0 | 0 | 0 | 0 | 4.487 |
| BRCOC2010123 | 0 | 0 | 14.772 | 6.456 | 0 | 0 | 0 |
| BRCOC2019910 | 0 | 0 | 0 | 0 | 0 | 2.309 | 3.116 |
| BRHIP1000104 | 0 | 0 | 0 | 0 | 0 | 1.208 | 1.629 |
| BRHIP1000108 | 0 | 0 | 0 | 0 | 0 | 7.962 | 10.743 |
| BRHIP1000174 | 0 | 0 | 0 | 0 | 0 | 9.366 | 25.278 |
| BRHIP1000258 | 0 | 0 | 0 | 0 | 0 | 47.766 | 0 |
| BRHIP2000312 | 0 | 0 | 0 | 0 | 0 | 0 | 16.166 |
| BRHIP2000534 | 0 | 0 | 4.615 | 14.119 | 0 | 0 | 0.853 |
| BRHIP2000553 | 0 | 0 | 0 | 0 | 0 | 4.747 | 0 |
| BRHIP2001099 | 0 | 0 | 0 | 0 | 0 | 12.807 | 0 |
| BRHIP2001805 | 0 | 0 | 0 | 85.243 | 0 | 0 | 0 |
| BRHIP2002339 | 0 | 0 | 0 | 0 | 0 | 28.997 | 0 |
| BRHIP2007305 | 0 | 0 | 0 | 6.671 | 0 | 2.091 | 0 |
| BRHIP2007307 | 0 | 0 | 0 | 0 | 0 | 0 | 70.959 |
| BRHIP2007741 | 0 | 0 | 0 | 0 | 0 | 3.207 | 4.327 |
| BRHIP2010217 | 0 | 0 | 0 | 0 | 0 | 0 | 13.922 |
| BRHIP2011080 | 0 | 0 | 0 | 0 | 0 | 64.423 | 0 |
| BRHIP2012054 | 0 | 0 | 0 | 0 | 0 | 0 | 70.959 |
| BRHIP2013699 | 0 | 0 | 0 | 0 | 0 | 39.421 | 0 |
| BRHIP2015224 | 0 | 0 | 0 | 0 | 0 | 0 | 22.681 |
| BRHIP2015245 | 0 | 0 | 0 | 0 | 0 | 0 | 5.918 |
| BRHIP2015679 | 29.287 | 0 | 0 | 0 | 0 | 0 | 0 |
| BRHIP2017642 | 0 | 0 | 0 | 0 | 0 | 47.719 | 0 |
| BRHIP2018712 | 0 | 0 | 0 | 0 | 0 | 11.224 | 0 |
| BRHIP2019186 | 0 | 0 | 0 | 0 | 0 | 7.292 | 9.840 |
| BRHIP2020573 | 0 | 0 | 0 | 0 | 0 | 33.438 | 0 |
| BRHIP2021495 | 0 | 0 | 0 | 0 | 0 | 11.849 | 15.989 |
| BRHIP2021762 | 0 | 0 | 0 | 0 | 0 | 5.147 | 0 |
| BRHIP2021858 | 0 | 0 | 0 | 0 | 0 | 6.182 | 0 |
| BRHIP2022986 | 0 | 0 | 0 | 0 | 0 | 15.770 | 0 |
| BRHIP2023292 | 0 | 0 | 0 | 0 | 0 | 64.423 | 0 |
| BRHIP2023773 | 0 | 0 | 0 | 0 | 0 | 0 | 70.959 |
| BRHIP2023888 | 0 | 0 | 0 | 4.337 | 0 | 0.680 | 0 |
| BRHIP2024742 | 0 | 0 | 0 | 0 | 0 | 2.304 | 0 |
| BRHIP2026214 | 0 | 0 | 0 | 0 | 0 | 64.423 | 0 |
| BRHIP2027077 | 0 | 0 | 0 | 11.904 | 0 | 3.732 | 0 |
| BRHIP3000017 | 0 | 0 | 0 | 0 | 0 | 8.146 | 0 |
| BRHIP3000111 | 0 | 0 | 0 | 0 | 28.053 | 0 | 2.552 |
| BRHIP3002141 | 0 | 0 | 0 | 0 | 0 | 0 | 39.113 |
| BRHIP3002691 | 0 | 0 | 0 | 0 | 0 | 15.322 | 0 |
| BRHIP3006717 | 0 | 0 | 0 | 0 | 0 | 3.144 | 21.215 |
| BRHIP3007586 | 0 | 0 | 0 | 0 | 0 | 6.375 | 0 |
| BRHIP3009099 | 0 | 0 | 0 | 0 | 0 | 64.423 | 0 |
| BRHIP3012997 | 0 | 0 | 0 | 0 | 0 | 1.712 | 2.310 |
| BRHIP3017855 | 0 | 0 | 0 | 0 | 0 | 0 | 9.545 |
| BRHIP3020046 | 0 | 68.001 | 0 | 0 | 0 | 0 | 0 |
| BRHIP3021019 | 0 | 0 | 0 | 0 | 0 | 14.308 | 19.306 |
| BRSSN1000056 | 70.732 | 0 | 0 | 0 | 0 | 0 | 0 |
| BRSSN2000312 | 0 | 0 | 0 | 0 | 0 | 19.877 | 0 |
| BRSSN2000498 | 0 | 0 | 0 | 0 | 0 | 2.022 | 2.728 |
| BRSSN2000561 | 0 | 0 | 0 | 0 | 0 | 11.584 | 15.631 |
| BRSSN2000566 | 0 | 0 | 0 | 0 | 0 | 0 | 24.251 |
| BRSSN2007338 | 0 | 0 | 0 | 0 | 0 | 0 | 18.425 |
| BRSSN2007464 | 0 | 0 | 55.181 | 0 | 0 | 0 | 0 |
| BRSSN2011653 | 0 | 0 | 0 | 0 | 0 | 18.308 | 0 |
| BRSSN2011843 | 0 | 0 | 0 | 0 | 0 | 22.111 | 0 |
| BRSSN2013696 | 41.698 | 0 | 0 | 0 | 0 | 0 | 0 |
| BRSSN2015238 | 0 | 0 | 0 | 0 | 0 | 0 | 8.534 |
| BRSTN1000083 | 0 | 0 | 0 | 0 | 0 | 4.718 | 1.592 |
| BRSTN2000220 | 0 | 0 | 0 | 0 | 0 | 0 | 8.553 |
| BRSTN2010089 | 0 | 0 | 0 | 0 | 0 | 0 | 16.447 |
| BRSTN2010750 | 0 | 0 | 0 | 0 | 0 | 0 | 25.357 |
| BRSTN2011961 | 0 | 0 | 0 | 0 | 0 | 0 | 0.722 |
| BRSTN2012069 | 0.442 | 0 | 0.128 | 0.223 | 0 | 0.157 | 0.401 |
| BRSTN2012089 | 0 | 0 | 0 | 0 | 0 | 0 | 14.460 |
| BRSTN2012174 | 0 | 0 | 0 | 0 | 0 | 0.374 | 0 |
| BRSTN2013502 | 0 | 0 | 0 | 0 | 0 | 0 | 6.059 |
| BRSTN2016470 | 2.555 | 0 | 0 | 0 | 0 | 0 | 0.546 |
| BRSTN2016892 | 0 | 0 | 0 | 0 | 0 | 0 | 7.439 |
| BRSTN2017104 | 0 | 0 | 0 | 0 | 53.428 | 0 | 0 |
| BRTHA2005864 | 0 | 0 | 0 | 0 | 0 | 5.995 | 0 |
| BRTHA2008502 | 0 | 0 | 0 | 0 | 0 | 0 | 53.934 |
| BRTHA2012714 | 0 | 0 | 0 | 7.387 | 0 | 0 | 0 |
| BRTHA2016577 | 0 | 0 | 0 | 0 | 0 | 0 | 5.882 |
| BRTHA2027229 | 0 | 61.446 | 0 | 0 | 0 | 1.691 | 0 |
| BRTHA2033155 | 0 | 0 | 0 | 0 | 0 | 0 | 10.602 |
| BRTHA3009090 | 0 | 0 | 0 | 0 | 0 | 0 | 29.341 |
| BRTHA3009858 | 0 | 0 | 0 | 0 | 0 | 0 | 57.818 |
| BRTHA3010530 | 0 | 0 | 0 | 0 | 0 | 25.829 | 0 |
| BRTHA3011194 | 0 | 0 | 0 | 0 | 0 | 6.530 | 8.811 |
| BRTHA3022641 | 0 | 0 | 0 | 0 | 0 | 32.682 | 0 |
| CD34C3000252 | 0 | 0 | 0 | 0 | 0 | 0 | 4.092 |
| CTONG1000052 | 0 | 0 | 0 | 0 | 0 | 4.465 | 3.012 |
| CTONG1000087 | 0 | 0 | 0 | 6.163 | 0 | 1.932 | 2.607 |
| CTONG1000094 | 0 | 0 | 0 | 0 | 0 | 10.792 | 16.505 |
| CTONG1000218 | 0 | 0 | 0 | 2.838 | 0 | 0.890 | 4.801 |
| CTONG1000241 | 0 | 0 | 0 | 0 | 0 | 3.919 | 5.288 |
| CTONG2000452 | 0 | 0 | 0 | 0 | 0 | 5.381 | 0 |
| CTONG2000508 | 0 | 0 | 0 | 0 | 0 | 0 | 1.969 |
| CTONG2001139 | 0 | 0 | 0 | 0 | 0 | 49.796 | 0 |
| CTONG2001320 | 0 | 0 | 0 | 31.070 | 0 | 9.740 | 0 |
| CTONG2001748 | 0 | 0 | 0 | 0 | 0 | 11.585 | 5.211 |
| CTONG2001911 | 0 | 0 | 0 | 0 | 0 | 0 | 37.668 |
| CTONG2002073 | 0 | 0 | 0 | 0 | 0 | 0 | 7.303 |
| CTONG2002270 | 0 | 0 | 0 | 3.126 | 0 | 0 | 1.322 |
| CTONG2002453 | 0 | 0 | 0 | 0 | 0 | 14.342 | 0 |
| CTONG2002744 | 0 | 0 | 7.941 | 3.471 | 0 | 2.176 | 1.468 |
| CTONG2002803 | 0 | 0 | 0 | 0 | 0 | 2.720 | 0 |
| CTONG2002820 | 0 | 0 | 0 | 0 | 0 | 20.779 | 0 |
| CTONG2002903 | 0 | 0 | 0 | 18.153 | 0 | 0 | 0 |
| CTONG2003094 | 0 | 0 | 0 | 0 | 0 | 3.385 | 0 |
| CTONG2003293 | 0 | 0 | 0 | 0 | 0 | 0 | 23.043 |
| CTONG2003298 | 0 | 0 | 9.785 | 8.553 | 0 | 4.022 | 0 |
| CTONG2003524 | 0 | 0 | 0 | 0 | 0 | 5.954 | 0 |
| CTONG2005290 | 0 | 0 | 0 | 0 | 0 | 0 | 57.236 |
| CTONG2005553 | 0 | 0 | 0 | 0 | 0 | 2.646 | 0 |
| CTONG2006235 | 0 | 0 | 0 | 0 | 0 | 3.026 | 4.084 |
| CTONG2006412 | 0 | 0 | 0 | 0 | 0 | 11.468 | 0 |
| CTONG2006562 | 0 | 0 | 0 | 0 | 0 | 2.587 | 0 |
| CTONG2006709 | 0 | 0 | 0 | 0 | 0 | 4.778 | 0 |
| CTONG2006798 | 0 | 0 | 0 | 56.866 | 0 | 0 | 0 |
| CTONG2006932 | 0 | 0 | 0 | 6.485 | 0 | 0 | 0 |
| CTONG2007500 | 0 | 0 | 0 | 0 | 0 | 1.389 | 0 |
| CTONG2007586 | 0 | 0 | 0 | 0 | 0 | 11.104 | 0 |
| CTONG2007776 | 0 | 0 | 0 | 0 | 0 | 0 | 10.603 |
| CTONG2008398 | 0 | 0 | 0 | 4.506 | 0 | 0 | 0 |
| CTONG2008506 | 0 | 0 | 0 | 0 | 0 | 1.738 | 9.383 |
| CTONG2008518 | 0 | 0 | 0 | 22.697 | 0 | 7.115 | 0 |
| CTONG2008521 | 0 | 0 | 0 | 0 | 0 | 56.173 | 0 |
| CTONG2008792 | 0 | 0 | 0 | 0 | 0 | 0 | 36.634 |
| CTONG2010566 | 0 | 0 | 0 | 0 | 0 | 50.102 | 0 |
| CTONG2010649 | 0 | 0 | 0 | 0 | 0 | 8.667 | 7.796 |
| CTONG2010821 | 0 | 47.973 | 0 | 0 | 0 | 0 | 3.563 |
| CTONG2011801 | 0 | 0 | 0 | 0 | 0 | 16.411 | 7.381 |
| CTONG2012001 | 0 | 0 | 0 | 0 | 0 | 0 | 35.651 |
| CTONG2012050 | 0 | 0 | 0 | 41.864 | 0 | 0 | 0 |
| CTONG2012401 | 0 | 0 | 0 | 0 | 0 | 15.543 | 0 |
| CTONG2012452 | 0 | 0 | 0 | 0 | 0 | 0.658 | 0 |
| CTONG2012996 | 0 | 0 | 0 | 0 | 0 | 5.394 | 0 |
| CTONG2013348 | 0 | 0 | 0 | 0 | 0 | 10.163 | 0 |
| CTONG2013381 | 0 | 0 | 0 | 0 | 0 | 5.796 | 0 |
| CTONG2013907 | 0 | 0 | 0 | 0 | 0 | 7.966 | 0 |
| CTONG2013985 | 0 | 0 | 0 | 0 | 0 | 10.819 | 0 |
| CTONG2014165 | 0 | 0 | 64.925 | 0 | 0 | 0 | 0 |
| CTONG2014389 | 0 | 0 | 0 | 15.567 | 0 | 4.880 | 0 |
| CTONG2014898 | 0 | 0 | 0 | 0 | 0 | 10.656 | 0 |
| CTONG2015091 | 0 | 0 | 0 | 4.786 | 0 | 3.001 | 2.024 |
| CTONG2015204 | 0 | 0 | 0 | 0 | 0 | 28.022 | 0 |
| CTONG2016056 | 0 | 0 | 0 | 0 | 0 | 3.674 | 0 |
| CTONG2016408 | 0 | 0 | 49.924 | 0 | 0 | 0 | 0 |
| CTONG2016575 | 0 | 0 | 6.704 | 2.930 | 0 | 7.348 | 0 |
| CTONG2016824 | 0 | 0 | 0 | 0 | 0 | 15.727 | 0 |
| CTONG2018343 | 0 | 0 | 0 | 0 | 0 | 56.281 | 0 |
| CTONG2018637 | 0 | 0 | 0 | 0 | 0 | 12.120 | 0 |
| CTONG2018739 | 0 | 0 | 0 | 0 | 0 | 14.319 | 0 |
| CTONG2018843 | 0 | 0 | 0 | 0 | 0 | 0 | 27.676 |
| CTONG2018898 | 0 | 0 | 0 | 0 | 0 | 16.905 | 7.203 |
| CTONG2019063 | 0 | 0 | 0 | 0 | 0 | 39.224 | 0 |
| CTONG2019248 | 0 | 0 | 0 | 0 | 0 | 27.950 | 0 |
| CTONG2020411 | 0 | 0 | 0 | 0 | 0 | 12.719 | 0 |
| CTONG2020484 | 0 | 0 | 0 | 0 | 0 | 1.086 | 0 |
| CTONG2020522 | 0 | 0 | 0 | 0 | 0 | 42.337 | 0 |
| CTONG2020560 | 0 | 0 | 20.228 | 0 | 0 | 2.771 | 0 |
| CTONG2020582 | 0 | 0 | 0 | 0 | 0 | 3.545 | 0 |
| CTONG2022835 | 0 | 0 | 0 | 0 | 0 | 3.169 | 0 |
| CTONG2028124 | 0 | 0 | 0 | 0 | 0 | 1.857 | 2.506 |
| CTONG3001123 | 0 | 0 | 0 | 46.246 | 0 | 0 | 0 |
| CTONG3002835 | 12.826 | 0 | 14.814 | 0 | 0 | 0 | 0 |
| CTONG3008894 | 8.487 | 0 | 0 | 0 | 0 | 2.686 | 0 |
| CTONG3009239 | 0 | 0 | 0 | 0 | 0 | 8.002 | 0 |
| D30ST1000066 | 100 | 0 | 0 | 0 | 0 | 0 | 0 |
| D30ST1000109 | 62.515 | 0 | 24.068 | 0 | 0 | 0 | 0 |
| D30ST1000238 | 100 | 0 | 0 | 0 | 0 | 0 | 0 |
| D30ST1000267 | 50.415 | 0 | 0 | 0 | 0 | 7.978 | 10.765 |
| D30ST1000270 | 30.165 | 0 | 0 | 0 | 0 | 0 | 0 |
| D30ST2000184 | 100 | 0 | 0 | 0 | 0 | 0 | 0 |
| D30ST2000618 | 100 | 0 | 0 | 0 | 0 | 0 | 0 |
| D30ST2000654 | 100 | 0 | 0 | 0 | 0 | 0 | 0 |
| D30ST2000734 | 93.334 | 0 | 0 | 0 | 0 | 0 | 0 |
| D30ST2001328 | 100 | 0 | 0 | 0 | 0 | 0 | 0 |
| D30ST2001669 | 100 | 0 | 0 | 0 | 0 | 0 | 0 |
| D30ST2001670 | 43.561 | 0 | 0 | 0 | 0 | 0 | 0 |
| D30ST2001788 | 34.047 | 0 | 0 | 0 | 0 | 0 | 0 |
| D30ST2002068 | 35.114 | 28.845 | 17.381 | 0 | 0 | 0 | 0 |
| D30ST2002182 | 86.773 | 0 | 0 | 0 | 0 | 0 | 0 |
| D30ST2002223 | 100 | 0 | 0 | 0 | 0 | 0 | 0 |
| D30ST2002262 | 100 | 0 | 0 | 0 | 0 | 0 | 0 |
| D30ST2002272 | 100 | 0 | 0 | 0 | 0 | 0 | 0 |
| D30ST2002417 | 100 | 0 | 0 | 0 | 0 | 0 | 0 |
| D30ST2002436 | 100 | 0 | 0 | 0 | 0 | 0 | 0 |
| D30ST2002648 | 17.515 | 0 | 0 | 0 | 0 | 0 | 0 |
| D30ST2003024 | 94.698 | 0 | 0 | 0 | 0 | 0 | 0 |
| D30ST2003331 | 100 | 0 | 0 | 0 | 0 | 0 | 0 |
| D30ST2003607 | 46.404 | 0 | 53.596 | 0 | 0 | 0 | 0 |
| D30ST2003797 | 100 | 0 | 0 | 0 | 0 | 0 | 0 |
| D30ST2004637 | 100 | 0 | 0 | 0 | 0 | 0 | 0 |
| D30ST3000169 | 28.566 | 0 | 19.796 | 0 | 0 | 0 | 0 |
| D30ST3000195 | 100 | 0 | 0 | 0 | 0 | 0 | 0 |
| D30ST3000258 | 72.574 | 0 | 0 | 0 | 0 | 0 | 0 |
| D30ST3000291 | 93.334 | 0 | 0 | 0 | 0 | 0 | 0 |
| D30ST3000388 | 100 | 0 | 0 | 0 | 0 | 0 | 0 |
| D30ST3000493 | 100 | 0 | 0 | 0 | 0 | 0 | 0 |
| D60ST2000127 | 0 | 100 | 0 | 0 | 0 | 0 | 0 |
| D60ST2000169 | 0 | 100 | 0 | 0 | 0 | 0 | 0 |
| D60ST2000245 | 0 | 100 | 0 | 0 | 0 | 0 | 0 |
| D60ST2000358 | 0 | 95.400 | 0 | 0 | 0 | 0 | 0 |
| D60ST2000464 | 0 | 73.552 | 0 | 0 | 0 | 0 | 0 |
| D60ST2000507 | 0 | 100 | 0 | 0 | 0 | 0 | 0 |
| D90ST2000031 | 0 | 0 | 63.705 | 0 | 0 | 0 | 0 |
| D90ST2000278 | 0 | 0 | 100 | 0 | 0 | 0 | 0 |
| D90ST2000440 | 0 | 0 | 100 | 0 | 0 | 0 | 0 |
| D90ST2000869 | 0 | 0 | 100 | 0 | 0 | 0 | 0 |
| D90ST2001319 | 0 | 0 | 100 | 0 | 0 | 0 | 0 |
| D90ST2001433 | 0 | 0 | 100 | 0 | 0 | 0 | 0 |
| D90ST2002397 | 0 | 0 | 37.837 | 0 | 0 | 0 | 0 |
| D90ST2002608 | 0 | 0 | 30.042 | 0 | 0 | 0 | 0 |
| D90ST2002673 | 0 | 0 | 19.695 | 0 | 0 | 0 | 0 |
| D90ST2003106 | 0 | 0 | 93.096 | 0 | 0 | 0 | 0 |
| D90ST2003108 | 0 | 0 | 65.767 | 0 | 0 | 0 | 0 |
| D90ST2003137 | 0 | 0 | 100 | 0 | 0 | 0 | 0 |
| D90ST2003397 | 0 | 0 | 38.536 | 0 | 0 | 0 | 0 |
| D90ST2003580 | 0 | 0 | 93.047 | 0 | 0 | 0 | 0 |
| D90ST2003594 | 0 | 0 | 100 | 0 | 0 | 0 | 0 |
| D90ST2003762 | 0 | 0 | 29.391 | 0 | 0 | 0 | 0 |
| D90ST2003791 | 0 | 0 | 82.500 | 0 | 0 | 0 | 0 |
| D90ST2003989 | 0 | 0 | 100 | 0 | 0 | 0 | 0 |
| D90ST2004018 | 0 | 0 | 100 | 0 | 0 | 0 | 0 |
| D90ST2004073 | 0 | 0 | 100 | 0 | 0 | 0 | 0 |
| D90ST2004417 | 0 | 0 | 100 | 0 | 0 | 0 | 0 |
| DFNES1000003 | 0 | 0 | 0 | 100 | 0 | 0 | 0 |
| DFNES1000083 | 0 | 0 | 0 | 13.257 | 0 | 0 | 0 |
| DFNES1000107 | 0 | 0 | 0 | 100 | 0 | 0 | 0 |
| DFNES1000150 | 0 | 0 | 0 | 6.581 | 0 | 0 | 0 |
| DFNES1000185 | 0 | 0 | 0 | 7.773 | 0 | 0 | 0 |
| DFNES2000011 | 0 | 0 | 0 | 3.223 | 0 | 0 | 0 |
| DFNES2000143 | 0 | 0 | 0 | 100 | 0 | 0 | 0 |
| DFNES2000146 | 0 | 0 | 0 | 65.605 | 0 | 20.566 | 0 |
| DFNES2000153 | 0 | 0 | 0 | 18.869 | 0 | 0 | 0 |
| DFNES2000212 | 0 | 0 | 0 | 85.399 | 0 | 0 | 0 |
| DFNES2000268 | 0 | 0 | 0 | 6.508 | 0 | 0 | 0 |
| DFNES2000292 | 0 | 0 | 0 | 22.118 | 0 | 0 | 0 |
| DFNES2000335 | 0 | 0 | 0 | 27.920 | 0 | 0 | 0 |
| DFNES2000426 | 0 | 0 | 0 | 74.412 | 0 | 0 | 0 |
| DFNES2000432 | 0 | 0 | 0 | 43.948 | 0 | 0 | 0 |
| DFNES2000443 | 0 | 0 | 0 | 4.000 | 0 | 1.254 | 0 |
| DFNES2000457 | 0 | 0 | 0 | 52.346 | 0 | 0 | 0 |
| DFNES2000471 | 0 | 0 | 0 | 100 | 0 | 0 | 0 |
| DFNES2000526 | 0 | 0 | 0 | 16.286 | 0 | 5.105 | 13.778 |
| DFNES2000913 | 0 | 0 | 0 | 100 | 0 | 0 | 0 |
| DFNES2001091 | 0 | 0 | 0 | 50.577 | 0 | 0 | 0 |
| DFNES2001096 | 0 | 0 | 0 | 45.162 | 0 | 0 | 0 |
| DFNES2001108 | 0 | 0 | 0 | 100 | 0 | 0 | 0 |
| DFNES2001177 | 0 | 0 | 0 | 100 | 0 | 0 | 0 |
| DFNES2001404 | 0 | 0 | 0 | 61.421 | 0 | 0 | 0 |
| DFNES2001564 | 0 | 0 | 0 | 100 | 0 | 0 | 0 |
| DFNES2001565 | 0 | 0 | 0 | 100 | 0 | 0 | 0 |
| DFNES2001647 | 0 | 0 | 0 | 100 | 0 | 0 | 0 |
| DFNES2001800 | 0 | 0 | 0 | 100 | 0 | 0 | 0 |
| DFNES2001829 | 0 | 0 | 0 | 54.385 | 0 | 0 | 0 |
| DFNES2002220 | 0 | 0 | 0 | 100 | 0 | 0 | 0 |
| DFNES2002509 | 0 | 0 | 0 | 29.923 | 0 | 0 | 0 |
| DFNES2002550 | 0 | 0 | 0 | 100 | 0 | 0 | 0 |
| DFNES2002588 | 0 | 0 | 0 | 100 | 0 | 0 | 0 |
| DFNES2002817 | 0 | 0 | 0 | 100 | 0 | 0 | 0 |
| DFNES2002966 | 0 | 0 | 0 | 90.016 | 0 | 0 | 0 |
| DFNES2003081 | 0 | 0 | 0 | 46.409 | 0 | 0 | 0 |
| DFNES2003192 | 0 | 0 | 0 | 17.653 | 0 | 0 | 7.467 |
| DFNES2003255 | 0 | 0 | 0 | 100 | 0 | 0 | 0 |
| DFNES2003742 | 0 | 0 | 0 | 61.421 | 0 | 0 | 0 |
| DFNES2004346 | 0 | 0 | 0 | 18.444 | 0 | 0 | 0 |
| DFNES2004354 | 0 | 0 | 0 | 100 | 0 | 0 | 0 |
| DFNES2004371 | 0 | 0 | 0 | 9.298 | 0 | 0 | 0 |
| DFNES2004383 | 0 | 0 | 0 | 100 | 0 | 0 | 0 |
| DFNES2004608 | 0 | 0 | 0 | 44.433 | 0 | 0 | 0 |
| DFNES2004684 | 0 | 0 | 0 | 100 | 0 | 0 | 0 |
| DFNES2005266 | 0 | 0 | 0 | 100 | 0 | 0 | 0 |
| DFNES2005527 | 0 | 0 | 0 | 100 | 0 | 0 | 0 |
| DFNES2005540 | 0 | 0 | 0 | 17.815 | 0 | 0 | 0 |
| DFNES2005690 | 0 | 0 | 0 | 29.920 | 0 | 0 | 0 |
| DFNES2005766 | 0 | 0 | 0 | 10.804 | 0 | 0 | 0 |
| DFNES2005779 | 0 | 0 | 0 | 100 | 0 | 0 | 0 |
| DFNES2005875 | 0 | 0 | 0 | 100 | 0 | 0 | 0 |
| DFNES2006346 | 0 | 0 | 0 | 41.632 | 0 | 13.051 | 0 |
| DFNES2006944 | 0 | 0 | 0 | 100 | 0 | 0 | 0 |
| DFNES2007113 | 0 | 0 | 0 | 39.383 | 0 | 0 | 0 |
| DFNES2007299 | 0 | 0 | 0 | 19.355 | 0 | 0 | 0 |
| DFNES2007332 | 0 | 0 | 0 | 21.872 | 0 | 0 | 0 |
| DFNES2007634 | 0 | 0 | 0 | 10.476 | 0 | 4.926 | 4.432 |
| DFNES2007641 | 0 | 0 | 0 | 62.977 | 0 | 0 | 0 |
| DFNES2007757 | 0 | 0 | 0 | 22.190 | 0 | 0 | 0 |
| DFNES2008088 | 0 | 0 | 0 | 15.493 | 0 | 0 | 0 |
| DFNES2008160 | 0 | 0 | 0 | 26.402 | 0 | 0 | 0 |
| DFNES2008280 | 0 | 0 | 0 | 100 | 0 | 0 | 0 |
| DFNES2008881 | 0 | 0 | 0 | 100 | 0 | 0 | 0 |
| DFNES2009482 | 0 | 0 | 0 | 8.358 | 38.864 | 0 | 3.536 |
| DFNES2010502 | 0 | 0 | 0 | 100 | 0 | 0 | 0 |
| DFNES2011192 | 0 | 0 | 0 | 100 | 0 | 0 | 0 |
| DFNES2011221 | 0 | 0 | 0 | 84.029 | 0 | 0 | 0 |
| DFNES2011239 | 0 | 0 | 0 | 44.035 | 0 | 13.804 | 0 |
| DFNES2011245 | 0 | 0 | 0 | 85.243 | 0 | 0 | 0 |
| DFNES2011380 | 0 | 0 | 0 | 68.891 | 0 | 0 | 0 |
| DFNES2011499 | 0 | 0 | 0 | 36.562 | 0 | 0 | 0 |
| ERLTF1000021 | 0 | 0 | 0 | 0 | 100 | 0 | 0 |
| ERLTF2000324 | 0 | 0 | 0 | 0 | 100 | 0 | 0 |
| ERLTF2000465 | 0 | 0 | 0 | 0 | 100 | 0 | 0 |
| FCBBF1000023 | 0 | 0 | 0 | 0 | 0 | 12.996 | 0 |
| FCBBF1000024 | 0 | 0 | 0 | 12.939 | 0 | 8.112 | 0 |
| FCBBF1000025 | 0 | 0 | 0 | 0 | 0 | 5.912 | 0 |
| FCBBF1000027 | 0 | 0 | 0 | 6.476 | 10.037 | 4.060 | 0.913 |
| FCBBF1000038 | 0 | 0 | 0 | 0 | 0 | 20.755 | 28.007 |
| FCBBF1000053 | 0 | 0 | 0 | 0 | 0 | 14.999 | 0 |
| FCBBF1000061 | 0 | 0 | 0 | 0 | 0 | 13.035 | 0 |
| FCBBF1000063 | 0 | 0 | 0 | 0 | 0 | 11.049 | 0 |
| FCBBF1000069 | 0 | 0 | 0 | 0 | 0 | 100 | 0 |
| FCBBF1000077 | 0 | 0 | 0 | 0 | 0 | 19.451 | 22.208 |
| FCBBF1000115 | 0 | 0 | 0 | 0 | 0 | 37.553 | 0 |
| FCBBF1000117 | 0 | 0 | 0 | 0 | 0 | 100 | 0 |
| FCBBF1000118 | 0 | 0 | 0 | 0 | 0 | 28.015 | 0 |
| FCBBF1000121 | 0 | 0 | 0 | 0 | 0 | 18.354 | 0 |
| FCBBF1000125 | 0 | 0 | 0 | 0 | 0 | 57.554 | 0 |
| FCBBF1000131 | 0 | 0 | 0 | 0 | 0 | 100 | 0 |
| FCBBF1000139 | 0 | 0 | 0 | 0 | 0 | 16.148 | 0 |
| FCBBF1000155 | 0 | 0 | 0 | 0 | 0 | 100 | 0 |
| FCBBF1000157 | 0 | 0 | 0 | 0 | 0 | 100 | 0 |
| FCBBF1000171 | 0 | 0 | 0 | 0 | 0 | 100 | 0 |
| FCBBF1000174 | 0 | 0 | 0 | 0 | 0 | 100 | 0 |
| FCBBF1000182 | 0 | 0 | 0 | 0 | 0 | 15.666 | 0 |
| FCBBF1000197 | 12.472 | 0 | 0 | 6.296 | 0 | 3.947 | 2.663 |
| FCBBF1000198 | 0 | 0 | 0 | 0 | 0 | 100 | 0 |
| FCBBF1000206 | 0 | 0 | 0 | 0 | 0 | 100 | 0 |
| FCBBF1000220 | 0 | 0 | 0 | 0 | 0 | 100 | 0 |
| FCBBF1000232 | 0 | 0 | 0 | 0 | 0 | 100 | 0 |
| FCBBF1000233 | 0 | 0 | 0 | 0 | 0 | 100 | 0 |
| FCBBF1000243 | 0 | 0 | 0 | 0 | 0 | 100 | 0 |
| FCBBF1000270 | 0 | 0 | 0 | 0 | 0 | 100 | 0 |
| FCBBF1000272 | 0 | 0 | 0 | 0 | 0 | 64.423 | 0 |
| FCBBF1000280 | 0 | 0 | 0 | 0 | 0 | 10.435 | 0 |
| FCBBF1000294 | 0 | 0 | 0 | 0 | 0 | 1.989 | 2.684 |
| FCBBF1000297 | 0 | 0 | 0 | 0 | 0 | 100 | 0 |
| FCBBF1000305 | 0 | 0 | 0 | 0 | 0 | 33.142 | 0 |
| FCBBF1000314 | 0 | 0 | 0 | 0 | 0 | 100 | 0 |
| FCBBF1000322 | 0 | 0 | 0 | 0 | 0 | 100 | 0 |
| FCBBF1000349 | 0 | 0 | 0 | 0 | 0 | 100 | 0 |
| FCBBF1000367 | 0 | 0 | 0 | 0 | 0 | 5.613 | 3.787 |
| FCBBF1000374 | 0 | 0 | 0 | 0 | 0 | 73.865 | 0 |
| FCBBF1000376 | 0 | 0 | 0 | 0 | 0 | 78.700 | 0 |
| FCBBF1000377 | 0 | 0 | 0 | 0 | 0 | 39.957 | 26.958 |
| FCBBF1000395 | 0 | 0 | 0 | 0 | 0 | 100 | 0 |
| FCBBF1000397 | 0 | 0 | 0 | 0 | 0 | 100 | 0 |
| FCBBF1000403 | 0 | 0 | 0 | 0 | 0 | 15.495 | 0 |
| FCBBF1000412 | 22.594 | 0 | 0 | 0 | 0 | 3.575 | 0 |
| FCBBF1000425 | 0 | 0 | 0 | 0 | 0 | 9.645 | 0 |
| FCBBF1000437 | 0 | 0 | 0 | 0 | 0 | 23.626 | 31.880 |
| FCBBF1000449 | 0 | 0 | 0 | 0 | 0 | 12.351 | 0 |
| FCBBF1000466 | 0 | 0 | 0 | 0 | 0 | 8.236 | 0 |
| FCBBF1000476 | 0 | 0 | 0 | 0 | 0 | 48.133 | 0 |
| FCBBF1000506 | 0 | 0 | 0 | 0 | 0 | 34.365 | 0 |
| FCBBF1000509 | 0 | 0 | 0 | 0 | 0 | 6.894 | 0 |
| FCBBF1000546 | 0 | 0 | 0 | 0 | 0 | 100 | 0 |
| FCBBF1000550 | 0 | 0 | 0 | 0 | 0 | 100 | 0 |
| FCBBF1000556 | 0 | 0 | 0 | 0 | 0 | 1.969 | 0 |
| FCBBF1000563 | 0 | 0 | 0 | 0 | 0 | 5.550 | 11.232 |
| FCBBF1000574 | 0 | 0 | 0 | 0 | 0 | 7.670 | 0 |
| FCBBF1000581 | 0 | 0 | 0 | 0 | 0 | 100 | 0 |
| FCBBF1000582 | 0 | 0 | 0 | 0 | 0 | 100 | 0 |
| FCBBF1000598 | 0 | 0 | 0 | 0 | 0 | 100 | 0 |
| FCBBF1000604 | 0 | 0 | 0 | 0 | 0 | 100 | 0 |
| FCBBF1000618 | 0 | 0 | 0 | 0 | 0 | 100 | 0 |
| FCBBF1000627 | 0 | 0 | 0 | 0 | 0 | 100 | 0 |
| FCBBF1000671 | 0 | 0 | 0 | 0 | 0 | 25.293 | 0 |
| FCBBF1000675 | 0 | 0 | 0 | 0 | 0 | 23.460 | 31.656 |
| FCBBF1000684 | 0 | 0 | 0 | 0 | 0 | 33.171 | 0 |
| FCBBF1000686 | 0 | 0 | 0 | 0 | 0 | 42.565 | 57.435 |
| FCBBF1000687 | 0 | 0 | 0 | 0 | 0 | 31.919 | 0 |
| FCBBF1000691 | 0 | 0 | 0 | 0 | 0 | 100 | 0 |
| FCBBF1000732 | 0 | 0 | 0 | 0 | 0 | 10.346 | 0 |
| FCBBF1000748 | 0 | 0 | 0 | 0 | 0 | 62.490 | 0 |
| FCBBF1000760 | 0 | 0 | 0 | 0 | 0 | 1.210 | 0 |
| FCBBF2000038 | 0 | 0 | 0 | 0 | 0 | 67.004 | 6.697 |
| FCBBF2000087 | 0 | 0 | 0 | 0 | 0 | 5.330 | 0 |
| FCBBF2000094 | 0 | 0 | 0 | 0 | 0 | 100 | 0 |
| FCBBF2000105 | 0 | 0 | 0 | 0 | 0 | 100 | 0 |
| FCBBF2000123 | 0 | 0 | 0 | 0 | 0 | 100 | 0 |
| FCBBF2000195 | 0 | 0 | 0 | 0 | 0 | 7.679 | 0 |
| FCBBF2000199 | 0 | 0 | 0 | 0 | 0 | 20.674 | 6.974 |
| FCBBF2000214 | 0 | 0 | 0 | 0 | 0 | 100 | 0 |
| FCBBF2000232 | 0 | 0 | 0 | 0 | 0 | 100 | 0 |
| FCBBF2000259 | 0 | 0 | 0 | 0 | 0 | 44.190 | 29.814 |
| FCBBF2000276 | 0 | 0 | 0 | 0 | 0 | 100 | 0 |
| FCBBF2000291 | 0 | 0 | 0 | 0 | 0 | 100 | 0 |
| FCBBF2000362 | 0 | 0 | 0 | 0 | 0 | 15.464 | 0 |
| FCBBF2000379 | 0 | 0 | 0 | 0 | 0 | 100 | 0 |
| FCBBF2000473 | 0 | 0 | 0 | 0 | 0 | 100 | 0 |
| FCBBF2000502 | 0 | 0 | 0 | 0 | 0 | 12.188 | 0 |
| FCBBF2000566 | 0 | 0 | 0 | 0 | 0 | 27.467 | 0 |
| FCBBF2000576 | 0 | 0 | 0 | 0 | 0 | 20.800 | 0 |
| FCBBF2000591 | 0 | 0 | 0 | 0 | 0 | 1.059 | 0 |
| FCBBF2000677 | 0 | 0 | 0 | 0 | 0 | 100 | 0 |
| FCBBF2000678 | 0 | 0 | 0 | 0 | 0 | 100 | 0 |
| FCBBF2000685 | 0 | 0 | 0 | 0 | 0 | 12.569 | 0 |
| FCBBF2000733 | 0 | 0 | 0 | 0 | 0 | 14.642 | 0 |
| FCBBF2000782 | 0 | 0 | 0 | 0 | 0 | 68.901 | 0 |
| FCBBF2000808 | 0 | 0 | 0 | 0 | 0 | 100 | 0 |
| FCBBF2000815 | 0 | 0 | 0 | 0 | 0 | 100 | 0 |
| FCBBF2000825 | 86.338 | 0 | 0 | 0 | 0 | 13.662 | 0 |
| FCBBF2000885 | 0 | 0 | 0 | 0 | 0 | 2.836 | 0 |
| FCBBF2000940 | 0 | 0 | 0 | 0 | 0 | 62.490 | 0 |
| FCBBF2000951 | 0 | 0 | 0 | 0 | 0 | 100 | 0 |
| FCBBF2001001 | 0 | 0 | 0 | 0 | 0 | 17.657 | 0 |
| FCBBF2001088 | 0 | 0 | 0 | 0 | 0 | 29.954 | 0 |
| FCBBF2001105 | 0 | 0 | 0 | 0 | 0 | 5.608 | 0 |
| FCBBF2001116 | 0 | 0 | 0 | 0 | 0 | 100 | 0 |
| FCBBF2001183 | 0 | 0 | 0 | 0 | 0 | 6.110 | 4.122 |
| FCBBF2001188 | 0 | 0 | 0 | 0 | 0 | 100 | 0 |
| FCBBF2001211 | 0 | 0 | 0 | 0 | 0 | 11.839 | 0 |
| FCBBF2001238 | 0 | 0 | 0 | 0 | 0 | 100 | 0 |
| FCBBF2001243 | 0 | 0 | 0 | 0 | 0 | 100 | 0 |
| FCBBF2001291 | 0 | 0 | 0 | 0 | 0 | 10.544 | 0 |
| FCBBF2001299 | 0 | 0 | 0 | 0 | 0 | 83.886 | 0 |
| FCBBF2001309 | 0 | 0 | 0 | 0 | 0 | 32.152 | 10.846 |
| FCBBF2001400 | 0 | 0 | 0 | 0 | 0 | 37.623 | 0 |
| FCBBF2001427 | 0 | 0 | 0 | 0 | 0 | 100 | 0 |
| FCBBF2001480 | 0 | 0 | 0 | 0 | 0 | 44.606 | 0 |
| FCBBF2001529 | 0 | 0 | 0 | 0 | 0 | 100 | 0 |
| FCBBF2001538 | 0 | 0 | 0 | 4.490 | 0 | 4.223 | 1.899 |
| FCBBF2001594 | 0 | 0 | 0 | 0 | 0 | 14.051 | 0 |
| FCBBF2001672 | 0 | 0 | 0 | 0 | 0 | 100 | 0 |
| FCBBF2001675 | 0 | 0 | 0 | 0 | 0 | 100 | 0 |
| FCBBF2001718 | 0 | 0 | 0 | 0 | 0 | 100 | 0 |
| FCBBF2001720 | 0 | 0 | 0 | 0 | 0 | 100 | 0 |
| FCBBF2001817 | 0 | 0 | 0 | 0 | 0 | 44.606 | 0 |
| FCBBF2001868 | 0 | 0 | 0 | 0 | 0 | 100 | 0 |
| FCBBF2002044 | 0 | 0 | 0 | 0 | 0 | 100 | 0 |
| FCBBF2002111 | 0 | 0 | 0 | 0 | 0 | 21.261 | 0 |
| FCBBF2002281 | 0 | 0 | 0 | 0 | 0 | 59.713 | 40.287 |
| FCBBF2002349 | 0 | 0 | 0 | 0 | 0 | 14.587 | 0 |
| FCBBF2002370 | 0 | 0 | 0 | 0 | 0 | 100 | 0 |
| FCBBF2002541 | 0 | 0 | 0 | 0 | 0 | 100 | 0 |
| FCBBF2002626 | 0 | 0 | 0 | 0 | 0 | 72.245 | 0 |
| FCBBF2002801 | 0 | 0 | 0 | 0 | 0 | 14.385 | 0 |
| FCBBF2002897 | 0 | 0 | 0 | 0 | 0 | 100 | 0 |
| FCBBF2002898 | 0 | 0 | 0 | 0 | 0 | 100 | 0 |
| FCBBF2002904 | 0 | 0 | 0 | 0 | 0 | 100 | 0 |
| FCBBF2002928 | 0 | 0 | 0 | 0 | 0 | 5.748 | 0 |
| FCBBF2002953 | 0 | 0 | 0 | 0 | 0 | 100 | 0 |
| FCBBF2003083 | 0 | 0 | 0 | 0 | 0 | 100 | 0 |
| FCBBF2003102 | 0 | 0 | 0 | 0 | 0 | 36.993 | 49.917 |
| FCBBF2003269 | 0 | 0 | 0 | 0 | 0 | 100 | 0 |
| FCBBF2003293 | 0 | 0 | 0 | 0 | 0 | 33.878 | 0 |
| FCBBF2003297 | 0 | 0 | 0 | 0 | 0 | 100 | 0 |
| FCBBF2003395 | 0 | 0 | 0 | 0 | 0 | 100 | 0 |
| FCBBF2003528 | 0 | 0 | 0 | 0 | 0 | 100 | 0 |
| FCBBF2003543 | 0 | 0 | 0 | 0 | 0 | 64.881 | 0 |
| FCBBF2003549 | 0 | 0 | 0 | 0 | 0 | 21.202 | 0 |
| FCBBF2003567 | 0 | 0 | 0 | 0 | 0 | 36.129 | 0 |
| FCBBF2003636 | 0 | 0 | 0 | 0 | 0 | 100 | 0 |
| FCBBF2003823 | 0 | 0 | 0 | 0 | 0 | 100 | 0 |
| FCBBF2003895 | 0 | 0 | 0 | 0 | 0 | 100 | 0 |
| FCBBF2004066 | 0 | 0 | 0 | 0 | 0 | 3.724 | 0 |
| FCBBF2004090 | 0 | 0 | 0 | 0 | 0 | 100 | 0 |
| FCBBF2004138 | 0 | 0 | 0 | 0 | 0 | 100 | 0 |
| FCBBF2004217 | 0 | 0 | 0 | 0 | 0 | 100 | 0 |
| FCBBF2004256 | 0 | 0 | 0 | 0 | 0 | 100 | 0 |
| FCBBF2004373 | 0 | 0 | 0 | 0 | 0 | 43.392 | 0 |
| FCBBF2004448 | 0 | 0 | 0 | 0 | 0 | 100 | 0 |
| FCBBF2004671 | 0 | 0 | 0 | 0 | 0 | 100 | 0 |
| FCBBF2004707 | 0 | 0 | 0 | 0 | 0 | 100 | 0 |
| FCBBF2004788 | 0 | 0 | 0 | 0 | 0 | 100 | 0 |
| FCBBF2005069 | 0 | 0 | 0 | 0 | 0 | 100 | 0 |
| FCBBF2005122 | 0 | 0 | 0 | 0 | 0 | 100 | 0 |
| FCBBF2005428 | 0 | 0 | 0 | 0 | 0 | 72.245 | 0 |
| FCBBF2005439 | 0 | 0 | 0 | 0 | 0 | 100 | 0 |
| FCBBF2005538 | 0 | 0 | 0 | 0 | 0 | 100 | 0 |
| FCBBF2005637 | 0 | 0 | 0 | 0 | 76.147 | 5.134 | 0 |
| FCBBF2005645 | 0 | 0 | 0 | 0 | 0 | 100 | 0 |
| FCBBF2005658 | 0 | 0 | 0 | 0 | 0 | 14.379 | 0 |
| FCBBF2005733 | 0 | 0 | 0 | 0 | 0 | 59.793 | 0 |
| FCBBF2005909 | 0 | 0 | 0 | 0 | 0 | 11.530 | 15.558 |
| FCBBF2005966 | 0 | 0 | 0 | 0 | 0 | 17.497 | 0 |
| FCBBF2006131 | 0 | 0 | 0 | 0 | 0 | 100 | 0 |
| FCBBF2006380 | 0 | 0 | 0 | 0 | 0 | 60.769 | 0 |
| FCBBF2006418 | 0 | 0 | 0 | 0 | 0 | 100 | 0 |
| FCBBF2006452 | 0 | 0 | 0 | 0 | 0 | 100 | 0 |
| FCBBF2006634 | 0 | 0 | 63.649 | 0 | 0 | 8.720 | 0 |
| FCBBF2006781 | 0 | 0 | 0 | 0 | 0 | 11.690 | 0 |
| FCBBF2007012 | 0 | 0 | 0 | 0 | 0 | 100 | 0 |
| FCBBF2007186 | 0 | 0 | 0 | 0 | 0 | 100 | 0 |
| FCBBF2007265 | 0 | 0 | 0 | 0 | 0 | 100 | 0 |
| FCBBF2007302 | 0 | 0 | 0 | 0 | 0 | 43.392 | 0 |
| FCBBF2007556 | 0 | 0 | 0 | 0 | 0 | 16.883 | 0 |
| FCBBF2007610 | 0 | 0 | 0 | 0 | 0 | 100 | 0 |
| FCBBF2007633 | 0 | 0 | 0 | 0 | 0 | 100 | 0 |
| FCBBF2007840 | 0 | 0 | 0 | 0 | 0 | 46.021 | 0 |
| FCBBF3000102 | 0 | 0 | 0 | 0 | 0 | 22.924 | 0 |
| FCBBF3000110 | 0 | 0 | 0 | 0 | 0 | 23.863 | 0 |
| FCBBF3000115 | 0 | 0 | 0 | 0 | 0 | 7.373 | 0 |
| FCBBF3000120 | 0 | 0 | 0 | 0 | 0 | 100 | 0 |
| FCBBF3000168 | 0 | 0 | 0 | 0 | 0 | 15.041 | 0 |
| FCBBF3000175 | 0 | 0 | 56.620 | 0 | 0 | 15.515 | 0 |
| FCBBF3000227 | 0 | 0 | 0 | 0 | 0 | 20.773 | 0 |
| FCBBF3000228 | 0 | 0 | 0 | 0 | 0 | 16.557 | 0 |
| FCBBF3000229 | 0 | 0 | 0 | 0 | 0 | 17.839 | 24.071 |
| FCBBF3000233 | 0 | 0 | 0 | 0 | 0 | 100 | 0 |
| FCBBF3000269 | 0 | 0 | 0 | 0 | 0 | 56.549 | 0 |
| FCBBF3000361 | 0 | 0 | 0 | 0 | 0 | 100 | 0 |
| FCBBF3000367 | 0 | 0 | 0 | 0 | 0 | 100 | 0 |
| FCBBF3000388 | 0 | 0 | 0 | 0 | 0 | 22.816 | 0 |
| FCBBF3000434 | 0 | 0 | 0 | 0 | 0 | 6.841 | 0 |
| FCBBF3000462 | 0 | 0 | 0 | 0 | 0 | 100 | 0 |
| FCBBF3000473 | 0 | 0 | 0 | 0 | 0 | 100 | 0 |
| FCBBF3000501 | 0 | 0 | 0 | 0 | 0 | 100 | 0 |
| FCBBF3000518 | 0 | 0 | 0 | 0 | 0 | 100 | 0 |
| FCBBF3000536 | 0 | 0 | 0 | 0 | 0 | 4.925 | 0 |
| FCBBF3000550 | 0 | 0 | 0 | 0 | 0 | 100 | 0 |
| FCBBF3000847 | 0 | 0 | 0 | 0 | 0 | 100 | 0 |
| FCBBF3001018 | 0 | 0 | 0 | 0 | 0 | 100 | 0 |
| FCBBF3001020 | 0 | 0 | 0 | 0 | 0 | 100 | 0 |
| FCBBF3001081 | 0 | 0 | 0 | 0 | 0 | 9.702 | 0 |
| FCBBF3001235 | 0 | 0 | 0 | 0 | 0 | 100 | 0 |
| FCBBF3001281 | 0 | 0 | 0 | 0 | 0 | 37.617 | 0 |
| FCBBF3001302 | 0 | 0 | 0 | 0 | 91.087 | 6.141 | 0 |
| FCBBF3001377 | 0 | 0 | 0 | 0 | 0 | 19.023 | 25.669 |
| FCBBF3001470 | 0 | 0 | 0 | 0 | 0 | 2.508 | 0 |
| FCBBF3001594 | 0 | 0 | 0 | 0 | 0 | 100 | 0 |
| FCBBF3001632 | 0 | 0 | 0 | 0 | 0 | 2.852 | 3.848 |
| FCBBF3001657 | 0 | 0 | 0 | 0 | 0 | 8.716 | 11.762 |
| FCBBF3001818 | 0 | 0 | 0 | 0 | 0 | 33.656 | 0 |
| FCBBF3001855 | 0 | 0 | 37.763 | 0 | 0 | 31.042 | 0 |
| FCBBF3001890 | 0 | 0 | 0 | 0 | 0 | 15.245 | 13.714 |
| FCBBF3001912 | 0 | 0 | 0 | 0 | 0 | 100 | 0 |
| FCBBF3001914 | 0 | 0 | 0 | 0 | 0 | 100 | 0 |
| FCBBF3001918 | 0 | 0 | 0 | 0 | 0 | 100 | 0 |
| FCBBF3001924 | 0 | 0 | 0 | 0 | 0 | 100 | 0 |
| FCBBF3001977 | 0 | 0 | 0 | 0 | 0 | 13.761 | 0 |
| FCBBF3002163 | 0 | 0 | 0 | 0 | 0 | 100 | 0 |
| FCBBF3002188 | 0 | 0 | 0 | 0 | 0 | 100 | 0 |
| FCBBF3002190 | 0 | 0 | 0 | 0 | 0 | 100 | 0 |
| FCBBF3002268 | 0 | 0 | 0 | 0 | 0 | 100 | 0 |
| FCBBF3002475 | 0 | 0 | 0 | 0 | 0 | 100 | 0 |
| FCBBF3002556 | 0 | 0 | 0 | 0 | 0 | 59.793 | 0 |
| FCBBF3002592 | 0 | 0 | 0 | 0 | 0 | 100 | 0 |
| FCBBF3002658 | 0 | 0 | 0 | 0 | 0 | 100 | 0 |
| FCBBF3002782 | 0 | 0 | 0 | 0 | 0 | 100 | 0 |
| FCBBF3002818 | 0 | 0 | 0 | 0 | 0 | 64.881 | 0 |
| FCBBF3002925 | 0 | 0 | 0 | 0 | 0 | 100 | 0 |
| FCBBF3003216 | 0 | 0 | 0 | 0 | 0 | 100 | 0 |
| FCBBF3003305 | 0 | 0 | 0 | 0 | 0 | 100 | 0 |
| FCBBF3003373 | 0 | 0 | 0 | 0 | 0 | 100 | 0 |
| FCBBF3003435 | 0 | 0 | 0 | 0 | 0 | 33.081 | 0 |
| FCBBF3003475 | 0 | 0 | 0 | 0 | 0 | 100 | 0 |
| FCBBF3003481 | 0 | 0 | 0 | 0 | 0 | 100 | 0 |
| FCBBF3003557 | 0 | 0 | 0 | 0 | 0 | 64.881 | 0 |
| FCBBF3003787 | 0 | 0 | 0 | 0 | 0 | 18.081 | 0 |
| FCBBF3003800 | 0 | 0 | 0 | 2.321 | 0 | 10.916 | 4.910 |
| FCBBF3003902 | 0 | 0 | 0 | 0 | 0 | 43.392 | 0 |
| FCBBF3004021 | 0 | 0 | 0 | 0 | 0 | 19.729 | 0 |
| FCBBF3004041 | 0 | 0 | 0 | 0 | 0 | 6.894 | 0 |
| FCBBF3004261 | 0 | 0 | 0 | 0 | 0 | 33.424 | 0 |
| FCBBF3004323 | 0 | 0 | 0 | 0 | 0 | 20.357 | 41.204 |
| FCBBF3004390 | 0 | 0 | 0 | 0 | 0 | 100 | 0 |
| FCBBF3004409 | 0 | 0 | 0 | 0 | 0 | 59.793 | 0 |
| FCBBF3004473 | 0 | 0 | 0 | 6.771 | 0 | 2.123 | 2.864 |
| FCBBF3004502 | 0 | 0 | 0 | 0 | 0 | 100 | 0 |
| FCBBF3004715 | 0 | 0 | 0 | 0 | 0 | 6.918 | 0 |
| FCBBF3004842 | 0 | 0 | 0 | 0 | 0 | 100 | 0 |
| FCBBF3004847 | 0 | 0 | 0 | 0 | 0 | 60.769 | 0 |
| FCBBF3004955 | 0 | 0 | 0 | 0 | 0 | 28.476 | 19.212 |
| FCBBF3005160 | 0 | 0 | 0 | 0 | 0 | 100 | 0 |
| FCBBF3005218 | 0 | 0 | 0 | 0 | 0 | 100 | 0 |
| FCBBF3005320 | 0 | 0 | 0 | 0 | 0 | 15.119 | 13.601 |
| FCBBF3005330 | 0 | 0 | 0 | 0 | 0 | 6.399 | 1.727 |
| FCBBF3005444 | 0 | 0 | 0 | 0 | 0 | 100 | 0 |
| FCBBF3005497 | 0 | 0 | 0 | 4.633 | 0 | 5.809 | 0 |
| FCBBF3005698 | 0 | 0 | 0 | 0 | 0 | 100 | 0 |
| FCBBF3005729 | 0 | 0 | 0 | 0 | 0 | 100 | 0 |
| FCBBF3006171 | 0 | 0 | 0 | 0 | 0 | 100 | 0 |
| FCBBF3006249 | 0 | 0 | 0 | 0 | 0 | 100 | 0 |
| FCBBF3006288 | 0 | 0 | 0 | 0 | 0 | 100 | 0 |
| FCBBF3006399 | 0 | 0 | 0 | 0 | 0 | 100 | 0 |
| FCBBF3006628 | 0 | 0 | 0 | 0 | 0 | 100 | 0 |
| FCBBF3006821 | 0 | 0 | 0 | 0 | 0 | 10.561 | 0 |
| FCBBF3007077 | 0 | 0 | 0 | 0 | 0 | 100 | 0 |
| FCBBF3007150 | 0 | 0 | 0 | 0 | 0 | 100 | 0 |
| FCBBF3007152 | 0 | 0 | 0 | 0 | 0 | 100 | 0 |
| FCBBF3007242 | 0 | 0 | 0 | 0 | 0 | 100 | 0 |
| FCBBF3007244 | 0 | 0 | 0 | 0 | 0 | 28.681 | 0 |
| FCBBF3007248 | 0 | 0 | 0 | 0 | 0 | 100 | 0 |
| FCBBF3007453 | 0 | 0 | 0 | 0 | 0 | 100 | 0 |
| FCBBF3007462 | 0 | 0 | 0 | 0 | 0 | 64.423 | 0 |
| FCBBF3007540 | 0 | 0 | 0 | 0 | 0 | 100 | 0 |
| FCBBF3007597 | 0 | 0 | 0 | 0 | 0 | 46.137 | 0 |
| FCBBF3007604 | 0 | 0 | 0 | 0 | 0 | 100 | 0 |
| FCBBF3007631 | 0 | 0 | 0 | 0 | 0 | 40.360 | 0 |
| FCBBF3007829 | 0 | 0 | 0 | 0 | 0 | 20.784 | 0 |
| FCBBF3007855 | 0 | 0 | 0 | 0 | 0 | 100 | 0 |
| FCBBF3007859 | 0 | 0 | 0 | 0 | 0 | 12.001 | 0 |
| FCBBF3007860 | 0 | 0 | 0 | 0 | 0 | 18.693 | 0 |
| FCBBF3008073 | 0 | 0 | 0 | 0 | 0 | 100 | 0 |
| FCBBF3008100 | 0 | 0 | 0 | 0 | 0 | 27.561 | 0 |
| FCBBF3008153 | 0 | 0 | 0 | 0 | 0 | 20.215 | 13.639 |
| FCBBF3008159 | 0 | 0 | 0 | 0 | 0 | 38.259 | 0 |
| FCBBF3008251 | 0 | 0 | 0 | 0 | 0 | 100 | 0 |
| FCBBF3008311 | 0 | 0 | 0 | 0 | 0 | 100 | 0 |
| FCBBF3008362 | 0 | 0 | 0 | 0 | 0 | 100 | 0 |
| FCBBF3008382 | 0 | 0 | 0 | 0 | 0 | 19.899 | 26.851 |
| FCBBF3008475 | 0 | 0 | 0 | 0 | 0 | 100 | 0 |
| FCBBF3008556 | 0 | 0 | 0 | 0 | 0 | 73.865 | 0 |
| FCBBF3008644 | 0 | 0 | 0 | 0 | 0 | 15.918 | 0 |
| FCBBF3008689 | 0 | 0 | 0 | 0 | 0 | 34.487 | 0 |
| FCBBF3008748 | 0 | 0 | 0 | 0 | 0 | 100 | 0 |
| FCBBF3008870 | 0 | 0 | 0 | 0 | 0 | 100 | 0 |
| FCBBF3008938 | 0 | 0 | 0 | 0 | 0 | 51.503 | 0 |
| FCBBF3008944 | 0 | 0 | 0 | 0 | 0 | 100 | 0 |
| FCBBF3009069 | 0 | 0 | 0 | 0 | 0 | 8.273 | 0 |
| FCBBF3009101 | 0 | 0 | 0 | 0 | 0 | 64.881 | 0 |
| FCBBF3009152 | 0 | 0 | 0 | 0 | 0 | 35.139 | 0 |
| FCBBF3009256 | 0 | 0 | 0 | 0 | 0 | 68.901 | 0 |
| FCBBF3009317 | 0 | 0 | 0 | 0 | 0 | 100 | 0 |
| FCBBF3009428 | 0 | 0 | 0 | 0 | 0 | 100 | 0 |
| FCBBF3009464 | 0 | 0 | 0 | 0 | 0 | 100 | 0 |
| FCBBF3009479 | 0 | 0 | 0 | 0 | 0 | 18.275 | 0 |
| FCBBF3009526 | 0 | 0 | 0 | 0 | 0 | 21.826 | 29.451 |
| FCBBF3009541 | 0 | 0 | 0 | 0 | 11.296 | 2.285 | 0 |
| FCBBF3009703 | 0 | 0 | 0 | 0 | 0 | 59.793 | 0 |
| FCBBF3009717 | 0 | 0 | 0 | 0 | 0 | 100 | 0 |
| FCBBF3009888 | 0 | 0 | 0 | 0 | 0 | 100 | 0 |
| FCBBF3009949 | 0 | 0 | 0 | 0 | 0 | 100 | 0 |
| FCBBF3009978 | 0 | 0 | 0 | 0 | 0 | 34.275 | 0 |
| FCBBF3010008 | 0 | 0 | 0 | 0 | 0 | 100 | 0 |
| FCBBF3010012 | 0 | 0 | 0 | 0 | 0 | 29.716 | 11.456 |
| FCBBF3010124 | 0 | 0 | 0 | 0 | 0 | 100 | 0 |
| FCBBF3010130 | 0 | 0 | 0 | 0 | 0 | 100 | 0 |
| FCBBF3010142 | 0 | 0 | 0 | 0 | 0 | 26.664 | 0 |
| FCBBF3010149 | 0 | 0 | 0 | 0 | 0 | 100 | 0 |
| FCBBF3010211 | 0 | 0 | 0 | 0 | 0 | 100 | 0 |
| FCBBF3010361 | 0 | 0 | 0 | 0 | 0 | 100 | 0 |
| FCBBF3010508 | 0 | 0 | 0 | 0 | 0 | 20.837 | 0 |
| FCBBF3010544 | 0 | 0 | 0 | 0 | 0 | 100 | 0 |
| FCBBF3010586 | 0 | 0 | 0 | 0 | 0 | 100 | 0 |
| FCBBF3010601 | 0 | 0 | 0 | 0 | 0 | 100 | 0 |
| FCBBF3010665 | 0 | 0 | 0 | 0 | 0 | 48.599 | 0 |
| FCBBF3010695 | 0 | 0 | 0 | 0 | 67.953 | 4.581 | 0 |
| FCBBF3010729 | 0 | 0 | 0 | 0 | 0 | 100 | 0 |
| FCBBF3010733 | 0 | 0 | 0 | 0 | 0 | 100 | 0 |
| FCBBF3011003 | 0 | 0 | 0 | 0 | 0 | 100 | 0 |
| FCBBF3011418 | 0 | 0 | 0 | 0 | 0 | 100 | 0 |
| FCBBF3011485 | 0 | 0 | 0 | 0 | 0 | 37.055 | 0 |
| FCBBF3011523 | 0 | 0 | 0 | 0 | 0 | 33.293 | 0 |
| FCBBF3011570 | 0 | 0 | 0 | 0 | 0 | 100 | 0 |
| FCBBF3011592 | 0 | 0 | 0 | 0 | 0 | 100 | 0 |
| FCBBF3011867 | 0 | 0 | 0 | 0 | 0 | 100 | 0 |
| FCBBF3011889 | 0 | 0 | 0 | 0 | 0 | 100 | 0 |
| FCBBF3012170 | 0 | 0 | 0 | 0 | 0 | 100 | 0 |
| FCBBF3012182 | 0 | 0 | 0 | 0 | 0 | 0.487 | 0 |
| FCBBF3012288 | 0 | 0 | 0 | 0 | 0 | 73.865 | 0 |
| FCBBF3012332 | 0 | 0 | 0 | 0 | 0 | 78.700 | 0 |
| FCBBF3012347 | 0 | 0 | 0 | 0 | 0 | 4.055 | 0 |
| FCBBF3012443 | 0 | 0 | 0 | 0 | 0 | 50.412 | 0 |
| FCBBF3012588 | 0 | 0 | 0 | 0 | 0 | 100 | 0 |
| FCBBF3012667 | 0 | 0 | 0 | 0 | 0 | 45.089 | 0 |
| FCBBF3012842 | 0 | 0 | 0 | 0 | 0 | 100 | 0 |
| FCBBF3012901 | 0 | 0 | 0 | 0 | 0 | 100 | 0 |
| FCBBF3013041 | 0 | 0 | 0 | 0 | 0 | 100 | 0 |
| FCBBF3013058 | 0 | 0 | 0 | 0 | 0 | 100 | 0 |
| FCBBF3013205 | 0 | 0 | 0 | 0 | 0 | 100 | 0 |
| FCBBF3013266 | 0 | 0 | 0 | 0 | 0 | 39.056 | 0 |
| FCBBF3013307 | 0 | 0 | 0 | 0 | 0 | 100 | 0 |
| FCBBF3013341 | 0 | 0 | 0 | 0 | 0 | 100 | 0 |
| FCBBF3013506 | 0 | 0 | 0 | 0 | 0 | 43.873 | 0 |
| FCBBF3013589 | 0 | 0 | 0 | 0 | 0 | 15.328 | 0 |
| FCBBF3013623 | 0 | 0 | 0 | 0 | 0 | 100 | 0 |
| FCBBF3013800 | 0 | 0 | 0 | 0 | 0 | 64.423 | 0 |
| FCBBF3013846 | 0 | 0 | 0 | 0 | 0 | 100 | 0 |
| FCBBF3014229 | 0 | 0 | 0 | 0 | 0 | 100 | 0 |
| FCBBF3014260 | 0 | 0 | 0 | 0 | 0 | 8.343 | 11.257 |
| FCBBF3014355 | 0 | 0 | 0 | 0 | 0 | 100 | 0 |
| FCBBF3014567 | 0 | 0 | 0 | 0 | 0 | 100 | 0 |
| FCBBF3014770 | 0 | 0 | 0 | 0 | 0 | 17.629 | 0 |
| FCBBF3015100 | 0 | 0 | 0 | 0 | 0 | 9.218 | 0 |
| FCBBF3015119 | 0 | 0 | 0 | 0 | 0 | 100 | 0 |
| FCBBF3015131 | 0 | 0 | 0 | 0 | 0 | 100 | 0 |
| FCBBF3015317 | 0 | 0 | 0 | 0 | 0 | 100 | 0 |
| FCBBF3015727 | 0 | 0 | 0 | 0 | 0 | 73.865 | 0 |
| FCBBF3015758 | 0 | 0 | 0 | 0 | 0 | 100 | 0 |
| FCBBF3015809 | 0 | 0 | 0 | 0 | 0 | 100 | 0 |
| FCBBF3015870 | 0 | 0 | 0 | 0 | 0 | 100 | 0 |
| FCBBF3016018 | 0 | 0 | 0 | 0 | 0 | 100 | 0 |
| FCBBF3016134 | 0 | 0 | 0 | 0 | 0 | 19.231 | 0 |
| FCBBF3016178 | 0 | 0 | 0 | 0 | 0 | 100 | 0 |
| FCBBF3016451 | 0 | 0 | 0 | 0 | 0 | 43.392 | 0 |
| FCBBF3016618 | 0 | 0 | 0 | 0 | 0 | 100 | 0 |
| FCBBF3016622 | 0 | 0 | 0 | 0 | 0 | 64.881 | 0 |
| FCBBF3016644 | 0 | 0 | 0 | 0 | 0 | 100 | 0 |
| FCBBF3016667 | 0 | 0 | 0 | 0 | 0 | 23.650 | 0 |
| FCBBF3016928 | 0 | 0 | 0 | 0 | 0 | 3.238 | 0 |
| FCBBF3016987 | 0 | 0 | 0 | 0 | 0 | 100 | 0 |
| FCBBF3017024 | 0 | 0 | 0 | 0 | 0 | 9.469 | 0 |
| FCBBF3017059 | 0 | 0 | 0 | 0 | 0 | 100 | 0 |
| FCBBF3017071 | 0 | 0 | 0 | 0 | 0 | 100 | 0 |
| FCBBF3017123 | 0 | 0 | 0 | 0 | 0 | 100 | 0 |
| FCBBF3017233 | 0 | 0 | 0 | 0 | 0 | 100 | 0 |
| FCBBF3017255 | 0 | 0 | 0 | 0 | 0 | 64.423 | 0 |
| FCBBF3017288 | 0 | 0 | 0 | 0 | 0 | 59.793 | 0 |
| FCBBF3017396 | 0 | 0 | 0 | 0 | 0 | 3.772 | 0 |
| FCBBF3017531 | 0 | 0 | 0 | 0 | 0 | 2.962 | 0 |
| FCBBF3017535 | 0 | 0 | 0 | 0 | 0 | 100 | 0 |
| FCBBF3017681 | 0 | 0 | 0 | 0 | 0 | 100 | 0 |
| FCBBF3017729 | 0 | 0 | 0 | 0 | 0 | 100 | 0 |
| FCBBF3017873 | 0 | 0 | 0 | 0 | 0 | 100 | 0 |
| FCBBF3017918 | 0 | 0 | 0 | 0 | 0 | 12.096 | 0 |
| FCBBF3017974 | 0 | 0 | 0 | 0 | 0 | 100 | 0 |
| FCBBF3018067 | 0 | 0 | 0 | 0 | 0 | 33.878 | 0 |
| FCBBF3018173 | 0 | 0 | 0 | 0 | 0 | 64.423 | 0 |
| FCBBF3018453 | 0 | 0 | 0 | 0 | 0 | 25.602 | 23.031 |
| FCBBF3018591 | 0 | 0 | 0 | 0 | 0 | 100 | 0 |
| FCBBF3018753 | 0 | 0 | 0 | 0 | 0 | 42.565 | 57.435 |
| FCBBF3018796 | 0 | 0 | 0 | 0 | 0 | 5.735 | 0 |
| FCBBF3018826 | 0 | 0 | 0 | 0 | 0 | 18.022 | 48.637 |
| FCBBF3018949 | 0 | 0 | 0 | 0 | 0 | 52.288 | 0 |
| FCBBF3019085 | 0 | 0 | 0 | 0 | 0 | 100 | 0 |
| FCBBF3019320 | 0 | 0 | 0 | 0 | 0 | 36.520 | 0 |
| FCBBF3019437 | 0 | 0 | 0 | 0 | 0 | 59.793 | 0 |
| FCBBF3019455 | 0 | 0 | 0 | 0 | 0 | 15.046 | 0 |
| FCBBF3019564 | 0 | 0 | 0 | 0 | 0 | 100 | 0 |
| FCBBF3019569 | 0 | 0 | 0 | 0 | 0 | 72.245 | 0 |
| FCBBF3019570 | 0 | 0 | 0 | 0 | 0 | 100 | 0 |
| FCBBF3019663 | 0 | 0 | 0 | 0 | 0 | 100 | 0 |
| FCBBF3019714 | 0 | 0 | 0 | 0 | 56.127 | 3.784 | 0 |
| FCBBF3019716 | 0 | 0 | 0 | 0 | 0 | 100 | 0 |
| FCBBF3019784 | 0 | 0 | 0 | 0 | 0 | 50.412 | 0 |
| FCBBF3019839 | 0 | 0 | 0 | 0 | 0 | 6.919 | 0 |
| FCBBF3019867 | 0 | 0 | 0 | 0 | 0 | 100 | 0 |
| FCBBF3019961 | 0 | 0 | 0 | 0 | 0 | 100 | 0 |
| FCBBF3020030 | 0 | 0 | 0 | 0 | 0 | 100 | 0 |
| FCBBF3020138 | 0 | 0 | 0 | 0 | 0 | 100 | 0 |
| FCBBF3020140 | 0 | 0 | 0 | 0 | 0 | 52.557 | 0 |
| FCBBF3020163 | 0 | 0 | 0 | 0 | 0 | 100 | 0 |
| FCBBF3020232 | 0 | 0 | 0 | 0 | 0 | 100 | 0 |
| FCBBF3020599 | 0 | 0 | 0 | 0 | 0 | 51.503 | 0 |
| FCBBF3021026 | 0 | 0 | 0 | 0 | 0 | 44.606 | 0 |
| FCBBF3021191 | 0 | 0 | 0 | 0 | 0 | 34.251 | 0 |
| FCBBF3021221 | 0 | 0 | 0 | 0 | 0 | 100 | 0 |
| FCBBF3021501 | 0 | 0 | 0 | 0 | 0 | 100 | 0 |
| FCBBF3021506 | 0 | 0 | 0 | 0 | 0 | 100 | 0 |
| FCBBF3021524 | 0 | 0 | 0 | 0 | 0 | 100 | 0 |
| FCBBF3021807 | 0 | 0 | 0 | 0 | 0 | 8.010 | 0 |
| FCBBF3021940 | 0 | 0 | 0 | 0 | 0 | 46.137 | 0 |
| FCBBF3021985 | 0 | 0 | 0 | 0 | 0 | 100 | 0 |
| FCBBF3022005 | 0 | 0 | 0 | 0 | 0 | 100 | 0 |
| FCBBF3022291 | 0 | 0 | 0 | 0 | 0 | 72.245 | 0 |
| FCBBF3022311 | 0 | 0 | 0 | 0 | 0 | 83.886 | 0 |
| FCBBF3022504 | 0 | 0 | 0 | 0 | 0 | 28.792 | 38.851 |
| FCBBF3022566 | 0 | 0 | 0 | 0 | 0 | 64.881 | 0 |
| FCBBF3022593 | 0 | 0 | 0 | 0 | 0 | 12.800 | 0 |
| FCBBF3022765 | 0 | 0 | 0 | 0 | 0 | 64.708 | 0 |
| FCBBF3022767 | 0 | 0 | 0 | 0 | 0 | 37.623 | 0 |
| FCBBF3022894 | 0 | 0 | 0 | 0 | 0 | 8.149 | 0 |
| FCBBF3023061 | 0 | 0 | 0 | 0 | 0 | 100 | 0 |
| FCBBF3023078 | 0 | 0 | 0 | 0 | 0 | 7.910 | 0 |
| FCBBF3023368 | 0 | 0 | 33.084 | 0 | 0 | 4.533 | 0 |
| FCBBF3023372 | 0 | 0 | 0 | 0 | 0 | 100 | 0 |
| FCBBF3023443 | 0 | 0 | 0 | 0 | 0 | 100 | 0 |
| FCBBF3023599 | 0 | 0 | 0 | 0 | 0 | 100 | 0 |
| FCBBF3023667 | 0 | 0 | 0 | 1.565 | 0 | 0.491 | 1.324 |
| FCBBF3023704 | 0 | 0 | 0 | 0 | 0 | 100 | 0 |
| FCBBF3023887 | 0 | 0 | 0 | 0 | 0 | 17.508 | 23.625 |
| FCBBF3023895 | 0 | 0 | 0 | 0 | 0 | 100 | 0 |
| FCBBF3024002 | 0 | 0 | 0 | 0 | 0 | 10.485 | 0 |
| FCBBF3024096 | 0 | 0 | 0 | 0 | 0 | 100 | 0 |
| FCBBF3024225 | 0 | 0 | 0 | 0 | 0 | 100 | 0 |
| FCBBF3024266 | 0 | 0 | 0 | 0 | 0 | 36.142 | 24.384 |
| FCBBF3024364 | 0 | 0 | 0 | 0 | 0 | 100 | 0 |
| FCBBF3024623 | 0 | 0 | 0 | 0 | 0 | 41.402 | 13.966 |
| FCBBF3024793 | 0 | 0 | 0 | 0 | 0 | 29.517 | 0 |
| FCBBF3024911 | 0 | 0 | 0 | 0 | 0 | 100 | 0 |
| FCBBF3025098 | 0 | 0 | 0 | 0 | 0 | 100 | 0 |
| FCBBF3025252 | 0 | 0 | 0 | 0 | 0 | 100 | 0 |
| FCBBF3025280 | 0 | 0 | 0 | 0 | 0 | 100 | 0 |
| FCBBF3025285 | 0 | 0 | 0 | 0 | 0 | 44.606 | 0 |
| FCBBF3025417 | 0 | 0 | 0 | 0 | 0 | 31.716 | 0 |
| FCBBF3025528 | 56.366 | 0 | 0 | 0 | 0 | 8.919 | 12.035 |
| FCBBF3025568 | 0 | 0 | 0 | 0 | 0 | 30.383 | 0 |
| FCBBF3025650 | 0 | 0 | 0 | 0 | 0 | 46.458 | 0 |
| FCBBF3025674 | 0 | 0 | 0 | 0 | 0 | 100 | 0 |
| FCBBF3025730 | 0 | 0 | 0 | 0 | 0 | 36.577 | 0 |
| FCBBF3025737 | 0 | 0 | 0 | 19.153 | 0 | 18.013 | 16.204 |
| FCBBF3025905 | 0 | 0 | 0 | 0 | 0 | 29.552 | 0 |
| FCBBF3026021 | 0 | 0 | 0 | 0 | 0 | 100 | 0 |
| FCBBF3026048 | 0 | 0 | 0 | 0 | 0 | 59.793 | 0 |
| FCBBF3026251 | 0 | 0 | 0 | 0 | 0 | 100 | 0 |
| FCBBF3026308 | 0 | 0 | 0 | 0 | 0 | 23.612 | 0 |
| FCBBF3026651 | 0 | 0 | 0 | 0 | 0 | 13.481 | 0 |
| FCBBF3026678 | 0 | 0 | 0 | 0 | 0 | 100 | 0 |
| FCBBF3026692 | 0 | 0 | 0 | 0 | 0 | 29.977 | 0 |
| FCBBF3027104 | 0 | 0 | 0 | 0 | 0 | 100 | 0 |
| FCBBF3027199 | 0 | 0 | 0 | 0 | 0 | 100 | 0 |
| FCBBF3027328 | 0 | 0 | 0 | 0 | 0 | 100 | 0 |
| FCBBF3027559 | 0 | 0 | 0 | 0 | 0 | 64.881 | 0 |
| FCBBF3027717 | 0 | 0 | 0 | 0 | 0 | 100 | 0 |
| FCBBF3027755 | 0 | 0 | 0 | 0 | 0 | 100 | 0 |
| FCBBF3027768 | 0 | 0 | 0 | 0 | 0 | 100 | 0 |
| FCBBF3027854 | 0 | 0 | 0 | 0 | 0 | 14.460 | 0 |
| FCBBF3027863 | 0 | 0 | 0 | 0 | 0 | 100 | 0 |
| FCBBF3027903 | 0 | 0 | 0 | 0 | 0 | 100 | 0 |
| FCBBF3028102 | 0 | 0 | 0 | 0 | 0 | 100 | 0 |
| FCBBF3028143 | 0 | 0 | 0 | 0 | 0 | 100 | 0 |
| FCBBF3028188 | 0 | 0 | 0 | 0 | 0 | 100 | 0 |
| FCBBF3028202 | 0 | 0 | 0 | 0 | 0 | 42.451 | 0 |
| FCBBF3028244 | 0 | 0 | 12.519 | 0 | 0 | 8.576 | 4.629 |
| FCBBF3028472 | 0 | 0 | 0 | 0 | 0 | 100 | 0 |
| FCBBF3028528 | 0 | 0 | 0 | 0 | 0 | 100 | 0 |
| FCBBF3028582 | 0 | 0 | 0 | 0 | 0 | 100 | 0 |
| FCBBF3028593 | 0 | 0 | 0 | 0 | 0 | 37.296 | 10.065 |
| FCBBF3028671 | 0 | 0 | 0 | 0 | 0 | 100 | 0 |
| FCBBF3028794 | 0 | 0 | 0 | 0 | 0 | 100 | 0 |
| FCBBF4000017 | 0 | 0 | 0 | 0 | 0 | 16.409 | 0 |
| FCBBF4000061 | 0 | 0 | 0 | 0 | 0 | 100 | 0 |
| FCBBF4000076 | 0 | 0 | 0 | 0 | 0 | 100 | 0 |
| FCBBF4000142 | 0 | 0 | 0 | 0 | 0 | 13.508 | 18.228 |
| FCBBF4000173 | 0 | 0 | 0 | 0 | 0 | 100 | 0 |
| FCBBF4000192 | 0 | 0 | 0 | 0 | 0 | 100 | 0 |
| FCBBF4000193 | 0 | 0 | 0 | 0 | 0 | 59.793 | 0 |
| FCBBF4000268 | 0 | 0 | 0 | 0 | 0 | 64.423 | 0 |
| FCBBF4000282 | 0 | 0 | 0 | 0 | 0 | 100 | 0 |
| FCBBF4000399 | 0 | 0 | 0 | 0 | 0 | 100 | 0 |
| FCBBF4000415 | 0 | 0 | 0 | 0 | 0 | 100 | 0 |
| FCBBF4000446 | 0 | 0 | 0 | 0 | 0 | 5.551 | 1.872 |
| FCBBF4000500 | 0 | 0 | 0 | 0 | 0 | 16.192 | 0 |
| FCBBF4000529 | 0 | 0 | 0 | 0 | 0 | 100 | 0 |
| FCBBF4000548 | 0 | 0 | 0 | 0 | 0 | 27.002 | 0 |
| FCBBF5000041 | 0 | 0 | 0 | 0 | 0 | 100 | 0 |
| FCBBF5000061 | 0 | 0 | 0 | 0 | 0 | 38.701 | 0 |
| FCBBF5000165 | 0 | 0 | 0 | 0 | 0 | 18.244 | 0 |
| FCBBF5000261 | 0 | 0 | 0 | 0 | 0 | 9.592 | 25.887 |
| FCBBF5000325 | 0 | 0 | 0 | 0 | 0 | 18.677 | 0 |
| FCBBF5000353 | 0 | 0 | 0 | 0 | 0 | 64.708 | 0 |
| FCBBF5000384 | 0 | 0 | 0 | 0 | 0 | 100 | 0 |
| FCBBF5000483 | 0 | 0 | 0 | 0 | 0 | 100 | 0 |
| FCBBF5000495 | 0 | 0 | 0 | 0 | 0 | 100 | 0 |
| FEBRA1000005 | 0 | 0 | 0 | 0 | 0 | 0 | 100 |
| FEBRA1000008 | 0 | 0 | 0 | 0 | 0 | 0 | 57.838 |
| FEBRA1000022 | 0 | 0 | 0 | 0 | 0 | 0 | 13.120 |
| FEBRA1000030 | 0 | 0 | 0 | 0 | 0 | 0 | 40.753 |
| FEBRA1000057 | 0 | 0 | 0 | 0 | 0 | 6.414 | 4.328 |
| FEBRA1000088 | 0 | 0 | 0 | 0 | 0 | 0 | 21.277 |
| FEBRA1000138 | 0 | 0 | 0 | 0 | 0 | 0 | 100 |
| FEBRA1000148 | 0 | 0 | 0 | 0 | 0 | 0 | 100 |
| FEBRA1000149 | 0 | 0 | 0 | 0 | 0 | 0 | 100 |
| FEBRA1000183 | 0 | 0 | 0 | 0 | 0 | 0 | 100 |
| FEBRA1000188 | 0 | 0 | 0 | 0 | 0 | 38.663 | 15.651 |
| FEBRA1000189 | 0 | 0 | 0 | 0 | 0 | 0 | 50.538 |
| FEBRA1000190 | 0 | 0 | 0 | 0 | 0 | 0 | 19.812 |
| FEBRA2000007 | 0 | 0 | 0 | 0 | 0 | 0 | 59.033 |
| FEBRA2000021 | 0 | 0 | 0 | 0 | 0 | 0 | 100 |
| FEBRA2000035 | 0 | 0 | 0 | 0 | 0 | 0 | 100 |
| FEBRA2000053 | 0 | 0 | 0 | 0 | 0 | 13.028 | 35.160 |
| FEBRA2000105 | 0 | 0 | 0 | 0 | 0 | 0 | 1.788 |
| FEBRA2000126 | 0 | 0 | 0 | 0 | 0 | 0 | 100 |
| FEBRA2000129 | 0 | 0 | 0 | 0 | 0 | 0 | 6.480 |
| FEBRA2000210 | 0 | 0 | 0 | 0 | 0 | 1.306 | 3.524 |
| FEBRA2000220 | 0 | 0 | 0 | 0 | 0 | 0 | 100 |
| FEBRA2000228 | 0 | 0 | 0 | 0 | 0 | 7.297 | 39.387 |
| FEBRA2000253 | 0 | 0 | 0 | 0 | 0 | 0 | 36.491 |
| FEBRA2000282 | 0 | 0 | 0 | 0 | 0 | 0 | 79.225 |
| FEBRA2000286 | 0 | 0 | 0 | 0 | 0 | 0 | 100 |
| FEBRA2000297 | 0 | 0 | 0 | 0 | 0 | 14.651 | 19.769 |
| FEBRA2000311 | 0 | 0 | 0 | 0 | 0 | 0 | 24.958 |
| FEBRA2000321 | 0 | 0 | 0 | 0 | 0 | 0 | 100 |
| FEBRA2000333 | 0 | 0 | 0 | 0 | 0 | 0 | 69.211 |
| FEBRA2000377 | 0 | 0 | 0 | 0 | 0 | 18.481 | 24.938 |
| FEBRA2000378 | 0 | 0 | 0 | 0 | 0 | 0 | 100 |
| FEBRA2000391 | 0 | 0 | 0 | 0 | 0 | 0 | 100 |
| FEBRA2000394 | 0 | 0 | 0 | 0 | 0 | 0 | 100 |
| FEBRA2000397 | 0 | 0 | 0 | 0 | 0 | 0 | 28.982 |
| FEBRA2000399 | 0 | 0 | 0 | 0 | 0 | 0 | 100 |
| FEBRA2000402 | 0 | 0 | 0 | 0 | 0 | 10.239 | 13.817 |
| FEBRA2000404 | 0 | 0 | 0 | 0 | 0 | 0 | 25.082 |
| FEBRA2000409 | 0 | 0 | 0 | 0 | 0 | 0 | 100 |
| FEBRA2000415 | 0 | 0 | 0 | 0 | 0 | 0 | 100 |
| FEBRA2000436 | 0 | 0 | 0 | 0 | 0 | 0 | 100 |
| FEBRA2000438 | 0 | 0 | 0 | 0 | 0 | 0 | 22.025 |
| FEBRA2000452 | 0 | 0 | 0 | 0 | 0 | 12.970 | 7.501 |
| FEBRA2000454 | 0 | 0 | 0 | 0 | 0 | 0 | 74.935 |
| FEBRA2000462 | 0 | 0 | 0 | 0 | 0 | 5.215 | 7.037 |
| FEBRA2000468 | 0 | 0 | 0 | 0 | 0 | 0 | 100 |
| FEBRA2000491 | 0 | 0 | 0 | 0 | 0 | 0 | 100 |
| FEBRA2000504 | 0 | 0 | 0 | 0 | 0 | 0 | 100 |
| FEBRA2000510 | 0 | 0 | 0 | 0 | 0 | 6.817 | 9.198 |
| FEBRA2000532 | 0 | 0 | 0 | 0 | 0 | 0 | 7.972 |
| FEBRA2000536 | 0 | 0 | 0 | 0 | 0 | 5.819 | 15.704 |
| FEBRA2000538 | 0 | 0 | 0 | 0 | 0 | 0 | 40.112 |
| FEBRA2000575 | 0 | 0 | 0 | 0 | 0 | 0 | 100 |
| FEBRA2000581 | 0 | 0 | 0 | 0 | 0 | 11.757 | 3.966 |
| FEBRA2000656 | 0 | 0 | 0 | 0 | 0 | 0 | 100 |
| FEBRA2000659 | 0 | 0 | 0 | 0 | 0 | 0 | 100 |
| FEBRA2000680 | 0 | 0 | 0 | 0 | 0 | 0 | 23.429 |
| FEBRA2000690 | 0 | 0 | 0 | 0 | 0 | 0 | 100 |
| FEBRA2000727 | 0 | 0 | 0 | 0 | 0 | 0 | 100 |
| FEBRA2000733 | 0 | 0 | 0 | 0 | 4.618 | 0 | 0.840 |
| FEBRA2000734 | 0 | 0 | 0 | 0 | 0 | 0 | 100 |
| FEBRA2000740 | 0 | 0 | 0 | 0 | 0 | 2.089 | 2.819 |
| FEBRA2000757 | 0 | 0 | 0 | 0 | 0 | 16.972 | 7.634 |
| FEBRA2000762 | 0 | 0 | 0 | 0 | 0 | 0 | 15.507 |
| FEBRA2000771 | 0 | 0 | 0 | 0 | 0 | 0 | 54.082 |
| FEBRA2000772 | 0 | 0 | 0 | 0 | 0 | 0 | 21.324 |
| FEBRA2000782 | 0 | 0 | 0 | 0 | 0 | 0 | 63.717 |
| FEBRA2000787 | 0 | 0 | 0 | 0 | 0 | 3.649 | 4.924 |
| FEBRA2000790 | 0 | 0 | 0 | 0 | 0 | 0 | 100 |
| FEBRA2000793 | 0 | 0 | 0 | 0 | 0 | 7.085 | 57.358 |
| FEBRA2000803 | 0 | 0 | 0 | 0 | 0 | 0 | 100 |
| FEBRA2000805 | 0 | 0 | 0 | 0 | 0 | 0 | 100 |
| FEBRA2000809 | 0 | 0 | 0 | 0 | 0 | 0 | 100 |
| FEBRA2000815 | 0 | 0 | 0 | 0 | 0 | 20.036 | 27.036 |
| FEBRA2000856 | 0 | 0 | 0 | 0 | 0 | 0 | 39.568 |
| FEBRA2000862 | 0 | 0 | 0 | 0 | 0 | 0 | 100 |
| FEBRA2000877 | 0 | 0 | 0 | 0 | 0 | 0 | 35.466 |
| FEBRA2000880 | 0 | 0 | 0 | 0 | 0 | 0 | 26.417 |
| FEBRA2000881 | 0 | 0 | 0 | 0 | 0 | 0 | 7.891 |
| FEBRA2000901 | 0 | 0 | 0 | 0 | 0 | 0 | 25.894 |
| FEBRA2000909 | 0 | 0 | 0 | 0 | 0 | 0 | 100 |
| FEBRA2000917 | 0 | 0 | 0 | 0 | 0 | 0 | 100 |
| FEBRA2000928 | 0 | 0 | 0 | 0 | 0 | 0 | 100 |
| FEBRA2000936 | 0 | 0 | 0 | 0 | 0 | 0 | 100 |
| FEBRA2000937 | 0 | 0 | 0 | 0 | 0 | 0 | 100 |
| FEBRA2000959 | 0 | 0 | 0 | 0 | 0 | 0 | 100 |
| FEBRA2000972 | 0 | 0 | 0 | 0 | 0 | 0 | 37.761 |
| FEBRA2001004 | 0 | 0 | 0 | 0 | 0 | 0 | 55.143 |
| FEBRA2001012 | 0 | 0 | 0 | 0 | 0 | 0 | 100 |
| FEBRA2001020 | 0 | 0 | 0 | 0 | 0 | 0 | 100 |
| FEBRA2001093 | 0 | 0 | 0 | 0 | 0 | 0 | 100 |
| FEBRA2001124 | 0 | 0 | 0 | 0 | 0 | 0 | 100 |
| FEBRA2001133 | 0 | 0 | 0 | 0 | 0 | 0 | 79.225 |
| FEBRA2001146 | 0 | 0 | 0 | 0 | 0 | 0 | 27.877 |
| FEBRA2001161 | 0 | 0 | 0 | 0 | 0 | 0 | 100 |
| FEBRA2001175 | 0 | 0 | 0 | 0 | 0 | 0 | 100 |
| FEBRA2001197 | 0 | 0 | 0 | 0 | 0 | 0 | 35.141 |
| FEBRA2001217 | 0 | 0 | 0 | 0 | 0 | 0 | 100 |
| FEBRA2001227 | 0 | 0 | 0 | 0 | 0 | 13.661 | 27.650 |
| FEBRA2001245 | 0 | 0 | 0 | 0 | 0 | 9.320 | 6.288 |
| FEBRA2001267 | 0 | 0 | 0 | 0 | 0 | 0 | 100 |
| FEBRA2001294 | 28.213 | 0 | 0 | 14.242 | 0 | 0 | 6.024 |
| FEBRA2001334 | 0 | 0 | 0 | 0 | 0 | 10.624 | 14.336 |
| FEBRA2001351 | 0 | 0 | 0 | 0 | 0 | 0 | 100 |
| FEBRA2001383 | 0 | 0 | 0 | 0 | 0 | 19.272 | 26.005 |
| FEBRA2001438 | 0 | 0 | 0 | 0 | 0 | 0 | 100 |
| FEBRA2001440 | 0 | 0 | 0 | 0 | 0 | 0 | 58.031 |
| FEBRA2001487 | 0 | 0 | 0 | 0 | 0 | 0 | 100 |
| FEBRA2001492 | 0 | 0 | 0 | 0 | 0 | 5.979 | 8.068 |
| FEBRA2001523 | 0 | 0 | 0 | 0 | 0 | 0 | 21.196 |
| FEBRA2001561 | 0 | 0 | 0 | 0 | 0 | 0 | 100 |
| FEBRA2001571 | 0 | 0 | 0 | 0 | 0 | 3.874 | 20.911 |
| FEBRA2001581 | 0 | 0 | 0 | 0 | 0 | 7.575 | 20.443 |
| FEBRA2001584 | 0 | 0 | 0 | 0 | 0 | 0 | 100 |
| FEBRA2001590 | 0 | 0 | 0 | 0 | 0 | 0 | 100 |
| FEBRA2001591 | 0 | 0 | 0 | 0 | 0 | 37.743 | 50.929 |
| FEBRA2001610 | 0 | 0 | 0 | 0 | 0 | 0 | 100 |
| FEBRA2001620 | 0 | 0 | 0 | 0 | 0 | 0 | 100 |
| FEBRA2001659 | 0 | 0 | 0 | 0 | 0 | 0 | 100 |
| FEBRA2001669 | 0 | 0 | 0 | 0 | 0 | 5.937 | 13.353 |
| FEBRA2001698 | 0 | 0 | 0 | 0 | 0 | 0 | 30.346 |
| FEBRA2001705 | 0 | 0 | 0 | 0 | 0 | 0 | 100 |
| FEBRA2001706 | 0 | 0 | 0 | 0 | 0 | 0 | 71.370 |
| FEBRA2001715 | 0 | 0 | 0 | 0 | 0 | 1.842 | 2.486 |
| FEBRA2001745 | 0 | 0 | 0 | 0 | 0 | 6.946 | 6.248 |
| FEBRA2001752 | 0 | 0 | 0 | 0 | 0 | 0 | 78.526 |
| FEBRA2001772 | 0 | 0 | 0 | 0 | 0 | 0 | 100 |
| FEBRA2001790 | 0 | 0 | 0 | 0 | 0 | 0 | 100 |
| FEBRA2001814 | 0 | 0 | 0 | 0 | 0 | 2.444 | 16.490 |
| FEBRA2001828 | 0 | 0 | 0 | 0 | 0 | 0 | 27.125 |
| FEBRA2001867 | 0 | 0 | 0 | 0 | 0 | 13.694 | 18.478 |
| FEBRA2001914 | 0 | 0 | 0 | 0 | 0 | 0 | 100 |
| FEBRA2001974 | 0 | 0 | 0 | 0 | 0 | 0 | 29.046 |
| FEBRA2001989 | 0 | 0 | 0 | 0 | 0 | 0 | 74.935 |
| FEBRA2001990 | 0 | 0 | 0 | 0 | 0 | 0 | 9.046 |
| FEBRA2002009 | 0 | 0 | 0 | 0 | 0 | 0 | 100 |
| FEBRA2002027 | 0 | 0 | 0 | 0 | 0 | 0 | 44.210 |
| FEBRA2002086 | 0 | 0 | 0 | 0 | 0 | 0 | 100 |
| FEBRA2002109 | 0 | 0 | 0 | 0 | 0 | 0 | 100 |
| FEBRA2002191 | 68.584 | 0 | 0 | 0 | 0 | 10.853 | 14.644 |
| FEBRA2002260 | 0 | 0 | 0 | 0 | 0 | 0 | 100 |
| FEBRA2002352 | 0 | 0 | 0 | 0 | 0 | 0 | 17.307 |
| FEBRA2002399 | 0 | 0 | 0 | 0 | 0 | 0 | 100 |
| FEBRA2002410 | 0 | 0 | 0 | 0 | 0 | 0 | 66.741 |
| FEBRA2002429 | 0 | 0 | 0 | 0 | 0 | 0 | 9.761 |
| FEBRA2002442 | 0 | 0 | 0 | 0 | 0 | 0 | 52.075 |
| FEBRA2002456 | 0 | 0 | 0 | 0 | 0 | 18.135 | 8.157 |
| FEBRA2002508 | 0 | 0 | 0 | 0 | 0 | 0 | 100 |
| FEBRA2002525 | 0 | 0 | 0 | 0 | 0 | 0 | 66.741 |
| FEBRA2002527 | 0 | 0 | 0 | 0 | 0 | 0 | 7.139 |
| FEBRA2002552 | 0 | 0 | 0 | 0 | 0 | 0 | 100 |
| FEBRA2002574 | 0 | 0 | 0 | 0 | 0 | 0 | 74.935 |
| FEBRA2002601 | 0 | 0 | 0 | 0 | 0 | 0 | 26.611 |
| FEBRA2002611 | 0 | 0 | 0 | 0 | 0 | 0 | 54.171 |
| FEBRA2002628 | 0 | 0 | 0 | 0 | 0 | 0 | 100 |
| FEBRA2002662 | 0 | 0 | 0 | 0 | 0 | 0 | 100 |
| FEBRA2002682 | 0 | 0 | 0 | 0 | 0 | 0 | 66.741 |
| FEBRA2002707 | 0 | 0 | 0 | 0 | 0 | 6.657 | 8.982 |
| FEBRA2002727 | 0 | 0 | 0 | 0 | 0 | 0 | 100 |
| FEBRA2002781 | 0 | 0 | 0 | 0 | 0 | 0 | 17.057 |
| FEBRA2002783 | 0 | 0 | 0 | 0 | 0 | 0 | 100 |
| FEBRA2002792 | 0 | 0 | 0 | 0 | 0 | 0 | 6.673 |
| FEBRA2002818 | 0 | 0 | 0 | 0 | 0 | 0 | 100 |
| FEBRA2002858 | 0 | 0 | 0 | 0 | 0 | 0 | 100 |
| FEBRA2002882 | 0 | 0 | 0 | 0 | 0 | 0 | 100 |
| FEBRA2002897 | 0 | 0 | 0 | 0 | 0 | 0 | 100 |
| FEBRA2002908 | 0 | 0 | 0 | 0 | 0 | 0 | 100 |
| FEBRA2002931 | 0 | 0 | 0 | 0 | 0 | 0 | 5.456 |
| FEBRA2002933 | 0 | 0 | 0 | 0 | 0 | 0.684 | 0.923 |
| FEBRA2002962 | 0 | 0 | 0 | 0 | 0 | 0 | 100 |
| FEBRA2002986 | 0 | 0 | 0 | 0 | 0 | 0 | 100 |
| FEBRA2003054 | 0 | 0 | 0 | 0 | 0 | 0 | 100 |
| FEBRA2003100 | 0 | 0 | 0 | 0 | 0 | 4.867 | 6.567 |
| FEBRA2003115 | 0 | 0 | 0 | 0 | 0 | 0 | 54.040 |
| FEBRA2003128 | 0 | 0 | 0 | 0 | 0 | 0 | 14.503 |
| FEBRA2003155 | 0 | 0 | 0 | 0 | 0 | 0 | 100 |
| FEBRA2003163 | 0 | 0 | 0 | 0 | 0 | 0 | 100 |
| FEBRA2003181 | 0 | 0 | 0 | 0 | 0 | 0 | 74.935 |
| FEBRA2003198 | 0 | 0 | 0 | 0 | 0 | 0 | 66.741 |
| FEBRA2003253 | 0 | 0 | 0 | 0 | 0 | 0 | 100 |
| FEBRA2003258 | 0 | 0 | 0 | 0 | 0 | 5.227 | 21.158 |
| FEBRA2003275 | 0 | 0 | 0 | 0 | 0 | 0 | 100 |
| FEBRA2003308 | 0 | 0 | 0 | 0 | 0 | 0 | 100 |
| FEBRA2003327 | 0 | 0 | 0 | 0 | 0 | 0 | 100 |
| FEBRA2003429 | 0 | 0 | 0 | 0 | 0 | 0 | 100 |
| FEBRA2003436 | 0 | 0 | 0 | 0 | 0 | 10.270 | 13.858 |
| FEBRA2003454 | 0 | 0 | 0 | 0 | 0 | 0 | 100 |
| FEBRA2003468 | 0 | 0 | 0 | 0 | 0 | 0 | 100 |
| FEBRA2003470 | 0 | 0 | 0 | 0 | 0 | 0 | 36.383 |
| FEBRA2003520 | 0 | 0 | 0 | 0 | 0 | 0 | 100 |
| FEBRA2003524 | 0 | 0 | 0 | 0 | 0 | 0 | 25.471 |
| FEBRA2003541 | 0 | 0 | 0 | 0 | 0 | 0 | 26.627 |
| FEBRA2003675 | 0 | 0 | 0 | 0 | 0 | 0 | 100 |
| FEBRA2003707 | 0 | 0 | 0 | 0 | 0 | 0 | 52.075 |
| FEBRA2003711 | 0 | 0 | 0 | 0 | 0 | 0 | 100 |
| FEBRA2003726 | 0 | 0 | 0 | 0 | 0 | 0 | 2.482 |
| FEBRA2003750 | 0 | 0 | 0 | 0 | 0 | 0 | 9.102 |
| FEBRA2003822 | 0 | 0 | 0 | 0 | 0 | 0 | 13.711 |
| FEBRA2003833 | 0 | 0 | 0 | 0 | 0 | 0 | 8.621 |
| FEBRA2003897 | 0 | 0 | 0 | 0 | 0 | 0 | 100 |
| FEBRA2003907 | 0 | 0 | 0 | 0 | 0 | 0 | 77.838 |
| FEBRA2003926 | 0 | 0 | 0 | 0 | 0 | 0 | 1.740 |
| FEBRA2003930 | 0 | 0 | 0 | 0 | 0 | 3.320 | 13.441 |
| FEBRA2004023 | 0 | 0 | 0 | 0 | 0 | 0 | 79.225 |
| FEBRA2004026 | 0 | 0 | 0 | 0 | 0 | 0 | 100 |
| FEBRA2004029 | 0 | 0 | 0 | 0 | 0 | 0 | 100 |
| FEBRA2004042 | 0 | 0 | 0 | 0 | 0 | 7.838 | 5.288 |
| FEBRA2004053 | 0 | 0 | 0 | 0 | 0 | 0 | 100 |
| FEBRA2004056 | 0 | 0 | 0 | 0 | 0 | 0 | 100 |
| FEBRA2004091 | 0 | 0 | 0 | 0 | 0 | 0 | 26.345 |
| FEBRA2004110 | 0 | 0 | 0 | 0 | 0 | 0 | 66.741 |
| FEBRA2004191 | 0 | 0 | 0 | 0 | 0 | 0 | 49.437 |
| FEBRA2004202 | 0 | 0 | 0 | 0 | 0 | 0 | 100 |
| FEBRA2004219 | 0 | 0 | 0 | 0 | 0 | 0 | 70.959 |
| FEBRA2004224 | 0 | 0 | 0 | 0 | 0 | 0 | 2.886 |
| FEBRA2004237 | 0 | 0 | 0 | 0 | 0 | 0 | 46.754 |
| FEBRA2004268 | 0 | 0 | 0 | 0 | 0 | 0 | 87.538 |
| FEBRA2004293 | 0 | 0 | 0 | 0 | 0 | 4.911 | 13.254 |
| FEBRA2004325 | 0 | 0 | 0 | 0 | 0 | 6.507 | 8.780 |
| FEBRA2004329 | 0 | 0 | 0 | 0 | 0 | 0 | 100 |
| FEBRA2004331 | 0 | 0 | 0 | 0 | 0 | 0 | 74.935 |
| FEBRA2004412 | 0 | 0 | 0 | 0 | 0 | 27.120 | 14.638 |
| FEBRA2004443 | 0 | 0 | 0 | 0 | 0 | 0 | 100 |
| FEBRA2004485 | 0 | 0 | 0 | 0 | 0 | 0 | 17.301 |
| FEBRA2004490 | 0 | 0 | 0 | 0 | 0 | 0 | 70.274 |
| FEBRA2004538 | 0 | 0 | 0 | 0 | 0 | 0 | 100 |
| FEBRA2004592 | 0 | 0 | 0 | 0 | 0 | 0 | 40.112 |
| FEBRA2004620 | 0 | 0 | 0 | 0 | 0 | 0 | 24.429 |
| FEBRA2004628 | 0 | 0 | 0 | 0 | 0 | 0 | 7.111 |
| FEBRA2004651 | 0 | 0 | 0 | 0 | 0 | 0 | 100 |
| FEBRA2004767 | 0 | 0 | 0 | 0 | 0 | 0 | 63.717 |
| FEBRA2004813 | 0 | 0 | 0 | 0 | 0 | 0 | 100 |
| FEBRA2004818 | 0 | 0 | 0 | 0 | 0 | 2.516 | 3.395 |
| FEBRA2004840 | 0 | 0 | 0 | 0 | 0 | 0 | 100 |
| FEBRA2004852 | 0 | 0 | 0 | 0 | 0 | 0 | 67.639 |
| FEBRA2004867 | 0 | 0 | 0 | 0 | 0 | 0 | 100 |
| FEBRA2004914 | 0 | 0 | 0 | 0 | 0 | 0 | 100 |
| FEBRA2004933 | 0 | 0 | 0 | 0 | 0 | 0 | 100 |
| FEBRA2004987 | 0 | 0 | 0 | 0 | 0 | 0 | 100 |
| FEBRA2005014 | 0 | 0 | 0 | 0 | 0 | 0 | 100 |
| FEBRA2005036 | 0 | 0 | 0 | 0 | 0 | 0 | 100 |
| FEBRA2005079 | 0 | 0 | 0 | 0 | 0 | 0 | 83.188 |
| FEBRA2005114 | 0 | 0 | 0 | 0 | 0 | 12.397 | 16.727 |
| FEBRA2005216 | 0 | 0 | 0 | 0 | 0 | 0 | 100 |
| FEBRA2005291 | 0 | 0 | 0 | 0 | 0 | 0 | 9.040 |
| FEBRA2005361 | 0 | 0 | 0 | 0 | 0 | 5.176 | 17.460 |
| FEBRA2005377 | 0 | 0 | 0 | 0 | 0 | 0 | 100 |
| FEBRA2005380 | 0 | 0 | 0 | 0 | 0 | 0 | 100 |
| FEBRA2005416 | 0 | 0 | 0 | 0 | 29.427 | 0 | 2.677 |
| FEBRA2005427 | 0 | 0 | 0 | 0 | 0 | 0 | 71.370 |
| FEBRA2005458 | 0 | 0 | 0 | 0 | 0 | 0 | 100 |
| FEBRA2005476 | 0 | 0 | 0 | 0 | 0 | 0 | 12.986 |
| FEBRA2005572 | 0 | 0 | 0 | 0 | 0 | 3.292 | 4.442 |
| FEBRA2005701 | 0 | 0 | 0 | 0 | 0 | 0 | 100 |
| FEBRA2005726 | 0 | 0 | 0 | 0 | 0 | 0 | 100 |
| FEBRA2005734 | 0 | 0 | 0 | 0 | 23.137 | 0 | 2.105 |
| FEBRA2005752 | 0 | 0 | 0 | 0 | 0 | 0 | 10.376 |
| FEBRA2005778 | 0 | 0 | 0 | 0 | 0 | 11.083 | 14.955 |
| FEBRA2005787 | 0 | 0 | 0 | 0 | 0 | 0 | 74.935 |
| FEBRA2005788 | 0 | 0 | 0 | 0 | 0 | 18.236 | 12.303 |
| FEBRA2005824 | 0 | 0 | 0 | 0 | 0 | 1.378 | 0.930 |
| FEBRA2005995 | 0 | 0 | 0 | 0 | 0 | 12.949 | 10.484 |
| FEBRA2005998 | 0 | 0 | 0 | 0 | 0 | 0 | 100 |
| FEBRA2006055 | 0 | 0 | 0 | 0 | 0 | 0 | 13.169 |
| FEBRA2006061 | 0 | 0 | 0 | 0 | 0 | 0 | 100 |
| FEBRA2006092 | 0 | 0 | 0 | 3.664 | 0 | 4.595 | 3.100 |
| FEBRA2006112 | 0 | 0 | 0 | 0 | 0 | 0 | 16.454 |
| FEBRA2006150 | 0 | 0 | 0 | 0 | 0 | 0 | 100 |
| FEBRA2006165 | 0 | 0 | 0 | 0 | 0 | 0 | 100 |
| FEBRA2006255 | 0 | 0 | 0 | 0 | 0 | 14.444 | 12.993 |
| FEBRA2006270 | 0 | 0 | 15.763 | 13.779 | 0 | 0 | 2.914 |
| FEBRA2006315 | 0 | 0 | 0 | 0 | 0 | 0 | 100 |
| FEBRA2006346 | 0 | 0 | 0 | 0 | 0 | 0 | 37.034 |
| FEBRA2006354 | 0 | 0 | 0 | 0 | 0 | 0 | 100 |
| FEBRA2006357 | 0 | 0 | 0 | 0 | 0 | 2.447 | 1.651 |
| FEBRA2006368 | 0 | 0 | 0 | 0 | 0 | 11.481 | 15.492 |
| FEBRA2006370 | 0 | 0 | 0 | 0 | 0 | 0 | 35.615 |
| FEBRA2006372 | 0 | 0 | 0 | 0 | 0 | 0 | 13.392 |
| FEBRA2006379 | 0 | 0 | 0 | 0 | 0 | 0 | 100 |
| FEBRA2006396 | 0 | 0 | 0 | 0 | 0 | 29.698 | 20.037 |
| FEBRA2006401 | 0 | 0 | 0 | 0 | 0 | 1.391 | 1.251 |
| FEBRA2006409 | 0 | 0 | 0 | 0 | 0 | 0 | 100 |
| FEBRA2006418 | 0 | 0 | 0 | 0 | 0 | 0 | 100 |
| FEBRA2006427 | 0 | 0 | 0 | 0 | 0 | 0 | 100 |
| FEBRA2006476 | 0 | 0 | 0 | 0 | 0 | 0 | 100 |
| FEBRA2006485 | 0 | 0 | 0 | 0 | 0 | 5.620 | 7.583 |
| FEBRA2006491 | 0 | 0 | 0 | 0 | 0 | 0 | 37.019 |
| FEBRA2006519 | 0 | 0 | 0 | 0 | 0 | 0 | 29.644 |
| FEBRA2006521 | 0 | 0 | 0 | 0 | 0 | 28.259 | 19.066 |
| FEBRA2006553 | 0 | 0 | 0 | 0 | 0 | 21.927 | 9.862 |
| FEBRA2006627 | 0 | 0 | 0 | 0 | 0 | 38.121 | 25.719 |
| FEBRA2006664 | 0 | 0 | 0 | 0 | 0 | 0 | 79.225 |
| FEBRA2006667 | 0 | 0 | 0 | 0 | 0 | 0 | 100 |
| FEBRA2006726 | 0 | 0 | 0 | 0 | 0 | 0 | 100 |
| FEBRA2006736 | 0 | 0 | 0 | 0 | 0 | 0 | 37.034 |
| FEBRA2006793 | 0 | 0 | 0 | 0 | 0 | 0 | 100 |
| FEBRA2006808 | 0 | 0 | 0 | 0 | 0 | 7.584 | 40.932 |
| FEBRA2006817 | 0 | 0 | 0 | 0 | 0 | 0 | 40.876 |
| FEBRA2006873 | 0 | 0 | 0 | 0 | 0 | 0 | 11.194 |
| FEBRA2006890 | 0 | 0 | 0 | 0 | 0 | 0 | 55.485 |
| FEBRA2006942 | 0 | 0 | 0 | 0 | 0 | 0 | 100 |
| FEBRA2006977 | 0 | 0 | 0 | 0 | 0 | 0 | 100 |
| FEBRA2007017 | 0 | 0 | 0 | 0 | 0 | 0 | 40.825 |
| FEBRA2007176 | 0 | 0 | 0 | 0 | 0 | 0 | 71.370 |
| FEBRA2007200 | 0 | 0 | 0 | 0 | 0 | 0 | 79.225 |
| FEBRA2007212 | 0 | 0 | 0 | 0 | 0 | 0 | 9.786 |
| FEBRA2007247 | 0 | 0 | 0 | 70.274 | 0 | 0 | 29.726 |
| FEBRA2007280 | 0 | 0 | 0 | 0 | 0 | 0 | 100 |
| FEBRA2007414 | 0 | 0 | 0 | 0 | 0 | 0 | 100 |
| FEBRA2007436 | 0 | 0 | 0 | 0 | 0 | 0 | 100 |
| FEBRA2007449 | 0 | 0 | 0 | 0 | 0 | 0 | 100 |
| FEBRA2007458 | 0 | 0 | 0 | 0 | 0 | 15.061 | 20.323 |
| FEBRA2007534 | 0 | 0 | 0 | 0 | 0 | 0 | 44.990 |
| FEBRA2007544 | 0 | 0 | 0 | 0 | 0 | 4.523 | 12.206 |
| FEBRA2007551 | 0 | 0 | 0 | 0 | 0 | 0 | 69.211 |
| FEBRA2007566 | 0 | 0 | 0 | 0 | 0 | 0 | 100 |
| FEBRA2007589 | 0 | 0 | 0 | 0 | 0 | 0 | 17.044 |
| FEBRA2007613 | 0 | 0 | 0 | 0 | 0 | 12.261 | 8.272 |
| FEBRA2007620 | 0 | 0 | 0 | 0 | 0 | 0 | 79.225 |
| FEBRA2007622 | 0 | 0 | 0 | 0 | 28.270 | 3.812 | 2.572 |
| FEBRA2007708 | 0 | 0 | 0 | 0 | 0 | 0 | 21.306 |
| FEBRA2007714 | 0 | 0 | 0 | 0 | 0 | 15.415 | 20.800 |
| FEBRA2007793 | 0 | 0 | 0 | 0 | 0 | 0 | 50.083 |
| FEBRA2007801 | 0 | 0 | 0 | 0 | 0 | 4.561 | 6.154 |
| FEBRA2007818 | 0 | 0 | 0 | 0 | 0 | 0 | 13.940 |
| FEBRA2007823 | 0 | 0 | 0 | 0 | 0 | 0 | 71.370 |
| FEBRA2007880 | 0 | 0 | 0 | 0 | 0 | 0 | 18.765 |
| FEBRA2007900 | 0 | 0 | 0 | 0 | 0 | 0 | 19.322 |
| FEBRA2007901 | 0 | 0 | 49.976 | 0 | 0 | 0 | 9.239 |
| FEBRA2007931 | 0 | 0 | 0 | 0 | 0 | 0 | 100 |
| FEBRA2007957 | 0 | 0 | 0 | 0 | 0 | 0 | 45.384 |
| FEBRA2008009 | 0 | 0 | 0 | 0 | 0 | 0 | 100 |
| FEBRA2008036 | 0 | 0 | 0 | 0 | 0 | 2.639 | 24.924 |
| FEBRA2008081 | 0 | 0 | 0 | 0 | 0 | 1.308 | 3.531 |
| FEBRA2008086 | 0 | 0 | 0 | 0 | 0 | 0 | 69.211 |
| FEBRA2008087 | 2.093 | 0 | 0 | 0 | 0 | 0 | 1.341 |
| FEBRA2008134 | 0 | 0 | 0 | 0 | 0 | 0 | 71.215 |
| FEBRA2008135 | 0 | 0 | 0 | 0 | 0 | 0 | 100 |
| FEBRA2008159 | 0 | 0 | 0 | 0 | 0 | 0 | 77.838 |
| FEBRA2008165 | 0 | 0 | 0 | 0 | 0 | 0 | 100 |
| FEBRA2008172 | 0 | 0 | 0 | 0 | 0 | 0 | 100 |
| FEBRA2008201 | 0 | 0 | 0 | 0 | 0 | 0 | 5.978 |
| FEBRA2008210 | 0 | 0 | 0 | 0 | 0 | 0 | 16.720 |
| FEBRA2008255 | 0 | 0 | 0 | 0 | 0 | 0 | 12.615 |
| FEBRA2008265 | 0 | 0 | 0 | 0 | 0 | 0 | 40.825 |
| FEBRA2008266 | 0 | 0 | 0 | 0 | 0 | 0 | 22.652 |
| FEBRA2008282 | 0 | 0 | 0 | 0 | 0 | 0 | 100 |
| FEBRA2008287 | 0 | 0 | 0 | 0 | 0 | 0 | 7.348 |
| FEBRA2008302 | 12.424 | 0 | 0 | 0 | 0 | 0 | 5.306 |
| FEBRA2008311 | 0 | 0 | 0 | 0 | 0 | 0 | 100 |
| FEBRA2008341 | 0 | 0 | 0 | 0 | 0 | 0 | 16.375 |
| FEBRA2008360 | 0 | 0 | 0 | 0 | 0 | 37.775 | 25.486 |
| FEBRA2008459 | 0 | 0 | 0 | 0 | 0 | 0 | 71.215 |
| FEBRA2008468 | 0 | 0 | 0 | 0 | 0 | 0 | 100 |
| FEBRA2008475 | 0 | 0 | 0 | 0 | 0 | 0 | 42.067 |
| FEBRA2008481 | 0 | 0 | 0 | 0 | 0 | 0 | 100 |
| FEBRA2008542 | 0 | 0 | 0 | 0 | 0 | 0 | 100 |
| FEBRA2008583 | 0 | 0 | 0 | 0.779 | 0 | 5.128 | 5.931 |
| FEBRA2008660 | 0 | 0 | 0 | 0 | 0 | 0 | 100 |
| FEBRA2008662 | 0 | 0 | 0 | 0 | 0 | 5.865 | 11.870 |
| FEBRA2008681 | 0 | 0 | 0 | 0 | 0 | 0 | 100 |
| FEBRA2008692 | 0 | 0 | 0 | 0 | 0 | 0 | 6.116 |
| FEBRA2008741 | 0 | 0 | 0 | 0 | 0 | 0 | 100 |
| FEBRA2008755 | 0 | 0 | 0 | 0 | 0 | 0 | 4.095 |
| FEBRA2008836 | 0 | 0 | 0 | 0 | 0 | 0 | 79.225 |
| FEBRA2008859 | 0 | 0 | 0 | 0 | 0 | 0 | 77.838 |
| FEBRA2008861 | 0 | 0 | 0 | 0 | 0 | 10.794 | 14.565 |
| FEBRA2008866 | 0 | 0 | 0 | 0 | 0 | 0 | 100 |
| FEBRA2008881 | 0 | 0 | 0 | 0 | 0 | 0 | 100 |
| FEBRA2008928 | 0 | 0 | 0 | 0 | 0 | 0 | 77.838 |
| FEBRA2008983 | 0 | 0 | 0 | 0 | 0 | 0 | 100 |
| FEBRA2009016 | 0 | 0 | 0 | 0 | 0 | 0 | 100 |
| FEBRA2009022 | 0 | 0 | 0 | 0 | 0 | 0 | 8.325 |
| FEBRA2009029 | 0 | 0 | 0 | 0 | 0 | 0 | 100 |
| FEBRA2009074 | 0 | 0 | 0 | 0 | 0 | 0 | 100 |
| FEBRA2009117 | 0 | 0 | 0 | 0 | 0 | 0 | 100 |
| FEBRA2009120 | 0 | 0 | 0 | 0 | 0 | 0 | 100 |
| FEBRA2009162 | 0 | 0 | 0 | 0 | 0 | 0 | 100 |
| FEBRA2009185 | 0 | 0 | 0 | 0 | 0 | 0 | 11.324 |
| FEBRA2009240 | 0 | 0 | 0 | 0 | 0 | 0 | 100 |
| FEBRA2009265 | 0 | 0 | 0 | 0 | 0 | 0 | 100 |
| FEBRA2009276 | 0 | 0 | 0 | 0 | 0 | 0 | 58.346 |
| FEBRA2009289 | 0 | 0 | 0 | 0 | 0 | 0 | 34.980 |
| FEBRA2009327 | 0 | 0 | 0 | 0 | 0 | 0 | 100 |
| FEBRA2009328 | 0 | 0 | 0 | 0 | 0 | 0 | 12.353 |
| FEBRA2009352 | 0 | 0 | 0 | 0 | 0 | 0 | 70.959 |
| FEBRA2009362 | 0 | 0 | 0 | 0 | 0 | 0 | 37.960 |
| FEBRA2009385 | 0 | 0 | 0 | 0 | 0 | 0 | 100 |
| FEBRA2009416 | 0 | 0 | 0 | 0 | 0 | 0 | 100 |
| FEBRA2009419 | 0 | 0 | 0 | 0 | 0 | 4.882 | 3.294 |
| FEBRA2009437 | 0 | 0 | 0 | 0 | 0 | 0 | 9.084 |
| FEBRA2009478 | 0 | 0 | 0 | 0 | 0 | 0 | 100 |
| FEBRA2009507 | 0 | 0 | 0 | 0 | 0 | 0 | 100 |
| FEBRA2009514 | 0 | 0 | 0 | 0 | 0 | 12.239 | 24.772 |
| FEBRA2009541 | 0 | 0 | 0 | 0 | 0 | 0 | 41.464 |
| FEBRA2009567 | 0 | 0 | 0 | 0 | 0 | 0 | 100 |
| FEBRA2009588 | 0 | 0 | 0 | 0 | 0 | 8.952 | 24.158 |
| FEBRA2009731 | 0 | 0 | 0 | 0 | 0 | 0 | 100 |
| FEBRA2009754 | 0 | 0 | 0 | 0 | 0 | 0 | 100 |
| FEBRA2009780 | 0 | 0 | 0 | 0 | 0 | 0 | 68.997 |
| FEBRA2009846 | 0 | 0 | 0 | 0 | 0 | 0 | 51.462 |
| FEBRA2009986 | 0 | 0 | 0 | 0 | 0 | 11.874 | 16.023 |
| FEBRA2010141 | 0 | 0 | 0 | 0 | 0 | 0 | 100 |
| FEBRA2010299 | 0 | 0 | 0 | 0 | 0 | 0 | 100 |
| FEBRA2010484 | 0 | 0 | 0 | 0 | 0 | 0 | 100 |
| FEBRA2010719 | 0 | 0 | 0 | 0 | 0 | 0 | 43.257 |
| FEBRA2010746 | 0 | 0 | 0 | 0 | 0 | 0 | 21.386 |
| FEBRA2010768 | 0 | 0 | 0 | 0 | 0 | 0 | 40.876 |
| FEBRA2010802 | 0 | 0 | 0 | 0 | 0 | 0 | 100 |
| FEBRA2011063 | 0 | 0 | 0 | 0 | 0 | 0 | 100 |
| FEBRA2011090 | 0 | 0 | 0 | 0 | 0 | 0 | 43.266 |
| FEBRA2011356 | 0 | 0 | 0 | 0 | 0 | 0 | 100 |
| FEBRA2011392 | 0 | 0 | 0 | 0 | 0 | 0 | 67.639 |
| FEBRA2011414 | 0 | 0 | 0 | 0 | 0 | 0 | 100 |
| FEBRA2011593 | 0 | 0 | 0 | 0 | 0 | 0 | 100 |
| FEBRA2011665 | 0 | 0 | 0 | 0 | 0 | 0 | 100 |
| FEBRA2012090 | 0 | 0 | 0 | 0 | 0 | 0 | 100 |
| FEBRA2012120 | 0 | 0 | 0 | 0 | 0 | 0 | 40.243 |
| FEBRA2012181 | 0 | 0 | 0 | 0 | 0 | 0 | 41.159 |
| FEBRA2012195 | 0 | 0 | 0 | 0 | 0 | 0 | 100 |
| FEBRA2012397 | 0 | 0 | 0 | 0 | 0 | 0 | 58.346 |
| FEBRA2012418 | 0 | 0 | 0 | 0 | 0 | 0 | 100 |
| FEBRA2012507 | 0 | 0 | 0 | 0 | 0 | 0 | 18.603 |
| FEBRA2012625 | 0 | 0 | 0 | 0 | 0 | 0 | 100 |
| FEBRA2013019 | 0 | 0 | 0 | 0 | 0 | 42.565 | 57.435 |
| FEBRA2013069 | 0 | 0 | 0 | 0 | 0 | 0 | 100 |
| FEBRA2013274 | 0 | 0 | 0 | 0 | 0 | 0 | 100 |
| FEBRA2013465 | 0 | 0 | 0 | 0 | 0 | 0 | 100 |
| FEBRA2013570 | 0 | 0 | 0 | 0 | 0 | 0 | 27.839 |
| FEBRA2013699 | 0 | 0 | 0 | 0 | 0 | 0 | 17.841 |
| FEBRA2013905 | 0 | 0 | 0 | 0 | 0 | 0 | 100 |
| FEBRA2013951 | 0 | 0 | 0 | 0 | 0 | 0 | 40.876 |
| FEBRA2014010 | 0 | 0 | 0 | 0 | 0 | 0 | 40.243 |
| FEBRA2014122 | 0 | 0 | 0 | 0 | 0 | 0 | 66.741 |
| FEBRA2014198 | 0 | 0 | 0 | 0 | 0 | 0 | 100 |
| FEBRA2014213 | 0 | 0 | 0 | 0 | 0 | 0 | 9.817 |
| FEBRA2014297 | 0 | 0 | 0 | 0 | 0 | 0 | 5.328 |
| FEBRA2014417 | 0 | 0 | 0 | 0 | 0 | 0 | 4.038 |
| FEBRA2014443 | 0 | 0 | 0 | 0 | 0 | 0 | 100 |
| FEBRA2014578 | 0 | 0 | 0 | 0 | 0 | 0 | 54.561 |
| FEBRA2014939 | 0 | 0 | 0 | 0 | 0 | 15.432 | 20.824 |
| FEBRA2015076 | 0 | 0 | 0 | 0 | 0 | 0 | 100 |
| FEBRA2015085 | 0 | 0 | 0 | 0 | 0 | 25.351 | 7.602 |
| FEBRA2015175 | 0 | 0 | 0 | 0 | 0 | 0 | 100 |
| FEBRA2015292 | 0 | 0 | 0 | 0 | 0 | 0 | 100 |
| FEBRA2015588 | 0 | 0 | 0 | 0 | 0 | 0 | 100 |
| FEBRA2016112 | 0 | 0 | 0 | 0 | 0 | 0 | 100 |
| FEBRA2016398 | 0 | 0 | 0 | 0 | 0 | 0 | 43.076 |
| FEBRA2016572 | 0 | 0 | 0 | 0 | 0 | 0 | 48.982 |
| FEBRA2016583 | 0 | 0 | 0 | 0 | 0 | 0 | 70.959 |
| FEBRA2016621 | 0 | 0 | 0 | 0 | 0 | 0 | 100 |
| FEBRA2016654 | 0 | 0 | 0 | 0 | 0 | 0 | 100 |
| FEBRA2016739 | 0 | 0 | 0 | 0 | 0 | 0 | 100 |
| FEBRA2017024 | 0 | 0 | 0 | 0 | 0 | 0 | 24.052 |
| FEBRA2017098 | 0 | 0 | 0 | 0 | 0 | 42.565 | 57.435 |
| FEBRA2017138 | 0 | 0 | 0 | 0 | 0 | 0 | 100 |
| FEBRA2017154 | 0 | 0 | 0 | 0 | 0 | 0 | 100 |
| FEBRA2017200 | 0 | 0 | 0 | 0 | 0 | 0 | 100 |
| FEBRA2017223 | 0 | 0 | 0 | 0 | 0 | 0 | 100 |
| FEBRA2017333 | 0 | 0 | 0 | 0 | 0 | 0 | 100 |
| FEBRA2017502 | 0 | 0 | 0 | 0 | 0 | 0 | 100 |
| FEBRA2017533 | 0 | 0 | 0 | 0 | 0 | 0 | 67.995 |
| FEBRA2017680 | 0 | 0 | 0 | 0 | 0 | 0 | 23.704 |
| FEBRA2017736 | 0 | 0 | 0 | 0 | 0 | 0 | 100 |
| FEBRA2017780 | 0 | 0 | 0 | 0 | 0 | 59.713 | 40.287 |
| FEBRA2017811 | 0 | 0 | 0 | 0 | 0 | 0 | 100 |
| FEBRA2017850 | 0 | 0 | 0 | 0 | 0 | 33.093 | 44.654 |
| FEBRA2018051 | 0 | 0 | 0 | 0 | 0 | 0 | 100 |
| FEBRA2018203 | 0 | 0 | 0 | 0 | 0 | 28.033 | 37.827 |
| FEBRA2018407 | 0 | 0 | 0 | 0 | 0 | 0 | 40.386 |
| FEBRA2018433 | 0 | 0 | 0 | 0 | 0 | 0 | 77.838 |
| FEBRA2018476 | 0 | 0 | 0 | 0 | 0 | 2.019 | 8.171 |
| FEBRA2018746 | 0 | 0 | 0 | 0 | 0 | 0 | 37.287 |
| FEBRA2019172 | 0 | 0 | 0 | 0 | 0 | 0 | 100 |
| FEBRA2019242 | 0 | 0 | 0 | 0 | 0 | 0 | 20.225 |
| FEBRA2019298 | 0 | 0 | 0 | 0 | 0 | 0 | 18.103 |
| FEBRA2019389 | 0 | 0 | 0 | 0 | 0 | 0 | 40.825 |
| FEBRA2019457 | 0 | 0 | 0 | 0 | 0 | 0 | 100 |
| FEBRA2019519 | 0 | 0 | 0 | 0 | 0 | 0 | 100 |
| FEBRA2019582 | 0 | 0 | 0 | 0 | 0 | 0 | 100 |
| FEBRA2019637 | 0 | 0 | 0 | 0 | 0 | 0 | 40.753 |
| FEBRA2019663 | 0 | 0 | 0 | 0 | 0 | 0 | 21.712 |
| FEBRA2019690 | 0 | 0 | 0 | 0 | 0 | 0 | 40.243 |
| FEBRA2019711 | 0 | 0 | 0 | 0 | 0 | 0 | 5.271 |
| FEBRA2019867 | 0 | 0 | 0 | 0 | 0 | 0 | 69.211 |
| FEBRA2020406 | 0 | 0 | 0 | 0 | 0 | 42.565 | 57.435 |
| FEBRA2020566 | 0 | 0 | 0 | 0 | 0 | 0 | 10.387 |
| FEBRA2020582 | 0 | 0 | 0 | 0 | 0 | 42.565 | 57.435 |
| FEBRA2020668 | 0 | 0 | 0 | 0 | 0 | 0 | 100 |
| FEBRA2020801 | 0 | 0 | 0 | 0 | 0 | 0 | 100 |
| FEBRA2020845 | 0 | 0 | 0 | 0 | 0 | 0 | 71.370 |
| FEBRA2020886 | 0 | 0 | 0 | 0 | 0 | 0 | 60.446 |
| FEBRA2020977 | 0 | 0 | 0 | 0 | 0 | 19.470 | 13.136 |
| FEBRA2021032 | 0 | 0 | 72.292 | 0 | 0 | 0 | 13.365 |
| FEBRA2021134 | 0 | 0 | 0 | 0 | 0 | 0 | 100 |
| FEBRA2021171 | 0 | 0 | 0 | 0 | 0 | 0 | 26.519 |
| FEBRA2021339 | 0 | 0 | 0 | 0 | 0 | 0 | 79.225 |
| FEBRA2021431 | 0 | 0 | 0 | 0 | 0 | 0 | 100 |
| FEBRA2021497 | 0 | 0 | 0 | 0 | 0 | 0 | 100 |
| FEBRA2021550 | 0 | 0 | 0 | 0 | 0 | 0 | 77.838 |
| FEBRA2021571 | 0 | 0 | 0 | 0 | 0 | 0 | 100 |
| FEBRA2021636 | 0 | 0 | 0 | 0 | 0 | 0 | 50.440 |
| FEBRA2021864 | 0 | 0 | 0 | 0 | 0 | 0 | 77.838 |
| FEBRA2021892 | 0 | 0 | 0 | 0 | 0 | 0 | 100 |
| FEBRA2021908 | 0 | 0 | 0 | 0 | 0 | 0 | 100 |
| FEBRA2021966 | 0 | 0 | 0 | 0 | 0 | 7.969 | 10.753 |
| FEBRA2022013 | 0 | 0 | 0 | 0 | 0 | 0 | 23.437 |
| FEBRA2022055 | 0 | 0 | 0 | 0 | 0 | 0 | 1.326 |
| FEBRA2022148 | 0 | 0 | 0 | 0 | 0 | 0 | 100 |
| FEBRA2022204 | 0 | 0 | 0 | 0 | 0 | 0 | 100 |
| FEBRA2022255 | 0 | 0 | 0 | 0 | 0 | 0 | 100 |
| FEBRA2022322 | 0 | 0 | 0 | 0 | 0 | 0 | 100 |
| FEBRA2022504 | 0 | 0 | 0 | 0 | 0 | 0 | 4.094 |
| FEBRA2022601 | 0 | 0 | 0 | 0 | 0 | 0 | 77.838 |
| FEBRA2022696 | 0 | 0 | 0 | 0 | 0 | 0 | 52.075 |
| FEBRA2022729 | 0 | 0 | 0 | 0 | 0 | 0 | 100 |
| FEBRA2022787 | 0 | 0 | 0 | 0 | 0 | 0 | 100 |
| FEBRA2022911 | 0 | 0 | 0 | 0 | 0 | 0 | 100 |
| FEBRA2022956 | 0 | 0 | 0 | 0 | 0 | 0 | 100 |
| FEBRA2022963 | 0 | 0 | 0 | 0 | 0 | 0 | 100 |
| FEBRA2022972 | 0 | 0 | 0 | 0 | 0 | 0 | 100 |
| FEBRA2023227 | 0 | 0 | 0 | 0 | 0 | 0 | 12.767 |
| FEBRA2023285 | 0 | 0 | 0 | 0 | 0 | 0 | 100 |
| FEBRA2023351 | 0 | 0 | 0 | 0 | 0 | 0 | 100 |
| FEBRA2023377 | 0 | 0 | 0 | 0 | 0 | 0 | 19.338 |
| FEBRA2023399 | 0 | 0 | 0 | 0 | 0 | 0 | 21.881 |
| FEBRA2023498 | 0 | 0 | 0 | 0 | 0 | 0 | 100 |
| FEBRA2023550 | 0 | 0 | 0 | 0 | 0 | 0 | 40.825 |
| FEBRA2023721 | 0 | 0 | 0 | 0 | 0 | 0 | 100 |
| FEBRA2023927 | 0 | 0 | 0 | 0 | 0 | 0 | 10.153 |
| FEBRA2023989 | 0 | 0 | 0 | 0 | 0 | 0 | 100 |
| FEBRA2023990 | 0 | 0 | 0 | 0 | 0 | 0 | 100 |
| FEBRA2024019 | 0 | 0 | 0 | 0 | 0 | 2.478 | 23.402 |
| FEBRA2024136 | 0 | 0 | 0 | 0 | 0 | 0 | 28.600 |
| FEBRA2024150 | 0 | 0 | 0 | 0 | 0 | 0 | 55.970 |
| FEBRA2024343 | 0 | 0 | 0 | 0 | 0 | 0 | 100 |
| FEBRA2024570 | 0 | 0 | 0 | 0 | 0 | 0 | 25.087 |
| FEBRA2024693 | 0 | 0 | 0 | 0 | 0 | 0 | 100 |
| FEBRA2024727 | 0 | 0 | 0 | 0 | 0 | 0 | 66.741 |
| FEBRA2024744 | 0 | 0 | 0 | 0 | 0 | 0 | 100 |
| FEBRA2024797 | 0 | 0 | 0 | 0 | 0 | 0 | 100 |
| FEBRA2024987 | 0 | 0 | 0 | 0 | 0 | 0 | 24.523 |
| FEBRA2025249 | 0 | 0 | 0 | 0 | 0 | 0 | 100 |
| FEBRA2025427 | 0 | 0 | 0 | 0 | 0 | 4.579 | 24.717 |
| FEBRA2025463 | 0 | 0 | 0 | 0 | 0 | 0 | 100 |
| FEBRA2025477 | 0 | 0 | 0 | 0 | 0 | 0 | 100 |
| FEBRA2025838 | 0 | 0 | 0 | 0 | 0 | 0 | 2.048 |
| FEBRA2026474 | 0 | 0 | 0 | 0 | 0 | 0 | 100 |
| FEBRA2026582 | 0 | 0 | 0 | 0 | 0 | 0 | 57.838 |
| FEBRA2026629 | 0 | 0 | 0 | 0 | 0 | 0 | 100 |
| FEBRA2026769 | 0 | 0 | 0 | 0 | 0 | 0 | 100 |
| FEBRA2026879 | 0 | 0 | 0 | 0 | 0 | 0 | 100 |
| FEBRA2026890 | 0 | 0 | 0 | 0 | 0 | 0 | 100 |
| FEBRA2026977 | 0 | 0 | 0 | 0 | 0 | 0 | 100 |
| FEBRA2026984 | 0 | 0 | 0 | 0 | 0 | 0 | 43.714 |
| FEBRA2027082 | 0 | 0 | 0 | 0 | 0 | 0 | 100 |
| FEBRA2027297 | 0 | 0 | 0 | 0 | 0 | 0 | 100 |
| FEBRA2027352 | 0 | 0 | 0 | 0 | 0 | 0 | 100 |
| FEBRA2027364 | 0 | 0 | 0 | 0 | 0 | 0 | 100 |
| FEBRA2027609 | 0 | 0 | 0 | 0 | 0 | 0 | 100 |
| FEBRA2028158 | 0 | 0 | 0 | 0 | 0 | 0 | 68.997 |
| FEBRA2028222 | 0 | 0 | 0 | 0 | 0 | 0 | 100 |
| FEBRA2028366 | 0 | 0 | 0 | 0 | 0 | 0 | 100 |
| FEBRA2028457 | 0 | 0 | 0 | 0 | 0 | 0 | 100 |
| FEBRA2028477 | 0 | 0 | 0 | 0 | 0 | 0 | 100 |
| FEBRA2028503 | 0 | 0 | 0 | 0 | 0 | 0 | 17.429 |
| FEBRA2028516 | 0 | 0 | 0 | 0 | 0 | 0 | 2.851 |
| FELIV1000153 | 0 | 0 | 0 | 0 | 0 | 0.305 | 0 |
| HCASM1000115 | 0 | 69.583 | 0 | 0 | 0 | 1.915 | 0 |
| HCASM2000016 | 0 | 0 | 0 | 4.398 | 0 | 1.379 | 0 |
| HCASM2000363 | 0 | 0 | 0 | 4.008 | 0 | 0 | 0 |
| HCASM2005388 | 0 | 0 | 47.694 | 0 | 0 | 0 | 0 |
| HCHON1000015 | 0 | 0 | 0 | 9.186 | 0 | 2.880 | 0 |
| HCHON1000030 | 2.118 | 0 | 0 | 0 | 4.970 | 0.670 | 1.356 |
| HCHON1000166 | 0 | 0 | 0 | 0 | 0 | 0 | 7.499 |
| HCHON2000028 | 0 | 0 | 0 | 9.350 | 0 | 0 | 0 |
| HCHON2000056 | 3.311 | 0 | 0 | 1.671 | 0 | 0 | 0.707 |
| HCHON2000160 | 0 | 0 | 0 | 5.932 | 0 | 0 | 12.547 |
| HCHON2000212 | 0 | 0 | 0 | 0 | 0 | 15.878 | 0 |
| HCHON2000244 | 0 | 0 | 0 | 7.753 | 0 | 1.215 | 4.920 |
| HCHON2000295 | 0 | 0 | 0 | 0 | 12.003 | 0 | 0 |
| HCHON2000323 | 0 | 0 | 0 | 0 | 0 | 3.422 | 0 |
| HCHON2000508 | 4.360 | 50.138 | 0 | 2.201 | 0 | 0 | 0 |
| HCHON2000676 | 0 | 0 | 0 | 17.571 | 0 | 5.508 | 0 |
| HCHON2000698 | 0 | 0 | 0 | 0 | 0 | 5.295 | 0 |
| HCHON2000738 | 0 | 0 | 0 | 0 | 0 | 5.501 | 0 |
| HCHON2000743 | 0 | 0 | 0 | 0 | 0 | 11.280 | 0 |
| HCHON2000751 | 0 | 0 | 0 | 0 | 0 | 6.596 | 0 |
| HCHON2000826 | 0 | 0 | 0 | 0 | 0 | 5.289 | 1.784 |
| HCHON2000832 | 0 | 0 | 0 | 0 | 0 | 6.536 | 8.819 |
| HCHON2000942 | 0 | 0 | 0 | 0 | 0 | 0 | 28.262 |
| HCHON2001039 | 0 | 0 | 0 | 0 | 0 | 4.123 | 2.782 |
| HCHON2001050 | 16.922 | 0 | 0 | 0 | 0 | 0 | 0 |
| HCHON2001099 | 0 | 0 | 0 | 48.221 | 0 | 0 | 0 |
| HCHON2001200 | 0 | 0 | 0 | 0 | 0 | 4.794 | 0 |
| HCHON2001217 | 0 | 0 | 0 | 6.134 | 0 | 3.846 | 2.595 |
| HCHON2001407 | 0 | 0 | 0 | 0 | 0 | 4.377 | 1.969 |
| HCHON2001434 | 0 | 0 | 0 | 0 | 0 | 5.644 | 0 |
| HCHON2001665 | 0 | 0 | 0 | 0 | 0 | 2.851 | 0 |
| HCHON2002496 | 0 | 0 | 0 | 45.775 | 0 | 0 | 0 |
| HCHON2004002 | 0 | 0 | 0 | 0 | 0 | 0 | 1.957 |
| HCHON2005166 | 0 | 0 | 0 | 0 | 0 | 22.599 | 0 |
| HCHON2006770 | 0 | 0 | 0 | 16.633 | 0 | 0 | 0 |
| HCHON2010543 | 0 | 0 | 0 | 0 | 0 | 16.573 | 0 |
| HEART1000149 | 0 | 0 | 0 | 5.534 | 0 | 1.735 | 0 |
| HEART1000173 | 0 | 0 | 0 | 0 | 0 | 4.849 | 0 |
| HEART2006521 | 0 | 0 | 0 | 0 | 0 | 8.837 | 0 |
| HEART2007231 | 0 | 0 | 0 | 0 | 0 | 8.949 | 0 |
| HHDPC1000083 | 0 | 0 | 0 | 0 | 0 | 0 | 2.440 |
| HHDPC1000114 | 0 | 0 | 0 | 0 | 0 | 0 | 1.811 |
| HHDPC1000118 | 0 | 0 | 0 | 0 | 0 | 15.487 | 5.225 |
| HHDPC1000163 | 0 | 0 | 0 | 14.822 | 0 | 4.646 | 0 |
| HHDPC2000055 | 0 | 0 | 0 | 0 | 0 | 6.756 | 4.558 |
| HHDPC2000104 | 0 | 0 | 0 | 10.903 | 0 | 0 | 0 |
| HHDPC2000149 | 0 | 0 | 0 | 0 | 0 | 8.255 | 0 |
| HHDPC2000455 | 0 | 0 | 0 | 6.477 | 0 | 0 | 0 |
| HHDPC2003439 | 0 | 0 | 0 | 7.494 | 0 | 2.819 | 1.268 |
| HHDPC2003983 | 0 | 0 | 0 | 0 | 0 | 2.572 | 0.694 |
| HHDPC2006862 | 0 | 0 | 0 | 0 | 0 | 13.827 | 0 |
| HHDPC2007267 | 0 | 0 | 0 | 0 | 0 | 0.902 | 0 |
| HHDPC2009528 | 0 | 0 | 0 | 0 | 0 | 12.007 | 0 |
| HLUNG1000055 | 0 | 0 | 0 | 3.190 | 0 | 1.000 | 1.349 |
| HLUNG1000091 | 0 | 0 | 0 | 0 | 0 | 27.339 | 0 |
| HLUNG2000063 | 0 | 0 | 0 | 0 | 0 | 0 | 6.148 |
| HLUNG2000232 | 0 | 0 | 0 | 0 | 0 | 23.283 | 0 |
| HLUNG2000314 | 0 | 0 | 0 | 0 | 67.223 | 0 | 0 |
| HLUNG2000412 | 0 | 0 | 0 | 0 | 0 | 0 | 6.675 |
| HLUNG2000501 | 0 | 0 | 0 | 0 | 0 | 1.585 | 0 |
| HLUNG2000884 | 0 | 0 | 0 | 0 | 0 | 11.863 | 5.336 |
| HLUNG2000950 | 0 | 0 | 0 | 0 | 0 | 22.840 | 0 |
| HLUNG2001439 | 0 | 0 | 0 | 5.197 | 0 | 1.629 | 0 |
| HLUNG2001518 | 0 | 0 | 0 | 0 | 0 | 0 | 5.452 |
| HLUNG2002059 | 0 | 0 | 0 | 48.430 | 0 | 0 | 0 |
| HLUNG2002334 | 0 | 0 | 0 | 0 | 0 | 16.982 | 0 |
| HLUNG2004159 | 0 | 0 | 0 | 0 | 0 | 6.699 | 4.520 |
| HLUNG2004774 | 0 | 0 | 0 | 0 | 0 | 0 | 40.465 |
| HLUNG2005230 | 26.687 | 0 | 0 | 0 | 0 | 0 | 0 |
| HLUNG2006812 | 0 | 0 | 0 | 0 | 0 | 5.463 | 0 |
| HLUNG2008885 | 0 | 0 | 0 | 0 | 0 | 0 | 26.910 |
| HLUNG2009225 | 0 | 0 | 0 | 0 | 0 | 5.572 | 3.760 |
| HLUNG2017262 | 0 | 0 | 0 | 9.346 | 0 | 5.859 | 3.953 |
| HSYRA1000062 | 0 | 0 | 0 | 10.097 | 0 | 1.583 | 2.136 |
| HSYRA1000119 | 0 | 0 | 0 | 2.710 | 0 | 0 | 0 |
| HSYRA1000152 | 0 | 0 | 0 | 7.029 | 0 | 6.611 | 0 |
| HSYRA2000159 | 0 | 0 | 1.626 | 0 | 0 | 1.782 | 1.202 |
| HSYRA2000190 | 0 | 0 | 0 | 13.997 | 0 | 0 | 0 |
| HSYRA2000221 | 0 | 0 | 0 | 0 | 0 | 17.488 | 0 |
| HSYRA2000232 | 0 | 0 | 0 | 0 | 0 | 19.125 | 0 |
| HSYRA2000248 | 0 | 0 | 0 | 0 | 0 | 3.767 | 8.471 |
| HSYRA2000332 | 0 | 0 | 0 | 0 | 0 | 0 | 1.944 |
| HSYRA2000640 | 0 | 0 | 0 | 5.021 | 0 | 0 | 6.371 |
| HSYRA2000743 | 0 | 0 | 0 | 9.121 | 0 | 0 | 0 |
| HSYRA2000787 | 0 | 0 | 0 | 0 | 0 | 0 | 15.507 |
| HSYRA2001103 | 0 | 0 | 0 | 14.995 | 0 | 0 | 0 |
| HSYRA2001138 | 0 | 0 | 0 | 3.005 | 0 | 0 | 0 |
| HSYRA2001225 | 0 | 0 | 0 | 0 | 0 | 0 | 3.686 |
| HSYRA2001396 | 0 | 0 | 0 | 0 | 0 | 0 | 3.787 |
| HSYRA2001476 | 0 | 0 | 0 | 0 | 0 | 0.892 | 0 |
| HSYRA2001567 | 0 | 0 | 0 | 0 | 0 | 4.140 | 0 |
| HSYRA2001574 | 0 | 0 | 0 | 0 | 0 | 0 | 3.751 |
| HSYRA2001580 | 0 | 0 | 0 | 32.300 | 0 | 0 | 13.663 |
| HSYRA2001595 | 0 | 0 | 0 | 0 | 0 | 2.105 | 1.420 |
| HSYRA2001615 | 0 | 0 | 0 | 12.222 | 0 | 0 | 0 |
| HSYRA2001621 | 0 | 0 | 0 | 0 | 0 | 0.339 | 0.457 |
| HSYRA2001631 | 0 | 0 | 0 | 0 | 0 | 21.545 | 0 |
| IMR321000193 | 0 | 0 | 0 | 25.866 | 0 | 8.109 | 0 |
| IMR321000210 | 0 | 0 | 0 | 0 | 0 | 3.745 | 7.580 |
| IMR321000219 | 0 | 0 | 0 | 1.654 | 0 | 1.037 | 0 |
| IMR321000242 | 0 | 0 | 0 | 0 | 0 | 10.389 | 14.019 |
| IMR321000253 | 0 | 0 | 0 | 0 | 0 | 3.763 | 0 |
| IMR322000121 | 0 | 0 | 0 | 6.570 | 0 | 0 | 0 |
| IMR322000127 | 0 | 0 | 0 | 0 | 0 | 8.585 | 11.585 |
| IMR322000144 | 0 | 0 | 0 | 0 | 44.695 | 0 | 0 |
| IMR322000223 | 7.949 | 0 | 0 | 0 | 0 | 0 | 3.395 |
| IMR322000243 | 0 | 0 | 0 | 5.056 | 0 | 0 | 0 |
| IMR322000316 | 0 | 0 | 0 | 0 | 0 | 9.199 | 16.551 |
| IMR322000555 | 0 | 0 | 0 | 0 | 0 | 11.022 | 0 |
| IMR322000730 | 1.600 | 9.201 | 0 | 0 | 0 | 0 | 0 |
| IMR322000819 | 49.762 | 0 | 0 | 0 | 0 | 0 | 0 |
| IMR322000917 | 0 | 0 | 0 | 0 | 0 | 43.645 | 0 |
| IMR322000918 | 0 | 0 | 0 | 34.549 | 0 | 0 | 0 |
| IMR322000935 | 0 | 0 | 0 | 8.823 | 0 | 2.766 | 0 |
| IMR322000973 | 0 | 0 | 0 | 4.752 | 0 | 1.490 | 0 |
| IMR322001218 | 13.070 | 0 | 0 | 0 | 0 | 2.068 | 0 |
| IMR322001332 | 0 | 0 | 0 | 0 | 0 | 4.919 | 0 |
| IMR322001380 | 0 | 0 | 0 | 0 | 0 | 7.324 | 9.883 |
| IMR322001435 | 0 | 0 | 0 | 0 | 0 | 3.471 | 0 |
| IMR322001541 | 0 | 0 | 0 | 0 | 0 | 6.251 | 0 |
| IMR322001584 | 0 | 0 | 16.832 | 0 | 0 | 0 | 3.112 |
| IMR322001600 | 0 | 10.810 | 0 | 6.643 | 0 | 0.297 | 0.401 |
| IMR322001670 | 0 | 0 | 0 | 0 | 0 | 16.857 | 0 |
| IMR322012529 | 0 | 0 | 0 | 0 | 0 | 8.700 | 0 |
| IMR322019070 | 0 | 0 | 0 | 0 | 0 | 0 | 13.339 |
| KIDNE2000085 | 0 | 0 | 0 | 0 | 28.178 | 0 | 0 |
| KIDNE2000252 | 0 | 0 | 0 | 0 | 0 | 1.579 | 0 |
| KIDNE2000403 | 0 | 0 | 0 | 4.869 | 0 | 1.526 | 0 |
| KIDNE2000574 | 0 | 0 | 0 | 0 | 0 | 0 | 3.732 |
| KIDNE2000665 | 0 | 0 | 0 | 0 | 0 | 3.576 | 0 |
| KIDNE2000947 | 0 | 0 | 0 | 14.895 | 0 | 9.338 | 0 |
| KIDNE2001162 | 0 | 0 | 0 | 0 | 0 | 0 | 1.164 |
| KIDNE2001467 | 0 | 0 | 0 | 3.072 | 0 | 3.371 | 1.949 |
| KIDNE2001713 | 0 | 0 | 0 | 0 | 0 | 28.625 | 0 |
| KIDNE2002265 | 0 | 0 | 0 | 0 | 0 | 10.080 | 4.534 |
| KIDNE2002438 | 0 | 0 | 0 | 0 | 0 | 34.637 | 0 |
| KIDNE2002872 | 0 | 38.385 | 46.259 | 0 | 0 | 0 | 0 |
| KIDNE2002883 | 0 | 0 | 0 | 0 | 0 | 8.380 | 0 |
| KIDNE2003373 | 0 | 0 | 0 | 0 | 0 | 28.625 | 0 |
| KIDNE2003941 | 0 | 0 | 0 | 2.972 | 0 | 0 | 1.257 |
| KIDNE2004305 | 0 | 0 | 0 | 0 | 0 | 34.637 | 0 |
| KIDNE2004475 | 0 | 0 | 0 | 0 | 0 | 4.755 | 19.250 |
| KIDNE2004626 | 0 | 0 | 0 | 0 | 0 | 0 | 32.129 |
| KIDNE2004846 | 77.005 | 0 | 0 | 0 | 0 | 0 | 0 |
| KIDNE2005336 | 0 | 0 | 0 | 0 | 0 | 0 | 41.693 |
| KIDNE2005676 | 0 | 0 | 0 | 8.291 | 0 | 10.396 | 0 |
| KIDNE2006014 | 0 | 0 | 0 | 0 | 0 | 10.971 | 7.402 |
| KIDNE2006248 | 3.630 | 0 | 4.192 | 1.832 | 0 | 0 | 0 |
| KIDNE2006465 | 0 | 0 | 0 | 0 | 0 | 5.716 | 15.427 |
| KIDNE2006811 | 37.991 | 0 | 0 | 0 | 0 | 0 | 8.112 |
| KIDNE2006880 | 0 | 0 | 43.291 | 0 | 0 | 0 | 0 |
| KIDNE2007352 | 0 | 0 | 0 | 0 | 0 | 2.304 | 2.073 |
| KIDNE2008403 | 0 | 0 | 0 | 0 | 0 | 0 | 3.390 |
| KIDNE2008404 | 0 | 0 | 62.526 | 0 | 0 | 0 | 0 |
| KIDNE2009367 | 0 | 0 | 0 | 4.442 | 0 | 0 | 0 |
| KIDNE2010265 | 0 | 0 | 63.715 | 0 | 0 | 0 | 5.890 |
| KIDNE2013413 | 0 | 0 | 0 | 0 | 0 | 34.637 | 0 |
| KIDNE2013845 | 0 | 0 | 0 | 0 | 0 | 2.065 | 0 |
| KIDNE2014290 | 0 | 0 | 0 | 0 | 0 | 0 | 1.748 |
| KIDNE2015445 | 0 | 0 | 0 | 20.247 | 0 | 0 | 0 |
| KIDNE2018352 | 0 | 0 | 0 | 0 | 0 | 6.588 | 0 |
| KIDNE2018493 | 0 | 0 | 0 | 0 | 0 | 0 | 17.765 |
| LIVER1000132 | 5.842 | 0 | 0 | 0 | 0 | 0.924 | 2.495 |
| LIVER1000230 | 0 | 0 | 0 | 0 | 0 | 0 | 14.457 |
| LIVER2000416 | 0 | 0 | 0 | 0 | 0 | 4.180 | 0 |
| LIVER2001539 | 0 | 0 | 0 | 0 | 0 | 9.200 | 0 |
| LIVER2002842 | 0 | 0 | 0 | 0 | 0 | 3.527 | 9.518 |
| LIVER2006006 | 0 | 47.741 | 0 | 8.382 | 0 | 1.314 | 0 |
| MAMGL1000032 | 0 | 0 | 0 | 0 | 0 | 0.298 | 0.402 |
| MAMGL1000035 | 0 | 0 | 0 | 2.373 | 0 | 0.372 | 0 |
| MESAN1000050 | 0 | 0 | 0 | 28.382 | 0 | 0 | 4.002 |
| MESAN1000101 | 0 | 0 | 0 | 0 | 0 | 0 | 14.389 |
| MESAN2000067 | 0 | 0 | 0 | 0 | 0 | 33.254 | 0 |
| MESAN2000092 | 0 | 0 | 0 | 0 | 0 | 16.348 | 0 |
| MESAN2000149 | 0 | 0 | 0 | 14.477 | 0 | 4.538 | 0 |
| MESAN2000267 | 0 | 0 | 0 | 0 | 0 | 1.513 | 1.021 |
| MESAN2000572 | 0 | 0 | 0 | 0 | 0 | 1.889 | 0 |
| MESAN2001450 | 0 | 0 | 0 | 0 | 0 | 5.328 | 0 |
| MESAN2002086 | 0 | 0 | 0 | 7.360 | 0 | 0 | 0 |
| MESAN2002186 | 0 | 0 | 59.118 | 0 | 0 | 0 | 0 |
| MESAN2002519 | 0 | 0 | 0 | 0 | 0 | 0 | 11.561 |
| MESAN2002724 | 0 | 0 | 12.435 | 0 | 0 | 0 | 0 |
| MESAN2002790 | 0 | 0 | 0 | 28.827 | 0 | 0 | 0 |
| MESAN2002844 | 0 | 0 | 0 | 0 | 0 | 0 | 18.063 |
| MESAN2003035 | 0 | 0 | 0 | 0 | 0 | 13.240 | 0 |
| MESAN2003622 | 0 | 0 | 0 | 3.542 | 0 | 0 | 1.498 |
| MESAN2004288 | 0 | 0 | 0 | 30.624 | 0 | 9.600 | 0 |
| MESAN2004575 | 0 | 0 | 0 | 76.069 | 0 | 0 | 0 |
| MESAN2005689 | 0 | 0 | 0 | 0 | 0 | 5.732 | 0 |
| MESAN2005766 | 0 | 0 | 0 | 0 | 0 | 3.644 | 0 |
| MESAN2006401 | 0 | 0 | 0 | 0 | 0 | 3.342 | 0 |
| MESAN2006563 | 0 | 0 | 0 | 0 | 0 | 3.827 | 0 |
| MESAN2006971 | 0 | 0 | 0 | 35.411 | 0 | 0 | 0 |
| MESAN2007755 | 0 | 0 | 0 | 0 | 0 | 16.901 | 0 |
| MESAN2008926 | 0 | 0 | 0 | 0 | 0 | 5.898 | 0 |
| MESAN2008936 | 0 | 0 | 0 | 0 | 0 | 0 | 9.917 |
| MESAN2009081 | 0 | 0 | 0 | 27.740 | 0 | 8.696 | 0 |
| MESAN2011627 | 0 | 0 | 50.747 | 0 | 0 | 0 | 0 |
| MESAN2011984 | 0 | 0 | 0 | 0 | 0 | 6.304 | 0 |
| MESAN2012054 | 0 | 0 | 0 | 0 | 0 | 4.713 | 0 |
| MESAN2013284 | 0 | 0 | 0 | 0 | 0 | 11.345 | 0 |
| NB9N41000011 | 0 | 0 | 0 | 12.543 | 0 | 0 | 0 |
| NB9N42000104 | 0 | 0 | 0 | 9.770 | 0 | 0 | 0 |
| NB9N42000281 | 0 | 0 | 0 | 0 | 0 | 3.532 | 0 |
| NHNPC2000187 | 5.283 | 0 | 0 | 0 | 12.400 | 0 | 0 |
| NHNPC2000206 | 0 | 0 | 0 | 4.047 | 0 | 1.269 | 1.712 |
| NHNPC2000212 | 0 | 0 | 0 | 0 | 0 | 6.438 | 0 |
| NHNPC2001223 | 0 | 0 | 0 | 0 | 0 | 6.894 | 0 |
| NHNPC2001931 | 0 | 0 | 0 | 2.813 | 0 | 0 | 0 |
| NT2NE1000018 | 0 | 0 | 0 | 0 | 0 | 4.594 | 6.199 |
| NT2NE1000024 | 0 | 0 | 0 | 0 | 0 | 0 | 28.710 |
| NT2NE1000073 | 0 | 0 | 0 | 0 | 0 | 0 | 19.850 |
| NT2NE1000163 | 0 | 0 | 5.462 | 0 | 0 | 0 | 0 |
| NT2NE2000056 | 0 | 0 | 0 | 0 | 0 | 2.177 | 3.917 |
| NT2NE2000260 | 1.410 | 0 | 0 | 0 | 0 | 0.223 | 0 |
| NT2NE2000327 | 0 | 0 | 0 | 0 | 0 | 0 | 12.542 |
| NT2NE2000353 | 0 | 0 | 0 | 0 | 0 | 33.765 | 0 |
| NT2NE2000383 | 0 | 0 | 0 | 0 | 0 | 0 | 3.788 |
| NT2NE2000386 | 0 | 0 | 0 | 0 | 0 | 28.547 | 0 |
| NT2NE2000392 | 0 | 0 | 0 | 0 | 0 | 24.740 | 24.481 |
| NT2NE2000470 | 0 | 0 | 0 | 0 | 0 | 10.082 | 0 |
| NT2NE2000575 | 0 | 0 | 0 | 0 | 0 | 0.888 | 0.599 |
| NT2NE2000707 | 0 | 0 | 0 | 0 | 0 | 3.091 | 1.668 |
| NT2NE2000763 | 0 | 0 | 0 | 0 | 32.885 | 0 | 2.992 |
| NT2NE2000809 | 0 | 0 | 0 | 19.976 | 0 | 0 | 8.450 |
| NT2NE2000909 | 0 | 0 | 0 | 0 | 0 | 12.095 | 8.160 |
| NT2NE2001000 | 0 | 0 | 0 | 5.072 | 0 | 0 | 0 |
| NT2NE2001048 | 0 | 0 | 0 | 0 | 0 | 2.765 | 0 |
| NT2NE2001176 | 0 | 0 | 0 | 0 | 0 | 6.330 | 2.847 |
| NT2NE2001337 | 0 | 0 | 0 | 0 | 0 | 16.790 | 0 |
| NT2NE2001435 | 0 | 0 | 0 | 0 | 0 | 7.856 | 5.300 |
| NT2NE2001442 | 0 | 0 | 0 | 0 | 0 | 9.232 | 0 |
| NT2NE2001530 | 0 | 0 | 0 | 0 | 0 | 12.926 | 0 |
| NT2NE2001545 | 0 | 0 | 0 | 10.559 | 0 | 0 | 0 |
| NT2NE2001617 | 0 | 0 | 0 | 0 | 0 | 8.382 | 0 |
| NT2NE2001793 | 0 | 0 | 0 | 0 | 0 | 1.916 | 0 |
| NT2NE2003185 | 0 | 0 | 0 | 0 | 0 | 14.006 | 0 |
| NT2NE2003280 | 0 | 0 | 0 | 0 | 0 | 13.445 | 0 |
| NT2NE2003393 | 0 | 86.291 | 0 | 0 | 0 | 0 | 0 |
| NT2NE2003485 | 0 | 0 | 62.774 | 0 | 0 | 0 | 0 |
| NT2NE2003569 | 0 | 0 | 0 | 10.228 | 0 | 6.412 | 0 |
| NT2NE2004255 | 0 | 0 | 0 | 35.102 | 0 | 0 | 14.848 |
| NT2NE2004519 | 0 | 0 | 0 | 0 | 0 | 6.621 | 0 |
| NT2NE2005371 | 0 | 0 | 0 | 0 | 0 | 0 | 13.745 |
| NT2NE2005395 | 0 | 0 | 0 | 0 | 0 | 50.484 | 0 |
| NT2NE2005688 | 0 | 0 | 0 | 0 | 0 | 4.139 | 0 |
| NT2NE2005876 | 0 | 0 | 0 | 0 | 0 | 5.450 | 14.709 |
| NT2NE2006087 | 0 | 0 | 0 | 0 | 0 | 0 | 50.606 |
| NT2NE2006103 | 0 | 0 | 0 | 0 | 0 | 15.996 | 0 |
| NT2NE2006458 | 0 | 0 | 0 | 0 | 0 | 2.611 | 0 |
| NT2NE2006909 | 0 | 0 | 0 | 0 | 0 | 0.527 | 0.711 |
| NT2NE2006958 | 0 | 0 | 0 | 0 | 0 | 0 | 40.753 |
| NT2NE2008213 | 0 | 0 | 0 | 0 | 0 | 0 | 20.745 |
| NT2NE2009295 | 0 | 0 | 0 | 11.757 | 0 | 0 | 4.973 |
| NT2NE2010056 | 0 | 0 | 0 | 0 | 0 | 0 | 19.976 |
| NT2NE2010842 | 0 | 0 | 0 | 0 | 0 | 3.484 | 2.350 |
| NT2NE2011033 | 0 | 0 | 0 | 0 | 0 | 33.765 | 0 |
| NT2NE2014104 | 0 | 0 | 0 | 9.892 | 0 | 0 | 4.184 |
| NT2NE2014113 | 0 | 0 | 0 | 0 | 0 | 33.527 | 0 |
| NT2NE2019091 | 0 | 0 | 0 | 0 | 0 | 0 | 4.719 |
| NT2RI1000048 | 0 | 57.002 | 0 | 0 | 0 | 1.569 | 6.350 |
| NT2RI1000127 | 0 | 0 | 0 | 0 | 0 | 10.059 | 9.049 |
| NT2RI2000064 | 12.568 | 0 | 0 | 0 | 0 | 1.989 | 0 |
| NT2RI2000116 | 0 | 0 | 0 | 0 | 0 | 21.488 | 0 |
| NT2RI2000133 | 29.915 | 0 | 0 | 0 | 0 | 0 | 0 |
| NT2RI2000255 | 0 | 0 | 0 | 7.054 | 0 | 0 | 0 |
| NT2RI2000282 | 0 | 0 | 0 | 3.731 | 0 | 0 | 0 |
| NT2RI2000294 | 0 | 0 | 0 | 0 | 0 | 3.497 | 9.436 |
| NT2RI2000344 | 0 | 0 | 0 | 0 | 0 | 0 | 4.037 |
| NT2RI2000348 | 0 | 0 | 0 | 0 | 0 | 16.371 | 0 |
| NT2RI2000412 | 0 | 0 | 0 | 0 | 0 | 14.239 | 0 |
| NT2RI2000578 | 0 | 0 | 4.509 | 3.941 | 0 | 0 | 1.667 |
| NT2RI2000685 | 0 | 0 | 0 | 0 | 0 | 3.661 | 2.470 |
| NT2RI2000727 | 0 | 0 | 0 | 0 | 0 | 1.434 | 3.225 |
| NT2RI2000829 | 0 | 0 | 0 | 0 | 0 | 7.056 | 0 |
| NT2RI2001054 | 6.946 | 0 | 0 | 0 | 0 | 0 | 1.483 |
| NT2RI2001091 | 41.046 | 0 | 0 | 0 | 0 | 6.495 | 0 |
| NT2RI2001342 | 0 | 0 | 0 | 0 | 0 | 2.916 | 0 |
| NT2RI2001385 | 0 | 0 | 0 | 0 | 0 | 7.279 | 0 |
| NT2RI2001422 | 0 | 0 | 50.129 | 0 | 0 | 0 | 0 |
| NT2RI2001450 | 0 | 0 | 0 | 0 | 0 | 6.547 | 17.668 |
| NT2RI2001540 | 0.665 | 0 | 1.535 | 0.335 | 0 | 0.631 | 1.277 |
| NT2RI2001621 | 0 | 0 | 0 | 18.040 | 0 | 5.655 | 0 |
| NT2RI2001657 | 6.247 | 0 | 7.215 | 0 | 0 | 0.988 | 0 |
| NT2RI2001731 | 0 | 0 | 0 | 0 | 0 | 3.499 | 0 |
| NT2RI2001859 | 0 | 0 | 0 | 5.719 | 0 | 1.793 | 0 |
| NT2RI2001952 | 0 | 0 | 0 | 0 | 0 | 38.701 | 0 |
| NT2RI2002091 | 0.470 | 0 | 0.543 | 4.110 | 2.205 | 0.025 | 0.033 |
| NT2RI2002117 | 0 | 0 | 0 | 0 | 0 | 0 | 11.744 |
| NT2RI2002152 | 0 | 0 | 0 | 7.411 | 0 | 0 | 0 |
| NT2RI2002316 | 0 | 0 | 10.811 | 9.450 | 0 | 1.481 | 1.999 |
| NT2RI2002391 | 0 | 0 | 0 | 0 | 0 | 4.495 | 4.043 |
| NT2RI2002540 | 0 | 0 | 0 | 0 | 0 | 3.194 | 17.238 |
| NT2RI2002554 | 0 | 0 | 0 | 10.686 | 0 | 6.700 | 9.040 |
| NT2RI2002654 | 0 | 0 | 0 | 0 | 0 | 1.085 | 0 |
| NT2RI2002699 | 0 | 0 | 0 | 0 | 0 | 21.123 | 0 |
| NT2RI2002819 | 0 | 0 | 0 | 0 | 0 | 0 | 9.281 |
| NT2RI2002847 | 0 | 0 | 0 | 0 | 0 | 6.957 | 9.388 |
| NT2RI2002958 | 0 | 0 | 0 | 0 | 0 | 0 | 14.400 |
| NT2RI2003019 | 0 | 0 | 0 | 30.822 | 0 | 0 | 0 |
| NT2RI2003051 | 0 | 0 | 0 | 0 | 0 | 1.891 | 0 |
| NT2RI2003301 | 0 | 0 | 0 | 0 | 0 | 10.486 | 14.149 |
| NT2RI2003304 | 0 | 0 | 0 | 0 | 0 | 0.485 | 0.654 |
| NT2RI2003317 | 0 | 0 | 0 | 9.290 | 0 | 2.912 | 3.929 |
| NT2RI2003361 | 0 | 0 | 0 | 0 | 0 | 0 | 12.312 |
| NT2RI2003383 | 0 | 0 | 0 | 0 | 0 | 67.032 | 0 |
| NT2RI2003407 | 0 | 0 | 0 | 0 | 0 | 2.236 | 0 |
| NT2RI2003420 | 0 | 0 | 0 | 9.075 | 0 | 5.690 | 3.839 |
| NT2RI2003556 | 4.442 | 0 | 0 | 0 | 0 | 0 | 0.948 |
| NT2RI2003695 | 0 | 0 | 0 | 0 | 0 | 7.274 | 0 |
| NT2RI2003738 | 0 | 0 | 0 | 3.093 | 19.175 | 0.646 | 1.744 |
| NT2RI2003751 | 0 | 0 | 0 | 0 | 0 | 2.559 | 3.453 |
| NT2RI2003921 | 0 | 0 | 0 | 2.795 | 12.995 | 0.876 | 1.182 |
| NT2RI2003973 | 0 | 0 | 0 | 0 | 0 | 23.190 | 0 |
| NT2RI2003993 | 0 | 0 | 0 | 0 | 0 | 0 | 9.464 |
| NT2RI2004209 | 0 | 0 | 0 | 0 | 0 | 0 | 18.302 |
| NT2RI2004230 | 0 | 0 | 0 | 0 | 0 | 8.479 | 2.860 |
| NT2RI2004398 | 0 | 0 | 0 | 0 | 0 | 0 | 12.419 |
| NT2RI2004410 | 0 | 0 | 0 | 0 | 0 | 9.215 | 0 |
| NT2RI2004884 | 0 | 0 | 0 | 0 | 0 | 0 | 11.556 |
| NT2RI2005116 | 0 | 0 | 0 | 0 | 0 | 2.362 | 0 |
| NT2RI2005150 | 0 | 0 | 0 | 0 | 0 | 0 | 1.718 |
| NT2RI2005335 | 0 | 0 | 0 | 6.844 | 0 | 2.145 | 0 |
| NT2RI2005353 | 0 | 0 | 0 | 6.789 | 0 | 0 | 2.872 |
| NT2RI2005368 | 0 | 0 | 0 | 0 | 0 | 3.733 | 0 |
| NT2RI2005405 | 0 | 0 | 0 | 6.617 | 0 | 0.519 | 1.400 |
| NT2RI2005564 | 0 | 0 | 0 | 0 | 0 | 0 | 22.207 |
| NT2RI2005579 | 0 | 0 | 0 | 0 | 0 | 17.338 | 0 |
| NT2RI2005713 | 0 | 0 | 0 | 8.715 | 0 | 5.464 | 3.687 |
| NT2RI2005723 | 0 | 0 | 0 | 2.957 | 0 | 1.854 | 2.502 |
| NT2RI2005811 | 17.886 | 0 | 0 | 0 | 0 | 5.661 | 0 |
| NT2RI2005816 | 0 | 0 | 0 | 0 | 0 | 11.809 | 0 |
| NT2RI2005818 | 0 | 0 | 0 | 0 | 0 | 14.116 | 19.048 |
| NT2RI2006072 | 0 | 0 | 0 | 4.509 | 0 | 0 | 0 |
| NT2RI2006183 | 0 | 0 | 0 | 0 | 0 | 0 | 47.686 |
| NT2RI2006412 | 0 | 0 | 0 | 0 | 0 | 0 | 2.043 |
| NT2RI2006506 | 0 | 0 | 0 | 0 | 0 | 24.887 | 0 |
| NT2RI2006647 | 0 | 0 | 0 | 27.023 | 0 | 8.471 | 0 |
| NT2RI2006825 | 0 | 0 | 0 | 0 | 0 | 15.195 | 6.834 |
| NT2RI2006856 | 0 | 0 | 0 | 0 | 0 | 0 | 2.335 |
| NT2RI2006943 | 0 | 0 | 0 | 0 | 0 | 4.494 | 9.096 |
| NT2RI2007054 | 0 | 0 | 0 | 0 | 0 | 2.398 | 0 |
| NT2RI2007133 | 0 | 0 | 0 | 0 | 0 | 0 | 0.978 |
| NT2RI2007277 | 0 | 0 | 0 | 0 | 0 | 10.867 | 9.775 |
| NT2RI2007377 | 0 | 0 | 0 | 0 | 0 | 12.982 | 11.678 |
| NT2RI2007384 | 0 | 0 | 0 | 5.104 | 0 | 0 | 0 |
| NT2RI2007468 | 0 | 0 | 0 | 0 | 0 | 7.719 | 0 |
| NT2RI2007572 | 0 | 0 | 0 | 8.807 | 0 | 5.521 | 1.863 |
| NT2RI2007589 | 0 | 0 | 0 | 0 | 0 | 0 | 15.973 |
| NT2RI2007629 | 0 | 0 | 0 | 11.880 | 0 | 3.724 | 5.025 |
| NT2RI2007723 | 0 | 0 | 0 | 0 | 0 | 0 | 8.819 |
| NT2RI2007884 | 0 | 0 | 0 | 0 | 0 | 4.690 | 0 |
| NT2RI2007987 | 0 | 0 | 0 | 0 | 0 | 0 | 8.977 |
| NT2RI2008045 | 0 | 0 | 10.470 | 0 | 0 | 2.869 | 3.871 |
| NT2RI2008171 | 0 | 0 | 0 | 0 | 0 | 8.203 | 0 |
| NT2RI2008221 | 0 | 74.427 | 0 | 0 | 0 | 0 | 0 |
| NT2RI2008336 | 0 | 0 | 0 | 0 | 0 | 2.960 | 1.997 |
| NT2RI2008396 | 0 | 0 | 0 | 2.598 | 0 | 0.814 | 3.296 |
| NT2RI2008526 | 0 | 0 | 0 | 4.518 | 0 | 0 | 0 |
| NT2RI2008566 | 0 | 0 | 0 | 0 | 0 | 0 | 23.447 |
| NT2RI2008724 | 0 | 0 | 0 | 0 | 0 | 3.393 | 0 |
| NT2RI2008749 | 0 | 0 | 0 | 0 | 0 | 1.045 | 0 |
| NT2RI2008791 | 0 | 0 | 0 | 0 | 0 | 2.155 | 0 |
| NT2RI2008808 | 0 | 0 | 0 | 0 | 0 | 33.500 | 11.301 |
| NT2RI2008942 | 0 | 0 | 0 | 0 | 0 | 1.937 | 5.228 |
| NT2RI2009037 | 0 | 0 | 0 | 0 | 0 | 1.557 | 8.406 |
| NT2RI2009065 | 0 | 0 | 0 | 0 | 0 | 2.588 | 0 |
| NT2RI2009173 | 0 | 0 | 0 | 0 | 0 | 2.061 | 5.561 |
| NT2RI2009194 | 0 | 0 | 0 | 17.375 | 0 | 1.816 | 9.799 |
| NT2RI2009233 | 0 | 0 | 0 | 0 | 0 | 4.167 | 0 |
| NT2RI2009239 | 0 | 0 | 0 | 0 | 0 | 2.582 | 0 |
| NT2RI2009259 | 0 | 0 | 0 | 68.973 | 0 | 0 | 0 |
| NT2RI2009269 | 0 | 0 | 0 | 0 | 0 | 0 | 2.463 |
| NT2RI2009281 | 16.431 | 0 | 0 | 0 | 0 | 0 | 3.508 |
| NT2RI2009402 | 0 | 0 | 0 | 0 | 0 | 0 | 15.637 |
| NT2RI2009406 | 0 | 0 | 0 | 0 | 0 | 5.198 | 14.027 |
| NT2RI2012350 | 4.673 | 26.870 | 0 | 0 | 10.968 | 0 | 0 |
| NT2RI2015342 | 0 | 0 | 0 | 8.866 | 0 | 2.779 | 3.750 |
| NT2RI2015533 | 0 | 0 | 0 | 0 | 0 | 5.742 | 0 |
| NT2RI2017529 | 0 | 0 | 0 | 0 | 0 | 0 | 2.419 |
| NT2RI3000622 | 0 | 0 | 0 | 0 | 0 | 0 | 21.343 |
| NT2RP6000017 | 0 | 0 | 20.175 | 8.818 | 0 | 2.764 | 0 |
| NT2RP6000072 | 0 | 0 | 0 | 0 | 0 | 2.985 | 0 |
| NT2RP6000078 | 0 | 0 | 0 | 0 | 0 | 1.329 | 0 |
| NT2RP6000109 | 0 | 0 | 0 | 0 | 0 | 7.057 | 0 |
| NT2RP6000110 | 0 | 0 | 0 | 0 | 0 | 10.118 | 6.826 |
| NT2RP6000123 | 0 | 0 | 0 | 4.614 | 10.727 | 6.509 | 2.928 |
| NT2RP7000076 | 0 | 0 | 0 | 0 | 0 | 0 | 6.077 |
| NT2RP7000173 | 0 | 0 | 0 | 0 | 0 | 7.190 | 2.772 |
| NT2RP7000238 | 0 | 0 | 0 | 0 | 0 | 0 | 6.454 |
| NT2RP7000271 | 0 | 0 | 0 | 0 | 0 | 5.603 | 0 |
| NT2RP7000425 | 0 | 0 | 0 | 0 | 0 | 0 | 50.844 |
| NT2RP7000477 | 0 | 0 | 0 | 0 | 0 | 3.655 | 0 |
| NT2RP7000624 | 0 | 0 | 0 | 0 | 0 | 8.060 | 0 |
| NT2RP7000906 | 0 | 0 | 0 | 0 | 0 | 0 | 3.252 |
| NT2RP7001166 | 8.732 | 0 | 0 | 0 | 0 | 0 | 0 |
| NT2RP7001231 | 0 | 0 | 0 | 0 | 0 | 38.148 | 0 |
| NT2RP7001283 | 0 | 0 | 0 | 0 | 15.424 | 0 | 0 |
| NT2RP7001591 | 0 | 0 | 0 | 0 | 0 | 0 | 6.481 |
| NT2RP7002028 | 0 | 0 | 0 | 0 | 0 | 0 | 5.010 |
| NT2RP7002379 | 0 | 0 | 0 | 2.967 | 0 | 6.510 | 0 |
| NT2RP7002738 | 0 | 0 | 0 | 0 | 0 | 10.635 | 0 |
| NT2RP7002802 | 0 | 0 | 0 | 0 | 0 | 6.751 | 0 |
| NT2RP7002875 | 0 | 0 | 0 | 0 | 0 | 11.933 | 20.703 |
| NT2RP7003203 | 0 | 0 | 0 | 0 | 0 | 13.650 | 9.209 |
| NT2RP7003261 | 0 | 0 | 0 | 0 | 0 | 2.510 | 0 |
| NT2RP7003319 | 0 | 0 | 0 | 0 | 0 | 0 | 2.274 |
| NT2RP7003511 | 0 | 0 | 0 | 19.474 | 0 | 6.105 | 0 |
| NT2RP7003688 | 0 | 0 | 0 | 0 | 0 | 2.728 | 1.841 |
| NT2RP7003724 | 0 | 0 | 0 | 0 | 0 | 0 | 23.020 |
| NT2RP7003960 | 0 | 0 | 0 | 0 | 0 | 0 | 4.130 |
| NT2RP7004123 | 0 | 0 | 0 | 0 | 0 | 7.090 | 0 |
| NT2RP7004173 | 8.916 | 0 | 0 | 0 | 0 | 2.822 | 3.808 |
| NT2RP7004196 | 0 | 0 | 0 | 0 | 0 | 2.421 | 6.532 |
| NT2RP7004204 | 0 | 0 | 0 | 0 | 0 | 3.150 | 4.251 |
| NT2RP7004348 | 0 | 0 | 0 | 13.318 | 0 | 0 | 5.634 |
| NT2RP7004352 | 0 | 0 | 0 | 0 | 0 | 3.138 | 8.468 |
| NT2RP7004373 | 0 | 0 | 0 | 0 | 0 | 2.174 | 2.934 |
| NT2RP7004481 | 0 | 0 | 0 | 0 | 0 | 9.936 | 0 |
| NT2RP7004728 | 0 | 0 | 0 | 0 | 0 | 5.807 | 7.836 |
| NT2RP7004751 | 0 | 0 | 0 | 2.758 | 0 | 3.459 | 0 |
| NT2RP7004884 | 0 | 0 | 0 | 0 | 0 | 0 | 6.844 |
| NT2RP7004925 | 0 | 0 | 0 | 0 | 0 | 0 | 3.148 |
| NT2RP7004946 | 0 | 0 | 0 | 0 | 0 | 7.952 | 6.438 |
| NT2RP7005513 | 0 | 0 | 0 | 0 | 0 | 3.123 | 4.213 |
| NT2RP7006188 | 0 | 0 | 0 | 0 | 0 | 4.810 | 0 |
| NT2RP7006223 | 0 | 0 | 0 | 0 | 0 | 7.806 | 0 |
| NT2RP7006619 | 0 | 0 | 0 | 0 | 0 | 8.156 | 11.005 |
| NT2RP7006717 | 0 | 0 | 0 | 0 | 0 | 2.431 | 0 |
| NT2RP7006986 | 0 | 0 | 0 | 0 | 0 | 0 | 9.365 |
| NT2RP7007114 | 0 | 0 | 0 | 0 | 0 | 30.267 | 0 |
| NT2RP7007269 | 0 | 0 | 0 | 0 | 0 | 43.392 | 0 |
| NT2RP7007387 | 0 | 0 | 0 | 0 | 0 | 7.584 | 5.117 |
| NT2RP7007530 | 0 | 0 | 0 | 0 | 0 | 12.151 | 0 |
| NT2RP7007842 | 0 | 0 | 0 | 0 | 0 | 3.543 | 4.781 |
| NT2RP7008015 | 0 | 0 | 0 | 0 | 0 | 0 | 2.515 |
| NT2RP7008167 | 0 | 0 | 0 | 5.349 | 0 | 0 | 0 |
| NT2RP7008190 | 0 | 0 | 0 | 7.817 | 0 | 0 | 3.307 |
| NT2RP7008441 | 0 | 0 | 0 | 0 | 0 | 37.192 | 0 |
| NT2RP7008714 | 0 | 0 | 0 | 0 | 0 | 7.165 | 19.335 |
| NT2RP7009030 | 0 | 0 | 0 | 0 | 0 | 17.773 | 0 |
| NT2RP7009087 | 0 | 0 | 0 | 0 | 0 | 8.976 | 0 |
| NT2RP7009097 | 0 | 0 | 0 | 0 | 0 | 3.321 | 0 |
| NT2RP7009108 | 0 | 0 | 0 | 0 | 0 | 0 | 2.216 |
| NT2RP7009225 | 0 | 0 | 0 | 16.577 | 0 | 0 | 0 |
| NT2RP7009259 | 0 | 0 | 0 | 0 | 0 | 2.076 | 0 |
| NT2RP7009394 | 0 | 0 | 0 | 0 | 0 | 6.702 | 0 |
| NT2RP7009481 | 0 | 0 | 0 | 0 | 0 | 0 | 10.209 |
| NT2RP7009482 | 0 | 0 | 0 | 0 | 0 | 0.856 | 1.155 |
| NT2RP7009498 | 0 | 0 | 0 | 0 | 0 | 0 | 2.512 |
| NT2RP7009577 | 0 | 0 | 0 | 0 | 0 | 43.392 | 0 |
| NT2RP7011318 | 0 | 0 | 0 | 0 | 0 | 43.392 | 0 |
| NT2RP7013764 | 0 | 0 | 0 | 0 | 0 | 20.975 | 0 |
| NT2RP7015512 | 0 | 0 | 0 | 0 | 0 | 11.941 | 0 |
| NT2RP7019401 | 0 | 0 | 0 | 0 | 0 | 0 | 25.883 |
| NT2RP8001604 | 0 | 0 | 0 | 0 | 0 | 0 | 17.297 |
| NT2RP8007920 | 0 | 0 | 0 | 0 | 0 | 10.963 | 0 |
| NTONG1000033 | 0 | 0 | 0 | 14.441 | 0 | 2.263 | 0 |
| NTONG1000098 | 0 | 0 | 0 | 3.755 | 17.458 | 1.177 | 0 |
| NTONG1000264 | 0 | 0 | 0 | 0 | 0 | 19.807 | 2.430 |
| NTONG2000265 | 0 | 0 | 0 | 0 | 0 | 0 | 4.250 |
| NTONG2000334 | 0 | 0 | 0 | 0 | 0 | 3.777 | 5.097 |
| NTONG2000878 | 0 | 0 | 0 | 0 | 0 | 4.363 | 0 |
| NTONG2000977 | 11.477 | 0 | 0 | 0 | 0 | 0 | 0 |
| NTONG2000985 | 0 | 0 | 0 | 10.987 | 0 | 3.444 | 0 |
| NTONG2001550 | 0 | 0 | 0 | 0 | 0 | 0 | 8.676 |
| NTONG2001612 | 0 | 0 | 15.137 | 0 | 0 | 2.074 | 0 |
| NTONG2001762 | 0 | 0 | 0 | 0 | 0 | 13.326 | 0 |
| NTONG2004918 | 0 | 0 | 0 | 0 | 0 | 11.964 | 0 |
| NTONG2005520 | 0 | 0 | 0 | 3.923 | 0 | 1.230 | 1.659 |
| NTONG2005897 | 0 | 0 | 0 | 0 | 0 | 0 | 34.223 |
| NTONG2005969 | 0 | 0 | 0 | 0 | 0 | 0 | 8.008 |
| NTONG2006709 | 0 | 0 | 0 | 0 | 0 | 16.742 | 0 |
| NTONG2008483 | 0 | 0 | 0 | 0 | 0 | 1.476 | 1.992 |
| OCBBF1000049 | 0 | 0 | 0 | 0 | 0 | 9.180 | 12.388 |
| OCBBF1000067 | 0 | 0 | 0 | 0 | 0 | 13.507 | 63.788 |
| OCBBF1000080 | 0 | 0 | 0 | 0 | 0 | 35.323 | 0 |
| OCBBF1000104 | 0 | 0 | 0 | 0 | 0 | 38.054 | 0 |
| OCBBF1000114 | 0 | 0 | 0 | 0 | 0 | 0 | 6.355 |
| OCBBF1000146 | 0 | 0 | 0 | 0 | 0 | 12.749 | 17.203 |
| OCBBF1000153 | 0 | 0 | 0 | 0 | 0 | 15.675 | 0 |
| OCBBF1000185 | 0 | 0 | 0 | 0 | 0 | 15.555 | 0 |
| OCBBF1000188 | 0 | 0 | 0 | 0 | 0 | 1.924 | 0 |
| OCBBF2000013 | 0 | 0 | 0 | 0 | 0 | 3.595 | 14.552 |
| OCBBF2000015 | 0 | 0 | 0 | 0 | 0 | 2.923 | 0 |
| OCBBF2000126 | 0 | 0 | 0 | 0 | 0 | 0 | 9.689 |
| OCBBF2000178 | 0 | 0 | 0 | 0 | 0 | 6.043 | 5.436 |
| OCBBF2000277 | 0 | 0 | 0 | 0 | 0 | 13.573 | 0 |
| OCBBF2000323 | 0 | 0 | 0 | 0 | 0 | 28.033 | 37.827 |
| OCBBF2000467 | 0 | 0 | 0 | 0 | 0 | 14.905 | 10.056 |
| OCBBF2000831 | 0 | 0 | 0 | 0 | 0 | 17.790 | 0 |
| OCBBF2000846 | 0 | 0 | 0 | 0 | 0 | 2.704 | 1.824 |
| OCBBF2000904 | 0 | 0 | 0 | 0 | 0 | 22.402 | 10.076 |
| OCBBF2000986 | 0 | 0 | 0 | 0 | 0 | 3.561 | 0 |
| OCBBF2001166 | 0 | 0 | 0 | 0 | 0 | 20.251 | 0 |
| OCBBF2001210 | 0 | 0 | 0 | 0 | 0 | 13.397 | 0 |
| OCBBF2001252 | 0 | 0 | 0 | 0 | 0 | 34.015 | 22.949 |
| OCBBF2001323 | 0 | 0 | 0 | 0 | 0 | 47.657 | 0 |
| OCBBF2001402 | 0 | 0 | 0 | 0 | 0 | 59.793 | 0 |
| OCBBF2001492 | 0 | 0 | 0 | 0 | 0 | 2.535 | 0 |
| OCBBF2001639 | 0 | 0 | 0 | 0 | 0 | 0 | 11.723 |
| OCBBF2001687 | 0 | 0 | 0 | 0 | 0 | 10.661 | 0 |
| OCBBF2001749 | 0 | 0 | 0 | 0 | 0 | 59.793 | 0 |
| OCBBF2001794 | 0 | 0 | 0 | 0 | 0 | 0 | 11.785 |
| OCBBF2002290 | 0 | 0 | 0 | 0 | 0 | 18.632 | 0 |
| OCBBF2002376 | 0 | 0 | 0 | 0 | 0 | 14.065 | 0 |
| OCBBF2002626 | 0 | 0 | 0 | 0 | 0 | 1.560 | 0 |
| OCBBF2002656 | 0 | 0 | 0 | 0 | 0 | 9.168 | 0 |
| OCBBF2002663 | 0 | 0 | 0 | 0 | 0 | 59.793 | 0 |
| OCBBF2003052 | 0 | 0 | 0 | 0 | 0 | 28.068 | 9.469 |
| OCBBF2003246 | 0 | 0 | 0 | 0 | 0 | 0 | 24.396 |
| OCBBF2003518 | 0 | 0 | 0 | 0 | 0 | 0 | 2.570 |
| OCBBF2003925 | 0 | 0 | 0 | 9.821 | 0 | 0 | 2.077 |
| OCBBF2004038 | 0 | 0 | 0 | 0 | 0 | 0 | 66.741 |
| OCBBF2004104 | 0 | 0 | 0 | 0 | 0 | 15.181 | 13.657 |
| OCBBF2004273 | 0 | 0 | 0 | 0 | 0 | 3.312 | 0 |
| OCBBF2004757 | 0 | 0 | 0 | 0 | 0 | 18.314 | 30.890 |
| OCBBF2004930 | 0 | 0 | 0 | 0 | 0 | 0 | 25.873 |
| OCBBF2004984 | 0 | 0 | 0 | 0 | 0 | 44.001 | 0 |
| OCBBF2005428 | 0 | 0 | 0 | 0 | 0 | 6.090 | 0 |
| OCBBF2005956 | 0 | 0 | 0 | 0 | 0 | 5.245 | 0 |
| OCBBF2006113 | 0 | 0 | 0 | 0 | 0 | 48.624 | 0 |
| OCBBF2006172 | 0 | 0 | 0 | 0 | 0 | 0 | 13.071 |
| OCBBF2006313 | 0 | 0 | 0 | 0 | 0 | 0 | 14.234 |
| OCBBF2006764 | 0 | 0 | 0 | 0 | 0 | 28.349 | 0 |
| OCBBF2006849 | 0 | 0 | 0 | 0 | 0 | 3.734 | 0 |
| OCBBF2006859 | 0 | 0 | 0 | 0 | 0 | 0 | 18.676 |
| OCBBF2007028 | 0 | 0 | 0 | 8.137 | 0 | 5.102 | 3.442 |
| OCBBF2007196 | 0 | 0 | 0 | 0 | 0 | 33.142 | 0 |
| OCBBF2007415 | 0 | 0 | 0 | 0 | 0 | 2.959 | 0 |
| OCBBF2007762 | 0 | 0 | 0 | 0 | 0 | 29.049 | 0 |
| OCBBF2007829 | 0 | 0 | 0 | 6.472 | 0 | 3.043 | 2.737 |
| OCBBF2007892 | 0 | 0 | 0 | 0 | 0 | 0 | 21.239 |
| OCBBF2008005 | 0 | 0 | 0 | 0 | 0 | 11.733 | 7.916 |
| OCBBF2008041 | 0 | 0 | 0 | 0 | 0 | 7.723 | 0 |
| OCBBF2008340 | 0 | 0 | 0 | 0 | 0 | 28.522 | 0 |
| OCBBF2008466 | 0 | 0 | 0 | 0 | 0 | 0 | 42.651 |
| OCBBF2008701 | 0 | 0 | 0 | 0 | 0 | 0 | 27.016 |
| OCBBF2008770 | 0 | 0 | 0 | 0 | 0 | 24.703 | 33.334 |
| OCBBF2009301 | 0 | 0 | 0 | 0 | 0 | 0 | 5.167 |
| OCBBF2009391 | 0 | 0 | 0 | 0 | 0 | 59.793 | 0 |
| OCBBF2009424 | 0 | 0 | 0 | 0 | 0 | 13.407 | 0 |
| OCBBF2009772 | 0 | 0 | 0 | 0 | 0 | 4.351 | 0 |
| OCBBF2009836 | 0 | 0 | 0 | 0 | 0 | 7.570 | 10.215 |
| OCBBF2010819 | 0 | 0 | 0 | 0 | 0 | 23.173 | 0 |
| OCBBF2010830 | 0 | 0 | 0 | 0 | 0 | 1.626 | 0 |
| OCBBF2010841 | 0 | 0 | 0 | 0 | 0 | 11.483 | 0 |
| OCBBF2010843 | 0 | 0 | 0 | 0 | 0 | 27.517 | 0 |
| OCBBF2010871 | 0 | 0 | 0 | 0 | 0 | 25.333 | 0 |
| OCBBF2011021 | 0 | 0 | 0 | 0 | 0 | 2.670 | 0 |
| OCBBF2011073 | 0 | 0 | 0 | 0 | 0 | 0 | 25.519 |
| OCBBF2011232 | 0 | 0 | 0 | 0 | 0 | 0 | 19.973 |
| OCBBF2011536 | 0 | 0 | 0 | 0 | 0 | 3.686 | 9.946 |
| OCBBF2011625 | 0 | 0 | 0 | 0 | 0 | 0 | 66.741 |
| OCBBF2011759 | 0 | 0 | 0 | 0 | 0 | 3.453 | 0 |
| OCBBF2011887 | 0 | 0 | 0 | 0 | 0 | 8.688 | 0 |
| OCBBF2012095 | 0 | 0 | 0 | 0 | 0 | 0 | 38.146 |
| OCBBF2012191 | 0 | 0 | 0 | 0 | 0 | 59.793 | 0 |
| OCBBF2012553 | 0 | 0 | 0 | 6.912 | 0 | 4.333 | 11.695 |
| OCBBF2012678 | 0 | 0 | 0 | 0 | 0 | 25.486 | 0 |
| OCBBF2012821 | 0 | 0 | 0 | 0 | 0 | 9.245 | 0 |
| OCBBF2012908 | 0 | 0 | 0 | 0 | 0 | 18.162 | 8.169 |
| OCBBF2013011 | 0 | 0 | 0 | 0 | 0 | 13.949 | 0 |
| OCBBF2013149 | 0 | 0 | 0 | 0 | 0 | 0 | 7.733 |
| OCBBF2013481 | 0 | 0 | 0 | 0 | 0 | 10.100 | 0 |
| OCBBF2013789 | 0 | 0 | 0 | 0 | 0 | 27.881 | 0 |
| OCBBF2013843 | 0 | 0 | 0 | 0 | 0 | 2.961 | 3.996 |
| OCBBF2013926 | 0 | 0 | 0 | 0 | 0 | 22.924 | 0 |
| OCBBF2014064 | 0 | 0 | 0 | 0 | 0 | 2.523 | 10.215 |
| OCBBF2014292 | 0 | 0 | 0 | 0 | 0 | 19.134 | 0 |
| OCBBF2014322 | 0 | 0 | 0 | 0 | 0 | 0 | 51.462 |
| OCBBF2014386 | 0 | 0 | 0 | 0 | 0 | 33.591 | 0 |
| OCBBF2014541 | 0 | 0 | 0 | 0 | 0 | 7.244 | 9.774 |
| OCBBF2014873 | 0 | 0 | 0 | 0 | 0 | 26.202 | 0 |
| OCBBF2014880 | 0 | 0 | 0 | 0 | 0 | 59.793 | 0 |
| OCBBF2014928 | 0 | 0 | 0 | 0 | 0 | 59.793 | 0 |
| OCBBF2015503 | 0 | 0 | 0 | 0 | 0 | 41.591 | 0 |
| OCBBF2015599 | 0 | 0 | 0 | 0 | 0 | 59.793 | 0 |
| OCBBF2015751 | 0 | 0 | 0 | 0 | 0 | 5.235 | 0 |
| OCBBF2016405 | 0 | 0 | 0 | 0 | 0 | 71.253 | 0 |
| OCBBF2016928 | 31.972 | 0 | 0 | 0 | 0 | 5.059 | 0 |
| OCBBF2017035 | 0 | 0 | 0 | 0 | 0 | 4.479 | 6.044 |
| OCBBF2017398 | 0 | 0 | 0 | 0 | 0 | 2.376 | 0 |
| OCBBF2017458 | 0 | 0 | 0 | 0 | 0 | 20.570 | 0 |
| OCBBF2017754 | 0 | 0 | 0 | 0 | 0 | 6.936 | 9.360 |
| OCBBF2017791 | 0 | 0 | 0 | 0 | 0 | 4.733 | 6.386 |
| OCBBF2017888 | 0 | 0 | 0 | 0 | 0 | 31.476 | 0 |
| OCBBF2017893 | 0 | 0 | 0 | 0 | 0 | 0 | 4.324 |
| OCBBF2018012 | 0 | 0 | 0 | 0 | 0 | 5.185 | 0 |
| OCBBF2018234 | 0 | 0 | 0 | 0 | 0 | 23.932 | 0 |
| OCBBF2018707 | 0 | 0 | 0 | 0 | 0 | 0 | 11.213 |
| OCBBF2018873 | 0 | 0 | 0 | 0 | 0 | 5.120 | 0 |
| OCBBF2018956 | 0 | 0 | 0 | 9.974 | 0 | 0 | 0 |
| OCBBF2021286 | 0 | 0 | 0 | 0 | 0 | 0 | 23.004 |
| OCBBF2023162 | 0 | 0 | 0 | 0 | 0 | 18.995 | 0 |
| OCBBF2026368 | 0 | 0 | 0 | 0 | 0 | 0 | 20.599 |
| OCBBF2033295 | 0 | 0 | 0 | 0 | 0 | 19.428 | 0 |
| OCBBF2035226 | 0 | 0 | 0 | 0 | 0 | 1.085 | 0 |
| OCBBF3000323 | 0 | 0 | 0 | 0 | 0 | 0 | 16.582 |
| PEBLM1000174 | 0 | 0 | 0 | 0 | 0 | 8.835 | 0 |
| PEBLM2000308 | 0 | 0 | 0 | 0 | 0 | 18.312 | 0 |
| PEBLM2000395 | 10.626 | 0 | 0 | 0 | 0 | 5.044 | 0 |
| PEBLM2003914 | 0 | 0 | 0 | 12.522 | 0 | 0 | 0 |
| PEBLM2006366 | 32.312 | 0 | 0 | 0 | 0 | 0 | 0 |
| PEBLM2007296 | 0 | 0 | 0 | 0 | 47.388 | 0 | 4.311 |
| PEBLM2007774 | 7.033 | 20.220 | 0 | 1.775 | 0 | 0 | 0 |
| PLACE5000113 | 0 | 0 | 0 | 0 | 0 | 6.357 | 0 |
| PLACE5000159 | 0 | 0 | 0 | 0 | 0 | 16.795 | 0 |
| PLACE5000170 | 0 | 0 | 0 | 0 | 0 | 6.423 | 0 |
| PLACE5000172 | 0 | 0 | 0 | 0 | 0 | 0 | 3.240 |
| PLACE6000145 | 12.099 | 0 | 0 | 0 | 0 | 0 | 0 |
| PLACE6000263 | 0 | 0 | 0 | 8.960 | 0 | 0 | 0 |
| PLACE6000379 | 0 | 0 | 0 | 1.041 | 0 | 3.263 | 6.164 |
| PLACE6000463 | 0 | 0 | 0 | 0 | 0 | 14.415 | 0 |
| PLACE6001064 | 0 | 0 | 0 | 3.381 | 0 | 4.240 | 0 |
| PLACE6001262 | 0 | 0 | 0 | 0 | 0 | 0 | 21.783 |
| PLACE6001281 | 0 | 0 | 0 | 0 | 0 | 0 | 8.582 |
| PLACE6001443 | 0 | 0 | 0 | 11.576 | 0 | 0 | 0 |
| PLACE6002084 | 4.312 | 0 | 4.980 | 4.353 | 0 | 0.682 | 0 |
| PLACE6002102 | 0 | 0 | 0 | 0 | 0 | 5.218 | 0 |
| PLACE6004005 | 0 | 0 | 0 | 0 | 0 | 5.472 | 29.535 |
| PLACE6004312 | 0 | 0 | 8.132 | 3.554 | 0 | 1.114 | 1.503 |
| PLACE6004931 | 76.447 | 0 | 0 | 0 | 0 | 0 | 0 |
| PLACE6007436 | 0 | 0 | 0 | 0 | 0 | 6.637 | 8.956 |
| PLACE6008775 | 0 | 0 | 0 | 0 | 0 | 0 | 4.595 |
| PLACE6010077 | 0 | 0 | 11.740 | 5.131 | 0 | 0 | 2.170 |
| PLACE6010848 | 0 | 0 | 0 | 0 | 0 | 15.118 | 0 |
| PLACE6011041 | 0 | 0 | 0 | 0 | 0 | 0 | 6.782 |
| PLACE6011057 | 0 | 0 | 30.391 | 0 | 0 | 0 | 0 |
| PLACE6013222 | 0 | 0 | 0 | 0 | 0 | 27.309 | 0 |
| PLACE6015051 | 0 | 0 | 0 | 0 | 0 | 8.516 | 0 |
| PLACE6016210 | 0 | 0 | 0 | 0 | 0 | 0 | 31.569 |
| PLACE6016942 | 0 | 0 | 0 | 0 | 0 | 0 | 9.752 |
| PLACE6018031 | 0 | 0 | 0 | 0 | 0 | 0 | 16.761 |
| PROST1000097 | 0 | 0 | 0 | 0 | 0 | 0 | 1.466 |
| PROST1000120 | 0 | 0 | 0 | 0 | 0 | 6.092 | 0 |
| PROST1000199 | 8.530 | 0 | 0 | 0 | 0 | 1.350 | 0 |
| PROST1000215 | 0 | 0 | 0 | 0 | 0 | 9.449 | 0 |
| PROST1000272 | 0 | 0 | 0 | 0 | 0 | 0 | 15.731 |
| PROST1000526 | 0 | 0 | 0 | 0 | 0 | 4.668 | 0 |
| PROST2000079 | 0 | 0 | 0 | 0 | 0 | 5.530 | 0 |
| PROST2000138 | 0 | 0 | 0 | 0 | 0 | 0.160 | 0 |
| PROST2000165 | 0 | 0 | 0 | 0 | 0 | 50.609 | 0 |
| PROST2000241 | 71.444 | 0 | 0 | 0 | 0 | 0 | 0 |
| PROST2000337 | 0 | 0 | 0 | 0 | 0 | 34.251 | 0 |
| PROST2000893 | 0 | 0 | 0 | 0 | 0 | 0 | 41.278 |
| PROST2001180 | 0 | 0 | 0 | 0 | 0 | 4.587 | 6.190 |
| PROST2001213 | 0 | 0 | 0 | 0 | 0 | 0 | 20.781 |
| PROST2001823 | 0 | 0 | 0 | 0 | 0 | 34.251 | 0 |
| PROST2001883 | 0 | 59.960 | 0 | 0 | 0 | 0 | 0 |
| PROST2002078 | 0 | 0 | 0 | 0 | 66.593 | 0 | 0 |
| PROST2003338 | 0 | 0 | 0 | 0 | 0 | 4.136 | 5.581 |
| PROST2004095 | 0 | 0 | 0 | 2.758 | 0 | 5.188 | 1.167 |
| PROST2004258 | 0 | 0 | 0 | 22.485 | 0 | 0 | 9.511 |
| PROST2004270 | 0 | 0 | 0 | 0 | 0 | 2.173 | 0 |
| PROST2004416 | 0 | 0 | 0 | 0 | 0 | 0 | 1.695 |
| PROST2004570 | 0 | 0 | 0 | 0 | 0 | 13.848 | 0 |
| PROST2005039 | 0 | 0 | 0 | 0 | 0 | 25.460 | 0 |
| PROST2005143 | 0 | 0 | 0 | 0 | 0 | 12.533 | 0 |
| PROST2005793 | 0 | 0 | 0 | 0 | 0 | 7.245 | 0 |
| PROST2006030 | 0 | 0 | 0 | 0 | 0 | 6.990 | 0 |
| PROST2006536 | 0 | 0 | 0 | 0 | 0 | 16.398 | 22.127 |
| PROST2007612 | 0 | 0 | 0 | 0 | 0 | 11.799 | 0 |
| PROST2008268 | 0 | 0 | 0 | 0 | 0 | 34.251 | 0 |
| PROST2008271 | 0 | 0 | 0 | 0 | 0 | 7.240 | 0 |
| PROST2008360 | 0 | 0 | 0 | 0 | 0 | 3.325 | 0 |
| PROST2008770 | 0 | 0 | 0 | 0 | 0 | 0 | 1.945 |
| PROST2010382 | 0 | 0 | 0 | 0 | 85.749 | 0 | 0 |
| PROST2010782 | 0 | 0 | 3.279 | 0 | 0 | 0 | 0 |
| PROST2011038 | 0 | 0 | 0 | 0 | 0 | 0 | 29.914 |
| PROST2011482 | 0 | 0 | 0 | 0 | 0 | 34.251 | 0 |
| PROST2011577 | 0 | 0 | 0 | 0 | 0 | 5.703 | 0 |
| PROST2012007 | 0 | 0 | 0 | 0 | 0 | 2.097 | 0 |
| PROST2012448 | 0 | 0 | 0 | 0 | 0 | 15.073 | 0 |
| PROST2015332 | 0 | 0 | 0 | 0 | 0 | 0 | 6.425 |
| PROST2017529 | 0 | 0 | 0 | 14.958 | 0 | 0 | 0 |
| PROST2018977 | 0 | 0 | 0 | 0 | 0 | 24.007 | 0 |
| PROST2019253 | 0 | 0 | 0 | 0 | 0 | 52.767 | 20.942 |
| PUAEN1000057 | 0 | 0 | 0 | 0 | 0 | 3.793 | 0 |
| PUAEN1000164 | 4.647 | 0 | 0 | 0 | 0 | 0 | 0.992 |
| PUAEN1000239 | 0 | 0 | 0 | 0 | 0 | 5.727 | 0 |
| PUAEN2000312 | 0 | 0 | 0 | 0 | 0 | 16.356 | 0 |
| PUAEN2000374 | 0 | 0 | 0 | 1.886 | 8.770 | 0 | 0 |
| PUAEN2000535 | 0 | 0 | 0 | 0 | 0 | 1.486 | 0 |
| PUAEN2000942 | 0 | 0 | 0 | 0 | 0 | 24.665 | 0 |
| PUAEN2001345 | 0 | 0 | 0 | 0 | 80.232 | 0 | 0 |
| PUAEN2002489 | 0 | 0 | 0 | 0 | 0 | 24.108 | 0 |
| PUAEN2003408 | 0 | 0 | 40.610 | 0 | 0 | 5.564 | 15.015 |
| PUAEN2007044 | 0 | 0 | 0 | 16.894 | 0 | 0 | 0 |
| PUAEN2009655 | 0 | 0 | 49.285 | 0 | 0 | 0 | 0 |
| RECTM1000051 | 0 | 0 | 31.123 | 0 | 0 | 0 | 0 |
| RECTM2000349 | 0 | 0 | 0 | 0 | 0 | 7.826 | 0 |
| SALGL1000157 | 0 | 8.730 | 0 | 1.533 | 0 | 0 | 0.324 |
| SKMUS1000022 | 0 | 0 | 0 | 0 | 11.405 | 0 | 0 |
| SKMUS1000084 | 0 | 0 | 0 | 0 | 0 | 2.845 | 0 |
| SKMUS1000186 | 0 | 0 | 0 | 0 | 0 | 0.742 | 0 |
| SKMUS2000020 | 0 | 0 | 0 | 0 | 0 | 0 | 9.182 |
| SKMUS2000074 | 0 | 0 | 0 | 0 | 0 | 9.448 | 0 |
| SKMUS2000361 | 0 | 0 | 0 | 6.302 | 0 | 0 | 2.666 |
| SKMUS2000380 | 0 | 0 | 0 | 0 | 0 | 0 | 5.406 |
| SKMUS2000484 | 0 | 0 | 0 | 0 | 0 | 0 | 8.755 |
| SKMUS2000690 | 0 | 0 | 65.679 | 0 | 0 | 0 | 0 |
| SKMUS2000902 | 0 | 0 | 0 | 31.874 | 0 | 0 | 0 |
| SKMUS2000931 | 0 | 0 | 0 | 6.414 | 0 | 0 | 1.356 |
| SKMUS2001147 | 0 | 0 | 0 | 0 | 0 | 5.121 | 0 |
| SKMUS2001402 | 0 | 0 | 0 | 0 | 0 | 0 | 10.509 |
| SKMUS2001454 | 0 | 0 | 0 | 0 | 0 | 2.494 | 0.841 |
| SKNMC1000110 | 0 | 0 | 0 | 0 | 0 | 6.689 | 0 |
| SKNMC1000168 | 0 | 0 | 0 | 0 | 22.946 | 0 | 2.088 |
| SKNMC1000229 | 0 | 0 | 0 | 0 | 0 | 9.712 | 0 |
| SKNMC2000065 | 0 | 0 | 0 | 6.362 | 0 | 7.977 | 5.382 |
| SKNMC2000097 | 0 | 0 | 0 | 0 | 0 | 0.823 | 1.111 |
| SKNMC2000305 | 0 | 0 | 0 | 0 | 0 | 0 | 8.781 |
| SKNMC2000356 | 0 | 0 | 0 | 0 | 0 | 16.334 | 0 |
| SKNMC2000635 | 0 | 0 | 0 | 4.228 | 0 | 0 | 0 |
| SKNMC2000649 | 0 | 0 | 0 | 5.377 | 0 | 1.685 | 0 |
| SKNMC2000698 | 0 | 0 | 0 | 0 | 0 | 3.816 | 0 |
| SKNMC2000877 | 0 | 0 | 0 | 0 | 0 | 2.189 | 2.954 |
| SKNSH1000002 | 0 | 0 | 0 | 8.471 | 0 | 0 | 0 |
| SKNSH2000163 | 0 | 0 | 0 | 0 | 0 | 19.605 | 0 |
| SKNSH2000347 | 0 | 0 | 0 | 26.446 | 0 | 0 | 0 |
| SKNSH2000716 | 0 | 0 | 0 | 0 | 0 | 6.404 | 4.320 |
| SKNSH2000819 | 0 | 0 | 0 | 0 | 0 | 4.598 | 0 |
| SKNSH2003528 | 0 | 0 | 40.935 | 0 | 0 | 5.608 | 0 |
| SKNSH2006234 | 0 | 0 | 0 | 20.629 | 0 | 0 | 0 |
| SKNSH2008940 | 0 | 0 | 25.857 | 0 | 0 | 0 | 0 |
| SKNSH2009357 | 0 | 0 | 0 | 0 | 0 | 0 | 23.814 |
| SMINT1000117 | 0 | 0 | 0 | 0 | 0 | 7.290 | 0 |
| SMINT2000007 | 0 | 0 | 0 | 0 | 0 | 0 | 14.994 |
| SMINT2000073 | 0 | 0 | 0 | 0 | 0 | 32.054 | 0 |
| SMINT2000396 | 0 | 0 | 0 | 21.642 | 0 | 6.784 | 0 |
| SMINT2000441 | 0 | 0 | 0 | 2.660 | 0 | 0.834 | 2.250 |
| SMINT2000468 | 0 | 0 | 0 | 0 | 0 | 0 | 5.704 |
| SMINT2000602 | 6.417 | 0 | 7.412 | 0 | 0 | 0 | 0 |
| SMINT2000629 | 0 | 0 | 0 | 0 | 0 | 4.961 | 6.695 |
| SMINT2000694 | 0 | 0 | 0 | 0 | 0 | 0 | 2.963 |
| SMINT2002159 | 0 | 0 | 0 | 40.407 | 0 | 0 | 0 |
| SMINT2002620 | 0 | 0 | 0 | 0 | 0 | 4.186 | 0 |
| SMINT2002689 | 0 | 0 | 0 | 0 | 0 | 0 | 2.930 |
| SMINT2002884 | 43.124 | 0 | 0 | 0 | 0 | 0 | 0 |
| SMINT2003074 | 0 | 0 | 0 | 0 | 0 | 7.597 | 0 |
| SMINT2003169 | 5.491 | 0 | 0 | 0 | 0 | 0 | 0 |
| SMINT2003340 | 0 | 0 | 39.619 | 0 | 0 | 0 | 7.324 |
| SMINT2003505 | 36.765 | 0 | 0 | 0 | 0 | 0 | 0 |
| SMINT2004729 | 0 | 0 | 0 | 0 | 0 | 23.727 | 0 |
| SMINT2004872 | 0 | 0 | 0 | 12.464 | 0 | 0 | 0 |
| SMINT2004972 | 0 | 0 | 0 | 46.681 | 0 | 0 | 19.746 |
| SMINT2005368 | 0 | 0 | 0 | 0 | 0 | 2.170 | 0 |
| SMINT2006716 | 0 | 0 | 0 | 0 | 0 | 0 | 58.556 |
| SMINT2007508 | 0 | 0 | 0 | 0 | 0 | 0 | 41.399 |
| SMINT2008921 | 0 | 0 | 0 | 0 | 0 | 2.050 | 0 |
| SMINT2008960 | 0 | 0 | 9.225 | 0 | 0 | 1.264 | 1.705 |
| SMINT2010084 | 0 | 0 | 0 | 0 | 0 | 0 | 8.566 |
| SMINT2010426 | 0 | 0 | 0 | 31.925 | 0 | 0 | 0 |
| SMINT2010901 | 0 | 0 | 0 | 0 | 0 | 6.488 | 0 |
| SMINT2011588 | 0 | 0 | 0 | 0 | 0 | 34.363 | 0 |
| SMINT2018681 | 48.822 | 0 | 0 | 0 | 0 | 0 | 0 |
| SPLEN1000049 | 0 | 0 | 0 | 0 | 0 | 40.275 | 0 |
| SPLEN1000089 | 0 | 0 | 40.187 | 0 | 27.222 | 0 | 0 |
| SPLEN1000106 | 0 | 0 | 0 | 0 | 0 | 4.300 | 0 |
| SPLEN1000116 | 0 | 0 | 0 | 0 | 13.562 | 0 | 1.234 |
| SPLEN1000166 | 0 | 0 | 0 | 0 | 0 | 12.530 | 2.818 |
| SPLEN2000255 | 0 | 0 | 0 | 0 | 0 | 2.837 | 3.828 |
| SPLEN2000267 | 0 | 0 | 0 | 0 | 0 | 0 | 14.553 |
| SPLEN2000348 | 0 | 0 | 0 | 0 | 0 | 0 | 6.974 |
| SPLEN2000505 | 0 | 0 | 5.683 | 2.484 | 0 | 1.557 | 0 |
| SPLEN2000698 | 0 | 0 | 28.593 | 0 | 0 | 0 | 0 |
| SPLEN2000882 | 0 | 0 | 0 | 10.353 | 0 | 0 | 0 |
| SPLEN2001599 | 0 | 0 | 0 | 0 | 0 | 0 | 17.788 |
| SPLEN2001689 | 0 | 0 | 0 | 0 | 0 | 0 | 34.793 |
| SPLEN2002007 | 0 | 0 | 0 | 0 | 0 | 0 | 47.573 |
| SPLEN2002335 | 0 | 0 | 0 | 0 | 27.746 | 3.741 | 2.524 |
| SPLEN2002467 | 0 | 0 | 0 | 0 | 0 | 6.019 | 0 |
| SPLEN2004078 | 0 | 0 | 0 | 0 | 0 | 27.607 | 0 |
| SPLEN2004555 | 0 | 0 | 0 | 0 | 0 | 3.933 | 2.653 |
| SPLEN2004773 | 16.618 | 0 | 9.597 | 0 | 0 | 2.630 | 3.548 |
| SPLEN2005009 | 0 | 0 | 0 | 0 | 0 | 15.882 | 0 |
| SPLEN2005342 | 0 | 0 | 0 | 0 | 0 | 19.711 | 13.299 |
| SPLEN2005869 | 74.977 | 0 | 0 | 0 | 0 | 0 | 0 |
| SPLEN2006122 | 0 | 0 | 0 | 0 | 23.078 | 0 | 2.099 |
| SPLEN2006133 | 0 | 0 | 0 | 0 | 0 | 1.753 | 0 |
| SPLEN2006143 | 0 | 0 | 0 | 0 | 0 | 4.133 | 0 |
| SPLEN2006232 | 33.489 | 0 | 0 | 0 | 0 | 0 | 0 |
| SPLEN2006305 | 0 | 0 | 0 | 0 | 17.309 | 1.167 | 0 |
| SPLEN2006374 | 0 | 0 | 0 | 0 | 0 | 2.808 | 0 |
| SPLEN2007276 | 0 | 0 | 35.761 | 0 | 0 | 0 | 0 |
| SPLEN2007498 | 0 | 0 | 0 | 0 | 0 | 4.835 | 19.572 |
| SPLEN2007951 | 0 | 0 | 0 | 0 | 0 | 0 | 58.898 |
| SPLEN2008460 | 30.589 | 0 | 0 | 0 | 0 | 0 | 0 |
| SPLEN2009081 | 0 | 0 | 0 | 0 | 0 | 0 | 16.134 |
| SPLEN2010195 | 4.529 | 0 | 5.231 | 2.286 | 0 | 0 | 0 |
| SPLEN2011419 | 0 | 0 | 0 | 14.082 | 0 | 0 | 0 |
| SPLEN2012571 | 0 | 0 | 0 | 0 | 0 | 0 | 7.925 |
| SPLEN2013821 | 87.032 | 0 | 0 | 0 | 0 | 0 | 0 |
| SPLEN2013936 | 0 | 0 | 0 | 0 | 0 | 12.327 | 0 |
| SPLEN2014080 | 55.315 | 0 | 0 | 0 | 0 | 0 | 0 |
| SPLEN2014381 | 0 | 0 | 0 | 0 | 0 | 0 | 74.133 |
| SPLEN2015310 | 0 | 0 | 0 | 0 | 0 | 0 | 1.429 |
| SPLEN2016139 | 29.917 | 0 | 0 | 0 | 0 | 0 | 0 |
| SPLEN2016268 | 0 | 0 | 0 | 2.546 | 0 | 3.991 | 0 |
| SPLEN2016972 | 0 | 0 | 0 | 0 | 0 | 3.746 | 0 |
| SPLEN2017318 | 0 | 0 | 0 | 0 | 0 | 9.374 | 0 |
| SPLEN2018157 | 0 | 0 | 0 | 0 | 0 | 13.368 | 0 |
| SPLEN2018159 | 0 | 0 | 0 | 55.812 | 0 | 0 | 0 |
| SPLEN2019169 | 0 | 0 | 0 | 0 | 0 | 10.459 | 0 |
| SPLEN2019405 | 0 | 0 | 0 | 0 | 0 | 2.646 | 0 |
| SPLEN2019505 | 0 | 0 | 66.106 | 0 | 0 | 9.057 | 12.221 |
| SPLEN2021194 | 0 | 0 | 0 | 0 | 0 | 12.464 | 0 |
| SPLEN2027113 | 0 | 0 | 0 | 9.643 | 0 | 0 | 0 |
| SPLEN2028365 | 0 | 0 | 0 | 0 | 94.030 | 0 | 0 |
| SPLEN2028424 | 0 | 0 | 0 | 0 | 0 | 51.503 | 0 |
| SPLEN2028466 | 0 | 0 | 0 | 0 | 0 | 0 | 1.031 |
| SPLEN2032157 | 0 | 0 | 0 | 0 | 0 | 0 | 14.245 |
| SPLEN2036932 | 0 | 0 | 0 | 0 | 0 | 0 | 21.926 |
| SPLEN2039379 | 0 | 0 | 0 | 0 | 0 | 0 | 7.220 |
| STOMA1000189 | 0 | 0 | 0 | 9.216 | 0 | 0 | 0 |
| STOMA2000395 | 0 | 0 | 0 | 0 | 0 | 0 | 5.322 |
| SYNOV1000124 | 0 | 0 | 0 | 0 | 0 | 6.166 | 1.387 |
| SYNOV2001033 | 0 | 0 | 0 | 3.533 | 16.429 | 0 | 0 |
| SYNOV2001144 | 0 | 0 | 19.072 | 0 | 0 | 0 | 0 |
| SYNOV2001262 | 0 | 0 | 0 | 0 | 0 | 3.854 | 0 |
| SYNOV2001374 | 0 | 0 | 0 | 0 | 0 | 3.384 | 0 |
| SYNOV2008765 | 0 | 96.887 | 0 | 0 | 0 | 0 | 0 |
| SYNOV2009172 | 0 | 0 | 0 | 0 | 14.260 | 0 | 0 |
| SYNOV4007671 | 0 | 0 | 0 | 4.320 | 0 | 1.354 | 1.827 |
| SYNOV4009129 | 0 | 0 | 0 | 0 | 0 | 28.685 | 19.353 |
| T1ESE2000609 | 0 | 0 | 0 | 26.790 | 0 | 0 | 5.666 |
| T1ESE2000904 | 0 | 0 | 0 | 13.606 | 0 | 0 | 5.755 |
| TBAES2009387 | 0 | 0 | 0 | 0 | 0 | 0.988 | 0 |
| TCOLN1000180 | 0 | 0 | 0 | 0 | 0 | 4.523 | 0 |
| TESOP2002273 | 0 | 0 | 0 | 0 | 0 | 7.498 | 0 |
| TESOP2002451 | 0 | 0 | 0 | 0 | 0 | 4.388 | 0 |
| TESOP2007912 | 0 | 0 | 0 | 0 | 0 | 21.261 | 0 |
| TESTI1000023 | 0 | 0 | 0 | 0 | 0 | 0 | 8.362 |
| TESTI2000100 | 0 | 0 | 0 | 0 | 0 | 0 | 48.295 |
| TESTI2000184 | 0 | 0 | 0 | 0 | 0 | 4.177 | 0 |
| TESTI2000238 | 0 | 0 | 0 | 0 | 0 | 58.560 | 0 |
| TESTI2000356 | 0 | 0 | 0 | 0 | 0 | 0 | 43.714 |
| TESTI2001099 | 0 | 0 | 0 | 2.888 | 0 | 3.621 | 2.443 |
| TESTI2001141 | 0 | 0 | 0 | 0 | 0 | 17.445 | 23.540 |
| TESTI2001269 | 0 | 0 | 0 | 3.217 | 0 | 0 | 0 |
| TESTI2001511 | 0 | 0 | 0 | 0 | 47.942 | 0 | 0 |
| TESTI2002149 | 0 | 0 | 0 | 0 | 0 | 6.180 | 0 |
| TESTI2002840 | 0 | 0 | 0 | 0 | 0 | 73.865 | 0 |
| TESTI2003061 | 0 | 0 | 0 | 0 | 0 | 0 | 32.281 |
| TESTI2003413 | 0 | 0 | 0 | 15.344 | 0 | 4.810 | 0 |
| TESTI2003454 | 61.996 | 0 | 0 | 0 | 0 | 0 | 0 |
| TESTI2003533 | 0 | 0 | 0 | 0 | 0 | 1.602 | 2.161 |
| TESTI2004031 | 4.680 | 0 | 0 | 2.363 | 0 | 0.741 | 0 |
| TESTI2004153 | 0 | 0 | 0 | 0 | 0 | 0 | 10.815 |
| TESTI2004295 | 0 | 0 | 0 | 0 | 0 | 0 | 20.413 |
| TESTI2005040 | 0 | 0 | 0 | 0 | 0 | 58.560 | 0 |
| TESTI2005408 | 0 | 0 | 0 | 10.441 | 0 | 0 | 0 |
| TESTI2005564 | 0 | 0 | 0 | 0 | 0 | 0 | 9.129 |
| TESTI2005784 | 0 | 0 | 0 | 17.528 | 0 | 0 | 0 |
| TESTI2005908 | 0 | 0 | 0 | 0 | 0 | 0 | 3.925 |
| TESTI2005981 | 0 | 0 | 0 | 0 | 0 | 57.537 | 0 |
| TESTI2006051 | 0 | 0 | 5.710 | 0 | 0 | 0 | 0 |
| TESTI2006120 | 0 | 0 | 0 | 0 | 0 | 0 | 12.098 |
| TESTI2006453 | 0 | 56.495 | 0 | 0 | 0 | 0 | 0 |
| TESTI2006588 | 0 | 0 | 0 | 0 | 0 | 4.001 | 6.748 |
| TESTI2006748 | 0 | 0 | 0 | 0 | 0 | 12.710 | 8.575 |
| TESTI2006877 | 0 | 0 | 0 | 0 | 0 | 0 | 33.083 |
| TESTI2007407 | 0 | 0 | 0 | 0 | 0 | 5.671 | 0 |
| TESTI2007464 | 0 | 0 | 0 | 0 | 0 | 7.410 | 0 |
| TESTI2007998 | 0 | 0 | 0 | 0 | 0 | 5.842 | 7.883 |
| TESTI2008020 | 0 | 0 | 0 | 0 | 0 | 7.085 | 0 |
| TESTI2008240 | 0 | 0 | 0 | 0 | 0 | 0 | 4.364 |
| TESTI2008394 | 0 | 0 | 0 | 0 | 0 | 73.865 | 0 |
| TESTI2008405 | 60.795 | 0 | 0 | 0 | 0 | 0 | 0 |
| TESTI2009402 | 0 | 0 | 0 | 0 | 0 | 0 | 22.853 |
| TESTI2009520 | 0 | 0 | 0 | 0 | 0 | 0 | 1.870 |
| TESTI2009785 | 0 | 0 | 0 | 0 | 0 | 7.952 | 0 |
| TESTI2009987 | 0 | 0 | 0 | 30.062 | 0 | 0 | 0 |
| TESTI2010513 | 0 | 0 | 0 | 0 | 0 | 0.726 | 1.959 |
| TESTI2010617 | 0 | 0 | 0 | 0 | 0 | 0 | 34.719 |
| TESTI2011680 | 0 | 0 | 0 | 0 | 0 | 27.640 | 0 |
| TESTI2013231 | 0 | 0 | 0 | 0 | 0 | 3.676 | 4.960 |
| TESTI2013264 | 0 | 0 | 0 | 0 | 0 | 0 | 62.629 |
| TESTI2013295 | 0 | 0 | 0 | 0 | 0 | 4.921 | 0 |
| TESTI2014505 | 0 | 0 | 0 | 0 | 0 | 36.406 | 0 |
| TESTI2014780 | 0 | 0 | 0 | 0 | 0 | 52.464 | 0 |
| TESTI2015213 | 0 | 0 | 0 | 0 | 14.063 | 1.896 | 2.559 |
| TESTI2015335 | 0 | 0 | 0 | 0 | 0 | 0 | 55.970 |
| TESTI2015626 | 0 | 0 | 4.435 | 0 | 0 | 0.608 | 0 |
| TESTI2018014 | 0 | 0 | 0 | 0 | 0 | 0 | 9.609 |
| TESTI2018462 | 0 | 0 | 0 | 0 | 0 | 5.221 | 0 |
| TESTI2020510 | 0 | 0 | 0 | 0 | 0 | 13.364 | 0 |
| TESTI2021124 | 0 | 0 | 0 | 0 | 0 | 10.559 | 0 |
| TESTI2021315 | 0 | 0 | 0 | 0 | 0 | 37.439 | 0 |
| TESTI2024864 | 0 | 0 | 0 | 0 | 0 | 51.017 | 0 |
| TESTI2025454 | 0 | 0 | 0 | 0 | 0 | 20.808 | 0 |
| TESTI2026525 | 0 | 0 | 0 | 0 | 0 | 16.076 | 0 |
| TESTI2027496 | 0 | 0 | 0 | 0 | 0 | 17.357 | 0 |
| TESTI2034940 | 0 | 0 | 0 | 0 | 0 | 0.481 | 1.299 |
| TESTI2036969 | 0 | 0 | 0 | 21.174 | 0 | 19.913 | 0 |
| TESTI2046456 | 0 | 0 | 6.242 | 2.728 | 0 | 0.855 | 2.308 |
| TESTI2053723 | 0 | 0 | 0 | 0 | 0 | 0 | 22.570 |
| TESTI4000014 | 0 | 0 | 0 | 0 | 9.787 | 1.980 | 0.890 |
| TESTI4002072 | 0 | 0 | 0 | 0 | 0 | 6.169 | 0 |
| TESTI4002799 | 0 | 0 | 0 | 0 | 12.102 | 0 | 0 |
| TESTI4003703 | 0 | 0 | 0 | 0 | 0 | 8.175 | 22.061 |
| TESTI4004626 | 0 | 0 | 0 | 0 | 0 | 0 | 41.040 |
| TESTI4005857 | 0 | 0 | 0 | 0 | 0 | 0 | 79.225 |
| TESTI4009286 | 0 | 0 | 0 | 0 | 39.728 | 1.339 | 0 |
| TESTI4009454 | 0 | 0 | 0 | 0 | 0 | 0 | 10.019 |
| TESTI4010851 | 0 | 0 | 7.372 | 0 | 0 | 5.050 | 6.814 |
| TESTI4010979 | 0 | 0 | 0 | 0 | 0 | 0 | 48.982 |
| TESTI4013441 | 1.831 | 0 | 0 | 1.849 | 0 | 0.290 | 0.391 |
| TESTI4014175 | 0 | 0 | 0 | 0 | 0 | 49.352 | 0 |
| TESTI4015204 | 0 | 0 | 0 | 0 | 0 | 48.509 | 0 |
| TESTI4019843 | 0 | 0 | 0 | 0 | 0 | 73.865 | 0 |
| TESTI4037156 | 0 | 0 | 0 | 0 | 0 | 2.556 | 1.380 |
| TESTI4043140 | 0 | 0 | 0 | 0 | 0 | 5.123 | 0 |
| THYMU1000002 | 0 | 0 | 0 | 3.488 | 0 | 3.280 | 1.476 |
| THYMU1000016 | 0 | 0 | 10.422 | 0 | 0 | 0.714 | 0 |
| THYMU1000017 | 0 | 0 | 0 | 0 | 0 | 0 | 74.935 |
| THYMU1000041 | 0 | 0 | 0 | 0 | 0 | 4.393 | 0 |
| THYMU1000103 | 0 | 0 | 0 | 0 | 0 | 0 | 4.395 |
| THYMU1000144 | 0 | 0 | 0 | 0 | 0 | 11.947 | 19.344 |
| THYMU1000359 | 6.258 | 0 | 7.228 | 0 | 0 | 0 | 0 |
| THYMU1000374 | 0 | 0 | 0 | 0 | 0 | 0 | 3.734 |
| THYMU1000490 | 0 | 0 | 0 | 0 | 0 | 21.187 | 0 |
| THYMU1000499 | 0 | 0 | 0 | 0 | 0 | 0 | 14.228 |
| THYMU2000382 | 0 | 0 | 0 | 0 | 0 | 0 | 3.022 |
| THYMU2000436 | 0 | 0 | 0 | 0 | 0 | 0 | 2.297 |
| THYMU2000672 | 0 | 0 | 0 | 0 | 0 | 41.789 | 0 |
| THYMU2000684 | 0 | 0 | 0 | 0 | 0 | 0 | 10.379 |
| THYMU2000946 | 0 | 0 | 0 | 0 | 0 | 0 | 3.607 |
| THYMU2001926 | 0 | 0 | 0 | 0 | 0 | 35.857 | 0 |
| THYMU2002162 | 0 | 0 | 0 | 0 | 0 | 20.141 | 27.178 |
| THYMU2002450 | 0 | 0 | 0 | 0 | 0 | 39.856 | 0 |
| THYMU2002583 | 12.101 | 0 | 0 | 3.054 | 0 | 1.915 | 0 |
| THYMU2002756 | 0 | 0 | 0 | 0 | 0 | 0 | 18.250 |
| THYMU2002841 | 0 | 0 | 0 | 17.103 | 0 | 5.362 | 0 |
| THYMU2002983 | 34.939 | 0 | 0 | 0 | 0 | 0 | 0 |
| THYMU2003012 | 10.231 | 0 | 0 | 10.329 | 0 | 0 | 0 |
| THYMU2003419 | 0 | 0 | 0 | 0 | 0 | 0 | 2.504 |
| THYMU2003446 | 0 | 0 | 0 | 0 | 0 | 4.406 | 5.946 |
| THYMU2003542 | 0 | 0 | 0 | 0 | 0 | 3.992 | 0 |
| THYMU2003891 | 1.703 | 0 | 0 | 0 | 3.998 | 0 | 0 |
| THYMU2003981 | 18.291 | 0 | 21.126 | 0 | 0 | 0 | 0 |
| THYMU2004152 | 0 | 0 | 0 | 0 | 0 | 7.337 | 0 |
| THYMU2004344 | 0 | 0 | 0 | 0 | 0 | 0 | 3.185 |
| THYMU2004410 | 0 | 0 | 0 | 0 | 0 | 0 | 4.776 |
| THYMU2004452 | 0 | 0 | 0 | 0 | 0 | 0 | 57.616 |
| THYMU2004733 | 0 | 0 | 0 | 33.006 | 0 | 0 | 0 |
| THYMU2004916 | 0 | 0 | 0 | 0 | 42.760 | 0 | 0 |
| THYMU2005546 | 0 | 0 | 0 | 3.223 | 0 | 2.021 | 0 |
| THYMU2006505 | 0 | 0 | 0 | 0 | 0 | 5.044 | 10.209 |
| THYMU2006813 | 0 | 0 | 0 | 0 | 0 | 8.770 | 3.945 |
| THYMU2007112 | 0 | 0 | 0 | 0 | 0 | 16.898 | 0 |
| THYMU2007415 | 0 | 0 | 0 | 0 | 0 | 8.941 | 0 |
| THYMU2007729 | 0 | 0 | 0 | 0 | 0 | 0 | 12.184 |
| THYMU2007802 | 0 | 0 | 0 | 0 | 0 | 0 | 74.935 |
| THYMU2008727 | 0 | 0 | 0 | 87.605 | 0 | 0 | 0 |
| THYMU2009658 | 0 | 0 | 4.723 | 0 | 0 | 0 | 0 |
| THYMU2011482 | 0 | 0 | 0 | 0 | 0 | 11.342 | 15.304 |
| THYMU2011736 | 0 | 0 | 0 | 0 | 0 | 0 | 74.935 |
| THYMU2012024 | 0 | 0 | 0 | 0 | 0 | 5.505 | 0 |
| THYMU2013136 | 0 | 0 | 0 | 0 | 0 | 0 | 4.078 |
| THYMU2013916 | 0 | 0 | 0 | 0 | 0 | 4.098 | 2.765 |
| THYMU2014167 | 0 | 0 | 0 | 0 | 0 | 10.152 | 0 |
| THYMU2015762 | 0 | 0 | 0 | 0 | 27.166 | 0 | 0 |
| THYMU2016968 | 86.295 | 0 | 0 | 0 | 0 | 0 | 0 |
| THYMU2017601 | 0 | 0 | 0 | 0 | 0 | 13.046 | 0 |
| THYMU2018028 | 0 | 0 | 0 | 0 | 0 | 0 | 74.935 |
| THYMU2027125 | 0 | 0 | 0 | 0 | 0 | 0 | 0.446 |
| THYMU2034374 | 0 | 0 | 0 | 0 | 0 | 23.239 | 0 |
| THYMU2036215 | 0 | 0 | 0 | 0 | 0 | 0 | 57.348 |
| THYMU3001077 | 0 | 0 | 0 | 0 | 0 | 0 | 74.935 |
| THYMU3013386 | 0 | 0 | 0 | 0 | 0 | 1.383 | 0 |
| THYMU3015759 | 0 | 0 | 0 | 0 | 0 | 2.080 | 0 |
| THYMU3032798 | 0 | 0 | 26.074 | 0 | 0 | 0 | 0 |
| THYMU3033626 | 0 | 0 | 0 | 0 | 0 | 10.384 | 0 |
| TKIDN1000192 | 0 | 0 | 0 | 0 | 0 | 10.206 | 0 |
| TKIDN2002738 | 0 | 0 | 0 | 0 | 0 | 0.775 | 0 |
| TKIDN2005487 | 0 | 0 | 9.687 | 0 | 0 | 0 | 0 |
| TKIDN2009641 | 0 | 0 | 0 | 0 | 0 | 21.363 | 0 |
| TKIDN2011289 | 0 | 0 | 0 | 0 | 0 | 11.044 | 14.902 |
| TKIDN2015423 | 7.432 | 0 | 0 | 0 | 0 | 0 | 4.761 |
| TLIVE2000979 | 0 | 0 | 0 | 0 | 0 | 0 | 26.611 |
| TLIVE2002046 | 0 | 0 | 0 | 0 | 0 | 3.353 | 4.524 |
| TRACH1000011 | 0 | 0 | 0 | 0 | 0 | 13.599 | 0 |
| TRACH1000030 | 0 | 0 | 0 | 0 | 0 | 2.549 | 3.440 |
| TRACH1000063 | 25.109 | 0 | 0 | 0 | 0 | 0 | 0 |
| TRACH1000181 | 0 | 0 | 0 | 0 | 0 | 0 | 11.810 |
| TRACH2000079 | 0 | 0 | 0 | 0 | 0 | 0 | 2.701 |
| TRACH2000248 | 0 | 0 | 0 | 0 | 0 | 9.022 | 3.478 |
| TRACH2000321 | 0 | 0 | 0 | 5.791 | 0 | 3.631 | 1.225 |
| TRACH2000359 | 0 | 0 | 0 | 0 | 0 | 0 | 7.434 |
| TRACH2000461 | 0 | 0 | 0 | 0 | 0 | 3.168 | 0 |
| TRACH2000559 | 0 | 0 | 0 | 0 | 0 | 7.195 | 0 |
| TRACH2000660 | 0 | 0 | 0 | 0 | 0 | 23.431 | 0 |
| TRACH2000780 | 10.204 | 0 | 0 | 0 | 0 | 0 | 0 |
| TRACH2000920 | 0 | 0 | 0 | 0 | 0 | 12.249 | 8.264 |
| TRACH2000926 | 0 | 0 | 0 | 0 | 0 | 0 | 6.955 |
| TRACH2000959 | 0 | 0 | 0 | 0 | 0 | 0.451 | 1.217 |
| TRACH2000972 | 0 | 0 | 7.991 | 0 | 0 | 1.095 | 0 |
| TRACH2001021 | 4.888 | 0 | 11.292 | 0 | 0 | 0 | 0 |
| TRACH2001109 | 0 | 0 | 0 | 0 | 0 | 2.707 | 1.043 |
| TRACH2001289 | 0 | 0 | 0 | 2.003 | 0 | 8.163 | 2.542 |
| TRACH2001314 | 0 | 0 | 0 | 0 | 0 | 3.377 | 0 |
| TRACH2001428 | 0 | 84.729 | 0 | 0 | 0 | 2.332 | 0 |
| TRACH2001432 | 0 | 0 | 0 | 0 | 0 | 4.110 | 2.773 |
| TRACH2001443 | 0 | 0 | 0 | 0 | 0 | 17.167 | 0 |
| TRACH2001463 | 0 | 0 | 0 | 0 | 0 | 11.313 | 7.633 |
| TRACH2001478 | 0 | 0 | 0 | 3.421 | 0 | 0 | 0 |
| TRACH2001523 | 0 | 0 | 22.925 | 0 | 0 | 3.141 | 0 |
| TRACH2001612 | 0 | 0 | 0 | 0 | 0 | 7.380 | 9.958 |
| TRACH2001810 | 0 | 0 | 0 | 0 | 0 | 7.173 | 5.808 |
| TRACH2002100 | 0 | 0 | 0 | 0 | 0 | 0 | 42.753 |
| TRACH2002537 | 0 | 0 | 0 | 5.465 | 0 | 5.140 | 0 |
| TRACH2002803 | 0 | 0 | 0 | 0 | 0 | 7.700 | 0 |
| TRACH2003272 | 0 | 0 | 0 | 0 | 0 | 6.845 | 9.236 |
| TRACH2003347 | 0 | 0 | 0 | 0 | 0 | 2.935 | 3.960 |
| TRACH2005811 | 0 | 0 | 0 | 0 | 0 | 1.948 | 7.887 |
| TRACH2007816 | 0 | 0 | 0 | 0 | 0 | 18.443 | 0 |
| TRACH2008081 | 0 | 85.762 | 0 | 0 | 0 | 0 | 0 |
| TRACH2008300 | 0 | 0 | 0 | 0 | 0 | 3.136 | 0 |
| TRACH2008472 | 0 | 0 | 0 | 9.247 | 0 | 0 | 0 |
| TRACH2011113 | 0 | 0 | 0 | 0 | 0 | 8.722 | 23.539 |
| TRACH2011894 | 0 | 0 | 0 | 0 | 0 | 32.856 | 0 |
| TRACH2013123 | 0 | 0 | 0 | 0 | 0 | 22.218 | 0 |
| TRACH2013552 | 0 | 0 | 0 | 0 | 0 | 0 | 25.898 |
| TRACH2014077 | 0 | 0 | 0 | 0 | 0 | 6.284 | 0 |
| TRACH2014124 | 12.051 | 0 | 0 | 0 | 0 | 3.814 | 5.146 |
| TRACH2015823 | 0 | 0 | 0 | 0 | 0 | 0 | 5.453 |
| TRACH2018446 | 0 | 0 | 0 | 0 | 0 | 15.452 | 0 |
| TRACH2023299 | 74.521 | 0 | 0 | 0 | 0 | 0 | 0 |
| TRACH2025535 | 6.778 | 0 | 0 | 0 | 0 | 3.218 | 0 |
| TRACH3002192 | 0 | 0 | 0 | 3.675 | 0 | 2.304 | 3.109 |
| TRACH3002752 | 0 | 0 | 0 | 0 | 0 | 9.436 | 0 |
| TRACH3004068 | 0 | 0 | 0 | 0 | 0 | 0 | 3.553 |
| TRACH3007625 | 0 | 0 | 0 | 6.928 | 0 | 0 | 0 |
| TUTER2000904 | 0 | 0 | 0 | 0 | 0 | 5.158 | 0 |
| UMVEN1000156 | 0 | 0 | 0 | 0 | 0 | 0 | 2.576 |
| UMVEN2000152 | 0 | 0 | 0 | 0 | 0 | 1.455 | 0 |
| UMVEN2000453 | 0 | 0 | 0 | 0 | 0 | 0 | 1.302 |
| UTERU1000106 | 0 | 0 | 0 | 0 | 0 | 10.646 | 14.365 |
| UTERU1000182 | 0 | 0 | 0 | 0 | 0 | 0 | 2.022 |
| UTERU2000095 | 0 | 0 | 0 | 0 | 0 | 1.529 | 0 |
| UTERU2000197 | 0 | 0 | 0 | 0 | 0 | 60.769 | 0 |
| UTERU2000300 | 0 | 0 | 0 | 0 | 0 | 9.112 | 0 |
| UTERU2000424 | 0 | 0 | 0 | 0 | 0 | 3.138 | 4.234 |
| UTERU2000542 | 0 | 0 | 0 | 0 | 0 | 0 | 22.508 |
| UTERU2001607 | 0 | 0 | 0 | 0 | 0 | 0 | 7.355 |
| UTERU2002294 | 0 | 0 | 0 | 0 | 0 | 0 | 13.576 |
| UTERU2002662 | 0 | 0 | 0 | 0 | 0 | 3.287 | 4.435 |
| UTERU2004461 | 0 | 0 | 0 | 0 | 0 | 0 | 67.639 |
| UTERU2004664 | 0 | 0 | 0 | 0 | 0 | 0 | 4.230 |
| UTERU2004807 | 0 | 0 | 0 | 0 | 0 | 0 | 2.504 |
| UTERU2004929 | 0 | 0 | 0 | 0 | 0 | 21.446 | 0 |
| UTERU2005621 | 0 | 0 | 0 | 0 | 0 | 0 | 5.619 |
| UTERU2006137 | 90.731 | 0 | 0 | 0 | 0 | 0 | 0 |
| UTERU2007253 | 0 | 0 | 0 | 0 | 0 | 38.074 | 0 |
| UTERU2008085 | 0 | 0 | 0 | 0 | 0 | 0.167 | 0.225 |
| UTERU2009510 | 0 | 0 | 0 | 0 | 0 | 27.767 | 0 |
| UTERU2009972 | 0 | 0 | 0 | 0 | 0 | 13.090 | 0 |
| UTERU2010417 | 0 | 0 | 0 | 1.858 | 0 | 1.165 | 0.786 |
| UTERU2011906 | 0 | 0 | 0 | 0 | 0 | 0 | 17.000 |
| UTERU2012230 | 0 | 0 | 0 | 0 | 0 | 0 | 4.387 |
| UTERU2012286 | 0 | 0 | 0 | 0 | 0 | 0 | 6.316 |
| UTERU2013078 | 0 | 0 | 0 | 0 | 0 | 0 | 34.190 |
| UTERU2013586 | 0 | 0 | 0 | 0 | 0 | 24.344 | 0 |
| UTERU2014167 | 0 | 61.187 | 0 | 0 | 0 | 1.684 | 0 |
| UTERU2014464 | 0 | 0 | 0 | 0 | 0 | 0 | 33.653 |
| UTERU2014548 | 0 | 0 | 0 | 0 | 0 | 60.769 | 0 |
| UTERU2014668 | 0 | 0 | 0 | 0 | 0 | 60.769 | 0 |
| UTERU2015653 | 0 | 0 | 0 | 3.438 | 0 | 0 | 0 |
| UTERU2016799 | 0 | 0 | 0 | 0 | 0 | 10.744 | 0 |
| UTERU2017613 | 0 | 0 | 0 | 0 | 0 | 0 | 51.268 |
| UTERU2019005 | 0 | 0 | 0 | 0 | 0 | 11.932 | 0 |
| UTERU2023175 | 0 | 0 | 0 | 0 | 0 | 8.252 | 0 |
| UTERU2027369 | 0 | 0 | 0 | 0 | 0 | 60.769 | 0 |
| UTERU3015011 | 0 | 0 | 0 | 0 | 0 | 0 | 17.593 |

[0682] Genes whose expression levels were negligibly low in each of the above-described libraries are shown with their clone names below.

[0683] 3NB691000018, 3NB691000085, 3NB691000113, 3NB691000116, 3NB691000129, 3NB691000191, 3NB692000012, 3NB692000029, 3NB692000102, 3NB692000154, 3NB692000276, 3NB692000305, 3NB692000429, 3NB692000529, 3NB692000973, 3NB692001002, 3NB692001034, 3NB692001040, 3NB692001123, 3NB692001267, 3NB692001288, 3NB692001339, 3NB692001349, 3NB692001366, 3NB692001408, 3NB692001433, 3NB692001442, 3NB692001459, 3NB692001471, 3NB692001496, 3NB692001501, 3NB692001507, 3NB692001511, 3NB692001519, 3NB692001520, 3NB692001528, 3NB692001538, 3NB692001548, 3NB692001557, 3NB692001637, 3NB692001719, 3NB692001853, 3NB692001861, 3NB692002051, 3NB692002365, 3NB692002685, 3NB692002806, 3NB692003538, 3NB692004045, 3NB692004724, 3NB692005439, 3NB692008178, 3NB692008729, ACTVT2000380, ADIPS1000064, ADIPS2000069, ADIPS2000088, ADIPS2000245, ADRGL1000038, ADRGL1000067, ADRGL1000111, ADRGL1000144, ADRGL1000147, ADRGL1000160, ADRGL1000165, ADRGL1000182, ADRGL2000042, ADRGL2000056, ADRGL2000064, ADRGL2000074, ADRGL2000085, ADRGL2000117, ADRGL2000142, ADRGL2000172, ADRGL2000248, ADRGL2000261, ADRGL2000323, ADRGL2000328, ADRGL2000353, ADRGL2000384, ADRGL2000428, ADRGL2000636, ADRGL2000644, ADRGL2000968, ADRGL2001119, ADRGL2001229, ADRGL2001287, ADRGL2001301, ADRGL2001354, ADRGL2001554, ADRGL2001651, ADRGL2001756, ADRGL2001830, ADRGL2001836, ADRGL2001854, ADRGL2002013, ADRGL2002029, ADRGL2002191, ADRGL2002260, ADRGL2002392, ADRGL2002679, ADRGL2002753, ADRGL2002857, ADRGL2003017, ADRGL2003329, ADRGL2003552, ADRGL2003585, ADRGL2003638, ADRGL2003684, ADRGL2003773, ADRGL2003785, ADRGL2004031, ADRGL2004077, ADRGL2004451, ADRGL2004459, ADRGL2004708, ADRGL2004724, ADRGL2004749, ADRGL2004770, ADRGL2004777, ADRGL2004833, ADRGL2005336, ADRGL2005564, ADRGL2005756, ADRGL2005838, ADRGL2005926, ADRGL2005961, ADRGL2006034, ADRGL2006124, ADRGL2006177, ADRGL2006193, ADRGL2006377, ADRGL2006677, ADRGL2006732, ADRGL2006767, ADRGL2006817, ADRGL2006846, ADRGL2006886, ADRGL2007080, ADRGL2007125, ADRGL2007283, ADRGL2007313, ADRGL2007357, ADRGL2007636, ADRGL2007651, ADRGL2007810, ADRGL2007877, ADRGL2007906, ADRGL2007974, ADRGL2008023, ADRGL2008331, ADRGL2008337, ADRGL2008535, ADRGL2008966, ADRGL2009146, ADRGL2009324, ADRGL2009489, ADRGL2009533, ADRGL2009691, ADRGL2009755, ADRGL2010152, ADRGL2010315, ADRGL2010594, ADRGL2010860, ADRGL2010974, ADRGL2011190, ADRGL2011330, ADRGL2012038, ADRGL2012179, AHMSC1000138, ASTRO1000009, ASTRO1000018, ASTRO1000029, ASTRO1000096, ASTRO2000011, ASTRO2000095, ASTRO2000191, ASTRO2000278, ASTRO2000372, ASTRO2000381, ASTRO2000403, ASTRO2000417, ASTRO2000480, ASTRO2000482, ASTRO2000533, ASTRO2000653, ASTRO2000662, ASTRO2000725, ASTRO2000801, ASTRO2000914, ASTRO2001001, ASTRO2001008, ASTRO2001076, ASTRO2001088, ASTRO2001107, ASTRO2001122, ASTRO2001227, ASTRO2001249, ASTRO2001480, ASTRO2001806, ASTRO2002024, ASTRO2002035, ASTRO2002064, ASTRO2002459, ASTRO2002571, ASTRO2002632, ASTRO2002659, ASTRO2002693, ASTRO2002720, ASTRO2002733, ASTRO2002743, ASTRO2002842, ASTRO2003024, ASTRO2003316, ASTRO2003574, ASTRO2003581, ASTRO2003632, ASTRO2003740, ASTRO2003840, ASTRO2003925, ASTRO2003960, ASTRO2004051, ASTRO2004177, ASTRO2004217, ASTRO2004297, ASTRO2004584, ASTRO2004628, ASTRO2004751, ASTRO2004877, ASTRO2005008, ASTRO2005081, ASTRO2005096, ASTRO2005242, ASTRO2005273, ASTRO2005343, ASTRO2005360, ASTRO2005413, ASTRO2005423, ASTRO2005557, ASTRO2005575, ASTRO2005593, ASTRO2005726, ASTRO2005863, ASTRO2005896, ASTRO2005902, ASTRO2006356, ASTRO2006475, ASTRO2006732, ASTRO2006747, ASTRO2006952, ASTRO2007221, ASTRO2007377, ASTRO2007515, ASTRO2007578, ASTRO2007643, ASTRO2007666, ASTRO2007956, ASTRO2007962, ASTRO2008040, ASTRO2008216, ASTRO2008239, ASTRO2008409, ASTRO2008425, ASTRO2008508, ASTRO2008777, ASTRO2008895, ASTRO2008960, ASTRO2009068, ASTRO2009118, ASTRO2009177, ASTRO2009333, ASTRO2009458, ASTRO2009526, ASTRO2009879, ASTRO2010072, ASTRO2010582, ASTRO2010615, ASTRO2010799, ASTRO2010962, ASTRO2010996, ASTRO2011149, ASTRO2011426, ASTRO2011437, ASTRO2011461, ASTRO2011834, ASTRO2011893, ASTRO2013124, ASTRO2013671, ASTRO2013802, ASTRO2014135, ASTRO2014174, ASTRO2014211, ASTRO2014363, ASTRO2014392, ASTRO2014498, ASTRO2014561, ASTRO2014576, ASTRO2014923, ASTRO2014961, ASTRO2015162, ASTRO2015185, ASTRO2015328, ASTRO2015987, ASTRO2016044, ASTRO2016114, ASTRO2016148, ASTRO2016681, ASTRO2016819, ASTRO2016847, ASTRO2016892, ASTRO2017348, ASTRO2017627, ASTRO2018169, ASTRO2018373, ASTRO2018540, ASTRO2019039, ASTRO2019171, ASTRO3000154, ASTRO3000172, ASTRO3000177, ASTRO3000301, ASTRO3000474, ASTRO3000482, BEAST2000454, BGGI11000123, BGGI11000193, BGGI11000285, BGGI12000022, BGGI12000067, BGGI12000161, BGGI12000533, BGGI12000544, BGGI12000616, BGGI12000684, BGGI12000693, BGGI12000839, BGGI12001002, BGGI12001241, BGGI12001247, BGGI12001714, BLADE1000176, BLADE2000181, BLADE2000256, BLADE2000340, BLADE2000389, BLADE2000463, BLADE2000492, BLADE2000579, BLADE2000640, BLADE2000866, BLADE2000938, BLADE2001031, BLADE2001133, BLADE2001138, BLADE2001141, BLADE2001371, BLADE2001458, BLADE2001575, BLADE2001753, BLADE2001935, BLADE2001940, BLADE2001987, BLADE2002073, BLADE2002310, BLADE2002730, BLADE2002738, BLADE2002744, BLADE2002782, BLADE2002947, BLADE2002972, BLADE2003474, BLADE2003916, BLADE2004089, BLADE2004345, BLADE2004389, BLADE2004462, BLADE2004628, BLADE2004670, BLADE2004722, BLADE2004849, BLADE2005036, BLADE2005038, BLADE2005229, BLADE2005459, BLADE2005792, BLADE2006043, BLADE2006415, BLADE2006607, BLADE2006826, BLADE2006830, BLADE2006849, BLADE2006947, BLADE2007033, BLADE2007043, BLADE2007589, BLADE2007666, BLADE2007722, BLADE2007735, BLADE2007744, BLADE2007799, BLADE2007923, BLADE2007935, BLADE2007958, BLADE2008281, BLADE2008398, BLADE2008454, BLADE2008479, BLADE2008539, BLADE2008809, BLADE2008995, BLADE2009452, BLADE2009479, BLADE2009593, BNGH41000104, BNGH41000118, BNGH41000137, BNGH41000153, BNGH41000169, BNGH41000177, BNGH41000190, BNGH41000198, BNGH41000216, BNGH41000235, BNGH42000130, BNGH42000132, BNGH42000360, BNGH42000405, BNGH42000532, BNGH42000675, BNGH42000791, BNGH42000815, BNGH42000994, BNGH42001247, BNGH42001406, BNGH42001576, BNGH42001724, BNGH42002168, BNGH42002244, BNGH42002387, BNGH42002487, BNGH42002489, BNGH42003529, BNGH42003570, BNGH42003641, BNGH42004076, BNGH42004291, BNGH42004538, BNGH42004679, BNGH42005017, BNGH42005235, BNGH42005504, BNGH42006226, BNGH42006234, BNGH42007037, BNGH42007366, BNGH42007594, BNGH42007798, BNGH42008199, BNGH42008510, BNGH42008649, BNGH42008743, BNGH42008832, BNGH42008850, BNGH42008943, BNGH42009021, BRACE1000020, BRACE1000047, BRACE1000051, BRACE1000065, BRACE1000070, BRACE1000073, BRACE1000084, BRACE1000092, BRACE1000101, BRACE1000114, BRACE1000124, BRACE1000131, BRACE1000132, BRACE1000166, BRACE1000186, BRACE1000258, BRACE1000451, BRACE1000475, BRACE1000572, BRACE2000061, BRACE2000077, BRACE2000078, BRACE2000100, BRACE2000109, BRACE2000141, BRACE2000148, BRACE2000183, BRACE2000229, BRACE2000232, BRACE2000245, BRACE2000256, BRACE2000266, BRACE2000267, BRACE2000280, BRACE2000300, BRACE2000331, BRACE2000332, BRACE2000347, BRACE2000351, BRACE2000368, BRACE2000392, BRACE2000441, BRACE2000487, BRACE2000489, BRACE2000505, BRACE2000525, BRACE2000526, BRACE2000531, BRACE2000545, BRACE2000553, BRACE2000565, BRACE2000577, BRACE2000640, BRACE2000650, BRACE2000677, BRACE2000698, BRACE2000718, BRACE2000733, BRACE2000743, BRACE2000753, BRACE2000815, BRACE2000864, BRACE2000885, BRACE2000893, BRACE2000905, BRACE2000936, BRACE2000947, BRACE2000965, BRACE2000969, BRACE2000988, BRACE2001017, BRACE2001065, BRACE2001070, BRACE2001094, BRACE2001107, BRACE2001143, BRACE2001151, BRACE2001188, BRACE2001191, BRACE2001197, BRACE2001236, BRACE2001239, BRACE2001269, BRACE2001312, BRACE2001313, BRACE2001330, BRACE2001340, BRACE2001352, BRACE2001353, BRACE2001374, BRACE2001375, BRACE2001423, BRACE2001424, BRACE2001445, BRACE2001453, BRACE2001455, BRACE2001477, BRACE2001492, BRACE2001496, BRACE2001508, BRACE2001534, BRACE2001543, BRACE2001564, BRACE2001588, BRACE2001607, BRACE2001626, BRACE2001673, BRACE2001677, BRACE2001692, BRACE2001705, BRACE2001709, BRACE2001711, BRACE2001726, BRACE2001733, BRACE2001737, BRACE2001742, BRACE2001777, BRACE2001779, BRACE2001834, BRACE2001855, BRACE2001859, BRACE2001865, BRACE2001872, BRACE2001881, BRACE2001898, BRACE2001923, BRACE2001942, BRACE2001944, BRACE2001954, BRACE2001971, BRACE2001972, BRACE2001973, BRACE2002026, BRACE2002034, BRACE2002081, BRACE2002139, BRACE2002142, BRACE2002151, BRACE2002157, BRACE2002176, BRACE2002202, BRACE2002206, BRACE2002227, BRACE2002260, BRACE2002297, BRACE2002304, BRACE2002356, BRACE2002392, BRACE2002394, BRACE2002409, BRACE2002431, BRACE2002444, BRACE2002458, BRACE2002467, BRACE2002468, BRACE2002495, BRACE2002582, BRACE2002585, BRACE2002589, BRACE2002590, BRACE2002606, BRACE2002613, BRACE2002614, BRACE2002617, BRACE2002623, BRACE2002635, BRACE2002649, BRACE2002661, BRACE2002676, BRACE2002677, BRACE2002685, BRACE2002695, BRACE2002707, BRACE2002736, BRACE2002752, BRACE2002755, BRACE2002762, BRACE2002772, BRACE2002792, BRACE2002796, BRACE2002803, BRACE2002807, BRACE2002812, BRACE2002834, BRACE2002849, BRACE2002857, BRACE2002884, BRACE2002896, BRACE2002948, BRACE2003078, BRACE2003097, BRACE2003168, BRACE2003199, BRACE2003210, BRACE2003269, BRACE2003285, BRACE2003304, BRACE2003319, BRACE2003398, BRACE2003420, BRACE2003428, BRACE2003431, BRACE2003512, BRACE2003516, BRACE2003539, BRACE2003540, BRACE2003594, BRACE2003598, BRACE2003609, BRACE2003614, BRACE2003628, BRACE2003639, BRACE2003700, BRACE2003713, BRACE2003766, BRACE2003788, BRACE2003800, BRACE2003802, BRACE2003825, BRACE2003845, BRACE2003846, BRACE2003847, BRACE2003848, BRACE2003873, BRACE2003885, BRACE2003887, BRACE2003905, BRACE2003928, BRACE2003954, BRACE2003982, BRACE2003987, BRACE2005034, BRACE2005047, BRACE2005063, BRACE2005083, BRACE2005090, BRACE2005099, BRACE2005118, BRACE2005124, BRACE2005138, BRACE2005160, BRACE2005169, BRACE2005189, BRACE2005193, BRACE2005196, BRACE2005198, BRACE2005216, BRACE2005243, BRACE2005253, BRACE2005290, BRACE2005298, BRACE2005328, BRACE2005329, BRACE2005337, BRACE2005348, BRACE2005363, BRACE2005395, BRACE2005408, BRACE2005433, BRACE2005434, BRACE2005448, BRACE2005450, BRACE2005453, BRACE2005457, BRACE2005460, BRACE2005489, BRACE2005518, BRACE2005556, BRACE2005562, BRACE2005624, BRACE2005642, BRACE2005661, BRACE2005667, BRACE2005731, BRACE2005742, BRACE2005762, BRACE2005773, BRACE2005787, BRACE2005795, BRACE2005800, BRACE2005858, BRACE2005869, BRACE2005875, BRACE2005881, BRACE2005898, BRACE2005904, BRACE2005906, BRACE2005907, BRACE2005911, BRACE2005949, BRACE2005981, BRACE2005991, BRACE2006084, BRACE2006089, BRACE2006102, BRACE2006105, BRACE2006122, BRACE2006137, BRACE2006143, BRACE2006162, BRACE2006167, BRACE2006174, BRACE2006240, BRACE2006245, BRACE2006249, BRACE2006274, BRACE2006281, BRACE2006298, BRACE2006363, BRACE2006378, BRACE2006380, BRACE2006393, BRACE2006397, BRACE2006413, BRACE2006417, BRACE2006453, BRACE2006459, BRACE2006488, BRACE2006534, BRACE2006537, BRACE2006540, BRACE2006547, BRACE2006564, BRACE2006587, BRACE2006598, BRACE2006636, BRACE2006685, BRACE2006703, BRACE2006753, BRACE2006783, BRACE2006821, BRACE2006833, BRACE2006859, BRACE2006871, BRACE2006909, BRACE2006911, BRACE2006924, BRACE2006935, BRACE2006944, BRACE2006951, BRACE2006982, BRACE2006986, BRACE2007013, BRACE2007068, BRACE2007087, BRACE2007138, BRACE2007191, BRACE2007197, BRACE2007201, BRACE2007203, BRACE2007232, BRACE2007254, BRACE2007262, BRACE2007274, BRACE2007281, BRACE2007295, BRACE2007358, BRACE2007396, BRACE2007398, BRACE2007401, BRACE2007411, BRACE2007447, BRACE2007477, BRACE2007502, BRACE2007503, BRACE2007522, BRACE2007527, BRACE2007538, BRACE2007563, BRACE2007567, BRACE2007577, BRACE2007621, BRACE2007640, BRACE2007646, BRACE2007663, BRACE2007682, BRACE2007685, BRACE2007708, BRACE2007727, BRACE2007749, BRACE2007760, BRACE2007761, BRACE2007764, BRACE2007767, BRACE2007769, BRACE2007784, BRACE2007786, BRACE2007798, BRACE2007799, BRACE2007801, BRACE2007836, BRACE2007868, BRACE2007888, BRACE2007902, BRACE2007920, BRACE2007944, BRACE2008008, BRACE2008015, BRACE2008021, BRACE2008097, BRACE2008114, BRACE2008144, BRACE2008172, BRACE2008216, BRACE2008218, BRACE2008251, BRACE2008276, BRACE2008295, BRACE2008308, BRACE2008336, BRACE2008361, BRACE2008380, BRACE2008385, BRACE2008399, BRACE2008401, BRACE2008402, BRACE2008410, BRACE2008420, BRACE2008443, BRACE2008473, BRACE2008480, BRACE2008488, BRACE2008495, BRACE2008500, BRACE2008594, BRACE2008604, BRACE2008615, BRACE2008622, BRACE2008629, BRACE2008655, BRACE2008656, BRACE2008706, BRACE2008708, BRACE2008710, BRACE2008754, BRACE2008847, BRACE2008857, BRACE2008861, BRACE2008867, BRACE2008881, BRACE2008883, BRACE2008917, BRACE2008919, BRACE2008948, BRACE2008960, BRACE2008968, BRACE2008999, BRACE2009014, BRACE2009016, BRACE2009031, BRACE2009053, BRACE2009122, BRACE2009131, BRACE2009185, BRACE2009188, BRACE2009212, BRACE2009221, BRACE2009235, BRACE2009238, BRACE2009270, BRACE2009272, BRACE2009274, BRACE2009275, BRACE2009291, BRACE2009293, BRACE2009307, BRACE2009311, BRACE2009318, BRACE2009323, BRACE2009366, BRACE2009421, BRACE2009428, BRACE2009434, BRACE2009437, BRACE2009483, BRACE2009533, BRACE2009558, BRACE2009566, BRACE2009591, BRACE2009620, BRACE2009654, BRACE2009721, BRACE2009732, BRACE2009754, BRACE2009828, BRACE2009886, BRACE2009907, BRACE2010170, BRACE2010171, BRACE2010203, BRACE2010208, BRACE2010336, BRACE2010348, BRACE2010440, BRACE2010444, BRACE2010477, BRACE2010489, BRACE2010535, BRACE2010550, BRACE2010598, BRACE2010632, BRACE2010642, BRACE2010651, BRACE2010684, BRACE2010753, BRACE2010813, BRACE2010837, BRACE2010888, BRACE2010937, BRACE2010983, BRACE2011007, BRACE2011025, BRACE2011199, BRACE2011265, BRACE2011389, BRACE2011478, BRACE2011545, BRACE2011592, BRACE2011611, BRACE2011646, BRACE2011677, BRACE2011703, BRACE2011747, BRACE2011838, BRACE2011892, BRACE2011904, BRACE2011947, BRACE2012061, BRACE2012062, BRACE2012185, BRACE2012232, BRACE2012510, BRACE2012625, BRACE2012653, BRACE2012833, BRACE2012838, BRACE2012936, BRACE2012947, BRACE2013009, BRACE2013010, BRACE2013126, BRACE2013132, BRACE2013149, BRACE2013806, BRACE2013855, BRACE2013911, BRACE2014108, BRACE2014161, BRACE2014232, BRACE2014268, BRACE2014306, BRACE2014475, BRACE2014657, BRACE2014746, BRACE2014780, BRACE2014818, BRACE2014821, BRACE2014824, BRACE2014850, BRACE2014854, BRACE2015031, BRACE2015132, BRACE2015262, BRACE2015270, BRACE2015287, BRACE2015314, BRACE2015352, BRACE2015368, BRACE2015412, BRACE2015436, BRACE2015741, BRACE2015756, BRACE2015969, BRACE2015995, BRACE2016058, BRACE2016194, BRACE2016315, BRACE2016325, BRACE2016335, BRACE2016362, BRACE2016366, BRACE2016465, BRACE2016516, BRACE2016583, BRACE2016708, BRACE2016821, BRACE2016896, BRACE2016981, BRACE2017108, BRACE2017124, BRACE2017298, BRACE2017359, BRACE2017397, BRACE2017410, BRACE2017438, BRACE2017580, BRACE2017587, BRACE2017720, BRACE2017844, BRACE2017872, BRACE2017929, BRACE2017934, BRACE2017985, BRACE2017992, BRACE2018337, BRACE2018443, BRACE2018448, BRACE2018568, BRACE2018700, BRACE2018727, BRACE2018736, BRACE2018759, BRACE2018762, BRACE2018782, BRACE2018847, BRACE2019004, BRACE2019044, BRACE2019244, BRACE2019258, BRACE2019327, BRACE2019348, BRACE2019371, BRACE2019467, BRACE2019510, BRACE2019519, BRACE2019528, BRACE2019618, BRACE2019696, BRACE2019703, BRACE2019843, BRACE2019865, BRACE2019872, BRACE2020028, BRACE2020077, BRACE2020097, BRACE2020157, BRACE2020278, BRACE2020358, BRACE2020467, BRACE2020584, BRACE2020652, BRACE2020709, BRACE2020742, BRACE2020756, BRACE2020863, BRACE2020982, BRACE2021143, BRACE2021148, BRACE2021245, BRACE2021254, BRACE2021264, BRACE2021433, BRACE2021478, BRACE2021541, BRACE2021670, BRACE2021695, BRACE2021708, BRACE2021721, BRACE2021932, BRACE2021936, BRACE2022030, BRACE2022158, BRACE2022196, BRACE2022270, BRACE2022328, BRACE2022333, BRACE2022389, BRACE2022394, BRACE2022435, BRACE2022448, BRACE2022450, BRACE2022549, BRACE2022633, BRACE2022693, BRACE2022848, BRACE2022928, BRACE2022990, BRACE2023069, BRACE2023070, BRACE2023223, BRACE2023268, BRACE2023284, BRACE2023404, BRACE2023451, BRACE2023540, BRACE2023633, BRACE2023727, BRACE2023744, BRACE2023800, BRACE2023801, BRACE2024074, BRACE2024222, BRACE2024610, BRACE2024627, BRACE2024781, BRACE2024826, BRACE2025018, BRACE2025316, BRACE2025333, BRACE2025437, BRACE2025452, BRACE2025710, BRACE2025992, BRACE2026131, BRACE2026142, BRACE2026293, BRACE2026294, BRACE2026404, BRACE2026675, BRACE2026725, BRACE2026836, BRACE2026920, BRACE2026971, BRACE2027018, BRACE2027221, BRACE2027258, BRACE2027312, BRACE2027382, BRACE2027389, BRACE2027408, BRACE2027643, BRACE2027767, BRACE2027770, BRACE2027879, BRACE2027896, BRACE2027970, BRACE2028171, BRACE2028392, BRACE2028410, BRACE2028636, BRACE2028741, BRACE2028956, BRACE2028970, BRACE2029112, BRACE2029356, BRACE2029396, BRACE2029581, BRACE2029644, BRACE2029849, BRACE2030039, BRACE2030096, BRACE2030323, BRACE2030326, BRACE2030345, BRACE2030736, BRACE2030883, BRACE2030884, BRACE2031154, BRACE2031232, BRACE2031527, BRACE2031531, BRACE2031553, BRACE2031899, BRACE2032044, BRACE2032090, BRACE2032134, BRACE2032148, BRACE2032182, BRACE2032329, BRACE2032385, BRACE2032436, BRACE2032477, BRACE2032502, BRACE2032538, BRACE2032584, BRACE2032823, BRACE2033128, BRACE2033394, BRACE2033478, BRACE2033720, BRACE2033786, BRACE2034434, BRACE2034523, BRACE2034616, BRACE2034622, BRACE2034870, BRACE2035003, BRACE2035120, BRACE2035124, BRACE2035191, BRACE2035278, BRACE2035381, BRACE2035441, BRACE2035485, BRACE2036005, BRACE2036096, BRACE2036743, BRACE2036830, BRACE2036834, BRACE2036900, BRACE2037132, BRACE2037294, BRACE2037299, BRACE2037310, BRACE2037431, BRACE2037692, BRACE2037847, BRACE2038114, BRACE2038269, BRACE2038271, BRACE2038329, BRACE2038492, BRACE2038551, BRACE2038618, BRACE2039009, BRACE2039128, BRACE2039170, BRACE2039249, BRACE2039286, BRACE2039297, BRACE2039327, BRACE2039362, BRACE2039475, BRACE2039600, BRACE2039607, BRACE2039734, BRACE2039823, BRACE2039832, BRACE2039893, BRACE2039986, BRACE2040138, BRACE2040325, BRACE2040514, BRACE2040640, BRACE2040987, BRACE2041009, BRACE2041095, BRACE2041200, BRACE2041264, BRACE2041890, BRACE2041898, BRACE2042394, BRACE2042398, BRACE2042550, BRACE2042620, BRACE2042628, BRACE2042873, BRACE2043036, BRACE2043105, BRACE2043142, BRACE2043248, BRACE2043349, BRACE2043381, BRACE2043774, BRACE2043942, BRACE2044057, BRACE2044105, BRACE2044263, BRACE2044286, BRACE2044304, BRACE2044473, BRACE2044510, BRACE2044640, BRACE2044816, BRACE2044946, BRACE2044949, BRACE2045300, BRACE2045428, BRACE2045445, BRACE2045596, BRACE2045772, BRACE2045947, BRACE2045954, BRACE2046251, BRACE2046295, BRACE2046976, BRACE2047011, BRACE2047232, BRACE2047350, BRACE2047377, BRACE2047385, BRACE2047492, BRACE2047558, BRACE2047573, BRACE2047835, BRACE2047893, BRACE2047975, BRACE3000071, BRACE3000404, BRACE3000520, BRACE3000697, BRACE3000840, BRACE3000973, BRACE3001002, BRACE3001058, BRACE3001066, BRACE3001217, BRACE3001299, BRACE3001384, BRACE3001391, BRACE3001403, BRACE3001595, BRACE3001754, BRACE3001948, BRACE3001973, BRACE3002184, BRACE3002298, BRACE3002344, BRACE3002390, BRACE3002420, BRACE3002508, BRACE3002541, BRACE3002756, BRACE3003004, BRACE3003026, BRACE3003053, BRACE3003192, BRACE3003413, BRACE3003595, BRACE3003698, BRACE3003866, BRACE3003920, BRACE3004046, BRACE3004058, BRACE3004113, BRACE3004205, BRACE3004358, BRACE3004371, BRACE3004435, BRACE3004477, BRACE3004767, BRACE3004772, BRACE3004783, BRACE3004843, BRACE3004862, BRACE3004880, BRACE3004887, BRACE3004981, BRACE3004996, BRACE3004998, BRACE3005103, BRACE3005127, BRACE3005145, BRACE3005217, BRACE3005225, BRACE3005430, BRACE3005499, BRACE3005760, BRACE3005870, BRACE3005903, BRACE3005989, BRACE3006113, BRACE3006185, BRACE3006226, BRACE3006462, BRACE3006463, BRACE3006553, BRACE3006872, BRACE3006917, BRACE3007058, BRACE3007084, BRACE3007085, BRACE3007258, BRACE3007322, BRACE3007472, BRACE3007480, BRACE3007559, BRACE3007625, BRACE3007642, BRACE3007649, BRACE3007767, BRACE3007869, BRACE3008036, BRACE3008066, BRACE3008092, BRACE3008095, BRACE3008137, BRACE3008255, BRACE3008337, BRACE3008384, BRACE3008720, BRACE3008772, BRACE3009044, BRACE3009075, BRACE3009090, BRACE3009127, BRACE3009197, BRACE3009237, BRACE3009265, BRACE3009297, BRACE3009377, BRACE3009392, BRACE3009416, BRACE3009539, BRACE3009574, BRACE3009701, BRACE3009708, BRACE3009724, BRACE3009993, BRACE3010076, BRACE3010079, BRACE3010086, BRACE3010221, BRACE3010283, BRACE3010315, BRACE3010397, BRACE3010416, BRACE3010435, BRACE3010702, BRACE3010862, BRACE3011271, BRACE3011421, BRACE3011447, BRACE3011505, BRACE3011634, BRACE3011774, BRACE3012357, BRACE3012574, BRACE3012806, BRACE3012930, BRACE3013119, BRACE3013418, BRACE3013576, BRACE3013740, BRACE3013874, BRACE3013936, BRACE3013986, BRACE3014005, BRACE3014068, BRACE3014231, BRACE3014290, BRACE3014317, BRACE3014523, BRACE3014714, BRACE3014807, BRACE3014942, BRACE3015090, BRACE3015121, BRACE3015262, BRACE3015521, BRACE3015808, BRACE3015829, BRACE3015894, BRACE3015898, BRACE3016020, BRACE3016122, BRACE3016167, BRACE3016170, BRACE3016580, BRACE3016788, BRACE3016810, BRACE3016862, BRACE3016884, BRACE3017083, BRACE3017253, BRACE3018083, BRACE3018308, BRACE3018963, BRACE3019055, BRACE3019071, BRACE3019084, BRACE3019570, BRACE3019611, BRACE3019817, BRACE3019828, BRACE3019941, BRACE3020151, BRACE3020194, BRACE3020286, BRACE3020356, BRACE3020594, BRACE3020669, BRACE3020671, BRACE3020890, BRACE3021148, BRACE3021430, BRACE3021517, BRACE3021805, BRACE3022051, BRACE3022303, BRACE3022312, BRACE3022340, BRACE3022847, BRACE3023604, BRACE3023912, BRACE3024073, BRACE3024359, BRACE3024379, BRACE3024444, BRACE3024497, BRACE3024537, BRACE3024659, BRACE3024662, BRACE3024879, BRACE3025153, BRACE3025302, BRACE3025457, BRACE3025531, BRACE3025627, BRACE3025630, BRACE3025719, BRACE3026008, BRACE3026075, BRACE3026161, BRACE3026290, BRACE3026345, BRACE3026456, BRACE3026735, BRACE3026802, BRACE3026844, BRACE3026947, BRACE3026993, BRACE3027242, BRACE3027256, BRACE3027326, BRACE3027478, BRACE3027480, BRACE3027931, BRACE3027976, BRACE3028214, BRACE3028241, BRACE3028360, BRACE3028895, BRACE3028998, BRACE3029005, BRACE3029021, BRACE3029205, BRACE3029447, BRACE3030057, BRACE3030103, BRACE3030538, BRACE3030748, BRACE3030866, BRACE3031161, BRACE3031184, BRACE3031185, BRACE3031315, BRACE3031372, BRACE3031579, BRACE3031728, BRACE3031838, BRACE3031843, BRACE3032427, BRACE3032455, BRACE3032537, BRACE3032538, BRACE3032631, BRACE3032771, BRACE3032980, BRACE3032983, BRACE3033525, BRACE3034159, BRACE3034183, BRACE3034389, BRACE3034964, BRACE3034993, BRACE3035168, BRACE3035227, BRACE3036156, BRACE3036271, BRACE3037612, BRACE3037637, BRACE3037803, BRACE3038012, BRACE3038030, BRACE3038569, BRACE3038570, BRACE3038687, BRACE3038760, BRACE3039288, BRACE3039358, BRACE3039378, BRACE3039454, BRACE3040012, BRACE3040239, BRACE3040504, BRACE3040644, BRACE3040856, BRACE3040863, BRACE3041059, BRACE3041162, BRACE3041827, BRACE3042046, BRACE3042210, BRACE3042326, BRACE3042409, BRACE3042432, BRACE3042594, BRACE3043597, BRACE3044090, BRACE3044172, BRACE3044247, BRACE3044377, BRACE3044389, BRACE3044495, BRACE3045011, BRACE3045033, BRACE3045078, BRACE3045145, BRACE3045424, BRACE3045708, BRACE3045981, BRACE3046049, BRACE3046152, BRACE3046294, BRACE3046450, BRACE3046466, BRACE3046491, BRACE3046609, BRACE3046762, BRACE3046837, BRACE3046855, BRACE3046966, BRACE3047018, BRACE3047482, BRACE3047801, BRALZ1000047, BRALZ1000103, BRALZ2000189, BRALZ2000263, BRALZ2000988, BRALZ2001038, BRALZ2001279, BRALZ2001350, BRALZ2001445, BRALZ2001559, BRALZ2001743, BRALZ2001834, BRALZ2002174, BRALZ2002418, BRALZ2002477, BRALZ2003119, BRALZ2003330, BRALZ2003453, BRALZ2003525, BRALZ2004397, BRALZ2005467, BRALZ2005471, BRALZ2005888, BRALZ2005950, BRALZ2005992, BRALZ2006288, BRALZ2006474, BRALZ2006560, BRALZ2006734, BRALZ2006800, BRALZ2006976, BRALZ2007376, BRALZ2007545, BRALZ2007576, BRALZ2007661, BRALZ2007790, BRALZ2007793, BRALZ2007952, BRALZ2008031, BRALZ2008462, BRALZ2008617, BRALZ2008696, BRALZ2008763, BRALZ2008869, BRALZ2008930, BRALZ2009446, BRALZ2009486, BRALZ2010186, BRALZ2010842, BRALZ2011337, BRALZ2011796, BRALZ2012050, BRALZ2012183, BRALZ2012848, BRALZ2013621, BRALZ2013690, BRALZ2014054, BRALZ2014316, BRALZ2014484, BRALZ2014951, BRALZ2015168, BRALZ2015811, BRALZ2016085, BRALZ2016498, BRALZ2017359, BRALZ2017531, BRALZ2017607, BRALZ2017620, BRALZ2017844, BRALZ2018342, BRALZ2018492, BRALZ2018834, BRALZ2019047, BRAMY1000095, BRAMY1000098, BRAMY1000130, BRAMY1000157, BRAMY2000021, BRAMY2000025, BRAMY2000052, BRAMY2000076, BRAMY2000086, BRAMY2000151, BRAMY2000196, BRAMY2000231, BRAMY2000277, BRAMY2000388, BRAMY2000411, BRAMY2000508, BRAMY2000585, BRAMY2000653, BRAMY2000814, BRAMY2000946, BRAMY2000981, BRAMY2000987, BRAMY2001068, BRAMY2001114, BRAMY2001203, BRAMY2001282, BRAMY2001367, BRAMY2001427, BRAMY2001473, BRAMY2001678, BRAMY2002005, BRAMY2002044, BRAMY2002072, BRAMY2002158, BRAMY2002311, BRAMY2002339, BRAMY2002364, BRAMY2002369, BRAMY2002479, BRAMY2002493, BRAMY2002525, BRAMY2002584, BRAMY2002604, BRAMY2002621, BRAMY2002638, BRAMY2002739, BRAMY2002799, BRAMY2002853, BRAMY2002862, BRAMY2002956, BRAMY2003008, BRAMY2003037, BRAMY2003117, BRAMY2003287, BRAMY2003325, BRAMY2003529, BRAMY2003538, BRAMY2003585, BRAMY2003634, BRAMY2003653, BRAMY2003681, BRAMY2003893, BRAMY2003897, BRAMY2003898, BRAMY2003904, BRAMY2003926, BRAMY2004031, BRAMY2004058, BRAMY2004183, BRAMY2004335, BRAMY2004351, BRAMY2004352, BRAMY2004387, BRAMY2004492, BRAMY2004524, BRAMY2004537, BRAMY2004542, BRAMY2004756, BRAMY2004771, BRAMY2005052, BRAMY2005064, BRAMY2005094, BRAMY2005151, BRAMY2005182, BRAMY2005244, BRAMY2005391, BRAMY2005488, BRAMY2005576, BRAMY2005648, BRAMY2005662, BRAMY2005708, BRAMY2005711, BRAMY2006092, BRAMY2006118, BRAMY2006149, BRAMY2006366, BRAMY2006375, BRAMY2006397, BRAMY2006411, BRAMY2006459, BRAMY2006466, BRAMY2006659, BRAMY2006779, BRAMY2006809, BRAMY2006879, BRAMY2007043, BRAMY2007110, BRAMY2007185, BRAMY2007249, BRAMY2007255, BRAMY2007287, BRAMY2007308, BRAMY2007411, BRAMY2007458, BRAMY2007486, BRAMY2007546, BRAMY2007594, BRAMY2007610, BRAMY2007653, BRAMY2007753, BRAMY2007859, BRAMY2008333, BRAMY2008382, BRAMY2008563, BRAMY2008583, BRAMY2008979, BRAMY2009013, BRAMY2009023, BRAMY2009034, BRAMY2009105, BRAMY2009123, BRAMY2009192, BRAMY2009344, BRAMY2009349, BRAMY2009394, BRAMY2009489, BRAMY2009508, BRAMY2009528, BRAMY2009557, BRAMY2009693, BRAMY2010068, BRAMY2010135, BRAMY2010145, BRAMY2010171, BRAMY2010208, BRAMY2010239, BRAMY2010272, BRAMY2010290, BRAMY2010357, BRAMY2010366, BRAMY2010395, BRAMY2010441, BRAMY2010442, BRAMY2010464, BRAMY2010581, BRAMY2010798, BRAMY2010808, BRAMY2010919, BRAMY2011064, BRAMY2011105, BRAMY2011178, BRAMY2011196, BRAMY2011216, BRAMY2011253, BRAMY2011446, BRAMY2011480, BRAMY2011639, BRAMY2011679, BRAMY2011811, BRAMY2011841, BRAMY2011846, BRAMY2011849, BRAMY2011872, BRAMY2011961, BRAMY2012017, BRAMY2012091, BRAMY2012119, BRAMY2012162, BRAMY2012163, BRAMY2012277, BRAMY2012340, BRAMY2012426, BRAMY2012497, BRAMY2012517, BRAMY2012536, BRAMY2012555, BRAMY2012568, BRAMY2012581, BRAMY2012691, BRAMY2012721, BRAMY2012731, BRAMY2012776, BRAMY2012880, BRAMY2012881, BRAMY2013169, BRAMY2013200, BRAMY2013216, BRAMY2013405, BRAMY2013414, BRAMY2013572, BRAMY2013590, BRAMY2013621, BRAMY2013659, BRAMY2013722, BRAMY2013736, BRAMY2013756, BRAMY2013944, BRAMY2013975, BRAMY2014019, BRAMY2014205, BRAMY2014387, BRAMY2014462, BRAMY2014469, BRAMY2014541, BRAMY2014754, BRAMY2014813, BRAMY2015211, BRAMY2015311, BRAMY2015420, BRAMY2015503, BRAMY2015516, BRAMY2015550, BRAMY2015551, BRAMY2015559, BRAMY2015688, BRAMY2015705, BRAMY2015782, BRAMY2015833, BRAMY2015855, BRAMY2015890, BRAMY2015911, BRAMY2015925, BRAMY2016002, BRAMY2016009, BRAMY2016020, BRAMY2016070, BRAMY2016251, BRAMY2016325, BRAMY2016327, BRAMY2016386, BRAMY2016706, BRAMY2016771, BRAMY2016892, BRAMY2016938, BRAMY2016953, BRAMY2017014, BRAMY2017249, BRAMY2017348, BRAMY2017450, BRAMY2017455, BRAMY2017528, BRAMY2017864, BRAMY2018027, BRAMY2018106, BRAMY2018122, BRAMY2018126, BRAMY2018272, BRAMY2018273, BRAMY2018279, BRAMY2018295, BRAMY2018308, BRAMY2018396, BRAMY2018467, BRAMY2018635, BRAMY2018785, BRAMY2019055, BRAMY2019111, BRAMY2019277, BRAMY2019300, BRAMY2019468, BRAMY2019509, BRAMY2019600, BRAMY2019643, BRAMY2019710, BRAMY2019963, BRAMY2019985, BRAMY2020050, BRAMY2020058, BRAMY2020270, BRAMY2020354, BRAMY2020355, BRAMY2020412, BRAMY2020445, BRAMY2020466, BRAMY2020520, BRAMY2020574, BRAMY2020634, BRAMY2020713, BRAMY2021040, BRAMY2021063, BRAMY2021098, BRAMY2021139, BRAMY2021142, BRAMY2021276, BRAMY2021310, BRAMY2021388, BRAMY2021498, BRAMY2021523, BRAMY2021710, BRAMY2021732, BRAMY2021746, BRAMY2021825, BRAMY2021867, BRAMY2021962, BRAMY2021982, BRAMY2022052, BRAMY2022160, BRAMY2022168, BRAMY2022263, BRAMY2022301, BRAMY2022320, BRAMY2022383, BRAMY2022445, BRAMY2022454, BRAMY2022525, BRAMY2022532, BRAMY2022723, BRAMY2022796, BRAMY2022929, BRAMY2022980, BRAMY2022984, BRAMY2023060, BRAMY2023110, BRAMY2023115, BRAMY2023161, BRAMY2023172, BRAMY2023238, BRAMY2023327, BRAMY2023358, BRAMY2023406, BRAMY2023482, BRAMY2023514, BRAMY2023719, BRAMY2023729, BRAMY2023786, BRAMY2023852, BRAMY2023863, BRAMY2024004, BRAMY2024073, BRAMY2024312, BRAMY2024374, BRAMY2024390, BRAMY2024449, BRAMY2024489, BRAMY2024497, BRAMY2024514, BRAMY2024530, BRAMY2024535, BRAMY2024545, BRAMY2024576, BRAMY2024593, BRAMY2024711, BRAMY2024715, BRAMY2024728, BRAMY2024849, BRAMY2025024, BRAMY2025032, BRAMY2025121, BRAMY2025175, BRAMY2025218, BRAMY2025230, BRAMY2025272, BRAMY2025277, BRAMY2025495, BRAMY2025812, BRAMY2025996, BRAMY2026009, BRAMY2026091, BRAMY2026168, BRAMY2026300, BRAMY2026347, BRAMY2026395, BRAMY2026405, BRAMY2026533, BRAMY2026538, BRAMY2026685, BRAMY2026713, BRAMY2026824, BRAMY2026899, BRAMY2026902, BRAMY2026904, BRAMY2026976, BRAMY2027073, BRAMY2027114, BRAMY2027140, BRAMY2027242, BRAMY2027396, BRAMY2027451, BRAMY2027461, BRAMY2027467, BRAMY2027587, BRAMY2027714, BRAMY2027717, BRAMY2027739, BRAMY2027752, BRAMY2027782, BRAMY2028072, BRAMY2028183, BRAMY2028188, BRAMY2028269, BRAMY2028472, BRAMY2028491, BRAMY2028516, BRAMY2028565, BRAMY2028593, BRAMY2028682, BRAMY2028783, BRAMY2028796, BRAMY2028856, BRAMY2028914, BRAMY2029204, BRAMY2029602, BRAMY2029988, BRAMY2030098, BRAMY2030109, BRAMY2030206, BRAMY2030477, BRAMY2030545, BRAMY2030607, BRAMY2030702, BRAMY2030703, BRAMY2030768, BRAMY2030799, BRAMY2030859, BRAMY2030915, BRAMY2031317, BRAMY2031377, BRAMY2031442, BRAMY2031516, BRAMY2032014, BRAMY2032231, BRAMY2032242, BRAMY2032290, BRAMY2032311, BRAMY2032317, BRAMY2032344, BRAMY2032589, BRAMY2032678, BRAMY2032696, BRAMY2032777, BRAMY2032994, BRAMY2033003, BRAMY2033116, BRAMY2033240, BRAMY2033267, BRAMY2033316, BRAMY2033332, BRAMY2033506, BRAMY2033594, BRAMY2033895, BRAMY2033914, BRAMY2034072, BRAMY2034185, BRAMY2034187, BRAMY2034305, BRAMY2034561, BRAMY2034920, BRAMY2034993, BRAMY2035070, BRAMY2035449, BRAMY2035545, BRAMY2035606, BRAMY2035718, BRAMY2035719, BRAMY2035801, BRAMY2035869, BRAMY2035923, BRAMY2036076, BRAMY2036079, BRAMY2036254, BRAMY2036266, BRAMY2036387, BRAMY2036396, BRAMY2036615, BRAMY2036699, BRAMY2036913, BRAMY2036918, BRAMY2036968, BRAMY2037147, BRAMY2037328, BRAMY2037609, BRAMY2037629, BRAMY2037800, BRAMY2037823, BRAMY2037971, BRAMY2038100, BRAMY2038128, BRAMY2038317, BRAMY2038475, BRAMY2038484, BRAMY2038516, BRAMY2038832, BRAMY2038846, BRAMY2038887, BRAMY2038904, BRAMY2039287, BRAMY2039300, BRAMY2039314, BRAMY2039341, BRAMY2039630, BRAMY2039695, BRAMY2039728, BRAMY2040051, BRAMY2040159, BRAMY2040214, BRAMY2040478, BRAMY2040592, BRAMY2040915, BRAMY2041261, BRAMY2041347, BRAMY2041378, BRAMY2041384, BRAMY2041434, BRAMY2041507, BRAMY2041542, BRAMY2041738, BRAMY2042122, BRAMY2042131, BRAMY2042178, BRAMY2042195, BRAMY2042244, BRAMY2042549, BRAMY2042596, BRAMY2042612, BRAMY2042641, BRAMY2042711, BRAMY2042760, BRAMY2042804, BRAMY2042899, BRAMY2042918, BRAMY2043069, BRAMY2043103, BRAMY2043314, BRAMY2043345, BRAMY2044246, BRAMY2044317, BRAMY2044349, BRAMY2044686, BRAMY2044838, BRAMY2045036, BRAMY2045299, BRAMY2045471, BRAMY2045530, BRAMY2046109, BRAMY2046478, BRAMY2046489, BRAMY2046537, BRAMY2046667, BRAMY2046742, BRAMY2046871, BRAMY2046984, BRAMY2046989, BRAMY2047169, BRAMY2047280, BRAMY2047420, BRAMY2047676, BRAMY2047692, BRAMY2047746, BRAMY2047751, BRAMY2047765, BRAMY2047884, BRAMY2047948, BRAMY3000206, BRAMY3000210, BRAMY3000213, BRAMY3000254, BRAMY3000307, BRAMY3000692, BRAMY3001356, BRAMY3001401, BRAMY3001409, BRAMY3001794, BRAMY3002120, BRAMY3002312, BRAMY3002329, BRAMY3002458, BRAMY3002508, BRAMY3002620, BRAMY3002803, BRAMY3002805, BRAMY3002886, BRAMY3003026, BRAMY3003109, BRAMY3003205, BRAMY3003310, BRAMY3003566, BRAMY3003723, BRAMY3004126, BRAMY3004224, BRAMY3004364, BRAMY3004672, BRAMY3004800, BRAMY3004900, BRAMY3004919, BRAMY3005184, BRAMY3005656, BRAMY3005912, BRAMY3005932, BRAMY3006032, BRAMY3006297, BRAMY3006761, BRAMY3007078, BRAMY3007206, BRAMY3007311, BRAMY3007350, BRAMY3007449, BRAMY3007471, BRAMY3007609, BRAMY3007723, BRAMY3007968, BRAMY3008088, BRAMY3008096, BRAMY3008466, BRAMY3008505, BRAMY3008650, BRAMY3008937, BRAMY3009158, BRAMY3009207, BRAMY3009491, BRAMY3009556, BRAMY3009782, BRAMY3009811, BRAMY3009904, BRAMY3010008, BRAMY3010264, BRAMY3010321, BRAMY3010411, BRAMY3010603, BRAMY3010654, BRAMY4000089, BRAMY4000095, BRAMY4000229, BRAMY4000277, BRAMY4000915, BRAMY4000962, BRAMY4001173, BRAMY4001200, BRAMY4001234, BRAMY4001449, BRAMY4001652, BRAMY4001863, BRAMY4001913, BRAMY4002575, BRAMY4002628, BRASW1000053, BRASW1000125, BRAWH1000001, BRAWH1000002, BRAWH1000007, BRAWH1000083, BRAWH1000094, BRAWH1000116, BRAWH1000130, BRAWH1000157, BRAWH1000164, BRAWH1000168, BRAWH1000174, BRAWH1000180, BRAWH1000369, BRAWH2000034, BRAWH2000048, BRAWH2000071, BRAWH2000093, BRAWH2000109, BRAWH2000131, BRAWH2000142, BRAWH2000177, BRAWH2000218, BRAWH2000232, BRAWH2000248, BRAWH2000256, BRAWH2000323, BRAWH2000353, BRAWH2000370, BRAWH2000409, BRAWH2000417, BRAWH2000443, BRAWH2000471, BRAWH2000476, BRAWH2000482, BRAWH2000488, BRAWH2000494, BRAWH2000500, BRAWH2000503, BRAWH2000554, BRAWH2000595, BRAWH2000633, BRAWH2000643, BRAWH2000651, BRAWH2000682, BRAWH2000697, BRAWH2000752, BRAWH2000859, BRAWH2000866, BRAWH2000892, BRAWH2000901, BRAWH2000926, BRAWH2000944, BRAWH2000984, BRAWH2001019, BRAWH2001052, BRAWH2001103, BRAWH2001129, BRAWH2001137, BRAWH2001159, BRAWH2001166, BRAWH2001186, BRAWH2001203, BRAWH2001238, BRAWH2001239, BRAWH2001255, BRAWH2001355, BRAWH2001378, BRAWH2001395, BRAWH2001406, BRAWH2001412, BRAWH2001418, BRAWH2001436, BRAWH2001438, BRAWH2001459, BRAWH2001461, BRAWH2001492, BRAWH2001503, BRAWH2001519, BRAWH2001530, BRAWH2001535, BRAWH2001589, BRAWH2001666, BRAWH2001671, BRAWH2001679, BRAWH2001686, BRAWH2001701, BRAWH2001842, BRAWH2001862, BRAWH2001873, BRAWH2001940, BRAWH2001973, BRAWH2002047, BRAWH2002060, BRAWH2002062, BRAWH2002125, BRAWH2002191, BRAWH2002318, BRAWH2002333, BRAWH2002352, BRAWH2002383, BRAWH2002549, BRAWH2002601, BRAWH2002623, BRAWH2002630, BRAWH2002635, BRAWH2002662, BRAWH2002679, BRAWH2002725, BRAWH2002761, BRAWH2002811, BRAWH2002861, BRAWH2002963, BRAWH2002967, BRAWH2002976, BRAWH2003000, BRAWH2003135, BRAWH2003240, BRAWH2003307, BRAWH2003355, BRAWH2003366, BRAWH2003689, BRAWH2003693, BRAWH2003832, BRAWH2003948, BRAWH2003964, BRAWH2004044, BRAWH2004068, BRAWH2004078, BRAWH2004136, BRAWH2004217, BRAWH2004580, BRAWH2004731, BRAWH2004779, BRAWH2004842, BRAWH2004884, BRAWH2004923, BRAWH2005225, BRAWH2005315, BRAWH2005517, BRAWH2005524, BRAWH2005533, BRAWH2005578, BRAWH2005812, BRAWH2005974, BRAWH2005998, BRAWH2006044, BRAWH2006083, BRAWH2006207, BRAWH2006301, BRAWH2006395, BRAWH2006405, BRAWH2006526, BRAWH2006543, BRAWH2006622, BRAWH2006760, BRAWH2006960, BRAWH2006989, BRAWH2007069, BRAWH2007308, BRAWH2007406, BRAWH2007550, BRAWH2007570, BRAWH2007591, BRAWH2007658, BRAWH2007808, BRAWH2007825, BRAWH2007862, BRAWH2007890, BRAWH2008058, BRAWH2008128, BRAWH2008219, BRAWH2008292, BRAWH2008297, BRAWH2008366, BRAWH2008380, BRAWH2008540, BRAWH2008577, BRAWH2008790, BRAWH2008956, BRAWH2008993, BRAWH2009112, BRAWH2009227, BRAWH2009238, BRAWH2009261, BRAWH2009263, BRAWH2009298, BRAWH2009304, BRAWH2009307, BRAWH2009393, BRAWH2009485, BRAWH2009490, BRAWH2009558, BRAWH2009590, BRAWH2009626, BRAWH2009678, BRAWH2009695, BRAWH2009907, BRAWH2010000, BRAWH2010069, BRAWH2010084, BRAWH2010136, BRAWH2010318, BRAWH2010354, BRAWH2010364, BRAWH2010536, BRAWH2010552, BRAWH2010584, BRAWH2010618, BRAWH2010619, BRAWH2010754, BRAWH2011066, BRAWH2011079, BRAWH2011096, BRAWH2011155, BRAWH2011166, BRAWH2011204, BRAWH2011286, BRAWH2011294, BRAWH2011400, BRAWH2011762, BRAWH2011795, BRAWH2011796, BRAWH2011823, BRAWH2011860, BRAWH2011920, BRAWH2011958, BRAWH2012054, BRAWH2012077, BRAWH2012162, BRAWH2012258, BRAWH2012326, BRAWH2012538, BRAWH2012540, BRAWH2012619, BRAWH2012698, BRAWH2012749, BRAWH2012963, BRAWH2013047, BRAWH2013219, BRAWH2013294, BRAWH2013748, BRAWH2013866, BRAWH2013871, BRAWH2013914, BRAWH2013941, BRAWH2013955, BRAWH2014053, BRAWH2014234, BRAWH2014379, BRAWH2014414, BRAWH2014473, BRAWH2014662, BRAWH2014717, BRAWH2014729, BRAWH2014876, BRAWH2014934, BRAWH2014954, BRAWH2015349, BRAWH2015375, BRAWH2015385, BRAWH2015595, BRAWH2015728, BRAWH2015853, BRAWH2015866, BRAWH2016028, BRAWH2016106, BRAWH2016160, BRAWH2016166, BRAWH2016209, BRAWH2016221, BRAWH2016223, BRAWH2016269, BRAWH2016305, BRAWH2016439, BRAWH2016446, BRAWH2016514, BRAWH2016562, BRAWH2016655, BRAWH2016679, BRAWH2016702, BRAWH2016785, BRAWH2016792, BRAWH2016800, BRAWH2017103, BRAWH2017250, BRAWH2017294, BRAWH2017304, BRAWH2017305, BRAWH2017379, BRAWH2017407, BRAWH2017433, BRAWH2017523, BRAWH2017534, BRAWH2017635, BRAWH2017913, BRAWH2018206, BRAWH2018267, BRAWH2018282, BRAWH2018317, BRAWH2018506, BRAWH2018514, BRAWH2018527, BRAWH2018601, BRAWH2018729, BRAWH2018745, BRAWH2018875, BRAWH2019053, BRAWH2019055, BRAWH2019198, BRAWH3000078, BRAWH3000100, BRAWH3000166, BRAWH3000314, BRAWH3000329, BRAWH3000410, BRAWH3000446, BRAWH3000491, BRAWH3000604, BRAWH3000884, BRAWH3001053, BRAWH3001319, BRAWH3001326, BRAWH3001475, BRAWH3001636, BRAWH3001638, BRAWH3001712, BRAWH3001760, BRAWH3001783, BRAWH3001833, BRAWH3001879, BRAWH3001891, BRAWH3001918, BRAWH3002433, BRAWH3002467, BRAWH3002513, BRAWH3002574, BRAWH3002600, BRAWH3002819, BRAWH3003019, BRAWH3003136, BRAWH3003244, BRAWH3003343, BRAWH3003411, BRAWH3003522, BRAWH3003573, BRAWH3003598, BRAWH3003727, BRAWH3003801, BRAWH3003975, BRAWH3004222, BRAWH3004335, BRAWH3004350, BRAWH3004453, BRAWH3004530, BRAWH3004666, BRAWH3005037, BRAWH3005047, BRAWH3005132, BRAWH3005292, BRAWH3005300, BRAWH3005422, BRAWH3005534, BRAWH3005886, BRAWH3005892, BRAWH3005896, BRAWH3005912, BRAWH3005981, BRAWH3006547, BRAWH3006548, BRAWH3006761, BRAWH3006792, BRAWH3007129, BRAWH3007221, BRAWH3007441, BRAWH3007455, BRAWH3007506, BRAWH3007726, BRAWH3007783, BRAWH3008167, BRAWH3008341, BRAWH3008559, BRAWH3008697, BRAWH3008867, BRAWH3008931, BRAWH3009017, BRAWH3009285, BRAWH3009297, BRAWH3009546, BRAWH3009961, BRAWH3010560, BRAWH3010602, BRAWH3010657, BRAWH3010726, BRAWH3010833, BRAWH3011101, BRAWH3011331, BRAWH3011402, BRAWH3011577, BRAWH3011623, BRAWH3011637, BRAWH3011685, BRAWH3011907, BRAWH3011929, BRAWH3012005, BRAWH3012662, BRAWH3012779, BRAWH3013009, BRAWH3013049, BRAWH3013197, BRAWH3013264, BRAWH3013508, BRAWH3014609, BRAWH3014639, BRAWH3015017, BRAWH3015175, BRAWH3015260, BRAWH3015610, BRAWH3015825, BRAWH3016123, BRAWH3016715, BRAWH3017260, BRAWH3017477, BRAWH3017537, BRAWH3017980, BRAWH3018369, BRAWH3018548, BRAWH3018969, BRAWH3019026, BRAWH3019529, BRAWH3019594, BRAWH3019629, BRAWH3019820, BRAWH3020200, BRAWH3020318, BRAWH3020486, BRAWH3020884, BRAWH3020928, BRAWH3021012, BRAWH3021545, BRAWH3021580, BRAWH3021641, BRAWH3021643, BRAWH3021724, BRAWH3022347, BRAWH3022431, BRAWH3022459, BRAWH3022542, BRAWH3022719, BRAWH3022866, BRAWH3022900, BRAWH3023156, BRAWH3023168, BRAWH3023172, BRAWH3023274, BRAWH3023421, BRAWH3024231, BRAWH3024242, BRAWH3024469, BRAWH3024506, BRAWH3024613, BRAWH3024989, BRAWH3026349, BRAWH3026394, BRAWH3026529, BRAWH3027420, BRAWH3027440, BRAWH3027533, BRAWH3027574, BRAWH3027607, BRAWH3027616, BRAWH3027675, BRAWH3027806, BRAWH3027880, BRAWH3027927, BRAWH3028202, BRAWH3028223, BRAWH3028306, BRAWH3028461, BRAWH3028645, BRAWH3028754, BRAWH3028796, BRAWH3029254, BRAWH3029313, BRAWH3029538, BRAWH3029556, BRAWH3029806, BRAWH3030613, BRAWH3030772, BRAWH3030810, BRAWH3030892, BRAWH3030910, BRAWH3030950, BRAWH3031054, BRAWH3031710, BRAWH3031902, BRAWH3032298, BRAWH3032340, BRAWH3032571, BRAWH3032620, BRAWH3032930, BRAWH3033117, BRAWH3033293, BRAWH3033448, BRAWH3033513, BRAWH3034097, BRAWH3034114, BRAWH3034134, BRAWH3034668, BRAWH3034743, BRAWH3034775, BRAWH3034890, BRAWH3035154, BRAWH3035403, BRAWH3035904, BRAWH3035914, BRAWH3035936, BRAWH3036077, BRAWH3036247, BRAWH3036270, BRAWH3036561, BRAWH3036738, BRAWH3036951, BRAWH3037265, BRAWH3037394, BRAWH3037533, BRAWH3037979, BRAWH3038055, BRAWH3038230, BRAWH3038252, BRAWH3038324, BRCAN1000065, BRCAN1000076, BRCAN1000105, BRCAN1000149, BRCAN2000148, BRCAN2000149, BRCAN2000209, BRCAN2000239, BRCAN2000346, BRCAN2000364, BRCAN2000383, BRCAN2000418, BRCAN2000523, BRCAN2000541, BRCAN2000577, BRCAN2000620, BRCAN2000639, BRCAN2000763, BRCAN2000832, BRCAN2000923, BRCAN2001223, BRCAN2001866, BRCAN2002173, BRCAN2002416, BRCAN2002473, BRCAN2002562, BRCAN2002662, BRCAN2002826, BRCAN2002854, BRCAN2002856, BRCAN2002892, BRCAN2002944, BRCAN2002948, BRCAN2003070, BRCAN2003269, BRCAN2003389, BRCAN2003628, BRCAN2003703, BRCAN2003746, BRCAN2003814, BRCAN2003987, BRCAN2004173, BRCAN2004355, BRCAN2004371, BRCAN2004653, BRCAN2004699, BRCAN2005436, BRCAN2005449, BRCAN2006019, BRCAN2006051, BRCAN2006063, BRCAN2006117, BRCAN2006174, BRCAN2006290, BRCAN2006297, BRCAN2006323, BRCAN2006401, BRCAN2006411, BRCAN2006450, BRCAN2006955, BRCAN2007119, BRCAN2007144, BRCAN2007409, BRCAN2007426, BRCAN2007525, BRCAN2007700, BRCAN2008494, BRCAN2008528, BRCAN2008701, BRCAN2008894, BRCAN2009156, BRCAN2009168, BRCAN2009203, BRCAN2010374, BRCAN2010376, BRCAN2010547, BRCAN2010581, BRCAN2011254, BRCAN2011316, BRCAN2011602, BRCAN2011946, BRCAN2012110, BRCAN2012355, BRCAN2012402, BRCAN2012408, BRCAN2012481, BRCAN2012613, BRCAN2012713, BRCAN2012929, BRCAN2013655, BRCAN2013660, BRCAN2014143, BRCAN2014229, BRCAN2014370, BRCAN2014602, BRCAN2014652, BRCAN2014788, BRCAN2014881, BRCAN2014952, BRCAN2015371, BRCAN2015402, BRCAN2015464, BRCAN2015719, BRCAN2015757, BRCAN2015886, BRCAN2016025, BRCAN2016046, BRCAN2016174, BRCAN2016433, BRCAN2016619, BRCAN2016762, BRCAN2016814, BRCAN2017442, BRCAN2017905, BRCAN2018240, BRCAN2018269, BRCAN2018490, BRCAN2018566, BRCAN2018667, BRCAN2018748, BRCAN2018935, BRCAN2019002, BRCAN2019387, BRCAN2019653, BRCAN2019773, BRCAN2019907, BRCAN2020234, BRCAN2020331, BRCAN2020412, BRCAN2020467, BRCAN2020710, BRCAN2020880, BRCAN2021024, BRCAN2021028, BRCAN2021325, BRCAN2021452, BRCAN2021669, BRCAN2021718, BRCAN2022126, BRCAN2022191, BRCAN2022472, BRCAN2022474, BRCAN2023347, BRCAN2023724, BRCAN2024451, BRCAN2024563, BRCAN2025009, BRCAN2025093, BRCAN2025349, BRCAN2025368, BRCAN2025712, BRCAN2025982, BRCAN2026117, BRCAN2026340, BRCAN2026711, BRCAN2027150, BRCAN2027310, BRCAN2027334, BRCAN2027355, BRCAN2027364, BRCAN2027513, BRCAN2027593, BRCAN2027970, BRCAN2028021, BRCAN2028040, BRCAN2028319, BRCAN2028338, BRCAN2028355, BRCAN2028378, BRCAN2028460, BRCAN2028545, BRCAN2028634, BRCAN2028702, BRCOC1000040, BRCOC1000087, BRCOC1000094, BRCOC2000047, BRCOC2000152, BRCOC2000184, BRCOC2000186, BRCOC2000333, BRCOC2000360, BRCOC2000404, BRCOC2000487, BRCOC2000637, BRCOC2000670, BRCOC2000816, BRCOC2000850, BRCOC2001355, BRCOC2002085, BRCOC2002155, BRCOC2002323, BRCOC2002659, BRCOC2002664, BRCOC2002686, BRCOC2002751, BRCOC2002756, BRCOC2002777, BRCOC2002835, BRCOC2003100, BRCOC2003125, BRCOC2003187, BRCOC2003213, BRCOC2003513, BRCOC2003732, BRCOC2003740, BRCOC2004036, BRCOC2004175, BRCOC2004354, BRCOC2004455, BRCOC2004950, BRCOC2005542, BRCOC2005903, BRCOC2005951, BRCOC2006164, BRCOC2006189, BRCOC2006243, BRCOC2006270, BRCOC2006639, BRCOC2006942, BRCOC2007034, BRCOC2007593, BRCOC2007733, BRCOC2007769, BRCOC2008064, BRCOC2008225, BRCOC2008642, BRCOC2008993, BRCOC2009052, BRCOC2009196, BRCOC2009380, BRCOC2009638, BRCOC2009937, BRCOC2010115, BRCOC2010510, BRCOC2010730, BRCOC2010980, BRCOC2010994, BRCOC2011010, BRCOC2011398, BRCOC2011418, BRCOC2011506, BRCOC2011769, BRCOC2011996, BRCOC2012172, BRCOC2012229, BRCOC2012386, BRCOC2012551, BRCOC2012813, BRCOC2013448, BRCOC2013573, BRCOC2013675, BRCOC2013780, BRCOC2014013, BRCOC2014033, BRCOC2014400, BRCOC2014748, BRCOC2014833, BRCOC2015597, BRCOC2015824, BRCOC2015908, BRCOC2015944, BRCOC2016525, BRCOC2016661, BRCOC2017061, BRCOC2017652, BRCOC2017856, BRCOC2018775, BRCOC2018877, BRCOC2019255, BRCOC2019549, BRCOC2019841, BRCOC2019896, BRCOC2019903, BRCOC2019934, BRCOC2020122, BRCOC2020142, BRHIP1000058, BRHIP1000072, BRHIP1000129, BRHIP2000021, BRHIP2000079, BRHIP2000087, BRHIP2000163, BRHIP2000210, BRHIP2000239, BRHIP2000245, BRHIP2000359, BRHIP2000445, BRHIP2000506, BRHIP2000532, BRHIP2000621, BRHIP2000691, BRHIP2000819, BRHIP2000826, BRHIP2000920, BRHIP2001074, BRHIP2001686, BRHIP2001782, BRHIP2001802, BRHIP2001886, BRHIP2001927, BRHIP2002122, BRHIP2002143, BRHIP2002172, BRHIP2002346, BRHIP2002510, BRHIP2002664, BRHIP2002722, BRHIP2002929, BRHIP2003048, BRHIP2003062, BRHIP2003242, BRHIP2003272, BRHIP2003748, BRHIP2003786, BRHIP2003828, BRHIP2003917, BRHIP2004312, BRHIP2004355, BRHIP2004359, BRHIP2004814, BRHIP2004883, BRHIP2004902, BRHIP2005010, BRHIP2005236, BRHIP2005271, BRHIP2005354, BRHIP2005600, BRHIP2005719, BRHIP2005724, BRHIP2005752, BRHIP2005932, BRHIP2006617, BRHIP2006782, BRHIP2006800, BRHIP2006819, BRHIP2006921, BRHIP2007616, BRHIP2007690, BRHIP2007928, BRHIP2007969, BRHIP2008269, BRHIP2008389, BRHIP2008607, BRHIP2008756, BRHIP2008909, BRHIP2009019, BRHIP2009177, BRHIP2009340, BRHIP2009351, BRHIP2009414, BRHIP2009474, BRHIP2009617, BRHIP2009685, BRHIP2010309, BRHIP2010444, BRHIP2010487, BRHIP2010571, BRHIP2010593, BRHIP2010610, BRHIP2010723, BRHIP2010744, BRHIP2011120, BRHIP2011199, BRHIP2011491, BRHIP2011508, BRHIP2011576, BRHIP2011616, BRHIP2011783, BRHIP2011838, BRHIP2011891, BRHIP2011933, BRHIP2012059, BRHIP2012141, BRHIP2012314, BRHIP2012360, BRHIP2012545, BRHIP2012580, BRHIP2012627, BRHIP2012642, BRHIP2012750, BRHIP2012922, BRHIP2012923, BRHIP2012972, BRHIP2013286, BRHIP2013447, BRHIP2013510, BRHIP2013723, BRHIP2013958, BRHIP2013972, BRHIP2014063, BRHIP2014228, BRHIP2014285, BRHIP2014291, BRHIP2014373, BRHIP2014386, BRHIP2014387, BRHIP2014954, BRHIP2015153, BRHIP2015356, BRHIP2015360, BRHIP2016005, BRHIP2016125, BRHIP2016788, BRHIP2016968, BRHIP2016990, BRHIP2017010, BRHIP2017315, BRHIP2017385, BRHIP2017404, BRHIP2017542, BRHIP2017553, BRHIP2017714, BRHIP2017780, BRHIP2017945, BRHIP2018014, BRHIP2018369, BRHIP2018612, BRHIP2018635, BRHIP2018650, BRHIP2018719, BRHIP2018805, BRHIP2018998, BRHIP2019007, BRHIP2019047, BRHIP2019149, BRHIP2019177, BRHIP2019291, BRHIP2019494, BRHIP2019589, BRHIP2019641, BRHIP2019819, BRHIP2019884, BRHIP2019972, BRHIP2020182, BRHIP2020509, BRHIP2020622, BRHIP2020695, BRHIP2020743, BRHIP2020799, BRHIP2020842, BRHIP2020859, BRHIP2020930, BRHIP2021102, BRHIP2021289, BRHIP2021615, BRHIP2021744, BRHIP2021870, BRHIP2021929, BRHIP2022006, BRHIP2022054, BRHIP2022221, BRHIP2022228, BRHIP2022298, BRHIP2022326, BRHIP2022467, BRHIP2022708, BRHIP2023071, BRHIP2023229, BRHIP2023272, BRHIP2023309, BRHIP2023369, BRHIP2023438, BRHIP2023695, BRHIP2023735, BRHIP2023762, BRHIP2023860, BRHIP2023869, BRHIP2024046, BRHIP2024165, BRHIP2024201, BRHIP2024347, BRHIP2024398, BRHIP2024549, BRHIP2024789, BRHIP2024911, BRHIP2024941, BRHIP2025245, BRHIP2025366, BRHIP2025448, BRHIP2025679, BRHIP2025739, BRHIP2025797, BRHIP2026021, BRHIP2026061, BRHIP2026155, BRHIP2026288, BRHIP2026346, BRHIP2026557, BRHIP2026723, BRHIP2026877, BRHIP2027017, BRHIP2027054, BRHIP2027563, BRHIP2027685, BRHIP2027762, BRHIP2028187, BRHIP2028303, BRHIP2028330, BRHIP2028480, BRHIP2028583, BRHIP2028593, BRHIP2029176, BRHIP2029283, BRHIP2029393, BRHIP2029529, BRHIP2029643, BRHIP2029663, BRHIP3000060, BRHIP3000070, BRHIP3000081, BRHIP3000131, BRHIP3000240, BRHIP3000377, BRHIP3000457, BRHIP3000475, BRHIP3000488, BRHIP3000526, BRHIP3000626, BRHIP3000859, BRHIP3000907, BRHIP3001076, BRHIP3001079, BRHIP3001141, BRHIP3001283, BRHIP3001338, BRHIP3001360, BRHIP3001481, BRHIP3001878, BRHIP3001964, BRHIP3002114, BRHIP3002124, BRHIP3002363, BRHIP3002920, BRHIP3002931, BRHIP3003063, BRHIP3003126, BRHIP3003306, BRHIP3003340, BRHIP3003395, BRHIP3003484, BRHIP3003644, BRHIP3003688, BRHIP3003795, BRHIP3003961, BRHIP3003984, BRHIP3004193, BRHIP3004215, BRHIP3004416, BRHIP3004710, BRHIP3004725, BRHIP3004774, BRHIP3004786, BRHIP3004863, BRHIP3004968, BRHIP3005037, BRHIP3005137, BRHIP3005142, BRHIP3005231, BRHIP3005307, BRHIP3005574, BRHIP3005673, BRHIP3005768, BRHIP3005801, BRHIP3005944, BRHIP3006279, BRHIP3006294, BRHIP3006390, BRHIP3006449, BRHIP3006683, BRHIP3006786, BRHIP3006950, BRHIP3007172, BRHIP3007183, BRHIP3007195, BRHIP3007223, BRHIP3007239, BRHIP3007291, BRHIP3007409, BRHIP3007424, BRHIP3007483, BRHIP3007609, BRHIP3007640, BRHIP3007960, BRHIP3008082, BRHIP3008183, BRHIP3008314, BRHIP3008320, BRHIP3008344, BRHIP3008405, BRHIP3008565, BRHIP3008598, BRHIP3008606, BRHIP3008691, BRHIP3008714, BRHIP3008997, BRHIP3009140, BRHIP3009181, BRHIP3009318, BRHIP3009427, BRHIP3009448, BRHIP3009672, BRHIP3009753, BRHIP3010135, BRHIP3010289, BRHIP3010529, BRHIP3011082, BRHIP3011241, BRHIP3011269, BRHIP3011460, BRHIP3011567, BRHIP3011831, BRHIP3012185, BRHIP3012289, BRHIP3012357, BRHIP3012736, BRHIP3012745, BRHIP3012868, BRHIP3013078, BRHIP3013271, BRHIP3013588, BRHIP3013698, BRHIP3013765, BRHIP3013897, BRHIP3014237, BRHIP3014675, BRHIP3015620, BRHIP3015751, BRHIP3015854, BRHIP3016032, BRHIP3016213, BRHIP3016302, BRHIP3016421, BRHIP3017109, BRHIP3017146, BRHIP3017256, BRHIP3017325, BRHIP3017558, BRHIP3017637, BRHIP3018278, BRHIP3018784, BRHIP3019643, BRHIP3019824, BRHIP3019880, BRHIP3019956, BRHIP3020155, BRHIP3020182, BRHIP3020733, BRHIP3021499, BRHIP3021534, BRHIP3021778, BRHIP3021987, BRHIP3022656, BRHIP3023922, BRHIP3024118, BRHIP3024533, BRHIP3024703, BRHIP3024725, BRHIP3024820, BRHIP3025161, BRHIP3025702, BRHIP3025795, BRHIP3025844, BRHIP3026052, BRHIP3026097, BRHIP3026231, BRHIP3026335, BRHIP3026651, BRHIP3027105, BRHIP3027137, BRHIP3027160, BRHIP3027191, BRHIP3027501, BRHIP3027594, BRHIP3027651, BRHIP3027854, BRHIP3027947, BRHIP3028570, BRHIP3028742, BRSSN1000059, BRSSN1000092, BRSSN1000153, BRSSN2000097, BRSSN2000175, BRSSN2000197, BRSSN2000244, BRSSN2000293, BRSSN2000295, BRSSN2000518, BRSSN2000684, BRSSN2000715, BRSSN2000832, BRSSN2001213, BRSSN2001275, BRSSN2001342, BRSSN2001426, BRSSN2001503, BRSSN2001579, BRSSN2001758, BRSSN2001810, BRSSN2001869, BRSSN2002857, BRSSN2002859, BRSSN2003012, BRSSN2003086, BRSSN2003093, BRSSN2003820, BRSSN2003841, BRSSN2003937, BRSSN2004142, BRSSN2004303, BRSSN2004304, BRSSN2004496, BRSSN2004657, BRSSN2004679, BRSSN2004686, BRSSN2004710, BRSSN2004719, BRSSN2005847, BRSSN2006133, BRSSN2006390, BRSSN2006575, BRSSN2006611, BRSSN2006644, BRSSN2006892, BRSSN2007076, BRSSN2007168, BRSSN2007202, BRSSN2007504, BRSSN2007819, BRSSN2008125, BRSSN2008419, BRSSN2008464, BRSSN2008549, BRSSN2008797, BRSSN2009119, BRSSN2009378, BRSSN2009389, BRSSN2009395, BRSSN2009518, BRSSN2009627, BRSSN2009630, BRSSN2009702, BRSSN2010019, BRSSN2010110, BRSSN2010587, BRSSN2010596, BRSSN2010830, BRSSN2011262, BRSSN2011738, BRSSN2012081, BRSSN2012103, BRSSN2012157, BRSSN2012198, BRSSN2012254, BRSSN2012439, BRSSN2012622, BRSSN2012691, BRSSN2012838, BRSSN2013095, BRSSN2013544, BRSSN2013702, BRSSN2013733, BRSSN2013753, BRSSN2013874, BRSSN2014112, BRSSN2014294, BRSSN2014299, BRSSN2014424, BRSSN2014513, BRSSN2014556, BRSSN2014573, BRSSN2014610, BRSSN2014636, BRSSN2014685, BRSSN2015199, BRSSN2015369, BRSSN2015493, BRSSN2015497, BRSSN2015554, BRSSN2015707, BRSSN2015773, BRSSN2015907, BRSSN2015982, BRSSN2016589, BRSSN2016768, BRSSN2016905, BRSSN2017297, BRSSN2017422, BRSSN2017530, BRSSN2017682, BRSSN2017757, BRSSN2018218, BRSSN2018440, BRSSN2018447, BRSSN2018581, BRSSN2018731, BRSSN2018771, BRSSN2018925, BRSTN1000097, BRSTN2000058, BRSTN2000070, BRSTN2000312, BRSTN2000367, BRSTN2000536, BRSTN2000872, BRSTN2001067, BRSTN2001613, BRSTN2001801, BRSTN2002105, BRSTN2002400, BRSTN2002532, BRSTN2002691, BRSTN2003590, BRSTN2003835, BRSTN2004863, BRSTN2004869, BRSTN2004987, BRSTN2005721, BRSTN2006306, BRSTN2006466, BRSTN2006580, BRSTN2006583, BRSTN2006638, BRSTN2006865, BRSTN2007000, BRSTN2007118, BRSTN2007284, BRSTN2007765, BRSTN2008052, BRSTN2008283, BRSTN2008367, BRSTN2008418, BRSTN2008457, BRSTN2008475, BRSTN2008930, BRSTN2009247, BRSTN2010107, BRSTN2010363, BRSTN2010416, BRSTN2010500, BRSTN2010569, BRSTN2010923, BRSTN2011211, BRSTN2011597, BRSTN2011688, BRSTN2011799, BRSTN2012284, BRSTN2012320, BRSTN2012380, BRSTN2012451, BRSTN2013171, BRSTN2013354, BRSTN2013931, BRSTN2014490, BRSTN2014633, BRSTN2014751, BRSTN2014770, BRSTN2015015, BRSTN2015889, BRSTN2015978, BRSTN2016066, BRSTN2016335, BRSTN2016678, BRSTN2016918, BRSTN2016992, BRSTN2017151, BRSTN2017237, BRSTN2017379, BRSTN2017761, BRSTN2017771, BRSTN2017995, BRSTN2018077, BRSTN2018083, BRSTN2018596, BRSTN2018692, BRSTN2018712, BRSTN2019079, BRSTN2019129, BRTHA1000021, BRTHA1000063, BRTHA1000311, BRTHA2000057, BRTHA2000474, BRTHA2000514, BRTHA2000574, BRTHA2000855, BRTHA2000969, BRTHA2000972, BRTHA2001304, BRTHA2001370, BRTHA2001462, BRTHA2001717, BRTHA2001812, BRTHA2002091, BRTHA2002115, BRTHA2002133, BRTHA2002281, BRTHA2002376, BRTHA2002442, BRTHA2002493, BRTHA2002565, BRTHA2002608, BRTHA2002702, BRTHA2002721, BRTHA2002726, BRTHA2002741, BRTHA2002808, BRTHA2002896, BRTHA2002903, BRTHA2003030, BRTHA2003110, BRTHA2003116, BRTHA2003436, BRTHA2003759, BRTHA2003794, BRTHA2004361, BRTHA2004371, BRTHA2004582, BRTHA2004629, BRTHA2004639, BRTHA2004642, BRTHA2004812, BRTHA2004821, BRTHA2004978, BRTHA2004992, BRTHA2005005, BRTHA2005013, BRTHA2005448, BRTHA2005579, BRTHA2005831, BRTHA2005942, BRTHA2005956, BRTHA2006075, BRTHA2006146, BRTHA2006194, BRTHA2006232, BRTHA2006720, BRTHA2006735, BRTHA2006974, BRTHA2006975, BRTHA2007060, BRTHA2007122, BRTHA2007422, BRTHA2007603, BRTHA2007665, BRTHA2007998, BRTHA2008316, BRTHA2008335, BRTHA2008513, BRTHA2008527, BRTHA2008535, BRTHA2008598, BRTHA2008669, BRTHA2008955, BRTHA2009311, BRTHA2009349, BRTHA2009486, BRTHA2009803, BRTHA2009846, BRTHA2009886, BRTHA2009972, BRTHA2010008, BRTHA2010033, BRTHA2010073, BRTHA2010097, BRTHA2010191, BRTHA2010397, BRTHA2010608, BRTHA2010672, BRTHA2010884, BRTHA2010907, BRTHA2011062, BRTHA2011194, BRTHA2011321, BRTHA2011351, BRTHA2011500, BRTHA2011641, BRTHA2011691, BRTHA2012129, BRTHA2012183, BRTHA2012189, BRTHA2012351, BRTHA2012392, BRTHA2012466, BRTHA2012555, BRTHA2012562, BRTHA2012980, BRTHA2013054, BRTHA2013262, BRTHA2013275, BRTHA2013426, BRTHA2013460, BRTHA2013515, BRTHA2013540, BRTHA2013595, BRTHA2013610, BRTHA2013707, BRTHA2013942, BRTHA2014287, BRTHA2014334, BRTHA2014381, BRTHA2014578, BRTHA2014647, BRTHA2014663, BRTHA2014792, BRTHA2014828, BRTHA2014909, BRTHA2014975, BRTHA2014997, BRTHA2015406, BRTHA2015478, BRTHA2015696, BRTHA2015700, BRTHA2015853, BRTHA2015878, BRTHA2016179, BRTHA2016215, BRTHA2016267, BRTHA2016318, BRTHA2016496, BRTHA2016543, BRTHA2016552, BRTHA2016765, BRTHA2016918, BRTHA2017178, BRTHA2017353, BRTHA2017364, BRTHA2017972, BRTHA2017985, BRTHA2018011, BRTHA2018129, BRTHA2018165, BRTHA2018304, BRTHA2018344, BRTHA2018420, BRTHA2018443, BRTHA2018504, BRTHA2018558, BRTHA2018591, BRTHA2018624, BRTHA2018706, BRTHA2018707, BRTHA2019014, BRTHA2019022, BRTHA2019048, BRTHA2019073, BRTHA2019726, BRTHA2019743, BRTHA2020400, BRTHA2020566, BRTHA2020642, BRTHA2020695, BRTHA2020721, BRTHA2020781, BRTHA2020811, BRTHA2020910, BRTHA2021212, BRTHA2021440, BRTHA2021450, BRTHA2022074, BRTHA2022914, BRTHA2022968, BRTHA2023402, BRTHA2023437, BRTHA2024177, BRTHA2024354, BRTHA2024712, BRTHA2025869, BRTHA2026071, BRTHA2026290, BRTHA2026311, BRTHA2027227, BRTHA2027250, BRTHA2027546, BRTHA2028297, BRTHA2029969, BRTHA2030036, BRTHA2030213, BRTHA2031517, BRTHA2031800, BRTHA2031917, BRTHA2032763, BRTHA2032845, BRTHA2033122, BRTHA2033264, BRTHA2033320, BRTHA2033469, BRTHA2033683, BRTHA2034281, BRTHA2034576, BRTHA2034874, BRTHA2035448, BRTHA2035743, BRTHA2036055, BRTHA2036295, BRTHA2036660, BRTHA2037247, BRTHA2038279, BRTHA2038345, BRTHA2038353, BRTHA2038396, BRTHA3000252, BRTHA3000273, BRTHA3000296, BRTHA3000297, BRTHA3000325, BRTHA3000456, BRTHA3000633, BRTHA3000789, BRTHA3001221, BRTHA3001623, BRTHA3002265, BRTHA3002401, BRTHA3002411, BRTHA3002427, BRTHA3002864, BRTHA3002933, BRTHA3002955, BRTHA3003000, BRTHA3003023, BRTHA3003074, BRTHA3003225, BRTHA3003339, BRTHA3003343, BRTHA3003417, BRTHA3003449, BRTHA3003474, BRTHA3003490, BRTHA3003704, BRTHA3003736, BRTHA3004307, BRTHA3004432, BRTHA3004475, BRTHA3004502, BRTHA3004610, BRTHA3005046, BRTHA3005735, BRTHA3005988, BRTHA3006318, BRTHA3006593, BRTHA3006856, BRTHA3007113, BRTHA3007130, BRTHA3007148, BRTHA3007319, BRTHA3007469, BRTHA3007472, BRTHA3007532, BRTHA3007662, BRTHA3007685, BRTHA3007769, BRTHA3007922, BRTHA3008143, BRTHA3008293, BRTHA3008310, BRTHA3008386, BRTHA3008520, BRTHA3008608, BRTHA3008694, BRTHA3008778, BRTHA3008826, BRTHA3009037, BRTHA3009291, BRTHA3010135, BRTHA3010366, BRTHA3010469, BRTHA3010540, BRTHA3010717, BRTHA3011149, BRTHA3011187, BRTHA3011229, BRTHA3011265, BRTHA3011361, BRTHA3011510, BRTHA3011892, BRTHA3012265, BRTHA3013860, BRTHA3013882, BRTHA3013884, BRTHA3013981, BRTHA3014000, BRTHA3014105, BRTHA3014507, BRTHA3014547, BRTHA3014691, BRTHA3014835, BRTHA3014854, BRTHA3014908, BRTHA3014920, BRTHA3015815, BRTHA3016616, BRTHA3016835, BRTHA3016845, BRTHA3016917, BRTHA3017047, BRTHA3017589, BRTHA3017848, BRTHA3018409, BRTHA3018514, BRTHA3018617, BRTHA3018623, BRTHA3018656, BRTHA3019048, BRTHA3019105, BRTHA3019183, BRTHA3020000, BRTHA3020314, BRTHA3020369, BRTHA3021569, BRTHA3021708, BRTHA3021786, BRTHA3021971, BRTHA3023403, BRTHA3023523, BRTHA3023590, BRTHA3023929, BRTHA3024233, BRTHA3024600, BRTHA3025073, BRTHA3025789, BRTHA3025826, BRTHA3026161, BRTHA3026180, BRTHA3026507, BRTHA3026556, BRTHA3026916, BRTHA3027171, BRTHA3027318, BRTHA3027638, BRTHA3027820, BRTHA3027879, BRTHA3027957, BRTHA3028339, BRTHA3028505, BRTHA3028782, CD34C2000051, CD34C2000152, CD34C2000175, CD34C2000443, CD34C3000125, CD34C3000314, CD34C3000424, CD34C3000494, CERVX1000042, CERVX2000812, CERVX2000968, CERVX2002006, CERVX2002013, CERVX2002430, CERVX2002770, CHONS1000058, CHONS2000172, CHONS2000797, CHONS2001287, CHONS2001382, CHONS2001797, CHONS2001834, CHONS2002419, CHONS2002829, COLON1000030, COLON1000084, COLON1000135, COLON2000470, COLON2000557, COLON2000568, COLON2001721, COLON2001829, COLON2001866, COLON2002443, COLON2002520, COLON2003043, COLON2003529, COLON2004318, COLON2004351, COLON2004478, COLON2004911, COLON2005126, COLON2005623, COLON2005735, COLON2005772, COLON2006263, COLON2006282, COLON2006417, COLON2007274, COLON2007733, COLON2008105, COLON2009337, COLON2009499, CORDB1000140, CORDB2000061, CORDB2000127, CORDB2000541, CTONG1000009, CTONG1000010, CTONG1000020′, CTONG1000022, CTONG1000040, CTONG1000056, CTONG1000062, CTONG1000086, CTONG1000088, CTONG1000093, CTONG1000097, CTONG1000113, CTONG1000137, CTONG1000165, CTONG1000175, CTONG1000180, CTONG1000181, CTONG1000220, CTONG1000277, CTONG1000283, CTONG1000288, CTONG1000302, CTONG1000341, CTONG1000467, CTONG1000476, CTONG1000488, CTONG1000508, CTONG1000540, CTONG2000031, CTONG2000034, CTONG2000042, CTONG2000063, CTONG2000201, CTONG2000218, CTONG2000279, CTONG2000303, CTONG2000330, CTONG2000395, CTONG2000411, CTONG2000465, CTONG2000469, CTONG2000480, CTONG2000561, CTONG2000589, CTONG2000766, CTONG2000771, CTONG2000819, CTONG2000827, CTONG2000846, CTONG2000855, CTONG2000977, CTONG2001226, CTONG2001366, CTONG2001413, CTONG2001428, CTONG2001513, CTONG2001524, CTONG2001533, CTONG2001598, CTONG2001681, CTONG2001724, CTONG2001749, CTONG2001800, CTONG2001820, CTONG2001858, CTONG2001877, CTONG2001932, CTONG2001955, CTONG2002066, CTONG2002095, CTONG2002143, CTONG2002395, CTONG2002417, CTONG2002418, CTONG2002520, CTONG2002558, CTONG2002590, CTONG2002709, CTONG2002721, CTONG2002766, CTONG2002816, CTONG2002832, CTONG2002841, CTONG2002965, CTONG2002999, CTONG2003028, CTONG2003100, CTONG2003115, CTONG2003189, CTONG2003245, CTONG2003348, CTONG2003350, CTONG2003361, CTONG2003372, CTONG2003375, CTONG2003427, CTONG2003517, CTONG2003599, CTONG2003680, CTONG2003699, CTONG2003764, CTONG2003782, CTONG2003889, CTONG2003937, CTONG2003945, CTONG2004000, CTONG2004062, CTONG2004115, CTONG2004126, CTONG2004264, CTONG2004305, CTONG2004397, CTONG2004423, CTONG2004454, CTONG2004487, CTONG2004550, CTONG2004669, CTONG2004716, CTONG2004912, CTONG2004941, CTONG2004948, CTONG2005028, CTONG2005049, CTONG2005110, CTONG2005145, CTONG2005265, CTONG2005278, CTONG2005374, CTONG2005399, CTONG2005468, CTONG2005567, CTONG2005585, CTONG2005615, CTONG2005635, CTONG2005775, CTONG2005795, CTONG2005890, CTONG2005904, CTONG2005913, CTONG2006004, CTONG2006129, CTONG2006223, CTONG2006273, CTONG2006310, CTONG2006377, CTONG2006393, CTONG2006449, CTONG2006515, CTONG2006524, CTONG2006568, CTONG2006611, CTONG2006620, CTONG2006666, CTONG2006691, CTONG2006836, CTONG2006942, CTONG2006964, CTONG2007007, CTONG2007009, CTONG2007072, CTONG2007078, CTONG2007091, CTONG2007104, CTONG2007168, CTONG2007175, CTONG2007259, CTONG2007272, CTONG2007293, CTONG2007297, CTONG2007399, CTONG2007400, CTONG2007417, CTONG2007441, CTONG2007474, CTONG2007613, CTONG2007623, CTONG2007681, CTONG2007779, CTONG2007898, CTONG2007959, CTONG2007970, CTONG2008014, CTONG2008184, CTONG2008262, CTONG2008269, CTONG2008321, CTONG2008343, CTONG2008402, CTONG2008405, CTONG2008466, CTONG2008562, CTONG2008577, CTONG2008595, CTONG2008621, CTONG2008689, CTONG2008720, CTONG2008721, CTONG2008773, CTONG2008989, CTONG2009033, CTONG2009108, CTONG2009132, CTONG2009156, CTONG2009181, CTONG2009257, CTONG2009258, CTONG2009268, CTONG2009270, CTONG2009395, CTONG2009423, CTONG2009440, CTONG2009527, CTONG2009529, CTONG2009531, CTONG2009534, CTONG2009570, CTONG2009572, CTONG2009604, CTONG2009643, CTONG2009675, CTONG2009689, CTONG2009725, CTONG2009766, CTONG2009768, CTONG2009844, CTONG2009871, CTONG2009887, CTONG2009891, CTONG2009923, CTONG2009938, CTONG2009955, CTONG2009958, CTONG2009963, CTONG2010018, CTONG2010024, CTONG2010116, CTONG2010133, CTONG2010148, CTONG2010276, CTONG2010330, CTONG2010348, CTONG2010408, CTONG2010508, CTONG2010623, CTONG2010652, CTONG2010803, CTONG2011188, CTONG2011429, CTONG2011474, CTONG2011676, CTONG2011716, CTONG2011765, CTONG2011779, CTONG2011815, CTONG2011822, CTONG2011825, CTONG2011920, CTONG2011985, CTONG2012029, CTONG2012077, CTONG2012101, CTONG2012123, CTONG2012158, CTONG2012230, CTONG2012422, CTONG2012425, CTONG2012447, CTONG2012453, CTONG2012473, CTONG2012476, CTONG2012533, CTONG2012554, CTONG2012564, CTONG2012607, CTONG2012661, CTONG2012724, CTONG2012738, CTONG2012745, CTONG2012758, CTONG2012843, CTONG2012847, CTONG2012879, CTONG2012901, CTONG2013128, CTONG2013149, CTONG2013156, CTONG2013178, CTONG2013222, CTONG2013284, CTONG2013339, CTONG2013352, CTONG2013393, CTONG2013511, CTONG2013630, CTONG2013803, CTONG2013934, CTONG2013986, CTONG2014032, CTONG2014058, CTONG2014119, CTONG2014191, CTONG2014206, CTONG2014234, CTONG2014264, CTONG2014280, CTONG2014369, CTONG2014491, CTONG2014630, CTONG2014635, CTONG2014646, CTONG2014705, CTONG2014946, CTONG2014954, CTONG2014959, CTONG2014966, CTONG2014995, CTONG2015316, CTONG2015330, CTONG2015345, CTONG2015358, CTONG2015434, CTONG2015518, CTONG2015540, CTONG2015596, CTONG2015633, CTONG2015678, CTONG2015717, CTONG2015804, CTONG2015815, CTONG2015866, CTONG2015914, CTONG2015953, CTONG2016185, CTONG2016217, CTONG2016355, CTONG2016499, CTONG2016505, CTONG2016559, CTONG2016658, CTONG2016775, CTONG2016797, CTONG2016846, CTONG2016869, CTONG2016904, CTONG2016931, CTONG2016942, CTONG2016953, CTONG2017021, CTONG2017094, CTONG2017292, CTONG2017409, CTONG2017429, CTONG2017444, CTONG2017458, CTONG2017500, CTONG2017604, CTONG2017650, CTONG2017798, CTONG2017804, CTONG2017814, CTONG2017910, CTONG2017939, CTONG2017989, CTONG2017998, CTONG2018062, CTONG2018069, CTONG2018147, CTONG2018211, CTONG2018217, CTONG2018279, CTONG2018334, CTONG2018379, CTONG2018383, CTONG2018413, CTONG2018483, CTONG2018629, CTONG2018632, CTONG2018652, CTONG2018653, CTONG2018655, CTONG2018735, CTONG2018808, CTONG2018900, CTONG2018976, CTONG2019029, CTONG2019144, CTONG2019232, CTONG2019400, CTONG2019590, CTONG2019652, CTONG2019704, CTONG2019788, CTONG2019822, CTONG2019833, CTONG2020031, CTONG2020108, CTONG2020127, CTONG2020171, CTONG2020374, CTONG2020378, CTONG2020445, CTONG2020638, CTONG2020806, CTONG2020831, CTONG2020974, CTONG2021024, CTONG2021132, CTONG2021168, CTONG2021289, CTONG2022153, CTONG2022601, CTONG2023021, CTONG2023449, CTONG2023512, CTONG2024031, CTONG2024206, CTONG2024614, CTONG2024749, CTONG2025496, CTONG2025513, CTONG2025516, CTONG2025610, CTONG2025900, CTONG2026513, CTONG2026770, CTONG2026920, CTONG2026987, CTONG2027150, CTONG2027263, CTONG2027327, CTONG2027361, CTONG2027591, CTONG2027736, CTONG2027783, CTONG2027828, CTONG2027959, CTONG2028097, CTONG2028208, CTONG2028309, CTONG2028486, CTONG2028518, CTONG2028687, CTONG2028758, CTONG3000657, CTONG3000686, CTONG3000707, CTONG3000896, CTONG3001420, CTONG3001501, CTONG3001560, CTONG3001605, CTONG3001746, CTONG3002020, CTONG3002127, CTONG3002370, CTONG3002412, CTONG3002433, CTONG3002518, CTONG3002552, CTONG3002588, CTONG3002674, CTONG3002728, CTONG3002909, CTONG3002947, CTONG3002983, CTONG3003165, CTONG3003179, CTONG3003483, CTONG3003553, CTONG3003598, CTONG3003652, CTONG3003654, CTONG3003669, CTONG3003737, CTONG3003905, CTONG3003972, CTONG3004072, CTONG3004317, CTONG3004397, CTONG3004550, CTONG3004576, CTONG3004607, CTONG3004712, CTONG3004726, CTONG3005325, CTONG3005648, CTONG3005713, CTONG3005803; CTONG3005813, CTONG3006067, CTONG3006073, CTONG3006186, CTONG3006629, CTONG3006650, CTONG3006659, CTONG3007244, CTONG3007444, CTONG3007528, CTONG3007586, CTONG3007870, CTONG3008223, CTONG3008252, CTONG3008258, CTONG3008457, CTONG3008496, CTONG3008566, CTONG3008639, CTONG3008831, CTONG3008951, CTONG3008959, CTONG3009028, CTONG3009227, CTONG3009287, CTONG3009328, CTONG3009385, FEHRT2000325, FEHRT2000364, FEKID1000018, FELIV1000101, FELIV1000137, FELIV1000164, FELNG2000241, HCASM1000021, HCASM1000050, HCASM1000061, HCASM1000130, HCASM2000138, HCASM2000156, HCASM2000202, HCASM2000214, HCASM2000266, HCASM2000307, HCASM2000534, HCASM2000536, HCASM2000560, HCASM2000871, HCASM2001285, HCASM2001810, HCASM2001866, HCASM2001890, HCASM2002148, HCASM2002502, HCASM2002754, HCASM2002918, HCASM2003018, HCASM2003076, HCASM2003099, HCASM2003212, HCASM2003237, HCASM2003357, HCASM2003415, HCASM2005484, HCASM2006131, HCASM2006338, HCASM2006359, HCASM2006632, HCASM2007047, HCASM2007317, HCASM2007737, HCASM2007773, HCASM2008154, HCASM2008536, HCASM2009405, HCASM2009424, HCASM2009463, HCASM2009588, HCHON1000131, HCHON1000142, HCHON1000176, HCHON1000191, HCHON2000038, HCHON2000062, HCHON2000087, HCHON2000100, HCHON2000156, HCHON2000199, HCHON2000226, HCHON2000265, HCHON2000271, HCHON2000315, HCHON2000322, HCHON2000344, HCHON2000364, HCHON2000373, HCHON2000395, HCHON2000417, HCHON2000418, HCHON2000473, HCHON2000475, HCHON2000503, HCHON2000626, HCHON2000660, HCHON2000663, HCHON2000673, HCHON2000699, HCHON2000705, HCHON2000815, HCHON2000817, HCHON2000818, HCHON2000819, HCHON2000851, HCHON2000898, HCHON2000935, HCHON2000956, HCHON2000994, HCHON2001084, HCHON2001108, HCHON2001110, HCHON2001116, HCHON2001161, HCHON2001214, HCHON2001233, HCHON2001269, HCHON2001359, HCHON2001450, HCHON2001453, HCHON2001497, HCHON2001505, HCHON2001519, HCHON2001523, HCHON2001535, HCHON2001546, HCHON2001548, HCHON2001577, HCHON2001598, HCHON2001604, HCHON2001607, HCHON2001646, HCHON2001712, HCHON2001768, HCHON2001801, HCHON2001853, HCHON2002123, HCHON2002194, HCHON2002241, HCHON2002247, HCHON2002354, HCHON2002676, HCHON2002770, HCHON2002964, HCHON2002971, HCHON2003131, HCHON2003134, HCHON2003327, HCHON2003513, HCHON2003532, HCHON2003642, HCHON2003659, HCHON2003676, HCHON2004007, HCHON2004279, HCHON2004359, HCHON2004531, HCHON2004776, HCHON2004858, HCHON2005048, HCHON2005118, HCHON2005802, HCHON2005921, HCHON2005987, HCHON2006250, HCHON2006459, HCHON2006714, HCHON2006722, HCHON2006786, HCHON2006841, HCHON2006871, HCHON2007046, HCHON2007482, HCHON2007650, HCHON2007674, HCHON2007774, HCHON2007881, HCHON2008112, HCHON2008239, HCHON2008444, HCHON2008582, HCHON2008672, HCHON2008856, HCHON2008871, HCHON2008989, HCHON2009191, HCHON2009384, HCHON2009749, HCHON2009766, HCHON2009795, HCHON2010074, HEART1000010, HEART1000074, HEART1000088, HEART1000099, HEART1000102, HEART1000118, HEART1000132, HEART1000139, HEART1000142, HEART1000151, HEART1000185, HEART2000024, HEART2000035, HEART2000099, HEART2000298, HEART2000306, HEART2000309, HEART2000411, HEART2000418, HEART2000444, HEART2000448, HEART2000492, HEART2000506, HEART2000520, HEART2000541, HEART2000568, HEART2000611, HEART2000959, HEART2001680, HEART2001756, HEART2002129, HEART2002184, HEART2002220, HEART2002432, HEART2002531, HEART2002598, HEART2002717, HEART2003027, HEART2003168, HEART2003432, HEART2003440, HEART2003781, HEART2003836, HEART2003852, HEART2004570, HEART2004764, HEART2004931, HEART2004940, HEART2004941, HEART2004980, HEART2005244, HEART2005310, HEART2005581, HEART2005610, HEART2006131, HEART2006195, HEART2006310, HEART2006334, HEART2006487, HEART2006557, HEART2006787, HEART2006789, HEART2006909, HEART2007031, HEART2007443, HEART2007696, HEART2007767, HEART2008108, HEART2008111, HEART2008257, HEART2008509, HEART2008994, HEART2009000, HEART2009599, HEART2009680, HEART2010391, HEART2010492, HEART2010495, HELAC2000158, HELAC2000301, HHDPC1000001, HHDPC1000065, HHDPC2000070, HHDPC2000102, HHDPC2000115, HHDPC2000258, HHDPC2000315, HHDPC2000456, HHDPC2000462, HHDPC2000572, HHDPC2000656, HHDPC2000692, HHDPC2001337, HHDPC2001432, HHDPC2001896, HHDPC2002963, HHDPC2003049, HHDPC2003113, HHDPC2003381, HHDPC2003472, HHDPC2004757, HHDPC2005185, HHDPC2005513, HHDPC2005742, HHDPC2005794, HHDPC2006460, HHDPC2006927, HHDPC2007302, HHDPC2007775, HHDPC2008123, HHDPC2008185, HHDPC2008279, HHDPC2008297, HHDPC2008414, HHDPC2008474, HHDPC2008816, HHDPC2008843, HHDPC2009114, HHDPC2009178, HHDPC2009208, HHDPC2009272, HLUNG1000017, HLUNG1000024, HLUNG1000030, HLUNG1000034, HLUNG1000037, HLUNG1000053, HLUNG1000064, HLUNG1000076, HLUNG1000084, HLUNG1000099, HLUNG1000104, HLUNG1000105, HLUNG1000110, HLUNG1000151, HLUNG1000169, HLUNG2000004, HLUNG2000014, HLUNG2000027, HLUNG2000068, HLUNG2000116, HLUNG2000125, HLUNG2000130, HLUNG2000142, HLUNG2000174, HLUNG2000176, HLUNG2000217, HLUNG2000255, HLUNG2000281, HLUNG2000315, HLUNG2000340, HLUNG2000362, HLUNG2000363, HLUNG2000431, HLUNG2000480, HLUNG2000489, HLUNG2000549, HLUNG2000557, HLUNG2000570, HLUNG2000751, HLUNG2000761, HLUNG2000777, HLUNG2000846, HLUNG2000870, HLUNG2000926, HLUNG2000955, HLUNG2000970, HLUNG2001013, HLUNG2001126, HLUNG2001144, HLUNG2001146, HLUNG2001214, HLUNG2001459, HLUNG2001507, HLUNG2001633, HLUNG2001677, HLUNG2001712, HLUNG2001814, HLUNG2001996, HLUNG2002006, HLUNG2002050, HLUNG2002085, HLUNG2002145, HLUNG2002295, HLUNG2002303, HLUNG2002405, HLUNG2002429, HLUNG2002465, HLUNG2002562, HLUNG2002648, HLUNG2002659, HLUNG2002707, HLUNG2002811, HLUNG2002916, HLUNG2002942, HLUNG2002949, HLUNG2002958, HLUNG2002982, HLUNG2003003, HLUNG2003042, HLUNG2003049, HLUNG2003061, HLUNG2003162, HLUNG2003246, HLUNG2003306, HLUNG2003331, HLUNG2003335, HLUNG2003378, HLUNG2003497, HLUNG2003691, HLUNG2003710, HLUNG2003714, HLUNG2003716, HLUNG2003778, HLUNG2003833, HLUNG2003872, HLUNG2003918, HLUNG2003991, HLUNG2004014, HLUNG2004037, HLUNG2004067, HLUNG2004154, HLUNG2004170, HLUNG2004217, HLUNG2004273, HLUNG2004388, HLUNG2004416, HLUNG2004521, HLUNG2004534, HLUNG2004684, HLUNG2004707, HLUNG2004775, HLUNG2005012, HLUNG2005030, HLUNG2005045, HLUNG2005076, HLUNG2005133, HLUNG2005203, HLUNG2005479, HLUNG2005524, HLUNG2005656, HLUNG2005738, HLUNG2005774, HLUNG2005813, HLUNG2005924, HLUNG2006026, HLUNG2006067, HLUNG2006094, HLUNG2006370, HLUNG2006397, HLUNG2006570, HLUNG2006599, HLUNG2006614, HLUNG2006671, HLUNG2006781, HLUNG2006843, HLUNG2006852, HLUNG2006935, HLUNG2007041, HLUNG2007163, HLUNG2007210, HLUNG2007219, HLUNG2007245, HLUNG2007433, HLUNG2007931, HLUNG2008066, HLUNG2008139, HLUNG2008153, HLUNG2008225, HLUNG2008235, HLUNG2008247, HLUNG2008333, HLUNG2008348, HLUNG2008384, HLUNG2008396, HLUNG2008439, HLUNG2008479, HLUNG2008480, HLUNG2008521, HLUNG2008637, HLUNG2008833, HLUNG2008875, HLUNG2008958, HLUNG2008959, HLUNG2009067, HLUNG2009215, HLUNG2009253, HLUNG2009303, HLUNG2009413, HLUNG2009729, HLUNG2010181, HLUNG2010464, HLUNG2010562, HLUNG2010845, HLUNG2011041, HLUNG2011298, HLUNG2011461, HLUNG2011833, HLUNG2012049, HLUNG2012287, HLUNG2012315, HLUNG2012546, HLUNG2012600, HLUNG2012727, HLUNG2013097, HLUNG2013204, HLUNG2013304, HLUNG2013350, HLUNG2013622, HLUNG2013643, HLUNG2013784, HLUNG2013851, HLUNG2014262, HLUNG2014288, HLUNG2014449, HLUNG2014821, HLUNG2015184, HLUNG2015418, HLUNG2015548, HLUNG2015578, HLUNG2015617, HLUNG2016022, HLUNG2016862, HLUNG2017286, HLUNG2017307, HLUNG2017350, HLUNG2017546, HLUNG2017806, HLUNG2018029, HLUNG2018282, HLUNG2018626, HLUNG2019058, HSYRA1000131, HSYRA1000137, HSYRA1000148, HSYRA1000178, HSYRA2000044, HSYRA2000135, HSYRA2000137, HSYRA2000224, HSYRA2000237, HSYRA2000253, HSYRA2000255, HSYRA2000371, HSYRA2000424, HSYRA2000507, HSYRA2000510, HSYRA2000605, HSYRA2000629, HSYRA2000706, HSYRA2000760, HSYRA2000792, HSYRA2000828, HSYRA2000832, HSYRA2000925, HSYRA2000927, HSYRA2001003, HSYRA2001105, HSYRA2001142, HSYRA2001153, HSYRA2001232, HSYRA2001255, HSYRA2001332, HSYRA2001353, HSYRA2001420, HSYRA2001484, HSYRA2001552, HSYRA2001638, HSYRA2001983, HSYRA2002103, HSYRA2002590, HSYRA2002741, HSYRA2003168, HSYRA2004550, HSYRA2004858, HSYRA2005456, HSYRA2005496, HSYRA2005628, HSYRA2005970, HSYRA2006049, HSYRA2006873, HSYRA2007241, HSYRA2007338, HSYRA2007650, HSYRA2007667, HSYRA2008154, HSYRA2008714, HSYRA2009102, IMR321000155, IMR321000158, IMR321000161, IMR321000165, IMR321000207, IMR321000230, IMR321000266, IMR322000010, IMR322000072, IMR322000107, IMR322000152, IMR322000164, IMR322000178, IMR322000302, IMR322000374, IMR322000379, IMR322000383, IMR322000418, IMR322000518, IMR322000604, IMR322000609, IMR322000656, IMR322000672, IMR322000742, IMR322000775, IMR322000791, IMR322000811, IMR322000838, IMR322000859, IMR322000863, IMR322000919, IMR322000953, IMR322000984, IMR322001018, IMR322001049, IMR322001167, IMR322001185, IMR322001245, IMR322001317, IMR322001318, IMR322001322, IMR322001438, IMR322001452, IMR322001491, IMR322001534, IMR322001665, IMR322001710, IMR322001724, IMR322001879, IMR322002035, IMR322002110, IMR322002470, IMR322002993, IMR322003675, IMR322004768, IMR322005293, IMR322005833, IMR322006012, IMR322006222, IMR322006495, IMR322006520, IMR322006886, IMR322006947, IMR322007078, IMR322007225, IMR322007704, IMR322008651, IMR322009710, IMR322009807, IMR322010295, IMR322010953, IMR322011689, IMR322012314, IMR322013053, IMR322013396, IMR322013731, IMR322013805, IMR322015523, IMR322016146, IMR322017049, IMR322018117, IMR322018192, JCMLC2000273, KIDNE1000008, KIDNE1000012, KIDNE1000015, KIDNE1000028, KIDNE1000036, KIDNE1000064, KIDNE1000104, KIDNE1000121, KIDNE1000143, KIDNE1000145, KIDNE1000152, KIDNE2000026, KIDNE2000041, KIDNE2000046, KIDNE2000051, KIDNE2000070, KIDNE2000167, KIDNE2000174, KIDNE2000192, KIDNE2000227, KIDNE2000244, KIDNE2000245, KIDNE2000266, KIDNE2000287, KIDNE2000315, KIDNE2000317, KIDNE2000328, KIDNE2000330, KIDNE2000335, KIDNE2000349, KIDNE2000375, KIDNE2000383, KIDNE2000394, KIDNE2000422, KIDNE2000493, KIDNE2000497, KIDNE2000510, KIDNE2000513, KIDNE2000517, KIDNE2000519, KIDNE2000555, KIDNE2000624, KIDNE2000678, KIDNE2000717, KIDNE2000721, KIDNE2000722, KIDNE2000777, KIDNE2000801, KIDNE2000832, KIDNE2000833, KIDNE2000846, KIDNE2000867, KIDNE2000909, KIDNE2001117, KIDNE2001140, KIDNE2001269, KIDNE2001361, KIDNE2001373, KIDNE2001636, KIDNE2001802, KIDNE2001840, KIDNE2001847, KIDNE2001857, KIDNE2001873, KIDNE2001897, KIDNE2001931, KIDNE2001979, KIDNE2002015, KIDNE2002162, KIDNE2002168, KIDNE2002191, KIDNE2002198, KIDNE2002252, KIDNE2002262, KIDNE2002483, KIDNE2002725, KIDNE2002768, KIDNE2002795, KIDNE2002798, KIDNE2002839, KIDNE2002845, KIDNE2002882, KIDNE2002980, KIDNE2002991, KIDNE2003185, KIDNE2003188, KIDNE2003233, KIDNE2003305, KIDNE2003316, KIDNE2003335, KIDNE2003357, KIDNE2003377, KIDNE2003507, KIDNE2003752, KIDNE2003764, KIDNE2003837, KIDNE2003994, KIDNE2004034, KIDNE2004054, KIDNE2004084, KIDNE2004095, KIDNE2004115, KIDNE2004233, KIDNE2004262, KIDNE2004279, KIDNE2004294, KIDNE2004295, KIDNE2004344, KIDNE2004394, KIDNE2004411, KIDNE2004519, KIDNE2004520, KIDNE2004531, KIDNE2004534, KIDNE2004562, KIDNE2004579, KIDNE2004681, KIDNE2004828, KIDNE2004864, KIDNE2004879, KIDNE2004981, KIDNE2004985, KIDNE2004999, KIDNE2005038, KIDNE2005042, KIDNE2005062, KIDNE2005266, KIDNE2005296, KIDNE2005321, KIDNE2005327, KIDNE2005400, KIDNE2005424, KIDNE2005477, KIDNE2005526, KIDNE2005543, KIDNE2005603, KIDNE2005629, KIDNE2005781, KIDNE2005798, KIDNE2005854, KIDNE2005908, KIDNE2005937, KIDNE2006009, KIDNE2006030, KIDNE2006039, KIDNE2006053, KIDNE2006062, KIDNE2006092, KIDNE2006145, KIDNE2006149, KIDNE2006210, KIDNE2006299, KIDNE2006334, KIDNE2006353, KIDNE2006376, KIDNE2006378, KIDNE2006580, KIDNE2006652, KIDNE2006687, KIDNE2006733, KIDNE2006760, KIDNE2006775, KIDNE2006820, KIDNE2007005, KIDNE2007040, KIDNE2007077, KIDNE2007186, KIDNE2007222, KIDNE2007328, KIDNE2007356, KIDNE2007422, KIDNE2007569, KIDNE2007810, KIDNE2007811, KIDNE2007910, KIDNE2007944, KIDNE2007954, KIDNE2008022, KIDNE2008048, KIDNE2008069, KIDNE2008072, KIDNE2008116, KIDNE2008117, KIDNE2008218, KIDNE2008315, KIDNE2008362, KIDNE2008378, KIDNE2008446, KIDNE2008473, KIDNE2008480, KIDNE2008649, KIDNE2008666, KIDNE2008697, KIDNE2008758, KIDNE2008788, KIDNE2008795, KIDNE2008824, KIDNE2008832, KIDNE2008869, KIDNE2008914, KIDNE2008975, KIDNE2008987, KIDNE2009019, KIDNE2009109, KIDNE2009180, KIDNE2009191, KIDNE2009332, KIDNE2009426, KIDNE2009467, KIDNE2009490, KIDNE2009553, KIDNE2009605, KIDNE2009628, KIDNE2009647, KIDNE2009676, KIDNE2009723, KIDNE2010007, KIDNE2010049, KIDNE2010052, KIDNE2010084, KIDNE2010137, KIDNE2010151, KIDNE2010264, KIDNE2010271, KIDNE2010419, KIDNE2010430, KIDNE2010574, KIDNE2010674, KIDNE2010739, KIDNE2010750, KIDNE2010762, KIDNE2010863, KIDNE2010973, KIDNE2010989, KIDNE2011200, KIDNE2011314, KIDNE2011508, KIDNE2011532, KIDNE2011635, KIDNE2011752, KIDNE2011782, KIDNE2011858, KIDNE2012009, KIDNE2012025, KIDNE2012188, KIDNE2012291, KIDNE2012316, KIDNE2012361, KIDNE2012440, KIDNE2012453, KIDNE2012563, KIDNE2012601, KIDNE2012613, KIDNE2012710, KIDNE2012745, KIDNE2012775, KIDNE2012784, KIDNE2012945, KIDNE2013045, KIDNE2013095, KIDNE2013158, KIDNE2013218, KIDNE2013263, KIDNE2013346, KIDNE2013388, KIDNE2013489, KIDNE2013639, KIDNE2013731, KIDNE2013734, KIDNE2013775, KIDNE2013801, KIDNE2013866, KIDNE2014087, KIDNE2014112, KIDNE2014119, KIDNE2014170, KIDNE2014184, KIDNE2014268, KIDNE2014298, KIDNE2014320, KIDNE2014325, KIDNE2014415, KIDNE2014489, KIDNE2014496, KIDNE2014661, KIDNE2014717, KIDNE2014789, KIDNE2014808, KIDNE2014890, KIDNE2014978, KIDNE2015073, KIDNE2015221, KIDNE2015244, KIDNE2015313, KIDNE2015433, KIDNE2015483, KIDNE2015515, KIDNE2015546, KIDNE2015556, KIDNE2015598, KIDNE2015660, KIDNE2015710, KIDNE2015987, KIDNE2016000, KIDNE2016036, KIDNE2016096, KIDNE2016101, KIDNE2016142, KIDNE2016188, KIDNE2016327, KIDNE2016371, KIDNE2016388, KIDNE2016464, KIDNE2016539, KIDNE2016570, KIDNE2016918, KIDNE2017007, KIDNE2017040, KIDNE2017052, KIDNE2017151, KIDNE2017153, KIDNE2017315, KIDNE2017332, KIDNE2017343, KIDNE2017454, KIDNE2017603, KIDNE2017956, KIDNE2018071, KIDNE2018166, KIDNE2018167, KIDNE2018217, KIDNE2018254, KIDNE2018268, KIDNE2018269, KIDNE2018287, KIDNE2018294, KIDNE2018462, KIDNE2018617, KIDNE2018678, KIDNE2018727, KIDNE2018863, KIDNE2018891, KIDNE2018989, KIDNE2018996, KIDNE2019074, KIDNE2019187, LIVER1000017, LIVER1000050, LIVER1000055, LIVER1000058, LIVER1000063, LIVER1000067, LIVER1000073, LIVER1000079, LIVER1000082, LIVER1000099, LIVER1000104, LIVER1000111, LIVER1000126, LIVER1000139, LIVER1000155, LIVER1000165, LIVER1000175, LIVER1000224, LIVER1000278, LIVER1000303, LIVER1000397, LIVER1000421, LIVER1000433, LIVER1000479, LIVER1000482, LIVER1000542, LIVER2000003, LIVER2000033, LIVER2000037, LIVER2000158, LIVER2000216, LIVER2000237, LIVER2000247, LIVER2000360, LIVER2000446, LIVER2000515, LIVER2000592, LIVER2000626, LIVER2000682, LIVER2000769, LIVER2000775, LIVER2001051, LIVER2001076, LIVER2001099, LIVER2001113, LIVER2001164, LIVER2001191, LIVER2001265, LIVER2001329, LIVER2001389, LIVER2001461, LIVER2001608, LIVER2001835, LIVER2002638, LIVER2002644, LIVER2002660, LIVER2002702, LIVER2003008, LIVER2003065, LIVER2003234, LIVER2003511, LIVER2003524, LIVER2003568, LIVER2003581, LIVER2003800, LIVER2003854, LIVER2004074, LIVER2004392, LIVER2004514, LIVER2004565, LIVER2005028, LIVER2005198, LIVER2005218, LIVER2005376, LIVER2005385, LIVER2005512, LIVER2005520, LIVER2005527, LIVER2005544, LIVER2005625, LIVER2005728, LIVER2005789, LIVER2005973, LIVER2005981, LIVER2006251, LIVER2006410, LIVER2006469, LIVER2006644, LIVER2006764, LIVER2007415, LIVER2007548, LIVER2007568, LIVER2007721, LIVER2007783, LIVER2008053, LIVER2008465, LIVER2008473, LIVER2008580, LIVER2008706, LIVER2008751, LIVER2008945, LIVER2008998, LIVER2009110, LIVER2009118, LIVER2009554, LYMPB100141, LYMPB1000158, LYMPB2000083, MAMGL1000017, MAMGL1000083, MAMGL1000096, MAMGL1000100, MAMGL1000132, MAMGL1000151, MAMGL1000173, MAMGL1000178, MAMGL1000182, MAMGL1000184, MESAN1000032, MESAN1000035, MESAN1000079, MESAN1000080, MESAN1000121, MESAN1000126, MESAN1000147, MESAN1000180, MESAN2000023, MESAN2000026, MESAN2000167, MESAN2000264, MESAN2000291, MESAN2000337, MESAN2000434, MESAN2000457, MESAN2000462, MESAN2000501, MESAN2000608, MESAN2000620, MESAN2000711, MESAN2000815, MESAN2000894, MESAN2000909, MESAN2001154, MESAN2001627, MESAN2001770, MESAN2001979, MESAN2001980, MESAN2002113, MESAN2002122, MESAN2002147, MESAN2002424, MESAN2002687, MESAN2002709, MESAN2002940, MESAN2002978, MESAN2003037, MESAN2003039, MESAN2003058, MESAN2003101, MESAN2003190, MESAN2003322, MESAN2003444, MESAN2003490, MESAN2003529, MESAN2003646, MESAN2003662, MESAN2003709, MESAN2003851, MESAN2004138, MESAN2005284, MESAN2005303, MESAN2005371, MESAN2005633, MESAN2005724, MESAN2005808, MESAN2005811, MESAN2005957, MESAN2005958, MESAN2006022, MESAN2006043, MESAN2006328, MESAN2006580, MESAN2006599, MESAN2006743, MESAN2006953, MESAN2007032, MESAN2007440, MESAN2007597, MESAN2008222, MESAN2008334, MESAN2008415, MESAN2008460, MESAN2008536, MESAN2008679, MESAN2008729, MESAN2008821, MESAN2009019, MESAN2009105, MESAN2009311, MESAN2009418, MESAN2009503, MESAN2009522, MESAN2009580, MESAN2010031, MESAN2010114, MESAN2010312, MESAN2010321, MESAN2010664, MESAN2010681, MESAN2011545, MESAN2011597, MESAN2011632, MESAN2011977, MESAN2012113, MESAN2012586, MESAN2012708, MESAN2012735, MESAN2013019, MESAN2013022, MESAN2013183, MESAN2013211, MESAN2013283, MESAN2013611, MESAN2013674, MESAN2013845, MESAN2013908, MESAN2013936, MESAN2014192, MESAN2014295, MESAN2014298, MESAN2014412, MESAN2014624, MESAN2015277, MESAN2015365, MESAN2015391, MESAN2015401, MESAN2015501, MESAN2015515, MESAN2015708, MESAN2016159, MESAN2016304, MESAN2016409, MESAN2016552, MESAN2016965, MESAN2017133, MESAN2017152, MESAN2017373, MESAN2017417, MESAN2018209, MESAN2018576, MESAN2018670, MESAN2018699, MESTC1000042, MESTC1000147, MESTC2000150, MESTC2000153, MESTC2000170, N1ESE2000698, NB9N41000047, NB9N41000121, NB9N41000135, NB9N41000142, NB9N41000146, NB9N41000340, NB9N42000122, NB9N42000196, NB9N42000314, NB9N42000342, NB9N42000430, NB9N42000495, NB9N42001300, NCRRP1000129, NESOP1000010, NESOP1000087, NESOP1000108, NESOP2000231, NESOP2000452, NESOP2000499, NESOP2000504, NESOP2000744, NESOP2001144, NESOP2001433, NESOP2001656, NESOP2001694, NESOP2001752, NESOP2002352, NESOP2002418, NESOP2002487, NESOP2002738, NESOP2002780, NETRP1000034, NETRP1000082, NETRP2000086, NETRP2000182, NETRP2000439, NHNPC1000034, NHNPC1000037, NHNPC1000084, NHNPC1000101, NHNPC1000124, NHNPC2000062, NHNPC2000606, NHNPC2000877, NHNPC2001108, NHNPC2001312, NHNPC2001816, NHNPC2002565, NHNPC2002749, NOVAR1000015, NOVAR1000091, NOVAR1000102, NOVAR2000038, NOVAR2000136, NOVAR2000352, NOVAR2000412, NOVAR2000710, NOVAR2000783, NOVAR2000962, NOVAR2001108, NOVAR2001620, NOVAR2001783, NOVAR2001876, NOVAR2002039, NT2NE1000004, NT2NE1000014, NT2NE1000023, NT2NE1000059, NT2NE1000063, NT2NE1000083, NT2NE1000120, NT2NE1000122, NT2NE1000175, NT2NE1000181, NT2NE1000185, NT2NE2000038, NT2NE2000054, NT2NE2000057, NT2NE2000064, NT2NE2000109, NT2NE2000137, NT2NE2000156, NT2NE2000174, NT2NE2000195, NT2NE2000222, NT2NE2000259, NT2NE2000284, NT2NE2000299, NT2NE2000356, NT2NE2000369, NT2NE2000374, NT2NE2000384, NT2NE2000390, NT2NE2000455, NT2NE2000488, NT2NE2000517, NT2NE2000536, NT2NE2000546, NT2NE2000548, NT2NE2000550, NT2NE2000586, NT2NE2000612, NT2NE2000636, NT2NE2000658, NT2NE2000706, NT2NE2000802, NT2NE2000808, NT2NE2000864, NT2NE2000913, NT2NE2000950, NT2NE2000951, NT2NE2000963, NT2NE2000980, NT2NE2001005, NT2NE2001021, NT2NE2001040, NT2NE2001049, NT2NE2001142, NT2NE2001156, NT2NE2001180, NT2NE2001181, NT2NE2001188, NT2NE2001191, NT2NE2001247, NT2NE2001252, NT2NE2001324, NT2NE2001326, NT2NE2001364, NT2NE2001372, NT2NE2001397, NT2NE2001403, NT2NE2001428, NT2NE2001432, NT2NE2001524, NT2NE2001598, NT2NE2001623, NT2NE2001626, NT2NE2001634, NT2NE2001648, NT2NE2001655, NT2NE2001660, NT2NE2001666, NT2NE2001677, NT2NE2001697, NT2NE2001698, NT2NE2001723, NT2NE2001725, NT2NE2001874, NT2NE2001889, NT2NE2001923, NT2NE2002100, NT2NE2002162, NT2NE2002186, NT2NE2002285, NT2NE2002311, NT2NE2002620, NT2NE2002651, NT2NE2002732, NT2NE2002768, NT2NE2002791, NT2NE2002856, NT2NE2002870, NT2NE2003150, NT2NE2003252, NT2NE2003308, NT2NE2003309, NT2NE2003315, NT2NE2003408, NT2NE2003457, NT2NE2003540, NT2NE2003571, NT2NE2003705, NT2NE2003752, NT2NE2003887, NT2NE2003921, NT2NE2004378, NT2NE2004490, NT2NE2004606, NT2NE2004716, NT2NE2004740, NT2NE2004787, NT2NE2004916, NT2NE2005035, NT2NE2005223, NT2NE2005276, NT2NE2005317, NT2NE2005323, NT2NE2005358, NT2NE2005419, NT2NE2005441, NT2NE2005517, NT2NE2005537, NT2NE2005555, NT2NE2005588, NT2NE2005676, NT2NE2005720, NT2NE2005784, NT2NE2005804, NT2NE2005821, NT2NE2005890, NT2NE2005921, NT2NE2005968, NT2NE2006075, NT2NE2006217, NT2NE2006288, NT2NE2006382, NT2NE2006387, NT2NE2006427, NT2NE2006432, NT2NE2006478, NT2NE2006531, NT2NE2006659, NT2NE2006784, NT2NE2006813, NT2NE2006894, NT2NE2006942, NT2NE2007052, NT2NE2007220, NT2NE2007425, NT2NE2007725, NT2NE2007727, NT2NE2007786, NT2NE2007877, NT2NE2007967, NT2NE2008017, NT2NE2008060, NT2NE2008077, NT2NE2008260, NT2NE2008378, NT2NE2008607, NT2NE2008639, NT2NE2008727, NT2NE2008783, NT2NE2008785, NT2NE2008803, NT2NE2008867, NT2NE2008961, NT2NE2008997, NT2NE2009138, NT2NE2009426, NT2NE2009523, NT2NE2009608, NT2NE2009691, NT2NE2010105, NT2NE2010150, NT2NE2010400, NT2NE2010632, NT2NE2010633, NT2NE2010654, NT2NE2010688, NT2NE2010781, NT2NE2010854, NT2NE2011036, NT2NE2011107, NT2NE2011119, NT2NE2011154, NT2NE2011221, NT2NE2011411, NT2NE2011485, NT2NE2011650, NT2NE2011684, NT2NE2011687, NT2NE2011691, NT2NE2011758, NT2NE2011823, NT2NE2011896, NT2NE2011998, NT2NE2012113, NT2NE2012199, NT2NE2012243, NT2NE2012361, NT2NE2012448, NT2NE2012457, NT2NE2012493, NT2NE2012505, NT2NE2012533, NT2NE2012603, NT2NE2012747, NT2NE2012790, NT2NE2012847, NT2NE2012928, NT2NE2013019, NT2NE2013081, NT2NE2013189, NT2NE2013217, NT2NE2013547, NT2NE2014013, NT2NE2014028, NT2NE2014176, NT2NE2014221, NT2NE2014525, NT2NE2014650, NT2NE2014651, NT2NE2014681, NT2NE2014758, NT2NE2014869, NT2NE2014950, NT2NE2015061, NT2NE2015262, NT2NE2015275, NT2NE2015362, NT2NE2015480, NT2NE2015511, NT2NE2015565, NT2NE2015626, NT2NE2015747, NT2NE2015860, NT2NE2015885, NT2NE2015904, NT2NE2015974, NT2NE2016041, NT2NE2016387, NT2NE2016419, NT2NE2016519, NT2NE2016608, NT2NE2016766, NT2NE2016774, NT2NE2016971, NT2NE2017259, NT2NE2017332, NT2NE2017397, NT2NE2017480, NT2NE2017492, NT2NE2017508, NT2NE2017562, NT2NE2017590, NT2NE2017612, NT2NE2017721, NT2NE2017752, NT2NE2017792, NT2NE2017982, NT2NE2018165, NT2NE2018176, NT2NE2018180, NT2NE2018273, NT2NE2018376, NT2NE2018472, NT2NE2018490, NT2NE2018594, NT2NE2018739, NT2NE2018916, NT2NE2019056, NT2NE2019076, NT2NE2019099, NT2RI1000016, NT2RI1000027, NT2RI1000035, NT2RI1000164, NT2RI1000172, NT2RI2000004, NT2RI2000007, NT2RI2000107, NT2RI2000117, NT2RI2000128, NT2RI2000167, NT2RI2000173, NT2RI2000187, NT2RI2000263, NT2RI2000270, NT2RI2000276, NT2RI2000284, NT2RI2000313, NT2RI2000341, NT2RI2000421, NT2RI2000480, NT2RI2000575, NT2RI2000588, NT2RI2000597, NT2RI2000669, NT2RI2000671, NT2RI2000688, NT2RI2000689, NT2RI2000704, NT2RI2000738, NT2RI2000775, NT2RI2000822, NT2RI2000841, NT2RI2000865, NT2RI2000932, NT2RI2000974, NT2RI2000987, NT2RI2001010, NT2RI2001017, NT2RI2001030, NT2RI2001083, NT2RI2001167, NT2RI2001178, NT2RI2001230, NT2RI2001235, NT2RI2001244, NT2RI2001307, NT2RI2001409, NT2RI2001410, NT2RI2001425, NT2RI2001449, NT2RI2001474, NT2RI2001519, NT2RI2001595, NT2RI2001624, NT2RI2001726, NT2RI2001769, NT2RI2001782, NT2RI2001836, NT2RI2001846, NT2RI2001866, NT2RI2001910, NT2RI2002022, NT2RI2002041, NT2RI2002120, NT2RI2002153, NT2RI2002179, NT2RI2002243, NT2RI2002252, NT2RI2002260, NT2RI2002266, NT2RI2002270, NT2RI2002334, NT2RI2002359, NT2RI2002447, NT2RI2002481, NT2RI2002507, NT2RI2002517, NT2RI2002530, NT2RI2002549, NT2RI2002564, NT2RI2002585, NT2RI2002592, NT2RI2002602, NT2RI2002729, NT2RI2002802, NT2RI2002822, NT2RI2002852, NT2RI2002865, NT2RI2002923, NT2RI2002926, NT2RI2002970, NT2RI2003011, NT2RI2003067, NT2RI2003184, NT2RI2003205, NT2RI2003222, NT2RI2003338, NT2RI2003344, NT2RI2003360, NT2RI2003392, NT2RI2003399, NT2RI2003419, NT2RI2003481, NT2RI2003487, NT2RI2003655, NT2RI2003667, NT2RI2003678, NT2RI2003884, NT2RI2004059, NT2RI2004078, NT2RI2004079, NT2RI2004093, NT2RI2004136, NT2RI2004157, NT2RI2004188, NT2RI2004190, NT2RI2004284, NT2RI2004290, NT2RI2004304, NT2RI2004312, NT2RI2004381, NT2RI2004442, NT2RI2004468, NT2RI2004535, NT2RI2004606, NT2RI2004608, NT2RI2004618, NT2RI2004783, NT2RI2004818, NT2RI2004840, NT2RI2004916, NT2RI2004962, NT2RI2004984, NT2RI2004985, NT2RI2005048, NT2RI2005061, NT2RI2005069, NT2RI2005087, NT2RI2005096, NT2RI2005115, NT2RI2005130, NT2RI2005166, NT2RI2005239, NT2RI2005246, NT2RI2005315, NT2RI2005358, NT2RI2005382, NT2RI2005473, NT2RI2005520, NT2RI2005621, NT2RI2005628, NT2RI2005647, NT2RI2005670, NT2RI2005710, NT2RI2005772, NT2RI2005814, NT2RI2005851, NT2RI2005966, NT2RI2006070, NT2RI2006071, NT2RI2006081, NT2RI2006126, NT2RI2006127, NT2RI2006257, NT2RI2006271, NT2RI2006294, NT2RI2006345, NT2RI2006403, NT2RI2006445, NT2RI2006487, NT2RI2006553, NT2RI2006565, NT2RI2006640, NT2RI2006659, NT2RI2006662, NT2RI2006667, NT2RI2006679, NT2RI2006682, NT2RI2006686, NT2RI2006703, NT2RI2006716, NT2RI2006735, NT2RI2006762, NT2RI2006788, NT2RI2006838, NT2RI2006853, NT2RI2006855, NT2RI2006973, NT2RI2007046, NT2RI2007048, NT2RI2007084, NT2RI2007096, NT2RI2007116, NT2RI2007148, NT2RI2007214, NT2RI2007303, NT2RI2007334, NT2RI2007386, NT2RI2007406, NT2RI2007439, NT2RI2007445, NT2RI2007469, NT2RI2007498, NT2RI2007507, NT2RI2007593, NT2RI2007729, NT2RI2007751, NT2RI2007754, NT2RI2007827, NT2RI2007853, NT2RI2007877, NT2RI2007879, NT2RI2007891, NT2RI2007956, NT2RI2007965, NT2RI2008007, NT2RI2008050, NT2RI2008141, NT2RI2008188, NT2RI2008204, NT2RI2008233, NT2RI2008455, NT2RI2008481, NT2RI2008502, NT2RI2008598, NT2RI2008622, NT2RI2008656, NT2RI2008714, NT2RI2008801, NT2RI2008812, NT2RI2008841, NT2RI2008952, NT2RI2009005, NT2RI2009066, NT2RI2009083, NT2RI2009101, NT2RI2009103, NT2RI2009144, NT2RI2009151, NT2RI2009215, NT2RI2009289, NT2RI2009301, NT2RI2009517, NT2RI2009583, NT2RI2009585, NT2RI2009595, NT2RI2009855, NT2RI2010283, NT2RI2010508, NT2RI2010795, NT2RI2011422, NT2RI2011450, NT2RI2011683, NT2RI2011803, NT2RI2012659, NT2RI2012726, NT2RI2012990, NT2RI2013345, NT2RI2013357, NT2RI2013373, NT2RI2014247, NT2RI2014551, NT2RI2014683, NT2RI2014733, NT2RI2015239, NT2RI2016128, NT2RI2016134, NT2RI2018311, NT2RI2018363, NT2RI2018448, NT2RI2018883, NT2RI2018950, NT2RI2019751, NT2RI2019826, NT2RI2020390, NT2RI2020703, NT2RI2021463, NT2RI2021625, NT2RI2022468, NT2RI2022584, NT2RI2023303, NT2RI2023671, NT2RI2024008, NT2RI2024313, NT2RI2024460, NT2RI2024496, NT2RI2024935, NT2RI2025075, NT2RI2025255, NT2RI2025564, NT2RI2025565, NT2RI2025909, NT2RI2025957, NT2RI2025976, NT2RI2026758, NT2RI2027081, NT2RI2027157, NT2RI2027224, NT2RI2027323, NT2RI2027396, NT2RI2027484, NT2RI2027975, NT2RI2028213, NT2RI2028222, NT2RI2028537, NT2RI2028642, NT2RI3000174, NT2RI3000213, NT2RI3000423, NT2RI3001132, NT2RI3001263, NT2RI3001279, NT2RI3001348, NT2RI3001445, NT2RI3001458, NT2RI3001515, NT2RI3001573, NT2RI3001967, NT2RI3002303, NT2RI3002557, NT2RI3002842, NT2RI3003027, NT2RI3003031, NT2RI3003095, NT2RI3003104, NT2RI3003162, NT2RI3003362, NT2RI3003382, NT2RI3003409, NT2RI3003738, NT2RI3003925, NT2RI3004133, NT2RI3004381, NT2RI3004510, NT2RI3005202, NT2RI3005403, NT2RI3005416, NT2RI3005724, NT2RI3005861, NT2RI3005923, NT2RI3005928, NT2RI3006132, NT2RI3006171, NT2RI3006284, NT2RI3006340, NT2RI3006376, NT2RI3006666, NT2RI3006673, NT2RI3006796, NT2RI3007065, NT2RI3007095, NT2RI3007158, NT2RI3007167, NT2RI3007213, NT2RI3007291, NT2RI3007443, NT2RI3007543, NT2RI3007684, NT2RI3007757, NT2RI3007878, NT2RI3007978, NT2RI3008055, NT2RI3008162, NT2RI3008179, NT2RI3008228, NT2RI3008442, NT2RI3008652, NT2RI3008697, NT2RI3008974, NT2RI3009158, NT2RI3009480, NT2RI3009524, NT2RP6000005, NT2RP6000008, NT2RP6000032, NT2RP6000033, NT2RP6000039, NT2RP6000043, NT2RP6000059, NT2RP6000060, NT2RP6000077, NT2RP6000085, NT2RP6000086, NT2RP6000100, NT2RP6000119, NT2RP6000127, NT2RP6000130, NT2RP6000140, NT2RP6000150, NT2RP7000041, NT2RP7000069, NT2RP7000086, NT2RP7000109, NT2RP7000112, NT2RP7000259, NT2RP7000311, NT2RP7000359, NT2RP7000364, NT2RP7000380, NT2RP7000391, NT2RP7000579, NT2RP7000586, NT2RP7000600, NT2RP7000812, NT2RP7000926, NT2RP7001074, NT2RP7001080, NT2RP7001156, NT2RP7001306, NT2RP7001319, NT2RP7001335, NT2RP7001364, NT2RP7001475, NT2RP7001532, NT2RP7001602, NT2RP7001678, NT2RP7001856, NT2RP7001962, NT2RP7002064, NT2RP7002151, NT2RP7002163, NT2RP7002243, NT2RP7002282, NT2RP7002376, NT2RP7002449, NT2RP7002450, NT2RP7002478, NT2RP7002554, NT2RP7002594, NT2RP7002603, NT2RP7002619, NT2RP7002650, NT2RP7002779, NT2RP7002829, NT2RP7002841, NT2RP7002906, NT2RP7002978, NT2RP7002982, NT2RP7003025, NT2RP7003050, NT2RP7003055, NT2RP7003084, NT2RP7003091, NT2RP7003107, NT2RP7003134, NT2RP7003148, NT2RP7003439, NT2RP7003629, NT2RP7003632, NT2RP7003647, NT2RP7003680, NT2RP7004027, NT2RP7004080, NT2RP7004114, NT2RP7004233, NT2RP7004260, NT2RP7004358, NT2RP7004396, NT2RP7004428, NT2RP7004541, NT2RP7004559, NT2RP7004641, NT2RP7004656, NT2RP7004687, NT2RP7004722, NT2RP7004766, NT2RP7004790, NT2RP7004911, NT2RP7004915, NT2RP7004961, NT2RP7004964, NT2RP7004975, NT2RP7005118, NT2RP7005205, NT2RP7005219, NT2RP7005323, NT2RP7005468, NT2RP7005493, NT2RP7005529, NT2RP7005629, NT2RP7005631, NT2RP7005669, NT2RP7005675, NT2RP7005750, NT2RP7005846, NT2RP7006033, NT2RP7006075, NT2RP7006141, NT2RP7006160, NT2RP7006162, NT2RP7006263, NT2RP7006296, NT2RP7006304, NT2RP7006374, NT2RP7006395, NT2RP7006408, NT2RP7006457, NT2RP7006490, NT2RP7006539, NT2RP7006547, NT2RP7006601, NT2RP7006621, NT2RP7006636, NT2RP7006701, NT2RP7006853, NT2RP7006886, NT2RP7006887, NT2RP7006980, NT2RP7006995, NT2RP7007154, NT2RP7007177, NT2RP7007221, NT2RP7007226, NT2RP7007252, NT2RP7007310, NT2RP7007359, NT2RP7007381, NT2RP7007406, NT2RP7007480, NT2RP7007504, NT2RP7007537, NT2RP7007580, NT2RP7007594, NT2RP7007610, NT2RP7007617, NT2RP7007643, NT2RP7007766, NT2RP7007925, NT2RP7007930, NT2RP7007975, NT2RP7008013, NT2RP7008133, NT2RP7008137, NT2RP7008142, NT2RP7008144, NT2RP7008161, NT2RP7008315, NT2RP7008360, NT2RP7008396, NT2RP7008406, NT2RP7008435, NT2RP7008454, NT2RP7008487, NT2RP7008543, NT2RP7008544, NT2RP7008550, NT2RP7008557, NT2RP7008623, NT2RP7008657, NT2RP7008720, NT2RP7008855, NT2RP7008863, NT2RP7009012, NT2RP7009019, NT2RP7009147, NT2RP7009149, NT2RP7009168, NT2RP7009215, NT2RP7009236, NT2RP7009253, NT2RP7009267, NT2RP7009322, NT2RP7009363, NT2RP7009370, NT2RP7009373, NT2RP7009397, NT2RP7009429, NT2RP7009439, NT2RP7009466, NT2RP7009502, NT2RP7009507, NT2RP7009743, NT2RP7009867, NT2RP7010109, NT2RP7010128, NT2RP7010235, NT2RP7010275, NT2RP7010521, NT2RP7010599, NT2RP7010612, NT2RP7010817, NT2RP7011086, NT2RP7011132, NT2RP7011268, NT2RP7011452, NT2RP7011570, NT2RP7011721, NT2RP7011909, NT2RP7012291, NT2RP7012516, NT2RP7012776, NT2RP7013002, NT2RP7013374, NT2RP7013499, NT2RP7013573, NT2RP7013729, NT2RP7013795, NT2RP7013999, NT2RP7014005, NT2RP7014178, NT2RP7014348, NT2RP7014420, NT2RP7014583, NT2RP7014721, NT2RP7014743, NT2RP7014778, NT2RP7014906, NT2RP7014910, NT2RP7015080, NT2RP7015431, NT2RP7015503, NT2RP7015676, NT2RP7015789, NT2RP7015996, NT2RP7016508, NT2RP7016574, NT2RP7016622, NT2RP7016911, NT2RP7017139, NT2RP7017284, NT2RP7017365, NT2RP7017474, NT2RP7017546, NT2RP7017567, NT2RP7017795, NT2RP7017971, NT2RP7018032, NT2RP7018126, NT2RP7018197, NT2RP7018206, NT2RP7018340, NT2RP7018586, NT2RP7018802, NT2RP7018871, NT2RP7019064, NT2RP7019135, NT2RP7019273, NT2RP7019367, NT2RP7019445, NT2RP7019543, NT2RP7019682, NT2RP7019835, NT2RP7020112, NT2RP7020123, NT2RP7020343, NT2RP7020379, NT2RP8000137, NT2RP8000296, NT2RP8000435, NT2RP8000483, NT2RP8000521, NT2RP8000633, NT2RP8001363, NT2RP8001407, NT2RP8001584, NT2RP8001605, NT2RP8003490, NT2RP8003657, NT2RP8003787, NT2RP8004306, NT2RP8005546, NT2RP8006452, NT2RP8006521, NT2RP8007416, NT2RP8007503, NT2RP8007715, NT2RP8008057, NT2RP8009248, NTONG1000006, NTONG1000047, NTONG1000052, NTONG1000075, NTONG1000087, NTONG1000123, NTONG1000130, NTONG1000161, NTONG1000172, NTONG1000182, NTONG1000213, NTONG1000214, NTONG1000246, NTONG1000247, NTONG1000257, NTONG2000040, NTONG2000107, NTONG2000231, NTONG2000363, NTONG2000413, NTONG2000492, NTONG2000499, NTONG2000531, NTONG2000583, NTONG2000800, NTONG2000858, NTONG2000876, NTONG2000966, NTONG2001014, NTONG2001079, NTONG2001137, NTONG2001157, NTONG2001173, NTONG2001220, NTONG2001222, NTONG2001362, NTONG2001428, NTONG2001532, NTONG2001567, NTONG2001587, NTONG2001619, NTONG2001642, NTONG2001657, NTONG2001676, NTONG2002278, NTONG2002582, NTONG2002807, NTONG2002948, NTONG2002970, NTONG2002985, NTONG2003158, NTONG2003210, NTONG2003316, NTONG2003409, NTONG2003454, NTONG2003515, NTONG2003805, NTONG2003839, NTONG2003852, NTONG2003897, NTONG2003928, NTONG2004095, NTONG2004308, NTONG2004521, NTONG2004614, NTONG2004690, NTONG2004806, NTONG2004829, NTONG2004844, NTONG2004991, NTONG2005062, NTONG2005086, NTONG2005137, NTONG2005153, NTONG2005265, NTONG2005277, NTONG2005363, NTONG2005373, NTONG2005391, NTONG2005480, NTONG2005497, NTONG2005577, NTONG2005657, NTONG2005801, NTONG2005822, NTONG2006099, NTONG2006187, NTONG2006301, NTONG2006324, NTONG2006354, NTONG2006440, NTONG2006484, NTONG2006501, NTONG2006646, NTONG2006783, NTONG2007020, NTONG2007028, NTONG2007034, NTONG2007249, NTONG2007517, NTONG2007522, NTONG2007658, NTONG2007693, NTONG2007756, NTONG2008088, NTONG2008093, NTONG2008143, NTONG2008365, NTONG2008522, NTONG2008672, NTONG2008862, NTONG2008939, NTONG2008944, NTONG2009060, NTONG2009068, NTONG2009229, NTONG2009233, NTONG2009468, NTONG2009576, OCBBF1000016, OCBBF1000030, OCBBF1000042, OCBBF1000054, OCBBF1000085, OCBBF1000086, OCBBF1000091, OCBBF1000118, OCBBF1000119, OCBBF1000122, OCBBF1000130, OCBBF1000138, OCBBF1000145, OCBBF1000175, OCBBF1000192, OCBBF1000254, OCBBF1000315, OCBBF2000231, OCBBF2000287, OCBBF2000452, OCBBF2000522, OCBBF2000677, OCBBF2000703, OCBBF2000712, OCBBF2000719, OCBBF2000824, OCBBF2000982, OCBBF2000998, OCBBF2001075, OCBBF2001101, OCBBF2001124, OCBBF2001140, OCBBF2001176, OCBBF2001186, OCBBF2001196, OCBBF2001307, OCBBF2001389, OCBBF2001408, OCBBF2001416, OCBBF2001473, OCBBF2001494, OCBBF2001527, OCBBF2001528, OCBBF2001586, OCBBF2001681, OCBBF2001706, OCBBF2001910, OCBBF2001931, OCBBF2001961, OCBBF2001983, OCBBF2002015, OCBBF2002083, OCBBF2002086, OCBBF2002124, OCBBF2002161, OCBBF2002357, OCBBF2002615, OCBBF2002805, OCBBF2002865, OCBBF2002920, OCBBF2002980, OCBBF2003028, OCBBF2003091, OCBBF2003327, OCBBF2003543, OCBBF2003593, OCBBF2003744, OCBBF2003819, OCBBF2004147, OCBBF2004168, OCBBF2004235, OCBBF2004259, OCBBF2004385, OCBBF2004418, OCBBF2004478, OCBBF2004482, OCBBF2004533, OCBBF2004567, OCBBF2004612, OCBBF2004647, OCBBF2004669, OCBBF2004826, OCBBF2004866, OCBBF2004883, OCBBF2004889, OCBBF2005066, OCBBF2005077, OCBBF2005161, OCBBF2005343, OCBBF2005349, OCBBF2005373, OCBBF2005420, OCBBF2005433, OCBBF2005476, OCBBF2005546, OCBBF2005843, OCBBF2005901, OCBBF2006005, OCBBF2006030, OCBBF2006058, OCBBF2006148, OCBBF2006151, OCBBF2006154, OCBBF2006214, OCBBF2006241, OCBBF2006388, OCBBF2006438, OCBBF2006567, OCBBF2006624, OCBBF2006639, OCBBF2006660, OCBBF2006972, OCBBF2006987, OCBBF2007039, OCBBF2007051, OCBBF2007068, OCBBF2007114, OCBBF2007121, OCBBF2007184, OCBBF2007194, OCBBF2007224, OCBBF2007238, OCBBF2007354, OCBBF2007414, OCBBF2007428, OCBBF2007478, OCBBF2007485, OCBBF2007520, OCBBF2007555, OCBBF2007610, OCBBF2007622, OCBBF2007756, OCBBF2007931, OCBBF2007946, OCBBF2008116, OCBBF2008138, OCBBF2008144, OCBBF2008283, OCBBF2008330, OCBBF2008366, OCBBF2008483, OCBBF2008511, OCBBF2008520, OCBBF2008569, OCBBF2008586, OCBBF2008640, OCBBF2008691, OCBBF2008724, OCBBF2008760, OCBBF2008768, OCBBF2008775, OCBBF2008790, OCBBF2008814, OCBBF2008822, OCBBF2009095, OCBBF2009115, OCBBF2009242, OCBBF2009352, OCBBF2009536, OCBBF2009571, OCBBF2009583, OCBBF2009603, OCBBF2009788, OCBBF2009920, OCBBF2009926, OCBBF2010040, OCBBF2010140, OCBBF2010281, OCBBF2010313, OCBBF2010404, OCBBF2010416, OCBBF2010420, OCBBF2010557, OCBBF2010604, OCBBF2010709, OCBBF2010792, OCBBF2010858, OCBBF2010863, OCBBF2010931, OCBBF2010945, OCBBF2010978, OCBBF2010989, OCBBF2011137, OCBBF2011160, OCBBF2011177, OCBBF2011228, OCBBF2011283, OCBBF2011311, OCBBF2011669, OCBBF2011685, OCBBF2011706, OCBBF2011722, OCBBF2011767, OCBBF2011855, OCBBF2011872, OCBBF2011897, OCBBF2011914, OCBBF2011960, OCBBF2011981, OCBBF2012001, OCBBF2012028, OCBBF2012039, OCBBF2012139, OCBBF2012262, OCBBF2012320, OCBBF2012436, OCBBF2012525, OCBBF2012704, OCBBF2012714, OCBBF2012755, OCBBF2012812, OCBBF2012881, OCBBF2012936, OCBBF2012990, OCBBF2013049, OCBBF2013091, OCBBF2013123, OCBBF2013127, OCBBF2013208, OCBBF2013285, OCBBF2013319, OCBBF2013324, OCBBF2013366, OCBBF2013507, OCBBF2013721, OCBBF2013883, OCBBF2014052, OCBBF2014089, OCBBF2014576, OCBBF2014707, OCBBF2014745, OCBBF2014828, OCBBF2015031, OCBBF2015081, OCBBF2015115, OCBBF2015232, OCBBF2015233, OCBBF2015285, OCBBF2015334, OCBBF2015335, OCBBF2015506, OCBBF2015645, OCBBF2015659, OCBBF2015797, OCBBF2015931, OCBBF2015980, OCBBF2016038, OCBBF2016467, OCBBF2016590, OCBBF2016591, OCBBF2016612, OCBBF2016689, OCBBF2016690, OCBBF2016729, OCBBF2016841, OCBBF2017055, OCBBF2017069, OCBBF2017306, OCBBF2017325, OCBBF2017489, OCBBF2017516, OCBBF2017665, OCBBF2017815, OCBBF2017882, OCBBF2017920, OCBBF2018014, OCBBF2018084, OCBBF2018167, OCBBF2018206, OCBBF2018229, OCBBF2018362, OCBBF2018380, OCBBF2018563, OCBBF2018581, OCBBF2018618, OCBBF2018663, OCBBF2018687, OCBBF2018827, OCBBF2018828, OCBBF2018934, OCBBF2019108, OCBBF2019195, OCBBF2019327, OCBBF2019684, OCBBF2019761, OCBBF2019823, OCBBF2019950, OCBBF2020048, OCBBF2020318, OCBBF2020343, OCBBF2020453, OCBBF2020741, OCBBF2020801, OCBBF2020825, OCBBF2020838, OCBBF2021020, OCBBF2021214, OCBBF2021323, OCBBF2021518, OCBBF2021788, OCBBF2021833, OCBBF2022351, OCBBF2022573, OCBBF2022574, OCBBF2023598, OCBBF2023643, OCBBF2024463, OCBBF2024589, OCBBF2024719, OCBBF2024779, OCBBF2024781, OCBBF2024850, OCBBF2025028, OCBBF2025115, OCBBF2025198, OCBBF2025451, OCBBF2025458, OCBBF2025527, OCBBF2025631, OCBBF2025730, OCBBF2026025, OCBBF2026035, OCBBF2026144, OCBBF2026645, OCBBF2026649, OCBBF2026690, OCBBF2026981, OCBBF2027148, OCBBF2027197, OCBBF2027354, OCBBF2027423, OCBBF2027478, OCBBF2027481, OCBBF2027511, OCBBF2027661, OCBBF2027728, OCBBF2027782, OCBBF2027868, OCBBF2028055, OCBBF2028173, OCBBF2028421, OCBBF2029471, OCBBF2029901, OCBBF2030116, OCBBF2030329, OCBBF2030354, OCBBF2030517, OCBBF2030574, OCBBF2030708, OCBBF2030927, OCBBF2030963, OCBBF2031167, OCBBF2031198, OCBBF2031366, OCBBF2031561, OCBBF2032152, OCBBF2032274, OCBBF2032539, OCBBF2032590, OCBBF2032599, OCBBF2032611, OCBBF2032671, OCBBF2033413, OCBBF2033869, OCBBF2033948, OCBBF2034333, OCBBF2034529, OCBBF2034637, OCBBF2034906, OCBBF2035110, OCBBF2035214, OCBBF2035390, OCBBF2035564, OCBBF2035658, OCBBF2035823, OCBBF2035885, OCBBF2035916, OCBBF2036019, OCBBF2036031, OCBBF2036225, OCBBF2036476, OCBBF2036743, OCBBF2036752, OCBBF2037068, OCBBF2037340, OCBBF2037398, OCBBF2037464, OCBBF2037547, OCBBF2037598, OCBBF2037638, OCBBF2038238, OCBBF2038285, OCBBF2038317, OCBBF3000097, OCBBF3000213, OCBBF3000296, OCBBF3000372, OCBBF3000380, OCBBF3000743, OCBBF3000830, OCBBF3001076, OCBBF3001202, OCBBF3001333, OCBBF3001616, OCBBF3002553, OCBBF3002600, OCBBF3002654, OCBBF3003103, OCBBF3003209, OCBBF3003592, OCBBF3003745, OCBBF3003761, OCBBF3004264, OCBBF3004314, OCBBF3004487, OCBBF3004972, OCBBF3005330, OCBBF3005597, OCBBF3005843, OCBBF3006802, OCBBF3006986, OCBBF3007078, OCBBF3007704, OCBBF3008230, OCBBF3008392, OCBBF3008835, OCBBF3009192, OCBBF3009244, OCBBF3009279, PANCR1000012, PANCR1000021, PANCR1000081, PANCR1000086, PANCR1000091, PANCR1000185, PEBLM1000024, PEBLM1000029, PEBLM1000034, PEBLM1000062, PEBLM1000066, PEBLM1000068, PEBLM1000071, PEBLM1000083, PEBLM1000144, PEBLM1000147, PEBLM1000180, PEBLM2000030, PEBLM2000112, PEBLM2000126, PEBLM2000147, PEBLM2000170, PEBLM2000180, PEBLM2000213, PEBLM2000222, PEBLM2000248, PEBLM2000267, PEBLM2000270, PEBLM2000321, PEBLM2000326, PEBLM2000333, PEBLM2000338, PEBLM2000479, PEBLM2000502, PEBLM2001072, PEBLM2001312, PEBLM2001465, PEBLM2001488, PEBLM2001803, PEBLM2002432, PEBLM2002455, PEBLM2002594, PEBLM2002749, PEBLM2002887, PEBLM2003426, PEBLM2003765, PEBLM2003935, PEBLM2004015, PEBLM2004216, PEBLM2004290, PEBLM2004452, PEBLM2004497, PEBLM2004666, PEBLM2004733, PEBLM2005282, PEBLM2005615, PEBLM2005632, PEBLM2005697, PEBLM2006031, PEBLM2006036, PEBLM2006049, PEBLM2006113, PEBLM2006135, PEBLM2006215, PEBLM2006283, PEBLM2006298, PEBLM2006709, PEBLM2006912, PEBLM2007112, PEBLM2007140, PEBLM2007188, PEBLM2007437, PEBLM2007447, PEBLM2007598, PEBLM2007832, PEBLM2007834, PEBLM2008106, PEBLM2008576, PEBLM2008605, PEBLM2008826, PEBLM2008861, PERIC1000025, PERIC1000147, PERIC2000180, PERIC2000214, PERIC2000386, PERIC2000387, PERIC2000422, PERIC2000473, PERIC2000478, PERIC2000889, PERIC2000914, PERIC2001227, PERIC2001228, PERIC2001379, PERIC2001504, PERIC2001703, PERIC2001764, PERIC2002243, PERIC2002272, PERIC2002452, PERIC2002766, PERIC2003001, PERIC2003090, PERIC2003287, PERIC2003349, PERIC2003452, PERIC2003699, PERIC2003720, PERIC2003794, PERIC2003834, PERIC2003919, PERIC2003957, PERIC2004028, PERIC2004131, PERIC2004259, PERIC2004379, PERIC2004429, PERIC2004510, PERIC2004613, PERIC2004909, PERIC2005111, PERIC2005117, PERIC2005305, PERIC2005347, PERIC2005370, PERIC2005936, PERIC2006035, PERIC2006121, PERIC2006443, PERIC2006945, PERIC2006960, PERIC2007068, PERIC2007439, PERIC2007914, PERIC2008008, PERIC2008385, PERIC2009001, PERIC2009086, PERIC2009329, PERIC2009566, PLACE5000001, PLACE5000013, PLACE5000037, PLACE5000058, PLACE5000066, PLACE5000067, PLACE5000068, PLACE5000070, PLACE5000080, PLACE5000105, PLACE5000115, PLACE5000116, PLACE5000129, PLACE5000139, PLACE5000153, PLACE5000171, PLACE5000178, PLACE5000245, PLACE5000260, PLACE5000282, PLACE5000297, PLACE5000372, PLACE5000492, PLACE5000522, PLACE5000527, PLACE6000012, PLACE6000044, PLACE6000055, PLACE6000070, PLACE6000137, PLACE6000191, PLACE6000205, PLACE6000231, PLACE6000296, PLACE6000314, PLACE6000325, PLACE6000348, PLACE6000371, PLACE6000414, PLACE6000424, PLACE6000426, PLACE6000429, PLACE6000450, PLACE6000523, PLACE6000550, PLACE6000552, PLACE6000555, PLACE6000619, PLACE6000630, PLACE6000953, PLACE6001118, PLACE6001153, PLACE6001185, PLACE6001294, PLACE6001536, PLACE6001557, PLACE6001712, PLACE6001740, PLACE6001823, PLACE6001886, PLACE6001923, PLACE6001925, PLACE6001933, PLACE6002011, PLACE6002016, PLACE6002056, PLACE6002157, PLACE6002312, PLACE6002323, PLACE6002345, PLACE6002419, PLACE6002462, PLACE6002647, PLACE6002668, PLACE6002692, PLACE6002699, PLACE6002710, PLACE6002871, PLACE6002949, PLACE6002960, PLACE6003004, PLACE6003038, PLACE6003077, PLACE6003094, PLACE6003109, PLACE6003204, PLACE6003218, PLACE6003372, PLACE6003383, PLACE6003393, PLACE6003399, PLACE6003539, PLACE6003621, PLACE6003705, PLACE6003740, PLACE6003745, PLACE6003771, PLACE6003796, PLACE6003839, PLACE6003850, PLACE6004101, PLACE6004219, PLACE6004336, PLACE6004368, PLACE6004380, PLACE6004396, PLACE6004397, PLACE6004454, PLACE6004464, PLACE6004491, PLACE6004578, PLACE6004663, PLACE6004687, PLACE6004738, PLACE6004966, PLACE6004993, PLACE6005007, PLACE6005029, PLACE6005108, PLACE6005231, PLACE6005234, PLACE6005283, PLACE6005294, PLACE6005328, PLACE6005351, PLACE6005423, PLACE6005482, PLACE6005487, PLACE6005535, PLACE6005546, PLACE6005559, PLACE6005579, PLACE6005691, PLACE6005786, PLACE6006042, PLACE6006077, PLACE6006137, PLACE6006158, PLACE6006186, PLACE6006217, PLACE6006222, PLACE6006266, PLACE6006287, PLACE6006394, PLACE6006418, PLACE6006474, PLACE6006549, PLACE6006566, PLACE6006697, PLACE6006822, PLACE6006871, PLACE6006905, PLACE6006988, PLACE6007050, PLACE6007180, PLACE6007239, PLACE6007242, PLACE6007309, PLACE6007373, PLACE6007380, PLACE6007433, PLACE6007482, PLACE6007687, PLACE6007787, PLACE6007798, PLACE6007807, PLACE6007925, PLACE6008036, PLACE6008094, PLACE6008126, PLACE6008285, PLACE6008444, PLACE6008453, PLACE6008640, PLACE6008750, PLACE6008768, PLACE6008793, PLACE6008824, PLACE6008989, PLACE6009006, PLACE6009008, PLACE6009228, PLACE6009237, PLACE6009338, PLACE6009419, PLACE6009430, PLACE6009482, PLACE6009524, PLACE6009527, PLACE6009560, PLACE6009590, PLACE6009821, PLACE6009835, PLACE6009853, PLACE6010463, PLACE6010484, PLACE6010485, PLACE6010568, PLACE6010701, PLACE6010704, PLACE6010732, PLACE6010765, PLACE6010925, PLACE6010936, PLACE6010991, PLACE6011102, PLACE6011156, PLACE6011211, PLACE6011260, PLACE6011334, PLACE6011627, PLACE6011774, PLACE6011881, PLACE6011907, PLACE6011970, PLACE6011975, PLACE6012028, PLACE6012108, PLACE6012168, PLACE6012297, PLACE6012308, PLACE6012574, PLACE6012908, PLACE6012936, PLACE6012942, PLACE6013232, PLACE6013288, PLACE6013386, PLACE6013400, PLACE6013650, PLACE6013672, PLACE6013883, PLACE6013884, PLACE6013885, PLACE6014043, PLACE6014064, PLACE6014516, PLACE6014882, PLACE6015211, PLACE6015322, PLACE6015445, PLACE6015460, PLACE6015513, PLACE6015591, PLACE6015729, PLACE6015731, PLACE6015939, PLACE6016030, PLACE6016093, PLACE6016105, PLACE6016160, PLACE6016254, PLACE6016383, PLACE6016984, PLACE6017002, PLACE6017431, PLACE6017564, PLACE6017578, PLACE6017626, PLACE6017701, PLACE6017714, PLACE6017788, PLACE6017791, PLACE6018107, PLACE6018187, PLACE6018235, PLACE6018287, PLACE6018441, PLACE6018487, PLACE6018497, PLACE6018769, PLACE6018834, PLACE6018843, PLACE6018863, PLACE6018938, PLACE6019195, PLACE6019385, PLACE6019542, PLACE6019600, PLACE6019674, PLACE6019676, PLACE6019701, PLACE6019932, PLACE6020031, PLACE6020145, PLACE7000167, PLACE7000170, PLACE7000266, PLACE7000333, PLACE7000410, PLACE7000502, PLACE7000707, PLACE7001022, PLACE7001544, PLACE7001759, PLACE7001936, PLACE7002303, PLACE7002641, PLACE7003639, PLACE7003657, PLACE7003684, PLACE7003985, PLACE7004103, PLACE7004961, PLACE7005169, PLACE7005671, PLACE7005840, PLACE7006051, PLACE7006090, PLACE7006240, PLACE7006268, PLACE7006275, PLACE7006498, PLACE7006540, PLACE7007379, PLACE7007644, PLACE7007973, PLACE7008136, PLACE7008261, PLACE7008431, PLACE7008623, PLACE7008766, PLACE7009563, PROST1000033, PROST1000039, PROST1000065, PROST1000083, PROST1000085, PROST1000110, PROST1000123, PROST1000136, PROST1000144, PROST1000145, PROST1000152, PROST1000167, PROST1000184, PROST1000217, PROST1000220, PROST1000226, PROST1000246, PROST1000262, PROST1000298, PROST1000322, PROST1000334, PROST1000343, PROST1000362, PROST1000377, PROST1000383, PROST1000412, PROST1000419, PROST1000451, PROST1000480, PROST1000485, PROST1000493, PROST1000512, PROST1000527, PROST1000528, PROST1000536, PROST1000559, PROST1000564, PROST1000575, PROST2000036, PROST2000053, PROST2000067, PROST2000105, PROST2000143, PROST2000162, PROST2000176, PROST2000203, PROST2000206, PROST2000212, PROST2000267, PROST2000273, PROST2000274, PROST2000277, PROST2000284, PROST2000325, PROST2000432, PROST2000452, PROST2000463, PROST2000470, PROST2000505, PROST2000567, PROST2000572, PROST2000717, PROST2000760, PROST2000761, PROST2000835, PROST2000961, PROST2001002, PROST2001116, PROST2001138, PROST2001283, PROST2001414, PROST2001415, PROST2001465, PROST2001521, PROST2001540, PROST2001552, PROST2001599, PROST2001611, PROST2001636, PROST2001739, PROST2001796, PROST2001805, PROST2001899, PROST2001997, PROST2001998, PROST2002101, PROST2002162, PROST2002212, PROST2002227, PROST2002338, PROST2002425, PROST2002488, PROST2002489, PROST2002527, PROST2002591, PROST2002602, PROST2002633, PROST2002651, PROST2002682, PROST2002685, PROST2002722, PROST2002736, PROST2002842, PROST2002897, PROST2002906, PROST2002927, PROST2002960, PROST2003102, PROST2003117, PROST2003210, PROST2003232, PROST2003302, PROST2003303, PROST2003324, PROST2003340, PROST2003396, PROST2003428, PROST2003472, PROST2003517, PROST2003537, PROST2003563, PROST2003577, PROST2003583, PROST2003586, PROST2003628, PROST2003635, PROST2003674, PROST2003676, PROST2003725, PROST2003732, PROST2003775, PROST2003922, PROST2003930, PROST2004115, PROST2004142, PROST2004146, PROST2004161, PROST2004251, PROST2004332, PROST2004481, PROST2004526, PROST2004727, PROST2004739, PROST2004742, PROST2004744, PROST2004817, PROST2005067, PROST2005076, PROST2005093, PROST2005121, PROST2005131, PROST2005228, PROST2005272, PROST2005285, PROST2005426, PROST2005466, PROST2005604, PROST2005630, PROST2005683, PROST2005788, PROST2005880, PROST2005886, PROST2005904, PROST2005919, PROST2005943, PROST2006008, PROST2006020, PROST2006060, PROST2006196, PROST2006201, PROST2006260, PROST2006282, PROST2006343, PROST2006450, PROST2006491, PROST2006510, PROST2006579, PROST2006688, PROST2006737, PROST2006766, PROST2006782, PROST2006933, PROST2006988, PROST2007122, PROST2007200, PROST2007237, PROST2007248, PROST2007289, PROST2007317, PROST2007328, PROST2007382, PROST2007389, PROST2007416, PROST2007528, PROST2007818, PROST2007871, PROST2007950, PROST2007956, PROST2007974, PROST2007988, PROST2008079, PROST2008088, PROST2008243, PROST2008245, PROST2008447, PROST2008468, PROST2008472, PROST2008489, PROST2008516, PROST2008724, PROST2008835, PROST2008993, PROST2009022, PROST2009208, PROST2009222, PROST2009254, PROST2009273, PROST2009320, PROST2009347, PROST2009365, PROST2009388, PROST2009400, PROST2009470, PROST2009483, PROST2009571, PROST2009731, PROST2009736, PROST2009795, PROST2009901, PROST2009909, PROST2010046, PROST2010219, PROST2010250, PROST2010318, PROST2010326, PROST2010400, PROST2010545, PROST2010579, PROST2010606, PROST2010885, PROST2011012, PROST2011105, PROST2011297, PROST2011410, PROST2011439, PROST2011631, PROST2011660, PROST2012005, PROST2012016, PROST2012088, PROST2012140, PROST2012157, PROST2012190, PROST2012249, PROST2012353, PROST2012400, PROST2012504, PROST2012542, PROST2012550, PROST2012740, PROST2012745, PROST2012780, PROST2012888, PROST2012890, PROST2013032, PROST2013053, PROST2013121, PROST2013260, PROST2013327, PROST2013531, PROST2013605, PROST2013627, PROST2013873, PROST2013880, PROST2014422, PROST2014585, PROST2014601, PROST2014659, PROST2014862, PROST2014916, PROST2014925, PROST2015124, PROST2015137, PROST2015198, PROST2015243, PROST2015246, PROST2015251, PROST2015287, PROST2015457, PROST2015464, PROST2015537, PROST2015545, PROST2015551, PROST2015636, PROST2015710, PROST2015756, PROST2015877, PROST2015900, PROST2015924, PROST2015932, PROST2016195, PROST2016246, PROST2016351, PROST2016379, PROST2016444, PROST2016462, PROST2016499, PROST2016512, PROST2016566, PROST2016582, PROST2016668, PROST2016684, PROST2016777, PROST2016829, PROST2016860, PROST2016918, PROST2016980, PROST2017098, PROST2017128, PROST2017203, PROST2017367, PROST2017413, PROST2017441, PROST2017578, PROST2017612, PROST2017617, PROST2017692, PROST2017700, PROST2017701, PROST2017729, PROST2017836, PROST2017910, PROST2017972, PROST2018030, PROST2018090, PROST2018235, PROST2018437, PROST2018487, PROST2018511, PROST2018583, PROST2018588, PROST2018607, PROST2018788, PROST2018902, PROST2018922, PROST2019164, PROST2019296, PROST2019398, PROST2019487, PROST2019781, PUAEN1000039, PUAEN1000065, PUAEN1000081, PUAEN1000085, PUAEN1000087, PUAEN1000121, PUAEN1000147, PUAEN1000161, PUAEN1000175, PUAEN1000275, PUAEN1000276, PUAEN1000288, PUAEN1000322, PUAEN2000080, PUAEN2000152, PUAEN2000175, PUAEN2000247, PUAEN2000394, PUAEN2000497, PUAEN2000594, PUAEN2000684, PUAEN2001260, PUAEN2001526, PUAEN2001586, PUAEN2001882, PUAEN2002473, PUAEN2002552, PUAEN2002568, PUAEN2002616, PUAEN2002758, PUAEN2003018, PUAEN2003079, PUAEN2003116, PUAEN2003517, PUAEN2003954, PUAEN2004067, PUAEN2004083, PUAEN2004400, PUAEN2004511, PUAEN2004525, PUAEN2004875, PUAEN2005110, PUAEN2005247, PUAEN2005502, PUAEN2005588, PUAEN2005930, PUAEN2006029, PUAEN2006328, PUAEN2006335, PUAEN2006578, PUAEN2006639, PUAEN2006761, PUAEN2007350, PUAEN2007785, PUAEN2007898, PUAEN2008123, PUAEN2008228, PUAEN2008314, PUAEN2008515, PUAEN2008815, PUAEN2008939, PUAEN2008980, PUAEN2008985, PUAEN2009174, PUAEN2009348, PUAEN2009534, PUAEN2009795, PUAEN2009852, PUAEN2010346, PUAEN2010824, RECTM1000141, RECTM2000220, RECTM2000433, RECTM2000510, RECTM2001307, RECTM2001347, RECTM2001519, RECTM2001666, RECTM2001691, RECTM2001749, RECTM2002172, RECTM2002602, RECTM2002632, SALGL1000005, SALGL1000024, SALGL1000028, SALGL1000047, SALGL1000065, SALGL1000107, SALGL1000171, SKMUS1000014, SKMUS1000030, SKMUS1000064, SKMUS1000067, SKMUS1000102, SKMUS1000104, SKMUS1000110, SKMUS1000118, SKMUS1000124, SKMUS1000129, SKMUS1000138, SKMUS1000176, SKMUS1000177, SKMUS2000061, SKMUS2000078, SKMUS2000117, SKMUS2000137, SKMUS2000198, SKMUS2000243, SKMUS2000271, SKMUS2000287, SKMUS2000317, SKMUS2000330, SKMUS2000339, SKMUS2000343, SKMUS2000365, SKMUS2000390, SKMUS2000416, SKMUS2000458, SKMUS2000467, SKMUS2000468, SKMUS2000515, SKMUS2000679, SKMUS2000701, SKMUS2000705, SKMUS2000710, SKMUS2000724, SKMUS2000726, SKMUS2000757, SKMUS2000774, SKMUS2000780, SKMUS2000821, SKMUS2000847, SKMUS2000863, SKMUS2000873, SKMUS2000894, SKMUS2000898, SKMUS2000933, SKMUS2000945, SKMUS2000954, SKMUS2000961, SKMUS2000973, SKMUS2000980, SKMUS2001008, SKMUS2001014, SKMUS2001129, SKMUS2001157, SKMUS2001164, SKMUS2001199, SKMUS2001201, SKMUS2001215, SKMUS2001247, SKMUS2001254, SKMUS2001271, SKMUS2001287, SKMUS2001323, SKMUS2001364, SKMUS2001398, SKMUS2001412, SKMUS2001492, SKMUS2001501, SKMUS2001528, SKMUS2001543, SKMUS2001580, SKMUS2001585, SKMUS2001608, SKMUS2001631, SKMUS2001634, SKMUS2001662, SKMUS2001663, SKMUS2001668, SKMUS2001671, SKMUS2001683, SKMUS2001693, SKMUS2001695, SKMUS2001703, SKMUS2001740, SKMUS2001742, SKMUS2001823, SKMUS2001850, SKMUS2002077, SKMUS2002084, SKMUS2002153, SKMUS2002475, SKMUS2002602, SKMUS2002634, SKMUS2002693, SKMUS2002821, SKMUS2002840, SKMUS2002920, SKMUS2003034, SKMUS2003074, SKMUS2003168, SKMUS2003194, SKMUS2003744, SKMUS2004044, SKMUS2004047, SKMUS2004483, SKMUS2004667, SKMUS2004897, SKMUS2004903, SKMUS2004908, SKMUS2005428, SKMUS2006394, SKMUS2006481, SKMUS2006755, SKMUS2007315, SKMUS2007359, SKMUS2007568, SKMUS2007740, SKMUS2007816, SKMUS2007915, SKMUS2008338, SKMUS2008407, SKMUS2008474, SKMUS2008585, SKMUS2008607, SKMUS2009190, SKMUS2009232, SKMUS2009479, SKMUS2009557, SKNMC1000123, SKNMC1000124, SKNMC1000137, SKNMC1000159, SKNMC1000251, SKNMC1000264, SKNMC2000224, SKNMC2000256, SKNMC2000322, SKNMC2000374, SKNMC2000583, SKNMC2000593, SKNMC2000612, SKNMC2000622, SKNMC2000966, SKNMC2001113, SKNMC2001324, SKNMC2001503, SKNMC2001555, SKNMC2001596, SKNMC2001623, SKNMC2002402, SKNMC2003639, SKNMC2003924, SKNMC2003987, SKNMC2004457, SKNMC2004643, SKNMC2004651, SKNMC2005772, SKNMC2006173, SKNMC2006327, SKNMC2006998, SKNMC2007134, SKNMC2007502, SKNMC2007504, SKNMC2007961, SKNMC2009450, SKNSH1000086, SKNSH1000101, SKNSH1000174, SKNSH1000301, SKNSH1000308, SKNSH1000416, SKNSH2000051, SKNSH2000101, SKNSH2000151, SKNSH2000250, SKNSH2000319, SKNSH2000482, SKNSH2000516, SKNSH2000550, SKNSH2000971, SKNSH2001222, SKNSH2001875, SKNSH2001931, SKNSH2002054, SKNSH2002325, SKNSH2002768, SKNSH2002866, SKNSH2003064, SKNSH2003174, SKNSH2003422, SKNSH2003466, SKNSH2003483, SKNSH2003633, SKNSH2004039, SKNSH2005061, SKNSH2005120, SKNSH2005194, SKNSH2005240, SKNSH2005792, SKNSH2005816, SKNSH2005981, SKNSH2006304, SKNSH2006432, SKNSH2006822, SKNSH2007142, SKNSH2007149, SKNSH2007429, SKNSH2007739, SKNSH2008043, SKNSH2008969, SKNSH2009197, SKNSH2009435, SKNSH2009991, SKNSH2010015, SMINT1000012, SMINT1000016, SMINT1000039, SMINT1000042, SMINT1000048, SMINT1000051, SMINT1000054, SMINT1000057, SMINT1000071, SMINT1000075, SMINT1000078, SMINT1000091, SMINT1000100, SMINT1000103, SMINT1000118, SMINT1000131, SMINT1000137, SMINT1000192, SMINT2000018, SMINT2000032, SMINT2000040, SMINT2000060, SMINT2000084, SMINT2000145, SMINT2000159, SMINT2000176, SMINT2000185, SMINT2000227, SMINT2000229, SMINT2000232, SMINT2000239, SMINT2000267, SMINT2000277, SMINT2000400, SMINT2000454, SMINT2000518, SMINT2000529, SMINT2000530, SMINT2000537, SMINT2000538, SMINT2000541, SMINT2000545, SMINT2000558, SMINT2000562, SMINT2000568, SMINT2000609, SMINT2000659, SMINT2000747, SMINT2000811, SMINT2000824, SMINT2000933, SMINT2000984, SMINT2001114, SMINT2001158, SMINT2001183, SMINT2001199, SMINT2001222, SMINT2001348, SMINT2001397, SMINT2001458, SMINT2001461, SMINT2001535, SMINT2001559, SMINT2001609, SMINT2001615, SMINT2001683, SMINT2001731, SMINT2001812, SMINT2001818, SMINT2001950, SMINT2002126, SMINT2002202, SMINT2002210, SMINT2002224, SMINT2002281, SMINT2002311, SMINT2002314, SMINT2002328, SMINT2002414, SMINT2002457, SMINT2002743, SMINT2002778, SMINT2002880, SMINT2002882, SMINT2002899, SMINT2002974, SMINT2002976, SMINT2003003, SMINT2003128, SMINT2003150, SMINT2003317, SMINT2003386, SMINT2003423, SMINT2003551, SMINT2003569, SMINT2003641, SMINT2003644, SMINT2003866, SMINT2003905, SMINT2004023, SMINT2004037, SMINT2004047, SMINT2004086, SMINT2004144, SMINT2004280, SMINT2004299, SMINT2004339, SMINT2004350, SMINT2004414, SMINT2004473, SMINT2004547, SMINT2004583, SMINT2004589, SMINT2004781, SMINT2004891, SMINT2004909, SMINT2004992, SMINT2005075, SMINT2005161, SMINT2005174, SMINT2005213, SMINT2005330, SMINT2005387, SMINT2005402, SMINT2005405, SMINT2005621, SMINT2005623, SMINT2005624, SMINT2005688, SMINT2005800, SMINT2005956, SMINT2006078, SMINT2006205, SMINT2006331, SMINT2006596, SMINT2006641, SMINT2006648, SMINT2006708, SMINT2006801, SMINT2007062, SMINT2007101, SMINT2007140, SMINT2007187, SMINT2007219, SMINT2007294, SMINT2007365, SMINT2007391, SMINT2007433, SMINT2007526, SMINT2007579, SMINT2007647, SMINT2007729, SMINT2007790, SMINT2007792, SMINT2007796, SMINT2007867, SMINT2007932, SMINT2008042, SMINT2008054, SMINT2008133, SMINT2008277, SMINT2008329, SMINT2008455, SMINT2008491, SMINT2008531, SMINT2008545, SMINT2008558, SMINT2008590, SMINT2008625, SMINT2008672, SMINT2008690, SMINT2008715, SMINT2008720, SMINT2008817, SMINT2008844, SMINT2008869, SMINT2008917, SMINT2009119, SMINT2009121, SMINT2009212, SMINT2009216, SMINT2009233, SMINT2009259, SMINT2009272, SMINT2009292, SMINT2009363, SMINT2009415, SMINT2009468, SMINT2009505, SMINT2009529, SMINT2009832, SMINT2009895, SMINT2009902, SMINT2009973, SMINT2010015, SMINT2010068, SMINT2010076, SMINT2010144, SMINT2010200, SMINT2010278, SMINT2010324, SMINT2010326, SMINT2010369, SMINT2010500, SMINT2010533, SMINT2010629, SMINT2010639, SMINT2010672, SMINT2010753, SMINT2010853, SMINT2010897, SMINT2010959, SMINT2010997, SMINT2011033, SMINT2011066, SMINT2011273, SMINT2011311, SMINT2011406, SMINT2011509, SMINT2011567, SMINT2011656, SMINT2011888, SMINT2011958, SMINT2012040, SMINT2012122, SMINT2012179, SMINT2012195, SMINT2012285, SMINT2012291, SMINT2012501, SMINT2012734, SMINT2012793, SMINT2013031, SMINT2013032, SMINT2013129, SMINT2013170, SMINT2013181, SMINT2013228, SMINT2013613, SMINT2013626, SMINT2013695, SMINT2013833, SMINT2013890, SMINT2014166, SMINT2014282, SMINT2014443, SMINT2014480, SMINT2014489, SMINT2014721, SMINT2015006, SMINT2015294, SMINT2015306, SMINT2015326, SMINT2015353, SMINT2015454, SMINT2015518, SMINT2015745, SMINT2015787, SMINT2015810, SMINT2016122, SMINT2016146, SMINT2016286, SMINT2016313, SMINT2016396, SMINT2016412, SMINT2016440, SMINT2016477, SMINT2016544, SMINT2016857, SMINT2017134, SMINT2017319, SMINT2017324, SMINT2017410, SMINT2017431, SMINT2017432, SMINT2017436, SMINT2017599, SMINT2017659, SMINT2017736, SMINT2017781, SMINT2017855, SMINT2017884, SMINT2017964, SMINT2017974, SMINT2018343, SMINT2018353, SMINT2018592, SMINT2019017, SMINT2019105, SMINT2019142, SMINT2019153, SMINT2019200, SPLEN1000013, SPLEN1000041, SPLEN1000056, SPLEN1000087, SPLEN1000091, SPLEN1000134, SPLEN1000139, SPLEN1000143, SPLEN1000144, SPLEN1000145, SPLEN1000156, SPLEN1000163, SPLEN1000165, SPLEN1000178, SPLEN2000020, SPLEN2000047, SPLEN2000064, SPLEN2000072, SPLEN2000098, SPLEN2000126, SPLEN2000134, SPLEN2000143, SPLEN2000189, SPLEN2000197, SPLEN2000205, SPLEN2000210, SPLEN2000222, SPLEN2000242, SPLEN2000243, SPLEN2000247, SPLEN2000258, SPLEN2000270, SPLEN2000307, SPLEN2000310, SPLEN2000341, SPLEN2000350, SPLEN2000357, SPLEN2000364, SPLEN2000402, SPLEN2000414, SPLEN2000420, SPLEN2000443, SPLEN2000448, SPLEN2000450, SPLEN2000464, SPLEN2000496, SPLEN2000515, SPLEN2000516, SPLEN2000537, SPLEN2000541, SPLEN2000607, SPLEN2000630, SPLEN2000695, SPLEN2000839, SPLEN2000874, SPLEN2001135, SPLEN2001141, SPLEN2001157, SPLEN2001176, SPLEN2001227, SPLEN2001245, SPLEN2001278, SPLEN2001354, SPLEN2001367, SPLEN2001383, SPLEN2001476, SPLEN2001503, SPLEN2001510, SPLEN2001626, SPLEN2001650, SPLEN2001710, SPLEN2001761, SPLEN2001781, SPLEN2001881, SPLEN2001912, SPLEN2001945, SPLEN2002053, SPLEN2002133, SPLEN2002147, SPLEN2002166, SPLEN2002175, SPLEN2002223, SPLEN2002272, SPLEN2002314, SPLEN2002343, SPLEN2002354, SPLEN2002385, SPLEN2002419, SPLEN2002451, SPLEN2002462, SPLEN2002463, SPLEN2002477, SPLEN2002493, SPLEN2002662, SPLEN2002695, SPLEN2002707, SPLEN2002744, SPLEN2002917, SPLEN2002931, SPLEN2002957, SPLEN2003160, SPLEN2003204, SPLEN2003219, SPLEN2003297, SPLEN2003396, SPLEN2003678, SPLEN2003878, SPLEN2003918, SPLEN2003924, SPLEN2004060, SPLEN2004124, SPLEN2004148, SPLEN2004181, SPLEN2004220, SPLEN2004343, SPLEN2004346, SPLEN2004368, SPLEN2004611, SPLEN2004662, SPLEN2004844, SPLEN2004880, SPLEN2004984, SPLEN2005227, SPLEN2005272, SPLEN2005416, SPLEN2005429, SPLEN2005450, SPLEN2005474, SPLEN2005560, SPLEN2005727, SPLEN2005783, SPLEN2005790, SPLEN2005806, SPLEN2005818, SPLEN2005838, SPLEN2005927, SPLEN2005939, SPLEN2006268, SPLEN2006283, SPLEN2006325, SPLEN2006389, SPLEN2006425, SPLEN2006671, SPLEN2006701, SPLEN2006785, SPLEN2006875, SPLEN2007182, SPLEN2007314, SPLEN2007326, SPLEN2007350, SPLEN2007388, SPLEN2007619, SPLEN2007653, SPLEN2007689, SPLEN2007695, SPLEN2007739, SPLEN2007750, SPLEN2007794, SPLEN2007879, SPLEN2007926, SPLEN2008007, SPLEN2008135, SPLEN2008164, SPLEN2008317, SPLEN2008496, SPLEN2008591, SPLEN2008786, SPLEN2009088, SPLEN2009163, SPLEN2009315, SPLEN2009340, SPLEN2009512, SPLEN2009513, SPLEN2009541, SPLEN2009548, SPLEN2009555, SPLEN2009581, SPLEN2009733, SPLEN2009803, SPLEN2009884, SPLEN2009918, SPLEN2009970, SPLEN2010004, SPLEN2010015, SPLEN2010112, SPLEN2010119, SPLEN2010146, SPLEN2010187, SPLEN2010350, SPLEN2010395, SPLEN2010415, SPLEN2010447, SPLEN2010469, SPLEN2010510, SPLEN2010530, SPLEN2010534, SPLEN2010588, SPLEN2010625, SPLEN2010800, SPLEN2010846, SPLEN2010847, SPLEN2010862, SPLEN2010912, SPLEN2010978, SPLEN2010986, SPLEN2011018, SPLEN2011021, SPLEN2011025, SPLEN2011086, SPLEN2011139, SPLEN2011145, SPLEN2011248, SPLEN2011252, SPLEN2011422, SPLEN2011672, SPLEN2011678, SPLEN2011737, SPLEN2011758, SPLEN2011766, SPLEN2011805, SPLEN2011820, SPLEN2011830, SPLEN2011931, SPLEN2011981, SPLEN2012115, SPLEN2012175, SPLEN2012179, SPLEN2012185, SPLEN2012234, SPLEN2012453, SPLEN2012523, SPLEN2012524, SPLEN2012525, SPLEN2012606, SPLEN2012611, SPLEN2012619, SPLEN2012624, SPLEN2012725, SPLEN2012743, SPLEN2012756, SPLEN2012800, SPLEN2012846, SPLEN2012889, SPLEN2012961, SPLEN2013108, SPLEN2013195, SPLEN2013503, SPLEN2013644, SPLEN2013648, SPLEN2013670, SPLEN2013673, SPLEN2013690, SPLEN2013714, SPLEN2013753, SPLEN2013857, SPLEN2013860, SPLEN2013910, SPLEN2013923, SPLEN2014041, SPLEN2014063, SPLEN2014073, SPLEN2014119, SPLEN2014136, SPLEN2014199, SPLEN2014210, SPLEN2014293, SPLEN2014318, SPLEN2014452, SPLEN2014454, SPLEN2014486, SPLEN2014543, SPLEN2014572, SPLEN2014645, SPLEN2014669, SPLEN2014711, SPLEN2014739, SPLEN2014860, SPLEN2014865, SPLEN2014911, SPLEN2014919, SPLEN2014920, SPLEN2014924, SPLEN2014937, SPLEN2014946, SPLEN2015031, SPLEN2015094, SPLEN2015121, SPLEN2015129, SPLEN2015158, SPLEN2015166, SPLEN2015216, SPLEN2015258, SPLEN2015261, SPLEN2015267, SPLEN2015276, SPLEN2015415, SPLEN2015433, SPLEN2015593, SPLEN2015674, SPLEN2015679, SPLEN2015707, SPLEN2015730, SPLEN2015746, SPLEN2015788, SPLEN2015815, SPLEN2015890, SPLEN2015891, SPLEN2015899, SPLEN2016045, SPLEN2016053, SPLEN2016069, SPLEN2016098, SPLEN2016135, SPLEN2016241, SPLEN2016250, SPLEN2016304, SPLEN2016356, SPLEN2016421, SPLEN2016480, SPLEN2016531, SPLEN2016533, SPLEN2016541, SPLEN2016552, SPLEN2016554, SPLEN2016602, SPLEN2016627, SPLEN2016678, SPLEN2016743, SPLEN2016773, SPLEN2016781, SPLEN2016840, SPLEN2016863, SPLEN2016922, SPLEN2016932, SPLEN2016973, SPLEN2017043, SPLEN2017104, SPLEN2017121, SPLEN2017147, SPLEN2017187, SPLEN2017189, SPLEN2017212, SPLEN2017351, SPLEN2017426, SPLEN2017452, SPLEN2017538, SPLEN2017592, SPLEN2017613, SPLEN2017620, SPLEN2017643, SPLEN2017687, SPLEN2017740, SPLEN2017781, SPLEN2017918, SPLEN2017999, SPLEN2018098, SPLEN2018112, SPLEN2018180, SPLEN2018181, SPLEN2018280, SPLEN2018285, SPLEN2018299, SPLEN2018302, SPLEN2018364, SPLEN2018395, SPLEN2018643, SPLEN2018683, SPLEN2018732, SPLEN2018749, SPLEN2018933, SPLEN2019008, SPLEN2019043, SPLEN2019077, SPLEN2019092, SPLEN2019102, SPLEN2019131, SPLEN2019257, SPLEN2019311, SPLEN2019323, SPLEN2019349, SPLEN2019375, SPLEN2019379, SPLEN2019446, SPLEN2019471, SPLEN2019480, SPLEN2019571, SPLEN2019575, SPLEN2019709, SPLEN2019774, SPLEN2019793, SPLEN2019811, SPLEN2019839, SPLEN2019956, SPLEN2019985, SPLEN2020007, SPLEN2020034, SPLEN2020153, SPLEN2020154, SPLEN2020166, SPLEN2020183, SPLEN2020223, SPLEN2020359, SPLEN2020417, SPLEN2020427, SPLEN2020467, SPLEN2020512, SPLEN2020608, SPLEN2020777, SPLEN2020805, SPLEN2021057, SPLEN2021122, SPLEN2021157, SPLEN2021231, SPLEN2021273, SPLEN2021295, SPLEN2021298, SPLEN2021383, SPLEN2021417, SPLEN2021440, SPLEN2021458, SPLEN2021463, SPLEN2021560, SPLEN2021701, SPLEN2021795, SPLEN2021983, SPLEN2021991, SPLEN2022040, SPLEN2022162, SPLEN2022227, SPLEN2022522, SPLEN2022591, SPLEN2022785, SPLEN2022920, SPLEN2023024, SPLEN2023118, SPLEN2023160, SPLEN2023423, SPLEN2023710, SPLEN2023733, SPLEN2023791, SPLEN2023977, SPLEN2024070, SPLEN2024127, SPLEN2024232, SPLEN2024273, SPLEN2024383, SPLEN2024489, SPLEN2024530, SPLEN2024571, SPLEN2024577, SPLEN2024617, SPLEN2024737, SPLEN2024922, SPLEN2024956, SPLEN2024990, SPLEN2025012, SPLEN2025017, SPLEN2025039, SPLEN2025219, SPLEN2025491, SPLEN2025626, SPLEN2025820, SPLEN2026144, SPLEN2026411, SPLEN2026765, SPLEN2027157, SPLEN2027395, SPLEN2027488, SPLEN2027780, SPLEN2027852, SPLEN2027868, SPLEN2027995, SPLEN2028046, SPLEN2028066, SPLEN2028138, SPLEN2028417, SPLEN2028593, SPLEN2028844, SPLEN2028914, SPLEN2028994, SPLEN2029051, SPLEN2029176, SPLEN2029295, SPLEN2029380, SPLEN2029522, SPLEN2029683, SPLEN2029727, SPLEN2029904, SPLEN2029912, SPLEN2030250, SPLEN2030335, SPLEN2030371, SPLEN2030397, SPLEN2030479, SPLEN2030495, SPLEN2030562, SPLEN2030763, SPLEN2030847, SPLEN2031004, SPLEN2031125, SPLEN2031424, SPLEN2031547, SPLEN2031674, SPLEN2031724, SPLEN2031780, SPLEN2032036, SPLEN2032112, SPLEN2032154, SPLEN2032321, SPLEN2032356, SPLEN2032677, SPLEN2032813, SPLEN2032924, SPLEN2033098, SPLEN2033153, SPLEN2033333, SPLEN2033490, SPLEN2033539, SPLEN2033921, SPLEN2033996, SPLEN2034021, SPLEN2034081, SPLEN2034252, SPLEN2034448, SPLEN2034551, SPLEN2034601, SPLEN2034678, SPLEN2034781, SPLEN2034864, SPLEN2034934, SPLEN2035318, SPLEN2035615, SPLEN2036076, SPLEN2036103, SPLEN2036326, SPLEN2036475, SPLEN2036501, SPLEN2036579, SPLEN2036608, SPLEN2036702, SPLEN2036712, SPLEN2036821, SPLEN2036953, SPLEN2037077, SPLEN2037194, SPLEN2037319, SPLEN2037444, SPLEN2037580, SPLEN2037630, SPLEN2037678, SPLEN2037722, SPLEN2037891, SPLEN2038055, SPLEN2038180, SPLEN2038345, SPLEN2038407, SPLEN2038473, SPLEN2038834, SPLEN2039311, SPLEN2039672, SPLEN2039697, SPLEN2039845, SPLEN2039936, SPLEN2040222, SPLEN2040237, SPLEN2040824, SPLEN2041304, SPLEN2041306, SPLEN2041310, SPLEN2041585, SPLEN2041645, SPLEN2041700, SPLEN2041720, SPLEN2041977, SPLEN2042051, SPLEN2042303, SPLEN2042521, SPLEN2042535, SPLEN2042598, SPLEN2042714, SPLEN2042920, STOMA1000013, STOMA1000047, STOMA1000052, STOMA1000074, STOMA1000091, STOMA1000117, STOMA1000133, STOMA1000175, STOMA1000186, STOMA1000190, STOMA1000191, STOMA2000032, STOMA2000072, STOMA2000088, STOMA2000104, STOMA2000121, STOMA2000148, STOMA2000168, STOMA2000183, STOMA2000188, STOMA2000257, STOMA2000279, STOMA2000289, STOMA2000383, STOMA2000386, STOMA2000396, STOMA2000478, STOMA2000482, STOMA2000529, STOMA2000539, STOMA2000567, STOMA2000640, STOMA2000678, STOMA2000686, STOMA2000888, STOMA2001025, STOMA2001389, STOMA2002052, STOMA2002141, STOMA2002166, STOMA2002367, STOMA2002688, STOMA2002828, STOMA2003158, STOMA2003289, STOMA2003444, STOMA2003477, STOMA2003646, STOMA2003716, STOMA2003781, STOMA2003894, STOMA2004194, STOMA2004294, STOMA2004663, STOMA2004668, STOMA2004852, STOMA2004873, STOMA2004884, STOMA2004893, STOMA2004925, STOMA2005120, STOMA2005664, STOMA2005667, STOMA2005746, STOMA2005782, STOMA2006181, STOMA2006213, STOMA2006229, STOMA2006325, STOMA2006330, STOMA2006398, STOMA2006447, STOMA2006780, STOMA2006904, STOMA2007269, STOMA2007680, STOMA2007745, STOMA2008050, STOMA2008361, STOMA2008546, STOMA2008614, STOMA2008638, STOMA2008838, STOMA2009250, STOMA2009253, STOMA2009256, STOMA2009289, SYNOV1000045, SYNOV1000049, SYNOV1000118, SYNOV1000128, SYNOV1000164, SYNOV1000190, SYNOV1000256, SYNOV1000374, SYNOV2000152, SYNOV2000171, SYNOV2000173, SYNOV2000177, SYNOV2000178, SYNOV2000193, SYNOV2000251, SYNOV2000279, SYNOV2000291, SYNOV2000297, SYNOV2000397, SYNOV2000426, SYNOV2000601, SYNOV2000700, SYNOV2000820, SYNOV2000824, SYNOV2000923, SYNOV2001014, SYNOV2001035, SYNOV2001088, SYNOV2001111, SYNOV2001212, SYNOV2001239, SYNOV2001251, SYNOV2001300, SYNOV2001356, SYNOV2001390, SYNOV2001451, SYNOV2001457, SYNOV2001468, SYNOV2001581, SYNOV2001648, SYNOV2001660, SYNOV2003326, SYNOV2005216, SYNOV2005448, SYNOV2005541, SYNOV2005673, SYNOV2005817, SYNOV2005962, SYNOV2006430, SYNOV2006620, SYNOV2007758, SYNOV2007965, SYNOV2011233, SYNOV2012326, SYNOV2013365, SYNOV2013637, SYNOV2014157, SYNOV2014364, SYNOV2016124, SYNOV2016837, SYNOV2017055, SYNOV2017179, SYNOV2018921, SYNOV2019280, SYNOV2020085, SYNOV2020463, SYNOV2021320, SYNOV2021953, SYNOV3000184, SYNOV3000231, SYNOV3000302, SYNOV3000345, SYNOV4000249, SYNOV4000472, SYNOV4000598, SYNOV4000706, SYNOV4001153, SYNOV4001224, SYNOV4001326, SYNOV4001342, SYNOV4001395, SYNOV4002001, SYNOV4002392, SYNOV4002875, SYNOV4002883, SYNOV4003174, SYNOV4003322, SYNOV4003681, SYNOV4003981, SYNOV4004184, SYNOV4004741, SYNOV4004823, SYNOV4004914, SYNOV4005256, SYNOV4005570, SYNOV4005739, SYNOV4005889, SYNOV4005981, SYNOV4005989, SYNOV4006256, SYNOV4006327, SYNOV4006542, SYNOV4007012, SYNOV4007215, SYNOV4007360, SYNOV4007430, SYNOV4007521, SYNOV4007553, SYNOV4007711, SYNOV4008245, SYNOV4008336, SYNOV4009139, SYNOV4009298, SYNOV4009575, T1ESE2000116, T1ESE2002665, TBAES2000004, TBAES2000059, TBAES2000116, TBAES2000255, TBAES2000315, TBAES2000352, TBAES2000932, TBAES2001171, TBAES2001220, TBAES2001229, TBAES2001258, TBAES2001296, TBAES2001492, TBAES2001553, TBAES2001751, TBAES2003435, TBAES2003492, TBAES2003550, TBAES2003702, TBAES2003917, TBAES2004055, TBAES2004105, TBAES2004939, TBAES2005157, TBAES2005361, TBAES2005543, TBAES2006568, TBAES2006881, TBAES2007379, TBAES2007428, TBAES2007481, TBAES2007504, TBAES2007548, TBAES2007697, TBAES2007862, TBAES2007964, TBAES2008133, TCERX2000171, TCERX2000431, TCERX2000613, TCERX2000998, TCERX2002644, TCOLN1000037, TCOLN2000139, TCOLN2000236, TCOLN2000641, TCOLN2001268, TCOLN2002047, TCOLN2002278, TESOP1000035, TESOP1000127, TESOP1000160, TESOP2000083, TESOP2000090, TESOP2000205, TESOP2000312, TESOP2000390, TESOP2000400, TESOP2000510, TESOP2000527, TESOP2000569, TESOP2000739, TESOP2000801, TESOP2001122, TESOP2001166, TESOP2001345, TESOP2001474, TESOP2001796, TESOP2001818, TESOP2001849, TESOP2001865, TESOP2001901, TESOP2001953, TESOP2002005, TESOP2002110, TESOP2002150, TESOP2002489, TESOP2002539, TESOP2002545, TESOP2002804, TESOP2002950, TESOP2003273, TESOP2003308, TESOP2003553, TESOP2003753, TESOP2004110, TESOP2004114, TESOP2004173, TESOP2004214, TESOP2005199, TESOP2005285, TESOP2005485, TESOP2005498, TESOP2005579, TESOP2006041, TESOP2006053, TESOP2006060, TESOP2006068, TESOP2006110, TESOP2006398, TESOP2006670, TESOP2006704, TESOP2006746, TESOP2006865, TESOP2006893, TESOP2007041, TESOP2007052, TESOP2007262, TESOP2007384, TESOP2007636, TESOP2007674, TESOP2007688, TESOP2007725, TESOP2007978, TESOP2008127, TESOP2008552, TESOP2008556, TESOP2008563, TESOP2008820, TESOP2009121, TESOP2009201, TESOP2009247, TESOP2009555, TESTI1000018, TESTI1000019, TESTI1000025, TESTI1000029, TESTI1000030, TESTI1000042, TESTI1000045, TESTI1000051, TESTI1000055, TESTI1000064, TESTI1000070, TESTI1000085, TESTI1000088, TESTI1000093, TESTI1000094, TESTI1000096, TESTI1000101, TESTI1000109, TESTI1000125, TESTI1000127, TESTI1000128, TESTI1000131, TESTI1000138, TESTI1000142, TESTI1000157, TESTI1000163, TESTI1000168, TESTI1000169, TESTI1000179, TESTI1000183, TESTI1000191, TESTI1000257, TESTI1000266, TESTI1000319, TESTI1000330, TESTI1000348, TESTI1000390, TESTI1000391, TESTI1000459, TESTI1000491, TESTI1000545, TESTI2000006, TESTI2000018, TESTI2000044, TESTI2000117, TESTI2000120, TESTI2000147, TESTI2000154, TESTI2000172, TESTI2000177, TESTI2000179, TESTI2000207, TESTI2000208, TESTI2000221, TESTI2000253, TESTI2000272, TESTI2000278, TESTI2000349, TESTI2000358, TESTI2000372, TESTI2000427, TESTI2000431, TESTI2000435, TESTI2000443, TESTI2000452, TESTI2000462, TESTI2000489, TESTI2000520, TESTI2000571, TESTI2000591, TESTI2000598, TESTI2000600, TESTI2000616, TESTI2000627, TESTI2000644, TESTI2000671, TESTI2000683, TESTI2000689, TESTI2000695, TESTI2000699, TESTI2000707, TESTI2000745, TESTI2000756, TESTI2000762, TESTI2000784, TESTI2000808, TESTI2000819, TESTI2000830, TESTI2000840, TESTI2000849, TESTI2000850, TESTI2000874, TESTI2000883, TESTI2000909, TESTI2000951, TESTI2000970, TESTI2000981, TESTI2001008, TESTI2001049, TESTI2001082, TESTI2001120, TESTI2001134, TESTI2001153, TESTI2001180, TESTI2001208, TESTI2001229, TESTI2001236, TESTI2001237, TESTI2001306, TESTI2001313, TESTI2001330, TESTI2001339, TESTI2001345, TESTI2001352, TESTI2001364, TESTI2001412, TESTI2001420, TESTI2001498, TESTI2001512, TESTI2001518, TESTI2001556, TESTI2001593, TESTI2001613, TESTI2001621, TESTI2001661, TESTI2001665, TESTI2001671, TESTI2001697, TESTI2001725, TESTI2001758, TESTI2001766, TESTI2001792, TESTI2001793, TESTI2001795, TESTI2001812, TESTI2001815, TESTI2001823, TESTI2001826, TESTI2001827, TESTI2001829, TESTI2001852, TESTI2001862, TESTI2001869, TESTI2001879, TESTI2001894, TESTI2001898, TESTI2001915, TESTI2001950, TESTI2001959, TESTI2001968, TESTI2001985, TESTI2001991, TESTI2002002, TESTI2002012, TESTI2002036, TESTI2002048, TESTI2002057, TESTI2002081, TESTI2002090, TESTI2002105, TESTI2002216, TESTI2002223, TESTI2002245, TESTI2002251, TESTI2002256, TESTI2002264, TESTI2002282, TESTI2002293, TESTI2002294, TESTI2002326, TESTI2002351, TESTI2002361, TESTI2002365, TESTI2002369, TESTI2002406, TESTI2002415, TESTI2002423, TESTI2002453, TESTI2002461, TESTI2002465, TESTI2002467, TESTI2002498, TESTI2002516, TESTI2002544, TESTI2002578, TESTI2002580, TESTI2002618, TESTI2002632, TESTI2002676, TESTI2002690, TESTI2002696, TESTI2002698, TESTI2002700, TESTI2002707, TESTI2002724, TESTI2002729, TESTI2002752, TESTI2002753, TESTI2002789, TESTI2002802, TESTI2002806, TESTI2002866, TESTI2002877, TESTI2002910, TESTI2002912, TESTI2002928, TESTI2002937, TESTI2002965, TESTI2002993, TESTI2003005, TESTI2003020, TESTI2003031, TESTI2003037, TESTI2003044, TESTI2003059, TESTI2003071, TESTI2003074, TESTI2003089, TESTI2003104, TESTI2003109, TESTI2003117, TESTI2003127, TESTI2003130, TESTI2003131, TESTI2003139, TESTI2003141, TESTI2003152, TESTI2003181, TESTI2003193, TESTI2003196, TESTI2003228, TESTI2003236, TESTI2003255, TESTI2003258, TESTI2003277, TESTI2003280, TESTI2003299, TESTI2003311, TESTI2003321, TESTI2003325, TESTI2003327, TESTI2003330, TESTI2003347, TESTI2003354, TESTI2003356, TESTI2003372, TESTI2003376, TESTI2003418, TESTI2003419, TESTI2003432, TESTI2003475, TESTI2003476, TESTI2003498, TESTI2003512, TESTI2003539, TESTI2003541, TESTI2003545, TESTI2003551, TESTI2003574, TESTI2003579, TESTI2003580, TESTI2003589, TESTI2003596, TESTI2003598, TESTI2003615, TESTI2003625, TESTI2003638, TESTI2003649, TESTI2003692, TESTI2003718, TESTI2003727, TESTI2003756, TESTI2003768, TESTI2003781, TESTI2003787, TESTI2003824, TESTI2003827, TESTI2003894, TESTI2003911, TESTI2003914, TESTI2003940, TESTI2003962, TESTI2003998, TESTI2004000, TESTI2004073, TESTI2004080, TESTI2004085, TESTI2004089, TESTI2004111, TESTI2004119, TESTI2004122, TESTI2004163, TESTI2004169, TESTI2004207, TESTI2004215, TESTI2004227, TESTI2004229, TESTI2004243, TESTI2004255, TESTI2004287, TESTI2004313, TESTI2004318, TESTI2004322, TESTI2004391, TESTI2004399, TESTI2004423, TESTI2004431, TESTI2004432, TESTI2004452, TESTI2004459, TESTI2004490, TESTI2004539, TESTI2004552, TESTI2004560, TESTI2004574, TESTI2004601, TESTI2004611, TESTI2004649, TESTI2004654, TESTI2004675, TESTI2004687, TESTI2004689, TESTI2004700, TESTI2004706, TESTI2004712, TESTI2004734, TESTI2004737, TESTI2004783, TESTI2004791, TESTI2004793, TESTI2004860, TESTI2004906, TESTI2004920, TESTI2004929, TESTI2004936, TESTI2004941, TESTI2004971, TESTI2004982, TESTI2004993, TESTI2004994, TESTI2004999, TESTI2005017, TESTI2005025, TESTI2005060, TESTI2005072, TESTI2005085, TESTI2005112, TESTI2005120, TESTI2005153, TESTI2005155, TESTI2005173, TESTI2005267, TESTI2005268, TESTI2005280, TESTI2005307, TESTI2005326, TESTI2005363, TESTI2005376, TESTI2005378, TESTI2005380, TESTI2005391, TESTI2005395, TESTI2005396, TESTI2005415, TESTI2005470, TESTI2005492, TESTI2005568, TESTI2005584, TESTI2005588, TESTI2005590, TESTI2005603, TESTI2005609, TESTI2005610, TESTI2005630, TESTI2005672, TESTI2005683, TESTI2005690, TESTI2005692, TESTI2005703, TESTI2005720, TESTI2005731, TESTI2005739, TESTI2005742, TESTI2005743, TESTI2005759, TESTI2005767, TESTI2005775, TESTI2005788, TESTI2005827, TESTI2005835, TESTI2005860, TESTI2005892, TESTI2005911, TESTI2005933, TESTI2005937, TESTI2005948, TESTI2005979, TESTI2005982, TESTI2005984, TESTI2005986, TESTI2005987, TESTI2006007, TESTI2006008, TESTI2006015, TESTI2006016, TESTI2006035, TESTI2006040, TESTI2006041, TESTI2006045, TESTI2006067, TESTI2006083, TESTI2006097, TESTI2006109, TESTI2006111, TESTI2006125, TESTI2006179, TESTI2006209, TESTI2006210, TESTI2006212, TESTI2006218, TESTI2006238, TESTI2006255, TESTI2006258, TESTI2006278, TESTI2006333, TESTI2006341, TESTI2006360, TESTI2006383, TESTI2006409, TESTI2006425, TESTI2006437, TESTI2006457, TESTI2006460, TESTI2006465, TESTI2006483, TESTI2006499, TESTI2006523, TESTI2006543, TESTI2006565, TESTI2006572, TESTI2006615, TESTI2006617, TESTI2006624, TESTI2006628, TESTI2006633, TESTI2006643, TESTI2006648, TESTI2006659, TESTI2006660, TESTI2006665, TESTI2006667, TESTI2006677, TESTI2006720, TESTI2006735, TESTI2006744, TESTI2006774, TESTI2006853, TESTI2006866, TESTI2006872, TESTI2006879, TESTI2006894, TESTI2006940, TESTI2006955, TESTI2006978, TESTI2006979, TESTI2006990, TESTI2007040, TESTI2007074, TESTI2007078, TESTI2007113, TESTI2007152, TESTI2007163, TESTI2007183, TESTI2007211, TESTI2007220, TESTI2007234, TESTI2007311, TESTI2007320, TESTI2007346, TESTI2007358, TESTI2007402, TESTI2007405, TESTI2007422, TESTI2007452, TESTI2007466, TESTI2007480, TESTI2007490, TESTI2007502, TESTI2007524, TESTI2007533, TESTI2007576, TESTI2007613, TESTI2007657, TESTI2007685, TESTI2007692, TESTI2007749, TESTI2007750, TESTI2007808, TESTI2007814, TESTI2007829, TESTI2007864, TESTI2007867, TESTI2007872, TESTI2007906, TESTI2007922, TESTI2007951, TESTI2007972, TESTI2007973, TESTI2008014, TESTI2008032, TESTI2008033, TESTI2008046, TESTI2008081, TESTI2008099, TESTI2008139, TESTI2008144, TESTI2008161, TESTI2008189, TESTI2008204, TESTI2008219, TESTI2008233, TESTI2008234, TESTI2008237, TESTI2008278, TESTI2008320, TESTI2008331, TESTI2008343, TESTI2008387, TESTI2008389, TESTI2008420, TESTI2008425, TESTI2008440, TESTI2008567, TESTI2008595, TESTI2008621, TESTI2008636, TESTI2008657, TESTI2008684, TESTI2008699, TESTI2008715, TESTI2008762, TESTI2008774, TESTI2008786, TESTI2008822, TESTI2008835, TESTI2008840, TESTI2008847, TESTI2008884, TESTI2008901, TESTI2008929, TESTI2008946, TESTI2008960, TESTI2009018, TESTI2009091, TESTI2009097, TESTI2009136, TESTI2009185, TESTI2009190, TESTI2009217, TESTI2009239, TESTI2009325, TESTI2009388, TESTI2009390, TESTI2009400, TESTI2009412, TESTI2009423, TESTI2009447, TESTI2009462, TESTI2009474, TESTI2009477, TESTI2009497, TESTI2009502, TESTI2009511, TESTI2009544, TESTI2009545, TESTI2009551, TESTI2009577, TESTI2009585, TESTI2009588, TESTI2009683, TESTI2009727, TESTI2009739, TESTI2009812, TESTI2009835, TESTI2009853, TESTI2009935, TESTI2009977, TESTI2010009, TESTI2010154, TESTI2010180, TESTI2010239, TESTI2010280, TESTI2010354, TESTI2010396, TESTI2010400, TESTI2010409, TESTI2010572, TESTI2010587, TESTI2010591, TESTI2010682, TESTI2010724, TESTI2010732, TESTI2010734, TESTI2010755, TESTI2010793, TESTI2010806, TESTI2010833, TESTI2010872, TESTI2011009, TESTI2011020, TESTI2011028, TESTI2011033, TESTI2011254, TESTI2011286, TESTI2011294, TESTI2011314, TESTI2011315, TESTI2011394, TESTI2011407, TESTI2011448, TESTI2011480, TESTI2011549, TESTI2011575, TESTI2011605, TESTI2011612, TESTI2011665, TESTI2011683, TESTI2011712, TESTI2011750, TESTI2011840, TESTI2011846, TESTI2011915, TESTI2011928, TESTI2011971, TESTI2012019, TESTI2012050, TESTI2012090, TESTI2012095, TESTI2012104, TESTI2012152, TESTI2012155, TESTI2012171, TESTI2012207, TESTI2012231, TESTI2012244, TESTI2012289, TESTI2012308, TESTI2012356, TESTI2012387, TESTI2012394, TESTI2012444, TESTI2012511, TESTI2012528, TESTI2012544, TESTI2012550, TESTI2012571, TESTI2012592, TESTI2012617, TESTI2012628, TESTI2012778, TESTI2012812, TESTI2012834, TESTI2012835, TESTI2012861, TESTI2012900, TESTI2012915, TESTI2012922, TESTI2013001, TESTI2013012, TESTI2013053, TESTI2013144, TESTI2013163, TESTI2013169, TESTI2013212, TESTI2013257, TESTI2013268, TESTI2013322, TESTI2013381, TESTI2013382, TESTI2013401, TESTI2013427, TESTI2013468, TESTI2013497, TESTI2013545, TESTI2013546, TESTI2013566, TESTI2013601, TESTI2013604, TESTI2013607, TESTI2013610, TESTI2013691, TESTI2013699, TESTI2013737, TESTI2013767, TESTI2013832, TESTI2013873, TESTI2013889, TESTI2014007, TESTI2014036, TESTI2014097, TESTI2014160, TESTI2014248, TESTI2014254, TESTI2014269, TESTI2014274, TESTI2014318, TESTI2014324, TESTI2014339, TESTI2014362, TESTI2014385, TESTI2014415, TESTI2014439, TESTI2014474, TESTI2014577, TESTI2014578, TESTI2014716, TESTI2014800, TESTI2014838, TESTI2014843, TESTI2014979, TESTI2014988, TESTI2015042, TESTI2015092, TESTI2015105, TESTI2015180, TESTI2015246, TESTI2015249, TESTI2015327, TESTI2015331, TESTI2015350, TESTI2015375, TESTI2015437, TESTI2015590, TESTI2015610, TESTI2015647, TESTI2015675, TESTI2015710, TESTI2015752, TESTI2015830, TESTI2015914, TESTI2015938, TESTI2015947, TESTI2015962, TESTI2015987, TESTI2016033, TESTI2016046, TESTI2016101, TESTI2016162, TESTI2016197, TESTI2016278, TESTI2016298, TESTI2016331, TESTI2016337, TESTI2016410, TESTI2016421, TESTI2016509, TESTI2016568, TESTI2016583, TESTI2016599, TESTI2016629, TESTI2016663, TESTI2016667, TESTI2016688, TESTI2016701, TESTI2016758, TESTI2016848, TESTI2016863, TESTI2016888, TESTI2016896, TESTI2016922, TESTI2016942, TESTI2016950, TESTI2016996, TESTI2017017, TESTI2017028, TESTI2017035, TESTI2017069, TESTI2017089, TESTI2017102, TESTI2017107, TESTI2017113, TESTI2017125, TESTI2017256, TESTI2017305, TESTI2017311, TESTI2017396, TESTI2017507, TESTI2017537, TESTI2017582, TESTI2017584, TESTI2017645, TESTI2017727, TESTI2017740, TESTI2017775, TESTI2017816, TESTI2017832, TESTI2017923, TESTI2017932, TESTI2017951, TESTI2017954, TESTI2018031, TESTI2018035, TESTI2018060, TESTI2018083, TESTI2018178, TESTI2018221, TESTI2018276, TESTI2018290, TESTI2018335, TESTI2018337, TESTI2018368, TESTI2018421, TESTI2018428, TESTI2018475, TESTI2018482, TESTI2018521, TESTI2018565, TESTI2018581, TESTI2018611, TESTI2018687, TESTI2018697, TESTI2018838, TESTI2018867, TESTI2018941, TESTI2018957, TESTI2018974, TESTI2018975, TESTI2018997, TESTI2019042, TESTI2019077, TESTI2019228, TESTI2019257, TESTI2019280, TESTI2019282, TESTI2019308, TESTI2019336, TESTI2019352, TESTI2019406, TESTI2019430, TESTI2019455, TESTI2019481, TESTI2019488, TESTI2019501, TESTI2019648, TESTI2019669, TESTI2019697, TESTI2019729, TESTI2019760, TESTI2019787, TESTI2019794, TESTI2019854, TESTI2019859, TESTI2019860, TESTI2019872, TESTI2019911, TESTI2019917, TESTI2019975, TESTI2019998, TESTI2020012, TESTI2020026, TESTI2020029, TESTI2020071, TESTI2020084, TESTI2020265, TESTI2020283, TESTI2020316, TESTI2020344, TESTI2020379, TESTI2020426, TESTI2020445, TESTI2020515, TESTI2020525, TESTI2020579, TESTI2020717, TESTI2020840, TESTI2020871, TESTI2020905, TESTI2020906, TESTI2020946, TESTI2020956, TESTI2020981, TESTI2020999, TESTI2021003, TESTI2021038, TESTI2021057, TESTI2021077, TESTI2021112, TESTI2021114, TESTI2021116, TESTI2021118, TESTI2021122, TESTI2021138, TESTI2021297, TESTI2021358, TESTI2021425, TESTI2021447, TESTI2021463, TESTI2021531, TESTI2021599, TESTI2021637, TESTI2021654, TESTI2021667, TESTI2021736, TESTI2021785, TESTI2021819, TESTI2021851, TESTI2021895, TESTI2021911, TESTI2021939, TESTI2021999, TESTI2022010, TESTI2022023, TESTI2022065, TESTI2022086, TESTI2022179, TESTI2022203, TESTI2022246, TESTI2022323, TESTI2022338, TESTI2022400, TESTI2022462, TESTI2022495, TESTI2022623, TESTI2022649, TESTI2022652, TESTI2022738, TESTI2022798, TESTI2022812, TESTI2022814, TESTI2022874, TESTI2022940, TESTI2022952, TESTI2023025, TESTI2023033, TESTI2023053, TESTI2023085, TESTI2023192, TESTI2023194, TESTI2023214, TESTI2023254, TESTI2023386, TESTI2023414, TESTI2023427, TESTI2023436, TESTI2023599, TESTI2023752, TESTI2023800, TESTI2023861, TESTI2023903, TESTI2023942, TESTI2023947, TESTI2023951, TESTI2023968, TESTI2024009, TESTI2024090, TESTI2024125, TESTI2024153, TESTI2024192, TESTI2024267, TESTI2024283, TESTI2024299, TESTI2024419, TESTI2024422, TESTI2024443, TESTI2024446, TESTI2024473, TESTI2024476, TESTI2024498, TESTI2024560, TESTI2024567, TESTI2024586, TESTI2024598, TESTI2024641, TESTI2024648, TESTI2024718, TESTI2024744, TESTI2024844, TESTI2024885, TESTI2024936, TESTI2024978, TESTI2024999, TESTI2025006, TESTI2025013, TESTI2025022, TESTI2025063, TESTI2025117, TESTI2025144, TESTI2025161, TESTI2025174, TESTI2025229, TESTI2025269, TESTI2025365, TESTI2025403, TESTI2025409, TESTI2025422, TESTI2025448, TESTI2025486, TESTI2025546, TESTI2025582, TESTI2025609, TESTI2025656, TESTI2025757, TESTI2025791, TESTI2025846, TESTI2025872, TESTI2025879, TESTI2025911, TESTI2025920, TESTI2025924, TESTI2026014, TESTI2026024, TESTI2026064, TESTI2026077, TESTI2026104, TESTI2026116, TESTI2026134, TESTI2026168, TESTI2026196, TESTI2026215, TESTI2026218, TESTI2026233, TESTI2026291, TESTI2026294, TESTI2026401, TESTI2026403, TESTI2026453, TESTI2026461, TESTI2026491, TESTI2026505, TESTI2026515, TESTI2026534, TESTI2026537, TESTI2026589, TESTI2026597, TESTI2026605, TESTI2026647, TESTI2026674, TESTI2026794, TESTI2026824, TESTI2026854, TESTI2026925, TESTI2026936, TESTI2026957, TESTI2027013, TESTI2027019, TESTI2027108, TESTI2027165, TESTI2027171, TESTI2027173, TESTI2027179, TESTI2027185, TESTI2027206, TESTI2027238, TESTI2027239, TESTI2027243, TESTI2027271, TESTI2027296, TESTI2027378, TESTI2027411, TESTI2027450, TESTI2027503, TESTI2027562, TESTI2027615, TESTI2027645, TESTI2027730, TESTI2027736, TESTI2027791, TESTI2027820, TESTI2027828, TESTI2027840, TESTI2027909, TESTI2028098, TESTI2028151, TESTI2028242, TESTI2028253, TESTI2028254, TESTI2028269, TESTI2028290, TESTI2028296, TESTI2028384, TESTI2028426, TESTI2028488, TESTI2028523, TESTI2028583, TESTI2028613, TESTI2028659, TESTI2028662, TESTI2028670, TESTI2028705, TESTI2028776, TESTI2028811, TESTI2028891, TESTI2028985, TESTI2028997, TESTI2029131, TESTI2029162, TESTI2029196, TESTI2029201, TESTI2029227, TESTI2029244, TESTI2029249, TESTI2029252, TESTI2029259, TESTI2029264, TESTI2029470, TESTI2029672, TESTI2029785, TESTI2029880, TESTI2030136, TESTI2030322, TESTI2030336, TESTI2030342, TESTI2030519, TESTI2030554, TESTI2030556, TESTI2030728, TESTI2030754, TESTI2030770, TESTI2030860, TESTI2030901, TESTI2030917, TESTI2030930, TESTI2031006, TESTI2031007, TESTI2031060, TESTI2031129, TESTI2031356, TESTI2031418, TESTI2031504, TESTI2031529, TESTI2031687, TESTI2031760, TESTI2031809, TESTI2031919, TESTI2031935, TESTI2031986, TESTI2032044, TESTI2032067, TESTI2032079, TESTI2032643, TESTI2032681, TESTI2032761, TESTI2032768, TESTI2032774, TESTI2032828, TESTI2033031, TESTI2033242, TESTI2033254, TESTI2033300, TESTI2033395, TESTI2033441, TESTI2033453, TESTI2033505, TESTI2033520, TESTI2033641, TESTI2033710, TESTI2033905, TESTI2034187, TESTI2034243, TESTI2034249, TESTI2034307, TESTI2034357, TESTI2034401, TESTI2034407, TESTI2034506, TESTI2034520, TESTI2034718, TESTI2034730, TESTI2034749, TESTI2034767, TESTI2034774, TESTI2034777, TESTI2034785, TESTI2034799, TESTI2034847, TESTI2034913, TESTI2034916, TESTI2034931, TESTI2034953, TESTI2034997, TESTI2035003, TESTI2035078, TESTI2035084, TESTI2035107, TESTI2035121, TESTI2035124, TESTI2035183, TESTI2035236, TESTI2035262, TESTI2035309, TESTI2035688, TESTI2035775, TESTI2035793, TESTI2035898, TESTI2035962, TESTI2035981, TESTI2035997, TESTI2036114, TESTI2036129, TESTI2036285, TESTI2036288, TESTI2036513, TESTI2036589, TESTI2036650, TESTI2036684, TESTI2036691, TESTI2036736, TESTI2036822, TESTI2036833, TESTI2036913, TESTI2036922, TESTI2036951, TESTI2036965, TESTI2037002, TESTI2037055, TESTI2037081, TESTI2037085, TESTI2037103, TESTI2037106, TESTI2037111, TESTI2037209, TESTI2037255, TESTI2037359, TESTI2037375, TESTI2037382, TESTI2037534, TESTI2037569, TESTI2037572, TESTI2037643, TESTI2037657, TESTI2037673, TESTI2037723, TESTI2037819, TESTI2037830, TESTI2037845, TESTI2037877, TESTI2037976, TESTI2038048, TESTI2038065, TESTI2038104, TESTI2038275, TESTI2038388, TESTI2038573, TESTI2038596, TESTI2038623, TESTI2038644, TESTI2038733, TESTI2038858, TESTI2038958, TESTI2039025, TESTI2039026, TESTI2039038, TESTI2039041, TESTI2039060, TESTI2039113, TESTI2039121, TESTI2039177, TESTI2039209, TESTI2039225, TESTI2039227, TESTI2039276, TESTI2039342, TESTI2039353, TESTI2039544, TESTI2039613, TESTI2039707, TESTI2039732, TESTI2039738, TESTI2039776, TESTI2039867, TESTI2039908, TESTI2040018, TESTI2040094, TESTI2040102, TESTI2040128, TESTI2040143, TESTI2040297, TESTI2040372, TESTI2040377, TESTI2040424, TESTI2040642, TESTI2040815, TESTI2040897, TESTI2040944, TESTI2040964, TESTI2040983, TESTI2040989, TESTI2041330, TESTI2041362, TESTI2041517, TESTI2041564, TESTI2041664, TESTI2041730, TESTI2041734, TESTI2041778, TESTI2041800, TESTI2041947, TESTI2041956, TESTI2041976, TESTI2042062, TESTI2042149, TESTI2042264, TESTI2042295, TESTI2042302, TESTI2042326, TESTI2042400, TESTI2042450, TESTI2042473, TESTI2042507, TESTI2042508, TESTI2042750, TESTI2042783, TESTI2042806, TESTI2042928, TESTI2042946, TESTI2042958, TESTI2043275, TESTI2043277, TESTI2043282, TESTI2043313, TESTI2043477, TESTI2043585, TESTI2043758, TESTI2043817, TESTI2043857, TESTI2043866, TESTI2043869, TESTI2044064, TESTI2044118, TESTI2044194, TESTI2044276, TESTI2044306, TESTI2044309, TESTI2044413, TESTI2044418, TESTI2044754, TESTI2044788, TESTI2044796, TESTI2044833, TESTI2044892, TESTI2044920, TESTI2044968, TESTI2045139, TESTI2045155, TESTI2045171, TESTI2045199, TESTI2045353, TESTI2045509, TESTI2045562, TESTI2045611, TESTI2045819, TESTI2045850, TESTI2045920, TESTI2045964, TESTI2045983, TESTI2046100, TESTI2046188, TESTI2046347, TESTI2046352, TESTI2046358, TESTI2046439, TESTI2046535, TESTI2046536, TESTI2046552, TESTI2046569, TESTI2046686, TESTI2046721, TESTI2046732, TESTI2046786, TESTI2046797, TESTI2046863, TESTI2046872, TESTI2047071, TESTI2047141, TESTI2047147, TESTI2047153, TESTI2047212, TESTI2047342, TESTI2047383, TESTI2047605, TESTI2047792, TESTI2047801, TESTI2047818, TESTI2047824, TESTI2047885, TESTI2047930, TESTI2048105, TESTI2048109, TESTI2048465, TESTI2048603, TESTI2048898, TESTI2049041, TESTI2049062, TESTI2049206, TESTI2049246, TESTI2049277, TESTI2049422, TESTI2049452, TESTI2049469, TESTI2049553, TESTI2049576, TESTI2049857, TESTI2049956, TESTI2050137, TESTI2050681, TESTI2050780, TESTI2050987, TESTI2051148, TESTI2051177, TESTI2051279, TESTI2051488, TESTI2051543, TESTI2051627, TESTI2051742, TESTI2051767, TESTI2051791, TESTI2051806, TESTI2051867, TESTI2051873, TESTI2052110, TESTI2052202, TESTI2052211, TESTI2052256, TESTI2052288, TESTI2052525, TESTI2052670, TESTI2052693, TESTI2052698, TESTI2052799, TESTI2052822, TESTI2052985, TESTI2053151, TESTI2053242, TESTI2053399, TESTI2053526, TESTI2053561, TESTI2053621, TESTI2053667, TESTI3000002, TESTI3000005, TESTI4000068, TESTI4000079, TESTI4000093, TESTI4000134, TESTI4000137, TESTI4000153, TESTI4000155, TESTI4000157, TESTI4000183, TESTI4000214, TESTI4000215, TESTI4000228, TESTI4000250, TESTI4000288, TESTI4000319, TESTI4000349, TESTI4000370, TESTI4000394, TESTI4000434, TESTI4000462, TESTI4000530, TESTI4000534, TESTI4000598, TESTI4000600, TESTI4000621, TESTI4000703, TESTI4000724, TESTI4000957, TESTI4000970, TESTI4001036, TESTI4001037, TESTI4001060, TESTI4001106, TESTI4001148, TESTI4001176, TESTI4001195, TESTI4001201, TESTI4001206, TESTI4001348, TESTI4001441, TESTI4001467, TESTI4001473, TESTI4001517, TESTI4001527, TESTI4001561, TESTI4001569, TESTI4001604, TESTI4001665, TESTI4001679, TESTI4001795, TESTI4001923, TESTI4001925, TESTI4001984, TESTI4002003, TESTI4002141, TESTI4002195, TESTI4002202, TESTI4002290, TESTI4002319, TESTI4002491, TESTI4002520, TESTI4002552, TESTI4002647, TESTI4002703, TESTI4002754, TESTI4002868, TESTI4002878, TESTI4002889, TESTI4002988, TESTI4003150, TESTI4003179, TESTI4003279, TESTI4003319, TESTI4003404, TESTI4003565, TESTI4003574, TESTI4003579, TESTI4003602, TESTI4003733, TESTI4003796, TESTI4003944, TESTI4004003, TESTI4004031, TESTI4004200, TESTI4004210, TESTI4004539, TESTI4004653, TESTI4004695, TESTI4004722, TESTI4004887, TESTI4004917, TESTI4005015, TESTI4005039, TESTI4005133, TESTI4005158, TESTI4005317, TESTI4005322, TESTI4005399, TESTI4005470, TESTI4005500, TESTI4005534, TESTI4005543, TESTI4005628, TESTI4005801, TESTI4005805, TESTI4005961, TESTI4006053, TESTI4006079, TESTI4006112, TESTI4006137, TESTI4006148, TESTI4006219, TESTI4006234, TESTI4006308, TESTI4006326, TESTI4006393, TESTI4006407, TESTI4006412, TESTI4006420, TESTI4006441, TESTI4006473, TESTI4006539, TESTI4006546, TESTI4006567, TESTI4006704, TESTI4006728, TESTI4006802, TESTI4006819, TESTI4007064, TESTI4007163, TESTI4007176, TESTI4007203, TESTI4007239, TESTI4007369, TESTI4007373, TESTI4007382, TESTI4007404, TESTI4007489, TESTI4007565, TESTI4007671, TESTI4007775, TESTI4007778, TESTI4007799, TESTI4007810, TESTI4007816, TESTI4007965, TESTI4008007, TESTI4008018, TESTI4008050, TESTI4008058, TESTI4008086, TESTI4008097, TESTI4008176, TESTI4008209, TESTI4008219, TESTI4008250, TESTI4008302, TESTI4008305, TESTI4008401, TESTI4008417, TESTI4008429, TESTI4008573, TESTI4008797, TESTI4008816, TESTI4008840, TESTI4008935, TESTI4008993, TESTI4009022, TESTI4009028, TESTI4009034, TESTI4009123, TESTI4009160, TESTI4009215, TESTI4009283, TESTI4009306, TESTI4009374, TESTI4009406, TESTI4009457, TESTI4009501, TESTI4009563, TESTI4009608, TESTI4009638, TESTI4009752, TESTI4009881, TESTI4009886, TESTI4009928, TESTI4010076, TESTI4010082, TESTI4010095, TESTI4010211, TESTI4010377, TESTI4010475, TESTI4010544, TESTI4010713, TESTI4010721, TESTI4010789, TESTI4010817, TESTI4010831, TESTI4010902, TESTI4010928, TESTI4011070, TESTI4011072, TESTI4011084, TESTI4011118, TESTI4011246, TESTI4011484, TESTI4011505, TESTI4011532, TESTI4011616, TESTI4011744, TESTI4011745, TESTI4011829, TESTI4011926, TESTI4011956, TESTI4012010, TESTI4012086, TESTI4012258, TESTI4012293, TESTI4012329, TESTI4012382, TESTI4012406, TESTI4012448, TESTI4012451, TESTI4012505, TESTI4012556, TESTI4012623, TESTI4012646, TESTI4012679, TESTI4012911, TESTI4012956, TESTI4012960, TESTI4013365, TESTI4013369, TESTI4013410, TESTI4013474, TESTI4013602, TESTI4013667, TESTI4013675, TESTI4013685, TESTI4013735, TESTI4013742, TESTI4013774, TESTI4013817, TESTI4013830, TESTI4013852, TESTI4013894, TESTI4013924, TESTI4013960, TESTI4013962, TESTI4014159, TESTI4014265, TESTI4014276, TESTI4014306, TESTI4014392, TESTI4014415, TESTI4014445, TESTI4014553, TESTI4014661, TESTI4014694, TESTI4014801, TESTI4014818, TESTI4014891, TESTI4014908, TESTI4014924, TESTI4014932, TESTI4014977, TESTI4015012, TESTI4015129, TESTI4015145, TESTI4015263, TESTI4015293, TESTI4015299, TESTI4015339, TESTI4015398, TESTI4015442, TESTI4015471, TESTI4015477, TESTI4015600, TESTI4015646, TESTI4015681, TESTI4015688, TESTI4015790, TESTI4016110, TESTI4016238, TESTI4016551, TESTI4016812, TESTI4016822, TESTI4016865, TESTI4016882, TESTI4016925, TESTI4017001, TESTI4017116, TESTI4017137, TESTI4017229, TESTI4017254, TESTI4017269, TESTI4017380, TESTI4017382, TESTI4017543, TESTI4017575, TESTI4017647, TESTI4017714, TESTI4017763, TESTI4017848, TESTI4017854, TESTI4017901, TESTI4017961, TESTI4017984, TESTI4018101, TESTI4018152, TESTI4018208, TESTI4018382, TESTI4018436, TESTI4018506, TESTI4018555, TESTI4018751, TESTI4018806, TESTI4018835, TESTI4018859, TESTI4018881, TESTI4018886, TESTI4018938, TESTI4019140, TESTI4019149, TESTI4019299, TESTI4019417, TESTI4019440, TESTI4019566, TESTI4019657, TESTI4019756, TESTI4020092, TESTI4020102, TESTI4020342, TESTI4020460, TESTI4020596, TESTI4020806, TESTI4020819, TESTI4020920, TESTI4021129, TESTI4021197, TESTI4021294, TESTI4021377, TESTI4021456, TESTI4021491, TESTI4021569, TESTI4021713, TESTI4021821, TESTI4022158, TESTI4022577, TESTI4022716, TESTI4022873, TESTI4023096, TESTI4023172, TESTI4023546, TESTI4023555, TESTI4023654, TESTI4023722, TESTI4023762, TESTI4023942, TESTI4024096, TESTI4024240, TESTI4024245, TESTI4024294, TESTI4024344, TESTI4024387, TESTI4024420, TESTI4024494, TESTI4024740, TESTI4024874, TESTI4024890, TESTI4024907, TESTI4024930, TESTI4025062, TESTI4025268, TESTI4025401, TESTI4025494, TESTI4025547, TESTI4025731, TESTI4025797, TESTI4025865, TESTI4025908, TESTI4025920, TESTI4026079, TESTI4026080, TESTI4026192, TESTI4026207, TESTI4026295, TESTI4026390, TESTI4026456, TESTI4026510, TESTI4026524, TESTI4026680, TESTI4026700, TESTI4026762, TESTI4026785, TESTI4027139, TESTI4027170, TESTI4027262, TESTI4027516, TESTI4027557, TESTI4027660, TESTI4027821, TESTI4027969, TESTI4028042, TESTI4028059, TESTI4028062, TESTI4028182, TESTI4028429, TESTI4028612, TESTI4028692, TESTI4028809, TESTI4028823, TESTI4028880, TESTI4028904, TESTI4028938, TESTI4028958, TESTI4028983, TESTI4029023, TESTI4029348, TESTI4029370, TESTI4029528, TESTI4029651, TESTI4029671, TESTI4029676, TESTI4029690, TESTI4029731, TESTI4029743, TESTI4030069, TESTI4030159, TESTI4030319, TESTI4030505, TESTI4030603, TESTI4030669, TESTI4030673, TESTI4030864, TESTI4031066, TESTI4031173, TESTI4031335, TESTI4031745, TESTI4031818, TESTI4032090, TESTI4032112, TESTI4032128, TESTI4032270, TESTI4032375, TESTI4032834, TESTI4032856, TESTI4032895, TESTI4032913, TESTI4033146, TESTI4033177, TESTI4033433, TESTI4033690, TESTI4034172, TESTI4034212, TESTI4034432, TESTI4034495, TESTI4034632, TESTI4034633, TESTI4034912, TESTI4034973, TESTI4035063, TESTI4035065, TESTI4035498, TESTI4035508, TESTI4035581, TESTI4035602, TESTI4035637, TESTI4035649, TESTI4035770, TESTI4035872, TESTI4035895, TESTI4035898, TESTI4035989, TESTI4036012, TESTI4036042, TESTI4036048, TESTI4036315, TESTI4036319, TESTI4036449, TESTI4036767, TESTI4036909, TESTI4037066, TESTI4037188, TESTI4037228, TESTI4037244, TESTI4037727, TESTI4037949, TESTI4038047, TESTI4038099, TESTI4038156, TESTI4038223, TESTI4038258, TESTI4038284, TESTI4038339, TESTI4038492, TESTI4038721, TESTI4038758, TESTI4038779, TESTI4038818, TESTI4039038, TESTI4039086, TESTI4039451, TESTI4039575, TESTI4039659, TESTI4039744, TESTI4039904, TESTI4040197, TESTI4040363, TESTI4040535, TESTI4040559, TESTI4040598, TESTI4040800, TESTI4040804, TESTI4040939, TESTI4040956, TESTI4041049, TESTI4041053, TESTI4041086, TESTI4041099, TESTI4041143, TESTI4041482, TESTI4041519, TESTI4041624, TESTI4041629, TESTI4041832, TESTI4041844, TESTI4041903, TESTI4041954, TESTI4041984, TESTI4041985, TESTI4041986, TESTI4042098, TESTI4042420, TESTI4042440, TESTI4042444, TESTI4042711, TESTI4042846, TESTI4043067, TESTI4043129, TESTI4043166, TESTI4043203, TESTI4043223, TESTI4043371, TESTI4043378, TESTI4043512, TESTI4043551, TESTI4043710, TESTI4043947, TESTI4044035, TESTI4044076, TESTI4044084, TESTI4044123, TESTI4044186, TESTI4044234, TESTI4044291, TESTI4044296, TESTI4044300, TESTI4044682, TESTI4044704, TESTI4044770, TESTI4045168, TESTI4045312, TESTI4045330, TESTI4045470, TESTI4045701, TESTI4045908, TESTI4045955, TESTI4045982, TESTI4046073, TESTI4046090, TESTI4046240, TESTI4046245, TESTI4046253, TESTI4046282, TESTI4046328, TESTI4046450, TESTI4046457, TESTI4046487, TESTI4046502, TESTI4046523, TESTI4046819, TESTI4046873, TESTI4046884, TESTI4046896, TESTI4046903, TESTI4046962, TESTI4047069, TESTI4047119, TESTI4047305, TESTI4047328, TESTI4047437, TESTI4047569, TESTI4047746, TESTI4047808, THYMU1000010, THYMU1000025, THYMU1000029, THYMU1000032, THYMU1000033, THYMU1000060, THYMU1000074, THYMU1000083, THYMU1000098, THYMU1000105, THYMU1000109, THYMU1000136, THYMU1000142, THYMU1000158, THYMU1000176, THYMU1000179, THYMU1000191, THYMU1000198, THYMU1000217, THYMU1000240, THYMU1000242, THYMU1000291, THYMU1000316, THYMU1000318, THYMU1000329, THYMU1000331, THYMU1000336, THYMU1000366, THYMU1000382, THYMU1000393, THYMU1000394, THYMU1000399, THYMU1000426, THYMU1000428, THYMU1000440, THYMU1000459, THYMU1000473, THYMU1000491, THYMU1000496, THYMU1000527, THYMU1000532, THYMU1000536, THYMU1000554, THYMU1000558, THYMU1000576, THYMU1000600, THYMU1000677, THYMU1000692, THYMU2000022, THYMU2000032, THYMU2000057, THYMU2000120, THYMU2000138, THYMU2000140, THYMU2000155, THYMU2000162, THYMU2000171, THYMU2000176, THYMU2000179, THYMU2000231, THYMU2000236, THYMU2000276, THYMU2000280, THYMU2000300, THYMU2000317, THYMU2000368, THYMU2000369, THYMU2000418, THYMU2000440, THYMU2000489, THYMU2000492, THYMU2000519, THYMU2000570, THYMU2000602, THYMU2000660, THYMU2000671, THYMU2000702, THYMU2000767, THYMU2000775, THYMU2000800, THYMU2000879, THYMU2000932, THYMU2000950, THYMU2000971, THYMU2000982, THYMU2000990, THYMU2001007, THYMU2001018, THYMU2001053, THYMU2001071, THYMU2001090, THYMU2001139, THYMU2001195, THYMU2001202, THYMU2001203, THYMU2001256, THYMU2001270, THYMU2001291, THYMU2001314, THYMU2001325, THYMU2001357, THYMU2001381, THYMU2001422, THYMU2001443, THYMU2001515, THYMU2001521, THYMU2001556, THYMU2001622, THYMU2001727, THYMU2001819, THYMU2001825, THYMU2001839, THYMU2001868, THYMU2001898, THYMU2001900, THYMU2001916, THYMU2001989, THYMU2002023, THYMU2002037, THYMU2002080, THYMU2002109, THYMU2002147, THYMU2002154, THYMU2002157, THYMU2002177, THYMU2002203, THYMU2002229, THYMU2002242, THYMU2002338, THYMU2002356, THYMU2002376, THYMU2002384, THYMU2002490, THYMU2002548, THYMU2002695, THYMU2002745, THYMU2002789, THYMU2002792, THYMU2002815, THYMU2002852, THYMU2002910, THYMU2002950, THYMU2003046, THYMU2003069, THYMU2003107, THYMU2003124, THYMU2003133, THYMU2003166, THYMU2003232, THYMU2003242, THYMU2003249, THYMU2003270, THYMU2003282, THYMU2003287, THYMU2003336, THYMU2003366, THYMU2003397, THYMU2003440, THYMU2003470, THYMU2003479, THYMU2003499, THYMU2003632, THYMU2003650, THYMU2003700, THYMU2003760, THYMU2003803, THYMU2003855, THYMU2003907, THYMU2003932, THYMU2004003, THYMU2004008, THYMU2004042, THYMU2004108, THYMU2004111, THYMU2004123, THYMU2004139, THYMU2004169, THYMU2004284, THYMU2004320, THYMU2004336, THYMU2004356, THYMU2004508, THYMU2004512, THYMU2004635, THYMU2004639, THYMU2004668, THYMU2004677, THYMU2004688, THYMU2004693, THYMU2004835, THYMU2004843, THYMU2004906, THYMU2004986, THYMU2005001, THYMU2005003, THYMU2005046, THYMU2005134, THYMU2005156, THYMU2005190, THYMU2005225, THYMU2005240, THYMU2005246, THYMU2005270, THYMU2005283, THYMU2005303, THYMU2005321, THYMU2005356, THYMU2005369, THYMU2005439, THYMU2005480, THYMU2005482, THYMU2005507, THYMU2005545, THYMU2005574, THYMU2005576, THYMU2005748, THYMU2005759, THYMU2005807, THYMU2005815, THYMU2005855, THYMU2005881, THYMU2005948, THYMU2005980, THYMU2005997, THYMU2006001, THYMU2006048, THYMU2006098, THYMU2006160, THYMU2006170, THYMU2006252, THYMU2006261, THYMU2006277, THYMU2006303, THYMU2006324, THYMU2006350, THYMU2006357, THYMU2006365, THYMU2006420, THYMU2006468, THYMU2006610, THYMU2006666, THYMU2006712, THYMU2006913, THYMU2006946, THYMU2006965, THYMU2007025, THYMU2007036, THYMU2007060, THYMU2007065, THYMU2007095, THYMU2007146, THYMU2007179, THYMU2007258, THYMU2007307, THYMU2007308, THYMU2007339, THYMU2007350, THYMU2007384, THYMU2007467, THYMU2007493, THYMU2007521, THYMU2007528, THYMU2007530, THYMU2007532, THYMU2007561, THYMU2007571, THYMU2007635, THYMU2007658, THYMU2007667, THYMU2007694, THYMU2007725, THYMU2007824, THYMU2007854, THYMU2007886, THYMU2007952, THYMU2007969, THYMU2008035, THYMU2008036, THYMU2008049, THYMU2008072, THYMU2008111, THYMU2008145, THYMU2008149, THYMU2008185, THYMU2008191, THYMU2008207, THYMU2008226, THYMU2008282, THYMU2008321, THYMU2008339, THYMU2008350, THYMU2008351, THYMU2008383, THYMU2008452, THYMU2008643, THYMU2008686, THYMU2008691, THYMU2008714, THYMU2008725, THYMU2008781, THYMU2008799, THYMU2008876, THYMU2008910, THYMU2008917, THYMU2008928, THYMU2008990, THYMU2008994, THYMU2009023, THYMU2009046, THYMU2009101, THYMU2009104, THYMU2009134, THYMU2009157, THYMU2009181, THYMU2009186, THYMU2009338, THYMU2009425, THYMU2009516, THYMU2009526, THYMU2009546, THYMU2009592, THYMU2009596, THYMU2009792, THYMU2009835, THYMU2009906, THYMU2009948, THYMU2010030, THYMU2010041, THYMU2010046, THYMU2010059, THYMU2010082, THYMU2010094, THYMU2010161, THYMU2010192, THYMU2010448, THYMU2010519, THYMU2010637, THYMU2010671, THYMU2010699, THYMU2010705, THYMU2010779, THYMU2010816, THYMU2010831, THYMU2010848, THYMU2011053, THYMU2011063, THYMU2011072, THYMU2011096, THYMU2011118, THYMU2011142, THYMU2011183, THYMU2011257, THYMU2011259, THYMU2011295, THYMU2011308, THYMU2011390, THYMU2011431, THYMU2011447, THYMU2011538, THYMU2011548, THYMU2011551, THYMU2011564, THYMU2011573, THYMU2011585, THYMU2011621, THYMU2011666, THYMU2011785, THYMU2011806, THYMU2011852, THYMU2011875, THYMU2011881, THYMU2011937, THYMU2011939, THYMU2012002, THYMU2012073, THYMU2012104, THYMU2012113, THYMU2012273, THYMU2012401, THYMU2012492, THYMU2012507, THYMU2012565, THYMU2012574, THYMU2012625, THYMU2012631, THYMU2012665, THYMU2012690, THYMU2012701, THYMU2012807, THYMU2012826, THYMU2012882, THYMU2012891, THYMU2012902, THYMU2012919, THYMU2013023, THYMU2013047, THYMU2013051, THYMU2013089, THYMU2013170, THYMU2013364, THYMU2013386, THYMU2013426, THYMU2013578, THYMU2013648, THYMU2013705, THYMU2013757, THYMU2013779, THYMU2013863, THYMU2013950, THYMU2013981, THYMU2014067, THYMU2014068, THYMU2014183, THYMU2014204, THYMU2014297, THYMU2014323, THYMU2014327, THYMU2014353, THYMU2014492, THYMU2014500, THYMU2014599, THYMU2014762, THYMU2014777, THYMU2014801, THYMU2014901, THYMU2014923, THYMU2015019, THYMU2015161, THYMU2015316, THYMU2015321, THYMU2015439, THYMU2015441, THYMU2015479, THYMU2015775, THYMU2015825, THYMU2015918, THYMU2015943, THYMU2015984, THYMU2016113, THYMU2016164, THYMU2016204, THYMU2016219, THYMU2016360, THYMU2016496, THYMU2016523, THYMU2016840, THYMU2017008, THYMU2017010, THYMU2017023, THYMU2017085, THYMU2017099, THYMU2017158, THYMU2017162, THYMU2017215, THYMU2017362, THYMU2017366, THYMU2017398, THYMU2017449, THYMU2017479, THYMU2017522, THYMU2017526, THYMU2017675, THYMU2017707, THYMU2017831, THYMU2017844, THYMU2017878, THYMU2017948, THYMU2018071, THYMU2018126, THYMU2018189, THYMU2018197, THYMU2018384, THYMU2018455, THYMU2018547, THYMU2018565, THYMU2018639, THYMU2018673, THYMU2018721, THYMU2018772, THYMU2018819, THYMU2018841, THYMU2018997, THYMU2019021, THYMU2019054, THYMU2019197, THYMU2019210, THYMU2019364, THYMU2019436, THYMU2019442, THYMU2019587, THYMU2019599, THYMU2019686, THYMU2019813, THYMU2020198, THYMU2020289, THYMU2020416, THYMU2020491, THYMU2020499, THYMU2020560, THYMU2020667, THYMU2020830, THYMU2020883, THYMU2020959, THYMU2021361, THYMU2021509, THYMU2021597, THYMU2021684, THYMU2021714, THYMU2022213, THYMU2022289, THYMU2022660, THYMU2022854, THYMU2022922, THYMU2023209, THYMU2023264, THYMU2023576, THYMU2023711, THYMU2023900, THYMU2023943, THYMU2023967, THYMU2024071, THYMU2024121, THYMU2024185, THYMU2024207, THYMU2024616, THYMU2024684, THYMU2024748, THYMU2025042, THYMU2025189, THYMU2025319, THYMU2025325, THYMU2025406, THYMU2025557, THYMU2025572, THYMU2025707, THYMU2025849, THYMU2025909, THYMU2025939, THYMU2026182, THYMU2026350, THYMU2026530, THYMU2026531, THYMU2026835, THYMU2026904, THYMU2027053, THYMU2027168, THYMU2027249, THYMU2027282, THYMU2027497, THYMU2027695, THYMU2027734, THYMU2027894, THYMU2027975, THYMU2027996, THYMU2028041, THYMU2028368, THYMU2028379, THYMU2028394, THYMU2028412, THYMU2028629, THYMU2028632, THYMU2028724, THYMU2028739, THYMU2028942, THYMU2028978, THYMU2029134, THYMU2029578, THYMU2029676, THYMU2029688, THYMU2029788, THYMU2030068, THYMU2030226, THYMU2030264, THYMU2030462, THYMU2030543, THYMU2030637, THYMU2030655, THYMU2030796, THYMU2030912, THYMU2030982, THYMU2031046, THYMU2031139, THYMU2031218, THYMU2031249, THYMU2031258, THYMU2031341, THYMU2031368, THYMU2031579, THYMU2031847, THYMU2031890, THYMU2031994, THYMU2032014, THYMU2032035, THYMU2032080, THYMU2032150, THYMU2032155, THYMU2032358, THYMU2032437, THYMU2032601, THYMU2032655, THYMU2032696, THYMU2032715, THYMU2032732, THYMU2032825, THYMU2032976, THYMU2033053, THYMU2033059, THYMU2033070, THYMU2033079, THYMU2033085, THYMU2033104, THYMU2033227, THYMU2033263, THYMU2033308, THYMU2033401, THYMU2033583, THYMU2033755, THYMU2033787, THYMU2033816, THYMU2034182, THYMU2034279, THYMU2034314, THYMU2034338, THYMU2034647, THYMU2034917, THYMU2035064, THYMU2035078, THYMU2035101, THYMU2035319, THYMU2035321, THYMU2035388, THYMU2035400, THYMU2035554, THYMU2035710, THYMU2035735, THYMU2036058, THYMU2036105, THYMU2036207, THYMU2036252, THYMU2036265, THYMU2036366, THYMU2036459, THYMU2036461, THYMU2036604, THYMU2036653, THYMU2037081, THYMU2037208, THYMU2037226, THYMU2037233, THYMU2037234, THYMU2037348, THYMU2037406, THYMU2037965, THYMU2038058, THYMU2038189, THYMU2038199, THYMU2038220, THYMU2038301, THYMU2038369, THYMU2038389, THYMU2038615, THYMU2038636, THYMU2038739, THYMU2038772, THYMU2038797, THYMU2038906, THYMU2039305, THYMU2039315, THYMU2039334, THYMU2039350, THYMU2039411, THYMU2039634, THYMU2039719, THYMU2039780, THYMU2039788, THYMU2039989, THYMU2040029, THYMU2040110, THYMU2040114, THYMU2040140, THYMU2040412, THYMU2040427, THYMU2040824, THYMU2040925, THYMU2041007, THYMU2041015, THYMU2041252, THYMU3000028, THYMU3000036, THYMU3000037, THYMU3000082, THYMU3000194, THYMU3000224, THYMU3000269, THYMU3000306, THYMU3000360, THYMU3000390, THYMU3000420, THYMU3000490, THYMU3000504, THYMU3000542, THYMU3000655, THYMU3000776, THYMU3000826, THYMU3000841, THYMU3001082, THYMU3001083, THYMU3001133, THYMU3001151, THYMU3001379, THYMU3001472, THYMU3001593, THYMU3001883, THYMU3001939, THYMU3001991, THYMU3002452, THYMU3002578, THYMU3002661, THYMU3003007, THYMU3003092, THYMU3003212, THYMU3003309, THYMU3003350, THYMU3003403, THYMU3003565, THYMU3003763, THYMU3003865, THYMU3003958, THYMU3003965, THYMU3004157, THYMU3004628, THYMU3004632, THYMU3004835, THYMU3004866, THYMU3005050, THYMU3005378, THYMU3005407, THYMU3005415, THYMU3005427, THYMU3005482, THYMU3005491, THYMU3005629, THYMU3005696, THYMU3006118, THYMU3006132, THYMU3006168, THYMU3006172, THYMU3006371, THYMU3006485, THYMU3006640, THYMU3006767, THYMU3006811, THYMU3006963, THYMU3007137, THYMU3007308, THYMU3007368, THYMU3007423, THYMU3007559, THYMU3007845, THYMU3008060, THYMU3008105, THYMU3008136, THYMU3008171, THYMU3008216, THYMU3008436, THYMU3008672, THYMU3008883, THYMU3008935, THYMU3009006, THYMU3009255, THYMU3009391, THYMU3009643, THYMU3009755, THYMU3010247, THYMU3011012, THYMU3011081, THYMU3011244, THYMU3011360, THYMU3011534, THYMU3011543, THYMU3011556, THYMU3011717, THYMU3011827, THYMU3012402, THYMU3012907, THYMU3012983, THYMU3013114, THYMU3013197, THYMU3013241, THYMU3013470, THYMU3013785, THYMU3013897, THYMU3014038, THYMU3014173, THYMU3014372, THYMU3014555, THYMU3014620, THYMU3014701, THYMU3015042, THYMU3015457, THYMU3015571, THYMU3015592, THYMU3015625, THYMU3015647, THYMU3015962, THYMU3016022, THYMU3016518, THYMU3016797, THYMU3016822, THYMU3016850, THYMU3017562, THYMU3017688, THYMU3017689, THYMU3017761, THYMU3018151, THYMU3018896, THYMU3019095, THYMU3019476, THYMU3019605, THYMU3019916, THYMU3020221, THYMU3020595, THYMU3020713, THYMU3020856, THYMU3020869, THYMU3020970, THYMU3021404, THYMU3021586, THYMU3021755, THYMU3021900, THYMU3022211, THYMU3022434, THYMU3022528, THYMU3022668, THYMU3022982, THYMU3023107, THYMU3023211, THYMU3023216, THYMU3023394, THYMU3023400, THYMU3023797, THYMU3024164, THYMU3024339, THYMU3024602, THYMU3024879, THYMU3025118, THYMU3025313, THYMU3025642, THYMU3025683, THYMU3025772, THYMU3025865, THYMU3026000, THYMU3026350, THYMU3026479, THYMU3026532, THYMU3026783, THYMU3026869, THYMU3027251, THYMU3027540, THYMU3027655, THYMU3027671, THYMU3028075, THYMU3028410, THYMU3028461, THYMU3028702, THYMU3029188, THYMU3029318, THYMU3029421, THYMU3029719, THYMU3029774, THYMU3029832, THYMU3030072, THYMU3030231, THYMU3030706, THYMU3030710, THYMU3030752, THYMU3031146, THYMU3031402, THYMU3031610, THYMU3031612, THYMU3031868, THYMU3031878, THYMU3032032, THYMU3032867, THYMU3033402, THYMU3033630, THYMU3033649, THYMU3033754, THYMU3033759, THYMU3034078, THYMU3034099, THYMU3034453, THYMU3034616, THYMU3034671, THYMU3034853, THYMU3034867, THYMU3034983, THYMU3036200, THYMU3036310, THYMU3036934, THYMU3036953, THYMU3037052, THYMU3037192, THYMU3037617, THYMU3037772, THYMU3037827, THYMU3037836, THYMU3037856, THYMU3037867, THYMU3037909, THYMU3037980, THYMU3038158, THYMU3038167, THYMU3038214, THYMU3038266, THYMU3038328, THYMU3038347, THYMU3038375, THYMU3038603, THYMU3038687, THYMU3038759, THYMU3038879, THYMU3038970, THYMU3039807, THYMU3039846, THYMU3040068, THYMU3040126, THYMU3040146, THYMU3040168, THYMU3040172, THYMU3040725, THYMU3040746, THYMU3040816, THYMU3040829, THYMU3040830, THYMU3040986, THYMU3041354, THYMU3041386, THYMU3041428, THYMU3041573, THYMU3041603, THYMU3041736, THYMU3041918, THYMU3042075, THYMU3042321, THYMU3042372, THYMU3042758, THYMU3042929, THYMU3043200, THYMU3043327, THYMU3043482, THYMU3043597, THYMU3043688, THYMU3043779, THYMU3043883, THYMU3043993, THYMU3044175, THYMU3044188, THYMU3044441, THYMU3044445, THYMU3045510, THYMU3045673, THYMU3045692, THYMU3045704, THYMU3046140, THYMU3046350, THYMU3046360, THYMU3046856, THYMU3047115, THYMU3047144, THYMU3047156, THYMU3047366, THYMU3047513, THYMU3047542, THYMU3047760, THYMU3047891, TKIDN1000001, TKIDN1000044, TKIDN1000062, TKIDN1000066, TKIDN1000164, TKIDN1000171, TKIDN2000127, TKIDN2000240, TKIDN2000246, TKIDN2000319, TKIDN2000464, TKIDN2000521, TKIDN2000701, TKIDN2001529, TKIDN2001662, TKIDN2002318, TKIDN2002329, TKIDN2002424, TKIDN2002632, TKIDN2003044, TKIDN2003059, TKIDN2003062, TKIDN2003078, TKIDN2003366, TKIDN2003396, TKIDN2003413, TKIDN2003597, TKIDN2003601, TKIDN2004185, TKIDN2004386, TKIDN2004458, TKIDN2004748, TKIDN2005721, TKIDN2005934, TKIDN2005947, TKIDN2005956, TKIDN2006525, TKIDN2006761, TKIDN2006852, TKIDN2007605, TKIDN2007667, TKIDN2007828, TKIDN2008176, TKIDN2008778, TKIDN2009092, TKIDN2009330, TKIDN2009481, TKIDN2009794, TKIDN2009889, TKIDN2010200, TKIDN2010232, TKIDN2010278, TKIDN2010602, TKIDN2010812, TKIDN2010934, TKIDN2011051, TKIDN2011160, TKIDN2011324, TKIDN2012034, TKIDN2012771, TKIDN2012824, TKIDN2013134, TKIDN2013287, TKIDN2014570, TKIDN2014757, TKIDN2014771, TKIDN2014964, TKIDN2015025, TKIDN2015071, TKIDN2015161, TKIDN2015263, TKIDN2015285, TKIDN2015788, TKIDN2016309, TKIDN2016399, TKIDN2016846, TKIDN2018926, TKIDN2019116, TLIVE2000023, TLIVE2000142, TLIVE2000292, TLIVE2000762, TLIVE2001327, TLIVE2001616, TLIVE2001684, TLIVE2001828, TLIVE2001927, TLIVE2002336, TLIVE2002338, TLIVE2002562, TLIVE2002690, TLIVE2002882, TLIVE2003197, TLIVE2003200, TLIVE2003225, TLIVE2003381, TLIVE2003737, TLIVE2003961, TLIVE2003970, TLIVE2004110, TLIVE2004320, TLIVE2004331, TLIVE2004601, TLIVE2005180, TLIVE2005390, TLIVE2005516, TLIVE2005731, TLIVE2005866, TLIVE2006236, TLIVE2006359, TLIVE2006529, TLIVE2006621, TLIVE2006733, TLIVE2007000, TLIVE2007016, TLIVE2007132, TLIVE2007192, TLIVE2007528, TLIVE2007607, TLIVE2007736, TLIVE2007816, TLIVE2007919, TLIVE2008083, TLIVE2008213, TLIVE2008221, TLIVE2008229, TLIVE2008712, TLIVE2008797, TLIVE2009087, TLIVE2009163, TLIVE2009489, TLIVE2009541, TLUNG2000179, TOVAR2000476, TOVAR2000575, TOVAR2000649, TOVAR2000904, TOVAR2001281, TOVAR2001556, TOVAR2001730, TOVAR2002247, TOVAR2002514, TOVAR2002549, TOVAR2002800, TRACH1000018, TRACH1000038, TRACH1000057, TRACH1000074, TRACH1000100, TRACH1000106, TRACH1000125, TRACH1000140, TRACH1000144, TRACH1000193, TRACH1000205, TRACH1000212, TRACH1000240, TRACH2000002, TRACH2000015, TRACH2000024, TRACH2000032, TRACH2000045, TRACH2000047, TRACH2000081, TRACH2000083, TRACH2000148, TRACH2000185, TRACH2000196, TRACH2000235, TRACH2000237, TRACH2000243, TRACH2000250, TRACH2000259, TRACH2000272, TRACH2000282, TRACH2000287, TRACH2000289, TRACH2000306, TRACH2000312, TRACH2000336, TRACH2000393, TRACH2000411, TRACH2000420, TRACH2000472, TRACH2000496, TRACH2000497, TRACH2000502, TRACH2000522, TRACH2000540, TRACH2000665, TRACH2000675, TRACH2000677, TRACH2000702, TRACH2000703, TRACH2000767, TRACH2000775, TRACH2000807, TRACH2000862, TRACH2000873, TRACH2000894, TRACH2000898, TRACH2000923, TRACH2000944, TRACH2000981, TRACH2000986, TRACH2001037, TRACH2001060, TRACH2001085, TRACH2001101, TRACH2001121, TRACH2001147, TRACH2001154, TRACH2001188, TRACH2001192, TRACH2001249, TRACH2001275, TRACH2001335, TRACH2001339, TRACH2001341, TRACH2001347, TRACH2001395, TRACH2001400, TRACH2001403, TRACH2001416, TRACH2001474, TRACH2001525, TRACH2001532, TRACH2001549, TRACH2001592, TRACH2001596, TRACH2001607, TRACH2001621, TRACH2001646, TRACH2001651, TRACH2001684, TRACH2001898, TRACH2001933, TRACH2001968, TRACH2001996, TRACH2002043, TRACH2002054, TRACH2002092, TRACH2002138, TRACH2002333, TRACH2002664, TRACH2002784, TRACH2002840, TRACH2002847, TRACH2002853, TRACH2002862, TRACH2002954, TRACH2002960, TRACH2002988, TRACH2003070, TRACH2003323, TRACH2003484, TRACH2003516, TRACH2003605, TRACH2003736, TRACH2003759, TRACH2003941, TRACH2004039, TRACH2004054, TRACH2004087, TRACH2004109, TRACH2004170, TRACH2004183, TRACH2004251, TRACH2004292, TRACH2004336, TRACH2004399, TRACH2004428, TRACH2004458, TRACH2004499, TRACH2004521, TRACH2004570, TRACH2004845, TRACH2004887, TRACH2004950, TRACH2005004, TRACH2005017, TRACH2005066, TRACH2005159, TRACH2005314, TRACH2005444, TRACH2005541, TRACH2005666, TRACH2005698, TRACH2005710, TRACH2005720, TRACH2005769, TRACH2005796, TRACH2005800, TRACH2006015, TRACH2006049, TRACH2006097, TRACH2006194, TRACH2006327, TRACH2006331, TRACH2006378, TRACH2006387, TRACH2006528, TRACH2006670, TRACH2006762, TRACH2006866, TRACH2006870, TRACH2006918, TRACH2007059, TRACH2007324, TRACH2007358, TRACH2007399, TRACH2007483, TRACH2007542, TRACH2007577, TRACH2007674, TRACH2007676, TRACH2007688, TRACH2007733, TRACH2007754, TRACH2007894, TRACH2007969, TRACH2007988, TRACH2008112, TRACH2008113, TRACH2008127, TRACH2008130, TRACH2008278, TRACH2008478, TRACH2008540, TRACH2008583, TRACH2008597, TRACH2008716, TRACH2008820, TRACH2008891, TRACH2008921, TRACH2009006, TRACH2009060, TRACH2009107, TRACH2009123, TRACH2009268, TRACH2009291, TRACH2009310, TRACH2009340, TRACH2009348, TRACH2009358, TRACH2009661, TRACH2009730, TRACH2009743, TRACH2009754, TRACH2009851, TRACH2009862, TRACH2009934, TRACH2010159, TRACH2010218, TRACH2010251, TRACH2010272, TRACH2010317, TRACH2010419, TRACH2010451, TRACH2010505, TRACH2010587, TRACH2010600, TRACH2010634, TRACH2010639, TRACH2010677, TRACH2010698, TRACH2010771, TRACH2010824, TRACH2010883, TRACH2010965, TRACH2010974, TRACH2011057, TRACH2011093, TRACH2011290, TRACH2011293, TRACH2011302, TRACH2011500, TRACH2011574, TRACH2011956, TRACH2012000, TRACH2012138, TRACH2012242, TRACH2012298, TRACH2012370, TRACH2012376, TRACH2012387, TRACH2012497, TRACH2012536, TRACH2012562, TRACH2012742, TRACH2012811, TRACH2012823, TRACH2012918, TRACH2013081, TRACH2013265, TRACH2013369, TRACH2013450, TRACH2013495, TRACH2013585, TRACH2013671, TRACH2013726, TRACH2013902, TRACH2013928, TRACH2013982, TRACH2013991, TRACH2014018, TRACH2014045, TRACH2014046, TRACH2014082, TRACH2014268, TRACH2014284, TRACH2014337, TRACH2014356, TRACH2014371, TRACH2014442, TRACH2014483, TRACH2014495, TRACH2014544, TRACH2014573, TRACH2014725, TRACH2014760, TRACH2014815, TRACH2014839, TRACH2014938, TRACH2014950, TRACH2014972, TRACH2014974, TRACH2014997, TRACH2015180, TRACH2015243, TRACH2015316, TRACH2015381, TRACH2015486, TRACH2015654, TRACH2015824, TRACH2015939, TRACH2015987, TRACH2016080, TRACH2016131, TRACH2016286, TRACH2016317, TRACH2016347, TRACH2016380, TRACH2016384, TRACH2016410, TRACH2016481, TRACH2016498, TRACH2016533, TRACH2016551, TRACH2016554, TRACH2016651, TRACH2016690, TRACH2016709, TRACH2016722, TRACH2016835, TRACH2016980, TRACH2017086, TRACH2017368, TRACH2017498, TRACH2017609, TRACH2017949, TRACH2017965, TRACH2017980, TRACH2018034, TRACH2018084, TRACH2018262, TRACH2018273, TRACH2018278, TRACH2018317, TRACH2018345, TRACH2018380, TRACH2018449, TRACH2018512, TRACH2018646, TRACH2018663, TRACH2018718, TRACH2018835, TRACH2018882, TRACH2018914, TRACH2018950, TRACH2019024, TRACH2019046, TRACH2019080, TRACH2019151, TRACH2019154, TRACH2019176, TRACH2019248, TRACH2019309, TRACH2019425, TRACH2019473, TRACH2019602, TRACH2019661, TRACH2019672, TRACH2019673, TRACH2019844, TRACH2019879, TRACH2020048, TRACH2020336, TRACH2020525, TRACH2021398, TRACH2021622, TRACH2021635, TRACH2021964, TRACH2022042, TRACH2022113, TRACH2022253, TRACH2022425, TRACH2022553, TRACH2022649, TRACH2022839, TRACH2023246, TRACH2023306, TRACH2023416, TRACH2023479, TRACH2023684, TRACH2023860, TRACH2023876, TRACH2024139, TRACH2024187, TRACH2024271, TRACH2024293, TRACH2024408, TRACH2024512, TRACH2024559, TRACH2024647, TRACH2024651, TRACH2024730, TRACH2024735, TRACH2024749, TRACH2024821, TRACH2025057, TRACH2025084, TRACH2025155, TRACH2025224, TRACH2025344, TRACH2025379, TRACH2025507, TRACH2025569, TRACH2025705, TRACH2025749, TRACH2025753, TRACH2025810, TRACH2025853, TRACH2025911, TRACH2025932, TRACH3000014, TRACH3000017, TRACH3000043, TRACH3000134, TRACH3000180, TRACH3000342, TRACH3000420, TRACH3000515, TRACH3000530, TRACH3000548, TRACH3000558, TRACH3000586, TRACH3000692, TRACH3000780, TRACH3000892, TRACH3000926, TRACH3001119, TRACH3001443, TRACH3001550, TRACH3001759, TRACH3002064, TRACH3002107, TRACH3002168, TRACH3002188, TRACH3002245, TRACH3002293, TRACH3002533, TRACH3002561, TRACH3002567, TRACH3002605, TRACH3002650, TRACH3002866, TRACH3002871, TRACH3002876, TRACH3002890, TRACH3003009, TRACH3003037, TRACH3003357, TRACH3003379, TRACH3003547, TRACH3003586, TRACH3003683, TRACH3003780, TRACH3003805, TRACH3003832, TRACH3003872, TRACH3004113, TRACH3004288, TRACH3004303, TRACH3004412, TRACH3004424, TRACH3004456, TRACH3004537, TRACH3004596, TRACH3004651, TRACH3004652, TRACH3004671, TRACH3004721, TRACH3004747, TRACH3004760, TRACH3004783, TRACH3004786, TRACH3004840, TRACH3004931, TRACH3004934, TRACH3005072, TRACH3005085, TRACH3005102, TRACH3005173, TRACH3005191, TRACH3005211, TRACH3005274, TRACH3005294, TRACH3005479, TRACH3005549, TRACH3005699, TRACH3005702, TRACH3005808, TRACH3005852, TRACH3005896, TRACH3006038, TRACH3006149, TRACH3006228, TRACH3006264, TRACH3006336, TRACH3006379, TRACH3006392, TRACH3006395, TRACH3006397, TRACH3006412, TRACH3006470, TRACH3006589, TRACH3006626, TRACH3006699, TRACH3006717, TRACH3006800, TRACH3006889, TRACH3006985, TRACH3007097, TRACH3007268, TRACH3007274, TRACH3007277, TRACH3007391, TRACH3007479, TRACH3007541, TRACH3007595, TRACH3007627, TRACH3007689, TRACH3007766, TRACH3007866, TRACH3007995, TRACH3008042, TRACH3008061, TRACH3008093, TRACH3008201, TRACH3008508, TRACH3008535, TRACH3008629, TRACH3008632, TRACH3008688, TRACH3008697, TRACH3008713, TRACH3008887, TRACH3008902, TRACH3008990, TRACH3009001, TRACH3009008, TRACH3009059, TRACH3009061, TRACH3009148, TRACH3009455, TRACH3009701, TRACH3009715, TRACH3009894, TRACH3009956, TRACH3010079, TRACH3010167, TRACH3010331, TRACH3010342, TRACH3010382, TRACH3010757, TRACH3010901, TRACH3011004, TRACH3011082, TRACH3011184, TRACH3011282, TRACH3011313, TRACH3011454, TRACH3011485, TRACH3011503, TRACH3011538, TRACH3011542, TRACH3012106, TRACH3012161, TRACH3012232, TRACH3012261, TRACH3012445, TRACH3012460, TRACH3012659, TRACH3012718, TRACH3012864, TRACH3012891, TRACH3012942, TRACH3013043, TRACH3013072, TRACH3013426, TRACH3013454, TRACH3013558, TRACH3013684, TRACH3013693, TRACH3013700, TRACH3013766, TRACH3013900, TRACH3013926, TRACH3014063, TRACH3014183, TRACH3014215, TRACH3014316, TRACH3014415, TRACH3014580, TRACH3014641, TRACH3014885, TRACH3015136, TRACH3015336, TRACH3015346, TRACH3015354, TRACH3015467, TRACH3015626, TRACH3015951, TRACH3016051, TRACH3016120, TRACH3016264, TRACH3016277, TRACH3016368, TRACH3016455, TRACH3016614, TRACH3016805, TRACH3016992, TRACH3017171, TRACH3017409, TRACH3017934, TRACH3018108, TRACH3018191, TRACH3018240, TRACH3018261, TRACH3018519, TRACH3018524, TRACH3018606, TRACH3018783, TRACH3018907, TRACH3018933, TRACH3018943, TRACH3019018, TRACH3019058, TRACH3019142, TRACH3019290, TRACH3019347, TRACH3019370, TRACH3019447, TRACH3019598, TRACH3019621, TRACH3019662, TRACH3019807, TRACH3019924, TRACH3019977, TRACH3020137, TRACH3020410, TRACH3020563, TRACH3020605, TRACH3020750, TRACH3020769, TRACH3020928, TRACH3020930, TRACH3021023, TRACH3021066, TRACH3021212, TRACH3021335, TRACH3021373, TRACH3021544, TRACH3021778, TRACH3021834, TRACH3021883, TRACH3022170, TRACH3022198, TRACH3022296, TRACH3022482, TRACH3022732, TRACH3022758, TRACH3022875, TRACH3022910, TRACH3022960, TRACH3023063, TRACH3023203, TRACH3023242, TRACH3023373, TRACH3023516, TRACH3023752, TRACH3023945, TRACH3023960, TRACH3024020, TRACH3024081, TRACH3024342, TRACH3024423, TRACH3024428, TRACH3024512, TRACH3024671, TRACH3024823, TRACH3025302, TRACH3025316, TRACH3025346, TRACH3025520, TRACH3026148, TRACH3026283, TRACH3026299, TRACH3026303, TRACH3026542, TRACH3026650, TRACH3026676, TRACH3026744, TRACH3026949, TRACH3027229, TRACH3027527, TRACH3027681, TRACH3027701, TRACH3027885, TRACH3028031, TRACH3028164, TRACH3028180, TRACH3028195, TRACH3028441, TRACH3028597, TRACH3028678, TRACH3028837, TRACH3028847, TRACH3028855, TRACH3029139, TRACH3029329, TRACH3029451, TRACH3029462, TRACH3029520, TRACH3029592, TRACH3029629, TRACH3029665, TRACH3029670, TRACH3029800, TRACH3030111, TRACH3030130, TRACH3030176, TRACH3030252, TRACH3030725, TRACH3030855, TRACH3030883, TRACH3031316, TRACH3031400, TRACH3031463, TRACH3031479, TRACH3031518, TRACH3031660, TRACH3031678, TRACH3031936, TRACH3032044, TRACH3032065, TRACH3032150, TRACH3032372, TRACH3032480, TRACH3032570, TRACH3032755, TRACH3032827, TRACH3032873, TRACH3033535, TRACH3033680, TRACH3033868, TRACH3034145, TRACH3034414, TRACH3034488, TRACH3034680, TRACH3034731, TRACH3034745, TRACH3034762, TRACH3034903, TRACH3035187, TRACH3035199, TRACH3035235, TRACH3035451, TRACH3035482, TRACH3035526, TRACH3036004, TRACH3036103, TRACH3036193, TRACH3036207, TRACH3036278, TRACH3036309, TRACH3036456, TRACH3036609, TRACH3036638, TRACH3036683, TRACH3036750, TRACH3036792, TRACH3036843, TRACH3036897, TRACH3036932, TRACH3036942, TRACH3036997, TRACH3037063, TRACH3037067, TRACH3037267, TRACH3037288, TRACH3037505, TRACH3037573, TRACH3037696, TRACH3037897, TRACH3038086, TRACH3038399, TSTOM1000135, TSTOM1000186, TSTOM2000139, TSTOM2000235, TSTOM2000315, TSTOM2000442, TSTOM2000553, TSTOM2000569, TSTOM2000588, TSTOM2001195, TSTOM2001274, TSTOM2001571, TSTOM2001996, TSTOM2002265, TSTOM2002505, TSTOM2002561, TSTOM2002611, TSTOM2002672, TSTOM2002682, TUTER1000014, TUTER1000122, TUTER1000137, TUTER2000057, TUTER2000283, TUTER2000425, TUTER2000916, TUTER2001286, TUTER2001341, TUTER2001387, TUTER2001433, TUTER2001461, TUTER2002028, TUTER2002074, TUTER2002158, TUTER2002228, TUTER2002323, TUTER2002356, TUTER2002729, UMVEN1000122, UMVEN1000143, UMVEN1000186, UMVEN2000046, UMVEN2000069, UMVEN2000121, UMVEN2000133, UMVEN2000354, UTERU1000008, UTERU1000015, UTERU1000024, UTERU1000031, UTERU1000032, UTERU1000057, UTERU1000065, UTERU1000077, UTERU1000093, UTERU1000096, UTERU1000109, UTERU1000131, UTERU1000138, UTERU1000148, UTERU1000160, UTERU1000183, UTERU1000187, UTERU1000192, UTERU1000249, UTERU1000337, UTERU1000339, UTERU1000384, UTERU2000023, UTERU2000047, UTERU2000074, UTERU2000099, UTERU2000154, UTERU2000218, UTERU2000238, UTERU2000243, UTERU2000260, UTERU2000263, UTERU2000329, UTERU2000332, UTERU2000338, UTERU2000349, UTERU2000377, UTERU2000393, UTERU2000418, UTERU2000465, UTERU2000485, UTERU2000517, UTERU2000524, UTERU2000537, UTERU2000539, UTERU2000541, UTERU2000546, UTERU2000550, UTERU2000569, UTERU2000607, UTERU2000629, UTERU2000649, UTERU2000663, UTERU2000696, UTERU2000794, UTERU2000830, UTERU2000844, UTERU2000922, UTERU2000925, UTERU2001024, UTERU2001110, UTERU2001176, UTERU2001281, UTERU2001389, UTERU2001409, UTERU2001412, UTERU2001504, UTERU2001658, UTERU2001747, UTERU2001876, UTERU2002001, UTERU2002011, UTERU2002176, UTERU2002198, UTERU2002332, UTERU2002410, UTERU2002473, UTERU2002547, UTERU2002693, UTERU2002733, UTERU2002736, UTERU2002737, UTERU2002826, UTERU2002841, UTERU2002964, UTERU2002993, UTERU2003035, UTERU2003057, UTERU2003126, UTERU2003135, UTERU2003321, UTERU2003399, UTERU2003411, UTERU2003456, UTERU2003577, UTERU2003704, UTERU2003926, UTERU2003973, UTERU2004015, UTERU2004037, UTERU2004039, UTERU2004061, UTERU2004073, UTERU2004163, UTERU2004197, UTERU2004299, UTERU2004520, UTERU2004564, UTERU2004688, UTERU2004698, UTERU2004861, UTERU2005004, UTERU2005050, UTERU2005069, UTERU2005074, UTERU2005179, UTERU2005292, UTERU2005346, UTERU2005354, UTERU2005446, UTERU2005449, UTERU2005450, UTERU2005533, UTERU2005593, UTERU2005601, UTERU2005664, UTERU2005822, UTERU2005903, UTERU2005905, UTERU2006103, UTERU2006115, UTERU2006182, UTERU2006400, UTERU2006412, UTERU2006429, UTERU2006486, UTERU2006524, UTERU2006547, UTERU2006568, UTERU2006593, UTERU2006643, UTERU2006651, UTERU2006705, UTERU2006899, UTERU2007004, UTERU2007075, UTERU2007081, UTERU2007128, UTERU2007267, UTERU2007444, UTERU2007499, UTERU2007639, UTERU2007724, UTERU2007924, UTERU2007942, UTERU2008018, UTERU2008019, UTERU2008027, UTERU2008040, UTERU2008077, UTERU2008130, UTERU2008302, UTERU2008347, UTERU2008426, UTERU2008516, UTERU2008561, UTERU2008653, UTERU2008705, UTERU2008707, UTERU2008747, UTERU2008785, UTERU2008845, UTERU2008901, UTERU2008930, UTERU2008938, UTERU2008939, UTERU2008962, UTERU2009094, UTERU2009120, UTERU2009131, UTERU2009147, UTERU2009206, UTERU2009283, UTERU2009335, UTERU2009414, UTERU2009435, UTERU2009483, UTERU2009538, UTERU2009540, UTERU2009776, UTERU2009904, UTERU2009951, UTERU2010115, UTERU2010124, UTERU2010164, UTERU2010226, UTERU2010231, UTERU2010304, UTERU2010320, UTERU2010431, UTERU2010525, UTERU2010651, UTERU2010724, UTERU2010747, UTERU2011195, UTERU2011199, UTERU2011220, UTERU2011261, UTERU2011287, UTERU2011410, UTERU2011574, UTERU2011621, UTERU2011657, UTERU2011741, UTERU2011806, UTERU2011811, UTERU2011897, UTERU2011962, UTERU2011968, UTERU2012031, UTERU2012101, UTERU2012114, UTERU2012252, UTERU2012333, UTERU2012407, UTERU2012526, UTERU2012581, UTERU2012610, UTERU2012615, UTERU2012688, UTERU2012703, UTERU2012715, UTERU2012741, UTERU2012767, UTERU2012786, UTERU2012856, UTERU2012890, UTERU2012938, UTERU2012976, UTERU2013048, UTERU2013231, UTERU2013262, UTERU2013280, UTERU2013322, UTERU2013483, UTERU2013491, UTERU2013502, UTERU2013926, UTERU2013976, UTERU2014001, UTERU2014024, UTERU2014223, UTERU2014398, UTERU2014601, UTERU2014631, UTERU2014678, UTERU2014728, UTERU2014898, UTERU2014998, UTERU2015062, UTERU2015087, UTERU2015108, UTERU2015190, UTERU2015198, UTERU2015202, UTERU2015405, UTERU2015640, UTERU2015830, UTERU2015880, UTERU2016147, UTERU2016157, UTERU2016426, UTERU2016464, UTERU2016669, UTERU2016757, UTERU2016761, UTERU2016822, UTERU2016896, UTERU2016902, UTERU2016979, UTERU2016981, UTERU2017123, UTERU2017303, UTERU2017421, UTERU2017492, UTERU2017623, UTERU2017632, UTERU2017761, UTERU2017762, UTERU2017810, UTERU2017988, UTERU2018127, UTERU2018180, UTERU2018200, UTERU2018333, UTERU2018364, UTERU2018514, UTERU2018522, UTERU2018523, UTERU2018544, UTERU2018566, UTERU2018609, UTERU2018674, UTERU2018712, UTERU2018784, UTERU2018789, UTERU2018811, UTERU2018867, UTERU2018881, UTERU2018884, UTERU2018955, UTERU2019038, UTERU2019096, UTERU2019163, UTERU2019257, UTERU2019453, UTERU2019491, UTERU2019534, UTERU2019681, UTERU2019706, UTERU2019710, UTERU2019940, UTERU2019959, UTERU2019964, UTERU2020226, UTERU2020242, UTERU2020292, UTERU2020351, UTERU2020491, UTERU2020718, UTERU2021163, UTERU2021380, UTERU2021649, UTERU2021820, UTERU2022020, UTERU2022773, UTERU2022955, UTERU2022981, UTERU2023039, UTERU2023045, UTERU2023262, UTERU2023550, UTERU2023651, UTERU2023687, UTERU2023712, UTERU2023941, UTERU2024002, UTERU2024042, UTERU2024141, UTERU2024481, UTERU2024656, UTERU2024758, UTERU2024820, UTERU2024881, UTERU2024969, UTERU2025025, UTERU2025041, UTERU2025301, UTERU2025366, UTERU2025415, UTERU2025579, UTERU2025645, UTERU2025891, UTERU2026025, UTERU2026090, UTERU2026142, UTERU2026203, UTERU2026775, UTERU2027023, UTERU2027591, UTERU2027616, UTERU2027941, UTERU2028377, UTERU2028734, UTERU2029503, UTERU2029660, UTERU2029742, UTERU2029953, UTERU2030213, UTERU2030270, UTERU2030280, UTERU2031060, UTERU2031084, UTERU2031268, UTERU2031295, UTERU2031521, UTERU2031611, UTERU2031703, UTERU2031834, UTERU2031851, UTERU2032075, UTERU2032220, UTERU2032279, UTERU2032726, UTERU2033172, UTERU2033375, UTERU2033382, UTERU2033420, UTERU2033530, UTERU2033577, UTERU2034053, UTERU2034147, UTERU2034695, UTERU2035114, UTERU2035187, UTERU2035231, UTERU2035306, UTERU2035323, UTERU2035328, UTERU2035331, UTERU2035452, UTERU2035469, UTERU2035503, UTERU2035745, UTERU2035908, UTERU2035926, UTERU2035978, UTERU2036089, UTERU2036347, UTERU2036507, UTERU2036512, UTERU2036530, UTERU2036623, UTERU2036690, UTERU2037224, UTERU2037361, UTERU2037423, UTERU2037577, UTERU2037674, UTERU2037791, UTERU2037843, UTERU2038171, UTERU2038251, UTERU3000226, UTERU3000298, UTERU3000402, UTERU3000645, UTERU3000665, UTERU3000670, UTERU3000727, UTERU3000738, UTERU3000828, UTERU3000844, UTERU3000899, UTERU3000959, UTERU3001029, UTERU3001053, UTERU3001059, UTERU3001158, UTERU3001240, UTERU3001394, UTERU3001542, UTERU3001558, UTERU3001571, UTERU3001585, UTERU3001632, UTERU3001652, UTERU3001766, UTERU3001988, UTERU3002209, UTERU3002218, UTERU3002383, UTERU3002600, UTERU3002620, UTERU3002667, UTERU3002701, UTERU3002731, UTERU3002768, UTERU3002786, UTERU3002993, UTERU3003116, UTERU3003135, UTERU3003178, UTERU3003465, UTERU3003495, UTERU3003523, UTERU3003660, UTERU3003774, UTERU3003776, UTERU3004384, UTERU3004418, UTERU3004477, UTERU3004523, UTERU3004616, UTERU3004635, UTERU3004709, UTERU3004938, UTERU3004992, UTERU3005049, UTERU3005159, UTERU3005205, UTERU3005230, UTERU3005264, UTERU3005422, UTERU3005460, UTERU3005536, UTERU3005585, UTERU3005767, UTERU3005907, UTERU3005970, UTERU3006008, UTERU3006228, UTERU3006308, UTERU3006538, UTERU3006640, UTERU3006687, UTERU3006720, UTERU3006798, UTERU3006884, UTERU3007021, UTERU3007104, UTERU3007108, UTERU3007134, UTERU3007419, UTERU3007640, UTERU3007731, UTERU3007913, UTERU3008280, UTERU3008463, UTERU3008660, UTERU3008671, UTERU3008722, UTERU3008917, UTERU3009259, UTERU3009490, UTERU3009517, UTERU3009690, UTERU3009775, UTERU3009871, UTERU3009979, UTERU3009987, UTERU3010029, UTERU3010409, UTERU3010526, UTERU3010604, UTERU3010892, UTERU3010919, UTERU3011063, UTERU3011092, UTERU3011273, UTERU3011398, UTERU3011558, UTERU3011579, UTERU3011795, UTERU3011837, UTERU3012293, UTERU3012414, UTERU3012476, UTERU3012599, UTERU3012999, UTERU3013167, UTERU3013302, UTERU3013781, UTERU3014274, UTERU3014446, UTERU3014611, UTERU3014647, UTERU3014791, UTERU3014906, UTERU3015086, UTERU3015299, UTERU3015412, UTERU3015500, UTERU3015647, UTERU3015844, UTERU3016070, UTERU3016273, UTERU3016274, UTERU3016308, UTERU3016789, UTERU3017176, UTERU3017441, UTERU3017626, UTERU3017995, UTERU3018154, UTERU3018172, UTERU3018255, UTERU3018616, UTERU3018711, UTERU3019078

[0684] Of the 17,176 genes that include the cDNAs of the present invention, genes whose expression levels were high enough to detect in each of the FEHRT, FEKID, FELIV, FELNG, HCASM, HCHON, and HEART libraries were analyzed for expression frequency. The analysis results are described below. Each is a relative value, =where the expression level over all tissues is taken as 100. The larger this value, the greater the level of expression.

TABLE 31

| Clone Name | FEHRT | FEKID | FELIV | FELNG | HCASM | HCHON | HEART |
|---|---|---|---|---|---|---|---|
| 3NB691000129 | 0 | 0 | 0 | 0 | 0 | 15.976 | 0 |
| 3NB691000173 | 0 | 0 | 0 | 0 | 10.485 | 0 | 0 |
| 3NB692000281 | 0 | 4.762 | 0 | 0 | 1.462 | 0 | 0 |
| 3NB692000912 | 0 | 10.163 | 0 | 0 | 0 | 0 | 0 |
| 3NB692001002 | 0 | 42.320 | 0 | 0 | 0 | 0 | 0 |
| 3NB692001022 | 0 | 0 | 0 | 0 | 0 | 7.873 | 0 |
| 3NB692001334 | 0 | 5.806 | 0 | 0 | 0 | 0 | 0 |
| 3NB692001528 | 0 | 50.886 | 0 | 0 | 0 | 0 | 0 |
| ADRGL2000006 | 0 | 0 | 0 | 0 | 0 | 0 | 6.935 |
| ADRGL2000097 | 0 | 0 | 0 | 0 | 0 | 14.068 | 0 |
| ADRGL2010152 | 0 | 0 | 0 | 0 | 0 | 36.653 | 0 |
| ASTRO1000165 | 0 | 0 | 0 | 0 | 14.716 | 0 | 0 |
| ASTRO2000046 | 0 | 0 | 0 | 0 | 0 | 2.582 | 0 |
| ASTRO2000662 | 0 | 0 | 0 | 0 | 53.551 | 0 | 0 |
| ASTRO2001076 | 0 | 0 | 0 | 0 | 9.437 | 0 | 0 |
| ASTRO2001806 | 0 | 0 | 0 | 0 | 9.499 | 0 | 0 |
| ASTRO2001823 | 0 | 0 | 0 | 0 | 0 | 0 | 9.684 |
| ASTRO2003024 | 0 | 0 | 0 | 0 | 0 | 0 | 6.323 |
| ASTRO2003632 | 0 | 0 | 0 | 0 | 0 | 2.629 | 0 |
| ASTRO2013585 | 0 | 0 | 0 | 0 | 3.237 | 3.085 | 0 |
| ASTRO2014863 | 0 | 0 | 0 | 0 | 0 | 21.377 | 0 |
| ASTRO2015328 | 0 | 0 | 0 | 0 | 0 | 24.081 | 0 |
| ASTRO2016491 | 0 | 0 | 0 | 10.830 | 0 | 0 | 0 |
| BGGI12000054 | 0 | 0 | 0 | 0 | 0 | 2.981 | 0 |
| BGGI12000693 | 0 | 40.832 | 0 | 0 | 0 | 0 | 0 |
| BGGI12000839 | 0 | 15.951 | 0 | 0 | 0 | 0 | 0 |
| BGGI12001097 | 0 | 0 | 0 | 0 | 7.461 | 0 | 7.497 |
| BNGH41000177 | 0 | 0 | 0 | 0 | 0 | 0 | 46.383 |
| BNGH42000360 | 0 | 0 | 50.470 | 0 | 0 | 0 | 5.247 |
| BNGH42001247 | 0 | 0 | 0 | 0 | 0 | 33.288 | 0 |
| BNGH42001576 | 0 | 0 | 0 | 0 | 32.396 | 0 | 0 |
| BNGH42005968 | 0 | 0 | 0 | 0 | 15.250 | 0 | 0 |
| BNGH42007460 | 0 | 0 | 0 | 0 | 0 | 6.376 | 0 |
| BNGH42007709 | 0 | 0 | 0 | 0 | 0 | 1.456 | 0 |
| BRACE1000042 | 0 | 0 | 0 | 0 | 0 | 0 | 30.466 |
| BRACE1000070 | 37.227 | 0 | 0 | 0 | 0 | 0 | 0 |
| BRACE1000115 | 0 | 0 | 0 | 0 | 0 | 0 | 1.249 |
| BRACE1000131 | 0 | 0 | 0 | 0 | 0 | 6.591 | 0 |
| BRACE1000186 | 0 | 0 | 0 | 0 | 0 | 13.681 | 0 |
| BRACE2000078 | 0 | 96.823 | 0 | 0 | 0 | 0 | 0 |
| BRACE2000148 | 0 | 0 | 0 | 76.780 | 0 | 0 | 0 |
| BRACE2000307 | 0 | 25.479 | 0 | 0 | 0 | 0 | 0 |
| BRACE2000332 | 0 | 0 | 0 | 0 | 0 | 0 | 18.109 |
| BRACE2001497 | 0 | 0 | 0 | 0 | 0 | 11.791 | 0 |
| BRACE2001855 | 0 | 0 | 0 | 49.493 | 0 | 0 | 0 |
| BRACE2001859 | 0 | 0 | 0 | 0 | 90.342 | 0 | 0 |
| BRACE2001971 | 0 | 0 | 0 | 0 | 14.892 | 0 | 0 |
| BRACE2002392 | 0 | 0 | 0 | 0 | 11.444 | 0 | 0 |
| BRACE2003172 | 0 | 0 | 0 | 0 | 4.316 | 0 | 0 |
| BRACE2003304 | 0 | 47.291 | 0 | 0 | 0 | 0 | 0 |
| BRACE2003825 | 0 | 0 | 0 | 0 | 90.342 | 0 | 0 |
| BRACE2003827 | 0 | 0 | 0 | 0 | 5.817 | 5.544 | 0 |
| BRACE2005087 | 0 | 0 | 0 | 0 | 0 | 6.564 | 0 |
| BRACE2005363 | 0 | 0 | 0 | 0 | 0 | 89.914 | 0 |
| BRACE2005937 | 0 | 0 | 0 | 0 | 40.104 | 0 | 0 |
| BRACE2006537 | 0 | 0 | 0 | 0 | 7.146 | 0 | 0 |
| BRACE2006900 | 0 | 11.130 | 0 | 0 | 0 | 0 | 0 |
| BRACE2006944 | 0 | 0 | 0 | 0 | 0 | 0 | 77.811 |
| BRACE2007798 | 0 | 0 | 0 | 0 | 0 | 0 | 13.801 |
| BRACE2008653 | 0 | 0 | 0 | 0 | 0 | 0 | 3.518 |
| BRACE2008968 | 0 | 0 | 0 | 12.505 | 3.861 | 0 | 0 |
| BRACE2009037 | 0 | 0 | 0 | 0 | 1.939 | 5.543 | 0 |
| BRACE2010336 | 0 | 0 | 0 | 0 | 90.342 | 0 | 0 |
| BRACE2012528 | 0 | 0 | 0 | 0 | 0 | 0 | 6.328 |
| BRACE2012814 | 0 | 33.171 | 0 | 0 | 10.181 | 0 | 10.230 |
| BRACE2013855 | 0 | 0 | 0 | 0 | 0 | 0 | 53.511 |
| BRACE2017397 | 0 | 0 | 0 | 0 | 0 | 14.924 | 0 |
| BRACE2018337 | 0 | 0 | 0 | 0 | 0 | 0 | 15.890 |
| BRACE2039624 | 0 | 0 | 0 | 0 | 0 | 6.122 | 0 |
| BRACE3004371 | 0 | 0 | 0 | 0 | 0 | 0 | 25.063 |
| BRALZ2009482 | 0 | 0 | 0 | 0 | 0 | 0 | 2.479 |
| BRAMY2000354 | 0 | 29.725 | 0 | 0 | 0 | 0 | 0 |
| BRAMY2000411 | 0 | 0 | 0 | 0 | 41.151 | 0 | 0 |
| BRAMY2007287 | 0 | 0 | 0 | 0 | 0 | 0 | 71.484 |
| BRAMY2012536 | 0 | 0 | 0 | 0 | 0 | 0 | 3.851 |
| BRAMY2016325 | 0 | 0 | 0 | 0 | 0 | 23.841 | 0 |
| BRAMY2020427 | 12.330 | 0 | 0 | 12.734 | 0 | 0 | 0 |
| BRAMY2024827 | 0 | 43.154 | 0 | 0 | 0 | 0 | 0 |
| BRAMY2027739 | 0 | 0 | 0 | 28.942 | 0 | 0 | 0 |
| BRAMY2028740 | 0 | 20.139 | 0 | 0 | 0 | 0 | 0 |
| BRAMY2028796 | 30.954 | 0 | 0 | 0 | 9.869 | 0 | 0 |
| BRAMY2040095 | 0 | 0 | 0 | 0 | 2.270 | 0 | 0 |
| BRAMY2040592 | 0 | 0 | 0 | 0 | 0 | 0 | 23.231 |
| BRAMY3004377 | 0 | 0 | 0 | 0 | 5.507 | 0 | 0 |
| BRAMY3010008 | 0 | 12.590 | 0 | 0 | 0 | 0 | 0 |
| BRAWH1000037 | 0 | 0 | 0 | 0 | 0 | 0 | 12.165 |
| BRAWH1000040 | 0 | 0 | 0 | 0 | 0 | 4.354 | 0 |
| BRAWH2000169 | 0 | 0 | 0 | 0 | 69.985 | 0 | 0 |
| BRAWH2000177 | 0 | 0 | 0 | 0 | 0 | 50.592 | 0 |
| BRAWH2000588 | 0 | 0 | 0 | 0 | 8.330 | 0 | 0 |
| BRAWH2000636 | 0 | 0 | 0 | 11.365 | 0 | 0 | 0 |
| BRAWH2000839 | 0 | 0 | 0 | 8.833 | 0 | 0 | 0 |
| BRAWH2000924 | 5.976 | 0 | 0 | 0 | 1.905 | 0 | 0 |
| BRAWH2001019 | 0 | 0 | 0 | 0 | 0 | 0 | 15.215 |
| BRAWH2001092 | 3.660 | 0 | 0 | 0 | 0 | 1.112 | 1.173 |
| BRAWH2001671 | 0 | 0 | 0 | 0 | 0 | 0 | 25.367 |
| BRAWH2002963 | 0 | 0 | 0 | 0 | 0 | 0 | 79.600 |
| BRAWH2005068 | 0 | 8.701 | 0 | 0 | 0 | 2.545 | 0 |
| BRAWH2008706 | 0 | 0 | 0 | 0 | 19.092 | 0 | 0 |
| BRAWH2009304 | 0 | 0 | 0 | 0 | 0 | 0 | 26.166 |
| BRAWH2009307 | 0 | 0 | 0 | 0 | 0 | 0 | 13.283 |
| BRAWH2012077 | 0 | 0 | 0 | 0 | 0 | 79.280 | 0 |
| BRAWH2014645 | 0 | 0 | 0 | 0 | 7.019 | 0 | 0 |
| BRAWH2017685 | 0 | 10.978 | 0 | 0 | 3.370 | 0 | 0 |
| BRAWH2018526 | 0 | 0 | 0 | 0 | 2.043 | 0 | 2.053 |
| BRAWH3002853 | 0 | 0 | 0 | 0 | 0 | 4.680 | 0 |
| BRAWH3024989 | 0 | 0 | 0 | 0 | 15.730 | 0 | 0 |
| BRCAN1000168 | 0 | 0 | 0 | 0 | 0 | 0 | 9.411 |
| BRCAN2002173 | 0 | 0 | 0 | 42.766 | 0 | 0 | 0 |
| BRCAN2003814 | 90.076 | 0 | 0 | 0 | 0 | 0 | 0 |
| BRCAN2003944 | 0 | 0 | 0 | 0 | 1.870 | 3.564 | 0 |
| BRCAN2026197 | 0 | 0 | 0 | 0 | 10.366 | 0 | 0 |
| BRCAN2028036 | 0 | 0 | 0 | 0 | 16.030 | 0 | 0 |
| BRCOC1000094 | 0 | 0 | 0 | 0 | 6.322 | 0 | 0 |
| BRCOC2003187 | 0 | 34.023 | 0 | 0 | 0 | 0 | 0 |
| BRCOC2018775 | 0 | 0 | 0 | 0 | 0 | 64.108 | 0 |
| BRHIP2000534 | 0 | 0 | 0 | 0 | 2.272 | 2.166 | 0 |
| BRHIP2007305 | 0 | 0 | 0 | 0 | 7.516 | 0 | 0 |
| BRHIP2011491 | 0 | 0 | 0 | 0 | 0 | 0 | 5.514 |
| BRHIP2022326 | 0 | 36.805 | 0 | 0 | 5.648 | 0 | 11.351 |
| BRHIP2023888 | 0 | 0 | 0 | 0 | 2.443 | 2.328 | 0 |
| BRSSN2015493 | 0 | 0 | 0 | 78.612 | 0 | 0 | 0 |
| BRSTN2011961 | 0 | 6.265 | 0 | 0 | 1.923 | 0 | 1.932 |
| BRSTN2012069 | 0.394 | 1.841 | 0 | 2.238 | 0.377 | 0.180 | 1.641 |
| BRSTN2012174 | 0 | 8.750 | 0 | 4.350 | 0 | 0 | 2.699 |
| BRSTN2016470 | 0 | 0 | 0 | 4.707 | 0 | 0 | 1.460 |
| BRSTN2016678 | 0 | 0 | 0 | 0 | 60.919 | 0 | 0 |
| BRSTN2016992 | 0 | 0 | 0 | 0 | 0 | 0 | 6.566 |
| BRTHA2012714 | 0 | 0 | 0 | 0 | 0 | 15.862 | 16.724 |
| BRTHA2027229 | 0 | 19.799 | 0 | 0 | 0 | 0 | 0 |
| CD34C3000252 | 0 | 0 | 0 | 0 | 5.449 | 0 | 0 |
| CTONG1000087 | 0 | 0 | 0 | 0 | 0 | 6.617 | 0 |
| CTONG1000175 | 0 | 0 | 0 | 36.210 | 0 | 0 | 0 |
| CTONG2000452 | 0 | 0 | 0 | 0 | 19.337 | 0 | 0 |
| CTONG2001748 | 0 | 0 | 0 | 0 | 0 | 13.227 | 0 |
| CTONG2002073 | 0 | 0 | 0 | 0 | 0 | 9.268 | 0 |
| CTONG2002520 | 0 | 0 | 0 | 0 | 19.545 | 0 | 0 |
| CTONG2003298 | 0 | 0 | 0 | 0 | 4.818 | 4.592 | 0 |
| CTONG2006004 | 0 | 0 | 0 | 0 | 0 | 0 | 7.042 |
| CTONG2006562 | 0 | 30.286 | 0 | 0 | 0 | 0 | 0 |
| CTONG2006932 | 0 | 0 | 0 | 23.667 | 0 | 0 | 0 |
| CTONG2008506 | 0 | 20.356 | 0 | 0 | 0 | 5.954 | 0 |
| CTONG2010821 | 0 | 0 | 0 | 0 | 0 | 4.522 | 0 |
| CTONG2012452 | 0 | 0 | 0 | 0 | 0 | 0 | 2.376 |
| CTONG2012564 | 0 | 85.462 | 0 | 0 | 0 | 0 | 0 |
| CTONG2012745 | 0 | 0 | 0 | 0 | 36.827 | 0 | 0 |
| CTONG2013907 | 0 | 0 | 0 | 0 | 0 | 13.642 | 0 |
| CTONG2015091 | 0 | 0 | 0 | 0 | 0 | 0 | 5.418 |
| CTONG2016575 | 0 | 0 | 0 | 0 | 3.301 | 0 | 0 |
| CTONG2016824 | 0 | 0 | 0 | 0 | 0 | 26.934 | 0 |
| CTONG2016931 | 0 | 0 | 0 | 0 | 0 | 0 | 20.359 |
| CTONG2017500 | 55.163 | 0 | 0 | 0 | 0 | 0 | 0 |
| CTONG2018900 | 0 | 0 | 0 | 92.030 | 0 | 0 | 0 |
| CTONG2020484 | 0 | 0 | 0 | 0 | 0 | 3.720 | 0 |
| CTONG2028124 | 0 | 0 | 0 | 10.809 | 0 | 0 | 3.353 |
| CTONG2028208 | 0 | 0 | 0 | 0 | 23.511 | 0 | 0 |
| CTONG3000657 | 0 | 0 | 0 | 0 | 0 | 0 | 25.884 |
| CTONG3009028 | 0 | 0 | 0 | 0 | 10.685 | 0 | 0 |
| D3OST3000169 | 10.191 | 0 | 0 | 0 | 0 | 0 | 0 |
| D6OST2000464 | 0 | 0 | 0 | 0 | 7.274 | 0 | 0 |
| D9OST2003397 | 0 | 0 | 0 | 61.464 | 0 | 0 | 0 |
| DFNES2000011 | 0 | 0 | 0 | 0 | 7.261 | 0 | 0 |
| DFNES2002509 | 0 | 0 | 0 | 0 | 0 | 32.128 | 0 |
| DFNES2005540 | 0 | 0 | 0 | 0 | 0 | 19.128 | 20.167 |
| DFNES2005766 | 0 | 0 | 0 | 0 | 0 | 11.601 | 0 |
| DFNES2007332 | 0 | 0 | 0 | 0 | 0 | 0 | 49.518 |
| FCBBF1000027 | 0 | 0 | 0 | 0 | 2.432 | 0 | 4.887 |
| FCBBF1000139 | 0 | 0 | 0 | 0 | 0 | 11.061 | 0 |
| FCBBF1000280 | 0 | 0 | 0 | 0 | 0 | 35.741 | 0 |
| FCBBF1000367 | 0 | 0 | 0 | 0 | 0 | 9.613 | 0 |
| FCBBF1000732 | 0 | 0 | 0 | 0 | 18.591 | 0 | 0 |
| FCBBF2001291 | 0 | 41.153 | 0 | 0 | 12.631 | 0 | 0 |
| FCBBF2001538 | 0 | 0 | 0 | 0 | 5.059 | 0 | 0 |
| FCBBF2005658 | 0 | 0 | 0 | 0 | 51.674 | 0 | 0 |
| FCBBF3001470 | 0 | 0 | 0 | 0 | 0 | 8.589 | 0 |
| FCBBF3001632 | 0 | 33.393 | 0 | 0 | 0 | 0 | 0 |
| FCBBF3003800 | 0 | 0 | 0 | 0 | 2.615 | 2.493 | 2.628 |
| FCBBF3005320 | 0 | 0 | 0 | 0 | 0 | 0 | 18.199 |
| FCBBF3005330 | 14.426 | 14.985 | 0 | 0 | 0 | 0 | 0 |
| FCBBF3007244 | 0 | 0 | 0 | 0 | 0 | 49.116 | 0 |
| FCBBF3009541 | 0 | 0 | 0 | 0 | 0 | 2.608 | 0 |
| FCBBF3016928 | 0 | 0 | 0 | 18.845 | 0 | 0 | 0 |
| FCBBF3019455 | 0 | 0 | 0 | 0 | 54.072 | 0 | 0 |
| FCBBF3019714 | 0 | 0 | 0 | 0 | 0 | 12.961 | 0 |
| FCBBF3022894 | 91.851 | 0 | 0 | 0 | 0 | 0 | 0 |
| FCBBF3023078 | 0 | 0 | 0 | 92.090 | 0 | 0 | 0 |
| FCBBF3023368 | 0 | 0 | 0 | 0 | 16.290 | 15.525 | 0 |
| FCBBF3023667 | 0 | 2.873 | 0 | 0 | 0 | 0.840 | 1.772 |
| FCBBF4000017 | 0 | 0 | 0 | 0 | 0 | 56.201 | 0 |
| FCBBF4000446 | 0 | 0 | 0 | 0 | 4.987 | 0 | 0 |
| FEBRA2000129 | 0 | 0 | 0 | 0 | 17.260 | 0 | 0 |
| FEBRA2000733 | 0 | 0 | 0 | 0 | 2.238 | 1.066 | 2.249 |
| FEBRA2000740 | 0 | 0 | 0 | 0 | 7.509 | 0 | 0 |
| FEBRA2000787 | 0 | 0 | 0 | 42.481 | 0 | 0 | 0 |
| FEBRA2001294 | 0 | 0 | 0 | 0 | 16.045 | 0 | 0 |
| FEBRA2002456 | 0 | 0 | 0 | 0 | 0 | 6.902 | 0 |
| FEBRA2002933 | 0 | 0 | 0 | 0 | 2.457 | 0 | 2.469 |
| FEBRA2003926 | 0 | 0 | 0 | 0 | 4.635 | 0 | 0 |
| FEBRA2004224 | 0 | 0 | 0 | 0 | 0 | 7.326 | 0 |
| FEBRA2005572 | 0 | 0 | 0 | 0 | 0 | 0 | 11.887 |
| FEBRA2005734 | 17.583 | 0 | 0 | 0 | 0 | 0 | 0 |
| FEBRA2007622 | 0 | 0 | 0 | 0 | 0 | 13.056 | 0 |
| FEBRA2007880 | 0 | 0 | 0 | 0 | 0 | 0 | 25.109 |
| FEBRA2008087 | 0 | 0 | 0 | 0 | 2.380 | 0 | 2.392 |
| FEBRA2008287 | 61.381 | 0 | 0 | 0 | 0 | 0 | 0 |
| FEBRA2008583 | 0 | 0 | 0 | 0 | 0 | 0.836 | 0 |
| FEBRA2008755 | 0 | 0 | 0 | 0 | 0 | 10.394 | 0 |
| FEBRA2009419 | 0 | 0 | 0 | 0 | 8.773 | 0 | 0 |
| FEBRA2014417 | 0 | 0 | 0 | 0 | 0 | 3.416 | 0 |
| FEBRA2020566 | 0 | 0 | 0 | 89.613 | 0 | 0 | 0 |
| FEBRA2022055 | 0 | 0 | 0 | 0 | 0 | 0 | 7.100 |
| FEBRA2022504 | 0 | 0 | 0 | 0 | 0 | 31.177 | 0 |
| FEBRA2023399 | 0 | 0 | 0 | 0 | 0 | 55.540 | 0 |
| FEBRA2023927 | 0 | 0 | 0 | 0 | 0 | 0 | 27.172 |
| FEBRA2025427 | 0 | 0 | 0 | 0 | 0 | 15.685 | 0 |
| FEBRA2025838 | 0 | 17.770 | 0 | 0 | 0 | 0 | 0 |
| FEHRT2000325 | 100 | 0 | 0 | 0 | 0 | 0 | 0 |
| FEHRT2000364 | 92.290 | 0 | 0 | 0 | 0 | 0 | 0 |
| FEKID1000018 | 0 | 85.388 | 0 | 0 | 0 | 0 | 0 |
| FELIV1000101 | 0 | 0 | 99.741 | 0 | 0 | 0 | 0 |
| FELIV1000137 | 0 | 0 | 99.433 | 0 | 0 | 0 | 0 |
| FELIV1000153 | 0 | 0 | 52.921 | 0 | 1.095 | 1.044 | 0 |
| FELIV1000164 | 6.055 | 0 | 93.294 | 0 | 0 | 0 | 0 |
| FELNG2000241 | 0 | 0 | 0 | 100 | 0 | 0 | 0 |
| HCASM1000021 | 0 | 0 | 0 | 0 | 100 | 0 | 0 |
| HCASM1000050 | 0 | 0 | 0 | 0 | 100 | 0 | 0 |
| HCASM1000061 | 0 | 0 | 0 | 0 | 100 | 0 | 0 |
| HCASM1000115 | 0 | 0 | 0 | 0 | 6.882 | 0 | 0 |
| HCASM1000130 | 0 | 0 | 0 | 0 | 100 | 0 | 0 |
| HCASM2000016 | 0 | 0 | 0 | 0 | 4.955 | 9.445 | 0 |
| HCASM2000138 | 0 | 0 | 0 | 0 | 28.042 | 0 | 0 |
| HCASM2000156 | 0 | 0 | 0 | 0 | 86.824 | 0 | 0 |
| HCASM2000202 | 0 | 0 | 0 | 0 | 100 | 0 | 0 |
| HCASM2000214 | 0 | 0 | 0 | 0 | 62.795 | 0 | 0 |
| HCASM2000266 | 0 | 0 | 0 | 0 | 100 | 0 | 0 |
| HCASM2000307 | 0 | 0 | 0 | 0 | 100 | 0 | 0 |
| HCASM2000363 | 0 | 0 | 0 | 0 | 9.030 | 0 | 0 |
| HCASM2000534 | 0 | 0 | 0 | 0 | 100 | 0 | 0 |
| HCASM2000536 | 0 | 0 | 0 | 0 | 100 | 0 | 0 |
| HCASM2000560 | 0 | 0 | 0 | 0 | 100 | 0 | 0 |
| HCASM2000871 | 0 | 0 | 0 | 0 | 100 | 0 | 0 |
| HCASM2001285 | 0 | 0 | 0 | 0 | 100 | 0 | 0 |
| HCASM2001810 | 0 | 0 | 0 | 0 | 100 | 0 | 0 |
| HCASM2001866 | 0 | 0 | 0 | 0 | 100 | 0 | 0 |
| HCASM2001890 | 0 | 0 | 0 | 0 | 84.772 | 0 | 0 |
| HCASM2002148 | 0 | 0 | 0 | 0 | 100 | 0 | 0 |
| HCASM2002502 | 0 | 0 | 0 | 0 | 100 | 0 | 0 |
| HCASM2002754 | 0 | 0 | 0 | 0 | 100 | 0 | 0 |
| HCASM2002918 | 0 | 0 | 0 | 0 | 100 | 0 | 0 |
| HCASM2003018 | 0 | 0 | 0 | 0 | 58.599 | 0 | 0 |
| HCASM2003076 | 0 | 0 | 0 | 0 | 37.805 | 36.029 | 0 |
| HCASM2003099 | 0 | 0 | 0 | 0 | 100 | 0 | 0 |
| HCASM2003212 | 0 | 0 | 0 | 0 | 100 | 0 | 0 |
| HCASM2003237 | 0 | 0 | 0 | 0 | 100 | 0 | 0 |
| HCASM2003357 | 0 | 0 | 0 | 0 | 100 | 0 | 0 |
| HCASM2003415 | 0 | 36.285 | 0 | 0 | 11.137 | 0 | 0 |
| HCASM2005388 | 0 | 0 | 0 | 0 | 23.484 | 0 | 0 |
| HCASM2005484 | 0 | 0 | 0 | 0 | 85.688 | 0 | 0 |
| HCASM2006131 | 0 | 0 | 0 | 0 | 100 | 0 | 0 |
| HCASM2006338 | 0 | 0 | 0 | 0 | 100 | 0 | 0 |
| HCASM2006359 | 0 | 0 | 0 | 0 | 100 | 0 | 0 |
| HCASM2006632 | 0 | 0 | 0 | 0 | 100 | 0 | 0 |
| HCASM2007047 | 0 | 0 | 0 | 73.789 | 22.780 | 0 | 0 |
| HCASM2007317 | 0 | 0 | 0 | 0 | 100 | 0 | 0 |
| HCASM2007737 | 0 | 0 | 0 | 0 | 100 | 0 | 0 |
| HCASM2007773 | 0 | 0 | 0 | 0 | 100 | 0 | 0 |
| HCASM2008154 | 0 | 0 | 0 | 0 | 100 | 0 | 0 |
| HCASM2008536 | 0 | 0 | 0 | 0 | 84.772 | 0 | 0 |
| HCASM2009405 | 0 | 0 | 0 | 0 | 100 | 0 | 0 |
| HCASM2009424 | 0 | 0 | 0 | 0 | 100 | 0 | 0 |
| HCASM2009463 | 0 | 0 | 0 | 0 | 100 | 0 | 0 |
| HCASM2009588 | 0 | 0 | 0 | 0 | 6.946 | 0 | 0 |
| HCHON1000015 | 0 | 0 | 0 | 0 | 0 | 9.863 | 10.399 |
| HCHON1000030 | 3.777 | 0 | 0 | 0 | 0 | 1.148 | 2.420 |
| HCHON1000131 | 0 | 0 | 0 | 0 | 0 | 25.961 | 0 |
| HCHON1000142 | 0 | 0 | 0 | 0 | 0 | 84.140 | 0 |
| HCHON1000166 | 0 | 0 | 0 | 0 | 0 | 19.035 | 20.069 |
| HCHON1000176 | 0 | 0 | 0 | 0 | 0 | 100 | 0 |
| HCHON1000191 | 10.058 | 0 | 0 | 0 | 0 | 9.169 | 0 |
| HCHON2000028 | 0 | 0 | 0 | 0 | 0 | 10.039 | 0 |
| HCHON2000038 | 0 | 0 | 0 | 0 | 0 | 100 | 0 |
| HCHON2000056 | 0 | 0 | 0 | 0 | 1.883 | 5.384 | 1.892 |
| HCHON2000062 | 0 | 0 | 0 | 0 | 0 | 26.520 | 0 |
| HCHON2000087 | 0 | 0 | 0 | 0 | 0 | 3.915 | 4.127 |
| HCHON2000100 | 0 | 0 | 0 | 0 | 0 | 100 | 0 |
| HCHON2000156 | 0 | 0 | 0 | 0 | 0 | 100 | 0 |
| HCHON2000160 | 0 | 0 | 0 | 0 | 0 | 6.369 | 0 |
| HCHON2000199 | 0 | 0 | 0 | 0 | 0 | 100 | 0 |
| HCHON2000212 | 0 | 0 | 0 | 0 | 0 | 54.383 | 0 |
| HCHON2000226 | 0 | 8.723 | 0 | 8.672 | 2.677 | 5.103 | 0 |
| HCHON2000244 | 13.698 | 0 | 0 | 0 | 0 | 4.162 | 0 |
| HCHON2000265 | 0 | 0 | 0 | 0 | 0 | 12.802 | 0 |
| HCHON2000271 | 0 | 0 | 0 | 0 | 0 | 100 | 0 |
| HCHON2000295 | 0 | 0 | 0 | 0 | 0 | 2.772 | 0 |
| HCHON2000315 | 0 | 0 | 0 | 0 | 0 | 100 | 0 |
| HCHON2000322 | 0 | 0 | 0 | 0 | 0 | 69.478 | 0 |
| HCHON2000323 | 0 | 0 | 0 | 0 | 12.299 | 11.721 | 0 |
| HCHON2000344 | 0 | 0 | 0 | 0 | 0 | 100 | 0 |
| HCHON2000364 | 0 | 0 | 0 | 0 | 2.952 | 28.131 | 0 |
| HCHON2000373 | 0 | 0 | 0 | 0 | 6.729 | 19.239 | 0 |
| HCHON2000395 | 0 | 0 | 0 | 0 | 0 | 100 | 0 |
| HCHON2000417 | 0 | 0 | 0 | 0 | 0 | 100 | 0 |
| HCHON2000418 | 0 | 0 | 0 | 0 | 0 | 84.140 | 0 |
| HCHON2000473 | 0 | 0 | 0 | 0 | 0 | 37.038 | 0 |
| HCHON2000475 | 0 | 0 | 0 | 0 | 0 | 8.423 | 0 |
| HCHON2000503 | 0 | 0 | 0 | 0 | 0 | 100 | 0 |
| HCHON2000508 | 0 | 0 | 0 | 0 | 2.479 | 4.726 | 0 |
| HCHON2000626 | 0 | 0 | 0 | 0 | 7.805 | 14.876 | 7.842 |
| HCHON2000660 | 0 | 0 | 0 | 0 | 0 | 100 | 0 |
| HCHON2000663 | 0 | 0 | 0 | 0 | 0 | 53.978 | 0 |
| HCHON2000673 | 0 | 0 | 0 | 0 | 0 | 100 | 0 |
| HCHON2000676 | 0 | 0 | 0 | 0 | 19.795 | 18.865 | 0 |
| HCHON2000698 | 0 | 0 | 0 | 0 | 0 | 18.136 | 0 |
| HCHON2000699 | 0 | 0 | 0 | 0 | 0 | 88.356 | 0 |
| HCHON2000705 | 0 | 0 | 0 | 0 | 0 | 63.051 | 0 |
| HCHON2000738 | 0 | 0 | 0 | 0 | 0 | 18.841 | 0 |
| HCHON2000743 | 0 | 0 | 0 | 0 | 0 | 38.633 | 0 |
| HCHON2000751 | 0 | 0 | 0 | 0 | 0 | 22.591 | 23.818 |
| HCHON2000815 | 0 | 0 | 0 | 0 | 0 | 35.342 | 0 |
| HCHON2000817 | 0 | 0 | 0 | 0 | 0 | 100 | 0 |
| HCHON2000818 | 0 | 0 | 0 | 0 | 0 | 100 | 0 |
| HCHON2000819 | 0 | 0 | 0 | 0 | 0 | 46.359 | 0 |
| HCHON2000826 | 0 | 0 | 0 | 0 | 0 | 4.529 | 0 |
| HCHON2000832 | 0 | 0 | 0 | 0 | 0 | 22.386 | 0 |
| HCHON2000851 | 0 | 0 | 0 | 0 | 0 | 100 | 0 |
| HCHON2000898 | 0 | 0 | 0 | 0 | 0 | 64.476 | 0 |
| HCHON2000935 | 0 | 0 | 0 | 0 | 0 | 100 | 0 |
| HCHON2000942 | 0 | 0 | 0 | 0 | 0 | 71.738 | 0 |
| HCHON2000956 | 0 | 0 | 0 | 0 | 0 | 100 | 0 |
| HCHON2000994 | 0 | 0 | 0 | 0 | 0 | 100 | 0 |
| HCHON2001039 | 0 | 0 | 0 | 0 | 7.408 | 7.061 | 0 |
| HCHON2001050 | 0 | 0 | 0 | 0 | 9.623 | 9.171 | 0 |
| HCHON2001084 | 0 | 0 | 0 | 0 | 0 | 72.645 | 0 |
| HCHON2001099 | 0 | 0 | 0 | 0 | 0 | 34.516 | 0 |
| HCHON2001108 | 0 | 0 | 0 | 0 | 0 | 13.511 | 0 |
| HCHON2001110 | 0 | 0 | 0 | 0 | 0 | 52.199 | 0 |
| HCHON2001116 | 0 | 0 | 0 | 0 | 0 | 100 | 0 |
| HCHON2001161 | 0 | 0 | 0 | 0 | 0 | 68.132 | 0 |
| HCHON2001200 | 0 | 0 | 0 | 0 | 0 | 2.737 | 0 |
| HCHON2001214 | 0 | 0 | 0 | 0 | 0 | 100 | 0 |
| HCHON2001217 | 0 | 0 | 0 | 0 | 6.911 | 6.586 | 0 |
| HCHON2001233 | 0 | 0 | 0 | 0 | 0 | 100 | 0 |
| HCHON2001269 | 0 | 0 | 0 | 0 | 0 | 100 | 0 |
| HCHON2001359 | 0 | 0 | 0 | 0 | 0 | 5.387 | 0 |
| HCHON2001407 | 0 | 0 | 0 | 16.983 | 0 | 4.997 | 0 |
| HCHON2001434 | 0 | 0 | 0 | 0 | 0 | 9.666 | 10.191 |
| HCHON2001450 | 0 | 0 | 0 | 0 | 0 | 100 | 0 |
| HCHON2001453 | 0 | 0 | 0 | 0 | 0 | 100 | 0 |
| HCHON2001497 | 0 | 0 | 0 | 0 | 0 | 47.410 | 0 |
| HCHON2001505 | 0 | 0 | 0 | 0 | 0 | 28.434 | 0 |
| HCHON2001519 | 0 | 0 | 0 | 0 | 0 | 90.637 | 0 |
| HCHON2001523 | 0 | 0 | 0 | 0 | 0 | 100 | 0 |
| HCHON2001535 | 0 | 0 | 0 | 0 | 0 | 58.352 | 0 |
| HCHON2001546 | 0 | 0 | 0 | 0 | 0 | 45.846 | 0 |
| HCHON2001548 | 0 | 0 | 0 | 0 | 0 | 72.417 | 0 |
| HCHON2001577 | 0 | 0 | 0 | 0 | 0 | 100 | 0 |
| HCHON2001598 | 0 | 0 | 0 | 0 | 0 | 15.375 | 0 |
| HCHON2001604 | 0 | 0 | 0 | 0 | 0 | 100 | 0 |
| HCHON2001607 | 0 | 0 | 0 | 0 | 0 | 100 | 0 |
| HCHON2001646 | 0 | 0 | 0 | 0 | 0 | 100 | 0 |
| HCHON2001665 | 0 | 0 | 0 | 33.188 | 0 | 9.764 | 0 |
| HCHON2001712 | 0 | 0 | 0 | 0 | 0 | 88.356 | 0 |
| HCHON2001768 | 0 | 0 | 0 | 0 | 0 | 100 | 0 |
| HCHON2001801 | 0 | 0 | 0 | 0 | 0 | 64.108 | 0 |
| HCHON2001853 | 0 | 0 | 0 | 0 | 0 | 35.438 | 0 |
| HCHON2002123 | 0 | 0 | 0 | 0 | 0 | 100 | 0 |
| HCHON2002194 | 0 | 0 | 0 | 0 | 0 | 100 | 0 |
| HCHON2002241 | 0 | 0 | 0 | 0 | 0 | 100 | 0 |
| HCHON2002247 | 0 | 0 | 0 | 0 | 0 | 17.764 | 0 |
| HCHON2002354 | 0 | 0 | 0 | 0 | 0 | 80.389 | 0 |
| HCHON2002496 | 0 | 0 | 0 | 0 | 0 | 49.148 | 0 |
| HCHON2002676 | 0 | 0 | 0 | 0 | 0 | 86.353 | 0 |
| HCHON2002770 | 0 | 0 | 0 | 0 | 0 | 100 | 0 |
| HCHON2002964 | 0 | 0 | 0 | 0 | 0 | 100 | 0 |
| HCHON2002971 | 0 | 0 | 0 | 0 | 0 | 88.356 | 0 |
| HCHON2003131 | 0 | 0 | 0 | 0 | 0 | 100 | 0 |
| HCHON2003134 | 0 | 0 | 0 | 0 | 0 | 100 | 0 |
| HCHON2003327 | 0 | 0 | 0 | 0 | 0 | 100 | 0 |
| HCHON2003513 | 0 | 0 | 0 | 0 | 0 | 100 | 0 |
| HCHON2003532 | 0 | 0 | 0 | 0 | 0 | 100 | 0 |
| HCHON2003642 | 0 | 0 | 0 | 0 | 0 | 78.436 | 0 |
| HCHON2003659 | 0 | 0 | 0 | 0 | 0 | 100 | 0 |
| HCHON2003676 | 0 | 0 | 0 | 0 | 0 | 100 | 0 |
| HCHON2004002 | 0 | 0 | 0 | 0 | 0 | 4.968 | 0 |
| HCHON2004007 | 0 | 0 | 0 | 0 | 0 | 100 | 0 |
| HCHON2004279 | 0 | 0 | 0 | 0 | 0 | 100 | 0 |
| HCHON2004359 | 0 | 0 | 0 | 0 | 0 | 100 | 0 |
| HCHON2004531 | 0 | 0 | 0 | 0 | 0 | 100 | 0 |
| HCHON2004776 | 0 | 0 | 0 | 0 | 0 | 100 | 0 |
| HCHON2004858 | 0 | 0 | 0 | 0 | 0 | 83.589 | 0 |
| HCHON2005048 | 0 | 0 | 0 | 0 | 0 | 100 | 0 |
| HCHON2005118 | 0 | 0 | 0 | 0 | 0 | 100 | 0 |
| HCHON2005166 | 0 | 0 | 0 | 0 | 0 | 77.401 | 0 |
| HCHON2005802 | 0 | 0 | 0 | 0 | 0 | 100 | 0 |
| HCHON2005921 | 0 | 0 | 0 | 0 | 0 | 26.243 | 0 |
| HCHON2005987 | 0 | 0 | 0 | 0 | 0 | 63.091 | 0 |
| HCHON2006250 | 0 | 0 | 0 | 0 | 0 | 9.901 | 0 |
| HCHON2006459 | 0 | 0 | 0 | 0 | 0 | 68.296 | 0 |
| HCHON2006714 | 0 | 0 | 0 | 0 | 0 | 100 | 0 |
| HCHON2006722 | 0 | 0 | 0 | 0 | 0 | 64.108 | 0 |
| HCHON2006770 | 0 | 0 | 0 | 0 | 0 | 17.858 | 0 |
| HCHON2006786 | 0 | 0 | 0 | 0 | 0 | 86.115 | 0 |
| HCHON2006841 | 0 | 0 | 0 | 0 | 0 | 100 | 0 |
| HCHON2006871 | 0 | 0 | 0 | 0 | 0 | 100 | 0 |
| HCHON2007046 | 0 | 0 | 0 | 77.267 | 0 | 22.733 | 0 |
| HCHON2007482 | 0 | 0 | 0 | 0 | 0 | 100 | 0 |
| HCHON2007650 | 0 | 0 | 0 | 0 | 0 | 77.065 | 0 |
| HCHON2007674 | 0 | 0 | 0 | 0 | 0 | 100 | 0 |
| HCHON2007774 | 0 | 0 | 0 | 0 | 0 | 100 | 0 |
| HCHON2007881 | 0 | 0 | 0 | 0 | 0 | 83.589 | 0 |
| HCHON2008112 | 0 | 0 | 0 | 0 | 0 | 86.264 | 0 |
| HCHON2008239 | 0 | 0 | 0 | 0 | 0 | 100 | 0 |
| HCHON2008444 | 0 | 0 | 0 | 0 | 0 | 84.140 | 0 |
| HCHON2008582 | 0 | 0 | 0 | 0 | 0 | 100 | 0 |
| HCHON2008672 | 0 | 0 | 0 | 0 | 0 | 100 | 0 |
| HCHON2008856 | 0 | 0 | 0 | 0 | 0 | 63.091 | 0 |
| HCHON2008871 | 0 | 0 | 0 | 0 | 0 | 100 | 0 |
| HCHON2008989 | 0 | 0 | 0 | 0 | 0 | 100 | 0 |
| HCHON2009191 | 0 | 0 | 0 | 0 | 0 | 100 | 0 |
| HCHON2009384 | 0 | 0 | 0 | 0 | 0 | 100 | 0 |
| HCHON2009749 | 0 | 0 | 0 | 0 | 0 | 100 | 0 |
| HCHON2009766 | 0 | 0 | 0 | 0 | 0 | 100 | 0 |
| HCHON2009795 | 0 | 0 | 0 | 0 | 0 | 100 | 0 |
| HCHON2010074 | 0 | 0 | 0 | 0 | 0 | 100 | 0 |
| HCHON2010543 | 0 | 0 | 0 | 0 | 0 | 56.763 | 0 |
| HEART1000010 | 0 | 0 | 0 | 0 | 0 | 0 | 22.793 |
| HEART1000074 | 0 | 0 | 0 | 32.652 | 0 | 0 | 5.064 |
| HEART1000088 | 0 | 0 | 0 | 0 | 0 | 0 | 49.759 |
| HEART1000099 | 0 | 0 | 0 | 0 | 0 | 0 | 100 |
| HEART1000102 | 0 | 0 | 0 | 0 | 0 | 0 | 100 |
| HEART1000118 | 0 | 0 | 0 | 0 | 0 | 0 | 73.940 |
| HEART1000132 | 0 | 0 | 0 | 0 | 0 | 0 | 58.129 |
| HEART1000139 | 0 | 0 | 0 | 0 | 0 | 0 | 66.452 |
| HEART1000142 | 37.124 | 0 | 0 | 0 | 0 | 0 | 11.893 |
| HEART1000149 | 0 | 0 | 0 | 0 | 0 | 0 | 6.265 |
| HEART1000151 | 0 | 0 | 0 | 0 | 0 | 0 | 100 |
| HEART1000173 | 0 | 0 | 0 | 0 | 0 | 0 | 17.510 |
| HEART1000185 | 32.926 | 0 | 0 | 0 | 0 | 5.002 | 26.371 |
| HEART2000024 | 0 | 0 | 0 | 0 | 0 | 0 | 100 |
| HEART2000035 | 0 | 0 | 0 | 0 | 0 | 0 | 100 |
| HEART2000099 | 0 | 0 | 0 | 0 | 0 | 0 | 100 |
| HEART2000298 | 0 | 0 | 0 | 0 | 0 | 0 | 100 |
| HEART2000306 | 0 | 0 | 0 | 0 | 0 | 0 | 90.384 |
| HEART2000309 | 0 | 0 | 0 | 0 | 0 | 0 | 100 |
| HEART2000411 | 0 | 0 | 0 | 0 | 0 | 0 | 84.451 |
| HEART2000418 | 0 | 0 | 0 | 0 | 0 | 0 | 100 |
| HEART2000444 | 0 | 0 | 0 | 0 | 0 | 0 | 56.184 |
| HEART2000448 | 0 | 0 | 0 | 0 | 0 | 0 | 100 |
| HEART2000492 | 0 | 0 | 0 | 0 | 0 | 0 | 100 |
| HEART2000506 | 0 | 0 | 0 | 0 | 0 | 0 | 70.197 |
| HEART2000520 | 0 | 0 | 0 | 0 | 0 | 0 | 38.479 |
| HEART2000541 | 0 | 0 | 0 | 0 | 0 | 0 | 53.555 |
| HEART2000568 | 0 | 0 | 0 | 0 | 0 | 0 | 100 |
| HEART2000611 | 0 | 0 | 0 | 0 | 0 | 0 | 100 |
| HEART2000959 | 0 | 0 | 0 | 0 | 0 | 0 | 78.578 |
| HEART2001680 | 0 | 0 | 0 | 0 | 0 | 0 | 100 |
| HEART2001756 | 0 | 0 | 0 | 0 | 0 | 0 | 100 |
| HEART2002129 | 0 | 0 | 0 | 0 | 0 | 0 | 100 |
| HEART2002184 | 0 | 0 | 0 | 0 | 0 | 0 | 100 |
| HEART2002220 | 0 | 0 | 0 | 0 | 0 | 0 | 100 |
| HEART2002432 | 0 | 0 | 0 | 0 | 0 | 0 | 100 |
| HEART2002531 | 0 | 0 | 0 | 0 | 0 | 0 | 100 |
| HEART2002598 | 0 | 0 | 0 | 0 | 0 | 0 | 100 |
| HEART2002717 | 0 | 0 | 0 | 0 | 0 | 0 | 100 |
| HEART2003027 | 0 | 0 | 0 | 0 | 0 | 0 | 100 |
| HEART2003168 | 0 | 0 | 0 | 0 | 0 | 0 | 85.747 |
| HEART2003432 | 0 | 0 | 0 | 0 | 0 | 0 | 100 |
| HEART2003440 | 0 | 0 | 0 | 0 | 0 | 0 | 19.529 |
| HEART2003781 | 0 | 0 | 0 | 0 | 0 | 0 | 100 |
| HEART2003836 | 0 | 0 | 0 | 0 | 0 | 0 | 27.450 |
| HEART2003852 | 0 | 0 | 0 | 0 | 0 | 0 | 25.993 |
| HEART2004570 | 0 | 0 | 0 | 0 | 0 | 0 | 100 |
| HEART2004764 | 0 | 0 | 0 | 0 | 0 | 0 | 83.614 |
| HEART2004931 | 0 | 0 | 0 | 0 | 0 | 0 | 45.365 |
| HEART2004940 | 0 | 0 | 0 | 0 | 0 | 0 | 100 |
| HEART2004941 | 0 | 0 | 0 | 0 | 0 | 0 | 63.375 |
| HEART2004980 | 0 | 0 | 0 | 0 | 0 | 0 | 100 |
| HEART2005244 | 0 | 0 | 0 | 0 | 0 | 0 | 100 |
| HEART2005310 | 0 | 0 | 0 | 0 | 0 | 0 | 46.510 |
| HEART2005581 | 0 | 0 | 0 | 0 | 0 | 0 | 100 |
| HEART2005610 | 0 | 0 | 0 | 0 | 0 | 0 | 100 |
| HEART2006131 | 0 | 0 | 0 | 0 | 0 | 0 | 100 |
| HEART2006195 | 0 | 0 | 0 | 0 | 0 | 0 | 63.277 |
| HEART2006310 | 0 | 0 | 0 | 0 | 0 | 0 | 100 |
| HEART2006334 | 0 | 0 | 0 | 0 | 0 | 0 | 100 |
| HEART2006487 | 0 | 0 | 0 | 0 | 0 | 0 | 64.867 |
| HEART2006521 | 0 | 0 | 0 | 0 | 0 | 0 | 15.956 |
| HEART2006557 | 0 | 0 | 0 | 0 | 0 | 0 | 100 |
| HEART2006787 | 0 | 0 | 0 | 0 | 0 | 0 | 100 |
| HEART2006789 | 0 | 0 | 0 | 0 | 0 | 0 | 100 |
| HEART2006909 | 0 | 0 | 0 | 0 | 0 | 0 | 100 |
| HEART2007031 | 0 | 0 | 0 | 0 | 0 | 0 | 75.806 |
| HEART2007231 | 0 | 0 | 0 | 0 | 0 | 0 | 32.316 |
| HEART2007443 | 0 | 0 | 0 | 0 | 0 | 0 | 100 |
| HEART2007696 | 0 | 0 | 0 | 0 | 0 | 0 | 33.229 |
| HEART2007767 | 0 | 0 | 0 | 0 | 0 | 0 | 100 |
| HEART2008108 | 0 | 0 | 0 | 0 | 0 | 0 | 100 |
| HEART2008111 | 0 | 0 | 0 | 0 | 0 | 0 | 100 |
| HEART2008257 | 0 | 0 | 0 | 0 | 0 | 0 | 100 |
| HEART2008509 | 0 | 0 | 0 | 0 | 0 | 0 | 78.725 |
| HEART2008994 | 0 | 0 | 0 | 0 | 0 | 0 | 100 |
| HEART2009000 | 0 | 0 | 0 | 0 | 0 | 0 | 68.952 |
| HEART2009599 | 0 | 0 | 0 | 0 | 0 | 0 | 100 |
| HEART2009680 | 0 | 0 | 0 | 0 | 0 | 0 | 100 |
| HEART2010391 | 0 | 0 | 0 | 0 | 0 | 0 | 100 |
| HEART2010492 | 0 | 0 | 0 | 0 | 0 | 0 | 100 |
| HEART2010495 | 0 | 0 | 0 | 0 | 0 | 0 | 49.759 |
| HHDPC1000083 | 0 | 0 | 0 | 0 | 6.499 | 0 | 0 |
| HHDPC1000114 | 15.131 | 0 | 0 | 0 | 4.824 | 0 | 0 |
| HHDPC1000163 | 0 | 0 | 0 | 0 | 8.349 | 0 | 8.389 |
| HHDPC2000115 | 0 | 0 | 0 | 0 | 0 | 0 | 17.452 |
| HHDPC2003381 | 0 | 75.443 | 0 | 0 | 0 | 0 | 0 |
| HHDPC2003439 | 0 | 0 | 0 | 0 | 0 | 1.609 | 0 |
| HHDPC2003983 | 0 | 12.047 | 0 | 0 | 3.698 | 0 | 0 |
| HHDPC2008297 | 0 | 0 | 0 | 0 | 0 | 47.331 | 0 |
| HLUNG1000055 | 0 | 11.709 | 0 | 11.642 | 0 | 0 | 3.611 |
| HLUNG2000063 | 0 | 0 | 0 | 0 | 0 | 15.606 | 16.454 |
| HLUNG2000501 | 0 | 0 | 0 | 18.449 | 0 | 0 | 5.723 |
| HLUNG2001712 | 0 | 0 | 0 | 0 | 0 | 0 | 21.996 |
| HLUNG2002465 | 0 | 0 | 0 | 26.011 | 0 | 0 | 0 |
| HLUNG2003331 | 0 | 0 | 0 | 0 | 0 | 0 | 55.232 |
| HLUNG2004534 | 0 | 62.747 | 0 | 0 | 0 | 0 | 0 |
| HLUNG2007210 | 0 | 0 | 0 | 0 | 0 | 13.007 | 0 |
| HLUNG2007245 | 0 | 75.147 | 0 | 0 | 0 | 0 | 0 |
| HSYRA1000062 | 0 | 0 | 0 | 9.212 | 2.844 | 5.421 | 0 |
| HSYRA1000119 | 0 | 0 | 0 | 0 | 3.053 | 2.909 | 0 |
| HSYRA2000137 | 0 | 0 | 0 | 0 | 0 | 14.342 | 15.121 |
| HSYRA2000159 | 0 | 0 | 0 | 0 | 0 | 0 | 1.609 |
| HSYRA2000224 | 0 | 38.896 | 0 | 0 | 0 | 0 | 0 |
| HSYRA2000232 | 0 | 0 | 0 | 15.903 | 0 | 0 | 0 |
| HSYRA2000248 | 14.153 | 0 | 0 | 0 | 0 | 8.601 | 0 |
| HSYRA2000255 | 0 | 0 | 0 | 0 | 0 | 25.553 | 0 |
| HSYRA2000332 | 16.242 | 0 | 0 | 16.775 | 0 | 9.871 | 0 |
| HSYRA2000743 | 0 | 0 | 0 | 0 | 0 | 0 | 5.163 |
| HSYRA2000792 | 0 | 0 | 0 | 0 | 0 | 15.324 | 0 |
| HSYRA2001103 | 0 | 0 | 0 | 0 | 5.631 | 0 | 0 |
| HSYRA2001138 | 0 | 5.515 | 0 | 0 | 0 | 0 | 0 |
| HSYRA2001232 | 0 | 0 | 0 | 0 | 0 | 24.478 | 0 |
| HSYRA2001476 | 0 | 0 | 0 | 0 | 6.411 | 12.219 | 0 |
| HSYRA2001567 | 0 | 0 | 0 | 0 | 0 | 28.361 | 0 |
| HSYRA2001574 | 0 | 0 | 0 | 0 | 4.996 | 0 | 0 |
| HSYRA2001615 | 0 | 0 | 0 | 0 | 0 | 13.123 | 0 |
| HSYRA2001621 | 0 | 0 | 0 | 0 | 2.437 | 0 | 0 |
| HSYRA2005628 | 0 | 0 | 0 | 0 | 0 | 42.436 | 0 |
| IMR321000158 | 0 | 0 | 0 | 0 | 5.054 | 0 | 0 |
| IMR322000072 | 0 | 0 | 0 | 0 | 0 | 5.077 | 0 |
| IMR322000178 | 38.729 | 0 | 0 | 39.999 | 0 | 0 | 0 |
| IMR322000223 | 0 | 0 | 0 | 0 | 0 | 4.308 | 4.542 |
| IMR322000374 | 0 | 0 | 0 | 0 | 36.572 | 0 | 0 |
| IMR322000555 | 0 | 0 | 0 | 0 | 0 | 0 | 39.800 |
| IMR322000730 | 2.854 | 0 | 0 | 8.843 | 0 | 0 | 2.743 |
| IMR322000742 | 0 | 0 | 0 | 35.613 | 0 | 0 | 0 |
| IMR322000791 | 0 | 0 | 0 | 0 | 0 | 32.829 | 0 |
| IMR322001317 | 0 | 0 | 0 | 0 | 0 | 0 | 10.536 |
| IMR322001435 | 0 | 0 | 0 | 0 | 0 | 11.889 | 0 |
| IMR322001534 | 0 | 0 | 0 | 0 | 0 | 0 | 55.124 |
| IMR322001600 | 3.353 | 0 | 0 | 0 | 2.138 | 3.057 | 0 |
| IMR322001710 | 0 | 0 | 0 | 0 | 12.877 | 0 | 0 |
| KIDNE1000008 | 0 | 43.681 | 0 | 0 | 0 | 0 | 0 |
| KIDNE1000143 | 0 | 43.153 | 0 | 0 | 0 | 0 | 0 |
| KIDNE2000085 | 0 | 0 | 0 | 0 | 0 | 6.507 | 0 |
| KIDNE2000315 | 0 | 0 | 0 | 0 | 0 | 0 | 45.557 |
| KIDNE2000403 | 0 | 17.871 | 0 | 0 | 0 | 0 | 0 |
| KIDNE2000497 | 0 | 0 | 0 | 0 | 0 | 0 | 20.919 |
| KIDNE2000665 | 0 | 41.875 | 0 | 0 | 0 | 0 | 12.914 |
| KIDNE2000832 | 0 | 67.408 | 0 | 0 | 0 | 0 | 0 |
| KIDNE2000909 | 0 | 0 | 0 | 44.154 | 0 | 0 | 0 |
| KIDNE2001467 | 0 | 0 | 0 | 0 | 3.461 | 3.299 | 0 |
| KIDNE2002839 | 0 | 0 | 0 | 0 | 0 | 0 | 48.974 |
| KIDNE2002872 | 0 | 12.368 | 0 | 0 | 0 | 0 | 0 |
| KIDNE2002883 | 0 | 0 | 0 | 0 | 0 | 0 | 15.131 |
| KIDNE2002980 | 0 | 0 | 0 | 67.783 | 0 | 0 | 0 |
| KIDNE2003507 | 70.503 | 0 | 0 | 0 | 0 | 0 | 0 |
| KIDNE2005676 | 0 | 0 | 0 | 0 | 0 | 8.902 | 0 |
| KIDNE2006062 | 0 | 60.803 | 0 | 0 | 0 | 0 | 0 |
| KIDNE2006248 | 6.474 | 0 | 0 | 0 | 0 | 0 | 0 |
| KIDNE2008048 | 0 | 0 | 0 | 0 | 3.562 | 6.789 | 0 |
| KIDNE2010265 | 0 | 0 | 0 | 0 | 15.686 | 0 | 0 |
| KIDNE2014290 | 0 | 0 | 0 | 0 | 4.655 | 0 | 0 |
| KIDNE2017040 | 0 | 0 | 0 | 0 | 0 | 21.278 | 0 |
| LIVER2005218 | 51.359 | 0 | 0 | 0 | 0 | 0 | 0 |
| LIVER2007783 | 0 | 44.385 | 0 | 0 | 0 | 0 | 0 |
| MAMGL1000032 | 0 | 0 | 0 | 6.931 | 1.070 | 0 | 0 |
| MAMGL1000035 | 0 | 0 | 0 | 0 | 0 | 0 | 1.343 |
| MAMGL1000173 | 0 | 0 | 0 | 0 | 0 | 0 | 1.768 |
| MESAN1000080 | 0 | 30.885 | 0 | 0 | 0 | 9.034 | 0 |
| MESAN1000126 | 0 | 0 | 0 | 0 | 0 | 11.299 | 0 |
| MESAN2000267 | 0 | 0 | 0 | 0 | 2.719 | 0 | 0 |
| MESAN2000572 | 0 | 22.116 | 0 | 0 | 0 | 0 | 0 |
| MESAN2000608 | 0 | 17.010 | 0 | 0 | 0 | 4.976 | 5.246 |
| MESAN2000909 | 0 | 0 | 0 | 0 | 0 | 34.948 | 0 |
| MESAN2002086 | 0 | 0 | 0 | 0 | 8.292 | 10.536 | 0 |
| MESAN2002790 | 0 | 0 | 0 | 0 | 16.238 | 0 | 0 |
| MESAN2003622 | 0 | 0 | 0 | 12.925 | 3.990 | 0 | 0 |
| MESAN2005766 | 0 | 0 | 0 | 0 | 0 | 6.240 | 6.579 |
| MESAN2005958 | 0 | 0 | 0 | 0 | 0 | 17.040 | 0 |
| MESAN2009580 | 0 | 24.023 | 0 | 0 | 0 | 0 | 0 |
| MESAN2012735 | 0 | 0 | 0 | 0 | 0 | 63.051 | 0 |
| MESAN2013908 | 0 | 0 | 0 | 0 | 0 | 43.658 | 0 |
| NB9N41000121 | 0 | 0 | 0 | 0 | 0 | 4.752 | 0 |
| NB9N41000340 | 0 | 0 | 0 | 0 | 9.629 | 0 | 9.675 |
| NB9N42000104 | 0 | 0 | 0 | 0 | 0 | 5.245 | 0 |
| NB9N42000342 | 0 | 0 | 0 | 0 | 14.361 | 0 | 0 |
| NHNPC2000187 | 0 | 0 | 0 | 0 | 0 | 0 | 3.019 |
| NHNPC2000206 | 0 | 0 | 0 | 0 | 0 | 4.345 | 0 |
| NHNPC2001931 | 0 | 0 | 0 | 0 | 0 | 6.040 | 3.184 |
| NT2NE1000059 | 0 | 0 | 0 | 0 | 0 | 34.225 | 0 |
| NT2NE2000056 | 0 | 0 | 0 | 8.449 | 0 | 0 | 0 |
| NT2NE2000174 | 15.892 | 0 | 0 | 0 | 0 | 0 | 0 |
| NT2NE2000260 | 0 | 2.613 | 0 | 2.598 | 0 | 0 | 0 |
| NT2NE2000383 | 0 | 0 | 0 | 0 | 10.089 | 0 | 0 |
| NT2NE2000575 | 5.006 | 0 | 0 | 0 | 3.192 | 1.521 | 1.604 |
| NT2NE2000636 | 0 | 0 | 0 | 0 | 23.974 | 0 | 0 |
| NT2NE2000707 | 0 | 0 | 0 | 0 | 0 | 0 | 4.465 |
| NT2NE2000963 | 9.554 | 4.962 | 0 | 0 | 0 | 1.452 | 0 |
| NT2NE2001000 | 0 | 0 | 0 | 0 | 0 | 0 | 5.741 |
| NT2NE2001655 | 0 | 0 | 0 | 0 | 0 | 0 | 18.680 |
| NT2NE2002620 | 0 | 0 | 0 | 0 | 6.351 | 0 | 0 |
| NT2NE2003569 | 0 | 37.541 | 0 | 0 | 0 | 0 | 0 |
| NT2NE2003921 | 0 | 0 | 0 | 0 | 0 | 0 | 40.699 |
| NT2NE2005688 | 0 | 0 | 0 | 0 | 4.958 | 0 | 0 |
| NT2NE2006458 | 0 | 0 | 0 | 30.400 | 0 | 8.944 | 0 |
| NT2NE2008077 | 0 | 0 | 0 | 0 | 64.689 | 0 | 0 |
| NT2NE2018180 | 0 | 0 | 0 | 0 | 24.965 | 0 | 0 |
| NT2NE2019091 | 0 | 0 | 0 | 0 | 12.569 | 0 | 0 |
| NT2RI1000027 | 0 | 0 | 0 | 21.745 | 0 | 0 | 0 |
| NT2RI1000127 | 0 | 0 | 0 | 39.035 | 0 | 0 | 0 |
| NT2RI2000064 | 0 | 0 | 0 | 0 | 0 | 0 | 3.591 |
| NT2RI2000282 | 0 | 6.847 | 0 | 0 | 0 | 4.006 | 2.112 |
| NT2RI2000284 | 0 | 0 | 0 | 9.804 | 0 | 0 | 3.041 |
| NT2RI2000669 | 0 | 0 | 0 | 0 | 0 | 77.688 | 0 |
| NT2RI2000671 | 0 | 0 | 0 | 0 | 0 | 0 | 7.017 |
| NT2RI2000727 | 0 | 0 | 0 | 0 | 5.153 | 0 | 0 |
| NT2RI2000974 | 0 | 0 | 0 | 0 | 0 | 13.649 | 0 |
| NT2RI2001540 | 0 | 0 | 0 | 2.449 | 1.134 | 0 | 1.139 |
| NT2RI2001657 | 0 | 0 | 0 | 0 | 3.552 | 3.386 | 0 |
| NT2RI2001731 | 39.438 | 0 | 0 | 0 | 0 | 0 | 0 |
| NT2RI2001859 | 0 | 0 | 0 | 0 | 0 | 6.140 | 0 |
| NT2RI2002091 | 0 | 0 | 0 | 0.577 | 2.939 | 5.601 | 1.253 |
| NT2RI2002391 | 0 | 0 | 0 | 34.882 | 0 | 0 | 0 |
| NT2RI2002654 | 0 | 12.708 | 0 | 12.634 | 7.801 | 0 | 3.919 |
| NT2RI2003304 | 5.465 | 5.677 | 0 | 0 | 0 | 1.660 | 0 |
| NT2RI2003338 | 0 | 21.903 | 0 | 0 | 6.723 | 6.407 | 0 |
| NT2RI2003407 | 0 | 0 | 0 | 0 | 8.036 | 7.658 | 0 |
| NT2RI2003420 | 0 | 0 | 0 | 0 | 0 | 0 | 10.273 |
| NT2RI2003481 | 0 | 0 | 0 | 0 | 12.821 | 0 | 0 |
| NT2RI2003695 | 0 | 0 | 0 | 0 | 5.228 | 4.983 | 0 |
| NT2RI2003738 | 0 | 0 | 0 | 0 | 0 | 1.107 | 2.334 |
| NT2RI2003751 | 0 | 29.966 | 0 | 0 | 18.395 | 0 | 9.242 |
| NT2RI2003921 | 0 | 0 | 0 | 10.200 | 0 | 3.001 | 0 |
| NT2RI2003993 | 0 | 0 | 0 | 0 | 0 | 0 | 25.326 |
| NT2RI2004059 | 0 | 0 | 0 | 0 | 0 | 0 | 45.459 |
| NT2RI2004535 | 0 | 0 | 0 | 0 | 12.709 | 0 | 0 |
| NT2RI2005087 | 0 | 0 | 0 | 92.209 | 0 | 0 | 0 |
| NT2RI2005150 | 0 | 0 | 0 | 0 | 4.575 | 0 | 0 |
| NT2RI2005335 | 0 | 0 | 0 | 8.325 | 0 | 0 | 0 |
| NT2RI2005405 | 0 | 0 | 0 | 0 | 3.728 | 3.553 | 0 |
| NT2RI2005723 | 0 | 0 | 0 | 0 | 0 | 0 | 16.739 |
| NT2RI2005851 | 0 | 0 | 0 | 0 | 0 | 23.580 | 0 |
| NT2RI2006412 | 0 | 0 | 0 | 0 | 0 | 0 | 21.874 |
| NT2RI2006825 | 0 | 0 | 0 | 0 | 0 | 17.348 | 0 |
| NT2RI2006856 | 0 | 0 | 0 | 0 | 0 | 0 | 3.125 |
| NT2RI2007054 | 0 | 0 | 0 | 0 | 0 | 0 | 8.661 |
| NT2RI2007133 | 0 | 0 | 0 | 0 | 2.605 | 0 | 2.617 |
| NT2RI2007148 | 0 | 0 | 0 | 0 | 6.270 | 0 | 6.300 |
| NT2RI2007384 | 0 | 0 | 0 | 0 | 0 | 0 | 2.889 |
| NT2RI2007754 | 0 | 0 | 0 | 0 | 0 | 0 | 64.734 |
| NT2RI2007987 | 0 | 0 | 0 | 0 | 0 | 11.393 | 0 |
| NT2RI2008045 | 0 | 0 | 0 | 0 | 5.155 | 4.913 | 0 |
| NT2RI2008141 | 0 | 0 | 0 | 0 | 14.197 | 0 | 0 |
| NT2RI2008171 | 0 | 0 | 0 | 0 | 0 | 0 | 29.622 |
| NT2RI2008396 | 9.179 | 0 | 0 | 0 | 0 | 2.789 | 0 |
| NT2RI2008481 | 0 | 0 | 0 | 0 | 0 | 0 | 4.934 |
| NT2RI2008526 | 0 | 0 | 0 | 0 | 5.090 | 0 | 0 |
| NT2RI2008598 | 0 | 0 | 0 | 0 | 55.694 | 0 | 0 |
| NT2RI2008622 | 0 | 0 | 0 | 0 | 20.953 | 0 | 0 |
| NT2RI2008791 | 0 | 0 | 0 | 0 | 0 | 0 | 7.784 |
| NT2RI2009037 | 0 | 0 | 0 | 0 | 5.597 | 0 | 0 |
| NT2RI2009065 | 0 | 0 | 0 | 10.045 | 3.101 | 0 | 0 |
| NT2RI2009194 | 0 | 0 | 0 | 0 | 6.525 | 0 | 0 |
| NT2RI2009233 | 0 | 0 | 0 | 0 | 14.976 | 0 | 0 |
| NT2RI2009269 | 0 | 0 | 0 | 0 | 0 | 0 | 6.593 |
| NT2RI2009583 | 0 | 4.840 | 0 | 0 | 0 | 0 | 0 |
| NT2RI2022468 | 0 | 0 | 0 | 0 | 44.507 | 0 | 0 |
| NT2RI3007543 | 0 | 0 | 0 | 18.247 | 5.633 | 10.737 | 0 |
| NT2RP6000033 | 0 | 89.975 | 0 | 0 | 0 | 0 | 0 |
| NT2RP6000039 | 0 | 0 | 0 | 38.566 | 0 | 0 | 0 |
| NT2RP6000123 | 0 | 0 | 0 | 8.419 | 0 | 0 | 0 |
| NT2RP7000076 | 0 | 0 | 0 | 0 | 0 | 0 | 4.066 |
| NT2RP7001166 | 0 | 0 | 0 | 0 | 0 | 4.732 | 0 |
| NT2RP7001283 | 0 | 12.176 | 0 | 0 | 3.737 | 3.562 | 0 |
| NT2RP7001591 | 0 | 56.239 | 0 | 0 | 0 | 0 | 0 |
| NT2RP7001962 | 0 | 0 | 0 | 0 | 17.637 | 0 | 0 |
| NT2RP7002028 | 0 | 43.470 | 0 | 0 | 0 | 0 | 0 |
| NT2RP7002379 | 0 | 0 | 0 | 0 | 3.342 | 3.185 | 0 |
| NT2RP7002449 | 0 | 0 | 0 | 0 | 0 | 12.783 | 0 |
| NT2RP7002450 | 0 | 0 | 0 | 0 | 0 | 0 | 17.805 |
| NT2RP7002619 | 0 | 0 | 0 | 0 | 0 | 6.894 | 0 |
| NT2RP7003960 | 0 | 0 | 0 | 0 | 0 | 10.484 | 0 |
| NT2RP7004348 | 0 | 0 | 0 | 0 | 0 | 14.300 | 0 |
| NT2RP7004751 | 0 | 0 | 0 | 0 | 0 | 2.962 | 0 |
| NT2RP7004925 | 0 | 0 | 0 | 0 | 8.383 | 0 | 0 |
| NT2RP7006075 | 0 | 0 | 0 | 0 | 0 | 16.578 | 0 |
| NT2RP7006717 | 0 | 0 | 0 | 0 | 0 | 0 | 4.389 |
| NT2RP7007154 | 0 | 0 | 0 | 0 | 0 | 3.608 | 0 |
| NT2RP7007177 | 0 | 0 | 0 | 0 | 9.042 | 0 | 0 |
| NT2RP7008623 | 89.627 | 0 | 0 | 0 | 0 | 0 | 0 |
| NT2RP7009087 | 0 | 0 | 0 | 0 | 16.129 | 0 | 0 |
| NT2RP7009149 | 0 | 0 | 0 | 0 | 0 | 30.278 | 0 |
| NT2RP7012776 | 0 | 0 | 0 | 0 | 55.802 | 0 | 0 |
| NT2RP7014005 | 0 | 0 | 0 | 0 | 0 | 36.812 | 0 |
| NT2RP8007920 | 0 | 0 | 0 | 0 | 0 | 12.517 | 0 |
| NTONG1000182 | 0 | 0 | 0 | 0 | 0 | 0 | 8.259 |
| NTONG1000257 | 0 | 0 | 0 | 0 | 0 | 6.963 | 0 |
| NTONG2000265 | 0 | 0 | 0 | 0 | 5.660 | 0 | 0 |
| NTONG2000878 | 24.591 | 0 | 0 | 0 | 0 | 7.472 | 0 |
| NTONG2001567 | 0 | 0 | 0 | 6.595 | 2.036 | 0 | 0 |
| NTONG2001762 | 0 | 0 | 0 | 0 | 11.973 | 0 | 0 |
| NTONG2002948 | 0 | 0 | 0 | 0 | 0 | 0 | 44.440 |
| NTONG2003839 | 0 | 0 | 0 | 0 | 17.408 | 0 | 0 |
| NTONG2007658 | 0 | 0 | 0 | 43.039 | 0 | 0 | 0 |
| NTONG2008483 | 0 | 0 | 0 | 0 | 0 | 0 | 5.330 |
| OCBBF1000086 | 0 | 0 | 0 | 0 | 0 | 4.843 | 0 |
| OCBBF1000175 | 0 | 0 | 0 | 0 | 0 | 0 | 48.053 |
| OCBBF2000712 | 0 | 0 | 0 | 0 | 0 | 5.980 | 0 |
| OCBBF2000982 | 0 | 18.864 | 0 | 0 | 0 | 0 | 0 |
| OCBBF2001492 | 0 | 0 | 0 | 0 | 0 | 0 | 4.577 |
| OCBBF2002626 | 0 | 0 | 0 | 0 | 0 | 5.343 | 0 |
| OCBBF2004273 | 0 | 19.389 | 0 | 0 | 5.951 | 0 | 0 |
| OCBBF2007829 | 0 | 0 | 0 | 0 | 0 | 3.474 | 3.663 |
| OCBBF2008144 | 0 | 62.383 | 0 | 0 | 0 | 0 | 0 |
| OCBBF2008483 | 0 | 0 | 0 | 0 | 57.797 | 0 | 0 |
| OCBBF2009424 | 0 | 0 | 0 | 0 | 0 | 45.919 | 0 |
| OCBBF2010830 | 0 | 0 | 0 | 0 | 0 | 11.135 | 0 |
| OCBBF2011021 | 0 | 0 | 0 | 0 | 9.597 | 0 | 0 |
| OCBBF2011536 | 0 | 0 | 0 | 42.905 | 0 | 12.623 | 0 |
| OCBBF2012714 | 0 | 0 | 0 | 0 | 38.538 | 0 | 0 |
| OCBBF2014292 | 0 | 0 | 0 | 0 | 6.876 | 0 | 0 |
| OCBBF2014576 | 0 | 0 | 0 | 78.585 | 0 | 0 | 0 |
| OCBBF2018707 | 0 | 0 | 0 | 0 | 14.932 | 0 | 0 |
| OCBBF2018956 | 35.243 | 0 | 0 | 0 | 0 | 0 | 0 |
| OCBBF2024850 | 0 | 0 | 0 | 0 | 0 | 0 | 14.826 |
| OCBBF2035226 | 0 | 12.708 | 0 | 0 | 0 | 0 | 0 |
| PEBLM2006366 | 0 | 0 | 0 | 0 | 0 | 0 | 18.464 |
| PEBLM2006709 | 0 | 0 | 0 | 0 | 0 | 35.204 | 0 |
| PEBLM2007774 | 0 | 6.515 | 0 | 0 | 0 | 0 | 2.009 |
| PLACE5000080 | 0 | 0 | 0 | 0 | 0 | 78.048 | 0 |
| PLACE5000170 | 0 | 0 | 0 | 0 | 0 | 0 | 23.195 |
| PLACE5000282 | 0 | 0 | 0 | 0 | 0 | 78.048 | 0 |
| PLACE6000325 | 0 | 0 | 0 | 0 | 0 | 51.259 | 0 |
| PLACE6000379 | 3.678 | 0 | 0 | 0 | 1.173 | 4.470 | 0 |
| PLACE6000414 | 0 | 0 | 0 | 0 | 0 | 24.324 | 0 |
| PLACE6001064 | 0 | 0 | 0 | 0 | 0 | 7.260 | 0 |
| PLACE6001281 | 0 | 0 | 0 | 0 | 0 | 0 | 22.967 |
| PLACE6002084 | 0 | 0 | 0 | 0 | 2.452 | 0 | 0 |
| PLACE6003383 | 0 | 0 | 0 | 0 | 0 | 0 | 15.925 |
| PLACE6004312 | 12.559 | 0 | 0 | 0 | 0 | 0 | 4.023 |
| PLACE6004578 | 0 | 26.814 | 0 | 0 | 0 | 0 | 0 |
| PLACE6006042 | 0 | 0 | 0 | 0 | 0 | 34.446 | 0 |
| PLACE6006186 | 0 | 0 | 0 | 0 | 0 | 45.767 | 0 |
| PLACE6007436 | 0 | 0 | 0 | 0 | 0 | 0 | 23.968 |
| PLACE6010484 | 0 | 0 | 0 | 0 | 0 | 9.780 | 0 |
| PLACE6010848 | 0 | 0 | 0 | 0 | 54.330 | 0 | 0 |
| PLACE6011041 | 0 | 58.854 | 0 | 0 | 0 | 0 | 0 |
| PLACE6012028 | 0 | 0 | 0 | 0 | 0 | 0 | 41.878 |
| PLACE6014882 | 0 | 0 | 0 | 0 | 78.861 | 0 | 0 |
| PLACE6015051 | 0 | 0 | 0 | 0 | 0 | 0 | 30.753 |
| PLACE6016383 | 0 | 0 | 0 | 0 | 0 | 0 | 43.129 |
| PLACE6017578 | 0 | 0 | 0 | 0 | 0 | 63.999 | 0 |
| PLACE6017791 | 0 | 0 | 0 | 0 | 0 | 0 | 73.274 |
| PLACE6018487 | 0 | 0 | 0 | 28.705 | 0 | 0 | 0 |
| PLACE6019385 | 0 | 87.742 | 0 | 0 | 0 | 0 | 0 |
| PLACE6020145 | 0 | 0 | 0 | 0 | 0 | 0 | 55.988 |
| PROST1000097 | 0 | 0 | 0 | 12.646 | 0 | 0 | 0 |
| PROST1000199 | 0 | 0 | 0 | 0 | 0 | 4.623 | 4.874 |
| PROST1000343 | 59.153 | 0 | 0 | 0 | 0 | 0 | 0 |
| PROST1000512 | 0 | 46.564 | 0 | 0 | 0 | 0 | 0 |
| PROST1000536 | 0 | 0 | 0 | 0 | 39.920 | 0 | 0 |
| PROST1000564 | 0 | 29.078 | 0 | 0 | 0 | 8.506 | 0 |
| PROST2000138 | 0 | 1.875 | 0 | 0 | 1.151 | 2.742 | 1.156 |
| PROST2001283 | 0 | 0 | 0 | 45.762 | 0 | 0 | 14.195 |
| PROST2002078 | 0 | 0 | 0 | 0 | 0 | 0 | 16.213 |
| PROST2003338 | 0 | 0 | 0 | 0 | 0 | 7.082 | 7.467 |
| PROST2003517 | 0 | 0 | 0 | 0 | 0 | 0 | 17.563 |
| PROST2004095 | 0 | 10.125 | 0 | 0 | 3.108 | 0 | 3.122 |
| PROST2004416 | 0 | 0 | 0 | 0 | 4.515 | 0 | 0 |
| PROST2008489 | 0 | 0 | 0 | 0 | 0 | 0 | 4.321 |
| PROST2010782 | 0 | 0 | 78.029 | 0 | 0 | 0 | 0 |
| PROST2012745 | 0 | 0 | 0 | 0 | 0 | 0 | 25.800 |
| PROST2012780 | 0 | 0 | 0 | 0 | 0 | 0 | 48.531 |
| PROST2013053 | 0 | 64.069 | 0 | 0 | 0 | 0 | 0 |
| PROST2017203 | 27.042 | 0 | 0 | 27.929 | 0 | 0 | 0 |
| PROST2017692 | 0 | 0 | 0 | 0 | 0 | 13.988 | 0 |
| PUAEN2000374 | 0 | 0 | 0 | 0 | 2.125 | 0 | 0 |
| PUAEN2000497 | 53.684 | 0 | 0 | 0 | 0 | 0 | 0 |
| SALGL1000157 | 0 | 0 | 0 | 0 | 0.863 | 0 | 0.868 |
| SKMUS1000064 | 0 | 0 | 0 | 0 | 0 | 0 | 46.964 |
| SKMUS1000084 | 0 | 0 | 0 | 0 | 10.225 | 0 | 0 |
| SKMUS1000138 | 0 | 0 | 0 | 0 | 0 | 0 | 5.766 |
| SKMUS1000186 | 0 | 0 | 0 | 0 | 0 | 2.540 | 0 |
| SKMUS2000198 | 0 | 0 | 0 | 0 | 0 | 0 | 21.074 |
| SKMUS2000361 | 0 | 0 | 0 | 0 | 0 | 0 | 7.134 |
| SKMUS2000380 | 0 | 0 | 0 | 0 | 0 | 13.722 | 14.467 |
| SKMUS2000458 | 0 | 0 | 0 | 0 | 0 | 0 | 12.752 |
| SKMUS2000679 | 13.951 | 0 | 0 | 0 | 0 | 0 | 4.469 |
| SKMUS2000757 | 0 | 0 | 0 | 0 | 32.810 | 0 | 0 |
| SKMUS2000821 | 0 | 0 | 0 | 0 | 0 | 0 | 5.295 |
| SKMUS2000873 | 0 | 0 | 0 | 0 | 0 | 0 | 58.714 |
| SKMUS2000931 | 0 | 0 | 0 | 0 | 0 | 0 | 3.630 |
| SKMUS2001008 | 0 | 0 | 0 | 0 | 0 | 0 | 6.322 |
| SKMUS2001501 | 0 | 0 | 0 | 0 | 0 | 0 | 29.082 |
| SKMUS2001634 | 0 | 28.321 | 0 | 0 | 0 | 8.284 | 0 |
| SKMUS2006394 | 0 | 0 | 0 | 0 | 0 | 0 | 32.130 |
| SKNMC1000137 | 0 | 0 | 0 | 22.798 | 7.038 | 0 | 0 |
| SKNMC1000168 | 0 | 0 | 0 | 18.010 | 0 | 0 | 0 |
| SKNMC2000224 | 0 | 0 | 0 | 0 | 0 | 39.635 | 0 |
| SKNMC2000635 | 0 | 3.880 | 0 | 0 | 7.146 | 6.810 | 0 |
| SKNMC2000649 | 0 | 0 | 0 | 0 | 0 | 11.546 | 0 |
| SKNMC2000698 | 0 | 0 | 0 | 0 | 0 | 13.070 | 0 |
| SKNSH2000716 | 0 | 37.491 | 0 | 0 | 0 | 0 | 0 |
| SKNSH2001931 | 0 | 0 | 0 | 0 | 33.930 | 0 | 0 |
| SKNSH2002768 | 0 | 0 | 0 | 0 | 0 | 0 | 15.796 |
| SKNSH2006234 | 0 | 0 | 0 | 0 | 23.241 | 0 | 0 |
| SMINT1000039 | 0 | 0 | 0 | 0 | 65.296 | 0 | 0 |
| SMINT1000131 | 0 | 0 | 0 | 0 | 6.080 | 5.795 | 0 |
| SMINT1000192 | 0 | 0 | 0 | 64.044 | 0 | 0 | 0 |
| SMINT2000277 | 0 | 0 | 0 | 0 | 0 | 0 | 12.095 |
| SMINT2000396 | 0 | 0 | 0 | 0 | 8.127 | 0 | 0 |
| SMINT2000441 | 0 | 0 | 0 | 0 | 2.997 | 2.856 | 0 |
| SMINT2000468 | 0 | 0 | 0 | 0 | 0 | 14.477 | 0 |
| SMINT2000694 | 0 | 0 | 0 | 0 | 0 | 0 | 7.930 |
| SMINT2001818 | 0 | 0 | 0 | 0 | 0 | 0 | 6.254 |
| SMINT2002689 | 0 | 0 | 0 | 0 | 0 | 0 | 7.842 |
| SMINT2003074 | 0 | 0 | 0 | 0 | 9.101 | 0 | 0 |
| SMINT2003169 | 0 | 0 | 0 | 0 | 3.123 | 0 | 3.138 |
| SMINT2003905 | 0 | 0 | 0 | 0 | 0 | 4.899 | 0 |
| SMINT2004144 | 0 | 9.818 | 0 | 0 | 0 | 0 | 0 |
| SMINT2007433 | 0 | 0 | 0 | 0 | 0 | 0 | 55.688 |
| SMINT2012122 | 0 | 0 | 0 | 0 | 0 | 0 | 23.322 |
| SMINT2012291 | 0 | 0 | 0 | 0 | 0 | 0 | 30.763 |
| SMINT2013031 | 64.629 | 0 | 0 | 0 | 0 | 0 | 0 |
| SMINT2017599 | 85.510 | 0 | 0 | 0 | 0 | 0 | 0 |
| SMINT2018353 | 0 | 0 | 0 | 0 | 0 | 0 | 65.405 |
| SPLEN1000116 | 0 | 0 | 0 | 0 | 0 | 0 | 3.302 |
| SPLEN1000166 | 0 | 0 | 0 | 0 | 0 | 7.153 | 0 |
| SPLEN2000258 | 0 | 0 | 0 | 0 | 29.066 | 0 | 0 |
| SPLEN2000348 | 0 | 0 | 0 | 0 | 0 | 17.701 | 0 |
| SPLEN2000874 | 0 | 0 | 0 | 10.483 | 0 | 0 | 3.252 |
| SPLEN2000882 | 0 | 0 | 0 | 0 | 11.663 | 0 | 0 |
| SPLEN2002477 | 33.838 | 0 | 0 | 0 | 0 | 0 | 0 |
| SPLEN2002744 | 0 | 0 | 0 | 0 | 0 | 0 | 14.879 |
| SPLEN2005806 | 0 | 13.228 | 0 | 0 | 0 | 3.869 | 0 |
| SPLEN2005927 | 0 | 0 | 0 | 0 | 0 | 0 | 28.728 |
| SPLEN2006325 | 0 | 0 | 0 | 0 | 55.314 | 0 | 0 |
| SPLEN2013503 | 0 | 0 | 0 | 53.981 | 0 | 0 | 0 |
| SPLEN2013690 | 0 | 0 | 0 | 0 | 0 | 68.333 | 0 |
| SPLEN2014572 | 0 | 0 | 0 | 0 | 0 | 39.379 | 0 |
| SPLEN2016268 | 0 | 0 | 0 | 9.292 | 0 | 2.734 | 2.882 |
| SPLEN2016421 | 0 | 0 | 0 | 0 | 0 | 13.109 | 13.821 |
| SPLEN2016743 | 0 | 0 | 0 | 0 | 0 | 0 | 38.250 |
| SPLEN2016972 | 0 | 43.864 | 0 | 0 | 0 | 0 | 0 |
| SPLEN2018302 | 0 | 0 | 0 | 0 | 40.372 | 0 | 0 |
| SPLEN2019405 | 0 | 30.978 | 0 | 0 | 0 | 0 | 0 |
| SPLEN2029912 | 0 | 0 | 0 | 0 | 10.846 | 0 | 0 |
| SPLEN2032157 | 0 | 0 | 0 | 0 | 37.939 | 0 | 0 |
| STOMA1000189 | 0 | 0 | 0 | 33.633 | 0 | 0 | 0 |
| STOMA2000121 | 0 | 26.360 | 0 | 0 | 0 | 0 | 0 |
| STOMA2000395 | 0 | 0 | 0 | 0 | 14.173 | 0 | 0 |
| STOMA2000396 | 0 | 0 | 0 | 0 | 0 | 0 | 34.381 |
| STOMA2002166 | 12.183 | 0 | 0 | 0 | 3.884 | 0 | 0 |
| STOMA2006229 | 0 | 0 | 0 | 0 | 0 | 0 | 40.108 |
| SYNOV1000045 | 0 | 0 | 0 | 0 | 0 | 0 | 46.864 |
| SYNOV1000124 | 0 | 0 | 0 | 0 | 7.386 | 0 | 0 |
| SYNOV2001033 | 0 | 0 | 0 | 0 | 3.981 | 0 | 0 |
| SYNOV2009172 | 0 | 0 | 0 | 0 | 0 | 3.293 | 3.472 |
| T1ESE2000609 | 0 | 0 | 0 | 0 | 0 | 0 | 15.163 |
| TESOP2002451 | 0 | 51.382 | 0 | 0 | 0 | 0 | 0 |
| TESTI1000023 | 0 | 0 | 0 | 0 | 0 | 5.307 | 0 |
| TESTI2001099 | 0 | 0 | 0 | 0 | 3.253 | 3.101 | 0 |
| TESTI2001153 | 0 | 0 | 0 | 0 | 0 | 2.520 | 42.503 |
| TESTI2001269 | 0 | 0 | 0 | 0 | 0 | 3.454 | 0 |
| TESTI2001829 | 0 | 0 | 0 | 0 | 0 | 5.373 | 0 |
| TESTI2003325 | 0 | 0 | 0 | 0 | 0 | 0 | 28.233 |
| TESTI2003413 | 0 | 0 | 0 | 0 | 0 | 16.475 | 0 |
| TESTI2003533 | 0 | 18.755 | 0 | 0 | 0 | 0 | 0 |
| TESTI2003579 | 0 | 0 | 0 | 0 | 0 | 0 | 77.283 |
| TESTI2005759 | 0 | 20.230 | 0 | 0 | 0 | 0 | 0 |
| TESTI2005908 | 32.790 | 0 | 0 | 0 | 0 | 0 | 0 |
| TESTI2006051 | 0 | 0 | 0 | 9.107 | 0 | 0 | 0 |
| TESTI2006588 | 0 | 0 | 0 | 0 | 0 | 3.426 | 3.612 |
| TESTI2006748 | 0 | 0 | 0 | 0 | 0 | 21.767 | 0 |
| TESTI2007211 | 0 | 0 | 0 | 0 | 0 | 0 | 22.035 |
| TESTI2007464 | 0 | 0 | 0 | 0 | 0 | 25.379 | 26.758 |
| TESTI2008240 | 5.207 | 0 | 0 | 0 | 0 | 6.329 | 0 |
| TESTI2010513 | 0 | 0 | 0 | 0 | 0 | 2.486 | 0 |
| TESTI2011286 | 0 | 0 | 0 | 0 | 0 | 82.877 | 0 |
| TESTI2012511 | 0 | 92.868 | 0 | 0 | 0 | 0 | 0 |
| TESTI2012778 | 0 | 3.997 | 0 | 0 | 1.227 | 0 | 0 |
| TESTI2015213 | 0 | 0 | 0 | 0 | 0 | 3.247 | 0 |
| TESTI2017954 | 0 | 0 | 0 | 0 | 0 | 4.192 | 0 |
| TESTI2018997 | 0 | 0 | 0 | 0 | 0 | 13.178 | 0 |
| TESTI2021297 | 0 | 0 | 0 | 0 | 0 | 43.439 | 0 |
| TESTI2021425 | 0 | 0 | 0 | 37.027 | 0 | 0 | 0 |
| TESTI2024844 | 0 | 0 | 0 | 0 | 0 | 7.249 | 7.643 |
| TESTI2025422 | 0 | 0 | 0 | 0 | 0 | 0 | 16.559 |
| TESTI2028296 | 0 | 0 | 0 | 0 | 0 | 0 | 16.451 |
| TESTI2034940 | 0 | 5.635 | 0 | 5.603 | 0 | 0 | 5.214 |
| TESTI4000014 | 0 | 0 | 0 | 0 | 1.186 | 0 | 0 |
| TESTI4002799 | 0 | 9.553 | 0 | 0 | 0 | 0 | 0 |
| TESTI4010851 | 0 | 0 | 0 | 0 | 3.630 | 0 | 0 |
| TESTI4013441 | 0 | 3.393 | 0 | 0 | 2.083 | 2.977 | 1.046 |
| THYMU1000002 | 0 | 12.804 | 0 | 0 | 0 | 0 | 0 |
| THYMU1000109 | 0 | 0 | 0 | 16.927 | 0 | 0 | 0 |
| THYMU1000329 | 0 | 0 | 0 | 0 | 0 | 33.723 | 0 |
| THYMU2000382 | 0 | 0 | 0 | 13.036 | 0 | 0 | 0 |
| THYMU2000436 | 0 | 19.931 | 0 | 0 | 0 | 0 | 0 |
| THYMU2002756 | 0 | 0 | 0 | 0 | 48.606 | 0 | 0 |
| THYMU2003046 | 0 | 0 | 0 | 0 | 0 | 12.164 | 0 |
| THYMU2003133 | 0 | 0 | 0 | 0 | 23.036 | 0 | 0 |
| THYMU2004284 | 0 | 0 | 0 | 0 | 0 | 0 | 89.631 |
| THYMU2005003 | 0 | 0 | 0 | 0 | 0 | 88.356 | 0 |
| THYMU2005482 | 0 | 0 | 0 | 0 | 81.696 | 0 | 0 |
| THYMU2005980 | 0 | 0 | 0 | 0 | 0 | 0 | 54.098 |
| THYMU2008321 | 0 | 0 | 0 | 0 | 0 | 0 | 19.286 |
| THYMU2012625 | 0 | 22.471 | 0 | 0 | 0 | 0 | 0 |
| THYMU2027125 | 0 | 0 | 0 | 0 | 0 | 0 | 3.582 |
| THYMU2032155 | 0 | 0 | 0 | 0 | 0 | 45.186 | 0 |
| THYMU3033626 | 0 | 0 | 0 | 0 | 37.318 | 0 | 0 |
| THYMU3044188 | 0 | 0 | 0 | 96.268 | 0 | 0 | 0 |
| TKIDN2004185 | 0 | 0 | 0 | 85.316 | 0 | 0 | 0 |
| TKIDN2004748 | 0 | 0 | 0 | 0 | 64.204 | 0 | 0 |
| TKIDN2005487 | 0 | 0 | 0 | 0 | 4.770 | 0 | 0 |
| TKIDN2015788 | 54.776 | 0 | 0 | 0 | 0 | 0 | 0 |
| TRACH2000047 | 0 | 0 | 0 | 0 | 0 | 0 | 35.730 |
| TRACH2000079 | 0 | 0 | 0 | 0 | 3.597 | 0 | 0 |
| TRACH2000248 | 0 | 0 | 0 | 0 | 0 | 0 | 4.654 |
| TRACH2000321 | 0 | 0 | 0 | 0 | 3.262 | 0 | 0 |
| TRACH2000540 | 0 | 0 | 0 | 30.640 | 0 | 0 | 0 |
| TRACH2001021 | 0 | 0 | 0 | 0 | 0 | 0 | 2.793 |
| TRACH2001289 | 0 | 7.352 | 0 | 0 | 2.257 | 0 | 0 |
| TRACH2001607 | 0 | 0 | 0 | 0 | 0 | 0 | 6.700 |
| TRACH2005710 | 0 | 0 | 0 | 0 | 0 | 84.960 | 0 |
| TRACH2005811 | 0 | 0 | 0 | 0 | 0 | 6.673 | 0 |
| TRACH2007399 | 0 | 0 | 0 | 0 | 3.127 | 2.981 | 0 |
| TRACH2011113 | 0 | 0 | 0 | 0 | 0 | 29.874 | 0 |
| TRACH2014124 | 0 | 0 | 0 | 0 | 0 | 0 | 6.886 |
| TRACH2015824 | 0 | 0 | 0 | 49.981 | 0 | 0 | 0 |
| TRACH3002192 | 12.987 | 0 | 0 | 0 | 0 | 3.946 | 0 |
| TRACH3005294 | 77.338 | 0 | 0 | 0 | 0 | 0 | 0 |
| TRACH3007479 | 0 | 0 | 0 | 0 | 0 | 0 | 7.175 |
| UMVEN1000186 | 0 | 0 | 0 | 0 | 1.754 | 1.672 | 0 |
| UMVEN2000133 | 0 | 0 | 0 | 0 | 0 | 0 | 3.910 |
| UTERU1000182 | 0 | 0 | 0 | 0 | 0 | 0 | 5.412 |
| UTERU2000095 | 0 | 0 | 0 | 0 | 0 | 0 | 2.761 |
| UTERU2000263 | 0 | 0 | 0 | 0 | 0 | 3.242 | 0 |
| UTERU2000424 | 0 | 0 | 0 | 0 | 0 | 0 | 5.666 |
| UTERU2000485 | 0 | 0 | 0 | 0 | 84.772 | 0 | 0 |
| UTERU2001607 | 0 | 0 | 0 | 0 | 9.794 | 0 | 0 |
| UTERU2002294 | 0 | 0 | 0 | 0 | 0 | 11.486 | 0 |
| UTERU2004037 | 0 | 0 | 0 | 0 | 0 | 13.874 | 0 |
| UTERU2005292 | 0 | 0 | 0 | 66.969 | 0 | 0 | 0 |
| UTERU2006400 | 0 | 0 | 0 | 0 | 84.772 | 0 | 0 |
| UTERU2007924 | 0 | 57.855 | 0 | 0 | 0 | 0 | 0 |
| UTERU2008085 | 0 | 0 | 0 | 0 | 1.199 | 0 | 8.435 |
| UTERU2008938 | 0 | 0 | 0 | 0 | 0 | 0 | 16.418 |
| UTERU2009335 | 0 | 0 | 0 | 0 | 0 | 0 | 20.234 |
| UTERU2010417 | 0 | 0 | 0 | 0 | 0 | 1.995 | 0 |
| UTERU2012230 | 0 | 0 | 0 | 0 | 0 | 0 | 11.740 |
| UTERU2014898 | 0 | 32.915 | 0 | 0 | 0 | 0 | 0 |
| UTERU2015653 | 0 | 12.620 | 0 | 0 | 0 | 0 | 0 |
| UTERU2023045 | 0 | 0 | 0 | 0 | 0 | 57.268 | 0 |
| UTERU2023175 | 0 | 0 | 0 | 32.020 | 0 | 0 | 0 |

[0685] Genes whose expression levels were negligibly low in each of the above-described libraries are shown with their clone names below.

[0686] 3NB691000018, 3NB691000085, 3NB691000113, 3NB691000116, 3NB691000191, 3NB692000012, 3NB692000029, 3NB692000102, 3NB692000154, 3NB692000276, 3NB692000305, 3NB692000330, 3NB692000374, 3NB692000429, 3NB692000484, 3NB692000529, 3NB692000545, 3NB692000973, 3NB692001034, 3NB692001040, 3NB692001123, 3NB692001267, 3NB692001288, 3NB692001339, 3NB692001349, 3NB692001366, 3NB692001408, 3NB692001433, 3NB692001442, 3NB692001459, 3NB692001471, 3NB692001496, 3NB692001501, 3NB692001507, 3NB692001511, 3NB692001519, 3NB692001520, 3NB692001538, 3NB692001548, 3NB692001557, 3NB692001637, 3NB692001719, 3NB692001853, 3NB692001861, 3NB692002051, 3NB692002365, 3NB692002685, 3NB692002806, 3NB692003538, 3NB692004045, 3NB692004724, 3NB692005439, 3NB692006952, 3NB692008178, 3NB692008729, ACTVT2000380, ADIPS1000064, ADIPS2000069, ADIPS2000088, ADIPS2000245, ADIPS2000425, ADRGL1000002, ADRGL1000018, ADRGL1000033, ADRGL1000038, ADRGL1000065, ADRGL1000067, ADRGL1000111, ADRGL1000144, ADRGL1000147, ADRGL1000160, ADRGL1000165, ADRGL1000182, ADRGL2000042, ADRGL2000056, ADRGL2000064, ADRGL2000074, ADRGL2000085, ADRGL2000117, ADRGL2000142, ADRGL2000172, ADRGL2000248, ADRGL2000261, ADRGL2000323, ADRGL2000328, ADRGL2000353, ADRGL2000384, ADRGL2000428, ADRGL2000636, ADRGL2000644, ADRGL2000968, ADRGL2001119, ADRGL2001229, ADRGL2001287, ADRGL2001301, ADRGL2001354, ADRGL2001554, ADRGL2001651, ADRGL2001756, ADRGL2001830, ADRGL2001836, ADRGL2001854, ADRGL2002013, ADRGL2002029, ADRGL2002191, ADRGL2002260, ADRGL2002392, ADRGL2002477, ADRGL2002679, ADRGL2002753, ADRGL2002857, ADRGL2003017, ADRGL2003329, ADRGL2003552, ADRGL2003585, ADRGL2003638, ADRGL2003684, ADRGL2003773, ADRGL2003785, ADRGL2004031, ADRGL2004077, ADRGL2004451, ADRGL2004459, ADRGL2004676, ADRGL2004708, ADRGL2004724, ADRGL2004749, ADRGL2004770, ADRGL2004777, ADRGL2004833, ADRGL2005336, ADRGL2005564, ADRGL2005756, ADRGL2005838, ADRGL2005926, ADRGL2005961, ADRGL2006034, ADRGL2006124, ADRGL2006177, ADRGL2006193, ADRGL2006377, ADRGL2006677, ADRGL2006732, ADRGL2006767, ADRGL2006817, ADRGL2006846, ADRGL2006886, ADRGL2007080, ADRGL2007125, ADRGL2007283, ADRGL2007313, ADRGL2007357, ADRGL2007636, ADRGL2007651, ADRGL2007810, ADRGL2007877, ADRGL2007906, ADRGL2007974, ADRGL2008023, ADRGL2008331, ADRGL2008337, ADRGL2008535, ADRGL2008966, ADRGL2009146, ADRGL2009273, ADRGL2009324, ADRGL2009489, ADRGL2009533, ADRGL2009691, ADRGL2009755, ADRGL2010315, ADRGL2010594, ADRGL2010860, ADRGL2010974, ADRGL2011190, ADRGL2011330, ADRGL2012038, ADRGL2012179, AHMSC1000138, ASTRO1000009, ASTRO1000018, ASTRO1000029, ASTRO1000096, ASTRO2000011, ASTRO2000014, ASTRO2000095, ASTRO2000141, ASTRO2000191, ASTRO2000278, ASTRO2000372, ASTRO2000381, ASTRO2000403, ASTRO2000417, ASTRO2000480, ASTRO2000482, ASTRO2000533, ASTRO2000653, ASTRO2000725, ASTRO2000801, ASTRO2000914, ASTRO2001001, ASTRO2001008, ASTRO2001029, ASTRO2001088, ASTRO2001107, ASTRO2001122, ASTRO2001227, ASTRO2001249, ASTRO2001480, ASTRO2002024, ASTRO2002035, ASTRO2002064, ASTRO2002202, ASTRO2002459, ASTRO2002571, ASTRO2002632, ASTRO2002659, ASTRO2002693, ASTRO2002720, ASTRO2002733, ASTRO2002743, ASTRO2002842, ASTRO2003212, ASTRO2003316, ASTRO2003461, ASTRO2003574, ASTRO2003581, ASTRO2003740, ASTRO2003840, ASTRO2003925, ASTRO2003960, ASTRO2004032, ASTRO2004051, ASTRO2004177, ASTRO2004217, ASTRO2004297, ASTRO2004584, ASTRO2004628, ASTRO2004751, ASTRO2004877, ASTRO2004974, ASTRO2005008, ASTRO2005081, ASTRO2005096, ASTRO2005242, ASTRO2005273, ASTRO2005343, ASTRO2005360, ASTRO2005413, ASTRO2005423, ASTRO2005553, ASTRO2005557, ASTRO2005575, ASTRO2005593, ASTRO2005687, ASTRO2005726, ASTRO2005863, ASTRO2005896, ASTRO2005902, ASTRO2006356, ASTRO2006475, ASTRO2006732, ASTRO2006747, ASTRO2006920, ASTRO2006952, ASTRO2007047, ASTRO2007221, ASTRO2007377, ASTRO2007515, ASTRO2007578, ASTRO2007643, ASTRO2007666, ASTRO2007948, ASTRO2007956, ASTRO2007962, ASTRO2008040, ASTRO2008216, ASTRO2008239, ASTRO2008409, ASTRO2008425, ASTRO2008508, ASTRO2008777, ASTRO2008895, ASTRO2008960, ASTRO2008972, ASTRO2009068, ASTRO2009118, ASTRO2009177, ASTRO2009333, ASTRO2009458, ASTRO2009526, ASTRO2009879, ASTRO2010072, ASTRO2010582, ASTRO2010615, ASTRO2010799, ASTRO2010819, ASTRO2010962, ASTRO2010996, ASTRO2011149, ASTRO2011422, ASTRO2011426, ASTRO2011437, ASTRO2011461, ASTRO2011834, ASTRO2011893, ASTRO2012552, ASTRO2013124, ASTRO2013671, ASTRO2013802, ASTRO2014135, ASTRO2014174, ASTRO2014211, ASTRO2014363, ASTRO2014392, ASTRO2014498, ASTRO2014561, ASTRO2014576, ASTRO2014923, ASTRO2014961, ASTRO2015162, ASTRO2015185, ASTRO2015529, ASTRO2015987, ASTRO2016044, ASTRO2016114, ASTRO2016148, ASTRO2016681, ASTRO2016819, ASTRO2016847, ASTRO2016892, ASTRO2017348, ASTRO2017627, ASTRO2018169, ASTRO2018373, ASTRO2018540, ASTRO2019039, ASTRO2019171, ASTRO3000154, ASTRO3000172, ASTRO3000177, ASTRO3000301, ASTRO3000474, ASTRO3000482, BEAST2000454, BGGI11000123, BGGI11000193, BGGI11000285, BGGI12000022, BGGI12000067, BGGI12000161, BGGI12000533, BGGI12000544, BGGI12000616, BGGI12000684, BGGI12001002, BGGI12001075, BGGI12001241, BGGI12001247, BGGI12001682, BGGI12001714, BLADE1000176, BLADE2000181, BLADE2000256, BLADE2000340, BLADE2000389, BLADE2000463, BLADE2000492, BLADE2000579, BLADE2000640, BLADE2000866, BLADE2000938, BLADE2001031, BLADE2001133, BLADE2001138, BLADE2001141, BLADE2001371, BLADE2001458, BLADE2001575, BLADE2001753, BLADE2001935, BLADE2001940, BLADE2001987, BLADE2002073, BLADE2002310, BLADE2002730, BLADE2002738, BLADE2002744, BLADE2002782, BLADE2002947, BLADE2002972, BLADE2003474, BLADE2003916, BLADE2004089, BLADE2004345, BLADE2004389, BLADE2004462, BLADE2004628, BLADE2004670, BLADE2004722, BLADE2004849, BLADE2005036, BLADE2005038, BLADE2005229, BLADE2005459, BLADE2005792, BLADE2006043, BLADE2006412, BLADE2006415, BLADE2006607, BLADE2006826, BLADE2006830, BLADE2006849, BLADE2006947, BLADE2007033, BLADE2007043, BLADE2007589, BLADE2007666, BLADE2007722, BLADE2007735, BLADE2007744, BLADE2007799, BLADE2007923, BLADE2007935, BLADE2007958, BLADE2008281, BLADE2008398, BLADE2008454, BLADE2008461, BLADE2008479, BLADE2008539, BLADE2008809, BLADE2008995, BLADE2009452, BLADE2009479, BLADE2009593, BNGH41000098, BNGH41000104, BNGH41000118, BNGH41000137, BNGH41000153, BNGH41000169, BNGH41000190, BNGH41000198, BNGH41000216, BNGH41000235, BNGH42000130, BNGH42000132, BNGH42000405, BNGH42000532, BNGH42000675, BNGH42000739, BNGH42000791, BNGH42000815, BNGH42000994, BNGH42001406, BNGH42001724, BNGH42002168, BNGH42002244, BNGH42002387, BNGH42002487, BNGH42002489, BNGH42003529, BNGH42003570, BNGH42003641, BNGH42004076, BNGH42004291, BNGH42004538, BNGH42004679, BNGH42005017, BNGH42005235, BNGH42005504, BNGH42006135, BNGH42006226, BNGH42006234, BNGH42007037, BNGH42007366, BNGH42007594, BNGH42007788, BNGH42007798, BNGH42008199, BNGH42008510, BNGH42008603, BNGH42008649, BNGH42008743, BNGH42008832, BNGH42008850, BNGH42008943, BNGH42009021, BNGH42009025, BRACE1000020, BRACE1000047, BRACE1000051, BRACE1000065, BRACE1000073, BRACE1000084, BRACE1000087, BRACE1000092, BRACE1000093, BRACE1000101, BRACE1000114, BRACE1000124, BRACE1000132, BRACE1000159, BRACE1000166, BRACE1000169, BRACE1000187, BRACE1000239, BRACE1000258, BRACE1000451, BRACE1000475, BRACE1000572, BRACE2000061, BRACE2000077, BRACE2000100, BRACE2000109, BRACE2000141, BRACE2000183, BRACE2000229, BRACE2000232, BRACE2000245, BRACE2000256, BRACE2000266, BRACE2000267, BRACE2000280, BRACE2000300, BRACE2000331, BRACE2000347, BRACE2000351, BRACE2000368, BRACE2000392, BRACE2000441, BRACE2000487, BRACE2000489, BRACE2000505, BRACE2000525, BRACE2000526, BRACE2000531, BRACE2000545, BRACE2000553, BRACE2000565, BRACE2000577, BRACE2000640, BRACE2000650, BRACE2000677, BRACE2000698, BRACE2000718, BRACE2000733, BRACE2000743, BRACE2000750, BRACE2000753, BRACE2000815, BRACE2000864, BRACE2000885, BRACE2000893, BRACE2000905, BRACE2000936, BRACE2000947, BRACE2000965, BRACE2000969, BRACE2000975, BRACE2000988, BRACE2001017, BRACE2001065, BRACE2001070, BRACE2001094, BRACE2001107, BRACE2001117, BRACE2001143, BRACE2001151, BRACE2001154, BRACE2001188, BRACE2001191, BRACE2001197, BRACE2001236, BRACE2001239, BRACE2001269, BRACE2001312, BRACE2001313, BRACE2001330, BRACE2001340, BRACE2001352, BRACE2001353, BRACE2001374, BRACE2001375, BRACE2001423, BRACE2001424, BRACE2001445, BRACE2001453, BRACE2001455, BRACE2001477, BRACE2001492, BRACE2001496, BRACE2001508, BRACE2001534, BRACE2001543, BRACE2001564, BRACE2001588, BRACE2001607, BRACE2001626, BRACE2001673, BRACE2001677, BRACE2001692, BRACE2001705, BRACE2001709, BRACE2001711, BRACE2001726, BRACE2001733, BRACE2001737, BRACE2001742, BRACE2001777, BRACE2001779, BRACE2001834, BRACE2001865, BRACE2001872, BRACE2001881, BRACE2001892, BRACE2001898, BRACE2001923, BRACE2001942, BRACE2001944, BRACE2001954, BRACE2001972, BRACE2001973, BRACE2002026, BRACE2002034, BRACE2002050, BRACE2002081, BRACE2002091, BRACE2002139, BRACE2002142, BRACE2002151, BRACE2002157, BRACE2002176, BRACE2002202, BRACE2002206, BRACE2002227, BRACE2002260, BRACE2002297, BRACE2002304, BRACE2002356, BRACE2002394, BRACE2002409, BRACE2002431, BRACE2002441, BRACE2002444, BRACE2002458, BRACE2002467, BRACE2002468, BRACE2002478, BRACE2002495, BRACE2002582, BRACE2002585, BRACE2002589, BRACE2002590, BRACE2002606, BRACE2002613, BRACE2002614, BRACE2002617, BRACE2002623, BRACE2002635, BRACE2002649, BRACE2002661, BRACE2002676, BRACE2002677, BRACE2002682, BRACE2002685, BRACE2002695, BRACE2002707, BRACE2002736, BRACE2002752, BRACE2002755, BRACE2002762, BRACE2002772, BRACE2002792, BRACE2002796, BRACE2002803, BRACE2002807, BRACE2002812, BRACE2002834, BRACE2002849, BRACE2002857, BRACE2002860, BRACE2002861, BRACE2002884, BRACE2002896, BRACE2002948, BRACE2003037, BRACE2003078, BRACE2003097, BRACE2003110, BRACE2003168, BRACE2003199, BRACE2003210, BRACE2003217, BRACE2003254, BRACE2003269, BRACE2003285, BRACE2003319, BRACE2003398, BRACE2003420, BRACE2003428, BRACE2003431, BRACE2003512, BRACE2003516, BRACE2003527, BRACE2003539, BRACE2003540, BRACE2003594, BRACE2003598, BRACE2003609, BRACE2003614, BRACE2003628, BRACE2003639, BRACE2003700, BRACE2003713, BRACE2003766, BRACE2003785, BRACE2003788, BRACE2003800, BRACE2003802, BRACE2003845, BRACE2003846, BRACE2003847, BRACE2003848, BRACE2003873, BRACE2003885, BRACE2003887, BRACE2003892, BRACE2003904, BRACE2003905, BRACE2003928, BRACE2003944, BRACE2003954, BRACE2003982, BRACE2003987, BRACE2005034, BRACE2005047, BRACE2005063, BRACE2005083, BRACE2005090, BRACE2005099, BRACE2005118, BRACE2005124, BRACE2005138, BRACE2005151, BRACE2005160, BRACE2005169, BRACE2005189, BRACE2005193, BRACE2005196, BRACE2005198, BRACE2005216, BRACE2005231, BRACE2005243, BRACE2005251, BRACE2005253, BRACE2005290, BRACE2005298, BRACE2005328, BRACE2005329, BRACE2005337, BRACE2005348, BRACE2005395, BRACE2005408, BRACE2005433, BRACE2005434, BRACE2005448, BRACE2005450, BRACE2005453, BRACE2005457, BRACE2005460, BRACE2005489, BRACE2005518, BRACE2005556, BRACE2005562, BRACE2005624, BRACE2005642, BRACE2005661, BRACE2005667, BRACE2005681, BRACE2005719, BRACE2005731, BRACE2005742, BRACE2005762, BRACE2005773, BRACE2005787, BRACE2005795, BRACE2005800, BRACE2005858, BRACE2005869, BRACE2005875, BRACE2005881, BRACE2005898, BRACE2005904, BRACE2005906, BRACE2005907, BRACE2005911, BRACE2005949, BRACE2005981, BRACE2005991, BRACE2006055, BRACE2006072, BRACE2006075, BRACE2006084, BRACE2006089, BRACE2006102, BRACE2006105, BRACE2006122, BRACE2006137, BRACE2006143, BRACE2006162, BRACE2006167, BRACE2006174, BRACE2006240, BRACE2006245, BRACE2006249, BRACE2006258, BRACE2006264, BRACE2006274, BRACE2006281, BRACE2006298, BRACE2006319, BRACE2006344, BRACE2006354, BRACE2006363, BRACE2006378, BRACE2006380, BRACE2006393, BRACE2006397, BRACE2006413, BRACE2006417, BRACE2006453, BRACE2006459, BRACE2006488, BRACE2006514, BRACE2006534, BRACE2006540, BRACE2006547, BRACE2006564, BRACE2006587, BRACE2006598, BRACE2006636, BRACE2006685, BRACE2006703, BRACE2006743, BRACE2006753, BRACE2006783, BRACE2006821, BRACE2006833, BRACE2006859, BRACE2006871, BRACE2006909, BRACE2006911, BRACE2006924, BRACE2006935, BRACE2006937, BRACE2006951, BRACE2006982, BRACE2006986, BRACE2007013, BRACE2007064, BRACE2007068, BRACE2007087, BRACE2007089, BRACE2007109, BRACE2007138, BRACE2007174, BRACE2007191, BRACE2007197, BRACE2007201, BRACE2007203, BRACE2007232, BRACE2007254, BRACE2007262, BRACE2007274, BRACE2007281, BRACE2007295, BRACE2007358, BRACE2007396, BRACE2007398, BRACE2007401, BRACE2007411, BRACE2007447, BRACE2007477, BRACE2007502, BRACE2007503, BRACE2007518, BRACE2007522, BRACE2007527, BRACE2007538, BRACE2007563, BRACE2007567, BRACE2007577, BRACE2007621, BRACE2007640, BRACE2007641, BRACE2007646, BRACE2007663, BRACE2007671, BRACE2007682, BRACE2007685, BRACE2007708, BRACE2007727, BRACE2007749, BRACE2007760, BRACE2007761, BRACE2007764, BRACE2007767, BRACE2007768, BRACE2007769, BRACE2007784, BRACE2007786, BRACE2007799, BRACE2007801, BRACE2007832, BRACE2007836, BRACE2007868, BRACE2007882, BRACE2007888, BRACE2007902, BRACE2007920, BRACE2007937, BRACE2007944, BRACE2007952, BRACE2008008, BRACE2008015, BRACE2008021, BRACE2008097, BRACE2008102, BRACE2008114, BRACE2008144, BRACE2008172, BRACE2008216, BRACE2008218, BRACE2008251, BRACE2008276, BRACE2008295, BRACE2008308, BRACE2008336, BRACE2008358, BRACE2008361, BRACE2008380, BRACE2008385, BRACE2008399, BRACE2008401, BRACE2008402, BRACE2008410, BRACE2008420, BRACE2008443, BRACE2008473, BRACE2008480, BRACE2008481, BRACE2008488, BRACE2008495, BRACE2008500, BRACE2008553, BRACE2008594, BRACE2008604, BRACE2008615, BRACE2008622, BRACE2008629, BRACE2008655, BRACE2008656, BRACE2008706, BRACE2008708, BRACE2008710, BRACE2008754, BRACE2008797, BRACE2008847, BRACE2008857, BRACE2008861, BRACE2008867, BRACE2008881, BRACE2008883, BRACE2008917, BRACE2008919, BRACE2008941, BRACE2008948, BRACE2008960, BRACE2008999, BRACE2009014, BRACE2009016, BRACE2009031, BRACE2009044, BRACE2009045, BRACE2009053, BRACE2009122, BRACE2009131, BRACE2009185, BRACE2009188, BRACE2009212, BRACE2009221, BRACE2009235, BRACE2009238, BRACE2009255, BRACE2009270, BRACE2009272, BRACE2009274, BRACE2009275, BRACE2009291, BRACE2009293, BRACE2009307, BRACE2009311, BRACE2009318, BRACE2009323, BRACE2009366, BRACE2009421, BRACE2009428, BRACE2009434, BRACE2009437, BRACE2009483, BRACE2009517, BRACE2009533, BRACE2009558, BRACE2009566, BRACE2009591, BRACE2009620, BRACE2009654, BRACE2009721, BRACE2009732, BRACE2009754, BRACE2009828, BRACE2009886, BRACE2009907, BRACE2009957, BRACE2010170, BRACE2010171, BRACE2010203, BRACE2010208, BRACE2010348, BRACE2010440, BRACE2010444, BRACE2010477, BRACE2010489, BRACE2010535, BRACE2010550, BRACE2010598, BRACE2010632, BRACE2010642, BRACE2010651, BRACE2010669, BRACE2010684, BRACE2010753, BRACE2010813, BRACE2010828, BRACE2010837, BRACE2010888, BRACE2010937, BRACE2010983, BRACE2011007, BRACE2011025, BRACE2011183, BRACE2011199, BRACE2011265, BRACE2011389, BRACE2011478, BRACE2011545, BRACE2011592, BRACE2011611, BRACE2011646, BRACE2011677, BRACE2011703, BRACE2011747, BRACE2011838, BRACE2011892, BRACE2011904, BRACE2011947, BRACE2012061, BRACE2012062, BRACE2012185, BRACE2012222, BRACE2012232, BRACE2012291, BRACE2012317, BRACE2012510, BRACE2012625, BRACE2012653, BRACE2012833, BRACE2012838, BRACE2012936, BRACE2012947, BRACE2013009, BRACE2013010, BRACE2013126, BRACE2013132, BRACE2013149, BRACE2013369, BRACE2013806, BRACE2013911, BRACE2014108, BRACE2014161, BRACE2014232, BRACE2014257, BRACE2014268, BRACE2014306, BRACE2014475, BRACE2014657, BRACE2014746, BRACE2014780, BRACE2014818, BRACE2014821, BRACE2014824, BRACE2014850, BRACE2014854, BRACE2015031, BRACE2015058, BRACE2015132, BRACE2015262, BRACE2015270, BRACE2015287, BRACE2015314, BRACE2015352, BRACE2015368, BRACE2015412, BRACE2015436, BRACE2015741, BRACE2015756, BRACE2015969, BRACE2015995, BRACE2016058, BRACE2016194, BRACE2016315, BRACE2016325, BRACE2016335, BRACE2016362, BRACE2016366, BRACE2016465, BRACE2016516, BRACE2016583, BRACE2016708, BRACE2016821, BRACE2016896, BRACE2016981, BRACE2017108, BRACE2017124, BRACE2017298, BRACE2017359, BRACE2017410, BRACE2017438, BRACE2017574, BRACE2017580, BRACE2017587, BRACE2017720, BRACE2017844, BRACE2017872, BRACE2017929, BRACE2017934, BRACE2017985, BRACE2017992, BRACE2018443, BRACE2018448, BRACE2018568, BRACE2018700, BRACE2018727, BRACE2018736, BRACE2018759, BRACE2018762, BRACE2018782, BRACE2018847, BRACE2019004, BRACE2019044, BRACE2019147, BRACE2019244, BRACE2019258, BRACE2019327, BRACE2019348, BRACE2019371, BRACE2019467, BRACE2019510, BRACE2019519, BRACE2019528, BRACE2019618, BRACE2019696, BRACE2019703, BRACE2019843, BRACE2019865, BRACE2019872, BRACE2019877, BRACE2020028, BRACE2020077, BRACE2020097, BRACE2020157, BRACE2020278, BRACE2020358, BRACE2020467, BRACE2020584, BRACE2020652, BRACE2020709, BRACE2020742, BRACE2020756, BRACE2020863, BRACE2020982, BRACE2021014, BRACE2021143, BRACE2021148, BRACE2021245, BRACE2021254, BRACE2021264, BRACE2021344, BRACE2021433, BRACE2021478, BRACE2021541, BRACE2021670, BRACE2021695, BRACE2021708, BRACE2021721, BRACE2021932, BRACE2021936, BRACE2022030, BRACE2022158, BRACE2022196, BRACE2022270, BRACE2022328, BRACE2022333, BRACE2022389, BRACE2022394, BRACE2022435, BRACE2022448, BRACE2022450, BRACE2022549, BRACE2022633, BRACE2022638, BRACE2022693, BRACE2022848, BRACE2022928, BRACE2022990, BRACE2023069, BRACE2023070, BRACE2023223, BRACE2023268, BRACE2023284, BRACE2023404, BRACE2023451, BRACE2023540, BRACE2023633, BRACE2023718, BRACE2023727, BRACE2023744, BRACE2023800, BRACE2023801, BRACE2024074, BRACE2024222, BRACE2024610, BRACE2024627, BRACE2024781, BRACE2024826, BRACE2025018, BRACE2025316, BRACE2025333, BRACE2025437, BRACE2025452, BRACE2025492, BRACE2025710, BRACE2025796, BRACE2025992, BRACE2026054, BRACE2026131, BRACE2026141, BRACE2026142, BRACE2026293, BRACE2026294, BRACE2026404, BRACE2026675, BRACE2026725, BRACE2026836, BRACE2026920, BRACE2026971, BRACE2027018, BRACE2027221, BRACE2027258, BRACE2027312, BRACE2027382, BRACE2027389, BRACE2027408, BRACE2027643, BRACE2027767, BRACE2027770, BRACE2027879, BRACE2027896, BRACE2027970, BRACE2028171, BRACE2028392, BRACE2028410, BRACE2028636, BRACE2028741, BRACE2028956, BRACE2028970, BRACE2029112, BRACE2029356, BRACE2029396, BRACE2029581, BRACE2029644, BRACE2029849, BRACE2030039, BRACE2030096, BRACE2030323, BRACE2030326, BRACE2030341, BRACE2030345, BRACE2030736, BRACE2030883, BRACE2030884, BRACE2031154, BRACE2031232, BRACE2031527, BRACE2031531, BRACE2031553, BRACE2031899, BRACE2032044, BRACE2032090, BRACE2032134, BRACE2032148, BRACE2032182, BRACE2032329, BRACE2032385, BRACE2032436, BRACE2032477, BRACE2032502, BRACE2032538, BRACE2032584, BRACE2032823, BRACE2033128, BRACE2033394, BRACE2033478, BRACE2033720, BRACE2033786, BRACE2034434, BRACE2034523, BRACE2034616, BRACE2034622, BRACE2034870, BRACE2035003, BRACE2035120, BRACE2035124, BRACE2035191, BRACE2035278, BRACE2035381, BRACE2035441, BRACE2035485, BRACE2036005, BRACE2036096, BRACE2036743, BRACE2036830, BRACE2036834, BRACE2036900, BRACE2037132, BRACE2037294, BRACE2037295, BRACE2037299, BRACE2037310, BRACE2037431, BRACE2037692, BRACE2037847, BRACE2038114, BRACE2038269, BRACE2038271, BRACE2038329, BRACE2038492, BRACE2038551, BRACE2038618, BRACE2039009, BRACE2039128, BRACE2039170, BRACE2039249, BRACE2039286, BRACE2039297, BRACE2039327, BRACE2039362, BRACE2039475, BRACE2039600, BRACE2039607, BRACE2039734, BRACE2039823, BRACE2039832, BRACE2039893, BRACE2039986, BRACE2040138, BRACE2040325, BRACE2040514, BRACE2040640, BRACE2040987, BRACE2041009, BRACE2041095, BRACE2041200, BRACE2041264, BRACE2041890, BRACE2041898, BRACE2042394, BRACE2042398, BRACE2042550, BRACE2042620, BRACE2042628, BRACE2042873, BRACE2043036, BRACE2043105, BRACE2043142, BRACE2043248, BRACE2043349, BRACE2043381, BRACE2043774, BRACE2043942, BRACE2044057, BRACE2044105, BRACE2044263, BRACE2044286, BRACE2044304, BRACE2044473, BRACE2044510, BRACE2044640, BRACE2044816, BRACE2044946, BRACE2044949, BRACE2045300, BRACE2045428, BRACE2045445, BRACE2045596, BRACE2045772, BRACE2045947, BRACE2045954, BRACE2046251, BRACE2046295, BRACE2046976, BRACE2047011, BRACE2047232, BRACE2047350, BRACE2047377, BRACE2047385, BRACE2047492, BRACE2047558, BRACE2047573, BRACE2047835, BRACE2047893, BRACE2047975, BRACE3000071, BRACE3000404, BRACE3000520, BRACE3000697, BRACE3000840, BRACE3000973, BRACE3001002, BRACE3001058, BRACE3001066, BRACE3001113, BRACE3001217, BRACE3001299, BRACE3001384, BRACE3001391, BRACE3001403, BRACE3001595, BRACE3001754, BRACE3001948, BRACE3001973, BRACE3002184, BRACE3002298, BRACE3002344, BRACE3002390, BRACE3002420, BRACE3002508, BRACE3002541, BRACE3002756, BRACE3003004, BRACE3003026, BRACE3003053, BRACE3003192, BRACE3003413, BRACE3003595, BRACE3003698, BRACE3003866, BRACE3003920, BRACE3004046, BRACE3004058, BRACE3004113, BRACE3004150, BRACE3004205, BRACE3004358, BRACE3004435, BRACE3004477, BRACE3004767, BRACE3004772, BRACE3004783, BRACE3004843, BRACE3004862, BRACE3004880, BRACE3004887, BRACE3004981, BRACE3004996, BRACE3004998, BRACE3005103, BRACE3005127, BRACE3005145, BRACE3005217, BRACE3005225, BRACE3005430, BRACE3005499, BRACE3005760, BRACE3005870, BRACE3005903, BRACE3005938, BRACE3005989, BRACE3006113, BRACE3006185, BRACE3006226, BRACE3006462, BRACE3006463, BRACE3006553, BRACE3006872, BRACE3006917, BRACE3007058, BRACE3007084, BRACE3007085, BRACE3007258, BRACE3007322, BRACE3007472, BRACE3007480, BRACE3007559, BRACE3007625, BRACE3007642, BRACE3007649, BRACE3007767, BRACE3007869, BRACE3008036, BRACE3008066, BRACE3008092, BRACE3008095, BRACE3008137, BRACE3008255, BRACE3008337, BRACE3008384, BRACE3008720, BRACE3008772, BRACE3009044, BRACE3009075, BRACE3009090, BRACE3009127, BRACE3009197, BRACE3009237, BRACE3009265, BRACE3009297, BRACE3009377, BRACE3009392, BRACE3009416, BRACE3009539, BRACE3009574, BRACE3009701, BRACE3009708, BRACE3009724, BRACE3009993, BRACE3010076, BRACE3010079, BRACE3010086, BRACE3010221, BRACE3010283, BRACE3010315, BRACE3010397, BRACE3010416, BRACE3010428, BRACE3010435, BRACE3010438, BRACE3010702, BRACE3010862, BRACE3011271, BRACE3011421, BRACE3011447, BRACE3011505, BRACE3011634, BRACE3011774, BRACE3012357, BRACE3012574, BRACE3012806, BRACE3012930, BRACE3013119, BRACE3013418, BRACE3013576, BRACE3013740, BRACE3013780, BRACE3013874, BRACE3013936, BRACE3013986, BRACE3014005, BRACE3014068, BRACE3014231, BRACE3014290, BRACE3014317, BRACE3014523, BRACE3014714, BRACE3014807, BRACE3014942, BRACE3015090, BRACE3015121, BRACE3015262, BRACE3015521, BRACE3015808, BRACE3015829, BRACE3015894, BRACE3015898, BRACE3016020, BRACE3016122, BRACE3016167, BRACE3016170, BRACE3016580, BRACE3016788, BRACE3016810, BRACE3016862, BRACE3016884, BRACE3017083, BRACE3017253, BRACE3018083, BRACE3018308, BRACE3018963, BRACE3019055, BRACE3019071, BRACE3019084, BRACE3019570, BRACE3019611, BRACE3019817, BRACE3019828, BRACE3019941, BRACE3020151, BRACE3020194, BRACE3020286, BRACE3020356, BRACE3020594, BRACE3020669, BRACE3020671, BRACE3020890, BRACE3021148, BRACE3021430, BRACE3021517, BRACE3021805, BRACE3022051, BRACE3022303, BRACE3022312, BRACE3022340, BRACE3022847, BRACE3023604, BRACE3023912, BRACE3024073, BRACE3024359, BRACE3024379, BRACE3024444, BRACE3024497, BRACE3024537, BRACE3024659, BRACE3024662, BRACE3024879, BRACE3025153, BRACE3025302, BRACE3025457, BRACE3025531, BRACE3025627, BRACE3025630, BRACE3025719, BRACE3026008, BRACE3026075, BRACE3026161, BRACE3026290, BRACE3026345, BRACE3026456, BRACE3026735, BRACE3026802, BRACE3026844, BRACE3026947, BRACE3026993, BRACE3027242, BRACE3027256, BRACE3027326, BRACE3027478, BRACE3027480, BRACE3027931, BRACE3027976, BRACE3028214, BRACE3028241, BRACE3028360, BRACE3028895, BRACE3028998, BRACE3029005, BRACE3029021, BRACE3029205, BRACE3029447, BRACE3030057, BRACE3030103, BRACE3030538, BRACE3030748, BRACE3030866, BRACE3031161, BRACE3031184, BRACE3031185, BRACE3031315, BRACE3031372, BRACE3031579, BRACE3031728, BRACE3031838, BRACE3031843, BRACE3032427, BRACE3032455, BRACE3032537, BRACE3032538, BRACE3032631, BRACE3032771, BRACE3032980, BRACE3032983, BRACE3033525, BRACE3034159, BRACE3034183, BRACE3034389, BRACE3034964, BRACE3034993, BRACE3035168, BRACE3035227, BRACE3036156, BRACE3036271, BRACE3037612, BRACE3037637, BRACE3037803, BRACE3038012, BRACE3038030, BRACE3038569, BRACE3038570, BRACE3038687, BRACE3038760, BRACE3039288, BRACE3039358, BRACE3039378, BRACE3039454, BRACE3040012, BRACE3040239, BRACE3040504, BRACE3040644, BRACE3040856, BRACE3040863, BRACE3041059, BRACE3041162, BRACE3041827, BRACE3042046, BRACE3042210, BRACE3042326, BRACE3042409, BRACE3042432, BRACE3042594, BRACE3043597, BRACE3044090, BRACE3044172, BRACE3044247, BRACE3044377, BRACE3044389, BRACE3044495, BRACE3045011, BRACE3045033, BRACE3045078, BRACE3045145, BRACE3045424, BRACE3045708, BRACE3045981, BRACE3046049, BRACE3046152, BRACE3046294, BRACE3046450, BRACE3046466, BRACE3046491, BRACE3046609, BRACE3046762, BRACE3046837, BRACE3046855, BRACE3046966, BRACE3047018, BRACE3047482, BRACE3047801, BRALZ1000047, BRALZ1000103, BRALZ2000189, BRALZ2000263, BRALZ2000988, BRALZ2001038, BRALZ2001279, BRALZ2001350, BRALZ2001445, BRALZ2001559, BRALZ2001743, BRALZ2001834, BRALZ2002174, BRALZ2002418, BRALZ2002477, BRALZ2003119, BRALZ2003330, BRALZ2003453, BRALZ2003525, BRALZ2004397, BRALZ2005467, BRALZ2005471, BRALZ2005888, BRALZ2005950, BRALZ2005992, BRALZ2006288, BRALZ2006474, BRALZ2006560, BRALZ2006734, BRALZ2006800, BRALZ2006976, BRALZ2007376, BRALZ2007545, BRALZ2007576, BRALZ2007661, BRALZ2007790, BRALZ2007793, BRALZ2007952, BRALZ2008031, BRALZ2008166, BRALZ2008462, BRALZ2008617, BRALZ2008696, BRALZ2008763, BRALZ2008869, BRALZ2008930, BRALZ2009446, BRALZ2009486, BRALZ2010186, BRALZ2010842, BRALZ2011337, BRALZ2011796, BRALZ2011880, BRALZ2012050, BRALZ2012183, BRALZ2012848, BRALZ2013621, BRALZ2013690, BRALZ2014054, BRALZ2014316, BRALZ2014484, BRALZ2014951, BRALZ2015168, BRALZ2015811, BRALZ2016085, BRALZ2016498, BRALZ2017359, BRALZ2017531, BRALZ2017607, BRALZ2017620, BRALZ2017844, BRALZ2018342, BRALZ2018492, BRALZ2018834, BRALZ2019047, BRAMY1000095, BRAMY1000098, BRAMY1000130, BRAMY1000157, BRAMY1000173, BRAMY2000021, BRAMY2000025, BRAMY2000052, BRAMY2000076, BRAMY2000086, BRAMY2000151, BRAMY2000181, BRAMY2000196, BRAMY2000231, BRAMY2000277, BRAMY2000388, BRAMY2000508, BRAMY2000562, BRAMY2000585, BRAMY2000653, BRAMY2000814, BRAMY2000893, BRAMY2000946, BRAMY2000981, BRAMY2000987, BRAMY2001068, BRAMY2001114, BRAMY2001203, BRAMY2001282, BRAMY2001367, BRAMY2001427, BRAMY2001473, BRAMY2001678, BRAMY2002005, BRAMY2002044, BRAMY2002072, BRAMY2002158, BRAMY2002311, BRAMY2002339, BRAMY2002364, BRAMY2002369, BRAMY2002479, BRAMY2002493, BRAMY2002525, BRAMY2002584, BRAMY2002604, BRAMY2002621, BRAMY2002638, BRAMY2002739, BRAMY2002799, BRAMY2002853, BRAMY2002862, BRAMY2002956, BRAMY2003008, BRAMY2003037, BRAMY2003117, BRAMY2003287, BRAMY2003325, BRAMY2003529, BRAMY2003538, BRAMY2003585, BRAMY2003634, BRAMY2003653, BRAMY2003681, BRAMY2003893, BRAMY2003897, BRAMY2003898, BRAMY2003904, BRAMY2003926, BRAMY2003929, BRAMY2004031, BRAMY2004058, BRAMY2004183, BRAMY2004335, BRAMY2004351, BRAMY2004352, BRAMY2004363, BRAMY2004387, BRAMY2004492, BRAMY2004521, BRAMY2004524, BRAMY2004537, BRAMY2004542, BRAMY2004756, BRAMY2004771, BRAMY2005052, BRAMY2005064, BRAMY2005094, BRAMY2005151, BRAMY2005182, BRAMY2005244, BRAMY2005391, BRAMY2005488, BRAMY2005576, BRAMY2005648, BRAMY2005662, BRAMY2005708, BRAMY2005711, BRAMY2006092, BRAMY2006118, BRAMY2006149, BRAMY2006366, BRAMY2006375, BRAMY2006397, BRAMY2006411, BRAMY2006459, BRAMY2006466, BRAMY2006659, BRAMY2006779, BRAMY2006809, BRAMY2006879, BRAMY2007043, BRAMY2007078, BRAMY2007110, BRAMY2007185, BRAMY2007244, BRAMY2007249, BRAMY2007255, BRAMY2007308, BRAMY2007411, BRAMY2007458, BRAMY2007486, BRAMY2007546, BRAMY2007567, BRAMY2007594, BRAMY2007610, BRAMY2007613, BRAMY2007653, BRAMY2007753, BRAMY2007859, BRAMY2008333, BRAMY2008382, BRAMY2008563, BRAMY2008583, BRAMY2008977, BRAMY2008979, BRAMY2009013, BRAMY2009023, BRAMY2009034, BRAMY2009105, BRAMY2009123, BRAMY2009192, BRAMY2009344, BRAMY2009349, BRAMY2009394, BRAMY2009489, BRAMY2009508, BRAMY2009528, BRAMY2009557, BRAMY2009612, BRAMY2009693, BRAMY2009934, BRAMY2010068, BRAMY2010135, BRAMY2010145, BRAMY2010171, BRAMY2010208, BRAMY2010239, BRAMY2010272, BRAMY2010290, BRAMY2010357, BRAMY2010366, BRAMY2010395, BRAMY2010441, BRAMY2010442, BRAMY2010464, BRAMY2010581, BRAMY2010798, BRAMY2010808, BRAMY2010919, BRAMY2011064, BRAMY2011105, BRAMY2011178, BRAMY2011196, BRAMY2011216, BRAMY2011253, BRAMY2011446, BRAMY2011480, BRAMY2011639, BRAMY2011679, BRAMY2011811, BRAMY2011841, BRAMY2011846, BRAMY2011849, BRAMY2011872, BRAMY2011961, BRAMY2012017, BRAMY2012091, BRAMY2012119, BRAMY2012162, BRAMY2012163, BRAMY2012277, BRAMY2012340, BRAMY2012426, BRAMY2012497, BRAMY2012517, BRAMY2012555, BRAMY2012568, BRAMY2012581, BRAMY2012691, BRAMY2012721, BRAMY2012731, BRAMY2012776, BRAMY2012880, BRAMY2012881, BRAMY2013169, BRAMY2013200, BRAMY2013216, BRAMY2013405, BRAMY2013414, BRAMY2013572, BRAMY2013590, BRAMY2013621, BRAMY2013659, BRAMY2013722, BRAMY2013736, BRAMY2013756, BRAMY2013944, BRAMY2013975, BRAMY2014019, BRAMY2014205, BRAMY2014387, BRAMY2014462, BRAMY2014469, BRAMY2014541, BRAMY2014754, BRAMY2014813, BRAMY2015211, BRAMY2015251, BRAMY2015311, BRAMY2015420, BRAMY2015503, BRAMY2015516, BRAMY2015550, BRAMY2015551, BRAMY2015559, BRAMY2015688, BRAMY2015705, BRAMY2015782, BRAMY2015833, BRAMY2015855, BRAMY2015890, BRAMY2015911, BRAMY2015925, BRAMY2016002, BRAMY2016009, BRAMY2016020, BRAMY2016070, BRAMY2016251, BRAMY2016327, BRAMY2016386, BRAMY2016706, BRAMY2016771, BRAMY2016892, BRAMY2016938, BRAMY2016953, BRAMY2017014, BRAMY2017249, BRAMY2017348, BRAMY2017450, BRAMY2017455, BRAMY2017528, BRAMY2017864, BRAMY2018027, BRAMY2018106, BRAMY2018122, BRAMY2018126, BRAMY2018272, BRAMY2018273, BRAMY2018279, BRAMY2018295, BRAMY2018308, BRAMY2018396, BRAMY2018467, BRAMY2018635, BRAMY2018785, BRAMY2019055, BRAMY2019111, BRAMY2019277, BRAMY2019300, BRAMY2019468, BRAMY2019509, BRAMY2019554, BRAMY2019600, BRAMY2019643, BRAMY2019710, BRAMY2019963, BRAMY2019985, BRAMY2019989, BRAMY2020050, BRAMY2020058, BRAMY2020106, BRAMY2020270, BRAMY2020354, BRAMY2020355, BRAMY2020412, BRAMY2020445, BRAMY2020466, BRAMY2020520, BRAMY2020574, BRAMY2020634, BRAMY2020713, BRAMY2021040, BRAMY2021063, BRAMY2021098, BRAMY2021139, BRAMY2021142, BRAMY2021276, BRAMY2021310, BRAMY2021388, BRAMY2021498, BRAMY2021523, BRAMY2021710, BRAMY2021732, BRAMY2021746, BRAMY2021825, BRAMY2021867, BRAMY2021962, BRAMY2021982, BRAMY2022052, BRAMY2022160, BRAMY2022168, BRAMY2022263, BRAMY2022301, BRAMY2022320, BRAMY2022383, BRAMY2022445, BRAMY2022454, BRAMY2022493, BRAMY2022525, BRAMY2022532, BRAMY2022723, BRAMY2022786, BRAMY2022796, BRAMY2022929, BRAMY2022980, BRAMY2022984, BRAMY2023060, BRAMY2023110, BRAMY2023115, BRAMY2023161, BRAMY2023172, BRAMY2023238, BRAMY2023327, BRAMY2023358, BRAMY2023406, BRAMY2023482, BRAMY2023514, BRAMY2023719, BRAMY2023729, BRAMY2023786, BRAMY2023852, BRAMY2023863, BRAMY2023939, BRAMY2024004, BRAMY2024073, BRAMY2024312, BRAMY2024374, BRAMY2024390, BRAMY2024416, BRAMY2024449, BRAMY2024489, BRAMY2024497, BRAMY2024514, BRAMY2024530, BRAMY2024535, BRAMY2024545, BRAMY2024576, BRAMY2024593, BRAMY2024711, BRAMY2024715, BRAMY2024728, BRAMY2024849, BRAMY2025024, BRAMY2025032, BRAMY2025121, BRAMY2025175, BRAMY2025218, BRAMY2025230, BRAMY2025272, BRAMY2025277, BRAMY2025495, BRAMY2025812, BRAMY2025996, BRAMY2026009, BRAMY2026091, BRAMY2026168, BRAMY2026300, BRAMY2026347, BRAMY2026395, BRAMY2026405, BRAMY2026533, BRAMY2026538, BRAMY2026685, BRAMY2026713, BRAMY2026778, BRAMY2026824, BRAMY2026899, BRAMY2026902, BRAMY2026904, BRAMY2026976, BRAMY2027073, BRAMY2027114, BRAMY2027140, BRAMY2027242, BRAMY2027396, BRAMY2027451, BRAMY2027461, BRAMY2027467, BRAMY2027587, BRAMY2027714, BRAMY2027717, BRAMY2027752, BRAMY2027782, BRAMY2028072, BRAMY2028183, BRAMY2028188, BRAMY2028269, BRAMY2028282, BRAMY2028472, BRAMY2028491, BRAMY2028516, BRAMY2028565, BRAMY2028593, BRAMY2028682, BRAMY2028783, BRAMY2028856, BRAMY2028914, BRAMY2029204, BRAMY2029602, BRAMY2029988, BRAMY2030098, BRAMY2030109, BRAMY2030206, BRAMY2030477, BRAMY2030545, BRAMY2030607, BRAMY2030702, BRAMY2030703, BRAMY2030768, BRAMY2030799, BRAMY2030859, BRAMY2030915, BRAMY2031317, BRAMY2031377, BRAMY2031442, BRAMY2031516, BRAMY2032014, BRAMY2032087, BRAMY2032231, BRAMY2032242, BRAMY2032290, BRAMY2032311, BRAMY2032317, BRAMY2032344, BRAMY2032589, BRAMY2032678, BRAMY2032696, BRAMY2032777, BRAMY2032994, BRAMY2033003, BRAMY2033116, BRAMY2033240, BRAMY2033267, BRAMY2033316, BRAMY2033332, BRAMY2033506, BRAMY2033594, BRAMY2033895, BRAMY2033914, BRAMY2034072, BRAMY2034185, BRAMY2034187, BRAMY2034305, BRAMY2034561, BRAMY2034920, BRAMY2034993, BRAMY2035070, BRAMY2035449, BRAMY2035545, BRAMY2035606, BRAMY2035718, BRAMY2035719, BRAMY2035801, BRAMY2035869, BRAMY2035923, BRAMY2036076, BRAMY2036079, BRAMY2036254, BRAMY2036266, BRAMY2036387, BRAMY2036396, BRAMY2036459, BRAMY2036567, BRAMY2036615, BRAMY2036699, BRAMY2036913, BRAMY2036918, BRAMY2036968, BRAMY2037147, BRAMY2037328, BRAMY2037609, BRAMY2037629, BRAMY2037800, BRAMY2037823, BRAMY2037971, BRAMY2038100, BRAMY2038128, BRAMY2038317, BRAMY2038475, BRAMY2038484, BRAMY2038516, BRAMY2038832, BRAMY2038846, BRAMY2038887, BRAMY2038904, BRAMY2039287, BRAMY2039300, BRAMY2039314, BRAMY2039341, BRAMY2039630, BRAMY2039695, BRAMY2039728, BRAMY2039872, BRAMY2040051, BRAMY2040159, BRAMY2040214, BRAMY2040478, BRAMY2040915, BRAMY2041261, BRAMY2041347, BRAMY2041378, BRAMY2041384, BRAMY2041434, BRAMY2041507, BRAMY2041542, BRAMY2041738, BRAMY2042122, BRAMY2042131, BRAMY2042178, BRAMY2042195, BRAMY2042244, BRAMY2042549, BRAMY2042596, BRAMY2042612, BRAMY2042641, BRAMY2042711, BRAMY2042760, BRAMY2042804, BRAMY2042899, BRAMY2042918, BRAMY2043069, BRAMY2043103, BRAMY2043314, BRAMY2043345, BRAMY2044246, BRAMY2044317, BRAMY2044349, BRAMY2044686, BRAMY2044838, BRAMY2045036, BRAMY2045299, BRAMY2045471, BRAMY2045530, BRAMY2046109, BRAMY2046478, BRAMY2046489, BRAMY2046537, BRAMY2046667, BRAMY2046742, BRAMY2046871, BRAMY2046984, BRAMY2046989, BRAMY2047169, BRAMY2047280, BRAMY2047420, BRAMY2047676, BRAMY2047692, BRAMY2047746, BRAMY2047751, BRAMY2047765, BRAMY2047884, BRAMY2047948, BRAMY3000206, BRAMY3000210, BRAMY3000213, BRAMY3000224, BRAMY3000254, BRAMY3000307, BRAMY3000692, BRAMY3001356, BRAMY3001401, BRAMY3001409, BRAMY3001794, BRAMY3002120, BRAMY3002312, BRAMY3002329, BRAMY3002458, BRAMY3002508, BRAMY3002620, BRAMY3002803, BRAMY3002805, BRAMY3002886, BRAMY3002991, BRAMY3003026, BRAMY3003109, BRAMY3003205, BRAMY3003310, BRAMY3003566, BRAMY3003723, BRAMY3004126, BRAMY3004224, BRAMY3004364, BRAMY3004672, BRAMY3004800, BRAMY3004900, BRAMY3004919, BRAMY3005091, BRAMY3005184, BRAMY3005656, BRAMY3005912, BRAMY3005932, BRAMY3006032, BRAMY3006297, BRAMY3006761, BRAMY3007078, BRAMY3007206, BRAMY3007311, BRAMY3007350, BRAMY3007449, BRAMY3007471, BRAMY3007609, BRAMY3007723, BRAMY3007968, BRAMY3008044, BRAMY3008088, BRAMY3008096, BRAMY3008335, BRAMY3008466, BRAMY3008505, BRAMY3008650, BRAMY3008937, BRAMY3009158, BRAMY3009207, BRAMY3009491, BRAMY3009556, BRAMY3009782, BRAMY3009811, BRAMY3009904, BRAMY3010264, BRAMY3010321, BRAMY3010411, BRAMY3010492, BRAMY3010603, BRAMY3010654, BRAMY4000089, BRAMY4000095, BRAMY4000229, BRAMY4000277, BRAMY4000915, BRAMY4000962, BRAMY4001173, BRAMY4001200, BRAMY4001234, BRAMY4001449, BRAMY4001652, BRAMY4001863, BRAMY4001913, BRAMY4002575, BRAMY4002628, BRASW1000053, BRASW1000125, BRAWH1000001, BRAWH1000002, BRAWH1000007, BRAWH1000045, BRAWH1000083, BRAWH1000093, BRAWH1000094, BRAWH1000116, BRAWH1000127, BRAWH1000130, BRAWH1000157, BRAWH1000162, BRAWH1000164, BRAWH1000168, BRAWH1000174, BRAWH1000180, BRAWH1000369, BRAWH2000034, BRAWH2000048, BRAWH2000071, BRAWH2000082, BRAWH2000093, BRAWH2000109, BRAWH2000131, BRAWH2000142, BRAWH2000218, BRAWH2000232, BRAWH2000248, BRAWH2000256, BRAWH2000274, BRAWH2000323, BRAWH2000353, BRAWH2000370, BRAWH2000409, BRAWH2000417, BRAWH2000443, BRAWH2000460, BRAWH2000471, BRAWH2000476, BRAWH2000482, BRAWH2000488, BRAWH2000494, BRAWH2000500, BRAWH2000503, BRAWH2000522, BRAWH2000554, BRAWH2000595, BRAWH2000633, BRAWH2000643, BRAWH2000651, BRAWH2000682, BRAWH2000686, BRAWH2000697, BRAWH2000752, BRAWH2000859, BRAWH2000866, BRAWH2000892, BRAWH2000901, BRAWH2000926, BRAWH2000944, BRAWH2000984, BRAWH2001037, BRAWH2001052, BRAWH2001103, BRAWH2001129, BRAWH2001137, BRAWH2001141, BRAWH2001159, BRAWH2001166, BRAWH2001171, BRAWH2001186, BRAWH2001203, BRAWH2001238, BRAWH2001239, BRAWH2001255, BRAWH2001321, BRAWH2001355, BRAWH2001378, BRAWH2001395, BRAWH2001406, BRAWH2001412, BRAWH2001418, BRAWH2001424, BRAWH2001436, BRAWH2001438, BRAWH2001439, BRAWH2001459, BRAWH2001461, BRAWH2001484, BRAWH2001492, BRAWH2001503, BRAWH2001519, BRAWH2001530, BRAWH2001535, BRAWH2001589, BRAWH2001662, BRAWH2001666, BRAWH2001679, BRAWH2001686, BRAWH2001701, BRAWH2001842, BRAWH2001862, BRAWH2001873, BRAWH2001940, BRAWH2001973, BRAWH2002047, BRAWH2002060, BRAWH2002062, BRAWH2002125, BRAWH2002191, BRAWH2002318, BRAWH2002333, BRAWH2002352, BRAWH2002383, BRAWH2002549, BRAWH2002560, BRAWH2002601, BRAWH2002623, BRAWH2002630, BRAWH2002635, BRAWH2002662, BRAWH2002679, BRAWH2002725, BRAWH2002761, BRAWH2002811, BRAWH2002861, BRAWH2002911, BRAWH2002967, BRAWH2002976, BRAWH2003000, BRAWH2003025, BRAWH2003135, BRAWH2003240, BRAWH2003307, BRAWH2003355, BRAWH2003366, BRAWH2003662, BRAWH2003689, BRAWH2003693, BRAWH2003818, BRAWH2003832, BRAWH2003948, BRAWH2003964, BRAWH2004044, BRAWH2004068, BRAWH2004078, BRAWH2004095, BRAWH2004136, BRAWH2004217, BRAWH2004580, BRAWH2004731, BRAWH2004779, BRAWH2004842, BRAWH2004884, BRAWH2004923, BRAWH2005008, BRAWH2005074, BRAWH2005225, BRAWH2005315, BRAWH2005517, BRAWH2005524, BRAWH2005533, BRAWH2005578, BRAWH2005661, BRAWH2005812, BRAWH2005974, BRAWH2005998, BRAWH2006044, BRAWH2006083, BRAWH2006207, BRAWH2006301, BRAWH2006395, BRAWH2006405, BRAWH2006450, BRAWH2006493, BRAWH2006526, BRAWH2006543, BRAWH2006622, BRAWH2006760, BRAWH2006960, BRAWH2006989, BRAWH2006996, BRAWH2007069, BRAWH2007308, BRAWH2007406, BRAWH2007550, BRAWH2007570, BRAWH2007591, BRAWH2007605, BRAWH2007658, BRAWH2007664, BRAWH2007800, BRAWH2007808, BRAWH2007825, BRAWH2007862, BRAWH2007890, BRAWH2008058, BRAWH2008128, BRAWH2008219, BRAWH2008255, BRAWH2008292, BRAWH2008297, BRAWH2008366, BRAWH2008380, BRAWH2008540, BRAWH2008577, BRAWH2008790, BRAWH2008903, BRAWH2008956, BRAWH2008993, BRAWH2009112, BRAWH2009227, BRAWH2009238, BRAWH2009261, BRAWH2009263, BRAWH2009298, BRAWH2009360, BRAWH2009393, BRAWH2009485, BRAWH2009490, BRAWH2009558, BRAWH2009590, BRAWH2009626, BRAWH2009678, BRAWH2009695, BRAWH2009907, BRAWH2010000, BRAWH2010069, BRAWH2010084, BRAWH2010136, BRAWH2010318, BRAWH2010329, BRAWH2010354, BRAWH2010364, BRAWH2010536, BRAWH2010552, BRAWH2010584, BRAWH2010618, BRAWH2010619, BRAWH2010754, BRAWH2010980, BRAWH2011066, BRAWH2011079, BRAWH2011096, BRAWH2011155, BRAWH2011166, BRAWH2011204, BRAWH2011286, BRAWH2011294, BRAWH2011343, BRAWH2011400, BRAWH2011762, BRAWH2011795, BRAWH2011796, BRAWH2011812, BRAWH2011823, BRAWH2011860, BRAWH2011920, BRAWH2011958, BRAWH2012054, BRAWH2012161, BRAWH2012162, BRAWH2012164, BRAWH2012258, BRAWH2012277, BRAWH2012326, BRAWH2012538, BRAWH2012540, BRAWH2012619, BRAWH2012698, BRAWH2012749, BRAWH2012827, BRAWH2012866, BRAWH2012963, BRAWH2013047, BRAWH2013219, BRAWH2013294, BRAWH2013748, BRAWH2013866, BRAWH2013871, BRAWH2013914, BRAWH2013941, BRAWH2013955, BRAWH2014053, BRAWH2014188, BRAWH2014234, BRAWH2014379, BRAWH2014414, BRAWH2014473, BRAWH2014511, BRAWH2014662, BRAWH2014717, BRAWH2014729, BRAWH2014876, BRAWH2014934, BRAWH2014954, BRAWH2015247, BRAWH2015349, BRAWH2015375, BRAWH2015385, BRAWH2015595, BRAWH2015728, BRAWH2015853, BRAWH2015866, BRAWH2016028, BRAWH2016106, BRAWH2016160, BRAWH2016166, BRAWH2016209, BRAWH2016221, BRAWH2016223, BRAWH2016269, BRAWH2016305, BRAWH2016439, BRAWH2016446, BRAWH2016514, BRAWH2016562, BRAWH2016655, BRAWH2016679, BRAWH2016702, BRAWH2016724, BRAWH2016785, BRAWH2016792, BRAWH2016800, BRAWH2017002, BRAWH2017103, BRAWH2017250, BRAWH2017294, BRAWH2017304, BRAWH2017305, BRAWH2017379, BRAWH2017407, BRAWH2017433, BRAWH2017523, BRAWH2017534, BRAWH2017542, BRAWH2017635, BRAWH2017913, BRAWH2018206, BRAWH2018267, BRAWH2018282, BRAWH2018317, BRAWH2018506, BRAWH2018514, BRAWH2018527, BRAWH2018601, BRAWH2018729, BRAWH2018745, BRAWH2018875, BRAWH2019053, BRAWH2019055, BRAWH2019198, BRAWH3000078, BRAWH3000088, BRAWH3000100, BRAWH3000166, BRAWH3000314, BRAWH3000329, BRAWH3000410, BRAWH3000446, BRAWH3000491, BRAWH3000604, BRAWH3000884, BRAWH3001053, BRAWH3001319, BRAWH3001326, BRAWH3001475, BRAWH3001636, BRAWH3001638, BRAWH3001712, BRAWH3001760, BRAWH3001783, BRAWH3001833, BRAWH3001879, BRAWH3001891, BRAWH3001918, BRAWH3002433, BRAWH3002467, BRAWH3002513, BRAWH3002574, BRAWH3002600, BRAWH3002819, BRAWH3003019, BRAWH3003136, BRAWH3003244, BRAWH3003343, BRAWH3003411, BRAWH3003522, BRAWH3003573, BRAWH3003598, BRAWH3003727, BRAWH3003801, BRAWH3003975, BRAWH3004222, BRAWH3004335, BRAWH3004350, BRAWH3004453, BRAWH3004530, BRAWH3004666, BRAWH3005037, BRAWH3005047, BRAWH3005132, BRAWH3005146, BRAWH3005292, BRAWH3005300, BRAWH3005422, BRAWH3005534, BRAWH3005886, BRAWH3005892, BRAWH3005896, BRAWH3005912, BRAWH3005981, BRAWH3006547, BRAWH3006548, BRAWH3006761, BRAWH3006792, BRAWH3007129, BRAWH3007221, BRAWH3007441, BRAWH3007455, BRAWH3007506, BRAWH3007726, BRAWH3007783, BRAWH3008167, BRAWH3008341, BRAWH3008559, BRAWH3008697, BRAWH3008867, BRAWH3008931, BRAWH3009017, BRAWH3009285, BRAWH3009297, BRAWH3009546, BRAWH3009961, BRAWH3010461, BRAWH3010560, BRAWH3010602, BRAWH3010657, BRAWH3010726, BRAWH3010833, BRAWH3011101, BRAWH3011331, BRAWH3011402, BRAWH3011577, BRAWH3011623, BRAWH3011637, BRAWH3011685, BRAWH3011907, BRAWH3011929, BRAWH3012005, BRAWH3012662, BRAWH3012779, BRAWH3013009, BRAWH3013049, BRAWH3013197, BRAWH3013264, BRAWH3013508, BRAWH3014609, BRAWH3014639, BRAWH3015017, BRAWH3015175, BRAWH3015260, BRAWH3015610, BRAWH3015825, BRAWH3016123, BRAWH3016271, BRAWH3016715, BRAWH3017259, BRAWH3017260, BRAWH3017477, BRAWH3017537, BRAWH3017980, BRAWH3018063, BRAWH3018369, BRAWH3018548, BRAWH3018969, BRAWH3019026, BRAWH3019529, BRAWH3019594, BRAWH3019629, BRAWH3019820, BRAWH3020200, BRAWH3020318, BRAWH3020486, BRAWH3020884, BRAWH3020928, BRAWH3021012, BRAWH3021545, BRAWH3021574, BRAWH3021580, BRAWH3021641, BRAWH3021643, BRAWH3021724, BRAWH3022347, BRAWH3022431, BRAWH3022459, BRAWH3022542, BRAWH3022719, BRAWH3022866, BRAWH3022900, BRAWH3023156, BRAWH3023168, BRAWH3023172, BRAWH3023274, BRAWH3023421, BRAWH3024231, BRAWH3024242, BRAWH3024469, BRAWH3024506, BRAWH3024613, BRAWH3026349, BRAWH3026394, BRAWH3026529, BRAWH3027420, BRAWH3027440, BRAWH3027533, BRAWH3027574, BRAWH3027607, BRAWH3027616, BRAWH3027675, BRAWH3027806, BRAWH3027880, BRAWH3027927, BRAWH3028202, BRAWH3028223, BRAWH3028306, BRAWH3028461, BRAWH3028645, BRAWH3028754, BRAWH3028796, BRAWH3029254, BRAWH3029313, BRAWH3029538, BRAWH3029556, BRAWH3029806, BRAWH3030613, BRAWH3030772, BRAWH3030810, BRAWH3030892, BRAWH3030910, BRAWH3030950, BRAWH3031054, BRAWH3031710, BRAWH3031902, BRAWH3032298, BRAWH3032340, BRAWH3032571, BRAWH3032620, BRAWH3032930, BRAWH3033117, BRAWH3033293, BRAWH3033448, BRAWH3033513, BRAWH3034097, BRAWH3034114, BRAWH3034134, BRAWH3034668, BRAWH3034743, BRAWH3034775, BRAWH3034890, BRAWH3035154, BRAWH3035403, BRAWH3035904, BRAWH3035914, BRAWH3035936, BRAWH3036077, BRAWH3036247, BRAWH3036270, BRAWH3036561, BRAWH3036738, BRAWH3036951, BRAWH3037265, BRAWH3037394, BRAWH3037533, BRAWH3037979, BRAWH3038055, BRAWH3038230, BRAWH3038252, BRAWH3038324, BRCAN1000065, BRCAN1000076, BRCAN1000105, BRCAN1000149, BRCAN2000148, BRCAN2000149, BRCAN2000209, BRCAN2000239, BRCAN2000346, BRCAN2000364, BRCAN2000383, BRCAN2000418, BRCAN2000523, BRCAN2000541, BRCAN2000563, BRCAN2000577, BRCAN2000620, BRCAN2000639, BRCAN2000763, BRCAN2000832, BRCAN2000923, BRCAN2001223, BRCAN2001866, BRCAN2002416, BRCAN2002473, BRCAN2002562, BRCAN2002662, BRCAN2002826, BRCAN2002854, BRCAN2002856, BRCAN2002892, BRCAN2002944, BRCAN2002948, BRCAN2003070, BRCAN2003269, BRCAN2003389, BRCAN2003628, BRCAN2003703, BRCAN2003746, BRCAN2003987, BRCAN2004173, BRCAN2004355, BRCAN2004371, BRCAN2004653, BRCAN2004699, BRCAN2005436, BRCAN2005449, BRCAN2006019, BRCAN2006051, BRCAN2006063, BRCAN2006117, BRCAN2006174, BRCAN2006290, BRCAN2006297, BRCAN2006323, BRCAN2006401, BRCAN2006411, BRCAN2006450, BRCAN2006955, BRCAN2007119, BRCAN2007144, BRCAN2007409, BRCAN2007426, BRCAN2007525, BRCAN2007700, BRCAN2008494, BRCAN2008528, BRCAN2008701, BRCAN2008894, BRCAN2009156, BRCAN2009168, BRCAN2009203, BRCAN2009432, BRCAN2010374, BRCAN2010376, BRCAN2010547, BRCAN2010581, BRCAN2010665, BRCAN2011254, BRCAN2011316, BRCAN2011602, BRCAN2011946, BRCAN2012110, BRCAN2012355, BRCAN2012402, BRCAN2012408, BRCAN2012481, BRCAN2012613, BRCAN2012713, BRCAN2012929, BRCAN2013655, BRCAN2013660, BRCAN2014143, BRCAN2014229, BRCAN2014370, BRCAN2014602, BRCAN2014652, BRCAN2014788, BRCAN2014881, BRCAN2014952, BRCAN2015371, BRCAN2015402, BRCAN2015464, BRCAN2015719, BRCAN2015757, BRCAN2015886, BRCAN2016025, BRCAN2016046, BRCAN2016174, BRCAN2016433, BRCAN2016619, BRCAN2016762, BRCAN2016814, BRCAN2017442, BRCAN2017905, BRCAN2018240, BRCAN2018269, BRCAN2018490, BRCAN2018566, BRCAN2018667, BRCAN2018748, BRCAN2018935, BRCAN2019002, BRCAN2019387, BRCAN2019653, BRCAN2019773, BRCAN2019907, BRCAN2020234, BRCAN2020331, BRCAN2020412, BRCAN2020467, BRCAN2020710, BRCAN2020880, BRCAN2021024, BRCAN2021028, BRCAN2021325, BRCAN2021452, BRCAN2021669, BRCAN2021718, BRCAN2022126, BRCAN2022191, BRCAN2022472, BRCAN2022474, BRCAN2023347, BRCAN2023724, BRCAN2024451, BRCAN2024563, BRCAN2024572, BRCAN2025009, BRCAN2025093, BRCAN2025349, BRCAN2025368, BRCAN2025712, BRCAN2025982, BRCAN2026117, BRCAN2026340, BRCAN2026711, BRCAN2027150, BRCAN2027310, BRCAN2027334, BRCAN2027355, BRCAN2027364, BRCAN2027513, BRCAN2027593, BRCAN2027970, BRCAN2028021, BRCAN2028040, BRCAN2028319, BRCAN2028338, BRCAN2028355, BRCAN2028378, BRCAN2028460, BRCAN2028545, BRCAN2028634, BRCAN2028702, BRCOC1000040, BRCOC1000087, BRCOC2000004, BRCOC2000047, BRCOC2000152, BRCOC2000184, BRCOC2000186, BRCOC2000333, BRCOC2000360, BRCOC2000404, BRCOC2000487, BRCOC2000637, BRCOC2000670, BRCOC2000816, BRCOC2000850, BRCOC2001355, BRCOC2002085, BRCOC2002155, BRCOC2002323, BRCOC2002659, BRCOC2002664, BRCOC2002686, BRCOC2002751, BRCOC2002756, BRCOC2002777, BRCOC2002835, BRCOC2003100, BRCOC2003125, BRCOC2003213, BRCOC2003513, BRCOC2003732, BRCOC2003740, BRCOC2004036, BRCOC2004175, BRCOC2004354, BRCOC2004455, BRCOC2004950, BRCOC2005542, BRCOC2005903, BRCOC2005951, BRCOC2006164, BRCOC2006189, BRCOC2006243, BRCOC2006270, BRCOC2006639, BRCOC2006942, BRCOC2007034, BRCOC2007593, BRCOC2007733, BRCOC2007769, BRCOC2008064, BRCOC2008225, BRCOC2008642, BRCOC2008993, BRCOC2009052, BRCOC2009196, BRCOC2009380, BRCOC2009638, BRCOC2009937, BRCOC2010115, BRCOC2010123, BRCOC2010510, BRCOC2010730, BRCOC2010980, BRCOC2010994, BRCOC2011010, BRCOC2011398, BRCOC2011418, BRCOC2011506, BRCOC2011769, BRCOC2011996, BRCOC2012172, BRCOC2012229, BRCOC2012386, BRCOC2012551, BRCOC2012813, BRCOC2013448, BRCOC2013573, BRCOC2013675, BRCOC2013780, BRCOC2014013, BRCOC2014033, BRCOC2014400, BRCOC2014748, BRCOC2014833, BRCOC2015597, BRCOC2015824, BRCOC2015908, BRCOC2015944, BRCOC2016525, BRCOC2016661, BRCOC2017061, BRCOC2017652, BRCOC2017856, BRCOC2018877, BRCOC2019255, BRCOC2019549, BRCOC2019841, BRCOC2019896, BRCOC2019903, BRCOC2019910, BRCOC2019934, BRCOC2020122, BRCOC2020142, BRHIP1000058, BRHIP1000072, BRHIP1000104, BRHIP1000108, BRHIP1000129, BRHIP1000174, BRHIP1000258, BRHIP2000021, BRHIP2000079, BRHIP2000087, BRHIP2000163, BRHIP2000210, BRHIP2000239, BRHIP2000245, BRHIP2000312, BRHIP2000359, BRHIP2000445, BRHIP2000506, BRHIP2000532, BRHIP2000553, BRHIP2000621, BRHIP2000691, BRHIP2000819, BRHIP2000826, BRHIP2000920, BRHIP2001074, BRHIP2001099, BRHIP2001686, BRHIP2001782, BRHIP2001802, BRHIP2001805, BRHIP2001886, BRHIP2001927, BRHIP2002122, BRHIP2002143, BRHIP2002172, BRHIP2002339, BRHIP2002346, BRHIP2002510, BRHIP2002664, BRHIP2002722, BRHIP2002929, BRHIP2003048, BRHIP2003062, BRHIP2003242, BRHIP2003272, BRHIP2003748, BRHIP2003786, BRHIP2003828, BRHIP2003917, BRHIP2004312, BRHIP2004355, BRHIP2004359, BRHIP2004814, BRHIP2004883, BRHIP2004902, BRHIP2005010, BRHIP2005236, BRHIP2005271, BRHIP2005354, BRHIP2005600, BRHIP2005719, BRHIP2005724, BRHIP2005752, BRHIP2005932, BRHIP2006617, BRHIP2006782, BRHIP2006800, BRHIP2006819, BRHIP2006921, BRHIP2007307, BRHIP2007616, BRHIP2007690, BRHIP2007741, BRHIP2007928, BRHIP2007969, BRHIP2008269, BRHIP2008389, BRHIP2008607, BRHIP2008756, BRHIP2008909, BRHIP2009019, BRHIP2009177, BRHIP2009340, BRHIP2009351, BRHIP2009414, BRHIP2009474, BRHIP2009617, BRHIP2009685, BRHIP2010217, BRHIP2010309, BRHIP2010444, BRHIP2010487, BRHIP2010571, BRHIP2010593, BRHIP2010610, BRHIP2010723, BRHIP2010744, BRHIP2011080, BRHIP2011120, BRHIP2011199, BRHIP2011508, BRHIP2011576, BRHIP2011616, BRHIP2011783, BRHIP2011838, BRHIP2011891, BRHIP2011933, BRHIP2012054, BRHIP2012059, BRHIP2012141, BRHIP2012314, BRHIP2012360, BRHIP2012545, BRHIP2012580, BRHIP2012627, BRHIP2012642, BRHIP2012750, BRHIP2012922, BRHIP2012923, BRHIP2012972, BRHIP2013286, BRHIP2013447, BRHIP2013510, BRHIP2013699, BRHIP2013723, BRHIP2013958, BRHIP2013972, BRHIP2014063, BRHIP2014228, BRHIP2014285, BRHIP2014291, BRHIP2014373, BRHIP2014386, BRHIP2014387, BRHIP2014954, BRHIP2015153, BRHIP2015224, BRHIP2015245, BRHIP2015356, BRHIP2015360, BRHIP2015679, BRHIP2016005, BRHIP2016125, BRHIP2016788, BRHIP2016968, BRHIP2016990, BRHIP2017010, BRHIP2017315, BRHIP2017385, BRHIP2017404, BRHIP2017542, BRHIP2017553, BRHIP2017642, BRHIP2017714, BRHIP2017780, BRHIP2017945, BRHIP2018014, BRHIP2018369, BRHIP2018612, BRHIP2018635, BRHIP2018650, BRHIP2018712, BRHIP2018719, BRHIP2018805, BRHIP2018998, BRHIP2019007, BRHIP2019047, BRHIP2019149, BRHIP2019177, BRHIP2019186, BRHIP2019291, BRHIP2019494, BRHIP2019589, BRHIP2019641, BRHIP2019819, BRHIP2019884, BRHIP2019972, BRHIP2020182, BRHIP2020509, BRHIP2020573, BRHIP2020622, BRHIP2020695, BRHIP2020743, BRHIP2020799, BRHIP2020842, BRHIP2020859, BRHIP2020930, BRHIP2021102, BRHIP2021289, BRHIP2021495, BRHIP2021615, BRHIP2021744, BRHIP2021762, BRHIP2021858, BRHIP2021870, BRHIP2021929, BRHIP2022006, BRHIP2022054, BRHIP2022221, BRHIP2022228, BRHIP2022298, BRHIP2022467, BRHIP2022708, BRHIP2022986, BRHIP2023071, BRHIP2023229, BRHIP2023272, BRHIP2023292, BRHIP2023309, BRHIP2023369, BRHIP2023438, BRHIP2023695, BRHIP2023735, BRHIP2023762, BRHIP2023773, BRHIP2023860, BRHIP2023869, BRHIP2024046, BRHIP2024165, BRHIP2024201, BRHIP2024347, BRHIP2024398, BRHIP2024549, BRHIP2024742, BRHIP2024789, BRHIP2024911, BRHIP2024941, BRHIP2025245, BRHIP2025366, BRHIP2025448, BRHIP2025679, BRHIP2025739, BRHIP2025797, BRHIP2026021, BRHIP2026061, BRHIP2026155, BRHIP2026214, BRHIP2026288, BRHIP2026346, BRHIP2026557, BRHIP2026723, BRHIP2026877, BRHIP2027017, BRHIP2027054, BRHIP2027077, BRHIP2027563, BRHIP2027685, BRHIP2027762, BRHIP2028187, BRHIP2028303, BRHIP2028330, BRHIP2028480, BRHIP2028583, BRHIP2028593, BRHIP2029176, BRHIP2029283, BRHIP2029393, BRHIP2029529, BRHIP2029643, BRHIP2029663, BRHIP3000017, BRHIP3000060, BRHIP3000070, BRHIP3000081, BRHIP3000111, BRHIP3000131, BRHIP3000240, BRHIP3000377, BRHIP3000457, BRHIP3000475, BRHIP3000488, BRHIP3000526, BRHIP3000626, BRHIP3000859, BRHIP3000907, BRHIP3001076, BRHIP3001079, BRHIP3001141, BRHIP3001283, BRHIP3001338, BRHIP3001360, BRHIP3001481, BRHIP3001878, BRHIP3001964, BRHIP3002114, BRHIP3002124, BRHIP3002141, BRHIP3002363, BRHIP3002691, BRHIP3002920, BRHIP3002931, BRHIP3003063, BRHIP3003126, BRHIP3003306, BRHIP3003340, BRHIP3003395, BRHIP3003484, BRHIP3003644, BRHIP3003688, BRHIP3003795, BRHIP3003961, BRHIP3003984, BRHIP3004193, BRHIP3004215, BRHIP3004416, BRHIP3004710, BRHIP3004725, BRHIP3004774, BRHIP3004786, BRHIP3004863, BRHIP3004968, BRHIP3005037, BRHIP3005137, BRHIP3005142, BRHIP3005231, BRHIP3005307, BRHIP3005574, BRHIP3005673, BRHIP3005768, BRHIP3005801, BRHIP3005944, BRHIP3006279, BRHIP3006294, BRHIP3006390, BRHIP3006449, BRHIP3006683, BRHIP3006717, BRHIP3006786, BRHIP3006950, BRHIP3007172, BRHIP3007183, BRHIP3007195, BRHIP3007223, BRHIP3007239, BRHIP3007291, BRHIP3007409, BRHIP3007424, BRHIP3007483, BRHIP3007586, BRHIP3007609, BRHIP3007640, BRHIP3007960, BRHIP3008082, BRHIP3008183, BRHIP3008314, BRHIP3008320, BRHIP3008344, BRHIP3008405, BRHIP3008565, BRHIP3008598, BRHIP3008606, BRHIP3008691, BRHIP3008714, BRHIP3008997, BRHIP3009099, BRHIP3009140, BRHIP3009181, BRHIP3009318, BRHIP3009427, BRHIP3009448, BRHIP3009672, BRHIP3009753, BRHIP3010135, BRHIP3010289, BRHIP3010529, BRHIP3011082, BRHIP3011241, BRHIP3011269, BRHIP3011460, BRHIP3011567, BRHIP3011831, BRHIP3012185, BRHIP3012289, BRHIP3012357, BRHIP3012736, BRHIP3012745, BRHIP3012868, BRHIP3012997, BRHIP3013078, BRHIP3013271, BRHIP3013588, BRHIP3013698, BRHIP3013765, BRHIP3013897, BRHIP3014237, BRHIP3014675, BRHIP3015620, BRHIP3015751, BRHIP3015854, BRHIP3016032, BRHIP3016213, BRHIP3016302, BRHIP3016421, BRHIP3017109, BRHIP3017146, BRHIP3017256, BRHIP3017325, BRHIP3017558, BRHIP3017637, BRHIP3017855, BRHIP3018278, BRHIP3018784, BRHIP3019643, BRHIP3019824, BRHIP3019880, BRHIP3019956, BRHIP3020046, BRHIP3020155, BRHIP3020182, BRHIP3020733, BRHIP3021019, BRHIP3021499, BRHIP3021534, BRHIP3021778, BRHIP3021987, BRHIP3022656, BRHIP3023922, BRHIP3024118, BRHIP3024533, BRHIP3024703, BRHIP3024725, BRHIP3024820, BRHIP3025161, BRHIP3025702, BRHIP3025795, BRHIP3025844, BRHIP3026052, BRHIP3026097, BRHIP3026231, BRHIP3026335, BRHIP3026651, BRHIP3027105, BRHIP3027137, BRHIP3027160, BRHIP3027191, BRHIP3027501, BRHIP3027594, BRHIP3027651, BRHIP3027854, BRHIP3027947, BRHIP3028570, BRHIP3028742, BRSSN1000056, BRSSN1000059, BRSSN1000092, BRSSN1000153, BRSSN2000097, BRSSN2000175, BRSSN2000197, BRSSN2000244, BRSSN2000293, BRSSN2000295, BRSSN2000312, BRSSN2000498, BRSSN2000518, BRSSN2000561, BRSSN2000566, BRSSN2000684, BRSSN2000715, BRSSN2000832, BRSSN2001213, BRSSN2001275, BRSSN2001342, BRSSN2001426, BRSSN2001503, BRSSN2001579, BRSSN2001758, BRSSN2001810, BRSSN2001869, BRSSN2002857, BRSSN2002859, BRSSN2003012, BRSSN2003086, BRSSN2003093, BRSSN2003820, BRSSN2003841, BRSSN2003937, BRSSN2004142, BRSSN2004303, BRSSN2004304, BRSSN2004496, BRSSN2004657, BRSSN2004679, BRSSN2004686, BRSSN2004710, BRSSN2004719, BRSSN2005847, BRSSN2006133, BRSSN2006390, BRSSN2006575, BRSSN2006611, BRSSN2006644, BRSSN2006892, BRSSN2007076, BRSSN2007168, BRSSN2007202, BRSSN2007338, BRSSN2007464, BRSSN2007504, BRSSN2007819, BRSSN2008125, BRSSN2008419, BRSSN2008464, BRSSN2008549, BRSSN2008797, BRSSN2009119, BRSSN2009378, BRSSN2009389, BRSSN2009395, BRSSN2009518, BRSSN2009627, BRSSN2009630, BRSSN2009702, BRSSN2010019, BRSSN2010110, BRSSN2010587, BRSSN2010596, BRSSN2010830, BRSSN2011262, BRSSN2011653, BRSSN2011738, BRSSN2011843, BRSSN2012081, BRSSN2012103, BRSSN2012157, BRSSN2012198, BRSSN2012254, BRSSN2012439, BRSSN2012622, BRSSN2012691, BRSSN2012838, BRSSN2013095, BRSSN2013544, BRSSN2013696, BRSSN2013702, BRSSN2013733, BRSSN2013753, BRSSN2013874, BRSSN2014112, BRSSN2014294, BRSSN2014299, BRSSN2014424, BRSSN2014513, BRSSN2014556, BRSSN2014573, BRSSN2014610, BRSSN2014636, BRSSN2014685, BRSSN2015199, BRSSN2015238, BRSSN2015369, BRSSN2015497, BRSSN2015554, BRSSN2015707, BRSSN2015773, BRSSN2015907, BRSSN2015982, BRSSN2016589, BRSSN2016768, BRSSN2016905, BRSSN2017297, BRSSN2017422, BRSSN2017530, BRSSN2017682, BRSSN2017757, BRSSN2018218, BRSSN2018440, BRSSN2018447, BRSSN2018581, BRSSN2018731, BRSSN2018771, BRSSN2018925, BRSTN1000083, BRSTN1000097, BRSTN2000058, BRSTN2000070, BRSTN2000220, BRSTN2000312, BRSTN2000367, BRSTN2000536, BRSTN2000872, BRSTN2001067, BRSTN2001613, BRSTN2001801, BRSTN2002105, BRSTN2002400, BRSTN2002532, BRSTN2002691, BRSTN2003590, BRSTN2003835, BRSTN2004863, BRSTN2004869, BRSTN2004987, BRSTN2005721, BRSTN2006306, BRSTN2006466, BRSTN2006580, BRSTN2006583, BRSTN2006638, BRSTN2006865, BRSTN2007000, BRSTN2007118, BRSTN2007284, BRSTN2007765, BRSTN2008052, BRSTN2008283, BRSTN2008367, BRSTN2008418, BRSTN2008457, BRSTN2008475, BRSTN2008930, BRSTN2009247, BRSTN2010089, BRSTN2010107, BRSTN2010363, BRSTN2010416, BRSTN2010500, BRSTN2010569, BRSTN2010750, BRSTN2010923, BRSTN2011211, BRSTN2011597, BRSTN2011688, BRSTN2011799, BRSTN2012089, BRSTN2012284, BRSTN2012320, BRSTN2012380, BRSTN2012451, BRSTN2013171, BRSTN2013354, BRSTN2013502, BRSTN2013931, BRSTN2014490, BRSTN2014633, BRSTN2014751, BRSTN2014770, BRSTN2015015, BRSTN2015889, BRSTN2015978, BRSTN2016066, BRSTN2016335, BRSTN2016892, BRSTN2016918, BRSTN2017104, BRSTN2017151, BRSTN2017237, BRSTN2017379, BRSTN2017761, BRSTN2017771, BRSTN2017995, BRSTN2018077, BRSTN2018083, BRSTN2018596, BRSTN2018692, BRSTN2018712, BRSTN2019079, BRSTN2019129, BRTHA1000021, BRTHA1000063, BRTHA1000311, BRTHA2000057, BRTHA2000474, BRTHA2000514, BRTHA2000574, BRTHA2000855, BRTHA2000969, BRTHA2000972, BRTHA2001304, BRTHA2001370, BRTHA2001462, BRTHA2001717, BRTHA2001812, BRTHA2002091, BRTHA2002115, BRTHA2002133, BRTHA2002281, BRTHA2002376, BRTHA2002442, BRTHA2002493, BRTHA2002565, BRTHA2002608, BRTHA2002702, BRTHA2002721, BRTHA2002726, BRTHA2002741, BRTHA2002808, BRTHA2002896, BRTHA2002903, BRTHA2003030, BRTHA2003110, BRTHA2003116, BRTHA2003436, BRTHA2003759, BRTHA2003794, BRTHA2004361, BRTHA2004371, BRTHA2004582, BRTHA2004629, BRTHA2004639, BRTHA2004642, BRTHA2004812, BRTHA2004821, BRTHA2004978, BRTHA2004992, BRTHA2005005, BRTHA2005013, BRTHA2005448, BRTHA2005579, BRTHA2005831, BRTHA2005864, BRTHA2005942, BRTHA2005956, BRTHA2006075, BRTHA2006146, BRTHA2006194, BRTHA2006232, BRTHA2006720, BRTHA2006735, BRTHA2006974, BRTHA2006975, BRTHA2007060, BRTHA2007122, BRTHA2007422, BRTHA2007603, BRTHA2007665, BRTHA2007998, BRTHA2008316, BRTHA2008335, BRTHA2008502, BRTHA2008513, BRTHA2008527, BRTHA2008535, BRTHA2008598, BRTHA2008669, BRTHA2008955, BRTHA2009311, BRTHA2009349, BRTHA2009486, BRTHA2009803, BRTHA2009846, BRTHA2009886, BRTHA2009972, BRTHA2010008, BRTHA2010033, BRTHA2010073, BRTHA2010097, BRTHA2010191, BRTHA2010397, BRTHA2010608, BRTHA2010672, BRTHA2010884, BRTHA2010907, BRTHA2011062, BRTHA2011194, BRTHA2011321, BRTHA2011351, BRTHA2011500, BRTHA2011641, BRTHA2011691, BRTHA2012129, BRTHA2012183, BRTHA2012189, BRTHA2012351, BRTHA2012392, BRTHA2012466, BRTHA2012555, BRTHA2012562, BRTHA2012980, BRTHA2013054, BRTHA2013262, BRTHA2013275, BRTHA2013426, BRTHA2013460, BRTHA2013515, BRTHA2013540, BRTHA2013595, BRTHA2013610, BRTHA2013707, BRTHA2013942, BRTHA2014287, BRTHA2014334, BRTHA2014381, BRTHA2014578, BRTHA2014647, BRTHA2014663, BRTHA2014792, BRTHA2014828, BRTHA2014909, BRTHA2014975, BRTHA2014997, BRTHA2015406, BRTHA2015478, BRTHA2015696, BRTHA2015700, BRTHA2015853, BRTHA2015878, BRTHA2016179, BRTHA2016215, BRTHA2016267, BRTHA2016318, BRTHA2016496, BRTHA2016543, BRTHA2016552, BRTHA2016577, BRTHA2016765, BRTHA2016918, BRTHA2017178, BRTHA2017353, BRTHA2017364, BRTHA2017972, BRTHA2017985, BRTHA2018011, BRTHA2018129, BRTHA2018165, BRTHA2018304, BRTHA2018344, BRTHA2018420, BRTHA2018443, BRTHA2018504, BRTHA2018558, BRTHA2018591, BRTHA2018624, BRTHA2018706, BRTHA2018707, BRTHA2019014, BRTHA2019022, BRTHA2019048, BRTHA2019073, BRTHA2019726, BRTHA2019743, BRTHA2020400, BRTHA2020566, BRTHA2020642, BRTHA2020695, BRTHA2020721, BRTHA2020781, BRTHA2020811, BRTHA2020910, BRTHA2021212, BRTHA2021440, BRTHA2021450, BRTHA2022074, BRTHA2022914, BRTHA2022968, BRTHA2023402, BRTHA2023437, BRTHA2024177, BRTHA2024354, BRTHA2024712, BRTHA2025869, BRTHA2026071, BRTHA2026290, BRTHA2026311, BRTHA2027227, BRTHA2027250, BRTHA2027546, BRTHA2028297, BRTHA2029969, BRTHA2030036, BRTHA2030213, BRTHA2031517, BRTHA2031800, BRTHA2031917, BRTHA2032763, BRTHA2032845, BRTHA2033122, BRTHA2033155, BRTHA2033264, BRTHA2033320, BRTHA2033469, BRTHA2033683, BRTHA2034281, BRTHA2034576, BRTHA2034874, BRTHA2035448, BRTHA2035743, BRTHA2036055, BRTHA2036295, BRTHA2036660, BRTHA2037247, BRTHA2038279, BRTHA2038345, BRTHA2038353, BRTHA2038396, BRTHA3000252, BRTHA3000273, BRTHA3000296, BRTHA3000297, BRTHA3000325, BRTHA3000456, BRTHA3000633, BRTHA3000789, BRTHA3001221, BRTHA3001623, BRTHA3002265, BRTHA3002401, BRTHA3002411, BRTHA3002427, BRTHA3002864, BRTHA3002933, BRTHA3002955, BRTHA3003000, BRTHA3003023, BRTHA3003074, BRTHA3003225, BRTHA3003339, BRTHA3003343, BRTHA3003417, BRTHA3003449, BRTHA3003474, BRTHA3003490, BRTHA3003704, BRTHA3003736, BRTHA3004307, BRTHA3004432, BRTHA3004475, BRTHA3004502, BRTHA3004610, BRTHA3005046, BRTHA3005735, BRTHA3005988, BRTHA3006318, BRTHA3006593, BRTHA3006856, BRTHA3007113, BRTHA3007130, BRTHA3007148, BRTHA3007319, BRTHA3007469, BRTHA3007472, BRTHA3007532, BRTHA3007662, BRTHA3007685, BRTHA3007769, BRTHA3007922, BRTHA3008143, BRTHA3008293, BRTHA3008310, BRTHA3008386, BRTHA3008520, BRTHA3008608, BRTHA3008694, BRTHA3008778, BRTHA3008826, BRTHA3009037, BRTHA3009090, BRTHA3009291, BRTHA3009858, BRTHA3010135, BRTHA3010366, BRTHA3010469, BRTHA3010530, BRTHA3010540, BRTHA3010717, BRTHA3011149, BRTHA3011187, BRTHA3011194, BRTHA3011229, BRTHA3011265, BRTHA3011361, BRTHA3011510, BRTHA3011892, BRTHA3012265, BRTHA3013860, BRTHA3013882, BRTHA3013884, BRTHA3013981, BRTHA3014000, BRTHA3014105, BRTHA3014507, BRTHA3014547, BRTHA3014691, BRTHA3014835, BRTHA3014854, BRTHA3014908, BRTHA3014920, BRTHA3015815, BRTHA3016616, BRTHA3016835, BRTHA3016845, BRTHA3016917, BRTHA3017047, BRTHA3017589, BRTHA3017848, BRTHA3018409, BRTHA3018514, BRTHA3018617, BRTHA3018623, BRTHA3018656, BRTHA3019048, BRTHA3019105, BRTHA3019183, BRTHA3020000, BRTHA3020314, BRTHA3020369, BRTHA3021569, BRTHA3021708, BRTHA3021786, BRTHA3021971, BRTHA3022641, BRTHA3023403, BRTHA3023523, BRTHA3023590, BRTHA3023929, BRTHA3024233, BRTHA3024600, BRTHA3025073, BRTHA3025789, BRTHA3025826, BRTHA3026161, BRTHA3026180, BRTHA3026507, BRTHA3026556, BRTHA3026916, BRTHA3027171, BRTHA3027318, BRTHA3027638, BRTHA3027820, BRTHA3027879, BRTHA3027957, BRTHA3028339, BRTHA3028505, BRTHA3028782, CD34C2000051, CD34C2000152, CD34C2000175, CD34C2000443, CD34C3000125, CD34C3000314, CD34C3000424, CD34C3000494, CERVX1000042, CERVX2000812, CERVX2000968, CERVX2002006, CERVX2002013, CERVX2002430, CERVX2002770, CHONS1000058, CHONS2000172, CHONS2000797, CHONS2001287, CHONS2001382, CHONS2001797, CHONS2001834, CHONS2002419, CHONS2002829, COLON1000030, COLON1000084, COLON1000135, COLON2000470, COLON2000557, COLON2000568, COLON2001721, COLON2001829, COLON2001866, COLON2002443, COLON2002520, COLON2003043, COLON2003529, COLON2004318, COLON2004351, COLON2004478, COLON2004911, COLON2005126, COLON2005623, COLON2005735, COLON2005772, COLON2006263, COLON2006282, COLON2006417, COLON2007274, COLON2007733, COLON2008105, COLON2009337, COLON2009499, CORDB1000140, CORDB2000061, CORDB2000127, CORDB2000541, CTONG1000009, CTONG1000010, CTONG1000020, CTONG1000022, CTONG1000040, CTONG1000052, CTONG1000056, CTONG1000062, CTONG1000086, CTONG1000088, CTONG1000093, CTONG1000094, CTONG1000097, CTONG1000113, CTONG1000137, CTONG1000165, CTONG1000180, CTONG1000181, CTONG1000218, CTONG1000220, CTONG1000241, CTONG1000277, CTONG1000283, CTONG1000288, CTONG1000302, CTONG1000341, CTONG1000467, CTONG1000476, CTONG1000488, CTONG1000508, CTONG1000540, CTONG2000031, CTONG2000034, CTONG2000042, CTONG2000063, CTONG2000201, CTONG2000218, CTONG2000279, CTONG2000303, CTONG2000330, CTONG2000395, CTONG2000411, CTONG2000465, CTONG2000469, CTONG2000480, CTONG2000508, CTONG2000561, CTONG2000589, CTONG2000766, CTONG2000771, CTONG2000819, CTONG2000827, CTONG2000846, CTONG2000855, CTONG2000977, CTONG2001139, CTONG2001226, CTONG2001320, CTONG2001366, CTONG2001413, CTONG2001428, CTONG2001513, CTONG2001524, CTONG2001533, CTONG2001598, CTONG2001681, CTONG2001724, CTONG2001749, CTONG2001800, CTONG2001820, CTONG2001858, CTONG2001877, CTONG2001911, CTONG2001932, CTONG2001955, CTONG2002066, CTONG2002095, CTONG2002143, CTONG2002270, CTONG2002395, CTONG2002417, CTONG2002418, CTONG2002453, CTONG2002558, CTONG2002590, CTONG2002709, CTONG2002721, CTONG2002744, CTONG2002766, CTONG2002803, CTONG2002816, CTONG2002820, CTONG2002832, CTONG2002841, CTONG2002903, CTONG2002965, CTONG2002999, CTONG2003028, CTONG2003094, CTONG2003100, CTONG2003115, CTONG2003189, CTONG2003245, CTONG2003293, CTONG2003348, CTONG2003350, CTONG2003361, CTONG2003372, CTONG2003375, CTONG2003427, CTONG2003517, CTONG2003524, CTONG2003599, CTONG2003680, CTONG2003699, CTONG2003764, CTONG2003782, CTONG2003889, CTONG2003937, CTONG2003945, CTONG2004000, CTONG2004062, CTONG2004115, CTONG2004126, CTONG2004264, CTONG2004305, CTONG2004397, CTONG2004423, CTONG2004454, CTONG2004487, CTONG2004550, CTONG2004669, CTONG2004716, CTONG2004912, CTONG2004941, CTONG2004948, CTONG2005028, CTONG2005049, CTONG2005110, CTONG2005145, CTONG2005265, CTONG2005278, CTONG2005290, CTONG2005374, CTONG2005399, CTONG2005468, CTONG2005553, CTONG2005567, CTONG2005585, CTONG2005615, CTONG2005635, CTONG2005775, CTONG2005795, CTONG2005890, CTONG2005904, CTONG2005913, CTONG2006129, CTONG2006223, CTONG2006235, CTONG2006273, CTONG2006310, CTONG2006377, CTONG2006393, CTONG2006412, CTONG2006449, CTONG2006515, CTONG2006524, CTONG2006568, CTONG2006611, CTONG2006620, CTONG2006666, CTONG2006691, CTONG2006709, CTONG2006798, CTONG2006836, CTONG2006942, CTONG2006964, CTONG2007007, CTONG2007009, CTONG2007072, CTONG2007078, CTONG2007091, CTONG2007104, CTONG2007168, CTONG2007175, CTONG2007259, CTONG2007272, CTONG2007293, CTONG2007297, CTONG2007399, CTONG2007400, CTONG2007417, CTONG2007441, CTONG2007474, CTONG2007500, CTONG2007586, CTONG2007613, CTONG2007623, CTONG2007681, CTONG2007776, CTONG2007779, CTONG2007898, CTONG2007959, CTONG2007970, CTONG2008014, CTONG2008184, CTONG2008262, CTONG2008269, CTONG2008321, CTONG2008343, CTONG2008398, CTONG2008402, CTONG2008405, CTONG2008466, CTONG2008518, CTONG2008521, CTONG2008562, CTONG2008577, CTONG2008595, CTONG2008621, CTONG2008689, CTONG2008720, CTONG2008721, CTONG2008773, CTONG2008792, CTONG2008989, CTONG2009033, CTONG2009108, CTONG2009132, CTONG2009156, CTONG2009181, CTONG2009257, CTONG2009258, CTONG2009268, CTONG2009270, CTONG2009395, CTONG2009423, CTONG2009440, CTONG2009527, CTONG2009529, CTONG2009531, CTONG2009534, CTONG2009570, CTONG2009572, CTONG2009604, CTONG2009643, CTONG2009675, CTONG2009689, CTONG2009725, CTONG2009766, CTONG2009768, CTONG2009844, CTONG2009871, CTONG2009887, CTONG2009891, CTONG2009923, CTONG2009938, CTONG2009955, CTONG2009958, CTONG2009963, CTONG2010018, CTONG2010024, CTONG2010116, CTONG2010133, CTONG2010148, CTONG2010276, CTONG2010330, CTONG2010348, CTONG2010408, CTONG2010508, CTONG2010566, CTONG2010623, CTONG2010649, CTONG2010652, CTONG2010803, CTONG2011188, CTONG2011429, CTONG2011474, CTONG2011676, CTONG2011716, CTONG2011765, CTONG2011779, CTONG2011801, CTONG2011815, CTONG2011822, CTONG2011825, CTONG2011920, CTONG2011985, CTONG2012001, CTONG2012029, CTONG2012050, CTONG2012077, CTONG2012101, CTONG2012123, CTONG2012158, CTONG2012230, CTONG2012401, CTONG2012422, CTONG2012425, CTONG2012447, CTONG2012453, CTONG2012473, CTONG2012476, CTONG2012533, CTONG2012554, CTONG2012607, CTONG2012661, CTONG2012724, CTONG2012738, CTONG2012758, CTONG2012843, CTONG2012847, CTONG2012879, CTONG2012901, CTONG2012996, CTONG2013128, CTONG2013149, CTONG2013156, CTONG2013178, CTONG2013222, CTONG2013284, CTONG2013339, CTONG2013348, CTONG2013352, CTONG2013381, CTONG2013393, CTONG2013511, CTONG2013630, CTONG2013803, CTONG2013934, CTONG2013985, CTONG2013986, CTONG2014032, CTONG2014058, CTONG2014119, CTONG2014165, CTONG2014191, CTONG2014206, CTONG2014234, CTONG2014264, CTONG2014280, CTONG2014369, CTONG2014389, CTONG2014491, CTONG2014630, CTONG2014635, CTONG2014646, CTONG2014705, CTONG2014898, CTONG2014946, CTONG2014954, CTONG2014959, CTONG2014966, CTONG2014995, CTONG2015204, CTONG2015316, CTONG2015330, CTONG2015345, CTONG2015358, CTONG2015434, CTONG2015518, CTONG2015540, CTONG2015596, CTONG2015633, CTONG2015678, CTONG2015717, CTONG2015804, CTONG2015815, CTONG2015866, CTONG2015914, CTONG2015953, CTONG2016056, CTONG2016185, CTONG2016217, CTONG2016355, CTONG2016408, CTONG2016499, CTONG2016565, CTONG2016559, CTONG2016658, CTONG2016775, CTONG2016797, CTONG2016846, CTONG2016869, CTONG2016904, CTONG2016942, CTONG2016953, CTONG2017021, CTONG2017094, CTONG2017292, CTONG2017409, CTONG2017429, CTONG2017444, CTONG2017458, CTONG2017604, CTONG2017650, CTONG2017798, CTONG2017804, CTONG2017814, CTONG2017910, CTONG2017939, CTONG2017989, CTONG2017998, CTONG2018062, CTONG2018069, CTONG2018147, CTONG2018211, CTONG2018217, CTONG2018279, CTONG2018334, CTONG2018343, CTONG2018379, CTONG2018383, CTONG2018413, CTONG2018483, CTONG2018629, CTONG2018632, CTONG2018637, CTONG2018652, CTONG2018653, CTONG2018655, CTONG2018735, CTONG2018739, CTONG2018808, CTONG2018843, CTONG2018898, CTONG2018976, CTONG2019029, CTONG2019063, CTONG2019144, CTONG2019232, CTONG2019248, CTONG2019400, CTONG2019590, CTONG2019652, CTONG2019704, CTONG2019788, CTONG2019822, CTONG2019833, CTONG2020031, CTONG2020108, CTONG2020127, CTONG2020171, CTONG2020374, CTONG2020378, CTONG2020411, CTONG2020445, CTONG2020522, CTONG2020560, CTONG2020582, CTONG2020638, CTONG2020806, CTONG2020831, CTONG2020974, CTONG2021024, CTONG2021132, CTONG2021168, CTONG2021289, CTONG2022153, CTONG2022601, CTONG2022835, CTONG2023021, CTONG2023449, CTONG2023512, CTONG2024031, CTONG2024206, CTONG2024614, CTONG2024749, CTONG2025496, CTONG2025513, CTONG2025516, CTONG2025610, CTONG2025900, CTONG2026513, CTONG2026770, CTONG2026920, CTONG2026987, CTONG2027150, CTONG2027263, CTONG2027327, CTONG2027361, CTONG2027591, CTONG2027736, CTONG2027783, CTONG2027828, CTONG2027959, CTONG2028097, CTONG2028309, CTONG2028486, CTONG2028518, CTONG2028687, CTONG2028758, CTONG3000686, CTONG3000707, CTONG3000896, CTONG3001123, CTONG3001420, CTONG3001501, CTONG3001560, CTONG3001605, CTONG3001746, CTONG3002020, CTONG3002127, CTONG3002370, CTONG3002412, CTONG3002433, CTONG3002518, CTONG3002552, CTONG3002588, CTONG3002674, CTONG3002728, CTONG3002835, CTONG3002909, CTONG3002947, CTONG3002983, CTONG3003165, CTONG3003179, CTONG3003483, CTONG3003553, CTONG3003598, CTONG3003652, CTONG3003654, CTONG3003669, CTONG3003737, CTONG3003905, CTONG3003972, CTONG3004072, CTONG3004317, CTONG3004397, CTONG3004550, CTONG3004576, CTONG3004607, CTONG3004712, CTONG3004726, CTONG3005325, CTONG3005648, CTONG3005713, CTONG3005803, CTONG3005813, CTONG3006067, CTONG3006073, CTONG3006186, CTONG3006629, CTONG3006650, CTONG3006659, CTONG3007244, CTONG3007444, CTONG3007528, CTONG3007586, CTONG3007870, CTONG3008223, CTONG3008252, CTONG3008258, CTONG3008457, CTONG3008496, CTONG3008566, CTONG3008639, CTONG3008831, CTONG3008894, CTONG3008951, CTONG3008959, CTONG3009227, CTONG3009239, CTONG3009287, CTONG3009328, CTONG3009385, D30ST1000066, D30ST1000109, D30ST1000238, D30ST1000267, D30ST1000270, D30ST2000184, D30ST2000618, D30ST2000654, D30ST2000734, D30ST2001328, D30ST2001669, D30ST2001670, D30ST2001788, D30ST2002068, D30ST2002182, D30ST2002223, D30ST2002262, D30ST2002272, D30ST2002417, D30ST2002436, D30ST2002648, D30ST2003024, D30ST2003331, D30ST2003607, D30ST2003797, D30ST2004637, D30ST3000195, D30ST3000258, D30ST3000291, D30ST3000388, D30ST3000493, D60ST2000127, D60ST2000169, D60ST2000245, D60ST2000358, D60ST2000507, D90ST2000031, D90ST2000278, D90ST2000440, D90ST2000869, D90ST2001319, D90ST2001433, D90ST2002397, D90ST2002608, D90ST2002673, D90ST2003106, D90ST2003108, D90ST2003137, D90ST2003580, D90ST2003594, D90ST2003762, D90ST2003791, D90ST2003989, D90ST2004018, D90ST2004073, D90ST2004417, DFNES1000003, DFNES1000083, DFNES1000107, DFNES1000150, DFNES1000185, DFNES2000143, DFNES2000146, DFNES2000153, DFNES2000212, DFNES2000268, DFNES2000292, DFNES2000335, DFNES2000426, DFNES2000432, DFNES2000443, DFNES2000457, DFNES2000471, DFNES2000526, DFNES2000913, DFNES2001091, DFNES2001096, DFNES2001108, DFNES2001177, DFNES2001404, DFNES2001564, DFNES2001565, DFNES2001647, DFNES2001800, DFNES2001829, DFNES2002220, DFNES2002550, DFNES2002588, DFNES2002817, DFNES2002966, DFNES2003081, DFNES2003192, DFNES2003255, DFNES2003742, DFNES2004346, DFNES2004354, DFNES2004371, DFNES2004383, DFNES2004608, DFNES2004684, DFNES2005266, DFNES2005527, DFNES2005690, DFNES2005779, DFNES2005875, DFNES2006346, DFNES2006944, DFNES2007113, DFNES2007299, DFNES2007634, DFNES2007641, DFNES2007757, DFNES2008088, DFNES2008160, DFNES2008280, DFNES2008881, DFNES2009482, DFNES2010502, DFNES2011192, DFNES2011221, DFNES2011239, DFNES2011245, DFNES2011380, DFNES2011499, ERLTF1000021, ERLTF2000324, ERLTF2000465, FCBBF1000023, FCBBF1000024, FCBBF1000025, FCBBF1000038, FCBBF1000053, FCBBF1000061, FCBBF1000063, FCBBF1000069, FCBBF1000077, FCBBF1000115, FCBBF1000117, FCBBF1000118, FCBBF1000121, FCBBF1000125, FCBBF1000131, FCBBF1000155, FCBBF1000157, FCBBF1000171, FCBBF1000174, FCBBF1000182, FCBBF1000197, FCBBF1000198, FCBBF1000206, FCBBF1000220, FCBBF1000232, FCBBF1000233, FCBBF1000243, FCBBF1000270, FCBBF1000272, FCBBF1000294, FCBBF1000297, FCBBF1000305, FCBBF1000314, FCBBF1000322, FCBBF1000349, FCBBF1000374, FCBBF1000376, FCBBF1000377, FCBBF1000395, FCBBF1000397, FCBBF1000403, FCBBF1000412, FCBBF1000425, FCBBF1000437, FCBBF1000449, FCBBF1000466, FCBBF1000476, FCBBF1000506, FCBBF1000509, FCBBF1000546, FCBBF1000550, FCBBF1000556, FCBBF1000563, FCBBF1000574, FCBBF1000581, FCBBF1000582, FCBBF1000598, FCBBF1000604, FCBBF1000618, FCBBF1000627, FCBBF1000671, FCBBF1000675, FCBBF1000684, FCBBF1000686, FCBBF1000687, FCBBF1000691, FCBBF1000748, FCBBF1000760, FCBBF2000038, FCBBF2000087, FCBBF2000094, FCBBF2000105, FCBBF2000123, FCBBF2000195, FCBBF2000199, FCBBF2000214, FCBBF2000232, FCBBF2000259, FCBBF2000276, FCBBF2000291, FCBBF2000362, FCBBF2000379, FCBBF2000473, FCBBF2000502, FCBBF2000566, FCBBF2000576, FCBBF2000591, FCBBF2000677, FCBBF2000678, FCBBF2000685, FCBBF2000733, FCBBF2000782, FCBBF2000808, FCBBF2000815, FCBBF2000825, FCBBF2000885, FCBBF2000940, FCBBF2000951, FCBBF2001001, FCBBF2001088, FCBBF2001105, FCBBF2001116, FCBBF2001183, FCBBF2001188, FCBBF2001211, FCBBF2001238, FCBBF2001243, FCBBF2001299, FCBBF2001309, FCBBF2001400, FCBBF2001427, FCBBF2001480, FCBBF2001529, FCBBF2001594, FCBBF2001672, FCBBF2001675, FCBBF2001718, FCBBF2001720, FCBBF2001817, FCBBF2001868, FCBBF2002044, FCBBF2002111, FCBBF2002281, FCBBF2002349, FCBBF2002370, FCBBF2002541, FCBBF2002626, FCBBF2002801, FCBBF2002897, FCBBF2002898, FCBBF2002904, FCBBF2002928, FCBBF2002953, FCBBF2003083, FCBBF2003102, FCBBF2003269, FCBBF2003293, FCBBF2003297, FCBBF2003395, FCBBF2003528, FCBBF2003543, FCBBF2003549, FCBBF2003567, FCBBF2003636, FCBBF2003823, FCBBF2003895, FCBBF2004066, FCBBF2004090, FCBBF2004138, FCBBF2004217, FCBBF2004256, FCBBF2004373, FCBBF2004448, FCBBF2004671, FCBBF2004707, FCBBF2004788, FCBBF2005069, FCBBF2005122, FCBBF2005428, FCBBF2005439, FCBBF2005538, FCBBF2005637, FCBBF2005645, FCBBF2005733, FCBBF2005909, FCBBF2005966, FCBBF2006131, FCBBF2006380, FCBBF2006418, FCBBF2006452, FCBBF2006634, FCBBF2006781, FCBBF2007012, FCBBF2007186, FCBBF2007265, FCBBF2007302, FCBBF2007556, FCBBF2007610, FCBBF2007633, FCBBF2007840, FCBBF3000102, FCBBF3000110, FCBBF3000115, FCBBF3000120, FCBBF3000168, FCBBF3000175, FCBBF3000227, FCBBF3000228, FCBBF3000229, FCBBF3000233, FCBBF3000269, FCBBF3000361, FCBBF3000367, FCBBF3000388, FCBBF3000434, FCBBF3000462, FCBBF3000473, FCBBF3000501, FCBBF3000518, FCBBF3000536, FCBBF3000550, FCBBF3000847, FCBBF3001018, FCBBF3001020, FCBBF3001081, FCBBF3001235, FCBBF3001281, FCBBF3001302, FCBBF3001377, FCBBF3001594, FCBBF3001657, FCBBF3001818, FCBBF3001855, FCBBF3001890, FCBBF3001912, FCBBF3001914, FCBBF3001918, FCBBF3001924, FCBBF3001977, FCBBF3002163, FCBBF3002188, FCBBF3002190, FCBBF3002268, FCBBF3002475, FCBBF3002556, FCBBF3002592, FCBBF3002658, FCBBF3002782, FCBBF3002818, FCBBF3002925, FCBBF3003216, FCBBF3003305, FCBBF3003373, FCBBF3003435, FCBBF3003475, FCBBF3003481, FCBBF3003557, FCBBF3003787, FCBBF3003902, FCBBF3004021, FCBBF3004041, FCBBF3004261, FCBBF3004323, FCBBF3004390, FCBBF3004409, FCBBF3004473, FCBBF3004502, FCBBF3004715, FCBBF3004842, FCBBF3004847, FCBBF3004955, FCBBF3005160, FCBBF3005218, FCBBF3005444, FCBBF3005497, FCBBF3005698, FCBBF3005729, FCBBF3006171, FCBBF3006249, FCBBF3006288, FCBBF3006399, FCBBF3006628, FCBBF3006821, FCBBF3007077, FCBBF3007150, FCBBF3007152, FCBBF3007242, FCBBF3007248, FCBBF3007453, FCBBF3007462, FCBBF3007540, FCBBF3007597, FCBBF3007604, FCBBF3007631, FCBBF3007829, FCBBF3007855, FCBBF3007859, FCBBF3007860, FCBBF3008073, FCBBF3008100, FCBBF3008153, FCBBF3008159, FCBBF3008251, FCBBF3008311, FCBBF3008362, FCBBF3008382, FCBBF3008475, FCBBF3008556, FCBBF3008644, FCBBF3008689, FCBBF3008748, FCBBF3008870, FCBBF3008938, FCBBF3008944, FCBBF3009069, FCBBF3009101, FCBBF3009152, FCBBF3009256, FCBBF3009317, FCBBF3009428, FCBBF3009464, FCBBF3009479, FCBBF3009526, FCBBF3009703, FCBBF3009717, FCBBF3009888, FCBBF3009949, FCBBF3009978, FCBBF3010008, FCBBF3010012, FCBBF3010124, FCBBF3010130, FCBBF3010142, FCBBF3010149, FCBBF3010211, FCBBF3010361, FCBBF3010508, FCBBF3010544, FCBBF3010586, FCBBF3010601, FCBBF3010665, FCBBF3010695, FCBBF3010729, FCBBF3010733, FCBBF3011003, FCBBF3011418, FCBBF3011485, FCBBF3011523, FCBBF3011570, FCBBF3011592, FCBBF3011867, FCBBF3011889, FCBBF3012170, FCBBF3012182, FCBBF3012288, FCBBF3012332, FCBBF3012347, FCBBF3012443, FCBBF3012588, FCBBF3012667, FCBBF3012842, FCBBF3012901, FCBBF3013041, FCBBF3013058, FCBBF3013205, FCBBF3013266, FCBBF3013307, FCBBF3013341, FCBBF3013506, FCBBF3013589, FCBBF3013623, FCBBF3013800, FCBBF3013846, FCBBF3014229, FCBBF3014260, FCBBF3014355, FCBBF3014567, FCBBF3014770, FCBBF3015100, FCBBF3015119, FCBBF3015131, FCBBF3015317, FCBBF3015727, FCBBF3015758, FCBBF3015809, FCBBF3015870, FCBBF3016018, FCBBF3016134, FCBBF3016178, FCBBF3016451, FCBBF3016618, FCBBF3016622, FCBBF3016644, FCBBF3016667, FCBBF3016987, FCBBF3017024, FCBBF3017059, FCBBF3017071, FCBBF3017123, FCBBF3017233, FCBBF3017255, FCBBF3017288, FCBBF3017396, FCBBF3017531, FCBBF3017535, FCBBF3017681, FCBBF3017729, FCBBF3017873, FCBBF3017918, FCBBF3017974, FCBBF3018067, FCBBF3018173, FCBBF3018453, FCBBF3018591, FCBBF3018753, FCBBF3018796, FCBBF3018826, FCBBF3018949, FCBBF3019085, FCBBF3019320, FCBBF3019437, FCBBF3019564, FCBBF3019569, FCBBF3019570, FCBBF3019663, FCBBF3019716, FCBBF3019784, FCBBF3019839, FCBBF3019867, FCBBF3019961, FCBBF3020030, FCBBF3020138, FCBBF3020140, FCBBF3020163, FCBBF3020232, FCBBF3020599, FCBBF3021026, FCBBF3021191, FCBBF3021221, FCBBF3021501, FCBBF3021506, FCBBF3021524, FCBBF3021807, FCBBF3021940, FCBBF3021985, FCBBF3022005, FCBBF3022291, FCBBF3022311, FCBBF3022504, FCBBF3022566, FCBBF3022593, FCBBF3022765, FCBBF3022767, FCBBF3023061, FCBBF3023372, FCBBF3023443, FCBBF3023599, FCBBF3023704, FCBBF3023887, FCBBF3023895, FCBBF3024002, FCBBF3024096, FCBBF3024225, FCBBF3024266, FCBBF3024364, FCBBF3024623, FCBBF3024793, FCBBF3024911, FCBBF3025098, FCBBF3025252, FCBBF3025280, FCBBF3025285, FCBBF3025417, FCBBF3025528, FCBBF3025568, FCBBF3025650, FCBBF3025674, FCBBF3025730, FCBBF3025737, FCBBF3025905, FCBBF3026021, FCBBF3026048, FCBBF3026251, FCBBF3026308, FCBBF3026651, FCBBF3026678, FCBBF3026692, FCBBF3027104, FCBBF3027199, FCBBF3027328, FCBBF3027559, FCBBF3027717, FCBBF3027755, FCBBF3027768, FCBBF3027854, FCBBF3027863, FCBBF3027903, FCBBF3028102, FCBBF3028143, FCBBF3028188, FCBBF3028202, FCBBF3028244, FCBBF3028472, FCBBF3028528, FCBBF3028582, FCBBF3028593, FCBBF3028671, FCBBF3028794, FCBBF4000061, FCBBF4000076, FCBBF4000142, FCBBF4000173, FCBBF4000192, FCBBF4000193, FCBBF4000268, FCBBF4000282, FCBBF4000399, FCBBF4000415, FCBBF4000500, FCBBF4000529, FCBBF4000548, FCBBF5000041, FCBBF5000061, FCBBF5000165, FCBBF5000261, FCBBF5000325, FCBBF5000353, FCBBF5000384, FCBBF5000483, FCBBF5000495, FEBRA1000005, FEBRA1000008, FEBRA1000022, FEBRA1000030, FEBRA1000057, FEBRA1000088, FEBRA1000138, FEBRA1000148, FEBRA1000149, FEBRA1000183, FEBRA1000188, FEBRA1000189, FEBRA1000190, FEBRA2000007, FEBRA2000021, FEBRA2000035, FEBRA2000053, FEBRA2000105, FEBRA2000126, FEBRA2000210, FEBRA2000220, FEBRA2000228, FEBRA2000253, FEBRA2000282, FEBRA2000286, FEBRA2000297, FEBRA2000311, FEBRA2000321, FEBRA2000333, FEBRA2000377, FEBRA2000378, FEBRA2000391, FEBRA2000394, FEBRA2000397, FEBRA2000399, FEBRA2000402, FEBRA2000404, FEBRA2000409, FEBRA2000415, FEBRA2000436, FEBRA2000438, FEBRA2000452, FEBRA2000454, FEBRA2000462, FEBRA2000468, FEBRA2000491, FEBRA2000504, FEBRA2000510, FEBRA2000532, FEBRA2000536, FEBRA2000538, FEBRA2000575, FEBRA2000581, FEBRA2000656, FEBRA2000659, FEBRA2000680, FEBRA2000690, FEBRA2000727, FEBRA2000734, FEBRA2000757, FEBRA2000762, FEBRA2000771, FEBRA2000772, FEBRA2000782, FEBRA2000790, FEBRA2000793, FEBRA2000803, FEBRA2000805, FEBRA2000809, FEBRA2000815, FEBRA2000856, FEBRA2000862, FEBRA2000877, FEBRA2000880, FEBRA2000881, FEBRA2000901, FEBRA2000909, FEBRA2000917, FEBRA2000928, FEBRA2000936, FEBRA2000937, FEBRA2000959, FEBRA2000972, FEBRA2001004, FEBRA2001012, FEBRA2001020, FEBRA2001093, FEBRA2001124, FEBRA2001133, FEBRA2001146, FEBRA2001161, FEBRA2001175, FEBRA2001197, FEBRA2001217, FEBRA2001227, FEBRA2001245, FEBRA2001267, FEBRA2001334, FEBRA2001351, FEBRA2001383, FEBRA2001438, FEBRA2001440, FEBRA2001487, FEBRA2001492, FEBRA2001523, FEBRA2001561, FEBRA2001571, FEBRA2001581, FEBRA2001584, FEBRA2001590, FEBRA2001591, FEBRA2001610, FEBRA2001620, FEBRA2001659, FEBRA2001669, FEBRA2001698, FEBRA2001705, FEBRA2001706, FEBRA2001715, FEBRA2001745, FEBRA2001752, FEBRA2001772, FEBRA2001790, FEBRA2001814, FEBRA2001828, FEBRA2001867, FEBRA2001914, FEBRA2001974, FEBRA2001989, FEBRA2001990, FEBRA2002009, FEBRA2002027, FEBRA2002086, FEBRA2002109, FEBRA2002191, FEBRA2002260, FEBRA2002352, FEBRA2002399, FEBRA2002410, FEBRA2002429, FEBRA2002442, FEBRA2002508, FEBRA2002525, FEBRA2002527, FEBRA2002552, FEBRA2002574, FEBRA2002601, FEBRA2002611, FEBRA2002628, FEBRA2002662, FEBRA2002682, FEBRA2002707, FEBRA2002727, FEBRA2002781, FEBRA2002783, FEBRA2002792, FEBRA2002818, FEBRA2002858, FEBRA2002882, FEBRA2002897, FEBRA2002908, FEBRA2002931, FEBRA2002962, FEBRA2002986, FEBRA2003054, FEBRA2003100, FEBRA2003115, FEBRA2003128, FEBRA2003155, FEBRA2003163, FEBRA2003181, FEBRA2003198, FEBRA2003253, FEBRA2003258, FEBRA2003275, FEBRA2003308, FEBRA2003327, FEBRA2003429, FEBRA2003436, FEBRA2003454, FEBRA2003468, FEBRA2003470, FEBRA2003520, FEBRA2003524, FEBRA2003541, FEBRA2003675, FEBRA2003707, FEBRA2003711, FEBRA2003726, FEBRA2003750, FEBRA2003822, FEBRA2003833, FEBRA2003897, FEBRA2003907, FEBRA2003930, FEBRA2004023, FEBRA2004026, FEBRA2004029, FEBRA2004042, FEBRA2004053, FEBRA2004056, FEBRA2004091, FEBRA2004110, FEBRA2004191, FEBRA2004202, FEBRA2004219, FEBRA2004237, FEBRA2004268, FEBRA2004293, FEBRA2004325, FEBRA2004329, FEBRA2004331, FEBRA2004412, FEBRA2004443, FEBRA2004485, FEBRA2004490, FEBRA2004538, FEBRA2004592, FEBRA2004620, FEBRA2004628, FEBRA2004651, FEBRA2004767, FEBRA2004813, FEBRA2004818, FEBRA2004840, FEBRA2004852, FEBRA2004867, FEBRA2004914, FEBRA2004933, FEBRA2004987, FEBRA2005014, FEBRA2005036, FEBRA2005079, FEBRA2005114, FEBRA2005216, FEBRA2005291, FEBRA2005361, FEBRA2005377, FEBRA2005380, FEBRA2005416, FEBRA2005427, FEBRA2005458, FEBRA2005476, FEBRA2005701, FEBRA2005726, FEBRA2005752, FEBRA2005778, FEBRA2005787, FEBRA2005788, FEBRA2005824, FEBRA2005995, FEBRA2005998, FEBRA2006055, FEBRA2006061, FEBRA2006092, FEBRA2006112, FEBRA2006150, FEBRA2006165, FEBRA2006255, FEBRA2006270, FEBRA2006315, FEBRA2006346, FEBRA2006354, FEBRA2006357, FEBRA2006368, FEBRA2006370, FEBRA2006372, FEBRA2006379, FEBRA2006396, FEBRA2006401, FEBRA2006409, FEBRA2006418, FEBRA2006427, FEBRA2006476, FEBRA2006485, FEBRA2006491, FEBRA2006519, FEBRA2006521, FEBRA2006553, FEBRA2006627, FEBRA2006664, FEBRA2006667, FEBRA2006726, FEBRA2006736, FEBRA2006793, FEBRA2006808, FEBRA2006817, FEBRA2006873, FEBRA2006890, FEBRA2006942, FEBRA2006977, FEBRA2007017, FEBRA2007176, FEBRA2007200, FEBRA2007212, FEBRA2007247, FEBRA2007280, FEBRA2007414, FEBRA2007436, FEBRA2007449, FEBRA2007458, FEBRA2007534, FEBRA2007544, FEBRA2007551, FEBRA2007566, FEBRA2007589, FEBRA2007613, FEBRA2007620, FEBRA2007708, FEBRA2007714, FEBRA2007793, FEBRA2007801, FEBRA2007818, FEBRA2007823, FEBRA2007900, FEBRA2007901, FEBRA2007931, FEBRA2007957, FEBRA2008009, FEBRA2008036, FEBRA2008081, FEBRA2008086, FEBRA2008134, FEBRA2008135, FEBRA2008159, FEBRA2008165, FEBRA2008172, FEBRA2008201, FEBRA2008210, FEBRA2008255, FEBRA2008265, FEBRA2008266, FEBRA2008282, FEBRA2008302, FEBRA2008311, FEBRA2008341, FEBRA2008360, FEBRA2008459, FEBRA2008468, FEBRA2008475, FEBRA2008481, FEBRA2008542, FEBRA2008660, FEBRA2008662, FEBRA2008681, FEBRA2008692, FEBRA2008741, FEBRA2008836, FEBRA2008859, FEBRA2008861, FEBRA2008866, FEBRA2008881, FEBRA2008928, FEBRA2008983, FEBRA2009016, FEBRA2009022, FEBRA2009029, FEBRA2009074, FEBRA2009117, FEBRA2009120, FEBRA2009162, FEBRA2009185, FEBRA2009240, FEBRA2009265, FEBRA2009276, FEBRA2009289, FEBRA2009327, FEBRA2009328, FEBRA2009352, FEBRA2009362, FEBRA2009385, FEBRA2009416, FEBRA2009437, FEBRA2009478, FEBRA2009507, FEBRA2009514, FEBRA2009541, FEBRA2009567, FEBRA2009588, FEBRA2009731, FEBRA2009754, FEBRA2009780, FEBRA2009846, FEBRA2009986, FEBRA2010141, FEBRA2010299, FEBRA2010484, FEBRA2010719, FEBRA2010746, FEBRA2010768, FEBRA2010802, FEBRA2011063, FEBRA2011090, FEBRA2011356, FEBRA2011392, FEBRA2011414, FEBRA2011593, FEBRA2011665, FEBRA2012090, FEBRA2012120, FEBRA2012181, FEBRA2012195, FEBRA2012397, FEBRA2012418, FEBRA2012507, FEBRA2012625, FEBRA2013019, FEBRA2013069, FEBRA2013274, FEBRA2013465, FEBRA2013570, FEBRA2013699, FEBRA2013905, FEBRA2013951, FEBRA2014010, FEBRA2014122, FEBRA2014198, FEBRA2014213, FEBRA2014297, FEBRA2014443, FEBRA2014578, FEBRA2014939, FEBRA2015076, FEBRA2015085, FEBRA2015175, FEBRA2015292, FEBRA2015588, FEBRA2016112, FEBRA2016398, FEBRA2016572, FEBRA2016583, FEBRA2016621, FEBRA2016654, FEBRA2016739, FEBRA2017024, FEBRA2017098, FEBRA2017138, FEBRA2017154, FEBRA2017200, FEBRA2017223, FEBRA2017333, FEBRA2017502, FEBRA2017533, FEBRA2017680, FEBRA2017736, FEBRA2017780, FEBRA2017811, FEBRA2017850, FEBRA2018051, FEBRA2018203, FEBRA2018407, FEBRA2018433, FEBRA2018476, FEBRA2018746, FEBRA2019172, FEBRA2019242, FEBRA2019298, FEBRA2019389, FEBRA2019457, FEBRA2019519, FEBRA2019582, FEBRA2019637, FEBRA2019663, FEBRA2019690, FEBRA2019711, FEBRA2019867, FEBRA2020406, FEBRA2020582, FEBRA2020668, FEBRA2020801, FEBRA2020845, FEBRA2020886, FEBRA2020977, FEBRA2021032, FEBRA2021134, FEBRA2021171, FEBRA2021339, FEBRA2021431, FEBRA2021497, FEBRA2021550, FEBRA2021571, FEBRA2021636, FEBRA2021864, FEBRA2021892, FEBRA2021908, FEBRA2021966, FEBRA2022013, FEBRA2022148, FEBRA2022204, FEBRA2022255, FEBRA2022322, FEBRA2022601, FEBRA2022696, FEBRA2022729, FEBRA2022787, FEBRA2022911, FEBRA2022956, FEBRA2022963, FEBRA2022972, FEBRA2023227, FEBRA2023285, FEBRA2023351, FEBRA2023377, FEBRA2023498, FEBRA2023550, FEBRA2023721, FEBRA2023989, FEBRA2023990, FEBRA2024019, FEBRA2024136, FEBRA2024150, FEBRA2024343, FEBRA2024570, FEBRA2024693, FEBRA2024727, FEBRA2024744, FEBRA2024797, FEBRA2024987, FEBRA2025249, FEBRA2025463, FEBRA2025477, FEBRA2026474, FEBRA2026582, FEBRA2026629, FEBRA2026769, FEBRA2026879, FEBRA2026890, FEBRA2026977, FEBRA2026984, FEBRA2027082, FEBRA2027297, FEBRA2027352, FEBRA2027364, FEBRA2027609, FEBRA2028158, FEBRA2028222, FEBRA2028366, FEBRA2028457, FEBRA2028477, FEBRA2028503, FEBRA2028516, HELAC2000158, HELAC2000301, HHDPC1000001, HHDPC1000065, HHDPC1000118, HHDPC2000055, HHDPC2000070, HHDPC2000102, HHDPC2000104, HHDPC2000149, HHDPC2000258, HHDPC2000315, HHDPC2000455, HHDPC2000456, HHDPC2000462, HHDPC2000572, HHDPC2000656, HHDPC2000692, HHDPC2001337, HHDPC2001432, HHDPC2001896, HHDPC2002963, HHDPC2003049, HHDPC2003113, HHDPC2003472, HHDPC2004757, HHDPC2005185, HHDPC2005513, HHDPC2005742, HHDPC2005794, HHDPC2006460, HHDPC2006862, HHDPC2006927, HHDPC2007267, HHDPC2007302, HHDPC2007775, HHDPC2008123, HHDPC2008185, HHDPC2008279, HHDPC2008414, HHDPC2008474, HHDPC2008816, HHDPC2008843, HHDPC2009114, HHDPC2009178, HHDPC2009208, HHDPC2009272, HHDPC2009528, HLUNG1000017, HLUNG1000024, HLUNG1000030, HLUNG1000034, HLUNG1000037, HLUNG1000053, HLUNG1000064, HLUNG1000076, HLUNG1000084, HLUNG1000091, HLUNG1000099, HLUNG1000104, HLUNG1000105, HLUNG1000110, HLUNG1000151, HLUNG1000169, HLUNG2000004, HLUNG2000014, HLUNG2000027, HLUNG2000068, HLUNG2000116, HLUNG2000125, HLUNG2000130, HLUNG2000142, HLUNG2000174, HLUNG2000176, HLUNG2000217, HLUNG2000232, HLUNG2000255, HLUNG2000281, HLUNG2000314, HLUNG2000315, HLUNG2000340, HLUNG2000362, HLUNG2000363, HLUNG2000412, HLUNG2000431, HLUNG2000480, HLUNG2000489, HLUNG2000549, HLUNG2000557, HLUNG2000570, HLUNG2000751, HLUNG2000761, HLUNG2000777, HLUNG2000846, HLUNG2000870, HLUNG2000884, HLUNG2000926, HLUNG2000950, HLUNG2000955, HLUNG2000970, HLUNG2001013, HLUNG2001126, HLUNG2001144, HLUNG2001146, HLUNG2001214, HLUNG2001439, HLUNG2001459, HLUNG2001507, HLUNG2001518, HLUNG2001633, HLUNG2001677, HLUNG2001814, HLUNG2001996, HLUNG2002006, HLUNG2002050, HLUNG2002059, HLUNG2002085, HLUNG2002145, HLUNG2002295, HLUNG2002303, HLUNG2002334, HLUNG2002405, HLUNG2002429, HLUNG2002562, HLUNG2002648, HLUNG2002659, HLUNG2002707, HLUNG2002811, HLUNG2002916, HLUNG2002942, HLUNG2002949, HLUNG2002958, HLUNG2002982, HLUNG2003003, HLUNG2003042, HLUNG2003049, HLUNG2003061, HLUNG2003162, HLUNG2003246, HLUNG2003306, HLUNG2003335, HLUNG2003378, HLUNG2003497, HLUNG2003691, HLUNG2003710, HLUNG2003714, HLUNG2003716, HLUNG2003778, HLUNG2003833, HLUNG2003872, HLUNG2003918, HLUNG2003991, HLUNG2004014, HLUNG2004037, HLUNG2004067, HLUNG2004154, HLUNG2004159, HLUNG2004170, HLUNG2004217, HLUNG2004273, HLUNG2004388, HLUNG2004416, HLUNG2004521, HLUNG2004684, HLUNG2004707, HLUNG2004774, HLUNG2004775, HLUNG2005012, HLUNG2005030, HLUNG2005045, HLUNG2005076, HLUNG2005133, HLUNG2005203, HLUNG2005230, HLUNG2005479, HLUNG2005524, HLUNG2005656, HLUNG2005738, HLUNG2005774, HLUNG2005813, HLUNG2005924, HLUNG2006026, HLUNG2006067, HLUNG2006094, HLUNG2006370, HLUNG2006397, HLUNG2006570, HLUNG2006599, HLUNG2006614, HLUNG2006671, HLUNG2006781, HLUNG2006812, HLUNG2006843, HLUNG2006852, HLUNG2006935, HLUNG2007041, HLUNG2007163, HLUNG2007219, HLUNG2007433, HLUNG2007931, HLUNG2008066, HLUNG2008139, HLUNG2008153, HLUNG2008225, HLUNG2008235, HLUNG2008247, HLUNG2008333, HLUNG2008348, HLUNG2008384, HLUNG2008396, HLUNG2008439, HLUNG2008479, HLUNG2008480, HLUNG2008521, HLUNG2008637, HLUNG2008833, HLUNG2008875, HLUNG2008885, HLUNG2008958, HLUNG2008959, HLUNG2009067, HLUNG2009215, HLUNG2009225, HLUNG2009253, HLUNG2009303, HLUNG2009413, HLUNG2009729, HLUNG2010181, HLUNG2010464, HLUNG2010562, HLUNG2010845, HLUNG2011041, HLUNG2011298, HLUNG2011461, HLUNG2011833, HLUNG2012049, HLUNG2012287, HLUNG2012315, HLUNG2012546, HLUNG2012600, HLUNG2012727, HLUNG2013097, HLUNG2013204, HLUNG2013304, HLUNG2013350, HLUNG2013622, HLUNG2013643, HLUNG2013784, HLUNG2013851, HLUNG2014262, HLUNG2014288, HLUNG2014449, HLUNG2014821, HLUNG2015184, HLUNG2015418, HLUNG2015548, HLUNG2015578, HLUNG2015617, HLUNG2016022, HLUNG2016862, HLUNG2017262, HLUNG2017286, HLUNG2017307, HLUNG2017350, HLUNG2017546, HLUNG2017806, HLUNG2018029, HLUNG2018282, HLUNG2018626, HLUNG2019058, HSYRA1000131, HSYRA1000137, HSYRA1000148, HSYRA1000152, HSYRA1000178, HSYRA2000044, HSYRA2000135, HSYRA2000190, HSYRA2000221, HSYRA2000237, HSYRA2000253, HSYRA2000371, HSYRA2000424, HSYRA2000507, HSYRA2000510, HSYRA2000605, HSYRA2000629, HSYRA2000640, HSYRA2000706, HSYRA2000760, HSYRA2000787, HSYRA2000828, HSYRA2000832, HSYRA2000925, HSYRA2000927, HSYRA2001003, HSYRA2001105, HSYRA2001142, HSYRA2001153, HSYRA2001225, HSYRA2001255, HSYRA2001332, HSYRA2001353, HSYRA2001396, HSYRA2001420, HSYRA2001484, HSYRA2001552, HSYRA2001580, HSYRA2001595, HSYRA2001631, HSYRA2001638, HSYRA2001983, HSYRA2002103, HSYRA2002590, HSYRA2002741, HSYRA2003168, HSYRA2004550, HSYRA2004858, HSYRA2005456, HSYRA2005496, HSYRA2005970, HSYRA2006049, HSYRA2006873, HSYRA2007241, HSYRA2007338, HSYRA2007650, HSYRA2007667, HSYRA2008154, HSYRA2008714, HSYRA2009102, IMR321000155, IMR321000161, IMR321000165, IMR321000193, IMR321000207, IMR321000210, IMR321000219, IMR321000230, IMR321000242, IMR321000253, IMR321000266, IMR322000010, IMR322000107, IMR322000121, IMR322000127, IMR322000144, IMR322000152, IMR322000164, IMR322000243, IMR322000302, IMR322000316, IMR322000379, IMR322000383, IMR322000418, IMR322000518, IMR322000604, IMR322000609, IMR322000656, IMR322000672, IMR322000775, IMR322000811, IMR322000819, IMR322000838, IMR322000859, IMR322000863, IMR322000917, IMR322000918, IMR322000919, IMR322000935, IMR322000953, IMR322000973, IMR322000984, IMR322001018, IMR322001049, IMR322001167, IMR322001185, IMR322001218, IMR322001245, IMR322001318, IMR322001322, IMR322001332, IMR322001380, IMR322001438, IMR322001452, IMR322001491, IMR322001541, IMR322001584, IMR322001665, IMR322001670, IMR322001724, IMR322001879, IMR322002035, IMR322002110, IMR322002470, IMR322002993, IMR322003675, IMR322004768, IMR322005293, IMR322005833, IMR322006012, IMR322006222, IMR322006495, IMR322006520, IMR322006886, IMR322006947, IMR322007078, IMR322007225, IMR322007704, IMR322008651, IMR322009710, IMR322009807, IMR322010295, IMR322010953, IMR322011689, IMR322012314, IMR322012529, IMR322013053, IMR322013396, IMR322013731, IMR322013805, IMR322015523, IMR322016146, IMR322017049, IMR322018117, IMR322018192, IMR322019070, JCMLC2000273, KIDNE1000012, KIDNE1000015, KIDNE1000028, KIDNE1000036, KIDNE1000064, KIDNE1000104, KIDNE1000121, KIDNE1000145, KIDNE1000152, KIDNE2000026, KIDNE2000041, KIDNE2000046, KIDNE2000051, KIDNE2000070, KIDNE2000167, KIDNE2000174, KIDNE2000192, KIDNE2000227, KIDNE2000244, KIDNE2000245, KIDNE2000252, KIDNE2000266, KIDNE2000287, KIDNE2000317, KIDNE2000328, KIDNE2000330, KIDNE2000335, KIDNE2000349, KIDNE2000375, KIDNE2000383, KIDNE2000394, KIDNE2000422, KIDNE2000493, KIDNE2000510, KIDNE2000513, KIDNE2000517, KIDNE2000519, KIDNE2000555, KIDNE2000574, KIDNE2000624, KIDNE2000678, KIDNE2000717, KIDNE2000721, KIDNE2000722, KIDNE2000777, KIDNE2000801, KIDNE2000833, KIDNE2000846, KIDNE2000867, KIDNE2000947, KIDNE2001117, KIDNE2001140, KIDNE2001162, KIDNE2001269, KIDNE2001361, KIDNE2001373, KIDNE2001636, KIDNE2001713, KIDNE2001802, KIDNE2001840, KIDNE2001847, KIDNE2001857, KIDNE2001873, KIDNE2001897, KIDNE2001931, KIDNE2001979, KIDNE2002015, KIDNE2002162, KIDNE2002168, KIDNE2002191, KIDNE2002198, KIDNE2002252, KIDNE2002262, KIDNE2002265, KIDNE2002438, KIDNE2002483, KIDNE2002725, KIDNE2002768, KIDNE2002795, KIDNE2002798, KIDNE2002845, KIDNE2002882, KIDNE2002991, KIDNE2003185, KIDNE2003188, KIDNE2003233, KIDNE2003305, KIDNE2003316, KIDNE2003335, KIDNE2003357, KIDNE2003373, KIDNE2003377, KIDNE2003752, KIDNE2003764, KIDNE2003837, KIDNE2003941, KIDNE2003994, KIDNE2004034, KIDNE2004054, KIDNE2004084, KIDNE2004095, KIDNE2004115, KIDNE2004233, KIDNE2004262, KIDNE2004279, KIDNE2004294, KIDNE2004295, KIDNE2004305, KIDNE2004344, KIDNE2004394, KIDNE2004411, KIDNE2004475, KIDNE2004519, KIDNE2004520, KIDNE2004531, KIDNE2004534, KIDNE2004562, KIDNE2004579, KIDNE2004626, KIDNE2004681, KIDNE2004828, KIDNE2004846, KIDNE2004864, KIDNE2004879, KIDNE2004981, KIDNE2004985, KIDNE2004999, KIDNE2005038, KIDNE2005042, KIDNE2005062, KIDNE2005266, KIDNE2005296, KIDNE2005321, KIDNE2005327, KIDNE2005336, KIDNE2005400, KIDNE2005424, KIDNE2005477, KIDNE2005526, KIDNE2005543, KIDNE2005603, KIDNE2005629, KIDNE2005781, KIDNE2005798, KIDNE2005854, KIDNE2005908, KIDNE2005937, KIDNE2006009, KIDNE2006014, KIDNE2006030, KIDNE2006039, KIDNE2006053, KIDNE2006092, KIDNE2006145, KIDNE2006149, KIDNE2006210, KIDNE2006299, KIDNE2006334, KIDNE2006353, KIDNE2006376, KIDNE2006378, KIDNE2006465, KIDNE2006580, KIDNE2006652, KIDNE2006687, KIDNE2006733, KIDNE2006760, KIDNE2006775, KIDNE2006811, KIDNE2006820, KIDNE2006880, KIDNE2007005, KIDNE2007040, KIDNE2007077, KIDNE2007186, KIDNE2007222, KIDNE2007328, KIDNE2007352, KIDNE2007356, KIDNE2007422, KIDNE2007569, KIDNE2007810, KIDNE2007811, KIDNE2007910, KIDNE2007944, KIDNE2007954, KIDNE2008022, KIDNE2008069, KIDNE2008072, KIDNE2008116, KIDNE2008117, KIDNE2008218, KIDNE2008315, KIDNE2008362, KIDNE2008378, KIDNE2008403, KIDNE2008404, KIDNE2008446, KIDNE2008473, KIDNE2008480, KIDNE2008649, KIDNE2008666, KIDNE2008697, KIDNE2008758, KIDNE2008788, KIDNE2008795, KIDNE2008824, KIDNE2008832, KIDNE2008869, KIDNE2008914, KIDNE2008975, KIDNE2008987, KIDNE2009019, KIDNE2009109, KIDNE2009180, KIDNE2009191, KIDNE2009332, KIDNE2009367, KIDNE2009426, KIDNE2009467, KIDNE2009490, KIDNE2009553, KIDNE2009605, KIDNE2009628, KIDNE2009647, KIDNE2009676, KIDNE2009723, KIDNE2010007, KIDNE2010049, KIDNE2010052, KIDNE2010084, KIDNE2010137, KIDNE2010151, KIDNE2010264, KIDNE2010271, KIDNE2010419, KIDNE2010430, KIDNE2010574, KIDNE2010674, KIDNE2010739, KIDNE2010750, KIDNE2010762, KIDNE2010863, KIDNE2010973, KIDNE2010989, KIDNE2011200, KIDNE2011314, KIDNE2011508, KIDNE2011532, KIDNE2011635, KIDNE2011752, KIDNE2011782, KIDNE2011858, KIDNE2012009, KIDNE2012025, KIDNE2012188, KIDNE2012291, KIDNE2012316, KIDNE2012361, KIDNE2012440, KIDNE2012453, KIDNE2012563, KIDNE2012601, KIDNE2012613, KIDNE2012710, KIDNE2012745, KIDNE2012775, KIDNE2012784, KIDNE2012945, KIDNE2013045, KIDNE2013095, KIDNE2013158, KIDNE2013218, KIDNE2013263, KIDNE2013346, KIDNE2013388, KIDNE2013413, KIDNE2013489, KIDNE2013639, KIDNE2013731, KIDNE2013734, KIDNE2013775, KIDNE2013801, KIDNE2013845, KIDNE2013866, KIDNE2014087, KIDNE2014112, KIDNE2014119, KIDNE2014170, KIDNE2014184, KIDNE2014268, KIDNE2014298, KIDNE2014320, KIDNE2014325, KIDNE2014415, KIDNE2014489, KIDNE2014496, KIDNE2014661, KIDNE2014717, KIDNE2014789, KIDNE2014808, KIDNE2014890, KIDNE2014978, KIDNE2015073, KIDNE2015221, KIDNE2015244, KIDNE2015313, KIDNE2015433, KIDNE2015445, KIDNE2015483, KIDNE2015515, KIDNE2015546, KIDNE2015556, KIDNE2015598, KIDNE2015660, KIDNE2015710, KIDNE2015987, KIDNE2016000, KIDNE2016036, KIDNE2016096, KIDNE2016101, KIDNE2016142, KIDNE2016188, KIDNE2016327, KIDNE2016371, KIDNE2016388, KIDNE2016464, KIDNE2016539, KIDNE2016570, KIDNE2016918, KIDNE2017007, KIDNE2017052, KIDNE2017151, KIDNE2017153, KIDNE2017315, KIDNE2017332, KIDNE2017343, KIDNE2017454, KIDNE2017603, KIDNE2017956, KIDNE2018071, KIDNE2018166, KIDNE2018167, KIDNE2018217, KIDNE2018254, KIDNE2018268, KIDNE2018269, KIDNE2018287, KIDNE2018294, KIDNE2018352, KIDNE2018462, KIDNE2018493, KIDNE2018617, KIDNE2018678, KIDNE2018727, KIDNE2018863, KIDNE2018891, KIDNE2018989, KIDNE2018996, KIDNE2019074, KIDNE2019187, LIVER1000017, LIVER1000050, LIVER1000055, LIVER1000058, LIVER1000063, LIVER1000067, LIVER1000073, LIVER1000079, LIVER1000082, LIVER1000099, LIVER1000104, LIVER1000111, LIVER1000126, LIVER1000132, LIVER1000139, LIVER1000155, LIVER1000165, LIVER1000175, LIVER1000224, LIVER1000230, LIVER1000278, LIVER1000303, LIVER1000397, LIVER1000421, LIVER1000433, LIVER1000479, LIVER1000482, LIVER1000542, LIVER2000003, LIVER2000033, LIVER2000037, LIVER2000158, LIVER2000216, LIVER2000237, LIVER2000247, LIVER2000360, LIVER2000416, LIVER2000446, LIVER2000515, LIVER2000592, LIVER2000626, LIVER2000682, LIVER2000769, LIVER2000775, LIVER2001051, LIVER2001076, LIVER2001099, LIVER2001113, LIVER2001164, LIVER2001191, LIVER2001265, LIVER2001329, LIVER2001389, LIVER2001461, LIVER2001539, LIVER2001608, LIVER2001835, LIVER2002638, LIVER2002644, LIVER2002660, LIVER2002702, LIVER2002842, LIVER2003008, LIVER2003065, LIVER2003234, LIVER2003511, LIVER2003524, LIVER2003568, LIVER2003581, LIVER2003800, LIVER2003854, LIVER2004074, LIVER2004392, LIVER2004514, LIVER2004565, LIVER2005028, LIVER2005198, LIVER2005376, LIVER2005385, LIVER2005512, LIVER2005520, LIVER2005527, LIVER2005544, LIVER2005625, LIVER2005728, LIVER2005789, LIVER2005973, LIVER2005981, LIVER2006006, LIVER2006251, LIVER2006410, LIVER2006469, LIVER2006644, LIVER2006764, LIVER2007415, LIVER2007548, LIVER2007568, LIVER2007721, LIVER2008053, LIVER2008465, LIVER2008473, LIVER2008580, LIVER2008706, LIVER2008751, LIVER2008945, LIVER2008998, LIVER2009110, LIVER2009118, LIVER2009554, LYMPB1000141, LYMPB1000158, LYMPB2000083, MAMGL1000017, MAMGL1000083, MAMGL1000096, MAMGL1000100, MAMGL1000132, MAMGL1000151, MAMGL1000178, MAMGL1000182, MAMGL1000184, MESAN1000032, MESAN1000035, MESAN1000050, MESAN1000079, MESAN1000101, MESAN1000121, MESAN1000147, MESAN1000180, MESAN2000023, MESAN2000026, MESAN2000067, MESAN2000092, MESAN2000149, MESAN2000167, MESAN2000264, MESAN2000291, MESAN2000337, MESAN2000434, MESAN2000457, MESAN2000462, MESAN2000501, MESAN2000620, MESAN2000711, MESAN2000815, MESAN2000894, MESAN2001154, MESAN2001450, MESAN2001627, MESAN2001770, MESAN2001979, MESAN2001980, MESAN2002113, MESAN2002122, MESAN2002147, MESAN2002186, MESAN2002424, MESAN2002519, MESAN2002687, MESAN2002709, MESAN2002724, MESAN2002844, MESAN2002940, MESAN2002978, MESAN2003035, MESAN2003037, MESAN2003039, MESAN2003058, MESAN2003101, MESAN2003190, MESAN2003322, MESAN2003444, MESAN2003490, MESAN2003529, MESAN2003646, MESAN2003662, MESAN2003709, MESAN2003851, MESAN2004138, MESAN2004288, MESAN2004575, MESAN2005284, MESAN2005303, MESAN2005371, MESAN2005633, MESAN2005689, MESAN2005724, MESAN2005808, MESAN2005811, MESAN2005957, MESAN2006022, MESAN2006043, MESAN2006328, MESAN2006401, MESAN2006563, MESAN2006580, MESAN2006599, MESAN2006743, MESAN2006953, MESAN2006971, MESAN2007032, MESAN2007440, MESAN2007597, MESAN2007755, MESAN2008222, MESAN2008334, MESAN2008415, MESAN2008460, MESAN2008536, MESAN2008679, MESAN2008729, MESAN2008821, MESAN2008926, MESAN2008936, MESAN2009019, MESAN2009081, MESAN2009105, MESAN2009311, MESAN2009418, MESAN2009503, MESAN2009522, MESAN2010031, MESAN2010114, MESAN2010312, MESAN2010321, MESAN2010664, MESAN2010681, MESAN2011545, MESAN2011597, MESAN2011627, MESAN2011632, MESAN2011977, MESAN2011984, MESAN2012054, MESAN2012113, MESAN2012586, MESAN2012708, MESAN2013019, MESAN2013022, MESAN2013183, MESAN2013211, MESAN2013283, MESAN2013284, MESAN2013611, MESAN2013674, MESAN2013845, MESAN2013936, MESAN2014192, MESAN2014295, MESAN2014298, MESAN2014412, MESAN2014624, MESAN2015277, MESAN2015365, MESAN2015391, MESAN2015401, MESAN2015501, MESAN2015515, MESAN2015708, MESAN2016159, MESAN2016304, MESAN2016409, MESAN2016552, MESAN2016965, MESAN2017133, MESAN2017152, MESAN2017373, MESAN2017417, MESAN2018209, MESAN2018576, MESAN2018670, MESAN2018699, MESTC1000042, MESTC1000147, MESTC2000150, MESTC2000153, MESTC2000170, N1ESE2000698, NB9N41000011, NB9N41000047, NB9N41000135, NB9N41000142, NB9N41000146, NB9N42000122, NB9N42000196, NB9N42000281, NB9N42000314, NB9N42000430, NB9N42000495, NB9N42001300, NCRRP1000129, NESOP1000010, NESOP1000087, NESOP1000108, NESOP2000231, NESOP2000452, NESOP2000499, NESOP2000504, NESOP2000744, NESOP2001144, NESOP2001433, NESOP2001656, NESOP2001694, NESOP2001752, NESOP2002352, NESOP2002418, NESOP2002487, NESOP2002738, NESOP2002780, NETRP1000034, NETRP1000082, NETRP2000086, NETRP2000182, NETRP2000439, NHNPC1000034, NHNPC1000037, NHNPC1000084, NHNPC1000101, NHNPC1000124, NHNPC2000062, NHNPC2000212, NHNPC2000606, NHNPC2000877, NHNPC2001108, NHNPC2001223, NHNPC2001312, NHNPC2001816, NHNPC2002565, NHNPC2002749, NOVAR1000015, NOVAR1000091, NOVAR1000102, NOVAR2000038, NOVAR2000136, NOVAR2000352, NOVAR2000412, NOVAR2000710, NOVAR2000783, NOVAR2000962, NOVAR2001108, NOVAR2001620, NOVAR2001783, NOVAR2001876, NOVAR2002039, NT2NE1000004, NT2NE1000014, NT2NE1000018, NT2NE1000023, NT2NE1000024, NT2NE1000063, NT2NE1000073, NT2NE1000083, NT2NE1000120, NT2NE1000122, NT2NE1000163, NT2NE1000175, NT2NE1000181, NT2NE1000185, NT2NE2000038, NT2NE2000054, NT2NE2000057, NT2NE2000064, NT2NE2000109, NT2NE2000137, NT2NE2000156, NT2NE2000195, NT2NE2000222, NT2NE2000259, NT2NE2000284, NT2NE2000299, NT2NE2000327, NT2NE2000353, NT2NE2000356, NT2NE2000369, NT2NE2000374, NT2NE2000384, NT2NE2000386, NT2NE2000390, NT2NE2000392, NT2NE2000455, NT2NE2000470, NT2NE2000488, NT2NE2000517, NT2NE2000536, NT2NE2000546, NT2NE2000548, NT2NE2000550, NT2NE2000586, NT2NE2000612, NT2NE2000658, NT2NE2000706, NT2NE2000763, NT2NE2000802, NT2NE2000808, NT2NE2000809, NT2NE2000864, NT2NE2000909, NT2NE2000913, NT2NE2000950, NT2NE2000951, NT2NE2000980, NT2NE2001005, NT2NE2001021, NT2NE2001040, NT2NE2001048, NT2NE2001049, NT2NE2001142, NT2NE2001156, NT2NE2001176, NT2NE2001180, NT2NE2001181, NT2NE2001188, NT2NE2001191, NT2NE2001247, NT2NE2001252, NT2NE2001324, NT2NE2001326, NT2NE2001337, NT2NE2001364, NT2NE2001372, NT2NE2001397, NT2NE2001403, NT2NE2001428, NT2NE2001432, NT2NE2001435, NT2NE2001442, NT2NE2001524, NT2NE2001530, NT2NE2001545, NT2NE2001598, NT2NE2001617, NT2NE2001623, NT2NE2001626, NT2NE2001634, NT2NE2001648, NT2NE2001660, NT2NE2001666, NT2NE2001677, NT2NE2001697, NT2NE2001698, NT2NE2001723, NT2NE2001725, NT2NE2001793, NT2NE2001874, NT2NE2001889, NT2NE2001923, NT2NE2002100, NT2NE2002162, NT2NE2002186, NT2NE2002285, NT2NE2002311, NT2NE2002651, NT2NE2002732, NT2NE2002768, NT2NE2002791, NT2NE2002856, NT2NE2002870, NT2NE2003150, NT2NE2003185, NT2NE2003252, NT2NE2003280, NT2NE2003308, NT2NE2003309, NT2NE2003315, NT2NE2003393, NT2NE2003408, NT2NE2003457, NT2NE2003485, NT2NE2003540, NT2NE2003571, NT2NE2003705, NT2NE2003752, NT2NE2003887, NT2NE2004255, NT2NE2004378, NT2NE2004490, NT2NE2004519, NT2NE2004606, NT2NE2004716, NT2NE2004740, NT2NE2004787, NT2NE2004916, NT2NE2005035, NT2NE2005223, NT2NE2005276, NT2NE2005317, NT2NE2005323, NT2NE2005358, NT2NE2005371, NT2NE2005395, NT2NE2005419, NT2NE2005441, NT2NE2005517, NT2NE2005537, NT2NE2005555, NT2NE2005588, NT2NE2005676, NT2NE2005720, NT2NE2005784, NT2NE2005804, NT2NE2005821, NT2NE2005876, NT2NE2005890, NT2NE2005921, NT2NE2005968, NT2NE2006075, NT2NE2006087, NT2NE2006103, NT2NE2006217, NT2NE2006288, NT2NE2006382, NT2NE2006387, NT2NE2006427, NT2NE2006432, NT2NE2006478, NT2NE2006531, NT2NE2006659, NT2NE2006784, NT2NE2006813, NT2NE2006894, NT2NE2006909, NT2NE2006942, NT2NE2006958, NT2NE2007052, NT2NE2007220, NT2NE2007425, NT2NE2007725, NT2NE2007727, NT2NE2007786, NT2NE2007877, NT2NE2007967, NT2NE2008017, NT2NE2008060, NT2NE2008213, NT2NE2008260, NT2NE2008378, NT2NE2008607, NT2NE2008639, NT2NE2008727, NT2NE2008783, NT2NE2008785, NT2NE2008803, NT2NE2008867, NT2NE2008961, NT2NE2008997, NT2NE2009138, NT2NE2009295, NT2NE2009426, NT2NE2009523, NT2NE2009608, NT2NE2009691, NT2NE2010056, NT2NE2010105, NT2NE2010150, NT2NE2010400, NT2NE2010632, NT2NE2010633, NT2NE2010654, NT2NE2010688, NT2NE2010781, NT2NE2010842, NT2NE2010854, NT2NE2011033, NT2NE2011036, NT2NE2011107, NT2NE2011119, NT2NE2011154, NT2NE2011221, NT2NE2011411, NT2NE2011485, NT2NE2011650, NT2NE2011684, NT2NE2011687, NT2NE2011691, NT2NE2011758, NT2NE2011823, NT2NE2011896, NT2NE2011998, NT2NE2012113, NT2NE2012199, NT2NE2012243, NT2NE2012361, NT2NE2012448, NT2NE2012457, NT2NE2012493, NT2NE2012505, NT2NE2012533, NT2NE2012603, NT2NE2012747, NT2NE2012790, NT2NE2012847, NT2NE2012928, NT2NE2013019, NT2NE2013081, NT2NE2013189, NT2NE2013217, NT2NE2013547, NT2NE2014013, NT2NE2014028, NT2NE2014104, NT2NE2014113, NT2NE2014176, NT2NE2014221, NT2NE2014525, NT2NE2014650, NT2NE2014651, NT2NE2014681, NT2NE2014758, NT2NE2014869, NT2NE2014950, NT2NE2015061, NT2NE2015262, NT2NE2015275, NT2NE2015362, NT2NE2015480, NT2NE2015511, NT2NE2015565, NT2NE2015626, NT2NE2015747, NT2NE2015860, NT2NE2015885, NT2NE2015904, NT2NE2015974, NT2NE2016041, NT2NE2016387, NT2NE2016419, NT2NE2016519, NT2NE2016608, NT2NE2016766, NT2NE2016774, NT2NE2016971, NT2NE2017259, NT2NE2017332, NT2NE2017397, NT2NE2017480, NT2NE2017492, NT2NE2017508, NT2NE2017562, NT2NE2017590, NT2NE2017612, NT2NE2017721, NT2NE2017752, NT2NE2017792, NT2NE2017982, NT2NE2018165, NT2NE2018176, NT2NE2018273, NT2NE2018376, NT2NE2018472, NT2NE2018490, NT2NE2018594, NT2NE2018739, NT2NE2018916, NT2NE2019056, NT2NE2019076, NT2NE2019099, NT2RI1000016, NT2RI1000035, NT2RI1000048, NT2RI1000164, NT2RI1000172, NT2RI2000004, NT2RI2000007, NT2RI2000107, NT2RI2000116, NT2RI2000117, NT2RI2000128, NT2RI2000133, NT2RI2000167, NT2RI2000173, NT2RI2000187, NT2RI2000255, NT2RI2000263, NT2RI2000270, NT2RI2000276, NT2RI2000294, NT2RI2000313, NT2RI2000341, NT2RI2000344, NT2RI2000348, NT2RI2000412, NT2RI2000421, NT2RI2000480, NT2RI2000575, NT2RI2000578, NT2RI2000588, NT2RI2000597, NT2RI2000685, NT2RI2000688, NT2RI2000689, NT2RI2000704, NT2RI2000738, NT2RI2000775, NT2RI2000822, NT2RI2000829, NT2RI2000841, NT2RI2000865, NT2RI2000932, NT2RI2000987, NT2RI2001010, NT2RI2001017, NT2RI2001030, NT2RI2001054, NT2RI2001083, NT2RI2001091, NT2RI2001167, NT2RI2001178, NT2RI2001230, NT2RI2001235, NT2RI2001244, NT2RI2001307, NT2RI2001342, NT2RI2001385, NT2RI2001409, NT2RI2001410, NT2RI2001422, NT2RI2001425, NT2RI2001449, NT2RI2001450, NT2RI2001474, NT2RI2001519, NT2RI2001595, NT2RI2001621, NT2RI2001624, NT2RI2001726, NT2RI2001769, NT2RI2001782, NT2RI2001836, NT2RI2001846, NT2RI2001866, NT2RI2001910, NT2RI2001952, NT2RI2002022, NT2RI2002041, NT2RI2002117, NT2RI2002120, NT2RI2002152, NT2RI2002153, NT2RI2002179, NT2RI2002243, NT2RI2002252, NT2RI2002260, NT2RI2002266, NT2RI2002270, NT2RI2002316, NT2RI2002334, NT2RI2002359, NT2RI2002447, NT2RI2002481, NT2RI2002507, NT2RI2002517, NT2RI2002530, NT2RI2002540, NT2RI2002549, NT2RI2002554, NT2RI2002564, NT2RI2002585, NT2RI2002592, NT2RI2002602, NT2RI2002699, NT2RI2002729, NT2RI2002802, NT2RI2002819, NT2RI2002822, NT2RI2002847, NT2RI2002852, NT2RI2002865, NT2RI2002923, NT2RI2002926, NT2RI2002958, NT2RI2002970, NT2RI2003011, NT2RI2003019, NT2RI2003051, NT2RI2003067, NT2RI2003184, NT2RI2003205, NT2RI2003222, NT2RI2003301, NT2RI2003317, NT2RI2003344, NT2RI2003360, NT2RI2003361, NT2RI2003383, NT2RI2003392, NT2RI2003399, NT2RI2003419, NT2RI2003487, NT2RI2003556, NT2RI2003655, NT2RI2003667, NT2RI2003678, NT2RI2003884, NT2RI2003973, NT2RI2004078, NT2RI2004079, NT2RI2004093, NT2RI2004136, NT2RI2004157, NT2RI2004188, NT2RI2004190, NT2RI2004209, NT2RI2004230, NT2RI2004284, NT2RI2004290, NT2RI2004304, NT2RI2004312, NT2RI2004381, NT2RI2004398, NT2RI2004410, NT2RI2004442, NT2RI2004468, NT2RI2004606, NT2RI2004608, NT2RI2004618, NT2RI2004783, NT2RI2004818, NT2RI2004840, NT2RI2004884, NT2RI2004916, NT2RI2004962, NT2RI2004984, NT2RI2004985, NT2RI2005048, NT2RI2005061, NT2RI2005069, NT2RI2005096, NT2RI2005115, NT2RI2005116, NT2RI2005130, NT2RI2005166, NT2RI2005239, NT2RI2005246, NT2RI2005315, NT2RI2005353, NT2RI2005358, NT2RI2005368, NT2RI2005382, NT2RI2005473, NT2RI2005520, NT2RI2005564, NT2RI2005579, NT2RI2005621, NT2RI2005628, NT2RI2005647, NT2RI2005670, NT2RI2005710, NT2RI2005713, NT2RI2005772, NT2RI2005811, NT2RI2005814, NT2RI2005816, NT2RI2005818, NT2RI2005966, NT2RI2006070, NT2RI2006071, NT2RI2006072, NT2RI2006081, NT2RI2006126, NT2RI2006127, NT2RI2006183, NT2RI2006257, NT2RI2006271, NT2RI2006294, NT2RI2006345, NT2RI2006403, NT2RI2006445, NT2RI2006487, NT2RI2006506, NT2RI2006553, NT2RI2006565, NT2RI2006640, NT2RI2006647, NT2RI2006659, NT2RI2006662, NT2RI2006667, NT2RI2006679, NT2RI2006682, NT2RI2006686, NT2RI2006703, NT2RI2006716, NT2RI2006735, NT2RI2006762, NT2RI2006788, NT2RI2006838, NT2RI2006853, NT2RI2006855, NT2RI2006943, NT2RI2006973, NT2RI2007046, NT2RI2007048, NT2RI2007084, NT2RI2007096, NT2RI2007116, NT2RI2007214, NT2RI2007277, NT2RI2007303, NT2RI2007334, NT2RI2007377, NT2RI2007386, NT2RI2007406, NT2RI2007439, NT2RI2007445, NT2RI2007468, NT2RI2007469, NT2RI2007498, NT2RI2007507, NT2RI2007572, NT2RI2007589, NT2RI2007593, NT2RI2007629, NT2RI2007723, NT2RI2007729, NT2RI2007751, NT2RI2007827, NT2RI2007853, NT2RI2007877, NT2RI2007879, NT2RI2007884, NT2RI2007891, NT2RI2007956, NT2RI2007965, NT2RI2008007, NT2RI2008050, NT2RI2008188, NT2RI2008204, NT2RI2008221, NT2RI2008233, NT2RI2008336, NT2RI2008455, NT2RI2008502, NT2RI2008566, NT2RI2008656, NT2RI2008714, NT2RI2008724, NT2RI2008749, NT2RI2008801, NT2RI2008808, NT2RI2008812, NT2RI2008841, NT2RI2008942, NT2RI2008952, NT2RI2009005, NT2RI2009066, NT2RI2009083, NT2RI2009101, NT2RI2009103, NT2RI2009144, NT2RI2009151, NT2RI2009173, NT2RI2009215, NT2RI2009239, NT2RI2009259, NT2RI2009281, NT2RI2009289, NT2RI2009301, NT2RI2009402, NT2RI2009406, NT2RI2009517, NT2RI2009585, NT2RI2009595, NT2RI2009855, NT2RI2010283, NT2RI2010508, NT2RI2010795, NT2RI2011422, NT2RI2011450, NT2RI2011683, NT2RI2011803, NT2RI2012350, NT2RI2012659, NT2RI2012726, NT2RI2012990, NT2RI2013345, NT2RI2013357, NT2RI2013373, NT2RI2014247, NT2RI2014551, NT2RI2014683, NT2RI2014733, NT2RI2015239, NT2RI2015342, NT2RI2015533, NT2RI2016128, NT2RI2016134, NT2RI2017529, NT2RI2018311, NT2RI2018363, NT2RI2018448, NT2RI2018883, NT2RI2018950, NT2RI2019751, NT2RI2019826, NT2RI2020390, NT2RI2020703, NT2RI2021463, NT2RI2021625, NT2RI2022584, NT2RI2023303, NT2RI2023671, NT2RI2024008, NT2RI2024313, NT2RI2024460, NT2RI2024496, NT2RI2024935, NT2RI2025075, NT2RI2025255, NT2RI2025564, NT2RI2025565, NT2RI2025909, NT2RI2025957, NT2RI2025976, NT2RI2026758, NT2RI2027081, NT2RI2027157, NT2RI2027224, NT2RI2027323, NT2RI2027396, NT2RI2027484, NT2RI2027975, NT2RI2028213, NT2RI2028222, NT2RI2028537, NT2RI2028642, NT2RI3000174, NT2RI3000213, NT2RI3000423, NT2RI3000622, NT2RI3001132, NT2RI3001263, NT2RI3001279, NT2RI3001348, NT2RI3001445, NT2RI3001458, NT2RI3001515, NT2RI3001573, NT2RI3001967, NT2RI3002303, NT2RI3002557, NT2RI3002842, NT2RI3003027, NT2RI3003031, NT2RI3003095, NT2RI3003104, NT2RI3003162, NT2RI3003362, NT2RI3003382, NT2RI3003409, NT2RI3003738, NT2RI3003925, NT2RI3004133, NT2RI3004381, NT2RI3004510, NT2RI3005202, NT2RI3005403, NT2RI3005416, NT2RI3005724, NT2RI3005861, NT2RI3005923, NT2RI3005928, NT2RI3006132, NT2RI3006171, NT2RI3006284, NT2RI3006340, NT2RI3006376, NT2RI3006666, NT2RI3006673, NT2RI3006796, NT2RI3007065, NT2RI3007095, NT2RI3007158, NT2RI3007167, NT2RI3007213, NT2RI3007291, NT2RI3007443, NT2RI3007684, NT2RI3007757, NT2RI3007878, NT2RI3007978, NT2RI3008055, NT2RI3008162, NT2RI3008179, NT2RI3008228, NT2RI3008442, NT2RI3008652, NT2RI3008697, NT2RI3008974, NT2RI3009158, NT2RI3009480, NT2RI3009524, NT2RP6000005, NT2RP6000008, NT2RP6000017, NT2RP6000032, NT2RP6000043, NT2RP6000059, NT2RP6000060, NT2RP6000072, NT2RP6000077, NT2RP6000078, NT2RP6000085, NT2RP6000086, NT2RP6000100, NT2RP6000109, NT2RP6000110, NT2RP6000119, NT2RP6000127, NT2RP6000130, NT2RP6000140, NT2RP6000150, NT2RP7000041, NT2RP7000069, NT2RP7000086, NT2RP7000109, NT2RP7000112, NT2RP7000173, NT2RP7000238, NT2RP7000259, NT2RP7000271, NT2RP7000311, NT2RP7000359, NT2RP7000364, NT2RP7000380, NT2RP7000391, NT2RP7000425, NT2RP7000477, NT2RP7000579, NT2RP7000586, NT2RP7000600, NT2RP7000624, NT2RP7000812, NT2RP7000906, NT2RP7000926, NT2RP7001074, NT2RP7001080, NT2RP7001156, NT2RP7001231, NT2RP7001306, NT2RP7001319, NT2RP7001335, NT2RP7001364, NT2RP7001475, NT2RP7001532, NT2RP7001602, NT2RP7001678, NT2RP7001856, NT2RP7002064, NT2RP7002151, NT2RP7002163, NT2RP7002243, NT2RP7002282, NT2RP7002376, NT2RP7002478, NT2RP7002554, NT2RP7002594, NT2RP7002603, NT2RP7002650, NT2RP7002738, NT2RP7002779, NT2RP7002802, NT2RP7002829, NT2RP7002841, NT2RP7002875, NT2RP7002906, NT2RP7002978, NT2RP7002982, NT2RP7003025, NT2RP7003050, NT2RP7003055, NT2RP7003084, NT2RP7003091, NT2RP7003107, NT2RP7003134, NT2RP7003148, NT2RP7003203, NT2RP7003261, NT2RP7003319, NT2RP7003439, NT2RP7003511, NT2RP7003629, NT2RP7003632, NT2RP7003647, NT2RP7003680, NT2RP7003688, NT2RP7003724, NT2RP7004027, NT2RP7004080, NT2RP7004114, NT2RP7004123, NT2RP7004173, NT2RP7004196, NT2RP7004204, NT2RP7004233, NT2RP7004260, NT2RP7004352, NT2RP7004358, NT2RP7004373, NT2RP7004396, NT2RP7004428, NT2RP7004481, NT2RP7004541, NT2RP7004559, NT2RP7004641, NT2RP7004656, NT2RP7004687, NT2RP7004722, NT2RP7004728, NT2RP7004766, NT2RP7004790, NT2RP7004884, NT2RP7004911, NT2RP7004915, NT2RP7004946, NT2RP7004961, NT2RP7004964, NT2RP7004975, NT2RP7005118, NT2RP7005205, NT2RP7005219, NT2RP7005323, NT2RP7005468, NT2RP7005493, NT2RP7005513, NT2RP7005529, NT2RP7005629, NT2RP7005631, NT2RP7005669, NT2RP7005675, NT2RP7005750, NT2RP7005846, NT2RP7006033, NT2RP7006141, NT2RP7006160, NT2RP7006162, NT2RP7006188, NT2RP7006223, NT2RP7006263, NT2RP7006296, NT2RP7006304, NT2RP7006374, NT2RP7006395, NT2RP7006408, NT2RP7006457, NT2RP7006490, NT2RP7006539, NT2RP7006547, NT2RP7006601, NT2RP7006619, NT2RP7006621, NT2RP7006636, NT2RP7006701, NT2RP7006853, NT2RP7006886, NT2RP7006887, NT2RP7006980, NT2RP7006986, NT2RP7006995, NT2RP7007114, NT2RP7007221, NT2RP7007226, NT2RP7007252, NT2RP7007269, NT2RP7007310, NT2RP7007359, NT2RP7007381, NT2RP7007387, NT2RP7007406, NT2RP7007480, NT2RP7007504, NT2RP7007530, NT2RP7007537, NT2RP7007580, NT2RP7007594, NT2RP7007610, NT2RP7007617, NT2RP7007643, NT2RP7007766, NT2RP7007842, NT2RP7007925, NT2RP7007930, NT2RP7007975, NT2RP7008013, NT2RP7008015, NT2RP7008133, NT2RP7008137, NT2RP7008142, NT2RP7008144, NT2RP7008161, NT2RP7008167, NT2RP7008190, NT2RP7008315, NT2RP7008360, NT2RP7008396, NT2RP7008406, NT2RP7008435, NT2RP7008441, NT2RP7008454, NT2RP7008487, NT2RP7008543, NT2RP7008544, NT2RP7008550, NT2RP7008557, NT2RP7008657, NT2RP7008714, NT2RP7008720, NT2RP7008855, NT2RP7008863, NT2RP7009012, NT2RP7009019, NT2RP7009030, NT2RP7009097, NT2RP7009108, NT2RP7009147, NT2RP7009168, NT2RP7009215, NT2RP7009225, NT2RP7009236, NT2RP7009253, NT2RP7009259, NT2RP7009267, NT2RP7009322, NT2RP7009363, NT2RP7009370, NT2RP7009373, NT2RP7009394, NT2RP7009397, NT2RP7009429, NT2RP7009439, NT2RP7009466, NT2RP7009481, NT2RP7009482, NT2RP7009498, NT2RP7009502, NT2RP7009507, NT2RP7009577, NT2RP7009743, NT2RP7009867, NT2RP7010109, NT2RP7010128, NT2RP7010235, NT2RP7010275, NT2RP7010521, NT2RP7010599, NT2RP7010612, NT2RP7010817, NT2RP7011086, NT2RP7011132, NT2RP7011268, NT2RP7011318, NT2RP7011452, NT2RP7011570, NT2RP7011721, NT2RP7011909, NT2RP7012291, NT2RP7012516, NT2RP7013002, NT2RP7013374, NT2RP7013499, NT2RP7013573, NT2RP7013729, NT2RP7013764, NT2RP7013795, NT2RP7013999, NT2RP7014178, NT2RP7014348, NT2RP7014420, NT2RP7014583, NT2RP7014721, NT2RP7014743, NT2RP7014778, NT2RP7014906, NT2RP7014910, NT2RP7015080, NT2RP7015431, NT2RP7015503, NT2RP7015512, NT2RP7015676, NT2RP7015789, NT2RP7015996, NT2RP7016508, NT2RP7016574, NT2RP7016622, NT2RP7016911, NT2RP7017139, NT2RP7017284, NT2RP7017365, NT2RP7017474, NT2RP7017546, NT2RP7017567, NT2RP7017795, NT2RP7017971, NT2RP7018032, NT2RP7018126, NT2RP7018197, NT2RP7018206, NT2RP7018340, NT2RP7018586, NT2RP7018802, NT2RP7018871, NT2RP7019064, NT2RP7019135, NT2RP7019273, NT2RP7019367, NT2RP7019401, NT2RP7019445, NT2RP7019543, NT2RP7019682, NT2RP7019835, NT2RP7020112, NT2RP7020123, NT2RP7020343, NT2RP7020379, NT2RP8000137, NT2RP8000296, NT2RP8000435, NT2RP8000483, NT2RP8000521, NT2RP8000633, NT2RP8001363, NT2RP8001407, NT2RP8001584, NT2RP8001604, NT2RP8001605, NT2RP8003490, NT2RP8003657, NT2RP8003787, NT2RP8004306, NT2RP8005546, NT2RP8006452, NT2RP8006521, NT2RP8007416, NT2RP8007503, NT2RP8007715, NT2RP8008057, NT2RP8009248, NTONG1000006, NTONG1000033, NTONG1000047, NTONG1000052, NTONG1000075, NTONG1000087, NTONG1000098, NTONG1000123, NTONG1000130, NTONG1000161, NTONG1000172, NTONG1000213, NTONG1000214, NTONG1000246, NTONG1000247, NTONG1000264, NTONG2000040, NTONG2000107, NTONG2000231, NTONG2000334, NTONG2000363, NTONG2000413, NTONG2000492, NTONG2000499, NTONG2000531, NTONG2000583, NTONG2000800, NTONG2000858, NTONG2000876, NTONG2000966, NTONG2000977, NTONG2000985, NTONG2001014, NTONG2001079, NTONG2001137, NTONG2001157, NTONG2001173, NTONG2001220, NTONG2001222, NTONG2001362, NTONG2001428, NTONG2001532, NTONG2001550, NTONG2001587, NTONG2001612, NTONG2001619, NTONG2001642, NTONG2001657, NTONG2001676, NTONG2002278, NTONG2002582, NTONG2002807, NTONG2002970, NTONG2002985, NTONG2003158, NTONG2003210, NTONG2003316, NTONG2003409, NTONG2003454, NTONG2003515, NTONG2003805, NTONG2003852, NTONG2003897, NTONG2003928, NTONG2004095, NTONG2004308, NTONG2004521, NTONG2004614, NTONG2004690, NTONG2004806, NTONG2004829, NTONG2004844, NTONG2004918, NTONG2004991, NTONG2005062, NTONG2005086, NTONG2005137, NTONG2005153, NTONG2005265, NTONG2005277, NTONG2005363, NTONG2005373, NTONG2005391, NTONG2005480, NTONG2005497, NTONG2005520, NTONG2005577, NTONG2005657, NTONG2005801, NTONG2005822, NTONG2005897, NTONG2005969, NTONG2006099, NTONG2006187, NTONG2006301, NTONG2006324, NTONG2006354, NTONG2006440, NTONG2006484, NTONG2006501, NTONG2006646, NTONG2006709, NTONG2006783, NTONG2007020, NTONG2007028, NTONG2007034, NTONG2007249, NTONG2007517, NTONG2007522, NTONG2007693, NTONG2007756, NTONG2008088, NTONG2008093, NTONG2008143, NTONG2008365, NTONG2008522, NTONG2008672, NTONG2008862, NTONG2008939, NTONG2008944, NTONG2009060, NTONG2009068, NTONG2009229, NTONG2009233, NTONG2009468, NTONG2009576, OCBBF1000016, OCBBF1000030, OCBBF1000042, OCBBF1000049, OCBBF1000054, OCBBF1000067, OCBBF1000080, OCBBF1000085, OCBBF1000091, OCBBF1000104, OCBBF1000114, OCBBF1000118, OCBBF1000119, OCBBF1000122, OCBBF1000130, OCBBF1000138, OCBBF1000145, OCBBF1000146, OCBBF1000153, OCBBF1000185, OCBBF1000188, OCBBF1000192, OCBBF1000254, OCBBF1000315, OCBBF2000013, OCBBF2000015, OCBBF2000126, OCBBF2000178, OCBBF2000231, OCBBF2000277, OCBBF2000287, OCBBF2000323, OCBBF2000452, OCBBF2000467, OCBBF2000522, OCBBF2000677, OCBBF2000703, OCBBF2000719, OCBBF2000824, OCBBF2000831, OCBBF2000846, OCBBF2000904, OCBBF2000986, OCBBF2000998, OCBBF2001075, OCBBF2001101, OCBBF2001124, OCBBF2001140, OCBBF2001166, OCBBF2001176, OCBBF2001186, OCBBF2001196, OCBBF2001210, OCBBF2001252, OCBBF2001307, OCBBF2001323, OCBBF2001389, OCBBF2001402, OCBBF2001408, OCBBF2001416, OCBBF2001473, OCBBF2001494, OCBBF2001527, OCBBF2001528, OCBBF2001586, OCBBF2001639, OCBBF2001681, OCBBF2001687, OCBBF2001706, OCBBF2001749, OCBBF2001794, OCBBF2001910, OCBBF2001931, OCBBF2001961, OCBBF2001983, OCBBF2002015, OCBBF2002083, OCBBF2002086, OCBBF2002124, OCBBF2002161, OCBBF2002290, OCBBF2002357, OCBBF2002376, OCBBF2002615, OCBBF2002656, OCBBF2002663, OCBBF2002805, OCBBF2002865, OCBBF2002920, OCBBF2002980, OCBBF2003028, OCBBF2003052, OCBBF2003091, OCBBF2003246, OCBBF2003327, OCBBF2003518, OCBBF2003543, OCBBF2003593, OCBBF2003744, OCBBF2003819, OCBBF2003925, OCBBF2004038, OCBBF2004104, OCBBF2004147, OCBBF2004168, OCBBF2004235, OCBBF2004259, OCBBF2004385, OCBBF2004418, OCBBF2004478, OCBBF2004482, OCBBF2004533, OCBBF2004567, OCBBF2004612, OCBBF2004647, OCBBF2004669, OCBBF2004757, OCBBF2004826, OCBBF2004866, OCBBF2004883, OCBBF2004889, OCBBF2004930, OCBBF2004984, OCBBF2005066, OCBBF2005077, OCBBF2005161, OCBBF2005343, OCBBF2005349, OCBBF2005373, OCBBF2005420, OCBBF2005428, OCBBF2005433, OCBBF2005476, OCBBF2005546, OCBBF2005843, OCBBF2005901, OCBBF2005956, OCBBF2006005, OCBBF2006030, OCBBF2006058, OCBBF2006113, OCBBF2006148, OCBBF2006151, OCBBF2006154, OCBBF2006172, OCBBF2006214, OCBBF2006241, OCBBF2006313, OCBBF2006388, OCBBF2006438, OCBBF2006567, OCBBF2006624, OCBBF2006639, OCBBF2006660, OCBBF2006764, OCBBF2006849, OCBBF2006859, OCBBF2006972, OCBBF2006987, OCBBF2007028, OCBBF2007039, OCBBF2007051, OCBBF2007068, OCBBF2007114, OCBBF2007121, OCBBF2007184, OCBBF2007194, OCBBF2007196, OCBBF2007224, OCBBF2007238, OCBBF2007354, OCBBF2007414, OCBBF2007415, OCBBF2007428, OCBBF2007478, OCBBF2007485, OCBBF2007520, OCBBF2007555, OCBBF2007610, OCBBF2007622, OCBBF2007756, OCBBF2007762, OCBBF2007892, OCBBF2007931, OCBBF2007946, OCBBF2008005, OCBBF2008041, OCBBF2008116, OCBBF2008138, OCBBF2008283, OCBBF2008330, OCBBF2008340, OCBBF2008366, OCBBF2008466, OCBBF2008511, OCBBF2008520, OCBBF2008569, OCBBF2008586, OCBBF2008640, OCBBF2008691, OCBBF2008701, OCBBF2008724, OCBBF2008760, OCBBF2008768, OCBBF2008770, OCBBF2008775, OCBBF2008790, OCBBF2008814, OCBBF2008822, OCBBF2009095, OCBBF2009115, OCBBF2009242, OCBBF2009301, OCBBF2009352, OCBBF2009391, OCBBF2009536, OCBBF2009571, OCBBF2009583, OCBBF2009603, OCBBF2009772, OCBBF2009788, OCBBF2009836, OCBBF2009920, OCBBF2009926, OCBBF2010040, OCBBF2010140, OCBBF2010281, OCBBF2010313, OCBBF2010404, OCBBF2010416, OCBBF2010420, OCBBF2010557, OCBBF2010604, OCBBF2010709, OCBBF2010792, OCBBF2010819, OCBBF2010841, OCBBF2010843, OCBBF2010858, OCBBF2010863, OCBBF2010871, OCBBF2010931, OCBBF2010945, OCBBF2010978, OCBBF2010989, OCBBF2011073, OCBBF2011137, OCBBF2011160, OCBBF2011177, OCBBF2011228, OCBBF2011232, OCBBF2011283, OCBBF2011311, OCBBF2011625, OCBBF2011669, OCBBF2011685, OCBBF2011706, OCBBF2011722, OCBBF2011759, OCBBF2011767, OCBBF2011855, OCBBF2011872, OCBBF2011887, OCBBF2011897, OCBBF2011914, OCBBF2011960, OCBBF2011981, OCBBF2012001, OCBBF2012028, OCBBF2012039, OCBBF2012095, OCBBF2012139, OCBBF2012191, OCBBF2012262, OCBBF2012320, OCBBF2012436, OCBBF2012525, OCBBF2012553, OCBBF2012678, OCBBF2012704, OCBBF2012755, OCBBF2012812, OCBBF2012821, OCBBF2012881, OCBBF2012908, OCBBF2012936, OCBBF2012990, OCBBF2013011, OCBBF2013049, OCBBF2013091, OCBBF2013123, OCBBF2013127, OCBBF2013149, OCBBF2013208, OCBBF2013285, OCBBF2013319, OCBBF2013324, OCBBF2013366, OCBBF2013481, OCBBF2013507, OCBBF2013721, OCBBF2013789, OCBBF2013843, OCBBF2013883, OCBBF2013926, OCBBF2014052, OCBBF2014064, OCBBF2014089, OCBBF2014322, OCBBF2014386, OCBBF2014541, OCBBF2014707, OCBBF2014745, OCBBF2014828, OCBBF2014873, OCBBF2014880, OCBBF2014928, OCBBF2015031, OCBBF2015081, OCBBF2015115, OCBBF2015232, OCBBF2015233, OCBBF2015285, OCBBF2015334, OCBBF2015335, OCBBF2015503, OCBBF2015506, OCBBF2015599, OCBBF2015645, OCBBF2015659, OCBBF2015751, OCBBF2015797, OCBBF2015931, OCBBF2015980, OCBBF2016038, OCBBF2016405, OCBBF2016467, OCBBF2016590, OCBBF2016591, OCBBF2016612, OCBBF2016689, OCBBF2016690, OCBBF2016729, OCBBF2016841, OCBBF2016928, OCBBF2017035, OCBBF2017055, OCBBF2017069, OCBBF2017306, OCBBF2017325, OCBBF2017398, OCBBF2017458, OCBBF2017489, OCBBF2017516, OCBBF2017665, OCBBF2017754, OCBBF2017791, OCBBF2017815, OCBBF2017882, OCBBF2017888, OCBBF2017893, OCBBF2017920, OCBBF2018012, OCBBF2018014, OCBBF2018084, OCBBF2018167, OCBBF2018206, OCBBF2018229, OCBBF2018234, OCBBF2018362, OCBBF2018380, OCBBF2018563, OCBBF2018581, OCBBF2018618, OCBBF2018663, OCBBF2018687, OCBBF2018827, OCBBF2018828, OCBBF2018873, OCBBF2018934, OCBBF2019108, OCBBF2019195, OCBBF2019327, OCBBF2019684, OCBBF2019761, OCBBF2019823, OCBBF2019950, OCBBF2020048, OCBBF2020318, OCBBF2020343, OCBBF2020453, OCBBF2020741, OCBBF2020801, OCBBF2020825, OCBBF2020838, OCBBF2021020, OCBBF2021214, OCBBF2021286, OCBBF2021323, OCBBF2021518, OCBBF2021788, OCBBF2021833, OCBBF2022351, OCBBF2022573, OCBBF2022574, OCBBF2023162, OCBBF2023598, OCBBF2023643, OCBBF2024463, OCBBF2024589, OCBBF2024719, OCBBF2024779, OCBBF2024781, OCBBF2025028, OCBBF2025115, OCBBF2025198, OCBBF2025451, OCBBF2025458, OCBBF2025527, OCBBF2025631, OCBBF2025730, OCBBF2026025, OCBBF2026035, OCBBF2026144, OCBBF2026368, OCBBF2026645, OCBBF2026649, OCBBF2026690, OCBBF2026981, OCBBF2027148, OCBBF2027197, OCBBF2027354, OCBBF2027423, OCBBF2027478, OCBBF2027481, OCBBF2027511, OCBBF2027661, OCBBF2027728, OCBBF2027782, OCBBF2027868, OCBBF2028055, OCBBF2028173, OCBBF2028421, OCBBF2029471, OCBBF2029901, OCBBF2030116, OCBBF2030329, OCBBF2030354, OCBBF2030517, OCBBF2030574, OCBBF2030708, OCBBF2030927, OCBBF2030963, OCBBF2031167, OCBBF2031198, OCBBF2031366, OCBBF2031561, OCBBF2032152, OCBBF2032274, OCBBF2032539, OCBBF2032590, OCBBF2032599, OCBBF2032611, OCBBF2032671, OCBBF2033295, OCBBF2033413, OCBBF2033869, OCBBF2033948, OCBBF2034333, OCBBF2034529, OCBBF2034637, OCBBF2034906, OCBBF2035110, OCBBF2035214, OCBBF2035390, OCBBF2035564, OCBBF2035658, OCBBF2035823, OCBBF2035885, OCBBF2035916, OCBBF2036019, OCBBF2036031, OCBBF2036225, OCBBF2036476, OCBBF2036743, OCBBF2036752, OCBBF2037068, OCBBF2037340, OCBBF2037398, OCBBF2037464, OCBBF2037547, OCBBF2037598, OCBBF2037638, OCBBF2038238, OCBBF2038285, OCBBF2038317, OCBBF3000097, OCBBF3000213, OCBBF3000296, OCBBF3000323, OCBBF3000372, OCBBF3000380, OCBBF3000743, OCBBF3000830, OCBBF3001076, OCBBF3001202, OCBBF3001333, OCBBF3001616, OCBBF3002553, OCBBF3002600, OCBBF3002654, OCBBF3003103, OCBBF3003209, OCBBF3003592, OCBBF3003745, OCBBF3003761, OCBBF3004264, OCBBF3004314, OCBBF3004487, OCBBF3004972, OCBBF3005330, OCBBF3005597, OCBBF3005843, OCBBF3006802, OCBBF3006986, OCBBF3007078, OCBBF3007704, OCBBF3008230, OCBBF3008392, OCBBF3008835, OCBBF3009192, OCBBF3009244, OCBBF3009279, PANCR1000012, PANCR1000021, PANCR1000081, PANCR1000086, PANCR1000091, PANCR1000185, PEBLM1000024, PEBLM1000029, PEBLM1000034, PEBLM1000062, PEBLM1000066, PEBLM1000068, PEBLM1000071, PEBLM1000083, PEBLM1000144, PEBLM1000147, PEBLM1000174, PEBLM1000180, PEBLM2000030, PEBLM2000112, PEBLM2000126, PEBLM2000147, PEBLM2000170, PEBLM2000180, PEBLM2000213, PEBLM2000222, PEBLM2000248, PEBLM2000267, PEBLM2000270, PEBLM2000308, PEBLM2000321, PEBLM2000326, PEBLM2000333, PEBLM2000338, PEBLM2000395, PEBLM2000479, PEBLM2000502, PEBLM2001072, PEBLM2001312, PEBLM2001465, PEBLM2001488, PEBLM2001803, PEBLM2002432, PEBLM2002455, PEBLM2002594, PEBLM2002749, PEBLM2002887, PEBLM2003426, PEBLM2003765, PEBLM2003914, PEBLM2003935, PEBLM2004015, PEBLM2004216, PEBLM2004290, PEBLM2004452, PEBLM2004497, PEBLM2004666, PEBLM2004733, PEBLM2005282, PEBLM2005615, PEBLM2005632, PEBLM2005697, PEBLM2006031, PEBLM2006036, PEBLM2006049, PEBLM2006113, PEBLM2006135, PEBLM2006215, PEBLM2006283, PEBLM2006298, PEBLM2006912, PEBLM2007112, PEBLM2007140, PEBLM2007188, PEBLM2007296, PEBLM2007437, PEBLM2007447, PEBLM2007598, PEBLM2007832, PEBLM2007834, PEBLM2008106, PEBLM2008576, PEBLM2008605, PEBLM2008826, PEBLM2008861, PERIC1000025, PERIC1000147, PERIC2000180, PERIC2000214, PERIC2000386, PERIC2000387, PERIC2000422, PERIC2000473, PERIC2000478, PERIC2000889, PERIC2000914, PERIC2001227, PERIC2001228, PERIC2001379, PERIC2001504, PERIC2001703, PERIC2001764, PERIC2002243, PERIC2002272, PERIC2002452, PERIC2002766, PERIC2003001, PERIC2003090, PERIC2003287, PERIC2003349, PERIC2003452, PERIC2003699, PERIC2003720, PERIC2003794, PERIC2003834, PERIC2003919, PERIC2003957, PERIC2004028, PERIC2004131, PERIC2004259, PERIC2004379, PERIC2004429, PERIC2004510, PERIC2004613, PERIC2004909, PERIC2005111, PERIC2005117, PERIC2005305, PERIC2005347, PERIC2005370, PERIC2005936, PERIC2006035, PERIC2006121, PERIC2006443, PERIC2006945, PERIC2006960, PERIC2007068, PERIC2007439, PERIC2007914, PERIC2008008, PERIC2008385, PERIC2009001, PERIC2009086, PERIC2009329, PERIC2009566, PLACE5000001, PLACE5000013, PLACE5000037, PLACE5000058, PLACE5000066, PLACE5000067, PLACE5000068, PLACE5000070, PLACE5000105, PLACE5000113, PLACE5000115, PLACE5000116, PLACE5000129, PLACE5000139, PLACE5000153, PLACE5000159, PLACE5000171, PLACE5000172, PLACE5000178, PLACE5000245, PLACE5000260, PLACE5000297, PLACE5000372, PLACE5000492, PLACE5000522, PLACE5000527, PLACE6000012, PLACE6000044, PLACE6000055, PLACE6000070, PLACE6000137, PLACE6000145, PLACE6000191, PLACE6000205, PLACE6000231, PLACE6000263, PLACE6000296, PLACE6000314, PLACE6000348, PLACE6000371, PLACE6000424, PLACE6000426, PLACE6000429, PLACE6000450, PLACE6000463, PLACE6000523, PLACE6000550, PLACE6000552, PLACE6000555, PLACE6000619, PLACE6000630, PLACE6000953, PLACE6001118, PLACE6001153, PLACE6001185, PLACE6001262, PLACE6001294, PLACE6001443, PLACE6001536, PLACE6001557, PLACE6001712, PLACE6001740, PLACE6001823, PLACE6001886, PLACE6001923, PLACE6001925, PLACE6001933, PLACE6002011, PLACE6002016, PLACE6002056, PLACE6002102, PLACE6002157, PLACE6002312, PLACE6002323, PLACE6002345, PLACE6002419, PLACE6002462, PLACE6002647, PLACE6002668, PLACE6002692, PLACE6002699, PLACE6002710, PLACE6002871, PLACE6002949, PLACE6002960, PLACE6003004, PLACE6003038, PLACE6003077, PLACE6003094, PLACE6003109, PLACE6003204, PLACE6003218, PLACE6003372, PLACE6003393, PLACE6003399, PLACE6003539, PLACE6003621, PLACE6003705, PLACE6003740, PLACE6003745, PLACE6003771, PLACE6003796, PLACE6003839, PLACE6003850, PLACE6004005, PLACE6004101, PLACE6004219, PLACE6004336, PLACE6004368, PLACE6004380, PLACE6004396, PLACE6004397, PLACE6004454, PLACE6004464, PLACE6004491, PLACE6004663, PLACE6004687, PLACE6004738, PLACE6004931, PLACE6004966, PLACE6004993, PLACE6005007, PLACE6005029, PLACE6005108, PLACE6005231, PLACE6005234, PLACE6005283, PLACE6005294, PLACE6005328, PLACE6005351, PLACE6005423, PLACE6005482, PLACE6005487, PLACE6005535, PLACE6005546, PLACE6005559, PLACE6005579, PLACE6005691, PLACE6005786, PLACE6006077, PLACE6006137, PLACE6006158, PLACE6006217, PLACE6006222, PLACE6006266, PLACE6006287, PLACE6006394, PLACE6006418, PLACE6006474, PLACE6006549, PLACE6006566, PLACE6006697, PLACE6006822, PLACE6006871, PLACE6006905, PLACE6006988, PLACE6007050, PLACE6007180, PLACE6007239, PLACE6007242, PLACE6007309, PLACE6007373, PLACE6007380, PLACE6007433, PLACE6007482, PLACE6007687, PLACE6007787, PLACE6007798, PLACE6007807, PLACE6007925, PLACE6008036, PLACE6008094, PLACE6008126, PLACE6008285, PLACE6008444, PLACE6008453, PLACE6008640, PLACE6008750, PLACE6008768, PLACE6008775, PLACE6008793, PLACE6008824, PLACE6008989, PLACE6009006, PLACE6009008, PLACE6009228, PLACE6009237, PLACE6009338, PLACE6009419, PLACE6009430, PLACE6009482, PLACE6009524, PLACE6009527, PLACE6009560, PLACE6009590, PLACE6009821, PLACE6009835, PLACE6009853, PLACE6010077, PLACE6010463, PLACE6010485, PLACE6010568, PLACE6010701, PLACE6010704, PLACE6010732, PLACE6010765, PLACE6010925, PLACE6010936, PLACE6010991, PLACE6011057, PLACE6011102, PLACE6011156, PLACE6011211, PLACE6011260, PLACE6011334, PLACE6011627, PLACE6011774, PLACE6011881, PLACE6011907, PLACE6011970, PLACE6011975, PLACE6012108, PLACE6012168, PLACE6012297, PLACE6012308, PLACE6012574, PLACE6012908, PLACE6012936, PLACE6012942, PLACE6013222, PLACE6013232, PLACE6013288, PLACE6013386, PLACE6013400, PLACE6013650, PLACE6013672, PLACE6013883, PLACE6013884, PLACE6013885, PLACE6014043, PLACE6014064, PLACE6014516, PLACE6015211, PLACE6015322, PLACE6015445, PLACE6015460, PLACE6015513, PLACE6015591, PLACE6015729, PLACE6015731, PLACE6015939, PLACE6016030, PLACE6016093, PLACE6016105, PLACE6016160, PLACE6016210, PLACE6016254, PLACE6016942, PLACE6016984, PLACE6017002, PLACE6017431, PLACE6017564, PLACE6017626, PLACE6017701, PLACE6017714, PLACE6017788, PLACE6018031, PLACE6018107, PLACE6018187, PLACE6018235, PLACE6018287, PLACE6018441, PLACE6018497, PLACE6018769, PLACE6018834, PLACE6018843, PLACE6018863, PLACE6018938, PLACE6019195, PLACE6019542, PLACE6019600, PLACE6019674, PLACE6019676, PLACE6019701, PLACE6019932, PLACE6020031, PLACE7000167, PLACE7000170, PLACE7000266, PLACE7000333, PLACE7000410, PLACE7000502, PLACE7000707, PLACE7001022, PLACE7001544, PLACE7001759, PLACE7001936, PLACE7002303, PLACE7002641, PLACE7003639, PLACE7003657, PLACE7003684, PLACE7003985, PLACE7004103, PLACE7004961, PLACE7005169, PLACE7005671, PLACE7005840, PLACE7006051, PLACE7006090, PLACE7006240, PLACE7006268, PLACE7006275, PLACE7006498, PLACE7006540, PLACE7007379, PLACE7007644, PLACE7007973, PLACE7008136, PLACE7008261, PLACE7008431, PLACE7008623, PLACE7008766, PLACE7009563, PROST1000033, PROST1000039, PROST1000065, PROST1000083, PROST1000085, PROST1000110, PROST1000120, PROST1000123, PROST1000136, PROST1000144, PROST1000145, PROST1000152, PROST1000167, PROST1000184, PROST1000215, PROST1000217, PROST1000220, PROST1000226, PROST1000246, PROST1000262, PROST1000272, PROST1000298, PROST1000322, PROST1000334, PROST1000362, PROST1000377, PROST1000383, PROST1000412, PROST1000419, PROST1000451, PROST1000480, PROST1000485, PROST1000493, PROST1000526, PROST1000527, PROST1000528, PROST1000559, PROST1000575, PROST2000036, PROST2000053, PROST2000067, PROST2000079, PROST2000105, PROST2000143, PROST2000162, PROST2000165, PROST2000176, PROST2000203, PROST2000206, PROST2000212, PROST2000241, PROST2000267, PROST2000273, PROST2000274, PROST2000277, PROST2000284, PROST2000325, PROST2000337, PROST2000432, PROST2000452, PROST2000463, PROST2000470, PROST2000505, PROST2000567, PROST2000572, PROST2000717, PROST2000760, PROST2000761, PROST2000835, PROST2000893, PROST2000961, PROST2001002, PROST2001116, PROST2001138, PROST2001180, PROST2001213, PROST2001414, PROST2001415, PROST2001465, PROST2001521, PROST2001540, PROST2001552, PROST2001599, PROST2001611, PROST2001636, PROST2001739, PROST2001796, PROST2001805, PROST2001823, PROST2001883, PROST2001899, PROST2001997, PROST2001998, PROST2002101, PROST2002162, PROST2002212, PROST2002227, PROST2002338, PROST2002425, PROST2002488, PROST2002489, PROST2002527, PROST2002591, PROST2002602, PROST2002633, PROST2002651, PROST2002682, PROST2002685, PROST2002722, PROST2002736, PROST2002842, PROST2002897, PROST2002906, PROST2002927, PROST2002960, PROST2003102, PROST2003117, PROST2003210, PROST2003232, PROST2003302, PROST2003303, PROST2003324, PROST2003340, PROST2003396, PROST2003428, PROST2003472, PROST2003537, PROST2003563, PROST2003577, PROST2003583, PROST2003586, PROST2003628, PROST2003635, PROST2003674, PROST2003676, PROST2003725, PROST2003732, PROST2003775, PROST2003922, PROST2003930, PROST2004115, PROST2004142, PROST2004146, PROST2004161, PROST2004251, PROST2004258, PROST2004270, PROST2004332, PROST2004481, PROST2004526, PROST2004570, PROST2004727, PROST2004739, PROST2004742, PROST2004744, PROST2004817, PROST2005039, PROST2005067, PROST2005076, PROST2005093, PROST2005121, PROST2005131, PROST2005143, PROST2005228, PROST2005272, PROST2005285, PROST2005426, PROST2005466, PROST2005604, PROST2005630, PROST2005683, PROST2005788, PROST2005793, PROST2005880, PROST2005886, PROST2005904, PROST2005919, PROST2005943, PROST2006008, PROST2006020, PROST2006030, PROST2006060, PROST2006196, PROST2006201, PROST2006260, PROST2006282, PROST2006343, PROST2006450, PROST2006491, PROST2006510, PROST2006536, PROST2006579, PROST2006688, PROST2006737, PROST2006766, PROST2006782, PROST2006933, PROST2006988, PROST2007122, PROST2007200, PROST2007237, PROST2007248, PROST2007289, PROST2007317, PROST2007328, PROST2007382, PROST2007389, PROST2007416, PROST2007528, PROST2007612, PROST2007818, PROST2007871, PROST2007950, PROST2007956, PROST2007974, PROST2007988, PROST2008079, PROST2008088, PROST2008243, PROST2008245, PROST2008268, PROST2008271, PROST2008360, PROST2008447, PROST2008468, PROST2008472, PROST2008516, PROST2008724, PROST2008770, PROST2008835, PROST2008993, PROST2009022, PROST2009208, PROST2009222, PROST2009254, PROST2009273, PROST2009320, PROST2009347, PROST2009365, PROST2009388, PROST2009400, PROST2009470, PROST2009483, PROST2009571, PROST2009731, PROST2009736, PROST2009795, PROST2009901, PROST2009909, PROST2010046, PROST2010219, PROST2010250, PROST2010318, PROST2010326, PROST2010382, PROST2010400, PROST2010545, PROST2010579, PROST2010606, PROST2010885, PROST2011012, PROST2011038, PROST2011105, PROST2011297, PROST2011410, PROST2011439, PROST2011482, PROST2011577, PROST2011631, PROST2011660, PROST2012005, PROST2012007, PROST2012016, PROST2012088, PROST2012140, PROST2012157, PROST2012190, PROST2012249, PROST2012353, PROST2012400, PROST2012448, PROST2012504, PROST2012542, PROST2012550, PROST2012740, PROST2012888, PROST2012890, PROST2013032, PROST2013121, PROST2013260, PROST2013327, PROST2013531, PROST2013605, PROST2013627, PROST2013873, PROST2013880, PROST2014422, PROST2014585, PROST2014601, PROST2014659, PROST2014862, PROST2014916, PROST2014925, PROST2015124, PROST2015137, PROST2015198, PROST2015243, PROST2015246, PROST2015251, PROST2015287, PROST2015332, PROST2015457, PROST2015464, PROST2015537, PROST2015545, PROST2015551, PROST2015636, PROST2015710, PROST2015756, PROST2015877, PROST2015900, PROST2015924, PROST2015932, PROST2016195, PROST2016246, PROST2016351, PROST2016379, PROST2016444, PROST2016462, PROST2016499, PROST2016512, PROST2016566, PROST2016582, PROST2016668, PROST2016684, PROST2016777, PROST2016829, PROST2016860, PROST2016918, PROST2016980, PROST2017098, PROST2017128, PROST2017367, PROST2017413, PROST2017441, PROST2017529, PROST2017578, PROST2017612, PROST2017617, PROST2017700, PROST2017701, PROST2017729, PROST2017836, PROST2017910, PROST2017972, PROST2018030, PROST2018090, PROST2018235, PROST2018437, PROST2018487, PROST2018511, PROST2018583, PROST2018588, PROST2018607, PROST2018788, PROST2018902, PROST2018922, PROST2018977, PROST2019164, PROST2019253, PROST2019296, PROST2019398, PROST2019487, PROST2019781, PUAEN1000039, PUAEN1000057, PUAEN1000065, PUAEN1000081, PUAEN1000085, PUAEN1000087, PUAEN1000121, PUAEN1000147, PUAEN1000161, PUAEN1000164, PUAEN1000175, PUAEN1000239, PUAEN1000275, PUAEN1000276, PUAEN1000288, PUAEN1000322, PUAEN2000080, PUAEN2000152, PUAEN2000175, PUAEN2000247, PUAEN2000312, PUAEN2000394, PUAEN2000535, PUAEN2000594, PUAEN2000684, PUAEN2000942, PUAEN2001260, PUAEN2001345, PUAEN2001526, PUAEN2001586, PUAEN2001882, PUAEN2002473, PUAEN2002489, PUAEN2002552, PUAEN2002568, PUAEN2002616, PUAEN2002758, PUAEN2003018, PUAEN2003079, PUAEN2003116, PUAEN2003408, PUAEN2003517, PUAEN2003954, PUAEN2004067, PUAEN2004083, PUAEN2004400, PUAEN2004511, PUAEN2004525, PUAEN2004875, PUAEN2005110, PUAEN2005247, PUAEN2005502, PUAEN2005588, PUAEN2005930, PUAEN2006029, PUAEN2006328, PUAEN2006335, PUAEN2006578, PUAEN2006639, PUAEN2006761, PUAEN2007044, PUAEN2007350, PUAEN2007785, PUAEN2007898, PUAEN2008123, PUAEN2008228, PUAEN2008314, PUAEN2008515, PUAEN2008815, PUAEN2008939, PUAEN2008980, PUAEN2008985, PUAEN2009174, PUAEN2009348, PUAEN2009534, PUAEN2009655, PUAEN2009795, PUAEN2009852, PUAEN2010346, PUAEN2010824, RECTM1000051, RECTM1000141, RECTM2000220, RECTM2000349, RECTM2000433, RECTM2000510, RECTM2001307, RECTM2001347, RECTM2001519, RECTM2001666, RECTM2001691, RECTM2001749, RECTM2002172, RECTM2002602, RECTM2002632, SALGL1000005, SALGL1000024, SALGL1000028, SALGL1000047, SALGL1000065, SALGL1000107, SALGL1000171, SKMUS1000014, SKMUS1000022, SKMUS1000030, SKMUS1000067, SKMUS1000102, SKMUS1000104, SKMUS1000110, SKMUS1000118, SKMUS1000124, SKMUS1000129, SKMUS1000176, SKMUS1000177, SKMUS2000020, SKMUS2000061, SKMUS2000074, SKMUS2000078, SKMUS2000117, SKMUS2000137, SKMUS2000243, SKMUS2000271, SKMUS2000287, SKMUS2000317, SKMUS2000330, SKMUS2000339, SKMUS2000343, SKMUS2000365, SKMUS2000390, SKMUS2000416, SKMUS2000467, SKMUS2000468, SKMUS2000484, SKMUS2000515, SKMUS2000690, SKMUS2000701, SKMUS2000705, SKMUS2000710, SKMUS2000724, SKMUS2000726, SKMUS2000774, SKMUS2000780, SKMUS2000847, SKMUS2000863, SKMUS2000894, SKMUS2000898, SKMUS2000902, SKMUS2000933, SKMUS2000945, SKMUS2000954, SKMUS2000961, SKMUS2000973, SKMUS2000980, SKMUS2001014, SKMUS2001129, SKMUS2001147, SKMUS2001157, SKMUS2001164, SKMUS2001199, SKMUS2001201, SKMUS2001215, SKMUS2001247, SKMUS2001254, SKMUS2001271, SKMUS2001287, SKMUS2001323, SKMUS2001364, SKMUS2001398, SKMUS2001402, SKMUS2001412, SKMUS2001454, SKMUS2001492, SKMUS2001528, SKMUS2001543, SKMUS2001580, SKMUS2001585, SKMUS2001608, SKMUS2001631, SKMUS2001662, SKMUS2001663, SKMUS2001668, SKMUS2001671, SKMUS2001683, SKMUS2001693, SKMUS2001695, SKMUS2001703, SKMUS2001740, SKMUS2001742, SKMUS2001823, SKMUS2001850, SKMUS2002077, SKMUS2002084, SKMUS2002153, SKMUS2002475, SKMUS2002602, SKMUS2002634, SKMUS2002693, SKMUS2002821, SKMUS2002840, SKMUS2002920, SKMUS2003034, SKMUS2003074, SKMUS2003168, SKMUS2003194, SKMUS2003744, SKMUS2004044, SKMUS2004047, SKMUS2004483, SKMUS2004667, SKMUS2004897, SKMUS2004903, SKMUS2004908, SKMUS2005428, SKMUS2006481, SKMUS2006755, SKMUS2007315, SKMUS2007359, SKMUS2007568, SKMUS2007740, SKMUS2007816, SKMUS2007915, SKMUS2008338, SKMUS2008407, SKMUS2008474, SKMUS2008585, SKMUS2008607, SKMUS2009190, SKMUS2009232, SKMUS2009479, SKMUS2009557, SKNMC1000110, SKNMC1000123, SKNMC1000124, SKNMC1000159, SKNMC1000229, SKNMC1000251, SKNMC1000264, SKNMC2000065, SKNMC2000097, SKNMC2000256, SKNMC2000305, SKNMC2000322, SKNMC2000356, SKNMC2000374, SKNMC2000583, SKNMC2000593, SKNMC2000612, SKNMC2000622, SKNMC2000877, SKNMC2000966, SKNMC2001113, SKNMC2001324, SKNMC2001503, SKNMC2001555, SKNMC2001596, SKNMC2001623, SKNMC2002402, SKNMC2003639, SKNMC2003924, SKNMC2003987, SKNMC2004457, SKNMC2004643, SKNMC2004651, SKNMC2005772, SKNMC2006173, SKNMC2006327, SKNMC2006998, SKNMC2007134, SKNMC2007502, SKNMC2007504, SKNMC2007961, SKNMC2009450, SKNSH1000002, SKNSH1000086, SKNSH1000101, SKNSH1000174, SKNSH1000301, SKNSH1000308, SKNSH1000416, SKNSH2000051, SKNSH2000101, SKNSH2000151, SKNSH2000163, SKNSH2000250, SKNSH2000319, SKNSH2000347, SKNSH2000482, SKNSH2000516, SKNSH2000550, SKNSH2000819, SKNSH2000971, SKNSH2001222, SKNSH2001875, SKNSH2002054, SKNSH2002325, SKNSH2002866, SKNSH2003064, SKNSH2003174, SKNSH2003422, SKNSH2003466, SKNSH2003483, SKNSH2003528, SKNSH2003633, SKNSH2004039, SKNSH2005061, SKNSH2005120, SKNSH2005194, SKNSH2005240, SKNSH2005792, SKNSH2005816, SKNSH2005981, SKNSH2006304, SKNSH2006432, SKNSH2006822, SKNSH2007142, SKNSH2007149, SKNSH2007429, SKNSH2007739, SKNSH2008043, SKNSH2008940, SKNSH2008969, SKNSH2009197, SKNSH2009357, SKNSH2009435, SKNSH2009991, SKNSH2010015, SMINT1000012, SMINT1000016, SMINT1000042, SMINT1000048, SMINT1000051, SMINT1000054, SMINT1000057, SMINT1000071, SMINT1000075, SMINT1000078, SMINT1000091, SMINT1000100, SMINT1000103, SMINT1000117, SMINT1000118, SMINT1000137, SMINT2000007, SMINT2000018, SMINT2000032, SMINT2000040, SMINT2000060, SMINT2000073, SMINT2000084, SMINT2000145, SMINT2000159, SMINT2000176, SMINT2000185, SMINT2000227, SMINT2000229, SMINT2000232, SMINT2000239, SMINT2000267, SMINT2000400, SMINT2000454, SMINT2000518, SMINT2000529, SMINT2000530, SMINT2000537, SMINT2000538, SMINT2000541, SMINT2000545, SMINT2000558, SMINT2000562, SMINT2000568, SMINT2000602, SMINT2000609, SMINT2000629, SMINT2000659, SMINT2000747, SMINT2000811, SMINT2000824, SMINT2000933, SMINT2000984, SMINT2001114, SMINT2001158, SMINT2001183, SMINT2001199, SMINT2001222, SMINT2001348, SMINT2001397, SMINT2001458, SMINT2001461, SMINT2001535, SMINT2001559, SMINT2001609, SMINT2001615, SMINT2001683, SMINT2001731, SMINT2001812, SMINT2001950, SMINT2002126, SMINT2002159, SMINT2002202, SMINT2002210, SMINT2002224, SMINT2002281, SMINT2002311, SMINT2002314, SMINT2002328, SMINT2002414, SMINT2002457, SMINT2002620, SMINT2002743, SMINT2002778, SMINT2002880, SMINT2002882, SMINT2002884, SMINT2002899, SMINT2002974, SMINT2002976, SMINT2003003, SMINT2003128, SMINT2003150, SMINT2003317, SMINT2003340, SMINT2003386, SMINT2003423, SMINT2003505, SMINT2003551, SMINT2003569, SMINT2003641, SMINT2003644, SMINT2003866, SMINT2004023, SMINT2004037, SMINT2004047, SMINT2004086, SMINT2004280, SMINT2004299, SMINT2004339, SMINT2004350, SMINT2004414, SMINT2004473, SMINT2004547, SMINT2004583, SMINT2004589, SMINT2004729, SMINT2004781, SMINT2004872, SMINT2004891, SMINT2004909, SMINT2004972, SMINT2004992, SMINT2005075, SMINT2005161, SMINT2005174, SMINT2005213, SMINT2005330, SMINT2005368, SMINT2005387, SMINT2005402, SMINT2005405, SMINT2005621, SMINT2005623, SMINT2005624, SMINT2005688, SMINT2005800, SMINT2005956, SMINT2006078, SMINT2006205, SMINT2006331, SMINT2006596, SMINT2006641, SMINT2006648, SMINT2006708, SMINT2006716, SMINT2006801, SMINT2007062, SMINT2007101, SMINT2007140, SMINT2007187, SMINT2007219, SMINT2007294, SMINT2007365, SMINT2007391, SMINT2007508, SMINT2007526, SMINT2007579, SMINT2007647, SMINT2007729, SMINT2007790, SMINT2007792, SMINT2007796, SMINT2007867, SMINT2007932, SMINT2008042, SMINT2008054, SMINT2008133, SMINT2008277, SMINT2008329, SMINT2008455, SMINT2008491, SMINT2008531, SMINT2008545, SMINT2008558, SMINT2008590, SMINT2008625, SMINT2008672, SMINT2008690, SMINT2008715, SMINT2008720, SMINT2008817, SMINT2008844, SMINT2008869, SMINT2008917, SMINT2008921, SMINT2008960, SMINT2009119, SMINT2009121, SMINT2009212, SMINT2009216, SMINT2009233, SMINT2009259, SMINT2009272, SMINT2009292, SMINT2009363, SMINT2009415, SMINT2009468, SMINT2009505, SMINT2009529, SMINT2009832, SMINT2009895, SMINT2009902, SMINT2009973, SMINT2010015, SMINT2010068, SMINT2010076, SMINT2010084, SMINT2010144, SMINT2010200, SMINT2010278, SMINT2010324, SMINT2010326, SMINT2010369, SMINT2010426, SMINT2010500, SMINT2010533, SMINT2010629, SMINT2010639, SMINT2010672, SMINT2010753, SMINT2010853, SMINT2010897, SMINT2010901, SMINT2010959, SMINT2010997, SMINT2011033, SMINT2011066, SMINT2011273, SMINT2011311, SMINT2011406, SMINT2011509, SMINT2011567, SMINT2011588, SMINT2011656, SMINT2011888, SMINT2011958, SMINT2012040, SMINT2012179, SMINT2012195, SMINT2012285, SMINT2012501, SMINT2012734, SMINT2012793, SMINT2013032, SMINT2013129, SMINT2013170, SMINT2013181, SMINT2013228, SMINT2013613, SMINT2013626, SMINT2013695, SMINT2013833, SMINT2013890, SMINT2014166, SMINT2014282, SMINT2014443, SMINT2014480, SMINT2014489, SMINT2014721, SMINT2015006, SMINT2015294, SMINT2015306, SMINT2015326, SMINT2015353, SMINT2015454, SMINT2015518, SMINT2015745, SMINT2015787, SMINT2015810, SMINT2016122, SMINT2016146, SMINT2016286, SMINT2016313, SMINT2016396, SMINT2016412, SMINT2016440, SMINT2016477, SMINT2016544, SMINT2016857, SMINT2017134, SMINT2017319, SMINT2017324, SMINT2017410, SMINT2017431, SMINT2017432, SMINT2017436, SMINT2017659, SMINT2017736, SMINT2017781, SMINT2017855, SMINT2017884, SMINT2017964, SMINT2017974, SMINT2018343, SMINT2018592, SMINT2018681, SMINT2019017, SMINT2019105, SMINT2019142, SMINT2019153, SMINT2019200, SPLEN1000013, SPLEN1000041, SPLEN1000049, SPLEN1000056, SPLEN1000087, SPLEN1000089, SPLEN1000091, SPLEN1000106, SPLEN1000134, SPLEN1000139, SPLEN1000143, SPLEN1000144, SPLEN1000145, SPLEN1000156, SPLEN1000163, SPLEN1000165, SPLEN1000178, SPLEN2000020, SPLEN2000047, SPLEN2000064, SPLEN2000072, SPLEN2000098, SPLEN2000126, SPLEN2000134, SPLEN2000143, SPLEN2000189, SPLEN2000197, SPLEN2000205, SPLEN2000210, SPLEN2000222, SPLEN2000242, SPLEN2000243, SPLEN2000247, SPLEN2000255, SPLEN2000267, SPLEN2000270, SPLEN2000307, SPLEN2000310, SPLEN2000341, SPLEN2000350, SPLEN2000357, SPLEN2000364, SPLEN2000402, SPLEN2000414, SPLEN2000420, SPLEN2000443, SPLEN2000448, SPLEN2000450, SPLEN2000464, SPLEN2000496, SPLEN2000505, SPLEN2000515, SPLEN2000516, SPLEN2000537, SPLEN2000541, SPLEN2000607, SPLEN2000630, SPLEN2000695, SPLEN2000698, SPLEN2000839, SPLEN2001135, SPLEN2001141, SPLEN2001157, SPLEN2001176, SPLEN2001227, SPLEN2001245, SPLEN2001278, SPLEN2001354, SPLEN2001367, SPLEN2001383, SPLEN2001476, SPLEN2001503, SPLEN2001510, SPLEN2001599, SPLEN2001626, SPLEN2001650, SPLEN2001689, SPLEN2001710, SPLEN2001761, SPLEN2001781, SPLEN2001881, SPLEN2001912, SPLEN2001945, SPLEN2002007, SPLEN2002053, SPLEN2002133, SPLEN2002147, SPLEN2002166, SPLEN2002175, SPLEN2002223, SPLEN2002272, SPLEN2002314, SPLEN2002335, SPLEN2002343, SPLEN2002354, SPLEN2002385, SPLEN2002419, SPLEN2002451, SPLEN2002462, SPLEN2002463, SPLEN2002467, SPLEN2002493, SPLEN2002662, SPLEN2002695, SPLEN2002707, SPLEN2002917, SPLEN2002931, SPLEN2002957, SPLEN2003160, SPLEN2003204, SPLEN2003219, SPLEN2003297, SPLEN2003396, SPLEN2003678, SPLEN2003878, SPLEN2003918, SPLEN2003924, SPLEN2004060, SPLEN2004078, SPLEN2004124, SPLEN2004148, SPLEN2004181, SPLEN2004220, SPLEN2004343, SPLEN2004346, SPLEN2004368, SPLEN2004555, SPLEN2004611, SPLEN2004662, SPLEN2004773, SPLEN2004844, SPLEN2004880, SPLEN2004984, SPLEN2005009, SPLEN2005227, SPLEN2005272, SPLEN2005342, SPLEN2005416, SPLEN2005429, SPLEN2005450, SPLEN2005474, SPLEN2005560, SPLEN2005727, SPLEN2005783, SPLEN2005790, SPLEN2005818, SPLEN2005838, SPLEN2005869, SPLEN2005939, SPLEN2006122, SPLEN2006133, SPLEN2006143, SPLEN2006232, SPLEN2006268, SPLEN2006283, SPLEN2006305, SPLEN2006374, SPLEN2006389, SPLEN2006425, SPLEN2006671, SPLEN2006701, SPLEN2006785, SPLEN2006875, SPLEN2007182, SPLEN2007276, SPLEN2007314, SPLEN2007326, SPLEN2007350, SPLEN2007388, SPLEN2007498, SPLEN2007619, SPLEN2007653, SPLEN2007689, SPLEN2007695, SPLEN2007739, SPLEN2007750, SPLEN2007794, SPLEN2007879, SPLEN2007926, SPLEN2007951, SPLEN2008007, SPLEN2008135, SPLEN2008164, SPLEN2008317, SPLEN2008460, SPLEN2008496, SPLEN2008591, SPLEN2008786, SPLEN2009081, SPLEN2009088, SPLEN2009163, SPLEN2009315, SPLEN2009340, SPLEN2009512, SPLEN2009513, SPLEN2009541, SPLEN2009548, SPLEN2009555, SPLEN2009581, SPLEN2009733, SPLEN2009803, SPLEN2009884, SPLEN2009918, SPLEN2009970, SPLEN2010004, SPLEN2010015, SPLEN2010112, SPLEN2010119, SPLEN2010146, SPLEN2010187, SPLEN2010195, SPLEN2010350, SPLEN2010395, SPLEN2010415, SPLEN2010447, SPLEN2010469, SPLEN2010510, SPLEN2010530, SPLEN2010534, SPLEN2010588, SPLEN2010625, SPLEN2010800, SPLEN2010846, SPLEN2010847, SPLEN2010862, SPLEN2010912, SPLEN2010978, SPLEN2010986, SPLEN2011018, SPLEN2011021, SPLEN2011025, SPLEN2011086, SPLEN2011139, SPLEN2011145, SPLEN2011248, SPLEN2011252, SPLEN2011419, SPLEN2011422, SPLEN2011672, SPLEN2011678, SPLEN2011737, SPLEN2011758, SPLEN2011766, SPLEN2011805, SPLEN2011820, SPLEN2011830, SPLEN2011931, SPLEN2011981, SPLEN2012115, SPLEN2012175, SPLEN2012179, SPLEN2012185, SPLEN2012234, SPLEN2012453, SPLEN2012523, SPLEN2012524, SPLEN2012525, SPLEN2012571, SPLEN2012606, SPLEN2012611, SPLEN2012619, SPLEN2012624, SPLEN2012725, SPLEN2012743, SPLEN2012756, SPLEN2012800, SPLEN2012846, SPLEN2012889, SPLEN2012961, SPLEN2013108, SPLEN2013195, SPLEN2013644, SPLEN2013648, SPLEN2013670, SPLEN2013673, SPLEN2013714, SPLEN2013753, SPLEN2013821, SPLEN2013857, SPLEN2013860, SPLEN2013910, SPLEN2013923, SPLEN2013936, SPLEN2014041, SPLEN2014063, SPLEN2014073, SPLEN2014080, SPLEN2014119, SPLEN2014136, SPLEN2014199, SPLEN2014210, SPLEN2014293, SPLEN2014318, SPLEN2014381, SPLEN2014452, SPLEN2014454, SPLEN2014486, SPLEN2014543, SPLEN2014645, SPLEN2014669, SPLEN2014711, SPLEN2014739, SPLEN2014860, SPLEN2014865, SPLEN2014911, SPLEN2014919, SPLEN2014920, SPLEN2014924, SPLEN2014937, SPLEN2014946, SPLEN2015031, SPLEN2015094, SPLEN2015121, SPLEN2015129, SPLEN2015158, SPLEN2015166, SPLEN2015216, SPLEN2015258, SPLEN2015261, SPLEN2015267, SPLEN2015276, SPLEN2015310, SPLEN2015415, SPLEN2015433, SPLEN2015593, SPLEN2015674, SPLEN2015679, SPLEN2015707, SPLEN2015730, SPLEN2015746, SPLEN2015788, SPLEN2015815, SPLEN2015890, SPLEN2015891, SPLEN2015899, SPLEN2016045, SPLEN2016053, SPLEN2016069, SPLEN2016098, SPLEN2016135, SPLEN2016139, SPLEN2016241, SPLEN2016250, SPLEN2016304, SPLEN2016356, SPLEN2016480, SPLEN2016531, SPLEN2016533, SPLEN2016541, SPLEN2016552, SPLEN2016554, SPLEN2016602, SPLEN2016627, SPLEN2016678, SPLEN2016773, SPLEN2016781, SPLEN2016840, SPLEN2016863, SPLEN2016922, SPLEN2016932, SPLEN2016973, SPLEN2017043, SPLEN2017104, SPLEN2017121, SPLEN2017147, SPLEN2017187, SPLEN2017189, SPLEN2017212, SPLEN2017318, SPLEN2017351, SPLEN2017426, SPLEN2017452, SPLEN2017538, SPLEN2017592, SPLEN2017613, SPLEN2017620, SPLEN2017643, SPLEN2017687, SPLEN2017740, SPLEN2017781, SPLEN2017918, SPLEN2017999, SPLEN2018098, SPLEN2018112, SPLEN2018157, SPLEN2018159, SPLEN2018180, SPLEN2018181, SPLEN2018280, SPLEN2018285, SPLEN2018299, SPLEN2018364, SPLEN2018395, SPLEN2018643, SPLEN2018683, SPLEN2018732, SPLEN2018749, SPLEN2018933, SPLEN2019008, SPLEN2019043, SPLEN2019077, SPLEN2019092, SPLEN2019102, SPLEN2019131, SPLEN2019169, SPLEN2019257, SPLEN2019311, SPLEN2019323, SPLEN2019349, SPLEN2019375, SPLEN2019379, SPLEN2019446, SPLEN2019471, SPLEN2019480, SPLEN2019505, SPLEN2019571, SPLEN2019575, SPLEN2019709, SPLEN2019774, SPLEN2019793, SPLEN2019811, SPLEN2019839, SPLEN2019956, SPLEN2019985, SPLEN2020007, SPLEN2020034, SPLEN2020153, SPLEN2020154, SPLEN2020166, SPLEN2020183, SPLEN2020223, SPLEN2020359, SPLEN2020417, SPLEN2020427, SPLEN2020467, SPLEN2020512, SPLEN2020608, SPLEN2020777, SPLEN2020805, SPLEN2021057, SPLEN2021122, SPLEN2021157, SPLEN2021194, SPLEN2021231, SPLEN2021273, SPLEN2021295, SPLEN2021298, SPLEN2021383, SPLEN2021417, SPLEN2021440, SPLEN2021458, SPLEN2021463, SPLEN2021560, SPLEN2021701, SPLEN2021795, SPLEN2021983, SPLEN2021991, SPLEN2022040, SPLEN2022162, SPLEN2022227, SPLEN2022522, SPLEN2022591, SPLEN2022785, SPLEN2022920, SPLEN2023024, SPLEN2023118, SPLEN2023160, SPLEN2023423, SPLEN2023710, SPLEN2023733, SPLEN2023791, SPLEN2023977, SPLEN2024070, SPLEN2024127, SPLEN2024232, SPLEN2024273, SPLEN2024383, SPLEN2024489, SPLEN2024530, SPLEN2024571, SPLEN2024577, SPLEN2024617, SPLEN2024737, SPLEN2024922, SPLEN2024956, SPLEN2024990, SPLEN2025012, SPLEN2025017, SPLEN2025039, SPLEN2025219, SPLEN2025491, SPLEN2025626, SPLEN2025820, SPLEN2026144, SPLEN2026411, SPLEN2026765, SPLEN2027113, SPLEN2027157, SPLEN2027395, SPLEN2027488, SPLEN2027780, SPLEN2027852, SPLEN2027868, SPLEN2027995, SPLEN2028046, SPLEN2028066, SPLEN2028138, SPLEN2028365, SPLEN2028417, SPLEN2028424, SPLEN2028466, SPLEN2028593, SPLEN2028844, SPLEN2028914, SPLEN2028994, SPLEN2029051, SPLEN2029176, SPLEN2029295, SPLEN2029380, SPLEN2029522, SPLEN2029683, SPLEN2029727, SPLEN2029904, SPLEN2030250, SPLEN2030335, SPLEN2030371, SPLEN2030397, SPLEN2030479, SPLEN2030495, SPLEN2030562, SPLEN2030763, SPLEN2030847, SPLEN2031004, SPLEN2031125, SPLEN2031424, SPLEN2031547, SPLEN2031674, SPLEN2031724, SPLEN2031780, SPLEN2032036, SPLEN2032112, SPLEN2032154, SPLEN2032321, SPLEN2032356, SPLEN2032677, SPLEN2032813, SPLEN2032924, SPLEN2033098, SPLEN2033153, SPLEN2033333, SPLEN2033490, SPLEN2033539, SPLEN2033921, SPLEN2033996, SPLEN2034021, SPLEN2034081, SPLEN2034252, SPLEN2034448, SPLEN2034551, SPLEN2034601, SPLEN2034678, SPLEN2034781, SPLEN2034864, SPLEN2034934, SPLEN2035318, SPLEN2035615, SPLEN2036076, SPLEN2036103, SPLEN2036326, SPLEN2036475, SPLEN2036501, SPLEN2036579, SPLEN2036608, SPLEN2036702, SPLEN2036712, SPLEN2036821, SPLEN2036932, SPLEN2036953, SPLEN2037077, SPLEN2037194, SPLEN2037319, SPLEN2037444, SPLEN2037580, SPLEN2037630, SPLEN2037678, SPLEN2037722, SPLEN2037891, SPLEN2038055, SPLEN2038180, SPLEN2038345, SPLEN2038407, SPLEN2038473, SPLEN2038834, SPLEN2039311, SPLEN2039379, SPLEN2039672, SPLEN2039697, SPLEN2039845, SPLEN2039936, SPLEN2040222, SPLEN2040237, SPLEN2040824, SPLEN2041304, SPLEN2041306, SPLEN2041310, SPLEN2041585, SPLEN2041645, SPLEN2041700, SPLEN2041720, SPLEN2041977, SPLEN2042051, SPLEN2042303, SPLEN2042521, SPLEN2042535, SPLEN2042598, SPLEN2042714, SPLEN2042920, STOMA1000013, STOMA1000047, STOMA1000052, STOMA1000074, STOMA1000091, STOMA1000117, STOMA1000133, STOMA1000175, STOMA1000186, STOMA1000190, STOMA1000191, STOMA2000032, STOMA2000072, STOMA2000088, STOMA2000104, STOMA2000148, STOMA2000168, STOMA2000183, STOMA2000188, STOMA2000257, STOMA2000279, STOMA2000289, STOMA2000383, STOMA2000386, STOMA2000478, STOMA2000482, STOMA2000529, STOMA2000539, STOMA2000567, STOMA2000640, STOMA2000678, STOMA2000686, STOMA2000888, STOMA2001025, STOMA2001389, STOMA2002052, STOMA2002141, STOMA2002367, STOMA2002688, STOMA2002828, STOMA2003158, STOMA2003289, STOMA2003444, STOMA2003477, STOMA2003646, STOMA2003716, STOMA2003781, STOMA2003894, STOMA2004194, STOMA2004294, STOMA2004663, STOMA2004668, STOMA2004852, STOMA2004873, STOMA2004884, STOMA2004893, STOMA2004925, STOMA2005120, STOMA2005664, STOMA2005667, STOMA2005746, STOMA2005782, STOMA2006181, STOMA2006213, STOMA2006325, STOMA2006330, STOMA2006398, STOMA2006447, STOMA2006780, STOMA2006904, STOMA2007269, STOMA2007680, STOMA2007745, STOMA2008050, STOMA2008361, STOMA2008546, STOMA2008614, STOMA2008638, STOMA2008838, STOMA2009250, STOMA2009253, STOMA2009256, STOMA2009289, SYNOV1000049, SYNOV1000118, SYNOV1000128, SYNOV1000164, SYNOV1000190, SYNOV1000256, SYNOV1000374, SYNOV2000152, SYNOV2000171, SYNOV2000173, SYNOV2000177, SYNOV2000178, SYNOV2000193, SYNOV2000251, SYNOV2000279, SYNOV2000291, SYNOV2000297, SYNOV2000397, SYNOV2000426, SYNOV2000601, SYNOV2000700, SYNOV2000820, SYNOV2000824, SYNOV2000923, SYNOV2001014, SYNOV2001035, SYNOV2001088, SYNOV2001111, SYNOV2001144, SYNOV2001212, SYNOV2001239, SYNOV2001251, SYNOV2001262, SYNOV2001300, SYNOV2001356, SYNOV2001374, SYNOV2001390, SYNOV2001451, SYNOV2001457, SYNOV2001468, SYNOV2001581, SYNOV2001648, SYNOV2001660, SYNOV2003326, SYNOV2005216, SYNOV2005448, SYNOV2005541, SYNOV2005673, SYNOV2005817, SYNOV2005962, SYNOV2006430, SYNOV2006620, SYNOV2007758, SYNOV2007965, SYNOV2008765, SYNOV2011233, SYNOV2012326, SYNOV2013365, SYNOV2013637, SYNOV2014157, SYNOV2014364, SYNOV2016124, SYNOV2016837, SYNOV2017055, SYNOV2017179, SYNOV2018921, SYNOV2019280, SYNOV2020085, SYNOV2020463, SYNOV2021320, SYNOV2021953, SYNOV3000184, SYNOV3000231, SYNOV3000302, SYNOV3000345, SYNOV4000249, SYNOV4000472, SYNOV4000598, SYNOV4000706, SYNOV4001153, SYNOV4001224, SYNOV4001326, SYNOV4001342, SYNOV4001395, SYNOV4002001, SYNOV4002392, SYNOV4002875, SYNOV4002883, SYNOV4003174, SYNOV4003322, SYNOV4003681, SYNOV4003981, SYNOV4004184, SYNOV4004741, SYNOV4004823, SYNOV4004914, SYNOV4005256, SYNOV4005570, SYNOV4005739, SYNOV4005889, SYNOV4005981, SYNOV4005989, SYNOV4006256, SYNOV4006327, SYNOV4006542, SYNOV4007012, SYNOV4007215, SYNOV4007360, SYNOV4007430, SYNOV4007521, SYNOV4007553, SYNOV4007671, SYNOV4007711, SYNOV4008245, SYNOV4008336, SYNOV4009129, SYNOV4009139, SYNOV4009298, SYNOV4009575, T1ESE2000116, T1ESE2000904, T1ESE2002665, TBAES2000004, TBAES2000059, TBAES2000116, TBAES2000255, TBAES2000315, TBAES2000352, TBAES2000932, TBAES2001171, TBAES2001220, TBAES2001229, TBAES2001258, TBAES2001296, TBAES2001492, TBAES2001553, TBAES2001751, TBAES2003435, TBAES2003492, TBAES2003550, TBAES2003702, TBAES2003917, TBAES2004055, TBAES2004105, TBAES2004939, TBAES2005157, TBAES2005361, TBAES2005543, TBAES2006568, TBAES2006881, TBAES2007379, TBAES2007428, TBAES2007481, TBAES2007504, TBAES2007548, TBAES2007697, TBAES2007862, TBAES2007964, TBAES2008133, TBAES2009387, TCERX2000171, TCERX2000431, TCERX2000613, TCERX2000998, TCERX2002644, TCOLN1000037, TCOLN1000180, TCOLN2000139, TCOLN2000236, TCOLN2000641, TCOLN2001268, TCOLN2002047, TCOLN2002278, TESOP1000035, TESOP1000127, TESOP1000160, TESOP2000083, TESOP2000090, TESOP2000205, TESOP2000312, TESOP2000390, TESOP2000400, TESOP2000510, TESOP2000527, TESOP2000569, TESOP2000739, TESOP2000801, TESOP2001122, TESOP2001166, TESOP2001345, TESOP2001474, TESOP2001796, TESOP2001818, TESOP2001849, TESOP2001865, TESOP2001901, TESOP2001953, TESOP2002005, TESOP2002110, TESOP2002150, TESOP2002273, TESOP2002489, TESOP2002539, TESOP2002545, TESOP2002804, TESOP2002950, TESOP2003273, TESOP2003308, TESOP2003553, TESOP2003753, TESOP2004110, TESOP2004114, TESOP2004173, TESOP2004214, TESOP2005199, TESOP2005285, TESOP2005485, TESOP2005498, TESOP2005579, TESOP2006041, TESOP2006053, TESOP2006060, TESOP2006068, TESOP2006110, TESOP2006398, TESOP2006670, TESOP2006704, TESOP2006746, TESOP2006865, TESOP2006893, TESOP2007041, TESOP2007052, TESOP2007262, TESOP2007384, TESOP2007636, TESOP2007674, TESOP2007688, TESOP2007725, TESOP2007912, TESOP2007978, TESOP2008127, TESOP2008552, TESOP2008556, TESOP2008563, TESOP2008820, TESOP2009121, TESOP2009201, TESOP2009247, TESOP2009555, TESTI1000018, TESTI1000019, TESTI1000025, TESTI1000029, TESTI1000030, TESTI1000042, TESTI1000045, TESTI1000051, TESTI1000055, TESTI1000064, TESTI1000070, TESTI1000085, TESTI1000088, TESTI1000093, TESTI1000094, TESTI1000096, TESTI1000101, TESTI1000109, TESTI1000125, TESTI1000127, TESTI1000128, TESTI1000131, TESTI1000138, TESTI1000142, TESTI1000157, TESTI1000163, TESTI1000168, TESTI1000169, TESTI1000179, TESTI1000183, TESTI1000191, TESTI1000257, TESTI1000266, TESTI1000319, TESTI1000330, TESTI1000348, TESTI1000390, TESTI1000391, TESTI1000459, TESTI1000491, TESTI1000545, TESTI2000006, TESTI2000018, TESTI2000044, TESTI2000100, TESTI2000117, TESTI2000120, TESTI2000147, TESTI2000154, TESTI2000172, TESTI2000177, TESTI2000179, TESTI2000184, TESTI2000207, TESTI2000208, TESTI2000221, TESTI2000238, TESTI2000253, TESTI2000272, TESTI2000278, TESTI2000349, TESTI2000356, TESTI2000358, TESTI2000372, TESTI2000427, TESTI2000431, TESTI2000435, TESTI2000443, TESTI2000452, TESTI2000462, TESTI2000489, TESTI2000520, TESTI2000571, TESTI2000591, TESTI2000598, TESTI2000600, TESTI2000616, TESTI2000627, TESTI2000644, TESTI2000671, TESTI2000683, TESTI2000689, TESTI2000695, TESTI2000699, TESTI2000707, TESTI2000745, TESTI2000756, TESTI2000762, TESTI2000784, TESTI2000808, TESTI2000819, TESTI2000830, TESTI2000840, TESTI2000849, TESTI2000850, TESTI2000874, TESTI2000883, TESTI2000909, TESTI2000951, TESTI2000970, TESTI2000981, TESTI2001008, TESTI2001049, TESTI2001082, TESTI2001120, TESTI2001134, TESTI2001141, TESTI2001180, TESTI2001208, TESTI2001229, TESTI2001236, TESTI2001237, TESTI2001306, TESTI2001313, TESTI2001330, TESTI2001339, TESTI2001345, TESTI2001352, TESTI2001364, TESTI2001412, TESTI2001420, TESTI2001498, TESTI2001511, TESTI2001512, TESTI2001518, TESTI2001556, TESTI2001593, TESTI2001613, TESTI2001621, TESTI2001661, TESTI2001665, TESTI2001671, TESTI2001697, TESTI2001725, TESTI2001758, TESTI2001766, TESTI2001792, TESTI2001793, TESTI2001795, TESTI2001812, TESTI2001815, TESTI2001823, TESTI2001826, TESTI2001827, TESTI2001852, TESTI2001862, TESTI2001869, TESTI2001879, TESTI2001894, TESTI2001898, TESTI2001915, TESTI2001950, TESTI2001959, TESTI2001968, TESTI2001985, TESTI2001991, TESTI2002002, TESTI2002012, TESTI2002036, TESTI2002048, TESTI2002057, TESTI2002081, TESTI2002090, TESTI2002105, TESTI2002149, TESTI2002216, TESTI2002223, TESTI2002245, TESTI2002251, TESTI2002256, TESTI2002264, TESTI2002282, TESTI2002293, TESTI2002294, TESTI2002326, TESTI2002351, TESTI2002361, TESTI2002365, TESTI2002369, TESTI2002406, TESTI2002415, TESTI2002423, TESTI2002453, TESTI2002461, TESTI2002465, TESTI2002467, TESTI2002498, TESTI2002516, TESTI2002544, TESTI2002578, TESTI2002580, TESTI2002618, TESTI2002632, TESTI2002676, TESTI2002690, TESTI2002696, TESTI2002698, TESTI2002700, TESTI2002707, TESTI2002724, TESTI2002729, TESTI2002752, TESTI2002753, TESTI2002789, TESTI2002802, TESTI2002806, TESTI2002840, TESTI2002866, TESTI2002877, TESTI2002910, TESTI2002912, TESTI2002928, TESTI2002937, TESTI2002965, TESTI2002993, TESTI2003005, TESTI2003020, TESTI2003031, TESTI2003037, TESTI2003044, TESTI2003059, TESTI2003061, TESTI2003071, TESTI2003074, TESTI2003089, TESTI2003104, TESTI2003109, TESTI2003117, TESTI2003127, TESTI2003130, TESTI2003131, TESTI2003139, TESTI2003141, TESTI2003152, TESTI2003181, TESTI2003193, TESTI2003196, TESTI2003228, TESTI2003236, TESTI2003255, TESTI2003258, TESTI2003277, TESTI2003280, TESTI2003299, TESTI2003311, TESTI2003321, TESTI2003327, TESTI2003330, TESTI2003347, TESTI2003354, TESTI2003356, TESTI2003372, TESTI2003376, TESTI2003418, TESTI2003419, TESTI2003432, TESTI2003454, TESTI2003475, TESTI2003476, TESTI2003498, TESTI2003512, TESTI2003539, TESTI2003541, TESTI2003545, TESTI2003551, TESTI2003574, TESTI2003580, TESTI2003589, TESTI2003596, TESTI2003598, TESTI2003615, TESTI2003625, TESTI2003638, TESTI2003649, TESTI2003692, TESTI2003718, TESTI2003727, TESTI2003756, TESTI2003768, TESTI2003781, TESTI2003787, TESTI2003824, TESTI2003827, TESTI2003894, TESTI2003911, TESTI2003914, TESTI2003940, TESTI2003962, TESTI2003998, TESTI2004000, TESTI2004031, TESTI2004073, TESTI2004080, TESTI2004085, TESTI2004089, TESTI2004111, TESTI2004119, TESTI2004122, TESTI2004153, TESTI2004163, TESTI2004169, TESTI2004207, TESTI2004215, TESTI2004227, TESTI2004229, TESTI2004243, TESTI2004255, TESTI2004287, TESTI2004295, TESTI2004313, TESTI2004318, TESTI2004322, TESTI2004391, TESTI2004399, TESTI2004423, TESTI2004431, TESTI2004432, TESTI2004452, TESTI2004459, TESTI2004490, TESTI2004539, TESTI2004552, TESTI2004560, TESTI2004574, TESTI2004601, TESTI2004611, TESTI2004649, TESTI2004654, TESTI2004675, TESTI2004687, TESTI2004689, TESTI2004700, TESTI2004706, TESTI2004712, TESTI2004734, TESTI2004737, TESTI2004783, TESTI2004791, TESTI2004793, TESTI2004860, TESTI2004906, TESTI2004920, TESTI2004929, TESTI2004936, TESTI2004941, TESTI2004971, TESTI2004982, TESTI2004993, TESTI2004994, TESTI2004999, TESTI2005017, TESTI2005025, TESTI2005040, TESTI2005060, TESTI2005072, TESTI2005085, TESTI2005112, TESTI2005120, TESTI2005153, TESTI2005155, TESTI2005173, TESTI2005267, TESTI2005268, TESTI2005280, TESTI2005307, TESTI2005326, TESTI2005363, TESTI2005376, TESTI2005378, TESTI2005380, TESTI2005391, TESTI2005395, TESTI2005396, TESTI2005408, TESTI2005415, TESTI2005470, TESTI2005492, TESTI2005564, TESTI2005568, TESTI2005584, TESTI2005588, TESTI2005590, TESTI2005603, TESTI2005609, TESTI2005610, TESTI2005630, TESTI2005672, TESTI2005683, TESTI2005690, TESTI2005692, TESTI2005703, TESTI2005720, TESTI2005731, TESTI2005739, TESTI2005742, TESTI2005743, TESTI2005767, TESTI2005775, TESTI2005784, TESTI2005788, TESTI2005827, TESTI2005835, TESTI2005860, TESTI2005892, TESTI2005911, TESTI2005933, TESTI2005937, TESTI2005948, TESTI2005979, TESTI2005981, TESTI2005982, TESTI2005984, TESTI2005986, TESTI2005987, TESTI2006007, TESTI2006008, TESTI2006015, TESTI2006016, TESTI2006035, TESTI2006040, TESTI2006041, TESTI2006045, TESTI2006067, TESTI2006083, TESTI2006097, TESTI2006109, TESTI2006111, TESTI2006120, TESTI2006125, TESTI2006179, TESTI2006209, TESTI2006210, TESTI2006212, TESTI2006218, TESTI2006238, TESTI2006255, TESTI2006258, TESTI2006278, TESTI2006333, TESTI2006341, TESTI2006360, TESTI2006383, TESTI2006409, TESTI2006425, TESTI2006437, TESTI2006453, TESTI2006457, TESTI2006460, TESTI2006465, TESTI2006483, TESTI2006499, TESTI2006523, TESTI2006543, TESTI2006565, TESTI2006572, TESTI2006615, TESTI2006617, TESTI2006624, TESTI2006628, TESTI2006633, TESTI2006643, TESTI2006648, TESTI2006659, TESTI2006660, TESTI2006665, TESTI2006667, TESTI2006677, TESTI2006720, TESTI2006735, TESTI2006744, TESTI2006774, TESTI2006853, TESTI2006866, TESTI2006872, TESTI2006877, TESTI2006879, TESTI2006894, TESTI2006940, TESTI2006955, TESTI2006978, TESTI2006979, TESTI2006990, TESTI2007040, TESTI2007074, TESTI2007078, TESTI2007113, TESTI2007152, TESTI2007163, TESTI2007183, TESTI2007220, TESTI2007234, TESTI2007311, TESTI2007320, TESTI2007346, TESTI2007358, TESTI2007402, TESTI2007405, TESTI2007407, TESTI2007422, TESTI2007452, TESTI2007466, TESTI2007480, TESTI2007490, TESTI2007502, TESTI2007524, TESTI2007533, TESTI2007576, TESTI2007613, TESTI2007657, TESTI2007685, TESTI2007692, TESTI2007749, TESTI2007750, TESTI2007808, TESTI2007814, TESTI2007829, TESTI2007864, TESTI2007867, TESTI2007872, TESTI2007906, TESTI2007922, TESTI2007951, TESTI2007972, TESTI2007973, TESTI2007998, TESTI2008014, TESTI2008020, TESTI2008032, TESTI2008033, TESTI2008046, TESTI2008081, TESTI2008099, TESTI2008139, TESTI2008144, TESTI2008161, TESTI2008189, TESTI2008204, TESTI2008219, TESTI2008233, TESTI2008234, TESTI2008237, TESTI2008278, TESTI2008320, TESTI2008331, TESTI2008343, TESTI2008387, TESTI2008389, TESTI2008394, TESTI2008405, TESTI2008420, TESTI2008425, TESTI2008440, TESTI2008567, TESTI2008595, TESTI2008621, TESTI2008636, TESTI2008657, TESTI2008684, TESTI2008699, TESTI2008715, TESTI2008762, TESTI2008774, TESTI2008786, TESTI2008822, TESTI2008835, TESTI2008840, TESTI2008847, TESTI2008884, TESTI2008901, TESTI2008929, TESTI2008946, TESTI2008960, TESTI2009018, TESTI2009091, TESTI2009097, TESTI2009136, TESTI2009185, TESTI2009190, TESTI2009217, TESTI2009239, TESTI2009325, TESTI2009388, TESTI2009390, TESTI2009400, TESTI2009402, TESTI2009412, TESTI2009423, TESTI2009447, TESTI2009462, TESTI2009474, TESTI2009477, TESTI2009497, TESTI2009502, TESTI2009511, TESTI2009520, TESTI2009544, TESTI2009545, TESTI2009551, TESTI2009577, TESTI2009585, TESTI2009588, TESTI2009683, TESTI2009727, TESTI2009739, TESTI2009785, TESTI2009812, TESTI2009835, TESTI2009853, TESTI2009935, TESTI2009977, TESTI2009987, TESTI2010009, TESTI2010154, TESTI2010180, TESTI2010239, TESTI2010280, TESTI2010354, TESTI2010396, TESTI2010400, TESTI2010409, TESTI2010572, TESTI2010587, TESTI2010591, TESTI2010617, TESTI2010682, TESTI2010724, TESTI2010732, TESTI2010734, TESTI2010755, TESTI2010793, TESTI2010806, TESTI2010833, TESTI2010872, TESTI2011009, TESTI2011020, TESTI2011028, TESTI2011033, TESTI2011254, TESTI2011294, TESTI2011314, TESTI2011315, TESTI2011394, TESTI2011407, TESTI2011448, TESTI2011480, TESTI2011549, TESTI2011575, TESTI2011605, TESTI2011612, TESTI2011665, TESTI2011680, TESTI2011683, TESTI2011712, TESTI2011750, TESTI2011840, TESTI2011846, TESTI2011915, TESTI2011928, TESTI2011971, TESTI2012019, TESTI2012050, TESTI2012090, TESTI2012095, TESTI2012104, TESTI2012152, TESTI2012155, TESTI2012171, TESTI2012207, TESTI2012231, TESTI2012244, TESTI2012289, TESTI2012308, TESTI2012356, TESTI2012387, TESTI2012394, TESTI2012444, TESTI2012528, TESTI2012544, TESTI2012550, TESTI2012571, TESTI2012592, TESTI2012617, TESTI2012628, TESTI2012812, TESTI2012834, TESTI2012835, TESTI2012861, TESTI2012900, TESTI2012915, TESTI2012922, TESTI2013001, TESTI2013012, TESTI2013053, TESTI2013144, TESTI2013163, TESTI2013169, TESTI2013212, TESTI2013231, TESTI2013257, TESTI2013264, TESTI2013268, TESTI2013295, TESTI2013322, TESTI2013381, TESTI2013382, TESTI2013401, TESTI2013427, TESTI2013468, TESTI2013497, TESTI2013545, TESTI2013546, TESTI2013566, TESTI2013601, TESTI2013604, TESTI2013607, TESTI2013610, TESTI2013691, TESTI2013699, TESTI2013737, TESTI2013767, TESTI2013832, TESTI2013873, TESTI2013889, TESTI2014007, TESTI2014036, TESTI2014097, TESTI2014160, TESTI2014248, TESTI2014254, TESTI2014269, TESTI2014274, TESTI2014318, TESTI2014324, TESTI2014339, TESTI2014362, TESTI2014385, TESTI2014415, TESTI2014439, TESTI2014474, TESTI2014505, TESTI2014577, TESTI2014578, TESTI2014716, TESTI2014780, TESTI2014800, TESTI2014838, TESTI2014843, TESTI2014979, TESTI2014988, TESTI2015042, TESTI2015092, TESTI2015105, TESTI2015180, TESTI2015246, TESTI2015249, TESTI2015327, TESTI2015331, TESTI2015335, TESTI2015350, TESTI2015375, TESTI2015437, TESTI2015590, TESTI2015610, TESTI2015626, TESTI2015647, TESTI2015675, TESTI2015710, TESTI2015752, TESTI2015830, TESTI2015914, TESTI2015938, TESTI2015947, TESTI2015962, TESTI2015987, TESTI2016033, TESTI2016046, TESTI2016101, TESTI2016162, TESTI2016197, TESTI2016278, TESTI2016298, TESTI2016331, TESTI2016337, TESTI2016410, TESTI2016421, TESTI2016509, TESTI2016568, TESTI2016583, TESTI2016599, TESTI2016629, TESTI2016663, TESTI2016667, TESTI2016688, TESTI2016701, TESTI2016758, TESTI2016848, TESTI2016863, TESTI2016888, TESTI2016896, TESTI2016922, TESTI2016942, TESTI2016950, TESTI2016996, TESTI2017017, TESTI2017028, TESTI2017035, TESTI2017069, TESTI2017089, TESTI2017102, TESTI2017107, TESTI2017113, TESTI2017125, TESTI2017256, TESTI2017305, TESTI2017311, TESTI2017396, TESTI2017507, TESTI2017537, TESTI2017582, TESTI2017584, TESTI2017645, TESTI2017727, TESTI2017740, TESTI2017775, TESTI2017816, TESTI2017832, TESTI2017923, TESTI2017932, TESTI2017951, TESTI2018014, TESTI2018031, TESTI2018035, TESTI2018060, TESTI2018083, TESTI2018178, TESTI2018221, TESTI2018276, TESTI2018290, TESTI2018335, TESTI2018337, TESTI2018368, TESTI2018421, TESTI2018428, TESTI2018462, TESTI2018475, TESTI2018482, TESTI2018521, TESTI2018565, TESTI2018581, TESTI2018611, TESTI2018687, TESTI2018697, TESTI2018838, TESTI2018867, TESTI2018941, TESTI2018957, TESTI2018974, TESTI2018975, TESTI2019042, TESTI2019077, TESTI2019228, TESTI2019257, TESTI2019280, TESTI2019282, TESTI2019308, TESTI2019336, TESTI2019352, TESTI2019406, TESTI2019430, TESTI2019455, TESTI2019481, TESTI2019488, TESTI2019501, TESTI2019648, TESTI2019669, TESTI2019697, TESTI2019729, TESTI2019760, TESTI2019787, TESTI2019794, TESTI2019854, TESTI2019859, TESTI2019860, TESTI2019872, TESTI2019911, TESTI2019917, TESTI2019975, TESTI2019998, TESTI2020012, TESTI2020026, TESTI2020029, TESTI2020071, TESTI2020084, TESTI2020265, TESTI2020283, TESTI2020316, TESTI2020344, TESTI2020379, TESTI2020426, TESTI2020445, TESTI2020510, TESTI2020515, TESTI2020525, TESTI2020579, TESTI2020717, TESTI2020840, TESTI2020871, TESTI2020905, TESTI2020906, TESTI2020946, TESTI2020956, TESTI2020981, TESTI2020999, TESTI2021003, TESTI2021038, TESTI2021057, TESTI2021077, TESTI2021112, TESTI2021114, TESTI2021116, TESTI2021118, TESTI2021122, TESTI2021124, TESTI2021138, TESTI2021315, TESTI2021358, TESTI2021447, TESTI2021463, TESTI2021531, TESTI2021599, TESTI2021637, TESTI2021654, TESTI2021667, TESTI2021736, TESTI2021785, TESTI2021819, TESTI2021851, TESTI2021895, TESTI2021911, TESTI2021939, TESTI2021999, TESTI2022010, TESTI2022023, TESTI2022065, TESTI2022086, TESTI2022179, TESTI2022203, TESTI2022246, TESTI2022323, TESTI2022338, TESTI2022400, TESTI2022462, TESTI2022495, TESTI2022623, TESTI2022649, TESTI2022652, TESTI2022738, TESTI2022798, TESTI2022812, TESTI2022814, TESTI2022874, TESTI2022940, TESTI2022952, TESTI2023025, TESTI2023033, TESTI2023053, TESTI2023085, TESTI2023192, TESTI2023194, TESTI2023214, TESTI2023254, TESTI2023386, TESTI2023414, TESTI2023427, TESTI2023436, TESTI2023599, TESTI2023752, TESTI2023800, TESTI2023861, TESTI2023903, TESTI2023942, TESTI2023947, TESTI2023951, TESTI2023968, TESTI2024009, TESTI2024090, TESTI2024125, TESTI2024153, TESTI2024192, TESTI2024267, TESTI2024283, TESTI2024299, TESTI2024419, TESTI2024422, TESTI2024443, TESTI2024446, TESTI2024473, TESTI2024476, TESTI2024498, TESTI2024560, TESTI2024567, TESTI2024586, TESTI2024598, TESTI2024641, TESTI2024648, TESTI2024718, TESTI2024744, TESTI2024864, TESTI2024885, TESTI2024936, TESTI2024978, TESTI2024999, TESTI2025006, TESTI2025013, TESTI2025022, TESTI2025063, TESTI2025117, TESTI2025144, TESTI2025161, TESTI2025174, TESTI2025229, TESTI2025269, TESTI2025365, TESTI2025403, TESTI2025409, TESTI2025448, TESTI2025454, TESTI2025486, TESTI2025546, TESTI2025582, TESTI2025609, TESTI2025656, TESTI2025757, TESTI2025791, TESTI2025846, TESTI2025872, TESTI2025879, TESTI2025911, TESTI2025920, TESTI2025924, TESTI2026014, TESTI2026024, TESTI2026064, TESTI2026077, TESTI2026104, TESTI2026116, TESTI2026134, TESTI2026168, TESTI2026196, TESTI2026215, TESTI2026218, TESTI2026233, TESTI2026291, TESTI2026294, TESTI2026401, TESTI2026403, TESTI2026453, TESTI2026461, TESTI2026491, TESTI2026505, TESTI2026515, TESTI2026525, TESTI2026534, TESTI2026537, TESTI2026589, TESTI2026597, TESTI2026605, TESTI2026647, TESTI2026674, TESTI2026794, TESTI2026824, TESTI2026854, TESTI2026925, TESTI2026936, TESTI2026957, TESTI2027013, TESTI2027019, TESTI2027108, TESTI2027165, TESTI2027171, TESTI2027173, TESTI2027179, TESTI2027185, TESTI2027206, TESTI2027238, TESTI2027239, TESTI2027243, TESTI2027271, TESTI2027296, TESTI2027378, TESTI2027411, TESTI2027450, TESTI2027496, TESTI2027503, TESTI2027562, TESTI2027615, TESTI2027645, TESTI2027730, TESTI2027736, TESTI2027791, TESTI2027820, TESTI2027828, TESTI2027840, TESTI2027909, TESTI2028098, TESTI2028151, TESTI2028242, TESTI2028253, TESTI2028254, TESTI2028269, TESTI2028290, TESTI2028384, TESTI2028426, TESTI2028488, TESTI2028523, TESTI2028583, TESTI2028613, TESTI2028659, TESTI2028662, TESTI2028670, TESTI2028705, TESTI2028776, TESTI2028811, TESTI2028891, TESTI2028985, TESTI2028997, TESTI2029131, TESTI2029162, TESTI2029196, TESTI2029201, TESTI2029227, TESTI2029244, TESTI2029249, TESTI2029252, TESTI2029259, TESTI2029264, TESTI2029470, TESTI2029672, TESTI2029785, TESTI2029880, TESTI2030136, TESTI2030322, TESTI2030336, TESTI2030342, TESTI2030519, TESTI2030554, TESTI2030556, TESTI2030728, TESTI2030754, TESTI2030770, TESTI2030860, TESTI2030901, TESTI2030917, TESTI2030930, TESTI2031006, TESTI2031007, TESTI2031060, TESTI2031129, TESTI2031356, TESTI2031418, TESTI2031504, TESTI2031529, TESTI2031687, TESTI2031760, TESTI2031809, TESTI2031919, TESTI2031935, TESTI2031986, TESTI2032044, TESTI2032067, TESTI2032079, TESTI2032643, TESTI2032681, TESTI2032761, TESTI2032768, TESTI2032774, TESTI2032828, TESTI2033031, TESTI2033242, TESTI2033254, TESTI2033300, TESTI2033395, TESTI2033441, TESTI2033453, TESTI2033505, TESTI2033520, TESTI2033641, TESTI2033710, TESTI2033905, TESTI2034187, TESTI2034243, TESTI2034249, TESTI2034307, TESTI2034357, TESTI2034401, TESTI2034407, TESTI2034506, TESTI2034520, TESTI2034718, TESTI2034730, TESTI2034749, TESTI2034767, TESTI2034774, TESTI2034777, TESTI2034785, TESTI2034799, TESTI2034847, TESTI2034913, TESTI2034916, TESTI2034931, TESTI2034953, TESTI2034997, TESTI2035003, TESTI2035078, TESTI2035084, TESTI2035107, TESTI2035121, TESTI2035124, TESTI2035183, TESTI2035236, TESTI2035262, TESTI2035309, TESTI2035688, TESTI2035775, TESTI2035793, TESTI2035898, TESTI2035962, TESTI2035981, TESTI2035997, TESTI2036114, TESTI2036129, TESTI2036285, TESTI2036288, TESTI2036513, TESTI2036589, TESTI2036650, TESTI2036684, TESTI2036691, TESTI2036736, TESTI2036822, TESTI2036833, TESTI2036913, TESTI2036922, TESTI2036951, TESTI2036965, TESTI2036969, TESTI2037002, TESTI2037055, TESTI2037081, TESTI2037085, TESTI2037103, TESTI2037106, TESTI2037111, TESTI2037209, TESTI2037255, TESTI2037359, TESTI2037375, TESTI2037382, TESTI2037534, TESTI2037569, TESTI2037572, TESTI2037643, TESTI2037657, TESTI2037673, TESTI2037723, TESTI2037819, TESTI2037830, TESTI2037845, TESTI2037877, TESTI2037976, TESTI2038048, TESTI2038065, TESTI2038104, TESTI2038275, TESTI2038388, TESTI2038573, TESTI2038596, TESTI2038623, TESTI2038644, TESTI2038733, TESTI2038858, TESTI2038958, TESTI2039025, TESTI2039026, TESTI2039038, TESTI2039041, TESTI2039060, TESTI2039113, TESTI2039121, TESTI2039177, TESTI2039209, TESTI2039225, TESTI2039227, TESTI2039276, TESTI2039342, TESTI2039353, TESTI2039544, TESTI2039613, TESTI2039707, TESTI2039732, TESTI2039738, TESTI2039776, TESTI2039867, TESTI2039908, TESTI2040018, TESTI2040094, TESTI2040102, TESTI2040128, TESTI2040143, TESTI2040297, TESTI2040372, TESTI2040377, TESTI2040424, TESTI2040642, TESTI2040815, TESTI2040897, TESTI2040944, TESTI2040964, TESTI2040983, TESTI2040989, TESTI2041330, TESTI2041362, TESTI2041517, TESTI2041564, TESTI2041664, TESTI2041730, TESTI2041734, TESTI2041778, TESTI2041800, TESTI2041947, TESTI2041956, TESTI2041976, TESTI2042062, TESTI2042149, TESTI2042264, TESTI2042295, TESTI2042302, TESTI2042326, TESTI2042400, TESTI2042450, TESTI2042473, TESTI2042507, TESTI2042508, TESTI2042750, TESTI2042783, TESTI2042806, TESTI2042928, TESTI2042946, TESTI2042958, TESTI2043275, TESTI2043277, TESTI2043282, TESTI2043313, TESTI2043477, TESTI2043585, TESTI2043758, TESTI2043817, TESTI2043857, TESTI2043866, TESTI2043869, TESTI2044064, TESTI2044118, TESTI2044194, TESTI2044276, TESTI2044306, TESTI2044309, TESTI2044413, TESTI2044418, TESTI2044754, TESTI2044788, TESTI2044796, TESTI2044833, TESTI2044892, TESTI2044920, TESTI2044968, TESTI2045139, TESTI2045155, TESTI2045171, TESTI2045199, TESTI2045353, TESTI2045509, TESTI2045562, TESTI2045611, TESTI2045819, TESTI2045850, TESTI2045920, TESTI2045964, TESTI2045983, TESTI2046100, TESTI2046188, TESTI2046347, TESTI2046352, TESTI2046358, TESTI2046439, TESTI2046456, TESTI2046535, TESTI2046536, TESTI2046552, TESTI2046569, TESTI2046686, TESTI2046721, TESTI2046732, TESTI2046786, TESTI2046797, TESTI2046863, TESTI2046872, TESTI2047071, TESTI2047141, TESTI2047147, TESTI2047153, TESTI2047212, TESTI2047342, TESTI2047383, TESTI2047605, TESTI2047792, TESTI2047801, TESTI2047818, TESTI2047824, TESTI2047885, TESTI2047930, TESTI2048105, TESTI2048109, TESTI2048465, TESTI2048603, TESTI2048898, TESTI2049041, TESTI2049062, TESTI2049206, TESTI2049246, TESTI2049277, TESTI2049422, TESTI2049452, TESTI2049469, TESTI2049553, TESTI2049576, TESTI2049857, TESTI2049956, TESTI2050137, TESTI2050681, TESTI2050780, TESTI2050987, TESTI2051148, TESTI2051177, TESTI2051279, TESTI2051488, TESTI2051543, TESTI2051627, TESTI2051742, TESTI2051767, TESTI2051791, TESTI2051806, TESTI2051867, TESTI2051873, TESTI2052110, TESTI2052202, TESTI2052211, TESTI2052256, TESTI2052288, TESTI2052525, TESTI2052670, TESTI2052693, TESTI2052698, TESTI2052799, TESTI2052822, TESTI2052985, TESTI2053151, TESTI2053242, TESTI2053399, TESTI2053526, TESTI2053561, TESTI2053621, TESTI2053667, TESTI2053723, TESTI3000002, TESTI3000005, TESTI4000068, TESTI4000079, TESTI4000093, TESTI4000134, TESTI4000137, TESTI4000153, TESTI4000155, TESTI4000157, TESTI4000183, TESTI4000214, TESTI4000215, TESTI4000228, TESTI4000250, TESTI4000288, TESTI4000319, TESTI4000349, TESTI4000370, TESTI4000394, TESTI4000434, TESTI4000462, TESTI4000530, TESTI4000534, TESTI4000598, TESTI4000600, TESTI4000621, TESTI4000703, TESTI4000724, TESTI4000957, TESTI4000970, TESTI4001036, TESTI4001037, TESTI4001060, TESTI4001106, TESTI4001148, TESTI4001176, TESTI4001195, TESTI4001201, TESTI4001206, TESTI4001348, TESTI4001441, TESTI4001467, TESTI4001473, TESTI4001517, TESTI4001527, TESTI4001561, TESTI4001569, TESTI4001604, TESTI4001665, TESTI4001679, TESTI4001795, TESTI4001923, TESTI4001925, TESTI4001984, TESTI4002003, TESTI4002072, TESTI4002141, TESTI4002195, TESTI4002202, TESTI4002290, TESTI4002319, TESTI4002491, TESTI4002520, TESTI4002552, TESTI4002647, TESTI4002703, TESTI4002754, TESTI4002868, TESTI4002878, TESTI4002889, TESTI4002988, TESTI4003150, TESTI4003179, TESTI4003279, TESTI4003319, TESTI4003404, TESTI4003565, TESTI4003574, TESTI4003579, TESTI4003602, TESTI4003703, TESTI4003733, TESTI4003796, TESTI4003944, TESTI4004003, TESTI4004031, TESTI4004200, TESTI4004210, TESTI4004539, TESTI4004626, TESTI4004653, TESTI4004695, TESTI4004722, TESTI4004887, TESTI4004917, TESTI4005015, TESTI4005039, TESTI4005133, TESTI4005158, TESTI4005317, TESTI4005322, TESTI4005399, TESTI4005470, TESTI4005500, TESTI4005534, TESTI4005543, TESTI4005628, TESTI4005801, TESTI4005805, TESTI4005857, TESTI4005961, TESTI4006053, TESTI4006079, TESTI4006112, TESTI4006137, TESTI4006148, TESTI4006219, TESTI4006234, TESTI4006308, TESTI4006326, TESTI4006393, TESTI4006407, TESTI4006412, TESTI4006420, TESTI4006441, TESTI4006473, TESTI4006539, TESTI4006546, TESTI4006567, TESTI4006704, TESTI4006728, TESTI4006802, TESTI4006819, TESTI4007064, TESTI4007163, TESTI4007176, TESTI4007203, TESTI4007239, TESTI4007369, TESTI4007373, TESTI4007382, TESTI4007404, TESTI4007489, TESTI4007565, TESTI4007671, TESTI4007775, TESTI4007778, TESTI4007799, TESTI4007810, TESTI4007816, TESTI4007965, TESTI4008007, TESTI4008018, TESTI4008050, TESTI4008058, TESTI4008086, TESTI4008097, TESTI4008176, TESTI4008209, TESTI4008219, TESTI4008250, TESTI4008302, TESTI4008305, TESTI4008401, TESTI4008417, TESTI4008429, TESTI4008573, TESTI4008797, TESTI4008816, TESTI4008840, TESTI4008935, TESTI4008993, TESTI4009022, TESTI4009028, TESTI4009034, TESTI4009123, TESTI4009160, TESTI4009215, TESTI4009283, TESTI4009286, TESTI4009306, TESTI4009374, TESTI4009406, TESTI4009454, TESTI4009457, TESTI4009501, TESTI4009563, TESTI4009608, TESTI4009638, TESTI4009752, TESTI4009881, TESTI4009886, TESTI4009928, TESTI4010076, TESTI4010082, TESTI4010095, TESTI4010211, TESTI4010377, TESTI4010475, TESTI4010544, TESTI4010713, TESTI4010721, TESTI4010789, TESTI4010817, TESTI4010831, TESTI4010902, TESTI4010928, TESTI4010979, TESTI4011070, TESTI4011072, TESTI4011084, TESTI4011118, TESTI4011246, TESTI4011484, TESTI4011505, TESTI4011532, TESTI4011616, TESTI4011744, TESTI4011745, TESTI4011829, TESTI4011926, TESTI4011956, TESTI4012010, TESTI4012086, TESTI4012258, TESTI4012293, TESTI4012329, TESTI4012382, TESTI4012406, TESTI4012448, TESTI4012451, TESTI4012505, TESTI4012556, TESTI4012623, TESTI4012646, TESTI4012679, TESTI4012911, TESTI4012956, TESTI4012960, TESTI4013365, TESTI4013369, TESTI4013410, TESTI4013474, TESTI4013602, TESTI4013667, TESTI4013675, TESTI4013685, TESTI4013735, TESTI4013742, TESTI4013774, TESTI4013817, TESTI4013830, TESTI4013852, TESTI4013894, TESTI4013924, TESTI4013960, TESTI4013962, TESTI4014159, TESTI4014175, TESTI4014265, TESTI4014276, TESTI4014306, TESTI4014392, TESTI4014415, TESTI4014445, TESTI4014553, TESTI4014661, TESTI4014694, TESTI4014801, TESTI4014818, TESTI4014891, TESTI4014908, TESTI4014924, TESTI4014932, TESTI4014977, TESTI4015012, TESTI4015129, TESTI4015145, TESTI4015204, TESTI4015263, TESTI4015293, TESTI4015299, TESTI4015339, TESTI4015398, TESTI4015442, TESTI4015471, TESTI4015477, TESTI4015600, TESTI4015646, TESTI4015681, TESTI4015688, TESTI4015790, TESTI4016110, TESTI4016238, TESTI4016551, TESTI4016812, TESTI4016822, TESTI4016865, TESTI4016882, TESTI4016925, TESTI4017001, TESTI4017116, TESTI4017137, TESTI4017229, TESTI4017254, TESTI4017269, TESTI4017380, TESTI4017382, TESTI4017543, TESTI4017575, TESTI4017647, TESTI4017714, TESTI4017763, TESTI4017848, TESTI4017854, TESTI4017901, TESTI4017961, TESTI4017984, TESTI4018101, TESTI4018152, TESTI4018208, TESTI4018382, TESTI4018436, TESTI4018506, TESTI4018555, TESTI4018751, TESTI4018806, TESTI4018835, TESTI4018859, TESTI4018881, TESTI4018886, TESTI4018938, TESTI4019140, TESTI4019149, TESTI4019299, TESTI4019417, TESTI4019440, TESTI4019566, TESTI4019657, TESTI4019756, TESTI4019843, TESTI4020092, TESTI4020102, TESTI4020342, TESTI4020460, TESTI4020596, TESTI4020806, TESTI4020819, TESTI4020920, TESTI4021129, TESTI4021197, TESTI4021294, TESTI4021377, TESTI4021456, TESTI4021491, TESTI4021569, TESTI4021713, TESTI4021821, TESTI4022158, TESTI4022577, TESTI4022716, TESTI4022873, TESTI4023096, TESTI4023172, TESTI4023546, TESTI4023555, TESTI4023654, TESTI4023722, TESTI4023762, TESTI4023942, TESTI4024096, TESTI4024240, TESTI4024245, TESTI4024294, TESTI4024344, TESTI4024387, TESTI4024420, TESTI4024494, TESTI4024740, TESTI4024874, TESTI4024890, TESTI4024907, TESTI4024930, TESTI4025062, TESTI4025268, TESTI4025401, TESTI4025494, TESTI4025547, TESTI4025731, TESTI4025797, TESTI4025865, TESTI4025908, TESTI4025920, TESTI4026079, TESTI4026080, TESTI4026192, TESTI4026207, TESTI4026295, TESTI4026390, TESTI4026456, TESTI4026510, TESTI4026524, TESTI4026680, TESTI4026700, TESTI4026762, TESTI4026785, TESTI4027139, TESTI4027170, TESTI4027262, TESTI4027516, TESTI4027557, TESTI4027660, TESTI4027821, TESTI4027969, TESTI4028042, TESTI4028059, TESTI4028062, TESTI4028182, TESTI4028429, TESTI4028612, TESTI4028692, TESTI4028809, TESTI4028823, TESTI4028880, TESTI4028904, TESTI4028938, TESTI4028958, TESTI4028983, TESTI4029023, TESTI4029348, TESTI4029370, TESTI4029528, TESTI4029651, TESTI4029671, TESTI4029676, TESTI4029690, TESTI4029731, TESTI4029743, TESTI4030069, TESTI4030159, TESTI4030319, TESTI4030505, TESTI4030603, TESTI4030669, TESTI4030673, TESTI4030864, TESTI4031066, TESTI4031173, TESTI4031335, TESTI4031745, TESTI4031818, TESTI4032090, TESTI4032112, TESTI4032128, TESTI4032270, TESTI4032375, TESTI4032834, TESTI4032856, TESTI4032895, TESTI4032913, TESTI4033146, TESTI4033177, TESTI4033433, TESTI4033690, TESTI4034172, TESTI4034212, TESTI4034432, TESTI4034495, TESTI4034632, TESTI4034633, TESTI4034912, TESTI4034973, TESTI4035063, TESTI4035065, TESTI4035498, TESTI4035508, TESTI4035581, TESTI4035602, TESTI4035637, TESTI4035649, TESTI4035770, TESTI4035872, TESTI4035895, TESTI4035898, TESTI4035989, TESTI4036012, TESTI4036042, TESTI4036048, TESTI4036315, TESTI4036319, TESTI4036449, TESTI4036767, TESTI4036909, TESTI4037066, TESTI4037156, TESTI4037188, TESTI4037228, TESTI4037244, TESTI4037727, TESTI4037949, TESTI4038047, TESTI4038099, TESTI4038156, TESTI4038223, TESTI4038258, TESTI4038284, TESTI4038339, TESTI4038492, TESTI4038721, TESTI4038758, TESTI4038779, TESTI4038818, TESTI4039038, TESTI4039086, TESTI4039451, TESTI4039575, TESTI4039659, TESTI4039744, TESTI4039904, TESTI4040197, TESTI4040363, TESTI4040535, TESTI4040559, TESTI4040598, TESTI4040800, TESTI4040804, TESTI4040939, TESTI4040956, TESTI4041049, TESTI4041053, TESTI4041086, TESTI4041099, TESTI4041143, TESTI4041482, TESTI4041519, TESTI4041624, TESTI4041629, TESTI4041832, TESTI4041844, TESTI4041903, TESTI4041954, TESTI4041984, TESTI4041985, TESTI4041986, TESTI4042098, TESTI4042420, TESTI4042440, TESTI4042444, TESTI4042711, TESTI4042846, TESTI4043067, TESTI4043129, TESTI4043140, TESTI4043166, TESTI4043203, TESTI4043223, TESTI4043371, TESTI4043378, TESTI4043512, TESTI4043551, TESTI4043710, TESTI4043947, TESTI4044035, TESTI4044076, TESTI4044084, TESTI4044123, TESTI4044186, TESTI4044234, TESTI4044291, TESTI4044296, TESTI4044300, TESTI4044682, TESTI4044704, TESTI4044770, TESTI4045168, TESTI4045312, TESTI4045330, TESTI4045470, TESTI4045701, TESTI4045908, TESTI4045955, TESTI4045982, TESTI4046073, TESTI4046090, TESTI4046240, TESTI4046245, TESTI4046253, TESTI4046282, TESTI4046328, TESTI4046450, TESTI4046457, TESTI4046487, TESTI4046502, TESTI4046523, TESTI4046819, TESTI4046873, TESTI4046884, TESTI4046896, TESTI4046903, TESTI4046962, TESTI4047069, TESTI4047119, TESTI4047305, TESTI4047328, TESTI4047437, TESTI4047569, TESTI4047746, TESTI4047808, THYMU1000010, THYMU1000016, THYMU1000017, THYMU1000025, THYMU1000029, THYMU1000032, THYMU1000033, THYMU1000041, THYMU1000060, THYMU1000074, THYMU1000083, THYMU1000098, THYMU1000103, THYMU1000105, THYMU1000136, THYMU1000142, THYMU1000144, THYMU1000158, THYMU1000176, THYMU1000179, THYMU1000191, THYMU1000198, THYMU1000217, THYMU1000240, THYMU1000242, THYMU1000291, THYMU1000316, THYMU1000318, THYMU1000331, THYMU1000336, THYMU1000359, THYMU1000366, THYMU1000374, THYMU1000382, THYMU1000393, THYMU1000394, THYMU1000399, THYMU1000426, THYMU1000428, THYMU1000440, THYMU1000459, THYMU1000473, THYMU1000490, THYMU1000491, THYMU1000496, THYMU1000499, THYMU1000527, THYMU1000532, THYMU1000536, THYMU1000554, THYMU1000558, THYMU1000576, THYMU1000600, THYMU1000677, THYMU1000692, THYMU2000022, THYMU2000032, THYMU2000057, THYMU2000120, THYMU2000138, THYMU2000140, THYMU2000155, THYMU2000162, THYMU2000171, THYMU2000176, THYMU2000179, THYMU2000231, THYMU2000236, THYMU2000276, THYMU2000280, THYMU2000300, THYMU2000317, THYMU2000368, THYMU2000369, THYMU2000418, THYMU2000440, THYMU2000489, THYMU2000492, THYMU2000519, THYMU2000570, THYMU2000602, THYMU2000660, THYMU2000671, THYMU2000672, THYMU2000684, THYMU2000702, THYMU2000767, THYMU2000775, THYMU2000800, THYMU2000879, THYMU2000932, THYMU2000946, THYMU2000950, THYMU2000971, THYMU2000982, THYMU2000990, THYMU2001007, THYMU2001018, THYMU2001053, THYMU2001071, THYMU2001090, THYMU2001139, THYMU2001195, THYMU2001202, THYMU2001203, THYMU2001256, THYMU2001270, THYMU2001291, THYMU2001314, THYMU2001325, THYMU2001357, THYMU2001381, THYMU2001422, THYMU2001443, THYMU2001515, THYMU2001521, THYMU2001556, THYMU2001622, THYMU2001727, THYMU2001819, THYMU2001825, THYMU2001839, THYMU2001868, THYMU2001898, THYMU2001900, THYMU2001916, THYMU2001926, THYMU2001989, THYMU2002023, THYMU2002037, THYMU2002080, THYMU2002109, THYMU2002147, THYMU2002154, THYMU2002157, THYMU2002162, THYMU2002177, THYMU2002203, THYMU2002229, THYMU2002242, THYMU2002338, THYMU2002356, THYMU2002376, THYMU2002384, THYMU2002450, THYMU2002490, THYMU2002548, THYMU2002583, THYMU2002695, THYMU2002745, THYMU2002789, THYMU2002792, THYMU2002815, THYMU2002841, THYMU2002852, THYMU2002910, THYMU2002950, THYMU2002983, THYMU2003012, THYMU2003069, THYMU2003107, THYMU2003124, THYMU2003166, THYMU2003232, THYMU2003242, THYMU2003249, THYMU2003270, THYMU2003282, THYMU2003287, THYMU2003336, THYMU2003366, THYMU2003397, THYMU2003419, THYMU2003440, THYMU2003446, THYMU2003470, THYMU2003479, THYMU2003499, THYMU2003542, THYMU2003632, THYMU2003650, THYMU2003700, THYMU2003760, THYMU2003803, THYMU2003855, THYMU2003891, THYMU2003907, THYMU2003932, THYMU2003981, THYMU2004003, THYMU2004008, THYMU2004042, THYMU2004108, THYMU2004111, THYMU2004123, THYMU2004139, THYMU2004152, THYMU2004169, THYMU2004320, THYMU2004336, THYMU2004344, THYMU2004356, THYMU2004410, THYMU2004452, THYMU2004508, THYMU2004512, THYMU2004635, THYMU2004639, THYMU2004668, THYMU2004677, THYMU2004688, THYMU2004693, THYMU2004733, THYMU2004835, THYMU2004843, THYMU2004906, THYMU2004916, THYMU2004986, THYMU2005001, THYMU2005046, THYMU2005134, THYMU2005156, THYMU2005190, THYMU2005225, THYMU2005240, THYMU2005246, THYMU2005270, THYMU2005283, THYMU2005303, THYMU2005321, THYMU2005356, THYMU2005369, THYMU2005439, THYMU2005480, THYMU2005507, THYMU2005545, THYMU2005546, THYMU2005574, THYMU2005576, THYMU2005748, THYMU2005759, THYMU2005807, THYMU2005815, THYMU2005855, THYMU2005881, THYMU2005948, THYMU2005997, THYMU2006001, THYMU2006048, THYMU2006098, THYMU2006160, THYMU2006170, THYMU2006252, THYMU2006261, THYMU2006277, THYMU2006303, THYMU2006324, THYMU2006350, THYMU2006357, THYMU2006365, THYMU2006420, THYMU2006468, THYMU2006505, THYMU2006610, THYMU2006666, THYMU2006712, THYMU2006813, THYMU2006913, THYMU2006946, THYMU2006965, THYMU2007025, THYMU2007036, THYMU2007060, THYMU2007065, THYMU2007095, THYMU2007112, THYMU2007146, THYMU2007179, THYMU2007258, THYMU2007307, THYMU2007308, THYMU2007339, THYMU2007350, THYMU2007384, THYMU2007415, THYMU2007467, THYMU2007493, THYMU2007521, THYMU2007528, THYMU2007530, THYMU2007532, THYMU2007561, THYMU2007571, THYMU2007635, THYMU2007658, THYMU2007667, THYMU2007694, THYMU2007725, THYMU2007729, THYMU2007802, THYMU2007824, THYMU2007854, THYMU2007886, THYMU2007952, THYMU2007969, THYMU2008035, THYMU2008036, THYMU2008049, THYMU2008072, THYMU2008111, THYMU2008145, THYMU2008149, THYMU2008185, THYMU2008191, THYMU2008207, THYMU2008226, THYMU2008282, THYMU2008339, THYMU2008350, THYMU2008351, THYMU2008383, THYMU2008452, THYMU2008643, THYMU2008686, THYMU2008691, THYMU2008714, THYMU2008725, THYMU2008727, THYMU2008781, THYMU2008799, THYMU2008876, THYMU2008910, THYMU2008917, THYMU2008928, THYMU2008990, THYMU2008994, THYMU2009023, THYMU2009046, THYMU2009101, THYMU2009104, THYMU2009134, THYMU2009157, THYMU2009181, THYMU2009186, THYMU2009338, THYMU2009425, THYMU2009516, THYMU2009526, THYMU2009546, THYMU2009592, THYMU2009596, THYMU2009658, THYMU2009792, THYMU2009835, THYMU2009906, THYMU2009948, THYMU2010030, THYMU2010041, THYMU2010046, THYMU2010059, THYMU2010082, THYMU2010094, THYMU2010161, THYMU2010192, THYMU2010448, THYMU2010519, THYMU2010637, THYMU2010671, THYMU2010699, THYMU2010705, THYMU2010779, THYMU2010816, THYMU2010831, THYMU2010848, THYMU2011053, THYMU2011063, THYMU2011072, THYMU2011096, THYMU2011118, THYMU2011142, THYMU2011183, THYMU2011257, THYMU2011259, THYMU2011295, THYMU2011308, THYMU2011390, THYMU2011431, THYMU2011447, THYMU2011482, THYMU2011538, THYMU2011548, THYMU2011551, THYMU2011564, THYMU2011573, THYMU2011585, THYMU2011621, THYMU2011666, THYMU2011736, THYMU2011785, THYMU2011806, THYMU2011852, THYMU2011875, THYMU2011881, THYMU2011937, THYMU2011939, THYMU2012002, THYMU2012024, THYMU2012073, THYMU2012104, THYMU2012113, THYMU2012273, THYMU2012401, THYMU2012492, THYMU2012507, THYMU2012565, THYMU2012574, THYMU2012631, THYMU2012665, THYMU2012690, THYMU2012701, THYMU2012807, THYMU2012826, THYMU2012882, THYMU2012891, THYMU2012902, THYMU2012919, THYMU2013023, THYMU2013047, THYMU2013051, THYMU2013089, THYMU2013136, THYMU2013170, THYMU2013364, THYMU2013386, THYMU2013426, THYMU2013578, THYMU2013648, THYMU2013705, THYMU2013757, THYMU2013779, THYMU2013863, THYMU2013916, THYMU2013950, THYMU2013981, THYMU2014067, THYMU2014068, THYMU2014167, THYMU2014183, THYMU2014204, THYMU2014297, THYMU2014323, THYMU2014327, THYMU2014353, THYMU2014492, THYMU2014500, THYMU2014599, THYMU2014762, THYMU2014777, THYMU2014801, THYMU2014901, THYMU2014923, THYMU2015019, THYMU2015161, THYMU2015316, THYMU2015321, THYMU2015439, THYMU2015441, THYMU2015479, THYMU2015762, THYMU2015775, THYMU2015825, THYMU2015918, THYMU2015943, THYMU2015984, THYMU2016113, THYMU2016164, THYMU2016204, THYMU2016219, THYMU2016360, THYMU2016496, THYMU2016523, THYMU2016840, THYMU2016968, THYMU2017008, THYMU2017010, THYMU2017023, THYMU2017085, THYMU2017099, THYMU2017158, THYMU2017162, THYMU2017215, THYMU2017362, THYMU2017366, THYMU2017398, THYMU2017449, THYMU2017479, THYMU2017522, THYMU2017526, THYMU2017601, THYMU2017675, THYMU2017707, THYMU2017831, THYMU2017844, THYMU2017878, THYMU2017948, THYMU2018028, THYMU2018071, THYMU2018126, THYMU2018189, THYMU2018197, THYMU2018384, THYMU2018455, THYMU2018547, THYMU2018565, THYMU2018639, THYMU2018673, THYMU2018721, THYMU2018772, THYMU2018819, THYMU2018841, THYMU2018997, THYMU2019021, THYMU2019054, THYMU2019197, THYMU2019210, THYMU2019364, THYMU2019436, THYMU2019442, THYMU2019587, THYMU2019599, THYMU2019686, THYMU2019813, THYMU2020198, THYMU2020289, THYMU2020416, THYMU2020491, THYMU2020499, THYMU2020560, THYMU2020667, THYMU2020830, THYMU2020883, THYMU2020959, THYMU2021361, THYMU2021509, THYMU2021597, THYMU2021684, THYMU2021714, THYMU2022213, THYMU2022289, THYMU2022660, THYMU2022854, THYMU2022922, THYMU2023209, THYMU2023264, THYMU2023576, THYMU2023711, THYMU2023900, THYMU2023943, THYMU2023967, THYMU2024071, THYMU2024121, THYMU2024185, THYMU2024207, THYMU2024616, THYMU2024684, THYMU2024748, THYMU2025042, THYMU2025189, THYMU2025319, THYMU2025325, THYMU2025406, THYMU2025557, THYMU2025572, THYMU2025707, THYMU2025849, THYMU2025909, THYMU2025939, THYMU2026182, THYMU2026350, THYMU2026530, THYMU2026531, THYMU2026835, THYMU2026904, THYMU2027053, THYMU2027168, THYMU2027249, THYMU2027282, THYMU2027497, THYMU2027695, THYMU2027734, THYMU2027894, THYMU2027975, THYMU2027996, THYMU2028041, THYMU2028368, THYMU2028379, THYMU2028394, THYMU2028412, THYMU2028629, THYMU2028632, THYMU2028724, THYMU2028739, THYMU2028942, THYMU2028978, THYMU2029134, THYMU2029578, THYMU2029676, THYMU2029688, THYMU2029788, THYMU2030068, THYMU2030226, THYMU2030264, THYMU2030462, THYMU2030543, THYMU2030637, THYMU2030655, THYMU2030796, THYMU2030912, THYMU2030982, THYMU2031046, THYMU2031139, THYMU2031218, THYMU2031249, THYMU2031258, THYMU2031341, THYMU2031368, THYMU2031579, THYMU2031847, THYMU2031890, THYMU2031994, THYMU2032014, THYMU2032035, THYMU2032080, THYMU2032150, THYMU2032358, THYMU2032437, THYMU2032601, THYMU2032655, THYMU2032696, THYMU2032715, THYMU2032732, THYMU2032825, THYMU2032976, THYMU2033053, THYMU2033059, THYMU2033070, THYMU2033079, THYMU2033085, THYMU2033104, THYMU2033227, THYMU2033263, THYMU2033308, THYMU2033401, THYMU2033583, THYMU2033755, THYMU2033787, THYMU2033816, THYMU2034182, THYMU2034279, THYMU2034314, THYMU2034338, THYMU2034374, THYMU2034647, THYMU2034917, THYMU2035064, THYMU2035078, THYMU2035101, THYMU2035319, THYMU2035321, THYMU2035388, THYMU2035400, THYMU2035554, THYMU2035710, THYMU2035735, THYMU2036058, THYMU2036105, THYMU2036207, THYMU2036215, THYMU2036252, THYMU2036265, THYMU2036366, THYMU2036459, THYMU2036461, THYMU2036604, THYMU2036653, THYMU2037081, THYMU2037208, THYMU2037226, THYMU2037233, THYMU2037234, THYMU2037348, THYMU2037406, THYMU2037965, THYMU2038058, THYMU2038189, THYMU2038199, THYMU2038220, THYMU2038301, THYMU2038369, THYMU2038389, THYMU2038615, THYMU2038636, THYMU2038739, THYMU2038772, THYMU2038797, THYMU2038906, THYMU2039305, THYMU2039315, THYMU2039334, THYMU2039350, THYMU2039411, THYMU2039634, THYMU2039719, THYMU2039780, THYMU2039788, THYMU2039989, THYMU2040029, THYMU2040110, THYMU2040114, THYMU2040140, THYMU2040412, THYMU2040427, THYMU2040824, THYMU2040925, THYMU2041007, THYMU2041015, THYMU2041252, THYMU3000028, THYMU3000036, THYMU3000037, THYMU3000082, THYMU3000194, THYMU3000224, THYMU3000269, THYMU3000306, THYMU3000360, THYMU3000390, THYMU3000420, THYMU3000490, THYMU3000504, THYMU3000542, THYMU3000655, THYMU3000776, THYMU3000826, THYMU3000841, THYMU3001077, THYMU3001082, THYMU3001083, THYMU3001133, THYMU3001151, THYMU3001379, THYMU3001472, THYMU3001593, THYMU3001883, THYMU3001939, THYMU3001991, THYMU3002452, THYMU3002578, THYMU3002661, THYMU3003007, THYMU3003092, THYMU3003212, THYMU3003309, THYMU3003350, THYMU3003403, THYMU3003565, THYMU3003763, THYMU3003865, THYMU3003958, THYMU3003965, THYMU3004157, THYMU3004628, THYMU3004632, THYMU3004835, THYMU3004866, THYMU3005050, THYMU3005378, THYMU3005407, THYMU3005415, THYMU3005427, THYMU3005482, THYMU3005491, THYMU3005629, THYMU3005696, THYMU3006118, THYMU3006132, THYMU3006168, THYMU3006172, THYMU3006371, THYMU3006485, THYMU3006640, THYMU3006767, THYMU3006811, THYMU3006963, THYMU3007137, THYMU3007308, THYMU3007368, THYMU3007423, THYMU3007559, THYMU3007845, THYMU3008060, THYMU3008105, THYMU3008136, THYMU3008171, THYMU3008216, THYMU3008436, THYMU3008672, THYMU3008883, THYMU3008935, THYMU3009006, THYMU3009255, THYMU3009391, THYMU3009643, THYMU3009755, THYMU3010247, THYMU3011012, THYMU3011081, THYMU3011244, THYMU3011360, THYMU3011534, THYMU3011543, THYMU3011556, THYMU3011717, THYMU3011827, THYMU3012402, THYMU3012907, THYMU3012983, THYMU3013114, THYMU3013197, THYMU3013241, THYMU3013386, THYMU3013470, THYMU3013785, THYMU3013897, THYMU3014038, THYMU3014173, THYMU3014372, THYMU3014555, THYMU3014620, THYMU3014701, THYMU3015042, THYMU3015457, THYMU3015571, THYMU3015592, THYMU3015625, THYMU3015647, THYMU3015759, THYMU3015962, THYMU3016022, THYMU3016518, THYMU3016797, THYMU3016822, THYMU3016850, THYMU3017562, THYMU3017688, THYMU3017689, THYMU3017761, THYMU3018151, THYMU3018896, THYMU3019095, THYMU3019476, THYMU3019605, THYMU3019916, THYMU3020221, THYMU3020595, THYMU3020713, THYMU3020856, THYMU3020869, THYMU3020970, THYMU3021404, THYMU3021586, THYMU3021755, THYMU3021900, THYMU3022211, THYMU3022434, THYMU3022528, THYMU3022668, THYMU3022982, THYMU3023107, THYMU3023211, THYMU3023216, THYMU3023394, THYMU3023400, THYMU3023797, THYMU3024164, THYMU3024339, THYMU3024602, THYMU3024879, THYMU3025118, THYMU3025313, THYMU3025642, THYMU3025683, THYMU3025772, THYMU3025865, THYMU3026000, THYMU3026350, THYMU3026479, THYMU3026532, THYMU3026783, THYMU3026869, THYMU3027251, THYMU3027540, THYMU3027655, THYMU3027671, THYMU3028075, THYMU3028410, THYMU3028461, THYMU3028702, THYMU3029188, THYMU3029318, THYMU3029421, THYMU3029719, THYMU3029774, THYMU3029832, THYMU3030072, THYMU3030231, THYMU3030706, THYMU3030710, THYMU3030752, THYMU3031146, THYMU3031402, THYMU3031610, THYMU3031612, THYMU3031868, THYMU3031878, THYMU3032032, THYMU3032798, THYMU3032867, THYMU3033402, THYMU3033630, THYMU3033649, THYMU3033754, THYMU3033759, THYMU3034078, THYMU3034099, THYMU3034453, THYMU3034616, THYMU3034671, THYMU3034853, THYMU3034867, THYMU3034983, THYMU3036200, THYMU3036310, THYMU3036934, THYMU3036953, THYMU3037052, THYMU3037192, THYMU3037617, THYMU3037772, THYMU3037827, THYMU3037836, THYMU3037856, THYMU3037867, THYMU3037909, THYMU3037980, THYMU3038158, THYMU3038167, THYMU3038214, THYMU3038266, THYMU3038328, THYMU3038347, THYMU3038375, THYMU3038603, THYMU3038687, THYMU3038759, THYMU3038879, THYMU3038970, THYMU3039807, THYMU3039846, THYMU3040068, THYMU3040126, THYMU3040146, THYMU3040168, THYMU3040172, THYMU3040725, THYMU3040746, THYMU3040816, THYMU3040829, THYMU3040830, THYMU3040986, THYMU3041354, THYMU3041386, THYMU3041428, THYMU3041573, THYMU3041603, THYMU3041736, THYMU3041918, THYMU3042075, THYMU3042321, THYMU3042372, THYMU3042758, THYMU3042929, THYMU3043200, THYMU3043327, THYMU3043482, THYMU3043597, THYMU3043688, THYMU3043779, THYMU3043883, THYMU3043993, THYMU3044175, THYMU3044441, THYMU3044445, THYMU3045510, THYMU3045673, THYMU3045692, THYMU3045704, THYMU3046140, THYMU3046350, THYMU3046360, THYMU3046856, THYMU3047115, THYMU3047144, THYMU3047156, THYMU3047366, THYMU3047513, THYMU3047542, THYMU3047760, THYMU3047891, TKIDN1000001, TKIDN1000044, TKIDN1000062, TKIDN1000066, TKIDN1000164, TKIDN1000171, TKIDN1000192, TKIDN2000127, TKIDN2000240, TKIDN2000246, TKIDN2000319, TKIDN2000464, TKIDN2000521, TKIDN2000701, TKIDN2001529, TKIDN2001662, TKIDN2002318, TKIDN2002329, TKIDN2002424, TKIDN2002632, TKIDN2002738, TKIDN2003044, TKIDN2003059, TKIDN2003062, TKIDN2003078, TKIDN2003366, TKIDN2003396, TKIDN2003413, TKIDN2003597, TKIDN2003601, TKIDN2004386, TKIDN2004458, TKIDN2005721, TKIDN2005934, TKIDN2005947, TKIDN2005956, TKIDN2006525, TKIDN2006761, TKIDN2006852, TKIDN2007605, TKIDN2007667, TKIDN2007828, TKIDN2008176, TKIDN2008778, TKIDN2009092, TKIDN2009330, TKIDN2009481, TKIDN2009641, TKIDN2009794, TKIDN2009889, TKIDN2010200, TKIDN2010232, TKIDN2010278, TKIDN2010602, TKIDN2010812, TKIDN2010934, TKIDN2011051, TKIDN2011160, TKIDN2011289, TKIDN2011324, TKIDN2012034, TKIDN2012771, TKIDN2012824, TKIDN2013134, TKIDN2013287, TKIDN2014570, TKIDN2014757, TKIDN2014771, TKIDN2014964, TKIDN2015025, TKIDN2015071, TKIDN2015161, TKIDN2015263, TKIDN2015285, TKIDN2015423, TKIDN2016309, TKIDN2016399, TKIDN2016846, TKIDN2018926, TKIDN2019116, TLIVE2000023, TLIVE2000142, TLIVE2000292, TLIVE2000762, TLIVE2000979, TLIVE2001327, TLIVE2001616, TLIVE2001684, TLIVE2001828, TLIVE2001927, TLIVE2002046, TLIVE2002336, TLIVE2002338, TLIVE2002562, TLIVE2002690, TLIVE2002882, TLIVE2003197, TLIVE2003200, TLIVE2003225, TLIVE2003381, TLIVE2003737, TLIVE2003961, TLIVE2003970, TLIVE2004110, TLIVE2004320, TLIVE2004331, TLIVE2004601, TLIVE2005180, TLIVE2005390, TLIVE2005516, TLIVE2005731, TLIVE2005866, TLIVE2006236, TLIVE2006359, TLIVE2006529, TLIVE2006621, TLIVE2006733, TLIVE2007000, TLIVE2007016, TLIVE2007132, TLIVE2007192, TLIVE2007528, TLIVE2007607, TLIVE2007736, TLIVE2007816, TLIVE2007919, TLIVE2008083, TLIVE2008213, TLIVE2008221, TLIVE2008229, TLIVE2008712, TLIVE2008797, TLIVE2009087, TLIVE2009163, TLIVE2009489, TLIVE2009541, TLUNG2000179, TOVAR2000476, TOVAR2000575, TOVAR2000649, TOVAR2000904, TOVAR2001281, TOVAR2001556, TOVAR2001730, TOVAR2002247, TOVAR2002514, TOVAR2002549, TOVAR2002800, TRACH1000011, TRACH1000018, TRACH1000030, TRACH1000038, TRACH1000057, TRACH1000063, TRACH1000074, TRACH1000100, TRACH1000106, TRACH1000125, TRACH1000140, TRACH1000144, TRACH1000181, TRACH1000193, TRACH1000205, TRACH1000212, TRACH1000240, TRACH2000002, TRACH2000015, TRACH2000024, TRACH2000032, TRACH2000045, TRACH2000081, TRACH2000083, TRACH2000148, TRACH2000185, TRACH2000196, TRACH2000235, TRACH2000237, TRACH2000243, TRACH2000250, TRACH2000259, TRACH2000272, TRACH2000282, TRACH2000287, TRACH2000289, TRACH2000306, TRACH2000312, TRACH2000336, TRACH2000359, TRACH2000393, TRACH2000411, TRACH2000420, TRACH2000461, TRACH2000472, TRACH2000496, TRACH2000497, TRACH2000502, TRACH2000522, TRACH2000559, TRACH2000660, TRACH2000665, TRACH2000675, TRACH2000677, TRACH2000702, TRACH2000703, TRACH2000767, TRACH2000775, TRACH2000780, TRACH2000807, TRACH2000862, TRACH2000873, TRACH2000894, TRACH2000898, TRACH2000920, TRACH2000923, TRACH2000926, TRACH2000944, TRACH2000959, TRACH2000972, TRACH2000981, TRACH2000986, TRACH2001037, TRACH2001060, TRACH2001085, TRACH2001101, TRACH2001109, TRACH2001121, TRACH2001147, TRACH2001154, TRACH2001188, TRACH2001192, TRACH2001249, TRACH2001275, TRACH2001314, TRACH2001335, TRACH2001339, TRACH2001341, TRACH2001347, TRACH2001395, TRACH2001400, TRACH2001403, TRACH2001416, TRACH2001428, TRACH2001432, TRACH2001443, TRACH2001463, TRACH2001474, TRACH2001478, TRACH2001523, TRACH2001525, TRACH2001532, TRACH2001549, TRACH2001592, TRACH2001596, TRACH2001612, TRACH2001621, TRACH2001646, TRACH2001651, TRACH2001684, TRACH2001810, TRACH2001898, TRACH2001933, TRACH2001968, TRACH2001996, TRACH2002043, TRACH2002054, TRACH2002092, TRACH2002100, TRACH2002138, TRACH2002333, TRACH2002537, TRACH2002664, TRACH2002784, TRACH2002803, TRACH2002840, TRACH2002847, TRACH2002853, TRACH2002862, TRACH2002954, TRACH2002960, TRACH2002988, TRACH2003070, TRACH2003272, TRACH2003323, TRACH2003347, TRACH2003484, TRACH2003516, TRACH2003605, TRACH2003736, TRACH2003759, TRACH2003941, TRACH2004039, TRACH2004054, TRACH2004087, TRACH2004109, TRACH2004170, TRACH2004183, TRACH2004251, TRACH2004292, TRACH2004336, TRACH2004399, TRACH2004428, TRACH2004458, TRACH2004499, TRACH2004521, TRACH2004570, TRACH2004845, TRACH2004887, TRACH2004950, TRACH2005004, TRACH2005017, TRACH2005066, TRACH2005159, TRACH2005314, TRACH2005444, TRACH2005541, TRACH2005666, TRACH2005698, TRACH2005720, TRACH2005769, TRACH2005796, TRACH2005800, TRACH2006015, TRACH2006049, TRACH2006097, TRACH2006194, TRACH2006327, TRACH2006331, TRACH2006378, TRACH2006387, TRACH2006528, TRACH2006670, TRACH2006762, TRACH2006866, TRACH2006870, TRACH2006918, TRACH2007059, TRACH2007324, TRACH2007358, TRACH2007483, TRACH2007542, TRACH2007577, TRACH2007674, TRACH2007676, TRACH2007688, TRACH2007733, TRACH2007754, TRACH2007816, TRACH2007894, TRACH2007969, TRACH2007988, TRACH2008081, TRACH2008112, TRACH2008113, TRACH2008127, TRACH2008130, TRACH2008278, TRACH2008300, TRACH2008472, TRACH2008478, TRACH2008540, TRACH2008583, TRACH2008597, TRACH2008716, TRACH2008820, TRACH2008891, TRACH2008921, TRACH2009006, TRACH2009060, TRACH2009107, TRACH2009123, TRACH2009268, TRACH2009291, TRACH2009310, TRACH2009340, TRACH2009348, TRACH2009358, TRACH2009661, TRACH2009730, TRACH2009743, TRACH2009754, TRACH2009851, TRACH2009862, TRACH2009934, TRACH2010159, TRACH2010218, TRACH2010251, TRACH2010272, TRACH2010317, TRACH2010419, TRACH2010451, TRACH2010505, TRACH2010587, TRACH2010600, TRACH2010634, TRACH2010639, TRACH2010677, TRACH2010698, TRACH2010771, TRACH2010824, TRACH2010883, TRACH2010965, TRACH2010974, TRACH2011057, TRACH2011093, TRACH2011290, TRACH2011293, TRACH2011302, TRACH2011500, TRACH2011574, TRACH2011894, TRACH2011956, TRACH2012000, TRACH2012138, TRACH2012242, TRACH2012298, TRACH2012370, TRACH2012376, TRACH2012387, TRACH2012497, TRACH2012536, TRACH2012562, TRACH2012742, TRACH2012811, TRACH2012823, TRACH2012918, TRACH2013081, TRACH2013123, TRACH2013265, TRACH2013369, TRACH2013450, TRACH2013495, TRACH2013552, TRACH2013585, TRACH2013671, TRACH2013726, TRACH2013902, TRACH2013928, TRACH2013982, TRACH2013991, TRACH2014018, TRACH2014045, TRACH2014046, TRACH2014077, TRACH2014082, TRACH2014268, TRACH2014284, TRACH2014337, TRACH2014356, TRACH2014371, TRACH2014442, TRACH2014483, TRACH2014495, TRACH2014544, TRACH2014573, TRACH2014725, TRACH2014760, TRACH2014815, TRACH2014839, TRACH2014938, TRACH2014950, TRACH2014972, TRACH2014974, TRACH2014997, TRACH2015180, TRACH2015243, TRACH2015316, TRACH2015381, TRACH2015486, TRACH2015654, TRACH2015823, TRACH2015939, TRACH2015987, TRACH2016080, TRACH2016131, TRACH2016286, TRACH2016317, TRACH2016347, TRACH2016380, TRACH2016384, TRACH2016410, TRACH2016481, TRACH2016498, TRACH2016533, TRACH2016551, TRACH2016554, TRACH2016651, TRACH2016690, TRACH2016709, TRACH2016722, TRACH2016835, TRACH2016980, TRACH2017086, TRACH2017368, TRACH2017498, TRACH2017609, TRACH2017949, TRACH2017965, TRACH2017980, TRACH2018034, TRACH2018084, TRACH2018262, TRACH2018273, TRACH2018278, TRACH2018317, TRACH2018345, TRACH2018380, TRACH2018446, TRACH2018449, TRACH2018512, TRACH2018646, TRACH2018663, TRACH2018718, TRACH2018835, TRACH2018882, TRACH2018914, TRACH2018950, TRACH2019024, TRACH2019046, TRACH2019080, TRACH2019151, TRACH2019154, TRACH2019176, TRACH2019248, TRACH2019309, TRACH2019425, TRACH2019473, TRACH2019602, TRACH2019661, TRACH2019672, TRACH2019673, TRACH2019844, TRACH2019879, TRACH2020048, TRACH2020336, TRACH2020525, TRACH2021398, TRACH2021622, TRACH2021635, TRACH2021964, TRACH2022042, TRACH2022113, TRACH2022253, TRACH2022425, TRACH2022553, TRACH2022649, TRACH2022839, TRACH2023246, TRACH2023299, TRACH2023306, TRACH2023416, TRACH2023479, TRACH2023684, TRACH2023860, TRACH2023876, TRACH2024139, TRACH2024187, TRACH2024271, TRACH2024293, TRACH2024408, TRACH2024512, TRACH2024559, TRACH2024647, TRACH2024651, TRACH2024730, TRACH2024735, TRACH2024749, TRACH2024821, TRACH2025057, TRACH2025084, TRACH2025155, TRACH2025224, TRACH2025344, TRACH2025379, TRACH2025507, TRACH2025535, TRACH2025569, TRACH2025705, TRACH2025749, TRACH2025753, TRACH2025810, TRACH2025853, TRACH2025911, TRACH2025932, TRACH3000014, TRACH3000017, TRACH3000043, TRACH3000134, TRACH3000180, TRACH3000342, TRACH3000420, TRACH3000515, TRACH3000530, TRACH3000548, TRACH3000558, TRACH3000586, TRACH3000692, TRACH3000780, TRACH3000892, TRACH3000926, TRACH3001119, TRACH3001443, TRACH3001550, TRACH3001759, TRACH3002064, TRACH3002107, TRACH3002168, TRACH3002188, TRACH3002245, TRACH3002293, TRACH3002533, TRACH3002561, TRACH3002567, TRACH3002605, TRACH3002650, TRACH3002752, TRACH3002866, TRACH3002871, TRACH3002876, TRACH3002890, TRACH3003009, TRACH3003037, TRACH3003357, TRACH3003379, TRACH3003547, TRACH3003586, TRACH3003683, TRACH3003780, TRACH3003805, TRACH3003832, TRACH3003872, TRACH3004068, TRACH3004113, TRACH3004288, TRACH3004303, TRACH3004412, TRACH3004424, TRACH3004456, TRACH3004537, TRACH3004596, TRACH3004651, TRACH3004652, TRACH3004671, TRACH3004721, TRACH3004747, TRACH3004760, TRACH3004783, TRACH3004786, TRACH3004840, TRACH3004931, TRACH3004934, TRACH3005072, TRACH3005085, TRACH3005102, TRACH3005173, TRACH3005191, TRACH3005211, TRACH3005274, TRACH3005479, TRACH3005549, TRACH3005699, TRACH3005702, TRACH3005808, TRACH3005852, TRACH3005896, TRACH3006038, TRACH3006149, TRACH3006228, TRACH3006264, TRACH3006336, TRACH3006379, TRACH3006392, TRACH3006395, TRACH3006397, TRACH3006412, TRACH3006470, TRACH3006589, TRACH3006626, TRACH3006699, TRACH3006717, TRACH3006800, TRACH3006889, TRACH3006985, TRACH3007097, TRACH3007268, TRACH3007274, TRACH3007277, TRACH3007391, TRACH3007541, TRACH3007595, TRACH3007625, TRACH3007627, TRACH3007689, TRACH3007766, TRACH3007866, TRACH3007995, TRACH3008042, TRACH3008061, TRACH3008093, TRACH3008201, TRACH3008508, TRACH3008535, TRACH3008629, TRACH3008632, TRACH3008688, TRACH3008697, TRACH3008713, TRACH3008887, TRACH3008902, TRACH3008990, TRACH3009001, TRACH3009008, TRACH3009059, TRACH3009061, TRACH3009148, TRACH3009455, TRACH3009701, TRACH3009715, TRACH3009894, TRACH3009956, TRACH3010079, TRACH3010167, TRACH3010331, TRACH3010342, TRACH3010382, TRACH3010757, TRACH3010901, TRACH3011004, TRACH3011082, TRACH3011184, TRACH3011282, TRACH3011313, TRACH3011454, TRACH3011485, TRACH3011503, TRACH3011538, TRACH3011542, TRACH3012106, TRACH3012161, TRACH3012232, TRACH3012261, TRACH3012445, TRACH3012460, TRACH3012659, TRACH3012718, TRACH3012864, TRACH3012891, TRACH3012942, TRACH3013043, TRACH3013072, TRACH3013426, TRACH3013454, TRACH3013558, TRACH3013684, TRACH3013693, TRACH3013700, TRACH3013766, TRACH3013900, TRACH3013926, TRACH3014063, TRACH3014183, TRACH3014215, TRACH3014316, TRACH3014415, TRACH3014580, TRACH3014641, TRACH3014885, TRACH3015136, TRACH3015336, TRACH3015346, TRACH3015354, TRACH3015467, TRACH3015626, TRACH3015951, TRACH3016051, TRACH3016120, TRACH3016264, TRACH3016277, TRACH3016368, TRACH3016455, TRACH3016614, TRACH3016805, TRACH3016992, TRACH3017171, TRACH3017409, TRACH3017934, TRACH3018108, TRACH3018191, TRACH3018240, TRACH3018261, TRACH3018519, TRACH3018524, TRACH3018606, TRACH3018783, TRACH3018907, TRACH3018933, TRACH3018943, TRACH3019018, TRACH3019058, TRACH3019142, TRACH3019290, TRACH3019347, TRACH3019370, TRACH3019447, TRACH3019598, TRACH3019621, TRACH3019662, TRACH3019807, TRACH3019924, TRACH3019977, TRACH3020137, TRACH3020410, TRACH3020563, TRACH3020605, TRACH3020750, TRACH3020769, TRACH3020928, TRACH3020930, TRACH3021023, TRACH3021066, TRACH3021212, TRACH3021335, TRACH3021373, TRACH3021544, TRACH3021778, TRACH3021834, TRACH3021883, TRACH3022170, TRACH3022198, TRACH3022296, TRACH3022482, TRACH3022732, TRACH3022758, TRACH3022875, TRACH3022910, TRACH3022960, TRACH3023063, TRACH3023203, TRACH3023242, TRACH3023373, TRACH3023516, TRACH3023752, TRACH3023945, TRACH3023960, TRACH3024020, TRACH3024081, TRACH3024342, TRACH3024423, TRACH3024428, TRACH3024512, TRACH3024671, TRACH3024823, TRACH3025302, TRACH3025316, TRACH3025346, TRACH3025520, TRACH3026148, TRACH3026283, TRACH3026299, TRACH3026303, TRACH3026542, TRACH3026650, TRACH3026676, TRACH3026744, TRACH3026949, TRACH3027229, TRACH3027527, TRACH3027681, TRACH3027701, TRACH3027885, TRACH3028031, TRACH3028164, TRACH3028180, TRACH3028195, TRACH3028441, TRACH3028597, TRACH3028678, TRACH3028837, TRACH3028847, TRACH3028855, TRACH3029139, TRACH3029329, TRACH3029451, TRACH3029462, TRACH3029520, TRACH3029592, TRACH3029629, TRACH3029665, TRACH3029670, TRACH3029800, TRACH3030111, TRACH3030130, TRACH3030176, TRACH3030252, TRACH3030725, TRACH3030855, TRACH3030883, TRACH3031316, TRACH3031400, TRACH3031463, TRACH3031479, TRACH3031518, TRACH3031660, TRACH3031678, TRACH3031936, TRACH3032044, TRACH3032065, TRACH3032150, TRACH3032372, TRACH3032480, TRACH3032570, TRACH3032755, TRACH3032827, TRACH3032873, TRACH3033535, TRACH3033680, TRACH3033868, TRACH3034145, TRACH3034414, TRACH3034488, TRACH3034680, TRACH3034731, TRACH3034745, TRACH3034762, TRACH3034903, TRACH3035187, TRACH3035199, TRACH3035235, TRACH3035451, TRACH3035482, TRACH3035526, TRACH3036004, TRACH3036103, TRACH3036193, TRACH3036207, TRACH3036278, TRACH3036309, TRACH3036456, TRACH3036609, TRACH3036638, TRACH3036683, TRACH3036750, TRACH3036792, TRACH3036843, TRACH3036897, TRACH3036932, TRACH3036942, TRACH3036997, TRACH3037063, TRACH3037067, TRACH3037267, TRACH3037288, TRACH3037505, TRACH3037573, TRACH3037696, TRACH3037897, TRACH3038086, TRACH3038399, TSTOM1000135, TSTOM1000186, TSTOM2000139, TSTOM2000235, TSTOM2000315, TSTOM2000442, TSTOM2000553, TSTOM2000569, TSTOM2000588, TSTOM2001195, TSTOM2001274, TSTOM2001571, TSTOM2001996, TSTOM2002265, TSTOM2002505, TSTOM2002561, TSTOM2002611, TSTOM2002672, TSTOM2002682, TUTER1000014, TUTER1000122, TUTER1000137, TUTER2000057, TUTER2000283, TUTER2000425, TUTER2000904, TUTER2000916, TUTER2001286, TUTER2001341, TUTER2001387, TUTER2001433, TUTER2001461, TUTER2002028, TUTER2002074, TUTER2002158, TUTER2002228, TUTER2002323, TUTER2002356, TUTER2002729, UMVEN1000122, UMVEN1000143, UMVEN1000156, UMVEN2000046, UMVEN2000069, UMVEN2000121, UMVEN2000152, UMVEN2000354, UMVEN2000453, UTERU1000008, UTERU1000015, UTERU1000024, UTERU1000031, UTERU1000032, UTERU1000057, UTERU1000065, UTERU1000077, UTERU1000093, UTERU1000096, UTERU1000106, UTERU1000109, UTERU1000131, UTERU1000138, UTERU1000148, UTERU1000160, UTERU1000183, UTERU1000187, UTERU1000192, UTERU1000249, UTERU1000337, UTERU1000339, UTERU1000384, UTERU2000023, UTERU2000047, UTERU2000074, UTERU2000099, UTERU2000154, UTERU2000197, UTERU2000218, UTERU2000238, UTERU2000243, UTERU2000260, UTERU2000300, UTERU2000329, UTERU2000332, UTERU2000338, UTERU2000349, UTERU2000377, UTERU2000393, UTERU2000418, UTERU2000465, UTERU2000517, UTERU2000524, UTERU2000537, UTERU2000539, UTERU2000541, UTERU2000542, UTERU2000546, UTERU2000550, UTERU2000569, UTERU2000607, UTERU2000629, UTERU2000649, UTERU2000663, UTERU2000696, UTERU2000794, UTERU2000830, UTERU2000844, UTERU2000922, UTERU2000925, UTERU2001024, UTERU2001110, UTERU2001176, UTERU2001281, UTERU2001389, UTERU2001409, UTERU2001412, UTERU2001504, UTERU2001658, UTERU2001747, UTERU2001876, UTERU2002001, UTERU2002011, UTERU2002176, UTERU2002198, UTERU2002332, UTERU2002410, UTERU2002473, UTERU2002547, UTERU2002662, UTERU2002693, UTERU2002733, UTERU2002736, UTERU2002737, UTERU2002826, UTERU2002841, UTERU2002964, UTERU2002993, UTERU2003035, UTERU2003057, UTERU2003126, UTERU2003135, UTERU2003321, UTERU2003399, UTERU2003411, UTERU2003456, UTERU2003577, UTERU2003704, UTERU2003926, UTERU2003973, UTERU2004015, UTERU2004039, UTERU2004061, UTERU2004073, UTERU2004163, UTERU2004197, UTERU2004299, UTERU2004461, UTERU2004520, UTERU2004564, UTERU2004664, UTERU2004688, UTERU2004698, UTERU2004807, UTERU2004861, UTERU2004929, UTERU2005004, UTERU2005050, UTERU2005069, UTERU2005074, UTERU2005179, UTERU2005346, UTERU2005354, UTERU2005446, UTERU2005449, UTERU2005450, UTERU2005533, UTERU2005593, UTERU2005601, UTERU2005621, UTERU2005664, UTERU2005822, UTERU2005903, UTERU2005905, UTERU2006103, UTERU2006115, UTERU2006137, UTERU2006182, UTERU2006412, UTERU2006429, UTERU2006486, UTERU2006524, UTERU2006547, UTERU2006568, UTERU2006593, UTERU2006643, UTERU2006651, UTERU2006705, UTERU2006899, UTERU2007004, UTERU2007075, UTERU2007081, UTERU2007128, UTERU2007253, UTERU2007267, UTERU2007444, UTERU2007499, UTERU2007639, UTERU2007724, UTERU2007942, UTERU2008018, UTERU2008019, UTERU2008027, UTERU2008040, UTERU2008077, UTERU2008130, UTERU2008302, UTERU2008347, UTERU2008426, UTERU2008516, UTERU2008561, UTERU2008653, UTERU2008705, UTERU2008707, UTERU2008747, UTERU2008785, UTERU2008845, UTERU2008901, UTERU2008930, UTERU2008939, UTERU2008962, UTERU2009094, UTERU2009120, UTERU2009131, UTERU2009147, UTERU2009206, UTERU2009283, UTERU2009414, UTERU2009435, UTERU2009483, UTERU2009510, UTERU2009538, UTERU2009540, UTERU2009776, UTERU2009904, UTERU2009951, UTERU2009972, UTERU2010115, UTERU2010124, UTERU2010164, UTERU2010226, UTERU2010231, UTERU2010304, UTERU2010320, UTERU2010431, UTERU2010525, UTERU2010651, UTERU2010724, UTERU2010747, UTERU2011195, UTERU2011199, UTERU2011220, UTERU2011261, UTERU2011287, UTERU2011410, UTERU2011574, UTERU2011621, UTERU2011657, UTERU2011741, UTERU2011806, UTERU2011811, UTERU2011897, UTERU2011906, UTERU2011962, UTERU2011968, UTERU2012031, UTERU2012101, UTERU2012114, UTERU2012252, UTERU2012286, UTERU2012333, UTERU2012407, UTERU2012526, UTERU2012581, UTERU2012610, UTERU2012615, UTERU2012688, UTERU2012703, UTERU2012715, UTERU2012741, UTERU2012767, UTERU2012786, UTERU2012856, UTERU2012890, UTERU2012938, UTERU2012976, UTERU2013048, UTERU2013078, UTERU2013231, UTERU2013262, UTERU2013280, UTERU2013322, UTERU2013483, UTERU2013491, UTERU2013502, UTERU2013586, UTERU2013926, UTERU2013976, UTERU2014001, UTERU2014024, UTERU2014167, UTERU2014223, UTERU2014398, UTERU2014464, UTERU2014548, UTERU2014601, UTERU2014631, UTERU2014668, UTERU2014678, UTERU2014728, UTERU2014998, UTERU2015062, UTERU2015087, UTERU2015108, UTERU2015190, UTERU2015198, UTERU2015202, UTERU2015405, UTERU2015640, UTERU2015830, UTERU2015880, UTERU2016147, UTERU2016157, UTERU2016426, UTERU2016464, UTERU2016669, UTERU2016757, UTERU2016761, UTERU2016799, UTERU2016822, UTERU2016896, UTERU2016902, UTERU2016979, UTERU2016981, UTERU2017123, UTERU2017303, UTERU2017421, UTERU2017492, UTERU2017613, UTERU2017623, UTERU2017632, UTERU2017761, UTERU2017762, UTERU2017810, UTERU2017988, UTERU2018127, UTERU2018180, UTERU2018200, UTERU2018333, UTERU2018364, UTERU2018514, UTERU2018522, UTERU2018523, UTERU2018544, UTERU2018566, UTERU2018609, UTERU2018674, UTERU2018712, UTERU2018784, UTERU2018789, UTERU2018811, UTERU2018867, UTERU2018881, UTERU2018884, UTERU2018955, UTERU2019005, UTERU2019038, UTERU2019096, UTERU2019163, UTERU2019257, UTERU2019453, UTERU2019491, UTERU2019534, UTERU2019681, UTERU2019706, UTERU2019710, UTERU2019940, UTERU2019959, UTERU2019964, UTERU2020226, UTERU2020242, UTERU2020292, UTERU2020351, UTERU2020491, UTERU2020718, UTERU2021163, UTERU2021380, UTERU2021649, UTERU2021820, UTERU2022020, UTERU2022773, UTERU2022955, UTERU2022981, UTERU2023039, UTERU2023262, UTERU2023550, UTERU2023651, UTERU2023687, UTERU2023712, UTERU2023941, UTERU2024002, UTERU2024042, UTERU2024141, UTERU2024481, UTERU2024656, UTERU2024758, UTERU2024820, UTERU2024881, UTERU2024969, UTERU2025025, UTERU2025041, UTERU2025301, UTERU2025366, UTERU2025415, UTERU2025579, UTERU2025645, UTERU2025891, UTERU2026025, UTERU2026090, UTERU2026142, UTERU2026203, UTERU2026775, UTERU2027023, UTERU2027369, UTERU2027591, UTERU2027616, UTERU2027941, UTERU2028377, UTERU2028734, UTERU2029503, UTERU2029660, UTERU2029742, UTERU2029953, UTERU2030213, UTERU2030270, UTERU2030280, UTERU2031060, UTERU2031084, UTERU2031268, UTERU2031295, UTERU2031521, UTERU2031611, UTERU2031703, UTERU2031834, UTERU2031851, UTERU2032075, UTERU2032220, UTERU2032279, UTERU2032726, UTERU2033172, UTERU2033375, UTERU2033382, UTERU2033420, UTERU2033530, UTERU2033577, UTERU2034053, UTERU2034147, UTERU2034695, UTERU2035114, UTERU2035187, UTERU2035231, UTERU2035306, UTERU2035323, UTERU2035328, UTERU2035331, UTERU2035452, UTERU2035469, UTERU2035503, UTERU2035745, UTERU2035908, UTERU2035926, UTERU2035978, UTERU2036089, UTERU2036347, UTERU2036507, UTERU2036512, UTERU2036530, UTERU2036623, UTERU2036690, UTERU2037224, UTERU2037361, UTERU2037423, UTERU2037577, UTERU2037674, UTERU2037791, UTERU2037843, UTERU2038171, UTERU2038251, UTERU3000226, UTERU3000298, UTERU3000402, UTERU3000645, UTERU3000665, UTERU3000670, UTERU3000727, UTERU3000738, UTERU3000828, UTERU3000844, UTERU3000899, UTERU3000959, UTERU3001029, UTERU3001053, UTERU3001059, UTERU3001158, UTERU3001240, UTERU3001394, UTERU3001542, UTERU3001558, UTERU3001571, UTERU3001585, UTERU3001632, UTERU3001652, UTERU3001766, UTERU3001988, UTERU3002209, UTERU3002218, UTERU3002383, UTERU3002600, UTERU3002620, UTERU3002667, UTERU3002701, UTERU3002731, UTERU3002768, UTERU3002786, UTERU3002993, UTERU3003116, UTERU3003135, UTERU3003178, UTERU3003465, UTERU3003495, UTERU3003523, UTERU3003660, UTERU3003774, UTERU3003776, UTERU3004384, UTERU3004418, UTERU3004477, UTERU3004523, UTERU3004616, UTERU3004635, UTERU3004709, UTERU3004938, UTERU3004992, UTERU3005049, UTERU3005159, UTERU3005205, UTERU3005230, UTERU3005264, UTERU3005422, UTERU3005460, UTERU3005536, UTERU3005585, UTERU3005767, UTERU3005907, UTERU3005970, UTERU3006008, UTERU3006228, UTERU3006308, UTERU3006538, UTERU3006640, UTERU3006687, UTERU3006720, UTERU3006798, UTERU3006884, UTERU3007021, UTERU3007104, UTERU3007108, UTERU3007134, UTERU3007419, UTERU3007640, UTERU3007731, UTERU3007913, UTERU3008280, UTERU3008463, UTERU3008660, UTERU3008671, UTERU3008722, UTERU3008917, UTERU3009259, UTERU3009490, UTERU3009517, UTERU3009690, UTERU3009775, UTERU3009871, UTERU3009979, UTERU3009987, UTERU3010029, UTERU3010409, UTERU3010526, UTERU3010604, UTERU3010892, UTERU3010919, UTERU3011063, UTERU3011092, UTERU3011273, UTERU3011398, UTERU3011558, UTERU3011579, UTERU3011795, UTERU3011837, UTERU3012293, UTERU3012414, UTERU3012476, UTERU3012599, UTERU3012999, UTERU3013167, UTERU3013302, UTERU3013781, UTERU3014274, UTERU3014446, UTERU3014611, UTERU3014647, UTERU3014791, UTERU3014906, UTERU3015011, UTERU3015086, UTERU3015299, UTERU3015412, UTERU3015500, UTERU3015647, UTERU3015844, UTERU3016070, UTERU3016273, UTERU3016274, UTERU3016308, UTERU3016789, UTERU3017176, UTERU3017441, UTERU3017626, UTERU3017995, UTERU3018154, UTERU3018172, UTERU3018255, UTERU3018616, UTERU3018711, UTERU3019078

[0687] Of the 17,176 genes including the cDNAs of the present invention, genes, whose expression levels were high enough to detect in each library of HELAC, HHDPC, HLUNG, HSYRA, IMR32, JCMLC, and KIDNE, were analyzed for the expression frequencies. The analysis results are described below. Each is a relative value, where the expression level over all tissues is taken as 100. The larger this value, the greater the level of expression.

TABLE 32

| Clone Name | HELAC | HHDPC | HLUNG | HSYRA | IMR32 | JCMLC | KIDNE |
|---|---|---|---|---|---|---|---|
| 3NB691000113 | 0 | 0 | 0 | 50.609 | 0 | 0 | 0 |
| 3NB691000116 | 0 | 11.451 | 0 | 0 | 0 | 0 | 0 |
| 3NB691000173 | 0 | 0 | 0 | 0 | 11.145 | 0 | 0 |
| 3NB692000281 | 0 | 0 | 0 | 0 | 3.107 | 0 | 0 |
| 3NB692000330 | 0 | 0 | 1.618 | 0 | 3.113 | 0 | 1.538 |
| 3NB692000374 | 0 | 7.636 | 3.978 | 0 | 0 | 0 | 0 |
| 3NB692000545 | 0 | 0 | 0 | 0 | 9.955 | 0 | 0 |
| 3NB692000912 | 0 | 0 | 0 | 0 | 3.316 | 0 | 1.638 |
| 3NB692001002 | 0 | 0 | 7.176 | 0 | 0 | 0 | 0 |
| 3NB692001022 | 0 | 0 | 0 | 0 | 4.390 | 0 | 0 |
| 3NB692001288 | 0 | 10.549 | 0 | 0 | 0 | 0 | 5.223 |
| 3NB692001334 | 0 | 0 | 0.985 | 2.006 | 7.577 | 0 | 0 |
| 3NB692001442 | 0 | 0 | 0 | 9.028 | 4.262 | 0 | 0 |
| 3NB692001459 | 0 | 0 | 0 | 0 | 19.948 | 0 | 0 |
| 3NB692001511 | 0 | 0 | 31.576 | 0 | 0 | 0 | 0 |
| 3NB692001637 | 0 | 0 | 0 | 33.877 | 0 | 0 | 0 |
| ADRGL2002477 | 0 | 0 | 6.240 | 0 | 0 | 0 | 5.931 |
| ADRGL2005838 | 0 | 0 | 38.763 | 0 | 0 | 0 | 0 |
| ADRGL2012038 | 0 | 0 | 0 | 15.365 | 0 | 0 | 0 |
| ASTRO1000165 | 0 | 0 | 0 | 16.566 | 0 | 0 | 7.727 |
| ASTRO2000014 | 36.043 | 0 | 0 | 0 | 0 | 0 | 0 |
| ASTRO2000046 | 0 | 2.873 | 0 | 3.050 | 0 | 0 | 0 |
| ASTRO2000480 | 0 | 0 | 0 | 0 | 9.990 | 0 | 0 |
| ASTRO2000801 | 0 | 0 | 0 | 0 | 3.600 | 0 | 0 |
| ASTRO2000914 | 0 | 0 | 7.139 | 0 | 0 | 0 | 6.786 |
| ASTRO2001029 | 0 | 0 | 9.198 | 0 | 0 | 0 | 0 |
| ASTRO2001076 | 0 | 0 | 0 | 0 | 0 | 39.073 | 0 |
| ASTRO2001806 | 0 | 10.074 | 0 | 0 | 0 | 0 | 0 |
| ASTRO2001823 | 0 | 10.221 | 0 | 0 | 0 | 0 | 0 |
| ASTRO2002459 | 0 | 0 | 0 | 6.543 | 0 | 0 | 0 |
| ASTRO2003024 | 0 | 0 | 3.476 | 0 | 0 | 0 | 0 |
| ASTRO2003632 | 0 | 2.925 | 12.190 | 0 | 0 | 0 | 0 |
| ASTRO2005687 | 0 | 0 | 0 | 24.993 | 0 | 0 | 0 |
| ASTRO2007047 | 0 | 0 | 15.330 | 0 | 0 | 0 | 0 |
| ASTRO2010819 | 0 | 0 | 0 | 0 | 0 | 0 | 2.346 |
| ASTRO2012552 | 0 | 0 | 0 | 0 | 10.431 | 0 | 0 |
| ASTRO2013585 | 0 | 0 | 0 | 3.644 | 0 | 0 | 1.700 |
| ASTRO2016491 | 0 | 0 | 1.847 | 0 | 0 | 0 | 0 |
| ASTRO2018169 | 82.898 | 0 | 0 | 0 | 0 | 0 | 0 |
| BGGI11000123 | 61.509 | 0 | 0 | 0 | 0 | 0 | 0 |
| BGGI12000533 | 0 | 15.896 | 0 | 0 | 0 | 0 | 0 |
| BGGI12000616 | 0 | 0 | 0 | 0 | 0 | 0 | 3.117 |
| BGGI12000839 | 0 | 0 | 2.705 | 0 | 0 | 0 | 0 |
| BGGI12001097 | 0 | 0 | 4.122 | 0 | 0 | 0 | 3.918 |
| BGGI12001682 | 0 | 0 | 0 | 0 | 3.644 | 0 | 0 |
| BLADE2002744 | 0 | 0 | 0 | 0 | 0 | 67.097 | 0 |
| BLADE2006830 | 0 | 0 | 0 | 0 | 0 | 46.211 | 0 |
| BLADE2007589 | 0 | 0 | 18.131 | 0 | 0 | 0 | 0 |
| BNGH41000153 | 0 | 0 | 17.235 | 0 | 0 | 0 | 0 |
| BNGH41000198 | 0 | 0 | 7.620 | 0 | 7.331 | 0 | 0 |
| BNGH42000130 | 91.923 | 0 | 0 | 0 | 0 | 0 | 0 |
| BNGH42000360 | 0 | 0 | 0 | 0 | 1.110 | 0 | 0 |
| BNGH42000739 | 0 | 0 | 2.282 | 0 | 0 | 0 | 0 |
| BNGH42007709 | 0 | 0 | 3.377 | 0 | 0.812 | 0 | 0.802 |
| BNGH42007788 | 0 | 0 | 0 | 23.009 | 0 | 0 | 0 |
| BRACE1000131 | 0 | 7.334 | 0 | 7.785 | 0 | 0 | 0 |
| BRACE1000159 | 0 | 0 | 0 | 0 | 6.515 | 0 | 0 |
| BRACE1000186 | 0 | 15.224 | 0 | 0 | 0 | 0 | 0 |
| BRACE2000245 | 0 | 0 | 0 | 0 | 0 | 0 | 30.833 |
| BRACE2000505 | 0 | 0 | 0 | 91.327 | 0 | 0 | 0 |
| BRACE2000525 | 0 | 0 | 0 | 0 | 0 | 0 | 5.664 |
| BRACE2000969 | 0 | 0 | 83.786 | 0 | 0 | 0 | 0 |
| BRACE2001117 | 0 | 0 | 0 | 0 | 19.410 | 0 | 9.589 |
| BRACE2001497 | 0 | 0 | 0 | 13.927 | 0 | 0 | 0 |
| BRACE2001692 | 0 | 0 | 0 | 0 | 2.137 | 0 | 0 |
| BRACE2001855 | 0 | 0 | 12.661 | 8.600 | 0 | 0 | 0 |
| BRACE2001892 | 0 | 0 | 0 | 0 | 1.069 | 0 | 0 |
| BRACE2001971 | 0 | 0 | 0 | 0 | 7.914 | 0 | 0 |
| BRACE2002081 | 0 | 0 | 70.380 | 0 | 0 | 0 | 0 |
| BRACE2002091 | 0 | 0 | 0 | 0 | 7.451 | 0 | 7.362 |
| BRACE2002392 | 0 | 0 | 0 | 0 | 6.082 | 0 | 0 |
| BRACE2002441 | 0 | 7.930 | 0 | 0 | 0 | 30.961 | 0 |
| BRACE2002685 | 0 | 0 | 0 | 0 | 0 | 0 | 11.950 |
| BRACE2002860 | 0 | 0 | 0 | 0 | 0 | 0 | 8.777 |
| BRACE2003172 | 0 | 0 | 0 | 0 | 0 | 0 | 4.532 |
| BRACE2003217 | 0 | 0 | 0 | 0 | 15.210 | 0 | 0 |
| BRACE2003254 | 0 | 0 | 3.321 | 0 | 3.195 | 0 | 0 |
| BRACE2003527 | 0 | 18.150 | 0 | 0 | 0 | 0 | 0 |
| BRACE2003827 | 0 | 0 | 0 | 0 | 3.091 | 0 | 0 |
| BRACE2003846 | 57.200 | 0 | 0 | 0 | 0 | 0 | 0 |
| BRACE2003892 | 0 | 0 | 8.005 | 0 | 0 | 0 | 0 |
| BRACE2003904 | 0 | 0 | 0 | 0 | 0 | 0 | 9.038 |
| BRACE2005099 | 0 | 0 | 0 | 0 | 0 | 0 | 9.269 |
| BRACE2005231 | 0 | 0 | 0 | 0 | 0 | 0 | 11.130 |
| BRACE2005434 | 0 | 0 | 0 | 0 | 2.433 | 0 | 0 |
| BRACE2005448 | 0 | 0 | 0 | 0 | 0 | 0 | 23.706 |
| BRACE2005681 | 0 | 0 | 0 | 0 | 3.522 | 0 | 0 |
| BRACE2006055 | 0 | 28.171 | 0 | 0 | 0 | 0 | 6.974 |
| BRACE2006089 | 0 | 28.709 | 0 | 0 | 0 | 0 | 0 |
| BRACE2006258 | 0 | 0 | 3.004 | 0 | 8.671 | 0 | 2.856 |
| BRACE2006397 | 0 | 0 | 6.496 | 0 | 0 | 8.114 | 1.029 |
| BRACE2006514 | 0 | 0 | 0 | 6.493 | 0 | 0 | 3.029 |
| BRACE2006871 | 0 | 0 | 0 | 0 | 3.528 | 0 | 0 |
| BRACE2006900 | 0 | 0 | 0 | 0 | 0 | 0 | 1.794 |
| BRACE2006911 | 0 | 0 | 68.109 | 0 | 0 | 0 | 0 |
| BRACE2007089 | 74.315 | 0 | 0 | 0 | 0 | 0 | 0 |
| BRACE2007401 | 0 | 0 | 0 | 0 | 6.449 | 0 | 0 |
| BRACE2007518 | 0 | 0 | 8.324 | 0 | 0 | 0 | 0 |
| BRACE2007577 | 0 | 0 | 3.591 | 0 | 0 | 0 | 0 |
| BRACE2008097 | 0 | 0 | 0 | 0 | 0 | 0 | 16.738 |
| BRACE2008251 | 0 | 0 | 49.689 | 0 | 0 | 0 | 0 |
| BRACE2008380 | 0 | 0 | 0 | 0 | 6.894 | 0 | 0 |
| BRACE2008385 | 0 | 0 | 7.660 | 0 | 0 | 0 | 0 |
| BRACE2008495 | 0 | 0 | 83.786 | 0 | 0 | 0 | 0 |
| BRACE2008706 | 0 | 0 | 0 | 49.117 | 0 | 0 | 0 |
| BRACE2008968 | 0 | 0 | 2.133 | 4.346 | 2.052 | 0 | 2.027 |
| BRACE2009037 | 0 | 2.056 | 2.142 | 2.182 | 0 | 0 | 1.018 |
| BRACE2009620 | 0 | 0 | 70.380 | 0 | 0 | 0 | 0 |
| BRACE2011265 | 0 | 0 | 0 | 0 | 13.090 | 0 | 0 |
| BRACE2012061 | 0 | 0 | 0 | 0 | 0 | 0 | 58.734 |
| BRACE2018337 | 0 | 16.771 | 0 | 0 | 0 | 0 | 0 |
| BRACE2021478 | 0 | 0 | 0 | 0 | 0 | 0 | 45.131 |
| BRACE2039624 | 0 | 0 | 3.548 | 0 | 0 | 0 | 3.373 |
| BRACE3004150 | 0 | 27.348 | 0 | 0 | 0 | 0 | 0 |
| BRACE3004371 | 0 | 0 | 0 | 0 | 0 | 0 | 13.097 |
| BRACE3005938 | 0 | 7.754 | 4.039 | 0 | 0 | 0 | 0 |
| BRACE3010428 | 0 | 0 | 0 | 17.112 | 0 | 0 | 3.991 |
| BRALZ2009482 | 0 | 0 | 1.363 | 0 | 0 | 0 | 5.182 |
| BRAMY2000151 | 0 | 0 | 0 | 0 | 77.787 | 0 | 0 |
| BRAMY2000354 | 0 | 0 | 0 | 0 | 0 | 0 | 4.791 |
| BRAMY2000388 | 0 | 0 | 0 | 0 | 0 | 0 | 21.330 |
| BRAMY2009934 | 0 | 0 | 0 | 0 | 20.859 | 0 | 0 |
| BRAMY2010208 | 0 | 0 | 0 | 0 | 0 | 0 | 63.370 |
| BRAMY2015911 | 0 | 0 | 0 | 0 | 0 | 0 | 51.943 |
| BRAMY2016325 | 0 | 26.531 | 0 | 0 | 0 | 0 | 0 |
| BRAMY2019554 | 0 | 0 | 0 | 0 | 0 | 21.938 | 0 |
| BRAMY2020412 | 0 | 0 | 0 | 80.233 | 0 | 0 | 0 |
| BRAMY2020427 | 0 | 0 | 2.172 | 0 | 4.179 | 0 | 2.064 |
| BRAMY2021310 | 0 | 87.482 | 0 | 0 | 0 | 0 | 0 |
| BRAMY2022786 | 0 | 17.573 | 0 | 0 | 0 | 0 | 0 |
| BRAMY2024004 | 0 | 0 | 0 | 0 | 0 | 76.038 | 0 |
| BRAMY2025230 | 0 | 0 | 0 | 73.283 | 0 | 0 | 0 |
| BRAMY2026778 | 0 | 34.114 | 0 | 0 | 0 | 0 | 0 |
| BRAMY2028914 | 0 | 0 | 0 | 0 | 62.506 | 0 | 0 |
| BRAMY2031516 | 0 | 0 | 27.091 | 0 | 0 | 0 | 0 |
| BRAMY2038832 | 0 | 0 | 44.706 | 0 | 0 | 0 | 0 |
| BRAMY2039630 | 0 | 0 | 0 | 0 | 0 | 0 | 60.511 |
| BRAMY2040095 | 0 | 0 | 1.254 | 0 | 0 | 18.794 | 0 |
| BRAMY2047420 | 0 | 0 | 0 | 0 | 7.149 | 0 | 0 |
| BRAMY3004364 | 0 | 0 | 0 | 0 | 0 | 0 | 23.683 |
| BRAMY3004377 | 0 | 5.840 | 3.042 | 6.199 | 2.926 | 0 | 0 |
| BRAMY3008044 | 0 | 0 | 0 | 0 | 0 | 0 | 6.254 |
| BRAMY3010008 | 0 | 0 | 2.135 | 0 | 0 | 0 | 0 |
| BRAMY3010492 | 0 | 0 | 21.124 | 0 | 0 | 0 | 0 |
| BRAWH1000040 | 0 | 0 | 0 | 5.143 | 0 | 0 | 0 |
| BRAWH1000083 | 0 | 0 | 0 | 0 | 0 | 0 | 15.796 |
| BRAWH1000093 | 0 | 3.248 | 0 | 0 | 0 | 12.679 | 0 |
| BRAWH2000417 | 0 | 0 | 2.266 | 0 | 0 | 0 | 0 |
| BRAWH2000460 | 0 | 4.297 | 2.238 | 0 | 0 | 0 | 2.128 |
| BRAWH2000522 | 0 | 0 | 0 | 0 | 12.791 | 0 | 0 |
| BRAWH2000588 | 0 | 0 | 0 | 9.377 | 0 | 0 | 0 |
| BRAWH2000633 | 0 | 0 | 0 | 0 | 4.678 | 0 | 0 |
| BRAWH2000636 | 0 | 0 | 0 | 3.950 | 0 | 0 | 0 |
| BRAWH2000697 | 0 | 0 | 3.710 | 0 | 0 | 0 | 3.527 |
| BRAWH2000944 | 0 | 0 | 19.134 | 0 | 0 | 0 | 0 |
| BRAWH2001092 | 0 | 3.713 | 1.289 | 1.314 | 0.620 | 0 | 1.225 |
| BRAWH2001166 | 0 | 0 | 11.578 | 0 | 0 | 0 | 0 |
| BRAWH2001239 | 0 | 51.373 | 0 | 0 | 0 | 0 | 0 |
| BRAWH2001424 | 0 | 0 | 0 | 0 | 0 | 0 | 17.750 |
| BRAWH2001461 | 0 | 0 | 13.038 | 0 | 0 | 0 | 0 |
| BRAWH2003025 | 0 | 0 | 11.121 | 0 | 0 | 0 | 0 |
| BRAWH2003693 | 0 | 24.090 | 0 | 0 | 0 | 0 | 0 |
| BRAWH2003818 | 0 | 0 | 0 | 22.621 | 0 | 0 | 0 |
| BRAWH2004078 | 0 | 0 | 0 | 0 | 0 | 0 | 18.371 |
| BRAWH2005068 | 0 | 0 | 0 | 0 | 2.839 | 0 | 0 |
| BRAWH2006996 | 0 | 0 | 0 | 25.423 | 0 | 0 | 0 |
| BRAWH2008255 | 0 | 0 | 0 | 63.154 | 0 | 0 | 0 |
| BRAWH2009307 | 0 | 0 | 7.303 | 0 | 0 | 0 | 0 |
| BRAWH2011812 | 0 | 0 | 0 | 0 | 47.789 | 0 | 0 |
| BRAWH2012538 | 0 | 0 | 0 | 0 | 0 | 0 | 35.370 |
| BRAWH2014188 | 0 | 0 | 2.626 | 5.351 | 0 | 0 | 0 |
| BRAWH2015349 | 0 | 0 | 0 | 0 | 0 | 0 | 38.345 |
| BRAWH2016269 | 0 | 0 | 0 | 0 | 4.652 | 0 | 4.596 |
| BRAWH2018526 | 0 | 0 | 0 | 0 | 1.086 | 0 | 0 |
| BRAWH2018729 | 0 | 0 | 0 | 22.271 | 0 | 0 | 0 |
| BRAWH3002853 | 0 | 10.416 | 2.713 | 0 | 0 | 0 | 0 |
| BRAWH3023172 | 80.380 | 0 | 0 | 0 | 3.232 | 0 | 0 |
| BRCAN2000639 | 0 | 0 | 61.519 | 0 | 0 | 0 | 0 |
| BRCAN2002173 | 0 | 0 | 0 | 0 | 0 | 0 | 6.932 |
| BRCAN2003944 | 0 | 1.983 | 0 | 4.210 | 0 | 0 | 0.982 |
| BRCAN2021028 | 0 | 0 | 38.589 | 0 | 0 | 0 | 0 |
| BRCAN2024572 | 0 | 0 | 0 | 20.413 | 0 | 0 | 0 |
| BRCAN2026197 | 0 | 10.993 | 0 | 0 | 0 | 0 | 0 |
| BRCAN2028036 | 0 | 0 | 8.855 | 0 | 0 | 0 | 0 |
| BRCOC2010123 | 0 | 0 | 0 | 8.188 | 0 | 0 | 0 |
| BRCOC2011506 | 83.518 | 0 | 0 | 0 | 0 | 0 | 0 |
| BRCOC2014013 | 0 | 0 | 0 | 0 | 0 | 0 | 18.907 |
| BRHIP1000104 | 0 | 0 | 2.397 | 0 | 0 | 0 | 0 |
| BRHIP2000534 | 0 | 0 | 0 | 2.558 | 0 | 18.818 | 0 |
| BRHIP2000553 | 0 | 18.094 | 0 | 0 | 0 | 0 | 0 |
| BRHIP2000819 | 0 | 0 | 7.923 | 0 | 0 | 0 | 0 |
| BRHIP2001099 | 0 | 0 | 25.425 | 0 | 0 | 0 | 24.167 |
| BRHIP2007305 | 0 | 0 | 4.152 | 8.461 | 0 | 0 | 3.947 |
| BRHIP2011576 | 0 | 0 | 0 | 0 | 0 | 0 | 66.835 |
| BRHIP2012627 | 0 | 0 | 0 | 0 | 55.428 | 0 | 0 |
| BRHIP2020509 | 0 | 0 | 0 | 0 | 0 | 0 | 65.282 |
| BRHIP2021870 | 0 | 0 | 0 | 0 | 0 | 0 | 15.479 |
| BRHIP2023272 | 0 | 0 | 12.379 | 0 | 0 | 0 | 0 |
| BRHIP2023888 | 0 | 0 | 1.350 | 0 | 0 | 10.115 | 1.283 |
| BRHIP2024398 | 0 | 0 | 30.880 | 0 | 0 | 0 | 0 |
| BRHIP3000111 | 0 | 0 | 0 | 7.652 | 0 | 0 | 0 |
| BRHIP3006717 | 0 | 11.985 | 0 | 0 | 0 | 0 | 0 |
| BRSSN2003012 | 0 | 0 | 15.866 | 32.333 | 0 | 0 | 0 |
| BRSSN2007464 | 0 | 0 | 0 | 0 | 14.440 | 0 | 0 |
| BRSSN2009518 | 0 | 0 | 0 | 25.748 | 0 | 0 | 0 |
| BRSTN2011961 | 0 | 4.078 | 2.124 | 8.658 | 0 | 0 | 0 |
| BRSTN2012069 | 0 | 0.133 | 0.763 | 0.848 | 2.503 | 0 | 0.429 |
| BRSTN2012174 | 0 | 0 | 0 | 1.512 | 4.996 | 0 | 0 |
| BRSTN2013171 | 0 | 0 | 25.419 | 0 | 0 | 0 | 0 |
| BRSTN2016470 | 0 | 0 | 0.803 | 0 | 1.545 | 0 | 0.763 |
| BRSTN2016892 | 0 | 0 | 0 | 0 | 10.529 | 0 | 0 |
| BRSTN2017104 | 0 | 0 | 0 | 0 | 6.880 | 0 | 0 |
| BRTHA2005864 | 0 | 0 | 5.951 | 0 | 0 | 0 | 0 |
| BRTHA2012714 | 0 | 0 | 9.194 | 0 | 0 | 0 | 0 |
| BRTHA2016577 | 0 | 0 | 0 | 0 | 8.326 | 0 | 0 |
| BRTHA2027229 | 0 | 0 | 0 | 0 | 3.230 | 0 | 0 |
| BRTHA3010540 | 0 | 0 | 0 | 0 | 0 | 92.534 | 0 |
| CTONG1000052 | 0 | 0 | 2.216 | 0 | 0 | 0 | 0 |
| CTONG1000087 | 0 | 0 | 3.835 | 0 | 0 | 0 | 3.646 |
| CTONG1000094 | 0 | 0 | 1.428 | 0 | 1.374 | 0 | 0 |
| CTONG1000175 | 0 | 0 | 0 | 0 | 0 | 0 | 5.870 |
| CTONG2000469 | 0 | 20.562 | 0 | 0 | 0 | 0 | 0 |
| CTONG2001226 | 0 | 0 | 0 | 0 | 0 | 0 | 26.463 |
| CTONG2002453 | 0 | 0 | 0 | 0 | 27.393 | 0 | 0 |
| CTONG2002903 | 0 | 0 | 11.298 | 0 | 0 | 0 | 0 |
| CTONG2003298 | 0 | 5.110 | 0 | 0 | 0 | 0 | 0 |
| CTONG2003524 | 0 | 0 | 5.910 | 24.087 | 0 | 0 | 0 |
| CTONG2003937 | 0 | 0 | 0 | 0 | 0 | 0 | 65.178 |
| CTONG2004487 | 0 | 0 | 3.469 | 0 | 0 | 0 | 0 |
| CTONG2004550 | 0 | 0 | 0 | 0 | 0 | 0 | 65.178 |
| CTONG2005265 | 0 | 0 | 0 | 0 | 0 | 0 | 65.178 |
| CTONG2005553 | 0 | 0 | 0 | 0 | 2.527 | 19.687 | 0 |
| CTONG2006004 | 0 | 0 | 3.871 | 0 | 0 | 0 | 0 |
| CTONG2006562 | 0 | 0 | 0 | 0 | 9.880 | 0 | 0 |
| CTONG2006611 | 0 | 0 | 26.485 | 0 | 0 | 0 | 0 |
| CTONG2006932 | 0 | 7.748 | 0 | 0 | 0 | 0 | 0 |
| CTONG2007072 | 0 | 15.148 | 0 | 0 | 0 | 0 | 0 |
| CTONG2007078 | 0 | 0 | 0 | 0 | 4.509 | 0 | 0 |
| CTONG2007500 | 0 | 5.295 | 5.517 | 0 | 0 | 20.674 | 0 |
| CTONG2008269 | 0 | 47.906 | 0 | 0 | 0 | 0 | 0 |
| CTONG2008398 | 0 | 0 | 0 | 5.714 | 0 | 0 | 2.665 |
| CTONG2008506 | 0 | 0 | 0 | 0 | 0 | 0 | 6.561 |
| CTONG2010348 | 0 | 0 | 6.495 | 0 | 0 | 0 | 0 |
| CTONG2010821 | 0 | 0 | 0 | 0 | 0 | 0 | 2.491 |
| CTONG2012029 | 0 | 0 | 0 | 0 | 0 | 0 | 65.178 |
| CTONG2012158 | 0 | 0 | 0 | 0 | 32.190 | 0 | 0 |
| CTONG2012452 | 0 | 0 | 2.612 | 0 | 3.769 | 0 | 0 |
| CTONG2012607 | 0 | 0 | 0 | 0 | 0 | 47.544 | 0 |
| CTONG2012847 | 0 | 0 | 0 | 0 | 0 | 0 | 6.004 |
| CTONG2012996 | 0 | 20.559 | 10.709 | 0 | 0 | 0 | 0 |
| CTONG2013348 | 0 | 0 | 0 | 0 | 19.412 | 0 | 19.179 |
| CTONG2013907 | 0 | 0 | 0 | 0 | 7.607 | 0 | 7.516 |
| CTONG2015091 | 0 | 0 | 0 | 6.070 | 2.865 | 0 | 0 |
| CTONG2015518 | 0 | 0 | 48.707 | 0 | 0 | 0 | 0 |
| CTONG2016056 | 0 | 14.001 | 0 | 0 | 0 | 0 | 0 |
| CTONG2016575 | 0 | 3.501 | 1.824 | 0 | 0 | 0 | 0 |
| CTONG2016824 | 0 | 0 | 0 | 0 | 15.019 | 0 | 0 |
| CTONG2016869 | 0 | 0 | 9.687 | 0 | 0 | 0 | 0 |
| CTONG2016931 | 0 | 0 | 11.193 | 0 | 0 | 0 | 0 |
| CTONG2017429 | 0 | 0 | 0 | 0 | 25.465 | 0 | 0 |
| CTONG2017444 | 0 | 0 | 13.506 | 0 | 0 | 0 | 0 |
| CTONG2018334 | 0 | 0 | 26.829 | 0 | 0 | 0 | 0 |
| CTONG2020484 | 0 | 0 | 2.156 | 4.394 | 0 | 0 | 0 |
| CTONG2022835 | 0 | 12.080 | 0 | 0 | 0 | 0 | 0 |
| CTONG2028124 | 0 | 0 | 9.217 | 3.756 | 0 | 0 | 3.504 |
| CTONG3008894 | 0 | 0 | 0 | 0 | 0 | 0 | 2.534 |
| CTONG3009028 | 0 | 0 | 0 | 0 | 0 | 44.240 | 0 |
| CTONG3009239 | 0 | 0 | 0 | 10.791 | 0 | 0 | 0 |
| D3OST2002068 | 0 | 0 | 0.788 | 0 | 0 | 0 | 0 |
| D3OST2002648 | 0 | 0 | 0 | 0 | 0 | 82.485 | 0 |
| D6OST2000464 | 0 | 0 | 0 | 8.189 | 0 | 0 | 0 |
| D9OST2000031 | 0 | 0 | 0 | 0 | 0 | 0 | 16.470 |
| D9OST2002608 | 0 | 0 | 8.171 | 0 | 0 | 0 | 0 |
| D9OST2002673 | 0 | 0 | 0 | 0 | 0 | 80.305 | 0 |
| DFNES1000150 | 0 | 0 | 0 | 0 | 0 | 30.700 | 3.893 |
| DFNES2000011 | 0 | 0 | 0 | 4.087 | 0 | 0 | 0 |
| DFNES2000153 | 0 | 0 | 0 | 0 | 0 | 0 | 11.162 |
| DFNES2000268 | 0 | 0 | 8.100 | 0 | 3.896 | 0 | 0 |
| DFNES2002509 | 0 | 0 | 0 | 37.950 | 0 | 0 | 0 |
| DFNES2004371 | 0 | 0 | 0 | 11.792 | 0 | 0 | 0 |
| DFNES2005766 | 0 | 0 | 6.724 | 0 | 0 | 0 | 0 |
| DFNES2008088 | 0 | 18.511 | 0 | 0 | 0 | 0 | 9.165 |
| FCBBF1000023 | 0 | 49.531 | 0 | 0 | 0 | 0 | 0 |
| FCBBF1000027 | 0 | 2.579 | 0 | 2.738 | 1.293 | 10.070 | 1.277 |
| FCBBF1000121 | 0 | 0 | 36.439 | 0 | 0 | 0 | 0 |
| FCBBF1000182 | 0 | 0 | 0 | 0 | 0 | 0 | 59.128 |
| FCBBF1000294 | 0 | 0 | 3.949 | 0 | 0 | 0 | 0 |
| FCBBF1000466 | 0 | 0 | 2.336 | 0 | 0 | 0 | 0 |
| FCBBF1000506 | 0 | 0 | 0 | 0 | 65.635 | 0 | 0 |
| FCBBF1000563 | 0 | 0 | 0 | 0 | 0 | 0 | 5.236 |
| FCBBF1000760 | 0 | 0 | 0 | 0 | 0 | 18.002 | 2.283 |
| FCBBF2000199 | 0 | 0 | 0 | 0 | 9.872 | 0 | 0 |
| FCBBF2000885 | 0 | 0 | 5.630 | 0 | 5.416 | 0 | 0 |
| FCBBF2001088 | 0 | 0 | 0 | 0 | 0 | 0 | 56.526 |
| FCBBF2001105 | 0 | 0 | 0 | 0 | 0 | 0 | 21.165 |
| FCBBF2002349 | 0 | 0 | 0 | 0 | 0 | 0 | 13.763 |
| FCBBF2002801 | 0 | 0 | 0 | 0 | 9.158 | 0 | 0 |
| FCBBF2005966 | 0 | 0 | 34.736 | 0 | 0 | 0 | 0 |
| FCBBF3000110 | 0 | 0 | 23.687 | 0 | 0 | 0 | 0 |
| FCBBF3000115 | 0 | 0 | 14.638 | 0 | 0 | 0 | 0 |
| FCBBF3000434 | 0 | 0 | 6.790 | 0 | 6.533 | 0 | 0 |
| FCBBF3000536 | 0 | 0 | 0 | 0 | 0 | 73.279 | 0 |
| FCBBF3001470 | 0 | 0 | 4.979 | 0 | 4.790 | 0 | 0 |
| FCBBF3001632 | 0 | 10.870 | 0 | 0 | 5.447 | 0 | 0 |
| FCBBF3003435 | 0 | 0 | 0 | 66.919 | 0 | 0 | 0 |
| FCBBF3003800 | 0 | 5.547 | 0 | 0 | 1.390 | 0 | 1.373 |
| FCBBF3004473 | 0 | 0 | 8.428 | 0 | 0 | 0 | 0 |
| FCBBF3005320 | 0 | 0 | 0 | 0 | 0 | 0 | 9.510 |
| FCBBF3005330 | 0 | 0 | 2.541 | 0 | 2.444 | 0 | 0 |
| FCBBF3005497 | 0 | 0 | 0 | 0 | 8.322 | 0 | 0 |
| FCBBF3007829 | 0 | 79.216 | 0 | 0 | 0 | 0 | 0 |
| FCBBF3016134 | 0 | 0 | 0 | 0 | 0 | 0 | 36.291 |
| FCBBF3017396 | 0 | 0 | 0 | 0 | 7.204 | 56.122 | 0 |
| FCBBF3017531 | 0 | 0 | 0 | 0 | 0 | 44.077 | 0 |
| FCBBF3018796 | 0 | 0 | 0 | 0 | 0 | 0 | 10.823 |
| FCBBF3019714 | 0 | 0 | 7.513 | 0 | 0 | 0 | 0 |
| FCBBF3023667 | 11.655 | 0 | 0.487 | 0.993 | 0 | 0 | 0.463 |
| FCBBF3028244 | 0 | 0 | 0 | 0 | 3.276 | 0 | 0 |
| FCBBF4000446 | 0 | 5.289 | 0 | 0 | 0 | 0 | 0 |
| FEBRA1000088 | 0 | 0 | 0 | 0 | 0 | 0 | 14.878 |
| FEBRA2000105 | 0 | 0 | 2.631 | 0 | 0 | 0 | 15.003 |
| FEBRA2000129 | 0 | 0 | 0 | 0 | 0 | 0 | 9.063 |
| FEBRA2000210 | 0 | 0 | 0 | 0 | 0 | 0 | 4.929 |
| FEBRA2000228 | 0 | 0 | 14.488 | 0 | 0 | 0 | 0 |
| FEBRA2000510 | 0 | 0 | 0 | 0 | 13.019 | 0 | 0 |
| FEBRA2000536 | 0 | 0 | 0 | 23.543 | 0 | 0 | 0 |
| FEBRA2000733 | 0 | 7.120 | 1.236 | 1.260 | 0 | 0 | 0 |
| FEBRA2000881 | 0 | 0 | 11.610 | 23.659 | 11.169 | 0 | 0 |
| FEBRA2000901 | 0 | 0 | 0 | 0 | 36.652 | 0 | 0 |
| FEBRA2001383 | 0 | 0 | 0 | 0 | 36.809 | 0 | 0 |
| FEBRA2001814 | 0 | 0 | 0 | 0 | 0 | 0 | 9.225 |
| FEBRA2002027 | 0 | 0 | 9.292 | 0 | 0 | 0 | 0 |
| FEBRA2002707 | 0 | 0 | 0 | 26.932 | 0 | 0 | 0 |
| FEBRA2003100 | 0 | 4.637 | 0 | 0 | 0 | 0 | 0 |
| FEBRA2003926 | 0 | 0 | 2.560 | 0 | 0 | 0 | 4.867 |
| FEBRA2003930 | 0 | 0 | 0 | 0 | 6.342 | 0 | 0 |
| FEBRA2004224 | 0 | 0 | 0 | 8.653 | 0 | 0 | 0 |
| FEBRA2004325 | 0 | 0 | 0 | 0 | 0 | 0 | 12.279 |
| FEBRA2004412 | 0 | 0 | 10.768 | 0 | 0 | 0 | 0 |
| FEBRA2004818 | 0 | 0 | 24.972 | 0 | 0 | 0 | 0 |
| FEBRA2005752 | 0 | 29.308 | 0 | 0 | 0 | 0 | 0 |
| FEBRA2005778 | 0 | 0 | 11.002 | 0 | 0 | 0 | 0 |
| FEBRA2006055 | 0 | 18.599 | 0 | 0 | 0 | 0 | 0 |
| FEBRA2006092 | 0 | 0 | 0 | 0 | 2.194 | 0 | 0 |
| FEBRA2006370 | 0 | 0 | 0 | 0 | 0 | 0 | 49.808 |
| FEBRA2006372 | 0 | 0 | 0 | 0 | 4.739 | 0 | 0 |
| FEBRA2006485 | 0 | 0 | 11.157 | 0 | 0 | 0 | 0 |
| FEBRA2006553 | 0 | 27.857 | 0 | 0 | 0 | 0 | 0 |
| FEBRA2007801 | 0 | 17.382 | 0 | 0 | 0 | 0 | 0 |
| FEBRA2007880 | 0 | 0 | 13.804 | 0 | 0 | 0 | 0 |
| FEBRA2008036 | 0 | 0 | 0 | 0 | 5.040 | 0 | 0 |
| FEBRA2008081 | 0 | 4.986 | 0 | 0 | 0 | 0 | 0 |
| FEBRA2008087 | 15.732 | 0 | 1.315 | 0 | 1.265 | 0 | 0.625 |
| FEBRA2008255 | 0 | 0 | 18.560 | 0 | 0 | 0 | 0 |
| FEBRA2008302 | 0 | 7.493 | 0 | 0 | 0 | 0 | 0 |
| FEBRA2014417 | 0 | 0 | 1.980 | 12.107 | 0 | 0 | 0 |
| FEBRA2018476 | 0 | 0 | 0 | 0 | 0 | 0 | 3.809 |
| FEBRA2019711 | 0 | 0 | 7.756 | 0 | 0 | 0 | 0 |
| FEBRA2022055 | 46.701 | 0 | 1.952 | 7.954 | 0 | 0 | 0 |
| FEBRA2022504 | 0 | 0 | 0 | 12.276 | 0 | 0 | 0 |
| FEBRA2025838 | 0 | 5.784 | 0 | 0 | 0 | 22.582 | 2.864 |
| FEBRA2028516 | 0 | 0 | 4.195 | 0 | 0 | 31.443 | 0 |
| FELIV1000153 | 0 | 1.161 | 0 | 0 | 0 | 0 | 0 |
| HCASM2000016 | 0 | 0 | 0 | 5.578 | 0 | 0 | 0 |
| HCASM2000363 | 0 | 0 | 2.494 | 10.165 | 0 | 0 | 0 |
| HCASM2003076 | 0 | 0 | 0 | 0 | 0 | 0 | 19.851 |
| HCHON1000030 | 0 | 2.554 | 0.665 | 1.356 | 0 | 4.986 | 4.426 |
| HCHON1000191 | 0 | 3.401 | 0 | 7.220 | 0 | 0 | 0 |
| HCHON2000056 | 0 | 1.997 | 2.081 | 4.240 | 3.002 | 7.797 | 0.989 |
| HCHON2000087 | 0 | 0 | 4.538 | 0 | 0 | 0 | 0 |
| HCHON2000160 | 0 | 0 | 0 | 7.524 | 0 | 0 | 7.019 |
| HCHON2000226 | 0 | 0 | 2.958 | 0 | 0 | 0 | 0 |
| HCHON2000244 | 0 | 9.264 | 0 | 0 | 0 | 18.084 | 4.587 |
| HCHON2000265 | 0 | 0 | 0 | 0 | 0 | 0 | 7.054 |
| HCHON2000364 | 0 | 6.261 | 0 | 3.323 | 0 | 0 | 0 |
| HCHON2000475 | 0 | 0 | 0 | 9.949 | 0 | 0 | 0 |
| HCHON2000508 | 0 | 5.259 | 1.370 | 0 | 0 | 0 | 0 |
| HCHON2000626 | 0 | 8.277 | 0 | 0 | 0 | 0 | 0 |
| HCHON2000738 | 0 | 0 | 0 | 0 | 10.506 | 0 | 0 |
| HCHON2000826 | 0 | 5.039 | 0 | 0 | 0 | 0 | 0 |
| HCHON2000898 | 0 | 0 | 0 | 0 | 0 | 0 | 35.524 |
| HCHON2001039 | 0 | 0 | 0 | 0 | 0 | 0 | 3.890 |
| HCHON2001050 | 0 | 0 | 0 | 0 | 0 | 0 | 5.053 |
| HCHON2001108 | 0 | 0 | 7.832 | 0 | 0 | 0 | 0 |
| HCHON2001359 | 0 | 0 | 0 | 0 | 0 | 0 | 2.968 |
| HCHON2001407 | 0 | 0 | 0 | 0 | 2.786 | 0 | 0 |
| HCHON2001434 | 0 | 0 | 0 | 0 | 0 | 0 | 5.326 |
| HCHON2001505 | 0 | 0 | 0 | 0 | 15.856 | 0 | 0 |
| HCHON2001546 | 0 | 0 | 0 | 54.154 | 0 | 0 | 0 |
| HCHON2001665 | 0 | 0 | 0 | 0 | 0 | 0 | 5.380 |
| HCHON2004002 | 0 | 5.528 | 0 | 0 | 0 | 0 | 0 |
| HEART1000074 | 0 | 0 | 2.784 | 0 | 0 | 0 | 2.646 |
| HEART1000149 | 0 | 0 | 3.444 | 0 | 0 | 0 | 16.370 |
| HEART1000185 | 0 | 0 | 0 | 5.909 | 0 | 0 | 0 |
| HEART2003440 | 0 | 0 | 0 | 0 | 0 | 80.471 | 0 |
| HEART2004941 | 0 | 0 | 0 | 0 | 33.520 | 0 | 0 |
| HELAC2000158 | 100 | 0 | 0 | 0 | 0 | 0 | 0 |
| HELAC2000301 | 100 | 0 | 0 | 0 | 0 | 0 | 0 |
| HHDPC1000001 | 0 | 100 | 0 | 0 | 0 | 0 | 0 |
| HHDPC1000065 | 0 | 64.387 | 0 | 0 | 0 | 0 | 0 |
| HHDPC1000083 | 0 | 6.892 | 0 | 7.316 | 0 | 0 | 0 |
| HHDPC1000114 | 0 | 40.929 | 0 | 0 | 0 | 0 | 0 |
| HHDPC1000118 | 0 | 14.757 | 0 | 0 | 0 | 0 | 7.307 |
| HHDPC1000163 | 0 | 8.855 | 0 | 0 | 4.437 | 0 | 0 |
| HHDPC2000055 | 0 | 12.875 | 0 | 0 | 12.904 | 0 | 0 |
| HHDPC2000070 | 0 | 67.761 | 0 | 0 | 0 | 0 | 0 |
| HHDPC2000102 | 0 | 33.433 | 0 | 0 | 0 | 0 | 0 |
| HHDPC2000104 | 0 | 13.026 | 0 | 0 | 0 | 0 | 0 |
| HHDPC2000115 | 0 | 18.420 | 0 | 0 | 0 | 0 | 0 |
| HHDPC2000149 | 0 | 31.462 | 16.389 | 0 | 0 | 0 | 0 |
| HHDPC2000258 | 0 | 66.528 | 0 | 0 | 0 | 0 | 0 |
| HHDPC2000315 | 0 | 100 | 0 | 0 | 0 | 0 | 0 |
| HHDPC2000455 | 0 | 3.869 | 0 | 0 | 0 | 0 | 0 |
| HHDPC2000456 | 0 | 10.932 | 0 | 0 | 0 | 0 | 0 |
| HHDPC2000462 | 0 | 79.486 | 0 | 0 | 0 | 0 | 0 |
| HHDPC2000572 | 0 | 46.099 | 0 | 0 | 0 | 0 | 0 |
| HHDPC2000656 | 0 | 60.189 | 0 | 0 | 0 | 0 | 0 |
| HHDPC2000692 | 0 | 100 | 0 | 0 | 0 | 0 | 0 |
| HHDPC2001337 | 0 | 100 | 0 | 0 | 0 | 0 | 0 |
| HHDPC2001432 | 0 | 100 | 0 | 0 | 0 | 0 | 0 |
| HHDPC2001896 | 0 | 66.020 | 0 | 0 | 0 | 0 | 0 |
| HHDPC2002963 | 0 | 100 | 0 | 0 | 0 | 0 | 0 |
| HHDPC2003049 | 0 | 100 | 0 | 0 | 0 | 0 | 0 |
| HHDPC2003113 | 0 | 100 | 0 | 0 | 0 | 0 | 0 |
| HHDPC2003381 | 0 | 24.557 | 0 | 0 | 0 | 0 | 0 |
| HHDPC2003439 | 0 | 7.163 | 0.933 | 0 | 0 | 13.983 | 0 |
| HHDPC2003472 | 0 | 91.505 | 0 | 0 | 0 | 0 | 0 |
| HHDPC2003983 | 0 | 1.961 | 1.021 | 0 | 3.930 | 0 | 0 |
| HHDPC2004757 | 0 | 100 | 0 | 0 | 0 | 0 | 0 |
| HHDPC2005185 | 0 | 100 | 0 | 0 | 0 | 0 | 0 |
| HHDPC2005513 | 0 | 100 | 0 | 0 | 0 | 0 | 0 |
| HHDPC2005742 | 0 | 89.412 | 0 | 0 | 0 | 0 | 0 |
| HHDPC2005794 | 0 | 56.010 | 0 | 0 | 0 | 0 | 0 |
| HHDPC2006460 | 0 | 66.929 | 0 | 0 | 0 | 0 | 0 |
| HHDPC2006862 | 0 | 52.700 | 0 | 0 | 0 | 0 | 0 |
| HHDPC2006927 | 0 | 100 | 0 | 0 | 0 | 0 | 0 |
| HHDPC2007267 | 0 | 3.438 | 1.791 | 0 | 0 | 26.843 | 0 |
| HHDPC2007302 | 0 | 100 | 0 | 0 | 0 | 0 | 0 |
| HHDPC2007775 | 0 | 76.087 | 0 | 0 | 0 | 0 | 0 |
| HHDPC2008123 | 0 | 89.412 | 0 | 0 | 0 | 0 | 0 |
| HHDPC2008185 | 0 | 100 | 0 | 0 | 0 | 0 | 0 |
| HHDPC2008279 | 0 | 100 | 0 | 0 | 0 | 0 | 0 |
| HHDPC2008297 | 0 | 52.669 | 0 | 0 | 0 | 0 | 0 |
| HHDPC2008414 | 0 | 100 | 0 | 0 | 0 | 0 | 0 |
| HHDPC2008474 | 0 | 100 | 0 | 0 | 0 | 0 | 0 |
| HHDPC2008816 | 0 | 86.394 | 0 | 0 | 0 | 0 | 0 |
| HHDPC2008843 | 0 | 100 | 0 | 0 | 0 | 0 | 0 |
| HHDPC2009114 | 0 | 100 | 0 | 0 | 0 | 0 | 0 |
| HHDPC2009178 | 0 | 71.472 | 0 | 0 | 0 | 0 | 0 |
| HHDPC2009208 | 0 | 100 | 0 | 0 | 0 | 0 | 0 |
| HHDPC2009272 | 0 | 86.275 | 0 | 0 | 0 | 0 | 0 |
| HHDPC2009528 | 0 | 45.763 | 0 | 0 | 0 | 0 | 0 |
| HLUNG1000017 | 0 | 0 | 100 | 0 | 0 | 0 | 0 |
| HLUNG1000024 | 0 | 0 | 100 | 0 | 0 | 0 | 0 |
| HLUNG1000030 | 0 | 0 | 100 | 0 | 0 | 0 | 0 |
| HLUNG1000034 | 0 | 0 | 100 | 0 | 0 | 0 | 0 |
| HLUNG1000037 | 0 | 0 | 32.229 | 0 | 0 | 0 | 0 |
| HLUNG1000053 | 0 | 0 | 100 | 0 | 0 | 0 | 0 |
| HLUNG1000055 | 0 | 0 | 3.971 | 0 | 0 | 0 | 0 |
| HLUNG1000064 | 0 | 0 | 49.950 | 0 | 0 | 0 | 0 |
| HLUNG1000076 | 0 | 0 | 12.342 | 0 | 0 | 0 | 0 |
| HLUNG1000084 | 0 | 0 | 100 | 0 | 0 | 0 | 0 |
| HLUNG1000091 | 0 | 0 | 54.277 | 0 | 0 | 0 | 0 |
| HLUNG1000099 | 0 | 0 | 39.587 | 0 | 0 | 0 | 0 |
| HLUNG1000104 | 0 | 0 | 100 | 0 | 0 | 0 | 0 |
| HLUNG1000105 | 0 | 0 | 38.763 | 0 | 0 | 0 | 0 |
| HLUNG1000110 | 0 | 0 | 84.874 | 0 | 0 | 0 | 0 |
| HLUNG1000151 | 0 | 0 | 100 | 0 | 0 | 0 | 0 |
| HLUNG1000169 | 0 | 0 | 100 | 0 | 0 | 0 | 0 |
| HLUNG2000004 | 0 | 0 | 46.386 | 0 | 0 | 0 | 0 |
| HLUNG2000014 | 0 | 0 | 100 | 0 | 0 | 0 | 0 |
| HLUNG2000027 | 0 | 0 | 100 | 0 | 0 | 0 | 0 |
| HLUNG2000063 | 0 | 0 | 18.092 | 0 | 0 | 0 | 0 |
| HLUNG2000068 | 0 | 0 | 100 | 0 | 0 | 0 | 0 |
| HLUNG2000116 | 0 | 0 | 100 | 0 | 0 | 0 | 0 |
| HLUNG2000125 | 0 | 0 | 26.171 | 0 | 0 | 0 | 0 |
| HLUNG2000130 | 0 | 0 | 100 | 0 | 0 | 0 | 0 |
| HLUNG2000142 | 0 | 0 | 100 | 0 | 0 | 0 | 0 |
| HLUNG2000174 | 0 | 0 | 100 | 0 | 0 | 0 | 0 |
| HLUNG2000176 | 0 | 0 | 81.477 | 0 | 0 | 0 | 0 |
| HLUNG2000217 | 0 | 0 | 100 | 0 | 0 | 0 | 0 |
| HLUNG2000232 | 0 | 0 | 46.224 | 0 | 0 | 0 | 0 |
| HLUNG2000255 | 0 | 0 | 100 | 0 | 0 | 0 | 0 |
| HLUNG2000281 | 0 | 0 | 100 | 0 | 0 | 0 | 0 |
| HLUNG2000314 | 0 | 0 | 8.998 | 0 | 0 | 0 | 0 |
| HLUNG2000315 | 0 | 0 | 55.942 | 0 | 0 | 0 | 0 |
| HLUNG2000340 | 0 | 0 | 100 | 0 | 0 | 0 | 0 |
| HLUNG2000362 | 0 | 0 | 100 | 0 | 0 | 0 | 0 |
| HLUNG2000363 | 0 | 0 | 100 | 0 | 0 | 0 | 0 |
| HLUNG2000412 | 0 | 0 | 9.821 | 0 | 0 | 0 | 0 |
| HLUNG2000431 | 0 | 0 | 100 | 0 | 0 | 0 | 0 |
| HLUNG2000480 | 0 | 0 | 100 | 0 | 0 | 0 | 0 |
| HLUNG2000489 | 0 | 0 | 100 | 0 | 0 | 0 | 0 |
| HLUNG2000501 | 0 | 0 | 6.293 | 0 | 0 | 0 | 0 |
| HLUNG2000549 | 0 | 0 | 100 | 0 | 0 | 0 | 0 |
| HLUNG2000557 | 0 | 0 | 100 | 0 | 0 | 0 | 0 |
| HLUNG2000570 | 0 | 0 | 100 | 0 | 0 | 0 | 0 |
| HLUNG2000751 | 0 | 0 | 63.370 | 0 | 0 | 0 | 0 |
| HLUNG2000761 | 0 | 0 | 100 | 0 | 0 | 0 | 0 |
| HLUNG2000777 | 0 | 0 | 100 | 0 | 0 | 0 | 0 |
| HLUNG2000846 | 0 | 0 | 16.570 | 0 | 0 | 0 | 0 |
| HLUNG2000870 | 0 | 0 | 100 | 0 | 0 | 0 | 0 |
| HLUNG2000884 | 0 | 0 | 7.851 | 0 | 0 | 0 | 0 |
| HLUNG2000926 | 0 | 0 | 100 | 0 | 0 | 0 | 0 |
| HLUNG2000950 | 0 | 0 | 45.344 | 0 | 0 | 0 | 0 |
| HLUNG2000955 | 0 | 0 | 100 | 0 | 0 | 0 | 0 |
| HLUNG2000970 | 0 | 0 | 100 | 0 | 0 | 0 | 0 |
| HLUNG2001013 | 0 | 0 | 100 | 0 | 0 | 0 | 0 |
| HLUNG2001126 | 0 | 0 | 100 | 0 | 0 | 0 | 0 |
| HLUNG2001144 | 0 | 0 | 100 | 0 | 0 | 0 | 0 |
| HLUNG2001146 | 0 | 0 | 19.226 | 0 | 0 | 0 | 0 |
| HLUNG2001214 | 0 | 0 | 100 | 0 | 0 | 0 | 0 |
| HLUNG2001439 | 0 | 0 | 3.235 | 0 | 0 | 0 | 0 |
| HLUNG2001459 | 0 | 0 | 24.038 | 0 | 0 | 0 | 0 |
| HLUNG2001507 | 0 | 0 | 18.366 | 0 | 0 | 0 | 0 |
| HLUNG2001518 | 0 | 0 | 4.011 | 0 | 0 | 0 | 0 |
| HLUNG2001633 | 0 | 0 | 29.367 | 0 | 0 | 0 | 0 |
| HLUNG2001677 | 0 | 0 | 12.888 | 0 | 0 | 0 | 0 |
| HLUNG2001712 | 0 | 0 | 12.093 | 0 | 11.634 | 0 | 0 |
| HLUNG2001814 | 0 | 0 | 100 | 0 | 0 | 0 | 0 |
| HLUNG2001996 | 0 | 0 | 76.784 | 0 | 0 | 0 | 0 |
| HLUNG2002006 | 0 | 0 | 100 | 0 | 0 | 0 | 0 |
| HLUNG2002050 | 0 | 0 | 100 | 0 | 0 | 0 | 0 |
| HLUNG2002059 | 0 | 0 | 10.047 | 0 | 0 | 0 | 0 |
| HLUNG2002085 | 0 | 0 | 100 | 0 | 0 | 0 | 0 |
| HLUNG2002145 | 0 | 0 | 50.966 | 0 | 0 | 0 | 0 |
| HLUNG2002295 | 0 | 0 | 100 | 0 | 0 | 0 | 0 |
| HLUNG2002303 | 0 | 0 | 100 | 0 | 0 | 0 | 0 |
| HLUNG2002334 | 0 | 0 | 33.714 | 0 | 0 | 0 | 0 |
| HLUNG2002405 | 0 | 0 | 100 | 0 | 0 | 0 | 0 |
| HLUNG2002429 | 0 | 0 | 100 | 0 | 0 | 0 | 0 |
| HLUNG2002465 | 0 | 0 | 4.436 | 0 | 0 | 0 | 0 |
| HLUNG2002562 | 0 | 0 | 100 | 0 | 0 | 0 | 0 |
| HLUNG2002648 | 0 | 0 | 13.257 | 0 | 0 | 0 | 0 |
| HLUNG2002659 | 0 | 0 | 100 | 0 | 0 | 0 | 0 |
| HLUNG2002707 | 0 | 0 | 100 | 0 | 0 | 0 | 0 |
| HLUNG2002811 | 0 | 0 | 17.874 | 0 | 0 | 0 | 0 |
| HLUNG2002916 | 0 | 0 | 31.642 | 0 | 0 | 0 | 0 |
| HLUNG2002942 | 0 | 0 | 100 | 0 | 0 | 0 | 0 |
| HLUNG2002949 | 0 | 0 | 67.829 | 0 | 0 | 0 | 0 |
| HLUNG2002958 | 0 | 0 | 100 | 0 | 0 | 0 | 0 |
| HLUNG2002982 | 0 | 0 | 100 | 0 | 0 | 0 | 0 |
| HLUNG2003003 | 0 | 0 | 29.311 | 0 | 0 | 0 | 0 |
| HLUNG2003042 | 0 | 0 | 43.654 | 0 | 0 | 0 | 0 |
| HLUNG2003049 | 0 | 0 | 100 | 0 | 0 | 0 | 0 |
| HLUNG2003061 | 0 | 0 | 100 | 0 | 0 | 0 | 0 |
| HLUNG2003162 | 0 | 0 | 100 | 0 | 0 | 0 | 0 |
| HLUNG2003246 | 0 | 0 | 100 | 0 | 0 | 0 | 0 |
| HLUNG2003306 | 0 | 0 | 46.963 | 0 | 0 | 0 | 0 |
| HLUNG2003331 | 0 | 0 | 30.365 | 0 | 0 | 0 | 0 |
| HLUNG2003335 | 0 | 0 | 100 | 0 | 0 | 0 | 0 |
| HLUNG2003378 | 0 | 0 | 33.957 | 0 | 0 | 0 | 32.277 |
| HLUNG2003497 | 0 | 0 | 81.477 | 0 | 0 | 0 | 0 |
| HLUNG2003691 | 0 | 0 | 100 | 0 | 0 | 0 | 0 |
| HLUNG2003710 | 0 | 0 | 100 | 0 | 0 | 0 | 0 |
| HLUNG2003714 | 0 | 0 | 100 | 0 | 0 | 0 | 0 |
| HLUNG2003716 | 0 | 0 | 83.786 | 0 | 0 | 0 | 0 |
| HLUNG2003778 | 0 | 0 | 18.920 | 0 | 0 | 0 | 0 |
| HLUNG2003833 | 0 | 0 | 100 | 0 | 0 | 0 | 0 |
| HLUNG2003872 | 0 | 0 | 100 | 0 | 0 | 0 | 0 |
| HLUNG2003918 | 0 | 0 | 100 | 0 | 0 | 0 | 0 |
| HLUNG2003991 | 0 | 0 | 100 | 0 | 0 | 0 | 0 |
| HLUNG2004014 | 0 | 0 | 100 | 0 | 0 | 0 | 0 |
| HLUNG2004037 | 0 | 0 | 55.992 | 0 | 0 | 0 | 0 |
| HLUNG2004067 | 0 | 0 | 40.386 | 0 | 0 | 0 | 0 |
| HLUNG2004154 | 0 | 0 | 38.142 | 0 | 0 | 0 | 0 |
| HLUNG2004159 | 0 | 0 | 6.650 | 0 | 0 | 0 | 6.321 |
| HLUNG2004170 | 0 | 0 | 22.600 | 0 | 0 | 0 | 0 |
| HLUNG2004217 | 0 | 0 | 100 | 0 | 0 | 0 | 0 |
| HLUNG2004273 | 0 | 0 | 100 | 0 | 0 | 0 | 0 |
| HLUNG2004388 | 0 | 0 | 32.754 | 0 | 0 | 0 | 0 |
| HLUNG2004416 | 0 | 0 | 100 | 0 | 0 | 0 | 0 |
| HLUNG2004521 | 0 | 0 | 100 | 0 | 0 | 0 | 0 |
| HLUNG2004534 | 0 | 0 | 10.639 | 0 | 0 | 0 | 0 |
| HLUNG2004684 | 0 | 0 | 24.764 | 0 | 0 | 0 | 0 |
| HLUNG2004707 | 0 | 0 | 100 | 0 | 0 | 0 | 0 |
| HLUNG2004774 | 0 | 0 | 59.535 | 0 | 0 | 0 | 0 |
| HLUNG2004775 | 0 | 0 | 100 | 0 | 0 | 0 | 0 |
| HLUNG2005012 | 0 | 0 | 100 | 0 | 0 | 0 | 0 |
| HLUNG2005030 | 0 | 0 | 100 | 0 | 0 | 0 | 0 |
| HLUNG2005045 | 0 | 0 | 100 | 0 | 0 | 0 | 0 |
| HLUNG2005076 | 0 | 0 | 100 | 0 | 0 | 0 | 0 |
| HLUNG2005133 | 0 | 0 | 51.963 | 0 | 0 | 0 | 0 |
| HLUNG2005203 | 0 | 0 | 76.605 | 0 | 0 | 0 | 0 |
| HLUNG2005230 | 0 | 0 | 8.384 | 0 | 0 | 0 | 0 |
| HLUNG2005479 | 0 | 0 | 100 | 0 | 0 | 0 | 0 |
| HLUNG2005524 | 0 | 0 | 100 | 0 | 0 | 0 | 0 |
| HLUNG2005656 | 0 | 0 | 83.786 | 0 | 0 | 0 | 0 |
| HLUNG2005738 | 0 | 0 | 67.330 | 0 | 0 | 0 | 0 |
| HLUNG2005774 | 0 | 0 | 100 | 0 | 0 | 0 | 0 |
| HLUNG2005813 | 0 | 0 | 100 | 0 | 0 | 0 | 0 |
| HLUNG2005924 | 0 | 0 | 100 | 0 | 0 | 0 | 0 |
| HLUNG2006026 | 0 | 0 | 100 | 0 | 0 | 0 | 0 |
| HLUNG2006067 | 0 | 0 | 100 | 0 | 0 | 0 | 0 |
| HLUNG2006094 | 0 | 0 | 100 | 0 | 0 | 0 | 0 |
| HLUNG2006370 | 0 | 0 | 89.793 | 0 | 0 | 0 | 0 |
| HLUNG2006397 | 0 | 0 | 100 | 0 | 0 | 0 | 0 |
| HLUNG2006570 | 0 | 0 | 71.114 | 0 | 0 | 0 | 0 |
| HLUNG2006599 | 0 | 0 | 100 | 0 | 0 | 0 | 0 |
| HLUNG2006614 | 0 | 0 | 100 | 0 | 0 | 0 | 0 |
| HLUNG2006671 | 0 | 0 | 100 | 0 | 0 | 0 | 0 |
| HLUNG2006781 | 0 | 0 | 100 | 0 | 0 | 0 | 0 |
| HLUNG2006812 | 0 | 0 | 21.691 | 0 | 0 | 0 | 10.309 |
| HLUNG2006843 | 0 | 0 | 38.068 | 0 | 0 | 0 | 0 |
| HLUNG2006852 | 0 | 0 | 100 | 0 | 0 | 0 | 0 |
| HLUNG2006935 | 0 | 0 | 100 | 0 | 0 | 0 | 0 |
| HLUNG2007041 | 0 | 0 | 100 | 0 | 0 | 0 | 0 |
| HLUNG2007163 | 0 | 0 | 49.414 | 0 | 0 | 0 | 0 |
| HLUNG2007210 | 0 | 0 | 7.539 | 0 | 0 | 0 | 0 |
| HLUNG2007219 | 0 | 0 | 81.477 | 0 | 0 | 0 | 0 |
| HLUNG2007245 | 0 | 0 | 12.742 | 0 | 0 | 0 | 12.111 |
| HLUNG2007433 | 0 | 0 | 100 | 0 | 0 | 0 | 0 |
| HLUNG2007931 | 0 | 0 | 100 | 0 | 0 | 0 | 0 |
| HLUNG2008066 | 0 | 0 | 100 | 0 | 0 | 0 | 0 |
| HLUNG2008139 | 0 | 0 | 42.036 | 0 | 0 | 0 | 0 |
| HLUNG2008153 | 0 | 0 | 24.966 | 0 | 0 | 0 | 0 |
| HLUNG2008225 | 0 | 0 | 60.513 | 0 | 0 | 0 | 0 |
| HLUNG2008235 | 0 | 0 | 100 | 0 | 0 | 0 | 0 |
| HLUNG2008247 | 0 | 0 | 100 | 0 | 0 | 0 | 0 |
| HLUNG2008333 | 0 | 0 | 75.461 | 0 | 0 | 0 | 0 |
| HLUNG2008348 | 0 | 0 | 46.606 | 0 | 0 | 0 | 0 |
| HLUNG2008384 | 0 | 0 | 100 | 0 | 0 | 0 | 0 |
| HLUNG2008396 | 0 | 0 | 100 | 0 | 0 | 0 | 0 |
| HLUNG2008439 | 0 | 0 | 100 | 0 | 0 | 0 | 0 |
| HLUNG2008479 | 0 | 0 | 66.321 | 0 | 0 | 0 | 0 |
| HLUNG2008480 | 0 | 0 | 100 | 0 | 0 | 0 | 0 |
| HLUNG2008521 | 0 | 0 | 100 | 0 | 0 | 0 | 0 |
| HLUNG2008637 | 0 | 0 | 6.196 | 0 | 5.960 | 0 | 0 |
| HLUNG2008833 | 0 | 0 | 100 | 0 | 0 | 0 | 0 |
| HLUNG2008875 | 0 | 0 | 100 | 0 | 0 | 0 | 0 |
| HLUNG2008885 | 0 | 0 | 39.593 | 0 | 0 | 0 | 0 |
| HLUNG2008958 | 0 | 0 | 100 | 0 | 0 | 0 | 0 |
| HLUNG2008959 | 0 | 0 | 100 | 0 | 0 | 0 | 0 |
| HLUNG2009067 | 0 | 0 | 76.784 | 0 | 0 | 0 | 0 |
| HLUNG2009215 | 0 | 0 | 50.841 | 0 | 0 | 0 | 0 |
| HLUNG2009225 | 0 | 0 | 5.531 | 0 | 0 | 0 | 0 |
| HLUNG2009253 | 0 | 0 | 100 | 0 | 0 | 0 | 0 |
| HLUNG2009303 | 0 | 0 | 100 | 0 | 0 | 0 | 0 |
| HLUNG2009413 | 0 | 0 | 100 | 0 | 0 | 0 | 0 |
| HLUNG2009729 | 0 | 0 | 100 | 0 | 0 | 0 | 0 |
| HLUNG2010181 | 0 | 0 | 100 | 0 | 0 | 0 | 0 |
| HLUNG2010464 | 0 | 0 | 100 | 0 | 0 | 0 | 0 |
| HLUNG2010562 | 0 | 0 | 100 | 0 | 0 | 0 | 0 |
| HLUNG2010845 | 0 | 0 | 100 | 0 | 0 | 0 | 0 |
| HLUNG2011041 | 0 | 0 | 100 | 0 | 0 | 0 | 0 |
| HLUNG2011298 | 0 | 0 | 35.254 | 0 | 0 | 0 | 0 |
| HLUNG2011461 | 0 | 0 | 78.577 | 0 | 0 | 0 | 0 |
| HLUNG2011833 | 0 | 0 | 15.055 | 0 | 0 | 0 | 0 |
| HLUNG2012049 | 0 | 0 | 100 | 0 | 0 | 0 | 0 |
| HLUNG2012287 | 0 | 0 | 100 | 0 | 0 | 0 | 0 |
| HLUNG2012315 | 0 | 0 | 100 | 0 | 0 | 0 | 0 |
| HLUNG2012546 | 0 | 0 | 100 | 0 | 0 | 0 | 0 |
| HLUNG2012600 | 0 | 0 | 100 | 0 | 0 | 0 | 0 |
| HLUNG2012727 | 0 | 0 | 100 | 0 | 0 | 0 | 0 |
| HLUNG2013097 | 0 | 0 | 100 | 0 | 0 | 0 | 0 |
| HLUNG2013204 | 0 | 0 | 100 | 0 | 0 | 0 | 0 |
| HLUNG2013304 | 0 | 0 | 100 | 0 | 0 | 0 | 0 |
| HLUNG2013350 | 0 | 0 | 100 | 0 | 0 | 0 | 0 |
| HLUNG2013622 | 0 | 0 | 100 | 0 | 0 | 0 | 0 |
| HLUNG2013643 | 0 | 0 | 100 | 0 | 0 | 0 | 0 |
| HLUNG2013784 | 0 | 0 | 12.816 | 0 | 0 | 0 | 0 |
| HLUNG2013851 | 0 | 0 | 100 | 0 | 0 | 0 | 0 |
| HLUNG2014262 | 0 | 0 | 100 | 0 | 0 | 0 | 0 |
| HLUNG2014288 | 0 | 0 | 100 | 0 | 0 | 0 | 0 |
| HLUNG2014449 | 0 | 0 | 100 | 0 | 0 | 0 | 0 |
| HLUNG2014821 | 0 | 0 | 62.081 | 0 | 0 | 0 | 0 |
| HLUNG2015184 | 0 | 0 | 48.026 | 0 | 0 | 0 | 0 |
| HLUNG2015418 | 0 | 0 | 76.605 | 0 | 0 | 0 | 0 |
| HLUNG2015548 | 0 | 0 | 100 | 0 | 0 | 0 | 0 |
| HLUNG2015578 | 0 | 0 | 100 | 0 | 0 | 0 | 0 |
| HLUNG2015617 | 0 | 0 | 100 | 0 | 0 | 0 | 0 |
| HLUNG2016022 | 0 | 0 | 100 | 0 | 0 | 0 | 0 |
| HLUNG2016862 | 0 | 0 | 100 | 0 | 0 | 0 | 0 |
| HLUNG2017262 | 0 | 0 | 5.816 | 0 | 0 | 0 | 0 |
| HLUNG2017286 | 0 | 0 | 100 | 0 | 0 | 0 | 0 |
| HLUNG2017307 | 0 | 0 | 100 | 0 | 0 | 0 | 0 |
| HLUNG2017350 | 0 | 0 | 100 | 0 | 0 | 0 | 0 |
| HLUNG2017546 | 0 | 0 | 12.944 | 0 | 0 | 0 | 0 |
| HLUNG2017806 | 0 | 0 | 100 | 0 | 0 | 0 | 0 |
| HLUNG2018029 | 0 | 0 | 100 | 0 | 0 | 0 | 0 |
| HLUNG2018282 | 0 | 0 | 100 | 0 | 0 | 0 | 0 |
| HLUNG2018626 | 0 | 0 | 100 | 0 | 0 | 0 | 0 |
| HLUNG2019058 | 0 | 0 | 100 | 0 | 0 | 0 | 0 |
| HSYRA1000062 | 0 | 3.016 | 1.571 | 3.201 | 1.511 | 0 | 0 |
| HSYRA1000119 | 0 | 3.237 | 1.686 | 3.437 | 0 | 0 | 4.809 |
| HSYRA1000131 | 0 | 0 | 0 | 100 | 0 | 0 | 0 |
| HSYRA1000137 | 0 | 0 | 0 | 27.855 | 13.150 | 0 | 0 |
| HSYRA1000148 | 0 | 0 | 0 | 49.288 | 0 | 0 | 0 |
| HSYRA1000152 | 0 | 0 | 0 | 8.915 | 0 | 0 | 4.158 |
| HSYRA1000178 | 0 | 0 | 9.197 | 18.741 | 0 | 0 | 0 |
| HSYRA2000044 | 0 | 0 | 0 | 89.963 | 0 | 0 | 0 |
| HSYRA2000135 | 0 | 27.849 | 0 | 29.561 | 0 | 0 | 0 |
| HSYRA2000137 | 0 | 0 | 0 | 16.941 | 0 | 0 | 0 |
| HSYRA2000159 | 0 | 0.849 | 0 | 0.901 | 0 | 0 | 0.420 |
| HSYRA2000190 | 0 | 0 | 0 | 17.752 | 8.381 | 0 | 0 |
| HSYRA2000221 | 0 | 0 | 0 | 70.752 | 0 | 0 | 0 |
| HSYRA2000224 | 0 | 0 | 6.595 | 13.440 | 0 | 0 | 0 |
| HSYRA2000232 | 0 | 0 | 0 | 5.527 | 0 | 0 | 2.578 |
| HSYRA2000237 | 0 | 0 | 0 | 100 | 0 | 0 | 0 |
| HSYRA2000248 | 0 | 0 | 0 | 15.240 | 0 | 0 | 0 |
| HSYRA2000253 | 0 | 0 | 0 | 63.145 | 29.810 | 0 | 0 |
| HSYRA2000255 | 0 | 0 | 0 | 3.354 | 0 | 0 | 0 |
| HSYRA2000332 | 0 | 0 | 2.861 | 29.148 | 0 | 0 | 0 |
| HSYRA2000371 | 0 | 0 | 0 | 100 | 0 | 0 | 0 |
| HSYRA2000424 | 0 | 0 | 0 | 86.967 | 0 | 0 | 0 |
| HSYRA2000507 | 0 | 0 | 0 | 91.958 | 0 | 0 | 0 |
| HSYRA2000510 | 0 | 0 | 0 | 100 | 0 | 0 | 0 |
| HSYRA2000605 | 0 | 0 | 0 | 44.719 | 0 | 0 | 0 |
| HSYRA2000629 | 0 | 0 | 0 | 74.837 | 0 | 0 | 0 |
| HSYRA2000640 | 0 | 5.999 | 0 | 6.367 | 6.012 | 0 | 0 |
| HSYRA2000706 | 0 | 0 | 0 | 91.327 | 0 | 0 | 0 |
| HSYRA2000743 | 0 | 0 | 0 | 5.784 | 0 | 0 | 0 |
| HSYRA2000760 | 0 | 0 | 0 | 100 | 0 | 0 | 0 |
| HSYRA2000787 | 0 | 0 | 0 | 23.247 | 0 | 0 | 0 |
| HSYRA2000792 | 0 | 0 | 0 | 18.101 | 0 | 66.575 | 0 |
| HSYRA2000828 | 0 | 0 | 0 | 21.296 | 0 | 0 | 0 |
| HSYRA2000832 | 0 | 0 | 32.918 | 67.082 | 0 | 0 | 0 |
| HSYRA2000925 | 0 | 1.560 | 0 | 1.656 | 0.782 | 0 | 0 |
| HSYRA2000927 | 0 | 0 | 0 | 100 | 0 | 0 | 0 |
| HSYRA2001003 | 0 | 0 | 0 | 64.164 | 0 | 0 | 0 |
| HSYRA2001103 | 0 | 17.916 | 0 | 6.339 | 0 | 0 | 0 |
| HSYRA2001105 | 0 | 0 | 0 | 20.593 | 0 | 0 | 0 |
| HSYRA2001138 | 0 | 5.385 | 1.870 | 11.433 | 0.900 | 0 | 5.333 |
| HSYRA2001142 | 0 | 0 | 0 | 100 | 0 | 0 | 0 |
| HSYRA2001153 | 0 | 0 | 0 | 68.327 | 0 | 0 | 0 |
| HSYRA2001225 | 0 | 0 | 0 | 5.525 | 0 | 0 | 0 |
| HSYRA2001232 | 0 | 0 | 0 | 57.829 | 0 | 0 | 0 |
| HSYRA2001255 | 0 | 0 | 0 | 100 | 0 | 0 | 0 |
| HSYRA2001332 | 0 | 0 | 0 | 100 | 0 | 0 | 0 |
| HSYRA2001353 | 0 | 0 | 0 | 37.924 | 0 | 0 | 0 |
| HSYRA2001396 | 0 | 0 | 0 | 11.355 | 0 | 0 | 0 |
| HSYRA2001420 | 0 | 0 | 20.436 | 41.645 | 0 | 0 | 0 |
| HSYRA2001476 | 0 | 3.399 | 0 | 3.608 | 0 | 0 | 0 |
| HSYRA2001484 | 0 | 0 | 0 | 67.457 | 0 | 0 | 0 |
| HSYRA2001552 | 0 | 0 | 0 | 100 | 0 | 0 | 0 |
| HSYRA2001567 | 0 | 0 | 0 | 33.500 | 0 | 0 | 0 |
| HSYRA2001574 | 0 | 0 | 0 | 5.624 | 0 | 0 | 0 |
| HSYRA2001580 | 0 | 0 | 0 | 40.964 | 0 | 0 | 0 |
| HSYRA2001595 | 0 | 0 | 2.089 | 4.258 | 0 | 0 | 0 |
| HSYRA2001615 | 0 | 0 | 0 | 15.501 | 0 | 0 | 0 |
| HSYRA2001621 | 0 | 0 | 0 | 1.371 | 0 | 0 | 0 |
| HSYRA2001631 | 0 | 0 | 0 | 43.582 | 0 | 0 | 0 |
| HSYRA2001638 | 0 | 0 | 0 | 16.905 | 0 | 0 | 0 |
| HSYRA2001983 | 0 | 0 | 0 | 36.074 | 0 | 0 | 16.826 |
| HSYRA2002103 | 0 | 0 | 0 | 100 | 0 | 0 | 0 |
| HSYRA2002590 | 0 | 0 | 0 | 100 | 0 | 0 | 0 |
| HSYRA2002741 | 0 | 0 | 0 | 52.597 | 0 | 0 | 0 |
| HSYRA2003168 | 0 | 0 | 0 | 100 | 0 | 0 | 0 |
| HSYRA2004550 | 0 | 0 | 0 | 100 | 0 | 0 | 0 |
| HSYRA2004858 | 0 | 0 | 0 | 100 | 0 | 0 | 0 |
| HSYRA2005456 | 0 | 0 | 0 | 100 | 0 | 0 | 0 |
| HSYRA2005496 | 0 | 0 | 0 | 100 | 0 | 0 | 0 |
| HSYRA2005628 | 0 | 0 | 0 | 50.126 | 0 | 0 | 0 |
| HSYRA2005970 | 0 | 0 | 0 | 100 | 0 | 0 | 0 |
| HSYRA2006049 | 0 | 0 | 0 | 50.609 | 0 | 0 | 0 |
| HSYRA2006873 | 0 | 0 | 0 | 100 | 0 | 0 | 0 |
| HSYRA2007241 | 0 | 0 | 0 | 57.334 | 0 | 0 | 0 |
| HSYRA2007338 | 0 | 0 | 0 | 100 | 0 | 0 | 0 |
| HSYRA2007650 | 0 | 0 | 0 | 35.551 | 0 | 0 | 0 |
| HSYRA2007667 | 0 | 0 | 0 | 66.840 | 0 | 0 | 0 |
| HSYRA2008154 | 0 | 0 | 0 | 100 | 0 | 0 | 0 |
| HSYRA2008714 | 0 | 0 | 0 | 100 | 0 | 0 | 0 |
| HSYRA2009102 | 0 | 0 | 0 | 100 | 0 | 0 | 0 |
| IMR321000155 | 0 | 0 | 0 | 0 | 100 | 0 | 0 |
| IMR321000158 | 0 | 5.360 | 0 | 0 | 13.429 | 0 | 0 |
| IMR321000161 | 0 | 0 | 0 | 0 | 80.886 | 0 | 0 |
| IMR321000165 | 0 | 0 | 0 | 0 | 100 | 0 | 0 |
| IMR321000193 | 0 | 0 | 0 | 0 | 15.487 | 0 | 15.302 |
| IMR321000207 | 0 | 0 | 0 | 0 | 49.332 | 0 | 0 |
| IMR321000210 | 0 | 0 | 0 | 0 | 7.153 | 0 | 0 |
| IMR321000219 | 0 | 0 | 1.029 | 0 | 0.990 | 0 | 0 |
| IMR321000230 | 0 | 0 | 0 | 0 | 100 | 0 | 0 |
| IMR321000242 | 0 | 0 | 0 | 0 | 19.843 | 0 | 0 |
| IMR321000253 | 0 | 0 | 0 | 0 | 3.594 | 0 | 0 |
| IMR321000266 | 0 | 0 | 10.379 | 0 | 9.985 | 0 | 0 |
| IMR322000010 | 0 | 0 | 0 | 0 | 33.404 | 0 | 0 |
| IMR322000072 | 0 | 0 | 0 | 0 | 25.481 | 0 | 0 |
| IMR322000107 | 0 | 0 | 0 | 0 | 100 | 0 | 0 |
| IMR322000121 | 0 | 0 | 0 | 0 | 7.867 | 0 | 0 |
| IMR322000127 | 0 | 0 | 0 | 0 | 5.466 | 0 | 0 |
| IMR322000144 | 0 | 0 | 0 | 0 | 11.511 | 0 | 0 |
| IMR322000152 | 0 | 0 | 0 | 0 | 28.585 | 0 | 0 |
| IMR322000164 | 0 | 0 | 0 | 0 | 100 | 0 | 0 |
| IMR322000178 | 0 | 0 | 0 | 0 | 6.562 | 0 | 0 |
| IMR322000223 | 0 | 0 | 0 | 0 | 2.402 | 0 | 0 |
| IMR322000243 | 0 | 0 | 3.147 | 0 | 6.055 | 0 | 0 |
| IMR322000302 | 0 | 0 | 0 | 0 | 20.933 | 0 | 0 |
| IMR322000316 | 0 | 0 | 0 | 0 | 1.464 | 0 | 0 |
| IMR322000374 | 0 | 0 | 0 | 0 | 19.436 | 0 | 0 |
| IMR322000379 | 0 | 0 | 0 | 0 | 100 | 0 | 0 |
| IMR322000383 | 0 | 0 | 0 | 0 | 100 | 0 | 0 |
| IMR322000418 | 0 | 0 | 0 | 0 | 100 | 0 | 0 |
| IMR322000518 | 0 | 0 | 0 | 0 | 32.511 | 0 | 0 |
| IMR322000555 | 0 | 0 | 0 | 0 | 21.051 | 0 | 0 |
| IMR322000604 | 0 | 0 | 0 | 0 | 77.918 | 0 | 0 |
| IMR322000609 | 0 | 0 | 0 | 0 | 77.918 | 0 | 0 |
| IMR322000656 | 0 | 0 | 0 | 0 | 100 | 0 | 0 |
| IMR322000672 | 0 | 0 | 0 | 0 | 100 | 0 | 0 |
| IMR322000730 | 0 | 2.895 | 0.503 | 0 | 1.934 | 0 | 0 |
| IMR322000742 | 0 | 0 | 0 | 0 | 17.529 | 0 | 5.773 |
| IMR322000775 | 0 | 0 | 0 | 0 | 29.259 | 0 | 0 |
| IMR322000791 | 0 | 0 | 0 | 0 | 18.307 | 0 | 0 |
| IMR322000811 | 0 | 0 | 0 | 0 | 49.874 | 0 | 0 |
| IMR322000819 | 0 | 0 | 0 | 0 | 30.079 | 0 | 0 |
| IMR322000838 | 0 | 0 | 0 | 0 | 76.087 | 0 | 0 |
| IMR322000859 | 0 | 0 | 0 | 0 | 71.312 | 0 | 0 |
| IMR322000863 | 0 | 0 | 0 | 0 | 95.212 | 0 | 0 |
| IMR322000917 | 0 | 0 | 0 | 0 | 41.680 | 0 | 0 |
| IMR322000918 | 0 | 0 | 0 | 0 | 10.343 | 0 | 0 |
| IMR322000919 | 0 | 0 | 0 | 0 | 100 | 0 | 0 |
| IMR322000935 | 0 | 0 | 0 | 0 | 5.283 | 0 | 0 |
| IMR322000953 | 0 | 0 | 0 | 0 | 100 | 0 | 0 |
| IMR322000973 | 0 | 0 | 0 | 0 | 2.845 | 0 | 0 |
| IMR322000984 | 0 | 0 | 0 | 0 | 100 | 0 | 0 |
| IMR322001018 | 0 | 0 | 0 | 0 | 100 | 0 | 0 |
| IMR322001049 | 0 | 0 | 0 | 0 | 20.440 | 0 | 0 |
| IMR322001167 | 0 | 0 | 0 | 0 | 100 | 0 | 0 |
| IMR322001185 | 0 | 0 | 0 | 0 | 49.459 | 0 | 0 |
| IMR322001218 | 0 | 0 | 0 | 0 | 7.900 | 0 | 0 |
| IMR322001245 | 0 | 0 | 0 | 0 | 100 | 0 | 0 |
| IMR322001317 | 0 | 0 | 0 | 0 | 22.291 | 0 | 0 |
| IMR322001318 | 0 | 0 | 0 | 0 | 77.787 | 0 | 0 |
| IMR322001322 | 0 | 0 | 0 | 0 | 77.787 | 0 | 0 |
| IMR322001332 | 0 | 0 | 0 | 0 | 28.184 | 0 | 0 |
| IMR322001380 | 0 | 0 | 0 | 0 | 13.989 | 0 | 0 |
| IMR322001435 | 0 | 6.615 | 3.446 | 0 | 6.630 | 0 | 3.275 |
| IMR322001438 | 0 | 0 | 0 | 0 | 29.322 | 0 | 0 |
| IMR322001452 | 0 | 0 | 0 | 0 | 100 | 0 | 0 |
| IMR322001491 | 0 | 0 | 0 | 0 | 34.025 | 0 | 0 |
| IMR322001534 | 0 | 0 | 0 | 0 | 29.156 | 0 | 0 |
| IMR322001541 | 0 | 0 | 0 | 0 | 47.754 | 0 | 0 |
| IMR322001584 | 0 | 0 | 0 | 0 | 4.405 | 34.316 | 0 |
| IMR322001600 | 0 | 1.134 | 0 | 0 | 0.568 | 0 | 0 |
| IMR322001665 | 0 | 0 | 0 | 0 | 100 | 0 | 0 |
| IMR322001670 | 0 | 0 | 0 | 0 | 16.098 | 0 | 0 |
| IMR322001710 | 0 | 0 | 0 | 0 | 13.687 | 0 | 0 |
| IMR322001724 | 0 | 0 | 0 | 0 | 100 | 0 | 0 |
| IMR322001879 | 0 | 0 | 0 | 0 | 34.007 | 0 | 0 |
| IMR322002035 | 0 | 0 | 0 | 0 | 63.824 | 0 | 0 |
| IMR322002110 | 0 | 0 | 0 | 0 | 100 | 0 | 0 |
| IMR322002470 | 0 | 0 | 0 | 0 | 100 | 0 | 0 |
| IMR322002993 | 0 | 0 | 0 | 0 | 54.923 | 0 | 0 |
| IMR322003675 | 0 | 0 | 0 | 0 | 100 | 0 | 0 |
| IMR322004768 | 0 | 0 | 0 | 0 | 100 | 0 | 0 |
| IMR322005293 | 0 | 0 | 0 | 0 | 100 | 0 | 0 |
| IMR322005833 | 0 | 0 | 0 | 0 | 100 | 0 | 0 |
| IMR322006012 | 0 | 0 | 0 | 0 | 100 | 0 | 0 |
| IMR322006222 | 0 | 0 | 0 | 0 | 100 | 0 | 0 |
| IMR322006495 | 0 | 0 | 0 | 0 | 100 | 0 | 0 |
| IMR322006520 | 0 | 0 | 0 | 0 | 100 | 0 | 0 |
| IMR322006886 | 0 | 0 | 0 | 0 | 100 | 0 | 0 |
| IMR322006947 | 0 | 0 | 0 | 0 | 32.603 | 0 | 0 |
| IMR322007078 | 0 | 0 | 0 | 0 | 100 | 0 | 0 |
| IMR322007225 | 0 | 0 | 0 | 0 | 100 | 0 | 0 |
| IMR322007704 | 0 | 0 | 0 | 0 | 100 | 0 | 0 |
| IMR322008651 | 0 | 0 | 0 | 0 | 100 | 0 | 0 |
| IMR322009710 | 0 | 0 | 0 | 0 | 83.254 | 0 | 0 |
| IMR322009807 | 0 | 0 | 0 | 0 | 100 | 0 | 0 |
| IMR322010295 | 0 | 0 | 0 | 0 | 100 | 0 | 0 |
| IMR322010953 | 0 | 0 | 0 | 0 | 100 | 0 | 0 |
| IMR322011689 | 0 | 0 | 0 | 0 | 100 | 0 | 0 |
| IMR322012314 | 0 | 0 | 0 | 0 | 100 | 0 | 0 |
| IMR322012529 | 0 | 0 | 0 | 0 | 16.616 | 0 | 0 |
| IMR322013053 | 0 | 0 | 0 | 0 | 100 | 0 | 0 |
| IMR322013396 | 0 | 0 | 0 | 0 | 100 | 0 | 0 |
| IMR322013731 | 0 | 0 | 0 | 0 | 100 | 0 | 0 |
| IMR322013805 | 0 | 0 | 0 | 0 | 47.665 | 0 | 0 |
| IMR322015523 | 0 | 0 | 0 | 0 | 100 | 0 | 0 |
| IMR322016146 | 0 | 0 | 0 | 0 | 100 | 0 | 0 |
| IMR322017049 | 0 | 0 | 0 | 0 | 100 | 0 | 0 |
| IMR322018117 | 0 | 0 | 0 | 0 | 100 | 0 | 0 |
| IMR322018192 | 0 | 0 | 0 | 0 | 100 | 0 | 0 |
| IMR322019070 | 0 | 0 | 9.813 | 0 | 9.441 | 0 | 0 |
| JCMLC2000273 | 0 | 0 | 0 | 0 | 0 | 84.957 | 0 |
| KIDNE1000008 | 0 | 0 | 0 | 0 | 0 | 0 | 56.319 |
| KIDNE1000012 | 0 | 0 | 0 | 0 | 0 | 0 | 100 |
| KIDNE1000015 | 0 | 0 | 0 | 0 | 0 | 0 | 100 |
| KIDNE1000028 | 0 | 0 | 0 | 0 | 0 | 0 | 100 |
| KIDNE1000036 | 0 | 0 | 0 | 0 | 0 | 0 | 74.510 |
| KIDNE1000064 | 0 | 0 | 0 | 0 | 0 | 0 | 100 |
| KIDNE1000104 | 0 | 0 | 0 | 0 | 0 | 0 | 57.817 |
| KIDNE1000121 | 0 | 0 | 0 | 0 | 0 | 0 | 100 |
| KIDNE1000143 | 0 | 0 | 0 | 0 | 0 | 0 | 55.638 |
| KIDNE1000145 | 0 | 0 | 0 | 0 | 0 | 0 | 9.641 |
| KIDNE1000152 | 0 | 0 | 0 | 0 | 0 | 0 | 100 |
| KIDNE2000026 | 0 | 0 | 0 | 0 | 0 | 0 | 100 |
| KIDNE2000041 | 0 | 0 | 0 | 0 | 0 | 0 | 100 |
| KIDNE2000046 | 0 | 0 | 0 | 0 | 0 | 0 | 100 |
| KIDNE2000051 | 0 | 0 | 0 | 0 | 0 | 0 | 100 |
| KIDNE2000070 | 0 | 0 | 0 | 0 | 0 | 0 | 100 |
| KIDNE2000085 | 0 | 0 | 0 | 0 | 0 | 0 | 7.170 |
| KIDNE2000167 | 0 | 0 | 0 | 0 | 0 | 0 | 100 |
| KIDNE2000174 | 0 | 0 | 0 | 0 | 0 | 0 | 100 |
| KIDNE2000192 | 0 | 0 | 0 | 0 | 0 | 0 | 100 |
| KIDNE2000227 | 0 | 0 | 0 | 0 | 0 | 0 | 100 |
| KIDNE2000244 | 0 | 0 | 0 | 0 | 0 | 0 | 100 |
| KIDNE2000245 | 0 | 0 | 0 | 0 | 0 | 0 | 100 |
| KIDNE2000252 | 0 | 0 | 0 | 6.388 | 0 | 0 | 2.979 |
| KIDNE2000266 | 0 | 0 | 15.443 | 0 | 0 | 0 | 14.679 |
| KIDNE2000287 | 0 | 0 | 0 | 0 | 0 | 0 | 100 |
| KIDNE2000315 | 0 | 0 | 0 | 0 | 0 | 0 | 47.614 |
| KIDNE2000317 | 0 | 0 | 0 | 0 | 0 | 0 | 49.600 |
| KIDNE2000328 | 0 | 0 | 0 | 0 | 0 | 0 | 100 |
| KIDNE2000330 | 0 | 0 | 0 | 0 | 0 | 0 | 11.902 |
| KIDNE2000335 | 0 | 0 | 0 | 0 | 0 | 0 | 100 |
| KIDNE2000349 | 0 | 0 | 0 | 0 | 0 | 52.159 | 30.868 |
| KIDNE2000375 | 0 | 0 | 0 | 0 | 0 | 0 | 100 |
| KIDNE2000383 | 0 | 0 | 0 | 0 | 0 | 0 | 17.169 |
| KIDNE2000394 | 0 | 0 | 0 | 0 | 0 | 0 | 100 |
| KIDNE2000403 | 0 | 0 | 0 | 0 | 0 | 0 | 2.880 |
| KIDNE2000422 | 0 | 0 | 0 | 0 | 0 | 0 | 77.710 |
| KIDNE2000493 | 0 | 0 | 0 | 0 | 0 | 0 | 100 |
| KIDNE2000497 | 0 | 0 | 0 | 0 | 0 | 0 | 10.932 |
| KIDNE2000510 | 0 | 0 | 0 | 0 | 0 | 0 | 100 |
| KIDNE2000513 | 0 | 0 | 0 | 0 | 0 | 0 | 100 |
| KIDNE2000517 | 0 | 0 | 0 | 0 | 0 | 0 | 27.300 |
| KIDNE2000519 | 0 | 0 | 0 | 0 | 0 | 0 | 100 |
| KIDNE2000555 | 0 | 0 | 0 | 0 | 0 | 0 | 100 |
| KIDNE2000574 | 0 | 5.271 | 0 | 0 | 2.641 | 0 | 2.610 |
| KIDNE2000624 | 0 | 0 | 0 | 0 | 0 | 0 | 100 |
| KIDNE2000665 | 0 | 0 | 0 | 0 | 0 | 0 | 13.498 |
| KIDNE2000678 | 0 | 0 | 0 | 0 | 0 | 0 | 100 |
| KIDNE2000717 | 0 | 0 | 0 | 0 | 0 | 0 | 100 |
| KIDNE2000721 | 0 | 0 | 0 | 0 | 0 | 0 | 73.728 |
| KIDNE2000722 | 0 | 0 | 0 | 0 | 0 | 0 | 100 |
| KIDNE2000777 | 0 | 0 | 0 | 0 | 0 | 0 | 19.958 |
| KIDNE2000801 | 0 | 0 | 0 | 0 | 0 | 0 | 100 |
| KIDNE2000832 | 0 | 0 | 0 | 0 | 0 | 0 | 32.592 |
| KIDNE2000833 | 0 | 0 | 0 | 0 | 0 | 0 | 25.115 |
| KIDNE2000846 | 0 | 0 | 0 | 0 | 0 | 0 | 100 |
| KIDNE2000867 | 0 | 0 | 0 | 0 | 0 | 0 | 100 |
| KIDNE2000909 | 0 | 0 | 0 | 0 | 0 | 0 | 7.157 |
| KIDNE2000947 | 0 | 0 | 0 | 0 | 0 | 0 | 8.811 |
| KIDNE2001117 | 0 | 0 | 0 | 0 | 0 | 0 | 77.710 |
| KIDNE2001140 | 0 | 0 | 0 | 0 | 0 | 0 | 100 |
| KIDNE2001162 | 0 | 0 | 0 | 3.489 | 1.647 | 0 | 1.627 |
| KIDNE2001269 | 0 | 0 | 0 | 0 | 0 | 0 | 100 |
| KIDNE2001361 | 0 | 0 | 0 | 0 | 0 | 0 | 80.699 |
| KIDNE2001373 | 0 | 0 | 0 | 0 | 0 | 0 | 24.839 |
| KIDNE2001467 | 0 | 0 | 0 | 0 | 0 | 7.165 | 0.909 |
| KIDNE2001636 | 0 | 0 | 0 | 0 | 0 | 0 | 49.423 |
| KIDNE2001713 | 0 | 0 | 0 | 0 | 0 | 0 | 54.019 |
| KIDNE2001802 | 0 | 0 | 0 | 0 | 0 | 0 | 100 |
| KIDNE2001840 | 0 | 0 | 0 | 0 | 0 | 0 | 100 |
| KIDNE2001847 | 0 | 0 | 0 | 0 | 0 | 0 | 12.687 |
| KIDNE2001857 | 0 | 0 | 0 | 0 | 0 | 0 | 100 |
| KIDNE2001873 | 0 | 0 | 0 | 0 | 0 | 0 | 100 |
| KIDNE2001897 | 0 | 0 | 0 | 0 | 0 | 0 | 100 |
| KIDNE2001931 | 0 | 0 | 0 | 0 | 0 | 0 | 100 |
| KIDNE2001979 | 0 | 0 | 0 | 44.035 | 0 | 0 | 20.540 |
| KIDNE2002015 | 0 | 0 | 0 | 0 | 0 | 0 | 100 |
| KIDNE2002162 | 0 | 0 | 0 | 0 | 0 | 0 | 100 |
| KIDNE2002168 | 0 | 0 | 0 | 0 | 0 | 0 | 100 |
| KIDNE2002191 | 0 | 0 | 0 | 0 | 0 | 0 | 24.850 |
| KIDNE2002198 | 0 | 0 | 0 | 0 | 0 | 0 | 100 |
| KIDNE2002252 | 0 | 0 | 0 | 0 | 0 | 0 | 7.600 |
| KIDNE2002262 | 0 | 0 | 0 | 0 | 0 | 0 | 100 |
| KIDNE2002265 | 0 | 0 | 0 | 0 | 0 | 0 | 6.341 |
| KIDNE2002438 | 0 | 0 | 0 | 0 | 0 | 0 | 65.363 |
| KIDNE2002483 | 0 | 0 | 0 | 0 | 0 | 0 | 100 |
| KIDNE2002725 | 0 | 0 | 0 | 0 | 0 | 0 | 35.870 |
| KIDNE2002768 | 0 | 0 | 0 | 0 | 0 | 0 | 100 |
| KIDNE2002795 | 0 | 0 | 0 | 0 | 0 | 0 | 100 |
| KIDNE2002798 | 0 | 0 | 44.388 | 0 | 0 | 0 | 42.192 |
| KIDNE2002839 | 0 | 0 | 0 | 0 | 0 | 0 | 25.593 |
| KIDNE2002845 | 0 | 0 | 0 | 0 | 0 | 0 | 100 |
| KIDNE2002872 | 0 | 0 | 0 | 0 | 0 | 0 | 1.993 |
| KIDNE2002882 | 0 | 0 | 0 | 0 | 0 | 0 | 28.683 |
| KIDNE2002883 | 0 | 0 | 0 | 0 | 0 | 0 | 7.907 |
| KIDNE2002980 | 0 | 0 | 0 | 0 | 0 | 0 | 10.988 |
| KIDNE2002991 | 0 | 0 | 0 | 0 | 0 | 0 | 100 |
| KIDNE2003185 | 0 | 0 | 0 | 0 | 0 | 0 | 100 |
| KIDNE2003188 | 0 | 0 | 0 | 0 | 0 | 0 | 100 |
| KIDNE2003233 | 0 | 0 | 0 | 0 | 0 | 0 | 83.085 |
| KIDNE2003305 | 0 | 0 | 6.174 | 0 | 0 | 0 | 8.803 |
| KIDNE2003316 | 0 | 0 | 0 | 0 | 0 | 0 | 26.377 |
| KIDNE2003335 | 0 | 0 | 0 | 0 | 0 | 0 | 100 |
| KIDNE2003357 | 0 | 0 | 0 | 0 | 0 | 0 | 51.547 |
| KIDNE2003373 | 0 | 0 | 0 | 0 | 0 | 0 | 54.019 |
| KIDNE2003377 | 0 | 0 | 0 | 0 | 0 | 0 | 100 |
| KIDNE2003507 | 0 | 0 | 0 | 0 | 0 | 0 | 23.607 |
| KIDNE2003752 | 0 | 0 | 0 | 0 | 0 | 0 | 100 |
| KIDNE2003764 | 0 | 0 | 39.509 | 0 | 0 | 0 | 37.554 |
| KIDNE2003837 | 0 | 0 | 0 | 0 | 0 | 0 | 100 |
| KIDNE2003941 | 0 | 0 | 0 | 0 | 0 | 0 | 1.758 |
| KIDNE2003994 | 0 | 0 | 0 | 0 | 0 | 0 | 28.111 |
| KIDNE2004034 | 0 | 0 | 0 | 0 | 0 | 0 | 100 |
| KIDNE2004054 | 0 | 0 | 0 | 0 | 0 | 0 | 45.509 |
| KIDNE2004084 | 0 | 0 | 0 | 0 | 0 | 0 | 100 |
| KIDNE2004095 | 0 | 0 | 0 | 0 | 0 | 0 | 100 |
| KIDNE2004115 | 0 | 0 | 0 | 0 | 0 | 0 | 83.085 |
| KIDNE2004233 | 0 | 0 | 0 | 0 | 0 | 0 | 100 |
| KIDNE2004262 | 0 | 0 | 0 | 0 | 0 | 0 | 100 |
| KIDNE2004279 | 0 | 0 | 0 | 0 | 0 | 0 | 100 |
| KIDNE2004294 | 0 | 0 | 0 | 0 | 0 | 0 | 100 |
| KIDNE2004295 | 0 | 0 | 23.416 | 0 | 0 | 0 | 22.257 |
| KIDNE2004305 | 0 | 0 | 0 | 0 | 0 | 0 | 65.363 |
| KIDNE2004344 | 0 | 0 | 0 | 0 | 0 | 0 | 80.699 |
| KIDNE2004394 | 0 | 0 | 0 | 0 | 0 | 0 | 100 |
| KIDNE2004411 | 0 | 0 | 0 | 0 | 0 | 0 | 59.417 |
| KIDNE2004475 | 0 | 0 | 0 | 0 | 9.083 | 0 | 8.974 |
| KIDNE2004519 | 0 | 0 | 0 | 0 | 0 | 0 | 100 |
| KIDNE2004520 | 0 | 0 | 0 | 0 | 0 | 0 | 100 |
| KIDNE2004531 | 0 | 0 | 0 | 0 | 0 | 0 | 80.699 |
| KIDNE2004534 | 0 | 0 | 0 | 0 | 13.171 | 0 | 13.013 |
| KIDNE2004562 | 0 | 0 | 0 | 0 | 0 | 0 | 100 |
| KIDNE2004579 | 0 | 0 | 0 | 0 | 0 | 0 | 100 |
| KIDNE2004626 | 0 | 0 | 0 | 0 | 0 | 0 | 44.933 |
| KIDNE2004681 | 0 | 0 | 0 | 0 | 0 | 0 | 100 |
| KIDNE2004828 | 0 | 0 | 0 | 0 | 0 | 0 | 100 |
| KIDNE2004846 | 0 | 0 | 0 | 0 | 0 | 0 | 22.995 |
| KIDNE2004864 | 0 | 0 | 0 | 0 | 0 | 0 | 34.038 |
| KIDNE2004879 | 0 | 0 | 0 | 0 | 0 | 0 | 100 |
| KIDNE2004981 | 0 | 0 | 0 | 0 | 0 | 0 | 100 |
| KIDNE2004985 | 0 | 0 | 0 | 0 | 0 | 0 | 100 |
| KIDNE2004999 | 0 | 0 | 0 | 0 | 0 | 0 | 100 |
| KIDNE2005038 | 0 | 0 | 0 | 0 | 0 | 0 | 100 |
| KIDNE2005042 | 0 | 0 | 0 | 0 | 0 | 0 | 28.069 |
| KIDNE2005062 | 0 | 0 | 0 | 0 | 0 | 0 | 100 |
| KIDNE2005266 | 0 | 0 | 0 | 0 | 0 | 0 | 100 |
| KIDNE2005296 | 0 | 0 | 0 | 0 | 0 | 0 | 100 |
| KIDNE2005321 | 0 | 0 | 0 | 0 | 0 | 0 | 34.448 |
| KIDNE2005327 | 0 | 0 | 0 | 0 | 0 | 0 | 100 |
| KIDNE2005336 | 0 | 0 | 0 | 0 | 0 | 0 | 58.307 |
| KIDNE2005400 | 0 | 0 | 0 | 0 | 0 | 0 | 100 |
| KIDNE2005424 | 0 | 0 | 0 | 0 | 0 | 0 | 100 |
| KIDNE2005477 | 0 | 0 | 0 | 0 | 0 | 0 | 100 |
| KIDNE2005526 | 0 | 0 | 0 | 0 | 0 | 0 | 100 |
| KIDNE2005543 | 0 | 0 | 0 | 0 | 0 | 0 | 62.084 |
| KIDNE2005603 | 0 | 0 | 0 | 0 | 0 | 0 | 100 |
| KIDNE2005629 | 0 | 0 | 0 | 0 | 0 | 0 | 100 |
| KIDNE2005676 | 0 | 0 | 0 | 0 | 0 | 0 | 4.905 |
| KIDNE2005781 | 0 | 0 | 0 | 0 | 0 | 0 | 100 |
| KIDNE2005798 | 0 | 0 | 0 | 0 | 0 | 0 | 100 |
| KIDNE2005854 | 0 | 0 | 0 | 0 | 0 | 0 | 100 |
| KIDNE2005908 | 0 | 0 | 0 | 0 | 0 | 0 | 100 |
| KIDNE2005937 | 0 | 0 | 0 | 0 | 0 | 0 | 94.471 |
| KIDNE2006009 | 0 | 25.959 | 0 | 0 | 0 | 0 | 12.853 |
| KIDNE2006014 | 0 | 0 | 0 | 0 | 0 | 0 | 10.352 |
| KIDNE2006030 | 0 | 0 | 0 | 0 | 0 | 0 | 7.440 |
| KIDNE2006039 | 0 | 0 | 0 | 0 | 0 | 0 | 55.033 |
| KIDNE2006053 | 0 | 0 | 0 | 0 | 0 | 0 | 100 |
| KIDNE2006062 | 0 | 0 | 0 | 0 | 0 | 0 | 39.197 |
| KIDNE2006092 | 0 | 0 | 0 | 0 | 0 | 0 | 100 |
| KIDNE2006145 | 0 | 0 | 0 | 0 | 0 | 0 | 100 |
| KIDNE2006149 | 0 | 0 | 0 | 0 | 0 | 0 | 100 |
| KIDNE2006210 | 0 | 0 | 0 | 0 | 0 | 0 | 48.873 |
| KIDNE2006248 | 27.288 | 0 | 1.140 | 0 | 0 | 8.547 | 1.084 |
| KIDNE2006299 | 0 | 0 | 0 | 0 | 0 | 0 | 100 |
| KIDNE2006334 | 0 | 0 | 0 | 0 | 0 | 0 | 100 |
| KIDNE2006353 | 0 | 0 | 14.344 | 0 | 0 | 0 | 13.634 |
| KIDNE2006376 | 0 | 0 | 0 | 0 | 0 | 0 | 100 |
| KIDNE2006378 | 0 | 0 | 0 | 0 | 0 | 0 | 100 |
| KIDNE2006465 | 0 | 0 | 0 | 0 | 0 | 0 | 10.787 |
| KIDNE2006580 | 0 | 0 | 0 | 0 | 0 | 0 | 48.900 |
| KIDNE2006652 | 0 | 0 | 0 | 0 | 0 | 0 | 90.326 |
| KIDNE2006687 | 0 | 0 | 0 | 0 | 0 | 0 | 100 |
| KIDNE2006733 | 0 | 0 | 0 | 0 | 0 | 0 | 100 |
| KIDNE2006760 | 0 | 0 | 24.742 | 0 | 0 | 0 | 23.517 |
| KIDNE2006775 | 0 | 0 | 0 | 0 | 0 | 0 | 6.387 |
| KIDNE2006811 | 0 | 0 | 11.935 | 0 | 0 | 0 | 11.345 |
| KIDNE2006820 | 0 | 0 | 0 | 0 | 0 | 0 | 100 |
| KIDNE2006880 | 0 | 0 | 11.775 | 0 | 0 | 0 | 11.193 |
| KIDNE2007005 | 0 | 0 | 0 | 0 | 0 | 0 | 66.711 |
| KIDNE2007040 | 0 | 0 | 0 | 0 | 0 | 0 | 74.510 |
| KIDNE2007077 | 0 | 0 | 0 | 0 | 0 | 0 | 100 |
| KIDNE2007186 | 0 | 0 | 0 | 0 | 0 | 0 | 66.711 |
| KIDNE2007222 | 0 | 0 | 0 | 0 | 0 | 0 | 100 |
| KIDNE2007328 | 0 | 0 | 3.245 | 0 | 0 | 0 | 3.084 |
| KIDNE2007352 | 0 | 0 | 3.049 | 3.107 | 0 | 11.428 | 5.797 |
| KIDNE2007356 | 0 | 0 | 0 | 0 | 0 | 0 | 49.573 |
| KIDNE2007422 | 0 | 0 | 0 | 0 | 0 | 0 | 100 |
| KIDNE2007569 | 0 | 0 | 0 | 0 | 0 | 0 | 100 |
| KIDNE2007810 | 0 | 0 | 0 | 0 | 0 | 0 | 100 |
| KIDNE2007811 | 0 | 0 | 0 | 0 | 0 | 0 | 29.868 |
| KIDNE2007910 | 0 | 0 | 0 | 0 | 0 | 0 | 31.595 |
| KIDNE2007944 | 0 | 0 | 0 | 0 | 0 | 0 | 35.045 |
| KIDNE2007954 | 0 | 0 | 7.732 | 0 | 0 | 0 | 7.349 |
| KIDNE2008022 | 0 | 0 | 0 | 0 | 0 | 0 | 84.210 |
| KIDNE2008048 | 0 | 3.777 | 0 | 0 | 0 | 0 | 3.740 |
| KIDNE2008069 | 0 | 0 | 0 | 0 | 0 | 0 | 4.069 |
| KIDNE2008072 | 0 | 0 | 0 | 0 | 0 | 0 | 100 |
| KIDNE2008116 | 0 | 0 | 0 | 0 | 0 | 0 | 4.045 |
| KIDNE2008117 | 0 | 0 | 0 | 0 | 0 | 0 | 100 |
| KIDNE2008218 | 0 | 0 | 0 | 0 | 0 | 0 | 100 |
| KIDNE2008315 | 0 | 0 | 0 | 0 | 0 | 0 | 100 |
| KIDNE2008362 | 0 | 0 | 0 | 0 | 16.112 | 0 | 15.919 |
| KIDNE2008378 | 0 | 0 | 0 | 0 | 0 | 0 | 100 |
| KIDNE2008403 | 0 | 0 | 0 | 0 | 0 | 0 | 4.741 |
| KIDNE2008404 | 0 | 0 | 0 | 0 | 0 | 0 | 32.332 |
| KIDNE2008446 | 0 | 0 | 0 | 0 | 0 | 0 | 100 |
| KIDNE2008473 | 0 | 0 | 0 | 0 | 0 | 0 | 100 |
| KIDNE2008480 | 0 | 0 | 0 | 0 | 0 | 0 | 100 |
| KIDNE2008649 | 0 | 0 | 0 | 0 | 0 | 0 | 89.133 |
| KIDNE2008666 | 0 | 0 | 0 | 0 | 0 | 0 | 77.710 |
| KIDNE2008697 | 0 | 0 | 0 | 0 | 0 | 0 | 100 |
| KIDNE2008758 | 0 | 0 | 0 | 0 | 0 | 0 | 75.867 |
| KIDNE2008788 | 0 | 0 | 0 | 0 | 0 | 0 | 100 |
| KIDNE2008795 | 0 | 0 | 0 | 0 | 0 | 0 | 100 |
| KIDNE2008824 | 0 | 0 | 0 | 0 | 0 | 0 | 100 |
| KIDNE2008832 | 0 | 0 | 0 | 0 | 0 | 0 | 100 |
| KIDNE2008869 | 0 | 0 | 0 | 0 | 0 | 0 | 100 |
| KIDNE2008914 | 0 | 0 | 0 | 0 | 0 | 0 | 60.644 |
| KIDNE2008975 | 0 | 0 | 0 | 0 | 0 | 0 | 100 |
| KIDNE2008987 | 0 | 0 | 0 | 0 | 0 | 0 | 10.043 |
| KIDNE2009019 | 0 | 0 | 0 | 0 | 0 | 0 | 73.728 |
| KIDNE2009109 | 0 | 0 | 0 | 0 | 0 | 0 | 100 |
| KIDNE2009180 | 0 | 0 | 0 | 0 | 0 | 0 | 100 |
| KIDNE2009191 | 0 | 0 | 0 | 0 | 0 | 0 | 100 |
| KIDNE2009332 | 0 | 0 | 0 | 0 | 0 | 0 | 65.735 |
| KIDNE2009367 | 0 | 0 | 0 | 0 | 2.659 | 0 | 2.628 |
| KIDNE2009426 | 0 | 0 | 0 | 0 | 0 | 0 | 100 |
| KIDNE2009467 | 0 | 0 | 0 | 0 | 0 | 0 | 100 |
| KIDNE2009490 | 0 | 0 | 0 | 0 | 0 | 0 | 100 |
| KIDNE2009553 | 0 | 0 | 0 | 0 | 0 | 0 | 100 |
| KIDNE2009605 | 0 | 0 | 0 | 0 | 0 | 0 | 52.649 |
| KIDNE2009628 | 0 | 0 | 0 | 0 | 0 | 0 | 100 |
| KIDNE2009647 | 0 | 0 | 0 | 0 | 0 | 0 | 100 |
| KIDNE2009676 | 0 | 0 | 0 | 0 | 0 | 0 | 100 |
| KIDNE2009723 | 0 | 0 | 0 | 0 | 0 | 0 | 100 |
| KIDNE2010007 | 0 | 0 | 0 | 0 | 0 | 0 | 100 |
| KIDNE2010049 | 0 | 0 | 0 | 0 | 0 | 0 | 11.987 |
| KIDNE2010052 | 0 | 0 | 0 | 0 | 0 | 0 | 100 |
| KIDNE2010084 | 0 | 0 | 0 | 0 | 0 | 0 | 100 |
| KIDNE2010137 | 0 | 0 | 0 | 0 | 0 | 0 | 100 |
| KIDNE2010151 | 0 | 0 | 0 | 0 | 0 | 0 | 100 |
| KIDNE2010264 | 0 | 0 | 0 | 0 | 0 | 0 | 100 |
| KIDNE2010265 | 0 | 0 | 0 | 0 | 0 | 0 | 8.237 |
| KIDNE2010271 | 0 | 0 | 0 | 0 | 0 | 0 | 100 |
| KIDNE2010419 | 0 | 0 | 0 | 0 | 0 | 0 | 100 |
| KIDNE2010430 | 0 | 0 | 0 | 0 | 0 | 0 | 33.246 |
| KIDNE2010574 | 0 | 0 | 0 | 0 | 0 | 0 | 100 |
| KIDNE2010674 | 0 | 0 | 0 | 0 | 0 | 0 | 100 |
| KIDNE2010739 | 0 | 0 | 0 | 0 | 0 | 0 | 100 |
| KIDNE2010750 | 0 | 0 | 0 | 0 | 0 | 0 | 74.264 |
| KIDNE2010762 | 0 | 0 | 0 | 0 | 0 | 0 | 100 |
| KIDNE2010863 | 0 | 0 | 0 | 0 | 0 | 0 | 100 |
| KIDNE2010973 | 0 | 0 | 0 | 0 | 0 | 0 | 100 |
| KIDNE2010989 | 0 | 0 | 0 | 0 | 0 | 0 | 100 |
| KIDNE2011200 | 0 | 0 | 0 | 0 | 0 | 0 | 100 |
| KIDNE2011314 | 0 | 0 | 0 | 0 | 0 | 0 | 75.867 |
| KIDNE2011508 | 0 | 0 | 0 | 0 | 0 | 0 | 65.178 |
| KIDNE2011532 | 0 | 0 | 0 | 0 | 0 | 0 | 100 |
| KIDNE2011635 | 0 | 0 | 0 | 0 | 0 | 0 | 48.502 |
| KIDNE2011752 | 0 | 0 | 0 | 0 | 0 | 0 | 83.085 |
| KIDNE2011782 | 0 | 0 | 0 | 0 | 0 | 0 | 100 |
| KIDNE2011858 | 0 | 0 | 0 | 0 | 0 | 0 | 100 |
| KIDNE2012009 | 0 | 0 | 0 | 0 | 0 | 0 | 33.186 |
| KIDNE2012025 | 0 | 0 | 0 | 0 | 0 | 0 | 16.362 |
| KIDNE2012188 | 0 | 0 | 0 | 0 | 0 | 0 | 62.256 |
| KIDNE2012291 | 0 | 0 | 0 | 0 | 0 | 0 | 83.085 |
| KIDNE2012316 | 0 | 0 | 0 | 0 | 0 | 0 | 59.126 |
| KIDNE2012361 | 0 | 0 | 0 | 0 | 0 | 0 | 100 |
| KIDNE2012440 | 0 | 0 | 0 | 13.230 | 0 | 0 | 6.171 |
| KIDNE2012453 | 0 | 0 | 0 | 0 | 0 | 0 | 100 |
| KIDNE2012563 | 0 | 0 | 0 | 0 | 0 | 0 | 100 |
| KIDNE2012601 | 0 | 0 | 0 | 0 | 0 | 0 | 100 |
| KIDNE2012613 | 0 | 0 | 0 | 0 | 0 | 0 | 100 |
| KIDNE2012710 | 0 | 0 | 0 | 0 | 0 | 0 | 33.012 |
| KIDNE2012745 | 0 | 0 | 0 | 0 | 0 | 0 | 100 |
| KIDNE2012775 | 0 | 0 | 0 | 0 | 0 | 0 | 100 |
| KIDNE2012784 | 0 | 0 | 0 | 0 | 0 | 0 | 59.375 |
| KIDNE2012945 | 0 | 0 | 51.268 | 0 | 0 | 0 | 48.732 |
| KIDNE2013045 | 0 | 0 | 0 | 0 | 0 | 0 | 100 |
| KIDNE2013095 | 0 | 0 | 0 | 0 | 0 | 0 | 100 |
| KIDNE2013158 | 0 | 0 | 0 | 0 | 0 | 0 | 63.240 |
| KIDNE2013218 | 0 | 0 | 0 | 0 | 0 | 0 | 100 |
| KIDNE2013263 | 0 | 0 | 0 | 0 | 0 | 0 | 100 |
| KIDNE2013346 | 0 | 0 | 0 | 0 | 0 | 0 | 72.727 |
| KIDNE2013388 | 0 | 0 | 0 | 0 | 0 | 0 | 100 |
| KIDNE2013413 | 0 | 0 | 0 | 0 | 0 | 0 | 65.363 |
| KIDNE2013489 | 0 | 0 | 0 | 0 | 0 | 0 | 100 |
| KIDNE2013639 | 0 | 0 | 0 | 0 | 0 | 0 | 100 |
| KIDNE2013731 | 0 | 0 | 0 | 0 | 0 | 0 | 100 |
| KIDNE2013734 | 0 | 0 | 0 | 0 | 0 | 0 | 100 |
| KIDNE2013775 | 0 | 0 | 0 | 0 | 0 | 0 | 100 |
| KIDNE2013801 | 0 | 0 | 0 | 0 | 0 | 0 | 100 |
| KIDNE2013845 | 0 | 0 | 4.099 | 0 | 0 | 0 | 3.897 |
| KIDNE2013866 | 0 | 0 | 0 | 0 | 0 | 0 | 84.210 |
| KIDNE2014087 | 0 | 0 | 0 | 0 | 0 | 0 | 100 |
| KIDNE2014112 | 0 | 0 | 0 | 0 | 0 | 0 | 100 |
| KIDNE2014119 | 0 | 0 | 0 | 0 | 0 | 0 | 49.697 |
| KIDNE2014170 | 0 | 0 | 0 | 0 | 0 | 0 | 100 |
| KIDNE2014184 | 0 | 0 | 0 | 0 | 0 | 0 | 100 |
| KIDNE2014268 | 0 | 0 | 0 | 0 | 0 | 0 | 100 |
| KIDNE2014290 | 0 | 0 | 10.285 | 5.240 | 0 | 0 | 2.444 |
| KIDNE2014298 | 0 | 0 | 0 | 0 | 0 | 0 | 100 |
| KIDNE2014320 | 0 | 0 | 0 | 0 | 0 | 0 | 75.867 |
| KIDNE2014325 | 0 | 26.636 | 13.875 | 0 | 0 | 0 | 13.188 |
| KIDNE2014415 | 0 | 0 | 0 | 0 | 0 | 0 | 100 |
| KIDNE2014489 | 0 | 0 | 0 | 0 | 0 | 0 | 100 |
| KIDNE2014496 | 0 | 0 | 0 | 0 | 0 | 0 | 100 |
| KIDNE2014661 | 0 | 0 | 0 | 0 | 0 | 0 | 100 |
| KIDNE2014717 | 0 | 0 | 0 | 0 | 0 | 0 | 100 |
| KIDNE2014789 | 0 | 0 | 0 | 0 | 0 | 0 | 100 |
| KIDNE2014808 | 0 | 0 | 0 | 0 | 0 | 0 | 75.683 |
| KIDNE2014890 | 0 | 0 | 0 | 0 | 0 | 0 | 100 |
| KIDNE2014978 | 0 | 0 | 0 | 0 | 0 | 0 | 77.579 |
| KIDNE2015073 | 0 | 0 | 0 | 0 | 0 | 0 | 100 |
| KIDNE2015221 | 0 | 0 | 0 | 0 | 0 | 0 | 100 |
| KIDNE2015244 | 0 | 0 | 0 | 0 | 0 | 0 | 100 |
| KIDNE2015313 | 0 | 0 | 0 | 0 | 0 | 0 | 100 |
| KIDNE2015433 | 0 | 0 | 0 | 0 | 0 | 0 | 30.805 |
| KIDNE2015445 | 0 | 0 | 0 | 0 | 0 | 0 | 11.977 |
| KIDNE2015483 | 0 | 0 | 0 | 0 | 0 | 0 | 100 |
| KIDNE2015515 | 0 | 0 | 0 | 0 | 0 | 0 | 100 |
| KIDNE2015546 | 0 | 0 | 0 | 0 | 0 | 0 | 48.502 |
| KIDNE2015556 | 0 | 0 | 0 | 0 | 0 | 0 | 100 |
| KIDNE2015598 | 0 | 0 | 0 | 0 | 0 | 0 | 80.699 |
| KIDNE2015660 | 0 | 0 | 0 | 0 | 0 | 0 | 100 |
| KIDNE2015710 | 0 | 0 | 0 | 0 | 0 | 0 | 6.526 |
| KIDNE2015987 | 0 | 0 | 0 | 0 | 0 | 0 | 100 |
| KIDNE2016000 | 0 | 0 | 0 | 0 | 0 | 0 | 100 |
| KIDNE2016036 | 0 | 0 | 0 | 0 | 0 | 0 | 100 |
| KIDNE2016096 | 0 | 0 | 0 | 0 | 0 | 0 | 100 |
| KIDNE2016101 | 0 | 0 | 0 | 0 | 0 | 0 | 83.085 |
| KIDNE2016142 | 0 | 0 | 0 | 0 | 0 | 0 | 100 |
| KIDNE2016188 | 0 | 0 | 0 | 0 | 0 | 0 | 100 |
| KIDNE2016327 | 0 | 0 | 0 | 0 | 0 | 0 | 60.998 |
| KIDNE2016371 | 0 | 0 | 0 | 0 | 0 | 0 | 31.410 |
| KIDNE2016388 | 0 | 0 | 0 | 0 | 0 | 0 | 100 |
| KIDNE2016464 | 0 | 0 | 0 | 0 | 0 | 0 | 100 |
| KIDNE2016539 | 0 | 0 | 0 | 0 | 50.301 | 0 | 49.699 |
| KIDNE2016570 | 0 | 0 | 0 | 0 | 0 | 0 | 84.210 |
| KIDNE2016918 | 0 | 0 | 0 | 0 | 0 | 0 | 100 |
| KIDNE2017007 | 0 | 0 | 0 | 0 | 0 | 0 | 100 |
| KIDNE2017040 | 0 | 0 | 0 | 0 | 0 | 0 | 11.723 |
| KIDNE2017052 | 0 | 0 | 0 | 0 | 0 | 0 | 80.699 |
| KIDNE2017151 | 0 | 0 | 0 | 0 | 0 | 0 | 100 |
| KIDNE2017153 | 0 | 0 | 0 | 0 | 0 | 0 | 83.085 |
| KIDNE2017315 | 0 | 0 | 0 | 0 | 0 | 0 | 100 |
| KIDNE2017332 | 0 | 0 | 0 | 0 | 0 | 0 | 100 |
| KIDNE2017343 | 0 | 0 | 0 | 0 | 0 | 0 | 46.057 |
| KIDNE2017454 | 0 | 0 | 0 | 0 | 0 | 0 | 100 |
| KIDNE2017603 | 0 | 0 | 0 | 0 | 0 | 0 | 100 |
| KIDNE2017956 | 0 | 0 | 0 | 0 | 0 | 0 | 100 |
| KIDNE2018071 | 0 | 0 | 0 | 0 | 0 | 0 | 49.105 |
| KIDNE2018166 | 0 | 0 | 0 | 0 | 0 | 0 | 100 |
| KIDNE2018167 | 0 | 0 | 0 | 0 | 0 | 0 | 100 |
| KIDNE2018217 | 0 | 0 | 0 | 0 | 0 | 0 | 21.156 |
| KIDNE2018254 | 0 | 0 | 0 | 0 | 0 | 0 | 100 |
| KIDNE2018268 | 0 | 0 | 0 | 0 | 0 | 0 | 100 |
| KIDNE2018269 | 0 | 0 | 0 | 0 | 0 | 0 | 100 |
| KIDNE2018287 | 0 | 0 | 0 | 0 | 0 | 0 | 100 |
| KIDNE2018294 | 0 | 0 | 0 | 0 | 0 | 0 | 100 |
| KIDNE2018352 | 0 | 0 | 13.079 | 0 | 0 | 0 | 12.432 |
| KIDNE2018462 | 0 | 0 | 0 | 0 | 0 | 0 | 100 |
| KIDNE2018493 | 0 | 0 | 0 | 0 | 0 | 0 | 12.423 |
| KIDNE2018617 | 0 | 0 | 0 | 0 | 0 | 0 | 100 |
| KIDNE2018678 | 0 | 0 | 0 | 0 | 0 | 0 | 100 |
| KIDNE2018727 | 0 | 0 | 0 | 0 | 0 | 0 | 100 |
| KIDNE2018863 | 0 | 0 | 0 | 0 | 0 | 0 | 100 |
| KIDNE2018891 | 0 | 0 | 0 | 0 | 0 | 0 | 21.260 |
| KIDNE2018989 | 0 | 0 | 0 | 0 | 0 | 0 | 100 |
| KIDNE2018996 | 0 | 0 | 0 | 0 | 0 | 0 | 100 |
| KIDNE2019074 | 0 | 0 | 0 | 0 | 0 | 0 | 100 |
| KIDNE2019187 | 0 | 0 | 0 | 0 | 0 | 0 | 100 |
| LIVER1000079 | 0 | 0 | 0 | 0 | 0 | 0 | 6.109 |
| LIVER1000104 | 0 | 0 | 0 | 0 | 0 | 0 | 43.110 |
| LIVER1000132 | 0 | 0 | 12.847 | 0 | 0 | 0 | 0 |
| LIVER2002842 | 0 | 0 | 14.004 | 0 | 0 | 0 | 0 |
| LIVER2003511 | 0 | 0 | 0 | 0 | 0 | 0 | 28.683 |
| LIVER2006006 | 0 | 5.007 | 0 | 0 | 0 | 0 | 0 |
| MAMGL1000032 | 0 | 1.135 | 0 | 0 | 0.569 | 0 | 1.685 |
| MAMGL1000035 | 0 | 0 | 0 | 0 | 0 | 0 | 0.702 |
| MAMGL1000173 | 0 | 1.866 | 0 | 0 | 0 | 0 | 0 |
| MESAN2000264 | 0 | 13.875 | 0 | 14.729 | 6.953 | 0 | 0 |
| MESAN2000267 | 0 | 5.767 | 1.502 | 0 | 4.335 | 0 | 0 |
| MESAN2000337 | 0 | 55.830 | 0 | 0 | 0 | 0 | 0 |
| MESAN2000572 | 0 | 0 | 0 | 0 | 0 | 0 | 3.564 |
| MESAN2000608 | 0 | 0 | 5.768 | 0 | 0 | 0 | 0 |
| MESAN2001980 | 0 | 0 | 49.727 | 0 | 0 | 0 | 0 |
| MESAN2002086 | 0 | 0 | 1.527 | 18.668 | 0 | 0 | 0 |
| MESAN2002519 | 0 | 0 | 0 | 0 | 0 | 0 | 16.169 |
| MESAN2002724 | 0 | 0 | 0 | 0 | 0 | 25.351 | 0 |
| MESAN2003622 | 0 | 0 | 2.204 | 8.983 | 2.121 | 0 | 0 |
| MESAN2005284 | 0 | 0 | 0 | 36.243 | 17.110 | 0 | 0 |
| MESAN2005689 | 0 | 0 | 0 | 0 | 0 | 0 | 10.816 |
| MESAN2005766 | 0 | 0 | 0 | 0 | 3.480 | 27.109 | 0 |
| MESAN2006563 | 0 | 4.862 | 0 | 0 | 0 | 0 | 0 |
| MESAN2006971 | 0 | 42.308 | 0 | 0 | 0 | 0 | 0 |
| MESAN2008679 | 0 | 0 | 0 | 0 | 24.725 | 0 | 0 |
| MESAN2013845 | 0 | 39.288 | 0 | 0 | 0 | 0 | 0 |
| MESAN2015708 | 0 | 65.504 | 0 | 0 | 0 | 0 | 0 |
| NHNPC2000062 | 0 | 0 | 0 | 0 | 0 | 0 | 7.306 |
| NHNPC2000187 | 0 | 0 | 1.660 | 6.765 | 0 | 0 | 0 |
| NHNPC2000206 | 0 | 0 | 0 | 5.133 | 0 | 0 | 0 |
| NHNPC2001931 | 0 | 0 | 0 | 3.567 | 0 | 0 | 0 |
| NOVAR1000091 | 0 | 0 | 0 | 0 | 6.833 | 0 | 0 |
| NOVAR2000038 | 0 | 0 | 2.278 | 0 | 0 | 0 | 2.166 |
| NT2NE1000004 | 0 | 0 | 30.290 | 0 | 0 | 0 | 0 |
| NT2NE1000163 | 0 | 2.852 | 0 | 0 | 0 | 0 | 0 |
| NT2NE2000174 | 0 | 2.687 | 0 | 2.852 | 4.039 | 0 | 0 |
| NT2NE2000195 | 0 | 0 | 0 | 0 | 5.424 | 0 | 0 |
| NT2NE2000260 | 0 | 0 | 0.443 | 0 | 0 | 3.321 | 0 |
| NT2NE2000575 | 0 | 0 | 2.645 | 0 | 1.697 | 0 | 3.352 |
| NT2NE2000707 | 0 | 0 | 2.455 | 5.002 | 0 | 0 | 3.500 |
| NT2NE2000763 | 0 | 0 | 0 | 8.970 | 0 | 0 | 0 |
| NT2NE2000963 | 0 | 0 | 1.683 | 0 | 0 | 0 | 0.800 |
| NT2NE2001000 | 0 | 0 | 3.156 | 0 | 0 | 0 | 0 |
| NT2NE2001048 | 0 | 10.539 | 0 | 0 | 0 | 0 | 10.436 |
| NT2NE2001176 | 0 | 0 | 0 | 0 | 4.030 | 0 | 0 |
| NT2NE2001435 | 0 | 0 | 7.799 | 0 | 0 | 0 | 0 |
| NT2NE2001530 | 0 | 49.265 | 0 | 0 | 0 | 0 | 0 |
| NT2NE2001655 | 0 | 0 | 0 | 0 | 0 | 0 | 4.881 |
| NT2NE2002870 | 0 | 16.073 | 0 | 0 | 0 | 0 | 0 |
| NT2NE2003393 | 0 | 9.051 | 0 | 0 | 0 | 0 | 0 |
| NT2NE2004519 | 0 | 0 | 0 | 13.393 | 0 | 0 | 0 |
| NT2NE2004716 | 0 | 0 | 7.040 | 0 | 0 | 0 | 0 |
| NT2NE2006103 | 0 | 0 | 31.757 | 0 | 0 | 0 | 0 |
| NT2NE2010842 | 0 | 0 | 0 | 0 | 3.327 | 0 | 0 |
| NT2NE2012790 | 0 | 0 | 0 | 0 | 21.167 | 0 | 0 |
| NT2NE2014104 | 0 | 0 | 0 | 12.545 | 0 | 0 | 0 |
| NT2NE2018180 | 0 | 0 | 0 | 0 | 13.268 | 0 | 0 |
| NT2NE2019076 | 0 | 0 | 0 | 67.346 | 0 | 0 | 0 |
| NT2RI1000027 | 0 | 0 | 3.708 | 0 | 7.135 | 0 | 0 |
| NT2RI1000127 | 0 | 0 | 0 | 0 | 6.404 | 0 | 0 |
| NT2RI2000064 | 0 | 3.790 | 0 | 0 | 3.798 | 0 | 0 |
| NT2RI2000107 | 0 | 0 | 8.496 | 0 | 0 | 0 | 0 |
| NT2RI2000263 | 0 | 0 | 6.274 | 0 | 6.036 | 0 | 0 |
| NT2RI2000282 | 0 | 6.686 | 1.161 | 11.829 | 0 | 0 | 2.207 |
| NT2RI2000284 | 0 | 3.210 | 6.688 | 0 | 1.609 | 0 | 0 |
| NT2RI2000578 | 0 | 0 | 0 | 2.499 | 1.180 | 0 | 0 |
| NT2RI2000671 | 0 | 7.406 | 0 | 0 | 0 | 0 | 3.667 |
| NT2RI2000685 | 0 | 0 | 3.634 | 0 | 0 | 0 | 6.908 |
| NT2RI2000727 | 0 | 1.822 | 0 | 1.934 | 0 | 0 | 0.902 |
| NT2RI2000974 | 0 | 15.188 | 0 | 0 | 0 | 0 | 0 |
| NT2RI2001054 | 0 | 8.379 | 0 | 4.447 | 0 | 0 | 2.074 |
| NT2RI2001385 | 0 | 27.741 | 0 | 0 | 13.902 | 0 | 0 |
| NT2RI2001540 | 0 | 1.202 | 0.626 | 2.127 | 2.009 | 0 | 0.397 |
| NT2RI2001657 | 0 | 7.535 | 3.925 | 0 | 0 | 0 | 20.519 |
| NT2RI2001731 | 0 | 0 | 0 | 0 | 6.683 | 0 | 6.603 |
| NT2RI2001846 | 0 | 34.698 | 0 | 0 | 0 | 0 | 17.180 |
| NT2RI2001859 | 0 | 6.833 | 0 | 0 | 0 | 0 | 0 |
| NT2RI2001910 | 0 | 0 | 27.394 | 0 | 0 | 0 | 0 |
| NT2RI2002091 | 7.063 | 4.250 | 2.607 | 1.704 | 0 | 3.318 | 0.561 |
| NT2RI2002152 | 0 | 0 | 0 | 0 | 8.875 | 0 | 0 |
| NT2RI2002266 | 0 | 0 | 0 | 0 | 0 | 0 | 8.738 |
| NT2RI2002316 | 0 | 0 | 0 | 0 | 2.829 | 0 | 0 |
| NT2RI2002391 | 0 | 0 | 8.923 | 0 | 0 | 0 | 0 |
| NT2RI2002554 | 0 | 0 | 0 | 0 | 0 | 0 | 6.321 |
| NT2RI2002729 | 0 | 14.810 | 0 | 0 | 0 | 57.819 | 0 |
| NT2RI2003184 | 0 | 0 | 0 | 0 | 0 | 0 | 65.735 |
| NT2RI2003304 | 0 | 1.848 | 1.925 | 0 | 0 | 0 | 0.915 |
| NT2RI2003317 | 0 | 0 | 5.781 | 0 | 11.124 | 0 | 0 |
| NT2RI2003344 | 0 | 0 | 7.142 | 0 | 0 | 0 | 0 |
| NT2RI2003419 | 0 | 79.486 | 0 | 0 | 0 | 0 | 0 |
| NT2RI2003695 | 0 | 0 | 2.888 | 0 | 0 | 0 | 0 |
| NT2RI2003738 | 0 | 2.464 | 0.642 | 2.615 | 0.617 | 9.618 | 0 |
| NT2RI2003921 | 0 | 0 | 0 | 0 | 0 | 39.112 | 0 |
| NT2RI2003993 | 0 | 0 | 13.924 | 0 | 0 | 0 | 0 |
| NT2RI2004209 | 0 | 0 | 26.927 | 0 | 0 | 0 | 25.595 |
| NT2RI2004230 | 0 | 0 | 4.208 | 0 | 0 | 0 | 0 |
| NT2RI2004312 | 0 | 0 | 0 | 0 | 53.560 | 0 | 0 |
| NT2RI2004535 | 0 | 13.478 | 0 | 0 | 0 | 0 | 6.673 |
| NT2RI2004608 | 0 | 0 | 0 | 0 | 13.055 | 0 | 0 |
| NT2RI2004884 | 0 | 0 | 0 | 5.775 | 0 | 0 | 0 |
| NT2RI2005150 | 0 | 0 | 5.055 | 0 | 7.294 | 0 | 0 |
| NT2RI2005335 | 0 | 0 | 0 | 0 | 1.366 | 0 | 0 |
| NT2RI2005368 | 0 | 0 | 0 | 0 | 0 | 0 | 7.044 |
| NT2RI2005405 | 0 | 5.930 | 2.059 | 0 | 0 | 0 | 2.936 |
| NT2RI2005713 | 0 | 0 | 0 | 0 | 0 | 0 | 10.311 |
| NT2RI2005723 | 0 | 7.067 | 1.841 | 0 | 1.771 | 0 | 0 |
| NT2RI2005814 | 0 | 0 | 0 | 9.735 | 0 | 0 | 0 |
| NT2RI2005818 | 0 | 0 | 0 | 0 | 8.987 | 0 | 0 |
| NT2RI2006070 | 0 | 0 | 7.538 | 0 | 0 | 0 | 0 |
| NT2RI2006412 | 0 | 5.772 | 3.007 | 0 | 0 | 0 | 0 |
| NT2RI2006553 | 0 | 26.043 | 0 | 0 | 0 | 0 | 12.894 |
| NT2RI2006565 | 0 | 0 | 21.916 | 0 | 0 | 0 | 0 |
| NT2RI2006853 | 0 | 0 | 8.227 | 0 | 0 | 0 | 7.820 |
| NT2RI2006856 | 0 | 0 | 1.718 | 0 | 0 | 0 | 0 |
| NT2RI2007054 | 0 | 0 | 0 | 0 | 0 | 0 | 9.052 |
| NT2RI2007084 | 0 | 22.981 | 11.971 | 8.131 | 0 | 0 | 0 |
| NT2RI2007133 | 0 | 0 | 1.439 | 0 | 0 | 0 | 0 |
| NT2RI2007377 | 0 | 0 | 4.296 | 0 | 0 | 0 | 0 |
| NT2RI2007498 | 0 | 0 | 0 | 6.096 | 0 | 0 | 0 |
| NT2RI2007572 | 0 | 5.261 | 0 | 5.585 | 0 | 0 | 0 |
| NT2RI2007593 | 0 | 23.199 | 0 | 0 | 0 | 0 | 0 |
| NT2RI2007629 | 0 | 0 | 0 | 15.067 | 0 | 0 | 0 |
| NT2RI2007884 | 0 | 0 | 0 | 0 | 8.958 | 0 | 8.851 |
| NT2RI2007987 | 0 | 0 | 0 | 0 | 0 | 0 | 6.277 |
| NT2RI2008045 | 0 | 0 | 0 | 0 | 0 | 0 | 2.707 |
| NT2RI2008336 | 0 | 2.821 | 0 | 0 | 1.414 | 0 | 0 |
| NT2RI2008396 | 0 | 9.311 | 1.617 | 0 | 0 | 12.118 | 4.610 |
| NT2RI2008481 | 64.910 | 0 | 0 | 0 | 0 | 0 | 0 |
| NT2RI2008526 | 0 | 0 | 2.812 | 0 | 2.705 | 0 | 0 |
| NT2RI2008749 | 49.624 | 0 | 0 | 4.226 | 0 | 0 | 0 |
| NT2RI2009037 | 0 | 0 | 3.092 | 6.301 | 0 | 0 | 0 |
| NT2RI2009065 | 0 | 0 | 0 | 3.491 | 1.648 | 0 | 0 |
| NT2RI2009066 | 0 | 0 | 20.105 | 0 | 0 | 0 | 9.555 |
| NT2RI2009173 | 0 | 0 | 4.091 | 0 | 0 | 0 | 0 |
| NT2RI2009194 | 0 | 13.840 | 0 | 0 | 0 | 0 | 0 |
| NT2RI2009239 | 0 | 0 | 5.126 | 0 | 0 | 0 | 0 |
| NT2RI2009406 | 0 | 0 | 0 | 0 | 0 | 0 | 9.808 |
| NT2RI2009583 | 0 | 0 | 0 | 0 | 0 | 0 | 10.920 |
| NT2RI2012350 | 0 | 0 | 0 | 0 | 0 | 11.003 | 0 |
| NT2RI2015342 | 0 | 0 | 0 | 0 | 10.616 | 0 | 0 |
| NT2RI3001348 | 0 | 73.590 | 0 | 0 | 0 | 0 | 0 |
| NT2RI3007543 | 0 | 0 | 0 | 6.341 | 2.994 | 0 | 0 |
| NT2RP6000005 | 0 | 0 | 8.067 | 0 | 0 | 0 | 0 |
| NT2RP6000072 | 0 | 0 | 0 | 12.077 | 0 | 0 | 0 |
| NT2RP6000078 | 0 | 0 | 0 | 0 | 0 | 19.769 | 0 |
| NT2RP6000123 | 0 | 2.756 | 1.436 | 0 | 1.381 | 0 | 1.365 |
| NT2RP7000076 | 0 | 4.291 | 0 | 0 | 0 | 0 | 0 |
| NT2RP7000173 | 0 | 0 | 2.039 | 0 | 0 | 0 | 0 |
| NT2RP7000271 | 0 | 21.355 | 0 | 0 | 0 | 0 | 0 |
| NT2RP7000477 | 0 | 0 | 0 | 0 | 0 | 0 | 6.897 |
| NT2RP7000600 | 0 | 0 | 8.127 | 0 | 0 | 0 | 0 |
| NT2RP7000906 | 0 | 0 | 4.785 | 9.750 | 0 | 0 | 0 |
| NT2RP7001166 | 0 | 0 | 2.743 | 0 | 0 | 0 | 0 |
| NT2RP7001283 | 0 | 0 | 0 | 4.207 | 0 | 15.473 | 0 |
| NT2RP7001962 | 0 | 0 | 9.743 | 0 | 0 | 0 | 0 |
| NT2RP7002449 | 0 | 0 | 0 | 15.099 | 0 | 0 | 0 |
| NT2RP7002829 | 0 | 0 | 32.071 | 0 | 0 | 0 | 0 |
| NT2RP7003688 | 0 | 5.199 | 0 | 0 | 0 | 0 | 0 |
| NT2RP7004348 | 0 | 0 | 0 | 0 | 0 | 0 | 7.879 |
| NT2RP7004373 | 0 | 0 | 0 | 0 | 0 | 0 | 8.206 |
| NT2RP7004428 | 0 | 0 | 12.369 | 0 | 0 | 0 | 0 |
| NT2RP7004728 | 0 | 0 | 0 | 0 | 0 | 0 | 5.480 |
| NT2RP7004751 | 0 | 0 | 0 | 3.498 | 3.303 | 0 | 0 |
| NT2RP7004884 | 0 | 0 | 0 | 0 | 0 | 0 | 9.571 |
| NT2RP7004911 | 0 | 0 | 0 | 0 | 0 | 48.454 | 0 |
| NT2RP7004946 | 0 | 6.062 | 3.157 | 0 | 3.038 | 0 | 0 |
| NT2RP7006141 | 0 | 0 | 0 | 0 | 0 | 0 | 2.575 |
| NT2RP7006717 | 0 | 4.632 | 0 | 0 | 2.321 | 0 | 0 |
| NT2RP7006886 | 0 | 0 | 0 | 0 | 33.560 | 0 | 0 |
| NT2RP7006986 | 0 | 0 | 0 | 0 | 0 | 0 | 13.097 |
| NT2RP7007154 | 0 | 0 | 2.092 | 0 | 0 | 0 | 0 |
| NT2RP7007177 | 0 | 0 | 4.995 | 0 | 4.805 | 0 | 0 |
| NT2RP7007387 | 0 | 0 | 0 | 15.341 | 0 | 0 | 7.156 |
| NT2RP7007610 | 0 | 0 | 10.615 | 0 | 0 | 0 | 0 |
| NT2RP7008015 | 88.555 | 0 | 0 | 0 | 0 | 0 | 0 |
| NT2RP7008190 | 0 | 0 | 0 | 0 | 4.681 | 0 | 4.625 |
| NT2RP7014910 | 0 | 0 | 0 | 0 | 4.219 | 0 | 0 |
| NT2RP7018126 | 0 | 0 | 0 | 0 | 59.416 | 0 | 0 |
| NT2RP7020112 | 0 | 0 | 0 | 0 | 0 | 0 | 59.126 |
| NTONG1000098 | 0 | 0 | 0 | 0 | 0 | 0 | 2.221 |
| NTONG1000246 | 0 | 0 | 11.470 | 11.687 | 0 | 0 | 0 |
| NTONG1000257 | 0 | 7.749 | 0 | 0 | 0 | 0 | 0 |
| NTONG2000800 | 0 | 0 | 3.884 | 0 | 0 | 0 | 1.846 |
| NTONG2001137 | 0 | 0 | 4.198 | 0 | 4.038 | 0 | 0 |
| NTONG2001567 | 0 | 0 | 5.623 | 11.459 | 0 | 0 | 0 |
| NTONG2001612 | 0 | 0 | 4.117 | 0 | 7.922 | 0 | 0 |
| NTONG2001676 | 0 | 0 | 0 | 0 | 25.171 | 0 | 0 |
| NTONG2003839 | 0 | 0 | 0 | 19.596 | 0 | 0 | 0 |
| NTONG2004918 | 0 | 0 | 0 | 0 | 22.850 | 0 | 0 |
| NTONG2005520 | 0 | 4.687 | 0 | 0 | 0 | 0 | 2.321 |
| NTONG2007658 | 0 | 0 | 0 | 0 | 7.061 | 0 | 0 |
| NTONG2008483 | 0 | 0 | 2.930 | 0 | 2.819 | 0 | 0 |
| OCBBF1000086 | 0 | 0 | 0 | 0 | 0 | 0 | 2.669 |
| OCBBF1000114 | 0 | 0 | 0 | 0 | 8.995 | 0 | 0 |
| OCBBF1000188 | 0 | 0 | 0 | 0 | 3.674 | 0 | 0 |
| OCBBF2000467 | 0 | 14.202 | 0 | 0 | 0 | 0 | 0 |
| OCBBF2000522 | 0 | 17.805 | 0 | 0 | 0 | 0 | 0 |
| OCBBF2000824 | 0 | 0 | 0 | 44.912 | 0 | 0 | 0 |
| OCBBF2000846 | 0 | 0 | 0 | 5.470 | 0 | 0 | 0 |
| OCBBF2000986 | 0 | 0 | 0 | 0 | 3.400 | 26.492 | 0 |
| OCBBF2001494 | 0 | 0 | 0 | 0 | 0 | 0 | 73.728 |
| OCBBF2001586 | 0 | 0 | 0 | 0 | 12.652 | 0 | 0 |
| OCBBF2001687 | 0 | 0 | 0 | 0 | 0 | 0 | 6.706 |
| OCBBF2002083 | 0 | 0 | 40.304 | 0 | 0 | 0 | 0 |
| OCBBF2004757 | 0 | 0 | 0 | 0 | 8.745 | 0 | 0 |
| OCBBF2006148 | 0 | 0 | 24.838 | 0 | 0 | 0 | 0 |
| OCBBF2006172 | 0 | 0 | 0 | 0 | 18.501 | 0 | 0 |
| OCBBF2007829 | 0 | 0 | 0 | 4.104 | 1.937 | 0 | 0 |
| OCBBF2008041 | 0 | 14.718 | 0 | 0 | 0 | 0 | 0 |
| OCBBF2008569 | 0 | 0 | 0 | 0 | 73.961 | 0 | 0 |
| OCBBF2008760 | 0 | 0 | 0 | 0 | 58.681 | 0 | 0 |
| OCBBF2009772 | 0 | 8.291 | 0 | 0 | 0 | 0 | 0 |
| OCBBF2010830 | 0 | 0 | 3.227 | 6.577 | 3.105 | 0 | 0 |
| OCBBF2011160 | 0 | 0 | 0 | 0 | 0 | 0 | 60.858 |
| OCBBF2011536 | 0 | 0 | 7.317 | 0 | 0 | 0 | 0 |
| OCBBF2012553 | 0 | 8.258 | 4.302 | 0 | 0 | 0 | 0 |
| OCBBF2013843 | 0 | 0 | 0 | 3.994 | 0 | 0 | 0 |
| OCBBF2014064 | 0 | 0 | 0 | 0 | 0 | 37.548 | 0 |
| OCBBF2014292 | 0 | 0 | 0 | 0 | 3.655 | 0 | 3.611 |
| OCBBF2014541 | 0 | 0 | 28.761 | 0 | 0 | 0 | 0 |
| OCBBF2017035 | 0 | 0 | 0 | 0 | 0 | 0 | 4.226 |
| OCBBF2017893 | 0 | 0 | 6.362 | 0 | 0 | 0 | 0 |
| OCBBF2018707 | 0 | 0 | 0 | 0 | 7.936 | 0 | 0 |
| OCBBF2018956 | 0 | 11.917 | 0 | 0 | 0 | 0 | 0 |
| OCBBF2021020 | 0 | 0 | 0 | 0 | 0 | 73.294 | 0 |
| OCBBF2035226 | 0 | 0 | 0 | 0 | 2.073 | 0 | 0 |
| OCBBF3000323 | 0 | 0 | 12.198 | 0 | 0 | 0 | 0 |
| OCBBF3004487 | 0 | 0 | 0 | 0 | 15.987 | 0 | 0 |
| PEBLM1000174 | 0 | 0 | 0 | 0 | 0 | 0 | 16.672 |
| PEBLM2000147 | 0 | 0 | 0 | 0 | 0 | 35.070 | 0 |
| PEBLM2000222 | 0 | 0 | 0 | 0 | 2.050 | 0 | 0 |
| PEBLM2000267 | 0 | 0 | 0 | 0 | 14.884 | 0 | 0 |
| PEBLM2000308 | 0 | 0 | 7.271 | 0 | 0 | 0 | 0 |
| PEBLM2000395 | 0 | 6.409 | 0 | 0 | 6.423 | 0 | 0 |
| PEBLM2004666 | 0 | 0 | 0 | 0 | 0 | 0 | 12.953 |
| PEBLM2007774 | 0 | 0 | 1.105 | 0 | 0 | 0 | 1.050 |
| PERIC2002452 | 0 | 0 | 0 | 0 | 34.376 | 0 | 0 |
| PLACE5000172 | 0 | 0 | 0 | 0 | 0 | 0 | 13.594 |
| PLACE6000314 | 0 | 0 | 55.942 | 0 | 0 | 0 | 0 |
| PLACE6000379 | 0 | 0 | 1.943 | 1.320 | 0 | 0 | 1.847 |
| PLACE6000463 | 0 | 0 | 28.618 | 0 | 0 | 0 | 0 |
| PLACE6001443 | 0 | 0 | 0 | 0 | 0 | 0 | 6.848 |
| PLACE6001923 | 0 | 44.258 | 0 | 0 | 0 | 0 | 0 |
| PLACE6002084 | 0 | 2.600 | 0 | 0 | 0 | 0 | 2.575 |
| PLACE6002960 | 0 | 0 | 20.354 | 0 | 0 | 0 | 0 |
| PLACE6003038 | 0 | 25.411 | 0 | 0 | 0 | 0 | 0 |
| PLACE6003383 | 0 | 0 | 0 | 8.921 | 0 | 0 | 0 |
| PLACE6004312 | 0 | 0 | 2.212 | 0 | 0 | 0 | 2.103 |
| PLACE6004396 | 0 | 0 | 67.330 | 0 | 0 | 0 | 0 |
| PLACE6006549 | 0 | 0 | 11.715 | 0 | 0 | 0 | 0 |
| PLACE6007436 | 0 | 0 | 0 | 0 | 0 | 0 | 12.525 |
| PLACE6009560 | 0 | 0 | 0 | 80.768 | 0 | 0 | 0 |
| PLACE6010484 | 0 | 0 | 0 | 0 | 0 | 0 | 5.389 |
| PLACE6011057 | 0 | 0 | 0 | 0 | 0 | 0 | 7.857 |
| PLACE6011334 | 0 | 0 | 0 | 0 | 31.714 | 0 | 0 |
| PLACE6013222 | 0 | 0 | 18.072 | 0 | 0 | 0 | 0 |
| PLACE6016383 | 0 | 0 | 23.711 | 0 | 0 | 0 | 0 |
| PLACE6017626 | 0 | 0 | 0 | 0 | 0 | 0 | 49.481 |
| PLACE6018863 | 0 | 0 | 0 | 0 | 0 | 0 | 66.204 |
| PLACE7004103 | 0 | 9.106 | 0 | 0 | 0 | 0 | 0 |
| PROST1000033 | 0 | 0 | 40.409 | 0 | 0 | 0 | 0 |
| PROST1000097 | 0 | 0 | 0 | 0 | 0 | 0 | 2.050 |
| PROST1000120 | 0 | 0 | 12.095 | 0 | 0 | 0 | 0 |
| PROST1000144 | 0 | 22.079 | 0 | 11.718 | 0 | 0 | 0 |
| PROST1000226 | 0 | 0 | 6.562 | 0 | 0 | 0 | 0 |
| PROST1000343 | 0 | 0 | 0 | 0 | 0 | 0 | 9.903 |
| PROST2000036 | 0 | 0 | 0 | 0 | 0 | 77.280 | 0 |
| PROST2000138 | 0 | 2.441 | 1.907 | 3.239 | 0 | 0 | 2.115 |
| PROST2001180 | 0 | 0 | 0 | 0 | 8.761 | 0 | 0 |
| PROST2002651 | 0 | 0 | 21.937 | 0 | 0 | 0 | 0 |
| PROST2003338 | 0 | 0 | 0 | 8.366 | 0 | 0 | 7.804 |
| PROST2003517 | 0 | 0 | 0 | 0 | 18.579 | 0 | 0 |
| PROST2004095 | 0 | 0 | 0 | 3.498 | 0 | 0 | 0 |
| PROST2004270 | 0 | 4.140 | 2.157 | 8.790 | 0 | 0 | 0 |
| PROST2005285 | 0 | 0 | 27.376 | 0 | 0 | 0 | 0 |
| PROST2005604 | 0 | 0 | 0 | 23.249 | 0 | 0 | 0 |
| PROST2005793 | 0 | 0 | 14.383 | 0 | 0 | 0 | 0 |
| PROST2006260 | 0 | 0 | 0 | 0 | 14.368 | 0 | 0 |
| PROST2006536 | 0 | 0 | 0 | 0 | 7.830 | 0 | 0 |
| PROST2006737 | 0 | 17.066 | 0 | 0 | 0 | 0 | 0 |
| PROST2008271 | 0 | 0 | 14.374 | 0 | 0 | 0 | 0 |
| PROST2008489 | 0 | 0 | 0 | 19.362 | 0 | 0 | 0 |
| PROST2008770 | 0 | 0 | 0 | 5.830 | 0 | 0 | 0 |
| PROST2010782 | 0 | 0 | 0.892 | 0 | 0 | 0 | 1.696 |
| PROST2011577 | 0 | 0 | 0 | 0 | 3.631 | 0 | 0 |
| PROST2012007 | 0 | 0 | 0 | 8.483 | 4.005 | 31.201 | 0 |
| PROST2012353 | 0 | 0 | 0 | 0 | 0 | 0 | 32.771 |
| PROST2015287 | 0 | 0 | 0 | 0 | 37.880 | 0 | 0 |
| PROST2015464 | 0 | 0 | 0 | 0 | 0 | 0 | 41.857 |
| PROST2016195 | 0 | 0 | 0 | 0 | 0 | 0 | 20.387 |
| PROST2017203 | 0 | 0 | 4.763 | 0 | 0 | 0 | 0 |
| PROST2017529 | 0 | 0 | 0 | 18.971 | 0 | 0 | 0 |
| PROST2017692 | 0 | 0 | 0 | 16.523 | 2.600 | 0 | 0 |
| PROST2018583 | 0 | 0 | 33.898 | 0 | 0 | 0 | 0 |
| PUAEN1000065 | 0 | 0 | 2.457 | 0 | 0 | 0 | 4.670 |
| PUAEN1000164 | 34.934 | 0 | 0 | 0 | 2.809 | 0 | 0 |
| PUAEN1000239 | 0 | 0 | 0 | 0 | 10.939 | 0 | 0 |
| PUAEN2000374 | 28.090 | 2.254 | 0 | 2.392 | 0 | 8.798 | 0 |
| PUAEN2000497 | 0 | 18.152 | 0 | 0 | 0 | 0 | 0 |
| PUAEN2000535 | 70.586 | 0 | 0 | 0 | 0 | 0 | 0 |
| PUAEN2003018 | 0 | 0 | 12.294 | 0 | 0 | 0 | 46.744 |
| PUAEN2003954 | 0 | 0 | 0 | 0 | 38.474 | 0 | 0 |
| PUAEN2004400 | 0 | 0 | 0 | 0 | 25.421 | 0 | 0 |
| PUAEN2008939 | 0 | 0 | 12.588 | 0 | 0 | 0 | 0 |
| SALGL1000157 | 0 | 0 | 1.431 | 1.944 | 0 | 0 | 0 |
| SKMUS1000177 | 0 | 0 | 0 | 0 | 8.332 | 0 | 0 |
| SKMUS1000186 | 0 | 0 | 1.472 | 3.000 | 0 | 0 | 0 |
| SKMUS2000361 | 0 | 0 | 0 | 0 | 0 | 0 | 3.728 |
| SKMUS2000484 | 0 | 0 | 6.441 | 0 | 0 | 0 | 0 |
| SKMUS2000931 | 0 | 3.831 | 0 | 0 | 1.920 | 0 | 0 |
| SKMUS2001147 | 0 | 0 | 0 | 0 | 19.562 | 0 | 0 |
| SKMUS2001454 | 0 | 0 | 2.476 | 0 | 2.382 | 0 | 1.177 |
| SKMUS2001528 | 0 | 0 | 0 | 0 | 0 | 0 | 4.376 |
| SKMUS2001634 | 0 | 0 | 4.802 | 0 | 0 | 0 | 0 |
| SKMUS2002084 | 0 | 0 | 0 | 0 | 22.031 | 0 | 0 |
| SKNMC1000110 | 0 | 0 | 0 | 0 | 0 | 0 | 12.622 |
| SKNMC1000168 | 0 | 0 | 0 | 0 | 0 | 0 | 2.919 |
| SKNMC2000065 | 0 | 7.601 | 0 | 0 | 0 | 0 | 0 |
| SKNMC2000097 | 0 | 6.277 | 0 | 0 | 0 | 0 | 0 |
| SKNMC2000322 | 0 | 0 | 0 | 0 | 9.966 | 0 | 0 |
| SKNMC2000593 | 0 | 0 | 31.996 | 0 | 0 | 0 | 0 |
| SKNMC2000635 | 0 | 3.789 | 0.658 | 6.703 | 0 | 0 | 0 |
| SKNMC2000649 | 0 | 6.424 | 6.692 | 0 | 0 | 0 | 0 |
| SKNMC2000698 | 0 | 14.544 | 0 | 0 | 0 | 0 | 0 |
| SKNMC2001503 | 0 | 0 | 11.374 | 0 | 0 | 0 | 0 |
| SKNSH1000002 | 0 | 0 | 0 | 0 | 0 | 0 | 5.011 |
| SKNSH2000151 | 0 | 0 | 0 | 0 | 19.196 | 0 | 18.966 |
| SKNSH2000347 | 0 | 0 | 0 | 0 | 7.917 | 0 | 0 |
| SKNSH2000716 | 0 | 0 | 0 | 0 | 24.462 | 0 | 0 |
| SKNSH2000971 | 0 | 50.629 | 0 | 0 | 0 | 0 | 0 |
| SKNSH2006234 | 0 | 24.647 | 0 | 0 | 0 | 0 | 0 |
| SMINT1000016 | 0 | 0 | 0 | 0 | 0 | 0 | 25.659 |
| SMINT1000048 | 0 | 0 | 28.889 | 0 | 0 | 0 | 0 |
| SMINT1000131 | 0 | 0 | 3.359 | 13.690 | 0 | 0 | 0 |
| SMINT2000007 | 0 | 0 | 22.061 | 0 | 0 | 0 | 0 |
| SMINT2000018 | 0 | 0 | 15.442 | 0 | 0 | 0 | 0 |
| SMINT2000159 | 0 | 0 | 0 | 0 | 0 | 0 | 19.053 |
| SMINT2000239 | 0 | 0 | 30.764 | 0 | 0 | 0 | 0 |
| SMINT2000277 | 0 | 0 | 33.247 | 0 | 0 | 0 | 0 |
| SMINT2000396 | 0 | 0 | 4.490 | 0 | 0 | 0 | 0 |
| SMINT2000441 | 0 | 0 | 1.656 | 0 | 0 | 0 | 3.147 |
| SMINT2000602 | 0 | 0 | 2.016 | 0 | 0 | 15.111 | 0 |
| SMINT2000659 | 0 | 0 | 0 | 0 | 0 | 0 | 0.969 |
| SMINT2000933 | 0 | 0 | 3.738 | 0 | 0 | 0 | 3.553 |
| SMINT2001812 | 0 | 0 | 0 | 0 | 0 | 0 | 27.880 |
| SMINT2002314 | 0 | 0 | 0 | 0 | 0 | 33.271 | 0 |
| SMINT2002882 | 0 | 0 | 0 | 0 | 10.246 | 0 | 0 |
| SMINT2002884 | 0 | 0 | 13.548 | 0 | 0 | 0 | 0 |
| SMINT2003074 | 0 | 0 | 5.028 | 0 | 0 | 0 | 0 |
| SMINT2003169 | 0 | 3.312 | 1.725 | 0 | 0 | 12.930 | 0 |
| SMINT2003340 | 0 | 0 | 0 | 0 | 0 | 0 | 10.243 |
| SMINT2004023 | 0 | 0 | 5.594 | 0 | 0 | 0 | 0 |
| SMINT2004144 | 0 | 0 | 0 | 0 | 0 | 0 | 7.912 |
| SMINT2004280 | 0 | 0 | 0 | 0 | 0 | 0 | 44.418 |
| SMINT2005368 | 0 | 0 | 0 | 0 | 8.288 | 0 | 0 |
| SMINT2008960 | 0 | 0 | 0 | 0 | 0 | 0 | 4.770 |
| SMINT2010901 | 0 | 24.729 | 0 | 0 | 0 | 0 | 0 |
| SMINT2012122 | 0 | 0 | 12.822 | 0 | 0 | 0 | 0 |
| SPLEN1000106 | 0 | 0 | 0 | 0 | 0 | 0 | 8.115 |
| SPLEN1000144 | 0 | 0 | 38.347 | 0 | 0 | 0 | 0 |
| SPLEN1000165 | 0 | 0 | 0 | 0 | 0 | 0 | 17.398 |
| SPLEN1000166 | 0 | 0 | 8.292 | 0 | 0 | 0 | 0 |
| SPLEN2000047 | 0 | 0 | 0 | 0 | 0 | 0 | 57.532 |
| SPLEN2000134 | 0 | 0 | 0 | 0 | 0 | 0 | 73.057 |
| SPLEN2000222 | 0 | 0 | 44.799 | 0 | 0 | 0 | 0 |
| SPLEN2000255 | 0 | 0 | 5.633 | 0 | 0 | 0 | 0 |
| SPLEN2000258 | 0 | 0 | 0 | 32.721 | 0 | 0 | 0 |
| SPLEN2000348 | 0 | 0 | 10.260 | 0 | 0 | 0 | 0 |
| SPLEN2000505 | 0 | 0 | 0 | 3.150 | 0 | 0 | 0 |
| SPLEN2000874 | 0 | 0 | 1.788 | 0 | 0 | 0 | 0 |
| SPLEN2001157 | 0 | 0 | 0 | 0 | 9.705 | 0 | 0 |
| SPLEN2001245 | 98.056 | 0 | 0 | 0 | 0 | 0 | 0 |
| SPLEN2001761 | 0 | 0 | 0 | 0 | 0 | 0 | 37.096 |
| SPLEN2002467 | 0 | 0 | 0 | 24.349 | 0 | 0 | 0 |
| SPLEN2002744 | 0 | 0 | 0 | 16.670 | 0 | 0 | 0 |
| SPLEN2004181 | 0 | 0 | 28.873 | 0 | 0 | 0 | 0 |
| SPLEN2004220 | 0 | 0 | 0 | 0 | 0 | 79.064 | 0 |
| SPLEN2004880 | 0 | 0 | 1.080 | 0 | 0 | 0 | 0 |
| SPLEN2004984 | 0 | 0 | 9.634 | 0 | 0 | 0 | 0 |
| SPLEN2005429 | 0 | 0 | 26.875 | 0 | 0 | 0 | 0 |
| SPLEN2005560 | 92.383 | 0 | 0 | 0 | 0 | 0 | 0 |
| SPLEN2005806 | 0 | 0 | 0 | 9.141 | 0 | 0 | 0 |
| SPLEN2006143 | 0 | 0 | 0 | 0 | 0 | 61.507 | 0 |
| SPLEN2006305 | 0 | 0 | 2.317 | 0 | 0 | 0 | 0 |
| SPLEN2006374 | 0 | 0 | 0 | 0 | 10.726 | 0 | 5.299 |
| SPLEN2007498 | 0 | 0 | 0 | 19.560 | 0 | 0 | 0 |
| SPLEN2008460 | 0 | 0 | 0 | 0 | 0 | 36.014 | 0 |
| SPLEN2010195 | 0 | 0 | 1.423 | 0 | 0 | 0 | 0 |
| SPLEN2011737 | 0 | 0 | 0 | 0 | 0 | 0 | 9.083 |
| SPLEN2012523 | 0 | 0 | 0 | 0 | 7.535 | 0 | 0 |
| SPLEN2012611 | 0 | 0 | 0 | 0 | 0 | 0 | 50.050 |
| SPLEN2012800 | 29.977 | 0 | 1.253 | 0 | 0 | 0 | 0 |
| SPLEN2013503 | 0 | 0 | 18.412 | 0 | 0 | 0 | 8.750 |
| SPLEN2013936 | 0 | 0 | 0 | 0 | 0 | 0 | 23.261 |
| SPLEN2014711 | 0 | 0 | 0 | 19.823 | 0 | 72.911 | 0 |
| SPLEN2014911 | 0 | 0 | 0 | 0 | 0 | 29.002 | 0 |
| SPLEN2015310 | 0 | 0 | 0 | 0 | 8.090 | 0 | 0 |
| SPLEN2015730 | 0 | 0 | 51.319 | 0 | 0 | 0 | 0 |
| SPLEN2016743 | 0 | 0 | 21.029 | 0 | 0 | 0 | 0 |
| SPLEN2016972 | 0 | 0 | 0 | 15.156 | 0 | 0 | 0 |
| SPLEN2017351 | 0 | 0 | 0 | 0 | 10.613 | 0 | 0 |
| SPLEN2017620 | 0 | 0 | 18.800 | 0 | 0 | 0 | 0 |
| SPLEN2017918 | 0 | 0 | 3.344 | 0 | 0 | 0 | 0 |
| SPLEN2021194 | 0 | 0 | 12.373 | 0 | 0 | 0 | 0 |
| SPLEN2028466 | 0 | 0 | 0 | 0 | 0 | 0 | 5.769 |
| SPLEN2028914 | 0 | 0 | 10.242 | 0 | 0 | 0 | 0 |
| SPLEN2029912 | 0 | 0 | 0 | 0 | 0 | 44.906 | 0 |
| SPLEN2031547 | 0 | 0 | 5.775 | 0 | 0 | 0 | 0 |
| SPLEN2037722 | 0 | 0 | 0 | 0 | 0 | 45.295 | 0 |
| SPLEN2038473 | 0 | 0 | 50.451 | 0 | 0 | 0 | 0 |
| SPLEN2041306 | 0 | 0 | 28.248 | 0 | 0 | 0 | 0 |
| SPLEN2042920 | 0 | 0 | 0 | 0 | 0 | 74.811 | 0 |
| STOMA1000047 | 0 | 0 | 11.622 | 0 | 0 | 0 | 22.094 |
| STOMA1000189 | 0 | 0 | 0 | 0 | 0 | 0 | 16.356 |
| STOMA2000257 | 0 | 0 | 7.240 | 0 | 0 | 0 | 0 |
| STOMA2000529 | 0 | 50.852 | 0 | 0 | 0 | 0 | 0 |
| STOMA2001389 | 0 | 0 | 21.183 | 0 | 0 | 0 | 0 |
| STOMA2002166 | 0 | 0 | 4.292 | 0 | 4.129 | 0 | 0 |
| SYNOV1000045 | 0 | 0 | 25.765 | 0 | 0 | 0 | 0 |
| SYNOV1000124 | 0 | 0 | 0 | 8.315 | 0 | 0 | 0 |
| SYNOV2001144 | 0 | 0 | 0 | 0 | 0 | 38.881 | 0 |
| SYNOV2001239 | 0 | 0 | 6.905 | 0 | 0 | 0 | 0 |
| SYNOV2001374 | 0 | 0 | 13.436 | 0 | 12.926 | 0 | 0 |
| SYNOV2009172 | 0 | 3.664 | 0 | 0 | 1.836 | 0 | 0 |
| SYNOV4001153 | 0 | 16.331 | 0 | 0 | 0 | 0 | 0 |
| SYNOV4007671 | 0 | 0 | 2.689 | 0 | 0 | 0 | 2.556 |
| TBAES2000059 | 0 | 0 | 5.527 | 0 | 0 | 0 | 5.253 |
| TBAES2001258 | 0 | 0 | 0 | 0 | 0 | 0 | 33.137 |
| TBAES2007428 | 0 | 37.819 | 0 | 0 | 0 | 0 | 0 |
| TBAES2009387 | 0 | 0 | 0 | 0 | 1.886 | 0 | 0 |
| TCERX2000431 | 0 | 0 | 7.705 | 15.701 | 14.824 | 0 | 0 |
| TESOP1000127 | 0 | 0 | 34.899 | 0 | 0 | 0 | 0 |
| TESTI1000023 | 0 | 0 | 3.076 | 6.268 | 0 | 0 | 0 |
| TESTI1000070 | 0 | 0 | 0 | 0 | 0 | 0 | 12.588 |
| TESTI1000168 | 0 | 0 | 11.494 | 0 | 0 | 0 | 0 |
| TESTI2001099 | 0 | 0 | 0 | 3.663 | 0 | 0 | 1.708 |
| TESTI2001120 | 84.853 | 0 | 0 | 0 | 0 | 0 | 0 |
| TESTI2001153 | 0 | 2.804 | 0 | 0 | 0 | 0 | 0 |
| TESTI2001269 | 0 | 3.844 | 0 | 0 | 1.926 | 15.006 | 1.903 |
| TESTI2001829 | 74.526 | 0 | 0 | 0 | 0 | 0 | 0 |
| TESTI2002632 | 0 | 0 | 39.711 | 0 | 0 | 0 | 0 |
| TESTI2002707 | 0 | 0 | 0 | 0 | 0 | 0 | 11.553 |
| TESTI2002866 | 0 | 0 | 0 | 0 | 0 | 0 | 37.093 |
| TESTI2003280 | 0 | 0 | 0 | 0 | 14.474 | 0 | 0 |
| TESTI2003325 | 0 | 0 | 15.522 | 0 | 14.933 | 0 | 0 |
| TESTI2003533 | 0 | 0 | 0 | 0 | 0 | 23.834 | 0 |
| TESTI2003625 | 0 | 0 | 28.073 | 0 | 0 | 0 | 0 |
| TESTI2004031 | 0 | 0 | 0 | 0 | 4.244 | 0 | 1.398 |
| TESTI2004431 | 0 | 0 | 0 | 0 | 0 | 0 | 29.162 |
| TESTI2004712 | 99.261 | 0 | 0 | 0 | 0 | 0 | 0 |
| TESTI2004737 | 0 | 0 | 6.497 | 0 | 0 | 0 | 0 |
| TESTI2005017 | 0 | 0 | 0 | 0 | 11.653 | 0 | 0 |
| TESTI2005112 | 0 | 0 | 0 | 0 | 0 | 0 | 67.827 |
| TESTI2005173 | 0 | 0 | 52.879 | 0 | 0 | 0 | 0 |
| TESTI2005408 | 0 | 24.949 | 0 | 0 | 0 | 0 | 0 |
| TESTI2005743 | 0 | 0 | 0 | 0 | 7.751 | 0 | 0 |
| TESTI2005788 | 0 | 0 | 16.963 | 0 | 0 | 0 | 0 |
| TESTI2005908 | 0 | 11.087 | 0 | 11.769 | 0 | 0 | 0 |
| TESTI2006097 | 0 | 0 | 0 | 78.748 | 0 | 0 | 0 |
| TESTI2006120 | 0 | 0 | 17.800 | 0 | 0 | 0 | 16.919 |
| TESTI2006453 | 0 | 0 | 3.087 | 0 | 0 | 0 | 0 |
| TESTI2006588 | 0 | 0 | 3.971 | 0 | 0 | 0 | 3.775 |
| TESTI2006748 | 0 | 0 | 12.617 | 0 | 0 | 0 | 0 |
| TESTI2007311 | 0 | 0 | 0 | 0 | 0 | 0 | 13.412 |
| TESTI2007998 | 0 | 11.133 | 0 | 11.818 | 0 | 0 | 0 |
| TESTI2008233 | 0 | 0 | 0 | 0 | 0 | 0 | 45.847 |
| TESTI2008240 | 0 | 0 | 0 | 0 | 0 | 0 | 1.744 |
| TESTI2008840 | 0 | 0 | 0 | 0 | 72.965 | 0 | 0 |
| TESTI2009423 | 0 | 0 | 59.311 | 0 | 0 | 0 | 0 |
| TESTI2009520 | 0 | 0 | 0 | 5.605 | 0 | 20.616 | 10.458 |
| TESTI2009577 | 0 | 0 | 0 | 0 | 6.236 | 0 | 0 |
| TESTI2009785 | 0 | 0 | 5.262 | 0 | 0 | 0 | 0 |
| TESTI2009977 | 0 | 0 | 0 | 0 | 0 | 0 | 84.210 |
| TESTI2011605 | 0 | 0 | 13.220 | 0 | 0 | 0 | 0 |
| TESTI2012289 | 0 | 0 | 0 | 0 | 0 | 0 | 30.091 |
| TESTI2012778 | 0 | 0 | 0 | 0 | 1.304 | 0 | 0 |
| TESTI2015213 | 0 | 3.614 | 3.765 | 3.836 | 0 | 0 | 0 |
| TESTI2015626 | 0 | 0 | 2.412 | 0 | 2.321 | 0 | 0 |
| TESTI2017954 | 0 | 9.329 | 0 | 0 | 0 | 0 | 0 |
| TESTI2018462 | 0 | 0 | 10.365 | 0 | 0 | 0 | 0 |
| TESTI2018611 | 92.200 | 0 | 0 | 0 | 0 | 0 | 0 |
| TESTI2024844 | 0 | 0 | 0 | 0 | 4.042 | 0 | 0 |
| TESTI2026215 | 0 | 0 | 0 | 0 | 0 | 0 | 24.148 |
| TESTI2027271 | 0 | 0 | 0 | 39.466 | 0 | 0 | 0 |
| TESTI2033441 | 0 | 0 | 8.049 | 0 | 0 | 0 | 0 |
| TESTI2034916 | 0 | 0 | 0 | 56.816 | 0 | 0 | 0 |
| TESTI2034940 | 0 | 0 | 1.911 | 3.894 | 1.838 | 0 | 0.908 |
| TESTI2040094 | 0 | 0 | 0 | 91.958 | 0 | 0 | 0 |
| TESTI2046456 | 0 | 0 | 1.698 | 0 | 0 | 0 | 3.227 |
| TESTI2051177 | 0 | 0 | 0 | 0 | 84.370 | 0 | 0 |
| TESTI4000014 | 0 | 0 | 0.655 | 0 | 0.630 | 4.909 | 1.245 |
| TESTI4002799 | 38.761 | 0 | 0 | 0 | 0 | 0 | 0 |
| TESTI4003703 | 0 | 0 | 16.229 | 0 | 0 | 0 | 0 |
| TESTI4010851 | 0 | 3.849 | 0 | 0 | 0 | 0 | 0 |
| TESTI4013441 | 0 | 2.209 | 0.575 | 0 | 0.553 | 0 | 0.547 |
| TESTI4013474 | 0 | 0 | 3.790 | 0 | 0 | 0 | 0 |
| TESTI4037156 | 0 | 0 | 2.030 | 0 | 0.976 | 0 | 0 |
| TESTI4043140 | 0 | 0 | 10.170 | 0 | 0 | 0 | 0 |
| TESTI4044704 | 0 | 0 | 18.694 | 0 | 0 | 0 | 0 |
| THYMU1000016 | 0 | 0 | 0 | 0 | 2.727 | 0 | 0 |
| THYMU1000041 | 0 | 0 | 0 | 0 | 0 | 0 | 8.290 |
| THYMU1000109 | 0 | 0 | 2.887 | 0 | 0 | 0 | 2.744 |
| THYMU1000359 | 0 | 0 | 0 | 0 | 0 | 0 | 1.869 |
| THYMU1000374 | 0 | 0 | 0 | 0 | 0 | 0 | 5.222 |
| THYMU1000394 | 0 | 0 | 18.030 | 0 | 0 | 0 | 0 |
| THYMU1000428 | 0 | 0 | 2.085 | 0 | 0 | 0 | 1.982 |
| THYMU1000473 | 0 | 0 | 0 | 0 | 0 | 91.440 | 0 |
| THYMU1000499 | 0 | 40.188 | 0 | 0 | 20.139 | 0 | 0 |
| THYMU2000057 | 0 | 0 | 4.974 | 0 | 0 | 0 | 0 |
| THYMU2000300 | 0 | 0 | 0 | 21.836 | 0 | 0 | 0 |
| THYMU2000369 | 0 | 0 | 0 | 0 | 0 | 0 | 62.676 |
| THYMU2000436 | 0 | 0 | 6.759 | 0 | 6.502 | 0 | 0 |
| THYMU2000702 | 0 | 0 | 0 | 0 | 0 | 86.018 | 0 |
| THYMU2000775 | 0 | 0 | 34.340 | 0 | 0 | 0 | 0 |
| THYMU2000946 | 0 | 0 | 0 | 10.814 | 0 | 0 | 0 |
| THYMU2001018 | 0 | 0 | 33.126 | 0 | 0 | 0 | 0 |
| THYMU2002080 | 0 | 0 | 54.584 | 0 | 0 | 0 | 0 |
| THYMU2002583 | 0 | 3.649 | 0 | 3.874 | 0 | 0 | 1.807 |
| THYMU2002745 | 0 | 0 | 0 | 0 | 13.509 | 0 | 0 |
| THYMU2003012 | 0 | 0 | 0 | 6.550 | 0 | 0 | 0 |
| THYMU2003446 | 0 | 0 | 8.748 | 0 | 0 | 0 | 0 |
| THYMU2003891 | 0 | 0 | 1.070 | 0 | 0 | 0 | 0 |
| THYMU2003981 | 0 | 0 | 1.915 | 0 | 0 | 0 | 0 |
| THYMU2004410 | 0 | 0 | 14.055 | 0 | 0 | 0 | 0 |
| THYMU2004916 | 0 | 0 | 11.447 | 0 | 0 | 0 | 5.440 |
| THYMU2006505 | 0 | 0 | 0 | 10.203 | 9.634 | 0 | 0 |
| THYMU2007415 | 0 | 0 | 8.875 | 0 | 0 | 0 | 0 |
| THYMU2007467 | 0 | 0 | 14.815 | 0 | 0 | 0 | 0 |
| THYMU2007729 | 0 | 0 | 17.926 | 0 | 0 | 0 | 17.039 |
| THYMU2009658 | 0 | 0 | 0 | 0 | 3.708 | 0 | 0 |
| THYMU2009792 | 0 | 0 | 0 | 0 | 0 | 76.990 | 0 |
| THYMU2012401 | 0 | 0 | 0 | 0 | 0 | 0 | 80.699 |
| THYMU2013136 | 0 | 5.759 | 0 | 0 | 0 | 0 | 0 |
| THYMU2013170 | 0 | 0 | 0 | 0 | 80.886 | 0 | 0 |
| THYMU2013916 | 0 | 7.810 | 4.068 | 0 | 0 | 0 | 7.734 |
| THYMU2015775 | 0 | 0 | 81.477 | 0 | 0 | 0 | 0 |
| THYMU2022660 | 0 | 0 | 0 | 0 | 80.886 | 0 | 0 |
| THYMU2027125 | 0 | 0 | 0 | 0 | 0.632 | 0 | 0 |
| THYMU2032014 | 0 | 0 | 0 | 0 | 0 | 0 | 57.532 |
| THYMU2032696 | 92.236 | 0 | 0 | 0 | 0 | 0 | 0 |
| THYMU2033059 | 0 | 0 | 81.477 | 0 | 0 | 0 | 0 |
| THYMU3005629 | 0 | 0 | 55.420 | 0 | 0 | 0 | 0 |
| THYMU3015759 | 0 | 0 | 0 | 8.415 | 0 | 0 | 0 |
| THYMU3032867 | 0 | 0 | 0 | 0 | 0 | 0 | 44.871 |
| THYMU3033626 | 0 | 0 | 20.615 | 0 | 0 | 0 | 0 |
| THYMU3034671 | 0 | 0 | 8.747 | 0 | 0 | 0 | 0 |
| THYMU3041428 | 0 | 0 | 0.935 | 0 | 0 | 0 | 0 |
| TKIDN2002738 | 0 | 2.953 | 0 | 0 | 0 | 0 | 1.462 |
| TKIDN2005487 | 63.052 | 0 | 2.635 | 0 | 0 | 0 | 0 |
| TKIDN2011289 | 0 | 0 | 0 | 0 | 21.094 | 0 | 0 |
| TRACH1000030 | 0 | 0 | 2.530 | 5.156 | 0 | 0 | 4.810 |
| TRACH1000063 | 0 | 0 | 0 | 0 | 7.589 | 0 | 0 |
| TRACH2000045 | 0 | 0 | 0 | 0 | 0 | 0 | 9.587 |
| TRACH2000079 | 0 | 7.629 | 0 | 0 | 0 | 0 | 0 |
| TRACH2000250 | 0 | 0 | 0 | 0 | 0 | 0 | 64.083 |
| TRACH2000321 | 0 | 3.460 | 1.802 | 7.344 | 0 | 0 | 1.713 |
| TRACH2000461 | 0 | 0 | 6.289 | 0 | 0 | 0 | 0 |
| TRACH2000702 | 0 | 0 | 14.400 | 0 | 0 | 0 | 0 |
| TRACH2000780 | 0 | 0 | 3.206 | 0 | 0 | 0 | 3.047 |
| TRACH2000926 | 0 | 0 | 10.233 | 0 | 0 | 0 | 0 |
| TRACH2000959 | 0 | 0 | 0.895 | 0 | 0 | 0 | 0 |
| TRACH2000972 | 0 | 0 | 0 | 0 | 0 | 0 | 4.132 |
| TRACH2001021 | 0 | 0 | 1.536 | 0 | 0 | 0 | 0 |
| TRACH2001101 | 0 | 0 | 19.498 | 0 | 0 | 0 | 9.267 |
| TRACH2001289 | 0 | 2.393 | 0 | 0 | 1.199 | 0 | 1.185 |
| TRACH2001314 | 0 | 0 | 0 | 0 | 6.449 | 0 | 0 |
| TRACH2001341 | 0 | 0 | 23.377 | 0 | 0 | 0 | 0 |
| TRACH2001432 | 0 | 0 | 0 | 8.314 | 0 | 0 | 0 |
| TRACH2001478 | 0 | 0 | 0 | 0 | 0 | 15.958 | 0 |
| TRACH2001684 | 0 | 0 | 0 | 0 | 0 | 0 | 62.100 |
| TRACH2001810 | 0 | 5.468 | 0 | 0 | 5.480 | 0 | 0 |
| TRACH2002092 | 0 | 19.765 | 0 | 0 | 0 | 0 | 0 |
| TRACH2002537 | 0 | 13.060 | 0 | 13.863 | 0 | 0 | 3.233 |
| TRACH2002664 | 0 | 0 | 5.582 | 0 | 0 | 0 | 0 |
| TRACH2002847 | 0 | 0 | 0 | 33.924 | 0 | 0 | 0 |
| TRACH2003272 | 0 | 0 | 0 | 0 | 0 | 0 | 12.917 |
| TRACH2003347 | 0 | 0 | 5.827 | 0 | 5.606 | 0 | 0 |
| TRACH2005800 | 0 | 0 | 0 | 35.963 | 0 | 0 | 0 |
| TRACH2005811 | 0 | 0 | 3.868 | 0 | 0 | 0 | 0 |
| TRACH2007399 | 0 | 3.317 | 0 | 7.041 | 0 | 0 | 0 |
| TRACH2009291 | 0 | 0 | 76.605 | 0 | 0 | 0 | 0 |
| TRACH2009851 | 0 | 0 | 55.151 | 0 | 0 | 0 | 0 |
| TRACH2010634 | 0 | 0 | 0 | 0 | 61.166 | 0 | 0 |
| TRACH2011302 | 0 | 86.275 | 0 | 0 | 0 | 0 | 0 |
| TRACH2012376 | 0 | 0 | 0 | 20.060 | 0 | 0 | 0 |
| TRACH2013081 | 0 | 0 | 0 | 86.967 | 0 | 0 | 0 |
| TRACH2014077 | 0 | 0 | 0 | 0 | 12.003 | 0 | 23.718 |
| TRACH2014124 | 0 | 0 | 3.786 | 0 | 0 | 0 | 0 |
| TRACH2014442 | 0 | 31.705 | 0 | 0 | 0 | 0 | 0 |
| TRACH2014997 | 0 | 24.910 | 0 | 0 | 0 | 0 | 0 |
| TRACH2015654 | 0 | 0 | 76.605 | 0 | 0 | 0 | 0 |
| TRACH2016317 | 0 | 0 | 0 | 0 | 82.533 | 0 | 0 |
| TRACH2018317 | 0 | 0 | 10.745 | 0 | 0 | 0 | 0 |
| TRACH2018446 | 0 | 0 | 15.339 | 0 | 0 | 0 | 0 |
| TRACH2019672 | 0 | 0 | 76.605 | 0 | 0 | 0 | 0 |
| TRACH2025535 | 0 | 0 | 0 | 4.339 | 4.097 | 0 | 0 |
| TRACH3000692 | 0 | 0 | 0 | 0 | 0 | 0 | 16.340 |
| TRACH3002192 | 0 | 4.391 | 0 | 0 | 2.201 | 0 | 0 |
| TRACH3004068 | 0 | 0 | 5.227 | 0 | 0 | 0 | 0 |
| TRACH3008093 | 0 | 34.493 | 0 | 18.307 | 0 | 0 | 0 |
| TRACH3022198 | 0 | 0 | 30.484 | 0 | 0 | 0 | 0 |
| UMVEN1000186 | 0 | 1.860 | 0 | 0 | 0 | 0 | 0 |
| UMVEN2000354 | 0 | 0 | 0 | 0 | 2.906 | 0 | 0 |
| UTERU1000384 | 0 | 0 | 0 | 0 | 25.149 | 0 | 0 |
| UTERU2000095 | 0 | 2.914 | 0 | 3.093 | 0 | 0 | 0 |
| UTERU2000263 | 0 | 0 | 0 | 3.830 | 0 | 0 | 0 |
| UTERU2000537 | 0 | 0 | 0 | 0 | 0 | 0 | 17.887 |
| UTERU2000696 | 0 | 0 | 0 | 21.268 | 0 | 0 | 0 |
| UTERU2000925 | 0 | 0 | 38.195 | 0 | 0 | 0 | 0 |
| UTERU2001658 | 0 | 0 | 32.488 | 0 | 0 | 0 | 0 |
| UTERU2002410 | 51.532 | 0 | 0 | 0 | 0 | 0 | 0 |
| UTERU2003057 | 0 | 0 | 0 | 19.331 | 0 | 0 | 0 |
| UTERU2004037 | 0 | 15.438 | 0 | 0 | 0 | 0 | 0 |
| UTERU2004197 | 0 | 0 | 0 | 15.029 | 0 | 0 | 0 |
| UTERU2004807 | 0 | 0 | 7.369 | 22.526 | 0 | 0 | 0 |
| UTERU2005354 | 0 | 0 | 0 | 0 | 7.718 | 0 | 0 |
| UTERU2005593 | 0 | 0 | 0 | 0 | 3.960 | 0 | 0 |
| UTERU2005621 | 0 | 0 | 8.268 | 0 | 0 | 0 | 0 |
| UTERU2006643 | 0 | 59.791 | 0 | 0 | 0 | 0 | 0 |
| UTERU2007724 | 0 | 46.260 | 0 | 0 | 0 | 0 | 0 |
| UTERU2008085 | 0 | 0 | 0.662 | 0 | 3.505 | 0 | 1.574 |
| UTERU2008747 | 0 | 0 | 0 | 0 | 31.185 | 0 | 0 |
| UTERU2008938 | 0 | 0 | 9.027 | 0 | 0 | 0 | 0 |
| UTERU2009972 | 0 | 0 | 0 | 0 | 0 | 0 | 12.351 |
| UTERU2010417 | 0 | 0 | 0 | 2.356 | 0 | 0 | 1.099 |
| UTERU2012286 | 0 | 0 | 9.292 | 0 | 8.940 | 0 | 0 |
| UTERU2012703 | 0 | 0 | 75.461 | 0 | 0 | 0 | 0 |
| UTERU2012767 | 0 | 0 | 0 | 0 | 18.790 | 0 | 0 |
| UTERU2014024 | 0 | 0 | 0 | 0 | 0 | 0 | 45.181 |
| UTERU2014167 | 0 | 0 | 0 | 6.812 | 0 | 0 | 3.177 |
| UTERU2015653 | 0 | 0 | 0 | 4.360 | 0 | 0 | 0 |
| UTERU2016799 | 0 | 0 | 0 | 0 | 20.520 | 0 | 0 |
| UTERU2023175 | 0 | 0 | 0 | 0 | 5.253 | 0 | 5.190 |

[0688] Genes whose expression levels were negligibly low in each of the above-described libraries are shown with their clone names below.

[0689] 3NB691000018, 3NB691000085, 3NB691000129, 3NB691000191, 3NB692000012, 3NB692000029, 3NB692000102, 3NB692000154, 3NB692000276, 3NB692000305, 3NB692000429, 3NB692000484, 3NB692000529, 3NB692000973, 3NB692001034, 3NB692001040, 3NB692001123, 3NB692001267, 3NB692001339, 3NB692001349, 3NB692001366, 3NB692001408, 3NB692001433, 3NB692001471, 3NB692001496, 3NB692001501, 3NB692001507, 3NB692001519, 3NB692001520, 3NB692001528, 3NB692001538, 3NB692001548, 3NB692001557, 3NB692001719, 3NB692001853, 3NB692001861, 3NB692002051, 3NB692002365, 3NB692002685, 3NB692002806, 3NB692003538, 3NB692004045, 3NB692004724, 3NB692005439, 3NB692006952, 3NB692008178, 3NB692008729, ACTVT2000380, ADIPS1000064, ADIPS2000069, ADIPS2000088, ADIPS2000245, ADIPS2000425, ADRGL1000002, ADRGL1000018, ADRGL1000033, ADRGL1000038, ADRGL1000065, ADRGL1000067, ADRGL1000111, ADRGL1000144, ADRGL1000147, ADRGL1000160, ADRGL1000165, ADRGL1000182, ADRGL2000006, ADRGL2000042, ADRGL2000056, ADRGL2000064, ADRGL2000074, ADRGL2000085, ADRGL2000097, ADRGL2000117, ADRGL2000142, ADRGL2000172, ADRGL2000248, ADRGL2000261, ADRGL2000323, ADRGL2000328, ADRGL2000353, ADRGL2000384, ADRGL2000428, ADRGL2000636, ADRGL2000644, ADRGL2000968, ADRGL2001119, ADRGL2001229, ADRGL2001287, ADRGL2001301, ADRGL2001354, ADRGL2001554, ADRGL2001651, ADRGL2001756, ADRGL2001830, ADRGL2001836, ADRGL2001854, ADRGL2002013, ADRGL2002029, ADRGL2002191, ADRGL2002260, ADRGL2002392, ADRGL2002679, ADRGL2002753, ADRGL2002857, ADRGL2003017, ADRGL2003329, ADRGL2003552, ADRGL2003585, ADRGL2003638, ADRGL2003684, ADRGL2003773, ADRGL2003785, ADRGL2004031, ADRGL2004077, ADRGL2004451, ADRGL2004459, ADRGL2004676, ADRGL2004708, ADRGL2004724, ADRGL2004749, ADRGL2004770, ADRGL2004777, ADRGL2004833, ADRGL2005336, ADRGL2005564, ADRGL2005756, ADRGL2005926, ADRGL2005961, ADRGL2006034, ADRGL2006124, ADRGL2006177, ADRGL2006193, ADRGL2006377, ADRGL2006677, ADRGL2006732, ADRGL2006767, ADRGL2006817, ADRGL2006846, ADRGL2006886, ADRGL2007080, ADRGL2007125, ADRGL2007283, ADRGL2007313, ADRGL2007357, ADRGL2007636, ADRGL2007651, ADRGL2007810, ADRGL2007877, ADRGL2007906, ADRGL2007974, ADRGL2008023, ADRGL2008331, ADRGL2008337, ADRGL2008535, ADRGL2008966, ADRGL2009146, ADRGL2009273, ADRGL2009324, ADRGL2009489, ADRGL2009533, ADRGL2009691, ADRGL2009755, ADRGL2010152, ADRGL2010315, ADRGL2010594, ADRGL2010860, ADRGL2010974, ADRGL2011190, ADRGL2011330, ADRGL2012179, AHMSC1000138, ASTRO1000009, ASTRO1000018, ASTRO1000029, ASTRO1000096, ASTRO2000011, ASTRO2000095, ASTRO2000141, ASTRO2000191, ASTRO2000278, ASTRO2000372, ASTRO2000381, ASTRO2000403, ASTRO2000417, ASTRO2000482, ASTRO2000533, ASTRO2000653, ASTRO2000662, ASTRO2000725, ASTRO2001001, ASTRO2001008, ASTRO2001088, ASTRO2001107, ASTRO2001122, ASTRO2001227, ASTRO2001249, ASTRO2001480, ASTRO2002024, ASTRO2002035, ASTRO2002064, ASTRO2002202, ASTRO2002571, ASTRO2002632, ASTRO2002659, ASTRO2002693, ASTRO2002720, ASTRO2002733, ASTRO2002743, ASTRO2002842, ASTRO2003212, ASTRO2003316, ASTRO2003461, ASTRO2003574, ASTRO2003581, ASTRO2003740, ASTRO2003840, ASTRO2003925, ASTRO2003960, ASTRO2004032, ASTRO2004051, ASTRO2004177, ASTRO2004217, ASTRO2004297, ASTRO2004584, ASTRO2004628, ASTRO2004751, ASTRO2004877, ASTRO2004974, ASTRO2005008, ASTRO2005081, ASTRO2005096, ASTRO2005242, ASTRO2005273, ASTRO2005343, ASTRO2005360, ASTRO2005413, ASTRO2005423, ASTRO2005553, ASTRO2005557, ASTRO2005575, ASTRO2005593, ASTRO2005726, ASTRO2005863, ASTRO2005896, ASTRO2005902, ASTRO2006356, ASTRO2006475, ASTRO2006732, ASTRO2006747, ASTRO2006920, ASTRO2006952, ASTRO2007221, ASTRO2007377, ASTRO2007515, ASTRO2007578, ASTRO2007643, ASTRO2007666, ASTRO2007948, ASTRO2007956, ASTRO2007962, ASTRO2008040, ASTRO2008216, ASTRO2008239, ASTRO2008409, ASTRO2008425, ASTRO2008508, ASTRO2008777, ASTRO2008895, ASTRO2008960, ASTRO2008972, ASTRO2009068, ASTRO2009118, ASTRO2009177, ASTRO2009333, ASTRO2009458, ASTRO2009526, ASTRO2009879, ASTRO2010072, ASTRO2010582, ASTRO2010615, ASTRO2010799, ASTRO2010962, ASTRO2010996, ASTRO2011149, ASTRO2011422, ASTRO2011426, ASTRO2011437, ASTRO2011461, ASTRO2011834, ASTRO2011893, ASTRO2013124, ASTRO2013671, ASTRO2013802, ASTRO2014135, ASTRO2014174, ASTRO2014211, ASTRO2014363, ASTRO2014392, ASTRO2014498, ASTRO2014561, ASTRO2014576, ASTRO2014863, ASTRO2014923, ASTRO2014961, ASTRO2015162, ASTRO2015185, ASTRO2015328, ASTRO2015529, ASTRO2015987, ASTRO2016044, ASTRO2016114, ASTRO2016148, ASTRO2016681, ASTRO2016819, ASTRO2016847, ASTRO2016892, ASTRO2017348, ASTRO2017627, ASTRO2018373, ASTRO2018540, ASTRO2019039, ASTRO2019171, ASTRO3000154, ASTRO3000172, ASTRO3000177, ASTRO3000301, ASTRO3000474, ASTRO3000482, BEAST2000454, BGGI11000193, BGGI11000285, BGGI12000022, BGGI12000054, BGGI12000067, BGGI12000161, BGGI12000544, BGGI12000684, BGGI12000693, BGGI12001002, BGGI12001075, BGGI12001241, BGGI12001247, BGGI12001714, BLADE1000176, BLADE2000181, BLADE2000256, BLADE2000340, BLADE2000389, BLADE2000463, BLADE2000492, BLADE2000579, BLADE2000640, BLADE2000866, BLADE2000938, BLADE2001031, BLADE2001133, BLADE2001138, BLADE2001141, BLADE2001371, BLADE2001458, BLADE2001575, BLADE2001753, BLADE2001935, BLADE2001940, BLADE2001987, BLADE2002073, BLADE2002310, BLADE2002730, BLADE2002738, BLADE2002782, BLADE2002947, BLADE2002972, BLADE2003474, BLADE2003916, BLADE2004089, BLADE2004345, BLADE2004389, BLADE2004462, BLADE2004628, BLADE2004670, BLADE2004722, BLADE2004849, BLADE2005036, BLADE2005038, BLADE2005229, BLADE2005459, BLADE2005792, BLADE2006043, BLADE2006412, BLADE2006415, BLADE2006607, BLADE2006826, BLADE2006849, BLADE2006947, BLADE2007033, BLADE2007043, BLADE2007666, BLADE2007722, BLADE2007735, BLADE2007744, BLADE2007799, BLADE2007923, BLADE2007935, BLADE2007958, BLADE2008281, BLADE2008398, BLADE2008454, BLADE2008461, BLADE2008479, BLADE2008539, BLADE2008809, BLADE2008995, BLADE2009452, BLADE2009479, BLADE2009593, BNGH41000098, BNGH41000104, BNGH41000118, BNGH41000137, BNGH41000169, BNGH41000177, BNGH41000190, BNGH41000216, BNGH41000235, BNGH42000132, BNGH42000405, BNGH42000532, BNGH42000675, BNGH42000791, BNGH42000815, BNGH42000994, BNGH42001247, BNGH42001406, BNGH42001576, BNGH42001724, BNGH42002168, BNGH42002244, BNGH42002387, BNGH42002487, BNGH42002489, BNGH42003529, BNGH42003570, BNGH42003641, BNGH42004076, BNGH42004291, BNGH42004538, BNGH42004679, BNGH42005017, BNGH42005235, BNGH42005504, BNGH42005968, BNGH42006135, BNGH42006226, BNGH42006234, BNGH42007037, BNGH42007366, BNGH42007460, BNGH42007594, BNGH42007798, BNGH42008199, BNGH42008510, BNGH42008603, BNGH42008649, BNGH42008743, BNGH42008832, BNGH42008850, BNGH42008943, BNGH42009021, BNGH42009025, BRACE1000020, BRACE1000042, BRACE1000047, BRACE1000051, BRACE1000065, BRACE1000070, BRACE1000073, BRACE1000084, BRACE1000087, BRACE1000092, BRACE1000093, BRACE1000101, BRACE1000114, BRACE1000115, BRACE1000124, BRACE1000132, BRACE1000166, BRACE1000169, BRACE1000187, BRACE1000239, BRACE1000258, BRACE1000451, BRACE1000475, BRACE1000572, BRACE2000061, BRACE2000077, BRACE2000078, BRACE2000100, BRACE2000109, BRACE2000141, BRACE2000148, BRACE2000183, BRACE2000229, BRACE2000232, BRACE2000256, BRACE2000266, BRACE2000267, BRACE2000280, BRACE2000300, BRACE2000307, BRACE2000331, BRACE2000332, BRACE2000347, BRACE2000351, BRACE2000368, BRACE2000392, BRACE2000441, BRACE2000487, BRACE2000489, BRACE2000526, BRACE2000531, BRACE2000545, BRACE2000553, BRACE2000565, BRACE2000577, BRACE2000640, BRACE2000650, BRACE2000677, BRACE2000698, BRACE2000718, BRACE2000733, BRACE2000743, BRACE2000750, BRACE2000753, BRACE2000815, BRACE2000864, BRACE2000885, BRACE2000893, BRACE2000905, BRACE2000936, BRACE2000947, BRACE2000965, BRACE2000975, BRACE2000988, BRACE2001017, BRACE2001065, BRACE2001070, BRACE2001094, BRACE2001107, BRACE2001143, BRACE2001151, BRACE2001154, BRACE2001188, BRACE2001191, BRACE2001197, BRACE2001236, BRACE2001239, BRACE2001269, BRACE2001312, BRACE2001313, BRACE2001330, BRACE2001340, BRACE2001352, BRACE2001353, BRACE2001374, BRACE2001375, BRACE2001423, BRACE2001424, BRACE2001445, BRACE2001453, BRACE2001455, BRACE2001477, BRACE2001492, BRACE2001496, BRACE2001508, BRACE2001534, BRACE2001543, BRACE2001564, BRACE2001588, BRACE2001607, BRACE2001626, BRACE2001673, BRACE2001677, BRACE2001705, BRACE2001709, BRACE2001711, BRACE2001726, BRACE2001733, BRACE2001737, BRACE2001742, BRACE2001777, BRACE2001779, BRACE2001834, BRACE2001859, BRACE2001865, BRACE2001872, BRACE2001881, BRACE2001898, BRACE2001923, BRACE2001942, BRACE2001944, BRACE2001954, BRACE2001972, BRACE2001973, BRACE2002026, BRACE2002034, BRACE2002050, BRACE2002139, BRACE2002142, BRACE2002151, BRACE2002157, BRACE2002176, BRACE2002202, BRACE2002206, BRACE2002227, BRACE2002260, BRACE2002297, BRACE2002304, BRACE2002356, BRACE2002394, BRACE2002409, BRACE2002431, BRACE2002444, BRACE2002458, BRACE2002467, BRACE2002468, BRACE2002478, BRACE2002495, BRACE2002582, BRACE2002585, BRACE2002589, BRACE2002590, BRACE2002606, BRACE2002613, BRACE2002614, BRACE2002617, BRACE2002623, BRACE2002635, BRACE2002649, BRACE2002661, BRACE2002676, BRACE2002677, BRACE2002682, BRACE2002695, BRACE2002707, BRACE2002736, BRACE2002752, BRACE2002755, BRACE2002762, BRACE2002772, BRACE2002792, BRACE2002796, BRACE2002803, BRACE2002807, BRACE2002812, BRACE2002834, BRACE2002849, BRACE2002857, BRACE2002861, BRACE2002884, BRACE2002896, BRACE2002948, BRACE2003037, BRACE2003078, BRACE2003097, BRACE2003110, BRACE2003168, BRACE2003199, BRACE2003210, BRACE2003269, BRACE2003285, BRACE2003304, BRACE2003319, BRACE2003398, BRACE2003420, BRACE2003428, BRACE2003431, BRACE2003512, BRACE2003516, BRACE2003539, BRACE2003540, BRACE2003594, BRACE2003598, BRACE2003609, BRACE2003614, BRACE2003628, BRACE2003639, BRACE2003700, BRACE2003713, BRACE2003766, BRACE2003785, BRACE2003788, BRACE2003800, BRACE2003802, BRACE2003825, BRACE2003845, BRACE2003847, BRACE2003848, BRACE2003873, BRACE2003885, BRACE2003887, BRACE2003905, BRACE2003928, BRACE2003944, BRACE2003954, BRACE2003982, BRACE2003987, BRACE2005034, BRACE2005047, BRACE2005063, BRACE2005083, BRACE2005087, BRACE2005090, BRACE2005118, BRACE2005124, BRACE2005138, BRACE2005151, BRACE2005160, BRACE2005169, BRACE2005189, BRACE2005193, BRACE2005196, BRACE2005198, BRACE2005216, BRACE2005243, BRACE2005251, BRACE2005253, BRACE2005290, BRACE2005298, BRACE2005328, BRACE2005329, BRACE2005337, BRACE2005348, BRACE2005363, BRACE2005395, BRACE2005408, BRACE2005433, BRACE2005450, BRACE2005453, BRACE2005457, BRACE2005460, BRACE2005489, BRACE2005518, BRACE2005556, BRACE2005562, BRACE2005624, BRACE2005642, BRACE2005661, BRACE2005667, BRACE2005719, BRACE2005731, BRACE2005742, BRACE2005762, BRACE2005773, BRACE2005787, BRACE2005795, BRACE2005800, BRACE2005858, BRACE2005869, BRACE2005875, BRACE2005881, BRACE2005898, BRACE2005904, BRACE2005906, BRACE2005907, BRACE2005911, BRACE2005937, BRACE2005949, BRACE2005981, BRACE2005991, BRACE2006072, BRACE2006075, BRACE2006084, BRACE2006102, BRACE2006105, BRACE2006122, BRACE2006137, BRACE2006143, BRACE2006162, BRACE2006167, BRACE2006174, BRACE2006240, BRACE2006245, BRACE2006249, BRACE2006264, BRACE2006274, BRACE2006281, BRACE2006298, BRACE2006319, BRACE2006344, BRACE2006354, BRACE2006363, BRACE2006378, BRACE2006380, BRACE2006393, BRACE2006413, BRACE2006417, BRACE2006453, BRACE2006459, BRACE2006488, BRACE2006534, BRACE2006537, BRACE2006540, BRACE2006547, BRACE2006564, BRACE2006587, BRACE2006598, BRACE2006636, BRACE2006685, BRACE2006703, BRACE2006743, BRACE2006753, BRACE2006783, BRACE2006821, BRACE2006833, BRACE2006859, BRACE2006909, BRACE2006924, BRACE2006935, BRACE2006937, BRACE2006944, BRACE2006951, BRACE2006982, BRACE2006986, BRACE2007013, BRACE2007064, BRACE2007068, BRACE2007087, BRACE2007109, BRACE2007138, BRACE2007174, BRACE2007191, BRACE2007197, BRACE2007201, BRACE2007203, BRACE2007232, BRACE2007254, BRACE2007262, BRACE2007274, BRACE2007281, BRACE2007295, BRACE2007358, BRACE2007396, BRACE2007398, BRACE2007411, BRACE2007447, BRACE2007477, BRACE2007502, BRACE2007503, BRACE2007522, BRACE2007527, BRACE2007538, BRACE2007563, BRACE2007567, BRACE2007621, BRACE2007640, BRACE2007641, BRACE2007646, BRACE2007663, BRACE2007671, BRACE2007682, BRACE2007685, BRACE2007708, BRACE2007727, BRACE2007749, BRACE2007760, BRACE2007761, BRACE2007764, BRACE2007767, BRACE2007768, BRACE2007769, BRACE2007784, BRACE2007786, BRACE2007798, BRACE2007799, BRACE2007801, BRACE2007832, BRACE2007836, BRACE2007868, BRACE2007882, BRACE2007888, BRACE2007902, BRACE2007920, BRACE2007937, BRACE2007944, BRACE2007952, BRACE2008008, BRACE2008015, BRACE2008021, BRACE2008102, BRACE2008114, BRACE2008144, BRACE2008172, BRACE2008216, BRACE2008218, BRACE2008276, BRACE2008295, BRACE2008308, BRACE2008336, BRACE2008358, BRACE2008361, BRACE2008399, BRACE2008401, BRACE2008402, BRACE2008410, BRACE2008420, BRACE2008443, BRACE2008473, BRACE2008480, BRACE2008481, BRACE2008488, BRACE2008500, BRACE2008553, BRACE2008594, BRACE2008604, BRACE2008615, BRACE2008622, BRACE2008629, BRACE2008653, BRACE2008655, BRACE2008656, BRACE2008708, BRACE2008710, BRACE2008754, BRACE2008797, BRACE2008847, BRACE2008857, BRACE2008861, BRACE2008867, BRACE2008881, BRACE2008883, BRACE2008917, BRACE2008919, BRACE2008941, BRACE2008948, BRACE2008960, BRACE2008999, BRACE2009014, BRACE2009016, BRACE2009031, BRACE2009044, BRACE2009045, BRACE2009053, BRACE2009122, BRACE2009131, BRACE2009185, BRACE2009188, BRACE2009212, BRACE2009221, BRACE2009235, BRACE2009238, BRACE2009255, BRACE2009270, BRACE2009272, BRACE2009274, BRACE2009275, BRACE2009291, BRACE2009293, BRACE2009307, BRACE2009311, BRACE2009318, BRACE2009323, BRACE2009366, BRACE2009421, BRACE2009428, BRACE2009434, BRACE2009437, BRACE2009483, BRACE2009517, BRACE2009533, BRACE2009558, BRACE2009566, BRACE2009591, BRACE2009654, BRACE2009721, BRACE2009732, BRACE2009754, BRACE2009828, BRACE2009886, BRACE2009907, BRACE2009957, BRACE2010170, BRACE2010171, BRACE2010203, BRACE2010208, BRACE2010336, BRACE2010348, BRACE2010440, BRACE2010444, BRACE2010477, BRACE2010489, BRACE2010535, BRACE2010550, BRACE2010598, BRACE2010632, BRACE2010642, BRACE2010651, BRACE2010669, BRACE2010684, BRACE2010753, BRACE2010813, BRACE2010828, BRACE2010837, BRACE2010888, BRACE2010937, BRACE2010983, BRACE2011007, BRACE2011025, BRACE2011183, BRACE2011199, BRACE2011389, BRACE2011478, BRACE2011545, BRACE2011592, BRACE2011611, BRACE2011646, BRACE2011677, BRACE2011703, BRACE2011747, BRACE2011838, BRACE2011892, BRACE2011904, BRACE2011947, BRACE2012062, BRACE2012185, BRACE2012222, BRACE2012232, BRACE2012291, BRACE2012317, BRACE2012510, BRACE2012528, BRACE2012625, BRACE2012653, BRACE2012814, BRACE2012833, BRACE2012838, BRACE2012936, BRACE2012947, BRACE2013009, BRACE2013010, BRACE2013126, BRACE2013132, BRACE2013149, BRACE2013369, BRACE2013806, BRACE2013855, BRACE2013911, BRACE2014108, BRACE2014161, BRACE2014232, BRACE2014257, BRACE2014268, BRACE2014306, BRACE2014475, BRACE2014657, BRACE2014746, BRACE2014780, BRACE2014818, BRACE2014821, BRACE2014824, BRACE2014850, BRACE2014854, BRACE2015031, BRACE2015058, BRACE2015132, BRACE2015262, BRACE2015270, BRACE2015287, BRACE2015314, BRACE2015352, BRACE2015368, BRACE2015412, BRACE2015436, BRACE2015741, BRACE2015756, BRACE2015969, BRACE2015995, BRACE2016058, BRACE2016194, BRACE2016315, BRACE2016325, BRACE2016335, BRACE2016362, BRACE2016366, BRACE2016465, BRACE2016516, BRACE2016583, BRACE2016708, BRACE2016821, BRACE2016896, BRACE2016981, BRACE2017108, BRACE2017124, BRACE2017298, BRACE2017359, BRACE2017397, BRACE2017410, BRACE2017438, BRACE2017574, BRACE2017580, BRACE2017587, BRACE2017720, BRACE2017844, BRACE2017872, BRACE2017929, BRACE2017934, BRACE2017985, BRACE2017992, BRACE2018443, BRACE2018448, BRACE2018568, BRACE2018700, BRACE2018727, BRACE2018736, BRACE2018759, BRACE2018762, BRACE2018782, BRACE2018847, BRACE2019004, BRACE2019044, BRACE2019147, BRACE2019244, BRACE2019258, BRACE2019327, BRACE2019348, BRACE2019371, BRACE2019467, BRACE2019510, BRACE2019519, BRACE2019528, BRACE2019618, BRACE2019696, BRACE2019703, BRACE2019843, BRACE2019865, BRACE2019872, BRACE2019877, BRACE2020028, BRACE2020077, BRACE2020097, BRACE2020157, BRACE2020278, BRACE2020358, BRACE2020467, BRACE2020584, BRACE2020652, BRACE2020709, BRACE2020742, BRACE2020756, BRACE2020863, BRACE2020982, BRACE2021014, BRACE2021143, BRACE2021148, BRACE2021245, BRACE2021254, BRACE2021264, BRACE2021344, BRACE2021433, BRACE2021541, BRACE2021670, BRACE2021695, BRACE2021708, BRACE2021721, BRACE2021932, BRACE2021936, BRACE2022030, BRACE2022158, BRACE2022196, BRACE2022270, BRACE2022328, BRACE2022333, BRACE2022389, BRACE2022394, BRACE2022435, BRACE2022448, BRACE2022450, BRACE2022549, BRACE2022633, BRACE2022638, BRACE2022693, BRACE2022848, BRACE2022928, BRACE2022990, BRACE2023069, BRACE2023070, BRACE2023223, BRACE2023268, BRACE2023284, BRACE2023404, BRACE2023451, BRACE2023540, BRACE2023633, BRACE2023718, BRACE2023727, BRACE2023744, BRACE2023800, BRACE2023801, BRACE2024074, BRACE2024222, BRACE2024610, BRACE2024627, BRACE2024781, BRACE2024826, BRACE2025018, BRACE2025316, BRACE2025333, BRACE2025437, BRACE2025452, BRACE2025492, BRACE2025710, BRACE2025796, BRACE2025992, BRACE2026054, BRACE2026131, BRACE2026141, BRACE2026142, BRACE2026293, BRACE2026294, BRACE2026404, BRACE2026675, BRACE2026725, BRACE2026836, BRACE2026920, BRACE2026971, BRACE2027018, BRACE2027221, BRACE2027258, BRACE2027312, BRACE2027382, BRACE2027389, BRACE2027408, BRACE2027643, BRACE2027767, BRACE2027770, BRACE2027879, BRACE2027896, BRACE2027970, BRACE2028171, BRACE2028392, BRACE2028410, BRACE2028636, BRACE2028741, BRACE2028956, BRACE2028970, BRACE2029112, BRACE2029356, BRACE2029396, BRACE2029581, BRACE2029644, BRACE2029849, BRACE2030039, BRACE2030096, BRACE2030323, BRACE2030326, BRACE2030341, BRACE2030345, BRACE2030736, BRACE2030883, BRACE2030884, BRACE2031154, BRACE2031232, BRACE2031527, BRACE2031531, BRACE2031553, BRACE2031899, BRACE2032044, BRACE2032090, BRACE2032134, BRACE2032148, BRACE2032182, BRACE2032329, BRACE2032385, BRACE2032436, BRACE2032477, BRACE2032502, BRACE2032538, BRACE2032584, BRACE2032823, BRACE2033128, BRACE2033394, BRACE2033478, BRACE2033720, BRACE2033786, BRACE2034434, BRACE2034523, BRACE2034616, BRACE2034622, BRACE2034870, BRACE2035003, BRACE2035120, BRACE2035124, BRACE2035191, BRACE2035278, BRACE2035381, BRACE2035441, BRACE2035485, BRACE2036005, BRACE2036096, BRACE2036743, BRACE2036830, BRACE2036834, BRACE2036900, BRACE2037132, BRACE2037294, BRACE2037295, BRACE2037299, BRACE2037310, BRACE2037431, BRACE2037692, BRACE2037847, BRACE2038114, BRACE2038269, BRACE2038271, BRACE2038329, BRACE2038492, BRACE2038551, BRACE2038618, BRACE2039009, BRACE2039128, BRACE2039170, BRACE2039249, BRACE2039286, BRACE2039297, BRACE2039327, BRACE2039362, BRACE2039475, BRACE2039600, BRACE2039607, BRACE2039734, BRACE2039823, BRACE2039832, BRACE2039893, BRACE2039986, BRACE2040138, BRACE2040325, BRACE2040514, BRACE2040640, BRACE2040987, BRACE2041009, BRACE2041095, BRACE2041200, BRACE2041264, BRACE2041890, BRACE2041898, BRACE2042394, BRACE2042398, BRACE2042550, BRACE2042620, BRACE2042628, BRACE2042873, BRACE2043036, BRACE2043105, BRACE2043142, BRACE2043248, BRACE2043349, BRACE2043381, BRACE2043774, BRACE2043942, BRACE2044057, BRACE2044105, BRACE2044263, BRACE2044286, BRACE2044304, BRACE2044473, BRACE2044510, BRACE2044640, BRACE2044816, BRACE2044946, BRACE2044949, BRACE2045300, BRACE2045428, BRACE2045445, BRACE2045596, BRACE2045772, BRACE2045947, BRACE2045954, BRACE2046251, BRACE2046295, BRACE2046976, BRACE2047011, BRACE2047232, BRACE2047350, BRACE2047377, BRACE2047385, BRACE2047492, BRACE2047558, BRACE2047573, BRACE2047835, BRACE2047893, BRACE2047975, BRACE3000071, BRACE3000404, BRACE3000520, BRACE3000697, BRACE3000840, BRACE3000973, BRACE3001002, BRACE3001058, BRACE3001066, BRACE3001113, BRACE3001217, BRACE3001299, BRACE3001384, BRACE3001391, BRACE3001403, BRACE3001595, BRACE3001754, BRACE3001948, BRACE3001973, BRACE3002184, BRACE3002298, BRACE3002344, BRACE3002390, BRACE3002420, BRACE3002508, BRACE3002541, BRACE3002756, BRACE3003004, BRACE3003026, BRACE3003053, BRACE3003192, BRACE3003413, BRACE3003595, BRACE3003698, BRACE3003866, BRACE3003920, BRACE3004046, BRACE3004058, BRACE3004113, BRACE3004205, BRACE3004358, BRACE3004435, BRACE3004477, BRACE3004767, BRACE3004772, BRACE3004783, BRACE3004843, BRACE3004862, BRACE3004880, BRACE3004887, BRACE3004981, BRACE3004996, BRACE3004998, BRACE3005103, BRACE3005127, BRACE3005145, BRACE3005217, BRACE3005225, BRACE3005430, BRACE3005499, BRACE3005760, BRACE3005870, BRACE3005903, BRACE3005989, BRACE3006113, BRACE3006185, BRACE3006226, BRACE3006462, BRACE3006463, BRACE3006553, BRACE3006872, BRACE3006917, BRACE3007058, BRACE3007084, BRACE3007085, BRACE3007258, BRACE3007322, BRACE3007472, BRACE3007480, BRACE3007559, BRACE3007625, BRACE3007642, BRACE3007649, BRACE3007767, BRACE3007869, BRACE3008036, BRACE3008066, BRACE3008092, BRACE3008095, BRACE3008137, BRACE3008255, BRACE3008337, BRACE3008384, BRACE3008720, BRACE3008772, BRACE3009044, BRACE3009075, BRACE3009090, BRACE3009127, BRACE3009197, BRACE3009237, BRACE3009265, BRACE3009297, BRACE3009377, BRACE3009392, BRACE3009416, BRACE3009539, BRACE3009574, BRACE3009701, BRACE3009708, BRACE3009724, BRACE3009993, BRACE3010076, BRACE3010079, BRACE3010086, BRACE3010221, BRACE3010283, BRACE3010315, BRACE3010397, BRACE3010416, BRACE3010435, BRACE3010438, BRACE3010702, BRACE3010862, BRACE3011271, BRACE3011421, BRACE3011447, BRACE3011505, BRACE3011634, BRACE3011774, BRACE3012357, BRACE3012574, BRACE3012806, BRACE3012930, BRACE3013119, BRACE3013418, BRACE3013576, BRACE3013740, BRACE3013780, BRACE3013874, BRACE3013936, BRACE3013986, BRACE3014005, BRACE3014068, BRACE3014231, BRACE3014290, BRACE3014317, BRACE3014523, BRACE3014714, BRACE3014807, BRACE3014942, BRACE3015090, BRACE3015121, BRACE3015262, BRACE3015521, BRACE3015808, BRACE3015829, BRACE3015894, BRACE3015898, BRACE3016020, BRACE3016122, BRACE3016167, BRACE3016170, BRACE3016580, BRACE3016788, BRACE3016810, BRACE3016862, BRACE3016884, BRACE3017083, BRACE3017253, BRACE3018083, BRACE3018308, BRACE3018963, BRACE3019055, BRACE3019071, BRACE3019084, BRACE3019570, BRACE3019611, BRACE3019817, BRACE3019828, BRACE3019941, BRACE3020151, BRACE3020194, BRACE3020286, BRACE3020356, BRACE3020594, BRACE3020669, BRACE3020671, BRACE3020890, BRACE3021148, BRACE3021430, BRACE3021517, BRACE3021805, BRACE3022051, BRACE3022303, BRACE3022312, BRACE3022340, BRACE3022847, BRACE3023604, BRACE3023912, BRACE3024073, BRACE3024359, BRACE3024379, BRACE3024444, BRACE3024497, BRACE3024537, BRACE3024659, BRACE3024662, BRACE3024879, BRACE3025153, BRACE3025302, BRACE3025457, BRACE3025531, BRACE3025627, BRACE3025630, BRACE3025719, BRACE3026008, BRACE3026075, BRACE3026161, BRACE3026290, BRACE3026345, BRACE3026456, BRACE3026735, BRACE3026802, BRACE3026844, BRACE3026947, BRACE3026993, BRACE3027242, BRACE3027256, BRACE3027326, BRACE3027478, BRACE3027480, BRACE3027931, BRACE3027976, BRACE3028214, BRACE3028241, BRACE3028360, BRACE3028895, BRACE3028998, BRACE3029005, BRACE3029021, BRACE3029205, BRACE3029447, BRACE3030057, BRACE3030103, BRACE3030538, BRACE3030748, BRACE3030866, BRACE3031161, BRACE3031184, BRACE3031185, BRACE3031315, BRACE3031372, BRACE3031579, BRACE3031728, BRACE3031838, BRACE3031843, BRACE3032427, BRACE3032455, BRACE3032537, BRACE3032538, BRACE3032631, BRACE3032771, BRACE3032980, BRACE3032983, BRACE3033525, BRACE3034159, BRACE3034183, BRACE3034389, BRACE3034964, BRACE3034993, BRACE3035168, BRACE3035227, BRACE3036156, BRACE3036271, BRACE3037612, BRACE3037637, BRACE3037803, BRACE3038012, BRACE3038030, BRACE3038569, BRACE3038570, BRACE3038687, BRACE3038760, BRACE3039288, BRACE3039358, BRACE3039378, BRACE3039454, BRACE3040012, BRACE3040239, BRACE3040504, BRACE3040644, BRACE3040856, BRACE3040863, BRACE3041059, BRACE3041162, BRACE3041827, BRACE3042046, BRACE3042210, BRACE3042326, BRACE3042409, BRACE3042432, BRACE3042594, BRACE3043597, BRACE3044090, BRACE3044172, BRACE3044247, BRACE3044377, BRACE3044389, BRACE3044495, BRACE3045011, BRACE3045033, BRACE3045078, BRACE3045145, BRACE3045424, BRACE3045708, BRACE3045981, BRACE3046049, BRACE3046152, BRACE3046294, BRACE3046450, BRACE3046466, BRACE3046491, BRACE3046609, BRACE3046762, BRACE3046837, BRACE3046855, BRACE3046966, BRACE3047018, BRACE3047482, BRACE3047801, BRALZ1000047, BRALZ1000103, BRALZ2000189, BRALZ2000263, BRALZ2000988, BRALZ2001038, BRALZ2001279, BRALZ2001350, BRALZ2001445, BRALZ2001559, BRALZ2001743, BRALZ2001834, BRALZ2002174, BRALZ2002418, BRALZ2002477, BRALZ2003119, BRALZ2003330, BRALZ2003453, BRALZ2003525, BRALZ2004397, BRALZ2005467, BRALZ2005471, BRALZ2005888, BRALZ2005950, BRALZ2005992, BRALZ2006288, BRALZ2006474, BRALZ2006560, BRALZ2006734, BRALZ2006800, BRALZ2006976, BRALZ2007376, BRALZ2007545, BRALZ2007576, BRALZ2007661, BRALZ2007790, BRALZ2007793, BRALZ2007952, BRALZ2008031, BRALZ2008166, BRALZ2008462, BRALZ2008617, BRALZ2008696, BRALZ2008763, BRALZ2008869, BRALZ2008930, BRALZ2009446, BRALZ2009486, BRALZ2010186, BRALZ2010842, BRALZ2011337, BRALZ2011796, BRALZ2011880, BRALZ2012050, BRALZ2012183, BRALZ2012848, BRALZ2013621, BRALZ2013690, BRALZ2014054, BRALZ2014316, BRALZ2014484, BRALZ2014951, BRALZ2015168, BRALZ2015811, BRALZ2016085, BRALZ2016498, BRALZ2017359, BRALZ2017531, BRALZ2017607, BRALZ2017620, BRALZ2017844, BRALZ2018342, BRALZ2018492, BRALZ2018834, BRALZ2019047, BRAMY1000095, BRAMY1000098, BRAMY1000130, BRAMY1000157, BRAMY1000173, BRAMY2000021, BRAMY2000025, BRAMY2000052, BRAMY2000076, BRAMY2000086, BRAMY2000181, BRAMY2000196, BRAMY2000231, BRAMY2000277, BRAMY2000411, BRAMY2000508, BRAMY2000562, BRAMY2000585, BRAMY2000653, BRAMY2000814, BRAMY2000893, BRAMY2000946, BRAMY2000981, BRAMY2000987, BRAMY2001068, BRAMY2001114, BRAMY2001203, BRAMY2001282, BRAMY2001367, BRAMY2001427, BRAMY2001473, BRAMY2001678, BRAMY2002005, BRAMY2002044, BRAMY2002072, BRAMY2002158, BRAMY2002311, BRAMY2002339, BRAMY2002364, BRAMY2002369, BRAMY2002479, BRAMY2002493, BRAMY2002525, BRAMY2002584, BRAMY2002604, BRAMY2002621, BRAMY2002638, BRAMY2002739, BRAMY2002799, BRAMY2002853, BRAMY2002862, BRAMY2002956, BRAMY2003008, BRAMY2003037, BRAMY2003117, BRAMY2003287, BRAMY2003325, BRAMY2003529, BRAMY2003538, BRAMY2003585, BRAMY2003634, BRAMY2003653, BRAMY2003681, BRAMY2003893, BRAMY2003897, BRAMY2003898, BRAMY2003904, BRAMY2003926, BRAMY2003929, BRAMY2004031, BRAMY2004058, BRAMY2004183, BRAMY2004335, BRAMY2004351, BRAMY2004352, BRAMY2004363, BRAMY2004387, BRAMY2004492, BRAMY2004521, BRAMY2004524, BRAMY2004537, BRAMY2004542, BRAMY2004756, BRAMY2004771, BRAMY2005052, BRAMY2005064, BRAMY2005094, BRAMY2005151, BRAMY2005182, BRAMY2005244, BRAMY2005391, BRAMY2005488, BRAMY2005576, BRAMY2005648, BRAMY2005662, BRAMY2005708, BRAMY2005711, BRAMY2006092, BRAMY2006118, BRAMY2006149, BRAMY2006366, BRAMY2006375, BRAMY2006397, BRAMY2006411, BRAMY2006459, BRAMY2006466, BRAMY2006659, BRAMY2006779, BRAMY2006809, BRAMY2006879, BRAMY2007043, BRAMY2007078, BRAMY2007110, BRAMY2007185, BRAMY2007244, BRAMY2007249, BRAMY2007255, BRAMY2007287, BRAMY2007308, BRAMY2007411, BRAMY2007458, BRAMY2007486, BRAMY2007546, BRAMY2007567, BRAMY2007594, BRAMY2007610, BRAMY2007613, BRAMY2007653, BRAMY2007753, BRAMY2007859, BRAMY2008333, BRAMY2008382, BRAMY2008563, BRAMY2008583, BRAMY2008977, BRAMY2008979, BRAMY2009013, BRAMY2009023, BRAMY2009034, BRAMY2009105, BRAMY2009123, BRAMY2009192, BRAMY2009344, BRAMY2009349, BRAMY2009394, BRAMY2009489, BRAMY2009508, BRAMY2009528, BRAMY2009557, BRAMY2009612, BRAMY2009693, BRAMY2010068, BRAMY2010135, BRAMY2010145, BRAMY2010171, BRAMY2010239, BRAMY2010272, BRAMY2010290, BRAMY2010357, BRAMY2010366, BRAMY2010395, BRAMY2010441, BRAMY2010442, BRAMY2010464, BRAMY2010581, BRAMY2010798, BRAMY2010808, BRAMY2010919, BRAMY2011064, BRAMY2011105, BRAMY2011178, BRAMY2011196, BRAMY2011216, BRAMY2011253, BRAMY2011446, BRAMY2011480, BRAMY2011639, BRAMY2011679, BRAMY2011811, BRAMY2011841, BRAMY2011846, BRAMY2011849, BRAMY2011872, BRAMY2011961, BRAMY2012017, BRAMY2012091, BRAMY2012119, BRAMY2012162, BRAMY2012163, BRAMY2012277, BRAMY2012340, BRAMY2012426, BRAMY2012497, BRAMY2012517, BRAMY2012536, BRAMY2012555, BRAMY2012568, BRAMY2012581, BRAMY2012691, BRAMY2012721, BRAMY2012731, BRAMY2012776, BRAMY2012880, BRAMY2012881, BRAMY2013169, BRAMY2013200, BRAMY2013216, BRAMY2013405, BRAMY2013414, BRAMY2013572, BRAMY2013590, BRAMY2013621, BRAMY2013659, BRAMY2013722, BRAMY2013736, BRAMY2013756, BRAMY2013944, BRAMY2013975, BRAMY2014019, BRAMY2014205, BRAMY2014387, BRAMY2014462, BRAMY2014469, BRAMY2014541, BRAMY2014754, BRAMY2014813, BRAMY2015211, BRAMY2015251, BRAMY2015311, BRAMY2015420, BRAMY2015503, BRAMY2015516, BRAMY2015550, BRAMY2015551, BRAMY2015559, BRAMY2015688, BRAMY2015705, BRAMY2015782, BRAMY2015833, BRAMY2015855, BRAMY2015890, BRAMY2015925, BRAMY2016002, BRAMY2016009, BRAMY2016020, BRAMY2016070, BRAMY2016251, BRAMY2016327, BRAMY2016386, BRAMY2016706, BRAMY2016771, BRAMY2016892, BRAMY2016938, BRAMY2016953, BRAMY2017014, BRAMY2017249, BRAMY2017348, BRAMY2017450, BRAMY2017455, BRAMY2017528, BRAMY2017864, BRAMY2018027, BRAMY2018106, BRAMY2018122, BRAMY2018126, BRAMY2018272, BRAMY2018273, BRAMY2018279, BRAMY2018295, BRAMY2018308, BRAMY2018396, BRAMY2018467, BRAMY2018635, BRAMY2018785, BRAMY2019055, BRAMY2019111, BRAMY2019277, BRAMY2019300, BRAMY2019468, BRAMY2019509, BRAMY2019600, BRAMY2019643, BRAMY2019710, BRAMY2019963, BRAMY2019985, BRAMY2019989, BRAMY2020050, BRAMY2020058, BRAMY2020106, BRAMY2020270, BRAMY2020354, BRAMY2020355, BRAMY2020445, BRAMY2020466, BRAMY2020520, BRAMY2020574, BRAMY2020634, BRAMY2020713, BRAMY2021040, BRAMY2021063, BRAMY2021098, BRAMY2021139, BRAMY2021142, BRAMY2021276, BRAMY2021388, BRAMY2021498, BRAMY2021523, BRAMY2021710, BRAMY2021732, BRAMY2021746, BRAMY2021825, BRAMY2021867, BRAMY2021962, BRAMY2021982, BRAMY2022052, BRAMY2022160, BRAMY2022168, BRAMY2022263, BRAMY2022301, BRAMY2022320, BRAMY2022383, BRAMY2022445, BRAMY2022454, BRAMY2022493, BRAMY2022525, BRAMY2022532, BRAMY2022723, BRAMY2022796, BRAMY2022929, BRAMY2022980, BRAMY2022984, BRAMY2023060, BRAMY2023110, BRAMY2023115, BRAMY2023161, BRAMY2023172, BRAMY2023238, BRAMY2023327, BRAMY2023358, BRAMY2023406, BRAMY2023482, BRAMY2023514, BRAMY2023719, BRAMY2023729, BRAMY2023786, BRAMY2023852, BRAMY2023863, BRAMY2023939, BRAMY2024073, BRAMY2024312, BRAMY2024374, BRAMY2024390, BRAMY2024416, BRAMY2024449, BRAMY2024489, BRAMY2024497, BRAMY2024514, BRAMY2024530, BRAMY2024535, BRAMY2024545, BRAMY2024576, BRAMY2024593, BRAMY2024711, BRAMY2024715, BRAMY2024728, BRAMY2024827, BRAMY2024849, BRAMY2025024, BRAMY2025032, BRAMY2025121, BRAMY2025175, BRAMY2025218, BRAMY2025272, BRAMY2025277, BRAMY2025495, BRAMY2025812, BRAMY2025996, BRAMY2026009, BRAMY2026091, BRAMY2026168, BRAMY2026300, BRAMY2026347, BRAMY2026395, BRAMY2026405, BRAMY2026533, BRAMY2026538, BRAMY2026685, BRAMY2026713, BRAMY2026824, BRAMY2026899, BRAMY2026902, BRAMY2026904, BRAMY2026976, BRAMY2027073, BRAMY2027114, BRAMY2027140, BRAMY2027242, BRAMY2027396, BRAMY2027451, BRAMY2027461, BRAMY2027467, BRAMY2027587, BRAMY2027714, BRAMY2027717, BRAMY2027739, BRAMY2027752, BRAMY2027782, BRAMY2028072, BRAMY2028183, BRAMY2028188, BRAMY2028269, BRAMY2028282, BRAMY2028472, BRAMY2028491, BRAMY2028516, BRAMY2028565, BRAMY2028593, BRAMY2028682, BRAMY2028740, BRAMY2028783, BRAMY2028796, BRAMY2028856, BRAMY2029204, BRAMY2029602, BRAMY2029988, BRAMY2030098, BRAMY2030109, BRAMY2030206, BRAMY2030477, BRAMY2030545, BRAMY2030607, BRAMY2030702, BRAMY2030703, BRAMY2030768, BRAMY2030799, BRAMY2030859, BRAMY2030915, BRAMY2031317, BRAMY2031377, BRAMY2031442, BRAMY2032014, BRAMY2032087, BRAMY2032231, BRAMY2032242, BRAMY2032290, BRAMY2032311, BRAMY2032317, BRAMY2032344, BRAMY2032589, BRAMY2032678, BRAMY2032696, BRAMY2032777, BRAMY2032994, BRAMY2033003, BRAMY2033116, BRAMY2033240, BRAMY2033267, BRAMY2033316, BRAMY2033332, BRAMY2033506, BRAMY2033594, BRAMY2033895, BRAMY2033914, BRAMY2034072, BRAMY2034185, BRAMY2034187, BRAMY2034305, BRAMY2034561, BRAMY2034920, BRAMY2034993, BRAMY2035070, BRAMY2035449, BRAMY2035545, BRAMY2035606, BRAMY2035718, BRAMY2035719, BRAMY2035801, BRAMY2035869, BRAMY2035923, BRAMY2036076, BRAMY2036079, BRAMY2036254, BRAMY2036266, BRAMY2036387, BRAMY2036396, BRAMY2036459, BRAMY2036567, BRAMY2036615, BRAMY2036699, BRAMY2036913, BRAMY2036918, BRAMY2036968, BRAMY2037147, BRAMY2037328, BRAMY2037609, BRAMY2037629, BRAMY2037800, BRAMY2037823, BRAMY2037971, BRAMY2038100, BRAMY2038128, BRAMY2038317, BRAMY2038475, BRAMY2038484, BRAMY2038516, BRAMY2038846, BRAMY2038887, BRAMY2038904, BRAMY2039287, BRAMY2039300, BRAMY2039314, BRAMY2039341, BRAMY2039695, BRAMY2039728, BRAMY2039872, BRAMY2040051, BRAMY2040159, BRAMY2040214, BRAMY2040478, BRAMY2040592, BRAMY2040915, BRAMY2041261, BRAMY2041347, BRAMY2041378, BRAMY2041384, BRAMY2041434, BRAMY2041507, BRAMY2041542, BRAMY2041738, BRAMY2042122, BRAMY2042131, BRAMY2042178, BRAMY2042195, BRAMY2042244, BRAMY2042549, BRAMY2042596, BRAMY2042612, BRAMY2042641, BRAMY2042711, BRAMY2042760, BRAMY2042804, BRAMY2042899, BRAMY2042918, BRAMY2043069, BRAMY2043103, BRAMY2043314, BRAMY2043345, BRAMY2044246, BRAMY2044317, BRAMY2044349, BRAMY2044686, BRAMY2044838, BRAMY2045036, BRAMY2045299, BRAMY2045471, BRAMY2045530, BRAMY2046109, BRAMY2046478, BRAMY2046489, BRAMY2046537, BRAMY2046667, BRAMY2046742, BRAMY2046871, BRAMY2046984, BRAMY2046989, BRAMY2047169, BRAMY2047280, BRAMY2047676, BRAMY2047692, BRAMY2047746, BRAMY2047751, BRAMY2047765, BRAMY2047884, BRAMY2047948, BRAMY3000206, BRAMY3000210, BRAMY3000213, BRAMY3000224, BRAMY3000254, BRAMY3000307, BRAMY3000692, BRAMY3001356, BRAMY3001401, BRAMY3001409, BRAMY3001794, BRAMY3002120, BRAMY3002312, BRAMY3002329, BRAMY3002458, BRAMY3002508, BRAMY3002620, BRAMY3002803, BRAMY3002805, BRAMY3002886, BRAMY3002991, BRAMY3003026, BRAMY3003109, BRAMY3003205, BRAMY3003310, BRAMY3003566, BRAMY3003723, BRAMY3004126, BRAMY3004224, BRAMY3004672, BRAMY3004800, BRAMY3004900, BRAMY3004919, BRAMY3005091, BRAMY3005184, BRAMY3005656, BRAMY3005912, BRAMY3005932, BRAMY3006032, BRAMY3006297, BRAMY3006761, BRAMY3007078, BRAMY3007206, BRAMY3007311, BRAMY3007350, BRAMY3007449, BRAMY3007471, BRAMY3007609, BRAMY3007723, BRAMY3007968, BRAMY3008088, BRAMY3008096, BRAMY3008335, BRAMY3008466, BRAMY3008505, BRAMY3008650, BRAMY3008937, BRAMY3009158, BRAMY3009207, BRAMY3009491, BRAMY3009556, BRAMY3009782, BRAMY3009811, BRAMY3009904, BRAMY3010264, BRAMY3010321, BRAMY3010411, BRAMY3010603, BRAMY3010654, BRAMY4000089, BRAMY4000095, BRAMY4000229, BRAMY4000277, BRAMY4000915, BRAMY4000962, BRAMY4001173, BRAMY4001200, BRAMY4001234, BRAMY4001449, BRAMY4001652, BRAMY4001863, BRAMY4001913, BRAMY4002575, BRAMY4002628, BRASW1000053, BRASW1000125, BRAWH1000001, BRAWH1000002, BRAWH1000007, BRAWH1000037, BRAWH1000045, BRAWH1000094, BRAWH1000116, BRAWH1000127, BRAWH1000130, BRAWH1000157, BRAWH1000162, BRAWH1000164, BRAWH1000168, BRAWH1000174, BRAWH1000180, BRAWH1000369, BRAWH2000034, BRAWH2000048, BRAWH2000071, BRAWH2000082, BRAWH2000093, BRAWH2000109, BRAWH2000131, BRAWH2000142, BRAWH2000169, BRAWH2000177, BRAWH2000218, BRAWH2000232, BRAWH2000248, BRAWH2000256, BRAWH2000274, BRAWH2000323, BRAWH2000353, BRAWH2000370, BRAWH2000409, BRAWH2000443, BRAWH2000471, BRAWH2000476, BRAWH2000482, BRAWH2000488, BRAWH2000494, BRAWH2000500, BRAWH2000503, BRAWH2000554, BRAWH2000595, BRAWH2000643, BRAWH2000651, BRAWH2000682, BRAWH2000686, BRAWH2000752, BRAWH2000839, BRAWH2000859, BRAWH2000866, BRAWH2000892, BRAWH2000901, BRAWH2000924, BRAWH2000926, BRAWH2000984, BRAWH2001019, BRAWH2001037, BRAWH2001052, BRAWH2001103, BRAWH2001129, BRAWH2001137, BRAWH2001141, BRAWH2001159, BRAWH2001171, BRAWH2001186, BRAWH2001203, BRAWH2001238, BRAWH2001255, BRAWH2001321, BRAWH2001355, BRAWH2001378, BRAWH2001395, BRAWH2001406, BRAWH2001412, BRAWH2001418, BRAWH2001436, BRAWH2001438, BRAWH2001439, BRAWH2001459, BRAWH2001484, BRAWH2001492, BRAWH2001503, BRAWH2001519, BRAWH2001530, BRAWH2001535, BRAWH2001589, BRAWH2001662, BRAWH2001666, BRAWH2001671, BRAWH2001679, BRAWH2001686, BRAWH2001701, BRAWH2001842, BRAWH2001862, BRAWH2001873, BRAWH2001940, BRAWH2001973, BRAWH2002047, BRAWH2002060, BRAWH2002062, BRAWH2002125, BRAWH2002191, BRAWH2002318, BRAWH2002333, BRAWH2002352, BRAWH2002383, BRAWH2002549, BRAWH2002560, BRAWH2002601, BRAWH2002623, BRAWH2002630, BRAWH2002635, BRAWH2002662, BRAWH2002679, BRAWH2002725, BRAWH2002761, BRAWH2002811, BRAWH2002861, BRAWH2002911, BRAWH2002963, BRAWH2002967, BRAWH2002976, BRAWH2003000, BRAWH2003135, BRAWH2003240, BRAWH2003307, BRAWH2003355, BRAWH2003366, BRAWH2003662, BRAWH2003689, BRAWH2003832, BRAWH2003948, BRAWH2003964, BRAWH2004044, BRAWH2004068, BRAWH2004095, BRAWH2004136, BRAWH2004217, BRAWH2004580, BRAWH2004731, BRAWH2004779, BRAWH2004842, BRAWH2004884, BRAWH2004923, BRAWH2005008, BRAWH2005074, BRAWH2005225, BRAWH2005315, BRAWH2005517, BRAWH2005524, BRAWH2005533, BRAWH2005578, BRAWH2005661, BRAWH2005812, BRAWH2005974, BRAWH2005998, BRAWH2006044, BRAWH2006083, BRAWH2006207, BRAWH2006301, BRAWH2006395, BRAWH2006405, BRAWH2006450, BRAWH2006493, BRAWH2006526, BRAWH2006543, BRAWH2006622, BRAWH2006760, BRAWH2006960, BRAWH2006989, BRAWH2007069, BRAWH2007308, BRAWH2007406, BRAWH2007550, BRAWH2007570, BRAWH2007591, BRAWH2007605, BRAWH2007658, BRAWH2007664, BRAWH2007800, BRAWH2007808, BRAWH2007825, BRAWH2007862, BRAWH2007890, BRAWH2008058, BRAWH2008128, BRAWH2008219, BRAWH2008292, BRAWH2008297, BRAWH2008366, BRAWH2008380, BRAWH2008540, BRAWH2008577, BRAWH2008706, BRAWH2008790, BRAWH2008903, BRAWH2008956, BRAWH2008993, BRAWH2009112, BRAWH2009227, BRAWH2009238, BRAWH2009261, BRAWH2009263, BRAWH2009298, BRAWH2009304, BRAWH2009360, BRAWH2009393, BRAWH2009485, BRAWH2009490, BRAWH2009558, BRAWH2009590, BRAWH2009626, BRAWH2009678, BRAWH2009695, BRAWH2009907, BRAWH2010000, BRAWH2010069, BRAWH2010084, BRAWH2010136, BRAWH2010318, BRAWH2010329, BRAWH2010354, BRAWH2010364, BRAWH2010536, BRAWH2010552, BRAWH2010584, BRAWH2010618, BRAWH2010619, BRAWH2010754, BRAWH2010980, BRAWH2011066, BRAWH2011079, BRAWH2011096, BRAWH2011155, BRAWH2011166, BRAWH2011204, BRAWH2011286, BRAWH2011294, BRAWH2011343, BRAWH2011400, BRAWH2011762, BRAWH2011795, BRAWH2011796, BRAWH2011823, BRAWH2011860, BRAWH2011920, BRAWH2011958, BRAWH2012054, BRAWH2012077, BRAWH2012161, BRAWH2012162, BRAWH2012164, BRAWH2012258, BRAWH2012277, BRAWH2012326, BRAWH2012540, BRAWH2012619, BRAWH2012698, BRAWH2012749, BRAWH2012827, BRAWH2012866, BRAWH2012963, BRAWH2013047, BRAWH2013219, BRAWH2013294, BRAWH2013748, BRAWH2013866, BRAWH2013871, BRAWH2013914, BRAWH2013941, BRAWH2013955, BRAWH2014053, BRAWH2014234, BRAWH2014379, BRAWH2014414, BRAWH2014473, BRAWH2014511, BRAWH2014645, BRAWH2014662, BRAWH2014717, BRAWH2014729, BRAWH2014876, BRAWH2014934, BRAWH2014954, BRAWH2015247, BRAWH2015375, BRAWH2015385, BRAWH2015595, BRAWH2015728, BRAWH2015853, BRAWH2015866, BRAWH2016028, BRAWH2016106, BRAWH2016160, BRAWH2016166, BRAWH2016209, BRAWH2016221, BRAWH2016223, BRAWH2016305, BRAWH2016439, BRAWH2016446, BRAWH2016514, BRAWH2016562, BRAWH2016655, BRAWH2016679, BRAWH2016702, BRAWH2016724, BRAWH2016785, BRAWH2016792, BRAWH2016800, BRAWH2017002, BRAWH2017103, BRAWH2017250, BRAWH2017294, BRAWH2017304, BRAWH2017305, BRAWH2017379, BRAWH2017407, BRAWH2017433, BRAWH2017523, BRAWH2017534, BRAWH2017542, BRAWH2017635, BRAWH2017685, BRAWH2017913, BRAWH2018206, BRAWH2018267, BRAWH2018282, BRAWH2018317, BRAWH2018506, BRAWH2018514, BRAWH2018527, BRAWH2018601, BRAWH2018745, BRAWH2018875, BRAWH2019053, BRAWH2019055, BRAWH2019198, BRAWH3000078, BRAWH3000088, BRAWH3000100, BRAWH3000166, BRAWH3000314, BRAWH3000329, BRAWH3000410, BRAWH3000446, BRAWH3000491, BRAWH3000604, BRAWH3000884, BRAWH3001053, BRAWH3001319, BRAWH3001326, BRAWH3001475, BRAWH3001636, BRAWH3001638, BRAWH3001712, BRAWH3001760, BRAWH3001783, BRAWH3001833, BRAWH3001879, BRAWH3001891, BRAWH3001918, BRAWH3002433, BRAWH3002467, BRAWH3002513, BRAWH3002574, BRAWH3002600, BRAWH3002819, BRAWH3003019, BRAWH3003136, BRAWH3003244, BRAWH3003343, BRAWH3003411, BRAWH3003522, BRAWH3003573, BRAWH3003598, BRAWH3003727, BRAWH3003801, BRAWH3003975, BRAWH3004222, BRAWH3004335, BRAWH3004350, BRAWH3004453, BRAWH3004530, BRAWH3004666, BRAWH3005037, BRAWH3005047, BRAWH3005132, BRAWH3005146, BRAWH3005292, BRAWH3005300, BRAWH3005422, BRAWH3005534, BRAWH3005886, BRAWH3005892, BRAWH3005896, BRAWH3005912, BRAWH3005981, BRAWH3006547, BRAWH3006548, BRAWH3006761, BRAWH3006792, BRAWH3007129, BRAWH3007221, BRAWH3007441, BRAWH3007455, BRAWH3007506, BRAWH3007726, BRAWH3007783, BRAWH3008167, BRAWH3008341, BRAWH3008559, BRAWH3008697, BRAWH3008867, BRAWH3008931, BRAWH3009017, BRAWH3009285, BRAWH3009297, BRAWH3009546, BRAWH3009961, BRAWH3010461, BRAWH3010560, BRAWH3010602, BRAWH3010657, BRAWH3010726, BRAWH3010833, BRAWH3011101, BRAWH3011331, BRAWH3011402, BRAWH3011577, BRAWH3011623, BRAWH3011637, BRAWH3011685, BRAWH3011907, BRAWH3011929, BRAWH3012005, BRAWH3012662, BRAWH3012779, BRAWH3013009, BRAWH3013049, BRAWH3013197, BRAWH3013264, BRAWH3013508, BRAWH3014609, BRAWH3014639, BRAWH3015017, BRAWH3015175, BRAWH3015260, BRAWH3015610, BRAWH3015825, BRAWH3016123, BRAWH3016271, BRAWH3016715, BRAWH3017259, BRAWH3017260, BRAWH3017477, BRAWH3017537, BRAWH3017980, BRAWH3018063, BRAWH3018369, BRAWH3018548, BRAWH3018969, BRAWH3019026, BRAWH3019529, BRAWH3019594, BRAWH3019629, BRAWH3019820, BRAWH3020200, BRAWH3020318, BRAWH3020486, BRAWH3020884, BRAWH3020928, BRAWH3021012, BRAWH3021545, BRAWH3021574, BRAWH3021580, BRAWH3021641, BRAWH3021643, BRAWH3021724, BRAWH3022347, BRAWH3022431, BRAWH3022459, BRAWH3022542, BRAWH3022719, BRAWH3022866, BRAWH3022900, BRAWH3023156, BRAWH3023168, BRAWH3023274, BRAWH3023421, BRAWH3024231, BRAWH3024242, BRAWH3024469, BRAWH3024506, BRAWH3024613, BRAWH3024989, BRAWH3026349, BRAWH3026394, BRAWH3026529, BRAWH3027420, BRAWH3027440, BRAWH3027533, BRAWH3027574, BRAWH3027607, BRAWH3027616, BRAWH3027675, BRAWH3027806, BRAWH3027880, BRAWH3027927, BRAWH3028202, BRAWH3028223, BRAWH3028306, BRAWH3028461, BRAWH3028645, BRAWH3028754, BRAWH3028796, BRAWH3029254, BRAWH3029313, BRAWH3029538, BRAWH3029556, BRAWH3029806, BRAWH3030613, BRAWH3030772, BRAWH3030810, BRAWH3030892, BRAWH3030910, BRAWH3030950, BRAWH3031054, BRAWH3031710, BRAWH3031902, BRAWH3032298, BRAWH3032340, BRAWH3032571, BRAWH3032620, BRAWH3032930, BRAWH3033117, BRAWH3033293, BRAWH3033448, BRAWH3033513, BRAWH3034097, BRAWH3034114, BRAWH3034134, BRAWH3034668, BRAWH3034743, BRAWH3034775, BRAWH3034890, BRAWH3035154, BRAWH3035403, BRAWH3035904, BRAWH3035914, BRAWH3035936, BRAWH3036077, BRAWH3036247, BRAWH3036270, BRAWH3036561, BRAWH3036738, BRAWH3036951, BRAWH3037265, BRAWH3037394, BRAWH3037533, BRAWH3037979, BRAWH3038055, BRAWH3038230, BRAWH3038252, BRAWH3038324, BRCAN1000065, BRCAN1000076, BRCAN1000105, BRCAN1000149, BRCAN1000168, BRCAN2000148, BRCAN2000149, BRCAN2000209, BRCAN2000239, BRCAN2000346, BRCAN2000364, BRCAN2000383, BRCAN2000418, BRCAN2000523, BRCAN2000541, BRCAN2000563, BRCAN2000577, BRCAN2000620, BRCAN2000763, BRCAN2000832, BRCAN2000923, BRCAN2001223, BRCAN2001866, BRCAN2002416, BRCAN2002473, BRCAN2002562, BRCAN2002662, BRCAN2002826, BRCAN2002854, BRCAN2002856, BRCAN2002892, BRCAN2002944, BRCAN2002948, BRCAN2003070, BRCAN2003269, BRCAN2003389, BRCAN2003628, BRCAN2003703, BRCAN2003746, BRCAN2003814, BRCAN2003987, BRCAN2004173, BRCAN2004355, BRCAN2004371, BRCAN2004653, BRCAN2004699, BRCAN2005436, BRCAN2005449, BRCAN2006019, BRCAN2006051, BRCAN2006063, BRCAN2006117, BRCAN2006174, BRCAN2006290, BRCAN2006297, BRCAN2006323, BRCAN2006401, BRCAN2006411, BRCAN2006450, BRCAN2006955, BRCAN2007119, BRCAN2007144, BRCAN2007409, BRCAN2007426, BRCAN2007525, BRCAN2007700, BRCAN2008494, BRCAN2008528, BRCAN2008701, BRCAN2008894, BRCAN2009156, BRCAN2009168, BRCAN2009203, BRCAN2009432, BRCAN2010374, BRCAN2010376, BRCAN2010547, BRCAN2010581, BRCAN2010665, BRCAN2011254, BRCAN2011316, BRCAN2011602, BRCAN2011946, BRCAN2012110, BRCAN2012355, BRCAN2012402, BRCAN2012408, BRCAN2012481, BRCAN2012613, BRCAN2012713, BRCAN2012929, BRCAN2013655, BRCAN2013660, BRCAN2014143, BRCAN2014229, BRCAN2014370, BRCAN2014602, BRCAN2014652, BRCAN2014788, BRCAN2014881, BRCAN2014952, BRCAN2015371, BRCAN2015402, BRCAN2015464, BRCAN2015719, BRCAN2015757, BRCAN2015886, BRCAN2016025, BRCAN2016046, BRCAN2016174, BRCAN2016433, BRCAN2016619, BRCAN2016762, BRCAN2016814, BRCAN2017442, BRCAN2017905, BRCAN2018240, BRCAN2018269, BRCAN2018490, BRCAN2018566, BRCAN2018667, BRCAN2018748, BRCAN2018935, BRCAN2019002, BRCAN2019387, BRCAN2019653, BRCAN2019773, BRCAN2019907, BRCAN2020234, BRCAN2020331, BRCAN2020412, BRCAN2020467, BRCAN2020710, BRCAN2020880, BRCAN2021024, BRCAN2021325, BRCAN2021452, BRCAN2021669, BRCAN2021718, BRCAN2022126, BRCAN2022191, BRCAN2022472, BRCAN2022474, BRCAN2023347, BRCAN2023724, BRCAN2024451, BRCAN2024563, BRCAN2025009, BRCAN2025093, BRCAN2025349, BRCAN2025368, BRCAN2025712, BRCAN2025982, BRCAN2026117, BRCAN2026340, BRCAN2026711, BRCAN2027150, BRCAN2027310, BRCAN2027334, BRCAN2027355, BRCAN2027364, BRCAN2027513, BRCAN2027593, BRCAN2027970, BRCAN2028021, BRCAN2028040, BRCAN2028319, BRCAN2028338, BRCAN2028355, BRCAN2028378, BRCAN2028460, BRCAN2028545, BRCAN2028634, BRCAN2028702, BRCOC1000040, BRCOC1000087, BRCOC1000094, BRCOC2000004, BRCOC2000047, BRCOC2000152, BRCOC2000184, BRCOC2000186, BRCOC2000333, BRCOC2000360, BRCOC2000404, BRCOC2000487, BRCOC2000637, BRCOC2000670, BRCOC2000816, BRCOC2000850, BRCOC2001355, BRCOC2002085, BRCOC2002155, BRCOC2002323, BRCOC2002659, BRCOC2002664, BRCOC2002686, BRCOC2002751, BRCOC2002756, BRCOC2002777, BRCOC2002835, BRCOC2003100, BRCOC2003125, BRCOC2003187, BRCOC2003213, BRCOC2003513, BRCOC2003732, BRCOC2003740, BRCOC2004036, BRCOC2004175, BRCOC2004354, BRCOC2004455, BRCOC2004950, BRCOC2005542, BRCOC2005903, BRCOC2005951, BRCOC2006164, BRCOC2006189, BRCOC2006243, BRCOC2006270, BRCOC2006639, BRCOC2006942, BRCOC2007034, BRCOC2007593, BRCOC2007733, BRCOC2007769, BRCOC2008064, BRCOC2008225, BRCOC2008642, BRCOC2008993, BRCOC2009052, BRCOC2009196, BRCOC2009380, BRCOC2009638, BRCOC2009937, BRCOC2010115, BRCOC2010510, BRCOC2010730, BRCOC2010980, BRCOC2010994, BRCOC2011010, BRCOC2011398, BRCOC2011418, BRCOC2011769, BRCOC2011996, BRCOC2012172, BRCOC2012229, BRCOC2012386, BRCOC2012551, BRCOC2012813, BRCOC2013448, BRCOC2013573, BRCOC2013675, BRCOC2013780, BRCOC2014033, BRCOC2014400, BRCOC2014748, BRCOC2014833, BRCOC2015597, BRCOC2015824, BRCOC2015908, BRCOC2015944, BRCOC2016525, BRCOC2016661, BRCOC2017061, BRCOC2017652, BRCOC2017856, BRCOC2018775, BRCOC2018877, BRCOC2019255, BRCOC2019549, BRCOC2019841, BRCOC2019896, BRCOC2019903, BRCOC2019910, BRCOC2019934, BRCOC2020122, BRCOC2020142, BRHIP1000058, BRHIP1000072, BRHIP1000108, BRHIP1000129, BRHIP1000174, BRHIP1000258, BRHIP2000021, BRHIP2000079, BRHIP2000087, BRHIP2000163, BRHIP2000210, BRHIP2000239, BRHIP2000245, BRHIP2000312, BRHIP2000359, BRHIP2000445, BRHIP2000506, BRHIP2000532, BRHIP2000621, BRHIP2000691, BRHIP2000826, BRHIP2000920, BRHIP2001074, BRHIP2001686, BRHIP2001782, BRHIP2001802, BRHIP2001805, BRHIP2001886, BRHIP2001927, BRHIP2002122, BRHIP2002143, BRHIP2002172, BRHIP2002339, BRHIP2002346, BRHIP2002510, BRHIP2002664, BRHIP2002722, BRHIP2002929, BRHIP2003048, BRHIP2003062, BRHIP2003242, BRHIP2003272, BRHIP2003748, BRHIP2003786, BRHIP2003828, BRHIP2003917, BRHIP2004312, BRHIP2004355, BRHIP2004359, BRHIP2004814, BRHIP2004883, BRHIP2004902, BRHIP2005010, BRHIP2005236, BRHIP2005271, BRHIP2005354, BRHIP2005600, BRHIP2005719, BRHIP2005724, BRHIP2005752, BRHIP2005932, BRHIP2006617, BRHIP2006782, BRHIP2006800, BRHIP2006819, BRHIP2006921, BRHIP2007307, BRHIP2007616, BRHIP2007690, BRHIP2007741, BRHIP2007928, BRHIP2007969, BRHIP2008269, BRHIP2008389, BRHIP2008607, BRHIP2008756, BRHIP2008909, BRHIP2009019, BRHIP2009177, BRHIP2009340, BRHIP2009351, BRHIP2009414, BRHIP2009474, BRHIP2009617, BRHIP2009685, BRHIP2010217, BRHIP2010309, BRHIP2010444, BRHIP2010487, BRHIP2010571, BRHIP2010593, BRHIP2010610, BRHIP2010723, BRHIP2010744, BRHIP2011080, BRHIP2011120, BRHIP2011199, BRHIP2011491, BRHIP2011508, BRHIP2011616, BRHIP2011783, BRHIP2011838, BRHIP2011891, BRHIP2011933, BRHIP2012054, BRHIP2012059, BRHIP2012141, BRHIP2012314, BRHIP2012360, BRHIP2012545, BRHIP2012580, BRHIP2012642, BRHIP2012750, BRHIP2012922, BRHIP2012923, BRHIP2012972, BRHIP2013286, BRHIP2013447, BRHIP2013510, BRHIP2013699, BRHIP2013723, BRHIP2013958, BRHIP2013972, BRHIP2014063, BRHIP2014228, BRHIP2014285, BRHIP2014291, BRHIP2014373, BRHIP2014386, BRHIP2014387, BRHIP2014954, BRHIP2015153, BRHIP2015224, BRHIP2015245, BRHIP2015356, BRHIP2015360, BRHIP2015679, BRHIP2016005, BRHIP2016125, BRHIP2016788, BRHIP2016968, BRHIP2016990, BRHIP2017010, BRHIP2017315, BRHIP2017385, BRHIP2017404, BRHIP2017542, BRHIP2017553, BRHIP2017642, BRHIP2017714, BRHIP2017780, BRHIP2017945, BRHIP2018014, BRHIP2018369, BRHIP2018612, BRHIP2018635, BRHIP2018650, BRHIP2018712, BRHIP2018719, BRHIP2018805, BRHIP2018998, BRHIP2019007, BRHIP2019047, BRHIP2019149, BRHIP2019177, BRHIP2019186, BRHIP2019291, BRHIP2019494, BRHIP2019589, BRHIP2019641, BRHIP2019819, BRHIP2019884, BRHIP2019972, BRHIP2020182, BRHIP2020573, BRHIP2020622, BRHIP2020695, BRHIP2020743, BRHIP2020799, BRHIP2020842, BRHIP2020859, BRHIP2020930, BRHIP2021102, BRHIP2021289, BRHIP2021495, BRHIP2021615, BRHIP2021744, BRHIP2021762, BRHIP2021858, BRHIP2021929, BRHIP2022006, BRHIP2022054, BRHIP2022221, BRHIP2022228, BRHIP2022298, BRHIP2022326, BRHIP2022467, BRHIP2022708, BRHIP2022986, BRHIP2023071, BRHIP2023229, BRHIP2023292, BRHIP2023309, BRHIP2023369, BRHIP2023438, BRHIP2023695, BRHIP2023735, BRHIP2023762, BRHIP2023773, BRHIP2023860, BRHIP2023869, BRHIP2024046, BRHIP2024165, BRHIP2024201, BRHIP2024347, BRHIP2024549, BRHIP2024742, BRHIP2024789, BRHIP2024911, BRHIP2024941, BRHIP2025245, BRHIP2025366, BRHIP2025448, BRHIP2025679, BRHIP2025739, BRHIP2025797, BRHIP2026021, BRHIP2026061, BRHIP2026155, BRHIP2026214, BRHIP2026288, BRHIP2026346, BRHIP2026557, BRHIP2026723, BRHIP2026877, BRHIP2027017, BRHIP2027054, BRHIP2027077, BRHIP2027563, BRHIP2027685, BRHIP2027762, BRHIP2028187, BRHIP2028303, BRHIP2028330, BRHIP2028480, BRHIP2028583, BRHIP2028593, BRHIP2029176, BRHIP2029283, BRHIP2029393, BRHIP2029529, BRHIP2029643, BRHIP2029663, BRHIP3000017, BRHIP3000060, BRHIP3000070, BRHIP3000081, BRHIP3000131, BRHIP3000240, BRHIP3000377, BRHIP3000457, BRHIP3000475, BRHIP3000488, BRHIP3000526, BRHIP3000626, BRHIP3000859, BRHIP3000907, BRHIP3001076, BRHIP3001079, BRHIP3001141, BRHIP3001283, BRHIP3001338, BRHIP3001360, BRHIP3001481, BRHIP3001878, BRHIP3001964, BRHIP3002114, BRHIP3002124, BRHIP3002141, BRHIP3002363, BRHIP3002691, BRHIP3002920, BRHIP3002931, BRHIP3003063, BRHIP3003126, BRHIP3003306, BRHIP3003340, BRHIP3003395, BRHIP3003484, BRHIP3003644, BRHIP3003688, BRHIP3003795, BRHIP3003961, BRHIP3003984, BRHIP3004193, BRHIP3004215, BRHIP3004416, BRHIP3004710, BRHIP3004725, BRHIP3004774, BRHIP3004786, BRHIP3004863, BRHIP3004968, BRHIP3005037, BRHIP3005137, BRHIP3005142, BRHIP3005231, BRHIP3005307, BRHIP3005574, BRHIP3005673, BRHIP3005768, BRHIP3005801, BRHIP3005944, BRHIP3006279, BRHIP3006294, BRHIP3006390, BRHIP3006449, BRHIP3006683, BRHIP3006786, BRHIP3006950, BRHIP3007172, BRHIP3007183, BRHIP3007195, BRHIP3007223, BRHIP3007239, BRHIP3007291, BRHIP3007409, BRHIP3007424, BRHIP3007483, BRHIP3007586, BRHIP3007609, BRHIP3007640, BRHIP3007960, BRHIP3008082, BRHIP3008183, BRHIP3008314, BRHIP3008320, BRHIP3008344, BRHIP3008405, BRHIP3008565, BRHIP3008598, BRHIP3008606, BRHIP3008691, BRHIP3008714, BRHIP3008997, BRHIP3009099, BRHIP3009140, BRHIP3009181, BRHIP3009318, BRHIP3009427, BRHIP3009448, BRHIP3009672, BRHIP3009753, BRHIP3010135, BRHIP3010289, BRHIP3010529, BRHIP3011082, BRHIP3011241, BRHIP3011269, BRHIP3011460, BRHIP3011567, BRHIP3011831, BRHIP3012185, BRHIP3012289, BRHIP3012357, BRHIP3012736, BRHIP3012745, BRHIP3012868, BRHIP3012997, BRHIP3013078, BRHIP3013271, BRHIP3013588, BRHIP3013698, BRHIP3013765, BRHIP3013897, BRHIP3014237, BRHIP3014675, BRHIP3015620, BRHIP3015751, BRHIP3015854, BRHIP3016032, BRHIP3016213, BRHIP3016302, BRHIP3016421, BRHIP3017109, BRHIP3017146, BRHIP3017256, BRHIP3017325, BRHIP3017558, BRHIP3017637, BRHIP3017855, BRHIP3018278, BRHIP3018784, BRHIP3019643, BRHIP3019824, BRHIP3019880, BRHIP3019956, BRHIP3020046, BRHIP3020155, BRHIP3020182, BRHIP3020733, BRHIP3021019, BRHIP3021499, BRHIP3021534, BRHIP3021778, BRHIP3021987, BRHIP3022656, BRHIP3023922, BRHIP3024118, BRHIP3024533, BRHIP3024703, BRHIP3024725, BRHIP3024820, BRHIP3025161, BRHIP3025702, BRHIP3025795, BRHIP3025844, BRHIP3026052, BRHIP3026097, BRHIP3026231, BRHIP3026335, BRHIP3026651, BRHIP3027105, BRHIP3027137, BRHIP3027160, BRHIP3027191, BRHIP3027501, BRHIP3027594, BRHIP3027651, BRHIP3027854, BRHIP3027947, BRHIP3028570, BRHIP3028742, BRSSN1000056, BRSSN1000059, BRSSN1000092, BRSSN1000153, BRSSN2000097, BRSSN2000175, BRSSN2000197, BRSSN2000244, BRSSN2000293, BRSSN2000295, BRSSN2000312, BRSSN2000498, BRSSN2000518, BRSSN2000561, BRSSN2000566, BRSSN2000684, BRSSN2000715, BRSSN2000832, BRSSN2001213, BRSSN2001275, BRSSN2001342, BRSSN2001426, BRSSN2001503, BRSSN2001579, BRSSN2001758, BRSSN2001810, BRSSN2001869, BRSSN2002857, BRSSN2002859, BRSSN2003086, BRSSN2003093, BRSSN2003820, BRSSN2003841, BRSSN2003937, BRSSN2004142, BRSSN2004303, BRSSN2004304, BRSSN2004496, BRSSN2004657, BRSSN2004679, BRSSN2004686, BRSSN2004710, BRSSN2004719, BRSSN2005847, BRSSN2006133, BRSSN2006390, BRSSN2006575, BRSSN2006611, BRSSN2006644, BRSSN2006892, BRSSN2007076, BRSSN2007168, BRSSN2007202, BRSSN2007338, BRSSN2007504, BRSSN2007819, BRSSN2008125, BRSSN2008419, BRSSN2008464, BRSSN2008549, BRSSN2008797, BRSSN2009119, BRSSN2009378, BRSSN2009389, BRSSN2009395, BRSSN2009627, BRSSN2009630, BRSSN2009702, BRSSN2010019, BRSSN2010110, BRSSN2010587, BRSSN2010596, BRSSN2010830, BRSSN2011262, BRSSN2011653, BRSSN2011738, BRSSN2011843, BRSSN2012081, BRSSN2012103, BRSSN2012157, BRSSN2012198, BRSSN2012254, BRSSN2012439, BRSSN2012622, BRSSN2012691, BRSSN2012838, BRSSN2013095, BRSSN2013544, BRSSN2013696, BRSSN2013702, BRSSN2013733, BRSSN2013753, BRSSN2013874, BRSSN2014112, BRSSN2014294, BRSSN2014299, BRSSN2014424, BRSSN2014513, BRSSN2014556, BRSSN2014573, BRSSN2014610, BRSSN2014636, BRSSN2014685, BRSSN2015199, BRSSN2015238, BRSSN2015369, BRSSN2015493, BRSSN2015497, BRSSN2015554, BRSSN2015707, BRSSN2015773, BRSSN2015907, BRSSN2015982, BRSSN2016589, BRSSN2016768, BRSSN2016905, BRSSN2017297, BRSSN2017422, BRSSN2017530, BRSSN2017682, BRSSN2017757, BRSSN2018218, BRSSN2018440, BRSSN2018447, BRSSN2018581, BRSSN2018731, BRSSN2018771, BRSSN2018925, BRSTN1000083, BRSTN1000097, BRSTN2000058, BRSTN2000070, BRSTN2000220, BRSTN2000312, BRSTN2000367, BRSTN2000536, BRSTN2000872, BRSTN2001067, BRSTN2001613, BRSTN2001801, BRSTN2002105, BRSTN2002400, BRSTN2002532, BRSTN2002691, BRSTN2003590, BRSTN2003835, BRSTN2004863, BRSTN2004869, BRSTN2004987, BRSTN2005721, BRSTN2006306, BRSTN2006466, BRSTN2006580, BRSTN2006583, BRSTN2006638, BRSTN2006865, BRSTN2007000, BRSTN2007118, BRSTN2007284, BRSTN2007765, BRSTN2008052, BRSTN2008283, BRSTN2008367, BRSTN2008418, BRSTN2008457, BRSTN2008475, BRSTN2008930, BRSTN2009247, BRSTN2010089, BRSTN2010107, BRSTN2010363, BRSTN2010416, BRSTN2010500, BRSTN2010569, BRSTN2010750, BRSTN2010923, BRSTN2011211, BRSTN2011597, BRSTN2011688, BRSTN2011799, BRSTN2012089, BRSTN2012284, BRSTN2012320, BRSTN2012380, BRSTN2012451, BRSTN2013354, BRSTN2013502, BRSTN2013931, BRSTN2014490, BRSTN2014633, BRSTN2014751, BRSTN2014770, BRSTN2015015, BRSTN2015889, BRSTN2015978, BRSTN2016066, BRSTN2016335, BRSTN2016678, BRSTN2016918, BRSTN2016992, BRSTN2017151, BRSTN2017237, BRSTN2017379, BRSTN2017761, BRSTN2017771, BRSTN2017995, BRSTN2018077, BRSTN2018083, BRSTN2018596, BRSTN2018692, BRSTN2018712, BRSTN2019079, BRSTN2019129, BRTHA1000021, BRTHA1000063, BRTHA1000311, BRTHA2000057, BRTHA2000474, BRTHA2000514, BRTHA2000574, BRTHA2000855, BRTHA2000969, BRTHA2000972, BRTHA2001304, BRTHA2001370, BRTHA2001462, BRTHA2001717, BRTHA2001812, BRTHA2002091, BRTHA2002115, BRTHA2002133, BRTHA2002281, BRTHA2002376, BRTHA2002442, BRTHA2002493, BRTHA2002565, BRTHA2002608, BRTHA2002702, BRTHA2002721, BRTHA2002726, BRTHA2002741, BRTHA2002808, BRTHA2002896, BRTHA2002903, BRTHA2003030, BRTHA2003110, BRTHA2003116, BRTHA2003436, BRTHA2003759, BRTHA2003794, BRTHA2004361, BRTHA2004371, BRTHA2004582, BRTHA2004629, BRTHA2004639, BRTHA2004642, BRTHA2004812, BRTHA2004821, BRTHA2004978, BRTHA2004992, BRTHA2005005, BRTHA2005013, BRTHA2005448, BRTHA2005579, BRTHA2005831, BRTHA2005942, BRTHA2005956, BRTHA2006075, BRTHA2006146, BRTHA2006194, BRTHA2006232, BRTHA2006720, BRTHA2006735, BRTHA2006974, BRTHA2006975, BRTHA2007060, BRTHA2007122, BRTHA2007422, BRTHA2007603, BRTHA2007665, BRTHA2007998, BRTHA2008316, BRTHA2008335, BRTHA2008502, BRTHA2008513, BRTHA2008527, BRTHA2008535, BRTHA2008598, BRTHA2008669, BRTHA2008955, BRTHA2009311, BRTHA2009349, BRTHA2009486, BRTHA2009803, BRTHA2009846, BRTHA2009886, BRTHA2009972, BRTHA2010008, BRTHA2010033, BRTHA2010073, BRTHA2010097, BRTHA2010191, BRTHA2010397, BRTHA2010608, BRTHA2010672, BRTHA2010884, BRTHA2010907, BRTHA2011062, BRTHA2011194, BRTHA2011321, BRTHA2011351, BRTHA2011500, BRTHA2011641, BRTHA2011691, BRTHA2012129, BRTHA2012183, BRTHA2012189, BRTHA2012351, BRTHA2012392, BRTHA2012466, BRTHA2012555, BRTHA2012562, BRTHA2012980, BRTHA2013054, BRTHA2013262, BRTHA2013275, BRTHA2013426, BRTHA2013460, BRTHA2013515, BRTHA2013540, BRTHA2013595, BRTHA2013610, BRTHA2013707, BRTHA2013942, BRTHA2014287, BRTHA2014334, BRTHA2014381, BRTHA2014578, BRTHA2014647, BRTHA2014663, BRTHA2014792, BRTHA2014828, BRTHA2014909, BRTHA2014975, BRTHA2014997, BRTHA2015406, BRTHA2015478, BRTHA2015696, BRTHA2015700, BRTHA2015853, BRTHA2015878, BRTHA2016179, BRTHA2016215, BRTHA2016267, BRTHA2016318, BRTHA2016496, BRTHA2016543, BRTHA2016552, BRTHA2016765, BRTHA2016918, BRTHA2017178, BRTHA2017353, BRTHA2017364, BRTHA2017972, BRTHA2017985, BRTHA2018011, BRTHA2018129, BRTHA2018165, BRTHA2018304, BRTHA2018344, BRTHA2018420, BRTHA2018443, BRTHA2018504, BRTHA2018558, BRTHA2018591, BRTHA2018624, BRTHA2018706, BRTHA2018707, BRTHA2019014, BRTHA2019022, BRTHA2019048, BRTHA2019073, BRTHA2019726, BRTHA2019743, BRTHA2020400, BRTHA2020566, BRTHA2020642, BRTHA2020695, BRTHA2020721, BRTHA2020781, BRTHA2020811, BRTHA2020910, BRTHA2021212, BRTHA2021440, BRTHA2021450, BRTHA2022074, BRTHA2022914, BRTHA2022968, BRTHA2023402, BRTHA2023437, BRTHA2024177, BRTHA2024354, BRTHA2024712, BRTHA2025869, BRTHA2026071, BRTHA2026290, BRTHA2026311, BRTHA2027227, BRTHA2027250, BRTHA2027546, BRTHA2028297, BRTHA2029969, BRTHA2030036, BRTHA2030213, BRTHA2031517, BRTHA2031800, BRTHA2031917, BRTHA2032763, BRTHA2032845, BRTHA2033122, BRTHA2033155, BRTHA2033264, BRTHA2033320, BRTHA2033469, BRTHA2033683, BRTHA2034281, BRTHA2034576, BRTHA2034874, BRTHA2035448, BRTHA2035743, BRTHA2036055, BRTHA2036295, BRTHA2036660, BRTHA2037247, BRTHA2038279, BRTHA2038345, BRTHA2038353, BRTHA2038396, BRTHA3000252, BRTHA3000273, BRTHA3000296, BRTHA3000297, BRTHA3000325, BRTHA3000456, BRTHA3000633, BRTHA3000789, BRTHA3001221, BRTHA3001623, BRTHA3002265, BRTHA3002401, BRTHA3002411, BRTHA3002427, BRTHA3002864, BRTHA3002933, BRTHA3002955, BRTHA3003000, BRTHA3003023, BRTHA3003074, BRTHA3003225, BRTHA3003339, BRTHA3003343, BRTHA3003417, BRTHA3003449, BRTHA3003474, BRTHA3003490, BRTHA3003704, BRTHA3003736, BRTHA3004307, BRTHA3004432, BRTHA3004475, BRTHA3004502, BRTHA3004610, BRTHA3005046, BRTHA3005735, BRTHA3005988, BRTHA3006318, BRTHA3006593, BRTHA3006856, BRTHA3007113, BRTHA3007130, BRTHA3007148, BRTHA3007319, BRTHA3007469, BRTHA3007472, BRTHA3007532, BRTHA3007662, BRTHA3007685, BRTHA3007769, BRTHA3007922, BRTHA3008143, BRTHA3008293, BRTHA3008310, BRTHA3008386, BRTHA3008520, BRTHA3008608, BRTHA3008694, BRTHA3008778, BRTHA3008826, BRTHA3009037, BRTHA3009090, BRTHA3009291, BRTHA3009858, BRTHA3010135, BRTHA3010366, BRTHA3010469, BRTHA3010530, BRTHA3010717, BRTHA3011149, BRTHA3011187, BRTHA3011194, BRTHA3011229, BRTHA3011265, BRTHA3011361, BRTHA3011510, BRTHA3011892, BRTHA3012265, BRTHA3013860, BRTHA3013882, BRTHA3013884, BRTHA3013981, BRTHA3014000, BRTHA3014105, BRTHA3014507, BRTHA3014547, BRTHA3014691, BRTHA3014835, BRTHA3014854, BRTHA3014908, BRTHA3014920, BRTHA3015815, BRTHA3016616, BRTHA3016835, BRTHA3016845, BRTHA3016917, BRTHA3017047, BRTHA3017589, BRTHA3017848, BRTHA3018409, BRTHA3018514, BRTHA3018617, BRTHA3018623, BRTHA3018656, BRTHA3019048, BRTHA3019105, BRTHA3019183, BRTHA3020000, BRTHA3020314, BRTHA3020369, BRTHA3021569, BRTHA3021708, BRTHA3021786, BRTHA3021971, BRTHA3022641, BRTHA3023403, BRTHA3023523, BRTHA3023590, BRTHA3023929, BRTHA3024233, BRTHA3024600, BRTHA3025073, BRTHA3025789, BRTHA3025826, BRTHA3026161, BRTHA3026180, BRTHA3026507, BRTHA3026556, BRTHA3026916, BRTHA3027171, BRTHA3027318, BRTHA3027638, BRTHA3027820, BRTHA3027879, BRTHA3027957, BRTHA3028339, BRTHA3028505, BRTHA3028782, CD34C2000051, CD34C2000152, CD34C2000175, CD34C2000443, CD34C3000125, CD34C3000252, CD34C3000314, CD34C3000424, CD34C3000494, CERVX1000042, CERVX2000812, CERVX2000968, CERVX2002006, CERVX2002013, CERVX2002430, CERVX2002770, CHONS1000058, CHONS2000172, CHONS2000797, CHONS2001287, CHONS2001382, CHONS2001797, CHONS2001834, CHONS2002419, CHONS2002829, COLON1000030, COLON1000084, COLON1000135, COLON2000470, COLON2000557, COLON2000568, COLON2001721, COLON2001829, COLON2001866, COLON2002443, COLON2002520, COLON2003043, COLON2003529, COLON2004318, COLON2004351, COLON2004478, COLON2004911, COLON2005126, COLON2005623, COLON2005735, COLON2005772, COLON2006263, COLON2006282, COLON2006417, COLON2007274, COLON2007733, COLON2008105, COLON2009337, COLON2009499, CORDB1000140, CORDB2000061, CORDB2000127, CORDB2000541, CTONG1000009, CTONG1000010, CTONG1000020, CTONG1000022, CTONG1000040, CTONG1000056, CTONG1000062, CTONG1000086, CTONG1000088, CTONG1000093, CTONG1000097, CTONG1000113, CTONG1000137, CTONG1000165, CTONG1000180, CTONG1000181, CTONG1000218, CTONG1000220, CTONG1000241, CTONG1000277, CTONG1000283, CTONG1000288, CTONG1000302, CTONG1000341, CTONG1000467, CTONG1000476, CTONG1000488, CTONG1000508, CTONG1000540, CTONG2000031, CTONG2000034, CTONG2000042, CTONG2000063, CTONG2000201, CTONG2000218, CTONG2000279, CTONG2000303, CTONG2000330, CTONG2000395, CTONG2000411, CTONG2000452, CTONG2000465, CTONG2000480, CTONG2000508, CTONG2000561, CTONG2000589, CTONG2000766, CTONG2000771, CTONG2000819, CTONG2000827, CTONG2000846, CTONG2000855, CTONG2000977, CTONG2001139, CTONG2001320, CTONG2001366, CTONG2001413, CTONG2001428, CTONG2001513, CTONG2001524, CTONG2001533, CTONG2001598, CTONG2001681, CTONG2001724, CTONG2001748, CTONG2001749, CTONG2001800, CTONG2001820, CTONG2001858, CTONG2001877, CTONG2001911, CTONG2001932, CTONG2001955, CTONG2002066, CTONG2002073, CTONG2002095, CTONG2002143, CTONG2002270, CTONG2002395, CTONG2002417, CTONG2002418, CTONG2002520, CTONG2002558, CTONG2002590, CTONG2002709, CTONG2002721, CTONG2002744, CTONG2002766, CTONG2002803, CTONG2002816, CTONG2002820, CTONG2002832, CTONG2002841, CTONG2002965, CTONG2002999, CTONG2003028, CTONG2003094, CTONG2003100, CTONG2003115, CTONG2003189, CTONG2003245, CTONG2003293, CTONG2003348, CTONG2003350, CTONG2003361, CTONG2003372, CTONG2003375, CTONG2003427, CTONG2003517, CTONG2003599, CTONG2003680, CTONG2003699, CTONG2003764, CTONG2003782, CTONG2003889, CTONG2003945, CTONG2004000, CTONG2004062, CTONG2004115, CTONG2004126, CTONG2004264, CTONG2004305, CTONG2004397, CTONG2004423, CTONG2004454, CTONG2004669, CTONG2004716, CTONG2004912, CTONG2004941, CTONG2004948, CTONG2005028, CTONG2005049, CTONG2005110, CTONG2005145, CTONG2005278, CTONG2005290, CTONG2005374, CTONG2005399, CTONG2005468, CTONG2005567, CTONG2005585, CTONG2005615, CTONG2005635, CTONG2005775, CTONG2005795, CTONG2005890, CTONG2005904, CTONG2005913, CTONG2006129, CTONG2006223, CTONG2006235, CTONG2006273, CTONG2006310, CTONG2006377, CTONG2006393, CTONG2006412, CTONG2006449, CTONG2006515, CTONG2006524, CTONG2006568, CTONG2006620, CTONG2006666, CTONG2006691, CTONG2006709, CTONG2006798, CTONG2006836, CTONG2006942, CTONG2006964, CTONG2007007, CTONG2007009, CTONG2007091, CTONG2007104, CTONG2007168, CTONG2007175, CTONG2007259, CTONG2007272, CTONG2007293, CTONG2007297, CTONG2007399, CTONG2007400, CTONG2007417, CTONG2007441, CTONG2007474, CTONG2007586, CTONG2007613, CTONG2007623, CTONG2007681, CTONG2007776, CTONG2007779, CTONG2007898, CTONG2007959, CTONG2007970, CTONG2008014, CTONG2008184, CTONG2008262, CTONG2008321, CTONG2008343, CTONG2008402, CTONG2008405, CTONG2008466, CTONG2008518, CTONG2008521, CTONG2008562, CTONG2008577, CTONG2008595, CTONG2008621, CTONG2008689, CTONG2008720, CTONG2008721, CTONG2008773, CTONG2008792, CTONG2008989, CTONG2009033, CTONG2009108, CTONG2009132, CTONG2009156, CTONG2009181, CTONG2009257, CTONG2009258, CTONG2009268, CTONG2009270, CTONG2009395, CTONG2009423, CTONG2009440, CTONG2009527, CTONG2009529, CTONG2009531, CTONG2009534, CTONG2009570, CTONG2009572, CTONG2009604, CTONG2009643, CTONG2009675, CTONG2009689, CTONG2009725, CTONG2009766, CTONG2009768, CTONG2009844, CTONG2009871, CTONG2009887, CTONG2009891, CTONG2009923, CTONG2009938, CTONG2009955, CTONG2009958, CTONG2009963, CTONG2010018, CTONG2010024, CTONG2010116, CTONG2010133, CTONG2010148, CTONG2010276, CTONG2010330, CTONG2010408, CTONG2010508, CTONG2010566, CTONG2010623, CTONG2010649, CTONG2010652, CTONG2010803, CTONG2011188, CTONG2011429, CTONG2011474, CTONG2011676, CTONG2011716, CTONG2011765, CTONG2011779, CTONG2011801, CTONG2011815, CTONG2011822, CTONG2011825, CTONG2011920, CTONG2011985, CTONG2012001, CTONG2012050, CTONG2012077, CTONG2012101, CTONG2012123, CTONG2012230, CTONG2012401, CTONG2012422, CTONG2012425, CTONG2012447, CTONG2012453, CTONG2012473, CTONG2012476, CTONG2012533, CTONG2012554, CTONG2012564, CTONG2012661, CTONG2012724, CTONG2012738, CTONG2012745, CTONG2012758, CTONG2012843, CTONG2012879, CTONG2012901, CTONG2013128, CTONG2013149, CTONG2013156, CTONG2013178, CTONG2013222, CTONG2013284, CTONG2013339, CTONG2013352, CTONG2013381, CTONG2013393, CTONG2013511, CTONG2013630, CTONG2013803, CTONG2013934, CTONG2013985, CTONG2013986, CTONG2014032, CTONG2014058, CTONG2014119, CTONG2014165, CTONG2014191, CTONG2014206, CTONG2014234, CTONG2014264, CTONG2014280, CTONG2014369, CTONG2014389, CTONG2014491, CTONG2014630, CTONG2014635, CTONG2014646, CTONG2014705, CTONG2014898, CTONG2014946, CTONG2014954, CTONG2014959, CTONG2014966, CTONG2014995, CTONG2015204, CTONG2015316, CTONG2015330, CTONG2015345, CTONG2015358, CTONG2015434, CTONG2015540, CTONG2015596, CTONG2015633, CTONG2015678, CTONG2015717, CTONG2015804, CTONG2015815, CTONG2015866, CTONG2015914, CTONG2015953, CTONG2016185, CTONG2016217, CTONG2016355, CTONG2016408, CTONG2016499, CTONG2016505, CTONG2016559, CTONG2016658, CTONG2016775, CTONG2016797, CTONG2016846, CTONG2016904, CTONG2016942, CTONG2016953, CTONG2017021, CTONG2017094, CTONG2017292, CTONG2017409, CTONG2017458, CTONG2017500, CTONG2017604, CTONG2017650, CTONG2017798, CTONG2017804, CTONG2017814, CTONG2017910, CTONG2017939, CTONG2017989, CTONG2017998, CTONG2018062, CTONG2018069, CTONG2018147, CTONG2018211, CTONG2018217, CTONG2018279, CTONG2018343, CTONG2018379, CTONG2018383, CTONG2018413, CTONG2018483, CTONG2018629, CTONG2018632, CTONG2018637, CTONG2018652, CTONG2018653, CTONG2018655, CTONG2018735, CTONG2018739, CTONG2018808, CTONG2018843, CTONG2018898, CTONG2018900, CTONG2018976, CTONG2019029, CTONG2019063, CTONG2019144, CTONG2019232, CTONG2019248, CTONG2019400, CTONG2019590, CTONG2019652, CTONG2019704, CTONG2019788, CTONG2019822, CTONG2019833, CTONG2020031, CTONG2020108, CTONG2020127, CTONG2020171, CTONG2020374, CTONG2020378, CTONG2020411, CTONG2020445, CTONG2020522, CTONG2020560, CTONG2020582, CTONG2020638, CTONG2020806, CTONG2020831, CTONG2020974, CTONG2021024, CTONG2021132, CTONG2021168, CTONG2021289, CTONG2022153, CTONG2022601, CTONG2023021, CTONG2023449, CTONG2023512, CTONG2024031, CTONG2024206, CTONG2024614, CTONG2024749, CTONG2025496, CTONG2025513, CTONG2025516, CTONG2025610, CTONG2025900, CTONG2026513, CTONG2026770, CTONG2026920, CTONG2026987, CTONG2027150, CTONG2027263, CTONG2027327, CTONG2027361, CTONG2027591, CTONG2027736, CTONG2027783, CTONG2027828, CTONG2027959, CTONG2028097, CTONG2028208, CTONG2028309, CTONG2028486, CTONG2028518, CTONG2028687, CTONG2028758, CTONG3000657, CTONG3000686, CTONG3000707, CTONG3000896, CTONG3001123, CTONG3001420, CTONG3001501, CTONG3001560, CTONG3001605, CTONG3001746, CTONG3002020, CTONG3002127, CTONG3002370, CTONG3002412, CTONG3002433, CTONG3002518, CTONG3002552, CTONG3002588, CTONG3002674, CTONG3002728, CTONG3002835, CTONG3002909, CTONG3002947, CTONG3002983, CTONG3003165, CTONG3003179, CTONG3003483, CTONG3003553, CTONG3003598, CTONG3003652, CTONG3003654, CTONG3003669, CTONG3003737, CTONG3003905, CTONG3003972, CTONG3004072, CTONG3004317, CTONG3004397, CTONG3004550, CTONG3004576, CTONG3004607, CTONG3004712, CTONG3004726, CTONG3005325, CTONG3005648, CTONG3005713, CTONG3005803, CTONG3005813, CTONG3006067, CTONG3006073, CTONG3006186, CTONG3006629, CTONG3006650, CTONG3006659, CTONG3007244, CTONG3007444, CTONG3007528, CTONG3007586, CTONG3007870, CTONG3008223, CTONG3008252, CTONG3008258, CTONG3008457, CTONG3008496, CTONG3008566, CTONG3008639, CTONG3008831, CTONG3008951, CTONG3008959, CTONG3009227, CTONG3009287, CTONG3009328, CTONG3009385, D30ST1000066, D30ST1000109, D30ST1000238, D30ST1000267, D30ST1000270, D30ST2000184, D30ST2000618, D30ST2000654, D30ST2000734, D30ST2001328, D30ST2001669, D30ST2001670, D30ST2001788, D30ST2002182, D30ST2002223, D30ST2002262, D30ST2002272, D30ST2002417, D30ST2002436, D30ST2003024, D30ST2003331, D30ST2003607, D30ST2003797, D30ST2004637, D30ST3000169, D30ST3000195, D30ST3000258, D30ST3000291, D30ST3000388, D30ST3000493, D60ST2000127, D60ST2000169, D60ST2000245, D60ST2000358, D60ST2000507, D90ST2000278, D90ST2000440, D90ST2000869, D90ST2001319, D90ST2001433, D90ST2002397, D90ST2003106, D90ST2003108, D90ST2003137, D90ST2003397, D90ST2003580, D90ST2003594, D90ST2003762, D90ST2003791, D90ST2003989, D90ST2004018, D90ST2004073, D90ST2004417, DFNES1000003, DFNES1000083, DFNES1000107, DFNES1000185, DFNES2000143, DFNES2000146, DFNES2000212, DFNES2000292, DFNES2000335, DFNES2000426, DFNES2000432, DFNES2000443, DFNES2000457, DFNES2000471, DFNES2000526, DFNES2000913, DFNES2001091, DFNES2001096, DFNES2001108, DFNES2001177, DFNES2001404, DFNES2001564, DFNES2001565, DFNES2001647, DFNES2001800, DFNES2001829, DFNES2002220, DFNES2002550, DFNES2002588, DFNES2002817, DFNES2002966, DFNES2003081, DFNES2003192, DFNES2003255, DFNES2003742, DFNES2004346, DFNES2004354, DFNES2004383, DFNES2004608, DFNES2004684, DFNES2005266, DFNES2005527, DFNES2005540, DFNES2005690, DFNES2005779, DFNES2005875, DFNES2006346, DFNES2006944, DFNES2007113, DFNES2007299, DFNES2007332, DFNES2007634, DFNES2007641, DFNES2007757, DFNES2008160, DFNES2008280, DFNES2008881, DFNES2009482, DFNES2010502, DFNES2011192, DFNES2011221, DFNES2011239, DFNES2011245, DFNES2011380, DFNES2011499, ERLTF1000021, ERLTF2000324, ERLTF2000465, FCBBF1000024, FCBBF1000025, FCBBF1000038, FCBBF1000053, FCBBF1000061, FCBBF1000063, FCBBF1000069, FCBBF1000077, FCBBF1000115, FCBBF1000117, FCBBF1000118, FCBBF1000125, FCBBF1000131, FCBBF1000139, FCBBF1000155, FCBBF1000157, FCBBF1000171, FCBBF1000174, FCBBF1000197, FCBBF1000198, FCBBF1000206, FCBBF1000220, FCBBF1000232, FCBBF1000233, FCBBF1000243, FCBBF1000270, FCBBF1000272, FCBBF1000280, FCBBF1000297, FCBBF1000305, FCBBF1000314, FCBBF1000322, FCBBF1000349, FCBBF1000367, FCBBF1000374, FCBBF1000376, FCBBF1000377, FCBBF1000395, FCBBF1000397, FCBBF1000403, FCBBF1000412, FCBBF1000425, FCBBF1000437, FCBBF1000449, FCBBF1000476, FCBBF1000509, FCBBF1000546, FCBBF1000550, FCBBF1000556, FCBBF1000574, FCBBF1000581, FCBBF1000582, FCBBF1000598, FCBBF1000604, FCBBF1000618, FCBBF1000627, FCBBF1000671, FCBBF1000675, FCBBF1000684, FCBBF1000686, FCBBF1000687, FCBBF1000691, FCBBF1000732, FCBBF1000748, FCBBF2000038, FCBBF2000087, FCBBF2000094, FCBBF2000105, FCBBF2000123, FCBBF2000195, FCBBF2000214, FCBBF2000232, FCBBF2000259, FCBBF2000276, FCBBF2000291, FCBBF2000362, FCBBF2000379, FCBBF2000473, FCBBF2000502, FCBBF2000566, FCBBF2000576, FCBBF2000591, FCBBF2000677, FCBBF2000678, FCBBF2000685, FCBBF2000733, FCBBF2000782, FCBBF2000808, FCBBF2000815, FCBBF2000825, FCBBF2000940, FCBBF2000951, FCBBF2001001, FCBBF2001116, FCBBF2001183, FCBBF2001188, FCBBF2001211, FCBBF2001238, FCBBF2001243, FCBBF2001291, FCBBF2001299, FCBBF2001309, FCBBF2001400, FCBBF2001427, FCBBF2001480, FCBBF2001529, FCBBF2001538, FCBBF2001594, FCBBF2001672, FCBBF2001675, FCBBF2001718, FCBBF2001720, FCBBF2001817, FCBBF2001868, FCBBF2002044, FCBBF2002111, FCBBF2002281, FCBBF2002370, FCBBF2002541, FCBBF2002626, FCBBF2002897, FCBBF2002898, FCBBF2002904, FCBBF2002928, FCBBF2002953, FCBBF2003083, FCBBF2003102, FCBBF2003269, FCBBF2003293, FCBBF2003297, FCBBF2003395, FCBBF2003528, FCBBF2003543, FCBBF2003549, FCBBF2003567, FCBBF2003636, FCBBF2003823, FCBBF2003895, FCBBF2004066, FCBBF2004090, FCBBF2004138, FCBBF2004217, FCBBF2004256, FCBBF2004373, FCBBF2004448, FCBBF2004671, FCBBF2004707, FCBBF2004788, FCBBF2005069, FCBBF2005122, FCBBF2005428, FCBBF2005439, FCBBF2005538, FCBBF2005637, FCBBF2005645, FCBBF2005658, FCBBF2005733, FCBBF2005909, FCBBF2006131, FCBBF2006380, FCBBF2006418, FCBBF2006452, FCBBF2006634, FCBBF2006781, FCBBF2007012, FCBBF2007186, FCBBF2007265, FCBBF2007302, FCBBF2007556, FCBBF2007610, FCBBF2007633, FCBBF2007840, FCBBF3000102, FCBBF3000120, FCBBF3000168, FCBBF3000175, FCBBF3000227, FCBBF3000228, FCBBF3000229, FCBBF3000233, FCBBF3000269, FCBBF3000361, FCBBF3000367, FCBBF3000388, FCBBF3000462, FCBBF3000473, FCBBF3000501, FCBBF3000518, FCBBF3000550, FCBBF3000847, FCBBF3001018, FCBBF3001020, FCBBF3001081, FCBBF3001235, FCBBF3001281, FCBBF3001302, FCBBF3001377, FCBBF3001594, FCBBF3001657, FCBBF3001818, FCBBF3001855, FCBBF3001890, FCBBF3001912, FCBBF3001914, FCBBF3001918, FCBBF3001924, FCBBF3001977, FCBBF3002163, FCBBF3002188, FCBBF3002190, FCBBF3002268, FCBBF3002475, FCBBF3002556, FCBBF3002592, FCBBF3002658, FCBBF3002782, FCBBF3002818, FCBBF3002925, FCBBF3003216, FCBBF3003305, FCBBF3003373, FCBBF3003475, FCBBF3003481, FCBBF3003557, FCBBF3003787, FCBBF3003902, FCBBF3004021, FCBBF3004041, FCBBF3004261, FCBBF3004323, FCBBF3004390, FCBBF3004409, FCBBF3004502, FCBBF3004715, FCBBF3004842, FCBBF3004847, FCBBF3004955, FCBBF3005160, FCBBF3005218, FCBBF3005444, FCBBF3005698, FCBBF3005729, FCBBF3006171, FCBBF3006249, FCBBF3006288, FCBBF3006399, FCBBF3006628, FCBBF3006821, FCBBF3007077, FCBBF3007150, FCBBF3007152, FCBBF3007242, FCBBF3007244, FCBBF3007248, FCBBF3007453, FCBBF3007462, FCBBF3007540, FCBBF3007597, FCBBF3007604, FCBBF3007631, FCBBF3007855, FCBBF3007859, FCBBF3007860, FCBBF3008073, FCBBF3008100, FCBBF3008153, FCBBF3008159, FCBBF3008251, FCBBF3008311, FCBBF3008362, FCBBF3008382, FCBBF3008475, FCBBF3008556, FCBBF3008644, FCBBF3008689, FCBBF3008748, FCBBF3008870, FCBBF3008938, FCBBF3008944, FCBBF3009069, FCBBF3009101, FCBBF3009152, FCBBF3009256, FCBBF3009317, FCBBF3009428, FCBBF3009464, FCBBF3009479, FCBBF3009526, FCBBF3009541, FCBBF3009703, FCBBF3009717, FCBBF3009888, FCBBF3009949, FCBBF3009978, FCBBF3010008, FCBBF3010012, FCBBF3010124, FCBBF3010130, FCBBF3010142, FCBBF3010149, FCBBF3010211, FCBBF3010361, FCBBF3010508, FCBBF3010544, FCBBF3010586, FCBBF3010601, FCBBF3010665, FCBBF3010695, FCBBF3010729, FCBBF3010733, FCBBF3011003, FCBBF3011418, FCBBF3011485, FCBBF3011523, FCBBF3011570, FCBBF3011592, FCBBF3011867, FCBBF3011889, FCBBF3012170, FCBBF3012182, FCBBF3012288, FCBBF3012332, FCBBF3012347, FCBBF3012443, FCBBF3012588, FCBBF3012667, FCBBF3012842, FCBBF3012901, FCBBF3013041, FCBBF3013058, FCBBF3013205, FCBBF3013266, FCBBF3013307, FCBBF3013341, FCBBF3013506, FCBBF3013589, FCBBF3013623, FCBBF3013800, FCBBF3013846, FCBBF3014229, FCBBF3014260, FCBBF3014355, FCBBF3014567, FCBBF3014770, FCBBF3015100, FCBBF3015119, FCBBF3015131, FCBBF3015317, FCBBF3015727, FCBBF3015758, FCBBF3015809, FCBBF3015870, FCBBF3016018, FCBBF3016178, FCBBF3016451, FCBBF3016618, FCBBF3016622, FCBBF3016644, FCBBF3016667, FCBBF3016928, FCBBF3016987, FCBBF3017024, FCBBF3017059, FCBBF3017071, FCBBF3017123, FCBBF3017233, FCBBF3017255, FCBBF3017288, FCBBF3017535, FCBBF3017681, FCBBF3017729, FCBBF3017873, FCBBF3017918, FCBBF3017974, FCBBF3018067, FCBBF3018173, FCBBF3018453, FCBBF3018591, FCBBF3018753, FCBBF3018826, FCBBF3018949, FCBBF3019085, FCBBF3019320, FCBBF3019437, FCBBF3019455, FCBBF3019564, FCBBF3019569, FCBBF3019570, FCBBF3019663, FCBBF3019716, FCBBF3019784, FCBBF3019839, FCBBF3019867, FCBBF3019961, FCBBF3020030, FCBBF3020138, FCBBF3020140, FCBBF3020163, FCBBF3020232, FCBBF3020599, FCBBF3021026, FCBBF3021191, FCBBF3021221, FCBBF3021501, FCBBF3021506, FCBBF3021524, FCBBF3021807, FCBBF3021940, FCBBF3021985, FCBBF3022005, FCBBF3022291, FCBBF3022311, FCBBF3022504, FCBBF3022566, FCBBF3022593, FCBBF3022765, FCBBF3022767, FCBBF3022894, FCBBF3023061, FCBBF3023078, FCBBF3023368, FCBBF3023372, FCBBF3023443, FCBBF3023599, FCBBF3023704, FCBBF3023887, FCBBF3023895, FCBBF3024002, FCBBF3024096, FCBBF3024225, FCBBF3024266, FCBBF3024364, FCBBF3024623, FCBBF3024793, FCBBF3024911, FCBBF3025098, FCBBF3025252, FCBBF3025280, FCBBF3025285, FCBBF3025417, FCBBF3025528, FCBBF3025568, FCBBF3025650, FCBBF3025674, FCBBF3025730, FCBBF3025737, FCBBF3025905, FCBBF3026021, FCBBF3026048, FCBBF3026251, FCBBF3026308, FCBBF3026651, FCBBF3026678, FCBBF3026692, FCBBF3027104, FCBBF3027199, FCBBF3027328, FCBBF3027559, FCBBF3027717, FCBBF3027755, FCBBF3027768, FCBBF3027854, FCBBF3027863, FCBBF3027903, FCBBF3028102, FCBBF3028143, FCBBF3028188, FCBBF3028202, FCBBF3028472, FCBBF3028528, FCBBF3028582, FCBBF3028593, FCBBF3028671, FCBBF3028794, FCBBF4000017, FCBBF4000061, FCBBF4000076, FCBBF4000142, FCBBF4000173, FCBBF4000192, FCBBF4000193, FCBBF4000268, FCBBF4000282, FCBBF4000399, FCBBF4000415, FCBBF4000500, FCBBF4000529, FCBBF4000548, FCBBF5000041, FCBBF5000061, FCBBF5000165, FCBBF5000261, FCBBF5000325, FCBBF5000353, FCBBF5000384, FCBBF5000483, FCBBF5000495, FEBRA1000005, FEBRA1000008, FEBRA1000022, FEBRA1000030, FEBRA1000057, FEBRA1000138, FEBRA1000148, FEBRA1000149, FEBRA1000183, FEBRA1000188, FEBRA1000189, FEBRA1000190, FEBRA2000007, FEBRA2000021, FEBRA2000035, FEBRA2000053, FEBRA2000126, FEBRA2000220, FEBRA2000253, FEBRA2000282, FEBRA2000286, FEBRA2000297, FEBRA2000311, FEBRA2000321, FEBRA2000333, FEBRA2000377, FEBRA2000378, FEBRA2000391, FEBRA2000394, FEBRA2000397, FEBRA2000399, FEBRA2000402, FEBRA2000404, FEBRA2000409, FEBRA2000415, FEBRA2000436, FEBRA2000438, FEBRA2000452, FEBRA2000454, FEBRA2000462, FEBRA2000468, FEBRA2000491, FEBRA2000504, FEBRA2000532, FEBRA2000538, FEBRA2000575, FEBRA2000581, FEBRA2000656, FEBRA2000659, FEBRA2000680, FEBRA2000690, FEBRA2000727, FEBRA2000734, FEBRA2000740, FEBRA2000757, FEBRA2000762, FEBRA2000771, FEBRA2000772, FEBRA2000782, FEBRA2000787, FEBRA2000790, FEBRA2000793, FEBRA2000803, FEBRA2000805, FEBRA2000809, FEBRA2000815, FEBRA2000856, FEBRA2000862, FEBRA2000877, FEBRA2000880, FEBRA2000909, FEBRA2000917, FEBRA2000928, FEBRA2000936, FEBRA2000937, FEBRA2000959, FEBRA2000972, FEBRA2001004, FEBRA2001012, FEBRA2001020, FEBRA2001093, FEBRA2001124, FEBRA2001133, FEBRA2001146, FEBRA2001161, FEBRA2001175, FEBRA2001197, FEBRA2001217, FEBRA2001227, FEBRA2001245, FEBRA2001267, FEBRA2001294, FEBRA2001334, FEBRA2001351, FEBRA2001438, FEBRA2001440, FEBRA2001487, FEBRA2001492, FEBRA2001523, FEBRA2001561, FEBRA2001571, FEBRA2001581, FEBRA2001584, FEBRA2001590, FEBRA2001591, FEBRA2001610, FEBRA2001620, FEBRA2001659, FEBRA2001669, FEBRA2001698, FEBRA2001705, FEBRA2001706, FEBRA2001715, FEBRA2001745, FEBRA2001752, FEBRA2001772, FEBRA2001790, FEBRA2001828, FEBRA2001867, FEBRA2001914, FEBRA2001974, FEBRA2001989, FEBRA2001990, FEBRA2002009, FEBRA2002086, FEBRA2002109, FEBRA2002191, FEBRA2002260, FEBRA2002352, FEBRA2002399, FEBRA2002410, FEBRA2002429, FEBRA2002442, FEBRA2002456, FEBRA2002508, FEBRA2002525, FEBRA2002527, FEBRA2002552, FEBRA2002574, FEBRA2002601, FEBRA2002611, FEBRA2002628, FEBRA2002662, FEBRA2002682, FEBRA2002727, FEBRA2002781, FEBRA2002783, FEBRA2002792, FEBRA2002818, FEBRA2002858, FEBRA2002882, FEBRA2002897, FEBRA2002908, FEBRA2002931, FEBRA2002933, FEBRA2002962, FEBRA2002986, FEBRA2003054, FEBRA2003115, FEBRA2003128, FEBRA2003155, FEBRA2003163, FEBRA2003181, FEBRA2003198, FEBRA2003253, FEBRA2003258, FEBRA2003275, FEBRA2003308, FEBRA2003327, FEBRA2003429, FEBRA2003436, FEBRA2003454, FEBRA2003468, FEBRA2003470, FEBRA2003520, FEBRA2003524, FEBRA2003541, FEBRA2003675, FEBRA2003707, FEBRA2003711, FEBRA2003726, FEBRA2003750, FEBRA2003822, FEBRA2003833, FEBRA2003897, FEBRA2003907, FEBRA2004023, FEBRA2004026, FEBRA2004029, FEBRA2004042, FEBRA2004053, FEBRA2004056, FEBRA2004091, FEBRA2004110, FEBRA2004191, FEBRA2004202, FEBRA2004219, FEBRA2004237, FEBRA2004268, FEBRA2004293, FEBRA2004329, FEBRA2004331, FEBRA2004443, FEBRA2004485, FEBRA2004490, FEBRA2004538, FEBRA2004592, FEBRA2004620, FEBRA2004628, FEBRA2004651, FEBRA2004767, FEBRA2004813, FEBRA2004840, FEBRA2004852, FEBRA2004867, FEBRA2004914, FEBRA2004933, FEBRA2004987, FEBRA2005014, FEBRA2005036, FEBRA2005079, FEBRA2005114, FEBRA2005216, FEBRA2005291, FEBRA2005361, FEBRA2005377, FEBRA2005380, FEBRA2005416, FEBRA2005427, FEBRA2005458, FEBRA2005476, FEBRA2005572, FEBRA2005701, FEBRA2005726, FEBRA2005734, FEBRA2005787, FEBRA2005788, FEBRA2005824, FEBRA2005995, FEBRA2005998, FEBRA2006061, FEBRA2006112, FEBRA2006150, FEBRA2006165, FEBRA2006255, FEBRA2006270, FEBRA2006315, FEBRA2006346, FEBRA2006354, FEBRA2006357, FEBRA2006368, FEBRA2006379, FEBRA2006396, FEBRA2006401, FEBRA2006409, FEBRA2006418, FEBRA2006427, FEBRA2006476, FEBRA2006491, FEBRA2006519, FEBRA2006521, FEBRA2006627, FEBRA2006664, FEBRA2006667, FEBRA2006726, FEBRA2006736, FEBRA2006793, FEBRA2006808, FEBRA2006817, FEBRA2006873, FEBRA2006890, FEBRA2006942, FEBRA2006977, FEBRA2007017, FEBRA2007176, FEBRA2007200, FEBRA2007212, FEBRA2007247, FEBRA2007280, FEBRA2007414, FEBRA2007436, FEBRA2007449, FEBRA2007458, FEBRA2007534, FEBRA2007544, FEBRA2007551, FEBRA2007566, FEBRA2007589, FEBRA2007613, FEBRA2007620, FEBRA2007622, FEBRA2007708, FEBRA2007714, FEBRA2007793, FEBRA2007818, FEBRA2007823, FEBRA2007900, FEBRA2007901, FEBRA2007931, FEBRA2007957, FEBRA2008009, FEBRA2008086, FEBRA2008134, FEBRA2008135, FEBRA2008159, FEBRA2008165, FEBRA2008172, FEBRA2008201, FEBRA2008210, FEBRA2008265, FEBRA2008266, FEBRA2008282, FEBRA2008287, FEBRA2008311, FEBRA2008341, FEBRA2008360, FEBRA2008459, FEBRA2008468, FEBRA2008475, FEBRA2008481, FEBRA2008542, FEBRA2008583, FEBRA2008660, FEBRA2008662, FEBRA2008681, FEBRA2008692, FEBRA2008741, FEBRA2008755, FEBRA2008836, FEBRA2008859, FEBRA2008861, FEBRA2008866, FEBRA2008881, FEBRA2008928, FEBRA2008983, FEBRA2009016, FEBRA2009022, FEBRA2009029, FEBRA2009074, FEBRA2009117, FEBRA2009120, FEBRA2009162, FEBRA2009185, FEBRA2009240, FEBRA2009265, FEBRA2009276, FEBRA2009289, FEBRA2009327, FEBRA2009328, FEBRA2009352, FEBRA2009362, FEBRA2009385, FEBRA2009416, FEBRA2009419, FEBRA2009437, FEBRA2009478, FEBRA2009507, FEBRA2009514, FEBRA2009541, FEBRA2009567, FEBRA2009588, FEBRA2009731, FEBRA2009754, FEBRA2009780, FEBRA2009846, FEBRA2009986, FEBRA2010141, FEBRA2010299, FEBRA2010484, FEBRA2010719, FEBRA2010746, FEBRA2010768, FEBRA2010802, FEBRA2011063, FEBRA2011090, FEBRA2011356, FEBRA2011392, FEBRA2011414, FEBRA2011593, FEBRA2011665, FEBRA2012090, FEBRA2012120, FEBRA2012181, FEBRA2012195, FEBRA2012397, FEBRA2012418, FEBRA2012507, FEBRA2012625, FEBRA2013019, FEBRA2013069, FEBRA2013274, FEBRA2013465, FEBRA2013570, FEBRA2013699, FEBRA2013905, FEBRA2013951, FEBRA2014010, FEBRA2014122, FEBRA2014198, FEBRA2014213, FEBRA2014297, FEBRA2014443, FEBRA2014578, FEBRA2014939, FEBRA2015076, FEBRA2015085, FEBRA2015175, FEBRA2015292, FEBRA2015588, FEBRA2016112, FEBRA2016398, FEBRA2016572, FEBRA2016583, FEBRA2016621, FEBRA2016654, FEBRA2016739, FEBRA2017024, FEBRA2017098, FEBRA2017138, FEBRA2017154, FEBRA2017200, FEBRA2017223, FEBRA2017333, FEBRA2017502, FEBRA2017533, FEBRA2017680, FEBRA2017736, FEBRA2017780, FEBRA2017811, FEBRA2017850, FEBRA2018051, FEBRA2018203, FEBRA2018407, FEBRA2018433, FEBRA2018746, FEBRA2019172, FEBRA2019242, FEBRA2019298, FEBRA2019389, FEBRA2019457, FEBRA2019519, FEBRA2019582, FEBRA2019637, FEBRA2019663, FEBRA2019690, FEBRA2019867, FEBRA2020406, FEBRA2020566, FEBRA2020582, FEBRA2020668, FEBRA2020801, FEBRA2020845, FEBRA2020886, FEBRA2020977, FEBRA2021032, FEBRA2021134, FEBRA2021171, FEBRA2021339, FEBRA2021431, FEBRA2021497, FEBRA2021550, FEBRA2021571, FEBRA2021636, FEBRA2021864, FEBRA2021892, FEBRA2021908, FEBRA2021966, FEBRA2022013, FEBRA2022148, FEBRA2022204, FEBRA2022255, FEBRA2022322, FEBRA2022601, FEBRA2022696, FEBRA2022729, FEBRA2022787, FEBRA2022911, FEBRA2022956, FEBRA2022963, FEBRA2022972, FEBRA2023227, FEBRA2023285, FEBRA2023351, FEBRA2023377, FEBRA2023399, FEBRA2023498, FEBRA2023550, FEBRA2023721, FEBRA2023927, FEBRA2023989, FEBRA2023990, FEBRA2024019, FEBRA2024136, FEBRA2024150, FEBRA2024343, FEBRA2024570, FEBRA2024693, FEBRA2024727, FEBRA2024744, FEBRA2024797, FEBRA2024987, FEBRA2025249, FEBRA2025427, FEBRA2025463, FEBRA2025477, FEBRA2026474, FEBRA2026582, FEBRA2026629, FEBRA2026769, FEBRA2026879, FEBRA2026890, FEBRA2026977, FEBRA2026984, FEBRA2027082, FEBRA2027297, FEBRA2027352, FEBRA2027364, FEBRA2027609, FEBRA2028158, FEBRA2028222, FEBRA2028366, FEBRA2028457, FEBRA2028477, FEBRA2028503, FEHRT2000325, FEHRT2000364, FEKID1000018, FELIV1000101, FELIV1000137, FELIV1000164, FELNG2000241, HCASM1000021, HCASM1000050, HCASM1000061, HCASM1000115, HCASM1000130, HCASM2000138, HCASM2000156, HCASM2000202, HCASM2000214, HCASM2000266, HCASM2000307, HCASM2000534, HCASM2000536, HCASM2000560, HCASM2000871, HCASM2001285, HCASM2001810, HCASM2001866, HCASM2001890, HCASM2002148, HCASM2002502, HCASM2002754, HCASM2002918, HCASM2003018, HCASM2003099, HCASM2003212, HCASM2003237, HCASM2003357, HCASM2003415, HCASM2005388, HCASM2005484, HCASM2006131, HCASM2006338, HCASM2006359, HCASM2006632, HCASM2007047, HCASM2007317, HCASM2007737, HCASM2007773, HCASM2008154, HCASM2008536, HCASM2009405, HCASM2009424, HCASM2009463, HCASM2009588, HCHON1000015, HCHON1000131, HCHON1000142, HCHON1000166, HCHON1000176, HCHON2000028, HCHON2000038, HCHON2000062, HCHON2000100, HCHON2000156, HCHON2000199, HCHON2000212, HCHON2000271, HCHON2000295, HCHON2000315, HCHON2000322, HCHON2000323, HCHON2000344, HCHON2000373, HCHON2000395, HCHON2000417, HCHON2000418, HCHON2000473, HCHON2000503, HCHON2000660, HCHON2000663, HCHON2000673, HCHON2000676, HCHON2000698, HCHON2000699, HCHON2000705, HCHON2000743, HCHON2000751, HCHON2000815, HCHON2000817, HCHON2000818, HCHON2000819, HCHON2000832, HCHON2000851, HCHON2000935, HCHON2000942, HCHON2000956, HCHON2000994, HCHON2001084, HCHON2001099, HCHON2001110, HCHON2001116, HCHON2001161, HCHON2001200, HCHON2001214, HCHON2001217, HCHON2001233, HCHON2001269, HCHON2001450, HCHON2001453, HCHON2001497, HCHON2001519, HCHON2001523, HCHON2001535, HCHON2001548, HCHON2001577, HCHON2001598, HCHON2001604, HCHON2001607, HCHON2001646, HCHON2001712, HCHON2001768, HCHON2001801, HCHON2001853, HCHON2002123, HCHON2002194, HCHON2002241, HCHON2002247, HCHON2002354, HCHON2002496, HCHON2002676, HCHON2002770, HCHON2002964, HCHON2002971, HCHON2003131, HCHON2003134, HCHON2003327, HCHON2003513, HCHON2003532, HCHON2003642, HCHON2003659, HCHON2003676, HCHON2004007, HCHON2004279, HCHON2004359, HCHON2004531, HCHON2004776, HCHON2004858, HCHON2005048, HCHON2005118, HCHON2005166, HCHON2005802, HCHON2005921, HCHON2005987, HCHON2006250, HCHON2006459, HCHON2006714, HCHON2006722, HCHON2006770, HCHON2006786, HCHON2006841, HCHON2006871, HCHON2007046, HCHON2007482, HCHON2007650, HCHON2007674, HCHON2007774, HCHON2007881, HCHON2008112, HCHON2008239, HCHON2008444, HCHON2008582, HCHON2008672, HCHON2008856, HCHON2008871, HCHON2008989, HCHON2009191, HCHON2009384, HCHON2009749, HCHON2009766, HCHON2009795, HCHON2010074, HCHON2010543, HEART1000010, HEART1000088, HEART1000099, HEART1000102, HEART1000118, HEART1000132, HEART1000139, HEART1000142, HEART1000151, HEART1000173, HEART2000024, HEART2000035, HEART2000099, HEART2000298, HEART2000306, HEART2000309, HEART2000411, HEART2000418, HEART2000444, HEART2000448, HEART2000492, HEART2000506, HEART2000520, HEART2000541, HEART2000568, HEART2000611, HEART2000959, HEART2001680, HEART2001756, HEART2002129, HEART2002184, HEART2002220, HEART2002432, HEART2002531, HEART2002598, HEART2002717, HEART2003027, HEART2003168, HEART2003432, HEART2003781, HEART2003836, HEART2003852, HEART2004570, HEART2004764, HEART2004931, HEART2004940, HEART2004980, HEART2005244, HEART2005310, HEART2005581, HEART2005610, HEART2006131, HEART2006195, HEART2006310, HEART2006334, HEART2006487, HEART2006521, HEART2006557, HEART2006787, HEART2006789, HEART2006909, HEART2007031, HEART2007231, HEART2007443, HEART2007696, HEART2007767, HEART2008108, HEART2008111, HEART2008257, HEART2008509, HEART2008994, HEART2009000, HEART2009599, HEART2009680, HEART2010391, HEART2010492, HEART2010495, LIVER1000017, LIVER1000050, LIVER1000055, LIVER1000058, LIVER1000063, LIVER1000067, LIVER1000073, LIVER1000082, LIVER1000099, LIVER1000111, LIVER1000126, LIVER1000139, LIVER1000155, LIVER1000165, LIVER1000175, LIVER1000224, LIVER1000230, LIVER1000278, LIVER1000303, LIVER1000397, LIVER1000421, LIVER1000433, LIVER1000479, LIVER1000482, LIVER1000542, LIVER2000003, LIVER2000033, LIVER2000037, LIVER2000158, LIVER2000216, LIVER2000237, LIVER2000247, LIVER2000360, LIVER2000416, LIVER2000446, LIVER2000515, LIVER2000592, LIVER2000626, LIVER2000682, LIVER2000769, LIVER2000775, LIVER2001051, LIVER2001076, LIVER2001099, LIVER2001113, LIVER2001164, LIVER2001191, LIVER2001265, LIVER2001329, LIVER2001389, LIVER2001461, LIVER2001539, LIVER2001608, LIVER2001835, LIVER2002638, LIVER2002644, LIVER2002660, LIVER2002702, LIVER2003008, LIVER2003065, LIVER2003234, LIVER2003524, LIVER2003568, LIVER2003581, LIVER2003800, LIVER2003854, LIVER2004074, LIVER2004392, LIVER2004514, LIVER2004565, LIVER2005028, LIVER2005198, LIVER2005218, LIVER2005376, LIVER2005385, LIVER2005512, LIVER2005520, LIVER2005527, LIVER2005544, LIVER2005625, LIVER2005728, LIVER2005789, LIVER2005973, LIVER2005981, LIVER2006251, LIVER2006410, LIVER2006469, LIVER2006644, LIVER2006764, LIVER2007415, LIVER2007548, LIVER2007568, LIVER2007721, LIVER2007783, LIVER2008053, LIVER2008465, LIVER2008473, LIVER2008580, LIVER2008706, LIVER2008751, LIVER2008945, LIVER2008998, LIVER2009110, LIVER2009118, LIVER2009554, LYMPB1000141, LYMPB1000158, LYMPB2000083, MAMGL1000017, MAMGL1000083, MAMGL1000096, MAMGL1000100, MAMGL1000132, MAMGL1000151, MAMGL1000178, MAMGL1000182, MAMGL1000184, MESAN1000032, MESAN1000035, MESAN1000050, MESAN1000079, MESAN1000080, MESAN1000101, MESAN1000121, MESAN1000126, MESAN1000147, MESAN1000180, MESAN2000023, MESAN2000026, MESAN2000067, MESAN2000092, MESAN2000149, MESAN2000167, MESAN2000291, MESAN2000434, MESAN2000457, MESAN2000462, MESAN2000501, MESAN2000620, MESAN2000711, MESAN2000815, MESAN2000894, MESAN2000909, MESAN2001154, MESAN2001450, MESAN2001627, MESAN2001770, MESAN2001979, MESAN2002113, MESAN2002122, MESAN2002147, MESAN2002186, MESAN2002424, MESAN2002687, MESAN2002709, MESAN2002790, MESAN2002844, MESAN2002940, MESAN2002978, MESAN2003035, MESAN2003037, MESAN2003039, MESAN2003058, MESAN2003101, MESAN2003190, MESAN2003322, MESAN2003444, MESAN2003490, MESAN2003529, MESAN2003646, MESAN2003662, MESAN2003709, MESAN2003851, MESAN2004138, MESAN2004288, MESAN2004575, MESAN2005303, MESAN2005371, MESAN2005633, MESAN2005724, MESAN2005808, MESAN2005811, MESAN2005957, MESAN2005958, MESAN2006022, MESAN2006043, MESAN2006328, MESAN2006401, MESAN2006580, MESAN2006599, MESAN2006743, MESAN2006953, MESAN2007032, MESAN2007440, MESAN2007597, MESAN2007755, MESAN2008222, MESAN2008334, MESAN2008415, MESAN2008460, MESAN2008536, MESAN2008729, MESAN2008821, MESAN2008926, MESAN2008936, MESAN2009019, MESAN2009081, MESAN2009105, MESAN2009311, MESAN2009418, MESAN2009503, MESAN2009522, MESAN2009580, MESAN2010031, MESAN2010114, MESAN2010312, MESAN2010321, MESAN2010664, MESAN2010681, MESAN2011545, MESAN2011597, MESAN2011627, MESAN2011632, MESAN2011977, MESAN2011984, MESAN2012054, MESAN2012113, MESAN2012586, MESAN2012708, MESAN2012735, MESAN2013019, MESAN2013022, MESAN2013183, MESAN2013211, MESAN2013283, MESAN2013284, MESAN2013611, MESAN2013674, MESAN2013908, MESAN2013936, MESAN2014192, MESAN2014295, MESAN2014298, MESAN2014412, MESAN2014624, MESAN2015277, MESAN2015365, MESAN2015391, MESAN2015401, MESAN2015501, MESAN2015515, MESAN2016159, MESAN2016304, MESAN2016409, MESAN2016552, MESAN2016965, MESAN2017133, MESAN2017152, MESAN2017373, MESAN2017417, MESAN2018209, MESAN2018576, MESAN2018670, MESAN2018699, MESTC1000042, MESTC1000147, MESTC2000150, MESTC2000153, MESTC2000170, N1ESE2000698, NB9N41000011, NB9N41000047, NB9N41000121, NB9N41000135, NB9N41000142, NB9N41000146, NB9N41000340, NB9N42000104, NB9N42000122, NB9N42000196, NB9N42000281, NB9N42000314, NB9N42000342, NB9N42000430, NB9N42000495, NB9N42001300, NCRRP1000129, NESOP1000010, NESOP1000087, NESOP1000108, NESOP2000231, NESOP2000452, NESOP2000499, NESOP2000504, NESOP2000744, NESOP2001144, NESOP2001433, NESOP2001656, NESOP2001694, NESOP2001752, NESOP2002352, NESOP2002418, NESOP2002487, NESOP2002738, NESOP2002780, NETRP1000034, NETRP1000082, NETRP2000086, NETRP2000182, NETRP2000439, NHNPC1000034, NHNPC1000037, NHNPC1000084, NHNPC1000101, NHNPC1000124, NHNPC2000212, NHNPC2000606, NHNPC2000877, NHNPC2001108, NHNPC2001223, NHNPC2001312, NHNPC2001816, NHNPC2002565, NHNPC2002749, NOVAR1000015, NOVAR1000102, NOVAR2000136, NOVAR2000352, NOVAR2000412, NOVAR2000710, NOVAR2000783, NOVAR2000962, NOVAR2001108, NOVAR2001620, NOVAR2001783, NOVAR2001876, NOVAR2002039, NT2NE1000014, NT2NE1000018, NT2NE1000023, NT2NE1000024, NT2NE1000059, NT2NE1000063, NT2NE1000073, NT2NE1000083, NT2NE1000120, NT2NE1000122, NT2NE1000175, NT2NE1000181, NT2NE1000185, NT2NE2000038, NT2NE2000054, NT2NE2000056, NT2NE2000057, NT2NE2000064, NT2NE2000109, NT2NE2000137, NT2NE2000156, NT2NE2000222, NT2NE2000259, NT2NE2000284, NT2NE2000299, NT2NE2000327, NT2NE2000353, NT2NE2000356, NT2NE2000369, NT2NE2000374, NT2NE2000383, NT2NE2000384, NT2NE2000386, NT2NE2000390, NT2NE2000392, NT2NE2000455, NT2NE2000470, NT2NE2000488, NT2NE2000517, NT2NE2000536, NT2NE2000546, NT2NE2000548, NT2NE2000550, NT2NE2000586, NT2NE2000612, NT2NE2000636, NT2NE2000658, NT2NE2000706, NT2NE2000802, NT2NE2000808, NT2NE2000809, NT2NE2000864, NT2NE2000909, NT2NE2000913, NT2NE2000950, NT2NE2000951, NT2NE2000980, NT2NE2001005, NT2NE2001021, NT2NE2001040, NT2NE2001049, NT2NE2001142, NT2NE2001156, NT2NE2001180, NT2NE2001181, NT2NE2001188, NT2NE2001191, NT2NE2001247, NT2NE2001252, NT2NE2001324, NT2NE2001326, NT2NE2001337, NT2NE2001364, NT2NE2001372, NT2NE2001397, NT2NE2001403, NT2NE2001428, NT2NE2001432, NT2NE2001442, NT2NE2001524, NT2NE2001545, NT2NE2001598, NT2NE2001617, NT2NE2001623, NT2NE2001626, NT2NE2001634, NT2NE2001648, NT2NE2001660, NT2NE2001666, NT2NE2001677, NT2NE2001697, NT2NE2001698, NT2NE2001723, NT2NE2001725, NT2NE2001793, NT2NE2001874, NT2NE2001889, NT2NE2001923, NT2NE2002100, NT2NE2002162, NT2NE2002186, NT2NE2002285, NT2NE2002311, NT2NE2002620, NT2NE2002651, NT2NE2002732, NT2NE2002768, NT2NE2002791, NT2NE2002856, NT2NE2003150, NT2NE2003185, NT2NE2003252, NT2NE2003280, NT2NE2003308, NT2NE2003309, NT2NE2003315, NT2NE2003408, NT2NE2003457, NT2NE2003485, NT2NE2003540, NT2NE2003569, NT2NE2003571, NT2NE2003705, NT2NE2003752, NT2NE2003887, NT2NE2003921, NT2NE2004255, NT2NE2004378, NT2NE2004490, NT2NE2004606, NT2NE2004740, NT2NE2004787, NT2NE2004916, NT2NE2005035, NT2NE2005223, NT2NE2005276, NT2NE2005317, NT2NE2005323, NT2NE2005358, NT2NE2005371, NT2NE2005395, NT2NE2005419, NT2NE2005441, NT2NE2005517, NT2NE2005537, NT2NE2005555, NT2NE2005588, NT2NE2005676, NT2NE2005688, NT2NE2005720, NT2NE2005784, NT2NE2005804, NT2NE2005821, NT2NE2005876, NT2NE2005890, NT2NE2005921, NT2NE2005968, NT2NE2006075, NT2NE2006087, NT2NE2006217, NT2NE2006288, NT2NE2006382, NT2NE2006387, NT2NE2006427, NT2NE2006432, NT2NE2006458, NT2NE2006478, NT2NE2006531, NT2NE2006659, NT2NE2006784, NT2NE2006813, NT2NE2006894, NT2NE2006909, NT2NE2006942, NT2NE2006958, NT2NE2007052, NT2NE2007220, NT2NE2007425, NT2NE2007725, NT2NE2007727, NT2NE2007786, NT2NE2007877, NT2NE2007967, NT2NE2008017, NT2NE2008060, NT2NE2008077, NT2NE2008213, NT2NE2008260, NT2NE2008378, NT2NE2008607, NT2NE2008639, NT2NE2008727, NT2NE2008783, NT2NE2008785, NT2NE2008803, NT2NE2008867, NT2NE2008961, NT2NE2008997, NT2NE2009138, NT2NE2009295, NT2NE2009426, NT2NE2009523, NT2NE2009608, NT2NE2009691, NT2NE2010056, NT2NE2010105, NT2NE2010150, NT2NE2010400, NT2NE2010632, NT2NE2010633, NT2NE2010654, NT2NE2010688, NT2NE2010781, NT2NE2010854, NT2NE2011033, NT2NE2011036, NT2NE2011107, NT2NE2011119, NT2NE2011154, NT2NE2011221, NT2NE2011411, NT2NE2011485, NT2NE2011650, NT2NE2011684, NT2NE2011687, NT2NE2011691, NT2NE2011758, NT2NE2011823, NT2NE2011896, NT2NE2011998, NT2NE2012113, NT2NE2012199, NT2NE2012243, NT2NE2012361, NT2NE2012448, NT2NE2012457, NT2NE2012493, NT2NE2012505, NT2NE2012533, NT2NE2012603, NT2NE2012747, NT2NE2012847, NT2NE2012928, NT2NE2013019, NT2NE2013081, NT2NE2013189, NT2NE2013217, NT2NE2013547, NT2NE2014013, NT2NE2014028, NT2NE2014113, NT2NE2014176, NT2NE2014221, NT2NE2014525, NT2NE2014650, NT2NE2014651, NT2NE2014681, NT2NE2014758, NT2NE2014869, NT2NE2014950, NT2NE2015061, NT2NE2015262, NT2NE2015275, NT2NE2015362, NT2NE2015480, NT2NE2015511, NT2NE2015565, NT2NE2015626, NT2NE2015747, NT2NE2015860, NT2NE2015885, NT2NE2015904, NT2NE2015974, NT2NE2016041, NT2NE2016387, NT2NE2016419, NT2NE2016519, NT2NE2016608, NT2NE2016766, NT2NE2016774, NT2NE2016971, NT2NE2017259, NT2NE2017332, NT2NE2017397, NT2NE2017480, NT2NE2017492, NT2NE2017508, NT2NE2017562, NT2NE2017590, NT2NE2017612, NT2NE2017721, NT2NE2017752, NT2NE2017792, NT2NE2017982, NT2NE2018165, NT2NE2018176, NT2NE2018273, NT2NE2018376, NT2NE2018472, NT2NE2018490, NT2NE2018594, NT2NE2018739, NT2NE2018916, NT2NE2019056, NT2NE2019091, NT2NE2019099, NT2RI1000016, NT2RI1000035, NT2RI1000048, NT2RI1000164, NT2RI1000172, NT2RI2000004, NT2RI2000007, NT2RI2000116, NT2RI2000117, NT2RI2000128, NT2RI2000133, NT2RI2000167, NT2RI2000173, NT2RI2000187, NT2RI2000255, NT2RI2000270, NT2RI2000276, NT2RI2000294, NT2RI2000313, NT2RI2000341, NT2RI2000344, NT2RI2000348, NT2RI2000412, NT2RI2000421, NT2RI2000480, NT2RI2000575, NT2RI2000588, NT2RI2000597, NT2RI2000669, NT2RI2000688, NT2RI2000689, NT2RI2000704, NT2RI2000738, NT2RI2000775, NT2RI2000822, NT2RI2000829, NT2RI2000841, NT2RI2000865, NT2RI2000932, NT2RI2000987, NT2RI2001010, NT2RI2001017, NT2RI2001030, NT2RI2001083, NT2RI2001091, NT2RI2001167, NT2RI2001178, NT2RI2001230, NT2RI2001235, NT2RI2001244, NT2RI2001307, NT2RI2001342, NT2RI2001409, NT2RI2001410, NT2RI2001422, NT2RI2001425, NT2RI2001449, NT2RI2001450, NT2RI2001474, NT2RI2001519, NT2RI2001595, NT2RI2001621, NT2RI2001624, NT2RI2001726, NT2RI2001769, NT2RI2001782, NT2RI2001836, NT2RI2001866, NT2RI2001952, NT2RI2002022, NT2RI2002041, NT2RI2002117, NT2RI2002120, NT2RI2002153, NT2RI2002179, NT2RI2002243, NT2RI2002252, NT2RI2002260, NT2RI2002270, NT2RI2002334, NT2RI2002359, NT2RI2002447, NT2RI2002481, NT2RI2002507, NT2RI2002517, NT2RI2002530, NT2RI2002540, NT2RI2002549, NT2RI2002564, NT2RI2002585, NT2RI2002592, NT2RI2002602, NT2RI2002654, NT2RI2002699, NT2RI2002802, NT2RI2002819, NT2RI2002822, NT2RI2002847, NT2RI2002852, NT2RI2002865, NT2RI2002923, NT2RI2002926, NT2RI2002958, NT2RI2002970, NT2RI2003011, NT2RI2003019, NT2RI2003051, NT2RI2003067, NT2RI2003205, NT2RI2003222, NT2RI2003301, NT2RI2003338, NT2RI2003360, NT2RI2003361, NT2RI2003383, NT2RI2003392, NT2RI2003399, NT2RI2003407, NT2RI2003420, NT2RI2003481, NT2RI2003487, NT2RI2003556, NT2RI2003655, NT2RI2003667, NT2RI2003678, NT2RI2003751, NT2RI2003884, NT2RI2003973, NT2RI2004059, NT2RI2004078, NT2RI2004079, NT2RI2004093, NT2RI2004136, NT2RI2004157, NT2RI2004188, NT2RI2004190, NT2RI2004284, NT2RI2004290, NT2RI2004304, NT2RI2004381, NT2RI2004398, NT2RI2004410, NT2RI2004442, NT2RI2004468, NT2RI2004606, NT2RI2004618, NT2RI2004783, NT2RI2004818, NT2RI2004840, NT2RI2004916, NT2RI2004962, NT2RI2004984, NT2RI2004985, NT2RI2005048, NT2RI2005061, NT2RI2005069, NT2RI2005087, NT2RI2005096, NT2RI2005115, NT2RI2005116, NT2RI2005130, NT2RI2005166, NT2RI2005239, NT2RI2005246, NT2RI2005315, NT2RI2005353, NT2RI2005358, NT2RI2005382, NT2RI2005473, NT2RI2005520, NT2RI2005564, NT2RI2005579, NT2RI2005621, NT2RI2005628, NT2RI2005647, NT2RI2005670, NT2RI2005710, NT2RI2005772, NT2RI2005811, NT2RI2005816, NT2RI2005851, NT2RI2005966, NT2RI2006071, NT2RI2006072, NT2RI2006081, NT2RI2006126, NT2RI2006127, NT2RI2006183, NT2RI2006257, NT2RI2006271, NT2RI2006294, NT2RI2006345, NT2RI2006403, NT2RI2006445, NT2RI2006487, NT2RI2006506, NT2RI2006640, NT2RI2006647, NT2RI2006659, NT2RI2006662, NT2RI2006667, NT2RI2006679, NT2RI2006682, NT2RI2006686, NT2RI2006703, NT2RI2006716, NT2RI2006735, NT2RI2006762, NT2RI2006788, NT2RI2006825, NT2RI2006838, NT2RI2006855, NT2RI2006943, NT2RI2006973, NT2RI2007046, NT2RI2007048, NT2RI2007096, NT2RI2007116, NT2RI2007148, NT2RI2007214, NT2RI2007277, NT2RI2007303, NT2RI2007334, NT2RI2007384, NT2RI2007386, NT2RI2007406, NT2RI2007439, NT2RI2007445, NT2RI2007468, NT2RI2007469, NT2RI2007507, NT2RI2007589, NT2RI2007723, NT2RI2007729, NT2RI2007751, NT2RI2007754, NT2RI2007827, NT2RI2007853, NT2RI2007877, NT2RI2007879, NT2RI2007891, NT2RI2007956, NT2RI2007965, NT2RI2008007, NT2RI2008050, NT2RI2008141, NT2RI2008171, NT2RI2008188, NT2RI2008204, NT2RI2008221, NT2RI2008233, NT2RI2008455, NT2RI2008502, NT2RI2008566, NT2RI2008598, NT2RI2008622, NT2RI2008656, NT2RI2008714, NT2RI2008724, NT2RI2008791, NT2RI2008801, NT2RI2008808, NT2RI2008812, NT2RI2008841, NT2RI2008942, NT2RI2008952, NT2RI2009005, NT2RI2009083, NT2RI2009101, NT2RI2009103, NT2RI2009144, NT2RI2009151, NT2RI2009215, NT2RI2009233, NT2RI2009259, NT2RI2009269, NT2RI2009281, NT2RI2009289, NT2RI2009301, NT2RI2009402, NT2RI2009517, NT2RI2009585, NT2RI2009595, NT2RI2009855, NT2RI2010283, NT2RI2010508, NT2RI2010795, NT2RI2011422, NT2RI2011450, NT2RI2011683, NT2RI2011803, NT2RI2012659, NT2RI2012726, NT2RI2012990, NT2RI2013345, NT2RI2013357, NT2RI2013373, NT2RI2014247, NT2RI2014551, NT2RI2014683, NT2RI2014733, NT2RI2015239, NT2RI2015533, NT2RI2016128, NT2RI2016134, NT2RI2017529, NT2RI2018311, NT2RI2018363, NT2RI2018448, NT2RI2018883, NT2RI2018950, NT2RI2019751, NT2RI2019826, NT2RI2020390, NT2RI2020703, NT2RI2021463, NT2RI2021625, NT2RI2022468, NT2RI2022584, NT2RI2023303, NT2RI2023671, NT2RI2024008, NT2RI2024313, NT2RI2024460, NT2RI2024496, NT2RI2024935, NT2RI2025075, NT2RI2025255, NT2RI2025564, NT2RI2025565, NT2RI2025909, NT2RI2025957, NT2RI2025976, NT2RI2026758, NT2RI2027081, NT2RI2027157, NT2RI2027224, NT2RI2027323, NT2RI2027396, NT2RI2027484, NT2RI2027975, NT2RI2028213, NT2RI2028222, NT2RI2028537, NT2RI2028642, NT2RI3000174, NT2RI3000213, NT2RI3000423, NT2RI3000622, NT2RI3001132, NT2RI3001263, NT2RI3001279, NT2RI3001445, NT2RI3001458, NT2RI3001515, NT2RI3001573, NT2RI3001967, NT2RI3002303, NT2RI3002557, NT2RI3002842, NT2RI3003027, NT2RI3003031, NT2RI3003095, NT2RI3003104, NT2RI3003162, NT2RI3003362, NT2RI3003382, NT2RI3003409, NT2RI3003738, NT2RI3003925, NT2RI3004133, NT2RI3004381, NT2RI3004510, NT2RI3005202, NT2RI3005403, NT2RI3005416, NT2RI3005724, NT2RI3005861, NT2RI3005923, NT2RI3005928, NT2RI3006132, NT2RI3006171, NT2RI3006284, NT2RI3006340, NT2RI3006376, NT2RI3006666, NT2RI3006673, NT2RI3006796, NT2RI3007065, NT2RI3007095, NT2RI3007158, NT2RI3007167, NT2RI3007213, NT2RI3007291, NT2RI3007443, NT2RI3007684, NT2RI3007757, NT2RI3007878, NT2RI3007978, NT2RI3008055, NT2RI3008162, NT2RI3008179, NT2RI3008228, NT2RI3008442, NT2RI3008652, NT2RI3008697, NT2RI3008974, NT2RI3009158, NT2RI3009480, NT2RI3009524, NT2RP6000008, NT2RP6000017, NT2RP6000032, NT2RP6000033, NT2RP6000039, NT2RP6000043, NT2RP6000059, NT2RP6000060, NT2RP6000077, NT2RP6000085, NT2RP6000086, NT2RP6000100, NT2RP6000109, NT2RP6000110, NT2RP6000119, NT2RP6000127, NT2RP6000130, NT2RP6000140, NT2RP6000150, NT2RP7000041, NT2RP7000069, NT2RP7000086, NT2RP7000109, NT2RP7000112, NT2RP7000238, NT2RP7000259, NT2RP7000311, NT2RP7000359, NT2RP7000364, NT2RP7000380, NT2RP7000391, NT2RP7000425, NT2RP7000579, NT2RP7000586, NT2RP7000624, NT2RP7000812, NT2RP7000926, NT2RP7001074, NT2RP7001080, NT2RP7001156, NT2RP7001231, NT2RP7001306, NT2RP7001319, NT2RP7001335, NT2RP7001364, NT2RP7001475, NT2RP7001532, NT2RP7001591, NT2RP7001602, NT2RP7001678, NT2RP7001856, NT2RP7002028, NT2RP7002064, NT2RP7002151, NT2RP7002163, NT2RP7002243, NT2RP7002282, NT2RP7002376, NT2RP7002379, NT2RP7002450, NT2RP7002478, NT2RP7002554, NT2RP7002594, NT2RP7002603, NT2RP7002619, NT2RP7002650, NT2RP7002738, NT2RP7002779, NT2RP7002802, NT2RP7002841, NT2RP7002875, NT2RP7002906, NT2RP7002978, NT2RP7002982, NT2RP7003025, NT2RP7003050, NT2RP7003055, NT2RP7003084, NT2RP7003091, NT2RP7003107, NT2RP7003134, NT2RP7003148, NT2RP7003203, NT2RP7003261, NT2RP7003319, NT2RP7003439, NT2RP7003511, NT2RP7003629, NT2RP7003632, NT2RP7003647, NT2RP7003680, NT2RP7003724, NT2RP7003960, NT2RP7004027, NT2RP7004080, NT2RP7004114, NT2RP7004123, NT2RP7004173, NT2RP7004196, NT2RP7004204, NT2RP7004233, NT2RP7004260, NT2RP7004352, NT2RP7004358, NT2RP7004396, NT2RP7004481, NT2RP7004541, NT2RP7004559, NT2RP7004641, NT2RP7004656, NT2RP7004687, NT2RP7004722, NT2RP7004766, NT2RP7004790, NT2RP7004915, NT2RP7004925, NT2RP7004961, NT2RP7004964, NT2RP7004975, NT2RP7005118, NT2RP7005205, NT2RP7005219, NT2RP7005323, NT2RP7005468, NT2RP7005493, NT2RP7005513, NT2RP7005529, NT2RP7005629, NT2RP7005631, NT2RP7005669, NT2RP7005675, NT2RP7005750, NT2RP7005846, NT2RP7006033, NT2RP7006075, NT2RP7006160, NT2RP7006162, NT2RP7006188, NT2RP7006223, NT2RP7006263, NT2RP7006296, NT2RP7006304, NT2RP7006374, NT2RP7006395, NT2RP7006408, NT2RP7006457, NT2RP7006490, NT2RP7006539, NT2RP7006547, NT2RP7006601, NT2RP7006619, NT2RP7006621, NT2RP7006636, NT2RP7006701, NT2RP7006853, NT2RP7006887, NT2RP7006980, NT2RP7006995, NT2RP7007114, NT2RP7007221, NT2RP7007226, NT2RP7007252, NT2RP7007269, NT2RP7007310, NT2RP7007359, NT2RP7007381, NT2RP7007406, NT2RP7007480, NT2RP7007504, NT2RP7007530, NT2RP7007537, NT2RP7007580, NT2RP7007594, NT2RP7007617, NT2RP7007643, NT2RP7007766, NT2RP7007842, NT2RP7007925, NT2RP7007930, NT2RP7007975, NT2RP7008013, NT2RP7008133, NT2RP7008137, NT2RP7008142, NT2RP7008144, NT2RP7008161, NT2RP7008167, NT2RP7008315, NT2RP7008360, NT2RP7008396, NT2RP7008406, NT2RP7008435, NT2RP7008441, NT2RP7008454, NT2RP7008487, NT2RP7008543, NT2RP7008544, NT2RP7008550, NT2RP7008557, NT2RP7008623, NT2RP7008657, NT2RP7008714, NT2RP7008720, NT2RP7008855, NT2RP7008863, NT2RP7009012, NT2RP7009019, NT2RP7009030, NT2RP7009087, NT2RP7009097, NT2RP7009108, NT2RP7009147, NT2RP7009149, NT2RP7009168, NT2RP7009215, NT2RP7009225, NT2RP7009236, NT2RP7009253, NT2RP7009259, NT2RP7009267, NT2RP7009322, NT2RP7009363, NT2RP7009370, NT2RP7009373, NT2RP7009394, NT2RP7009397, NT2RP7009429, NT2RP7009439, NT2RP7009466, NT2RP7009481, NT2RP7009482, NT2RP7009498, NT2RP7009502, NT2RP7009507, NT2RP7009577, NT2RP7009743, NT2RP7009867, NT2RP7010109, NT2RP7010128, NT2RP7010235, NT2RP7010275, NT2RP7010521, NT2RP7010599, NT2RP7010612, NT2RP7010817, NT2RP7011086, NT2RP7011132, NT2RP7011268, NT2RP7011318, NT2RP7011452, NT2RP7011570, NT2RP7011721, NT2RP7011909, NT2RP7012291, NT2RP7012516, NT2RP7012776, NT2RP7013002, NT2RP7013374, NT2RP7013499, NT2RP7013573, NT2RP7013729, NT2RP7013764, NT2RP7013795, NT2RP7013999, NT2RP7014005, NT2RP7014178, NT2RP7014348, NT2RP7014420, NT2RP7014583, NT2RP7014721, NT2RP7014743, NT2RP7014778, NT2RP7014906, NT2RP7015080, NT2RP7015431, NT2RP7015503, NT2RP7015512, NT2RP7015676, NT2RP7015789, NT2RP7015996, NT2RP7016508, NT2RP7016574, NT2RP7016622, NT2RP7016911, NT2RP7017139, NT2RP7017284, NT2RP7017365, NT2RP7017474, NT2RP7017546, NT2RP7017567, NT2RP7017795, NT2RP7017971, NT2RP7018032, NT2RP7018197, NT2RP7018206, NT2RP7018340, NT2RP7018586, NT2RP7018802, NT2RP7018871, NT2RP7019064, NT2RP7019135, NT2RP7019273, NT2RP7019367, NT2RP7019401, NT2RP7019445, NT2RP7019543, NT2RP7019682, NT2RP7019835, NT2RP7020123, NT2RP7020343, NT2RP7020379, NT2RP8000137, NT2RP8000296, NT2RP8000435, NT2RP8000483, NT2RP8000521, NT2RP8000633, NT2RP8001363, NT2RP8001407, NT2RP8001584, NT2RP8001604, NT2RP8001605, NT2RP8003490, NT2RP8003657, NT2RP8003787, NT2RP8004306, NT2RP8005546, NT2RP8006452, NT2RP8006521, NT2RP8007416, NT2RP8007503, NT2RP8007715, NT2RP8007920, NT2RP8008057, NT2RP8009248, NTONG1000006, NTONG1000033, NTONG1000047, NTONG1000052, NTONG1000075, NTONG1000087, NTONG1000123, NTONG1000130, NTONG1000161, NTONG1000172, NTONG1000182, NTONG1000213, NTONG1000214, NTONG1000247, NTONG1000264, NTONG2000040, NTONG2000107, NTONG2000231, NTONG2000265, NTONG2000334, NTONG2000363, NTONG2000413, NTONG2000492, NTONG2000499, NTONG2000531, NTONG2000583, NTONG2000858, NTONG2000876, NTONG2000878, NTONG2000966, NTONG2000977, NTONG2000985, NTONG2001014, NTONG2001079, NTONG2001157, NTONG2001173, NTONG2001220, NTONG2001222, NTONG2001362, NTONG2001428, NTONG2001532, NTONG2001550, NTONG2001587, NTONG2001619, NTONG2001642, NTONG2001657, NTONG2001762, NTONG2002278, NTONG2002582, NTONG2002807, NTONG2002948, NTONG2002970, NTONG2002985, NTONG2003158, NTONG2003210, NTONG2003316, NTONG2003409, NTONG2003454, NTONG2003515, NTONG2003805, NTONG2003852, NTONG2003897, NTONG2003928, NTONG2004095, NTONG2004308, NTONG2004521, NTONG2004614, NTONG2004690, NTONG2004806, NTONG2004829, NTONG2004844, NTONG2004991, NTONG2005062, NTONG2005086, NTONG2005137, NTONG2005153, NTONG2005265, NTONG2005277, NTONG2005363, NTONG2005373, NTONG2005391, NTONG2005480, NTONG2005497, NTONG2005577, NTONG2005657, NTONG2005801, NTONG2005822, NTONG2005897, NTONG2005969, NTONG2006099, NTONG2006187, NTONG2006301, NTONG2006324, NTONG2006354, NTONG2006440, NTONG2006484, NTONG2006501, NTONG2006646, NTONG2006709, NTONG2006783, NTONG2007020, NTONG2007028, NTONG2007034, NTONG2007249, NTONG2007517, NTONG2007522, NTONG2007693, NTONG2007756, NTONG2008088, NTONG2008093, NTONG2008143, NTONG2008365, NTONG2008522, NTONG2008672, NTONG2008862, NTONG2008939, NTONG2008944, NTONG2009060, NTONG2009068, NTONG2009229, NTONG2009233, NTONG2009468, NTONG2009576, OCBBF1000016, OCBBF1000030, OCBBF1000042, OCBBF1000049, OCBBF1000054, OCBBF1000067, OCBBF1000080, OCBBF1000085, OCBBF1000091, OCBBF1000104, OCBBF1000118, OCBBF1000119, OCBBF1000122, OCBBF1000130, OCBBF1000138, OCBBF1000145, OCBBF1000146, OCBBF1000153, OCBBF1000175, OCBBF1000185, OCBBF1000192, OCBBF1000254, OCBBF1000315, OCBBF2000013, OCBBF2000015, OCBBF2000126, OCBBF2000178, OCBBF2000231, OCBBF2000277, OCBBF2000287, OCBBF2000323, OCBBF2000452, OCBBF2000677, OCBBF2000703, OCBBF2000712, OCBBF2000719, OCBBF2000831, OCBBF2000904, OCBBF2000982, OCBBF2000998, OCBBF2001075, OCBBF2001101, OCBBF2001124, OCBBF2001140, OCBBF2001166, OCBBF2001176, OCBBF2001186, OCBBF2001196, OCBBF2001210, OCBBF2001252, OCBBF2001307, OCBBF2001323, OCBBF2001389, OCBBF2001402, OCBBF2001408, OCBBF2001416, OCBBF2001473, OCBBF2001492, OCBBF2001527, OCBBF2001528, OCBBF2001639, OCBBF2001681, OCBBF2001706, OCBBF2001749, OCBBF2001794, OCBBF2001910, OCBBF2001931, OCBBF2001961, OCBBF2001983, OCBBF2002015, OCBBF2002086, OCBBF2002124, OCBBF2002161, OCBBF2002290, OCBBF2002357, OCBBF2002376, OCBBF2002615, OCBBF2002626, OCBBF2002656, OCBBF2002663, OCBBF2002805, OCBBF2002865, OCBBF2002920, OCBBF2002980, OCBBF2003028, OCBBF2003052, OCBBF2003091, OCBBF2003246, OCBBF2003327, OCBBF2003518, OCBBF2003543, OCBBF2003593, OCBBF2003744, OCBBF2003819, OCBBF2003925, OCBBF2004038, OCBBF2004104, OCBBF2004147, OCBBF2004168, OCBBF2004235, OCBBF2004259, OCBBF2004273, OCBBF2004385, OCBBF2004418, OCBBF2004478, OCBBF2004482, OCBBF2004533, OCBBF2004567, OCBBF2004612, OCBBF2004647, OCBBF2004669, OCBBF2004826, OCBBF2004866, OCBBF2004883, OCBBF2004889, OCBBF2004930, OCBBF2004984, OCBBF2005066, OCBBF2005077, OCBBF2005161, OCBBF2005343, OCBBF2005349, OCBBF2005373, OCBBF2005420, OCBBF2005428, OCBBF2005433, OCBBF2005476, OCBBF2005546, OCBBF2005843, OCBBF2005901, OCBBF2005956, OCBBF2006005, OCBBF2006030, OCBBF2006058, OCBBF2006113, OCBBF2006151, OCBBF2006154, OCBBF2006214, OCBBF2006241, OCBBF2006313, OCBBF2006388, OCBBF2006438, OCBBF2006567, OCBBF2006624, OCBBF2006639, OCBBF2006660, OCBBF2006764, OCBBF2006849, OCBBF2006859, OCBBF2006972, OCBBF2006987, OCBBF2007028, OCBBF2007039, OCBBF2007051, OCBBF2007068, OCBBF2007114, OCBBF2007121, OCBBF2007184, OCBBF2007194, OCBBF2007196, OCBBF2007224, OCBBF2007238, OCBBF2007354, OCBBF2007414, OCBBF2007415, OCBBF2007428, OCBBF2007478, OCBBF2007485, OCBBF2007520, OCBBF2007555, OCBBF2007610, OCBBF2007622, OCBBF2007756, OCBBF2007762, OCBBF2007892, OCBBF2007931, OCBBF2007946, OCBBF2008005, OCBBF2008116, OCBBF2008138, OCBBF2008144, OCBBF2008283, OCBBF2008330, OCBBF2008340, OCBBF2008366, OCBBF2008466, OCBBF2008483, OCBBF2008511, OCBBF2008520, OCBBF2008586, OCBBF2008640, OCBBF2008691, OCBBF2008701, OCBBF2008724, OCBBF2008768, OCBBF2008770, OCBBF2008775, OCBBF2008790, OCBBF2008814, OCBBF2008822, OCBBF2009095, OCBBF2009115, OCBBF2009242, OCBBF2009301, OCBBF2009352, OCBBF2009391, OCBBF2009424, OCBBF2009536, OCBBF2009571, OCBBF2009583, OCBBF2009603, OCBBF2009788, OCBBF2009836, OCBBF2009920, OCBBF2009926, OCBBF2010040, OCBBF2010140, OCBBF2010281, OCBBF2010313, OCBBF2010404, OCBBF2010416, OCBBF2010420, OCBBF2010557, OCBBF2010604, OCBBF2010709, OCBBF2010792, OCBBF2010819, OCBBF2010841, OCBBF2010843, OCBBF2010858, OCBBF2010863, OCBBF2010871, OCBBF2010931, OCBBF2010945, OCBBF2010978, OCBBF2010989, OCBBF2011021, OCBBF2011073, OCBBF2011137, OCBBF2011177, OCBBF2011228, OCBBF2011232, OCBBF2011283, OCBBF2011311, OCBBF2011625, OCBBF2011669, OCBBF2011685, OCBBF2011706, OCBBF2011722, OCBBF2011759, OCBBF2011767, OCBBF2011855, OCBBF2011872, OCBBF2011887, OCBBF2011897, OCBBF2011914, OCBBF2011960, OCBBF2011981, OCBBF2012001, OCBBF2012028, OCBBF2012039, OCBBF2012095, OCBBF2012139, OCBBF2012191, OCBBF2012262, OCBBF2012320, OCBBF2012436, OCBBF2012525, OCBBF2012678, OCBBF2012704, OCBBF2012714, OCBBF2012755, OCBBF2012812, OCBBF2012821, OCBBF2012881, OCBBF2012908, OCBBF2012936, OCBBF2012990, OCBBF2013011, OCBBF2013049, OCBBF2013091, OCBBF2013123, OCBBF2013127, OCBBF2013149, OCBBF2013208, OCBBF2013285, OCBBF2013319, OCBBF2013324, OCBBF2013366, OCBBF2013481, OCBBF2013507, OCBBF2013721, OCBBF2013789, OCBBF2013883, OCBBF2013926, OCBBF2014052, OCBBF2014089, OCBBF2014322, OCBBF2014386, OCBBF2014576, OCBBF2014707, OCBBF2014745, OCBBF2014828, OCBBF2014873, OCBBF2014880, OCBBF2014928, OCBBF2015031, OCBBF2015081, OCBBF2015115, OCBBF2015232, OCBBF2015233, OCBBF2015285, OCBBF2015334, OCBBF2015335, OCBBF2015503, OCBBF2015506, OCBBF2015599, OCBBF2015645, OCBBF2015659, OCBBF2015751, OCBBF2015797, OCBBF2015931, OCBBF2015980, OCBBF2016038, OCBBF2016405, OCBBF2016467, OCBBF2016590, OCBBF2016591, OCBBF2016612, OCBBF2016689, OCBBF2016690, OCBBF2016729, OCBBF2016841, OCBBF2016928, OCBBF2017055, OCBBF2017069, OCBBF2017306, OCBBF2017325, OCBBF2017398, OCBBF2017458, OCBBF2017489, OCBBF2017516, OCBBF2017665, OCBBF2017754, OCBBF2017791, OCBBF2017815, OCBBF2017882, OCBBF2017888, OCBBF2017920, OCBBF2018012, OCBBF2018014, OCBBF2018084, OCBBF2018167, OCBBF2018206, OCBBF2018229, OCBBF2018234, OCBBF2018362, OCBBF2018380, OCBBF2018563, OCBBF2018581, OCBBF2018618, OCBBF2018663, OCBBF2018687, OCBBF2018827, OCBBF2018828, OCBBF2018873, OCBBF2018934, OCBBF2019108, OCBBF2019195, OCBBF2019327, OCBBF2019684, OCBBF2019761, OCBBF2019823, OCBBF2019950, OCBBF2020048, OCBBF2020318, OCBBF2020343, OCBBF2020453, OCBBF2020741, OCBBF2020801, OCBBF2020825, OCBBF2020838, OCBBF2021214, OCBBF2021286, OCBBF2021323, OCBBF2021518, OCBBF2021788, OCBBF2021833, OCBBF2022351, OCBBF2022573, OCBBF2022574, OCBBF2023162, OCBBF2023598, OCBBF2023643, OCBBF2024463, OCBBF2024589, OCBBF2024719, OCBBF2024779, OCBBF2024781, OCBBF2024850, OCBBF2025028, OCBBF2025115, OCBBF2025198, OCBBF2025451, OCBBF2025458, OCBBF2025527, OCBBF2025631, OCBBF2025730, OCBBF2026025, OCBBF2026035, OCBBF2026144, OCBBF2026368, OCBBF2026645, OCBBF2026649, OCBBF2026690, OCBBF2026981, OCBBF2027148, OCBBF2027197, OCBBF2027354, OCBBF2027423, OCBBF2027478, OCBBF2027481, OCBBF2027511, OCBBF2027661, OCBBF2027728, OCBBF2027782, OCBBF2027868, OCBBF2028055, OCBBF2028173, OCBBF2028421, OCBBF2029471, OCBBF2029901, OCBBF2030116, OCBBF2030329, OCBBF2030354, OCBBF2030517, OCBBF2030574, OCBBF2030708, OCBBF2030927, OCBBF2030963, OCBBF2031167, OCBBF2031198, OCBBF2031366, OCBBF2031561, OCBBF2032152, OCBBF2032274, OCBBF2032539, OCBBF2032590, OCBBF2032599, OCBBF2032611, OCBBF2032671, OCBBF2033295, OCBBF2033413, OCBBF2033869, OCBBF2033948, OCBBF2034333, OCBBF2034529, OCBBF2034637, OCBBF2034906, OCBBF2035110, OCBBF2035214, OCBBF2035390, OCBBF2035564, OCBBF2035658, OCBBF2035823, OCBBF2035885, OCBBF2035916, OCBBF2036019, OCBBF2036031, OCBBF2036225, OCBBF2036476, OCBBF2036743, OCBBF2036752, OCBBF2037068, OCBBF2037340, OCBBF2037398, OCBBF2037464, OCBBF2037547, OCBBF2037598, OCBBF2037638, OCBBF2038238, OCBBF2038285, OCBBF2038317, OCBBF3000097, OCBBF3000213, OCBBF3000296, OCBBF3000372, OCBBF3000380, OCBBF3000743, OCBBF3000830, OCBBF3001076, OCBBF3001202, OCBBF3001333, OCBBF3001616, OCBBF3002553, OCBBF3002600, OCBBF3002654, OCBBF3003103, OCBBF3003209, OCBBF3003592, OCBBF3003745, OCBBF3003761, OCBBF3004264, OCBBF3004314, OCBBF3004972, OCBBF3005330, OCBBF3005597, OCBBF3005843, OCBBF3006802, OCBBF3006986, OCBBF3007078, OCBBF3007704, OCBBF3008230, OCBBF3008392, OCBBF3008835, OCBBF3009192, OCBBF3009244, OCBBF3009279, PANCR1000012, PANCR1000021, PANCR1000081, PANCR1000086, PANCR1000091, PANCR1000185, PEBLM1000024, PEBLM1000029, PEBLM1000034, PEBLM1000062, PEBLM1000066, PEBLM1000068, PEBLM1000071, PEBLM1000083, PEBLM1000144, PEBLM1000147, PEBLM1000180, PEBLM2000030, PEBLM2000112, PEBLM2000126, PEBLM2000170, PEBLM2000180, PEBLM2000213, PEBLM2000248, PEBLM2000270, PEBLM2000321, PEBLM2000326, PEBLM2000333, PEBLM2000338, PEBLM2000479, PEBLM2000502, PEBLM2001072, PEBLM2001312, PEBLM2001465, PEBLM2001488, PEBLM2001803, PEBLM2002432, PEBLM2002455, PEBLM2002594, PEBLM2002749, PEBLM2002887, PEBLM2003426, PEBLM2003765, PEBLM2003914, PEBLM2003935, PEBLM2004015, PEBLM2004216, PEBLM2004290, PEBLM2004452, PEBLM2004497, PEBLM2004733, PEBLM2005282, PEBLM2005615, PEBLM2005632, PEBLM2005697, PEBLM2006031, PEBLM2006036, PEBLM2006049, PEBLM2006113, PEBLM2006135, PEBLM2006215, PEBLM2006283, PEBLM2006298, PEBLM2006366, PEBLM2006709, PEBLM2006912, PEBLM2007112, PEBLM2007140, PEBLM2007188, PEBLM2007296, PEBLM2007437, PEBLM2007447, PEBLM2007598, PEBLM2007832, PEBLM2007834, PEBLM2008106, PEBLM2008576, PEBLM2008605, PEBLM2008826, PEBLM2008861, PERIC1000025, PERIC1000147, PERIC2000180, PERIC2000214, PERIC2000386, PERIC2000387, PERIC2000422, PERIC2000473, PERIC2000478, PERIC2000889, PERIC2000914, PERIC2001227, PERIC2001228, PERIC2001379, PERIC2001504, PERIC2001703, PERIC2001764, PERIC2002243, PERIC2002272, PERIC2002766, PERIC2003001, PERIC2003090, PERIC2003287, PERIC2003349, PERIC2003452, PERIC2003699, PERIC2003720, PERIC2003794, PERIC2003834, PERIC2003919, PERIC2003957, PERIC2004028, PERIC2004131, PERIC2004259, PERIC2004379, PERIC2004429, PERIC2004510, PERIC2004613, PERIC2004909, PERIC2005111, PERIC2005117, PERIC2005305, PERIC2005347, PERIC2005370, PERIC2005936, PERIC2006035, PERIC2006121, PERIC2006443, PERIC2006945, PERIC2006960, PERIC2007068, PERIC2007439, PERIC2007914, PERIC2008008, PERIC2008385, PERIC2009001, PERIC2009086, PERIC2009329, PERIC2009566, PLACE5000001, PLACE5000013, PLACE5000037, PLACE5000058, PLACE5000066, PLACE5000067, PLACE5000068, PLACE5000070, PLACE5000080, PLACE5000105, PLACE5000113, PLACE5000115, PLACE5000116, PLACE5000129, PLACE5000139, PLACE5000153, PLACE5000159, PLACE5000170, PLACE5000171, PLACE5000178, PLACE5000245, PLACE5000260, PLACE5000282, PLACE5000297, PLACE5000372, PLACE5000492, PLACE5000522, PLACE5000527, PLACE6000012, PLACE6000044, PLACE6000055, PLACE6000070, PLACE6000137, PLACE6000145, PLACE6000191, PLACE6000205, PLACE6000231, PLACE6000263, PLACE6000296, PLACE6000325, PLACE6000348, PLACE6000371, PLACE6000414, PLACE6000424, PLACE6000426, PLACE6000429, PLACE6000450, PLACE6000523, PLACE6000550, PLACE6000552, PLACE6000555, PLACE6000619, PLACE6000630, PLACE6000953, PLACE6001064, PLACE6001118, PLACE6001153, PLACE6001185, PLACE6001262, PLACE6001281, PLACE6001294, PLACE6001536, PLACE6001557, PLACE6001712, PLACE6001740, PLACE6001823, PLACE6001886, PLACE6001925, PLACE6001933, PLACE6002011, PLACE6002016, PLACE6002056, PLACE6002102, PLACE6002157, PLACE6002312, PLACE6002323, PLACE6002345, PLACE6002419, PLACE6002462, PLACE6002647, PLACE6002668, PLACE6002692, PLACE6002699, PLACE6002710, PLACE6002871, PLACE6002949, PLACE6003004, PLACE6003077, PLACE6003094, PLACE6003109, PLACE6003204, PLACE6003218, PLACE6003372, PLACE6003393, PLACE6003399, PLACE6003539, PLACE6003621, PLACE6003705, PLACE6003740, PLACE6003745, PLACE6003771, PLACE6003796, PLACE6003839, PLACE6003850, PLACE6004005, PLACE6004101, PLACE6004219, PLACE6004336, PLACE6004368, PLACE6004380, PLACE6004397, PLACE6004454, PLACE6004464, PLACE6004491, PLACE6004578, PLACE6004663, PLACE6004687, PLACE6004738, PLACE6004931, PLACE6004966, PLACE6004993, PLACE6005007, PLACE6005029, PLACE6005108, PLACE6005231, PLACE6005234, PLACE6005283, PLACE6005294, PLACE6005328, PLACE6005351, PLACE6005423, PLACE6005482, PLACE6005487, PLACE6005535, PLACE6005546, PLACE6005559, PLACE6005579, PLACE6005691, PLACE6005786, PLACE6006042, PLACE6006077, PLACE6006137, PLACE6006158, PLACE6006186, PLACE6006217, PLACE6006222, PLACE6006266, PLACE6006287, PLACE6006394, PLACE6006418, PLACE6006474, PLACE6006566, PLACE6006697, PLACE6006822, PLACE6006871, PLACE6006905, PLACE6006988, PLACE6007050, PLACE6007180, PLACE6007239, PLACE6007242, PLACE6007309, PLACE6007373, PLACE6007380, PLACE6007433, PLACE6007482, PLACE6007687, PLACE6007787, PLACE6007798, PLACE6007807, PLACE6007925, PLACE6008036, PLACE6008094, PLACE6008126, PLACE6008285, PLACE6008444, PLACE6008453, PLACE6008640, PLACE6008750, PLACE6008768, PLACE6008775, PLACE6008793, PLACE6008824, PLACE6008989, PLACE6009006, PLACE6009008, PLACE6009228, PLACE6009237, PLACE6009338, PLACE6009419, PLACE6009430, PLACE6009482, PLACE6009524, PLACE6009527, PLACE6009590, PLACE6009821, PLACE6009835, PLACE6009853, PLACE6010077, PLACE6010463, PLACE6010485, PLACE6010568, PLACE6010701, PLACE6010704, PLACE6010732, PLACE6010765, PLACE6010848, PLACE6010925, PLACE6010936, PLACE6010991, PLACE6011041, PLACE6011102, PLACE6011156, PLACE6011211, PLACE6011260, PLACE6011627, PLACE6011774, PLACE6011881, PLACE6011907, PLACE6011970, PLACE6011975, PLACE6012028, PLACE6012108, PLACE6012168, PLACE6012297, PLACE6012308, PLACE6012574, PLACE6012908, PLACE6012936, PLACE6012942, PLACE6013232, PLACE6013288, PLACE6013386, PLACE6013400, PLACE6013650, PLACE6013672, PLACE6013883, PLACE6013884, PLACE6013885, PLACE6014043, PLACE6014064, PLACE6014516, PLACE6014882, PLACE6015051, PLACE6015211, PLACE6015322, PLACE6015445, PLACE6015460, PLACE6015513, PLACE6015591, PLACE6015729, PLACE6015731, PLACE6015939, PLACE6016030, PLACE6016093, PLACE6016105, PLACE6016160, PLACE6016210, PLACE6016254, PLACE6016942, PLACE6016984, PLACE6017002, PLACE6017431, PLACE6017564, PLACE6017578, PLACE6017701, PLACE6017714, PLACE6017788, PLACE6017791, PLACE6018031, PLACE6018107, PLACE6018187, PLACE6018235, PLACE6018287, PLACE6018441, PLACE6018487, PLACE6018497, PLACE6018769, PLACE6018834, PLACE6018843, PLACE6018938, PLACE6019195, PLACE6019385, PLACE6019542, PLACE6019600, PLACE6019674, PLACE6019676, PLACE6019701, PLACE6019932, PLACE6020031, PLACE6020145, PLACE7000167, PLACE7000170, PLACE7000266, PLACE7000333, PLACE7000410, PLACE7000502, PLACE7000707, PLACE7001022, PLACE7001544, PLACE7001759, PLACE7001936, PLACE7002303, PLACE7002641, PLACE7003639, PLACE7003657, PLACE7003684, PLACE7003985, PLACE7004961, PLACE7005169, PLACE7005671, PLACE7005840, PLACE7006051, PLACE7006090, PLACE7006240, PLACE7006268, PLACE7006275, PLACE7006498, PLACE7006540, PLACE7007379, PLACE7007644, PLACE7007973, PLACE7008136, PLACE7008261, PLACE7008431, PLACE7008623, PLACE7008766, PLACE7009563, PROST1000039, PROST1000065, PROST1000083, PROST1000085, PROST1000110, PROST1000123, PROST1000136, PROST1000145, PROST1000152, PROST1000167, PROST1000184, PROST1000199, PROST1000215, PROST1000217, PROST1000220, PROST1000246, PROST1000262, PROST1000272, PROST1000298, PROST1000322, PROST1000334, PROST1000362, PROST1000377, PROST1000383, PROST1000412, PROST1000419, PROST1000451, PROST1000480, PROST1000485, PROST1000493, PROST1000512, PROST1000526, PROST1000527, PROST1000528, PROST1000536, PROST1000559, PROST1000564, PROST1000575, PROST2000053, PROST2000067, PROST2000079, PROST2000105, PROST2000143, PROST2000162, PROST2000165, PROST2000176, PROST2000203, PROST2000206, PROST2000212, PROST2000241, PROST2000267, PROST2000273, PROST2000274, PROST2000277, PROST2000284, PROST2000325, PROST2000337, PROST2000432, PROST2000452, PROST2000463, PROST2000470, PROST2000505, PROST2000567, PROST2000572, PROST2000717, PROST2000760, PROST2000761, PROST2000835, PROST2000893, PROST2000961, PROST2001002, PROST2001116, PROST2001138, PROST2001213, PROST2001283, PROST2001414, PROST2001415, PROST2001465, PROST2001521, PROST2001540, PROST2001552, PROST2001599, PROST2001611, PROST2001636, PROST2001739, PROST2001796, PROST2001805, PROST2001823, PROST2001883, PROST2001899, PROST2001997, PROST2001998, PROST2002078, PROST2002101, PROST2002162, PROST2002212, PROST2002227, PROST2002338, PROST2002425, PROST2002488, PROST2002489, PROST2002527, PROST2002591, PROST2002602, PROST2002633, PROST2002682, PROST2002685, PROST2002722, PROST2002736, PROST2002842, PROST2002897, PROST2002906, PROST2002927, PROST2002960, PROST2003102, PROST2003117, PROST2003210, PROST2003232, PROST2003302, PROST2003303, PROST2003324, PROST2003340, PROST2003396, PROST2003428, PROST2003472, PROST2003537, PROST2003563, PROST2003577, PROST2003583, PROST2003586, PROST2003628, PROST2003635, PROST2003674, PROST2003676, PROST2003725, PROST2003732, PROST2003775, PROST2003922, PROST2003930, PROST2004115, PROST2004142, PROST2004146, PROST2004161, PROST2004251, PROST2004258, PROST2004332, PROST2004416, PROST2004481, PROST2004526, PROST2004570, PROST2004727, PROST2004739, PROST2004742, PROST2004744, PROST2004817, PROST2005039, PROST2005067, PROST2005076, PROST2005093, PROST2005121, PROST2005131, PROST2005143, PROST2005228, PROST2005272, PROST2005426, PROST2005466, PROST2005630, PROST2005683, PROST2005788, PROST2005880, PROST2005886, PROST2005904, PROST2005919, PROST2005943, PROST2006008, PROST2006020, PROST2006030, PROST2006060, PROST2006196, PROST2006201, PROST2006282, PROST2006343, PROST2006450, PROST2006491, PROST2006510, PROST2006579, PROST2006688, PROST2006766, PROST2006782, PROST2006933, PROST2006988, PROST2007122, PROST2007200, PROST2007237, PROST2007248, PROST2007289, PROST2007317, PROST2007328, PROST2007382, PROST2007389, PROST2007416, PROST2007528, PROST2007612, PROST2007818, PROST2007871, PROST2007950, PROST2007956, PROST2007974, PROST2007988, PROST2008079, PROST2008088, PROST2008243, PROST2008245, PROST2008268, PROST2008360, PROST2008447, PROST2008468, PROST2008472, PROST2008516, PROST2008724, PROST2008835, PROST2008993, PROST2009022, PROST2009208, PROST2009222, PROST2009254, PROST2009273, PROST2009320, PROST2009347, PROST2009365, PROST2009388, PROST2009400, PROST2009470, PROST2009483, PROST2009571, PROST2009731, PROST2009736, PROST2009795, PROST2009901, PROST2009909, PROST2010046, PROST2010219, PROST2010250, PROST2010318, PROST2010326, PROST2010382, PROST2010400, PROST2010545, PROST2010579, PROST2010606, PROST2010885, PROST2011012, PROST2011038, PROST2011105, PROST2011297, PROST2011410, PROST2011439, PROST2011482, PROST2011631, PROST2011660, PROST2012005, PROST2012016, PROST2012088, PROST2012140, PROST2012157, PROST2012190, PROST2012249, PROST2012400, PROST2012448, PROST2012504, PROST2012542, PROST2012550, PROST2012740, PROST2012745, PROST2012780, PROST2012888, PROST2012890, PROST2013032, PROST2013053, PROST2013121, PROST2013260, PROST2013327, PROST2013531, PROST2013605, PROST2013627, PROST2013873, PROST2013880, PROST2014422, PROST2014585, PROST2014601, PROST2014659, PROST2014862, PROST2014916, PROST2014925, PROST2015124, PROST2015137, PROST2015198, PROST2015243, PROST2015246, PROST2015251, PROST2015332, PROST2015457, PROST2015537, PROST2015545, PROST2015551, PROST2015636, PROST2015710, PROST2015756, PROST2015877, PROST2015900, PROST2015924, PROST2015932, PROST2016246, PROST2016351, PROST2016379, PROST2016444, PROST2016462, PROST2016499, PROST2016512, PROST2016566, PROST2016582, PROST2016668, PROST2016684, PROST2016777, PROST2016829, PROST2016860, PROST2016918, PROST2016980, PROST2017098, PROST2017128, PROST2017367, PROST2017413, PROST2017441, PROST2017578, PROST2017612, PROST2017617, PROST2017700, PROST2017701, PROST2017729, PROST2017836, PROST2017910, PROST2017972, PROST2018030, PROST2018090, PROST2018235, PROST2018437, PROST2018487, PROST2018511, PROST2018588, PROST2018607, PROST2018788, PROST2018902, PROST2018922, PROST2018977, PROST2019164, PROST2019253, PROST2019296, PROST2019398, PROST2019487, PROST2019781, PUAEN1000039, PUAEN1000057, PUAEN1000081, PUAEN1000085, PUAEN1000087, PUAEN1000121, PUAEN1000147, PUAEN1000161, PUAEN1000175, PUAEN1000275, PUAEN1000276, PUAEN1000288, PUAEN1000322, PUAEN2000080, PUAEN2000152, PUAEN2000175, PUAEN2000247, PUAEN2000312, PUAEN2000394, PUAEN2000594, PUAEN2000684, PUAEN2000942, PUAEN2001260, PUAEN2001345, PUAEN2001526, PUAEN2001586, PUAEN2001882, PUAEN2002473, PUAEN2002489, PUAEN2002552, PUAEN2002568, PUAEN2002616, PUAEN2002758, PUAEN2003079, PUAEN2003116, PUAEN2003408, PUAEN2003517, PUAEN2004067, PUAEN2004083, PUAEN2004511, PUAEN2004525, PUAEN2004875, PUAEN2005110, PUAEN2005247, PUAEN2005502, PUAEN2005588, PUAEN2005930, PUAEN2006029, PUAEN2006328, PUAEN2006335, PUAEN2006578, PUAEN2006639, PUAEN2006761, PUAEN2007044, PUAEN2007350, PUAEN2007785, PUAEN2007898, PUAEN2008123, PUAEN2008228, PUAEN2008314, PUAEN2008515, PUAEN2008815, PUAEN2008980, PUAEN2008985, PUAEN2009174, PUAEN2009348, PUAEN2009534, PUAEN2009655, PUAEN2009795, PUAEN2009852, PUAEN2010346, PUAEN2010824, RECTM1000051, RECTM1000141, RECTM2000220, RECTM2000349, RECTM2000433, RECTM2000510, RECTM2001307, RECTM2001347, RECTM2001519, RECTM2001666, RECTM2001691, RECTM2001749, RECTM2002172, RECTM2002602, RECTM2002632, SALGL1000005, SALGL1000024, SALGL1000028, SALGL1000047, SALGL1000065, SALGL1000107, SALGL1000171, SKMUS1000014, SKMUS1000022, SKMUS1000030, SKMUS1000064, SKMUS1000067, SKMUS1000084, SKMUS1000102, SKMUS1000104, SKMUS1000110, SKMUS1000118, SKMUS1000124, SKMUS1000129, SKMUS1000138, SKMUS1000176, SKMUS2000020, SKMUS2000061, SKMUS2000074, SKMUS2000078, SKMUS2000117, SKMUS2000137, SKMUS2000198, SKMUS2000243, SKMUS2000271, SKMUS2000287, SKMUS2000317, SKMUS2000330, SKMUS2000339, SKMUS2000343, SKMUS2000365, SKMUS2000380, SKMUS2000390, SKMUS2000416, SKMUS2000458, SKMUS2000467, SKMUS2000468, SKMUS2000515, SKMUS2000679, SKMUS2000690, SKMUS2000701, SKMUS2000705, SKMUS2000710, SKMUS2000724, SKMUS2000726, SKMUS2000757, SKMUS2000774, SKMUS2000780, SKMUS2000821, SKMUS2000847, SKMUS2000863, SKMUS2000873, SKMUS2000894, SKMUS2000898, SKMUS2000902, SKMUS2000933, SKMUS2000945, SKMUS2000954, SKMUS2000961, SKMUS2000973, SKMUS2000980, SKMUS2001008, SKMUS2001014, SKMUS2001129, SKMUS2001157, SKMUS2001164, SKMUS2001199, SKMUS2001201, SKMUS2001215, SKMUS2001247, SKMUS2001254, SKMUS2001271, SKMUS2001287, SKMUS2001323, SKMUS2001364, SKMUS2001398, SKMUS2001402, SKMUS2001412, SKMUS2001492, SKMUS2001501, SKMUS2001543, SKMUS2001580, SKMUS2001585, SKMUS2001608, SKMUS2001631, SKMUS2001662, SKMUS2001663, SKMUS2001668, SKMUS2001671, SKMUS2001683, SKMUS2001693, SKMUS2001695, SKMUS2001703, SKMUS2001740, SKMUS2001742, SKMUS2001823, SKMUS2001850, SKMUS2002077, SKMUS2002153, SKMUS2002475, SKMUS2002602, SKMUS2002634, SKMUS2002693, SKMUS2002821, SKMUS2002840, SKMUS2002920, SKMUS2003034, SKMUS2003074, SKMUS2003168, SKMUS2003194, SKMUS2003744, SKMUS2004044, SKMUS2004047, SKMUS2004483, SKMUS2004667, SKMUS2004897, SKMUS2004903, SKMUS2004908, SKMUS2005428, SKMUS2006394, SKMUS2006481, SKMUS2006755, SKMUS2007315, SKMUS2007359, SKMUS2007568, SKMUS2007740, SKMUS2007816, SKMUS2007915, SKMUS2008338, SKMUS2008407, SKMUS2008474, SKMUS2008585, SKMUS2008607, SKMUS2009190, SKMUS2009232, SKMUS2009479, SKMUS2009557, SKNMC1000123, SKNMC1000124, SKNMC1000137, SKNMC1000159, SKNMC1000229, SKNMC1000251, SKNMC1000264, SKNMC2000224, SKNMC2000256, SKNMC2000305, SKNMC2000356, SKNMC2000374, SKNMC2000583, SKNMC2000612, SKNMC2000622, SKNMC2000877, SKNMC2000966, SKNMC2001113, SKNMC2001324, SKNMC2001555, SKNMC2001596, SKNMC2001623, SKNMC2002402, SKNMC2003639, SKNMC2003924, SKNMC2003987, SKNMC2004457, SKNMC2004643, SKNMC2004651, SKNMC2005772, SKNMC2006173, SKNMC2006327, SKNMC2006998, SKNMC2007134, SKNMC2007502, SKNMC2007504, SKNMC2007961, SKNMC2009450, SKNSH1000086, SKNSH1000101, SKNSH1000174, SKNSH1000301, SKNSH1000308, SKNSH1000416, SKNSH2000051, SKNSH2000101, SKNSH2000163, SKNSH2000250, SKNSH2000319, SKNSH2000482, SKNSH2000516, SKNSH2000550, SKNSH2000819, SKNSH2001222, SKNSH2001875, SKNSH2001931, SKNSH2002054, SKNSH2002325, SKNSH2002768, SKNSH2002866, SKNSH2003064, SKNSH2003174, SKNSH2003422, SKNSH2003466, SKNSH2003483, SKNSH2003528, SKNSH2003633, SKNSH2004039, SKNSH2005061, SKNSH2005120, SKNSH2005194, SKNSH2005240, SKNSH2005792, SKNSH2005816, SKNSH2005981, SKNSH2006304, SKNSH2006432, SKNSH2006822, SKNSH2007142, SKNSH2007149, SKNSH2007429, SKNSH2007739, SKNSH2008043, SKNSH2008940, SKNSH2008969, SKNSH2009197, SKNSH2009357, SKNSH2009435, SKNSH2009991, SKNSH2010015, SMINT1000012, SMINT1000039, SMINT1000042, SMINT1000051, SMINT1000054, SMINT1000057, SMINT1000071, SMINT1000075, SMINT1000078, SMINT1000091, SMINT1000100, SMINT1000103, SMINT1000117, SMINT1000118, SMINT1000137, SMINT1000192, SMINT2000032, SMINT2000040, SMINT2000060, SMINT2000073, SMINT2000084, SMINT2000145, SMINT2000176, SMINT2000185, SMINT2000227, SMINT2000229, SMINT2000232, SMINT2000267, SMINT2000400, SMINT2000454, SMINT2000468, SMINT2000518, SMINT2000529, SMINT2000530, SMINT2000537, SMINT2000538, SMINT2000541, SMINT2000545, SMINT2000558, SMINT2000562, SMINT2000568, SMINT2000609, SMINT2000629, SMINT2000694, SMINT2000747, SMINT2000811, SMINT2000824, SMINT2000984, SMINT2001114, SMINT2001158, SMINT2001183, SMINT2001199, SMINT2001222, SMINT2001348, SMINT2001397, SMINT2001458, SMINT2001461, SMINT2001535, SMINT2001559, SMINT2001609, SMINT2001615, SMINT2001683, SMINT2001731, SMINT2001818, SMINT2001950, SMINT2002126, SMINT2002159, SMINT2002202, SMINT2002210, SMINT2002224, SMINT2002281, SMINT2002311, SMINT2002328, SMINT2002414, SMINT2002457, SMINT2002620, SMINT2002689, SMINT2002743, SMINT2002778, SMINT2002880, SMINT2002899, SMINT2002974, SMINT2002976, SMINT2003003, SMINT2003128, SMINT2003150, SMINT2003317, SMINT2003386, SMINT2003423, SMINT2003505, SMINT2003551, SMINT2003569, SMINT2003641, SMINT2003644, SMINT2003866, SMINT2003905, SMINT2004037, SMINT2004047, SMINT2004086, SMINT2004299, SMINT2004339, SMINT2004350, SMINT2004414, SMINT2004473, SMINT2004547, SMINT2004583, SMINT2004589, SMINT2004729, SMINT2004781, SMINT2004872, SMINT2004891, SMINT2004909, SMINT2004972, SMINT2004992, SMINT2005075, SMINT2005161, SMINT2005174, SMINT2005213, SMINT2005330, SMINT2005387, SMINT2005402, SMINT2005405, SMINT2005621, SMINT2005623, SMINT2005624, SMINT2005688, SMINT2005800, SMINT2005956, SMINT2006078, SMINT2006205, SMINT2006331, SMINT2006596, SMINT2006641, SMINT2006648, SMINT2006708, SMINT2006716, SMINT2006801, SMINT2007062, SMINT2007101, SMINT2007140, SMINT2007187, SMINT2007219, SMINT2007294, SMINT2007365, SMINT2007391, SMINT2007433, SMINT2007508, SMINT2007526, SMINT2007579, SMINT2007647, SMINT2007729, SMINT2007790, SMINT2007792, SMINT2007796, SMINT2007867, SMINT2007932, SMINT2008042, SMINT2008054, SMINT2008133, SMINT2008277, SMINT2008329, SMINT2008455, SMINT2008491, SMINT2008531, SMINT2008545, SMINT2008558, SMINT2008590, SMINT2008625, SMINT2008672, SMINT2008690, SMINT2008715, SMINT2008720, SMINT2008817, SMINT2008844, SMINT2008869, SMINT2008917, SMINT2008921, SMINT2009119, SMINT2009121, SMINT2009212, SMINT2009216, SMINT2009233, SMINT2009259, SMINT2009272, SMINT2009292, SMINT2009363, SMINT2009415, SMINT2009468, SMINT2009505, SMINT2009529, SMINT2009832, SMINT2009895, SMINT2009902, SMINT2009973, SMINT2010015, SMINT2010068, SMINT2010076, SMINT2010084, SMINT2010144, SMINT2010200, SMINT2010278, SMINT2010324, SMINT2010326, SMINT2010369, SMINT2010426, SMINT2010500, SMINT2010533, SMINT2010629, SMINT2010639, SMINT2010672, SMINT2010753, SMINT2010853, SMINT2010897, SMINT2010959, SMINT2010997, SMINT2011033, SMINT2011066, SMINT2011273, SMINT2011311, SMINT2011406, SMINT2011509, SMINT2011567, SMINT2011588, SMINT2011656, SMINT2011888, SMINT2011958, SMINT2012040, SMINT2012179, SMINT2012195, SMINT2012285, SMINT2012291, SMINT2012501, SMINT2012734, SMINT2012793, SMINT2013031, SMINT2013032, SMINT2013129, SMINT2013170, SMINT2013181, SMINT2013228, SMINT2013613, SMINT2013626, SMINT2013695, SMINT2013833, SMINT2013890, SMINT2014166, SMINT2014282, SMINT2014443, SMINT2014480, SMINT2014489, SMINT2014721, SMINT2015006, SMINT2015294, SMINT2015306, SMINT2015326, SMINT2015353, SMINT2015454, SMINT2015518, SMINT2015745, SMINT2015787, SMINT2015810, SMINT2016122, SMINT2016146, SMINT2016286, SMINT2016313, SMINT2016396, SMINT2016412, SMINT2016440, SMINT2016477, SMINT2016544, SMINT2016857, SMINT2017134, SMINT2017319, SMINT2017324, SMINT2017410, SMINT2017431, SMINT2017432, SMINT2017436, SMINT2017599, SMINT2017659, SMINT2017736, SMINT2017781, SMINT2017855, SMINT2017884, SMINT2017964, SMINT2017974, SMINT2018343, SMINT2018353, SMINT2018592, SMINT2018681, SMINT2019017, SMINT2019105, SMINT2019142, SMINT2019153, SMINT2019200, SPLEN1000013, SPLEN1000041, SPLEN1000049, SPLEN1000056, SPLEN1000087, SPLEN1000089, SPLEN1000091, SPLEN1000116, SPLEN1000134, SPLEN1000139, SPLEN1000143, SPLEN1000145, SPLEN1000156, SPLEN1000163, SPLEN1000178, SPLEN2000020, SPLEN2000064, SPLEN2000072, SPLEN2000098, SPLEN2000126, SPLEN2000143, SPLEN2000189, SPLEN2000197, SPLEN2000205, SPLEN2000210, SPLEN2000242, SPLEN2000243, SPLEN2000247, SPLEN2000267, SPLEN2000270, SPLEN2000307, SPLEN2000310, SPLEN2000341, SPLEN2000350, SPLEN2000357, SPLEN2000364, SPLEN2000402, SPLEN2000414, SPLEN2000420, SPLEN2000443, SPLEN2000448, SPLEN2000450, SPLEN2000464, SPLEN2000496, SPLEN2000515, SPLEN2000516, SPLEN2000537, SPLEN2000541, SPLEN2000607, SPLEN2000630, SPLEN2000695, SPLEN2000698, SPLEN2000839, SPLEN2000882, SPLEN2001135, SPLEN2001141, SPLEN2001176, SPLEN2001227, SPLEN2001278, SPLEN2001354, SPLEN2001367, SPLEN2001383, SPLEN2001476, SPLEN2001503, SPLEN2001510, SPLEN2001599, SPLEN2001626, SPLEN2001650, SPLEN2001689, SPLEN2001710, SPLEN2001781, SPLEN2001881, SPLEN2001912, SPLEN2001945, SPLEN2002007, SPLEN2002053, SPLEN2002133, SPLEN2002147, SPLEN2002166, SPLEN2002175, SPLEN2002223, SPLEN2002272, SPLEN2002314, SPLEN2002335, SPLEN2002343, SPLEN2002354, SPLEN2002385, SPLEN2002419, SPLEN2002451, SPLEN2002462, SPLEN2002463, SPLEN2002477, SPLEN2002493, SPLEN2002662, SPLEN2002695, SPLEN2002707, SPLEN2002917, SPLEN2002931, SPLEN2002957, SPLEN2003160, SPLEN2003204, SPLEN2003219, SPLEN2003297, SPLEN2003396, SPLEN2003678, SPLEN2003878, SPLEN2003918, SPLEN2003924, SPLEN2004060, SPLEN2004078, SPLEN2004124, SPLEN2004148, SPLEN2004343, SPLEN2004346, SPLEN2004368, SPLEN2004555, SPLEN2004611, SPLEN2004662, SPLEN2004773, SPLEN2004844, SPLEN2005009, SPLEN2005227, SPLEN2005272, SPLEN2005342, SPLEN2005416, SPLEN2005450, SPLEN2005474, SPLEN2005727, SPLEN2005783, SPLEN2005790, SPLEN2005818, SPLEN2005838, SPLEN2005869, SPLEN2005927, SPLEN2005939, SPLEN2006122, SPLEN2006133, SPLEN2006232, SPLEN2006268, SPLEN2006283, SPLEN2006325, SPLEN2006389, SPLEN2006425, SPLEN2006671, SPLEN2006701, SPLEN2006785, SPLEN2006875, SPLEN2007182, SPLEN2007276, SPLEN2007314, SPLEN2007326, SPLEN2007350, SPLEN2007388, SPLEN2007619, SPLEN2007653, SPLEN2007689, SPLEN2007695, SPLEN2007739, SPLEN2007750, SPLEN2007794, SPLEN2007879, SPLEN2007926, SPLEN2007951, SPLEN2008007, SPLEN2008135, SPLEN2008164, SPLEN2008317, SPLEN2008496, SPLEN2008591, SPLEN2008786, SPLEN2009081, SPLEN2009088, SPLEN2009163, SPLEN2009315, SPLEN2009340, SPLEN2009512, SPLEN2009513, SPLEN2009541, SPLEN2009548, SPLEN2009555, SPLEN2009581, SPLEN2009733, SPLEN2009803, SPLEN2009884, SPLEN2009918, SPLEN2009970, SPLEN2010004, SPLEN2010015, SPLEN2010112, SPLEN2010119, SPLEN2010146, SPLEN2010187, SPLEN2010350, SPLEN2010395, SPLEN2010415, SPLEN2010447, SPLEN2010469, SPLEN2010510, SPLEN2010530, SPLEN2010534, SPLEN2010588, SPLEN2010625, SPLEN2010800, SPLEN2010846, SPLEN2010847, SPLEN2010862, SPLEN2010912, SPLEN2010978, SPLEN2010986, SPLEN2011018, SPLEN2011021, SPLEN2011025, SPLEN2011086, SPLEN2011139, SPLEN2011145, SPLEN2011248, SPLEN2011252, SPLEN2011419, SPLEN2011422, SPLEN2011672, SPLEN2011678, SPLEN2011758, SPLEN2011766, SPLEN2011805, SPLEN2011820, SPLEN2011830, SPLEN2011931, SPLEN2011981, SPLEN2012115, SPLEN2012175, SPLEN2012179, SPLEN2012185, SPLEN2012234, SPLEN2012453, SPLEN2012524, SPLEN2012525, SPLEN2012571, SPLEN2012606, SPLEN2012619, SPLEN2012624, SPLEN2012725, SPLEN2012743, SPLEN2012756, SPLEN2012846, SPLEN2012889, SPLEN2012961, SPLEN2013108, SPLEN2013195, SPLEN2013644, SPLEN2013648, SPLEN2013670, SPLEN2013673, SPLEN2013690, SPLEN2013714, SPLEN2013753, SPLEN2013821, SPLEN2013857, SPLEN2013860, SPLEN2013910, SPLEN2013923, SPLEN2014041, SPLEN2014063, SPLEN2014073, SPLEN2014080, SPLEN2014119, SPLEN2014136, SPLEN2014199, SPLEN2014210, SPLEN2014293, SPLEN2014318, SPLEN2014381, SPLEN2014452, SPLEN2014454, SPLEN2014486, SPLEN2014543, SPLEN2014572, SPLEN2014645, SPLEN2014669, SPLEN2014739, SPLEN2014860, SPLEN2014865, SPLEN2014919, SPLEN2014920, SPLEN2014924, SPLEN2014937, SPLEN2014946, SPLEN2015031, SPLEN2015094, SPLEN2015121, SPLEN2015129, SPLEN2015158, SPLEN2015166, SPLEN2015216, SPLEN2015258, SPLEN2015261, SPLEN2015267, SPLEN2015276, SPLEN2015415, SPLEN2015433, SPLEN2015593, SPLEN2015674, SPLEN2015679, SPLEN2015707, SPLEN2015746, SPLEN2015788, SPLEN2015815, SPLEN2015890, SPLEN2015891, SPLEN2015899, SPLEN2016045, SPLEN2016053, SPLEN2016069, SPLEN2016098, SPLEN2016135, SPLEN2016139, SPLEN2016241, SPLEN2016250, SPLEN2016268, SPLEN2016304, SPLEN2016356, SPLEN2016421, SPLEN2016480, SPLEN2016531, SPLEN2016533, SPLEN2016541, SPLEN2016552, SPLEN2016554, SPLEN2016602, SPLEN2016627, SPLEN2016678, SPLEN2016773, SPLEN2016781, SPLEN2016840, SPLEN2016863, SPLEN2016922, SPLEN2016932, SPLEN2016973, SPLEN2017043, SPLEN2017104, SPLEN2017121, SPLEN2017147, SPLEN2017187, SPLEN2017189, SPLEN2017212, SPLEN2017318, SPLEN2017426, SPLEN2017452, SPLEN2017538, SPLEN2017592, SPLEN2017613, SPLEN2017643, SPLEN2017687, SPLEN2017740, SPLEN2017781, SPLEN2017999, SPLEN2018098, SPLEN2018112, SPLEN2018157, SPLEN2018159, SPLEN2018180, SPLEN2018181, SPLEN2018280, SPLEN2018285, SPLEN2018299, SPLEN2018302, SPLEN2018364, SPLEN2018395, SPLEN2018643, SPLEN2018683, SPLEN2018732, SPLEN2018749, SPLEN2018933, SPLEN2019008, SPLEN2019043, SPLEN2019077, SPLEN2019092, SPLEN2019102, SPLEN2019131, SPLEN2019169, SPLEN2019257, SPLEN2019311, SPLEN2019323, SPLEN2019349, SPLEN2019375, SPLEN2019379, SPLEN2019405, SPLEN2019446, SPLEN2019471, SPLEN2019480, SPLEN2019505, SPLEN2019571, SPLEN2019575, SPLEN2019709, SPLEN2019774, SPLEN2019793, SPLEN2019811, SPLEN2019839, SPLEN2019956, SPLEN2019985, SPLEN2020007, SPLEN2020034, SPLEN2020153, SPLEN2020154, SPLEN2020166, SPLEN2020183, SPLEN2020223, SPLEN2020359, SPLEN2020417, SPLEN2020427, SPLEN2020467, SPLEN2020512, SPLEN2020608, SPLEN2020777, SPLEN2020805, SPLEN2021057, SPLEN2021122, SPLEN2021157, SPLEN2021231, SPLEN2021273, SPLEN2021295, SPLEN2021298, SPLEN2021383, SPLEN2021417, SPLEN2021440, SPLEN2021458, SPLEN2021463, SPLEN2021560, SPLEN2021701, SPLEN2021795, SPLEN2021983, SPLEN2021991, SPLEN2022040, SPLEN2022162, SPLEN2022227, SPLEN2022522, SPLEN2022591, SPLEN2022785, SPLEN2022920, SPLEN2023024, SPLEN2023118, SPLEN2023160, SPLEN2023423, SPLEN2023710, SPLEN2023733, SPLEN2023791, SPLEN2023977, SPLEN2024070, SPLEN2024127, SPLEN2024232, SPLEN2024273, SPLEN2024383, SPLEN2024489, SPLEN2024530, SPLEN2024571, SPLEN2024577, SPLEN2024617, SPLEN2024737, SPLEN2024922, SPLEN2024956, SPLEN2024990, SPLEN2025012, SPLEN2025017, SPLEN2025039, SPLEN2025219, SPLEN2025491, SPLEN2025626, SPLEN2025820, SPLEN2026144, SPLEN2026411, SPLEN2026765, SPLEN2027113, SPLEN2027157, SPLEN2027395, SPLEN2027488, SPLEN2027780, SPLEN2027852, SPLEN2027868, SPLEN2027995, SPLEN2028046, SPLEN2028066, SPLEN2028138, SPLEN2028365, SPLEN2028417, SPLEN2028424, SPLEN2028593, SPLEN2028844, SPLEN2028994, SPLEN2029051, SPLEN2029176, SPLEN2029295, SPLEN2029380, SPLEN2029522, SPLEN2029683, SPLEN2029727, SPLEN2029904, SPLEN2030250, SPLEN2030335, SPLEN2030371, SPLEN2030397, SPLEN2030479, SPLEN2030495, SPLEN2030562, SPLEN2030763, SPLEN2030847, SPLEN2031004, SPLEN2031125, SPLEN2031424, SPLEN2031674, SPLEN2031724, SPLEN2031780, SPLEN2032036, SPLEN2032112, SPLEN2032154, SPLEN2032157, SPLEN2032321, SPLEN2032356, SPLEN2032677, SPLEN2032813, SPLEN2032924, SPLEN2033098, SPLEN2033153, SPLEN2033333, SPLEN2033490, SPLEN2033539, SPLEN2033921, SPLEN2033996, SPLEN2034021, SPLEN2034081, SPLEN2034252, SPLEN2034448, SPLEN2034551, SPLEN2034601, SPLEN2034678, SPLEN2034781, SPLEN2034864, SPLEN2034934, SPLEN2035318, SPLEN2035615, SPLEN2036076, SPLEN2036103, SPLEN2036326, SPLEN2036475, SPLEN2036501, SPLEN2036579, SPLEN2036608, SPLEN2036702, SPLEN2036712, SPLEN2036821, SPLEN2036932, SPLEN2036953, SPLEN2037077, SPLEN2037194, SPLEN2037319, SPLEN2037444, SPLEN2037580, SPLEN2037630, SPLEN2037678, SPLEN2037891, SPLEN2038055, SPLEN2038180, SPLEN2038345, SPLEN2038407, SPLEN2038834, SPLEN2039311, SPLEN2039379, SPLEN2039672, SPLEN2039697, SPLEN2039845, SPLEN2039936, SPLEN2040222, SPLEN2040237, SPLEN2040824, SPLEN2041304, SPLEN2041310, SPLEN2041585, SPLEN2041645, SPLEN2041700, SPLEN2041720, SPLEN2041977, SPLEN2042051, SPLEN2042303, SPLEN2042521, SPLEN2042535, SPLEN2042598, SPLEN2042714, STOMA1000013, STOMA1000052, STOMA1000074, STOMA1000091, STOMA1000117, STOMA1000133, STOMA1000175, STOMA1000186, STOMA1000190, STOMA1000191, STOMA2000032, STOMA2000072, STOMA2000088, STOMA2000104, STOMA2000121, STOMA2000148, STOMA2000168, STOMA2000183, STOMA2000188, STOMA2000279, STOMA2000289, STOMA2000383, STOMA2000386, STOMA2000395, STOMA2000396, STOMA2000478, STOMA2000482, STOMA2000539, STOMA2000567, STOMA2000640, STOMA2000678, STOMA2000686, STOMA2000888, STOMA2001025, STOMA2002052, STOMA2002141, STOMA2002367, STOMA2002688, STOMA2002828, STOMA2003158, STOMA2003289, STOMA2003444, STOMA2003477, STOMA2003646, STOMA2003716, STOMA2003781, STOMA2003894, STOMA2004194, STOMA2004294, STOMA2004663, STOMA2004668, STOMA2004852, STOMA2004873, STOMA2004884, STOMA2004893, STOMA2004925, STOMA2005120, STOMA2005664, STOMA2005667, STOMA2005746, STOMA2005782, STOMA2006181, STOMA2006213, STOMA2006229, STOMA2006325, STOMA2006330, STOMA2006398, STOMA2006447, STOMA2006780, STOMA2006904, STOMA2007269, STOMA2007680, STOMA2007745, STOMA2008050, STOMA2008361, STOMA2008546, STOMA2008614, STOMA2008638, STOMA2008838, STOMA2009250, STOMA2009253, STOMA2009256, STOMA2009289, SYNOV1000049, SYNOV1000118, SYNOV1000128, SYNOV1000164, SYNOV1000190, SYNOV1000256, SYNOV1000374, SYNOV2000152, SYNOV2000171, SYNOV2000173, SYNOV2000177, SYNOV2000178, SYNOV2000193, SYNOV2000251, SYNOV2000279, SYNOV2000291, SYNOV2000297, SYNOV2000397, SYNOV2000426, SYNOV2000601, SYNOV2000700, SYNOV2000820, SYNOV2000824, SYNOV2000923, SYNOV2001014, SYNOV2001033, SYNOV2001035, SYNOV2001088, SYNOV2001111, SYNOV2001212, SYNOV2001251, SYNOV2001262, SYNOV2001300, SYNOV2001356, SYNOV2001390, SYNOV2001451, SYNOV2001457, SYNOV2001468, SYNOV2001581, SYNOV2001648, SYNOV2001660, SYNOV2003326, SYNOV2005216, SYNOV2005448, SYNOV2005541, SYNOV2005673, SYNOV2005817, SYNOV2005962, SYNOV2006430, SYNOV2006620, SYNOV2007758, SYNOV2007965, SYNOV2008765, SYNOV2011233, SYNOV2012326, SYNOV2013365, SYNOV2013637, SYNOV2014157, SYNOV2014364, SYNOV2016124, SYNOV2016837, SYNOV2017055, SYNOV2017179, SYNOV2018921, SYNOV2019280, SYNOV2020085, SYNOV2020463, SYNOV2021320, SYNOV2021953, SYNOV3000184, SYNOV3000231, SYNOV3000302, SYNOV3000345, SYNOV4000249, SYNOV4000472, SYNOV4000598, SYNOV4000706, SYNOV4001224, SYNOV4001326, SYNOV4001342, SYNOV4001395, SYNOV4002001, SYNOV4002392, SYNOV4002875, SYNOV4002883, SYNOV4003174, SYNOV4003322, SYNOV4003681, SYNOV4003981, SYNOV4004184, SYNOV4004741, SYNOV4004823, SYNOV4004914, SYNOV4005256, SYNOV4005570, SYNOV4005739, SYNOV4005889, SYNOV4005981, SYNOV4005989, SYNOV4006256, SYNOV4006327, SYNOV4006542, SYNOV4007012, SYNOV4007215, SYNOV4007360, SYNOV4007430, SYNOV4007521, SYNOV4007553, SYNOV4007711, SYNOV4008245, SYNOV4008336, SYNOV4009129, SYNOV4009139, SYNOV4009298, SYNOV4009575, T1ESE2000116, T1ESE2000609, T1ESE2000904, T1ESE2002665, TBAES2000004, TBAES2000116, TBAES2000255, TBAES2000315, TBAES2000352, TBAES2000932, TBAES2001171, TBAES2001220, TBAES2001229, TBAES2001296, TBAES2001492, TBAES2001553, TBAES2001751, TBAES2003435, TBAES2003492, TBAES2003550, TBAES2003702, TBAES2003917, TBAES2004055, TBAES2004105, TBAES2004939, TBAES2005157, TBAES2005361, TBAES2005543, TBAES2006568, TBAES2006881, TBAES2007379, TBAES2007481, TBAES2007504, TBAES2007548, TBAES2007697, TBAES2007862, TBAES2007964, TBAES2008133, TCERX2000171, TCERX2000613, TCERX2000998, TCERX2002644, TCOLN1000037, TCOLN1000180, TCOLN2000139, TCOLN2000236, TCOLN2000641, TCOLN2001268, TCOLN2002047, TCOLN2002278, TESOP1000035, TESOP1000160, TESOP2000083, TESOP2000090, TESOP2000205, TESOP2000312, TESOP2000390, TESOP2000400, TESOP2000510, TESOP2000527, TESOP2000569, TESOP2000739, TESOP2000801, TESOP2001122, TESOP2001166, TESOP2001345, TESOP2001474, TESOP2001796, TESOP2001818, TESOP2001849, TESOP2001865, TESOP2001901, TESOP2001953, TESOP2002005, TESOP2002110, TESOP2002150, TESOP2002273, TESOP2002451, TESOP2002489, TESOP2002539, TESOP2002545, TESOP2002804, TESOP2002950, TESOP2003273, TESOP2003308, TESOP2003553, TESOP2003753, TESOP2004110, TESOP2004114, TESOP2004173, TESOP2004214, TESOP2005199, TESOP2005285, TESOP2005485, TESOP2005498, TESOP2005579, TESOP2006041, TESOP2006053, TESOP2006060, TESOP2006068, TESOP2006110, TESOP2006398, TESOP2006670, TESOP2006704, TESOP2006746, TESOP2006865, TESOP2006893, TESOP2007041, TESOP2007052, TESOP2007262, TESOP2007384, TESOP2007636, TESOP2007674, TESOP2007688, TESOP2007725, TESOP2007912, TESOP2007978, TESOP2008127, TESOP2008552, TESOP2008556, TESOP2008563, TESOP2008820, TESOP2009121, TESOP2009201, TESOP2009247, TESOP2009555, TESTI1000018, TESTI1000019, TESTI1000025, TESTI1000029, TESTI1000030, TESTI1000042, TESTI1000045, TESTI1000051, TESTI1000055, TESTI1000064, TESTI1000085, TESTI1000088, TESTI1000093, TESTI1000094, TESTI1000096, TESTI1000101, TESTI1000109, TESTI1000125, TESTI1000127, TESTI1000128, TESTI1000131, TESTI1000138, TESTI1000142, TESTI1000157, TESTI1000163, TESTI1000169, TESTI1000179, TESTI1000183, TESTI1000191, TESTI1000257, TESTI1000266, TESTI1000319, TESTI1000330, TESTI1000348, TESTI1000390, TESTI1000391, TESTI1000459, TESTI1000491, TESTI1000545, TESTI2000006, TESTI2000018, TESTI2000044, TESTI2000100, TESTI2000117, TESTI2000120, TESTI2000147, TESTI2000154, TESTI2000172, TESTI2000177, TESTI2000179, TESTI2000184, TESTI2000207, TESTI2000208, TESTI2000221, TESTI2000238, TESTI2000253, TESTI2000272, TESTI2000278, TESTI2000349, TESTI2000356, TESTI2000358, TESTI2000372, TESTI2000427, TESTI2000431, TESTI2000435, TESTI2000443, TESTI2000452, TESTI2000462, TESTI2000489, TESTI2000520, TESTI2000571, TESTI2000591, TESTI2000598, TESTI2000600, TESTI2000616, TESTI2000627, TESTI2000644, TESTI2000671, TESTI2000683, TESTI2000689, TESTI2000695, TESTI2000699, TESTI2000707, TESTI2000745, TESTI2000756, TESTI2000762, TESTI2000784, TESTI2000808, TESTI2000819, TESTI2000830, TESTI2000840, TESTI2000849, TESTI2000850, TESTI2000874, TESTI2000883, TESTI2000909, TESTI2000951, TESTI2000970, TESTI2000981, TESTI2001008, TESTI2001049, TESTI2001082, TESTI2001134, TESTI2001141, TESTI2001180, TESTI2001208, TESTI2001229, TESTI2001236, TESTI2001237, TESTI2001306, TESTI2001313, TESTI2001330, TESTI2001339, TESTI2001345, TESTI2001352, TESTI2001364, TESTI2001412, TESTI2001420, TESTI2001498, TESTI2001511, TESTI2001512, TESTI2001518, TESTI2001556, TESTI2001593, TESTI2001613, TESTI2001621, TESTI2001661, TESTI2001665, TESTI2001671, TESTI2001697, TESTI2001725, TESTI2001758, TESTI2001766, TESTI2001792, TESTI2001793, TESTI2001795, TESTI2001812, TESTI2001815, TESTI2001823, TESTI2001826, TESTI2001827, TESTI2001852, TESTI2001862, TESTI2001869, TESTI2001879, TESTI2001894, TESTI2001898, TESTI2001915, TESTI2001950, TESTI2001959, TESTI2001968, TESTI2001985, TESTI2001991, TESTI2002002, TESTI2002012, TESTI2002036, TESTI2002048, TESTI2002057, TESTI2002081, TESTI2002090, TESTI2002105, TESTI2002149, TESTI2002216, TESTI2002223, TESTI2002245, TESTI2002251, TESTI2002256, TESTI2002264, TESTI2002282, TESTI2002293, TESTI2002294, TESTI2002326, TESTI2002351, TESTI2002361, TESTI2002365, TESTI2002369, TESTI2002406, TESTI2002415, TESTI2002423, TESTI2002453, TESTI2002461, TESTI2002465, TESTI2002467, TESTI2002498, TESTI2002516, TESTI2002544, TESTI2002578, TESTI2002580, TESTI2002618, TESTI2002676, TESTI2002690, TESTI2002696, TESTI2002698, TESTI2002700, TESTI2002724, TESTI2002729, TESTI2002752, TESTI2002753, TESTI2002789, TESTI2002802, TESTI2002806, TESTI2002840, TESTI2002877, TESTI2002910, TESTI2002912, TESTI2002928, TESTI2002937, TESTI2002965, TESTI2002993, TESTI2003005, TESTI2003020, TESTI2003031, TESTI2003037, TESTI2003044, TESTI2003059, TESTI2003061, TESTI2003071, TESTI2003074, TESTI2003089, TESTI2003104, TESTI2003109, TESTI2003117, TESTI2003127, TESTI2003130, TESTI2003131, TESTI2003139, TESTI2003141, TESTI2003152, TESTI2003181, TESTI2003193, TESTI2003196, TESTI2003228, TESTI2003236, TESTI2003255, TESTI2003258, TESTI2003277, TESTI2003299, TESTI2003311, TESTI2003321, TESTI2003327, TESTI2003330, TESTI2003347, TESTI2003354, TESTI2003356, TESTI2003372, TESTI2003376, TESTI2003413, TESTI2003418, TESTI2003419, TESTI2003432, TESTI2003454, TESTI2003475, TESTI2003476, TESTI2003498, TESTI2003512, TESTI2003539, TESTI2003541, TESTI2003545, TESTI2003551, TESTI2003574, TESTI2003579, TESTI2003580, TESTI2003589, TESTI2003596, TESTI2003598, TESTI2003615, TESTI2003638, TESTI2003649, TESTI2003692, TESTI2003718, TESTI2003727, TESTI2003756, TESTI2003768, TESTI2003781, TESTI2003787, TESTI2003824, TESTI2003827, TESTI2003894, TESTI2003911, TESTI2003914, TESTI2003940, TESTI2003962, TESTI2003998, TESTI2004000, TESTI2004073, TESTI2004080, TESTI2004085, TESTI2004089, TESTI2004111, TESTI2004119, TESTI2004122, TESTI2004153, TESTI2004163, TESTI2004169, TESTI2004207, TESTI2004215, TESTI2004227, TESTI2004229, TESTI2004243, TESTI2004255, TESTI2004287, TESTI2004295, TESTI2004313, TESTI2004318, TESTI2004322, TESTI2004391, TESTI2004399, TESTI2004423, TESTI2004432, TESTI2004452, TESTI2004459, TESTI2004490, TESTI2004539, TESTI2004552, TESTI2004560, TESTI2004574, TESTI2004601, TESTI2004611, TESTI2004649, TESTI2004654, TESTI2004675, TESTI2004687, TESTI2004689, TESTI2004700, TESTI2004706, TESTI2004734, TESTI2004783, TESTI2004791, TESTI2004793, TESTI2004860, TESTI2004906, TESTI2004920, TESTI2004929, TESTI2004936, TESTI2004941, TESTI2004971, TESTI2004982, TESTI2004993, TESTI2004994, TESTI2004999, TESTI2005025, TESTI2005040, TESTI2005060, TESTI2005072, TESTI2005085, TESTI2005120, TESTI2005153, TESTI2005155, TESTI2005267, TESTI2005268, TESTI2005280, TESTI2005307, TESTI2005326, TESTI2005363, TESTI2005376, TESTI2005378, TESTI2005380, TESTI2005391, TESTI2005395, TESTI2005396, TESTI2005415, TESTI2005470, TESTI2005492, TESTI2005564, TESTI2005568, TESTI2005584, TESTI2005588, TESTI2005590, TESTI2005603, TESTI2005609, TESTI2005610, TESTI2005630, TESTI2005672, TESTI2005683, TESTI2005690, TESTI2005692, TESTI2005703, TESTI2005720, TESTI2005731, TESTI2005739, TESTI2005742, TESTI2005759, TESTI2005767, TESTI2005775, TESTI2005784, TESTI2005827, TESTI2005835, TESTI2005860, TESTI2005892, TESTI2005911, TESTI2005933, TESTI2005937, TESTI2005948, TESTI2005979, TESTI2005981, TESTI2005982, TESTI2005984, TESTI2005986, TESTI2005987, TESTI2006007, TESTI2006008, TESTI2006015, TESTI2006016, TESTI2006035, TESTI2006040, TESTI2006041, TESTI2006045, TESTI2006051, TESTI2006067, TESTI2006083, TESTI2006109, TESTI2006111, TESTI2006125, TESTI2006179, TESTI2006209, TESTI2006210, TESTI2006212, TESTI2006218, TESTI2006238, TESTI2006255, TESTI2006258, TESTI2006278, TESTI2006333, TESTI2006341, TESTI2006360, TESTI2006383, TESTI2006409, TESTI2006425, TESTI2006437, TESTI2006457, TESTI2006460, TESTI2006465, TESTI2006483, TESTI2006499, TESTI2006523, TESTI2006543, TESTI2006565, TESTI2006572, TESTI2006615, TESTI2006617, TESTI2006624, TESTI2006628, TESTI2006633, TESTI2006643, TESTI2006648, TESTI2006659, TESTI2006660, TESTI2006665, TESTI2006667, TESTI2006677, TESTI2006720, TESTI2006735, TESTI2006744, TESTI2006774, TESTI2006853, TESTI2006866, TESTI2006872, TESTI2006877, TESTI2006879, TESTI2006894, TESTI2006940, TESTI2006955, TESTI2006978, TESTI2006979, TESTI2006990, TESTI2007040, TESTI2007074, TESTI2007078, TESTI2007113, TESTI2007152, TESTI2007163, TESTI2007183, TESTI2007211, TESTI2007220, TESTI2007234, TESTI2007320, TESTI2007346, TESTI2007358, TESTI2007402, TESTI2007405, TESTI2007407, TESTI2007422, TESTI2007452, TESTI2007464, TESTI2007466, TESTI2007480, TESTI2007490, TESTI2007502, TESTI2007524, TESTI2007533, TESTI2007576, TESTI2007613, TESTI2007657, TESTI2007685, TESTI2007692, TESTI2007749, TESTI2007750, TESTI2007808, TESTI2007814, TESTI2007829, TESTI2007864, TESTI2007867, TESTI2007872, TESTI2007906, TESTI2007922, TESTI2007951, TESTI2007972, TESTI2007973, TESTI2008014, TESTI2008020, TESTI2008032, TESTI2008033, TESTI2008046, TESTI2008081, TESTI2008099, TESTI2008139, TESTI2008144, TESTI2008161, TESTI2008189, TESTI2008204, TESTI2008219, TESTI2008234, TESTI2008237, TESTI2008278, TESTI2008320, TESTI2008331, TESTI2008343, TESTI2008387, TESTI2008389, TESTI2008394, TESTI2008405, TESTI2008420, TESTI2008425, TESTI2008440, TESTI2008567, TESTI2008595, TESTI2008621, TESTI2008636, TESTI2008657, TESTI2008684, TESTI2008699, TESTI2008715, TESTI2008762, TESTI2008774, TESTI2008786, TESTI2008822, TESTI2008835, TESTI2008847, TESTI2008884, TESTI2008901, TESTI2008929, TESTI2008946, TESTI2008960, TESTI2009018, TESTI2009091, TESTI2009097, TESTI2009136, TESTI2009185, TESTI2009190, TESTI2009217, TESTI2009239, TESTI2009325, TESTI2009388, TESTI2009390, TESTI2009400, TESTI2009402, TESTI2009412, TESTI2009447, TESTI2009462, TESTI2009474, TESTI2009477, TESTI2009497, TESTI2009502, TESTI2009511, TESTI2009544, TESTI2009545, TESTI2009551, TESTI2009585, TESTI2009588, TESTI2009683, TESTI2009727, TESTI2009739, TESTI2009812, TESTI2009835, TESTI2009853, TESTI2009935, TESTI2009987, TESTI2010009, TESTI2010154, TESTI2010180, TESTI2010239, TESTI2010280, TESTI2010354, TESTI2010396, TESTI2010400, TESTI2010409, TESTI2010513, TESTI2010572, TESTI2010587, TESTI2010591, TESTI2010617, TESTI2010682, TESTI2010724, TESTI2010732, TESTI2010734, TESTI2010755, TESTI2010793, TESTI2010806, TESTI2010833, TESTI2010872, TESTI2011009, TESTI2011020, TESTI2011028, TESTI2011033, TESTI2011254, TESTI2011286, TESTI2011294, TESTI2011314, TESTI2011315, TESTI2011394, TESTI2011407, TESTI2011448, TESTI2011480, TESTI2011549, TESTI2011575, TESTI2011612, TESTI2011665, TESTI2011680, TESTI2011683, TESTI2011712, TESTI2011750, TESTI2011840, TESTI2011846, TESTI2011915, TESTI2011928, TESTI2011971, TESTI2012019, TESTI2012050, TESTI2012090, TESTI2012095, TESTI2012104, TESTI2012152, TESTI2012155, TESTI2012171, TESTI2012207, TESTI2012231, TESTI2012244, TESTI2012308, TESTI2012356, TESTI2012387, TESTI2012394, TESTI2012444, TESTI2012511, TESTI2012528, TESTI2012544, TESTI2012550, TESTI2012571, TESTI2012592, TESTI2012617, TESTI2012628, TESTI2012812, TESTI2012834, TESTI2012835, TESTI2012861, TESTI2012900, TESTI2012915, TESTI2012922, TESTI2013001, TESTI2013012, TESTI2013053, TESTI2013144, TESTI2013163, TESTI2013169, TESTI2013212, TESTI2013231, TESTI2013257, TESTI2013264, TESTI2013268, TESTI2013295, TESTI2013322, TESTI2013381, TESTI2013382, TESTI2013401, TESTI2013427, TESTI2013468, TESTI2013497, TESTI2013545, TESTI2013546, TESTI2013566, TESTI2013601, TESTI2013604, TESTI2013607, TESTI2013610, TESTI2013691, TESTI2013699, TESTI2013737, TESTI2013767, TESTI2013832, TESTI2013873, TESTI2013889, TESTI2014007, TESTI2014036, TESTI2014097, TESTI2014160, TESTI2014248, TESTI2014254, TESTI2014269, TESTI2014274, TESTI2014318, TESTI2014324, TESTI2014339, TESTI2014362, TESTI2014385, TESTI2014415, TESTI2014439, TESTI2014474, TESTI2014505, TESTI2014577, TESTI2014578, TESTI2014716, TESTI2014780, TESTI2014800, TESTI2014838, TESTI2014843, TESTI2014979, TESTI2014988, TESTI2015042, TESTI2015092, TESTI2015105, TESTI2015180, TESTI2015246, TESTI2015249, TESTI2015327, TESTI2015331, TESTI2015335, TESTI2015350, TESTI2015375, TESTI2015437, TESTI2015590, TESTI2015610, TESTI2015647, TESTI2015675, TESTI2015710, TESTI2015752, TESTI2015830, TESTI2015914, TESTI2015938, TESTI2015947, TESTI2015962, TESTI2015987, TESTI2016033, TESTI2016046, TESTI2016101, TESTI2016162, TESTI2016197, TESTI2016278, TESTI2016298, TESTI2016331, TESTI2016337, TESTI2016410, TESTI2016421, TESTI2016509, TESTI2016568, TESTI2016583, TESTI2016599, TESTI2016629, TESTI2016663, TESTI2016667, TESTI2016688, TESTI2016701, TESTI2016758, TESTI2016848, TESTI2016863, TESTI2016888, TESTI2016896, TESTI2016922, TESTI2016942, TESTI2016950, TESTI2016996, TESTI2017017, TESTI2017028, TESTI2017035, TESTI2017069, TESTI2017089, TESTI2017102, TESTI2017107, TESTI2017113, TESTI2017125, TESTI2017256, TESTI2017305, TESTI2017311, TESTI2017396, TESTI2017507, TESTI2017537, TESTI2017582, TESTI2017584, TESTI2017645, TESTI2017727, TESTI2017740, TESTI2017775, TESTI2017816, TESTI2017832, TESTI2017923, TESTI2017932, TESTI2017951, TESTI2018014, TESTI2018031, TESTI2018035, TESTI2018060, TESTI2018083, TESTI2018178, TESTI2018221, TESTI2018276, TESTI2018290, TESTI2018335, TESTI2018337, TESTI2018368, TESTI2018421, TESTI2018428, TESTI2018475, TESTI2018482, TESTI2018521, TESTI2018565, TESTI2018581, TESTI2018687, TESTI2018697, TESTI2018838, TESTI2018867, TESTI2018941, TESTI2018957, TESTI2018974, TESTI2018975, TESTI2018997, TESTI2019042, TESTI2019077, TESTI2019228, TESTI2019257, TESTI2019280, TESTI2019282, TESTI2019308, TESTI2019336, TESTI2019352, TESTI2019406, TESTI2019430, TESTI2019455, TESTI2019481, TESTI2019488, TESTI2019501, TESTI2019648, TESTI2019669, TESTI2019697, TESTI2019729, TESTI2019760, TESTI2019787, TESTI2019794, TESTI2019854, TESTI2019859, TESTI2019860, TESTI2019872, TESTI2019911, TESTI2019917, TESTI2019975, TESTI2019998, TESTI2020012, TESTI2020026, TESTI2020029, TESTI2020071, TESTI2020084, TESTI2020265, TESTI2020283, TESTI2020316, TESTI2020344, TESTI2020379, TESTI2020426, TESTI2020445, TESTI2020510, TESTI2020515, TESTI2020525, TESTI2020579, TESTI2020717, TESTI2020840, TESTI2020871, TESTI2020905, TESTI2020906, TESTI2020946, TESTI2020956, TESTI2020981, TESTI2020999, TESTI2021003, TESTI2021038, TESTI2021057, TESTI2021077, TESTI2021112, TESTI2021114, TESTI2021116, TESTI2021118, TESTI2021122, TESTI2021124, TESTI2021138, TESTI2021297, TESTI2021315, TESTI2021358, TESTI2021425, TESTI2021447, TESTI2021463, TESTI2021531, TESTI2021599, TESTI2021637, TESTI2021654, TESTI2021667, TESTI2021736, TESTI2021785, TESTI2021819, TESTI2021851, TESTI2021895, TESTI2021911, TESTI2021939, TESTI2021999, TESTI2022010, TESTI2022023, TESTI2022065, TESTI2022086, TESTI2022179, TESTI2022203, TESTI2022246, TESTI2022323, TESTI2022338, TESTI2022400, TESTI2022462, TESTI2022495, TESTI2022623, TESTI2022649, TESTI2022652, TESTI2022738, TESTI2022798, TESTI2022812, TESTI2022814, TESTI2022874, TESTI2022940, TESTI2022952, TESTI2023025, TESTI2023033, TESTI2023053, TESTI2023085, TESTI2023192, TESTI2023194, TESTI2023214, TESTI2023254, TESTI2023386, TESTI2023414, TESTI2023427, TESTI2023436, TESTI2023599, TESTI2023752, TESTI2023800, TESTI2023861, TESTI2023903, TESTI2023942, TESTI2023947, TESTI2023951, TESTI2023968, TESTI2024009, TESTI2024090, TESTI2024125, TESTI2024153, TESTI2024192, TESTI2024267, TESTI2024283, TESTI2024299, TESTI2024419, TESTI2024422, TESTI2024443, TESTI2024446, TESTI2024473, TESTI2024476, TESTI2024498, TESTI2024560, TESTI2024567, TESTI2024586, TESTI2024598, TESTI2024641, TESTI2024648, TESTI2024718, TESTI2024744, TESTI2024864, TESTI2024885, TESTI2024936, TESTI2024978, TESTI2024999, TESTI2025006, TESTI2025013, TESTI2025022, TESTI2025063, TESTI2025117, TESTI2025144, TESTI2025161, TESTI2025174, TESTI2025229, TESTI2025269, TESTI2025365, TESTI2025403, TESTI2025409, TESTI2025422, TESTI2025448, TESTI2025454, TESTI2025486, TESTI2025546, TESTI2025582, TESTI2025609, TESTI2025656, TESTI2025757, TESTI2025791, TESTI2025846, TESTI2025872, TESTI2025879, TESTI2025911, TESTI2025920, TESTI2025924, TESTI2026014, TESTI2026024, TESTI2026064, TESTI2026077, TESTI2026104, TESTI2026116, TESTI2026134, TESTI2026168, TESTI2026196, TESTI2026218, TESTI2026233, TESTI2026291, TESTI2026294, TESTI2026401, TESTI2026403, TESTI2026453, TESTI2026461, TESTI2026491, TESTI2026505, TESTI2026515, TESTI2026525, TESTI2026534, TESTI2026537, TESTI2026589, TESTI2026597, TESTI2026605, TESTI2026647, TESTI2026674, TESTI2026794, TESTI2026824, TESTI2026854, TESTI2026925, TESTI2026936, TESTI2026957, TESTI2027013, TESTI2027019, TESTI2027108, TESTI2027165, TESTI2027171, TESTI2027173, TESTI2027179, TESTI2027185, TESTI2027206, TESTI2027238, TESTI2027239, TESTI2027243, TESTI2027296, TESTI2027378, TESTI2027411, TESTI2027450, TESTI2027496, TESTI2027503, TESTI2027562, TESTI2027615, TESTI2027645, TESTI2027730, TESTI2027736, TESTI2027791, TESTI2027820, TESTI2027828, TESTI2027840, TESTI2027909, TESTI2028098, TESTI2028151, TESTI2028242, TESTI2028253, TESTI2028254, TESTI2028269, TESTI2028290, TESTI2028296, TESTI2028384, TESTI2028426, TESTI2028488, TESTI2028523, TESTI2028583, TESTI2028613, TESTI2028659, TESTI2028662, TESTI2028670, TESTI2028705, TESTI2028776, TESTI2028811, TESTI2028891, TESTI2028985, TESTI2028997, TESTI2029131, TESTI2029162, TESTI2029196, TESTI2029201, TESTI2029227, TESTI2029244, TESTI2029249, TESTI2029252, TESTI2029259, TESTI2029264, TESTI2029470, TESTI2029672, TESTI2029785, TESTI2029880, TESTI2030136, TESTI2030322, TESTI2030336, TESTI2030342, TESTI2030519, TESTI2030554, TESTI2030556, TESTI2030728, TESTI2030754, TESTI2030770, TESTI2030860, TESTI2030901, TESTI2030917, TESTI2030930, TESTI2031006, TESTI2031007, TESTI2031060, TESTI2031129, TESTI2031356, TESTI2031418, TESTI2031504, TESTI2031529, TESTI2031687, TESTI2031760, TESTI2031809, TESTI2031919, TESTI2031935, TESTI2031986, TESTI2032044, TESTI2032067, TESTI2032079, TESTI2032643, TESTI2032681, TESTI2032761, TESTI2032768, TESTI2032774, TESTI2032828, TESTI2033031, TESTI2033242, TESTI2033254, TESTI2033300, TESTI2033395, TESTI2033453, TESTI2033505, TESTI2033520, TESTI2033641, TESTI2033710, TESTI2033905, TESTI2034187, TESTI2034243, TESTI2034249, TESTI2034307, TESTI2034357, TESTI2034401, TESTI2034407, TESTI2034506, TESTI2034520, TESTI2034718, TESTI2034730, TESTI2034749, TESTI2034767, TESTI2034774, TESTI2034777, TESTI2034785, TESTI2034799, TESTI2034847, TESTI2034913, TESTI2034931, TESTI2034953, TESTI2034997, TESTI2035003, TESTI2035078, TESTI2035084, TESTI2035107, TESTI2035121, TESTI2035124, TESTI2035183, TESTI2035236, TESTI2035262, TESTI2035309, TESTI2035688, TESTI2035775, TESTI2035793, TESTI2035898, TESTI2035962, TESTI2035981, TESTI2035997, TESTI2036114, TESTI2036129, TESTI2036285, TESTI2036288, TESTI2036513, TESTI2036589, TESTI2036650, TESTI2036684, TESTI2036691, TESTI2036736, TESTI2036822, TESTI2036833, TESTI2036913, TESTI2036922, TESTI2036951, TESTI2036965, TESTI2036969, TESTI2037002, TESTI2037055, TESTI2037081, TESTI2037085, TESTI2037103, TESTI2037106, TESTI2037111, TESTI2037209, TESTI2037255, TESTI2037359, TESTI2037375, TESTI2037382, TESTI2037534, TESTI2037569, TESTI2037572, TESTI2037643, TESTI2037657, TESTI2037673, TESTI2037723, TESTI2037819, TESTI2037830, TESTI2037845, TESTI2037877, TESTI2037976, TESTI2038048, TESTI2038065, TESTI2038104, TESTI2038275, TESTI2038388, TESTI2038573, TESTI2038596, TESTI2038623, TESTI2038644, TESTI2038733, TESTI2038858, TESTI2038958, TESTI2039025, TESTI2039026, TESTI2039038, TESTI2039041, TESTI2039060, TESTI2039113, TESTI2039121, TESTI2039177, TESTI2039209, TESTI2039225, TESTI2039227, TESTI2039276, TESTI2039342, TESTI2039353, TESTI2039544, TESTI2039613, TESTI2039707, TESTI2039732, TESTI2039738, TESTI2039776, TESTI2039867, TESTI2039908, TESTI2040018, TESTI2040102, TESTI2040128, TESTI2040143, TESTI2040297, TESTI2040372, TESTI2040377, TESTI2040424, TESTI2040642, TESTI2040815, TESTI2040897, TESTI2040944, TESTI2040964, TESTI2040983, TESTI2040989, TESTI2041330, TESTI2041362, TESTI2041517, TESTI2041564, TESTI2041664, TESTI2041730, TESTI2041734, TESTI2041778, TESTI2041800, TESTI2041947, TESTI2041956, TESTI2041976, TESTI2042062, TESTI2042149, TESTI2042264, TESTI2042295, TESTI2042302, TESTI2042326, TESTI2042400, TESTI2042450, TESTI2042473, TESTI2042507, TESTI2042508, TESTI2042750, TESTI2042783, TESTI2042806, TESTI2042928, TESTI2042946, TESTI2042958, TESTI2043275, TESTI2043277, TESTI2043282, TESTI2043313, TESTI2043477, TESTI2043585, TESTI2043758, TESTI2043817, TESTI2043857, TESTI2043866, TESTI2043869, TESTI2044064, TESTI2044118, TESTI2044194, TESTI2044276, TESTI2044306, TESTI2044309, TESTI2044413, TESTI2044418, TESTI2044754, TESTI2044788, TESTI2044796, TESTI2044833, TESTI2044892, TESTI2044920, TESTI2044968, TESTI2045139, TESTI2045155, TESTI2045171, TESTI2045199, TESTI2045353, TESTI2045509, TESTI2045562, TESTI2045611, TESTI2045819, TESTI2045850, TESTI2045920, TESTI2045964, TESTI2045983, TESTI2046100, TESTI2046188, TESTI2046347, TESTI2046352, TESTI2046358, TESTI2046439, TESTI2046535, TESTI2046536, TESTI2046552, TESTI2046569, TESTI2046686, TESTI2046721, TESTI2046732, TESTI2046786, TESTI2046797, TESTI2046863, TESTI2046872, TESTI2047071, TESTI2047141, TESTI2047147, TESTI2047153, TESTI2047212, TESTI2047342, TESTI2047383, TESTI2047605, TESTI2047792, TESTI2047801, TESTI2047818, TESTI2047824, TESTI2047885, TESTI2047930, TESTI2048105, TESTI2048109, TESTI2048465, TESTI2048603, TESTI2048898, TESTI2049041, TESTI2049062, TESTI2049206, TESTI2049246, TESTI2049277, TESTI2049422, TESTI2049452, TESTI2049469, TESTI2049553, TESTI2049576, TESTI2049857, TESTI2049956, TESTI2050137, TESTI2050681, TESTI2050780, TESTI2050987, TESTI2051148, TESTI2051279, TESTI2051488, TESTI2051543, TESTI2051627, TESTI2051742, TESTI2051767, TESTI2051791, TESTI2051806, TESTI2051867, TESTI2051873, TESTI2052110, TESTI2052202, TESTI2052211, TESTI2052256, TESTI2052288, TESTI2052525, TESTI2052670, TESTI2052693, TESTI2052698, TESTI2052799, TESTI2052822, TESTI2052985, TESTI2053151, TESTI2053242, TESTI2053399, TESTI2053526, TESTI2053561, TESTI2053621, TESTI2053667, TESTI2053723, TESTI3000002, TESTI3000005, TESTI4000068, TESTI4000079, TESTI4000093, TESTI4000134, TESTI4000137, TESTI4000153, TESTI4000155, TESTI4000157, TESTI4000183, TESTI4000214, TESTI4000215, TESTI4000228, TESTI4000250, TESTI4000288, TESTI4000319, TESTI4000349, TESTI4000370, TESTI4000394, TESTI4000434, TESTI4000462, TESTI4000530, TESTI4000534, TESTI4000598, TESTI4000600, TESTI4000621, TESTI4000703, TESTI4000724, TESTI4000957, TESTI4000970, TESTI4001036, TESTI4001037, TESTI4001060, TESTI4001106, TESTI4001148, TESTI4001176, TESTI4001195, TESTI4001201, TESTI4001206, TESTI4001348, TESTI4001441, TESTI4001467, TESTI4001473, TESTI4001517, TESTI4001527, TESTI4001561, TESTI4001569, TESTI4001604, TESTI4001665, TESTI4001679, TESTI4001795, TESTI4001923, TESTI4001925, TESTI4001984, TESTI4002003, TESTI4002072, TESTI4002141, TESTI4002195, TESTI4002202, TESTI4002290, TESTI4002319, TESTI4002491, TESTI4002520, TESTI4002552, TESTI4002647, TESTI4002703, TESTI4002754, TESTI4002868, TESTI4002878, TESTI4002889, TESTI4002988, TESTI4003150, TESTI4003179, TESTI4003279, TESTI4003319, TESTI4003404, TESTI4003565, TESTI4003574, TESTI4003579, TESTI4003602, TESTI4003733, TESTI4003796, TESTI4003944, TESTI4004003, TESTI4004031, TESTI4004200, TESTI4004210, TESTI4004539, TESTI4004626, TESTI4004653, TESTI4004695, TESTI4004722, TESTI4004887, TESTI4004917, TESTI4005015, TESTI4005039, TESTI4005133, TESTI4005158, TESTI4005317, TESTI4005322, TESTI4005399, TESTI4005470, TESTI4005500, TESTI4005534, TESTI4005543, TESTI4005628, TESTI4005801, TESTI4005805, TESTI4005857, TESTI4005961, TESTI4006053, TESTI4006079, TESTI4006112, TESTI4006137, TESTI4006148, TESTI4006219, TESTI4006234, TESTI4006308, TESTI4006326, TESTI4006393, TESTI4006407, TESTI4006412, TESTI4006420, TESTI4006441, TESTI4006473, TESTI4006539, TESTI4006546, TESTI4006567, TESTI4006704, TESTI4006728, TESTI4006802, TESTI4006819, TESTI4007064, TESTI4007163, TESTI4007176, TESTI4007203, TESTI4007239, TESTI4007369, TESTI4007373, TESTI4007382, TESTI4007404, TESTI4007489, TESTI4007565, TESTI4007671, TESTI4007775, TESTI4007778, TESTI4007799, TESTI4007810, TESTI4007816, TESTI4007965, TESTI4008007, TESTI4008018, TESTI4008050, TESTI4008058, TESTI4008086, TESTI4008097, TESTI4008176, TESTI4008209, TESTI4008219, TESTI4008250, TESTI4008302, TESTI4008305, TESTI4008401, TESTI4008417, TESTI4008429, TESTI4008573, TESTI4008797, TESTI4008816, TESTI4008840, TESTI4008935, TESTI4008993, TESTI4009022, TESTI4009028, TESTI4009034, TESTI4009123, TESTI4009160, TESTI4009215, TESTI4009283, TESTI4009286, TESTI4009306, TESTI4009374, TESTI4009406, TESTI4009454, TESTI4009457, TESTI4009501, TESTI4009563, TESTI4009608, TESTI4009638, TESTI4009752, TESTI4009881, TESTI4009886, TESTI4009928, TESTI4010076, TESTI4010082, TESTI4010095, TESTI4010211, TESTI4010377, TESTI4010475, TESTI4010544, TESTI4010713, TESTI4010721, TESTI4010789, TESTI4010817, TESTI4010831, TESTI4010902, TESTI4010928, TESTI4010979, TESTI4011070, TESTI4011072, TESTI4011084, TESTI4011118, TESTI4011246, TESTI4011484, TESTI4011505, TESTI4011532, TESTI4011616, TESTI4011744, TESTI4011745, TESTI4011829, TESTI4011926, TESTI4011956, TESTI4012010, TESTI4012086, TESTI4012258, TESTI4012293, TESTI4012329, TESTI4012382, TESTI4012406, TESTI4012448, TESTI4012451, TESTI4012505, TESTI4012556, TESTI4012623, TESTI4012646, TESTI4012679, TESTI4012911, TESTI4012956, TESTI4012960, TESTI4013365, TESTI4013369, TESTI4013410, TESTI4013602, TESTI4013667, TESTI4013675, TESTI4013685, TESTI4013735, TESTI4013742, TESTI4013774, TESTI4013817, TESTI4013830, TESTI4013852, TESTI4013894, TESTI4013924, TESTI4013960, TESTI4013962, TESTI4014159, TESTI4014175, TESTI4014265, TESTI4014276, TESTI4014306, TESTI4014392, TESTI4014415, TESTI4014445, TESTI4014553, TESTI4014661, TESTI4014694, TESTI4014801, TESTI4014818, TESTI4014891, TESTI4014908, TESTI4014924, TESTI4014932, TESTI4014977, TESTI4015012, TESTI4015129, TESTI4015145, TESTI4015204, TESTI4015263, TESTI4015293, TESTI4015299, TESTI4015339, TESTI4015398, TESTI4015442, TESTI4015471, TESTI4015477, TESTI4015600, TESTI4015646, TESTI4015681, TESTI4015688, TESTI4015790, TESTI4016110, TESTI4016238, TESTI4016551, TESTI4016812, TESTI4016822, TESTI4016865, TESTI4016882, TESTI4016925, TESTI4017001, TESTI4017116, TESTI4017137, TESTI4017229, TESTI4017254, TESTI4017269, TESTI4017380, TESTI4017382, TESTI4017543, TESTI4017575, TESTI4017647, TESTI4017714, TESTI4017763, TESTI4017848, TESTI4017854, TESTI4017901, TESTI4017961, TESTI4017984, TESTI4018101, TESTI4018152, TESTI4018208, TESTI4018382, TESTI4018436, TESTI4018506, TESTI4018555, TESTI4018751, TESTI4018806, TESTI4018835, TESTI4018859, TESTI4018881, TESTI4018886, TESTI4018938, TESTI4019140, TESTI4019149, TESTI4019299, TESTI4019417, TESTI4019440, TESTI4019566, TESTI4019657, TESTI4019756, TESTI4019843, TESTI4020092, TESTI4020102, TESTI4020342, TESTI4020460, TESTI4020596, TESTI4020806, TESTI4020819, TESTI4020920, TESTI4021129, TESTI4021197, TESTI4021294, TESTI4021377, TESTI4021456, TESTI4021491, TESTI4021569, TESTI4021713, TESTI4021821, TESTI4022158, TESTI4022577, TESTI4022716, TESTI4022873, TESTI4023096, TESTI4023172, TESTI4023546, TESTI4023555, TESTI4023654, TESTI4023722, TESTI4023762, TESTI4023942, TESTI4024096, TESTI4024240, TESTI4024245, TESTI4024294, TESTI4024344, TESTI4024387, TESTI4024420, TESTI4024494, TESTI4024740, TESTI4024874, TESTI4024890, TESTI4024907, TESTI4024930, TESTI4025062, TESTI4025268, TESTI4025401, TESTI4025494, TESTI4025547, TESTI4025731, TESTI4025797, TESTI4025865, TESTI4025908, TESTI4025920, TESTI4026079, TESTI4026080, TESTI4026192, TESTI4026207, TESTI4026295, TESTI4026390, TESTI4026456, TESTI4026510, TESTI4026524, TESTI4026680, TESTI4026700, TESTI4026762, TESTI4026785, TESTI4027139, TESTI4027170, TESTI4027262, TESTI4027516, TESTI4027557, TESTI4027660, TESTI4027821, TESTI4027969, TESTI4028042, TESTI4028059, TESTI4028062, TESTI4028182, TESTI4028429, TESTI4028612, TESTI4028692, TESTI4028809, TESTI4028823, TESTI4028880, TESTI4028904, TESTI4028938, TESTI4028958, TESTI4028983, TESTI4029023, TESTI4029348, TESTI4029370, TESTI4029528, TESTI4029651, TESTI4029671, TESTI4029676, TESTI4029690, TESTI4029731, TESTI4029743, TESTI4030069, TESTI4030159, TESTI4030319, TESTI4030505, TESTI4030603, TESTI4030669, TESTI4030673, TESTI4030864, TESTI4031066, TESTI4031173, TESTI4031335, TESTI4031745, TESTI4031818, TESTI4032090, TESTI4032112, TESTI4032128, TESTI4032270, TESTI4032375, TESTI4032834, TESTI4032856, TESTI4032895, TESTI4032913, TESTI4033146, TESTI4033177, TESTI4033433, TESTI4033690, TESTI4034172, TESTI4034212, TESTI4034432, TESTI4034495, TESTI4034632, TESTI4034633, TESTI4034912, TESTI4034973, TESTI4035063, TESTI4035065, TESTI4035498, TESTI4035508, TESTI4035581, TESTI4035602, TESTI4035637, TESTI4035649, TESTI4035770, TESTI4035872, TESTI4035895, TESTI4035898, TESTI4035989, TESTI4036012, TESTI4036042, TESTI4036048, TESTI4036315, TESTI4036319, TESTI4036449, TESTI4036767, TESTI4036909, TESTI4037066, TESTI4037188, TESTI4037228, TESTI4037244, TESTI4037727, TESTI4037949, TESTI4038047, TESTI4038099, TESTI4038156, TESTI4038223, TESTI4038258, TESTI4038284, TESTI4038339, TESTI4038492, TESTI4038721, TESTI4038758, TESTI4038779, TESTI4038818, TESTI4039038, TESTI4039086, TESTI4039451, TESTI4039575, TESTI4039659, TESTI4039744, TESTI4039904, TESTI4040197, TESTI4040363, TESTI4040535, TESTI4040559, TESTI4040598, TESTI4040800, TESTI4040804, TESTI4040939, TESTI4040956, TESTI4041049, TESTI4041053, TESTI4041086, TESTI4041099, TESTI4041143, TESTI4041482, TESTI4041519, TESTI4041624, TESTI4041629, TESTI4041832, TESTI4041844, TESTI4041903, TESTI4041954, TESTI4041984, TESTI4041985, TESTI4041986, TESTI4042098, TESTI4042420, TESTI4042440, TESTI4042444, TESTI4042711, TESTI4042846, TESTI4043067, TESTI4043129, TESTI4043166, TESTI4043203, TESTI4043223, TESTI4043371, TESTI4043378, TESTI4043512, TESTI4043551, TESTI4043710, TESTI4043947, TESTI4044035, TESTI4044076, TESTI4044084, TESTI4044123, TESTI4044186, TESTI4044234, TESTI4044291, TESTI4044296, TESTI4044300, TESTI4044682, TESTI4044770, TESTI4045168, TESTI4045312, TESTI4045330, TESTI4045470, TESTI4045701, TESTI4045908, TESTI4045955, TESTI4045982, TESTI4046073, TESTI4046090, TESTI4046240, TESTI4046245, TESTI4046253, TESTI4046282, TESTI4046328, TESTI4046450, TESTI4046457, TESTI4046487, TESTI4046502, TESTI4046523, TESTI4046819, TESTI4046873, TESTI4046884, TESTI4046896, TESTI4046903, TESTI4046962, TESTI4047069, TESTI4047119, TESTI4047305, TESTI4047328, TESTI4047437, TESTI4047569, TESTI4047746, TESTI4047808, THYMU1000002, THYMU1000010, THYMU1000017, THYMU1000025, THYMU1000029, THYMU1000032, THYMU1000033, THYMU1000060, THYMU1000074, THYMU1000083, THYMU1000098, THYMU1000103, THYMU1000105, THYMU1000136, THYMU1000142, THYMU1000144, THYMU1000158, THYMU1000176, THYMU1000179, THYMU1000191, THYMU1000198, THYMU1000217, THYMU1000240, THYMU1000242, THYMU1000291, THYMU1000316, THYMU1000318, THYMU1000329, THYMU1000331, THYMU1000336, THYMU1000366, THYMU1000382, THYMU1000393, THYMU1000399, THYMU1000426, THYMU1000440, THYMU1000459, THYMU1000490, THYMU1000491, THYMU1000496, THYMU1000527, THYMU1000532, THYMU1000536, THYMU1000554, THYMU1000558, THYMU1000576, THYMU1000600, THYMU1000677, THYMU1000692, THYMU2000022, THYMU2000032, THYMU2000120, THYMU2000138, THYMU2000140, THYMU2000155, THYMU2000162, THYMU2000171, THYMU2000176, THYMU2000179, THYMU2000231, THYMU2000236, THYMU2000276, THYMU2000280, THYMU2000317, THYMU2000368, THYMU2000382, THYMU2000418, THYMU2000440, THYMU2000489, THYMU2000492, THYMU2000519, THYMU2000570, THYMU2000602, THYMU2000660, THYMU2000671, THYMU2000672, THYMU2000684, THYMU2000767, THYMU2000800, THYMU2000879, THYMU2000932, THYMU2000950, THYMU2000971, THYMU2000982, THYMU2000990, THYMU2001007, THYMU2001053, THYMU2001071, THYMU2001090, THYMU2001139, THYMU2001195, THYMU2001202, THYMU2001203, THYMU2001256, THYMU2001270, THYMU2001291, THYMU2001314, THYMU2001325, THYMU2001357, THYMU2001381, THYMU2001422, THYMU2001443, THYMU2001515, THYMU2001521, THYMU2001556, THYMU2001622, THYMU2001727, THYMU2001819, THYMU2001825, THYMU2001839, THYMU2001868, THYMU2001898, THYMU2001900, THYMU2001916, THYMU2001926, THYMU2001989, THYMU2002023, THYMU2002037, THYMU2002109, THYMU2002147, THYMU2002154, THYMU2002157, THYMU2002162, THYMU2002177, THYMU2002203, THYMU2002229, THYMU2002242, THYMU2002338, THYMU2002356, THYMU2002376, THYMU2002384, THYMU2002450, THYMU2002490, THYMU2002548, THYMU2002695, THYMU2002756, THYMU2002789, THYMU2002792, THYMU2002815, THYMU2002841, THYMU2002852, THYMU2002910, THYMU2002950, THYMU2002983, THYMU2003046, THYMU2003069, THYMU2003107, THYMU2003124, THYMU2003133, THYMU2003166, THYMU2003232, THYMU2003242, THYMU2003249, THYMU2003270, THYMU2003282, THYMU2003287, THYMU2003336, THYMU2003366, THYMU2003397, THYMU2003419, THYMU2003440, THYMU2003470, THYMU2003479, THYMU2003499, THYMU2003542, THYMU2003632, THYMU2003650, THYMU2003700, THYMU2003760, THYMU2003803, THYMU2003855, THYMU2003907, THYMU2003932, THYMU2004003, THYMU2004008, THYMU2004042, THYMU2004108, THYMU2004111, THYMU2004123, THYMU2004139, THYMU2004152, THYMU2004169, THYMU2004284, THYMU2004320, THYMU2004336, THYMU2004344, THYMU2004356, THYMU2004452, THYMU2004508, THYMU2004512, THYMU2004635, THYMU2004639, THYMU2004668, THYMU2004677, THYMU2004688, THYMU2004693, THYMU2004733, THYMU2004835, THYMU2004843, THYMU2004906, THYMU2004986, THYMU2005001, THYMU2005003, THYMU2005046, THYMU2005134, THYMU2005156, THYMU2005190, THYMU2005225, THYMU2005240, THYMU2005246, THYMU2005270, THYMU2005283, THYMU2005303, THYMU2005321, THYMU2005356, THYMU2005369, THYMU2005439, THYMU2005480, THYMU2005482, THYMU2005507, THYMU2005545, THYMU2005546, THYMU2005574, THYMU2005576, THYMU2005748, THYMU2005759, THYMU2005807, THYMU2005815, THYMU2005855, THYMU2005881, THYMU2005948, THYMU2005980, THYMU2005997, THYMU2006001, THYMU2006048, THYMU2006098, THYMU2006160, THYMU2006170, THYMU2006252, THYMU2006261, THYMU2006277, THYMU2006303, THYMU2006324, THYMU2006350, THYMU2006357, THYMU2006365, THYMU2006420, THYMU2006468, THYMU2006610, THYMU2006666, THYMU2006712, THYMU2006813, THYMU2006913, THYMU2006946, THYMU2006965, THYMU2007025, THYMU2007036, THYMU2007060, THYMU2007065, THYMU2007095, THYMU2007112, THYMU2007146, THYMU2007179, THYMU2007258, THYMU2007307, THYMU2007308, THYMU2007339, THYMU2007350, THYMU2007384, THYMU2007493, THYMU2007521, THYMU2007528, THYMU2007530, THYMU2007532, THYMU2007561, THYMU2007571, THYMU2007635, THYMU2007658, THYMU2007667, THYMU2007694, THYMU2007725, THYMU2007802, THYMU2007824, THYMU2007854, THYMU2007886, THYMU2007952, THYMU2007969, THYMU2008035, THYMU2008036, THYMU2008049, THYMU2008072, THYMU2008111, THYMU2008145, THYMU2008149, THYMU2008185, THYMU2008191, THYMU2008207, THYMU2008226, THYMU2008282, THYMU2008321, THYMU2008339, THYMU2008350, THYMU2008351, THYMU2008383, THYMU2008452, THYMU2008643, THYMU2008686, THYMU2008691, THYMU2008714, THYMU2008725, THYMU2008727, THYMU2008781, THYMU2008799, THYMU2008876, THYMU2008910, THYMU2008917, THYMU2008928, THYMU2008990, THYMU2008994, THYMU2009023, THYMU2009046, THYMU2009101, THYMU2009104, THYMU2009134, THYMU2009157, THYMU2009181, THYMU2009186, THYMU2009338, THYMU2009425, THYMU2009516, THYMU2009526, THYMU2009546, THYMU2009592, THYMU2009596, THYMU2009835, THYMU2009906, THYMU2009948, THYMU2010030, THYMU2010041, THYMU2010046, THYMU2010059, THYMU2010082, THYMU2010094, THYMU2010161, THYMU2010192, THYMU2010448, THYMU2010519, THYMU2010637, THYMU2010671, THYMU2010699, THYMU2010705, THYMU2010779, THYMU2010816, THYMU2010831, THYMU2010848, THYMU2011053, THYMU2011063, THYMU2011072, THYMU2011096, THYMU2011118, THYMU2011142, THYMU2011183, THYMU2011257, THYMU2011259, THYMU2011295, THYMU2011308, THYMU2011390, THYMU2011431, THYMU2011447, THYMU2011482, THYMU2011538, THYMU2011548, THYMU2011551, THYMU2011564, THYMU2011573, THYMU2011585, THYMU2011621, THYMU2011666, THYMU2011736, THYMU2011785, THYMU2011806, THYMU2011852, THYMU2011875, THYMU2011881, THYMU2011937, THYMU2011939, THYMU2012002, THYMU2012024, THYMU2012073, THYMU2012104, THYMU2012113, THYMU2012273, THYMU2012492, THYMU2012507, THYMU2012565, THYMU2012574, THYMU2012625, THYMU2012631, THYMU2012665, THYMU2012690, THYMU2012701, THYMU2012807, THYMU2012826, THYMU2012882, THYMU2012891, THYMU2012902, THYMU2012919, THYMU2013023, THYMU2013047, THYMU2013051, THYMU2013089, THYMU2013364, THYMU2013386, THYMU2013426, THYMU2013578, THYMU2013648, THYMU2013705, THYMU2013757, THYMU2013779, THYMU2013863, THYMU2013950, THYMU2013981, THYMU2014067, THYMU2014068, THYMU2014167, THYMU2014183, THYMU2014204, THYMU2014297, THYMU2014323, THYMU2014327, THYMU2014353, THYMU2014492, THYMU2014500, THYMU2014599, THYMU2014762, THYMU2014777, THYMU2014801, THYMU2014901, THYMU2014923, THYMU2015019, THYMU2015161, THYMU2015316, THYMU2015321, THYMU2015439, THYMU2015441, THYMU2015479, THYMU2015762, THYMU2015825, THYMU2015918, THYMU2015943, THYMU2015984, THYMU2016113, THYMU2016164, THYMU2016204, THYMU2016219, THYMU2016360, THYMU2016496, THYMU2016523, THYMU2016840, THYMU2016968, THYMU2017008, THYMU2017010, THYMU2017023, THYMU2017085, THYMU2017099, THYMU2017158, THYMU2017162, THYMU2017215, THYMU2017362, THYMU2017366, THYMU2017398, THYMU2017449, THYMU2017479, THYMU2017522, THYMU2017526, THYMU2017601, THYMU2017675, THYMU2017707, THYMU2017831, THYMU2017844, THYMU2017878, THYMU2017948, THYMU2018028, THYMU2018071, THYMU2018126, THYMU2018189, THYMU2018197, THYMU2018384, THYMU2018455, THYMU2018547, THYMU2018565, THYMU2018639, THYMU2018673, THYMU2018721, THYMU2018772, THYMU2018819, THYMU2018841, THYMU2018997, THYMU2019021, THYMU2019054, THYMU2019197, THYMU2019210, THYMU2019364, THYMU2019436, THYMU2019442, THYMU2019587, THYMU2019599, THYMU2019686, THYMU2019813, THYMU2020198, THYMU2020289, THYMU2020416, THYMU2020491, THYMU2020499, THYMU2020560, THYMU2020667, THYMU2020830, THYMU2020883, THYMU2020959, THYMU2021361, THYMU2021509, THYMU2021597, THYMU2021684, THYMU2021714, THYMU2022213, THYMU2022289, THYMU2022854, THYMU2022922, THYMU2023209, THYMU2023264, THYMU2023576, THYMU2023711, THYMU2023900, THYMU2023943, THYMU2023967, THYMU2024071, THYMU2024121, THYMU2024185, THYMU2024207, THYMU2024616, THYMU2024684, THYMU2024748, THYMU2025042, THYMU2025189, THYMU2025319, THYMU2025325, THYMU2025406, THYMU2025557, THYMU2025572, THYMU2025707, THYMU2025849, THYMU2025909, THYMU2025939, THYMU2026182, THYMU2026350, THYMU2026530, THYMU2026531, THYMU2026835, THYMU2026904, THYMU2027053, THYMU2027168, THYMU2027249, THYMU2027282, THYMU2027497, THYMU2027695, THYMU2027734, THYMU2027894, THYMU2027975, THYMU2027996, THYMU2028041, THYMU2028368, THYMU2028379, THYMU2028394, THYMU2028412, THYMU2028629, THYMU2028632, THYMU2028724, THYMU2028739, THYMU2028942, THYMU2028978, THYMU2029134, THYMU2029578, THYMU2029676, THYMU2029688, THYMU2029788, THYMU2030068, THYMU2030226, THYMU2030264, THYMU2030462, THYMU2030543, THYMU2030637, THYMU2030655, THYMU2030796, THYMU2030912, THYMU2030982, THYMU2031046, THYMU2031139, THYMU2031218, THYMU2031249, THYMU2031258, THYMU2031341, THYMU2031368, THYMU2031579, THYMU2031847, THYMU2031890, THYMU2031994, THYMU2032035, THYMU2032080, THYMU2032150, THYMU2032155, THYMU2032358, THYMU2032437, THYMU2032601, THYMU2032655, THYMU2032715, THYMU2032732, THYMU2032825, THYMU2032976, THYMU2033053, THYMU2033070, THYMU2033079, THYMU2033085, THYMU2033104, THYMU2033227, THYMU2033263, THYMU2033308, THYMU2033401, THYMU2033583, THYMU2033755, THYMU2033787, THYMU2033816, THYMU2034182, THYMU2034279, THYMU2034314, THYMU2034338, THYMU2034374, THYMU2034647, THYMU2034917, THYMU2035064, THYMU2035078, THYMU2035101, THYMU2035319, THYMU2035321, THYMU2035388, THYMU2035400, THYMU2035554, THYMU2035710, THYMU2035735, THYMU2036058, THYMU2036105, THYMU2036207, THYMU2036215, THYMU2036252, THYMU2036265, THYMU2036366, THYMU2036459, THYMU2036461, THYMU2036604, THYMU2036653, THYMU2037081, THYMU2037208, THYMU2037226, THYMU2037233, THYMU2037234, THYMU2037348, THYMU2037406, THYMU2037965, THYMU2038058, THYMU2038189, THYMU2038199, THYMU2038220, THYMU2038301, THYMU2038369, THYMU2038389, THYMU2038615, THYMU2038636, THYMU2038739, THYMU2038772, THYMU2038797, THYMU2038906, THYMU2039305, THYMU2039315, THYMU2039334, THYMU2039350, THYMU2039411, THYMU2039634, THYMU2039719, THYMU2039780, THYMU2039788, THYMU2039989, THYMU2040029, THYMU2040110, THYMU2040114, THYMU2040140, THYMU2040412, THYMU2040427, THYMU2040824, THYMU2040925, THYMU2041007, THYMU2041015, THYMU2041252, THYMU3000028, THYMU3000036, THYMU3000037, THYMU3000082, THYMU3000194, THYMU3000224, THYMU3000269, THYMU3000306, THYMU3000360, THYMU3000390, THYMU3000420, THYMU3000490, THYMU3000504, THYMU3000542, THYMU3000655, THYMU3000776, THYMU3000826, THYMU3000841, THYMU3001077, THYMU3001082, THYMU3001083, THYMU3001133, THYMU3001151, THYMU3001379, THYMU3001472, THYMU3001593, THYMU3001883, THYMU3001939, THYMU3001991, THYMU3002452, THYMU3002578, THYMU3002661, THYMU3003007, THYMU3003092, THYMU3003212, THYMU3003309, THYMU3003350, THYMU3003403, THYMU3003565, THYMU3003763, THYMU3003865, THYMU3003958, THYMU3003965, THYMU3004157, THYMU3004628, THYMU3004632, THYMU3004835, THYMU3004866, THYMU3005050, THYMU3005378, THYMU3005407, THYMU3005415, THYMU3005427, THYMU3005482, THYMU3005491, THYMU3005696, THYMU3006118, THYMU3006132, THYMU3006168, THYMU3006172, THYMU3006371, THYMU3006485, THYMU3006640, THYMU3006767, THYMU3006811, THYMU3006963, THYMU3007137, THYMU3007308, THYMU3007368, THYMU3007423, THYMU3007559, THYMU3007845, THYMU3008060, THYMU3008105, THYMU3008136, THYMU3008171, THYMU3008216, THYMU3008436, THYMU3008672, THYMU3008883, THYMU3008935, THYMU3009006, THYMU3009255, THYMU3009391, THYMU3009643, THYMU3009755, THYMU3010247, THYMU3011012, THYMU3011081, THYMU3011244, THYMU3011360, THYMU3011534, THYMU3011543, THYMU3011556, THYMU3011717, THYMU3011827, THYMU3012402, THYMU3012907, THYMU3012983, THYMU3013114, THYMU3013197, THYMU3013241, THYMU3013386, THYMU3013470, THYMU3013785, THYMU3013897, THYMU3014038, THYMU3014173, THYMU3014372, THYMU3014555, THYMU3014620, THYMU3014701, THYMU3015042, THYMU3015457, THYMU3015571, THYMU3015592, THYMU3015625, THYMU3015647, THYMU3015962, THYMU3016022, THYMU3016518, THYMU3016797, THYMU3016822, THYMU3016850, THYMU3017562, THYMU3017688, THYMU3017689, THYMU3017761, THYMU3018151, THYMU3018896, THYMU3019095, THYMU3019476, THYMU3019605, THYMU3019916, THYMU3020221, THYMU3020595, THYMU3020713, THYMU3020856, THYMU3020869, THYMU3020970, THYMU3021404, THYMU3021586, THYMU3021755, THYMU3021900, THYMU3022211, THYMU3022434, THYMU3022528, THYMU3022668, THYMU3022982, THYMU3023107, THYMU3023211, THYMU3023216, THYMU3023394, THYMU3023400, THYMU3023797, THYMU3024164, THYMU3024339, THYMU3024602, THYMU3024879, THYMU3025118, THYMU3025313, THYMU3025642, THYMU3025683, THYMU3025772, THYMU3025865, THYMU3026000, THYMU3026350, THYMU3026479, THYMU3026532, THYMU3026783, THYMU3026869, THYMU3027251, THYMU3027540, THYMU3027655, THYMU3027671, THYMU3028075, THYMU3028410, THYMU3028461, THYMU3028702, THYMU3029188, THYMU3029318, THYMU3029421, THYMU3029719, THYMU3029774, THYMU3029832, THYMU3030072, THYMU3030231, THYMU3030706, THYMU3030710, THYMU3030752, THYMU3031146, THYMU3031402, THYMU3031610, THYMU3031612, THYMU3031868, THYMU3031878, THYMU3032032, THYMU3032798, THYMU3033402, THYMU3033630, THYMU3033649, THYMU3033754, THYMU3033759, THYMU3034078, THYMU3034099, THYMU3034453, THYMU3034616, THYMU3034853, THYMU3034867, THYMU3034983, THYMU3036200, THYMU3036310, THYMU3036934, THYMU3036953, THYMU3037052, THYMU3037192, THYMU3037617, THYMU3037772, THYMU3037827, THYMU3037836, THYMU3037856, THYMU3037867, THYMU3037909, THYMU3037980, THYMU3038158, THYMU3038167, THYMU3038214, THYMU3038266, THYMU3038328, THYMU3038347, THYMU3038375, THYMU3038603, THYMU3038687, THYMU3038759, THYMU3038879, THYMU3038970, THYMU3039807, THYMU3039846, THYMU3040068, THYMU3040126, THYMU3040146, THYMU3040168, THYMU3040172, THYMU3040725, THYMU3040746, THYMU3040816, THYMU3040829, THYMU3040830, THYMU3040986, THYMU3041354, THYMU3041386, THYMU3041573, THYMU3041603, THYMU3041736, THYMU3041918, THYMU3042075, THYMU3042321, THYMU3042372, THYMU3042758, THYMU3042929, THYMU3043200, THYMU3043327, THYMU3043482, THYMU3043597, THYMU3043688, THYMU3043779, THYMU3043883, THYMU3043993, THYMU3044175, THYMU3044188, THYMU3044441, THYMU3044445, THYMU3045510, THYMU3045673, THYMU3045692, THYMU3045704, THYMU3046140, THYMU3046350, THYMU3046360, THYMU3046856, THYMU3047115, THYMU3047144, THYMU3047156, THYMU3047366, THYMU3047513, THYMU3047542, THYMU3047760, THYMU3047891, TKIDN1000001, TKIDN1000044, TKIDN1000062, TKIDN1000066, TKIDN1000164, TKIDN1000171, TKIDN1000192, TKIDN2000127, TKIDN2000240, TKIDN2000246, TKIDN2000319, TKIDN2000464, TKIDN2000521, TKIDN2000701, TKIDN2001529, TKIDN2001662, TKIDN2002318, TKIDN2002329, TKIDN2002424, TKIDN2002632, TKIDN2003044, TKIDN2003059, TKIDN2003062, TKIDN2003078, TKIDN2003366, TKIDN2003396, TKIDN2003413, TKIDN2003597, TKIDN2003601, TKIDN2004185, TKIDN2004386, TKIDN2004458, TKIDN2004748, TKIDN2005721, TKIDN2005934, TKIDN2005947, TKIDN2005956, TKIDN2006525, TKIDN2006761, TKIDN2006852, TKIDN2007605, TKIDN2007667, TKIDN2007828, TKIDN2008176, TKIDN2008778, TKIDN2009092, TKIDN2009330, TKIDN2009481, TKIDN2009641, TKIDN2009794, TKIDN2009889, TKIDN2010200, TKIDN2010232, TKIDN2010278, TKIDN2010602, TKIDN2010812, TKIDN2010934, TKIDN2011051, TKIDN2011160, TKIDN2011324, TKIDN2012034, TKIDN2012771, TKIDN2012824, TKIDN2013134, TKIDN2013287, TKIDN2014570, TKIDN2014757, TKIDN2014771, TKIDN2014964, TKIDN2015025, TKIDN2015071, TKIDN2015161, TKIDN2015263, TKIDN2015285, TKIDN2015423, TKIDN2015788, TKIDN2016309, TKIDN2016399, TKIDN2016846, TKIDN2018926, TKIDN2019116, TLIVE2000023, TLIVE2000142, TLIVE2000292, TLIVE2000762, TLIVE2000979, TLIVE2001327, TLIVE2001616, TLIVE2001684, TLIVE2001828, TLIVE2001927, TLIVE2002046, TLIVE2002336, TLIVE2002338, TLIVE2002562, TLIVE2002690, TLIVE2002882, TLIVE2003197, TLIVE2003200, TLIVE2003225, TLIVE2003381, TLIVE2003737, TLIVE2003961, TLIVE2003970, TLIVE2004110, TLIVE2004320, TLIVE2004331, TLIVE2004601, TLIVE2005180, TLIVE2005390, TLIVE2005516, TLIVE2005731, TLIVE2005866, TLIVE2006236, TLIVE2006359, TLIVE2006529, TLIVE2006621, TLIVE2006733, TLIVE2007000, TLIVE2007016, TLIVE2007132, TLIVE2007192, TLIVE2007528, TLIVE2007607, TLIVE2007736, TLIVE2007816, TLIVE2007919, TLIVE2008083, TLIVE2008213, TLIVE2008221, TLIVE2008229, TLIVE2008712, TLIVE2008797, TLIVE2009087, TLIVE2009163, TLIVE2009489, TLIVE2009541, TLUNG2000179, TOVAR2000476, TOVAR2000575, TOVAR2000649, TOVAR2000904, TOVAR2001281, TOVAR2001556, TOVAR2001730, TOVAR2002247, TOVAR2002514, TOVAR2002549, TOVAR2002800, TRACH1000011, TRACH1000018, TRACH1000038, TRACH1000057, TRACH1000074, TRACH1000100, TRACH1000106, TRACH1000125, TRACH1000140, TRACH1000144, TRACH1000181, TRACH1000193, TRACH1000205, TRACH1000212, TRACH1000240, TRACH2000002, TRACH2000015, TRACH2000024, TRACH2000032, TRACH2000047, TRACH2000081, TRACH2000083, TRACH2000148, TRACH2000185, TRACH2000196, TRACH2000235, TRACH2000237, TRACH2000243, TRACH2000248, TRACH2000259, TRACH2000272, TRACH2000282, TRACH2000287, TRACH2000289, TRACH2000306, TRACH2000312, TRACH2000336, TRACH2000359, TRACH2000393, TRACH2000411, TRACH2000420, TRACH2000472, TRACH2000496, TRACH2000497, TRACH2000502, TRACH2000522, TRACH2000540, TRACH2000559, TRACH2000660, TRACH2000665, TRACH2000675, TRACH2000677, TRACH2000703, TRACH2000767, TRACH2000775, TRACH2000807, TRACH2000862, TRACH2000873, TRACH2000894, TRACH2000898, TRACH2000920, TRACH2000923, TRACH2000944, TRACH2000981, TRACH2000986, TRACH2001037, TRACH2001060, TRACH2001085, TRACH2001109, TRACH2001121, TRACH2001147, TRACH2001154, TRACH2001188, TRACH2001192, TRACH2001249, TRACH2001275, TRACH2001335, TRACH2001339, TRACH2001347, TRACH2001395, TRACH2001400, TRACH2001403, TRACH2001416, TRACH2001428, TRACH2001443, TRACH2001463, TRACH2001474, TRACH2001523, TRACH2001525, TRACH2001532, TRACH2001549, TRACH2001592, TRACH2001596, TRACH2001607, TRACH2001612, TRACH2001621, TRACH2001646, TRACH2001651, TRACH2001898, TRACH2001933, TRACH2001968, TRACH2001996, TRACH2002043, TRACH2002054, TRACH2002100, TRACH2002138, TRACH2002333, TRACH2002784, TRACH2002803, TRACH2002840, TRACH2002853, TRACH2002862, TRACH2002954, TRACH2002960, TRACH2002988, TRACH2003070, TRACH2003323, TRACH2003484, TRACH2003516, TRACH2003605, TRACH2003736, TRACH2003759, TRACH2003941, TRACH2004039, TRACH2004054, TRACH2004087, TRACH2004109, TRACH2004170, TRACH2004183, TRACH2004251, TRACH2004292, TRACH2004336, TRACH2004399, TRACH2004428, TRACH2004458, TRACH2004499, TRACH2004521, TRACH2004570, TRACH2004845, TRACH2004887, TRACH2004950, TRACH2005004, TRACH2005017, TRACH2005066, TRACH2005159, TRACH2005314, TRACH2005444, TRACH2005541, TRACH2005666, TRACH2005698, TRACH2005710, TRACH2005720, TRACH2005769, TRACH2005796, TRACH2006015, TRACH2006049, TRACH2006097, TRACH2006194, TRACH2006327, TRACH2006331, TRACH2006378, TRACH2006387, TRACH2006528, TRACH2006670, TRACH2006762, TRACH2006866, TRACH2006870, TRACH2006918, TRACH2007059, TRACH2007324, TRACH2007358, TRACH2007483, TRACH2007542, TRACH2007577, TRACH2007674, TRACH2007676, TRACH2007688, TRACH2007733, TRACH2007754, TRACH2007816, TRACH2007894, TRACH2007969, TRACH2007988, TRACH2008081, TRACH2008112, TRACH2008113, TRACH2008127, TRACH2008130, TRACH2008278, TRACH2008300, TRACH2008472, TRACH2008478, TRACH2008540, TRACH2008583, TRACH2008597, TRACH2008716, TRACH2008820, TRACH2008891, TRACH2008921, TRACH2009006, TRACH2009060, TRACH2009107, TRACH2009123, TRACH2009268, TRACH2009310, TRACH2009340, TRACH2009348, TRACH2009358, TRACH2009661, TRACH2009730, TRACH2009743, TRACH2009754, TRACH2009862, TRACH2009934, TRACH2010159, TRACH2010218, TRACH2010251, TRACH2010272, TRACH2010317, TRACH2010419, TRACH2010451, TRACH2010505, TRACH2010587, TRACH2010600, TRACH2010639, TRACH2010677, TRACH2010698, TRACH2010771, TRACH2010824, TRACH2010883, TRACH2010965, TRACH2010974, TRACH2011057, TRACH2011093, TRACH2011113, TRACH2011290, TRACH2011293, TRACH2011500, TRACH2011574, TRACH2011894, TRACH2011956, TRACH2012000, TRACH2012138, TRACH2012242, TRACH2012298, TRACH2012370, TRACH2012387, TRACH2012497, TRACH2012536, TRACH2012562, TRACH2012742, TRACH2012811, TRACH2012823, TRACH2012918, TRACH2013123, TRACH2013265, TRACH2013369, TRACH2013450, TRACH2013495, TRACH2013552, TRACH2013585, TRACH2013671, TRACH2013726, TRACH2013902, TRACH2013928, TRACH2013982, TRACH2013991, TRACH2014018, TRACH2014045, TRACH2014046, TRACH2014082, TRACH2014268, TRACH2014284, TRACH2014337, TRACH2014356, TRACH2014371, TRACH2014483, TRACH2014495, TRACH2014544, TRACH2014573, TRACH2014725, TRACH2014760, TRACH2014815, TRACH2014839, TRACH2014938, TRACH2014950, TRACH2014972, TRACH2014974, TRACH2015180, TRACH2015243, TRACH2015316, TRACH2015381, TRACH2015486, TRACH2015823, TRACH2015824, TRACH2015939, TRACH2015987, TRACH2016080, TRACH2016131, TRACH2016286, TRACH2016347, TRACH2016380, TRACH2016384, TRACH2016410, TRACH2016481, TRACH2016498, TRACH2016533, TRACH2016551, TRACH2016554, TRACH2016651, TRACH2016690, TRACH2016709, TRACH2016722, TRACH2016835, TRACH2016980, TRACH2017086, TRACH2017368, TRACH2017498, TRACH2017609, TRACH2017949, TRACH2017965, TRACH2017980, TRACH2018034, TRACH2018084, TRACH2018262, TRACH2018273, TRACH2018278, TRACH2018345, TRACH2018380, TRACH2018449, TRACH2018512, TRACH2018646, TRACH2018663, TRACH2018718, TRACH2018835, TRACH2018882, TRACH2018914, TRACH2018950, TRACH2019024, TRACH2019046, TRACH2019080, TRACH2019151, TRACH2019154, TRACH2019176, TRACH2019248, TRACH2019309, TRACH2019425, TRACH2019473, TRACH2019602, TRACH2019661, TRACH2019673, TRACH2019844, TRACH2019879, TRACH2020048, TRACH2020336, TRACH2020525, TRACH2021398, TRACH2021622, TRACH2021635, TRACH2021964, TRACH2022042, TRACH2022113, TRACH2022253, TRACH2022425, TRACH2022553, TRACH2022649, TRACH2022839, TRACH2023246, TRACH2023299, TRACH2023306, TRACH2023416, TRACH2023479, TRACH2023684, TRACH2023860, TRACH2023876, TRACH2024139, TRACH2024187, TRACH2024271, TRACH2024293, TRACH2024408, TRACH2024512, TRACH2024559, TRACH2024647, TRACH2024651, TRACH2024730, TRACH2024735, TRACH2024749, TRACH2024821, TRACH2025057, TRACH2025084, TRACH2025155, TRACH2025224, TRACH2025344, TRACH2025379, TRACH2025507, TRACH2025569, TRACH2025705, TRACH2025749, TRACH2025753, TRACH2025810, TRACH2025853, TRACH2025911, TRACH2025932, TRACH3000014, TRACH3000017, TRACH3000043, TRACH3000134, TRACH3000180, TRACH3000342, TRACH3000420, TRACH3000515, TRACH3000530, TRACH3000548, TRACH3000558, TRACH3000586, TRACH3000780, TRACH3000892, TRACH3000926, TRACH3001119, TRACH3001443, TRACH3001550, TRACH3001759, TRACH3002064, TRACH3002107, TRACH3002168, TRACH3002188, TRACH3002245, TRACH3002293, TRACH3002533, TRACH3002561, TRACH3002567, TRACH3002605, TRACH3002650, TRACH3002752, TRACH3002866, TRACH3002871, TRACH3002876, TRACH3002890, TRACH3003009, TRACH3003037, TRACH3003357, TRACH3003379, TRACH3003547, TRACH3003586, TRACH3003683, TRACH3003780, TRACH3003805, TRACH3003832, TRACH3003872, TRACH3004113, TRACH3004288, TRACH3004303, TRACH3004412, TRACH3004424, TRACH3004456, TRACH3004537, TRACH3004596, TRACH3004651, TRACH3004652, TRACH3004671, TRACH3004721, TRACH3004747, TRACH3004760, TRACH3004783, TRACH3004786, TRACH3004840, TRACH3004931, TRACH3004934, TRACH3005072, TRACH3005085, TRACH3005102, TRACH3005173, TRACH3005191, TRACH3005211, TRACH3005274, TRACH3005294, TRACH3005479, TRACH3005549, TRACH3005699, TRACH3005702, TRACH3005808, TRACH3005852, TRACH3005896, TRACH3006038, TRACH3006149, TRACH3006228, TRACH3006264, TRACH3006336, TRACH3006379, TRACH3006392, TRACH3006395, TRACH3006397, TRACH3006412, TRACH3006470, TRACH3006589, TRACH3006626, TRACH3006699, TRACH3006717, TRACH3006800, TRACH3006889, TRACH3006985, TRACH3007097, TRACH3007268, TRACH3007274, TRACH3007277, TRACH3007391, TRACH3007479, TRACH3007541, TRACH3007595, TRACH3007625, TRACH3007627, TRACH3007689, TRACH3007766, TRACH3007866, TRACH3007995, TRACH3008042, TRACH3008061, TRACH3008201, TRACH3008508, TRACH3008535, TRACH3008629, TRACH3008632, TRACH3008688, TRACH3008697, TRACH3008713, TRACH3008887, TRACH3008902, TRACH3008990, TRACH3009001, TRACH3009008, TRACH3009059, TRACH3009061, TRACH3009148, TRACH3009455, TRACH3009701, TRACH3009715, TRACH3009894, TRACH3009956, TRACH3010079, TRACH3010167, TRACH3010331, TRACH3010342, TRACH3010382, TRACH3010757, TRACH3010901, TRACH3011004, TRACH3011082, TRACH3011184, TRACH3011282, TRACH3011313, TRACH3011454, TRACH3011485, TRACH3011503, TRACH3011538, TRACH3011542, TRACH3012106, TRACH3012161, TRACH3012232, TRACH3012261, TRACH3012445, TRACH3012460, TRACH3012659, TRACH3012718, TRACH3012864, TRACH3012891, TRACH3012942, TRACH3013043, TRACH3013072, TRACH3013426, TRACH3013454, TRACH3013558, TRACH3013684, TRACH3013693, TRACH3013700, TRACH3013766, TRACH3013900, TRACH3013926, TRACH3014063, TRACH3014183, TRACH3014215, TRACH3014316, TRACH3014415, TRACH3014580, TRACH3014641, TRACH3014885, TRACH3015136, TRACH3015336, TRACH3015346, TRACH3015354, TRACH3015467, TRACH3015626, TRACH3015951, TRACH3016051, TRACH3016120, TRACH3016264, TRACH3016277, TRACH3016368, TRACH3016455, TRACH3016614, TRACH3016805, TRACH3016992, TRACH3017171, TRACH3017409, TRACH3017934, TRACH3018108, TRACH3018191, TRACH3018240, TRACH3018261, TRACH3018519, TRACH3018524, TRACH3018606, TRACH3018783, TRACH3018907, TRACH3018933, TRACH3018943, TRACH3019018, TRACH3019058, TRACH3019142, TRACH3019290, TRACH3019347, TRACH3019370, TRACH3019447, TRACH3019598, TRACH3019621, TRACH3019662, TRACH3019807, TRACH3019924, TRACH3019977, TRACH3020137, TRACH3020410, TRACH3020563, TRACH3020605, TRACH3020750, TRACH3020769, TRACH3020928, TRACH3020930, TRACH3021023, TRACH3021066, TRACH3021212, TRACH3021335, TRACH3021373, TRACH3021544, TRACH3021778, TRACH3021834, TRACH3021883, TRACH3022170, TRACH3022296, TRACH3022482, TRACH3022732, TRACH3022758, TRACH3022875, TRACH3022910, TRACH3022960, TRACH3023063, TRACH3023203, TRACH3023242, TRACH3023373, TRACH3023516, TRACH3023752, TRACH3023945, TRACH3023960, TRACH3024020, TRACH3024081, TRACH3024342, TRACH3024423, TRACH3024428, TRACH3024512, TRACH3024671, TRACH3024823, TRACH3025302, TRACH3025316, TRACH3025346, TRACH3025520, TRACH3026148, TRACH3026283, TRACH3026299, TRACH3026303, TRACH3026542, TRACH3026650, TRACH3026676, TRACH3026744, TRACH3026949, TRACH3027229, TRACH3027527, TRACH3027681, TRACH3027701, TRACH3027885, TRACH3028031, TRACH3028164, TRACH3028180, TRACH3028195, TRACH3028441, TRACH3028597, TRACH3028678, TRACH3028837, TRACH3028847, TRACH3028855, TRACH3029139, TRACH3029329, TRACH3029451, TRACH3029462, TRACH3029520, TRACH3029592, TRACH3029629, TRACH3029665, TRACH3029670, TRACH3029800, TRACH3030111, TRACH3030130, TRACH3030176, TRACH3030252, TRACH3030725, TRACH3030855, TRACH3030883, TRACH3031316, TRACH3031400, TRACH3031463, TRACH3031479, TRACH3031518, TRACH3031660, TRACH3031678, TRACH3031936, TRACH3032044, TRACH3032065, TRACH3032150, TRACH3032372, TRACH3032480, TRACH3032570, TRACH3032755, TRACH3032827, TRACH3032873, TRACH3033535, TRACH3033680, TRACH3033868, TRACH3034145, TRACH3034414, TRACH3034488, TRACH3034680, TRACH3034731, TRACH3034745, TRACH3034762, TRACH3034903, TRACH3035187, TRACH3035199, TRACH3035235, TRACH3035451, TRACH3035482, TRACH3035526, TRACH3036004, TRACH3036103, TRACH3036193, TRACH3036207, TRACH3036278, TRACH3036309, TRACH3036456, TRACH3036609, TRACH3036638, TRACH3036683, TRACH3036750, TRACH3036792, TRACH3036843, TRACH3036897, TRACH3036932, TRACH3036942, TRACH3036997, TRACH3037063, TRACH3037067, TRACH3037267, TRACH3037288, TRACH3037505, TRACH3037573, TRACH3037696, TRACH3037897, TRACH3038086, TRACH3038399, TSTOM1000135, TSTOM1000186, TSTOM2000139, TSTOM2000235, TSTOM2000315, TSTOM2000442, TSTOM2000553, TSTOM2000569, TSTOM2000588, TSTOM2001195, TSTOM2001274, TSTOM2001571, TSTOM2001996, TSTOM2002265, TSTOM2002505, TSTOM2002561, TSTOM2002611, TSTOM2002672, TSTOM2002682, TUTER1000014, TUTER1000122, TUTER1000137, TUTER2000057, TUTER2000283, TUTER2000425, TUTER2000904, TUTER2000916, TUTER2001286, TUTER2001341, TUTER2001387, TUTER2001433, TUTER2001461, TUTER2002028, TUTER2002074, TUTER2002158, TUTER2002228, TUTER2002323, TUTER2002356, TUTER2002729, UMVEN1000122, UMVEN1000143, UMVEN1000156, UMVEN2000046, UMVEN2000069, UMVEN2000121, UMVEN2000133, UMVEN2000152, UMVEN2000453, UTERU1000008, UTERU1000015, UTERU1000024, UTERU1000031, UTERU1000032, UTERU1000057, UTERU1000065, UTERU1000077, UTERU1000093, UTERU1000096, UTERU1000106, UTERU1000109, UTERU1000131, UTERU1000138, UTERU1000148, UTERU1000160, UTERU1000182, UTERU1000183, UTERU1000187, UTERU1000192, UTERU1000249, UTERU1000337, UTERU1000339, UTERU2000023, UTERU2000047, UTERU2000074, UTERU2000099, UTERU2000154, UTERU2000197, UTERU2000218, UTERU2000238, UTERU2000243, UTERU2000260, UTERU2000300, UTERU2000329, UTERU2000332, UTERU2000338, UTERU2000349, UTERU2000377, UTERU2000393, UTERU2000418, UTERU2000424, UTERU2000465, UTERU2000485, UTERU2000517, UTERU2000524, UTERU2000539, UTERU2000541, UTERU2000542, UTERU2000546, UTERU2000550, UTERU2000569, UTERU2000607, UTERU2000629, UTERU2000649, UTERU2000663, UTERU2000794, UTERU2000830, UTERU2000844, UTERU2000922, UTERU2001024, UTERU2001110, UTERU2001176, UTERU2001281, UTERU2001389, UTERU2001409, UTERU2001412, UTERU2001504, UTERU2001607, UTERU2001747, UTERU2001876, UTERU2002001, UTERU2002011, UTERU2002176, UTERU2002198, UTERU2002294, UTERU2002332, UTERU2002473, UTERU2002547, UTERU2002662, UTERU2002693, UTERU2002733, UTERU2002736, UTERU2002737, UTERU2002826, UTERU2002841, UTERU2002964, UTERU2002993, UTERU2003035, UTERU2003126, UTERU2003135, UTERU2003321, UTERU2003399, UTERU2003411, UTERU2003456, UTERU2003577, UTERU2003704, UTERU2003926, UTERU2003973, UTERU2004015, UTERU2004039, UTERU2004061, UTERU2004073, UTERU2004163, UTERU2004299, UTERU2004461, UTERU2004520, UTERU2004564, UTERU2004664, UTERU2004688, UTERU2004698, UTERU2004861, UTERU2004929, UTERU2005004, UTERU2005050, UTERU2005069, UTERU2005074, UTERU2005179, UTERU2005292, UTERU2005346, UTERU2005446, UTERU2005449, UTERU2005450, UTERU2005533, UTERU2005601, UTERU2005664, UTERU2005822, UTERU2005903, UTERU2005905, UTERU2006103, UTERU2006115, UTERU2006137, UTERU2006182, UTERU2006400, UTERU2006412, UTERU2006429, UTERU2006486, UTERU2006524, UTERU2006547, UTERU2006568, UTERU2006593, UTERU2006651, UTERU2006705, UTERU2006899, UTERU2007004, UTERU2007075, UTERU2007081, UTERU2007128, UTERU2007253, UTERU2007267, UTERU2007444, UTERU2007499, UTERU2007639, UTERU2007924, UTERU2007942, UTERU2008018, UTERU2008019, UTERU2008027, UTERU2008040, UTERU2008077, UTERU2008130, UTERU2008302, UTERU2008347, UTERU2008426, UTERU2008516, UTERU2008561, UTERU2008653, UTERU2008705, UTERU2008707, UTERU2008785, UTERU2008845, UTERU2008901, UTERU2008930, UTERU2008939, UTERU2008962, UTERU2009094, UTERU2009120, UTERU2009131, UTERU2009147, UTERU2009206, UTERU2009283, UTERU2009335, UTERU2009414, UTERU2009435, UTERU2009483, UTERU2009510, UTERU2009538, UTERU2009540, UTERU2009776, UTERU2009904, UTERU2009951, UTERU2010115, UTERU2010124, UTERU2010164, UTERU2010226, UTERU2010231, UTERU2010304, UTERU2010320, UTERU2010431, UTERU2010525, UTERU2010651, UTERU2010724, UTERU2010747, UTERU2011195, UTERU2011199, UTERU2011220, UTERU2011261, UTERU2011287, UTERU2011410, UTERU2011574, UTERU2011621, UTERU2011657, UTERU2011741, UTERU2011806, UTERU2011811, UTERU2011897, UTERU2011906, UTERU2011962, UTERU2011968, UTERU2012031, UTERU2012101, UTERU2012114, UTERU2012230, UTERU2012252, UTERU2012333, UTERU2012407, UTERU2012526, UTERU2012581, UTERU2012610, UTERU2012615, UTERU2012688, UTERU2012715, UTERU2012741, UTERU2012786, UTERU2012856, UTERU2012890, UTERU2012938, UTERU2012976, UTERU2013048, UTERU2013078, UTERU2013231, UTERU2013262, UTERU2013280, UTERU2013322, UTERU2013483, UTERU2013491, UTERU2013502, UTERU2013586, UTERU2013926, UTERU2013976, UTERU2014001, UTERU2014223, UTERU2014398, UTERU2014464, UTERU2014548, UTERU2014601, UTERU2014631, UTERU2014668, UTERU2014678, UTERU2014728, UTERU2014898, UTERU2014998, UTERU2015062, UTERU2015087, UTERU2015108, UTERU2015190, UTERU2015198, UTERU2015202, UTERU2015405, UTERU2015640, UTERU2015830, UTERU2015880, UTERU2016147, UTERU2016157, UTERU2016426, UTERU2016464, UTERU2016669, UTERU2016757, UTERU2016761, UTERU2016822, UTERU2016896, UTERU2016902, UTERU2016979, UTERU2016981, UTERU2017123, UTERU2017303, UTERU2017421, UTERU2017492, UTERU2017613, UTERU2017623, UTERU2017632, UTERU2017761, UTERU2017762, UTERU2017810, UTERU2017988, UTERU2018127, UTERU2018180, UTERU2018200, UTERU2018333, UTERU2018364, UTERU2018514, UTERU2018522, UTERU2018523, UTERU2018544, UTERU2018566, UTERU2018609, UTERU2018674, UTERU2018712, UTERU2018784, UTERU2018789, UTERU2018811, UTERU2018867, UTERU2018881, UTERU2018884, UTERU2018955, UTERU2019005, UTERU2019038, UTERU2019096, UTERU2019163, UTERU2019257, UTERU2019453, UTERU2019491, UTERU2019534, UTERU2019681, UTERU2019706, UTERU2019710, UTERU2019940, UTERU2019959, UTERU2019964, UTERU2020226, UTERU2020242, UTERU2020292, UTERU2020351, UTERU2020491, UTERU2020718, UTERU2021163, UTERU2021380, UTERU2021649, UTERU2021820, UTERU2022020, UTERU2022773, UTERU2022955, UTERU2022981, UTERU2023039, UTERU2023045, UTERU2023262, UTERU2023550, UTERU2023651, UTERU2023687, UTERU2023712, UTERU2023941, UTERU2024002, UTERU2024042, UTERU2024141, UTERU2024481, UTERU2024656, UTERU2024758, UTERU2024820, UTERU2024881, UTERU2024969, UTERU2025025, UTERU2025041, UTERU2025301, UTERU2025366, UTERU2025415, UTERU2025579, UTERU2025645, UTERU2025891, UTERU2026025, UTERU2026090, UTERU2026142, UTERU2026203, UTERU2026775, UTERU2027023, UTERU2027369, UTERU2027591, UTERU2027616, UTERU2027941, UTERU2028377, UTERU2028734, UTERU2029503, UTERU2029660, UTERU2029742, UTERU2029953, UTERU2030213, UTERU2030270, UTERU2030280, UTERU2031060, UTERU2031084, UTERU2031268, UTERU2031295, UTERU2031521, UTERU2031611, UTERU2031703, UTERU2031834, UTERU2031851, UTERU2032075, UTERU2032220, UTERU2032279, UTERU2032726, UTERU2033172, UTERU2033375, UTERU2033382, UTERU2033420, UTERU2033530, UTERU2033577, UTERU2034053, UTERU2034147, UTERU2034695, UTERU2035114, UTERU2035187, UTERU2035231, UTERU2035306, UTERU2035323, UTERU2035328, UTERU2035331, UTERU2035452, UTERU2035469, UTERU2035503, UTERU2035745, UTERU2035908, UTERU2035926, UTERU2035978, UTERU2036089, UTERU2036347, UTERU2036507, UTERU2036512, UTERU2036530, UTERU2036623, UTERU2036690, UTERU2037224, UTERU2037361, UTERU2037423, UTERU2037577, UTERU2037674, UTERU2037791, UTERU2037843, UTERU2038171, UTERU2038251, UTERU3000226, UTERU3000298, UTERU3000402, UTERU3000645, UTERU3000665, UTERU3000670, UTERU3000727, UTERU3000738, UTERU3000828, UTERU3000844, UTERU3000899, UTERU3000959, UTERU3001029, UTERU3001053, UTERU3001059, UTERU3001158, UTERU3001240, UTERU3001394, UTERU3001542, UTERU3001558, UTERU3001571, UTERU3001585, UTERU3001632, UTERU3001652, UTERU3001766, UTERU3001988, UTERU3002209, UTERU3002218, UTERU3002383, UTERU3002600, UTERU3002620, UTERU3002667, UTERU3002701, UTERU3002731, UTERU3002768, UTERU3002786, UTERU3002993, UTERU3003116, UTERU3003135, UTERU3003178, UTERU3003465, UTERU3003495, UTERU3003523, UTERU3003660, UTERU3003774, UTERU3003776, UTERU3004384, UTERU3004418, UTERU3004477, UTERU3004523, UTERU3004616, UTERU3004635, UTERU3004709, UTERU3004938, UTERU3004992, UTERU3005049, UTERU3005159, UTERU3005205, UTERU3005230, UTERU3005264, UTERU3005422, UTERU3005460, UTERU3005536, UTERU3005585, UTERU3005767, UTERU3005907, UTERU3005970, UTERU3006008, UTERU3006228, UTERU3006308, UTERU3006538, UTERU3006640, UTERU3006687, UTERU3006720, UTERU3006798, UTERU3006884, UTERU3007021, UTERU3007104, UTERU3007108, UTERU3007134, UTERU3007419, UTERU3007640, UTERU3007731, UTERU3007913, UTERU3008280, UTERU3008463, UTERU3008660, UTERU3008671, UTERU3008722, UTERU3008917, UTERU3009259, UTERU3009490, UTERU3009517, UTERU3009690, UTERU3009775, UTERU3009871, UTERU3009979, UTERU3009987, UTERU3010029, UTERU3010409, UTERU3010526, UTERU3010604, UTERU3010892, UTERU3010919, UTERU3011063, UTERU3011092, UTERU3011273, UTERU3011398, UTERU3011558, UTERU3011579, UTERU3011795, UTERU3011837, UTERU3012293, UTERU3012414, UTERU3012476, UTERU3012599, UTERU3012999, UTERU3013167, UTERU3013302, UTERU3013781, UTERU3014274, UTERU3014446, UTERU3014611, UTERU3014647, UTERU3014791, UTERU3014906, UTERU3015011, UTERU3015086, UTERU3015299, UTERU3015412, UTERU3015500, UTERU3015647, UTERU3015844, UTERU3016070, UTERU3016273, UTERU3016274, UTERU3016308, UTERU3016789, UTERU3017176, UTERU3017441, UTERU3017626, UTERU3017995, UTERU3018154, UTERU3018172, UTERU3018255, UTERU3018616, UTERU3018711, UTERU3019078

[0690] Of the 17,176 genes that include the cDNAs of the present invention, genes whose expression levels were high enough to detect in each of the LIVER, LYMPB, MAMGL, MESAN, MESTC, N1ESE, and NB9N4 libraries were analyzed for expression frequency. The analysis results are described below. Each is a relative value, where the expression level over all tissues is taken as 100. The larger this value, the greater the level of expression.

TABLE 33

| Clone Name | LIVER | LYMPB | MAMGL | MESAN | MESTC | N1ESE | NB9N4 |
|---|---|---|---|---|---|---|---|
| 3NB691000116 | 0 | 0 | 0 | 12.061 | 0 | 0 | 0 |
| 3NB692000281 | 0 | 4.995 | 0 | 0.816 | 0 | 4.999 | 0 |
| 3NB692000912 | 0 | 10.662 | 0 | 0 | 0 | 0 | 0 |
| 3NB692001334 | 0 | 0 | 0 | 0 | 0 | 0 | 9.082 |
| ADIPS2000425 | 0 | 0 | 0 | 0 | 0 | 17.629 | 0 |
| ADRGL2009273 | 0 | 0 | 0 | 5.151 | 0 | 0 | 0 |
| ADRGL2012038 | 0 | 0 | 0 | 0 | 0 | 0 | 69.551 |
| ASTR01000009 | 0 | 0 | 0 | 0 | 0 | 0 | 88.342 |
| ASTR02000046 | 0 | 0 | 0 | 4.539 | 0 | 0 | 0 |
| ASTR02001806 | 0 | 0 | 0 | 5.305 | 0 | 0 | 0 |
| ASTR02002035 | 0 | 0 | 0 | 40.248 | 0 | 0 | 0 |
| ASTR02003632 | 0 | 0 | 0 | 15.405 | 0 | 0 | 14.056 |
| ASTR02004974 | 0 | 0 | 0 | 0 | 0 | 0 | 65.738 |
| ASTR02005687 | 9.662 | 0 | 0 | 0 | 0 | 0 | 0 |
| ASTR02009068 | 0 | 0 | 0 | 20.982 | 0 | 0 | 0 |
| ASTR02010819 | 0 | 0 | 0 | 2.495 | 0 | 0 | 0 |
| ASTR02012552 | 0 | 0 | 0 | 5.481 | 0 | 0 | 0 |
| ASTR02013585 | 0 | 0 | 0 | 1.808 | 0 | 0 | 0 |
| ASTR02015328 | 0 | 0 | 0 | 14.112 | 0 | 0 | 0 |
| BNGH42000360 | 4.090 | 0 | 0 | 0 | 0 | 0 | 0 |
| BNGH42000815 | 0 | 0 | 0 | 32.470 | 0 | 0 | 0 |
| BNGH42005017 | 0 | 0 | 0 | 32.470 | 0 | 0 | 0 |
| BNGH42005968 | 0 | 0 | 0 | 17.034 | 0 | 0 | 0 |
| BNGH42007460 | 0 | 0 | 0 | 7.473 | 0 | 0 | 0 |
| BNGH42007709 | 1.995 | 0 | 0 | 0 | 0 | 0 | 0 |
| BRACE1000115 | 1.623 | 0 | 0 | 0 | 0 | 0 | 0 |
| BRACE2001711 | 33.720 | 0 | 0 | 0 | 0 | 0 | 0 |
| BRACE2002441 | 0 | 0 | 0 | 4.176 | 0 | 0 | 0 |
| BRACE2003172 | 2.817 | 0 | 0 | 0 | 0 | 0 | 0 |
| BRACE2003254 | 0 | 20.545 | 0 | 3.357 | 0 | 0 | 0 |
| BRACE2003846 | 0 | 14.789 | 0 | 0 | 0 | 0 | 0 |
| BRACE2007567 | 0 | 31.488 | 0 | 0 | 0 | 0 | 0 |
| BRACE2007577 | 0 | 0 | 0 | 0 | 84.570 | 0 | 0 |
| BRACE2008358 | 19.643 | 0 | 0 | 0 | 0 | 0 | 0 |
| BRACE2008653 | 0 | 0 | 0 | 3.911 | 0 | 0 | 0 |
| BRACE2008968 | 0 | 13.195 | 0 | 0 | 0 | 0 | 0 |
| BRACE2009037 | 0 | 0 | 0 | 1.083 | 0 | 0 | 0 |
| BRACE2009291 | 11.466 | 0 | 0 | 0 | 0 | 0 | 44.754 |
| BRACE2019147 | 0 | 48.599 | 0 | 0 | 0 | 0 | 0 |
| BRACE2045772 | 0 | 0 | 0 | 0 | 0 | 0 | 97.945 |
| BRACE3004150 | 0 | 0 | 0 | 14.402 | 0 | 0 | 0 |
| BRACE3005938 | 0 | 0 | 0 | 0 | 0 | 25.009 | 0 |
| BRACE3010438 | 0 | 0 | 0 | 6.640 | 0 | 0 | 0 |
| BRAMY2000585 | 0 | 0 | 0 | 0 | 0 | 55.777 | 0 |
| BRAMY2004521 | 0 | 0 | 0 | 17.578 | 0 | 0 | 0 |
| BRAMY2015211 | 0 | 0 | 0 | 48.167 | 0 | 0 | 0 |
| BRAMY2019600 | 0 | 0 | 0 | 29.939 | 0 | 0 | 0 |
| BRAMY2019989 | 0 | 43.763 | 0 | 0 | 0 | 0 | 0 |
| BRAMY2021523 | 0 | 0 | 0 | 78.633 | 0 | 0 | 0 |
| BRAMY2028796 | 0 | 0 | 0 | 0 | 0 | 33.758 | 0 |
| BRAMY2032087 | 0 | 27.482 | 0 | 4.491 | 0 | 0 | 0 |
| BRAMY2040095 | 0 | 0 | 0 | 2.535 | 0 | 0 | 0 |
| BRAMY3004377 | 0 | 0 | 0 | 3.075 | 0 | 0 | 0 |
| BRAMY3010008 | 0 | 0 | 0 | 2.158 | 50.268 | 0 | 19.691 |
| BRAWH1000040 | 0 | 0 | 0 | 2.551 | 0 | 0 | 0 |
| BRAWH1000093 | 0 | 20.933 | 0 | 0 | 0 | 0 | 0 |
| BRAWH2000588 | 0 | 0 | 0 | 4.652 | 0 | 0 | 0 |
| BRAWH2000633 | 0 | 0 | 0 | 4.916 | 0 | 0 | 0 |
| BRAWH2000839 | 0 | 0 | 0 | 6.092 | 0 | 9.327 | 0 |
| BRAWH2000926 | 0 | 0 | 0 | 0 | 0 | 95.782 | 0 |
| BRAWH2001092 | 0 | 0 | 0 | 2.607 | 15.180 | 0 | 5.946 |
| BRAWH2001103 | 56.964 | 0 | 0 | 0 | 0 | 0 | 0 |
| BRAWH2001424 | 0 | 0 | 0 | 18.879 | 0 | 0 | 0 |
| BRAWH2001439 | 0 | 0 | 0 | 3.815 | 0 | 0 | 0 |
| BRAWH2004095 | 0 | 26.826 | 0 | 0 | 0 | 0 | 0 |
| BRAWH2005068 | 0 | 0 | 0 | 0 | 0 | 0 | 13.609 |
| BRAWH2007800 | 0 | 0 | 0 | 0 | 0 | 53.345 | 0 |
| BRAWH2014188 | 0 | 16.246 | 0 | 2.655 | 0 | 0 | 0 |
| BRAWH2014511 | 0 | 0 | 0 | 15.933 | 0 | 0 | 0 |
| BRAWH2016679 | 83.525 | 0 | 0 | 0 | 0 | 0 | 0 |
| BRAWH2017685 | 0 | 0 | 0 | 0 | 0 | 11.525 | 0 |
| BRAWH2018729 | 0 | 67.618 | 0 | 0 | 0 | 0 | 0 |
| BRAWH3016271 | 0 | 0 | 0 | 20 | 0 | 0 | 0 |
| BRAWH3018063 | 0 | 0 | 0 | 19.573 | 0 | 0 | 0 |
| BRCAN2018935 | 79.072 | 0 | 0 | 0 | 0 | 0 | 0 |
| BRHIP2000534 | 0 | 0 | 0 | 3.807 | 0 | 0 | 0 |
| BRHIP2007741 | 0 | 39.391 | 0 | 0 | 0 | 0 | 0 |
| BRHIP2011491 | 0 | 0 | 0 | 0 | 0 | 18.771 | 0 |
| BRHIP2022054 | 0 | 55.882 | 0 | 0 | 0 | 0 | 0 |
| BRHIP2023888 | 0 | 0 | 0 | 2.729 | 0 | 8.356 | 0 |
| BRHIP3007586 | 0 | 0 | 0 | 12.796 | 0 | 0 | 0 |
| BRSSN1000059 | 0 | 0 | 0 | 49.907 | 0 | 0 | 0 |
| BRSSN2001869 | 0 | 0 | 0 | 11.193 | 0 | 0 | 0 |
| BRSTN2011961 | 0 | 0 | 0 | 0 | 0 | 6.577 | 0 |
| BRSTN2012069 | 0 | 0 | 0 | 0.070 | 0.817 | 1.718 | 0 |
| BRSTN2016470 | 1.897 | 0 | 0 | 0.812 | 0 | 0 | 0 |
| BRSTN2016892 | 0 | 67.714 | 0 | 0 | 0 | 0 | 0 |
| BRTHA2007998 | 0 | 0 | 0 | 0 | 74.482 | 0 | 0 |
| BRTHA2010097 | 0 | 0 | 0 | 0 | 0 | 95.344 | 0 |
| BRTHA2017972 | 0 | 0 | 0 | 62.573 | 0 | 0 | 0 |
| BRTHA3003023 | 0 | 0 | 0 | 14.988 | 0 | 45.898 | 0 |
| BRTHA3003074 | 0 | 0 | 0 | 41.752 | 0 | 0 | 0 |
| BRTHA3003736 | 18.647 | 0 | 0 | 0 | 0 | 0 | 0 |
| CD34C3000252 | 0 | 0 | 0 | 3.043 | 0 | 18.640 | 0 |
| CTONG1000087 | 0 | 23.730 | 0 | 0 | 0 | 0 | 0 |
| CTONG1000218 | 0 | 0 | 0 | 1.786 | 41.589 | 0 | 0 |
| CTONG1000241 | 18.389 | 0 | 0 | 7.866 | 0 | 0 | 0 |
| CTONG2000508 | 6.845 | 0 | 0 | 0 | 0 | 0 | 0 |
| CTONG2002073 | 12.697 | 0 | 0 | 0 | 0 | 0 | 0 |
| CTONG2002803 | 0 | 0 | 0 | 5.460 | 0 | 0 | 0 |
| CTONG2003517 | 0 | 0 | 0 | 41.570 | 0 | 0 | 0 |
| CTONG2004487 | 8.199 | 0 | 0 | 0 | 0 | 0 | 0 |
| CTONG2005028 | 0 | 0 | 0 | 25.383 | 0 | 0 | 0 |
| CTONG2005553 | 0 | 16.251 | 0 | 0 | 0 | 0 | 24.229 |
| CTONG2005585 | 0 | 0 | 0 | 0 | 0 | 0 | 94.782 |
| CTONG2006004 | 0 | 0 | 0 | 0 | 0 | 0 | 35.710 |
| CTONG2006235 | 14.200 | 0 | 0 | 0 | 0 | 0 | 0 |
| CTONG2006449 | 0 | 0 | 0 | 32.597 | 0 | 0 | 0 |
| CTONG2006611 | 0 | 0 | 0 | 26.777 | 0 | 0 | 0 |
| CTONG2006932 | 9.539 | 0 | 0 | 0 | 0 | 0 | 0 |
| CTONG2008398 | 0 | 0 | 0 | 2.835 | 0 | 0 | 0 |
| CTONG2010348 | 15.350 | 0 | 0 | 0 | 0 | 0 | 0 |
| CTONG2012158 | 0 | 0 | 0 | 33.828 | 0 | 0 | 0 |
| CTONG2012401 | 0 | 0 | 0 | 15.599 | 0 | 0 | 0 |
| CTONG2012452 | 0 | 0 | 0 | 0 | 0 | 0 | 12.048 |
| CTONG2012879 | 0 | 0 | 0 | 12.610 | 0 | 0 | 0 |
| CTONG2013907 | 0 | 0 | 0 | 7.994 | 0 | 0 | 0 |
| CTONG2013985 | 0 | 0 | 0 | 21.715 | 0 | 0 | 0 |
| CTONG2015091 | 0 | 0 | 0 | 0 | 0 | 18.442 | 0 |
| CTONG2016575 | 0 | 0 | 0 | 1.844 | 0 | 0 | 0 |
| CTONG2017500 | 0 | 0 | 0 | 9.823 | 0 | 0 | 0 |
| CTONG2017998 | 0 | 0 | 0 | 9.289 | 0 | 0 | 0 |
| CTONG2019590 | 0 | 0 | 0 | 39.901 | 0 | 0 | 0 |
| CTONG2019822 | 0 | 73.780 | 0 | 0 | 0 | 0 | 0 |
| CTONG2020484 | 0 | 0 | 0 | 2.180 | 0 | 0 | 0 |
| CTONG2022835 | 0 | 0 | 0 | 6.362 | 0 | 0 | 0 |
| CTONG3008894 | 0 | 0 | 0 | 5.391 | 0 | 0 | 0 |
| DFNES1000150 | 0 | 0 | 0 | 20.705 | 0 | 0 | 0 |
| DFNES2000011 | 0 | 0 | 0 | 0 | 47.230 | 0 | 0 |
| DFNES2000268 | 0 | 25.058 | 0 | 0 | 0 | 0 | 0 |
| DFNES2000292 | 0 | 0 | 0 | 13.916 | 0 | 0 | 0 |
| DFNES2000335 | 0 | 0 | 0 | 17.567 | 0 | 0 | 0 |
| DFNES2007299 | 0 | 74.528 | 0 | 0 | 0 | 0 | 0 |
| FCBBF1000025 | 0 | 0 | 0 | 23.732 | 0 | 0 | 0 |
| FCBBF1000027 | 0 | 0 | 0 | 4.075 | 0 | 0 | 0 |
| FCBBF1000077 | 0 | 0 | 0 | 0 | 0 | 0 | 27.401 |
| FCBBF1000197 | 0 | 0 | 0 | 3.961 | 0 | 0 | 0 |
| FCBBF1000294 | 0 | 0 | 0 | 3.992 | 0 | 0 | 0 |
| FCBBF1000367 | 0 | 0 | 0 | 5.633 | 0 | 0 | 0 |
| FCBBF1000466 | 0 | 14.452 | 0 | 0 | 0 | 0 | 0 |
| FCBBF2000591 | 0 | 0 | 92.989 | 0 | 0 | 0 | 0 |
| FCBBF2001538 | 0 | 0 | 0 | 0 | 0 | 17.303 | 0 |
| FCBBF2005658 | 0 | 0 | 0 | 28.860 | 0 | 0 | 0 |
| FCBBF3003800 | 0 | 0 | 0 | 1.461 | 0 | 0 | 0 |
| FCBBF3004473 | 0 | 0 | 0 | 8.520 | 0 | 0 | 0 |
| FCBBF3005330 | 0 | 0 | 0 | 2.569 | 0 | 0 | 0 |
| FCBBF3005497 | 0 | 17.840 | 0 | 5.830 | 0 | 0 | 0 |
| FCBBF3009541 | 0 | 9.355 | 0 | 1.529 | 0 | 0 | 0 |
| FCBBF3022593 | 0 | 0 | 0 | 25.691 | 0 | 0 | 0 |
| FCBBF3023667 | 1.151 | 0 | 0 | 1.477 | 0 | 0 | 4.493 |
| FCBBF4000446 | 0 | 0 | 0 | 2.785 | 0 | 0 | 0 |
| FEBRA2000105 | 12.434 | 0 | 0 | 0 | 0 | 0 | 0 |
| FEBRA2000581 | 0 | 0 | 0 | 2.950 | 0 | 0 | 0 |
| FEBRA2000733 | 0 | 0 | 0 | 0.625 | 0 | 3.827 | 11.403 |
| FEBRA2002527 | 0 | 64.989 | 0 | 10.620 | 0 | 0 | 0 |
| FEBRA2002933 | 3.208 | 8.398 | 0 | 2.744 | 0 | 0 | 12.520 |
| FEBRA2003822 | 47.676 | 0 | 0 | 0 | 0 | 0 | 0 |
| FEBRA2003833 | 0 | 0 | 0 | 6.412 | 0 | 0 | 0 |
| FEBRA2003926 | 6.051 | 0 | 0 | 2.588 | 0 | 15.853 | 0 |
| FEBRA2004224 | 0 | 0 | 0 | 4.293 | 0 | 0 | 0 |
| FEBRA2005572 | 0 | 40.433 | 0 | 0 | 0 | 0 | 0 |
| FEBRA2005752 | 0 | 0 | 0 | 15.434 | 0 | 0 | 0 |
| FEBRA2006270 | 0 | 0 | 0 | 0 | 0 | 26.548 | 0 |
| FEBRA2006485 | 0 | 0 | 0 | 11.280 | 0 | 0 | 0 |
| FEBRA2007801 | 0 | 0 | 0 | 18.308 | 0 | 0 | 0 |
| FEBRA2008081 | 0 | 0 | 0 | 2.626 | 0 | 0 | 0 |
| FEBRA2008302 | 0 | 0 | 0 | 11.839 | 0 | 0 | 0 |
| FEBRA2008583 | 1.146 | 0 | 0 | 0 | 0 | 0 | 0 |
| FEBRA2009022 | 0 | 0 | 0 | 12.383 | 0 | 0 | 0 |
| FEBRA2019298 | 0 | 0 | 0 | 0 | 0 | 0 | 81.897 |
| FEBRA2022504 | 0 | 0 | 0 | 6.090 | 0 | 0 | 0 |
| FELIV1000153 | 0 | 0 | 0 | 1.223 | 0 | 0 | 5.580 |
| HCASM2000363 | 0 | 0 | 0 | 7.565 | 0 | 0 | 0 |
| HCHON1000015 | 0 | 0 | 0 | 5.780 | 0 | 0 | 0 |
| HCHON1000030 | 0 | 4.116 | 0 | 0.673 | 0 | 4.119 | 0 |
| HCHON1000191 | 0 | 0 | 0 | 0 | 41.718 | 10.969 | 0 |
| HCHON2000028 | 0 | 0 | 0 | 35.299 | 0 | 0 | 0 |
| HCHON2000056 | 0 | 0 | 0 | 3.155 | 0 | 0 | 0 |
| HCHON2000226 | 0 | 0 | 0 | 0 | 0 | 9.158 | 0 |
| HCHON2000244 | 0 | 0 | 0 | 4.878 | 0 | 0 | 0 |
| HCHON2000295 | 0 | 0 | 0 | 0 | 37.831 | 0 | 0 |
| HCHON2000364 | 0 | 0 | 0 | 0 | 38.398 | 10.096 | 0 |
| HCHON2000373 | 0 | 0 | 0 | 15.033 | 0 | 0 | 0 |
| HCHON2000508 | 0 | 0 | 0 | 1.385 | 0 | 0 | 0 |
| HCHON2000676 | 0 | 0 | 0 | 22.111 | 0 | 0 | 0 |
| HCHON2000705 | 0 | 0 | 0 | 36.949 | 0 | 0 | 0 |
| HCHON2000751 | 0 | 0 | 0 | 13.239 | 0 | 0 | 0 |
| HCHON2000819 | 0 | 0 | 0 | 27.167 | 0 | 0 | 0 |
| HCHON2001108 | 0 | 0 | 0 | 0 | 0 | 0 | 72.243 |
| HCHON2001200 | 0 | 9.815 | 0 | 1.604 | 0 | 0 | 0 |
| HCHON2001217 | 0 | 0 | 0 | 7.719 | 0 | 0 | 0 |
| HCHON2001598 | 0 | 0 | 0 | 27.029 | 0 | 0 | 0 |
| HEART2000541 | 11.598 | 0 | 0 | 0 | 0 | 0 | 0 |
| HHDPC1000083 | 0 | 0 | 0 | 0 | 0 | 22.229 | 0 |
| HHDPC2000455 | 0 | 0 | 0 | 14.264 | 47.462 | 12.480 | 0 |
| HHDPC2003439 | 0 | 0 | 0 | 5.659 | 0 | 0 | 0 |
| HHDPC2003983 | 2.414 | 0 | 0 | 0 | 0 | 0 | 0 |
| HLUNG1000064 | 0 | 0 | 0 | 25.250 | 0 | 0 | 0 |
| HLUNG2000004 | 0 | 0 | 0 | 9.379 | 0 | 0 | 0 |
| HLUNG2001507 | 0 | 0 | 0 | 18.568 | 0 | 0 | 0 |
| HLUNG2001518 | 0 | 0 | 0 | 4.055 | 0 | 0 | 0 |
| HLUNG2004154 | 0 | 0 | 0 | 38.561 | 0 | 0 | 0 |
| HLUNG2004388 | 0 | 0 | 0 | 16.557 | 0 | 0 | 0 |
| HLUNG2007210 | 0 | 0 | 0 | 0 | 0 | 0 | 69.546 |
| HSYRA1000062 | 0 | 0 | 0 | 1.588 | 0 | 0 | 0 |
| HSYRA1000119 | 0 | 0 | 0 | 1.705 | 0 | 0 | 0 |
| HSYRA1000152 | 10.339 | 0 | 0 | 0 | 0 | 0 | 0 |
| HSYRA2000159 | 0 | 0 | 0 | 0.447 | 10.413 | 0 | 0 |
| HSYRA2000255 | 0 | 0 | 0 | 1.664 | 0 | 30.570 | 0 |
| HSYRA2000332 | 0 | 0 | 0 | 0 | 0 | 17.713 | 0 |
| HSYRA2000925 | 0 | 0 | 0 | 0.822 | 0 | 5.032 | 0 |
| HSYRA2001103 | 0 | 0 | 0 | 3.145 | 0 | 0 | 0 |
| HSYRA2001138 | 0 | 0 | 0 | 1.891 | 0 | 0 | 0 |
| HSYRA2001225 | 0 | 0 | 0 | 5.482 | 0 | 0 | 0 |
| HSYRA2001476 | 0 | 0 | 0 | 3.580 | 0 | 21.927 | 0 |
| HSYRA2001574 | 0 | 0 | 0 | 0 | 0 | 51.263 | 0 |
| HSYRA2001615 | 0 | 0 | 0 | 7.690 | 0 | 0 | 0 |
| HSYRA2001621 | 0 | 0 | 0 | 1.361 | 0 | 0 | 6.208 |
| HSYRA2007241 | 0 | 0 | 0 | 42.666 | 0 | 0 | 0 |
| HSYRA2007667 | 0 | 0 | 0 | 33.160 | 0 | 0 | 0 |
| IMR321000219 | 0 | 6.369 | 0 | 0 | 0 | 6.374 | 0 |
| IMR321000253 | 0 | 0 | 0 | 0 | 0 | 0 | 34.459 |
| IMR322000072 | 0 | 0 | 0 | 0 | 0 | 0 | 27.147 |
| IMR322000121 | 0 | 0 | 0 | 8.267 | 0 | 0 | 0 |
| IMR322000243 | 0 | 38.938 | 0 | 3.181 | 0 | 0 | 0 |
| IMR322000918 | 0 | 0 | 0 | 10.869 | 0 | 0 | 0 |
| IMR322000935 | 0 | 0 | 0 | 5.552 | 0 | 0 | 0 |
| IMR322000973 | 0 | 18.298 | 0 | 0 | 0 | 0 | 27.281 |
| IMR322001435 | 0 | 0 | 0 | 6.967 | 0 | 0 | 0 |
| IMR322001584 | 0 | 0 | 0 | 4.629 | 0 | 0 | 0 |
| IMR322001600 | 0 | 3.654 | 0 | 0 | 0 | 3.657 | 0 |
| IMR322001710 | 0 | 0 | 0 | 21.575 | 0 | 0 | 0 |
| IMR322012529 | 40.820 | 0 | 0 | 0 | 0 | 0 | 0 |
| KIDNE2000252 | 0 | 19.394 | 0 | 0 | 0 | 0 | 0 |
| KIDNE2000574 | 0 | 0 | 0 | 0 | 0 | 16.999 | 0 |
| KIDNE2001467 | 0 | 0 | 0 | 1.933 | 0 | 0 | 0 |
| KIDNE2002252 | 0 | 49.468 | 0 | 0 | 0 | 0 | 0 |
| KIDNE2002265 | 0 | 0 | 0 | 0 | 0 | 0 | 61.533 |
| KIDNE2002882 | 71.317 | 0 | 0 | 0 | 0 | 0 | 0 |
| KIDNE2003941 | 0 | 0 | 0 | 0 | 43.564 | 0 | 0 |
| KIDNE2004534 | 0 | 0 | 0 | 13.841 | 0 | 0 | 0 |
| KIDNE2006248 | 5.390 | 0 | 0 | 0 | 0 | 0 | 0 |
| KIDNE2006880 | 27.829 | 0 | 0 | 0 | 0 | 0 | 0 |
| KIDNE2008048 | 4.650 | 0 | 0 | 3.978 | 0 | 0 | 0 |
| KIDNE2008116 | 0 | 0 | 0 | 4.302 | 0 | 0 | 0 |
| KIDNE2013845 | 0 | 0 | 0 | 0 | 0 | 25.383 | 0 |
| KIDNE2014290 | 6.077 | 0 | 0 | 0 | 0 | 0 | 0 |
| LIVER1000017 | 54.117 | 0 | 0 | 0 | 0 | 0 | 0 |
| LIVER1000050 | 100 | 0 | 0 | 0 | 0 | 0 | 0 |
| LIVER1000055 | 100 | 0 | 0 | 0 | 0 | 0 | 0 |
| LIVER1000058 | 100 | 0 | 0 | 0 | 0 | 0 | 0 |
| LIVER1000063 | 100 | 0 | 0 | 0 | 0 | 0 | 0 |
| LIVER1000067 | 60.172 | 0 | 0 | 0 | 0 | 0 | 0 |
| LIVER1000073 | 100 | 0 | 0 | 0 | 0 | 0 | 0 |
| LIVER1000079 | 30.377 | 0 | 0 | 0 | 0 | 0 | 0 |
| LIVER1000082 | 100 | 0 | 0 | 0 | 0 | 0 | 0 |
| LIVER1000099 | 100 | 0 | 0 | 0 | 0 | 0 | 0 |
| LIVER1000104 | 21.438 | 0 | 0 | 0 | 0 | 0 | 0 |
| LIVER1000111 | 54.743 | 0 | 0 | 0 | 0 | 0 | 0 |
| LIVER1000126 | 66.455 | 0 | 0 | 0 | 0 | 0 | 0 |
| LIVER1000132 | 4.338 | 0 | 0 | 0 | 0 | 0 | 0 |
| LIVER1000139 | 100 | 0 | 0 | 0 | 0 | 0 | 0 |
| LIVER1000155 | 100 | 0 | 0 | 0 | 0 | 0 | 0 |
| LIVER1000165 | 100 | 0 | 0 | 0 | 0 | 0 | 0 |
| LIVER1000175 | 100 | 0 | 0 | 0 | 0 | 0 | 0 |
| LIVER1000224 | 100 | 0 | 0 | 0 | 0 | 0 | 0 |
| LIVER1000230 | 50.270 | 0 | 0 | 0 | 0 | 0 | 0 |
| LIVER1000278 | 100 | 0 | 0 | 0 | 0 | 0 | 0 |
| LIVER1000303 | 77.605 | 0 | 0 | 0 | 0 | 0 | 0 |
| LIVER1000397 | 100 | 0 | 0 | 0 | 0 | 0 | 0 |
| LIVER1000421 | 71.069 | 0 | 0 | 0 | 0 | 0 | 0 |
| LIVER1000433 | 100 | 0 | 0 | 0 | 0 | 0 | 0 |
| LIVER1000479 | 100 | 0 | 0 | 0 | 0 | 0 | 0 |
| LIVER1000482 | 100 | 0 | 0 | 0 | 0 | 0 | 0 |
| LIVER1000542 | 28.522 | 0 | 0 | 0 | 0 | 0 | 0 |
| LIVER2000003 | 100 | 0 | 0 | 0 | 0 | 0 | 0 |
| LIVER2000033 | 11.991 | 0 | 0 | 10.259 | 0 | 31.416 | 0 |
| LIVER2000037 | 13.711 | 0 | 0 | 0 | 0 | 0 | 0 |
| LIVER2000158 | 59.936 | 0 | 0 | 0 | 0 | 0 | 0 |
| LIVER2000216 | 100 | 0 | 0 | 0 | 0 | 0 | 0 |
| LIVER2000237 | 100 | 0 | 0 | 0 | 0 | 0 | 0 |
| LIVER2000247 | 100 | 0 | 0 | 0 | 0 | 0 | 0 |
| LIVER2000360 | 100 | 0 | 0 | 0 | 0 | 0 | 0 |
| LIVER2000416 | 19.614 | 0 | 0 | 0 | 0 | 0 | 0 |
| LIVER2000446 | 35.657 | 0 | 0 | 0 | 0 | 0 | 0 |
| LIVER2000515 | 100 | 0 | 0 | 0 | 0 | 0 | 0 |
| LIVER2000592 | 100 | 0 | 0 | 0 | 0 | 0 | 0 |
| LIVER2000626 | 100 | 0 | 0 | 0 | 0 | 0 | 0 |
| LIVER2000682 | 100 | 0 | 0 | 0 | 0 | 0 | 0 |
| LIVER2000769 | 100 | 0 | 0 | 0 | 0 | 0 | 0 |
| LIVER2000775 | 100 | 0 | 0 | 0 | 0 | 0 | 0 |
| LIVER2001051 | 100 | 0 | 0 | 0 | 0 | 0 | 0 |
| LIVER2001076 | 100 | 0 | 0 | 0 | 0 | 0 | 0 |
| LIVER2001099 | 100 | 0 | 0 | 0 | 0 | 0 | 0 |
| LIVER2001113 | 92.988 | 0 | 0 | 0 | 0 | 0 | 0 |
| LIVER2001164 | 100 | 0 | 0 | 0 | 0 | 0 | 0 |
| LIVER2001191 | 100 | 0 | 0 | 0 | 0 | 0 | 0 |
| LIVER2001265 | 89.587 | 0 | 0 | 0 | 0 | 0 | 0 |
| LIVER2001329 | 100 | 0 | 0 | 0 | 0 | 0 | 0 |
| LIVER2001389 | 100 | 0 | 0 | 0 | 0 | 0 | 0 |
| LIVER2001461 | 100 | 0 | 0 | 0 | 0 | 0 | 0 |
| LIVER2001539 | 43.167 | 0 | 0 | 0 | 0 | 0 | 0 |
| LIVER2001608 | 22.768 | 0 | 0 | 0 | 0 | 0 | 0 |
| LIVER2001835 | 70.989 | 0 | 0 | 0 | 0 | 0 | 0 |
| LIVER2002638 | 70.623 | 0 | 0 | 0 | 0 | 0 | 0 |
| LIVER2002644 | 100 | 0 | 0 | 0 | 0 | 0 | 0 |
| LIVER2002660 | 100 | 0 | 0 | 0 | 0 | 0 | 0 |
| LIVER2002702 | 100 | 0 | 0 | 0 | 0 | 0 | 0 |
| LIVER2002842 | 16.548 | 0 | 0 | 0 | 0 | 0 | 0 |
| LIVER2003008 | 89.587 | 0 | 0 | 0 | 0 | 0 | 0 |
| LIVER2003065 | 55.769 | 0 | 0 | 0 | 0 | 0 | 0 |
| LIVER2003234 | 87.905 | 0 | 0 | 0 | 0 | 0 | 0 |
| LIVER2003511 | 71.317 | 0 | 0 | 0 | 0 | 0 | 0 |
| LIVER2003524 | 100 | 0 | 0 | 0 | 0 | 0 | 0 |
| LIVER2003568 | 100 | 0 | 0 | 0 | 0 | 0 | 0 |
| LIVER2003581 | 29.021 | 0 | 0 | 0 | 0 | 0 | 0 |
| LIVER2003800 | 9.037 | 0 | 0 | 0 | 0 | 0 | 0 |
| LIVER2003854 | 100 | 0 | 0 | 0 | 0 | 0 | 0 |
| LIVER2004074 | 100 | 0 | 0 | 0 | 0 | 0 | 0 |
| LIVER2004392 | 100 | 0 | 0 | 0 | 0 | 0 | 0 |
| LIVER2004514 | 88.557 | 0 | 0 | 0 | 0 | 0 | 0 |
| LIVER2004565 | 100 | 0 | 0 | 0 | 0 | 0 | 0 |
| LIVER2005028 | 65.496 | 0 | 0 | 0 | 0 | 0 | 0 |
| LIVER2005198 | 100 | 0 | 0 | 0 | 0 | 0 | 0 |
| LIVER2005218 | 42.758 | 0 | 0 | 0 | 0 | 0 | 0 |
| LIVER2005376 | 100 | 0 | 0 | 0 | 0 | 0 | 0 |
| LIVER2005385 | 100 | 0 | 0 | 0 | 0 | 0 | 0 |
| LIVER2005512 | 100 | 0 | 0 | 0 | 0 | 0 | 0 |
| LIVER2005520 | 100 | 0 | 0 | 0 | 0 | 0 | 0 |
| LIVER2005527 | 100 | 0 | 0 | 0 | 0 | 0 | 0 |
| LIVER2005544 | 100 | 0 | 0 | 0 | 0 | 0 | 0 |
| LIVER2005625 | 100 | 0 | 0 | 0 | 0 | 0 | 0 |
| LIVER2005728 | 100 | 0 | 0 | 0 | 0 | 0 | 0 |
| LIVER2005789 | 15.607 | 0 | 0 | 0 | 0 | 0 | 0 |
| LIVER2005973 | 89.470 | 0 | 0 | 0 | 0 | 0 | 0 |
| LIVER2005981 | 24.820 | 0 | 0 | 0 | 0 | 65.025 | 0 |
| LIVER2006006 | 6.164 | 0 | 0 | 5.274 | 0 | 0 | 0 |
| LIVER2006251 | 100 | 0 | 0 | 0 | 0 | 0 | 0 |
| LIVER2006410 | 88.658 | 0 | 0 | 0 | 0 | 0 | 0 |
| LIVER2006469 | 100 | 0 | 0 | 0 | 0 | 0 | 0 |
| LIVER2006644 | 100 | 0 | 0 | 0 | 0 | 0 | 0 |
| LIVER2006764 | 100 | 0 | 0 | 0 | 0 | 0 | 0 |
| LIVER2007415 | 100 | 0 | 0 | 0 | 0 | 0 | 0 |
| LIVER2007548 | 100 | 0 | 0 | 0 | 0 | 0 | 0 |
| LIVER2007568 | 100 | 0 | 0 | 0 | 0 | 0 | 0 |
| LIVER2007721 | 100 | 0 | 0 | 0 | 0 | 0 | 0 |
| LIVER2007783 | 17.786 | 0 | 0 | 0 | 0 | 0 | 0 |
| LIVER2008053 | 100 | 0 | 0 | 0 | 0 | 0 | 0 |
| LIVER2008465 | 57.368 | 0 | 0 | 0 | 0 | 0 | 0 |
| LIVER2008473 | 100 | 0 | 0 | 0 | 0 | 0 | 0 |
| LIVER2008580 | 100 | 0 | 0 | 0 | 0 | 0 | 0 |
| LIVER2008706 | 38.666 | 0 | 0 | 0 | 0 | 0 | 0 |
| LIVER2008751 | 75.266 | 0 | 0 | 0 | 0 | 0 | 0 |
| LIVER2008945 | 100 | 0 | 0 | 0 | 0 | 0 | 0 |
| LIVER2008998 | 100 | 0 | 0 | 0 | 0 | 0 | 0 |
| LIVER2009110 | 100 | 0 | 0 | 0 | 0 | 0 | 0 |
| LIVER2009118 | 100 | 0 | 0 | 0 | 0 | 0 | 0 |
| LIVER2009554 | 100 | 0 | 0 | 0 | 0 | 0 | 0 |
| LYMPB1000141 | 0 | 97.200 | 0 | 0 | 0 | 0 | 0 |
| LYMPB1000158 | 0 | 100 | 0 | 0 | 0 | 0 | 0 |
| LYMPB2000083 | 0 | 100 | 0 | 0 | 0 | 0 | 0 |
| MAMGL1000017 | 0 | 0 | 98.615 | 0 | 0 | 0 | 0 |
| MAMGL1000032 | 0 | 0 | 52.261 | 0 | 0 | 0 | 0 |
| MAMGL1000035 | 0 | 13.709 | 65.316 | 0.747 | 0 | 4.573 | 0 |
| MAMGL1000083 | 0 | 0 | 93.965 | 0 | 0 | 0 | 0 |
| MAMGL1000096 | 0 | 0 | 97.735 | 0 | 0 | 0 | 0 |
| MAMGL1000100 | 0 | 0 | 95.758 | 0 | 0 | 0 | 0 |
| MAMGL1000132 | 0 | 0 | 100 | 0 | 0 | 0 | 0 |
| MAMGL1000151 | 0 | 0 | 100 | 0 | 0 | 0 | 0 |
| MAMGL1000173 | 0 | 0 | 85.972 | 0 | 0 | 0 | 0 |
| MAMGL1000178 | 0 | 0 | 99.213 | 0 | 0 | 0 | 0 |
| MAMGL1000182 | 0 | 0 | 100 | 0 | 0 | 0 | 0 |
| MAMGL1000184 | 0 | 0 | 100 | 0 | 0 | 0 | 0 |
| MESAN1000032 | 0 | 0 | 0 | 76.979 | 0 | 0 | 0 |
| MESAN1000035 | 0 | 0 | 0 | 100 | 0 | 0 | 0 |
| MESAN1000050 | 0 | 0 | 0 | 11.905 | 0 | 0 | 0 |
| MESAN1000079 | 0 | 0 | 0 | 53.297 | 0 | 0 | 0 |
| MESAN1000080 | 0 | 0 | 0 | 10.589 | 0 | 0 | 0 |
| MESAN1000101 | 0 | 0 | 0 | 21.403 | 0 | 0 | 0 |
| MESAN1000121 | 0 | 0 | 0 | 100 | 0 | 0 | 0 |
| MESAN1000126 | 0 | 0 | 0 | 6.622 | 0 | 0 | 0 |
| MESAN1000147 | 0 | 0 | 0 | 38.021 | 0 | 0 | 0 |
| MESAN1000180 | 0 | 0 | 0 | 100 | 0 | 0 | 0 |
| MESAN2000023 | 0 | 0 | 0 | 100 | 0 | 0 | 0 |
| MESAN2000026 | 0 | 0 | 0 | 100 | 0 | 0 | 0 |
| MESAN2000067 | 0 | 0 | 0 | 66.746 | 0 | 0 | 0 |
| MESAN2000092 | 0 | 0 | 0 | 32.812 | 0 | 0 | 0 |
| MESAN2000149 | 0 | 0 | 0 | 9.109 | 0 | 0 | 0 |
| MESAN2000167 | 0 | 0 | 0 | 100 | 0 | 0 | 0 |
| MESAN2000264 | 0 | 0 | 0 | 29.229 | 0 | 0 | 0 |
| MESAN2000267 | 0 | 0 | 0 | 1.518 | 0 | 9.300 | 0 |
| MESAN2000291 | 0 | 0 | 0 | 85.013 | 0 | 0 | 0 |
| MESAN2000337 | 0 | 0 | 0 | 29.402 | 0 | 0 | 0 |
| MESAN2000434 | 0 | 0 | 0 | 85.013 | 0 | 0 | 0 |
| MESAN2000457 | 0 | 0 | 0 | 29.370 | 0 | 0 | 0 |
| MESAN2000462 | 0 | 0 | 0 | 100 | 0 | 0 | 0 |
| MESAN2000501 | 0 | 0 | 0 | 11.125 | 0 | 0 | 0 |
| MESAN2000572 | 0 | 0 | 0 | 7.582 | 0 | 0 | 0 |
| MESAN2000608 | 6.817 | 0 | 0 | 5.832 | 0 | 0 | 0 |
| MESAN2000620 | 0 | 0 | 0 | 67.570 | 0 | 0 | 0 |
| MESAN2000711 | 0 | 0 | 0 | 100 | 0 | 0 | 0 |
| MESAN2000815 | 0 | 0 | 0 | 57.898 | 0 | 0 | 0 |
| MESAN2000894 | 0 | 0 | 0 | 75.663 | 0 | 0 | 0 |
| MESAN2000909 | 0 | 0 | 0 | 61.441 | 0 | 0 | 0 |
| MESAN2001154 | 0 | 0 | 0 | 4.940 | 0 | 0 | 0 |
| MESAN2001450 | 0 | 0 | 0 | 10.694 | 0 | 0 | 0 |
| MESAN2001627 | 0 | 0 | 0 | 48.501 | 0 | 0 | 0 |
| MESAN2001770 | 0 | 0 | 0 | 100 | 0 | 0 | 0 |
| MESAN2001979 | 0 | 0 | 0 | 100 | 0 | 0 | 0 |
| MESAN2001980 | 0 | 0 | 0 | 50.273 | 0 | 0 | 0 |
| MESAN2002086 | 0 | 0 | 0 | 3.087 | 0 | 0 | 0 |
| MESAN2002113 | 0 | 0 | 0 | 100 | 0 | 0 | 0 |
| MESAN2002122 | 0 | 0 | 0 | 32.891 | 0 | 0 | 0 |
| MESAN2002147 | 0 | 0 | 0 | 100 | 0 | 0 | 0 |
| MESAN2002186 | 0 | 0 | 0 | 8.128 | 0 | 0 | 0 |
| MESAN2002424 | 0 | 0 | 0 | 75.663 | 0 | 0 | 0 |
| MESAN2002519 | 0 | 0 | 0 | 17.197 | 0 | 0 | 0 |
| MESAN2002687 | 0 | 0 | 0 | 100 | 0 | 0 | 0 |
| MESAN2002709 | 0 | 0 | 0 | 100 | 0 | 0 | 0 |
| MESAN2002724 | 0 | 0 | 0 | 13.678 | 0 | 0 | 0 |
| MESAN2002790 | 0 | 0 | 0 | 18.138 | 0 | 0 | 0 |
| MESAN2002844 | 0 | 0 | 0 | 26.869 | 0 | 0 | 0 |
| MESAN2002940 | 0 | 0 | 0 | 11.793 | 0 | 0 | 0 |
| MESAN2002978 | 0 | 0 | 0 | 100 | 0 | 0 | 0 |
| MESAN2003035 | 0 | 0 | 0 | 53.150 | 0 | 0 | 0 |
| MESAN2003037 | 0 | 0 | 0 | 100 | 0 | 0 | 0 |
| MESAN2003039 | 0 | 0 | 0 | 60.362 | 0 | 0 | 0 |
| MESAN2003058 | 0 | 0 | 0 | 22.208 | 0 | 0 | 0 |
| MESAN2003101 | 0 | 0 | 0 | 100 | 0 | 0 | 0 |
| MESAN2003190 | 0 | 0 | 0 | 65.620 | 0 | 0 | 0 |
| MESAN2003322 | 0 | 0 | 0 | 100 | 0 | 0 | 0 |
| MESAN2003444 | 0 | 0 | 0 | 13.813 | 0 | 0 | 0 |
| MESAN2003490 | 0 | 0 | 0 | 100 | 0 | 0 | 0 |
| MESAN2003529 | 0 | 0 | 0 | 100 | 0 | 0 | 0 |
| MESAN2003622 | 0 | 0 | 0 | 2.228 | 0 | 0 | 0 |
| MESAN2003646 | 0 | 0 | 0 | 76.979 | 0 | 0 | 0 |
| MESAN2003662 | 0 | 0 | 0 | 100 | 0 | 0 | 0 |
| MESAN2003709 | 0 | 0 | 0 | 30.755 | 0 | 0 | 0 |
| MESAN2003851 | 0 | 0 | 0 | 100 | 0 | 0 | 0 |
| MESAN2004138 | 0 | 0 | 0 | 100 | 0 | 0 | 0 |
| MESAN2004288 | 0 | 0 | 0 | 19.269 | 0 | 0 | 0 |
| MESAN2004575 | 0 | 0 | 0 | 23.931 | 0 | 0 | 0 |
| MESAN2005284 | 0 | 0 | 0 | 17.981 | 0 | 0 | 0 |
| MESAN2005303 | 0 | 0 | 0 | 29.377 | 0 | 0 | 0 |
| MESAN2005371 | 0 | 0 | 0 | 100 | 0 | 0 | 0 |
| MESAN2005633 | 0 | 0 | 0 | 31.828 | 0 | 0 | 0 |
| MESAN2005689 | 0 | 0 | 0 | 23.008 | 0 | 0 | 0 |
| MESAN2005724 | 0 | 0 | 0 | 100 | 0 | 0 | 0 |
| MESAN2005766 | 0 | 0 | 0 | 3.657 | 0 | 0 | 0 |
| MESAN2005808 | 0 | 0 | 0 | 100 | 0 | 0 | 0 |
| MESAN2005811 | 0 | 0 | 0 | 100 | 0 | 0 | 0 |
| MESAN2005957 | 0 | 0 | 0 | 36.616 | 0 | 0 | 0 |
| MESAN2005958 | 0 | 0 | 0 | 9.986 | 0 | 0 | 0 |
| MESAN2006022 | 0 | 0 | 0 | 100 | 0 | 0 | 0 |
| MESAN2006043 | 0 | 0 | 0 | 59.068 | 0 | 0 | 0 |
| MESAN2006328 | 0 | 0 | 0 | 100 | 0 | 0 | 0 |
| MESAN2006401 | 0 | 0 | 0 | 6.708 | 0 | 0 | 0 |
| MESAN2006563 | 0 | 0 | 0 | 5.121 | 0 | 0 | 0 |
| MESAN2006580 | 0 | 0 | 0 | 75.663 | 0 | 0 | 0 |
| MESAN2006599 | 0 | 0 | 0 | 100 | 0 | 0 | 0 |
| MESAN2006743 | 0 | 0 | 0 | 28.586 | 0 | 0 | 0 |
| MESAN2006953 | 0 | 0 | 0 | 25.426 | 0 | 0 | 0 |
| MESAN2006971 | 0 | 0 | 0 | 22.281 | 0 | 0 | 0 |
| MESAN2007032 | 0 | 0 | 0 | 100 | 0 | 0 | 0 |
| MESAN2007440 | 0 | 0 | 0 | 100 | 0 | 0 | 0 |
| MESAN2007597 | 0 | 0 | 0 | 100 | 0 | 0 | 0 |
| MESAN2007755 | 0 | 0 | 0 | 33.922 | 0 | 0 | 0 |
| MESAN2008222 | 0 | 0 | 0 | 100 | 0 | 0 | 0 |
| MESAN2008334 | 0 | 0 | 0 | 30.484 | 0 | 0 | 0 |
| MESAN2008415 | 0 | 0 | 0 | 39.656 | 0 | 0 | 0 |
| MESAN2008460 | 0 | 0 | 0 | 100 | 0 | 0 | 0 |
| MESAN2008536 | 0 | 0 | 0 | 100 | 0 | 0 | 0 |
| MESAN2008679 | 0 | 0 | 0 | 25.983 | 0 | 0 | 0 |
| MESAN2008729 | 0 | 0 | 0 | 83.934 | 0 | 0 | 0 |
| MESAN2008821 | 0 | 0 | 0 | 100 | 0 | 0 | 0 |
| MESAN2008926 | 0 | 72.444 | 0 | 11.838 | 0 | 0 | 0 |
| MESAN2008936 | 0 | 0 | 0 | 14.752 | 0 | 0 | 0 |
| MESAN2009019 | 0 | 0 | 0 | 28.967 | 0 | 0 | 0 |
| MESAN2009081 | 0 | 0 | 0 | 17.454 | 0 | 0 | 0 |
| MESAN2009105 | 0 | 0 | 0 | 100 | 0 | 0 | 0 |
| MESAN2009311 | 0 | 0 | 0 | 100 | 0 | 0 | 0 |
| MESAN2009418 | 0 | 0 | 0 | 100 | 0 | 0 | 0 |
| MESAN2009503 | 0 | 0 | 0 | 61.778 | 0 | 0 | 0 |
| MESAN2009522 | 0 | 0 | 0 | 100 | 0 | 0 | 0 |
| MESAN2009580 | 0 | 0 | 0 | 4.118 | 0 | 0 | 0 |
| MESAN2010031 | 0 | 0 | 0 | 100 | 0 | 0 | 0 |
| MESAN2010114 | 0 | 0 | 0 | 100 | 0 | 0 | 0 |
| MESAN2010312 | 0 | 0 | 0 | 100 | 0 | 0 | 0 |
| MESAN2010321 | 0 | 0 | 0 | 100 | 0 | 0 | 0 |
| MESAN2010664 | 0 | 0 | 0 | 32.181 | 0 | 0 | 0 |
| MESAN2010681 | 0 | 0 | 0 | 100 | 0 | 0 | 0 |
| MESAN2011545 | 0 | 0 | 0 | 100 | 0 | 0 | 0 |
| MESAN2011597 | 0 | 0 | 0 | 100 | 0 | 0 | 0 |
| MESAN2011627 | 0 | 0 | 0 | 13.955 | 0 | 0 | 0 |
| MESAN2011632 | 0 | 0 | 0 | 78.423 | 0 | 0 | 0 |
| MESAN2011977 | 0 | 0 | 0 | 100 | 0 | 0 | 0 |
| MESAN2011984 | 29.577 | 0 | 0 | 6.326 | 0 | 0 | 0 |
| MESAN2012054 | 0 | 0 | 0 | 9.459 | 0 | 0 | 0 |
| MESAN2012113 | 0 | 0 | 0 | 21.877 | 0 | 0 | 0 |
| MESAN2012586 | 0 | 0 | 0 | 100 | 0 | 0 | 0 |
| MESAN2012708 | 0 | 0 | 0 | 100 | 0 | 0 | 0 |
| MESAN2012735 | 0 | 0 | 0 | 36.949 | 0 | 0 | 0 |
| MESAN2013019 | 0 | 0 | 0 | 100 | 0 | 0 | 0 |
| MESAN2013022 | 0 | 0 | 0 | 100 | 0 | 0 | 0 |
| MESAN2013183 | 0 | 0 | 0 | 100 | 0 | 0 | 0 |
| MESAN2013211 | 0 | 0 | 0 | 100 | 0 | 0 | 0 |
| MESAN2013283 | 0 | 0 | 0 | 61.778 | 0 | 0 | 0 |
| MESAN2013284 | 0 | 0 | 0 | 9.108 | 0 | 0 | 0 |
| MESAN2013611 | 0 | 0 | 0 | 100 | 0 | 0 | 0 |
| MESAN2013674 | 0 | 0 | 0 | 100 | 0 | 0 | 0 |
| MESAN2013845 | 0 | 0 | 0 | 41.380 | 0 | 0 | 0 |
| MESAN2013908 | 0 | 0 | 0 | 25.584 | 0 | 0 | 0 |
| MESAN2013936 | 0 | 0 | 0 | 100 | 0 | 0 | 0 |
| MESAN2014192 | 0 | 0 | 0 | 81.641 | 0 | 0 | 0 |
| MESAN2014295 | 0 | 0 | 0 | 75.663 | 0 | 0 | 0 |
| MESAN2014298 | 0 | 0 | 0 | 100 | 0 | 0 | 0 |
| MESAN2014412 | 0 | 0 | 0 | 71.370 | 0 | 0 | 0 |
| MESAN2014624 | 0 | 0 | 0 | 100 | 0 | 0 | 0 |
| MESAN2015277 | 0 | 0 | 0 | 100 | 0 | 0 | 0 |
| MESAN2015365 | 0 | 0 | 0 | 83.934 | 0 | 0 | 0 |
| MESAN2015391 | 0 | 0 | 0 | 74.905 | 0 | 0 | 0 |
| MESAN2015401 | 0 | 0 | 0 | 100 | 0 | 0 | 0 |
| MESAN2015501 | 0 | 0 | 0 | 100 | 0 | 0 | 0 |
| MESAN2015515 | 0 | 0 | 0 | 9.850 | 0 | 0 | 0 |
| MESAN2015708 | 0 | 0 | 0 | 34.496 | 0 | 0 | 0 |
| MESAN2016159 | 0 | 0 | 0 | 85.013 | 0 | 0 | 0 |
| MESAN2016304 | 0 | 0 | 0 | 100 | 0 | 0 | 0 |
| MESAN2016409 | 0 | 0 | 0 | 61.778 | 0 | 0 | 0 |
| MESAN2016552 | 0 | 0 | 0 | 45.115 | 0 | 0 | 0 |
| MESAN2016965 | 0 | 0 | 0 | 100 | 0 | 0 | 0 |
| MESAN2017133 | 0 | 0 | 0 | 32.534 | 0 | 0 | 0 |
| MESAN2017152 | 0 | 0 | 0 | 75.663 | 0 | 0 | 0 |
| MESAN2017373 | 0 | 0 | 0 | 12.988 | 0 | 0 | 0 |
| MESAN2017417 | 0 | 0 | 0 | 100 | 0 | 0 | 0 |
| MESAN2018209 | 0 | 0 | 0 | 100 | 0 | 0 | 0 |
| MESAN2018576 | 0 | 0 | 0 | 39.023 | 0 | 0 | 0 |
| MESAN2018670 | 0 | 0 | 0 | 100 | 0 | 0 | 0 |
| MESAN2018699 | 0 | 0 | 0 | 57.088 | 0 | 0 | 0 |
| MESTC1000042 | 0 | 0 | 0 | 0 | 96.958 | 0 | 0 |
| MESTC1000147 | 0 | 0 | 0 | 0 | 100 | 0 | 0 |
| MESTC2000150 | 0 | 0 | 0 | 0 | 100 | 0 | 0 |
| MESTC2000153 | 0 | 0 | 0 | 0 | 100 | 0 | 0 |
| MESTC2000170 | 0 | 0 | 0 | 0 | 100 | 0 | 0 |
| N1ESE2000698 | 0 | 0 | 0 | 0 | 0 | 96.458 | 0 |
| NB9N41000011 | 0 | 0 | 0 | 0 | 0 | 0 | 72.006 |
| NB9N41000047 | 0 | 0 | 0 | 0 | 0 | 0 | 88.925 |
| NB9N41000121 | 0 | 0 | 0 | 2.785 | 0 | 0 | 50.813 |
| NB9N41000135 | 0 | 0 | 0 | 0 | 0 | 0 | 75.036 |
| NB9N41000142 | 0 | 0 | 0 | 0 | 0 | 0 | 90.579 |
| NB9N41000146 | 0 | 0 | 0 | 0 | 0 | 0 | 100 |
| NB9N41000340 | 0 | 0 | 0 | 0 | 0 | 0 | 49.068 |
| NB9N42000104 | 0 | 18.811 | 0 | 6.147 | 0 | 0 | 56.090 |
| NB9N42000122 | 0 | 0 | 0 | 0 | 0 | 0 | 100 |
| NB9N42000196 | 0 | 0 | 0 | 0 | 0 | 0 | 68.342 |
| NB9N42000281 | 0 | 0 | 0 | 0 | 0 | 0 | 64.692 |
| NB9N42000314 | 0 | 0 | 0 | 0 | 0 | 0 | 100 |
| NB9N42000342 | 0 | 0 | 0 | 10.694 | 0 | 0 | 24.394 |
| NB9N42000430 | 0 | 0 | 0 | 0 | 0 | 0 | 93.650 |
| NB9N42000495 | 0 | 0 | 0 | 0 | 0 | 0 | 100 |
| NB9N42001300 | 0 | 0 | 0 | 0 | 0 | 0 | 91.584 |
| NHNPC2000187 | 0 | 0 | 0 | 0 | 0 | 0 | 15.310 |
| NHNPC2000206 | 0 | 0 | 0 | 5.093 | 0 | 0 | 0 |
| NHNPC2001931 | 0 | 0 | 0 | 5.309 | 0 | 0 | 0 |
| NT2NE1000004 | 0 | 0 | 0 | 30.623 | 0 | 0 | 0 |
| NT2NE1000163 | 0 | 0 | 0 | 1.502 | 0 | 0 | 0 |
| NT2NE2000056 | 0 | 0 | 0 | 2.913 | 0 | 0 | 0 |
| NT2NE2000260 | 0 | 19.189 | 0 | 0.448 | 0 | 0 | 0 |
| NT2NE2000913 | 0 | 0 | 0 | 27.352 | 0 | 0 | 0 |
| NT2NE2001000 | 7.460 | 0 | 0 | 0 | 0 | 0 | 0 |
| NT2NE2001617 | 0 | 0 | 0 | 16.823 | 0 | 0 | 0 |
| NT2NE2001793 | 0 | 0 | 0 | 3.846 | 0 | 0 | 0 |
| NT2NE2003887 | 54.102 | 0 | 0 | 0 | 0 | 0 | 0 |
| NT2NE2004519 | 0 | 0 | 0 | 0 | 0 | 40.694 | 0 |
| NT2NE2005688 | 0 | 0 | 0 | 0 | 64.494 | 0 | 0 |
| NT2NE2010842 | 0 | 21.396 | 0 | 0 | 0 | 0 | 0 |
| NT2NE2014104 | 14.549 | 0 | 0 | 0 | 0 | 0 | 0 |
| NT2RI1000027 | 8.764 | 0 | 0 | 0 | 0 | 0 | 0 |
| NT2RI2000064 | 0 | 0 | 0 | 1.996 | 0 | 0 | 0 |
| NT2RI2000255 | 0 | 0 | 0 | 4.438 | 0 | 0 | 0 |
| NT2RI2000282 | 0 | 0 | 0 | 1.174 | 0 | 0 | 10.709 |
| NT2RI2000284 | 0 | 0 | 0 | 1.690 | 0 | 0 | 0 |
| NT2RI2000344 | 0 | 0 | 0 | 3.002 | 0 | 0 | 0 |
| NT2RI2000578 | 0 | 0 | 0 | 0 | 0 | 7.594 | 22.627 |
| NT2RI2000671 | 0 | 0 | 0 | 0 | 0 | 0 | 35.587 |
| NT2RI2000727 | 0 | 0 | 0 | 3.837 | 0 | 0 | 0 |
| NT2RI2000865 | 0 | 0 | 0 | 0 | 0 | 0 | 94.903 |
| NT2RI2001054 | 0 | 0 | 0 | 2.206 | 0 | 0 | 0 |
| NT2RI2001540 | 0 | 0 | 0 | 0.211 | 0 | 1.293 | 3.852 |
| NT2RI2001657 | 0 | 12.142 | 0 | 7.936 | 0 | 0 | 0 |
| NT2RI2001731 | 0 | 0 | 0 | 14.045 | 0 | 0 | 0 |
| NT2RI2001769 | 0 | 0 | 0 | 0 | 0 | 50.483 | 0 |
| NT2RI2001846 | 0 | 0 | 0 | 18.273 | 0 | 0 | 0 |
| NT2RI2001859 | 0 | 0 | 0 | 7.197 | 0 | 0 | 0 |
| NT2RI2002091 | 0.233 | 0.304 | 0 | 2.487 | 1.158 | 2.741 | 2.269 |
| NT2RI2002152 | 0 | 0 | 0 | 0 | 0 | 0 | 42.547 |
| NT2RI2002316 | 0 | 0 | 0 | 2.973 | 0 | 0 | 0 |
| NT2RI2002530 | 0 | 0 | 0 | 22.382 | 0 | 0 | 0 |
| NT2RI2002654 | 0 | 0 | 0 | 2.178 | 0 | 0 | 0 |
| NT2RI2002822 | 0 | 0 | 0 | 18.605 | 0 | 0 | 0 |
| NT2RI2003051 | 8.874 | 0 | 0 | 0 | 0 | 0 | 0 |
| NT2RI2003304 | 2.275 | 11.910 | 0 | 0.973 | 0 | 5.960 | 0 |
| NT2RI2003407 | 0 | 27.466 | 0 | 4.488 | 0 | 0 | 0 |
| NT2RI2003738 | 3.033 | 3.970 | 0 | 0.649 | 0 | 0 | 0 |
| NT2RI2003751 | 0 | 0 | 0 | 5.137 | 0 | 0 | 0 |
| NT2RI2004188 | 0 | 65.160 | 0 | 0 | 0 | 0 | 0 |
| NT2RI2004284 | 0 | 0 | 0 | 0 | 0 | 0 | 54.386 |
| NT2RI2004884 | 0 | 0 | 0 | 2.865 | 0 | 0 | 0 |
| NT2RI2005115 | 0 | 0 | 0 | 22.659 | 0 | 0 | 0 |
| NT2RI2005116 | 0 | 0 | 0 | 4.740 | 0 | 29.030 | 0 |
| NT2RI2005335 | 0 | 8.784 | 0 | 0 | 0 | 0 | 0 |
| NT2RI2005405 | 0 | 6.370 | 0 | 2.082 | 0 | 0 | 0 |
| NT2RI2005579 | 0 | 0 | 0 | 34.800 | 0 | 0 | 0 |
| NT2RI2005710 | 0 | 0 | 0 | 19.356 | 0 | 0 | 0 |
| NT2RI2005814 | 0 | 29.555 | 0 | 0 | 0 | 0 | 0 |
| NT2RI2006412 | 0 | 0 | 0 | 3.040 | 0 | 0 | 0 |
| NT2RI2006647 | 0 | 0 | 0 | 17.003 | 0 | 0 | 0 |
| NT2RI2007133 | 0 | 0 | 0 | 1.455 | 0 | 0 | 0 |
| NT2RI2007277 | 0 | 22.247 | 0 | 0 | 0 | 0 | 0 |
| NT2RI2007384 | 0 | 0 | 0 | 1.606 | 0 | 0 | 0 |
| NT2RI2007498 | 0 | 0 | 0 | 0 | 35.222 | 0 | 0 |
| NT2RI2007572 | 0 | 0 | 0 | 0 | 0 | 16.968 | 0 |
| NT2RI2007827 | 0 | 0 | 0 | 27.837 | 0 | 0 | 0 |
| NT2RI2007853 | 0 | 0 | 0 | 0 | 0 | 50.846 | 0 |
| NT2RI2008045 | 0 | 0 | 0 | 2.879 | 0 | 0 | 0 |
| NT2RI2008141 | 0 | 0 | 0 | 23.787 | 0 | 0 | 0 |
| NT2RI2008336 | 3.473 | 9.091 | 0 | 1.485 | 0 | 0 | 0 |
| NT2RI2008526 | 0 | 17.398 | 0 | 0 | 0 | 0 | 0 |
| NT2RI2008724 | 0 | 0 | 0 | 0 | 0 | 41.706 | 0 |
| NT2RI2008791 | 0 | 26.476 | 0 | 0 | 0 | 0 | 0 |
| NT2RI2009065 | 4.048 | 0 | 0 | 5.195 | 0 | 10.606 | 0 |
| NT2RI2009233 | 0 | 0 | 0 | 8.364 | 0 | 0 | 0 |
| NT2RI2009583 | 1.939 | 0 | 0 | 0 | 0 | 0 | 0 |
| NT2RI2012350 | 0 | 0 | 0 | 1.484 | 0 | 0 | 0 |
| NT2RI3007543 | 0 | 0 | 0 | 3.146 | 0 | 0 | 0 |
| NT2RP6000072 | 0 | 0 | 0 | 5.992 | 0 | 0 | 0 |
| NT2RP6000077 | 0 | 0 | 0 | 23.835 | 0 | 0 | 0 |
| NT2RP7000238 | 0 | 29.375 | 0 | 0 | 0 | 0 | 0 |
| NT2RP7000624 | 0 | 0 | 0 | 16.178 | 0 | 0 | 0 |
| NT2RP7001166 | 0 | 0 | 0 | 2.773 | 0 | 0 | 0 |
| NT2RP7002379 | 0 | 0 | 0 | 3.733 | 0 | 11.432 | 0 |
| NT2RP7002450 | 0 | 0 | 0 | 0 | 0 | 60.611 | 0 |
| NT2RP7002619 | 0 | 24.725 | 0 | 0 | 0 | 24.743 | 0 |
| NT2RP7002802 | 0 | 0 | 0 | 13.551 | 0 | 0 | 0 |
| NT2RP7002875 | 0 | 0 | 0 | 3.422 | 0 | 0 | 0 |
| NT2RP7003960 | 0 | 0 | 0 | 6.144 | 0 | 0 | 0 |
| NT2RP7004114 | 0 | 0 | 0 | 20.677 | 0 | 0 | 0 |
| NT2RP7004123 | 0 | 43.546 | 0 | 7.116 | 0 | 0 | 0 |
| NT2RP7004173 | 0 | 0 | 0 | 5.664 | 0 | 17.344 | 0 |
| NT2RP7004204 | 0 | 0 | 0 | 6.323 | 0 | 0 | 0 |
| NT2RP7004728 | 0 | 0 | 0 | 5.828 | 0 | 0 | 0 |
| NT2RP7005513 | 0 | 0 | 0 | 0 | 0 | 0 | 57.185 |
| NT2RP7005750 | 0 | 0 | 0 | 13.268 | 0 | 0 | 0 |
| NT2RP7006141 | 32.007 | 0 | 0 | 0 | 0 | 0 | 0 |
| NT2RP7006188 | 0 | 0 | 0 | 9.654 | 0 | 0 | 0 |
| NT2RP7006263 | 0 | 0 | 0 | 14.931 | 0 | 0 | 0 |
| NT2RP7006717 | 0 | 0 | 0 | 7.319 | 0 | 0 | 0 |
| NT2RP7007154 | 4.943 | 0 | 0 | 0 | 0 | 0 | 0 |
| NT2RP7007842 | 0 | 0 | 0 | 7.112 | 0 | 0 | 0 |
| NT2RP7007975 | 0 | 0 | 0 | 10.120 | 0 | 0 | 0 |
| NT2RP7009097 | 0 | 0 | 0 | 6.667 | 0 | 0 | 0 |
| NT2RP7009259 | 0 | 0 | 0 | 2.083 | 0 | 0 | 0 |
| NT2RP7014910 | 0 | 0 | 0 | 0 | 0 | 0 | 40.452 |
| NT2RP7019401 | 0 | 0 | 0 | 38.500 | 0 | 0 | 0 |
| NTONG1000098 | 0 | 0 | 0 | 4.725 | 0 | 0 | 0 |
| NTONG1000264 | 0 | 0 | 0 | 3.614 | 0 | 0 | 0 |
| NTONG2000265 | 0 | 0 | 0 | 6.322 | 0 | 0 | 0 |
| NTONG2000876 | 0 | 0 | 0 | 5.163 | 0 | 0 | 0 |
| NTONG2000977 | 0 | 0 | 0 | 3.645 | 0 | 0 | 0 |
| NTONG2001137 | 9.920 | 0 | 0 | 0 | 0 | 0 | 0 |
| NTONG2001567 | 0 | 0 | 0 | 2.274 | 0 | 6.964 | 0 |
| NTONG2003839 | 0 | 0 | 0 | 9.722 | 0 | 0 | 0 |
| NTONG2004844 | 0 | 0 | 0 | 6.009 | 0 | 0 | 0 |
| NTONG2005520 | 0 | 15.106 | 0 | 2.468 | 0 | 0 | 0 |
| NTONG2006301 | 47.641 | 0 | 0 | 0 | 0 | 0 | 0 |
| NTONG2008483 | 0 | 0 | 0 | 2.963 | 0 | 0 | 0 |
| OCBBF2000013 | 0 | 0 | 0 | 7.215 | 0 | 0 | 0 |
| OCBBF2000522 | 0 | 0 | 0 | 9.376 | 0 | 0 | 0 |
| OCBBF2000712 | 0 | 0 | 0 | 0 | 81.622 | 0 | 0 |
| OCBBF2000846 | 0 | 16.606 | 0 | 0 | 0 | 0 | 0 |
| OCBBF2000982 | 0 | 19.789 | 0 | 0 | 0 | 0 | 0 |
| OCBBF2000986 | 0 | 0 | 0 | 3.573 | 0 | 0 | 0 |
| OCBBF2001687 | 0 | 0 | 0 | 7.133 | 0 | 0 | 0 |
| OCBBF2002626 | 0 | 0 | 0 | 0 | 72.937 | 0 | 0 |
| OCBBF2006849 | 0 | 45.862 | 0 | 0 | 0 | 0 | 0 |
| OCBBF2007224 | 0 | 0 | 0 | 35.012 | 0 | 0 | 0 |
| OCBBF2008041 | 0 | 0 | 0 | 7.751 | 0 | 0 | 0 |
| OCBBF2008822 | 0 | 0 | 0 | 0 | 0 | 0 | 80.650 |
| OCBBF2011021 | 0 | 0 | 0 | 5.360 | 0 | 0 | 0 |
| OCBBF2012553 | 0 | 0 | 0 | 0 | 0 | 26.635 | 0 |
| OCBBF2016841 | 0 | 0 | 0 | 22.652 | 0 | 0 | 0 |
| OCBBF2018873 | 0 | 0 | 0 | 5.138 | 0 | 0 | 0 |
| OCBBF2035226 | 0 | 0 | 0 | 0 | 0 | 0 | 19.876 |
| PEBLM1000174 | 0 | 0 | 0 | 17.733 | 0 | 0 | 0 |
| PEBLM2000222 | 0 | 0 | 0 | 0 | 50.169 | 0 | 0 |
| PEBLM2000267 | 0 | 0 | 0 | 5.214 | 0 | 0 | 0 |
| PEBLM2004452 | 0 | 0 | 0 | 5.005 | 0 | 0 | 0 |
| PEBLM2007774 | 5.222 | 0 | 0 | 0 | 26.013 | 0 | 0 |
| PERIC2005117 | 0 | 0 | 0 | 0 | 0 | 0 | 72.680 |
| PLACE5000068 | 54.438 | 0 | 0 | 0 | 0 | 0 | 0 |
| PLACE5000172 | 22.534 | 0 | 0 | 0 | 0 | 0 | 0 |
| PLACE6000379 | 0 | 12.024 | 0 | 6.550 | 0 | 0 | 0 |
| PLACE6002084 | 0 | 0 | 0 | 2.739 | 0 | 0 | 0 |
| PLACE6006549 | 20.765 | 0 | 0 | 0 | 0 | 0 | 0 |
| PLACE6008793 | 0 | 0 | 0 | 0 | 0 | 0 | 53.643 |
| PLACE6010077 | 0 | 0 | 0 | 3.228 | 0 | 0 | 0 |
| PROST1000144 | 0 | 35.578 | 0 | 0 | 0 | 0 | 0 |
| PROST1000199 | 0 | 0 | 0 | 0 | 0 | 16.593 | 0 |
| PROST1000526 | 0 | 0 | 0 | 9.369 | 0 | 0 | 0 |
| PROST1000564 | 11.652 | 0 | 0 | 4.985 | 0 | 0 | 0 |
| PROST2000138 | 0 | 0 | 0 | 3.857 | 7.486 | 5.905 | 0 |
| PROST2000432 | 0 | 0 | 0 | 51.115 | 0 | 0 | 0 |
| PROST2003517 | 0 | 0 | 0 | 9.762 | 0 | 0 | 0 |
| PROST2004095 | 4.057 | 0 | 0 | 0 | 0 | 0 | 0 |
| PROST2004251 | 0 | 20.330 | 0 | 0 | 0 | 0 | 0 |
| PROST2004270 | 0 | 0 | 0 | 2.180 | 0 | 0 | 0 |
| PROST2004416 | 0 | 0 | 0 | 5.043 | 0 | 0 | 0 |
| PROST2005793 | 0 | 0 | 0 | 14.541 | 0 | 0 | 0 |
| PROST2008360 | 0 | 0 | 0 | 6.674 | 0 | 0 | 0 |
| PROST2008770 | 6.762 | 0 | 0 | 0 | 0 | 0 | 0 |
| PROST2009731 | 0 | 0 | 0 | 0 | 93.666 | 0 | 0 |
| PROST2010782 | 2.108 | 0 | 0 | 0.902 | 0 | 0 | 0 |
| PROST2014916 | 0 | 0 | 0 | 0 | 0 | 82.735 | 0 |
| PROST2017692 | 0 | 0 | 0 | 2.733 | 0 | 16.735 | 0 |
| PUAEN1000164 | 0 | 0 | 0 | 0 | 34.378 | 0 | 0 |
| PUAEN1000322 | 0 | 0 | 0 | 4.740 | 0 | 0 | 0 |
| PUAEN2000175 | 0 | 80.086 | 0 | 0 | 0 | 0 | 0 |
| PUAEN2000374 | 0 | 0 | 0 | 1.187 | 0 | 0 | 10.828 |
| PUAEN2000594 | 0 | 0 | 0 | 39.656 | 0 | 0 | 0 |
| PUAEN2003408 | 0 | 0 | 0 | 11.167 | 0 | 0 | 0 |
| PUAEN2008314 | 0 | 0 | 0 | 39.656 | 0 | 0 | 0 |
| SALGL1000157 | 1.127 | 0 | 0 | 0 | 11.231 | 0 | 0 |
| SKMUS1000022 | 0 | 0 | 0 | 0 | 35.949 | 0 | 0 |
| SKMUS1000186 | 3.479 | 0 | 0 | 0 | 0 | 0 | 0 |
| SKMUS2000484 | 0 | 39.848 | 0 | 0 | 0 | 0 | 0 |
| SKMUS2000679 | 11.615 | 0 | 0 | 0 | 0 | 0 | 0 |
| SKMUS2000931 | 0 | 0 | 0 | 2.018 | 0 | 0 | 0 |
| SKMUS2001454 | 0 | 0 | 0 | 1.252 | 0 | 0 | 11.419 |
| SKNMC1000137 | 9.189 | 0 | 0 | 3.931 | 0 | 0 | 0 |
| SKNMC2000305 | 0 | 0 | 0 | 13.061 | 0 | 0 | 0 |
| SKNMC2000635 | 0 | 0 | 0 | 3.326 | 0 | 8.147 | 0 |
| SKNMC2000877 | 0 | 0 | 0 | 4.394 | 0 | 0 | 0 |
| SKNSH2008940 | 0 | 43.514 | 0 | 0 | 0 | 0 | 0 |
| SMINT1000016 | 21.266 | 0 | 0 | 0 | 0 | 0 | 0 |
| SMINT2000396 | 0 | 0 | 0 | 4.539 | 0 | 0 | 0 |
| SMINT2000400 | 0 | 0 | 0 | 24.805 | 0 | 0 | 0 |
| SMINT2000441 | 0 | 0 | 0 | 1.674 | 0 | 0 | 15.271 |
| SMINT2000694 | 0 | 26.973 | 0 | 0 | 0 | 0 | 0 |
| SMINT2001348 | 0 | 0 | 0 | 34.400 | 0 | 0 | 0 |
| SMINT2001818 | 0 | 21.272 | 0 | 0 | 0 | 0 | 0 |
| SMINT2003169 | 0 | 0 | 0 | 1.744 | 0 | 0 | 0 |
| SMINT2004144 | 55.082 | 0 | 0 | 0 | 0 | 0 | 0 |
| SMINT2008921 | 0 | 25.178 | 0 | 0 | 0 | 0 | 0 |
| SMINT2010639 | 23.481 | 0 | 0 | 0 | 0 | 0 | 0 |
| SPLEN1000106 | 0 | 0 | 0 | 8.631 | 0 | 0 | 0 |
| SPLEN1000116 | 4.290 | 11.231 | 0 | 0 | 0 | 0 | 0 |
| SPLEN2000242 | 83.286 | 0 | 0 | 0 | 0 | 0 | 0 |
| SPLEN2000505 | 0 | 0 | 0 | 4.688 | 0 | 0 | 0 |
| SPLEN2000882 | 0 | 0 | 0 | 13.028 | 0 | 0 | 0 |
| SPLEN2004555 | 0 | 0 | 0 | 3.947 | 0 | 0 | 0 |
| SPLEN2005806 | 0 | 0 | 0 | 0 | 0 | 13.887 | 0 |
| SPLEN2006122 | 0 | 19.112 | 0 | 0 | 0 | 0 | 0 |
| SPLEN2006133 | 0 | 21.527 | 0 | 0 | 0 | 0 | 0 |
| SPLEN2009555 | 0 | 0 | 0 | 31.496 | 0 | 0 | 0 |
| SPLEN2011419 | 0 | 0 | 0 | 8.861 | 0 | 0 | 0 |
| SPLEN2012115 | 0 | 92.880 | 0 | 0 | 0 | 0 | 0 |
| SPLEN2012624 | 43.831 | 0 | 0 | 0 | 0 | 0 | 0 |
| SPLEN2015310 | 4.968 | 0 | 0 | 0 | 0 | 0 | 0 |
| SPLEN2016268 | 0 | 0 | 0 | 1.602 | 0 | 0 | 0 |
| SPLEN2016421 | 0 | 0 | 0 | 7.682 | 0 | 0 | 0 |
| SPLEN2017620 | 0 | 0 | 0 | 19.007 | 0 | 0 | 0 |
| SPLEN2017918 | 0 | 0 | 0 | 6.762 | 0 | 20.705 | 0 |
| SPLEN2027113 | 0 | 0 | 0 | 0 | 0 | 37.161 | 0 |
| SPLEN2028466 | 0 | 0 | 0 | 1.534 | 0 | 0 | 0 |
| SPLEN2036076 | 14.241 | 0 | 0 | 0 | 0 | 0 | 0 |
| STOMA2002166 | 0 | 13.276 | 0 | 0 | 0 | 0 | 0 |
| SYNOV2001033 | 0 | 0 | 0 | 4.446 | 0 | 0 | 0 |
| SYNOV2005541 | 0 | 0 | 0 | 53.086 | 0 | 0 | 0 |
| SYNOV2009172 | 0 | 0 | 0 | 1.930 | 0 | 0 | 0 |
| SYNOV4001153 | 0 | 0 | 0 | 8.600 | 0 | 0 | 0 |
| SYNOV4007671 | 0 | 0 | 0 | 2.718 | 0 | 0 | 0 |
| TBAES2009387 | 0 | 0 | 0 | 0 | 46.168 | 0 | 18.085 |
| TESTI2000253 | 38.706 | 0 | 0 | 0 | 0 | 0 | 0 |
| TESTI2001099 | 0 | 11.120 | 0 | 3.634 | 0 | 0 | 0 |
| TESTI2001269 | 0 | 0 | 0 | 0 | 0 | 24.794 | 0 |
| TESTI2001826 | 0 | 0 | 0 | 41.489 | 0 | 0 | 0 |
| TESTI2002149 | 0 | 37.954 | 0 | 0 | 0 | 0 | 0 |
| TESTI2002365 | 0 | 0 | 0 | 4.049 | 0 | 0 | 0 |
| TESTI2005326 | 0 | 0 | 0 | 85.013 | 0 | 0 | 0 |
| TESTI2005743 | 0 | 0 | 0 | 8.145 | 0 | 0 | 0 |
| TESTI2005759 | 0 | 0 | 0 | 3.468 | 0 | 0 | 0 |
| TESTI2006588 | 0 | 0 | 0 | 2.007 | 0 | 0 | 0 |
| TESTI2007922 | 0 | 89.668 | 0 | 0 | 0 | 0 | 0 |
| TESTI2008240 | 0 | 0 | 0 | 1.855 | 0 | 0 | 0 |
| TESTI2009577 | 0 | 40.108 | 0 | 6.554 | 0 | 0 | 0 |
| TESTI2010513 | 0 | 0 | 0 | 1.457 | 0 | 0 | 0 |
| TESTI2012356 | 0 | 0 | 0 | 0 | 0 | 0 | 98.105 |
| TESTI2012778 | 0 | 8.386 | 0 | 0 | 0 | 0 | 0 |
| TESTI2017954 | 0 | 0 | 0 | 2.456 | 0 | 15.044 | 0 |
| TESTI2018014 | 0 | 0 | 0 | 14.293 | 0 | 0 | 0 |
| TESTI2018997 | 0 | 47.262 | 0 | 0 | 0 | 0 | 0 |
| TESTI2021118 | 92.988 | 0 | 0 | 0 | 0 | 0 | 0 |
| TESTI2033441 | 0 | 0 | 0 | 0 | 0 | 24.920 | 0 |
| TESTI4001467 | 0 | 0 | 0 | 20.529 | 0 | 0 | 0 |
| TESTI4002799 | 0 | 0 | 0 | 1.638 | 0 | 0 | 0 |
| TESTI4013441 | 0 | 0 | 0 | 3.489 | 13.546 | 0 | 0 |
| TESTI4014694 | 0 | 0 | 0 | 0 | 96.252 | 0 | 0 |
| TESTI4037156 | 0 | 6.280 | 0 | 1.026 | 23.900 | 0 | 9.362 |
| TESTI4040598 | 0 | 0 | 0 | 0 | 0 | 97.202 | 0 |
| THYMU1000002 | 0 | 0 | 0 | 6.584 | 0 | 0 | 20.026 |
| THYMU1000010 | 0 | 61.173 | 0 | 0 | 0 | 0 | 0 |
| THYMU1000016 | 0 | 0 | 0 | 0 | 33.377 | 0 | 0 |
| THYMU1000032 | 0 | 17.713 | 0 | 0 | 0 | 0 | 0 |
| THYMU1000359 | 4.647 | 0 | 0 | 0 | 0 | 0 | 0 |
| THYMU1000428 | 4.927 | 0 | 0 | 0 | 0 | 0 | 0 |
| THYMU2000382 | 5.254 | 13.754 | 0 | 0 | 0 | 0 | 0 |
| THYMU2000946 | 0 | 0 | 0 | 16.095 | 0 | 0 | 0 |
| THYMU2001018 | 0 | 0 | 0 | 33.490 | 0 | 0 | 0 |
| THYMU2001422 | 0 | 0 | 0 | 46.185 | 0 | 0 | 0 |
| THYMU2002583 | 0 | 23.522 | 0 | 0 | 0 | 0 | 0 |
| THYMU2002983 | 25.942 | 0 | 0 | 0 | 0 | 0 | 0 |
| THYMU2003891 | 0 | 6.622 | 0 | 0 | 0 | 0 | 0 |
| THYMU2004152 | 8.607 | 0 | 0 | 0 | 0 | 0 | 0 |
| THYMU2004344 | 0 | 28.989 | 0 | 0 | 0 | 0 | 0 |
| THYMU2005546 | 0 | 0 | 0 | 2.028 | 0 | 0 | 0 |
| THYMU2006505 | 0 | 0 | 0 | 10.124 | 0 | 0 | 0 |
| THYMU2007886 | 0 | 0 | 0 | 5.135 | 0 | 0 | 0 |
| THYMU2008185 | 0 | 0 | 0 | 0 | 0 | 0 | 97.595 |
| THYMU2009658 | 0 | 0 | 0 | 1.299 | 0 | 7.955 | 0 |
| THYMU2012625 | 9.005 | 0 | 0 | 0 | 0 | 0 | 0 |
| THYMU2013136 | 0 | 0 | 0 | 0 | 70.643 | 0 | 0 |
| THYMU2013916 | 9.614 | 0 | 0 | 0 | 0 | 0 | 0 |
| THYMU2027125 | 0 | 0 | 0 | 0 | 0 | 0 | 6.056 |
| THYMU2035735 | 0 | 0 | 0 | 4.892 | 0 | 0 | 0 |
| THYMU3038158 | 53.382 | 0 | 0 | 0 | 0 | 0 | 0 |
| TKIDN2000246 | 0 | 0 | 0 | 0 | 0 | 6.908 | 0 |
| TRACH2000472 | 7.402 | 0 | 0 | 0 | 0 | 0 | 0 |
| TRACH2000540 | 12.349 | 0 | 0 | 0 | 0 | 0 | 0 |
| TRACH2000559 | 0 | 0 | 0 | 0 | 0 | 88.443 | 0 |
| TRACH2001021 | 3.630 | 0 | 0 | 0 | 0 | 0 | 0 |
| TRACH2001289 | 0 | 0 | 0 | 0 | 29.356 | 0 | 0 |
| TRACH2001478 | 0 | 0 | 0 | 2.153 | 50.138 | 0 | 0 |
| TRACH2001607 | 8.706 | 0 | 0 | 0 | 0 | 0 | 0 |
| TRACH2001810 | 0 | 0 | 0 | 0 | 0 | 0 | 26.274 |
| TRACH2001898 | 0 | 0 | 0 | 0 | 88.050 | 0 | 0 |
| TRACH2002092 | 0 | 0 | 0 | 20.818 | 0 | 0 | 0 |
| TRACH2004499 | 0 | 0 | 0 | 0 | 0 | 66.734 | 0 |
| TRACH2005800 | 0 | 0 | 0 | 0 | 0 | 54.636 | 0 |
| TRACH2012298 | 0 | 0 | 0 | 0 | 0 | 0 | 48.010 |
| TRACH3007479 | 0 | 0 | 0 | 11.964 | 0 | 0 | 0 |
| TRACH3027229 | 93.931 | 0 | 0 | 0 | 0 | 0 | 0 |
| UMVEN1000186 | 0 | 0 | 0 | 5.878 | 0 | 0 | 0 |
| UMVEN2000133 | 0 | 13.301 | 0 | 0 | 0 | 0 | 0 |
| UTERU2000095 | 0 | 0 | 0 | 1.535 | 0 | 0 | 0 |
| UTERU2000263 | 0 | 0 | 0 | 0 | 44.254 | 0 | 0 |
| UTERU2001607 | 0 | 33.475 | 0 | 5.470 | 0 | 0 | 0 |
| UTERU2002294 | 15.736 | 0 | 0 | 0 | 0 | 0 | 0 |
| UTERU2002662 | 0 | 0 | 0 | 6.598 | 0 | 0 | 0 |
| UTERU2005593 | 0 | 0 | 0 | 4.162 | 0 | 0 | 0 |
| UTERU2005621 | 19.540 | 0 | 0 | 0 | 0 | 0 | 0 |
| UTERU2007253 | 0 | 0 | 0 | 38.210 | 0 | 0 | 0 |
| UTERU2008085 | 0 | 0 | 0 | 0.335 | 0 | 2.051 | 3.055 |
| UTERU2008302 | 0 | 0 | 0 | 0 | 0 | 30.340 | 0 |
| UTERU2010417 | 0 | 0 | 0 | 1.169 | 0 | 0 | 0 |
| UTERU2011220 | 0 | 88.827 | 0 | 0 | 0 | 0 | 0 |
| UTERU2015108 | 0 | 0 | 0 | 23.399 | 0 | 0 | 0 |
| UTERU2018566 | 0 | 0 | 0 | 66.092 | 0 | 0 | 0 |
| UTERU2019005 | 0 | 0 | 0 | 23.949 | 0 | 0 | 0 |

[0691] Genes whose expression levels were negligibly low in each of the above-described libraries are shown with their clone names below.

[0692] 3NB691000018, 3NB691000085, 3NB691000113, 3NB691000129, 3NB691000173, 3NB691000191, 3NB692000012, 3NB692000029, 3NB692000102, 3NB692000154, 3NB692000276, 3NB692000305, 3NB692000330, 3NB692000374, 3NB692000429, 3NB692000484, 3NB692000529, 3NB692000545, 3NB692000973, 3NB692001002, 3NB692001022, 3NB692001034, 3NB692001040, 3NB692001123, 3NB692001267, 3NB692001288, 3NB692001339, 3NB692001349, 3NB692001366, 3NB692001408, 3NB692001433, 3NB692001442, 3NB692001459, 3NB692001471, 3NB692001496, 3NB692001501, 3NB692001507, 3NB692001511, 3NB692001519, 3NB692001520, 3NB692001528, 3NB692001538, 3NB692001548, 3NB692001557, 3NB692001637, 3NB692001719, 3NB692001853, 3NB692001861, 3NB692002051, 3NB692002365, 3NB692002685, 3NB692002806, 3NB692003538, 3NB692004045, 3NB692004724, 3NB692005439, 3NB692006952, 3NB692008178, 3NB692008729, ACTVT2000380, ADIPS1000064, ADIPS2000069, ADIPS2000088, ADIPS2000245, ADRGL1000002, ADRGL1000018, ADRGL1000033, ADRGL1000038, ADRGL1000065, ADRGL1000067, ADRGL1000111, ADRGL1000144, ADRGL1000147, ADRGL1000160, ADRGL1000165, ADRGL1000182, ADRGL2000006, ADRGL2000042, ADRGL2000056, ADRGL2000064, ADRGL2000074, ADRGL2000085, ADRGL2000097, ADRGL2000117, ADRGL2000142, ADRGL2000172, ADRGL2000248, ADRGL2000261, ADRGL2000323, ADRGL2000328, ADRGL2000353, ADRGL2000384, ADRGL2000428, ADRGL2000636, ADRGL2000644, ADRGL2000968, ADRGL2001119, ADRGL2001229, ADRGL2001287, ADRGL2001301, ADRGL2001354, ADRGL2001554, ADRGL2001651, ADRGL2001756, ADRGL2001830, ADRGL2001836, ADRGL2001854, ADRGL2002013, ADRGL2002029, ADRGL2002191, ADRGL2002260, ADRGL2002392, ADRGL2002477, ADRGL2002679, ADRGL2002753, ADRGL2002857, ADRGL2003017, ADRGL2003329, ADRGL2003552, ADRGL2003585, ADRGL2003638, ADRGL2003684, ADRGL2003773, ADRGL2003785, ADRGL2004031, ADRGL2004077, ADRGL2004451, ADRGL2004459, ADRGL2004676, ADRGL2004708, ADRGL2004724, ADRGL2004749, ADRGL2004770, ADRGL2004777, ADRGL2004833, ADRGL2005336, ADRGL2005564, ADRGL2005756, ADRGL2005838, ADRGL2005926, ADRGL2005961, ADRGL2006034, ADRGL2006124, ADRGL2006177, ADRGL2006193, ADRGL2006377, ADRGL2006677, ADRGL2006732, ADRGL2006767, ADRGL2006817, ADRGL2006846, ADRGL2006886, ADRGL2007080, ADRGL2007125, ADRGL2007283, ADRGL2007313, ADRGL2007357, ADRGL2007636, ADRGL2007651, ADRGL2007810, ADRGL2007877, ADRGL2007906, ADRGL2007974, ADRGL2008023, ADRGL2008331, ADRGL2008337, ADRGL2008535, ADRGL2008966, ADRGL2009146, ADRGL2009324, ADRGL2009489, ADRGL2009533, ADRGL2009691, ADRGL2009755, ADRGL2010152, ADRGL2010315, ADRGL2010594, ADRGL2010860, ADRGL2010974, ADRGL2011190, ADRGL2011330, ADRGL2012179, AHMSC1000138, ASTRO1000018, ASTRO1000029, ASTRO1000096, ASTRO1000165, ASTRO2000011, ASTRO2000014, ASTRO2000095, ASTRO2000141, ASTRO2000191, ASTRO2000278, ASTRO2000372, ASTRO2000381, ASTRO2000403, ASTRO2000417, ASTRO2000480, ASTRO2000482, ASTRO2000533, ASTRO2000653, ASTRO2000662, ASTRO2000725, ASTRO2000801, ASTRO2000914, ASTRO2001001, ASTRO2001008, ASTRO2001029, ASTRO2001076, ASTRO2001088, ASTRO2001107, ASTRO2001122, ASTRO2001227, ASTRO2001249, ASTRO2001480, ASTRO2001823, ASTRO2002024, ASTRO2002064, ASTRO2002202, ASTRO2002459, ASTRO2002571, ASTRO2002632, ASTRO2002659, ASTRO2002693, ASTRO2002720, ASTRO2002733, ASTRO2002743, ASTRO2002842, ASTRO2003024, ASTRO2003212, ASTRO2003316, ASTRO2003461, ASTRO2003574, ASTRO2003581, ASTRO2003740, ASTRO2003840, ASTRO2003925, ASTRO2003960, ASTRO2004032, ASTRO2004051, ASTRO2004177, ASTRO2004217, ASTRO2004297, ASTRO2004584, ASTRO2004628, ASTRO2004751, ASTRO2004877, ASTRO2005008, ASTRO2005081, ASTRO2005096, ASTRO2005242, ASTRO2005273, ASTRO2005343, ASTRO2005360, ASTRO2005413, ASTRO2005423, ASTRO2005553, ASTRO2005557, ASTRO2005575, ASTRO2005593, ASTRO2005726, ASTRO2005863, ASTRO2005896, ASTRO2005902, ASTRO2006356, ASTRO2006475, ASTRO2006732, ASTRO2006747, ASTRO2006920, ASTRO2006952, ASTRO2007047, ASTRO2007221, ASTRO2007377, ASTRO2007515, ASTRO2007578, ASTRO2007643, ASTRO2007666, ASTRO2007948, ASTRO2007956, ASTRO2007962, ASTRO2008040, ASTRO2008216, ASTRO2008239, ASTRO2008409, ASTRO2008425, ASTRO2008508, ASTRO2008777, ASTRO2008895, ASTRO2008960, ASTRO2008972, ASTRO2009118, ASTRO2009177, ASTRO2009333, ASTRO2009458, ASTRO2009526, ASTRO2009879, ASTRO2010072, ASTRO2010582, ASTRO2010615, ASTRO2010799, ASTRO2010962, ASTRO2010996, ASTRO2011149, ASTRO2011422, ASTRO2011426, ASTRO2011437, ASTRO2011461, ASTRO2011834, ASTRO2011893, ASTRO2013124, ASTRO2013671, ASTRO2013802, ASTRO2014135, ASTRO2014174, ASTRO2014211, ASTRO2014363, ASTRO2014392, ASTRO2014498, ASTRO2014561, ASTRO2014576, ASTRO2014863, ASTRO2014923, ASTRO2014961, ASTRO2015162, ASTRO2015185, ASTRO2015529, ASTRO2015987, ASTRO2016044, ASTRO2016114, ASTRO2016148, ASTRO2016491, ASTRO2016681, ASTRO2016819, ASTRO2016847, ASTRO2016892, ASTRO2017348, ASTRO2017627, ASTRO2018169, ASTRO2018373, ASTRO2018540, ASTRO2019039, ASTRO2019171, ASTRO3000154, ASTRO3000172, ASTRO3000177, ASTRO3000301, ASTRO3000474, ASTRO3000482, BEAST2000454, BGGI11000123, BGGI11000193, BGGI11000285, BGGI12000022, BGGI12000054, BGGI12000067, BGGI12000161, BGGI12000533, BGGI12000544, BGGI12000616, BGGI12000684, BGGI12000693, BGGI12000839, BGGI12001002, BGGI12001075, BGGI12001097, BGGI12001241, BGGI12001247, BGGI12001682, BGGI12001714, BLADE1000176, BLADE2000181, BLADE2000256, BLADE2000340, BLADE2000389, BLADE2000463, BLADE2000492, BLADE2000579, BLADE2000640, BLADE2000866, BLADE2000938, BLADE2001031, BLADE2001133, BLADE2001138, BLADE2001141, BLADE2001371, BLADE2001458, BLADE2001575, BLADE2001753, BLADE2001935, BLADE2001940, BLADE2001987, BLADE2002073, BLADE2002310, BLADE2002730, BLADE2002738, BLADE2002744, BLADE2002782, BLADE2002947, BLADE2002972, BLADE2003474, BLADE2003916, BLADE2004089, BLADE2004345, BLADE2004389, BLADE2004462, BLADE2004628, BLADE2004670, BLADE2004722, BLADE2004849, BLADE2005036, BLADE2005038, BLADE2005229, BLADE2005459, BLADE2005792, BLADE2006043, BLADE2006412, BLADE2006415, BLADE2006607, BLADE2006826, BLADE2006830, BLADE2006849, BLADE2006947, BLADE2007033, BLADE2007043, BLADE2007589, BLADE2007666, BLADE2007722, BLADE2007735, BLADE2007744, BLADE2007799, BLADE2007923, BLADE2007935, BLADE2007958, BLADE2008281, BLADE2008398, BLADE2008454, BLADE2008461, BLADE2008479, BLADE2008539, BLADE2008809, BLADE2008995, BLADE2009452, BLADE2009479, BLADE2009593, BNGH41000098, BNGH41000104, BNGH41000118, BNGH41000137, BNGH41000153, BNGH41000169, BNGH41000177, BNGH41000190, BNGH41000198, BNGH41000216, BNGH41000235, BNGH42000130, BNGH42000132, BNGH42000405, BNGH42000532, BNGH42000675, BNGH42000739, BNGH42000791, BNGH42000994, BNGH42001247, BNGH42001406, BNGH42001576, BNGH42001724, BNGH42002168, BNGH42002244, BNGH42002387, BNGH42002487, BNGH42002489, BNGH42003529, BNGH42003570, BNGH42003641, BNGH42004076, BNGH42004291, BNGH42004538, BNGH42004679, BNGH42005235, BNGH42005504, BNGH42006135, BNGH42006226, BNGH42006234, BNGH42007037, BNGH42007366, BNGH42007594, BNGH42007788, BNGH42007798, BNGH42008199, BNGH42008510, BNGH42008603, BNGH42008649, BNGH42008743, BNGH42008832, BNGH42008850, BNGH42008943, BNGH42009021, BNGH42009025, BRACE1000020, BRACE1000042, BRACE1000047, BRACE1000051, BRACE1000065, BRACE1000070, BRACE1000073, BRACE1000084, BRACE1000087, BRACE1000092, BRACE1000093, BRACE1000101, BRACE1000114, BRACE1000124, BRACE1000131, BRACE1000132, BRACE1000159, BRACE1000166, BRACE1000169, BRACE1000186, BRACE1000187, BRACE1000239, BRACE1000258, BRACE1000451, BRACE1000475, BRACE1000572, BRACE2000061, BRACE2000077, BRACE2000078, BRACE2000100, BRACE2000109, BRACE2000141, BRACE2000148, BRACE2000183, BRACE2000229, BRACE2000232, BRACE2000245, BRACE2000256, BRACE2000266, BRACE2000267, BRACE2000280, BRACE2000300, BRACE2000307, BRACE2000331, BRACE2000332, BRACE2000347, BRACE2000351, BRACE2000368, BRACE2000392, BRACE2000441, BRACE2000487, BRACE2000489, BRACE2000505, BRACE2000525, BRACE2000526, BRACE2000531, BRACE2000545, BRACE2000553, BRACE2000565, BRACE2000577, BRACE2000640, BRACE2000650, BRACE2000677, BRACE2000698, BRACE2000718, BRACE2000733, BRACE2000743, BRACE2000750, BRACE2000753, BRACE2000815, BRACE2000864, BRACE2000885, BRACE2000893, BRACE2000905, BRACE2000936, BRACE2000947, BRACE2000965, BRACE2000969, BRACE2000975, BRACE2000988, BRACE2001017, BRACE2001065, BRACE2001070, BRACE2001094, BRACE2001107, BRACE2001117, BRACE2001143, BRACE2001151, BRACE2001154, BRACE2001188, BRACE2001191, BRACE2001197, BRACE2001236, BRACE2001239, BRACE2001269, BRACE2001312, BRACE2001313, BRACE2001330, BRACE2001340, BRACE2001352, BRACE2001353, BRACE2001374, BRACE2001375, BRACE2001423, BRACE2001424, BRACE2001445, BRACE2001453, BRACE2001455, BRACE2001477, BRACE2001492, BRACE2001496, BRACE2001497, BRACE2001508, BRACE2001534, BRACE2001543, BRACE2001564, BRACE2001588, BRACE2001607, BRACE2001626, BRACE2001673, BRACE2001677, BRACE2001692, BRACE2001705, BRACE2001709, BRACE2001726, BRACE2001733, BRACE2001737, BRACE2001742, BRACE2001777, BRACE2001779, BRACE2001834, BRACE2001855, BRACE2001859, BRACE2001865, BRACE2001872, BRACE2001881, BRACE2001892, BRACE2001898, BRACE2001923, BRACE2001942, BRACE2001944, BRACE2001954, BRACE2001971, BRACE2001972, BRACE2001973, BRACE2002026, BRACE2002034, BRACE2002050, BRACE2002081, BRACE2002091, BRACE2002139, BRACE2002142, BRACE2002151, BRACE2002157, BRACE2002176, BRACE2002202, BRACE2002206, BRACE2002227, BRACE2002260, BRACE2002297, BRACE2002304, BRACE2002356, BRACE2002392, BRACE2002394, BRACE2002409, BRACE2002431, BRACE2002444, BRACE2002458, BRACE2002467, BRACE2002468, BRACE2002478, BRACE2002495, BRACE2002582, BRACE2002585, BRACE2002589, BRACE2002590, BRACE2002606, BRACE2002613, BRACE2002614, BRACE2002617, BRACE2002623, BRACE2002635, BRACE2002649, BRACE2002661, BRACE2002676, BRACE2002677, BRACE2002682, BRACE2002685, BRACE2002695, BRACE2002707, BRACE2002736, BRACE2002752, BRACE2002755, BRACE2002762, BRACE2002772, BRACE2002792, BRACE2002796, BRACE2002803, BRACE2002807, BRACE2002812, BRACE2002834, BRACE2002849, BRACE2002857, BRACE2002860, BRACE2002861, BRACE2002884, BRACE2002896, BRACE2002948, BRACE2003037, BRACE2003078, BRACE2003097, BRACE2003110, BRACE2003168, BRACE2003199, BRACE2003210, BRACE2003217, BRACE2003269, BRACE2003285, BRACE2003304, BRACE2003319, BRACE2003398, BRACE2003420, BRACE2003428, BRACE2003431, BRACE2003512, BRACE2003516, BRACE2003527, BRACE2003539, BRACE2003540, BRACE2003594, BRACE2003598, BRACE2003609, BRACE2003614, BRACE2003628, BRACE2003639, BRACE2003700, BRACE2003713, BRACE2003766, BRACE2003785, BRACE2003788, BRACE2003800, BRACE2003802, BRACE2003825, BRACE2003827, BRACE2003845, BRACE2003847, BRACE2003848, BRACE2003873, BRACE2003885, BRACE2003887, BRACE2003892, BRACE2003904, BRACE2003905, BRACE2003928, BRACE2003944, BRACE2003954, BRACE2003982, BRACE2003987, BRACE2005034, BRACE2005047, BRACE2005063, BRACE2005083, BRACE2005087, BRACE2005090, BRACE2005099, BRACE2005118, BRACE2005124, BRACE2005138, BRACE2005151, BRACE2005160, BRACE2005169, BRACE2005189, BRACE2005193, BRACE2005196, BRACE2005198, BRACE2005216, BRACE2005231, BRACE2005243, BRACE2005251, BRACE2005253, BRACE2005290, BRACE2005298, BRACE2005328, BRACE2005329, BRACE2005337, BRACE2005348, BRACE2005363, BRACE2005395, BRACE2005408, BRACE2005433, BRACE2005434, BRACE2005448, BRACE2005450, BRACE2005453, BRACE2005457, BRACE2005460, BRACE2005489, BRACE2005518, BRACE2005556, BRACE2005562, BRACE2005624, BRACE2005642, BRACE2005661, BRACE2005667, BRACE2005681, BRACE2005719, BRACE2005731, BRACE2005742, BRACE2005762, BRACE2005773, BRACE2005787, BRACE2005795, BRACE2005800, BRACE2005858, BRACE2005869, BRACE2005875, BRACE2005881, BRACE2005898, BRACE2005904, BRACE2005906, BRACE2005907, BRACE2005911, BRACE2005937, BRACE2005949, BRACE2005981, BRACE2005991, BRACE2006055, BRACE2006072, BRACE2006075, BRACE2006084, BRACE2006089, BRACE2006102, BRACE2006105, BRACE2006122, BRACE2006137, BRACE2006143, BRACE2006162, BRACE2006167, BRACE2006174, BRACE2006240, BRACE2006245, BRACE2006249, BRACE2006258, BRACE2006264, BRACE2006274, BRACE2006281, BRACE2006298, BRACE2006319, BRACE2006344, BRACE2006354, BRACE2006363, BRACE2006378, BRACE2006380, BRACE2006393, BRACE2006397, BRACE2006413, BRACE2006417, BRACE2006453, BRACE2006459, BRACE2006488, BRACE2006514, BRACE2006534, BRACE2006537, BRACE2006540, BRACE2006547, BRACE2006564, BRACE2006587, BRACE2006598, BRACE2006636, BRACE2006685, BRACE2006703, BRACE2006743, BRACE2006753, BRACE2006783, BRACE2006821, BRACE2006833, BRACE2006859, BRACE2006871, BRACE2006900, BRACE2006909, BRACE2006911, BRACE2006924, BRACE2006935, BRACE2006937, BRACE2006944, BRACE2006951, BRACE2006982, BRACE2006986, BRACE2007013, BRACE2007064, BRACE2007068, BRACE2007087, BRACE2007089, BRACE2007109, BRACE2007138, BRACE2007174, BRACE2007191, BRACE2007197, BRACE2007201, BRACE2007203, BRACE2007232, BRACE2007254, BRACE2007262, BRACE2007274, BRACE2007281, BRACE2007295, BRACE2007358, BRACE2007396, BRACE2007398, BRACE2007401, BRACE2007411, BRACE2007447, BRACE2007477, BRACE2007502, BRACE2007503, BRACE2007518, BRACE2007522, BRACE2007527, BRACE2007538, BRACE2007563, BRACE2007621, BRACE2007640, BRACE2007641, BRACE2007646, BRACE2007663, BRACE2007671, BRACE2007682, BRACE2007685, BRACE2007708, BRACE2007727, BRACE2007749, BRACE2007760, BRACE2007761, BRACE2007764, BRACE2007767, BRACE2007768, BRACE2007769, BRACE2007784, BRACE2007786, BRACE2007798, BRACE2007799, BRACE2007801, BRACE2007832, BRACE2007836, BRACE2007868, BRACE2007882, BRACE2007888, BRACE2007902, BRACE2007920, BRACE2007937, BRACE2007944, BRACE2007952, BRACE2008008, BRACE2008015, BRACE2008021, BRACE2008097, BRACE2008102, BRACE2008114, BRACE2008144, BRACE2008172, BRACE2008216, BRACE2008218, BRACE2008251, BRACE2008276, BRACE2008295, BRACE2008308, BRACE2008336, BRACE2008361, BRACE2008380, BRACE2008385, BRACE2008399, BRACE2008401, BRACE2008402, BRACE2008410, BRACE2008420, BRACE2008443, BRACE2008473, BRACE2008480, BRACE2008481, BRACE2008488, BRACE2008495, BRACE2008500, BRACE2008553, BRACE2008594, BRACE2008604, BRACE2008615, BRACE2008622, BRACE2008629, BRACE2008655, BRACE2008656, BRACE2008706, BRACE2008708, BRACE2008710, BRACE2008754, BRACE2008797, BRACE2008847, BRACE2008857, BRACE2008861, BRACE2008867, BRACE2008881, BRACE2008883, BRACE2008917, BRACE2008919, BRACE2008941, BRACE2008948, BRACE2008960, BRACE2008999, BRACE2009014, BRACE2009016, BRACE2009031, BRACE2009044, BRACE2009045, BRACE2009053, BRACE2009122, BRACE2009131, BRACE2009185, BRACE2009188, BRACE2009212, BRACE2009221, BRACE2009235, BRACE2009238, BRACE2009255, BRACE2009270, BRACE2009272, BRACE2009274, BRACE2009275, BRACE2009293, BRACE2009307, BRACE2009311, BRACE2009318, BRACE2009323, BRACE2009366, BRACE2009421, BRACE2009428, BRACE2009434, BRACE2009437, BRACE2009483, BRACE2009517, BRACE2009533, BRACE2009558, BRACE2009566, BRACE2009591, BRACE2009620, BRACE2009654, BRACE2009721, BRACE2009732, BRACE2009754, BRACE2009828, BRACE2009886, BRACE2009907, BRACE2009957, BRACE2010170, BRACE2010171, BRACE2010203, BRACE2010208, BRACE2010336, BRACE2010348, BRACE2010440, BRACE2010444, BRACE2010477, BRACE2010489, BRACE2010535, BRACE2010550, BRACE2010598, BRACE2010632, BRACE2010642, BRACE2010651, BRACE2010669, BRACE2010684, BRACE2010753, BRACE2010813, BRACE2010828, BRACE2010837, BRACE2010888, BRACE2010937, BRACE2010983, BRACE2011007, BRACE2011025, BRACE2011183, BRACE2011199, BRACE2011265, BRACE2011389, BRACE2011478, BRACE2011545, BRACE2011592, BRACE2011611, BRACE2011646, BRACE2011677, BRACE2011703, BRACE2011747, BRACE2011838, BRACE2011892, BRACE2011904, BRACE2011947, BRACE2012061, BRACE2012062, BRACE2012185, BRACE2012222, BRACE2012232, BRACE2012291, BRACE2012317, BRACE2012510, BRACE2012528, BRACE2012625, BRACE2012653, BRACE2012814, BRACE2012833, BRACE2012838, BRACE2012936, BRACE2012947, BRACE2013009, BRACE2013010, BRACE2013126, BRACE2013132, BRACE2013149, BRACE2013369, BRACE2013806, BRACE2013855, BRACE2013911, BRACE2014108, BRACE2014161, BRACE2014232, BRACE2014257, BRACE2014268, BRACE2014306, BRACE2014475, BRACE2014657, BRACE2014746, BRACE2014780, BRACE2014818, BRACE2014821, BRACE2014824, BRACE2014850, BRACE2014854, BRACE2015031, BRACE2015058, BRACE2015132, BRACE2015262, BRACE2015270, BRACE2015287, BRACE2015314, BRACE2015352, BRACE2015368, BRACE2015412, BRACE2015436, BRACE2015741, BRACE2015756, BRACE2015969, BRACE2015995, BRACE2016058, BRACE2016194, BRACE2016315, BRACE2016325, BRACE2016335, BRACE2016362, BRACE2016366, BRACE2016465, BRACE2016516, BRACE2016583, BRACE2016708, BRACE2016821, BRACE2016896, BRACE2016981, BRACE2017108, BRACE2017124, BRACE2017298, BRACE2017359, BRACE2017397, BRACE2017410, BRACE2017438, BRACE2017574, BRACE2017580, BRACE2017587, BRACE2017720, BRACE2017844, BRACE2017872, BRACE2017929, BRACE2017934, BRACE2017985, BRACE2017992, BRACE2018337, BRACE2018443, BRACE2018448, BRACE2018568, BRACE2018700, BRACE2018727, BRACE2018736, BRACE2018759, BRACE2018762, BRACE2018782, BRACE2018847, BRACE2019004, BRACE2019044, BRACE2019244, BRACE2019258, BRACE2019327, BRACE2019348, BRACE2019371, BRACE2019467, BRACE2019510, BRACE2019519, BRACE2019528, BRACE2019618, BRACE2019696, BRACE2019703, BRACE2019843, BRACE2019865, BRACE2019872, BRACE2019877, BRACE2020028, BRACE2020077, BRACE2020097, BRACE2020157, BRACE2020278, BRACE2020358, BRACE2020467, BRACE2020584, BRACE2020652, BRACE2020709, BRACE2020742, BRACE2020756, BRACE2020863, BRACE2020982, BRACE2021014, BRACE2021143, BRACE2021148, BRACE2021245, BRACE2021254, BRACE2021264, BRACE2021344, BRACE2021433, BRACE2021478, BRACE2021541, BRACE2021670, BRACE2021695, BRACE2021708, BRACE2021721, BRACE2021932, BRACE2021936, BRACE2022030, BRACE2022158, BRACE2022196, BRACE2022270, BRACE2022328, BRACE2022333, BRACE2022389, BRACE2022394, BRACE2022435, BRACE2022448, BRACE2022450, BRACE2022549, BRACE2022633, BRACE2022638, BRACE2022693, BRACE2022848, BRACE2022928, BRACE2022990, BRACE2023069, BRACE2023070, BRACE2023223, BRACE2023268, BRACE2023284, BRACE2023404, BRACE2023451, BRACE2023540, BRACE2023633, BRACE2023718, BRACE2023727, BRACE2023744, BRACE2023800, BRACE2023801, BRACE2024074, BRACE2024222, BRACE2024610, BRACE2024627, BRACE2024781, BRACE2024826, BRACE2025018, BRACE2025316, BRACE2025333, BRACE2025437, BRACE2025452, BRACE2025492, BRACE2025710, BRACE2025796, BRACE2025992, BRACE2026054, BRACE2026131, BRACE2026141, BRACE2026142, BRACE2026293, BRACE2026294, BRACE2026404, BRACE2026675, BRACE2026725, BRACE2026836, BRACE2026920, BRACE2026971, BRACE2027018, BRACE2027221, BRACE2027258, BRACE2027312, BRACE2027382, BRACE2027389, BRACE2027408, BRACE2027643, BRACE2027767, BRACE2027770, BRACE2027879, BRACE2027896, BRACE2027970, BRACE2028171, BRACE2028392, BRACE2028410, BRACE2028636, BRACE2028741, BRACE2028956, BRACE2028970, BRACE2029112, BRACE2029356, BRACE2029396, BRACE2029581, BRACE2029644, BRACE2029849, BRACE2030039, BRACE2030096, BRACE2030323, BRACE2030326, BRACE2030341, BRACE2030345, BRACE2030736, BRACE2030883, BRACE2030884, BRACE2031154, BRACE2031232, BRACE2031527, BRACE2031531, BRACE2031553, BRACE2031899, BRACE2032044, BRACE2032090, BRACE2032134, BRACE2032148, BRACE2032182, BRACE2032329, BRACE2032385, BRACE2032436, BRACE2032477, BRACE2032502, BRACE2032538, BRACE2032584, BRACE2032823, BRACE2033128, BRACE2033394, BRACE2033478, BRACE2033720, BRACE2033786, BRACE2034434, BRACE2034523, BRACE2034616, BRACE2034622, BRACE2034870, BRACE2035003, BRACE2035120, BRACE2035124, BRACE2035191, BRACE2035278, BRACE2035381, BRACE2035441, BRACE2035485, BRACE2036005, BRACE2036096, BRACE2036743, BRACE2036830, BRACE2036834, BRACE2036900, BRACE2037132, BRACE2037294, BRACE2037295, BRACE2037299, BRACE2037310, BRACE2037431, BRACE2037692, BRACE2037847, BRACE2038114, BRACE2038269, BRACE2038271, BRACE2038329, BRACE2038492, BRACE2038551, BRACE2038618, BRACE2039009, BRACE2039128, BRACE2039170, BRACE2039249, BRACE2039286, BRACE2039297, BRACE2039327, BRACE2039362, BRACE2039475, BRACE2039600, BRACE2039607, BRACE2039624, BRACE2039734, BRACE2039823, BRACE2039832, BRACE2039893, BRACE2039986, BRACE2040138, BRACE2040325, BRACE2040514, BRACE2040640, BRACE2040987, BRACE2041009, BRACE2041095, BRACE2041200, BRACE2041264, BRACE2041890, BRACE2041898, BRACE2042394, BRACE2042398, BRACE2042550, BRACE2042620, BRACE2042628, BRACE2042873, BRACE2043036, BRACE2043105, BRACE2043142, BRACE2043248, BRACE2043349, BRACE2043381, BRACE2043774, BRACE2043942, BRACE2044057, BRACE2044105, BRACE2044263, BRACE2044286, BRACE2044304, BRACE2044473, BRACE2044510, BRACE2044640, BRACE2044816, BRACE2044946, BRACE2044949, BRACE2045300, BRACE2045428, BRACE2045445, BRACE2045596, BRACE2045947, BRACE2045954, BRACE2046251, BRACE2046295, BRACE2046976, BRACE2047011, BRACE2047232, BRACE2047350, BRACE2047377, BRACE2047385, BRACE2047492, BRACE2047558, BRACE2047573, BRACE2047835, BRACE2047893, BRACE2047975, BRACE3000071, BRACE3000404, BRACE3000520, BRACE3000697, BRACE3000840, BRACE3000973, BRACE3001002, BRACE3001058, BRACE3001066, BRACE3001113, BRACE3001217, BRACE3001299, BRACE3001384, BRACE3001391, BRACE3001403, BRACE3001595, BRACE3001754, BRACE3001948, BRACE3001973, BRACE3002184, BRACE3002298, BRACE3002344, BRACE3002390, BRACE3002420, BRACE3002508, BRACE3002541, BRACE3002756, BRACE3003004, BRACE3003026, BRACE3003053, BRACE3003192, BRACE3003413, BRACE3003595, BRACE3003698, BRACE3003866, BRACE3003920, BRACE3004046, BRACE3004058, BRACE3004113, BRACE3004205, BRACE3004358, BRACE3004371, BRACE3004435, BRACE3004477, BRACE3004767, BRACE3004772, BRACE3004783, BRACE3004843, BRACE3004862, BRACE3004880, BRACE3004887, BRACE3004981, BRACE3004996, BRACE3004998, BRACE3005103, BRACE3005127, BRACE3005145, BRACE3005217, BRACE3005225, BRACE3005430, BRACE3005499, BRACE3005760, BRACE3005870, BRACE3005903, BRACE3005989, BRACE3006113, BRACE3006185, BRACE3006226, BRACE3006462, BRACE3006463, BRACE3006553, BRACE3006872, BRACE3006917, BRACE3007058, BRACE3007084, BRACE3007085, BRACE3007258, BRACE3007322, BRACE3007472, BRACE3007480, BRACE3007559, BRACE3007625, BRACE3007642, BRACE3007649, BRACE3007767, BRACE3007869, BRACE3008036, BRACE3008066, BRACE3008092, BRACE3008095, BRACE3008137, BRACE3008255, BRACE3008337, BRACE3008384, BRACE3008720, BRACE3008772, BRACE3009044, BRACE3009075, BRACE3009090, BRACE3009127, BRACE3009197, BRACE3009237, BRACE3009265, BRACE3009297, BRACE3009377, BRACE3009392, BRACE3009416, BRACE3009539, BRACE3009574, BRACE3009701, BRACE3009708, BRACE3009724, BRACE3009993, BRACE3010076, BRACE3010079, BRACE3010086, BRACE3010221, BRACE3010283, BRACE3010315, BRACE3010397, BRACE3010416, BRACE3010428, BRACE3010435, BRACE3010702, BRACE3010862, BRACE3011271, BRACE3011421, BRACE3011447, BRACE3011505, BRACE3011634, BRACE3011774, BRACE3012357, BRACE3012574, BRACE3012806, BRACE3012930, BRACE3013119, BRACE3013418, BRACE3013576, BRACE3013740, BRACE3013780, BRACE3013874, BRACE3013936, BRACE3013986, BRACE3014005, BRACE3014068, BRACE3014231, BRACE3014290, BRACE3014317, BRACE3014523, BRACE3014714, BRACE3014807, BRACE3014942, BRACE3015090, BRACE3015121, BRACE3015262, BRACE3015521, BRACE3015808, BRACE3015829, BRACE3015894, BRACE3015898, BRACE3016020, BRACE3016122, BRACE3016167, BRACE3016170, BRACE3016580, BRACE3016788, BRACE3016810, BRACE3016862, BRACE3016884, BRACE3017083, BRACE3017253, BRACE3018083, BRACE3018308, BRACE3018963, BRACE3019055, BRACE3019071, BRACE3019084, BRACE3019570, BRACE3019611, BRACE3019817, BRACE3019828, BRACE3019941, BRACE3020151, BRACE3020194, BRACE3020286, BRACE3020356, BRACE3020594, BRACE3020669, BRACE3020671, BRACE3020890, BRACE3021148, BRACE3021430, BRACE3021517, BRACE3021805, BRACE3022051, BRACE3022303, BRACE3022312, BRACE3022340, BRACE3022847, BRACE3023604, BRACE3023912, BRACE3024073, BRACE3024359, BRACE3024379, BRACE3024444, BRACE3024497, BRACE3024537, BRACE3024659, BRACE3024662, BRACE3024879, BRACE3025153, BRACE3025302, BRACE3025457, BRACE3025531, BRACE3025627, BRACE3025630, BRACE3025719, BRACE3026008, BRACE3026075, BRACE3026161, BRACE3026290, BRACE3026345, BRACE3026456, BRACE3026735, BRACE3026802, BRACE3026844, BRACE3026947, BRACE3026993, BRACE3027242, BRACE3027256, BRACE3027326, BRACE3027478, BRACE3027480, BRACE3027931, BRACE3027976, BRACE3028214, BRACE3028241, BRACE3028360, BRACE3028895, BRACE3028998, BRACE3029005, BRACE3029021, BRACE3029205, BRACE3029447, BRACE3030057, BRACE3030103, BRACE3030538, BRACE3030748, BRACE3030866, BRACE3031161, BRACE3031184, BRACE3031185, BRACE3031315, BRACE3031372, BRACE3031579, BRACE3031728, BRACE3031838, BRACE3031843, BRACE3032427, BRACE3032455, BRACE3032537, BRACE3032538, BRACE3032631, BRACE3032771, BRACE3032980, BRACE3032983, BRACE3033525, BRACE3034159, BRACE3034183, BRACE3034389, BRACE3034964, BRACE3034993, BRACE3035168, BRACE3035227, BRACE3036156, BRACE3036271, BRACE3037612, BRACE3037637, BRACE3037803, BRACE3038012, BRACE3038030, BRACE3038569, BRACE3038570, BRACE3038687, BRACE3038760, BRACE3039288, BRACE3039358, BRACE3039378, BRACE3039454, BRACE3040012, BRACE3040239, BRACE3040504, BRACE3040644, BRACE3040856, BRACE3040863, BRACE3041059, BRACE3041162, BRACE3041827, BRACE3042046, BRACE3042210, BRACE3042326, BRACE3042409, BRACE3042432, BRACE3042594, BRACE3043597, BRACE3044090, BRACE3044172, BRACE3044247, BRACE3044377, BRACE3044389, BRACE3044495, BRACE3045011, BRACE3045033, BRACE3045078, BRACE3045145, BRACE3045424, BRACE3045708, BRACE3045981, BRACE3046049, BRACE3046152, BRACE3046294, BRACE3046450, BRACE3046466, BRACE3046491, BRACE3046609, BRACE3046762, BRACE3046837, BRACE3046855, BRACE3046966, BRACE3047018, BRACE3047482, BRACE3047801, BRALZ1000047, BRALZ1000103, BRALZ2000189, BRALZ2000263, BRALZ2000988, BRALZ2001038, BRALZ2001279, BRALZ2001350, BRALZ2001445, BRALZ2001559, BRALZ2001743, BRALZ2001834, BRALZ2002174, BRALZ2002418, BRALZ2002477, BRALZ2003119, BRALZ2003330, BRALZ2003453, BRALZ2003525, BRALZ2004397, BRALZ2005467, BRALZ2005471, BRALZ2005888, BRALZ2005950, BRALZ2005992, BRALZ2006288, BRALZ2006474, BRALZ2006560, BRALZ2006734, BRALZ2006800, BRALZ2006976, BRALZ2007376, BRALZ2007545, BRALZ2007576, BRALZ2007661, BRALZ2007790, BRALZ2007793, BRALZ2007952, BRALZ2008031, BRALZ2008166, BRALZ2008462, BRALZ2008617, BRALZ2008696, BRALZ2008763, BRALZ2008869, BRALZ2008930, BRALZ2009446, BRALZ2009482, BRALZ2009486, BRALZ2010186, BRALZ2010842, BRALZ2011337, BRALZ2011796, BRALZ2011880, BRALZ2012050, BRALZ2012183, BRALZ2012848, BRALZ2013621, BRALZ2013690, BRALZ2014054, BRALZ2014316, BRALZ2014484, BRALZ2014951, BRALZ2015168, BRALZ2015811, BRALZ2016085, BRALZ2016498, BRALZ2017359, BRALZ2017531, BRALZ2017607, BRALZ2017620, BRALZ2017844, BRALZ2018342, BRALZ2018492, BRALZ2018834, BRALZ2019047, BRAMY1000095, BRAMY1000098, BRAMY1000130, BRAMY1000157, BRAMY1000173, BRAMY2000021, BRAMY2000025, BRAMY2000052, BRAMY2000076, BRAMY2000086, BRAMY2000151, BRAMY2000181, BRAMY2000196, BRAMY2000231, BRAMY2000277, BRAMY2000354, BRAMY2000388, BRAMY2000411, BRAMY2000508, BRAMY2000562, BRAMY2000653, BRAMY2000814, BRAMY2000893, BRAMY2000946, BRAMY2000981, BRAMY2000987, BRAMY2001068, BRAMY2001114, BRAMY2001203, BRAMY2001282, BRAMY2001367, BRAMY2001427, BRAMY2001473, BRAMY2001678, BRAMY2002005, BRAMY2002044, BRAMY2002072, BRAMY2002158, BRAMY2002311, BRAMY2002339, BRAMY2002364, BRAMY2002369, BRAMY2002479, BRAMY2002493, BRAMY2002525, BRAMY2002584, BRAMY2002604, BRAMY2002621, BRAMY2002638, BRAMY2002739, BRAMY2002799, BRAMY2002853, BRAMY2002862, BRAMY2002956, BRAMY2003008, BRAMY2003037, BRAMY2003117, BRAMY2003287, BRAMY2003325, BRAMY2003529, BRAMY2003538, BRAMY2003585, BRAMY2003634, BRAMY2003653, BRAMY2003681, BRAMY2003893, BRAMY2003897, BRAMY2003898, BRAMY2003904, BRAMY2003926, BRAMY2003929, BRAMY2004031, BRAMY2004058, BRAMY2004183, BRAMY2004335, BRAMY2004351, BRAMY2004352, BRAMY2004363, BRAMY2004387, BRAMY2004492, BRAMY2004524, BRAMY2004537, BRAMY2004542, BRAMY2004756, BRAMY2004771, BRAMY2005052, BRAMY2005064, BRAMY2005094, BRAMY2005151, BRAMY2005182, BRAMY2005244, BRAMY2005391, BRAMY2005488, BRAMY2005576, BRAMY2005648, BRAMY2005662, BRAMY2005708, BRAMY2005711, BRAMY2006092, BRAMY2006118, BRAMY2006149, BRAMY2006366, BRAMY2006375, BRAMY2006397, BRAMY2006411, BRAMY2006459, BRAMY2006466, BRAMY2006659, BRAMY2006779, BRAMY2006809, BRAMY2006879, BRAMY2007043, BRAMY2007078, BRAMY2007110, BRAMY2007185, BRAMY2007244, BRAMY2007249, BRAMY2007255, BRAMY2007287, BRAMY2007308, BRAMY2007411, BRAMY2007458, BRAMY2007486, BRAMY2007546, BRAMY2007567, BRAMY2007594, BRAMY2007610, BRAMY2007613, BRAMY2007653, BRAMY2007753, BRAMY2007859, BRAMY2008333, BRAMY2008382, BRAMY2008563, BRAMY2008583, BRAMY2008977, BRAMY2008979, BRAMY2009013, BRAMY2009023, BRAMY2009034, BRAMY2009105, BRAMY2009123, BRAMY2009192, BRAMY2009344, BRAMY2009349, BRAMY2009394, BRAMY2009489, BRAMY2009508, BRAMY2009528, BRAMY2009557, BRAMY2009612, BRAMY2009693, BRAMY2009934, BRAMY2010068, BRAMY2010135, BRAMY2010145, BRAMY2010171, BRAMY2010208, BRAMY2010239, BRAMY2010272, BRAMY2010290, BRAMY2010357, BRAMY2010366, BRAMY2010395, BRAMY2010441, BRAMY2010442, BRAMY2010464, BRAMY2010581, BRAMY2010798, BRAMY2010808, BRAMY2010919, BRAMY2011064, BRAMY2011105, BRAMY2011178, BRAMY2011196, BRAMY2011216, BRAMY2011253, BRAMY2011446, BRAMY2011480, BRAMY2011639, BRAMY2011679, BRAMY2011811, BRAMY2011841, BRAMY2011846, BRAMY2011849, BRAMY2011872, BRAMY2011961, BRAMY2012017, BRAMY2012091, BRAMY2012119, BRAMY2012162, BRAMY2012163, BRAMY2012277, BRAMY2012340, BRAMY2012426, BRAMY2012497, BRAMY2012517, BRAMY2012536, BRAMY2012555, BRAMY2012568, BRAMY2012581, BRAMY2012691, BRAMY2012721, BRAMY2012731, BRAMY2012776, BRAMY2012880, BRAMY2012881, BRAMY2013169, BRAMY2013200, BRAMY2013216, BRAMY2013405, BRAMY2013414, BRAMY2013572, BRAMY2013590, BRAMY2013621, BRAMY2013659, BRAMY2013722, BRAMY2013736, BRAMY2013756, BRAMY2013944, BRAMY2013975, BRAMY2014019, BRAMY2014205, BRAMY2014387, BRAMY2014462, BRAMY2014469, BRAMY2014541, BRAMY2014754, BRAMY2014813, BRAMY2015251, BRAMY2015311, BRAMY2015420, BRAMY2015503, BRAMY2015516, BRAMY2015550, BRAMY2015551, BRAMY2015559, BRAMY2015688, BRAMY2015705, BRAMY2015782, BRAMY2015833, BRAMY2015855, BRAMY2015890, BRAMY2015911, BRAMY2015925, BRAMY2016002, BRAMY2016009, BRAMY2016020, BRAMY2016070, BRAMY2016251, BRAMY2016325, BRAMY2016327, BRAMY2016386, BRAMY2016706, BRAMY2016771, BRAMY2016892, BRAMY2016938, BRAMY2016953, BRAMY2017014, BRAMY2017249, BRAMY2017348, BRAMY2017450, BRAMY2017455, BRAMY2017528, BRAMY2017864, BRAMY2018027, BRAMY2018106, BRAMY2018122, BRAMY2018126, BRAMY2018272, BRAMY2018273, BRAMY2018279, BRAMY2018295, BRAMY2018308, BRAMY2018396, BRAMY2018467, BRAMY2018635, BRAMY2018785, BRAMY2019055, BRAMY2019111, BRAMY2019277, BRAMY2019300, BRAMY2019468, BRAMY2019509, BRAMY2019554, BRAMY2019643, BRAMY2019710, BRAMY2019963, BRAMY2019985, BRAMY2020050, BRAMY2020058, BRAMY2020106, BRAMY2020270, BRAMY2020354, BRAMY2020355, BRAMY2020412, BRAMY2020427, BRAMY2020445, BRAMY2020466, BRAMY2020520, BRAMY2020574, BRAMY2020634, BRAMY2020713, BRAMY2021040, BRAMY2021063, BRAMY2021098, BRAMY2021139, BRAMY2021142, BRAMY2021276, BRAMY2021310, BRAMY2021388, BRAMY2021498, BRAMY2021710, BRAMY2021732, BRAMY2021746, BRAMY2021825, BRAMY2021867, BRAMY2021962, BRAMY2021982, BRAMY2022052, BRAMY2022160, BRAMY2022168, BRAMY2022263, BRAMY2022301, BRAMY2022320, BRAMY2022383, BRAMY2022445, BRAMY2022454, BRAMY2022493, BRAMY2022525, BRAMY2022532, BRAMY2022723, BRAMY2022786, BRAMY2022796, BRAMY2022929, BRAMY2022980, BRAMY2022984, BRAMY2023060, BRAMY2023110, BRAMY2023115, BRAMY2023161, BRAMY2023172, BRAMY2023238, BRAMY2023327, BRAMY2023358, BRAMY2023406, BRAMY2023482, BRAMY2023514, BRAMY2023719, BRAMY2023729, BRAMY2023786, BRAMY2023852, BRAMY2023863, BRAMY2023939, BRAMY2024004, BRAMY2024073, BRAMY2024312, BRAMY2024374, BRAMY2024390, BRAMY2024416, BRAMY2024449, BRAMY2024489, BRAMY2024497, BRAMY2024514, BRAMY2024530, BRAMY2024535, BRAMY2024545, BRAMY2024576, BRAMY2024593, BRAMY2024711, BRAMY2024715, BRAMY2024728, BRAMY2024827, BRAMY2024849, BRAMY2025024, BRAMY2025032, BRAMY2025121, BRAMY2025175, BRAMY2025218, BRAMY2025230, BRAMY2025272, BRAMY2025277, BRAMY2025495, BRAMY2025812, BRAMY2025996, BRAMY2026009, BRAMY2026091, BRAMY2026168, BRAMY2026300, BRAMY2026347, BRAMY2026395, BRAMY2026405, BRAMY2026533, BRAMY2026538, BRAMY2026685, BRAMY2026713, BRAMY2026778, BRAMY2026824, BRAMY2026899, BRAMY2026902, BRAMY2026904, BRAMY2026976, BRAMY2027073, BRAMY2027114, BRAMY2027140, BRAMY2027242, BRAMY2027396, BRAMY2027451, BRAMY2027461, BRAMY2027467, BRAMY2027587, BRAMY2027714, BRAMY2027717, BRAMY2027739, BRAMY2027752, BRAMY2027782, BRAMY2028072, BRAMY2028183, BRAMY2028188, BRAMY2028269, BRAMY2028282, BRAMY2028472, BRAMY2028491, BRAMY2028516, BRAMY2028565, BRAMY2028593, BRAMY2028682, BRAMY2028740, BRAMY2028783, BRAMY2028856, BRAMY2028914, BRAMY2029204, BRAMY2029602, BRAMY2029988, BRAMY2030098, BRAMY2030109, BRAMY2030206, BRAMY2030477, BRAMY2030545, BRAMY2030607, BRAMY2030702, BRAMY2030703, BRAMY2030768, BRAMY2030799, BRAMY2030859, BRAMY2030915, BRAMY2031317, BRAMY2031377, BRAMY2031442, BRAMY2031516, BRAMY2032014, BRAMY2032231, BRAMY2032242, BRAMY2032290, BRAMY2032311, BRAMY2032317, BRAMY2032344, BRAMY2032589, BRAMY2032678, BRAMY2032696, BRAMY2032777, BRAMY2032994, BRAMY2033003, BRAMY2033116, BRAMY2033240, BRAMY2033267, BRAMY2033316, BRAMY2033332, BRAMY2033506, BRAMY2033594, BRAMY2033895, BRAMY2033914, BRAMY2034072, BRAMY2034185, BRAMY2034187, BRAMY2034305, BRAMY2034561, BRAMY2034920, BRAMY2034993, BRAMY2035070, BRAMY2035449, BRAMY2035545, BRAMY2035606, BRAMY2035718, BRAMY2035719, BRAMY2035801, BRAMY2035869, BRAMY2035923, BRAMY2036076, BRAMY2036079, BRAMY2036254, BRAMY2036266, BRAMY2036387, BRAMY2036396, BRAMY2036459, BRAMY2036567, BRAMY2036615, BRAMY2036699, BRAMY2036913, BRAMY2036918, BRAMY2036968, BRAMY2037147, BRAMY2037328, BRAMY2037609, BRAMY2037629, BRAMY2037800, BRAMY2037823, BRAMY2037971, BRAMY2038100, BRAMY2038128, BRAMY2038317, BRAMY2038475, BRAMY2038484, BRAMY2038516, BRAMY2038832, BRAMY2038846, BRAMY2038887, BRAMY2038904, BRAMY2039287, BRAMY2039300, BRAMY2039314, BRAMY2039341, BRAMY2039630, BRAMY2039695, BRAMY2039728, BRAMY2039872, BRAMY2040051, BRAMY2040159, BRAMY2040214, BRAMY2040478, BRAMY2040592, BRAMY2040915, BRAMY2041261, BRAMY2041347, BRAMY2041378, BRAMY2041384, BRAMY2041434, BRAMY2041507, BRAMY2041542, BRAMY2041738, BRAMY2042122, BRAMY2042131, BRAMY2042178, BRAMY2042195, BRAMY2042244, BRAMY2042549, BRAMY2042596, BRAMY2042612, BRAMY2042641, BRAMY2042711, BRAMY2042760, BRAMY2042804, BRAMY2042899, BRAMY2042918, BRAMY2043069, BRAMY2043103, BRAMY2043314, BRAMY2043345, BRAMY2044246, BRAMY2044317, BRAMY2044349, BRAMY2044686, BRAMY2044838, BRAMY2045036, BRAMY2045299, BRAMY2045471, BRAMY2045530, BRAMY2046109, BRAMY2046478, BRAMY2046489, BRAMY2046537, BRAMY2046667, BRAMY2046742, BRAMY2046871, BRAMY2046984, BRAMY2046989, BRAMY2047169, BRAMY2047280, BRAMY2047420, BRAMY2047676, BRAMY2047692, BRAMY2047746, BRAMY2047751, BRAMY2047765, BRAMY2047884, BRAMY2047948, BRAMY3000206, BRAMY3000210, BRAMY3000213, BRAMY3000224, BRAMY3000254, BRAMY3000307, BRAMY3000692, BRAMY3001356, BRAMY3001401, BRAMY3001409, BRAMY3001794, BRAMY3002120, BRAMY3002312, BRAMY3002329, BRAMY3002458, BRAMY3002508, BRAMY3002620, BRAMY3002803, BRAMY3002805, BRAMY3002886, BRAMY3002991, BRAMY3003026, BRAMY3003109, BRAMY3003205, BRAMY3003310, BRAMY3003566, BRAMY3003723, BRAMY3004126, BRAMY3004224, BRAMY3004364, BRAMY3004672, BRAMY3004800, BRAMY3004900, BRAMY3004919, BRAMY3005091, BRAMY3005184, BRAMY3005656, BRAMY3005912, BRAMY3005932, BRAMY3006032, BRAMY3006297, BRAMY3006761, BRAMY3007078, BRAMY3007206, BRAMY3007311, BRAMY3007350, BRAMY3007449, BRAMY3007471, BRAMY3007609, BRAMY3007723, BRAMY3007968, BRAMY3008044, BRAMY3008088, BRAMY3008096, BRAMY3008335, BRAMY3008466, BRAMY3008505, BRAMY3008650, BRAMY3008937, BRAMY3009158, BRAMY3009207, BRAMY3009491, BRAMY3009556, BRAMY3009782, BRAMY3009811, BRAMY3009904, BRAMY3010264, BRAMY3010321, BRAMY3010411, BRAMY3010492, BRAMY3010603, BRAMY3010654, BRAMY4000089, BRAMY4000095, BRAMY4000229, BRAMY4000277, BRAMY4000915, BRAMY4000962, BRAMY4001173, BRAMY4001200, BRAMY4001234, BRAMY4001449, BRAMY4001652, BRAMY4001863, BRAMY4001913, BRAMY4002575, BRAMY4002628, BRASW1000053, BRASW1000125, BRAWH1000001, BRAWH1000002, BRAWH1000007, BRAWH1000037, BRAWH1000045, BRAWH1000083, BRAWH1000094, BRAWH1000116, BRAWH1000127, BRAWH1000130, BRAWH1000157, BRAWH1000162, BRAWH1000164, BRAWH1000168, BRAWH1000174, BRAWH1000180, BRAWH1000369, BRAWH2000034, BRAWH2000048, BRAWH2000071, BRAWH2000082, BRAWH2000093, BRAWH2000109, BRAWH2000131, BRAWH2000142, BRAWH2000169, BRAWH2000177, BRAWH2000218, BRAWH2000232, BRAWH2000248, BRAWH2000256, BRAWH2000274, BRAWH2000323, BRAWH2000353, BRAWH2000370, BRAWH2000409, BRAWH2000417, BRAWH2000443, BRAWH2000460, BRAWH2000471, BRAWH2000476, BRAWH2000482, BRAWH2000488, BRAWH2000494, BRAWH2000500, BRAWH2000503, BRAWH2000522, BRAWH2000554, BRAWH2000595, BRAWH2000636, BRAWH2000643, BRAWH2000651, BRAWH2000682, BRAWH2000686, BRAWH2000697, BRAWH2000752, BRAWH2000859, BRAWH2000866, BRAWH2000892, BRAWH2000901, BRAWH2000924, BRAWH2000944, BRAWH2000984, BRAWH2001019, BRAWH2001037, BRAWH2001052, BRAWH2001129, BRAWH2001137, BRAWH2001141, BRAWH2001159, BRAWH2001166, BRAWH2001171, BRAWH2001186, BRAWH2001203, BRAWH2001238, BRAWH2001239, BRAWH2001255, BRAWH2001321, BRAWH2001355, BRAWH2001378, BRAWH2001395, BRAWH2001406, BRAWH2001412, BRAWH2001418, BRAWH2001436, BRAWH2001438, BRAWH2001459, BRAWH2001461, BRAWH2001484, BRAWH2001492, BRAWH2001503, BRAWH2001519, BRAWH2001530, BRAWH2001535, BRAWH2001589, BRAWH2001662, BRAWH2001666, BRAWH2001671, BRAWH2001679, BRAWH2001686, BRAWH2001701, BRAWH2001842, BRAWH2001862, BRAWH2001873, BRAWH2001940, BRAWH2001973, BRAWH2002047, BRAWH2002060, BRAWH2002062, BRAWH2002125, BRAWH2002191, BRAWH2002318, BRAWH2002333, BRAWH2002352, BRAWH2002383, BRAWH2002549, BRAWH2002560, BRAWH2002601, BRAWH2002623, BRAWH2002630, BRAWH2002635, BRAWH2002662, BRAWH2002679, BRAWH2002725, BRAWH2002761, BRAWH2002811, BRAWH2002861, BRAWH2002911, BRAWH2002963, BRAWH2002967, BRAWH2002976, BRAWH2003000, BRAWH2003025, BRAWH2003135, BRAWH2003240, BRAWH2003307, BRAWH2003355, BRAWH2003366, BRAWH2003662, BRAWH2003689, BRAWH2003693, BRAWH2003818, BRAWH2003832, BRAWH2003948, BRAWH2003964, BRAWH2004044, BRAWH2004068, BRAWH2004078, BRAWH2004136, BRAWH2004217, BRAWH2004580, BRAWH2004731, BRAWH2004779, BRAWH2004842, BRAWH2004884, BRAWH2004923, BRAWH2005008, BRAWH2005074, BRAWH2005225, BRAWH2005315, BRAWH2005517, BRAWH2005524, BRAWH2005533, BRAWH2005578, BRAWH2005661, BRAWH2005812, BRAWH2005974, BRAWH2005998, BRAWH2006044, BRAWH2006083, BRAWH2006207, BRAWH2006301, BRAWH2006395, BRAWH2006405, BRAWH2006450, BRAWH2006493, BRAWH2006526, BRAWH2006543, BRAWH2006622, BRAWH2006760, BRAWH2006960, BRAWH2006989, BRAWH2006996, BRAWH2007069, BRAWH2007308, BRAWH2007406, BRAWH2007550, BRAWH2007570, BRAWH2007591, BRAWH2007605, BRAWH2007658, BRAWH2007664, BRAWH2007808, BRAWH2007825, BRAWH2007862, BRAWH2007890, BRAWH2008058, BRAWH2008128, BRAWH2008219, BRAWH2008255, BRAWH2008292, BRAWH2008297, BRAWH2008366, BRAWH2008380, BRAWH2008540, BRAWH2008577, BRAWH2008706, BRAWH2008790, BRAWH2008903, BRAWH2008956, BRAWH2008993, BRAWH2009112, BRAWH2009227, BRAWH2009238, BRAWH2009261, BRAWH2009263, BRAWH2009298, BRAWH2009304, BRAWH2009307, BRAWH2009360, BRAWH2009393, BRAWH2009485, BRAWH2009490, BRAWH2009558, BRAWH2009590, BRAWH2009626, BRAWH2009678, BRAWH2009695, BRAWH2009907, BRAWH2010000, BRAWH2010069, BRAWH2010084, BRAWH2010136, BRAWH2010318, BRAWH2010329, BRAWH2010354, BRAWH2010364, BRAWH2010536, BRAWH2010552, BRAWH2010584, BRAWH2010618, BRAWH2010619, BRAWH2010754, BRAWH2010980, BRAWH2011066, BRAWH2011079, BRAWH2011096, BRAWH2011155, BRAWH2011166, BRAWH2011204, BRAWH2011286, BRAWH2011294, BRAWH2011343, BRAWH2011400, BRAWH2011762, BRAWH2011795, BRAWH2011796, BRAWH2011812, BRAWH2011823, BRAWH2011860, BRAWH2011920, BRAWH2011958, BRAWH2012054, BRAWH2012077, BRAWH2012161, BRAWH2012162, BRAWH2012164, BRAWH2012258, BRAWH2012277, BRAWH2012326, BRAWH2012538, BRAWH2012540, BRAWH2012619, BRAWH2012698, BRAWH2012749, BRAWH2012827, BRAWH2012866, BRAWH2012963, BRAWH2013047, BRAWH2013219, BRAWH2013294, BRAWH2013748, BRAWH2013866, BRAWH2013871, BRAWH2013914, BRAWH2013941, BRAWH2013955, BRAWH2014053, BRAWH2014234, BRAWH2014379, BRAWH2014414, BRAWH2014473, BRAWH2014645, BRAWH2014662, BRAWH2014717, BRAWH2014729, BRAWH2014876, BRAWH2014934, BRAWH2014954, BRAWH2015247, BRAWH2015349, BRAWH2015375, BRAWH2015385, BRAWH2015595, BRAWH2015728, BRAWH2015853, BRAWH2015866, BRAWH2016028, BRAWH2016106, BRAWH2016160, BRAWH2016166, BRAWH2016209, BRAWH2016221, BRAWH2016223, BRAWH2016269, BRAWH2016305, BRAWH2016439, BRAWH2016446, BRAWH2016514, BRAWH2016562, BRAWH2016655, BRAWH2016702, BRAWH2016724, BRAWH2016785, BRAWH2016792, BRAWH2016800; BRAWH2017002 BRAWH2017103, BRAWH2017250, BRAWH2017294, BRAWH2017304, BRAWH2017305, BRAWH2017379, BRAWH2017407, BRAWH2017433, BRAWH2017523, BRAWH2017534, BRAWH2017542, BRAWH2017635, BRAWH2017913, BRAWH2018206, BRAWH2018267, BRAWH2018282, BRAWH2018317, BRAWH2018506, BRAWH2018514, BRAWH2018526, BRAWH2018527, BRAWH2018601, BRAWH2018745, BRAWH2018875, BRAWH2019053, BRAWH2019055, BRAWH2019198, BRAWH3000078, BRAWH3000088, BRAWH3000100, BRAWH3000166, BRAWH3000314, BRAWH3000329, BRAWH3000410, BRAWH3000446, BRAWH3000491, BRAWH3000604, BRAWH3000884, BRAWH3001053, BRAWH3001319, BRAWH3001326, BRAWH3001475, BRAWH3001636, BRAWH3001638, BRAWH3001712, BRAWH3001760, BRAWH3001783, BRAWH3001833, BRAWH3001879, BRAWH3001891, BRAWH3001918, BRAWH3002433, BRAWH3002467, BRAWH3002513, BRAWH3002574, BRAWH3002600, BRAWH3002819, BRAWH3002853, BRAWH3003019, BRAWH3003136, BRAWH3003244, BRAWH3003343, BRAWH3003411, BRAWH3003522, BRAWH3003573, BRAWH3003598, BRAWH3003727, BRAWH3003801, BRAWH3003975, BRAWH3004222, BRAWH3004335, BRAWH3004350, BRAWH3004453, BRAWH3004530, BRAWH3004666, BRAWH3005037, BRAWH3005047, BRAWH3005132, BRAWH3005146, BRAWH3005292, BRAWH3005300, BRAWH3005422, BRAWH3005534, BRAWH3005886, BRAWH3005892, BRAWH3005896, BRAWH3005912, BRAWH3005981, BRAWH3006547, BRAWH3006548, BRAWH3006761, BRAWH3006792, BRAWH3007129, BRAWH3007221, BRAWH3007441, BRAWH3007455, BRAWH3007506, BRAWH3007726, BRAWH3007783, BRAWH3008167, BRAWH3008341, BRAWH3008559, BRAWH3008697, BRAWH3008867, BRAWH3008931, BRAWH3009017, BRAWH3009285, BRAWH3009297, BRAWH3009546, BRAWH3009961, BRAWH3010461, BRAWH3010560, BRAWH3010602, BRAWH3010657, BRAWH3010726, BRAWH3010833, BRAWH3011101, BRAWH3011331, BRAWH3011402, BRAWH3011577, BRAWH3011623, BRAWH3011637, BRAWH3011685, BRAWH3011907, BRAWH3011929, BRAWH3012005, BRAWH3012662, BRAWH3012779, BRAWH3013009, BRAWH3013049, BRAWH3013197, BRAWH3013264, BRAWH3013508, BRAWH3014609, BRAWH3014639, BRAWH3015017, BRAWH3015175, BRAWH3015260, BRAWH3015610, BRAWH3015825, BRAWH3016123, BRAWH3016715, BRAWH3017259, BRAWH3017260, BRAWH3017477, BRAWH3017537, BRAWH3017980, BRAWH3018369, BRAWH3018548, BRAWH3018969, BRAWH3019026, BRAWH3019529, BRAWH3019594, BRAWH3019629, BRAWH3019820, BRAWH3020200, BRAWH3020318, BRAWH3020486, BRAWH3020884, BRAWH3020928, BRAWH3021012, BRAWH3021545, BRAWH3021574, BRAWH3021580, BRAWH3021641, BRAWH3021643, BRAWH3021724, BRAWH3022347, BRAWH3022431, BRAWH3022459, BRAWH3022542, BRAWH3022719, BRAWH3022866, BRAWH3022900, BRAWH3023156, BRAWH3023168, BRAWH3023172, BRAWH3023274, BRAWH3023421, BRAWH3024231, BRAWH3024242, BRAWH3024469, BRAWH3024506, BRAWH3024613, BRAWH3024989, BRAWH3026349, BRAWH3026394, BRAWH3026529, BRAWH3027420, BRAWH3027440, BRAWH3027533, BRAWH3027574, BRAWH3027607, BRAWH3027616, BRAWH3027675, BRAWH3027806, BRAWH3027880, BRAWH3027927, BRAWH3028202, BRAWH3028223, BRAWH3028306, BRAWH3028461, BRAWH3028645, BRAWH3028754, BRAWH3028796, BRAWH3029254, BRAWH3029313, BRAWH3029538, BRAWH3029556, BRAWH3029806, BRAWH3030613, BRAWH3030772, BRAWH3030810, BRAWH3030892, BRAWH3030910, BRAWH3030950, BRAWH3031054, BRAWH3031710, BRAWH3031902, BRAWH3032298, BRAWH3032340, BRAWH3032571, BRAWH3032620, BRAWH3032930, BRAWH3033117, BRAWH3033293, BRAWH3033448, BRAWH3033513, BRAWH3034097, BRAWH3034114, BRAWH3034134, BRAWH3034668, BRAWH3034743, BRAWH3034775, BRAWH3034890, BRAWH3035154, BRAWH3035403, BRAWH3035904, BRAWH3035914, BRAWH3035936, BRAWH3036077, BRAWH3036247, BRAWH3036270, BRAWH3036561, BRAWH3036738, BRAWH3036951, BRAWH3037265, BRAWH3037394, BRAWH3037533, BRAWH3037979, BRAWH3038055, BRAWH3038230, BRAWH3038252, BRAWH3038324, BRCAN1000065, BRCAN1000076, BRCAN1000105, BRCAN1000149, BRCAN1000168, BRCAN2000148, BRCAN2000149, BRCAN2000209, BRCAN2000239, BRCAN2000346, BRCAN2000364, BRCAN2000383, BRCAN2000418, BRCAN2000523, BRCAN2000541, BRCAN2000563, BRCAN2000577, BRCAN2000620, BRCAN2000639, BRCAN2000763, BRCAN2000832, BRCAN2000923, BRCAN2001223, BRCAN2001866, BRCAN2002173, BRCAN2002416, BRCAN2002473, BRCAN2002562, BRCAN2002662, BRCAN2002826, BRCAN2002854, BRCAN2002856, BRCAN2002892, BRCAN2002944, BRCAN2002948, BRCAN2003070, BRCAN2003269, BRCAN2003389, BRCAN2003628, BRCAN2003703, BRCAN2003746, BRCAN2003814, BRCAN2003944, BRCAN2003987, BRCAN2004173, BRCAN2004355, BRCAN2004371, BRCAN2004653, BRCAN2004699, BRCAN2005436, BRCAN2005449, BRCAN2006019, BRCAN2006051, BRCAN2006063, BRCAN2006117, BRCAN2006174, BRCAN2006290, BRCAN2006297, BRCAN2006323, BRCAN2006401, BRCAN2006411, BRCAN2006450, BRCAN2006955, BRCAN2007119, BRCAN2007144, BRCAN2007409, BRCAN2007426, BRCAN2007525, BRCAN2007700, BRCAN2008494, BRCAN2008528, BRCAN2008701, BRCAN2008894, BRCAN2009156, BRCAN2009168, BRCAN2009203, BRCAN2009432, BRCAN2010374, BRCAN2010376, BRCAN2010547, BRCAN2010581, BRCAN2010665, BRCAN2011254, BRCAN2011316, BRCAN2011602, BRCAN2011946, BRCAN2012110, BRCAN2012355, BRCAN2012402, BRCAN2012408, BRCAN2012481, BRCAN2012613, BRCAN2012713, BRCAN2012929, BRCAN2013655, BRCAN2013660, BRCAN2014143, BRCAN2014229, BRCAN2014370, BRCAN2014602, BRCAN2014652, BRCAN2014788, BRCAN2014881, BRCAN2014952, BRCAN2015371, BRCAN2015402, BRCAN2015464, BRCAN2015719, BRCAN2015757, BRCAN2015886, BRCAN2016025, BRCAN2016046, BRCAN2016174, BRCAN2016433, BRCAN2016619, BRCAN2016762, BRCAN2016814, BRCAN2017442, BRCAN2017905, BRCAN2018240, BRCAN2018269, BRCAN2018490, BRCAN2018566, BRCAN2018667, BRCAN2018748, BRCAN2019002, BRCAN2019387, BRCAN2019653, BRCAN2019773, BRCAN2019907, BRCAN2020234, BRCAN2020331, BRCAN2020412, BRCAN2020467, BRCAN2020710, BRCAN2020880, BRCAN2021024, BRCAN2021028, BRCAN2021325, BRCAN2021452, BRCAN2021669, BRCAN2021718, BRCAN2022126, BRCAN2022191, BRCAN2022472, BRCAN2022474, BRCAN2023347, BRCAN2023724, BRCAN2024451, BRCAN2024563, BRCAN2024572, BRCAN2025009, BRCAN2025093, BRCAN2025349, BRCAN2025368, BRCAN2025712, BRCAN2025982, BRCAN2026117, BRCAN2026197, BRCAN2026340, BRCAN2026711, BRCAN2027150, BRCAN2027310, BRCAN2027334, BRCAN2027355, BRCAN2027364, BRCAN2027513, BRCAN2027593, BRCAN2027970, BRCAN2028021, BRCAN2028036, BRCAN2028040, BRCAN2028319, BRCAN2028338, BRCAN2028355, BRCAN2028378, BRCAN2028460, BRCAN2028545, BRCAN2028634, BRCAN2028702, BRCOC1000040, BRCOC1000087, BRCOC1000094, BRCOC2600004, BRCOC2000047, BRCOC2000152, BRCOC2000184, BRCOC2000186, BRCOC2000333, BRCOC2000360, BRCOC2000404, BRCOC2000487, BRCOC2000637, BRCOC2000670, BRCOC2000816, BRCOC2000850, BRCOC2001355, BRCOC2002085, BRCOC2002155, BRCOC2002323, BRCOC2002659, BRCOC2002664, BRCOC2002686, BRCOC2002751, BRCOC2002756, BRCOC2002777, BRCOC2002835, BRCOC2003100, BRCOC2003125, BRCOC2003187, BRCOC2003213, BRCOC2003513, BRCOC2003732, BRCOC2003740, BRCOC2004036, BRCOC2004175, BRCOC2004354, BRCOC2004455, BRCOC2004950, BRCOC2005542, BRCOC2005903, BRCOC2005951, BRCOC2006164, BRCOC2006189, BRCOC2006243, BRCOC2006270, BRCOC2006639, BRCOC2006942, BRCOC2007034, BRCOC2007593, BRCOC2007733, BRCOC2007769, BRCOC2008064, BRCOC2008225, BRCOC2008642, BRCOC2008993, BRCOC2009052, BRCOC2009196, BRCOC2009380, BRCOC2009638, BRCOC2009937, BRCOC2010115, BRCOC2010123, BRCOC2010510, BRCOC2010730, BRCOC2010980, BRCOC2010994, BRCOC2011010, BRCOC2011398, BRCOC2011418, BRCOC2011506, BRCOC2011769, BRCOC2011996, BRCOC2012172, BRCOC2012229, BRCOC2012386, BRCOC2012551, BRCOC2012813, BRCOC2013448, BRCOC2013573, BRCOC2013675, BRCOC2013780, BRCOC2014013, BRCOC2014033, BRCOC2014400, BRCOC2014748, BRCOC2014833, BRCOC2015597, BRCOC2015824, BRCOC2015908, BRCOC2015944, BRCOC2016525, BRCOC2016661, BRCOC2017061, BRCOC2017652, BRCOC2017856, BRCOC2018775, BRCOC2018877, BRCOC2019255, BRCOC2019549, BRCOC2019841, BRCOC2019896, BRCOC2019903, BRCOC2019910, BRCOC2019934, BRCOC2020122, BRCOC2020142, BRHIP1000058, BRHIP1000072, BRHIP1000104, BRHIP1000108, BRHIP1000129, BRHIP1000174, BRHIP1000258, BRHIP2000021, BRHIP2000079, BRHIP2000087, BRHIP2000163, BRHIP2000210, BRHIP2000239, BRHIP2000245, BRHIP2000312, BRHIP2000359, BRHIP2000445, BRHIP2000506, BRHIP2000532, BRHIP2000553, BRHIP2000621, BRHIP2000691, BRHIP2000819, BRHIP2000826, BRHIP2000920, BRHIP2001074, BRHIP2001099, BRHIP2001686, BRHIP2001782, BRHIP2001802, BRHIP2001805, BRHIP2001886, BRHIP2001927, BRHIP2002122, BRHIP2002143, BRHIP2002172, BRHIP2002339, BRHIP2002346, BRHIP2002510, BRHIP2002664, BRHIP2002722, BRHIP2002929, BRHIP2003048, BRHIP2003062, BRHIP2003242, BRHIP2003272, BRHIP2003748, BRHIP2003786, BRHIP2003828, BRHIP2003917, BRHIP2004312, BRHIP2004355, BRHIP2004359, BRHIP2004814, BRHIP2004883, BRHIP2004902, BRHIP2005010, BRHIP2005236, BRHIP2005271, BRHIP2005354, BRHIP2005600, BRHIP2005719, BRHIP2005724, BRHIP2005752, BRHIP2005932, BRHIP2006617, BRHIP2006782, BRHIP2006800, BRHIP2006819, BRHIP2006921, BRHIP2007305, BRHIP2007307, BRHIP2007616, BRHIP2007690, BRHIP2007928, BRHIP2007969, BRHIP2008269, BRHIP2008389, BRHIP2008607, BRHIP2008756, BRHIP2008909, BRHIP2009019, BRHIP2009177, BRHIP2009340, BRHIP2009351, BRHIP2009414, BRHIP2009474, BRHIP2009617, BRHIP2009685, BRHIP2010217, BRHIP2010309, BRHIP2010444, BRHIP2010487, BRHIP2010571, BRHIP2010593, BRHIP2010610, BRHIP2010723, BRHIP2010744, BRHIP2011080, BRHIP2011120, BRHIP2011199, BRHIP2011508, BRHIP2011576, BRHIP2011616, BRHIP2011783, BRHIP2011838, BRHIP2011891, BRHIP2011933, BRHIP2012054, BRHIP2012059, BRHIP2012141, BRHIP2012314, BRHIP2012360, BRHIP2012545, BRHIP2012580, BRHIP2012627, BRHIP2012642, BRHIP2012750, BRHIP2012922, BRHIP2012923, BRHIP2012972, BRHIP2013286, BRHIP2013447, BRHIP2013510, BRHIP2013699, BRHIP2013723, BRHIP2013958, BRHIP2013972, BRHIP2014063, BRHIP2014228, BRHIP2014285, BRHIP2014291, BRHIP2014373, BRHIP2014386, BRHIP2014387, BRHIP2014954, BRHIP2015153, BRHIP2015224, BRHIP2015245, BRHIP2015356, BRHIP2015360, BRHIP2015679, BRHIP2016005, BRHIP2016125, BRHIP2016788, BRHIP2016968, BRHIP2016990, BRHIP2017010, BRHIP2017315, BRHIP2017385, BRHIP2017404, BRHIP2017542, BRHIP2017553, BRHIP2017642, BRHIP2017714, BRHIP2017780, BRHIP2017945, BRHIP2018014, BRHIP2018369, BRHIP2018612, BRHIP2018635, BRHIP2018650, BRHIP2018712, BRHIP2018719, BRHIP2018805, BRHIP2018998, BRHIP2019007, BRHIP2019047, BRHIP2019149, BRHIP2019177, BRHIP2019186, BRHIP2019291, BRHIP2019494, BRHIP2019589, BRHIP2019641, BRHIP2019819, BRHIP2019884, BRHIP2019972, BRHIP2020182, BRHIP2020509, BRHIP2020573, BRHIP2020622, BRHIP2020695, BRHIP2020743, BRHIP2020799, BRHIP2020842, BRHIP2020859, BRHIP2020930, BRHIP2021102, BRHIP2021289, BRHIP2021495, BRHIP2021615, BRHIP2021744, BRHIP2021762, BRHIP2021858, BRHIP2021870, BRHIP2021929, BRHIP2022006, BRHIP2022221, BRHIP2022228, BRHIP2022298, BRHIP2022326, BRHIP2022467, BRHIP2022708, BRHIP2022986, BRHIP2023071, BRHIP2023229, BRHIP2023272, BRHIP2023292, BRHIP2023309, BRHIP2023369, BRHIP2023438, BRHIP2023695, BRHIP2023735, BRHIP2023762, BRHIP2023773, BRHIP2023860, BRHIP2023869, BRHIP2024046, BRHIP2024165, BRHIP2024201, BRHIP2024347, BRHIP2024398, BRHIP2024549, BRHIP2024742, BRHIP2024789, BRHIP2024911, BRHIP2024941, BRHIP2025245, BRHIP2025366, BRHIP2025448, BRHIP2025679, BRHIP2025739, BRHIP2025797, BRHIP2026021, BRHIP2026061, BRHIP2026155, BRHIP2026214, BRHIP2026288, BRHIP2026346, BRHIP2026557, BRHIP2026723, BRHIP2026877, BRHIP2027017, BRHIP2027054, BRHIP2027077, BRHIP2027563, BRHIP2027685, BRHIP2027762, BRHIP2028187, BRHIP2028303, BRHIP2028330, BRHIP2028480, BRHIP2028583, BRHIP2028593, BRHIP2029176, BRHIP2029283, BRHIP2029393, BRHIP2029529, BRHIP2029643, BRHIP2029663, BRHIP3000017, BRHIP3000060, BRHIP3000070, BRHIP3000081, BRHIP3000111, BRHIP3000131, BRHIP3000240, BRHIP3000377, BRHIP3000457, BRHIP3000475, BRHIP3000488, BRHIP3000526, BRHIP3000626, BRHIP3000859, BRHIP3000907, BRHIP3001076, BRHIP3001079, BRHIP3001141, BRHIP3001283, BRHIP3001338, BRHIP3001360, BRHIP3001481, BRHIP3001878, BRHIP3001964, BRHIP3002114, BRHIP3002124, BRHIP3002141, BRHIP3002363, BRHIP3002691, BRHIP3002920, BRHIP3002931, BRHIP3003063, BRHIP3003126, BRHIP3003306, BRHIP3003340, BRHIP3003395, BRHIP3003484, BRHIP3003644, BRHIP3003688, BRHIP3003795, BRHIP3003961, BRHIP3003984, BRHIP3004193, BRHIP3004215, BRHIP3004416, BRHIP3004710, BRHIP3004725, BRHIP3004774, BRHIP3004786, BRHIP3004863, BRHIP3004968, BRHIP3005037, BRHIP3005137, BRHIP3005142, BRHIP3005231, BRHIP3005307, BRHIP3005574, BRHIP3005673, BRHIP3005768, BRHIP3005801, BRHIP3005944, BRHIP3006279, BRHIP3006294, BRHIP3006390, BRHIP3006449, BRHIP3006683, BRHIP3006717, BRHIP3006786, BRHIP3006950, BRHIP3007172, BRHIP3007183, BRHIP3007195, BRHIP3007223, BRHIP3007239, BRHIP3007291, BRHIP3007409, BRHIP3007424, BRHIP3007483, BRHIP3007609, BRHIP3007640, BRHIP3007960, BRHIP3008082, BRHIP3008183, BRHIP3008314, BRHIP3008320, BRHIP3008344, BRHIP3008405, BRHIP3008565, BRHIP3008598, BRHIP3008606, BRHIP3008691, BRHIP3008714, BRHIP3008997, BRHIP3009099, BRHIP3009140, BRHIP3009181, BRHIP3009318, BRHIP3009427, BRHIP3009448, BRHIP3009672, BRHIP3009753, BRHIP3010135, BRHIP3010289, BRHIP3010529, BRHIP3011082, BRHIP3011241, BRHIP3011269, BRHIP3011460, BRHIP3011567, BRHIP3011831, BRHIP3012185, BRHIP3012289, BRHIP3012357, BRHIP3012736, BRHIP3012745, BRHIP3012868, BRHIP3012997, BRHIP3013078, BRHIP3013271, BRHIP3013588, BRHIP3013698, BRHIP3013765, BRHIP3013897, BRHIP3014237, BRHIP3014675, BRHIP3015620, BRHIP3015751, BRHIP3015854, BRHIP3016032, BRHIP3016213, BRHIP3016302, BRHIP3016421, BRHIP3017109, BRHIP3017146, BRHIP3017256, BRHIP3017325, BRHIP3017558, BRHIP3017637, BRHIP3017855, BRHIP3018278, BRHIP3018784, BRHIP3019643, BRHIP3019824, BRHIP3019880, BRHIP3019956, BRHIP3020046, BRHIP3020155, BRHIP3020182, BRHIP3020733, BRHIP3021019, BRHIP3021499, BRHIP3021534, BRHIP3021778, BRHIP3021987, BRHIP3022656, BRHIP3023922, BRHIP3024118, BRHIP3024533, BRHIP3024703, BRHIP3024725, BRHIP3024820, BRHIP3025161, BRHIP3025702, BRHIP3025795, BRHIP3025844, BRHIP3026052, BRHIP3026097, BRHIP3026231, BRHIP3026335, BRHIP3026651, BRHIP3027105, BRHIP3027137, BRHIP3027160, BRHIP3027191, BRHIP3027501, BRHIP3027594, BRHIP3027651, BRHIP3027854, BRHIP3027947, BRHIP3028570, BRHIP3028742, BRSSN1000056, BRSSN1000092, BRSSN1000153, BRSSN2000097, BRSSN2000175, BRSSN2000197, BRSSN2000244, BRSSN2000293, BRSSN2000295, BRSSN2000312, BRSSN2000498, BRSSN2000518, BRSSN2000561, BRSSN2000566, BRSSN2000684, BRSSN2000715, BRSSN2000832, BRSSN2001213, BRSSN2001275, BRSSN2001342, BRSSN2001426, BRSSN2001503, BRSSN2001579, BRSSN2001758, BRSSN2001810, BRSSN2002857, BRSSN2002859, BRSSN2003012, BRSSN2003086, BRSSN2003093, BRSSN2003820, BRSSN2003841, BRSSN2003937, BRSSN2004142, BRSSN2004303, BRSSN2004304, BRSSN2004496, BRSSN2004657, BRSSN2004679, BRSSN2004686, BRSSN2004710, BRSSN2004719, BRSSN2005847, BRSSN2006133, BRSSN2006390, BRSSN2006575, BRSSN2006611, BRSSN2006644, BRSSN2006892, BRSSN2007076, BRSSN2007168, BRSSN2007202, BRSSN2007338, BRSSN2007464, BRSSN2007504, BRSSN2007819, BRSSN2008125, BRSSN2008419, BRSSN2008464, BRSSN2008549, BRSSN2008797, BRSSN2009119, BRSSN2009378, BRSSN2009389, BRSSN2009395, BRSSN2009518, BRSSN2009627, BRSSN2009630, BRSSN2009702, BRSSN2010019, BRSSN2010110, BRSSN2010587, BRSSN2010596, BRSSN2010830, BRSSN2011262, BRSSN2011653, BRSSN2011738, BRSSN2011843, BRSSN2012081, BRSSN2012103, BRSSN2012157, BRSSN2012198, BRSSN2012254, BRSSN2012439, BRSSN2012622, BRSSN2012691, BRSSN2012838, BRSSN2013095, BRSSN2013544, BRSSN2013696, BRSSN2013702, BRSSN2013733, BRSSN2013753, BRSSN2013874, BRSSN2014112, BRSSN2014294, BRSSN2014299, BRSSN2014424, BRSSN2014513, BRSSN2014556, BRSSN2014573, BRSSN2014610, BRSSN2014636, BRSSN2014685, BRSSN2015199, BRSSN2015238, BRSSN2015369, BRSSN2015493, BRSSN2015497, BRSSN2015554, BRSSN2015707, BRSSN2015773, BRSSN2015907, BRSSN2015982, BRSSN2016589, BRSSN2016768, BRSSN2016905, BRSSN2017297, BRSSN2017422, BRSSN2017530, BRSSN2017682, BRSSN2017757, BRSSN2018218, BRSSN2018440, BRSSN2018447, BRSSN2018581, BRSSN2018731, BRSSN2018771, BRSSN2018925, BRSTN1000083, BRSTN1000097, BRSTN2000058, BRSTN2000070, BRSTN2000220, BRSTN2000312, BRSTN2000367, BRSTN2000536, BRSTN2000872, BRSTN2001067, BRSTN2001613, BRSTN2001801, BRSTN2002105, BRSTN2002400, BRSTN2002532, BRSTN2002691, BRSTN2003590, BRSTN2003835, BRSTN2004863, BRSTN2004869, BRSTN2004987, BRSTN2005721, BRSTN2006306, BRSTN2006466, BRSTN2006580, BRSTN2006583, BRSTN2006638, BRSTN2006865, BRSTN2007000, BRSTN2007118, BRSTN2007284, BRSTN2007765, BRSTN2008052, BRSTN2008283, BRSTN2008367, BRSTN2008418, BRSTN2008457, BRSTN2008475, BRSTN2008930, BRSTN2009247, BRSTN2010089, BRSTN2010107, BRSTN2010363, BRSTN2010416, BRSTN2010500, BRSTN2010569, BRSTN2010750, BRSTN2010923, BRSTN2011211, BRSTN2011597, BRSTN2011688, BRSTN2011799, BRSTN2012089, BRSTN2012174, BRSTN2012284, BRSTN2012320, BRSTN2012380, BRSTN2012451, BRSTN2013171, BRSTN2013354, BRSTN2013502, BRSTN2013931, BRSTN2014490, BRSTN2014633, BRSTN2014751, BRSTN2014770, BRSTN2015015, BRSTN2015889, BRSTN2015978, BRSTN2016066, BRSTN2016335, BRSTN2016678, BRSTN2016918, BRSTN2016992, BRSTN2017104, BRSTN2017151, BRSTN2017237, BRSTN2017379, BRSTN2017761, BRSTN2017771, BRSTN2017995, BRSTN2018077, BRSTN2018083, BRSTN2018596, BRSTN2018692, BRSTN2018712, BRSTN2019079, BRSTN2019129, BRTHA1000021, BRTHA1000063, BRTHA1000311, BRTHA2000057, BRTHA2000474, BRTHA2000514, BRTHA2000574, BRTHA2000855, BRTHA2000969, BRTHA2000972, BRTHA2001304, BRTHA2001370, BRTHA2001462, BRTHA2001717, BRTHA2001812, BRTHA2002091, BRTHA2002115, BRTHA2002133, BRTHA2002281, BRTHA2002376, BRTHA2002442, BRTHA2002493, BRTHA2002565, BRTHA2002608, BRTHA2002702, BRTHA2002721, BRTHA2002726, BRTHA2002741, BRTHA2002808, BRTHA2002896, BRTHA2002903, BRTHA2003030, BRTHA2003110, BRTHA2003116, BRTHA2003436, BRTHA2003759, BRTHA2003794, BRTHA2004361, BRTHA2004371, BRTHA2004582, BRTHA2004629, BRTHA2004639, BRTHA2004642, BRTHA2004812, BRTHA2004821, BRTHA2004978, BRTHA2004992, BRTHA2005005, BRTHA2005013, BRTHA2005448, BRTHA2005579, BRTHA2005831, BRTHA2005864, BRTHA2005942, BRTHA2005956, BRTHA2006075, BRTHA2006146, BRTHA2006194, BRTHA2006232, BRTHA2006720, BRTHA2006735, BRTHA2006974, BRTHA2006975, BRTHA2007060, BRTHA2007122, BRTHA2007422, BRTHA2007603, BRTHA2007665, BRTHA2008316, BRTHA2008335, BRTHA2008502, BRTHA2008513, BRTHA2008527, BRTHA2008535, BRTHA2008598, BRTHA2008669, BRTHA2008955, BRTHA2009311, BRTHA2009349, BRTHA2009486, BRTHA2009803, BRTHA2009846, BRTHA2009886, BRTHA2009972, BRTHA2010008, BRTHA2010033, BRTHA2010073, BRTHA2010191, BRTHA2010397, BRTHA2010608, BRTHA2010672, BRTHA2010884, BRTHA2010907, BRTHA2011062, BRTHA2011194, BRTHA2011321, BRTHA2011351, BRTHA2011500, BRTHA2011641, BRTHA2011691, BRTHA2012129, BRTHA2012183, BRTHA2012189, BRTHA2012351, BRTHA2012392, BRTHA2012466, BRTHA2012555, BRTHA2012562, BRTHA2012714, BRTHA2012980, BRTHA2013054, BRTHA2013262, BRTHA2013275, BRTHA2013426, BRTHA2013460, BRTHA2013515, BRTHA2013540, BRTHA2013595, BRTHA2013610, BRTHA2013707, BRTHA2013942, BRTHA2014287, BRTHA2014334, BRTHA2014381, BRTHA2014578, BRTHA2014647, BRTHA2014663, BRTHA2014792, BRTHA2014828, BRTHA2014909, BRTHA2014975, BRTHA2014997, BRTHA2015406, BRTHA2015478, BRTHA2015696, BRTHA2015700, BRTHA2015853, BRTHA2015878, BRTHA2016179, BRTHA2016215, BRTHA2016267, BRTHA2016318, BRTHA2016496, BRTHA2016543, BRTHA2016552, BRTHA2016577, BRTHA2016765, BRTHA2016918, BRTHA2017178, BRTHA2017353, BRTHA2017364, BRTHA2017985, BRTHA2018011, BRTHA2018129, BRTHA2018165, BRTHA2018304, BRTHA2018344, BRTHA2018420, BRTHA2018443, BRTHA2018504, BRTHA2018558, BRTHA2018591, BRTHA2018624, BRTHA2018706, BRTHA2018707, BRTHA2019014, BRTHA2019022, BRTHA2019048, BRTHA2019073, BRTHA2019726, BRTHA2019743, BRTHA2020400, BRTHA2020566, BRTHA2020642, BRTHA2020695, BRTHA2020721, BRTHA2020781, BRTHA2020811, BRTHA2020910, BRTHA2021212, BRTHA2021440, BRTHA2021450, BRTHA2022074, BRTHA2022914, BRTHA2022968, BRTHA2023402, BRTHA2023437, BRTHA2024177, BRTHA2024354, BRTHA2024712, BRTHA2025869, BRTHA2026071, BRTHA2026290, BRTHA2026311, BRTHA2027227, BRTHA2027229, BRTHA2027250, BRTHA2027546, BRTHA2028297, BRTHA2029969, BRTHA2030036, BRTHA2030213, BRTHA2031517, BRTHA2031800, BRTHA2031917, BRTHA2032763, BRTHA2032845, BRTHA2033122, BRTHA2033155, BRTHA2033264, BRTHA2033320, BRTHA2033469, BRTHA2033683, BRTHA2034281, BRTHA2034576, BRTHA2034874, BRTHA2035448, BRTHA2035743, BRTHA2036055, BRTHA2036295, BRTHA2036660, BRTHA2037247, BRTHA2038279, BRTHA2038345, BRTHA2038353, BRTHA2038396, BRTHA3000252, BRTHA3000273, BRTHA3000296, BRTHA3000297, BRTHA3000325, BRTHA3000456, BRTHA3000633, BRTHA3000789, BRTHA3001221, BRTHA3001623, BRTHA3002265, BRTHA3002401, BRTHA3002411, BRTHA3002427, BRTHA3002864, BRTHA3002933, BRTHA3002955, BRTHA3003000, BRTHA3003225, BRTHA3003339, BRTHA3003343, BRTHA3003417, BRTHA3003449, BRTHA3003474, BRTHA3003490, BRTHA3003704, BRTHA3004307, BRTHA3004432, BRTHA3004475, BRTHA3004502, BRTHA3004610, BRTHA3005046, BRTHA3005735, BRTHA3005988, BRTHA3006318, BRTHA3006593, BRTHA3006856, BRTHA3007113, BRTHA3007130, BRTHA3007148, BRTHA3007319, BRTHA3007469, BRTHA3007472, BRTHA3007532, BRTHA3007662, BRTHA3007685, BRTHA3007769, BRTHA3007922, BRTHA3008143, BRTHA3008293, BRTHA3008310, BRTHA3008386, BRTHA3008520, BRTHA3008608, BRTHA3008694, BRTHA3008778, BRTHA3008826, BRTHA3009037, BRTHA3009090, BRTHA3009291, BRTHA3009858, BRTHA3010135, BRTHA3010366, BRTHA3010469, BRTHA3010530, BRTHA3010540, BRTHA3010717, BRTHA3011149, BRTHA3011187, BRTHA3011194, BRTHA3011229, BRTHA3011265, BRTHA3011361, BRTHA3011510, BRTHA3011892, BRTHA3012265, BRTHA3013860, BRTHA3013882, BRTHA3013884, BRTHA3013981, BRTHA3014000, BRTHA3014105, BRTHA3014507, BRTHA3014547, BRTHA3014691, BRTHA3014835, BRTHA3014854, BRTHA3014908, BRTHA3014920, BRTHA3015815, BRTHA3016616, BRTHA3016835, BRTHA3016845, BRTHA3016917, BRTHA3017047, BRTHA3017589, BRTHA3017848, BRTHA3018409, BRTHA3018514, BRTHA3018617, BRTHA3018623, BRTHA3018656, BRTHA3019048, BRTHA3019105, BRTHA3019183, BRTHA3020000, BRTHA3020314, BRTHA3020369, BRTHA3021569, BRTHA3021708, BRTHA3021786, BRTHA3021971, BRTHA3022641, BRTHA3023403, BRTHA3023523, BRTHA3023590, BRTHA3023929, BRTHA3024233, BRTHA3024600, BRTHA3025073, BRTHA3025789, BRTHA3025826, BRTHA3026161, BRTHA3026180, BRTHA3026507, BRTHA3026556, BRTHA3026916, BRTHA3027171, BRTHA3027318, BRTHA3027638, BRTHA3027820, BRTHA3027879, BRTHA3027957, BRTHA3028339, BRTHA3028505, BRTHA3028782, CD34C2000051, CD34C2000152, CD34C2000175, CD34C2000443, CD34C3000125, CD34C3000314, CD34C3000424, CD34C3000494, CERVX1000042, CERVX2000812, CERVX2000968, CERVX2002006, CERVX2002013, CERVX2002430, CERVX2002770, CHONS1000058, CHONS2000172, CHONS2000797, CHONS2001287, CHONS2001382, CHONS2001797, CHONS2001834, CHONS2002419, CHONS2002829, COLON1000030, COLON1000084, COLON1000135, COLON2000470, COLON2000557, COLON2000568, COLON2001721, COLON2001829, COLON2001866, COLON2002443, COLON2002520, COLON2003043, COLON2003529, COLON2004318, COLON2004351, COLON2004478, COLON2004911, COLON2005126, COLON2005623, COLON2005735, COLON2005772, COLON2006263, COLON2006282, COLON2006417, COLON2007274, COLON2007733, COLON2008105, COLON2009337, COLON2009499, CORDB1000140, CORDB2000061, CORDB2000127, CORDB2000541, CTONG1000009, CTONG1000010, CTONG1000020, CTONG1000022, CTONG1000040, CTONG1000052, CTONG1000056, CTONG1000062, CTONG1000086, CTONG1000088, CTONG1000093, CTONG1000094, CTONG1000097, CTONG1000113, CTONG1000137, CTONG1000165, CTONG1000175, CTONG1000180, CTONG1000181, CTONG1000220, CTONG1000277, CTONG1000283, CTONG1000288, CTONG1000302, CTONG1000341, CTONG1000467, CTONG1000476, CTONG1000488, CTONG1000508, CTONG1000540, CTONG2000031, CTONG2000034, CTONG2000042, CTONG2000063, CTONG2000201, CTONG2000218, CTONG2000279, CTONG2000303, CTONG2000330, CTONG2000395, CTONG2000411, CTONG2000452, CTONG2000465, CTONG2000469, CTONG2000480, CTONG2000561, CTONG2000589, CTONG2000766, CTONG2000771, CTONG2000819, CTONG2000827, CTONG2000846, CTONG2000855, CTONG2000977, CTONG2001139, CTONG2001226, CTONG2001320, CTONG2001366, CTONG2001413, CTONG2001428, CTONG2001513, CTONG2001524, CTONG2001533, CTONG2001598, CTONG2001681, CTONG2001724, CTONG2001748, CTONG2001749, CTONG2001800, CTONG2001820, CTONG2001858, CTONG2001877, CTONG2001911, CTONG2001932, CTONG2001955, CTONG2002066, CTONG2002095, CTONG2002143, CTONG2002270, CTONG2002395, CTONG2002417, CTONG2002418, CTONG2002453, CTONG2002520, CTONG2002558, CTONG2002590, CTONG2002709, CTONG2002721, CTONG2002744, CTONG2002766, CTONG2002816, CTONG2002820, CTONG2002832, CTONG2002841, CTONG2002903, CTONG2002965, CTONG2002999, CTONG2003028, CTONG2003094, CTONG2003100, CTONG2003115, CTONG2003189, CTONG2003245, CTONG2003293, CTONG2003298, CTONG2003348, CTONG2003350, CTONG2003361, CTONG2003372, CTONG2003375, CTONG2003427, CTONG2003524, CTONG2003599, CTONG2003680, CTONG2003699, CTONG2003764, CTONG2003782, CTONG2003889, CTONG2003937, CTONG2003945, CTONG2004000, CTONG2004062, CTONG2004115, CTONG2004126, CTONG2004264, CTONG2004305, CTONG2004397, CTONG2004423, CTONG2004454, CTONG2004550, CTONG2004669, CTONG2004716, CTONG2004912, CTONG2004941, CTONG2004948, CTONG2005049, CTONG2005110, CTONG2005145, CTONG2005265, CTONG2005278, CTONG2005290, CTONG2005374, CTONG2005399, CTONG2005468, CTONG2005567, CTONG2005615, CTONG2005635, CTONG2005775, CTONG2005795, CTONG2005890, CTONG2005904, CTONG2005913, CTONG2006129, CTONG2006223, CTONG2006273, CTONG2006310, CTONG2006377, CTONG2006393, CTONG2006412, CTONG2006515, CTONG2006524, CTONG2006562, CTONG2006568, CTONG2006620, CTONG2006666, CTONG2006691, CTONG2006709, CTONG2006798, CTONG2006836, CTONG2006942, CTONG2006964, CTONG2007007, CTONG2007009, CTONG2007072, CTONG2007078, CTONG2007091, CTONG2007104, CTONG2007168, CTONG2007175, CTONG2007259, CTONG2007272, CTONG2007293, CTONG2007297, CTONG2007399, CTONG2007400, CTONG2007417, CTONG2007441, CTONG2007474, CTONG2007500, CTONG2007586, CTONG2007613, CTONG2007623, CTONG2007681, CTONG2007776, CTONG2007779, CTONG2007898, CTONG2007959, CTONG2007970, CTONG2008014, CTONG2008184, CTONG2008262, CTONG2008269, CTONG2008321, CTONG2008343, CTONG2008402, CTONG2008405, CTONG2008466, CTONG2008506, CTONG2008518, CTONG2008521, CTONG2008562, CTONG2008577, CTONG2008595, CTONG2008621, CTONG2008689, CTONG2008720, CTONG2008721, CTONG2008773, CTONG2008792, CTONG2008989, CTONG2009033, CTONG2009108, CTONG2009132, CTONG2009156, CTONG2009181, CTONG2009257, CTONG2009258, CTONG2009268, CTONG2009270, CTONG2009395, CTONG2009423, CTONG2009440, CTONG2009527, CTONG2009529, CTONG2009531, CTONG2009534, CTONG2009570, CTONG2009572, CTONG2009604, CTONG2009643, CTONG2009675, CTONG2009689, CTONG2009725, CTONG2009766, CTONG2009768, CTONG2009844, CTONG2009871, CTONG2009887, CTONG2009891, CTONG2009923, CTONG2009938, CTONG2009955, CTONG2009958, CTONG2009963, CTONG2010018, CTONG2010024, CTONG2010116, CTONG2010133, CTONG2010148, CTONG2010276, CTONG2010330, CTONG2010408, CTONG2010508, CTONG2010566, CTONG2010623, CTONG2010649, CTONG2010652, CTONG2010803, CTONG2010821, CTONG2011188, CTONG2011429, CTONG2011474, CTONG2011676, CTONG2011716, CTONG2011765, CTONG2011779, CTONG2011801, CTONG2011815, CTONG2011822, CTONG2011825, CTONG2011920, CTONG2011985, CTONG2012001, CTONG2012029, CTONG2012050, CTONG2012077, CTONG2012101, CTONG2012123, CTONG2012230, CTONG2012422, CTONG2012425, CTONG2012447, CTONG2012453, CTONG2012473, CTONG2012476, CTONG2012533, CTONG2012554, CTONG2012564, CTONG2012607, CTONG2012661, CTONG2012724, CTONG2012738, CTONG2012745, CTONG2012758, CTONG2012843, CTONG2012847, CTONG2012901, CTONG2012996, CTONG2013128, CTONG2013149, CTONG2013156, CTONG2013178, CTONG2013222, CTONG2013284, CTONG2013339, CTONG2013348, CTONG2013352, CTONG2013381, CTONG2013393, CTONG2013511, CTONG2013630, CTONG2013803, CTONG2013934, CTONG2013986, CTONG2014032, CTONG2014058, CTONG2014119, CTONG2014165, CTONG2014191, CTONG2014206, CTONG2014234, CTONG2014264, CTONG2014280, CTONG2014369, CTONG2014389, CTONG2014491, CTONG2014630, CTONG2014635, CTONG2014646, CTONG2014705, CTONG2014898, CTONG2014946, CTONG2014954, CTONG2014959, CTONG2014966, CTONG2014995, CTONG2015204, CTONG2015316, CTONG2015330, CTONG2015345, CTONG2015358, CTONG2015434, CTONG2015518, CTONG2015540, CTONG2015596, CTONG2015633, CTONG2015678, CTONG2015717, CTONG2015804, CTONG2015815, CTONG2015866, CTONG2015914, CTONG2015953, CTONG2016056, CTONG2016185, CTONG2016217, CTONG2016355, CTONG2016408, CTONG2016499, CTONG2016505, CTONG2016559, CTONG2016658, CTONG2016775, CTONG2016797, CTONG2016824, CTONG2016846, CTONG2016869, CTONG2016904, CTONG2016931, CTONG2016942, CTONG2016953, CTONG2017021, CTONG2017094, CTONG2017292, CTONG2017409, CTONG2017429, CTONG2017444, CTONG2017458, CTONG2017604, CTONG2017650, CTONG2017798, CTONG2017804, CTONG2017814, CTONG2017910, CTONG2017939, CTONG2017989, CTONG2018062, CTONG2018069, CTONG2018147, CTONG2018211, CTONG2018217, CTONG2018279, CTONG2018334, CTONG2018343, CTONG2018379, CTONG2018383, CTONG2018413, CTONG2018483, CTONG2018629, CTONG2018632, CTONG2018637, CTONG2018652, CTONG2018653, CTONG2018655, CTONG2018735, CTONG2018739, CTONG2018808, CTONG2018843, CTONG2018898, CTONG2018900, CTONG2018976, CTONG2019029, CTONG2019063, CTONG2019144, CTONG2019232, CTONG2019248, CTONG2019400, CTONG2019652, CTONG2019704, CTONG2019788, CTONG2019833, CTONG2020031, CTONG2020108, CTONG2020127, CTONG2020171, CTONG2020374, CTONG2020378, CTONG2020411, CTONG2020445, CTONG2020522, CTONG2020560, CTONG2020582, CTONG2020638, CTONG2020806, CTONG2020831, CTONG2020974, CTONG2021024, CTONG2021132, CTONG2021168, CTONG2021289, CTONG2022153, CTONG2022601, CTONG2023021, CTONG2023449, CTONG2023512, CTONG2024031, CTONG2024206, CTONG2024614, CTONG2024749, CTONG2025496, CTONG2025513, CTONG2025516, CTONG2025610, CTONG2025900, CTONG2026513, CTONG2026770, CTONG2026920, CTONG2026987, CTONG2027150, CTONG2027263, CTONG2027327, CTONG2027361, CTONG2027591, CTONG2027736, CTONG2027783, CTONG2027828, CTONG2027959, CTONG2028097, CTONG2028124, CTONG2028208, CTONG2028309, CTONG2028486, CTONG2028518, CTONG2028687, CTONG2028758, CTONG3000657, CTONG3000686, CTONG3000707, CTONG3000896, CTONG3001123, CTONG3001420, CTONG3001501, CTONG3001560, CTONG3001605, CTONG3001746, CTONG3002020, CTONG3002127, CTONG3002370, CTONG3002412, CTONG3002433, CTONG3002518, CTONG3002552, CTONG3002588, CTONG3002674, CTONG3002728, CTONG3002835, CTONG3002909, CTONG3002947, CTONG3002983, CTONG3003165, CTONG3003179, CTONG3003483, CTONG3003553, CTONG3003598, CTONG3003652, CTONG3003654, CTONG3003669, CTONG3003737, CTONG3003905, CTONG3003972, CTONG3004072, CTONG3004317, CTONG3004397, CTONG3004550, CTONG3004576, CTONG3004607, CTONG3004712, CTONG3004726, CTONG3005325, CTONG3005648, CTONG3005713, CTONG3005803, CTONG3005813, CTONG3006067, CTONG3006073, CTONG3006186, CTONG3006629, CTONG3006650, CTONG3006659, CTONG3007244, CTONG3007444, CTONG3007528, CTONG3007586, CTONG3007870, CTONG3008223, CTONG3008252, CTONG3008258, CTONG3008457, CTONG3008496, CTONG3008566, CTONG3008639, CTONG3008831, CTONG3008951, CTONG3008959, CTONG3009028, CTONG3009227, CTONG3009239, CTONG3009287, CTONG3009328, CTONG3009385, D30ST1000066, D30ST1000109, D30ST1000238, D30ST1000267, D30ST1000270, D30ST2000184, D30ST2000618, D30ST2000654, D30ST2000734, D30ST2001328, D30ST2001669, D30ST2001670, D30ST2001788, D30ST2002068, D30ST2002182, D30ST2002223, D30ST2002262, D30ST2002272, D30ST2002417, D30ST2002436, D30ST2002648, D30ST2003024, D30ST2003331, D30ST2003607, D30ST2003797, D30ST2004637, D30ST3000169, D30ST3000195, D30ST3000258, D30ST3000291, D30ST3000388, D30ST3000493, D60ST2000127, D60ST2000169, D60ST2000245, D60ST2000358, D60ST2000464, D60ST2000507, D90ST2000031, D90ST2000278, D90ST2000440, D90ST2000869, D90ST2001319, D90ST2001433, D90ST2002397, D90ST2002608, D90ST2002673, D90ST2003106, D90ST2003108, D90ST2003137, D90ST2003397, D90ST2003580, D90ST2003594, D90ST2003762, D90ST2003791, D90ST2003989, D90ST2004018, D90ST2004073, D90ST2004417, DFNES1000003, DFNES1000083, DFNES1000107, DFNES1000185, DFNES2000143, DFNES2000146, DFNES2000153, DFNES2000212, DFNES2000426, DFNES2000432, DFNES2000443, DFNES2000457, DFNES2000471, DFNES2000526, DFNES2000913, DFNES2001091, DFNES2001096, DFNES2001108, DFNES2001177, DFNES2001404, DFNES2001564, DFNES2001565, DFNES2001647, DFNES2001800, DFNES2001829, DFNES2002220, DFNES2002509, DFNES2002550, DFNES2002588, DFNES2002817, DFNES2002966, DFNES2003081, DFNES2003192, DFNES2003255, DFNES2003742, DFNES2004346, DFNES2004354, DFNES2004371, DFNES2004383, DFNES2004608, DFNES2004684, DFNES2005266, DFNES2005527, DFNES2005540, DFNES2005690, DFNES2005766, DFNES2005779, DFNES2005875, DFNES2006346, DFNES2006944, DFNES2007113, DFNES2007332, DFNES2007634, DFNES2007641, DFNES2007757, DFNES2008088, DFNES2008160, DFNES2008280, DFNES2008881, DFNES2009482, DFNES2010502, DFNES2011192, DFNES2011221, DFNES2011239, DFNES2011245, DFNES2011380, DFNES2011499, ERLTF1000021, ERLTF2000324, ERLTF2000465, FCBBF1000023, FCBBF1000024, FCBBF1000038, FCBBF1000053, FCBBF1000061, FCBBF1000063, FCBBF1000069, FCBBF1000115, FCBBF1000117, FCBBF1000118, FCBBF1000121, FCBBF1000125, FCBBF1000131, FCBBF1000139, FCBBF1000155, FCBBF1000157, FCBBF1000171, FCBBF1000174, FCBBF1000182, FCBBF1000198, FCBBF1000206, FCBBF1000220, FCBBF1000232, FCBBF1000233, FCBBF1000243, FCBBF1000270, FCBBF1000272, FCBBF1000280, FCBBF1000297, FCBBF1000305, FCBBF1000314, FCBBF1000322, FCBBF1000349, FCBBF1000374, FCBBF1000376, FCBBF1000377, FCBBF1000395, FCBBF1000397, FCBBF1000403, FCBBF1000412, FCBBF1000425, FCBBF1000437, FCBBF1000449, FCBBF1000476, FCBBF1000506, FCBBF1000509, FCBBF1000546, FCBBF1000550, FCBBF1000556, FCBBF1000563, FCBBF1000574, FCBBF1000581, FCBBF1000582, FCBBF1000598, FCBBF1000604, FCBBF1000618, FCBBF1000627, FCBBF1000671, FCBBF1000675, FCBBF1000684, FCBBF1000686, FCBBF1000687, FCBBF1000691, FCBBF1000732, FCBBF1000748, FCBBF1000760, FCBBF2000038, FCBBF2000087, FCBBF2000094, FCBBF2000105, FCBBF2000123, FCBBF2000195, FCBBF2000199, FCBBF2000214, FCBBF2000232, FCBBF2000259, FCBBF2000276, FCBBF2000291, FCBBF2000362, FCBBF2000379, FCBBF2000473, FCBBF2000502, FCBBF2000566, FCBBF2000576, FCBBF2000677, FCBBF2000678, FCBBF2000685, FCBBF2000733, FCBBF2000782, FCBBF2000808, FCBBF2000815, FCBBF2000825, FCBBF2000885, FCBBF2000940, FCBBF2000951, FCBBF2001001, FCBBF2001088, FCBBF2001105, FCBBF2001116, FCBBF2001183, FCBBF2001188, FCBBF2001211, FCBBF2001238, FCBBF2001243, FCBBF2001291, FCBBF2001299, FCBBF2001309, FCBBF2001400, FCBBF2001427, FCBBF2001480, FCBBF2001529, FCBBF2001594, FCBBF2001672, FCBBF2001675, FCBBF2001718, FCBBF2001720, FCBBF2001817, FCBBF2001868, FCBBF2002044, FCBBF2002111, FCBBF2002281, FCBBF2002349, FCBBF2002370, FCBBF2002541, FCBBF2002626, FCBBF2002801, FCBBF2002897, FCBBF2002898, FCBBF2002904, FCBBF2002928, FCBBF2002953, FCBBF2003083, FCBBF2003102, FCBBF2003269, FCBBF2003293, FCBBF2003297, FCBBF2003395, FCBBF2003528, FCBBF2003543, FCBBF2003549, FCBBF2003567, FCBBF2003636, FCBBF2003823, FCBBF2003895, FCBBF2004066, FCBBF2004090, FCBBF2004138, FCBBF2004217, FCBBF2004256, FCBBF2004373, FCBBF2004448, FCBBF2004671, FCBBF2004707, FCBBF2004788, FCBBF2005069, FCBBF2005122, FCBBF2005428, FCBBF2005439, FCBBF2005538, FCBBF2005637, FCBBF2005645, FCBBF2005733, FCBBF2005909, FCBBF2005966, FCBBF2006131, FCBBF2006380, FCBBF2006418, FCBBF2006452, FCBBF2006634, FCBBF2006781, FCBBF2007012, FCBBF2007186, FCBBF2007265, FCBBF2007302, FCBBF2007556, FCBBF2007610, FCBBF2007633, FCBBF2007840, FCBBF3000102, FCBBF3000110, FCBBF3000115, FCBBF3000120, FCBBF3000168, FCBBF3000175, FCBBF3000227, FCBBF3000228, FCBBF3000229, FCBBF3000233, FCBBF3000269, FCBBF3000361, FCBBF3000367, FCBBF3000388, FCBBF3000434, FCBBF3000462, FCBBF3000473, FCBBF3000501, FCBBF3000518, FCBBF3000536, FCBBF3000550, FCBBF3000847, FCBBF3001018, FCBBF3001020, FCBBF3001081, FCBBF3001235, FCBBF3001281, FCBBF3001302, FCBBF3001377, FCBBF3001470, FCBBF3001594, FCBBF3001632, FCBBF3001657, FCBBF3001818, FCBBF3001855, FCBBF3001890, FCBBF3001912, FCBBF3001914, FCBBF3001918, FCBBF3001924, FCBBF3001977, FCBBF3002163, FCBBF3002188, FCBBF3002190, FCBBF3002268, FCBBF3002475, FCBBF3002556, FCBBF3002592, FCBBF3002658, FCBBF3002782, FCBBF3002818, FCBBF3002925, FCBBF3003216, FCBBF3003305, FCBBF3003373, FCBBF3003435, FCBBF3003475, FCBBF3003481, FCBBF3003557, FCBBF3003787, FCBBF3003902, FCBBF3004021, FCBBF3004041, FCBBF3004261, FCBBF3004323, FCBBF3004390, FCBBF3004409, FCBBF3004502, FCBBF3004715, FCBBF3004842, FCBBF3004847, FCBBF3004955, FCBBF3005160, FCBBF3005218, FCBBF3005320, FCBBF3005444, FCBBF3005698, FCBBF3005729, FCBBF3006171, FCBBF3006249, FCBBF3006288, FCBBF3006399, FCBBF3006628, FCBBF3006821, FCBBF3007077, FCBBF3007150, FCBBF3007152, FCBBF3007242, FCBBF3007244, FCBBF3007248, FCBBF3007453, FCBBF3007462, FCBBF3007540, FCBBF3007597, FCBBF3007604, FCBBF3007631, FCBBF3007829, FCBBF3007855, FCBBF3007859, FCBBF3007860, FCBBF3008073, FCBBF3008100, FCBBF3008153, FCBBF3008159, FCBBF3008251, FCBBF3008311, FCBBF3008362, FCBBF3008382, FCBBF3008475, FCBBF3008556, FCBBF3008644, FCBBF3008689, FCBBF3008748, FCBBF3008870, FCBBF3008938, FCBBF3008944, FCBBF3009069, FCBBF3009101, FCBBF3009152, FCBBF3009256, FCBBF3009317, FCBBF3009428, FCBBF3009464, FCBBF3009479, FCBBF3009526, FCBBF3009703, FCBBF3009717, FCBBF3009888, FCBBF3009949, FCBBF3009978, FCBBF3010008, FCBBF3010012, FCBBF3010124, FCBBF3010130, FCBBF3010142, FCBBF3010149, FCBBF3010211, FCBBF3010361, FCBBF3010508, FCBBF3010544, FCBBF3010586, FCBBF3010601, FCBBF3010665, FCBBF3010695, FCBBF3010729, FCBBF3010733, FCBBF3011003, FCBBF3011418, FCBBF3011485, FCBBF3011523, FCBBF3011570, FCBBF3011592, FCBBF3011867, FCBBF3011889, FCBBF3012170, FCBBF3012182, FCBBF3012288, FCBBF3012332, FCBBF3012347, FCBBF3012443, FCBBF3012588, FCBBF3012667, FCBBF3012842, FCBBF3012901, FCBBF3013041, FCBBF3013058, FCBBF3013205, FCBBF3013266, FCBBF3013307, FCBBF3013341, FCBBF3013506, FCBBF3013589, FCBBF3013623, FCBBF3013800, FCBBF3013846, FCBBF3014229, FCBBF3014260, FCBBF3014355, FCBBF3014567, FCBBF3014770, FCBBF3015100, FCBBF3015119, FCBBF3015131, FCBBF3015317, FCBBF3015727, FCBBF3015758, FCBBF3015809, FCBBF3015870, FCBBF3016018, FCBBF3016134, FCBBF3016178, FCBBF3016451, FCBBF3016618, FCBBF3016622, FCBBF3016644, FCBBF3016667, FCBBF3016928, FCBBF3016987, FCBBF3017024, FCBBF3017059, FCBBF3017071, FCBBF3017123, FCBBF3017233, FCBBF3017255, FCBBF3017288, FCBBF3017396, FCBBF3017531, FCBBF3017535, FCBBF3017681, FCBBF3017729, FCBBF3017873, FCBBF3017918, FCBBF3017974, FCBBF3018067, FCBBF3018173, FCBBF3018453, FCBBF3018591, FCBBF3018753, FCBBF3018796, FCBBF3018826, FCBBF3018949, FCBBF3019085, FCBBF3019320, FCBBF3019437, FCBBF3019455, FCBBF3019564, FCBBF3019569, FCBBF3019570, FCBBF3019663, FCBBF3019714, FCBBF3019716, FCBBF3019784, FCBBF3019839, FCBBF3019867, FCBBF3019961, FCBBF3020030, FCBBF3020138, FCBBF3020140, FCBBF3020163, FCBBF3020232, FCBBF3020599, FCBBF3021026, FCBBF3021191, FCBBF3021221, FCBBF3021501, FCBBF3021506, FCBBF3021524, FCBBF3021807, FCBBF3021940, FCBBF3021985, FCBBF3022005, FCBBF3022291, FCBBF3022311, FCBBF3022504, FCBBF3022566, FCBBF3022765, FCBBF3022767, FCBBF3022894, FCBBF3023061, FCBBF3023078, FCBBF3023368, FCBBF3023372, FCBBF3023443, FCBBF3023599, FCBBF3023704, FCBBF3023887, FCBBF3023895, FCBBF3024002, FCBBF3024096, FCBBF3024225, FCBBF3024266, FCBBF3024364, FCBBF3024623, FCBBF3024793, FCBBF3024911, FCBBF3025098, FCBBF3025252, FCBBF3025280, FCBBF3025285, FCBBF3025417, FCBBF3025528, FCBBF3025568, FCBBF3025650, FCBBF3025674, FCBBF3025730, FCBBF3025737, FCBBF3025905, FCBBF3026021, FCBBF3026048, FCBBF3026251, FCBBF3026308, FCBBF3026651, FCBBF3026678, FCBBF3026692, FCBBF3027104, FCBBF3027199, FCBBF3027328, FCBBF3027559, FCBBF3027717, FCBBF3027755, FCBBF3027768, FCBBF3027854, FCBBF3027863, FCBBF3027903, FCBBF3028102, FCBBF3028143, FCBBF3028188, FCBBF3028202, FCBBF3028244, FCBBF3028472, FCBBF3028528, FCBBF3028582, FCBBF3028593, FCBBF3028671, FCBBF3028794, FCBBF4000017, FCBBF4000061, FCBBF4000076, FCBBF4000142, FCBBF4000173, FCBBF4000192, FCBBF4000193, FCBBF4000268, FCBBF4000282, FCBBF4000399, FCBBF4000415, FCBBF4000500, FCBBF4000529, FCBBF4000548, FCBBF5000041, FCBBF5000061, FCBBF5000165, FCBBF5000261, FCBBF5000325, FCBBF5000353, FCBBF5000384, FCBBF5000483, FCBBF5000495, FEBRA1000005, FEBRA1000008, FEBRA1000022, FEBRA1000030, FEBRA1000057, FEBRA1000088, FEBRA1000138, FEBRA1000148, FEBRA1000149, FEBRA1000183, FEBRA1000188, FEBRA1000189, FEBRA1000190, FEBRA2000007, FEBRA2000021, FEBRA2000035, FEBRA2000053, FEBRA2000126, FEBRA2000129, FEBRA2000210, FEBRA2000220, FEBRA2000228, FEBRA2000253, FEBRA2000282, FEBRA2000286, FEBRA2000297, FEBRA2000311, FEBRA2000321, FEBRA2000333, FEBRA2000377, FEBRA2000378, FEBRA2000391, FEBRA2000394, FEBRA2000397, FEBRA2000399, FEBRA2000402, FEBRA2000404, FEBRA2000409, FEBRA2000415, FEBRA2000436, FEBRA2000438, FEBRA2000452, FEBRA2000454, FEBRA2000462, FEBRA2000468, FEBRA2000491, FEBRA2000504, FEBRA2000510, FEBRA2000532, FEBRA2000536, FEBRA2000538, FEBRA2000575, FEBRA2000656, FEBRA2000659, FEBRA2000680, FEBRA2000690, FEBRA2000727, FEBRA2000734, FEBRA2000740, FEBRA2000757, FEBRA2000762, FEBRA2000771, FEBRA2000772, FEBRA2000782, FEBRA2000787, FEBRA2000790, FEBRA2000793, FEBRA2000803, FEBRA2000805, FEBRA2000809, FEBRA2000815, FEBRA2000856, FEBRA2000862, FEBRA2000877, FEBRA2000880, FEBRA2000881, FEBRA2000901, FEBRA2000909, FEBRA2000917, FEBRA2000928, FEBRA2000936, FEBRA2000937, FEBRA2000959, FEBRA2000972, FEBRA2001004, FEBRA2001012, FEBRA2001020, FEBRA2001093, FEBRA2001124, FEBRA2001133, FEBRA2001146, FEBRA2001161, FEBRA2001175, FEBRA2001197, FEBRA2001217, FEBRA2001227, FEBRA2001245, FEBRA2001267, FEBRA2001294, FEBRA2001334, FEBRA2001351, FEBRA2001383, FEBRA2001438, FEBRA2001440, FEBRA2001487, FEBRA2001492, FEBRA2001523, FEBRA2001561, FEBRA2001571, FEBRA2001581, FEBRA2001584, FEBRA2001590, FEBRA2001591, FEBRA2001610, FEBRA2001620, FEBRA2001659, FEBRA2001669, FEBRA2001698, FEBRA2001705, FEBRA2001706, FEBRA2001715, FEBRA2001745, FEBRA2001752, FEBRA2001772, FEBRA2001790, FEBRA2001814, FEBRA2001828, FEBRA2001867, FEBRA2001914, FEBRA2001974, FEBRA2001989, FEBRA2001990, FEBRA2002009, FEBRA2002027, FEBRA2002086, FEBRA2002109, FEBRA2002191, FEBRA2002260, FEBRA2002352, FEBRA2002399, FEBRA2002410, FEBRA2002429, FEBRA2002442, FEBRA2002456, FEBRA2002508, FEBRA2002525, FEBRA2002552, FEBRA2002574, FEBRA2002601, FEBRA2002611, FEBRA2002628, FEBRA2002662, FEBRA2002682, FEBRA2002707, FEBRA2002727, FEBRA2002781, FEBRA2002783, FEBRA2002792, FEBRA2002818, FEBRA2002858, FEBRA2002882, FEBRA2002897, FEBRA2002908, FEBRA2002931, FEBRA2002962, FEBRA2002986, FEBRA2003054, FEBRA2003100, FEBRA2003115, FEBRA2003128, FEBRA2003155, FEBRA2003163, FEBRA2003181, FEBRA2003198, FEBRA2003253, FEBRA2003258, FEBRA2003275, FEBRA2003308, FEBRA2003327, FEBRA2003429, FEBRA2003436, FEBRA2003454, FEBRA2003468, FEBRA2003470, FEBRA2003520, FEBRA2003524, FEBRA2003541, FEBRA2003675, FEBRA2003707, FEBRA2003711, FEBRA2003726, FEBRA2003750, FEBRA2003897, FEBRA2003907, FEBRA2003930, FEBRA2004023, FEBRA2004026, FEBRA2004029, FEBRA2004042, FEBRA2004053, FEBRA2004056, FEBRA2004091, FEBRA2004110, FEBRA2004191, FEBRA2004202, FEBRA2004219, FEBRA2004237, FEBRA2004268, FEBRA2004293, FEBRA2004325, FEBRA2004329, FEBRA2004331, FEBRA2004412, FEBRA2004443, FEBRA2004485, FEBRA2004490, FEBRA2004538, FEBRA2004592, FEBRA2004620, FEBRA2004628, FEBRA2004651, FEBRA2004767, FEBRA2004813, FEBRA2004818, FEBRA2004840, FEBRA2004852, FEBRA2004867, FEBRA2004914, FEBRA2004933, FEBRA2004987, FEBRA2005014, FEBRA2005036, FEBRA2005079, FEBRA2005114, FEBRA2005216, FEBRA2005291, FEBRA2005361, FEBRA2005377, FEBRA2005380, FEBRA2005416, FEBRA2005427, FEBRA2005458, FEBRA2005476, FEBRA2005701, FEBRA2005726, FEBRA2005734, FEBRA2005778, FEBRA2005787, FEBRA2005788, FEBRA2005824, FEBRA2005995, FEBRA2005998, FEBRA2006055, FEBRA2006061, FEBRA2006092, FEBRA2006112, FEBRA2006150, FEBRA2006165, FEBRA2006255, FEBRA2006315, FEBRA2006346, FEBRA2006354, FEBRA2006357, FEBRA2006368, FEBRA2006370, FEBRA2006372, FEBRA2006379, FEBRA2006396, FEBRA2006401, FEBRA2006409, FEBRA2006418, FEBRA2006427, FEBRA2006476, FEBRA2006491, FEBRA2006519, FEBRA2006521, FEBRA2006553, FEBRA2006627, FEBRA2006664, FEBRA2006667, FEBRA2006726, FEBRA2006736, FEBRA2006793, FEBRA2006808, FEBRA2006817, FEBRA2006873, FEBRA2006890, FEBRA2006942, FEBRA2006977, FEBRA2007017, FEBRA2007176, FEBRA2007200, FEBRA2007212, FEBRA2007247, FEBRA2007280, FEBRA2007414, FEBRA2007436, FEBRA2007449, FEBRA2007458, FEBRA2007534, FEBRA2007544, FEBRA2007551, FEBRA2007566, FEBRA2007589, FEBRA2007613, FEBRA2007620, FEBRA2007622, FEBRA2007708, FEBRA2007714, FEBRA2007793, FEBRA2007818, FEBRA2007823, FEBRA2007880, FEBRA2007900, FEBRA2007901, FEBRA2007931, FEBRA2007957, FEBRA2008009, FEBRA2008036, FEBRA2008086, FEBRA2008087, FEBRA2008134, FEBRA2008135, FEBRA2008159, FEBRA2008165, FEBRA2008172, FEBRA2008201, FEBRA2008210, FEBRA2008255, FEBRA2008265, FEBRA2008266, FEBRA2008282, FEBRA2008287, FEBRA2008311, FEBRA2008341, FEBRA2008360, FEBRA2008459, FEBRA2008468, FEBRA2008475, FEBRA2008481, FEBRA2008542, FEBRA2008660, FEBRA2008662, FEBRA2008681, FEBRA2008692, FEBRA2008741, FEBRA2008755, FEBRA2008836, FEBRA2008859, FEBRA2008861, FEBRA2008866, FEBRA2008881, FEBRA2008928, FEBRA2008983, FEBRA2009016, FEBRA2009029, FEBRA2009074, FEBRA2009117, FEBRA2009120, FEBRA2009162, FEBRA2009185, FEBRA2009240, FEBRA2009265, FEBRA2009276, FEBRA2009289, FEBRA2009327, FEBRA2009328, FEBRA2009352, FEBRA2009362, FEBRA2009385, FEBRA2009416, FEBRA2009419, FEBRA2009437, FEBRA2009478, FEBRA2009507, FEBRA2009514, FEBRA2009541, FEBRA2009567, FEBRA2009588, FEBRA2009731, FEBRA2009754, FEBRA2009780, FEBRA2009846, FEBRA2009986, FEBRA2010141, FEBRA2010299, FEBRA2010484, FEBRA2010719, FEBRA2010746, FEBRA2010768, FEBRA2010802, FEBRA2011063, FEBRA2011090, FEBRA2011356, FEBRA2011392, FEBRA2011414, FEBRA2011593, FEBRA2011665, FEBRA2012090, FEBRA2012120, FEBRA2012181, FEBRA2012195, FEBRA2012397, FEBRA2012418, FEBRA2012507, FEBRA2012625, FEBRA2013019, FEBRA2013069, FEBRA2013274, FEBRA2013465, FEBRA2013570, FEBRA2013699, FEBRA2013905, FEBRA2013951, FEBRA2014010, FEBRA2014122, FEBRA2014198, FEBRA2014213, FEBRA2014297, FEBRA2014417, FEBRA2014443, FEBRA2014578, FEBRA2014939, FEBRA2015076, FEBRA2015085, FEBRA2015175, FEBRA2015292, FEBRA2015588, FEBRA2016112, FEBRA2016398, FEBRA2016572, FEBRA2016583, FEBRA2016621, FEBRA2016654, FEBRA2016739, FEBRA2017024, FEBRA2017098, FEBRA2017138, FEBRA2017154, FEBRA2017200, FEBRA2017223, FEBRA2017333, FEBRA2017502, FEBRA2017533, FEBRA2017680, FEBRA2017736, FEBRA2017780, FEBRA2017811, FEBRA2017850, FEBRA2018051, FEBRA2018203, FEBRA2018407, FEBRA2018433, FEBRA2018476, FEBRA2018746, FEBRA2019172, FEBRA2019242, FEBRA2019389, FEBRA2019457, FEBRA2019519, FEBRA2019582, FEBRA2019637, FEBRA2019663, FEBRA2019690, FEBRA2019711, FEBRA2019867, FEBRA2020406, FEBRA2020566, FEBRA2020582, FEBRA2020668, FEBRA2020801, FEBRA2020845, FEBRA2020886, FEBRA2020977, FEBRA2021032, FEBRA2021134, FEBRA2021171, FEBRA2021339, FEBRA2021431, FEBRA2021497, FEBRA2021550, FEBRA2021571, FEBRA2021636, FEBRA2021864, FEBRA2021892, FEBRA2021908, FEBRA2021966, FEBRA2022013, FEBRA2022055, FEBRA2022148, FEBRA2022204, FEBRA2022255, FEBRA2022322, FEBRA2022601, FEBRA2022696, FEBRA2022729, FEBRA2022787, FEBRA2022911, FEBRA2022956, FEBRA2022963, FEBRA2022972, FEBRA2023227, FEBRA2023285, FEBRA2023351, FEBRA2023377, FEBRA2023399, FEBRA2023498, FEBRA2023550, FEBRA2023721, FEBRA2023927, FEBRA2023989, FEBRA2023990, FEBRA2024019, FEBRA2024136, FEBRA2024150, FEBRA2024343, FEBRA2024570, FEBRA2024693, FEBRA2024727, FEBRA2024744, FEBRA2024797, FEBRA2024987, FEBRA2025249, FEBRA2025427, FEBRA2025463, FEBRA2025477, FEBRA2025838, FEBRA2026474, FEBRA2026582, FEBRA2026629, FEBRA2026769, FEBRA2026879, FEBRA2026890, FEBRA2026977, FEBRA2026984, FEBRA2027082, FEBRA2027297, FEBRA2027352, FEBRA2027364, FEBRA2027609, FEBRA2028158, FEBRA2028222, FEBRA2028366, FEBRA2028457, FEBRA2028477, FEBRA2028503, FEBRA2028516, FEHRT2000325, FEHRT2000364, FEKID1000018, FELIV1000101, FELIV1000137, FELIV1000164, FELNG2000241, HCASM1000021, HCASM1000050, HCASM1000061, HCASM1000115, HCASM1000130, HCASM2000016, HCASM2000138, HCASM2000156, HCASM2000202, HCASM2000214, HCASM2000266, HCASM2000307, HCASM2000534, HCASM2000536, HCASM2000560, HCASM2000871, HCASM2001285, HCASM2001810, HCASM2001866, HCASM2001890, HCASM2002148, HCASM2002502, HCASM2002754, HCASM2002918, HCASM2003018, HCASM2003076, HCASM2003099, HCASM2003212, HCASM2003237, HCASM2003357, HCASM2003415, HCASM2005388, HCASM2005484, HCASM2006131, HCASM2006338, HCASM2006359, HCASM2006632, HCASM2007047, HCASM2007317, HCASM2007737, HCASM2007773, HCASM2008154, HCASM2008536, HCASM2009405, HCASM2009424, HCASM2009463, HCASM2009588, HCHON1000131, HCHON1000142, HCHON1000166, HCHON1000176, HCHON2000038, HCHON2000062, HCHON2000087, HCHON2000100, HCHON2000156, HCHON2000160, HCHON2000199, HCHON2000212, HCHON2000265, HCHON2000271, HCHON2000315, HCHON2000322, HCHON2000323, HCHON2000344, HCHON2000395, HCHON2000417, HCHON2000418, HCHON2000473, HCHON2000475, HCHON2000503, HCHON2000626, HCHON2000660, HCHON2000663, HCHON2000673, HCHON2000698, HCHON2000699, HCHON2000738, HCHON2000743, HCHON2000815, HCHON2000817, HCHON2000818, HCHON2000826, HCHON2000832, HCHON2000851, HCHON2000898, HCHON2000935, HCHON2000942, HCHON2000956, HCHON2000994, HCHON2001039, HCHON2001050, HCHON2001084, HCHON2001099, HCHON2001110, HCHON2001116, HCHON2001161, HCHON2001214, HCHON2001233, HCHON2001269, HCHON2001359, HCHON2001407, HCHON2001434, HCHON2001450, HCHON2001453, HCHON2001497, HCHON2001505, HCHON2001519, HCHON2001523, HCHON2001535, HCHON2001546, HCHON2001548, HCHON2001577, HCHON2001604, HCHON2001607, HCHON2001646, HCHON2001665, HCHON2001712, HCHON2001768, HCHON2001801, HCHON2001853, HCHON2002123, HCHON2002194, HCHON2002241, HCHON2002247, HCHON2002354, HCHON2002496, HCHON2002676, HCHON2002770, HCHON2002964, HCHON2002971, HCHON2003131, HCHON2003134, HCHON2003327, HCHON2003513, HCHON2003532, HCHON2003642, HCHON2003659, HCHON2003676, HCHON2004002 HCHON2004007, HCHON2004279, HCHON2004359, HCHON2004531, HCHON2004776, HCHON2004858, HCHON2005048, HCHON2005118, HCHON2005166, HCHON2005802, HCHON2005921, HCHON2005987, HCHON2006250, HCHON2006459, HCHON2006714, HCHON2006722, HCHON2006770, HCHON2006786, HCHON2006841, HCHON2006871, HCHON2007046, HCHON2007482, HCHON2007650, HCHON2007674, HCHON2007774, HCHON2007881, HCHON2008112, HCHON2008239, HCHON2008444, HCHON2008582, HCHON2008672, HCHON2008856, HCHON2008871, HCHON2008989, HCHON2009191, HCHON2009384, HCHON2009749, HCHON2009766, HCHON2009795, HCHON2010074, HCHON2010543, HEART1000010, HEART1000074, HEART1000088, HEART1000099, HEART1000102, HEART1000118, HEART1000132, HEART1000139, HEART1000142, HEART1000149, HEART1000151, HEART1000173, HEART1000185, HEART2000024, HEART2000035, HEART2000099, HEART2000298, HEART2000306, HEART2000309, HEART2000411, HEART2000418, HEART2000444, HEART2000448, HEART2000492, HEART2000506, HEART2000520, HEART2000568, HEART2000611, HEART2000959, HEART2001680, HEART2001756, HEART2002129, HEART2002184, HEART2002220, HEART2002432, HEART2002531, HEART2002598, HEART2002717, HEART2003027, HEART2003168, HEART2003432, HEART2003440, HEART2003781, HEART2003836, HEART2003852, HEART2004570, HEART2004764, HEART2004931, HEART2004940, HEART2004941, HEART2004980, HEART2005244, HEART2005310, HEART2005581, HEART2005610, HEART2006131, HEART2006195, HEART2006310, HEART2006334, HEART2006487, HEART2006521, HEART2006557, HEART2006787, HEART2006789, HEART2006909, HEART2007031, HEART2007231, HEART2007443, HEART2007696, HEART2007767, HEART2008108, HEART2008111, HEART2008257, HEART2008509, HEART2008994, HEART2009000, HEART2009599, HEART2009680, HEART2010391, HEART2010492, HEART2010495, HELAC2000158, HELAC2000301, HHDPC1000001, HHDPC1000065, HHDPC1000114, HHDPC1000118, HHDPC1000163, HHDPC2000055, HHDPC2000070, HHDPC2000102, HHDPC2000104, HHDPC2000115, HHDPC2000149, HHDPC2000258, HHDPC2000315, HHDPC2000456, HHDPC2000462, HHDPC2000572, HHDPC2000656, HHDPC2000692, HHDPC2001337, HHDPC2001432, HHDPC2001896, HHDPC2002963, HHDPC2003049, HHDPC2003113, HHDPC2003381, HHDPC2003472, HHDPC2004757, HHDPC2005185, HHDPC2005513, HHDPC2005742, HHDPC2005794, HHDPC2006460, HHDPC2006862, HHDPC2006927, HHDPC2007267, HHDPC2007302, HHDPC2007775, HHDPC2008123, HHDPC2008185, HHDPC2008279, HHDPC2008297, HHDPC2008414, HHDPC2008474, HHDPC2008816, HHDPC2008843, HHDPC2009114, HHDPC2009178, HHDPC2009208, HHDPC2009272, HHDPC2009528, HLUNG1000017, HLUNG1000024, HLUNG1000030, HLUNG1000034, HLUNG1000037, HLUNG1000053, HLUNG1000055, HLUNG1000076, HLUNG1000084, HLUNG1000091, HLUNG1000099, HLUNG1000104, HLUNG1000105, HLUNG1000110, HLUNG1000151, HLUNG1000169, HLUNG2000014, HLUNG2000027, HLUNG2000063, HLUNG2000068, HLUNG2000116, HLUNG2000125, HLUNG2000130, HLUNG2000142, HLUNG2000174, HLUNG2000176, HLUNG2000217, HLUNG2000232, HLUNG2000255, HLUNG2000281, HLUNG2000314, HLUNG2000315, HLUNG2000340, HLUNG2000362, HLUNG2000363, HLUNG2000412, HLUNG2000431, HLUNG2000480, HLUNG2000489, HLUNG2000501, HLUNG2000549, HLUNG2000557, HLUNG2000570, HLUNG2000751, HLUNG2000761, HLUNG2000777, HLUNG2000846, HLUNG2000870, HLUNG2000884, HLUNG2000926, HLUNG2000950, HLUNG2000955, HLUNG2000970, HLUNG2001013, HLUNG2001126, HLUNG2001144, HLUNG2001146, HLUNG2001214, HLUNG2001439, HLUNG2001459, HLUNG2001633, HLUNG2001677, HLUNG2001712, HLUNG2001814, HLUNG2001996, HLUNG2002006, HLUNG2002050, HLUNG2002059, HLUNG2002085, HLUNG2002145, HLUNG2002295, HLUNG2002303, HLUNG2002334, HLUNG2002405, HLUNG2002429, HLUNG2002465, HLUNG2002562, HLUNG2002648, HLUNG2002659, HLUNG2002707, HLUNG2002811, HLUNG2002916, HLUNG2002942, HLUNG2002949, HLUNG2002958, HLUNG2002982, HLUNG2003003, HLUNG2003042, HLUNG2003049, HLUNG2003061, HLUNG2003162, HLUNG2003246, HLUNG2003306, HLUNG2003331, HLUNG2003335, HLUNG2003378, HLUNG2003497, HLUNG2003691, HLUNG2003710, HLUNG2003714, HLUNG2003716, HLUNG2003778, HLUNG2003833, HLUNG2003872, HLUNG2003918, HLUNG2003991, HLUNG2004014, HLUNG2004037, HLUNG2004067, HLUNG2004159, HLUNG2004170, HLUNG2004217, HLUNG2004273, HLUNG2004416, HLUNG2004521, HLUNG2004534, HLUNG2004684, HLUNG2004707, HLUNG2004774, HLUNG2004775, HLUNG2005012, HLUNG2005030, HLUNG2005045, HLUNG2005076, HLUNG2005133, HLUNG2005203, HLUNG2005230, HLUNG2005479, HLUNG2005524, HLUNG2005656, HLUNG2005738, HLUNG2005774, HLUNG2005813, HLUNG2005924, HLUNG2006026, HLUNG2006067, HLUNG2006094, HLUNG2006370, HLUNG2006397, HLUNG2006570, HLUNG2006599, HLUNG2006614, HLUNG2006671, HLUNG2006781, HLUNG2006812, HLUNG2006843, HLUNG2006852, HLUNG2006935, HLUNG2007041, HLUNG2007163, HLUNG2007219, HLUNG2007245, HLUNG2007433, HLUNG2007931, HLUNG2008066, HLUNG2008139, HLUNG2008153, HLUNG2008225, HLUNG2008235, HLUNG2008247, HLUNG2008333, HLUNG2008348, HLUNG2008384, HLUNG2008396, HLUNG2008439, HLUNG2008479, HLUNG2008480, HLUNG2008521, HLUNG2008637, HLUNG2008833, HLUNG2008875, HLUNG2008885, HLUNG2008958, HLUNG2008959, HLUNG2009067, HLUNG2009215, HLUNG2009225, HLUNG2009253, HLUNG2009303, HLUNG2009413, HLUNG2009729, HLUNG2010181, HLUNG2010464, HLUNG2010562, HLUNG2010845, HLUNG2011041, HLUNG2011298, HLUNG2011461, HLUNG2011833, HLUNG2012049, HLUNG2012287, HLUNG2012315, HLUNG2012546, HLUNG2012600, HLUNG2012727, HLUNG2013097, HLUNG2013204, HLUNG2013304, HLUNG2013350, HLUNG2013622, HLUNG2013643, HLUNG2013784, HLUNG2013851, HLUNG2014262, HLUNG2014288, HLUNG2014449, HLUNG2014821, HLUNG2015184, HLUNG2015418, HLUNG2015548, HLUNG2015578, HLUNG2015617, HLUNG2016022, HLUNG2016862, HLUNG2017262, HLUNG2017286, HLUNG2017307, HLUNG2017350, HLUNG2017546, HLUNG2017806, HLUNG2018029, HLUNG2018282, HLUNG2018626, HLUNG2019058, HSYRA1000131, HSYRA1000137, HSYRA1000148, HSYRA1000178, HSYRA2000044, HSYRA2000135, HSYRA2000137, HSYRA2000190, HSYRA2000221, HSYRA2000224, HSYRA2000232, HSYRA2000237, HSYRA2000248, HSYRA2000253, HSYRA2000371, HSYRA2000424, HSYRA2000507, HSYRA2000510, HSYRA2000605, HSYRA2000629, HSYRA2000640, HSYRA2000706, HSYRA2000743, HSYRA2000760, HSYRA2000787, HSYRA2000792, HSYRA2000828, HSYRA2000832, HSYRA2000927, HSYRA2001003, HSYRA2001105, HSYRA2001142, HSYRA2001153, HSYRA2001232, HSYRA2001255, HSYRA2001332, HSYRA2001353, HSYRA2001396, HSYRA2001420, HSYRA2001484, HSYRA2001552, HSYRA2001567, HSYRA2001580, HSYRA2001595, HSYRA2001631, HSYRA2001638, HSYRA2001983, HSYRA2002103, HSYRA2002590, HSYRA2002741, HSYRA2003168, HSYRA2004550, HSYRA2004858, HSYRA2005456, HSYRA2005496, HSYRA2005628, HSYRA2005970, HSYRA2006049, HSYRA2006873, HSYRA2007338, HSYRA2007650, HSYRA2008154, HSYRA2008714, HSYRA2009102, IMR321000155, IMR321000158, IMR321000161, IMR321000165, IMR321000193, IMR321000207, IMR321000210, IMR321000230, IMR321000242, IMR321000266, IMR322000010, IMR322000107, IMR322000127, IMR322000144, IMR322000152, IMR322000164, IMR322000178, IMR322000223, IMR322000302, IMR322000316, IMR322000374, IMR322000379, IMR322000383, IMR322000418, IMR322000518, IMR322000555, IMR322000604, IMR322000609, IMR322000656, IMR322000672, IMR322000730, IMR322000742, IMR322000775, IMR322000791, IMR322000811, IMR322000819, IMR322000838, IMR322000859, IMR322000863, IMR322000917, IMR322000919, IMR322000953, IMR322000984, IMR322001018, IMR322001049, IMR322001167, IMR322001185, IMR322001218, IMR322001245, IMR322001317, IMR322001318, IMR322001322, IMR322001332, IMR322001380, IMR322001438, IMR322001452, IMR322001491, IMR322001534, IMR322001541, IMR322001665, IMR322001670, IMR322001724, IMR322001879, IMR322002035, IMR322002110, IMR322002470, IMR322002993, IMR322003675, IMR322004768, IMR322005293, IMR322005833, IMR322006012, IMR322006222, IMR322006495, IMR322006520, IMR322006886, IMR322006947, IMR322007078, IMR322007225, IMR322007704, IMR322008651, IMR322009710, IMR322009807, IMR322010295, IMR322010953, IMR322011689, IMR322012314, IMR322013053, IMR322013396, IMR322013731, IMR322013805, IMR322015523, IMR322016146, IMR322017049, IMR322018117, IMR322018192, IMR322019070, JCMLC2000273, KIDNE1000008, KIDNE1000012, KIDNE1000015, KIDNE1000028, KIDNE1000036, KIDNE1000064, KIDNE1000104, KIDNE1000121, KIDNE1000143, KIDNE1000145, KIDNE1000152, KIDNE2000026, KIDNE2000041, KIDNE2000046, KIDNE2000051, KIDNE2000070, KIDNE2000085, KIDNE2000167, KIDNE2000174, KIDNE2000192, KIDNE2000227, KIDNE2000244, KIDNE2000245, KIDNE2000266, KIDNE2000287, KIDNE2000315, KIDNE2000317, KIDNE2000328, KIDNE2000330, KIDNE2000335, KIDNE2000349, KIDNE2000375, KIDNE2000383, KIDNE2000394, KIDNE2000403, KIDNE2000422, KIDNE2000493, KIDNE2000497, KIDNE2000510, KIDNE2000513, KIDNE2000517, KIDNE2000519, KIDNE2000555, KIDNE2000624, KIDNE2000665, KIDNE2000678, KIDNE2000717, KIDNE2000721, KIDNE2000722, KIDNE2000777, KIDNE2000801, KIDNE2000832, KIDNE2000833, KIDNE2000846, KIDNE2000867, KIDNE2000909, KIDNE2000947, KIDNE2001117, KIDNE2001140, KIDNE2001162, KIDNE2001269, KIDNE2001361, KIDNE2001373, KIDNE2001636, KIDNE2001713, KIDNE2001802, KIDNE2001840, KIDNE2001847, KIDNE2001857, KIDNE2001873, KIDNE2001897, KIDNE2001931, KIDNE2001979, KIDNE2002015, KIDNE2002162, KIDNE2002168, KIDNE2002191, KIDNE2002198, KIDNE2002262, KIDNE2002438, KIDNE2002483, KIDNE2002725, KIDNE2002768, KIDNE2002795, KIDNE2002798, KIDNE2002839, KIDNE2002845, KIDNE2002872, KIDNE2002883, KIDNE2002980, KIDNE2002991, KIDNE2003185, KIDNE2003188, KIDNE2003233, KIDNE2003305, KIDNE2003316, KIDNE2003335, KIDNE2003357, KIDNE2003373, KIDNE2003377, KIDNE2003507, KIDNE2003752, KIDNE2003764, KIDNE2003837, KIDNE2003994, KIDNE2004034, KIDNE2004054, KIDNE2004084, KIDNE2004095, KIDNE2004115, KIDNE2004233, KIDNE2004262, KIDNE2004279, KIDNE2004294, KIDNE2004295, KIDNE2004305, KIDNE2004344, KIDNE2004394, KIDNE2004411, KIDNE2004475, KIDNE2004519, KIDNE2004520, KIDNE2004531, KIDNE2004562, KIDNE2004579, KIDNE2004626, KIDNE2004681, KIDNE2004828, KIDNE2004846, KIDNE2004864, KIDNE2004879, KIDNE2004981, KIDNE2004985, KIDNE2004999, KIDNE2005038, KIDNE2005042, KIDNE2005062, KIDNE2005266, KIDNE2005296, KIDNE2005321, KIDNE2005327, KIDNE2005336, KIDNE2005400, KIDNE2005424, KIDNE2005477, KIDNE2005526, KIDNE2005543, KIDNE2005603, KIDNE2005629, KIDNE2005676, KIDNE2005781, KIDNE2005798, KIDNE2005854, KIDNE2005908, KIDNE2005937, KIDNE2006009, KIDNE2006014, KIDNE2006030, KIDNE2006039, KIDNE2006053, KIDNE2006062, KIDNE2006092, KIDNE2006145, KIDNE2006149, KIDNE2006210, KIDNE2006299, KIDNE2006334, KIDNE2006353, KIDNE2006376, KIDNE2006378, KIDNE2006465, KIDNE2006580, KIDNE2006652, KIDNE2006687, KIDNE2006733, KIDNE2006760, KIDNE2006775, KIDNE2006811, KIDNE2006820, KIDNE2007005, KIDNE2007040, KIDNE2007077, KIDNE2007186, KIDNE2007222, KIDNE2007328, KIDNE2007352, KIDNE2007356, KIDNE2007422, KIDNE2007569, KIDNE2007810, KIDNE2007811, KIDNE2007910, KIDNE2007944, KIDNE2007954, KIDNE2008022, KIDNE2008069, KIDNE2008072, KIDNE2008117, KIDNE2008218, KIDNE2008315, KIDNE2008362, KIDNE2008378, KIDNE2008403, KIDNE2008404, KIDNE2008446, KIDNE2008473, KIDNE2008480, KIDNE2008649, KIDNE2008666, KIDNE2008697, KIDNE2008758, KIDNE2008788, KIDNE2008795, KIDNE2008824, KIDNE2008832, KIDNE2008869, KIDNE2008914, KIDNE2008975, KIDNE2008987, KIDNE2009019, KIDNE2009109, KIDNE2009180, KIDNE2009191, KIDNE2009332, KIDNE2009367, KIDNE2009426, KIDNE2009467, KIDNE2009490, KIDNE2009553, KIDNE2009605, KIDNE2009628, KIDNE2009647, KIDNE2009676, KIDNE2009723, KIDNE2010007, KIDNE2010049, KIDNE2010052, KIDNE2010084, KIDNE2010137, KIDNE2010151, KIDNE2010264, KIDNE2010265, KIDNE2010271, KIDNE2010419, KIDNE2010430, KIDNE2010574, KIDNE2010674, KIDNE2010739, KIDNE2010750, KIDNE2010762, KIDNE2010863, KIDNE2010973, KIDNE2010989, KIDNE2011200, KIDNE2011314, KIDNE2011508, KIDNE2011532, KIDNE2011635, KIDNE2011752, KIDNE2011782, KIDNE2011858, KIDNE2012009, KIDNE2012025, KIDNE2012188, KIDNE2012291, KIDNE2012316, KIDNE2012361, KIDNE2012440, KIDNE2012453, KIDNE2012563, KIDNE2012601, KIDNE2012613, KIDNE2012710, KIDNE2012745, KIDNE2012775, KIDNE2012784, KIDNE2012945, KIDNE2013045, KIDNE2013095, KIDNE2013158, KIDNE2013218, KIDNE2013263, KIDNE2013346, KIDNE2013388, KIDNE2013413, KIDNE2013489, KIDNE2013639, KIDNE2013731, KIDNE2013734, KIDNE2013775, KIDNE2013801, KIDNE2013866, KIDNE2014087, KIDNE2014112, KIDNE2014119, KIDNE2014170, KIDNE2014184, KIDNE2014268, KIDNE2014298, KIDNE2014320, KIDNE2014325, KIDNE2014415, KIDNE2014489, KIDNE2014496, KIDNE2014661, KIDNE2014717, KIDNE2014789, KIDNE2014808, KIDNE2014890, KIDNE2014978, KIDNE2015073, KIDNE2015221, KIDNE2015244, KIDNE2015313, KIDNE2015433, KIDNE2015445, KIDNE2015483, KIDNE2015515, KIDNE2015546, KIDNE2015556, KIDNE2015598, KIDNE2015660, KIDNE2015710, KIDNE2015987, KIDNE2016000, KIDNE2016036, KIDNE2016096, KIDNE2016101, KIDNE2016142, KIDNE2016188, KIDNE2016327, KIDNE2016371, KIDNE2016388, KIDNE2016464, KIDNE2016539, KIDNE2016570, KIDNE2016918, KIDNE2017007, KIDNE2017040, KIDNE2017052, KIDNE2017151, KIDNE2017153, KIDNE2017315, KIDNE2017332, KIDNE2017343, KIDNE2017454, KIDNE2017603, KIDNE2017956, KIDNE2018071, KIDNE2018166, KIDNE2018167, KIDNE2018217, KIDNE2018254, KIDNE2018268, KIDNE2018269, KIDNE2018287, KIDNE2018294, KIDNE2018352, KIDNE2018462, KIDNE2018493, KIDNE2018617, KIDNE2018678, KIDNE2018727, KIDNE2018863, KIDNE2018891, KIDNE2018989, KIDNE2018996, KIDNE2019074, KIDNE2019187, NCRRP1000129, NESOP1000010, NESOP1000087, NESOP1000108, NESOP2000231, NESOP2000452, NESOP2000499, NESOP2000504, NESOP2000744, NESOP2001144, NESOP2001433, NESOP2001656, NESOP2001694, NESOP2001752, NESOP2002352, NESOP2002418, NESOP2002487, NESOP2002738, NESOP2002780, NETRP1000034, NETRP1000082, NETRP2000086, NETRP2000182, NETRP2000439, NHNPC1000034, NHNPC1000037, NHNPC1000084, NHNPC1000101, NHNPC1000124, NHNPC2000062, NHNPC2000212, NHNPC2000606, NHNPC2000877, NHNPC2001108, NHNPC2001223, NHNPC2001312, NHNPC2001816, NHNPC2002565, NHNPC2002749, NOVAR1000015, NOVAR1000091, NOVAR1000102, NOVAR2000038, NOVAR2000136, NOVAR2000352, NOVAR2000412, NOVAR2000710, NOVAR2000783, NOVAR2000962, NOVAR2001108, NOVAR2001620, NOVAR2001783, NOVAR2001876, NOVAR2002039, NT2NE1000014, NT2NE1000018, NT2NE1000023, NT2NE1000024, NT2NE1000059, NT2NE1000063, NT2NE1000073, NT2NE1000083, NT2NE1000120, NT2NE1000122, NT2NE1000175, NT2NE1000181, NT2NE1000185, NT2NE2000038, NT2NE2000054, NT2NE2000057, NT2NE2000064, NT2NE2000109, NT2NE2000137, NT2NE2000156, NT2NE2000174, NT2NE2000195, NT2NE2000222, NT2NE2000259, NT2NE2000284, NT2NE2000299, NT2NE2000327, NT2NE2000353, NT2NE2000356, NT2NE2000369, NT2NE2000374, NT2NE2000383, NT2NE2000384, NT2NE2000386, NT2NE2000390, NT2NE2000392, NT2NE2000455, NT2NE2000470, NT2NE2000488, NT2NE2000517, NT2NE2000536, NT2NE2000546, NT2NE2000548, NT2NE2000550, NT2NE2000575, NT2NE2000586, NT2NE2000612, NT2NE2000636, NT2NE2000658, NT2NE2000706, NT2NE2000707, NT2NE2000763, NT2NE2000802, NT2NE2000808, NT2NE2000809, NT2NE2000864, NT2NE2000909, NT2NE2000950, NT2NE2000951, NT2NE2000963, NT2NE2000980, NT2NE2001005, NT2NE2001021, NT2NE2001040, NT2NE2001048, NT2NE2001049, NT2NE2001142, NT2NE2001156, NT2NE2001176, NT2NE2001180, NT2NE2001181, NT2NE2001188, NT2NE2001191, NT2NE2001247, NT2NE2001252, NT2NE2001324, NT2NE2001326, NT2NE2001337, NT2NE2001364, NT2NE2001372, NT2NE2001397, NT2NE2001403, NT2NE2001428, NT2NE2001432, NT2NE2001435, NT2NE2001442, NT2NE2001524, NT2NE2001530, NT2NE2001545, NT2NE2001598, NT2NE2001623, NT2NE2001626, NT2NE2001634, NT2NE2001648, NT2NE2001655, NT2NE2001660, NT2NE2001666, NT2NE2001677, NT2NE2001697, NT2NE2001698, NT2NE2001723, NT2NE2001725, NT2NE2001874, NT2NE2001889, NT2NE2001923, NT2NE2002100, NT2NE2002162, NT2NE2002186, NT2NE2002285, NT2NE2002311, NT2NE2002620, NT2NE2002651, NT2NE2002732, NT2NE2002768, NT2NE2002791, NT2NE2002856, NT2NE2002870, NT2NE2003150, NT2NE2003185, NT2NE2003252, NT2NE2003280, NT2NE2003308, NT2NE2003309, NT2NE2003315, NT2NE2003393, NT2NE2003408, NT2NE2003457, NT2NE2003485, NT2NE2003540, NT2NE2003569, NT2NE2003571, NT2NE2003705, NT2NE2003752, NT2NE2003921, NT2NE2004255, NT2NE2004378, NT2NE2004490, NT2NE2004606, NT2NE2004716, NT2NE2004740, NT2NE2004787, NT2NE2004916, NT2NE2005035, NT2NE2005223, NT2NE2005276, NT2NE2005317, NT2NE2005323, NT2NE2005358, NT2NE2005371, NT2NE2005395, NT2NE2005419, NT2NE2005441, NT2NE2005517, NT2NE2005537, NT2NE2005555, NT2NE2005588, NT2NE2005676, NT2NE2005720, NT2NE2005784, NT2NE2005804, NT2NE2005821, NT2NE2005876, NT2NE2005890, NT2NE2005921, NT2NE2005968, NT2NE2006075, NT2NE2006087, NT2NE2006103, NT2NE2006217, NT2NE2006288, NT2NE2006382, NT2NE2006387, NT2NE2006427, NT2NE2006432, NT2NE2006458, NT2NE2006478, NT2NE2006531, NT2NE2006659, NT2NE2006784, NT2NE2006813, NT2NE2006894, NT2NE2006909, NT2NE2006942, NT2NE2006958, NT2NE2007052, NT2NE2007220, NT2NE2007425, NT2NE2007725, NT2NE2007727, NT2NE2007786, NT2NE2007877, NT2NE2007967, NT2NE2008017, NT2NE2008060, NT2NE2008077, NT2NE2008213, NT2NE2008260, NT2NE2008378, NT2NE2008607, NT2NE2008639, NT2NE2008727, NT2NE2008783, NT2NE2008785, NT2NE2008803, NT2NE2008867, NT2NE2008961, NT2NE2008997, NT2NE2009138, NT2NE2009295, NT2NE2009426, NT2NE2009523, NT2NE2009608, NT2NE2009691, NT2NE2010056, NT2NE2010105, NT2NE2010150, NT2NE2010400, NT2NE2010632, NT2NE2010633, NT2NE2010654, NT2NE2010688, NT2NE2010781, NT2NE2010854, NT2NE2011033, NT2NE2011036, NT2NE2011107, NT2NE2011119, NT2NE2011154, NT2NE2011221, NT2NE2011411, NT2NE2011485, NT2NE2011650, NT2NE2011684, NT2NE2011687, NT2NE2011691, NT2NE2011758, NT2NE2011823, NT2NE2011896, NT2NE2011998, NT2NE2012113, NT2NE2012199, NT2NE2012243, NT2NE2012361, NT2NE2012448, NT2NE2012457, NT2NE2012493, NT2NE2012505, NT2NE2012533, NT2NE2012603, NT2NE2012747, NT2NE2012790, NT2NE2012847, NT2NE2012928, NT2NE2013019, NT2NE2013081, NT2NE2013189, NT2NE2013217, NT2NE2013547, NT2NE2014013, NT2NE2014028, NT2NE2014113, NT2NE2014176, NT2NE2014221, NT2NE2014525, NT2NE2014650, NT2NE2014651, NT2NE2014681, NT2NE2014758, NT2NE2014869, NT2NE2014950, NT2NE2015061, NT2NE2015262, NT2NE2015275, NT2NE2015362, NT2NE2015480, NT2NE2015511, NT2NE2015565, NT2NE2015626, NT2NE2015747, NT2NE2015860, NT2NE2015885, NT2NE2015904, NT2NE2015974, NT2NE2016041, NT2NE2016387, NT2NE2016419, NT2NE2016519, NT2NE2016608, NT2NE2016766, NT2NE2016774, NT2NE2016971, NT2NE2017259, NT2NE2017332, NT2NE2017397, NT2NE2017480, NT2NE2017492, NT2NE2017508, NT2NE2017562, NT2NE2017590, NT2NE2017612, NT2NE2017721, NT2NE2017752, NT2NE2017792, NT2NE2017982, NT2NE2018165, NT2NE2018176, NT2NE2018180, NT2NE2018273, NT2NE2018376, NT2NE2018472, NT2NE2018490, NT2NE2018594, NT2NE2018739, NT2NE2018916, NT2NE2019056, NT2NE2019076, NT2NE2019091, NT2NE2019099, NT2RI1000016, NT2RI1000035, NT2RI1000048, NT2RI1000127, NT2RI1000164, NT2RI1000172, NT2RI2000004, NT2RI2000007, NT2RI2000107, NT2RI2000116, NT2RI2000117, NT2RI2000128, NT2RI2000133, NT2RI2000167, NT2RI2000173, NT2RI2000187, NT2RI2000263, NT2RI2000270, NT2RI2000276, NT2RI2000294, NT2RI2000313, NT2RI2000341, NT2RI2000348, NT2RI2000412, NT2RI2000421, NT2RI2000480, NT2RI2000575, NT2RI2000588, NT2RI2000597, NT2RI2000669, NT2RI2000685, NT2RI2000688, NT2RI2000689, NT2RI2000704, NT2RI2000738, NT2RI2000775, NT2RI2000822, NT2RI2000829, NT2RI2000841, NT2RI2000932, NT2RI2000974, NT2RI2000987, NT2RI2001010, NT2RI2001017, NT2RI2001030, NT2RI2001083, NT2RI2001091, NT2RI2001167, NT2RI2001178, NT2RI2001230, NT2RI2001235, NT2RI2001244, NT2RI2001307, NT2RI2001342, NT2RI2001385, NT2RI2001409, NT2RI2001410, NT2RI2001422, NT2RI2001425, NT2RI2001449, NT2RI2001450, NT2RI2001474, NT2RI2001519, NT2RI2001595, NT2RI2001621, NT2RI2001624, NT2RI2001726, NT2RI2001782, NT2RI2001836, NT2RI2001866, NT2RI2001910, NT2RI2001952, NT2RI2002022, NT2RI2002041, NT2RI2002117, NT2RI2002120, NT2RI2002153, NT2RI2002179, NT2RI2002243, NT2RI2002252, NT2RI2002260, NT2RI2002266, NT2RI2002270, NT2RI2002334, NT2RI2002359, NT2RI2002391, NT2RI2002447, NT2RI2002481, NT2RI2002507, NT2RI2002517, NT2RI2002540, NT2RI2002549, NT2RI2002554, NT2RI2002564, NT2RI2002585, NT2RI2002592, NT2RI2002602, NT2RI2002699, NT2RI2002729, NT2RI2002802, NT2RI2002819, NT2RI2002847, NT2RI2002852, NT2RI2002865, NT2RI2002923, NT2RI2002926, NT2RI2002958, NT2RI2002970, NT2RI2003011, NT2RI2003019, NT2RI2003067, NT2RI2003184, NT2RI2003205, NT2RI2003222, NT2RI2003301, NT2RI2003317, NT2RI2003338, NT2RI2003344, NT2RI2003360, NT2RI2003361, NT2RI2003383, NT2RI2003392, NT2RI2003399, NT2RI2003419, NT2RI2003420, NT2RI2003481, NT2RI2003487, NT2RI2003556, NT2RI2003655, NT2RI2003667, NT2RI2003678, NT2RI2003695, NT2RI2003884, NT2RI2003921, NT2RI2003973, NT2RI2003993, NT2RI2004059, NT2RI2004078, NT2RI2004079, NT2RI2004093, NT2RI2004136, NT2RI2004157, NT2RI2004190, NT2RI2004209, NT2RI2004230, NT2RI2004290, NT2RI2004304, NT2RI2004312, NT2RI2004381, NT2RI2004398, NT2RI2004410, NT2RI2004442, NT2RI2004468, NT2RI2004535, NT2RI2004606, NT2RI2004608, NT2RI2004618, NT2RI2004783, NT2RI2004818, NT2RI2004840, NT2RI2004916, NT2RI2004962, NT2RI2004984, NT2RI2004985, NT2RI2005048, NT2RI2005061, NT2RI2005069, NT2RI2005087, NT2RI2005096, NT2RI2005130, NT2RI2005150, NT2RI2005166, NT2RI2005239, NT2RI2005246, NT2RI2005315, NT2RI2005353, NT2RI2005358, NT2RI2005368, NT2RI2005382, NT2RI2005473, NT2RI2005520, NT2RI2005564, NT2RI2005621, NT2RI2005628, NT2RI2005647, NT2RI2005670, NT2RI2005713, NT2RI2005723, NT2RI2005772, NT2RI2005811, NT2RI2005816, NT2RI2005818, NT2RI2005851, NT2RI2005966, NT2RI2006070, NT2RI2006071, NT2RI2006072, NT2RI2006081, NT2RI2006126, NT2RI2006127, NT2RI2006183, NT2RI2006257, NT2RI2006271, NT2RI2006294, NT2RI2006345, NT2RI2006403, NT2RI2006445, NT2RI2006487, NT2RI2006506, NT2RI2006553, NT2RI2006565, NT2RI2006640, NT2RI2006659, NT2RI2006662, NT2RI2006667, NT2RI2006679, NT2RI2006682, NT2RI2006686, NT2RI2006703, NT2RI2006716, NT2RI2006735, NT2RI2006762, NT2RI2006788, NT2RI2006825, NT2RI2006838, NT2RI2006853, NT2RI2006855, NT2RI2006856, NT2RI2006943, NT2RI2006973, NT2RI2007046, NT2RI2007048, NT2RI2007054, NT2RI2007084, NT2RI2007096, NT2RI2007116, NT2RI2007148, NT2RI2007214, NT2RI2007303, NT2RI2007334, NT2RI2007377, NT2RI2007386, NT2RI2007406, NT2RI2007439, NT2RI2007445, NT2RI2007468, NT2RI2007469, NT2RI2007507, NT2RI2007589, NT2RI2007593, NT2RI2007629, NT2RI2007723, NT2RI2007729, NT2RI2007751, NT2RI2007754, NT2RI2007877, NT2RI2007879, NT2RI2007884, NT2RI2007891, NT2RI2007956, NT2RI2007965, NT2RI2007987, NT2RI2008007, NT2RI2008050, NT2RI2008171, NT2RI2008188, NT2RI2008204, NT2RI2008221, NT2RI2008233, NT2RI2008396, NT2RI2008455, NT2RI2008481, NT2RI2008502, NT2RI2008566, NT2RI2008598, NT2RI2008622, NT2RI2008656, NT2RI2008714, NT2RI2008749, NT2RI2008801, NT2RI2008808, NT2RI2008812, NT2RI2008841, NT2RI2008942, NT2RI2008952, NT2RI2009005, NT2RI2009037, NT2RI2009066, NT2RI2009083, NT2RI2009101, NT2RI2009103, NT2RI2009144, NT2RI2009151, NT2RI2009173, NT2RI2009194, NT2RI2009215, NT2RI2009239, NT2RI2009259, NT2RI2009269, NT2RI2009281, NT2RI2009289, NT2RI2009301, NT2RI2009402, NT2RI2009406, NT2RI2009517, NT2RI2009585, NT2RI2009595, NT2RI2009855, NT2RI2010283, NT2RI2010508, NT2RI2010795, NT2RI2011422, NT2RI2011450, NT2RI2011683, NT2RI2011803, NT2RI2012659, NT2RI2012726, NT2RI2012990, NT2RI2013345, NT2RI2013357, NT2RI2013373, NT2RI2014247, NT2RI2014551, NT2RI2014683, NT2RI2014733, NT2RI2015239, NT2RI2015342, NT2RI2015533, NT2RI2016128, NT2RI2016134, NT2RI2017529, NT2RI2018311, NT2RI2018363, NT2RI2018448, NT2RI2018883, NT2RI2018950, NT2RI2019751, NT2RI2019826, NT2RI2020390, NT2RI2020703, NT2RI2021463, NT2RI2021625, NT2RI2022468, NT2RI2022584, NT2RI2023303, NT2RI2023671, NT2RI2024008, NT2RI2024313, NT2RI2024460, NT2RI2024496, NT2RI2024935, NT2RI2025075, NT2RI2025255, NT2RI2025564, NT2RI2025565, NT2RI2025909, NT2RI2025957, NT2RI2025976, NT2RI2026758, NT2RI2027081, NT2RI2027157, NT2RI2027224, NT2RI2027323, NT2RI2027396, NT2RI2027484, NT2RI2027975, NT2RI2028213, NT2RI2028222, NT2RI2028537, NT2RI2028642, NT2RI3000174, NT2RI3000213, NT2RI3000423, NT2RI3000622, NT2RI3001132, NT2RI3001263, NT2RI3001279, NT2RI3001348, NT2RI3001445, NT2RI3001458, NT2RI3001515, NT2RI3001573, NT2RI3001967, NT2RI3002303, NT2RI3002557, NT2RI3002842, NT2RI3003027, NT2RI3003031, NT2RI3003095, NT2RI3003104, NT2RI3003162, NT2RI3003362, NT2RI3003382, NT2RI3003409, NT2RI3003738, NT2RI3003925, NT2RI3004133, NT2RI3004381, NT2RI3004510, NT2RI3005202, NT2RI3005403, NT2RI3005416, NT2RI3005724, NT2RI3005861, NT2RI3005923, NT2RI3005928, NT2RI3006132, NT2RI3006171, NT2RI3006284, NT2RI3006340, NT2RI3006376, NT2RI3006666, NT2RI3006673, NT2RI3006796, NT2RI3007065, NT2RI3007095, NT2RI3007158, NT2RI3007167, NT2RI3007213, NT2RI3007291, NT2RI3007443, NT2RI3007684, NT2RI3007757, NT2RI3007878, NT2RI3007978, NT2RI3008055, NT2RI3008162, NT2RI3008179, NT2RI3008228, NT2RI3008442, NT2RI3008652, NT2RI3008697, NT2RI3008974, NT2RI3009158, NT2RI3009480, NT2RI3009524, NT2RP6000005, NT2RP6000008, NT2RP6000017, NT2RP6000032, NT2RP6000033, NT2RP6000039, NT2RP6000043, NT2RP6000059, NT2RP6000060, NT2RP6000078, NT2RP6000085, NT2RP6000086, NT2RP6000100, NT2RP6000109, NT2RP6000110, NT2RP6000119, NT2RP6000123, NT2RP6000127, NT2RP6000130, NT2RP6000140, NT2RP6000150, NT2RP7000041, NT2RP7000069, NT2RP7000076, NT2RP7000086, NT2RP7000109, NT2RP7000112, NT2RP7000173, NT2RP7000259, NT2RP7000271, NT2RP7000311, NT2RP7000359, NT2RP7000364, NT2RP7000380, NT2RP7000391, NT2RP7000425, NT2RP7000477, NT2RP7000579, NT2RP7000586, NT2RP7000600, NT2RP7000812, NT2RP7000906, NT2RP7000926, NT2RP7001074, NT2RP7001080, NT2RP7001156, NT2RP7001231, NT2RP7001283, NT2RP7001306, NT2RP7001319, NT2RP7001335, NT2RP7001364, NT2RP7001475, NT2RP7001532, NT2RP7001591, NT2RP7001602, NT2RP7001678, NT2RP7001856, NT2RP7001962, NT2RP7002028, NT2RP7002064, NT2RP7002151, NT2RP7002163, NT2RP7002243, NT2RP7002282, NT2RP7002376, NT2RP7002449, NT2RP7002478, NT2RP7002554, NT2RP7002594, NT2RP7002603, NT2RP7002650, NT2RP7002738, NT2RP7002779, NT2RP7002829, NT2RP7002841, NT2RP7002906, NT2RP7002978, NT2RP7002982, NT2RP7003025, NT2RP7003050, NT2RP7003055, NT2RP7003084, NT2RP7003091, NT2RP7003107, NT2RP7003134, NT2RP7003148, NT2RP7003203, NT2RP7003261, NT2RP7003319, NT2RP7003439, NT2RP7003511, NT2RP7003629, NT2RP7003632, NT2RP7003647, NT2RP7003680, NT2RP7003688, NT2RP7003724, NT2RP7004027, NT2RP7004080, NT2RP7004196, NT2RP7004233, NT2RP7004260, NT2RP7004348, NT2RP7004352, NT2RP7004358, NT2RP7004373, NT2RP7004396, NT2RP7004428, NT2RP7004481, NT2RP7004541, NT2RP7004559, NT2RP7004641, NT2RP7004656, NT2RP7004687, NT2RP7004722, NT2RP7004751, NT2RP7004766, NT2RP7004790, NT2RP7004884, NT2RP7004911, NT2RP7004915, NT2RP7004925, NT2RP7004946, NT2RP7004961, NT2RP7004964, NT2RP7004975, NT2RP7005118, NT2RP7005205, NT2RP7005219, NT2RP7005323, NT2RP7005468, NT2RP7005493, NT2RP7005529, NT2RP7005629, NT2RP7005631, NT2RP7005669, NT2RP7005675, NT2RP7005846, NT2RP7006033, NT2RP7006075, NT2RP7006160, NT2RP7006162, NT2RP7006223, NT2RP7006296, NT2RP7006304, NT2RP7006374, NT2RP7006395, NT2RP7006408, NT2RP7006457, NT2RP7006490, NT2RP7006539, NT2RP7006547, NT2RP7006601, NT2RP7006619, NT2RP7006621, NT2RP7006636, NT2RP7006701, NT2RP7006853, NT2RP7006886, NT2RP7006887, NT2RP7006980, NT2RP7006986, NT2RP7006995, NT2RP7007114, NT2RP7007177, NT2RP7007221, NT2RP7007226, NT2RP7007252, NT2RP7007269, NT2RP7007310, NT2RP7007359, NT2RP7007381, NT2RP7007387, NT2RP7007406, NT2RP7007480, NT2RP7007504, NT2RP7007530, NT2RP7007537, NT2RP7007580, NT2RP7007594, NT2RP7007610, NT2RP7007617, NT2RP7007643, NT2RP7007766, NT2RP7007925, NT2RP7007930, NT2RP7008013, NT2RP7008015, NT2RP7008133, NT2RP7008137, NT2RP7008142, NT2RP7008144, NT2RP7008161, NT2RP7008167, NT2RP7008190, NT2RP7008315, NT2RP7008360, NT2RP7008396, NT2RP7008406, NT2RP7008435, NT2RP7008441, NT2RP7008454, NT2RP7008487, NT2RP7008543, NT2RP7008544, NT2RP7008550, NT2RP7008557, NT2RP7008623, NT2RP7008657, NT2RP7008714, NT2RP7008720, NT2RP7008855, NT2RP7008863, NT2RP7009012, NT2RP7009019, NT2RP7009030, NT2RP7009087, NT2RP7009108, NT2RP7009147, NT2RP7009149, NT2RP7009168, NT2RP7009215, NT2RP7009225, NT2RP7009236, NT2RP7009253, NT2RP7009267, NT2RP7009322, NT2RP7009363, NT2RP7009370, NT2RP7009373, NT2RP7009394, NT2RP7009397, NT2RP7009429, NT2RP7009439, NT2RP7009466, NT2RP7009481, NT2RP7009482, NT2RP7009498, NT2RP7009502, NT2RP7009507, NT2RP7009577, NT2RP7009743, NT2RP7009867, NT2RP7010109, NT2RP7010128, NT2RP7010235, NT2RP7010275, NT2RP7010521, NT2RP7010599, NT2RP7010612, NT2RP7010817, NT2RP7011086, NT2RP7011132, NT2RP7011268, NT2RP7011318, NT2RP7011452, NT2RP7011570, NT2RP7011721, NT2RP7011909, NT2RP7012291, NT2RP7012516, NT2RP7012776, NT2RP7013002, NT2RP7013374, NT2RP7013499, NT2RP7013573, NT2RP7013729, NT2RP7013764, NT2RP7013795, NT2RP7013999, NT2RP7014005, NT2RP7014178, NT2RP7014348, NT2RP7014420, NT2RP7014583, NT2RP7014721, NT2RP7014743, NT2RP7014778, NT2RP7014906, NT2RP7015080, NT2RP7015431, NT2RP7015503, NT2RP7015512, NT2RP7015676, NT2RP7015789, NT2RP7015996, NT2RP7016508, NT2RP7016574, NT2RP7016622, NT2RP7016911, NT2RP7017139, NT2RP7017284, NT2RP7017365, NT2RP7017474, NT2RP7017546, NT2RP7017567, NT2RP7017795, NT2RP7017971, NT2RP7018032, NT2RP7018126, NT2RP7018197, NT2RP7018206, NT2RP7018340, NT2RP7018586, NT2RP7018802, NT2RP7018871, NT2RP7019064, NT2RP7019135, NT2RP7019273, NT2RP7019367, NT2RP7019445, NT2RP7019543, NT2RP7019682, NT2RP7019835, NT2RP7020112, NT2RP7020123, NT2RP7020343, NT2RP7020379, NT2RP8000137, NT2RP8000296, NT2RP8000435, NT2RP8000483, NT2RP8000521, NT2RP8000633, NT2RP8001363, NT2RP8001407, NT2RP8001584, NT2RP8001604, NT2RP8001605, NT2RP8003490, NT2RP8003657, NT2RP8003787, NT2RP8004306, NT2RP8005546, NT2RP8006452, NT2RP8006521, NT2RP8007416, NT2RP8007503, NT2RP8007715, NT2RP8007920, NT2RP8008057, NT2RP8009248, NTONG1000006, NTONG1000033, NTONG1000047, NTONG1000052, NTONG1000075, NTONG1000087, NTONG1000123, NTONG1000130, NTONG1000161, NTONG1000172, NTONG1000182, NTONG1000213, NTONG1000214, NTONG1000246, NTONG1000247, NTONG1000257, NTONG2000040, NTONG2000107, NTONG2000231, NTONG2000334, NTONG2000363, NTONG2000413, NTONG2000492, NTONG2000499, NTONG2000531, NTONG2000583, NTONG2000800, NTONG2000858, NTONG2000878, NTONG2000966, NTONG2000985, NTONG2001014, NTONG2001079, NTONG2001157, NTONG2001173, NTONG2001220, NTONG2001222, NTONG2001362, NTONG2001428, NTONG2001532, NTONG2001550, NTONG2001587, NTONG2001612, NTONG2001619, NTONG2001642, NTONG2001657, NTONG2001676, NTONG2001762, NTONG2002278, NTONG2002582, NTONG2002807, NTONG2002948, NTONG2002970, NTONG2002985, NTONG2003158, NTONG2003210, NTONG2003316, NTONG2003409, NTONG2003454, NTONG2003515, NTONG2003805, NTONG2003852, NTONG2003897, NTONG2003928, NTONG2004095, NTONG2004308, NTONG2004521, NTONG2004614, NTONG2004690, NTONG2004806, NTONG2004829, NTONG2004918, NTONG2004991, NTONG2005062, NTONG2005086, NTONG2005137, NTONG2005153, NTONG2005265, NTONG2005277, NTONG2005363, NTONG2005373, NTONG2005391, NTONG2005480, NTONG2005497, NTONG2005577, NTONG2005657, NTONG2005801, NTONG2005822, NTONG2005897, NTONG2005969, NTONG2006099, NTONG2006187, NTONG2006324, NTONG2006354, NTONG2006440, NTONG2006484, NTONG2006501, NTONG2006646, NTONG2006709, NTONG2006783, NTONG2007020, NTONG2007028, NTONG2007034, NTONG2007249, NTONG2007517, NTONG2007522, NTONG2007658, NTONG2007693, NTONG2007756, NTONG2008088, NTONG2008093, NTONG2008143, NTONG2008365, NTONG2008522, NTONG2008672, NTONG2008862, NTONG2008939, NTONG2008944, NTONG2009060, NTONG2009068, NTONG2009229, NTONG2009233, NTONG2009468, NTONG2009576, OCBBF1000016, OCBBF1000030, OCBBF1000042, OCBBF1000049, OCBBF1000054, OCBBF1000067, OCBBF1000080, OCBBF1000085, OCBBF1000086, OCBBF1000091, OCBBF1000104, OCBBF1000114, OCBBF1000118, OCBBF1000119, OCBBF1000122, OCBBF1000130, OCBBF1000138, OCBBF1000145, OCBBF1000146, OCBBF1000153, OCBBF1000175, OCBBF1000185, OCBBF1000188, OCBBF1000192, OCBBF1000254, OCBBF1000315, OCBBF2000015, OCBBF2000126, OCBBF2000178, OCBBF2000231, OCBBF2000277, OCBBF2000287, OCBBF2000323, OCBBF2000452, OCBBF2000467, OCBBF2000677, OCBBF2000703, OCBBF2000719, OCBBF2000824, OCBBF2000831, OCBBF2000904, OCBBF2000998, OCBBF2001075, OCBBF2001101, OCBBF2001124, OCBBF2001140, OCBBF2001166, OCBBF2001176, OCBBF2001186, OCBBF2001196, OCBBF2001210, OCBBF2001252, OCBBF2001307, OCBBF2001323, OCBBF2001389, OCBBF2001402, OCBBF2001408, OCBBF2001416, OCBBF2001473, OCBBF2001492, OCBBF2001494, OCBBF2001527, OCBBF2001528, OCBBF2001586, OCBBF2001639, OCBBF2001681, OCBBF2001706, OCBBF2001749, OCBBF2001794, OCBBF2001910, OCBBF2001931, OCBBF2001961, OCBBF2001983, OCBBF2002015, OCBBF2002083, OCBBF2002086, OCBBF2002124, OCBBF2002161, OCBBF2002290, OCBBF2002357, OCBBF2002376, OCBBF2002615, OCBBF2002656, OCBBF2002663, OCBBF2002805, OCBBF2002865, OCBBF2002920, OCBBF2002980, OCBBF2003028, OCBBF2003052, OCBBF2003091, OCBBF2003246, OCBBF2003327, OCBBF2003518, OCBBF2003543, OCBBF2003593, OCBBF2003744, OCBBF2003819, OCBBF2003925, OCBBF2004038, OCBBF2004104, OCBBF2004147, OCBBF2004168, OCBBF2004235, OCBBF2004259, OCBBF2004273, OCBBF2004385, OCBBF2004418, OCBBF2004478, OCBBF2004482, OCBBF2004533, OCBBF2004567, OCBBF2004612, OCBBF2004647, OCBBF2004669, OCBBF2004757, OCBBF2004826, OCBBF2004866, OCBBF2004883, OCBBF2004889, OCBBF2004930, OCBBF2004984, OCBBF2005066, OCBBF2005077, OCBBF2005161, OCBBF2005343, OCBBF2005349, OCBBF2005373, OCBBF2005420, OCBBF2005428, OCBBF2005433, OCBBF2005476, OCBBF2005546, OCBBF2005843, OCBBF2005901, OCBBF2005956, OCBBF2006005, OCBBF2006030, OCBBF2006058, OCBBF2006113, OCBBF2006148, OCBBF2006151, OCBBF2006154, OCBBF2006172, OCBBF2006214, OCBBF2006241, OCBBF2006313, OCBBF2006388, OCBBF2006438, OCBBF2006567, OCBBF2006624, OCBBF2006639, OCBBF2006660, OCBBF2006764, OCBBF2006859, OCBBF2006972, OCBBF2006987, OCBBF2007028, OCBBF2007039, OCBBF2007051, OCBBF2007068, OCBBF2007114, OCBBF2007121, OCBBF2007184, OCBBF2007194, OCBBF2007196, OCBBF2007238, OCBBF2007354, OCBBF2007414, OCBBF2007415, OCBBF2007428, OCBBF2007478, OCBBF2007485, OCBBF2007520, OCBBF2007555, OCBBF2007610, OCBBF2007622, OCBBF2007756, OCBBF2007762, OCBBF2007829, OCBBF2007892, OCBBF2007931, OCBBF2007946, OCBBF2008005, OCBBF2008116, OCBBF2008138, OCBBF2008144, OCBBF2008283, OCBBF2008330, OCBBF2008340, OCBBF2008366, OCBBF2008466, OCBBF2008483, OCBBF2008511, OCBBF2008520, OCBBF2008569, OCBBF2008586, OCBBF2008640, OCBBF2008691, OCBBF2008701, OCBBF2008724, OCBBF2008760, OCBBF2008768, OCBBF2008770, OCBBF2008775, OCBBF2008790, OCBBF2008814, OCBBF2009095, OCBBF2009115, OCBBF2009242, OCBBF2009301, OCBBF2009352, OCBBF2009391, OCBBF2009424, OCBBF2009536, OCBBF2009571, OCBBF2009583, OCBBF2009603, OCBBF2009772, OCBBF2009788, OCBBF2009836, OCBBF2009920, OCBBF2009926, OCBBF2010040, OCBBF2010140, OCBBF2010281, OCBBF2010313, OCBBF2010404, OCBBF2010416, OCBBF2010420, OCBBF2010557, OCBBF2010604, OCBBF2010709, OCBBF2010792, OCBBF2010819, OCBBF2010830, OCBBF2010841, OCBBF2010843, OCBBF2010858, OCBBF2010863, OCBBF2010871, OCBBF2010931, OCBBF2010945, OCBBF2010978, OCBBF2010989, OCBBF2011073, OCBBF2011137, OCBBF2011160, OCBBF2011177, OCBBF2011228, OCBBF2011232, OCBBF2011283, OCBBF2011311, OCBBF2011536, OCBBF2011625, OCBBF2011669, OCBBF2011685, OCBBF2011706, OCBBF2011722, OCBBF2011759, OCBBF2011767, OCBBF2011855, OCBBF2011872, OCBBF2011887, OCBBF2011897, OCBBF2011914, OCBBF2011960, OCBBF2011981, OCBBF2012001, OCBBF2012028, OCBBF2012039, OCBBF2012095, OCBBF2012139, OCBBF2012191, OCBBF2012262, OCBBF2012320, OCBBF2012436, OCBBF2012525, OCBBF2012678, OCBBF2012704, OCBBF2012714, OCBBF2012755, OCBBF2012812, OCBBF2012821, OCBBF2012881, OCBBF2012908, OCBBF2012936, OCBBF2012990, OCBBF2013011, OCBBF2013049, OCBBF2013091, OCBBF2013123, OCBBF2013127, OCBBF2013149, OCBBF2013208, OCBBF2013285, OCBBF2013319, OCBBF2013324, OCBBF2013366, OCBBF2013481, OCBBF2013507, OCBBF2013721, OCBBF2013789, OCBBF2013843, OCBBF2013883, OCBBF2013926, OCBBF2014052, OCBBF2014064, OCBBF2014089, OCBBF2014292, OCBBF2014322, OCBBF2014386, OCBBF2014541, OCBBF2014576, OCBBF2014707, OCBBF2014745, OCBBF2014828, OCBBF2014873, OCBBF2014880, OCBBF2014928, OCBBF2015031, OCBBF2015081, OCBBF2015115, OCBBF2015232, OCBBF2015233, OCBBF2015285, OCBBF2015334, OCBBF2015335, OCBBF2015503, OCBBF2015506, OCBBF2015599, OCBBF2015645, OCBBF2015659, OCBBF2015751, OCBBF2015797, OCBBF2015931, OCBBF2015980, OCBBF2016038, OCBBF2016405, OCBBF2016467, OCBBF2016590, OCBBF2016591, OCBBF2016612, OCBBF2016689, OCBBF2016690, OCBBF2016729, OCBBF2016928, OCBBF2017035, OCBBF2017055, OCBBF2017069, OCBBF2017306, OCBBF2017325, OCBBF2017398, OCBBF2017458, OCBBF2017489, OCBBF2017516, OCBBF2017665, OCBBF2017754, OCBBF2017791, OCBBF2017815, OCBBF2017882, OCBBF2017888, OCBBF2017893, OCBBF2017920, OCBBF2018012, OCBBF2018014, OCBBF2018084, OCBBF2018167, OCBBF2018206, OCBBF2018229, OCBBF2018234, OCBBF2018362, OCBBF2018380, OCBBF2018563, OCBBF2018581, OCBBF2018618, OCBBF2018663, OCBBF2018687, OCBBF2018707, OCBBF2018827, OCBBF2018828, OCBBF2018934, OCBBF2018956, OCBBF2019108, OCBBF2019195, OCBBF2019327, OCBBF2019684, OCBBF2019761, OCBBF2019823, OCBBF2019950, OCBBF2020048, OCBBF2020318, OCBBF2020343, OCBBF2020453, OCBBF2020741, OCBBF2020801, OCBBF2020825, OCBBF2020838, OCBBF2021020, OCBBF2021214, OCBBF2021286, OCBBF2021323, OCBBF2021518, OCBBF2021788, OCBBF2021833, OCBBF2022351, OCBBF2022573, OCBBF2022574, OCBBF2023162, OCBBF2023598, OCBBF2023643, OCBBF2024463, OCBBF2024589, OCBBF2024719, OCBBF2024779, OCBBF2024781, OCBBF2024850, OCBBF2025028, OCBBF2025115, OCBBF2025198, OCBBF2025451, OCBBF2025458, OCBBF2025527, OCBBF2025631, OCBBF2025730, OCBBF2026025, OCBBF2026035, OCBBF2026144, OCBBF2026368, OCBBF2026645, OCBBF2026649, OCBBF2026690, OCBBF2026981, OCBBF2027148, OCBBF2027197, OCBBF2027354, OCBBF2027423, OCBBF2027478, OCBBF2027481, OCBBF2027511, OCBBF2027661, OCBBF2027728, OCBBF2027782, OCBBF2027868, OCBBF2028055, OCBBF2028173, OCBBF2028421, OCBBF2029471, OCBBF2029901, OCBBF2030116, OCBBF2030329, OCBBF2030354, OCBBF2030517, OCBBF2030574, OCBBF2030708, OCBBF2030927, OCBBF2030963, OCBBF2031167, OCBBF2031198, OCBBF2031366, OCBBF2031561, OCBBF2032152, OCBBF2032274, OCBBF2032539, OCBBF2032590, OCBBF2032599, OCBBF2032611, OCBBF2032671, OCBBF2033295, OCBBF2033413, OCBBF2033869, OCBBF2033948, OCBBF2034333, OCBBF2034529, OCBBF2034637, OCBBF2034906, OCBBF2035110, OCBBF2035214, OCBBF2035390, OCBBF2035564, OCBBF2035658, OCBBF2035823, OCBBF2035885, OCBBF2035916, OCBBF2036019, OCBBF2036031, OCBBF2036225, OCBBF2036476, OCBBF2036743, OCBBF2036752, OCBBF2037068, OCBBF2037340, OCBBF2037398, OCBBF2037464, OCBBF2037547, OCBBF2037598, OCBBF2037638, OCBBF2038238, OCBBF2038285, OCBBF2038317, OCBBF3000097, OCBBF3000213, OCBBF3000296, OCBBF3000323, OCBBF3000372, OCBBF3000380, OCBBF3000743, OCBBF3000830, OCBBF3001076, OCBBF3001202, OCBBF3001333, OCBBF3001616, OCBBF3002553, OCBBF3002600, OCBBF3002654, OCBBF3003103, OCBBF3003209, OCBBF3003592, OCBBF3003745, OCBBF3003761, OCBBF3004264, OCBBF3004314, OCBBF3004487, OCBBF3004972, OCBBF3005330, OCBBF3005597, OCBBF3005843, OCBBF3006802, OCBBF3006986, OCBBF3007078, OCBBF3007704, OCBBF3008230, OCBBF3008392, OCBBF3008835, OCBBF3009192, OCBBF3009244, OCBBF3009279, PANCR1000012, PANCR1000021, PANCR1000081, PANCR1000086, PANCR1000091, PANCR1000185, PEBLM1000024, PEBLM1000029, PEBLM1000034, PEBLM1000062, PEBLM1000066, PEBLM1000068, PEBLM1000071, PEBLM1000083, PEBLM1000144, PEBLM1000147, PEBLM1000180, PEBLM2000030, PEBLM2000112, PEBLM2000126, PEBLM2000147, PEBLM2000170, PEBLM2000180, PEBLM2000213, PEBLM2000248, PEBLM2000270, PEBLM2000308, PEBLM2000321, PEBLM2000326, PEBLM2000333, PEBLM2000338, PEBLM2000395, PEBLM2000479, PEBLM2000502, PEBLM2001072, PEBLM2001312, PEBLM2001465, PEBLM2001488, PEBLM2001803, PEBLM2002432, PEBLM2002455, PEBLM2002594, PEBLM2002749, PEBLM2002887, PEBLM2003426, PEBLM2003765, PEBLM2003914, PEBLM2003935, PEBLM2004015, PEBLM2004216, PEBLM2004290, PEBLM2004497, PEBLM2004666, PEBLM2004733, PEBLM2005282, PEBLM2005615, PEBLM2005632, PEBLM2005697, PEBLM2006031, PEBLM2006036, PEBLM2006049, PEBLM2006113, PEBLM2006135, PEBLM2006215, PEBLM2006283, PEBLM2006298, PEBLM2006366, PEBLM2006709, PEBLM2006912, PEBLM2007112, PEBLM2007140, PEBLM2007188, PEBLM2007296, PEBLM2007437, PEBLM2007447, PEBLM2007598, PEBLM2007832, PEBLM2007834, PEBLM2008106, PEBLM2008576, PEBLM2008605, PEBLM2008826, PEBLM2008861, PERIC1000025, PERIC1000147, PERIC2000180, PERIC2000214, PERIC2000386, PERIC2000387, PERIC2000422, PERIC2000473, PERIC2000478, PERIC2000889, PERIC2000914, PERIC2001227, PERIC2001228, PERIC2001379, PERIC2001504, PERIC2001703, PERIC2001764, PERIC2002243, PERIC2002272, PERIC2002452, PERIC2002766, PERIC2003001, PERIC2003090, PERIC2003287, PERIC2003349, PERIC2003452, PERIC2003699, PERIC2003720, PERIC2003794, PERIC2003834, PERIC2003919, PERIC2003957, PERIC2004028, PERIC2004131, PERIC2004259, PERIC2004379, PERIC2004429, PERIC2004510, PERIC2004613, PERIC2004909, PERIC2005111, PERIC2005305, PERIC2005347, PERIC2005370, PERIC2005936, PERIC2006035, PERIC2006121, PERIC2006443, PERIC2006945, PERIC2006960, PERIC2007068, PERIC2007439, PERIC2007914, PERIC2008008, PERIC2008385, PERIC2009001, PERIC2009086, PERIC2009329, PERIC2009566, PLACE5000001, PLACE5000013, PLACE5000037, PLACE5000058, PLACE5000066, PLACE5000067, PLACE5000070, PLACE5000080, PLACE5000105, PLACE5000113, PLACE5000115, PLACE5000116, PLACE5000129, PLACE5000139, PLACE5000153, PLACE5000159, PLACE5000170, PLACE5000171, PLACE5000178, PLACE5000245, PLACE5000260, PLACE5000282, PLACE5000297, PLACE5000372, PLACE5000492, PLACE5000522, PLACE5000527, PLACE6000012, PLACE6000044, PLACE6000055, PLACE6000070, PLACE6000137, PLACE6000145, PLACE6000191, PLACE6000205, PLACE6000231, PLACE6000263, PLACE6000296, PLACE6000314, PLACE6000325, PLACE6000348, PLACE6000371, PLACE6000414, PLACE6000424, PLACE6000426, PLACE6000429, PLACE6000450, PLACE6000463, PLACE6000523, PLACE6000550, PLACE6000552, PLACE6000555, PLACE6000619, PLACE6000630, PLACE6000953, PLACE6001064, PLACE6001118, PLACE6001153, PLACE6001185, PLACE6001262, PLACE6001281, PLACE6001294, PLACE6001443, PLACE6001536, PLACE6001557, PLACE6001712, PLACE6001740, PLACE6001823, PLACE6001886, PLACE6001923, PLACE6001925, PLACE6001933, PLACE6002011, PLACE6002016, PLACE6002056, PLACE6002102, PLACE6002157, PLACE6002312, PLACE6002323, PLACE6002345, PLACE6002419, PLACE6002462, PLACE6002647, PLACE6002668, PLACE6002692, PLACE6002699, PLACE6002710, PLACE6002871, PLACE6002949, PLACE6002960, PLACE6003004, PLACE6003038, PLACE6003077, PLACE6003094, PLACE6003109, PLACE6003204, PLACE6003218, PLACE6003372, PLACE6003383, PLACE6003393, PLACE6003399, PLACE6003539, PLACE6003621, PLACE6003705, PLACE6003740, PLACE6003745, PLACE6003771, PLACE6003796, PLACE6003839, PLACE6003850, PLACE6004005, PLACE6004101, PLACE6004219, PLACE6004312, PLACE6004336, PLACE6004368, PLACE6004380, PLACE6004396, PLACE6004397, PLACE6004454, PLACE6004464, PLACE6004491, PLACE6004578, PLACE6004663, PLACE6004687, PLACE6004738, PLACE6004931, PLACE6004966, PLACE6004993, PLACE6005007, PLACE6005029, PLACE6005108, PLACE6005231, PLACE6005234, PLACE6005283, PLACE6005294, PLACE6005328, PLACE6005351, PLACE6005423, PLACE6005482, PLACE6005487, PLACE6005535, PLACE6005546, PLACE6005559, PLACE6005579, PLACE6005691, PLACE6005786, PLACE6006042, PLACE6006077, PLACE6006137, PLACE6006158, PLACE6006186, PLACE6006217, PLACE6006222, PLACE6006266, PLACE6006287, PLACE6006394, PLACE6006418, PLACE6006474, PLACE6006566, PLACE6006697, PLACE6006822, PLACE6006871, PLACE6006905, PLACE6006988, PLACE6007050, PLACE6007180, PLACE6007239, PLACE6007242, PLACE6007309, PLACE6007373, PLACE6007380, PLACE6007433, PLACE6007436, PLACE6007482, PLACE6007687, PLACE6007787, PLACE6007798, PLACE6007807, PLACE6007925, PLACE6008036, PLACE6008094, PLACE6008126, PLACE6008285, PLACE6008444, PLACE6008453, PLACE6008640, PLACE6008750, PLACE6008768, PLACE6008775, PLACE6008824, PLACE6008989, PLACE6009006, PLACE6009008, PLACE6009228, PLACE6009237, PLACE6009338, PLACE6009419, PLACE6009430, PLACE6009482, PLACE6009524, PLACE6009527, PLACE6009560, PLACE6009590, PLACE6009821, PLACE6009835, PLACE6009853, PLACE6010463, PLACE6010484, PLACE6010485, PLACE6010568, PLACE6010701, PLACE6010704, PLACE6010732, PLACE6010765, PLACE6010848, PLACE6010925, PLACE6010936, PLACE6010991, PLACE6011041, PLACE6011057, PLACE6011102, PLACE6011156, PLACE6011211, PLACE6011260, PLACE6011334, PLACE6011627, PLACE6011774, PLACE6011881, PLACE6011907, PLACE6011970, PLACE6011975, PLACE6012028, PLACE6012108, PLACE6012168, PLACE6012297, PLACE6012308, PLACE6012574, PLACE6012908, PLACE6012936, PLACE6012942, PLACE6013222, PLACE6013232, PLACE6013288, PLACE6013386, PLACE6013400, PLACE6013650, PLACE6013672, PLACE6013883, PLACE6013884, PLACE6013885, PLACE6014043, PLACE6014064, PLACE6014516, PLACE6014882, PLACE6015051, PLACE6015211, PLACE6015322, PLACE6015445, PLACE6015460, PLACE6015513, PLACE6015591, PLACE6015729, PLACE6015731, PLACE6015939, PLACE6016030, PLACE6016093, PLACE6016105, PLACE6016160, PLACE6016210, PLACE6016254, PLACE6016383, PLACE6016942, PLACE6016984, PLACE6017002, PLACE6017431, PLACE6017564, PLACE6017578, PLACE6017626, PLACE6017701, PLACE6017714, PLACE6017788, PLACE6017791, PLACE6018031, PLACE6018107, PLACE6018187, PLACE6018235, PLACE6018287, PLACE6018441, PLACE6018487, PLACE6018497, PLACE6018769, PLACE6018834, PLACE6018843, PLACE6018863, PLACE6018938, PLACE6019195, PLACE6019385, PLACE6019542, PLACE6019600, PLACE6019674, PLACE6019676, PLACE6019701, PLACE6019932, PLACE6020031, PLACE6020145, PLACE7000167, PLACE7000170, PLACE7000266, PLACE7000333, PLACE7000410, PLACE7000502, PLACE7000707, PLACE7001022, PLACE7001544, PLACE7001759, PLACE7001936, PLACE7002303, PLACE7002641, PLACE7003639, PLACE7003657, PLACE7003684, PLACE7003985, PLACE7004103, PLACE7004961, PLACE7005169, PLACE7005671, PLACE7005840, PLACE7006051, PLACE7006090, PLACE7006240, PLACE7006268, PLACE7006275, PLACE7006498, PLACE7006540, PLACE7007379, PLACE7007644, PLACE7007973, PLACE7008136, PLACE7008261, PLACE7008431, PLACE7008623, PLACE7008766, PLACE7009563, PROST1000033, PROST1000039, PROST1000065, PROST1000083, PROST1000085, PROST1000097, PROST1000110, PROST1000120, PROST1000123, PROST1000136, PROST1000145, PROST1000152, PROST1000167, PROST1000184, PROST1000215, PROST1000217, PROST1000220, PROST1000226, PROST1000246, PROST1000262, PROST1000272, PROST1000298, PROST1000322, PROST1000334, PROST1000343, PROST1000362, PROST1000377, PROST1000383, PROST1000412, PROST1000419, PROST1000451, PROST1000480, PROST1000485, PROST1000493, PROST1000512, PROST1000527, PROST1000528, PROST1000536, PROST1000559, PROST1000575, PROST2000036, PROST2000053, PROST2000067, PROST2000079, PROST2000105, PROST2000143, PROST2000162, PROST2000165, PROST2000176, PROST2000203, PROST2000206, PROST2000212, PROST2000241, PROST2000267, PROST2000273, PROST2000274, PROST2000277, PROST2000284, PROST2000325, PROST2000337, PROST2000452, PROST2000463, PROST2000470, PROST2000505, PROST2000567, PROST2000572, PROST2000717, PROST2000760, PROST2000761, PROST2000835, PROST2000893, PROST2000961, PROST2001002, PROST2001116, PROST2001138, PROST2001180, PROST2001213, PROST2001283, PROST2001414, PROST2001415, PROST2001465, PROST2001521, PROST2001540, PROST2001552, PROST2001599, PROST2001611, PROST2001636, PROST2001739, PROST2001796, PROST2001805, PROST2001823, PROST2001883, PROST2001899, PROST2001997, PROST2001998, PROST2002078, PROST2002101, PROST2002162, PROST2002212, PROST2002227, PROST2002338, PROST2002425, PROST2002488, PROST2002489, PROST2002527, PROST2002591, PROST2002602, PROST2002633, PROST2002651, PROST2002682, PROST2002685, PROST2002722, PROST2002736, PROST2002842, PROST2002897, PROST2002906, PROST2002927, PROST2002960, PROST2003102, PROST2003117, PROST2003210, PROST2003232, PROST2003302, PROST2003303, PROST2003324, PROST2003338, PROST2003340, PROST2003396, PROST2003428, PROST2003472, PROST2003537, PROST2003563, PROST2003577, PROST2003583, PROST2003586, PROST2003628, PROST2003635, PROST2003674, PROST2003676, PROST2003725, PROST2003732, PROST2003775, PROST2003922, PROST2003930, PROST2004115, PROST2004142, PROST2004146, PROST2004161, PROST2004258, PROST2004332, PROST2004481, PROST2004526, PROST2004570, PROST2004727, PROST2004739, PROST2004742, PROST2004744, PROST2004817, PROST2005039, PROST2005067, PROST2005076, PROST2005093, PROST2005121, PROST2005131, PROST2005143, PROST2005228, PROST2005272, PROST2005285, PROST2005426, PROST2005466, PROST2005604, PROST2005630, PROST2005683, PROST2005788, PROST2005880, PROST2005886, PROST2005904, PROST2005919, PROST2005943, PROST2006008, PROST2006020, PROST2006030, PROST2006060, PROST2006196, PROST2006201, PROST2006260, PROST2006282, PROST2006343, PROST2006450, PROST2006491, PROST2006510, PROST2006536, PROST2006579, PROST2006688, PROST2006737, PROST2006766, PROST2006782, PROST2006933, PROST2006988, PROST2007122, PROST2007200, PROST2007237, PROST2007248, PROST2007289, PROST2007317, PROST2007328, PROST2007382, PROST2007389, PROST2007416, PROST2007528, PROST2007612, PROST2007818, PROST2007871, PROST2007950, PROST2007956, PROST2007974, PROST2007988, PROST2008079, PROST2008088, PROST2008243, PROST2008245, PROST2008268, PROST2008271, PROST2008447, PROST2008468, PROST2008472, PROST2008489, PROST2008516, PROST2008724, PROST2008835, PROST2008993, PROST2009022, PROST2009208, PROST2009222, PROST2009254, PROST2009273, PROST2009320, PROST2009347, PROST2009365, PROST2009388, PROST2009400, PROST2009470, PROST2009483, PROST2009571, PROST2009736, PROST2009795, PROST2009901, PROST2009909, PROST2010046, PROST2010219, PROST2010250, PROST2010318, PROST2010326, PROST2010382, PROST2010400, PROST2010545, PROST2010579, PROST2010606, PROST2010885, PROST2011012, PROST2011038, PROST2011105, PROST2011297, PROST2011410, PROST2011439, PROST2011482, PROST2011577, PROST2011631, PROST2011660, PROST2012005, PROST2012007, PROST2012016, PROST2012088, PROST2012140, PROST2012157, PROST2012190, PROST2012249, PROST2012353, PROST2012400, PROST2012448, PROST2012504, PROST2012542, PROST2012550, PROST2012740, PROST2012745, PROST2012780, PROST2012888, PROST2012890, PROST2013032, PROST2013053, PROST2013121, PROST2013260, PROST2013327, PROST2013531, PROST2013605, PROST2013627, PROST2013873, PROST2013880, PROST2014422, PROST2014585, PROST2014601, PROST2014659, PROST2014862, PROST2014925, PROST2015124, PROST2015137, PROST2015198, PROST2015243, PROST2015246, PROST2015251, PROST2015287, PROST2015332, PROST2015457, PROST2015464, PROST2015537, PROST2015545, PROST2015551, PROST2015636, PROST2015710, PROST2015756, PROST2015877, PROST2015900, PROST2015924, PROST2015932, PROST2016195, PROST2016246, PROST2016351, PROST2016379, PROST2016444, PROST2016462, PROST2016499, PROST2016512, PROST2016566, PROST2016582, PROST2016668, PROST2016684, PROST2016777, PROST2016829, PROST2016860, PROST2016918, PROST2016980, PROST2017098, PROST2017128, PROST2017203, PROST2017367, PROST2017413, PROST2017441, PROST2017529, PROST2017578, PROST2017612, PROST2017617, PROST2017700, PROST2017701, PROST2017729, PROST2017836, PROST2017910, PROST2017972, PROST2018030, PROST2018090, PROST2018235, PROST2018437, PROST2018487, PROST2018511, PROST2018583, PROST2018588, PROST2018607, PROST2018788, PROST2018902, PROST2018922, PROST2018977, PROST2019164, PROST2019253, PROST2019296, PROST2019398, PROST2019487, PROST2019781, PUAEN1000039, PUAEN1000057, PUAEN1000065, PUAEN1000081, PUAEN1000085, PUAEN1000087, PUAEN1000121, PUAEN1000147, PUAEN1000161, PUAEN1000175, PUAEN1000239, PUAEN1000275, PUAEN1000276, PUAEN1000288, PUAEN2000080, PUAEN2000152, PUAEN2000247, PUAEN2000312, PUAEN2000394, PUAEN2000497, PUAEN2000535, PUAEN2000684, PUAEN2000942, PUAEN2001260, PUAEN2001345, PUAEN2001526, PUAEN2001586, PUAEN2001882, PUAEN2002473, PUAEN2002489, PUAEN2002552, PUAEN2002568, PUAEN2002616, PUAEN2002758, PUAEN2003018, PUAEN2003079, PUAEN2003116, PUAEN2003517, PUAEN2003954, PUAEN2004067, PUAEN2004083, PUAEN2004400, PUAEN2004511, PUAEN2004525, PUAEN2004875, PUAEN2005110, PUAEN2005247, PUAEN2005502, PUAEN2005588, PUAEN2005930, PUAEN2006029, PUAEN2006328, PUAEN2006335, PUAEN2006578, PUAEN2006639, PUAEN2006761, PUAEN2007044, PUAEN2007350, PUAEN2007785, PUAEN2007898, PUAEN2008123, PUAEN2008228, PUAEN2008515, PUAEN2008815, PUAEN2008939, PUAEN2008980, PUAEN2008985, PUAEN2009174, PUAEN2009348, PUAEN2009534, PUAEN2009655, PUAEN2009795, PUAEN2009852, PUAEN2010346, PUAEN2010824, RECTM1000051, RECTM1000141, RECTM2000220, RECTM2000349, RECTM2000433, RECTM2000510, RECTM2001307, RECTM2001347, RECTM2001519, RECTM2001666, RECTM2001691, RECTM2001749, RECTM2002172, RECTM2002602, RECTM2002632, SALGL1000005, SALGL1000024, SALGL1000028, SALGL1000047, SALGL1000065, SALGL1000107, SALGL1000171, SKMUS1000014, SKMUS1000030, SKMUS1000064, SKMUS1000067, SKMUS1000084, SKMUS1000102, SKMUS1000104, SKMUS1000110, SKMUS1000118, SKMUS1000124, SKMUS1000129, SKMUS1000138, SKMUS1000176, SKMUS1000177, SKMUS2000020, SKMUS2000061, SKMUS2000074, SKMUS2000078, SKMUS2000117, SKMUS2000137, SKMUS2000198, SKMUS2000243, SKMUS2000271, SKMUS2000287, SKMUS2000317, SKMUS2000330, SKMUS2000339, SKMUS2000343, SKMUS2000361, SKMUS2000365, SKMUS2000380, SKMUS2000390, SKMUS2000416, SKMUS2000458, SKMUS2000467, SKMUS2000468, SKMUS2000515, SKMUS2000690, SKMUS2000701, SKMUS2000705, SKMUS2000710, SKMUS2000724, SKMUS2000726, SKMUS2000757, SKMUS2000774, SKMUS2000780, SKMUS2000821, SKMUS2000847, SKMUS2000863, SKMUS2000873, SKMUS2000894, SKMUS2000898, SKMUS2000902, SKMUS2000933, SKMUS2000945, SKMUS2000954, SKMUS2000961, SKMUS2000973, SKMUS2000980, SKMUS2001008, SKMUS2001014, SKMUS2001129, SKMUS2001147, SKMUS2001157, SKMUS2001164, SKMUS2001199, SKMUS2001201, SKMUS2001215, SKMUS2001247, SKMUS2001254, SKMUS2001271, SKMUS2001287, SKMUS2001323, SKMUS2001364, SKMUS2001398, SKMUS2001402, SKMUS2001412, SKMUS2001492, SKMUS2001501, SKMUS2001528, SKMUS2001543, SKMUS2001580, SKMUS2001585, SKMUS2001608, SKMUS2001631, SKMUS2001634, SKMUS2001662, SKMUS2001663, SKMUS2001668, SKMUS2001671, SKMUS2001683, SKMUS2001693, SKMUS2001695, SKMUS2001703, SKMUS2001740, SKMUS2001742, SKMUS2001823, SKMUS2001850, SKMUS2002077, SKMUS2002084, SKMUS2002153, SKMUS2002475, SKMUS2002602, SKMUS2002634, SKMUS2002693, SKMUS2002821, SKMUS2002840, SKMUS2002920, SKMUS2003034, SKMUS2003074, SKMUS2003168, SKMUS2003194, SKMUS2003744, SKMUS2004044, SKMUS2004047, SKMUS2004483, SKMUS2004667, SKMUS2004897, SKMUS2004903, SKMUS2004908, SKMUS2005428, SKMUS2006394, SKMUS2006481, SKMUS2006755, SKMUS2007315, SKMUS2007359, SKMUS2007568, SKMUS2007740, SKMUS2007816, SKMUS2007915, SKMUS2008338, SKMUS2008407, SKMUS2008474, SKMUS2008585, SKMUS2008607, SKMUS2009190, SKMUS2009232, SKMUS2009479, SKMUS2009557, SKNMC1000110, SKNMC1000123, SKNMC1000124, SKNMC1000159, SKNMC1000168, SKNMC1000229, SKNMC1000251, SKNMC1000264, SKNMC2000065, SKNMC2000097, SKNMC2000224, SKNMC2000256, SKNMC2000322, SKNMC2000356, SKNMC2000374, SKNMC2000583, SKNMC2000593, SKNMC2000612, SKNMC2000622, SKNMC2000649, SKNMC2000698, SKNMC2000966, SKNMC2001113, SKNMC2001324, SKNMC2001503, SKNMC2001555, SKNMC2001596, SKNMC2001623, SKNMC2002402, SKNMC2003639, SKNMC2003924, SKNMC2003987, SKNMC2004457, SKNMC2004643, SKNMC2004651, SKNMC2005772, SKNMC2006173, SKNMC2006327, SKNMC2006998, SKNMC2007134, SKNMC2007502, SKNMC2007504, SKNMC2007961, SKNMC2009450, SKNSH1000002, SKNSH1000086, SKNSH1000101, SKNSH1000174, SKNSH1000301, SKNSH1000308, SKNSH1000416, SKNSH2000051, SKNSH2000101, SKNSH2000151, SKNSH2000163, SKNSH2000250, SKNSH2000319, SKNSH2000347, SKNSH2000482, SKNSH2000516, SKNSH2000550, SKNSH2000716, SKNSH2000819, SKNSH2000971, SKNSH2001222, SKNSH2001875, SKNSH2001931, SKNSH2002054, SKNSH2002325, SKNSH2002768, SKNSH2002866, SKNSH2003064, SKNSH2003174, SKNSH2003422, SKNSH2003466, SKNSH2003483, SKNSH2003528, SKNSH2003633, SKNSH2004039, SKNSH2005061, SKNSH2005120, SKNSH2005194, SKNSH2005240, SKNSH2005792, SKNSH2005816, SKNSH2005981, SKNSH2006234, SKNSH2006304, SKNSH2006432, SKNSH2006822, SKNSH2007142, SKNSH2007149, SKNSH2007429, SKNSH2007739, SKNSH2008043, SKNSH2008969, SKNSH2009197, SKNSH2009357, SKNSH2009435, SKNSH2009991, SKNSH2010015, SMINT1000012, SMINT1000039, SMINT1000042, SMINT1000048, SMINT1000051, SMINT1000054, SMINT1000057, SMINT1000071, SMINT1000075, SMINT1000078, SMINT1000091, SMINT1000100, SMINT1000103, SMINT1000117, SMINT1000118, SMINT1000131, SMINT1000137, SMINT1000192, SMINT2000007, SMINT2000018, SMINT2000032, SMINT2000040, SMINT2000060, SMINT2000073, SMINT2000084, SMINT2000145, SMINT2000159, SMINT2000176, SMINT2000185, SMINT2000227, SMINT2000229, SMINT2000232, SMINT2000239, SMINT2000267, SMINT2000277, SMINT2000454, SMINT2000468, SMINT2000518, SMINT2000529, SMINT2000530, SMINT2000537, SMINT2000538, SMINT2000541, SMINT2000545, SMINT2000558, SMINT2000562, SMINT2000568, SMINT2000602, SMINT2000609, SMINT2000629, SMINT2000659, SMINT2000747, SMINT2000811, SMINT2000824, SMINT2000933, SMINT2000984, SMINT2001114, SMINT2001158, SMINT2001183, SMINT2001199, SMINT2001222, SMINT2001397, SMINT2001458, SMINT2001461, SMINT2001535, SMINT2001559, SMINT2001609, SMINT2001615, SMINT2001683, SMINT2001731, SMINT2001812, SMINT2001950, SMINT2002126, SMINT2002159, SMINT2002202, SMINT2002210, SMINT2002224, SMINT2002281, SMINT2002311, SMINT2002314, SMINT2002328, SMINT2002414, SMINT2002457, SMINT2002620, SMINT2002689, SMINT2002743, SMINT2002778, SMINT2002880, SMINT2002882, SMINT2002884, SMINT2002899, SMINT2002974, SMINT2002976, SMINT2003003, SMINT2003074, SMINT2003128, SMINT2003150, SMINT2003317, SMINT2003340, SMINT2003386, SMINT2003423, SMINT2003505, SMINT2003551, SMINT2003569, SMINT2003641, SMINT2003644, SMINT2003866, SMINT2003905, SMINT2004023, SMINT2004037, SMINT2004047, SMINT2004086, SMINT2004280, SMINT2004299, SMINT2004339, SMINT2004350, SMINT2004414, SMINT2004473, SMINT2004547, SMINT2004583, SMINT2004589, SMINT2004729, SMINT2004781, SMINT2004872, SMINT2004891, SMINT2004909, SMINT2004972, SMINT2004992, SMINT2005075, SMINT2005161, SMINT2005174, SMINT2005213, SMINT2005330, SMINT2005368, SMINT2005387, SMINT2005402, SMINT2005405, SMINT2005621, SMINT2005623, SMINT2005624, SMINT2005688, SMINT2005800, SMINT2005956, SMINT2006078, SMINT2006205, SMINT2006331, SMINT2006596, SMINT2006641, SMINT2006648, SMINT2006708, SMINT2006716, SMINT2006801, SMINT2007062, SMINT2007101, SMINT2007140, SMINT2007187, SMINT2007219, SMINT2007294, SMINT2007365, SMINT2007391, SMINT2007433, SMINT2007508, SMINT2007526, SMINT2007579, SMINT2007647, SMINT2007729, SMINT2007790, SMINT2007792, SMINT2007796, SMINT2007867, SMINT2007932, SMINT2008042, SMINT2008054, SMINT2008133, SMINT2008277, SMINT2008329, SMINT2008455, SMINT2008491, SMINT2008531, SMINT2008545, SMINT2008558, SMINT2008590, SMINT2008625, SMINT2008672, SMINT2008690, SMINT2008715, SMINT2008720, SMINT2008817, SMINT2008844, SMINT2008869, SMINT2008917, SMINT2008960, SMINT2009119, SMINT2009121, SMINT2009212, SMINT2009216, SMINT2009233, SMINT2009259, SMINT2009272, SMINT2009292, SMINT2009363, SMINT2009415, SMINT2009468, SMINT2009505, SMINT2009529, SMINT2009832, SMINT2009895, SMINT2009902, SMINT2009973, SMINT2010015, SMINT2010068, SMINT2010076, SMINT2010084, SMINT2010144, SMINT2010200, SMINT2010278, SMINT2010324, SMINT2010326, SMINT2010369, SMINT2010426, SMINT2010500, SMINT2010533, SMINT2010629, SMINT2010672, SMINT2010753, SMINT2010853, SMINT2010897, SMINT2010901, SMINT2010959, SMINT2010997, SMINT2011033, SMINT2011066, SMINT2011273, SMINT2011311, SMINT2011406, SMINT2011509, SMINT2011567, SMINT2011588, SMINT2011656, SMINT2011888, SMINT2011958, SMINT2012040, SMINT2012122, SMINT2012179, SMINT2012195, SMINT2012285, SMINT2012291, SMINT2012501, SMINT2012734, SMINT2012793, SMINT2013031, SMINT2013032, SMINT2013129, SMINT2013170, SMINT2013181, SMINT2013228, SMINT2013613, SMINT2013626, SMINT2013695, SMINT2013833, SMINT2013890, SMINT2014166, SMINT2014282, SMINT2014443, SMINT2014480, SMINT2014489, SMINT2014721, SMINT2015006, SMINT2015294, SMINT2015306, SMINT2015326, SMINT2015353, SMINT2015454, SMINT2015518, SMINT2015745, SMINT2015787, SMINT2015810, SMINT2016122, SMINT2016146, SMINT2016286, SMINT2016313, SMINT2016396, SMINT2016412, SMINT2016440, SMINT2016477, SMINT2016544, SMINT2016857, SMINT2017134, SMINT2017319, SMINT2017324, SMINT2017410, SMINT2017431, SMINT2017432, SMINT2017436, SMINT2017599, SMINT2017659, SMINT2017736, SMINT2017781, SMINT2017855, SMINT2017884, SMINT2017964, SMINT2017974, SMINT2018343, SMINT2018353, SMINT2018592, SMINT2018681, SMINT2019017, SMINT2019105, SMINT2019142, SMINT2019153, SMINT2019200, SPLEN1000013, SPLEN1000041, SPLEN1000049, SPLEN1000056, SPLEN1000087, SPLEN1000089, SPLEN1000091, SPLEN1000134, SPLEN1000139, SPLEN1000143, SPLEN1000144, SPLEN1000145, SPLEN1000156, SPLEN1000163, SPLEN1000165, SPLEN1000166, SPLEN1000178, SPLEN2000020, SPLEN2000047, SPLEN2000064, SPLEN2000072, SPLEN2000098, SPLEN2000126, SPLEN2000134, SPLEN2000143, SPLEN2000189, SPLEN2000197, SPLEN2000205, SPLEN2000210, SPLEN2000222, SPLEN2000243, SPLEN2000247, SPLEN2000255, SPLEN2000258, SPLEN2000267, SPLEN2000270, SPLEN2000307, SPLEN2000310, SPLEN2000341, SPLEN2000348, SPLEN2000350, SPLEN2000357, SPLEN2000364, SPLEN2000402, SPLEN2000414, SPLEN2000420, SPLEN2000443, SPLEN2000448, SPLEN2000450, SPLEN2000464, SPLEN2000496, SPLEN2000515, SPLEN2000516, SPLEN2000537, SPLEN2000541, SPLEN2000607, SPLEN2000630, SPLEN2000695, SPLEN2000698, SPLEN2000839, SPLEN2000874, SPLEN2001135, SPLEN2001141, SPLEN2001157, SPLEN2001176, SPLEN2001227, SPLEN2001245, SPLEN2001278, SPLEN2001354, SPLEN2001367, SPLEN2001383, SPLEN2001476, SPLEN2001503, SPLEN2001510, SPLEN2001599, SPLEN2001626, SPLEN2001650, SPLEN2001689, SPLEN2001710, SPLEN2001761, SPLEN2001781, SPLEN2001881, SPLEN2001912, SPLEN2001945, SPLEN2002007, SPLEN2002053, SPLEN2002133, SPLEN2002147, SPLEN2002166, SPLEN2002175, SPLEN2002223, SPLEN2002272, SPLEN2002314, SPLEN2002335, SPLEN2002343, SPLEN2002354, SPLEN2002385, SPLEN2002419, SPLEN2002451, SPLEN2002462, SPLEN2002463, SPLEN2002467, SPLEN2002477, SPLEN2002493, SPLEN2002662, SPLEN2002695, SPLEN2002707, SPLEN2002744, SPLEN2002917, SPLEN2002931, SPLEN2002957, SPLEN2003160, SPLEN2003204, SPLEN2003219, SPLEN2003297, SPLEN2003396, SPLEN2003678, SPLEN2003878, SPLEN2003918, SPLEN2003924, SPLEN2004060, SPLEN2004078, SPLEN2004124, SPLEN2004148, SPLEN2004181, SPLEN2004220, SPLEN2004343, SPLEN2004346, SPLEN2004368, SPLEN2004611, SPLEN2004662, SPLEN2004773, SPLEN2004844, SPLEN2004880, SPLEN2004984, SPLEN2005009, SPLEN2005227, SPLEN2005272, SPLEN2005342, SPLEN2005416, SPLEN2005429, SPLEN2005450, SPLEN2005474, SPLEN2005560, SPLEN2005727, SPLEN2005783, SPLEN2005790, SPLEN2005818, SPLEN2005838, SPLEN2005869, SPLEN2005927, SPLEN2005939, SPLEN2006143, SPLEN2006232, SPLEN2006268, SPLEN2006283, SPLEN2006305, SPLEN2006325, SPLEN2006374, SPLEN2006389, SPLEN2006425, SPLEN2006671, SPLEN2006701, SPLEN2006785, SPLEN2006875, SPLEN2007182, SPLEN2007276, SPLEN2007314, SPLEN2007326, SPLEN2007350, SPLEN2007388, SPLEN2007498, SPLEN2007619, SPLEN2007653, SPLEN2007689, SPLEN2007695, SPLEN2007739, SPLEN2007750, SPLEN2007794, SPLEN2007879, SPLEN2007926, SPLEN2007951, SPLEN2008007, SPLEN2008135, SPLEN2008164, SPLEN2008317, SPLEN2008460, SPLEN2008496, SPLEN2008591, SPLEN2008786, SPLEN2009081, SPLEN2009088, SPLEN2009163, SPLEN2009315, SPLEN2009340, SPLEN2009512, SPLEN2009513, SPLEN2009541, SPLEN2009548, SPLEN2009581, SPLEN2009733, SPLEN2009803, SPLEN2009884, SPLEN2009918, SPLEN2009970, SPLEN2010004, SPLEN2010015, SPLEN2010112, SPLEN2010119, SPLEN2010146, SPLEN2010187, SPLEN2010195, SPLEN2010350, SPLEN2010395, SPLEN2010415, SPLEN2010447, SPLEN2010469, SPLEN2010510, SPLEN2010530, SPLEN2010534, SPLEN2010588, SPLEN2010625, SPLEN2010800, SPLEN2010846, SPLEN2010847, SPLEN2010862, SPLEN2010912, SPLEN2010978, SPLEN2010986, SPLEN2011018, SPLEN2011021, SPLEN2011025, SPLEN2011086, SPLEN2011139, SPLEN2011145, SPLEN2011248, SPLEN2011252, SPLEN2011422, SPLEN2011672, SPLEN2011678, SPLEN2011737, SPLEN2011758, SPLEN2011766, SPLEN2011805, SPLEN2011820, SPLEN2011830, SPLEN2011931, SPLEN2011981, SPLEN2012175, SPLEN2012179, SPLEN2012185, SPLEN2012234, SPLEN2012453, SPLEN2012523, SPLEN2012524, SPLEN2012525, SPLEN2012571, SPLEN2012606, SPLEN2012611, SPLEN2012619, SPLEN2012725, SPLEN2012743, SPLEN2012756, SPLEN2012800, SPLEN2012846, SPLEN2012889, SPLEN2012961, SPLEN2013108, SPLEN2013195, SPLEN2013503, SPLEN2013644, SPLEN2013648, SPLEN2013670, SPLEN2013673, SPLEN2013690, SPLEN2013714, SPLEN2013753, SPLEN2013821, SPLEN2013857, SPLEN2013860, SPLEN2013910, SPLEN2013923, SPLEN2013936, SPLEN2014041, SPLEN2014063, SPLEN2014073, SPLEN2014080, SPLEN2014119, SPLEN2014136, SPLEN2014199, SPLEN2014210, SPLEN2014293, SPLEN2014318, SPLEN2014381, SPLEN2014452, SPLEN2014454, SPLEN2014486, SPLEN2014543, SPLEN2014572, SPLEN2014645, SPLEN2014669, SPLEN2014711, SPLEN2014739, SPLEN2014860, SPLEN2014865, SPLEN2014911, SPLEN2014919, SPLEN2014920, SPLEN2014924, SPLEN2014937, SPLEN2014946, SPLEN2015031, SPLEN2015094, SPLEN2015121, SPLEN2015129, SPLEN2015158, SPLEN2015166, SPLEN2015216, SPLEN2015258, SPLEN2015261, SPLEN2015267, SPLEN2015276, SPLEN2015415, SPLEN2015433, SPLEN2015593, SPLEN2015674, SPLEN2015679, SPLEN2015707, SPLEN2015730, SPLEN2015746, SPLEN2015788, SPLEN2015815, SPLEN2015890, SPLEN2015891, SPLEN2015899, SPLEN2016045, SPLEN2016053, SPLEN2016069, SPLEN2016098, SPLEN2016135, SPLEN2016139, SPLEN2016241, SPLEN2016250, SPLEN2016304, SPLEN2016356, SPLEN2016480, SPLEN2016531, SPLEN2016533, SPLEN2016541, SPLEN2016552, SPLEN2016554, SPLEN2016602, SPLEN2016627, SPLEN2016678, SPLEN2016743, SPLEN2016773, SPLEN2016781, SPLEN2016840, SPLEN2016863, SPLEN2016922, SPLEN2016932, SPLEN2016972, SPLEN2016973, SPLEN2017043, SPLEN2017104, SPLEN2017121, SPLEN2017147, SPLEN2017187, SPLEN2017189, SPLEN2017212, SPLEN2017318, SPLEN2017351, SPLEN2017426, SPLEN2017452, SPLEN2017538, SPLEN2017592, SPLEN2017613, SPLEN2017643, SPLEN2017687, SPLEN2017740, SPLEN2017781, SPLEN2017999, SPLEN2018098, SPLEN2018112, SPLEN2018157, SPLEN2018159, SPLEN2018180, SPLEN2018181, SPLEN2018280, SPLEN2018285, SPLEN2018299, SPLEN2018302, SPLEN2018364, SPLEN2018395, SPLEN2018643, SPLEN2018683, SPLEN2018732, SPLEN2018749, SPLEN2018933, SPLEN2019008, SPLEN2019043, SPLEN2019077, SPLEN2019092, SPLEN2019102, SPLEN2019131, SPLEN2019169, SPLEN2019257, SPLEN2019311, SPLEN2019323, SPLEN2019349, SPLEN2019375, SPLEN2019379, SPLEN2019405, SPLEN2019446, SPLEN2019471, SPLEN2019480, SPLEN2019505, SPLEN2019571, SPLEN2019575, SPLEN2019709, SPLEN2019774, SPLEN2019793, SPLEN2019811, SPLEN2019839, SPLEN2019956, SPLEN2019985, SPLEN2020007, SPLEN2020034, SPLEN2020153, SPLEN2020154, SPLEN2020166, SPLEN2020183, SPLEN2020223, SPLEN2020359, SPLEN2020417, SPLEN2020427, SPLEN2020467, SPLEN2020512, SPLEN2020608, SPLEN2020777, SPLEN2020805, SPLEN2021057, SPLEN2021122, SPLEN2021157, SPLEN2021194, SPLEN2021231, SPLEN2021273, SPLEN2021295, SPLEN2021298, SPLEN2021383, SPLEN2021417, SPLEN2021440, SPLEN2021458, SPLEN2021463, SPLEN2021560, SPLEN2021701, SPLEN2021795, SPLEN2021983, SPLEN2021991, SPLEN2022040, SPLEN2022162, SPLEN2022227, SPLEN2022522, SPLEN2022591, SPLEN2022785, SPLEN2022920, SPLEN2023024, SPLEN2023118, SPLEN2023160, SPLEN2023423, SPLEN2023710, SPLEN2023733, SPLEN2023791, SPLEN2023977, SPLEN2024070, SPLEN2024127, SPLEN2024232, SPLEN2024273, SPLEN2024383, SPLEN2024489, SPLEN2024530, SPLEN2024571, SPLEN2024577, SPLEN2024617, SPLEN2024737, SPLEN2024922, SPLEN2024956, SPLEN2024990, SPLEN2025012, SPLEN2025017, SPLEN2025039, SPLEN2025219, SPLEN2025491, SPLEN2025626, SPLEN2025820, SPLEN2026144, SPLEN2026411, SPLEN2026765, SPLEN2027157, SPLEN2027395, SPLEN2027488, SPLEN2027780, SPLEN2027852, SPLEN2027868, SPLEN2027995, SPLEN2028046, SPLEN2028066, SPLEN2028138, SPLEN2028365, SPLEN2028417, SPLEN2028424, SPLEN2028593, SPLEN2028844, SPLEN2028914, SPLEN2028994, SPLEN2029051, SPLEN2029176, SPLEN2029295, SPLEN2029380, SPLEN2029522, SPLEN2029683, SPLEN2029727, SPLEN2029904, SPLEN2029912, SPLEN2030250, SPLEN2030335, SPLEN2030371, SPLEN2030397, SPLEN2030479, SPLEN2030495, SPLEN2030562, SPLEN2030763, SPLEN2030847, SPLEN2031004, SPLEN2031125, SPLEN2031424, SPLEN2031547, SPLEN2031674, SPLEN2031724, SPLEN2031780, SPLEN2032036, SPLEN2032112, SPLEN2032154, SPLEN2032157, SPLEN2032321, SPLEN2032356, SPLEN2032677, SPLEN2032813, SPLEN2032924, SPLEN2033098, SPLEN2033153, SPLEN2033333, SPLEN2033490, SPLEN2033539, SPLEN2033921, SPLEN2033996, SPLEN2034021, SPLEN2034081, SPLEN2034252, SPLEN2034448, SPLEN2034551, SPLEN2034601, SPLEN2034678, SPLEN2034781, SPLEN2034864, SPLEN2034934, SPLEN2035318, SPLEN2035615, SPLEN2036103, SPLEN2036326, SPLEN2036475, SPLEN2036501, SPLEN2036579, SPLEN2036608, SPLEN2036702, SPLEN2036712, SPLEN2036821, SPLEN2036932, SPLEN2036953, SPLEN2037077, SPLEN2037194, SPLEN2037319, SPLEN2037444, SPLEN2037580, SPLEN2037630, SPLEN2037678, SPLEN2037722, SPLEN2037891, SPLEN2038055, SPLEN2038180, SPLEN2038345, SPLEN2038407, SPLEN2038473, SPLEN2038834, SPLEN2039311, SPLEN2039379, SPLEN2039672, SPLEN2039697, SPLEN2039845, SPLEN2039936, SPLEN2040222, SPLEN2040237, SPLEN2040824, SPLEN2041304, SPLEN2041306, SPLEN2041310, SPLEN2041585, SPLEN2041645, SPLEN2041700, SPLEN2041720, SPLEN2041977, SPLEN2042051, SPLEN2042303, SPLEN2042521, SPLEN2042535, SPLEN2042598, SPLEN2042714, SPLEN2042920, STOMA1000013, STOMA1000047, STOMA1000052, STOMA1000074, STOMA1000091, STOMA1000117, STOMA1000133, STOMA1000175, STOMA1000186, STOMA1000189, STOMA1000190, STOMA1000191, STOMA2000032, STOMA2000072, STOMA2000088, STOMA2000104, STOMA2000121, STOMA2000148, STOMA2000168, STOMA2000183, STOMA2000188, STOMA2000257, STOMA2000279, STOMA2000289, STOMA2000383, STOMA2000386, STOMA2000395, STOMA2000396, STOMA2000478, STOMA2000482, STOMA2000529, STOMA2000539, STOMA2000567, STOMA2000640, STOMA2000678, STOMA2000686, STOMA2000888, STOMA2001025, STOMA2001389, STOMA2002052, STOMA2002141, STOMA2002367, STOMA2002688, STOMA2002828, STOMA2003158, STOMA2003289, STOMA2003444, STOMA2003477, STOMA2003646, STOMA2003716, STOMA2003781, STOMA2003894, STOMA2004194, STOMA2004294, STOMA2004663, STOMA2004668, STOMA2004852, STOMA2004873, STOMA2004884, STOMA2004893, STOMA2004925, STOMA2005120, STOMA2005664, STOMA2005667, STOMA2005746, STOMA2005782, STOMA2006181, STOMA2006213, STOMA2006229, STOMA2006325, STOMA2006330, STOMA2006398, STOMA2006447, STOMA2006780, STOMA2006904, STOMA2007269, STOMA2007680, STOMA2007745, STOMA2008050, STOMA2008361, STOMA2008546, STOMA2008614, STOMA2008638, STOMA2008838, STOMA2009250, STOMA2009253, STOMA2009256, STOMA2009289, SYNOV1000045, SYNOV1000049, SYNOV1000118, SYNOV1000124, SYNOV1000128, SYNOV1000164, SYNOV1000190, SYNOV1000256, SYNOV1000374, SYNOV2000152, SYNOV2000171, SYNOV2000173, SYNOV2000177, SYNOV2000178, SYNOV2000193, SYNOV2000251, SYNOV2000279, SYNOV2000291, SYNOV2000297, SYNOV2000397, SYNOV2000426, SYNOV2000601, SYNOV2000700, SYNOV2000820, SYNOV2000824, SYNOV2000923, SYNOV2001014, SYNOV2001035, SYNOV2001088, SYNOV2001111, SYNOV2001144, SYNOV2001212, SYNOV2001239, SYNOV2001251, SYNOV2001262, SYNOV2001300, SYNOV2001356, SYNOV2001374, SYNOV2001390, SYNOV2001451, SYNOV2001457, SYNOV2001468, SYNOV2001581, SYNOV2001648, SYNOV2001660, SYNOV2003326, SYNOV2005216, SYNOV2005448, SYNOV2005673, SYNOV2005817, SYNOV2005962, SYNOV2006430, SYNOV2006620, SYNOV2007758, SYNOV2007965, SYNOV2008765, SYNOV2011233, SYNOV2012326, SYNOV2013365, SYNOV2013637, SYNOV2014157, SYNOV2014364, SYNOV2016124, SYNOV2016837, SYNOV2017055, SYNOV2017179, SYNOV2018921, SYNOV2019280, SYNOV2020085, SYNOV2020463, SYNOV2021320, SYNOV2021953, SYNOV3000184, SYNOV3000231, SYNOV3000302, SYNOV3000345, SYNOV4000249, SYNOV4000472, SYNOV4000598, SYNOV4000706, SYNOV4001224, SYNOV4001326, SYNOV4001342, SYNOV4001395, SYNOV4002001, SYNOV4002392, SYNOV4002875, SYNOV4002883, SYNOV4003174, SYNOV4003322, SYNOV4003681, SYNOV4003981, SYNOV4004184, SYNOV4004741, SYNOV4004823, SYNOV4004914, SYNOV4005256, SYNOV4005570, SYNOV4005739, SYNOV4005889, SYNOV4005981, SYNOV4005989, SYNOV4006256, SYNOV4006327, SYNOV4006542, SYNOV4007012, SYNOV4007215, SYNOV4007360, SYNOV4007430, SYNOV4007521, SYNOV4007553, SYNOV4007711, SYNOV4008245, SYNOV4008336, SYNOV4009129, SYNOV4009139, SYNOV4009298, SYNOV4009575, T1ESE2000116, T1ESE2000609, T1ESE2000904, T1ESE2002665, TBAES2000004, TBAES2000059, TBAES2000116, TBAES2000255, TBAES2000315, TBAES2000352, TBAES2000932, TBAES2001171, TBAES2001220, TBAES2001229, TBAES2001258, TBAES2001296, TBAES2001492, TBAES2001553, TBAES2001751, TBAES2003435, TBAES2003492, TBAES2003550, TBAES2003702, TBAES2003917, TBAES2004055, TBAES2004105, TBAES2004939, TBAES2005157, TBAES2005361, TBAES2005543, TBAES2006568, TBAES2006881, TBAES2007379, TBAES2007428, TBAES2007481, TBAES2007504, TBAES2007548, TBAES2007697, TBAES2007862, TBAES2007964, TBAES2008133, TCERX2000171, TCERX2000431, TCERX2000613, TCERX2000998, TCERX2002644, TCOLN1000037, TCOLN1000180, TCOLN2000139, TCOLN2000236, TCOLN2000641, TCOLN2001268, TCOLN2002047, TCOLN2002278, TESOP1000035, TESOP1000127, TESOP1000160, TESOP2000083, TESOP2000090, TESOP2000205, TESOP2000312, TESOP2000390, TESOP2000400, TESOP2000510, TESOP2000527, TESOP2000569, TESOP2000739, TESOP2000801, TESOP2001122, TESOP2001166, TESOP2001345, TESOP2001474, TESOP2001796, TESOP2001818, TESOP2001849, TESOP2001865, TESOP2001901, TESOP2001953, TESOP2002005, TESOP2002110, TESOP2002150, TESOP2002273, TESOP2002451, TESOP2002489, TESOP2002539, TESOP2002545, TESOP2002804, TESOP2002950, TESOP2003273, TESOP2003308, TESOP2003553, TESOP2003753, TESOP2004110, TESOP2004114, TESOP2004173, TESOP2004214, TESOP2005199, TESOP2005285, TESOP2005485, TESOP2005498, TESOP2005579, TESOP2006041, TESOP2006053, TESOP2006060, TESOP2006068, TESOP2006110, TESOP2006398, TESOP2006670, TESOP2006704, TESOP2006746, TESOP2006865, TESOP2006893, TESOP2007041, TESOP2007052, TESOP2007262, TESOP2007384, TESOP2007636, TESOP2007674, TESOP2007688, TESOP2007725, TESOP2007912, TESOP2007978, TESOP2008127, TESOP2008552, TESOP2008556, TESOP2008563, TESOP2008820, TESOP2009121, TESOP2009201, TESOP2009247, TESOP2009555, TESTI1000018, TESTI1000019, TESTI1000023, TESTI1000025, TESTI1000029, TESTI1000030, TESTI1000042, TESTI1000045, TESTI1000051, TESTI1000055, TESTI1000064, TESTI1000070, TESTI1000085, TESTI1000088, TESTI1000093, TESTI1000094, TESTI1000096, TESTI1000101, TESTI1000109, TESTI1000125, TESTI1000127, TESTI1000128, TESTI1000131, TESTI1000138, TESTI1000142, TESTI1000157, TESTI1000163, TESTI1000168, TESTI1000169, TESTI1000179, TESTI1000183, TESTI1000191, TESTI1000257, TESTI1000266, TESTI1000319, TESTI1000330, TESTI1000348, TESTI1000390, TESTI1000391, TESTI1000459, TESTI1000491, TESTI1000545, TESTI2000006, TESTI2000018, TESTI2000044, TESTI2000100, TESTI2000117, TESTI2000120, TESTI2000147, TESTI2000154, TESTI2000172, TESTI2000177, TESTI2000179, TESTI2000184, TESTI2000207, TESTI2000208, TESTI2000221, TESTI2000238, TESTI2000272, TESTI2000278, TESTI2000349, TESTI2000356, TESTI2000358, TESTI2000372, TESTI2000427, TESTI2000431, TESTI2000435, TESTI2000443, TESTI2000452, TESTI2000462, TESTI2000489, TESTI2000520, TESTI2000571, TESTI2000591, TESTI2000598, TESTI2000600, TESTI2000616, TESTI2000627, TESTI2000644, TESTI2000671, TESTI2000683, TESTI2000689, TESTI2000695, TESTI2000699, TESTI2000707, TESTI2000745, TESTI2000756, TESTI2000762, TESTI2000784, TESTI2000808, TESTI2000819, TESTI2000830, TESTI2000840, TESTI2000849, TESTI2000850, TESTI2000874, TESTI2000883, TESTI2000909, TESTI2000951, TESTI2000970, TESTI2000981, TESTI2001008, TESTI2001049, TESTI2001082, TESTI2001120, TESTI2001134, TESTI2001141, TESTI2001153, TESTI2001180, TESTI2001208, TESTI2001229, TESTI2001236, TESTI2001237, TESTI2001306, TESTI2001313, TESTI2001330, TESTI2001339, TESTI2001345, TESTI2001352, TESTI2001364, TESTI2001412, TESTI2001420, TESTI2001498, TESTI2001511, TESTI2001512, TESTI2001518, TESTI2001556, TESTI2001593, TESTI2001613, TESTI2001621, TESTI2001661, TESTI2001665, TESTI2001671, TESTI2001697, TESTI2001725, TESTI2001758, TESTI2001766, TESTI2001792, TESTI2001793, TESTI2001795, TESTI2001812, TESTI2001815, TESTI2001823, TESTI2001827, TESTI2001829, TESTI2001852, TESTI2001862, TESTI2001869, TESTI2001879, TESTI2001894, TESTI2001898, TESTI2001915, TESTI2001950, TESTI2001959, TESTI2001968, TESTI2001985, TESTI2001991, TESTI2002002, TESTI2002012, TESTI2002036, TESTI2002048, TESTI2002057, TESTI2002081, TESTI2002090, TESTI2002105, TESTI2002216, TESTI2002223, TESTI2002245, TESTI2002251, TESTI2002256, TESTI2002264, TESTI2002282, TESTI2002293, TESTI2002294, TESTI2002326, TESTI2002351, TESTI2002361, TESTI2002369, TESTI2002406, TESTI2002415, TESTI2002423, TESTI2002453, TESTI2002461, TESTI2002465, TESTI2002467, TESTI2002498, TESTI2002516, TESTI2002544, TESTI2002578, TESTI2002580, TESTI2002618, TESTI2002632, TESTI2002676, TESTI2002690, TESTI2002696, TESTI2002698, TESTI2002700, TESTI2002707, TESTI2002724, TESTI2002729, TESTI2002752, TESTI2002753, TESTI2002789, TESTI2002802, TESTI2002806, TESTI2002840, TESTI2002866, TESTI2002877, TESTI2002910, TESTI2002912, TESTI2002928, TESTI2002937, TESTI2002965, TESTI2002993, TESTI2003005, TESTI2003020, TESTI2003031, TESTI2003037, TESTI2003044, TESTI2003059, TESTI2003061, TESTI2003071, TESTI2003074, TESTI2003089, TESTI2003104, TESTI2003109, TESTI2003117, TESTI2003127, TESTI2003130, TESTI2003131, TESTI2003139, TESTI2003141, TESTI2003152, TESTI2003181, TESTI2003193, TESTI2003196, TESTI2003228, TESTI2003236, TESTI2003255, TESTI2003258, TESTI2003277, TESTI2003280, TESTI2003299, TESTI2003311, TESTI2003321, TESTI2003325, TESTI2003327, TESTI2003330, TESTI2003347, TESTI2003354, TESTI2003356, TESTI2003372, TESTI2003376, TESTI2003413, TESTI2003418, TESTI2003419, TESTI2003432, TESTI2003454, TESTI2003475, TESTI2003476, TESTI2003498, TESTI2003512, TESTI2003533, TESTI2003539, TESTI2003541, TESTI2003545, TESTI2003551, TESTI2003574, TESTI2003579, TESTI2003580, TESTI2003589, TESTI2003596, TESTI2003598, TESTI2003615, TESTI2003625, TESTI2003638, TESTI2003649, TESTI2003692, TESTI2003718, TESTI2003727, TESTI2003756, TESTI2003768, TESTI2003781, TESTI2003787, TESTI2003824, TESTI2003827, TESTI2003894, TESTI2003911, TESTI2003914, TESTI2003940, TESTI2003962, TESTI2003998, TESTI2004000, TESTI2004031, TESTI2004073, TESTI2004080, TESTI2004085, TESTI2004089, TESTI2004111, TESTI2004119, TESTI2004122, TESTI2004153, TESTI2004163, TESTI2004169, TESTI2004207, TESTI2004215, TESTI2004227, TESTI2004229, TESTI2004243, TESTI2004255, TESTI2004287, TESTI2004295, TESTI2004313, TESTI2004318, TESTI2004322, TESTI2004391, TESTI2004399, TESTI2004423, TESTI2004431, TESTI2004432, TESTI2004452, TESTI2004459, TESTI2004490, TESTI2004539, TESTI2004552, TESTI2004560, TESTI2004574, TESTI2004601, TESTI2004611, TESTI2004649, TESTI2004654, TESTI2004675, TESTI2004687, TESTI2004689, TESTI2004700, TESTI2004706, TESTI2004712, TESTI2004734, TESTI2004737, TESTI2004783, TESTI2004791, TESTI2004793, TESTI2004860, TESTI2004906, TESTI2004920, TESTI2004929, TESTI2004936, TESTI2004941, TESTI2004971, TESTI2004982, TESTI2004993, TESTI2004994, TESTI2004999, TESTI2005017, TESTI2005025, TESTI2005040, TESTI2005060, TESTI2005072, TESTI2005085, TESTI2005112, TESTI2005120, TESTI2005153, TESTI2005155, TESTI2005173, TESTI2005267, TESTI2005268, TESTI2005280, TESTI2005307, TESTI2005363, TESTI2005376, TESTI2005378, TESTI2005380, TESTI2005391, TESTI2005395, TESTI2005396, TESTI2005408, TESTI2005415, TESTI2005470, TESTI2005492, TESTI2005564, TESTI2005568, TESTI2005584, TESTI2005588, TESTI2005590, TESTI2005603, TESTI2005609, TESTI2005610, TESTI2005630, TESTI2005672, TESTI2005683, TESTI2005690, TESTI2005692, TESTI2005703, TESTI2005720, TESTI2005731, TESTI2005739, TESTI2005742, TESTI2005767, TESTI2005775, TESTI2005784, TESTI2005788, TESTI2005827, TESTI2005835, TESTI2005860, TESTI2005892, TESTI2005908, TESTI2005911, TESTI2005933, TESTI2005937, TESTI2005948, TESTI2005979, TESTI2005981, TESTI2005982, TESTI2005984, TESTI2005986, TESTI2005987, TESTI2006007, TESTI2006008, TESTI2006015, TESTI2006016, TESTI2006035, TESTI2006040, TESTI2006041, TESTI2006045, TESTI2006051, TESTI2006067, TESTI2006083, TESTI2006097, TESTI2006109, TESTI2006111, TESTI2006120, TESTI2006125, TESTI2006179, TESTI2006209, TESTI2006210, TESTI2006212, TESTI2006218, TESTI2006238, TESTI2006255, TESTI2006258, TESTI2006278, TESTI2006333, TESTI2006341, TESTI2006360, TESTI2006383, TESTI2006409, TESTI2006425, TESTI2006437, TESTI2006453, TESTI2006457, TESTI2006460, TESTI2006465, TESTI2006483, TESTI2006499, TESTI2006523, TESTI2006543, TESTI2006565, TESTI2006572, TESTI2006615, TESTI2006617, TESTI2006624, TESTI2006628, TESTI2006633, TESTI2006643, TESTI2006648, TESTI2006659, TESTI2006660, TESTI2006665, TESTI2006667, TESTI2006677, TESTI2006720, TESTI2006735, TESTI2006744, TESTI2006748, TESTI2006774, TESTI2006853, TESTI2006866, TESTI2006872, TESTI2006877, TESTI2006879, TESTI2006894, TESTI2006940, TESTI2006955, TESTI2006978, TESTI2006979, TESTI2006990, TESTI2007040, TESTI2007074, TESTI2007078, TESTI2007113, TESTI2007152, TESTI2007163, TESTI2007183, TESTI2007211, TESTI2007220, TESTI2007234, TESTI2007311, TESTI2007320, TESTI2007346, TESTI2007358, TESTI2007402, TESTI2007405, TESTI2007407, TESTI2007422, TESTI2007452, TESTI2007464, TESTI2007466, TESTI2007480, TESTI2007490, TESTI2007502, TESTI2007524, TESTI2007533, TESTI2007576, TESTI2007613, TESTI2007657, TESTI2007685, TESTI2007692, TESTI2007749, TESTI2007750, TESTI2007808, TESTI2007814, TESTI2007829, TESTI2007864, TESTI2007867, TESTI2007872, TESTI2007906, TESTI2007951, TESTI2007972, TESTI2007973, TESTI2007998, TESTI2008014, TESTI2008020, TESTI2008032, TESTI2008033, TESTI2008046, TESTI2008081, TESTI2008099, TESTI2008139, TESTI2008144, TESTI2008161, TESTI2008189, TESTI2008204, TESTI2008219, TESTI2008233, TESTI2008234, TESTI2008237, TESTI2008278, TESTI2008320, TESTI2008331, TESTI2008343, TESTI2008387, TESTI2008389, TESTI2008394, TESTI2008405, TESTI2008420, TESTI2008425, TESTI2008440, TESTI2008567, TESTI2008595, TESTI2008621, TESTI2008636, TESTI2008657, TESTI2008684, TESTI2008699, TESTI2008715, TESTI2008762, TESTI2008774, TESTI2008786, TESTI2008822, TESTI2008835, TESTI2008840, TESTI2008847, TESTI2008884, TESTI2008901, TESTI2008929, TESTI2008946, TESTI2008960, TESTI2009018, TESTI2009091, TESTI2009097, TESTI2009136, TESTI2009185, TESTI2009190, TESTI2009217, TESTI2009239, TESTI2009325, TESTI2009388, TESTI2009390, TESTI2009400, TESTI2009402, TESTI2009412, TESTI2009423, TESTI2009447, TESTI2009462, TESTI2009474, TESTI2009477, TESTI2009497, TESTI2009502, TESTI2009511, TESTI2009520, TESTI2009544, TESTI2009545, TESTI2009551, TESTI2009585, TESTI2009588, TESTI2009683, TESTI2009727, TESTI2009739, TESTI2009785, TESTI2009812, TESTI2009835, TESTI2009853, TESTI2009935, TESTI2009977, TESTI2009987, TESTI2010009, TESTI2010154, TESTI2010180, TESTI2010239, TESTI2010280, TESTI2010354, TESTI2010396, TESTI2010400, TESTI2010409, TESTI2010572, TESTI2010587, TESTI2010591, TESTI2010617, TESTI2010682, TESTI2010724, TESTI2010732, TESTI2010734, TESTI2010755, TESTI2010793, TESTI2010806, TESTI2010833, TESTI2010872, TESTI2011009, TESTI2011020, TESTI2011028, TESTI2011033, TESTI2011254, TESTI2011286, TESTI2011294, TESTI2011314, TESTI2011315, TESTI2011394, TESTI2011407, TESTI2011448, TESTI2011480, TESTI2011549, TESTI2011575, TESTI2011605, TESTI2011612, TESTI2011665, TESTI2011680, TESTI2011683, TESTI2011712, TESTI2011750, TESTI2011840, TESTI2011846, TESTI2011915, TESTI2011928, TESTI2011971, TESTI2012019, TESTI2012050, TESTI2012090, TESTI2012095, TESTI2012104, TESTI2012152, TESTI2012155, TESTI2012171, TESTI2012207, TESTI2012231, TESTI2012244, TESTI2012289, TESTI2012308, TESTI2012387, TESTI2012394, TESTI2012444, TESTI2012511, TESTI2012528, TESTI2012544, TESTI2012550, TESTI2012571, TESTI2012592, TESTI2012617, TESTI2012628, TESTI2012812, TESTI2012834, TESTI2012835, TESTI2012861, TESTI2012900, TESTI2012915, TESTI2012922, TESTI2013001, TESTI2013012, TESTI2013053, TESTI2013144, TESTI2013163, TESTI2013169, TESTI2013212, TESTI2013231, TESTI2013257, TESTI2013264, TESTI2013268, TESTI2013295, TESTI2013322, TESTI2013381, TESTI2013382, TESTI2013401, TESTI2013427, TESTI2013468, TESTI2013497, TESTI2013545, TESTI2013546, TESTI2013566, TESTI2013601, TESTI2013604, TESTI2013607, TESTI2013610, TESTI2013691, TESTI2013699, TESTI2013737, TESTI2013767, TESTI2013832, TESTI2013873, TESTI2013889, TESTI2014007, TESTI2014036, TESTI2014097, TESTI2014160, TESTI2014248, TESTI2014254, TESTI2014269, TESTI2014274, TESTI2014318, TESTI2014324, TESTI2014339, TESTI2014362, TESTI2014385, TESTI2014415, TESTI2014439, TESTI2014474, TESTI2014505, TESTI2014577, TESTI2014578, TESTI2014716, TESTI2014780, TESTI2014800, TESTI2014838, TESTI2014843, TESTI2014979, TESTI2014988, TESTI2015042, TESTI2015092, TESTI2015105, TESTI2015180, TESTI2015213, TESTI2015246, TESTI2015249, TESTI2015327, TESTI2015331, TESTI2015335, TESTI2015350, TESTI2015375, TESTI2015437, TESTI2015590, TESTI2015610, TESTI2015626, TESTI2015647, TESTI2015675, TESTI2015710, TESTI2015752, TESTI2015830, TESTI2015914, TESTI2015938, TESTI2015947, TESTI2015962, TESTI2015987, TESTI2016033, TESTI2016046, TESTI2016101, TESTI2016162, TESTI2016197, TESTI2016278, TESTI2016298, TESTI2016331, TESTI2016337, TESTI2016410, TESTI2016421, TESTI2016509, TESTI2016568, TESTI2016583, TESTI2016599, TESTI2016629, TESTI2016663, TESTI2016667, TESTI2016688, TESTI2016701, TESTI2016758, TESTI2016848, TESTI2016863, TESTI2016888, TESTI2016896, TESTI2016922, TESTI2016942, TESTI2016950, TESTI2016996, TESTI2017017, TESTI2017028, TESTI2017035, TESTI2017069, TESTI2017089, TESTI2017102, TESTI2017107, TESTI2017113, TESTI2017125, TESTI2017256, TESTI2017305, TESTI2017311, TESTI2017396, TESTI2017507, TESTI2017537, TESTI2017582, TESTI2017584, TESTI2017645, TESTI2017727, TESTI2017740, TESTI2017775, TESTI2017816, TESTI2017832, TESTI2017923, TESTI2017932, TESTI2017951, TESTI2018031, TESTI2018035, TESTI2018060, TESTI2018083, TESTI2018178, TESTI2018221, TESTI2018276, TESTI2018290, TESTI2018335, TESTI2018337, TESTI2018368, TESTI2018421, TESTI2018428, TESTI2018462, TESTI2018475, TESTI2018482, TESTI2018521, TESTI2018565, TESTI2018581, TESTI2018611, TESTI2018687, TESTI2018697, TESTI2018838, TESTI2018867, TESTI2018941, TESTI2018957, TESTI2018974, TESTI2018975, TESTI2019042, TESTI2019077, TESTI2019228, TESTI2019257, TESTI2019280, TESTI2019282, TESTI2019308, TESTI2019336, TESTI2019352, TESTI2019406, TESTI2019430, TESTI2019455, TESTI2019481, TESTI2019488, TESTI2019501, TESTI2019648, TESTI2019669, TESTI2019697, TESTI2019729, TESTI2019760, TESTI2019787, TESTI2019794, TESTI2019854, TESTI2019859, TESTI2019860, TESTI2019872, TESTI2019911, TESTI2019917, TESTI2019975, TESTI2019998, TESTI2020012, TESTI2020026, TESTI2020029, TESTI2020071, TESTI2020084, TESTI2020265, TESTI2020283, TESTI2020316, TESTI2020344, TESTI2020379, TESTI2020426, TESTI2020445, TESTI2020510, TESTI2020515, TESTI2020525, TESTI2020579, TESTI2020717, TESTI2020840, TESTI2020871, TESTI2020905, TESTI2020906, TESTI2020946, TESTI2020956, TESTI2020981, TESTI2020999, TESTI2021003, TESTI2021038, TESTI2021057, TESTI2021077, TESTI2021112, TESTI2021114, TESTI2021116, TESTI2021122, TESTI2021124, TESTI2021138, TESTI2021297, TESTI2021315, TESTI2021358, TESTI2021425, TESTI2021447, TESTI2021463, TESTI2021531, TESTI2021599, TESTI2021637, TESTI2021654, TESTI2021667, TESTI2021736, TESTI2021785, TESTI2021819, TESTI2021851, TESTI2021895, TESTI2021911, TESTI2021939, TESTI2021999, TESTI2022010, TESTI2022023, TESTI2022065, TESTI2022086, TESTI2022179, TESTI2022203, TESTI2022246, TESTI2022323, TESTI2022338, TESTI2022400, TESTI2022462, TESTI2022495, TESTI2022623, TESTI2022649, TESTI2022652, TESTI2022738, TESTI2022798, TESTI2022812, TESTI2022814, TESTI2022874, TESTI2022940, TESTI2022952, TESTI2023025, TESTI2023033, TESTI2023053, TESTI2023085, TESTI2023192, TESTI2023194, TESTI2023214, TESTI2023254, TESTI2023386, TESTI2023414, TESTI2023427, TESTI2023436, TESTI2023599, TESTI2023752, TESTI2023800, TESTI2023861, TESTI2023903, TESTI2023942, TESTI2023947, TESTI2023951, TESTI2023968, TESTI2024009, TESTI2024090, TESTI2024125, TESTI2024153, TESTI2024192, TESTI2024267, TESTI2024283, TESTI2024299, TESTI2024419, TESTI2024422, TESTI2024443, TESTI2024446, TESTI2024473, TESTI2024476, TESTI2024498, TESTI2024560, TESTI2024567, TESTI2024586, TESTI2024598, TESTI2024641, TESTI2024648, TESTI2024718, TESTI2024744, TESTI2024844, TESTI2024864, TESTI2024885, TESTI2024936, TESTI2024978, TESTI2024999, TESTI2025006, TESTI2025013, TESTI2025022, TESTI2025063, TESTI2025117, TESTI2025144, TESTI2025161, TESTI2025174, TESTI2025229, TESTI2025269, TESTI2025365, TESTI2025403, TESTI2025409, TESTI2025422, TESTI2025448, TESTI2025454, TESTI2025486, TESTI2025546, TESTI2025582, TESTI2025609, TESTI2025656, TESTI2025757, TESTI2025791, TESTI2025846, TESTI2025872, TESTI2025879, TESTI2025911, TESTI2025920, TESTI2025924, TESTI2026014, TESTI2026024, TESTI2026064, TESTI2026077, TESTI2026104, TESTI2026116, TESTI2026134, TESTI2026168, TESTI2026196, TESTI2026215, TESTI2026218, TESTI2026233, TESTI2026291, TESTI2026294, TESTI2026401, TESTI2026403, TESTI2026453, TESTI2026461, TESTI2026491, TESTI2026505, TESTI2026515, TESTI2026525, TESTI2026534, TESTI2026537, TESTI2026589, TESTI2026597, TESTI2026605, TESTI2026647, TESTI2026674, TESTI2026794, TESTI2026824, TESTI2026854, TESTI2026925, TESTI2026936, TESTI2026957, TESTI2027013, TESTI2027019, TESTI2027108, TESTI2027165, TESTI2027171, TESTI2027173, TESTI2027179, TESTI2027185, TESTI2027206, TESTI2027238, TESTI2027239, TESTI2027243, TESTI2027271, TESTI2027296, TESTI2027378, TESTI2027411, TESTI2027450, TESTI2027496, TESTI2027503, TESTI2027562, TESTI2027615, TESTI2027645, TESTI2027730, TESTI2027736, TESTI2027791, TESTI2027820, TESTI2027828, TESTI2027840, TESTI2027909, TESTI2028098, TESTI2028151, TESTI2028242, TESTI2028253, TESTI2028254, TESTI2028269, TESTI2028290, TESTI2028296, TESTI2028384, TESTI2028426, TESTI2028488, TESTI2028523, TESTI2028583, TESTI2028613, TESTI2028659, TESTI2028662, TESTI2028670, TESTI2028705, TESTI2028776, TESTI2028811, TESTI2028891, TESTI2028985, TESTI2028997, TESTI2029131, TESTI2029162, TESTI2029196, TESTI2029201, TESTI2029227, TESTI2029244, TESTI2029249, TESTI2029252, TESTI2029259, TESTI2029264, TESTI2029470, TESTI2029672, TESTI2029785, TESTI2029880, TESTI2030136, TESTI2030322, TESTI2030336, TESTI2030342, TESTI2030519, TESTI2030554, TESTI2030556, TESTI2030728, TESTI2030754, TESTI2030770, TESTI2030860, TESTI2030901, TESTI2030917, TESTI2030930, TESTI2031006, TESTI2031007, TESTI2031060, TESTI2031129, TESTI2031356, TESTI2031418, TESTI2031504, TESTI2031529, TESTI2031687, TESTI2031760, TESTI2031809, TESTI2031919, TESTI2031935, TESTI2031986, TESTI2032044, TESTI2032067, TESTI2032079, TESTI2032643, TESTI2032681, TESTI2032761, TESTI2032768, TESTI2032774, TESTI2032828, TESTI2033031, TESTI2033242, TESTI2033254, TESTI2033300, TESTI2033395, TESTI2033453, TESTI2033505, TESTI2033520, TESTI2033641, TESTI2033710, TESTI2033905, TESTI2034187, TESTI2034243, TESTI2034249, TESTI2034307, TESTI2034357, TESTI2034401, TESTI2034407, TESTI2034506, TESTI2034520, TESTI2034718, TESTI2034730, TESTI2034749, TESTI2034767, TESTI2034774, TESTI2034777, TESTI2034785, TESTI2034799, TESTI2034847, TESTI2034913, TESTI2034916, TESTI2034931, TESTI2034940, TESTI2034953, TESTI2034997, TESTI2035003, TESTI2035078, TESTI2035084, TESTI2035107, TESTI2035121, TESTI2035124, TESTI2035183, TESTI2035236, TESTI2035262, TESTI2035309, TESTI2035688, TESTI2035775, TESTI2035793, TESTI2035898, TESTI2035962, TESTI2035981, TESTI2035997, TESTI2036114, TESTI2036129, TESTI2036285, TESTI2036288, TESTI2036513, TESTI2036589, TESTI2036650, TESTI2036684, TESTI2036691, TESTI2036736, TESTI2036822, TESTI2036833, TESTI2036913, TESTI2036922, TESTI2036951, TESTI2036965, TESTI2036969, TESTI2037002, TESTI2037055, TESTI2037081, TESTI2037085, TESTI2037103, TESTI2037106, TESTI2037111, TESTI2037209, TESTI2037255, TESTI2037359, TESTI2037375, TESTI2037382, TESTI2037534, TESTI2037569, TESTI2037572, TESTI2037643, TESTI2037657, TESTI2037673, TESTI2037723, TESTI2037819, TESTI2037830, TESTI2037845, TESTI2037877, TESTI2037976, TESTI2038048, TESTI2038065, TESTI2038104, TESTI2038275, TESTI2038388, TESTI2038573, TESTI2038596, TESTI2038623, TESTI2038644, TESTI2038733, TESTI2038858, TESTI2038958, TESTI2039025, TESTI2039026, TESTI2039038, TESTI2039041, TESTI2039060, TESTI2039113, TESTI2039121, TESTI2039177, TESTI2039209, TESTI2039225, TESTI2039227, TESTI2039276, TESTI2039342, TESTI2039353, TESTI2039544, TESTI2039613, TESTI2039707, TESTI2039732, TESTI2039738, TESTI2039776, TESTI2039867, TESTI2039908, TESTI2040018, TESTI2040094, TESTI2040102, TESTI2040128, TESTI2040143, TESTI2040297, TESTI2040372, TESTI2040377, TESTI2040424, TESTI2040642, TESTI2040815, TESTI2040897, TESTI2040944, TESTI2040964, TESTI2040983, TESTI2040989, TESTI2041330, TESTI2041362, TESTI2041517, TESTI2041564, TESTI2041664, TESTI2041730, TESTI2041734, TESTI2041778, TESTI2041800, TESTI2041947, TESTI2041956, TESTI2041976, TESTI2042062, TESTI2042149, TESTI2042264, TESTI2042295, TESTI2042302, TESTI2042326, TESTI2042400, TESTI2042450, TESTI2042473, TESTI2042507, TESTI2042508, TESTI2042750, TESTI2042783, TESTI2042806, TESTI2042928, TESTI2042946, TESTI2042958, TESTI2043275, TESTI2043277, TESTI2043282, TESTI2043313, TESTI2043477, TESTI2043585, TESTI2043758, TESTI2043817, TESTI2043857, TESTI2043866, TESTI2043869, TESTI2044064, TESTI2044118, TESTI2044194, TESTI2044276, TESTI2044306, TESTI2044309, TESTI2044413, TESTI2044418, TESTI2044754, TESTI2044788, TESTI2044796, TESTI2044833, TESTI2044892, TESTI2044920, TESTI2044968, TESTI2045139, TESTI2045155, TESTI2045171, TESTI2045199, TESTI2045353, TESTI2045509, TESTI2045562, TESTI2045611, TESTI2045819, TESTI2045850, TESTI2045920, TESTI2045964, TESTI2045983, TESTI2046100, TESTI2046188, TESTI2046347, TESTI2046352, TESTI2046358, TESTI2046439, TESTI2046456, TESTI2046535, TESTI2046536, TESTI2046552, TESTI2046569, TESTI2046686, TESTI2046721, TESTI2046732, TESTI2046786, TESTI2046797, TESTI2046863, TESTI2046872, TESTI2047071, TESTI2047141, TESTI2047147, TESTI2047153, TESTI2047212, TESTI2047342, TESTI2047383, TESTI2047605, TESTI2047792, TESTI2047801, TESTI2047818, TESTI2047824, TESTI2047885, TESTI2047930, TESTI2048105, TESTI2048109, TESTI2048465, TESTI2048603, TESTI2048898, TESTI2049041, TESTI2049062, TESTI2049206, TESTI2049246, TESTI2049277, TESTI2049422, TESTI2049452, TESTI2049469, TESTI2049553, TESTI2049576, TESTI2049857, TESTI2049956, TESTI2050137, TESTI2050681, TESTI2050780, TESTI2050987, TESTI2051148, TESTI2051177, TESTI2051279, TESTI2051488, TESTI2051543, TESTI2051627, TESTI2051742, TESTI2051767, TESTI2051791, TESTI2051806, TESTI2051867, TESTI2051873, TESTI2052110, TESTI2052202, TESTI2052211, TESTI2052256, TESTI2052288, TESTI2052525, TESTI2052670, TESTI2052693, TESTI2052698, TESTI2052799, TESTI2052822, TESTI2052985, TESTI2053151, TESTI2053242, TESTI2053399, TESTI2053526, TESTI2053561, TESTI2053621, TESTI2053667, TESTI2053723, TESTI3000002, TESTI3000005, TESTI4000014, TESTI4000068, TESTI4000079, TESTI4000093, TESTI4000134, TESTI4000137, TESTI4000153, TESTI4000155, TESTI4000157, TESTI4000183, TESTI4000214, TESTI4000215, TESTI4000228, TESTI4000250, TESTI4000288, TESTI4000319, TESTI4000349, TESTI4000370, TESTI4000394, TESTI4000434, TESTI4000462, TESTI4000530, TESTI4000534, TESTI4000598, TESTI4000600, TESTI4000621, TESTI4000703, TESTI4000724, TESTI4000957, TESTI4000970, TESTI4001036, TESTI4001037, TESTI4001060, TESTI4001106, TESTI4001148, TESTI4001176, TESTI4001195, TESTI4001201, TESTI4001206, TESTI4001348, TESTI4001441, TESTI4001473, TESTI4001517, TESTI4001527, TESTI4001561, TESTI4001569, TESTI4001604, TESTI4001665, TESTI4001679, TESTI4001795, TESTI4001923, TESTI4001925, TESTI4001984, TESTI4002003, TESTI4002072, TESTI4002141, TESTI4002195, TESTI4002202, TESTI4002290, TESTI4002319, TESTI4002491, TESTI4002520, TESTI4002552, TESTI4002647, TESTI4002703, TESTI4002754, TESTI4002868, TESTI4002878, TESTI4002889, TESTI4002988, TESTI4003150, TESTI4003179, TESTI4003279, TESTI4003319, TESTI4003404, TESTI4003565, TESTI4003574, TESTI4003579, TESTI4003602, TESTI4003703, TESTI4003733, TESTI4003796, TESTI4003944, TESTI4004003, TESTI4004031, TESTI4004200, TESTI4004210, TESTI4004539, TESTI4004626, TESTI4004653, TESTI4004695, TESTI4004722, TESTI4004887, TESTI4004917, TESTI4005015, TESTI4005039, TESTI4005133, TESTI4005158, TESTI4005317, TESTI4005322, TESTI4005399, TESTI4005470, TESTI4005500, TESTI4005534, TESTI4005543, TESTI4005628, TESTI4005801, TESTI4005805, TESTI4005857, TESTI4005961, TESTI4006053, TESTI4006079, TESTI4006112, TESTI4006137, TESTI4006148, TESTI4006219, TESTI4006234, TESTI4006308, TESTI4006326, TESTI4006393, TESTI4006407, TESTI4006412, TESTI4006420, TESTI4006441, TESTI4006473, TESTI4006539, TESTI4006546, TESTI4006567, TESTI4006704, TESTI4006728, TESTI4006802, TESTI4006819, TESTI4007064, TESTI4007163, TESTI4007176, TESTI4007203, TESTI4007239, TESTI4007369, TESTI4007373, TESTI4007382, TESTI4007404, TESTI4007489, TESTI4007565, TESTI4007671, TESTI4007775, TESTI4007778, TESTI4007799, TESTI4007810, TESTI4007816, TESTI4007965, TESTI4008007, TESTI4008018, TESTI4008050, TESTI4008058, TESTI4008086, TESTI4008097, TESTI4008176, TESTI4008209, TESTI4008219, TESTI4008250, TESTI4008302, TESTI4008305, TESTI4008401, TESTI4008417, TESTI4008429, TESTI4008573, TESTI4008797, TESTI4008816, TESTI4008840, TESTI4008935, TESTI4008993, TESTI4009022, TESTI4009028, TESTI4009034, TESTI4009123, TESTI4009160, TESTI4009215, TESTI4009283, TESTI4009286, TESTI4009306, TESTI4009374, TESTI4009406, TESTI4009454, TESTI4009457, TESTI4009501, TESTI4009563, TESTI4009608, TESTI4009638, TESTI4009752, TESTI4009881, TESTI4009886, TESTI4009928, TESTI4010076, TESTI4010082, TESTI4010095, TESTI4010211, TESTI4010377, TESTI4010475, TESTI4010544, TESTI4010713, TESTI4010721, TESTI4010789, TESTI4010817, TESTI4010831, TESTI4010851, TESTI4010902, TESTI4010928, TESTI4010979, TESTI4011070, TESTI4011072, TESTI4011084, TESTI4011118, TESTI4011246, TESTI4011484, TESTI4011505, TESTI4011532, TESTI4011616, TESTI4011744, TESTI4011745, TESTI4011829, TESTI4011926, TESTI4011956, TESTI4012010, TESTI4012086, TESTI4012258, TESTI4012293, TESTI4012329, TESTI4012382, TESTI4012406, TESTI4012448, TESTI4012451, TESTI4012505, TESTI4012556, TESTI4012623, TESTI4012646, TESTI4012679, TESTI4012911, TESTI4012956, TESTI4012960, TESTI4013365, TESTI4013369, TESTI4013410, TESTI4013474, TESTI4013602, TESTI4013667, TESTI4013675, TESTI4013685, TESTI4013735, TESTI4013742, TESTI4013774, TESTI4013817, TESTI4013830, TESTI4013852, TESTI4013894, TESTI4013924, TESTI4013960, TESTI4013962, TESTI4014159, TESTI4014175, TESTI4014265, TESTI4014276, TESTI4014306, TESTI4014392, TESTI4014415, TESTI4014445, TESTI4014553, TESTI4014661, TESTI4014801, TESTI4014818, TESTI4014891, TESTI4014908, TESTI4014924, TESTI4014932, TESTI4014977, TESTI4015012, TESTI4015129, TESTI4015145, TESTI4015204, TESTI4015263, TESTI4015293, TESTI4015299, TESTI4015339, TESTI4015398, TESTI4015442, TESTI4015471, TESTI4015477, TESTI4015600, TESTI4015646, TESTI4015681, TESTI4015688, TESTI4015790, TESTI4016110, TESTI4016238, TESTI4016551, TESTI4016812, TESTI4016822, TESTI4016865, TESTI4016882, TESTI4016925, TESTI4017001, TESTI4017116, TESTI4017137, TESTI4017229, TESTI4017254, TESTI4017269, TESTI4017380, TESTI4017382, TESTI4017543, TESTI4017575, TESTI4017647, TESTI4017714, TESTI4017763, TESTI4017848, TESTI4017854, TESTI4017901, TESTI4017961, TESTI4017984, TESTI4018101, TESTI4018152, TESTI4018208, TESTI4018382, TESTI4018436, TESTI4018506, TESTI4018555, TESTI4018751, TESTI4018806, TESTI4018835, TESTI4018859, TESTI4018881, TESTI4018886, TESTI4018938, TESTI4019140, TESTI4019149, TESTI4019299, TESTI4019417, TESTI4019440, TESTI4019566, TESTI4019657, TESTI4019756, TESTI4019843, TESTI4020092, TESTI4020102, TESTI4020342, TESTI4020460, TESTI4020596, TESTI4020806, TESTI4020819, TESTI4020920, TESTI4021129, TESTI4021197, TESTI4021294, TESTI4021377, TESTI4021456, TESTI4021491, TESTI4021569, TESTI4021713, TESTI4021821, TESTI4022158, TESTI4022577, TESTI4022716, TESTI4022873, TESTI4023096, TESTI4023172, TESTI4023546, TESTI4023555, TESTI4023654, TESTI4023722, TESTI4023762, TESTI4023942, TESTI4024096, TESTI4024240, TESTI4024245, TESTI4024294, TESTI4024344, TESTI4024387, TESTI4024420, TESTI4024494, TESTI4024740, TESTI4024874, TESTI4024890, TESTI4024907, TESTI4024930, TESTI4025062, TESTI4025268, TESTI4025401, TESTI4025494, TESTI4025547, TESTI4025731, TESTI4025797, TESTI4025865, TESTI4025908, TESTI4025920, TESTI4026079, TESTI4026080, TESTI4026192, TESTI4026207, TESTI4026295, TESTI4026390, TESTI4026456, TESTI4026510, TESTI4026524, TESTI4026680, TESTI4026700, TESTI4026762, TESTI4026785, TESTI4027139, TESTI4027170, TESTI4027262, TESTI4027516, TESTI4027557, TESTI4027660, TESTI4027821, TESTI4027969, TESTI4028042, TESTI4028059, TESTI4028062, TESTI4028182, TESTI4028429, TESTI4028612, TESTI4028692, TESTI4028809, TESTI4028823, TESTI4028880, TESTI4028904, TESTI4028938, TESTI4028958, TESTI4028983, TESTI4029023, TESTI4029348, TESTI4029370, TESTI4029528, TESTI4029651, TESTI4029671, TESTI4029676, TESTI4029690, TESTI4029731, TESTI4029743, TESTI4030069, TESTI4030159, TESTI4030319, TESTI4030505, TESTI4030603, TESTI4030669, TESTI4030673, TESTI4030864, TESTI4031066, TESTI4031173, TESTI4031335, TESTI4031745, TESTI4031818, TESTI4032090, TESTI4032112, TESTI4032128, TESTI4032270, TESTI4032375, TESTI4032834, TESTI4032856, TESTI4032895, TESTI4032913, TESTI4033146, TESTI4033177, TESTI4033433, TESTI4033690, TESTI4034172, TESTI4034212, TESTI4034432, TESTI4034495, TESTI4034632, TESTI4034633, TESTI4034912, TESTI4034973, TESTI4035063, TESTI4035065, TESTI4035498, TESTI4035508, TESTI4035581, TESTI4035602, TESTI4035637, TESTI4035649, TESTI4035770, TESTI4035872, TESTI4035895, TESTI4035898, TESTI4035989, TESTI4036012, TESTI4036042, TESTI4036048, TESTI4036315, TESTI4036319, TESTI4036449, TESTI4036767, TESTI4036909, TESTI4037066, TESTI4037188, TESTI4037228, TESTI4037244, TESTI4037727, TESTI4037949, TESTI4038047, TESTI4038099, TESTI4038156, TESTI4038223, TESTI4038258, TESTI4038284, TESTI4038339, TESTI4038492, TESTI4038721, TESTI4038758, TESTI4038779, TESTI4038818, TESTI4039038, TESTI4039086, TESTI4039451, TESTI4039575, TESTI4039659, TESTI4039744, TESTI4039904, TESTI4040197, TESTI4040363, TESTI4040535, TESTI4040559, TESTI4040800, TESTI4040804, TESTI4040939, TESTI4040956, TESTI4041049, TESTI4041053, TESTI4041086, TESTI4041099, TESTI4041143, TESTI4041482, TESTI4041519, TESTI4041624, TESTI4041629, TESTI4041832, TESTI4041844, TESTI4041903, TESTI4041954, TESTI4041984, TESTI4041985, TESTI4041986, TESTI4042098, TESTI4042420, TESTI4042440, TESTI4042444, TESTI4042711, TESTI4042846, TESTI4043067, TESTI4043129, TESTI4043140, TESTI4043166, TESTI4043203, TESTI4043223, TESTI4043371, TESTI4043378, TESTI4043512, TESTI4043551, TESTI4043710, TESTI4043947, TESTI4044035, TESTI4044076, TESTI4044084, TESTI4044123, TESTI4044186, TESTI4044234, TESTI4044291, TESTI4044296, TESTI4044300, TESTI4044682, TESTI4044704, TESTI4044770, TESTI4045168, TESTI4045312, TESTI4045330, TESTI4045470, TESTI4045701, TESTI4045908, TESTI4045955, TESTI4045982, TESTI4046073, TESTI4046090, TESTI4046240, TESTI4046245, TESTI4046253, TESTI4046282, TESTI4046328, TESTI4046450, TESTI4046457, TESTI4046487, TESTI4046502, TESTI4046523, TESTI4046819, TESTI4046873, TESTI4046884, TESTI4046896, TESTI4046903, TESTI4046962, TESTI4047069, TESTI4047119, TESTI4047305, TESTI4047328, TESTI4047437, TESTI4047569, TESTI4047746, TESTI4047808, THYMU1000017, THYMU1000025, THYMU1000029, THYMU1000033, THYMU1000041, THYMU1000060, THYMU1000074, THYMU1000083, THYMU1000098, THYMU1000103, THYMU1000105, THYMU1000109, THYMU1000136, THYMU1000142, THYMU1000144, THYMU1000158, THYMU1000176, THYMU1000179, THYMU1000191, THYMU1000198, THYMU1000217, THYMU1000240, THYMU1000242, THYMU1000291, THYMU1000316, THYMU1000318, THYMU1000329, THYMU1000331, THYMU1000336, THYMU1000366, THYMU1000374, THYMU1000382, THYMU1000393, THYMU1000394, THYMU1000399, THYMU1000426, THYMU1000440, THYMU1000459, THYMU1000473, THYMU1000490, THYMU1000491, THYMU1000496, THYMU1000499, THYMU1000527, THYMU1000532, THYMU1000536, THYMU1000554, THYMU1000558, THYMU1000576, THYMU1000600, THYMU1000677, THYMU1000692, THYMU2000022, THYMU2000032, THYMU2000057, THYMU2000120, THYMU2000138, THYMU2000140, THYMU2000155, THYMU2000162, THYMU2000171, THYMU2000176, THYMU2000179, THYMU2000231, THYMU2000236, THYMU2000276, THYMU2000280, THYMU2000300, THYMU2000317, THYMU2000368, THYMU2000369, THYMU2000418, THYMU2000436, THYMU2000440, THYMU2000489, THYMU2000492, THYMU2000519, THYMU2000570, THYMU2000602, THYMU2000660, THYMU2000671, THYMU2000672, THYMU2000684, THYMU2000702, THYMU2000767, THYMU2000775, THYMU2000800, THYMU2000879, THYMU2000932, THYMU2000950, THYMU2000971, THYMU2000982, THYMU2000990, THYMU2001007, THYMU2001053, THYMU2001071, THYMU2001090, THYMU2001139, THYMU2001195, THYMU2001202, THYMU2001203, THYMU2001256, THYMU2001270, THYMU2001291, THYMU2001314, THYMU2001325, THYMU2001357, THYMU2001381, THYMU2001443, THYMU2001515, THYMU2001521, THYMU2001556, THYMU2001622, THYMU2001727, THYMU2001819, THYMU2001825, THYMU2001839, THYMU2001868, THYMU2001898, THYMU2001900, THYMU2001916, THYMU2001926, THYMU2001989, THYMU2002023, THYMU2002037, THYMU2002080, THYMU2002109, THYMU2002147, THYMU2002154, THYMU2002157, THYMU2002162, THYMU2002177, THYMU2002203, THYMU2002229, THYMU2002242, THYMU2002338, THYMU2002356, THYMU2002376, THYMU2002384, THYMU2002450, THYMU2002490, THYMU2002548, THYMU2002695, THYMU2002745, THYMU2002756, THYMU2002789, THYMU2002792, THYMU2002815, THYMU2002841, THYMU2002852, THYMU2002910, THYMU2002950, THYMU2003012, THYMU2003046, THYMU2003069, THYMU2003107, THYMU2003124, THYMU2003133, THYMU2003166, THYMU2003232, THYMU2003242, THYMU2003249, THYMU2003270, THYMU2003282, THYMU2003287, THYMU2003336, THYMU2003366, THYMU2003397, THYMU2003419, THYMU2003440, THYMU2003446, THYMU2003470, THYMU2003479, THYMU2003499, THYMU2003542, THYMU2003632, THYMU2003650, THYMU2003700, THYMU2003760, THYMU2003803, THYMU2003855, THYMU2003907, THYMU2003932, THYMU2003981, THYMU2004003, THYMU2004008, THYMU2004042, THYMU2004108, THYMU2004111, THYMU2004123, THYMU2004139, THYMU2004169, THYMU2004284, THYMU2004320, THYMU2004336, THYMU2004356, THYMU2004410, THYMU2004452, THYMU2004508, THYMU2004512, THYMU2004635, THYMU2004639, THYMU2004668, THYMU2004677, THYMU2004688, THYMU2004693, THYMU2004733, THYMU2004835, THYMU2004843, THYMU2004906, THYMU2004916, THYMU2004986, THYMU2005001, THYMU2005003, THYMU2005046, THYMU2005134, THYMU2005156, THYMU2005190, THYMU2005225, THYMU2005240, THYMU2005246, THYMU2005270, THYMU2005283, THYMU2005303, THYMU2005321, THYMU2005356, THYMU2005369, THYMU2005439, THYMU2005480, THYMU2005482, THYMU2005507, THYMU2005545, THYMU2005574, THYMU2005576, THYMU2005748, THYMU2005759, THYMU2005807, THYMU2005815, THYMU2005855, THYMU2005881, THYMU2005948, THYMU2005980, THYMU2005997, THYMU2006001, THYMU2006048, THYMU2006098, THYMU2006160, THYMU2006170, THYMU2006252, THYMU2006261, THYMU2006277, THYMU2006303, THYMU2006324, THYMU2006350, THYMU2006357, THYMU2006365, THYMU2006420, THYMU2006468, THYMU2006610, THYMU2006666, THYMU2006712, THYMU2006813, THYMU2006913, THYMU2006946, THYMU2006965, THYMU2007025, THYMU2007036, THYMU2007060, THYMU2007065, THYMU2007095, THYMU2007112, THYMU2007146, THYMU2007179, THYMU2007258, THYMU2007307, THYMU2007308, THYMU2007339, THYMU2007350, THYMU2007384, THYMU2007415, THYMU2007467, THYMU2007493, THYMU2007521, THYMU2007528, THYMU2007530, THYMU2007532, THYMU2007561, THYMU2007571, THYMU2007635, THYMU2007658, THYMU2007667, THYMU2007694, THYMU2007725, THYMU2007729, THYMU2007802, THYMU2007824, THYMU2007854, THYMU2007952, THYMU2007969, THYMU2008035, THYMU2008036, THYMU2008049, THYMU2008072, THYMU2008111, THYMU2008145, THYMU2008149, THYMU2008191, THYMU2008207, THYMU2008226, THYMU2008282, THYMU2008321, THYMU2008339, THYMU2008350, THYMU2008351, THYMU2008383, THYMU2008452, THYMU2008643, THYMU2008686, THYMU2008691, THYMU2008714, THYMU2008725, THYMU2008727, THYMU2008781, THYMU2008799, THYMU2008876, THYMU2008910, THYMU2008917, THYMU2008928, THYMU2008990, THYMU2008994, THYMU2009023, THYMU2009046, THYMU2009101, THYMU2009104, THYMU2009134, THYMU2009157, THYMU2009181, THYMU2009186, THYMU2009338, THYMU2009425, THYMU2009516, THYMU2009526, THYMU2009546, THYMU2009592, THYMU2009596, THYMU2009792, THYMU2009835, THYMU2009906, THYMU2009948, THYMU2010030, THYMU2010041, THYMU2010046, THYMU2010059, THYMU2010082, THYMU2010094, THYMU2010161, THYMU2010192, THYMU2010448, THYMU2010519, THYMU2010637, THYMU2010671, THYMU2010699, THYMU2010705, THYMU2010779, THYMU2010816, THYMU2010831, THYMU2010848, THYMU2011053, THYMU2011063, THYMU2011072, THYMU2011096, THYMU2011118, THYMU2011142, THYMU2011183, THYMU2011257, THYMU2011259, THYMU2011295, THYMU2011308, THYMU2011390, THYMU2011431, THYMU2011447, THYMU2011482, THYMU2011538, THYMU2011548, THYMU2011551, THYMU2011564, THYMU2011573, THYMU2011585, THYMU2011621, THYMU2011666, THYMU2011736, THYMU2011785, THYMU2011806, THYMU2011852, THYMU2011875, THYMU2011881, THYMU2011937, THYMU2011939, THYMU2012002, THYMU2012024, THYMU2012073, THYMU2012104, THYMU2012113, THYMU2012273, THYMU2012401, THYMU2012492, THYMU2012507, THYMU2012565, THYMU2012574, THYMU2012631, THYMU2012665, THYMU2012690, THYMU2012701, THYMU2012807, THYMU2012826, THYMU2012882, THYMU2012891, THYMU2012902, THYMU2012919, THYMU2013023, THYMU2013047, THYMU2013051, THYMU2013089, THYMU2013170, THYMU2013364, THYMU2013386, THYMU2013426, THYMU2013578, THYMU2013648, THYMU2013705, THYMU2013757, THYMU2013779, THYMU2013863, THYMU2013950, THYMU2013981, THYMU2014067, THYMU2014068, THYMU2014167, THYMU2014183, THYMU2014204, THYMU2014297, THYMU2014323, THYMU2014327, THYMU2014353, THYMU2014492, THYMU2014500, THYMU2014599, THYMU2014762, THYMU2014777, THYMU2014801, THYMU2014901, THYMU2014923, THYMU2015019, THYMU2015161, THYMU2015316, THYMU2015321, THYMU2015439, THYMU2015441, THYMU2015479, THYMU2015762, THYMU2015775, THYMU2015825, THYMU2015918, THYMU2015943, THYMU2015984, THYMU2016113, THYMU2016164, THYMU2016204, THYMU2016219, THYMU2016360, THYMU2016496, THYMU2016523, THYMU2016840, THYMU2016968, THYMU2017008, THYMU2017010, THYMU2017023, THYMU2017085, THYMU2017099, THYMU2017158, THYMU2017162, THYMU2017215, THYMU2017362, THYMU2017366, THYMU2017398, THYMU2017449, THYMU2017479, THYMU2017522, THYMU2017526, THYMU2017601, THYMU2017675, THYMU2017707, THYMU2017831, THYMU2017844, THYMU2017878, THYMU2017948, THYMU2018028, THYMU2018071, THYMU2018126, THYMU2018189, THYMU2018197, THYMU2018384, THYMU2018455, THYMU2018547, THYMU2018565, THYMU2018639, THYMU2018673, THYMU2018721, THYMU2018772, THYMU2018819, THYMU2018841, THYMU2018997, THYMU2019021, THYMU2019054, THYMU2019197, THYMU2019210, THYMU2019364, THYMU2019436, THYMU2019442, THYMU2019587, THYMU2019599, THYMU2019686, THYMU2019813, THYMU2020198, THYMU2020289, THYMU2020416, THYMU2020491, THYMU2020499, THYMU2020560, THYMU2020667, THYMU2020830, THYMU2020883, THYMU2020959, THYMU2021361, THYMU2021509, THYMU2021597, THYMU2021684, THYMU2021714, THYMU2022213, THYMU2022289, THYMU2022660, THYMU2022854, THYMU2022922, THYMU2023209, THYMU2023264, THYMU2023576, THYMU2023711, THYMU2023900, THYMU2023943, THYMU2023967, THYMU2024071, THYMU2024121, THYMU2024185, THYMU2024207, THYMU2024616, THYMU2024684, THYMU2024748, THYMU2025042, THYMU2025189, THYMU2025319, THYMU2025325, THYMU2025406, THYMU2025557, THYMU2025572, THYMU2025707, THYMU2025849, THYMU2025909, THYMU2025939, THYMU2026182, THYMU2026350, THYMU2026530, THYMU2026531, THYMU2026835, THYMU2026904, THYMU2027053, THYMU2027168, THYMU2027249, THYMU2027282, THYMU2027497, THYMU2027695, THYMU2027734, THYMU2027894, THYMU2027975, THYMU2027996, THYMU2028041, THYMU2028368, THYMU2028379, THYMU2028394, THYMU2028412, THYMU2028629, THYMU2028632, THYMU2028724, THYMU2028739, THYMU2028942, THYMU2028978, THYMU2029134, THYMU2029578, THYMU2029676, THYMU2029688, THYMU2029788, THYMU2030068, THYMU2030226, THYMU2030264, THYMU2030462, THYMU2030543, THYMU2030637, THYMU2030655, THYMU2030796, THYMU2030912, THYMU2030982, THYMU2031046, THYMU2031139, THYMU2031218, THYMU2031249, THYMU2031258, THYMU2031341, THYMU2031368, THYMU2031579, THYMU2031847, THYMU2031890, THYMU2031994, THYMU2032014, THYMU2032035, THYMU2032080, THYMU2032150, THYMU2032155, THYMU2032358, THYMU2032437, THYMU2032601, THYMU2032655, THYMU2032696, THYMU2032715, THYMU2032732, THYMU2032825, THYMU2032976, THYMU2033053, THYMU2033059, THYMU2033070, THYMU2033079, THYMU2033085, THYMU2033104, THYMU2033227, THYMU2033263, THYMU2033308, THYMU2033401, THYMU2033583, THYMU2033755, THYMU2033787, THYMU2033816, THYMU2034182, THYMU2034279, THYMU2034314, THYMU2034338, THYMU2034374, THYMU2034647, THYMU2034917, THYMU2035064, THYMU2035078, THYMU2035101, THYMU2035319, THYMU2035321, THYMU2035388, THYMU2035400, THYMU2035554, THYMU2035710, THYMU2036058, THYMU2036105, THYMU2036207, THYMU2036215, THYMU2036252, THYMU2036265, THYMU2036366, THYMU2036459, THYMU2036461, THYMU2036604, THYMU2036653, THYMU2037081, THYMU2037208, THYMU2037226, THYMU2037233, THYMU2037234, THYMU2037348, THYMU2037406, THYMU2037965, THYMU2038058, THYMU2038189, THYMU2038199, THYMU2038220, THYMU2038301, THYMU2038369, THYMU2038389, THYMU2038615, THYMU2038636, THYMU2038739, THYMU2038772, THYMU2038797, THYMU2038906, THYMU2039305, THYMU2039315, THYMU2039334, THYMU2039350, THYMU2039411, THYMU2039634, THYMU2039719, THYMU2039780, THYMU2039788, THYMU2039989, THYMU2040029, THYMU2040110, THYMU2040114, THYMU2040140, THYMU2040412, THYMU2040427, THYMU2040824, THYMU2040925, THYMU2041007, THYMU2041015, THYMU2041252, THYMU3000028, THYMU3000036, THYMU3000037, THYMU3000082, THYMU3000194, THYMU3000224, THYMU3000269, THYMU3000306, THYMU3000360, THYMU3000390, THYMU3000420, THYMU3000490, THYMU3000504, THYMU3000542, THYMU3000655, THYMU3000776, THYMU3000826, THYMU3000841, THYMU3001077, THYMU3001082, THYMU3001083, THYMU3001133, THYMU3001151, THYMU3001379, THYMU3001472, THYMU3001593, THYMU3001883, THYMU3001939, THYMU3001991, THYMU3002452, THYMU3002578, THYMU3002661, THYMU3003007, THYMU3003092, THYMU3003212, THYMU3003309, THYMU3003350, THYMU3003403, THYMU3003565, THYMU3003763, THYMU3003865, THYMU3003958, THYMU3003965, THYMU3004157, THYMU3004628, THYMU3004632, THYMU3004835, THYMU3004866, THYMU3005050, THYMU3005378, THYMU3005407, THYMU3005415, THYMU3005427, THYMU3005482, THYMU3005491, THYMU3005629, THYMU3005696, THYMU3006118, THYMU3006132, THYMU3006168, THYMU3006172, THYMU3006371, THYMU3006485, THYMU3006640, THYMU3006767, THYMU3006811, THYMU3006963, THYMU3007137, THYMU3007308, THYMU3007368, THYMU3007423, THYMU3007559, THYMU3007845, THYMU3008060, THYMU3008105, THYMU3008136, THYMU3008171, THYMU3008216, THYMU3008436, THYMU3008672, THYMU3008883, THYMU3008935, THYMU3009006, THYMU3009255, THYMU3009391, THYMU3009643, THYMU3009755, THYMU3010247, THYMU3011012, THYMU3011081, THYMU3011244, THYMU3011360, THYMU3011534, THYMU3011543, THYMU3011556, THYMU3011717, THYMU3011827, THYMU3012402, THYMU3012907, THYMU3012983, THYMU3013114, THYMU3013197, THYMU3013241, THYMU3013386, THYMU3013470, THYMU3013785, THYMU3013897, THYMU3014038, THYMU3014173, THYMU3014372, THYMU3014555, THYMU3014620, THYMU3014701, THYMU3015042, THYMU3015457, THYMU3015571, THYMU3015592, THYMU3015625, THYMU3015647, THYMU3015759, THYMU3015962, THYMU3016022, THYMU3016518, THYMU3016797, THYMU3016822, THYMU3016850, THYMU3017562, THYMU3017688, THYMU3017689, THYMU3017761, THYMU3018151, THYMU3018896, THYMU3019095, THYMU3019476, THYMU3019605, THYMU3019916, THYMU3020221, THYMU3020595, THYMU3020713, THYMU3020856, THYMU3020869, THYMU3020970, THYMU3021404, THYMU3021586, THYMU3021755, THYMU3021900, THYMU3022211, THYMU3022434, THYMU3022528, THYMU3022668, THYMU3022982, THYMU3023107, THYMU3023211, THYMU3023216, THYMU3023394, THYMU3023400, THYMU3023797, THYMU3024164, THYMU3024339, THYMU3024602, THYMU3024879, THYMU3025118, THYMU3025313, THYMU3025642, THYMU3025683, THYMU3025772, THYMU3025865, THYMU3026000, THYMU3026350, THYMU3026479, THYMU3026532, THYMU3026783, THYMU3026869, THYMU3027251, THYMU3027540, THYMU3027655, THYMU3027671, THYMU3028075, THYMU3028410, THYMU3028461, THYMU3028702, THYMU3029188, THYMU3029318, THYMU3029421, THYMU3029719, THYMU3029774, THYMU3029832, THYMU3030072, THYMU3030231, THYMU3030706, THYMU3030710, THYMU3030752, THYMU3031146, THYMU3031402, THYMU3031610, THYMU3031612, THYMU3031868, THYMU3031878, THYMU3032032, THYMU3032798, THYMU3032867, THYMU3033402, THYMU3033626, THYMU3033630, THYMU3033649, THYMU3033754, THYMU3033759, THYMU3034078, THYMU3034099, THYMU3034453, THYMU3034616, THYMU3034671, THYMU3034853, THYMU3034867, THYMU3034983, THYMU3036200, THYMU3036310, THYMU3036934, THYMU3036953, THYMU3037052, THYMU3037192, THYMU3037617, THYMU3037772, THYMU3037827, THYMU3037836, THYMU3037856, THYMU3037867, THYMU3037909, THYMU3037980, THYMU3038167, THYMU3038214, THYMU3038266, THYMU3038328, THYMU3038347, THYMU3038375, THYMU3038603, THYMU3038687, THYMU3038759, THYMU3038879, THYMU3038970, THYMU3039807, THYMU3039846, THYMU3040068, THYMU3040126, THYMU3040146, THYMU3040168, THYMU3040172, THYMU3040725, THYMU3040746, THYMU3040816, THYMU3040829, THYMU3040830, THYMU3040986, THYMU3041354, THYMU3041386, THYMU3041428, THYMU3041573, THYMU3041603, THYMU3041736, THYMU3041918, THYMU3042075, THYMU3042321, THYMU3042372, THYMU3042758, THYMU3042929, THYMU3043200, THYMU3043327, THYMU3043482, THYMU3043597, THYMU3043688, THYMU3043779, THYMU3043883, THYMU3043993, THYMU3044175, THYMU3044188, THYMU3044441, THYMU3044445, THYMU3045510, THYMU3045673, THYMU3045692, THYMU3045704, THYMU3046140, THYMU3046350, THYMU3046360, THYMU3046856, THYMU3047115, THYMU3047144, THYMU3047156, THYMU3047366, THYMU3047513, THYMU3047542, THYMU3047760, THYMU3047891, TKIDN1000001, TKIDN1000044, TKIDN1000062, TKIDN1000066, TKIDN1000164, TKIDN1000171, TKIDN1000192, TKIDN2000127, TKIDN2000240, TKIDN2000319, TKIDN2000464, TKIDN2000521, TKIDN2000701, TKIDN2001529, TKIDN2001662, TKIDN2002318, TKIDN2002329, TKIDN2002424, TKIDN2002632, TKIDN2002738, TKIDN2003044, TKIDN2003059, TKIDN2003062, TKIDN2003078, TKIDN2003366, TKIDN2003396, TKIDN2003413, TKIDN2003597, TKIDN2003601, TKIDN2004185, TKIDN2004386, TKIDN2004458, TKIDN2004748, TKIDN2005487, TKIDN2005721, TKIDN2005934, TKIDN2005947, TKIDN2005956, TKIDN2006525, TKIDN2006761, TKIDN2006852, TKIDN2007605, TKIDN2007667, TKIDN2007828, TKIDN2008176, TKIDN2008778, TKIDN2009092, TKIDN2009330, TKIDN2009481, TKIDN2009641, TKIDN2009794, TKIDN2009889, TKIDN2010200, TKIDN2010232, TKIDN2010278, TKIDN2010602, TKIDN2010812, TKIDN2010934, TKIDN2011051, TKIDN2011160, TKIDN2011289, TKIDN2011324, TKIDN2012034, TKIDN2012771, TKIDN2012824, TKIDN2013134, TKIDN2013287, TKIDN2014570, TKIDN2014757, TKIDN2014771, TKIDN2014964, TKIDN2015025, TKIDN2015071, TKIDN2015161, TKIDN2015263, TKIDN2015285, TKIDN2015423, TKIDN2015788, TKIDN2016309, TKIDN2016399, TKIDN2016846, TKIDN2018926, TKIDN2019116, TLIVE2000023, TLIVE2000142, TLIVE2000292, TLIVE2000762, TLIVE2000979, TLIVE2001327, TLIVE2001616, TLIVE2001684, TLIVE2001828, TLIVE2001927, TLIVE2002046, TLIVE2002336, TLIVE2002338, TLIVE2002562, TLIVE2002690, TLIVE2002882, TLIVE2003197, TLIVE2003200, TLIVE2003225, TLIVE2003381, TLIVE2003737, TLIVE2003961, TLIVE2003970, TLIVE2004110, TLIVE2004320, TLIVE2004331, TLIVE2004601, TLIVE2005180, TLIVE2005390, TLIVE2005516, TLIVE2005731, TLIVE2005866, TLIVE2006236, TLIVE2006359, TLIVE2006529, TLIVE2006621, TLIVE2006733, TLIVE2007000, TLIVE2007016, TLIVE2007132, TLIVE2007192, TLIVE2007528, TLIVE2007607, TLIVE2007736, TLIVE2007816, TLIVE2007919, TLIVE2008083, TLIVE2008213, TLIVE2008221, TLIVE2008229, TLIVE2008712, TLIVE2008797, TLIVE2009087, TLIVE2009163, TLIVE2009489, TLIVE2009541, TLUNG2000179, TOVAR2000476, TOVAR2000575, TOVAR2000649, TOVAR2000904, TOVAR2001281, TOVAR2001556, TOVAR2001730, TOVAR2002247, TOVAR2002514, TOVAR2002549, TOVAR2002800, TRACH1000011, TRACH1000018, TRACH1000030, TRACH1000038, TRACH1000057, TRACH1000063, TRACH1000074, TRACH1000100, TRACH1000106, TRACH1000125, TRACH1000140, TRACH1000144, TRACH1000181, TRACH1000193, TRACH1000205, TRACH1000212, TRACH1000240, TRACH2000002, TRACH2000015, TRACH2000024, TRACH2000032, TRACH2000045, TRACH2000047, TRACH2000079, TRACH2000081, TRACH2000083, TRACH2000148, TRACH2000185, TRACH2000196, TRACH2000235, TRACH2000237, TRACH2000243, TRACH2000248, TRACH2000250, TRACH2000259, TRACH2000272, TRACH2000282, TRACH2000287, TRACH2000289, TRACH2000306, TRACH2000312, TRACH2000321, TRACH2000336, TRACH2000359, TRACH2000393, TRACH2000411, TRACH2000420, TRACH2000461, TRACH2000496, TRACH2000497, TRACH2000502, TRACH2000522, TRACH2000660, TRACH2000665, TRACH2000675, TRACH2000677, TRACH2000702, TRACH2000703, TRACH2000767, TRACH2000775, TRACH2000780, TRACH2000807, TRACH2000862, TRACH2000873, TRACH2000894, TRACH2000898, TRACH2000920, TRACH2000923, TRACH2000926, TRACH2000944, TRACH2000959, TRACH2000972, TRACH2000981, TRACH2000986, TRACH2001037, TRACH2001060, TRACH2001085, TRACH2001101, TRACH2001109, TRACH2001121, TRACH2001147, TRACH2001154, TRACH2001188, TRACH2001192, TRACH2001249, TRACH2001275, TRACH2001314, TRACH2001335, TRACH2001339, TRACH2001341, TRACH2001347, TRACH2001395, TRACH2001400, TRACH2001403, TRACH2001416, TRACH2001428, TRACH2001432, TRACH2001443, TRACH2001463, TRACH2001474, TRACH2001523, TRACH2001525, TRACH2001532, TRACH2001549, TRACH2001592, TRACH2001596, TRACH2001612, TRACH2001621, TRACH2001646, TRACH2001651, TRACH2001684, TRACH2001933, TRACH2001968, TRACH2001996, TRACH2002043, TRACH2002054, TRACH2002100, TRACH2002138, TRACH2002333, TRACH2002537, TRACH2002664, TRACH2002784, TRACH2002803, TRACH2002840, TRACH2002847, TRACH2002853, TRACH2002862, TRACH2002954, TRACH2002960, TRACH2002988, TRACH2003070, TRACH2003272, TRACH2003323, TRACH2003347, TRACH2003484, TRACH2003516, TRACH2003605, TRACH2003736, TRACH2003759, TRACH2003941, TRACH2004039, TRACH2004054, TRACH2004087, TRACH2004109, TRACH2004170, TRACH2004183, TRACH2004251, TRACH2004292, TRACH2004336, TRACH2004399, TRACH2004428, TRACH2004458, TRACH2004521, TRACH2004570, TRACH2004845, TRACH2004887, TRACH2004950, TRACH2005004, TRACH2005017, TRACH2005066, TRACH2005159, TRACH2005314, TRACH2005444, TRACH2005541, TRACH2005666, TRACH2005698, TRACH2005710, TRACH2005720, TRACH2005769, TRACH2005796, TRACH2005811, TRACH2006015, TRACH2006049, TRACH2006097, TRACH2006194, TRACH2006327, TRACH2006331, TRACH2006378, TRACH2006387, TRACH2006528, TRACH2006670, TRACH2006762, TRACH2006866, TRACH2006870, TRACH2006918, TRACH2007059, TRACH2007324, TRACH2007358, TRACH2007399, TRACH2007483, TRACH2007542, TRACH2007577, TRACH2007674, TRACH2007676, TRACH2007688, TRACH2007733, TRACH2007754, TRACH2007816, TRACH2007894, TRACH2007969, TRACH2007988, TRACH2008081, TRACH2008112, TRACH2008113, TRACH2008127, TRACH2008130, TRACH2008278, TRACH2008300, TRACH2008472, TRACH2008478, TRACH2008540, TRACH2008583, TRACH2008597, TRACH2008716, TRACH2008820, TRACH2008891, TRACH2008921, TRACH2009006, TRACH2009060, TRACH2009107, TRACH2009123, TRACH2009268, TRACH2009291, TRACH2009310, TRACH2009340, TRACH2009348, TRACH2009358, TRACH2009661, TRACH2009730, TRACH2009743, TRACH2009754, TRACH2009851, TRACH2009862, TRACH2009934, TRACH2010159, TRACH2010218, TRACH2010251, TRACH2010272, TRACH2010317, TRACH2010419, TRACH2010451, TRACH2010505, TRACH2010587, TRACH2010600, TRACH2010634, TRACH2010639, TRACH2010677, TRACH2010698, TRACH2010771, TRACH2010824, TRACH2010883, TRACH2010965, TRACH2010974, TRACH2011057, TRACH2011093, TRACH2011113, TRACH2011290, TRACH2011293, TRACH2011302, TRACH2011500, TRACH2011574, TRACH2011894, TRACH2011956, TRACH2012000, TRACH2012138, TRACH2012242, TRACH2012370, TRACH2012376, TRACH2012387, TRACH2012497, TRACH2012536, TRACH2012562, TRACH2012742, TRACH2012811, TRACH2012823, TRACH2012918, TRACH2013081, TRACH2013123, TRACH2013265, TRACH2013369, TRACH2013450, TRACH2013495, TRACH2013552, TRACH2013585, TRACH2013671, TRACH2013726, TRACH2013902, TRACH2013928, TRACH2013982, TRACH2013991, TRACH2014018, TRACH2014045, TRACH2014046, TRACH2014077, TRACH2014082, TRACH2014124, TRACH2014268, TRACH2014284, TRACH2014337, TRACH2014356, TRACH2014371, TRACH2014442, TRACH2014483, TRACH2014495, TRACH2014544, TRACH2014573, TRACH2014725, TRACH2014760, TRACH2014815, TRACH2014839, TRACH2014938, TRACH2014950, TRACH2014972, TRACH2014974, TRACH2014997, TRACH2015180, TRACH2015243, TRACH2015316, TRACH2015381, TRACH2015486, TRACH2015654, TRACH2015823, TRACH2015824, TRACH2015939, TRACH2015987, TRACH2016080, TRACH2016131, TRACH2016286, TRACH2016317, TRACH2016347, TRACH2016380, TRACH2016384, TRACH2016410, TRACH2016481, TRACH2016498, TRACH2016533, TRACH2016551, TRACH2016554, TRACH2016651, TRACH2016690, TRACH2016709, TRACH2016722, TRACH2016835, TRACH2016980, TRACH2017086, TRACH2017368, TRACH2017498, TRACH2017609, TRACH2017949, TRACH2017965, TRACH2017980, TRACH2018034, TRACH2018084, TRACH2018262, TRACH2018273, TRACH2018278, TRACH2018317, TRACH2018345, TRACH2018380, TRACH2018446, TRACH2018449, TRACH2018512, TRACH2018646, TRACH2018663, TRACH2018718, TRACH2018835, TRACH2018882, TRACH2018914, TRACH2018950, TRACH2019024, TRACH2019046, TRACH2019080, TRACH2019151, TRACH2019154, TRACH2019176, TRACH2019248, TRACH2019309, TRACH2019425, TRACH2019473, TRACH2019602, TRACH2019661, TRACH2019672, TRACH2019673, TRACH2019844, TRACH2019879, TRACH2020048, TRACH2020336, TRACH2020525, TRACH2021398, TRACH2021622, TRACH2021635, TRACH2021964, TRACH2022042, TRACH2022113, TRACH2022253, TRACH2022425, TRACH2022553, TRACH2022649, TRACH2022839, TRACH2023246, TRACH2023299, TRACH2023306, TRACH2023416, TRACH2023479, TRACH2023684, TRACH2023860, TRACH2023876, TRACH2024139, TRACH2024187, TRACH2024271, TRACH2024293, TRACH2024408, TRACH2024512, TRACH2024559, TRACH2024647, TRACH2024651, TRACH2024730, TRACH2024735, TRACH2024749, TRACH2024821, TRACH2025057, TRACH2025084, TRACH2025155, TRACH2025224, TRACH2025344, TRACH2025379, TRACH2025507, TRACH2025535, TRACH2025569, TRACH2025705, TRACH2025749, TRACH2025753, TRACH2025810, TRACH2025853, TRACH2025911, TRACH2025932, TRACH3000014, TRACH3000017, TRACH3000043, TRACH3000134, TRACH3000180, TRACH3000342, TRACH3000420, TRACH3000515, TRACH3000530, TRACH3000548, TRACH3000558, TRACH3000586, TRACH3000692, TRACH3000780, TRACH3000892, TRACH3000926, TRACH3001119, TRACH3001443, TRACH3001550, TRACH3001759, TRACH3002064, TRACH3002107, TRACH3002168, TRACH3002188, TRACH3002192, TRACH3002245, TRACH3002293, TRACH3002533, TRACH3002561, TRACH3002567, TRACH3002605, TRACH3002650, TRACH3002752, TRACH3002866, TRACH3002871, TRACH3002876, TRACH3002890, TRACH3003009, TRACH3003037, TRACH3003357, TRACH3003379, TRACH3003547, TRACH3003586, TRACH3003683, TRACH3003780, TRACH3003805, TRACH3003832, TRACH3003872, TRACH3004068, TRACH3004113, TRACH3004288, TRACH3004303, TRACH3004412, TRACH3004424, TRACH3004456, TRACH3004537, TRACH3004596, TRACH3004651, TRACH3004652, TRACH3004671, TRACH3004721, TRACH3004747, TRACH3004760, TRACH3004783, TRACH3004786, TRACH3004840, TRACH3004931, TRACH3004934, TRACH3005072, TRACH3005085, TRACH3005102, TRACH3005173, TRACH3005191, TRACH3005211, TRACH3005274, TRACH3005294, TRACH3005479, TRACH3005549, TRACH3005699, TRACH3005702, TRACH3005808, TRACH3005852, TRACH3005896, TRACH3006038, TRACH3006149, TRACH3006228, TRACH3006264, TRACH3006336, TRACH3006379, TRACH3006392, TRACH3006395, TRACH3006397, TRACH3006412, TRACH3006470, TRACH3006589, TRACH3006626, TRACH3006699, TRACH3006717, TRACH3006800, TRACH3006889, TRACH3006985, TRACH3007097, TRACH3007268, TRACH3007274, TRACH3007277, TRACH3007391, TRACH3007541, TRACH3007595, TRACH3007625, TRACH3007627, TRACH3007689, TRACH3007766, TRACH3007866, TRACH3007995, TRACH3008042, TRACH3008061, TRACH3008093, TRACH3008201, TRACH3008508, TRACH3008535, TRACH3008629, TRACH3008632, TRACH3008688, TRACH3008697, TRACH3008713, TRACH3008887, TRACH3008902, TRACH3008990, TRACH3009001, TRACH3009008, TRACH3009059, TRACH3009061, TRACH3009148, TRACH3009455, TRACH3009701, TRACH3009715, TRACH3009894, TRACH3009956, TRACH3010079, TRACH3010167, TRACH3010331, TRACH3010342, TRACH3010382, TRACH3010757, TRACH3010901, TRACH3011004, TRACH3011082, TRACH3011184, TRACH3011282, TRACH3011313, TRACH3011454, TRACH3011485, TRACH3011503, TRACH3011538, TRACH3011542, TRACH3012106, TRACH3012161, TRACH3012232, TRACH3012261, TRACH3012445, TRACH3012460, TRACH3012659, TRACH3012718, TRACH3012864, TRACH3012891, TRACH3012942, TRACH3013043, TRACH3013072, TRACH3013426, TRACH3013454, TRACH3013558, TRACH3013684, TRACH3013693, TRACH3013700, TRACH3013766, TRACH3013900, TRACH3013926, TRACH3014063, TRACH3014183, TRACH3014215, TRACH3014316, TRACH3014415, TRACH3014580, TRACH3014641, TRACH3014885, TRACH3015136, TRACH3015336, TRACH3015346, TRACH3015354, TRACH3015467, TRACH3015626, TRACH3015951, TRACH3016051, TRACH3016120, TRACH3016264, TRACH3016277, TRACH3016368, TRACH3016455, TRACH3016614, TRACH3016805, TRACH3016992, TRACH3017171, TRACH3017409, TRACH3017934, TRACH3018108, TRACH3018191, TRACH3018240, TRACH3018261, TRACH3018519, TRACH3018524, TRACH3018606, TRACH3018783, TRACH3018907, TRACH3018933, TRACH3018943, TRACH3019018, TRACH3019058, TRACH3019142, TRACH3019290, TRACH3019347, TRACH3019370, TRACH3019447, TRACH3019598, TRACH3019621, TRACH3019662, TRACH3019807, TRACH3019924, TRACH3019977, TRACH3020137, TRACH3020410, TRACH3020563, TRACH3020605, TRACH3020750, TRACH3020769, TRACH3020928, TRACH3020930, TRACH3021023, TRACH3021066, TRACH3021212, TRACH3021335, TRACH3021373, TRACH3021544, TRACH3021778, TRACH3021834, TRACH3021883, TRACH3022170, TRACH3022198, TRACH3022296, TRACH3022482, TRACH3022732, TRACH3022758, TRACH3022875, TRACH3022910, TRACH3022960, TRACH3023063, TRACH3023203, TRACH3023242, TRACH3023373, TRACH3023516, TRACH3023752, TRACH3023945, TRACH3023960, TRACH3024020, TRACH3024081, TRACH3024342, TRACH3024423, TRACH3024428, TRACH3024512, TRACH3024671, TRACH3024823, TRACH3025302, TRACH3025316, TRACH3025346, TRACH3025520, TRACH3026148, TRACH3026283, TRACH3026299, TRACH3026303, TRACH3026542, TRACH3026650, TRACH3026676, TRACH3026744, TRACH3026949, TRACH3027527, TRACH3027681, TRACH3027701, TRACH3027885, TRACH3028031, TRACH3028164, TRACH3028180, TRACH3028195, TRACH3028441, TRACH3028597, TRACH3028678, TRACH3028837, TRACH3028847, TRACH3028855, TRACH3029139, TRACH3029329, TRACH3029451, TRACH3029462, TRACH3029520, TRACH3029592, TRACH3029629, TRACH3029665, TRACH3029670, TRACH3029800, TRACH3030111, TRACH3030130, TRACH3030176, TRACH3030252, TRACH3030725, TRACH3030855, TRACH3030883, TRACH3031316, TRACH3031400, TRACH3031463, TRACH3031479, TRACH3031518, TRACH3031660, TRACH3031678, TRACH3031936, TRACH3032044, TRACH3032065, TRACH3032150, TRACH3032372, TRACH3032480, TRACH3032570, TRACH3032755, TRACH3032827, TRACH3032873, TRACH3033535, TRACH3033680, TRACH3033868, TRACH3034145, TRACH3034414, TRACH3034488, TRACH3034680, TRACH3034731, TRACH3034745, TRACH3034762, TRACH3034903, TRACH3035187, TRACH3035199, TRACH3035235, TRACH3035451, TRACH3035482, TRACH3035526, TRACH3036004, TRACH3036103, TRACH3036193, TRACH3036207, TRACH3036278, TRACH3036309, TRACH3036456, TRACH3036609, TRACH3036638, TRACH3036683, TRACH3036750, TRACH3036792, TRACH3036843, TRACH3036897, TRACH3036932, TRACH3036942, TRACH3036997, TRACH3037063, TRACH3037067, TRACH3037267, TRACH3037288, TRACH3037505, TRACH3037573, TRACH3037696, TRACH3037897, TRACH3038086, TRACH3038399, TSTOM1000135, TSTOM1000186, TSTOM2000139, TSTOM2000235, TSTOM2000315, TSTOM2000442, TSTOM2000553, TSTOM2000569, TSTOM2000588, TSTOM2001195, TSTOM2001274, TSTOM2001571, TSTOM2001996, TSTOM2002265, TSTOM2002505, TSTOM2002561, TSTOM2002611, TSTOM2002672, TSTOM2002682, TUTER1000014, TUTER1000122, TUTER1000137, TUTER2000057, TUTER2000283, TUTER2000425, TUTER2000904, TUTER2000916, TUTER2001286, TUTER2001341, TUTER2001387, TUTER2001433, TUTER2001461, TUTER2002028, TUTER2002074, TUTER2002158, TUTER2002228, TUTER2002323, TUTER2002356, TUTER2002729, UMVEN1000122, UMVEN1000143, UMVEN1000156, UMVEN2000046, UMVEN2000069, UMVEN2000121, UMVEN2000152, UMVEN2000354, UMVEN2000453, UTERU1000008, UTERU1000015, UTERU1000024, UTERU1000031, UTERU1000032, UTERU1000057, UTERU1000065, UTERU1000077, UTERU1000093, UTERU1000096, UTERU1000106, UTERU1000109, UTERU1000131, UTERU1000138, UTERU1000148, UTERU1000160, UTERU1000182, UTERU1000183, UTERU1000187, UTERU1000192, UTERU1000249, UTERU1000337, UTERU1000339, UTERU1000384, UTERU2000023, UTERU2000047, UTERU2000074, UTERU2000099, UTERU2000154, UTERU2000197, UTERU2000218, UTERU2000238, UTERU2000243, UTERU2000260, UTERU2000300, UTERU2000329, UTERU2000332, UTERU2000338, UTERU2000349, UTERU2000377, UTERU2000393, UTERU2000418, UTERU2000424, UTERU2000465, UTERU2000485, UTERU2000517, UTERU2000524, UTERU2000537, UTERU2000539, UTERU2000541, UTERU2000542, UTERU2000546, UTERU2000550, UTERU2000569, UTERU2000607, UTERU2000629, UTERU2000649, UTERU2000663, UTERU2000696, UTERU2000794, UTERU2000830, UTERU2000844, UTERU2000922, UTERU2000925, UTERU2001024, UTERU2001110, UTERU2001176, UTERU2001281, UTERU2001389, UTERU2001409, UTERU2001412, UTERU2001504, UTERU2001658, UTERU2001747, UTERU2001876, UTERU2002001, UTERU2002011, UTERU2002176, UTERU2002198, UTERU2002332, UTERU2002410, UTERU2002473, UTERU2002547, UTERU2002693, UTERU2002733, UTERU2002736, UTERU2002737, UTERU2002826, UTERU2002841, UTERU2002964, UTERU2002993, UTERU2003035, UTERU2003057, UTERU2003126, UTERU2003135, UTERU2003321, UTERU2003399, UTERU2003411, UTERU2003456, UTERU2003577, UTERU2003704, UTERU2003926, UTERU2003973, UTERU2004015, UTERU2004037, UTERU2004039, UTERU2004061, UTERU2004073, UTERU2004163, UTERU2004197, UTERU2004299, UTERU2004461, UTERU2004520, UTERU2004564, UTERU2004664, UTERU2004688, UTERU2004698, UTERU2004807, UTERU2004861, UTERU2004929, UTERU2005004, UTERU2005050, UTERU2005069, UTERU2005074, UTERU2005179, UTERU2005292, UTERU2005346, UTERU2005354, UTERU2005446, UTERU2005449, UTERU2005450, UTERU2005533, UTERU2005601, UTERU2005664, UTERU2005822, UTERU2005903, UTERU2005905, UTERU2006103, UTERU2006115, UTERU2006137, UTERU2006182, UTERU2006400, UTERU2006412, UTERU2006429, UTERU2006486, UTERU2006524, UTERU2006547, UTERU2006568, UTERU2006593, UTERU2006643, UTERU2006651, UTERU2006705, UTERU2006899, UTERU2007004, UTERU2007075, UTERU2007081, UTERU2007128, UTERU2007267, UTERU2007444, UTERU2007499, UTERU2007639, UTERU2007724, UTERU2007924, UTERU2007942, UTERU2008018, UTERU2008019, UTERU2008027, UTERU2008040, UTERU2008077, UTERU2008130, UTERU2008347, UTERU2008426, UTERU2008516, UTERU2008561, UTERU2008653, UTERU2008705, UTERU2008707, UTERU2008747, UTERU2008785, UTERU2008845, UTERU2008901, UTERU2008930, UTERU2008938, UTERU2008939, UTERU2008962, UTERU2009094, UTERU2009120, UTERU2009131, UTERU2009147, UTERU2009206, UTERU2009283, UTERU2009335, UTERU2009414, UTERU2009435, UTERU2009483, UTERU2009510, UTERU2009538, UTERU2009540, UTERU2009776, UTERU2009904, UTERU2009951, UTERU2009972, UTERU2010115, UTERU2010124, UTERU2010164, UTERU2010226, UTERU2010231, UTERU2010304, UTERU2010320, UTERU2010431, UTERU2010525, UTERU2010651, UTERU2010724, UTERU2010747, UTERU2011195, UTERU2011199, UTERU2011261, UTERU2011287, UTERU2011410, UTERU2011574, UTERU2011621, UTERU2011657, UTERU2011741, UTERU2011806, UTERU2011811, UTERU2011897, UTERU2011906, UTERU2011962, UTERU2011968, UTERU2012031, UTERU2012101, UTERU2012114, UTERU2012230, UTERU2012252, UTERU2012286, UTERU2012333, UTERU2012407, UTERU2012526, UTERU2012581, UTERU2012610, UTERU2012615, UTERU2012688, UTERU2012703, UTERU2012715, UTERU2012741, UTERU2012767, UTERU2012786, UTERU2012856, UTERU2012890, UTERU2012938, UTERU2012976, UTERU2013048, UTERU2013078, UTERU2013231, UTERU2013262, UTERU2013280, UTERU2013322, UTERU2013483, UTERU2013491, UTERU2013502, UTERU2013586, UTERU2013926, UTERU2013976, UTERU2014001, UTERU2014024, UTERU2014167, UTERU2014223, UTERU2014398, UTERU2014464, UTERU2014548, UTERU2014601, UTERU2014631, UTERU2014668, UTERU2014678, UTERU2014728, UTERU2014898, UTERU2014998, UTERU2015062, UTERU2015087, UTERU2015190, UTERU2015198, UTERU2015202, UTERU2015405, UTERU2015640, UTERU2015653, UTERU2015830, UTERU2015880, UTERU2016147, UTERU2016157, UTERU2016426, UTERU2016464, UTERU2016669, UTERU2016757, UTERU2016761, UTERU2016799, UTERU2016822, UTERU2016896, UTERU2016902, UTERU2016979, UTERU2016981, UTERU2017123, UTERU2017303, UTERU2017421, UTERU2017492, UTERU2017613, UTERU2017623, UTERU2017632, UTERU2017761, UTERU2017762, UTERU2017810, UTERU2017988, UTERU2018127, UTERU2018180, UTERU2018200, UTERU2018333, UTERU2018364, UTERU2018514, UTERU2018522, UTERU2018523, UTERU2018544, UTERU2018609, UTERU2018674, UTERU2018712, UTERU2018784, UTERU2018789, UTERU2018811, UTERU2018867, UTERU2018881, UTERU2018884, UTERU2018955, UTERU2019038, UTERU2019096, UTERU2019163, UTERU2019257, UTERU2019453, UTERU2019491, UTERU2019534, UTERU2019681, UTERU2019706, UTERU2019710, UTERU2019940, UTERU2019959, UTERU2019964, UTERU2020226, UTERU2020242, UTERU2020292, UTERU2020351, UTERU2020491, UTERU2020718, UTERU2021163, UTERU2021380, UTERU2021649, UTERU2021820, UTERU2022020, UTERU2022773, UTERU2022955, UTERU2022981, UTERU2023039, UTERU2023045, UTERU2023175, UTERU2023262, UTERU2023550, UTERU2023651, UTERU2023687, UTERU2023712, UTERU2023941, UTERU2024002, UTERU2024042, UTERU2024141, UTERU2024481, UTERU2024656, UTERU2024758, UTERU2024820, UTERU2024881, UTERU2024969, UTERU2025025, UTERU2025041, UTERU2025301, UTERU2025366, UTERU2025415, UTERU2025579, UTERU2025645, UTERU2025891, UTERU2026025, UTERU2026090, UTERU2026142, UTERU2026203, UTERU2026775, UTERU2027023, UTERU2027369, UTERU2027591, UTERU2027616, UTERU2027941, UTERU2028377, UTERU2028734, UTERU2029503, UTERU2029660, UTERU2029742, UTERU2029953, UTERU2030213, UTERU2030270, UTERU2030280, UTERU2031060, UTERU2031084, UTERU2031268, UTERU2031295, UTERU2031521, UTERU2031611, UTERU2031703, UTERU2031834, UTERU2031851, UTERU2032075, UTERU2032220, UTERU2032279, UTERU2032726, UTERU2033172, UTERU2033375, UTERU2033382, UTERU2033420, UTERU2033530, UTERU2033577, UTERU2034053, UTERU2034147, UTERU2034695, UTERU2035114, UTERU2035187, UTERU2035231, UTERU2035306, UTERU2035323, UTERU2035328, UTERU2035331, UTERU2035452, UTERU2035469, UTERU2035503, UTERU2035745, UTERU2035908, UTERU2035926, UTERU2035978, UTERU2036089, UTERU2036347, UTERU2036507, UTERU2036512, UTERU2036530, UTERU2036623, UTERU2036690, UTERU2037224, UTERU2037361, UTERU2037423, UTERU2037577, UTERU2037674, UTERU2037791, UTERU2037843, UTERU2038171, UTERU2038251, UTERU3000226, UTERU3000298, UTERU3000402, UTERU3000645, UTERU3000665, UTERU3000670, UTERU3000727, UTERU3000738, UTERU3000828, UTERU3000844, UTERU3000899, UTERU3000959, UTERU3001029, UTERU3001053, UTERU3001059, UTERU3001158, UTERU3001240, UTERU3001394, UTERU3001542, UTERU3001558, UTERU3001571, UTERU3001585, UTERU3001632, UTERU3001652, UTERU3001766, UTERU3001988, UTERU3002209, UTERU3002218, UTERU3002383, UTERU3002600, UTERU3002620, UTERU3002667, UTERU3002701, UTERU3002731, UTERU3002768, UTERU3002786, UTERU3002993, UTERU3003116, UTERU3003135, UTERU3003178, UTERU3003465, UTERU3003495, UTERU3003523, UTERU3003660, UTERU3003774, UTERU3003776, UTERU3004384, UTERU3004418, UTERU3004477, UTERU3004523, UTERU3004616, UTERU3004635, UTERU3004709, UTERU3004938, UTERU3004992, UTERU3005049, UTERU3005159, UTERU3005205, UTERU3005230, UTERU3005264, UTERU3005422, UTERU3005460, UTERU3005536, UTERU3005585, UTERU3005767, UTERU3005907, UTERU3005970, UTERU3006008, UTERU3006228, UTERU3006308, UTERU3006538, UTERU3006640, UTERU3006687, UTERU3006720, UTERU3006798, UTERU3006884, UTERU3007021, UTERU3007104, UTERU3007108, UTERU3007134, UTERU3007419, UTERU3007640, UTERU3007731, UTERU3007913, UTERU3008280, UTERU3008463, UTERU3008660, UTERU3008671, UTERU3008722, UTERU3008917, UTERU3009259, UTERU3009490, UTERU3009517, UTERU3009690, UTERU3009775, UTERU3009871, UTERU3009979, UTERU3009987, UTERU3010029, UTERU3010409, UTERU3010526, UTERU3010604, UTERU3010892, UTERU3010919, UTERU3011063, UTERU3011092, UTERU3011273, UTERU3011398, UTERU3011558, UTERU3011579, UTERU3011795, UTERU3011837, UTERU3012293, UTERU3012414, UTERU3012476, UTERU3012599, UTERU3012999, UTERU3013167, UTERU3013302, UTERU3013781, UTERU3014274, UTERU3014446, UTERU3014611, UTERU3014647, UTERU3014791, UTERU3014906, UTERU3015011, UTERU3015086, UTERU3015299, UTERU3015412, UTERU3015500, UTERU3015647, UTERU3015844, UTERU3016070, UTERU3016273, UTERU3016274, UTERU3016308, UTERU3016789, UTERU3017176, UTERU3017441, UTERU3017626, UTERU3017995, UTERU3018154, UTERU3018172, UTERU3018255, UTERU3018616, UTERU3018711, UTERU3019078

[0693] Of the 17,176 genes that include the cDNAs of the present invention, genes whose expression levels were high enough to detect in each of the NCRRM, NCRRP, NESOP, NETRP, NHNPC, and NOVAR libraries were analyzed for expression frequency. The analysis results are described below. Each is a relative value, where the expression level over all tissues is taken as 100. The larger this value, the greater the level of expression.

TABLE 34

| Clone Name | NCRRM | NCRRP | NESOP | NETRP | NHNPC | NOVAR |
|---|---|---|---|---|---|---|
| 3NB692000281 | 0 | 0 | 4.684 | 0 | 5.492 | 0 |
| 3NB692000374 | 0 | 0 | 0 | 0 | 27.059 | 0 |
| 3NB692000912 | 0 | 0 | 0 | 0 | 11.723 | 0 |
| 3NB692001334 | 0 | 0 | 0 | 5.204 | 6.697 | 0 |
| 3NB692001339 | 0 | 0 | 49.901 | 0 | 0 | 0 |
| ADRGL2000006 | 0 | 0 | 0 | 0 | 0 | 24.778 |
| ADRGL2009273 | 0 | 0 | 29.556 | 0 | 0 | 0 |
| ASTRO1000096 | 0 | 0 | 0 | 65.097 | 0 | 0 |
| ASTRO2000014 | 0 | 35.063 | 0 | 0 | 0 | 0 |
| ASTRO2000801 | 86.606 | 0 | 0 | 0 | 0 | 0 |
| ASTRO2002202 | 0 | 0 | 0 | 0 | 0 | 54.926 |
| ASTRO2007047 | 0 | 0 | 0 | 0 | 52.143 | 0 |
| ASTRO2008216 | 0 | 0 | 0 | 20.620 | 0 | 0 |
| ASTRO2008508 | 0 | 0 | 0 | 58.115 | 0 | 0 |
| ASTRO2016491 | 0 | 0 | 0 | 3.254 | 0 | 0 |
| BGGI12000054 | 0 | 0 | 5.011 | 1.522 | 0 | 0 |
| BGGI12000616 | 0 | 0 | 0 | 0 | 0 | 21.310 |
| BLADE2002744 | 0 | 0 | 0 | 15.772 | 0 | 0 |
| BNGH42000360 | 0 | 0 | 0 | 0 | 0 | 3.749 |
| BNGH42007709 | 0 | 0 | 0 | 1.487 | 5.743 | 0 |
| BRACE1000131 | 0 | 0 | 0 | 0 | 25.988 | 0 |
| BRACE2001692 | 0 | 0 | 12.883 | 0 | 0 | 0 |
| BRACE2002677 | 0 | 0 | 0 | 12.475 | 0 | 0 |
| BRACE2002685 | 0 | 0 | 72.930 | 0 | 0 | 0 |
| BRACE2003172 | 0 | 0 | 0 | 0 | 0 | 7.746 |
| BRACE2003827 | 0 | 0 | 0 | 0 | 0 | 20.882 |
| BRACE2005433 | 0 | 0 | 0 | 74.625 | 0 | 0 |
| BRACE2005875 | 0 | 0 | 91.597 | 0 | 0 | 0 |
| BRACE2006344 | 0 | 0 | 76.055 | 0 | 0 | 0 |
| BRACE2006397 | 0 | 0 | 0 | 0 | 7.365 | 0 |
| BRACE2006900 | 0 | 0 | 0 | 3.325 | 0 | 0 |
| BRACE2007109 | 0 | 0 | 20.309 | 0 | 0 | 0 |
| BRACE2008097 | 0 | 0 | 0 | 31.024 | 0 | 0 |
| BRACE2008385 | 0 | 0 | 0 | 53.984 | 0 | 0 |
| BRACE2009517 | 0 | 0 | 0 | 17.526 | 0 | 0 |
| BRACE2016335 | 0 | 0 | 0 | 90.103 | 0 | 0 |
| BRACE2044949 | 0 | 0 | 0 | 0 | 97.234 | 0 |
| BRACE3019941 | 0 | 0 | 0 | 0 | 72.896 | 0 |
| BRALZ2009482 | 0 | 31.729 | 0 | 0 | 0 | 8.857 |
| BRAMY2006397 | 0 | 0 | 0 | 18.146 | 0 | 0 |
| BRAMY2020427 | 0 | 0 | 0 | 0 | 0 | 14.113 |
| BRAMY2023719 | 0 | 0 | 0 | 38.634 | 0 | 0 |
| BRAMY2027739 | 0 | 0 | 0 | 0 | 33.576 | 0 |
| BRAMY2036387 | 0 | 0 | 0 | 86.510 | 0 | 0 |
| BRAMY2040095 | 0 | 0 | 0 | 15.462 | 0 | 8.147 |
| BRAMY2047420 | 0 | 0 | 21.553 | 0 | 0 | 0 |
| BRAWH1000040 | 0 | 0 | 0 | 0 | 17.168 | 0 |
| BRAWH1000093 | 0 | 0 | 0 | 11.921 | 0 | 0 |
| BRAWH2000588 | 0 | 0 | 0 | 8.107 | 0 | 0 |
| BRAWH2001092 | 0 | 0 | 0 | 0 | 4.385 | 0 |
| BRAWH2007800 | 0 | 0 | 0 | 30.357 | 0 | 0 |
| BRAWH2008577 | 0 | 0 | 0 | 22.974 | 0 | 0 |
| BRAWH2009490 | 0 | 0 | 0 | 0 | 84.417 | 0 |
| BRAWH2012161 | 0 | 0 | 81.923 | 0 | 0 | 0 |
| BRAWH2016269 | 0 | 0 | 0 | 0 | 32.893 | 0 |
| BRAWH2017685 | 0 | 0 | 0 | 0 | 25.325 | 0 |
| BRAWH2018526 | 26.126 | 0 | 0 | 0 | 23.035 | 0 |
| BRAWH3002853 | 0 | 0 | 0 | 4.780 | 0 | 0 |
| BRCAN2009432 | 0 | 0 | 0 | 8.509 | 0 | 0 |
| BRHIP2000534 | 0 | 0 | 0 | 8.847 | 0 | 8.158 |
| BRHIP2010593 | 0 | 0 | 0 | 0 | 0 | 83.465 |
| BRHIP2011491 | 0 | 0 | 0 | 0 | 0 | 19.701 |
| BRHIP2019186 | 0 | 0 | 0 | 0 | 0 | 47.038 |
| BRHIP3007223 | 0 | 0 | 42.899 | 0 | 0 | 0 |
| BRHIP3009753 | 98.813 | 0 | 0 | 0 | 0 | 0 |
| BRHIP3018784 | 0 | 0 | 0 | 67.175 | 0 | 0 |
| BRSSN2015238 | 0 | 0 | 0 | 22.121 | 0 | 0 |
| BRSTN1000083 | 0 | 54.516 | 0 | 0 | 0 | 0 |
| BRSTN2012069 | 0 | 0 | 1.409 | 0 | 0.472 | 5.861 |
| BRSTN2012174 | 0 | 0 | 0 | 0 | 5.046 | 14.462 |
| CTONG1000010 | 0 | 0 | 0 | 41.893 | 0 | 0 |
| CTONG1000052 | 0 | 0 | 0 | 3.904 | 0 | 0 |
| CTONG1000094 | 33.063 | 0 | 0 | 0 | 0 | 0 |
| CTONG1000218 | 0 | 0 | 0 | 3.111 | 0 | 0 |
| CTONG2002744 | 0 | 0 | 12.530 | 0 | 0 | 0 |
| CTONG2007500 | 0 | 0 | 0 | 4.860 | 0 | 0 |
| CTONG2012452 | 0 | 0 | 0 | 0 | 8.885 | 0 |
| CTONG2015091 | 0 | 0 | 0 | 0 | 20.262 | 0 |
| CTONG2016185 | 0 | 0 | 0 | 16.799 | 0 | 0 |
| CTONG2017604 | 0 | 0 | 0 | 77.625 | 0 | 0 |
| CTONG2019788 | 0 | 0 | 0 | 0 | 0 | 72.878 |
| CTONG2028124 | 0 | 0 | 0 | 9.743 | 0 | 0 |
| CTONG2028208 | 0 | 0 | 0 | 22.882 | 0 | 0 |
| CTONG3002412 | 0 | 0 | 0 | 69.150 | 0 | 0 |
| CTONG3008894 | 0 | 0 | 0 | 4.697 | 0 | 0 |
| CTONG3009028 | 0 | 0 | 0 | 20.798 | 0 | 0 |
| D30ST3000169 | 0 | 0 | 0 | 3.162 | 0 | 0 |
| D90ST2003762 | 0 | 0 | 0 | 14.084 | 0 | 0 |
| DFNES2000268 | 0 | 0 | 0 | 14.271 | 0 | 0 |
| DFNES2000443 | 57.628 | 0 | 0 | 0 | 0 | 0 |
| FCBBF1000294 | 0 | 0 | 0 | 6.957 | 0 | 0 |
| FCBBF2000087 | 0 | 0 | 61.380 | 0 | 0 | 0 |
| FCBBF3001470 | 0 | 0 | 28.883 | 0 | 0 | 0 |
| FCBBF3003800 | 0 | 0 | 0 | 0 | 9.828 | 0 |
| FCBBF3004041 | 0 | 0 | 0 | 0 | 93.106 | 0 |
| FCBBF3009541 | 0 | 35.198 | 0 | 0 | 0 | 0 |
| FEBRA2000733 | 0 | 0 | 0 | 1.089 | 0 | 0 |
| FEBRA2001715 | 0 | 0 | 0 | 0 | 24.879 | 0 |
| FEBRA2001745 | 0 | 0 | 0 | 0 | 31.268 | 29.870 |
| FEBRA2002933 | 0 | 31.597 | 0 | 0 | 0 | 0 |
| FEBRA2003100 | 55.911 | 0 | 0 | 0 | 0 | 0 |
| FEBRA2003541 | 0 | 0 | 0 | 0 | 38.072 | 0 |
| FEBRA2003726 | 84.540 | 0 | 0 | 0 | 0 | 0 |
| FEBRA2003930 | 0 | 0 | 38.240 | 0 | 0 | 0 |
| FEBRA2005734 | 0 | 0 | 0 | 5.456 | 21.067 | 0 |
| FEBRA2008087 | 0 | 0 | 0 | 0 | 0 | 4.272 |
| FEBRA2008583 | 0 | 0 | 0 | 0 | 6.596 | 0 |
| FEBRA2009437 | 0 | 0 | 0 | 0 | 90.916 | 0 |
| FEBRA2013570 | 0 | 0 | 0 | 72.161 | 0 | 0 |
| FEBRA2018476 | 0 | 0 | 0 | 7.060 | 0 | 0 |
| FEBRA2019711 | 0 | 0 | 0 | 13.664 | 0 | 0 |
| FELIV1000153 | 0 | 0 | 3.509 | 0 | 0 | 3.931 |
| HCHON2000056 | 0 | 0 | 0 | 5.498 | 7.077 | 0 |
| HCHON2000087 | 0 | 0 | 0 | 3.998 | 0 | 0 |
| HCHON2000295 | 0 | 0 | 27.959 | 0 | 0 | 0 |
| HCHON2000815 | 0 | 0 | 0 | 18.046 | 0 | 0 |
| HCHON2001359 | 0 | 0 | 0 | 5.501 | 0 | 0 |
| HCHON2004002 | 0 | 0 | 0 | 5.073 | 0 | 0 |
| HEART1000173 | 0 | 0 | 0 | 0 | 65.485 | 0 |
| HHDPC1000114 | 0 | 0 | 15.460 | 0 | 0 | 0 |
| HHDPC2000104 | 0 | 0 | 0 | 0 | 0 | 44.094 |
| HHDPC2000456 | 0 | 0 | 0 | 10.033 | 0 | 0 |
| HHDPC2003439 | 0 | 0 | 0 | 1.643 | 0 | 0 |
| HHDPC2003983 | 0 | 0 | 0 | 0 | 0 | 6.637 |
| HLUNG2000501 | 0 | 0 | 18.252 | 0 | 0 | 0 |
| HLUNG2001439 | 74.869 | 0 | 0 | 0 | 0 | 0 |
| HLUNG2002465 | 0 | 0 | 0 | 31.261 | 0 | 0 |
| HLUNG2003778 | 0 | 0 | 0 | 33.333 | 0 | 0 |
| HLUNG2013784 | 0 | 0 | 0 | 0 | 87.184 | 0 |
| HLUNG2017546 | 0 | 0 | 0 | 0 | 0 | 84.114 |
| HSYRA1000119 | 0 | 0 | 0 | 0 | 11.472 | 0 |
| HSYRA2000159 | 0 | 0 | 0 | 5.454 | 0 | 0 |
| HSYRA2001225 | 62.759 | 0 | 0 | 0 | 0 | 0 |
| HSYRA2001476 | 0 | 0 | 0 | 6.239 | 0 | 0 |
| HSYRA2001595 | 0 | 0 | 0 | 0 | 14.213 | 0 |
| HSYRA2001621 | 0 | 0 | 3.904 | 0 | 0 | 0 |
| IMR321000210 | 0 | 0 | 0 | 0 | 0 | 24.159 |
| IMR321000219 | 0 | 0 | 0 | 1.814 | 0 | 0 |
| IMR321000253 | 0 | 0 | 0 | 0 | 25.412 | 0 |
| IMR322000121 | 0 | 0 | 0 | 14.407 | 27.814 | 0 |
| IMR322000223 | 0 | 0 | 0 | 0 | 16.987 | 16.228 |
| IMR322001218 | 0 | 0 | 0 | 0 | 27.932 | 26.683 |
| IMR322001600 | 13.670 | 0 | 0 | 0 | 0 | 0 |
| KIDNE2001467 | 0 | 22.254 | 0 | 0 | 6.503 | 0 |
| KIDNE2003941 | 0 | 0 | 0 | 0 | 12.585 | 0 |
| KIDNE2007328 | 0 | 0 | 0 | 5.717 | 0 | 0 |
| KIDNE2007352 | 0 | 0 | 0 | 2.686 | 0 | 9.908 |
| KIDNE2007944 | 0 | 0 | 0 | 64.955 | 0 | 0 |
| KIDNE2012440 | 0 | 0 | 0 | 0 | 44.165 | 0 |
| KIDNE2014290 | 0 | 0 | 0 | 9.060 | 0 | 0 |
| LIVER1000132 | 0 | 0 | 0 | 0 | 0 | 11.927 |
| MAMGL1000032 | 0 | 0 | 0 | 2.082 | 0 | 3.840 |
| MESAN2000267 | 0 | 0 | 0 | 0 | 10.217 | 0 |
| MESAN2002724 | 0 | 0 | 0 | 5.959 | 0 | 0 |
| MESAN2003622 | 0 | 0 | 0 | 0 | 0 | 14.324 |
| MESAN2006563 | 0 | 0 | 0 | 0 | 34.458 | 0 |
| MESAN2017373 | 0 | 0 | 0 | 0 | 0 | 83.483 |
| NB9N42000342 | 0 | 0 | 0 | 4.659 | 0 | 0 |
| NCRRP1000129 | 0 | 100 | 0 | 0 | 0 | 0 |
| NESOP1000010 | 0 | 0 | 100 | 0 | 0 | 0 |
| NESOP1000087 | 0 | 0 | 85.774 | 0 | 0 | 0 |
| NESOP1000108 | 0 | 0 | 100 | 0 | 0 | 0 |
| NESOP2000231 | 0 | 0 | 100 | 0 | 0 | 0 |
| NESOP2000452 | 0 | 0 | 100 | 0 | 0 | 0 |
| NESOP2000499 | 0 | 0 | 100 | 0 | 0 | 0 |
| NESOP2000504 | 0 | 0 | 96.229 | 0 | 0 | 0 |
| NESOP2000744 | 0 | 0 | 100 | 0 | 0 | 0 |
| NESOP2001144 | 0 | 0 | 100 | 0 | 0 | 0 |
| NESOP2001433 | 0 | 0 | 100 | 0 | 0 | 0 |
| NESOP2001656 | 0 | 0 | 85.181 | 0 | 0 | 0 |
| NESOP2001694 | 0 | 0 | 100 | 0 | 0 | 0 |
| NESOP2001752 | 0 | 0 | 96.772 | 0 | 0 | 0 |
| NESOP2002352 | 0 | 0 | 100 | 0 | 0 | 0 |
| NESOP2002418 | 0 | 0 | 100 | 0 | 0 | 0 |
| NESOP2002487 | 0 | 0 | 100 | 0 | 0 | 0 |
| NESOP2002738 | 0 | 0 | 100 | 0 | 0 | 0 |
| NESOP2002780 | 0 | 0 | 100 | 0 | 0 | 0 |
| NETRP1000034 | 0 | 0 | 0 | 100 | 0 | 0 |
| NETRP1000082 | 0 | 0 | 0 | 100 | 0 | 0 |
| NETRP2000086 | 0 | 0 | 0 | 100 | 0 | 0 |
| NETRP2000182 | 0 | 0 | 0 | 100 | 0 | 0 |
| NETRP2000439 | 0 | 0 | 0 | 100 | 0 | 0 |
| NHNPC1000034 | 0 | 0 | 0 | 0 | 96.118 | 0 |
| NHNPC1000037 | 0 | 0 | 0 | 0 | 100 | 0 |
| NHNPC1000084 | 0 | 0 | 0 | 0 | 100 | 0 |
| NHNPC1000101 | 0 | 0 | 0 | 0 | 100 | 0 |
| NHNPC1000124 | 0 | 0 | 0 | 0 | 100 | 0 |
| NHNPC2000062 | 0 | 0 | 0 | 0 | 52.287 | 0 |
| NHNPC2000187 | 0 | 0 | 0 | 2.924 | 11.291 | 0 |
| NHNPC2000206 | 0 | 0 | 0 | 4.437 | 17.134 | 0 |
| NHNPC2000212 | 0 | 0 | 0 | 0 | 86.954 | 0 |
| NHNPC2000606 | 0 | 0 | 0 | 0 | 100 | 0 |
| NHNPC2000877 | 0 | 0 | 0 | 0 | 100 | 0 |
| NHNPC2001108 | 0 | 0 | 0 | 0 | 97.447 | 0 |
| NHNPC2001223 | 0 | 0 | 0 | 0 | 93.106 | 0 |
| NHNPC2001312 | 0 | 0 | 0 | 0 | 95.257 | 0 |
| NHNPC2001816 | 0 | 0 | 0 | 0 | 100 | 0 |
| NHNPC2001931 | 0 | 0 | 0 | 0 | 11.907 | 0 |
| NHNPC2002565 | 0 | 0 | 0 | 0 | 100 | 0 |
| NHNPC2002749 | 0 | 0 | 0 | 0 | 100 | 0 |
| NOVAR1000015 | 0 | 0 | 0 | 0 | 0 | 72.374 |
| NOVAR1000091 | 0 | 0 | 0 | 0 | 0 | 46.155 |
| NOVAR1000102 | 0 | 0 | 0 | 0 | 0 | 99.094 |
| NOVAR2000038 | 0 | 0 | 0 | 0 | 0 | 14.805 |
| NOVAR2000136 | 0 | 0 | 0 | 0 | 0 | 100 |
| NOVAR2000352 | 0 | 0 | 0 | 0 | 0 | 100 |
| NOVAR2000412 | 0 | 0 | 0 | 0 | 0 | 100 |
| NOVAR2000710 | 0 | 0 | 0 | 0 | 0 | 83.961 |
| NOVAR2000783 | 0 | 0 | 0 | 0 | 0 | 90.145 |
| NOVAR2000962 | 0 | 0 | 0 | 0 | 0 | 100 |
| NOVAR2001108 | 0 | 0 | 0 | 0 | 0 | 100 |
| NOVAR2001620 | 0 | 0 | 0 | 0 | 0 | 100 |
| NOVAR2001783 | 0 | 0 | 0 | 0 | 0 | 95.973 |
| NOVAR2001876 | 0 | 0 | 0 | 0 | 0 | 100 |
| NOVAR2002039 | 0 | 0 | 0 | 0 | 0 | 96.620 |
| NT2NE2000260 | 0 | 0 | 0 | 3.903 | 3.014 | 0 |
| NT2NE2000575 | 0 | 0 | 5.115 | 0 | 0 | 0 |
| NT2NE2000963 | 0 | 0 | 0 | 0 | 0 | 10.935 |
| NT2NE2001000 | 0 | 0 | 0 | 5.561 | 0 | 0 |
| NT2NE2002870 | 0 | 0 | 0 | 0 | 56.954 | 0 |
| NT2RI2000421 | 0 | 0 | 0 | 0 | 75.923 | 0 |
| NT2RI2000727 | 0 | 0 | 0 | 1.672 | 0 | 0 |
| NT2RI2001230 | 65.484 | 0 | 0 | 0 | 0 | 0 |
| NT2RI2001342 | 0 | 0 | 33.584 | 0 | 0 | 0 |
| NT2RI2001540 | 0 | 0 | 1.211 | 0 | 0 | 2.714 |
| NT2RI2002091 | 0 | 0 | 0 | 0 | 0.669 | 0.639 |
| NT2RI2002316 | 0 | 0 | 17.058 | 5.181 | 0 | 0 |
| NT2RI2003304 | 0 | 0 | 0 | 0 | 6.548 | 0 |
| NT2RI2003481 | 0 | 0 | 41.086 | 0 | 0 | 0 |
| NT2RI2003487 | 0 | 0 | 0 | 0 | 93.211 | 0 |
| NT2RI2003556 | 32.299 | 0 | 0 | 0 | 9.492 | 0 |
| NT2RI2003695 | 0 | 0 | 0 | 5.088 | 0 | 0 |
| NT2RI2003738 | 0 | 0 | 0 | 1.130 | 0 | 0 |
| NT2RI2004284 | 0 | 0 | 0 | 0 | 0 | 38.313 |
| NT2RI2005150 | 0 | 0 | 0 | 0 | 34.386 | 0 |
| NT2RI2005368 | 0 | 0 | 0 | 0 | 0 | 48.158 |
| NT2RI2005814 | 0 | 0 | 0 | 0 | 32.496 | 0 |
| NT2RI2006072 | 64.954 | 0 | 0 | 0 | 0 | 0 |
| NT2RI2006127 | 0 | 0 | 0 | 78.050 | 0 | 0 |
| NT2RI2006271 | 0 | 0 | 0 | 0 | 69.688 | 0 |
| NT2RI2006856 | 0 | 0 | 9.966 | 0 | 0 | 0 |
| NT2RI2007084 | 0 | 0 | 0 | 0 | 27.144 | 0 |
| NT2RI2007133 | 33.304 | 33.495 | 0 | 0 | 0 | 0 |
| NT2RI2007148 | 80.174 | 0 | 0 | 0 | 0 | 0 |
| NT2RI2007384 | 0 | 0 | 9.214 | 0 | 0 | 0 |
| NT2RI2007879 | 0 | 0 | 0 | 10.256 | 0 | 0 |
| NT2RI2007884 | 0 | 0 | 0 | 16.405 | 0 | 0 |
| NT2RI2008622 | 0 | 0 | 0 | 20.392 | 0 | 0 |
| NT2RI2008724 | 0 | 0 | 0 | 11.867 | 0 | 0 |
| NT2RI2008749 | 0 | 0 | 0 | 0 | 14.107 | 0 |
| NT2RI2009194 | 0 | 0 | 0 | 0 | 24.520 | 0 |
| NT2RI2009281 | 0 | 0 | 0 | 0 | 35.116 | 0 |
| NT2RI2017529 | 82.371 | 0 | 0 | 0 | 0 | 0 |
| NT2RP6000005 | 0 | 0 | 0 | 0 | 54.879 | 0 |
| NT2RP6000017 | 0 | 0 | 0 | 0 | 0 | 35.661 |
| NT2RP6000078 | 0 | 0 | 0 | 4.647 | 0 | 0 |
| NT2RP7000076 | 0 | 0 | 0 | 0 | 15.206 | 0 |
| NT2RP7000173 | 0 | 0 | 0 | 0 | 13.871 | 0 |
| NT2RP7001856 | 0 | 0 | 0 | 0 | 85.512 | 0 |
| NT2RP7006490 | 0 | 0 | 0 | 0 | 0 | 51.161 |
| NT2RP7006717 | 0 | 0 | 0 | 4.251 | 0 | 0 |
| NT2RP7007177 | 0 | 0 | 0 | 0 | 33.978 | 0 |
| NT2RP7007530 | 0 | 0 | 0 | 0 | 0 | 52.253 |
| NT2RP7008190 | 0 | 0 | 0 | 0 | 33.097 | 0 |
| NT2RP7009147 | 0 | 0 | 33.894 | 0 | 0 | 0 |
| NT2RP7009482 | 39.344 | 0 | 0 | 2.995 | 0 | 0 |
| NT2RP7009498 | 85.550 | 0 | 0 | 0 | 0 | 0 |
| NT2RP7015503 | 0 | 0 | 0 | 0 | 0 | 75.473 |
| NTONG1000246 | 0 | 0 | 0 | 20.208 | 0 | 0 |
| NTONG1000257 | 0 | 0 | 0 | 56.890 | 0 | 0 |
| NTONG2000334 | 0 | 0 | 0 | 0 | 51.012 | 0 |
| NTONG2000800 | 0 | 0 | 56.331 | 0 | 0 | 0 |
| NTONG2001220 | 0 | 0 | 0 | 37.184 | 0 | 0 |
| NTONG2001222 | 0 | 0 | 35.287 | 0 | 0 | 0 |
| NTONG2001362 | 0 | 0 | 74.273 | 0 | 0 | 0 |
| NTONG2001587 | 0 | 0 | 69.673 | 0 | 0 | 0 |
| NTONG2004844 | 0 | 0 | 0 | 0 | 40.435 | 0 |
| OCBBF2000846 | 0 | 0 | 0 | 4.729 | 0 | 0 |
| OCBBF2000982 | 0 | 0 | 0 | 5.635 | 0 | 0 |
| OCBBF2002086 | 0 | 0 | 0 | 20.818 | 0 | 0 |
| OCBBF2003518 | 87.513 | 0 | 0 | 0 | 0 | 0 |
| OCBBF2003925 | 70.735 | 0 | 0 | 0 | 0 | 0 |
| OCBBF2005428 | 0 | 0 | 0 | 0 | 82.251 | 0 |
| OCBBF2006313 | 0 | 0 | 0 | 36.896 | 0 | 0 |
| OCBBF2007354 | 0 | 0 | 0 | 0 | 25.066 | 0 |
| OCBBF2007415 | 0 | 0 | 0 | 0 | 19.979 | 0 |
| OCBBF2008041 | 0 | 0 | 0 | 0 | 52.152 | 0 |
| OCBBF2009242 | 0 | 0 | 0 | 18.297 | 0 | 0 |
| OCBBF2010830 | 0 | 0 | 18.722 | 17.058 | 0 | 0 |
| OCBBF2012821 | 0 | 0 | 53.237 | 0 | 0 | 0 |
| OCBBF2013366 | 0 | 0 | 0 | 0 | 67.349 | 0 |
| OCBBF2015751 | 0 | 0 | 0 | 0 | 70.707 | 0 |
| PANCR1000081 | 0 | 0 | 0 | 1.932 | 0 | 0 |
| PEBLM2000395 | 0 | 0 | 0 | 5.881 | 0 | 0 |
| PEBLM2008861 | 0 | 0 | 0 | 31.108 | 0 | 0 |
| PLACE6000630 | 0 | 0 | 82.098 | 0 | 0 | 0 |
| PLACE6001262 | 0 | 0 | 0 | 56.464 | 0 | 0 |
| PLACE6003038 | 0 | 0 | 0 | 23.320 | 0 | 0 |
| PLACE6004312 | 0 | 0 | 0 | 7.794 | 15.048 | 0 |
| PLACE6005487 | 0 | 0 | 0 | 0 | 93.342 | 0 |
| PLACE6012574 | 0 | 87.267 | 0 | 0 | 0 | 0 |
| PLACE6019932 | 0 | 0 | 92.281 | 0 | 0 | 0 |
| PROST2000079 | 0 | 0 | 0 | 0 | 74.684 | 0 |
| PROST2000138 | 0 | 14.800 | 1.844 | 1.680 | 0 | 0 |
| PROST2002162 | 0 | 0 | 82.370 | 0 | 0 | 0 |
| PROST2004251 | 0 | 76.493 | 0 | 0 | 0 | 0 |
| PROST2016195 | 0 | 0 | 0 | 37.788 | 0 | 0 |
| PUAEN1000322 | 0 | 0 | 27.200 | 0 | 0 | 0 |
| PUAEN2000374 | 0 | 0 | 0 | 2.068 | 0 | 0 |
| SALGL1000024 | 0 | 0 | 0 | 1.964 | 0 | 0 |
| SALGL1000157 | 0 | 0 | 2.767 | 3.361 | 0 | 0 |
| SKMUS1000186 | 0 | 34.269 | 0 | 0 | 0 | 19.133 |
| SKMUS2001528 | 0 | 0 | 0 | 8.111 | 0 | 0 |
| SKNMC2000322 | 0 | 0 | 0 | 0 | 35.235 | 0 |
| SKNMC2000635 | 0 | 0 | 0 | 0 | 4.476 | 0 |
| SMINT1000131 | 0 | 0 | 19.486 | 0 | 0 | 0 |
| SMINT2000545 | 0 | 0 | 0 | 15.318 | 0 | 0 |
| SMINT2000933 | 0 | 0 | 0 | 13.171 | 0 | 0 |
| SMINT2001199 | 0 | 0 | 0 | 64.679 | 0 | 0 |
| SMINT2001818 | 0 | 0 | 0 | 24.229 | 0 | 0 |
| SMINT2002884 | 0 | 0 | 0 | 23.868 | 0 | 0 |
| SMINT2003505 | 0 | 0 | 0 | 20.349 | 0 | 0 |
| SMINT2003905 | 0 | 66.100 | 0 | 0 | 0 | 0 |
| SMINT2004023 | 0 | 0 | 0 | 29.565 | 0 | 0 |
| SMINT2004583 | 0 | 0 | 82.426 | 0 | 0 | 0 |
| SMINT2005688 | 0 | 0 | 0 | 0 | 62.271 | 0 |
| SMINT2008960 | 0 | 0 | 0 | 4.421 | 0 | 0 |
| SMINT2014480 | 0 | 0 | 0 | 10.266 | 0 | 0 |
| SMINT2015306 | 0 | 0 | 0 | 64.679 | 0 | 0 |
| SPLEN1000089 | 0 | 0 | 0 | 25.678 | 0 | 0 |
| SPLEN1000116 | 42.016 | 0 | 0 | 0 | 0 | 0 |
| SPLEN2000505 | 0 | 35.982 | 0 | 0 | 0 | 0 |
| SPLEN2000698 | 0 | 0 | 0 | 0 | 0 | 50.540 |
| SPLEN2000874 | 0 | 0 | 0 | 3.150 | 0 | 0 |
| SPLEN2000882 | 0 | 0 | 0 | 11.351 | 0 | 0 |
| SPLEN2001141 | 0 | 0 | 0 | 24.408 | 0 | 0 |
| SPLEN2001503 | 0 | 0 | 0 | 65.001 | 0 | 0 |
| SPLEN2002467 | 0 | 0 | 0 | 21.051 | 0 | 0 |
| SPLEN2004181 | 0 | 0 | 0 | 50.868 | 0 | 0 |
| SPLEN2004984 | 0 | 0 | 0 | 50.919 | 0 | 0 |
| SPLEN2005342 | 0 | 0 | 0 | 34.473 | 0 | 0 |
| SPLEN2005806 | 0 | 52.211 | 0 | 0 | 0 | 0 |
| SPLEN2006122 | 0 | 0 | 0 | 5.442 | 0 | 0 |
| SPLEN2007276 | 0 | 0 | 0 | 34.275 | 0 | 0 |
| SPLEN2011678 | 96.754 | 0 | 0 | 0 | 0 | 0 |
| SPLEN2012571 | 0 | 0 | 0 | 20.542 | 0 | 0 |
| SPLEN2012800 | 57.993 | 0 | 0 | 0 | 0 | 0 |
| SPLEN2017918 | 0 | 0 | 0 | 0 | 22.748 | 0 |
| SPLEN2021194 | 0 | 0 | 0 | 43.596 | 0 | 0 |
| SPLEN2022522 | 0 | 0 | 0 | 18.320 | 0 | 0 |
| SPLEN2024232 | 0 | 0 | 0 | 42.861 | 0 | 0 |
| SPLEN2028466 | 0 | 0 | 0 | 0 | 10.321 | 0 |
| SPLEN2028914 | 0 | 0 | 0 | 18.044 | 0 | 0 |
| SPLEN2034448 | 0 | 0 | 0 | 33.504 | 0 | 0 |
| STOMA1000091 | 0 | 0 | 0 | 44.949 | 0 | 0 |
| SYNOV1000164 | 0 | 0 | 0 | 49.698 | 0 | 0 |
| SYNOV2001239 | 0 | 0 | 0 | 2.027 | 0 | 7.478 |
| SYNOV2001262 | 0 | 0 | 0 | 13.482 | 0 | 0 |
| SYNOV2001581 | 0 | 0 | 0 | 17.017 | 0 | 0 |
| SYNOV2001648 | 0 | 0 | 0 | 7.002 | 0 | 0 |
| TESTI2000591 | 0 | 0 | 38.854 | 0 | 0 | 43.525 |
| TESTI2001862 | 0 | 0 | 56.260 | 0 | 0 | 0 |
| TESTI2002149 | 0 | 0 | 0 | 0 | 0 | 39.864 |
| TESTI2003005 | 0 | 0 | 0 | 0 | 75.802 | 0 |
| TESTI2003071 | 0 | 0 | 0 | 0 | 0 | 83.156 |
| TESTI2003127 | 0 | 0 | 0 | 68.997 | 0 | 0 |
| TESTI2003756 | 0 | 0 | 0 | 67.792 | 0 | 0 |
| TESTI2004031 | 0 | 34.228 | 8.530 | 0 | 0 | 0 |
| TESTI2006588 | 0 | 0 | 0 | 0 | 0 | 12.903 |
| TESTI2009474 | 0 | 0 | 0 | 13.055 | 0 | 0 |
| TESTI2010513 | 33.353 | 0 | 0 | 0 | 0 | 0 |
| TESTI2012019 | 0 | 0 | 0 | 0 | 0 | 92.398 |
| TESTI2012778 | 47.058 | 0 | 0 | 0 | 0 | 0 |
| TESTI2013231 | 0 | 0 | 0 | 0 | 0 | 47.426 |
| TESTI2015213 | 0 | 0 | 0 | 0 | 12.805 | 0 |
| TESTI2015437 | 0 | 0 | 0 | 0 | 0 | 97.331 |
| TESTI2015626 | 0 | 0 | 0 | 0 | 0 | 7.838 |
| TESTI2017954 | 0 | 0 | 0 | 0 | 16.528 | 0 |
| TESTI2021654 | 0 | 0 | 0 | 63.153 | 0 | 0 |
| TESTI2025013 | 0 | 0 | 0 | 0 | 0 | 84.839 |
| TESTI2026525 | 0 | 0 | 0 | 28.114 | 0 | 0 |
| TESTI2034940 | 0 | 0 | 0 | 1.683 | 6.500 | 0 |
| TESTI2052693 | 0 | 0 | 0 | 0 | 0 | 39.903 |
| TESTI4000014 | 0 | 30.495 | 0 | 0 | 0 | 0 |
| TESTI4009286 | 0 | 0 | 15.424 | 4.684 | 0 | 0 |
| TESTI4013441 | 0 | 13.391 | 0 | 0 | 0 | 0 |
| TESTI4018436 | 0 | 0 | 0 | 33.629 | 0 | 0 |
| THYMU1000016 | 0 | 0 | 8.222 | 2.497 | 0 | 0 |
| THYMU1000359 | 0 | 0 | 0 | 24.247 | 0 | 0 |
| THYMU1000394 | 0 | 0 | 0 | 31.765 | 0 | 0 |
| THYMU2000057 | 0 | 0 | 0 | 43.820 | 0 | 0 |
| THYMU2003012 | 0 | 0 | 0 | 11.326 | 0 | 0 |
| THYMU2003419 | 0 | 0 | 0 | 9.735 | 0 | 0 |
| THYMU2003891 | 0 | 0 | 0 | 12.257 | 0 | 0 |
| THYMU2003981 | 0 | 0 | 0 | 10.124 | 0 | 0 |
| THYMU2006277 | 0 | 99.033 | 0 | 0 | 0 | 0 |
| THYMU2007060 | 0 | 0 | 0 | 55.100 | 0 | 0 |
| THYMU2007886 | 0 | 0 | 0 | 8.948 | 0 | 0 |
| THYMU2009658 | 0 | 0 | 0 | 0 | 0 | 8.349 |
| THYMU2020416 | 0 | 0 | 0 | 88.571 | 0 | 0 |
| THYMU2027125 | 0 | 0 | 0 | 0 | 0 | 4.266 |
| THYMU2032825 | 0 | 0 | 0 | 60.077 | 0 | 0 |
| THYMU3015759 | 0 | 0 | 0 | 7.275 | 0 | 0 |
| THYMU3032798 | 0 | 0 | 0 | 12.495 | 0 | 0 |
| TKIDN2000246 | 0 | 0 | 0 | 0 | 7.590 | 0 |
| TKIDN2002738 | 35.603 | 0 | 0 | 0 | 0 | 0 |
| TLIVE2001327 | 0 | 0 | 0 | 30.308 | 0 | 0 |
| TLIVE2003970 | 0 | 0 | 0 | 0 | 57.706 | 0 |
| TRACH2000079 | 0 | 0 | 0 | 3.500 | 0 | 0 |
| TRACH2000196 | 0 | 0 | 0 | 85.226 | 0 | 0 |
| TRACH2000321 | 0 | 0 | 20.907 | 3.175 | 0 | 0 |
| TRACH2000540 | 0 | 0 | 0 | 36.823 | 0 | 0 |
| TRACH2000780 | 0 | 0 | 0 | 0 | 21.807 | 0 |
| TRACH2001109 | 0 | 0 | 0 | 0 | 5.222 | 0 |
| TRACH2001523 | 0 | 0 | 36.173 | 0 | 0 | 0 |
| TRACH2001810 | 0 | 0 | 0 | 10.036 | 0 | 0 |
| TRACH2002043 | 0 | 90.545 | 0 | 0 | 0 | 0 |
| TRACH2007754 | 0 | 0 | 31.967 | 0 | 0 | 0 |
| TRACH2008081 | 0 | 0 | 0 | 8.255 | 0 | 0 |
| TRACH2011293 | 0 | 0 | 94.999 | 0 | 0 | 0 |
| TRACH3003832 | 0 | 0 | 0 | 78.462 | 0 | 0 |
| TRACH3036942 | 0 | 0 | 0 | 0 | 0 | 5.816 |
| UMVEN2000133 | 0 | 0 | 0 | 11.363 | 0 | 0 |
| UMVEN2000453 | 0 | 0 | 0 | 3.374 | 0 | 0 |
| UTERU1000182 | 68.865 | 0 | 0 | 0 | 0 | 0 |
| UTERU2000095 | 0 | 0 | 0 | 2.674 | 0 | 0 |
| UTERU2000332 | 0 | 0 | 0 | 61.113 | 0 | 0 |
| UTERU2004664 | 0 | 0 | 0 | 0 | 42.338 | 0 |
| UTERU2005593 | 0 | 0 | 0 | 7.253 | 0 | 0 |
| UTERU2008027 | 0 | 0 | 0 | 0 | 95.438 | 0 |
| UTERU2008085 | 0 | 0 | 0 | 0 | 0 | 8.610 |
| UTERU2010417 | 0 | 0 | 0 | 2.037 | 0 | 0 |
| UTERU2011741 | 0 | 0 | 0 | 76.126 | 0 | 0 |
| UTERU2015108 | 0 | 0 | 0 | 40.775 | 0 | 0 |
| UTERU2018884 | 0 | 0 | 0 | 0 | 77.306 | 0 |
| UTERU2033375 | 98.615 | 0 | 0 | 0 | 0 | 0 |

[0694] Genes whose expression levels were negligibly low in each of the above-described libraries are shown with their clone names below.

[0695] 3NB691000018, 3NB691000085, 3NB691000113, 3NB691000116, 3NB691000129, 3NB691000173, 3NB691000191, 3NB692000012, 3NB692000029, 3NB692000102, 3NB692000154, 3NB692000276, 3NB692000305, 3NB692000330, 3NB692000429, 3NB692000484, 3NB692000529, 3NB692000545, 3NB692000973, 3NB692001002, 3NB692001022, 3NB692001034, 3NB692001040, 3NB692001123, 3NB692001267, 3NB692001288, 3NB692001349, 3NB692001366, 3NB692001408, 3NB692001433, 3NB692001442, 3NB692001459, 3NB692001471, 3NB692001496, 3NB692001501, 3NB692001507, 3NB692001511, 3NB692001519, 3NB692001520, 3NB692001528, 3NB692001538, 3NB692001548, 3NB692001557, 3NB692001637, 3NB692001719, 3NB692001853, 3NB692001861, 3NB692002051, 3NB692002365, 3NB692002685, 3NB692002806, 3NB692003538, 3NB692004045, 3NB692004724, 3NB692005439, 3NB692006952, 3NB692008178, 3NB692008729, ACTVT2000380, ADIPS1000064, ADIPS2000069, ADIPS2000088, ADIPS2000245, ADIPS2000425, ADRGL1000002, ADRGL1000018, ADRGL1000033, ADRGL1000038, ADRGL1000065, ADRGL1000067, ADRGL1000111, ADRGL1000144, ADRGL1000147, ADRGL1000160, ADRGL1000165, ADRGL1000182, ADRGL2000042, ADRGL2000056, ADRGL2000064, ADRGL2000074, ADRGL2000085, ADRGL2000097, ADRGL2000117, ADRGL2000142, ADRGL2000172, ADRGL2000248, ADRGL2000261, ADRGL2000323, ADRGL2000328, ADRGL2000353, ADRGL2000384, ADRGL2000428, ADRGL2000636, ADRGL2000644, ADRGL2000968, ADRGL2001119, ADRGL2001229, ADRGL2001287, ADRGL2001301, ADRGL2001354, ADRGL2001554, ADRGL2001651, ADRGL2001756, ADRGL2001830, ADRGL2001836, ADRGL2001854, ADRGL2002013, ADRGL2002029, ADRGL2002191, ADRGL2002260, ADRGL2002392, ADRGL2002477, ADRGL2002679, ADRGL2002753, ADRGL2002857, ADRGL2003017, ADRGL2003329, ADRGL2003552, ADRGL2003585, ADRGL2003638, ADRGL2003684, ADRGL2003773, ADRGL2003785, ADRGL2004031, ADRGL2004077, ADRGL2004451, ADRGL2004459, ADRGL2004676, ADRGL2004708, ADRGL2004724, ADRGL2004749, ADRGL2004770, ADRGL2004777, ADRGL2004833, ADRGL2005336, ADRGL2005564, ADRGL2005756, ADRGL2005838, ADRGL2005926, ADRGL2005961, ADRGL2006034, ADRGL2006124, ADRGL2006177, ADRGL2006193, ADRGL2006377, ADRGL2006677, ADRGL2006732, ADRGL2006767, ADRGL2006817, ADRGL2006846, ADRGL2006886, ADRGL2007080, ADRGL2007125, ADRGL2007283, ADRGL2007313, ADRGL2007357, ADRGL2007636, ADRGL2007651, ADRGL2007810, ADRGL2007877, ADRGL2007906, ADRGL2007974, ADRGL2008023, ADRGL2008331, ADRGL2008337, ADRGL2008535, ADRGL2008966, ADRGL2009146, ADRGL2009324, ADRGL2009489, ADRGL2009533, ADRGL2009691, ADRGL2009755, ADRGL2010152, ADRGL2010315, ADRGL2010594, ADRGL2010860, ADRGL2010974, ADRGL2011190, ADRGL2011330, ADRGL2012038, ADRGL2012179, AHMSC1000138, ASTRO1000009, ASTRO1000018, ASTRO1000029, ASTRO1000165, ASTRO2000011, ASTRO2000046, ASTRO2000095, ASTRO2000141, ASTRO2000191, ASTRO2000278, ASTRO2000372, ASTRO2000381, ASTRO2000403, ASTRO2000417, ASTRO2000480, ASTRO2000482, ASTRO2000533, ASTRO2000653, ASTRO2000662, ASTRO2000725, ASTRO2000914, ASTRO2001001, ASTRO2001008, ASTRO2001029, ASTRO2001076, ASTRO2001088, ASTRO2001107, ASTRO2001122, ASTRO2001227, ASTRO2001249, ASTRO2001480, ASTRO2001806, ASTRO2001823, ASTRO2002024, ASTRO2002035, ASTRO2002064, ASTRO2002459, ASTRO2002571, ASTRO2002632, ASTRO2002659, ASTRO2002693, ASTRO2002720, ASTRO2002733, ASTRO2002743, ASTRO2002842, ASTRO2003024, ASTRO2003212, ASTRO2003316, ASTRO2003461, ASTRO2003574, ASTRO2003581, ASTRO2003632, ASTRO2003740, ASTRO2003840, ASTRO2003925, ASTRO2003960, ASTRO2004032, ASTRO2004051, ASTRO2004177, ASTRO2004217, ASTRO2004297, ASTRO2004584, ASTRO2004628, ASTRO2004751, ASTRO2004877, ASTRO2004974, ASTRO2005008, ASTRO2005081, ASTRO2005096, ASTRO2005242, ASTRO2005273, ASTRO2005343, ASTRO2005360, ASTRO2005413, ASTRO2005423, ASTRO2005553, ASTRO2005557, ASTRO2005575, ASTRO2005593, ASTRO2005687, ASTRO2005726, ASTRO2005863, ASTRO2005896, ASTRO2005902, ASTRO2006356, ASTRO2006475, ASTRO2006732, ASTRO2006747, ASTRO2006920, ASTRO2006952, ASTRO2007221, ASTRO2007377, ASTRO2007515, ASTRO2007578, ASTRO2007643, ASTRO2007666, ASTRO2007948, ASTRO2007956, ASTRO2007962, ASTRO2008040, ASTRO2008239, ASTRO2008409, ASTRO2008425, ASTRO2008777, ASTRO2008895, ASTRO2008960, ASTRO2008972, ASTRO2009068, ASTRO2009118, ASTRO2009177, ASTRO2009333, ASTRO2009458, ASTRO2009526, ASTRO2009879, ASTRO2010072, ASTRO2010582, ASTRO2010615, ASTRO2010799, ASTRO2010819, ASTRO2010962, ASTRO2010996, ASTRO2011149, ASTRO2011422, ASTRO2011426, ASTRO2011437, ASTRO2011461, ASTRO2011834, ASTRO2011893, ASTRO2012552, ASTRO2013124, ASTRO2013585, ASTRO2013671, ASTRO2013802, ASTRO2014135, ASTRO2014174, ASTRO2014211, ASTRO2014363, ASTRO2014392, ASTRO2014498, ASTRO2014561, ASTRO2014576, ASTRO2014863, ASTRO2014923, ASTRO2014961, ASTRO2015162, ASTRO2015185, ASTRO2015328, ASTRO2015529, ASTRO2015987, ASTRO2016044, ASTRO2016114, ASTRO2016148, ASTRO2016681, ASTRO2016819, ASTRO2016847, ASTRO2016892, ASTRO2017348, ASTRO2017627, ASTRO2018169, ASTRO2018373, ASTRO2018540, ASTRO2019039, ASTRO2019171, ASTRO3000154, ASTRO3000172, ASTRO3000177, ASTRO3000301, ASTRO3000474, ASTRO3000482, BEAST2000454, BGGI11000123, BGGI11000193, BGGI11000285, BGGI12000022, BGGI12000067, BGGI12000161, BGGI12000533, BGGI12000544, BGGI12000684, BGGI12000693, BGGI12000839, BGGI12001002, BGGI12001075, BGGI12001097, BGGI12001241, BGGI12001247, BGGI12001682, BGGI12001714, BLADE1000176, BLADE2000181, BLADE2000256, BLADE2000340, BLADE2000389, BLADE2000463, BLADE2000492, BLADE2000579, BLADE2000640, BLADE2000866, BLADE2000938, BLADE2001031, BLADE2001133, BLADE2001138, BLADE2001141, BLADE2001371, BLADE2001458, BLADE2001575, BLADE2001753, BLADE2001935, BLADE2001940, BLADE2001987, BLADE2002073, BLADE2002310, BLADE2002730, BLADE2002738, BLADE2002782, BLADE2002947, BLADE2002972, BLADE2003474, BLADE2003916, BLADE2004089, BLADE2004345, BLADE2004389, BLADE2004462, BLADE2004628, BLADE2004670, BLADE2004722, BLADE2004849, BLADE2005036, BLADE2005038, BLADE2005229, BLADE2005459, BLADE2005792, BLADE2006043, BLADE2006412, BLADE2006415, BLADE2006607, BLADE2006826, BLADE2006830, BLADE2006849, BLADE2006947, BLADE2007033, BLADE2007043, BLADE2007589, BLADE2007666, BLADE2007722, BLADE2007735, BLADE2007744, BLADE2007799, BLADE2007923, BLADE2007935, BLADE2007958, BLADE2008281, BLADE2008398, BLADE2008454, BLADE2008461, BLADE2008479, BLADE2008539, BLADE2008809, BLADE2008995, BLADE2009452, BLADE2009479, BLADE2009593, BNGH41000098, BNGH41000104, BNGH41000118, BNGH41000137, BNGH41000153, BNGH41000169, BNGH41000177, BNGH41000190, BNGH41000198, BNGH41000216, BNGH41000235, BNGH42000130, BNGH42000132, BNGH42000405, BNGH42000532, BNGH42000675, BNGH42000739, BNGH42000791, BNGH42000815, BNGH42000994, BNGH42001247, BNGH42001406, BNGH42001576, BNGH42001724, BNGH42002168, BNGH42002244, BNGH42002387, BNGH42002487, BNGH42002489, BNGH42003529, BNGH42003570, BNGH42003641, BNGH42004076, BNGH42004291, BNGH42004538, BNGH42004679, BNGH42005017, BNGH42005235, BNGH42005504, BNGH42005968, BNGH42006135, BNGH42006226, BNGH42006234, BNGH42007037, BNGH42007366, BNGH42007460, BNGH42007594, BNGH42007788, BNGH42007798, BNGH42008199, BNGH42008510, BNGH42008603, BNGH42008649, BNGH42008743, BNGH42008832, BNGH42008850, BNGH42008943, BNGH42009021, BNGH42009025, BRACE1000020, BRACE1000042, BRACE1000047, BRACE1000051, BRACE1000065, BRACE1000070, BRACE1000073, BRACE1000084, BRACE1000087, BRACE1000092, BRACE1000093, BRACE1000101, BRACE1000114, BRACE1000115, BRACE1000124, BRACE1000132, BRACE1000159, BRACE1000166, BRACE1000169, BRACE1000186, BRACE1000187, BRACE1000239, BRACE1000258, BRACE1000451, BRACE1000475, BRACE1000572, BRACE2000061, BRACE2000077, BRACE2000078, BRACE2000100, BRACE2000109, BRACE2000141, BRACE2000148, BRACE2000183, BRACE2000229, BRACE2000232, BRACE2000245, BRACE2000256, BRACE2000266, BRACE2000267, BRACE2000280, BRACE2000300, BRACE2000307, BRACE2000331, BRACE2000332, BRACE2000347, BRACE2000351, BRACE2000368, BRACE2000392, BRACE2000441, BRACE2000487, BRACE2000489, BRACE2000505, BRACE2000525, BRACE2000526, BRACE2000531, BRACE2000545, BRACE2000553, BRACE2000565, BRACE2000577, BRACE2000640, BRACE2000650, BRACE2000677, BRACE2000698, BRACE2000718, BRACE2000733, BRACE2000743, BRACE2000750, BRACE2000753, BRACE2000815, BRACE2000864, BRACE2000885, BRACE2000893, BRACE2000905, BRACE2000936, BRACE2000947, BRACE2000965, BRACE2000969, BRACE2000975, BRACE2000988, BRACE2001017, BRACE2001065, BRACE2001070, BRACE2001094, BRACE2001107, BRACE2001117, BRACE2001143, BRACE2001151, BRACE2001154, BRACE2001188, BRACE2001191, BRACE2001197, BRACE2001236, BRACE2001239, BRACE2001269, BRACE2001312, BRACE2001313, BRACE2001330, BRACE2001340, BRACE2001352, BRACE2001353, BRACE2001374, BRACE2001375, BRACE2001423, BRACE2001424, BRACE2001445, BRACE2001453, BRACE2001455, BRACE2001477, BRACE2001492, BRACE2001496, BRACE2001497, BRACE2001508, BRACE2001534, BRACE2001543, BRACE2001564, BRACE2001588, BRACE2001607, BRACE2001626, BRACE2001673, BRACE2001677, BRACE2001705, BRACE2001709, BRACE2001711, BRACE2001726, BRACE2001733, BRACE2001737, BRACE2001742, BRACE2001777, BRACE2001779, BRACE2001834, BRACE2001855, BRACE2001859, BRACE2001865, BRACE2001872, BRACE2001881, BRACE2001892, BRACE2001898, BRACE2001923, BRACE2001942, BRACE2001944, BRACE2001954, BRACE2001971, BRACE2001972, BRACE2001973, BRACE2002026, BRACE2002034, BRACE2002050, BRACE2002081, BRACE2002091, BRACE2002139, BRACE2002142, BRACE2002151, BRACE2002157, BRACE2002176, BRACE2002202, BRACE2002206, BRACE2002227, BRACE2002260, BRACE2002297, BRACE2002304, BRACE2002356, BRACE2002392, BRACE2002394, BRACE2002409, BRACE2002431, BRACE2002441, BRACE2002444, BRACE2002458, BRACE2002467, BRACE2002468, BRACE2002478, BRACE2002495, BRACE2002582, BRACE2002585, BRACE2002589, BRACE2002590, BRACE2002606, BRACE2002613, BRACE2002614, BRACE2002617, BRACE2002623, BRACE2002635, BRACE2002649, BRACE2002661, BRACE2002676, BRACE2002682, BRACE2002695, BRACE2002707, BRACE2002736, BRACE2002752, BRACE2002755, BRACE2002762, BRACE2002772, BRACE2002792, BRACE2002796, BRACE2002803, BRACE2002807, BRACE2002812, BRACE2002834, BRACE2002849, BRACE2002857, BRACE2002860, BRACE2002861, BRACE2002884, BRACE2002896, BRACE2002948, BRACE2003037, BRACE2003078, BRACE2003097, BRACE2003110, BRACE2003168, BRACE2003199, BRACE2003210, BRACE2003217, BRACE2003254, BRACE2003269, BRACE2003285, BRACE2003304, BRACE2003319, BRACE2003398, BRACE2003420, BRACE2003428, BRACE2003431, BRACE2003512, BRACE2003516, BRACE2003527, BRACE2003539, BRACE2003540, BRACE2003594, BRACE2003598, BRACE2003609, BRACE2003614, BRACE2003628, BRACE2003639, BRACE2003700, BRACE2003713, BRACE2003766, BRACE2003785, BRACE2003788, BRACE2003800, BRACE2003802, BRACE2003825, BRACE2003845, BRACE2003846, BRACE2003847, BRACE2003848, BRACE2003873, BRACE2003885, BRACE2003887, BRACE2003892, BRACE2003904, BRACE2003905, BRACE2003928, BRACE2003944, BRACE2003954, BRACE2003982, BRACE2003987, BRACE2005034, BRACE2005047, BRACE2005063, BRACE2005083, BRACE2005087, BRACE2005090, BRACE2005099, BRACE2005118, BRACE2005124, BRACE2005138, BRACE2005151, BRACE2005160, BRACE2005169, BRACE2005189, BRACE2005193, BRACE2005196, BRACE2005198, BRACE2005216, BRACE2005231, BRACE2005243, BRACE2005251, BRACE2005253, BRACE2005290, BRACE2005298, BRACE2005328, BRACE2005329, BRACE2005337, BRACE2005348, BRACE2005363, BRACE2005395, BRACE2005408, BRACE2005434, BRACE2005448, BRACE2005450, BRACE2005453, BRACE2005457, BRACE2005460, BRACE2005489, BRACE2005518, BRACE2005556, BRACE2005562, BRACE2005624, BRACE2005642, BRACE2005661, BRACE2005667, BRACE2005681, BRACE2005719, BRACE2005731, BRACE2005742, BRACE2005762, BRACE2005773, BRACE2005787, BRACE2005795, BRACE2005800, BRACE2005858, BRACE2005869, BRACE2005881, BRACE2005898, BRACE2005904, BRACE2005906, BRACE2005907, BRACE2005911, BRACE2005937, BRACE2005949, BRACE2005981, BRACE2005991, BRACE2006055, BRACE2006072, BRACE2006075, BRACE2006084, BRACE2006089, BRACE2006102, BRACE2006105, BRACE2006122, BRACE2006137, BRACE2006143, BRACE2006162, BRACE2006167, BRACE2006174, BRACE2006240, BRACE2006245, BRACE2006249, BRACE2006258, BRACE2006264, BRACE2006274, BRACE2006281, BRACE2006298, BRACE2006319, BRACE2006354, BRACE2006363, BRACE2006378, BRACE2006380, BRACE2006393, BRACE2006413, BRACE2006417, BRACE2006453, BRACE2006459, BRACE2006488, BRACE2006514, BRACE2006534, BRACE2006537, BRACE2006540, BRACE2006547, BRACE2006564, BRACE2006587, BRACE2006598, BRACE2006636, BRACE2006685, BRACE2006703, BRACE2006743, BRACE2006753, BRACE2006783, BRACE2006821, BRACE2006833, BRACE2006859, BRACE2006871, BRACE2006909, BRACE2006911, BRACE2006924, BRACE2006935, BRACE2006937, BRACE2006944, BRACE2006951, BRACE2006982, BRACE2006986, BRACE2007013, BRACE2007064, BRACE2007068, BRACE2007087, BRACE2007089, BRACE2007138, BRACE2007174, BRACE2007191, BRACE2007197, BRACE2007201, BRACE2007203, BRACE2007232, BRACE2007254, BRACE2007262, BRACE2007274, BRACE2007281, BRACE2007295, BRACE2007358, BRACE2007396, BRACE2007398, BRACE2007401, BRACE2007411, BRACE2007447, BRACE2007477, BRACE2007502, BRACE2007503, BRACE2007518, BRACE2007522, BRACE2007527, BRACE2007538, BRACE2007563, BRACE2007567, BRACE2007577, BRACE2007621, BRACE2007640, BRACE2007641, BRACE2007646, BRACE2007663, BRACE2007671, BRACE2007682, BRACE2007685, BRACE2007708, BRACE2007727, BRACE2007749, BRACE2007760, BRACE2007761, BRACE2007764, BRACE2007767, BRACE2007768, BRACE2007769, BRACE2007784, BRACE2007786, BRACE2007798, BRACE2007799, BRACE2007801, BRACE2007832, BRACE2007836, BRACE2007868, BRACE2007882, BRACE2007888, BRACE2007902, BRACE2007920, BRACE2007937, BRACE2007944, BRACE2007952, BRACE2008008, BRACE2008015, BRACE2008021, BRACE2008102, BRACE2008114, BRACE2008144, BRACE2008172, BRACE2008216, BRACE2008218, BRACE2008251, BRACE2008276, BRACE2008295, BRACE2008308, BRACE2008336, BRACE2008358, BRACE2008361, BRACE2008380, BRACE2008399, BRACE2008401, BRACE2008402, BRACE2008410, BRACE2008420, BRACE2008443, BRACE2008473, BRACE2008480, BRACE2008481, BRACE2008488, BRACE2008495, BRACE2008500, BRACE2008553, BRACE2008594, BRACE2008604, BRACE2008615, BRACE2008622, BRACE2008629, BRACE2008653, BRACE2008655, BRACE2008656, BRACE2008706, BRACE2008708, BRACE2008710, BRACE2008754, BRACE2008797, BRACE2008847, BRACE2008857, BRACE2008861, BRACE2008867, BRACE2008881, BRACE2008883, BRACE2008917, BRACE2008919, BRACE2008941, BRACE2008948, BRACE2008960, BRACE2008968, BRACE2008999, BRACE2009014, BRACE2009016, BRACE2009031, BRACE2009037, BRACE2009044, BRACE2009045, BRACE2009053, BRACE2009122, BRACE2009131, BRACE2009185, BRACE2009188, BRACE2009212, BRACE2009221, BRACE2009235, BRACE2009238, BRACE2009255, BRACE2009270, BRACE2009272, BRACE2009274, BRACE2009275, BRACE2009291, BRACE2009293, BRACE2009307, BRACE2009311, BRACE2009318, BRACE2009323, BRACE2009366, BRACE2009421, BRACE2009428, BRACE2009434, BRACE2009437, BRACE2009483, BRACE2009533, BRACE2009558, BRACE2009566, BRACE2009591, BRACE2009620, BRACE2009654, BRACE2009721, BRACE2009732, BRACE2009754, BRACE2009828, BRACE2009886, BRACE2009907, BRACE2009957, BRACE2010170, BRACE2010171, BRACE2010203, BRACE2010208, BRACE2010336, BRACE2010348, BRACE2010440, BRACE2010444, BRACE2010477, BRACE2010489, BRACE2010535, BRACE2010550, BRACE2010598, BRACE2010632, BRACE2010642, BRACE2010651, BRACE2010669, BRACE2010684, BRACE2010753, BRACE2010813, BRACE2010828, BRACE2010837, BRACE2010888, BRACE2010937, BRACE2010983, BRACE2011007, BRACE2011025, BRACE2011183, BRACE2011199, BRACE2011265, BRACE2011389, BRACE2011478, BRACE2011545, BRACE2011592, BRACE2011611, BRACE2011646, BRACE2011677, BRACE2011703, BRACE2011747, BRACE2011838, BRACE2011892, BRACE2011904, BRACE2011947, BRACE2012061, BRACE2012062, BRACE2012185, BRACE2012222, BRACE2012232, BRACE2012291, BRACE2012317, BRACE2012510, BRACE2012528, BRACE2012625, BRACE2012653, BRACE2012814, BRACE2012833, BRACE2012838, BRACE2012936, BRACE2012947, BRACE2013009, BRACE2013010, BRACE2013126, BRACE2013132, BRACE2013149, BRACE2013369, BRACE2013806, BRACE2013855, BRACE2013911, BRACE2014108, BRACE2014161, BRACE2014232, BRACE2014257, BRACE2014268, BRACE2014306, BRACE2014475, BRACE2014657, BRACE2014746, BRACE2014780, BRACE2014818, BRACE2014821, BRACE2014824, BRACE2014850, BRACE2014854, BRACE2015031, BRACE2015058, BRACE2015132, BRACE2015262, BRACE2015270, BRACE2015287, BRACE2015314, BRACE2015352, BRACE2015368, BRACE2015412, BRACE2015436, BRACE2015741, BRACE2015756, BRACE2015969, BRACE2015995, BRACE2016058, BRACE2016194, BRACE2016315, BRACE2016325, BRACE2016362, BRACE2016366, BRACE2016465, BRACE2016516, BRACE2016583, BRACE2016708, BRACE2016821, BRACE2016896, BRACE2016981, BRACE2017108, BRACE2017124, BRACE2017298, BRACE2017359, BRACE2017397, BRACE2017410, BRACE2017438, BRACE2017574, BRACE2017580, BRACE2017587, BRACE2017720, BRACE2017844, BRACE2017872, BRACE2017929, BRACE2017934, BRACE2017985, BRACE2017992, BRACE2018337, BRACE2018443, BRACE2018448, BRACE2018568, BRACE2018700, BRACE2018727, BRACE2018736, BRACE2018759, BRACE2018762, BRACE2018782, BRACE2018847, BRACE2019004, BRACE2019044, BRACE2019147, BRACE2019244, BRACE2019258, BRACE2019327, BRACE2019348, BRACE2019371, BRACE2019467, BRACE2019510, BRACE2019519, BRACE2019528, BRACE2019618, BRACE2019696, BRACE2019703, BRACE2019843, BRACE2019865, BRACE2019872, BRACE2019877, BRACE2020028, BRACE2020077, BRACE2020097, BRACE2020157, BRACE2020278, BRACE2020358, BRACE2020467, BRACE2020584, BRACE2020652, BRACE2020709, BRACE2020742, BRACE2020756, BRACE2020863, BRACE2020982, BRACE2021014, BRACE2021143, BRACE2021148, BRACE2021245, BRACE2021254, BRACE2021264, BRACE2021344, BRACE2021433, BRACE2021478, BRACE2021541, BRACE2021670, BRACE2021695, BRACE2021708, BRACE2021721, BRACE2021932, BRACE2021936, BRACE2022030, BRACE2022158, BRACE2022196, BRACE2022270, BRACE2022328, BRACE2022333, BRACE2022389, BRACE2022394, BRACE2022435, BRACE2022448, BRACE2022450, BRACE2022549, BRACE2022633, BRACE2022638, BRACE2022693, BRACE2022848, BRACE2022928, BRACE2022990, BRACE2023069, BRACE2023070, BRACE2023223, BRACE2023268, BRACE2023284, BRACE2023404, BRACE2023451, BRACE2023540, BRACE2023633, BRACE2023718, BRACE2023727, BRACE2023744, BRACE2023800, BRACE2023801, BRACE2024074, BRACE2024222, BRACE2024610, BRACE2024627, BRACE2024781, BRACE2024826, BRACE2025018, BRACE2025316, BRACE2025333, BRACE2025437, BRACE2025452, BRACE2025492, BRACE2025710, BRACE2025796, BRACE2025992, BRACE2026054, BRACE2026131, BRACE2026141, BRACE2026142, BRACE2026293, BRACE2026294, BRACE2026404, BRACE2026675, BRACE2026725, BRACE2026836, BRACE2026920, BRACE2026971, BRACE2027018, BRACE2027221, BRACE2027258, BRACE2027312, BRACE2027382, BRACE2027389, BRACE2027408, BRACE2027643, BRACE2027767, BRACE2027770, BRACE2027879, BRACE2027896, BRACE2027970, BRACE2028171, BRACE2028392, BRACE2028410, BRACE2028636, BRACE2028741, BRACE2028956, BRACE2028970, BRACE2029112, BRACE2029356, BRACE2029396, BRACE2029581, BRACE2029644, BRACE2029849, BRACE2030039, BRACE2030096, BRACE2030323, BRACE2030326, BRACE2030341, BRACE2030345, BRACE2030736, BRACE2030883, BRACE2030884, BRACE2031154, BRACE2031232, BRACE2031527, BRACE2031531, BRACE2031553, BRACE2031899, BRACE2032044, BRACE2032090, BRACE2032134, BRACE2032148, BRACE2032182, BRACE2032329, BRACE2032385, BRACE2032436, BRACE2032477, BRACE2032502, BRACE2032538, BRACE2032584, BRACE2032823, BRACE2033128, BRACE2033394, BRACE2033478, BRACE2033720, BRACE2033786, BRACE2034434, BRACE2034523, BRACE2034616, BRACE2034622, BRACE2034870, BRACE2035003, BRACE2035120, BRACE2035124, BRACE2035191, BRACE2035278, BRACE2035381, BRACE2035441, BRACE2035485, BRACE2036005, BRACE2036096, BRACE2036743, BRACE2036830, BRACE2036834, BRACE2036900, BRACE2037132, BRACE2037294, BRACE2037295, BRACE2037299, BRACE2037310, BRACE2037431, BRACE2037692, BRACE2037847, BRACE2038114, BRACE2038269, BRACE2038271, BRACE2038329, BRACE2038492, BRACE2038551, BRACE2038618, BRACE2039009, BRACE2039128, BRACE2039170, BRACE2039249, BRACE2039286, BRACE2039297, BRACE2039327, BRACE2039362, BRACE2039475, BRACE2039600, BRACE2039607, BRACE2039624, BRACE2039734, BRACE2039823, BRACE2039832, BRACE2039893, BRACE2039986, BRACE2040138, BRACE2040325, BRACE2040514, BRACE2040640, BRACE2040987, BRACE2041009, BRACE2041095, BRACE2041200, BRACE2041264, BRACE2041890, BRACE2041898, BRACE2042394, BRACE2042398, BRACE2042550, BRACE2042620, BRACE2042628, BRACE2042873, BRACE2043036, BRACE2043105, BRACE2043142, BRACE2043248, BRACE2043349, BRACE2043381, BRACE2043774, BRACE2043942, BRACE2044057, BRACE2044105, BRACE2044263, BRACE2044286, BRACE2044304, BRACE2044473, BRACE2044510, BRACE2044640, BRACE2044816, BRACE2044946, BRACE2045300, BRACE2045428, BRACE2045445, BRACE2045596, BRACE2045772, BRACE2045947, BRACE2045954, BRACE2046251, BRACE2046295, BRACE2046976, BRACE2047011, BRACE2047232, BRACE2047350, BRACE2047377, BRACE2047385, BRACE2047492, BRACE2047558, BRACE2047573, BRACE2047835, BRACE2047893, BRACE2047975, BRACE3000071, BRACE3000404, BRACE3000520, BRACE3000697, BRACE3000840, BRACE3000973, BRACE3001002, BRACE3001058, BRACE3001066, BRACE3001113, BRACE3001217, BRACE3001299, BRACE3001384, BRACE3001391, BRACE3001403, BRACE3001595, BRACE3001754, BRACE3001948, BRACE3001973, BRACE3002184, BRACE3002298, BRACE3002344, BRACE3002390, BRACE3002420, BRACE3002508, BRACE3002541, BRACE3002756, BRACE3003004, BRACE3003026, BRACE3003053, BRACE3003192, BRACE3003413, BRACE3003595, BRACE3003698, BRACE3003866, BRACE3003920, BRACE3004046, BRACE3004058, BRACE3004113, BRACE3004150, BRACE3004205, BRACE3004358, BRACE3004371, BRACE3004435, BRACE3004477, BRACE3004767, BRACE3004772, BRACE3004783, BRACE3004843, BRACE3004862, BRACE3004880, BRACE3004887, BRACE3004981, BRACE3004996, BRACE3004998, BRACE3005103, BRACE3005127, BRACE3005145, BRACE3005217, BRACE3005225, BRACE3005430, BRACE3005499, BRACE3005760, BRACE3005870, BRACE3005903, BRACE3005938, BRACE3005989, BRACE3006113, BRACE3006185, BRACE3006226, BRACE3006462, BRACE3006463, BRACE3006553, BRACE3006872, BRACE3006917, BRACE3007058, BRACE3007084, BRACE3007085, BRACE3007258, BRACE3007322, BRACE3007472, BRACE3007480, BRACE3007559, BRACE3007625, BRACE3007642, BRACE3007649, BRACE3007767, BRACE3007869, BRACE3008036, BRACE3008066, BRACE3008092, BRACE3008095, BRACE3008137, BRACE3008255, BRACE3008337, BRACE3008384, BRACE3008720, BRACE3008772, BRACE3009044, BRACE3009075, BRACE3009090, BRACE3009127, BRACE3009197, BRACE3009237, BRACE3009265, BRACE3009297, BRACE3009377, BRACE3009392, BRACE3009416, BRACE3009539, BRACE3009574, BRACE3009701, BRACE3009708, BRACE3009724, BRACE3009993, BRACE3010076, BRACE3010079, BRACE3010086, BRACE3010221, BRACE3010283, BRACE3010315, BRACE3010397, BRACE3010416, BRACE3010428, BRACE3010435, BRACE3010438, BRACE3010702, BRACE3010862, BRACE3011271, BRACE3011421, BRACE3011447, BRACE3011505, BRACE3011634, BRACE3011774, BRACE3012357, BRACE3012574, BRACE3012806, BRACE3012930, BRACE3013119, BRACE3013418, BRACE3013576, BRACE3013740, BRACE3013780, BRACE3013874, BRACE3013936, BRACE3013986, BRACE3014005, BRACE3014068, BRACE3014231, BRACE3014290, BRACE3014317, BRACE3014523, BRACE3014714, BRACE3014807, BRACE3014942, BRACE3015090, BRACE3015121, BRACE3015262, BRACE3015521, BRACE3015808, BRACE3015829, BRACE3015894, BRACE3015898, BRACE3016020, BRACE3016122, BRACE3016167, BRACE3016170, BRACE3016580, BRACE3016788, BRACE3016810, BRACE3016862, BRACE3016884, BRACE3017083, BRACE3017253, BRACE3018083, BRACE3018308, BRACE3018963, BRACE3019055, BRACE3019071, BRACE3019084, BRACE3019570, BRACE3019611, BRACE3019817, BRACE3019828, BRACE3020151, BRACE3020194, BRACE3020286, BRACE3020356, BRACE3020594, BRACE3020669, BRACE3020671, BRACE3020890, BRACE3021148, BRACE3021430, BRACE3021517, BRACE3021805, BRACE3022051, BRACE3022303, BRACE3022312, BRACE3022340, BRACE3022847, BRACE3023604, BRACE3023912, BRACE3024073, BRACE3024359, BRACE3024379, BRACE3024444, BRACE3024497, BRACE3024537, BRACE3024659, BRACE3024662, BRACE3024879, BRACE3025153, BRACE3025302, BRACE3025457, BRACE3025531, BRACE3025627, BRACE3025630, BRACE3025719, BRACE3026008, BRACE3026075, BRACE3026161, BRACE3026290, BRACE3026345, BRACE3026456, BRACE3026735, BRACE3026802, BRACE3026844, BRACE3026947, BRACE3026993, BRACE3027242, BRACE3027256, BRACE3027326, BRACE3027478, BRACE3027480, BRACE3027931, BRACE3027976, BRACE3028214, BRACE3028241, BRACE3028360, BRACE3028895, BRACE3028998, BRACE3029005, BRACE3029021, BRACE3029205, BRACE3029447, BRACE3030057, BRACE3030103, BRACE3030538, BRACE3030748, BRACE3030866, BRACE3031161, BRACE3031184, BRACE3031185, BRACE3031315, BRACE3031372, BRACE3031579, BRACE3031728, BRACE3031838, BRACE3031843, BRACE3032427, BRACE3032455, BRACE3032537, BRACE3032538, BRACE3032631, BRACE3032771, BRACE3032980, BRACE3032983, BRACE3033525, BRACE3034159, BRACE3034183, BRACE3034389, BRACE3034964, BRACE3034993, BRACE3035168, BRACE3035227, BRACE3036156, BRACE3036271, BRACE3037612, BRACE3037637, BRACE3037803, BRACE3038012, BRACE3038030, BRACE3038569, BRACE3038570, BRACE3038687, BRACE3038760, BRACE3039288, BRACE3039358, BRACE3039378, BRACE3039454, BRACE3040012, BRACE3040239, BRACE3040504, BRACE3040644, BRACE3040856, BRACE3040863, BRACE3041059, BRACE3041162, BRACE3041827, BRACE3042046, BRACE3042210, BRACE3042326, BRACE3042409, BRACE3042432, BRACE3042594, BRACE3043597, BRACE3044090, BRACE3044172, BRACE3044247, BRACE3044377, BRACE3044389, BRACE3044495, BRACE3045011, BRACE3045033, BRACE3045078, BRACE3045145, BRACE3045424, BRACE3045708, BRACE3045981, BRACE3046049, BRACE3046152, BRACE3046294, BRACE3046450, BRACE3046466, BRACE3046491, BRACE3046609, BRACE3046762, BRACE3046837, BRACE3046855, BRACE3046966, BRACE3047018, BRACE3047482, BRACE3047801, BRALZ1000047, BRALZ1000103, BRALZ2000189, BRALZ2000263, BRALZ2000988, BRALZ2001038, BRALZ2001279, BRALZ2001350, BRALZ2001445, BRALZ2001559, BRALZ2001743, BRALZ2001834, BRALZ2002174, BRALZ2002418, BRALZ2002477, BRALZ2003119, BRALZ2003330, BRALZ2003453, BRALZ2003525, BRALZ2004397, BRALZ2005467, BRALZ2005471, BRALZ2005888, BRALZ2005950, BRALZ2005992, BRALZ2006288, BRALZ2006474, BRALZ2006560, BRALZ2006734, BRALZ2006800, BRALZ2006976, BRALZ2007376, BRALZ2007545, BRALZ2007576, BRALZ2007661, BRALZ2007790, BRALZ2007793, BRALZ2007952, BRALZ2008031, BRALZ2008166, BRALZ2008462, BRALZ2008617, BRALZ2008696, BRALZ2008763, BRALZ2008869, BRALZ2008930, BRALZ2009446, BRALZ2009486, BRALZ2010186, BRALZ2010842, BRALZ2011337, BRALZ2011796, BRALZ2011880, BRALZ2012050, BRALZ2012183, BRALZ2012848, BRALZ2013621, BRALZ2013690, BRALZ2014054, BRALZ2014316, BRALZ2014484, BRALZ2014951, BRALZ2015168, BRALZ2015811, BRALZ2016085, BRALZ2016498, BRALZ2017359, BRALZ2017531, BRALZ2017607, BRALZ2017620, BRALZ2017844, BRALZ2018342, BRALZ2018492, BRALZ2018834, BRALZ2019047, BRAMY1000095, BRAMY1000098, BRAMY1000130, BRAMY1000157, BRAMY1000173, BRAMY2000021, BRAMY2000025, BRAMY2000052, BRAMY2000076, BRAMY2000086, BRAMY2000151, BRAMY2000181, BRAMY2000196, BRAMY2000231, BRAMY2000277, BRAMY2000354, BRAMY2000388, BRAMY2000411, BRAMY2000508, BRAMY2000562, BRAMY2000585, BRAMY2000653, BRAMY2000814, BRAMY2000893, BRAMY2000946, BRAMY2000981, BRAMY2000987, BRAMY2001068, BRAMY2001114, BRAMY2001203, BRAMY2001282, BRAMY2001367, BRAMY2001427, BRAMY2001473, BRAMY2001678, BRAMY2002005, BRAMY2002044, BRAMY2002072, BRAMY2002158, BRAMY2002311, BRAMY2002339, BRAMY2002364, BRAMY2002369, BRAMY2002479, BRAMY2002493, BRAMY2002525, BRAMY2002584, BRAMY2002604, BRAMY2002621, BRAMY2002638, BRAMY2002739, BRAMY2002799, BRAMY2002853, BRAMY2002862, BRAMY2002956, BRAMY2003008, BRAMY2003037, BRAMY2003117, BRAMY2003287, BRAMY2003325, BRAMY2003529, BRAMY2003538, BRAMY2003585, BRAMY2003634, BRAMY2003653, BRAMY2003681, BRAMY2003893, BRAMY2003897, BRAMY2003898, BRAMY2003904, BRAMY2003926, BRAMY2003929, BRAMY2004031, BRAMY2004058, BRAMY2004183, BRAMY2004335, BRAMY2004351, BRAMY2004352, BRAMY2004363, BRAMY2004387, BRAMY2004492, BRAMY2004521, BRAMY2004524, BRAMY2004537, BRAMY2004542, BRAMY2004756, BRAMY2004771, BRAMY2005052, BRAMY2005064, BRAMY2005094, BRAMY2005151, BRAMY2005182, BRAMY2005244, BRAMY2005391, BRAMY2005488, BRAMY2005576, BRAMY2005648, BRAMY2005662, BRAMY2005708, BRAMY2005711, BRAMY2006092, BRAMY2006118, BRAMY2006149, BRAMY2006366, BRAMY2006375, BRAMY2006411, BRAMY2006459, BRAMY2006466, BRAMY2006659, BRAMY2006779, BRAMY2006809, BRAMY2006879, BRAMY2007043, BRAMY2007078, BRAMY2007110, BRAMY2007185, BRAMY2007244, BRAMY2007249, BRAMY2007255, BRAMY2007287, BRAMY2007308, BRAMY2007411, BRAMY2007458, BRAMY2007486, BRAMY2007546, BRAMY2007567, BRAMY2007594, BRAMY2007610, BRAMY2007613, BRAMY2007653, BRAMY2007753, BRAMY2007859, BRAMY2008333, BRAMY2008382, BRAMY2008563, BRAMY2008583, BRAMY2008977, BRAMY2008979, BRAMY2009013, BRAMY2009023, BRAMY2009034, BRAMY2009105, BRAMY2009123, BRAMY2009192, BRAMY2009344, BRAMY2009349, BRAMY2009394, BRAMY2009489, BRAMY2009508, BRAMY2009528, BRAMY2009557, BRAMY2009612, BRAMY2009693, BRAMY2009934, BRAMY2010068, BRAMY2010135, BRAMY2010145, BRAMY2010171, BRAMY2010208, BRAMY2010239, BRAMY2010272, BRAMY2010290, BRAMY2010357, BRAMY2010366, BRAMY2010395, BRAMY2010441, BRAMY2010442, BRAMY2010464, BRAMY2010581, BRAMY2010798, BRAMY2010808, BRAMY2010919, BRAMY2011064, BRAMY2011105, BRAMY2011178, BRAMY2011196, BRAMY2011216, BRAMY2011253, BRAMY2011446, BRAMY2011480, BRAMY2011639, BRAMY2011679, BRAMY2011811, BRAMY2011841, BRAMY2011846, BRAMY2011849, BRAMY2011872, BRAMY2011961, BRAMY2012017, BRAMY2012091, BRAMY2012119, BRAMY2012162, BRAMY2012163, BRAMY2012277, BRAMY2012340, BRAMY2012426, BRAMY2012497, BRAMY2012517, BRAMY2012536, BRAMY2012555, BRAMY2012568, BRAMY2012581, BRAMY2012691, BRAMY2012721, BRAMY2012731, BRAMY2012776, BRAMY2012880, BRAMY2012881, BRAMY2013169, BRAMY2013200, BRAMY2013216, BRAMY2013405, BRAMY2013414, BRAMY2013572, BRAMY2013590, BRAMY2013621, BRAMY2013659, BRAMY2013722, BRAMY2013736, BRAMY2013756, BRAMY2013944, BRAMY2013975, BRAMY2014019, BRAMY2014205, BRAMY2014387, BRAMY2014462, BRAMY2014469, BRAMY2014541, BRAMY2014754, BRAMY2014813, BRAMY2015211, BRAMY2015251, BRAMY2015311, BRAMY2015420, BRAMY2015503, BRAMY2015516, BRAMY2015550, BRAMY2015551, BRAMY2015559, BRAMY2015688, BRAMY2015705, BRAMY2015782, BRAMY2015833, BRAMY2015855, BRAMY2015890, BRAMY2015911, BRAMY2015925, BRAMY2016002, BRAMY2016009, BRAMY2016020, BRAMY2016070, BRAMY2016251, BRAMY2016325, BRAMY2016327, BRAMY2016386, BRAMY2016706, BRAMY2016771, BRAMY2016892, BRAMY2016938, BRAMY2016953, BRAMY2017014, BRAMY2017249, BRAMY2017348, BRAMY2017450, BRAMY2017455, BRAMY2017528, BRAMY2017864, BRAMY2018027, BRAMY2018106, BRAMY2018122, BRAMY2018126, BRAMY2018272, BRAMY2018273, BRAMY2018279, BRAMY2018295, BRAMY2018308, BRAMY2018396, BRAMY2018467, BRAMY2018635, BRAMY2018785, BRAMY2019055, BRAMY2019111, BRAMY2019277, BRAMY2019300, BRAMY2019468, BRAMY2019509, BRAMY2019554, BRAMY2019600, BRAMY2019643, BRAMY2019710, BRAMY2019963, BRAMY2019985, BRAMY2019989, BRAMY2020050, BRAMY2020058, BRAMY2020106, BRAMY2020270, BRAMY2020354, BRAMY2020355, BRAMY2020412, BRAMY2020445, BRAMY2020466, BRAMY2020520, BRAMY2020574, BRAMY2020634, BRAMY2020713, BRAMY2021040, BRAMY2021063, BRAMY2021098, BRAMY2021139, BRAMY2021142, BRAMY2021276, BRAMY2021310, BRAMY2021388, BRAMY2021498, BRAMY2021523, BRAMY2021710, BRAMY2021732, BRAMY2021746, BRAMY2021825, BRAMY2021867, BRAMY2021962, BRAMY2021982, BRAMY2022052, BRAMY2022160, BRAMY2022168, BRAMY2022263, BRAMY2022301, BRAMY2022320, BRAMY2022383, BRAMY2022445, BRAMY2022454, BRAMY2022493, BRAMY2022525, BRAMY2022532, BRAMY2022723, BRAMY2022786, BRAMY2022796, BRAMY2022929, BRAMY2022980, BRAMY2022984, BRAMY2023060, BRAMY2023110, BRAMY2023115, BRAMY2023161, BRAMY2023172, BRAMY2023238, BRAMY2023327, BRAMY2023358, BRAMY2023406, BRAMY2023482, BRAMY2023514, BRAMY2023729, BRAMY2023786, BRAMY2023852, BRAMY2023863, BRAMY2023939, BRAMY2024004, BRAMY2024073, BRAMY2024312, BRAMY2024374, BRAMY2024390, BRAMY2024416, BRAMY2024449, BRAMY2024489, BRAMY2024497, BRAMY2024514, BRAMY2024530, BRAMY2024535, BRAMY2024545, BRAMY2024576, BRAMY2024593, BRAMY2024711, BRAMY2024715, BRAMY2024728, BRAMY2024827, BRAMY2024849, BRAMY2025024, BRAMY2025032, BRAMY2025121, BRAMY2025175, BRAMY2025218, BRAMY2025230, BRAMY2025272, BRAMY2025277, BRAMY2025495, BRAMY2025812, BRAMY2025996, BRAMY2026009, BRAMY2026091, BRAMY2026168, BRAMY2026300, BRAMY2026347, BRAMY2026395, BRAMY2026405, BRAMY2026533, BRAMY2026538, BRAMY2026685, BRAMY2026713, BRAMY2026778, BRAMY2026824, BRAMY2026899, BRAMY2026902, BRAMY2026904, BRAMY2026976, BRAMY2027073, BRAMY2027114, BRAMY2027140, BRAMY2027242, BRAMY2027396, BRAMY2027451, BRAMY2027461, BRAMY2027467, BRAMY2027587, BRAMY2027714, BRAMY2027717, BRAMY2027752, BRAMY2027782, BRAMY2028072, BRAMY2028183, BRAMY2028188, BRAMY2028269, BRAMY2028282, BRAMY2028472, BRAMY2028491, BRAMY2028516, BRAMY2028565, BRAMY2028593, BRAMY2028682, BRAMY2028740, BRAMY2028783, BRAMY2028796, BRAMY2028856, BRAMY2028914, BRAMY2029204, BRAMY2029602, BRAMY2029988, BRAMY2030098, BRAMY2030109, BRAMY2030206, BRAMY2030477, BRAMY2030545, BRAMY2030607, BRAMY2030702, BRAMY2030703, BRAMY2030768, BRAMY2030799, BRAMY2030859, BRAMY2030915, BRAMY2031317, BRAMY2031377, BRAMY2031442, BRAMY2031516, BRAMY2032014, BRAMY2032087, BRAMY2032231, BRAMY2032242, BRAMY2032290, BRAMY2032311, BRAMY2032317, BRAMY2032344, BRAMY2032589, BRAMY2032678, BRAMY2032696, BRAMY2032777, BRAMY2032994, BRAMY2033003, BRAMY2033116, BRAMY2033240, BRAMY2033267, BRAMY2033316, BRAMY2033332, BRAMY2033506, BRAMY2033594, BRAMY2033895, BRAMY2033914, BRAMY2034072, BRAMY2034185, BRAMY2034187, BRAMY2034305, BRAMY2034561, BRAMY2034920, BRAMY2034993, BRAMY2035070, BRAMY2035449, BRAMY2035545, BRAMY2035606, BRAMY2035718, BRAMY2035719, BRAMY2035801, BRAMY2035869, BRAMY2035923, BRAMY2036076, BRAMY2036079, BRAMY2036254, BRAMY2036266, BRAMY2036396, BRAMY2036459, BRAMY2036567, BRAMY2036615, BRAMY2036699, BRAMY2036913, BRAMY2036918, BRAMY2036968, BRAMY2037147, BRAMY2037328, BRAMY2037609, BRAMY2037629, BRAMY2037800, BRAMY2037823, BRAMY2037971, BRAMY2038100, BRAMY2038128, BRAMY2038317, BRAMY2038475, BRAMY2038484, BRAMY2038516, BRAMY2038832, BRAMY2038846, BRAMY2038887, BRAMY2038904, BRAMY2039287, BRAMY2039300, BRAMY2039314, BRAMY2039341, BRAMY2039630, BRAMY2039695, BRAMY2039728, BRAMY2039872, BRAMY2040051, BRAMY2040159, BRAMY2040214, BRAMY2040478, BRAMY2040592, BRAMY2040915, BRAMY2041261, BRAMY2041347, BRAMY2041378, BRAMY2041384, BRAMY2041434, BRAMY2041507, BRAMY2041542, BRAMY2041738, BRAMY2042122, BRAMY2042131, BRAMY2042178, BRAMY2042195, BRAMY2042244, BRAMY2042549, BRAMY2042596, BRAMY2042612, BRAMY2042641, BRAMY2042711, BRAMY2042760, BRAMY2042804, BRAMY2042899, BRAMY2042918, BRAMY2043069, BRAMY2043103, BRAMY2043314, BRAMY2043345, BRAMY2044246, BRAMY2044317, BRAMY2044349, BRAMY2044686, BRAMY2044838, BRAMY2045036, BRAMY2045299, BRAMY2045471, BRAMY2045530, BRAMY2046109, BRAMY2046478, BRAMY2046489, BRAMY2046537, BRAMY2046667, BRAMY2046742, BRAMY2046871, BRAMY2046984, BRAMY2046989, BRAMY2047169, BRAMY2047280, BRAMY2047676, BRAMY2047692, BRAMY2047746, BRAMY2047751, BRAMY2047765, BRAMY2047884, BRAMY2047948, BRAMY3000206, BRAMY3000210, BRAMY3000213, BRAMY3000224, BRAMY3000254, BRAMY3000307, BRAMY3000692, BRAMY3001356, BRAMY3001401, BRAMY3001409, BRAMY3001794, BRAMY3002120, BRAMY3002312, BRAMY3002329, BRAMY3002458, BRAMY3002508, BRAMY3002620, BRAMY3002803, BRAMY3002805, BRAMY3002886, BRAMY3002991, BRAMY3003026, BRAMY3003109, BRAMY3003205, BRAMY3003310, BRAMY3003566, BRAMY3003723, BRAMY3004126, BRAMY3004224, BRAMY3004364, BRAMY3004377, BRAMY3004672, BRAMY3004800, BRAMY3004900, BRAMY3004919, BRAMY3005091, BRAMY3005184, BRAMY3005656, BRAMY3005912, BRAMY3005932, BRAMY3006032, BRAMY3006297, BRAMY3006761, BRAMY3007078, BRAMY3007206, BRAMY3007311, BRAMY3007350, BRAMY3007449, BRAMY3007471, BRAMY3007609, BRAMY3007723, BRAMY3007968, BRAMY3008044, BRAMY3008088, BRAMY3008096, BRAMY3008335, BRAMY3008466, BRAMY3008505, BRAMY3008650, BRAMY3008937, BRAMY3009158, BRAMY3009207, BRAMY3009491, BRAMY3009556, BRAMY3009782, BRAMY3009811, BRAMY3009904, BRAMY3010008, BRAMY3010264, BRAMY3010321, BRAMY3010411, BRAMY3010492, BRAMY3010603, BRAMY3010654, BRAMY4000089, BRAMY4000095, BRAMY4000229, BRAMY4000277, BRAMY4000915, BRAMY4000962, BRAMY4001173, BRAMY4001200, BRAMY4001234, BRAMY4001449, BRAMY4001652, BRAMY4001863, BRAMY4001913, BRAMY4002575, BRAMY4002628, BRASW1000053, BRASW1000125, BRAWH1000001, BRAWH1000002, BRAWH1000007, BRAWH1000037, BRAWH1000045, BRAWH1000083, BRAWH1000094, BRAWH1000116, BRAWH1000127, BRAWH1000130, BRAWH1000157, BRAWH1000162, BRAWH1000164, BRAWH1000168, BRAWH1000174, BRAWH1000180, BRAWH1000369, BRAWH2000034, BRAWH2000048, BRAWH2000071, BRAWH2000082, BRAWH2000093, BRAWH2000109, BRAWH2000131, BRAWH2000142, BRAWH2000169, BRAWH2000177, BRAWH2000218, BRAWH2000232, BRAWH2000248, BRAWH2000256, BRAWH2000274, BRAWH2000323, BRAWH2000353, BRAWH2000370, BRAWH2000409, BRAWH2000417, BRAWH2000443, BRAWH2000460, BRAWH2000471, BRAWH2000476, BRAWH2000482, BRAWH2000488, BRAWH2000494, BRAWH2000500, BRAWH2000503, BRAWH2000522, BRAWH2000554, BRAWH2000595, BRAWH2000633, BRAWH2000636, BRAWH2000643, BRAWH2000651, BRAWH2000682, BRAWH2000686, BRAWH2000697, BRAWH2000752, BRAWH2000839, BRAWH2000859, BRAWH2000866, BRAWH2000892, BRAWH2000901, BRAWH2000924, BRAWH2000926, BRAWH2000944, BRAWH2000984, BRAWH2001019, BRAWH2001037, BRAWH2001052, BRAWH2001103, BRAWH2001129, BRAWH2001137, BRAWH2001141, BRAWH2001159, BRAWH2001166, BRAWH2001171, BRAWH2001186, BRAWH2001203, BRAWH2001238, BRAWH2001239, BRAWH2001255, BRAWH2001321, BRAWH2001355, BRAWH2001378, BRAWH2001395, BRAWH2001406, BRAWH2001412, BRAWH2001418, BRAWH2001424, BRAWH2001436, BRAWH2001438, BRAWH2001439, BRAWH2001459, BRAWH2001461, BRAWH2001484, BRAWH2001492, BRAWH2001503, BRAWH2001519, BRAWH2001530, BRAWH2001535, BRAWH2001589, BRAWH2001662, BRAWH2001666, BRAWH2001671, BRAWH2001679, BRAWH2001686, BRAWH2001701, BRAWH2001842, BRAWH2001862, BRAWH2001873, BRAWH2001940, BRAWH2001973, BRAWH2002047, BRAWH2002060, BRAWH2002062, BRAWH2002125, BRAWH2002191, BRAWH2002318, BRAWH2002333, BRAWH2002352, BRAWH2002383, BRAWH2002549, BRAWH2002560, BRAWH2002601, BRAWH2002623, BRAWH2002630, BRAWH2002635, BRAWH2002662, BRAWH2002679, BRAWH2002725, BRAWH2002761, BRAWH2002811, BRAWH2002861, BRAWH2002911, BRAWH2002963, BRAWH2002967, BRAWH2002976, BRAWH2003000, BRAWH2003025, BRAWH2003135, BRAWH2003240, BRAWH2003307, BRAWH2003355, BRAWH2003366, BRAWH2003662, BRAWH2003689, BRAWH2003693, BRAWH2003818, BRAWH2003832, BRAWH2003948, BRAWH2003964, BRAWH2004044, BRAWH2004068, BRAWH2004078, BRAWH2004095, BRAWH2004136, BRAWH2004217, BRAWH2004580, BRAWH2004731, BRAWH2004779, BRAWH2004842, BRAWH2004884, BRAWH2004923, BRAWH2005008, BRAWH2005068, BRAWH2005074, BRAWH2005225, BRAWH2005315, BRAWH2005517, BRAWH2005524, BRAWH2005533, BRAWH2005578, BRAWH2005661, BRAWH2005812, BRAWH2005974, BRAWH2005998, BRAWH2006044, BRAWH2006083, BRAWH2006207, BRAWH2006301, BRAWH2006395, BRAWH2006405, BRAWH2006450, BRAWH2006493, BRAWH2006526, BRAWH2006543, BRAWH2006622, BRAWH2006760, BRAWH2006960, BRAWH2006989, BRAWH2006996, BRAWH2007069, BRAWH2007308, BRAWH2007406, BRAWH2007550, BRAWH2007570, BRAWH2007591, BRAWH2007605, BRAWH2007658, BRAWH2007664, BRAWH2007808, BRAWH2007825, BRAWH2007862, BRAWH2007890, BRAWH2008058, BRAWH2008128, BRAWH2008219, BRAWH2008255, BRAWH2008292, BRAWH2008297, BRAWH2008366, BRAWH2008380, BRAWH2008540, BRAWH2008706, BRAWH2008790, BRAWH2008903, BRAWH2008956, BRAWH2008993, BRAWH2009112, BRAWH2009227, BRAWH2009238, BRAWH2009261, BRAWH2009263, BRAWH2009298, BRAWH2009304, BRAWH2009307, BRAWH2009360, BRAWH2009393, BRAWH2009485, BRAWH2009558, BRAWH2009590, BRAWH2009626, BRAWH2009678, BRAWH2009695, BRAWH2009907, BRAWH2010000, BRAWH2010069, BRAWH2010084, BRAWH2010136, BRAWH2010318, BRAWH2010329, BRAWH2010354, BRAWH2010364, BRAWH2010536, BRAWH2010552, BRAWH2010584, BRAWH2010618, BRAWH2010619, BRAWH2010754, BRAWH2010980, BRAWH2011066, BRAWH2011079, BRAWH2011096, BRAWH2011155, BRAWH2011166, BRAWH2011204, BRAWH2011286, BRAWH2011294, BRAWH2011343, BRAWH2011400, BRAWH2011762, BRAWH2011795, BRAWH2011796, BRAWH2011812, BRAWH2011823, BRAWH2011860, BRAWH2011920, BRAWH2011958, BRAWH2012054, BRAWH2012077, BRAWH2012162, BRAWH2012164, BRAWH2012258, BRAWH2012277, BRAWH2012326, BRAWH2012538, BRAWH2012540, BRAWH2012619, BRAWH2012698, BRAWH2012749, BRAWH2012827, BRAWH2012866, BRAWH2012963, BRAWH2013047, BRAWH2013219, BRAWH2013294, BRAWH2013748, BRAWH2013866, BRAWH2013871, BRAWH2013914, BRAWH2013941, BRAWH2013955, BRAWH2014053, BRAWH2014188, BRAWH2014234, BRAWH2014379, BRAWH2014414, BRAWH2014473, BRAWH2014511, BRAWH2014645, BRAWH2014662, BRAWH2014717, BRAWH2014729, BRAWH2014876, BRAWH2014934, BRAWH2014954, BRAWH2015247, BRAWH2015349, BRAWH2015375, BRAWH2015385, BRAWH2015595, BRAWH2015728, BRAWH2015853, BRAWH2015866, BRAWH2016028, BRAWH2016106, BRAWH2016160, BRAWH2016166, BRAWH2016209, BRAWH2016221, BRAWH2016223, BRAWH2016305, BRAWH2016439, BRAWH2016446, BRAWH2016514, BRAWH2016562, BRAWH2016655, BRAWH2016679, BRAWH2016702, BRAWH2016724, BRAWH2016785, BRAWH2016792, BRAWH2016800, BRAWH2017002, BRAWH2017103, BRAWH2017250, BRAWH2017294, BRAWH2017304, BRAWH2017305, BRAWH2017379, BRAWH2017407, BRAWH2017433, BRAWH2017523, BRAWH2017534, BRAWH2017542, BRAWH2017635, BRAWH2017913, BRAWH2018206, BRAWH2018267, BRAWH2018282, BRAWH2018317, BRAWH2018506, BRAWH2018514, BRAWH2018527, BRAWH2018601, BRAWH2018729, BRAWH2018745, BRAWH2018875, BRAWH2019053, BRAWH2019055, BRAWH2019198, BRAWH3000078, BRAWH3000088, BRAWH3000100, BRAWH3000166, BRAWH3000314, BRAWH3000329, BRAWH3000410, BRAWH3000446, BRAWH3000491, BRAWH3000604, BRAWH3000884, BRAWH3001053, BRAWH3001319, BRAWH3001326, BRAWH3001475, BRAWH3001636, BRAWH3001638, BRAWH3001712, BRAWH3001760, BRAWH3001783, BRAWH3001833, BRAWH3001879, BRAWH3001891, BRAWH3001918, BRAWH3002433, BRAWH3002467, BRAWH3002513, BRAWH3002574, BRAWH3002600, BRAWH3002819, BRAWH3003019, BRAWH3003136, BRAWH3003244, BRAWH3003343, BRAWH3003411, BRAWH3003522, BRAWH3003573, BRAWH3003598, BRAWH3003727, BRAWH3003801, BRAWH3003975, BRAWH3004222, BRAWH3004335, BRAWH3004350, BRAWH3004453, BRAWH3004530, BRAWH3004666, BRAWH3005037, BRAWH3005047, BRAWH3005132, BRAWH3005146, BRAWH3005292, BRAWH3005300, BRAWH3005422, BRAWH3005534, BRAWH3005886, BRAWH3005892, BRAWH3005896, BRAWH3005912, BRAWH3005981, BRAWH3006547, BRAWH3006548, BRAWH3006761, BRAWH3006792, BRAWH3007129, BRAWH3007221, BRAWH3007441, BRAWH3007455, BRAWH3007506, BRAWH3007726, BRAWH3007783, BRAWH3008167, BRAWH3008341, BRAWH3008559, BRAWH3008697, BRAWH3008867, BRAWH3008931, BRAWH3009017, BRAWH3009285, BRAWH3009297, BRAWH3009546, BRAWH3009961, BRAWH3010461, BRAWH3010560, BRAWH3010602, BRAWH3010657, BRAWH3010726, BRAWH3010833, BRAWH3011101, BRAWH3011331, BRAWH3011402, BRAWH3011577, BRAWH3011623, BRAWH3011637, BRAWH3011685, BRAWH3011907, BRAWH3011929, BRAWH3012005, BRAWH3012662, BRAWH3012779, BRAWH3013009, BRAWH3013049, BRAWH3013197, BRAWH3013264, BRAWH3013508, BRAWH3014609, BRAWH3014639, BRAWH3015017, BRAWH3015175, BRAWH3015260, BRAWH3015610, BRAWH3015825, BRAWH3016123, BRAWH3016271, BRAWH3016715, BRAWH3017259, BRAWH3017260, BRAWH3017477, BRAWH3017537, BRAWH3017980, BRAWH3018063, BRAWH3018369, BRAWH3018548, BRAWH3018969, BRAWH3019026, BRAWH3019529, BRAWH3019594, BRAWH3019629, BRAWH3019820, BRAWH3020200, BRAWH3020318, BRAWH3020486, BRAWH3020884, BRAWH3020928, BRAWH3021012, BRAWH3021545, BRAWH3021574, BRAWH3021580, BRAWH3021641, BRAWH3021643, BRAWH3021724, BRAWH3022347, BRAWH3022431, BRAWH3022459, BRAWH3022542, BRAWH3022719, BRAWH3022866, BRAWH3022900, BRAWH3023156, BRAWH3023168, BRAWH3023172, BRAWH3023274, BRAWH3023421, BRAWH3024231, BRAWH3024242, BRAWH3024469, BRAWH3024506, BRAWH3024613, BRAWH3024989, BRAWH3026349, BRAWH3026394, BRAWH3026529, BRAWH3027420, BRAWH3027440, BRAWH3027533, BRAWH3027574, BRAWH3027607, BRAWH3027616, BRAWH3027675, BRAWH3027806, BRAWH3027880, BRAWH3027927, BRAWH3028202, BRAWH3028223, BRAWH3028306, BRAWH3028461, BRAWH3028645, BRAWH3028754, BRAWH3028796, BRAWH3029254, BRAWH3029313, BRAWH3029538, BRAWH3029556, BRAWH3029806, BRAWH3030613, BRAWH3030772, BRAWH3030810, BRAWH3030892, BRAWH3030910, BRAWH3030950, BRAWH3031054, BRAWH3031710, BRAWH3031902, BRAWH3032298, BRAWH3032340, BRAWH3032571, BRAWH3032620, BRAWH3032930, BRAWH3033117, BRAWH3033293, BRAWH3033448, BRAWH3033513, BRAWH3034097, BRAWH3034114, BRAWH3034134, BRAWH3034668, BRAWH3034743, BRAWH3034775, BRAWH3034890, BRAWH3035154, BRAWH3035403, BRAWH3035904, BRAWH3035914, BRAWH3035936, BRAWH3036077, BRAWH3036247, BRAWH3036270, BRAWH3036561, BRAWH3036738, BRAWH3036951, BRAWH3037265, BRAWH3037394, BRAWH3037533, BRAWH3037979, BRAWH3038055, BRAWH3038230, BRAWH3038252, BRAWH3038324, BRCAN1000065, BRCAN1000076, BRCAN1000105, BRCAN1000149, BRCAN1000168, BRCAN2000148, BRCAN2000149, BRCAN2000209, BRCAN2000239, BRCAN2000346, BRCAN2000364, BRCAN2000383, BRCAN2000418, BRCAN2000523, BRCAN2000541, BRCAN2000563, BRCAN2000577, BRCAN2000620, BRCAN2000639, BRCAN2000763, BRCAN2000832, BRCAN2000923, BRCAN2001223, BRCAN2001866, BRCAN2002173, BRCAN2002416, BRCAN2002473, BRCAN2002562, BRCAN2002662, BRCAN2002826, BRCAN2002854, BRCAN2002856, BRCAN2002892, BRCAN2002944, BRCAN2002948, BRCAN2003070, BRCAN2003269, BRCAN2003389, BRCAN2003628, BRCAN2003703, BRCAN2003746, BRCAN2003814, BRCAN2003944, BRCAN2003987, BRCAN2004173, BRCAN2004355, BRCAN2004371, BRCAN2004653, BRCAN2004699, BRCAN2005436, BRCAN2005449, BRCAN2006019, BRCAN2006051, BRCAN2006063, BRCAN2006117, BRCAN2006174, BRCAN2006290, BRCAN2006297, BRCAN2006323, BRCAN2006401, BRCAN2006411, BRCAN2006450, BRCAN2006955, BRCAN2007119, BRCAN2007144, BRCAN2007409, BRCAN2007426, BRCAN2007525, BRCAN2007700, BRCAN2008494, BRCAN2008528, BRCAN2008701, BRCAN2008894, BRCAN2009156, BRCAN2009168, BRCAN2009203, BRCAN2010374, BRCAN2010376, BRCAN2010547, BRCAN2010581, BRCAN2010665, BRCAN2011254, BRCAN2011316, BRCAN2011602, BRCAN2011946, BRCAN2012110, BRCAN2012355, BRCAN2012402, BRCAN2012408, BRCAN2012481, BRCAN2012613, BRCAN2012713, BRCAN2012929, BRCAN2013655, BRCAN2013660, BRCAN2014143, BRCAN2014229, BRCAN2014370, BRCAN2014602, BRCAN2014652, BRCAN2014788, BRCAN2014881, BRCAN2014952, BRCAN2015371, BRCAN2015402, BRCAN2015464, BRCAN2015719, BRCAN2015757, BRCAN2015886, BRCAN2016025, BRCAN2016046, BRCAN2016174, BRCAN2016433, BRCAN2016619, BRCAN2016762, BRCAN2016814, BRCAN2017442, BRCAN2017905, BRCAN2018240, BRCAN2018269, BRCAN2018490, BRCAN2018566, BRCAN2018667, BRCAN2018748, BRCAN2018935, BRCAN2019002, BRCAN2019387, BRCAN2019653, BRCAN2019773, BRCAN2019907, BRCAN2020234, BRCAN2020331, BRCAN2020412, BRCAN2020467, BRCAN2020710, BRCAN2020880, BRCAN2021024, BRCAN2021028, BRCAN2021325, BRCAN2021452, BRCAN2021669, BRCAN2021718, BRCAN2022126, BRCAN2022191, BRCAN2022472, BRCAN2022474, BRCAN2023347, BRCAN2023724, BRCAN2024451, BRCAN2024563, BRCAN2024572, BRCAN2025009, BRCAN2025093, BRCAN2025349, BRCAN2025368, BRCAN2025712, BRCAN2025982, BRCAN2026117, BRCAN2026197, BRCAN2026340, BRCAN2026711, BRCAN2027150, BRCAN2027310, BRCAN2027334, BRCAN2027355, BRCAN2027364, BRCAN2027513, BRCAN2027593, BRCAN2027970, BRCAN2028021, BRCAN2028036, BRCAN2028040, BRCAN2028319, BRCAN2028338, BRCAN2028355, BRCAN2028378, BRCAN2028460, BRCAN2028545, BRCAN2028634, BRCAN2028702, BRCOC1000040, BRCOC1000087, BRCOC1000094, BRCOC2000004, BRCOC2000047, BRCOC2000152, BRCOC2000184, BRCOC2000186, BRCOC2000333, BRCOC2000360, BRCOC2000404, BRCOC2000487, BRCOC2000637, BRCOC2000670, BRCOC2000816, BRCOC2000850, BRCOC2001355, BRCOC2002085, BRCOC2002155, BRCOC2002323, BRCOC2002659, BRCOC2002664, BRCOC2002686, BRCOC2002751, BRCOC2002756, BRCOC2002777, BRCOC2002835, BRCOC2003100, BRCOC2003125, BRCOC2003187, BRCOC2003213, BRCOC2003513, BRCOC2003732, BRCOC2003740, BRCOC2004036, BRCOC2004175, BRCOC2004354, BRCOC2004455, BRCOC2004950, BRCOC2005542, BRCOC2005903, BRCOC2005951, BRCOC2006164, BRCOC2006189, BRCOC2006243, BRCOC2006270, BRCOC2006639, BRCOC2006942, BRCOC2007034, BRCOC2007593, BRCOC2007733, BRCOC2007769, BRCOC2008064, BRCOC2008225, BRCOC2008642, BRCOC2008993, BRCOC2009052, BRCOC2009196, BRCOC2009380, BRCOC2009638, BRCOC2009937, BRCOC2010115, BRCOC2010123, BRCOC2010510, BRCOC2010730, BRCOC2010980, BRCOC2010994, BRCOC2011010, BRCOC2011398, BRCOC2011418, BRCOC2011506, BRCOC2011769, BRCOC2011996, BRCOC2012172, BRCOC2012229, BRCOC2012386, BRCOC2012551, BRCOC2012813, BRCOC2013448, BRCOC2013573, BRCOC2013675, BRCOC2013780, BRCOC2014013, BRCOC2014033, BRCOC2014400, BRCOC2014748, BRCOC2014833, BRCOC2015597, BRCOC2015824, BRCOC2015908, BRCOC2015944, BRCOC2016525, BRCOC2016661, BRCOC2017061, BRCOC2017652, BRCOC2017856, BRCOC2018775, BRCOC2018877, BRCOC2019255, BRCOC2019549, BRCOC2019841, BRCOC2019896, BRCOC2019903, BRCOC2019910, BRCOC2019934, BRCOC2020122, BRCOC2020142, BRHIP1000058, BRHIP1000072, BRHIP1000104, BRHIP1000108, BRHIP1000129, BRHIP1000174, BRHIP1000258, BRHIP2000021, BRHIP2000079, BRHIP2000087, BRHIP2000163, BRHIP2000210, BRHIP2000239, BRHIP2000245, BRHIP2000312, BRHIP2000359, BRHIP2000445, BRHIP2000506, BRHIP2000532, BRHIP2000553, BRHIP2000621, BRHIP2000691, BRHIP2000819, BRHIP2000826, BRHIP2000920, BRHIP2001074, BRHIP2001099, BRHIP2001686, BRHIP2001782, BRHIP2001802, BRHIP2001805, BRHIP2001886, BRHIP2001927, BRHIP2002122, BRHIP2002143, BRHIP2002172, BRHIP2002339, BRHIP2002346, BRHIP2002510, BRHIP2002664, BRHIP2002722, BRHIP2002929, BRHIP2003048, BRHIP2003062, BRHIP2003242, BRHIP2003272, BRHIP2003748, BRHIP2003786, BRHIP2003828, BRHIP2003917, BRHIP2004312, BRHIP2004355, BRHIP2004359, BRHIP2004814, BRHIP2004883, BRHIP2004902, BRHIP2005010, BRHIP2005236, BRHIP2005271, BRHIP2005354, BRHIP2005600, BRHIP2005719, BRHIP2005724, BRHIP2005752, BRHIP2005932, BRHIP2006617, BRHIP2006782, BRHIP2006800, BRHIP2006819, BRHIP2006921, BRHIP2007305, BRHIP2007307, BRHIP2007616, BRHIP2007690, BRHIP2007741, BRHIP2007928, BRHIP2007969, BRHIP2008269, BRHIP2008389, BRHIP2008607, BRHIP2008756, BRHIP2008909, BRHIP2009019, BRHIP2009177, BRHIP2009340, BRHIP2009351, BRHIP2009414, BRHIP2009474, BRHIP2009617, BRHIP2009685, BRHIP2010217, BRHIP2010309, BRHIP2010444, BRHIP2010487, BRHIP2010571, BRHIP2010610, BRHIP2010723, BRHIP2010744, BRHIP2011080, BRHIP2011120, BRHIP2011199, BRHIP2011508, BRHIP2011576, BRHIP2011616, BRHIP2011783, BRHIP2011838, BRHIP2011891, BRHIP2011933, BRHIP2012054, BRHIP2012059, BRHIP2012141, BRHIP2012314, BRHIP2012360, BRHIP2012545, BRHIP2012580, BRHIP2012627, BRHIP2012642, BRHIP2012750, BRHIP2012922, BRHIP2012923, BRHIP2012972, BRHIP2013286, BRHIP2013447, BRHIP2013510, BRHIP2013699, BRHIP2013723, BRHIP2013958, BRHIP2013972, BRHIP2014063, BRHIP2014228, BRHIP2014285, BRHIP2014291, BRHIP2014373, BRHIP2014386, BRHIP2014387, BRHIP2014954, BRHIP2015153, BRHIP2015224, BRHIP2015245, BRHIP2015356, BRHIP2015360, BRHIP2015679, BRHIP2016005, BRHIP2016125, BRHIP2016788, BRHIP2016968, BRHIP2016990, BRHIP2017010, BRHIP2017315, BRHIP2017385, BRHIP2017404, BRHIP2017542, BRHIP2017553, BRHIP2017642, BRHIP2017714, BRHIP2017780, BRHIP2017945, BRHIP2018014, BRHIP2018369, BRHIP2018612, BRHIP2018635, BRHIP2018650, BRHIP2018712, BRHIP2018719, BRHIP2018805, BRHIP2018998, BRHIP2019007, BRHIP2019047, BRHIP2019149, BRHIP2019177, BRHIP2019291, BRHIP2019494, BRHIP2019589, BRHIP2019641, BRHIP2019819, BRHIP2019884, BRHIP2019972, BRHIP2020182, BRHIP2020509, BRHIP2020573, BRHIP2020622, BRHIP2020695, BRHIP2020743, BRHIP2020799, BRHIP2020842, BRHIP2020859, BRHIP2020930, BRHIP2021102, BRHIP2021289, BRHIP2021495, BRHIP2021615, BRHIP2021744, BRHIP2021762, BRHIP2021858, BRHIP2021870, BRHIP2021929, BRHIP2022006, BRHIP2022054, BRHIP2022221, BRHIP2022228, BRHIP2022298, BRHIP2022326, BRHIP2022467, BRHIP2022708, BRHIP2022986, BRHIP2023071, BRHIP2023229, BRHIP2023272, BRHIP2023292, BRHIP2023309, BRHIP2023369, BRHIP2023438, BRHIP2023695, BRHIP2023735, BRHIP2023762, BRHIP2023773, BRHIP2023860, BRHIP2023869, BRHIP2023888, BRHIP2024046, BRHIP2024165, BRHIP2024201, BRHIP2024347, BRHIP2024398, BRHIP2024549, BRHIP2024742, BRHIP2024789, BRHIP2024911, BRHIP2024941, BRHIP2025245, BRHIP2025366, BRHIP2025448, BRHIP2025679, BRHIP2025739, BRHIP2025797, BRHIP2026021, BRHIP2026061, BRHIP2026155, BRHIP2026214, BRHIP2026288, BRHIP2026346, BRHIP2026557, BRHIP2026723, BRHIP2026877, BRHIP2027017, BRHIP2027054, BRHIP2027077, BRHIP2027563, BRHIP2027685, BRHIP2027762, BRHIP2028187, BRHIP2028303, BRHIP2028330, BRHIP2028480, BRHIP2028583, BRHIP2028593, BRHIP2029176, BRHIP2029283, BRHIP2029393, BRHIP2029529, BRHIP2029643, BRHIP2029663, BRHIP3000017, BRHIP3000060, BRHIP3000070, BRHIP3000081, BRHIP3000111, BRHIP3000131, BRHIP3000240, BRHIP3000377, BRHIP3000457, BRHIP3000475, BRHIP3000488, BRHIP3000526, BRHIP3000626, BRHIP3000859, BRHIP3000907, BRHIP3001076, BRHIP3001079, BRHIP3001141, BRHIP3001283, BRHIP3001338, BRHIP3001360, BRHIP3001481, BRHIP3001878, BRHIP3001964, BRHIP3002114, BRHIP3002124, BRHIP3002141, BRHIP3002363, BRHIP3002691, BRHIP3002920, BRHIP3002931, BRHIP3003063, BRHIP3003126, BRHIP3003306, BRHIP3003340, BRHIP3003395, BRHIP3003484, BRHIP3003644, BRHIP3003688, BRHIP3003795, BRHIP3003961, BRHIP3003984, BRHIP3004193, BRHIP3004215, BRHIP3004416, BRHIP3004710, BRHIP3004725, BRHIP3004774, BRHIP3004786, BRHIP3004863, BRHIP3004968, BRHIP3005037, BRHIP3005137, BRHIP3005142, BRHIP3005231, BRHIP3005307, BRHIP3005574, BRHIP3005673, BRHIP3005768, BRHIP3005801, BRHIP3005944, BRHIP3006279, BRHIP3006294, BRHIP3006390, BRHIP3006449, BRHIP3006683, BRHIP3006717, BRHIP3006786, BRHIP3006950, BRHIP3007172, BRHIP3007183, BRHIP3007195, BRHIP3007239, BRHIP3007291, BRHIP3007409, BRHIP3007424, BRHIP3007483, BRHIP3007586, BRHIP3007609, BRHIP3007640, BRHIP3007960, BRHIP3008082, BRHIP3008183, BRHIP3008314, BRHIP3008320, BRHIP3008344, BRHIP3008405, BRHIP3008565, BRHIP3008598, BRHIP3008606, BRHIP3008691, BRHIP3008714, BRHIP3008997, BRHIP3009099, BRHIP3009140, BRHIP3009181, BRHIP3009318, BRHIP3009427, BRHIP3009448, BRHIP3009672, BRHIP3010135, BRHIP3010289, BRHIP3010529, BRHIP3011082, BRHIP3011241, BRHIP3011269, BRHIP3011460, BRHIP3011567, BRHIP3011831, BRHIP3012185, BRHIP3012289, BRHIP3012357, BRHIP3012736, BRHIP3012745, BRHIP3012868, BRHIP3012997, BRHIP3013078, BRHIP3013271, BRHIP3013588, BRHIP3013698, BRHIP3013765, BRHIP3013897, BRHIP3014237, BRHIP3014675, BRHIP3015620, BRHIP3015751, BRHIP3015854, BRHIP3016032, BRHIP3016213, BRHIP3016302, BRHIP3016421, BRHIP3017109, BRHIP3017146, BRHIP3017256, BRHIP3017325, BRHIP3017558, BRHIP3017637, BRHIP3017855, BRHIP3018278, BRHIP3019643, BRHIP3019824, BRHIP3019880, BRHIP3019956, BRHIP3020046, BRHIP3020155, BRHIP3020182, BRHIP3020733, BRHIP3021019, BRHIP3021499, BRHIP3021534, BRHIP3021778, BRHIP3021987, BRHIP3022656, BRHIP3023922, BRHIP3024118, BRHIP3024533, BRHIP3024703, BRHIP3024725, BRHIP3024820, BRHIP3025161, BRHIP3025702, BRHIP3025795, BRHIP3025844, BRHIP3026052, BRHIP3026097, BRHIP3026231, BRHIP3026335, BRHIP3026651, BRHIP3027105, BRHIP3027137, BRHIP3027160, BRHIP3027191, BRHIP3027501, BRHIP3027594, BRHIP3027651, BRHIP3027854, BRHIP3027947, BRHIP3028570, BRHIP3028742, BRSSN1000056, BRSSN1000059, BRSSN1000092, BRSSN1000153, BRSSN2000097, BRSSN2000175, BRSSN2000197, BRSSN2000244, BRSSN2000293, BRSSN2000295, BRSSN2000312, BRSSN2000498, BRSSN2000518, BRSSN2000561, BRSSN2000566, BRSSN2000684, BRSSN2000715, BRSSN2000832, BRSSN2001213, BRSSN2001275, BRSSN2001342, BRSSN2001426, BRSSN2001503, BRSSN2001579, BRSSN2001758, BRSSN2001810, BRSSN2001869, BRSSN2002857, BRSSN2002859, BRSSN2003012, BRSSN2003086, BRSSN2003093, BRSSN2003820, BRSSN2003841, BRSSN2003937, BRSSN2004142, BRSSN2004303, BRSSN2004304, BRSSN2004496, BRSSN2004657, BRSSN2004679, BRSSN2004686, BRSSN2004710, BRSSN2004719, BRSSN2005847, BRSSN2006133, BRSSN2006390, BRSSN2006575, BRSSN2006611, BRSSN2006644, BRSSN2006892, BRSSN2007076, BRSSN2007168, BRSSN2007202, BRSSN2007338, BRSSN2007464, BRSSN2007504, BRSSN2007819, BRSSN2008125, BRSSN2008419, BRSSN2008464, BRSSN2008549, BRSSN2008797, BRSSN2009119, BRSSN2009378, BRSSN2009389, BRSSN2009395, BRSSN2009518, BRSSN2009627, BRSSN2009630, BRSSN2009702, BRSSN2010019, BRSSN2010110, BRSSN2010587, BRSSN2010596, BRSSN2010830, BRSSN2011262, BRSSN2011653, BRSSN2011738, BRSSN2011843, BRSSN2012081, BRSSN2012103, BRSSN2012157, BRSSN2012198, BRSSN2012254, BRSSN2012439, BRSSN2012622, BRSSN2012691, BRSSN2012838, BRSSN2013095, BRSSN2013544, BRSSN2013696, BRSSN2013702, BRSSN2013733, BRSSN2013753, BRSSN2013874, BRSSN2014112, BRSSN2014294, BRSSN2014299, BRSSN2014424, BRSSN2014513, BRSSN2014556, BRSSN2014573, BRSSN2014610, BRSSN2014636, BRSSN2014685, BRSSN2015199, BRSSN2015369, BRSSN2015493, BRSSN2015497, BRSSN2015554, BRSSN2015707, BRSSN2015773, BRSSN2015907, BRSSN2015982, BRSSN2016589, BRSSN2016768, BRSSN2016905, BRSSN2017297, BRSSN2017422, BRSSN2017530, BRSSN2017682, BRSSN2017757, BRSSN2018218, BRSSN2018440, BRSSN2018447, BRSSN2018581, BRSSN2018731, BRSSN2018771, BRSSN2018925, BRSTN1000097, BRSTN2000058, BRSTN2000070, BRSTN2000220, BRSTN2000312, BRSTN2000367, BRSTN2000536, BRSTN2000872, BRSTN2001067, BRSTN2001613, BRSTN2001801, BRSTN2002105, BRSTN2002400, BRSTN2002532, BRSTN2002691, BRSTN2003590, BRSTN2003835, BRSTN2004863, BRSTN2004869, BRSTN2004987, BRSTN2005721, BRSTN2006306, BRSTN2006466, BRSTN2006580, BRSTN2006583, BRSTN2006638, BRSTN2006865, BRSTN2007000, BRSTN2007118, BRSTN2007284, BRSTN2007765, BRSTN2008052, BRSTN2008283, BRSTN2008367, BRSTN2008418, BRSTN2008457, BRSTN2008475, BRSTN2008930, BRSTN2009247, BRSTN2010089, BRSTN2010107, BRSTN2010363, BRSTN2010416, BRSTN2010500, BRSTN2010569, BRSTN2010750, BRSTN2010923, BRSTN2011211, BRSTN2011597, BRSTN2011688, BRSTN2011799, BRSTN2011961, BRSTN2012089, BRSTN2012284, BRSTN2012320, BRSTN2012380, BRSTN2012451, BRSTN2013171, BRSTN2013354, BRSTN2013502, BRSTN2013931, BRSTN2014490, BRSTN2014633, BRSTN2014751, BRSTN2014770, BRSTN2015015, BRSTN2015889, BRSTN2015978, BRSTN2016066, BRSTN2016335, BRSTN2016470, BRSTN2016678, BRSTN2016892, BRSTN2016918, BRSTN2016992, BRSTN2017104, BRSTN2017151, BRSTN2017237, BRSTN2017379, BRSTN2017761, BRSTN2017771, BRSTN2017995, BRSTN2018077, BRSTN2018083, BRSTN2018596, BRSTN2018692, BRSTN2018712, BRSTN2019079, BRSTN2019129, BRTHA1000021, BRTHA1000063, BRTHA1000311, BRTHA2000057, BRTHA2000474, BRTHA2000514, BRTHA2000574, BRTHA2000855, BRTHA2000969, BRTHA2000972, BRTHA2001304, BRTHA2001370, BRTHA2001462, BRTHA2001717, BRTHA2001812, BRTHA2002091, BRTHA2002115, BRTHA2002133, BRTHA2002281, BRTHA2002376, BRTHA2002442, BRTHA2002493, BRTHA2002565, BRTHA2002608, BRTHA2002702, BRTHA2002721, BRTHA2002726, BRTHA2002741, BRTHA2002808, BRTHA2002896, BRTHA2002903, BRTHA2003030, BRTHA2003110, BRTHA2003116, BRTHA2003436, BRTHA2003759, BRTHA2003794, BRTHA2004361, BRTHA2004371, BRTHA2004582, BRTHA2004629, BRTHA2004639, BRTHA2004642, BRTHA2004812, BRTHA2004821, BRTHA2004978, BRTHA2004992, BRTHA2005005, BRTHA2005013, BRTHA2005448, BRTHA2005579, BRTHA2005831, BRTHA2005864, BRTHA2005942, BRTHA2005956, BRTHA2006075, BRTHA2006146, BRTHA2006194, BRTHA2006232, BRTHA2006720, BRTHA2006735, BRTHA2006974, BRTHA2006975, BRTHA2007060, BRTHA2007122, BRTHA2007422, BRTHA2007603, BRTHA2007665, BRTHA2007998, BRTHA2008316, BRTHA2008335, BRTHA2008502, BRTHA2008513, BRTHA2008527, BRTHA2008535, BRTHA2008598, BRTHA2008669, BRTHA2008955, BRTHA2009311, BRTHA2009349, BRTHA2009486, BRTHA2009803, BRTHA2009846, BRTHA2009886, BRTHA2009972, BRTHA2010008, BRTHA2010033, BRTHA2010073, BRTHA2010097, BRTHA2010191, BRTHA2010397, BRTHA2010608, BRTHA2010672, BRTHA2010884, BRTHA2010907, BRTHA2011062, BRTHA2011194, BRTHA2011321, BRTHA2011351, BRTHA2011500, BRTHA2011641, BRTHA2011691, BRTHA2012129, BRTHA2012183, BRTHA2012189, BRTHA2012351, BRTHA2012392, BRTHA2012466, BRTHA2012555, BRTHA2012562, BRTHA2012714, BRTHA2012980, BRTHA2013054, BRTHA2013262, BRTHA2013275, BRTHA2013426, BRTHA2013460, BRTHA2013515, BRTHA2013540, BRTHA2013595, BRTHA2013610, BRTHA2013707, BRTHA2013942, BRTHA2014287, BRTHA2014334, BRTHA2014381, BRTHA2014578, BRTHA2014647, BRTHA2014663, BRTHA2014792, BRTHA2014828, BRTHA2014909, BRTHA2014975, BRTHA2014997, BRTHA2015406, BRTHA2015478, BRTHA2015696, BRTHA2015700, BRTHA2015853, BRTHA2015878, BRTHA2016179, BRTHA2016215, BRTHA2016267, BRTHA2016318, BRTHA2016496, BRTHA2016543, BRTHA2016552, BRTHA2016577, BRTHA2016765, BRTHA2016918, BRTHA2017178, BRTHA2017353, BRTHA2017364, BRTHA2017972, BRTHA2017985, BRTHA2018011, BRTHA2018129, BRTHA2018165, BRTHA2018304, BRTHA2018344, BRTHA2018420, BRTHA2018443, BRTHA2018504, BRTHA2018558, BRTHA2018591, BRTHA2018624, BRTHA2018706, BRTHA2018707, BRTHA2019014, BRTHA2019022, BRTHA2019048, BRTHA2019073, BRTHA2019726, BRTHA2019743, BRTHA2020400, BRTHA2020566, BRTHA2020642, BRTHA2020695, BRTHA2020721, BRTHA2020781, BRTHA2020811, BRTHA2020910, BRTHA2021212, BRTHA2021440, BRTHA2021450, BRTHA2022074, BRTHA2022914, BRTHA2022968, BRTHA2023402, BRTHA2023437, BRTHA2024177, BRTHA2024354, BRTHA2024712, BRTHA2025869, BRTHA2026071, BRTHA2026290, BRTHA2026311, BRTHA2027227, BRTHA2027229, BRTHA2027250, BRTHA2027546, BRTHA2028297, BRTHA2029969, BRTHA2030036, BRTHA2030213, BRTHA2031517, BRTHA2031800, BRTHA2031917, BRTHA2032763, BRTHA2032845, BRTHA2033122, BRTHA2033155, BRTHA2033264, BRTHA2033320, BRTHA2033469, BRTHA2033683, BRTHA2034281, BRTHA2034576, BRTHA2034874, BRTHA2035448, BRTHA2035743, BRTHA2036055, BRTHA2036295, BRTHA2036660, BRTHA2037247, BRTHA2038279, BRTHA2038345, BRTHA2038353, BRTHA2038396, BRTHA3000252, BRTHA3000273, BRTHA3000296, BRTHA3000297, BRTHA3000325, BRTHA3000456, BRTHA3000633, BRTHA3000789, BRTHA3001221, BRTHA3001623, BRTHA3002265, BRTHA3002401, BRTHA3002411, BRTHA3002427, BRTHA3002864, BRTHA3002933, BRTHA3002955, BRTHA3003000, BRTHA3003023, BRTHA3003074, BRTHA3003225, BRTHA3003339, BRTHA3003343, BRTHA3003417, BRTHA3003449, BRTHA3003474, BRTHA3003490, BRTHA3003704, BRTHA3003736, BRTHA3004307, BRTHA3004432, BRTHA3004475, BRTHA3004502, BRTHA3004610, BRTHA3005046, BRTHA3005735, BRTHA3005988, BRTHA3006318, BRTHA3006593, BRTHA3006856, BRTHA3007113, BRTHA3007130, BRTHA3007148, BRTHA3007319, BRTHA3007469, BRTHA3007472, BRTHA3007532, BRTHA3007662, BRTHA3007685, BRTHA3007769, BRTHA3007922, BRTHA3008143, BRTHA3008293, BRTHA3008310, BRTHA3008386, BRTHA3008520, BRTHA3008608, BRTHA3008694, BRTHA3008778, BRTHA3008826, BRTHA3009037, BRTHA3009090, BRTHA3009291, BRTHA3009858, BRTHA3010135, BRTHA3010366, BRTHA3010469, BRTHA3010530, BRTHA3010540, BRTHA3010717, BRTHA3011149, BRTHA3011187, BRTHA3011194, BRTHA3011229, BRTHA3011265, BRTHA3011361, BRTHA3011510, BRTHA3011892, BRTHA3012265, BRTHA3013860, BRTHA3013882, BRTHA3013884, BRTHA3013981, BRTHA3014000, BRTHA3014105, BRTHA3014507, BRTHA3014547, BRTHA3014691, BRTHA3014835, BRTHA3014854, BRTHA3014908, BRTHA3014920, BRTHA3015815, BRTHA3016616, BRTHA3016835, BRTHA3016845, BRTHA3016917, BRTHA3017047, BRTHA3017589, BRTHA3017848, BRTHA3018409, BRTHA3018514, BRTHA3018617, BRTHA3018623, BRTHA3018656, BRTHA3019048, BRTHA3019105, BRTHA3019183, BRTHA3020000, BRTHA3020314, BRTHA3020369, BRTHA3021569, BRTHA3021708, BRTHA3021786, BRTHA3021971, BRTHA3022641, BRTHA3023403, BRTHA3023523, BRTHA3023590, BRTHA3023929, BRTHA3024233, BRTHA3024600, BRTHA3025073, BRTHA3025789, BRTHA3025826, BRTHA3026161, BRTHA3026180, BRTHA3026507, BRTHA3026556, BRTHA3026916, BRTHA3027171, BRTHA3027318, BRTHA3027638, BRTHA3027820, BRTHA3027879, BRTHA3027957, BRTHA3028339, BRTHA3028505, BRTHA3028782, CD34C2000051, CD34C2000152, CD34C2000175, CD34C2000443, CD34C3000125, CD34C3000252, CD34C3000314, CD34C3000424, CD34C3000494, CERVX1000042, CERVX2000812, CERVX2000968, CERVX2002006, CERVX2002013, CERVX2002430, CERVX2002770, CHONS1000058, CHONS2000172, CHONS2000797, CHONS2001287, CHONS2001382, CHONS2001797, CHONS2001834, CHONS2002419, CHONS2002829, COLON1000030, COLON1000084, COLON1000135, COLON2000470, COLON2000557, COLON2000568, COLON2001721, COLON2001829, COLON2001866, COLON2002443, COLON2002520, COLON2003043, COLON2003529, COLON2004318, COLON2004351, COLON2004478, COLON2004911, COLON2005126, COLON2005623, COLON2005735, COLON2005772, COLON2006263, COLON2006282, COLON2006417, COLON2007274, COLON2007733, COLON2008105, COLON2009337, COLON2009499, CORDB1000140, CORDB2000061, CORDB2000127, CORDB2000541, CTONG1000009, CTONG1000020, CTONG1000022, CTONG1000040, CTONG1000056, CTONG1000062, CTONG1000086, CTONG1000087, CTONG1000088, CTONG1000093, CTONG1000097, CTONG1000113, CTONG1000137, CTONG1000165, CTONG1000175, CTONG1000180, CTONG1000181, CTONG1000220, CTONG1000241, CTONG1000277, CTONG1000283, CTONG1000288, CTONG1000302, CTONG1000341, CTONG1000467, CTONG1000476, CTONG1000488, CTONG1000508, CTONG1000540, CTONG2000031, CTONG2000034, CTONG2000042, CTONG2000063, CTONG2000201, CTONG2000218, CTONG2000279, CTONG2000303, CTONG2000330, CTONG2000395, CTONG2000411, CTONG2000452, CTONG2000465, CTONG2000469, CTONG2000480, CTONG2000508, CTONG2000561, CTONG2000589, CTONG2000766, CTONG2000771, CTONG2000819, CTONG2000827, CTONG2000846, CTONG2000855, CTONG2000977, CTONG2001139, CTONG2001226, CTONG2001320, CTONG2001366, CTONG2001413, CTONG2001428, CTONG2001513, CTONG2001524, CTONG2001533, CTONG2001598, CTONG2001681, CTONG2001724, CTONG2001748, CTONG2001749, CTONG2001800, CTONG2001820, CTONG2001858, CTONG2001877, CTONG2001911, CTONG2001932, CTONG2001955, CTONG2002066, CTONG2002073, CTONG2002095, CTONG2002143, CTONG2002270, CTONG2002395, CTONG2002417, CTONG2002418, CTONG2002453, CTONG2002520, CTONG2002558, CTONG2002590, CTONG2002709, CTONG2002721, CTONG2002766, CTONG2002803, CTONG2002816, CTONG2002820, CTONG2002832, CTONG2002841, CTONG2002903, CTONG2002965, CTONG2002999, CTONG2003028, CTONG2003094, CTONG2003100, CTONG2003115, CTONG2003189, CTONG2003245, CTONG2003293, CTONG2003298, CTONG2003348, CTONG2003350, CTONG2003361, CTONG2003372, CTONG2003375, CTONG2003427, CTONG2003517, CTONG2003524, CTONG2003599, CTONG2003680, CTONG2003699, CTONG2003764, CTONG2003782, CTONG2003889, CTONG2003937, CTONG2003945, CTONG2004000, CTONG2004062, CTONG2004115, CTONG2004126, CTONG2004264, CTONG2004305, CTONG2004397, CTONG2004423, CTONG2004454, CTONG2004487, CTONG2004550, CTONG2004669, CTONG2004716, CTONG2004912, CTONG2004941, CTONG2004948, CTONG2005028, CTONG2005049, CTONG2005110, CTONG2005145, CTONG2005265, CTONG2005278, CTONG2005290, CTONG2005374, CTONG2005399, CTONG2005468, CTONG2005553, CTONG2005567, CTONG2005585, CTONG2005615, CTONG2005635, CTONG2005775, CTONG2005795, CTONG2005890, CTONG2005904, CTONG2005913, CTONG2006004, CTONG2006129, CTONG2006223, CTONG2006235, CTONG2006273, CTONG2006310, CTONG2006377, CTONG2006393, CTONG2006412, CTONG2006449, CTONG2006515, CTONG2006524, CTONG2006562, CTONG2006568, CTONG2006611, CTONG2006620, CTONG2006666, CTONG2006691, CTONG2006709, CTONG2006798, CTONG2006836, CTONG2006932, CTONG2006942, CTONG2006964, CTONG2007007, CTONG2007009, CTONG2007072, CTONG2007078, CTONG2007091, CTONG2007104, CTONG2007168, CTONG2007175, CTONG2007259, CTONG2007272, CTONG2007293, CTONG2007297, CTONG2007399, CTONG2007400, CTONG2007417, CTONG2007441, CTONG2007474, CTONG2007586, CTONG2007613, CTONG2007623, CTONG2007681, CTONG2007776, CTONG2007779, CTONG2007898, CTONG2007959, CTONG2007970, CTONG2008014, CTONG2008184, CTONG2008262, CTONG2008269, CTONG2008321, CTONG2008343, CTONG2008398, CTONG2008402, CTONG2008405, CTONG2008466, CTONG2008506, CTONG2008518, CTONG2008521, CTONG2008562, CTONG2008577, CTONG2008595, CTONG2008621, CTONG2008689, CTONG2008720, CTONG2008721, CTONG2008773, CTONG2008792, CTONG2008989, CTONG2009033, CTONG2009108, CTONG2009132, CTONG2009156, CTONG2009181, CTONG2009257, CTONG2009258, CTONG2009268, CTONG2009270, CTONG2009395, CTONG2009423, CTONG2009440, CTONG2009527, CTONG2009529, CTONG2009531, CTONG2009534, CTONG2009570, CTONG2009572, CTONG2009604, CTONG2009643, CTONG2009675, CTONG2009689, CTONG2009725, CTONG2009766, CTONG2009768, CTONG2009844, CTONG2009871, CTONG2009887, CTONG2009891, CTONG2009923, CTONG2009938, CTONG2009955, CTONG2009958, CTONG2009963, CTONG2010018, CTONG2010024, CTONG2010116, CTONG2010133, CTONG2010148, CTONG2010276, CTONG2010330, CTONG2010348, CTONG2010408, CTONG2010508, CTONG2010566, CTONG2010623, CTONG2010649, CTONG2010652, CTONG2010803, CTONG2010821, CTONG2011188, CTONG2011429, CTONG2011474, CTONG2011676, CTONG2011716, CTONG2011765, CTONG2011779, CTONG2011801, CTONG2011815, CTONG2011822, CTONG2011825, CTONG2011920, CTONG2011985, CTONG2012001, CTONG2012029, CTONG2012050, CTONG2012077, CTONG2012101, CTONG2012123, CTONG2012158, CTONG2012230, CTONG2012401, CTONG2012422, CTONG2012425, CTONG2012447, CTONG2012453, CTONG2012473, CTONG2012476, CTONG2012533, CTONG2012554, CTONG2012564, CTONG2012607, CTONG2012661, CTONG2012724, CTONG2012738, CTONG2012745, CTONG2012758, CTONG2012843, CTONG2012847, CTONG2012879, CTONG2012901, CTONG2012996, CTONG2013128, CTONG2013149, CTONG2013156, CTONG2013178, CTONG2013222, CTONG2013284, CTONG2013339, CTONG2013348, CTONG2013352, CTONG2013381, CTONG2013393, CTONG2013511, CTONG2013630, CTONG2013803, CTONG2013907, CTONG2013934, CTONG2013985, CTONG2013986, CTONG2014032, CTONG2014058, CTONG2014119, CTONG2014165, CTONG2014191, CTONG2014206, CTONG2014234, CTONG2014264, CTONG2014280, CTONG2014369, CTONG2014389, CTONG2014491, CTONG2014630, CTONG2014635, CTONG2014646, CTONG2014705, CTONG2014898, CTONG2014946, CTONG2014954, CTONG2014959, CTONG2014966, CTONG2014995, CTONG2015204, CTONG2015316, CTONG2015330, CTONG2015345, CTONG2015358, CTONG2015434, CTONG2015518, CTONG2015540, CTONG2015596, CTONG2015633, CTONG2015678, CTONG2015717, CTONG2015804, CTONG2015815, CTONG2015866, CTONG2015914, CTONG2015953, CTONG2016056, CTONG2016217, CTONG2016355, CTONG2016408, CTONG2016499, CTONG2016505, CTONG2016559, CTONG2016575, CTONG2016658, CTONG2016775, CTONG2016797, CTONG2016824, CTONG2016846, CTONG2016869, CTONG2016904, CTONG2016931, CTONG2016942, CTONG2016953, CTONG2017021, CTONG2017094, CTONG2017292, CTONG2017409, CTONG2017429, CTONG2017444, CTONG2017458, CTONG2017500, CTONG2017650, CTONG2017798, CTONG2017804, CTONG2017814, CTONG2017910, CTONG2017939, CTONG2017989, CTONG2017998, CTONG2018062, CTONG2018069, CTONG2018147, CTONG2018211, CTONG2018217, CTONG2018279, CTONG2018334, CTONG2018343, CTONG2018379, CTONG2018383, CTONG2018413, CTONG2018483, CTONG2018629, CTONG2018632, CTONG2018637, CTONG2018652, CTONG2018653, CTONG2018655, CTONG2018735, CTONG2018739, CTONG2018808, CTONG2018843, CTONG2018898, CTONG2018900, CTONG2018976, CTONG2019029, CTONG2019063, CTONG2019144, CTONG2019232, CTONG2019248, CTONG2019400, CTONG2019590, CTONG2019652, CTONG2019704, CTONG2019822, CTONG2019833, CTONG2020031, CTONG2020108, CTONG2020127, CTONG2020171, CTONG2020374, CTONG2020378, CTONG2020411, CTONG2020445, CTONG2020484, CTONG2020522, CTONG2020560, CTONG2020582, CTONG2020638, CTONG2020806, CTONG2020831, CTONG2020974, CTONG2021024, CTONG2021132, CTONG2021168, CTONG2021289, CTONG2022153, CTONG2022601, CTONG2022835, CTONG2023021, CTONG2023449, CTONG2023512, CTONG2024031, CTONG2024206, CTONG2024614, CTONG2024749, CTONG2025496, CTONG2025513, CTONG2025516, CTONG2025610, CTONG2025900, CTONG2026513, CTONG2026770, CTONG2026920, CTONG2026987, CTONG2027150, CTONG2027263, CTONG2027327, CTONG2027361, CTONG2027591, CTONG2027736, CTONG2027783, CTONG2027828, CTONG2027959, CTONG2028097, CTONG2028309, CTONG2028486, CTONG2028518, CTONG2028687, CTONG2028758, CTONG3000657, CTONG3000686, CTONG3000707, CTONG3000896, CTONG3001123, CTONG3001420, CTONG3001501, CTONG3001560, CTONG3001605, CTONG3001746, CTONG3002020, CTONG3002127, CTONG3002370, CTONG3002433, CTONG3002518, CTONG3002552, CTONG3002588, CTONG3002674, CTONG3002728, CTONG3002835, CTONG3002909, CTONG3002947, CTONG3002983, CTONG3003165, CTONG3003179, CTONG3003483, CTONG3003553, CTONG3003598, CTONG3003652, CTONG3003654, CTONG3003669, CTONG3003737, CTONG3003905, CTONG3003972, CTONG3004072, CTONG3004317, CTONG3004397, CTONG3004550, CTONG3004576, CTONG3004607, CTONG3004712, CTONG3004726, CTONG3005325, CTONG3005648, CTONG3005713, CTONG3005803, CTONG3005813, CTONG3006067, CTONG3006073, CTONG3006186, CTONG3006629, CTONG3006650, CTONG3006659, CTONG3007244, CTONG3007444, CTONG3007528, CTONG3007586, CTONG3007870, CTONG3008223, CTONG3008252, CTONG3008258, CTONG3008457, CTONG3008496, CTONG3008566, CTONG3008639, CTONG3008831, CTONG3008951, CTONG3008959, CTONG3009227, CTONG3009239, CTONG3009287, CTONG3009328, CTONG3009385, D30ST1000066, D30ST1000109, D30ST1000238, D30ST1000267, D30ST1000270, D30ST2000184, D30ST2000618, D30ST2000654, D30ST2000734, D30ST2001328, D30ST2001669, D30ST2001670, D30ST2001788, D30ST2002068, D30ST2002182, D30ST2002223, D30ST2002262, D30ST2002272, D30ST2002417, D30ST2002436, D30ST2002648, D30ST2003024, D30ST2003331, D30ST2003607, D30ST2003797, D30ST2004637, D30ST3000195, D30ST3000258, D30ST3000291, D30ST3000388, D30ST3000493, D60ST2000127, D60ST2000169, D60ST2000245, D60ST2000358, D60ST2000464, D60ST2000507, D90ST2000031, D90ST2000278, D90ST2000440, D90ST2000869, D90ST2001319, D90ST2001433, D90ST2002397, D90ST2002608, D90ST2002673, D90ST2003106, D90ST2003108, D90ST2003137, D90ST2003397, D90ST2003580, D90ST2003594, D90ST2003791, D90ST2003989, D90ST2004018, D90ST2004073, D90ST2004417, DFNES1000003, DFNES1000083, DFNES1000107, DFNES1000150, DFNES1000185, DFNES2000011, DFNES2000143, DFNES2000146, DFNES2000153, DFNES2000212, DFNES2000292, DFNES2000335, DFNES2000426, DFNES2000432, DFNES2000457, DFNES2000471, DFNES2000526, DFNES2000913, DFNES2001091, DFNES2001096, DFNES2001108, DFNES2001177, DFNES2001404, DFNES2001564, DFNES2001565, DFNES2001647, DFNES2001800, DFNES2001829, DFNES2002220, DFNES2002509, DFNES2002550, DFNES2002588, DFNES2002817, DFNES2002966, DFNES2003081, DFNES2003192, DFNES2003255, DFNES2003742, DFNES2004346, DFNES2004354, DFNES2004371, DFNES2004383, DFNES2004608, DFNES2004684, DFNES2005266, DFNES2005527, DFNES2005540, DFNES2005690, DFNES2005766, DFNES2005779, DFNES2005875, DFNES2006346, DFNES2006944, DFNES2007113, DFNES2007299, DFNES2007332, DFNES2007634, DFNES2007641, DFNES2007757, DFNES2008088, DFNES2008160, DFNES2008280, DFNES2008881, DFNES2009482, DFNES2010502, DFNES2011192, DFNES2011221, DFNES2011239, DFNES2011245, DFNES2011380, DFNES2011499, ERLTF1000021, ERLTF2000324, ERLTF2000465, FCBBF1000023, FCBBF1000024, FCBBF1000025, FCBBF1000027, FCBBF1000038, FCBBF1000053, FCBBF1000061, FCBBF1000063, FCBBF1000069, FCBBF1000077, FCBBF1000115, FCBBF1000117, FCBBF1000118, FCBBF1000121, FCBBF1000125, FCBBF1000131, FCBBF1000139, FCBBF1000155, FCBBF1000157, FCBBF1000171, FCBBF1000174, FCBBF1000182, FCBBF1000197, FCBBF1000198, FCBBF1000206, FCBBF1000220, FCBBF1000232, FCBBF1000233, FCBBF1000243, FCBBF1000270, FCBBF1000272, FCBBF1000280, FCBBF1000297, FCBBF1000305, FCBBF1000314, FCBBF1000322, FCBBF1000349, FCBBF1000367, FCBBF1000374, FCBBF1000376, FCBBF1000377, FCBBF1000395, FCBBF1000397, FCBBF1000403, FCBBF1000412, FCBBF1000425, FCBBF1000437, FCBBF1000449, FCBBF1000466, FCBBF1000476, FCBBF1000506, FCBBF1000509, FCBBF1000546, FCBBF1000550, FCBBF1000556, FCBBF1000563, FCBBF1000574, FCBBF1000581, FCBBF1000582, FCBBF1000598, FCBBF1000604, FCBBF1000618, FCBBF1000627, FCBBF1000671, FCBBF1000675, FCBBF1000684, FCBBF1000686, FCBBF1000687, FCBBF1000691, FCBBF1000732, FCBBF1000748, FCBBF1000760, FCBBF2000038, FCBBF2000094, FCBBF2000105, FCBBF2000123, FCBBF2000195, FCBBF2000199, FCBBF2000214, FCBBF2000232, FCBBF2000259, FCBBF2000276, FCBBF2000291, FCBBF2000362, FCBBF2000379, FCBBF2000473, FCBBF2000502, FCBBF2000566, FCBBF2000576, FCBBF2000591, FCBBF2000677, FCBBF2000678, FCBBF2000685, FCBBF2000733, FCBBF2000782, FCBBF2000808, FCBBF2000815, FCBBF2000825, FCBBF2000885, FCBBF2000940, FCBBF2000951, FCBBF2001001, FCBBF2001088, FCBBF2001105, FCBBF2001116, FCBBF2001183, FCBBF2001188, FCBBF2001211, FCBBF2001238, FCBBF2001243, FCBBF2001291, FCBBF2001299, FCBBF2001309, FCBBF2001400, FCBBF2001427, FCBBF2001480, FCBBF2001529, FCBBF2001538, FCBBF2001594, FCBBF2001672, FCBBF2001675, FCBBF2001718, FCBBF2001720, FCBBF2001817, FCBBF2001868, FCBBF2002044, FCBBF2002111, FCBBF2002281, FCBBF2002349, FCBBF2002370, FCBBF2002541, FCBBF2002626, FCBBF2002801, FCBBF2002897, FCBBF2002898, FCBBF2002904, FCBBF2002928, FCBBF2002953, FCBBF2003083, FCBBF2003102, FCBBF2003269, FCBBF2003293, FCBBF2003297, FCBBF2003395, FCBBF2003528, FCBBF2003543, FCBBF2003549, FCBBF2003567, FCBBF2003636, FCBBF2003823, FCBBF2003895, FCBBF2004066, FCBBF2004090, FCBBF2004138, FCBBF2004217, FCBBF2004256, FCBBF2004373, FCBBF2004448, FCBBF2004671, FCBBF2004707, FCBBF2004788, FCBBF2005069, FCBBF2005122, FCBBF2005428, FCBBF2005439, FCBBF2005538, FCBBF2005637, FCBBF2005645, FCBBF2005658, FCBBF2005733, FCBBF2005909, FCBBF2005966, FCBBF2006131, FCBBF2006380, FCBBF2006418, FCBBF2006452, FCBBF2006634, FCBBF2006781, FCBBF2007012, FCBBF2007186, FCBBF2007265, FCBBF2007302, FCBBF2007556, FCBBF2007610, FCBBF2007633, FCBBF2007840, FCBBF3000102, FCBBF3000110, FCBBF3000115, FCBBF3000120, FCBBF3000168, FCBBF3000175, FCBBF3000227, FCBBF3000228, FCBBF3000229, FCBBF3000233, FCBBF3000269, FCBBF3000361, FCBBF3000367, FCBBF3000388, FCBBF3000434, FCBBF3000462, FCBBF3000473, FCBBF3000501, FCBBF3000518, FCBBF3000536, FCBBF3000550, FCBBF3000847, FCBBF3001018, FCBBF3001020, FCBBF3001081, FCBBF3001235, FCBBF3001281, FCBBF3001302, FCBBF3001377, FCBBF3001594, FCBBF3001632, FCBBF3001657, FCBBF3001818, FCBBF3001855, FCBBF3001890, FCBBF3001912, FCBBF3001914, FCBBF3001918, FCBBF3001924, FCBBF3001977, FCBBF3002163, FCBBF3002188, FCBBF3002190, FCBBF3002268, FCBBF3002475, FCBBF3002556, FCBBF3002592, FCBBF3002658, FCBBF3002782, FCBBF3002818, FCBBF3002925, FCBBF3003216, FCBBF3003305, FCBBF3003373, FCBBF3003435, FCBBF3003475, FCBBF3003481, FCBBF3003557, FCBBF3003787, FCBBF3003902, FCBBF3004021, FCBBF3004261, FCBBF3004323, FCBBF3004390, FCBBF3004409, FCBBF3004473, FCBBF3004502, FCBBF3004715, FCBBF3004842, FCBBF3004847, FCBBF3004955, FCBBF3005160, FCBBF3005218, FCBBF3005320, FCBBF3005330, FCBBF3005444, FCBBF3005497, FCBBF3005698, FCBBF3005729, FCBBF3006171, FCBBF3006249, FCBBF3006288, FCBBF3006399, FCBBF3006628, FCBBF3006821, FCBBF3007077, FCBBF3007150, FCBBF3007152, FCBBF3007242, FCBBF3007244, FCBBF3007248, FCBBF3007453, FCBBF3007462, FCBBF3007540, FCBBF3007597, FCBBF3007604, FCBBF3007631, FCBBF3007829, FCBBF3007855, FCBBF3007859, FCBBF3007860, FCBBF3008073, FCBBF3008100, FCBBF3008153, FCBBF3008159, FCBBF3008251, FCBBF3008311, FCBBF3008362, FCBBF3008382, FCBBF3008475, FCBBF3008556, FCBBF3008644, FCBBF3008689, FCBBF3008748, FCBBF3008870, FCBBF3008938, FCBBF3008944, FCBBF3009069, FCBBF3009101, FCBBF3009152, FCBBF3009256, FCBBF3009317, FCBBF3009428, FCBBF3009464, FCBBF3009479, FCBBF3009526, FCBBF3009703, FCBBF3009717, FCBBF3009888, FCBBF3009949, FCBBF3009978, FCBBF3010008, FCBBF3010012, FCBBF3010124, FCBBF3010130, FCBBF3010142, FCBBF3010149, FCBBF3010211, FCBBF3010361, FCBBF3010508, FCBBF3010544, FCBBF3010586, FCBBF3010601, FCBBF3010665, FCBBF3010695, FCBBF3010729, FCBBF3010733, FCBBF3011003, FCBBF3011418, FCBBF3011485, FCBBF3011523, FCBBF3011570, FCBBF3011592, FCBBF3011867, FCBBF3011889, FCBBF3012170, FCBBF3012182, FCBBF3012288, FCBBF3012332, FCBBF3012347, FCBBF3012443, FCBBF3012588, FCBBF3012667, FCBBF3012842, FCBBF3012901, FCBBF3013041, FCBBF3013058, FCBBF3013205, FCBBF3013266, FCBBF3013307, FCBBF3013341, FCBBF3013506, FCBBF3013589, FCBBF3013623, FCBBF3013800, FCBBF3013846, FCBBF3014229, FCBBF3014260, FCBBF3014355, FCBBF3014567, FCBBF3014770, FCBBF3015100, FCBBF3015119, FCBBF3015131, FCBBF3015317, FCBBF3015727, FCBBF3015758, FCBBF3015809, FCBBF3015870, FCBBF3016018, FCBBF3016134, FCBBF3016178, FCBBF3016451, FCBBF3016618, FCBBF3016622, FCBBF3016644, FCBBF3016667, FCBBF3016928, FCBBF3016987, FCBBF3017024, FCBBF3017059, FCBBF3017071, FCBBF3017123, FCBBF3017233, FCBBF3017255, FCBBF3017288, FCBBF3017396, FCBBF3017531, FCBBF3017535, FCBBF3017681, FCBBF3017729, FCBBF3017873, FCBBF3017918, FCBBF3017974, FCBBF3018067, FCBBF3018173, FCBBF3018453, FCBBF3018591, FCBBF3018753, FCBBF3018796, FCBBF3018826, FCBBF3018949, FCBBF3019085, FCBBF3019320, FCBBF3019437, FCBBF3019455, FCBBF3019564, FCBBF3019569, FCBBF3019570, FCBBF3019663, FCBBF3019714, FCBBF3019716, FCBBF3019784, FCBBF3019839, FCBBF3019867, FCBBF3019961, FCBBF3020030, FCBBF3020138, FCBBF3020140, FCBBF3020163, FCBBF3020232, FCBBF3020599, FCBBF3021026, FCBBF3021191, FCBBF3021221, FCBBF3021501, FCBBF3021506, FCBBF3021524, FCBBF3021807, FCBBF3021940, FCBBF3021985, FCBBF3022005, FCBBF3022291, FCBBF3022311, FCBBF3022504, FCBBF3022566, FCBBF3022593, FCBBF3022765, FCBBF3022767, FCBBF3022894, FCBBF3023061, FCBBF3023078, FCBBF3023368, FCBBF3023372, FCBBF3023443, FCBBF3023599, FCBBF3023667, FCBBF3023704, FCBBF3023887, FCBBF3023895, FCBBF3024002, FCBBF3024096, FCBBF3024225, FCBBF3024266, FCBBF3024364, FCBBF3024623, FCBBF3024793, FCBBF3024911, FCBBF3025098, FCBBF3025252, FCBBF3025280, FCBBF3025285, FCBBF3025417, FCBBF3025528, FCBBF3025568, FCBBF3025650, FCBBF3025674, FCBBF3025730, FCBBF3025737, FCBBF3025905, FCBBF3026021, FCBBF3026048, FCBBF3026251, FCBBF3026308, FCBBF3026651, FCBBF3026678, FCBBF3026692, FCBBF3027104, FCBBF3027199, FCBBF3027328, FCBBF3027559, FCBBF3027717, FCBBF3027755, FCBBF3027768, FCBBF3027854, FCBBF3027863, FCBBF3027903, FCBBF3028102, FCBBF3028143, FCBBF3028188, FCBBF3028202, FCBBF3028244, FCBBF3028472, FCBBF3028528, FCBBF3028582, FCBBF3028593, FCBBF3028671, FCBBF3028794, FCBBF4000017, FCBBF4000061, FCBBF4000076, FCBBF4000142, FCBBF4000173, FCBBF4000192, FCBBF4000193, FCBBF4000268, FCBBF4000282, FCBBF4000399, FCBBF4000415, FCBBF4000446, FCBBF4000500, FCBBF4000529, FCBBF4000548, FCBBF5000041, FCBBF5000061, FCBBF5000165, FCBBF5000261, FCBBF5000325, FCBBF5000353, FCBBF5000384, FCBBF5000483, FCBBF5000495, FEBRA1000005, FEBRA1000008, FEBRA1000022, FEBRA1000030, FEBRA1000057, FEBRA1000088, FEBRA1000138, FEBRA1000148, FEBRA1000149, FEBRA1000183, FEBRA1000188, FEBRA1000189, FEBRA1000190, FEBRA2000007, FEBRA2000021, FEBRA2000035, FEBRA2000053, FEBRA2000105, FEBRA2000126, FEBRA2000129, FEBRA2000210, FEBRA2000220, FEBRA2000228, FEBRA2000253, FEBRA2000282, FEBRA2000286, FEBRA2000297, FEBRA2000311, FEBRA2000321, FEBRA2000333, FEBRA2000377, FEBRA2000378, FEBRA2000391, FEBRA2000394, FEBRA2000397, FEBRA2000399, FEBRA2000402, FEBRA2000404, FEBRA2000409, FEBRA2000415, FEBRA2000436, FEBRA2000438, FEBRA2000452, FEBRA2000454, FEBRA2000462, FEBRA2000468, FEBRA2000491, FEBRA2000504, FEBRA2000510, FEBRA2000532, FEBRA2000536, FEBRA2000538, FEBRA2000575, FEBRA2000581, FEBRA2000656, FEBRA2000659, FEBRA2000680, FEBRA2000690, FEBRA2000727, FEBRA2000734, FEBRA2000740, FEBRA2000757, FEBRA2000762, FEBRA2000771, FEBRA2000772, FEBRA2000782, FEBRA2000787, FEBRA2000790, FEBRA2000793, FEBRA2000803, FEBRA2000805, FEBRA2000809, FEBRA2000815, FEBRA2000856, FEBRA2000862, FEBRA2000877, FEBRA2000880, FEBRA2000881, FEBRA2000901, FEBRA2000909, FEBRA2000917, FEBRA2000928, FEBRA2000936, FEBRA2000937, FEBRA2000959, FEBRA2000972, FEBRA2001004, FEBRA2001012, FEBRA2001020, FEBRA2001093, FEBRA2001124, FEBRA2001133, FEBRA2001146, FEBRA2001161, FEBRA2001175, FEBRA2001197, FEBRA2001217, FEBRA2001227, FEBRA2001245, FEBRA2001267, FEBRA2001294, FEBRA2001334, FEBRA2001351, FEBRA2001383, FEBRA2001438, FEBRA2001440, FEBRA2001487, FEBRA2001492, FEBRA2001523, FEBRA2001561, FEBRA2001571, FEBRA2001581, FEBRA2001584, FEBRA2001590, FEBRA2001591, FEBRA2001610, FEBRA2001620, FEBRA2001659, FEBRA2001669, FEBRA2001698, FEBRA2001705, FEBRA2001706, FEBRA2001752, FEBRA2001772, FEBRA2001790, FEBRA2001814, FEBRA2001828, FEBRA2001867, FEBRA2001914, FEBRA2001974, FEBRA2001989, FEBRA2001990, FEBRA2002009, FEBRA2002027, FEBRA2002086, FEBRA2002109, FEBRA2002191, FEBRA2002260, FEBRA2002352, FEBRA2002399, FEBRA2002410, FEBRA2002429, FEBRA2002442, FEBRA2002456, FEBRA2002508, FEBRA2002525, FEBRA2002527, FEBRA2002552, FEBRA2002574, FEBRA2002601, FEBRA2002611, FEBRA2002628, FEBRA2002662, FEBRA2002682, FEBRA2002707, FEBRA2002727, FEBRA2002781, FEBRA2002783, FEBRA2002792, FEBRA2002818, FEBRA2002858, FEBRA2002882, FEBRA2002897, FEBRA2002908, FEBRA2002931, FEBRA2002962, FEBRA2002986, FEBRA2003054, FEBRA2003115, FEBRA2003128, FEBRA2003155, FEBRA2003163, FEBRA2003181, FEBRA2003198, FEBRA2003253, FEBRA2003258, FEBRA2003275, FEBRA2003308, FEBRA2003327, FEBRA2003429, FEBRA2003436, FEBRA2003454, FEBRA2003468, FEBRA2003470, FEBRA2003520, FEBRA2003524, FEBRA2003675, FEBRA2003707, FEBRA2003711, FEBRA2003750, FEBRA2003822, FEBRA2003833, FEBRA2003897, FEBRA2003907, FEBRA2003926, FEBRA2004023, FEBRA2004026, FEBRA2004029, FEBRA2004042, FEBRA2004053, FEBRA2004056, FEBRA2004091, FEBRA2004110, FEBRA2004191, FEBRA2004202, FEBRA2004219, FEBRA2004224, FEBRA2004237, FEBRA2004268, FEBRA2004293, FEBRA2004325, FEBRA2004329, FEBRA2004331, FEBRA2004412, FEBRA2004443, FEBRA2004485, FEBRA2004490, FEBRA2004538, FEBRA2004592, FEBRA2004620, FEBRA2004628, FEBRA2004651, FEBRA2004767, FEBRA2004813, FEBRA2004818, FEBRA2004840, FEBRA2004852, FEBRA2004867, FEBRA2004914, FEBRA2004933, FEBRA2004987, FEBRA2005014, FEBRA2005036, FEBRA2005079, FEBRA2005114, FEBRA2005216, FEBRA2005291, FEBRA2005361, FEBRA2005377, FEBRA2005380, FEBRA2005416, FEBRA2005427, FEBRA2005458, FEBRA2005476, FEBRA2005572, FEBRA2005701, FEBRA2005726, FEBRA2005752, FEBRA2005778, FEBRA2005787, FEBRA2005788, FEBRA2005824, FEBRA2005995, FEBRA2005998, FEBRA2006055, FEBRA2006061, FEBRA2006092, FEBRA2006112, FEBRA2006150, FEBRA2006165, FEBRA2006255, FEBRA2006270, FEBRA2006315, FEBRA2006346, FEBRA2006354, FEBRA2006357, FEBRA2006368, FEBRA2006370, FEBRA2006372, FEBRA2006379, FEBRA2006396, FEBRA2006401, FEBRA2006409, FEBRA2006418, FEBRA2006427, FEBRA2006476, FEBRA2006485, FEBRA2006491, FEBRA2006519, FEBRA2006521, FEBRA2006553, FEBRA2006627, FEBRA2006664, FEBRA2006667, FEBRA2006726, FEBRA2006736, FEBRA2006793, FEBRA2006808, FEBRA2006817, FEBRA2006873, FEBRA2006890, FEBRA2006942, FEBRA2006977, FEBRA2007017, FEBRA2007176, FEBRA2007200, FEBRA2007212, FEBRA2007247, FEBRA2007280, FEBRA2007414, FEBRA2007436, FEBRA2007449, FEBRA2007458, FEBRA2007534, FEBRA2007544, FEBRA2007551, FEBRA2007566, FEBRA2007589, FEBRA2007613, FEBRA2007620, FEBRA2007622, FEBRA2007708, FEBRA2007714, FEBRA2007793, FEBRA2007801, FEBRA2007818, FEBRA2007823, FEBRA2007880, FEBRA2007900, FEBRA2007901, FEBRA2007931, FEBRA2007957, FEBRA2008009, FEBRA2008036, FEBRA2008081, FEBRA2008086, FEBRA2008134, FEBRA2008135, FEBRA2008159, FEBRA2008165, FEBRA2008172, FEBRA2008201, FEBRA2008210, FEBRA2008255, FEBRA2008265, FEBRA2008266, FEBRA2008282, FEBRA2008287, FEBRA2008302, FEBRA2008311, FEBRA2008341, FEBRA2008360, FEBRA2008459, FEBRA2008468, FEBRA2008475, FEBRA2008481, FEBRA2008542, FEBRA2008660, FEBRA2008662, FEBRA2008681, FEBRA2008692, FEBRA2008741, FEBRA2008755, FEBRA2008836, FEBRA2008859, FEBRA2008861, FEBRA2008866, FEBRA2008881, FEBRA2008928, FEBRA2008983, FEBRA2009016, FEBRA2009022, FEBRA2009029, FEBRA2009074, FEBRA2009117, FEBRA2009120, FEBRA2009162, FEBRA2009185, FEBRA2009240, FEBRA2009265, FEBRA2009276, FEBRA2009289, FEBRA2009327, FEBRA2009328, FEBRA2009352, FEBRA2009362, FEBRA2009385, FEBRA2009416, FEBRA2009419, FEBRA2009478, FEBRA2009507, FEBRA2009514, FEBRA2009541, FEBRA2009567, FEBRA2009588, FEBRA2009731, FEBRA2009754, FEBRA2009780, FEBRA2009846, FEBRA2009986, FEBRA2010141, FEBRA2010299, FEBRA2010484, FEBRA2010719, FEBRA2010746, FEBRA2010768, FEBRA2010802, FEBRA2011063, FEBRA2011090, FEBRA2011356, FEBRA2011392, FEBRA2011414, FEBRA2011593, FEBRA2011665, FEBRA2012090, FEBRA2012120, FEBRA2012181, FEBRA2012195, FEBRA2012397, FEBRA2012418, FEBRA2012507, FEBRA2012625, FEBRA2013019, FEBRA2013069, FEBRA2013274, FEBRA2013465, FEBRA2013699, FEBRA2013905, FEBRA2013951, FEBRA2014010, FEBRA2014122, FEBRA2014198, FEBRA2014213, FEBRA2014297, FEBRA2014417, FEBRA2014443, FEBRA2014578, FEBRA2014939, FEBRA2015076, FEBRA2015085, FEBRA2015175, FEBRA2015292, FEBRA2015588, FEBRA2016112, FEBRA2016398, FEBRA2016572, FEBRA2016583, FEBRA2016621, FEBRA2016654, FEBRA2016739, FEBRA2017024, FEBRA2017098, FEBRA2017138, FEBRA2017154, FEBRA2017200, FEBRA2017223, FEBRA2017333, FEBRA2017502, FEBRA2017533, FEBRA2017680, FEBRA2017736, FEBRA2017780, FEBRA2017811, FEBRA2017850, FEBRA2018051, FEBRA2018203, FEBRA2018407, FEBRA2018433, FEBRA2018746, FEBRA2019172, FEBRA2019242, FEBRA2019298, FEBRA2019389, FEBRA2019457, FEBRA2019519, FEBRA2019582, FEBRA2019637, FEBRA2019663, FEBRA2019690, FEBRA2019867, FEBRA2020406, FEBRA2020566, FEBRA2020582, FEBRA2020668, FEBRA2020801, FEBRA2020845, FEBRA2020886, FEBRA2020977, FEBRA2021032, FEBRA2021134, FEBRA2021171, FEBRA2021339, FEBRA2021431, FEBRA2021497, FEBRA2021550, FEBRA2021571, FEBRA2021636, FEBRA2021864, FEBRA2021892, FEBRA2021908, FEBRA2021966, FEBRA2022013, FEBRA2022055, FEBRA2022148, FEBRA2022204, FEBRA2022255, FEBRA2022322, FEBRA2022504, FEBRA2022601, FEBRA2022696, FEBRA2022729, FEBRA2022787, FEBRA2022911, FEBRA2022956, FEBRA2022963, FEBRA2022972, FEBRA2023227, FEBRA2023285, FEBRA2023351, FEBRA2023377, FEBRA2023399, FEBRA2023498, FEBRA2023550, FEBRA2023721, FEBRA2023927, FEBRA2023989, FEBRA2023990, FEBRA2024019, FEBRA2024136, FEBRA2024150, FEBRA2024343, FEBRA2024570, FEBRA2024693, FEBRA2024727, FEBRA2024744, FEBRA2024797, FEBRA2024987, FEBRA2025249, FEBRA2025427, FEBRA2025463, FEBRA2025477, FEBRA2025838, FEBRA2026474, FEBRA2026582, FEBRA2026629, FEBRA2026769, FEBRA2026879, FEBRA2026890, FEBRA2026977, FEBRA2026984, FEBRA2027082, FEBRA2027297, FEBRA2027352, FEBRA2027364, FEBRA2027609, FEBRA2028158, FEBRA2028222, FEBRA2028366, FEBRA2028457, FEBRA2028477, FEBRA2028503, FEBRA2028516, FEHRT2000325, FEHRT2000364, FEKID1000018, FELIV1000101, FELIV1000137, FELIV1000164, FELNG2000241, HCASM1000021, HCASM1000050, HCASM1000061, HCASM1000115, HCASM1000130, HCASM2000016, HCASM2000138, HCASM2000156, HCASM2000202, HCASM2000214, HCASM2000266, HCASM2000307, HCASM2000363, HCASM2000534, HCASM2000536, HCASM2000560, HCASM2000871, HCASM2001285, HCASM2001810, HCASM2001866, HCASM2001890, HCASM2002148, HCASM2002502, HCASM2002754, HCASM2002918, HCASM2003018, HCASM2003076, HCASM2003099, HCASM2003212, HCASM2003237, HCASM2003357, HCASM2003415, HCASM2005388, HCASM2005484, HCASM2006131, HCASM2006338, HCASM2006359, HCASM2006632, HCASM2007047, HCASM2007317, HCASM2007737, HCASM2007773, HCASM2008154, HCASM2008536, HCASM2009405, HCASM2009424, HCASM2009463, HCASM2009588, HCHON1000015, HCHON1000030, HCHON1000131, HCHON1000142, HCHON1000166, HCHON1000176, HCHON1000191, HCHON2000028, HCHON2000038, HCHON2000062, HCHON2000100, HCHON2000156, HCHON2000160, HCHON2000199, HCHON2000212, HCHON2000226, HCHON2000244, HCHON2000265, HCHON2000271, HCHON2000315, HCHON2000322, HCHON2000323, HCHON2000344, HCHON2000364, HCHON2000373, HCHON2000395, HCHON2000417, HCHON2000418, HCHON2000473, HCHON2000475, HCHON2000503, HCHON2000508, HCHON2000626, HCHON2000660, HCHON2000663, HCHON2000673, HCHON2000676, HCHON2000698, HCHON2000699, HCHON2000705, HCHON2000738, HCHON2000743, HCHON2000751, HCHON2000817, HCHON2000818, HCHON2000819, HCHON2000826, HCHON2000832, HCHON2000851, HCHON2000898, HCHON2000935, HCHON2000942, HCHON2000956, HCHON2000994, HCHON2001039, HCHON2001050, HCHON2001084, HCHON2001099, HCHON2001108, HCHON2001110, HCHON2001116, HCHON2001161, HCHON2001200, HCHON2001214, HCHON2001217, HCHON2001233, HCHON2001269, HCHON2001407, HCHON2001434, HCHON2001450, HCHON2001453, HCHON2001497, HCHON2001505, HCHON2001519, HCHON2001523, HCHON2001535, HCHON2001546, HCHON2001548, HCHON2001577, HCHON2001598, HCHON2001604, HCHON2001607, HCHON2001646, HCHON2001665, HCHON2001712, HCHON2001768, HCHON2001801, HCHON2001853, HCHON2002123, HCHON2002194, HCHON2002241, HCHON2002247, HCHON2002354, HCHON2002496, HCHON2002676, HCHON2002770, HCHON2002964, HCHON2002971, HCHON2003131, HCHON2003134, HCHON2003327, HCHON2003513, HCHON2003532, HCHON2003642, HCHON2003659, HCHON2003676, HCHON2004007, HCHON2004279, HCHON2004359, HCHON2004531, HCHON2004776, HCHON2004858, HCHON2005048, HCHON2005118, HCHON2005166, HCHON2005802, HCHON2005921, HCHON2005987, HCHON2006250, HCHON2006459, HCHON2006714, HCHON2006722, HCHON2006770, HCHON2006786, HCHON2006841, HCHON2006871, HCHON2007046, HCHON2007482, HCHON2007650, HCHON2007674, HCHON2007774, HCHON2007881, HCHON2008112, HCHON2008239, HCHON2008444, HCHON2008582, HCHON2008672, HCHON2008856, HCHON2008871, HCHON2008989, HCHON2009191, HCHON2009384, HCHON2009749, HCHON2009766, HCHON2009795, HCHON2010074, HCHON2010543, HEART1000010, HEART1000074, HEART1000088, HEART1000099, HEART1000102, HEART1000118, HEART1000132, HEART1000139, HEART1000142, HEART1000149, HEART1000151, HEART1000185, HEART2000024, HEART2000035, HEART2000099, HEART2000298, HEART2000306, HEART2000309, HEART2000411, HEART2000418, HEART2000444, HEART2000448, HEART2000492, HEART2000506, HEART2000520, HEART2000541, HEART2000568, HEART2000611, HEART2000959, HEART2001680, HEART2001756, HEART2002129, HEART2002184, HEART2002220, HEART2002432, HEART2002531, HEART2002598, HEART2002717, HEART2003027, HEART2003168, HEART2003432, HEART2003440, HEART2003781, HEART2003836, HEART2003852, HEART2004570, HEART2004764, HEART2004931, HEART2004940, HEART2004941, HEART2004980, HEART2005244, HEART2005310, HEART2005581, HEART2005610, HEART2006131, HEART2006195, HEART2006310, HEART2006334, HEART2006487, HEART2006521, HEART2006557, HEART2006787, HEART2006789, HEART2006909, HEART2007031, HEART2007231, HEART2007443, HEART2007696, HEART2007767, HEART2008108, HEART2008111, HEART2008257, HEART2008509, HEART2008994, HEART2009000, HEART2009599, HEART2009680, HEART2010391, HEART2010492, HEART2010495, HELAC2000158, HELAC2000301, HHDPC1000001, HHDPC1000065, HHDPC1000083, HHDPC1000118, HHDPC1000163, HHDPC2000055, HHDPC2000070, HHDPC2000102, HHDPC2000115, HHDPC2000149, HHDPC2000258, HHDPC2000315, HHDPC2000455, HHDPC2000462, HHDPC2000572, HHDPC2000656, HHDPC2000692, HHDPC2001337, HHDPC2001432, HHDPC2001896, HHDPC2002963, HHDPC2003049, HHDPC2003113, HHDPC2003381, HHDPC2003472, HHDPC2004757, HHDPC2005185, HHDPC2005513, HHDPC2005742, HHDPC2005794, HHDPC2006460, HHDPC2006862, HHDPC2006927, HHDPC2007267, HHDPC2007302, HHDPC2007775, HHDPC2008123, HHDPC2008185, HHDPC2008279, HHDPC2008297, HHDPC2008414, HHDPC2008474, HHDPC2008816, HHDPC2008843, HHDPC2009114, HHDPC2009178, HHDPC2009208, HHDPC2009272, HHDPC2009528, HLUNG1000017, HLUNG1000024, HLUNG1000030, HLUNG1000034, HLUNG1000037, HLUNG1000053, HLUNG1000055, HLUNG1000064, HLUNG1000076, HLUNG1000084, HLUNG1000091, HLUNG1000099, HLUNG1000104, HLUNG1000105, HLUNG1000110, HLUNG1000151, HLUNG1000169, HLUNG2000004, HLUNG2000014, HLUNG2000027, HLUNG2000063, HLUNG2000068, HLUNG2000116, HLUNG2000125, HLUNG2000130, HLUNG2000142, HLUNG2000174, HLUNG2000176, HLUNG2000217, HLUNG2000232, HLUNG2000255, HLUNG2000281, HLUNG2000314, HLUNG2000315, HLUNG2000340, HLUNG2000362, HLUNG2000363, HLUNG2000412, HLUNG2000431, HLUNG2000480, HLUNG2000489, HLUNG2000549, HLUNG2000557, HLUNG2000570, HLUNG2000751, HLUNG2000761, HLUNG2000777, HLUNG2000846, HLUNG2000870, HLUNG2000884, HLUNG2000926, HLUNG2000950, HLUNG2000955, HLUNG2000970, HLUNG2001013, HLUNG2001126, HLUNG2001144, HLUNG2001146, HLUNG2001214, HLUNG2001459, HLUNG2001507, HLUNG2001518, HLUNG2001633, HLUNG2001677, HLUNG2001712, HLUNG2001814, HLUNG2001996, HLUNG2002006, HLUNG2002050, HLUNG2002059, HLUNG2002085, HLUNG2002145, HLUNG2002295, HLUNG2002303, HLUNG2002334, HLUNG2002405, HLUNG2002429, HLUNG2002562, HLUNG2002648, HLUNG2002659, HLUNG2002707, HLUNG2002811, HLUNG2002916, HLUNG2002942, HLUNG2002949, HLUNG2002958, HLUNG2002982, HLUNG2003003, HLUNG2003042, HLUNG2003049, HLUNG2003061, HLUNG2003162, HLUNG2003246, HLUNG2003306, HLUNG2003331, HLUNG2003335, HLUNG2003378, HLUNG2003497, HLUNG2003691, HLUNG2003710, HLUNG2003714, HLUNG2003716, HLUNG2003833, HLUNG2003872, HLUNG2003918, HLUNG2003991, HLUNG2004014, HLUNG2004037, HLUNG2004067, HLUNG2004154, HLUNG2004159, HLUNG2004170, HLUNG2004217, HLUNG2004273, HLUNG2004388, HLUNG2004416, HLUNG2004521, HLUNG2004534, HLUNG2004684, HLUNG2004707, HLUNG2004774, HLUNG2004775, HLUNG2005012, HLUNG2005030, HLUNG2005045, HLUNG2005076, HLUNG2005133, HLUNG2005203, HLUNG2005230, HLUNG2005479, HLUNG2005524, HLUNG2005656, HLUNG2005738, HLUNG2005774, HLUNG2005813, HLUNG2005924, HLUNG2006026, HLUNG2006067, HLUNG2006094, HLUNG2006370, HLUNG2006397, HLUNG2006570, HLUNG2006599, HLUNG2006614, HLUNG2006671, HLUNG2006781, HLUNG2006812, HLUNG2006843, HLUNG2006852, HLUNG2006935, HLUNG2007041, HLUNG2007163, HLUNG2007210, HLUNG2007219, HLUNG2007245, HLUNG2007433, HLUNG2007931, HLUNG2008066, HLUNG2008139, HLUNG2008153, HLUNG2008225, HLUNG2008235, HLUNG2008247, HLUNG2008333, HLUNG2008348, HLUNG2008384, HLUNG2008396, HLUNG2008439, HLUNG2008479, HLUNG2008480, HLUNG2008521, HLUNG2008637, HLUNG2008833, HLUNG2008875, HLUNG2008885, HLUNG2008958, HLUNG2008959, HLUNG2009067, HLUNG2009215, HLUNG2009225, HLUNG2009253, HLUNG2009303, HLUNG2009413, HLUNG2009729, HLUNG2010181, HLUNG2010464, HLUNG2010562, HLUNG2010845, HLUNG2011041, HLUNG2011298, HLUNG2011461, HLUNG2011833, HLUNG2012049, HLUNG2012287, HLUNG2012315, HLUNG2012546, HLUNG2012600, HLUNG2012727, HLUNG2013097, HLUNG2013204, HLUNG2013304, HLUNG2013350, HLUNG2013622, HLUNG2013643, HLUNG2013851, HLUNG2014262, HLUNG2014288, HLUNG2014449, HLUNG2014821, HLUNG2015184, HLUNG2015418, HLUNG2015548, HLUNG2015578, HLUNG2015617, HLUNG2016022, HLUNG2016862, HLUNG2017262, HLUNG2017286, HLUNG2017307, HLUNG2017350, HLUNG2017806, HLUNG2018029, HLUNG2018282, HLUNG2018626, HLUNG2019058, HSYRA1000062, HSYRA1000131, HSYRA1000137, HSYRA1000148, HSYRA1000152, HSYRA1000178, HSYRA2000044, HSYRA2000135, HSYRA2000137, HSYRA2000190, HSYRA2000221, HSYRA2000224, HSYRA2000232, HSYRA2000237, HSYRA2000248, HSYRA2000253, HSYRA2000255, HSYRA2000332, HSYRA2000371, HSYRA2000424, HSYRA2000507, HSYRA2000510, HSYRA2000605, HSYRA2000629, HSYRA2000640, HSYRA2000706, HSYRA2000743, HSYRA2000760, HSYRA2000787, HSYRA2000792, HSYRA2000828, HSYRA2000832, HSYRA2000925, HSYRA2000927, HSYRA2001003, HSYRA2001103, HSYRA2001105, HSYRA2001138, HSYRA2001142, HSYRA2001153, HSYRA2001232, HSYRA2001255, HSYRA2001332, HSYRA2001353, HSYRA2001396, HSYRA2001420, HSYRA2001484, HSYRA2001552, HSYRA2001567, HSYRA2001574, HSYRA2001580, HSYRA2001615, HSYRA2001631, HSYRA2001638, HSYRA2001983, HSYRA2002103, HSYRA2002590, HSYRA2002741, HSYRA2003168, HSYRA2004550, HSYRA2004858, HSYRA2005456, HSYRA2005496, HSYRA2005628, HSYRA2005970, HSYRA2006049, HSYRA2006873, HSYRA2007241, HSYRA2007338, HSYRA2007650, HSYRA2007667, HSYRA2008154, HSYRA2008714, HSYRA2009102, IMR321000155, IMR321000158, IMR321000161, IMR321000165, IMR321000193, IMR321000207, IMR321000230, IMR321000242, IMR321000266, IMR322000010, IMR322000072, IMR322000107, IMR322000127, IMR322000144, IMR322000152, IMR322000164, IMR322000178, IMR322000243, IMR322000302, IMR322000316, IMR322000374, IMR322000379, IMR322000383, IMR322000418, IMR322000518, IMR322000555, IMR322000604, IMR322000609, IMR322000656, IMR322000672, IMR322000730, IMR322000742, IMR322000775, IMR322000791, IMR322000811, IMR322000819, IMR322000838, IMR322000859, IMR322000863, IMR322000917, IMR322000918, IMR322000919, IMR322000935, IMR322000953, IMR322000973, IMR322000984, IMR322001018, IMR322001049, IMR322001167, IMR322001185, IMR322001245, IMR322001317, IMR322001318, IMR322001322, IMR322001332, IMR322001380, IMR322001435, IMR322001438, IMR322001452, IMR322001491, IMR322001534, IMR322001541, IMR322001584, IMR322001665, IMR322001670, IMR322001710, IMR322001724, IMR322001879, IMR322002035, IMR322002110, IMR322002470, IMR322002993, IMR322003675, IMR322004768, IMR322005293, IMR322005833, IMR322006012, IMR322006222, IMR322006495, IMR322006520, IMR322006886, IMR322006947, IMR322007078, IMR322007225, IMR322007704, IMR322008651, IMR322009710, IMR322009807, IMR322010295, IMR322010953, IMR322011689, IMR322012314, IMR322012529, IMR322013053, IMR322013396, IMR322013731, IMR322013805, IMR322015523, IMR322016146, IMR322017049, IMR322018117, IMR322018192, IMR322019070, JCMLC2000273, KIDNE1000008, KIDNE1000012, KIDNE1000015, KIDNE1000028, KIDNE1000036, KIDNE1000064, KIDNE1000104, KIDNE1000121, KIDNE1000143, KIDNE1000145, KIDNE1000152, KIDNE2000026, KIDNE2000041, KIDNE2000046, KIDNE2000051, KIDNE2000070, KIDNE2000085, KIDNE2000167, KIDNE2000174, KIDNE2000192, KIDNE2000227, KIDNE2000244, KIDNE2000245, KIDNE2000252, KIDNE2000266, KIDNE2000287, KIDNE2000315, KIDNE2000317, KIDNE2000328, KIDNE2000330, KIDNE2000335, KIDNE2000349, KIDNE2000375, KIDNE2000383, KIDNE2000394, KIDNE2000403, KIDNE2000422, KIDNE2000493, KIDNE2000497, KIDNE2000510, KIDNE2000513, KIDNE2000517, KIDNE2000519, KIDNE2000555, KIDNE2000574, KIDNE2000624, KIDNE2000665, KIDNE2000678, KIDNE2000717, KIDNE2000721, KIDNE2000722, KIDNE2000777, KIDNE2000801, KIDNE2000832, KIDNE2000833, KIDNE2000846, KIDNE2000867, KIDNE2000909, KIDNE2000947, KIDNE2001117, KIDNE2001140, KIDNE2001162, KIDNE2001269, KIDNE2001361, KIDNE2001373, KIDNE2001636, KIDNE2001713, KIDNE2001802, KIDNE2001840, KIDNE2001847, KIDNE2001857, KIDNE2001873, KIDNE2001897, KIDNE2001931, KIDNE2001979, KIDNE2002015, KIDNE2002162, KIDNE2002168, KIDNE2002191, KIDNE2002198, KIDNE2002252, KIDNE2002262, KIDNE2002265, KIDNE2002438, KIDNE2002483, KIDNE2002725, KIDNE2002768, KIDNE2002795, KIDNE2002798, KIDNE2002839, KIDNE2002845, KIDNE2002872, KIDNE2002882, KIDNE2002883, KIDNE2002980, KIDNE2002991, KIDNE2003185, KIDNE2003188, KIDNE2003233, KIDNE2003305, KIDNE2003316, KIDNE2003335, KIDNE2003357, KIDNE2003373, KIDNE2003377, KIDNE2003507, KIDNE2003752, KIDNE2003764, KIDNE2003837, KIDNE2003994, KIDNE2004034, KIDNE2004054, KIDNE2004084, KIDNE2004095, KIDNE2004115, KIDNE2004233, KIDNE2004262, KIDNE2004279, KIDNE2004294, KIDNE2004295, KIDNE2004305, KIDNE2004344, KIDNE2004394, KIDNE2004411, KIDNE2004475, KIDNE2004519, KIDNE2004520, KIDNE2004531, KIDNE2004534, KIDNE2004562, KIDNE2004579, KIDNE2004626, KIDNE2004681, KIDNE2004828, KIDNE2004846, KIDNE2004864, KIDNE2004879, KIDNE2004981, KIDNE2004985, KIDNE2004999, KIDNE2005038, KIDNE2005042, KIDNE2005062, KIDNE2005266, KIDNE2005296, KIDNE2005321, KIDNE2005327, KIDNE2005336, KIDNE2005400, KIDNE2005424, KIDNE2005477, KIDNE2005526, KIDNE2005543, KIDNE2005603, KIDNE2005629, KIDNE2005676, KIDNE2005781, KIDNE2005798, KIDNE2005854, KIDNE2005908, KIDNE2005937, KIDNE2006009, KIDNE2006014, KIDNE2006030, KIDNE2006039, KIDNE2006053, KIDNE2006062, KIDNE2006092, KIDNE2006145, KIDNE2006149, KIDNE2006210, KIDNE2006248, KIDNE2006299, KIDNE2006334, KIDNE2006353, KIDNE2006376, KIDNE2006378, KIDNE2006465, KIDNE2006580, KIDNE2006652, KIDNE2006687, KIDNE2006733, KIDNE2006760, KIDNE2006775, KIDNE2006811, KIDNE2006820, KIDNE2006880, KIDNE2007005, KIDNE2007040, KIDNE2007077, KIDNE2007186, KIDNE2007222, KIDNE2007356, KIDNE2007422, KIDNE2007569, KIDNE2007810, KIDNE2007811, KIDNE2007910, KIDNE2007954, KIDNE2008022, KIDNE2008048, KIDNE2008069, KIDNE2008072, KIDNE2008116, KIDNE2008117, KIDNE2008218, KIDNE2008315, KIDNE2008362, KIDNE2008378, KIDNE2008403, KIDNE2008404, KIDNE2008446, KIDNE2008473, KIDNE2008480, KIDNE2008649, KIDNE2008666, KIDNE2008697, KIDNE2008758, KIDNE2008788, KIDNE2008795, KIDNE2008824, KIDNE2008832, KIDNE2008869, KIDNE2008914, KIDNE2008975, KIDNE2008987, KIDNE2009019, KIDNE2009109, KIDNE2009180, KIDNE2009191, KIDNE2009332, KIDNE2009367, KIDNE2009426, KIDNE2009467, KIDNE2009490, KIDNE2009553, KIDNE2009605, KIDNE2009628, KIDNE2009647, KIDNE2009676, KIDNE2009723, KIDNE2010007, KIDNE2010049, KIDNE2010052, KIDNE2010084, KIDNE2010137, KIDNE2010151, KIDNE2010264, KIDNE2010265, KIDNE2010271, KIDNE2010419, KIDNE2010430, KIDNE2010574, KIDNE2010674, KIDNE2010739, KIDNE2010750, KIDNE2010762, KIDNE2010863, KIDNE2010973, KIDNE2010989, KIDNE2011200, KIDNE2011314, KIDNE2011508, KIDNE2011532, KIDNE2011635, KIDNE2011752, KIDNE2011782, KIDNE2011858, KIDNE2012009, KIDNE2012025, KIDNE2012188, KIDNE2012291, KIDNE2012316, KIDNE2012361, KIDNE2012453, KIDNE2012563, KIDNE2012601, KIDNE2012613, KIDNE2012710, KIDNE2012745, KIDNE2012775, KIDNE2012784, KIDNE2012945, KIDNE2013045, KIDNE2013095, KIDNE2013158, KIDNE2013218, KIDNE2013263, KIDNE2013346, KIDNE2013388, KIDNE2013413, KIDNE2013489, KIDNE2013639, KIDNE2013731, KIDNE2013734, KIDNE2013775, KIDNE2013801, KIDNE2013845, KIDNE2013866, KIDNE2014087, KIDNE2014112, KIDNE2014119, KIDNE2014170, KIDNE2014184, KIDNE2014268, KIDNE2014298, KIDNE2014320, KIDNE2014325, KIDNE2014415, KIDNE2014489, KIDNE2014496, KIDNE2014661, KIDNE2014717, KIDNE2014789, KIDNE2014808, KIDNE2014890, KIDNE2014978, KIDNE2015073, KIDNE2015221, KIDNE2015244, KIDNE2015313, KIDNE2015433, KIDNE2015445, KIDNE2015483, KIDNE2015515, KIDNE2015546, KIDNE2015556, KIDNE2015598, KIDNE2015660, KIDNE2015710, KIDNE2015987, KIDNE2016000, KIDNE2016036, KIDNE2016096, KIDNE2016101, KIDNE2016142, KIDNE2016188, KIDNE2016327, KIDNE2016371, KIDNE2016388, KIDNE2016464, KIDNE2016539, KIDNE2016570, KIDNE2016918, KIDNE2017007, KIDNE2017040, KIDNE2017052, KIDNE2017151, KIDNE2017153, KIDNE2017315, KIDNE2017332, KIDNE2017343, KIDNE2017454, KIDNE2017603, KIDNE2017956, KIDNE2018071, KIDNE2018166, KIDNE2018167, KIDNE2018217, KIDNE2018254, KIDNE2018268, KIDNE2018269, KIDNE2018287, KIDNE2018294, KIDNE2018352, KIDNE2018462, KIDNE2018493, KIDNE2018617, KIDNE2018678, KIDNE2018727, KIDNE2018863, KIDNE2018891, KIDNE2018989, KIDNE2018996, KIDNE2019074, KIDNE2019187, LIVER1000017, LIVER1000050, LIVER1000055, LIVER1000058, LIVER1000063, LIVER1000067, LIVER1000073, LIVER1000079, LIVER1000082, LIVER1000099, LIVER1000104, LIVER1000111, LIVER1000126, LIVER1000139, LIVER1000155, LIVER1000165, LIVER1000175, LIVER1000224, LIVER1000230, LIVER1000278, LIVER1000303, LIVER1000397, LIVER1000421, LIVER1000433, LIVER1000479, LIVER1000482, LIVER1000542, LIVER2000003, LIVER2000033, LIVER2000037, LIVER2000158, LIVER2000216, LIVER2000237, LIVER2000247, LIVER2000360, LIVER2000416, LIVER2000446, LIVER2000515, LIVER2000592, LIVER2000626, LIVER2000682, LIVER2000769, LIVER2000775, LIVER2001051, LIVER2001076, LIVER2001099, LIVER2001113, LIVER2001164, LIVER2001191, LIVER2001265, LIVER2001329, LIVER2001389, LIVER2001461, LIVER2001539, LIVER2001608, LIVER2001835, LIVER2002638, LIVER2002644, LIVER2002660, LIVER2002702, LIVER2002842, LIVER2003008, LIVER2003065, LIVER2003234, LIVER2003511, LIVER2003524, LIVER2003568, LIVER2003581, LIVER2003800, LIVER2003854, LIVER2004074, LIVER2004392, LIVER2004514, LIVER2004565, LIVER2005028, LIVER2005198, LIVER2005218, LIVER2005376, LIVER2005385, LIVER2005512, LIVER2005520, LIVER2005527, LIVER2005544, LIVER2005625, LIVER2005728, LIVER2005789, LIVER2005973, LIVER2005981, LIVER2006006, LIVER2006251, LIVER2006410, LIVER2006469, LIVER2006644, LIVER2006764, LIVER2007415, LIVER2007548, LIVER2007568, LIVER2007721, LIVER2007783, LIVER2008053, LIVER2008465, LIVER2008473, LIVER2008580, LIVER2008706, LIVER2008751, LIVER2008945, LIVER2008998, LIVER2009110, LIVER2009118, LIVER2009554, LYMPB1000141, LYMPB1000158, LYMPB2000083, MAMGL1000017, MAMGL1000035, MAMGL1000083, MAMGL1000096, MAMGL1000100, MAMGL1000132, MAMGL1000151, MAMGL1000173, MAMGL1000178, MAMGL1000182, MAMGL1000184, MESAN1000032, MESAN1000035, MESAN1000050, MESAN1000079, MESAN1000080, MESAN1000101, MESAN1000121, MESAN1000126, MESAN1000147, MESAN1000180, MESAN2000023, MESAN2000026, MESAN2000067, MESAN2000092, MESAN2000149, MESAN2000167, MESAN2000264, MESAN2000291, MESAN2000337, MESAN2000434, MESAN2000457, MESAN2000462, MESAN2000501, MESAN2000572, MESAN2000608, MESAN2000620, MESAN2000711, MESAN2000815, MESAN2000894, MESAN2000909, MESAN2001154, MESAN2001450, MESAN2001627, MESAN2001770, MESAN2001979, MESAN2001980, MESAN2002086, MESAN2002113, MESAN2002122, MESAN2002147, MESAN2002186, MESAN2002424, MESAN2002519, MESAN2002687, MESAN2002709, MESAN2002790, MESAN2002844, MESAN2002940, MESAN2002978, MESAN2003035, MESAN2003037, MESAN2003039, MESAN2003058, MESAN2003101, MESAN2003190, MESAN2003322, MESAN2003444, MESAN2003490, MESAN2003529, MESAN2003646, MESAN2003662, MESAN2003709, MESAN2003851, MESAN2004138, MESAN2004288, MESAN2004575, MESAN2005284, MESAN2005303, MESAN2005371, MESAN2005633, MESAN2005689, MESAN2005724, MESAN2005766, MESAN2005808, MESAN2005811, MESAN2005957, MESAN2005958, MESAN2006022, MESAN2006043, MESAN2006328, MESAN2006401, MESAN2006580, MESAN2006599, MESAN2006743, MESAN2006953, MESAN2006971, MESAN2007032, MESAN2007440, MESAN2007597, MESAN2007755, MESAN2008222, MESAN2008334, MESAN2008415, MESAN2008460, MESAN2008536, MESAN2008679, MESAN2008729, MESAN2008821, MESAN2008926, MESAN2008936, MESAN2009019, MESAN2009081, MESAN2009105, MESAN2009311, MESAN2009418, MESAN2009503, MESAN2009522, MESAN2009580, MESAN2010031, MESAN2010114, MESAN2010312, MESAN2010321, MESAN2010664, MESAN2010681, MESAN2011545, MESAN2011597, MESAN2011627, MESAN2011632, MESAN2011977, MESAN2011984, MESAN2012054, MESAN2012113, MESAN2012586, MESAN2012708, MESAN2012735, MESAN2013019, MESAN2013022, MESAN2013183, MESAN2013211, MESAN2013283, MESAN2013284, MESAN2013611, MESAN2013674, MESAN2013845, MESAN2013908, MESAN2013936, MESAN2014192, MESAN2014295, MESAN2014298, MESAN2014412, MESAN2014624, MESAN2015277, MESAN2015365, MESAN2015391, MESAN2015401, MESAN2015501, MESAN2015515, MESAN2015708, MESAN2016159, MESAN2016304, MESAN2016409, MESAN2016552, MESAN2016965, MESAN2017133, MESAN2017152, MESAN2017417, MESAN2018209, MESAN2018576, MESAN2018670, MESAN2018699, MESTC1000042, MESTC1000147, MESTC2000150, MESTC2000153, MESTC2000170, N1ESE2000698, NB9N41000011, NB9N41000047, NB9N41000121, NB9N41000135, NB9N41000142, NB9N41000146, NB9N41000340, NB9N42000104, NB9N42000122, NB9N42000196, NB9N42000281, NB9N42000314, NB9N42000430, NB9N42000495, NB9N42001300, NT2NE1000004, NT2NE1000014, NT2NE1000018, NT2NE1000023, NT2NE1000024, NT2NE1000059, NT2NE1000063, NT2NE1000073, NT2NE1000083, NT2NE1000120, NT2NE1000122, NT2NE1000163, NT2NE1000175, NT2NE1000181, NT2NE1000185, NT2NE2000038, NT2NE2000054, NT2NE2000056, NT2NE2000057, NT2NE2000064, NT2NE2000109, NT2NE2000137, NT2NE2000156, NT2NE2000174, NT2NE2000195, NT2NE2000222, NT2NE2000259, NT2NE2000284, NT2NE2000299, NT2NE2000327, NT2NE2000353, NT2NE2000356, NT2NE2000369, NT2NE2000374, NT2NE2000383, NT2NE2000384, NT2NE2000386, NT2NE2000390, NT2NE2000392, NT2NE2000455, NT2NE2000470, NT2NE2000488, NT2NE2000517, NT2NE2000536, NT2NE2000546, NT2NE2000548, NT2NE2000550, NT2NE2000586, NT2NE2000612, NT2NE2000636, NT2NE2000658, NT2NE2000706, NT2NE2000707, NT2NE2000763, NT2NE2000802, NT2NE2000808, NT2NE2000809, NT2NE2000864, NT2NE2000909, NT2NE2000913, NT2NE2000950, NT2NE2000951, NT2NE2000980, NT2NE2001005, NT2NE2001021, NT2NE2001040, NT2NE2001048, NT2NE2001049, NT2NE2001142, NT2NE2001156, NT2NE2001176, NT2NE2001180, NT2NE2001181, NT2NE2001188, NT2NE2001191, NT2NE2001247, NT2NE2001252, NT2NE2001324, NT2NE2001326, NT2NE2001337, NT2NE2001364, NT2NE2001372, NT2NE2001397, NT2NE2001403, NT2NE2001428, NT2NE2001432, NT2NE2001435, NT2NE2001442, NT2NE2001524, NT2NE2001530, NT2NE2001545, NT2NE2001598, NT2NE2001617, NT2NE2001623, NT2NE2001626, NT2NE2001634, NT2NE2001648, NT2NE2001655, NT2NE2001660, NT2NE2001666, NT2NE2001677, NT2NE2001697, NT2NE2001698, NT2NE2001723, NT2NE2001725, NT2NE2001793, NT2NE2001874, NT2NE2001889, NT2NE2001923, NT2NE2002100, NT2NE2002162, NT2NE2002186, NT2NE2002285, NT2NE2002311, NT2NE2002620, NT2NE2002651, NT2NE2002732, NT2NE2002768, NT2NE2002791, NT2NE2002856, NT2NE2003150, NT2NE2003185, NT2NE2003252, NT2NE2003280, NT2NE2003308, NT2NE2003309, NT2NE2003315, NT2NE2003393, NT2NE2003408, NT2NE2003457, NT2NE2003485, NT2NE2003540, NT2NE2003569, NT2NE2003571, NT2NE2003705, NT2NE2003752, NT2NE2003887, NT2NE2003921, NT2NE2004255, NT2NE2004378, NT2NE2004490, NT2NE2004519, NT2NE2004606, NT2NE2004716, NT2NE2004740, NT2NE2004787, NT2NE2004916, NT2NE2005035, NT2NE2005223, NT2NE2005276, NT2NE2005317, NT2NE2005323, NT2NE2005358, NT2NE2005371, NT2NE2005395, NT2NE2005419, NT2NE2005441, NT2NE2005517, NT2NE2005537, NT2NE2005555, NT2NE2005588, NT2NE2005676, NT2NE2005688, NT2NE2005720, NT2NE2005784, NT2NE2005804, NT2NE2005821, NT2NE2005876, NT2NE2005890, NT2NE2005921, NT2NE2005968, NT2NE2006075, NT2NE2006087, NT2NE2006103, NT2NE2006217, NT2NE2006288, NT2NE2006382, NT2NE2006387, NT2NE2006427, NT2NE2006432, NT2NE2006458, NT2NE2006478, NT2NE2006531, NT2NE2006659, NT2NE2006784, NT2NE2006813, NT2NE2006894, NT2NE2006909, NT2NE2006942, NT2NE2006958, NT2NE2007052, NT2NE2007220, NT2NE2007425, NT2NE2007725, NT2NE2007727, NT2NE2007786, NT2NE2007877, NT2NE2007967, NT2NE2008017, NT2NE2008060, NT2NE2008077, NT2NE2008213, NT2NE2008260, NT2NE2008378, NT2NE2008607, NT2NE2008639, NT2NE2008727, NT2NE2008783, NT2NE2008785, NT2NE2008803, NT2NE2008867, NT2NE2008961, NT2NE2008997, NT2NE2009138, NT2NE2009295, NT2NE2009426, NT2NE2009523, NT2NE2009608, NT2NE2009691, NT2NE2010056, NT2NE2010105, NT2NE2010150, NT2NE2010400, NT2NE2010632, NT2NE2010633, NT2NE2010654, NT2NE2010688, NT2NE2010781, NT2NE2010842, NT2NE2010854, NT2NE2011033, NT2NE2011036, NT2NE2011107, NT2NE2011119, NT2NE2011154, NT2NE2011221, NT2NE2011411, NT2NE2011485, NT2NE2011650, NT2NE2011684, NT2NE2011687, NT2NE2011691, NT2NE2011758, NT2NE2011823, NT2NE2011896, NT2NE2011998, NT2NE2012113, NT2NE2012199, NT2NE2012243, NT2NE2012361, NT2NE2012448, NT2NE2012457, NT2NE2012493, NT2NE2012505, NT2NE2012533, NT2NE2012603, NT2NE2012747, NT2NE2012790, NT2NE2012847, NT2NE2012928, NT2NE2013019, NT2NE2013081, NT2NE2013189, NT2NE2013217, NT2NE2013547, NT2NE2014013, NT2NE2014028, NT2NE2014104, NT2NE2014113, NT2NE2014176, NT2NE2014221, NT2NE2014525, NT2NE2014650, NT2NE2014651, NT2NE2014681, NT2NE2014758, NT2NE2014869, NT2NE2014950, NT2NE2015061, NT2NE2015262, NT2NE2015275, NT2NE2015362, NT2NE2015480, NT2NE2015511, NT2NE2015565, NT2NE2015626, NT2NE2015747, NT2NE2015860, NT2NE2015885, NT2NE2015904, NT2NE2015974, NT2NE2016041, NT2NE2016387, NT2NE2016419, NT2NE2016519, NT2NE2016608, NT2NE2016766, NT2NE2016774, NT2NE2016971, NT2NE2017259, NT2NE2017332, NT2NE2017397, NT2NE2017480, NT2NE2017492, NT2NE2017508, NT2NE2017562, NT2NE2017590, NT2NE2017612, NT2NE2017721, NT2NE2017752, NT2NE2017792, NT2NE2017982, NT2NE2018165, NT2NE2018176, NT2NE2018180, NT2NE2018273, NT2NE2018376, NT2NE2018472, NT2NE2018490, NT2NE2018594, NT2NE2018739, NT2NE2018916, NT2NE2019056, NT2NE2019076, NT2NE2019091, NT2NE2019099, NT2RI1000016, NT2RI1000027, NT2RI1000035, NT2RI1000048, NT2RI1000127, NT2RI1000164, NT2RI1000172, NT2RI2000004, NT2RI2000007, NT2RI2000064, NT2RI2000107, NT2RI2000116, NT2RI2000117, NT2RI2000128, NT2RI2000133, NT2RI2000167, NT2RI2000173, NT2RI2000187, NT2RI2000255, NT2RI2000263, NT2RI2000270, NT2RI2000276, NT2RI2000282, NT2RI2000284, NT2RI2000294, NT2RI2000313, NT2RI2000341, NT2RI2000344, NT2RI2000348, NT2RI2000412, NT2RI2000480, NT2RI2000575, NT2RI2000578, NT2RI2000588, NT2RI2000597, NT2RI2000669, NT2RI2000671, NT2RI2000685, NT2RI2000688, NT2RI2000689, NT2RI2000704, NT2RI2000738, NT2RI2000775, NT2RI2000822, NT2RI2000829, NT2RI2000841, NT2RI2000865, NT2RI2000932, NT2RI2000974, NT2RI2000987, NT2RI2001010, NT2RI2001017, NT2RI2001030, NT2RI2001054, NT2RI2001083, NT2RI2001091, NT2RI2001167, NT2RI2001178, NT2RI2001235, NT2RI2001244, NT2RI2001307, NT2RI2001385, NT2RI2001409, NT2RI2001410, NT2RI2001422, NT2RI2001425, NT2RI2001449, NT2RI2001450, NT2RI2001474, NT2RI2001519, NT2RI2001595, NT2RI2001621, NT2RI2001624, NT2RI2001657, NT2RI2001726, NT2RI2001731, NT2RI2001769, NT2RI2001782, NT2RI2001836, NT2RI2001846, NT2RI2001859, NT2RI2001866, NT2RI2001910, NT2RI2001952, NT2RI2002022, NT2RI2002041, NT2RI2002117, NT2RI2002120, NT2RI2002152, NT2RI2002153, NT2RI2002179, NT2RI2002243, NT2RI2002252, NT2RI2002260, NT2RI2002266, NT2RI2002270, NT2RI2002334, NT2RI2002359, NT2RI2002391, NT2RI2002447, NT2RI2002481, NT2RI2002507, NT2RI2002517, NT2RI2002530, NT2RI2002540, NT2RI2002549, NT2RI2002554, NT2RI2002564, NT2RI2002585, NT2RI2002592, NT2RI2002602, NT2RI2002654, NT2RI2002699, NT2RI2002729, NT2RI2002802, NT2RI2002819, NT2RI2002822, NT2RI2002847, NT2RI2002852, NT2RI2002865, NT2RI2002923, NT2RI2002926, NT2RI2002958, NT2RI2002970, NT2RI2003011, NT2RI2003019, NT2RI2003051, NT2RI2003067, NT2RI2003184, NT2RI2003205, NT2RI2003222, NT2RI2003301, NT2RI2003317, NT2RI2003338, NT2RI2003344, NT2RI2003360, NT2RI2003361, NT2RI2003383, NT2RI2003392, NT2RI2003399, NT2RI2003407, NT2RI2003419, NT2RI2003420, NT2RI2003655, NT2RI2003667, NT2RI2003678, NT2RI2003751, NT2RI2003884, NT2RI2003921, NT2RI2003973, NT2RI2003993, NT2RI2004059, NT2RI2004078, NT2RI2004079, NT2RI2004093, NT2RI2004136, NT2RI2004157, NT2RI2004188, NT2RI2004190, NT2RI2004209, NT2RI2004230, NT2RI2004290, NT2RI2004304, NT2RI2004312, NT2RI2004381, NT2RI2004398, NT2RI2004410, NT2RI2004442, NT2RI2004468, NT2RI2004535, NT2RI2004606, NT2RI2004608, NT2RI2004618, NT72RI2004783, NT2RI2004818, NT2RI2004840, NT2RI2004884, NT2RI2004916, NT2RI2004962, NT2RI2004984, NT2RI2004985, NT2RI2005048, NT2RI2005061, NT2RI2005069, NT2RI2005087, NT2RI2005096, NT2RI2005115, NT2RI2005116, NT2RI2005130, NT2RI2005166, NT2RI2005239, NT2RI2005246, NT2RI2005315, NT2RI2005335, NT2RI2005353, NT2RI2005358, NT2RI2005382, NT2RI2005405, NT2RI2005473, NT2RI2005520, NT2RI2005564, NT2RI2005579, NT2RI2005621, NT2RI2005628, NT2RI2005647, NT2RI2005670, NT2RI2005710, NT2RI2005713, NT2RI2005723, NT2RI2005772, NT2RI2005811, NT2RI2005816, NT2RI2005818, NT2RI2005851, NT2RI2005966, NT2RI2006070, NT2RI2006071, NT2RI2006081, NT2RI2006126, NT2RI2006183, NT2RI2006257, NT2RI2006294, NT2RI2006345, NT2RI2006403, NT2RI2006412, NT2RI2006445, NT2RI2006487, NT2RI2006506, NT2RI2006553, NT2RI2006565, NT2RI2006640, NT2RI2006647, NT2RI2006659, NT2RI2006662, NT2RI2006667, NT2RI2006679, NT2RI2006682, NT2RI2006686, NT2RI2006703, NT2RI2006716, NT2RI2006735, NT2RI2006762, NT2RI2006788, NT2RI2006825, NT2RI2006838, NT2RI2006853, NT2RI2006855, NT2RI2006943, NT2RI2006973, NT2RI2007046, NT2RI2007048, NT2RI2007054, NT2RI2007096, NT2RI2007116, NT2RI2007214, NT2RI2007277, NT2RI2007303, NT2RI2007334, NT2RI2007377, NT2RI2007386, NT2RI2007406, NT2RI2007439, NT2RI2007445, NT2RI2007468, NT2RI2007469, NT2RI2007498, NT2RI2007507, NT2RI2007572, NT2RI2007589, NT2RI2007593, NT2RI2007629, NT2RI2007723, NT2RI2007729, NT2RI2007751, NT2RI2007754, NT2RI2007827, NT2RI2007853, NT2RI2007877, NT2RI2007891, NT2RI2007956, NT2RI2007965, NT2RI2007987, NT2RI2008007, NT2RI2008045, NT2RI2008050, NT2RI2008141, NT2RI2008171, NT2RI2008188, NT2RI2008204, NT2RI2008221, NT2RI2008233, NT2RI2008336, NT2RI2008396, NT2RI2008455, NT2RI2008481, NT2RI2008502, NT2RI2008526, NT2RI2008566, NT2RI2008598, NT2RI2008656, NT2RI2008714, NT2RI2008791, NT2RI2008801, NT2RI2008808, NT2RI2008812, NT2RI2008841, NT2RI2008942, NT2RI2008952, NT2RI2009005, NT2RI2009037, NT2RI2009065, NT2RI2009066, NT2RI2009083, NT2RI2009101, NT2RI2009103, NT2RI2009144, NT2RI2009151, NT2RI2009173, NT2RI2009215, NT2RI2009233, NT2RI2009239, NT2RI2009259, NT2RI2009269, NT2RI2009289, NT2RI2009301, NT2RI2009402, NT2RI2009406, NT2RI2009517, NT2RI2009583, NT2RI2009585, NT2RI2009595, NT2RI2009855, NT2RI2010283, NT2RI2010508, NT2RI2010795, NT2RI2011422, NT2RI2011450, NT2RI2011683, NT2RI2011803, NT2RI2012350, NT2RI2012659, NT2RI2012726, NT2RI2012990, NT2RI2013345, NT2RI2013357, NT2RI2013373, NT2RI2014247, NT2RI2014551, NT2RI2014683, NT2RI2014733, NT2RI2015239, NT2RI2015342, NT2RI2015533, NT2RI2016128, NT2RI2016134, NT2RI2018311, NT2RI2018363, NT2RI2018448, NT2RI2018883, NT2RI2018950, NT2RI2019751, NT2RI2019826, NT2RI2020390, NT2RI2020703, NT2RI2021463, NT2RI2021625, NT2RI2022468, NT2RI2022584, NT2RI2023303, NT2RI2023671, NT2RI2024008, NT2RI2024313, NT2RI2024460, NT2RI2024496, NT2RI2024935, NT2RI2025075, NT2RI2025255, NT2RI2025564, NT2RI2025565, NT2RI2025909, NT2RI2025957, NT2RI2025976, NT2RI2026758, NT2RI2027081, NT2RI2027157, NT2RI2027224, NT2RI2027323, NT2RI2027396, NT2RI2027484, NT2RI2027975, NT2RI2028213, NT2RI2028222, NT2RI2028537, NT2RI2028642, NT2RI3000174, NT2RI3000213, NT2RI3000423, NT2RI3000622, NT2RI3001132, NT2RI3001263, NT2RI3001279, NT2RI3001348, NT2RI3001445, NT2RI3001458, NT2RI3001515, NT2RI3001573, NT2RI3001967, NT2RI3002303, NT2RI3002557, NT2RI3002842, NT2RI3003027, NT2RI3003031, NT2RI3003095, NT2RI3003104, NT2RI3003162, NT2RI3003362, NT2RI3003382, NT2RI3003409, NT2RI3003738, NT2RI3003925, NT2RI3004133, NT2RI3004381, NT2RI3004510, NT2RI3005202, NT2RI3005403, NT2RI3005416, NT2RI3005724, NT2RI3005861, NT2RI3005923, NT2RI3005928, NT2RI3006132, NT2RI3006171, NT2RI3006284, NT2RI3006340, NT2RI3006376, NT2RI3006666, NT2RI3006673, NT2RI3006796, NT2RI3007065, NT2RI3007095, NT2RI3007158, NT2RI3007167, NT2RI3007213, NT2RI3007291, NT2RI3007443, NT2RI3007543, NT2RI3007684, NT2RI3007757, NT2RI3007878, NT2RI3007978, NT2RI3008055, NT2RI3008162, NT2RI3008179, NT2RI3008228, NT2RI3008442, NT2RI3008652, NT2RI3008697, NT2RI3008974, NT2RI3009158, NT2RI3009480, NT2RI3009524, NT2RP6000008, NT2RP6000032, NT2RP6000033, NT2RP6000039, NT2RP6000043, NT2RP6000059, NT2RP6000060, NT2RP6000072, NT2RP6000077, NT2RP6000085, NT2RP6000086, NT2RP6000100, NT2RP6000109, NT2RP6000110, NT2RP6000119, NT2RP6000123, NT2RP6000127, NT2RP6000130, NT2RP6000140, NT2RP6000150, NT2RP7000041, NT2RP7000069, NT2RP7000086, NT2RP7000109, NT2RP7000112, NT2RP7000238, NT2RP7000259, NT2RP7000271, NT2RP7000311, NT2RP7000359, NT2RP7000364, NT2RP7000380, NT2RP7000391, NT2RP7000425, NT2RP7000477, NT2RP7000579, NT2RP7000586, NT2RP7000600, NT2RP7000624, NT2RP7000812, NT2RP7000906, NT2RP7000926, NT2RP7001074, NT2RP7001080, NT2RP7001156, NT2RP7001166, NT2RP7001231, NT2RP7001283, NT2RP7001306, NT2RP7001319, NT2RP7001335, NT2RP7001364, NT2RP7001475, NT2RP7001532, NT2RP7001591, NT2RP7001602, NT2RP7001678, NT2RP7001962, NT2RP7002028, NT2RP7002064, NT2RP7002151, NT2RP7002163, NT2RP7002243, NT2RP7002282, NT2RP7002376, NT2RP7002379, NT2RP7002449, NT2RP7002450, NT2RP7002478, NT2RP7002554, NT2RP7002594, NT2RP7002603, NT2RP7002619, NT2RP7002650, NT2RP7002738, NT2RP7002779, NT2RP7002802, NT2RP7002829, NT2RP7002841, NT2RP7002875, NT2RP7002906, NT2RP7002978, NT2RP7002982, NT2RP7003025, NT2RP7003050, NT2RP7003055, NT2RP7003084, NT2RP7003091, NT2RP7003107, NT2RP7003134, NT2RP7003148, NT2RP7003203, NT2RP7003261, NT2RP7003319, NT2RP7003439, NT2RP7003511, NT2RP7003629, NT2RP7003632, NT2RP7003647, NT2RP7003680, NT2RP7003688, NT2RP7003724, NT2RP7003960, NT2RP7004027, NT2RP7004080, NT2RP7004114, NT2RP7004123, NT2RP7004173, NT2RP7004196, NT2RP7004204, NT2RP7004233, NT2RP7004260, NT2RP7004348, NT2RP7004352, NT2RP7004358, NT2RP7004373, NT2RP7004396, NT2RP7004428, NT2RP7004481, NT2RP7004541, NT2RP7004559, NT2RP7004641, NT2RP7004656, NT2RP7004687, NT2RP7004722, NT2RP7004728, NT2RP7004751, NT2RP7004766, NT2RP7004790, NT2RP7004884, NT2RP7004911, NT2RP7004915, NT2RP7004925, NT2RP7004946, NT2RP7004961, NT2RP7004964, NT2RP7004975, NT2RP7005118, NT2RP7005205, NT2RP7005219, NT2RP7005323, NT2RP7005468, NT2RP7005493, NT2RP7005513, NT2RP7005529, NT2RP7005629, NT2RP7005631, NT2RP7005669, NT2RP7005675, NT2RP7005750, NT2RP7005846, NT2RP7006033, NT2RP7006075, NT2RP7006141, NT2RP7006160, NT2RP7006162, NT2RP7006188, NT2RP7006223, NT2RP7006263, NT2RP7006296, NT2RP7006304, NT2RP7006374, NT2RP7006395, NT2RP7006408, NT2RP7006457, NT2RP7006539, NT2RP7006547, NT2RP7006601, NT2RP7006619, NT2RP7006621, NT2RP7006636, NT2RP7006701, NT2RP7006853, NT2RP7006886, NT2RP7006887, NT2RP7006980, NT2RP7006986, NT2RP7006995, NT2RP7007114, NT2RP7007154, NT2RP7007221, NT2RP7007226, NT2RP7007252, NT2RP7007269, NT2RP7007310, NT2RP7007359, NT2RP7007381, NT2RP7007387, NT2RP7007406, NT2RP7007480, NT2RP7007504, NT2RP7007537, NT2RP7007580, NT2RP7007594, NT2RP7007610, NT2RP7007617, NT2RP7007643, NT2RP7007766, NT2RP7007842, NT2RP7007925, NT2RP7007930, NT2RP7007975, NT2RP7008013, NT2RP7008015, NT2RP7008133, NT2RP7008137, NT2RP7008142, NT2RP7008144, NT2RP7008161, NT2RP7008167, NT2RP7008315, NT2RP7008360, NT2RP7008396, NT2RP7008406, NT2RP7008435, NT2RP7008441, NT2RP7008454, NT2RP7008487, NT2RP7008543, NT2RP7008544, NT2RP7008550, NT2RP7008557, NT2RP7008623, NT2RP7008657, NT2RP7008714, NT2RP7008720, NT2RP7008855, NT2RP7008863, NT2RP7009012, NT2RP7009019, NT2RP7009030, NT2RP7009087, NT2RP7009097, NT2RP7009108, NT2RP7009149, NT2RP7009168, NT2RP7009215, NT2RP7009225, NT2RP7009236, NT2RP7009253, NT2RP7009259, NT2RP7009267, NT2RP7009322, NT2RP7009363, NT2RP7009370, NT2RP7009373, NT2RP7009394, NT2RP7009397, NT2RP7009429, NT2RP7009439, NT2RP7009466, NT2RP7009481, NT2RP7009502, NT2RP7009507, NT2RP7009577, NT2RP7009743, NT2RP7009867, NT2RP7010109, NT2RP7010128, NT2RP7010235, NT2RP7010275, NT2RP7010521, NT2RP7010599, NT2RP7010612, NT2RP7010817, NT2RP7011086, NT2RP7011132, NT2RP7011268, NT2RP7011318, NT2RP7011452, NT2RP7011570, NT2RP7011721, NT2RP7011909, NT2RP7012291, NT2RP7012516, NT2RP7012776, NT2RP7013002, NT2RP7013374, NT2RP7013499, NT2RP7013573, NT2RP7013729, NT2RP7013764, NT2RP7013795, NT2RP7013999, NT2RP7014005, NT2RP7014178, NT2RP7014348, NT2RP7014420, NT2RP7014583, NT2RP7014721, NT2RP7014743, NT2RP7014778, NT2RP7014906, NT2RP7014910, NT2RP7015080, NT2RP7015431, NT2RP7015512, NT2RP7015676, NT2RP7015789, NT2RP7015996, NT2RP7016508, NT2RP7016574, NT2RP7016622, NT2RP7016911, NT2RP7017139, NT2RP7017284, NT2RP7017365, NT2RP7017474, NT2RP7017546, NT2RP7017567, NT2RP7017795, NT2RP7017971, NT2RP7018032, NT2RP7018126, NT2RP7018197, NT2RP7018206, NT2RP7018340, NT2RP7018586, NT2RP7018802, NT2RP7018871, NT2RP7019064, NT2RP7019135, NT2RP7019273, NT2RP7019367, NT2RP7019401, NT2RP7019445, NT2RP7019543, NT2RP7019682, NT2RP7019835, NT2RP7020112, NT2RP7020123, NT2RP7020343, NT2RP7020379, NT2RP8000137, NT2RP8000296, NT2RP8000435, NT2RP8000483, NT2RP8000521, NT2RP8000633, NT2RP8001363, NT2RP8001407, NT2RP8001584, NT2RP8001604, NT2RP8001605, NT2RP8003490, NT2RP8003657, NT2RP8003787, NT2RP8004306, NT2RP8005546, NT2RP8006452, NT2RP8006521, NT2RP8007416, NT2RP8007503, NT2RP8007715, NT2RP8007920, NT2RP8008057, NT2RP8009248, NTONG1000006, NTONG1000033, NTONG1000047, NTONG1000052, NTONG1000075, NTONG1000087, NTONG1000098, NTONG1000123, NTONG1000130, NTONG1000161, NTONG1000172, NTONG1000182, NTONG1000213, NTONG1000214, NTONG1000247, NTONG1000264, NTONG2000040, NTONG2000107, NTONG2000231, NTONG2000265, NTONG2000363, NTONG2000413, NTONG2000492, NTONG2000499, NTONG2000531, NTONG2000583, NTONG2000858, NTONG2000876, NTONG2000878, NTONG2000966, NTONG2000977, NTONG2000985, NTONG2001014, NTONG2001079, NTONG2001137, NTONG2001157, NTONG2001173, NTONG2001428, NTONG2001532, NTONG2001550, NTONG2001567, NTONG2001612, NTONG2001619, NTONG2001642, NTONG2001657, NTONG2001676, NTONG2001762, NTONG2002278, NTONG2002582, NTONG2002807, NTONG2002948, NTONG2002970, NTONG2002985, NTONG2003158, NTONG2003210, NTONG2003316, NTONG2003409, NTONG2003454, NTONG2003515, NTONG2003805, NTONG2003839, NTONG2003852, NTONG2003897, NTONG2003928, NTONG2004095, NTONG2004308, NTONG2004521, NTONG2004614, NTONG2004690, NTONG2004806, NTONG2004829, NTONG2004918, NTONG2004991, NTONG2005062, NTONG2005086, NTONG2005137, NTONG2005153, NTONG2005265, NTONG2005277, NTONG2005363, NTONG2005373, NTONG2005391, NTONG2005480, NTONG2005497, NTONG2005520, NTONG2005577, NTONG2005657, NTONG2005801, NTONG2005822, NTONG2005897, NTONG2005969, NTONG2006099, NTONG2006187, NTONG2006301, NTONG2006324, NTONG2006354, NTONG2006440, NTONG2006484, NTONG2006501, NTONG2006646, NTONG2006709, NTONG2006783, NTONG2007020, NTONG2007028, NTONG2007034, NTONG2007249, NTONG2007517, NTONG2007522, NTONG2007658, NTONG2007693, NTONG2007756, NTONG2008088, NTONG2008093, NTONG2008143, NTONG2008365, NTONG2008483, NTONG2008522, NTONG2008672, NTONG2008862, NTONG2008939, NTONG2008944, NTONG2009060, NTONG2009068, NTONG2009229, NTONG2009233, NTONG2009468, NTONG2009576, OCBBF1000016, OCBBF1000030, OCBBF1000042, OCBBF1000049, OCBBF1000054, OCBBF1000067, OCBBF1000080, OCBBF1000085, OCBBF1000086, OCBBF1000091, OCBBF1000104, OCBBF1000114, OCBBF1000118, OCBBF1000119, OCBBF1000122, OCBBF1000130, OCBBF1000138, OCBBF1000145, OCBBF1000146, OCBBF1000153, OCBBF1000175, OCBBF1000185, OCBBF1000188, OCBBF1000192, OCBBF1000254, OCBBF1000315, OCBBF2000013, OCBBF2000015, OCBBF2000126, OCBBF2000178, OCBBF2000231, OCBBF2000277, OCBBF2000287, OCBBF2000323, OCBBF2000452, OCBBF2000467, OCBBF2000522, OCBBF2000677, OCBBF2000703, OCBBF2000712, OCBBF2000719, OCBBF2000824, OCBBF2000831, OCBBF2000904, OCBBF2000986, OCBBF2000998, OCBBF2001075, OCBBF2001101, OCBBF2001124, OCBBF2001140, OCBBF2001166, OCBBF2001176, OCBBF2001186, OCBBF2001196, OCBBF2001210, OCBBF2001252, OCBBF2001307, OCBBF2001323, OCBBF2001389, OCBBF2001402, OCBBF2001408, OCBBF2001416, OCBBF2001473, OCBBF2001492, OCBBF2001494, OCBBF2001527, OCBBF2001528, OCBBF2001586, OCBBF2001639, OCBBF2001681, OCBBF2001687, OCBBF2001706, OCBBF2001749, OCBBF2001794, OCBBF2001910, OCBBF2001931, OCBBF2001961, OCBBF2001983, OCBBF2002015, OCBBF2002083, OCBBF2002124, OCBBF2002161, OCBBF2002290, OCBBF2002357, OCBBF2002376, OCBBF2002615, OCBBF2002626, OCBBF2002656, OCBBF2002663, OCBBF2002805, OCBBF2002865, OCBBF2002920, OCBBF2002980, OCBBF2003028, OCBBF2003052, OCBBF2003091, OCBBF2003246, OCBBF2003327, OCBBF2003543, OCBBF2003593, OCBBF2003744, OCBBF2003819, OCBBF2004038, OCBBF2004104, OCBBF2004147, OCBBF2004168, OCBBF2004235, OCBBF2004259, OCBBF2004273, OCBBF2004385, OCBBF2004418, OCBBF2004478, OCBBF2004482, OCBBF2004533, OCBBF2004567, OCBBF2004612, OCBBF2004647, OCBBF2004669, OCBBF2004757, OCBBF2004826, OCBBF2004866, OCBBF2004883, OCBBF2004889, OCBBF2004930, OCBBF2004984, OCBBF2005066, OCBBF2005077, OCBBF2005161, OCBBF2005343, OCBBF2005349, OCBBF2005373, OCBBF2005420, OCBBF2005433, OCBBF2005476, OCBBF2005546, OCBBF2005843, OCBBF2005901, OCBBF2005956, OCBBF2006005, OCBBF2006030, OCBBF2006058, OCBBF2006113, OCBBF2006148, OCBBF2006151, OCBBF2006154, OCBBF2006172, OCBBF2006214, OCBBF2006241, OCBBF2006388, OCBBF2006438, OCBBF2006567, OCBBF2006624, OCBBF2006639, OCBBF2006660, OCBBF2006764, OCBBF2006849, OCBBF2006859, OCBBF2006972, OCBBF2006987, OCBBF2007028, OCBBF2007039, OCBBF2007051, OCBBF2007068, OCBBF2007114, OCBBF2007121, OCBBF2007184, OCBBF2007194, OCBBF2007196, OCBBF2007224, OCBBF2007238, OCBBF2007414, OCBBF2007428, OCBBF2007478, OCBBF2007485, OCBBF2007520, OCBBF2007555, OCBBF2007610, OCBBF2007622, OCBBF2007756, OCBBF2007762, OCBBF2007829, OCBBF2007892, OCBBF2007931, OCBBF2007946, OCBBF2008005, OCBBF2008116, OCBBF2008138, OCBBF2008144, OCBBF2008283, OCBBF2008330, OCBBF2008340, OCBBF2008366, OCBBF2008466, OCBBF2008483, OCBBF2008511, OCBBF2008520, OCBBF2008569, OCBBF2008586, OCBBF2008640, OCBBF2008691, OCBBF2008701, OCBBF2008724, OCBBF2008760, OCBBF2008768, OCBBF2008770, OCBBF2008775, OCBBF2008790, OCBBF2008814, OCBBF2008822, OCBBF2009095, OCBBF2009115, OCBBF2009301, OCBBF2009352, OCBBF2009391, OCBBF2009424, OCBBF2009536, OCBBF2009571, OCBBF2009583, OCBBF2009603, OCBBF2009772, OCBBF2009788, OCBBF2009836, OCBBF2009920, OCBBF2009926, OCBBF2010040, OCBBF2010140, OCBBF2010281, OCBBF2010313, OCBBF2010404, OCBBF2010416, OCBBF2010420, OCBBF2010557, OCBBF2010604, OCBBF2010709, OCBBF2010792, OCBBF2010819, OCBBF2010841, OCBBF2010843, OCBBF2010858, OCBBF2010863, OCBBF2010871, OCBBF2010931, OCBBF2010945, OCBBF2010978, OCBBF2010989, OCBBF2011021, OCBBF2011073, OCBBF2011137, OCBBF2011160, OCBBF2011177, OCBBF2011228, OCBBF2011232, OCBBF2011283, OCBBF2011311, OCBBF2011536, OCBBF2011625, OCBBF2011669, OCBBF2011685, OCBBF2011706, OCBBF2011722, OCBBF2011759, OCBBF2011767, OCBBF2011855, OCBBF2011872, OCBBF2011887, OCBBF2011897, OCBBF2011914, OCBBF2011960, OCBBF2011981, OCBBF2012001, OCBBF2012028, OCBBF2012039, OCBBF2012095, OCBBF2012139, OCBBF2012191, OCBBF2012262, OCBBF2012320, OCBBF2012436, OCBBF2012525, OCBBF2012553, OCBBF2012678, OCBBF2012704, OCBBF2012714, OCBBF2012755, OCBBF2012812, OCBBF2012881, OCBBF2012908, OCBBF2012936, OCBBF2012990, OCBBF2013011, OCBBF2013049, OCBBF2013091, OCBBF2013123, OCBBF2013127, OCBBF2013149, OCBBF2013208, OCBBF2013285, OCBBF2013319, OCBBF2013324, OCBBF2013481, OCBBF2013507, OCBBF2013721, OCBBF2013789, OCBBF2013843, OCBBF2013883, OCBBF2013926, OCBBF2014052, OCBBF2014064, OCBBF2014089, OCBBF2014292, OCBBF2014322, OCBBF2014386, OCBBF2014541, OCBBF2014576, OCBBF2014707, OCBBF2014745, OCBBF2014828, OCBBF2014873, OCBBF2014880, OCBBF2014928, OCBBF2015031, OCBBF2015081, OCBBF2015115, OCBBF2015232, OCBBF2015233, OCBBF2015285, OCBBF2015334, OCBBF2015335, OCBBF2015503, OCBBF2015506, OCBBF2015599, OCBBF2015645, OCBBF2015659, OCBBF2015797, OCBBF2015931, OCBBF2015980, OCBBF2016038, OCBBF2016405, OCBBF2016467, OCBBF2016590, OCBBF2016591, OCBBF2016612, OCBBF2016689, OCBBF2016690, OCBBF2016729, OCBBF2016841, OCBBF2016928, OCBBF2017035, OCBBF2017055, OCBBF2017069, OCBBF2017306, OCBBF2017325, OCBBF2017398, OCBBF2017458, OCBBF2017489, OCBBF2017516, OCBBF2017665, OCBBF2017754, OCBBF2017791, OCBBF2017815, OCBBF2017882, OCBBF2017888, OCBBF2017893, OCBBF2017920, OCBBF2018012, OCBBF2018014, OCBBF2018084, OCBBF2018167, OCBBF2018206, OCBBF2018229, OCBBF2018234, OCBBF2018362, OCBBF2018380, OCBBF2018563, OCBBF2018581, OCBBF2018618, OCBBF2018663, OCBBF2018687, OCBBF2018707, OCBBF2018827, OCBBF2018828, OCBBF2018873, OCBBF2018934, OCBBF2018956, OCBBF2019108, OCBBF2019195, OCBBF2019327, OCBBF2019684, OCBBF2019761, OCBBF2019823, OCBBF2019950, OCBBF2020048, OCBBF2020318, OCBBF2020343, OCBBF2020453, OCBBF2020741, OCBBF2020801, OCBBF2020825, OCBBF2020838, OCBBF2021020, OCBBF2021214, OCBBF2021286, OCBBF2021323, OCBBF2021518, OCBBF2021788, OCBBF2021833, OCBBF2022351, OCBBF2022573, OCBBF2022574, OCBBF2023162, OCBBF2023598, OCBBF2023643, OCBBF2024463, OCBBF2024589, OCBBF2024719, OCBBF2024779, OCBBF2024781, OCBBF2024850, OCBBF2025028, OCBBF2025115, OCBBF2025198, OCBBF2025451, OCBBF2025458, OCBBF2025527, OCBBF2025631, OCBBF2025730, OCBBF2026025, OCBBF2026035, OCBBF2026144, OCBBF2026368, OCBBF2026645, OCBBF2026649, OCBBF2026690, OCBBF2026981, OCBBF2027148, OCBBF2027197, OCBBF2027354, OCBBF2027423, OCBBF2027478, OCBBF2027481, OCBBF2027511, OCBBF2027661, OCBBF2027728, OCBBF2027782, OCBBF2027868, OCBBF2028055, OCBBF2028173, OCBBF2028421, OCBBF2029471, OCBBF2029901, OCBBF2030116, OCBBF2030329, OCBBF2030354, OCBBF2030517, OCBBF2030574, OCBBF2030708, OCBBF2030927, OCBBF2030963, OCBBF2031167, OCBBF2031198, OCBBF2031366, OCBBF2031561, OCBBF2032152, OCBBF2032274, OCBBF2032539, OCBBF2032590, OCBBF2032599, OCBBF2032611, OCBBF2032671, OCBBF2033295, OCBBF2033413, OCBBF2033869, OCBBF2033948, OCBBF2034333, OCBBF2034529, OCBBF2034637, OCBBF2034906, OCBBF2035110, OCBBF2035214, OCBBF2035226, OCBBF2035390, OCBBF2035564, OCBBF2035658, OCBBF2035823, OCBBF2035885, OCBBF2035916, OCBBF2036019, OCBBF2036031, OCBBF2036225, OCBBF2036476, OCBBF2036743, OCBBF2036752, OCBBF2037068, OCBBF2037340, OCBBF2037398, OCBBF2037464, OCBBF2037547, OCBBF2037598, OCBBF2037638, OCBBF2038238, OCBBF2038285, OCBBF2038317, OCBBF3000097, OCBBF3000213, OCBBF3000296, OCBBF3000323, OCBBF3000372, OCBBF3000380, OCBBF3000743, OCBBF3000830, OCBBF3001076, OCBBF3001202, OCBBF3001333, OCBBF3001616, OCBBF3002553, OCBBF3002600, OCBBF3002654, OCBBF3003103, OCBBF3003209, OCBBF3003592, OCBBF3003745, OCBBF3003761, OCBBF3004264, OCBBF3004314, OCBBF3004487, OCBBF3004972, OCBBF3005330, OCBBF3005597, OCBBF3005843, OCBBF3006802, OCBBF3006986, OCBBF3007078, OCBBF3007704, OCBBF3008230, OCBBF3008392, OCBBF3008835, OCBBF3009192, OCBBF3009244, OCBBF3009279, PANCR1000012, PANCR1000021, PANCR1000086, PANCR1000091, PANCR1000185, PEBLM1000024, PEBLM1000029, PEBLM1000034, PEBLM1000062, PEBLM1000066, PEBLM1000068, PEBLM1000071, PEBLM1000083, PEBLM1000144, PEBLM1000147, PEBLM1000174, PEBLM1000180, PEBLM2000030, PEBLM2000112, PEBLM2000126, PEBLM2000147, PEBLM2000170, PEBLM2000180, PEBLM2000213, PEBLM2000222, PEBLM2000248, PEBLM2000267, PEBLM2000270, PEBLM2000308, PEBLM2000321, PEBLM2000326, PEBLM2000333, PEBLM2000338, PEBLM2000479, PEBLM2000502, PEBLM2001072, PEBLM2001312, PEBLM2001465, PEBLM2001488, PEBLM2001803, PEBLM2002432, PEBLM2002455, PEBLM2002594, PEBLM2002749, PEBLM2002887, PEBLM2003426, PEBLM2003765, PEBLM2003914, PEBLM2003935, PEBLM2004015, PEBLM2004216, PEBLM2004290, PEBLM2004452, PEBLM2004497, PEBLM2004666, PEBLM2004733, PEBLM2005282, PEBLM2005615, PEBLM2005632, PEBLM2005697, PEBLM2006031, PEBLM2006036, PEBLM2006049, PEBLM2006113, PEBLM2006135, PEBLM2006215, PEBLM2006283, PEBLM2006298, PEBLM2006366, PEBLM2006709, PEBLM2006912, PEBLM2007112, PEBLM2007140, PEBLM2007188, PEBLM2007296, PEBLM2007437, PEBLM2007447, PEBLM2007598, PEBLM2007774, PEBLM2007832, PEBLM2007834, PEBLM2008106, PEBLM2008576, PEBLM2008605, PEBLM2008826, PERIC1000025, PERIC1000147, PERIC2000180, PERIC2000214, PERIC2000386, PERIC2000387, PERIC2000422, PERIC2000473, PERIC2000478, PERIC2000889, PERIC2000914, PERIC2001227, PERIC2001228, PERIC2001379, PERIC2001504, PERIC2001703, PERIC2001764, PERIC2002243, PERIC2002272, PERIC2002452, PERIC2002766, PERIC2003001, PERIC2003090, PERIC2003287, PERIC2003349, PERIC2003452, PERIC2003699, PERIC2003720, PERIC2003794, PERIC2003834, PERIC2003919, PERIC2003957, PERIC2004028, PERIC2004131, PERIC2004259, PERIC2004379, PERIC2004429, PERIC2004510, PERIC2004613, PERIC2004909, PERIC2005111, PERIC2005117, PERIC2005305, PERIC2005347, PERIC2005370, PERIC2005936, PERIC2006035, PERIC2006121, PERIC2006443, PERIC2006945, PERIC2006960, PERIC2007068, PERIC2007439, PERIC2007914, PERIC2008008, PERIC2008385, PERIC2009001, PERIC2009086, PERIC2009329, PERIC2009566, PLACE5000001, PLACE5000013, PLACE5000037, PLACE5000058, PLACE5000066, PLACE5000067, PLACE5000068, PLACE5000070, PLACE5000080, PLACE5000105, PLACE5000113, PLACE5000115, PLACE5000116, PLACE5000129, PLACE5000139, PLACE5000153, PLACE5000159, PLACE5000170, PLACE5000171, PLACE5000172, PLACE5000178, PLACE5000245, PLACE5000260, PLACE5000282, PLACE5000297, PLACE5000372, PLACE5000492, PLACE5000522, PLACE5000527, PLACE6000012, PLACE6000044, PLACE6000055, PLACE6000070, PLACE6000137, PLACE6000145, PLACE6000191, PLACE6000205, PLACE6000231, PLACE6000263, PLACE6000296, PLACE6000314, PLACE6000325, PLACE6000348, PLACE6000371, PLACE6000379, PLACE6000414, PLACE6000424, PLACE6000426, PLACE6000429, PLACE6000450, PLACE6000463, PLACE6000523, PLACE6000550, PLACE6000552, PLACE6000555, PLACE6000619, PLACE6000953, PLACE6001064, PLACE6001118, PLACE6001153, PLACE6001185, PLACE6001281, PLACE6001294, PLACE6001443, PLACE6001536, PLACE6001557, PLACE6001712, PLACE6001740, PLACE6001823, PLACE6001886, PLACE6001923, PLACE6001925, PLACE6001933, PLACE6002011, PLACE6002016, PLACE6002056, PLACE6002084, PLACE6002102, PLACE6002157, PLACE6002312, PLACE6002323, PLACE6002345, PLACE6002419, PLACE6002462, PLACE6002647, PLACE6002668, PLACE6002692, PLACE6002699, PLACE6002710, PLACE6002871, PLACE6002949, PLACE6002960, PLACE6003004, PLACE6003077, PLACE6003094, PLACE6003109, PLACE6003204, PLACE6003218, PLACE6003372, PLACE6003383, PLACE6003393, PLACE6003399, PLACE6003539, PLACE6003621, PLACE6003705, PLACE6003740, PLACE6003745, PLACE6003771, PLACE6003796, PLACE6003839, PLACE6003850, PLACE6004005, PLACE6004101, PLACE6004219, PLACE6004336, PLACE6004368, PLACE6004380, PLACE6004396, PLACE6004397, PLACE6004454, PLACE6004464, PLACE6004491, PLACE6004578, PLACE6004663, PLACE6004687, PLACE6004738, PLACE6004931, PLACE6004966, PLACE6004993, PLACE6005007, PLACE6005029, PLACE6005108, PLACE6005231, PLACE6005234, PLACE6005283, PLACE6005294, PLACE6005328, PLACE6005351, PLACE6005423, PLACE6005482, PLACE6005535, PLACE6005546, PLACE6005559, PLACE6005579, PLACE6005691, PLACE6005786, PLACE6006042, PLACE6006077, PLACE6006137, PLACE6006158, PLACE6006186, PLACE6006217, PLACE6006222, PLACE6006266, PLACE6006287, PLACE6006394, PLACE6006418, PLACE6006474, PLACE6006549, PLACE6006566, PLACE6006697, PLACE6006822, PLACE6006871, PLACE6006905, PLACE6006988, PLACE6007050, PLACE6007180, PLACE6007239, PLACE6007242, PLACE6007309, PLACE6007373, PLACE6007380, PLACE6007433, PLACE6007436, PLACE6007482, PLACE6007687, PLACE6007787, PLACE6007798, PLACE6007807, PLACE6007925, PLACE6008036, PLACE6008094, PLACE6008126, PLACE6008285, PLACE6008444, PLACE6008453, PLACE6008640, PLACE6008750, PLACE6008768, PLACE6008775, PLACE6008793, PLACE6008824, PLACE6008989, PLACE6009006, PLACE6009008, PLACE6009228, PLACE6009237, PLACE6009338, PLACE6009419, PLACE6009430, PLACE6009482, PLACE6009524, PLACE6009527, PLACE6009560, PLACE6009590, PLACE6009821, PLACE6009835, PLACE6009853, PLACE6010077, PLACE6010463, PLACE6010484, PLACE6010485, PLACE6010568, PLACE6010701, PLACE6010704, PLACE6010732, PLACE6010765, PLACE6010848, PLACE6010925, PLACE6010936, PLACE6010991, PLACE6011041, PLACE6011057, PLACE6011102, PLACE6011156, PLACE6011211, PLACE6011260, PLACE6011334, PLACE6011627, PLACE6011774, PLACE6011881, PLACE6011907, PLACE6011970, PLACE6011975, PLACE6012028, PLACE6012108, PLACE6012168, PLACE6012297, PLACE6012308, PLACE6012908, PLACE6012936, PLACE6012942, PLACE6013222, PLACE6013232, PLACE6013288, PLACE6013386, PLACE6013400, PLACE6013650, PLACE6013672, PLACE6013883, PLACE6013884, PLACE6013885, PLACE6014043, PLACE6014064, PLACE6014516, PLACE6014882, PLACE6015051, PLACE6015211, PLACE6015322, PLACE6015445, PLACE6015460, PLACE6015513, PLACE6015591, PLACE6015729, PLACE6015731, PLACE6015939, PLACE6016030, PLACE6016093, PLACE6016105, PLACE6016160, PLACE6016210, PLACE6016254, PLACE6016383, PLACE6016942, PLACE6016984, PLACE6017002, PLACE6017431, PLACE6017564, PLACE6017578, PLACE6017626, PLACE6017701, PLACE6017714, PLACE6017788, PLACE6017791, PLACE6018031, PLACE6018107, PLACE6018187, PLACE6018235, PLACE6018287, PLACE6018441, PLACE6018487, PLACE6018497, PLACE6018769, PLACE6018834, PLACE6018843, PLACE6018863, PLACE6018938, PLACE6019195, PLACE6019385, PLACE6019542, PLACE6019600, PLACE6019674, PLACE6019676, PLACE6019701, PLACE6020031, PLACE6020145, PLACE7000167, PLACE7000170, PLACE7000266, PLACE7000333, PLACE7000410, PLACE7000502, PLACE7000707, PLACE7001022, PLACE7001544, PLACE7001759, PLACE7001936, PLACE7002303, PLACE7002641, PLACE7003639, PLACE7003657, PLACE7003684, PLACE7003985, PLACE7004103, PLACE7004961, PLACE7005169, PLACE7005671, PLACE7005840, PLACE7006051, PLACE7006090, PLACE7006240, PLACE7006268, PLACE7006275, PLACE7006498, PLACE7006540, PLACE7007379, PLACE7007644, PLACE7007973, PLACE7008136, PLACE7008261, PLACE7008431, PLACE7008623, PLACE7008766, PLACE7009563, PROST1000033, PROST1000039, PROST1000065, PROST1000083, PROST1000085, PROST1000097, PROST1000110, PROST1000120, PROST1000123, PROST1000136, PROST1000144, PROST1000145, PROST1000152, PROST1000167, PROST1000184, PROST1000199, PROST1000215, PROST1000217, PROST1000220, PROST1000226, PROST1000246, PROST1000262, PROST1000272, PROST1000298, PROST1000322, PROST1000334, PROST1000343, PROST1000362, PROST1000377, PROST1000383, PROST1000412, PROST1000419, PROST1000451, PROST1000480, PROST1000485, PROST1000493, PROST1000512, PROST1000526, PROST1000527, PROST1000528, PROST1000536, PROST1000559, PROST1000564, PROST1000575, PROST2000036, PROST2000053, PROST2000067, PROST2000105, PROST2000143, PROST2000162, PROST2000165, PROST2000176, PROST2000203, PROST2000206, PROST2000212, PROST2000241, PROST2000267, PROST2000273, PROST2000274, PROST2000277, PROST2000284, PROST2000325, PROST2000337, PROST2000432, PROST2000452, PROST2000463, PROST2000470, PROST2000505, PROST2000567, PROST2000572, PROST2000717, PROST2000760, PROST2000761, PROST2000835, PROST2000893, PROST2000961, PROST2001002, PROST2001116, PROST2001138, PROST2001180, PROST2001213, PROST2001283, PROST2001414, PROST2001415, PROST2001465, PROST2001521, PROST2001540, PROST2001552, PROST2001599, PROST2001611, PROST2001636, PROST2001739, PROST2001796, PROST2001805, PROST2001823, PROST2001883, PROST2001899, PROST2001997, PROST2001998, PROST2002078, PROST2002101, PROST2002212, PROST2002227, PROST2002338, PROST2002425, PROST2002488, PROST2002489, PROST2002527, PROST2002591, PROST2002602, PROST2002633, PROST2002651, PROST2002682, PROST2002685, PROST2002722, PROST2002736, PROST2002842, PROST2002897, PROST2002906, PROST2002927, PROST2002960, PROST2003102, PROST2003117, PROST2003210, PROST2003232, PROST2003302, PROST2003303, PROST2003324, PROST2003338, PROST2003340, PROST2003396, PROST2003428, PROST2003472, PROST2003517, PROST2003537, PROST2003563, PROST2003577, PROST2003583, PROST2003586, PROST2003628, PROST2003635, PROST2003674, PROST2003676, PROST2003725, PROST2003732, PROST2003775, PROST2003922, PROST2003930, PROST2004095, PROST2004115, PROST2004142, PROST2004146, PROST2004161, PROST2004258, PROST2004270, PROST2004332, PROST2004416, PROST2004481, PROST2004526, PROST2004570, PROST2004727, PROST2004739, PROST2004742, PROST2004744, PROST2004817, PROST2005039, PROST2005067, PROST2005076, PROST2005093, PROST2005121, PROST2005131, PROST2005143, PROST2005228, PROST2005272, PROST2005285, PROST2005426, PROST2005466, PROST2005604, PROST2005630, PROST2005683, PROST2005788, PROST2005793, PROST2005880, PROST2005886, PROST2005904, PROST2005919, PROST2005943, PROST2006008, PROST2006020, PROST2006030, PROST2006060, PROST2006196, PROST2006201, PROST2006260, PROST2006282, PROST2006343, PROST2006450, PROST2006491, PROST2006510, PROST2006536, PROST2006579, PROST2006688, PROST2006737, PROST2006766, PROST2006782, PROST2006933, PROST2006988, PROST2007122, PROST2007200, PROST2007237, PROST2007248, PROST2007289, PROST2007317, PROST2007328, PROST2007382, PROST2007389, PROST2007416, PROST2007528, PROST2007612, PROST2007818, PROST2007871, PROST2007950, PROST2007956, PROST2007974, PROST2007988, PROST2008079, PROST2008088, PROST2008243, PROST2008245, PROST2008268, PROST2008271, PROST2008360, PROST2008447, PROST2008468, PROST2008472, PROST2008489, PROST2008516, PROST2008724, PROST2008770, PROST2008835, PROST2008993, PROST2009022, PROST2009208, PROST2009222, PROST2009254, PROST2009273, PROST2009320, PROST2009347, PROST2009365, PROST2009388, PROST2009400, PROST2009470, PROST2009483, PROST2009571, PROST2009731, PROST2009736, PROST2009795, PROST2009901, PROST2009909, PROST2010046, PROST2010219, PROST2010250, PROST2010318, PROST2010326, PROST2010382, PROST2010400, PROST2010545, PROST2010579, PROST2010606, PROST2010782, PROST2010885, PROST2011012, PROST2011038, PROST2011105, PROST2011297, PROST2011410, PROST2011439, PROST2011482, PROST2011577, PROST2011631, PROST2011660, PROST2012005, PROST2012007, PROST2012016, PROST2012088, PROST2012140, PROST2012157, PROST2012190, PROST2012249, PROST2012353, PROST2012400, PROST2012448, PROST2012504, PROST2012542, PROST2012550, PROST2012740, PROST2012745, PROST2012780, PROST2012888, PROST2012890, PROST2013032, PROST2013053, PROST2013121, PROST2013260, PROST2013327, PROST2013531, PROST2013605, PROST2013627, PROST2013873, PROST2013880, PROST2014422, PROST2014585, PROST2014601, PROST2014659, PROST2014862, PROST2014916, PROST2014925, PROST2015124, PROST2015137, PROST2015198, PROST2015243, PROST2015246, PROST2015251, PROST2015287, PROST2015332, PROST2015457, PROST2015464, PROST2015537, PROST2015545, PROST2015551, PROST2015636, PROST2015710, PROST2015756, PROST2015877, PROST2015900, PROST2015924, PROST2015932, PROST2016246, PROST2016351, PROST2016379, PROST2016444, PROST2016462, PROST2016499, PROST2016512, PROST2016566, PROST2016582, PROST2016668, PROST2016684, PROST2016777, PROST2016829, PROST2016860, PROST2016918, PROST2016980, PROST2017098, PROST2017128, PROST2017203, PROST2017367, PROST2017413, PROST2017441, PROST2017529, PROST2017578, PROST2017612, PROST2017617, PROST2017692, PROST2017700, PROST2017701, PROST2017729, PROST2017836, PROST2017910, PROST2017972, PROST2018030, PROST2018090, PROST2018235, PROST2018437, PROST2018487, PROST2018511, PROST2018583, PROST2018588, PROST2018607, PROST2018788, PROST2018902, PROST2018922, PROST2018977, PROST2019164, PROST2019253, PROST2019296, PROST2019398, PROST2019487, PROST2019781, PUAEN1000039, PUAEN1000057, PUAEN1000065, PUAEN1000081, PUAEN1000085, PUAEN1000087, PUAEN1000121, PUAEN1000147, PUAEN1000161, PUAEN1000164, PUAEN1000175, PUAEN1000239, PUAEN1000275, PUAEN1000276, PUAEN1000288, PUAEN2000080, PUAEN2000152, PUAEN2000175, PUAEN2000247, PUAEN2000312, PUAEN2000394, PUAEN2000497, PUAEN2000535, PUAEN2000594, PUAEN2000684, PUAEN2000942, PUAEN2001260, PUAEN2001345, PUAEN2001526, PUAEN2001586, PUAEN2001882, PUAEN2002473, PUAEN2002489, PUAEN2002552, PUAEN2002568, PUAEN2002616, PUAEN2002758, PUAEN2003018, PUAEN2003079, PUAEN2003116, PUAEN2003408, PUAEN2003517, PUAEN2003954, PUAEN2004067, PUAEN2004083, PUAEN2004400, PUAEN2004511, PUAEN2004525, PUAEN2004875, PUAEN2005110, PUAEN2005247, PUAEN2005502, PUAEN2005588, PUAEN2005930, PUAEN2006029, PUAEN2006328, PUAEN2006335, PUAEN2006578, PUAEN2006639, PUAEN2006761, PUAEN2007044, PUAEN2007350, PUAEN2007785, PUAEN2007898, PUAEN2008123, PUAEN2008228, PUAEN2008314, PUAEN2008515, PUAEN2008815, PUAEN2008939, PUAEN2008980, PUAEN2008985, PUAEN2009174, PUAEN2009348, PUAEN2009534, PUAEN2009655, PUAEN2009795, PUAEN2009852, PUAEN2010346, PUAEN2010824, RECTM1000051, RECTM1000141, RECTM2000220, RECTM2000349, RECTM2000433, RECTM2000510, RECTM2001307, RECTM2001347, RECTM2001519, RECTM2001666, RECTM2001691, RECTM2001749, RECTM2002172, RECTM2002602, RECTM2002632, SALGL1000005, SALGL1000028, SALGL1000047, SALGL1000065, SALGL1000107, SALGL1000171, SKMUS1000014, SKMUS1000022, SKMUS1000030, SKMUS1000064, SKMUS1000067, SKMUS1000084, SKMUS1000102, SKMUS1000104, SKMUS1000110, SKMUS1000118, SKMUS1000124, SKMUS1000129, SKMUS1000138, SKMUS1000176, SKMUS1000177, SKMUS2000020, SKMUS2000061, SKMUS2000074, SKMUS2000078, SKMUS2000117, SKMUS2000137, SKMUS2000198, SKMUS2000243, SKMUS2000271, SKMUS2000287, SKMUS2000317, SKMUS2000330, SKMUS2000339, SKMUS2000343, SKMUS2000361, SKMUS2000365, SKMUS2000380, SKMUS2000390, SKMUS2000416, SKMUS2000458, SKMUS2000467, SKMUS2000468, SKMUS2000484, SKMUS2000515, SKMUS2000679, SKMUS2000690, SKMUS2000701, SKMUS2000705, SKMUS2000710, SKMUS2000724, SKMUS2000726, SKMUS2000757, SKMUS2000774, SKMUS2000780, SKMUS2000821, SKMUS2000847, SKMUS2000863, SKMUS2000873, SKMUS2000894, SKMUS2000898, SKMUS2000902, SKMUS2000931, SKMUS2000933, SKMUS2000945, SKMUS2000954, SKMUS2000961, SKMUS2000973, SKMUS2000980, SKMUS2001008, SKMUS2001014, SKMUS2001129, SKMUS2001147, SKMUS2001157, SKMUS2001164, SKMUS2001199, SKMUS2001201, SKMUS2001215, SKMUS2001247, SKMUS2001254, SKMUS2001271, SKMUS2001287, SKMUS2001323, SKMUS2001364, SKMUS2001398, SKMUS2001402, SKMUS2001412, SKMUS2001454, SKMUS2001492, SKMUS2001501, SKMUS2001543, SKMUS2001580, SKMUS2001585, SKMUS2001608, SKMUS2001631, SKMUS2001634, SKMUS2001662, SKMUS2001663, SKMUS2001668, SKMUS2001671, SKMUS2001683, SKMUS2001693, SKMUS2001695, SKMUS2001703, SKMUS2001740, SKMUS2001742, SKMUS2001823, SKMUS2001850, SKMUS2002077, SKMUS2002084, SKMUS2002153, SKMUS2002475, SKMUS2002602, SKMUS2002634, SKMUS2002693, SKMUS2002821, SKMUS2002840, SKMUS2002920, SKMUS2003034, SKMUS2003074, SKMUS2003168, SKMUS2003194, SKMUS2003744, SKMUS2004044, SKMUS2004047, SKMUS2004483, SKMUS2004667, SKMUS2004897, SKMUS2004903, SKMUS2004908, SKMUS2005428, SKMUS2006394, SKMUS2006481, SKMUS2006755, SKMUS2007315, SKMUS2007359, SKMUS2007568, SKMUS2007740, SKMUS2007816, SKMUS2007915, SKMUS2008338, SKMUS2008407, SKMUS2008474, SKMUS2008585, SKMUS2008607, SKMUS2009190, SKMUS2009232, SKMUS2009479, SKMUS2009557, SKNMC1000110, SKNMC1000123, SKNMC1000124, SKNMC1000137, SKNMC1000159, SKNMC1000168, SKNMC1000229, SKNMC1000251, SKNMC1000264, SKNMC2000065, SKNMC2000097, SKNMC2000224, SKNMC2000256, SKNMC2000305, SKNMC2000356, SKNMC2000374, SKNMC2000583, SKNMC2000593, SKNMC2000612, SKNMC2000622, SKNMC2000649, SKNMC2000698, SKNMC2000877, SKNMC2000966, SKNMC2001113, SKNMC2001324, SKNMC2001503, SKNMC2001555, SKNMC2001596, SKNMC2001623, SKNMC2002402, SKNMC2003639, SKNMC2003924, SKNMC2003987, SKNMC2004457, SKNMC2004643, SKNMC2004651, SKNMC2005772, SKNMC2006173, SKNMC2006327, SKNMC2006998, SKNMC2007134, SKNMC2007502, SKNMC2007504, SKNMC2007961, SKNMC2009450, SKNSH1000002, SKNSH1000086, SKNSH1000101, SKNSH1000174, SKNSH1000301, SKNSH1000308, SKNSH1000416, SKNSH2000051, SKNSH2000101, SKNSH2000151, SKNSH2000163, SKNSH2000250, SKNSH2000319, SKNSH2000347, SKNSH2000482, SKNSH2000516, SKNSH2000550, SKNSH2000716, SKNSH2000819, SKNSH2000971, SKNSH2001222, SKNSH2001875, SKNSH2001931, SKNSH2002054, SKNSH2002325, SKNSH2002768, SKNSH2002866, SKNSH2003064, SKNSH2003174, SKNSH2003422, SKNSH2003466, SKNSH2003483, SKNSH2003528, SKNSH2003633, SKNSH2004039, SKNSH2005061, SKNSH2005120, SKNSH2005194, SKNSH2005240, SKNSH2005792, SKNSH2005816, SKNSH2005981, SKNSH2006234, SKNSH2006304, SKNSH2006432, SKNSH2006822, SKNSH2007142, SKNSH2007149, SKNSH2007429, SKNSH2007739, SKNSH2008043, SKNSH2008940, SKNSH2008969, SKNSH2009197, SKNSH2009357, SKNSH2009435, SKNSH2009991, SKNSH2010015, SMINT1000012, SMINT1000016, SMINT1000039, SMINT1000042, SMINT1000048, SMINT1000051, SMINT1000054, SMINT1000057, SMINT1000071, SMINT1000075, SMINT1000078, SMINT1000091, SMINT1000100, SMINT1000103, SMINT1000117, SMINT1000118, SMINT1000137, SMINT1000192, SMINT2000007, SMINT2000018, SMINT2000032, SMINT2000040, SMINT2000060, SMINT2000073, SMINT2000084, SMINT2000145, SMINT2000159, SMINT2000176, SMINT2000185, SMINT2000227, SMINT2000229, SMINT2000232, SMINT2000239, SMINT2000267, SMINT2000277, SMINT2000396, SMINT2000400, SMINT2000441, SMINT2000454, SMINT2000468, SMINT2000518, SMINT2000529, SMINT2000530, SMINT2000537, SMINT2000538, SMINT2000541, SMINT2000558, SMINT2000562, SMINT2000568, SMINT2000602, SMINT2000609, SMINT2000629, SMINT2000659, SMINT2000694, SMINT2000747, SMINT2000811, SMINT2000824, SMINT2000984, SMINT2001114, SMINT2001158, SMINT2001183, SMINT2001222, SMINT2001348, SMINT2001397, SMINT2001458, SMINT2001461, SMINT2001535, SMINT2001559, SMINT2001609, SMINT2001615, SMINT2001683, SMINT2001731, SMINT2001812, SMINT2001950, SMINT2002126, SMINT2002159, SMINT2002202, SMINT2002210, SMINT2002224, SMINT2002281, SMINT2002311, SMINT2002314, SMINT2002328, SMINT2002414, SMINT2002457, SMINT2002620, SMINT2002689, SMINT2002743, SMINT2002778, SMINT2002880, SMINT2002882, SMINT2002899, SMINT2002974, SMINT2002976, SMINT2003003, SMINT2003074, SMINT2003128, SMINT2003150, SMINT2003169, SMINT2003317, SMINT2003340, SMINT2003386, SMINT2003423, SMINT2003551, SMINT2003569, SMINT2003641, SMINT2003644, SMINT2003866, SMINT2004037, SMINT2004047, SMINT2004086, SMINT2004144, SMINT2004280, SMINT2004299, SMINT2004339, SMINT2004350, SMINT2004414, SMINT2004473, SMINT2004547, SMINT2004589, SMINT2004729, SMINT2004781, SMINT2004872, SMINT2004891, SMINT2004909, SMINT2004972, SMINT2004992, SMINT2005075, SMINT2005161, SMINT2005174, SMINT2005213, SMINT2005330, SMINT2005368, SMINT2005387, SMINT2005402, SMINT2005405, SMINT2005621, SMINT2005623, SMINT2005624, SMINT2005800, SMINT2005956, SMINT2006078, SMINT2006205, SMINT2006331, SMINT2006596, SMINT2006641, SMINT2006648, SMINT2006708, SMINT2006716, SMINT2006801, SMINT2007062, SMINT2007101, SMINT2007140, SMINT2007187, SMINT2007219, SMINT2007294, SMINT2007365, SMINT2007391, SMINT2007433, SMINT2007508, SMINT2007526, SMINT2007579, SMINT2007647, SMINT2007729, SMINT2007790, SMINT2007792, SMINT2007796, SMINT2007867, SMINT2007932, SMINT2008042, SMINT2008054, SMINT2008133, SMINT2008277, SMINT2008329, SMINT2008455, SMINT2008491, SMINT2008531, SMINT2008545, SMINT2008558, SMINT2008590, SMINT2008625, SMINT2008672, SMINT2008690, SMINT2008715, SMINT2008720, SMINT2008817, SMINT2008844, SMINT2008869, SMINT2008917, SMINT2008921, SMINT2009119, SMINT2009121, SMINT2009212, SMINT2009216, SMINT2009233, SMINT2009259, SMINT2009272, SMINT2009292, SMINT2009363, SMINT2009415, SMINT2009468, SMINT2009505, SMINT2009529, SMINT2009832, SMINT2009895, SMINT2009902, SMINT2009973, SMINT2010015, SMINT2010068, SMINT2010076, SMINT2010084, SMINT2010144, SMINT2010200, SMINT2010278, SMINT2010324, SMINT2010326, SMINT2010369, SMINT2010426, SMINT2010500, SMINT2010533, SMINT2010629, SMINT2010639, SMINT2010672, SMINT2010753, SMINT2010853, SMINT2010897, SMINT2010901, SMINT2010959, SMINT2010997, SMINT2011033, SMINT2011066, SMINT2011273, SMINT2011311, SMINT2011406, SMINT2011509, SMINT2011567, SMINT2011588, SMINT2011656, SMINT2011888, SMINT2011958, SMINT2012040, SMINT2012122, SMINT2012179, SMINT2012195, SMINT2012285, SMINT2012291, SMINT2012501, SMINT2012734, SMINT2012793, SMINT2013031, SMINT2013032, SMINT2013129, SMINT2013170, SMINT2013181, SMINT2013228, SMINT2013613, SMINT2013626, SMINT2013695, SMINT2013833, SMINT2013890, SMINT2014166, SMINT2014282, SMINT2014443, SMINT2014489, SMINT2014721, SMINT2015006, SMINT2015294, SMINT2015326, SMINT2015353, SMINT2015454, SMINT2015518, SMINT2015745, SMINT2015787, SMINT2015810, SMINT2016122, SMINT2016146, SMINT2016286, SMINT2016313, SMINT2016396, SMINT2016412, SMINT2016440, SMINT2016477, SMINT2016544, SMINT2016857, SMINT2017134, SMINT2017319, SMINT2017324, SMINT2017410, SMINT2017431, SMINT2017432, SMINT2017436, SMINT2017599, SMINT2017659, SMINT2017736, SMINT2017781, SMINT2017855, SMINT2017884, SMINT2017964, SMINT2017974, SMINT2018343, SMINT2018353, SMINT2018592, SMINT2018681, SMINT2019017, SMINT2019105, SMINT2019142, SMINT2019153, SMINT2019200, SPLEN1000013, SPLEN1000041, SPLEN1000049, SPLEN1000056, SPLEN1000087, SPLEN1000091, SPLEN1000106, SPLEN1000134, SPLEN1000139, SPLEN1000143, SPLEN1000144, SPLEN1000145, SPLEN1000156, SPLEN1000163, SPLEN1000165, SPLEN1000166, SPLEN1000178, SPLEN2000020, SPLEN2000047, SPLEN2000064, SPLEN2000072, SPLEN2000098, SPLEN2000126, SPLEN2000134, SPLEN2000143, SPLEN2000189, SPLEN2000197, SPLEN2000205, SPLEN2000210, SPLEN2000222, SPLEN2000242, SPLEN2000243, SPLEN2000247, SPLEN2000255, SPLEN2000258, SPLEN2000267, SPLEN2000270, SPLEN2000307, SPLEN2000310, SPLEN2000341, SPLEN2000348, SPLEN2000350, SPLEN2000357, SPLEN2000364, SPLEN2000402, SPLEN2000414, SPLEN2000420, SPLEN2000443, SPLEN2000448, SPLEN2000450, SPLEN2000464, SPLEN2000496, SPLEN2000515, SPLEN2000516, SPLEN2000537, SPLEN2000541, SPLEN2000607, SPLEN2000630, SPLEN2000695, SPLEN2000839, SPLEN2001135, SPLEN2001157, SPLEN2001176, SPLEN2001227, SPLEN2001245, SPLEN2001278, SPLEN2001354, SPLEN2001367, SPLEN2001383, SPLEN2001476, SPLEN2001510, SPLEN2001599, SPLEN2001626, SPLEN2001650, SPLEN2001689, SPLEN2001710, SPLEN2001761, SPLEN2001781, SPLEN2001881, SPLEN2001912, SPLEN2001945, SPLEN2002007, SPLEN2002053, SPLEN2002133, SPLEN2002147, SPLEN2002166, SPLEN2002175, SPLEN2002223, SPLEN2002272, SPLEN2002314, SPLEN2002335, SPLEN2002343, SPLEN2002354, SPLEN2002385, SPLEN2002419, SPLEN2002451, SPLEN2002462, SPLEN2002463, SPLEN2002477, SPLEN2002493, SPLEN2002662, SPLEN2002695, SPLEN2002707, SPLEN2002744, SPLEN2002917, SPLEN2002931, SPLEN2002957, SPLEN2003160, SPLEN2003204, SPLEN2003219, SPLEN2003297, SPLEN2003396, SPLEN2003678, SPLEN2003878, SPLEN2003918, SPLEN2003924, SPLEN2004060, SPLEN2004078, SPLEN2004124, SPLEN2004148, SPLEN2004220, SPLEN2004343, SPLEN2004346, SPLEN2004368, SPLEN2004555, SPLEN2004611, SPLEN2004662, SPLEN2004773, SPLEN2004844, SPLEN2004880, SPLEN2005009, SPLEN2005227, SPLEN2005272, SPLEN2005416, SPLEN2005429, SPLEN2005450, SPLEN2005474, SPLEN2005560, SPLEN2005727, SPLEN2005783, SPLEN2005790, SPLEN2005818, SPLEN2005838, SPLEN2005869, SPLEN2005927, SPLEN2005939, SPLEN2006133, SPLEN2006143, SPLEN2006232, SPLEN2006268, SPLEN2006283, SPLEN2006305, SPLEN2006325, SPLEN2006374, SPLEN2006389, SPLEN2006425, SPLEN2006671, SPLEN2006701, SPLEN2006785, SPLEN2006875, SPLEN2007182, SPLEN2007314, SPLEN2007326, SPLEN2007350, SPLEN2007388, SPLEN2007498, SPLEN2007619, SPLEN2007653, SPLEN2007689, SPLEN2007695, SPLEN2007739, SPLEN2007750, SPLEN2007794, SPLEN2007879, SPLEN2007926, SPLEN2007951, SPLEN2008007, SPLEN2008135, SPLEN2008164, SPLEN2008317, SPLEN2008460, SPLEN2008496, SPLEN2008591, SPLEN2008786, SPLEN2009081, SPLEN2009088, SPLEN2009163, SPLEN2009315, SPLEN2009340, SPLEN2009512, SPLEN2009513, SPLEN2009541, SPLEN2009548, SPLEN2009555, SPLEN2009581, SPLEN2009733, SPLEN2009803, SPLEN2009884, SPLEN2009918, SPLEN2009970, SPLEN2010004, SPLEN2010015, SPLEN2010112, SPLEN2010119, SPLEN2010146, SPLEN2010187, SPLEN2010195, SPLEN2010350, SPLEN2010395, SPLEN2010415, SPLEN2010447, SPLEN2010469, SPLEN2010510, SPLEN2010530, SPLEN2010534, SPLEN2010588, SPLEN2010625, SPLEN2010800, SPLEN2010846, SPLEN2010847, SPLEN2010862, SPLEN2010912, SPLEN2010978, SPLEN2010986, SPLEN2011018, SPLEN2011021, SPLEN2011025, SPLEN2011086, SPLEN2011139, SPLEN2011145, SPLEN2011248, SPLEN2011252, SPLEN2011419, SPLEN2011422, SPLEN2011672, SPLEN2011737, SPLEN2011758, SPLEN2011766, SPLEN2011805, SPLEN2011820, SPLEN2011830, SPLEN2011931, SPLEN2011981, SPLEN2012115, SPLEN2012175, SPLEN2012179, SPLEN2012185, SPLEN2012234, SPLEN2012453, SPLEN2012523, SPLEN2012524, SPLEN2012525, SPLEN2012606, SPLEN2012611, SPLEN2012619, SPLEN2012624, SPLEN2012725, SPLEN2012743, SPLEN2012756, SPLEN2012846, SPLEN2012889, SPLEN2012961, SPLEN2013108, SPLEN2013195, SPLEN2013503, SPLEN2013644, SPLEN2013648, SPLEN2013670, SPLEN2013673, SPLEN2013690, SPLEN2013714, SPLEN2013753, SPLEN2013821, SPLEN2013857, SPLEN2013860, SPLEN2013910, SPLEN2013923, SPLEN2013936, SPLEN2014041, SPLEN2014063, SPLEN2014073, SPLEN2014080, SPLEN2014119, SPLEN2014136, SPLEN2014199, SPLEN2014210, SPLEN2014293, SPLEN2014318, SPLEN2014381, SPLEN2014452, SPLEN2014454, SPLEN2014486, SPLEN2014543, SPLEN2014572, SPLEN2014645, SPLEN2014669, SPLEN2014711, SPLEN2014739, SPLEN2014860, SPLEN2014865, SPLEN2014911, SPLEN2014919, SPLEN2014920, SPLEN2014924, SPLEN2014937, SPLEN2014946, SPLEN2015031, SPLEN2015094, SPLEN2015121, SPLEN2015129, SPLEN2015158, SPLEN2015166, SPLEN2015216, SPLEN2015258, SPLEN2015261, SPLEN2015267, SPLEN2015276, SPLEN2015310, SPLEN2015415, SPLEN2015433, SPLEN2015593, SPLEN2015674, SPLEN2015679, SPLEN2015707, SPLEN2015730, SPLEN2015746, SPLEN2015788, SPLEN2015815, SPLEN2015890, SPLEN2015891, SPLEN2015899, SPLEN2016045, SPLEN2016053, SPLEN2016069, SPLEN2016098, SPLEN2016135, SPLEN2016139, SPLEN2016241, SPLEN2016250, SPLEN2016268, SPLEN2016304, SPLEN2016356, SPLEN2016421, SPLEN2016480, SPLEN2016531, SPLEN2016533, SPLEN2016541, SPLEN2016552, SPLEN2016554, SPLEN2016602, SPLEN2016627, SPLEN2016678, SPLEN2016743, SPLEN2016773, SPLEN2016781, SPLEN2016840, SPLEN2016863, SPLEN2016922, SPLEN2016932, SPLEN2016972, SPLEN2016973, SPLEN2017043, SPLEN2017104, SPLEN2017121, SPLEN2017147, SPLEN2017187, SPLEN2017189, SPLEN2017212, SPLEN2017318, SPLEN2017351, SPLEN2017426, SPLEN2017452, SPLEN2017538, SPLEN2017592, SPLEN2017613, SPLEN2017620, SPLEN2017643, SPLEN2017687, SPLEN2017740, SPLEN2017781, SPLEN2017999, SPLEN2018098, SPLEN2018112, SPLEN2018157, SPLEN2018159, SPLEN2018180, SPLEN2018181, SPLEN2018280, SPLEN2018285, SPLEN2018299, SPLEN2018302, SPLEN2018364, SPLEN2018395, SPLEN2018643, SPLEN2018683, SPLEN2018732, SPLEN2018749, SPLEN2018933, SPLEN2019008, SPLEN2019043, SPLEN2019077, SPLEN2019092, SPLEN2019102, SPLEN2019131, SPLEN2019169, SPLEN2019257, SPLEN2019311, SPLEN2019323, SPLEN2019349, SPLEN2019375, SPLEN2019379, SPLEN2019405, SPLEN2019446, SPLEN2019471, SPLEN2019480, SPLEN2019505, SPLEN2019571, SPLEN2019575, SPLEN2019709, SPLEN2019774, SPLEN2019793, SPLEN2019811, SPLEN2019839, SPLEN2019956, SPLEN2019985, SPLEN2020007, SPLEN2020034, SPLEN2020153, SPLEN2020154, SPLEN2020166, SPLEN2020183, SPLEN2020223, SPLEN2020359, SPLEN2020417, SPLEN2020427, SPLEN2020467, SPLEN2020512, SPLEN2020608, SPLEN2020777, SPLEN2020805, SPLEN2021057, SPLEN2021122, SPLEN2021157, SPLEN2021231, SPLEN2021273, SPLEN2021295, SPLEN2021298, SPLEN2021383, SPLEN2021417, SPLEN2021440, SPLEN2021458, SPLEN2021463, SPLEN2021560, SPLEN2021701, SPLEN2021795, SPLEN2021983, SPLEN2021991, SPLEN2022040, SPLEN2022162, SPLEN2022227, SPLEN2022591, SPLEN2022785, SPLEN2022920, SPLEN2023024, SPLEN2023118, SPLEN2023160, SPLEN2023423, SPLEN2023710, SPLEN2023733, SPLEN2023791, SPLEN2023977, SPLEN2024070, SPLEN2024127, SPLEN2024273, SPLEN2024383, SPLEN2024489, SPLEN2024530, SPLEN2024571, SPLEN2024577, SPLEN2024617, SPLEN2024737, SPLEN2024922, SPLEN2024956, SPLEN2024990, SPLEN2025012, SPLEN2025017, SPLEN2025039, SPLEN2025219, SPLEN2025491, SPLEN2025626, SPLEN2025820, SPLEN2026144, SPLEN2026411, SPLEN2026765, SPLEN2027113, SPLEN2027157, SPLEN2027395, SPLEN2027488, SPLEN2027780, SPLEN2027852, SPLEN2027868, SPLEN2027995, SPLEN2028046, SPLEN2028066, SPLEN2028138, SPLEN2028365, SPLEN2028417, SPLEN2028424, SPLEN2028593, SPLEN2028844, SPLEN2028994, SPLEN2029051, SPLEN2029176, SPLEN2029295, SPLEN2029380, SPLEN2029522, SPLEN2029683, SPLEN2029727, SPLEN2029904, SPLEN2029912, SPLEN2030250, SPLEN2030335, SPLEN2030371, SPLEN2030397, SPLEN2030479, SPLEN2030495, SPLEN2030562, SPLEN2030763, SPLEN2030847, SPLEN2031004, SPLEN2031125, SPLEN2031424, SPLEN2031547, SPLEN2031674, SPLEN2031724, SPLEN2031780, SPLEN2032036, SPLEN2032112, SPLEN2032154, SPLEN2032157, SPLEN2032321, SPLEN2032356, SPLEN2032677, SPLEN2032813, SPLEN2032924, SPLEN2033098, SPLEN2033153, SPLEN2033333, SPLEN2033490, SPLEN2033539, SPLEN2033921, SPLEN2033996, SPLEN2034021, SPLEN2034081, SPLEN2034252, SPLEN2034551, SPLEN2034601, SPLEN2034678, SPLEN2034781, SPLEN2034864, SPLEN2034934, SPLEN2035318, SPLEN2035615, SPLEN2036076, SPLEN2036103, SPLEN2036326, SPLEN2036475, SPLEN2036501, SPLEN2036579, SPLEN2036608, SPLEN2036702, SPLEN2036712, SPLEN2036821, SPLEN2036932, SPLEN2036953, SPLEN2037077, SPLEN2037194, SPLEN2037319, SPLEN2037444, SPLEN2037580, SPLEN2037630, SPLEN2037678, SPLEN2037722, SPLEN2037891, SPLEN2038055, SPLEN2038180, SPLEN2038345, SPLEN2038407, SPLEN2038473, SPLEN2038834, SPLEN2039311, SPLEN2039379, SPLEN2039672, SPLEN2039697, SPLEN2039845, SPLEN2039936, SPLEN2040222, SPLEN2040237, SPLEN2040824, SPLEN2041304, SPLEN2041306, SPLEN2041310, SPLEN2041585, SPLEN2041645, SPLEN2041700, SPLEN2041720, SPLEN2041977, SPLEN2042051, SPLEN2042303, SPLEN2042521, SPLEN2042535, SPLEN2042598, SPLEN2042714, SPLEN2042920, STOMA1000013, STOMA1000047, STOMA1000052, STOMA1000074, STOMA1000117, STOMA1000133, STOMA1000175, STOMA1000186, STOMA1000189, STOMA1000190, STOMA1000191, STOMA2000032, STOMA2000072, STOMA2000088, STOMA2000104, STOMA2000121, STOMA2000148, STOMA2000168, STOMA2000183, STOMA2000188, STOMA2000257, STOMA2000279, STOMA2000289, STOMA2000383, STOMA2000386, STOMA2000395, STOMA2000396, STOMA2000478, STOMA2000482, STOMA2000529, STOMA2000539, STOMA2000567, STOMA2000640, STOMA2000678, STOMA2000686, STOMA2000888, STOMA2001025, STOMA2001389, STOMA2002052, STOMA2002141, STOMA2002166, STOMA2002367, STOMA2002688, STOMA2002828, STOMA2003158, STOMA2003289, STOMA2003444, STOMA2003477, STOMA2003646, STOMA2003716, STOMA2003781, STOMA2003894, STOMA2004194, STOMA2004294, STOMA2004663, STOMA2004668, STOMA2004852, STOMA2004873, STOMA2004884, STOMA2004893, STOMA2004925, STOMA2005120, STOMA2005664, STOMA2005667, STOMA2005746, STOMA2005782, STOMA2006181, STOMA2006213, STOMA2006229, STOMA2006325, STOMA2006330, STOMA2006398, STOMA2006447, STOMA2006780, STOMA2006904, STOMA2007269, STOMA2007680, STOMA2007745, STOMA2008050, STOMA2008361, STOMA2008546, STOMA2008614, STOMA2008638, STOMA2008838, STOMA2009250, STOMA2009253, STOMA2009256, STOMA2009289, SYNOV1000045, SYNOV1000049, SYNOV1000118, SYNOV1000124, SYNOV1000128, SYNOV1000190, SYNOV1000256, SYNOV1000374, SYNOV2000152, SYNOV2000171, SYNOV2000173, SYNOV2000177, SYNOV2000178, SYNOV2000193, SYNOV2000251, SYNOV2000279, SYNOV2000291, SYNOV2000297, SYNOV2000397, SYNOV2000426, SYNOV2000601, SYNOV2000700, SYNOV2000820, SYNOV2000824, SYNOV2000923, SYNOV2001014, SYNOV2001033, SYNOV2001035, SYNOV2001088, SYNOV2001111, SYNOV2001144, SYNOV2001212, SYNOV2001251, SYNOV2001300, SYNOV2001356, SYNOV2001374, SYNOV2001390, SYNOV2001451, SYNOV2001457, SYNOV2001468, SYNOV2001660, SYNOV2003326, SYNOV2005216, SYNOV2005448, SYNOV2005541, SYNOV2005673, SYNOV2005817, SYNOV2005962, SYNOV2006430, SYNOV2006620, SYNOV2007758, SYNOV2007965, SYNOV2008765, SYNOV2009172, SYNOV2011233, SYNOV2012326, SYNOV2013365, SYNOV2013637, SYNOV2014157, SYNOV2014364, SYNOV2016124, SYNOV2016837, SYNOV2017055, SYNOV2017179, SYNOV2018921, SYNOV2019280, SYNOV2020085, SYNOV2020463, SYNOV2021320, SYNOV2021953, SYNOV3000184, SYNOV3000231, SYNOV3000302, SYNOV3000345, SYNOV4000249, SYNOV4000472, SYNOV4000598, SYNOV4000706, SYNOV4001153, SYNOV4001224, SYNOV4001326, SYNOV4001342, SYNOV4001395, SYNOV4002001, SYNOV4002392, SYNOV4002875, SYNOV4002883, SYNOV4003174, SYNOV4003322, SYNOV4003681, SYNOV4003981, SYNOV4004184, SYNOV4004741, SYNOV4004823, SYNOV4004914, SYNOV4005256, SYNOV4005570, SYNOV4005739, SYNOV4005889, SYNOV4005981, SYNOV4005989, SYNOV4006256, SYNOV4006327, SYNOV4006542, SYNOV4007012, SYNOV4007215, SYNOV4007360, SYNOV4007430, SYNOV4007521, SYNOV4007553, SYNOV4007671, SYNOV4007711, SYNOV4008245, SYNOV4008336, SYNOV4009129, SYNOV4009139, SYNOV4009298, SYNOV4009575, T1ESE2000116, T1ESE2000609, T1ESE2000904, T1ESE2002665, TBAES2000004, TBAES2000059, TBAES2000116, TBAES2000255, TBAES2000315, TBAES2000352, TBAES2000932, TBAES2001171, TBAES2001220, TBAES2001229, TBAES2001258, TBAES2001296, TBAES2001492, TBAES2001553, TBAES2001751, TBAES2003435, TBAES2003492, TBAES2003550, TBAES2003702, TBAES2003917, TBAES2004055, TBAES2004105, TBAES2004939, TBAES2005157, TBAES2005361, TBAES2005543, TBAES2006568, TBAES2006881, TBAES2007379, TBAES2007428, TBAES2007481, TBAES2007504, TBAES2007548, TBAES2007697, TBAES2007862, TBAES2007964, TBAES2008133, TBAES2009387, TCERX2000171, TCERX2000431, TCERX2000613, TCERX2000998, TCERX2002644, TCOLN1000037, TCOLN1000180, TCOLN2000139, TCOLN2000236, TCOLN2000641, TCOLN2001268, TCOLN2002047, TCOLN2002278, TESOP1000035, TESOP1000127, TESOP1000160, TESOP2000083, TESOP2000090, TESOP2000205, TESOP2000312, TESOP2000390, TESOP2000400, TESOP2000510, TESOP2000527, TESOP2000569, TESOP2000739, TESOP2000801, TESOP2001122, TESOP2001166, TESOP2001345, TESOP2001474, TESOP2001796, TESOP2001818, TESOP2001849, TESOP2001865, TESOP2001901, TESOP2001953, TESOP2002005, TESOP2002110, TESOP2002150, TESOP2002273, TESOP2002451, TESOP2002489, TESOP2002539, TESOP2002545, TESOP2002804, TESOP2002950, TESOP2003273, TESOP2003308, TESOP2003553, TESOP2003753, TESOP2004110, TESOP2004114, TESOP2004173, TESOP2004214, TESOP2005199, TESOP2005285, TESOP2005485, TESOP2005498, TESOP2005579, TESOP2006041, TESOP2006053, TESOP2006060, TESOP2006068, TESOP2006110, TESOP2006398, TESOP2006670, TESOP2006704, TESOP2006746, TESOP2006865, TESOP2006893, TESOP2007041, TESOP2007052, TESOP2007262, TESOP2007384, TESOP2007636, TESOP2007674, TESOP2007688, TESOP2007725, TESOP2007912, TESOP2007978, TESOP2008127, TESOP2008552, TESOP2008556, TESOP2008563, TESOP2008820, TESOP2009121, TESOP2009201, TESOP2009247, TESOP2009555, TESTI1000018, TESTI1000019, TESTI1000023, TESTI1000025, TESTI1000029, TESTI1000030, TESTI1000042, TESTI1000045, TESTI1000051, TESTI1000055, TESTI1000064, TESTI1000070, TESTI1000085, TESTI1000088, TESTI1000093, TESTI1000094, TESTI1000096, TESTI1000101, TESTI1000109, TESTI1000125, TESTI1000127, TESTI1000128, TESTI1000131, TESTI1000138, TESTI1000142, TESTI1000157, TESTI1000163, TESTI1000168, TESTI1000169, TESTI1000179, TESTI1000183, TESTI1000191, TESTI1000257, TESTI1000266, TESTI1000319, TESTI1000330, TESTI1000348, TESTI1000390, TESTI1000391, TESTI1000459, TESTI1000491, TESTI1000545, TESTI2000006, TESTI2000018, TESTI2000044, TESTI2000100, TESTI2000117, TESTI2000120, TESTI2000147, TESTI2000154, TESTI2000172, TESTI2000177, TESTI2000179, TESTI2000184, TESTI2000207, TESTI2000208, TESTI2000221, TESTI2000238, TESTI2000253, TESTI2000272, TESTI2000278, TESTI2000349, TESTI2000356, TESTI2000358, TESTI2000372, TESTI2000427, TESTI2000431, TESTI2000435, TESTI2000443, TESTI2000452, TESTI2000462, TESTI2000489, TESTI2000520, TESTI2000571, TESTI2000598, TESTI2000600, TESTI2000616, TESTI2000627, TESTI2000644, TESTI2000671, TESTI2000683, TESTI2000689, TESTI2000695, TESTI2000699, TESTI2000707, TESTI2000745, TESTI2000756, TESTI2000762, TESTI2000784, TESTI2000808, TESTI2000819, TESTI2000830, TESTI2000840, TESTI2000849, TESTI2000850, TESTI2000874, TESTI2000883, TESTI2000909, TESTI2000951, TESTI2000970, TESTI2000981, TESTI2001008, TESTI2001049, TESTI2001082, TESTI2001099, TESTI2001120, TESTI2001134, TESTI2001141, TESTI2001153, TESTI2001180, TESTI2001208, TESTI2001229, TESTI2001236, TESTI2001237, TESTI2001269, TESTI2001306, TESTI2001313, TESTI2001330, TESTI2001339, TESTI2001345, TESTI2001352, TESTI2001364, TESTI2001412, TESTI2001420, TESTI2001498, TESTI2001511, TESTI2001512, TESTI2001518, TESTI2001556, TESTI2001593, TESTI2001613, TESTI2001621, TESTI2001661, TESTI2001665, TESTI2001671, TESTI2001697, TESTI2001725, TESTI2001758, TESTI2001766, TESTI2001792, TESTI2001793, TESTI2001795, TESTI2001812, TESTI2001815, TESTI2001823, TESTI2001826, TESTI2001827, TESTI2001829, TESTI2001852, TESTI2001869, TESTI2001879, TESTI2001894, TESTI2001898, TESTI2001915, TESTI2001950, TESTI2001959, TESTI2001968, TESTI2001985, TESTI2001991, TESTI2002002, TESTI2002012, TESTI2002036, TESTI2002048, TESTI2002057, TESTI2002081, TESTI2002090, TESTI2002105, TESTI2002216, TESTI2002223, TESTI2002245, TESTI2002251, TESTI2002256, TESTI2002264, TESTI2002282, TESTI2002293, TESTI2002294, TESTI2002326, TESTI2002351, TESTI2002361, TESTI2002365, TESTI2002369, TESTI2002406, TESTI2002415, TESTI2002423, TESTI2002453, TESTI2002461, TESTI2002465, TESTI2002467, TESTI2002498, TESTI2002516, TESTI2002544, TESTI2002578, TESTI2002580, TESTI2002618, TESTI2002632, TESTI2002676, TESTI2002690, TESTI2002696, TESTI2002698, TESTI2002700, TESTI2002707, TESTI2002724, TESTI2002729, TESTI2002752, TESTI2002753, TESTI2002789, TESTI2002802, TESTI2002806, TESTI2002840, TESTI2002866, TESTI2002877, TESTI2002910, TESTI2002912, TESTI2002928, TESTI2002937, TESTI2002965, TESTI2002993, TESTI2003020, TESTI2003031, TESTI2003037, TESTI2003044, TESTI2003059, TESTI2003061, TESTI2003074, TESTI2003089, TESTI2003104, TESTI2003109, TESTI2003117, TESTI2003130, TESTI2003131, TESTI2003139, TESTI2003141, TESTI2003152, TESTI2003181, TESTI2003193, TESTI2003196, TESTI2003228, TESTI2003236, TESTI2003255, TESTI2003258, TESTI2003277, TESTI2003280, TESTI2003299, TESTI2003311, TESTI2003321, TESTI2003325, TESTI2003327, TESTI2003330, TESTI2003347, TESTI2003354, TESTI2003356, TESTI2003372, TESTI2003376, TESTI2003413, TESTI2003418, TESTI2003419, TESTI2003432, TESTI2003454, TESTI2003475, TESTI2003476, TESTI2003498, TESTI2003512, TESTI2003533, TESTI2003539, TESTI2003541, TESTI2003545, TESTI2003551, TESTI2003574, TESTI2003579, TESTI2003580, TESTI2003589, TESTI2003596, TESTI2003598, TESTI2003615, TESTI2003625, TESTI2003638, TESTI2003649, TESTI2003692, TESTI2003718, TESTI2003727, TESTI2003768, TESTI2003781, TESTI2003787, TESTI2003824, TESTI2003827, TESTI2003894, TESTI2003911, TESTI2003914, TESTI2003940, TESTI2003962, TESTI2003998, TESTI2004000, TESTI2004073, TESTI2004080, TESTI2004085, TESTI2004089, TESTI2004111, TESTI2004119, TESTI2004122, TESTI2004153, TESTI2004163, TESTI2004169, TESTI2004207, TESTI2004215, TESTI2004227, TESTI2004229, TESTI2004243, TESTI2004255, TESTI2004287, TESTI2004295, TESTI2004313, TESTI2004318, TESTI2004322, TESTI2004391, TESTI2004399, TESTI2004423, TESTI2004431, TESTI2004432, TESTI2004452, TESTI2004459, TESTI2004490, TESTI2004539, TESTI2004552, TESTI2004560, TESTI2004574, TESTI2004601, TESTI2004611, TESTI2004649, TESTI2004654, TESTI2004675, TESTI2004687, TESTI2004689, TESTI2004700, TESTI2004706, TESTI2004712, TESTI2004734, TESTI2004737, TESTI2004783, TESTI2004791, TESTI2004793, TESTI2004860, TESTI2004906, TESTI2004920, TESTI2004929, TESTI2004936, TESTI2004941, TESTI2004971, TESTI2004982, TESTI2004993, TESTI2004994, TESTI2004999, TESTI2005017, TESTI2005025, TESTI2005040, TESTI2005060, TESTI2005072, TESTI2005085, TESTI2005112, TESTI2005120, TESTI2005153, TESTI2005155, TESTI2005173, TESTI2005267, TESTI2005268, TESTI2005280, TESTI2005307, TESTI2005326, TESTI2005363, TESTI2005376, TESTI2005378, TESTI2005380, TESTI2005391, TESTI2005395, TESTI2005396, TESTI2005408, TESTI2005415, TESTI2005470, TESTI2005492, TESTI2005564, TESTI2005568, TESTI2005584, TESTI2005588, TESTI2005590, TESTI2005603, TESTI2005609, TESTI2005610, TESTI2005630, TESTI2005672, TESTI2005683, TESTI2005690, TESTI2005692, TESTI2005703, TESTI2005720, TESTI2005731, TESTI2005739, TESTI2005742, TESTI2005743, TESTI2005759, TESTI2005767, TESTI2005775, TESTI2005784, TESTI2005788, TESTI2005827, TESTI2005835, TESTI2005860, TESTI2005892, TESTI2005908, TESTI2005911, TESTI2005933, TESTI2005937, TESTI2005948, TESTI2005979, TESTI2005981, TESTI2005982, TESTI2005984, TESTI2005986, TESTI2005987, TESTI2006007, TESTI2006008, TESTI2006015, TESTI2006016, TESTI2006035, TESTI2006040, TESTI2006041, TESTI2006045, TESTI2006051, TESTI2006067, TESTI2006083, TESTI2006097, TESTI2006109, TESTI2006111, TESTI2006120, TESTI2006125, TESTI2006179, TESTI2006209, TESTI2006210, TESTI2006212, TESTI2006218, TESTI2006238, TESTI2006255, TESTI2006258, TESTI2006278, TESTI2006333, TESTI2006341, TESTI2006360, TESTI2006383, TESTI2006409, TESTI2006425, TESTI2006437, TESTI2006453, TESTI2006457, TESTI2006460, TESTI2006465, TESTI2006483, TESTI2006499, TESTI2006523, TESTI2006543, TESTI2006565, TESTI2006572, TESTI2006615, TESTI2006617, TESTI2006624, TESTI2006628, TESTI2006633, TESTI2006643, TESTI2006648, TESTI2006659, TESTI2006660, TESTI2006665, TESTI2006667, TESTI2006677, TESTI2006720, TESTI2006735, TESTI2006744, TESTI2006748, TESTI2006774, TESTI2006853, TESTI2006866, TESTI2006872, TESTI2006877, TESTI2006879, TESTI2006894, TESTI2006940, TESTI2006955, TESTI2006978, TESTI2006979, TESTI2006990, TESTI2007040, TESTI2007074, TESTI2007078, TESTI2007113, TESTI2007152, TESTI2007163, TESTI2007183, TESTI2007211, TESTI2007220, TESTI2007234, TESTI2007311, TESTI2007320, TESTI2007346, TESTI2007358, TESTI2007402, TESTI2007405, TESTI2007407, TESTI2007422, TESTI2007452, TESTI2007464, TESTI2007466, TESTI2007480, TESTI2007490, TESTI2007502, TESTI2007524, TESTI2007533, TESTI2007576, TESTI2007613, TESTI2007657, TESTI2007685, TESTI2007692, TESTI2007749, TESTI2007750, TESTI2007808, TESTI2007814, TESTI2007829, TESTI2007864, TESTI2007867, TESTI2007872, TESTI2007906, TESTI2007922, TESTI2007951, TESTI2007972, TESTI2007973, TESTI2007998, TESTI2008014, TESTI2008020, TESTI2008032, TESTI2008033, TESTI2008046, TESTI2008081, TESTI2008099, TESTI2008139, TESTI2008144, TESTI2008161, TESTI2008189, TESTI2008204, TESTI2008219, TESTI2008233, TESTI2008234, TESTI2008237, TESTI2008240, TESTI2008278, TESTI2008320, TESTI2008331, TESTI2008343, TESTI2008387, TESTI2008389, TESTI2008394, TESTI2008405, TESTI2008420, TESTI2008425, TESTI2008440, TESTI2008567, TESTI2008595, TESTI2008621, TESTI2008636, TESTI2008657, TESTI2008684, TESTI2008699, TESTI2008715, TESTI2008762, TESTI2008774, TESTI2008786, TESTI2008822, TESTI2008835, TESTI2008840, TESTI2008847, TESTI2008884, TESTI2008901, TESTI2008929, TESTI2008946, TESTI2008960, TESTI2009018, TESTI2009091, TESTI2009097, TESTI2009136, TESTI2009185, TESTI2009190, TESTI2009217, TESTI2009239, TESTI2009325, TESTI2009388, TESTI2009390, TESTI2009400, TESTI2009402, TESTI2009412, TESTI2009423, TESTI2009447, TESTI2009462, TESTI2009477, TESTI2009497, TESTI2009502, TESTI2009511, TESTI2009520, TESTI2009544, TESTI2009545, TESTI2009551, TESTI2009577, TESTI2009585, TESTI2009588, TESTI2009683, TESTI2009727, TESTI2009739, TESTI2009785, TESTI2009812, TESTI2009835, TESTI2009853, TESTI2009935, TESTI2009977, TESTI2009987, TESTI2010009, TESTI2010154, TESTI2010180, TESTI2010239, TESTI2010280, TESTI2010354, TESTI2010396, TESTI2010400, TESTI2010409, TESTI2010572, TESTI2010587, TESTI2010591, TESTI2010617, TESTI2010682, TESTI2010724, TESTI2010732, TESTI2010734, TESTI2010755, TESTI2010793, TESTI2010806, TESTI2010833, TESTI2010872, TESTI2011009, TESTI2011020, TESTI2011028, TESTI2011033, TESTI2011254, TESTI2011286, TESTI2011294, TESTI2011314, TESTI2011315, TESTI2011394, TESTI2011407, TESTI2011448, TESTI2011480, TESTI2011549, TESTI2011575, TESTI2011605, TESTI2011612, TESTI2011665, TESTI2011680, TESTI2011683, TESTI2011712, TESTI2011750, TESTI2011840, TESTI2011846, TESTI2011915, TESTI2011928, TESTI2011971, TESTI2012050, TESTI2012090, TESTI2012095, TESTI2012104, TESTI2012152, TESTI2012155, TESTI2012171, TESTI2012207, TESTI2012231, TESTI2012244, TESTI2012289, TESTI2012308, TESTI2012356, TESTI2012387, TESTI2012394, TESTI2012444, TESTI2012511, TESTI2012528, TESTI2012544, TESTI2012550, TESTI2012571, TESTI2012592, TESTI2012617, TESTI2012628, TESTI2012812, TESTI2012834, TESTI2012835, TESTI2012861, TESTI2012900, TESTI2012915, TESTI2012922, TESTI2013001, TESTI2013012, TESTI2013053, TESTI2013144, TESTI2013163, TESTI2013169, TESTI2013212, TESTI2013257, TESTI2013264, TESTI2013268, TESTI2013295, TESTI2013322, TESTI2013381, TESTI2013382, TESTI2013401, TESTI2013427, TESTI2013468, TESTI2013497, TESTI2013545, TESTI2013546, TESTI2013566, TESTI2013601, TESTI2013604, TESTI2013607, TESTI2013610, TESTI2013691, TESTI2013699, TESTI2013737, TESTI2013767, TESTI2013832, TESTI2013873, TESTI2013889, TESTI2014007, TESTI2014036, TESTI2014097, TESTI2014160, TESTI2014248, TESTI2014254, TESTI2014269, TESTI2014274, TESTI2014318, TESTI2014324, TESTI2014339, TESTI2014362, TESTI2014385, TESTI2014415, TESTI2014439, TESTI2014474, TESTI2014505, TESTI2014577, TESTI2014578, TESTI2014716, TESTI2014780, TESTI2014800, TESTI2014838, TESTI2014843, TESTI2014979, TESTI2014988, TESTI2015042, TESTI2015092, TESTI2015105, TESTI2015180, TESTI2015246, TESTI2015249, TESTI2015327, TESTI2015331, TESTI2015335, TESTI2015350, TESTI2015375, TESTI2015590, TESTI2015610, TESTI2015647, TESTI2015675, TESTI2015710, TESTI2015752, TESTI2015830, TESTI2015914, TESTI2015938, TESTI2015947, TESTI2015962, TESTI2015987, TESTI2016033, TESTI2016046, TESTI2016101, TESTI2016162, TESTI2016197, TESTI2016278, TESTI2016298, TESTI2016331, TESTI2016337, TESTI2016410, TESTI2016421, TESTI2016509, TESTI2016568, TESTI2016583, TESTI2016599, TESTI2016629, TESTI2016663, TESTI2016667, TESTI2016688, TESTI2016701, TESTI2016758, TESTI2016848, TESTI2016863, TESTI2016888, TESTI2016896, TESTI2016922, TESTI2016942, TESTI2016950, TESTI2016996, TESTI2017017, TESTI2017028, TESTI2017035, TESTI2017069, TESTI2017089, TESTI2017102, TESTI2017107, TESTI2017113, TESTI2017125, TESTI2017256, TESTI2017305, TESTI2017311, TESTI2017396, TESTI2017507, TESTI2017537, TESTI2017582, TESTI2017584, TESTI2017645, TESTI2017727, TESTI2017740, TESTI2017775, TESTI2017816, TESTI2017832, TESTI2017923, TESTI2017932, TESTI2017951, TESTI2018014, TESTI2018031, TESTI2018035, TESTI2018060, TESTI2018083, TESTI2018178, TESTI2018221, TESTI2018276, TESTI2018290, TESTI2018335, TESTI2018337, TESTI2018368, TESTI2018421, TESTI2018428, TESTI2018462, TESTI2018475, TESTI2018482, TESTI2018521, TESTI2018565, TESTI2018581, TESTI2018611, TESTI2018687, TESTI2018697, TESTI2018838, TESTI2018867, TESTI2018941, TESTI2018957, TESTI2018974, TESTI2018975, TESTI2018997, TESTI2019042, TESTI2019077, TESTI2019228, TESTI2019257, TESTI2019280, TESTI2019282, TESTI2019308, TESTI2019336, TESTI2019352, TESTI2019406, TESTI2019430, TESTI2019455, TESTI2019481, TESTI2019488, TESTI2019501, TESTI2019648, TESTI2019669, TESTI2019697, TESTI2019729, TESTI2019760, TESTI2019787, TESTI2019794, TESTI2019854, TESTI2019859, TESTI2019860, TESTI2019872, TESTI2019911, TESTI2019917, TESTI2019975, TESTI2019998, TESTI2020012, TESTI2020026, TESTI2020029, TESTI2020071, TESTI2020084, TESTI2020265, TESTI2020283, TESTI2020316, TESTI2020344, TESTI2020379, TESTI2020426, TESTI2020445, TESTI2020510, TESTI2020515, TESTI2020525, TESTI2020579, TESTI2020717, TESTI2020840, TESTI2020871, TESTI2020905, TESTI2020906, TESTI2020946, TESTI2020956, TESTI2020981, TESTI2020999, TESTI2021003, TESTI2021038, TESTI2021057, TESTI2021077, TESTI2021112, TESTI2021114, TESTI2021116, TESTI2021118, TESTI2021122, TESTI2021124, TESTI2021138, TESTI2021297, TESTI2021315, TESTI2021358, TESTI2021425, TESTI2021447, TESTI2021463, TESTI2021531, TESTI2021599, TESTI2021637, TESTI2021667, TESTI2021736, TESTI2021785, TESTI2021819, TESTI2021851, TESTI2021895, TESTI2021911, TESTI2021939, TESTI2021999, TESTI2022010, TESTI2022023, TESTI2022065, TESTI2022086, TESTI2022179, TESTI2022203, TESTI2022246, TESTI2022323, TESTI2022338, TESTI2022400, TESTI2022462, TESTI2022495, TESTI2022623, TESTI2022649, TESTI2022652, TESTI2022738, TESTI2022798, TESTI2022812, TESTI2022814, TESTI2022874, TESTI2022940, TESTI2022952, TESTI2023025, TESTI2023033, TESTI2023053, TESTI2023085, TESTI2023192, TESTI2023194, TESTI2023214, TESTI2023254, TESTI2023386, TESTI2023414, TESTI2023427, TESTI2023436, TESTI2023599, TESTI2023752, TESTI2023800, TESTI2023861, TESTI2023903, TESTI2023942, TESTI2023947, TESTI2023951, TESTI2023968, TESTI2024009, TESTI2024090, TESTI2024125, TESTI2024153, TESTI2024192, TESTI2024267, TESTI2024283, TESTI2024299, TESTI2024419, TESTI2024422, TESTI2024443, TESTI2024446, TESTI2024473, TESTI2024476, TESTI2024498, TESTI2024560, TESTI2024567, TESTI2024586, TESTI2024598, TESTI2024641, TESTI2024648, TESTI2024718, TESTI2024744, TESTI2024844, TESTI2024864, TESTI2024885, TESTI2024936, TESTI2024978, TESTI2024999, TESTI2025006, TESTI2025022, TESTI2025063, TESTI2025117, TESTI2025144, TESTI2025161, TESTI2025174, TESTI2025229, TESTI2025269, TESTI2025365, TESTI2025403, TESTI2025409, TESTI2025422, TESTI2025448, TESTI2025454, TESTI2025486, TESTI2025546, TESTI2025582, TESTI2025609, TESTI2025656, TESTI2025757, TESTI2025791, TESTI2025846, TESTI2025872, TESTI2025879, TESTI2025911, TESTI2025920, TESTI2025924, TESTI2026014, TESTI2026024, TESTI2026064, TESTI2026077, TESTI2026104, TESTI2026116, TESTI2026134, TESTI2026168, TESTI2026196, TESTI2026215, TESTI2026218, TESTI2026233, TESTI2026291, TESTI2026294, TESTI2026401, TESTI2026403, TESTI2026453, TESTI2026461, TESTI2026491, TESTI2026505, TESTI2026515, TESTI2026534, TESTI2026537, TESTI2026589, TESTI2026597, TESTI2026605, TESTI2026647, TESTI2026674, TESTI2026794, TESTI2026824, TESTI2026854, TESTI2026925, TESTI2026936, TESTI2026957, TESTI2027013, TESTI2027019, TESTI2027108, TESTI2027165, TESTI2027171, TESTI2027173, TESTI2027179, TESTI2027185, TESTI2027206, TESTI2027238, TESTI2027239, TESTI2027243, TESTI2027271, TESTI2027296, TESTI2027378, TESTI2027411, TESTI2027450, TESTI2027496, TESTI2027503, TESTI2027562, TESTI2027615, TESTI2027645, TESTI2027730, TESTI2027736, TESTI2027791, TESTI2027820, TESTI2027828, TESTI2027840, TESTI2027909, TESTI2028098, TESTI2028151, TESTI2028242, TESTI2028253, TESTI2028254, TESTI2028269, TESTI2028290, TESTI2028296, TESTI2028384, TESTI2028426, TESTI2028488, TESTI2028523, TESTI2028583, TESTI2028613, TESTI2028659, TESTI2028662, TESTI2028670, TESTI2028705, TESTI2028776, TESTI2028811, TESTI2028891, TESTI2028985, TESTI2028997, TESTI2029131, TESTI2029162, TESTI2029196, TESTI2029201, TESTI2029227, TESTI2029244, TESTI2029249, TESTI2029252, TESTI2029259, TESTI2029264, TESTI2029470, TESTI2029672, TESTI2029785, TESTI2029880, TESTI2030136, TESTI2030322, TESTI2030336, TESTI2030342, TESTI2030519, TESTI2030554, TESTI2030556, TESTI2030728, TESTI2030754, TESTI2030770, TESTI2030860, TESTI2030901, TESTI2030917, TESTI2030930, TESTI2031006, TESTI2031007, TESTI2031060, TESTI2031129, TESTI2031356, TESTI2031418, TESTI2031504, TESTI2031529, TESTI2031687, TESTI2031760, TESTI2031809, TESTI2031919, TESTI2031935, TESTI2031986, TESTI2032044, TESTI2032067, TESTI2032079, TESTI2032643, TESTI2032681, TESTI2032761, TESTI2032768, TESTI2032774, TESTI2032828, TESTI2033031, TESTI2033242, TESTI2033254, TESTI2033300, TESTI2033395, TESTI2033441, TESTI2033453, TESTI2033505, TESTI2033520, TESTI2033641, TESTI2033710, TESTI2033905, TESTI2034187, TESTI2034243, TESTI2034249, TESTI2034307, TESTI2034357, TESTI2034401, TESTI2034407, TESTI2034506, TESTI2034520, TESTI2034718, TESTI2034730, TESTI2034749, TESTI2034767, TESTI2034774, TESTI2034777, TESTI2034785, TESTI2034799, TESTI2034847, TESTI2034913, TESTI2034916, TESTI2034931, TESTI2034953, TESTI2034997, TESTI2035003, TESTI2035078, TESTI2035084, TESTI2035107, TESTI2035121, TESTI2035124, TESTI2035183, TESTI2035236, TESTI2035262, TESTI2035309, TESTI2035688, TESTI2035775, TESTI2035793, TESTI2035898, TESTI2035962, TESTI2035981, TESTI2035997, TESTI2036114, TESTI2036129, TESTI2036285, TESTI2036288, TESTI2036513, TESTI2036589, TESTI2036650, TESTI2036684, TESTI2036691, TESTI2036736, TESTI2036822, TESTI2036833, TESTI2036913, TESTI2036922, TESTI2036951, TESTI2036965, TESTI2036969, TESTI2037002, TESTI2037055, TESTI2037081, TESTI2037085, TESTI2037103, TESTI2037106, TESTI2037111, TESTI2037209, TESTI2037255, TESTI2037359, TESTI2037375, TESTI2037382, TESTI2037534, TESTI2037569, TESTI2037572, TESTI2037643, TESTI2037657, TESTI2037673, TESTI2037723, TESTI2037819, TESTI2037830, TESTI2037845, TESTI2037877, TESTI2037976, TESTI2038048, TESTI2038065, TESTI2038104, TESTI2038275, TESTI2038388, TESTI2038573, TESTI2038596, TESTI2038623, TESTI2038644, TESTI2038733, TESTI2038858, TESTI2038958, TESTI2039025, TESTI2039026, TESTI2039038, TESTI2039041, TESTI2039060, TESTI2039113, TESTI2039121, TESTI2039177, TESTI2039209, TESTI2039225, TESTI2039227, TESTI2039276, TESTI2039342, TESTI2039353, TESTI2039544, TESTI2039613, TESTI2039707, TESTI2039732, TESTI2039738, TESTI2039776, TESTI2039867, TESTI2039908, TESTI2040018, TESTI2040094, TESTI2040102, TESTI2040128, TESTI2040143, TESTI2040297, TESTI2040372, TESTI2040377, TESTI2040424, TESTI2040642, TESTI2040815, TESTI2040897, TESTI2040944, TESTI2040964, TESTI2040983, TESTI2040989, TESTI2041330, TESTI2041362, TESTI2041517, TESTI2041564, TESTI2041664, TESTI2041730, TESTI2041734, TESTI2041778, TESTI2041800, TESTI2041947, TESTI2041956, TESTI2041976, TESTI2042062, TESTI2042149, TESTI2042264, TESTI2042295, TESTI2042302, TESTI2042326, TESTI2042400, TESTI2042450, TESTI2042473, TESTI2042507, TESTI2042508, TESTI2042750, TESTI2042783, TESTI2042806, TESTI2042928, TESTI2042946, TESTI2042958, TESTI2043275, TESTI2043277, TESTI2043282, TESTI2043313, TESTI2043477, TESTI2043585, TESTI2043758, TESTI2043817, TESTI2043857, TESTI2043866, TESTI2043869, TESTI2044064, TESTI2044118, TESTI2044194, TESTI2044276, TESTI2044306, TESTI2044309, TESTI2044413, TESTI2044418, TESTI2044754, TESTI2044788, TESTI2044796, TESTI2044833, TESTI2044892, TESTI2044920, TESTI2044968, TESTI2045139, TESTI2045155, TESTI2045171, TESTI2045199, TESTI2045353, TESTI2045509, TESTI2045562, TESTI2045611, TESTI2045819, TESTI2045850, TESTI2045920, TESTI2045964, TESTI2045983, TESTI2046100, TESTI2046188, TESTI2046347, TESTI2046352, TESTI2046358, TESTI2046439, TESTI2046456, TESTI2046535, TESTI2046536, TESTI2046552, TESTI2046569, TESTI2046686, TESTI2046721, TESTI2046732, TESTI2046786, TESTI2046797, TESTI2046863, TESTI2046872, TESTI2047071, TESTI2047141, TESTI2047147, TESTI2047153, TESTI2047212, TESTI2047342, TESTI2047383, TESTI2047605, TESTI2047792, TESTI2047801, TESTI2047818, TESTI2047824, TESTI2047885, TESTI2047930, TESTI2048105, TESTI2048109, TESTI2048465, TESTI2048603, TESTI2048898, TESTI2049041, TESTI2049062, TESTI2049206, TESTI2049246, TESTI2049277, TESTI2049422, TESTI2049452, TESTI2049469, TESTI2049553, TESTI2049576, TESTI2049857, TESTI2049956, TESTI2050137, TESTI2050681, TESTI2050780, TESTI2050987, TESTI2051148, TESTI2051177, TESTI2051279, TESTI2051488, TESTI2051543, TESTI2051627, TESTI2051742, TESTI2051767, TESTI2051791, TESTI2051806, TESTI2051867, TESTI2051873, TESTI2052110, TESTI2052202, TESTI2052211, TESTI2052256, TESTI2052288, TESTI2052525, TESTI2052670, TESTI2052698, TESTI2052799, TESTI2052822, TESTI2052985, TESTI2053151, TESTI2053242, TESTI2053399, TESTI2053526, TESTI2053561, TESTI2053621, TESTI2053667, TESTI2053723, TESTI3000002, TESTI3000005, TESTI4000068, TESTI4000079, TESTI4000093, TESTI4000134, TESTI4000137, TESTI4000153, TESTI4000155, TESTI4000157, TESTI4000183, TESTI4000214, TESTI4000215, TESTI4000228, TESTI4000250, TESTI4000288, TESTI4000319, TESTI4000349, TESTI4000370, TESTI4000394, TESTI4000434, TESTI4000462, TESTI4000530, TESTI4000534, TESTI4000598, TESTI4000600, TESTI4000621, TESTI4000703, TESTI4000724, TESTI4000957, TESTI4000970, TESTI4001036, TESTI4001037, TESTI4001060, TESTI4001106, TESTI4001148, TESTI4001176, TESTI4001195, TESTI4001201, TESTI4001206, TESTI4001348, TESTI4001441, TESTI4001467, TESTI4001473, TESTI4001517, TESTI4001527, TESTI4001561, TESTI4001569, TESTI4001604, TESTI4001665, TESTI4001679, TESTI4001795, TESTI4001923, TESTI4001925, TESTI4001984, TESTI4002003, TESTI4002072, TESTI4002141, TESTI4002195, TESTI4002202, TESTI4002290, TESTI4002319, TESTI4002491, TESTI4002520, TESTI4002552, TESTI4002647, TESTI4002703, TESTI4002754, TESTI4002799, TESTI4002868, TESTI4002878, TESTI4002889, TESTI4002988, TESTI4003150, TESTI4003179, TESTI4003279, TESTI4003319, TESTI4003404, TESTI4003565, TESTI4003574, TESTI4003579, TESTI4003602, TESTI4003703, TESTI4003733, TESTI4003796, TESTI4003944, TESTI4004003, TESTI4004031, TESTI4004200, TESTI4004210, TESTI4004539, TESTI4004626, TESTI4004653, TESTI4004695, TESTI4004722, TESTI4004887, TESTI4004917, TESTI4005015, TESTI4005039, TESTI4005133, TESTI4005158, TESTI4005317, TESTI4005322, TESTI4005399, TESTI4005470, TESTI4005500, TESTI4005534, TESTI4005543, TESTI4005628, TESTI4005801, TESTI4005805, TESTI4005857, TESTI4005961, TESTI4006053, TESTI4006079, TESTI4006112, TESTI4006137, TESTI4006148, TESTI4006219, TESTI4006234, TESTI4006308, TESTI4006326, TESTI4006393, TESTI4006407, TESTI4006412, TESTI4006420, TESTI4006441, TESTI4006473, TESTI4006539, TESTI4006546, TESTI4006567, TESTI4006704, TESTI4006728, TESTI4006802, TESTI4006819, TESTI4007064, TESTI4007163, TESTI4007176, TESTI4007203, TESTI4007239, TESTI4007369, TESTI4007373, TESTI4007382, TESTI4007404, TESTI4007489, TESTI4007565, TESTI4007671, TESTI4007775, TESTI4007778, TESTI4007799, TESTI4007810, TESTI4007816, TESTI4007965, TESTI4008007, TESTI4008018, TESTI4008050, TESTI4008058, TESTI4008086, TESTI4008097, TESTI4008176, TESTI4008209, TESTI4008219, TESTI4008250, TESTI4008302, TESTI4008305, TESTI4008401, TESTI4008417, TESTI4008429, TESTI4008573, TESTI4008797, TESTI4008816, TESTI4008840, TESTI4008935, TESTI4008993, TESTI4009022, TESTI4009028, TESTI4009034, TESTI4009123, TESTI4009160, TESTI4009215, TESTI4009283, TESTI4009306, TESTI4009374, TESTI4009406, TESTI4009454, TESTI4009457, TESTI4009501, TESTI4009563, TESTI4009608, TESTI4009638, TESTI4009752, TESTI4009881, TESTI4009886, TESTI4009928, TESTI4010076, TESTI4010082, TESTI4010095, TESTI4010211, TESTI4010377, TESTI4010475, TESTI4010544, TESTI4010713, TESTI4010721, TESTI4010789, TESTI4010817, TESTI4010831, TESTI4010851, TESTI4010902, TESTI4010928, TESTI4010979, TESTI4011070, TESTI4011072, TESTI4011084, TESTI4011118, TESTI4011246, TESTI4011484, TESTI4011505, TESTI4011532, TESTI4011616, TESTI4011744, TESTI4011745, TESTI4011829, TESTI4011926, TESTI4011956, TESTI4012010, TESTI4012086, TESTI4012258, TESTI4012293, TESTI4012329, TESTI4012382, TESTI4012406, TESTI4012448, TESTI4012451, TESTI4012505, TESTI4012556, TESTI4012623, TESTI4012646, TESTI4012679, TESTI4012911, TESTI4012956, TESTI4012960, TESTI4013365, TESTI4013369, TESTI4013410, TESTI4013474, TESTI4013602, TESTI4013667, TESTI4013675, TESTI4013685, TESTI4013735, TESTI4013742, TESTI4013774, TESTI4013817, TESTI4013830, TESTI4013852, TESTI4013894, TESTI4013924, TESTI4013960, TESTI4013962, TESTI4014159, TESTI4014175, TESTI4014265, TESTI4014276, TESTI4014306, TESTI4014392, TESTI4014415, TESTI4014445, TESTI4014553, TESTI4014661, TESTI4014694, TESTI4014801, TESTI4014818, TESTI4014891, TESTI4014908, TESTI4014924, TESTI4014932, TESTI4014977, TESTI4015012, TESTI4015129, TESTI4015145, TESTI4015204, TESTI4015263, TESTI4015293, TESTI4015299, TESTI4015339, TESTI4015398, TESTI4015442, TESTI4015471, TESTI4015477, TESTI4015600, TESTI4015646, TESTI4015681, TESTI4015688, TESTI4015790, TESTI4016110, TESTI4016238, TESTI4016551, TESTI4016812, TESTI4016822, TESTI4016865, TESTI4016882, TESTI4016925, TESTI4017001, TESTI4017116, TESTI4017137, TESTI4017229, TESTI4017254, TESTI4017269, TESTI4017380, TESTI4017382, TESTI4017543, TESTI4017575, TESTI4017647, TESTI4017714, TESTI4017763, TESTI4017848, TESTI4017854, TESTI4017901, TESTI4017961, TESTI4017984, TESTI4018101, TESTI4018152, TESTI4018208, TESTI4018382, TESTI4018506, TESTI4018555, TESTI4018751, TESTI4018806, TESTI4018835, TESTI4018859, TESTI4018881, TESTI4018886, TESTI4018938, TESTI4019140, TESTI4019149, TESTI4019299, TESTI4019417, TESTI4019440, TESTI4019566, TESTI4019657, TESTI4019756, TESTI4019843, TESTI4020092, TESTI4020102, TESTI4020342, TESTI4020460, TESTI4020596, TESTI4020806, TESTI4020819, TESTI4020920, TESTI4021129, TESTI4021197, TESTI4021294, TESTI4021377, TESTI4021456, TESTI4021491, TESTI4021569, TESTI4021713, TESTI4021821, TESTI4022158, TESTI4022577, TESTI4022716, TESTI4022873, TESTI4023096, TESTI4023172, TESTI4023546, TESTI4023555, TESTI4023654, TESTI4023722, TESTI4023762, TESTI4023942, TESTI4024096, TESTI4024240, TESTI4024245, TESTI4024294, TESTI4024344, TESTI4024387, TESTI4024420, TESTI4024494, TESTI4024740, TESTI4024874, TESTI4024890, TESTI4024907, TESTI4024930, TESTI4025062, TESTI4025268, TESTI4025401, TESTI4025494, TESTI4025547, TESTI4025731, TESTI4025797, TESTI4025865, TESTI4025908, TESTI4025920, TESTI4026079, TESTI4026080, TESTI4026192, TESTI4026207, TESTI4026295, TESTI4026390, TESTI4026456, TESTI4026510, TESTI4026524, TESTI4026680, TESTI4026700, TESTI4026762, TESTI4026785, TESTI4027139, TESTI4027170, TESTI4027262, TESTI4027516, TESTI4027557, TESTI4027660, TESTI4027821, TESTI4027969, TESTI4028042, TESTI4028059, TESTI4028062, TESTI4028182, TESTI4028429, TESTI4028612, TESTI4028692, TESTI4028809, TESTI4028823, TESTI4028880, TESTI4028904, TESTI4028938, TESTI4028958, TESTI4028983, TESTI4029023, TESTI4029348, TESTI4029370, TESTI4029528, TESTI4029651, TESTI4029671, TESTI4029676, TESTI4029690, TESTI4029731, TESTI4029743, TESTI4030069, TESTI4030159, TESTI4030319, TESTI4030505, TESTI4030603, TESTI4030669, TESTI4030673, TESTI4030864, TESTI4031066, TESTI4031173, TESTI4031335, TESTI4031745, TESTI4031818, TESTI4032090, TESTI4032112, TESTI4032128, TESTI4032270, TESTI4032375, TESTI4032834, TESTI4032856, TESTI4032895, TESTI4032913, TESTI4033146, TESTI4033177, TESTI4033433, TESTI4033690, TESTI4034172, TESTI4034212, TESTI4034432, TESTI4034495, TESTI4034632, TESTI4034633, TESTI4034912, TESTI4034973, TESTI4035063, TESTI4035065, TESTI4035498, TESTI4035508, TESTI4035581, TESTI4035602, TESTI4035637, TESTI4035649, TESTI4035770, TESTI4035872, TESTI4035895, TESTI4035898, TESTI4035989, TESTI4036012, TESTI4036042, TESTI4036048, TESTI4036315, TESTI4036319, TESTI4036449, TESTI4036767, TESTI4036909, TESTI4037066, TESTI4037156, TESTI4037188, TESTI4037228, TESTI4037244, TESTI4037727, TESTI4037949, TESTI4038047, TESTI4038099, TESTI4038156, TESTI4038223, TESTI4038258, TESTI4038284, TESTI4038339, TESTI4038492, TESTI4038721, TESTI4038758, TESTI4038779, TESTI4038818, TESTI4039038, TESTI4039086, TESTI4039451, TESTI4039575, TESTI4039659, TESTI4039744, TESTI4039904, TESTI4040197, TESTI4040363, TESTI4040535, TESTI4040559, TESTI4040598, TESTI4040800, TESTI4040804, TESTI4040939, TESTI4040956, TESTI4041049, TESTI4041053, TESTI4041086, TESTI4041099, TESTI4041143, TESTI4041482, TESTI4041519, TESTI4041624, TESTI4041629, TESTI4041832, TESTI4041844, TESTI4041903, TESTI4041954, TESTI4041984, TESTI4041985, TESTI4041986, TESTI4042098, TESTI4042420, TESTI4042440, TESTI4042444, TESTI4042711, TESTI4042846, TESTI4043067, TESTI4043129, TESTI4043140, TESTI4043166, TESTI4043203, TESTI4043223, TESTI4043371, TESTI4043378, TESTI4043512, TESTI4043551, TESTI4043710, TESTI4043947, TESTI4044035, TESTI4044076, TESTI4044084, TESTI4044123, TESTI4044186, TESTI4044234, TESTI4044291, TESTI4044296, TESTI4044300, TESTI4044682, TESTI4044704, TESTI4044770, TESTI4045168, TESTI4045312, TESTI4045330, TESTI4045470, TESTI4045701, TESTI4045908, TESTI4045955, TESTI4045982, TESTI4046073, TESTI4046090, TESTI4046240, TESTI4046245, TESTI4046253, TESTI4046282, TESTI4046328, TESTI4046450, TESTI4046457, TESTI4046487, TESTI4046502, TESTI4046523, TESTI4046819, TESTI4046873, TESTI4046884, TESTI4046896, TESTI4046903, TESTI4046962, TESTI4047069, TESTI4047119, TESTI4047305, TESTI4047328, TESTI4047437, TESTI4047569, TESTI4047746, TESTI4047808, THYMU1000002, THYMU1000010, THYMU1000017, THYMU1000025, THYMU1000029, THYMU1000032, THYMU1000033, THYMU1000041, THYMU1000060, THYMU1000074, THYMU1000083, THYMU1000098, THYMU1000103, THYMU1000105, THYMU1000109, THYMU1000136, THYMU1000142, THYMU1000144, THYMU1000158, THYMU1000176, THYMU1000179, THYMU1000191, THYMU1000198, THYMU1000217, THYMU1000240, THYMU1000242, THYMU1000291, THYMU1000316, THYMU1000318, THYMU1000329, THYMU1000331, THYMU1000336, THYMU1000366, THYMU1000374, THYMU1000382, THYMU1000393, THYMU1000399, THYMU1000426, THYMU1000428, THYMU1000440, THYMU1000459, THYMU1000473, THYMU1000490, THYMU1000491, THYMU1000496, THYMU1000499, THYMU1000527, THYMU1000532, THYMU1000536, THYMU1000554, THYMU1000558, THYMU1000576, THYMU1000600, THYMU1000677, THYMU1000692, THYMU2000022, THYMU2000032, THYMU2000120, THYMU2000138, THYMU2000140, THYMU2000155, THYMU2000162, THYMU2000171, THYMU2000176, THYMU2000179, THYMU2000231, THYMU2000236, THYMU2000276, THYMU2000280, THYMU2000300, THYMU2000317, THYMU2000368, THYMU2000369, THYMU2000382, THYMU2000418, THYMU2000436, THYMU2000440, THYMU2000489, THYMU2000492, THYMU2000519, THYMU2000570, THYMU2000602, THYMU2000660, THYMU2000671, THYMU2000672, THYMU2000684, THYMU2000702, THYMU2000767, THYMU2000775, THYMU2000800, THYMU2000879, THYMU2000932, THYMU2000946, THYMU2000950, THYMU2000971, THYMU2000982, THYMU2000990, THYMU2001007, THYMU2001018, THYMU2001053, THYMU2001071, THYMU2001090, THYMU2001139, THYMU2001195, THYMU2001202, THYMU2001203, THYMU2001256, THYMU2001270, THYMU2001291, THYMU2001314, THYMU2001325, THYMU2001357, THYMU2001381, THYMU2001422, THYMU2001443, THYMU2001515, THYMU2001521, THYMU2001556, THYMU2001622, THYMU2001727, THYMU2001819, THYMU2001825, THYMU2001839, THYMU2001868, THYMU2001898, THYMU2001900, THYMU2001916, THYMU2001926, THYMU2001989, THYMU2002023, THYMU2002037, THYMU2002080, THYMU2002109, THYMU2002147, THYMU2002154, THYMU2002157, THYMU2002162, THYMU2002177, THYMU2002203, THYMU2002229, THYMU2002242, THYMU2002338, THYMU2002356, THYMU2002376, THYMU2002384, THYMU2002450, THYMU2002490, THYMU2002548, THYMU2002583, THYMU2002695, THYMU2002745, THYMU2002756, THYMU2002789, THYMU2002792, THYMU2002815, THYMU2002841, THYMU2002852, THYMU2002910, THYMU2002950, THYMU2002983, THYMU2003046, THYMU2003069, THYMU2003107, THYMU2003124, THYMU2003133, THYMU2003166, THYMU2003232, THYMU2003242, THYMU2003249, THYMU2003270, THYMU2003282, THYMU2003287, THYMU2003336, THYMU2003366, THYMU2003397, THYMU2003440, THYMU2003446, THYMU2003470, THYMU2003479, THYMU2003499, THYMU2003542, THYMU2003632, THYMU2003650, THYMU2003700, THYMU2003760, THYMU2003803, THYMU2003855, THYMU2003907, THYMU2003932, THYMU2004003, THYMU2004008, THYMU2004042, THYMU2004108, THYMU2004111, THYMU2004123, THYMU2004139, THYMU2004152, THYMU2004169, THYMU2004284, THYMU2004320, THYMU2004336, THYMU2004344, THYMU2004356, THYMU2004410, THYMU2004452, THYMU2004508, THYMU2004512, THYMU2004635, THYMU2004639, THYMU2004668, THYMU2004677, THYMU2004688, THYMU2004693, THYMU2004733, THYMU2004835, THYMU2004843, THYMU2004906, THYMU2004916, THYMU2004986, THYMU2005001, THYMU2005003, THYMU2005046, THYMU2005134, THYMU2005156, THYMU2005190, THYMU2005225, THYMU2005240, THYMU2005246, THYMU2005270, THYMU2005283, THYMU2005303, THYMU2005321, THYMU2005356, THYMU2005369, THYMU2005439, THYMU2005480, THYMU2005482, THYMU2005507, THYMU2005545, THYMU2005546, THYMU2005574, THYMU2005576, THYMU2005748, THYMU2005759, THYMU2005807, THYMU2005815, THYMU2005855, THYMU2005881, THYMU2005948, THYMU2005980, THYMU2005997, THYMU2006001, THYMU2006048, THYMU2006098, THYMU2006160, THYMU2006170, THYMU2006252, THYMU2006261, THYMU2006303, THYMU2006324, THYMU2006350, THYMU2006357, THYMU2006365, THYMU2006420, THYMU2006468, THYMU2006505, THYMU2006610, THYMU2006666, THYMU2006712, THYMU2006813, THYMU2006913, THYMU2006946, THYMU2006965, THYMU2007025, THYMU2007036, THYMU2007065, THYMU2007095, THYMU2007112, THYMU2007146, THYMU2007179, THYMU2007258, THYMU2007307, THYMU2007308, THYMU2007339, THYMU2007350, THYMU2007384, THYMU2007415, THYMU2007467, THYMU2007493, THYMU2007521, THYMU2007528, THYMU2007530, THYMU2007532, THYMU2007561, THYMU2007571, THYMU2007635, THYMU2007658, THYMU2007667, THYMU2007694, THYMU2007725, THYMU2007729, THYMU2007802, THYMU2007824, THYMU2007854, THYMU2007952, THYMU2007969, THYMU2008035, THYMU2008036, THYMU2008049, THYMU2008072, THYMU2008111, THYMU2008145, THYMU2008149, THYMU2008185, THYMU2008191, THYMU2008207, THYMU2008226, THYMU2008282, THYMU2008321, THYMU2008339, THYMU2008350, THYMU2008351, THYMU2008383, THYMU2008452, THYMU2008643, THYMU2008686, THYMU2008691, THYMU2008714, THYMU2008725, THYMU2008727, THYMU2008781, THYMU2008799, THYMU2008876, THYMU2008910, THYMU2008917, THYMU2008928, THYMU2008990, THYMU2008994, THYMU2009023, THYMU2009046, THYMU2009101, THYMU2009104, THYMU2009134, THYMU2009157, THYMU2009181, THYMU2009186, THYMU2009338, THYMU2009425, THYMU2009516, THYMU2009526, THYMU2009546, THYMU2009592, THYMU2009596, THYMU2009792, THYMU2009835, THYMU2009906, THYMU2009948, THYMU2010030, THYMU2010041, THYMU2010046, THYMU2010059, THYMU2010082, THYMU2010094, THYMU2010161, THYMU2010192, THYMU2010448, THYMU2010519, THYMU2010637, THYMU2010671, THYMU2010699, THYMU2010705, THYMU2010779, THYMU2010816, THYMU2010831, THYMU2010848, THYMU2011053, THYMU2011063, THYMU2011072, THYMU2011096, THYMU2011118, THYMU2011142, THYMU2011183, THYMU2011257, THYMU2011259, THYMU2011295, THYMU2011308, THYMU2011390, THYMU2011431, THYMU2011447, THYMU2011482, THYMU2011538, THYMU2011548, THYMU2011551, THYMU2011564, THYMU2011573, THYMU2011585, THYMU2011621, THYMU2011666, THYMU2011736, THYMU2011785, THYMU2011806, THYMU2011852, THYMU2011875, THYMU2011881, THYMU2011937, THYMU2011939, THYMU2012002, THYMU2012024, THYMU2012073, THYMU2012104, THYMU2012113, THYMU2012273, THYMU2012401, THYMU2012492, THYMU2012507, THYMU2012565, THYMU2012574, THYMU2012625, THYMU2012631, THYMU2012665, THYMU2012690, THYMU2012701, THYMU2012807, THYMU2012826, THYMU2012882, THYMU2012891, THYMU2012902, THYMU2012919, THYMU2013023, THYMU2013047, THYMU2013051, THYMU2013089, THYMU2013136, THYMU2013170, THYMU2013364, THYMU2013386, THYMU2013426, THYMU2013578, THYMU2013648, THYMU2013705, THYMU2013757, THYMU2013779, THYMU2013863, THYMU2013916, THYMU2013950, THYMU2013981, THYMU2014067, THYMU2014068, THYMU2014167, THYMU2014183, THYMU2014204, THYMU2014297, THYMU2014323, THYMU2014327, THYMU2014353, THYMU2014492, THYMU2014500, THYMU2014599, THYMU2014762, THYMU2014777, THYMU2014801, THYMU2014901, THYMU2014923, THYMU2015019, THYMU2015161, THYMU2015316, THYMU2015321, THYMU2015439, THYMU2015441, THYMU2015479, THYMU2015762, THYMU2015775, THYMU2015825, THYMU2015918, THYMU2015943, THYMU2015984, THYMU2016113, THYMU2016164, THYMU2016204, THYMU2016219, THYMU2016360, THYMU2016496, THYMU2016523, THYMU2016840, THYMU2016968, THYMU2017008, THYMU2017010, THYMU2017023, THYMU2017085, THYMU2017099, THYMU2017158, THYMU2017162, THYMU2017215, THYMU2017362, THYMU2017366, THYMU2017398, THYMU2017449, THYMU2017479, THYMU2017522, THYMU2017526, THYMU2017601, THYMU2017675, THYMU2017707, THYMU2017831, THYMU2017844, THYMU2017878, THYMU2017948, THYMU2018028, THYMU2018071, THYMU2018126, THYMU2018189, THYMU2018197, THYMU2018384, THYMU2018455, THYMU2018547, THYMU2018565, THYMU2018639, THYMU2018673, THYMU2018721, THYMU2018772, THYMU2018819, THYMU2018841, THYMU2018997, THYMU2019021, THYMU2019054, THYMU2019197, THYMU2019210, THYMU2019364, THYMU2019436, THYMU2019442, THYMU2019587, THYMU2019599, THYMU2019686, THYMU2019813, THYMU2020198, THYMU2020289, THYMU2020491, THYMU2020499, THYMU2020560, THYMU2020667, THYMU2020830, THYMU2020883, THYMU2020959, THYMU2021361, THYMU2021509, THYMU2021597, THYMU2021684, THYMU2021714, THYMU2022213, THYMU2022289, THYMU2022660, THYMU2022854, THYMU2022922, THYMU2023209, THYMU2023264, THYMU2023576, THYMU2023711, THYMU2023900, THYMU2023943, THYMU2023967, THYMU2024071, THYMU2024121, THYMU2024185, THYMU2024207, THYMU2024616, THYMU2024684, THYMU2024748, THYMU2025042, THYMU2025189, THYMU2025319, THYMU2025325, THYMU2025406, THYMU2025557, THYMU2025572, THYMU2025707, THYMU2025849, THYMU2025909, THYMU2025939, THYMU2026182, THYMU2026350, THYMU2026530, THYMU2026531, THYMU2026835, THYMU2026904, THYMU2027053, THYMU2027168, THYMU2027249, THYMU2027282, THYMU2027497, THYMU2027695, THYMU2027734, THYMU2027894, THYMU2027975, THYMU2027996, THYMU2028041, THYMU2028368, THYMU2028379, THYMU2028394, THYMU2028412, THYMU2028629, THYMU2028632, THYMU2028724, THYMU2028739, THYMU2028942, THYMU2028978, THYMU2029134, THYMU2029578, THYMU2029676, THYMU2029688, THYMU2029788, THYMU2030068, THYMU2030226, THYMU2030264, THYMU2030462, THYMU2030543, THYMU2030637, THYMU2030655, THYMU2030796, THYMU2030912, THYMU2030982, THYMU2031046, THYMU2031139, THYMU2031218, THYMU2031249, THYMU2031258, THYMU2031341, THYMU2031368, THYMU2031579, THYMU2031847, THYMU2031890, THYMU2031994, THYMU2032014, THYMU2032035, THYMU2032080, THYMU2032150, THYMU2032155, THYMU2032358, THYMU2032437, THYMU2032601, THYMU2032655, THYMU2032696, THYMU2032715, THYMU2032732, THYMU2032976, THYMU2033053, THYMU2033059, THYMU2033070, THYMU2033079, THYMU2033085, THYMU2033104, THYMU2033227, THYMU2033263, THYMU2033308, THYMU2033401, THYMU2033583, THYMU2033755, THYMU2033787, THYMU2033816, THYMU2034182, THYMU2034279, THYMU2034314, THYMU2034338, THYMU2034374, THYMU2034647, THYMU2034917, THYMU2035064, THYMU2035078, THYMU2035101, THYMU2035319, THYMU2035321, THYMU2035388, THYMU2035400, THYMU2035554, THYMU2035710, THYMU2035735, THYMU2036058, THYMU2036105, THYMU2036207, THYMU2036215, THYMU2036252, THYMU2036265, THYMU2036366, THYMU2036459, THYMU2036461, THYMU2036604, THYMU2036653, THYMU2037081, THYMU2037208, THYMU2037226, THYMU2037233, THYMU2037234, THYMU2037348, THYMU2037406, THYMU2037965, THYMU2038058, THYMU2038189, THYMU2038199, THYMU2038220, THYMU2038301, THYMU2038369, THYMU2038389, THYMU2038615, THYMU2038636, THYMU2038739, THYMU2038772, THYMU2038797, THYMU2038906, THYMU2039305, THYMU2039315, THYMU2039334, THYMU2039350, THYMU2039411, THYMU2039634, THYMU2039719, THYMU2039780, THYMU2039788, THYMU2039989, THYMU2040029, THYMU2040110, THYMU2040114, THYMU2040140, THYMU2040412, THYMU2040427, THYMU2040824, THYMU2040925, THYMU2041007, THYMU2041015, THYMU2041252, THYMU3000028, THYMU3000036, THYMU3000037, THYMU3000082, THYMU3000194, THYMU3000224, THYMU3000269, THYMU3000306, THYMU3000360, THYMU3000390, THYMU3000420, THYMU3000490, THYMU3000504, THYMU3000542, THYMU3000655, THYMU3000776, THYMU3000826, THYMU3000841, THYMU3001077, THYMU3001082, THYMU3001083, THYMU3001133, THYMU3001151, THYMU3001379, THYMU3001472, THYMU3001593, THYMU3001883, THYMU3001939, THYMU3001991, THYMU3002452, THYMU3002578, THYMU3002661, THYMU3003007, THYMU3003092, THYMU3003212, THYMU3003309, THYMU3003350, THYMU3003403, THYMU3003565, THYMU3003763, THYMU3003865, THYMU3003958, THYMU3003965, THYMU3004157, THYMU3004628, THYMU3004632, THYMU3004835, THYMU3004866, THYMU3005050, THYMU3005378, THYMU3005407, THYMU3005415, THYMU3005427, THYMU3005482, THYMU3005491, THYMU3005629, THYMU3005696, THYMU3006118, THYMU3006132, THYMU3006168, THYMU3006172, THYMU3006371, THYMU3006485, THYMU3006640, THYMU3006767, THYMU3006811, THYMU3006963, THYMU3007137, THYMU3007308, THYMU3007368, THYMU3007423, THYMU3007559, THYMU3007845, THYMU3008060, THYMU3008105, THYMU3008136, THYMU3008171, THYMU3008216, THYMU3008436, THYMU3008672, THYMU3008883, THYMU3008935, THYMU3009006, THYMU3009255, THYMU3009391, THYMU3009643, THYMU3009755, THYMU3010247, THYMU3011012, THYMU3011081, THYMU3011244, THYMU3011360, THYMU3011534, THYMU3011543, THYMU3011556, THYMU3011717, THYMU3011827, THYMU3012402, THYMU3012907, THYMU3012983, THYMU3013114, THYMU3013197, THYMU3013241, THYMU3013386, THYMU3013470, THYMU3013785, THYMU3013897, THYMU3014038, THYMU3014173, THYMU3014372, THYMU3014555, THYMU3014620, THYMU3014701, THYMU3015042, THYMU3015457, THYMU3015571, THYMU3015592, THYMU3015625, THYMU3015647, THYMU3015962, THYMU3016022, THYMU3016518, THYMU3016797, THYMU3016822, THYMU3016850, THYMU3017562, THYMU3017688, THYMU3017689, THYMU3017761, THYMU3018151, THYMU3018896, THYMU3019095, THYMU3019476, THYMU3019605, THYMU3019916, THYMU3020221, THYMU3020595, THYMU3020713, THYMU3020856, THYMU3020869, THYMU3020970, THYMU3021404, THYMU3021586, THYMU3021755, THYMU3021900, THYMU3022211, THYMU3022434, THYMU3022528, THYMU3022668, THYMU3022982, THYMU3023107, THYMU3023211, THYMU3023216, THYMU3023394, THYMU3023400, THYMU3023797, THYMU3024164, THYMU3024339, THYMU3024602, THYMU3024879, THYMU3025118, THYMU3025313, THYMU3025642, THYMU3025683, THYMU3025772, THYMU3025865, THYMU3026000, THYMU3026350, THYMU3026479, THYMU3026532, THYMU3026783, THYMU3026869, THYMU3027251, THYMU3027540, THYMU3027655, THYMU3027671, THYMU3028075, THYMU3028410, THYMU3028461, THYMU3028702, THYMU3029188, THYMU3029318, THYMU3029421, THYMU3029719, THYMU3029774, THYMU3029832, THYMU3030072, THYMU3030231, THYMU3030706, THYMU3030710, THYMU3030752, THYMU3031146, THYMU3031402, THYMU3031610, THYMU3031612, THYMU3031868, THYMU3031878, THYMU3032032, THYMU3032867, THYMU3033402, THYMU3033626, THYMU3033630, THYMU3033649, THYMU3033754, THYMU3033759, THYMU3034078, THYMU3034099, THYMU3034453, THYMU3034616, THYMU3034671, THYMU3034853, THYMU3034867, THYMU3034983, THYMU3036200, THYMU3036310, THYMU3036934, THYMU3036953, THYMU3037052, THYMU3037192, THYMU3037617, THYMU3037772, THYMU3037827, THYMU3037836, THYMU3037856, THYMU3037867, THYMU3037909, THYMU3037980, THYMU3038158, THYMU3038167, THYMU3038214, THYMU3038266, THYMU3038328, THYMU3038347, THYMU3038375, THYMU3038603, THYMU3038687, THYMU3038759, THYMU3038879, THYMU3038970, THYMU3039807, THYMU3039846, THYMU3040068, THYMU3040126, THYMU3040146, THYMU3040168, THYMU3040172, THYMU3040725, THYMU3040746, THYMU3040816, THYMU3040829, THYMU3040830, THYMU3040986, THYMU3041354, THYMU3041386, THYMU3041428, THYMU3041573, THYMU3041603, THYMU3041736, THYMU3041918, THYMU3042075, THYMU3042321, THYMU3042372, THYMU3042758, THYMU3042929, THYMU3043200, THYMU3043327, THYMU3043482, THYMU3043597, THYMU3043688, THYMU3043779, THYMU3043883, THYMU3043993, THYMU3044175, THYMU3044188, THYMU3044441, THYMU3044445, THYMU3045510, THYMU3045673, THYMU3045692, THYMU3045704, THYMU3046140, THYMU3046350, THYMU3046360, THYMU3046856, THYMU3047115, THYMU3047144, THYMU3047156, THYMU3047366, THYMU3047513, THYMU3047542, THYMU3047760, THYMU3047891, TKIDN1000001, TKIDN1000044, TKIDN1000062, TKIDN1000066, TKIDN1000164, TKIDN1000171, TKIDN1000192, TKIDN2000127, TKIDN2000240, TKIDN2000319, TKIDN2000464, TKIDN2000521, TKIDN2000701, TKIDN2001529, TKIDN2001662, TKIDN2002318, TKIDN2002329, TKIDN2002424, TKIDN2002632, TKIDN2003044, TKIDN2003059, TKIDN2003062, TKIDN2003078, TKIDN2003366, TKIDN2003396, TKIDN2003413, TKIDN2003597, TKIDN2003601, TKIDN2004185, TKIDN2004386, TKIDN2004458, TKIDN2004748, TKIDN2005487, TKIDN2005721, TKIDN2005934, TKIDN2005947, TKIDN2005956, TKIDN2006525, TKIDN2006761, TKIDN2006852, TKIDN2007605, TKIDN2007667, TKIDN2007828, TKIDN2008176, TKIDN2008778, TKIDN2009092, TKIDN2009330, TKIDN2009481, TKIDN2009641, TKIDN2009794, TKIDN2009889, TKIDN2010200, TKIDN2010232, TKIDN2010278, TKIDN2010602, TKIDN2010812, TKIDN2010934, TKIDN2011051, TKIDN2011160, TKIDN2011289, TKIDN2011324, TKIDN2012034, TKIDN2012771, TKIDN2012824, TKIDN2013134, TKIDN2013287, TKIDN2014570, TKIDN2014757, TKIDN2014771, TKIDN2014964, TKIDN2015025, TKIDN2015071, TKIDN2015161, TKIDN2015263, TKIDN2015285, TKIDN2015423, TKIDN2015788, TKIDN2016309, TKIDN2016399, TKIDN2016846, TKIDN2018926, TKIDN2019116, TLIVE2000023, TLIVE2000142, TLIVE2000292, TLIVE2000762, TLIVE2000979, TLIVE2001616, TLIVE2001684, TLIVE2001828, TLIVE2001927, TLIVE2002046, TLIVE2002336, TLIVE2002338, TLIVE2002562, TLIVE2002690, TLIVE2002882, TLIVE2003197, TLIVE2003200, TLIVE2003225, TLIVE2003381, TLIVE2003737, TLIVE2003961, TLIVE2004110, TLIVE2004320, TLIVE2004331, TLIVE2004601, TLIVE2005180, TLIVE2005390, TLIVE2005516, TLIVE2005731, TLIVE2005866, TLIVE2006236, TLIVE2006359, TLIVE2006529, TLIVE2006621, TLIVE2006733, TLIVE2007000, TLIVE2007016, TLIVE2007132, TLIVE2007192, TLIVE2007528, TLIVE2007607, TLIVE2007736, TLIVE2007816, TLIVE2007919, TLIVE2008083, TLIVE2008213, TLIVE2008221, TLIVE2008229, TLIVE2008712, TLIVE2008797, TLIVE2009087, TLIVE2009163, TLIVE2009489, TLIVE2009541, TLUNG2000179, TOVAR2000476, TOVAR2000575, TOVAR2000649, TOVAR2000904, TOVAR2001281, TOVAR2001556, TOVAR2001730, TOVAR2002247, TOVAR2002514, TOVAR2002549, TOVAR2002800, TRACH1000011, TRACH1000018, TRACH1000030, TRACH1000038, TRACH1000057, TRACH1000063, TRACH1000074, TRACH1000100, TRACH1000106, TRACH1000125, TRACH1000140, TRACH1000144, TRACH1000181, TRACH1000193, TRACH1000205, TRACH1000212, TRACH1000240, TRACH2000002, TRACH2000015, TRACH2000024, TRACH2000032, TRACH2000045, TRACH2000047, TRACH2000081, TRACH2000083, TRACH2000148, TRACH2000185, TRACH2000235, TRACH2000237, TRACH2000243, TRACH2000248, TRACH2000250, TRACH2000259, TRACH2000272, TRACH2000282, TRACH2000287, TRACH2000289, TRACH2000306, TRACH2000312, TRACH2000336, TRACH2000359, TRACH2000393, TRACH2000411, TRACH2000420, TRACH2000461, TRACH2000472, TRACH2000496, TRACH2000497, TRACH2000502, TRACH2000522, TRACH2000559, TRACH2000660, TRACH2000665, TRACH2000675, TRACH2000677, TRACH2000702, TRACH2000703, TRACH2000767, TRACH2000775, TRACH2000807, TRACH2000862, TRACH2000873, TRACH2000894, TRACH2000898, TRACH2000920, TRACH2000923, TRACH2000926, TRACH2000944, TRACH2000959, TRACH2000972, TRACH2000981, TRACH2000986, TRACH2001021, TRACH2001037, TRACH2001060, TRACH2001085, TRACH2001101, TRACH2001121, TRACH2001147, TRACH2001154, TRACH2001188, TRACH2001192, TRACH2001249, TRACH2001275, TRACH2001289, TRACH2001314, TRACH2001335, TRACH2001339, TRACH2001341, TRACH2001347, TRACH2001395, TRACH2001400, TRACH2001403, TRACH2001416, TRACH2001428, TRACH2001432, TRACH2001443, TRACH2001463, TRACH2001474, TRACH2001478, TRACH2001525, TRACH2001532, TRACH2001549, TRACH2001592, TRACH2001596, TRACH2001607, TRACH2001612, TRACH2001621, TRACH2001646, TRACH2001651, TRACH2001684, TRACH2001898, TRACH2001933, TRACH2001968, TRACH2001996, TRACH2002054, TRACH2002092, TRACH2002100, TRACH2002138, TRACH2002333, TRACH2002537, TRACH2002664, TRACH2002784, TRACH2002803, TRACH2002840, TRACH2002847, TRACH2002853, TRACH2002862, TRACH2002954, TRACH2002960, TRACH2002988, TRACH2003070, TRACH2003272, TRACH2003323, TRACH2003347, TRACH2003484, TRACH2003516, TRACH2003605, TRACH2003736, TRACH2003759, TRACH2003941, TRACH2004039, TRACH2004054, TRACH2004087, TRACH2004109, TRACH2004170, TRACH2004183, TRACH2004251, TRACH2004292, TRACH2004336, TRACH2004399, TRACH2004428, TRACH2004458, TRACH2004499, TRACH2004521, TRACH2004570, TRACH2004845, TRACH2004887, TRACH2004950, TRACH2005004, TRACH2005017, TRACH2005066, TRACH2005159, TRACH2005314, TRACH2005444, TRACH2005541, TRACH2005666, TRACH2005698, TRACH2005710, TRACH2005720, TRACH2005769, TRACH2005796, TRACH2005800, TRACH2005811, TRACH2006015, TRACH2006049, TRACH2006097, TRACH2006194, TRACH2006327, TRACH2006331, TRACH2006378, TRACH2006387, TRACH2006528, TRACH2006670, TRACH2006762, TRACH2006866, TRACH2006870, TRACH2006918, TRACH2007059, TRACH2007324, TRACH2007358, TRACH2007399, TRACH2007483, TRACH2007542, TRACH2007577, TRACH2007674, TRACH2007676, TRACH2007688, TRACH2007733, TRACH2007816, TRACH2007894, TRACH2007969, TRACH2007988, TRACH2008112, TRACH2008113, TRACH2008127, TRACH2008130, TRACH2008278, TRACH2008300, TRACH2008472, TRACH2008478, TRACH2008540, TRACH2008583, TRACH2008597, TRACH2008716, TRACH2008820, TRACH2008891, TRACH2008921, TRACH2009006, TRACH2009060, TRACH2009107, TRACH2009123, TRACH2009268, TRACH2009291, TRACH2009310, TRACH2009340, TRACH2009348, TRACH2009358, TRACH2009661, TRACH2009730, TRACH2009743, TRACH2009754, TRACH2009851, TRACH2009862, TRACH2009934, TRACH2010159, TRACH2010218, TRACH2010251, TRACH2010272, TRACH2010317, TRACH2010419, TRACH2010451, TRACH2010505, TRACH2010587, TRACH2010600, TRACH2010634, TRACH2010639, TRACH2010677, TRACH2010698, TRACH2010771, TRACH2010824, TRACH2010883, TRACH2010965, TRACH2010974, TRACH2011057, TRACH2011093, TRACH2011113, TRACH2011290, TRACH2011302, TRACH2011500, TRACH2011574, TRACH2011894, TRACH2011956, TRACH2012000, TRACH2012138, TRACH2012242, TRACH2012298, TRACH2012370, TRACH2012376, TRACH2012387, TRACH2012497, TRACH2012536, TRACH2012562, TRACH2012742, TRACH2012811, TRACH2012823, TRACH2012918, TRACH2013081, TRACH2013123, TRACH2013265, TRACH2013369, TRACH2013450, TRACH2013495, TRACH2013552, TRACH2013585, TRACH2013671, TRACH2013726, TRACH2013902, TRACH2013928, TRACH2013982, TRACH2013991, TRACH2014018, TRACH2014045, TRACH2014046, TRACH2014077, TRACH2014082, TRACH2014124, TRACH2014268, TRACH2014284, TRACH2014337, TRACH2014356, TRACH2014371, TRACH2014442, TRACH2014483, TRACH2014495, TRACH2014544, TRACH2014573, TRACH2014725, TRACH2014760, TRACH2014815, TRACH2014839, TRACH2014938, TRACH2014950, TRACH2014972, TRACH2014974, TRACH2014997, TRACH2015180, TRACH2015243, TRACH2015316, TRACH2015381, TRACH2015486, TRACH2015654, TRACH2015823, TRACH2015824, TRACH2015939, TRACH2015987, TRACH2016080, TRACH2016131, TRACH2016286, TRACH2016317, TRACH2016347, TRACH2016380, TRACH2016384, TRACH2016410, TRACH2016481, TRACH2016498, TRACH2016533, TRACH2016551, TRACH2016554, TRACH2016651, TRACH2016690, TRACH2016709, TRACH2016722, TRACH2016835, TRACH2016980, TRACH2017086, TRACH2017368, TRACH2017498, TRACH2017609, TRACH2017949, TRACH2017965, TRACH2017980, TRACH2018034, TRACH2018084, TRACH2018262, TRACH2018273, TRACH2018278, TRACH2018317, TRACH2018345, TRACH2018380, TRACH2018446, TRACH2018449, TRACH2018512, TRACH2018646, TRACH2018663, TRACH2018718, TRACH2018835, TRACH2018882, TRACH2018914, TRACH2018950, TRACH2019024, TRACH2019046, TRACH2019080, TRACH2019151, TRACH2019154, TRACH2019176, TRACH2019248, TRACH2019309, TRACH2019425, TRACH2019473, TRACH2019602, TRACH2019661, TRACH2019672, TRACH2019673, TRACH2019844, TRACH2019879, TRACH2020048, TRACH2020336, TRACH2020525, TRACH2021398, TRACH2021622, TRACH2021635, TRACH2021964, TRACH2022042, TRACH2022113, TRACH2022253, TRACH2022425, TRACH2022553, TRACH2022649, TRACH2022839, TRACH2023246, TRACH2023299, TRACH2023306, TRACH2023416, TRACH2023479, TRACH2023684, TRACH2023860, TRACH2023876, TRACH2024139, TRACH2024187, TRACH2024271, TRACH2024293, TRACH2024408, TRACH2024512, TRACH2024559, TRACH2024647, TRACH2024651, TRACH2024730, TRACH2024735, TRACH2024749, TRACH2024821, TRACH2025057, TRACH2025084, TRACH2025155, TRACH2025224, TRACH2025344, TRACH2025379, TRACH2025507, TRACH2025535, TRACH2025569, TRACH2025705, TRACH2025749, TRACH2025753, TRACH2025810, TRACH2025853, TRACH2025911, TRACH2025932, TRACH3000014, TRACH3000017, TRACH3000043, TRACH3000134, TRACH3000180, TRACH3000342, TRACH3000420, TRACH3000515, TRACH3000530, TRACH3000548, TRACH3000558, TRACH3000586, TRACH3000692, TRACH3000780, TRACH3000892, TRACH3000926, TRACH3001119, TRACH3001443, TRACH3001550, TRACH3001759, TRACH3002064, TRACH3002107, TRACH3002168, TRACH3002188, TRACH3002192, TRACH3002245, TRACH3002293, TRACH3002533, TRACH3002561, TRACH3002567, TRACH3002605, TRACH3002650, TRACH3002752, TRACH3002866, TRACH3002871, TRACH3002876, TRACH3002890, TRACH3003009, TRACH3003037, TRACH3003357, TRACH3003379, TRACH3003547, TRACH3003586, TRACH3003683, TRACH3003780, TRACH3003805, TRACH3003872, TRACH3004068, TRACH3004113, TRACH3004288, TRACH3004303, TRACH3004412, TRACH3004424, TRACH3004456, TRACH3004537, TRACH3004596, TRACH3004651, TRACH3004652, TRACH3004671, TRACH3004721, TRACH3004747, TRACH3004760, TRACH3004783, TRACH3004786, TRACH3004840, TRACH3004931, TRACH3004934, TRACH3005072, TRACH3005085, TRACH3005102, TRACH3005173, TRACH3005191, TRACH3005211, TRACH3005274, TRACH3005294, TRACH3005479, TRACH3005549, TRACH3005699, TRACH3005702, TRACH3005808, TRACH3005852, TRACH3005896, TRACH3006038, TRACH3006149, TRACH3006228, TRACH3006264, TRACH3006336, TRACH3006379, TRACH3006392, TRACH3006395, TRACH3006397, TRACH3006412, TRACH3006470, TRACH3006589, TRACH3006626, TRACH3006699, TRACH3006717, TRACH3006800, TRACH3006889, TRACH3006985, TRACH3007097, TRACH3007268, TRACH3007274, TRACH3007277, TRACH3007391, TRACH3007479, TRACH3007541, TRACH3007595, TRACH3007625, TRACH3007627, TRACH3007689, TRACH3007766, TRACH3007866, TRACH3007995, TRACH3008042, TRACH3008061, TRACH3008093, TRACH3008201, TRACH3008508, TRACH3008535, TRACH3008629, TRACH3008632, TRACH3008688, TRACH3008697, TRACH3008713, TRACH3008887, TRACH3008902, TRACH3008990, TRACH3009001, TRACH3009008, TRACH3009059, TRACH3009061, TRACH3009148, TRACH3009455, TRACH3009701, TRACH3009715, TRACH3009894, TRACH3009956, TRACH3010079, TRACH3010167, TRACH3010331, TRACH3010342, TRACH3010382, TRACH3010757, TRACH3010901, TRACH3011004, TRACH3011082, TRACH3011184, TRACH3011282, TRACH3011313, TRACH3011454, TRACH3011485, TRACH3011503, TRACH3011538, TRACH3011542, TRACH3012106, TRACH3012161, TRACH3012232, TRACH3012261, TRACH3012445, TRACH3012460, TRACH3012659, TRACH3012718, TRACH3012864, TRACH3012891, TRACH3012942, TRACH3013043, TRACH3013072, TRACH3013426, TRACH3013454, TRACH3013558, TRACH3013684, TRACH3013693, TRACH3013700, TRACH3013766, TRACH3013900, TRACH3013926, TRACH3014063, TRACH3014183, TRACH3014215, TRACH3014316, TRACH3014415, TRACH3014580, TRACH3014641, TRACH3014885, TRACH3015136, TRACH3015336, TRACH3015346, TRACH3015354, TRACH3015467, TRACH3015626, TRACH3015951, TRACH3016051, TRACH3016120, TRACH3016264, TRACH3016277, TRACH3016368, TRACH3016455, TRACH3016614, TRACH3016805, TRACH3016992, TRACH3017171, TRACH3017409, TRACH3017934, TRACH3018108, TRACH3018191, TRACH3018240, TRACH3018261, TRACH3018519, TRACH3018524, TRACH3018606, TRACH3018783, TRACH3018907, TRACH3018933, TRACH3018943, TRACH3019018, TRACH3019058, TRACH3019142, TRACH3019290, TRACH3019347, TRACH3019370, TRACH3019447, TRACH3019598, TRACH3019621, TRACH3019662, TRACH3019807, TRACH3019924, TRACH3019977, TRACH3020137, TRACH3020410, TRACH3020563, TRACH3020605, TRACH3020750, TRACH3020769, TRACH3020928, TRACH3020930, TRACH3021023, TRACH3021066, TRACH3021212, TRACH3021335, TRACH3021373, TRACH3021544, TRACH3021778, TRACH3021834, TRACH3021883, TRACH3022170, TRACH3022198, TRACH3022296, TRACH3022482, TRACH3022732, TRACH3022758, TRACH3022875, TRACH3022910, TRACH3022960, TRACH3023063, TRACH3023203, TRACH3023242, TRACH3023373, TRACH3023516, TRACH3023752, TRACH3023945, TRACH3023960, TRACH3024020, TRACH3024081, TRACH3024342, TRACH3024423, TRACH3024428, TRACH3024512, TRACH3024671, TRACH3024823, TRACH3025302, TRACH3025316, TRACH3025346, TRACH3025520, TRACH3026148, TRACH3026283, TRACH3026299, TRACH3026303, TRACH3026542, TRACH3026650, TRACH3026676, TRACH3026744, TRACH3026949, TRACH3027229, TRACH3027527, TRACH3027681, TRACH3027701, TRACH3027885, TRACH3028031, TRACH3028164, TRACH3028180, TRACH3028195, TRACH3028441, TRACH3028597, TRACH3028678, TRACH3028837, TRACH3028847, TRACH3028855, TRACH3029139, TRACH3029329, TRACH3029451, TRACH3029462, TRACH3029520, TRACH3029592, TRACH3029629, TRACH3029665, TRACH3029670, TRACH3029800, TRACH3030111, TRACH3030130, TRACH3030176, TRACH3030252, TRACH3030725, TRACH3030855, TRACH3030883, TRACH3031316, TRACH3031400, TRACH3031463, TRACH3031479, TRACH3031518, TRACH3031660, TRACH3031678, TRACH3031936, TRACH3032044, TRACH3032065, TRACH3032150, TRACH3032372, TRACH3032480, TRACH3032570, TRACH3032755, TRACH3032827, TRACH3032873, TRACH3033535, TRACH3033680, TRACH3033868, TRACH3034145, TRACH3034414, TRACH3034488, TRACH3034680, TRACH3034731, TRACH3034745, TRACH3034762, TRACH3034903, TRACH3035187, TRACH3035199, TRACH3035235, TRACH3035451, TRACH3035482, TRACH3035526, TRACH3036004, TRACH3036103, TRACH3036193, TRACH3036207, TRACH3036278, TRACH3036309, TRACH3036456, TRACH3036609, TRACH3036638, TRACH3036683, TRACH3036750, TRACH3036792, TRACH3036843, TRACH3036897, TRACH3036932, TRACH3036997, TRACH3037063, TRACH3037067, TRACH3037267, TRACH3037288, TRACH3037505, TRACH3037573, TRACH3037696, TRACH3037897, TRACH3038086, TRACH3038399, TSTOM1000135, TSTOM1000186, TSTOM2000139, TSTOM2000235, TSTOM2000315, TSTOM2000442, TSTOM2000553, TSTOM2000569, TSTOM2000588, TSTOM2001195, TSTOM2001274, TSTOM2001571, TSTOM2001996, TSTOM2002265, TSTOM2002505, TSTOM2002561, TSTOM2002611, TSTOM2002672, TSTOM2002682, TUTER1000014, TUTER1000122, TUTER1000137, TUTER2000057, TUTER2000283, TUTER2000425, TUTER2000904, TUTER2000916, TUTER2001286, TUTER2001341, TUTER2001387, TUTER2001433, TUTER2001461, TUTER2002028, TUTER2002074, TUTER2002158, TUTER2002228, TUTER2002323, TUTER2002356, TUTER2002729, UMVEN1000122, UMVEN1000143, UMVEN1000156, UMVEN1000186, UMVEN2000046, UMVEN2000069, UMVEN2000121, UMVEN2000152, UMVEN2000354, UTERU1000008, UTERU1000015, UTERU1000024, UTERU1000031, UTERU1000032, UTERU1000057, UTERU1000065, UTERU1000077, UTERU1000093, UTERU1000096, UTERU1000106, UTERU1000109, UTERU1000131, UTERU1000138, UTERU1000148, UTERU1000160, UTERU1000183, UTERU1000187, UTERU1000192, UTERU1000249, UTERU1000337, UTERU1000339, UTERU1000384, UTERU2000023, UTERU2000047, UTERU2000074, UTERU2000099, UTERU2000154, UTERU2000197, UTERU2000218, UTERU2000238, UTERU2000243, UTERU2000260, UTERU2000263, UTERU2000300, UTERU2000329, UTERU2000338, UTERU2000349, UTERU2000377, UTERU2000393, UTERU2000418, UTERU2000424, UTERU2000465, UTERU2000485, UTERU2000517, UTERU2000524, UTERU2000537, UTERU2000539, UTERU2000541, UTERU2000542, UTERU2000546, UTERU2000550, UTERU2000569, UTERU2000607, UTERU2000629, UTERU2000649, UTERU2000663, UTERU2000696, UTERU2000794, UTERU2000830, UTERU2000844, UTERU2000922, UTERU2000925, UTERU2001024, UTERU2001110, UTERU2001176, UTERU2001281, UTERU2001389, UTERU2001409, UTERU2001412, UTERU2001504, UTERU2001607, UTERU2001658, UTERU2001747, UTERU2001876, UTERU2002001, UTERU2002011, UTERU2002176, UTERU2002198, UTERU2002294, UTERU2002332, UTERU2002410, UTERU2002473, UTERU2002547, UTERU2002662, UTERU2002693, UTERU2002733, UTERU2002736, UTERU2002737, UTERU2002826, UTERU2002841, UTERU2002964, UTERU2002993, UTERU2003035, UTERU2003057, UTERU2003126, UTERU2003135, UTERU2003321, UTERU2003399, UTERU2003411, UTERU2003456, UTERU2003577, UTERU2003704, UTERU2003926, UTERU2003973, UTERU2004015, UTERU2004037, UTERU2004039, UTERU2004061, UTERU2004073, UTERU2004163, UTERU2004197, UTERU2004299, UTERU2004461, UTERU2004520, UTERU2004564, UTERU2004688, UTERU2004698, UTERU2004807, UTERU2004861, UTERU2004929, UTERU2005004, UTERU2005050, UTERU2005069, UTERU2005074, UTERU2005179, UTERU2005292, UTERU2005346, UTERU2005354, UTERU2005446, UTERU2005449, UTERU2005450, UTERU2005533, UTERU2005601, UTERU2005621, UTERU2005664, UTERU2005822, UTERU2005903, UTERU2005905, UTERU2006103, UTERU2006115, UTERU2006137, UTERU2006182, UTERU2006400, UTERU2006412, UTERU2006429, UTERU2006486, UTERU2006524, UTERU2006547, UTERU2006568, UTERU2006593, UTERU2006643, UTERU2006651, UTERU2006705, UTERU2006899, UTERU2007004, UTERU2007075, UTERU2007081, UTERU2007128, UTERU2007253, UTERU2007267, UTERU2007444, UTERU2007499, UTERU2007639, UTERU2007724, UTERU2007924, UTERU2007942, UTERU2008018, UTERU2008019, UTERU2008040, UTERU2008077, UTERU2008130, UTERU2008302, UTERU2008347, UTERU2008426, UTERU2008516, UTERU2008561, UTERU2008653, UTERU2008705, UTERU2008707, UTERU2008747, UTERU2008785, UTERU2008845, UTERU2008901, UTERU2008930, UTERU2008938, UTERU2008939, UTERU2008962, UTERU2009094, UTERU2009120, UTERU2009131, UTERU2009147, UTERU2009206, UTERU2009283, UTERU2009335, UTERU2009414, UTERU2009435, UTERU2009483, UTERU2009510, UTERU2009538, UTERU2009540, UTERU2009776, UTERU2009904, UTERU2009951, UTERU2009972, UTERU2010115, UTERU2010124, UTERU2010164, UTERU2010226, UTERU2010231, UTERU2010304, UTERU2010320, UTERU2010431, UTERU2010525, UTERU2010651, UTERU2010724, UTERU2010747, UTERU2011195, UTERU2011199, UTERU2011220, UTERU2011261, UTERU2011287, UTERU2011410, UTERU2011574, UTERU2011621, UTERU2011657, UTERU2011806, UTERU2011811, UTERU2011897, UTERU2011906, UTERU2011962, UTERU2011968, UTERU2012031, UTERU2012101, UTERU2012114, UTERU2012230, UTERU2012252, UTERU2012286, UTERU2012333, UTERU2012407, UTERU2012526, UTERU2012581, UTERU2012610, UTERU2012615, UTERU2012688, UTERU2012703, UTERU2012715, UTERU2012741, UTERU2012767, UTERU2012786, UTERU2012856, UTERU2012890, UTERU2012938, UTERU2012976, UTERU2013048, UTERU2013078, UTERU2013231, UTERU2013262, UTERU2013280, UTERU2013322, UTERU2013483, UTERU2013491, UTERU2013502, UTERU2013586, UTERU2013926, UTERU2013976, UTERU2014001, UTERU2014024, UTERU2014167, UTERU2014223, UTERU2014398, UTERU2014464, UTERU2014548, UTERU2014601, UTERU2014631, UTERU2014668, UTERU2014678, UTERU2014728, UTERU2014898, UTERU2014998, UTERU2015062, UTERU2015087, UTERU2015190, UTERU2015198, UTERU2015202, UTERU2015405, UTERU2015640, UTERU2015653, UTERU2015830, UTERU2015880, UTERU2016147, UTERU2016157, UTERU2016426, UTERU2016464, UTERU2016669, UTERU2016757, UTERU2016761, UTERU2016799, UTERU2016822, UTERU2016896, UTERU2016902, UTERU2016979, UTERU2016981, UTERU2017123, UTERU2017303, UTERU2017421, UTERU2017492, UTERU2017613, UTERU2017623, UTERU2017632, UTERU2017761, UTERU2017762, UTERU2017810, UTERU2017988, UTERU2018127, UTERU2018180, UTERU2018200, UTERU2018333, UTERU2018364, UTERU2018514, UTERU2018522, UTERU2018523, UTERU2018544, UTERU2018566, UTERU2018609, UTERU2018674, UTERU2018712, UTERU2018784, UTERU2018789, UTERU2018811, UTERU2018867, UTERU2018881, UTERU2018955, UTERU2019005, UTERU2019038, UTERU2019096, UTERU2019163, UTERU2019257, UTERU2019453, UTERU2019491, UTERU2019534, UTERU2019681, UTERU2019706, UTERU2019710, UTERU2019940, UTERU2019959, UTERU2019964, UTERU2020226, UTERU2020242, UTERU2020292, UTERU2020351, UTERU2020491, UTERU2020718, UTERU2021163, UTERU2021380, UTERU2021649, UTERU2021820, UTERU2022020, UTERU2022773, UTERU2022955, UTERU2022981, UTERU2023039, UTERU2023045, UTERU2023175, UTERU2023262, UTERU2023550, UTERU2023651, UTERU2023687, UTERU2023712, UTERU2023941, UTERU2024002, UTERU2024042, UTERU2024141, UTERU2024481, UTERU2024656, UTERU2024758, UTERU2024820, UTERU2024881, UTERU2024969, UTERU2025025, UTERU2025041, UTERU2025301, UTERU2025366, UTERU2025415, UTERU2025579, UTERU2025645, UTERU2025891, UTERU2026025, UTERU2026090, UTERU2026142, UTERU2026203, UTERU2026775, UTERU2027023, UTERU2027369, UTERU2027591, UTERU2027616, UTERU2027941, UTERU2028377, UTERU2028734, UTERU2029503, UTERU2029660, UTERU2029742, UTERU2029953, UTERU2030213, UTERU2030270, UTERU2030280, UTERU2031060, UTERU2031084, UTERU2031268, UTERU2031295, UTERU2031521, UTERU2031611, UTERU2031703, UTERU2031834, UTERU2031851, UTERU2032075, UTERU2032220, UTERU2032279, UTERU2032726, UTERU2033172, UTERU2033382, UTERU2033420, UTERU2033530, UTERU2033577, UTERU2034053, UTERU2034147, UTERU2034695, UTERU2035114, UTERU2035187, UTERU2035231, UTERU2035306, UTERU2035323, UTERU2035328, UTERU2035331, UTERU2035452, UTERU2035469, UTERU2035503, UTERU2035745, UTERU2035908, UTERU2035926, UTERU2035978, UTERU2036089, UTERU2036347, UTERU2036507, UTERU2036512, UTERU2036530, UTERU2036623, UTERU2036690, UTERU2037224, UTERU2037361, UTERU2037423, UTERU2037577, UTERU2037674, UTERU2037791, UTERU2037843, UTERU2038171, UTERU2038251, UTERU3000226, UTERU3000298, UTERU3000402, UTERU3000645, UTERU3000665, UTERU3000670, UTERU3000727, UTERU3000738, UTERU3000828, UTERU3000844, UTERU3000899, UTERU3000959, UTERU3001029, UTERU3001053, UTERU3001059, UTERU3001158, UTERU3001240, UTERU3001394, UTERU3001542, UTERU3001558, UTERU3001571, UTERU3001585, UTERU3001632, UTERU3001652, UTERU3001766, UTERU3001988, UTERU3002209, UTERU3002218, UTERU3002383, UTERU3002600, UTERU3002620, UTERU3002667, UTERU3002701, UTERU3002731, UTERU3002768, UTERU3002786, UTERU3002993, UTERU3003116, UTERU3003135, UTERU3003178, UTERU3003465, UTERU3003495, UTERU3003523, UTERU3003660, UTERU3003774, UTERU3003776, UTERU3004384, UTERU3004418, UTERU3004477, UTERU3004523, UTERU3004616, UTERU3004635, UTERU3004709, UTERU3004938, UTERU3004992, UTERU3005049, UTERU3005159, UTERU3005205, UTERU3005230, UTERU3005264, UTERU3005422, UTERU3005460, UTERU3005536, UTERU3005585, UTERU3005767, UTERU3005907, UTERU3005970, UTERU3006008, UTERU3006228, UTERU3006308, UTERU3006538, UTERU3006640, UTERU3006687, UTERU3006720, UTERU3006798, UTERU3006884, UTERU3007021, UTERU3007104, UTERU3007108, UTERU3007134, UTERU3007419, UTERU3007640, UTERU3007731, UTERU3007913, UTERU3008280, UTERU3008463, UTERU3008660, UTERU3008671, UTERU3008722, UTERU3008917, UTERU3009259, UTERU3009490, UTERU3009517, UTERU3009690, UTERU3009775, UTERU3009871, UTERU3009979, UTERU3009987, UTERU3010029, UTERU3010409, UTERU3010526, UTERU3010604, UTERU3010892, UTERU3010919, UTERU3011063, UTERU3011092, UTERU3011273, UTERU3011398, UTERU3011558, UTERU3011579, UTERU3011795, UTERU3011837, UTERU3012293, UTERU3012414, UTERU3012476, UTERU3012599, UTERU3012999, UTERU3013167, UTERU3013302, UTERU3013781, UTERU3014274, UTERU3014446, UTERU3014611, UTERU3014647, UTERU3014791, UTERU3014906, UTERU3015011, UTERU3015086, UTERU3015299, UTERU3015412, UTERU3015500, UTERU3015647, UTERU3015844, UTERU3016070, UTERU3016273, UTERU3016274, UTERU3016308, UTERU3016789, UTERU3017176, UTERU3017441, UTERU3017626, UTERU3017995, UTERU3018154, UTERU3018172, UTERU3018255, UTERU3018616, UTERU3018711, UTERU3019078

[0696] Of the 17,176 genes that include the cDNAs of the present invention, genes whose expression levels were high enough to detect in each of the NT2NE, NT2RI, NT2RM, NT2RP, NTISM, NTONG, and OCBBF libraries were analyzed for expression frequency. The analysis results are described below. Each is a relative value, where the expression level over all tissues is taken as 100. The larger this value, the greater the level of expression.

TABLE 35

| Clone Name | NT2NE | NT2RI | NT2RM | NT2RP | NTISM | NTONG | OCBBF |
|---|---|---|---|---|---|---|---|
| 3NB691000116 | 0 | 0 | 0 | 0 | 0 | 0 | 2.020 |
| 3NB691000129 | 0 | 4.588 | 0 | 6.085 | 0 | 0 | 0 |
| 3NB691000173 | 5.723 | 0 | 0 | 0 | 0 | 0 | 0 |
| 3NB692000281 | 0 | 0.400 | 0 | 0.531 | 0 | 0 | 0 |
| 3NB692000374 | 0 | 0 | 0 | 0 | 0 | 0 | 2.694 |
| 3NB692000545 | 0 | 5.127 | 0 | 13.599 | 0 | 0 | 0 |
| 3NB692000912 | 5.108 | 0.854 | 0 | 1.132 | 0 | 3.463 | 0 |
| 3NB692001002 | 0 | 0 | 0 | 0 | 0 | 0 | 2.430 |
| 3NB692001022 | 0 | 0 | 0 | 0 | 0 | 0 | 3.091 |
| 3NB692001288 | 0 | 0 | 0 | 0 | 0 | 0 | 1.861 |
| 3NB692001334 | 1.946 | 0 | 0 | 0.647 | 0 | 1.978 | 1.667 |
| 3NB692001442 | 4.378 | 0 | 0 | 0 | 0 | 0 | 0 |
| 3NB692001496 | 27.896 | 0 | 0 | 0 | 0 | 0 | 0 |
| 3NB692001528 | 0 | 0 | 0 | 0 | 0 | 0 | 2.922 |
| 3NB692001719 | 0 | 0 | 0 | 0 | 0 | 0 | 8.556 |
| ADIPS2000425 | 0 | 0 | 0 | 0 | 0 | 0 | 0.964 |
| ADRGL1000002 | 0 | 0 | 0 | 0 | 0 | 0 | 53.185 |
| ADRGL1000065 | 0 | 0 | 0 | 0 | 0 | 0 | 7.006 |
| ADRGL1000144 | 0 | 0 | 0 | 16.110 | 0 | 0 | 4.152 |
| ADRGL2000006 | 3.767 | 1.889 | 0 | 0 | 0 | 0 | 12.914 |
| ADRGL2000042 | 9.204 | 0 | 0 | 0 | 0 | 0 | 0 |
| ADRGL2000097 | 0 | 0 | 0 | 5.358 | 0 | 0 | 0 |
| ADRGL2002477 | 0 | 0 | 0 | 0 | 0 | 0 | 4.227 |
| ADRGL2002679 | 0 | 0 | 0 | 0 | 0 | 0 | 15.458 |
| ADRGL2009273 | 0 | 0 | 0 | 0 | 0 | 0 | 3.451 |
| ADRGL2012179 | 0 | 0 | 0 | 0 | 0 | 0 | 17.655 |
| ASTRO1000165 | 0 | 8.055 | 0 | 0 | 0 | 0 | 11.014 |
| ASTRO2000046 | 0 | 10.381 | 0 | 4.917 | 0 | 0 | 1.014 |
| ASTRO2000381 | 0 | 0 | 0 | 0 | 0 | 0 | 23.405 |
| ASTRO2000480 | 0 | 0 | 0 | 6.823 | 0 | 0 | 0 |
| ASTRO2000801 | 0 | 0 | 0 | 0 | 0 | 0 | 1.267 |
| ASTRO2000914 | 0 | 3.537 | 0 | 0 | 0 | 0 | 0 |
| ASTRO2001029 | 0 | 2.279 | 0 | 12.089 | 0 | 0 | 1.558 |
| ASTRO2001076 | 0 | 0 | 0 | 3.426 | 0 | 0 | 5.297 |
| ASTRO2001107 | 0 | 0 | 0 | 0 | 0 | 0 | 9.074 |
| ASTRO2001823 | 0 | 0 | 0 | 3.498 | 0 | 0 | 0 |
| ASTRO2002202 | 0 | 0 | 0 | 5.554 | 0 | 0 | 0 |
| ASTRO2002693 | 25.689 | 0 | 0 | 0 | 0 | 0 | 0 |
| ASTRO2003316 | 0 | 10.721 | 0 | 0 | 0 | 0 | 0 |
| ASTRO2003461 | 0 | 0 | 0 | 0 | 0 | 0 | 14.800 |
| ASTRO2003632 | 0 | 0.755 | 0 | 1.001 | 0 | 0 | 0 |
| ASTRO2004032 | 0 | 0 | 0 | 0 | 0 | 0 | 15.142 |
| ASTRO2004974 | 0 | 0 | 0 | 0 | 0 | 0 | 4.828 |
| ASTRO2005423 | 12.479 | 0 | 0 | 8.299 | 0 | 0 | 12.832 |
| ASTRO2005553 | 0 | 0 | 0 | 0 | 0 | 0 | 6.438 |
| ASTRO2005687 | 0 | 0 | 0 | 0 | 0 | 0 | 1.385 |
| ASTRO2008216 | 0 | 0 | 0 | 0 | 0 | 0 | 3.964 |
| ASTRO2008409 | 0 | 23.625 | 0 | 31.333 | 0 | 0 | 0 |
| ASTRO2009068 | 0 | 0 | 0 | 0 | 0 | 0 | 7.029 |
| ASTRO2009118 | 0 | 28.385 | 0 | 0 | 0 | 0 | 0 |
| ASTRO2010819 | 0 | 0 | 0 | 1.622 | 0 | 0 | 6.687 |
| ASTRO2010996 | 0 | 34.405 | 0 | 0 | 0 | 0 | 0 |
| ASTRO2011422 | 0 | 0 | 0 | 17.485 | 0 | 0 | 18.025 |
| ASTRO2012552 | 5.357 | 2.686 | 0 | 0 | 0 | 0 | 0 |
| ASTRO2013585 | 3.533 | 1.772 | 0 | 2.350 | 0 | 0 | 0 |
| ASTRO2015529 | 0 | 0 | 0 | 0 | 0 | 13.655 | 0 |
| ASTRO2016148 | 0 | 0 | 0 | 0 | 0 | 0 | 26.393 |
| ASTRO2016491 | 0 | 0 | 0 | 3.641 | 0 | 0 | 1.877 |
| ASTRO2016819 | 0 | 23.453 | 0 | 0 | 0 | 0 | 0 |
| BGGI12000054 | 0 | 0.856 | 0 | 1.135 | 0 | 3.472 | 0 |
| BGGI12000533 | 0 | 0 | 0 | 0 | 0 | 0 | 2.805 |
| BGGI12000616 | 0 | 0 | 0 | 2.155 | 0 | 0 | 0 |
| BGGI12000684 | 0 | 4.483 | 0 | 0 | 0 | 18.183 | 0 |
| BGGI12000839 | 0 | 0 | 0 | 0 | 0 | 0 | 1.832 |
| BGGI12001002 | 0 | 0 | 0 | 0 | 0 | 13.083 | 0 |
| BGGI12001075 | 0 | 7.194 | 0 | 0 | 0 | 0 | 2.459 |
| BGGI12001097 | 0 | 2.042 | 0 | 0 | 0 | 0 | 0 |
| BGGI12001682 | 0 | 0 | 0 | 0 | 0 | 0 | 1.283 |
| BLADE2004089 | 0 | 0 | 0 | 0 | 0 | 0 | 12.311 |
| BLADE2004849 | 26.862 | 0 | 0 | 0 | 0 | 0 | 0 |
| BLADE2006830 | 0 | 0 | 0 | 0 | 0 | 24.778 | 0 |
| BLADE2008461 | 0 | 0 | 0 | 5.974 | 0 | 0 | 0 |
| BNGH41000098 | 0 | 0 | 0 | 0 | 0 | 0 | 3.149 |
| BNGH41000137 | 0 | 0 | 0 | 0 | 0 | 0 | 5.390 |
| BNGH41000153 | 0 | 8.539 | 0 | 11.325 | 0 | 0 | 0 |
| BNGH41000198 | 0 | 15.102 | 0 | 0 | 0 | 0 | 0 |
| BNGH42000360 | 0.570 | 0.286 | 0 | 0 | 0 | 0 | 0 |
| BNGH42000739 | 0 | 0 | 0 | 2.999 | 0 | 0 | 1.546 |
| BNGH42002168 | 0 | 0 | 38.287 | 0 | 0 | 9.806 | 0 |
| BNGH42006135 | 2.393 | 1.200 | 0 | 6.365 | 0 | 0 | 3.281 |
| BNGH42007460 | 0 | 1.831 | 0 | 0 | 0 | 0 | 1.252 |
| BNGH42007709 | 0.834 | 0 | 0 | 0 | 0 | 0 | 0 |
| BNGH42007788 | 0 | 0 | 0 | 7.419 | 0 | 0 | 0 |
| BNGH42007798 | 0 | 17.846 | 0 | 0 | 0 | 0 | 0 |
| BNGH42008603 | 5.242 | 0 | 0 | 0 | 0 | 0 | 5.390 |
| BNGH42008743 | 0 | 0 | 0 | 3.710 | 0 | 0 | 1.912 |
| BNGH42009025 | 5.052 | 0 | 0 | 0 | 0 | 0 | 0 |
| BRACE1000020 | 40.792 | 0 | 0 | 27.128 | 0 | 0 | 0 |
| BRACE1000042 | 0 | 0 | 0 | 0 | 0 | 0 | 1.891 |
| BRACE1000070 | 0 | 0 | 0 | 8.617 | 0 | 13.175 | 2.221 |
| BRACE1000087 | 0 | 0 | 0 | 35.366 | 0 | 0 | 0 |
| BRACE1000115 | 1.357 | 0 | 0 | 0 | 0 | 0 | 0 |
| BRACE1000131 | 3.775 | 0 | 0 | 2.510 | 0 | 0 | 1.294 |
| BRACE1000186 | 7.836 | 0 | 0 | 5.211 | 0 | 15.935 | 0 |
| BRACE1000187 | 0 | 0 | 0 | 0 | 0 | 0 | 23.470 |
| BRACE2000307 | 0 | 4.281 | 0 | 8.516 | 0 | 0 | 10.243 |
| BRACE2000332 | 0 | 0 | 0 | 0 | 0 | 0 | 3.372 |
| BRACE2000347 | 9.369 | 0 | 0 | 6.230 | 0 | 0 | 0 |
| BRACE2000487 | 29.738 | 0 | 0 | 0 | 0 | 0 | 0 |
| BRACE2000525 | 0 | 0 | 0 | 0 | 0 | 0 | 2.018 |
| BRACE2000698 | 0 | 0 | 0 | 0 | 0 | 63.412 | 0 |
| BRACE2000733 | 0 | 0 | 0 | 0 | 0 | 0 | 21.894 |
| BRACE2000975 | 2.322 | 0 | 0 | 1.544 | 0 | 0 | 7.958 |
| BRACE2001107 | 0 | 26.748 | 0 | 0 | 0 | 0 | 0 |
| BRACE2001143 | 0 | 2.700 | 0 | 0 | 0 | 0 | 0 |
| BRACE2001151 | 46.787 | 0 | 0 | 0 | 0 | 0 | 0 |
| BRACE2001236 | 0 | 0 | 0 | 0 | 0 | 0 | 22.352 |
| BRACE2001477 | 0 | 12.500 | 0 | 0 | 0 | 25.347 | 0 |
| BRACE2001497 | 0 | 3.386 | 0 | 0 | 0 | 0 | 11.574 |
| BRACE2001508 | 0 | 0 | 0 | 21.242 | 0 | 0 | 0 |
| BRACE2001692 | 0 | 0 | 0 | 1.459 | 0 | 0 | 0 |
| BRACE2001855 | 4.170 | 4.182 | 0 | 0 | 0 | 0 | 0 |
| BRACE2001881 | 83.623 | 0 | 0 | 0 | 0 | 0 | 0 |
| BRACE2001892 | 2.196 | 1.651 | 0 | 2.920 | 0 | 0 | 7.526 |
| BRACE2001944 | 0 | 0 | 0 | 0 | 0 | 0 | 15.586 |
| BRACE2001971 | 8.129 | 0 | 0 | 0 | 0 | 0 | 2.786 |
| BRACE2002050 | 0 | 0 | 0 | 0 | 0 | 0 | 3.602 |
| BRACE2002091 | 7.653 | 0 | 0 | 0 | 0 | 0 | 0 |
| BRACE2002356 | 0 | 0 | 0 | 43.792 | 0 | 0 | 0 |
| BRACE2002441 | 0 | 2.047 | 0 | 0 | 0 | 0 | 1.399 |
| BRACE2002582 | 0 | 23.746 | 0 | 0 | 0 | 0 | 0 |
| BRACE2002649 | 0 | 0 | 0 | 0 | 0 | 0 | 13.153 |
| BRACE2002677 | 0 | 0 | 0 | 0 | 0 | 0 | 2.398 |
| BRACE2002796 | 0 | 0 | 0 | 0 | 0 | 0 | 63.640 |
| BRACE2002803 | 0 | 0 | 0 | 0 | 0 | 0 | 22.636 |
| BRACE2002861 | 0 | 0 | 0 | 0 | 0 | 0 | 6.448 |
| BRACE2003037 | 0 | 0 | 0 | 0 | 0 | 0 | 5.365 |
| BRACE2003110 | 48.819 | 0 | 0 | 0 | 0 | 0 | 16.734 |
| BRACE2003172 | 0 | 0 | 0 | 0 | 0 | 0 | 17.361 |
| BRACE2003254 | 3.281 | 0 | 0 | 2.182 | 0 | 0 | 5.623 |
| BRACE2003304 | 0 | 19.864 | 0 | 10.538 | 0 | 0 | 2.716 |
| BRACE2003319 | 0 | 0 | 65.930 | 0 | 0 | 0 | 0 |
| BRACE2003527 | 9.342 | 0 | 0 | 0 | 0 | 0 | 0 |
| BRACE2003609 | 32.942 | 0 | 0 | 21.907 | 0 | 0 | 11.292 |
| BRACE2003628 | 0 | 0 | 0 | 16.442 | 0 | 0 | 0 |
| BRACE2003785 | 7.043 | 3.532 | 0 | 2.342 | 0 | 0 | 1.207 |
| BRACE2003827 | 15.876 | 4.776 | 0 | 0 | 0 | 0 | 0 |
| BRACE2003845 | 0 | 0 | 0 | 10.981 | 0 | 0 | 5.660 |
| BRACE2003846 | 0 | 1.184 | 0 | 3.141 | 0 | 0 | 3.238 |
| BRACE2003892 | 0 | 0 | 0 | 0 | 0 | 0 | 5.422 |
| BRACE2003904 | 0 | 4.711 | 0 | 6.248 | 0 | 0 | 0 |
| BRACE2003905 | 0 | 0 | 0 | 0 | 0 | 0 | 39.290 |
| BRACE2003944 | 0 | 0.941 | 0 | 0 | 0 | 34.336 | 0 |
| BRACE2005087 | 0 | 3.770 | 0 | 2.500 | 0 | 0 | 9.020 |
| BRACE2005151 | 7.615 | 0 | 0 | 0 | 0 | 0 | 0 |
| BRACE2005189 | 0 | 46.047 | 0 | 0 | 0 | 0 | 0 |
| BRACE2005196 | 0 | 0 | 0 | 0 | 0 | 0 | 39.504 |
| BRACE2005395 | 34.170 | 0 | 0 | 0 | 0 | 0 | 11.713 |
| BRACE2005434 | 2.499 | 0 | 0 | 0 | 0 | 0 | 0.856 |
| BRACE2005681 | 0 | 0 | 0 | 0 | 0 | 0 | 4.961 |
| BRACE2005719 | 10.763 | 0 | 0 | 0 | 0 | 0 | 0 |
| BRACE2005875 | 0 | 0 | 0 | 0 | 0 | 0 | 5.348 |
| BRACE2005937 | 0 | 0 | 0 | 0 | 0 | 0 | 7.504 |
| BRACE2006055 | 14.499 | 0 | 0 | 0 | 0 | 0 | 2.485 |
| BRACE2006162 | 0 | 0 | 0 | 0 | 0 | 11.404 | 0 |
| BRACE2006258 | 2.969 | 5.954 | 0 | 0 | 0 | 0 | 0 |
| BRACE2006281 | 0 | 0 | 86.959 | 0 | 0 | 0 | 0 |
| BRACE2006319 | 0 | 0 | 0 | 8.450 | 0 | 0 | 8.711 |
| BRACE2006354 | 0 | 0 | 0 | 0 | 0 | 0 | 23.191 |
| BRACE2006514 | 0 | 7.894 | 0 | 0 | 0 | 0 | 2.158 |
| BRACE2006636 | 0 | 0 | 0 | 0 | 0 | 0 | 17.031 |
| BRACE2006743 | 0 | 0 | 0 | 0 | 0 | 0 | 11.047 |
| BRACE2006833 | 0 | 0 | 0 | 0 | 0 | 0 | 46.671 |
| BRACE2006859 | 0 | 0 | 0 | 0 | 0 | 74.880 | 0 |
| BRACE2006900 | 0 | 0.935 | 0 | 0 | 0 | 0 | 0 |
| BRACE2006937 | 4.850 | 0 | 0 | 0 | 0 | 0 | 9.976 |
| BRACE2007064 | 0 | 0 | 0 | 0 | 0 | 0 | 8.074 |
| BRACE2007089 | 0 | 1.539 | 0 | 0 | 0 | 0 | 0 |
| BRACE2007174 | 0 | 28.390 | 0 | 0 | 0 | 0 | 0 |
| BRACE2007401 | 0 | 3.321 | 0 | 0 | 0 | 0 | 2.270 |
| BRACE2007518 | 0 | 0 | 0 | 0 | 0 | 0 | 8.458 |
| BRACE2007577 | 0 | 0 | 0 | 0 | 0 | 0 | 4.866 |
| BRACE2007641 | 0 | 0 | 0 | 0 | 0 | 0 | 33.106 |
| BRACE2007671 | 5.603 | 2.810 | 0 | 3.726 | 0 | 0 | 0 |
| BRACE2007760 | 0 | 0 | 0 | 0 | 0 | 0 | 16.281 |
| BRACE2007768 | 0 | 0 | 0 | 0 | 0 | 0 | 11.887 |
| BRACE2007902 | 0 | 0 | 0 | 77.250 | 0 | 0 | 0 |
| BRACE2007937 | 0 | 4.615 | 0 | 0 | 0 | 0 | 25.242 |
| BRACE2007952 | 0 | 0 | 0 | 0 | 0 | 0 | 3.012 |
| BRACE2008358 | 0 | 0 | 0 | 0 | 0 | 0 | 5.630 |
| BRACE2008380 | 0 | 3.550 | 0 | 0 | 0 | 0 | 2.427 |
| BRACE2008402 | 0 | 0 | 0 | 0 | 0 | 0 | 5.209 |
| BRACE2008481 | 10.117 | 0 | 0 | 0 | 0 | 0 | 0 |
| BRACE2008653 | 1.911 | 3.834 | 0 | 2.542 | 0 | 0 | 3.276 |
| BRACE2008968 | 2.107 | 0 | 0 | 1.401 | 0 | 0 | 0 |
| BRACE2009037 | 5.291 | 1.061 | 0 | 0 | 0 | 0 | 0.363 |
| BRACE2009045 | 0 | 0 | 0 | 0 | 0 | 0 | 22.440 |
| BRACE2009291 | 0 | 0 | 0 | 3.188 | 0 | 9.749 | 0 |
| BRACE2009307 | 0 | 0 | 0 | 0 | 0 | 0 | 18.399 |
| BRACE2009558 | 10.420 | 0 | 0 | 6.930 | 0 | 21.191 | 0 |
| BRACE2010669 | 0 | 0 | 0 | 0 | 0 | 0 | 31.677 |
| BRACE2011265 | 0 | 0 | 0 | 0 | 0 | 0 | 4.608 |
| BRACE2012317 | 0 | 1.247 | 0 | 0 | 0 | 5.057 | 1.705 |
| BRACE2012528 | 0 | 0.862 | 0 | 1.143 | 0 | 0 | 3.535 |
| BRACE2012814 | 5.557 | 0 | 0 | 3.696 | 0 | 0 | 3.810 |
| BRACE2014306 | 17.640 | 0 | 0 | 0 | 0 | 0 | 0 |
| BRACE2014850 | 0 | 0 | 0 | 0 | 0 | 0 | 9.317 |
| BRACE2015058 | 0 | 0 | 0 | 10.567 | 0 | 0 | 5.447 |
| BRACE2015132 | 0 | 29.940 | 0 | 0 | 0 | 0 | 0 |
| BRACE2017574 | 0 | 9.310 | 0 | 0 | 0 | 0 | 12.729 |
| BRACE2018337 | 0 | 4.328 | 0 | 0 | 0 | 0 | 5.918 |
| BRACE2019147 | 0 | 0 | 0 | 5.162 | 0 | 0 | 2.660 |
| BRACE2021014 | 0 | 0 | 0 | 0 | 0 | 0 | 14.719 |
| BRACE2021541 | 0 | 28.929 | 0 | 0 | 0 | 0 | 0 |
| BRACE2022389 | 0 | 0 | 0 | 0 | 0 | 0 | 13.200 |
| BRACE2022549 | 0 | 0 | 0 | 0 | 0 | 0 | 63.640 |
| BRACE2022638 | 0 | 2.709 | 0 | 3.593 | 0 | 0 | 2.778 |
| BRACE2025492 | 0 | 0 | 0 | 0 | 0 | 0 | 32.696 |
| BRACE2026054 | 0 | 41.542 | 0 | 0 | 0 | 0 | 0 |
| BRACE2026725 | 66.449 | 0 | 0 | 0 | 0 | 0 | 0 |
| BRACE2027258 | 0 | 0 | 0 | 0 | 0 | 0 | 41.974 |
| BRACE2027643 | 0 | 0 | 0 | 0 | 0 | 0 | 17.893 |
| BRACE2032477 | 0 | 0 | 0 | 0 | 0 | 0 | 20.768 |
| BRACE2035278 | 0 | 0 | 0 | 0 | 0 | 0 | 46.671 |
| BRACE2037295 | 23.776 | 0 | 0 | 0 | 0 | 0 | 0 |
| BRACE2037310 | 0 | 0 | 0 | 0 | 0 | 0 | 48.748 |
| BRACE2039624 | 0 | 3.516 | 0 | 4.663 | 0 | 0 | 2.404 |
| BRACE2044286 | 0 | 33.923 | 0 | 0 | 0 | 0 | 0 |
| BRACE2045954 | 0 | 0 | 0 | 0 | 0 | 0 | 33.925 |
| BRACE3001113 | 0 | 0 | 0 | 0 | 0 | 0 | 32.696 |
| BRACE3001973 | 0 | 0 | 0 | 0 | 0 | 0 | 63.640 |
| BRACE3002184 | 0 | 0 | 0 | 0 | 0 | 0 | 33.290 |
| BRACE3003026 | 0 | 59.349 | 0 | 0 | 0 | 0 | 0 |
| BRACE3003053 | 0 | 0 | 0 | 0 | 0 | 0 | 63.640 |
| BRACE3004371 | 0 | 0 | 0 | 0 | 0 | 0 | 9.334 |
| BRACE3005938 | 0 | 2.001 | 0 | 2.654 | 0 | 0 | 1.368 |
| BRACE3010428 | 0 | 2.080 | 0 | 0 | 0 | 0 | 4.266 |
| BRACE3011271 | 0 | 0 | 0 | 0 | 0 | 0 | 27.420 |
| BRACE3013780 | 0 | 0 | 0 | 0 | 0 | 0 | 5.958 |
| BRACE3027931 | 0 | 0 | 0 | 0 | 0 | 0 | 41.796 |
| BRACE3030538 | 0 | 0 | 0 | 0 | 0 | 0 | 63.640 |
| BRALZ2009482 | 0 | 2.026 | 0 | 0 | 0 | 2.739 | 0 |
| BRAMY1000173 | 0 | 0 | 0 | 0 | 0 | 0 | 26.275 |
| BRAMY2000354 | 4.980 | 0 | 0 | 0 | 0 | 0 | 0 |
| BRAMY2000562 | 0 | 0 | 0 | 0 | 0 | 0 | 4.775 |
| BRAMY2004363 | 0 | 3.715 | 0 | 0 | 0 | 0 | 10.159 |
| BRAMY2007567 | 0 | 0 | 0 | 0 | 0 | 0 | 9.640 |
| BRAMY2007613 | 0 | 4.869 | 0 | 0 | 0 | 0 | 8.321 |
| BRAMY2008382 | 56.197 | 28.179 | 0 | 0 | 0 | 0 | 0 |
| BRAMY2009013 | 0 | 11.068 | 0 | 14.679 | 0 | 0 | 52.965 |
| BRAMY2009508 | 0 | 13.626 | 0 | 0 | 0 | 0 | 0 |
| BRAMY2010357 | 0 | 0 | 0 | 0 | 0 | 0 | 18.549 |
| BRAMY2010464 | 0 | 40.041 | 0 | 0 | 0 | 0 | 0 |
| BRAMY2012091 | 0 | 0 | 0 | 0 | 0 | 0 | 7.377 |
| BRAMY2012581 | 0 | 0 | 0 | 0 | 0 | 0 | 28.378 |
| BRAMY2013169 | 0 | 0 | 0 | 0 | 0 | 0 | 14.126 |
| BRAMY2013621 | 0 | 0 | 0 | 70.518 | 0 | 0 | 0 |
| BRAMY2013659 | 0 | 0 | 0 | 0 | 0 | 0 | 36.086 |
| BRAMY2013756 | 0 | 68.630 | 0 | 0 | 0 | 0 | 0 |
| BRAMY2014205 | 0 | 0 | 0 | 0 | 0 | 0 | 17.799 |
| BRAMY2015251 | 0 | 0 | 0 | 0 | 0 | 0 | 7.608 |
| BRAMY2015705 | 0 | 0 | 0 | 70.518 | 0 | 0 | 0 |
| BRAMY2016009 | 0 | 0 | 0 | 12.604 | 0 | 0 | 6.496 |
| BRAMY2016251 | 0 | 0 | 0 | 0 | 0 | 0 | 8.934 |
| BRAMY2016706 | 0 | 9.007 | 0 | 0 | 0 | 0 | 0 |
| BRAMY2018785 | 0 | 0 | 0 | 16.390 | 0 | 0 | 0 |
| BRAMY2019554 | 2.892 | 1.450 | 0 | 3.847 | 0 | 0 | 15.862 |
| BRAMY2019600 | 0 | 0 | 0 | 0 | 0 | 0 | 30.091 |
| BRAMY2019963 | 0 | 0 | 0 | 0 | 0 | 0 | 25.378 |
| BRAMY2020106 | 0 | 0 | 0 | 0 | 0 | 0 | 27.775 |
| BRAMY2022493 | 0 | 0 | 0 | 6.394 | 0 | 0 | 3.296 |
| BRAMY2022525 | 0 | 40.075 | 0 | 0 | 0 | 0 | 0 |
| BRAMY2023863 | 0 | 64.331 | 0 | 0 | 0 | 0 | 0 |
| BRAMY2023939 | 22.151 | 11.107 | 0 | 0 | 0 | 0 | 15.186 |
| BRAMY2027587 | 0 | 0 | 0 | 0 | 0 | 0 | 16.588 |
| BRAMY2028269 | 0 | 29.661 | 0 | 0 | 0 | 0 | 0 |
| BRAMY2028282 | 0 | 0 | 0 | 0 | 0 | 0 | 30.319 |
| BRAMY2028740 | 0 | 1.692 | 0 | 2.244 | 0 | 0 | 0 |
| BRAMY2028796 | 0 | 0 | 0 | 0 | 0 | 0 | 3.693 |
| BRAMY2029988 | 0 | 0 | 0 | 0 | 0 | 0 | 14.633 |
| BRAMY2031516 | 0 | 0 | 0 | 17.802 | 0 | 0 | 0 |
| BRAMY2032087 | 0 | 0 | 0 | 0 | 0 | 0 | 6.018 |
| BRAMY2036459 | 0 | 0 | 0 | 0 | 0 | 0 | 2.341 |
| BRAMY2040095 | 1.239 | 1.864 | 0 | 2.472 | 0 | 0 | 0 |
| BRAMY3002991 | 14.210 | 0 | 0 | 0 | 0 | 0 | 0 |
| BRAMY3003026 | 0 | 0 | 0 | 0 | 0 | 0 | 55.216 |
| BRAMY3004377 | 9.017 | 1.507 | 0 | 3.998 | 0 | 6.112 | 2.061 |
| BRAMY3005184 | 0 | 0 | 0 | 0 | 0 | 0 | 27.836 |
| BRAMY3005912 | 0 | 0 | 0 | 0 | 0 | 0 | 26.605 |
| BRAMY3008044 | 0 | 3.260 | 0 | 0 | 0 | 0 | 20.056 |
| BRAMY3010008 | 0 | 0 | 0 | 0 | 0 | 4.289 | 0 |
| BRAMY4002628 | 0 | 12.908 | 0 | 17.119 | 0 | 0 | 8.824 |
| BRAWH1000007 | 0 | 0 | 0 | 21.657 | 0 | 0 | 11.163 |
| BRAWH1000037 | 0 | 3.314 | 0 | 4.395 | 0 | 0 | 0 |
| BRAWH1000040 | 0 | 1.250 | 0 | 1.658 | 0 | 0 | 5.129 |
| BRAWH1000045 | 3.628 | 1.819 | 0 | 0 | 0 | 0 | 4.974 |
| BRAWH1000093 | 0 | 0 | 0 | 0 | 0 | 0 | 2.292 |
| BRAWH1000127 | 0 | 0 | 0 | 0 | 0 | 0 | 3.971 |
| BRAWH1000162 | 0 | 0 | 0 | 0 | 0 | 0 | 9.069 |
| BRAWH2000082 | 0 | 1.394 | 0 | 5.547 | 0 | 0 | 0 |
| BRAWH2000274 | 0 | 0 | 0 | 0 | 0 | 0 | 7.357 |
| BRAWH2000460 | 0 | 5.545 | 0 | 1.471 | 0 | 0 | 1.516 |
| BRAWH2000488 | 0 | 18.321 | 0 | 0 | 0 | 0 | 12.525 |
| BRAWH2000522 | 13.137 | 0 | 0 | 0 | 0 | 0 | 2.252 |
| BRAWH2000588 | 4.547 | 2.280 | 0 | 0 | 0 | 0 | 1.559 |
| BRAWH2000633 | 0 | 0 | 0 | 0 | 0 | 0 | 4.941 |
| BRAWH2000636 | 1.915 | 0 | 0 | 5.094 | 0 | 0 | 5.908 |
| BRAWH2000686 | 0 | 0 | 0 | 0 | 0 | 0 | 10.630 |
| BRAWH2000697 | 3.666 | 1.838 | 0 | 2.438 | 0 | 7.455 | 0 |
| BRAWH2000839 | 1.488 | 2.239 | 0 | 1.980 | 0 | 0 | 0.510 |
| BRAWH2000924 | 0 | 0 | 0 | 0 | 0 | 0 | 0.713 |
| BRAWH2000944 | 0 | 9.480 | 0 | 0 | 0 | 0 | 0 |
| BRAWH2001037 | 0 | 0 | 0 | 0 | 0 | 0 | 24.911 |
| BRAWH2001092 | 0 | 2.555 | 0 | 0.847 | 0 | 0 | 2.838 |
| BRAWH2001141 | 0 | 0 | 0 | 0 | 0 | 0 | 6.313 |
| BRAWH2001166 | 0 | 5.736 | 0 | 22.824 | 0 | 0 | 3.921 |
| BRAWH2001171 | 0 | 2.245 | 0 | 8.931 | 0 | 0 | 15.345 |
| BRAWH2001186 | 0 | 0 | 81.991 | 0 | 0 | 0 | 0 |
| BRAWH2001321 | 6.222 | 1.560 | 0 | 0 | 0 | 0 | 7.465 |
| BRAWH2001412 | 54.493 | 0 | 0 | 0 | 0 | 0 | 0 |
| BRAWH2001424 | 0 | 0 | 0 | 0 | 0 | 37.524 | 0 |
| BRAWH2001439 | 3.729 | 1.870 | 0 | 4.960 | 0 | 0 | 7.669 |
| BRAWH2001484 | 0 | 0 | 0 | 0 | 0 | 0 | 13.199 |
| BRAWH2001530 | 0 | 0 | 0 | 0 | 0 | 0 | 9.483 |
| BRAWH2001662 | 0 | 0 | 0 | 22.162 | 0 | 0 | 5.712 |
| BRAWH2001862 | 0 | 0 | 96.642 | 0 | 0 | 0 | 0 |
| BRAWH2002560 | 0 | 0 | 0 | 0 | 0 | 0 | 24.052 |
| BRAWH2002811 | 0 | 15.672 | 0 | 0 | 0 | 0 | 0 |
| BRAWH2002967 | 0 | 0 | 0 | 0 | 0 | 0 | 55.403 |
| BRAWH2003662 | 0 | 0 | 0 | 0 | 0 | 0 | 7.699 |
| BRAWH2003693 | 0 | 12.434 | 0 | 0 | 0 | 0 | 0 |
| BRAWH2003818 | 0 | 0 | 0 | 7.294 | 0 | 0 | 11.280 |
| BRAWH2004095 | 0 | 0 | 0 | 5.698 | 0 | 0 | 7.343 |
| BRAWH2005225 | 0 | 0 | 0 | 0 | 0 | 0 | 21.603 |
| BRAWH2005517 | 0 | 0 | 0 | 0 | 0 | 0 | 55.403 |
| BRAWH2005661 | 0 | 0 | 0 | 0 | 0 | 0 | 3.972 |
| BRAWH2006044 | 0 | 31.972 | 0 | 0 | 0 | 0 | 0 |
| BRAWH2006622 | 59.966 | 0 | 0 | 0 | 0 | 0 | 0 |
| BRAWH2007605 | 0 | 7.455 | 0 | 9.887 | 0 | 0 | 2.548 |
| BRAWH2007664 | 37.081 | 0 | 0 | 0 | 0 | 0 | 0 |
| BRAWH2007800 | 0 | 0 | 0 | 0 | 0 | 0 | 2.918 |
| BRAWH2008058 | 0 | 0 | 0 | 0 | 0 | 0 | 29.101 |
| BRAWH2008255 | 15.311 | 0 | 0 | 0 | 0 | 0 | 5.248 |
| BRAWH2008706 | 0 | 0 | 0 | 0 | 0 | 0 | 3.572 |
| BRAWH2009626 | 0 | 0 | 0 | 0 | 0 | 0 | 55.403 |
| BRAWH2010329 | 0 | 0 | 0 | 0 | 0 | 0 | 6.217 |
| BRAWH2010754 | 40.540 | 0 | 0 | 0 | 0 | 0 | 0 |
| BRAWH2010980 | 25.609 | 0 | 0 | 0 | 0 | 0 | 0 |
| BRAWH2011286 | 0 | 0 | 0 | 21.508 | 0 | 0 | 0 |
| BRAWH2011823 | 78.374 | 0 | 0 | 0 | 0 | 0 | 0 |
| BRAWH2011920 | 0 | 0 | 0 | 0 | 0 | 0 | 23.538 |
| BRAWH2012164 | 0 | 0 | 0 | 0 | 0 | 0 | 25.884 |
| BRAWH2012866 | 0 | 0 | 0 | 0 | 0 | 0 | 18.485 |
| BRAWH2014188 | 0 | 5.204 | 0 | 0 | 0 | 0 | 2.668 |
| BRAWH2014379 | 0 | 37.724 | 0 | 0 | 0 | 0 | 0 |
| BRAWH2014645 | 0 | 1.921 | 0 | 7.643 | 0 | 0 | 6.566 |
| BRAWH2014662 | 56.250 | 0 | 0 | 0 | 0 | 0 | 0 |
| BRAWH2016446 | 0 | 0 | 0 | 20.968 | 0 | 0 | 10.808 |
| BRAWH2017002 | 0 | 0 | 0 | 0 | 0 | 0 | 12.365 |
| BRAWH2017304 | 0 | 0 | 0 | 40.020 | 0 | 0 | 0 |
| BRAWH2017685 | 1.839 | 0 | 0 | 3.669 | 0 | 3.740 | 5.044 |
| BRAWH2018526 | 0 | 0.559 | 0 | 0 | 0 | 0 | 0 |
| BRAWH3000088 | 4.192 | 8.409 | 0 | 2.788 | 0 | 0 | 4.311 |
| BRAWH3001918 | 0 | 0 | 0 | 0 | 0 | 0 | 17.250 |
| BRAWH3002574 | 0 | 12.014 | 0 | 0 | 0 | 0 | 8.213 |
| BRAWH3002853 | 0 | 1.344 | 0 | 5.348 | 0 | 0 | 1.838 |
| BRAWH3003727 | 0 | 0 | 0 | 0 | 0 | 0 | 12.492 |
| BRAWH3004222 | 0 | 0 | 0 | 0 | 0 | 0 | 55.403 |
| BRAWH3004350 | 0 | 0 | 0 | 0 | 0 | 0 | 20.597 |
| BRAWH3005981 | 0 | 0 | 0 | 70.676 | 0 | 0 | 0 |
| BRAWH3008931 | 0 | 0 | 0 | 0 | 0 | 0 | 4.303 |
| BRAWH3009546 | 0 | 0 | 0 | 0 | 0 | 0 | 29.283 |
| BRAWH3010461 | 0 | 3.733 | 0 | 0 | 0 | 0 | 15.313 |
| BRAWH3014609 | 0 | 0 | 0 | 0 | 0 | 0 | 55.403 |
| BRAWH3017259 | 50.722 | 0 | 0 | 0 | 0 | 0 | 17.387 |
| BRAWH3018063 | 0 | 14.389 | 0 | 0 | 0 | 0 | 3.279 |
| BRAWH3021545 | 0 | 0 | 0 | 0 | 0 | 26.887 | 0 |
| BRAWH3021574 | 0 | 0 | 0 | 0 | 0 | 0 | 11.677 |
| BRAWH3027533 | 0 | 0 | 0 | 0 | 0 | 0 | 13.675 |
| BRAWH3029806 | 0 | 0 | 0 | 0 | 0 | 0 | 22.142 |
| BRAWH3034743 | 0 | 0 | 0 | 0 | 0 | 0 | 10.350 |
| BRAWH3037265 | 0 | 0 | 0 | 0 | 0 | 0 | 55.403 |
| BRCAN1000168 | 0 | 0 | 0 | 0 | 0 | 10.397 | 0 |
| BRCAN2000563 | 0 | 23.897 | 0 | 0 | 0 | 0 | 0 |
| BRCAN2003389 | 0 | 5.526 | 87.498 | 0 | 0 | 0 | 0 |
| BRCAN2003944 | 1.021 | 0 | 0 | 2.036 | 0 | 0 | 0 |
| BRCAN2007409 | 0 | 0 | 0 | 0 | 0 | 0 | 3.727 |
| BRCAN2009432 | 0 | 0 | 0 | 3.173 | 0 | 0 | 0 |
| BRCAN2016619 | 0 | 23.940 | 0 | 0 | 0 | 0 | 0 |
| BRCAN2019653 | 0 | 0 | 0 | 15.031 | 0 | 0 | 0 |
| BRCAN2022126 | 0 | 8.824 | 0 | 0 | 0 | 0 | 0 |
| BRCAN2026197 | 0 | 0 | 0 | 0 | 0 | 0 | 1.940 |
| BRCAN2027364 | 0 | 0 | 0 | 0 | 0 | 0 | 7.379 |
| BRCAN2028036 | 0 | 4.387 | 0 | 0 | 0 | 0 | 0 |
| BRCAN2028355 | 5.354 | 0 | 0 | 0 | 0 | 0 | 0 |
| BRCOC1000040 | 0 | 0 | 0 | 0 | 0 | 0 | 3.664 |
| BRCOC2000152 | 0 | 0 | 0 | 0 | 0 | 0 | 25.963 |
| BRCOC2000184 | 0 | 0 | 0 | 0 | 0 | 61.762 | 0 |
| BRCOC2000487 | 0 | 0.526 | 0 | 0 | 95.528 | 0 | 0 |
| BRCOC2010123 | 3.970 | 3.981 | 0 | 2.640 | 0 | 0 | 0 |
| BRCOC2010510 | 0 | 0 | 0 | 0 | 0 | 0 | 14.918 |
| BRCOC2012172 | 0 | 5.112 | 0 | 13.559 | 0 | 0 | 0 |
| BRCOC2012386 | 0 | 20.721 | 0 | 27.482 | 0 | 0 | 0 |
| BRCOC2014400 | 0 | 0 | 0 | 40.488 | 0 | 0 | 0 |
| BRCOC2019910 | 0 | 0 | 0 | 0 | 0 | 0 | 2.329 |
| BRHIP1000104 | 2.369 | 0 | 0 | 0 | 0 | 0 | 0 |
| BRHIP1000108 | 0 | 0 | 0 | 0 | 0 | 0 | 5.354 |
| BRHIP1000174 | 0 | 0 | 0 | 0 | 0 | 0 | 6.298 |
| BRHIP2000312 | 0 | 0 | 0 | 0 | 0 | 0 | 8.056 |
| BRHIP2000534 | 1.240 | 1.244 | 0 | 0.825 | 0 | 0 | 0 |
| BRHIP2000553 | 0 | 9.340 | 0 | 12.387 | 0 | 0 | 12.769 |
| BRHIP2001074 | 0 | 0 | 0 | 47.218 | 0 | 0 | 0 |
| BRHIP2007305 | 0 | 0 | 0 | 0 | 0 | 0 | 2.813 |
| BRHIP2007741 | 6.291 | 6.309 | 0 | 0 | 0 | 0 | 4.313 |
| BRHIP2010217 | 0 | 0 | 0 | 0 | 0 | 0 | 6.938 |
| BRHIP2012627 | 0 | 28.546 | 0 | 0 | 0 | 0 | 0 |
| BRHIP2013286 | 0 | 0 | 0 | 82.532 | 0 | 0 | 0 |
| BRHIP2014228 | 0 | 0 | 0 | 35.475 | 0 | 0 | 0 |
| BRHIP2015224 | 0 | 0 | 0 | 0 | 0 | 0 | 11.303 |
| BRHIP2015245 | 0 | 0 | 0 | 0 | 0 | 0 | 14.746 |
| BRHIP2015679 | 9.091 | 0 | 0 | 0 | 0 | 18.488 | 0 |
| BRHIP2018712 | 0 | 0 | 0 | 0 | 0 | 0 | 7.547 |
| BRHIP2019819 | 0 | 0 | 0 | 0 | 0 | 0 | 10.771 |
| BRHIP2020573 | 0 | 0 | 0 | 0 | 0 | 0 | 22.485 |
| BRHIP2020799 | 0 | 9.197 | 0 | 0 | 0 | 0 | 0 |
| BRHIP2021762 | 0 | 5.063 | 0 | 0 | 0 | 0 | 3.461 |
| BRHIP2021858 | 0 | 0 | 0 | 0 | 0 | 0 | 8.314 |
| BRHIP2022228 | 0 | 0 | 0 | 0 | 0 | 0 | 11.352 |
| BRHIP2022326 | 0 | 1.546 | 0 | 4.101 | 0 | 0 | 1.057 |
| BRHIP2022986 | 0 | 0 | 0 | 0 | 0 | 0 | 10.604 |
| BRHIP2023762 | 0 | 0 | 0 | 5.752 | 0 | 0 | 0 |
| BRHIP2023888 | 2.667 | 7.355 | 0 | 2.660 | 0 | 0 | 3.200 |
| BRHIP2024398 | 0 | 0 | 0 | 0 | 0 | 0 | 10.459 |
| BRHIP2024742 | 0 | 0 | 0 | 12.023 | 0 | 0 | 9.296 |
| BRHIP2024911 | 0 | 67.372 | 0 | 0 | 0 | 0 | 0 |
| BRHIP2025448 | 0 | 0 | 0 | 0 | 0 | 0 | 37.989 |
| BRHIP2026061 | 0 | 0 | 0 | 0 | 0 | 0 | 37.989 |
| BRHIP2027017 | 0 | 20.920 | 0 | 0 | 0 | 0 | 14.301 |
| BRHIP2029643 | 0 | 0 | 0 | 0 | 0 | 0 | 18.557 |
| BRHIP2029663 | 0 | 0 | 0 | 0 | 0 | 0 | 54.907 |
| BRHIP3000017 | 0 | 8.013 | 0 | 0 | 0 | 0 | 5.478 |
| BRHIP3000111 | 3.710 | 1.860 | 0 | 0 | 0 | 0 | 0 |
| BRHIP3000131 | 0 | 6.673 | 0 | 0 | 0 | 0 | 0 |
| BRHIP3000457 | 0 | 0 | 0 | 0 | 0 | 0 | 33.739 |
| BRHIP3000475 | 0 | 0 | 0 | 0 | 0 | 0 | 53.721 |
| BRHIP3002691 | 0 | 0 | 0 | 0 | 0 | 0 | 10.303 |
| BRHIP3003795 | 0 | 0 | 0 | 0 | 0 | 0 | 54.907 |
| BRHIP3004968 | 0 | 0 | 0 | 0 | 0 | 0 | 41.796 |
| BRHIP3006717 | 6.168 | 0 | 0 | 0 | 0 | 0 | 8.458 |
| BRHIP3007223 | 0 | 3.664 | 0 | 4.859 | 0 | 14.859 | 2.505 |
| BRHIP3007586 | 12.507 | 0 | 0 | 0 | 0 | 0 | 0 |
| BRHIP3008082 | 0 | 0 | 0 | 0 | 0 | 0 | 54.907 |
| BRHIP3008320 | 0 | 0 | 0 | 0 | 0 | 0 | 29.007 |
| BRHIP3018784 | 0 | 0 | 0 | 0 | 0 | 0 | 4.305 |
| BRHIP3021019 | 0 | 14.074 | 0 | 0 | 0 | 0 | 28.863 |
| BRSSN2000498 | 0 | 1.989 | 0 | 0 | 0 | 0 | 0 |
| BRSSN2000561 | 0 | 0 | 0 | 15.113 | 0 | 0 | 7.790 |
| BRSSN2009518 | 12.485 | 0 | 0 | 4.151 | 0 | 0 | 0 |
| BRSSN2011653 | 0 | 0 | 0 | 0 | 0 | 0 | 24.622 |
| BRSSN2011738 | 0 | 0 | 0 | 0 | 0 | 0 | 13.066 |
| BRSSN2011843 | 0 | 0 | 0 | 0 | 0 | 0 | 14.868 |
| BRSSN2013753 | 0 | 26.797 | 0 | 0 | 0 | 0 | 18.319 |
| BRSSN2014610 | 0 | 0 | 0 | 17.209 | 0 | 0 | 0 |
| BRSSN2015238 | 0 | 0 | 0 | 0 | 0 | 0 | 8.505 |
| BRSSN2018440 | 0 | 0 | 0 | 0 | 0 | 0 | 25.025 |
| BRSTN1000083 | 0 | 3.481 | 0 | 0 | 0 | 4.706 | 4.759 |
| BRSTN2011961 | 3.149 | 0.526 | 8.334 | 0 | 0 | 2.134 | 0 |
| BRSTN2012069 | 0.788 | 0.052 | 0 | 0.479 | 0 | 0 | 0.047 |
| BRSTN2012174 | 1.466 | 1.470 | 5.820 | 0.487 | 0 | 0 | 0 |
| BRSTN2015889 | 0 | 7.039 | 0 | 0 | 0 | 0 | 0 |
| BRSTN2016992 | 0 | 0 | 0 | 0 | 0 | 0 | 0.611 |
| BRTHA1000311 | 0 | 0 | 0 | 0 | 0 | 0 | 7.331 |
| BRTHA2005864 | 0 | 0 | 0 | 0 | 0 | 0 | 6.047 |
| BRTHA2007998 | 0 | 0 | 0 | 0 | 0 | 0 | 2.143 |
| BRTHA2013054 | 0 | 0 | 0 | 0 | 0 | 0 | 7.462 |
| BRTHA2016577 | 0 | 4.288 | 0 | 0 | 0 | 17.389 | 2.931 |
| BRTHA2033155 | 0 | 7.729 | 0 | 0 | 0 | 0 | 21.134 |
| BRTHA3000633 | 0 | 62.102 | 0 | 0 | 0 | 0 | 0 |
| BRTHA3002427 | 0 | 0 | 0 | 0 | 0 | 0 | 3.551 |
| BRTHA3003225 | 0 | 0 | 0 | 0 | 0 | 0 | 52.835 |
| BRTHA3003490 | 0 | 0 | 0 | 3.913 | 0 | 11.964 | 8.067 |
| BRTHA3003736 | 0 | 0 | 0 | 0 | 0 | 0 | 8.017 |
| BRTHA3004307 | 0 | 0 | 0 | 0 | 0 | 0 | 11.227 |
| BRTHA3007472 | 0 | 7.091 | 0 | 0 | 0 | 0 | 4.847 |
| BRTHA3007922 | 0 | 0 | 0 | 37.613 | 0 | 0 | 0 |
| BRTHA3008778 | 0 | 0 | 0 | 0 | 0 | 0 | 30.863 |
| BRTHA3011194 | 12.809 | 0 | 0 | 0 | 0 | 0 | 13.172 |
| BRTHA3011265 | 0 | 0 | 0 | 20.563 | 0 | 0 | 0 |
| BRTHA3021971 | 0 | 0 | 55.855 | 0 | 0 | 0 | 2.411 |
| BRTHA3023403 | 0 | 0 | 0 | 0 | 0 | 0 | 27.684 |
| CD34C3000252 | 0 | 0 | 0 | 0 | 0 | 12.098 | 0 |
| CHONS2002829 | 0 | 2.969 | 0 | 0 | 0 | 0 | 0 |
| COLON2001721 | 0 | 10.053 | 0 | 0 | 0 | 0 | 0 |
| CTONG1000010 | 0 | 0 | 0 | 15.625 | 0 | 0 | 0 |
| CTONG1000052 | 0 | 1.098 | 0 | 11.650 | 0 | 4.453 | 6.005 |
| CTONG1000087 | 3.790 | 5.701 | 0 | 5.041 | 0 | 0 | 1.299 |
| CTONG1000094 | 0 | 1.415 | 0 | 0 | 0 | 0 | 4.354 |
| CTONG1000218 | 0 | 3.500 | 13.856 | 1.161 | 0 | 0 | 1.795 |
| CTONG1000241 | 0 | 0 | 0 | 0 | 0 | 0 | 7.906 |
| CTONG1000288 | 0 | 0 | 0 | 0 | 0 | 11.209 | 0 |
| CTONG2000034 | 0 | 0 | 0 | 0 | 0 | 66.426 | 0 |
| CTONG2000063 | 0 | 0 | 0 | 5.160 | 0 | 0 | 0 |
| CTONG2000452 | 0 | 0 | 0 | 0 | 0 | 0 | 3.618 |
| CTONG2000469 | 0 | 5.307 | 0 | 0 | 0 | 0 | 0 |
| CTONG2000508 | 0 | 1.435 | 0 | 1.903 | 0 | 0 | 3.924 |
| CTONG2001748 | 0 | 0 | 0 | 5.038 | 0 | 0 | 10.387 |
| CTONG2001820 | 0 | 49.384 | 0 | 0 | 0 | 0 | 0 |
| CTONG2001911 | 0 | 0 | 0 | 0 | 0 | 0 | 18.771 |
| CTONG2001932 | 0 | 0 | 0 | 0 | 0 | 0 | 12.834 |
| CTONG2002073 | 0 | 2.662 | 0 | 0 | 0 | 0 | 1.820 |
| CTONG2002095 | 0 | 12.727 | 0 | 33.758 | 0 | 0 | 8.700 |
| CTONG2002270 | 0 | 0.964 | 0 | 1.278 | 0 | 3.909 | 2.636 |
| CTONG2002709 | 0 | 0 | 62.349 | 0 | 0 | 0 | 0 |
| CTONG2002744 | 0 | 0 | 0 | 2.839 | 0 | 0 | 4.390 |
| CTONG2002803 | 0 | 10.703 | 0 | 3.549 | 0 | 0 | 1.829 |
| CTONG2002820 | 0 | 0 | 0 | 0 | 0 | 0 | 27.945 |
| CTONG2002832 | 0 | 0 | 0 | 0 | 0 | 0 | 27.853 |
| CTONG2002841 | 0 | 0 | 0 | 0 | 0 | 0 | 26.318 |
| CTONG2002903 | 0 | 5.598 | 0 | 0 | 0 | 0 | 0 |
| CTONG2003094 | 0 | 3.330 | 0 | 0 | 0 | 0 | 4.552 |
| CTONG2003293 | 0 | 0 | 0 | 22.278 | 0 | 0 | 11.483 |
| CTONG2003298 | 0 | 0 | 0 | 0 | 0 | 5.348 | 2.705 |
| CTONG2003524 | 0 | 2.928 | 0 | 0 | 0 | 11.875 | 4.003 |
| CTONG2004423 | 0 | 20.882 | 0 | 0 | 0 | 0 | 0 |
| CTONG2004487 | 0 | 0 | 0 | 2.280 | 0 | 6.971 | 3.525 |
| CTONG2005028 | 0 | 12.439 | 0 | 0 | 0 | 0 | 0 |
| CTONG2005278 | 10.444 | 0 | 0 | 6.946 | 0 | 0 | 21.481 |
| CTONG2005553 | 0 | 0 | 0 | 3.452 | 0 | 0 | 3.559 |
| CTONG2006004 | 0 | 1.918 | 0 | 2.544 | 0 | 0 | 2.622 |
| CTONG2006235 | 0 | 0 | 0 | 3.948 | 0 | 0 | 2.035 |
| CTONG2006412 | 0 | 0 | 0 | 14.961 | 0 | 0 | 15.423 |
| CTONG2006449 | 0 | 0 | 0 | 0 | 0 | 0 | 10.920 |
| CTONG2006562 | 0 | 0 | 0 | 0 | 0 | 10.318 | 3.479 |
| CTONG2006709 | 0 | 0 | 0 | 0 | 0 | 0 | 12.850 |
| CTONG2007078 | 0 | 0 | 0 | 0 | 0 | 0 | 1.588 |
| CTONG2007400 | 0 | 20.911 | 0 | 0 | 0 | 0 | 0 |
| CTONG2007500 | 0 | 1.367 | 0 | 1.812 | 0 | 0 | 0.934 |
| CTONG2007586 | 21.782 | 0 | 0 | 0 | 0 | 0 | 14.933 |
| CTONG2007959 | 0 | 66.117 | 0 | 0 | 0 | 0 | 0 |
| CTONG2008321 | 0 | 0 | 0 | 0 | 0 | 0 | 18.688 |
| CTONG2008398 | 0 | 2.779 | 0 | 0 | 0 | 0 | 1.900 |
| CTONG2008466 | 0 | 14.208 | 0 | 0 | 0 | 0 | 9.713 |
| CTONG2008506 | 0 | 0 | 0 | 4.536 | 0 | 0 | 5.845 |
| CTONG2008518 | 0 | 6.999 | 0 | 9.282 | 0 | 0 | 0 |
| CTONG2008792 | 0 | 13.353 | 0 | 0 | 0 | 0 | 9.128 |
| CTONG2009108 | 0 | 0 | 0 | 0 | 0 | 0 | 29.481 |
| CTONG2009529 | 22.915 | 0 | 0 | 0 | 0 | 0 | 0 |
| CTONG2010348 | 0 | 0 | 0 | 4.268 | 0 | 0 | 2.200 |
| CTONG2010566 | 0 | 24.642 | 0 | 0 | 0 | 0 | 0 |
| CTONG2010649 | 5.667 | 2.842 | 0 | 3.769 | 0 | 0 | 11.655 |
| CTONG2010821 | 0 | 0 | 0 | 1.722 | 0 | 0 | 0 |
| CTONG2011801 | 0 | 0 | 0 | 0 | 0 | 0 | 11.035 |
| CTONG2012452 | 0 | 3.236 | 0 | 0 | 0 | 0 | 1.327 |
| CTONG2012453 | 0 | 0 | 0 | 18.151 | 0 | 0 | 0 |
| CTONG2012564 | 0 | 7.180 | 0 | 0 | 0 | 0 | 0 |
| CTONG2012607 | 0 | 0 | 0 | 0 | 0 | 0 | 2.148 |
| CTONG2012661 | 0 | 0 | 0 | 0 | 0 | 0 | 26.030 |
| CTONG2012843 | 0 | 0 | 0 | 0 | 0 | 66.426 | 0 |
| CTONG2012879 | 0 | 12.359 | 0 | 24.588 | 0 | 0 | 2.112 |
| CTONG2012996 | 0 | 0 | 0 | 0 | 0 | 0 | 7.255 |
| CTONG2013352 | 0 | 49.384 | 0 | 0 | 0 | 0 | 0 |
| CTONG2013381 | 0 | 5.701 | 0 | 30.243 | 0 | 0 | 3.897 |
| CTONG2013907 | 0 | 0 | 0 | 10.392 | 0 | 0 | 0 |
| CTONG2013934 | 0 | 0 | 0 | 0 | 0 | 0 | 8.617 |
| CTONG2014280 | 0 | 0 | 0 | 30.295 | 0 | 0 | 0 |
| CTONG2014369 | 0 | 0 | 0 | 0 | 0 | 30.670 | 0 |
| CTONG2014898 | 0 | 0 | 0 | 0 | 0 | 0 | 14.331 |
| CTONG2015091 | 0 | 0 | 0 | 0 | 0 | 5.985 | 2.018 |
| CTONG2016056 | 0 | 0 | 57.220 | 0 | 0 | 0 | 0 |
| CTONG2016408 | 0 | 13.456 | 0 | 0 | 0 | 0 | 4.599 |
| CTONG2016575 | 1.802 | 7.228 | 0 | 1.198 | 0 | 0 | 9.265 |
| CTONG2016824 | 0 | 0 | 0 | 0 | 0 | 31.370 | 0 |
| CTONG2016931 | 0 | 0 | 0 | 0 | 0 | 22.490 | 0 |
| CTONG2017444 | 0 | 0 | 0 | 0 | 0 | 27.140 | 0 |
| CTONG2017500 | 0 | 0 | 0 | 0 | 0 | 0 | 3.291 |
| CTONG2018211 | 0 | 12.395 | 0 | 16.440 | 0 | 0 | 0 |
| CTONG2018383 | 0 | 0 | 0 | 10.895 | 0 | 0 | 0 |
| CTONG2018632 | 0 | 29.069 | 0 | 0 | 0 | 0 | 0 |
| CTONG2018637 | 0 | 0 | 0 | 0 | 0 | 0 | 16.300 |
| CTONG2018739 | 0 | 0 | 0 | 0 | 0 | 0 | 4.814 |
| CTONG2018808 | 0 | 0 | 0 | 0 | 0 | 58.046 | 0 |
| CTONG2018898 | 0 | 0.875 | 0 | 1.161 | 0 | 0 | 23.932 |
| CTONG2019400 | 0 | 0 | 0 | 0 | 0 | 0 | 24.523 |
| CTONG2019788 | 0 | 0 | 0 | 0 | 0 | 0 | 3.798 |
| CTONG2020411 | 0 | 25.022 | 0 | 16.593 | 0 | 0 | 0 |
| CTONG2020484 | 2.130 | 0 | 0 | 1.417 | 0 | 0 | 0 |
| CTONG2020560 | 0 | 0 | 0 | 3.616 | 0 | 0 | 0 |
| CTONG2020638 | 0 | 22.499 | 0 | 0 | 0 | 0 | 0 |
| CTONG2028124 | 0 | 0.913 | 0 | 1.211 | 0 | 3.704 | 1.249 |
| CTONG2028208 | 0 | 6.435 | 0 | 0 | 0 | 0 | 0 |
| CTONG3002835 | 0 | 1.996 | 0 | 0 | 0 | 0 | 2.730 |
| CTONG3003905 | 0 | 0 | 0 | 47.197 | 0 | 0 | 0 |
| CTONG3004726 | 0 | 0 | 0 | 0 | 0 | 0 | 21.039 |
| CTONG3006629 | 0 | 0 | 0 | 0 | 0 | 0 | 40.011 |
| CTONG3008894 | 2.634 | 9.247 | 0 | 7.008 | 0 | 0 | 12.642 |
| CTONG3009028 | 0 | 2.924 | 0 | 0 | 0 | 0 | 0 |
| CTONG3009239 | 0 | 2.624 | 0 | 0 | 0 | 0 | 0 |
| D30ST1000267 | 0 | 0 | 0 | 0 | 0 | 0 | 5.365 |
| D30ST1000270 | 0 | 4.695 | 0 | 6.227 | 0 | 0 | 0 |
| D30ST2002068 | 0 | 0.781 | 0 | 0 | 0 | 0 | 0 |
| D60ST2000464 | 0 | 0 | 0 | 0 | 0 | 0 | 1.361 |
| DFNES2000146 | 0 | 0 | 0 | 0 | 0 | 0 | 13.829 |
| DFNES2000153 | 0 | 0 | 0 | 0 | 0 | 0 | 3.977 |
| DFNES2000335 | 0 | 0 | 0 | 11.418 | 0 | 0 | 0 |
| DFNES2000443 | 0 | 0 | 0 | 3.272 | 0 | 0 | 0 |
| DFNES2000526 | 20.031 | 0 | 0 | 0 | 0 | 0 | 0 |
| DFNES2004346 | 11.342 | 0 | 0 | 0 | 0 | 0 | 0 |
| DFNES2004371 | 0 | 0 | 0 | 3.802 | 0 | 0 | 3.920 |
| DFNES2004608 | 0 | 0 | 0 | 0 | 0 | 55.567 | 0 |
| DFNES2005690 | 0 | 9.226 | 0 | 0 | 0 | 0 | 0 |
| DFNES2005766 | 0 | 0 | 52.757 | 0 | 0 | 0 | 0 |
| DFNES2006346 | 0 | 0 | 0 | 0 | 0 | 0 | 8.776 |
| DFNES2007634 | 0 | 1.615 | 0 | 0 | 0 | 0 | 2.208 |
| DFNES2008088 | 9.527 | 0 | 0 | 0 | 0 | 0 | 0 |
| DFNES2008160 | 0 | 0 | 0 | 0 | 0 | 0 | 11.131 |
| DFNES2009482 | 0 | 2.577 | 0 | 0 | 0 | 0 | 0 |
| DFNES2011499 | 0 | 22.548 | 0 | 0 | 0 | 0 | 0 |
| FCBBF1000024 | 0 | 0 | 0 | 10.583 | 0 | 0 | 10.910 |
| FCBBF1000027 | 0 | 1.997 | 0 | 3.531 | 0 | 0 | 1.820 |
| FCBBF1000038 | 0 | 0 | 0 | 0 | 0 | 0 | 41.870 |
| FCBBF1000053 | 19.616 | 0 | 0 | 0 | 0 | 0 | 3.362 |
| FCBBF1000061 | 0 | 0 | 0 | 0 | 0 | 0 | 17.530 |
| FCBBF1000063 | 0 | 0 | 0 | 14.415 | 0 | 0 | 7.430 |
| FCBBF1000077 | 0 | 1.472 | 0 | 0 | 0 | 0 | 13.079 |
| FCBBF1000115 | 0 | 0 | 0 | 0 | 0 | 0 | 25.252 |
| FCBBF1000118 | 0 | 0 | 0 | 0 | 0 | 0 | 56.514 |
| FCBBF1000139 | 0 | 0 | 0 | 12.640 | 0 | 0 | 34.747 |
| FCBBF1000197 | 0 | 1.941 | 0 | 0 | 0 | 0 | 0 |
| FCBBF1000280 | 0 | 10.265 | 0 | 0 | 0 | 0 | 0 |
| FCBBF1000294 | 0 | 0 | 0 | 0 | 0 | 7.935 | 6.688 |
| FCBBF1000305 | 0 | 0 | 0 | 0 | 0 | 0 | 66.858 |
| FCBBF1000377 | 0 | 19.652 | 0 | 0 | 0 | 0 | 13.434 |
| FCBBF1000403 | 0 | 15.241 | 0 | 0 | 0 | 0 | 0 |
| FCBBF1000412 | 0 | 0 | 0 | 0 | 0 | 0 | 7.212 |
| FCBBF1000449 | 0 | 0 | 0 | 0 | 0 | 0 | 16.611 |
| FCBBF1000466 | 0 | 2.315 | 0 | 1.535 | 0 | 0 | 3.165 |
| FCBBF1000476 | 0 | 0 | 0 | 0 | 0 | 0 | 10.789 |
| FCBBF1000509 | 6.762 | 0 | 0 | 0 | 0 | 0 | 0 |
| FCBBF1000556 | 0 | 0 | 0 | 5.138 | 0 | 0 | 0 |
| FCBBF1000563 | 5.443 | 24.565 | 0 | 7.240 | 0 | 0 | 1.866 |
| FCBBF1000574 | 0 | 0 | 0 | 0 | 0 | 0 | 15.473 |
| FCBBF1000671 | 0 | 0 | 0 | 0 | 0 | 0 | 51.023 |
| FCBBF1000675 | 0 | 23.076 | 0 | 0 | 0 | 0 | 0 |
| FCBBF1000687 | 31.307 | 0 | 0 | 0 | 0 | 0 | 0 |
| FCBBF1000732 | 0 | 5.089 | 0 | 0 | 0 | 0 | 0 |
| FCBBF1000760 | 0 | 1.190 | 0 | 0 | 0 | 0 | 0.814 |
| FCBBF2000038 | 0 | 0 | 0 | 0 | 0 | 0 | 5.006 |
| FCBBF2000199 | 0 | 0 | 0 | 0 | 0 | 0 | 31.279 |
| FCBBF2000259 | 0 | 0 | 0 | 0 | 0 | 0 | 14.857 |
| FCBBF2000362 | 30.336 | 0 | 0 | 0 | 0 | 0 | 0 |
| FCBBF2000566 | 0 | 0 | 0 | 0 | 0 | 0 | 32.322 |
| FCBBF2000591 | 0 | 0 | 0 | 0.691 | 0 | 0 | 0 |
| FCBBF2000885 | 5.563 | 0 | 0 | 7.399 | 0 | 0 | 9.534 |
| FCBBF2001001 | 0 | 17.368 | 0 | 0 | 0 | 0 | 0 |
| FCBBF2001105 | 0 | 16.549 | 0 | 0 | 0 | 0 | 3.771 |
| FCBBF2001183 | 0 | 0 | 0 | 0 | 0 | 0 | 8.217 |
| FCBBF2001211 | 0 | 11.646 | 0 | 0 | 0 | 0 | 0 |
| FCBBF2001291 | 6.895 | 3.457 | 0 | 4.585 | 0 | 0 | 0 |
| FCBBF2001309 | 0 | 7.906 | 0 | 0 | 0 | 0 | 21.620 |
| FCBBF2001538 | 0 | 2.769 | 0 | 0 | 0 | 0 | 0 |
| FCBBF2001594 | 0 | 6.911 | 0 | 0 | 0 | 0 | 9.449 |
| FCBBF2002349 | 0 | 7.174 | 0 | 0 | 0 | 0 | 4.904 |
| FCBBF2002801 | 0 | 0 | 0 | 0 | 0 | 0 | 12.897 |
| FCBBF2004066 | 0 | 0 | 0 | 0 | 0 | 0 | 5.009 |
| FCBBF2004373 | 0 | 0 | 0 | 56.608 | 0 | 0 | 0 |
| FCBBF2005733 | 0 | 0 | 0 | 0 | 0 | 0 | 40.207 |
| FCBBF2005909 | 0 | 0 | 0 | 0 | 0 | 0 | 31.013 |
| FCBBF2005966 | 34.323 | 0 | 0 | 0 | 0 | 0 | 0 |
| FCBBF2006781 | 0 | 0 | 0 | 30.502 | 0 | 0 | 0 |
| FCBBF2007302 | 0 | 0 | 0 | 56.608 | 0 | 0 | 0 |
| FCBBF2007556 | 0 | 0 | 0 | 0 | 0 | 0 | 11.353 |
| FCBBF2007840 | 45.139 | 0 | 0 | 0 | 0 | 0 | 0 |
| FCBBF3000102 | 0 | 0 | 0 | 0 | 0 | 0 | 77.076 |
| FCBBF3000110 | 0 | 0 | 0 | 0 | 0 | 0 | 8.023 |
| FCBBF3000115 | 0 | 0 | 0 | 0 | 0 | 0 | 9.916 |
| FCBBF3000168 | 0 | 14.795 | 0 | 0 | 0 | 0 | 20.229 |
| FCBBF3000388 | 8.952 | 0 | 0 | 5.953 | 0 | 0 | 6.137 |
| FCBBF3000434 | 6.709 | 0 | 0 | 0 | 0 | 0 | 2.300 |
| FCBBF3001081 | 0 | 0 | 0 | 6.328 | 0 | 0 | 0 |
| FCBBF3001281 | 0 | 0 | 0 | 49.073 | 0 | 0 | 0 |
| FCBBF3001377 | 0 | 0 | 0 | 24.817 | 0 | 0 | 0 |
| FCBBF3001632 | 5.595 | 2.805 | 0 | 7.441 | 0 | 0 | 13.424 |
| FCBBF3001657 | 0 | 0 | 0 | 0 | 0 | 0 | 11.722 |
| FCBBF3001818 | 0 | 16.553 | 0 | 0 | 0 | 0 | 0 |
| FCBBF3001855 | 0 | 5.089 | 0 | 0 | 0 | 20.639 | 3.479 |
| FCBBF3001890 | 9.969 | 4.999 | 0 | 0 | 0 | 0 | 3.417 |
| FCBBF3001977 | 0 | 13.536 | 0 | 17.952 | 0 | 0 | 9.253 |
| FCBBF3002556 | 0 | 0 | 0 | 0 | 0 | 0 | 40.207 |
| FCBBF3003787 | 0 | 0 | 0 | 0 | 0 | 72.131 | 0 |
| FCBBF3003800 | 1.428 | 2.863 | 0 | 1.899 | 0 | 0 | 10.766 |
| FCBBF3003902 | 0 | 0 | 0 | 56.608 | 0 | 0 | 0 |
| FCBBF3004261 | 0 | 0 | 0 | 21.802 | 0 | 0 | 0 |
| FCBBF3004323 | 0 | 0 | 0 | 0 | 0 | 0 | 27.378 |
| FCBBF3004409 | 0 | 0 | 0 | 0 | 0 | 0 | 40.207 |
| FCBBF3004473 | 0 | 4.176 | 0 | 0 | 0 | 0 | 2.854 |
| FCBBF3004715 | 0 | 0 | 0 | 0 | 0 | 0 | 4.652 |
| FCBBF3004955 | 0 | 0 | 0 | 0 | 0 | 0 | 28.723 |
| FCBBF3005320 | 0 | 0 | 0 | 0 | 0 | 0 | 6.778 |
| FCBBF3005330 | 2.511 | 3.777 | 0 | 0 | 0 | 0 | 2.582 |
| FCBBF3005497 | 0 | 0 | 0 | 3.789 | 0 | 0 | 2.930 |
| FCBBF3006821 | 0 | 10.388 | 0 | 0 | 0 | 0 | 0 |
| FCBBF3007859 | 0 | 11.805 | 0 | 0 | 0 | 0 | 8.070 |
| FCBBF3008100 | 0 | 0 | 0 | 0 | 0 | 0 | 18.533 |
| FCBBF3008382 | 0 | 0 | 0 | 0 | 0 | 0 | 13.381 |
| FCBBF3008644 | 0 | 0 | 0 | 0 | 0 | 0 | 10.704 |
| FCBBF3009069 | 0 | 0 | 0 | 0 | 0 | 0 | 5.563 |
| FCBBF3009152 | 0 | 0 | 0 | 45.841 | 0 | 0 | 0 |
| FCBBF3009479 | 35.849 | 0 | 0 | 0 | 0 | 0 | 0 |
| FCBBF3009541 | 0 | 0 | 0 | 5.961 | 0 | 0 | 1.536 |
| FCBBF3009703 | 0 | 0 | 0 | 0 | 0 | 0 | 40.207 |
| FCBBF3010012 | 0 | 0 | 0 | 0 | 0 | 0 | 22.837 |
| FCBBF3010142 | 0 | 0 | 0 | 0 | 0 | 0 | 17.930 |
| FCBBF3010695 | 0 | 0 | 0 | 0 | 0 | 0 | 3.081 |
| FCBBF3011485 | 0 | 0 | 0 | 0 | 0 | 0 | 49.834 |
| FCBBF3012347 | 0 | 3.989 | 0 | 0 | 0 | 0 | 0 |
| FCBBF3012443 | 0 | 49.588 | 0 | 0 | 0 | 0 | 0 |
| FCBBF3012667 | 0 | 0 | 0 | 0 | 0 | 0 | 30.319 |
| FCBBF3013589 | 0 | 0 | 0 | 19.996 | 0 | 0 | 0 |
| FCBBF3014260 | 0 | 0 | 0 | 21.767 | 0 | 0 | 8.415 |
| FCBBF3014770 | 0 | 0 | 0 | 0 | 0 | 0 | 11.854 |
| FCBBF3015100 | 0 | 0 | 0 | 0 | 0 | 0 | 43.390 |
| FCBBF3016134 | 0 | 0 | 0 | 25.089 | 0 | 0 | 0 |
| FCBBF3016451 | 0 | 0 | 0 | 56.608 | 0 | 0 | 0 |
| FCBBF3016667 | 0 | 0 | 0 | 0 | 0 | 0 | 15.903 |
| FCBBF3016928 | 0 | 1.592 | 25.214 | 2.112 | 0 | 0 | 1.089 |
| FCBBF3017024 | 0 | 0 | 0 | 0 | 0 | 0 | 12.734 |
| FCBBF3017288 | 0 | 0 | 0 | 0 | 0 | 0 | 40.207 |
| FCBBF3017396 | 0 | 0 | 0 | 0 | 0 | 0 | 7.608 |
| FCBBF3017918 | 0 | 23.796 | 0 | 31.560 | 0 | 0 | 0 |
| FCBBF3018453 | 16.741 | 8.394 | 0 | 0 | 0 | 0 | 22.954 |
| FCBBF3018826 | 0 | 0 | 0 | 23.511 | 0 | 0 | 0 |
| FCBBF3018949 | 0 | 0 | 0 | 0 | 0 | 0 | 17.580 |
| FCBBF3019437 | 0 | 0 | 0 | 0 | 0 | 0 | 40.207 |
| FCBBF3019455 | 0 | 0 | 0 | 0 | 0 | 0 | 20.235 |
| FCBBF3019714 | 0 | 0 | 0 | 0 | 0 | 0 | 2.545 |
| FCBBF3019784 | 0 | 49.588 | 0 | 0 | 0 | 0 | 0 |
| FCBBF3022504 | 0 | 0 | 0 | 0 | 0 | 0 | 19.361 |
| FCBBF3022593 | 0 | 12.591 | 0 | 0 | 0 | 0 | 8.607 |
| FCBBF3023368 | 0 | 0 | 0 | 0 | 0 | 0 | 6.096 |
| FCBBF3023667 | 0.481 | 2.655 | 3.821 | 1.600 | 0 | 0 | 0 |
| FCBBF3023887 | 0 | 0 | 0 | 0 | 0 | 0 | 58.866 |
| FCBBF3024002 | 0 | 0 | 0 | 0 | 0 | 0 | 28.201 |
| FCBBF3024623 | 0 | 5.091 | 0 | 0 | 0 | 0 | 0 |
| FCBBF3025528 | 0 | 0 | 0 | 0 | 0 | 0 | 11.995 |
| FCBBF3025730 | 0 | 0 | 0 | 0 | 0 | 0 | 24.596 |
| FCBBF3025737 | 0 | 0 | 0 | 15.666 | 0 | 0 | 0 |
| FCBBF3026048 | 0 | 0 | 0 | 0 | 0 | 0 | 40.207 |
| FCBBF3026651 | 0 | 0 | 0 | 0 | 0 | 0 | 9.065 |
| FCBBF3027854 | 0 | 28.447 | 0 | 0 | 0 | 0 | 0 |
| FCBBF3028244 | 3.365 | 1.687 | 0 | 8.951 | 0 | 0 | 11.534 |
| FCBBF3028593 | 0 | 0 | 0 | 0 | 0 | 0 | 20.063 |
| FCBBF4000017 | 0 | 0 | 0 | 0 | 0 | 0 | 11.034 |
| FCBBF4000142 | 0 | 0 | 0 | 8.811 | 0 | 0 | 18.167 |
| FCBBF4000193 | 0 | 0 | 0 | 0 | 0 | 0 | 40.207 |
| FCBBF4000446 | 8.166 | 6.825 | 0 | 5.431 | 0 | 0 | 17.729 |
| FCBBF5000061 | 0 | 38.068 | 0 | 0 | 0 | 0 | 0 |
| FCBBF5000165 | 11.929 | 0 | 0 | 0 | 0 | 0 | 8.178 |
| FEBRA1000008 | 0 | 42.162 | 0 | 0 | 0 | 0 | 0 |
| FEBRA1000030 | 59.247 | 0 | 0 | 0 | 0 | 0 | 0 |
| FEBRA1000057 | 0 | 9.464 | 0 | 0 | 0 | 0 | 0 |
| FEBRA1000088 | 15.466 | 0 | 0 | 0 | 0 | 0 | 0 |
| FEBRA1000188 | 0 | 0 | 0 | 5.044 | 0 | 0 | 36.398 |
| FEBRA2000105 | 0 | 0 | 0 | 1.729 | 0 | 0 | 0.891 |
| FEBRA2000228 | 0 | 0 | 0 | 0 | 0 | 0 | 9.814 |
| FEBRA2000253 | 0 | 0 | 0 | 0 | 0 | 0 | 36.369 |
| FEBRA2000297 | 28.740 | 0 | 0 | 0 | 0 | 0 | 9.852 |
| FEBRA2000377 | 0 | 0 | 0 | 0 | 0 | 0 | 12.427 |
| FEBRA2000397 | 42.133 | 0 | 0 | 0 | 0 | 0 | 28.885 |
| FEBRA2000452 | 0 | 3.645 | 0 | 9.669 | 0 | 0 | 11.213 |
| FEBRA2000462 | 0 | 0 | 0 | 0 | 0 | 0 | 7.013 |
| FEBRA2000532 | 0 | 0 | 0 | 0 | 0 | 0 | 3.973 |
| FEBRA2000581 | 2.883 | 0 | 0 | 0 | 0 | 0 | 12.847 |
| FEBRA2000733 | 1.832 | 0.306 | 0 | 0 | 0 | 0 | 0 |
| FEBRA2000740 | 0 | 2.055 | 0 | 0 | 0 | 0 | 4.215 |
| FEBRA2000757 | 0 | 0 | 0 | 0 | 0 | 0 | 19.021 |
| FEBRA2000787 | 0 | 0 | 0 | 4.760 | 0 | 0 | 7.361 |
| FEBRA2000793 | 0 | 0 | 0 | 0 | 0 | 0 | 28.583 |
| FEBRA2000815 | 0 | 0 | 0 | 0 | 0 | 0 | 17.964 |
| FEBRA2000881 | 0 | 0 | 0 | 7.629 | 0 | 0 | 0 |
| FEBRA2000972 | 0 | 0 | 0 | 0 | 0 | 0 | 18.817 |
| FEBRA2001146 | 0 | 0 | 0 | 0 | 0 | 0 | 13.892 |
| FEBRA2001197 | 0 | 0 | 0 | 0 | 0 | 0 | 35.024 |
| FEBRA2001227 | 0 | 0 | 0 | 0 | 0 | 0 | 4.593 |
| FEBRA2001245 | 9.141 | 0 | 0 | 0 | 0 | 0 | 12.534 |
| FEBRA2001492 | 0 | 0 | 0 | 15.601 | 0 | 0 | 4.021 |
| FEBRA2001571 | 0 | 0 | 0 | 0 | 0 | 15.455 | 7.816 |
| FEBRA2001581 | 14.860 | 0 | 0 | 0 | 0 | 0 | 0 |
| FEBRA2001669 | 0 | 0 | 0 | 2.582 | 0 | 0 | 23.955 |
| FEBRA2001715 | 0 | 0 | 0 | 7.210 | 0 | 0 | 9.910 |
| FEBRA2001745 | 4.542 | 0 | 0 | 0 | 0 | 0 | 9.341 |
| FEBRA2001814 | 9.589 | 0 | 0 | 0 | 0 | 0 | 3.287 |
| FEBRA2001828 | 0 | 9.887 | 0 | 0 | 0 | 0 | 0 |
| FEBRA2001867 | 0 | 0 | 0 | 17.865 | 0 | 0 | 4.604 |
| FEBRA2001990 | 0 | 0 | 0 | 0 | 0 | 0 | 4.508 |
| FEBRA2002027 | 0 | 0 | 0 | 0 | 0 | 0 | 3.147 |
| FEBRA2002352 | 12.580 | 6.308 | 0 | 0 | 0 | 0 | 8.625 |
| FEBRA2002410 | 0 | 0 | 0 | 0 | 0 | 0 | 33.259 |
| FEBRA2002456 | 0 | 0 | 0 | 2.629 | 0 | 0 | 8.130 |
| FEBRA2002525 | 0 | 0 | 0 | 0 | 0 | 0 | 33.259 |
| FEBRA2002682 | 0 | 0 | 0 | 0 | 0 | 0 | 33.259 |
| FEBRA2002707 | 0 | 0 | 0 | 0 | 0 | 26.556 | 0 |
| FEBRA2002781 | 0 | 0 | 0 | 0 | 0 | 0 | 25.500 |
| FEBRA2002792 | 0 | 2.432 | 0 | 3.226 | 0 | 0 | 0 |
| FEBRA2002931 | 0 | 0 | 0 | 15.825 | 0 | 0 | 12.236 |
| FEBRA2002933 | 0 | 1.345 | 0 | 2.676 | 0 | 0 | 0.460 |
| FEBRA2003100 | 2.387 | 2.394 | 0 | 0 | 0 | 0 | 5.727 |
| FEBRA2003128 | 0 | 15.858 | 0 | 0 | 0 | 0 | 7.227 |
| FEBRA2003198 | 0 | 0 | 0 | 0 | 0 | 0 | 33.259 |
| FEBRA2003470 | 0 | 0 | 0 | 0 | 0 | 0 | 18.131 |
| FEBRA2003541 | 0 | 0 | 0 | 0 | 0 | 0 | 32.225 |
| FEBRA2003750 | 0 | 0 | 0 | 0 | 0 | 0 | 2.268 |
| FEBRA2003833 | 0 | 0 | 0 | 16.670 | 0 | 0 | 4.296 |
| FEBRA2003926 | 0 | 1.269 | 0 | 5.047 | 0 | 5.145 | 0 |
| FEBRA2003930 | 0 | 3.266 | 0 | 0 | 0 | 0 | 2.233 |
| FEBRA2004042 | 0 | 0 | 0 | 15.337 | 0 | 0 | 5.270 |
| FEBRA2004110 | 0 | 0 | 0 | 0 | 0 | 0 | 33.259 |
| FEBRA2004191 | 0 | 0 | 0 | 0 | 0 | 0 | 24.636 |
| FEBRA2004224 | 0 | 0 | 0 | 0 | 0 | 0 | 1.438 |
| FEBRA2004293 | 0 | 0 | 0 | 0 | 0 | 0 | 6.605 |
| FEBRA2004325 | 0 | 6.401 | 0 | 0 | 0 | 0 | 0 |
| FEBRA2004412 | 0 | 0 | 0 | 0 | 0 | 0 | 3.647 |
| FEBRA2004485 | 0 | 0 | 0 | 0 | 0 | 0 | 17.243 |
| FEBRA2005114 | 24.318 | 12.194 | 0 | 0 | 0 | 0 | 0 |
| FEBRA2005361 | 0 | 0 | 0 | 0 | 0 | 0 | 1.740 |
| FEBRA2005416 | 0 | 0 | 0 | 2.588 | 0 | 0 | 1.334 |
| FEBRA2005476 | 0 | 4.733 | 0 | 6.277 | 0 | 0 | 0 |
| FEBRA2005572 | 6.457 | 0 | 0 | 0 | 0 | 0 | 0 |
| FEBRA2005734 | 6.120 | 3.069 | 0 | 4.070 | 0 | 0 | 0 |
| FEBRA2005778 | 0 | 0 | 0 | 7.229 | 0 | 0 | 11.179 |
| FEBRA2005824 | 0 | 0 | 0 | 0 | 0 | 5.498 | 1.853 |
| FEBRA2005995 | 0 | 2.548 | 0 | 0 | 0 | 0 | 19.157 |
| FEBRA2006092 | 2.253 | 0 | 0 | 1.499 | 0 | 0 | 1.545 |
| FEBRA2006112 | 0 | 0 | 0 | 0 | 0 | 0 | 8.200 |
| FEBRA2006255 | 0 | 0 | 0 | 0 | 0 | 0 | 14.569 |
| FEBRA2006270 | 0 | 0 | 0 | 0 | 0 | 8.616 | 1.452 |
| FEBRA2006357 | 0 | 0 | 0 | 0 | 0 | 9.763 | 4.114 |
| FEBRA2006368 | 0 | 0 | 0 | 0 | 0 | 0 | 11.580 |
| FEBRA2006372 | 0 | 0 | 38.646 | 3.237 | 0 | 0 | 3.337 |
| FEBRA2006396 | 0 | 14.606 | 0 | 0 | 0 | 0 | 29.955 |
| FEBRA2006401 | 0 | 1.824 | 0 | 0 | 82.760 | 0 | 1.247 |
| FEBRA2006485 | 0 | 0 | 0 | 0 | 0 | 0 | 3.779 |
| FEBRA2006521 | 0 | 0 | 0 | 0 | 0 | 0 | 9.501 |
| FEBRA2006553 | 0 | 0 | 0 | 0 | 0 | 0 | 4.915 |
| FEBRA2006627 | 0 | 0 | 0 | 0 | 0 | 0 | 25.634 |
| FEBRA2006808 | 0 | 0 | 0 | 0 | 0 | 0 | 5.099 |
| FEBRA2006873 | 0 | 8.160 | 0 | 0 | 0 | 0 | 11.157 |
| FEBRA2007458 | 29.545 | 14.815 | 0 | 0 | 0 | 0 | 20.255 |
| FEBRA2007544 | 0 | 0 | 0 | 0 | 0 | 0 | 9.124 |
| FEBRA2007622 | 0 | 1.875 | 0 | 0 | 0 | 7.603 | 2.563 |
| FEBRA2007714 | 0 | 0 | 0 | 0 | 0 | 0 | 31.096 |
| FEBRA2007793 | 0 | 0 | 0 | 0 | 0 | 0 | 49.917 |
| FEBRA2007801 | 0 | 0 | 0 | 5.950 | 0 | 0 | 0 |
| FEBRA2007880 | 0 | 0 | 0 | 0 | 0 | 0 | 4.676 |
| FEBRA2007900 | 0 | 0 | 0 | 18.681 | 0 | 0 | 0 |
| FEBRA2007901 | 0 | 0 | 0 | 0 | 0 | 0 | 4.604 |
| FEBRA2008036 | 0 | 0 | 0 | 0 | 0 | 0 | 10.646 |
| FEBRA2008081 | 2.566 | 5.147 | 0 | 6.827 | 0 | 10.438 | 4.399 |
| FEBRA2008087 | 1.949 | 0 | 5.158 | 0 | 0 | 0 | 0 |
| FEBRA2008201 | 0 | 0 | 0 | 17.339 | 0 | 0 | 0 |
| FEBRA2008210 | 0 | 0 | 0 | 0 | 0 | 0 | 8.332 |
| FEBRA2008287 | 0 | 0 | 0 | 0 | 0 | 0 | 3.662 |
| FEBRA2008302 | 0 | 3.868 | 0 | 0 | 0 | 0 | 2.644 |
| FEBRA2008360 | 0 | 0 | 0 | 0 | 0 | 0 | 25.401 |
| FEBRA2008583 | 0.479 | 0.721 | 0 | 0 | 43.582 | 0 | 10.016 |
| FEBRA2008662 | 11.505 | 0 | 0 | 0 | 0 | 0 | 1.972 |
| FEBRA2008861 | 0 | 10.618 | 0 | 4.694 | 0 | 0 | 14.517 |
| FEBRA2009022 | 12.103 | 0 | 0 | 0 | 0 | 0 | 0 |
| FEBRA2009419 | 0 | 4.802 | 0 | 0 | 0 | 0 | 6.566 |
| FEBRA2009514 | 0 | 6.019 | 0 | 0 | 0 | 0 | 0 |
| FEBRA2009588 | 0 | 0 | 0 | 0 | 0 | 0 | 42.136 |
| FEBRA2009846 | 0 | 0 | 0 | 0 | 0 | 0 | 25.645 |
| FEBRA2009986 | 0 | 0 | 0 | 0 | 0 | 0 | 23.954 |
| FEBRA2010719 | 0 | 0 | 0 | 0 | 0 | 0 | 21.556 |
| FEBRA2010746 | 0 | 0 | 0 | 0 | 0 | 0 | 63.946 |
| FEBRA2011090 | 0 | 0 | 0 | 0 | 0 | 0 | 21.561 |
| FEBRA2013699 | 0 | 13.005 | 0 | 0 | 0 | 0 | 8.891 |
| FEBRA2014122 | 0 | 0 | 0 | 0 | 0 | 0 | 33.259 |
| FEBRA2014417 | 1.957 | 0 | 0 | 0 | 0 | 0 | 2.012 |
| FEBRA2014578 | 0 | 0 | 0 | 0 | 0 | 0 | 27.189 |
| FEBRA2014939 | 0 | 0 | 0 | 0 | 0 | 0 | 51.886 |
| FEBRA2015085 | 5.526 | 0 | 0 | 7.349 | 0 | 0 | 22.729 |
| FEBRA2017024 | 0 | 0 | 0 | 0 | 0 | 0 | 11.986 |
| FEBRA2017850 | 0 | 0 | 0 | 0 | 0 | 0 | 22.253 |
| FEBRA2018203 | 0 | 0 | 0 | 0 | 0 | 0 | 18.850 |
| FEBRA2018407 | 0 | 29.440 | 0 | 0 | 0 | 0 | 0 |
| FEBRA2018476 | 0 | 0 | 0 | 0 | 0 | 0 | 2.715 |
| FEBRA2019242 | 0 | 58.974 | 0 | 0 | 0 | 0 | 0 |
| FEBRA2019637 | 59.247 | 0 | 0 | 0 | 0 | 0 | 0 |
| FEBRA2020886 | 0 | 0 | 0 | 0 | 0 | 0 | 15.061 |
| FEBRA2020977 | 0 | 0 | 0 | 0 | 0 | 0 | 6.546 |
| FEBRA2021966 | 0 | 0 | 0 | 0 | 0 | 31.791 | 0 |
| FEBRA2022055 | 0 | 0.967 | 0 | 0 | 0 | 0 | 0 |
| FEBRA2022504 | 5.952 | 2.985 | 0 | 3.958 | 0 | 0 | 0 |
| FEBRA2023377 | 0 | 0 | 0 | 0 | 0 | 0 | 9.637 |
| FEBRA2024019 | 4.860 | 0 | 0 | 3.232 | 0 | 0 | 0 |
| FEBRA2024727 | 0 | 0 | 0 | 0 | 0 | 0 | 33.259 |
| FEBRA2025427 | 0 | 0 | 0 | 0 | 0 | 0 | 3.079 |
| FEBRA2025838 | 2.977 | 0 | 0 | 0 | 0 | 0 | 1.020 |
| FEBRA2026582 | 0 | 42.162 | 0 | 0 | 0 | 0 | 0 |
| FEBRA2028503 | 0 | 0 | 0 | 0 | 0 | 0 | 8.685 |
| FEBRA2028516 | 0 | 6.236 | 0 | 11.027 | 0 | 0 | 2.842 |
| FELIV1000153 | 0 | 0 | 0 | 0 | 0 | 1.216 | 0.205 |
| HCASM1000115 | 0 | 1.884 | 0 | 2.498 | 0 | 0 | 1.288 |
| HCASM2000016 | 0 | 2.713 | 0 | 0 | 0 | 0 | 1.854 |
| HCASM2000138 | 0 | 7.675 | 0 | 0 | 0 | 0 | 0 |
| HCASM2000214 | 0 | 17.187 | 0 | 0 | 0 | 0 | 0 |
| HCASM2003018 | 0 | 0 | 0 | 0 | 0 | 0 | 10.964 |
| HCHON1000030 | 1.315 | 2.307 | 0 | 0.874 | 0 | 0 | 1.127 |
| HCHON1000131 | 0 | 7.456 | 0 | 0 | 0 | 0 | 5.097 |
| HCHON1000191 | 1.750 | 0.878 | 0 | 0 | 0 | 0 | 0 |
| HCHON2000028 | 0 | 5.766 | 0 | 0 | 0 | 0 | 0 |
| HCHON2000056 | 2.056 | 0 | 0 | 0 | 0 | 0 | 2.466 |
| HCHON2000160 | 3.648 | 0 | 0 | 0 | 0 | 0 | 2.501 |
| HCHON2000212 | 0 | 0 | 0 | 0 | 0 | 0 | 10.677 |
| HCHON2000226 | 1.461 | 0.733 | 0 | 0 | 0 | 0 | 0 |
| HCHON2000244 | 0 | 1.195 | 0 | 3.171 | 0 | 0 | 0 |
| HCHON2000265 | 0 | 0 | 58.221 | 0 | 0 | 0 | 0 |
| HCHON2000295 | 0 | 0.796 | 0 | 0 | 0 | 3.228 | 0 |
| HCHON2000323 | 0 | 0 | 0 | 0 | 0 | 0 | 4.602 |
| HCHON2000373 | 3.673 | 0 | 0 | 0 | 0 | 0 | 0 |
| HCHON2000473 | 0 | 0 | 0 | 0 | 0 | 0 | 7.272 |
| HCHON2000475 | 0 | 0 | 0 | 6.416 | 0 | 0 | 0 |
| HCHON2000508 | 0 | 0 | 0 | 0.900 | 0 | 2.752 | 0.464 |
| HCHON2000676 | 0 | 0 | 0 | 0 | 0 | 0 | 3.704 |
| HCHON2000698 | 10.388 | 0 | 0 | 0 | 0 | 0 | 3.561 |
| HCHON2000738 | 0 | 5.411 | 0 | 7.176 | 0 | 0 | 0 |
| HCHON2000743 | 0 | 0 | 0 | 0 | 0 | 0 | 7.585 |
| HCHON2000751 | 0 | 0 | 0 | 0 | 0 | 0 | 4.435 |
| HCHON2000815 | 20.242 | 5.075 | 0 | 0 | 0 | 0 | 3.469 |
| HCHON2000826 | 2.594 | 3.902 | 0 | 10.349 | 0 | 5.275 | 2.667 |
| HCHON2000832 | 12.822 | 19.287 | 0 | 17.053 | 0 | 0 | 0 |
| HCHON2001039 | 0 | 0 | 0 | 0 | 0 | 0 | 4.159 |
| HCHON2001084 | 0 | 4.173 | 0 | 0 | 0 | 0 | 0 |
| HCHON2001161 | 0 | 0 | 0 | 0 | 0 | 0 | 13.376 |
| HCHON2001200 | 3.135 | 0 | 0 | 3.127 | 0 | 3.188 | 1.612 |
| HCHON2001217 | 0 | 5.674 | 0 | 2.509 | 0 | 0 | 2.586 |
| HCHON2001359 | 0 | 1.547 | 0 | 0 | 0 | 0 | 0 |
| HCHON2001407 | 5.724 | 1.435 | 0 | 3.806 | 0 | 0 | 4.905 |
| HCHON2001548 | 0 | 0 | 0 | 27.583 | 0 | 0 | 0 |
| HCHON2001665 | 0 | 0 | 0 | 0 | 0 | 0 | 5.751 |
| HCHON2002247 | 10.174 | 0 | 0 | 6.766 | 0 | 0 | 0 |
| HCHON2004858 | 0 | 0 | 0 | 0 | 0 | 0 | 16.411 |
| HCHON2005921 | 0 | 0 | 0 | 0 | 0 | 0 | 5.152 |
| HCHON2006250 | 0 | 0 | 0 | 3.771 | 0 | 0 | 0 |
| HCHON2006459 | 0 | 19.614 | 0 | 0 | 0 | 0 | 0 |
| HCHON2007881 | 0 | 0 | 0 | 0 | 0 | 0 | 16.411 |
| HCHON2010543 | 0 | 0 | 0 | 0 | 0 | 0 | 11.144 |
| HEART1000074 | 0 | 0 | 0 | 1.830 | 0 | 0 | 2.829 |
| HEART1000118 | 0 | 0 | 0 | 0 | 0 | 0 | 13.769 |
| HEART1000132 | 0 | 0 | 0 | 0 | 0 | 21.405 | 0 |
| HEART1000142 | 0 | 0 | 0 | 0 | 0 | 13.139 | 0 |
| HEART1000149 | 0 | 1.707 | 0 | 0 | 0 | 0 | 1.167 |
| HEART1000173 | 9.512 | 0 | 0 | 0 | 0 | 0 | 0 |
| HEART1000185 | 0 | 0 | 0 | 0 | 0 | 11.653 | 0 |
| HEART2000411 | 0 | 0 | 0 | 0 | 0 | 15.549 | 0 |
| HEART2006521 | 0 | 4.346 | 0 | 5.764 | 0 | 0 | 0 |
| HEART2007231 | 0 | 17.605 | 0 | 11.675 | 0 | 0 | 0 |
| HEART2007696 | 0 | 0 | 0 | 12.004 | 0 | 0 | 0 |
| HHDPC1000083 | 0 | 1.779 | 0 | 0 | 0 | 0 | 2.432 |
| HHDPC1000114 | 5.267 | 2.641 | 0 | 0 | 0 | 0 | 0 |
| HHDPC1000118 | 15.191 | 3.809 | 0 | 10.102 | 0 | 0 | 0 |
| HHDPC1000163 | 4.557 | 0 | 0 | 3.031 | 0 | 0 | 0 |
| HHDPC2000055 | 0 | 0 | 0 | 4.407 | 0 | 0 | 0 |
| HHDPC2000102 | 0 | 8.628 | 0 | 0 | 0 | 0 | 5.899 |
| HHDPC2000104 | 0 | 0 | 0 | 4.459 | 0 | 0 | 4.596 |
| HHDPC2000455 | 0 | 0 | 0 | 1.324 | 0 | 0 | 0 |
| HHDPC2000456 | 0 | 0 | 0 | 3.742 | 0 | 0 | 1.929 |
| HHDPC2000462 | 0 | 20.514 | 0 | 0 | 0 | 0 | 0 |
| HHDPC2000572 | 0 | 11.897 | 0 | 0 | 0 | 0 | 0 |
| HHDPC2001896 | 33.980 | 0 | 0 | 0 | 0 | 0 | 0 |
| HHDPC2003439 | 0.922 | 1.387 | 0 | 0.613 | 0 | 0 | 5.371 |
| HHDPC2003983 | 0 | 6.072 | 0 | 3.356 | 0 | 0 | 1.038 |
| HHDPC2007267 | 0 | 0 | 0 | 1.177 | 0 | 7.196 | 0 |
| HHDPC2009528 | 0 | 0 | 0 | 0 | 0 | 0 | 8.074 |
| HLUNG1000037 | 0 | 0 | 0 | 21.178 | 0 | 0 | 0 |
| HLUNG1000055 | 1.962 | 0.984 | 0 | 2.609 | 0 | 0 | 4.035 |
| HLUNG1000091 | 0 | 0 | 0 | 0 | 0 | 0 | 18.384 |
| HLUNG2000412 | 0 | 4.866 | 0 | 0 | 0 | 0 | 3.326 |
| HLUNG2000846 | 0 | 0 | 0 | 0 | 0 | 0 | 5.612 |
| HLUNG2001146 | 0 | 0 | 0 | 0 | 0 | 0 | 13.024 |
| HLUNG2001518 | 0 | 0 | 0 | 0 | 0 | 0 | 4.075 |
| HLUNG2001633 | 0 | 0 | 0 | 0 | 0 | 0 | 9.947 |
| HLUNG2001677 | 0 | 6.385 | 0 | 0 | 0 | 0 | 0 |
| HLUNG2001712 | 0 | 0 | 0 | 0 | 0 | 0 | 4.096 |
| HLUNG2002334 | 33.313 | 0 | 0 | 0 | 0 | 0 | 0 |
| HLUNG2003042 | 0 | 4.326 | 0 | 0 | 0 | 17.544 | 0 |
| HLUNG2003306 | 0 | 0 | 0 | 0 | 0 | 0 | 15.907 |
| HLUNG2003378 | 0 | 16.824 | 0 | 0 | 0 | 0 | 0 |
| HLUNG2004067 | 0 | 0 | 0 | 26.538 | 0 | 0 | 0 |
| HLUNG2004159 | 0 | 3.295 | 0 | 0 | 0 | 0 | 2.252 |
| HLUNG2004170 | 0 | 0 | 0 | 0 | 0 | 0 | 7.655 |
| HLUNG2004388 | 0 | 8.114 | 0 | 0 | 0 | 0 | 0 |
| HLUNG2005133 | 0 | 0 | 0 | 34.145 | 0 | 0 | 0 |
| HLUNG2006812 | 0 | 0 | 0 | 7.127 | 0 | 21.793 | 3.673 |
| HLUNG2006843 | 0 | 18.861 | 0 | 25.015 | 0 | 0 | 0 |
| HLUNG2007210 | 0 | 0 | 0 | 9.908 | 0 | 0 | 0 |
| HLUNG2008153 | 24.669 | 0 | 0 | 0 | 0 | 0 | 0 |
| HLUNG2008348 | 0 | 0 | 0 | 0 | 0 | 0 | 31.571 |
| HLUNG2009225 | 0 | 0 | 0 | 0 | 0 | 0 | 3.747 |
| HLUNG2017262 | 0 | 0 | 0 | 0 | 0 | 0 | 9.850 |
| HSYRA1000062 | 3.105 | 2.335 | 0 | 1.032 | 0 | 0 | 3.193 |
| HSYRA1000119 | 0 | 1.671 | 0 | 0 | 0 | 0 | 0 |
| HSYRA1000137 | 0 | 6.772 | 0 | 0 | 0 | 0 | 18.519 |
| HSYRA1000148 | 0 | 0 | 0 | 0 | 0 | 0 | 8.192 |
| HSYRA1000152 | 0 | 2.167 | 0 | 2.875 | 0 | 0 | 7.409 |
| HSYRA1000178 | 0 | 4.557 | 0 | 0 | 0 | 0 | 3.115 |
| HSYRA2000135 | 14.334 | 7.187 | 0 | 0 | 0 | 0 | 0 |
| HSYRA2000137 | 0 | 4.119 | 0 | 0 | 0 | 0 | 0 |
| HSYRA2000159 | 0.437 | 1.534 | 0 | 0.291 | 0 | 0.889 | 1.947 |
| HSYRA2000190 | 8.607 | 0 | 0 | 0 | 0 | 0 | 2.950 |
| HSYRA2000221 | 0 | 0 | 0 | 0 | 0 | 0 | 11.760 |
| HSYRA2000224 | 0 | 0 | 0 | 0 | 0 | 0 | 2.234 |
| HSYRA2000232 | 8.039 | 1.344 | 0 | 1.782 | 0 | 0 | 6.430 |
| HSYRA2000248 | 2.463 | 0 | 0 | 1.638 | 0 | 0 | 4.222 |
| HSYRA2000255 | 0 | 0.815 | 0 | 0 | 0 | 0 | 0 |
| HSYRA2000332 | 0 | 0 | 0 | 0 | 0 | 0 | 1.938 |
| HSYRA2000605 | 0 | 10.873 | 0 | 0 | 0 | 0 | 0 |
| HSYRA2000743 | 0 | 4.219 | 0 | 5.595 | 0 | 0 | 5.768 |
| HSYRA2000828 | 0 | 2.589 | 0 | 10.301 | 0 | 0 | 0 |
| HSYRA2000925 | 0 | 0 | 0 | 0 | 0 | 0 | 0.275 |
| HSYRA2001105 | 0 | 0 | 0 | 6.640 | 0 | 0 | 0 |
| HSYRA2001138 | 0.924 | 1.390 | 0 | 0.614 | 0 | 0 | 0 |
| HSYRA2001225 | 0 | 0 | 0 | 3.563 | 0 | 0 | 1.837 |
| HSYRA2001396 | 0 | 2.761 | 0 | 0 | 0 | 0 | 0 |
| HSYRA2001476 | 0 | 0.877 | 0 | 1.164 | 0 | 0 | 0.600 |
| HSYRA2001567 | 0 | 0 | 0 | 0 | 0 | 0 | 2.784 |
| HSYRA2001574 | 0 | 1.367 | 0 | 1.813 | 0 | 0 | 1.869 |
| HSYRA2001595 | 8.258 | 1.035 | 16.393 | 5.492 | 0 | 0 | 1.415 |
| HSYRA2001615 | 0 | 11.306 | 0 | 0 | 0 | 0 | 2.576 |
| HSYRA2001621 | 0 | 0.667 | 5.280 | 0.442 | 0 | 0 | 0 |
| HSYRA2001638 | 0 | 0 | 0 | 10.902 | 0 | 0 | 5.619 |
| HSYRA2007650 | 0 | 8.644 | 0 | 0 | 0 | 0 | 0 |
| IMR321000158 | 0 | 5.533 | 0 | 0 | 0 | 0 | 0 |
| IMR321000207 | 50.668 | 0 | 0 | 0 | 0 | 0 | 0 |
| IMR321000210 | 3.673 | 5.526 | 0 | 4.886 | 0 | 7.470 | 3.778 |
| IMR321000219 | 1.017 | 4.590 | 0 | 2.029 | 0 | 2.069 | 4.881 |
| IMR321000242 | 0 | 0 | 0 | 0 | 0 | 0 | 6.986 |
| IMR321000266 | 0 | 5.143 | 0 | 0 | 0 | 0 | 0 |
| IMR322000072 | 0 | 0 | 0 | 1.934 | 0 | 0 | 0 |
| IMR322000121 | 0 | 0 | 0 | 0 | 0 | 8.216 | 1.385 |
| IMR322000127 | 0 | 0 | 0 | 3.733 | 0 | 0 | 1.924 |
| IMR322000144 | 0 | 0 | 0 | 3.931 | 0 | 0 | 2.026 |
| IMR322000223 | 2.467 | 2.475 | 0 | 0 | 0 | 0 | 0 |
| IMR322000243 | 0 | 3.118 | 0 | 0 | 0 | 6.323 | 2.132 |
| IMR322000302 | 21.500 | 10.781 | 0 | 0 | 0 | 0 | 0 |
| IMR322000316 | 9.023 | 5.278 | 0 | 1.000 | 0 | 0 | 10.310 |
| IMR322000555 | 0 | 0 | 0 | 0 | 0 | 0 | 7.411 |
| IMR322000730 | 0.497 | 0.249 | 3.944 | 0 | 0 | 0 | 0 |
| IMR322000775 | 0 | 0 | 0 | 0 | 0 | 30.557 | 0 |
| IMR322000791 | 18.803 | 0 | 0 | 0 | 0 | 0 | 0 |
| IMR322000917 | 0 | 0 | 0 | 0 | 0 | 0 | 14.674 |
| IMR322000935 | 5.426 | 0 | 0 | 0 | 0 | 0 | 1.860 |
| IMR322000973 | 0 | 0 | 0 | 1.943 | 0 | 0 | 0 |
| IMR322001317 | 5.724 | 0 | 0 | 0 | 0 | 0 | 0 |
| IMR322001332 | 9.649 | 0 | 0 | 0 | 0 | 0 | 0 |
| IMR322001380 | 7.184 | 3.602 | 0 | 0 | 0 | 0 | 0 |
| IMR322001435 | 3.405 | 0 | 0 | 0 | 0 | 0 | 1.167 |
| IMR322001541 | 6.131 | 0 | 0 | 0 | 0 | 0 | 0 |
| IMR322001600 | 0 | 0.585 | 0 | 1.164 | 0 | 2.373 | 0 |
| IMR322001670 | 0 | 0 | 0 | 0 | 0 | 0 | 5.667 |
| IMR322001710 | 0 | 3.524 | 0 | 4.674 | 0 | 14.294 | 0 |
| IMR322001879 | 0 | 35.028 | 0 | 0 | 0 | 0 | 0 |
| IMR322002993 | 0 | 0 | 0 | 0 | 0 | 0 | 19.337 |
| IMR322012529 | 0 | 0 | 0 | 0 | 0 | 0 | 17.550 |
| KIDNE1000143 | 0 | 1.208 | 0 | 0 | 0 | 0 | 0 |
| KIDNE1000145 | 0 | 0 | 0 | 6.665 | 0 | 0 | 0 |
| KIDNE2000085 | 0 | 0 | 0 | 4.957 | 0 | 0 | 0 |
| KIDNE2000252 | 6.195 | 1.553 | 0 | 0 | 0 | 0 | 6.370 |
| KIDNE2000330 | 0 | 0 | 0 | 8.228 | 0 | 0 | 0 |
| KIDNE2000403 | 0 | 0 | 0 | 1.991 | 0 | 0 | 0 |
| KIDNE2000574 | 0 | 0 | 0 | 0 | 0 | 0 | 0.930 |
| KIDNE2000665 | 7.016 | 0 | 0 | 0 | 0 | 0 | 2.405 |
| KIDNE2000721 | 0 | 0 | 0 | 0 | 0 | 0 | 26.272 |
| KIDNE2000947 | 0 | 0 | 0 | 0 | 0 | 0 | 9.419 |
| KIDNE2001162 | 3.383 | 0 | 0 | 1.125 | 0 | 0 | 0.580 |
| KIDNE2001467 | 0.945 | 2.368 | 0 | 2.513 | 0 | 1.921 | 4.857 |
| KIDNE2001979 | 0 | 0 | 0 | 28.399 | 0 | 0 | 0 |
| KIDNE2002191 | 0 | 0 | 0 | 34.358 | 0 | 0 | 17.710 |
| KIDNE2002252 | 0 | 3.961 | 0 | 0 | 0 | 0 | 2.708 |
| KIDNE2002265 | 0 | 0 | 0 | 4.383 | 0 | 0 | 11.297 |
| KIDNE2002883 | 0 | 0 | 0 | 0 | 0 | 16.715 | 0 |
| KIDNE2003305 | 0 | 0 | 0 | 2.029 | 0 | 0 | 0 |
| KIDNE2003941 | 0 | 1.833 | 0 | 3.647 | 0 | 0 | 0.627 |
| KIDNE2004475 | 9.329 | 0 | 0 | 0 | 0 | 0 | 9.593 |
| KIDNE2004534 | 0 | 0 | 0 | 8.996 | 0 | 0 | 9.274 |
| KIDNE2005042 | 0 | 0 | 0 | 0 | 0 | 0 | 10.002 |
| KIDNE2005321 | 35.810 | 17.956 | 0 | 0 | 0 | 0 | 0 |
| KIDNE2005676 | 0 | 7.670 | 0 | 6.781 | 0 | 0 | 1.748 |
| KIDNE2006014 | 0 | 10.792 | 0 | 7.156 | 0 | 0 | 0 |
| KIDNE2006030 | 0 | 3.878 | 0 | 0 | 0 | 0 | 5.302 |
| KIDNE2006248 | 2.254 | 3.390 | 0 | 0.749 | 0 | 0 | 0.386 |
| KIDNE2006465 | 0 | 5.623 | 0 | 7.458 | 0 | 0 | 19.220 |
| KIDNE2006775 | 0 | 3.329 | 0 | 0 | 0 | 0 | 0 |
| KIDNE2006811 | 0 | 0 | 0 | 0 | 0 | 0 | 4.043 |
| KIDNE2007328 | 0 | 6.431 | 0 | 0 | 0 | 0 | 0 |
| KIDNE2007352 | 1.507 | 1.511 | 0 | 0 | 0 | 3.064 | 1.033 |
| KIDNE2007954 | 15.279 | 0 | 0 | 0 | 0 | 0 | 0 |
| KIDNE2008048 | 1.944 | 6.824 | 0 | 1.293 | 0 | 3.954 | 5.998 |
| KIDNE2008914 | 0 | 0 | 0 | 0 | 0 | 0 | 21.609 |
| KIDNE2008987 | 10.440 | 0 | 0 | 0 | 0 | 0 | 0 |
| KIDNE2009019 | 0 | 0 | 0 | 0 | 0 | 0 | 26.272 |
| KIDNE2009332 | 0 | 34.265 | 0 | 0 | 0 | 0 | 0 |
| KIDNE2009367 | 0 | 0 | 0 | 0 | 0 | 5.555 | 0.936 |
| KIDNE2010430 | 0 | 17.330 | 0 | 0 | 0 | 0 | 0 |
| KIDNE2012025 | 0 | 0 | 67.526 | 0 | 0 | 0 | 0 |
| KIDNE2012188 | 0 | 16.225 | 0 | 21.519 | 0 | 0 | 0 |
| KIDNE2012316 | 0 | 0 | 0 | 40.874 | 0 | 0 | 0 |
| KIDNE2012440 | 0 | 0 | 0 | 0 | 0 | 0 | 2.199 |
| KIDNE2013845 | 0 | 0 | 0 | 0 | 0 | 0 | 5.554 |
| KIDNE2014290 | 0 | 0 | 0 | 0 | 0 | 0 | 0.871 |
| KIDNE2015445 | 0 | 0 | 0 | 0 | 0 | 0 | 4.268 |
| KIDNE2017040 | 0 | 0 | 0 | 0 | 0 | 0 | 8.355 |
| KIDNE2018217 | 21.992 | 11.027 | 0 | 0 | 0 | 0 | 0 |
| KIDNE2018891 | 0 | 0 | 0 | 0 | 0 | 0 | 7.576 |
| LIVER1000079 | 6.350 | 0 | 0 | 0 | 0 | 0 | 0 |
| LIVER2000033 | 0 | 2.514 | 0 | 0 | 0 | 0 | 0 |
| LIVER2001539 | 0 | 0 | 0 | 0 | 0 | 0 | 6.186 |
| LIVER2001608 | 0 | 0 | 0 | 0 | 0 | 0 | 1.631 |
| LIVER2006006 | 2.577 | 3.877 | 0 | 1.714 | 0 | 0 | 0 |
| LIVER2008465 | 0 | 0 | 0 | 15.950 | 0 | 0 | 0 |
| MAMGL1000032 | 0.584 | 0.293 | 0 | 0 | 0 | 0 | 0 |
| MAMGL1000035 | 0.730 | 0.732 | 0 | 0 | 0 | 0 | 0.500 |
| MAMGL1000173 | 0 | 0 | 0 | 0.639 | 0 | 0 | 0 |
| MESAN1000050 | 0 | 2.917 | 0 | 7.738 | 0 | 0 | 0 |
| MESAN1000101 | 0 | 0 | 0 | 0 | 0 | 0 | 14.341 |
| MESAN1000126 | 0 | 0 | 0 | 0 | 0 | 0 | 2.218 |
| MESAN1000147 | 0 | 37.266 | 0 | 24.712 | 0 | 0 | 0 |
| MESAN2000149 | 0 | 0 | 0 | 0 | 0 | 0 | 3.052 |
| MESAN2000267 | 4.452 | 0 | 0 | 1.974 | 0 | 3.018 | 2.035 |
| MESAN2000457 | 0 | 7.197 | 0 | 0 | 0 | 0 | 0 |
| MESAN2000501 | 0 | 5.452 | 0 | 0 | 0 | 0 | 0 |
| MESAN2000572 | 0 | 3.716 | 0 | 0 | 0 | 0 | 0 |
| MESAN2000608 | 2.850 | 0 | 0 | 1.895 | 0 | 5.795 | 0.977 |
| MESAN2001627 | 0 | 23.769 | 0 | 0 | 0 | 0 | 0 |
| MESAN2002086 | 0 | 3.026 | 0 | 1.003 | 0 | 0 | 0.517 |
| MESAN2002122 | 0 | 0 | 0 | 0 | 0 | 0 | 33.057 |
| MESAN2002186 | 7.944 | 0 | 0 | 0 | 0 | 0 | 0 |
| MESAN2002519 | 0 | 0 | 0 | 0 | 0 | 0 | 5.761 |
| MESAN2002844 | 26.260 | 0 | 0 | 0 | 0 | 0 | 0 |
| MESAN2002940 | 0 | 0 | 0 | 0 | 0 | 0 | 3.951 |
| MESAN2003035 | 0 | 0 | 0 | 0 | 0 | 0 | 8.903 |
| MESAN2003039 | 0 | 0 | 0 | 0 | 0 | 0 | 20.223 |
| MESAN2003058 | 0 | 0 | 0 | 14.434 | 0 | 0 | 7.440 |
| MESAN2003444 | 0 | 0 | 0 | 0 | 0 | 0 | 4.628 |
| MESAN2003622 | 2.178 | 2.184 | 0 | 0 | 0 | 4.429 | 0 |
| MESAN2005633 | 0 | 0 | 0 | 0 | 0 | 0 | 10.663 |
| MESAN2005689 | 0 | 0 | 0 | 7.477 | 0 | 0 | 7.708 |
| MESAN2005766 | 0 | 0 | 0 | 9.507 | 0 | 0 | 1.225 |
| MESAN2006043 | 0 | 14.474 | 0 | 0 | 0 | 0 | 0 |
| MESAN2006401 | 0 | 0 | 0 | 4.360 | 0 | 0 | 15.732 |
| MESAN2006563 | 0 | 2.510 | 0 | 1.664 | 0 | 0 | 2.573 |
| MESAN2006743 | 13.969 | 0 | 0 | 0 | 0 | 0 | 0 |
| MESAN2006953 | 0 | 12.461 | 0 | 0 | 0 | 0 | 0 |
| MESAN2008334 | 0 | 0 | 0 | 0 | 0 | 0 | 10.213 |
| MESAN2008926 | 0 | 0 | 0 | 0 | 0 | 0 | 3.966 |
| MESAN2008936 | 0 | 14.459 | 0 | 0 | 0 | 0 | 4.942 |
| MESAN2009019 | 0 | 0 | 0 | 56.483 | 0 | 0 | 0 |
| MESAN2011984 | 0 | 0 | 0 | 4.112 | 0 | 0 | 2.119 |
| MESAN2012054 | 0 | 4.636 | 0 | 0 | 0 | 0 | 3.169 |
| MESAN2012113 | 0 | 10.721 | 0 | 14.219 | 0 | 0 | 7.329 |
| MESAN2013284 | 8.902 | 6.696 | 0 | 8.880 | 0 | 0 | 9.154 |
| MESAN2013908 | 25.005 | 0 | 0 | 0 | 0 | 0 | 0 |
| MESAN2015391 | 0 | 0 | 0 | 0 | 0 | 0 | 25.095 |
| MESAN2015515 | 0 | 0 | 0 | 6.402 | 0 | 0 | 0 |
| MESAN2016552 | 0 | 0 | 0 | 0 | 0 | 0 | 30.229 |
| MESAN2017133 | 0 | 0 | 0 | 0 | 0 | 0 | 10.900 |
| NB9N41000011 | 0 | 0 | 0 | 0 | 0 | 0 | 2.644 |
| NB9N41000047 | 0 | 0 | 0 | 0 | 0 | 0 | 3.265 |
| NB9N41000121 | 0 | 0 | 0 | 0 | 0 | 0 | 0.933 |
| NB9N41000135 | 0 | 4.030 | 0 | 0 | 0 | 0 | 0 |
| NB9N41000142 | 0 | 0 | 0 | 6.452 | 0 | 0 | 0 |
| NB9N42000281 | 0 | 3.475 | 0 | 0 | 0 | 0 | 9.501 |
| NHNPC2000206 | 7.466 | 2.496 | 0 | 8.275 | 0 | 0 | 2.559 |
| NHNPC2000212 | 0 | 0 | 0 | 0 | 0 | 0 | 4.329 |
| NHNPC2001312 | 0 | 0 | 0 | 0 | 0 | 0 | 4.743 |
| NHNPC2001931 | 0 | 0 | 0 | 0 | 0 | 17.586 | 0 |
| NOVAR1000091 | 0 | 3.519 | 0 | 0 | 0 | 0 | 0 |
| NOVAR2000783 | 0 | 0 | 0 | 0 | 0 | 0 | 4.698 |
| NT2NE1000004 | 29.929 | 0 | 0 | 0 | 0 | 0 | 0 |
| NT2NE1000014 | 31.502 | 15.796 | 0 | 0 | 0 | 0 | 10.799 |
| NT2NE1000018 | 9.012 | 0 | 0 | 0 | 0 | 0 | 6.178 |
| NT2NE1000023 | 100 | 0 | 0 | 0 | 0 | 0 | 0 |
| NT2NE1000024 | 13.913 | 0 | 0 | 18.505 | 0 | 0 | 4.769 |
| NT2NE1000059 | 19.602 | 0 | 0 | 0 | 0 | 0 | 6.719 |
| NT2NE1000063 | 100 | 0 | 0 | 0 | 0 | 0 | 0 |
| NT2NE1000073 | 57.716 | 14.470 | 0 | 0 | 0 | 0 | 0 |
| NT2NE1000083 | 100 | 0 | 0 | 0 | 0 | 0 | 0 |
| NT2NE1000120 | 100 | 0 | 0 | 0 | 0 | 0 | 0 |
| NT2NE1000122 | 81.295 | 0 | 0 | 0 | 0 | 0 | 0 |
| NT2NE1000163 | 1.468 | 2.208 | 0 | 0 | 0 | 0 | 0.503 |
| NT2NE1000175 | 100 | 0 | 0 | 0 | 0 | 0 | 0 |
| NT2NE1000181 | 66.155 | 0 | 0 | 0 | 0 | 0 | 0 |
| NT2NE1000185 | 100 | 0 | 0 | 0 | 0 | 0 | 0 |
| NT2NE2000038 | 100 | 0 | 0 | 0 | 0 | 0 | 0 |
| NT2NE2000054 | 100 | 0 | 0 | 0 | 0 | 0 | 0 |
| NT2NE2000056 | 1.424 | 1.428 | 0 | 0 | 0 | 2.895 | 3.416 |
| NT2NE2000057 | 100 | 0 | 0 | 0 | 0 | 0 | 0 |
| NT2NE2000064 | 100 | 0 | 0 | 0 | 0 | 0 | 0 |
| NT2NE2000109 | 100 | 0 | 0 | 0 | 0 | 0 | 0 |
| NT2NE2000137 | 100 | 0 | 0 | 0 | 0 | 0 | 0 |
| NT2NE2000156 | 46.158 | 23.145 | 0 | 30.696 | 0 | 0 | 0 |
| NT2NE2000174 | 4.149 | 0 | 0 | 1.839 | 0 | 0 | 0 |
| NT2NE2000195 | 11.142 | 0 | 0 | 0 | 0 | 0 | 0 |
| NT2NE2000222 | 100 | 0 | 0 | 0 | 0 | 0 | 0 |
| NT2NE2000259 | 30.583 | 0 | 0 | 0 | 0 | 0 | 6.989 |
| NT2NE2000260 | 0.438 | 0 | 0 | 0.291 | 0 | 0 | 0 |
| NT2NE2000284 | 100 | 0 | 0 | 0 | 0 | 0 | 0 |
| NT2NE2000299 | 100 | 0 | 0 | 0 | 0 | 0 | 0 |
| NT2NE2000327 | 9.117 | 0 | 0 | 18.189 | 0 | 0 | 0 |
| NT2NE2000353 | 66.235 | 0 | 0 | 0 | 0 | 0 | 0 |
| NT2NE2000356 | 81.295 | 0 | 0 | 0 | 0 | 0 | 0 |
| NT2NE2000369 | 100 | 0 | 0 | 0 | 0 | 0 | 0 |
| NT2NE2000374 | 100 | 0 | 0 | 0 | 0 | 0 | 0 |
| NT2NE2000383 | 5.507 | 0 | 0 | 0 | 0 | 0 | 1.888 |
| NT2NE2000384 | 8.341 | 0 | 0 | 0 | 0 | 0 | 0 |
| NT2NE2000386 | 56.001 | 0 | 0 | 0 | 0 | 0 | 0 |
| NT2NE2000390 | 100 | 0 | 0 | 0 | 0 | 0 | 0 |
| NT2NE2000392 | 6.471 | 0 | 0 | 0 | 0 | 0 | 14.418 |
| NT2NE2000455 | 75.239 | 0 | 0 | 0 | 0 | 0 | 0 |
| NT2NE2000470 | 19.777 | 0 | 0 | 0 | 0 | 0 | 13.558 |
| NT2NE2000488 | 100 | 0 | 0 | 0 | 0 | 0 | 0 |
| NT2NE2000517 | 51.465 | 0 | 0 | 34.226 | 0 | 0 | 0 |
| NT2NE2000536 | 31.191 | 0 | 0 | 0 | 0 | 0 | 0 |
| NT2NE2000546 | 100 | 0 | 0 | 0 | 0 | 0 | 0 |
| NT2NE2000548 | 76.570 | 0 | 0 | 0 | 0 | 0 | 0 |
| NT2NE2000550 | 100 | 0 | 0 | 0 | 0 | 0 | 0 |
| NT2NE2000575 | 1.742 | 0.874 | 0 | 0 | 0 | 0 | 0.299 |
| NT2NE2000586 | 100 | 0 | 0 | 0 | 0 | 0 | 0 |
| NT2NE2000612 | 100 | 0 | 0 | 0 | 0 | 0 | 0 |
| NT2NE2000636 | 26.172 | 6.562 | 0 | 0 | 0 | 0 | 0 |
| NT2NE2000658 | 100 | 0 | 0 | 0 | 0 | 0 | 0 |
| NT2NE2000706 | 100 | 0 | 0 | 0 | 0 | 0 | 0 |
| NT2NE2000707 | 2.426 | 2.433 | 0 | 3.226 | 0 | 0 | 4.157 |
| NT2NE2000763 | 4.349 | 0 | 0 | 2.892 | 0 | 0 | 4.473 |
| NT2NE2000802 | 100 | 0 | 0 | 0 | 0 | 0 | 0 |
| NT2NE2000808 | 100 | 0 | 0 | 0 | 0 | 0 | 0 |
| NT2NE2000809 | 12.284 | 0 | 0 | 16.339 | 0 | 0 | 0 |
| NT2NE2000864 | 83.623 | 0 | 0 | 0 | 0 | 0 | 0 |
| NT2NE2000909 | 23.727 | 0 | 0 | 0 | 0 | 0 | 12.200 |
| NT2NE2000913 | 26.733 | 0 | 0 | 17.778 | 0 | 0 | 9.163 |
| NT2NE2000950 | 18.995 | 9.524 | 0 | 0 | 0 | 0 | 0 |
| NT2NE2000951 | 100 | 0 | 0 | 0 | 0 | 0 | 0 |
| NT2NE2000963 | 4.157 | 1.251 | 0 | 0.553 | 0 | 0 | 0 |
| NT2NE2000980 | 55.327 | 27.743 | 0 | 0 | 0 | 0 | 0 |
| NT2NE2001000 | 3.119 | 1.564 | 0 | 0 | 0 | 0 | 1.069 |
| NT2NE2001005 | 84.719 | 0 | 0 | 0 | 0 | 0 | 0 |
| NT2NE2001021 | 100 | 0 | 0 | 0 | 0 | 0 | 0 |
| NT2NE2001040 | 56.184 | 0 | 0 | 0 | 0 | 0 | 0 |
| NT2NE2001048 | 5.424 | 2.720 | 0 | 3.607 | 0 | 11.031 | 0 |
| NT2NE2001049 | 31.847 | 0 | 0 | 21.179 | 0 | 0 | 0 |
| NT2NE2001142 | 100 | 0 | 0 | 0 | 0 | 0 | 0 |
| NT2NE2001156 | 20.368 | 0 | 0 | 0 | 0 | 0 | 0 |
| NT2NE2001176 | 8.279 | 2.076 | 0 | 0 | 0 | 0 | 7.095 |
| NT2NE2001180 | 50.569 | 0 | 0 | 0 | 0 | 0 | 0 |
| NT2NE2001181 | 67.567 | 0 | 0 | 0 | 0 | 0 | 0 |
| NT2NE2001188 | 100 | 0 | 0 | 0 | 0 | 0 | 0 |
| NT2NE2001191 | 100 | 0 | 0 | 0 | 0 | 0 | 0 |
| NT2NE2001247 | 100 | 0 | 0 | 0 | 0 | 0 | 0 |
| NT2NE2001252 | 100 | 0 | 0 | 0 | 0 | 0 | 0 |
| NT2NE2001324 | 83.623 | 0 | 0 | 0 | 0 | 0 | 0 |
| NT2NE2001326 | 76.390 | 0 | 0 | 0 | 0 | 0 | 0 |
| NT2NE2001337 | 16.469 | 0 | 0 | 10.952 | 0 | 0 | 5.645 |
| NT2NE2001364 | 38.745 | 0 | 0 | 0 | 0 | 0 | 0 |
| NT2NE2001372 | 100 | 0 | 0 | 0 | 0 | 0 | 0 |
| NT2NE2001397 | 47.665 | 0 | 0 | 0 | 0 | 0 | 0 |
| NT2NE2001403 | 37.604 | 0 | 0 | 12.504 | 0 | 0 | 6.445 |
| NT2NE2001428 | 100 | 0 | 0 | 0 | 0 | 0 | 0 |
| NT2NE2001432 | 100 | 0 | 0 | 0 | 0 | 0 | 0 |
| NT2NE2001435 | 3.853 | 0 | 0 | 0 | 0 | 0 | 14.528 |
| NT2NE2001442 | 18.110 | 0 | 0 | 0 | 0 | 0 | 6.208 |
| NT2NE2001524 | 100 | 0 | 0 | 0 | 0 | 0 | 0 |
| NT2NE2001530 | 25.357 | 0 | 0 | 0 | 0 | 0 | 0 |
| NT2NE2001545 | 19.481 | 0 | 0 | 8.637 | 0 | 0 | 2.226 |
| NT2NE2001598 | 45.971 | 0 | 0 | 0 | 0 | 0 | 0 |
| NT2NE2001617 | 16.442 | 0 | 0 | 0 | 0 | 0 | 0 |
| NT2NE2001623 | 100 | 0 | 0 | 0 | 0 | 0 | 0 |
| NT2NE2001626 | 100 | 0 | 0 | 0 | 0 | 0 | 0 |
| NT2NE2001634 | 100 | 0 | 0 | 0 | 0 | 0 | 0 |
| NT2NE2001648 | 31.454 | 0 | 0 | 0 | 0 | 0 | 0 |
| NT2NE2001655 | 20.296 | 2.544 | 0 | 0 | 0 | 0 | 0 |
| NT2NE2001660 | 28.385 | 0 | 0 | 0 | 0 | 0 | 0 |
| NT2NE2001666 | 100 | 0 | 0 | 0 | 0 | 0 | 0 |
| NT2NE2001677 | 100 | 0 | 0 | 0 | 0 | 0 | 0 |
| NT2NE2001697 | 19.787 | 0 | 0 | 0 | 0 | 0 | 0 |
| NT2NE2001698 | 100 | 0 | 0 | 0 | 0 | 0 | 0 |
| NT2NE2001723 | 100 | 0 | 0 | 0 | 0 | 0 | 0 |
| NT2NE2001725 | 100 | 0 | 0 | 0 | 0 | 0 | 0 |
| NT2NE2001793 | 7.518 | 15.079 | 0 | 5.000 | 0 | 0 | 5.154 |
| NT2NE2001874 | 100 | 0 | 0 | 0 | 0 | 0 | 0 |
| NT2NE2001889 | 100 | 0 | 0 | 0 | 0 | 0 | 0 |
| NT2NE2001923 | 100 | 0 | 0 | 0 | 0 | 0 | 0 |
| NT2NE2002100 | 81.295 | 0 | 0 | 0 | 0 | 0 | 0 |
| NT2NE2002162 | 44.305 | 0 | 0 | 0 | 0 | 0 | 0 |
| NT2NE2002186 | 100 | 0 | 0 | 0 | 0 | 0 | 0 |
| NT2NE2002285 | 100 | 0 | 0 | 0 | 0 | 0 | 0 |
| NT2NE2002311 | 100 | 0 | 0 | 0 | 0 | 0 | 0 |
| NT2NE2002620 | 3.466 | 0 | 0 | 0 | 0 | 0 | 0 |
| NT2NE2002651 | 100 | 0 | 0 | 0 | 0 | 0 | 0 |
| NT2NE2002732 | 100 | 0 | 0 | 0 | 0 | 0 | 0 |
| NT2NE2002768 | 100 | 0 | 0 | 0 | 0 | 0 | 0 |
| NT2NE2002791 | 100 | 0 | 0 | 0 | 0 | 0 | 0 |
| NT2NE2002856 | 100 | 0 | 0 | 0 | 0 | 0 | 0 |
| NT2NE2002870 | 8.273 | 0 | 0 | 0 | 0 | 0 | 2.836 |
| NT2NE2003150 | 100 | 0 | 0 | 0 | 0 | 0 | 0 |
| NT2NE2003185 | 27.476 | 0 | 0 | 0 | 0 | 0 | 9.418 |
| NT2NE2003252 | 100 | 0 | 0 | 0 | 0 | 0 | 0 |
| NT2NE2003280 | 26.374 | 0 | 0 | 0 | 0 | 0 | 27.122 |
| NT2NE2003308 | 100 | 0 | 0 | 0 | 0 | 0 | 0 |
| NT2NE2003309 | 100 | 0 | 0 | 0 | 0 | 0 | 0 |
| NT2NE2003315 | 100 | 0 | 0 | 0 | 0 | 0 | 0 |
| NT2NE2003393 | 4.658 | 0 | 0 | 0 | 0 | 0 | 0 |
| NT2NE2003408 | 100 | 0 | 0 | 0 | 0 | 0 | 0 |
| NT2NE2003457 | 100 | 0 | 0 | 0 | 0 | 0 | 0 |
| NT2NE2003485 | 8.436 | 0 | 0 | 0 | 0 | 0 | 2.892 |
| NT2NE2003540 | 100 | 0 | 0 | 0 | 0 | 0 | 0 |
| NT2NE2003569 | 6.289 | 6.307 | 0 | 0 | 0 | 12.790 | 0 |
| NT2NE2003571 | 100 | 0 | 0 | 0 | 0 | 0 | 0 |
| NT2NE2003705 | 100 | 0 | 0 | 0 | 0 | 0 | 0 |
| NT2NE2003752 | 100 | 0 | 0 | 0 | 0 | 0 | 0 |
| NT2NE2003887 | 22.619 | 0 | 0 | 0 | 0 | 0 | 7.753 |
| NT2NE2003921 | 44.218 | 0 | 0 | 0 | 0 | 0 | 0 |
| NT2NE2004255 | 21.586 | 0 | 0 | 0 | 0 | 0 | 7.399 |
| NT2NE2004378 | 100 | 0 | 0 | 0 | 0 | 0 | 0 |
| NT2NE2004490 | 100 | 0 | 0 | 0 | 0 | 0 | 0 |
| NT2NE2004519 | 12.988 | 3.256 | 0 | 0 | 0 | 0 | 2.226 |
| NT2NE2004606 | 100 | 0 | 0 | 0 | 0 | 0 | 0 |
| NT2NE2004716 | 6.956 | 0 | 0 | 0 | 0 | 0 | 0 |
| NT2NE2004740 | 76.390 | 0 | 0 | 0 | 0 | 0 | 0 |
| NT2NE2004787 | 100 | 0 | 0 | 0 | 0 | 0 | 0 |
| NT2NE2004916 | 100 | 0 | 0 | 0 | 0 | 0 | 0 |
| NT2NE2005035 | 100 | 0 | 0 | 0 | 0 | 0 | 0 |
| NT2NE2005223 | 100 | 0 | 0 | 0 | 0 | 0 | 0 |
| NT2NE2005276 | 100 | 0 | 0 | 0 | 0 | 0 | 0 |
| NT2NE2005317 | 46.084 | 0 | 0 | 30.647 | 0 | 0 | 0 |
| NT2NE2005323 | 81.295 | 0 | 0 | 0 | 0 | 0 | 0 |
| NT2NE2005358 | 75.239 | 0 | 0 | 0 | 0 | 0 | 0 |
| NT2NE2005371 | 19.983 | 0 | 0 | 0 | 0 | 0 | 0 |
| NT2NE2005395 | 49.516 | 0 | 0 | 0 | 0 | 0 | 0 |
| NT2NE2005419 | 41.962 | 0 | 0 | 0 | 0 | 0 | 14.384 |
| NT2NE2005441 | 11.259 | 0 | 0 | 0 | 0 | 0 | 0 |
| NT2NE2005517 | 100 | 0 | 0 | 0 | 0 | 0 | 0 |
| NT2NE2005537 | 100 | 0 | 0 | 0 | 0 | 0 | 0 |
| NT2NE2005555 | 100 | 0 | 0 | 0 | 0 | 0 | 0 |
| NT2NE2005588 | 61.235 | 0 | 0 | 0 | 0 | 0 | 0 |
| NT2NE2005676 | 100 | 0 | 0 | 0 | 0 | 0 | 0 |
| NT2NE2005688 | 2.706 | 0 | 0 | 1.800 | 0 | 0 | 0 |
| NT2NE2005720 | 34.046 | 0 | 0 | 0 | 0 | 0 | 0 |
| NT2NE2005784 | 100 | 0 | 0 | 0 | 0 | 0 | 0 |
| NT2NE2005804 | 100 | 0 | 0 | 0 | 0 | 0 | 0 |
| NT2NE2005821 | 100 | 0 | 0 | 0 | 0 | 0 | 0 |
| NT2NE2005876 | 10.692 | 0 | 0 | 0 | 0 | 10.871 | 12.827 |
| NT2NE2005890 | 64.265 | 0 | 0 | 0 | 0 | 0 | 0 |
| NT2NE2005921 | 100 | 0 | 0 | 0 | 0 | 0 | 0 |
| NT2NE2005968 | 100 | 0 | 0 | 0 | 0 | 0 | 0 |
| NT2NE2006075 | 28.548 | 0 | 0 | 0 | 0 | 0 | 0 |
| NT2NE2006087 | 36.785 | 0 | 0 | 0 | 0 | 0 | 12.609 |
| NT2NE2006103 | 31.379 | 0 | 0 | 20.868 | 0 | 0 | 0 |
| NT2NE2006217 | 100 | 0 | 0 | 0 | 0 | 0 | 0 |
| NT2NE2006288 | 100 | 0 | 0 | 0 | 0 | 0 | 0 |
| NT2NE2006382 | 100 | 0 | 0 | 0 | 0 | 0 | 0 |
| NT2NE2006387 | 100 | 0 | 0 | 0 | 0 | 0 | 0 |
| NT2NE2006427 | 66.603 | 33.397 | 0 | 0 | 0 | 0 | 0 |
| NT2NE2006432 | 100 | 0 | 0 | 0 | 0 | 0 | 0 |
| NT2NE2006458 | 5.123 | 0 | 0 | 0 | 0 | 0 | 0 |
| NT2NE2006478 | 38.940 | 0 | 0 | 0 | 0 | 0 | 0 |
| NT2NE2006531 | 100 | 0 | 0 | 0 | 0 | 0 | 0 |
| NT2NE2006659 | 65.576 | 0 | 0 | 0 | 0 | 0 | 0 |
| NT2NE2006784 | 100 | 0 | 0 | 0 | 0 | 0 | 0 |
| NT2NE2006813 | 100 | 0 | 0 | 0 | 0 | 0 | 0 |
| NT2NE2006894 | 100 | 0 | 0 | 0 | 0 | 0 | 0 |
| NT2NE2006909 | 1.034 | 0 | 0 | 0 | 94.074 | 0 | 0 |
| NT2NE2006942 | 100 | 0 | 0 | 0 | 0 | 0 | 0 |
| NT2NE2006958 | 59.247 | 0 | 0 | 0 | 0 | 0 | 0 |
| NT2NE2007052 | 100 | 0 | 0 | 0 | 0 | 0 | 0 |
| NT2NE2007220 | 100 | 0 | 0 | 0 | 0 | 0 | 0 |
| NT2NE2007425 | 100 | 0 | 0 | 0 | 0 | 0 | 0 |
| NT2NE2007725 | 100 | 0 | 0 | 0 | 0 | 0 | 0 |
| NT2NE2007727 | 22.173 | 77.827 | 0 | 0 | 0 | 0 | 0 |
| NT2NE2007786 | 14.439 | 0 | 0 | 0 | 0 | 0 | 0 |
| NT2NE2007877 | 100 | 0 | 0 | 0 | 0 | 0 | 0 |
| NT2NE2007967 | 100 | 0 | 0 | 0 | 0 | 0 | 0 |
| NT2NE2008017 | 100 | 0 | 0 | 0 | 0 | 0 | 0 |
| NT2NE2008060 | 74.472 | 0 | 0 | 0 | 0 | 0 | 25.528 |
| NT2NE2008077 | 35.311 | 0 | 0 | 0 | 0 | 0 | 0 |
| NT2NE2008213 | 30.158 | 0 | 0 | 0 | 0 | 0 | 0 |
| NT2NE2008260 | 100 | 0 | 0 | 0 | 0 | 0 | 0 |
| NT2NE2008378 | 100 | 0 | 0 | 0 | 0 | 0 | 0 |
| NT2NE2008607 | 100 | 0 | 0 | 0 | 0 | 0 | 0 |
| NT2NE2008639 | 100 | 0 | 0 | 0 | 0 | 0 | 0 |
| NT2NE2008727 | 100 | 0 | 0 | 0 | 0 | 0 | 0 |
| NT2NE2008783 | 100 | 0 | 0 | 0 | 0 | 0 | 0 |
| NT2NE2008785 | 34.001 | 0 | 0 | 0 | 0 | 0 | 0 |
| NT2NE2008803 | 83.623 | 0 | 0 | 0 | 0 | 0 | 0 |
| NT2NE2008867 | 100 | 0 | 0 | 0 | 0 | 0 | 0 |
| NT2NE2008961 | 100 | 0 | 0 | 0 | 0 | 0 | 0 |
| NT2NE2008997 | 100 | 0 | 0 | 0 | 0 | 0 | 0 |
| NT2NE2009138 | 100 | 0 | 0 | 0 | 0 | 0 | 0 |
| NT2NE2009295 | 7.230 | 0 | 57.410 | 4.808 | 0 | 0 | 0 |
| NT2NE2009426 | 100 | 0 | 0 | 0 | 0 | 0 | 0 |
| NT2NE2009523 | 56.323 | 0 | 0 | 0 | 0 | 0 | 0 |
| NT2NE2009608 | 100 | 0 | 0 | 0 | 0 | 0 | 0 |
| NT2NE2009691 | 100 | 0 | 0 | 0 | 0 | 0 | 0 |
| NT2NE2010056 | 29.041 | 0 | 0 | 0 | 0 | 0 | 0 |
| NT2NE2010105 | 100 | 0 | 0 | 0 | 0 | 0 | 0 |
| NT2NE2010150 | 100 | 0 | 0 | 0 | 0 | 0 | 0 |
| NT2NE2010400 | 100 | 0 | 0 | 0 | 0 | 0 | 0 |
| NT2NE2010632 | 100 | 0 | 0 | 0 | 0 | 0 | 0 |
| NT2NE2010633 | 100 | 0 | 0 | 0 | 0 | 0 | 0 |
| NT2NE2010654 | 100 | 0 | 0 | 0 | 0 | 0 | 0 |
| NT2NE2010688 | 78.374 | 0 | 0 | 0 | 0 | 0 | 0 |
| NT2NE2010781 | 100 | 0 | 0 | 0 | 0 | 0 | 0 |
| NT2NE2010842 | 3.417 | 5.140 | 0 | 6.817 | 0 | 0 | 2.343 |
| NT2NE2010854 | 84.719 | 0 | 0 | 0 | 0 | 0 | 0 |
| NT2NE2011033 | 66.235 | 0 | 0 | 0 | 0 | 0 | 0 |
| NT2NE2011036 | 100 | 0 | 0 | 0 | 0 | 0 | 0 |
| NT2NE2011107 | 43.585 | 0 | 0 | 0 | 0 | 0 | 14.940 |
| NT2NE2011119 | 33.561 | 0 | 0 | 11.160 | 0 | 0 | 0 |
| NT2NE2011154 | 100 | 0 | 0 | 0 | 0 | 0 | 0 |
| NT2NE2011221 | 52.138 | 0 | 0 | 0 | 0 | 0 | 0 |
| NT2NE2011411 | 100 | 0 | 0 | 0 | 0 | 0 | 0 |
| NT2NE2011485 | 68.667 | 0 | 0 | 0 | 0 | 0 | 0 |
| NT2NE2011650 | 66.603 | 33.397 | 0 | 0 | 0 | 0 | 0 |
| NT2NE2011684 | 31.736 | 0 | 0 | 0 | 0 | 0 | 0 |
| NT2NE2011687 | 100 | 0 | 0 | 0 | 0 | 0 | 0 |
| NT2NE2011691 | 100 | 0 | 0 | 0 | 0 | 0 | 0 |
| NT2NE2011758 | 100 | 0 | 0 | 0 | 0 | 0 | 0 |
| NT2NE2011823 | 100 | 0 | 0 | 0 | 0 | 0 | 0 |
| NT2NE2011896 | 100 | 0 | 0 | 0 | 0 | 0 | 0 |
| NT2NE2011998 | 74.472 | 0 | 0 | 0 | 0 | 0 | 25.528 |
| NT2NE2012113 | 100 | 0 | 0 | 0 | 0 | 0 | 0 |
| NT2NE2012199 | 87.795 | 0 | 0 | 0 | 0 | 0 | 0 |
| NT2NE2012243 | 76.570 | 0 | 0 | 0 | 0 | 0 | 0 |
| NT2NE2012361 | 100 | 0 | 0 | 0 | 0 | 0 | 0 |
| NT2NE2012448 | 100 | 0 | 0 | 0 | 0 | 0 | 0 |
| NT2NE2012457 | 100 | 0 | 0 | 0 | 0 | 0 | 0 |
| NT2NE2012493 | 100 | 0 | 0 | 0 | 0 | 0 | 0 |
| NT2NE2012505 | 66.449 | 0 | 0 | 0 | 0 | 0 | 0 |
| NT2NE2012533 | 100 | 0 | 0 | 0 | 0 | 0 | 0 |
| NT2NE2012603 | 100 | 0 | 0 | 0 | 0 | 0 | 0 |
| NT2NE2012747 | 100 | 0 | 0 | 0 | 0 | 0 | 0 |
| NT2NE2012790 | 21.741 | 10.901 | 0 | 0 | 0 | 0 | 0 |
| NT2NE2012847 | 100 | 0 | 0 | 0 | 0 | 0 | 0 |
| NT2NE2012928 | 31.553 | 0 | 0 | 0 | 0 | 0 | 0 |
| NT2NE2013019 | 66.603 | 33.397 | 0 | 0 | 0 | 0 | 0 |
| NT2NE2013081 | 100 | 0 | 0 | 0 | 0 | 0 | 0 |
| NT2NE2013189 | 100 | 0 | 0 | 0 | 0 | 0 | 0 |
| NT2NE2013217 | 100 | 0 | 0 | 0 | 0 | 0 | 0 |
| NT2NE2013547 | 100 | 0 | 0 | 0 | 0 | 0 | 0 |
| NT2NE2014013 | 100 | 0 | 0 | 0 | 0 | 0 | 0 |
| NT2NE2014028 | 100 | 0 | 0 | 0 | 0 | 0 | 0 |
| NT2NE2014104 | 6.083 | 0 | 0 | 0 | 0 | 0 | 0 |
| NT2NE2014113 | 32.885 | 0 | 0 | 0 | 0 | 0 | 0 |
| NT2NE2014176 | 49.929 | 50.071 | 0 | 0 | 0 | 0 | 0 |
| NT2NE2014221 | 100 | 0 | 0 | 0 | 0 | 0 | 0 |
| NT2NE2014525 | 100 | 0 | 0 | 0 | 0 | 0 | 0 |
| NT2NE2014650 | 100 | 0 | 0 | 0 | 0 | 0 | 0 |
| NT2NE2014651 | 100 | 0 | 0 | 0 | 0 | 0 | 0 |
| NT2NE2014681 | 100 | 0 | 0 | 0 | 0 | 0 | 0 |
| NT2NE2014758 | 100 | 0 | 0 | 0 | 0 | 0 | 0 |
| NT2NE2014869 | 100 | 0 | 0 | 0 | 0 | 0 | 0 |
| NT2NE2014950 | 100 | 0 | 0 | 0 | 0 | 0 | 0 |
| NT2NE2015061 | 100 | 0 | 0 | 0 | 0 | 0 | 0 |
| NT2NE2015262 | 81.295 | 0 | 0 | 0 | 0 | 0 | 0 |
| NT2NE2015275 | 100 | 0 | 0 | 0 | 0 | 0 | 0 |
| NT2NE2015362 | 66.449 | 0 | 0 | 0 | 0 | 0 | 0 |
| NT2NE2015480 | 100 | 0 | 0 | 0 | 0 | 0 | 0 |
| NT2NE2015511 | 100 | 0 | 0 | 0 | 0 | 0 | 0 |
| NT2NE2015565 | 100 | 0 | 0 | 0 | 0 | 0 | 0 |
| NT2NE2015626 | 100 | 0 | 0 | 0 | 0 | 0 | 0 |
| NT2NE2015747 | 100 | 0 | 0 | 0 | 0 | 0 | 0 |
| NT2NE2015860 | 66.603 | 33.397 | 0 | 0 | 0 | 0 | 0 |
| NT2NE2015885 | 100 | 0 | 0 | 0 | 0 | 0 | 0 |
| NT2NE2015904 | 78.033 | 0 | 0 | 0 | 0 | 0 | 0 |
| NT2NE2015974 | 27.684 | 0 | 0 | 0 | 0 | 0 | 18.979 |
| NT2NE2016041 | 100 | 0 | 0 | 0 | 0 | 0 | 0 |
| NT2NE2016387 | 78.374 | 0 | 0 | 0 | 0 | 0 | 0 |
| NT2NE2016419 | 100 | 0 | 0 | 0 | 0 | 0 | 0 |
| NT2NE2016519 | 100 | 0 | 0 | 0 | 0 | 0 | 0 |
| NT2NE2016608 | 100 | 0 | 0 | 0 | 0 | 0 | 0 |
| NT2NE2016766 | 100 | 0 | 0 | 0 | 0 | 0 | 0 |
| NT2NE2016774 | 100 | 0 | 0 | 0 | 0 | 0 | 0 |
| NT2NE2016971 | 49.619 | 24.880 | 0 | 0 | 0 | 0 | 0 |
| NT2NE2017259 | 100 | 0 | 0 | 0 | 0 | 0 | 0 |
| NT2NE2017332 | 100 | 0 | 0 | 0 | 0 | 0 | 0 |
| NT2NE2017397 | 100 | 0 | 0 | 0 | 0 | 0 | 0 |
| NT2NE2017480 | 60.059 | 0 | 0 | 39.941 | 0 | 0 | 0 |
| NT2NE2017492 | 61.159 | 0 | 0 | 0 | 0 | 0 | 0 |
| NT2NE2017508 | 100 | 0 | 0 | 0 | 0 | 0 | 0 |
| NT2NE2017562 | 100 | 0 | 0 | 0 | 0 | 0 | 0 |
| NT2NE2017590 | 100 | 0 | 0 | 0 | 0 | 0 | 0 |
| NT2NE2017612 | 100 | 0 | 0 | 0 | 0 | 0 | 0 |
| NT2NE2017721 | 100 | 0 | 0 | 0 | 0 | 0 | 0 |
| NT2NE2017752 | 42.542 | 0 | 0 | 28.292 | 0 | 0 | 29.166 |
| NT2NE2017792 | 67.849 | 0 | 0 | 0 | 0 | 0 | 0 |
| NT2NE2017982 | 84.719 | 0 | 0 | 0 | 0 | 0 | 0 |
| NT2NE2018165 | 100 | 0 | 0 | 0 | 0 | 0 | 0 |
| NT2NE2018176 | 100 | 0 | 0 | 0 | 0 | 0 | 0 |
| NT2NE2018180 | 13.627 | 0 | 0 | 0 | 0 | 0 | 0 |
| NT2NE2018273 | 100 | 0 | 0 | 0 | 0 | 0 | 0 |
| NT2NE2018376 | 100 | 0 | 0 | 0 | 0 | 0 | 0 |
| NT2NE2018472 | 100 | 0 | 0 | 0 | 0 | 0 | 0 |
| NT2NE2018490 | 84.719 | 0 | 0 | 0 | 0 | 0 | 0 |
| NT2NE2018594 | 61.235 | 0 | 0 | 0 | 0 | 0 | 0 |
| NT2NE2018739 | 100 | 0 | 0 | 0 | 0 | 0 | 0 |
| NT2NE2018916 | 100 | 0 | 0 | 0 | 0 | 0 | 0 |
| NT2NE2019056 | 100 | 0 | 0 | 0 | 0 | 0 | 0 |
| NT2NE2019076 | 32.654 | 0 | 0 | 0 | 0 | 0 | 0 |
| NT2NE2019091 | 6.861 | 0 | 0 | 9.125 | 0 | 0 | 4.704 |
| NT2NE2019099 | 100 | 0 | 0 | 0 | 0 | 0 | 0 |
| NT2RI1000016 | 0 | 45.918 | 0 | 0 | 0 | 0 | 0 |
| NT2RI1000027 | 0 | 1.837 | 0 | 2.437 | 0 | 0 | 0 |
| NT2RI1000035 | 0 | 34.405 | 0 | 0 | 0 | 0 | 0 |
| NT2RI1000048 | 6.154 | 1.543 | 0 | 0 | 0 | 0 | 1.055 |
| NT2RI1000127 | 6.578 | 3.298 | 0 | 0 | 0 | 0 | 4.509 |
| NT2RI1000164 | 0 | 100 | 0 | 0 | 0 | 0 | 0 |
| NT2RI1000172 | 46.158 | 23.145 | 0 | 30.696 | 0 | 0 | 0 |
| NT2RI2000004 | 0 | 100 | 0 | 0 | 0 | 0 | 0 |
| NT2RI2000007 | 0 | 60.375 | 0 | 0 | 0 | 0 | 0 |
| NT2RI2000064 | 3.901 | 0.978 | 0 | 2.594 | 0 | 0 | 0.669 |
| NT2RI2000107 | 0 | 8.418 | 0 | 5.583 | 0 | 0 | 0 |
| NT2RI2000116 | 0 | 4.227 | 0 | 8.410 | 0 | 0 | 50.573 |
| NT2RI2000117 | 0 | 100 | 0 | 0 | 0 | 0 | 0 |
| NT2RI2000128 | 0 | 100 | 0 | 0 | 0 | 0 | 0 |
| NT2RI2000133 | 9.286 | 4.656 | 0 | 0 | 0 | 0 | 0 |
| NT2RI2000167 | 0 | 20.995 | 0 | 0 | 0 | 0 | 0 |
| NT2RI2000173 | 0 | 42.988 | 0 | 57.012 | 0 | 0 | 0 |
| NT2RI2000187 | 0 | 100 | 0 | 0 | 0 | 0 | 0 |
| NT2RI2000255 | 4.338 | 2.175 | 0 | 0 | 0 | 0 | 0 |
| NT2RI2000263 | 6.199 | 6.217 | 0 | 4.123 | 0 | 0 | 6.375 |
| NT2RI2000270 | 0 | 100 | 0 | 0 | 0 | 0 | 0 |
| NT2RI2000276 | 0 | 100 | 0 | 0 | 0 | 0 | 0 |
| NT2RI2000282 | 1.147 | 3.451 | 0 | 2.289 | 0 | 0 | 0 |
| NT2RI2000284 | 0 | 0.828 | 0 | 0 | 0 | 0 | 0 |
| NT2RI2000294 | 6.859 | 10.318 | 0 | 4.562 | 0 | 0 | 7.054 |
| NT2RI2000313 | 0 | 33.224 | 0 | 44.064 | 0 | 0 | 22.712 |
| NT2RI2000341 | 0 | 100 | 0 | 0 | 0 | 0 | 0 |
| NT2RI2000344 | 5.868 | 1.471 | 0 | 0 | 0 | 0 | 1.006 |
| NT2RI2000348 | 0 | 32.207 | 0 | 0 | 0 | 0 | 44.033 |
| NT2RI2000412 | 0 | 28.013 | 0 | 0 | 0 | 0 | 9.575 |
| NT2RI2000421 | 11.028 | 11.060 | 0 | 0 | 0 | 0 | 0 |
| NT2RI2000480 | 0 | 100 | 0 | 0 | 0 | 0 | 0 |
| NT2RI2000575 | 0 | 100 | 0 | 0 | 0 | 0 | 0 |
| NT2RI2000578 | 1.212 | 1.823 | 0 | 0.806 | 0 | 0 | 0 |
| NT2RI2000588 | 0 | 100 | 0 | 0 | 0 | 0 | 0 |
| NT2RI2000597 | 0 | 100 | 0 | 0 | 0 | 0 | 0 |
| NT2RI2000669 | 0 | 22.312 | 0 | 0 | 0 | 0 | 0 |
| NT2RI2000671 | 3.812 | 1.911 | 0 | 7.605 | 0 | 0 | 0 |
| NT2RI2000685 | 7.181 | 1.800 | 0 | 0 | 0 | 7.302 | 1.231 |
| NT2RI2000688 | 0 | 100 | 0 | 0 | 0 | 0 | 0 |
| NT2RI2000689 | 0 | 11.240 | 0 | 3.727 | 0 | 11.396 | 1.921 |
| NT2RI2000704 | 0 | 100 | 0 | 0 | 0 | 0 | 0 |
| NT2RI2000727 | 0.938 | 0.940 | 0 | 0 | 0 | 0 | 0.321 |
| NT2RI2000738 | 0 | 100 | 0 | 0 | 0 | 0 | 0 |
| NT2RI2000775 | 0 | 61.984 | 0 | 0 | 0 | 0 | 0 |
| NT2RI2000822 | 0 | 19.359 | 0 | 0 | 0 | 0 | 0 |
| NT2RI2000829 | 13.842 | 6.941 | 0 | 0 | 0 | 0 | 14.234 |
| NT2RI2000841 | 0 | 100 | 0 | 0 | 0 | 0 | 0 |
| NT2RI2000865 | 0 | 5.097 | 0 | 0 | 0 | 0 | 0 |
| NT2RI2000932 | 0 | 100 | 0 | 0 | 0 | 0 | 0 |
| NT2RI2000974 | 7.817 | 11.759 | 0 | 10.397 | 0 | 0 | 2.680 |
| NT2RI2000987 | 0 | 100 | 0 | 0 | 0 | 0 | 0 |
| NT2RI2001010 | 0 | 68.547 | 0 | 0 | 0 | 0 | 0 |
| NT2RI2001017 | 0 | 100 | 0 | 0 | 0 | 0 | 0 |
| NT2RI2001030 | 0 | 59.396 | 0 | 0 | 0 | 0 | 40.604 |
| NT2RI2001054 | 2.156 | 1.081 | 0 | 0 | 0 | 0 | 3.696 |
| NT2RI2001083 | 0 | 100 | 0 | 0 | 0 | 0 | 0 |
| NT2RI2001091 | 0 | 6.389 | 0 | 0 | 0 | 0 | 0 |
| NT2RI2001167 | 0 | 73.545 | 0 | 0 | 0 | 0 | 0 |
| NT2RI2001178 | 0 | 100 | 0 | 0 | 0 | 0 | 0 |
| NT2RI2001230 | 0 | 5.607 | 0 | 0 | 0 | 0 | 0 |
| NT2RI2001235 | 0 | 100 | 0 | 0 | 0 | 0 | 0 |
| NT2RI2001244 | 0 | 100 | 0 | 0 | 0 | 0 | 0 |
| NT2RI2001307 | 0 | 100 | 0 | 0 | 0 | 0 | 0 |
| NT2RI2001342 | 0 | 2.868 | 0 | 0 | 0 | 0 | 1.961 |
| NT2RI2001385 | 0 | 7.160 | 0 | 0 | 0 | 0 | 0 |
| NT2RI2001409 | 0 | 20.927 | 0 | 0 | 0 | 0 | 0 |
| NT2RI2001410 | 0 | 100 | 0 | 0 | 0 | 0 | 0 |
| NT2RI2001422 | 0 | 6.756 | 0 | 0 | 0 | 0 | 0 |
| NT2RI2001425 | 0 | 100 | 0 | 0 | 0 | 0 | 0 |
| NT2RI2001449 | 0 | 72.520 | 0 | 27.480 | 0 | 0 | 0 |
| NT2RI2001450 | 6.421 | 3.220 | 0 | 0 | 0 | 0 | 8.805 |
| NT2RI2001474 | 0 | 100 | 0 | 0 | 0 | 0 | 0 |
| NT2RI2001519 | 0 | 100 | 0 | 0 | 0 | 0 | 0 |
| NT2RI2001540 | 0.413 | 0.517 | 1.638 | 0.274 | 0 | 0 | 0.071 |
| NT2RI2001595 | 0 | 14.429 | 0 | 57.411 | 0 | 0 | 0 |
| NT2RI2001621 | 11.094 | 11.125 | 0 | 0 | 0 | 0 | 3.803 |
| NT2RI2001624 | 0 | 100 | 0 | 0 | 0 | 0 | 0 |
| NT2RI2001657 | 0 | 0.972 | 0 | 0 | 0 | 0 | 0 |
| NT2RI2001726 | 0 | 38.377 | 0 | 0 | 0 | 0 | 13.117 |
| NT2RI2001731 | 6.864 | 3.442 | 0 | 0 | 0 | 0 | 4.705 |
| NT2RI2001769 | 0 | 16.159 | 0 | 0 | 0 | 0 | 0 |
| NT2RI2001782 | 0 | 100 | 0 | 0 | 0 | 0 | 0 |
| NT2RI2001836 | 0 | 100 | 0 | 0 | 0 | 0 | 0 |
| NT2RI2001846 | 0 | 8.955 | 0 | 0 | 0 | 0 | 0 |
| NT2RI2001859 | 3.517 | 3.527 | 0 | 0 | 0 | 7.152 | 2.411 |
| NT2RI2001866 | 0 | 26.371 | 0 | 34.974 | 0 | 0 | 0 |
| NT2RI2001910 | 0 | 13.573 | 0 | 0 | 0 | 0 | 0 |
| NT2RI2001952 | 0 | 38.068 | 0 | 0 | 0 | 0 | 0 |
| NT2RI2002022 | 0 | 59.396 | 0 | 0 | 0 | 0 | 40.604 |
| NT2RI2002041 | 0 | 100 | 0 | 0 | 0 | 0 | 0 |
| NT2RI2002091 | 0.389 | 0.756 | 0 | 0.065 | 0 | 2.867 | 0 |
| NT2RI2002117 | 0 | 8.561 | 0 | 0 | 0 | 0 | 0 |
| NT2RI2002120 | 0 | 100 | 0 | 0 | 0 | 0 | 0 |
| NT2RI2002152 | 0 | 9.141 | 0 | 0 | 0 | 0 | 0 |
| NT2RI2002153 | 0 | 100 | 0 | 0 | 0 | 0 | 0 |
| NT2RI2002179 | 0 | 100 | 0 | 0 | 0 | 0 | 0 |
| NT2RI2002243 | 0 | 5.978 | 0 | 0 | 0 | 0 | 0 |
| NT2RI2002252 | 0 | 100 | 0 | 0 | 0 | 0 | 0 |
| NT2RI2002260 | 0 | 42.988 | 0 | 57.012 | 0 | 0 | 0 |
| NT2RI2002266 | 0 | 4.555 | 72.122 | 0 | 0 | 0 | 6.227 |
| NT2RI2002270 | 0 | 100 | 0 | 0 | 0 | 0 | 0 |
| NT2RI2002316 | 0 | 1.457 | 0 | 1.932 | 0 | 0 | 0.996 |
| NT2RI2002334 | 0 | 100 | 0 | 0 | 0 | 0 | 0 |
| NT2RI2002359 | 0 | 29.911 | 0 | 0 | 0 | 0 | 0 |
| NT2RI2002391 | 0 | 11.790 | 0 | 0 | 0 | 0 | 1.007 |
| NT2RI2002447 | 0 | 100 | 0 | 0 | 0 | 0 | 0 |
| NT2RI2002481 | 0 | 100 | 0 | 0 | 0 | 0 | 0 |
| NT2RI2002507 | 0 | 100 | 0 | 0 | 0 | 0 | 0 |
| NT2RI2002517 | 0 | 42.988 | 0 | 57.012 | 0 | 0 | 0 |
| NT2RI2002530 | 0 | 10.969 | 0 | 0 | 0 | 0 | 7.499 |
| NT2RI2002540 | 6.265 | 3.141 | 0 | 0 | 0 | 0 | 2.148 |
| NT2RI2002549 | 0 | 12.521 | 0 | 0 | 0 | 0 | 8.559 |
| NT2RI2002554 | 6.571 | 3.295 | 0 | 4.370 | 0 | 0 | 9.010 |
| NT2RI2002564 | 0 | 100 | 0 | 0 | 0 | 0 | 0 |
| NT2RI2002585 | 0 | 23.627 | 0 | 0 | 0 | 0 | 16.152 |
| NT2RI2002592 | 0 | 33.510 | 0 | 0 | 0 | 0 | 0 |
| NT2RI2002602 | 0 | 14.231 | 0 | 56.622 | 0 | 0 | 0 |
| NT2RI2002654 | 2.129 | 4.270 | 0 | 2.832 | 0 | 4.329 | 0.730 |
| NT2RI2002699 | 0 | 20.778 | 0 | 0 | 0 | 0 | 0 |
| NT2RI2002729 | 0 | 7.644 | 0 | 0 | 0 | 0 | 0 |
| NT2RI2002802 | 0 | 52.242 | 0 | 0 | 0 | 0 | 0 |
| NT2RI2002819 | 0 | 6.766 | 0 | 8.973 | 0 | 0 | 4.625 |
| NT2RI2002822 | 0 | 9.118 | 0 | 0 | 0 | 0 | 0 |
| NT2RI2002847 | 4.549 | 6.843 | 0 | 9.076 | 0 | 9.251 | 7.797 |
| NT2RI2002852 | 0 | 73.545 | 0 | 0 | 0 | 0 | 0 |
| NT2RI2002865 | 0 | 24.645 | 0 | 0 | 0 | 0 | 0 |
| NT2RI2002923 | 0 | 100 | 0 | 0 | 0 | 0 | 0 |
| NT2RI2002926 | 57.202 | 14.342 | 0 | 0 | 0 | 0 | 0 |
| NT2RI2002958 | 0 | 5.249 | 0 | 0 | 0 | 0 | 8.372 |
| NT2RI2002970 | 0 | 100 | 0 | 0 | 0 | 0 | 0 |
| NT2RI2003011 | 12.513 | 6.275 | 0 | 0 | 0 | 0 | 0 |
| NT2RI2003019 | 0 | 19.008 | 0 | 0 | 0 | 0 | 0 |
| NT2RI2003051 | 0 | 1.860 | 0 | 4.935 | 0 | 0 | 0 |
| NT2RI2003067 | 0 | 100 | 0 | 0 | 0 | 0 | 0 |
| NT2RI2003184 | 0 | 34.265 | 0 | 0 | 0 | 0 | 0 |
| NT2RI2003205 | 0 | 17.549 | 0 | 0 | 0 | 0 | 31.992 |
| NT2RI2003222 | 0 | 46.196 | 0 | 0 | 0 | 0 | 0 |
| NT2RI2003301 | 0 | 10.314 | 0 | 0 | 0 | 0 | 42.305 |
| NT2RI2003304 | 1.902 | 4.769 | 0 | 4.427 | 0 | 0 | 0.978 |
| NT2RI2003317 | 0 | 2.864 | 0 | 3.799 | 0 | 0 | 13.707 |
| NT2RI2003338 | 0 | 7.360 | 0 | 2.440 | 0 | 0 | 5.031 |
| NT2RI2003344 | 0 | 3.539 | 0 | 0 | 0 | 0 | 0 |
| NT2RI2003360 | 0 | 100 | 0 | 0 | 0 | 0 | 0 |
| NT2RI2003361 | 17.898 | 8.975 | 0 | 11.903 | 0 | 0 | 0 |
| NT2RI2003383 | 0 | 32.968 | 0 | 0 | 0 | 0 | 0 |
| NT2RI2003392 | 0 | 100 | 0 | 0 | 0 | 0 | 0 |
| NT2RI2003399 | 0 | 58.159 | 0 | 0 | 0 | 0 | 0 |
| NT2RI2003407 | 0 | 2.199 | 0 | 0 | 0 | 0 | 1.504 |
| NT2RI2003419 | 0 | 20.514 | 0 | 0 | 0 | 0 | 0 |
| NT2RI2003420 | 5.581 | 11.194 | 0 | 3.711 | 0 | 0 | 0 |
| NT2RI2003481 | 0 | 3.509 | 0 | 0 | 0 | 0 | 4.798 |
| NT2RI2003487 | 0 | 6.789 | 0 | 0 | 0 | 0 | 0 |
| NT2RI2003556 | 1.379 | 0.691 | 0 | 3.668 | 0 | 0 | 1.418 |
| NT2RI2003655 | 0 | 35.500 | 0 | 0 | 0 | 0 | 0 |
| NT2RI2003667 | 66.603 | 33.397 | 0 | 0 | 0 | 0 | 0 |
| NT2RI2003678 | 0 | 13.840 | 0 | 9.178 | 0 | 0 | 4.731 |
| NT2RI2003695 | 2.854 | 5.724 | 0 | 1.898 | 0 | 0 | 2.935 |
| NT2RI2003738 | 0.634 | 0.636 | 0 | 0.422 | 0 | 0 | 1.087 |
| NT2RI2003751 | 10.041 | 5.035 | 0 | 0 | 0 | 0 | 0 |
| NT2RI2003884 | 0 | 100 | 0 | 0 | 0 | 0 | 0 |
| NT2RI2003921 | 6.875 | 4.309 | 0 | 4.572 | 0 | 0 | 0 |
| NT2RI2003973 | 0 | 45.622 | 0 | 0 | 0 | 0 | 31.188 |
| NT2RI2003993 | 0 | 6.899 | 0 | 0 | 0 | 0 | 0 |
| NT2RI2004059 | 0 | 12.383 | 0 | 0 | 0 | 0 | 0 |
| NT2RI2004078 | 0 | 64.504 | 0 | 0 | 0 | 0 | 0 |
| NT2RI2004079 | 0 | 100 | 0 | 0 | 0 | 0 | 0 |
| NT2RI2004093 | 0 | 100 | 0 | 0 | 0 | 0 | 0 |
| NT2RI2004136 | 0 | 100 | 0 | 0 | 0 | 0 | 0 |
| NT2RI2004157 | 0 | 60.375 | 0 | 0 | 0 | 0 | 0 |
| NT2RI2004188 | 0 | 10.436 | 0 | 0 | 0 | 0 | 0 |
| NT2RI2004190 | 0 | 100 | 0 | 0 | 0 | 0 | 0 |
| NT2RI2004209 | 0 | 13.341 | 0 | 0 | 0 | 0 | 0 |
| NT2RI2004230 | 12.475 | 6.255 | 0 | 19.358 | 0 | 0 | 17.105 |
| NT2RI2004284 | 0 | 2.921 | 0 | 0 | 0 | 0 | 0 |
| NT2RI2004290 | 0 | 38.769 | 0 | 0 | 0 | 0 | 0 |
| NT2RI2004304 | 0 | 7.568 | 0 | 10.036 | 0 | 0 | 20.693 |
| NT2RI2004312 | 0 | 27.584 | 0 | 0 | 0 | 0 | 18.857 |
| NT2RI2004381 | 0 | 100 | 0 | 0 | 0 | 0 | 0 |
| NT2RI2004398 | 0 | 9.053 | 0 | 0 | 0 | 0 | 12.377 |
| NT2RI2004410 | 18.077 | 9.065 | 0 | 6.011 | 0 | 0 | 0 |
| NT2RI2004442 | 0 | 100 | 0 | 0 | 0 | 0 | 0 |
| NT2RI2004468 | 0 | 100 | 0 | 0 | 0 | 0 | 0 |
| NT2RI2004535 | 6.937 | 13.914 | 0 | 0 | 0 | 0 | 0 |
| NT2RI2004606 | 0 | 64.504 | 0 | 0 | 0 | 0 | 0 |
| NT2RI2004608 | 0 | 6.723 | 0 | 0 | 0 | 0 | 0 |
| NT2RI2004618 | 0 | 100 | 0 | 0 | 0 | 0 | 0 |
| NT2RI2004783 | 0 | 78.423 | 0 | 0 | 0 | 0 | 0 |
| NT2RI2004818 | 0 | 100 | 0 | 0 | 0 | 0 | 0 |
| NT2RI2004840 | 0 | 100 | 0 | 0 | 0 | 0 | 0 |
| NT2RI2004884 | 5.600 | 1.404 | 0 | 0 | 0 | 0 | 0.960 |
| NT2RI2004916 | 0 | 60.128 | 0 | 39.872 | 0 | 0 | 0 |
| NT2RI2004962 | 0 | 100 | 0 | 0 | 0 | 0 | 0 |
| NT2RI2004984 | 0 | 100 | 0 | 0 | 0 | 0 | 0 |
| NT2RI2004985 | 0 | 100 | 0 | 0 | 0 | 0 | 0 |
| NT2RI2005048 | 0 | 100 | 0 | 0 | 0 | 0 | 0 |
| NT2RI2005061 | 0 | 15.855 | 0 | 21.027 | 0 | 0 | 5.419 |
| NT2RI2005069 | 0 | 100 | 0 | 0 | 0 | 0 | 0 |
| NT2RI2005087 | 0 | 7.791 | 0 | 0 | 0 | 0 | 0 |
| NT2RI2005096 | 0 | 73.545 | 0 | 0 | 0 | 0 | 0 |
| NT2RI2005115 | 0 | 11.105 | 0 | 0 | 0 | 0 | 0 |
| NT2RI2005116 | 0 | 4.646 | 0 | 3.081 | 0 | 0 | 4.764 |
| NT2RI2005130 | 49.929 | 50.071 | 0 | 0 | 0 | 0 | 0 |
| NT2RI2005150 | 7.492 | 2.504 | 0 | 1.661 | 0 | 0 | 1.712 |
| NT2RI2005166 | 0 | 47.393 | 0 | 0 | 0 | 0 | 0 |
| NT2RI2005239 | 14.292 | 21.500 | 0 | 19.009 | 0 | 0 | 4.899 |
| NT2RI2005246 | 0 | 16.871 | 0 | 0 | 0 | 0 | 11.533 |
| NT2RI2005315 | 0 | 49.384 | 0 | 0 | 0 | 0 | 0 |
| NT2RI2005335 | 1.403 | 2.814 | 0 | 4.665 | 0 | 0 | 1.924 |
| NT2RI2005353 | 0 | 6.280 | 0 | 0 | 0 | 0 | 0 |
| NT2RI2005358 | 0 | 37.296 | 0 | 0 | 0 | 0 | 0 |
| NT2RI2005368 | 0 | 7.344 | 0 | 4.870 | 0 | 0 | 17.571 |
| NT2RI2005382 | 0 | 35.947 | 0 | 0 | 0 | 0 | 0 |
| NT2RI2005405 | 4.069 | 1.020 | 0 | 2.030 | 0 | 2.069 | 0.349 |
| NT2RI2005473 | 0 | 5.935 | 0 | 0 | 0 | 0 | 0 |
| NT2RI2005520 | 0 | 100 | 0 | 0 | 0 | 0 | 0 |
| NT2RI2005564 | 16.142 | 16.188 | 0 | 0 | 0 | 0 | 16.600 |
| NT2RI2005579 | 0 | 17.054 | 0 | 0 | 0 | 0 | 11.659 |
| NT2RI2005621 | 0 | 100 | 0 | 0 | 0 | 0 | 0 |
| NT2RI2005628 | 0 | 100 | 0 | 0 | 0 | 0 | 0 |
| NT2RI2005647 | 0 | 1.202 | 0 | 0 | 0 | 82.851 | 0 |
| NT2RI2005670 | 0 | 100 | 0 | 0 | 0 | 0 | 0 |
| NT2RI2005710 | 0 | 18.971 | 0 | 37.741 | 0 | 0 | 0 |
| NT2RI2005713 | 0 | 2.687 | 0 | 0 | 0 | 0 | 3.674 |
| NT2RI2005723 | 7.275 | 0.912 | 0 | 1.209 | 0 | 0 | 0 |
| NT2RI2005772 | 0 | 100 | 0 | 0 | 0 | 0 | 0 |
| NT2RI2005811 | 0 | 8.352 | 0 | 0 | 0 | 11.291 | 1.903 |
| NT2RI2005814 | 0 | 2.367 | 0 | 6.278 | 0 | 0 | 0 |
| NT2RI2005816 | 0 | 11.615 | 0 | 15.405 | 0 | 0 | 47.643 |
| NT2RI2005818 | 9.230 | 13.885 | 0 | 0 | 0 | 0 | 12.656 |
| NT2RI2005851 | 0 | 13.544 | 0 | 17.963 | 0 | 0 | 13.888 |
| NT2RI2005966 | 0 | 33.881 | 0 | 0 | 0 | 0 | 0 |
| NT2RI2006070 | 0 | 3.735 | 0 | 0 | 0 | 0 | 0 |
| NT2RI2006071 | 0 | 5.130 | 0 | 6.804 | 0 | 0 | 7.014 |
| NT2RI2006072 | 2.773 | 2.781 | 0 | 3.688 | 0 | 0 | 1.901 |
| NT2RI2006081 | 0 | 100 | 0 | 0 | 0 | 0 | 0 |
| NT2RI2006126 | 0 | 100 | 0 | 0 | 0 | 0 | 0 |
| NT2RI2006127 | 0 | 21.950 | 0 | 0 | 0 | 0 | 0 |
| NT2RI2006183 | 0 | 17.381 | 0 | 23.051 | 0 | 0 | 11.882 |
| NT2RI2006257 | 0 | 100 | 0 | 0 | 0 | 0 | 0 |
| NT2RI2006271 | 10.122 | 5.076 | 0 | 0 | 0 | 0 | 0 |
| NT2RI2006294 | 0 | 100 | 0 | 0 | 0 | 0 | 0 |
| NT2RI2006345 | 0 | 100 | 0 | 0 | 0 | 0 | 0 |
| NT2RI2006403 | 0 | 100 | 0 | 0 | 0 | 0 | 0 |
| NT2RI2006412 | 0 | 1.490 | 0 | 0 | 0 | 0 | 0 |
| NT2RI2006445 | 0 | 100 | 0 | 0 | 0 | 0 | 0 |
| NT2RI2006487 | 0 | 100 | 0 | 0 | 0 | 0 | 0 |
| NT2RI2006506 | 0 | 24.481 | 0 | 0 | 0 | 0 | 16.735 |
| NT2RI2006553 | 0 | 13.442 | 0 | 0 | 0 | 0 | 0 |
| NT2RI2006565 | 0 | 10.859 | 0 | 43.204 | 0 | 0 | 0 |
| NT2RI2006640 | 0 | 22.843 | 0 | 15.148 | 0 | 0 | 0 |
| NT2RI2006647 | 0 | 8.333 | 0 | 0 | 0 | 0 | 5.696 |
| NT2RI2006659 | 0 | 42.988 | 0 | 57.012 | 0 | 0 | 0 |
| NT2RI2006662 | 0 | 100 | 0 | 0 | 0 | 0 | 0 |
| NT2RI2006667 | 0 | 100 | 0 | 0 | 0 | 0 | 0 |
| NT2RI2006679 | 0 | 100 | 0 | 0 | 0 | 0 | 0 |
| NT2RI2006682 | 0 | 35.773 | 0 | 23.722 | 0 | 0 | 0 |
| NT2RI2006686 | 0 | 21.246 | 0 | 0 | 0 | 0 | 0 |
| NT2RI2006703 | 0 | 29.452 | 0 | 39.061 | 0 | 0 | 0 |
| NT2RI2006716 | 0 | 100 | 0 | 0 | 0 | 0 | 0 |
| NT2RI2006735 | 0 | 28.601 | 0 | 0 | 0 | 0 | 0 |
| NT2RI2006762 | 0 | 100 | 0 | 0 | 0 | 0 | 0 |
| NT2RI2006788 | 0 | 100 | 0 | 0 | 0 | 0 | 0 |
| NT2RI2006825 | 0 | 4.982 | 0 | 0 | 0 | 0 | 3.406 |
| NT2RI2006838 | 0 | 100 | 0 | 0 | 0 | 0 | 0 |
| NT2RI2006853 | 8.129 | 4.076 | 0 | 0 | 0 | 0 | 0 |
| NT2RI2006855 | 0 | 15.665 | 0 | 0 | 0 | 0 | 0 |
| NT2RI2006856 | 5.093 | 0.851 | 0 | 1.129 | 0 | 0 | 0 |
| NT2RI2006943 | 17.631 | 8.841 | 0 | 2.931 | 0 | 0 | 3.022 |
| NT2RI2006973 | 0 | 100 | 0 | 0 | 0 | 0 | 0 |
| NT2RI2007046 | 0 | 100 | 0 | 0 | 0 | 0 | 0 |
| NT2RI2007048 | 0 | 100 | 0 | 0 | 0 | 0 | 0 |
| NT2RI2007054 | 0 | 2.359 | 0 | 0 | 0 | 0 | 1.613 |
| NT2RI2007084 | 0 | 1.977 | 0 | 0 | 0 | 0 | 0 |
| NT2RI2007096 | 0 | 9.420 | 0 | 12.494 | 0 | 0 | 19.320 |
| NT2RI2007116 | 0 | 100 | 0 | 0 | 0 | 0 | 0 |
| NT2RI2007133 | 1.422 | 1.426 | 0 | 1.891 | 0 | 0 | 0 |
| NT2RI2007148 | 0 | 1.716 | 0 | 0 | 0 | 0 | 0 |
| NT2RI2007214 | 0 | 42.988 | 0 | 57.012 | 0 | 0 | 0 |
| NT2RI2007277 | 3.553 | 5.345 | 0 | 7.088 | 0 | 0 | 26.793 |
| NT2RI2007303 | 0 | 100 | 0 | 0 | 0 | 0 | 0 |
| NT2RI2007334 | 45.725 | 22.928 | 0 | 0 | 0 | 0 | 31.347 |
| NT2RI2007377 | 8.489 | 2.128 | 0 | 2.823 | 0 | 0 | 8.730 |
| NT2RI2007384 | 0 | 2.361 | 12.461 | 1.044 | 0 | 6.383 | 0 |
| NT2RI2007386 | 0 | 100 | 0 | 0 | 0 | 0 | 0 |
| NT2RI2007406 | 66.603 | 33.397 | 0 | 0 | 0 | 0 | 0 |
| NT2RI2007439 | 66.603 | 33.397 | 0 | 0 | 0 | 0 | 0 |
| NT2RI2007445 | 6.498 | 6.517 | 0 | 8.643 | 0 | 0 | 0 |
| NT2RI2007468 | 15.143 | 15.186 | 0 | 10.070 | 0 | 0 | 5.191 |
| NT2RI2007469 | 0 | 58.159 | 0 | 0 | 0 | 0 | 0 |
| NT2RI2007498 | 1.478 | 17.786 | 0 | 1.966 | 0 | 0 | 0 |
| NT2RI2007507 | 0 | 100 | 0 | 0 | 0 | 0 | 0 |
| NT2RI2007572 | 2.708 | 1.358 | 0 | 3.602 | 0 | 0 | 7.426 |
| NT2RI2007589 | 0 | 3.881 | 0 | 5.148 | 0 | 0 | 0 |
| NT2RI2007593 | 0 | 29.937 | 0 | 0 | 0 | 0 | 0 |
| NT2RI2007629 | 0 | 14.653 | 0 | 0 | 0 | 0 | 5.008 |
| NT2RI2007723 | 12.821 | 12.858 | 0 | 0 | 0 | 0 | 0 |
| NT2RI2007729 | 0 | 20.986 | 0 | 0 | 0 | 0 | 0 |
| NT2RI2007751 | 0 | 100 | 0 | 0 | 0 | 0 | 0 |
| NT2RI2007754 | 0 | 35.266 | 0 | 0 | 0 | 0 | 0 |
| NT2RI2007827 | 0 | 13.642 | 0 | 0 | 0 | 0 | 0 |
| NT2RI2007853 | 0 | 8.137 | 0 | 0 | 0 | 0 | 0 |
| NT2RI2007877 | 0 | 100 | 0 | 0 | 0 | 0 | 0 |
| NT2RI2007879 | 0 | 5.768 | 0 | 0 | 0 | 0 | 0 |
| NT2RI2007884 | 0 | 4.613 | 0 | 12.237 | 0 | 0 | 6.308 |
| NT2RI2007891 | 0 | 100 | 0 | 0 | 0 | 0 | 0 |
| NT2RI2007956 | 0 | 100 | 0 | 0 | 0 | 0 | 0 |
| NT2RI2007965 | 0 | 42.988 | 0 | 57.012 | 0 | 0 | 0 |
| NT2RI2007987 | 0 | 6.544 | 0 | 0 | 0 | 0 | 13.421 |
| NT2RI2008007 | 0 | 35.172 | 0 | 0 | 0 | 0 | 0 |
| NT2RI2008045 | 0 | 1.411 | 0 | 1.871 | 0 | 0 | 3.858 |
| NT2RI2008050 | 0 | 100 | 0 | 0 | 0 | 0 | 0 |
| NT2RI2008141 | 0 | 7.772 | 0 | 20.614 | 0 | 0 | 5.313 |
| NT2RI2008171 | 0 | 8.069 | 0 | 0 | 0 | 0 | 0 |
| NT2RI2008188 | 0 | 52.242 | 0 | 0 | 0 | 0 | 0 |
| NT2RI2008204 | 44.987 | 11.279 | 0 | 0 | 0 | 0 | 0 |
| NT2RI2008221 | 0 | 2.015 | 0 | 0 | 0 | 0 | 0 |
| NT2RI2008233 | 0 | 34.405 | 0 | 0 | 0 | 0 | 0 |
| NT2RI2008336 | 1.452 | 3.640 | 0 | 2.897 | 0 | 0 | 1.991 |
| NT2RI2008396 | 4.792 | 5.607 | 0 | 4.249 | 0 | 0 | 2.738 |
| NT2RI2008455 | 0 | 100 | 0 | 0 | 0 | 0 | 0 |
| NT2RI2008481 | 0 | 4.032 | 0 | 3.565 | 0 | 5.451 | 0.919 |
| NT2RI2008502 | 0 | 100 | 0 | 0 | 0 | 0 | 0 |
| NT2RI2008526 | 0 | 2.787 | 0 | 0 | 0 | 5.650 | 0 |
| NT2RI2008566 | 0 | 17.092 | 0 | 0 | 0 | 0 | 11.684 |
| NT2RI2008598 | 0 | 15.244 | 0 | 0 | 0 | 0 | 0 |
| NT2RI2008622 | 0 | 5.735 | 0 | 7.606 | 0 | 23.258 | 3.920 |
| NT2RI2008656 | 0 | 4.935 | 78.152 | 0 | 0 | 0 | 0 |
| NT2RI2008714 | 0 | 26.665 | 0 | 0 | 0 | 0 | 0 |
| NT2RI2008724 | 0 | 3.337 | 0 | 0 | 0 | 0 | 0 |
| NT2RI2008749 | 4.098 | 1.027 | 0 | 1.363 | 0 | 0 | 0 |
| NT2RI2008791 | 4.228 | 6.361 | 0 | 0 | 0 | 8.599 | 0 |
| NT2RI2008801 | 0 | 100 | 0 | 0 | 0 | 0 | 0 |
| NT2RI2008808 | 16.429 | 8.238 | 0 | 10.926 | 0 | 0 | 0 |
| NT2RI2008812 | 0 | 13.156 | 0 | 0 | 0 | 0 | 0 |
| NT2RI2008841 | 0 | 100 | 0 | 0 | 0 | 0 | 0 |
| NT2RI2008942 | 0 | 13.339 | 0 | 27.801 | 0 | 0 | 3.908 |
| NT2RI2008952 | 0 | 100 | 0 | 0 | 0 | 0 | 0 |
| NT2RI2009005 | 0 | 100 | 0 | 0 | 0 | 0 | 0 |
| NT2RI2009037 | 3.055 | 4.596 | 0 | 0 | 0 | 0 | 4.189 |
| NT2RI2009065 | 1.693 | 4.244 | 0 | 1.126 | 0 | 0 | 2.321 |
| NT2RI2009066 | 19.866 | 4.981 | 0 | 6.606 | 0 | 0 | 0 |
| NT2RI2009083 | 0 | 18.633 | 0 | 0 | 0 | 0 | 0 |
| NT2RI2009101 | 0 | 100 | 0 | 0 | 0 | 0 | 0 |
| NT2RI2009103 | 0 | 58.159 | 0 | 0 | 0 | 0 | 0 |
| NT2RI2009144 | 0 | 100 | 0 | 0 | 0 | 0 | 0 |
| NT2RI2009151 | 0 | 100 | 0 | 0 | 0 | 0 | 0 |
| NT2RI2009173 | 4.042 | 2.027 | 0 | 2.688 | 0 | 0 | 1.386 |
| NT2RI2009194 | 0 | 5.358 | 0 | 0 | 0 | 0 | 9.767 |
| NT2RI2009215 | 0 | 100 | 0 | 0 | 0 | 0 | 0 |
| NT2RI2009233 | 0 | 4.099 | 0 | 5.436 | 0 | 0 | 5.604 |
| NT2RI2009239 | 0 | 5.080 | 0 | 3.369 | 0 | 0 | 0 |
| NT2RI2009259 | 0 | 21.268 | 0 | 0 | 0 | 0 | 0 |
| NT2RI2009269 | 21.488 | 7.183 | 0 | 2.382 | 0 | 0 | 0 |
| NT2RI2009281 | 5.101 | 2.558 | 0 | 10.176 | 0 | 0 | 1.748 |
| NT2RI2009289 | 0 | 100 | 0 | 0 | 0 | 0 | 0 |
| NT2RI2009301 | 0 | 100 | 0 | 0 | 0 | 0 | 0 |
| NT2RI2009402 | 0 | 5.700 | 0 | 0 | 0 | 0 | 19.482 |
| NT2RI2009406 | 10.196 | 20.451 | 0 | 13.561 | 0 | 0 | 0 |
| NT2RI2009517 | 0 | 100 | 0 | 0 | 0 | 0 | 0 |
| NT2RI2009583 | 0.811 | 0.813 | 0 | 0 | 0 | 4.947 | 0 |
| NT2RI2009585 | 0 | 100 | 0 | 0 | 0 | 0 | 0 |
| NT2RI2009595 | 0 | 100 | 0 | 0 | 0 | 0 | 0 |
| NT2RI2009855 | 0 | 100 | 0 | 0 | 0 | 0 | 0 |
| NT2RI2010283 | 0 | 13.449 | 0 | 35.673 | 0 | 0 | 0 |
| NT2RI2010508 | 0 | 100 | 0 | 0 | 0 | 0 | 0 |
| NT2RI2010795 | 0 | 29.973 | 0 | 0 | 0 | 0 | 0 |
| NT2RI2011422 | 0 | 100 | 0 | 0 | 0 | 0 | 0 |
| NT2RI2011450 | 0 | 46.154 | 0 | 0 | 0 | 0 | 0 |
| NT2RI2011683 | 0 | 100 | 0 | 0 | 0 | 0 | 0 |
| NT2RI2011803 | 0 | 100 | 0 | 0 | 0 | 0 | 0 |
| NT2RI2012350 | 0 | 2.182 | 0 | 0 | 0 | 0 | 0 |
| NT2RI2012659 | 0 | 24.645 | 0 | 0 | 0 | 0 | 0 |
| NT2RI2012726 | 16.813 | 8.430 | 0 | 11.181 | 0 | 0 | 5.763 |
| NT2RI2012990 | 0 | 24.360 | 0 | 0 | 0 | 0 | 0 |
| NT2RI2013345 | 0 | 17.187 | 0 | 0 | 0 | 0 | 0 |
| NT2RI2013357 | 0 | 73.545 | 0 | 0 | 0 | 0 | 0 |
| NT2RI2013373 | 0 | 100 | 0 | 0 | 0 | 0 | 0 |
| NT2RI2014247 | 0 | 27.718 | 0 | 0 | 0 | 0 | 0 |
| NT2RI2014551 | 0 | 100 | 0 | 0 | 0 | 0 | 0 |
| NT2RI2014683 | 0 | 100 | 0 | 0 | 0 | 0 | 0 |
| NT2RI2014733 | 0 | 45.319 | 0 | 0 | 0 | 0 | 0 |
| NT2RI2015239 | 0 | 100 | 0 | 0 | 0 | 0 | 0 |
| NT2RI2015342 | 0 | 8.201 | 0 | 10.877 | 0 | 0 | 0 |
| NT2RI2015533 | 0 | 2.824 | 0 | 0 | 0 | 0 | 3.861 |
| NT2RI2016128 | 0 | 100 | 0 | 0 | 0 | 0 | 0 |
| NT2RI2016134 | 0 | 100 | 0 | 0 | 0 | 0 | 0 |
| NT2RI2017529 | 0 | 3.526 | 0 | 0 | 0 | 7.151 | 0 |
| NT2RI2018311 | 0 | 78.082 | 0 | 0 | 0 | 0 | 0 |
| NT2RI2018363 | 0 | 100 | 0 | 0 | 0 | 0 | 0 |
| NT2RI2018448 | 0 | 11.442 | 0 | 15.176 | 0 | 0 | 0 |
| NT2RI2018883 | 0 | 49.384 | 0 | 0 | 0 | 0 | 0 |
| NT2RI2018950 | 0 | 100 | 0 | 0 | 0 | 0 | 0 |
| NT2RI2019751 | 0 | 71.913 | 0 | 0 | 0 | 0 | 0 |
| NT2RI2019826 | 0 | 100 | 0 | 0 | 0 | 0 | 0 |
| NT2RI2020390 | 0 | 100 | 0 | 0 | 0 | 0 | 0 |
| NT2RI2020703 | 0 | 100 | 0 | 0 | 0 | 0 | 0 |
| NT2RI2021463 | 0 | 100 | 0 | 0 | 0 | 0 | 0 |
| NT2RI2021625 | 0 | 34.630 | 0 | 45.928 | 0 | 0 | 0 |
| NT2RI2022468 | 0 | 12.182 | 0 | 0 | 0 | 0 | 0 |
| NT2RI2022584 | 0 | 100 | 0 | 0 | 0 | 0 | 0 |
| NT2RI2023303 | 0 | 100 | 0 | 0 | 0 | 0 | 0 |
| NT2RI2023671 | 0 | 100 | 0 | 0 | 0 | 0 | 0 |
| NT2RI2024008 | 0 | 61.866 | 0 | 0 | 0 | 0 | 0 |
| NT2RI2024313 | 0 | 26.626 | 0 | 0 | 0 | 0 | 0 |
| NT2RI2024460 | 0 | 100 | 0 | 0 | 0 | 0 | 0 |
| NT2RI2024496 | 0 | 100 | 0 | 0 | 0 | 0 | 0 |
| NT2RI2024935 | 0 | 7.895 | 0 | 0 | 0 | 0 | 0 |
| NT2RI2025075 | 0 | 30.809 | 0 | 0 | 0 | 0 | 21.061 |
| NT2RI2025255 | 0 | 62.102 | 0 | 0 | 0 | 0 | 0 |
| NT2RI2025564 | 0 | 100 | 0 | 0 | 0 | 0 | 0 |
| NT2RI2025565 | 0 | 100 | 0 | 0 | 0 | 0 | 0 |
| NT2RI2025909 | 0 | 100 | 0 | 0 | 0 | 0 | 0 |
| NT2RI2025957 | 0 | 100 | 0 | 0 | 0 | 0 | 0 |
| NT2RI2025976 | 0 | 100 | 0 | 0 | 0 | 0 | 0 |
| NT2RI2026758 | 0 | 100 | 0 | 0 | 0 | 0 | 0 |
| NT2RI2027081 | 0 | 100 | 0 | 0 | 0 | 0 | 0 |
| NT2RI2027157 | 0 | 100 | 0 | 0 | 0 | 0 | 0 |
| NT2RI2027224 | 0 | 61.866 | 0 | 0 | 0 | 0 | 0 |
| NT2RI2027323 | 0 | 60.375 | 0 | 0 | 0 | 0 | 0 |
| NT2RI2027396 | 0 | 100 | 0 | 0 | 0 | 0 | 0 |
| NT2RI2027484 | 0 | 100 | 0 | 0 | 0 | 0 | 0 |
| NT2RI2027975 | 0 | 71.913 | 0 | 0 | 0 | 0 | 0 |
| NT2RI2028213 | 0 | 100 | 0 | 0 | 0 | 0 | 0 |
| NT2RI2028222 | 0 | 100 | 0 | 0 | 0 | 0 | 0 |
| NT2RI2028537 | 0 | 100 | 0 | 0 | 0 | 0 | 0 |
| NT2RI2028642 | 0 | 100 | 0 | 0 | 0 | 0 | 0 |
| NT2RI3000174 | 0 | 61.866 | 0 | 0 | 0 | 0 | 0 |
| NT2RI3000213 | 0 | 100 | 0 | 0 | 0 | 0 | 0 |
| NT2RI3000423 | 0 | 8.738 | 0 | 34.767 | 0 | 0 | 0 |
| NT2RI3000622 | 0 | 15.558 | 0 | 0 | 0 | 63.099 | 0 |
| NT2RI3001132 | 0 | 100 | 0 | 0 | 0 | 0 | 0 |
| NT2RI3001263 | 0 | 100 | 0 | 0 | 0 | 0 | 0 |
| NT2RI3001279 | 0 | 100 | 0 | 0 | 0 | 0 | 0 |
| NT2RI3001348 | 0 | 18.992 | 0 | 0 | 0 | 0 | 0 |
| NT2RI3001445 | 0 | 11.509 | 0 | 0 | 0 | 0 | 7.868 |
| NT2RI3001458 | 0 | 100 | 0 | 0 | 0 | 0 | 0 |
| NT2RI3001515 | 0 | 19.682 | 0 | 0 | 0 | 0 | 40.364 |
| NT2RI3001573 | 0 | 100 | 0 | 0 | 0 | 0 | 0 |
| NT2RI3001967 | 0 | 100 | 0 | 0 | 0 | 0 | 0 |
| NT2RI3002303 | 0 | 100 | 0 | 0 | 0 | 0 | 0 |
| NT2RI3002557 | 0 | 100 | 0 | 0 | 0 | 0 | 0 |
| NT2RI3002842 | 0 | 34.054 | 0 | 45.164 | 0 | 0 | 0 |
| NT2RI3003027 | 0 | 100 | 0 | 0 | 0 | 0 | 0 |
| NT2RI3003031 | 0 | 100 | 0 | 0 | 0 | 0 | 0 |
| NT2RI3003095 | 0 | 100 | 0 | 0 | 0 | 0 | 0 |
| NT2RI3003104 | 0 | 28.425 | 0 | 0 | 0 | 0 | 0 |
| NT2RI3003162 | 0 | 100 | 0 | 0 | 0 | 0 | 0 |
| NT2RI3003362 | 0 | 100 | 0 | 0 | 0 | 0 | 0 |
| NT2RI3003382 | 0 | 71.913 | 0 | 0 | 0 | 0 | 0 |
| NT2RI3003409 | 0 | 100 | 0 | 0 | 0 | 0 | 0 |
| NT2RI3003738 | 0 | 32.959 | 0 | 0 | 0 | 0 | 0 |
| NT2RI3003925 | 0 | 64.044 | 0 | 0 | 0 | 0 | 0 |
| NT2RI3004133 | 0 | 100 | 0 | 0 | 0 | 0 | 0 |
| NT2RI3004381 | 0 | 100 | 0 | 0 | 0 | 0 | 0 |
| NT2RI3004510 | 0 | 51.230 | 0 | 0 | 0 | 0 | 0 |
| NT2RI3005202 | 0 | 100 | 0 | 0 | 0 | 0 | 0 |
| NT2RI3005403 | 0 | 62.102 | 0 | 0 | 0 | 0 | 0 |
| NT2RI3005416 | 0 | 100 | 0 | 0 | 0 | 0 | 0 |
| NT2RI3005724 | 0 | 10.770 | 0 | 14.284 | 0 | 0 | 0 |
| NT2RI3005861 | 0 | 100 | 0 | 0 | 0 | 0 | 0 |
| NT2RI3005923 | 0 | 35.423 | 0 | 0 | 0 | 0 | 0 |
| NT2RI3005928 | 0 | 100 | 0 | 0 | 0 | 0 | 0 |
| NT2RI3006132 | 0 | 100 | 0 | 0 | 0 | 0 | 0 |
| NT2RI3006171 | 0 | 100 | 0 | 0 | 0 | 0 | 0 |
| NT2RI3006284 | 0 | 3.760 | 0 | 0 | 0 | 0 | 0 |
| NT2RI3006340 | 0 | 14.839 | 0 | 0 | 0 | 0 | 0 |
| NT2RI3006376 | 0 | 100 | 0 | 0 | 0 | 0 | 0 |
| NT2RI3006666 | 0 | 37.941 | 0 | 0 | 0 | 0 | 0 |
| NT2RI3006673 | 0 | 18.135 | 0 | 0 | 0 | 0 | 0 |
| NT2RI3006796 | 0 | 100 | 0 | 0 | 0 | 0 | 0 |
| NT2RI3007065 | 0 | 100 | 0 | 0 | 0 | 0 | 0 |
| NT2RI3007095 | 0 | 100 | 0 | 0 | 0 | 0 | 0 |
| NT2RI3007158 | 0 | 100 | 0 | 0 | 0 | 0 | 0 |
| NT2RI3007167 | 0 | 100 | 0 | 0 | 0 | 0 | 0 |
| NT2RI3007213 | 0 | 71.913 | 0 | 0 | 0 | 0 | 0 |
| NT2RI3007291 | 0 | 22.746 | 0 | 0 | 0 | 0 | 0 |
| NT2RI3007443 | 0 | 100 | 0 | 0 | 0 | 0 | 0 |
| NT2RI3007543 | 6.150 | 1.542 | 0 | 0 | 0 | 6.253 | 3.162 |
| NT2RI3007684 | 0 | 100 | 0 | 0 | 0 | 0 | 0 |
| NT2RI3007757 | 0 | 45.964 | 0 | 30.480 | 0 | 0 | 0 |
| NT2RI3007878 | 0 | 100 | 0 | 0 | 0 | 0 | 0 |
| NT2RI3007978 | 0 | 100 | 0 | 0 | 0 | 0 | 0 |
| NT2RI3008055 | 0 | 40.142 | 0 | 0 | 0 | 0 | 0 |
| NT2RI3008162 | 0 | 100 | 0 | 0 | 0 | 0 | 0 |
| NT2RI3008179 | 0 | 100 | 0 | 0 | 0 | 0 | 0 |
| NT2RI3008228 | 0 | 100 | 0 | 0 | 0 | 0 | 0 |
| NT2RI3008442 | 0 | 100 | 0 | 0 | 0 | 0 | 0 |
| NT2RI3008652 | 0 | 100 | 0 | 0 | 0 | 0 | 0 |
| NT2RI3008697 | 0 | 100 | 0 | 0 | 0 | 0 | 0 |
| NT2RI3008974 | 0 | 100 | 0 | 0 | 0 | 0 | 0 |
| NT2RI3009158 | 0 | 45.727 | 0 | 0 | 0 | 0 | 0 |
| NT2RI3009480 | 0 | 68.547 | 0 | 0 | 0 | 0 | 0 |
| NT2RI3009524 | 0 | 64.504 | 0 | 0 | 0 | 0 | 0 |
| NT2RP6000005 | 0 | 0 | 0 | 5.301 | 0 | 0 | 5.465 |
| NT2RP6000008 | 0 | 0 | 0 | 77.250 | 0 | 0 | 0 |
| NT2RP6000017 | 5.422 | 0 | 0 | 3.606 | 0 | 0 | 1.859 |
| NT2RP6000032 | 0 | 14.251 | 0 | 18.901 | 0 | 0 | 0 |
| NT2RP6000033 | 0 | 0 | 0 | 10.025 | 0 | 0 | 0 |
| NT2RP6000039 | 0 | 3.259 | 0 | 8.644 | 0 | 0 | 6.683 |
| NT2RP6000043 | 13.765 | 0 | 0 | 9.154 | 0 | 0 | 4.718 |
| NT2RP6000059 | 0 | 0 | 0 | 52.276 | 0 | 0 | 0 |
| NT2RP6000060 | 0 | 0 | 0 | 100 | 0 | 0 | 0 |
| NT2RP6000072 | 5.856 | 0 | 0 | 7.789 | 0 | 0 | 0 |
| NT2RP6000077 | 0 | 0 | 0 | 15.492 | 0 | 0 | 0 |
| NT2RP6000078 | 0 | 0 | 0 | 0.867 | 0 | 0 | 1.787 |
| NT2RP6000085 | 0 | 16.809 | 0 | 11.147 | 0 | 0 | 5.745 |
| NT2RP6000086 | 0 | 0 | 0 | 77.250 | 0 | 0 | 0 |
| NT2RP6000100 | 0 | 0 | 0 | 52.773 | 0 | 0 | 0 |
| NT2RP6000109 | 6.922 | 6.941 | 0 | 13.809 | 0 | 0 | 11.863 |
| NT2RP6000110 | 0 | 9.952 | 0 | 6.600 | 0 | 0 | 17.009 |
| NT2RP6000119 | 0 | 0 | 0 | 100 | 0 | 0 | 0 |
| NT2RP6000123 | 1.419 | 2.134 | 0 | 1.887 | 0 | 0 | 2.918 |
| NT2RP6000127 | 0 | 0 | 0 | 100 | 0 | 0 | 0 |
| NT2RP6000130 | 0 | 0 | 0 | 38.584 | 0 | 0 | 0 |
| NT2RP6000140 | 0 | 0 | 0 | 100 | 0 | 0 | 0 |
| NT2RP6000150 | 0 | 0 | 0 | 100 | 0 | 0 | 0 |
| NT2RP7000041 | 0 | 0 | 0 | 100 | 0 | 0 | 0 |
| NT2RP7000069 | 0 | 0 | 0 | 16.237 | 0 | 0 | 4.185 |
| NT2RP7000076 | 0 | 2.215 | 0 | 2.938 | 0 | 0 | 2.271 |
| NT2RP7000086 | 0 | 0 | 0 | 30.820 | 0 | 0 | 0 |
| NT2RP7000109 | 0 | 0 | 0 | 100 | 0 | 0 | 0 |
| NT2RP7000112 | 0 | 0 | 0 | 38.711 | 0 | 0 | 19.954 |
| NT2RP7000173 | 0 | 2.021 | 0 | 13.399 | 0 | 0 | 19.338 |
| NT2RP7000238 | 0 | 16.467 | 0 | 24.959 | 0 | 0 | 1.608 |
| NT2RP7000259 | 0 | 0 | 0 | 32.229 | 0 | 0 | 0 |
| NT2RP7000271 | 0 | 0 | 0 | 7.310 | 0 | 0 | 0 |
| NT2RP7000311 | 0 | 0 | 0 | 100 | 0 | 0 | 0 |
| NT2RP7000359 | 0 | 0 | 0 | 100 | 0 | 0 | 0 |
| NT2RP7000364 | 0 | 0 | 0 | 100 | 0 | 0 | 0 |
| NT2RP7000380 | 0 | 0 | 0 | 100 | 0 | 0 | 0 |
| NT2RP7000391 | 0 | 0 | 0 | 100 | 0 | 0 | 0 |
| NT2RP7000425 | 0 | 0 | 0 | 49.156 | 0 | 0 | 0 |
| NT2RP7000477 | 7.170 | 3.595 | 0 | 14.305 | 0 | 0 | 2.458 |
| NT2RP7000579 | 0 | 0 | 0 | 87.165 | 0 | 0 | 0 |
| NT2RP7000586 | 0 | 19.966 | 0 | 26.480 | 0 | 0 | 0 |
| NT2RP7000600 | 0 | 0 | 0 | 10.681 | 0 | 0 | 2.753 |
| NT2RP7000624 | 0 | 0 | 0 | 10.515 | 0 | 0 | 16.260 |
| NT2RP7000812 | 0 | 0 | 0 | 38.463 | 0 | 0 | 0 |
| NT2RP7000906 | 0 | 2.371 | 0 | 3.144 | 0 | 0 | 3.241 |
| NT2RP7000926 | 0 | 0 | 0 | 100 | 0 | 0 | 0 |
| NT2RP7001074 | 0 | 0 | 0 | 100 | 0 | 0 | 0 |
| NT2RP7001080 | 24.260 | 18.247 | 0 | 32.267 | 0 | 0 | 0 |
| NT2RP7001156 | 0 | 0 | 0 | 78.664 | 0 | 0 | 0 |
| NT2RP7001166 | 2.710 | 2.718 | 0 | 7.210 | 0 | 0 | 1.858 |
| NT2RP7001231 | 0 | 0 | 0 | 9.953 | 0 | 0 | 10.261 |
| NT2RP7001283 | 2.040 | 1.023 | 0 | 2.713 | 0 | 0 | 2.098 |
| NT2RP7001306 | 0 | 0 | 0 | 17.531 | 0 | 0 | 0 |
| NT2RP7001319 | 0 | 0 | 0 | 100 | 0 | 0 | 0 |
| NT2RP7001335 | 0 | 0 | 0 | 25.176 | 0 | 0 | 0 |
| NT2RP7001364 | 0 | 0 | 0 | 70.518 | 0 | 0 | 0 |
| NT2RP7001475 | 0 | 0 | 0 | 42.341 | 0 | 0 | 0 |
| NT2RP7001532 | 0 | 0 | 0 | 100 | 0 | 0 | 0 |
| NT2RP7001591 | 0 | 0 | 0 | 6.266 | 0 | 19.161 | 0 |
| NT2RP7001602 | 0 | 0 | 0 | 100 | 0 | 0 | 0 |
| NT2RP7001678 | 0 | 0 | 0 | 37.485 | 0 | 0 | 0 |
| NT2RP7001856 | 0 | 6.228 | 0 | 8.260 | 0 | 0 | 0 |
| NT2RP7001962 | 0 | 0 | 0 | 12.805 | 0 | 0 | 6.600 |
| NT2RP7002028 | 0 | 0 | 0 | 4.843 | 0 | 0 | 2.496 |
| NT2RP7002064 | 0 | 0 | 0 | 53.332 | 0 | 0 | 0 |
| NT2RP7002151 | 0 | 0 | 0 | 65.987 | 0 | 0 | 34.013 |
| NT2RP7002163 | 0 | 0 | 0 | 100 | 0 | 0 | 0 |
| NT2RP7002243 | 0 | 0 | 0 | 49.240 | 0 | 0 | 50.760 |
| NT2RP7002282 | 0 | 0 | 0 | 37.009 | 0 | 0 | 19.076 |
| NT2RP7002376 | 0 | 0 | 0 | 29.242 | 0 | 0 | 0 |
| NT2RP7002379 | 0 | 0.915 | 0 | 2.426 | 0 | 0 | 3.127 |
| NT2RP7002449 | 0 | 3.671 | 0 | 4.869 | 0 | 0 | 5.019 |
| NT2RP7002450 | 0 | 0 | 0 | 6.432 | 0 | 0 | 0 |
| NT2RP7002478 | 0 | 0 | 0 | 70.259 | 0 | 0 | 0 |
| NT2RP7002554 | 0 | 0 | 0 | 100 | 0 | 0 | 0 |
| NT2RP7002594 | 0 | 0 | 0 | 32.922 | 0 | 0 | 0 |
| NT2RP7002603 | 0 | 0 | 0 | 100 | 0 | 0 | 0 |
| NT2RP7002619 | 0 | 0 | 0 | 2.626 | 0 | 0 | 4.061 |
| NT2RP7002650 | 0 | 0 | 0 | 100 | 0 | 0 | 0 |
| NT2RP7002738 | 0 | 0 | 0 | 27.748 | 0 | 0 | 35.756 |
| NT2RP7002779 | 0 | 0 | 0 | 78.664 | 0 | 0 | 0 |
| NT2RP7002802 | 0 | 6.641 | 0 | 26.423 | 0 | 0 | 9.080 |
| NT2RP7002829 | 0 | 0 | 0 | 21.074 | 0 | 0 | 0 |
| NT2RP7002841 | 0 | 0 | 0 | 100 | 0 | 0 | 0 |
| NT2RP7002875 | 3.344 | 1.677 | 0 | 4.448 | 0 | 0 | 14.902 |
| NT2RP7002906 | 10.161 | 0 | 0 | 6.757 | 0 | 0 | 13.932 |
| NT2RP7002978 | 0 | 0 | 0 | 100 | 0 | 0 | 0 |
| NT2RP7002982 | 0 | 7.064 | 0 | 18.738 | 0 | 0 | 0 |
| NT2RP7003025 | 0 | 0 | 0 | 100 | 0 | 0 | 0 |
| NT2RP7003050 | 0 | 0 | 0 | 100 | 0 | 0 | 0 |
| NT2RP7003055 | 38.242 | 0 | 0 | 25.432 | 0 | 0 | 13.109 |
| NT2RP7003084 | 0 | 0 | 0 | 100 | 0 | 0 | 0 |
| NT2RP7003091 | 0 | 0 | 0 | 100 | 0 | 0 | 0 |
| NT2RP7003107 | 0 | 0 | 0 | 100 | 0 | 0 | 0 |
| NT2RP7003134 | 0 | 0 | 0 | 100 | 0 | 0 | 0 |
| NT2RP7003148 | 0 | 0 | 0 | 100 | 0 | 0 | 0 |
| NT2RP7003203 | 0 | 6.713 | 0 | 4.452 | 0 | 0 | 13.768 |
| NT2RP7003261 | 0 | 0 | 39.095 | 3.274 | 0 | 10.013 | 3.376 |
| NT2RP7003319 | 0 | 1.658 | 0 | 2.199 | 0 | 0 | 5.667 |
| NT2RP7003439 | 0 | 0 | 0 | 100 | 0 | 0 | 0 |
| NT2RP7003511 | 0 | 0 | 0 | 15.928 | 0 | 0 | 8.210 |
| NT2RP7003629 | 0 | 0 | 0 | 27.270 | 0 | 0 | 0 |
| NT2RP7003632 | 5.901 | 0 | 0 | 3.924 | 0 | 12.001 | 2.023 |
| NT2RP7003647 | 0 | 2.139 | 0 | 5.673 | 0 | 0 | 4.386 |
| NT2RP7003680 | 27.035 | 0 | 0 | 35.957 | 0 | 0 | 0 |
| NT2RP7003688 | 0 | 5.367 | 0 | 1.780 | 0 | 5.442 | 8.256 |
| NT2RP7003724 | 0 | 0 | 0 | 22.256 | 0 | 0 | 0 |
| NT2RP7003960 | 0 | 3.011 | 0 | 11.979 | 0 | 0 | 8.233 |
| NT2RP7004027 | 0 | 0 | 0 | 100 | 0 | 0 | 0 |
| NT2RP7004080 | 0 | 0 | 0 | 100 | 0 | 0 | 0 |
| NT2RP7004114 | 0 | 10.133 | 0 | 26.878 | 0 | 0 | 6.927 |
| NT2RP7004123 | 0 | 0 | 0 | 4.625 | 0 | 0 | 0 |
| NT2RP7004173 | 2.768 | 1.388 | 0 | 1.841 | 0 | 0 | 4.744 |
| NT2RP7004196 | 4.748 | 9.524 | 0 | 6.315 | 0 | 0 | 6.511 |
| NT2RP7004204 | 0 | 0 | 0 | 8.219 | 0 | 0 | 2.118 |
| NT2RP7004233 | 0 | 0 | 0 | 28.819 | 0 | 0 | 14.855 |
| NT2RP7004260 | 0 | 0 | 0 | 61.835 | 0 | 0 | 0 |
| NT2RP7004348 | 0 | 4.107 | 0 | 10.893 | 0 | 0 | 16.844 |
| NT2RP7004352 | 0 | 9.259 | 0 | 16.373 | 0 | 0 | 12.659 |
| NT2RP7004358 | 0 | 0 | 0 | 100 | 0 | 0 | 0 |
| NT2RP7004373 | 0 | 0 | 0 | 2.837 | 0 | 0 | 1.462 |
| NT2RP7004396 | 0 | 0 | 0 | 100 | 0 | 0 | 0 |
| NT2RP7004428 | 0 | 0 | 0 | 16.256 | 0 | 0 | 12.569 |
| NT2RP7004481 | 0 | 9.773 | 0 | 38.885 | 0 | 0 | 26.724 |
| NT2RP7004541 | 0 | 0 | 0 | 58.079 | 0 | 0 | 0 |
| NT2RP7004559 | 0 | 0 | 0 | 20.543 | 0 | 0 | 0 |
| NT2RP7004641 | 0 | 0 | 0 | 61.835 | 0 | 0 | 0 |
| NT2RP7004656 | 0 | 0 | 0 | 51.826 | 0 | 0 | 0 |
| NT2RP7004687 | 0 | 0 | 0 | 45.439 | 0 | 0 | 0 |
| NT2RP7004722 | 0 | 0 | 0 | 100 | 0 | 0 | 0 |
| NT2RP7004728 | 0 | 0 | 0 | 7.576 | 0 | 0 | 9.763 |
| NT2RP7004751 | 0 | 0 | 13.468 | 2.256 | 0 | 0 | 0 |
| NT2RP7004766 | 0 | 0 | 0 | 100 | 0 | 0 | 0 |
| NT2RP7004790 | 0 | 0 | 0 | 37.619 | 0 | 0 | 0 |
| NT2RP7004884 | 0 | 0 | 0 | 13.233 | 0 | 0 | 13.642 |
| NT2RP7004911 | 0 | 3.203 | 0 | 4.248 | 0 | 0 | 2.190 |
| NT2RP7004915 | 0 | 13.491 | 0 | 35.784 | 0 | 0 | 0 |
| NT2RP7004925 | 0 | 6.884 | 36.334 | 6.086 | 0 | 0 | 3.137 |
| NT2RP7004946 | 0 | 3.129 | 0 | 8.299 | 0 | 0 | 8.555 |
| NT2RP7004961 | 0 | 0 | 0 | 81.144 | 0 | 0 | 0 |
| NT2RP7004964 | 0 | 0 | 0 | 100 | 0 | 0 | 0 |
| NT2RP7004975 | 0 | 0 | 0 | 100 | 0 | 0 | 0 |
| NT2RP7005118 | 0 | 0 | 0 | 100 | 0 | 0 | 0 |
| NT2RP7005205 | 0 | 0 | 0 | 100 | 0 | 0 | 0 |
| NT2RP7005219 | 0 | 0 | 0 | 62.933 | 0 | 0 | 0 |
| NT2RP7005323 | 0 | 0 | 0 | 100 | 0 | 0 | 0 |
| NT2RP7005468 | 0 | 33.224 | 0 | 44.064 | 0 | 0 | 22.712 |
| NT2RP7005493 | 0 | 0 | 0 | 29.165 | 0 | 0 | 0 |
| NT2RP7005513 | 0 | 0 | 0 | 4.074 | 0 | 0 | 2.100 |
| NT2RP7005529 | 0 | 0 | 0 | 35.588 | 0 | 0 | 0 |
| NT2RP7005629 | 0 | 0 | 0 | 100 | 0 | 0 | 0 |
| NT2RP7005631 | 0 | 0 | 0 | 100 | 0 | 0 | 0 |
| NT2RP7005669 | 0 | 0 | 0 | 100 | 0 | 0 | 0 |
| NT2RP7005675 | 0 | 0 | 0 | 7.009 | 0 | 0 | 7.226 |
| NT2RP7005750 | 0 | 13.005 | 0 | 17.247 | 0 | 0 | 4.445 |
| NT2RP7005846 | 0 | 0 | 0 | 100 | 0 | 0 | 0 |
| NT2RP7006033 | 0 | 0 | 0 | 37.056 | 0 | 0 | 9.550 |
| NT2RP7006075 | 18.990 | 0 | 0 | 6.315 | 0 | 0 | 0 |
| NT2RP7006141 | 0 | 0 | 0 | 1.780 | 0 | 0 | 0 |
| NT2RP7006160 | 0 | 0 | 0 | 100 | 0 | 0 | 0 |
| NT2RP7006162 | 0 | 0 | 0 | 77.250 | 0 | 0 | 0 |
| NT2RP7006188 | 0 | 0 | 0 | 18.824 | 0 | 0 | 6.468 |
| NT2RP7006223 | 0 | 7.678 | 0 | 10.183 | 0 | 0 | 10.498 |
| NT2RP7006263 | 0 | 7.317 | 0 | 9.705 | 0 | 0 | 10.004 |
| NT2RP7006296 | 0 | 0 | 0 | 78.664 | 0 | 0 | 0 |
| NT2RP7006304 | 0 | 0 | 0 | 78.664 | 0 | 0 | 0 |
| NT2RP7006374 | 0 | 0 | 0 | 100 | 0 | 0 | 0 |
| NT2RP7006395 | 0 | 0 | 0 | 82.532 | 0 | 0 | 0 |
| NT2RP7006408 | 0 | 0 | 0 | 100 | 0 | 0 | 0 |
| NT2RP7006457 | 0 | 0 | 0 | 100 | 0 | 0 | 0 |
| NT2RP7006490 | 7.779 | 7.801 | 0 | 5.173 | 0 | 0 | 5.333 |
| NT2RP7006539 | 0 | 0 | 0 | 14.024 | 0 | 0 | 0 |
| NT2RP7006547 | 0 | 0 | 0 | 78.664 | 0 | 0 | 0 |
| NT2RP7006601 | 0 | 0 | 0 | 68.270 | 0 | 0 | 0 |
| NT2RP7006619 | 0 | 0 | 0 | 5.320 | 0 | 0 | 2.742 |
| NT2RP7006621 | 0 | 0 | 0 | 100 | 0 | 0 | 0 |
| NT2RP7006636 | 0 | 0 | 0 | 100 | 0 | 0 | 0 |
| NT2RP7006701 | 18.221 | 0 | 0 | 12.117 | 0 | 0 | 0 |
| NT2RP7006717 | 2.384 | 0 | 0 | 3.171 | 0 | 0 | 5.721 |
| NT2RP7006853 | 0 | 0 | 0 | 100 | 0 | 0 | 0 |
| NT2RP7006886 | 0 | 0 | 0 | 22.923 | 0 | 0 | 11.816 |
| NT2RP7006887 | 0 | 0 | 0 | 100 | 0 | 0 | 0 |
| NT2RP7006980 | 0 | 0 | 0 | 40.647 | 0 | 0 | 0 |
| NT2RP7006986 | 0 | 6.827 | 0 | 9.054 | 0 | 0 | 9.334 |
| NT2RP7006995 | 0 | 0 | 0 | 51.826 | 0 | 0 | 0 |
| NT2RP7007114 | 0 | 0 | 0 | 39.485 | 0 | 0 | 0 |
| NT2RP7007154 | 0 | 0 | 0 | 1.374 | 0 | 0 | 1.417 |
| NT2RP7007177 | 4.935 | 2.475 | 0 | 6.564 | 0 | 0 | 3.383 |
| NT2RP7007221 | 0 | 0 | 0 | 100 | 0 | 0 | 0 |
| NT2RP7007226 | 0 | 0 | 0 | 100 | 0 | 0 | 0 |
| NT2RP7007252 | 0 | 0 | 0 | 33.100 | 0 | 0 | 0 |
| NT2RP7007269 | 0 | 0 | 0 | 56.608 | 0 | 0 | 0 |
| NT2RP7007310 | 0 | 0 | 0 | 8.975 | 0 | 0 | 0 |
| NT2RP7007359 | 0 | 0 | 0 | 100 | 0 | 0 | 0 |
| NT2RP7007381 | 0 | 0 | 0 | 37.796 | 0 | 0 | 0 |
| NT2RP7007387 | 0 | 3.730 | 0 | 9.894 | 0 | 0 | 5.100 |
| NT2RP7007406 | 0 | 0 | 0 | 74.295 | 0 | 0 | 0 |
| NT2RP7007480 | 0 | 0 | 0 | 100 | 0 | 0 | 0 |
| NT2RP7007504 | 0 | 0 | 0 | 100 | 0 | 0 | 0 |
| NT2RP7007530 | 0 | 0 | 0 | 10.568 | 0 | 0 | 2.723 |
| NT2RP7007537 | 4.456 | 2.234 | 0 | 11.854 | 0 | 9.062 | 0 |
| NT2RP7007580 | 0 | 0 | 0 | 57.604 | 0 | 0 | 0 |
| NT2RP7007594 | 0 | 0 | 0 | 100 | 0 | 0 | 0 |
| NT2RP7007610 | 0 | 5.259 | 0 | 13.950 | 0 | 0 | 3.595 |
| NT2RP7007617 | 0 | 28.588 | 0 | 37.916 | 0 | 0 | 0 |
| NT2RP7007643 | 0 | 0 | 0 | 78.664 | 0 | 0 | 0 |
| NT2RP7007766 | 0 | 0 | 0 | 74.295 | 0 | 0 | 0 |
| NT2RP7007842 | 13.902 | 3.485 | 0 | 4.623 | 0 | 0 | 2.383 |
| NT2RP7007925 | 0 | 0 | 0 | 100 | 0 | 0 | 0 |
| NT2RP7007930 | 0 | 0 | 0 | 78.664 | 0 | 0 | 0 |
| NT2RP7007975 | 0 | 4.960 | 0 | 13.156 | 0 | 0 | 1.695 |
| NT2RP7008013 | 0 | 0 | 0 | 100 | 0 | 0 | 0 |
| NT2RP7008015 | 0 | 0 | 0 | 4.863 | 0 | 0 | 1.253 |
| NT2RP7008133 | 0 | 0 | 0 | 100 | 0 | 0 | 0 |
| NT2RP7008137 | 0 | 0 | 0 | 100 | 0 | 0 | 0 |
| NT2RP7008142 | 0 | 0 | 0 | 100 | 0 | 0 | 0 |
| NT2RP7008144 | 0 | 0 | 0 | 100 | 0 | 0 | 0 |
| NT2RP7008161 | 0 | 22.818 | 0 | 15.131 | 0 | 0 | 15.599 |
| NT2RP7008167 | 0 | 1.649 | 0 | 8.750 | 0 | 6.689 | 3.382 |
| NT2RP7008190 | 0 | 0 | 0 | 3.197 | 0 | 0 | 3.296 |
| NT2RP7008315 | 0 | 0 | 0 | 18.087 | 0 | 0 | 0 |
| NT2RP7008360 | 0 | 60.128 | 0 | 39.872 | 0 | 0 | 0 |
| NT2RP7008396 | 0 | 22.370 | 0 | 29.668 | 0 | 0 | 0 |
| NT2RP7008406 | 0 | 0 | 0 | 100 | 0 | 0 | 0 |
| NT2RP7008435 | 0 | 0 | 0 | 100 | 0 | 0 | 0 |
| NT2RP7008441 | 0 | 0 | 0 | 48.519 | 0 | 0 | 0 |
| NT2RP7008454 | 0 | 0 | 0 | 100 | 0 | 0 | 0 |
| NT2RP7008487 | 0 | 0 | 0 | 36.879 | 0 | 0 | 19.009 |
| NT2RP7008543 | 0 | 0 | 0 | 13.261 | 0 | 0 | 3.418 |
| NT2RP7008544 | 0 | 0 | 0 | 100 | 0 | 0 | 0 |
| NT2RP7008550 | 0 | 20.085 | 0 | 79.915 | 0 | 0 | 0 |
| NT2RP7008557 | 0 | 0 | 0 | 100 | 0 | 0 | 0 |
| NT2RP7008623 | 0 | 0 | 0 | 10.373 | 0 | 0 | 0 |
| NT2RP7008657 | 0 | 0 | 0 | 100 | 0 | 0 | 0 |
| NT2RP7008714 | 14.055 | 14.095 | 0 | 9.347 | 0 | 0 | 0 |
| NT2RP7008720 | 0 | 42.988 | 0 | 57.012 | 0 | 0 | 0 |
| NT2RP7008855 | 0 | 0 | 0 | 100 | 0 | 0 | 0 |
| NT2RP7008863 | 0 | 0 | 0 | 100 | 0 | 0 | 0 |
| NT2RP7009012 | 0 | 20.604 | 0 | 27.326 | 0 | 0 | 0 |
| NT2RP7009019 | 0 | 0 | 0 | 100 | 0 | 0 | 0 |
| NT2RP7009030 | 0 | 0 | 0 | 46.373 | 0 | 0 | 35.854 |
| NT2RP7009087 | 0 | 4.415 | 0 | 11.710 | 0 | 17.904 | 6.036 |
| NT2RP7009097 | 0 | 0 | 0 | 4.333 | 0 | 13.250 | 0 |
| NT2RP7009108 | 0 | 0 | 0 | 8.568 | 0 | 0 | 0 |
| NT2RP7009147 | 0 | 2.895 | 0 | 7.679 | 0 | 0 | 1.979 |
| NT2RP7009149 | 0 | 8.696 | 0 | 2.883 | 0 | 0 | 0 |
| NT2RP7009168 | 0 | 0 | 0 | 65.987 | 0 | 0 | 34.013 |
| NT2RP7009215 | 0 | 0 | 0 | 100 | 0 | 0 | 0 |
| NT2RP7009225 | 0 | 15.334 | 0 | 20.337 | 0 | 0 | 3.494 |
| NT2RP7009236 | 0 | 0 | 0 | 100 | 0 | 0 | 0 |
| NT2RP7009253 | 0 | 0 | 0 | 100 | 0 | 0 | 0 |
| NT2RP7009259 | 2.036 | 6.126 | 0 | 9.479 | 0 | 4.141 | 2.094 |
| NT2RP7009267 | 0 | 0 | 0 | 100 | 0 | 0 | 0 |
| NT2RP7009322 | 0 | 0 | 0 | 26.050 | 0 | 0 | 0 |
| NT2RP7009363 | 0 | 0 | 0 | 100 | 0 | 0 | 0 |
| NT2RP7009370 | 0 | 0 | 0 | 78.664 | 0 | 0 | 0 |
| NT2RP7009373 | 14.559 | 0 | 0 | 19.364 | 0 | 0 | 9.981 |
| NT2RP7009394 | 0 | 0 | 0 | 5.829 | 0 | 0 | 6.009 |
| NT2RP7009397 | 0 | 0 | 0 | 100 | 0 | 0 | 0 |
| NT2RP7009429 | 0 | 0 | 0 | 100 | 0 | 0 | 0 |
| NT2RP7009439 | 0 | 0 | 0 | 100 | 0 | 0 | 0 |
| NT2RP7009466 | 0 | 0 | 0 | 74.295 | 0 | 0 | 0 |
| NT2RP7009481 | 0 | 0 | 0 | 29.611 | 0 | 0 | 0 |
| NT2RP7009482 | 0 | 5.053 | 0 | 5.585 | 0 | 0 | 6.333 |
| NT2RP7009498 | 0 | 1.831 | 0 | 2.429 | 0 | 0 | 0 |
| NT2RP7009502 | 0 | 0 | 0 | 100 | 0 | 0 | 0 |
| NT2RP7009507 | 0 | 0 | 0 | 70.676 | 0 | 0 | 0 |
| NT2RP7009577 | 0 | 0 | 0 | 56.608 | 0 | 0 | 0 |
| NT2RP7009743 | 0 | 0 | 0 | 100 | 0 | 0 | 0 |
| NT2RP7009867 | 0 | 0 | 0 | 100 | 0 | 0 | 0 |
| NT2RP7010109 | 0 | 0 | 0 | 75.744 | 0 | 0 | 0 |
| NT2RP7010128 | 0 | 0 | 0 | 100 | 0 | 0 | 0 |
| NT2RP7010235 | 0 | 15.860 | 0 | 84.140 | 0 | 0 | 0 |
| NT2RP7010275 | 0 | 0 | 0 | 100 | 0 | 0 | 0 |
| NT2RP7010521 | 0 | 0 | 0 | 100 | 0 | 0 | 0 |
| NT2RP7010599 | 0 | 0 | 0 | 77.250 | 0 | 0 | 0 |
| NT2RP7010612 | 0 | 0 | 0 | 52.133 | 0 | 0 | 0 |
| NT2RP7010817 | 0 | 0 | 0 | 100 | 0 | 0 | 0 |
| NT2RP7011086 | 0 | 0 | 0 | 100 | 0 | 0 | 0 |
| NT2RP7011132 | 0 | 0 | 0 | 100 | 0 | 0 | 0 |
| NT2RP7011268 | 0 | 0 | 0 | 100 | 0 | 0 | 0 |
| NT2RP7011318 | 0 | 0 | 0 | 56.608 | 0 | 0 | 0 |
| NT2RP7011452 | 0 | 0 | 0 | 100 | 0 | 0 | 0 |
| NT2RP7011570 | 0 | 0 | 0 | 100 | 0 | 0 | 0 |
| NT2RP7011721 | 0 | 0 | 0 | 100 | 0 | 0 | 0 |
| NT2RP7011909 | 0 | 0 | 0 | 0.683 | 93.459 | 0 | 0 |
| NT2RP7012291 | 0 | 0 | 0 | 100 | 0 | 0 | 0 |
| NT2RP7012516 | 0 | 0 | 0 | 100 | 0 | 0 | 0 |
| NT2RP7012776 | 0 | 0 | 0 | 20.256 | 0 | 0 | 0 |
| NT2RP7013002 | 0 | 42.988 | 0 | 57.012 | 0 | 0 | 0 |
| NT2RP7013374 | 0 | 0 | 0 | 100 | 0 | 0 | 0 |
| NT2RP7013499 | 0 | 0 | 0 | 100 | 0 | 0 | 0 |
| NT2RP7013573 | 0 | 13.095 | 0 | 17.367 | 0 | 0 | 8.952 |
| NT2RP7013729 | 0 | 0 | 0 | 100 | 0 | 0 | 0 |
| NT2RP7013764 | 0 | 0 | 0 | 54.725 | 0 | 0 | 0 |
| NT2RP7013795 | 0 | 0 | 0 | 10.432 | 0 | 0 | 0 |
| NT2RP7013999 | 0 | 0 | 0 | 100 | 0 | 0 | 0 |
| NT2RP7014005 | 0 | 21.145 | 0 | 14.022 | 0 | 0 | 0 |
| NT2RP7014178 | 0 | 0 | 0 | 100 | 0 | 0 | 0 |
| NT2RP7014348 | 0 | 0 | 0 | 100 | 0 | 0 | 0 |
| NT2RP7014420 | 0 | 0 | 0 | 100 | 0 | 0 | 0 |
| NT2RP7014583 | 0 | 0 | 0 | 39.434 | 0 | 0 | 0 |
| NT2RP7014721 | 0 | 0 | 0 | 100 | 0 | 0 | 0 |
| NT2RP7014743 | 0 | 0 | 0 | 100 | 0 | 0 | 0 |
| NT2RP7014778 | 0 | 0 | 0 | 100 | 0 | 0 | 0 |
| NT2RP7014906 | 0 | 0 | 0 | 100 | 0 | 0 | 0 |
| NT2RP7014910 | 0 | 6.518 | 0 | 5.763 | 0 | 0 | 2.971 |
| NT2RP7015080 | 0 | 0 | 0 | 100 | 0 | 0 | 0 |
| NT2RP7015431 | 0 | 0 | 0 | 100 | 0 | 0 | 0 |
| NT2RP7015503 | 0 | 0 | 0 | 7.632 | 0 | 0 | 0 |
| NT2RP7015512 | 0 | 0 | 0 | 31.156 | 0 | 0 | 0 |
| NT2RP7015676 | 0 | 0 | 0 | 100 | 0 | 0 | 0 |
| NT2RP7015789 | 0 | 0 | 0 | 100 | 0 | 0 | 0 |
| NT2RP7015996 | 0 | 0 | 0 | 100 | 0 | 0 | 0 |
| NT2RP7016508 | 0 | 0 | 0 | 100 | 0 | 0 | 0 |
| NT2RP7016574 | 0 | 0 | 0 | 53.243 | 0 | 0 | 0 |
| NT2RP7016622 | 0 | 0 | 0 | 100 | 0 | 0 | 0 |
| NT2RP7016911 | 0 | 0 | 0 | 100 | 0 | 0 | 0 |
| NT2RP7017139 | 0 | 0 | 0 | 100 | 0 | 0 | 0 |
| NT2RP7017284 | 0 | 0 | 0 | 100 | 0 | 0 | 0 |
| NT2RP7017365 | 0 | 0 | 0 | 100 | 0 | 0 | 0 |
| NT2RP7017474 | 0 | 0 | 0 | 45.366 | 0 | 0 | 0 |
| NT2RP7017546 | 0 | 0 | 0 | 100 | 0 | 0 | 0 |
| NT2RP7017567 | 0 | 0 | 0 | 100 | 0 | 0 | 0 |
| NT2RP7017795 | 0 | 0 | 0 | 100 | 0 | 0 | 0 |
| NT2RP7017971 | 0 | 0 | 0 | 100 | 0 | 0 | 0 |
| NT2RP7018032 | 0 | 0 | 0 | 100 | 0 | 0 | 0 |
| NT2RP7018126 | 0 | 0 | 0 | 40.584 | 0 | 0 | 0 |
| NT2RP7018197 | 0 | 0 | 0 | 100 | 0 | 0 | 0 |
| NT2RP7018206 | 0 | 0 | 0 | 100 | 0 | 0 | 0 |
| NT2RP7018340 | 0 | 0 | 0 | 100 | 0 | 0 | 0 |
| NT2RP7018586 | 0 | 0 | 0 | 100 | 0 | 0 | 0 |
| NT2RP7018802 | 0 | 0 | 0 | 100 | 0 | 0 | 0 |
| NT2RP7018871 | 0 | 0 | 0 | 100 | 0 | 0 | 0 |
| NT2RP7019064 | 0 | 23.338 | 0 | 30.952 | 0 | 0 | 0 |
| NT2RP7019135 | 0 | 0 | 0 | 70.676 | 0 | 0 | 0 |
| NT2RP7019273 | 0 | 0 | 0 | 100 | 0 | 0 | 0 |
| NT2RP7019367 | 0 | 0 | 0 | 100 | 0 | 0 | 0 |
| NT2RP7019401 | 0 | 0 | 0 | 25.024 | 0 | 0 | 0 |
| NT2RP7019445 | 0 | 0 | 0 | 100 | 0 | 0 | 0 |
| NT2RP7019543 | 0 | 0 | 0 | 50.987 | 0 | 0 | 0 |
| NT2RP7019682 | 0 | 0 | 0 | 100 | 0 | 0 | 0 |
| NT2RP7019835 | 0 | 0 | 0 | 2.512 | 0 | 0 | 0 |
| NT2RP7020112 | 0 | 0 | 0 | 40.874 | 0 | 0 | 0 |
| NT2RP7020123 | 0 | 0 | 0 | 10.250 | 0 | 0 | 0 |
| NT2RP7020343 | 0 | 0 | 0 | 100 | 0 | 0 | 0 |
| NT2RP7020379 | 0 | 0 | 0 | 100 | 0 | 0 | 0 |
| NT2RP8000137 | 0 | 0 | 0 | 100 | 0 | 0 | 0 |
| NT2RP8000296 | 0 | 0 | 0 | 100 | 0 | 0 | 0 |
| NT2RP8000435 | 0 | 24.247 | 0 | 32.158 | 0 | 0 | 0 |
| NT2RP8000483 | 0 | 0 | 0 | 100 | 0 | 0 | 0 |
| NT2RP8000521 | 0 | 0 | 0 | 62.933 | 0 | 0 | 0 |
| NT2RP8000633 | 0 | 0 | 0 | 100 | 0 | 0 | 0 |
| NT2RP8001363 | 0 | 0 | 0 | 100 | 0 | 0 | 0 |
| NT2RP8001407 | 0 | 0 | 0 | 100 | 0 | 0 | 0 |
| NT2RP8001584 | 0 | 0 | 0 | 100 | 0 | 0 | 0 |
| NT2RP8001604 | 0 | 25.218 | 0 | 33.445 | 0 | 0 | 0 |
| NT2RP8001605 | 0 | 0 | 0 | 70.676 | 0 | 0 | 0 |
| NT2RP8003490 | 0 | 0 | 0 | 100 | 0 | 0 | 0 |
| NT2RP8003657 | 0 | 0 | 0 | 100 | 0 | 0 | 0 |
| NT2RP8003787 | 0 | 0 | 0 | 100 | 0 | 0 | 0 |
| NT2RP8004306 | 0 | 0 | 0 | 100 | 0 | 0 | 0 |
| NT2RP8005546 | 0 | 0 | 0 | 59.103 | 0 | 0 | 0 |
| NT2RP8006452 | 0 | 0 | 0 | 100 | 0 | 0 | 0 |
| NT2RP8006521 | 0 | 0 | 0 | 100 | 0 | 0 | 0 |
| NT2RP8007416 | 0 | 0 | 0 | 100 | 0 | 0 | 0 |
| NT2RP8007503 | 0 | 0 | 0 | 100 | 0 | 0 | 0 |
| NT2RP8007715 | 0 | 0 | 0 | 30.282 | 0 | 0 | 0 |
| NT2RP8007920 | 0 | 0 | 0 | 9.535 | 0 | 0 | 31.946 |
| NT2RP8008057 | 0 | 0 | 0 | 68.270 | 0 | 0 | 0 |
| NT2RP8009248 | 0 | 0 | 0 | 100 | 0 | 0 | 0 |
| NTONG1000006 | 0 | 0 | 0 | 0 | 0 | 100 | 0 |
| NTONG1000033 | 0 | 6.679 | 0 | 0 | 0 | 9.030 | 0 |
| NTONG1000047 | 0 | 0 | 0 | 0 | 0 | 44.281 | 0 |
| NTONG1000052 | 0 | 0 | 0 | 0 | 0 | 52.799 | 0 |
| NTONG1000075 | 0 | 0 | 0 | 0 | 0 | 49.103 | 0 |
| NTONG1000087 | 0 | 0 | 0 | 0 | 0 | 100 | 0 |
| NTONG1000098 | 0 | 2.316 | 0 | 3.071 | 0 | 4.695 | 4.749 |
| NTONG1000123 | 0 | 0 | 0 | 0 | 0 | 68.634 | 0 |
| NTONG1000130 | 0 | 0 | 0 | 0 | 0 | 86.807 | 0 |
| NTONG1000161 | 0 | 0 | 0 | 0 | 0 | 100 | 0 |
| NTONG1000172 | 0 | 0 | 0 | 0 | 0 | 100 | 0 |
| NTONG1000182 | 0 | 2.250 | 0 | 0 | 0 | 27.372 | 0 |
| NTONG1000213 | 0 | 0 | 0 | 0 | 0 | 100 | 0 |
| NTONG1000214 | 0 | 0 | 0 | 8.919 | 0 | 81.823 | 0 |
| NTONG1000246 | 0 | 0 | 0 | 0 | 0 | 11.524 | 0 |
| NTONG1000247 | 0 | 0 | 0 | 0 | 0 | 100 | 0 |
| NTONG1000257 | 0 | 0 | 0 | 0 | 0 | 8.111 | 0 |
| NTONG1000264 | 3.532 | 1.771 | 0 | 2.349 | 0 | 7.183 | 15.741 |
| NTONG1000040 | 0 | 0 | 0 | 0 | 0 | 100 | 0 |
| NTONG1000107 | 0 | 0 | 0 | 0 | 0 | 78.591 | 0 |
| NTONG1000231 | 0 | 0 | 0 | 0 | 0 | 100 | 0 |
| NTONG1000265 | 0 | 0 | 0 | 2.055 | 0 | 6.283 | 3.177 |
| NTONG1000334 | 0 | 0 | 0 | 0 | 0 | 15.068 | 7.620 |
| NTONG1000363 | 0 | 0 | 0 | 0 | 0 | 100 | 0 |
| NTONG1000413 | 0 | 0 | 0 | 0 | 0 | 79.538 | 13.407 |
| NTONG1000492 | 0 | 0 | 0 | 0 | 0 | 100 | 0 |
| NTONG1000499 | 0 | 0 | 0 | 0 | 0 | 68.022 | 0 |
| NTONG1000531 | 0 | 0 | 0 | 0 | 0 | 100 | 0 |
| NTONG1000583 | 0 | 0 | 0 | 0 | 0 | 100 | 0 |
| NTONG1000800 | 0 | 0 | 0 | 0 | 0 | 15.610 | 0 |
| NTONG1000858 | 0 | 0 | 0 | 0 | 0 | 21.285 | 0 |
| NTONG1000876 | 0 | 0 | 0 | 0 | 0 | 10.262 | 1.730 |
| NTONG1000878 | 0 | 2.146 | 0 | 0 | 0 | 8.703 | 0 |
| NTONG1000966 | 0 | 0 | 0 | 0 | 0 | 100 | 0 |
| NTONG1000977 | 0 | 0 | 0 | 0 | 0 | 7.425 | 2.442 |
| NTONG1000985 | 0 | 0 | 53.648 | 0 | 0 | 13.740 | 2.316 |
| NTONG1001014 | 0 | 0 | 0 | 0 | 0 | 100 | 0 |
| NTONG1001079 | 0 | 0 | 0 | 0 | 0 | 85.575 | 14.425 |
| NTONG1001137 | 0 | 0 | 0 | 0 | 0 | 8.434 | 0 |
| NTONG2001157 | 0 | 0 | 0 | 0 | 0 | 100 | 0 |
| NTONG2001173 | 0 | 0 | 0 | 0 | 0 | 100 | 0 |
| NTONG2001220 | 0 | 0 | 0 | 0 | 0 | 42.409 | 0 |
| NTONG2001222 | 0 | 0 | 0 | 0 | 0 | 30.557 | 0 |
| NTONG2001362 | 0 | 0 | 0 | 0 | 0 | 25.727 | 0 |
| NTONG2001428 | 0 | 0 | 0 | 0 | 0 | 77.689 | 0 |
| NTONG2001532 | 0 | 0 | 0 | 0 | 0 | 100 | 0 |
| NTONG2001550 | 0 | 0 | 0 | 0 | 0 | 25.651 | 0 |
| NTONG2001567 | 0 | 0 | 0 | 0 | 0 | 9.039 | 0 |
| NTONG2001587 | 0 | 0 | 0 | 0 | 0 | 17.552 | 0 |
| NTONG2001612 | 0 | 2.040 | 0 | 2.705 | 0 | 8.273 | 4.184 |
| NTONG2001619 | 0 | 0 | 0 | 0 | 0 | 100 | 0 |
| NTONG2001642 | 0 | 0 | 0 | 0 | 0 | 100 | 0 |
| NTONG2001657 | 0 | 0 | 0 | 0 | 0 | 48.867 | 0 |
| NTONG2001676 | 0 | 0 | 0 | 17.193 | 0 | 52.573 | 0 |
| NTONG2001762 | 0 | 0 | 0 | 0 | 0 | 13.290 | 11.201 |
| NTONG2002278 | 0 | 0 | 0 | 0 | 0 | 100 | 0 |
| NTONG2002582 | 0 | 0 | 0 | 0 | 0 | 27.719 | 0 |
| NTONG2002807 | 0 | 0 | 0 | 0 | 0 | 86.921 | 0 |
| NTONG2002948 | 0 | 0 | 0 | 0 | 0 | 32.729 | 0 |
| NTONG2002970 | 0 | 0 | 0 | 0 | 0 | 100 | 0 |
| NTONG2002985 | 0 | 0 | 0 | 0 | 0 | 88.053 | 0 |
| NTONG2003158 | 0 | 0 | 0 | 0 | 0 | 100 | 0 |
| NTONG2003210 | 0 | 0 | 0 | 0 | 0 | 100 | 0 |
| NTONG2003316 | 0 | 0 | 0 | 0 | 0 | 100 | 0 |
| NTONG2003409 | 0 | 0 | 0 | 0 | 0 | 100 | 0 |
| NTONG2003454 | 0 | 0 | 0 | 0 | 0 | 21.971 | 0 |
| NTONG2003515 | 0 | 0 | 0 | 0 | 0 | 72.123 | 0 |
| NTONG2003805 | 0 | 0 | 0 | 0 | 0 | 100 | 0 |
| NTONG2003839 | 0 | 9.529 | 0 | 0 | 0 | 19.323 | 0 |
| NTONG2003852 | 0 | 0 | 0 | 0 | 0 | 49.507 | 0 |
| NTONG2003897 | 0 | 0 | 0 | 0 | 0 | 100 | 0 |
| NTONG2003928 | 0 | 0 | 0 | 0 | 0 | 42.932 | 0 |
| NTONG2004095 | 0 | 0 | 0 | 0 | 0 | 67.666 | 0 |
| NTONG2004308 | 0 | 0 | 0 | 0 | 0 | 86.807 | 0 |
| NTONG2004521 | 0 | 0 | 0 | 0 | 0 | 100 | 0 |
| NTONG2004614 | 0 | 0 | 0 | 0 | 0 | 43.643 | 0 |
| NTONG2004690 | 0 | 0 | 0 | 0 | 0 | 100 | 0 |
| NTONG2004806 | 0 | 0 | 0 | 0 | 0 | 51.123 | 0 |
| NTONG2004829 | 0 | 0 | 0 | 0 | 0 | 100 | 0 |
| NTONG2004844 | 0 | 0 | 0 | 0 | 0 | 11.944 | 0 |
| NTONG2004918 | 0 | 0 | 0 | 0 | 0 | 47.726 | 0 |
| NTONG2004991 | 0 | 0 | 0 | 0 | 0 | 100 | 0 |
| NTONG2005062 | 0 | 0 | 0 | 0 | 0 | 100 | 0 |
| NTONG2005086 | 0 | 0 | 0 | 0 | 0 | 100 | 0 |
| NTONG2005137 | 0 | 0 | 0 | 0 | 0 | 100 | 0 |
| NTONG2005153 | 0 | 0 | 0 | 0 | 0 | 58.314 | 0 |
| NTONG2005265 | 0 | 0 | 0 | 0 | 0 | 100 | 0 |
| NTONG2005277 | 0 | 0 | 0 | 0 | 0 | 100 | 0 |
| NTONG2005363 | 0 | 0 | 0 | 0 | 0 | 86.071 | 0 |
| NTONG2005373 | 0 | 0 | 0 | 0 | 0 | 86.864 | 0 |
| NTONG2005391 | 0 | 4.236 | 0 | 11.237 | 0 | 17.181 | 2.896 |
| NTONG2005480 | 0 | 0 | 0 | 0 | 0 | 100 | 0 |
| NTONG2005497 | 0 | 0 | 0 | 0 | 90.363 | 2.020 | 0 |
| NTONG2005520 | 0 | 6.048 | 0 | 0 | 0 | 4.906 | 0 |
| NTONG2005577 | 0 | 0 | 0 | 0 | 0 | 100 | 0 |
| NTONG2005657 | 0 | 0 | 0 | 0 | 0 | 100 | 0 |
| NTONG2005801 | 0 | 0 | 0 | 0 | 0 | 26.260 | 0 |
| NTONG2005822 | 0 | 0 | 0 | 0 | 0 | 67.622 | 0 |
| NTONG2005897 | 0 | 0 | 0 | 0 | 0 | 50.588 | 0 |
| NTONG2005969 | 0 | 0 | 0 | 15.484 | 0 | 23.675 | 0 |
| NTONG2006099 | 0 | 0 | 0 | 0 | 0 | 100 | 0 |
| NTONG2006187 | 0 | 0 | 0 | 0 | 0 | 100 | 0 |
| NTONG2006301 | 0 | 0 | 0 | 0 | 0 | 40.505 | 0 |
| NTONG2006324 | 0 | 0 | 0 | 0 | 0 | 100 | 0 |
| NTONG2006354 | 0 | 0 | 0 | 0 | 0 | 100 | 0 |
| NTONG2006440 | 0 | 0 | 0 | 0 | 0 | 100 | 0 |
| NTONG2006484 | 0 | 0 | 0 | 0 | 0 | 31.857 | 0 |
| NTONG2006501 | 0 | 0 | 0 | 0 | 0 | 100 | 0 |
| NTONG2006646 | 0 | 0 | 0 | 0 | 0 | 100 | 0 |
| NTONG2006709 | 0 | 16.469 | 0 | 0 | 0 | 66.789 | 0 |
| NTONG2006783 | 0 | 0 | 0 | 0 | 0 | 20.865 | 0 |
| NTONG2007020 | 0 | 0 | 0 | 0 | 0 | 100 | 0 |
| NTONG2007028 | 0 | 0 | 0 | 0 | 0 | 88.053 | 0 |
| NTONG2007034 | 0 | 0 | 0 | 0 | 0 | 52.247 | 0 |
| NTONG2007249 | 0 | 0 | 0 | 0 | 0 | 100 | 0 |
| NTONG2007517 | 0 | 0 | 0 | 0 | 0 | 100 | 0 |
| NTONG2007522 | 0 | 0 | 0 | 0 | 0 | 100 | 0 |
| NTONG2007658 | 0 | 0 | 0 | 0 | 0 | 14.749 | 0 |
| NTONG2007693 | 0 | 0 | 0 | 0 | 0 | 51.858 | 0 |
| NTONG2007756 | 0 | 0 | 0 | 0 | 0 | 49.744 | 0 |
| NTONG2008088 | 0 | 0 | 0 | 0 | 0 | 75.309 | 0 |
| NTONG2008093 | 0 | 0 | 0 | 0 | 0 | 100 | 0 |
| NTONG2008143 | 0 | 0 | 0 | 0 | 0 | 80.075 | 0 |
| NTONG2008365 | 0 | 0 | 0 | 0 | 0 | 100 | 0 |
| NTONG2008483 | 0 | 4.356 | 0 | 0 | 0 | 17.664 | 1.985 |
| NTONG2008522 | 0 | 0 | 0 | 0 | 0 | 57.763 | 0 |
| NTONG2008672 | 0 | 0 | 0 | 0 | 0 | 100 | 0 |
| NTONG2008862 | 0 | 0 | 0 | 0 | 0 | 100 | 0 |
| NTONG2008939 | 0 | 0 | 0 | 0 | 0 | 100 | 0 |
| NTONG2008944 | 0 | 0 | 0 | 14.075 | 0 | 21.519 | 3.627 |
| NTONG2009060 | 0 | 0 | 0 | 0 | 0 | 20.536 | 0 |
| NTONG2009068 | 0 | 0 | 0 | 0 | 0 | 100 | 0 |
| NTONG2009229 | 0 | 0 | 0 | 0 | 0 | 100 | 0 |
| NTONG2009233 | 0 | 0 | 0 | 0 | 0 | 100 | 0 |
| NTONG2009468 | 0 | 0 | 0 | 0 | 0 | 69.996 | 0 |
| NTONG2009576 | 0 | 0 | 0 | 0 | 0 | 52.366 | 0 |
| OCBBF1000016 | 0 | 0 | 0 | 0 | 0 | 0 | 100 |
| OCBBF1000030 | 0 | 0 | 0 | 0 | 0 | 0 | 54.907 |
| OCBBF1000042 | 0 | 0 | 0 | 0 | 0 | 0 | 100 |
| OCBBF1000049 | 0 | 9.030 | 0 | 0 | 0 | 0 | 49.386 |
| OCBBF1000054 | 0 | 0 | 0 | 0 | 0 | 0 | 100 |
| OCBBF1000067 | 0 | 0 | 0 | 0 | 0 | 0 | 22.706 |
| OCBBF1000080 | 0 | 0 | 0 | 0 | 0 | 0 | 23.753 |
| OCBBF1000085 | 0 | 0 | 0 | 0 | 0 | 0 | 100 |
| OCBBF1000086 | 0 | 0 | 0 | 1.845 | 0 | 0 | 1.902 |
| OCBBF1000091 | 0 | 0 | 0 | 0 | 0 | 0 | 100 |
| OCBBF1000104 | 0 | 0 | 0 | 24.822 | 0 | 0 | 25.588 |
| OCBBF1000114 | 0 | 0 | 0 | 0 | 0 | 0 | 3.167 |
| OCBBF1000118 | 0 | 0 | 0 | 0 | 0 | 0 | 100 |
| OCBBF1000119 | 0 | 0 | 0 | 0 | 0 | 0 | 100 |
| OCBBF1000122 | 0 | 0 | 0 | 0 | 0 | 0 | 100 |
| OCBBF1000130 | 0 | 0 | 0 | 0 | 0 | 0 | 100 |
| OCBBF1000138 | 0 | 0 | 0 | 0 | 0 | 0 | 100 |
| OCBBF1000145 | 0 | 0 | 0 | 0 | 0 | 0 | 52.835 |
| OCBBF1000146 | 6.252 | 1.568 | 0 | 6.237 | 0 | 0 | 10.716 |
| OCBBF1000153 | 0 | 0 | 0 | 0 | 0 | 0 | 84.325 |
| OCBBF1000175 | 0 | 13.090 | 0 | 0 | 0 | 0 | 17.896 |
| OCBBF1000185 | 0 | 7.650 | 0 | 20.293 | 0 | 0 | 31.379 |
| OCBBF1000188 | 3.774 | 1.892 | 0 | 0 | 0 | 0 | 3.881 |
| OCBBF1000192 | 0 | 0 | 0 | 0 | 0 | 0 | 100 |
| OCBBF1000254 | 0 | 0 | 0 | 0 | 0 | 0 | 55.216 |
| OCBBF1000315 | 0 | 0 | 0 | 0 | 0 | 0 | 21.738 |
| OCBBF2000013 | 0 | 14.144 | 0 | 4.690 | 0 | 0 | 12.086 |
| OCBBF2000015 | 0 | 2.875 | 0 | 11.441 | 0 | 0 | 13.760 |
| OCBBF2000126 | 0 | 0 | 0 | 9.367 | 0 | 0 | 4.828 |
| OCBBF2000178 | 11.854 | 1.981 | 0 | 2.628 | 0 | 0 | 31.152 |
| OCBBF2000231 | 0 | 0 | 0 | 9.441 | 0 | 0 | 29.197 |
| OCBBF2000277 | 0 | 26.701 | 0 | 0 | 0 | 0 | 18.253 |
| OCBBF2000287 | 0 | 0 | 0 | 0 | 0 | 0 | 26.038 |
| OCBBF2000323 | 0 | 0 | 0 | 0 | 0 | 0 | 18.850 |
| OCBBF2000452 | 0 | 0 | 0 | 0 | 0 | 0 | 100 |
| OCBBF2000467 | 0 | 0 | 0 | 0 | 0 | 14.865 | 22.551 |
| OCBBF2000522 | 0 | 4.595 | 0 | 0 | 0 | 18.636 | 3.141 |
| OCBBF2000677 | 0 | 0 | 0 | 0 | 0 | 0 | 20.236 |
| OCBBF2000703 | 0 | 0 | 0 | 0 | 0 | 0 | 100 |
| OCBBF2000712 | 0 | 0 | 0 | 0 | 0 | 0 | 2.348 |
| OCBBF2000719 | 0 | 0 | 0 | 0 | 0 | 0 | 100 |
| OCBBF2000824 | 0 | 0 | 0 | 0 | 0 | 0 | 14.930 |
| OCBBF2000831 | 0 | 0 | 0 | 0 | 0 | 0 | 47.849 |
| OCBBF2000846 | 0 | 0 | 0 | 0 | 0 | 0 | 0.909 |
| OCBBF2000904 | 29.296 | 0 | 0 | 9.741 | 0 | 0 | 10.042 |
| OCBBF2000982 | 0 | 0 | 25.094 | 0 | 0 | 0 | 6.500 |
| OCBBF2000986 | 0 | 3.502 | 0 | 2.323 | 0 | 0 | 8.380 |
| OCBBF2000998 | 0 | 0 | 0 | 0 | 0 | 0 | 100 |
| OCBBF2001075 | 0 | 0 | 0 | 0 | 0 | 0 | 100 |
| OCBBF2001101 | 0 | 0 | 0 | 0 | 0 | 0 | 100 |
| OCBBF2001124 | 0 | 0 | 0 | 0 | 0 | 0 | 100 |
| OCBBF2001140 | 0 | 0 | 0 | 0 | 0 | 0 | 7.024 |
| OCBBF2001166 | 0 | 0 | 0 | 0 | 0 | 0 | 13.617 |
| OCBBF2001176 | 0 | 0 | 0 | 0 | 0 | 0 | 100 |
| OCBBF2001186 | 0 | 0 | 0 | 0 | 0 | 0 | 43.982 |
| OCBBF2001196 | 0 | 0 | 0 | 0 | 0 | 0 | 19.673 |
| OCBBF2001210 | 0 | 0 | 0 | 0 | 0 | 0 | 27.026 |
| OCBBF2001252 | 0 | 0 | 0 | 0 | 0 | 0 | 40.027 |
| OCBBF2001307 | 0 | 0 | 0 | 0 | 0 | 0 | 2.066 |
| OCBBF2001323 | 0 | 0 | 0 | 20.724 | 0 | 0 | 21.364 |
| OCBBF2001389 | 0 | 0 | 0 | 0 | 0 | 0 | 100 |
| OCBBF2001402 | 0 | 0 | 0 | 0 | 0 | 0 | 40.207 |
| OCBBF2001408 | 0 | 0 | 0 | 0 | 0 | 0 | 47.976 |
| OCBBF2001416 | 0 | 0 | 0 | 0 | 0 | 0 | 51.849 |
| OCBBF2001473 | 0 | 0 | 0 | 0 | 0 | 0 | 100 |
| OCBBF2001492 | 2.487 | 0 | 0 | 3.307 | 0 | 0 | 8.524 |
| OCBBF2001494 | 0 | 0 | 0 | 0 | 0 | 0 | 26.272 |
| OCBBF2001527 | 0 | 0 | 0 | 0 | 0 | 0 | 100 |
| OCBBF2001528 | 0 | 0 | 0 | 0 | 0 | 0 | 41.188 |
| OCBBF2001586 | 12.994 | 0 | 0 | 8.642 | 0 | 26.425 | 4.454 |
| OCBBF2001639 | 0 | 0 | 0 | 0 | 0 | 0 | 5.842 |
| OCBBF2001681 | 0 | 0 | 0 | 0 | 0 | 0 | 100 |
| OCBBF2001687 | 0 | 0 | 0 | 0 | 0 | 0 | 7.169 |
| OCBBF2001706 | 0 | 0 | 0 | 0 | 0 | 0 | 59.836 |
| OCBBF2001749 | 0 | 0 | 0 | 0 | 0 | 0 | 40.207 |
| OCBBF2001794 | 0 | 0 | 0 | 0 | 0 | 34.843 | 11.746 |
| OCBBF2001910 | 0 | 0 | 0 | 0 | 0 | 0 | 100 |
| OCBBF2001931 | 0 | 0 | 0 | 0 | 0 | 0 | 20.802 |
| OCBBF2001961 | 0 | 0 | 0 | 0 | 0 | 0 | 51.019 |
| OCBBF2001983 | 0 | 0 | 0 | 0 | 0 | 0 | 8.974 |
| OCBBF2002015 | 0 | 0 | 0 | 0 | 0 | 0 | 17.182 |
| OCBBF2002083 | 0 | 0 | 0 | 0 | 0 | 0 | 27.302 |
| OCBBF2002086 | 0 | 5.855 | 0 | 7.765 | 0 | 0 | 4.002 |
| OCBBF2002124 | 0 | 0 | 0 | 0 | 0 | 0 | 100 |
| OCBBF2002161 | 0 | 0 | 0 | 0 | 0 | 0 | 100 |
| OCBBF2002290 | 0 | 0 | 0 | 0 | 0 | 0 | 12.529 |
| OCBBF2002357 | 0 | 0 | 0 | 0 | 0 | 0 | 100 |
| OCBBF2002376 | 0 | 0 | 0 | 0 | 0 | 0 | 18.916 |
| OCBBF2002615 | 0 | 0 | 0 | 0 | 0 | 0 | 100 |
| OCBBF2002626 | 3.060 | 1.535 | 0 | 0 | 0 | 0 | 4.196 |
| OCBBF2002656 | 0 | 0 | 0 | 0 | 0 | 0 | 6.165 |
| OCBBF2002663 | 0 | 0 | 0 | 0 | 0 | 0 | 40.207 |
| OCBBF2002805 | 0 | 0 | 0 | 0 | 0 | 0 | 100 |
| OCBBF2002865 | 0 | 0 | 0 | 0 | 0 | 0 | 65.522 |
| OCBBF2002920 | 0 | 0 | 0 | 0 | 0 | 0 | 100 |
| OCBBF2002980 | 0 | 0 | 0 | 0 | 0 | 0 | 54.907 |
| OCBBF2003028 | 0 | 0 | 0 | 0 | 0 | 0 | 100 |
| OCBBF2003052 | 0 | 0 | 0 | 0 | 0 | 0 | 14.156 |
| OCBBF2003091 | 0 | 0 | 0 | 0 | 0 | 0 | 100 |
| OCBBF2003246 | 0 | 0 | 0 | 0 | 0 | 0 | 24.315 |
| OCBBF2003327 | 0 | 0 | 0 | 0 | 0 | 0 | 100 |
| OCBBF2003518 | 0 | 1.873 | 0 | 0 | 0 | 0 | 1.281 |
| OCBBF2003543 | 0 | 0 | 0 | 0 | 0 | 0 | 59.836 |
| OCBBF2003593 | 0 | 0 | 0 | 0 | 0 | 0 | 55.403 |
| OCBBF2003744 | 0 | 0 | 0 | 0 | 0 | 0 | 52.585 |
| OCBBF2003819 | 0 | 0 | 0 | 0 | 0 | 0 | 26.175 |
| OCBBF2003925 | 0 | 0 | 0 | 4.016 | 0 | 0 | 1.035 |
| OCBBF2004038 | 0 | 0 | 0 | 0 | 0 | 0 | 33.259 |
| OCBBF2004104 | 0 | 0 | 0 | 0 | 0 | 0 | 22.118 |
| OCBBF2004147 | 0 | 0 | 0 | 0 | 0 | 0 | 100 |
| OCBBF2004168 | 0 | 0 | 0 | 0 | 0 | 0 | 100 |
| OCBBF2004235 | 0 | 0 | 0 | 0 | 0 | 0 | 14.817 |
| OCBBF2004259 | 0 | 0 | 0 | 0 | 0 | 0 | 52.835 |
| OCBBF2004273 | 0 | 4.887 | 0 | 0 | 0 | 0 | 3.341 |
| OCBBF2004385 | 0 | 0 | 0 | 0 | 0 | 0 | 100 |
| OCBBF2004418 | 0 | 0 | 0 | 0 | 0 | 0 | 17.655 |
| OCBBF2004478 | 0 | 0 | 0 | 0 | 0 | 0 | 100 |
| OCBBF2004482 | 0 | 0 | 0 | 0 | 0 | 0 | 100 |
| OCBBF2004533 | 0 | 0 | 0 | 0 | 0 | 0 | 25.025 |
| OCBBF2004567 | 0 | 0 | 0 | 0 | 0 | 0 | 100 |
| OCBBF2004612 | 0 | 0 | 0 | 0 | 0 | 0 | 100 |
| OCBBF2004647 | 0 | 0 | 0 | 0 | 0 | 0 | 100 |
| OCBBF2004669 | 0 | 0 | 0 | 0 | 0 | 0 | 54.907 |
| OCBBF2004757 | 0 | 4.504 | 0 | 0 | 0 | 0 | 12.315 |
| OCBBF2004826 | 0 | 0 | 0 | 0 | 0 | 0 | 100 |
| OCBBF2004866 | 0 | 0 | 0 | 0 | 0 | 0 | 100 |
| OCBBF2004883 | 0 | 0 | 0 | 0 | 0 | 0 | 100 |
| OCBBF2004889 | 0 | 0 | 0 | 0 | 0 | 0 | 55.403 |
| OCBBF2004930 | 0 | 0 | 0 | 0 | 0 | 0 | 12.893 |
| OCBBF2004984 | 0 | 0 | 0 | 0 | 0 | 0 | 29.587 |
| OCBBF2005066 | 0 | 0 | 0 | 0 | 0 | 0 | 100 |
| OCBBF2005077 | 0 | 0 | 0 | 0 | 0 | 0 | 100 |
| OCBBF2005161 | 0 | 0 | 0 | 0 | 0 | 0 | 54.907 |
| OCBBF2005343 | 0 | 0 | 0 | 0 | 0 | 0 | 100 |
| OCBBF2005349 | 0 | 0 | 0 | 0 | 0 | 0 | 100 |
| OCBBF2005373 | 0 | 0 | 0 | 0 | 0 | 0 | 100 |
| OCBBF2005420 | 0 | 0 | 0 | 0 | 0 | 0 | 78.844 |
| OCBBF2005428 | 0 | 0 | 0 | 0 | 0 | 0 | 4.095 |
| OCBBF2005433 | 0 | 0 | 0 | 0 | 0 | 0 | 100 |
| OCBBF2005476 | 0 | 8.495 | 0 | 0 | 0 | 0 | 5.808 |
| OCBBF2005546 | 0 | 0 | 0 | 0 | 0 | 0 | 54.907 |
| OCBBF2005843 | 0 | 0 | 0 | 0 | 0 | 0 | 100 |
| OCBBF2005901 | 0 | 0 | 0 | 0 | 0 | 0 | 100 |
| OCBBF2005956 | 0 | 10.318 | 0 | 0 | 0 | 0 | 3.527 |
| OCBBF2006005 | 0 | 0 | 0 | 0 | 0 | 0 | 5.922 |
| OCBBF2006030 | 0 | 0 | 0 | 0 | 0 | 0 | 100 |
| OCBBF2006058 | 0 | 0 | 0 | 0 | 0 | 0 | 100 |
| OCBBF2006113 | 0 | 0 | 0 | 0 | 0 | 0 | 32.696 |
| OCBBF2006148 | 0 | 0 | 0 | 0 | 0 | 0 | 16.826 |
| OCBBF2006151 | 0 | 0 | 0 | 0 | 0 | 0 | 7.162 |
| OCBBF2006154 | 0 | 0 | 0 | 0 | 0 | 0 | 100 |
| OCBBF2006172 | 0 | 0 | 0 | 0 | 0 | 0 | 13.027 |
| OCBBF2006214 | 0 | 0 | 0 | 0 | 0 | 0 | 100 |
| OCBBF2006241 | 0 | 0 | 0 | 0 | 0 | 0 | 100 |
| OCBBF2006313 | 0 | 0 | 0 | 13.761 | 0 | 0 | 7.093 |
| OCBBF2006388 | 0 | 0 | 0 | 0 | 0 | 0 | 100 |
| OCBBF2006438 | 0 | 0 | 0 | 0 | 0 | 0 | 100 |
| OCBBF2006567 | 0 | 0 | 0 | 0 | 0 | 0 | 100 |
| OCBBF2006624 | 0 | 0 | 0 | 0 | 0 | 0 | 100 |
| OCBBF2006639 | 0 | 0 | 0 | 0 | 0 | 0 | 100 |
| OCBBF2006660 | 0 | 0 | 0 | 0 | 0 | 0 | 18.751 |
| OCBBF2006764 | 0 | 0 | 0 | 0 | 0 | 0 | 19.063 |
| OCBBF2006849 | 0 | 0 | 0 | 0 | 0 | 14.895 | 7.532 |
| OCBBF2006859 | 0 | 13.615 | 0 | 0 | 0 | 0 | 9.307 |
| OCBBF2006972 | 0 | 0 | 0 | 0 | 0 | 0 | 55.403 |
| OCBBF2006987 | 0 | 0 | 0 | 62.306 | 0 | 0 | 16.058 |
| OCBBF2007028 | 0 | 2.509 | 0 | 0 | 0 | 0 | 15.437 |
| OCBBF2007039 | 0 | 0 | 0 | 0 | 0 | 0 | 100 |
| OCBBF2007051 | 0 | 0 | 0 | 0 | 0 | 0 | 54.907 |
| OCBBF2007068 | 0 | 0 | 0 | 0 | 0 | 0 | 54.907 |
| OCBBF2007114 | 0 | 0 | 0 | 0 | 0 | 0 | 39.836 |
| OCBBF2007121 | 0 | 0 | 0 | 0 | 0 | 0 | 52.585 |
| OCBBF2007184 | 0 | 0 | 0 | 0 | 0 | 0 | 100 |
| OCBBF2007194 | 0 | 0 | 0 | 0 | 0 | 0 | 100 |
| OCBBF2007196 | 0 | 0 | 0 | 0 | 0 | 0 | 66.858 |
| OCBBF2007224 | 0 | 0 | 0 | 0 | 0 | 0 | 11.730 |
| OCBBF2007238 | 0 | 0 | 0 | 0 | 0 | 0 | 100 |
| OCBBF2007354 | 0 | 3.651 | 0 | 0 | 0 | 0 | 1.248 |
| OCBBF2007414 | 0 | 0 | 0 | 0 | 0 | 0 | 59.836 |
| OCBBF2007415 | 2.902 | 0 | 0 | 1.930 | 0 | 0 | 1.990 |
| OCBBF2007428 | 0 | 0 | 0 | 0 | 0 | 0 | 100 |
| OCBBF2007478 | 0 | 0 | 0 | 0 | 0 | 0 | 100 |
| OCBBF2007485 | 0 | 0 | 0 | 0 | 0 | 0 | 100 |
| OCBBF2007520 | 0 | 0 | 0 | 0 | 0 | 0 | 100 |
| OCBBF2007555 | 0 | 0 | 0 | 0 | 0 | 0 | 100 |
| OCBBF2007610 | 0 | 0 | 0 | 0 | 0 | 0 | 100 |
| OCBBF2007622 | 0 | 0 | 0 | 0 | 0 | 0 | 4.561 |
| OCBBF2007756 | 0 | 0 | 0 | 0 | 0 | 0 | 100 |
| OCBBF2007762 | 0 | 0 | 0 | 0 | 0 | 0 | 39.066 |
| OCBBF2007829 | 0 | 1.996 | 0 | 1.323 | 0 | 4.047 | 2.728 |
| OCBBF2007892 | 0 | 0 | 0 | 0 | 0 | 0 | 5.292 |
| OCBBF2007931 | 0 | 0 | 0 | 0 | 0 | 0 | 100 |
| OCBBF2007946 | 0 | 0 | 0 | 0 | 0 | 0 | 100 |
| OCBBF2008005 | 0 | 0 | 0 | 0 | 0 | 0 | 21.697 |
| OCBBF2008041 | 0 | 0 | 0 | 5.038 | 0 | 0 | 2.597 |
| OCBBF2008116 | 0 | 0 | 0 | 0 | 0 | 0 | 100 |
| OCBBF2008138 | 0 | 0 | 0 | 0 | 0 | 0 | 100 |
| OCBBF2008144 | 0 | 0 | 0 | 0 | 0 | 0 | 7.165 |
| OCBBF2008283 | 0 | 0 | 0 | 0 | 0 | 0 | 100 |
| OCBBF2008330 | 0 | 0 | 0 | 0 | 0 | 0 | 100 |
| OCBBF2008340 | 0 | 0 | 0 | 0 | 0 | 0 | 47.948 |
| OCBBF2008366 | 0 | 0 | 0 | 0 | 0 | 0 | 15.035 |
| OCBBF2008466 | 0 | 0 | 0 | 0 | 0 | 0 | 10.627 |
| OCBBF2008483 | 0 | 0 | 0 | 0 | 0 | 0 | 10.814 |
| OCBBF2008511 | 0 | 0 | 0 | 0 | 0 | 0 | 41.146 |
| OCBBF2008520 | 0 | 0 | 0 | 0 | 0 | 0 | 100 |
| OCBBF2008569 | 0 | 0 | 0 | 0 | 0 | 0 | 26.039 |
| OCBBF2008586 | 0 | 0 | 0 | 0 | 0 | 0 | 100 |
| OCBBF2008640 | 0 | 0 | 0 | 0 | 0 | 0 | 100 |
| OCBBF2008691 | 0 | 0 | 0 | 0 | 0 | 0 | 100 |
| OCBBF2008701 | 0 | 0 | 0 | 0 | 0 | 0 | 40.389 |
| OCBBF2008724 | 0 | 0 | 0 | 0 | 0 | 0 | 100 |
| OCBBF2008760 | 0 | 0 | 0 | 0 | 0 | 0 | 41.319 |
| OCBBF2008768 | 0 | 0 | 0 | 0 | 0 | 0 | 100 |
| OCBBF2008770 | 0 | 0 | 0 | 0 | 0 | 0 | 33.223 |
| OCBBF2008775 | 0 | 0 | 0 | 0 | 0 | 0 | 55.216 |
| OCBBF2008790 | 0 | 0 | 0 | 0 | 0 | 0 | 100 |
| OCBBF2008814 | 0 | 0 | 0 | 0 | 0 | 0 | 100 |
| OCBBF2008822 | 0 | 0 | 0 | 0 | 0 | 0 | 2.961 |
| OCBBF2009095 | 0 | 0 | 0 | 0 | 0 | 0 | 8.165 |
| OCBBF2009115 | 0 | 0 | 0 | 0 | 0 | 0 | 100 |
| OCBBF2009242 | 0 | 0 | 0 | 0 | 0 | 0 | 3.517 |
| OCBBF2009301 | 0 | 15.068 | 0 | 0 | 0 | 0 | 15.451 |
| OCBBF2009352 | 0 | 0 | 0 | 0 | 0 | 0 | 6.993 |
| OCBBF2009391 | 0 | 0 | 0 | 0 | 0 | 0 | 40.207 |
| OCBBF2009424 | 0 | 0 | 0 | 0 | 0 | 0 | 9.015 |
| OCBBF2009536 | 0 | 0 | 0 | 0 | 0 | 0 | 52.835 |
| OCBBF2009571 | 0 | 0 | 0 | 0 | 0 | 0 | 100 |
| OCBBF2009583 | 0 | 0 | 0 | 0 | 0 | 0 | 100 |
| OCBBF2009603 | 0 | 0 | 0 | 0 | 0 | 0 | 41.108 |
| OCBBF2009772 | 0 | 4.280 | 0 | 5.676 | 0 | 0 | 5.851 |
| OCBBF2009788 | 0 | 0 | 0 | 0 | 0 | 0 | 100 |
| OCBBF2009836 | 0 | 0 | 0 | 0 | 0 | 0 | 10.181 |
| OCBBF2009920 | 0 | 0 | 0 | 0 | 0 | 0 | 54.907 |
| OCBBF2009926 | 0 | 0 | 0 | 0 | 0 | 0 | 100 |
| OCBBF2010040 | 0 | 0 | 0 | 0 | 0 | 0 | 100 |
| OCBBF2010140 | 0 | 0 | 0 | 0 | 0 | 0 | 40.385 |
| OCBBF2010281 | 0 | 0 | 0 | 0 | 0 | 0 | 52.585 |
| OCBBF2010313 | 0 | 0 | 0 | 0 | 0 | 0 | 34.079 |
| OCBBF2010404 | 0 | 0 | 0 | 0 | 0 | 0 | 100 |
| OCBBF2010416 | 0 | 0 | 0 | 0 | 0 | 0 | 100 |
| OCBBF2010420 | 0 | 0 | 0 | 0 | 0 | 0 | 100 |
| OCBBF2010557 | 0 | 0 | 0 | 0 | 0 | 0 | 22.763 |
| OCBBF2010604 | 0 | 0 | 0 | 0 | 0 | 0 | 100 |
| OCBBF2010709 | 0 | 0 | 0 | 0 | 0 | 0 | 100 |
| OCBBF2010792 | 0 | 0 | 0 | 0 | 0 | 0 | 100 |
| OCBBF2010819 | 0 | 0 | 0 | 30.231 | 0 | 0 | 15.583 |
| OCBBF2010830 | 0 | 4.797 | 0 | 2.121 | 0 | 0 | 2.186 |
| OCBBF2010841 | 0 | 0 | 0 | 14.981 | 0 | 0 | 7.722 |
| OCBBF2010843 | 53.980 | 0 | 0 | 0 | 0 | 0 | 18.503 |
| OCBBF2010858 | 0 | 0 | 0 | 16.054 | 0 | 0 | 33.100 |
| OCBBF2010863 | 0 | 0 | 0 | 0 | 0 | 0 | 55.216 |
| OCBBF2010871 | 0 | 0 | 0 | 0 | 0 | 0 | 34.069 |
| OCBBF2010931 | 0 | 0 | 0 | 0 | 0 | 0 | 100 |
| OCBBF2010945 | 0 | 0 | 0 | 0 | 0 | 0 | 51.019 |
| OCBBF2010978 | 0 | 0 | 0 | 0 | 0 | 0 | 100 |
| OCBBF2010989 | 0 | 0 | 0 | 0 | 0 | 0 | 100 |
| OCBBF2011021 | 0 | 0 | 0 | 0 | 0 | 0 | 10.774 |
| OCBBF2011073 | 0 | 6.201 | 0 | 0 | 0 | 0 | 21.195 |
| OCBBF2011137 | 0 | 0 | 0 | 0 | 0 | 0 | 100 |
| OCBBF2011160 | 0 | 0 | 0 | 0 | 0 | 0 | 21.686 |
| OCBBF2011177 | 0 | 0 | 0 | 0 | 0 | 0 | 100 |
| OCBBF2011228 | 0 | 0 | 0 | 0 | 0 | 0 | 53.120 |
| OCBBF2011232 | 0 | 0 | 0 | 0 | 0 | 0 | 39.814 |
| OCBBF2011283 | 0 | 0 | 0 | 0 | 0 | 0 | 80.940 |
| OCBBF2011311 | 0 | 0 | 0 | 0 | 0 | 0 | 100 |
| OCBBF2011536 | 0 | 0 | 0 | 0 | 0 | 0 | 4.957 |
| OCBBF2011625 | 0 | 0 | 0 | 0 | 0 | 0 | 33.259 |
| OCBBF2011669 | 0 | 0 | 0 | 0 | 0 | 0 | 63.640 |
| OCBBF2011685 | 0 | 0 | 0 | 0 | 0 | 0 | 100 |
| OCBBF2011706 | 0 | 0 | 0 | 0 | 0 | 0 | 100 |
| OCBBF2011722 | 0 | 0 | 0 | 0 | 0 | 0 | 100 |
| OCBBF2011759 | 0 | 1.698 | 0 | 2.252 | 0 | 0 | 9.288 |
| OCBBF2011767 | 0 | 0 | 0 | 0 | 0 | 0 | 36.946 |
| OCBBF2011855 | 0 | 0 | 0 | 0 | 0 | 0 | 100 |
| OCBBF2011872 | 0 | 0 | 0 | 0 | 0 | 0 | 100 |
| OCBBF2011887 | 0 | 8.546 | 0 | 0 | 0 | 0 | 17.527 |
| OCBBF2011897 | 0 | 0 | 0 | 0 | 0 | 0 | 21.447 |
| OCBBF2011914 | 0 | 0 | 0 | 0 | 0 | 0 | 18.119 |
| OCBBF2011960 | 0 | 0 | 0 | 0 | 0 | 0 | 100 |
| OCBBF2011981 | 0 | 0 | 0 | 0 | 0 | 0 | 100 |
| OCBBF2012001 | 0 | 0 | 0 | 0 | 0 | 0 | 30.933 |
| OCBBF2012028 | 0 | 0 | 0 | 0 | 0 | 0 | 100 |
| OCBBF2012039 | 0 | 0 | 0 | 0 | 0 | 0 | 9.527 |
| OCBBF2012095 | 0 | 0 | 0 | 0 | 0 | 0 | 19.009 |
| OCBBF2012139 | 0 | 0 | 0 | 0 | 0 | 0 | 100 |
| OCBBF2012191 | 0 | 0 | 0 | 0 | 0 | 0 | 40.207 |
| OCBBF2012262 | 0 | 0 | 0 | 34.956 | 0 | 0 | 36.036 |
| OCBBF2012320 | 0 | 0 | 0 | 0 | 0 | 0 | 100 |
| OCBBF2012436 | 0 | 0 | 0 | 0 | 0 | 0 | 59.836 |
| OCBBF2012525 | 0 | 0 | 0 | 0 | 0 | 0 | 84.002 |
| OCBBF2012553 | 0 | 2.131 | 0 | 0 | 0 | 0 | 4.371 |
| OCBBF2012678 | 0 | 12.535 | 0 | 0 | 0 | 0 | 25.707 |
| OCBBF2012704 | 0 | 37.942 | 0 | 0 | 0 | 0 | 25.938 |
| OCBBF2012714 | 0 | 0 | 0 | 0 | 0 | 0 | 7.211 |
| OCBBF2012755 | 0 | 0 | 0 | 0 | 0 | 0 | 100 |
| OCBBF2012812 | 0 | 0 | 0 | 0 | 0 | 0 | 25.584 |
| OCBBF2012821 | 0 | 0 | 0 | 0 | 0 | 0 | 3.108 |
| OCBBF2012881 | 0 | 0 | 0 | 0 | 0 | 0 | 55.216 |
| OCBBF2012908 | 11.876 | 0 | 0 | 0 | 0 | 0 | 12.212 |
| OCBBF2012936 | 0 | 0 | 0 | 0 | 0 | 0 | 55.403 |
| OCBBF2012990 | 0 | 0 | 0 | 0 | 0 | 0 | 100 |
| OCBBF2013011 | 0 | 0 | 0 | 18.197 | 0 | 0 | 9.380 |
| OCBBF2013049 | 0 | 0 | 0 | 0 | 0 | 0 | 100 |
| OCBBF2013091 | 0 | 0 | 0 | 0 | 0 | 0 | 100 |
| OCBBF2013123 | 0 | 0 | 0 | 0 | 0 | 0 | 28.345 |
| OCBBF2013127 | 0 | 0 | 0 | 0 | 0 | 0 | 100 |
| OCBBF2013149 | 0 | 0 | 0 | 0 | 0 | 0 | 1.927 |
| OCBBF2013208 | 0 | 0 | 0 | 0 | 0 | 0 | 100 |
| OCBBF2013285 | 0 | 0 | 0 | 0 | 0 | 0 | 63.640 |
| OCBBF2013319 | 0 | 0 | 0 | 0 | 0 | 0 | 100 |
| OCBBF2013324 | 0 | 0 | 0 | 0 | 0 | 0 | 46.671 |
| OCBBF2013366 | 9.783 | 4.905 | 0 | 0 | 0 | 0 | 3.353 |
| OCBBF2013481 | 0 | 0 | 0 | 0 | 0 | 0 | 6.792 |
| OCBBF2013507 | 0 | 0 | 0 | 0 | 0 | 0 | 100 |
| OCBBF2013721 | 0 | 0 | 0 | 0 | 0 | 0 | 100 |
| OCBBF2013789 | 0 | 0 | 0 | 0 | 0 | 0 | 37.496 |
| OCBBF2013843 | 0 | 0 | 0 | 0 | 0 | 3.938 | 3.983 |
| OCBBF2013883 | 74.472 | 0 | 0 | 0 | 0 | 0 | 25.528 |
| OCBBF2013926 | 0 | 0 | 0 | 0 | 0 | 0 | 77.076 |
| OCBBF2014052 | 0 | 0 | 0 | 0 | 0 | 0 | 52.585 |
| OCBBF2014064 | 0 | 0 | 0 | 0 | 0 | 0 | 3.394 |
| OCBBF2014089 | 0 | 35.863 | 0 | 0 | 0 | 0 | 24.517 |
| OCBBF2014292 | 3.754 | 0 | 0 | 2.496 | 0 | 7.633 | 25.733 |
| OCBBF2014322 | 0 | 0 | 0 | 0 | 0 | 0 | 25.645 |
| OCBBF2014386 | 0 | 0 | 0 | 43.822 | 0 | 0 | 22.588 |
| OCBBF2014541 | 0 | 0 | 0 | 0 | 0 | 0 | 34.096 |
| OCBBF2014576 | 0 | 0 | 0 | 0 | 0 | 0 | 4.539 |
| OCBBF2014707 | 0 | 0 | 0 | 0 | 0 | 0 | 100 |
| OCBBF2014745 | 0 | 0 | 0 | 0 | 0 | 0 | 63.640 |
| OCBBF2014828 | 0 | 0 | 0 | 0 | 0 | 0 | 100 |
| OCBBF2014873 | 0 | 0 | 0 | 0 | 0 | 0 | 17.619 |
| OCBBF2014880 | 0 | 0 | 0 | 0 | 0 | 0 | 40.207 |
| OCBBF2014928 | 0 | 0 | 0 | 0 | 0 | 0 | 40.207 |
| OCBBF2015031 | 0 | 0 | 0 | 0 | 0 | 0 | 100 |
| OCBBF2015081 | 0 | 0 | 0 | 0 | 0 | 0 | 100 |
| OCBBF2015115 | 0 | 0 | 0 | 43.004 | 0 | 0 | 44.332 |
| OCBBF2015232 | 0 | 0 | 0 | 0 | 0 | 0 | 100 |
| OCBBF2015233 | 0 | 0 | 0 | 0 | 0 | 0 | 77.781 |
| OCBBF2015285 | 0 | 0 | 0 | 0 | 0 | 0 | 100 |
| OCBBF2015334 | 0 | 0 | 0 | 0 | 0 | 0 | 65.522 |
| OCBBF2015335 | 0 | 0 | 0 | 0 | 0 | 0 | 100 |
| OCBBF2015503 | 0 | 0 | 0 | 18.086 | 0 | 0 | 18.645 |
| OCBBF2015506 | 0 | 0 | 0 | 0 | 0 | 0 | 100 |
| OCBBF2015599 | 0 | 0 | 0 | 0 | 0 | 0 | 40.207 |
| OCBBF2015645 | 0 | 0 | 0 | 0 | 0 | 0 | 100 |
| OCBBF2015659 | 0 | 0 | 0 | 0 | 0 | 0 | 100 |
| OCBBF2015751 | 0 | 0 | 0 | 0 | 0 | 0 | 10.561 |
| OCBBF2015797 | 0 | 0 | 0 | 0 | 0 | 0 | 65.522 |
| OCBBF2015931 | 0 | 0 | 0 | 0 | 0 | 0 | 25.025 |
| OCBBF2015980 | 0 | 0 | 0 | 0 | 0 | 0 | 100 |
| OCBBF2016038 | 0 | 0 | 0 | 0 | 0 | 0 | 100 |
| OCBBF2016405 | 0 | 0 | 0 | 0 | 0 | 0 | 28.747 |
| OCBBF2016467 | 0 | 0 | 0 | 0 | 0 | 0 | 100 |
| OCBBF2016590 | 0 | 0 | 0 | 0 | 0 | 0 | 100 |
| OCBBF2016591 | 0 | 0 | 0 | 0 | 0 | 0 | 100 |
| OCBBF2016612 | 0 | 0 | 0 | 0 | 0 | 0 | 52.585 |
| OCBBF2016689 | 0 | 0 | 0 | 0 | 0 | 0 | 77.781 |
| OCBBF2016690 | 0 | 0 | 0 | 0 | 0 | 0 | 100 |
| OCBBF2016729 | 0 | 0 | 0 | 0 | 0 | 0 | 11.324 |
| OCBBF2016841 | 22.139 | 0 | 0 | 0 | 0 | 0 | 7.589 |
| OCBBF2016928 | 0 | 0 | 0 | 0 | 0 | 0 | 13.608 |
| OCBBF2017035 | 0 | 0 | 0 | 2.922 | 0 | 8.935 | 6.024 |
| OCBBF2017055 | 0 | 0 | 0 | 0 | 0 | 0 | 22.290 |
| OCBBF2017069 | 0 | 0 | 0 | 0 | 0 | 0 | 100 |
| OCBBF2017306 | 0 | 0 | 0 | 0 | 0 | 0 | 55.403 |
| OCBBF2017325 | 0 | 0 | 0 | 0 | 0 | 0 | 100 |
| OCBBF2017398 | 0 | 2.338 | 0 | 3.100 | 0 | 0 | 9.588 |
| OCBBF2017458 | 0 | 10.117 | 0 | 0 | 0 | 0 | 20.748 |
| OCBBF2017489 | 0 | 0 | 0 | 0 | 0 | 0 | 100 |
| OCBBF2017516 | 0 | 0 | 0 | 0 | 0 | 0 | 100 |
| OCBBF2017665 | 0 | 0 | 0 | 0 | 0 | 0 | 100 |
| OCBBF2017754 | 0 | 0 | 0 | 9.049 | 0 | 0 | 27.986 |
| OCBBF2017791 | 0 | 4.655 | 0 | 6.174 | 0 | 0 | 1.591 |
| OCBBF2017815 | 0 | 0 | 0 | 0 | 0 | 0 | 65.522 |
| OCBBF2017882 | 0 | 0 | 0 | 0 | 0 | 0 | 8.864 |
| OCBBF2017888 | 0 | 0 | 0 | 0 | 0 | 0 | 21.165 |
| OCBBF2017893 | 0 | 0 | 0 | 0 | 0 | 0 | 4.310 |
| OCBBF2017920 | 0 | 0 | 0 | 31.033 | 0 | 0 | 31.992 |
| OCBBF2018012 | 0 | 0 | 0 | 0 | 0 | 0 | 3.487 |
| OCBBF2018014 | 0 | 0 | 0 | 0 | 0 | 0 | 100 |
| OCBBF2018084 | 0 | 0 | 0 | 0 | 0 | 0 | 16.434 |
| OCBBF2018167 | 0 | 0 | 0 | 0 | 0 | 0 | 100 |
| OCBBF2018206 | 0 | 0 | 0 | 0 | 0 | 0 | 54.907 |
| OCBBF2018229 | 0 | 0 | 0 | 0 | 0 | 0 | 100 |
| OCBBF2018234 | 0 | 11.770 | 0 | 0 | 0 | 0 | 16.093 |
| OCBBF2018362 | 0 | 0 | 0 | 0 | 0 | 0 | 57.154 |
| OCBBF2018380 | 0 | 0 | 0 | 0 | 0 | 0 | 100 |
| OCBBF2018563 | 0 | 0 | 0 | 0 | 0 | 0 | 25.548 |
| OCBBF2018581 | 0 | 7.818 | 0 | 0 | 0 | 0 | 21.378 |
| OCBBF2018618 | 0 | 0 | 0 | 0 | 0 | 0 | 40.294 |
| OCBBF2018663 | 0 | 0 | 0 | 0 | 0 | 0 | 100 |
| OCBBF2018687 | 0 | 0 | 0 | 0 | 0 | 0 | 100 |
| OCBBF2018707 | 0 | 0 | 0 | 0 | 0 | 0 | 2.794 |
| OCBBF2018827 | 0 | 0 | 0 | 11.826 | 0 | 0 | 6.095 |
| OCBBF2018828 | 0 | 0 | 0 | 0 | 0 | 0 | 100 |
| OCBBF2018873 | 0 | 0 | 39.876 | 0 | 0 | 10.213 | 5.164 |
| OCBBF2018934 | 0 | 0 | 0 | 0 | 0 | 0 | 100 |
| OCBBF2018956 | 0 | 0 | 0 | 4.079 | 0 | 0 | 2.102 |
| OCBBF2019108 | 0 | 0 | 0 | 0 | 0 | 0 | 42.690 |
| OCBBF2019195 | 0 | 0 | 0 | 0 | 0 | 0 | 100 |
| OCBBF2019327 | 0 | 0 | 0 | 0 | 0 | 0 | 100 |
| OCBBF2019684 | 0 | 0 | 0 | 0 | 0 | 0 | 100 |
| OCBBF2019761 | 0 | 0 | 0 | 0 | 0 | 0 | 100 |
| OCBBF2019823 | 0 | 0 | 0 | 0 | 0 | 0 | 100 |
| OCBBF2019950 | 0 | 0 | 0 | 0 | 0 | 0 | 54.907 |
| OCBBF2020048 | 0 | 0 | 0 | 0 | 0 | 0 | 65.522 |
| OCBBF2020318 | 0 | 0 | 0 | 0 | 0 | 0 | 59.836 |
| OCBBF2020343 | 0 | 0 | 0 | 0 | 0 | 0 | 63.640 |
| OCBBF2020453 | 0 | 0 | 0 | 0 | 0 | 0 | 100 |
| OCBBF2020741 | 0 | 0 | 0 | 0 | 0 | 0 | 17.527 |
| OCBBF2020801 | 0 | 0 | 0 | 0 | 0 | 0 | 59.836 |
| OCBBF2020825 | 0 | 0 | 0 | 0 | 0 | 0 | 100 |
| OCBBF2020838 | 0 | 0 | 0 | 0 | 0 | 0 | 100 |
| OCBBF2021020 | 0 | 0 | 0 | 0 | 0 | 0 | 3.312 |
| OCBBF2021214 | 0 | 0 | 0 | 0 | 0 | 0 | 100 |
| OCBBF2021286 | 0 | 0 | 0 | 0 | 0 | 0 | 22.928 |
| OCBBF2021323 | 0 | 0 | 0 | 0 | 0 | 0 | 100 |
| OCBBF2021518 | 0 | 0 | 0 | 0 | 0 | 0 | 100 |
| OCBBF2021788 | 0 | 0 | 0 | 0 | 0 | 0 | 100 |
| OCBBF2021833 | 0 | 0 | 0 | 0 | 0 | 0 | 36.034 |
| OCBBF2022351 | 0 | 0 | 0 | 0 | 0 | 0 | 63.640 |
| OCBBF2022573 | 0 | 0 | 0 | 0 | 0 | 0 | 100 |
| OCBBF2022574 | 0 | 0 | 0 | 0 | 0 | 0 | 100 |
| OCBBF2023162 | 0 | 0 | 0 | 0 | 0 | 0 | 12.773 |
| OCBBF2023598 | 0 | 0 | 0 | 0 | 0 | 0 | 100 |
| OCBBF2023643 | 0 | 0 | 0 | 0 | 0 | 0 | 100 |
| OCBBF2024463 | 0 | 0 | 0 | 0 | 0 | 0 | 100 |
| OCBBF2024589 | 0 | 0 | 0 | 0 | 0 | 0 | 100 |
| OCBBF2024719 | 0 | 0 | 0 | 0 | 0 | 0 | 36.847 |
| OCBBF2024779 | 0 | 0 | 0 | 0 | 0 | 0 | 100 |
| OCBBF2024781 | 0 | 0 | 0 | 0 | 0 | 0 | 100 |
| OCBBF2024850 | 0 | 0 | 0 | 0 | 0 | 0 | 5.522 |
| OCBBF2025028 | 0 | 0 | 0 | 0 | 0 | 0 | 100 |
| OCBBF2025115 | 0 | 0 | 0 | 0 | 0 | 0 | 100 |
| OCBBF2025198 | 0 | 0 | 0 | 0 | 0 | 0 | 100 |
| OCBBF2025451 | 0 | 0 | 0 | 0 | 0 | 0 | 100 |
| OCBBF2025458 | 0 | 0 | 0 | 0 | 0 | 0 | 100 |
| OCBBF2025527 | 0 | 0 | 0 | 0 | 0 | 0 | 63.640 |
| OCBBF2025631 | 0 | 0 | 0 | 0 | 0 | 0 | 100 |
| OCBBF2025730 | 0 | 0 | 0 | 0 | 0 | 0 | 100 |
| OCBBF2026025 | 0 | 0 | 0 | 0 | 0 | 0 | 100 |
| OCBBF2026035 | 0 | 0 | 0 | 0 | 0 | 0 | 100 |
| OCBBF2026144 | 0 | 0 | 0 | 0 | 0 | 0 | 100 |
| OCBBF2026368 | 0 | 0 | 0 | 0 | 0 | 0 | 30.795 |
| OCBBF2026645 | 0 | 0 | 0 | 0 | 0 | 0 | 100 |
| OCBBF2026649 | 0 | 0 | 0 | 0 | 0 | 0 | 63.640 |
| OCBBF2026690 | 0 | 0 | 0 | 0 | 0 | 0 | 100 |
| OCBBF2026981 | 0 | 0 | 0 | 0 | 0 | 0 | 100 |
| OCBBF2027148 | 0 | 0 | 0 | 0 | 0 | 0 | 28.907 |
| OCBBF2027197 | 0 | 0 | 0 | 0 | 0 | 0 | 63.640 |
| OCBBF2027354 | 0 | 0 | 0 | 0 | 0 | 0 | 100 |
| OCBBF2027423 | 0 | 0 | 0 | 0 | 0 | 0 | 100 |
| OCBBF2027478 | 0 | 0 | 0 | 0 | 0 | 0 | 100 |
| OCBBF2027481 | 0 | 0 | 0 | 0 | 0 | 0 | 100 |
| OCBBF2027511 | 0 | 0 | 0 | 0 | 0 | 0 | 100 |
| OCBBF2027661 | 0 | 0 | 0 | 0 | 0 | 0 | 46.671 |
| OCBBF2027728 | 0 | 0 | 0 | 0 | 0 | 0 | 100 |
| OCBBF2027782 | 0 | 0 | 0 | 0 | 0 | 0 | 100 |
| OCBBF2027868 | 0 | 0 | 0 | 0 | 0 | 0 | 100 |
| OCBBF2028055 | 0 | 0 | 0 | 0 | 0 | 0 | 55.403 |
| OCBBF2028173 | 0 | 0 | 0 | 0 | 0 | 0 | 100 |
| OCBBF2028421 | 0 | 0 | 0 | 0 | 0 | 0 | 52.585 |
| OCBBF2029471 | 0 | 0 | 0 | 0 | 0 | 0 | 100 |
| OCBBF2029901 | 0 | 0 | 0 | 0 | 0 | 0 | 100 |
| OCBBF2030116 | 0 | 0 | 0 | 0 | 0 | 0 | 54.907 |
| OCBBF2030329 | 0 | 0 | 0 | 0 | 0 | 0 | 55.216 |
| OCBBF2030354 | 0 | 0 | 0 | 0 | 0 | 0 | 100 |
| OCBBF2030517 | 0 | 0 | 0 | 0 | 0 | 0 | 100 |
| OCBBF2030574 | 0 | 0 | 0 | 0 | 0 | 0 | 100 |
| OCBBF2030708 | 0 | 0 | 0 | 0 | 0 | 0 | 100 |
| OCBBF2030927 | 0 | 0 | 0 | 0 | 0 | 0 | 55.216 |
| OCBBF2030963 | 0 | 0 | 0 | 0 | 0 | 0 | 100 |
| OCBBF2031167 | 0 | 0 | 0 | 0 | 0 | 0 | 100 |
| OCBBF2031198 | 0 | 0 | 0 | 0 | 0 | 0 | 100 |
| OCBBF2031366 | 0 | 0 | 0 | 0 | 0 | 0 | 100 |
| OCBBF2031561 | 0 | 0 | 0 | 0 | 0 | 0 | 39.003 |
| OCBBF2032152 | 0 | 0 | 0 | 0 | 0 | 0 | 100 |
| OCBBF2032274 | 0 | 0 | 0 | 0 | 0 | 0 | 100 |
| OCBBF2032539 | 0 | 0 | 0 | 0 | 0 | 0 | 100 |
| OCBBF2032590 | 0 | 0 | 0 | 0 | 0 | 0 | 100 |
| OCBBF2032599 | 0 | 0 | 0 | 0 | 0 | 0 | 100 |
| OCBBF2032611 | 0 | 0 | 0 | 0 | 0 | 0 | 100 |
| OCBBF2032671 | 0 | 0 | 0 | 0 | 0 | 0 | 100 |
| OCBBF2033295 | 0 | 0 | 0 | 12.672 | 0 | 0 | 39.191 |
| OCBBF2033413 | 0 | 0 | 0 | 0 | 0 | 0 | 100 |
| OCBBF2033869 | 0 | 0 | 0 | 0 | 0 | 0 | 100 |
| OCBBF2033948 | 0 | 0 | 0 | 0 | 0 | 0 | 100 |
| OCBBF2034333 | 0 | 0 | 0 | 0 | 0 | 0 | 100 |
| OCBBF2034529 | 0 | 0 | 0 | 0 | 0 | 0 | 100 |
| OCBBF2034637 | 0 | 0 | 0 | 0 | 0 | 0 | 100 |
| OCBBF2034906 | 0 | 0 | 0 | 0 | 0 | 0 | 100 |
| OCBBF2035110 | 0 | 0 | 0 | 0 | 0 | 0 | 100 |
| OCBBF2035214 | 0 | 0 | 0 | 0 | 0 | 0 | 55.216 |
| OCBBF2035226 | 0 | 0 | 0 | 1.416 | 0 | 0 | 0.730 |
| OCBBF2035390 | 0 | 0 | 0 | 0 | 0 | 0 | 100 |
| OCBBF2035564 | 0 | 0 | 0 | 0 | 0 | 0 | 100 |
| OCBBF2035658 | 0 | 0 | 0 | 0 | 0 | 0 | 100 |
| OCBBF2035823 | 0 | 0 | 0 | 0 | 0 | 0 | 42.690 |
| OCBBF2035885 | 0 | 0 | 0 | 0 | 0 | 0 | 100 |
| OCBBF2035916 | 0 | 0 | 0 | 0 | 0 | 0 | 100 |
| OCBBF2036019 | 0 | 0 | 0 | 0 | 0 | 0 | 100 |
| OCBBF2036031 | 0 | 0 | 0 | 0 | 0 | 0 | 100 |
| OCBBF2036225 | 0 | 0 | 0 | 0 | 0 | 0 | 100 |
| OCBBF2036476 | 0 | 0 | 0 | 0 | 0 | 0 | 100 |
| OCBBF2036743 | 0 | 0 | 0 | 0 | 0 | 0 | 27.462 |
| OCBBF2036752 | 0 | 0 | 0 | 0 | 0 | 0 | 100 |
| OCBBF2037068 | 54.224 | 27.189 | 0 | 0 | 0 | 0 | 18.587 |
| OCBBF2037340 | 0 | 0 | 0 | 0 | 0 | 0 | 100 |
| OCBBF2037398 | 0 | 0 | 0 | 0 | 0 | 0 | 100 |
| OCBBF2037464 | 0 | 0 | 0 | 0 | 0 | 0 | 100 |
| OCBBF2037547 | 0 | 0 | 0 | 0 | 0 | 0 | 100 |
| OCBBF2037598 | 0 | 0 | 0 | 0 | 0 | 0 | 100 |
| OCBBF2037638 | 0 | 0 | 0 | 0 | 0 | 0 | 100 |
| OCBBF2038238 | 0 | 0 | 0 | 0 | 0 | 0 | 100 |
| OCBBF2038285 | 0 | 0 | 0 | 0 | 0 | 0 | 100 |
| OCBBF2038317 | 0 | 0 | 0 | 0 | 0 | 0 | 12.245 |
| OCBBF3000097 | 0 | 0 | 0 | 0 | 0 | 0 | 100 |
| OCBBF3000213 | 0 | 0 | 0 | 0 | 0 | 0 | 100 |
| OCBBF3000296 | 0 | 0 | 0 | 0 | 0 | 0 | 47.069 |
| OCBBF3000323 | 0 | 0 | 0 | 0 | 0 | 0 | 4.132 |
| OCBBF3000372 | 0 | 0 | 0 | 0 | 0 | 0 | 100 |
| OCBBF3000380 | 0 | 0 | 0 | 0 | 0 | 0 | 100 |
| OCBBF3000743 | 0 | 0 | 0 | 0 | 0 | 0 | 100 |
| OCBBF3000830 | 0 | 0 | 0 | 0 | 0 | 0 | 100 |
| OCBBF3001076 | 0 | 0 | 0 | 0 | 0 | 0 | 100 |
| OCBBF3001202 | 0 | 0 | 0 | 0 | 0 | 0 | 100 |
| OCBBF3001333 | 0 | 5.839 | 0 | 7.743 | 0 | 0 | 11.974 |
| OCBBF3001616 | 0 | 0 | 0 | 0 | 0 | 0 | 100 |
| OCBBF3002553 | 0 | 0 | 0 | 0 | 0 | 0 | 100 |
| OCBBF3002600 | 0 | 0 | 0 | 0 | 0 | 0 | 100 |
| OCBBF3002654 | 0 | 0 | 0 | 0 | 0 | 0 | 100 |
| OCBBF3003103 | 0 | 0 | 0 | 0 | 0 | 0 | 55.403 |
| OCBBF3003209 | 0 | 0 | 0 | 0 | 0 | 0 | 100 |
| OCBBF3003592 | 0 | 0 | 0 | 0 | 0 | 0 | 100 |
| OCBBF3003745 | 0 | 0 | 0 | 0 | 0 | 0 | 100 |
| OCBBF3003761 | 0 | 0 | 0 | 0 | 0 | 0 | 100 |
| OCBBF3004264 | 0 | 0 | 0 | 0 | 0 | 0 | 100 |
| OCBBF3004314 | 0 | 0 | 0 | 0 | 0 | 0 | 100 |
| OCBBF3004487 | 0 | 0 | 0 | 0 | 0 | 0 | 11.257 |
| OCBBF3004972 | 0 | 0 | 0 | 0 | 0 | 0 | 100 |
| OCBBF3005330 | 0 | 0 | 0 | 0 | 0 | 0 | 100 |
| OCBBF3005597 | 0 | 0 | 0 | 0 | 0 | 0 | 100 |
| OCBBF3005843 | 0 | 0 | 0 | 0 | 0 | 0 | 100 |
| OCBBF3006802 | 0 | 0 | 0 | 0 | 0 | 0 | 100 |
| OCBBF3006986 | 0 | 0 | 0 | 0 | 0 | 0 | 100 |
| OCBBF3007078 | 0 | 0 | 0 | 0 | 0 | 0 | 100 |
| OCBBF3007704 | 0 | 0 | 0 | 0 | 0 | 0 | 100 |
| OCBBF3008230 | 0 | 0 | 0 | 0 | 0 | 0 | 37.069 |
| OCBBF3008392 | 0 | 0 | 0 | 0 | 0 | 0 | 100 |
| OCBBF3008835 | 0 | 0 | 0 | 0 | 0 | 0 | 52.835 |
| OCBBF3009192 | 0 | 0 | 0 | 0 | 0 | 0 | 100 |
| OCBBF3009244 | 0 | 0 | 0 | 0 | 0 | 0 | 42.785 |
| OCBBF3009279 | 0 | 0 | 0 | 0 | 0 | 0 | 100 |
| PEBLM1000066 | 0 | 0 | 0 | 0 | 0 | 0 | 5.887 |
| PEBLM1000144 | 0 | 10.899 | 0 | 0 | 0 | 0 | 0 |
| PEBLM2000147 | 0 | 0 | 0 | 0 | 0 | 0 | 4.754 |
| PEBLM2000222 | 0 | 2.111 | 0 | 0 | 0 | 0 | 0 |
| PEBLM2000308 | 0 | 0 | 0 | 4.778 | 0 | 0 | 9.851 |
| PEBLM2000326 | 0 | 0 | 0 | 0 | 0 | 0 | 13.487 |
| PEBLM2000395 | 0 | 3.308 | 0 | 4.387 | 0 | 0 | 3.392 |
| PEBLM2001072 | 0 | 0 | 0 | 4.371 | 0 | 0 | 2.253 |
| PEBLM2004452 | 0 | 2.453 | 0 | 3.253 | 0 | 0 | 5.030 |
| PEBLM2006366 | 0 | 5.030 | 0 | 0 | 0 | 0 | 3.438 |
| PEBLM2006709 | 0 | 10.110 | 0 | 0 | 0 | 0 | 0 |
| PEBLM2007188 | 0 | 0 | 0 | 0 | 0 | 0 | 10.845 |
| PERIC2002766 | 0 | 0 | 0 | 0 | 0 | 0 | 15.571 |
| PERIC2005117 | 0 | 0 | 0 | 0 | 0 | 0 | 5.337 |
| PERIC2007068 | 0 | 2.804 | 0 | 3.719 | 0 | 0 | 3.834 |
| PLACE5000013 | 0 | 2.885 | 0 | 7.651 | 0 | 0 | 0 |
| PLACE5000113 | 0 | 12.506 | 0 | 16.586 | 0 | 0 | 4.275 |
| PLACE5000159 | 0 | 4.130 | 0 | 16.432 | 0 | 0 | 14.117 |
| PLACE6000263 | 0 | 5.526 | 0 | 0 | 0 | 0 | 0 |
| PLACE6000379 | 3.201 | 0.963 | 0 | 1.277 | 0 | 0 | 1.755 |
| PLACE6001064 | 0 | 13.553 | 0 | 9.679 | 0 | 0 | 1.425 |
| PLACE6001281 | 0 | 6.256 | 0 | 0 | 0 | 0 | 4.277 |
| PLACE6001443 | 0 | 3.569 | 0 | 0 | 0 | 0 | 0 |
| PLACE6001923 | 22.779 | 0 | 0 | 0 | 0 | 0 | 0 |
| PLACE6002084 | 6.692 | 0 | 0 | 0.890 | 0 | 0 | 1.376 |
| PLACE6002102 | 0 | 7.700 | 0 | 3.404 | 0 | 0 | 22.809 |
| PLACE6002960 | 0 | 0 | 0 | 0 | 0 | 8.180 | 4.136 |
| PLACE6003383 | 0 | 0 | 0 | 0 | 0 | 8.796 | 0 |
| PLACE6003393 | 0 | 0 | 0 | 0 | 0 | 55.964 | 0 |
| PLACE6003745 | 0 | 9.549 | 0 | 0 | 0 | 0 | 0 |
| PLACE6004005 | 14.313 | 5.383 | 0 | 0 | 0 | 0 | 1.227 |
| PLACE6004312 | 0 | 0 | 0 | 0 | 0 | 0 | 1.498 |
| PLACE6004397 | 0 | 3.340 | 0 | 8.860 | 0 | 0 | 0 |
| PLACE6004931 | 0 | 11.899 | 0 | 0 | 0 | 0 | 0 |
| PLACE6005482 | 0 | 9.610 | 0 | 0 | 0 | 0 | 0 |
| PLACE6006042 | 0 | 0 | 0 | 0 | 0 | 0 | 6.763 |
| PLACE6006137 | 0 | 0 | 0 | 8.232 | 0 | 0 | 4.243 |
| PLACE6006988 | 0 | 0 | 0 | 0 | 0 | 0 | 41.108 |
| PLACE6008793 | 5.746 | 0 | 0 | 3.821 | 0 | 0 | 0 |
| PLACE6010484 | 5.602 | 0 | 0 | 0 | 0 | 0 | 0 |
| PLACE6011041 | 0 | 0 | 0 | 0 | 0 | 0 | 3.380 |
| PLACE6011057 | 0 | 0 | 0 | 5.432 | 0 | 0 | 2.800 |
| PLACE6011334 | 0 | 0 | 0 | 0 | 0 | 0 | 11.165 |
| PLACE6011627 | 0 | 0 | 0 | 0 | 0 | 0 | 41.108 |
| PLACE6011970 | 0 | 0 | 0 | 0 | 0 | 0 | 32.218 |
| PLACE6016210 | 45.894 | 0 | 0 | 0 | 0 | 0 | 0 |
| PLACE6018938 | 0 | 0 | 0 | 18.491 | 0 | 0 | 0 |
| PLACE6019385 | 0 | 0 | 0 | 0 | 0 | 0 | 5.039 |
| PLACE7004103 | 0 | 9.400 | 0 | 6.234 | 0 | 9.531 | 1.607 |
| PROST1000097 | 0 | 0 | 0 | 0 | 0 | 0 | 0.730 |
| PROST1000144 | 0 | 0 | 0 | 0 | 0 | 0 | 5.843 |
| PROST1000199 | 0 | 1.328 | 0 | 1.761 | 0 | 0 | 0.908 |
| PROST1000215 | 0 | 0 | 0 | 0 | 0 | 0 | 12.708 |
| PROST1000220 | 0 | 0 | 0 | 0 | 0 | 30.022 | 0 |
| PROST1000226 | 0 | 6.503 | 0 | 0 | 0 | 0 | 0 |
| PROST1000322 | 0 | 0 | 0 | 57.613 | 0 | 0 | 0 |
| PROST1000526 | 9.156 | 0 | 0 | 0 | 0 | 0 | 0 |
| PROST1000564 | 0 | 0 | 0 | 3.240 | 0 | 0 | 0 |
| PROST2000079 | 0 | 0 | 0 | 7.214 | 0 | 0 | 0 |
| PROST2000138 | 0 | 0.945 | 0 | 0.209 | 0 | 0.639 | 0.108 |
| PROST2000274 | 0 | 0 | 0 | 24.872 | 0 | 0 | 0 |
| PROST2000284 | 0 | 0 | 0 | 16.880 | 0 | 0 | 4.350 |
| PROST2000325 | 0 | 0 | 0 | 17.061 | 0 | 0 | 0 |
| PROST2000760 | 0 | 0 | 0 | 0 | 0 | 0 | 3.485 |
| PROST2001180 | 0 | 0 | 0 | 5.984 | 0 | 0 | 0 |
| PROST2001213 | 0 | 0 | 0 | 20.091 | 0 | 0 | 0 |
| PROST2001552 | 0 | 3.164 | 0 | 2.098 | 0 | 0 | 0 |
| PROST2002227 | 0 | 0 | 73.145 | 0 | 0 | 0 | 0 |
| PROST2002651 | 0 | 0 | 0 | 0 | 0 | 22.039 | 7.430 |
| PROST2002960 | 0 | 24.426 | 0 | 0 | 0 | 0 | 16.698 |
| PROST2003232 | 0 | 0 | 0 | 0 | 0 | 0 | 0.848 |
| PROST2003338 | 0 | 0 | 0 | 2.698 | 0 | 0 | 0 |
| PROST2003396 | 0 | 0 | 0 | 0 | 0 | 0 | 7.422 |
| PROST2003517 | 0 | 0 | 0 | 0 | 0 | 0 | 3.271 |
| PROST2004095 | 0 | 0 | 0 | 2.256 | 0 | 3.449 | 5.233 |
| PROST2004258 | 0 | 0 | 0 | 9.195 | 0 | 0 | 0 |
| PROST2004270 | 0 | 1.069 | 16.921 | 4.252 | 0 | 0 | 7.305 |
| PROST2004416 | 2.464 | 2.471 | 19.566 | 0 | 0 | 10.022 | 0 |
| PROST2004570 | 27.165 | 0 | 0 | 0 | 0 | 0 | 0 |
| PROST2004739 | 0 | 0 | 0 | 0 | 0 | 0 | 27.713 |
| PROST2005143 | 0 | 0 | 0 | 0 | 0 | 0 | 8.427 |
| PROST2005272 | 0 | 0 | 0 | 0 | 0 | 0 | 10.202 |
| PROST2005793 | 0 | 0 | 0 | 0 | 0 | 0 | 4.872 |
| PROST2006030 | 0 | 13.752 | 0 | 9.119 | 0 | 0 | 0 |
| PROST2006260 | 0 | 0 | 0 | 0 | 0 | 0 | 10.117 |
| PROST2006343 | 0 | 0 | 0 | 0 | 0 | 32.585 | 0 |
| PROST2006536 | 0 | 4.033 | 0 | 10.696 | 0 | 0 | 0 |
| PROST2007200 | 0 | 0 | 0 | 0 | 0 | 0 | 44.022 |
| PROST2007871 | 39.973 | 0 | 0 | 0 | 0 | 0 | 13.702 |
| PROST2008271 | 0 | 0 | 0 | 0 | 0 | 0 | 9.737 |
| PROST2008489 | 2.347 | 1.177 | 0 | 0 | 0 | 0 | 0 |
| PROST2008770 | 14.135 | 0 | 0 | 1.880 | 0 | 0 | 2.907 |
| PROST2009400 | 0 | 21.671 | 0 | 0 | 0 | 0 | 14.815 |
| PROST2010782 | 2.644 | 0 | 0 | 0.586 | 0 | 0 | 0 |
| PROST2011577 | 0 | 0 | 0 | 0 | 0 | 0 | 1.278 |
| PROST2012007 | 0 | 2.062 | 0 | 0 | 0 | 0 | 0 |
| PROST2012448 | 0 | 0 | 0 | 0 | 0 | 0 | 10.136 |
| PROST2012888 | 0 | 0 | 0 | 40.462 | 0 | 0 | 0 |
| PROST2012890 | 0 | 27.718 | 0 | 0 | 0 | 0 | 0 |
| PROST2015137 | 0 | 0 | 0 | 0 | 0 | 0 | 22.826 |
| PROST2015332 | 0 | 0 | 0 | 0 | 0 | 0 | 3.202 |
| PROST2016918 | 0 | 0 | 0 | 0 | 0 | 0 | 7.895 |
| PROST2017203 | 0 | 0 | 0 | 0 | 0 | 9.571 | 1.613 |
| PROST2017692 | 0 | 2.678 | 0 | 0 | 0 | 0 | 0 |
| PROST2017910 | 0 | 0 | 0 | 25.185 | 0 | 0 | 0 |
| PROST2018607 | 0 | 0 | 0 | 40.462 | 0 | 0 | 0 |
| PROST2019253 | 0 | 0 | 0 | 0 | 0 | 0 | 8.349 |
| PUAEN1000057 | 0 | 7.462 | 0 | 4.948 | 0 | 0 | 7.651 |
| PUAEN1000065 | 0 | 0 | 0 | 1.614 | 0 | 9.872 | 0 |
| PUAEN1000161 | 0 | 0 | 0 | 0 | 0 | 0 | 7.166 |
| PUAEN1000164 | 0 | 0.723 | 0 | 0.959 | 0 | 0 | 0 |
| PUAEN1000239 | 11.235 | 0 | 0 | 0 | 0 | 0 | 23.107 |
| PUAEN1000322 | 0 | 4.646 | 0 | 0 | 0 | 0 | 0 |
| PUAEN2000374 | 1.160 | 0.582 | 0 | 2.314 | 0 | 2.359 | 1.590 |
| PUAEN2000497 | 0 | 4.685 | 0 | 0 | 0 | 0 | 0 |
| PUAEN2002489 | 0 | 0 | 0 | 0 | 0 | 0 | 8.106 |
| PUAEN2003408 | 0 | 0 | 0 | 0 | 0 | 0 | 3.741 |
| PUAEN2006335 | 0 | 0 | 0 | 0 | 0 | 0 | 15.755 |
| PUAEN2007044 | 0 | 13.024 | 0 | 3.455 | 0 | 0 | 3.561 |
| PUAEN2007350 | 0 | 24.360 | 0 | 0 | 0 | 0 | 0 |
| PUAEN2008815 | 0 | 0 | 0 | 29.929 | 0 | 0 | 0 |
| RECTM1000051 | 0 | 0 | 0 | 0 | 0 | 0 | 2.867 |
| RECTM2000510 | 10.923 | 0 | 0 | 0 | 0 | 0 | 0 |
| RECTM2001347 | 0 | 0 | 0 | 0 | 0 | 0 | 5.153 |
| SALGL1000047 | 0 | 0.538 | 0 | 0.714 | 0 | 0 | 0.368 |
| SALGL1000157 | 0 | 1.654 | 0 | 0.313 | 0 | 0 | 0 |
| SKMUS1000022 | 0 | 0.756 | 0 | 1.003 | 0 | 0 | 0.517 |
| SKMUS1000064 | 0 | 0.853 | 0 | 0 | 0 | 0 | 0 |
| SKMUS1000084 | 0 | 2.799 | 0 | 0 | 0 | 0 | 7.653 |
| SKMUS1000138 | 0 | 0 | 0 | 0 | 0 | 1.416 | 0 |
| SKMUS1000186 | 1.455 | 0.729 | 0 | 0 | 0 | 0 | 0.499 |
| SKMUS2000198 | 0 | 0 | 0 | 0 | 0 | 23.281 | 0 |
| SKMUS2000361 | 0 | 1.943 | 0 | 0 | 0 | 0 | 0 |
| SKMUS2000467 | 0 | 20.503 | 0 | 0 | 0 | 0 | 0 |
| SKMUS2000679 | 0 | 0 | 0 | 0 | 0 | 4.937 | 0 |
| SKMUS2000931 | 1.972 | 2.967 | 0 | 1.311 | 0 | 4.010 | 2.028 |
| SKMUS2001147 | 0 | 0 | 0 | 6.681 | 0 | 0 | 3.444 |
| SKMUS2001323 | 0 | 0 | 50.550 | 0 | 0 | 0 | 0 |
| SKMUS2001454 | 2.446 | 3.067 | 0 | 1.627 | 0 | 0 | 2.096 |
| SKMUS2001634 | 0 | 0 | 0 | 0 | 0 | 9.649 | 4.879 |
| SKMUS2002084 | 22.628 | 11.346 | 0 | 0 | 0 | 0 | 0 |
| SKMUS2004908 | 0 | 5.969 | 0 | 23.749 | 0 | 0 | 8.161 |
| SKNMC1000110 | 0 | 0 | 0 | 17.451 | 0 | 26.682 | 0 |
| SKNMC1000168 | 3.035 | 0 | 0 | 0 | 0 | 0 | 2.081 |
| SKNMC1000229 | 0 | 0 | 0 | 25.340 | 0 | 0 | 0 |
| SKNMC1000264 | 0 | 0 | 0 | 12.641 | 0 | 0 | 0 |
| SKNMC2000065 | 0 | 7.847 | 0 | 7.805 | 0 | 0 | 9.388 |
| SKNMC2000097 | 0 | 0 | 12.826 | 1.074 | 0 | 0 | 1.107 |
| SKNMC2000635 | 1.950 | 2.608 | 0 | 0.865 | 0 | 0 | 0 |
| SKNMC2000649 | 0 | 1.658 | 0 | 2.199 | 0 | 6.724 | 1.133 |
| SKNMC2000698 | 0 | 0 | 0 | 4.978 | 0 | 0 | 2.566 |
| SKNMC2000877 | 0 | 0 | 0 | 0 | 0 | 0 | 1.472 |
| SKNMC2001324 | 0 | 0 | 0 | 0 | 0 | 0 | 8.022 |
| SKNMC2002402 | 0 | 0 | 0 | 0 | 0 | 0 | 9.158 |
| SKNMC2006173 | 0 | 13.984 | 0 | 0 | 0 | 0 | 9.559 |
| SKNSH1000002 | 0 | 2.612 | 0 | 0 | 0 | 10.593 | 0 |
| SKNSH1000086 | 0 | 0 | 0 | 20.579 | 0 | 0 | 10.607 |
| SKNSH1000101 | 0 | 0 | 0 | 0 | 0 | 0 | 0.798 |
| SKNSH2000051 | 0 | 0 | 0 | 0 | 0 | 0 | 41.985 |
| SKNSH2000101 | 0 | 0 | 0 | 0 | 0 | 0 | 8.186 |
| SKNSH2000250 | 0 | 0 | 0 | 0 | 0 | 0 | 3.500 |
| SKNSH2000347 | 0 | 0 | 0 | 0 | 0 | 0 | 5.575 |
| SKNSH2000819 | 0 | 4.523 | 0 | 0 | 0 | 0 | 0 |
| SKNSH2001931 | 0 | 0 | 0 | 24.633 | 0 | 0 | 6.348 |
| SKNSH2002325 | 0 | 6.937 | 0 | 0 | 0 | 0 | 0 |
| SKNSH2005061 | 0 | 3.081 | 0 | 0 | 0 | 0 | 0 |
| SKNSH2008043 | 0 | 18.400 | 0 | 0 | 0 | 0 | 0 |
| SMINT1000042 | 0 | 0 | 0 | 0 | 0 | 0 | 3.328 |
| SMINT1000054 | 0 | 33.993 | 0 | 0 | 0 | 0 | 0 |
| SMINT1000117 | 0 | 0 | 0 | 0 | 0 | 0 | 3.268 |
| SMINT1000131 | 3.319 | 0 | 0 | 0 | 0 | 0 | 0 |
| SMINT2000018 | 0 | 0 | 0 | 0 | 0 | 0 | 5.230 |
| SMINT2000073 | 0 | 0 | 0 | 0 | 0 | 0 | 21.554 |
| SMINT2000176 | 50.667 | 0 | 0 | 0 | 0 | 0 | 0 |
| SMINT2000232 | 0 | 0 | 0 | 0 | 0 | 0 | 17.685 |
| SMINT2000277 | 0 | 0 | 0 | 0 | 0 | 0 | 2.252 |
| SMINT2000396 | 0 | 0 | 0 | 2.950 | 0 | 0 | 3.041 |
| SMINT2000400 | 0 | 12.156 | 0 | 16.123 | 0 | 0 | 16.621 |
| SMINT2000441 | 0 | 2.461 | 0 | 1.088 | 0 | 0 | 0.561 |
| SMINT2000468 | 0 | 0 | 0 | 0 | 0 | 0 | 2.842 |
| SMINT2000537 | 0 | 0 | 0 | 0 | 0 | 0 | 26.038 |
| SMINT2000609 | 0 | 33.993 | 0 | 0 | 0 | 0 | 0 |
| SMINT2000659 | 0 | 0 | 0 | 0 | 91.616 | 0 | 0 |
| SMINT2000694 | 4.308 | 0 | 0 | 0 | 0 | 0 | 0 |
| SMINT2001615 | 0 | 0 | 0 | 40.582 | 0 | 0 | 0 |
| SMINT2002224 | 0 | 0 | 0 | 0 | 0 | 0 | 15.727 |
| SMINT2002620 | 0 | 0 | 0 | 10.921 | 0 | 0 | 0 |
| SMINT2002882 | 10.523 | 0 | 0 | 6.998 | 0 | 0 | 0 |
| SMINT2002976 | 0 | 0 | 0 | 0 | 0 | 0 | 6.480 |
| SMINT2003074 | 0 | 0 | 0 | 6.607 | 0 | 0 | 1.703 |
| SMINT2003169 | 1.705 | 0 | 0 | 1.134 | 0 | 0 | 1.169 |
| SMINT2003551 | 0 | 25.210 | 0 | 0 | 0 | 0 | 0 |
| SMINT2003905 | 2.806 | 4.221 | 0 | 0 | 0 | 0 | 0 |
| SMINT2004729 | 0 | 0 | 0 | 30.953 | 0 | 0 | 0 |
| SMINT2005368 | 8.512 | 0 | 0 | 0 | 0 | 0 | 1.459 |
| SMINT2005956 | 0 | 4.783 | 0 | 0 | 0 | 0 | 0 |
| SMINT2007187 | 0 | 12.199 | 0 | 0 | 0 | 0 | 25.019 |
| SMINT2008590 | 0 | 0 | 0 | 0 | 0 | 0 | 11.892 |
| SMINT2008672 | 0 | 0 | 0 | 32.753 | 0 | 0 | 0 |
| SMINT2008921 | 0 | 0 | 0 | 0 | 0 | 0 | 1.378 |
| SMINT2008960 | 0 | 0 | 0 | 0 | 0 | 0 | 0.850 |
| SMINT2009292 | 0 | 6.446 | 0 | 0 | 0 | 0 | 4.406 |
| SMINT2010426 | 0 | 0 | 0 | 0 | 0 | 0 | 6.730 |
| SMINT2010639 | 0 | 4.923 | 0 | 0 | 0 | 0 | 0 |
| SMINT2010901 | 0 | 0 | 0 | 8.464 | 0 | 0 | 0 |
| SMINT2012291 | 0 | 0 | 0 | 0 | 0 | 33.985 | 0 |
| SMINT2013890 | 0 | 0 | 0 | 0 | 0 | 67.622 | 0 |
| SMINT2014480 | 0 | 2.887 | 0 | 0 | 0 | 0 | 0 |
| SPLEN1000106 | 0 | 0 | 0 | 0 | 0 | 0 | 5.783 |
| SPLEN1000116 | 0 | 0 | 0 | 0 | 0 | 0 | 1.230 |
| SPLEN1000165 | 0 | 9.069 | 0 | 0 | 0 | 0 | 12.399 |
| SPLEN1000166 | 20.484 | 0 | 0 | 2.724 | 0 | 0 | 7.022 |
| SPLEN2000258 | 0 | 0 | 0 | 0 | 0 | 0 | 5.439 |
| SPLEN2000267 | 0 | 0 | 0 | 0 | 0 | 0 | 14.505 |
| SPLEN2000505 | 0 | 0 | 0 | 0 | 0 | 6.212 | 0.524 |
| SPLEN2000516 | 0 | 0 | 0 | 0 | 0 | 0 | 14.849 |
| SPLEN2000698 | 0 | 0 | 0 | 0 | 0 | 0 | 2.634 |
| SPLEN2000839 | 0 | 0 | 0 | 0 | 0 | 67.269 | 0 |
| SPLEN2000882 | 0 | 0 | 0 | 0 | 0 | 0 | 2.182 |
| SPLEN2001157 | 9.968 | 0 | 0 | 0 | 0 | 0 | 0 |
| SPLEN2002335 | 0 | 0 | 0 | 0 | 0 | 0 | 3.774 |
| SPLEN2002467 | 0 | 0 | 0 | 7.852 | 0 | 0 | 4.047 |
| SPLEN2002493 | 0 | 3.145 | 0 | 8.343 | 0 | 0 | 0 |
| SPLEN2002744 | 0 | 4.053 | 0 | 0 | 0 | 0 | 0 |
| SPLEN2004078 | 0 | 0 | 0 | 0 | 0 | 0 | 18.564 |
| SPLEN2004555 | 0 | 0 | 0 | 0 | 0 | 15.689 | 2.645 |
| SPLEN2004773 | 0 | 0 | 0 | 1.715 | 0 | 10.490 | 0 |
| SPLEN2005009 | 0 | 31.245 | 0 | 0 | 0 | 0 | 0 |
| SPLEN2005783 | 0 | 0 | 0 | 0 | 0 | 0 | 8.098 |
| SPLEN2006122 | 0 | 1.530 | 0 | 0 | 0 | 0 | 0 |
| SPLEN2006133 | 0 | 0 | 0 | 0 | 0 | 0 | 1.178 |
| SPLEN2006143 | 0 | 0 | 0 | 0 | 0 | 0 | 2.779 |
| SPLEN2006305 | 0 | 2.296 | 0 | 1.522 | 0 | 0 | 2.354 |
| SPLEN2006325 | 30.193 | 0 | 0 | 0 | 0 | 0 | 0 |
| SPLEN2006374 | 5.509 | 0 | 0 | 0 | 0 | 0 | 3.776 |
| SPLEN2007182 | 0 | 0 | 0 | 0 | 0 | 0 | 15.878 |
| SPLEN2007739 | 0 | 0 | 0 | 0 | 0 | 0 | 7.543 |
| SPLEN2008460 | 0 | 0 | 0 | 0 | 0 | 0 | 1.627 |
| SPLEN2009555 | 0 | 15.436 | 0 | 0 | 0 | 0 | 10.552 |
| SPLEN2009970 | 0 | 0 | 0 | 0 | 0 | 37.585 | 12.671 |
| SPLEN2010195 | 0 | 0.705 | 0 | 1.870 | 0 | 0 | 0.964 |
| SPLEN2010912 | 0 | 0 | 0 | 0 | 0 | 0 | 15.386 |
| SPLEN2011737 | 0 | 0 | 0 | 0 | 0 | 0 | 3.237 |
| SPLEN2011758 | 19.034 | 0 | 0 | 0 | 0 | 0 | 6.525 |
| SPLEN2012571 | 0 | 5.777 | 0 | 15.323 | 0 | 0 | 0 |
| SPLEN2014080 | 0 | 8.610 | 0 | 0 | 0 | 0 | 11.772 |
| SPLEN2014911 | 0 | 0 | 0 | 0 | 0 | 7.775 | 0 |
| SPLEN2015310 | 0 | 1.042 | 0 | 0 | 0 | 0 | 0 |
| SPLEN2016268 | 6.263 | 2.355 | 12.432 | 0 | 0 | 3.184 | 2.147 |
| SPLEN2016972 | 7.349 | 0 | 0 | 0 | 0 | 0 | 0 |
| SPLEN2017318 | 0 | 0 | 0 | 0 | 0 | 0 | 6.304 |
| SPLEN2017351 | 0 | 10.932 | 0 | 7.249 | 0 | 0 | 7.473 |
| SPLEN2018157 | 0 | 0 | 0 | 5.813 | 0 | 0 | 14.982 |
| SPLEN2018159 | 0 | 17.210 | 0 | 0 | 0 | 0 | 0 |
| SPLEN2019446 | 0 | 0 | 0 | 0 | 0 | 0 | 12.927 |
| SPLEN2021122 | 0 | 0 | 0 | 0 | 0 | 0 | 20.261 |
| SPLEN2021194 | 0 | 0 | 0 | 0 | 0 | 0 | 4.191 |
| SPLEN2025017 | 0 | 0 | 0 | 0 | 0 | 0 | 41.660 |
| SPLEN2027113 | 0 | 2.974 | 0 | 7.887 | 0 | 0 | 2.033 |
| SPLEN2028466 | 1.499 | 1.503 | 0 | 0 | 0 | 9.146 | 0 |
| SPLEN2028914 | 0 | 10.149 | 0 | 6.730 | 0 | 0 | 3.469 |
| SPLEN2031547 | 0 | 2.861 | 0 | 0 | 0 | 0 | 11.735 |
| SPLEN2039379 | 0 | 0 | 0 | 0 | 0 | 0 | 10.793 |
| SPLEN2042303 | 0 | 0 | 0 | 0 | 0 | 0 | 32.557 |
| STOMA1000047 | 0 | 0 | 0 | 7.637 | 0 | 0 | 0 |
| STOMA2000121 | 4.416 | 0 | 0 | 0 | 0 | 0 | 0 |
| STOMA2000289 | 9.873 | 0 | 0 | 0 | 0 | 0 | 0 |
| STOMA2000396 | 0 | 0 | 0 | 0 | 0 | 0 | 6.402 |
| STOMA2000482 | 0 | 0 | 0 | 0 | 0 | 28.412 | 0 |
| STOMA2002166 | 0 | 2.126 | 16.835 | 0 | 0 | 0 | 0 |
| STOMA2006780 | 0 | 0 | 0 | 0 | 0 | 0 | 10.791 |
| SYNOV1000049 | 0 | 0 | 0 | 52.773 | 0 | 0 | 0 |
| SYNOV1000118 | 15.338 | 0 | 0 | 0 | 0 | 0 | 10.515 |
| SYNOV1000124 | 0 | 1.011 | 0 | 2.681 | 0 | 0 | 3.455 |
| SYNOV2001033 | 0 | 1.090 | 0 | 1.445 | 0 | 0 | 0.745 |
| SYNOV2001144 | 0 | 0 | 0 | 0 | 0 | 10.424 | 0 |
| SYNOV2001374 | 6.638 | 0 | 0 | 4.414 | 0 | 0 | 0 |
| SYNOV2005216 | 0 | 0 | 0 | 0 | 0 | 0 | 12.130 |
| SYNOV4007671 | 2.657 | 0 | 42.189 | 0 | 0 | 0 | 0 |
| SYNOV4009129 | 0 | 0 | 0 | 0 | 0 | 0 | 9.644 |
| SYNOV4009298 | 0 | 0 | 0 | 0 | 0 | 0 | 36.547 |
| T1ESE2000904 | 0 | 0 | 0 | 11.128 | 0 | 0 | 0 |
| TESOP1000035 | 0 | 0 | 0 | 0 | 0 | 0 | 5.494 |
| TESOP2002273 | 0 | 0 | 0 | 9.782 | 0 | 0 | 15.126 |
| TESOP2002451 | 0 | 0 | 0 | 0 | 0 | 0 | 5.902 |
| TESOP2007384 | 0 | 0 | 0 | 0 | 0 | 44.382 | 0 |
| TESTI1000023 | 6.079 | 0 | 0 | 0 | 0 | 0 | 2.084 |
| TESTI1000051 | 0 | 0 | 0 | 12.552 | 0 | 0 | 0 |
| TESTI1000096 | 0 | 0 | 0 | 42.162 | 0 | 0 | 0 |
| TESTI1000142 | 0 | 0 | 0 | 0 | 0 | 0 | 8.382 |
| TESTI1000266 | 0 | 0 | 0 | 0 | 0 | 0 | 65.522 |
| TESTI2000172 | 0 | 0 | 0 | 20.618 | 0 | 0 | 0 |
| TESTI2000179 | 0 | 0 | 0 | 0 | 0 | 0 | 45.508 |
| TESTI2000184 | 0 | 4.108 | 0 | 5.449 | 0 | 0 | 5.617 |
| TESTI2000598 | 0 | 0 | 0 | 12.107 | 0 | 0 | 49.922 |
| TESTI2000627 | 0 | 0 | 0 | 0 | 0 | 0 | 26.175 |
| TESTI2000784 | 0 | 0 | 0 | 16.432 | 0 | 0 | 5.647 |
| TESTI2000874 | 45.303 | 0 | 0 | 0 | 0 | 0 | 0 |
| TESTI2000970 | 0 | 0 | 0 | 0 | 0 | 0 | 12.078 |
| TESTI2001099 | 0 | 2.671 | 0 | 0 | 0 | 0 | 0.609 |
| TESTI2001269 | 0 | 0.992 | 0 | 1.316 | 0 | 4.023 | 0.678 |
| TESTI2001511 | 0 | 0 | 0 | 8.433 | 0 | 0 | 0 |
| TESTI2001613 | 0 | 0 | 0 | 0 | 0 | 0 | 16.971 |
| TESTI2001869 | 0 | 0 | 0 | 0 | 0 | 0 | 29.647 |
| TESTI2001985 | 21.274 | 0 | 0 | 0 | 0 | 0 | 7.293 |
| TESTI2002149 | 0 | 0 | 0 | 4.031 | 0 | 0 | 0 |
| TESTI2002365 | 0 | 7.938 | 0 | 2.632 | 0 | 0 | 1.357 |
| TESTI2002369 | 0 | 27.307 | 0 | 36.216 | 0 | 0 | 0 |
| TESTI2002707 | 0 | 0 | 0 | 0 | 0 | 0 | 6.175 |
| TESTI2002866 | 0 | 19.335 | 0 | 0 | 0 | 0 | 0 |
| TESTI2003127 | 0 | 0 | 0 | 0 | 0 | 0 | 13.265 |
| TESTI2003280 | 0 | 0 | 0 | 0 | 0 | 0 | 5.096 |
| TESTI2003413 | 0 | 0 | 0 | 6.275 | 0 | 0 | 3.234 |
| TESTI2003533 | 9.426 | 0 | 0 | 0 | 0 | 0 | 0 |
| TESTI2004031 | 2.906 | 0 | 0 | 0 | 0 | 0 | 2.490 |
| TESTI2004122 | 0 | 0 | 87.855 | 0 | 0 | 0 | 0 |
| TESTI2004153 | 31.445 | 0 | 0 | 10.456 | 0 | 0 | 0 |
| TESTI2004391 | 15.305 | 7.674 | 0 | 0 | 0 | 0 | 5.246 |
| TESTI2004734 | 0 | 0 | 0 | 0 | 0 | 0 | 42.599 |
| TESTI2004737 | 0 | 0 | 0 | 0 | 0 | 0 | 2.200 |
| TESTI2004929 | 10.290 | 0 | 0 | 0 | 0 | 0 | 0 |
| TESTI2005395 | 0 | 0 | 0 | 0 | 0 | 0 | 48.724 |
| TESTI2005396 | 0 | 26.815 | 0 | 35.563 | 0 | 0 | 18.331 |
| TESTI2005408 | 0 | 3.220 | 0 | 0 | 0 | 0 | 2.201 |
| TESTI2005731 | 0 | 6.004 | 0 | 0 | 0 | 0 | 0 |
| TESTI2005742 | 0 | 0 | 0 | 0 | 0 | 0 | 25.334 |
| TESTI2005743 | 0 | 0 | 0 | 0 | 0 | 0 | 2.729 |
| TESTI2005784 | 0 | 5.405 | 0 | 0 | 0 | 0 | 7.390 |
| TESTI2006120 | 0 | 17.639 | 0 | 0 | 0 | 0 | 0 |
| TESTI2006383 | 14.689 | 0 | 0 | 9.768 | 0 | 0 | 0 |
| TESTI2006588 | 1.962 | 0.984 | 0 | 0 | 0 | 0 | 1.345 |
| TESTI2006615 | 0 | 0 | 0 | 11.123 | 0 | 0 | 0 |
| TESTI2006748 | 0 | 0 | 0 | 8.291 | 0 | 0 | 4.273 |
| TESTI2006872 | 0 | 19.972 | 0 | 0 | 0 | 0 | 0 |
| TESTI2007211 | 0 | 0 | 0 | 0 | 0 | 0 | 4.103 |
| TESTI2007464 | 0 | 7.289 | 0 | 19.333 | 0 | 0 | 0 |
| TESTI2007998 | 0 | 0 | 0 | 0 | 0 | 0 | 1.964 |
| TESTI2008020 | 13.899 | 0 | 0 | 0 | 0 | 0 | 0 |
| TESTI2008240 | 0 | 0 | 0 | 0 | 0 | 1.843 | 1.243 |
| TESTI2008835 | 0 | 0 | 0 | 0 | 0 | 79.966 | 0 |
| TESTI2009388 | 72.663 | 0 | 0 | 0 | 0 | 0 | 0 |
| TESTI2009402 | 0 | 16.660 | 0 | 0 | 0 | 0 | 0 |
| TESTI2009474 | 0 | 0 | 0 | 0 | 0 | 0 | 7.530 |
| TESTI2009497 | 0 | 0 | 0 | 0 | 0 | 0 | 65.522 |
| TESTI2009520 | 0 | 0 | 0 | 3.615 | 0 | 0 | 0 |
| TESTI2009577 | 0 | 0 | 0 | 4.260 | 0 | 0 | 2.196 |
| TESTI2009785 | 5.200 | 2.607 | 0 | 6.916 | 0 | 0 | 5.347 |
| TESTI2010513 | 0 | 0 | 0 | 0 | 0 | 0 | 2.440 |
| TESTI2010617 | 0 | 0 | 0 | 16.783 | 0 | 0 | 8.651 |
| TESTI2010724 | 0 | 6.817 | 0 | 0 | 0 | 0 | 0 |
| TESTI2011680 | 0 | 13.594 | 0 | 18.029 | 0 | 0 | 18.586 |
| TESTI2011683 | 0 | 0 | 0 | 0 | 0 | 0 | 40.221 |
| TESTI2012155 | 0 | 0 | 0 | 15.444 | 0 | 0 | 7.961 |
| TESTI2013295 | 19.306 | 0 | 0 | 12.839 | 0 | 0 | 13.236 |
| TESTI2014318 | 0 | 52.242 | 0 | 0 | 0 | 0 | 0 |
| TESTI2015213 | 3.720 | 0.933 | 14.768 | 0 | 0 | 0 | 0 |
| TESTI2015246 | 0 | 0 | 0 | 28.533 | 0 | 0 | 0 |
| TESTI2015626 | 2.384 | 0 | 9.463 | 0 | 0 | 0 | 0.409 |
| TESTI2017645 | 0 | 0 | 0 | 0 | 0 | 0 | 41.342 |
| TESTI2017954 | 0 | 1.204 | 0 | 3.193 | 0 | 0 | 1.646 |
| TESTI2018014 | 0 | 0 | 0 | 9.290 | 0 | 28.407 | 0 |
| TESTI2018462 | 0 | 0 | 0 | 0 | 0 | 0 | 7.021 |
| TESTI2018867 | 0 | 0 | 0 | 0 | 0 | 20.987 | 0 |
| TESTI2020510 | 0 | 0 | 0 | 0 | 0 | 0 | 26.958 |
| TESTI2020525 | 0 | 0 | 0 | 78.664 | 0 | 0 | 0 |
| TESTI2021124 | 0 | 0 | 0 | 13.774 | 0 | 0 | 7.100 |
| TESTI2021447 | 0 | 0 | 0 | 0 | 0 | 0 | 32.208 |
| TESTI2021851 | 68.568 | 0 | 0 | 0 | 0 | 0 | 0 |
| TESTI2022179 | 0 | 19.086 | 0 | 0 | 0 | 0 | 0 |
| TESTI2023414 | 0 | 0 | 0 | 39.241 | 0 | 0 | 5.057 |
| TESTI2025757 | 0 | 0 | 0 | 40.866 | 0 | 0 | 0 |
| TESTI2026215 | 0 | 0 | 0 | 0 | 0 | 0 | 8.605 |
| TESTI2026525 | 15.768 | 0 | 0 | 0 | 0 | 0 | 0 |
| TESTI2027496 | 0 | 17.073 | 0 | 0 | 0 | 0 | 0 |
| TESTI2029227 | 0 | 0 | 0 | 14.307 | 0 | 0 | 14.749 |
| TESTI2034940 | 1.888 | 0.947 | 0 | 0 | 0 | 0 | 0 |
| TESTI2036969 | 0 | 6.529 | 0 | 0 | 0 | 0 | 8.927 |
| TESTI2039177 | 0 | 7.531 | 0 | 0 | 0 | 0 | 0 |
| TESTI2041734 | 0 | 0 | 0 | 0 | 0 | 0 | 48.724 |
| TESTI2044276 | 0 | 17.235 | 0 | 0 | 0 | 0 | 11.782 |
| TESTI2046456 | 0 | 2.523 | 0 | 5.578 | 0 | 0 | 2.300 |
| TESTI2053723 | 0 | 0 | 0 | 0 | 0 | 0 | 5.624 |
| TESTI4000014 | 0 | 0.974 | 0 | 3.443 | 0 | 2.632 | 2.440 |
| TESTI4000434 | 0 | 0 | 0 | 0 | 0 | 0 | 16.243 |
| TESTI4002072 | 0 | 6.068 | 0 | 8.048 | 0 | 0 | 4.148 |
| TESTI4002647 | 0 | 0 | 0 | 0 | 0 | 0 | 65.522 |
| TESTI4002799 | 0 | 1.605 | 0 | 4.258 | 0 | 0 | 1.646 |
| TESTI4005133 | 0 | 0 | 0 | 0 | 0 | 0 | 14.814 |
| TESTI4005399 | 0 | 0 | 0 | 0 | 0 | 0 | 9.686 |
| TESTI4006326 | 0 | 0 | 0 | 0 | 0 | 0 | 48.724 |
| TESTI4007965 | 0 | 32.797 | 0 | 0 | 0 | 0 | 0 |
| TESTI4008058 | 0 | 0 | 0 | 0 | 0 | 0 | 21.899 |
| TESTI4009286 | 0 | 0 | 0 | 1.747 | 0 | 0 | 0 |
| TESTI4009454 | 14.566 | 0 | 0 | 9.687 | 0 | 0 | 0 |
| TESTI4010851 | 0 | 1.987 | 0 | 5.270 | 0 | 0 | 4.075 |
| TESTI4012960 | 0 | 0 | 0 | 71.770 | 0 | 0 | 18.497 |
| TESTI4013441 | 0.568 | 0.285 | 0 | 0.378 | 0 | 1.156 | 1.169 |
| TESTI4014175 | 0 | 0 | 0 | 0 | 0 | 0 | 33.186 |
| TESTI4015442 | 0 | 0 | 0 | 48.593 | 0 | 0 | 25.047 |
| TESTI4017714 | 0 | 0 | 0 | 0 | 0 | 0 | 48.724 |
| TESTI4018436 | 0 | 9.457 | 0 | 0 | 0 | 0 | 0 |
| TESTI4020596 | 0 | 0 | 0 | 0 | 0 | 0 | 65.522 |
| TESTI4024740 | 0 | 0 | 0 | 43.356 | 0 | 0 | 0 |
| TESTI4029671 | 0 | 0 | 0 | 44.826 | 0 | 0 | 0 |
| TESTI4032913 | 0 | 0 | 0 | 0 | 0 | 59.736 | 0 |
| TESTI4035770 | 0 | 0 | 0 | 0 | 0 | 0 | 65.522 |
| TESTI4037156 | 2.006 | 1.509 | 0 | 4.669 | 0 | 0 | 0.688 |
| TESTI4038284 | 0 | 3.347 | 0 | 8.877 | 0 | 0 | 4.576 |
| TESTI4043140 | 0 | 0 | 0 | 0 | 0 | 0 | 3.445 |
| TESTI4043223 | 0 | 0 | 0 | 0 | 0 | 0 | 34.381 |
| THYMU1000002 | 0 | 1.076 | 0 | 1.427 | 0 | 4.362 | 0 |
| THYMU1000016 | 0 | 0.702 | 0 | 1.863 | 0 | 0 | 0.480 |
| THYMU1000041 | 0 | 0 | 0 | 0 | 0 | 17.525 | 0 |
| THYMU1000083 | 0 | 5.449 | 0 | 0 | 0 | 22.099 | 7.450 |
| THYMU1000103 | 0 | 6.408 | 0 | 4.249 | 0 | 0 | 0 |
| THYMU1000144 | 0 | 0 | 0 | 0 | 0 | 0 | 11.247 |
| THYMU1000329 | 19.315 | 0 | 0 | 0 | 0 | 0 | 0 |
| THYMU1000374 | 0 | 0 | 0 | 7.220 | 0 | 0 | 1.861 |
| THYMU1000428 | 0 | 0 | 0 | 1.370 | 0 | 0 | 0 |
| THYMU1000499 | 20.685 | 0 | 0 | 0 | 0 | 0 | 0 |
| THYMU2000369 | 0 | 0 | 0 | 0 | 0 | 0 | 22.334 |
| THYMU2000436 | 3.339 | 0 | 0 | 0 | 0 | 0 | 0 |
| THYMU2000702 | 0 | 11.372 | 0 | 0 | 0 | 0 | 0 |
| THYMU2000946 | 5.243 | 5.258 | 0 | 3.487 | 0 | 0 | 3.595 |
| THYMU2001007 | 0 | 0 | 0 | 0 | 0 | 19.994 | 0 |
| THYMU2001926 | 0 | 35.271 | 0 | 0 | 0 | 0 | 0 |
| THYMU2002583 | 0 | 0 | 0 | 1.249 | 0 | 0 | 0 |
| THYMU2002841 | 0 | 5.274 | 0 | 0 | 0 | 0 | 0 |
| THYMU2003046 | 0 | 0 | 0 | 0 | 0 | 14.168 | 0 |
| THYMU2003419 | 1.820 | 0 | 0 | 1.210 | 0 | 0 | 0 |
| THYMU2003446 | 0 | 4.334 | 0 | 0 | 0 | 0 | 0 |
| THYMU2003981 | 0 | 0 | 0 | 0 | 0 | 0 | 0.649 |
| THYMU2004152 | 0 | 0 | 0 | 0 | 0 | 0 | 1.233 |
| THYMU2004344 | 4.630 | 2.321 | 0 | 6.158 | 0 | 0 | 6.348 |
| THYMU2004916 | 0 | 0 | 0 | 3.761 | 0 | 0 | 0 |
| THYMU2005546 | 0 | 0 | 0 | 0 | 0 | 0 | 2.718 |
| THYMU2006505 | 0 | 0 | 0 | 0 | 0 | 0 | 6.783 |
| THYMU2006813 | 0 | 0 | 0 | 0 | 0 | 0 | 3.931 |
| THYMU2007036 | 0 | 0 | 0 | 0 | 0 | 0 | 19.184 |
| THYMU2007065 | 14.696 | 0 | 0 | 0 | 0 | 0 | 0 |
| THYMU2007112 | 0 | 0 | 0 | 0 | 0 | 0 | 11.363 |
| THYMU2007339 | 0 | 0 | 0 | 74.295 | 0 | 0 | 0 |
| THYMU2007694 | 0 | 0 | 0 | 0 | 0 | 0 | 25.756 |
| THYMU2007886 | 0 | 0 | 0 | 3.337 | 0 | 0 | 0 |
| THYMU2008049 | 0 | 0 | 0 | 0 | 0 | 0 | 56.118 |
| THYMU2008321 | 20.953 | 0 | 0 | 0 | 0 | 0 | 3.591 |
| THYMU2009592 | 0 | 0 | 0 | 0 | 0 | 0 | 34.320 |
| THYMU2010448 | 0 | 19.245 | 0 | 0 | 0 | 0 | 6.578 |
| THYMU2011482 | 0 | 0 | 0 | 0 | 0 | 0 | 3.813 |
| THYMU2011875 | 81.295 | 0 | 0 | 0 | 0 | 0 | 0 |
| THYMU2011881 | 0 | 0 | 0 | 0 | 0 | 0 | 12.950 |
| THYMU2012002 | 0 | 0 | 0 | 0 | 0 | 0 | 31.541 |
| THYMU2012024 | 0 | 0 | 0 | 0 | 0 | 0 | 3.702 |
| THYMU2012625 | 0 | 0 | 0 | 0 | 0 | 7.656 | 0 |
| THYMU2013136 | 0 | 2.973 | 0 | 0 | 0 | 0 | 2.032 |
| THYMU2013916 | 0 | 2.016 | 0 | 0 | 0 | 0 | 0 |
| THYMU2014167 | 0 | 0 | 0 | 0 | 0 | 0 | 20.480 |
| THYMU2015762 | 0 | 0 | 0 | 0 | 0 | 0 | 2.463 |
| THYMU2016204 | 0 | 0 | 0 | 0 | 0 | 0 | 59.836 |
| THYMU2017158 | 0 | 0 | 0 | 0 | 0 | 0 | 59.836 |
| THYMU2019021 | 0 | 0 | 0 | 11.713 | 0 | 0 | 0 |
| THYMU2025939 | 0 | 0 | 0 | 0 | 0 | 0 | 19.812 |
| THYMU2026350 | 0 | 0 | 0 | 0 | 0 | 0 | 59.836 |
| THYMU2027125 | 1.297 | 0.651 | 0 | 0.431 | 0 | 0 | 0 |
| THYMU2031341 | 0 | 0 | 0 | 0 | 0 | 0 | 4.286 |
| THYMU2032825 | 0 | 0 | 0 | 0 | 0 | 0 | 11.550 |
| THYMU2034917 | 0 | 0 | 0 | 46.831 | 0 | 0 | 0 |
| THYMU3001939 | 0 | 0 | 0 | 0 | 0 | 0 | 59.836 |
| THYMU3002578 | 0 | 0 | 0 | 0 | 0 | 0 | 38.004 |
| THYMU3003309 | 0 | 0 | 0 | 0 | 0 | 0 | 36.117 |
| THYMU3008105 | 0 | 0 | 0 | 0 | 0 | 0 | 25.159 |
| THYMU3011827 | 0 | 0 | 0 | 0 | 0 | 0 | 28.855 |
| THYMU3015759 | 0 | 4.092 | 0 | 0 | 0 | 0 | 1.399 |
| THYMU3026000 | 0 | 0 | 0 | 0 | 0 | 0 | 30.477 |
| THYMU3032798 | 0 | 0 | 0 | 0 | 0 | 0 | 4.804 |
| THYMU3033626 | 0 | 0 | 0 | 0 | 0 | 0 | 6.982 |
| THYMU3034671 | 0 | 0 | 0 | 0 | 0 | 0 | 5.926 |
| THYMU3041428 | 0 | 0.463 | 0 | 0.614 | 0 | 0 | 0 |
| THYMU3047115 | 0 | 0.747 | 0 | 0 | 0 | 57.541 | 0 |
| TKIDN1000044 | 0 | 0 | 0 | 0 | 0 | 0 | 11.633 |
| TKIDN1000192 | 0 | 0 | 0 | 13.315 | 0 | 0 | 6.863 |
| TKIDN2000127 | 0 | 32.928 | 0 | 0 | 0 | 0 | 0 |
| TKIDN2000246 | 0 | 1.106 | 0 | 0 | 0 | 0 | 0 |
| TKIDN2001529 | 0 | 0 | 0 | 0 | 0 | 0 | 25.127 |
| TKIDN2002738 | 0 | 0 | 0 | 0 | 0 | 3.091 | 0 |
| TKIDN2003078 | 0 | 0 | 0 | 33.378 | 0 | 0 | 0 |
| TKIDN2005487 | 0 | 0 | 0 | 0 | 0 | 0 | 1.785 |
| TKIDN2009641 | 0 | 0 | 0 | 0 | 0 | 0 | 7.182 |
| TKIDN2010812 | 0 | 0 | 0 | 0 | 0 | 0 | 13.244 |
| TKIDN2010934 | 0 | 0 | 0 | 0 | 0 | 0 | 25.127 |
| TKIDN2011289 | 0 | 0 | 0 | 14.408 | 0 | 0 | 0 |
| TKIDN2013287 | 0 | 0 | 0 | 0 | 0 | 0 | 21.501 |
| TKIDN2014964 | 0 | 19.916 | 0 | 0 | 0 | 0 | 0 |
| TKIDN2015285 | 0 | 18.041 | 0 | 0 | 0 | 0 | 0 |
| TKIDN2015423 | 0 | 0 | 0 | 1.534 | 0 | 0 | 4.745 |
| TLIVE2002046 | 0 | 3.298 | 0 | 0 | 0 | 0 | 2.255 |
| TLIVE2002690 | 0 | 0 | 0 | 0 | 0 | 44.414 | 0 |
| TRACH1000030 | 2.500 | 0 | 0 | 0 | 0 | 0 | 0.857 |
| TRACH1000106 | 43.031 | 0 | 0 | 0 | 0 | 0 | 0 |
| TRACH1000181 | 0 | 0 | 0 | 0 | 0 | 34.915 | 5.885 |
| TRACH1000205 | 0 | 7.152 | 0 | 0 | 0 | 0 | 4.889 |
| TRACH2000079 | 0 | 0 | 0 | 0 | 0 | 7.985 | 1.346 |
| TRACH2000237 | 0 | 9.770 | 0 | 25.916 | 0 | 0 | 0 |
| TRACH2000248 | 0 | 0 | 0 | 0 | 0 | 0 | 3.467 |
| TRACH2000321 | 1.781 | 0.893 | 0 | 1.184 | 0 | 0 | 7.324 |
| TRACH2000420 | 0 | 6.094 | 0 | 0 | 0 | 0 | 4.166 |
| TRACH2000461 | 0 | 6.231 | 0 | 8.264 | 0 | 0 | 6.390 |
| TRACH2000472 | 3.095 | 0 | 0 | 4.116 | 0 | 0 | 0 |
| TRACH2000702 | 0 | 7.134 | 0 | 9.462 | 0 | 0 | 0 |
| TRACH2000780 | 3.168 | 7.941 | 0 | 6.319 | 0 | 0 | 1.086 |
| TRACH2000920 | 0 | 0 | 0 | 7.990 | 0 | 0 | 16.474 |
| TRACH2000926 | 0 | 0 | 0 | 0 | 0 | 20.562 | 0 |
| TRACH2000959 | 0 | 0.444 | 0 | 0 | 0 | 0 | 0.607 |
| TRACH2001021 | 0 | 0.761 | 0 | 1.009 | 0 | 0 | 0 |
| TRACH2001109 | 0 | 0.380 | 0 | 1.009 | 0 | 0 | 1.560 |
| TRACH2001289 | 1.232 | 2.471 | 0 | 2.458 | 0 | 0 | 2.956 |
| TRACH2001314 | 0 | 0 | 0 | 17.621 | 0 | 0 | 0 |
| TRACH2001463 | 0 | 11.128 | 0 | 7.379 | 0 | 0 | 3.804 |
| TRACH2001478 | 0 | 1.055 | 0 | 0 | 0 | 0 | 0.721 |
| TRACH2001607 | 0 | 0 | 0 | 0 | 0 | 0 | 1.248 |
| TRACH2001612 | 0 | 7.259 | 0 | 9.627 | 0 | 0 | 0 |
| TRACH2001810 | 0 | 1.411 | 0 | 1.872 | 0 | 0 | 2.894 |
| TRACH2001898 | 0 | 0 | 0 | 2.457 | 0 | 0 | 1.266 |
| TRACH2002537 | 0 | 0 | 0 | 0 | 0 | 0 | 2.304 |
| TRACH2002803 | 0 | 0 | 0 | 0 | 0 | 0 | 2.589 |
| TRACH2003272 | 0 | 0 | 0 | 0 | 0 | 0 | 9.205 |
| TRACH2003323 | 0 | 0 | 0 | 0 | 0 | 13.116 | 4.422 |
| TRACH2003347 | 5.758 | 0 | 0 | 3.829 | 0 | 0 | 3.947 |
| TRACH2005800 | 0 | 0 | 0 | 2.899 | 0 | 0 | 0 |
| TRACH2005811 | 3.822 | 0 | 0 | 0 | 0 | 0 | 0 |
| TRACH2007358 | 0 | 0 | 0 | 0 | 0 | 86.807 | 0 |
| TRACH2007399 | 0 | 1.712 | 0 | 0 | 0 | 0 | 0.585 |
| TRACH2008081 | 0 | 0 | 0 | 0 | 0 | 0 | 1.587 |
| TRACH2008130 | 0 | 0 | 0 | 0 | 0 | 0 | 52.585 |
| TRACH2008300 | 0 | 0 | 0 | 0 | 0 | 0 | 6.327 |
| TRACH2008472 | 0 | 5.703 | 0 | 0 | 0 | 0 | 3.898 |
| TRACH2010771 | 0 | 61.866 | 0 | 0 | 0 | 0 | 0 |
| TRACH2011290 | 0 | 0 | 0 | 0 | 0 | 0 | 52.585 |
| TRACH2011894 | 0 | 16.160 | 0 | 0 | 0 | 0 | 0 |
| TRACH2012298 | 0 | 2.579 | 0 | 3.420 | 0 | 0 | 0 |
| TRACH2013123 | 0 | 21.855 | 0 | 28.985 | 0 | 0 | 0 |
| TRACH2013552 | 0 | 0 | 0 | 0 | 0 | 0 | 12.906 |
| TRACH2014124 | 0 | 0 | 0 | 0 | 0 | 0 | 2.565 |
| TRACH2015823 | 0 | 7.950 | 0 | 0 | 0 | 0 | 5.435 |
| TRACH2018446 | 0 | 0 | 0 | 0 | 0 | 0 | 5.195 |
| TRACH2025535 | 4.208 | 3.165 | 0 | 1.399 | 0 | 0 | 0 |
| TRACH3000134 | 0 | 0 | 0 | 43.581 | 0 | 0 | 0 |
| TRACH3000692 | 0 | 0 | 0 | 11.296 | 0 | 0 | 0 |
| TRACH3002192 | 4.520 | 2.267 | 0 | 0 | 0 | 0 | 8.522 |
| TRACH3003547 | 0 | 0 | 0 | 0 | 0 | 0 | 5.253 |
| TRACH3003872 | 0 | 0 | 0 | 13.230 | 0 | 0 | 0 |
| TRACH3004424 | 0 | 30.905 | 0 | 0 | 0 | 0 | 0 |
| TRACH3004721 | 10.536 | 5.283 | 0 | 14.013 | 0 | 0 | 3.611 |
| TRACH3005211 | 0 | 0 | 0 | 44.416 | 0 | 0 | 22.894 |
| TRACH3005294 | 0 | 0 | 0 | 0 | 0 | 0 | 4.614 |
| TRACH3006717 | 0 | 6.668 | 0 | 0 | 0 | 0 | 4.558 |
| TRACH3007625 | 4.260 | 2.136 | 0 | 2.833 | 0 | 0 | 4.381 |
| TRACH3008093 | 0 | 8.902 | 0 | 0 | 0 | 0 | 9.128 |
| TRACH3008535 | 0 | 0 | 0 | 68.270 | 0 | 0 | 0 |
| TRACH3008713 | 0 | 0 | 0 | 68.270 | 0 | 0 | 0 |
| TRACH3009008 | 0 | 0 | 0 | 11.807 | 0 | 0 | 0 |
| TRACH3014316 | 0 | 0 | 0 | 0 | 0 | 0 | 52.585 |
| TRACH3016805 | 0 | 0 | 0 | 10.851 | 0 | 0 | 11.187 |
| TRACH3021544 | 0 | 0 | 0 | 0 | 0 | 0 | 52.585 |
| TRACH3026303 | 0 | 0 | 0 | 27.016 | 0 | 0 | 20.888 |
| TRACH3028855 | 0 | 0 | 0 | 0 | 0 | 0 | 27.714 |
| TRACH3037067 | 0 | 2.921 | 0 | 0 | 0 | 0 | 0 |
| TUTER1000122 | 0 | 0 | 0 | 0 | 0 | 0 | 8.109 |
| TUTER2000057 | 0 | 7.539 | 0 | 0 | 0 | 0 | 0 |
| UMVEN2000152 | 0 | 0 | 0 | 0 | 0 | 0 | 2.935 |
| UMVEN2000354 | 0 | 0 | 0 | 1.985 | 0 | 0 | 0 |
| UMVEN2000453 | 0 | 0 | 0 | 1.258 | 0 | 3.848 | 0 |
| UTERU1000106 | 0 | 10.472 | 0 | 0 | 0 | 0 | 0 |
| UTERU1000182 | 0 | 2.948 | 0 | 0 | 0 | 0 | 0 |
| UTERU1000384 | 0 | 12.952 | 0 | 0 | 0 | 0 | 0 |
| UTERU2000095 | 0 | 2.256 | 0 | 0 | 0 | 3.050 | 1.028 |
| UTERU2000263 | 0 | 0.931 | 0 | 1.235 | 0 | 0 | 0 |
| UTERU2000300 | 0 | 0 | 0 | 0 | 0 | 0 | 6.127 |
| UTERU2000424 | 0 | 0 | 0 | 0 | 0 | 0 | 1.055 |
| UTERU2000696 | 0 | 0 | 0 | 6.858 | 0 | 0 | 0 |
| UTERU2001607 | 0 | 2.681 | 0 | 0 | 0 | 0 | 1.833 |
| UTERU2002294 | 0 | 9.896 | 0 | 0 | 0 | 0 | 0 |
| UTERU2002410 | 0 | 1.067 | 0 | 0 | 0 | 0 | 0 |
| UTERU2002662 | 6.448 | 3.233 | 0 | 12.865 | 0 | 0 | 2.210 |
| UTERU2003411 | 0 | 0 | 0 | 0 | 99.640 | 0 | 0 |
| UTERU2004197 | 0 | 7.308 | 0 | 0 | 0 | 0 | 2.498 |
| UTERU2004807 | 0 | 0 | 0 | 0 | 0 | 7.404 | 0 |
| UTERU2005354 | 7.928 | 3.975 | 0 | 5.272 | 0 | 0 | 2.717 |
| UTERU2006593 | 0 | 8.050 | 0 | 10.676 | 0 | 0 | 0 |
| UTERU2007924 | 9.693 | 0 | 0 | 0 | 0 | 0 | 0 |
| UTERU2008085 | 2.291 | 0.164 | 2.599 | 0.435 | 0 | 0 | 0.112 |
| UTERU2008302 | 0 | 0 | 0 | 3.220 | 0 | 9.846 | 0 |
| UTERU2008653 | 0 | 0 | 0 | 0 | 0 | 0 | 51.019 |
| UTERU2009335 | 10.992 | 0 | 0 | 0 | 0 | 0 | 3.768 |
| UTERU2009435 | 0 | 0 | 0 | 12.888 | 0 | 0 | 0 |
| UTERU2009972 | 0 | 0 | 0 | 0 | 0 | 0 | 39.610 |
| UTERU2010226 | 28.588 | 0 | 0 | 0 | 0 | 0 | 0 |
| UTERU2010417 | 1.143 | 1.146 | 0 | 3.799 | 0 | 4.647 | 1.567 |
| UTERU2011621 | 0 | 0 | 0 | 0 | 0 | 0 | 12.335 |
| UTERU2012230 | 0 | 3.198 | 0 | 4.241 | 0 | 0 | 0 |
| UTERU2012286 | 9.182 | 9.208 | 0 | 18.318 | 0 | 0 | 0 |
| UTERU2012526 | 0 | 0 | 0 | 22.255 | 0 | 0 | 0 |
| UTERU2012767 | 0 | 0 | 0 | 25.668 | 0 | 0 | 6.615 |
| UTERU2012938 | 0 | 0 | 0 | 0 | 0 | 0 | 51.019 |
| UTERU2013262 | 0 | 0 | 0 | 44.229 | 0 | 0 | 0 |
| UTERU2013491 | 0 | 0 | 0 | 0 | 0 | 86.071 | 0 |
| UTERU2013586 | 0 | 0 | 0 | 0 | 0 | 0 | 8.185 |
| UTERU2014167 | 0 | 1.656 | 0 | 0 | 0 | 0 | 0 |
| UTERU2014678 | 0 | 0 | 0 | 0 | 0 | 0 | 51.019 |
| UTERU2014898 | 5.514 | 0 | 0 | 0 | 0 | 0 | 0 |
| UTERU2015653 | 0 | 1.060 | 0 | 0 | 0 | 4.300 | 0 |
| UTERU2016426 | 0 | 0 | 0 | 30.630 | 0 | 0 | 0 |
| UTERU2016669 | 29.924 | 0 | 0 | 0 | 0 | 0 | 0 |
| UTERU2016799 | 0 | 0 | 0 | 0 | 0 | 0 | 7.224 |
| UTERU2018884 | 0 | 0 | 0 | 0 | 0 | 0 | 1.925 |
| UTERU2019005 | 0 | 0 | 0 | 0 | 0 | 0 | 8.023 |
| UTERU2019096 | 16.696 | 4.186 | 0 | 0 | 0 | 0 | 11.447 |
| UTERU2023175 | 5.396 | 0 | 0 | 7.176 | 0 | 0 | 1.850 |
| UTERU2024969 | 0 | 0 | 0 | 7.740 | 0 | 0 | 0 |
| UTERU2028734 | 0 | 0 | 0 | 0 | 0 | 0 | 27.272 |
| UTERU3000727 | 0 | 41.026 | 0 | 0 | 0 | 0 | 0 |
| UTERU3000899 | 0 | 0 | 0 | 0 | 0 | 0 | 35.054 |
| UTERU3003660 | 0 | 0 | 0 | 17.745 | 0 | 0 | 9.147 |
| UTERU3004418 | 0 | 0 | 0 | 0 | 0 | 0 | 36.166 |
| UTERU3010409 | 0 | 0 | 0 | 0 | 0 | 0 | 8.599 |

[0697] Genes whose expression levels were negligibly low in each of the above-described libraries are shown with their clone names below.

[0698] 3NB691000018, 3NB691000085, 3NB691000113, 3NB691000191, 3NB692000012, 3NB692000029, 3NB692000102, 3NB692000154, 3NB692000276, 3NB692000305, 3NB692000330, 3NB692000429, 3NB692000484, 3NB692000529, 3NB692000973, 3NB692001034, 3NB692001040, 3NB692001123, 3NB692001267, 3NB692001339, 3NB692001349, 3NB692001366, 3NB692001408, 3NB692001433, 3NB692001459, 3NB692001471, 3NB692001501, 3NB692001507, 3NB692001511, 3NB692001519, 3NB692001520, 3NB692001538, 3NB692001548, 3NB692001557, 3NB692001637, 3NB692001853, 3NB692001861, 3NB692002051, 3NB692002365, 3NB692002685, 3NB692002806, 3NB692003538, 3NB692004045, 3NB692004724, 3NB692005439, 3NB692006952, 3NB692008178, 3NB692008729, ACTVT2000380, ADIPS1000064, ADIPS2000069, ADIPS2000088, ADIPS2000245, ADRGL1000018, ADRGL1000033, ADRGL1000038, ADRGL1000067, ADRGL1000111, ADRGL1000147, ADRGL1000160, ADRGL1000165, ADRGL1000182, ADRGL2000056, ADRGL2000064, ADRGL2000074, ADRGL2000085, ADRGL2000117, ADRGL2000142, ADRGL2000172, ADRGL2000248, ADRGL2000261, ADRGL2000323, ADRGL2000328, ADRGL2000353, ADRGL2000384, ADRGL2000428, ADRGL2000636, ADRGL2000644, ADRGL2000968, ADRGL2001119, ADRGL2001229, ADRGL2001287, ADRGL2001301, ADRGL2001354, ADRGL2001554, ADRGL2001651, ADRGL2001756, ADRGL2001830, ADRGL2001836, ADRGL2001854, ADRGL2002013, ADRGL2002029, ADRGL2002191, ADRGL2002260, ADRGL2002392, ADRGL2002753, ADRGL2002857, ADRGL2003017, ADRGL2003329, ADRGL2003552, ADRGL2003585, ADRGL2003638, ADRGL2003684, ADRGL2003773, ADRGL2003785, ADRGL2004031, ADRGL2004077, ADRGL2004451, ADRGL2004459, ADRGL2004676, ADRGL2004708, ADRGL2004724, ADRGL2004749, ADRGL2004770, ADRGL2004777, ADRGL2004833, ADRGL2005336, ADRGL2005564, ADRGL2005756, ADRGL2005838, ADRGL2005926, ADRGL2005961, ADRGL2006034, ADRGL2006124, ADRGL2006177, ADRGL2006193, ADRGL2006377, ADRGL2006677, ADRGL2006732, ADRGL2006767, ADRGL2006817, ADRGL2006846, ADRGL2006886, ADRGL2007080, ADRGL2007125, ADRGL2007283, ADRGL2007313, ADRGL2007357, ADRGL2007636, ADRGL2007651, ADRGL2007810, ADRGL2007877, ADRGL2007906, ADRGL2007974, ADRGL2008023, ADRGL2008331, ADRGL2008337, ADRGL2008535, ADRGL2008966, ADRGL2009146, ADRGL2009324, ADRGL2009489, ADRGL2009533, ADRGL2009691, ADRGL2009755, ADRGL2010152, ADRGL2010315, ADRGL2010594, ADRGL2010860, ADRGL2010974, ADRGL2011190, ADRGL2011330, ADRGL2012038, AHMSC1000138, ASTRO1000009, ASTRO1000018, ASTRO1000029, ASTRO1000096, ASTRO2000011, ASTRO2000014, ASTRO2000095, ASTRO2000141, ASTRO2000191, ASTRO2000278, ASTRO2000372, ASTRO2000403, ASTRO2000417, ASTRO2000482, ASTRO2000533, ASTRO2000653, ASTRO2000662, ASTRO2000725, ASTRO2001001, ASTRO2001008, ASTRO2001088, ASTRO2001122, ASTRO2001227, ASTRO2001249, ASTRO2001480, ASTRO2001806, ASTRO2002024, ASTRO2002035, ASTRO2002064, ASTRO2002459, ASTRO2002571, ASTRO2002632, ASTRO2002659, ASTRO2002720, ASTRO2002733, ASTRO2002743, ASTRO2002842, ASTRO2003024, ASTRO2003212, ASTRO2003574, ASTRO2003581, ASTRO2003740, ASTRO2003840, ASTRO2003925, ASTRO2003960, ASTRO2004051, ASTRO2004177, ASTRO2004217, ASTRO2004297, ASTRO2004584, ASTRO2004628, ASTRO2004751, ASTRO2004877, ASTRO2005008, ASTRO2005081, ASTRO2005096, ASTRO2005242, ASTRO2005273, ASTRO2005343, ASTRO2005360, ASTRO2005413, ASTRO2005557, ASTRO2005575, ASTRO2005593, ASTRO2005726, ASTRO2005863, ASTRO2005896, ASTRO2005902, ASTRO2006356, ASTRO2006475, ASTRO2006732, ASTRO2006747, ASTRO2006920, ASTRO2006952, ASTRO2007047, ASTRO2007221, ASTRO2007377, ASTRO2007515, ASTRO2007578, ASTRO2007643, ASTRO2007666, ASTRO2007948, ASTRO2007956, ASTRO2007962, ASTRO2008040, ASTRO2008239, ASTRO2008425, ASTRO2008508, ASTRO2008777, ASTRO2008895, ASTRO2008960, ASTRO2008972, ASTRO2009177, ASTRO2009333, ASTRO2009458, ASTRO2009526, ASTRO2009879, ASTRO2010072, ASTRO2010582, ASTRO2010615, ASTRO2010799, ASTRO2010962, ASTRO2011149, ASTRO2011426, ASTRO2011437, ASTRO2011461, ASTRO2011834, ASTRO2011893, ASTRO2013124, ASTRO2013671, ASTRO2013802, ASTRO2014135, ASTRO2014174, ASTRO2014211, ASTRO2014363, ASTRO2014392, ASTRO2014498, ASTRO2014561, ASTRO2014576, ASTRO2014863, ASTRO2014923, ASTRO2014961, ASTRO2015162, ASTRO2015185, ASTRO2015328, ASTRO2015987, ASTRO2016044, ASTRO2016114, ASTRO2016681, ASTRO2016847, ASTRO2016892, ASTRO2017348, ASTRO2017627, ASTRO2018169, ASTRO2018373, ASTRO2018540, ASTRO2019039, ASTRO2019171, ASTRO3000154, ASTRO3000172, ASTRO3000177, ASTRO3000301, ASTRO3000474, ASTRO3000482, BEAST2000454, BGGI11000123, BGGI11000193, BGGI11000285, BGGI12000022, BGGI12000067, BGGI12000161, BGGI12000544, BGGI12000693, BGGI12001241, BGGI12001247, BGGI12001714, BLADE1000176, BLADE2000181, BLADE2000256, BLADE2000340, BLADE2000389, BLADE2000463, BLADE2000492, BLADE2000579, BLADE2000640, BLADE2000866, BLADE2000938, BLADE2001031, BLADE2001133, BLADE2001138, BLADE2001141, BLADE2001371, BLADE2001458, BLADE2001575, BLADE2001753, BLADE2001935, BLADE2001940, BLADE2001987, BLADE2002073, BLADE2002310, BLADE2002730, BLADE2002738, BLADE2002744, BLADE2002782, BLADE2002947, BLADE2002972, BLADE2003474, BLADE2003916, BLADE2004345, BLADE2004389, BLADE2004462, BLADE2004628, BLADE2004670, BLADE2004722, BLADE2005036, BLADE2005038, BLADE2005229, BLADE2005459, BLADE2005792, BLADE2006043, BLADE2006412, BLADE2006415, BLADE2006607, BLADE2006826, BLADE2006849, BLADE2006947, BLADE2007033, BLADE2007043, BLADE2007589, BLADE2007666, BLADE2007722, BLADE2007735, BLADE2007744, BLADE2007799, BLADE2007923, BLADE2007935, BLADE2007958, BLADE2008281, BLADE2008398, BLADE2008454, BLADE2008479, BLADE2008539, BLADE2008809, BLADE2008995, BLADE2009452, BLADE2009479, BLADE2009593, BNGH41000104, BNGH41000118, BNGH41000169, BNGH41000177, BNGH41000190, BNGH41000216, BNGH41000235, BNGH42000130, BNGH42000132, BNGH42000405, BNGH42000532, BNGH42000675, BNGH42000791, BNGH42000815, BNGH42000994, BNGH42001247, BNGH42001406, BNGH42001576, BNGH42001724, BNGH42002244, BNGH42002387, BNGH42002487, BNGH42002489, BNGH42003529, BNGH42003570, BNGH42003641, BNGH42004076, BNGH42004291, BNGH42004538, BNGH42004679, BNGH42005017, BNGH42005235, BNGH42005504, BNGH42005968, BNGH42006226, BNGH42006234, BNGH42007037, BNGH42007366, BNGH42007594, BNGH42008199, BNGH42008510, BNGH42008649, BNGH42008832, BNGH42008850, BNGH42008943, BNGH42009021, BRACE1000047, BRACE1000051, BRACE1000065, BRACE1000073, BRACE1000084, BRACE1000092, BRACE1000093, BRACE1000101, BRACE1000114, BRACE1000124, BRACE1000132, BRACE1000159, BRACE1000166, BRACE1000169, BRACE1000239, BRACE1000258, BRACE1000451, BRACE1000475, BRACE1000572, BRACE2000061, BRACE2000077, BRACE2000078, BRACE2000100, BRACE2000109, BRACE2000141, BRACE2000148, BRACE2000183, BRACE2000229, BRACE2000232, BRACE2000245, BRACE2000256, BRACE2000266, BRACE2000267, BRACE2000280, BRACE2000300, BRACE2000331, BRACE2000351, BRACE2000368, BRACE2000392, BRACE2000441, BRACE2000489, BRACE2000505, BRACE2000526, BRACE2000531, BRACE2000545, BRACE2000553, BRACE2000565, BRACE2000577, BRACE2000640, BRACE2000650, BRACE2000677, BRACE2000718, BRACE2000743, BRACE2000750, BRACE2000753, BRACE2000815, BRACE2000864, BRACE2000885, BRACE2000893, BRACE2000905, BRACE2000936, BRACE2000947, BRACE2000965, BRACE2000969, BRACE2000988, BRACE2001017, BRACE2001065, BRACE2001070, BRACE2001094, BRACE2001117, BRACE2001154, BRACE2001188, BRACE2001191, BRACE2001197, BRACE2001239, BRACE2001269, BRACE2001312, BRACE2001313, BRACE2001330, BRACE2001340, BRACE2001352, BRACE2001353, BRACE2001374, BRACE2001375, BRACE2001423, BRACE2001424, BRACE2001445, BRACE2001453, BRACE2001455, BRACE2001492, BRACE2001496, BRACE2001534, BRACE2001543, BRACE2001564, BRACE2001588, BRACE2001607, BRACE2001626, BRACE2001673, BRACE2001677, BRACE2001705, BRACE2001709, BRACE2001711, BRACE2001726, BRACE2001733, BRACE2001737, BRACE2001742, BRACE2001777, BRACE2001779, BRACE2001834, BRACE2001859, BRACE2001865, BRACE2001872, BRACE2001898, BRACE2001923, BRACE2001942, BRACE2001954, BRACE2001972, BRACE2001973, BRACE2002026, BRACE2002034, BRACE2002081, BRACE2002139, BRACE2002142, BRACE2002151, BRACE2002157, BRACE2002176, BRACE2002202, BRACE2002206, BRACE2002227, BRACE2002260, BRACE2002297, BRACE2002304, BRACE2002392, BRACE2002394, BRACE2002409, BRACE2002431, BRACE2002444, BRACE2002458, BRACE2002467, BRACE2002468, BRACE2002478, BRACE2002495, BRACE2002585, BRACE2002589, BRACE2002590, BRACE2002606, BRACE2002613, BRACE2002614, BRACE2002617, BRACE2002623, BRACE2002635, BRACE2002661, BRACE2002676, BRACE2002682, BRACE2002685, BRACE2002695, BRACE2002707, BRACE2002736, BRACE2002752, BRACE2002755, BRACE2002762, BRACE2002772, BRACE2002792, BRACE2002807, BRACE2002812, BRACE2002834, BRACE2002849, BRACE2002857, BRACE2002860, BRACE2002884, BRACE2002896, BRACE2002948, BRACE2003078, BRACE2003097, BRACE2003168, BRACE2003199, BRACE2003210, BRACE2003217, BRACE2003269, BRACE2003285, BRACE2003398, BRACE2003420, BRACE2003428, BRACE2003431, BRACE2003512, BRACE2003516, BRACE2003539, BRACE2003540, BRACE2003594, BRACE2003598, BRACE2003614, BRACE2003639, BRACE2003700, BRACE2003713, BRACE2003766, BRACE2003788, BRACE2003800, BRACE2003802, BRACE2003825, BRACE2003847, BRACE2003848, BRACE2003873, BRACE2003885, BRACE2003887, BRACE2003928, BRACE2003954, BRACE2003982, BRACE2003987, BRACE2005034, BRACE2005047, BRACE2005063, BRACE2005083, BRACE2005090, BRACE2005099, BRACE2005118, BRACE2005124, BRACE2005138, BRACE2005160, BRACE2005169, BRACE2005193, BRACE2005198, BRACE2005216, BRACE2005231, BRACE2005243, BRACE2005251, BRACE2005253, BRACE2005290, BRACE2005298, BRACE2005328, BRACE2005329, BRACE2005337, BRACE2005348, BRACE2005363, BRACE2005408, BRACE2005433, BRACE2005448, BRACE2005450, BRACE2005453, BRACE2005457, BRACE2005460, BRACE2005489, BRACE2005518, BRACE2005556, BRACE2005562, BRACE2005624, BRACE2005642, BRACE2005661, BRACE2005667, BRACE2005731, BRACE2005742, BRACE2005762, BRACE2005773, BRACE2005787, BRACE2005795, BRACE2005800, BRACE2005858, BRACE2005869, BRACE2005881, BRACE2005898, BRACE2005904, BRACE2005906, BRACE2005907, BRACE2005911, BRACE2005949, BRACE2005981, BRACE2005991, BRACE2006072, BRACE2006075, BRACE2006084, BRACE2006089, BRACE2006102, BRACE2006105, BRACE2006122, BRACE2006137, BRACE2006143, BRACE2006167, BRACE2006174, BRACE2006240, BRACE2006245, BRACE2006249, BRACE2006264, BRACE2006274, BRACE2006298, BRACE2006344, BRACE2006363, BRACE2006378, BRACE2006380, BRACE2006393, BRACE2006397, BRACE2006413, BRACE2006417, BRACE2006453, BRACE2006459, BRACE2006488, BRACE2006534, BRACE2006537, BRACE2006540, BRACE2006547, BRACE2006564, BRACE2006587, BRACE2006598, BRACE2006685, BRACE2006703, BRACE2006753, BRACE2006783, BRACE2006821, BRACE2006871, BRACE2006909, BRACE2006911, BRACE2006924, BRACE2006935, BRACE2006944, BRACE2006951, BRACE2006982, BRACE2006986, BRACE2007013, BRACE2007068, BRACE2007087, BRACE2007109, BRACE2007138, BRACE2007191, BRACE2007197, BRACE2007201, BRACE2007203, BRACE2007232, BRACE2007254, BRACE2007262, BRACE2007274, BRACE2007281, BRACE2007295, BRACE2007358, BRACE2007396, BRACE2007398, BRACE2007411, BRACE2007447, BRACE2007477, BRACE2007502, BRACE2007503, BRACE2007522, BRACE2007527, BRACE2007538, BRACE2007563, BRACE2007567, BRACE2007621, BRACE2007640, BRACE2007646, BRACE2007663, BRACE2007682, BRACE2007685, BRACE2007708, BRACE2007727, BRACE2007749, BRACE2007761, BRACE2007764, BRACE2007767, BRACE2007769, BRACE2007784, BRACE2007786, BRACE2007798, BRACE2007799, BRACE2007801, BRACE2007832, BRACE2007836, BRACE2007868, BRACE2007882, BRACE2007888, BRACE2007920, BRACE2007944, BRACE2008008, BRACE2008015, BRACE2008021, BRACE2008097, BRACE2008102, BRACE2008114, BRACE2008144, BRACE2008172, BRACE2008216, BRACE2008218, BRACE2008251, BRACE2008276, BRACE2008295, BRACE2008308, BRACE2008336, BRACE2008361, BRACE2008385, BRACE2008399, BRACE2008401, BRACE2008410, BRACE2008420, BRACE2008443, BRACE2008473, BRACE2008480, BRACE2008488, BRACE2008495, BRACE2008500, BRACE2008553, BRACE2008594, BRACE2008604, BRACE2008615, BRACE2008622, BRACE2008629, BRACE2008655, BRACE2008656, BRACE2008706, BRACE2008708, BRACE2008710, BRACE2008754, BRACE2008797, BRACE2008847, BRACE2008857, BRACE2008861, BRACE2008867, BRACE2008881, BRACE2008883, BRACE2008917, BRACE2008919, BRACE2008941, BRACE2008948, BRACE2008960, BRACE2008999, BRACE2009014, BRACE2009016, BRACE2009031, BRACE2009044, BRACE2009053, BRACE2009122, BRACE2009131, BRACE2009185, BRACE2009188, BRACE2009212, BRACE2009221, BRACE2009235, BRACE2009238, BRACE2009255, BRACE2009270, BRACE2009272, BRACE2009274, BRACE2009275, BRACE2009293, BRACE2009311, BRACE2009318, BRACE2009323, BRACE2009366, BRACE2009421, BRACE2009428, BRACE2009434, BRACE2009437, BRACE2009483, BRACE2009517, BRACE2009533, BRACE2009566, BRACE2009591, BRACE2009620, BRACE2009654, BRACE2009721, BRACE2009732, BRACE2009754, BRACE2009828, BRACE2009886, BRACE2009907, BRACE2009957, BRACE2010170, BRACE2010171, BRACE2010203, BRACE2010208, BRACE2010336, BRACE2010348, BRACE2010440, BRACE2010444, BRACE2010477, BRACE2010489, BRACE2010535, BRACE2010550, BRACE2010598, BRACE2010632, BRACE2010642, BRACE2010651, BRACE2010684, BRACE2010753, BRACE2010813, BRACE2010828, BRACE2010837, BRACE2010888, BRACE2010937, BRACE2010983, BRACE2011007, BRACE2011025, BRACE2011183, BRACE2011199, BRACE2011389, BRACE2011478, BRACE2011545, BRACE2011592, BRACE2011611, BRACE2011646, BRACE2011677, BRACE2011703, BRACE2011747, BRACE2011838, BRACE2011892, BRACE2011904, BRACE2011947, BRACE2012061, BRACE2012062, BRACE2012185, BRACE2012222, BRACE2012232, BRACE2012291, BRACE2012510, BRACE2012625, BRACE2012653, BRACE2012833, BRACE2012838, BRACE2012936, BRACE2012947, BRACE2013009, BRACE2013010, BRACE2013126, BRACE2013132, BRACE2013149, BRACE2013369, BRACE2013806, BRACE2013855, BRACE2013911, BRACE2014108, BRACE2014161, BRACE2014232, BRACE2014257, BRACE2014268, BRACE2014475, BRACE2014657, BRACE2014746, BRACE2014780, BRACE2014818, BRACE2014821, BRACE2014824, BRACE2014854, BRACE2015031, BRACE2015262, BRACE2015270, BRACE2015287, BRACE2015314, BRACE2015352, BRACE2015368, BRACE2015412, BRACE2015436, BRACE2015741, BRACE2015756, BRACE2015969, BRACE2015995, BRACE2016058, BRACE2016194, BRACE2016315, BRACE2016325, BRACE2016335, BRACE2016362, BRACE2016366, BRACE2016465, BRACE2016516, BRACE2016583, BRACE2016708, BRACE2016821, BRACE2016896, BRACE2016981, BRACE2017108, BRACE2017124, BRACE2017298, BRACE2017359, BRACE2017397, BRACE2017410, BRACE2017438, BRACE2017580, BRACE2017587, BRACE2017720, BRACE2017844, BRACE2017872, BRACE2017929, BRACE2017934, BRACE2017985, BRACE2017992, BRACE2018443, BRACE2018448, BRACE2018568, BRACE2018700, BRACE2018727, BRACE2018736, BRACE2018759, BRACE2018762, BRACE2018782, BRACE2018847, BRACE2019004, BRACE2019044, BRACE2019244, BRACE2019258, BRACE2019327, BRACE2019348, BRACE2019371, BRACE2019467, BRACE2019510, BRACE2019519, BRACE2019528, BRACE2019618, BRACE2019696, BRACE2019703, BRACE2019843, BRACE2019865, BRACE2019872, BRACE2019877, BRACE2020028, BRACE2020077, BRACE2020097, BRACE2020157, BRACE2020278, BRACE2020358, BRACE2020467, BRACE2020584, BRACE2020652, BRACE2020709, BRACE2020742, BRACE2020756, BRACE2020863, BRACE2020982, BRACE2021143, BRACE2021148, BRACE2021245, BRACE2021254, BRACE2021264, BRACE2021344, BRACE2021433, BRACE2021478, BRACE2021670, BRACE2021695, BRACE2021708, BRACE2021721, BRACE2021932, BRACE2021936, BRACE2022030, BRACE2022158, BRACE2022196, BRACE2022270, BRACE2022328, BRACE2022333, BRACE2022394, BRACE2022435, BRACE2022448, BRACE2022450, BRACE2022633, BRACE2022693, BRACE2022848, BRACE2022928, BRACE2022990, BRACE2023069, BRACE2023070, BRACE2023223, BRACE2023268, BRACE2023284, BRACE2023404, BRACE2023451, BRACE2023540, BRACE2023633, BRACE2023718, BRACE2023727, BRACE2023744, BRACE2023800, BRACE2023801, BRACE2024074, BRACE2024222, BRACE2024610, BRACE2024627, BRACE2024781, BRACE2024826, BRACE2025018, BRACE2025316, BRACE2025333, BRACE2025437, BRACE2025452, BRACE2025710, BRACE2025796, BRACE2025992, BRACE2026131, BRACE2026141, BRACE2026142, BRACE2026293, BRACE2026294, BRACE2026404, BRACE2026675, BRACE2026836, BRACE2026920, BRACE2026971, BRACE2027018, BRACE2027221, BRACE2027312, BRACE2027382, BRACE2027389, BRACE2027408, BRACE2027767, BRACE2027770, BRACE2027879, BRACE2027896, BRACE2027970, BRACE2028171, BRACE2028392, BRACE2028410, BRACE2028636, BRACE2028741, BRACE2028956, BRACE2028970, BRACE2029112, BRACE2029356, BRACE2029396, BRACE2029581, BRACE2029644, BRACE2029849, BRACE2030039, BRACE2030096, BRACE2030323, BRACE2030326, BRACE2030341, BRACE2030345, BRACE2030736, BRACE2030883, BRACE2030884, BRACE2031154, BRACE2031232, BRACE2031527, BRACE2031531, BRACE2031553, BRACE2031899, BRACE2032044, BRACE2032090, BRACE2032134, BRACE2032148, BRACE2032182, BRACE2032329, BRACE2032385, BRACE2032436, BRACE2032502, BRACE2032538, BRACE2032584, BRACE2032823, BRACE2033128, BRACE2033394, BRACE2033478, BRACE2033720, BRACE2033786, BRACE2034434, BRACE2034523, BRACE2034616, BRACE2034622, BRACE2034870, BRACE2035003, BRACE2035120, BRACE2035124, BRACE2035191, BRACE2035381, BRACE2035441, BRACE2035485, BRACE2036005, BRACE2036096, BRACE2036743, BRACE2036830, BRACE2036834, BRACE2036900, BRACE2037132, BRACE2037294, BRACE2037299, BRACE2037431, BRACE2037692, BRACE2037847, BRACE2038114, BRACE2038269, BRACE2038271, BRACE2038329, BRACE2038492, BRACE2038551, BRACE2038618, BRACE2039009, BRACE2039128, BRACE2039170, BRACE2039249, BRACE2039286, BRACE2039297, BRACE2039327, BRACE2039362, BRACE2039475, BRACE2039600, BRACE2039607, BRACE2039734, BRACE2039823, BRACE2039832, BRACE2039893, BRACE2039986, BRACE2040138, BRACE2040325, BRACE2040514, BRACE2040640, BRACE2040987, BRACE2041009, BRACE2041095, BRACE2041200, BRACE2041264, BRACE2041890, BRACE2041898, BRACE2042394, BRACE2042398, BRACE2042550, BRACE2042620, BRACE2042628, BRACE2042873, BRACE2043036, BRACE2043105, BRACE2043142, BRACE2043248, BRACE2043349, BRACE2043381, BRACE2043774, BRACE2043942, BRACE2044057, BRACE2044105, BRACE2044263, BRACE2044304, BRACE2044473, BRACE2044510, BRACE2044640, BRACE2044816, BRACE2044946, BRACE2044949, BRACE2045300, BRACE2045428, BRACE2045445, BRACE2045596, BRACE2045772, BRACE2045947, BRACE2046251, BRACE2046295, BRACE2046976, BRACE2047011, BRACE2047232, BRACE2047350, BRACE2047377, BRACE2047385, BRACE2047492, BRACE2047558, BRACE2047573, BRACE2047835, BRACE2047893, BRACE2047975, BRACE3000071, BRACE3000404, BRACE3000520, BRACE3000697, BRACE3000840, BRACE3000973, BRACE3001002, BRACE3001058, BRACE3001066, BRACE3001217, BRACE3001299, BRACE3001384, BRACE3001391, BRACE3001403, BRACE3001595, BRACE3001754, BRACE3001948, BRACE3002298, BRACE3002344, BRACE3002390, BRACE3002420, BRACE3002508, BRACE3002541, BRACE3002756, BRACE3003004, BRACE3003192, BRACE3003413, BRACE3003595, BRACE3003698, BRACE3003866, BRACE3003920, BRACE3004046, BRACE3004058, BRACE3004113, BRACE3004150, BRACE3004205, BRACE3004358, BRACE3004435, BRACE3004477, BRACE3004767, BRACE3004772, BRACE3004783, BRACE3004843, BRACE3004862, BRACE3004880, BRACE3004887, BRACE3004981, BRACE3004996, BRACE3004998, BRACE3005103, BRACE3005127, BRACE3005145, BRACE3005217, BRACE3005225, BRACE3005430, BRACE3005499, BRACE3005760, BRACE3005870, BRACE3005903, BRACE3005989, BRACE3006113, BRACE3006185, BRACE3006226, BRACE3006462, BRACE3006463, BRACE3006553, BRACE3006872, BRACE3006917, BRACE3007058, BRACE3007084, BRACE3007085, BRACE3007258, BRACE3007322, BRACE3007472, BRACE3007480, BRACE3007559, BRACE3007625, BRACE3007642, BRACE3007649, BRACE3007767, BRACE3007869, BRACE3008036, BRACE3008066, BRACE3008092, BRACE3008095, BRACE3008137, BRACE3008255, BRACE3008337, BRACE3008384, BRACE3008720, BRACE3008772, BRACE3009044, BRACE3009075, BRACE3009090, BRACE3009127, BRACE3009197, BRACE3009237, BRACE3009265, BRACE3009297, BRACE3009377, BRACE3009392, BRACE3009416, BRACE3009539, BRACE3009574, BRACE3009701, BRACE3009708, BRACE3009724, BRACE3009993, BRACE3010076, BRACE3010079, BRACE3010086, BRACE3010221, BRACE3010283, BRACE3010315, BRACE3010397, BRACE3010416, BRACE3010435, BRACE3010438, BRACE3010702, BRACE3010862, BRACE3011421, BRACE3011447, BRACE3011505, BRACE3011634, BRACE3011774, BRACE3012357, BRACE3012574, BRACE3012806, BRACE3012930, BRACE3013119, BRACE3013418, BRACE3013576, BRACE3013740, BRACE3013874, BRACE3013936, BRACE3013986, BRACE3014005, BRACE3014068, BRACE3014231, BRACE3014290, BRACE3014317, BRACE3014523, BRACE3014714, BRACE3014807, BRACE3014942, BRACE3015090, BRACE3015121, BRACE3015262, BRACE3015521, BRACE3015808, BRACE3015829, BRACE3015894, BRACE3015898, BRACE3016020, BRACE3016122, BRACE3016167, BRACE3016170, BRACE3016580, BRACE3016788, BRACE3016810, BRACE3016862, BRACE3016884, BRACE3017083, BRACE3017253, BRACE3018083, BRACE3018308, BRACE3018963, BRACE3019055, BRACE3019071, BRACE3019084, BRACE3019570, BRACE3019611, BRACE3019817, BRACE3019828, BRACE3019941, BRACE3020151, BRACE3020194, BRACE3020286, BRACE3020356, BRACE3020594, BRACE3020669, BRACE3020671, BRACE3020890, BRACE3021148, BRACE3021430, BRACE3021517, BRACE3021805, BRACE3022051, BRACE3022303, BRACE3022312, BRACE3022340, BRACE3022847, BRACE3023604, BRACE3023912, BRACE3024073, BRACE3024359, BRACE3024379, BRACE3024444, BRACE3024497, BRACE3024537, BRACE3024659, BRACE3024662, BRACE3024879, BRACE3025153, BRACE3025302, BRACE3025457, BRACE3025531, BRACE3025627, BRACE3025630, BRACE3025719, BRACE3026008, BRACE3026075, BRACE3026161, BRACE3026290, BRACE3026345, BRACE3026456, BRACE3026735, BRACE3026802, BRACE3026844, BRACE3026947, BRACE3026993, BRACE3027242, BRACE3027256, BRACE3027326, BRACE3027478, BRACE3027480, BRACE3027976, BRACE3028214, BRACE3028241, BRACE3028360, BRACE3028895, BRACE3028998, BRACE3029005, BRACE3029021, BRACE3029205, BRACE3029447, BRACE3030057, BRACE3030103, BRACE3030748, BRACE3030866, BRACE3031161, BRACE3031184, BRACE3031185, BRACE3031315, BRACE3031372, BRACE3031579, BRACE3031728, BRACE3031838, BRACE3031843, BRACE3032427, BRACE3032455, BRACE3032537, BRACE3032538, BRACE3032631, BRACE3032771, BRACE3032980, BRACE3032983, BRACE3033525, BRACE3034159, BRACE3034183, BRACE3034389, BRACE3034964, BRACE3034993, BRACE3035168, BRACE3035227, BRACE3036156, BRACE3036271, BRACE3037612, BRACE3037637, BRACE3037803, BRACE3038012, BRACE3038030, BRACE3038569, BRACE3038570, BRACE3038687, BRACE3038760, BRACE3039288, BRACE3039358, BRACE3039378, BRACE3039454, BRACE3040012, BRACE3040239, BRACE3040504, BRACE3040644, BRACE3040856, BRACE3040863, BRACE3041059, BRACE3041162, BRACE3041827, BRACE3042046, BRACE3042210, BRACE3042326, BRACE3042409, BRACE3042432, BRACE3042594, BRACE3043597, BRACE3044090, BRACE3044172, BRACE3044247, BRACE3044377, BRACE3044389, BRACE3044495, BRACE3045011, BRACE3045033, BRACE3045078, BRACE3045145, BRACE3045424, BRACE3045708, BRACE3045981, BRACE3046049, BRACE3046152, BRACE3046294, BRACE3046450, BRACE3046466, BRACE3046491, BRACE3046609, BRACE3046762, BRACE3046837, BRACE3046855, BRACE3046966, BRACE3047018, BRACE3047482, BRACE3047801, BRALZ1000047, BRALZ1000103, BRALZ2000189, BRALZ2000263, BRALZ2000988, BRALZ2001038, BRALZ2001279, BRALZ2001350, BRALZ2001445, BRALZ2001559, BRALZ2001743, BRALZ2001834, BRALZ2002174, BRALZ2002418, BRALZ2002477, BRALZ2003119, BRALZ2003330, BRALZ2003453, BRALZ2003525, BRALZ2004397, BRALZ2005467, BRALZ2005471, BRALZ2005888, BRALZ2005950, BRALZ2005992, BRALZ2006288, BRALZ2006474, BRALZ2006560, BRALZ2006734, BRALZ2006800, BRALZ2006976, BRALZ2007376, BRALZ2007545, BRALZ2007576, BRALZ2007661, BRALZ2007790, BRALZ2007793, BRALZ2007952, BRALZ2008031, BRALZ2008166, BRALZ2008462, BRALZ2008617, BRALZ2008696, BRALZ2008763, BRALZ2008869, BRALZ2008930, BRALZ2009446, BRALZ2009486, BRALZ2010186, BRALZ2010842, BRALZ2011337, BRALZ2011796, BRALZ2011880, BRALZ2012050, BRALZ2012183, BRALZ2012848, BRALZ2013621, BRALZ2013690, BRALZ2014054, BRALZ2014316, BRALZ2014484, BRALZ2014951, BRALZ2015168, BRALZ2015811, BRALZ2016085, BRALZ2016498, BRALZ2017359, BRALZ2017531, BRALZ2017607, BRALZ2017620, BRALZ2017844, BRALZ2018342, BRALZ2018492, BRALZ2018834, BRALZ2019047, BRAMY1000095, BRAMY1000098, BRAMY1000130, BRAMY1000157, BRAMY2000021, BRAMY2000025, BRAMY2000052, BRAMY2000076, BRAMY2000086, BRAMY2000151, BRAMY2000181, BRAMY2000196, BRAMY2000231, BRAMY2000277, BRAMY2000388, BRAMY2000411, BRAMY2000508, BRAMY2000585, BRAMY2000653, BRAMY2000814, BRAMY2000893, BRAMY2000946, BRAMY2000981, BRAMY2000987, BRAMY2001068, BRAMY2001114, BRAMY2001203, BRAMY2001282, BRAMY2001367, BRAMY2001427, BRAMY2001473, BRAMY2001678, BRAMY2002005, BRAMY2002044, BRAMY2002072, BRAMY2002158, BRAMY2002311, BRAMY2002339, BRAMY2002364, BRAMY2002369, BRAMY2002479, BRAMY2002493, BRAMY2002525, BRAMY2002584, BRAMY2002604, BRAMY2002621, BRAMY2002638, BRAMY2002739, BRAMY2002799, BRAMY2002853, BRAMY2002862, BRAMY2002956, BRAMY2003008, BRAMY2003037, BRAMY2003117, BRAMY2003287, BRAMY2003325, BRAMY2003529, BRAMY2003538, BRAMY2003585, BRAMY2003634, BRAMY2003653, BRAMY2003681, BRAMY2003893, BRAMY2003897, BRAMY2003898, BRAMY2003904, BRAMY2003926, BRAMY2003929, BRAMY2004031, BRAMY2004058, BRAMY2004183, BRAMY2004335, BRAMY2004351, BRAMY2004352, BRAMY2004387, BRAMY2004492, BRAMY2004521, BRAMY2004524, BRAMY2004537, BRAMY2004542, BRAMY2004756, BRAMY2004771, BRAMY2005052, BRAMY2005064, BRAMY2005094, BRAMY2005151, BRAMY2005182, BRAMY2005244, BRAMY2005391, BRAMY2005488, BRAMY2005576, BRAMY2005648, BRAMY2005662, BRAMY2005708, BRAMY2005711, BRAMY2006092, BRAMY2006118, BRAMY2006149, BRAMY2006366, BRAMY2006375, BRAMY2006397, BRAMY2006411, BRAMY2006459, BRAMY2006466, BRAMY2006659, BRAMY2006779, BRAMY2006809, BRAMY2006879, BRAMY2007043, BRAMY2007078, BRAMY2007110, BRAMY2007185, BRAMY2007244, BRAMY2007249, BRAMY2007255, BRAMY2007287, BRAMY2007308, BRAMY2007411, BRAMY2007458, BRAMY2007486, BRAMY2007546, BRAMY2007594, BRAMY2007610, BRAMY2007653, BRAMY2007753, BRAMY2007859, BRAMY2008333, BRAMY2008563, BRAMY2008583, BRAMY2008977, BRAMY2008979, BRAMY2009023, BRAMY2009034, BRAMY2009105, BRAMY2009123, BRAMY2009192, BRAMY2009344, BRAMY2009349, BRAMY2009394, BRAMY2009489, BRAMY2009528, BRAMY2009557, BRAMY2009612, BRAMY2009693, BRAMY2009934, BRAMY2010068, BRAMY2010135, BRAMY2010145, BRAMY2010171, BRAMY2010208, BRAMY2010239, BRAMY2010272, BRAMY2010290, BRAMY2010366, BRAMY2010395, BRAMY2010441, BRAMY2010442, BRAMY2010581, BRAMY2010798, BRAMY2010808, BRAMY2010919, BRAMY2011064, BRAMY2011105, BRAMY2011178, BRAMY2011196, BRAMY2011216, BRAMY2011253, BRAMY2011446, BRAMY2011480, BRAMY2011639, BRAMY2011679, BRAMY2011811, BRAMY2011841, BRAMY2011846, BRAMY2011849, BRAMY2011872, BRAMY2011961, BRAMY2012017, BRAMY2012119, BRAMY2012162, BRAMY2012163, BRAMY2012277, BRAMY2012340, BRAMY2012426, BRAMY2012497, BRAMY2012517, BRAMY2012536, BRAMY2012555, BRAMY2012568, BRAMY2012691, BRAMY2012721, BRAMY2012731, BRAMY2012776, BRAMY2012880, BRAMY2012881, BRAMY2013200, BRAMY2013216, BRAMY2013405, BRAMY2013414, BRAMY2013572, BRAMY2013590, BRAMY2013722, BRAMY2013736, BRAMY2013944, BRAMY2013975, BRAMY2014019, BRAMY2014387, BRAMY2014462, BRAMY2014469, BRAMY2014541, BRAMY2014754, BRAMY2014813, BRAMY2015211, BRAMY2015311, BRAMY2015420, BRAMY2015503, BRAMY2015516, BRAMY2015550, BRAMY2015551, BRAMY2015559, BRAMY2015688, BRAMY2015782, BRAMY2015833, BRAMY2015855, BRAMY2015890, BRAMY2015911, BRAMY2015925, BRAMY2016002, BRAMY2016020, BRAMY2016070, BRAMY2016325, BRAMY2016327, BRAMY2016386, BRAMY2016771, BRAMY2016892, BRAMY2016938, BRAMY2016953, BRAMY2017014, BRAMY2017249, BRAMY2017348, BRAMY2017450, BRAMY2017455, BRAMY2017528, BRAMY2017864, BRAMY2018027, BRAMY2018106, BRAMY2018122, BRAMY2018126, BRAMY2018272, BRAMY2018273, BRAMY2018279, BRAMY2018295, BRAMY2018308, BRAMY2018396, BRAMY2018467, BRAMY2018635, BRAMY2019055, BRAMY2019111, BRAMY2019277, BRAMY2019300, BRAMY2019468, BRAMY2019509, BRAMY2019643, BRAMY2019710, BRAMY2019985, BRAMY2019989, BRAMY2020050, BRAMY2020058, BRAMY2020270, BRAMY2020354, BRAMY2020355, BRAMY2020412, BRAMY2020427, BRAMY2020445, BRAMY2020466, BRAMY2020520, BRAMY2020574, BRAMY2020634, BRAMY2020713, BRAMY2021040, BRAMY2021063, BRAMY2021098, BRAMY2021139, BRAMY2021142, BRAMY2021276, BRAMY2021310, BRAMY2021388, BRAMY2021498, BRAMY2021523, BRAMY2021710, BRAMY2021732, BRAMY2021746, BRAMY2021825, BRAMY2021867, BRAMY2021962, BRAMY2021982, BRAMY2022052, BRAMY2022160, BRAMY2022168, BRAMY2022263, BRAMY2022301, BRAMY2022320, BRAMY2022383, BRAMY2022445, BRAMY2022454, BRAMY2022532, BRAMY2022723, BRAMY2022786, BRAMY2022796, BRAMY2022929, BRAMY2022980, BRAMY2022984, BRAMY2023060, BRAMY2023110, BRAMY2023115, BRAMY2023161, BRAMY2023172, BRAMY2023238, BRAMY2023327, BRAMY2023358, BRAMY2023406, BRAMY2023482, BRAMY2023514, BRAMY2023719, BRAMY2023729, BRAMY2023786, BRAMY2023852, BRAMY2024004, BRAMY2024073, BRAMY2024312, BRAMY2024374, BRAMY2024390, BRAMY2024416, BRAMY2024449, BRAMY2024489, BRAMY2024497, BRAMY2024514, BRAMY2024530, BRAMY2024535, BRAMY2024545, BRAMY2024576, BRAMY2024593, BRAMY2024711, BRAMY2024715, BRAMY2024728, BRAMY2024827, BRAMY2024849, BRAMY2025024, BRAMY2025032, BRAMY2025121, BRAMY2025175, BRAMY2025218, BRAMY2025230, BRAMY2025272, BRAMY2025277, BRAMY2025495, BRAMY2025812, BRAMY2025996, BRAMY2026009, BRAMY2026091, BRAMY2026168, BRAMY2026300, BRAMY2026347, BRAMY2026395, BRAMY2026405, BRAMY2026533, BRAMY2026538, BRAMY2026685, BRAMY2026713, BRAMY2026778, BRAMY2026824, BRAMY2026899, BRAMY2026902, BRAMY2026904, BRAMY2026976, BRAMY2027073, BRAMY2027114, BRAMY2027140, BRAMY2027242, BRAMY2027396, BRAMY2027451, BRAMY2027461, BRAMY2027467, BRAMY2027714, BRAMY2027717, BRAMY2027739, BRAMY2027752, BRAMY2027782, BRAMY2028072, BRAMY2028183, BRAMY2028188, BRAMY2028472, BRAMY2028491, BRAMY2028516, BRAMY2028565, BRAMY2028593, BRAMY2028682, BRAMY2028783, BRAMY2028856, BRAMY2028914, BRAMY2029204, BRAMY2029602, BRAMY2030098, BRAMY2030109, BRAMY2030206, BRAMY2030477, BRAMY2030545, BRAMY2030607, BRAMY2030702, BRAMY2030703, BRAMY2030768, BRAMY2030799, BRAMY2030859, BRAMY2030915, BRAMY2031317, BRAMY2031377, BRAMY2031442, BRAMY2032014, BRAMY2032231, BRAMY2032242, BRAMY2032290, BRAMY2032311, BRAMY2032317, BRAMY2032344, BRAMY2032589, BRAMY2032678, BRAMY2032696, BRAMY2032777, BRAMY2032994, BRAMY2033003, BRAMY2033116, BRAMY2033240, BRAMY2033267, BRAMY2033316, BRAMY2033332, BRAMY2033506, BRAMY2033594, BRAMY2033895, BRAMY2033914, BRAMY2034072, BRAMY2034185, BRAMY2034187, BRAMY2034305, BRAMY2034561, BRAMY2034920, BRAMY2034993, BRAMY2035070, BRAMY2035449, BRAMY2035545, BRAMY2035606, BRAMY2035718, BRAMY2035719, BRAMY2035801, BRAMY2035869, BRAMY2035923, BRAMY2036076, BRAMY2036079, BRAMY2036254, BRAMY2036266, BRAMY2036387, BRAMY2036396, BRAMY2036567, BRAMY2036615, BRAMY2036699, BRAMY2036913, BRAMY2036918, BRAMY2036968, BRAMY2037147, BRAMY2037328, BRAMY2037609, BRAMY2037629, BRAMY2037800, BRAMY2037823, BRAMY2037971, BRAMY2038100, BRAMY2038128, BRAMY2038317, BRAMY2038475, BRAMY2038484, BRAMY2038516, BRAMY2038832, BRAMY2038846, BRAMY2038887, BRAMY2038904, BRAMY2039287, BRAMY2039300, BRAMY2039314, BRAMY2039341, BRAMY2039630, BRAMY2039695, BRAMY2039728, BRAMY2039872, BRAMY2040051, BRAMY2040159, BRAMY2040214, BRAMY2040478, BRAMY2040592, BRAMY2040915, BRAMY2041261, BRAMY2041347, BRAMY2041378, BRAMY2041384, BRAMY2041434, BRAMY2041507, BRAMY2041542, BRAMY2041738, BRAMY2042122, BRAMY2042131, BRAMY2042178, BRAMY2042195, BRAMY2042244, BRAMY2042549, BRAMY2042596, BRAMY2042612, BRAMY2042641, BRAMY2042711, BRAMY2042760, BRAMY2042804, BRAMY2042899, BRAMY2042918, BRAMY2043069, BRAMY2043103, BRAMY2043314, BRAMY2043345, BRAMY2044246, BRAMY2044317, BRAMY2044349, BRAMY2044686, BRAMY2044838, BRAMY2045036, BRAMY2045299, BRAMY2045471, BRAMY2045530, BRAMY2046109, BRAMY2046478, BRAMY2046489, BRAMY2046537, BRAMY2046667, BRAMY2046742, BRAMY2046871, BRAMY2046984, BRAMY2046989, BRAMY2047169, BRAMY2047280, BRAMY2047420, BRAMY2047676, BRAMY2047692, BRAMY2047746, BRAMY2047751, BRAMY2047765, BRAMY2047884, BRAMY2047948, BRAMY3000206, BRAMY3000210, BRAMY3000213, BRAMY3000224, BRAMY3000254, BRAMY3000307, BRAMY3000692, BRAMY3001356, BRAMY3001401, BRAMY3001409, BRAMY3001794, BRAMY3002120, BRAMY3002312, BRAMY3002329, BRAMY3002458, BRAMY3002508, BRAMY3002620, BRAMY3002803, BRAMY3002805, BRAMY3002886, BRAMY3003109, BRAMY3003205, BRAMY3003310, BRAMY3003566, BRAMY3003723, BRAMY3004126, BRAMY3004224, BRAMY3004364, BRAMY3004672, BRAMY3004800, BRAMY3004900, BRAMY3004919, BRAMY3005091, BRAMY3005656, BRAMY3005932, BRAMY3006032, BRAMY3006297, BRAMY3006761, BRAMY3007078, BRAMY3007206, BRAMY3007311, BRAMY3007350, BRAMY3007449, BRAMY3007471, BRAMY3007609, BRAMY3007723, BRAMY3007968, BRAMY3008088, BRAMY3008096, BRAMY3008335, BRAMY3008466, BRAMY3008505, BRAMY3008650, BRAMY3008937, BRAMY3009158, BRAMY3009207, BRAMY3009491, BRAMY3009556, BRAMY3009782, BRAMY3009811, BRAMY3009904, BRAMY3010264, BRAMY3010321, BRAMY3010411, BRAMY3010492, BRAMY3010603, BRAMY3010654, BRAMY4000089, BRAMY4000095, BRAMY4000229, BRAMY4000277, BRAMY4000915, BRAMY4000962, BRAMY4001173, BRAMY4001200, BRAMY4001234, BRAMY4001449, BRAMY4001652, BRAMY4001863, BRAMY4001913, BRAMY4002575, BRASW1000053, BRASW1000125, BRAWH1000001, BRAWH1000002, BRAWH1000083, BRAWH1000094, BRAWH1000116, BRAWH1000130, BRAWH1000157, BRAWH1000164, BRAWH1000168, BRAWH1000174, BRAWH1000180, BRAWH1000369, BRAWH2000034, BRAWH2000048, BRAWH2000071, BRAWH2000093, BRAWH2000109, BRAWH2000131, BRAWH2000142, BRAWH2000169, BRAWH2000177, BRAWH2000218, BRAWH2000232, BRAWH2000248, BRAWH2000256, BRAWH2000323, BRAWH2000353, BRAWH2000370, BRAWH2000409, BRAWH2000417, BRAWH2000443, BRAWH2000471, BRAWH2000476, BRAWH2000482, BRAWH2000494, BRAWH2000500, BRAWH2000503, BRAWH2000554, BRAWH2000595, BRAWH2000643, BRAWH2000651, BRAWH2000682, BRAWH2000752, BRAWH2000859, BRAWH2000866, BRAWH2000892, BRAWH2000901, BRAWH2000926, BRAWH2000984, BRAWH2001019, BRAWH2001052, BRAWH2001103, BRAWH2001129, BRAWH2001137, BRAWH2001159, BRAWH2001203, BRAWH2001238, BRAWH2001239, BRAWH2001255, BRAWH2001355, BRAWH2001378, BRAWH2001395, BRAWH2001406, BRAWH2001418, BRAWH2001436, BRAWH2001438, BRAWH2001459, BRAWH2001461, BRAWH2001492, BRAWH2001503, BRAWH2001519, BRAWH2001535, BRAWH2001589, BRAWH2001666, BRAWH2001671, BRAWH2001679, BRAWH2001686, BRAWH2001701, BRAWH2001842, BRAWH2001873, BRAWH2001940, BRAWH2001973, BRAWH2002047, BRAWH2002060, BRAWH2002062, BRAWH2002125, BRAWH2002191, BRAWH2002318, BRAWH2002333, BRAWH2002352, BRAWH2002383, BRAWH2002549, BRAWH2002601, BRAWH2002623, BRAWH2002630, BRAWH2002635, BRAWH2002662, BRAWH2002679, BRAWH2002725, BRAWH2002761, BRAWH2002861, BRAWH2002911, BRAWH2002963, BRAWH2002976, BRAWH2003000, BRAWH2003025, BRAWH2003135, BRAWH2003240, BRAWH2003307, BRAWH2003355, BRAWH2003366, BRAWH2003689, BRAWH2003832, BRAWH2003948, BRAWH2003964, BRAWH2004044, BRAWH2004068, BRAWH2004078, BRAWH2004136, BRAWH2004217, BRAWH2004580, BRAWH2004731, BRAWH2004779, BRAWH2004842, BRAWH2004884, BRAWH2004923, BRAWH2005008, BRAWH2005068, BRAWH2005074, BRAWH2005315, BRAWH2005524, BRAWH2005533, BRAWH2005578, BRAWH2005812, BRAWH2005974, BRAWH2005998, BRAWH2006083, BRAWH2006207, BRAWH2006301, BRAWH2006395, BRAWH2006405, BRAWH2006450, BRAWH2006493, BRAWH2006526, BRAWH2006543, BRAWH2006760, BRAWH2006960, BRAWH2006989, BRAWH2006996, BRAWH2007069, BRAWH2007308, BRAWH2007406, BRAWH2007550, BRAWH2007570, BRAWH2007591, BRAWH2007658, BRAWH2007808, BRAWH2007825, BRAWH2007862, BRAWH2007890, BRAWH2008128, BRAWH2008219, BRAWH2008292, BRAWH2008297, BRAWH2008366, BRAWH2008380, BRAWH2008540, BRAWH2008577, BRAWH2008790, BRAWH2008903, BRAWH2008956, BRAWH2008993, BRAWH2009112, BRAWH2009227, BRAWH2009238, BRAWH2009261, BRAWH2009263, BRAWH2009298, BRAWH2009304, BRAWH2009307, BRAWH2009360, BRAWH2009393, BRAWH2009485, BRAWH2009490, BRAWH2009558, BRAWH2009590, BRAWH2009678, BRAWH2009695, BRAWH2009907, BRAWH2010000, BRAWH2010069, BRAWH2010084, BRAWH2010136, BRAWH2010318, BRAWH2010354, BRAWH2010364, BRAWH2010536, BRAWH2010552, BRAWH2010584, BRAWH2010618, BRAWH2010619, BRAWH2011066, BRAWH2011079, BRAWH2011096, BRAWH2011155, BRAWH2011166, BRAWH2011204, BRAWH2011294, BRAWH2011343, BRAWH2011400, BRAWH2011762, BRAWH2011795, BRAWH2011796, BRAWH2011812, BRAWH2011860, BRAWH2011958, BRAWH2012054, BRAWH2012077, BRAWH2012161, BRAWH2012162, BRAWH2012258, BRAWH2012277, BRAWH2012326, BRAWH2012538, BRAWH2012540, BRAWH2012619, BRAWH2012698, BRAWH2012749, BRAWH2012827, BRAWH2012963, BRAWH2013047, BRAWH2013219, BRAWH2013294, BRAWH2013748, BRAWH2013866, BRAWH2013871, BRAWH2013914, BRAWH2013941, BRAWH2013955, BRAWH2014053, BRAWH2014234, BRAWH2014414, BRAWH2014473, BRAWH2014511, BRAWH2014717, BRAWH2014729, BRAWH2014876, BRAWH2014934, BRAWH2014954, BRAWH2015247, BRAWH2015349, BRAWH2015375, BRAWH2015385, BRAWH2015595, BRAWH2015728, BRAWH2015853, BRAWH2015866, BRAWH2016028, BRAWH2016106, BRAWH2016160, BRAWH2016166, BRAWH2016209, BRAWH2016221, BRAWH2016223, BRAWH2016269, BRAWH2016305, BRAWH2016439, BRAWH2016514, BRAWH2016562, BRAWH2016655, BRAWH2016679, BRAWH2016702, BRAWH2016724, BRAWH2016785, BRAWH2016792, BRAWH2016800, BRAWH2017103, BRAWH2017250, BRAWH2017294, BRAWH2017305, BRAWH2017379, BRAWH2017407, BRAWH2017433, BRAWH2017523, BRAWH2017534, BRAWH2017542, BRAWH2017635, BRAWH2017913, BRAWH2018206, BRAWH2018267, BRAWH2018282, BRAWH2018317, BRAWH2018506, BRAWH2018514, BRAWH2018527, BRAWH2018601, BRAWH2018729, BRAWH2018745, BRAWH2018875, BRAWH2019053, BRAWH2019055, BRAWH2019198, BRAWH3000078, BRAWH3000100, BRAWH3000166, BRAWH3000314, BRAWH3000329, BRAWH3000410, BRAWH3000446, BRAWH3000491, BRAWH3000604, BRAWH3000884, BRAWH3001053, BRAWH3001319, BRAWH3001326, BRAWH3001475, BRAWH3001636, BRAWH3001638, BRAWH3001712, BRAWH3001760, BRAWH3001783, BRAWH3001833, BRAWH3001879, BRAWH3001891, BRAWH3002433, BRAWH3002467, BRAWH3002513, BRAWH3002600, BRAWH3002819, BRAWH3003019, BRAWH3003136, BRAWH3003244, BRAWH3003343, BRAWH3003411, BRAWH3003522, BRAWH3003573, BRAWH3003598, BRAWH3003801, BRAWH3003975, BRAWH3004335, BRAWH3004453, BRAWH3004530, BRAWH3004666, BRAWH3005037, BRAWH3005047, BRAWH3005132, BRAWH3005146, BRAWH3005292, BRAWH3005300, BRAWH3005422, BRAWH3005534, BRAWH3005886, BRAWH3005892, BRAWH3005896, BRAWH3005912, BRAWH3006547, BRAWH3006548, BRAWH3006761, BRAWH3006792, BRAWH3007129, BRAWH3007221, BRAWH3007441, BRAWH3007455, BRAWH3007506, BRAWH3007726, BRAWH3007783, BRAWH3008167, BRAWH3008341, BRAWH3008559, BRAWH3008697, BRAWH3008867, BRAWH3009017, BRAWH3009285, BRAWH3009297, BRAWH3009961, BRAWH3010560, BRAWH3010602, BRAWH3010657, BRAWH3010726, BRAWH3010833, BRAWH3011101, BRAWH3011331, BRAWH3011402, BRAWH3011577, BRAWH3011623, BRAWH3011637, BRAWH3011685, BRAWH3011907, BRAWH3011929, BRAWH3012005, BRAWH3012662, BRAWH3012779, BRAWH3013009, BRAWH3013049, BRAWH3013197, BRAWH3013264, BRAWH3013508, BRAWH3014639, BRAWH3015017, BRAWH3015175, BRAWH3015260, BRAWH3015610, BRAWH3015825, BRAWH3016123, BRAWH3016271, BRAWH3016715, BRAWH3017260, BRAWH3017477, BRAWH3017537, BRAWH3017980, BRAWH3018369, BRAWH3018548, BRAWH3018969, BRAWH3019026, BRAWH3019529, BRAWH3019594, BRAWH3019629, BRAWH3019820, BRAWH3020200, BRAWH3020318, BRAWH3020486, BRAWH3020884, BRAWH3020928, BRAWH3021012, BRAWH3021580, BRAWH3021641, BRAWH3021643, BRAWH3021724, BRAWH3022347, BRAWH3022431, BRAWH3022459, BRAWH3022542, BRAWH3022719, BRAWH3022866, BRAWH3022900, BRAWH3023156, BRAWH3023168, BRAWH3023172, BRAWH3023274, BRAWH3023421, BRAWH3024231, BRAWH3024242, BRAWH3024469, BRAWH3024506, BRAWH3024613, BRAWH3024989, BRAWH3026349, BRAWH3026394, BRAWH3026529, BRAWH3027420, BRAWH3027440, BRAWH3027574, BRAWH3027607, BRAWH3027616, BRAWH3027675, BRAWH3027806, BRAWH3027880, BRAWH3027927, BRAWH3028202, BRAWH3028223, BRAWH3028306, BRAWH3028461, BRAWH3028645, BRAWH3028754, BRAWH3028796, BRAWH3029254, BRAWH3029313, BRAWH3029538, BRAWH3029556, BRAWH3030613, BRAWH3030772, BRAWH3030810, BRAWH3030892, BRAWH3030910, BRAWH3030950, BRAWH3031054, BRAWH3031710, BRAWH3031902, BRAWH3032298, BRAWH3032340, BRAWH3032571, BRAWH3032620, BRAWH3032930, BRAWH3033117, BRAWH3033293, BRAWH3033448, BRAWH3033513, BRAWH3034097, BRAWH3034114, BRAWH3034134, BRAWH3034668, BRAWH3034775, BRAWH3034890, BRAWH3035154, BRAWH3035403, BRAWH3035904, BRAWH3035914, BRAWH3035936, BRAWH3036077, BRAWH3036247, BRAWH3036270, BRAWH3036561, BRAWH3036738, BRAWH3036951, BRAWH3037394, BRAWH3037533, BRAWH3037979, BRAWH3038055, BRAWH3038230, BRAWH3038252, BRAWH3038324, BRCAN1000065, BRCAN1000076, BRCAN1000105, BRCAN1000149, BRCAN2000148, BRCAN2000149, BRCAN2000209, BRCAN2000239, BRCAN2000346, BRCAN2000364, BRCAN2000383, BRCAN2000418, BRCAN2000523, BRCAN2000541, BRCAN2000577, BRCAN2000620, BRCAN2000639, BRCAN2000763, BRCAN2000832, BRCAN2000923, BRCA2001223, BRCAN2001866, BRCAN2002173, BRCAN2002416, BRCAN2002473, BRCAN2002562, BRCAN2002662, BRCAN2002826, BRCAN2002854, BRCAN2002856, BRCAN2002892, BRCAN2002944, BRCAN2002948, BRCAN2003070, BRCAN2003269, BRCAN2003628, BRCAN2003703, BRCAN2003746, BRCAN2003814, BRCAN2003987, BRCAN2004173, BRCAN2004355, BRCAN2004371, BRCAN2004653, BRCAN2004699, BRCAN2005436, BRCAN2005449, BRCAN2006019, BRCAN2006051, BRCAN2006063, BRCAN2006117, BRCAN2006174, BRCAN2006290, BRCAN2006297, BRCAN2006323, BRCAN2006401, BRCAN2006411, BRCAN2006450, BRCAN2006955, BRCAN2007119, BRCAN2007144, BRCAN2007426, BRCAN2007525, BRCAN2007700, BRCAN2008494, BRCAN2008528, BRCAN2008701, BRCAN2008894, BRCAN2009156, BRCAN2009168, BRCAN2009203, BRCAN2010374, BRCAN2010376, BRCAN2010547, BRCAN2010581, BRCAN2010665, BRCAN2011254, BRCAN2011316, BRCAN2011602, BRCAN2011946, BRCAN2012110, BRCAN2012355, BRCAN2012402, BRCAN2012408, BRCAN2012481, BRCAN2012613, BRCAN2012713, BRCAN2012929, BRCAN2013655, BRCAN2013660, BRCAN2014143, BRCAN2014229, BRCAN2014370, BRCAN2014602, BRCAN2014652, BRCAN2014788, BRCAN2014881, BRCAN2014952, BRCAN2015371, BRCAN2015402, BRCAN2015464, BRCAN2015719, BRCAN2015757, BRCAN2015886, BRCAN2016025, BRCAN2016046, BRCAN2016174, BRCAN2016433, BRCAN2016762, BRCAN2016814, BRCAN2017442, BRCAN2017905, BRCAN2018240, BRCAN2018269, BRCAN2018490, BRCAN2018566, BRCAN2018667, BRCAN2018748, BRCAN2018935, BRCAN2019002, BRCAN2019387, BRCAN2019773, BRCAN2019907, BRCAN2020234, BRCAN2020331, BRCAN2020412, BRCAN2020467, BRCAN2020710, BRCAN2020880, BRCAN2021024, BRCAN2021028, BRCAN2021325, BRCAN2021452, BRCAN2021669, BRCAN2021718, BRCAN2022191, BRCAN2022472, BRCAN2022474, BRCAN2023347, BRCAN2023724, BRCAN2024451, BRCAN2024563, BRCAN2024572, BRCAN2025009, BRCAN2025093, BRCAN2025349, BRCAN2025368, BRCAN2025712, BRCAN2025982, BRCAN2026117, BRCAN2026340, BRCAN2026711, BRCAN2027150, BRCAN2027310, BRCAN2027334, BRCAN2027355, BRCAN2027513, BRCAN2027593, BRCAN2027970, BRCAN2028021, BRCAN2028040, BRCAN2028319, BRCAN2028338, BRCAN2028378, BRCAN2028460, BRCAN2028545, BRCAN2028634, BRCAN2028702, BRCOC1000087, BRCOC1000094, BRCOC2000004, BRCOC2000047, BRCOC2000186, BRCOC2000333, BRCOC2000360, BRCOC2000404, BRCOC2000637, BRCOC2000670, BRCOC2000816, BRCOC2000850, BRCOC2001355, BRCOC2002085, BRCOC2002155, BRCOC2002323, BRCOC2002659, BRCOC2002664, BRCOC2002686, BRCOC2002751, BRCOC2002756, BRCOC2002777, BRCOC2002835, BRCOC2003100, BRCOC2003125, BRCOC2003187, BRCOC2003213, BRCOC2003513, BRCOC2003732, BRCOC2003740, BRCOC2004036, BRCOC2004175, BRCOC2004354, BRCOC2004455, BRCOC2004950, BRCOC2005542, BRCOC2005903, BRCOC2005951, BRCOC2006164, BRCOC2006189, BRCOC2006243, BRCOC2006270, BRCOC2006639, BRCOC2006942, BRCOC2007034, BRCOC2007593, BRCOC2007733, BRCOC2007769, BRCOC2008064, BRCOC2008225, BRCOC2008642, BRCOC2008993, BRCOC2009052, BRCOC2009196, BRCOC2009380, BRCOC2009638, BRCOC2009937, BRCOC2010115, BRCOC2010730, BRCOC2010980, BRCOC2010994, BRCOC2011010, BRCOC2011398, BRCOC2011418, BRCOC2011506, BRCOC2011769, BRCOC2011996, BRCOC2012229, BRCOC2012551, BRCOC2012813, BRCOC2013448, BRCOC2013573, BRCOC2013675, BRCOC2013780, BRCOC2014013, BRCOC2014033, BRCOC2014748, BRCOC2014833, BRCOC2015597, BRCOC2015824, BRCOC2015908, BRCOC2015944, BRCOC2016525, BRCOC2016661, BRCOC2017061, BRCOC2017652, BRCOC2017856, BRCOC2018775, BRCOC2018877, BRCOC2019255, BRCOC2019549, BRCOC2019841, BRCOC2019896, BRCOC2019903, BRCOC2019934, BRCOC2020122, BRCOC2020142, BRHIP1000058, BRHIP1000072, BRHIP1000129, BRHIP1000258, BRHIP2000021, BRHIP2000079, BRHIP2000087, BRHIP2000163, BRHIP2000210, BRHIP2000239, BRHIP2000245, BRHIP2000359, BRHIP2000445, BRHIP2000506, BRHIP2000532, BRHIP2000621, BRHIP2000691, BRHIP2000819, BRHIP2000826, BRHIP2000920, BRHIP2001099, BRHIP2001686, BRHIP2001782, BRHIP2001802, BRHIP2001805, BRHIP2001886, BRHIP2001927, BRHIP2002122, BRHIP2002143, BRHIP2002172, BRHIP2002339, BRHIP2002346, BRHIP2002510, BRHIP2002664, BRHIP2002722, BRHIP2002929, BRHIP2003048, BRHIP2003062, BRHIP2003242, BRHIP2003272, BRHIP2003748, BRHIP2003786, BRHIP2003828, BRHIP2003917, BRHIP2004312, BRHIP2004355, BRHIP2004359, BRHIP2004814, BRHIP2004883, BRHIP2004902, BRHIP2005010, BRHIP2005236, BRHIP2005271, BRHIP2005354, BRHIP2005600, BRHIP2005719, BRHIP2005724, BRHIP2005752, BRHIP2005932, BRHIP2006617, BRHIP2006782, BRHIP2006800, BRHIP2006819, BRHIP2006921, BRHIP2007307, BRHIP2007616, BRHIP2007690, BRHIP2007928, BRHIP2007969, BRHIP2008269, BRHIP2008389, BRHIP2008607, BRHIP2008756, BRHIP2008909, BRHIP2009019, BRHIP2009177, BRHIP2009340, BRHIP2009351, BRHIP2009414, BRHIP2009474, BRHIP2009617, BRHIP2009685, BRHIP2010309, BRHIP2010444, BRHIP2010487, BRHIP2010571, BRHIP2010593, BRHIP2010610, BRHIP2010723, BRHIP2010744, BRHIP2011080, BRHIP2011120, BRHIP2011199, BRHIP2011491, BRHIP2011508, BRHIP2011576, BRHIP2011616, BRHIP2011783, BRHIP2011838, BRHIP2011891, BRHIP2011933, BRHIP2012054, BRHIP2012059, BRHIP2012141, BRHIP2012314, BRHIP2012360, BRHIP2012545, BRHIP2012580, BRHIP2012642, BRHIP2012750, BRHIP2012922, BRHIP2012923, BRHIP2012972, BRHIP2013447, BRHIP2013510, BRHIP2013699, BRHIP2013723, BRHIP2013958, BRHIP2013972, BRHIP2014063, BRHIP2014285, BRHIP2014291, BRHIP2014373, BRHIP2014386, BRHIP2014387, BRHIP2014954, BRHIP2015153, BRHIP2015356, BRHIP2015360, BRHIP2016005, BRHIP2016125, BRHIP2016788, BRHIP2016968, BRHIP2016990, BRHIP2017010, BRHIP2017315, BRHIP2017385, BRHIP2017404, BRHIP2017542, BRHIP2017553, BRHIP2017642, BRHIP2017714, BRHIP2017780, BRHIP2017945, BRHIP2018014, BRHIP2018369, BRHIP2018612, BRHIP2018635, BRHIP2018650, BRHIP2018719, BRHIP2018805, BRHIP2018998, BRHIP2019007, BRHIP2019047, BRHIP2019149, BRHIP2019177, BRHIP2019186, BRHIP2019291, BRHIP2019494, BRHIP2019589, BRHIP2019641, BRHIP2019884, BRHIP2019972, BRHIP2020182, BRHIP2020509, BRHIP2020622, BRHIP2020695, BRHIP2020743, BRHIP2020842, BRHIP2020859, BRHIP2020930, BRHIP2021102, BRHIP2021289, BRHIP2021495, BRHIP2021615, BRHIP2021744, BRHIP2021870, BRHIP2021929, BRHIP2022006, BRHIP2022054, BRHIP2022221, BRHIP2022298, BRHIP2022467, BRHIP2022708, BRHIP2023071, BRHIP2023229, BRHIP2023272, BRHIP2023292, BRHIP2023309, BRHIP2023369, BRHIP2023438, BRHIP2023695, BRHIP2023735, BRHIP2023773, BRHIP2023860, BRHIP2023869, BRHIP2024046, BRHIP2024165, BRHIP2024201, BRHIP2024347, BRHIP2024549, BRHIP2024789, BRHIP2024941, BRHIP2025245, BRHIP2025366, BRHIP2025679, BRHIP2025739, BRHIP2025797, BRHIP2026021, BRHIP2026155, BRHIP2026214, BRHIP2026288, BRHIP2026346, BRHIP2026557, BRHIP2026723, BRHIP2026877, BRHIP2027054, BRHIP2027077, BRHIP2027563, BRHIP2027685, BRHIP2027762, BRHIP2028187, BRHIP2028303, BRHIP2028330, BRHIP2028480, BRHIP2028583, BRHIP2028593, BRHIP2029176, BRHIP2029283, BRHIP2029393, BRHIP2029529, BRHIP3000060, BRHIP3000070, BRHIP3000081, BRHIP3000240, BRHIP3000377, BRHIP3000488, BRHIP3000526, BRHIP3000626, BRHIP3000859, BRHIP3000907, BRHIP3001076, BRHIP3001079, BRHIP3001141, BRHIP3001283, BRHIP3001338, BRHIP3001360, BRHIP3001481, BRHIP3001878, BRHIP3001964, BRHIP3002114, BRHIP3002124, BRHIP3002141, BRHIP3002363, BRHIP3002920, BRHIP3002931, BRHIP3003063, BRHIP3003126, BRHIP3003306, BRHIP3003340, BRHIP3003395, BRHIP3003484, BRHIP3003644, BRHIP3003688, BRHIP3003961, BRHIP3003984, BRHIP3004193, BRHIP3004215, BRHIP3004416, BRHIP3004710, BRHIP3004725, BRHIP3004774, BRHIP3004786, BRHIP3004863, BRHIP3005037, BRHIP3005137, BRHIP3005142, BRHIP3005231, BRHIP3005307, BRHIP3005574, BRHIP3005673, BRHIP3005768, BRHIP3005801, BRHIP3005944, BRHIP3006279, BRHIP3006294, BRHIP3006390, BRHIP3006449, BRHIP3006683, BRHIP3006786, BRHIP3006950, BRHIP3007172, BRHIP3007183, BRHIP3007195, BRHIP3007239, BRHIP3007291, BRHIP3007409, BRHIP3007424, BRHIP3007483, BRHIP3007609, BRHIP3007640, BRHIP3007960, BRHIP3008183, BRHIP3008314, BRHIP3008344, BRHIP3008405, BRHIP3008565, BRHIP3008598, BRHIP3008606, BRHIP3008691, BRHIP3008714, BRHIP3008997, BRHIP3009099, BRHIP3009140, BRHIP3009181, BRHIP3009318, BRHIP3009427, BRHIP3009448, BRHIP3009672, BRHIP3009753, BRHIP3010135, BRHIP3010289, BRHIP3010529, BRHIP3011082, BRHIP3011241, BRHIP3011269, BRHIP3011460, BRHIP3011567, BRHIP3011831, BRHIP3012185, BRHIP3012289, BRHIP3012357, BRHIP3012736, BRHIP3012745, BRHIP3012868, BRHIP3012997, BRHIP3013078, BRHIP3013271, BRHIP3013588, BRHIP3013698, BRHIP3013765, BRHIP3013897, BRHIP3014237, BRHIP3014675, BRHIP3015620, BRHIP3015751, BRHIP3015854, BRHIP3016032, BRHIP3016213, BRHIP3016302, BRHIP3016421, BRHIP3017109, BRHIP3017146, BRHIP3017256, BRHIP3017325, BRHIP3017558, BRHIP3017637, BRHIP3017855, BRHIP3018278, BRHIP3019643, BRHIP3019824, BRHIP3019880, BRHIP3019956, BRHIP3020046, BRHIP3020155, BRHIP3020182, BRHIP3020733, BRHIP3021499, BRHIP3021534, BRHIP3021778, BRHIP3021987, BRHIP3022656, BRHIP3023922, BRHIP3024118, BRHIP3024533, BRHIP3024703, BRHIP3024725, BRHIP3024820, BRHIP3025161, BRHIP3025702, BRHIP3025795, BRHIP3025844, BRHIP3026052, BRHIP3026097, BRHIP3026231, BRHIP3026335, BRHIP3026651, BRHIP3027105, BRHIP3027137, BRHIP3027160, BRHIP3027191, BRHIP3027501, BRHIP3027594, BRHIP3027651, BRHIP3027854, BRHIP3027947, BRHIP3028570, BRHIP3028742, BRSSN1000056, BRSSN1000059, BRSSN1000092, BRSSN1000153, BRSSN2000097, BRSSN2000175, BRSSN2000197, BRSSN2000244, BRSSN2000293, BRSSN2000295, BRSSN2000312, BRSSN2000518, BRSSN2000566, BRSSN2000684, BRSSN2000715, BRSSN2000832, BRSSN2001213, BRSSN2001275, BRSSN2001342, BRSSN2001426, BRSSN2001503, BRSSN2001579, BRSSN2001758, BRSSN2001810, BRSSN2001869, BRSSN2002857, BRSSN2002859, BRSSN2003012, BRSSN2003086, BRSSN2003093, BRSSN2003820, BRSSN2003841, BRSSN2003937, BRSSN2004142, BRSSN2004303, BRSSN2004304, BRSSN2004496, BRSSN2004657, BRSSN2004679, BRSSN2004686, BRSSN2004710, BRSSN2004719, BRSSN2005847, BRSSN2006133, BRSSN2006390, BRSSN2006575, BRSSN2006611, BRSSN2006644, BRSSN2006892, BRSSN2007076, BRSSN2007168, BRSSN2007202, BRSSN2007338, BRSSN2007464, BRSSN2007504, BRSSN2007819, BRSSN2008125, BRSSN2008419, BRSSN2008464, BRSSN2008549, BRSSN2008797, BRSSN2009119, BRSSN2009378, BRSSN2009389, BRSSN2009395, BRSSN2009627, BRSSN2009630, BRSSN2009702, BRSSN2010019, BRSSN2010110, BRSSN2010587, BRSSN2010596, BRSSN2010830, BRSSN2011262, BRSSN2012081, BRSSN2012103, BRSSN2012157, BRSSN2012198, BRSSN2012254, BRSSN2012439, BRSSN2012622, BRSSN2012691, BRSSN2012838, BRSSN2013095, BRSSN2013544, BRSSN2013696, BRSSN2013702, BRSSN2013733, BRSSN2013874, BRSSN2014112, BRSSN2014294, BRSSN2014299, BRSSN2014424, BRSSN2014513, BRSSN2014556, BRSSN2014573, BRSSN2014636, BRSSN2014685, BRSSN2015199, BRSSN2015369, BRSSN2015493, BRSSN2015497, BRSSN2015554, BRSSN2015707, BRSSN2015773, BRSSN2015907, BRSSN2015982, BRSSN2016589, BRSSN2016768, BRSSN2016905, BRSSN2017297, BRSSN2017422, BRSSN2017530, BRSSN2017682, BRSSN2017757, BRSSN2018218, BRSSN2018447, BRSSN2018581, BRSSN2018731, BRSSN2018771, BRSSN2018925, BRSTN1000097, BRSTN2000058, BRSTN2000070, BRSTN2000220, BRSTN2000312, BRSTN2000367, BRSTN2000536, BRSTN2000872, BRSTN2001067, BRSTN2001613, BRSTN2001801, BRSTN2002105, BRSTN2002400, BRSTN2002532, BRSTN2002691, BRSTN2003590, BRSTN2003835, BRSTN2004863, BRSTN2004869, BRSTN2004987, BRSTN2005721, BRSTN2006306, BRSTN2006466, BRSTN2006580, BRSTN2006583, BRSTN2006638, BRSTN2006865, BRSTN2007000, BRSTN2007118, BRSTN2007284, BRSTN2007765, BRSTN2008052, BRSTN2008283, BRSTN2008367, BRSTN2008418, BRSTN2008457, BRSTN2008475, BRSTN2008930, BRSTN2009247, BRSTN2010089, BRSTN2010107, BRSTN2010363, BRSTN2010416, BRSTN2010500, BRSTN2010569, BRSTN2010750, BRSTN2010923, BRSTN2011211, BRSTN2011597, BRSTN2011688, BRSTN2011799, BRSTN2012089, BRSTN2012284, BRSTN2012320, BRSTN2012380, BRSTN2012451, BRSTN2013171, BRSTN2013354, BRSTN2013502, BRSTN2013931, BRSTN2014490, BRSTN2014633, BRSTN2014751, BRSTN2014770, BRSTN2015015, BRSTN2015978, BRSTN2016066, BRSTN2016335, BRSTN2016470, BRSTN2016678, BRSTN2016892, BRSTN2016918, BRSTN2017104, BRSTN2017151, BRSTN2017237, BRSTN2017379, BRSTN2017761, BRSTN2017771, BRSTN2017995, BRSTN2018077, BRSTN2018083, BRSTN2018596, BRSTN2018692, BRSTN2018712, BRSTN2019079, BRSTN2019129, BRTHA1000021, BRTHA1000063, BRTHA2000057, BRTHA2000474, BRTHA2000514, BRTHA2000574, BRTHA2000855, BRTHA2000969, BRTHA2000972, BRTHA2001304, BRTHA2001370, BRTHA2001462, BRTHA2001717, BRTHA2001812, BRTHA2002091, BRTHA2002115, BRTHA2002133, BRTHA2002281, BRTHA2002376, BRTHA2002442, BRTHA2002493, BRTHA2002565, BRTHA2002608, BRTHA2002702, BRTHA2002721, BRTHA2002726, BRTHA2002741, BRTHA2002808, BRTHA2002896, BRTHA2002903, BRTHA2003030, BRTHA2003110, BRTHA2003116, BRTHA2003436, BRTHA2003759, BRTHA2003794, BRTHA2004361, BRTHA2004371, BRTHA2004582, BRTHA2004629, BRTHA2004639, BRTHA2004642, BRTHA2004812, BRTHA2004821, BRTHA2004978, BRTHA2004992, BRTHA2005005, BRTHA2005013, BRTHA2005448, BRTHA2005579, BRTHA2005831, BRTHA2005942, BRTHA2005956, BRTHA2006075, BRTHA2006146, BRTHA2006194, BRTHA2006232, BRTHA2006720, BRTHA2006735, BRTHA2006974, BRTHA2006975, BRTHA2007060, BRTHA2007122, BRTHA2007422, BRTHA2007603, BRTHA2007665, BRTHA2008316, BRTHA2008335, BRTHA2008502, BRTHA2008513, BRTHA2008527, BRTHA2008535, BRTHA2008598, BRTHA2008669, BRTHA2008955, BRTHA2009311, BRTHA2009349, BRTHA2009486, BRTHA2009803, BRTHA2009846, BRTHA2009886, BRTHA2009972, BRTHA2010008, BRTHA2010033, BRTHA2010073, BRTHA2010097, BRTHA2010191, BRTHA2010397, BRTHA2010608, BRTHA2010672, BRTHA2010884, BRTHA2010907, BRTHA2011062, BRTHA2011194, BRTHA2011321, BRTHA2011351, BRTHA2011500, BRTHA2011641, BRTHA2011691, BRTHA2012129, BRTHA2012183, BRTHA2012189, BRTHA2012351, BRTHA2012392, BRTHA2012466, BRTHA2012555, BRTHA2012562, BRTHA2012714, BRTHA2012980, BRTHA2013262, BRTHA2013275, BRTHA2013426, BRTHA2013460, BRTHA2013515, BRTHA2013540, BRTHA2013595, BRTHA2013610, BRTHA2013707, BRTHA2013942, BRTHA2014287, BRTHA2014334, BRTHA2014381, BRTHA2014578, BRTHA2014647, BRTHA2014663, BRTHA2014792, BRTHA2014828, BRTHA2014909, BRTHA2014975, BRTHA2014997, BRTHA2015406, BRTHA2015478, BRTHA2015696, BRTHA2015700, BRTHA2015853, BRTHA2015878, BRTHA2016179, BRTHA2016215, BRTHA2016267, BRTHA2016318, BRTHA2016496, BRTHA2016543, BRTHA2016552, BRTHA2016765, BRTHA2016918, BRTHA2017178, BRTHA2017353, BRTHA2017364, BRTHA2017972, BRTHA2017985, BRTHA2018011, BRTHA2018129, BRTHA2018165, BRTHA2018304, BRTHA2018344, BRTHA2018420, BRTHA2018443, BRTHA2018504, BRTHA2018558, BRTHA2018591, BRTHA2018624, BRTHA2018706, BRTHA2018707, BRTHA2019014, BRTHA2019022, BRTHA2019048, BRTHA2019073, BRTHA2019726, BRTHA2019743, BRTHA2020400, BRTHA2020566, BRTHA2020642, BRTHA2020695, BRTHA2020721, BRTHA2020781, BRTHA2020811, BRTHA2020910, BRTHA2021212, BRTHA2021440, BRTHA2021450, BRTHA2022074, BRTHA2022914, BRTHA2022968, BRTHA2023402, BRTHA2023437, BRTHA2024177, BRTHA2024354, BRTHA2024712, BRTHA2025869, BRTHA2026071, BRTHA2026290, BRTHA2026311, BRTHA2027227, BRTHA2027229, BRTHA2027250, BRTHA2027546, BRTHA2028297, BRTHA2029969, BRTHA2030036, BRTHA2030213, BRTHA2031517, BRTHA2031800, BRTHA2031917, BRTHA2032763, BRTHA2032845, BRTHA2033122, BRTHA2033264, BRTHA2033320, BRTHA2033469, BRTHA2033683, BRTHA2034281, BRTHA2034576, BRTHA2034874, BRTHA2035448, BRTHA2035743, BRTHA2036055, BRTHA2036295, BRTHA2036660, BRTHA2037247, BRTHA2038279, BRTHA2038345, BRTHA2038353, BRTHA2038396, BRTHA3000252, BRTHA3000273, BRTHA3000296, BRTHA3000297, BRTHA3000325, BRTHA3000456, BRTHA3000789, BRTHA3001221, BRTHA3001623, BRTHA3002265, BRTHA3002401, BRTHA3002411, BRTHA3002864, BRTHA3002933, BRTHA3002955, BRTHA3003000, BRTHA3003023, BRTHA3003074, BRTHA3003339, BRTHA3003343, BRTHA3003417, BRTHA3003449, BRTHA3003474, BRTHA3003704, BRTHA3004432, BRTHA3004475, BRTHA3004502, BRTHA3004610, BRTHA3005046, BRTHA3005735, BRTHA3005988, BRTHA3006318, BRTHA3006593, BRTHA3006856, BRTHA3007113, BRTHA3007130, BRTHA3007148, BRTHA3007319, BRTHA3007469, BRTHA3007532, BRTHA3007662, BRTHA3007685, BRTHA3007769, BRTHA3008143, BRTHA3008293, BRTHA3008310, BRTHA3008386, BRTHA3008520, BRTHA3008608, BRTHA3008694, BRTHA3008826, BRTHA3009037, BRTHA3009090, BRTHA3009291, BRTHA3009858, BRTHA3010135, BRTHA3010366, BRTHA3010469, BRTHA3010530, BRTHA3010540, BRTHA3010717, BRTHA3011149, BRTHA3011187, BRTHA3011229, BRTHA3011361, BRTHA3011510, BRTHA3011892, BRTHA3012265, BRTHA3013860, BRTHA3013882, BRTHA3013884, BRTHA3013981, BRTHA3014000, BRTHA3014105, BRTHA3014507, BRTHA3014547, BRTHA3014691, BRTHA3014835, BRTHA3014854, BRTHA3014908, BRTHA3014920, BRTHA3015815, BRTHA3016616, BRTHA3016835, BRTHA3016845, BRTHA3016917, BRTHA3017047, BRTHA3017589, BRTHA3017848, BRTHA3018409, BRTHA3018514, BRTHA3018617, BRTHA3018623, BRTHA3018656, BRTHA3019048, BRTHA3019105, BRTHA3019183, BRTHA3020000, BRTHA3020314, BRTHA3020369, BRTHA3021569, BRTHA3021708, BRTHA3021786, BRTHA3022641, BRTHA3023523, BRTHA3023590, BRTHA3023929, BRTHA3024233, BRTHA3024600, BRTHA3025073, BRTHA3025789, BRTHA3025826, BRTHA3026161, BRTHA3026180, BRTHA3026507, BRTHA3026556, BRTHA3026916, BRTHA3027171, BRTHA3027318, BRTHA3027638, BRTHA3027820, BRTHA3027879, BRTHA3027957, BRTHA3028339, BRTHA3028505, BRTHA3028782, CD34C2000051, CD34C2000152, CD34C2000175, CD34C2000443, CD34C3000125, CD34C3000314, CD34C3000424, CD34C3000494, CERVX1000042, CERVX2000812, CERVX2000968, CERVX2002006, CERVX2002013, CERVX2002430, CERVX2002770, CHONS1000058, CHONS2000172, CHONS2000797, CHONS2001287, CHONS2001382, CHONS2001797, CHONS2001834, CHONS2002419, COLON1000030, COLON1000084, COLON1000135, COLON2000470, COLON2000557, COLON2000568, COLON2001829, COLON2001866, COLON2002443, COLON2002520, COLON2003043, COLON2003529, COLON2004318, COLON2004351, COLON2004478, COLON2004911, COLON2005126, COLON2005623, COLON2005735, COLON2005772, COLON2006263, COLON2006282, COLON2006417, COLON2007274, COLON2007733, COLON2008105, COLON2009337, COLON2009499, CORDB1000140, CORDB2000061, CORDB2000127, CORDB2000541, CTONG1000009, CTONG1000020, CTONG1000022, CTONG1000040, CTONG1000056, CTONG1000062, CTONG1000086, CTONG1000088, CTONG1000093, CTONG1000097, CTONG1000113, CTONG1000137, CTONG1000165, CTONG1000175, CTONG1000180, CTONG1000181, CTONG1000220, CTONG1000277, CTONG1000283, CTONG1000302, CTONG1000341, CTONG1000467, CTONG1000476, CTONG1000488, CTONG1000508, CTONG1000540, CTONG2000031, CTONG2000042, CTONG2000201, CTONG2000218, CTONG2000279, CTONG2000303, CTONG2000330, CTONG2000395, CTONG2000411, CTONG2000465, CTONG2000480, CTONG2000561, CTONG2000589, CTONG2000766, CTONG2000771, CTONG2000819, CTONG2000827, CTONG2000846, CTONG2000855, CTONG2000977, CTONG2001139, CTONG2001226, CTONG2001320, CTONG2001366, CTONG2001413, CTONG2001428, CTONG2001513, CTONG2001524, CTONG2001533, CTONG2001598, CTONG2001681, CTONG2001724, CTONG2001749, CTONG2001800, CTONG2001858, CTONG2001877, CTONG2001955, CTONG2002066, CTONG2002143, CTONG2002395, CTONG2002417, CTONG2002418, CTONG2002453, CTONG2002520, CTONG2002558, CTONG2002590, CTONG2002721, CTONG2002766, CTONG2002816, CTONG2002965, CTONG2002999, CTONG2003028, CTONG2003100, CTONG2003115, CTONG2003189, CTONG2003245, CTONG2003348, CTONG2003350, CTONG2003361, CTONG2003372, CTONG2003375, CTONG2003427, CTONG2003517, CTONG2003599, CTONG2003680, CTONG2003699, CTONG2003764, CTONG2003782, CTONG2003889, CTONG2003937, CTONG2003945, CTONG2004000, CTONG2004062, CTONG2004115, CTONG2004126, CTONG2004264, CTONG2004305, CTONG2004397, CTONG2004454, CTONG2004550, CTONG2004669, CTONG2004716, CTONG2004912, CTONG2004941, CTONG2004948, CTONG2005049, CTONG2005110, CTONG2005145, CTONG2005265, CTONG2005290, CTONG2005374, CTONG2005399, CTONG2005468, CTONG2005567, CTONG2005585, CTONG2005615, CTONG2005635, CTONG2005775, CTONG2005795, CTONG2005890, CTONG2005904, CTONG2005913, CTONG2006129, CTONG2006223, CTONG2006273, CTONG2006310, CTONG2006377, CTONG2006393, CTONG2006515, CTONG2006524, CTONG2006568, CTONG2006611, CTONG2006620, CTONG2006666, CTONG2006691, CTONG2006798, CTONG2006836, CTONG2006932, CTONG2006942, CTONG2006964, CTONG2007007, CTONG2007009, CTONG2007072, CTONG2007091, CTONG2007104, CTONG2007168, CTONG2007175, CTONG2007259, CTONG2007272, CTONG2007293, CTONG2007297, CTONG2007399, CTONG2007417, CTONG2007441, CTONG2007474, CTONG2007613, CTONG2007623, CTONG2007681, CTONG2007776, CTONG2007779, CTONG2007898, CTONG2007970, CTONG2008014, CTONG2008184, CTONG2008262, CTONG2008269, CTONG2008343, CTONG2008402, CTONG2008405, CTONG2008521, CTONG2008562, CTONG2008577, CTONG2008595, CTONG2008621, CTONG2008689, CTONG2008720, CTONG2008721, CTONG2008773, CTONG2008989, CTONG2009033, CTONG2009132, CTONG2009156, CTONG2009181, CTONG2009257, CTONG2009258, CTONG2009268, CTONG2009270, CTONG2009395, CTONG2009423, CTONG2009440, CTONG2009527, CTONG2009531, CTONG2009534, CTONG2009570, CTONG2009572, CTONG2009604, CTONG2009643, CTONG2009675, CTONG2009689, CTONG2009725, CTONG2009766, CTONG2009768, CTONG2009844, CTONG2009871, CTONG2009887, CTONG2009891, CTONG2009923, CTONG2009938, CTONG2009955, CTONG2009958, CTONG2009963, CTONG2010018, CTONG2010024, CTONG2010116, CTONG2010133, CTONG2010148, CTONG2010276, CTONG2010330, CTONG2010408, CTONG2010508, CTONG2010623, CTONG2010652, CTONG2010803, CTONG2011188, CTONG2011429, CTONG2011474, CTONG2011676, CTONG2011716, CTONG2011765, CTONG2011779, CTONG2011815, CTONG2011822, CTONG2011825, CTONG2011920, CTONG2011985, CTONG2012001, CTONG2012029, CTONG2012050, CTONG2012077, CTONG2012101, CTONG2012123, CTONG2012158, CTONG2012230, CTONG2012401, CTONG2012422, CTONG2012425, CTONG2012447, CTONG2012473, CTONG2012476, CTONG2012533, CTONG2012554, CTONG2012724, CTONG2012738, CTONG2012745, CTONG2012758, CTONG2012847, CTONG2012901, CTONG2013128, CTONG2013149, CTONG2013156, CTONG2013178, CTONG2013222, CTONG2013284, CTONG2013339, CTONG2013348, CTONG2013393, CTONG2013511, CTONG2013630, CTONG2013803, CTONG2013985, CTONG2013986, CTONG2014032, CTONG2014058, CTONG2014119, CTONG2014165, CTONG2014191, CTONG2014206, CTONG2014234, CTONG2014264, CTONG2014389, CTONG2014491, CTONG2014630, CTONG2014635, CTONG2014646, CTONG2014705, CTONG2014946, CTONG2014954, CTONG2014959, CTONG2014966, CTONG2014995, CTONG2015204, CTONG2015316, CTONG2015330, CTONG2015345, CTONG2015358, CTONG2015434, CTONG2015518, CTONG2015540, CTONG2015596, CTONG2015633, CTONG2015678, CTONG2015717, CTONG2015804, CTONG2015815, CTONG2015866, CTONG2015914, CTONG2015953, CTONG2016185, CTONG2016217, CTONG2016355, CTONG2016499, CTONG2016505, CTONG2016559, CTONG2016658, CTONG2016775, CTONG2016797, CTONG2016846, CTONG2016869, CTONG2016904, CTONG2016942, CTONG2016953, CTONG2017021, CTONG2017094, CTONG2017292, CTONG2017409, CTONG2017429, CTONG2017458, CTONG2017604, CTONG2017650, CTONG2017798, CTONG2017804, CTONG2017814, CTONG2017910, CTONG2017939, CTONG2017989, CTONG2017998, CTONG2018062, CTONG2018069, CTONG2018147, CTONG2018217, CTONG2018279, CTONG2018334, CTONG2018343, CTONG2018379, CTONG2018413, CTONG2018483, CTONG2018629, CTONG2018652, CTONG2018653, CTONG2018655, CTONG2018735, CTONG2018843, CTONG2018900, CTONG2018976, CTONG2019029, CTONG2019063, CTONG2019144, CTONG2019232, CTONG2019248, CTONG2019590, CTONG2019652, CTONG2019704, CTONG2019822, CTONG2019833, CTONG2020031, CTONG2020108, CTONG2020127, CTONG2020171, CTONG2020374, CTONG2020378, CTONG2020445, CTONG2020522, CTONG2020582, CTONG2020806, CTONG2020831, CTONG2020974, CTONG2021024, CTONG2021132, CTONG2021168, CTONG2021289, CTONG2022153, CTONG2022601, CTONG2022835, CTONG2023021, CTONG2023449, CTONG2023512, CTONG2024031, CTONG2024206, CTONG2024614, CTONG2024749, CTONG2025496, CTONG2025513, CTONG2025516, CTONG2025610, CTONG2025900, CTONG2026513, CTONG2026770, CTONG2026920, CTONG2026987, CTONG2027150, CTONG2027263, CTONG2027327, CTONG2027361, CTONG2027591, CTONG2027736, CTONG2027783, CTONG2027828, CTONG2027959, CTONG2028097, CTONG2028309, CTONG2028486, CTONG2028518, CTONG2028687, CTONG2028758, CTONG3000657, CTONG3000686, CTONG3000707, CTONG3000896, CTONG3001123, CTONG3001420, CTONG3001501, CTONG3001560, CTONG3001605, CTONG3001746, CTONG3002020, CTONG3002127, CTONG3002370, CTONG3002412, CTONG3002433, CTONG3002518, CTONG3002552, CTONG3002588, CTONG3002674, CTONG3002728, CTONG3002909, CTONG3002947, CTONG3002983, CTONG3003165, CTONG3003179, CTONG3003483, CTONG3003553, CTONG3003598, CTONG3003652, CTONG3003654, CTONG3003669, CTONG3003737, CTONG3003972, CTONG3004072, CTONG3004317, CTONG3004397, CTONG3004550, CTONG3004576, CTONG3004607, CTONG3004712, CTONG3005325, CTONG3005648, CTONG3005713, CTONG3005803, CTONG3005813, CTONG3006067, CTONG3006073, CTONG3006186, CTONG3006650, CTONG3006659, CTONG3007244, CTONG3007444, CTONG3007528, CTONG3007586, CTONG3007870, CTONG3008223, CTONG3008252, CTONG3008258, CTONG3008457, CTONG3008496, CTONG3008566, CTONG3008639, CTONG3008831, CTONG3008951, CTONG3008959, CTONG3009227, CTONG3009287, CTONG3009328, CTONG3009385, D30ST1000066, D30ST1000109, D30ST1000238, D30ST2000184, D30ST2000618, D30ST2000654, D30ST2000734, D30ST2001328, D30ST2001669, D30ST2001670, D30ST2001788, D30ST2002182, D30ST2002223, D30ST2002262, D30ST2002272, D30ST2002417, D30ST2002436, D30ST2002648, D30ST2003024, D30ST2003331, D30ST2003607, D30ST2003797, D30ST2004637, D30ST3000169, D30ST3000195, D30ST3000258, D30ST3000291, D30ST3000388, D30ST3000493, D60ST2000127, D60ST2000169, D60ST2000245, D60ST2000358, D60ST2000507, D90ST2000031, D90ST2000278, D90ST2000440, D90ST2000869, D90ST2001319, D90ST2001433, D90ST2002397, D90ST2002608, D90ST2002673, D90ST2003106, D90ST2003108, D90ST2003137, D90ST2003397, D90ST2003580, D90ST2003594, D90ST2003762, D90ST2003791, D90ST2003989, D90ST2004018, D90ST2004073, D90ST2004417, DFNES1000003, DFNES1000083, DFNES1000107, DFNES1000150, DFNES1000185, DFNES2000011, DFNES2000143, DFNES2000212, DFNES2000268, DFNES2000292, DFNES2000426, DFNES2000432, DFNES2000457, DFNES2000471, DFNES2000913, DFNES2001091, DFNES2001096, DFNES2001108, DFNES2001177, DFNES2001404, DFNES2001564, DFNES2001565, DFNES2001647, DFNES2001800, DFNES2001829, DFNES2002220, DFNES2002509, DFNES2002550, DFNES2002588, DFNES2002817, DFNES2002966, DFNES2003081, DFNES2003192, DFNES2003255, DFNES2003742, DFNES2004354, DFNES2004383, DFNES2004684, DFNES2005266, DFNES2005527, DFNES2005540, DFNES2005779, DFNES2005875, DFNES2006944, DFNES2007113, DFNES2007299, DFNES2007332, DFNES2007641, DFNES2007757, DFNES2008280, DFNES2008881, DFNES2010502, DFNES2011192, DFNES2011221, DFNES2011239, DFNES2011245, DFNES2011380, ERLTF1000021, ERLTF2000324, ERLTF2000465, FCBBF1000023, FCBBF1000025, FCBBF1000069, FCBBF1000117, FCBBF1000121, FCBBF1000125, FCBBF1000131, FCBBF1000155, FCBBF1000157, FCBBF1000171, FCBBF1000174, FCBBF1000182, FCBBF1000198, FCBBF1000206, FCBBF1000220, FCBBF1000232, FCBBF1000233, FCBBF1000243, FCBBF1000270, FCBBF1000272, FCBBF1000297, FCBBF1000314, FCBBF1000322, FCBBF1000349, FCBBF1000367, FCBBF1000374, FCBBF1000376, FCBBF1000395, FCBBF1000397, FCBBF1000425, FCBBF1000437, FCBBF1000506, FCBBF1000546, FCBBF1000550, FCBBF1000581, FCBBF1000582, FCBBF1000598, FCBBF1000604, FCBBF1000618, FCBBF1000627, FCBBF1000684, FCBBF1000686, FCBBF1000691, FCBBF1000748, FCBBF2000087, FCBBF2000094, FCBBF2000105, FCBBF2000123, FCBBF2000195, FCBBF2000214, FCBBF2000232, FCBBF2000276, FCBBF2000291, FCBBF2000379, FCBBF2000473, FCBBF2000502, FCBBF2000576, FCBBF2000677, FCBBF2000678, FCBBF2000685, FCBBF2000733, FCBBF2000782, FCBBF2000808, FCBBF2000815, FCBBF2000825, FCBBF2000940, FCBBF2000951, FCBBF2001088, FCBBF2001116, FCBBF2001188, FCBBF2001238, FCBBF2001243, FCBBF2001299, FCBBF2001400, FCBBF2001427, FCBBF2001480, FCBBF2001529, FCBBF2001672, FCBBF2001675, FCBBF2001718, FCBBF2001720, FCBBF2001817, FCBBF2001868, FCBBF2002044, FCBBF2002111, FCBBF2002281, FCBBF2002370, FCBBF2002541, FCBBF2002626, FCBBF2002897, FCBBF2002898, FCBBF2002904, FCBBF2002928, FCBBF2002953, FCBBF2003083, FCBBF2003102, FCBBF2003269, FCBBF2003293, FCBBF2003297, FCBBF2003395, FCBBF2003528, FCBBF2003543, FCBBF2003549, FCBBF2003567, FCBBF2003636, FCBBF2003823, FCBBF2003895, FCBBF2004090, FCBBF2004138, FCBBF2004217, FCBBF2004256, FCBBF2004448, FCBBF2004671, FCBBF2004707, FCBBF2004788, FCBBF2005069, FCBBF2005122, FCBBF2005428, FCBBF2005439, FCBBF2005538, FCBBF2005637, FCBBF2005645, FCBBF2005658, FCBBF2006131, FCBBF2006380, FCBBF2006418, FCBBF2006452, FCBBF2006634, FCBBF2007012, FCBBF2007186, FCBBF2007265, FCBBF2007610, FCBBF2007633, FCBBF3000120, FCBBF3000175, FCBBF3000227, FCBBF3000228, FCBBF3000229, FCBBF3000233, FCBBF3000269, FCBBF3000361, FCBBF3000367, FCBBF3000462, FCBBF3000473, FCBBF3000501, FCBBF3000518, FCBBF3000536, FCBBF3000550, FCBBF3000847, FCBBF3001018, FCBBF3001020, FCBBF3001235, FCBBF3001302, FCBBF3001470, FCBBF3001594, FCBBF3001912, FCBBF3001914, FCBBF3001918, FCBBF3001924, FCBBF3002163, FCBBF3002188, FCBBF3002190, FCBBF3002268, FCBBF3002475, FCBBF3002592, FCBBF3002658, FCBBF3002782, FCBBF3002818, FCBBF3002925, FCBBF3003216, FCBBF3003305, FCBBF3003373, FCBBF3003435, FCBBF3003475, FCBBF3003481, FCBBF3003557, FCBBF3004021, FCBBF3004041, FCBBF3004390, FCBBF3004502, FCBBF3004842, FCBBF3004847, FCBBF3005160, FCBBF3005218, FCBBF3005444, FCBBF3005698, FCBBF3005729, FCBBF3006171, FCBBF3006249, FCBBF3006288, FCBBF3006399, FCBBF3006628, FCBBF3007077, FCBBF3007150, FCBBF3007152, FCBBF3007242, FCBBF3007244, FCBBF3007248, FCBBF3007453, FCBBF3007462, FCBBF3007540, FCBBF3007597, FCBBF3007604, FCBBF3007631, FCBBF3007829, FCBBF3007855, FCBBF3007860, FCBBF3008073, FCBBF3008153, FCBBF3008159, FCBBF3008251, FCBBF3008311, FCBBF3008362, FCBBF3008475, FCBBF3008556, FCBBF3008689, FCBBF3008748, FCBBF3008870, FCBBF3008938, FCBBF3008944, FCBBF3009101, FCBBF3009256, FCBBF3009317, FCBBF3009428, FCBBF3009464, FCBBF3009526, FCBBF3009717, FCBBF3009888, FCBBF3009949, FCBBF3009978, FCBBF3010008, FCBBF3010124, FCBBF3010130, FCBBF3010149, FCBBF3010211, FCBBF3010361, FCBBF3010508, FCBBF3010544, FCBBF3010586, FCBBF3010601, FCBBF3010665, FCBBF3010729, FCBBF3010733, FCBBF3011003, FCBBF3011418, FCBBF3011523, FCBBF3011570, FCBBF3011592, FCBBF3011867, FCBBF3011889, FCBBF3012170, FCBBF3012182, FCBBF3012288, FCBBF3012332, FCBBF3012588, FCBBF3012842, FCBBF3012901, FCBBF3013041, FCBBF3013058, FCBBF3013205, FCBBF3013266, FCBBF3013307, FCBBF3013341, FCBBF3013506, FCBBF3013623, FCBBF3013800, FCBBF3013846, FCBBF3014229, FCBBF3014355, FCBBF3014567, FCBBF3015119, FCBBF3015131, FCBBF3015317, FCBBF3015727, FCBBF3015758, FCBBF3015809, FCBBF3015870, FCBBF3016018, FCBBF3016178, FCBBF3016618, FCBBF3016622, FCBBF3016644, FCBBF3016987, FCBBF3017059, FCBBF3017071, FCBBF3017123, FCBBF3017233, FCBBF3017255, FCBBF3017531, FCBBF3017535, FCBBF3017681, FCBBF3017729, FCBBF3017873, FCBBF3017974, FCBBF3018067, FCBBF3018173, FCBBF3018591, FCBBF3018753, FCBBF3018796, FCBBF3019085, FCBBF3019320, FCBBF3019564, FCBBF3019569, FCBBF3019570, FCBBF3019663, FCBBF3019716, FCBBF3019839, FCBBF3019867, FCBBF3019961, FCBBF3020030, FCBBF3020138, FCBBF3020140, FCBBF3020163, FCBBF3020232, FCBBF3020599, FCBBF3021026, FCBBF3021191, FCBBF3021221, FCBBF3021501, FCBBF3021506, FCBBF3021524, FCBBF3021807, FCBBF3021940, FCBBF3021985, FCBBF3022005, FCBBF3022291, FCBBF3022311, FCBBF3022566, FCBBF3022765, FCBBF3022767, FCBBF3022894, FCBBF3023061, FCBBF3023078, FCBBF3023372, FCBBF3023443, FCBBF3023599, FCBBF3023704, FCBBF3023895, FCBBF3024096, FCBBF3024225, FCBBF3024266, FCBBF3024364, FCBBF3024793, FCBBF3024911, FCBBF3025098, FCBBF3025252, FCBBF3025280, FCBBF3025285, FCBBF3025417, FCBBF3025568, FCBBF3025650, FCBBF3025674, FCBBF3025905, FCBBF3026021, FCBBF3026251, FCBBF3026308, FCBBF3026678, FCBBF3026692, FCBBF3027104, FCBBF3027199, FCBBF3027328, FCBBF3027559, FCBBF3027717, FCBBF3027755, FCBBF3027768, FCBBF3027863, FCBBF3027903, FCBBF3028102, FCBBF3028143, FCBBF3028188, FCBBF3028202, FCBBF3028472, FCBBF3028528, FCBBF3028582, FCBBF3028671, FCBBF3028794, FCBBF4000061, FCBBF4000076, FCBBF4000173, FCBBF4000192, FCBBF4000268, FCBBF4000282, FCBBF4000399, FCBBF4000415, FCBBF4000500, FCBBF4000529, FCBBF4000548, FCBBF5000041, FCBBF5000261, FCBBF5000325, FCBBF5000353, FCBBF5000384, FCBBF5000483, FCBBF5000495, FEBRA1000005, FEBRA1000022, FEBRA1000138, FEBRA1000148, FEBRA1000149, FEBRA1000183, FEBRA1000189, FEBRA1000190, FEBRA2000007, FEBRA2000021, FEBRA2000035, FEBRA2000053, FEBRA2000126, FEBRA2000129, FEBRA2000210, FEBRA2000220, FEBRA2000282, FEBRA2000286, FEBRA2000311, FEBRA2000321, FEBRA2000333, FEBRA2000378, FEBRA2000391, FEBRA2000394, FEBRA2000399, FEBRA2000402, FEBRA2000404, FEBRA2000409, FEBRA2000415, FEBRA2000436, FEBRA2000438, FEBRA2000454, FEBRA2000468, FEBRA2000491, FEBRA2000504, FEBRA2000510, FEBRA2000536, FEBRA2000538, FEBRA2000575, FEBRA2000656, FEBRA2000659, FEBRA2000680, FEBRA2000690, FEBRA2000727, FEBRA2000734, FEBRA2000762, FEBRA2000771, FEBRA2000772, FEBRA2000782, FEBRA2000790, FEBRA2000803, FEBRA2000805, FEBRA2000809, FEBRA2000856, FEBRA2000862, FEBRA2000877, FEBRA2000880, FEBRA2000901, FEBRA2000909, FEBRA2000917, FEBRA2000928, FEBRA2000936, FEBRA2000937, FEBRA2000959, FEBRA2001004, FEBRA2001012, FEBRA2001020, FEBRA2001093, FEBRA2001124, FEBRA2001133, FEBRA2001161, FEBRA2001175, FEBRA2001217, FEBRA2001267, FEBRA2001294, FEBRA2001334, FEBRA2001351, FEBRA2001383, FEBRA2001438, FEBRA2001440, FEBRA2001487, FEBRA2001523, FEBRA2001561, FEBRA2001584, FEBRA2001590, FEBRA2001591, FEBRA2001610, FEBRA2001620, FEBRA2001659, FEBRA2001698, FEBRA2001705, FEBRA2001706, FEBRA2001752, FEBRA2001772, FEBRA2001790, FEBRA2001914, FEBRA2001974, FEBRA2001989, FEBRA2002009, FEBRA2002086, FEBRA2002109, FEBRA2002191, FEBRA2002260, FEBRA2002399, FEBRA2002429, FEBRA2002442, FEBRA2002508, FEBRA2002527, FEBRA2002552, FEBRA2002574, FEBRA2002601, FEBRA2002611, FEBRA2002628, FEBRA2002662, FEBRA2002727, FEBRA2002783, FEBRA2002818, FEBRA2002858, FEBRA2002882, FEBRA2002897, FEBRA2002908, FEBRA2002962, FEBRA2002986, FEBRA2003054, FEBRA2003115, FEBRA2003155, FEBRA2003163, FEBRA2003181, FEBRA2003253, FEBRA2003258, FEBRA2003275, FEBRA2003308, FEBRA2003327, FEBRA2003429, FEBRA2003436, FEBRA2003454, FEBRA2003468, FEBRA2003520, FEBRA2003524, FEBRA2003675, FEBRA2003707, FEBRA2003711, FEBRA2003726, FEBRA2003822, FEBRA2003897, FEBRA2003907, FEBRA2004023, FEBRA2004026, FEBRA2004029, FEBRA2004053, FEBRA2004056, FEBRA2004091, FEBRA2004202, FEBRA2004219, FEBRA2004237, FEBRA2004268, FEBRA2004329, FEBRA2004331, FEBRA2004443, FEBRA2004490, FEBRA2004538, FEBRA2004592, FEBRA2004620, FEBRA2004628, FEBRA2004651, FEBRA2004767, FEBRA2004813, FEBRA2004818, FEBRA2004840, FEBRA2004852, FEBRA2004867, FEBRA2004914, FEBRA2004933, FEBRA2004987, FEBRA2005014, FEBRA2005036, FEBRA2005079, FEBRA2005216, FEBRA2005291, FEBRA2005377, FEBRA2005380, FEBRA2005427, FEBRA2005458, FEBRA2005701, FEBRA2005726, FEBRA2005752, FEBRA2005787, FEBRA2005788, FEBRA2005998, FEBRA2006055, FEBRA2006061, FEBRA2006150, FEBRA2006165, FEBRA2006315, FEBRA2006346, FEBRA2006354, FEBRA2006370, FEBRA2006379, FEBRA2006409, FEBRA2006418, FEBRA2006427, FEBRA2006476, FEBRA2006491, FEBRA2006519, FEBRA2006664, FEBRA2006667, FEBRA2006726, FEBRA2006736, FEBRA2006793, FEBRA2006817, FEBRA2006890, FEBRA2006942, FEBRA2006977, FEBRA2007017, FEBRA2007176, FEBRA2007200, FEBRA2007212, FEBRA2007247, FEBRA2007280, FEBRA2007414, FEBRA2007436, FEBRA2007449, FEBRA2007534, FEBRA2007551, FEBRA2007566, FEBRA2007589, FEBRA2007613, FEBRA2007620, FEBRA2007708, FEBRA2007818, FEBRA2007823, FEBRA2007931, FEBRA2007957, FEBRA2008009, FEBRA2008086, FEBRA2008134, FEBRA2008135, FEBRA2008159, FEBRA2008165, FEBRA2008172, FEBRA2008255, FEBRA2008265, FEBRA2008266, FEBRA2008282, FEBRA2008311, FEBRA2008341, FEBRA2008459, FEBRA2008468, FEBRA2008475, FEBRA2008481, FEBRA2008542, FEBRA2008660, FEBRA2008681, FEBRA2008692, FEBRA2008741, FEBRA2008755, FEBRA2008836, FEBRA2008859, FEBRA2008866, FEBRA2008881, FEBRA2008928, FEBRA2008983, FEBRA2009016, FEBRA2009029, FEBRA2009074, FEBRA2009117, FEBRA2009120, FEBRA2009162, FEBRA2009185, FEBRA2009240, FEBRA2009265, FEBRA2009276, FEBRA2009289, FEBRA2009327, FEBRA2009328, FEBRA2009352, FEBRA2009362, FEBRA2009385, FEBRA2009416, FEBRA2009437, FEBRA2009478, FEBRA2009507, FEBRA2009541, FEBRA2009567, FEBRA2009731, FEBRA2009754, FEBRA2009780, FEBRA2010141, FEBRA2010299, FEBRA2010484, FEBRA2010768, FEBRA2010802, FEBRA2011063, FEBRA2011356, FEBRA2011392, FEBRA2011414, FEBRA2011593, FEBRA2011665, FEBRA2012090, FEBRA2012120, FEBRA2012181, FEBRA2012195, FEBRA2012397, FEBRA2012418, FEBRA2012507, FEBRA2012625, FEBRA2013019, FEBRA2013069, FEBRA2013274, FEBRA2013465, FEBRA2013570, FEBRA2013905, FEBRA2013951, FEBRA2014010, FEBRA2014198, FEBRA2014213, FEBRA2014297, FEBRA2014443, FEBRA2015076, FEBRA2015175, FEBRA2015292, FEBRA2015588, FEBRA2016112, FEBRA2016398, FEBRA2016572, FEBRA2016583, FEBRA2016621, FEBRA2016654, FEBRA2016739, FEBRA2017098, FEBRA2017138, FEBRA2017154, FEBRA2017200, FEBRA2017223, FEBRA2017333, FEBRA2017502, FEBRA2017533, FEBRA2017680, FEBRA2017736, FEBRA2017780, FEBRA2017811, FEBRA2018051, FEBRA2018433, FEBRA2018746, FEBRA2019172, FEBRA2019298, FEBRA2019389, FEBRA2019457, FEBRA2019519, FEBRA2019582, FEBRA2019663, FEBRA2019690, FEBRA2019711, FEBRA2019867, FEBRA2020406, FEBRA2020566, FEBRA2020582, FEBRA2020668, FEBRA2020801, FEBRA2020845, FEBRA2021032, FEBRA2021134, FEBRA2021171, FEBRA2021339, FEBRA2021431, FEBRA2021497, FEBRA2021550, FEBRA2021571, FEBRA2021636, FEBRA2021864, FEBRA2021892, FEBRA2021908, FEBRA2022013, FEBRA2022148, FEBRA2022204, FEBRA2022255, FEBRA2022322, FEBRA2022601, FEBRA2022696, FEBRA2022729, FEBRA2022787, FEBRA2022911, FEBRA2022956, FEBRA2022963, FEBRA2022972, FEBRA2023227, FEBRA2023285, FEBRA2023351, FEBRA2023399, FEBRA2023498, FEBRA2023550, FEBRA2023721, FEBRA2023927, FEBRA2023989, FEBRA2023990, FEBRA2024136, FEBRA2024150, FEBRA2024343, FEBRA2024570, FEBRA2024693, FEBRA2024744, FEBRA2024797, FEBRA2024987, FEBRA2025249, FEBRA2025463, FEBRA2025477, FEBRA2026474, FEBRA2026629, FEBRA2026769, FEBRA2026879, FEBRA2026890, FEBRA2026977, FEBRA2026984, FEBRA2027082, FEBRA2027297, FEBRA2027352, FEBRA2027364, FEBRA2027609, FEBRA2028158, FEBRA2028222, FEBRA2028366, FEBRA2028457, FEBRA2028477, FEHRT2000325, FEHRT2000364, FEKID1000018, FELIV1000101, FELIV1000137, FELIV1000164, FELNG2000241, HCASM1000021, HCASM1000050, HCASM1000061, HCASM1000130, HCASM2000156, HCASM2000202, HCASM2000266, HCASM2000307, HCASM2000363, HCASM2000534, HCASM2000536, HCASM2000560, HCASM2000871, HCASM2001285, HCASM2001810, HCASM2001866, HCASM2001890, HCASM2002148, HCASM2002502, HCASM2002754, HCASM2002918, HCASM2003076, HCASM2003099, HCASM2003212, HCASM2003237, HCASM2003357, HCASM2003415, HCASM2005388, HCASM2005484, HCASM2006131, HCASM2006338, HCASM2006359, HCASM2006632, HCASM2007047, HCASM2007317, HCASM2007737, HCASM2007773, HCASM2008154, HCASM2008536, HCASM2009405, HCASM2009424, HCASM2009463, HCASM2009588, HCHON1000015, HCHON1000142, HCHON1000166, HCHON1000176, HCHON2000038, HCHON2000062, HCHON2000087, HCHON2000100, HCHON2000156, HCHON2000199, HCHON2000271, HCHON2000315, HCHON2000322, HCHON2000344, HCHON2000364, HCHON2000395, HCHON2000417, HCHON2000418, HCHON2000503, HCHON2000626, HCHON2000660, HCHON2000663, HCHON2000673, HCHON2000699, HCHON2000705, HCHON2000817, HCHON2000818, HCHON2000819, HCHON2000851, HCHON2000898, HCHON2000935, HCHON2000942, HCHON2000956, HCHON2000994, HCHON2001050, HCHON2001099, HCHON2001108, HCHON2001110, HCHON2001116, HCHON2001214, HCHON2001233, HCHON2001269, HCHON2001434, HCHON2001450, HCHON2001453, HCHON2001497, HCHON2001505, HCHON2001519, HCHON2001523, HCHON2001535, HCHON2001546, HCHON2001577, HCHON2001598, HCHON2001604, HCHON2001607, HCHON2001646, HCHON2001712, HCHON2001768, HCHON2001801, HCHON2001853, HCHON2002123, HCHON2002194, HCHON2002241, HCHON2002354, HCHON2002496, HCHON2002676, HCHON2002770, HCHON2002964, HCHON2002971, HCHON2003131, HCHON2003134, HCHON2003327, HCHON2003513, HCHON2003532, HCHON2003642, HCHON2003659, HCHON2003676, HCHON2004002, HCHON2004007, HCHON2004279, HCHON2004359, HCHON2004531, HCHON2004776, HCHON2005048, HCHON2005118, HCHON2005166, HCHON2005802, HCHON2005987, HCHON2006714, HCHON2006722, HCHON2006770, HCHON2006786, HCHON2006841, HCHON2006871, HCHON2007046, HCHON2007482, HCHON2007650, HCHON2007674, HCHON2007774, HCHON2008112, HCHON2008239, HCHON2008444, HCHON2008582, HCHON2008672, HCHON2008856, HCHON2008871, HCHON2008989, HCHON2009191, HCHON2009384, HCHON2009749, HCHON2009766, HCHON2009795, HCHON2010074, HEART1000010, HEART1000088, HEART1000099, HEART1000102, HEART1000139, HEART1000151, HEART2000024, HEART2000035, HEART2000099, HEART2000298, HEART2000306, HEART2000309, HEART2000418, HEART2000444, HEART2000448, HEART2000492, HEART2000506, HEART2000520, HEART2000541, HEART2000568, HEART2000611, HEART2000959, HEART2001680, HEART2001756, HEART2002129, HEART2002184, HEART2002220, HEART2002432, HEART2002531, HEART2002598, HEART2002717, HEART2003027, HEART2003168, HEART2003432, HEART2003440, HEART2003781, HEART2003836, HEART2003852, HEART2004570, HEART2004764, HEART2004931, HEART2004940, HEART2004941, HEART2004980, HEART2005244, HEART2005310, HEART2005581, HEART2005610, HEART2006131, HEART2006195, HEART2006310, HEART2006334, HEART2006487, HEART2006557, HEART2006787, HEART2006789, HEART2006909, HEART2007031, HEART2007443, HEART2007767, HEART2008108, HEART2008111, HEART2008257, HEART2008509, HEART2008994, HEART2009000, HEART2009599, HEART2009680, HEART2010391, HEART2010492, HEART2010495, HELAC2000158, HELAC2000301, HHDPC1000001, HHDPC1000065, HHDPC2000070, HHDPC2000115, HHDPC2000149, HHDPC2000258, HHDPC2000315, HHDPC2000656, HHDPC2000692, HHDPC2001337, HHDPC2001432, HHDPC2002963, HHDPC2003049, HHDPC2003113, HHDPC2003381, HHDPC2003472, HHDPC2004757, HHDPC2005185, HHDPC2005513, HHDPC2005742, HHDPC2005794, HHDPC2006460, HHDPC2006862, HHDPC2006927, HHDPC2007302, HHDPC2007775, HHDPC2008123, HHDPC2008185, HHDPC2008279, HHDPC2008297, HHDPC2008414, HHDPC2008474, HHDPC2008816, HHDPC2008843, HHDPC2009114, HHDPC2009178, HHDPC2009208, HHDPC2009272, HLUNG1000017, HLUNG1000024, HLUNG1000030, HLUNG1000034, HLUNG1000053, HLUNG1000064, HLUNG1000076, HLUNG1000084, HLUNG1000099, HLUNG1000104, HLUNG1000105, HLUNG1000110, HLUNG1000151, HLUNG1000169, HLUNG2000004, HLUNG2000014, HLUNG2000027, HLUNG2000063, HLUNG2000068, HLUNG2000116, HLUNG2000125, HLUNG2000130, HLUNG2000142, HLUNG2000174, HLUNG2000176, HLUNG2000217, HLUNG2000232, HLUNG2000255, HLUNG2000281, HLUNG2000314, HLUNG2000315, HLUNG2000340, HLUNG2000362, HLUNG2000363, HLUNG2000431, HLUNG2000480, HLUNG2000489, HLUNG2000501, HLUNG2000549, HLUNG2000557, HLUNG2000570, HLUNG2000751, HLUNG2000761, HLUNG2000777, HLUNG2000870, HLUNG2000884, HLUNG2000926, HLUNG2000950, HLUNG2000955, HLUNG2000970, HLUNG2001013, HLUNG2001126, HLUNG2001144, HLUNG2001214, HLUNG2001439, HLUNG2001459, HLUNG2001507, HLUNG2001814, HLUNG2001996, HLUNG2002006, HLUNG2002050, HLUNG2002059, HLUNG2002085, HLUNG2002145, HLUNG2002295, HLUNG2002303, HLUNG2002405, HLUNG2002429, HLUNG2002465, HLUNG2002562, HLUNG2002648, HLUNG2002659, HLUNG2002707, HLUNG2002811, HLUNG2002916, HLUNG2002942, HLUNG2002949, HLUNG2002958, HLUNG2002982, HLUNG2003003, HLUNG2003049, HLUNG2003061, HLUNG2003162, HLUNG2003246, HLUNG2003331, HLUNG2003335, HLUNG2003497, HLUNG2003691, HLUNG2003710, HLUNG2003714, HLUNG2003716, HLUNG2003778, HLUNG2003833, HLUNG2003872, HLUNG2003918, HLUNG2003991, HLUNG2004014, HLUNG2004037, HLUNG2004154, HLUNG2004217, HLUNG2004273, HLUNG2004416, HLUNG2004521, HLUNG2004534, HLUNG2004684, HLUNG2004707, HLUNG2004774, HLUNG2004775, HLUNG2005012, HLUNG2005030, HLUNG2005045, HLUNG2005076, HLUNG2005203, HLUNG2005230, HLUNG2005479, HLUNG2005524, HLUNG2005656, HLUNG2005738, HLUNG2005774, HLUNG2005813, HLUNG2005924, HLUNG2006026, HLUNG2006067, HLUNG2006094, HLUNG2006370, HLUNG2006397, HLUNG2006570, HLUNG2006599, HLUNG2006614, HLUNG2006671, HLUNG2006781, HLUNG2006852, HLUNG2006935, HLUNG2007041, HLUNG2007163, HLUNG2007219, HLUNG2007245, HLUNG2007433, HLUNG2007931, HLUNG2008066, HLUNG2008139, HLUNG2008225, HLUNG2008235, HLUNG2008247, HLUNG2008333, HLUNG2008384, HLUNG2008396, HLUNG2008439, HLUNG2008479, HLUNG2008480, HLUNG2008521, HLUNG2008637, HLUNG2008833, HLUNG2008875, HLUNG2008885, HLUNG2008958, HLUNG2008959, HLUNG2009067, HLUNG2009215, HLUNG2009253, HLUNG2009303, HLUNG2009413, HLUNG2009729, HLUNG2010181, HLUNG2010464, HLUNG2010562, HLUNG2010845, HLUNG2011041, HLUNG2011298, HLUNG2011461, HLUNG2011833, HLUNG2012049, HLUNG2012287, HLUNG2012315, HLUNG2012546, HLUNG2012600, HLUNG2012727, HLUNG2013097, HLUNG2013204, HLUNG2013304, HLUNG2013350, HLUNG2013622, HLUNG2013643, HLUNG2013784, HLUNG2013851, HLUNG2014262, HLUNG2014288, HLUNG2014449, HLUNG2014821, HLUNG2015184, HLUNG2015418, HLUNG2015548, HLUNG2015578, HLUNG2015617, HLUNG2016022, HLUNG2016862, HLUNG2017286, HLUNG2017307, HLUNG2017350, HLUNG2017546, HLUNG2017806, HLUNG2018029, HLUNG2018282, HLUNG2018626, HLUNG2019058, HSYRA1000131, HSYRA2000044, HSYRA2000237, HSYRA2000253, HSYRA2000371, HSYRA2000424, HSYRA2000507, HSYRA2000510, HSYRA2000629, HSYRA2000640, HSYRA2000706, HSYRA2000760, HSYRA2000787, HSYRA2000792, HSYRA2000832, HSYRA2000927, HSYRA2001003, HSYRA2001103, HSYRA2001142, HSYRA2001153, HSYRA2001232, HSYRA2001255, HSYRA2001332, HSYRA2001353, HSYRA2001420, HSYRA2001484, HSYRA2001552, HSYRA2001580, HSYRA2001631, HSYRA2001983, HSYRA2002103, HSYRA2002590, HSYRA2002741, HSYRA2003168, HSYRA2004550, HSYRA2004858, HSYRA2005456, HSYRA2005496, HSYRA2005628, HSYRA2005970, HSYRA2006049, HSYRA2006873, HSYRA2007241, HSYRA2007338, HSYRA2007667, HSYRA2008154, HSYRA2008714, HSYRA2009102, IMR321000155, IMR321000161, IMR321000165, IMR321000193, IMR321000230, IMR321000253, IMR322000010, IMR322000107, IMR322000152, IMR322000164, IMR322000178, IMR322000374, IMR322000379, IMR322000383, IMR322000418, IMR322000518, IMR322000604, IMR322000609, IMR322000656, IMR322000672, IMR322000742, IMR322000811, IMR322000819, IMR322000838, IMR322000859, IMR322000863, IMR322000918, IMR322000919, IMR322000953, IMR322000984, IMR322001018, IMR322001049, IMR322001167, IMR322001185, IMR322001218, IMR322001245, IMR322001318, IMR322001322, IMR322001438, IMR322001452, IMR322001491, IMR322001534, IMR322001584, IMR322001665, IMR322001724, IMR322002035, IMR322002110, IMR322002470, IMR322003675, IMR322004768, IMR322005293, IMR322005833, IMR322006012, IMR322006222, IMR322006495, IMR322006520, IMR322006886, IMR322006947, IMR322007078, IMR322007225, IMR322007704, IMR322008651, IMR322009710, IMR322009807, IMR322010295, IMR322010953, IMR322011689, IMR322012314, IMR322013053, IMR322013396, IMR322013731, IMR322013805, IMR322015523, IMR322016146, IMR322017049, IMR322018117, IMR322018192, IMR322019070, JCMLC2000273, KIDNE1000008, KIDNE1000012, KIDNE1000015, KIDNE1000028, KIDNE1000036, KIDNE1000064, KIDNE1000104, KIDNE1000121, KIDNE1000152, KIDNE2000026, KIDNE2000041, KIDNE2000046, KIDNE2000051, KIDNE2000070, KIDNE2000167, KIDNE2000174, KIDNE2000192, KIDNE2000227, KIDNE2000244, KIDNE2000245, KIDNE2000266, KIDNE2000287, KIDNE2000315, KIDNE2000317, KIDNE2000328, KIDNE2000335, KIDNE2000349, KIDNE2000375, KIDNE2000383, KIDNE2000394, KIDNE2000422, KIDNE2000493, KIDNE2000497, KIDNE2000510, KIDNE2000513, KIDNE2000517, KIDNE2000519, KIDNE2000555, KIDNE2000624, KIDNE2000678, KIDNE2000717, KIDNE2000722, KIDNE2000777, KIDNE2000801, KIDNE2000832, KIDNE2000833, KIDNE2000846, KIDNE2000867, KIDNE2000909, KIDNE2001117, KIDNE2001140, KIDNE2001269, KIDNE2001361, KIDNE2001373, KIDNE2001636, KIDNE2001713, KIDNE2001802, KIDNE2001840, KIDNE2001847, KIDNE2001857, KIDNE2001873, KIDNE2001897, KIDNE2001931, KIDNE2002015, KIDNE2002162, KIDNE2002168, KIDNE2002198, KIDNE2002262, KIDNE2002438, KIDNE2002483, KIDNE2002725, KIDNE2002768, KIDNE2002795, KIDNE2002798, KIDNE2002839, KIDNE2002845, KIDNE2002872, KIDNE2002882, KIDNE2002980, KIDNE2002991, KIDNE2003185, KIDNE2003188, KIDNE2003233, KIDNE2003316, KIDNE2003335, KIDNE2003357, KIDNE2003373, KIDNE2003377, KIDNE2003507, KIDNE2003752, KIDNE2003764, KIDNE2003837, KIDNE2003994, KIDNE2004034, KIDNE2004054, KIDNE2004084, KIDNE2004095, KIDNE2004115, KIDNE2004233, KIDNE2004262, KIDNE2004279, KIDNE2004294, KIDNE2004295, KIDNE2004305, KIDNE2004344, KIDNE2004394, KIDNE2004411, KIDNE2004519, KIDNE2004520, KIDNE2004531, KIDNE2004562, KIDNE2004579, KIDNE2004626, KIDNE2004681, KIDNE2004828, KIDNE2004846, KIDNE2004864, KIDNE2004879, KIDNE2004981, KIDNE2004985, KIDNE2004999, KIDNE2005038, KIDNE2005062, KIDNE2005266, KIDNE2005296, KIDNE2005327, KIDNE2005336, KIDNE2005400, KIDNE2005424, KIDNE2005477, KIDNE2005526, KIDNE2005543, KIDNE2005603, KIDNE2005629, KIDNE2005781, KIDNE2005798, KIDNE2005854, KIDNE2005908, KIDNE2005937, KIDNE2006009, KIDNE2006039, KIDNE2006053, KIDNE2006062, KIDNE2006092, KIDNE2006145, KIDNE2006149, KIDNE2006210, KIDNE2006299, KIDNE2006334, KIDNE2006353, KIDNE2006376, KIDNE2006378, KIDNE2006580, KIDNE2006652, KIDNE2006687, KIDNE2006733, KIDNE2006760, KIDNE2006820, KIDNE2006880, KIDNE2007005, KIDNE2007040, KIDNE2007077, KIDNE2007186, KIDNE2007222, KIDNE2007356, KIDNE2007422, KIDNE2007569, KIDNE2007810, KIDNE2007811, KIDNE2007910, KIDNE2007944, KIDNE2008022, KIDNE2008069, KIDNE2008072, KIDNE2008116, KIDNE2008117, KIDNE2008218, KIDNE2008315, KIDNE2008362, KIDNE2008378, KIDNE2008403, KIDNE2008404, KIDNE2008446, KIDNE2008473, KIDNE2008480, KIDNE2008649, KIDNE2008666, KIDNE2008697, KIDNE2008758, KIDNE2008788, KIDNE2008795, KIDNE2008824, KIDNE2008832, KIDNE2008869, KIDNE2008975, KIDNE2009109, KIDNE2009180, KIDNE2009191, KIDNE2009426, KIDNE2009467, KIDNE2009490, KIDNE2009553, KIDNE2009605, KIDNE2009628, KIDNE2009647, KIDNE2009676, KIDNE2009723, KIDNE2010007, KIDNE2010049, KIDNE2010052, KIDNE2010084, KIDNE2010137, KIDNE2010151, KIDNE2010264, KIDNE2010265, KIDNE2010271, KIDNE2010419, KIDNE2010574, KIDNE2010674, KIDNE2010739, KIDNE2010750, KIDNE2010762, KIDNE2010863, KIDNE2010973, KIDNE2010989, KIDNE2011200, KIDNE2011314, KIDNE2011508, KIDNE2011532, KIDNE2011635, KIDNE2011752, KIDNE2011782, KIDNE2011858, KIDNE2012009, KIDNE2012291, KIDNE2012361, KIDNE2012453, KIDNE2012563, KIDNE2012601, KIDNE2012613, KIDNE2012710, KIDNE2012745, KIDNE2012775, KIDNE2012784, KIDNE2012945, KIDNE2013045, KIDNE2013095, KIDNE2013158, KIDNE2013218, KIDNE2013263, KIDNE2013346, KIDNE2013388, KIDNE2013413, KIDNE2013489, KIDNE2013639, KIDNE2013731, KIDNE2013734, KIDNE2013775, KIDNE2013801, KIDNE2013866, KIDNE2014087, KIDNE2014112, KIDNE2014119, KIDNE2014170, KIDNE2014184, KIDNE2014268, KIDNE2014298, KIDNE2014320, KIDNE2014325, KIDNE2014415, KIDNE2014489, KIDNE2014496, KIDNE2014661, KIDNE2014717, KIDNE2014789, KIDNE2014808, KIDNE2014890, KIDNE2014978, KIDNE2015073, KIDNE2015221, KIDNE2015244, KIDNE2015313, KIDNE2015433, KIDNE2015483, KIDNE2015515, KIDNE2015546, KIDNE2015556, KIDNE2015598, KIDNE2015660, KIDNE2015710, KIDNE2015987, KIDNE2016000, KIDNE2016036, KIDNE2016096, KIDNE2016101, KIDNE2016142, KIDNE2016188, KIDNE2016327, KIDNE2016371, KIDNE2016388, KIDNE2016464, KIDNE2016539, KIDNE2016570, KIDNE2016918, KIDNE2017007, KIDNE2017052, KIDNE2017151, KIDNE2017153, KIDNE2017315, KIDNE2017332, KIDNE2017343, KIDNE2017454, KIDNE2017603, KIDNE2017956, KIDNE2018071, KIDNE2018166, KIDNE2018167, KIDNE2018254, KIDNE2018268, KIDNE2018269, KIDNE2018287, KIDNE2018294, KIDNE2018352, KIDNE2018462, KIDNE2018493, KIDNE2018617, KIDNE2018678, KIDNE2018727, KIDNE2018863, KIDNE2018989, KIDNE2018996, KIDNE2019074, KIDNE2019187, LIVER1000017, LIVER1000050, LIVER1000055, LIVER1000058, LIVER1000063, LIVER1000067, LIVER1000073, LIVER1000082, LIVER1000099, LIVER1000104, LIVER1000111, LIVER1000126, LIVER1000132, LIVER1000139, LIVER1000155, LIVER1000165, LIVER1000175, LIVER1000224, LIVER1000230, LIVER1000278, LIVER1000303, LIVER1000397, LIVER1000421, LIVER1000433, LIVER1000479, LIVER1000482, LIVER1000542, LIVER2000003, LIVER2000037, LIVER2000158, LIVER2000216, LIVER2000237, LIVER2000247, LIVER2000360, LIVER2000416, LIVER2000446, LIVER2000515, LIVER2000592, LIVER2000626, LIVER2000682, LIVER2000769, LIVER2000775, LIVER2001051, LIVER2001076, LIVER2001099, LIVER2001113, LIVER2001164, LIVER2001191, LIVER2001265, LIVER2001329, LIVER2001389, LIVER2001461, LIVER2001835, LIVER2002638, LIVER2002644, LIVER2002660, LIVER2002702, LIVER2002842, LIVER2003008, LIVER2003065, LIVER2003234, LIVER2003511, LIVER2003524, LIVER2003568, LIVER2003581, LIVER2003800, LIVER2003854, LIVER2004074, LIVER2004392, LIVER2004514, LIVER2004565, LIVER2005028, LIVER2005198, LIVER2005218, LIVER2005376, LIVER2005385, LIVER2005512, LIVER2005520, LIVER2005527, LIVER2005544, LIVER2005625, LIVER2005728, LIVER2005789, LIVER2005973, LIVER2005981, LIVER2006251, LIVER2006410, LIVER2006469, LIVER2006644, LIVER2006764, LIVER2007415, LIVER2007548, LIVER2007568, LIVER2007721, LIVER2007783, LIVER2008053, LIVER2008473, LIVER2008580, LIVER2008706, LIVER2008751, LIVER2008945, LIVER2008998, LIVER2009110, LIVER2009118, LIVER2009554, LYMPB1000141, LYMPB1000158, LYMPB2000083, MAMGL1000017, MAMGL1000083, MAMGL1000096, MAMGL1000100, MAMGL1000132, MAMGL1000151, MAMGL1000178, MAMGL1000182, MAMGL1000184, MESAN1000032, MESAN1000035, MESAN1000079, MESAN1000080, MESAN1000121, MESAN1000180, MESAN2000023, MESAN2000026, MESAN2000067, MESAN2000092, MESAN2000167, MESAN2000264, MESAN2000291, MESAN2000337, MESAN2000434, MESAN2000462, MESAN2000620, MESAN2000711, MESAN2000815, MESAN2000894, MESAN2000909, MESAN2001154, MESAN2001450, MESAN2001770, MESAN2001979, MESAN2001980, MESAN2002113, MESAN2002147, MESAN2002424, MESAN2002687, MESAN2002709, MESAN2002724, MESAN2002790, MESAN2002978, MESAN2003037, MESAN2003101, MESAN2003190, MESAN2003322, MESAN2003490, MESAN2003529, MESAN2003646, MESAN2003662, MESAN2003709, MESAN2003851, MESAN2004138, MESAN2004288, MESAN2004575, MESAN2005284, MESAN2005303, MESAN2005371, MESAN2005724, MESAN2005808, MESAN2005811, MESAN2005957, MESAN2005958, MESAN2006022, MESAN2006328, MESAN2006580, MESAN2006599, MESAN2006971, MESAN2007032, MESAN2007440, MESAN2007597, MESAN2007755, MESAN2008222, MESAN2008415, MESAN2008460, MESAN2008536, MESAN2008679, MESAN2008729, MESAN2008821, MESAN2009081, MESAN2009105, MESAN2009311, MESAN2009418, MESAN2009503, MESAN2009522, MESAN2009580, MESAN2010031, MESAN2010114, MESAN2010312, MESAN2010321, MESAN2010664, MESAN2010681, MESAN2011545, MESAN2011597, MESAN2011627, MESAN2011632, MESAN2011977, MESAN2012586, MESAN2012708, MESAN2012735, MESAN2013019, MESAN2013022, MESAN2013183, MESAN2013211, MESAN2013283, MESAN2013611, MESAN2013674, MESAN2013845, MESAN2013936, MESAN2014192, MESAN2014295, MESAN2014298, MESAN2014412, MESAN2014624, MESAN2015277, MESAN2015365, MESAN2015401, MESAN2015501, MESAN2015708, MESAN2016159, MESAN2016304, MESAN2016409, MESAN2016965, MESAN2017152, MESAN2017373, MESAN2017417, MESAN2018209, MESAN2018576, MESAN2018670, MESAN2018699, MESTC1000042, MESTC1000147, MESTC2000150, MESTC2000153, MESTC2000170, N1ESE2000698, NB9N41000146, NB9N41000340, NB9N42000104, NB9N42000122, NB9N42000196, NB9N42000314, NB9N42000342, NB9N42000430, NB9N42000495, NB9N42001300, NCRRP1000129, NESOP1000010, NESOP1000087, NESOP1000108, NESOP2000231, NESOP2000452, NESOP2000499, NESOP2000504, NESOP2000744, NESOP2001144, NESOP2001433, NESOP2001656, NESOP2001694, NESOP2001752, NESOP2002352, NESOP2002418, NESOP2002487, NESOP2002738, NESOP2002780, NETRP1000034, NETRP1000082, NETRP2000086, NETRP2000182, NETRP2000439, NHNPC1000034, NHNPC1000037, NHNPC1000084, NHNPC1000101, NHNPC1000124, NHNPC2000062, NHNPC2000187, NHNPC2000606, NHNPC2000877, NHNPC2001108, NHNPC2001223, NHNPC2001816, NHNPC2002565, NHNPC2002749, NOVAR1000015, NOVAR1000102, NOVAR2000038, NOVAR2000136, NOVAR2000352, NOVAR2000412, NOVAR2000710, NOVAR2000962, NOVAR2001108, NOVAR2001620, NOVAR2001783, NOVAR2001876, NOVAR2002039, PANCR1000012, PANCR1000021, PANCR1000081, PANCR1000086, PANCR1000091, PANCR1000185, PEBLM1000024, PEBLM1000029, PEBLM1000034, PEBLM1000062, PEBLM1000068, PEBLM1000071, PEBLM1000083, PEBLM1000147, PEBLM1000174, PEBLM1000180, PEBLM2000030, PEBLM2000112, PEBLM2000126, PEBLM2000170, PEBLM2000180, PEBLM2000213, PEBLM2000248, PEBLM2000267, PEBLM2000270, PEBLM2000321, PEBLM2000333, PEBLM2000338, PEBLM2000479, PEBLM2000502, PEBLM2001312, PEBLM2001465, PEBLM2001488, PEBLM2001803, PEBLM2002432, PEBLM2002455, PEBLM2002594, PEBLM2002749, PEBLM2002887, PEBLM2003426, PEBLM2003765, PEBLM2003914, PEBLM2003935, PEBLM2004015, PEBLM2004216, PEBLM2004290, PEBLM2004497, PEBLM2004666, PEBLM2004733, PEBLM2005282, PEBLM2005615, PEBLM2005632, PEBLM2005697, PEBLM2006031, PEBLM2006036, PEBLM2006049, PEBLM2006113, PEBLM2006135, PEBLM2006215, PEBLM2006283, PEBLM2006298, PEBLM2006912, PEBLM2007112, PEBLM2007140, PEBLM2007296, PEBLM2007437, PEBLM2007447, PEBLM2007598, PEBLM2007774, PEBLM2007832, PEBLM2007834, PEBLM2008106, PEBLM2008576, PEBLM2008605, PEBLM2008826, PEBLM2008861, PERIC1000025, PERIC1000147, PERIC2000180, PERIC2000214, PERIC2000386, PERIC2000387, PERIC2000422, PERIC2000473, PERIC2000478, PERIC2000889, PERIC2000914, PERIC2001227, PERIC2001228, PERIC2001379, PERIC2001504, PERIC2001703, PERIC2001764, PERIC2002243, PERIC2002272, PERIC2002452, PERIC2003001, PERIC2003090, PERIC2003287, PERIC2003349, PERIC2003452, PERIC2003699, PERIC2003720, PERIC2003794, PERIC2003834, PERIC2003919, PERIC2003957, PERIC2004028, PERIC2004131, PERIC2004259, PERIC2004379, PERIC2004429, PERIC2004510, PERIC2004613, PERIC2004909, PERIC2005111, PERIC2005305, PERIC2005347, PERIC2005370, PERIC2005936, PERIC2006035, PERIC2006121, PERIC2006443, PERIC2006945, PERIC2006960, PERIC2007439, PERIC2007914, PERIC2008008, PERIC2008385, PERIC2009001, PERIC2009086, PERIC2009329, PERIC2009566, PLACE5000001, PLACE5000037, PLACE5000058, PLACE5000066, PLACE5000067, PLACE5000068, PLACE5000070, PLACE5000080, PLACE5000105, PLACE5000115, PLACE5000116, PLACE5000129, PLACE5000139, PLACE5000153, PLACE5000170, PLACE5000171, PLACE5000172, PLACE5000178, PLACE5000245, PLACE5000260, PLACE5000282, PLACE5000297, PLACE5000372, PLACE5000492, PLACE5000522, PLACE5000527, PLACE6000012, PLACE6000044, PLACE6000055, PLACE6000070, PLACE6000137, PLACE6000145, PLACE6000191, PLACE6000205, PLACE6000231, PLACE6000296, PLACE6000314, PLACE6000325, PLACE6000348, PLACE6000371, PLACE6000414, PLACE6000424, PLACE6000426, PLACE6000429, PLACE6000450, PLACE6000463, PLACE6000523, PLACE6000550, PLACE6000552, PLACE6000555, PLACE6000619, PLACE6000630, PLACE6000953, PLACE6001118, PLACE6001153, PLACE6001185, PLACE6001262, PLACE6001294, PLACE6001536, PLACE6001557, PLACE6001712, PLACE6001740, PLACE6001823, PLACE6001886, PLACE6001925, PLACE6001933, PLACE6002011, PLACE6002016, PLACE6002056, PLACE6002157, PLACE6002312, PLACE6002323, PLACE6002345, PLACE6002419, PLACE6002462, PLACE6002647, PLACE6002668, PLACE6002692, PLACE6002699, PLACE6002710, PLACE6002871, PLACE6002949, PLACE6003004, PLACE6003038, PLACE6003077, PLACE6003094, PLACE6003109, PLACE6003204, PLACE6003218, PLACE6003372, PLACE6003399, PLACE6003539, PLACE6003621, PLACE6003705, PLACE6003740, PLACE6003771, PLACE6003796, PLACE6003839, PLACE6003850, PLACE6004101, PLACE6004219, PLACE6004336, PLACE6004368, PLACE6004380, PLACE6004396, PLACE6004454, PLACE6004464, PLACE6004491, PLACE6004578, PLACE6004663, PLACE6004687, PLACE6004738, PLACE6004966, PLACE6004993, PLACE6005007, PLACE6005029, PLACE6005108, PLACE6005231, PLACE6005234, PLACE6005283, PLACE6005294, PLACE6005328, PLACE6005351, PLACE6005423, PLACE6005487, PLACE6005535, PLACE6005546, PLACE6005559, PLACE6005579, PLACE6005691, PLACE6005786, PLACE6006077, PLACE6006158, PLACE6006186, PLACE6006217, PLACE6006222, PLACE6006266, PLACE6006287, PLACE6006394, PLACE6006418, PLACE6006474, PLACE6006549, PLACE6006566, PLACE6006697, PLACE6006822, PLACE6006871, PLACE6006905, PLACE6007050, PLACE6007180, PLACE6007239, PLACE6007242, PLACE6007309, PLACE6007373, PLACE6007380, PLACE6007433, PLACE6007436, PLACE6007482, PLACE6007687, PLACE6007787, PLACE6007798, PLACE6007807, PLACE6007925, PLACE6008036, PLACE6008094, PLACE6008126, PLACE6008285, PLACE6008444, PLACE6008453, PLACE6008640, PLACE6008750, PLACE6008768, PLACE6008775, PLACE6008824, PLACE6008989, PLACE6009006, PLACE6009008, PLACE6009228, PLACE6009237, PLACE6009338, PLACE6009419, PLACE6009430, PLACE6009482, PLACE6009524, PLACE6009527, PLACE6009560, PLACE6009590, PLACE6009821, PLACE6009835, PLACE6009853, PLACE6010077, PLACE6010463, PLACE6010485, PLACE6010568, PLACE6010701, PLACE6010704, PLACE6010732, PLACE6010765, PLACE6010848, PLACE6010925, PLACE6010936, PLACE6010991, PLACE6011102, PLACE6011156, PLACE6011211, PLACE6011260, PLACE6011774, PLACE6011881, PLACE6011907, PLACE6011975, PLACE6012028, PLACE6012108, PLACE6012168, PLACE6012297, PLACE6012308, PLACE6012574, PLACE6012908, PLACE6012936, PLACE6012942, PLACE6013222, PLACE6013232, PLACE6013288, PLACE6013386, PLACE6013400, PLACE6013650, PLACE6013672, PLACE6013883, PLACE6013884, PLACE6013885, PLACE6014043, PLACE6014064, PLACE6014516, PLACE6014882, PLACE6015051, PLACE6015211, PLACE6015322, PLACE6015445, PLACE6015460, PLACE6015513, PLACE6015591, PLACE6015729, PLACE6015731, PLACE6015939, PLACE6016030, PLACE6016093, PLACE6016105, PLACE6016160, PLACE6016254, PLACE6016383, PLACE6016942, PLACE6016984, PLACE6017002, PLACE6017431, PLACE6017564, PLACE6017578, PLACE6017626, PLACE6017701, PLACE6017714, PLACE6017788, PLACE6017791, PLACE6018031, PLACE6018107, PLACE6018187, PLACE6018235, PLACE6018287, PLACE6018441, PLACE6018487, PLACE6018497, PLACE6018769, PLACE6018834, PLACE6018843, PLACE6018863, PLACE6019195, PLACE6019542, PLACE6019600, PLACE6019674, PLACE6019676, PLACE6019701, PLACE6019932, PLACE6020031, PLACE6020145, PLACE7000167, PLACE7000170, PLACE7000266, PLACE7000333, PLACE7000410, PLACE7000502, PLACE7000707, PLACE7001022, PLACE7001544, PLACE7001759, PLACE7001936, PLACE7002303, PLACE7002641, PLACE7003639, PLACE7003657, PLACE7003684, PLACE7003985, PLACE7004961, PLACE7005169, PLACE7005671, PLACE7005840, PLACE7006051, PLACE7006090, PLACE7006240, PLACE7006268, PLACE7006275, PLACE7006498, PLACE7006540, PLACE7007379, PLACE7007644, PLACE7007973, PLACE7008136, PLACE7008261, PLACE7008431, PLACE7008623, PLACE7008766, PLACE7009563, PROST1000033, PROST1000039, PROST1000065, PROST1000083, PROST1000085, PROST1000110, PROST1000120, PROST1000123, PROST1000136, PROST1000145, PROST1000152, PROST1000167, PROST1000184, PROST1000217, PROST1000246, PROST1000262, PROST1000272, PROST1000298, PROST1000334, PROST1000343, PROST1000362, PROST1000377, PROST1000383, PROST1000412, PROST1000419, PROST1000451, PROST1000480, PROST1000485, PROST1000493, PROST1000512, PROST1000527, PROST1000528, PROST1000536, PROST1000559, PROST1000575, PROST2000036, PROST2000053, PROST2000067, PROST2000105, PROST2000143, PROST2000162, PROST2000165, PROST2000176, PROST2000203, PROST2000206, PROST2000212, PROST2000241, PROST2000267, PROST2000273, PROST2000277, PROST2000337, PROST2000432, PROST2000452, PROST2000463, PROST2000470, PROST2000505, PROST2000567, PROST2000512, PROST2000717, PROST2000761, PROST2000835, PROST2000893, PROST2000961, PROST2001002, PROST2001116, PROST2001138, PROST2001283, PROST2001414, PROST2001415, PROST2001465, PROST2001521, PROST2001540, PROST2001599, PROST2001611, PROST2001636, PROST2001739, PROST2001796, PROST2001805, PROST2001823, PROST2001883, PROST2001899, PROST2001997, PROST2001998, PROST2002078, PROST2002101, PROST2002162, PROST2002212, PROST2002338, PROST2002425, PROST2002488, PROST2002489, PROST2002527, PROST2002591, PROST2002602, PROST2002633, PROST2002682, PROST2002685, PROST2002722, PROST2002736, PROST2002842, PROST2002897, PROST2002906, PROST2002927, PROST2003102, PROST2003117, PROST2003210, PROST2003302, PROST2003303, PROST2003324, PROST2003340, PROST2003428, PROST2003472, PROST2003537, PROST2003563, PROST2003577, PROST2003583, PROST2003586, PROST2003628, PROST2003635, PROST2003674, PROST2003676, PROST2003725, PROST2003732, PROST2003775, PROST2003922, PROST2003930, PROST2004115, PROST2004142, PROST2004146, PROST2004161, PROST2004251, PROST2004332, PROST2004481, PROST2004526, PROST2004727, PROST2004742, PROST2004744, PROST2004817, PROST2005039, PROST2005067, PROST2005076, PROST2005093, PROST2005121, PROST2005131, PROST2005228, PROST2005285, PROST2005426, PROST2005466, PROST2005604, PROST2005630, PROST2005683, PROST2005788, PROST2005880, PROST2005886, PROST2005904, PROST2005919, PROST2005943, PROST2006008, PROST2006020, PROST2006060, PROST2006196, PROST2006201, PROST2006282, PROST2006450, PROST2006491, PROST2006510, PROST2006579, PROST2006688, PROST2006737, PROST2006766, PROST2006782, PROST2006933, PROST2006988, PROST2007122, PROST2007237, PROST2007248, PROST2007289, PROST2007317, PROST2007328, PROST2007382, PROST2007389, PROST2007416, PROST2007528, PROST2007612, PROST2007818, PROST2007950, PROST2007956, PROST2007974, PROST2007988, PROST2008079, PROST2008088, PROST2008243, PROST2008245, PROST2008268, PROST2008360, PROST2008447, PROST2008468, PROST2008472, PROST2008516, PROST2008724, PROST2008835, PROST2008993, PROST2009022, PROST2009208, PROST2009222, PROST2009254, PROST2009273, PROST2009320, PROST2009347, PROST2009365, PROST2009388, PROST2009470, PROST2009483, PROST2009571, PROST2009731, PROST2009736, PROST2009795, PROST2009901, PROST2009909, PROST2010046, PROST2010219, PROST2010250, PROST2010318, PROST2010326, PROST2010382, PROST2010400, PROST2010545, PROST2010579, PROST2010606, PROST2010885, PROST2011012, PROST2011038, PROST2011105, PROST2011297, PROST2011410, PROST2011439, PROST2011482, PROST2011631, PROST2011660, PROST2012005, PROST2012016, PROST2012088, PROST2012140, PROST2012157, PROST2012190, PROST2012249, PROST2012353, PROST2012400, PROST2012504, PROST2012542, PROST2012550, PROST2012740, PROST2012745, PROST2012780, PROST2013032, PROST2013053, PROST2013121, PROST2013260, PROST2013327, PROST2013531, PROST2013605, PROST2013627, PROST2013873, PROST2013880, PROST2014422, PROST2014585, PROST2014601, PROST2014659, PROST2014862, PROST2014916, PROST2014925, PROST2015124, PROST2015198, PROST2015243, PROST2015246, PROST2015251, PROST2015287, PROST2015457, PROST2015464, PROST2015537, PROST2015545, PROST2015551, PROST2015636, PROST2015710, PROST2015756, PROST2015877, PROST2015900, PROST2015924, PROST2015932, PROST2016195, PROST2016246, PROST2016351, PROST2016379, PROST2016444, PROST2016462, PROST2016499, PROST2016512, PROST2016566, PROST2016582, PROST2016668, PROST2016684, PROST2016777, PROST2016829, PROST2016860, PROST2016980, PROST2017098, PROST2017128, PROST2017367, PROST2017413, PROST2017441, PROST2017529, PROST2017578, PROST2017612, PROST2017617, PROST2017700, PROST2017701, PROST2017729, PROST2017836, PROST2017972, PROST2018030, PROST2018090, PROST2018235, PROST2018437, PROST2018487, PROST2018511, PROST2018583, PROST2018588, PROST2018788, PROST2018902, PROST2018922, PROST2018977, PROST2019164, PROST2019296, PROST2019398, PROST2019487, PROST2019781, PUAEN1000039, PUAEN1000081, PUAEN1000085, PUAEN1000087, PUAEN1000121, PUAEN1000147, PUAEN1000175, PUAEN1000275, PUAEN1000276, PUAEN1000288, PUAEN2000080, PUAEN2000152, PUAEN2000175, PUAEN2000247, PUAEN2000312, PUAEN2000394, PUAEN2000535, PUAEN2000594, PUAEN2000684, PUAEN2000942, PUAEN2001260, PUAEN2001345, PUAEN2001526, PUAEN2001586, PUAEN2001882, PUAEN2002473, PUAEN2002552, PUAEN2002568, PUAEN2002616, PUAEN2002758, PUAEN2003018, PUAEN2003079, PUAEN2003116, PUAEN2003517, PUAEN2003954, PUAEN2004067, PUAEN2004083, PUAEN2004400, PUAEN2004511, PUAEN2004525, PUAEN2004875, PUAEN2005110, PUAEN2005247, PUAEN2005502, PUAEN2005588, PUAEN2005930, PUAEN2006029, PUAEN2006328, PUAEN2006578, PUAEN2006639, PUAEN2006761, PUAEN2007785, PUAEN2007898, PUAEN2008123, PUAEN2008228, PUAEN2008314, PUAEN2008515, PUAEN2008939, PUAEN2008980, PUAEN2008985, PUAEN2009174, PUAEN2009348, PUAEN2009534, PUAEN2009655, PUAEN2009795, PUAEN2009852, PUAEN2010346, PUAEN2010824, RECTM1000141, RECTM2000220, RECTM2000349, RECTM2000433, RECTM2001307, RECTM2001519, RECTM2001666, RECTM2001691, RECTM2001749, RECTM2002172, RECTM2002602, RECTM2002632, SALGL1000005, SALGL1000024, SALGL1000028, SALGL1000065, SALGL1000107, SALGL1000171, SKMUS1000014, SKMUS1000030, SKMUS1000067, SKMUS1000102, SKMUS1000104, SKMUS1000110, SKMUS1000118, SKMUS1000124, SKMUS1000129, SKMUS1000176, SKMUS1000177, SKMUS2000020, SKMUS2000061, SKMUS2000074, SKMUS2000078, SKMUS2000117, SKMUS2000137, SKMUS2000243, SKMUS2000271, SKMUS2000287, SKMUS2000317, SKMUS2000330, SKMUS2000339, SKMUS2000343, SKMUS2000365, SKMUS2000380, SKMUS2000390, SKMUS2000416, SKMUS2000458, SKMUS2000468, SKMUS2000484, SKMUS2000515, SKMUS2000690, SKMUS2000701, SKMUS2000705, SKMUS2000710, SKMUS2000724, SKMUS2000726, SKMUS2000757, SKMUS2000774, SKMUS2000780, SKMUS2000821, SKMUS2000847, SKMUS2000863, SKMUS2000873, SKMUS2000894, SKMUS2000898, SKMUS2000902, SKMUS2000933, SKMUS2000945, SKMUS2000954, SKMUS2000961, SKMUS2000973, SKMUS2000980, SKMUS2001008, SKMUS2001014, SKMUS2001129, SKMUS2001157, SKMUS2001164, SKMUS2001199, SKMUS2001201, SKMUS2001215, SKMUS2001247, SKMUS2001254, SKMUS2001271, SKMUS2001287, SKMUS2001364, SKMUS2001398, SKMUS2001402, SKMUS2001412, SKMUS2001492, SKMUS2001501, SKMUS2001528, SKMUS2001543, SKMUS2001580, SKMUS2001585, SKMUS2001608, SKMUS2001631, SKMUS2001662, SKMUS2001663, SKMUS2001668, SKMUS2001671, SKMUS2001683, SKMUS2001693, SKMUS2001695, SKMUS2001703, SKMUS2001740, SKMUS2001742, SKMUS2001823, SKMUS2001850, SKMUS2002077, SKMUS2002153, SKMUS2002475, SKMUS2002602, SKMUS2002634, SKMUS2002693, SKMUS2002821, SKMUS2002840, SKMUS2002920, SKMUS2003034, SKMUS2003074, SKMUS2003168, SKMUS2003194, SKMUS2003744, SKMUS2004044, SKMUS2004047, SKMUS2004483, SKMUS2004667, SKMUS2004897, SKMUS2004903, SKMUS2005428, SKMUS2006394, SKMUS2006481, SKMUS2006755, SKMUS2007315, SKMUS2007359, SKMUS2007568, SKMUS2007740, SKMUS2007816, SKMUS2007915, SKMUS2008338, SKMUS2008407, SKMUS2008474, SKMUS2008585, SKMUS2008607, SKMUS2009190, SKMUS2009232, SKMUS2009479, SKMUS2009557, SKNMC1000123, SKNMC1000124, SKNMC1000137, SKNMC1000159, SKNMC1000251, SKNMC2000224, SKNMC2000256, SKNMC2000305, SKNMC2000322, SKNMC2000356, SKNMC2000374, SKNMC2000583, SKNMC2000593, SKNMC2000612, SKNMC2000622, SKNMC2000966, SKNMC2001113, SKNMC2001503, SKNMC2001555, SKNMC2001596, SKNMC2001623, SKNMC2003639, SKNMC2003924, SKNMC2003987, SKNMC2004457, SKNMC2004643, SKNMC2004651, SKNMC2005772, SKNMC2006327, SKNMC2006998, SKNMC2007134, SKNMC2007502, SKNMC2007504, SKNMC2007961, SKNMC2009450, SKNSH1000174, SKNSH1000301, SKNSH1000308, SKNSH1000416, SKNSH2000151, SKNSH2000163, SKNSH2000319, SKNSH2000482, SKNSH2000516, SKNSH2000550, SKNSH2000716, SKNSH2000971, SKNSH2001222, SKNSH2001875, SKNSH2002054, SKNSH2002768, SKNSH2002866, SKNSH2003064, SKNSH2003174, SKNSH2003422, SKNSH2003466, SKNSH2003483, SKNSH2003528, SKNSH2003633, SKNSH2004039, SKNSH2005120, SKNSH2005194, SKNSH2005240, SKNSH2005792, SKNSH2005816, SKNSH2005981, SKNSH2006234, SKNSH2006304, SKNSH2006432, SKNSH2006822, SKNSH2007142, SKNSH2007149, SKNSH2007429, SKNSH2007739, SKNSH2008940, SKNSH2008969, SKNSH2009197, SKNSH2009357, SKNSH2009435, SKNSH2009991, SKNSH2010015, SMINT1000012, SMINT1000016, SMINT1000039, SMINT1000048, SMINT1000051, SMINT1000057, SMINT1000071, SMINT1000075, SMINT1000078, SMINT1000091, SMINT1000100, SMINT1000103, SMINT1000118, SMINT1000137, SMINT1000192, SMINT2000007, SMINT2000032, SMINT2000040, SMINT2000060, SMINT2000084, SMINT2000145, SMINT2000159, SMINT2000185, SMINT2000227, SMINT2000229, SMINT2000239, SMINT2000267, SMINT2000454, SMINT2000518, SMINT2000529, SMINT2000530, SMINT2000538, SMINT2000541, SMINT2000545, SMINT2000558, SMINT2000562, SMINT2000568, SMINT2000602, SMINT2000629, SMINT2000747, SMINT2000811, SMINT2000824, SMINT2000933, SMINT2000984, SMINT2001114, SMINT2001158, SMINT2001183, SMINT2001199, SMINT2001222, SMINT2001348, SMINT2001397, SMINT2001458, SMINT2001461, SMINT2001535, SMINT2001559, SMINT2001609, SMINT2001683, SMINT2001731, SMINT2001812, SMINT2001818, SMINT2001950, SMINT2002126, SMINT2002159, SMINT2002202, SMINT2002210, SMINT2002281, SMINT2002311, SMINT2002314, SMINT2002328, SMINT2002414, SMINT2002457, SMINT2002689, SMINT2002743, SMINT2002778, SMINT2002880, SMINT2002884, SMINT2002899, SMINT2002974, SMINT2003003, SMINT2003128, SMINT2003150, SMINT2003317, SMINT2003340, SMINT2003386, SMINT2003423, SMINT2003505, SMINT2003569, SMINT2003641, SMINT2003644, SMINT2003866, SMINT2004023, SMINT2004037, SMINT2004047, SMINT2004086, SMINT2004144, SMINT2004280, SMINT2004299, SMINT2004339, SMINT2004350, SMINT2004414, SMINT2004473, SMINT2004547, SMINT2004583, SMINT2004589, SMINT2004781, SMINT2004872, SMINT2004891, SMINT2004909, SMINT2004972, SMINT2004992, SMINT2005075, SMINT2005161, SMINT2005174, SMINT2005213, SMINT2005330, SMINT2005387, SMINT2005402, SMINT2005405, SMINT2005621, SMINT2005623, SMINT2005624, SMINT2005688, SMINT2005800, SMINT2006078, SMINT2006205, SMINT2006331, SMINT2006596, SMINT2006641, SMINT2006648, SMINT2006708, SMINT2006716, SMINT2006801, SMINT2007062, SMINT2007101, SMINT2007140, SMINT2007219, SMINT2007294, SMINT2007365, SMINT2007391, SMINT2007433, SMINT2007508, SMINT2007526, SMINT2007579, SMINT2007647, SMINT2007729, SMINT2007790, SMINT2007792, SMINT2007796, SMINT2007867, SMINT2007932, SMINT2008042, SMINT2008054, SMINT2008133, SMINT2008277, SMINT2008329, SMINT2008455, SMINT2008491, SMINT2008531, SMINT2008545, SMINT2008558, SMINT2008625, SMINT2008690, SMINT2008715, SMINT2008720, SMINT2008817, SMINT2008844, SMINT2008869, SMINT2008917, SMINT2009119, SMINT2009121, SMINT2009212, SMINT2009216, SMINT2009233, SMINT2009259, SMINT2009272, SMINT2009363, SMINT2009415, SMINT2009468, SMINT2009505, SMINT2009529, SMINT2009832, SMINT2009895, SMINT2009902, SMINT2009973, SMINT2010015, SMINT2010068, SMINT2010076, SMINT2010084, SMINT2010144, SMINT2010200, SMINT2010278, SMINT2010324, SMINT2010326, SMINT2010369, SMINT2010500, SMINT2010533, SMINT2010629, SMINT2010672, SMINT2010753, SMINT2010853, SMINT2010897, SMINT2010959, SMINT2010997, SMINT2011033, SMINT2011066, SMINT2011273, SMINT2011311, SMINT2011406, SMINT2011509, SMINT2011567, SMINT2011588, SMINT2011656, SMINT2011888, SMINT2011958, SMINT2012040, SMINT2012122, SMINT2012179, SMINT2012195, SMINT2012285, SMINT2012501, SMINT2012734, SMINT2012793, SMINT2013031, SMINT2013032, SMINT2013129, SMINT2013170, SMINT2013181, SMINT2013228, SMINT2013613, SMINT2013626, SMINT2013695, SMINT2013833, SMINT2014166, SMINT2014282, SMINT2014443, SMINT2014489, SMINT2014721, SMINT2015006, SMINT2015294, SMINT2015306, SMINT2015326, SMINT2015353, SMINT2015454, SMINT2015518, SMINT2015745, SMINT2015787, SMINT2015810, SMINT2016122, SMINT2016146, SMINT2016286, SMINT2016313, SMINT2016396, SMINT2016412, SMINT2016440, SMINT2016477, SMINT2016544, SMINT2016857, SMINT2017134, SMINT2017319, SMINT2017324, SMINT2017410, SMINT2017431, SMINT2017432, SMINT2017436, SMINT2017599, SMINT2017659, SMINT2017736, SMINT2017781, SMINT2017855, SMINT2017884, SMINT2017964, SMINT2017974, SMINT2018343, SMINT2018353, SMINT2018592, SMINT2018681, SMINT2019017, SMINT2019105, SMINT2019142, SMINT2019153, SMINT2019200, SPLEN1000013, SPLEN1000041, SPLEN1000049, SPLEN1000056, SPLEN1000087, SPLEN1000089, SPLEN1000091, SPLEN1000134, SPLEN1000139, SPLEN1000143, SPLEN1000144, SPLEN1000145, SPLEN1000156, SPLEN1000163, SPLEN1000178, SPLEN2000020, SPLEN2000047, SPLEN2000064, SPLEN2000072, SPLEN2000098, SPLEN2000126, SPLEN2000134, SPLEN2000143, SPLEN2000189, SPLEN2000197, SPLEN2000205, SPLEN2000210, SPLEN2000222, SPLEN2000242, SPLEN2000243, SPLEN2000247, SPLEN2000255, SPLEN2000270, SPLEN2000307, SPLEN2000310, SPLEN2000341, SPLEN2000348, SPLEN2000350, SPLEN2000357, SPLEN2000364, SPLEN2000402, SPLEN2000414, SPLEN2000420, SPLEN2000443, SPLEN2000448, SPLEN2000450, SPLEN2000464, SPLEN2000496, SPLEN2000515, SPLEN2000537, SPLEN2000541, SPLEN2000607, SPLEN2000630, SPLEN2000695, SPLEN2000874, SPLEN2001135, SPLEN2001141, SPLEN2001176, SPLEN2001227, SPLEN2001245, SPLEN2001278, SPLEN2001354, SPLEN2001367, SPLEN2001383, SPLEN2001476, SPLEN2001503, SPLEN2001510, SPLEN2001599, SPLEN2001626, SPLEN2001650, SPLEN2001689, SPLEN2001710, SPLEN2001761, SPLEN2001781, SPLEN2001881, SPLEN2001912, SPLEN2001945, SPLEN2002007, SPLEN2002053, SPLEN2002133, SPLEN2002147, SPLEN2002166, SPLEN2002175, SPLEN2002223, SPLEN2002272, SPLEN2002314, SPLEN2002343, SPLEN2002354, SPLEN2002385, SPLEN2002419, SPLEN2002451, SPLEN2002462, SPLEN2002463, SPLEN2002477, SPLEN2002662, SPLEN2002695, SPLEN2002707, SPLEN2002917, SPLEN2002931, SPLEN2002957, SPLEN2003160, SPLEN2003204, SPLEN2003219, SPLEN2003297, SPLEN2003396, SPLEN2003678, SPLEN2003878, SPLEN2003918, SPLEN2003924, SPLEN2004060, SPLEN2004124, SPLEN2004148, SPLEN2004181, SPLEN2004220, SPLEN2004343, SPLEN2004346, SPLEN2004368, SPLEN2004611, SPLEN2004662, SPLEN2004844, SPLEN2004880, SPLEN2004984, SPLEN2005227, SPLEN2005272, SPLEN2005342, SPLEN2005416, SPLEN2005429, SPLEN2005450, SPLEN2005474, SPLEN2005560, SPLEN2005727, SPLEN2005790, SPLEN2005806, SPLEN2005818, SPLEN2005838, SPLEN2005869, SPLEN2005927, SPLEN2005939, SPLEN2006232, SPLEN2006268, SPLEN2006283, SPLEN2006389, SPLEN2006425, SPLEN2006671, SPLEN2006701, SPLEN2006785, SPLEN2006875, SPLEN2007276, SPLEN2007314, SPLEN2007326, SPLEN2007350, SPLEN2007388, SPLEN2007498, SPLEN2007619, SPLEN2007653, SPLEN2007689, SPLEN2007695, SPLEN2007750, SPLEN2007794, SPLEN2007879, SPLEN2007926, SPLEN2007951, SPLEN2008007, SPLEN2008135, SPLEN2008164, SPLEN2008317, SPLEN2008496, SPLEN2008591, SPLEN2008786, SPLEN2009081, SPLEN2009088, SPLEN2009163, SPLEN2009315, SPLEN2009340, SPLEN2009512, SPLEN2009513, SPLEN2009541, SPLEN2009548, SPLEN2009581, SPLEN2009733, SPLEN2009803, SPLEN2009884, SPLEN2009918, SPLEN2010004, SPLEN2010015, SPLEN2010112, SPLEN2010119, SPLEN2010146, SPLEN2010187, SPLEN2010350, SPLEN2010395, SPLEN2010415, SPLEN2010447, SPLEN2010469, SPLEN2010510, SPLEN2010530, SPLEN2010534, SPLEN2010588, SPLEN2010625, SPLEN2010800, SPLEN2010846, SPLEN2010847, SPLEN2010862, SPLEN2010978, SPLEN2010986, SPLEN2011018, SPLEN2011021, SPLEN2011025, SPLEN2011086, SPLEN2011139, SPLEN2011145, SPLEN2011248, SPLEN2011252, SPLEN2011419, SPLEN2011422, SPLEN2011672, SPLEN2011678, SPLEN2011766, SPLEN2011805, SPLEN2011820, SPLEN2011830, SPLEN2011931, SPLEN2011981, SPLEN2012115, SPLEN2012175, SPLEN2012179, SPLEN2012185, SPLEN2012234, SPLEN2012453, SPLEN2012523, SPLEN2012524, SPLEN2012525, SPLEN2012606, SPLEN2012611, SPLEN2012619, SPLEN2012624, SPLEN2012725, SPLEN2012743, SPLEN2012756, SPLEN2012800, SPLEN2012846, SPLEN2012889, SPLEN2012961, SPLEN2013108, SPLEN2013195, SPLEN2013503, SPLEN2013644, SPLEN2013648, SPLEN2013670, SPLEN2013673, SPLEN2013690, SPLEN2013714, SPLEN2013753, SPLEN2013821, SPLEN2013857, SPLEN2013860, SPLEN2013910, SPLEN2013923, SPLEN2013936, SPLEN2014041, SPLEN2014063, SPLEN2014073, SPLEN2014119, SPLEN2014136, SPLEN2014199, SPLEN2014210, SPLEN2014293, SPLEN2014318, SPLEN2014381, SPLEN2014452, SPLEN2014454, SPLEN2014486, SPLEN2014543, SPLEN2014572, SPLEN2014645, SPLEN2014669, SPLEN2014711, SPLEN2014739, SPLEN2014860, SPLEN2014865, SPLEN2014919, SPLEN2014920, SPLEN2014924, SPLEN2014937, SPLEN2014946, SPLEN2015031, SPLEN2015094, SPLEN2015121, SPLEN2015129, SPLEN2015158, SPLEN2015166, SPLEN2015216, SPLEN2015258, SPLEN2015261, SPLEN2015267, SPLEN2015276, SPLEN2015415, SPLEN2015433, SPLEN2015593, SPLEN2015674, SPLEN2015679, SPLEN2015707, SPLEN2015730, SPLEN2015746, SPLEN2015788, SPLEN2015815, SPLEN2015890, SPLEN2015891, SPLEN2015899, SPLEN2016045, SPLEN2016053, SPLEN2016069, SPLEN2016098, SPLEN2016135, SPLEN2016139, SPLEN2016241, SPLEN2016250, SPLEN2016304, SPLEN2016356, SPLEN2016421, SPLEN2016480, SPLEN2016531, SPLEN2016533, SPLEN2016541, SPLEN2016552, SPLEN2016554, SPLEN2016602, SPLEN2016627, SPLEN2016678, SPLEN2016743, SPLEN2016773, SPLEN2016781, SPLEN2016840, SPLEN2016863, SPLEN2016922, SPLEN2016932, SPLEN2016973, SPLEN2017043, SPLEN2017104, SPLEN2017121, SPLEN2017147, SPLEN2017187, SPLEN2017189, SPLEN2017212, SPLEN2017426, SPLEN2017452, SPLEN2017538, SPLEN2017592, SPLEN2017613, SPLEN2017620, SPLEN2017643, SPLEN2017687, SPLEN2017740, SPLEN2017781, SPLEN2017918, SPLEN2017999, SPLEN2018098, SPLEN2018112, SPLEN2018180, SPLEN2018181, SPLEN2018280, SPLEN2018285, SPLEN2018299, SPLEN2018302, SPLEN2018364, SPLEN2018395, SPLEN2018643, SPLEN2018683, SPLEN2018732, SPLEN2018749, SPLEN2018933, SPLEN2019008, SPLEN2019043, SPLEN2019077, SPLEN2019092, SPLEN2019102, SPLEN2019131, SPLEN2019169, SPLEN2019257, SPLEN2019311, SPLEN2019323, SPLEN2019349, SPLEN2019375, SPLEN2019379, SPLEN2019405, SPLEN2019471, SPLEN2019480, SPLEN2019505, SPLEN2019571, SPLEN2019575, SPLEN2019709, SPLEN2019774, SPLEN2019793, SPLEN2019811, SPLEN2019839, SPLEN2019956, SPLEN2019985, SPLEN2020007, SPLEN2020034, SPLEN2020153, SPLEN2020154, SPLEN2020166, SPLEN2020183, SPLEN2020223, SPLEN2020359, SPLEN2020417, SPLEN2020427, SPLEN2020467, SPLEN2020512, SPLEN2020608, SPLEN2020777, SPLEN2020805, SPLEN2021057, SPLEN2021157, SPLEN2021231, SPLEN2021273, SPLEN2021295, SPLEN2021298, SPLEN2021383, SPLEN2021417, SPLEN2021440, SPLEN2021458, SPLEN2021463, SPLEN2021560, SPLEN2021701, SPLEN2021795, SPLEN2021983, SPLEN2021991, SPLEN2022040, SPLEN2022162, SPLEN2022227, SPLEN2022522, SPLEN2022591, SPLEN2022785, SPLEN2022920, SPLEN2023024, SPLEN2023118, SPLEN2023160, SPLEN2023423, SPLEN2023710, SPLEN2023733, SPLEN2023791, SPLEN2023977, SPLEN2024070, SPLEN2024127, SPLEN2024232, SPLEN2024273, SPLEN2024383, SPLEN2024489, SPLEN2024530, SPLEN2024571, SPLEN2024577, SPLEN2024617, SPLEN2024737, SPLEN2024922, SPLEN2024956, SPLEN2024990, SPLEN2025012, SPLEN2025039, SPLEN2025219, SPLEN2025491, SPLEN2025626, SPLEN2025820, SPLEN2026144, SPLEN2026411, SPLEN2026765, SPLEN2027157, SPLEN2027395, SPLEN2027488, SPLEN2027780, SPLEN2027852, SPLEN2027868, SPLEN2027995, SPLEN2028046, SPLEN2028066, SPLEN2028138, SPLEN2028365, SPLEN2028417, SPLEN2028424, SPLEN2028593, SPLEN2028844, SPLEN2028994, SPLEN2029051, SPLEN2029176, SPLEN2029295, SPLEN2029380, SPLEN2029522, SPLEN2029683, SPLEN2029727, SPLEN2029904, SPLEN2029912, SPLEN2030250, SPLEN2030335, SPLEN2030371, SPLEN2030397, SPLEN2030479, SPLEN2030495, SPLEN2030562, SPLEN2030763, SPLEN2030847, SPLEN2031004, SPLEN2031125, SPLEN2031424, SPLEN2031674, SPLEN2031724, SPLEN2031780, SPLEN2032036, SPLEN2032112, SPLEN2032154, SPLEN2032157, SPLEN2032321, SPLEN2032356, SPLEN2032677, SPLEN2032813, SPLEN2032924, SPLEN2033098, SPLEN2033153, SPLEN2033333, SPLEN2033490, SPLEN2033539, SPLEN2033921, SPLEN2033996, SPLEN2034021, SPLEN2034081, SPLEN2034252, SPLEN2034448, SPLEN2034551, SPLEN2034601, SPLEN2034678, SPLEN2034781, SPLEN2034864, SPLEN2034934, SPLEN2035318, SPLEN2035615, SPLEN2036076, SPLEN2036103, SPLEN2036326, SPLEN2036475, SPLEN2036501, SPLEN2036579, SPLEN2036608, SPLEN2036702, SPLEN2036712, SPLEN2036821, SPLEN2036932, SPLEN2036953, SPLEN2037077, SPLEN2037194, SPLEN2037319, SPLEN2037444, SPLEN2037580, SPLEN2037630, SPLEN2037678, SPLEN2037722, SPLEN2037891, SPLEN2038055, SPLEN2038180, SPLEN2038345, SPLEN2038407, SPLEN2038473, SPLEN2038834, SPLEN2039311, SPLEN2039672, SPLEN2039697, SPLEN2039845, SPLEN2039936, SPLEN2040222, SPLEN2040237, SPLEN2040824, SPLEN2041304, SPLEN2041306, SPLEN2041310, SPLEN2041585, SPLEN2041645, SPLEN2041700, SPLEN2041720, SPLEN2041977, SPLEN2042051, SPLEN2042521, SPLEN2042535, SPLEN2042598, SPLEN2042714, SPLEN2042920, STOMA1000013, STOMA1000052, STOMA1000074, STOMA1000091, STOMA1000117, STOMA1000133, STOMA1000175, STOMA1000186, STOMA1000189, STOMA1000190, STOMA1000191, STOMA2000032, STOMA2000072, STOMA2000088, STOMA2000104, STOMA2000148, STOMA2000168, STOMA2000183, STOMA2000188, STOMA2000257, STOMA2000279, STOMA2000383, STOMA2000386, STOMA2000395, STOMA2000478, STOMA2000529, STOMA2000539, STOMA2000567, STOMA2000640, STOMA2000678, STOMA2000686, STOMA2000888, STOMA2001025, STOMA2001389, STOMA2002052, STOMA2002141, STOMA2002367, STOMA2002688, STOMA2002828, STOMA2003158, STOMA2003289, STOMA2003444, STOMA2003477, STOMA2003646, STOMA2003716, STOMA2003781, STOMA2003894, STOMA2004194, STOMA2004294, STOMA2004663, STOMA2004668, STOMA2004852, STOMA2004873, STOMA2004884, STOMA2004893, STOMA2004925, STOMA2005120, STOMA2005664, STOMA2005667, STOMA2005746, STOMA2005782, STOMA2006181, STOMA2006213, STOMA2006229, STOMA2006325, STOMA2006330, STOMA2006398, STOMA2006447, STOMA2006904, STOMA2007269, STOMA2007680, STOMA2007745, STOMA2008050, STOMA2008361, STOMA2008546, STOMA2008614, STOMA2008638, STOMA2008838, STOMA2009250, STOMA2009253, STOMA2009256, STOMA2009289, SYNOV1000045, SYNOV1000128, SYNOV1000164, SYNOV1000190, SYNOV1000256, SYNOV1000374, SYNOV2000152, SYNOV2000171, SYNOV2000173, SYNOV2000177, SYNOV2000178, SYNOV2000193, SYNOV2000251, SYNOV2000279, SYNOV2000291, SYNOV2000297, SYNOV2000397, SYNOV2000426, SYNOV2000601, SYNOV2000700, SYNOV2000820, SYNOV2000824, SYNOV2000923, SYNOV2001014, SYNOV2001035, SYNOV2001088, SYNOV2001111, SYNOV2001212, SYNOV2001239, SYNOV2001251, SYNOV2001262, SYNOV2001300, SYNOV2001356, SYNOV2001390, SYNOV2001451, SYNOV2001457, SYNOV2001468, SYNOV2001581, SYNOV2001648, SYNOV2001660, SYNOV2003326, SYNOV2005448, SYNOV2005541, SYNOV2005673, SYNOV2005817, SYNOV2005962, SYNOV2006430, SYNOV2006620, SYNOV2007758, SYNOV2007965, SYNOV2008765, SYNOV2009172, SYNOV2011233, SYNOV2012326, SYNOV2013365, SYNOV2013637, SYNOV2014157, SYNOV2014364, SYNOV2016124, SYNOV2016837, SYNOV2017055, SYNOV2017179, SYNOV2018921, SYNOV2019280, SYNOV2020085, SYNOV2020463, SYNOV2021320, SYNOV2021953, SYNOV3000184, SYNOV3000231, SYNOV3000302, SYNOV3000345, SYNOV4000249, SYNOV4000472, SYNOV4000598, SYNOV4000706, SYNOV4001153, SYNOV4001224, SYNOV4001326, SYNOV4001342, SYNOV4001395, SYNOV4002001, SYNOV4002392, SYNOV4002875, SYNOV4002883, SYNOV4003174, SYNOV4003322, SYNOV4003681, SYNOV4003981, SYNOV4004184, SYNOV4004741, SYNOV4004823, SYNOV4004914, SYNOV4005256, SYNOV4005570, SYNOV4005739, SYNOV4005889, SYNOV4005981, SYNOV4005989, SYNOV4006256, SYNOV4006327, SYNOV4006542, SYNOV4007012, SYNOV4007215, SYNOV4007360, SYNOV4007430, SYNOV4007521, SYNOV4007553, SYNOV4007711, SYNOV4008245, SYNOV4008336, SYNOV4009139, SYNOV4009575, T1ESE2000116, T1ESE2000609, T1ESE2002665, TBAES2000004, TBAES2000059, TBAES2000116, TBAES2000255, TBAES2000315, TBAES2000352, TBAES2000932, TBAES2001171, TBAES2001220, TBAES2001229, TBAES2001258, TBAES2001296, TBAES2001492, TBAES2001553, TBAES2001751, TBAES2003435, TBAES2003492, TBAES2003550, TBAES2003702, TBAES2003917, TBAES2004055, TBAES2004105, TBAES2004939, TBAES2005157, TBAES2005361, TBAES2005543, TBAES2006568, TBAES2006881, TBAES2007379, TBAES2007428, TBAES2007481, TBAES2007504, TBAES2007548, TBAES2007697, TBAES2007862, TBAES2007964, TBAES2008133, TBAES2009387, TCERX2000171, TCERX2000431, TCERX2000613, TCERX2000998, TCERX2002644, TCOLN1000037, TCOLN1000180, TCOLN2000139, TCOLN2000236, TCOLN2000641, TCOLN2001268, TCOLN2002047, TCOLN2002278, TESOP1000127, TESOP1000160, TESOP2000083, TESOP2000090, TESOP2000205, TESOP2000312, TESOP2000390, TESOP2000400, TESOP2000510, TESOP2000527, TESOP2000569, TESOP2000739, TESOP2000801, TESOP2001122, TESOP2001166, TESOP2001345, TESOP2001474, TESOP2001796, TESOP2001818, TESOP2001849, TESOP2001865, TESOP2001901, TESOP2001953, TESOP2002005, TESOP2002110, TESOP2002150, TESOP2002489, TESOP2002539, TESOP2002545, TESOP2002804, TESOP2002950, TESOP2003273, TESOP2003308, TESOP2003553, TESOP2003753, TESOP2004110, TESOP2004114, TESOP2004173, TESOP2004214, TESOP2005199, TESOP2005285, TESOP2005485, TESOP2005498, TESOP2005579, TESOP2006041, TESOP2006053, TESOP2006060, TESOP2006068, TESOP2006110, TESOP2006398, TESOP2006670, TESOP2006704, TESOP2006746, TESOP2006865, TESOP2006893, TESOP2007041, TESOP2007052, TESOP2007262, TESOP2007636, TESOP2007674, TESOP2007688, TESOP2007725, TESOP2007912, TESOP2007978, TESOP2008127, TESOP2008552, TESOP2008556, TESOP2008563, TESOP2008820, TESOP2009121, TESOP2009201, TESOP2009247, TESOP2009555, TESTI1000018, TESTI1000019, TESTI1000025, TESTI1000029, TESTI1000030, TESTI1000042, TESTI1000045, TESTI1000055, TESTI1000064, TESTI1000070, TESTI1000085, TESTI1000088, TESTI1000093, TESTI1000094, TESTI1000101, TESTI1000109, TESTI1000125, TESTI1000127, TESTI1000128, TESTI1000131, TESTI1000138, TESTI1000157, TESTI1000163, TESTI1000168, TESTI1000169, TESTI1000179, TESTI1000183, TESTI1000191, TESTI1000257, TESTI1000319, TESTI1000330, TESTI1000348, TESTI1000390, TESTI1000391, TESTI1000459, TESTI1000491, TESTI1000545, TESTI2000006, TESTI2000018, TESTI2000044, TESTI2000100, TESTI2000117, TESTI2000120, TESTI2000147, TESTI2000154, TESTI2000177, TESTI2000207, TESTI2000208, TESTI2000221, TESTI2000238, TESTI2000253, TESTI2000272, TESTI2000278, TESTI2000349, TESTI2000356, TESTI2000358, TESTI2000372, TESTI2000427, TESTI2000431, TESTI2000435, TESTI2000443, TESTI2000452, TESTI2000462, TESTI2000489, TESTI2000520, TESTI2000571, TESTI2000591, TESTI2000600, TESTI2000616, TESTI2000644, TESTI2000671, TESTI2000683, TESTI2000689, TESTI2000695, TESTI2000699, TESTI2000707, TESTI2000745, TESTI2000756, TESTI2000762, TESTI2000808, TESTI2000819, TESTI2000830, TESTI2000840, TESTI2000849, TESTI2000850, TESTI2000883, TESTI2000909, TESTI2000951, TESTI2000981, TESTI2001008, TESTI2001049, TESTI2001082, TESTI2001120, TESTI2001134, TESTI2001141, TESTI2001153, TESTI2001180, TESTI2001208, TESTI2001229, TESTI2001236, TESTI2001237, TESTI2001306, TESTI2001313, TESTI2001330, TESTI2001339, TESTI2001345, TESTI2001352, TESTI2001364, TESTI2001412, TESTI2001420, TESTI2001498, TESTI2001512, TESTI2001518, TESTI2001556, TESTI2001593, TESTI2001621, TESTI2001661, TESTI2001665, TESTI2001671, TESTI2001697, TESTI2001725, TESTI2001758, TESTI2001766, TESTI2001792, TESTI2001793, TESTI2001795, TESTI2001812, TESTI2001815, TESTI2001823, TESTI2001826, TESTI2001827, TESTI2001829, TESTI2001852, TESTI2001862, TESTI2001879, TESTI2001894, TESTI2001898, TESTI2001915, TESTI2001950, TESTI2001959, TESTI2001968, TESTI2001991, TESTI2002002, TESTI2002012, TESTI2002036, TESTI2002048, TESTI2002057, TESTI2002081, TESTI2002090, TESTI2002105, TESTI2002216, TESTI2002223, TESTI2002245, TESTI2002251, TESTI2002256, TESTI2002264, TESTI2002282, TESTI2002293, TESTI2002294, TESTI2002326, TESTI2002351, TESTI2002361, TESTI2002406, TESTI2002415, TESTI2002423, TESTI2002453, TESTI2002461, TESTI2002465, TESTI2002467, TESTI2002498, TESTI2002516, TESTI2002544, TESTI2002578, TESTI2002580, TESTI2002618, TESTI2002632, TESTI2002676, TESTI2002690, TESTI2002696, TESTI2002698, TESTI2002700, TESTI2002724, TESTI2002729, TESTI2002752, TESTI2002753, TESTI2002789, TESTI2002802, TESTI2002806, TESTI2002840, TESTI2002877, TESTI2002910, TESTI2002912, TESTI2002928, TESTI2002937, TESTI2002965, TESTI2002993, TESTI2003005, TESTI2003020, TESTI2003031, TESTI2003037, TESTI2003044, TESTI2003059, TESTI2003061, TESTI2003071, TESTI2003074, TESTI2003089, TESTI2003104, TESTI2003109, TESTI2003117, TESTI2003130, TESTI2003131, TESTI2003139, TESTI2003141, TESTI2003152, TESTI2003181, TESTI2003193, TESTI2003196, TESTI2003228, TESTI2003236, TESTI2003255, TESTI2003258, TESTI2003277, TESTI2003299, TESTI2003311, TESTI2003321, TESTI2003325, TESTI2003327, TESTI2003330, TESTI2003347, TESTI2003354, TESTI2003356, TESTI2003372, TESTI2003376, TESTI2003418, TESTI2003419, TESTI2003432, TESTI2003454, TESTI2003475, TESTI2003476, TESTI2003498, TESTI2003512, TESTI2003539, TESTI2003541, TESTI2003545, TESTI2003551, TESTI2003574, TESTI2003579, TESTI2003580, TESTI2003589, TESTI2003596, TESTI2003598, TESTI2003615, TESTI2003625, TESTI2003638, TESTI2003649, TESTI2003692, TESTI2003718, TESTI2003727, TESTI2003756, TESTI2003768, TESTI2003781, TESTI2003787, TESTI2003824, TESTI2003827, TESTI2003894, TESTI2003911, TESTI2003914, TESTI2003940, TESTI2003962, TESTI2003998, TESTI2004000, TESTI2004073, TESTI2004080, TESTI2004085, TESTI2004089, TESTI2004111, TESTI2004119, TESTI2004163, TESTI2004169, TESTI2004207, TESTI2004215, TESTI2004227, TESTI2004229, TESTI2004243, TESTI2004255, TESTI2004287, TESTI2004295, TESTI2004313, TESTI2004318, TESTI2004322, TESTI2004399, TESTI2004423, TESTI2004431, TESTI2004432, TESTI2004452, TESTI2004459, TESTI2004490, TESTI2004539, TESTI2004552, TESTI2004560, TESTI2004574, TESTI2004601, TESTI2004611, TESTI2004649, TESTI2004654, TESTI2004675, TESTI2004687, TESTI2004689, TESTI2004700, TESTI2004706, TESTI2004712, TESTI2004783, TESTI2004791, TESTI2004793, TESTI2004860, TESTI2004906, TESTI2004920, TESTI2004936, TESTI2004941, TESTI2004971, TESTI2004982, TESTI2004993, TESTI2004994, TESTI2004999, TESTI2005017, TESTI2005025, TESTI2005040, TESTI2005060, TESTI2005072, TESTI2005085, TESTI2005112, TESTI2005120, TESTI2005153, TESTI2005155, TESTI2005173, TESTI2005267, TESTI2005268, TESTI2005280, TESTI2005307, TESTI2005326, TESTI2005363, TESTI2005376, TESTI2005378, TESTI2005380, TESTI2005391, TESTI2005415, TESTI2005470, TESTI2005492, TESTI2005564, TESTI2005568, TESTI2005584, TESTI2005588, TESTI2005590, TESTI2005603, TESTI2005609, TESTI2005610, TESTI2005630, TESTI2005672, TESTI2005683, TESTI2005690, TESTI2005692, TESTI2005703, TESTI2005720, TESTI2005739, TESTI2005759, TESTI2005767, TESTI2005775, TESTI2005788, TESTI2005827, TESTI2005835, TESTI2005860, TESTI2005892, TESTI2005908, TESTI2005911, TESTI2005933, TESTI2005937, TESTI2005948, TESTI2005979, TESTI2005981, TESTI2005982, TESTI2005984, TESTI2005986, TESTI2005987, TESTI2006007, TESTI2006008, TESTI2006015, TESTI2006016, TESTI2006035, TESTI2006040, TESTI2006041, TESTI2006045, TESTI2006051, TESTI2006067, TESTI2006083, TESTI2006097, TESTI2006109, TESTI2006111, TESTI2006125, TESTI2006179, TESTI2006209, TESTI2006210, TESTI2006212, TESTI2006218, TESTI2006238, TESTI2006255, TESTI2006258, TESTI2006278, TESTI2006333, TESTI2006341, TESTI2006360, TESTI2006409, TESTI2006425, TESTI2006437, TESTI2006453, TESTI2006457, TESTI2006460, TESTI2006465, TESTI2006483, TESTI2006499, TESTI2006523, TESTI2006543, TESTI2006565, TESTI2006572, TESTI2006617, TESTI2006624, TESTI2006628, TESTI2006633, TESTI2006643, TESTI2006648, TESTI2006659, TESTI2006660, TESTI2006665, TESTI2006667, TESTI2006677, TESTI2006720, TESTI2006735, TESTI2006744, TESTI2006774, TESTI2006853, TESTI2006866, TESTI2006877, TESTI2006879, TESTI2006894, TESTI2006940, TESTI2006955, TESTI2006978, TESTI2006979, TESTI2006990, TESTI2007040, TESTI2007074, TESTI2007078, TESTI2007113, TESTI2007152, TESTI2007163, TESTI2007183, TESTI2007220, TESTI2007234, TESTI2007311, TESTI2007320, TESTI2007346, TESTI2007358, TESTI2007402, TESTI2007405, TESTI2007407, TESTI2007422, TESTI2007452, TESTI2007466, TESTI2007480, TESTI2007490, TESTI2007502, TESTI2007524, TESTI2007533, TESTI2007576, TESTI2007613, TESTI2007657, TESTI2007685, TESTI2007692, TESTI2007749, TESTI2007750, TESTI2007808, TESTI2007814, TESTI2007829, TESTI2007864, TESTI2007867, TESTI2007872, TESTI2007906, TESTI2007922, TESTI2007951, TESTI2007972, TESTI2007973, TESTI2008014, TESTI2008032, TESTI2008033, TESTI2008046, TESTI2008081, TESTI2008099, TESTI2008139, TESTI2008144, TESTI2008161, TESTI2008189, TESTI2008204, TESTI2008219, TESTI2008233, TESTI2008234, TESTI2008237, TESTI2008278, TESTI2008320, TESTI2008331, TESTI2008343, TESTI2008387, TESTI2008389, TESTI2008394, TESTI2008405, TESTI2008420, TESTI2008425, TESTI2008440, TESTI2008567, TESTI2008595, TESTI2008621, TESTI2008636, TESTI2008657, TESTI2008684, TESTI2008699, TESTI2008715, TESTI2008762, TESTI2008774, TESTI2008786, TESTI2008822, TESTI2008840, TESTI2008847, TESTI2008884, TESTI2008901, TESTI2008929, TESTI2008946, TESTI2008960, TESTI2009018, TESTI2009091, TESTI2009097, TESTI2009136, TESTI2009185, TESTI2009190, TESTI2009217, TESTI2009239, TESTI2009325, TESTI2009390, TESTI2009400, TESTI2009412, TESTI2009423, TESTI2009447, TESTI2009462, TESTI2009477, TESTI2009502, TESTI2009511, TESTI2009544, TESTI2009545, TESTI2009551, TESTI2009585, TESTI2009588, TESTI2009683, TESTI2009727, TESTI2009739, TESTI2009812, TESTI2009835, TESTI2009853, TESTI2009935, TESTI2009977, TESTI2009987, TESTI2010009, TESTI2010154, TESTI2010180, TESTI2010239, TESTI2010280, TESTI2010354, TESTI2010396, TESTI2010400, TESTI2010409, TESTI2010572, TESTI2010587, TESTI2010591, TESTI2010682, TESTI2010732, TESTI2010734, TESTI2010755, TESTI2010793, TESTI2010806, TESTI2010833, TESTI2010872, TESTI2011009, TESTI2011020, TESTI2011028, TESTI2011033, TESTI2011254, TESTI2011286, TESTI2011294, TESTI2011314, TESTI2011315, TESTI2011394, TESTI2011407, TESTI2011448, TESTI2011480, TESTI2011549, TESTI2011575, TESTI2011605, TESTI2011612, TESTI2011665, TESTI2011712, TESTI2011750, TESTI2011840, TESTI2011846, TESTI2011915, TESTI2011928, TESTI2011971, TESTI2012019, TESTI2012050, TESTI2012090, TESTI2012095, TESTI2012104, TESTI2012152, TESTI2012171, TESTI2012207, TESTI2012231, TESTI2012244, TESTI2012289, TESTI2012308, TESTI2012356, TESTI2012387, TESTI2012394, TESTI2012444, TESTI2012511, TESTI2012528, TESTI2012544, TESTI2012550, TESTI2012571, TESTI2012592, TESTI2012617, TESTI2012628, TESTI2012778, TESTI2012812, TESTI2012834, TESTI2012835, TESTI2012861, TESTI2012900, TESTI2012915, TESTI2012922, TESTI2013001, TESTI2013012, TESTI2013053, TESTI2013144, TESTI2013163, TESTI2013169, TESTI2013212, TESTI2013231, TESTI2013257, TESTI2013264, TESTI2013268, TESTI2013322, TESTI2013381, TESTI2013382, TESTI2013401, TESTI2013427, TESTI2013468, TESTI2013497, TESTI2013545, TESTI2013546, TESTI2013566, TESTI2013601, TESTI2013604, TESTI2013607, TESTI2013610, TESTI2013691, TESTI2013699, TESTI2013737, TESTI2013767, TESTI2013832, TESTI2013873, TESTI2013889, TESTI2014007, TESTI2014036, TESTI2014097, TESTI2014160, TESTI2014248, TESTI2014254, TESTI2014269, TESTI2014274, TESTI2014324, TESTI2014339, TESTI2014362, TESTI2014385, TESTI2014415, TESTI2014439, TESTI2014474, TESTI2014505, TESTI2014577, TESTI2014578, TESTI2014716, TESTI2014780, TESTI2014800, TESTI2014838, TESTI2014843, TESTI2014979, TESTI2014988, TESTI2015042, TESTI2015092, TESTI2015105, TESTI2015180, TESTI2015249, TESTI2015327, TESTI2015331, TESTI2015335, TESTI2015350, TESTI2015375, TESTI2015437, TESTI2015590, TESTI2015610, TESTI2015647, TESTI2015675, TESTI2015710, TESTI2015752, TESTI2015830, TESTI2015914, TESTI2015938, TESTI2015947, TESTI2015962, TESTI2015987, TESTI2016033, TESTI2016046, TESTI2016101, TESTI2016162, TESTI2016197, TESTI2016278, TESTI2016298, TESTI2016331, TESTI2016337, TESTI2016410, TESTI2016421, TESTI2016509, TESTI2016568, TESTI2016583, TESTI2016599, TESTI2016629, TESTI2016663, TESTI2016667, TESTI2016688, TESTI2016701, TESTI2016758, TESTI2016848, TESTI2016863, TESTI2016888, TESTI2016896, TESTI2016922, TESTI2016942, TESTI2016950, TESTI2016996, TESTI2017017, TESTI2017028, TESTI2017035, TESTI2017069, TESTI2017089, TESTI2017102, TESTI2017107, TESTI2017113, TESTI2017125, TESTI2017256, TESTI2017305, TESTI2017311, TESTI2017396, TESTI2017507, TESTI2017537, TESTI2017582, TESTI2017584, TESTI2017727, TESTI2017740, TESTI2017775, TESTI2017816, TESTI2017832, TESTI2017923, TESTI2017932, TESTI2017951, TESTI2018031, TESTI2018035, TESTI2018060, TESTI2018083, TESTI2018178, TESTI2018221, TESTI2018276, TESTI2018290, TESTI2018335, TESTI2018337, TESTI2018368, TESTI2018421, TESTI2018428, TESTI2018475, TESTI2018482, TESTI2018521, TESTI2018565, TESTI2018581, TESTI2018611, TESTI2018687, TESTI2018697, TESTI2018838, TESTI2018941, TESTI2018957, TESTI2018974, TESTI2018975, TESTI2018997, TESTI2019042, TESTI2019077, TESTI2019228, TESTI2019257, TESTI2019280, TESTI2019282, TESTI2019308, TESTI2019336, TESTI2019352, TESTI2019406, TESTI2019430, TESTI2019455, TESTI2019481, TESTI2019488, TESTI2019501, TESTI2019648, TESTI2019669, TESTI2019697, TESTI2019729, TESTI2019760, TESTI2019787, TESTI2019794, TESTI2019854, TESTI2019859, TESTI2019860, TESTI2019872, TESTI2019911, TESTI2019917, TESTI2019975, TESTI2019998, TESTI2020012, TESTI2020026, TESTI2020029, TESTI2020071, TESTI2020084, TESTI2020265, TESTI2020283, TESTI2020316, TESTI2020344, TESTI2020379, TESTI2020426, TESTI2020445, TESTI2020515, TESTI2020579, TESTI2020717, TESTI2020840, TESTI2020871, TESTI2020905, TESTI2020906, TESTI2020946, TESTI2020956, TESTI2020981, TESTI2020999, TESTI2021003, TESTI2021038, TESTI2021057, TESTI2021077, TESTI2021112, TESTI2021114, TESTI2021116, TESTI2021118, TESTI2021122, TESTI2021138, TESTI2021297, TESTI2021315, TESTI2021358, TESTI2021425, TESTI2021463, TESTI2021531, TESTI2021599, TESTI2021637, TESTI2021654, TESTI2021667, TESTI2021736, TESTI2021785, TESTI2021819, TESTI2021895, TESTI2021911, TESTI2021939, TESTI2021999, TESTI2022010, TESTI2022023, TESTI2022065, TESTI2022086, TESTI2022203, TESTI2022246, TESTI2022323, TESTI2022338, TESTI2022400, TESTI2022462, TESTI2022495, TESTI2022623, TESTI2022649, TESTI2022652, TESTI2022738, TESTI2022798, TESTI2022812, TESTI2022814, TESTI2022874, TESTI2022940, TESTI2022952, TESTI2023025, TESTI2023033, TESTI2023053, TESTI2023085, TESTI2023192, TESTI2023194, TESTI2023214, TESTI2023254, TESTI2023386, TESTI2023427, TESTI2023436, TESTI2023599, TESTI2023752, TESTI2023800, TESTI2023861, TESTI2023903, TESTI2023942, TESTI2023947, TESTI2023951, TESTI2023968, TESTI2024009, TESTI2024090, TESTI2024125, TESTI2024153, TESTI2024192, TESTI2024267, TESTI2024283, TESTI2024299, TESTI2024419, TESTI2024422, TESTI2024443, TESTI2024446, TESTI2024473, TESTI2024476, TESTI2024498, TESTI2024560, TESTI2024567, TESTI2024586, TESTI2024598, TESTI2024641, TESTI2024648, TESTI2024718, TESTI2024744, TESTI2024844, TESTI2024864, TESTI2024885, TESTI2024936, TESTI2024978, TESTI2024999, TESTI2025006, TESTI2025013, TESTI2025022, TESTI2025063, TESTI2025117, TESTI2025144, TESTI2025161, TESTI2025174, TESTI2025229, TESTI2025269, TESTI2025365, TESTI2025403, TESTI2025409, TESTI2025422, TESTI2025448, TESTI2025454, TESTI2025486, TESTI2025546, TESTI2025582, TESTI2025609, TESTI2025656, TESTI2025791, TESTI2025846, TESTI2025872, TESTI2025879, TESTI2025911, TESTI2025920, TESTI2025924, TESTI2026014, TESTI2026024, TESTI2026064, TESTI2026077, TESTI2026104, TESTI2026116, TESTI2026134, TESTI2026168, TESTI2026196, TESTI2026218, TESTI2026233, TESTI2026291, TESTI2026294, TESTI2026401, TESTI2026403, TESTI2026453, TESTI2026461, TESTI2026491, TESTI2026505, TESTI2026515, TESTI2026534, TESTI2026537, TESTI2026589, TESTI2026597, TESTI2026605, TESTI2026647, TESTI2026674, TESTI2026794, TESTI2026824, TESTI2026854, TESTI2026925, TESTI2026936, TESTI2026957, TESTI2027013, TESTI2027019, TESTI2027108, TESTI2027165, TESTI2027171, TESTI2027173, TESTI2027179, TESTI2027185, TESTI2027206, TESTI2027238, TESTI2027239, TESTI2027243, TESTI2027271, TESTI2027296, TESTI2027378, TESTI2027411, TESTI2027450, TESTI2027503, TESTI2027562, TESTI2027615, TESTI2027645, TESTI2027730, TESTI2027736, TESTI2027791, TESTI2027820, TESTI2027828, TESTI2027840, TESTI2027909, TESTI2028098, TESTI2028151, TESTI2028242, TESTI2028253, TESTI2028254, TESTI2028269, TESTI2028290, TESTI2028296, TESTI2028384, TESTI2028426, TESTI2028488, TESTI2028523, TESTI2028583, TESTI2028613, TESTI2028659, TESTI2028662, TESTI2028670, TESTI2028705, TESTI2028776, TESTI2028811, TESTI2028891, TESTI2028985, TESTI2028997, TESTI2029131, TESTI2029162, TESTI2029196, TESTI2029201, TESTI2029244, TESTI2029249, TESTI2029252, TESTI2029259, TESTI2029264, TESTI2029470, TESTI2029672, TESTI2029785, TESTI2029880, TESTI2030136, TESTI2030322, TESTI2030336, TESTI2030342, TESTI2030519, TESTI2030554, TESTI2030556, TESTI2030728, TESTI2030754, TESTI2030770, TESTI2030860, TESTI2030901, TESTI2030917, TESTI2030930, TESTI2031006, TESTI2031007, TESTI2031060, TESTI2031129, TESTI2031356, TESTI2031418, TESTI2031504, TESTI2031529, TESTI2031687, TESTI2031760, TESTI2031809, TESTI2031919, TESTI2031935, TESTI2031986, TESTI2032044, TESTI2032067, TESTI2032079, TESTI2032643, TESTI2032681, TESTI2032761, TESTI2032768, TESTI2032774, TESTI2032828, TESTI2033031, TESTI2033242, TESTI2033254, TESTI2033300, TESTI2033395, TESTI2033441, TESTI2033453, TESTI2033505, TESTI2033520, TESTI2033641, TESTI2033710, TESTI2033905, TESTI2034187, TESTI2034243, TESTI2034249, TESTI2034307, TESTI2034357, TESTI2034401, TESTI2034407, TESTI2034506, TESTI2034520, TESTI2034718, TESTI2034730, TESTI2034749, TESTI2034767, TESTI2034774, TESTI2034777, TESTI2034785, TESTI2034799, TESTI2034847, TESTI2034913, TESTI2034916, TESTI2034931, TESTI2034953, TESTI2034997, TESTI2035003, TESTI2035078, TESTI2035084, TESTI2035107, TESTI2035121, TESTI2035124, TESTI2035183, TESTI2035236, TESTI2035262, TESTI2035309, TESTI2035688, TESTI2035775, TESTI2035793, TESTI2035898, TESTI2035962, TESTI2035981, TESTI2035997, TESTI2036114, TESTI2036129, TESTI2036285, TESTI2036288, TESTI2036513, TESTI2036589, TESTI2036650, TESTI2036684, TESTI2036691, TESTI2036736, TESTI2036822, TESTI2036833, TESTI2036913, TESTI2036922, TESTI2036951, TESTI2036965, TESTI2037002, TESTI2037055, TESTI2037081, TESTI2037085, TESTI2037103, TESTI2037106, TESTI2037111, TESTI2037209, TESTI2037255, TESTI2037359, TESTI2037375, TESTI2037382, TESTI2037534, TESTI2037569, TESTI2037572, TESTI2037643, TESTI2037657, TESTI2037673, TESTI2037723, TESTI2037819, TESTI2037830, TESTI2037845, TESTI2037877, TESTI2037976, TESTI2038048, TESTI2038065, TESTI2038104, TESTI2038275, TESTI2038388, TESTI2038573, TESTI2038596, TESTI2038623, TESTI2038644, TESTI2038733, TESTI2038858, TESTI2038958, TESTI2039025, TESTI2039026, TESTI2039038, TESTI2039041, TESTI2039060, TESTI2039113, TESTI2039121, TESTI2039209, TESTI2039225, TESTI2039227, TESTI2039276, TESTI2039342, TESTI2039353, TESTI2039544, TESTI2039613, TESTI2039707, TESTI2039732, TESTI2039738, TESTI2039776, TESTI2039867, TESTI2039908, TESTI2040018, TESTI2040094, TESTI2040102, TESTI2040128, TESTI2040143, TESTI2040297, TESTI2040372, TESTI2040377, TESTI2040424, TESTI2040642, TESTI2040815, TESTI2040897, TESTI2040944, TESTI2040964, TESTI2040983, TESTI2040989, TESTI2041330, TESTI2041362, TESTI2041517, TESTI2041564, TESTI2041664, TESTI2041730, TESTI2041778, TESTI2041800, TESTI2041947, TESTI2041956, TESTI2041976, TESTI2042062, TESTI2042149, TESTI2042264, TESTI2042295, TESTI2042302, TESTI2042326, TESTI2042400, TESTI2042450, TESTI2042473, TESTI2042507, TESTI2042508, TESTI2042750, TESTI2042783, TESTI2042806, TESTI2042928, TESTI2042946, TESTI2042958, TESTI2043275, TESTI2043277, TESTI2043282, TESTI2043313, TESTI2043477, TESTI2043585, TESTI2043758, TESTI2043817, TESTI2043857, TESTI2043866, TESTI2043869, TESTI2044064, TESTI2044118, TESTI2044194, TESTI2044306, TESTI2044309, TESTI2044413, TESTI2044418, TESTI2044754, TESTI2044788, TESTI2044796, TESTI2044833, TESTI2044892, TESTI2044920, TESTI2044968, TESTI2045139, TESTI2045155, TESTI2045171, TESTI2045199, TESTI2045353, TESTI2045509, TESTI2045562, TESTI2045611, TESTI2045819, TESTI2045850, TESTI2045920, TESTI2045964, TESTI2045983, TESTI2046100, TESTI2046188, TESTI2046347, TESTI2046352, TESTI2046358, TESTI2046439, TESTI2046535, TESTI2046536, TESTI2046552, TESTI2046569, TESTI2046686, TESTI2046721, TESTI2046732, TESTI2046786, TESTI2046797, TESTI2046863, TESTI2046872, TESTI2047071, TESTI2047141, TESTI2047147, TESTI2047153, TESTI2047212, TESTI2047342, TESTI2047383, TESTI2047605, TESTI2047792, TESTI2047801, TESTI2047818, TESTI2047824, TESTI2047885, TESTI2047930, TESTI2048105, TESTI2048109, TESTI2048465, TESTI2048603, TESTI2048898, TESTI2049041, TESTI2049062, TESTI2049206, TESTI2049246, TESTI2049277, TESTI2049422, TESTI2049452, TESTI2049469, TESTI2049553, TESTI2049576, TESTI2049857, TESTI2049956, TESTI2050137, TESTI2050681, TESTI2050780, TESTI2050987, TESTI2051148, TESTI2051177, TESTI2051279, TESTI2051488, TESTI2051543, TESTI2051627, TESTI2051742, TESTI2051767, TESTI2051791, TESTI2051806, TESTI2051867, TESTI2051873, TESTI2052110, TESTI2052202, TESTI2052211, TESTI2052256, TESTI2052288, TESTI2052525, TESTI2052670, TESTI2052693, TESTI2052698, TESTI2052799, TESTI2052822, TESTI2052985, TESTI2053151, TESTI2053242, TESTI2053399, TESTI2053526, TESTI2053561, TESTI2053621, TESTI2053667, TESTI3000002, TESTI3000005, TESTI4000068, TESTI4000079, TESTI4000093, TESTI4000134, TESTI4000137, TESTI4000153, TESTI4000155, TESTI4000157, TESTI4000183, TESTI4000214, TESTI4000215, TESTI4000228, TESTI4000250, TESTI4000288, TESTI4000319, TESTI4000349, TESTI4000370, TESTI4000394, TESTI4000462, TESTI4000530, TESTI4000534, TESTI4000598, TESTI4000600, TESTI4000621, TESTI4000703, TESTI4000724, TESTI4000957, TESTI4000970, TESTI4001036, TESTI4001037, TESTI4001060, TESTI4001106, TESTI4001148, TESTI4001176, TESTI4001195, TESTI4001201, TESTI4001206, TESTI4001348, TESTI4001441, TESTI4001467, TESTI4001473, TESTI4001517, TESTI4001527, TESTI4001561, TESTI4001569, TESTI4001604, TESTI4001665, TESTI4001679, TESTI4001795, TESTI4001923, TESTI4001925, TESTI4001984, TESTI4002003, TESTI4002141, TESTI4002195, TESTI4002202, TESTI4002290, TESTI4002319, TESTI4002491, TESTI4002520, TESTI4002552, TESTI4002703, TESTI4002754, TESTI4002868, TESTI4002878, TESTI4002889, TESTI4002988, TESTI4003150, TESTI4003179, TESTI4003279, TESTI4003319, TESTI4003404, TESTI4003565, TESTI4003574, TESTI4003579, TESTI4003602, TESTI4003703, TESTI4003733, TESTI4003796, TESTI4003944, TESTI4004003, TESTI4004031, TESTI4004200, TESTI4004210, TESTI4004539, TESTI4004626, TESTI4004653, TESTI4004695, TESTI4004722, TESTI4004887, TESTI4004917, TESTI4005015, TESTI4005039, TESTI4005158, TESTI4005317, TESTI4005322, TESTI4005470, TESTI4005500, TESTI4005534, TESTI4005543, TESTI4005628, TESTI4005801, TESTI4005805, TESTI4005857, TESTI4005961, TESTI4006053, TESTI4006079, TESTI4006112, TESTI4006137, TESTI4006148, TESTI4006219, TESTI4006234, TESTI4006308, TESTI4006393, TESTI4006407, TESTI4006412, TESTI4006420, TESTI4006441, TESTI4006473, TESTI4006539, TESTI4006546, TESTI4006567, TESTI4006704, TESTI4006728, TESTI4006802, TESTI4006819, TESTI4007064, TESTI4007163, TESTI4007176, TESTI4007203, TESTI4007239, TESTI4007369, TESTI4007373, TESTI4007382, TESTI4007404, TESTI4007489, TESTI4007565, TESTI4007671, TESTI4007775, TESTI4007778, TESTI4007799, TESTI4007810, TESTI4007816, TESTI4008007, TESTI4008018, TESTI4008050, TESTI4008086, TESTI4008097, TESTI4008176, TESTI4008209, TESTI4008219, TESTI4008250, TESTI4008302, TESTI4008305, TESTI4008401, TESTI4008417, TESTI4008429, TESTI4008573, TESTI4008797, TESTI4008816, TESTI4008840, TESTI4008935, TESTI4008993, TESTI4009022, TESTI4009028, TESTI4009034, TESTI4009123, TESTI4009160, TESTI4009215, TESTI4009283, TESTI4009306, TESTI4009374, TESTI4009406, TESTI4009457, TESTI4009501, TESTI4009563, TESTI4009608, TESTI4009638, TESTI4009752, TESTI4009881, TESTI4009886, TESTI4009928, TESTI4010076, TESTI4010082, TESTI4010095, TESTI4010211, TESTI4010377, TESTI4010475, TESTI4010544, TESTI4010713, TESTI4010721, TESTI4010789, TESTI4010817, TESTI4010831, TESTI4010902, TESTI4010928, TESTI4010979, TESTI4011070, TESTI4011072, TESTI4011084, TESTI4011118, TESTI4011246, TESTI4011484, TESTI4011505, TESTI4011532, TESTI4011616, TESTI4011744, TESTI4011745, TESTI4011829, TESTI4011926, TESTI4011956, TESTI4012010, TESTI4012086, TESTI4012258, TESTI4012293, TESTI4012329, TESTI4012382, TESTI4012406, TESTI4012448, TESTI4012451, TESTI4012505, TESTI4012556, TESTI4012623, TESTI4012646, TESTI4012679, TESTI4012911, TESTI4012956, TESTI4013365, TESTI4013369, TESTI4013410, TESTI4013474, TESTI4013602, TESTI4013667, TESTI4013675, TESTI4013685, TESTI4013735, TESTI4013742, TESTI4013774, TESTI4013817, TESTI4013830, TESTI4013852, TESTI4013894, TESTI4013924, TESTI4013960, TESTI4013962, TESTI4014159, TESTI4014265, TESTI4014276, TESTI4014306, TESTI4014392, TESTI4014415, TESTI4014445, TESTI4014553, TESTI4014661, TESTI4014694, TESTI4014801, TESTI4014818, TESTI4014891, TESTI4014908, TESTI4014924, TESTI4014932, TESTI4014977, TESTI4015012, TESTI4015129, TESTI4015145, TESTI4015204, TESTI4015263, TESTI4015293, TESTI4015299, TESTI4015339, TESTI4015398, TESTI4015471, TESTI4015477, TESTI4015600, TESTI4015646, TESTI4015681, TESTI4015688, TESTI4015790, TESTI4016110, TESTI4016238, TESTI4016551, TESTI4016812, TESTI4016822, TESTI4016865, TESTI4016882, TESTI4016925, TESTI4017001, TESTI4017116, TESTI4017137, TESTI4017229, TESTI4017254, TESTI4017269, TESTI4017380, TESTI4017382, TESTI4017543, TESTI4017575, TESTI4017647, TESTI4017763, TESTI4017848, TESTI4017854, TESTI4017901, TESTI4017961, TESTI4017984, TESTI4018101, TESTI4018152, TESTI4018208, TESTI4018382, TESTI4018506, TESTI4018555, TESTI4018751, TESTI4018806, TESTI4018835, TESTI4018859, TESTI4018881, TESTI4018886, TESTI4018938, TESTI4019140, TESTI4019149, TESTI4019299, TESTI4019417, TESTI4019440, TESTI4019566, TESTI4019657, TESTI4019756, TESTI4019843, TESTI4020092, TESTI4020102, TESTI4020342, TESTI4020460, TESTI4020806, TESTI4020819, TESTI4020920, TESTI4021129, TESTI4021197, TESTI4021294, TESTI4021377, TESTI4021456, TESTI4021491, TESTI4021569, TESTI4021713, TESTI4021821, TESTI4022158, TESTI4022577, TESTI4022716, TESTI4022873, TESTI4023096, TESTI4023172, TESTI4023546, TESTI4023555, TESTI4023654, TESTI4023722, TESTI4023762, TESTI4023942, TESTI4024096, TESTI4024240, TESTI4024245, TESTI4024294, TESTI4024344, TESTI4024387, TESTI4024420, TESTI4024494, TESTI4024874, TESTI4024890, TESTI4024907, TESTI4024930, TESTI4025062, TESTI4025268, TESTI4025401, TESTI4025494, TESTI4025547, TESTI4025731, TESTI4025797, TESTI4025865, TESTI4025908, TESTI4025920, TESTI4026079, TESTI4026080, TESTI4026192, TESTI4026207, TESTI4026295, TESTI4026390, TESTI4026456, TESTI4026510, TESTI4026524, TESTI4026680, TESTI4026700, TESTI4026762, TESTI4026785, TESTI4027139, TESTI4027170, TESTI4027262, TESTI4027516, TESTI4027557, TESTI4027660, TESTI4027821, TESTI4027969, TESTI4028042, TESTI4028059, TESTI4028062, TESTI4028182, TESTI4028429, TESTI4028612, TESTI4028692, TESTI4028809, TESTI4028823, TESTI4028880, TESTI4028904, TESTI4028938, TESTI4028958, TESTI4028983, TESTI4029023, TESTI4029348, TESTI4029370, TESTI4029528, TESTI4029651, TESTI4029676, TESTI4029690, TESTI4029731, TESTI4029743, TESTI4030069, TESTI4030159, TESTI4030319, TESTI4030505, TESTI4030603, TESTI4030669, TESTI4030673, TESTI4030864, TESTI4031066, TESTI4031173, TESTI4031335, TESTI4031745, TESTI4031818, TESTI4032090, TESTI4032112, TESTI4032128, TESTI4032270, TESTI4032375, TESTI4032834, TESTI4032856, TESTI4032895, TESTI4033146, TESTI4033177, TESTI4033433, TESTI4033690, TESTI4034172, TESTI4034212, TESTI4034432, TESTI4034495, TESTI4034632, TESTI4034633, TESTI4034912, TESTI4034973, TESTI4035063, TESTI4035065, TESTI4035498, TESTI4035508, TESTI4035581, TESTI4035602, TESTI4035637, TESTI4035649, TESTI4035872, TESTI4035895, TESTI4035898, TESTI4035989, TESTI4036012, TESTI4036042, TESTI4036048, TESTI4036315, TESTI4036319, TESTI4036449, TESTI4036767, TESTI4036909, TESTI4037066, TESTI4037188, TESTI4037228, TESTI4037244, TESTI4037727, TESTI4037949, TESTI4038047, TESTI4038099, TESTI4038156, TESTI4038223, TESTI4038258, TESTI4038339, TESTI4038492, TESTI4038721, TESTI4038758, TESTI4038779, TESTI4038818, TESTI4039038, TESTI4039086, TESTI4039451, TESTI4039575, TESTI4039659, TESTI4039744, TESTI4039904, TESTI4040197, TESTI4040363, TESTI4040535, TESTI4040559, TESTI4040598, TESTI4040800, TESTI4040804, TESTI4040939, TESTI4040956, TESTI4041049, TESTI4041053, TESTI4041086, TESTI4041099, TESTI4041143, TESTI4041482, TESTI4041519, TESTI4041624, TESTI4041629, TESTI4041832, TESTI4041844, TESTI4041903, TESTI4041954, TESTI4041984, TESTI4041985, TESTI4041986, TESTI4042098, TESTI4042420, TESTI4042440, TESTI4042444, TESTI4042711, TESTI4042846, TESTI4043067, TESTI4043129, TESTI4043166, TESTI4043203, TESTI4043371, TESTI4043378, TESTI4043512, TESTI4043551, TESTI4043710, TESTI4043947, TESTI4044035, TESTI4044076, TESTI4044084, TESTI4044123, TESTI4044186, TESTI4044234, TESTI4044291, TESTI4044296, TESTI4044300, TESTI4044682, TESTI4044704, TESTI4044770, TESTI4045168, TESTI4045312, TESTI4045330, TESTI4045470, TESTI4045701, TESTI4045908, TESTI4045955, TESTI4045982, TESTI4046073, TESTI4046090, TESTI4046240, TESTI4046245, TESTI4046253, TESTI4046282, TESTI4046328, TESTI4046450, TESTI4046457, TESTI4046487, TESTI4046502, TESTI4046523, TESTI4046819, TESTI4046873, TESTI4046884, TESTI4046896, TESTI4046903, TESTI4046962, TESTI4047069, TESTI4047119, TESTI4047305, TESTI4047328, TESTI4047437, TESTI4047569, TESTI4047746, TESTI4047808, THYMU1000010, THYMU1000017, THYMU1000025, THYMU1000029, THYMU1000032, THYMU1000033, THYMU1000060, THYMU1000074, THYMU1000098, THYMU1000105, THYMU1000109, THYMU1000136, THYMU1000142, THYMU1000158, THYMU1000176, THYMU1000179, THYMU1000191, THYMU1000198, THYMU1000217, THYMU1000240, THYMU1000242, THYMU1000291, THYMU1000316, THYMU1000318, THYMU1000331, THYMU1000336, THYMU1000359, THYMU1000366, THYMU1000382, THYMU1000393, THYMU1000394, THYMU1000399, THYMU1000426, THYMU1000440, THYMU1000459, THYMU1000473, THYMU1000490, THYMU1000491, THYMU1000496, THYMU1000527, THYMU1000532, THYMU1000536, THYMU1000554, THYMU1000558, THYMU1000576, THYMU1000600, THYMU1000677, THYMU1000692, THYMU2000022, THYMU2000032, THYMU2000057, THYMU2000120, THYMU2000138, THYMU2000140, THYMU2000155, THYMU2000162, THYMU2000171, THYMU2000176, THYMU2000179, THYMU2000231, THYMU2000236, THYMU2000276, THYMU2000280, THYMU2000300, THYMU2000317, THYMU2000368, THYMU2000382, THYMU2000418, THYMU2000440, THYMU2000489, THYMU2000492, THYMU2000519, THYMU2000570, THYMU2000602, THYMU2000660, THYMU2000671, THYMU2000672, THYMU2000684, THYMU2000767, THYMU2000775, THYMU2000800, THYMU2000879, THYMU2000932, THYMU2000950, THYMU2000971, THYMU2000982, THYMU2000990, THYMU2001018, THYMU2001053, THYMU2001071, THYMU2001090, THYMU2001139, THYMU2001195, THYMU2001202, THYMU2001203, THYMU2001256, THYMU2001270, THYMU2001291, THYMU2001314, THYMU2001325, THYMU2001357, THYMU2001381, THYMU2001422, THYMU2001443, THYMU2001515, THYMU2001521, THYMU2001556, THYMU2001622, THYMU2001727, THYMU2001819, THYMU2001825, THYMU2001839, THYMU2001868, THYMU2001898, THYMU2001900, THYMU2001916, THYMU2001989, THYMU2002023, THYMU2002037, THYMU2002080, THYMU2002109, THYMU2002147, THYMU2002154, THYMU2002157, THYMU2002162, THYMU2002177, THYMU2002203, THYMU2002229, THYMU2002242, THYMU2002338, THYMU2002356, THYMU2002376, THYMU2002384, THYMU2002450, THYMU2002490, THYMU2002548, THYMU2002695, THYMU2002745, THYMU2002756, THYMU2002789, THYMU2002792, THYMU2002815, THYMU2002852, THYMU2002910, THYMU2002950, THYMU2002983, THYMU2003012, THYMU2003069, THYMU2003107, THYMU2003124, THYMU2003133, THYMU2003166, THYMU2003232, THYMU2003242, THYMU2003249, THYMU2003270, THYMU2003282, THYMU2003287, THYMU2003336, THYMU2003366, THYMU2003397, THYMU2003440, THYMU2003470, THYMU2003479, THYMU2003499, THYMU2003542, THYMU2003632, THYMU2003650, THYMU2003700, THYMU2003760, THYMU2003803, THYMU2003855, THYMU2003891, THYMU2003907, THYMU2003932, THYMU2004003, THYMU2004008, THYMU2004042, THYMU2004108, THYMU2004111, THYMU2004123, THYMU2004139, THYMU2004169, THYMU2004284, THYMU2004320, THYMU2004336, THYMU2004356, THYMU2004410, THYMU2004452, THYMU2004508, THYMU2004512, THYMU2004635, THYMU2004639, THYMU2004668, THYMU2004677, THYMU2004688, THYMU2004693, THYMU2004733, THYMU2004835, THYMU2004843, THYMU2004906, THYMU2004986, THYMU2005001, THYMU2005003, THYMU2005046, THYMU2005134, THYMU2005156, THYMU2005190, THYMU2005225, THYMU2005240, THYMU2005246, THYMU2005270, THYMU2005283, THYMU2005303, THYMU2005321, THYMU2005356, THYMU2005369, THYMU2005439, THYMU2005480, THYMU2005482, THYMU2005507, THYMU2005545, THYMU2005574, THYMU2005576, THYMU2005748, THYMU2005759, THYMU2005807, THYMU2005815, THYMU2005855, THYMU2005881, THYMU2005948, THYMU2005980, THYMU2005997, THYMU2006001, THYMU2006048, THYMU2006098, THYMU2006160, THYMU2006170, THYMU2006252, THYMU2006261, THYMU2006277, THYMU2006303, THYMU2006324, THYMU2006350, THYMU2006357, THYMU2006365, THYMU2006420, THYMU2006468, THYMU2006610, THYMU2006666, THYMU2006712, THYMU2006913, THYMU2006946, THYMU2006965, THYMU2007025, THYMU2007060, THYMU2007095, THYMU2007146, THYMU2007179, THYMU2007258, THYMU2007307, THYMU2007308, THYMU2007350, THYMU2007384, THYMU2007415, THYMU2007467, THYMU2007493, THYMU2007521, THYMU2007528, THYMU2007530, THYMU2007532, THYMU2007561, THYMU2007571, THYMU2007635, THYMU2007658, THYMU2007667, THYMU2007725, THYMU2007729, THYMU2007802, THYMU2007824, THYMU2007854, THYMU2007952, THYMU2007969, THYMU2008035, THYMU2008036, THYMU2008072, THYMU2008111, THYMU2008145, THYMU2008149, THYMU2008185, THYMU2008191, THYMU2008207, THYMU2008226, THYMU2008282, THYMU2008339, THYMU2008350, THYMU2008351, THYMU2008383, THYMU2008452, THYMU2008643, THYMU2008686, THYMU2008691, THYMU2008714, THYMU2008725, THYMU2008727, THYMU2008781, THYMU2008799, THYMU2008876, THYMU2008910, THYMU2008917, THYMU2008928, THYMU2008990, THYMU2008994, THYMU2009023, THYMU2009046, THYMU2009101, THYMU2009104, THYMU2009134, THYMU2009157, THYMU2009181, THYMU2009186, THYMU2009338, THYMU2009425, THYMU2009516, THYMU2009526, THYMU2009546, THYMU2009596, THYMU2009658, THYMU2009792, THYMU2009835, THYMU2009906, THYMU2009948, THYMU2010030, THYMU2010041, THYMU2010046, THYMU2010059, THYMU2010082, THYMU2010094, THYMU2010161, THYMU2010192, THYMU2010519, THYMU2010637, THYMU2010671, THYMU2010699, THYMU2010705, THYMU2010779, THYMU2010816, THYMU2010831, THYMU2010848, THYMU2011053, THYMU2011063, THYMU2011072, THYMU2011096, THYMU2011118, THYMU2011142, THYMU2011183, THYMU2011257, THYMU2011259, THYMU2011295, THYMU2011308, THYMU2011390, THYMU2011431, THYMU2011447, THYMU2011538, THYMU2011548, THYMU2011551, THYMU2011564, THYMU2011573, THYMU2011585, THYMU2011621, THYMU2011666, THYMU2011736, THYMU2011785, THYMU2011806, THYMU2011852, THYMU2011937, THYMU2011939, THYMU2012073, THYMU2012104, THYMU2012113, THYMU2012273, THYMU2012401, THYMU2012492, THYMU2012507, THYMU2012565, THYMU2012574, THYMU2012631, THYMU2012665, THYMU2012690, THYMU2012701, THYMU2012807, THYMU2012826, THYMU2012882, THYMU2012891, THYMU2012902, THYMU2012919, THYMU2013023, THYMU2013047, THYMU2013051, THYMU2013089, THYMU2013170, THYMU2013364, THYMU2013386, THYMU2013426, THYMU2013578, THYMU2013648, THYMU2013705, THYMU2013757, THYMU2013779, THYMU2013863, THYMU2013950, THYMU2013981, THYMU2014067, THYMU2014068, THYMU2014183, THYMU2014204, THYMU2014297, THYMU2014323, THYMU2014327, THYMU2014353, THYMU2014492, THYMU2014500, THYMU2014599, THYMU2014762, THYMU2014777, THYMU2014801, THYMU2014901, THYMU2014923, THYMU2015019, THYMU2015161, THYMU2015316, THYMU2015321, THYMU2015439, THYMU2015441, THYMU2015479, THYMU2015775, THYMU2015825, THYMU2015918, THYMU2015943, THYMU2015984, THYMU2016113, THYMU2016164, THYMU2016219, THYMU2016360, THYMU2016496, THYMU2016523, THYMU2016840, THYMU2016968, THYMU2017008, THYMU2017010, THYMU2017023, THYMU2017085, THYMU2017099, THYMU2017162, THYMU2017215, THYMU2017362, THYMU2017366, THYMU2017398, THYMU2017449, THYMU2017479, THYMU2017522, THYMU2017526, THYMU2017601, THYMU2017675, THYMU2017707, THYMU2017831, THYMU2017844, THYMU2017878, THYMU2017948, THYMU2018028, THYMU2018071, THYMU2018126, THYMU2018189, THYMU2018197, THYMU2018384, THYMU2018455, THYMU2018547, THYMU2018565, THYMU2018639, THYMU2018673, THYMU2018721, THYMU2018772, THYMU2018819, THYMU2018841, THYMU2018997, THYMU2019054, THYMU2019197, THYMU2019210, THYMU2019364, THYMU2019436, THYMU2019442, THYMU2019587, THYMU2019599, THYMU2019686, THYMU2019813, THYMU2020198, THYMU2020289, THYMU2020416, THYMU2020491, THYMU2020499, THYMU2020560, THYMU2020667, THYMU2020830, THYMU2020883, THYMU2020959, THYMU2021361, THYMU2021509, THYMU2021597, THYMU2021684, THYMU2021714, THYMU2022213, THYMU2022289, THYMU2022660, THYMU2022854, THYMU2022922, THYMU2023209, THYMU2023264, THYMU2023576, THYMU2023711, THYMU2023900, THYMU2023943, THYMU2023967, THYMU2024071, THYMU2024121, THYMU2024185, THYMU2024207, THYMU2024616, THYMU2024684, THYMU2024748, THYMU2025042, THYMU2025189, THYMU2025319, THYMU2025325, THYMU2025406, THYMU2025557, THYMU2025572, THYMU2025707, THYMU2025849, THYMU2025909, THYMU2026182, THYMU2026530, THYMU2026531, THYMU2026835, THYMU2026904, THYMU2027053, THYMU2027168, THYMU2027249, THYMU2027282, THYMU2027497, THYMU2027695, THYMU2027734, THYMU2027894, THYMU2027975, THYMU2027996, THYMU2028041, THYMU2028368, THYMU2028379, THYMU2028394, THYMU2028412, THYMU2028629, THYMU2028632, THYMU2028724, THYMU2028739, THYMU2028942, THYMU2028978, THYMU2029134, THYMU2029578, THYMU2029676, THYMU2029688, THYMU2029788, THYMU2030068, THYMU2030226, THYMU2030264, THYMU2030462, THYMU2030543, THYMU2030637, THYMU2030655, THYMU2030796, THYMU2030912, THYMU2030982, THYMU2031046, THYMU2031139, THYMU2031218, THYMU2031249, THYMU2031258, THYMU2031368, THYMU2031579, THYMU2031847, THYMU2031890, THYMU2031994, THYMU2032014, THYMU2032035, THYMU2032080, THYMU2032150, THYMU2032155, THYMU2032358, THYMU2032437, THYMU2032601, THYMU2032655, THYMU2032696, THYMU2032715, THYMU2032732, THYMU2032976, THYMU2033053, THYMU2033059, THYMU2033070, THYMU2033079, THYMU2033085, THYMU2033104, THYMU2033227, THYMU2033263, THYMU2033308, THYMU2033401, THYMU2033583, THYMU2033755, THYMU2033787, THYMU2033816, THYMU2034182, THYMU2034279, THYMU2034314, THYMU2034338, THYMU2034374, THYMU2034647, THYMU2035064, THYMU2035078, THYMU2035101, THYMU2035319, THYMU2035321, THYMU2035388, THYMU2035400, THYMU2035554, THYMU2035710, THYMU2035735, THYMU2036058, THYMU2036105, THYMU2036207, THYMU2036215, THYMU2036252, THYMU2036265, THYMU2036366, THYMU2036459, THYMU2036461, THYMU2036604, THYMU2036653, THYMU2037081, THYMU2037208, THYMU2037226, THYMU2037233, THYMU2037234, THYMU2037348, THYMU2037406, THYMU2037965, THYMU2038058, THYMU2038189, THYMU2038199, THYMU2038220, THYMU2038301, THYMU2038369, THYMU2038389, THYMU2038615, THYMU2038636, THYMU2038739, THYMU2038772, THYMU2038797, THYMU2038906, THYMU2039305, THYMU2039315, THYMU2039334, THYMU2039350, THYMU2039411, THYMU2039634, THYMU2039719, THYMU2039780, THYMU2039788, THYMU2039989, THYMU2040029, THYMU2040110, THYMU2040114, THYMU2040140, THYMU2040412, THYMU2040427, THYMU2040824, THYMU2040925, THYMU2041007, THYMU2041015, THYMU2041252, THYMU3000028, THYMU3000036, THYMU3000037, THYMU3000082, THYMU3000194, THYMU3000224, THYMU3000269, THYMU3000306, THYMU3000360, THYMU3000390, THYMU3000420, THYMU3000490, THYMU3000504, THYMU3000542, THYMU3000655, THYMU3000776, THYMU3000826, THYMU3000841, THYMU3001077, THYMU3001082, THYMU3001083, THYMU3001133, THYMU3001151, THYMU3001379, THYMU3001472, THYMU3001593, THYMU3001883, THYMU3001991, THYMU3002452, THYMU3002661, THYMU3003007, THYMU3003092, THYMU3003212, THYMU3003350, THYMU3003403, THYMU3003565, THYMU3003763, THYMU3003865, THYMU3003958, THYMU3003965, THYMU3004157, THYMU3004628, THYMU3004632, THYMU3004835, THYMU3004866, THYMU3005050, THYMU3005378, THYMU3005407, THYMU3005415, THYMU3005427, THYMU3005482, THYMU3005491, THYMU3005629, THYMU3005696, THYMU3006118, THYMU3006132, THYMU3006168, THYMU3006172, THYMU3006371, THYMU3006485, THYMU3006640, THYMU3006767, THYMU3006811, THYMU3006963, THYMU3007137, THYMU3007308, THYMU3007368, THYMU3007423, THYMU3007559, THYMU3007845, THYMU3008060, THYMU3008136, THYMU3008171, THYMU3008216, THYMU3008436, THYMU3008672, THYMU3008883, THYMU3008935, THYMU3009006, THYMU3009255, THYMU3009391, THYMU3009643, THYMU3009755, THYMU3010247, THYMU3011012, THYMU3011081, THYMU3011244, THYMU3011360, THYMU3011534, THYMU3011543, THYMU3011556, THYMU3011717, THYMU3012402, THYMU3012907, THYMU3012983, THYMU3013114, THYMU3013197, THYMU3013241, THYMU3013386, THYMU3013470, THYMU3013785, THYMU3013897, THYMU3014038, THYMU3014173, THYMU3014372, THYMU3014555, THYMU3014620, THYMU3014701, THYMU3015042, THYMU3015457, THYMU3015571, THYMU3015592, THYMU3015625, THYMU3015647, THYMU3015962, THYMU3016022, THYMU3016518, THYMU3016797, THYMU3016822, THYMU3016850, THYMU3017562, THYMU3017688, THYMU3017689, THYMU3017761, THYMU3018151, THYMU3018896, THYMU3019095, THYMU3019476, THYMU3019605, THYMU3019916, THYMU3020221, THYMU3020595, THYMU3020713, THYMU3020856, THYMU3020869, THYMU3020970, THYMU3021404, THYMU3021586, THYMU3021755, THYMU3021900, THYMU3022211, THYMU3022434, THYMU3022528, THYMU3022668, THYMU3022982, THYMU3023107, THYMU3023211, THYMU3023216, THYMU3023394, THYMU3023400, THYMU3023797, THYMU3024164, THYMU3024339, THYMU3024602, THYMU3024879, THYMU3025118, THYMU3025313, THYMU3025642, THYMU3025683, THYMU3025772, THYMU3025865, THYMU3026350, THYMU3026479, THYMU3026532, THYMU3026783, THYMU3026869, THYMU3027251, THYMU3027540, THYMU3027655, THYMU3027671, THYMU3028075, THYMU3028410, THYMU3028461, THYMU3028702, THYMU3029188, THYMU3029318, THYMU3029421, THYMU3029719, THYMU3029774, THYMU3029832, THYMU3030072, THYMU3030231, THYMU3030706, THYMU3030710, THYMU3030752, THYMU3031146, THYMU3031402, THYMU3031610, THYMU3031612, THYMU3031868, THYMU3031878, THYMU3032032, THYMU3032867, THYMU3033402, THYMU3033630, THYMU3033649, THYMU3033754, THYMU3033759, THYMU3034078, THYMU3034099, THYMU3034453, THYMU3034616, THYMU3034853, THYMU3034867, THYMU3034983, THYMU3036200, THYMU3036310, THYMU3036934, THYMU3036953, THYMU3037052, THYMU3037192, THYMU3037617, THYMU3037772, THYMU3037827, THYMU3037836, THYMU3037856, THYMU3037867, THYMU3037909, THYMU3037980, THYMU3038158, THYMU3038167, THYMU3038214, THYMU3038266, THYMU3038328, THYMU3038347, THYMU3038375, THYMU3038603, THYMU3038687, THYMU3038759, THYMU3038879, THYMU3038970, THYMU3039807, THYMU3039846, THYMU3040068, THYMU3040126, THYMU3040146, THYMU3040168, THYMU3040172, THYMU3040725, THYMU3040746, THYMU3040816, THYMU3040829, THYMU3040830, THYMU3040986, THYMU3041354, THYMU3041386, THYMU3041573, THYMU3041603, THYMU3041736, THYMU3041918, THYMU3042075, THYMU3042321, THYMU3042372, THYMU3042758, THYMU3042929, THYMU3043200, THYMU3043327, THYMU3043482, THYMU3043597, THYMU3043688, THYMU3043779, THYMU3043883, THYMU3043993, THYMU3044175, THYMU3044188, THYMU3044441, THYMU3044445, THYMU3045510, THYMU3045673, THYMU3045692, THYMU3045704, THYMU3046140, THYMU3046350, THYMU3046360, THYMU3046856, THYMU3047144, THYMU3047156, THYMU3047366, THYMU3047513, THYMU3047542, THYMU3047760, THYMU3047891, TKIDN1000001, TKIDN1000062, TKIDN1000066, TKIDN1000164, TKIDN1000171, TKIDN2000240, TKIDN2000319, TKIDN2000464, TKIDN2000521, TKIDN2000701, TKIDN2001662, TKIDN2002318, TKIDN2002329, TKIDN2002424, TKIDN2002632, TKIDN2003044, TKIDN2003059, TKIDN2003062, TKIDN2003366, TKIDN2003396, TKIDN2003413, TKIDN2003597, TKIDN2003601, TKIDN2004185, TKIDN2004386, TKIDN2004458, TKIDN2004748, TKIDN2005721, TKIDN2005934, TKIDN2005947, TKIDN2005956, TKIDN2006525, TKIDN2006761, TKIDN2006852, TKIDN2007605, TKIDN2007667, TKIDN2007828, TKIDN2008176, TKIDN2008778, TKIDN2009092, TKIDN2009330, TKIDN2009481, TKIDN2009794, TKIDN2009889, TKIDN2010200, TKIDN2010232, TKIDN2010278, TKIDN2010602, TKIDN2011051, TKIDN2011160, TKIDN2011324, TKIDN2012034, TKIDN2012771, TKIDN2012824, TKIDN2013134, TKIDN2014570, TKIDN2014757, TKIDN2014771, TKIDN2015025, TKIDN2015071, TKIDN2015161, TKIDN2015263, TKIDN2015788, TKIDN2016309, TKIDN2016399, TKIDN2016846, TKIDN2018926, TKIDN2019116, TLIVE2000023, TLIVE2000142, TLIVE2000292, TLIVE2000762, TLIVE2000979, TLIVE2001327, TLIVE2001616, TLIVE2001684, TLIVE2001828, TLIVE2001927, TLIVE2002336, TLIVE2002338, TLIVE2002562, TLIVE2002882, TLIVE2003197, TLIVE2003200, TLIVE2003225, TLIVE2003381, TLIVE2003737, TLIVE2003961, TLIVE2003970, TLIVE2004110, TLIVE2004320, TLIVE2004331, TLIVE2004601, TLIVE2005180, TLIVE2005390, TLIVE2005516, TLIVE2005731, TLIVE2005866, TLIVE2006236, TLIVE2006359, TLIVE2006529, TLIVE2006621, TLIVE2006733, TLIVE2007000, TLIVE2007016, TLIVE2007132, TLIVE2007192, TLIVE2007528, TLIVE2007607, TLIVE2007736, TLIVE2007816, TLIVE2007919, TLIVE2008083, TLIVE2008213, TLIVE2008221, TLIVE2008229, TLIVE2008712, TLIVE2008797, TLIVE2009087, TLIVE2009163, TLIVE2009489, TLIVE2009541, TLUNG2000179, TOVAR2000476, TOVAR2000575, TOVAR2000649, TOVAR2000904, TOVAR2001281, TOVAR2001556, TOVAR2001730, TOVAR2002247, TOVAR2002514, TOVAR2002549, TOVAR2002800, TRACH1000011, TRACH1000018, TRACH1000038, TRACH1000057, TRACH1000063, TRACH1000074, TRACH1000100, TRACH1000125, TRACH1000140, TRACH1000144, TRACH1000193, TRACH1000212, TRACH1000240, TRACH2000002, TRACH2000015, TRACH2000024, TRACH2000032, TRACH2000045, TRACH2000047, TRACH2000081, TRACH2000083, TRACH2000148, TRACH2000185, TRACH2000196, TRACH2000235, TRACH2000243, TRACH2000250, TRACH2000259, TRACH2000272, TRACH2000282, TRACH2000287, TRACH2000289, TRACH2000306, TRACH2000312, TRACH2000336, TRACH2000359, TRACH2000393, TRACH2000411, TRACH2000496, TRACH2000497, TRACH2000502, TRACH2000522, TRACH2000540, TRACH2000559, TRACH2000660, TRACH2000665, TRACH2000675, TRACH2000677, TRACH2000703, TRACH2000767, TRACH2000775, TRACH2000807, TRACH2000862, TRACH2000873, TRACH2000894, TRACH2000898, TRACH2000923, TRACH2000944, TRACH2000972, TRACH2000981, TRACH2000986, TRACH2001037, TRACH2001060, TRACH2001085, TRACH2001101, TRACH2001121, TRACH2001147, TRACH2001154, TRACH2001188, TRACH2001192, TRACH2001249, TRACH2001275, TRACH2001335, TRACH2001339, TRACH2001341, TRACH2001347, TRACH2001395, TRACH2001400, TRACH2001403, TRACH2001416, TRACH2001428, TRACH2001432, TRACH2001443, TRACH2001474, TRACH2001523, TRACH2001525, TRACH2001532, TRACH2001549, TRACH2001592, TRACH2001596, TRACH2001621, TRACH2001646, TRACH2001651, TRACH2001684, TRACH2001933, TRACH2001968, TRACH2001996, TRACH2002043, TRACH2002054, TRACH2002092, TRACH2002100, TRACH2002138, TRACH2002333, TRACH2002664, TRACH2002784, TRACH2002840, TRACH2002847, TRACH2002853, TRACH2002862, TRACH2002954, TRACH2002960, TRACH2002988, TRACH2003070, TRACH2003484, TRACH2003516, TRACH2003605, TRACH2003736, TRACH2003759, TRACH2003941, TRACH2004039, TRACH2004054, TRACH2004087, TRACH2004109, TRACH2004170, TRACH2004183, TRACH2004251, TRACH2004292, TRACH2004336, TRACH2004399, TRACH2004428, TRACH2004458, TRACH2004499, TRACH2004521, TRACH2004570, TRACH2004845, TRACH2004887, TRACH2004950, TRACH2005004, TRACH2005017, TRACH2005066, TRACH2005159, TRACH2005314, TRACH2005444, TRACH2005541, TRACH2005666, TRACH2005698, TRACH2005710, TRACH2005720, TRACH2005769, TRACH2005796, TRACH2006015, TRACH2006049, TRACH2006097, TRACH2006194, TRACH2006327, TRACH2006331, TRACH2006378, TRACH2006387, TRACH2006528, TRACH2006670, TRACH2006762, TRACH2006866, TRACH2006870, TRACH2006918, TRACH2007059, TRACH2007324, TRACH2007483, TRACH2007542, TRACH2007577, TRACH2007674, TRACH2007676, TRACH2007688, TRACH2007733, TRACH2007754, TRACH2007816, TRACH2007894, TRACH2007969, TRACH2007988, TRACH2008112, TRACH2008113, TRACH2008127, TRACH2008278, TRACH2008478, TRACH2008540, TRACH2008583, TRACH2008597, TRACH2008716, TRACH2008820, TRACH2008891, TRACH2008921, TRACH2009006, TRACH2009060, TRACH2009107, TRACH2009123, TRACH2009268, TRACH2009291, TRACH2009310, TRACH2009340, TRACH2009348, TRACH2009358, TRACH2009661, TRACH2009730, TRACH2009743, TRACH2009754, TRACH2009851, TRACH2009862, TRACH2009934, TRACH2010159, TRACH2010218, TRACH2010251, TRACH2010272, TRACH2010317, TRACH2010419, TRACH2010451, TRACH2010505, TRACH2010587, TRACH2010600, TRACH2010634, TRACH2010639, TRACH2010677, TRACH2010698, TRACH2010824, TRACH2010883, TRACH2010965, TRACH2010974, TRACH2011057, TRACH2011093, TRACH2011113, TRACH2011293, TRACH2011302, TRACH2011500, TRACH2011574, TRACH2011956, TRACH2012000, TRACH2012138, TRACH2012242, TRACH2012370, TRACH2012376, TRACH2012387, TRACH2012497, TRACH2012536, TRACH2012562, TRACH2012742, TRACH2012811, TRACH2012823, TRACH2012918, TRACH2013081, TRACH2013265, TRACH2013369, TRACH2013450, TRACH2013495, TRACH2013585, TRACH2013671, TRACH2013726, TRACH2013902, TRACH2013928, TRACH2013982, TRACH2013991, TRACH2014018, TRACH2014045, TRACH2014046, TRACH2014077, TRACH2014082, TRACH2014268, TRACH2014284, TRACH2014337, TRACH2014356, TRACH2014371, TRACH2014442, TRACH2014483, TRACH2014495, TRACH2014544, TRACH2014573, TRACH2014725, TRACH2014760, TRACH2014815, TRACH2014839, TRACH2014938, TRACH2014950, TRACH2014972, TRACH2014974, TRACH2014997, TRACH2015180, TRACH2015243, TRACH2015316, TRACH2015381, TRACH2015486, TRACH2015654, TRACH2015824, TRACH2015939, TRACH2015987, TRACH2016080, TRACH2016131, TRACH2016286, TRACH2016317, TRACH2016347, TRACH2016380, TRACH2016384, TRACH2016410, TRACH2016481, TRACH2016498, TRACH2016533, TRACH2016551, TRACH2016554, TRACH2016651, TRACH2016690, TRACH2016709, TRACH2016722, TRACH2016835, TRACH2016980, TRACH2017086, TRACH2017368, TRACH2017498, TRACH2017609, TRACH2017949, TRACH2017965, TRACH2017980, TRACH2018034, TRACH2018084, TRACH2018262, TRACH2018273, TRACH2018278, TRACH2018317, TRACH2018345, TRACH2018380, TRACH2018449, TRACH2018512, TRACH2018646, TRACH2018663, TRACH2018718, TRACH2018835, TRACH2018882, TRACH2018914, TRACH2018950, TRACH2019024, TRACH2019046, TRACH2019080, TRACH2019151, TRACH2019154, TRACH2019176, TRACH2019248, TRACH2019309, TRACH2019425, TRACH2019473, TRACH2019602, TRACH2019661, TRACH2019672, TRACH2019673, TRACH2019844, TRACH2019879, TRACH2020048, TRACH2020336, TRACH2020525, TRACH2021398, TRACH2021622, TRACH2021635, TRACH2021964, TRACH2022042, TRACH2022113, TRACH2022253, TRACH2022425, TRACH2022553, TRACH2022649, TRACH2022839, TRACH2023246, TRACH2023299, TRACH2023306, TRACH2023416, TRACH2023479, TRACH2023684, TRACH2023860, TRACH2023876, TRACH2024139, TRACH2024187, TRACH2024271, TRACH2024293, TRACH2024408, TRACH2024512, TRACH2024559, TRACH2024647, TRACH2024651, TRACH2024730, TRACH2024735, TRACH2024749, TRACH2024821, TRACH2025057, TRACH2025084, TRACH2025155, TRACH2025224, TRACH2025344, TRACH2025379, TRACH2025507, TRACH2025569, TRACH2025705, TRACH2025749, TRACH2025753, TRACH2025810, TRACH2025853, TRACH2025911, TRACH2025932, TRACH3000014, TRACH3000017, TRACH3000043, TRACH3000180, TRACH3000342, TRACH3000420, TRACH3000515, TRACH3000530, TRACH3000548, TRACH3000558, TRACH3000586, TRACH3000780, TRACH3000892, TRACH3000926, TRACH3001119, TRACH3001443, TRACH3001550, TRACH3001759, TRACH3002064, TRACH3002107, TRACH3002168, TRACH3002188, TRACH3002245, TRACH3002293, TRACH3002533, TRACH3002561, TRACH3002567, TRACH3002605, TRACH3002650, TRACH3002752, TRACH3002866, TRACH3002871, TRACH3002876, TRACH3002890, TRACH3003009, TRACH3003037, TRACH3003357, TRACH3003379, TRACH3003586, TRACH3003683, TRACH3003780, TRACH3003805, TRACH3003832, TRACH3004068, TRACH3004113, TRACH3004288, TRACH3004303, TRACH3004412, TRACH3004456, TRACH3004537, TRACH3004596, TRACH3004651, TRACH3004652, TRACH3004671, TRACH3004747, TRACH3004760, TRACH3004783, TRACH3004786, TRACH3004840, TRACH3004931, TRACH3004934, TRACH3005072, TRACH3005085, TRACH3005102, TRACH3005173, TRACH3005191, TRACH3005274, TRACH3005479, TRACH3005549, TRACH3005699, TRACH3005702, TRACH3005808, TRACH3005852, TRACH3005896, TRACH3006038, TRACH3006149, TRACH3006228, TRACH3006264, TRACH3006336, TRACH3006379, TRACH3006392, TRACH3006395, TRACH3006397, TRACH3006412, TRACH3006470, TRACH3006589, TRACH3006626, TRACH3006699, TRACH3006800, TRACH3006889, TRACH3006985, TRACH3007097, TRACH3007268, TRACH3007274, TRACH3007277, TRACH3007391, TRACH3007479, TRACH3007541, TRACH3007595, TRACH3007627, TRACH3007689, TRACH3007766, TRACH3007866, TRACH3007995, TRACH3008042, TRACH3008061, TRACH3008201, TRACH3008508, TRACH3008629, TRACH3008632, TRACH3008688, TRACH3008697, TRACH3008887, TRACH3008902, TRACH3008990, TRACH3009001, TRACH3009059, TRACH3009061, TRACH3009148, TRACH3009455, TRACH3009701, TRACH3009715, TRACH3009894, TRACH3009956, TRACH3010079, TRACH3010167, TRACH3010331, TRACH3010342, TRACH3010382, TRACH3010757, TRACH3010901, TRACH3011004, TRACH3011082, TRACH3011184, TRACH3011282, TRACH3011313, TRACH3011454, TRACH3011485, TRACH3011503, TRACH3011538, TRACH3011542, TRACH3012106, TRACH3012161, TRACH3012232, TRACH3012261, TRACH3012445, TRACH3012460, TRACH3012659, TRACH3012718, TRACH3012864, TRACH3012891, TRACH3012942, TRACH3013043, TRACH3013072, TRACH3013426, TRACH3013454, TRACH3013558, TRACH3013684, TRACH3013693, TRACH3013700, TRACH3013766, TRACH3013900, TRACH3013926, TRACH3014063, TRACH3014183, TRACH3014215, TRACH3014415, TRACH3014580, TRACH3014641, TRACH3014885, TRACH3015136, TRACH3015336, TRACH3015346, TRACH3015354, TRACH3015467, TRACH3015626, TRACH3015951, TRACH3016051, TRACH3016120, TRACH3016264, TRACH3016277, TRACH3016368, TRACH3016455, TRACH3016614, TRACH3016992, TRACH3017171, TRACH3017409, TRACH3017934, TRACH3018108, TRACH3018191, TRACH3018240, TRACH3018261, TRACH3018519, TRACH3018524, TRACH3018606, TRACH3018783, TRACH3018907, TRACH3018933, TRACH3018943, TRACH3019018, TRACH3019058, TRACH3019142, TRACH3019290, TRACH3019347, TRACH3019370, TRACH3019447, TRACH3019598, TRACH3019621, TRACH3019662, TRACH3019807, TRACH3019924, TRACH3019977, TRACH3020137, TRACH3020410, TRACH3020563, TRACH3020605, TRACH3020750, TRACH3020769, TRACH3020928, TRACH3020930, TRACH3021023, TRACH3021066, TRACH3021212, TRACH3021335, TRACH3021373, TRACH3021778, TRACH3021834, TRACH3021883, TRACH3022170, TRACH3022198, TRACH3022296, TRACH3022482, TRACH3022732, TRACH3022758, TRACH3022875, TRACH3022910, TRACH3022960, TRACH3023063, TRACH3023203, TRACH3023242, TRACH3023373, TRACH3023516, TRACH3023752, TRACH3023945, TRACH3023960, TRACH3024020, TRACH3024081, TRACH3024342, TRACH3024423, TRACH3024428, TRACH3024512, TRACH3024671, TRACH3024823, TRACH3025302, TRACH3025316, TRACH3025346, TRACH3025520, TRACH3026148, TRACH3026283, TRACH3026299, TRACH3026542, TRACH3026650, TRACH3026676, TRACH3026744, TRACH3026949, TRACH3027229, TRACH3027527, TRACH3027681, TRACH3027701, TRACH3027885, TRACH3028031, TRACH3028164, TRACH3028180, TRACH3028195, TRACH3028441, TRACH3028597, TRACH3028678, TRACH3028837, TRACH3028847, TRACH3029139, TRACH3029329, TRACH3029451, TRACH3029462, TRACH3029520, TRACH3029592, TRACH3029629, TRACH3029665, TRACH3029670, TRACH3029800, TRACH3030111, TRACH3030130, TRACH3030176, TRACH3030252, TRACH3030725, TRACH3030855, TRACH3030883, TRACH3031316, TRACH3031400, TRACH3031463, TRACH3031479, TRACH3031518, TRACH3031660, TRACH3031678, TRACH3031936, TRACH3032044, TRACH3032065, TRACH3032150, TRACH3032372, TRACH3032480, TRACH3032570, TRACH3032755, TRACH3032827, TRACH3032873, TRACH3033535, TRACH3033680, TRACH3033868, TRACH3034145, TRACH3034414, TRACH3034488, TRACH3034680, TRACH3034731, TRACH3034745, TRACH3034762, TRACH3034903, TRACH3035187, TRACH3035199, TRACH3035235, TRACH3035451, TRACH3035482, TRACH3035526, TRACH3036004, TRACH3036103, TRACH3036193, TRACH3036207, TRACH3036278, TRACH3036309, TRACH3036456, TRACH3036609, TRACH3036638, TRACH3036683, TRACH3036750, TRACH3036792, TRACH3036843, TRACH3036897, TRACH3036932, TRACH3036942, TRACH3036997, TRACH3037063, TRACH3037267, TRACH3037288, TRACH3037505, TRACH3037573, TRACH3037696, TRACH3037897, TRACH3038086, TRACH3038399, TSTOM1000135, TSTOM1000186, TSTOM2000139, TSTOM2000235, TSTOM2000315, TSTOM2000442, TSTOM2000553, TSTOM2000569, TSTOM2000588, TSTOM2001195, TSTOM2001274, TSTOM2001571, TSTOM2001996, TSTOM2002265, TSTOM2002505, TSTOM2002561, TSTOM2002611, TSTOM2002672, TSTOM2002682, TUTER1000014, TUTER1000137, TUTER2000283, TUTER2000425, TUTER2000904, TUTER2000916, TUTER2001286, TUTER2001341, TUTER2001387, TUTER2001433, TUTER2001461, TUTER2002028, TUTER2002074, TUTER2002158, TUTER2002228, TUTER2002323, TUTER2002356, TUTER2002729, UMVEN1000122, UMVEN1000143, UMVEN1000156, UMVEN1000186, UMVEN2000046, UMVEN2000069, UMVEN2000121, UMVEN2000133, UTERU1000008, UTERU1000015, UTERU1000024, UTERU1000031, UTERU1000032, UTERU1000057, UTERU1000065, UTERU1000077, UTERU1000093, UTERU1000096, UTERU1000109, UTERU1000131, UTERU1000138, UTERU1000148, UTERU1000160, UTERU1000183, UTERU1000187, UTERU1000192, UTERU1000249, UTERU1000337, UTERU1000339, UTERU2000023, UTERU2000047, UTERU2000074, UTERU2000099, UTERU2000154, UTERU2000197, UTERU2000218, UTERU2000238, UTERU2000243, UTERU2000260, UTERU2000329, UTERU2000332, UTERU2000338, UTERU2000349, UTERU2000377, UTERU2000393, UTERU2000418, UTERU2000465, UTERU2000485, UTERU2000517, UTERU2000524, UTERU2000537, UTERU2000539, UTERU2000541, UTERU2000542, UTERU2000546, UTERU2000550, UTERU2000569, UTERU2000607, UTERU2000629, UTERU2000649, UTERU2000663, UTERU2000794, UTERU2000830, UTERU2000844, UTERU2000922, UTERU2000925, UTERU2001024, UTERU2001110, UTERU2001176, UTERU2001281, UTERU2001389, UTERU2001409, UTERU2001412, UTERU2001504, UTERU2001658, UTERU2001747, UTERU2001876, UTERU2002001, UTERU2002011, UTERU2002176, UTERU2002198, UTERU2002332, UTERU2002473, UTERU2002547, UTERU2002693, UTERU2002733, UTERU2002736, UTERU2002737, UTERU2002826, UTERU2002841, UTERU2002964, UTERU2002993, UTERU2003035, UTERU2003057, UTERU2003126, UTERU2003135, UTERU2003321, UTERU2003399, UTERU2003456, UTERU2003577, UTERU2003704, UTERU2003926, UTERU2003973, UTERU2004015, UTERU2004037, UTERU2004039, UTERU2004061, UTERU2004073, UTERU2004163, UTERU2004299, UTERU2004461, UTERU2004520, UTERU2004564, UTERU2004664, UTERU2004688, UTERU2004698, UTERU2004861, UTERU2004929, UTERU2005004, UTERU2005050, UTERU2005069, UTERU2005074, UTERU2005179, UTERU2005292, UTERU2005346, UTERU2005446, UTERU2005449, UTERU2005450, UTERU2005533, UTERU2005593, UTERU2005601, UTERU2005621, UTERU2005664, UTERU2005822, UTERU2005903, UTERU2005905, UTERU2006103, UTERU2006115, UTERU2006137, UTERU2006182, UTERU2006400, UTERU2006412, UTERU2006429, UTERU2006486, UTERU2006524, UTERU2006547, UTERU2006568, UTERU2006643, UTERU2006651, UTERU2006705, UTERU2006899, UTERU2007004, UTERU2007075, UTERU2007081, UTERU2007128, UTERU2007253, UTERU2007267, UTERU2007444, UTERU2007499, UTERU2007639, UTERU2007724, UTERU2007942, UTERU2008018, UTERU2008019, UTERU2008027, UTERU2008040, UTERU2008077, UTERU2008130, UTERU2008347, UTERU2008426, UTERU2008516, UTERU2008561, UTERU2008705, UTERU2008707, UTERU2008747, UTERU2008785, UTERU2008845, UTERU2008901, UTERU2008930, UTERU2008938, UTERU2008939, UTERU2008962, UTERU2009094, UTERU2009120, UTERU2009131, UTERU2009147, UTERU2009206, UTERU2009283, UTERU2009414, UTERU2009483, UTERU2009510, UTERU2009538, UTERU2009540, UTERU2009776, UTERU2009904, UTERU2009951, UTERU2010115, UTERU2010124, UTERU2010164, UTERU2010231, UTERU2010304, UTERU2010320, UTERU2010431, UTERU2010525, UTERU2010651, UTERU2010724, UTERU2010747, UTERU2011195, UTERU2011199, UTERU2011220, UTERU2011261, UTERU2011287, UTERU2011410, UTERU2011574, UTERU2011657, UTERU2011741, UTERU2011806, UTERU2011811, UTERU2011897, UTERU2011906, UTERU2011962, UTERU2011968, UTERU2012031, UTERU2012101, UTERU2012114, UTERU2012252, UTERU2012333, UTERU2012407, UTERU2012581, UTERU2012610, UTERU2012615, UTERU2012688, UTERU2012703, UTERU2012715, UTERU2012741, UTERU2012786, UTERU2012856, UTERU2012890, UTERU2012976, UTERU2013048, UTERU2013078, UTERU2013231, UTERU2013280, UTERU2013322, UTERU2013483, UTERU2013502, UTERU2013926, UTERU2013976, UTERU2014001, UTERU2014024, UTERU2014223, UTERU2014398, UTERU2014464, UTERU2014548, UTERU2014601, UTERU2014631, UTERU2014668, UTERU2014728, UTERU2014998, UTERU2015062, UTERU2015087, UTERU2015108, UTERU2015190, UTERU2015198, UTERU2015202, UTERU2015405, UTERU2015640, UTERU2015830, UTERU2015880, UTERU2016147, UTERU2016157, UTERU2016464, UTERU2016757, UTERU2016761, UTERU2016822, UTERU2016896, UTERU2016902, UTERU2016979, UTERU2016981, UTERU2017123, UTERU2017303, UTERU2017421, UTERU2017492, UTERU2017613, UTERU2017623, UTERU2017632, UTERU2017761, UTERU2017762, UTERU2017810, UTERU2017988, UTERU2018127, UTERU2018180, UTERU2018200, UTERU2018333, UTERU2018364, UTERU2018514, UTERU2018522, UTERU2018523, UTERU2018544, UTERU2018566, UTERU2018609, UTERU2018674, UTERU2018712, UTERU2018784, UTERU2018789, UTERU2018811, UTERU2018867, UTERU2018881, UTERU2018955, UTERU2019038, UTERU2019163, UTERU2019257, UTERU2019453, UTERU2019491, UTERU2019534, UTERU2019681, UTERU2019706, UTERU2019710, UTERU2019940, UTERU2019959, UTERU2019964, UTERU2020226, UTERU2020242, UTERU2020292, UTERU2020351, UTERU2020491, UTERU2020718, UTERU2021163, UTERU2021380, UTERU2021649, UTERU2021820, UTERU2022020, UTERU2022773, UTERU2022955, UTERU2022981, UTERU2023039, UTERU2023045, UTERU2023262, UTERU2023550, UTERU2023651, UTERU2023687, UTERU2023712, UTERU2023941, UTERU2024002, UTERU2024042, UTERU2024141, UTERU2024481, UTERU2024656, UTERU2024758, UTERU2024820, UTERU2024881, UTERU2025025, UTERU2025041, UTERU2025301, UTERU2025366, UTERU2025415, UTERU2025579, UTERU2025645, UTERU2025891, UTERU2026025, UTERU2026090, UTERU2026142, UTERU2026203, UTERU2026775, UTERU2027023, UTERU2027369, UTERU2027591, UTERU2027616, UTERU2027941, UTERU2028377, UTERU2029503, UTERU2029660, UTERU2029742, UTERU2029953, UTERU2030213, UTERU2030270, UTERU2030280, UTERU2031060, UTERU2031084, UTERU2031268, UTERU2031295, UTERU2031521, UTERU2031611, UTERU2031703, UTERU2031834, UTERU2031851, UTERU2032075, UTERU2032220, UTERU2032279, UTERU2032726, UTERU2033172, UTERU2033375, UTERU2033382, UTERU2033420, UTERU2033530, UTERU2033577, UTERU2034053, UTERU2034147, UTERU2034695, UTERU2035114, UTERU2035187, UTERU2035231, UTERU2035306, UTERU2035323, UTERU2035328, UTERU2035331, UTERU2035452, UTERU2035469, UTERU2035503, UTERU2035745, UTERU2035908, UTERU2035926, UTERU2035978, UTERU2036089, UTERU2036347, UTERU2036507, UTERU2036512, UTERU2036530, UTERU2036623, UTERU2036690, UTERU2037224, UTERU2037361, UTERU2037423, UTERU2037577, UTERU2037674, UTERU2037791, UTERU2037843, UTERU2038171, UTERU2038251, UTERU3000226, UTERU3000298, UTERU3000402, UTERU3000645, UTERU3000665, UTERU3000670, UTERU3000738, UTERU3000828, UTERU3000844, UTERU3000959, UTERU3001029, UTERU3001053, UTERU3001059, UTERU3001158, UTERU3001240, UTERU3001394, UTERU3001542, UTERU3001558, UTERU3001571, UTERU3001585, UTERU3001632, UTERU3001652, UTERU3001766, UTERU3001988, UTERU3002209, UTERU3002218, UTERU3002383, UTERU3002600, UTERU3002620, UTERU3002667, UTERU3002701, UTERU3002731, UTERU3002768, UTERU3002786, UTERU3002993, UTERU3003116, UTERU3003135, UTERU3003178, UTERU3003465, UTERU3003495, UTERU3003523, UTERU3003774, UTERU3003776, UTERU3004384, UTERU3004477, UTERU3004523, UTERU3004616, UTERU3004635, UTERU3004709, UTERU3004938, UTERU3004992, UTERU3005049, UTERU3005159, UTERU3005205, UTERU3005230, UTERU3005264, UTERU3005422, UTERU3005460, UTERU3005536, UTERU3005585, UTERU3005767, UTERU3005907, UTERU3005970, UTERU3006008, UTERU3006228, UTERU3006308, UTERU3006538, UTERU3006640, UTERU3006687, UTERU3006720, UTERU3006798, UTERU3006884, UTERU3007021, UTERU3007104, UTERU3007108, UTERU3007134, UTERU3007419, UTERU3007640, UTERU3007731, UTERU3007913, UTERU3008280, UTERU3008463, UTERU3008660, UTERU3008671, UTERU3008722, UTERU3008917, UTERU3009259, UTERU3009490, UTERU3009517, UTERU3009690, UTERU3009775, UTERU3009871, UTERU3009979, UTERU3009987, UTERU3010029, UTERU3010526, UTERU3010604, UTERU3010892, UTERU3010919, UTERU3011063, UTERU3011092, UTERU3011273, UTERU3011398, UTERU3011558, UTERU3011579, UTERU3011795, UTERU3011837, UTERU3012293, UTERU3012414, UTERU3012476, UTERU3012599, UTERU3012999, UTERU3013167, UTERU3013302, UTERU3013781, UTERU3014274, UTERU3014446, UTERU3014611, UTERU3014647, UTERU3014791, UTERU3014906, UTERU3015011, UTERU3015086, UTERU3015299, UTERU3015412, UTERU3015500, UTERU3015647, UTERU3015844, UTERU3016070, UTERU3016273, UTERU3016274, UTERU3016308, UTERU3016789, UTERU3017176, UTERU3017441, UTERU3017626, UTERU3017995, UTERU3018154, UTERU3018172, UTERU3018255, UTERU3018616, UTERU3018711, UTERU3019078

[0699] Of the 17,176 genes that include the cDNAs of the present invention, genes whose expression levels were high enough to detect in each of the PANCR, PEBLM, PERIC, PLACE, PROST, PUAEN, and RECTM libraries were analyzed for expression frequency. The analysis results are described below. Each is a relative value, where the expression level over all tissues is taken as 100. The larger this value, the greater the level of expression.

TABLE 36

| Clone Name | PANCR | PEBLM | PERIC | PLACE | PROST | PUAEN | RECTM |
|---|---|---|---|---|---|---|---|
| 3NB691000085 | 0 | 0 | 0 | 0 | 30.703 | 0 | 0 |
| 3NB691000116 | 0 | 0 | 0 | 5.789 | 0 | 0 | 0 |
| 3NB691000129 | 0 | 0 | 0 | 0 | 0 | 0 | 54.934 |
| 3NB691000173 | 0 | 0 | 0 | 0 | 2.800 | 0 | 0 |
| 3NB692000281 | 0 | 1.655 | 1.483 | 0.392 | 0 | 0 | 0 |
| 3NB692000330 | 0 | 3.315 | 0 | 0 | 1.564 | 4.978 | 9.597 |
| 3NB692000374 | 0 | 0 | 0 | 1.930 | 0 | 0 | 0 |
| 3NB692000545 | 0 | 0 | 19.004 | 5.021 | 0 | 0 | 0 |
| 3NB692000912 | 0 | 7.063 | 3.165 | 0 | 0 | 2.651 | 0 |
| 3NB692001002 | 0 | 0 | 0 | 0 | 6.938 | 0 | 0 |
| 3NB692001022 | 0 | 9.352 | 0 | 0 | 0 | 0 | 0 |
| 3NB692001334 | 0 | 0 | 0 | 0 | 1.904 | 0 | 5.840 |
| 3NB692001528 | 0 | 0 | 0 | 0 | 8.342 | 0 | 0 |
| 3NB692001538 | 0 | 0 | 0 | 0 | 7.045 | 0 | 43.225 |
| 3NB692001557 | 0 | 45.597 | 0 | 0 | 0 | 0 | 0 |
| 3NB692001853 | 0 | 19.682 | 0 | 0 | 0 | 0 | 0 |
| ADIPS2000425 | 0 | 0 | 0 | 1.382 | 0 | 0 | 0 |
| ADRGL1000144 | 0 | 0 | 0 | 0 | 0 | 18.858 | 0 |
| ADRGL2000006 | 0 | 7.814 | 0 | 1.850 | 0 | 0 | 0 |
| ASTRO1000165 | 0 | 0 | 14.930 | 0 | 0 | 0 | 0 |
| ASTRO2000014 | 0 | 3.087 | 0 | 0 | 0 | 0 | 0 |
| ASTRO2000046 | 0 | 3.067 | 0 | 0 | 0 | 0 | 0 |
| ASTRO2000141 | 0 | 0 | 0 | 0 | 0 | 8.569 | 0 |
| ASTRO2000480 | 0 | 0 | 19.071 | 0 | 10.040 | 0 | 0 |
| ASTRO2000914 | 0 | 0 | 13.112 | 0 | 0 | 0 | 0 |
| ASTRO2001029 | 0 | 0 | 0 | 0 | 0 | 7.076 | 0 |
| ASTRO2001806 | 0 | 0 | 0 | 0 | 0 | 16.145 | 0 |
| ASTRO2001823 | 0 | 0 | 0 | 0 | 5.148 | 0 | 0 |
| ASTRO2004032 | 0 | 0 | 0 | 0 | 21.613 | 0 | 0 |
| ASTRO2004628 | 0 | 0 | 0 | 15.841 | 0 | 0 | 0 |
| ASTRO2005242 | 0 | 0 | 0 | 16.430 | 0 | 0 | 0 |
| ASTRO2005687 | 0 | 0 | 0 | 0 | 3.953 | 12.579 | 0 |
| ASTRO2005863 | 0 | 0 | 0 | 47.359 | 0 | 0 | 0 |
| ASTRO2006475 | 0 | 0 | 50.171 | 0 | 0 | 0 | 0 |
| ASTRO2006920 | 0 | 0 | 0 | 0 | 0 | 33.852 | 0 |
| ASTRO2007948 | 0 | 0 | 0 | 4.457 | 0 | 14.132 | 0 |
| ASTRO2008216 | 0 | 23.985 | 21.495 | 0 | 0 | 0 | 0 |
| ASTRO2010819 | 0 | 0 | 0 | 1.197 | 0 | 0 | 0 |
| ASTRO2012552 | 0 | 0 | 9.957 | 0 | 0 | 0 | 0 |
| ASTRO2013585 | 0 | 0 | 0 | 0.868 | 5.186 | 0 | 10.607 |
| ASTRO2015987 | 0 | 0 | 0 | 32.718 | 0 | 0 | 0 |
| ASTRO2016114 | 0 | 0 | 0 | 25.800 | 0 | 0 | 0 |
| ASTRO2016491 | 0 | 0 | 0 | 0.896 | 1.786 | 0 | 0 |
| ASTRO2018540 | 0 | 0 | 0 | 2.768 | 0 | 0 | 33.835 |
| BGGI12000054 | 0 | 0 | 3.173 | 0.419 | 0 | 33.224 | 0 |
| BGGI12000533 | 0 | 0 | 0 | 0 | 8.006 | 0 | 0 |
| BGGI12000616 | 0 | 0 | 6.023 | 0 | 0 | 0 | 0 |
| BGGI12000839 | 0 | 5.543 | 0 | 0 | 0 | 8.322 | 0 |
| BGGI12001097 | 0 | 0 | 0 | 0 | 0 | 12.682 | 0 |
| BGGI12001682 | 0 | 0 | 0 | 0 | 3.662 | 0 | 0 |
| BLADE2004722 | 0 | 0 | 0 | 17.812 | 0 | 0 | 0 |
| BLADE2007589 | 0 | 0 | 0 | 0 | 17.531 | 0 | 0 |
| BNGH41000098 | 0 | 0 | 0 | 0 | 0 | 28.605 | 0 |
| BNGH41000104 | 0 | 0 | 0 | 0 | 0 | 42.253 | 0 |
| BNGH41000153 | 0 | 0 | 0 | 0 | 16.664 | 0 | 0 |
| BNGH41000190 | 0 | 0 | 17.045 | 4.503 | 8.974 | 0 | 0 |
| BNGH42000360 | 0 | 0 | 0 | 0.560 | 0 | 0 | 0 |
| BNGH42000739 | 0 | 0 | 0 | 2.215 | 0 | 0 | 0 |
| BNGH42002487 | 0 | 0 | 0 | 16.657 | 0 | 0 | 0 |
| BNGH42005968 | 0 | 17.264 | 15.472 | 0 | 0 | 0 | 0 |
| BNGH42006135 | 0 | 0 | 0 | 3.525 | 0 | 3.725 | 0 |
| BNGH42007460 | 0 | 0 | 0 | 3.587 | 0 | 0 | 0 |
| BNGH42007709 | 0 | 5.191 | 3.101 | 1.639 | 0.816 | 0 | 0 |
| BNGH42007788 | 0 | 0 | 0 | 0 | 10.917 | 0 | 0 |
| BNGH42008603 | 0 | 0 | 0 | 0 | 0 | 16.323 | 0 |
| BNGH42008850 | 0 | 0 | 0 | 18.750 | 0 | 0 | 0 |
| BNGH42009025 | 0 | 0 | 0 | 0 | 4.944 | 0 | 0 |
| BRACE1000042 | 0 | 0 | 20.508 | 0 | 0 | 0 | 0 |
| BRACE1000070 | 0 | 0 | 0 | 0 | 6.340 | 0 | 0 |
| BRACE1000115 | 0 | 0 | 0 | 0.333 | 0 | 0 | 0 |
| BRACE1000131 | 0 | 0 | 0 | 0 | 3.694 | 0 | 0 |
| BRACE1000132 | 0 | 0 | 0 | 25.564 | 0 | 0 | 0 |
| BRACE1000159 | 0 | 0 | 12.437 | 0 | 0 | 0 | 0 |
| BRACE1000186 | 0 | 0 | 0 | 0 | 7.668 | 0 | 0 |
| BRACE1000239 | 0 | 0 | 0 | 35.265 | 0 | 0 | 0 |
| BRACE2000893 | 0 | 0 | 30.442 | 0 | 0 | 0 | 0 |
| BRACE2001143 | 0 | 0 | 0 | 0 | 5.268 | 0 | 0 |
| BRACE2001477 | 0 | 0 | 0 | 6.121 | 0 | 0 | 0 |
| BRACE2001497 | 0 | 0 | 0 | 3.316 | 0 | 0 | 0 |
| BRACE2001508 | 0 | 66.247 | 0 | 0 | 0 | 0 | 0 |
| BRACE2001673 | 0 | 0 | 0 | 0 | 0.831 | 0 | 0 |
| BRACE2001892 | 0 | 0 | 0 | 0 | 1.074 | 0 | 0 |
| BRACE2002091 | 0 | 0 | 0 | 0 | 0 | 0 | 45.947 |
| BRACE2002441 | 0 | 8.465 | 0 | 0 | 3.994 | 0 | 0 |
| BRACE2002606 | 0 | 0 | 0 | 0 | 0 | 90.728 | 0 |
| BRACE2002661 | 0 | 0 | 19.399 | 0 | 0 | 0 | 0 |
| BRACE2002677 | 0 | 0 | 13.004 | 3.436 | 0 | 0 | 0 |
| BRACE2002860 | 0 | 0 | 0 | 4.481 | 0 | 0 | 0 |
| BRACE2002861 | 0 | 0 | 0 | 4.618 | 0 | 0 | 0 |
| BRACE2003172 | 0 | 0 | 0 | 7.519 | 0 | 0 | 0 |
| BRACE2003217 | 0 | 0 | 29.036 | 0 | 0 | 0 | 0 |
| BRACE2003254 | 0 | 0 | 0 | 1.611 | 0 | 0 | 0 |
| BRACE2003628 | 0 | 0 | 0 | 0 | 24.194 | 0 | 0 |
| BRACE2003827 | 0 | 6.586 | 0 | 0 | 0 | 0 | 0 |
| BRACE2003944 | 0 | 0 | 34.870 | 0 | 1.836 | 5.842 | 0 |
| BRACE2005087 | 0 | 0 | 0 | 9.230 | 0 | 0 | 0 |
| BRACE2005434 | 0 | 0 | 0 | 0 | 2.445 | 0 | 0 |
| BRACE2005448 | 0 | 0 | 0 | 12.102 | 0 | 0 | 0 |
| BRACE2005937 | 0 | 0 | 0 | 21.500 | 0 | 0 | 0 |
| BRACE2006162 | 0 | 0 | 41.692 | 0 | 0 | 0 | 0 |
| BRACE2006258 | 0 | 0 | 0 | 0 | 0 | 4.622 | 0 |
| BRACE2006264 | 0 | 0 | 0 | 15.021 | 0 | 0 | 0 |
| BRACE2006319 | 0 | 0 | 23.616 | 0 | 0 | 0 | 0 |
| BRACE2006397 | 0 | 0 | 0 | 0.525 | 2.094 | 0 | 0 |
| BRACE2006514 | 0 | 0 | 0 | 0 | 0 | 4.902 | 0 |
| BRACE2006537 | 0 | 8.090 | 0 | 1.915 | 15.267 | 0 | 0 |
| BRACE2006547 | 0 | 0 | 0 | 0 | 53.061 | 0 | 0 |
| BRACE2006753 | 0 | 46.220 | 0 | 0 | 0 | 0 | 0 |
| BRACE2006900 | 0 | 0 | 0 | 0.916 | 0 | 0 | 0 |
| BRACE2007089 | 0 | 6.365 | 0 | 0 | 3.003 | 0 | 0 |
| BRACE2007191 | 0 | 0 | 0 | 4.890 | 2.436 | 0 | 0 |
| BRACE2007254 | 0 | 0 | 50.143 | 0 | 0 | 0 | 0 |
| BRACE2007518 | 0 | 0 | 0 | 4.039 | 0 | 0 | 0 |
| BRACE2007567 | 0 | 0 | 0 | 0 | 0 | 0 | 30.191 |
| BRACE2007671 | 0 | 0 | 10.414 | 0 | 10.966 | 8.724 | 0 |
| BRACE2007767 | 0 | 0 | 0 | 5.541 | 0 | 0 | 0 |
| BRACE2008358 | 0 | 0 | 0 | 4.033 | 16.072 | 0 | 0 |
| BRACE2008653 | 0 | 0 | 0 | 0.939 | 1.870 | 0 | 0 |
| BRACE2008706 | 0 | 0 | 0 | 0 | 11.652 | 0 | 0 |
| BRACE2008941 | 0 | 0 | 0 | 0 | 35.442 | 0 | 0 |
| BRACE2008968 | 0 | 0 | 0 | 0 | 6.186 | 0 | 0 |
| BRACE2009037 | 0 | 0 | 0 | 0 | 0 | 1.648 | 0 |
| BRACE2009291 | 0 | 0 | 8.910 | 0 | 0 | 0 | 0 |
| BRACE2009517 | 0 | 20.387 | 0 | 0 | 0 | 0 | 0 |
| BRACE2015287 | 0 | 0 | 0 | 0 | 0 | 0 | 49.965 |
| BRACE2016366 | 0 | 0 | 57.236 | 0 | 0 | 0 | 0 |
| BRACE2017397 | 0 | 0 | 0 | 8.395 | 0 | 0 | 0 |
| BRACE2017574 | 0 | 0 | 0 | 9.118 | 0 | 0 | 0 |
| BRACE2019147 | 0 | 16.098 | 0 | 0 | 0 | 0 | 0 |
| BRACE2022638 | 0 | 5.602 | 0 | 0 | 2.643 | 0 | 0 |
| BRACE2026836 | 0 | 0 | 46.481 | 0 | 0 | 0 | 0 |
| BRACE2037295 | 0 | 24.657 | 0 | 0 | 0 | 0 | 0 |
| BRACE2039624 | 0 | 0 | 0 | 0 | 3.431 | 0 | 0 |
| BRACE3000071 | 0 | 0 | 90.468 | 0 | 0 | 0 | 0 |
| BRACE3002184 | 0 | 0 | 0 | 47.691 | 0 | 0 | 0 |
| BRACE3003026 | 0 | 0 | 0 | 29.061 | 0 | 0 | 0 |
| BRACE3004371 | 0 | 0 | 0 | 6.686 | 0 | 0 | 0 |
| BRACE3004843 | 0 | 0 | 0 | 56.621 | 0 | 0 | 0 |
| BRACE3010428 | 0 | 8.604 | 0 | 2.037 | 0 | 0 | 0 |
| BRACE3010438 | 0 | 0 | 0 | 0 | 0 | 10.104 | 0 |
| BRACE3032631 | 0 | 0 | 0 | 22.445 | 0 | 0 | 0 |
| BRALZ2009482 | 0 | 0 | 0 | 5.952 | 0 | 0 | 8.085 |
| BRAMY2000354 | 0 | 0 | 9.256 | 0 | 0 | 0 | 29.898 |
| BRAMY2000893 | 0 | 0 | 0 | 0 | 0 | 0 | 33.110 |
| BRAMY2004363 | 0 | 0 | 0 | 0 | 0 | 11.536 | 0 |
| BRAMY2004521 | 0 | 0 | 0 | 4.218 | 0 | 0 | 0 |
| BRAMY2006366 | 0 | 0 | 0 | 16.395 | 0 | 0 | 0 |
| BRAMY2007078 | 0 | 28.583 | 0 | 0 | 0 | 21.457 | 0 |
| BRAMY2012091 | 0 | 0 | 40 | 0 | 0 | 0 | 0 |
| BRAMY2012536 | 0 | 4.339 | 0 | 0 | 0 | 0 | 0 |
| BRAMY2013590 | 0 | 0 | 0 | 38.449 | 0 | 0 | 0 |
| BRAMY2014813 | 0 | 72.515 | 0 | 0 | 0 | 0 | 0 |
| BRAMY2016009 | 0 | 0 | 0 | 9.307 | 0 | 0 | 0 |
| BRAMY2016706 | 0 | 0 | 0 | 0 | 17.578 | 0 | 0 |
| BRAMY2019554 | 0 | 0 | 0 | 0 | 2.830 | 0 | 0 |
| BRAMY2020427 | 0 | 4.451 | 0 | 2.108 | 0 | 0 | 0 |
| BRAMY2021139 | 0 | 0 | 0 | 45.546 | 0 | 0 | 0 |
| BRAMY2022786 | 0 | 0 | 0 | 2.221 | 0 | 0 | 0 |
| BRAMY2023719 | 0 | 44.940 | 0 | 0 | 0 | 0 | 0 |
| BRAMY2023939 | 0 | 0 | 0 | 10.878 | 0 | 0 | 0 |
| BRAMY2024827 | 0 | 0 | 0 | 0 | 0 | 0 | 43.406 |
| BRAMY2028491 | 0 | 0 | 0 | 63.850 | 0 | 0 | 0 |
| BRAMY2028740 | 0 | 0 | 0 | 0 | 3.302 | 0 | 0 |
| BRAMY2028796 | 0 | 0 | 0 | 2.645 | 0 | 0 | 0 |
| BRAMY2032087 | 0 | 0 | 0 | 2.155 | 0 | 0 | 0 |
| BRAMY2036459 | 0 | 0 | 0 | 0 | 0 | 0 | 41.005 |
| BRAMY2037147 | 0 | 0 | 0 | 63.850 | 0 | 0 | 0 |
| BRAMY2040592 | 0 | 0 | 0 | 0 | 12.349 | 0 | 0 |
| BRAMY3004377 | 0 | 0 | 0 | 0 | 2.941 | 4.680 | 0 |
| BRAMY3010008 | 0 | 0 | 0 | 1.036 | 0 | 0 | 0 |
| BRAWH1000007 | 0 | 0 | 0 | 0 | 0 | 50.702 | 0 |
| BRAWH1000040 | 0 | 5.172 | 0 | 0 | 0 | 0 | 0 |
| BRAWH1000093 | 0 | 3.467 | 0 | 1.642 | 0 | 2.602 | 0 |
| BRAWH2000460 | 0 | 4.587 | 0 | 1.086 | 2.164 | 3.444 | 0 |
| BRAWH2000488 | 0 | 0 | 0 | 0 | 35.754 | 0 | 0 |
| BRAWH2000503 | 0 | 0 | 0 | 36.922 | 0 | 0 | 0 |
| BRAWH2000588 | 0 | 0 | 0 | 0 | 8.898 | 7.079 | 0 |
| BRAWH2000633 | 0 | 0 | 0 | 0 | 0 | 7.480 | 0 |
| BRAWH2000697 | 0 | 0 | 0 | 3.600 | 0 | 5.708 | 0 |
| BRAWH2000839 | 0 | 3.087 | 0 | 0 | 1.457 | 4.635 | 0 |
| BRAWH2000924 | 0 | 0 | 0 | 0 | 0 | 1.619 | 0 |
| BRAWH2001092 | 0 | 1.321 | 0 | 0.313 | 0.623 | 2.975 | 3.824 |
| BRAWH2001141 | 0 | 0 | 0 | 0 | 18.022 | 0 | 0 |
| BRAWH2001166 | 0 | 0 | 0 | 0 | 11.195 | 0 | 0 |
| BRAWH2001171 | 0 | 0 | 4.160 | 1.099 | 0 | 0 | 0 |
| BRAWH2001439 | 0 | 0 | 0 | 0 | 3.649 | 0 | 0 |
| BRAWH2001484 | 0 | 0 | 0 | 18.909 | 0 | 0 | 0 |
| BRAWH2001671 | 0 | 0 | 0 | 0 | 13.485 | 0 | 0 |
| BRAWH2002679 | 0 | 0 | 0 | 0 | 33.575 | 0 | 0 |
| BRAWH2003025 | 0 | 0 | 0 | 0 | 10.753 | 0 | 0 |
| BRAWH2004095 | 0 | 0 | 0 | 2.104 | 0 | 0 | 0 |
| BRAWH2005225 | 0 | 0 | 0 | 0 | 20.557 | 32.708 | 0 |
| BRAWH2005661 | 0 | 0 | 0 | 0 | 5.669 | 0 | 0 |
| BRAWH2008219 | 0 | 0 | 0 | 0 | 51.103 | 0 | 0 |
| BRAWH2008706 | 0 | 0 | 0 | 5.117 | 0 | 0 | 0 |
| BRAWH2010136 | 0 | 0 | 0 | 46.991 | 0 | 0 | 0 |
| BRAWH2011343 | 0 | 0 | 0 | 12.485 | 0 | 0 | 0 |
| BRAWH2012162 | 0 | 0 | 0 | 0 | 63.940 | 0 | 0 |
| BRAWH2013748 | 0 | 0 | 0 | 0 | 0 | 0 | 58.070 |
| BRAWH2014188 | 0 | 5.381 | 0 | 8.919 | 0 | 4.040 | 0 |
| BRAWH2014934 | 0 | 0 | 0 | 64.025 | 0 | 0 | 0 |
| BRAWH2017685 | 0 | 0 | 0 | 0.903 | 0 | 2.864 | 0 |
| BRAWH2018526 | 0 | 4.626 | 0 | 0 | 2.183 | 3.473 | 0 |
| BRAWH3002574 | 0 | 0 | 0 | 0 | 23.446 | 0 | 0 |
| BRAWH3002853 | 0 | 0 | 4.982 | 1.316 | 5.246 | 0 | 0 |
| BRAWH3005146 | 0 | 0 | 0 | 0 | 0 | 28.570 | 0 |
| BRAWH3016271 | 0 | 0 | 0 | 0 | 0 | 30.435 | 0 |
| BRAWH3021574 | 0 | 0 | 0 | 8.364 | 0 | 0 | 0 |
| BRAWH3023172 | 0 | 0 | 6.169 | 0 | 0 | 0 | 0 |
| BRCAN1000168 | 0 | 0 | 0 | 2.511 | 5.003 | 0 | 0 |
| BRCAN2003944 | 0 | 0 | 0 | 0 | 0 | 4.767 | 0 |
| BRCAN2015371 | 0 | 0 | 0 | 0 | 38.874 | 0 | 0 |
| BRCAN2024572 | 0 | 0 | 0 | 4.861 | 0 | 0 | 0 |
| BRCAN2026197 | 0 | 0 | 0 | 0 | 0 | 8.810 | 0 |
| BRCAN2027150 | 0 | 76.615 | 0 | 0 | 0 | 0 | 0 |
| BRCAN2027364 | 0 | 0 | 0 | 5.285 | 0 | 0 | 0 |
| BRCAN2028036 | 0 | 0 | 0 | 0 | 0 | 13.623 | 0 |
| BRCAN2028355 | 0 | 0 | 9.952 | 0 | 0 | 0 | 0 |
| BRCOC1000040 | 0 | 0 | 0 | 5.248 | 0 | 0 | 0 |
| BRCOC2003187 | 0 | 0 | 0 | 0 | 0 | 0 | 17.111 |
| BRCOC2003213 | 0 | 0 | 0 | 0 | 36.816 | 0 | 0 |
| BRCOC2004175 | 0 | 0 | 65.535 | 0 | 0 | 0 | 0 |
| BRCOC2010123 | 0 | 0 | 0 | 1.950 | 0 | 0 | 0 |
| BRCOC2019255 | 0 | 0 | 0 | 30.447 | 0 | 0 | 0 |
| BRHIP2000534 | 0 | 2.573 | 0 | 0 | 1.214 | 3.862 | 0 |
| BRHIP2000553 | 0 | 0 | 0 | 4.573 | 0 | 0 | 0 |
| BRHIP2007305 | 0 | 0 | 0 | 2.015 | 0 | 6.388 | 0 |
| BRHIP2015245 | 0 | 0 | 0 | 4.225 | 0 | 0 | 0 |
| BRHIP2015679 | 0 | 0 | 0 | 8.929 | 0 | 0 | 0 |
| BRHIP2021762 | 0 | 0 | 0 | 4.958 | 0 | 0 | 0 |
| BRHIP2021870 | 0 | 33.373 | 0 | 0 | 0 | 0 | 0 |
| BRHIP2022326 | 0 | 0 | 5.731 | 0 | 0 | 0 | 0 |
| BRHIP2022986 | 0 | 21.388 | 0 | 5.064 | 0 | 32.111 | 0 |
| BRHIP2023229 | 0 | 0 | 0 | 0 | 0 | 84.688 | 0 |
| BRHIP2023438 | 0 | 0 | 0 | 45.400 | 0 | 0 | 0 |
| BRHIP2023695 | 0 | 0 | 0 | 63.562 | 0 | 0 | 0 |
| BRHIP2023762 | 0 | 17.938 | 0 | 0 | 0 | 0 | 0 |
| BRHIP2023888 | 0 | 0 | 0 | 3.274 | 1.305 | 2.076 | 0 |
| BRHIP2027077 | 0 | 15.182 | 0 | 0 | 0 | 0 | 0 |
| BRHIP3000111 | 0 | 0 | 0 | 0 | 0 | 5.777 | 0 |
| BRHIP3000131 | 0 | 0 | 0 | 6.535 | 0 | 20.721 | 0 |
| BRHIP3003961 | 0 | 0 | 0 | 33.755 | 0 | 0 | 0 |
| BRHIP3004215 | 0 | 0 | 0 | 24.161 | 0 | 0 | 0 |
| BRHIP3020046 | 0 | 7.614 | 0 | 0 | 0 | 0 | 0 |
| BRHIP3021987 | 0 | 0 | 0 | 63.562 | 0 | 0 | 0 |
| BRSSN2000498 | 0 | 16.450 | 0 | 0 | 0 | 0 | 0 |
| BRSSN2001869 | 0 | 22.689 | 0 | 0 | 0 | 0 | 0 |
| BRSSN2003012 | 0 | 0 | 0 | 7.699 | 0 | 0 | 0 |
| BRSSN2011262 | 0 | 0 | 18.984 | 0 | 0 | 0 | 0 |
| BRSSN2014610 | 0 | 0 | 0 | 12.708 | 0 | 0 | 0 |
| BRSSN2015982 | 0 | 0 | 0 | 28.913 | 0 | 0 | 0 |
| BRSTN1000083 | 0 | 0 | 4.301 | 2.273 | 0 | 0 | 0 |
| BRSTN2004863 | 0 | 0 | 0 | 17.731 | 0 | 0 | 0 |
| BRSTN2010089 | 0 | 0 | 0 | 11.742 | 0 | 0 | 0 |
| BRSTN2011961 | 0 | 0 | 3.902 | 1.031 | 1.027 | 3.268 | 0 |
| BRSTN2012069 | 0 | 0.355 | 0.446 | 0.219 | 0.403 | 0.107 | 3.704 |
| BRSTN2012174 | 0 | 1.520 | 0 | 0.720 | 0 | 0 | 0 |
| BRSTN2013502 | 0 | 0 | 0 | 0 | 0 | 0 | 52.880 |
| BRSTN2014490 | 0 | 0 | 0 | 0 | 32.674 | 0 | 0 |
| BRSTN2015889 | 0 | 0 | 0 | 0 | 13.737 | 0 | 0 |
| BRSTN2016470 | 0 | 0 | 0 | 1.169 | 0.776 | 0 | 0 |
| BRSTN2017104 | 0 | 0 | 0 | 0 | 6.915 | 0 | 0 |
| BRTHA1000311 | 0 | 0 | 0 | 5.251 | 0 | 0 | 0 |
| BRTHA2002726 | 0 | 0 | 0 | 0 | 76.179 | 0 | 0 |
| BRTHA2002808 | 0 | 87.143 | 0 | 0 | 0 | 0 | 0 |
| BRTHA2005864 | 0 | 0 | 0 | 5.775 | 0 | 0 | 0 |
| BRTHA2007998 | 0 | 0 | 0 | 0 | 0 | 4.866 | 0 |
| BRTHA2012392 | 0 | 0 | 0 | 61.610 | 0 | 0 | 0 |
| BRTHA2016765 | 0 | 0 | 79.260 | 0 | 0 | 0 | 0 |
| BRTHA2027229 | 0 | 0 | 0 | 0 | 0 | 5.165 | 0 |
| BRTHA3003490 | 0 | 0 | 0 | 0 | 0 | 9.160 | 0 |
| BRTHA3003736 | 0 | 0 | 0 | 0 | 7.629 | 0 | 0 |
| BRTHA3007472 | 0 | 29.330 | 0 | 0 | 0 | 22.018 | 0 |
| BRTHA3007922 | 0 | 0 | 0 | 27.774 | 0 | 0 | 0 |
| BRTHA3010135 | 0 | 0 | 0 | 35.611 | 0 | 0 | 0 |
| BRTHA3011265 | 0 | 0 | 0 | 15.184 | 0 | 0 | 0 |
| BRTHA3021971 | 0 | 14.590 | 0 | 0 | 0 | 0 | 0 |
| CERVX2002770 | 0 | 0 | 0 | 0 | 0 | 0 | 51.288 |
| CHONS2002829 | 0 | 0 | 0 | 5.815 | 0 | 0 | 0 |
| COLON2002443 | 0 | 33.895 | 0 | 0 | 0 | 0 | 0 |
| CTONG1000009 | 0 | 0 | 0 | 8.644 | 0 | 0 | 0 |
| CTONG1000052 | 0 | 0 | 4.070 | 1.075 | 2.143 | 0 | 0 |
| CTONG1000094 | 0 | 0 | 2.623 | 0 | 1.381 | 2.198 | 0 |
| CTONG1000175 | 0 | 0 | 0 | 2.996 | 11.942 | 0 | 0 |
| CTONG1000218 | 0 | 0 | 3.244 | 0 | 1.708 | 0 | 0 |
| CTONG1000220 | 0 | 0 | 0 | 0 | 0 | 75.183 | 0 |
| CTONG1000277 | 0 | 0 | 0 | 36.809 | 0 | 0 | 0 |
| CTONG1000467 | 0 | 0 | 0 | 15.292 | 0 | 0 | 0 |
| CTONG2000042 | 0 | 0 | 0 | 31.174 | 0 | 0 | 0 |
| CTONG2000063 | 0 | 0 | 0 | 3.810 | 0 | 0 | 0 |
| CTONG2000411 | 0 | 0 | 0 | 10.242 | 0 | 0 | 0 |
| CTONG2000452 | 0 | 0 | 0 | 5.183 | 0 | 16.434 | 0 |
| CTONG2000469 | 0 | 0 | 0 | 0 | 31.068 | 0 | 0 |
| CTONG2000561 | 0 | 0 | 0 | 38.747 | 0 | 0 | 0 |
| CTONG2000589 | 0 | 0 | 0 | 39.688 | 39.543 | 0 | 0 |
| CTONG2001320 | 0 | 0 | 0 | 0 | 0 | 29.748 | 0 |
| CTONG2001513 | 0 | 0 | 0 | 48.862 | 0 | 0 | 0 |
| CTONG2001748 | 0 | 0 | 0 | 3.720 | 0 | 0 | 0 |
| CTONG2001932 | 0 | 0 | 0 | 18.386 | 0 | 0 | 0 |
| CTONG2002073 | 0 | 0 | 0 | 2.607 | 5.194 | 0 | 0 |
| CTONG2002270 | 0 | 0 | 0 | 2.832 | 0 | 0 | 0 |
| CTONG2002453 | 0 | 0 | 0 | 0 | 0 | 43.805 | 0 |
| CTONG2002520 | 0 | 0 | 0 | 5.239 | 0 | 0 | 0 |
| CTONG2002709 | 0 | 0 | 0 | 0 | 15.368 | 0 | 0 |
| CTONG2002744 | 0 | 0 | 0 | 1.048 | 0 | 0 | 0 |
| CTONG2002903 | 0 | 0 | 0 | 5.482 | 10.924 | 0 | 0 |
| CTONG2003094 | 0 | 0 | 12.342 | 3.261 | 0 | 0 | 0 |
| CTONG2005553 | 0 | 0 | 0 | 1.274 | 0 | 0 | 0 |
| CTONG2005913 | 0 | 0 | 0 | 0 | 15.825 | 0 | 0 |
| CTONG2006562 | 0 | 0 | 0 | 2.492 | 0 | 0 | 0 |
| CTONG2006709 | 0 | 0 | 0 | 9.205 | 0 | 14.592 | 0 |
| CTONG2006932 | 0 | 0 | 0 | 0 | 3.903 | 0 | 0 |
| CTONG2007072 | 0 | 16.170 | 14.491 | 0 | 0 | 0 | 0 |
| CTONG2007078 | 0 | 19.211 | 0 | 0 | 0 | 0 | 0 |
| CTONG2007500 | 0 | 0 | 0 | 2.677 | 0 | 0 | 0 |
| CTONG2007613 | 0 | 0 | 0 | 0 | 0 | 49.390 | 0 |
| CTONG2007776 | 0 | 0 | 0 | 0 | 15.083 | 0 | 0 |
| CTONG2008398 | 0 | 0 | 0 | 0 | 0 | 4.314 | 0 |
| CTONG2008506 | 0 | 0 | 0 | 1.675 | 0 | 5.310 | 0 |
| CTONG2008518 | 0 | 0 | 0 | 6.854 | 0 | 0 | 0 |
| CTONG2010348 | 0 | 0 | 0 | 3.151 | 0 | 0 | 0 |
| CTONG2010821 | 0 | 5.371 | 0 | 0 | 2.534 | 0 | 0 |
| CTONG2011825 | 0 | 0 | 0 | 0 | 0 | 48.443 | 0 |
| CTONG2012001 | 0 | 0 | 0 | 12.726 | 0 | 0 | 0 |
| CTONG2012401 | 0 | 0 | 28.336 | 0 | 0 | 23.736 | 0 |
| CTONG2012452 | 0 | 2.677 | 0 | 1.901 | 0 | 0 | 0 |
| CTONG2012607 | 0 | 0 | 0 | 0 | 0 | 0 | 37.630 |
| CTONG2012847 | 0 | 0 | 0 | 0 | 6.107 | 9.717 | 0 |
| CTONG2012879 | 0 | 0 | 11.453 | 0 | 0 | 0 | 0 |
| CTONG2013149 | 0 | 0 | 0 | 0 | 0 | 75.183 | 0 |
| CTONG2013156 | 0 | 0 | 0 | 36.809 | 0 | 0 | 0 |
| CTONG2013222 | 0 | 0 | 0 | 0 | 13.327 | 0 | 0 |
| CTONG2015091 | 0 | 0 | 5.470 | 0 | 0 | 0 | 0 |
| CTONG2016056 | 0 | 0 | 13.394 | 0 | 0 | 0 | 0 |
| CTONG2016575 | 0 | 0 | 0 | 2.654 | 0 | 8.416 | 0 |
| CTONG2018383 | 0 | 33.978 | 0 | 0 | 0 | 0 | 0 |
| CTONG2018632 | 0 | 0 | 0 | 0 | 0 | 45.130 | 0 |
| CTONG2019029 | 0 | 0 | 0 | 14.402 | 0 | 0 | 0 |
| CTONG2019248 | 0 | 0 | 0 | 26.925 | 0 | 0 | 0 |
| CTONG2019590 | 0 | 0 | 0 | 19.151 | 0 | 0 | 0 |
| CTONG2020445 | 0 | 0 | 0 | 37.458 | 0 | 0 | 0 |
| CTONG2020484 | 0 | 0 | 0 | 0 | 0 | 6.634 | 0 |
| CTONG2020560 | 0 | 0 | 0 | 5.340 | 0 | 0 | 0 |
| CTONG2020582 | 0 | 0 | 12.925 | 13.659 | 6.804 | 0 | 0 |
| CTONG2024031 | 0 | 0 | 0 | 9.199 | 0 | 0 | 56.233 |
| CTONG2028124 | 0 | 3.778 | 3.385 | 0 | 7.129 | 0 | 0 |
| CTONG2028208 | 0 | 0 | 23.853 | 0 | 0 | 0 | 0 |
| CTONG2028309 | 0 | 0 | 0 | 13.063 | 0 | 0 | 0 |
| CTONG3000657 | 0 | 0 | 0 | 0 | 13.759 | 0 | 0 |
| CTONG3001420 | 0 | 0 | 0 | 48.862 | 0 | 0 | 0 |
| CTONG3002674 | 0 | 0 | 0 | 39.760 | 0 | 0 | 0 |
| CTONG3002835 | 0 | 0 | 7.401 | 0 | 0 | 0 | 0 |
| CTONG3004726 | 0 | 0 | 0 | 30.140 | 0 | 0 | 0 |
| CTONG3008894 | 0 | 0 | 0 | 1.294 | 0 | 0 | 0 |
| CTONG3009239 | 0 | 0 | 9.726 | 0 | 0 | 8.147 | 0 |
| D3OST1000109 | 0 | 13.416 | 0 | 0 | 0 | 0 | 0 |
| D3OST1000270 | 0 | 0 | 0 | 0 | 9.163 | 14.579 | 0 |
| D3OST2002068 | 0 | 8.074 | 0 | 0.382 | 0 | 0 | 0 |
| D3OST2002182 | 0 | 0 | 0 | 13.227 | 0 | 0 | 0 |
| D3OST3000169 | 0 | 11.035 | 0 | 0 | 0 | 0 | 0 |
| DFNES1000083 | 0 | 0 | 0 | 0 | 0 | 38.078 | 0 |
| DFNES1000150 | 0 | 0 | 0 | 3.975 | 0 | 0 | 0 |
| DFNES1000185 | 0 | 0 | 0 | 0 | 0 | 7.442 | 0 |
| DFNES2000011 | 0 | 0 | 0 | 1.946 | 0 | 0 | 0 |
| DFNES2000268 | 0 | 0 | 0 | 0 | 0 | 6.231 | 0 |
| DFNES2000292 | 0 | 0 | 0 | 0 | 0 | 42.353 | 0 |
| DFNES2000432 | 0 | 56.052 | 0 | 0 | 0 | 0 | 0 |
| DFNES2000457 | 0 | 0 | 0 | 0 | 31.500 | 0 | 0 |
| DFNES2003192 | 0 | 0 | 0 | 5.331 | 0 | 0 | 0 |
| DFNES2004371 | 0 | 0 | 0 | 5.616 | 0 | 0 | 0 |
| DFNES2005540 | 0 | 0 | 0 | 0 | 0 | 17.057 | 0 |
| DFNES2007634 | 0 | 0 | 0 | 3.164 | 0 | 0 | 0 |
| DFNES2011239 | 0 | 0 | 0 | 0 | 0 | 42.161 | 0 |
| DFNES2011499 | 0 | 0 | 0 | 11.041 | 0 | 0 | 0 |
| FCBBF1000024 | 0 | 0 | 0 | 3.907 | 0 | 0 | 0 |
| FCBBF1000025 | 0 | 0 | 0 | 0 | 0 | 18.057 | 0 |
| FCBBF1000027 | 0 | 2.753 | 0 | 0 | 1.299 | 0 | 0 |
| FCBBF1000053 | 0 | 20.343 | 0 | 0 | 0 | 0 | 0 |
| FCBBF1000061 | 0 | 0 | 0 | 4.186 | 0 | 0 | 0 |
| FCBBF1000077 | 0 | 0 | 0 | 0 | 0 | 4.570 | 0 |
| FCBBF1000139 | 0 | 0 | 0 | 3.111 | 0 | 0 | 0 |
| FCBBF1000182 | 0 | 0 | 0 | 15.092 | 0 | 0 | 0 |
| FCBBF1000197 | 0 | 8.030 | 0 | 9.506 | 0 | 0 | 0 |
| FCBBF1000294 | 0 | 8.093 | 0 | 3.832 | 0 | 0 | 0 |
| FCBBF1000367 | 0 | 0 | 10.233 | 0 | 0 | 0 | 33.054 |
| FCBBF1000412 | 0 | 14.546 | 0 | 3.444 | 0 | 10.920 | 0 |
| FCBBF1000425 | 0 | 39.241 | 0 | 0 | 0 | 0 | 0 |
| FCBBF1000449 | 0 | 50.253 | 0 | 0 | 0 | 0 | 0 |
| FCBBF1000466 | 0 | 0 | 4.290 | 0 | 2.258 | 0 | 0 |
| FCBBF1000563 | 0 | 0 | 0 | 0 | 0 | 8.475 | 0 |
| FCBBF2000502 | 0 | 49.587 | 0 | 0 | 0 | 0 | 0 |
| FCBBF2000566 | 0 | 27.938 | 0 | 0 | 0 | 0 | 0 |
| FCBBF2000591 | 0 | 2.155 | 0 | 0 | 0 | 0 | 0 |
| FCBBF2000685 | 0 | 0 | 0 | 0 | 0 | 38.388 | 0 |
| FCBBF2000885 | 0 | 0 | 0 | 5.464 | 0 | 0 | 0 |
| FCBBF2001105 | 0 | 0 | 0 | 0 | 21.530 | 0 | 0 |
| FCBBF2001309 | 0 | 0 | 0 | 7.743 | 0 | 0 | 0 |
| FCBBF2001538 | 0 | 0 | 5.132 | 0 | 2.702 | 0 | 0 |
| FCBBF2002349 | 0 | 0 | 26.593 | 0 | 0 | 0 | 0 |
| FCBBF2005637 | 0 | 0 | 18.719 | 0 | 0 | 0 | 0 |
| FCBBF2006634 | 0 | 0 | 0 | 16.801 | 0 | 0 | 0 |
| FCBBF3000228 | 0 | 0 | 0 | 15.949 | 0 | 0 | 0 |
| FCBBF3000434 | 0 | 0 | 0 | 0 | 6.566 | 0 | 0 |
| FCBBF3001081 | 0 | 0 | 17.687 | 9.346 | 0 | 0 | 0 |
| FCBBF3001657 | 0 | 0 | 15.891 | 0 | 0 | 0 | 0 |
| FCBBF3001890 | 0 | 0 | 0 | 0 | 9.755 | 0 | 0 |
| FCBBF3004021 | 0 | 80.271 | 0 | 0 | 0 | 0 | 0 |
| FCBBF3004261 | 0 | 0 | 0 | 16.099 | 0 | 0 | 0 |
| FCBBF3004473 | 0 | 0 | 0 | 0 | 8.149 | 0 | 0 |
| FCBBF3005320 | 0 | 0 | 0 | 0 | 9.674 | 0 | 0 |
| FCBBF3005330 | 0 | 5.207 | 0 | 0 | 0 | 0 | 0 |
| FCBBF3005497 | 0 | 5.909 | 0 | 2.798 | 0 | 8.872 | 0 |
| FCBBF3008644 | 0 | 64.763 | 0 | 0 | 0 | 0 | 0 |
| FCBBF3009541 | 0 | 0 | 0 | 1.467 | 0 | 2.326 | 0 |
| FCBBF3014260 | 0 | 0 | 0 | 4.018 | 0 | 0 | 0 |
| FCBBF3014770 | 0 | 0 | 64.279 | 0 | 0 | 0 | 0 |
| FCBBF3017024 | 0 | 38.525 | 0 | 18.243 | 0 | 0 | 0 |
| FCBBF3021191 | 0 | 0 | 0 | 0 | 65.749 | 0 | 0 |
| FCBBF3023667 | 0 | 0.998 | 0 | 0.945 | 0.471 | 0 | 0 |
| FCBBF3028244 | 0 | 0 | 6.254 | 0 | 0 | 0 | 0 |
| FCBBF4000446 | 0 | 0 | 0 | 1.337 | 0 | 0 | 0 |
| FEBRA2000105 | 0 | 0 | 0 | 2.553 | 0 | 0 | 0 |
| FEBRA2000402 | 0 | 0 | 0 | 0 | 19.655 | 0 | 0 |
| FEBRA2000404 | 0 | 0 | 67.776 | 0 | 0 | 0 | 0 |
| FEBRA2000510 | 0 | 0 | 0 | 0 | 0 | 20.820 | 0 |
| FEBRA2000581 | 0 | 0 | 0 | 0 | 0 | 4.489 | 0 |
| FEBRA2000733 | 0 | 1.267 | 2.270 | 1.200 | 1.195 | 0.951 | 0 |
| FEBRA2000787 | 0 | 0 | 0 | 3.515 | 0 | 0 | 0 |
| FEBRA2000881 | 0 | 0 | 0 | 5.633 | 0 | 0 | 0 |
| FEBRA2002933 | 0 | 0 | 0 | 0 | 2.625 | 2.088 | 8.052 |
| FEBRA2003100 | 0 | 0 | 0 | 1.172 | 0 | 0 | 0 |
| FEBRA2003750 | 0 | 0 | 0 | 3.249 | 0 | 0 | 0 |
| FEBRA2003833 | 0 | 0 | 0 | 6.155 | 0 | 0 | 0 |
| FEBRA2003926 | 0 | 0 | 0 | 0 | 2.476 | 3.939 | 0 |
| FEBRA2003930 | 0 | 13.509 | 0 | 0 | 0 | 0 | 0 |
| FEBRA2004042 | 0 | 0 | 0 | 3.775 | 0 | 0 | 0 |
| FEBRA2004293 | 0 | 0 | 0 | 0 | 18.855 | 0 | 0 |
| FEBRA2004325 | 0 | 0 | 0 | 6.268 | 0 | 39.749 | 0 |
| FEBRA2004412 | 0 | 0 | 0 | 5.225 | 0 | 0 | 0 |
| FEBRA2004628 | 0 | 0 | 0 | 0 | 10.116 | 0 | 0 |
| FEBRA2004818 | 0 | 0 | 0 | 2.423 | 0 | 0 | 0 |
| FEBRA2005416 | 0 | 0 | 0 | 1.911 | 0 | 6.059 | 0 |
| FEBRA2005572 | 0 | 0 | 0 | 3.171 | 0 | 0 | 0 |
| FEBRA2005734 | 0 | 0 | 0 | 0 | 2.994 | 0 | 0 |
| FEBRA2005824 | 0 | 2.804 | 0 | 0 | 0 | 0 | 0 |
| FEBRA2006055 | 0 | 0 | 0 | 4.701 | 0 | 0 | 57.471 |
| FEBRA2006112 | 0 | 0 | 0 | 23.494 | 0 | 0 | 0 |
| FEBRA2006270 | 0 | 0 | 0 | 2.080 | 0 | 0 | 0 |
| FEBRA2006372 | 0 | 0 | 0 | 0 | 0 | 7.578 | 0 |
| FEBRA2006519 | 0 | 0 | 0 | 21.163 | 0 | 0 | 0 |
| FEBRA2006553 | 0 | 0 | 0 | 0 | 14.030 | 0 | 0 |
| FEBRA2007212 | 0 | 29.506 | 0 | 0 | 0 | 0 | 0 |
| FEBRA2008081 | 0 | 0 | 0 | 3.781 | 0 | 0 | 0 |
| FEBRA2008087 | 0 | 2.695 | 0 | 1.276 | 1.271 | 0 | 7.800 |
| FEBRA2008255 | 0 | 0 | 0 | 9.006 | 0 | 0 | 0 |
| FEBRA2008302 | 0 | 0 | 0 | 1.894 | 0 | 0 | 0 |
| FEBRA2009276 | 0 | 0 | 0 | 41.654 | 0 | 0 | 0 |
| FEBRA2009419 | 0 | 9.932 | 0 | 4.703 | 0 | 7.455 | 0 |
| FEBRA2009541 | 0 | 0 | 0 | 29.601 | 0 | 0 | 0 |
| FEBRA2012397 | 0 | 0 | 0 | 41.654 | 0 | 0 | 0 |
| FEBRA2014417 | 0 | 0 | 0 | 0.961 | 0 | 3.047 | 0 |
| FEBRA2018476 | 0 | 0 | 7.360 | 0 | 7.750 | 0 | 0 |
| FEBRA2022055 | 0 | 0 | 3.584 | 0 | 7.548 | 3.002 | 0 |
| FEBRA2022504 | 0 | 0 | 0 | 0 | 5.824 | 0 | 0 |
| FEBRA2023927 | 0 | 0 | 0 | 7.249 | 0 | 0 | 0 |
| FEBRA2025838 | 0 | 6.175 | 0 | 0 | 0 | 0 | 0 |
| FELIV1000153 | 0 | 1.240 | 1.111 | 0 | 0 | 0 | 0 |
| HCASM2000363 | 0 | 5.112 | 0 | 0 | 2.412 | 3.837 | 0 |
| HCHON1000030 | 0 | 1.363 | 1.222 | 0.646 | 5.146 | 0 | 0 |
| HCHON1000166 | 0 | 0 | 0 | 0 | 10.668 | 0 | 0 |
| HCHON2000028 | 0 | 0 | 0 | 14.118 | 0 | 0 | 0 |
| HCHON2000056 | 0 | 0 | 0 | 0 | 2.012 | 1.600 | 0 |
| HCHON2000062 | 0 | 0 | 0 | 7.459 | 0 | 0 | 0 |
| HCHON2000087 | 0 | 0 | 0 | 0 | 0 | 3.491 | 0 |
| HCHON2000160 | 0 | 7.566 | 0 | 0 | 0 | 0 | 0 |
| HCHON2000226 | 0 | 0 | 0 | 0.718 | 0 | 0 | 8.774 |
| HCHON2000244 | 0 | 0 | 0 | 0 | 4.666 | 3.712 | 0 |
| HCHON2000265 | 0 | 0 | 13.629 | 0 | 0 | 0 | 0 |
| HCHON2000295 | 0 | 0 | 0 | 0.780 | 0 | 0 | 0 |
| HCHON2000322 | 0 | 0 | 0 | 19.541 | 0 | 0 | 0 |
| HCHON2000373 | 0 | 0 | 0 | 0 | 0 | 5.719 | 0 |
| HCHON2000475 | 0 | 10.005 | 0 | 0 | 0 | 0 | 0 |
| HCHON2000508 | 0 | 2.807 | 0 | 1.994 | 1.324 | 0 | 0 |
| HCHON2000826 | 0 | 0 | 0 | 0 | 2.538 | 4.038 | 0 |
| HCHON2001039 | 0 | 0 | 0 | 1.986 | 0 | 0 | 0 |
| HCHON2001084 | 0 | 0 | 0 | 0 | 8.143 | 0 | 0 |
| HCHON2001099 | 0 | 0 | 0 | 0 | 9.673 | 0 | 0 |
| HCHON2001200 | 0 | 3.251 | 2.913 | 0.770 | 1.534 | 0 | 0 |
| HCHON2001217 | 0 | 0 | 0 | 0 | 0 | 11.746 | 0 |
| HCHON2001359 | 0 | 6.399 | 5.735 | 0 | 0 | 0 | 0 |
| HCHON2001407 | 0 | 0 | 0 | 0 | 5.601 | 0 | 0 |
| HCHON2001434 | 0 | 0 | 0 | 0 | 5.417 | 0 | 0 |
| HCHON2001505 | 0 | 0 | 0 | 15.995 | 0 | 0 | 0 |
| HCHON2004002 | 0 | 23.605 | 0 | 1.397 | 0 | 0 | 0 |
| HCHON2005921 | 0 | 0 | 0 | 7.381 | 0 | 0 | 0 |
| HEART1000074 | 0 | 0 | 0 | 1.351 | 0 | 0 | 0 |
| HEART1000088 | 0 | 0 | 50.241 | 0 | 0 | 0 | 0 |
| HEART1000139 | 0 | 0 | 33.548 | 0 | 0 | 0 | 0 |
| HEART1000142 | 0 | 0 | 36.026 | 0 | 0 | 0 | 0 |
| HEART1000149 | 0 | 0 | 0 | 1.671 | 16.652 | 0 | 20.432 |
| HEART1000185 | 0 | 0 | 0 | 0 | 2.804 | 0 | 0 |
| HEART2000506 | 0 | 0 | 0 | 3.121 | 0 | 0 | 0 |
| HEART2000520 | 0 | 0 | 19.426 | 0 | 0 | 0 | 0 |
| HEART2000541 | 0 | 0 | 27.038 | 0 | 0 | 0 | 0 |
| HEART2003836 | 0 | 0 | 27.716 | 0 | 0 | 0 | 0 |
| HEART2006521 | 0 | 17.978 | 0 | 0 | 8.482 | 0 | 0 |
| HEART2007696 | 0 | 0 | 33.551 | 0 | 0 | 0 | 0 |
| HEART2010495 | 0 | 0 | 50.241 | 0 | 0 | 0 | 0 |
| HHDPC1000083 | 0 | 0 | 6.593 | 1.742 | 3.471 | 0 | 0 |
| HHDPC1000163 | 0 | 0 | 0 | 0 | 4.460 | 0 | 0 |
| HHDPC2000055 | 0 | 0 | 0 | 3.254 | 0 | 0 | 0 |
| HHDPC2000115 | 0 | 0 | 0 | 0 | 9.277 | 0 | 0 |
| HHDPC2000149 | 0 | 0 | 0 | 7.952 | 0 | 0 | 0 |
| HHDPC2000455 | 0 | 0 | 0 | 0.978 | 0 | 0 | 0 |
| HHDPC2000456 | 0 | 0 | 0 | 5.526 | 0 | 8.761 | 0 |
| HHDPC2003439 | 0 | 0 | 0 | 0.453 | 0 | 1.435 | 0 |
| HHDPC2003983 | 0 | 0 | 1.876 | 1.487 | 0 | 0 | 0 |
| HHDPC2007267 | 0 | 0 | 0 | 12.164 | 13.851 | 0 | 0 |
| HLUNG1000055 | 0 | 0 | 0 | 1.927 | 0 | 3.054 | 0 |
| HLUNG1000076 | 0 | 0 | 0 | 10.480 | 2.983 | 61.709 | 0 |
| HLUNG2000315 | 0 | 0 | 0 | 27.144 | 0 | 0 | 0 |
| HLUNG2000412 | 0 | 0 | 0 | 4.765 | 9.496 | 0 | 0 |
| HLUNG2000501 | 0 | 0 | 0 | 0 | 0 | 0 | 18.665 |
| HLUNG2000884 | 0 | 16.089 | 0 | 3.809 | 7.591 | 0 | 0 |
| HLUNG2001459 | 0 | 49.262 | 0 | 11.664 | 0 | 0 | 0 |
| HLUNG2001518 | 0 | 0 | 0 | 1.946 | 11.634 | 0 | 0 |
| HLUNG2001633 | 0 | 0 | 0 | 42.749 | 0 | 0 | 0 |
| HLUNG2001712 | 0 | 0 | 0 | 0 | 11.693 | 0 | 0 |
| HLUNG2002059 | 0 | 0 | 0 | 29.250 | 0 | 0 | 0 |
| HLUNG2002648 | 0 | 0 | 0 | 0 | 0 | 20.395 | 0 |
| HLUNG2003042 | 0 | 0 | 0 | 4.236 | 0 | 0 | 0 |
| HLUNG2003306 | 0 | 0 | 0 | 22.788 | 0 | 0 | 0 |
| HLUNG2003778 | 0 | 38.774 | 0 | 0 | 0 | 0 | 0 |
| HLUNG2004159 | 0 | 13.628 | 0 | 3.227 | 0 | 10.230 | 0 |
| HLUNG2004170 | 0 | 0 | 0 | 43.864 | 0 | 0 | 0 |
| HLUNG2005230 | 0 | 17.182 | 0 | 4.068 | 0 | 0 | 0 |
| HLUNG2005738 | 0 | 0 | 0 | 32.670 | 0 | 0 | 0 |
| HLUNG2008637 | 0 | 0 | 0 | 0 | 5.991 | 0 | 0 |
| HLUNG2009215 | 0 | 0 | 0 | 0 | 49.159 | 0 | 0 |
| HLUNG2011298 | 0 | 0 | 64.746 | 0 | 0 | 0 | 0 |
| HLUNG2017262 | 0 | 0 | 0 | 11.289 | 0 | 0 | 0 |
| HSYRA1000062 | 0 | 0 | 0 | 0.762 | 3.038 | 0 | 0 |
| HSYRA1000119 | 0 | 3.456 | 0 | 0 | 1.631 | 2.594 | 0 |
| HSYRA1000137 | 0 | 0 | 0 | 0 | 0 | 21.029 | 0 |
| HSYRA1000152 | 0 | 0 | 0 | 0 | 4.230 | 0 | 0 |
| HSYRA1000178 | 0 | 0 | 0 | 4.462 | 0 | 14.149 | 0 |
| HSYRA2000137 | 0 | 0 | 0 | 8.068 | 0 | 0 | 0 |
| HSYRA2000159 | 0 | 0.906 | 0.812 | 0.858 | 0 | 1.361 | 0 |
| HSYRA2000224 | 0 | 0 | 0 | 3.200 | 0 | 0 | 0 |
| HSYRA2000232 | 0 | 0 | 0 | 0 | 2.622 | 0 | 0 |
| HSYRA2000248 | 0 | 0 | 0 | 2.419 | 2.410 | 0 | 0 |
| HSYRA2000605 | 0 | 0 | 0 | 10.648 | 0 | 33.760 | 0 |
| HSYRA2000640 | 0 | 0 | 0 | 3.032 | 0 | 0 | 0 |
| HSYRA2000743 | 0 | 0 | 0 | 2.755 | 0 | 0 | 0 |
| HSYRA2000787 | 0 | 0 | 0 | 0 | 0 | 17.550 | 0 |
| HSYRA2000828 | 0 | 0 | 19.193 | 0 | 0 | 8.039 | 0 |
| HSYRA2001105 | 0 | 20.710 | 0 | 4.903 | 0 | 0 | 0 |
| HSYRA2001138 | 0 | 0 | 1.717 | 0 | 0 | 1.439 | 0 |
| HSYRA2001225 | 0 | 5.557 | 0 | 0 | 0 | 0 | 0 |
| HSYRA2001396 | 0 | 0 | 0 | 2.704 | 5.388 | 0 | 0 |
| HSYRA2001476 | 0 | 0 | 3.252 | 1.718 | 3.424 | 0 | 0 |
| HSYRA2001574 | 0 | 0 | 0 | 0 | 0 | 4.246 | 0 |
| HSYRA2001615 | 0 | 0 | 0 | 0 | 7.355 | 0 | 0 |
| HSYRA2001621 | 0 | 0 | 4.944 | 0 | 0 | 0 | 0 |
| HSYRA2001638 | 0 | 17.000 | 15.235 | 4.025 | 0 | 0 | 0 |
| HSYRA2002741 | 0 | 0 | 47.403 | 0 | 0 | 0 | 0 |
| HSYRA2007650 | 0 | 0 | 0 | 8.465 | 0 | 0 | 0 |
| IMR321000210 | 0 | 0 | 0 | 0 | 0 | 5.719 | 0 |
| IMR321000219 | 0 | 0 | 1.891 | 0 | 0 | 4.751 | 0 |
| IMR321000266 | 0 | 21.271 | 0 | 5.036 | 0 | 0 | 0 |
| IMR322000121 | 0 | 0 | 7.509 | 0 | 0 | 0 | 0 |
| IMR322000127 | 0 | 0 | 10.435 | 0 | 0 | 0 | 0 |
| IMR322000144 | 0 | 12.260 | 0 | 0 | 0 | 0 | 0 |
| IMR322000178 | 0 | 0 | 0 | 0 | 6.596 | 0 | 0 |
| IMR322000223 | 0 | 0 | 0 | 3.635 | 0 | 0 | 0 |
| IMR322000243 | 0 | 0 | 5.779 | 1.527 | 3.043 | 0 | 0 |
| IMR322000316 | 0 | 0 | 0 | 0 | 1.472 | 0 | 0 |
| IMR322000730 | 0 | 0 | 0.923 | 0.488 | 0 | 0 | 2.982 |
| IMR322000775 | 0 | 0 | 0 | 0 | 14.704 | 0 | 0 |
| IMR322000811 | 0 | 0 | 0 | 0 | 50.126 | 0 | 0 |
| IMR322000918 | 0 | 0 | 0 | 0 | 10.395 | 0 | 0 |
| IMR322000935 | 0 | 11.254 | 10.085 | 0 | 5.310 | 0 | 0 |
| IMR322001049 | 0 | 0 | 0 | 10.309 | 20.543 | 0 | 0 |
| IMR322001218 | 0 | 0 | 7.541 | 0 | 0 | 0 | 0 |
| IMR322001435 | 0 | 0 | 0 | 1.672 | 3.332 | 10.602 | 0 |
| IMR322001541 | 0 | 0 | 0 | 3.011 | 0 | 0 | 0 |
| IMR322001584 | 0 | 9.383 | 0 | 2.222 | 0 | 0 | 0 |
| IMR322001600 | 0 | 3.631 | 2.169 | 0.287 | 0.571 | 5.451 | 0 |
| IMR322019070 | 0 | 0 | 18.022 | 0 | 0 | 0 | 0 |
| KIDNE1000145 | 0 | 0 | 0 | 4.922 | 0 | 0 | 0 |
| KIDNE2000085 | 0 | 0 | 6.927 | 0 | 0 | 0 | 0 |
| KIDNE2000252 | 0 | 0 | 0 | 3.042 | 3.031 | 0 | 0 |
| KIDNE2000383 | 0 | 0 | 0 | 8.765 | 17.465 | 0 | 0 |
| KIDNE2000403 | 0 | 0 | 0 | 1.470 | 0 | 0 | 0 |
| KIDNE2000497 | 0 | 0 | 21.122 | 0 | 0 | 0 | 0 |
| KIDNE2000517 | 0 | 0 | 0 | 0 | 5.554 | 0 | 0 |
| KIDNE2000574 | 0 | 0 | 5.042 | 2.664 | 0 | 0 | 16.287 |
| KIDNE2000909 | 0 | 0 | 0 | 3.654 | 7.281 | 0 | 0 |
| KIDNE2001162 | 0 | 0 | 0 | 0.831 | 0 | 0 | 10.155 |
| KIDNE2001467 | 0 | 1.959 | 0 | 1.855 | 0.924 | 0 | 0 |
| KIDNE2001636 | 0 | 0 | 0 | 0 | 33.516 | 0 | 0 |
| KIDNE2002883 | 0 | 0 | 15.278 | 4.036 | 0 | 0 | 0 |
| KIDNE2002980 | 0 | 0 | 21.230 | 0 | 0 | 0 | 0 |
| KIDNE2003305 | 0 | 6.326 | 0 | 0 | 2.985 | 0 | 18.313 |
| KIDNE2004411 | 0 | 0 | 0 | 15.166 | 0 | 0 | 0 |
| KIDNE2004475 | 0 | 0 | 0 | 0 | 9.129 | 0 | 0 |
| KIDNE2004626 | 0 | 0 | 0 | 22.938 | 0 | 0 | 0 |
| KIDNE2005676 | 0 | 0 | 0 | 2.504 | 0 | 0 | 0 |
| KIDNE2006009 | 0 | 27.712 | 0 | 0 | 0 | 0 | 0 |
| KIDNE2006248 | 0 | 0 | 0 | 0 | 0 | 1.754 | 0 |
| KIDNE2007328 | 0 | 6.650 | 0 | 3.149 | 0 | 0 | 0 |
| KIDNE2007352 | 0 | 15.623 | 0 | 3.699 | 0 | 0 | 0 |
| KIDNE2007356 | 0 | 0 | 0 | 0 | 50.427 | 0 | 0 |
| KIDNE2007954 | 0 | 0 | 0 | 3.752 | 0 | 0 | 0 |
| KIDNE2008048 | 0 | 0 | 0 | 2.864 | 0 | 0 | 11.672 |
| KIDNE2008116 | 0 | 0 | 0 | 0 | 0 | 91.653 | 0 |
| KIDNE2008403 | 0 | 0 | 0 | 2.420 | 0 | 0 | 0 |
| KIDNE2010430 | 0 | 0 | 0 | 16.971 | 0 | 0 | 0 |
| KIDNE2012440 | 0 | 0 | 0 | 0 | 0 | 9.988 | 0 |
| KIDNE2013845 | 0 | 0 | 7.529 | 1.989 | 0 | 0 | 0 |
| KIDNE2014290 | 0 | 0 | 0 | 11.229 | 0 | 0 | 0 |
| KIDNE2014325 | 0 | 28.434 | 0 | 0 | 0 | 0 | 0 |
| KIDNE2015445 | 0 | 0 | 0 | 6.114 | 0 | 0 | 0 |
| KIDNE2016371 | 0 | 0 | 0 | 16.034 | 0 | 0 | 0 |
| KIDNE2017040 | 0 | 0 | 0 | 0 | 0 | 18.974 | 0 |
| KIDNE2018493 | 0 | 0 | 0 | 0 | 25.273 | 0 | 0 |
| LIVER1000079 | 0 | 13.171 | 0 | 0 | 0 | 0 | 0 |
| LIVER1000132 | 0 | 0 | 0 | 0 | 1.775 | 0 | 10.888 |
| LIVER2000416 | 0 | 0 | 0 | 0 | 0 | 12.767 | 49.230 |
| LIVER2000446 | 0 | 0 | 0 | 7.321 | 0 | 0 | 0 |
| LIVER2001539 | 0 | 0 | 0 | 0 | 0 | 28.099 | 0 |
| LIVER2001608 | 0 | 0 | 0 | 0 | 9.315 | 7.410 | 0 |
| LIVER2002842 | 0 | 0 | 0 | 3.397 | 0 | 0 | 0 |
| LIVER2005028 | 0 | 0 | 0 | 0 | 26.795 | 0 | 0 |
| LIVER2005789 | 0 | 0 | 0 | 1.602 | 0 | 0 | 19.587 |
| LIVER2005981 | 0 | 0 | 0 | 0 | 10.154 | 0 | 0 |
| LIVER2007783 | 0 | 0 | 13.821 | 0 | 0 | 0 | 0 |
| MAMGL1000032 | 0 | 0 | 0 | 0.287 | 0 | 0 | 0 |
| MAMGL1000035 | 0 | 0 | 0 | 0 | 0 | 1.136 | 0 |
| MAMGL1000096 | 0 | 2.265 | 0 | 0 | 0 | 0 | 0 |
| MAMGL1000173 | 0 | 0 | 0 | 0 | 1.880 | 0 | 0 |
| MESAN1000101 | 0 | 0 | 0 | 20.545 | 0 | 0 | 0 |
| MESAN1000126 | 0 | 0 | 0 | 9.534 | 0 | 0 | 0 |
| MESAN2000264 | 0 | 14.812 | 0 | 0 | 0 | 0 | 0 |
| MESAN2000267 | 0 | 0 | 0 | 2.915 | 0 | 0 | 0 |
| MESAN2000457 | 0 | 0 | 0 | 63.433 | 0 | 0 | 0 |
| MESAN2000572 | 0 | 0 | 0 | 1.820 | 0 | 0 | 0 |
| MESAN2000608 | 0 | 5.911 | 0 | 0 | 8.366 | 0 | 0 |
| MESAN2000620 | 0 | 0 | 0 | 32.430 | 0 | 0 | 0 |
| MESAN2001154 | 0 | 10.015 | 0 | 2.371 | 0 | 0 | 0 |
| MESAN2001450 | 0 | 0 | 0 | 0 | 0 | 16.273 | 0 |
| MESAN2002086 | 0 | 0 | 2.804 | 2.223 | 1.476 | 7.047 | 0 |
| MESAN2002724 | 0 | 0 | 0 | 4.924 | 0 | 0 | 0 |
| MESAN2002790 | 0 | 0 | 0 | 13.058 | 0 | 0 | 0 |
| MESAN2002940 | 0 | 0 | 0 | 0 | 0 | 17.945 | 0 |
| MESAN2003035 | 0 | 0 | 0 | 12.755 | 0 | 0 | 0 |
| MESAN2003058 | 0 | 0 | 0 | 0 | 0 | 33.793 | 0 |
| MESAN2003444 | 0 | 0 | 0 | 0 | 13.211 | 0 | 0 |
| MESAN2003622 | 0 | 0 | 0 | 1.070 | 0 | 0 | 0 |
| MESAN2005303 | 0 | 0 | 0 | 14.099 | 0 | 0 | 0 |
| MESAN2005766 | 0 | 0 | 0 | 0 | 3.497 | 0 | 0 |
| MESAN2005957 | 0 | 0 | 0 | 17.574 | 0 | 0 | 0 |
| MESAN2005958 | 0 | 0 | 0 | 9.585 | 0 | 0 | 0 |
| MESAN2006563 | 0 | 0 | 0 | 0 | 2.449 | 0 | 0 |
| MESAN2006743 | 0 | 0 | 0 | 0 | 0 | 21.750 | 0 |
| MESAN2008415 | 0 | 0 | 0 | 0 | 0 | 60.344 | 0 |
| MESAN2008936 | 0 | 0 | 0 | 0 | 0 | 22.448 | 0 |
| MESAN2009580 | 0 | 0 | 0 | 0 | 0 | 6.266 | 0 |
| MESAN2011627 | 0 | 28.288 | 0 | 0 | 0 | 0 | 0 |
| MESAN2011984 | 0 | 12.823 | 0 | 3.036 | 6.050 | 0 | 0 |
| MESAN2012054 | 0 | 0 | 0 | 4.540 | 0 | 0 | 0 |
| MESAN2012113 | 0 | 0 | 0 | 0 | 0 | 33.291 | 0 |
| MESAN2018699 | 0 | 0 | 0 | 27.399 | 0 | 0 | 0 |
| NB9N41000011 | 0 | 0 | 0 | 3.788 | 0 | 0 | 0 |
| NB9N42000342 | 0 | 0 | 0 | 0 | 0 | 4.068 | 0 |
| NHNPC2000187 | 0 | 0 | 3.048 | 2.416 | 0 | 0 | 0 |
| NHNPC2000206 | 0 | 0 | 0 | 2.444 | 0 | 0 | 0 |
| NHNPC2001931 | 0 | 0 | 9.644 | 1.699 | 0 | 0 | 10.384 |
| NOVAR1000091 | 0 | 0 | 0 | 3.446 | 0 | 0 | 0 |
| NOVAR2000038 | 0 | 0 | 0 | 0 | 2.203 | 0 | 0 |
| NT2NE1000163 | 0 | 0 | 2.728 | 0.721 | 0 | 0 | 0 |
| NT2NE2000056 | 0 | 0 | 0 | 0.699 | 0 | 0 | 0 |
| NT2NE2000174 | 0 | 0 | 0 | 0.679 | 0 | 2.153 | 0 |
| NT2NE2000195 | 0 | 11.554 | 0 | 0 | 5.451 | 0 | 0 |
| NT2NE2000259 | 0 | 21.143 | 0 | 0 | 0 | 0 | 0 |
| NT2NE2000260 | 0 | 5.448 | 0.814 | 0.430 | 0 | 0 | 0 |
| NT2NE2000327 | 0 | 0 | 0 | 4.477 | 0 | 0 | 0 |
| NT2NE2000383 | 0 | 11.422 | 0 | 2.704 | 0 | 0 | 0 |
| NT2NE2000384 | 0 | 0 | 0 | 4.096 | 0 | 12.987 | 0 |
| NT2NE2000575 | 0 | 0 | 3.239 | 0.428 | 0.853 | 1.356 | 0 |
| NT2NE2000707 | 0 | 0 | 0 | 0 | 1.187 | 1.888 | 0 |
| NT2NE2000963 | 0 | 0 | 1.545 | 0.408 | 0 | 1.294 | 9.982 |
| NT2NE2001000 | 0 | 0 | 5.797 | 0 | 3.052 | 0 | 0 |
| NT2NE2001337 | 0 | 0 | 0 | 8.087 | 0 | 25.641 | 0 |
| NT2NE2001435 | 0 | 7.991 | 0 | 0 | 3.770 | 0 | 0 |
| NT2NE2001530 | 0 | 0 | 0 | 12.452 | 0 | 0 | 0 |
| NT2NE2001545 | 0 | 13.468 | 0 | 3.189 | 6.354 | 0 | 0 |
| NT2NE2001655 | 0 | 0 | 0 | 2.492 | 4.965 | 0 | 0 |
| NT2NE2001793 | 0 | 0 | 0 | 3.692 | 0 | 0 | 0 |
| NT2NE2002870 | 0 | 0 | 0 | 0 | 0 | 12.880 | 0 |
| NT2NE2004716 | 0 | 0 | 0 | 0 | 0 | 0 | 41.761 |
| NT2NE2005371 | 0 | 0 | 0 | 0 | 19.554 | 0 | 0 |
| NT2NE2005441 | 0 | 0 | 0 | 0 | 0 | 0 | 67.598 |
| NT2NE2005688 | 0 | 0 | 5.030 | 1.329 | 0 | 4.213 | 0 |
| NT2NE2005876 | 0 | 11.088 | 0 | 0 | 0 | 0 | 0 |
| NT2NE2006458 | 0 | 0 | 0 | 0 | 0 | 7.976 | 0 |
| NT2NE2006478 | 0 | 0 | 0 | 19.122 | 0 | 0 | 0 |
| NT2NE2010842 | 0 | 14.174 | 0 | 0 | 0 | 10.641 | 0 |
| NT2NE2011119 | 0 | 34.804 | 0 | 0 | 0 | 0 | 0 |
| NT2NE2012928 | 0 | 0 | 0 | 0 | 30.876 | 0 | 0 |
| NT2NE2014104 | 0 | 0 | 0 | 2.987 | 0 | 0 | 0 |
| NT2RI1000027 | 0 | 0 | 0 | 1.799 | 0 | 0 | 0 |
| NT2RI2000064 | 0 | 0 | 7.251 | 0.958 | 0 | 6.074 | 11.711 |
| NT2RI2000107 | 0 | 52.232 | 0 | 0 | 0 | 0 | 0 |
| NT2RI2000255 | 0 | 0 | 0 | 2.130 | 8.490 | 0 | 0 |
| NT2RI2000282 | 0 | 0 | 0 | 0 | 1.122 | 1.786 | 0 |
| NT2RI2000671 | 0 | 0 | 0 | 0 | 3.730 | 0 | 0 |
| NT2RI2000685 | 0 | 0 | 6.674 | 0 | 3.514 | 0 | 0 |
| NT2RI2000689 | 0 | 0 | 0 | 0 | 10.967 | 0 | 0 |
| NT2RI2000727 | 0 | 0 | 0 | 0 | 0 | 1.460 | 0 |
| NT2RI2000822 | 0 | 0 | 71.758 | 0 | 0 | 0 | 0 |
| NT2RI2000974 | 0 | 0 | 14.530 | 0 | 0 | 0 | 0 |
| NT2RI2001230 | 0 | 5.798 | 0 | 1.373 | 0 | 4.352 | 0 |
| NT2RI2001342 | 0 | 0 | 0 | 2.809 | 0 | 0 | 0 |
| NT2RI2001540 | 0 | 2.139 | 1.917 | 1.013 | 0.807 | 0.642 | 3.716 |
| NT2RI2001595 | 0 | 0 | 0 | 0 | 28.159 | 0 | 0 |
| NT2RI2001657 | 0 | 0 | 0 | 1.904 | 1.897 | 3.019 | 0 |
| NT2RI2001859 | 0 | 7.294 | 6.537 | 0 | 3.441 | 0 | 0 |
| NT2RI2002091 | 0 | 0.202 | 0.361 | 1.552 | 0.618 | 1.665 | 1.751 |
| NT2RI2002316 | 0 | 0 | 5.401 | 0 | 0 | 0 | 0 |
| NT2RI2002359 | 0 | 61.860 | 0 | 0 | 0 | 0 | 0 |
| NT2RI2002391 | 0 | 0 | 0 | 1.443 | 0 | 0 | 0 |
| NT2RI2002530 | 0 | 0 | 0 | 0 | 0 | 34.059 | 0 |
| NT2RI2002554 | 0 | 0 | 0 | 3.227 | 0 | 0 | 0 |
| NT2RI2002654 | 0 | 4.416 | 0 | 1.045 | 4.167 | 0 | 0 |
| NT2RI2002699 | 0 | 0 | 0 | 20.348 | 0 | 0 | 0 |
| NT2RI2002729 | 0 | 15.809 | 0 | 0 | 0 | 0 | 0 |
| NT2RI2002819 | 0 | 27.984 | 0 | 0 | 0 | 0 | 0 |
| NT2RI2002847 | 0 | 9.435 | 0 | 0 | 4.452 | 0 | 0 |
| NT2RI2002865 | 0 | 0 | 0 | 12.068 | 0 | 0 | 0 |
| NT2RI2002958 | 0 | 0 | 0 | 0 | 13.657 | 0 | 0 |
| NT2RI2003019 | 0 | 0 | 0 | 0 | 18.547 | 0 | 0 |
| NT2RI2003051 | 0 | 0 | 0 | 10.932 | 0 | 0 | 0 |
| NT2RI2003304 | 0 | 1.973 | 0 | 0.467 | 0 | 0 | 0 |
| NT2RI2003317 | 0 | 0 | 0 | 0 | 5.590 | 0 | 0 |
| NT2RI2003338 | 0 | 0 | 6.821 | 0 | 0 | 5.713 | 0 |
| NT2RI2003407 | 0 | 0 | 0 | 4.308 | 0 | 0 | 0 |
| NT2RI2003420 | 0 | 0 | 0 | 2.741 | 0 | 0 | 0 |
| NT2RI2003556 | 0 | 2.860 | 0 | 0 | 1.349 | 0 | 0 |
| NT2RI2003695 | 0 | 0 | 0 | 1.401 | 5.585 | 0 | 0 |
| NT2RI2003738 | 0 | 0 | 0 | 0 | 3.102 | 0 | 0 |
| NT2RI2003921 | 0 | 0 | 0 | 0 | 1.682 | 2.676 | 0 |
| NT2RI2003993 | 0 | 0 | 0 | 6.756 | 0 | 0 | 0 |
| NT2RI2004230 | 0 | 0 | 0 | 0 | 4.069 | 6.474 | 0 |
| NT2RI2004398 | 0 | 0 | 0 | 8.866 | 0 | 0 | 0 |
| NT2RI2004608 | 0 | 0 | 0 | 6.584 | 0 | 0 | 0 |
| NT2RI2005061 | 0 | 32.789 | 0 | 7.763 | 0 | 0 | 0 |
| NT2RI2005115 | 0 | 0 | 0 | 0 | 0 | 34.481 | 0 |
| NT2RI2005116 | 0 | 9.608 | 0 | 0 | 4.533 | 0 | 0 |
| NT2RI2005335 | 0 | 2.910 | 0 | 1.378 | 1.373 | 0 | 0 |
| NT2RI2005353 | 0 | 0 | 0 | 4.100 | 0 | 0 | 0 |
| NT2RI2005405 | 0 | 2.110 | 0 | 0 | 0.996 | 6.336 | 0 |
| NT2RI2005723 | 0 | 0 | 3.380 | 0 | 1.780 | 0 | 0 |
| NT2RI2005811 | 0 | 11.516 | 0 | 0 | 5.433 | 0 | 0 |
| NT2RI2005814 | 0 | 0 | 0 | 0 | 0 | 7.349 | 0 |
| NT2RI2005966 | 0 | 0 | 0 | 0 | 66.119 | 0 | 0 |
| NT2RI2006070 | 0 | 0 | 0 | 0 | 7.288 | 11.597 | 0 |
| NT2RI2006553 | 0 | 0 | 0 | 0 | 13.117 | 0 | 0 |
| NT2RI2006565 | 0 | 0 | 0 | 10.634 | 0 | 0 | 0 |
| NT2RI2006647 | 0 | 0 | 0 | 8.161 | 0 | 0 | 0 |
| NT2RI2006682 | 0 | 0 | 16.576 | 0 | 0 | 13.885 | 0 |
| NT2RI2006686 | 0 | 0 | 78.754 | 0 | 0 | 0 | 0 |
| NT2RI2006825 | 0 | 0 | 0 | 9.758 | 0 | 0 | 0 |
| NT2RI2006855 | 0 | 0 | 58.068 | 0 | 0 | 0 | 0 |
| NT2RI2006856 | 0 | 0 | 0 | 0.834 | 1.661 | 0 | 10.191 |
| NT2RI2007054 | 0 | 0 | 0 | 0 | 4.604 | 0 | 0 |
| NT2RI2007133 | 0 | 0 | 0 | 0 | 1.391 | 0 | 0 |
| NT2RI2007377 | 0 | 0 | 0 | 2.084 | 0 | 0 | 0 |
| NT2RI2007384 | 0 | 0 | 2.917 | 1.541 | 0 | 4.887 | 0 |
| NT2RI2007498 | 0 | 0 | 0 | 3.629 | 0 | 0 | 0 |
| NT2RI2007589 | 0 | 0 | 7.194 | 0 | 0 | 0 | 0 |
| NT2RI2007853 | 0 | 0 | 0 | 0 | 0 | 25.267 | 0 |
| NT2RI2007879 | 0 | 0 | 0 | 0 | 5.629 | 0 | 0 |
| NT2RI2007987 | 0 | 0 | 12.129 | 0 | 0 | 0 | 0 |
| NT2RI2008141 | 0 | 0 | 0 | 7.611 | 0 | 0 | 0 |
| NT2RI2008221 | 0 | 8.333 | 0 | 0 | 0 | 0 | 0 |
| NT2RI2008336 | 0 | 0 | 0 | 0 | 4.262 | 0 | 0 |
| NT2RI2008396 | 0 | 0 | 0 | 1.569 | 1.563 | 0 | 0 |
| NT2RI2008526 | 0 | 0 | 0 | 0 | 0 | 8.652 | 0 |
| NT2RI2008749 | 0 | 0 | 7.617 | 2.012 | 0 | 0 | 0 |
| NT2RI2008791 | 0 | 0 | 0 | 0 | 4.138 | 6.583 | 0 |
| NT2RI2008812 | 0 | 0 | 0 | 0 | 0 | 40.851 | 0 |
| NT2RI2009037 | 0 | 6.337 | 0 | 0 | 0 | 4.757 | 0 |
| NT2RI2009065 | 0 | 3.511 | 0 | 0 | 1.656 | 0 | 0 |
| NT2RI2009239 | 0 | 0 | 0 | 2.488 | 0 | 0 | 0 |
| NT2RI2009269 | 0 | 0 | 0 | 3.517 | 0 | 5.576 | 0 |
| NT2RI2009281 | 0 | 0 | 0 | 0 | 4.991 | 0 | 0 |
| NT2RI2009583 | 0 | 0 | 4.521 | 0.398 | 1.587 | 0 | 0 |
| NT2RI2012350 | 0 | 0 | 0 | 0.712 | 0 | 2.258 | 0 |
| NT2RI2012990 | 0 | 0 | 0 | 0 | 0 | 75.640 | 0 |
| NT2RI2013345 | 0 | 0 | 63.707 | 0 | 0 | 0 | 0 |
| NT2RI2014247 | 0 | 0 | 0 | 0 | 54.091 | 0 | 0 |
| NT2RI2015342 | 0 | 0 | 0 | 2.677 | 0 | 0 | 0 |
| NT2RI2015533 | 0 | 0 | 10.469 | 0 | 0 | 0 | 0 |
| NT2RI3006284 | 0 | 0 | 0 | 3.682 | 0 | 0 | 0 |
| NT2RI3006340 | 0 | 0 | 55.006 | 0 | 0 | 0 | 0 |
| NT2RI3006666 | 0 | 0 | 0 | 37.157 | 0 | 0 | 0 |
| NT2RI3007543 | 0 | 0 | 5.715 | 1.510 | 0 | 0 | 0 |
| NT2RP6000005 | 0 | 16.533 | 0 | 0 | 0 | 0 | 0 |
| NT2RP6000032 | 0 | 58.947 | 0 | 0 | 0 | 0 | 0 |
| NT2RP6000039 | 0 | 0 | 0 | 12.765 | 0 | 0 | 0 |
| NT2RP6000072 | 0 | 0 | 10.884 | 0 | 0 | 0 | 0 |
| NT2RP6000077 | 0 | 0 | 0 | 22.879 | 0 | 0 | 0 |
| NT2RP6000078 | 0 | 5.405 | 0 | 0 | 0 | 0 | 0 |
| NT2RP6000110 | 0 | 0 | 0 | 4.873 | 0 | 0 | 0 |
| NT2RP6000123 | 0 | 0 | 0 | 0.697 | 5.553 | 2.209 | 0 |
| NT2RP7000069 | 0 | 0 | 0 | 11.990 | 0 | 0 | 0 |
| NT2RP7000076 | 0 | 9.162 | 0 | 0 | 8.645 | 0 | 0 |
| NT2RP7000173 | 0 | 0 | 0 | 0.989 | 1.972 | 0 | 0 |
| NT2RP7000271 | 0 | 0 | 0 | 5.398 | 0 | 0 | 0 |
| NT2RP7000477 | 0 | 0 | 13.327 | 0 | 0 | 0 | 0 |
| NT2RP7000600 | 0 | 0 | 0 | 3.944 | 0 | 0 | 0 |
| NT2RP7001166 | 0 | 0 | 0 | 1.331 | 0 | 0 | 0 |
| NT2RP7001283 | 0 | 0 | 0 | 0 | 1.996 | 0 | 0 |
| NT2RP7001962 | 0 | 0 | 0 | 9.455 | 0 | 0 | 0 |
| NT2RP7002028 | 0 | 0 | 0 | 0 | 0 | 11.339 | 0 |
| NT2RP7002379 | 0 | 0 | 0 | 0 | 1.785 | 2.840 | 0 |
| NT2RP7002619 | 0 | 8.190 | 0 | 1.939 | 0 | 6.148 | 0 |
| NT2RP7002982 | 0 | 0 | 0 | 0 | 55.144 | 0 | 0 |
| NT2RP7003203 | 0 | 13.884 | 0 | 3.287 | 0 | 0 | 0 |
| NT2RP7003261 | 0 | 0 | 0 | 2.418 | 0 | 0 | 0 |
| NT2RP7003319 | 0 | 0 | 6.146 | 3.247 | 0 | 0 | 0 |
| NT2RP7003629 | 0 | 0 | 0 | 20.137 | 0 | 0 | 0 |
| NT2RP7003647 | 0 | 0 | 0 | 6.283 | 0 | 0 | 0 |
| NT2RP7003688 | 0 | 0 | 0 | 2.628 | 2.619 | 0 | 0 |
| NT2RP7003724 | 0 | 0 | 0 | 16.434 | 0 | 0 | 0 |
| NT2RP7004114 | 0 | 0 | 0 | 9.924 | 0 | 0 | 0 |
| NT2RP7004173 | 0 | 0 | 0 | 4.077 | 0 | 0 | 0 |
| NT2RP7004196 | 0 | 0 | 0 | 0 | 0 | 7.393 | 0 |
| NT2RP7004373 | 0 | 0 | 0 | 6.284 | 4.174 | 0 | 0 |
| NT2RP7004728 | 0 | 11.814 | 0 | 2.797 | 0 | 0 | 0 |
| NT2RP7004751 | 0 | 0 | 0 | 0 | 0 | 2.641 | 0 |
| NT2RP7004925 | 0 | 0 | 0 | 2.247 | 4.478 | 0 | 0 |
| NT2RP7004946 | 0 | 6.471 | 0 | 3.064 | 0 | 0 | 0 |
| NT2RP7005513 | 0 | 0 | 11.385 | 0 | 0 | 9.537 | 0 |
| NT2RP7005675 | 0 | 0 | 0 | 5.176 | 0 | 0 | 0 |
| NT2RP7005750 | 0 | 0 | 0 | 0 | 25.379 | 0 | 0 |
| NT2RP7006033 | 0 | 0 | 0 | 13.681 | 0 | 0 | 0 |
| NT2RP7006075 | 0 | 0 | 0 | 9.326 | 0 | 0 | 0 |
| NT2RP7006141 | 0 | 0 | 0 | 0 | 2.619 | 0 | 0 |
| NT2RP7006188 | 0 | 0 | 0 | 9.266 | 0 | 0 | 0 |
| NT2RP7006619 | 0 | 0 | 0 | 3.928 | 0 | 0 | 0 |
| NT2RP7006980 | 0 | 0 | 0 | 30.014 | 0 | 0 | 0 |
| NT2RP7007154 | 0 | 0 | 0 | 1.015 | 0 | 0 | 0 |
| NT2RP7007177 | 0 | 0 | 0 | 0 | 0 | 7.684 | 0 |
| NT2RP7007387 | 0 | 0 | 0 | 3.653 | 0 | 0 | 0 |
| NT2RP7007537 | 0 | 0 | 8.283 | 0 | 4.361 | 0 | 0 |
| NT2RP7007975 | 0 | 0 | 0 | 2.429 | 0 | 0 | 0 |
| NT2RP7008161 | 0 | 0 | 0 | 11.173 | 0 | 0 | 0 |
| NT2RP7008167 | 0 | 0 | 0 | 0 | 3.219 | 0 | 0 |
| NT2RP7008190 | 0 | 0 | 0 | 2.361 | 4.704 | 0 | 0 |
| NT2RP7008396 | 0 | 0 | 0 | 21.908 | 0 | 0 | 0 |
| NT2RP7008543 | 0 | 0 | 0 | 9.792 | 9.756 | 0 | 0 |
| NT2RP7009097 | 0 | 0 | 0 | 3.200 | 0 | 0 | 0 |
| NT2RP7009147 | 0 | 0 | 0 | 2.835 | 0 | 0 | 0 |
| NT2RP7009149 | 0 | 0 | 8.058 | 0 | 0 | 0 | 0 |
| NT2RP7009259 | 0 | 0 | 0 | 4.000 | 0 | 0 | 0 |
| NT2RP7009394 | 0 | 0 | 0 | 2.152 | 0 | 0 | 0 |
| NT2RP7009482 | 0 | 0 | 0 | 0 | 1.644 | 2.615 | 0 |
| NT2RP7009498 | 0 | 0 | 0 | 3.587 | 0 | 0 | 0 |
| NT2RP7014910 | 0 | 0 | 0 | 2.128 | 0 | 0 | 0 |
| NT2RP7015512 | 0 | 0 | 0 | 34.509 | 0 | 0 | 0 |
| NT2RP7019064 | 0 | 0 | 0 | 45.711 | 0 | 0 | 0 |
| NT2RP8000435 | 0 | 0 | 0 | 23.746 | 0 | 0 | 0 |
| NT2RP8007920 | 0 | 14.869 | 0 | 0 | 0 | 0 | 0 |
| NTONG1000033 | 0 | 0 | 0 | 2.180 | 0 | 0 | 0 |
| NTONG1000052 | 0 | 0 | 35.389 | 0 | 5.081 | 0 | 0 |
| NTONG1000098 | 0 | 0 | 0 | 1.134 | 0 | 3.595 | 0 |
| NTONG1000123 | 0 | 0 | 31.366 | 0 | 0 | 0 | 0 |
| NTONG1000182 | 0 | 0 | 25.018 | 2.203 | 4.390 | 0 | 0 |
| NTONG1000257 | 0 | 0 | 0 | 0 | 0 | 6.210 | 0 |
| NTONG1000264 | 0 | 7.326 | 0 | 0 | 0 | 5.500 | 0 |
| NTONG2000265 | 0 | 0 | 0 | 1.517 | 0 | 0 | 0 |
| NTONG2000334 | 0 | 0 | 0 | 0 | 7.251 | 0 | 0 |
| NTONG2000858 | 0 | 0 | 58.364 | 0 | 0 | 0 | 0 |
| NTONG2000876 | 0 | 10.466 | 0 | 4.956 | 4.938 | 7.857 | 0 |
| NTONG2000878 | 0 | 0 | 0 | 2.102 | 0 | 0 | 25.694 |
| NTONG2000977 | 0 | 0 | 0 | 0 | 0 | 5.547 | 0 |
| NTONG2000985 | 0 | 0 | 12.558 | 0 | 0 | 0 | 0 |
| NTONG2001220 | 0 | 0 | 0 | 0 | 20.407 | 0 | 0 |
| NTONG2001550 | 0 | 0 | 0 | 0 | 12.343 | 0 | 0 |
| NTONG2001567 | 0 | 0 | 0 | 0 | 3.262 | 1.730 | 20.015 |
| NTONG2001612 | 0 | 0 | 0 | 0 | 0 | 6.334 | 0 |
| NTONG2002948 | 0 | 0 | 14.957 | 0 | 7.874 | 0 | 0 |
| NTONG2003454 | 0 | 0 | 0 | 10.611 | 0 | 0 | 0 |
| NTONG2003852 | 0 | 50.493 | 0 | 0 | 0 | 0 | 0 |
| NTONG2004614 | 0 | 0 | 0 | 10.539 | 0 | 0 | 0 |
| NTONG2004844 | 0 | 0 | 0 | 0 | 0 | 9.144 | 0 |
| NTONG2005391 | 0 | 0 | 0 | 12.447 | 0 | 0 | 0 |
| NTONG2005497 | 0 | 0 | 0 | 0 | 0 | 1.546 | 0 |
| NTONG2005520 | 0 | 0 | 0 | 1.185 | 0 | 3.756 | 0 |
| NTONG2005801 | 0 | 0 | 0 | 9.512 | 0 | 0 | 0 |
| NTONG2006484 | 0 | 0 | 0 | 0 | 30.659 | 0 | 0 |
| NTONG2006783 | 0 | 0 | 76.282 | 0 | 0 | 0 | 0 |
| NTONG2007034 | 0 | 0 | 47.753 | 0 | 0 | 0 | 0 |
| NTONG2007658 | 0 | 15.042 | 0 | 0 | 0 | 0 | 0 |
| NTONG2007756 | 0 | 0 | 45.466 | 0 | 0 | 0 | 0 |
| NTONG2008483 | 0 | 0 | 5.382 | 2.844 | 0 | 4.508 | 0 |
| NTONG2008944 | 0 | 0 | 0 | 25.982 | 0 | 0 | 0 |
| NTONG2009060 | 0 | 0 | 18.770 | 0 | 0 | 0 | 0 |
| OCBBF1000146 | 0 | 0 | 0 | 0 | 3.059 | 0 | 0 |
| OCBBF1000188 | 0 | 0 | 0 | 3.706 | 0 | 0 | 0 |
| OCBBF1000315 | 0 | 0 | 0 | 15.571 | 0 | 0 | 0 |
| OCBBF2000013 | 0 | 0 | 0 | 0 | 0 | 10.980 | 0 |
| OCBBF2000015 | 0 | 0 | 0 | 8.448 | 0 | 0 | 0 |
| OCBBF2000824 | 0 | 0 | 0 | 0 | 21.310 | 0 | 0 |
| OCBBF2000846 | 0 | 0 | 0 | 1.302 | 0 | 0 | 0 |
| OCBBF2000986 | 0 | 0 | 0 | 3.430 | 0 | 0 | 0 |
| OCBBF2001210 | 0 | 0 | 0 | 6.453 | 0 | 0 | 0 |
| OCBBF2001307 | 0 | 0 | 0 | 2.960 | 0 | 0 | 0 |
| OCBBF2001492 | 0 | 5.157 | 4.622 | 3.663 | 2.433 | 3.871 | 0 |
| OCBBF2001586 | 0 | 0 | 0 | 0 | 12.716 | 0 | 0 |
| OCBBF2001639 | 0 | 0 | 0 | 0 | 16.676 | 0 | 0 |
| OCBBF2001687 | 0 | 0 | 0 | 3.423 | 0 | 0 | 0 |
| OCBBF2001983 | 0 | 0 | 0 | 64.284 | 0 | 0 | 0 |
| OCBBF2002086 | 0 | 0 | 0 | 11.467 | 0 | 0 | 0 |
| OCBBF2002626 | 0 | 0 | 0 | 0 | 2.995 | 0 | 0 |
| OCBBF2003518 | 0 | 0 | 0 | 1.835 | 0 | 0 | 0 |
| OCBBF2004273 | 0 | 0 | 0 | 1.595 | 0 | 0 | 0 |
| OCBBF2005956 | 0 | 21.338 | 0 | 0 | 0 | 0 | 0 |
| OCBBF2006005 | 0 | 35.834 | 0 | 8.484 | 0 | 0 | 0 |
| OCBBF2006148 | 0 | 0 | 0 | 0 | 0 | 38.212 | 0 |
| OCBBF2006849 | 0 | 0 | 0 | 0 | 7.167 | 0 | 0 |
| OCBBF2007354 | 0 | 0 | 0 | 1.788 | 0 | 0 | 0 |
| OCBBF2007622 | 0 | 0 | 0 | 0 | 0 | 0 | 79.879 |
| OCBBF2007829 | 0 | 0 | 0 | 1.954 | 0 | 0 | 0 |
| OCBBF2009095 | 0 | 0 | 0 | 0 | 0 | 37.084 | 0 |
| OCBBF2009603 | 0 | 0 | 0 | 58.892 | 0 | 0 | 0 |
| OCBBF2009772 | 0 | 0 | 7.932 | 0 | 0 | 0 | 0 |
| OCBBF2011887 | 0 | 0 | 0 | 8.370 | 0 | 0 | 0 |
| OCBBF2012095 | 0 | 0 | 0 | 27.233 | 0 | 0 | 0 |
| OCBBF2012714 | 0 | 43.630 | 0 | 0 | 0 | 0 | 0 |
| OCBBF2012821 | 0 | 0 | 0 | 4.453 | 0 | 0 | 0 |
| OCBBF2014576 | 0 | 0 | 0 | 6.503 | 0 | 0 | 0 |
| OCBBF2015503 | 0 | 0 | 0 | 13.355 | 0 | 0 | 0 |
| OCBBF2016928 | 0 | 0 | 0 | 4.874 | 0 | 0 | 0 |
| OCBBF2017035 | 0 | 0 | 8.166 | 0 | 0 | 0 | 0 |
| OCBBF2017055 | 0 | 0 | 0 | 31.933 | 0 | 0 | 0 |
| OCBBF2017398 | 0 | 9.669 | 0 | 0 | 0 | 0 | 0 |
| OCBBF2017458 | 0 | 0 | 0 | 0 | 0 | 31.413 | 0 |
| OCBBF2017754 | 0 | 0 | 0 | 6.682 | 0 | 0 | 0 |
| OCBBF2017791 | 0 | 0 | 0 | 11.397 | 0 | 0 | 0 |
| OCBBF2017888 | 0 | 0 | 0 | 30.321 | 0 | 0 | 0 |
| OCBBF2018012 | 0 | 0 | 0 | 9.990 | 0 | 0 | 0 |
| OCBBF2018873 | 0 | 0 | 0 | 0 | 4.914 | 0 | 0 |
| OCBBF2018956 | 0 | 0 | 0 | 0 | 0 | 19.099 | 0 |
| OCBBF2024850 | 0 | 0 | 0 | 7.910 | 0 | 0 | 0 |
| OCBBF2026368 | 0 | 0 | 0 | 14.706 | 0 | 0 | 0 |
| OCBBF3000323 | 0 | 0 | 0 | 5.919 | 11.795 | 0 | 0 |
| OCBBF3001333 | 0 | 0 | 0 | 5.718 | 0 | 0 | 0 |
| OCBBF3004487 | 0 | 0 | 0 | 8.063 | 0 | 0 | 0 |
| PANCR1000012 | 100 | 0 | 0 | 0 | 0 | 0 | 0 |
| PANCR1000021 | 100 | 0 | 0 | 0 | 0 | 0 | 0 |
| PANCR1000081 | 98.068 | 0 | 0 | 0 | 0 | 0 | 0 |
| PANCR1000086 | 100 | 0 | 0 | 0 | 0 | 0 | 0 |
| PANCR1000091 | 98.673 | 0 | 0 | 0 | 0 | 0 | 0 |
| PANCR1000185 | 100 | 0 | 0 | 0 | 0 | 0 | 0 |
| PEBLM1000024 | 0 | 100 | 0 | 0 | 0 | 0 | 0 |
| PEBLM1000029 | 0 | 100 | 0 | 0 | 0 | 0 | 0 |
| PEBLM1000034 | 0 | 52.261 | 0 | 0 | 0 | 0 | 0 |
| PEBLM1000062 | 0 | 100 | 0 | 0 | 0 | 0 | 0 |
| PEBLM1000066 | 0 | 35.622 | 0 | 0 | 16.807 | 0 | 0 |
| PEBLM1000068 | 0 | 100 | 0 | 0 | 0 | 0 | 0 |
| PEBLM1000071 | 0 | 100 | 0 | 0 | 0 | 0 | 0 |
| PEBLM1000083 | 0 | 100 | 0 | 0 | 0 | 0 | 0 |
| PEBLM1000144 | 0 | 45.080 | 0 | 0 | 0 | 0 | 0 |
| PEBLM1000147 | 0 | 100 | 0 | 0 | 0 | 0 | 0 |
| PEBLM1000174 | 0 | 35.947 | 0 | 8.511 | 0 | 0 | 0 |
| PEBLM1000180 | 0 | 100 | 0 | 0 | 0 | 0 | 0 |
| PEBLM2000030 | 0 | 27.664 | 0 | 0 | 0 | 0 | 0 |
| PEBLM2000112 | 0 | 100 | 0 | 0 | 0 | 0 | 0 |
| PEBLM2000126 | 0 | 81.206 | 0 | 0 | 0 | 0 | 0 |
| PEBLM2000147 | 0 | 19.178 | 0 | 0 | 0 | 0 | 0 |
| PEBLM2000170 | 0 | 100 | 0 | 0 | 0 | 0 | 0 |
| PEBLM2000180 | 0 | 100 | 0 | 0 | 0 | 0 | 0 |
| PEBLM2000213 | 0 | 100 | 0 | 0 | 0 | 0 | 0 |
| PEBLM2000222 | 0 | 8.732 | 0 | 0 | 0 | 0 | 0 |
| PEBLM2000248 | 0 | 100 | 0 | 0 | 0 | 0 | 0 |
| PEBLM2000267 | 0 | 10.569 | 0 | 0 | 0 | 0 | 0 |
| PEBLM2000270 | 0 | 100 | 0 | 0 | 0 | 0 | 0 |
| PEBLM2000308 | 0 | 14.901 | 0 | 3.528 | 0 | 0 | 0 |
| PEBLM2000321 | 0 | 100 | 0 | 0 | 0 | 0 | 0 |
| PEBLM2000326 | 0 | 40.802 | 0 | 0 | 0 | 0 | 0 |
| PEBLM2000333 | 0 | 100 | 0 | 0 | 0 | 0 | 0 |
| PEBLM2000338 | 0 | 71.537 | 0 | 0 | 0 | 0 | 0 |
| PEBLM2000395 | 0 | 27.366 | 6.131 | 0 | 3.228 | 0 | 0 |
| PEBLM2000479 | 0 | 34.988 | 0 | 0 | 0 | 0 | 0 |
| PEBLM2000502 | 0 | 100 | 0 | 0 | 0 | 0 | 0 |
| PEBLM2001072 | 0 | 13.631 | 0 | 0 | 6.431 | 0 | 0 |
| PEBLM2001312 | 0 | 100 | 0 | 0 | 0 | 0 | 0 |
| PEBLM2001465 | 0 | 100 | 0 | 0 | 0 | 0 | 0 |
| PEBLM2001488 | 0 | 100 | 0 | 0 | 0 | 0 | 0 |
| PEBLM2001803 | 0 | 77.704 | 0 | 0 | 0 | 0 | 0 |
| PEBLM2002432 | 0 | 100 | 0 | 0 | 0 | 0 | 0 |
| PEBLM2002455 | 0 | 66.882 | 0 | 0 | 0 | 0 | 0 |
| PEBLM2002594 | 0 | 100 | 0 | 0 | 0 | 0 | 0 |
| PEBLM2002749 | 0 | 51.656 | 0 | 0 | 0 | 0 | 0 |
| PEBLM2002887 | 0 | 100 | 0 | 0 | 0 | 0 | 0 |
| PEBLM2003426 | 0 | 100 | 0 | 0 | 0 | 0 | 0 |
| PEBLM2003765 | 0 | 100 | 0 | 0 | 0 | 0 | 0 |
| PEBLM2003914 | 0 | 15.971 | 0 | 0 | 0 | 0 | 0 |
| PEBLM2003935 | 0 | 100 | 0 | 0 | 0 | 0 | 0 |
| PEBLM2004015 | 0 | 100 | 0 | 0 | 0 | 0 | 0 |
| PEBLM2004216 | 0 | 100 | 0 | 0 | 0 | 0 | 0 |
| PEBLM2004290 | 0 | 100 | 0 | 0 | 0 | 0 | 0 |
| PEBLM2004452 | 0 | 10.145 | 0 | 4.804 | 0 | 0 | 0 |
| PEBLM2004497 | 0 | 100 | 0 | 0 | 0 | 0 | 0 |
| PEBLM2004666 | 0 | 27.928 | 0 | 6.612 | 0 | 0 | 0 |
| PEBLM2004733 | 0 | 71.830 | 0 | 0 | 0 | 0 | 0 |
| PEBLM2005282 | 0 | 88.180 | 0 | 0 | 0 | 0 | 0 |
| PEBLM2005615 | 0 | 100 | 0 | 0 | 0 | 0 | 0 |
| PEBLM2005632 | 0 | 100 | 0 | 0 | 0 | 0 | 0 |
| PEBLM2005697 | 0 | 100 | 0 | 0 | 0 | 0 | 0 |
| PEBLM2006031 | 0 | 100 | 0 | 0 | 0 | 0 | 0 |
| PEBLM2006036 | 0 | 90.014 | 0 | 0 | 0 | 0 | 0 |
| PEBLM2006049 | 0 | 100 | 0 | 0 | 0 | 0 | 0 |
| PEBLM2006113 | 0 | 100 | 0 | 0 | 0 | 0 | 0 |
| PEBLM2006135 | 0 | 100 | 0 | 0 | 0 | 0 | 0 |
| PEBLM2006215 | 0 | 100 | 0 | 0 | 0 | 0 | 0 |
| PEBLM2006283 | 0 | 88.049 | 0 | 0 | 0 | 0 | 0 |
| PEBLM2006298 | 0 | 100 | 0 | 0 | 0 | 0 | 0 |
| PEBLM2006366 | 0 | 20.804 | 0 | 0 | 0 | 0 | 0 |
| PEBLM2006709 | 0 | 41.819 | 0 | 0 | 0 | 0 | 0 |
| PEBLM2006912 | 0 | 100 | 0 | 0 | 0 | 0 | 0 |
| PEBLM2007112 | 0 | 100 | 0 | 0 | 0 | 0 | 0 |
| PEBLM2007140 | 0 | 100 | 0 | 0 | 0 | 0 | 0 |
| PEBLM2007188 | 0 | 65.617 | 0 | 0 | 0 | 0 | 0 |
| PEBLM2007296 | 0 | 25.998 | 0 | 0 | 0 | 0 | 0 |
| PEBLM2007437 | 0 | 44.815 | 0 | 0 | 0 | 33.642 | 0 |
| PEBLM2007447 | 0 | 90.014 | 0 | 0 | 0 | 0 | 0 |
| PEBLM2007598 | 0 | 100 | 0 | 0 | 0 | 0 | 0 |
| PEBLM2007774 | 0 | 4.528 | 0 | 1.072 | 1.068 | 0 | 0 |
| PEBLM2007832 | 0 | 100 | 0 | 0 | 0 | 0 | 0 |
| PEBLM2007834 | 0 | 100 | 0 | 0 | 0 | 0 | 0 |
| PEBLM2008106 | 0 | 80.142 | 0 | 0 | 0 | 0 | 0 |
| PEBLM2008576 | 0 | 100 | 0 | 0 | 0 | 0 | 0 |
| PEBLM2008605 | 0 | 100 | 0 | 0 | 0 | 0 | 0 |
| PEBLM2008826 | 0 | 69.712 | 0 | 0 | 0 | 0 | 0 |
| PEBLM2008861 | 0 | 18.093 | 0 | 0 | 0 | 0 | 0 |
| PERIC1000025 | 0 | 0 | 100 | 0 | 0 | 0 | 0 |
| PERIC1000147 | 0 | 0 | 100 | 0 | 0 | 0 | 0 |
| PERIC2000180 | 0 | 0 | 100 | 0 | 0 | 0 | 0 |
| PERIC2000214 | 0 | 0 | 100 | 0 | 0 | 0 | 0 |
| PERIC2000386 | 0 | 0 | 100 | 0 | 0 | 0 | 0 |
| PERIC2000387 | 0 | 0 | 100 | 0 | 0 | 0 | 0 |
| PERIC2000422 | 0 | 0 | 100 | 0 | 0 | 0 | 0 |
| PERIC2000473 | 0 | 0 | 42.285 | 0 | 0 | 0 | 0 |
| PERIC2000478 | 0 | 0 | 73.334 | 0 | 0 | 0 | 0 |
| PERIC2000889 | 0 | 0 | 59.923 | 0 | 0 | 0 | 0 |
| PERIC2000914 | 0 | 0 | 100 | 0 | 0 | 0 | 0 |
| PERIC2001227 | 0 | 0 | 100 | 0 | 0 | 0 | 0 |
| PERIC2001228 | 0 | 0 | 100 | 0 | 0 | 0 | 0 |
| PERIC2001379 | 0 | 0 | 100 | 0 | 0 | 0 | 0 |
| PERIC2001504 | 0 | 0 | 100 | 0 | 0 | 0 | 0 |
| PERIC2001703 | 0 | 0 | 100 | 0 | 0 | 0 | 0 |
| PERIC2001764 | 0 | 0 | 100 | 0 | 0 | 0 | 0 |
| PERIC2002243 | 0 | 0 | 100 | 0 | 0 | 0 | 0 |
| PERIC2002272 | 0 | 0 | 100 | 0 | 0 | 0 | 0 |
| PERIC2002452 | 0 | 0 | 65.624 | 0 | 0 | 0 | 0 |
| PERIC2002766 | 0 | 0 | 84.429 | 0 | 0 | 0 | 0 |
| PERIC2003001 | 0 | 0 | 100 | 0 | 0 | 0 | 0 |
| PERIC2003090 | 0 | 0 | 100 | 0 | 0 | 0 | 0 |
| PERIC2003287 | 0 | 0 | 100 | 0 | 0 | 0 | 0 |
| PERIC2003349 | 0 | 0 | 100 | 0 | 0 | 0 | 0 |
| PERIC2003452 | 0 | 0 | 100 | 0 | 0 | 0 | 0 |
| PERIC2003699 | 0 | 0 | 79.101 | 20.899 | 0 | 0 | 0 |
| PERIC2003720 | 0 | 0 | 86.988 | 0 | 0 | 0 | 0 |
| PERIC2003794 | 0 | 0 | 91.154 | 0 | 0 | 0 | 0 |
| PERIC2003834 | 0 | 0 | 100 | 0 | 0 | 0 | 0 |
| PERIC2003919 | 0 | 0 | 100 | 0 | 0 | 0 | 0 |
| PERIC2003957 | 0 | 0 | 100 | 0 | 0 | 0 | 0 |
| PERIC2004028 | 0 | 0 | 100 | 0 | 0 | 0 | 0 |
| PERIC2004131 | 0 | 0 | 100 | 0 | 0 | 0 | 0 |
| PERIC2004259 | 0 | 0 | 100 | 0 | 0 | 0 | 0 |
| PERIC2004379 | 0 | 0 | 100 | 0 | 0 | 0 | 0 |
| PERIC2004429 | 0 | 0 | 100 | 0 | 0 | 0 | 0 |
| PERIC2004510 | 0 | 0 | 100 | 0 | 0 | 0 | 0 |
| PERIC2004613 | 0 | 0 | 100 | 0 | 0 | 0 | 0 |
| PERIC2004909 | 0 | 0 | 100 | 0 | 0 | 0 | 0 |
| PERIC2005111 | 0 | 0 | 100 | 0 | 0 | 0 | 0 |
| PERIC2005117 | 0 | 0 | 14.470 | 3.823 | 0 | 0 | 0 |
| PERIC2005305 | 0 | 0 | 100 | 0 | 0 | 0 | 0 |
| PERIC2005347 | 0 | 0 | 100 | 0 | 0 | 0 | 0 |
| PERIC2005370 | 0 | 0 | 100 | 0 | 0 | 0 | 0 |
| PERIC2005936 | 0 | 0 | 100 | 0 | 0 | 0 | 0 |
| PERIC2006035 | 0 | 0 | 100 | 0 | 0 | 0 | 0 |
| PERIC2006121 | 0 | 0 | 100 | 0 | 0 | 0 | 0 |
| PERIC2006443 | 0 | 0 | 32.715 | 0 | 0 | 27.404 | 0 |
| PERIC2006945 | 0 | 0 | 100 | 0 | 0 | 0 | 0 |
| PERIC2006960 | 0 | 0 | 100 | 0 | 0 | 0 | 0 |
| PERIC2007068 | 0 | 0 | 10.394 | 0 | 0 | 0 | 0 |
| PERIC2007439 | 0 | 0 | 100 | 0 | 0 | 0 | 0 |
| PERIC2007914 | 0 | 0 | 100 | 0 | 0 | 0 | 0 |
| PERIC2008008 | 0 | 0 | 100 | 0 | 0 | 0 | 0 |
| PERIC2008385 | 0 | 0 | 100 | 0 | 0 | 0 | 0 |
| PERIC2009001 | 0 | 0 | 100 | 0 | 0 | 0 | 0 |
| PERIC2009086 | 0 | 0 | 100 | 0 | 0 | 0 | 0 |
| PERIC2009329 | 0 | 0 | 100 | 0 | 0 | 0 | 0 |
| PERIC2009566 | 0 | 0 | 100 | 0 | 0 | 0 | 0 |
| PLACE5000001 | 0 | 0 | 0 | 100 | 0 | 0 | 0 |
| PLACE5000013 | 0 | 0 | 0 | 2.825 | 0 | 0 | 0 |
| PLACE5000037 | 0 | 0 | 0 | 100 | 0 | 0 | 0 |
| PLACE5000058 | 0 | 0 | 0 | 61.610 | 0 | 0 | 0 |
| PLACE5000066 | 0 | 0 | 0 | 16.284 | 0 | 0 | 0 |
| PLACE5000067 | 0 | 0 | 0 | 73.137 | 0 | 0 | 0 |
| PLACE5000068 | 0 | 0 | 0 | 11.176 | 0 | 0 | 0 |
| PLACE5000070 | 0 | 0 | 0 | 100 | 0 | 0 | 0 |
| PLACE5000080 | 0 | 0 | 0 | 21.952 | 0 | 0 | 0 |
| PLACE5000105 | 0 | 0 | 0 | 100 | 0 | 0 | 0 |
| PLACE5000113 | 0 | 0 | 0 | 12.248 | 0 | 0 | 0 |
| PLACE5000115 | 0 | 0 | 0 | 100 | 0 | 0 | 0 |
| PLACE5000116 | 0 | 0 | 0 | 100 | 0 | 0 | 0 |
| PLACE5000129 | 0 | 0 | 0 | 100 | 0 | 0 | 0 |
| PLACE5000139 | 0 | 0 | 79.101 | 20.899 | 0 | 0 | 0 |
| PLACE5000153 | 0 | 0 | 0 | 100 | 0 | 0 | 0 |
| PLACE5000159 | 0 | 0 | 0 | 4.045 | 0 | 0 | 0 |
| PLACE5000170 | 0 | 0 | 0 | 30.938 | 0 | 0 | 0 |
| PLACE5000171 | 0 | 0 | 0 | 100 | 0 | 0 | 0 |
| PLACE5000172 | 0 | 0 | 0 | 27.759 | 0 | 0 | 0 |
| PLACE5000178 | 0 | 0 | 0 | 64.025 | 0 | 0 | 0 |
| PLACE5000245 | 0 | 0 | 0 | 100 | 0 | 0 | 0 |
| PLACE5000260 | 0 | 0 | 0 | 100 | 0 | 0 | 0 |
| PLACE5000282 | 0 | 0 | 0 | 21.952 | 0 | 0 | 0 |
| PLACE5000297 | 0 | 0 | 0 | 63.562 | 0 | 0 | 0 |
| PLACE5000372 | 0 | 0 | 0 | 59.874 | 0 | 0 | 0 |
| PLACE5000492 | 0 | 0 | 0 | 43.685 | 0 | 0 | 0 |
| PLACE5000522 | 0 | 0 | 0 | 100 | 0 | 0 | 0 |
| PLACE5000527 | 0 | 0 | 0 | 100 | 0 | 0 | 0 |
| PLACE6000012 | 0 | 0 | 0 | 100 | 0 | 0 | 0 |
| PLACE6000044 | 0 | 0 | 0 | 100 | 0 | 0 | 0 |
| PLACE6000055 | 0 | 0 | 0 | 100 | 0 | 0 | 0 |
| PLACE6000070 | 0 | 0 | 0 | 100 | 0 | 0 | 0 |
| PLACE6000137 | 0 | 0 | 0 | 100 | 0 | 0 | 0 |
| PLACE6000145 | 0 | 0 | 0 | 1.844 | 0 | 0 | 0 |
| PLACE6000191 | 0 | 0 | 0 | 100 | 0 | 0 | 0 |
| PLACE6000205 | 0 | 0 | 0 | 100 | 0 | 0 | 0 |
| PLACE6000231 | 0 | 0 | 0 | 100 | 0 | 0 | 0 |
| PLACE6000263 | 0 | 0 | 10.241 | 2.706 | 0 | 0 | 0 |
| PLACE6000296 | 0 | 0 | 0 | 100 | 0 | 0 | 0 |
| PLACE6000314 | 0 | 0 | 0 | 27.144 | 0 | 0 | 0 |
| PLACE6000325 | 0 | 0 | 0 | 14.417 | 0 | 0 | 0 |
| PLACE6000348 | 0 | 0 | 0 | 50.674 | 0 | 0 | 0 |
| PLACE6000371 | 0 | 0 | 0 | 50.569 | 0 | 0 | 0 |
| PLACE6000379 | 0 | 3.983 | 0 | 1.257 | 0 | 2.990 | 0 |
| PLACE6000414 | 0 | 0 | 0 | 2.280 | 4.544 | 0 | 0 |
| PLACE6000424 | 0 | 0 | 0 | 100 | 0 | 0 | 0 |
| PLACE6000426 | 0 | 0 | 0 | 100 | 0 | 0 | 0 |
| PLACE6000429 | 0 | 0 | 0 | 100 | 0 | 0 | 0 |
| PLACE6000450 | 0 | 0 | 0 | 100 | 0 | 0 | 0 |
| PLACE6000463 | 0 | 0 | 0 | 13.886 | 0 | 0 | 0 |
| PLACE6000523 | 0 | 0 | 0 | 100 | 0 | 0 | 0 |
| PLACE6000550 | 0 | 0 | 0 | 100 | 0 | 0 | 0 |
| PLACE6000552 | 0 | 0 | 0 | 100 | 0 | 0 | 0 |
| PLACE6000555 | 0 | 0 | 0 | 100 | 0 | 0 | 0 |
| PLACE6000619 | 0 | 0 | 0 | 63.850 | 0 | 0 | 0 |
| PLACE6000630 | 0 | 0 | 0 | 6.867 | 0 | 0 | 0 |
| PLACE6000953 | 0 | 0 | 0 | 100 | 0 | 0 | 0 |
| PLACE6001064 | 0 | 4.312 | 0 | 3.063 | 0 | 0 | 0 |
| PLACE6001118 | 0 | 0 | 0 | 100 | 0 | 0 | 0 |
| PLACE6001153 | 0 | 0 | 0 | 100 | 0 | 0 | 0 |
| PLACE6001185 | 0 | 0 | 0 | 38.010 | 0 | 0 | 0 |
| PLACE6001262 | 0 | 0 | 0 | 15.551 | 0 | 0 | 0 |
| PLACE6001281 | 0 | 0 | 0 | 6.127 | 0 | 19.425 | 0 |
| PLACE6001294 | 0 | 0 | 0 | 100 | 0 | 0 | 0 |
| PLACE6001443 | 0 | 0 | 0 | 10.487 | 0 | 0 | 0 |
| PLACE6001536 | 0 | 0 | 0 | 100 | 0 | 0 | 0 |
| PLACE6001557 | 0 | 0 | 0 | 100 | 0 | 0 | 0 |
| PLACE6001712 | 0 | 0 | 0 | 100 | 0 | 0 | 0 |
| PLACE6001740 | 0 | 0 | 0 | 100 | 0 | 0 | 0 |
| PLACE6001823 | 0 | 0 | 0 | 50.708 | 0 | 0 | 0 |
| PLACE6001886 | 0 | 0 | 0 | 30.140 | 0 | 0 | 0 |
| PLACE6001923 | 0 | 0 | 0 | 11.186 | 0 | 0 | 0 |
| PLACE6001925 | 0 | 0 | 0 | 100 | 0 | 0 | 0 |
| PLACE6001933 | 0 | 0 | 0 | 100 | 0 | 0 | 0 |
| PLACE6002011 | 0 | 0 | 0 | 50.569 | 0 | 0 | 0 |
| PLACE6002016 | 0 | 0 | 0 | 100 | 0 | 0 | 0 |
| PLACE6002056 | 0 | 0 | 0 | 50.569 | 0 | 0 | 0 |
| PLACE6002084 | 0 | 2.776 | 2.488 | 0.657 | 0 | 4.168 | 0 |
| PLACE6002102 | 0 | 0 | 0 | 7.541 | 0 | 0 | 0 |
| PLACE6002157 | 0 | 0 | 0 | 100 | 0 | 0 | 0 |
| PLACE6002312 | 0 | 0 | 0 | 100 | 0 | 0 | 0 |
| PLACE6002323 | 0 | 0 | 0 | 100 | 0 | 0 | 0 |
| PLACE6002345 | 0 | 0 | 0 | 100 | 0 | 0 | 0 |
| PLACE6002419 | 0 | 0 | 0 | 18.553 | 0 | 0 | 0 |
| PLACE6002462 | 0 | 0 | 0 | 100 | 0 | 0 | 0 |
| PLACE6002647 | 0 | 0 | 0 | 100 | 0 | 0 | 0 |
| PLACE6002668 | 0 | 0 | 0 | 9.604 | 0 | 0 | 0 |
| PLACE6002692 | 0 | 0 | 0 | 63.850 | 0 | 0 | 0 |
| PLACE6002699 | 0 | 0 | 0 | 100 | 0 | 0 | 0 |
| PLACE6002710 | 0 | 0 | 0 | 100 | 0 | 0 | 0 |
| PLACE6002871 | 0 | 0 | 0 | 100 | 0 | 0 | 0 |
| PLACE6002949 | 0 | 0 | 0 | 100 | 0 | 0 | 0 |
| PLACE6002960 | 0 | 0 | 7.476 | 25.678 | 0 | 12.525 | 0 |
| PLACE6003004 | 0 | 0 | 0 | 61.610 | 0 | 0 | 0 |
| PLACE6003038 | 0 | 27.127 | 0 | 6.423 | 12.799 | 0 | 0 |
| PLACE6003077 | 0 | 0 | 0 | 45.210 | 0 | 0 | 0 |
| PLACE6003094 | 0 | 0 | 0 | 100 | 0 | 0 | 0 |
| PLACE6003109 | 0 | 0 | 0 | 100 | 0 | 0 | 0 |
| PLACE6003204 | 0 | 0 | 0 | 78.067 | 0 | 0 | 0 |
| PLACE6003218 | 0 | 0 | 0 | 51.794 | 0 | 0 | 0 |
| PLACE6003372 | 0 | 0 | 0 | 100 | 0 | 0 | 0 |
| PLACE6003383 | 0 | 0 | 0 | 2.124 | 12.698 | 0 | 0 |
| PLACE6003393 | 0 | 0 | 0 | 13.514 | 0 | 0 | 0 |
| PLACE6003399 | 0 | 0 | 0 | 100 | 0 | 0 | 0 |
| PLACE6003539 | 0 | 0 | 0 | 100 | 0 | 0 | 0 |
| PLACE6003621 | 0 | 0 | 0 | 71.489 | 0 | 0 | 0 |
| PLACE6003705 | 0 | 0 | 0 | 100 | 0 | 0 | 0 |
| PLACE6003740 | 0 | 0 | 0 | 100 | 0 | 0 | 0 |
| PLACE6003745 | 0 | 0 | 0 | 28.055 | 0 | 29.650 | 0 |
| PLACE6003771 | 0 | 0 | 0 | 100 | 0 | 0 | 0 |
| PLACE6003796 | 0 | 0 | 0 | 100 | 0 | 0 | 0 |
| PLACE6003839 | 0 | 0 | 0 | 100 | 0 | 0 | 0 |
| PLACE6003850 | 0 | 0 | 0 | 19.965 | 0 | 0 | 0 |
| PLACE6004005 | 0 | 0 | 0 | 1.757 | 0 | 0 | 0 |
| PLACE6004101 | 0 | 0 | 0 | 7.929 | 0 | 0 | 0 |
| PLACE6004219 | 0 | 0 | 0 | 100 | 0 | 0 | 0 |
| PLACE6004312 | 0 | 0 | 0 | 2.147 | 2.139 | 0 | 0 |
| PLACE6004336 | 0 | 0 | 0 | 100 | 0 | 0 | 0 |
| PLACE6004368 | 0 | 0 | 0 | 100 | 0 | 0 | 0 |
| PLACE6004380 | 0 | 0 | 0 | 100 | 0 | 0 | 0 |
| PLACE6004396 | 0 | 0 | 0 | 32.670 | 0 | 0 | 0 |
| PLACE6004397 | 0 | 13.816 | 0 | 3.271 | 0 | 10.371 | 0 |
| PLACE6004454 | 0 | 0 | 0 | 100 | 0 | 0 | 0 |
| PLACE6004464 | 0 | 0 | 0 | 67.171 | 0 | 0 | 0 |
| PLACE6004491 | 0 | 0 | 0 | 59.874 | 0 | 0 | 0 |
| PLACE6004578 | 0 | 0 | 0 | 6.618 | 0 | 0 | 0 |
| PLACE6004663 | 0 | 0 | 0 | 100 | 0 | 0 | 0 |
| PLACE6004687 | 0 | 0 | 0 | 100 | 0 | 0 | 0 |
| PLACE6004738 | 0 | 0 | 0 | 74.902 | 0 | 0 | 0 |
| PLACE6004931 | 0 | 0 | 0 | 11.653 | 0 | 0 | 0 |
| PLACE6004966 | 0 | 0 | 0 | 100 | 0 | 0 | 0 |
| PLACE6004993 | 0 | 0 | 0 | 33.936 | 0 | 0 | 0 |
| PLACE6005007 | 0 | 0 | 0 | 100 | 0 | 0 | 0 |
| PLACE6005029 | 0 | 0 | 0 | 100 | 0 | 0 | 0 |
| PLACE6005108 | 0 | 0 | 0 | 100 | 0 | 0 | 0 |
| PLACE6005231 | 0 | 0 | 0 | 19.656 | 0 | 0 | 0 |
| PLACE6005234 | 0 | 0 | 0 | 100 | 0 | 0 | 0 |
| PLACE6005283 | 0 | 0 | 0 | 100 | 0 | 0 | 0 |
| PLACE6005294 | 0 | 0 | 0 | 21.429 | 0 | 0 | 0 |
| PLACE6005328 | 0 | 0 | 0 | 100 | 0 | 0 | 0 |
| PLACE6005351 | 0 | 0 | 0 | 100 | 0 | 0 | 0 |
| PLACE6005423 | 0 | 0 | 0 | 100 | 0 | 0 | 0 |
| PLACE6005482 | 0 | 0 | 0 | 9.412 | 0 | 0 | 0 |
| PLACE6005487 | 0 | 0 | 0 | 6.658 | 0 | 0 | 0 |
| PLACE6005535 | 0 | 0 | 0 | 100 | 0 | 0 | 0 |
| PLACE6005546 | 0 | 0 | 0 | 100 | 0 | 0 | 0 |
| PLACE6005559 | 0 | 0 | 0 | 100 | 0 | 0 | 0 |
| PLACE6005579 | 0 | 0 | 0 | 100 | 0 | 0 | 0 |
| PLACE6005691 | 0 | 0 | 0 | 63.850 | 0 | 0 | 0 |
| PLACE6005786 | 0 | 0 | 0 | 100 | 0 | 0 | 0 |
| PLACE6006042 | 0 | 0 | 0 | 9.688 | 0 | 0 | 0 |
| PLACE6006077 | 0 | 0 | 0 | 100 | 0 | 0 | 0 |
| PLACE6006137 | 0 | 0 | 0 | 6.079 | 0 | 0 | 0 |
| PLACE6006158 | 0 | 0 | 0 | 100 | 0 | 0 | 0 |
| PLACE6006186 | 0 | 0 | 0 | 12.872 | 0 | 0 | 0 |
| PLACE6006217 | 0 | 0 | 0 | 100 | 0 | 0 | 0 |
| PLACE6006222 | 0 | 0 | 0 | 14.870 | 0 | 0 | 0 |
| PLACE6006266 | 0 | 0 | 0 | 100 | 0 | 0 | 0 |
| PLACE6006287 | 0 | 0 | 0 | 100 | 0 | 0 | 0 |
| PLACE6006394 | 0 | 0 | 0 | 100 | 0 | 0 | 0 |
| PLACE6006418 | 0 | 0 | 0 | 9.868 | 0 | 0 | 0 |
| PLACE6006474 | 0 | 0 | 0 | 100 | 0 | 0 | 0 |
| PLACE6006549 | 0 | 0 | 0 | 2.842 | 5.664 | 0 | 0 |
| PLACE6006566 | 0 | 0 | 0 | 100 | 0 | 0 | 0 |
| PLACE6006697 | 0 | 0 | 0 | 100 | 0 | 0 | 0 |
| PLACE6006822 | 0 | 0 | 0 | 100 | 0 | 0 | 0 |
| PLACE6006871 | 0 | 0 | 0 | 100 | 0 | 0 | 0 |
| PLACE6006905 | 0 | 0 | 0 | 100 | 0 | 0 | 0 |
| PLACE6006988 | 0 | 0 | 0 | 58.892 | 0 | 0 | 0 |
| PLACE6007050 | 0 | 0 | 0 | 100 | 0 | 0 | 0 |
| PLACE6007180 | 0 | 0 | 0 | 19.073 | 0 | 0 | 0 |
| PLACE6007239 | 0 | 0 | 0 | 95.382 | 0 | 0 | 0 |
| PLACE6007242 | 0 | 0 | 0 | 100 | 0 | 0 | 0 |
| PLACE6007309 | 0 | 0 | 0 | 32.348 | 0 | 0 | 0 |
| PLACE6007373 | 0 | 0 | 0 | 5.093 | 0 | 0 | 0 |
| PLACE6007380 | 0 | 0 | 0 | 100 | 0 | 0 | 0 |
| PLACE6007433 | 0 | 0 | 0 | 100 | 0 | 0 | 0 |
| PLACE6007436 | 0 | 0 | 0 | 19.181 | 0 | 0 | 0 |
| PLACE6007482 | 0 | 0 | 0 | 100 | 0 | 0 | 0 |
| PLACE6007687 | 0 | 0 | 0 | 100 | 0 | 0 | 0 |
| PLACE6007787 | 0 | 0 | 0 | 100 | 0 | 0 | 0 |
| PLACE6007798 | 0 | 0 | 0 | 100 | 0 | 0 | 0 |
| PLACE6007807 | 0 | 0 | 0 | 100 | 0 | 0 | 0 |
| PLACE6007925 | 0 | 0 | 0 | 18.034 | 0 | 0 | 0 |
| PLACE6008036 | 0 | 0 | 0 | 100 | 0 | 0 | 0 |
| PLACE6008094 | 0 | 0 | 0 | 100 | 0 | 0 | 0 |
| PLACE6008126 | 0 | 0 | 0 | 100 | 0 | 0 | 0 |
| PLACE6008285 | 0 | 0 | 0 | 100 | 0 | 0 | 0 |
| PLACE6008444 | 0 | 0 | 0 | 63.850 | 0 | 0 | 0 |
| PLACE6008453 | 0 | 0 | 0 | 100 | 0 | 0 | 0 |
| PLACE6008640 | 0 | 0 | 0 | 100 | 0 | 0 | 0 |
| PLACE6008750 | 0 | 0 | 0 | 100 | 0 | 0 | 0 |
| PLACE6008768 | 0 | 0 | 0 | 100 | 0 | 0 | 0 |
| PLACE6008775 | 0 | 0 | 0 | 6.560 | 0 | 0 | 0 |
| PLACE6008793 | 0 | 0 | 0 | 2.822 | 0 | 0 | 0 |
| PLACE6008824 | 0 | 0 | 0 | 59.874 | 0 | 0 | 0 |
| PLACE6008989 | 0 | 0 | 0 | 100 | 0 | 0 | 0 |
| PLACE6009006 | 0 | 0 | 0 | 100 | 0 | 0 | 0 |
| PLACE6009008 | 0 | 0 | 0 | 33.415 | 66.585 | 0 | 0 |
| PLACE6009228 | 0 | 0 | 0 | 50.569 | 0 | 0 | 0 |
| PLACE6009237 | 0 | 0 | 0 | 7.653 | 0 | 0 | 0 |
| PLACE6009338 | 0 | 0 | 0 | 44.716 | 0 | 0 | 0 |
| PLACE6009419 | 0 | 0 | 0 | 100 | 0 | 0 | 0 |
| PLACE6009430 | 0 | 0 | 0 | 100 | 0 | 0 | 0 |
| PLACE6009482 | 0 | 0 | 0 | 100 | 0 | 0 | 0 |
| PLACE6009524 | 0 | 0 | 0 | 100 | 0 | 0 | 0 |
| PLACE6009527 | 0 | 0 | 0 | 100 | 0 | 0 | 0 |
| PLACE6009560 | 0 | 0 | 0 | 19.232 | 0 | 0 | 0 |
| PLACE6009590 | 0 | 0 | 0 | 100 | 0 | 0 | 0 |
| PLACE6009821 | 0 | 0 | 0 | 27.404 | 0 | 0 | 0 |
| PLACE6009835 | 0 | 0 | 0 | 100 | 0 | 0 | 0 |
| PLACE6009853 | 0 | 0 | 0 | 100 | 0 | 0 | 0 |
| PLACE6010077 | 0 | 0 | 0 | 4.648 | 0 | 0 | 0 |
| PLACE6010463 | 0 | 0 | 0 | 100 | 0 | 0 | 0 |
| PLACE6010484 | 0 | 11.618 | 0 | 2.751 | 5.482 | 0 | 0 |
| PLACE6010485 | 0 | 0 | 0 | 100 | 0 | 0 | 0 |
| PLACE6010568 | 0 | 0 | 0 | 100 | 0 | 0 | 0 |
| PLACE6010701 | 0 | 0 | 0 | 33.415 | 66.585 | 0 | 0 |
| PLACE6010704 | 0 | 0 | 0 | 64.025 | 0 | 0 | 0 |
| PLACE6010732 | 0 | 0 | 0 | 43.685 | 0 | 0 | 0 |
| PLACE6010765 | 0 | 0 | 79.101 | 20.899 | 0 | 0 | 0 |
| PLACE6010848 | 0 | 0 | 0 | 14.563 | 0 | 0 | 0 |
| PLACE6010925 | 0 | 0 | 0 | 100 | 0 | 0 | 0 |
| PLACE6010936 | 0 | 0 | 0 | 87.601 | 0 | 0 | 0 |
| PLACE6010991 | 0 | 0 | 0 | 100 | 0 | 0 | 0 |
| PLACE6011041 | 0 | 0 | 0 | 29.052 | 0 | 0 | 0 |
| PLACE6011057 | 0 | 0 | 0 | 8.022 | 0 | 0 | 0 |
| PLACE6011102 | 0 | 0 | 0 | 100 | 0 | 0 | 0 |
| PLACE6011156 | 0 | 0 | 0 | 23.174 | 0 | 0 | 0 |
| PLACE6011211 | 0 | 0 | 0 | 100 | 0 | 0 | 0 |
| PLACE6011260 | 0 | 0 | 0 | 100 | 0 | 0 | 0 |
| PLACE6011334 | 0 | 0 | 0 | 15.995 | 0 | 0 | 0 |
| PLACE6011627 | 0 | 0 | 0 | 58.892 | 0 | 0 | 0 |
| PLACE6011774 | 0 | 0 | 0 | 100 | 0 | 0 | 0 |
| PLACE6011881 | 0 | 0 | 0 | 100 | 0 | 0 | 0 |
| PLACE6011907 | 0 | 0 | 0 | 100 | 0 | 0 | 0 |
| PLACE6011970 | 0 | 0 | 0 | 46.156 | 0 | 0 | 0 |
| PLACE6011975 | 0 | 0 | 0 | 100 | 0 | 0 | 0 |
| PLACE6012028 | 0 | 0 | 0 | 11.172 | 0 | 0 | 0 |
| PLACE6012108 | 0 | 0 | 0 | 100 | 0 | 0 | 0 |
| PLACE6012168 | 0 | 0 | 0 | 100 | 0 | 0 | 0 |
| PLACE6012297 | 0 | 0 | 0 | 100 | 0 | 0 | 0 |
| PLACE6012308 | 0 | 0 | 0 | 100 | 0 | 0 | 0 |
| PLACE6012574 | 0 | 0 | 0 | 12.733 | 0 | 0 | 0 |
| PLACE6012908 | 0 | 0 | 0 | 100 | 0 | 0 | 0 |
| PLACE6012936 | 0 | 0 | 0 | 68.095 | 0 | 0 | 0 |
| PLACE6012942 | 0 | 0 | 0 | 59.874 | 0 | 0 | 0 |
| PLACE6013222 | 0 | 0 | 0 | 17.538 | 0 | 0 | 0 |
| PLACE6013232 | 0 | 0 | 0 | 20.563 | 0 | 0 | 0 |
| PLACE6013288 | 0 | 0 | 0 | 100 | 0 | 0 | 0 |
| PLACE6013386 | 0 | 0 | 0 | 100 | 0 | 0 | 0 |
| PLACE6013400 | 0 | 0 | 0 | 100 | 0 | 0 | 0 |
| PLACE6013650 | 0 | 0 | 0 | 100 | 0 | 0 | 0 |
| PLACE6013672 | 0 | 0 | 0 | 49.147 | 0 | 0 | 0 |
| PLACE6013883 | 0 | 0 | 0 | 61.610 | 0 | 0 | 0 |
| PLACE6013884 | 0 | 0 | 0 | 100 | 0 | 0 | 0 |
| PLACE6013885 | 0 | 0 | 0 | 100 | 0 | 0 | 0 |
| PLACE6014043 | 0 | 0 | 0 | 100 | 0 | 0 | 0 |
| PLACE6014064 | 0 | 0 | 0 | 5.447 | 0 | 0 | 66.593 |
| PLACE6014516 | 0 | 0 | 0 | 100 | 0 | 0 | 0 |
| PLACE6014882 | 0 | 0 | 0 | 21.139 | 0 | 0 | 0 |
| PLACE6015051 | 0 | 0 | 0 | 8.204 | 0 | 0 | 0 |
| PLACE6015211 | 0 | 0 | 0 | 100 | 0 | 0 | 0 |
| PLACE6015322 | 0 | 0 | 0 | 50.569 | 0 | 0 | 0 |
| PLACE6015445 | 0 | 0 | 0 | 19.777 | 0 | 0 | 0 |
| PLACE6015460 | 0 | 0 | 0 | 100 | 0 | 0 | 0 |
| PLACE6015513 | 0 | 0 | 0 | 45.210 | 0 | 0 | 0 |
| PLACE6015591 | 0 | 0 | 0 | 100 | 0 | 0 | 0 |
| PLACE6015729 | 0 | 0 | 0 | 63.850 | 0 | 0 | 0 |
| PLACE6015731 | 0 | 0 | 0 | 27.317 | 0 | 0 | 0 |
| PLACE6015939 | 0 | 0 | 0 | 100 | 0 | 0 | 0 |
| PLACE6016030 | 0 | 0 | 0 | 100 | 0 | 0 | 0 |
| PLACE6016093 | 0 | 0 | 0 | 100 | 0 | 0 | 0 |
| PLACE6016105 | 0 | 0 | 0 | 100 | 0 | 0 | 0 |
| PLACE6016160 | 0 | 0 | 0 | 100 | 0 | 0 | 0 |
| PLACE6016210 | 0 | 0 | 0 | 22.537 | 0 | 0 | 0 |
| PLACE6016254 | 0 | 0 | 0 | 32.516 | 0 | 0 | 0 |
| PLACE6016383 | 0 | 0 | 0 | 11.505 | 0 | 0 | 0 |
| PLACE6016942 | 0 | 0 | 0 | 6.962 | 0 | 0 | 0 |
| PLACE6016984 | 0 | 0 | 0 | 65.750 | 0 | 0 | 0 |
| PLACE6017002 | 0 | 0 | 0 | 100 | 0 | 0 | 0 |
| PLACE6017431 | 0 | 0 | 0 | 59.874 | 0 | 0 | 0 |
| PLACE6017564 | 0 | 0 | 0 | 100 | 0 | 0 | 0 |
| PLACE6017578 | 0 | 0 | 0 | 36.001 | 0 | 0 | 0 |
| PLACE6017626 | 0 | 0 | 0 | 50.519 | 0 | 0 | 0 |
| PLACE6017701 | 0 | 0 | 0 | 43.685 | 0 | 0 | 0 |
| PLACE6017714 | 0 | 0 | 0 | 100 | 0 | 0 | 0 |
| PLACE6017788 | 0 | 0 | 0 | 73.137 | 0 | 0 | 0 |
| PLACE6017791 | 0 | 0 | 0 | 19.547 | 0 | 0 | 0 |
| PLACE6018031 | 0 | 0 | 0 | 11.966 | 0 | 0 | 0 |
| PLACE6018107 | 0 | 0 | 0 | 100 | 0 | 0 | 0 |
| PLACE6018187 | 0 | 0 | 0 | 100 | 0 | 0 | 0 |
| PLACE6018235 | 0 | 0 | 0 | 100 | 0 | 0 | 0 |
| PLACE6018287 | 0 | 0 | 0 | 84.484 | 0 | 0 | 0 |
| PLACE6018441 | 0 | 0 | 0 | 100 | 0 | 0 | 0 |
| PLACE6018487 | 0 | 0 | 0 | 1.188 | 0 | 0 | 0 |
| PLACE6018497 | 0 | 0 | 0 | 100 | 0 | 0 | 0 |
| PLACE6018769 | 0 | 0 | 0 | 100 | 0 | 0 | 0 |
| PLACE6018834 | 0 | 0 | 0 | 100 | 0 | 0 | 0 |
| PLACE6018843 | 0 | 0 | 0 | 100 | 0 | 0 | 0 |
| PLACE6018863 | 0 | 0 | 0 | 33.796 | 0 | 0 | 0 |
| PLACE6018938 | 0 | 0 | 0 | 54.615 | 0 | 0 | 0 |
| PLACE6019195 | 0 | 0 | 0 | 30.202 | 0 | 0 | 0 |
| PLACE6019385 | 0 | 0 | 0 | 7.219 | 0 | 0 | 0 |
| PLACE6019542 | 0 | 0 | 0 | 100 | 0 | 0 | 0 |
| PLACE6019600 | 0 | 0 | 0 | 100 | 0 | 0 | 0 |
| PLACE6019674 | 0 | 0 | 0 | 100 | 0 | 0 | 0 |
| PLACE6019676 | 0 | 0 | 0 | 100 | 0 | 0 | 0 |
| PLACE6019701 | 0 | 0 | 0 | 100 | 0 | 0 | 0 |
| PLACE6019932 | 0 | 0 | 0 | 7.719 | 0 | 0 | 0 |
| PLACE6020031 | 0 | 0 | 0 | 100 | 0 | 0 | 0 |
| PLACE6020145 | 0 | 0 | 0 | 14.936 | 0 | 0 | 0 |
| PLACE7000167 | 0 | 0 | 0 | 100 | 0 | 0 | 0 |
| PLACE7000170 | 0 | 0 | 0 | 100 | 0 | 0 | 0 |
| PLACE7000266 | 0 | 0 | 0 | 100 | 0 | 0 | 0 |
| PLACE7000333 | 0 | 0 | 0 | 100 | 0 | 0 | 0 |
| PLACE7000410 | 0 | 0 | 0 | 61.610 | 0 | 0 | 0 |
| PLACE7000502 | 0 | 0 | 0 | 100 | 0 | 0 | 0 |
| PLACE7000707 | 0 | 0 | 0 | 100 | 0 | 0 | 0 |
| PLACE7001022 | 0 | 0 | 0 | 50.083 | 0 | 0 | 0 |
| PLACE7001544 | 0 | 0 | 0 | 100 | 0 | 0 | 0 |
| PLACE7001759 | 0 | 0 | 0 | 100 | 0 | 0 | 0 |
| PLACE7001936 | 0 | 0 | 0 | 100 | 0 | 0 | 0 |
| PLACE7002303 | 0 | 0 | 0 | 100 | 0 | 0 | 0 |
| PLACE7002641 | 0 | 0 | 0 | 100 | 0 | 0 | 0 |
| PLACE7003639 | 0 | 0 | 0 | 100 | 0 | 0 | 0 |
| PLACE7003657 | 0 | 0 | 0 | 100 | 0 | 0 | 0 |
| PLACE7003684 | 0 | 0 | 0 | 100 | 0 | 0 | 0 |
| PLACE7003985 | 0 | 0 | 0 | 100 | 0 | 0 | 0 |
| PLACE7004103 | 0 | 0 | 0 | 11.508 | 0 | 0 | 0 |
| PLACE7004961 | 0 | 0 | 0 | 100 | 0 | 0 | 0 |
| PLACE7005169 | 0 | 0 | 0 | 100 | 0 | 0 | 0 |
| PLACE7005671 | 0 | 0 | 0 | 100 | 0 | 0 | 0 |
| PLACE7005840 | 0 | 0 | 0 | 68.095 | 0 | 0 | 0 |
| PLACE7006051 | 0 | 0 | 0 | 100 | 0 | 0 | 0 |
| PLACE7006090 | 0 | 0 | 0 | 100 | 0 | 0 | 0 |
| PLACE7006240 | 0 | 0 | 0 | 44.802 | 0 | 0 | 0 |
| PLACE7006268 | 0 | 0 | 0 | 33.415 | 66.585 | 0 | 0 |
| PLACE7006275 | 0 | 0 | 0 | 100 | 0 | 0 | 0 |
| PLACE7006498 | 0 | 0 | 0 | 100 | 0 | 0 | 0 |
| PLACE7006540 | 0 | 0 | 0 | 100 | 0 | 0 | 0 |
| PLACE7007379 | 0 | 0 | 0 | 100 | 0 | 0 | 0 |
| PLACE7007644 | 0 | 0 | 0 | 100 | 0 | 0 | 0 |
| PLACE7007973 | 0 | 0 | 0 | 100 | 0 | 0 | 0 |
| PLACE7008136 | 0 | 0 | 0 | 100 | 0 | 0 | 0 |
| PLACE7008261 | 0 | 0 | 0 | 50.708 | 0 | 0 | 0 |
| PLACE7008431 | 0 | 0 | 0 | 100 | 0 | 0 | 0 |
| PLACE7008623 | 0 | 0 | 0 | 100 | 0 | 0 | 0 |
| PLACE7008766 | 0 | 0 | 0 | 100 | 0 | 0 | 0 |
| PLACE7009563 | 0 | 0 | 0 | 100 | 0 | 0 | 0 |
| PROST1000033 | 0 | 0 | 0 | 0 | 39.071 | 0 | 0 |
| PROST1000039 | 0 | 0 | 0 | 0 | 100 | 0 | 0 |
| PROST1000065 | 0 | 0 | 0 | 0 | 100 | 0 | 0 |
| PROST1000083 | 0 | 0 | 0 | 0 | 100 | 0 | 0 |
| PROST1000085 | 0 | 0 | 0 | 0 | 24.534 | 0 | 0 |
| PROST1000097 | 0 | 0 | 7.922 | 2.093 | 2.085 | 0 | 0 |
| PROST1000110 | 0 | 0 | 0 | 0 | 100 | 0 | 0 |
| PROST1000120 | 0 | 24.787 | 0 | 5.869 | 11.695 | 18.607 | 0 |
| PROST1000123 | 0 | 0 | 0 | 0 | 100 | 0 | 0 |
| PROST1000136 | 0 | 0 | 0 | 0 | 100 | 0 | 0 |
| PROST1000144 | 0 | 0 | 0 | 2.790 | 5.560 | 0 | 0 |
| PROST1000145 | 0 | 0 | 0 | 0 | 100 | 0 | 0 |
| PROST1000152 | 0 | 0 | 0 | 0 | 100 | 0 | 0 |
| PROST1000167 | 0 | 0 | 0 | 0 | 100 | 0 | 0 |
| PROST1000184 | 0 | 0 | 0 | 0 | 100 | 0 | 0 |
| PROST1000199 | 0 | 0 | 0 | 1.300 | 5.182 | 0 | 0 |
| PROST1000215 | 0 | 0 | 0 | 0 | 18.139 | 28.860 | 0 |
| PROST1000217 | 0 | 0 | 0 | 0 | 100 | 0 | 0 |
| PROST1000220 | 0 | 0 | 0 | 0 | 43.340 | 0 | 0 |
| PROST1000226 | 0 | 0 | 0 | 6.368 | 12.690 | 0 | 0 |
| PROST1000246 | 0 | 0 | 0 | 0 | 38.964 | 0 | 0 |
| PROST1000262 | 0 | 0 | 0 | 0 | 100 | 0 | 0 |
| PROST1000272 | 0 | 0 | 0 | 0 | 11.190 | 0 | 0 |
| PROST1000298 | 0 | 0 | 0 | 0 | 100 | 0 | 0 |
| PROST1000322 | 0 | 0 | 0 | 0 | 42.387 | 0 | 0 |
| PROST1000334 | 0 | 0 | 0 | 0 | 100 | 0 | 0 |
| PROST1000343 | 0 | 0 | 0 | 0 | 10.074 | 0 | 0 |
| PROST1000362 | 0 | 0 | 0 | 0 | 100 | 0 | 0 |
| PROST1000377 | 0 | 0 | 0 | 0 | 100 | 0 | 0 |
| PROST1000383 | 0 | 0 | 0 | 0 | 76.179 | 0 | 0 |
| PROST1000412 | 0 | 0 | 0 | 0 | 100 | 0 | 0 |
| PROST1000419 | 0 | 0 | 0 | 0 | 100 | 0 | 0 |
| PROST1000451 | 0 | 0 | 0 | 0 | 100 | 0 | 0 |
| PROST1000480 | 0 | 0 | 0 | 0 | 67.090 | 0 | 0 |
| PROST1000485 | 0 | 0 | 0 | 0 | 100 | 0 | 0 |
| PROST1000493 | 0 | 0 | 0 | 0 | 100 | 0 | 0 |
| PROST1000512 | 0 | 0 | 0 | 0 | 53.436 | 0 | 0 |
| PROST1000526 | 0 | 0 | 0 | 0 | 8.960 | 0 | 0 |
| PROST1000527 | 0 | 0 | 0 | 0 | 100 | 0 | 0 |
| PROST1000528 | 0 | 0 | 0 | 0 | 100 | 0 | 0 |
| PROST1000536 | 0 | 0 | 0 | 10.700 | 42.645 | 0 | 0 |
| PROST1000559 | 0 | 0 | 0 | 0 | 100 | 0 | 0 |
| PROST1000564 | 0 | 0 | 0 | 0 | 4.767 | 0 | 0 |
| PROST1000575 | 0 | 0 | 0 | 0 | 100 | 0 | 0 |
| PROST2000036 | 0 | 0 | 0 | 0 | 9.969 | 0 | 0 |
| PROST2000053 | 0 | 0 | 0 | 0 | 100 | 0 | 0 |
| PROST2000067 | 0 | 0 | 0 | 0 | 100 | 0 | 0 |
| PROST2000079 | 0 | 0 | 0 | 0 | 10.615 | 0 | 0 |
| PROST2000105 | 0 | 0 | 0 | 0 | 100 | 0 | 0 |
| PROST2000138 | 0 | 0.651 | 1.168 | 3.085 | 1.537 | 0 | 0 |
| PROST2000143 | 0 | 0 | 0 | 0 | 100 | 0 | 0 |
| PROST2000162 | 0 | 0 | 0 | 0 | 100 | 0 | 0 |
| PROST2000165 | 0 | 0 | 0 | 0 | 32.383 | 0 | 0 |
| PROST2000176 | 0 | 0 | 0 | 0 | 9.001 | 0 | 0 |
| PROST2000203 | 0 | 0 | 0 | 0 | 100 | 0 | 0 |
| PROST2000206 | 0 | 0 | 0 | 0 | 77.659 | 0 | 0 |
| PROST2000212 | 0 | 0 | 0 | 0 | 100 | 0 | 0 |
| PROST2000241 | 0 | 0 | 0 | 0 | 21.702 | 0 | 0 |
| PROST2000267 | 0 | 0 | 0 | 0 | 100 | 0 | 0 |
| PROST2000273 | 0 | 0 | 0 | 0 | 74.833 | 0 | 0 |
| PROST2000274 | 0 | 0 | 0 | 18.366 | 36.598 | 0 | 0 |
| PROST2000277 | 0 | 0 | 0 | 0 | 75.996 | 0 | 0 |
| PROST2000284 | 0 | 0 | 0 | 0 | 12.419 | 0 | 0 |
| PROST2000325 | 0 | 53.208 | 0 | 0 | 25.104 | 0 | 0 |
| PROST2000337 | 0 | 0 | 0 | 0 | 65.749 | 0 | 0 |
| PROST2000432 | 0 | 0 | 0 | 0 | 48.885 | 0 | 0 |
| PROST2000452 | 0 | 0 | 0 | 0 | 100 | 0 | 0 |
| PROST2000463 | 0 | 0 | 0 | 0 | 60.719 | 0 | 0 |
| PROST2000470 | 0 | 0 | 0 | 0 | 100 | 0 | 0 |
| PROST2000505 | 0 | 0 | 0 | 0 | 100 | 0 | 0 |
| PROST2000567 | 0 | 0 | 0 | 0 | 50.797 | 0 | 0 |
| PROST2000572 | 0 | 0 | 0 | 0 | 100 | 0 | 0 |
| PROST2000717 | 0 | 0 | 0 | 0 | 100 | 0 | 0 |
| PROST2000760 | 0 | 0 | 0 | 0 | 9.948 | 0 | 0 |
| PROST2000761 | 0 | 0 | 0 | 0 | 33.566 | 0 | 0 |
| PROST2000835 | 0 | 0 | 0 | 0 | 75.996 | 0 | 0 |
| PROST2000893 | 0 | 0 | 0 | 0 | 58.722 | 0 | 0 |
| PROST2000961 | 0 | 0 | 0 | 0 | 100 | 0 | 0 |
| PROST2001002 | 0 | 0 | 0 | 0 | 69.674 | 0 | 0 |
| PROST2001116 | 0 | 0 | 0 | 0 | 75.996 | 0 | 0 |
| PROST2001138 | 0 | 0 | 0 | 0 | 100 | 0 | 0 |
| PROST2001180 | 0 | 0 | 0 | 0 | 8.805 | 0 | 0 |
| PROST2001213 | 0 | 0 | 0 | 0 | 59.127 | 0 | 0 |
| PROST2001283 | 0 | 0 | 0 | 0 | 7.546 | 0 | 0 |
| PROST2001414 | 0 | 0 | 0 | 0 | 100 | 0 | 0 |
| PROST2001415 | 0 | 0 | 0 | 0 | 100 | 0 | 0 |
| PROST2001465 | 0 | 0 | 0 | 0 | 100 | 0 | 0 |
| PROST2001521 | 0 | 0 | 0 | 0 | 4.309 | 0 | 52.873 |
| PROST2001540 | 0 | 0 | 0 | 0 | 100 | 0 | 0 |
| PROST2001552 | 0 | 0 | 0 | 0 | 3.087 | 0 | 0 |
| PROST2001599 | 0 | 0 | 0 | 0 | 100 | 0 | 0 |
| PROST2001611 | 0 | 0 | 0 | 0 | 100 | 0 | 0 |
| PROST2001636 | 0 | 0 | 0 | 0 | 100 | 0 | 0 |
| PROST2001739 | 0 | 0 | 0 | 0 | 11.723 | 0 | 0 |
| PROST2001796 | 0 | 0 | 0 | 0 | 100 | 0 | 0 |
| PROST2001805 | 0 | 0 | 0 | 0 | 100 | 0 | 0 |
| PROST2001823 | 0 | 0 | 0 | 0 | 65.749 | 0 | 0 |
| PROST2001883 | 0 | 0 | 0 | 0 | 3.167 | 0 | 0 |
| PROST2001899 | 0 | 0 | 0 | 0 | 100 | 0 | 0 |
| PROST2001997 | 0 | 0 | 0 | 0 | 20.676 | 0 | 0 |
| PROST2001998 | 0 | 0 | 0 | 0 | 100 | 0 | 0 |
| PROST2002078 | 0 | 0 | 0 | 0 | 8.618 | 0 | 0 |
| PROST2002101 | 0 | 0 | 0 | 0 | 100 | 0 | 0 |
| PROST2002162 | 0 | 0 | 0 | 0 | 13.729 | 0 | 0 |
| PROST2002212 | 0 | 0 | 0 | 0 | 100 | 0 | 0 |
| PROST2002227 | 0 | 0 | 0 | 0 | 9.014 | 0 | 0 |
| PROST2002338 | 0 | 0 | 0 | 0 | 100 | 0 | 0 |
| PROST2002425 | 0 | 0 | 0 | 0 | 56.349 | 0 | 0 |
| PROST2002488 | 0 | 0 | 0 | 0 | 100 | 0 | 0 |
| PROST2002489 | 0 | 0 | 0 | 0 | 100 | 0 | 0 |
| PROST2002527 | 0 | 0 | 0 | 0 | 100 | 0 | 0 |
| PROST2002591 | 0 | 0 | 0 | 0 | 100 | 0 | 0 |
| PROST2002602 | 0 | 0 | 0 | 0 | 100 | 0 | 0 |
| PROST2002633 | 0 | 0 | 0 | 0 | 100 | 0 | 0 |
| PROST2002651 | 0 | 0 | 0 | 0 | 10.605 | 0 | 0 |
| PROST2002682 | 0 | 0 | 0 | 0 | 100 | 0 | 0 |
| PROST2002685 | 0 | 0 | 0 | 0 | 100 | 0 | 0 |
| PROST2002722 | 0 | 0 | 0 | 0 | 100 | 0 | 0 |
| PROST2002736 | 0 | 0 | 0 | 0 | 100 | 0 | 0 |
| PROST2002842 | 0 | 0 | 0 | 0 | 100 | 0 | 0 |
| PROST2002897 | 0 | 0 | 0 | 0 | 75.996 | 0 | 0 |
| PROST2002906 | 0 | 0 | 0 | 0 | 100 | 0 | 0 |
| PROST2002927 | 0 | 0 | 0 | 0 | 37.967 | 0 | 0 |
| PROST2002960 | 0 | 0 | 0 | 0 | 47.668 | 0 | 0 |
| PROST2003102 | 0 | 0 | 0 | 0 | 100 | 0 | 0 |
| PROST2003117 | 0 | 0 | 0 | 0 | 100 | 0 | 0 |
| PROST2003210 | 0 | 0 | 0 | 0 | 100 | 0 | 0 |
| PROST2003232 | 0 | 0 | 0 | 1.214 | 4.839 | 0 | 0 |
| PROST2003302 | 0 | 0 | 0 | 0 | 100 | 0 | 0 |
| PROST2003303 | 0 | 0 | 0 | 0 | 100 | 0 | 0 |
| PROST2003324 | 0 | 0 | 0 | 0 | 62.709 | 0 | 0 |
| PROST2003338 | 0 | 0 | 0 | 0 | 3.969 | 6.316 | 0 |
| PROST2003340 | 0 | 0 | 0 | 0 | 100 | 0 | 0 |
| PROST2003396 | 0 | 0 | 0 | 21.264 | 21.187 | 0 | 0 |
| PROST2003428 | 0 | 0 | 0 | 0 | 67.090 | 0 | 0 |
| PROST2003472 | 0 | 0 | 0 | 0 | 100 | 0 | 0 |
| PROST2003517 | 0 | 0 | 0 | 0 | 18.673 | 0 | 0 |
| PROST2003537 | 0 | 0 | 0 | 0 | 75.996 | 0 | 0 |
| PROST2003563 | 0 | 0 | 0 | 0 | 100 | 0 | 0 |
| PROST2003577 | 0 | 0 | 0 | 0 | 100 | 0 | 0 |
| PROST2003583 | 0 | 0 | 0 | 0 | 100 | 0 | 0 |
| PROST2003586 | 0 | 0 | 0 | 0 | 100 | 0 | 0 |
| PROST2003628 | 0 | 0 | 0 | 0 | 100 | 0 | 0 |
| PROST2003635 | 0 | 0 | 0 | 0 | 100 | 0 | 0 |
| PROST2003674 | 0 | 0 | 0 | 0 | 100 | 0 | 0 |
| PROST2003676 | 0 | 0 | 0 | 0 | 100 | 0 | 0 |
| PROST2003725 | 0 | 0 | 0 | 0 | 80.963 | 0 | 0 |
| PROST2003732 | 0 | 0 | 0 | 0 | 100 | 0 | 0 |
| PROST2003775 | 0 | 0 | 0 | 0 | 100 | 0 | 0 |
| PROST2003922 | 0 | 0 | 0 | 0 | 100 | 0 | 0 |
| PROST2003930 | 0 | 0 | 0 | 0 | 100 | 0 | 0 |
| PROST2004095 | 0 | 0 | 0 | 0.833 | 4.980 | 0 | 0 |
| PROST2004115 | 0 | 0 | 0 | 0 | 100 | 0 | 0 |
| PROST2004142 | 0 | 0 | 0 | 0 | 100 | 0 | 0 |
| PROST2004146 | 0 | 0 | 0 | 0 | 100 | 0 | 0 |
| PROST2004161 | 0 | 0 | 0 | 0 | 100 | 0 | 0 |
| PROST2004251 | 0 | 0 | 0 | 0 | 3.177 | 0 | 0 |
| PROST2004258 | 0 | 0 | 0 | 0 | 27.061 | 0 | 0 |
| PROST2004270 | 0 | 0 | 0 | 0 | 10.427 | 0 | 0 |
| PROST2004332 | 0 | 0 | 0 | 0 | 100 | 0 | 0 |
| PROST2004416 | 0 | 0 | 0 | 1.210 | 2.411 | 0 | 0 |
| PROST2004481 | 0 | 0 | 0 | 0 | 100 | 0 | 0 |
| PROST2004526 | 0 | 0 | 0 | 0 | 100 | 0 | 0 |
| PROST2004570 | 0 | 0 | 0 | 0 | 26.582 | 0 | 0 |
| PROST2004727 | 0 | 0 | 0 | 0 | 100 | 0 | 0 |
| PROST2004739 | 0 | 0 | 0 | 0 | 26.371 | 0 | 0 |
| PROST2004742 | 0 | 0 | 0 | 0 | 100 | 0 | 0 |
| PROST2004744 | 0 | 39.737 | 0 | 0 | 18.748 | 0 | 0 |
| PROST2004817 | 0 | 0 | 0 | 0 | 100 | 0 | 0 |
| PROST2005039 | 0 | 0 | 0 | 0 | 48.872 | 0 | 0 |
| PROST2005067 | 0 | 0 | 0 | 0 | 57.209 | 0 | 0 |
| PROST2005076 | 0 | 0 | 48.502 | 0 | 25.535 | 0 | 0 |
| PROST2005093 | 0 | 0 | 0 | 0 | 83.324 | 0 | 0 |
| PROST2005121 | 0 | 0 | 0 | 0 | 100 | 0 | 0 |
| PROST2005131 | 0 | 0 | 0 | 0 | 100 | 0 | 0 |
| PROST2005143 | 0 | 0 | 0 | 0 | 24.058 | 0 | 0 |
| PROST2005228 | 0 | 0 | 0 | 0 | 100 | 0 | 0 |
| PROST2005272 | 0 | 0 | 0 | 0 | 29.123 | 0 | 0 |
| PROST2005285 | 0 | 0 | 0 | 13.283 | 26.470 | 0 | 0 |
| PROST2005426 | 0 | 0 | 0 | 0 | 100 | 0 | 0 |
| PROST2005466 | 0 | 0 | 0 | 0 | 83.324 | 0 | 0 |
| PROST2005604 | 0 | 0 | 0 | 0 | 11.031 | 0 | 0 |
| PROST2005630 | 0 | 0 | 0 | 0 | 100 | 0 | 0 |
| PROST2005683 | 0 | 0 | 61.281 | 0 | 32.263 | 0 | 0 |
| PROST2005788 | 0 | 0 | 0 | 0 | 100 | 0 | 0 |
| PROST2005793 | 0 | 0 | 0 | 0 | 13.907 | 0 | 0 |
| PROST2005880 | 0 | 0 | 0 | 0 | 100 | 0 | 0 |
| PROST2005886 | 0 | 0 | 0 | 0 | 100 | 0 | 0 |
| PROST2005904 | 0 | 0 | 0 | 0 | 100 | 0 | 0 |
| PROST2005919 | 0 | 0 | 0 | 0 | 100 | 0 | 0 |
| PROST2005943 | 0 | 0 | 0 | 0 | 100 | 0 | 0 |
| PROST2006008 | 0 | 0 | 0 | 0 | 100 | 0 | 0 |
| PROST2006020 | 0 | 0 | 0 | 0 | 100 | 0 | 0 |
| PROST2006030 | 0 | 0 | 0 | 6.734 | 13.418 | 0 | 0 |
| PROST2006060 | 0 | 0 | 0 | 0 | 23.679 | 0 | 0 |
| PROST2006196 | 0 | 0 | 0 | 0 | 100 | 0 | 0 |
| PROST2006201 | 0 | 0 | 0 | 0 | 100 | 0 | 0 |
| PROST2006260 | 0 | 0 | 0 | 7.247 | 14.441 | 0 | 0 |
| PROST2006282 | 0 | 0 | 0 | 0 | 31.502 | 0 | 0 |
| PROST2006343 | 0 | 0 | 0 | 0 | 31.360 | 0 | 0 |
| PROST2006450 | 0 | 0 | 0 | 0 | 100 | 0 | 0 |
| PROST2006491 | 0 | 0 | 0 | 0 | 100 | 0 | 0 |
| PROST2006510 | 0 | 0 | 0 | 0 | 100 | 0 | 0 |
| PROST2006536 | 0 | 0 | 0 | 0 | 23.609 | 0 | 0 |
| PROST2006579 | 0 | 0 | 0 | 0 | 100 | 0 | 0 |
| PROST2006688 | 0 | 0 | 0 | 0 | 100 | 0 | 0 |
| PROST2006737 | 0 | 0 | 0 | 0 | 8.595 | 0 | 0 |
| PROST2006766 | 0 | 0 | 0 | 0 | 100 | 0 | 0 |
| PROST2006782 | 0 | 0 | 0 | 0 | 100 | 0 | 0 |
| PROST2006933 | 0 | 0 | 0 | 0 | 67.090 | 0 | 0 |
| PROST2006988 | 0 | 0 | 0 | 0 | 51.786 | 0 | 0 |
| PROST2007122 | 0 | 0 | 0 | 0 | 100 | 0 | 0 |
| PROST2007200 | 0 | 0 | 0 | 0 | 41.890 | 0 | 0 |
| PROST2007237 | 0 | 0 | 0 | 0 | 100 | 0 | 0 |
| PROST2007248 | 0 | 0 | 0 | 0 | 66.101 | 0 | 0 |
| PROST2007289 | 0 | 0 | 0 | 0 | 100 | 0 | 0 |
| PROST2007317 | 0 | 0 | 0 | 0 | 84.436 | 0 | 0 |
| PROST2007328 | 0 | 0 | 0 | 0 | 100 | 0 | 0 |
| PROST2007382 | 0 | 0 | 0 | 0 | 100 | 0 | 0 |
| PROST2007389 | 0 | 0 | 0 | 0 | 100 | 0 | 0 |
| PROST2007416 | 0 | 0 | 0 | 0 | 100 | 0 | 0 |
| PROST2007528 | 0 | 0 | 0 | 0 | 100 | 0 | 0 |
| PROST2007612 | 0 | 0 | 0 | 0 | 11.325 | 0 | 0 |
| PROST2007818 | 0 | 0 | 0 | 0 | 100 | 0 | 0 |
| PROST2007871 | 0 | 0 | 0 | 0 | 39.115 | 0 | 0 |
| PROST2007950 | 0 | 0 | 0 | 0 | 100 | 0 | 0 |
| PROST2007956 | 0 | 0 | 0 | 0 | 100 | 0 | 0 |
| PROST2007974 | 0 | 0 | 0 | 0 | 100 | 0 | 0 |
| PROST2007988 | 0 | 0 | 0 | 0 | 100 | 0 | 0 |
| PROST2008079 | 0 | 0 | 0 | 0 | 100 | 0 | 0 |
| PROST2008088 | 0 | 0 | 0 | 0 | 100 | 0 | 0 |
| PROST2008243 | 0 | 0 | 0 | 0 | 100 | 0 | 0 |
| PROST2008245 | 0 | 0 | 0 | 0 | 100 | 0 | 0 |
| PROST2008268 | 0 | 0 | 0 | 0 | 65.749 | 0 | 0 |
| PROST2008271 | 0 | 0 | 0 | 0 | 13.898 | 0 | 0 |
| PROST2008360 | 0 | 0 | 0 | 0 | 12.766 | 0 | 0 |
| PROST2008447 | 0 | 0 | 0 | 0 | 100 | 0 | 0 |
| PROST2008468 | 0 | 0 | 0 | 0 | 100 | 0 | 0 |
| PROST2008472 | 0 | 0 | 0 | 0 | 100 | 0 | 0 |
| PROST2008489 | 0 | 0 | 0 | 0 | 2.297 | 7.309 | 0 |
| PROST2008516 | 0 | 0 | 0 | 0 | 100 | 0 | 0 |
| PROST2008724 | 0 | 0 | 0 | 0 | 100 | 0 | 0 |
| PROST2008770 | 0 | 0 | 0 | 0 | 2.766 | 0 | 0 |
| PROST2008835 | 0 | 0 | 0 | 0 | 100 | 0 | 0 |
| PROST2008993 | 0 | 0 | 0 | 0 | 100 | 0 | 0 |
| PROST2009022 | 0 | 0 | 0 | 0 | 100 | 0 | 0 |
| PROST2009208 | 0 | 0 | 0 | 0 | 100 | 0 | 0 |
| PROST2009222 | 0 | 0 | 0 | 0 | 100 | 0 | 0 |
| PROST2009254 | 0 | 0 | 0 | 0 | 100 | 0 | 0 |
| PROST2009273 | 0 | 0 | 0 | 0 | 100 | 0 | 0 |
| PROST2009320 | 0 | 0 | 0 | 0 | 50.124 | 0 | 0 |
| PROST2009347 | 0 | 0 | 0 | 0 | 67.212 | 0 | 0 |
| PROST2009365 | 0 | 0 | 0 | 0 | 100 | 0 | 0 |
| PROST2009388 | 0 | 0 | 0 | 0 | 100 | 0 | 0 |
| PROST2009400 | 0 | 0 | 0 | 21.223 | 42.291 | 0 | 0 |
| PROST2009470 | 0 | 0 | 0 | 0 | 100 | 0 | 0 |
| PROST2009483 | 0 | 0 | 0 | 0 | 100 | 0 | 0 |
| PROST2009571 | 0 | 0 | 0 | 0 | 100 | 0 | 0 |
| PROST2009731 | 0 | 0 | 0 | 0 | 3.846 | 0 | 0 |
| PROST2009736 | 0 | 0 | 0 | 0 | 100 | 0 | 0 |
| PROST2009795 | 0 | 0 | 0 | 0 | 100 | 0 | 0 |
| PROST2009901 | 0 | 0 | 0 | 0 | 100 | 0 | 0 |
| PROST2009909 | 0 | 0 | 0 | 0 | 100 | 0 | 0 |
| PROST2010046 | 0 | 0 | 0 | 0 | 100 | 0 | 0 |
| PROST2010219 | 0 | 0 | 0 | 0 | 75.996 | 0 | 0 |
| PROST2010250 | 0 | 0 | 0 | 0 | 100 | 0 | 0 |
| PROST2010318 | 0 | 0 | 0 | 0 | 85.605 | 0 | 0 |
| PROST2010326 | 0 | 0 | 0 | 0 | 100 | 0 | 0 |
| PROST2010382 | 0 | 0 | 0 | 0 | 11.098 | 0 | 0 |
| PROST2010400 | 0 | 0 | 0 | 0 | 100 | 0 | 0 |
| PROST2010545 | 0 | 0 | 0 | 0 | 46.670 | 0 | 0 |
| PROST2010579 | 0 | 0 | 0 | 0 | 66.659 | 0 | 0 |
| PROST2010606 | 0 | 0 | 0 | 0 | 100 | 0 | 0 |
| PROST2010782 | 0 | 0 | 0 | 0.866 | 2.587 | 0 | 0 |
| PROST2010885 | 0 | 0 | 0 | 0 | 100 | 0 | 0 |
| PROST2011012 | 0 | 0 | 0 | 0 | 100 | 0 | 0 |
| PROST2011038 | 0 | 0 | 0 | 0 | 42.556 | 0 | 0 |
| PROST2011105 | 0 | 0 | 0 | 0 | 63.107 | 0 | 0 |
| PROST2011297 | 0 | 0 | 0 | 0 | 100 | 0 | 0 |
| PROST2011410 | 0 | 0 | 0 | 0 | 14.062 | 0 | 0 |
| PROST2011439 | 0 | 0 | 0 | 0 | 100 | 0 | 0 |
| PROST2011482 | 0 | 0 | 0 | 0 | 65.749 | 0 | 0 |
| PROST2011577 | 0 | 0 | 0 | 0 | 3.649 | 0 | 0 |
| PROST2011631 | 0 | 0 | 0 | 0 | 100 | 0 | 0 |
| PROST2011660 | 0 | 0 | 0 | 0 | 83.324 | 0 | 0 |
| PROST2012005 | 0 | 0 | 0 | 0 | 100 | 0 | 0 |
| PROST2012007 | 0 | 0 | 0 | 2.020 | 4.025 | 0 | 0 |
| PROST2012016 | 0 | 0 | 0 | 0 | 77.874 | 0 | 0 |
| PROST2012088 | 0 | 0 | 0 | 0 | 100 | 0 | 0 |
| PROST2012140 | 0 | 0 | 0 | 0 | 65.565 | 0 | 0 |
| PROST2012157 | 0 | 0 | 0 | 0 | 100 | 0 | 0 |
| PROST2012190 | 0 | 0 | 0 | 0 | 100 | 0 | 0 |
| PROST2012249 | 0 | 0 | 0 | 0 | 100 | 0 | 0 |
| PROST2012353 | 0 | 0 | 0 | 0 | 33.336 | 0 | 0 |
| PROST2012400 | 0 | 0 | 0 | 0 | 100 | 0 | 0 |
| PROST2012448 | 0 | 0 | 0 | 0 | 28.935 | 0 | 0 |
| PROST2012504 | 0 | 0 | 0 | 0 | 80.963 | 0 | 0 |
| PROST2012542 | 0 | 0 | 0 | 0 | 100 | 0 | 0 |
| PROST2012550 | 0 | 0 | 0 | 0 | 100 | 0 | 0 |
| PROST2012740 | 0 | 0 | 0 | 0 | 100 | 0 | 0 |
| PROST2012745 | 0 | 0 | 0 | 0 | 13.715 | 0 | 0 |
| PROST2012780 | 0 | 0 | 0 | 0 | 25.798 | 0 | 0 |
| PROST2012888 | 0 | 0 | 0 | 0 | 59.538 | 0 | 0 |
| PROST2012890 | 0 | 0 | 0 | 0 | 54.091 | 0 | 0 |
| PROST2013032 | 0 | 0 | 0 | 0 | 100 | 0 | 0 |
| PROST2013053 | 0 | 0 | 0 | 5.271 | 10.504 | 0 | 0 |
| PROST2013121 | 0 | 0 | 0 | 19.142 | 38.145 | 0 | 0 |
| PROST2013260 | 0 | 0 | 0 | 0 | 100 | 0 | 0 |
| PROST2013327 | 0 | 0 | 0 | 0 | 100 | 0 | 0 |
| PROST2013531 | 0 | 0 | 0 | 0 | 100 | 0 | 0 |
| PROST2013605 | 0 | 0 | 0 | 0 | 100 | 0 | 0 |
| PROST2013627 | 0 | 0 | 0 | 0 | 100 | 0 | 0 |
| PROST2013873 | 0 | 0 | 0 | 0 | 100 | 0 | 0 |
| PROST2013880 | 0 | 0 | 0 | 0 | 100 | 0 | 0 |
| PROST2014422 | 0 | 0 | 0 | 0 | 100 | 0 | 0 |
| PROST2014585 | 0 | 0 | 0 | 0 | 100 | 0 | 0 |
| PROST2014601 | 0 | 0 | 0 | 0 | 100 | 0 | 0 |
| PROST2014659 | 0 | 0 | 0 | 0 | 100 | 0 | 0 |
| PROST2014862 | 0 | 0 | 0 | 0 | 56.349 | 0 | 0 |
| PROST2014916 | 0 | 0 | 0 | 0 | 12.920 | 0 | 0 |
| PROST2014925 | 0 | 0 | 0 | 0 | 100 | 0 | 0 |
| PROST2015124 | 0 | 0 | 0 | 0 | 100 | 0 | 0 |
| PROST2015137 | 0 | 0 | 0 | 0 | 65.163 | 0 | 0 |
| PROST2015198 | 0 | 0 | 0 | 0 | 100 | 0 | 0 |
| PROST2015243 | 0 | 0 | 0 | 0 | 100 | 0 | 0 |
| PROST2015246 | 0 | 0 | 0 | 0 | 100 | 0 | 0 |
| PROST2015251 | 0 | 0 | 0 | 0 | 76.179 | 0 | 0 |
| PROST2015287 | 0 | 0 | 0 | 0 | 38.071 | 0 | 0 |
| PROST2015332 | 0 | 0 | 17.362 | 0 | 9.141 | 0 | 0 |
| PROST2015457 | 0 | 0 | 0 | 0 | 100 | 0 | 0 |
| PROST2015464 | 0 | 0 | 0 | 0 | 6.083 | 0 | 37.318 |
| PROST2015537 | 0 | 0 | 0 | 0 | 100 | 0 | 0 |
| PROST2015545 | 0 | 0 | 0 | 0 | 100 | 0 | 0 |
| PROST2015551 | 0 | 0 | 0 | 0 | 100 | 0 | 0 |
| PROST2015636 | 0 | 0 | 0 | 0 | 100 | 0 | 0 |
| PROST2015710 | 0 | 0 | 0 | 0 | 43.675 | 0 | 0 |
| PROST2015756 | 0 | 0 | 0 | 0 | 100 | 0 | 0 |
| PROST2015877 | 0 | 0 | 0 | 0 | 100 | 0 | 0 |
| PROST2015900 | 0 | 0 | 0 | 0 | 83.324 | 0 | 0 |
| PROST2015924 | 0 | 50.935 | 0 | 0 | 24.031 | 0 | 0 |
| PROST2015932 | 0 | 0 | 0 | 0 | 100 | 0 | 0 |
| PROST2016195 | 0 | 0 | 0 | 0 | 20.739 | 0 | 0 |
| PROST2016246 | 0 | 0 | 0 | 0 | 100 | 0 | 0 |
| PROST2016351 | 0 | 0 | 59.664 | 0 | 31.411 | 0 | 0 |
| PROST2016379 | 0 | 0 | 0 | 0 | 100 | 0 | 0 |
| PROST2016444 | 0 | 0 | 0 | 0 | 100 | 0 | 0 |
| PROST2016462 | 0 | 0 | 0 | 0 | 100 | 0 | 0 |
| PROST2016499 | 0 | 0 | 0 | 0 | 100 | 0 | 0 |
| PROST2016512 | 0 | 0 | 0 | 0 | 100 | 0 | 0 |
| PROST2016566 | 0 | 0 | 0 | 0 | 100 | 0 | 0 |
| PROST2016582 | 0 | 0 | 65.511 | 0 | 34.489 | 0 | 0 |
| PROST2016668 | 0 | 0 | 0 | 0 | 100 | 0 | 0 |
| PROST2016684 | 0 | 0 | 0 | 0 | 100 | 0 | 0 |
| PROST2016777 | 0 | 0 | 0 | 0 | 100 | 0 | 0 |
| PROST2016829 | 0 | 0 | 0 | 0 | 100 | 0 | 0 |
| PROST2016860 | 0 | 0 | 0 | 0 | 100 | 0 | 0 |
| PROST2016918 | 0 | 0 | 0 | 0 | 22.538 | 0 | 0 |
| PROST2016980 | 0 | 0 | 0 | 0 | 80.304 | 0 | 0 |
| PROST2017098 | 0 | 0 | 0 | 0 | 100 | 0 | 0 |
| PROST2017128 | 0 | 0 | 54.279 | 0 | 28.576 | 0 | 0 |
| PROST2017203 | 0 | 0 | 0 | 0 | 4.605 | 0 | 0 |
| PROST2017367 | 0 | 0 | 0 | 0 | 100 | 0 | 0 |
| PROST2017413 | 0 | 0 | 0 | 0 | 100 | 0 | 0 |
| PROST2017441 | 0 | 0 | 0 | 0 | 100 | 0 | 0 |
| PROST2017529 | 0 | 0 | 0 | 0 | 9.001 | 0 | 0 |
| PROST2017578 | 0 | 0 | 0 | 0 | 100 | 0 | 0 |
| PROST2017612 | 0 | 0 | 0 | 0 | 75.996 | 0 | 0 |
| PROST2017617 | 0 | 0 | 0 | 0 | 74.833 | 0 | 0 |
| PROST2017692 | 0 | 0 | 0 | 0 | 2.613 | 0 | 0 |
| PROST2017700 | 0 | 0 | 0 | 0 | 100 | 0 | 0 |
| PROST2017701 | 0 | 0 | 0 | 0 | 100 | 0 | 0 |
| PROST2017729 | 0 | 0 | 0 | 0 | 50.124 | 0 | 0 |
| PROST2017836 | 0 | 0 | 0 | 0 | 100 | 0 | 0 |
| PROST2017910 | 0 | 0 | 0 | 0 | 37.058 | 0 | 0 |
| PROST2017972 | 0 | 0 | 0 | 0 | 42.891 | 0 | 0 |
| PROST2018030 | 0 | 0 | 0 | 0 | 100 | 0 | 0 |
| PROST2018090 | 0 | 0 | 0 | 0 | 7.715 | 0 | 47.331 |
| PROST2018235 | 0 | 0 | 0 | 0 | 100 | 0 | 0 |
| PROST2018437 | 0 | 0 | 0 | 0 | 100 | 0 | 0 |
| PROST2018487 | 0 | 0 | 0 | 0 | 100 | 0 | 0 |
| PROST2018511 | 0 | 0 | 0 | 0 | 100 | 0 | 0 |
| PROST2018583 | 0 | 0 | 0 | 0 | 32.777 | 0 | 0 |
| PROST2018588 | 0 | 0 | 0 | 23.355 | 46.539 | 0 | 0 |
| PROST2018607 | 0 | 0 | 0 | 0 | 59.538 | 0 | 0 |
| PROST2018788 | 0 | 0 | 0 | 0 | 100 | 0 | 0 |
| PROST2018902 | 0 | 0 | 0 | 0 | 100 | 0 | 0 |
| PROST2018922 | 0 | 0 | 0 | 0 | 100 | 0 | 0 |
| PROST2018977 | 0 | 0 | 0 | 0 | 46.084 | 0 | 0 |
| PROST2019164 | 0 | 0 | 0 | 0 | 13.077 | 0 | 0 |
| PROST2019253 | 0 | 0 | 0 | 0 | 5.958 | 0 | 0 |
| PROST2019296 | 0 | 0 | 0 | 0 | 20.168 | 0 | 0 |
| PROST2019398 | 0 | 0 | 0 | 0 | 100 | 0 | 0 |
| PROST2019487 | 0 | 0 | 0 | 0 | 100 | 0 | 0 |
| PROST2019781 | 0 | 0 | 0 | 0 | 100 | 0 | 0 |
| PUAEN1000039 | 0 | 0 | 0 | 0 | 0 | 100 | 0 |
| PUAEN1000057 | 0 | 0 | 0 | 0 | 0 | 23.169 | 0 |
| PUAEN1000065 | 0 | 0 | 13.535 | 0 | 16.627 | 3.779 | 0 |
| PUAEN1000081 | 0 | 0 | 0 | 0 | 0 | 75.183 | 0 |
| PUAEN1000085 | 0 | 0 | 0 | 0 | 0 | 100 | 0 |
| PUAEN1000087 | 0 | 0 | 0 | 0 | 0 | 100 | 0 |
| PUAEN1000121 | 0 | 0 | 0 | 0 | 0 | 100 | 0 |
| PUAEN1000147 | 0 | 0 | 0 | 0 | 0 | 52.615 | 0 |
| PUAEN1000161 | 0 | 0 | 0 | 20.531 | 0 | 32.548 | 0 |
| PUAEN1000164 | 0 | 0 | 0 | 0 | 0 | 4.492 | 0 |
| PUAEN1000175 | 0 | 0 | 0 | 0 | 0 | 100 | 0 |
| PUAEN1000239 | 0 | 0 | 0 | 0 | 0 | 17.492 | 0 |
| PUAEN1000275 | 0 | 0 | 0 | 0 | 0 | 100 | 0 |
| PUAEN1000276 | 0 | 0 | 0 | 0 | 0 | 100 | 0 |
| PUAEN1000288 | 0 | 0 | 0 | 0 | 0 | 100 | 0 |
| PUAEN1000322 | 0 | 0 | 0 | 0 | 0 | 7.213 | 0 |
| PUAEN2000080 | 0 | 0 | 0 | 0 | 0 | 100 | 0 |
| PUAEN2000152 | 0 | 0 | 0 | 0 | 0 | 66.977 | 0 |
| PUAEN2000175 | 0 | 0 | 0 | 0 | 0 | 19.914 | 0 |
| PUAEN2000247 | 0 | 0 | 0 | 0 | 19.593 | 62.349 | 0 |
| PUAEN2000312 | 0 | 0 | 0 | 0 | 0 | 49.955 | 0 |
| PUAEN2000374 | 0 | 0 | 0 | 1.709 | 0 | 5.418 | 0 |
| PUAEN2000394 | 0 | 0 | 0 | 0 | 0 | 100 | 0 |
| PUAEN2000497 | 0 | 0 | 0 | 0 | 0 | 14.547 | 0 |
| PUAEN2000535 | 0 | 6.045 | 0 | 0 | 0 | 4.538 | 0 |
| PUAEN2000594 | 0 | 0 | 0 | 0 | 0 | 60.344 | 0 |
| PUAEN2000684 | 0 | 0 | 0 | 0 | 0 | 100 | 0 |
| PUAEN2000942 | 0 | 0 | 0 | 0 | 0 | 75.335 | 0 |
| PUAEN2001260 | 0 | 0 | 0 | 0 | 0 | 100 | 0 |
| PUAEN2001345 | 0 | 0 | 0 | 0 | 0 | 16.521 | 0 |
| PUAEN2001526 | 0 | 0 | 0 | 0 | 0 | 100 | 0 |
| PUAEN2001586 | 0 | 0 | 0 | 5.082 | 0 | 16.112 | 0 |
| PUAEN2001882 | 0 | 0 | 0 | 0 | 0 | 61.957 | 0 |
| PUAEN2002473 | 0 | 0 | 0 | 0 | 0 | 100 | 0 |
| PUAEN2002489 | 0 | 0 | 0 | 0 | 0 | 36.817 | 0 |
| PUAEN2002552 | 0 | 0 | 0 | 0 | 0 | 100 | 0 |
| PUAEN2002568 | 0 | 0 | 0 | 0 | 0 | 61.524 | 0 |
| PUAEN2002616 | 0 | 0 | 0 | 0 | 0 | 100 | 0 |
| PUAEN2002758 | 0 | 0 | 0 | 0 | 0 | 100 | 0 |
| PUAEN2003018 | 0 | 0 | 0 | 0 | 0 | 18.914 | 0 |
| PUAEN2003079 | 0 | 0 | 0 | 0 | 0 | 100 | 0 |
| PUAEN2003116 | 0 | 0 | 0 | 0 | 0 | 100 | 0 |
| PUAEN2003408 | 0 | 0 | 0 | 0 | 0 | 16.993 | 0 |
| PUAEN2003517 | 0 | 0 | 0 | 0 | 0 | 100 | 0 |
| PUAEN2003954 | 0 | 0 | 0 | 0 | 0 | 61.526 | 0 |
| PUAEN2004067 | 0 | 0 | 0 | 0 | 0 | 100 | 0 |
| PUAEN2004083 | 0 | 0 | 0 | 0 | 0 | 100 | 0 |
| PUAEN2004400 | 0 | 0 | 0 | 0 | 0 | 40.652 | 0 |
| PUAEN2004511 | 0 | 0 | 0 | 0 | 0 | 100 | 0 |
| PUAEN2004525 | 0 | 0 | 0 | 0 | 0 | 100 | 0 |
| PUAEN2004875 | 0 | 0 | 0 | 0 | 0 | 100 | 0 |
| PUAEN2005110 | 0 | 0 | 0 | 0 | 0 | 100 | 0 |
| PUAEN2005247 | 0 | 0 | 0 | 0 | 0 | 100 | 0 |
| PUAEN2005502 | 0 | 0 | 0 | 0 | 0 | 60.392 | 0 |
| PUAEN2005588 | 0 | 0 | 0 | 0 | 0 | 100 | 0 |
| PUAEN2005930 | 0 | 0 | 0 | 0 | 0 | 51.805 | 0 |
| PUAEN2006029 | 0 | 0 | 0 | 0 | 0 | 100 | 0 |
| PUAEN2006328 | 0 | 0 | 0 | 0 | 0 | 20.807 | 0 |
| PUAEN2006335 | 0 | 0 | 0 | 0 | 0 | 71.562 | 0 |
| PUAEN2006578 | 0 | 0 | 0 | 0 | 0 | 100 | 0 |
| PUAEN2006639 | 0 | 0 | 0 | 0 | 0 | 100 | 0 |
| PUAEN2006761 | 0 | 0 | 0 | 0 | 0 | 100 | 0 |
| PUAEN2007044 | 0 | 0 | 0 | 5.102 | 0 | 8.088 | 0 |
| PUAEN2007350 | 0 | 0 | 0 | 0 | 0 | 75.640 | 0 |
| PUAEN2007785 | 0 | 0 | 0 | 0 | 0 | 100 | 0 |
| PUAEN2007898 | 0 | 0 | 0 | 0 | 0 | 60.962 | 0 |
| PUAEN2008123 | 0 | 0 | 0 | 0 | 0 | 100 | 0 |
| PUAEN2008228 | 0 | 0 | 0 | 0 | 0 | 82.551 | 0 |
| PUAEN2008314 | 0 | 0 | 0 | 0 | 0 | 60.344 | 0 |
| PUAEN2008515 | 0 | 0 | 0 | 0 | 0 | 54.781 | 0 |
| PUAEN2008815 | 0 | 0 | 0 | 0 | 0 | 70.071 | 0 |
| PUAEN2008939 | 0 | 0 | 0 | 6.108 | 0 | 77.460 | 0 |
| PUAEN2008980 | 0 | 0 | 0 | 0 | 0 | 100 | 0 |
| PUAEN2008985 | 0 | 0 | 0 | 0 | 0 | 25.036 | 0 |
| PUAEN2009174 | 0 | 0 | 0 | 0 | 0 | 31.987 | 0 |
| PUAEN2009348 | 0 | 0 | 0 | 0 | 0 | 44.559 | 0 |
| PUAEN2009534 | 0 | 0 | 0 | 0 | 0 | 100 | 0 |
| PUAEN2009655 | 0 | 0 | 0 | 0 | 0 | 20.623 | 0 |
| PUAEN2009795 | 0 | 0 | 0 | 0 | 0 | 100 | 0 |
| PUAEN2009852 | 0 | 0 | 0 | 0 | 0 | 100 | 0 |
| PUAEN2010346 | 0 | 0 | 0 | 0 | 0 | 56.319 | 0 |
| PUAEN2010824 | 0 | 0 | 0 | 0 | 0 | 29.560 | 0 |
| RECTM1000051 | 0 | 0 | 0 | 0 | 0 | 0 | 50.218 |
| RECTM1000141 | 0 | 0 | 0 | 0 | 0 | 0 | 100 |
| RECTM2000220 | 0 | 0 | 0 | 0 | 0 | 0 | 100 |
| RECTM2000349 | 0 | 0 | 0 | 0 | 0 | 0 | 92.174 |
| RECTM2000433 | 0 | 0 | 0 | 0 | 0 | 0 | 75.605 |
| RECTM2000510 | 0 | 0 | 0 | 0 | 0 | 0 | 65.580 |
| RECTM2001307 | 0 | 0 | 0 | 0 | 0 | 0 | 100 |
| RECTM2001347 | 0 | 0 | 0 | 0 | 0 | 0 | 90.247 |
| RECTM2001519 | 0 | 0 | 0 | 0 | 14.015 | 0 | 85.985 |
| RECTM2001666 | 0 | 0 | 0 | 0 | 0 | 0 | 100 |
| RECTM2001691 | 0 | 0 | 0 | 0 | 0 | 0 | 100 |
| RECTM2001749 | 0 | 0 | 0 | 0 | 0 | 0 | 100 |
| RECTM2002172 | 0 | 0 | 0 | 0 | 0 | 0 | 85.461 |
| RECTM2002602 | 0 | 0 | 0 | 0 | 0 | 0 | 100 |
| RECTM2002632 | 0 | 0 | 0 | 0 | 0 | 0 | 100 |
| SALGL1000005 | 0 | 0 | 0 | 0 | 1.075 | 0 | 0 |
| SALGL1000047 | 0 | 0 | 0 | 1.054 | 0 | 0 | 0 |
| SALGL1000157 | 0 | 0.977 | 0 | 0 | 0.922 | 0.734 | 0 |
| SKMUS1000022 | 0 | 0 | 2.804 | 0 | 0 | 0 | 0 |
| SKMUS1000064 | 0 | 0 | 15.807 | 0 | 0 | 0 | 0 |
| SKMUS1000084 | 0 | 0 | 0 | 2.741 | 0 | 0 | 0 |
| SKMUS1000138 | 0 | 0 | 0.647 | 0.171 | 0.341 | 0 | 0 |
| SKMUS1000186 | 0 | 3.017 | 2.704 | 2.143 | 0 | 0 | 0 |
| SKMUS2000361 | 0 | 0 | 0 | 0 | 0 | 12.068 | 0 |
| SKMUS2000380 | 0 | 0 | 0 | 0 | 7.691 | 0 | 0 |
| SKMUS2000458 | 0 | 0 | 6.438 | 0 | 0 | 0 | 0 |
| SKMUS2000515 | 0 | 0 | 0 | 20.164 | 0 | 0 | 0 |
| SKMUS2000679 | 0 | 0 | 22.564 | 0 | 0 | 0 | 0 |
| SKMUS2000873 | 0 | 0 | 18.526 | 0 | 1.951 | 0 | 0 |
| SKMUS2000931 | 0 | 8.180 | 3.665 | 1.937 | 0 | 0 | 0 |
| SKMUS2001008 | 0 | 0 | 3.192 | 0 | 0 | 0 | 0 |
| SKMUS2001129 | 0 | 0 | 34.255 | 9.050 | 0 | 0 | 0 |
| SKMUS2001147 | 0 | 0 | 0 | 0 | 0 | 15.641 | 0 |
| SKMUS2001157 | 0 | 0 | 24.165 | 0 | 0 | 0 | 0 |
| SKMUS2001201 | 0 | 0 | 47.998 | 0 | 0 | 0 | 0 |
| SKMUS2001402 | 0 | 0 | 56.794 | 0 | 0 | 0 | 0 |
| SKMUS2001454 | 0 | 0 | 2.273 | 1.201 | 0 | 0 | 0 |
| SKMUS2001634 | 0 | 0 | 0 | 4.660 | 0 | 0 | 0 |
| SKMUS2001668 | 0 | 0 | 19.961 | 0 | 0 | 0 | 0 |
| SKMUS2001693 | 0 | 0 | 32.341 | 0 | 0 | 0 | 0 |
| SKMUS2001695 | 0 | 0 | 36.451 | 0 | 0 | 0 | 0 |
| SKMUS2002634 | 0 | 0 | 57.706 | 0 | 6.076 | 0 | 0 |
| SKMUS2003168 | 0 | 0 | 0 | 0 | 33.480 | 0 | 0 |
| SKMUS2004667 | 0 | 0 | 0 | 0 | 33.480 | 0 | 0 |
| SKMUS2004903 | 0 | 0 | 48.875 | 0 | 0 | 0 | 0 |
| SKMUS2006755 | 0 | 0 | 48.875 | 0 | 0 | 0 | 0 |
| SKNMC1000137 | 0 | 0 | 0 | 15.092 | 0 | 0 | 0 |
| SKNMC1000168 | 0 | 0 | 0 | 0 | 8.909 | 0 | 18.220 |
| SKNMC2000097 | 0 | 3.350 | 0 | 0.793 | 0 | 0 | 0 |
| SKNMC2000322 | 0 | 0 | 0 | 2.513 | 0 | 0 | 0 |
| SKNMC2000635 | 0 | 0 | 0 | 1.277 | 1.908 | 2.024 | 0 |
| SKNMC2000649 | 0 | 0 | 0 | 6.495 | 0 | 0 | 0 |
| SKNMC2000698 | 0 | 0 | 0 | 0 | 7.325 | 11.655 | 0 |
| SKNMC2000877 | 0 | 0 | 0 | 0 | 0 | 0 | 25.782 |
| SKNMC2000966 | 0 | 0 | 0 | 0 | 28.717 | 0 | 0 |
| SKNMC2002402 | 0 | 0 | 0 | 13.120 | 0 | 0 | 0 |
| SKNSH1000002 | 0 | 0 | 0 | 2.558 | 5.097 | 0 | 0 |
| SKNSH1000101 | 0 | 4.828 | 0 | 0 | 0 | 0 | 0 |
| SKNSH2000347 | 0 | 0 | 0 | 7.986 | 0 | 0 | 0 |
| SKNSH2002768 | 0 | 0 | 0 | 8.427 | 8.397 | 13.360 | 0 |
| SKNSH2003528 | 0 | 0 | 0 | 5.403 | 0 | 17.130 | 0 |
| SKNSH2008940 | 0 | 0 | 0 | 0 | 0 | 10.820 | 0 |
| SMINT1000042 | 0 | 0 | 0 | 0 | 0 | 15.117 | 0 |
| SMINT1000078 | 0 | 0 | 0 | 0 | 66.777 | 0 | 0 |
| SMINT1000100 | 0 | 0 | 0 | 0 | 0 | 0 | 60.570 |
| SMINT1000117 | 0 | 9.886 | 0 | 0 | 0 | 0 | 0 |
| SMINT1000131 | 0 | 0 | 6.169 | 1.630 | 0 | 0 | 0 |
| SMINT2000018 | 0 | 0 | 0 | 0 | 14.931 | 0 | 0 |
| SMINT2000277 | 0 | 0 | 24.424 | 0 | 0 | 0 | 0 |
| SMINT2000396 | 0 | 0 | 0 | 13.071 | 0 | 6.907 | 0 |
| SMINT2000441 | 0 | 0 | 0 | 0.803 | 4.802 | 2.547 | 0 |
| SMINT2000468 | 0 | 0 | 0 | 4.072 | 0 | 0 | 0 |
| SMINT2000545 | 0 | 0 | 0 | 4.219 | 0 | 0 | 0 |
| SMINT2000602 | 0 | 8.263 | 0 | 0.978 | 0 | 0 | 0 |
| SMINT2000933 | 0 | 15.321 | 0 | 1.814 | 0 | 0 | 0 |
| SMINT2001818 | 0 | 7.046 | 0 | 0 | 3.324 | 0 | 0 |
| SMINT2002620 | 0 | 0 | 0 | 4.032 | 0 | 0 | 0 |
| SMINT2002689 | 0 | 0 | 0 | 4.184 | 0 | 0 | 0 |
| SMINT2002976 | 0 | 0 | 0 | 18.566 | 0 | 0 | 0 |
| SMINT2003505 | 0 | 23.670 | 0 | 0 | 0 | 0 | 0 |
| SMINT2004023 | 0 | 22.927 | 10.273 | 0 | 0 | 0 | 0 |
| SMINT2007433 | 0 | 0 | 0 | 14.856 | 0 | 0 | 0 |
| SMINT2008590 | 0 | 0 | 0 | 0 | 33.948 | 0 | 0 |
| SMINT2008917 | 0 | 0 | 0 | 0 | 39.679 | 0 | 0 |
| SMINT2008921 | 0 | 0 | 0 | 0 | 3.935 | 0 | 0 |
| SMINT2008960 | 0 | 0 | 4.608 | 0 | 0 | 0 | 0 |
| SMINT2009216 | 0 | 41.607 | 0 | 0 | 0 | 0 | 0 |
| SMINT2010084 | 0 | 0 | 0 | 6.115 | 0 | 0 | 0 |
| SMINT2010901 | 0 | 0 | 0 | 6.250 | 0 | 0 | 0 |
| SMINT2011311 | 0 | 0 | 0 | 33.526 | 0 | 0 | 0 |
| SMINT2011567 | 0 | 0 | 0 | 0 | 33.648 | 0 | 0 |
| SMINT2012122 | 0 | 0 | 23.549 | 0 | 0 | 0 | 0 |
| SMINT2013170 | 0 | 0 | 0 | 0 | 0 | 61.524 | 0 |
| SMINT2014480 | 0 | 11.942 | 0 | 0 | 0 | 0 | 0 |
| SMINT2018681 | 0 | 31.433 | 0 | 0 | 0 | 0 | 0 |
| SPLEN1000013 | 0 | 73.144 | 0 | 0 | 0 | 0 | 0 |
| SPLEN1000139 | 0 | 0 | 0 | 50.569 | 0 | 0 | 0 |
| SPLEN1000166 | 0 | 0 | 0 | 2.012 | 0 | 6.379 | 0 |
| SPLEN2000222 | 0 | 0 | 0 | 21.738 | 0 | 0 | 0 |
| SPLEN2000348 | 0 | 0 | 18.843 | 0 | 0 | 0 | 0 |
| SPLEN2000443 | 0 | 0 | 0 | 39.313 | 0 | 0 | 0 |
| SPLEN2000882 | 0 | 0 | 0 | 3.126 | 0 | 0 | 0 |
| SPLEN2001141 | 0 | 7.098 | 0 | 0 | 0 | 0 | 0 |
| SPLEN2001157 | 0 | 0 | 0 | 4.895 | 0 | 0 | 0 |
| SPLEN2002335 | 0 | 0 | 0 | 10.812 | 3.591 | 0 | 0 |
| SPLEN2002467 | 0 | 0 | 0 | 0 | 0 | 18.382 | 0 |
| SPLEN2002477 | 0 | 0 | 0 | 5.784 | 0 | 0 | 0 |
| SPLEN2002493 | 0 | 0 | 0 | 0 | 6.138 | 0 | 0 |
| SPLEN2002744 | 0 | 0 | 0 | 0 | 0 | 0 | 48.527 |
| SPLEN2005429 | 0 | 0 | 0 | 19.560 | 0 | 0 | 0 |
| SPLEN2006122 | 0 | 0 | 0 | 0 | 2.987 | 0 | 0 |
| SPLEN2006133 | 0 | 0 | 0 | 1.688 | 0 | 0 | 0 |
| SPLEN2006232 | 0 | 21.561 | 0 | 0 | 0 | 0 | 0 |
| SPLEN2006305 | 0 | 4.748 | 0 | 4.497 | 6.720 | 0 | 0 |
| SPLEN2007739 | 0 | 0 | 0 | 10.806 | 0 | 0 | 0 |
| SPLEN2007750 | 0 | 72.732 | 0 | 0 | 0 | 0 | 0 |
| SPLEN2007794 | 0 | 74.495 | 0 | 0 | 0 | 0 | 0 |
| SPLEN2008460 | 0 | 0 | 0 | 0 | 0 | 14.784 | 0 |
| SPLEN2010195 | 0 | 5.832 | 0 | 1.381 | 0 | 0 | 0 |
| SPLEN2010846 | 0 | 0 | 0 | 40.883 | 0 | 0 | 0 |
| SPLEN2011419 | 0 | 17.961 | 0 | 0 | 0 | 13.483 | 0 |
| SPLEN2011737 | 0 | 19.583 | 0 | 4.637 | 0 | 0 | 0 |
| SPLEN2011766 | 0 | 0 | 0 | 0 | 57.949 | 0 | 0 |
| SPLEN2012523 | 0 | 0 | 14.384 | 0 | 0 | 0 | 0 |
| SPLEN2012800 | 0 | 2.567 | 0 | 0 | 0 | 0 | 0 |
| SPLEN2014073 | 0 | 0 | 79.475 | 0 | 0 | 0 | 0 |
| SPLEN2014911 | 0 | 0 | 0 | 0 | 22.448 | 0 | 0 |
| SPLEN2015310 | 0 | 0 | 3.861 | 1.020 | 0 | 0 | 0 |
| SPLEN2016268 | 0 | 3.247 | 0 | 0 | 1.532 | 2.438 | 0 |
| SPLEN2016554 | 0 | 0 | 0 | 33.168 | 0 | 0 | 0 |
| SPLEN2017918 | 0 | 0 | 0 | 0 | 0 | 10.289 | 0 |
| SPLEN2018157 | 0 | 0 | 16.248 | 4.293 | 0 | 0 | 0 |
| SPLEN2019077 | 0 | 39.875 | 0 | 0 | 0 | 0 | 0 |
| SPLEN2023791 | 0 | 0 | 0 | 50.569 | 0 | 0 | 0 |
| SPLEN2027113 | 0 | 0 | 0 | 0 | 11.606 | 9.233 | 0 |
| SPLEN2028466 | 0 | 0 | 0 | 0 | 1.467 | 2.334 | 0 |
| SPLEN2028914 | 0 | 0 | 18.810 | 0 | 0 | 15.756 | 0 |
| SPLEN2029912 | 0 | 0 | 0 | 0 | 11.586 | 9.217 | 0 |
| SPLEN2031424 | 0 | 0 | 0 | 13.552 | 0 | 0 | 0 |
| SPLEN2033098 | 0 | 0 | 0 | 0 | 17.647 | 0 | 0 |
| SPLEN2036932 | 0 | 0 | 0 | 0 | 10.397 | 0 | 0 |
| SPLEN2037722 | 0 | 37.154 | 0 | 0 | 0 | 0 | 0 |
| SPLEN2038834 | 0 | 0 | 0 | 0 | 16.429 | 0 | 0 |
| SPLEN2042535 | 0 | 0 | 0 | 12.671 | 25.249 | 0 | 0 |
| SPLEN2042920 | 0 | 20.455 | 0 | 0 | 0 | 0 | 0 |
| STOMA1000189 | 0 | 0 | 0 | 2.783 | 0 | 0 | 0 |
| STOMA2000121 | 0 | 9.160 | 0 | 0 | 0 | 0 | 0 |
| STOMA2000257 | 0 | 0 | 0 | 0 | 7.000 | 0 | 0 |
| STOMA2000482 | 0 | 0 | 0 | 0 | 13.672 | 0 | 0 |
| STOMA2002166 | 0 | 0 | 0 | 0 | 2.075 | 0 | 0 |
| STOMA2004663 | 0 | 52.484 | 0 | 0 | 0 | 0 | 0 |
| SYNOV1000118 | 0 | 0 | 28.508 | 0 | 0 | 0 | 0 |
| SYNOV1000124 | 0 | 0 | 0 | 0 | 1.973 | 0 | 0 |
| SYNOV1000128 | 0 | 0 | 0 | 0 | 52.059 | 0 | 0 |
| SYNOV1000164 | 0 | 28.905 | 0 | 0 | 0 | 0 | 0 |
| SYNOV2001033 | 0 | 0 | 4.039 | 1.067 | 0 | 3.383 | 13.045 |
| SYNOV2001239 | 0 | 7.075 | 0 | 0 | 1.113 | 0 | 0 |
| SYNOV2001262 | 0 | 15.682 | 0 | 0 | 0 | 0 | 0 |
| SYNOV2001374 | 0 | 0 | 0 | 3.260 | 0 | 0 | 39.852 |
| SYNOV2001468 | 0 | 0 | 0 | 16.242 | 0 | 0 | 0 |
| SYNOV2009172 | 0 | 7.823 | 0 | 0 | 1.845 | 0 | 0 |
| SYNOV4001153 | 0 | 0 | 0 | 4.128 | 0 | 0 | 0 |
| SYNOV4007671 | 0 | 0 | 0 | 2.609 | 7.799 | 4.136 | 0 |
| SYNOV4009575 | 0 | 36.015 | 0 | 0 | 0 | 0 | 0 |
| T1ESE2002665 | 0 | 0 | 0 | 7.418 | 0 | 0 | 0 |
| TBAES2000116 | 0 | 0 | 0 | 20.191 | 0 | 0 | 0 |
| TBAES2009387 | 0 | 0 | 0 | 0.951 | 0 | 0 | 11.630 |
| TESOP1000035 | 0 | 33.245 | 0 | 0 | 0 | 0 | 0 |
| TESOP2002273 | 0 | 0 | 0 | 7.223 | 0 | 0 | 0 |
| TESOP2006053 | 0 | 0 | 49.610 | 0 | 0 | 0 | 0 |
| TESOP2008820 | 0 | 0 | 0 | 34.221 | 0 | 0 | 0 |
| TESTI1000023 | 0 | 0 | 5.649 | 0 | 0 | 0 | 0 |
| TESTI1000051 | 0 | 0 | 0 | 0 | 18.469 | 0 | 0 |
| TESTI1000064 | 0 | 0 | 0 | 0 | 17.264 | 0 | 0 |
| TESTI1000101 | 0 | 0 | 0 | 7.623 | 0 | 0 | 0 |
| TESTI1000142 | 0 | 0 | 0 | 0 | 0 | 38.072 | 0 |
| TESTI1000163 | 0 | 0 | 27.756 | 7.333 | 0 | 0 | 0 |
| TESTI2000006 | 0 | 74.325 | 0 | 0 | 0 | 0 | 0 |
| TESTI2000172 | 0 | 64.303 | 0 | 0 | 0 | 0 | 0 |
| TESTI2000184 | 0 | 8.497 | 0 | 4.024 | 0 | 0 | 0 |
| TESTI2000349 | 0 | 0 | 0 | 0 | 84.436 | 0 | 0 |
| TESTI2000435 | 0 | 0 | 0 | 0 | 68.199 | 0 | 0 |
| TESTI2000784 | 0 | 0 | 0 | 4.045 | 0 | 0 | 0 |
| TESTI2001099 | 0 | 0 | 3.301 | 1.744 | 0 | 2.765 | 0 |
| TESTI2001120 | 0 | 7.267 | 0 | 0 | 0 | 5.455 | 0 |
| TESTI2001153 | 0 | 0 | 32.187 | 0.709 | 0 | 0 | 0 |
| TESTI2001269 | 0 | 8.206 | 0 | 0 | 0 | 6.160 | 0 |
| TESTI2001829 | 0 | 0 | 0 | 1.511 | 6.023 | 0 | 0 |
| TESTI2002365 | 0 | 0 | 0 | 9.717 | 0 | 0 | 0 |
| TESTI2003005 | 0 | 0 | 0 | 0 | 10.774 | 0 | 0 |
| TESTI2003413 | 0 | 0 | 17.538 | 4.634 | 0 | 0 | 0 |
| TESTI2003533 | 0 | 0 | 5.840 | 0 | 3.075 | 0 | 0 |
| TESTI2003539 | 0 | 0 | 0 | 0 | 84.436 | 0 | 0 |
| TESTI2004031 | 0 | 0 | 0 | 1.427 | 0 | 0 | 0 |
| TESTI2004153 | 0 | 0 | 0 | 0 | 15.385 | 0 | 0 |
| TESTI2004431 | 0 | 0 | 0 | 0 | 29.665 | 0 | 0 |
| TESTI2004929 | 0 | 0 | 0 | 5.053 | 0 | 0 | 0 |
| TESTI2005408 | 0 | 13.317 | 0 | 0 | 6.283 | 0 | 0 |
| TESTI2005564 | 0 | 0 | 0 | 0 | 25.975 | 0 | 0 |
| TESTI2005784 | 0 | 0 | 0 | 5.293 | 0 | 0 | 0 |
| TESTI2005788 | 0 | 0 | 0 | 8.231 | 0 | 0 | 0 |
| TESTI2006051 | 0 | 0 | 8.557 | 0 | 0 | 0 | 0 |
| TESTI2006453 | 0 | 6.325 | 0 | 1.498 | 0 | 4.748 | 0 |
| TESTI2006588 | 0 | 0 | 0 | 2.890 | 3.840 | 0 | 0 |
| TESTI2006628 | 0 | 0 | 83.746 | 0 | 0 | 0 | 0 |
| TESTI2006633 | 0 | 0 | 0 | 47.576 | 0 | 0 | 0 |
| TESTI2006748 | 0 | 0 | 0 | 12.244 | 0 | 0 | 0 |
| TESTI2007407 | 0 | 0 | 0 | 0 | 0 | 17.320 | 0 |
| TESTI2007998 | 0 | 0 | 10.651 | 0 | 5.607 | 0 | 0 |
| TESTI2008240 | 0 | 0 | 1.684 | 18.246 | 1.774 | 0 | 0 |
| TESTI2008278 | 0 | 0 | 0 | 0 | 43.663 | 0 | 0 |
| TESTI2008621 | 0 | 0 | 0 | 17.980 | 0 | 0 | 0 |
| TESTI2009474 | 0 | 15.186 | 0 | 3.596 | 0 | 0 | 0 |
| TESTI2009520 | 0 | 0 | 0 | 4.004 | 0 | 0 | 0 |
| TESTI2009577 | 0 | 0 | 0 | 3.145 | 0 | 0 | 0 |
| TESTI2009785 | 0 | 0 | 0 | 0 | 5.088 | 0 | 0 |
| TESTI2010513 | 0 | 0 | 0 | 0 | 0 | 2.217 | 0 |
| TESTI2012155 | 0 | 48.166 | 0 | 0 | 0 | 0 | 0 |
| TESTI2012289 | 0 | 0 | 58.141 | 0 | 0 | 0 | 0 |
| TESTI2012778 | 0 | 2.778 | 0 | 0 | 0 | 1.043 | 0 |
| TESTI2013231 | 0 | 14.957 | 0 | 3.541 | 7.057 | 0 | 0 |
| TESTI2015092 | 0 | 0 | 22.316 | 0 | 0 | 0 | 0 |
| TESTI2015213 | 0 | 3.858 | 0 | 0 | 0 | 0 | 0 |
| TESTI2015626 | 0 | 2.472 | 0 | 0.585 | 0 | 0 | 0 |
| TESTI2016101 | 0 | 0 | 0 | 0 | 0 | 0 | 94.332 |
| TESTI2017954 | 0 | 0 | 0 | 0 | 2.349 | 0 | 0 |
| TESTI2018462 | 0 | 0 | 0 | 5.029 | 0 | 0 | 0 |
| TESTI2020510 | 0 | 0 | 0 | 0 | 0 | 40.816 | 0 |
| TESTI2020946 | 0 | 91.999 | 0 | 0 | 0 | 0 | 0 |
| TESTI2021297 | 0 | 0 | 0 | 0 | 0 | 38.736 | 0 |
| TESTI2021315 | 0 | 0 | 0 | 36.066 | 0 | 0 | 0 |
| TESTI2021425 | 0 | 0 | 0 | 6.128 | 0 | 0 | 0 |
| TESTI2023033 | 0 | 0 | 0 | 48.872 | 0 | 0 | 0 |
| TESTI2024090 | 0 | 0 | 0 | 73.137 | 0 | 0 | 0 |
| TESTI2024844 | 0 | 0 | 0 | 2.039 | 0 | 0 | 0 |
| TESTI2025546 | 0 | 0 | 0 | 12.354 | 0 | 19.584 | 0 |
| TESTI2026024 | 0 | 0 | 0 | 0 | 84.436 | 0 | 0 |
| TESTI2032643 | 0 | 0 | 81.912 | 0 | 0 | 0 | 0 |
| TESTI2033441 | 0 | 0 | 0 | 5.859 | 0 | 0 | 0 |
| TESTI2034249 | 0 | 0 | 0 | 6.955 | 13.858 | 0 | 0 |
| TESTI2034940 | 0 | 0 | 0 | 1.391 | 0.924 | 0 | 5.668 |
| TESTI2044276 | 0 | 0 | 0 | 16.878 | 0 | 0 | 0 |
| TESTI2046456 | 0 | 0 | 0 | 0.824 | 0 | 0 | 0 |
| TESTI2046721 | 0 | 91.999 | 0 | 0 | 0 | 0 | 0 |
| TESTI2053723 | 0 | 34.027 | 0 | 0 | 0 | 0 | 0 |
| TESTI4000014 | 0 | 2.685 | 0 | 0.318 | 0 | 0 | 0 |
| TESTI4001467 | 0 | 0 | 0 | 0 | 19.634 | 0 | 0 |
| TESTI4002072 | 0 | 0 | 0 | 5.943 | 0 | 0 | 0 |
| TESTI4002202 | 0 | 0 | 0 | 5.900 | 0 | 0 | 0 |
| TESTI4002799 | 0 | 0 | 2.975 | 0 | 0 | 0 | 0 |
| TESTI4009286 | 0 | 0 | 0 | 1.290 | 0 | 0 | 0 |
| TESTI4010851 | 0 | 0 | 3.683 | 2.919 | 0 | 0 | 0 |
| TESTI4013441 | 0 | 0 | 0 | 0 | 0.556 | 2.655 | 0 |
| TESTI4013474 | 0 | 15.533 | 0 | 0 | 0 | 0 | 0 |
| TESTI4018436 | 0 | 0 | 35.056 | 0 | 18.456 | 0 | 0 |
| TESTI4037156 | 0 | 2.080 | 0 | 0.492 | 0 | 0 | 0 |
| TESTI4038284 | 0 | 0 | 0 | 0 | 6.531 | 0 | 0 |
| TESTI4044704 | 0 | 38.311 | 0 | 0 | 0 | 0 | 0 |
| TESTI4046873 | 0 | 0 | 0 | 73.137 | 0 | 0 | 0 |
| THYMU1000002 | 0 | 0 | 7.974 | 1.053 | 2.099 | 3.340 | 0 |
| THYMU1000010 | 0 | 20.263 | 0 | 0 | 0 | 0 | 0 |
| THYMU1000016 | 0 | 0 | 0 | 0.688 | 0 | 2.181 | 0 |
| THYMU1000032 | 0 | 0 | 5.258 | 0 | 0 | 0 | 0 |
| THYMU1000083 | 0 | 0 | 0 | 0 | 10.634 | 0 | 0 |
| THYMU1000359 | 0 | 4.029 | 0 | 0 | 1.901 | 0 | 0 |
| THYMU1000394 | 0 | 0 | 0 | 8.749 | 17.433 | 0 | 0 |
| THYMU1000428 | 0 | 4.272 | 0 | 1.012 | 8.063 | 3.207 | 0 |
| THYMU2000057 | 0 | 20.389 | 0 | 0 | 0 | 0 | 0 |
| THYMU2000382 | 0 | 0 | 4.083 | 2.157 | 0 | 0 | 0 |
| THYMU2000684 | 0 | 0 | 0 | 7.410 | 14.765 | 0 | 0 |
| THYMU2001521 | 0 | 29.878 | 53.550 | 0 | 0 | 0 | 0 |
| THYMU2002229 | 0 | 81.842 | 0 | 0 | 0 | 0 | 0 |
| THYMU2002583 | 0 | 0 | 0 | 1.845 | 0 | 0 | 0 |
| THYMU2002745 | 0 | 0 | 0 | 0 | 0 | 0 | 83.299 |
| THYMU2002841 | 0 | 21.814 | 0 | 0 | 0 | 0 | 0 |
| THYMU2003012 | 0 | 6.587 | 0 | 0 | 0 | 0 | 0 |
| THYMU2003046 | 0 | 0 | 0 | 3.421 | 0 | 0 | 0 |
| THYMU2003069 | 0 | 0 | 0 | 7.866 | 0 | 0 | 0 |
| THYMU2003133 | 0 | 0 | 0 | 0 | 12.304 | 0 | 0 |
| THYMU2003419 | 0 | 0 | 0 | 4.469 | 1.781 | 0 | 0 |
| THYMU2003891 | 0 | 9.871 | 2.949 | 0 | 0.517 | 0 | 3.175 |
| THYMU2003981 | 0 | 3.926 | 0 | 0.929 | 0 | 0 | 0 |
| THYMU2004108 | 0 | 0 | 88.985 | 0 | 0 | 0 | 0 |
| THYMU2004152 | 0 | 14.926 | 0 | 0 | 0 | 0 | 0 |
| THYMU2004320 | 0 | 0 | 0 | 0 | 57.949 | 0 | 0 |
| THYMU2004344 | 0 | 0 | 0 | 2.273 | 4.530 | 0 | 0 |
| THYMU2004410 | 0 | 0 | 0 | 3.410 | 0 | 10.811 | 0 |
| THYMU2004733 | 0 | 0 | 37.726 | 0 | 0 | 0 | 0 |
| THYMU2005156 | 0 | 0 | 0 | 68.095 | 0 | 0 | 0 |
| THYMU2005546 | 0 | 0 | 0 | 0 | 0 | 3.086 | 0 |
| THYMU2005980 | 0 | 0 | 0 | 14.432 | 0 | 0 | 0 |
| THYMU2006505 | 0 | 0 | 0 | 2.429 | 0 | 0 | 0 |
| THYMU2006813 | 0 | 0 | 0 | 2.816 | 5.612 | 0 | 0 |
| THYMU2007036 | 0 | 58.036 | 0 | 0 | 0 | 0 | 0 |
| THYMU2007065 | 0 | 0 | 27.315 | 0 | 0 | 0 | 0 |
| THYMU2007112 | 0 | 0 | 0 | 0 | 16.219 | 0 | 0 |
| THYMU2007886 | 0 | 10.408 | 0 | 0 | 0 | 7.813 | 0 |
| THYMU2008725 | 0 | 0 | 0 | 0 | 0 | 73.576 | 0 |
| THYMU2009658 | 0 | 0 | 2.360 | 0 | 0 | 0 | 0 |
| THYMU2009792 | 0 | 0 | 0 | 0 | 0 | 15.803 | 0 |
| THYMU2010094 | 0 | 43.781 | 0 | 0 | 0 | 0 | 0 |
| THYMU2011881 | 0 | 78.357 | 0 | 0 | 0 | 0 | 0 |
| THYMU2012024 | 0 | 44.799 | 0 | 5.303 | 0 | 16.815 | 0 |
| THYMU2012625 | 0 | 0 | 0 | 0 | 0 | 0 | 22.602 |
| THYMU2013136 | 0 | 0 | 0 | 0 | 2.901 | 0 | 0 |
| THYMU2013648 | 0 | 90.014 | 0 | 0 | 0 | 0 | 0 |
| THYMU2013916 | 0 | 0 | 0 | 0 | 3.933 | 0 | 0 |
| THYMU2014167 | 0 | 0 | 0 | 0 | 19.488 | 0 | 0 |
| THYMU2014183 | 0 | 73.025 | 0 | 0 | 0 | 0 | 0 |
| THYMU2015019 | 0 | 0 | 0 | 0 | 0 | 77.187 | 0 |
| THYMU2018126 | 0 | 5.468 | 0 | 0 | 0 | 0 | 0 |
| THYMU2019021 | 0 | 0 | 32.736 | 0 | 0 | 0 | 0 |
| THYMU2025707 | 0 | 0 | 62.325 | 0 | 0 | 0 | 0 |
| THYMU2027125 | 0 | 0 | 0 | 1.274 | 0.635 | 0 | 3.895 |
| THYMU2027975 | 0 | 0 | 0 | 7.113 | 0 | 0 | 0 |
| THYMU2028629 | 0 | 0 | 0 | 32.582 | 0 | 0 | 0 |
| THYMU2031341 | 0 | 0 | 0 | 0 | 12.236 | 0 | 0 |
| THYMU2035735 | 0 | 0 | 0 | 0 | 4.678 | 0 | 28.704 |
| THYMU2036461 | 0 | 0 | 0 | 0 | 53.789 | 0 | 0 |
| THYMU3009006 | 0 | 0 | 0 | 33.017 | 0 | 0 | 0 |
| THYMU3013386 | 0 | 0 | 0 | 0 | 2.655 | 0 | 0 |
| THYMU3015759 | 0 | 8.463 | 0 | 0 | 3.993 | 6.353 | 0 |
| THYMU3024339 | 0 | 0 | 0 | 51.624 | 0 | 0 | 0 |
| THYMU3025642 | 0 | 0 | 0 | 68.095 | 0 | 0 | 0 |
| THYMU3034671 | 0 | 0 | 0 | 21.222 | 0 | 0 | 0 |
| THYMU3038158 | 0 | 0 | 41.483 | 0 | 0 | 0 | 0 |
| THYMU3047115 | 0 | 0 | 19.376 | 0 | 1.457 | 0 | 0 |
| TKIDN1000066 | 0 | 0 | 64.536 | 0 | 0 | 0 | 0 |
| TKIDN1000164 | 0 | 46.474 | 0 | 0 | 0 | 0 | 0 |
| TKIDN2001662 | 0 | 0 | 0 | 19.409 | 0 | 0 | 0 |
| TKIDN2002738 | 0 | 3.152 | 2.825 | 0 | 0 | 0 | 0 |
| TKIDN2003597 | 0 | 0 | 0 | 13.903 | 0 | 0 | 0 |
| TKIDN2007828 | 0 | 0 | 44.943 | 0 | 0 | 0 | 0 |
| TKIDN2015285 | 0 | 0 | 0 | 0 | 35.207 | 0 | 0 |
| TKIDN2015423 | 0 | 0 | 0 | 2.266 | 0 | 0 | 0 |
| TKIDN2015788 | 0 | 0 | 0 | 4.681 | 0 | 0 | 0 |
| TLIVE2002046 | 0 | 0 | 0 | 6.460 | 6.437 | 0 | 0 |
| TLIVE2003970 | 0 | 0 | 0 | 0 | 0 | 13.050 | 0 |
| TRACH1000030 | 0 | 0 | 0 | 3.683 | 4.893 | 15.571 | 0 |
| TRACH1000038 | 0 | 0 | 25.370 | 0 | 0 | 0 | 0 |
| TRACH1000063 | 0 | 16.166 | 0 | 0 | 0 | 0 | 0 |
| TRACH1000106 | 0 | 0 | 39.991 | 0 | 0 | 0 | 0 |
| TRACH1000205 | 0 | 0 | 0 | 0 | 0 | 22.206 | 0 |
| TRACH2000079 | 0 | 4.072 | 7.298 | 0 | 1.921 | 6.113 | 0 |
| TRACH2000081 | 0 | 0 | 85.742 | 0 | 0 | 0 | 0 |
| TRACH2000248 | 0 | 10.488 | 4.700 | 0 | 0 | 3.937 | 0 |
| TRACH2000321 | 0 | 0 | 3.310 | 1.749 | 0 | 0 | 0 |
| TRACH2000420 | 0 | 0 | 0 | 0 | 35.676 | 0 | 0 |
| TRACH2000472 | 0 | 0 | 0 | 0 | 6.056 | 0 | 37.157 |
| TRACH2000702 | 0 | 29.510 | 0 | 0 | 0 | 0 | 0 |
| TRACH2000959 | 0 | 0 | 0 | 0 | 0.866 | 0 | 0 |
| TRACH2000972 | 0 | 8.909 | 0 | 0 | 0 | 0 | 0 |
| TRACH2001021 | 0 | 0 | 5.641 | 1.490 | 1.485 | 0 | 9.110 |
| TRACH2001101 | 0 | 0 | 0 | 0 | 9.426 | 0 | 0 |
| TRACH2001289 | 0 | 5.110 | 2.290 | 1.210 | 2.411 | 0 | 0 |
| TRACH2001314 | 0 | 0 | 0 | 3.253 | 6.482 | 0 | 0 |
| TRACH2001443 | 0 | 0 | 0 | 16.537 | 0 | 0 | 0 |
| TRACH2001463 | 0 | 0 | 0 | 0 | 10.858 | 0 | 0 |
| TRACH2001478 | 0 | 0 | 3.910 | 0 | 0 | 3.276 | 0 |
| TRACH2001523 | 0 | 0 | 0 | 0 | 6.029 | 0 | 0 |
| TRACH2001607 | 0 | 0 | 0 | 1.787 | 3.562 | 0 | 0 |
| TRACH2001612 | 0 | 0 | 0 | 7.109 | 0 | 0 | 0 |
| TRACH2001898 | 0 | 0 | 0 | 0 | 3.615 | 0 | 0 |
| TRACH2002092 | 0 | 21.099 | 18.909 | 0 | 0 | 0 | 0 |
| TRACH2002537 | 0 | 0 | 0 | 0 | 3.289 | 5.233 | 0 |
| TRACH2002664 | 0 | 0 | 10.251 | 0 | 10.794 | 0 | 0 |
| TRACH2002847 | 0 | 0 | 0 | 0 | 0 | 25.610 | 0 |
| TRACH2003323 | 0 | 13.377 | 0 | 0 | 0 | 0 | 0 |
| TRACH2004499 | 0 | 0 | 19.794 | 0 | 0 | 0 | 0 |
| TRACH2005811 | 0 | 0 | 0 | 0 | 3.740 | 0 | 0 |
| TRACH2006762 | 0 | 0 | 0 | 0 | 75.996 | 0 | 0 |
| TRACH2007399 | 0 | 0 | 3.173 | 0 | 0 | 0 | 0 |
| TRACH2007754 | 0 | 0 | 0 | 2.674 | 0 | 0 | 32.689 |
| TRACH2007816 | 0 | 0 | 0 | 17.766 | 0 | 0 | 0 |
| TRACH2008472 | 0 | 0 | 10.569 | 0 | 0 | 0 | 0 |
| TRACH2008891 | 0 | 0 | 0 | 38.608 | 0 | 0 | 0 |
| TRACH2009006 | 0 | 52.758 | 0 | 0 | 0 | 0 | 0 |
| TRACH2010600 | 0 | 0 | 0 | 61.372 | 0 | 0 | 0 |
| TRACH2011500 | 0 | 0 | 0 | 0 | 47.884 | 0 | 0 |
| TRACH2012536 | 0 | 0 | 0 | 61.372 | 0 | 0 | 0 |
| TRACH2013991 | 0 | 0 | 85.742 | 0 | 0 | 0 | 0 |
| TRACH2014124 | 0 | 0 | 0 | 3.674 | 3.661 | 0 | 0 |
| TRACH2015823 | 0 | 0 | 0 | 3.893 | 0 | 0 | 0 |
| TRACH2015824 | 0 | 0 | 0 | 4.136 | 0 | 0 | 0 |
| TRACH2015939 | 0 | 42.223 | 0 | 0 | 0 | 0 | 0 |
| TRACH2017368 | 0 | 0 | 0 | 0 | 0 | 0 | 95.104 |
| TRACH2018317 | 0 | 0 | 0 | 0 | 0 | 16.530 | 0 |
| TRACH2018446 | 0 | 0 | 0 | 14.886 | 0 | 0 | 0 |
| TRACH3000692 | 0 | 0 | 0 | 8.341 | 0 | 26.446 | 0 |
| TRACH3002192 | 0 | 0 | 0 | 0 | 2.212 | 0 | 0 |
| TRACH3003547 | 0 | 0 | 0 | 0 | 14.997 | 0 | 0 |
| TRACH3004068 | 0 | 0 | 0 | 2.537 | 0 | 0 | 31.010 |
| TRACH3005699 | 0 | 0 | 0 | 17.081 | 0 | 0 | 0 |
| TRACH3006717 | 0 | 0 | 0 | 13.061 | 0 | 0 | 0 |
| TRACH3007625 | 0 | 0 | 7.918 | 0 | 4.169 | 0 | 0 |
| TRACH3008632 | 0 | 0 | 0 | 15.039 | 0 | 0 | 0 |
| TRACH3009148 | 0 | 0 | 0 | 31.925 | 0 | 0 | 0 |
| TRACH3016805 | 0 | 0 | 0 | 8.013 | 0 | 0 | 0 |
| TRACH3037067 | 0 | 48.330 | 0 | 0 | 0 | 0 | 0 |
| TSTOM2000139 | 0 | 0 | 0 | 7.443 | 0 | 0 | 0 |
| TSTOM2000315 | 0 | 17.130 | 0 | 0 | 0 | 0 | 0 |
| TSTOM2000553 | 0 | 0 | 0 | 3.000 | 0 | 0 | 0 |
| TUTER2000904 | 0 | 0 | 0 | 4.968 | 0 | 0 | 0 |
| UMVEN1000186 | 0 | 0 | 0 | 0.940 | 0 | 11.927 | 0 |
| UMVEN2000453 | 0 | 3.925 | 3.517 | 0.929 | 5.555 | 0 | 0 |
| UTERU1000182 | 0 | 0 | 0 | 2.887 | 2.877 | 0 | 0 |
| UTERU1000384 | 0 | 0 | 0 | 12.684 | 0 | 0 | 0 |
| UTERU2000095 | 0 | 0 | 5.576 | 0.737 | 0 | 4.671 | 0 |
| UTERU2000263 | 0 | 0 | 0 | 0 | 0 | 2.891 | 0 |
| UTERU2000300 | 0 | 0 | 0 | 0 | 0 | 27.831 | 0 |
| UTERU2000338 | 0 | 0 | 0 | 0 | 11.831 | 0 | 72.584 |
| UTERU2000424 | 0 | 6.384 | 0 | 0 | 6.024 | 0 | 0 |
| UTERU2000537 | 0 | 38.565 | 0 | 0 | 0 | 0 | 0 |
| UTERU2000542 | 0 | 0 | 60.821 | 0 | 0 | 0 | 0 |
| UTERU2000696 | 0 | 0 | 0 | 5.064 | 0 | 0 | 0 |
| UTERU2001607 | 0 | 0 | 0 | 2.625 | 0 | 0 | 0 |
| UTERU2001658 | 0 | 0 | 0 | 0 | 31.413 | 0 | 0 |
| UTERU2002001 | 0 | 0 | 0 | 59.874 | 0 | 0 | 0 |
| UTERU2002410 | 0 | 0 | 0 | 2.090 | 2.082 | 0 | 0 |
| UTERU2003704 | 0 | 0 | 0 | 30.632 | 0 | 0 | 0 |
| UTERU2003926 | 0 | 0 | 0 | 59.874 | 0 | 0 | 0 |
| UTERU2004037 | 0 | 16.480 | 0 | 0 | 0 | 0 | 0 |
| UTERU2004197 | 0 | 0 | 0 | 3.579 | 0 | 11.346 | 0 |
| UTERU2004807 | 0 | 0 | 0 | 8.939 | 7.125 | 0 | 0 |
| UTERU2004929 | 0 | 0 | 0 | 0 | 41.168 | 0 | 0 |
| UTERU2005354 | 0 | 16.442 | 0 | 3.893 | 0 | 0 | 0 |
| UTERU2005664 | 0 | 0 | 75.272 | 0 | 0 | 0 | 0 |
| UTERU2006593 | 0 | 0 | 0 | 5.255 | 5.236 | 0 | 0 |
| UTERU2007081 | 0 | 0 | 0 | 0 | 0 | 82.551 | 0 |
| UTERU2008040 | 0 | 0 | 0 | 0 | 41.737 | 0 | 0 |
| UTERU2008085 | 0 | 0.679 | 6.083 | 0.161 | 0.320 | 0.510 | 1.965 |
| UTERU2008302 | 0 | 10.042 | 0 | 0 | 0 | 0 | 0 |
| UTERU2008938 | 0 | 0 | 0 | 8.760 | 0 | 0 | 0 |
| UTERU2008939 | 0 | 0 | 0 | 26.435 | 0 | 0 | 0 |
| UTERU2010417 | 0 | 0 | 0 | 1.122 | 0 | 1.779 | 0 |
| UTERU2011220 | 0 | 0 | 0 | 3.483 | 0 | 0 | 0 |
| UTERU2012286 | 0 | 19.044 | 0 | 0 | 0 | 0 | 0 |
| UTERU2012856 | 0 | 0 | 0 | 6.279 | 0 | 0 | 0 |
| UTERU2013502 | 0 | 0 | 0 | 0 | 59.786 | 0 | 0 |
| UTERU2014167 | 0 | 0 | 0 | 0 | 3.232 | 0 | 0 |
| UTERU2014898 | 0 | 0 | 0 | 2.708 | 0 | 0 | 0 |
| UTERU2016822 | 0 | 0 | 0 | 14.308 | 0 | 11.341 | 0 |
| UTERU2016979 | 0 | 0 | 69.671 | 0 | 0 | 0 | 0 |
| UTERU2017492 | 0 | 0 | 0 | 0 | 0 | 0 | 94.803 |
| UTERU2017613 | 0 | 0 | 0 | 0 | 36.467 | 0 | 0 |
| UTERU2018523 | 0 | 0 | 0 | 59.874 | 0 | 0 | 0 |
| UTERU2018884 | 0 | 0 | 0 | 2.757 | 0 | 8.741 | 0 |
| UTERU2019005 | 0 | 0 | 0 | 0 | 22.904 | 0 | 0 |
| UTERU2019257 | 0 | 0 | 0 | 42.729 | 0 | 0 | 0 |
| UTERU2023175 | 0 | 0 | 0 | 5.299 | 0 | 0 | 0 |
| UTERU2023262 | 0 | 0 | 84.958 | 0 | 0 | 0 | 0 |
| UTERU2024969 | 0 | 24.138 | 0 | 0 | 0 | 0 | 0 |
| UTERU3004477 | 0 | 0 | 0 | 42.729 | 0 | 0 | 0 |
| UTERU3005907 | 0 | 0 | 0 | 69.877 | 0 | 0 | 0 |
| UTERU3010604 | 0 | 0 | 0 | 59.874 | 0 | 0 | 0 |
| UTERU3018616 | 0 | 0 | 0 | 0 | 74.833 | 0 | 0 |

[0700] Genes whose expression levels were negligibly low in each of the above-described libraries are shown with their clone names below.

[0701] 3NB691000018, 3NB691000113, 3NB691000191, 3NB692000012, 3NB692000029, 3NB692000102, 3NB692000154, 3NB692000276, 3NB692000305, 3NB692000429, 3NB692000484, 3NB692000529, 3NB692000973, 3NB692001034, 3NB692001040, 3NB692001123, 3NB692001267, 3NB692001288, 3NB692001339, 3NB692001349, 3NB692001366, 3NB692001408, 3NB692001433, 3NB692001442, 3NB692001459, 3NB692001471, 3NB692001496, 3NB692001501, 3NB692001507, 3NB692001511, 3NB692001519, 3NB692001520, 3NB692001548, 3NB692001637, 3NB692001719, 3NB692001861, 3NB692002051, 3NB692002365, 3NB692002685, 3NB692002806, 3NB692003538, 3NB692004045, 3NB692004724, 3NB692005439, 3NB692006952, 3NB692008178, 3NB692008729, ACTVT2000380, ADIPS1000064, ADIPS2000069, ADIPS2000088, ADIPS2000245, ADRGL1000002, ADRGL1000018, ADRGL1000033, ADRGL1000038, ADRGL1000065, ADRGL1000067, ADRGL1000111, ADRGL1000147, ADRGL1000160, ADRGL1000165, ADRGL1000182, ADRGL2000042, ADRGL2000056, ADRGL2000064, ADRGL2000074, ADRGL2000085, ADRGL2000097, ADRGL2000117, ADRGL2000142, ADRGL2000172, ADRGL2000248, ADRGL2000261, ADRGL2000323, ADRGL2000328, ADRGL2000353, ADRGL2000384, ADRGL2000428, ADRGL2000636, ADRGL2000644, ADRGL2000968, ADRGL2001119, ADRGL2001229, ADRGL2001287, ADRGL2001301, ADRGL2001354, ADRGL2001554, ADRGL2001651, ADRGL2001756, ADRGL2001830, ADRGL2001836, ADRGL2001854, ADRGL2002013, ADRGL2002029, ADRGL2002191, ADRGL2002260, ADRGL2002392, ADRGL2002477, ADRGL2002679, ADRGL2002753, ADRGL2002857, ADRGL2003017, ADRGL2003329, ADRGL2003552, ADRGL2003585, ADRGL2003638, ADRGL2003684, ADRGL2003773, ADRGL2003785, ADRGL2004031, ADRGL2004077, ADRGL2004451, ADRGL2004459, ADRGL2004676, ADRGL2004708, ADRGL2004724, ADRGL2004749, ADRGL2004770, ADRGL2004777, ADRGL2004833, ADRGL2005336, ADRGL2005564, ADRGL2005756, ADRGL2005838, ADRGL2005926, ADRGL2005961, ADRGL2006034, ADRGL2006124, ADRGL2006177, ADRGL2006193, ADRGL2006377, ADRGL2006677, ADRGL2006732, ADRGL2006767, ADRGL2006817, ADRGL2006846, ADRGL2006886, ADRGL2007080, ADRGL2007125, ADRGL2007283, ADRGL2007313, ADRGL2007357, ADRGL2007636, ADRGL2007651, ADRGL2007810, ADRGL2007877, ADRGL2007906, ADRGL2007974, ADRGL2008023, ADRGL2008331, ADRGL2008337, ADRGL2008535, ADRGL2008966, ADRGL2009146, ADRGL2009273, ADRGL2009324, ADRGL2009489, ADRGL2009533, ADRGL2009691, ADRGL2009755, ADRGL2010152, ADRGL2010315, ADRGL2010594, ADRGL2010860, ADRGL2010974, ADRGL2011190, ADRGL2011330, ADRGL2012038, ADRGL2012179, AHMSC1000138, ASTRO1000009, ASTRO1000018, ASTRO1000029, ASTRO1000096, ASTRO2000011, ASTRO2000095, ASTRO2000191, ASTRO2000278, ASTRO2000372, ASTRO2000381, ASTRO2000403, ASTRO2000417, ASTRO2000482, ASTRO2000533, ASTRO2000653, ASTRO2000662, ASTRO2000725, ASTRO2000801, ASTRO2001001, ASTRO2001008, ASTRO2001076, ASTRO2001088, ASTRO2001107, ASTRO2001122, ASTRO2001227, ASTRO2001249, ASTRO2001480, ASTRO2002024, ASTRO2002035, ASTRO2002064, ASTRO2002202, ASTRO2002459, ASTRO2002571, ASTRO2002632, ASTRO2002659, ASTRO2002693, ASTRO2002720, ASTRO2002733, ASTRO2002743, ASTRO2002842, ASTRO2003024, ASTRO2003212, ASTRO2003316, ASTRO2003461, ASTRO2003574, ASTRO2003581, ASTRO2003632, ASTRO2003740, ASTRO2003840, ASTRO2003925, ASTRO2003960, ASTRO2004051, ASTRO2004177, ASTRO2004217, ASTRO2004297, ASTRO2004584, ASTRO2004751, ASTRO2004877, ASTRO2004974, ASTRO2005008, ASTRO2005081, ASTRO2005096, ASTRO2005273, ASTRO2005343, ASTRO2005360, ASTRO2005413, ASTRO2005423, ASTRO2005553, ASTRO2005557, ASTRO2005575, ASTRO2005593, ASTRO2005726, ASTRO2005896, ASTRO2005902, ASTRO2006356, ASTRO2006732, ASTRO2006747, ASTRO2006952, ASTRO2007047, ASTRO2007221, ASTRO2007377, ASTRO2007515, ASTRO2007578, ASTRO2007643, ASTRO2007666, ASTRO2007956, ASTRO2007962, ASTRO2008040, ASTRO2008239, ASTRO2008409, ASTRO2008425, ASTRO2008508, ASTRO2008777, ASTRO2008895, ASTRO2008960, ASTRO2008972, ASTRO2009068, ASTRO2009118, ASTRO2009177, ASTRO2009333, ASTRO2009458, ASTRO2009526, ASTRO2009879, ASTRO2010072, ASTRO2010582, ASTRO2010615, ASTRO2010799, ASTRO2010962, ASTRO2010996, ASTRO2011149, ASTRO2011422, ASTRO2011426, ASTRO2011437, ASTRO2011461, ASTRO2011834, ASTRO2011893, ASTRO2013124, ASTRO2013671, ASTRO2013802, ASTRO2014135, ASTRO2014174, ASTRO2014211, ASTRO2014363, ASTRO2014392, ASTRO2014498, ASTRO2014561, ASTRO2014576, ASTRO2014863, ASTRO2014923, ASTRO2014961, ASTRO2015162, ASTRO2015185, ASTRO2015328, ASTRO2015529, ASTRO2016044, ASTRO2016148, ASTRO2016681, ASTRO2016819, ASTRO2016847, ASTRO2016892, ASTRO2017348, ASTRO2017627, ASTRO2018169, ASTRO2018373, ASTRO2019039, ASTRO2019171, ASTRO3000154, ASTRO3000172, ASTRO3000177, ASTRO3000301, ASTRO3000474, ASTRO3000482, BEAST2000454, BGGI11000123, BGGI11000193, BGGI11000285, BGGI12000022, BGGI12000067, BGGI12000161, BGGI12000544, BGGI12000684, BGGI12000693, BGGI12001002, BGGI12001075, BGGI12001241, BGGI12001247, BGGI12001714, BLADE1000176, BLADE2000181, BLADE2000256, BLADE2000340, BLADE2000389, BLADE2000463, BLADE2000492, BLADE2000579, BLADE2000640, BLADE2000866, BLADE2000938, BLADE2001031, BLADE2001133, BLADE2001138, BLADE2001141, BLADE2001371, BLADE2001458, BLADE2001575, BLADE2001753, BLADE2001935, BLADE2001940, BLADE2001987, BLADE2002073, BLADE2002310, BLADE2002730, BLADE2002738, BLADE2002744, BLADE2002782, BLADE2002947, BLADE2002972, BLADE2003474, BLADE2003916, BLADE2004089, BLADE2004345, BLADE2004389, BLADE2004462, BLADE2004628, BLADE2004670, BLADE2004849, BLADE2005036, BLADE2005038, BLADE2005229, BLADE2005459, BLADE2005792, BLADE2006043, BLADE2006412, BLADE2006415, BLADE2006607, BLADE2006826, BLADE2006830, BLADE2006849, BLADE2006947, BLADE2007033, BLADE2007043, BLADE2007666, BLADE2007722, BLADE2007735, BLADE2007744, BLADE2007799, BLADE2007923, BLADE2007935, BLADE2007958, BLADE2008281, BLADE2008398, BLADE2008454, BLADE2008461, BLADE2008479, BLADE2008539, BLADE2008809, BLADE2008995, BLADE2009452, BLADE2009479, BLADE2009593, BNGH41000118, BNGH41000137, BNGH41000169, BNGH41000177, BNGH41000198, BNGH41000216, BNGH41000235, BNGH42000130, BNGH42000132, BNGH42000405, BNGH42000532, BNGH42000675, BNGH42000791, BNGH42000815, BNGH42000994, BNGH42001247, BNGH42001406, BNGH42001576, BNGH42001724, BNGH42002168, BNGH42002244, BNGH42002387, BNGH42002489, BNGH42003529, BNGH42003570, BNGH42003641, BNGH42004076, BNGH42004291, BNGH42004538, BNGH42004679, BNGH42005017, BNGH42005235, BNGH42005504, BNGH42006226, BNGH42006234, BNGH42007037, BNGH42007366, BNGH42007594, BNGH42007798, BNGH42008199, BNGH42008510, BNGH42008649, BNGH42008743, BNGH42008832, BNGH42008943, BNGH42009021, BRACE1000020, BRACE1000047, BRACE1000051, BRACE1000065, BRACE1000073, BRACE1000084, BRACE1000087, BRACE1000092, BRACE1000093, BRACE1000101, BRACE1000114, BRACE1000124, BRACE1000166, BRACE1000169, BRACE1000187, BRACE1000258, BRACE1000451, BRACE1000475, BRACE1000572, BRACE2000061, BRACE2000077, BRACE2000078, BRACE2000100, BRACE2000109, BRACE2000141, BRACE2000148, BRACE2000183, BRACE2000229, BRACE2000232, BRACE2000245, BRACE2000256, BRACE2000266, BRACE2000267, BRACE2000280, BRACE2000300, BRACE2000307, BRACE2000331, BRACE2000332, BRACE2000347, BRACE2000351, BRACE2000368, BRACE2000392, BRACE2000441, BRACE2000487, BRACE2000489, BRACE2000505, BRACE2000525, BRACE2000526, BRACE2000531, BRACE2000545, BRACE2000553, BRACE2000565, BRACE2000577, BRACE2000640, BRACE2000650, BRACE2000677, BRACE2000698, BRACE2000718, BRACE2000733, BRACE2000743, BRACE2000750, BRACE2000753, BRACE2000815, BRACE2000864, BRACE2000885, BRACE2000905, BRACE2000936, BRACE2000947, BRACE2000965, BRACE2000969, BRACE2000975, BRACE2000988, BRACE2001017, BRACE2001065, BRACE2001070, BRACE2001094, BRACE2001107, BRACE2001117, BRACE2001151, BRACE2001154, BRACE2001188, BRACE2001191, BRACE2001197, BRACE2001236, BRACE2001239, BRACE2001269, BRACE2001312, BRACE2001313, BRACE2001330, BRACE2001340, BRACE2001352, BRACE2001353, BRACE2001374, BRACE2001375, BRACE2001423, BRACE2001424, BRACE2001445, BRACE2001453, BRACE2001455, BRACE2001492, BRACE2001496, BRACE2001534, BRACE2001543, BRACE2001564, BRACE2001588, BRACE2001607, BRACE2001626, BRACE2001677, BRACE2001692, BRACE2001705, BRACE2001709, BRACE2001711, BRACE2001726, BRACE2001733, BRACE2001737, BRACE2001742, BRACE2001777, BRACE2001779, BRACE2001834, BRACE2001855, BRACE2001859, BRACE2001865, BRACE2001872, BRACE2001881, BRACE2001898, BRACE2001923, BRACE2001942, BRACE2001944, BRACE2001954, BRACE2001971, BRACE2001972, BRACE2001973, BRACE2002026, BRACE2002034, BRACE2002050, BRACE2002081, BRACE2002139, BRACE2002142, BRACE2002151, BRACE2002157, BRACE2002176, BRACE2002202, BRACE2002206, BRACE2002227, BRACE2002260, BRACE2002297, BRACE2002304, BRACE2002356, BRACE2002392, BRACE2002394, BRACE2002409, BRACE2002431, BRACE2002444, BRACE2002458, BRACE2002467, BRACE2002468, BRACE2002478, BRACE2002495, BRACE2002582, BRACE2002585, BRACE2002589, BRACE2002590, BRACE2002613, BRACE2002614, BRACE2002617, BRACE2002623, BRACE2002635, BRACE2002649, BRACE2002676, BRACE2002682, BRACE2002685, BRACE2002695, BRACE2002707, BRACE2002736, BRACE2002752, BRACE2002755, BRACE2002762, BRACE2002772, BRACE2002792, BRACE2002796, BRACE2002803, BRACE2002807, BRACE2002812, BRACE2002834, BRACE2002849, BRACE2002857, BRACE2002884, BRACE2002896, BRACE2002948, BRACE2003037, BRACE2003078, BRACE2003097, BRACE2003110, BRACE2003168, BRACE2003199, BRACE2003210, BRACE2003269, BRACE2003285, BRACE2003304, BRACE2003319, BRACE2003398, BRACE2003420, BRACE2003428, BRACE2003431, BRACE2003512, BRACE2003516, BRACE2003527, BRACE2003539, BRACE2003540, BRACE2003594, BRACE2003598, BRACE2003609, BRACE2003614, BRACE2003639, BRACE2003700, BRACE2003713, BRACE2003766, BRACE2003785, BRACE2003788, BRACE2003800, BRACE2003802, BRACE2003825, BRACE2003845, BRACE2003846, BRACE2003847, BRACE2003848, BRACE2003873, BRACE2003885, BRACE2003887, BRACE2003892, BRACE2003904, BRACE2003905, BRACE2003928, BRACE2003954, BRACE2003982, BRACE2003987, BRACE2005034, BRACE2005047, BRACE2005063, BRACE2005083, BRACE2005090, BRACE2005099, BRACE2005118, BRACE2005124, BRACE2005138, BRACE2005151, BRACE2005160, BRACE2005169, BRACE2005189, BRACE2005193, BRACE2005196, BRACE2005198, BRACE2005216, BRACE2005231, BRACE2005243, BRACE2005251, BRACE2005253, BRACE2005290, BRACE2005298, BRACE2005328, BRACE2005329, BRACE2005337, BRACE2005348, BRACE2005363, BRACE2005395, BRACE2005408, BRACE2005433, BRACE2005450, BRACE2005453, BRACE2005457, BRACE2005460, BRACE2005489, BRACE2005518, BRACE2005556, BRACE2005562, BRACE2005624, BRACE2005642, BRACE2005661, BRACE2005667, BRACE2005681, BRACE2005719, BRACE2005731, BRACE2005742, BRACE2005762, BRACE2005773, BRACE2005787, BRACE2005795, BRACE2005800, BRACE2005858, BRACE2005869, BRACE2005875, BRACE2005881, BRACE2005898, BRACE2005904, BRACE2005906, BRACE2005907, BRACE2005911, BRACE2005949, BRACE2005981, BRACE2005991, BRACE2006055, BRACE2006072, BRACE2006075, BRACE2006084, BRACE2006089, BRACE2006102, BRACE2006105, BRACE2006122, BRACE2006137, BRACE2006143, BRACE2006167, BRACE2006174, BRACE2006240, BRACE2006245, BRACE2006249, BRACE2006274, BRACE2006281, BRACE2006298, BRACE2006344, BRACE2006354, BRACE2006363, BRACE2006378, BRACE2006380, BRACE2006393, BRACE2006413, BRACE2006417, BRACE2006453, BRACE2006459, BRACE2006488, BRACE2006534, BRACE2006540, BRACE2006564, BRACE2006587, BRACE2006598, BRACE2006636, BRACE2006685, BRACE2006703, BRACE2006743, BRACE2006783, BRACE2006821, BRACE2006833, BRACE2006859, BRACE2006871, BRACE2006909, BRACE2006911, BRACE2006924, BRACE2006935, BRACE2006937, BRACE2006944, BRACE2006951, BRACE2006982, BRACE2006986, BRACE2007013, BRACE2007064, BRACE2007068, BRACE2007087, BRACE2007109, BRACE2007138, BRACE2007174, BRACE2007197, BRACE2007201, BRACE2007203, BRACE2007232, BRACE2007262, BRACE2007274, BRACE2007281, BRACE2007295, BRACE2007358, BRACE2007396, BRACE2007398, BRACE2007401, BRACE2007411, BRACE2007447, BRACE2007477, BRACE2007502, BRACE2007503, BRACE2007522, BRACE2007527, BRACE2007538, BRACE2007563, BRACE2007577, BRACE2007621, BRACE2007640, BRACE2007641, BRACE2007646, BRACE2007663, BRACE2007682, BRACE2007685, BRACE2007708, BRACE2007727, BRACE2007749, BRACE2007760, BRACE2007761, BRACE2007764, BRACE2007768, BRACE2007769, BRACE2007784, BRACE2007786, BRACE2007798, BRACE2007799, BRACE2007801, BRACE2007832, BRACE2007836, BRACE2007868, BRACE2007882, BRACE2007888, BRACE2007902, BRACE2007920, BRACE2007937, BRACE2007944, BRACE2007952, BRACE2008008, BRACE2008015, BRACE2008021, BRACE2008097, BRACE2008102, BRACE2008114, BRACE2008144, BRACE2008172, BRACE2008216, BRACE2008218, BRACE2008251, BRACE2008276, BRACE2008295, BRACE2008308, BRACE2008336, BRACE2008361, BRACE2008380, BRACE2008385, BRACE2008399, BRACE2008401, BRACE2008402, BRACE2008410, BRACE2008420, BRACE2008443, BRACE2008473, BRACE2008480, BRACE2008481, BRACE2008488, BRACE2008495, BRACE2008500, BRACE2008553, BRACE2008594, BRACE2008604, BRACE2008615, BRACE2008622, BRACE2008629, BRACE2008655, BRACE2008656, BRACE2008708, BRACE2008710, BRACE2008754, BRACE2008797, BRACE2008847, BRACE2008857, BRACE2008861, BRACE2008867, BRACE2008881, BRACE2008883, BRACE2008917, BRACE2008919, BRACE2008948, BRACE2008960, BRACE2008999, BRACE2009014, BRACE2009016, BRACE2009031, BRACE2009044, BRACE2009045, BRACE2009053, BRACE2009122, BRACE2009131, BRACE2009185, BRACE2009188, BRACE2009212, BRACE2009221, BRACE2009235, BRACE2009238, BRACE2009255, BRACE2009270, BRACE2009272, BRACE2009274, BRACE2009275, BRACE2009293, BRACE2009307, BRACE2009311, BRACE2009318, BRACE2009323, BRACE2009366, BRACE2009421, BRACE2009428, BRACE2009434, BRACE2009437, BRACE2009483, BRACE2009533, BRACE2009558, BRACE2009566, BRACE2009591, BRACE2009620, BRACE2009654, BRACE2009721, BRACE2009732, BRACE2009754, BRACE2009828, BRACE2009886, BRACE2009907, BRACE2009957, BRACE2010170, BRACE2010171, BRACE2010203, BRACE2010208, BRACE2010336, BRACE2010348, BRACE2010440, BRACE2010444, BRACE2010477, BRACE2010489, BRACE2010535, BRACE2010550, BRACE2010598, BRACE2010632, BRACE2010642, BRACE2010651, BRACE2010669, BRACE2010684, BRACE2010753, BRACE2010813, BRACE2010828, BRACE2010837, BRACE2010888, BRACE2010937, BRACE2010983, BRACE2011007, BRACE2011025, BRACE2011183, BRACE2011199, BRACE2011265, BRACE2011389, BRACE2011478, BRACE2011545, BRACE2011592, BRACE2011611, BRACE2011646, BRACE2011677, BRACE2011703, BRACE2011747, BRACE2011838, BRACE2011892, BRACE2011904, BRACE2011947, BRACE2012061, BRACE2012062, BRACE2012185, BRACE2012222, BRACE2012232, BRACE2012291, BRACE2012317, BRACE2012510, BRACE2012528, BRACE2012625, BRACE2012653, BRACE2012814, BRACE2012833, BRACE2012838, BRACE2012936, BRACE2012947, BRACE2013009, BRACE2013010, BRACE2013126, BRACE2013132, BRACE2013149, BRACE2013369, BRACE2013806, BRACE2013855, BRACE2013911, BRACE2014108, BRACE2014161, BRACE2014232, BRACE2014257, BRACE2014268, BRACE2014306, BRACE2014475, BRACE2014657, BRACE2014746, BRACE2014780, BRACE2014818, BRACE2014821, BRACE2014824, BRACE2014850, BRACE2014854, BRACE2015031, BRACE2015058, BRACE2015132, BRACE2015262, BRACE2015270, BRACE2015314, BRACE2015352, BRACE2015368, BRACE2015412, BRACE2015436, BRACE2015741, BRACE2015756, BRACE2015969, BRACE2015995, BRACE2016058, BRACE2016194, BRACE2016315, BRACE2016325, BRACE2016335, BRACE2016362, BRACE2016465, BRACE2016516, BRACE2016583, BRACE2016708, BRACE2016821, BRACE2016896, BRACE2016981, BRACE2017108, BRACE2017124, BRACE2017298, BRACE2017359, BRACE2017410, BRACE2017438, BRACE2017580, BRACE2017587, BRACE2017720, BRACE2017844, BRACE2017872, BRACE2017929, BRACE2017934, BRACE2017985, BRACE2017992, BRACE2018337, BRACE2018443, BRACE2018448, BRACE2018568, BRACE2018700, BRACE2018727, BRACE2018736, BRACE2018759, BRACE2018762, BRACE2018782, BRACE2018847, BRACE2019004, BRACE2019044, BRACE2019244, BRACE2019258, BRACE2019327, BRACE2019348, BRACE2019371, BRACE2019467, BRACE2019510, BRACE2019519, BRACE2019528, BRACE2019618, BRACE2019696, BRACE2019703, BRACE2019843, BRACE2019865, BRACE2019872, BRACE2019877, BRACE2020028, BRACE2020077, BRACE2020097, BRACE2020157, BRACE2020278, BRACE2020358, BRACE2020467, BRACE2020584, BRACE2020652, BRACE2020709, BRACE2020742, BRACE2020756, BRACE2020863, BRACE2020982, BRACE2021014, BRACE2021143, BRACE2021148, BRACE2021245, BRACE2021254, BRACE2021264, BRACE2021344, BRACE2021433, BRACE2021478, BRACE2021541, BRACE2021670, BRACE2021695, BRACE2021708, BRACE2021721, BRACE2021932, BRACE2021936, BRACE2022030, BRACE2022158, BRACE2022196, BRACE2022270, BRACE2022328, BRACE2022333, BRACE2022389, BRACE2022394, BRACE2022435, BRACE2022448, BRACE2022450, BRACE2022549, BRACE2022633, BRACE2022693, BRACE2022848, BRACE2022928, BRACE2022990, BRACE2023069, BRACE2023070, BRACE2023223, BRACE2023268, BRACE2023284, BRACE2023404, BRACE2023451, BRACE2023540, BRACE2023633, BRACE2023718, BRACE2023727, BRACE2023744, BRACE2023800, BRACE2023801, BRACE2024074, BRACE2024222, BRACE2024610, BRACE2024627, BRACE2024781, BRACE2024826, BRACE2025018, BRACE2025316, BRACE2025333, BRACE2025437, BRACE2025452, BRACE2025492, BRACE2025710, BRACE2025796, BRACE2025992, BRACE2026054, BRACE2026131, BRACE2026141, BRACE2026142, BRACE2026293, BRACE2026294, BRACE2026404, BRACE2026675, BRACE2026725, BRACE2026920, BRACE2026971, BRACE2027018, BRACE2027221, BRACE2027258, BRACE2027312, BRACE2027382, BRACE2027389, BRACE2027408, BRACE2027643, BRACE2027767, BRACE2027770, BRACE2027879, BRACE2027896, BRACE2027970, BRACE2028171, BRACE2028392, BRACE2028410, BRACE2028636, BRACE2028741, BRACE2028956, BRACE2028970, BRACE2029112, BRACE2029356, BRACE2029396, BRACE2029581, BRACE2029644, BRACE2029849, BRACE2030039, BRACE2030096, BRACE2030323, BRACE2030326, BRACE2030341, BRACE2030345, BRACE2030736, BRACE2030883, BRACE2030884, BRACE2031154, BRACE2031232, BRACE2031527, BRACE2031531, BRACE2031553, BRACE2031899, BRACE2032044, BRACE2032090, BRACE2032134, BRACE2032148, BRACE2032182, BRACE2032329, BRACE2032385, BRACE2032436, BRACE2032477, BRACE2032502, BRACE2032538, BRACE2032584, BRACE2032823, BRACE2033128, BRACE2033394, BRACE2033478, BRACE2033720, BRACE2033786, BRACE2034434, BRACE2034523, BRACE2034616, BRACE2034622, BRACE2034870, BRACE2035003, BRACE2035120, BRACE2035124, BRACE2035191, BRACE2035278, BRACE2035381, BRACE2035441, BRACE2035485, BRACE2036005, BRACE2036096, BRACE2036743, BRACE2036830, BRACE2036834, BRACE2036900, BRACE2037132, BRACE2037294, BRACE2037299, BRACE2037310, BRACE2037431, BRACE2037692, BRACE2037847, BRACE2038114, BRACE2038269, BRACE2038271, BRACE2038329, BRACE2038492, BRACE2038551, BRACE2038618, BRACE2039009, BRACE2039128, BRACE2039170, BRACE2039249, BRACE2039286, BRACE2039297, BRACE2039327, BRACE2039362, BRACE2039475, BRACE2039600, BRACE2039607, BRACE2039734, BRACE2039823, BRACE2039832, BRACE2039893, BRACE2039986, BRACE2040138, BRACE2040325, BRACE2040514, BRACE2040640, BRACE2040987, BRACE2041009, BRACE2041095, BRACE2041200, BRACE2041264, BRACE2041890, BRACE2041898, BRACE2042394, BRACE2042398, BRACE2042550, BRACE2042620, BRACE2042628, BRACE2042873, BRACE2043036, BRACE2043105, BRACE2043142, BRACE2043248, BRACE2043349, BRACE2043381, BRACE2043774, BRACE2043942, BRACE2044057, BRACE2044105, BRACE2044263, BRACE2044286, BRACE2044304, BRACE2044473, BRACE2044510, BRACE2044640, BRACE2044816, BRACE2044946, BRACE2044949, BRACE2045300, BRACE2045428, BRACE2045445, BRACE2045596, BRACE2045772, BRACE2045947, BRACE2045954, BRACE2046251, BRACE2046295, BRACE2046976, BRACE2047011, BRACE2047232, BRACE2047350, BRACE2047377, BRACE2047385, BRACE2047492, BRACE2047558, BRACE2047573, BRACE2047835, BRACE2047893, BRACE2047975, BRACE3000404, BRACE3000520, BRACE3000697, BRACE3000840, BRACE3000973, BRACE3001002, BRACE3001058, BRACE3001066, BRACE3001113, BRACE3001217, BRACE3001299, BRACE3001384, BRACE3001391, BRACE3001403, BRACE3001595, BRACE3001754, BRACE3001948, BRACE3001973, BRACE3002298, BRACE3002344, BRACE3002390, BRACE3002420, BRACE3002508, BRACE3002541, BRACE3002756, BRACE3003004, BRACE3003053, BRACE3003192, BRACE3003413, BRACE3003595, BRACE3003698, BRACE3003866, BRACE3003920, BRACE3004046, BRACE3004058, BRACE3004113, BRACE3004150, BRACE3004205, BRACE3004358, BRACE3004435, BRACE3004477, BRACE3004767, BRACE3004772, BRACE3004783, BRACE3004862, BRACE3004880, BRACE3004887, BRACE3004981, BRACE3004996, BRACE3004998, BRACE3005103, BRACE3005127, BRACE3005145, BRACE3005217, BRACE3005225, BRACE3005430, BRACE3005499, BRACE3005760, BRACE3005870, BRACE3005903, BRACE3005938, BRACE3005989, BRACE3006113, BRACE3006185, BRACE3006226, BRACE3006462, BRACE3006463, BRACE3006553, BRACE3006872, BRACE3006917, BRACE3007058, BRACE3007084, BRACE3007085, BRACE3007258, BRACE3007322, BRACE3007472, BRACE3007480, BRACE3007559, BRACE3007625, BRACE3007642, BRACE3007649, BRACE3007767, BRACE3007869, BRACE3008036, BRACE3008066, BRACE3008092, BRACE3008095, BRACE3008137, BRACE3008255, BRACE3008337, BRACE3008384, BRACE3008720, BRACE3008772, BRACE3009044, BRACE3009075, BRACE3009090, BRACE3009127, BRACE3009197, BRACE3009237, BRACE3009265, BRACE3009297, BRACE3009377, BRACE3009392, BRACE3009416, BRACE3009539, BRACE3009574, BRACE3009701, BRACE3009708, BRACE3009724, BRACE3009993, BRACE3010076, BRACE3010079, BRACE3010086, BRACE3010221, BRACE3010283, BRACE3010315, BRACE3010397, BRACE3010416, BRACE3010435, BRACE3010702, BRACE3010862, BRACE3011271, BRACE3011421, BRACE3011447, BRACE3011505, BRACE3011634, BRACE3011774, BRACE3012357, BRACE3012574, BRACE3012806, BRACE3012930, BRACE3013119, BRACE3013418, BRACE3013576, BRACE3013740, BRACE3013780, BRACE3013874, BRACE3013936, BRACE3013986, BRACE3014005, BRACE3014068, BRACE3014231, BRACE3014290, BRACE3014317, BRACE3014523, BRACE3014714, BRACE3014807, BRACE3014942, BRACE3015090, BRACE3015121, BRACE3015262, BRACE3015521, BRACE3015808, BRACE3015829, BRACE3015894, BRACE3015898, BRACE3016020, BRACE3016122, BRACE3016167, BRACE3016170, BRACE3016580, BRACE3016788, BRACE3016810, BRACE3016862, BRACE3016884, BRACE3017083, BRACE3017253, BRACE3018083, BRACE3018308, BRACE3018963, BRACE3019055, BRACE3019071, BRACE3019084, BRACE3019570, BRACE3019611, BRACE3019817, BRACE3019828, BRACE3019941, BRACE3020151, BRACE3020194, BRACE3020286, BRACE3020356, BRACE3020594, BRACE3020669, BRACE3020671, BRACE3020890, BRACE3021148, BRACE3021430, BRACE3021517, BRACE3021805, BRACE3022051, BRACE3022303, BRACE3022312, BRACE3022340, BRACE3022847, BRACE3023604, BRACE3023912, BRACE3024073, BRACE3024359, BRACE3024379, BRACE3024444, BRACE3024497, BRACE3024537, BRACE3024659, BRACE3024662, BRACE3024879, BRACE3025153, BRACE3025302, BRACE3025457, BRACE3025531, BRACE3025627, BRACE3025630, BRACE3025719, BRACE3026008, BRACE3026075, BRACE3026161, BRACE3026290, BRACE3026345, BRACE3026456, BRACE3026735, BRACE3026802, BRACE3026844, BRACE3026947, BRACE3026993, BRACE3027242, BRACE3027256, BRACE3027326, BRACE3027478, BRACE3027480, BRACE3027931, BRACE3027976, BRACE3028214, BRACE3028241, BRACE3028360, BRACE3028895, BRACE3028998, BRACE3029005, BRACE3029021, BRACE3029205, BRACE3029447, BRACE3030057, BRACE3030103, BRACE3030538, BRACE3030748, BRACE3030866, BRACE3031161, BRACE3031184, BRACE3031185, BRACE3031315, BRACE3031372, BRACE3031579, BRACE3031728, BRACE3031838, BRACE3031843, BRACE3032427, BRACE3032455, BRACE3032537, BRACE3032538, BRACE3032771, BRACE3032980, BRACE3032983, BRACE3033525, BRACE3034159, BRACE3034183, BRACE3034389, BRACE3034964, BRACE3034993, BRACE3035168, BRACE3035227, BRACE3036156, BRACE3036271, BRACE3037612, BRACE3037637, BRACE3037803, BRACE3038012, BRACE3038030, BRACE3038569, BRACE3038570, BRACE3038687, BRACE3038760, BRACE3039288, BRACE3039358, BRACE3039378, BRACE3039454, BRACE3040012, BRACE3040239, BRACE3040504, BRACE3040644, BRACE3040856, BRACE3040863, BRACE3041059, BRACE3041162, BRACE3041827, BRACE3042046, BRACE3042210, BRACE3042326, BRACE3042409, BRACE3042432, BRACE3042594, BRACE3043597, BRACE3044090, BRACE3044172, BRACE3044247, BRACE3044377, BRACE3044389, BRACE3044495, BRACE3045011, BRACE3045033, BRACE3045078, BRACE3045145, BRACE3045424, BRACE3045708, BRACE3045981, BRACE3046049, BRACE3046152, BRACE3046294, BRACE3046450, BRACE3046466, BRACE3046491, BRACE3046609, BRACE3046762, BRACE3046837, BRACE3046855, BRACE3046966, BRACE3047018, BRACE3047482, BRACE3047801, BRALZ1000047, BRALZ1000103, BRALZ2000189, BRALZ2000263, BRALZ2000988, BRALZ2001038, BRALZ2001279, BRALZ2001350, BRALZ2001445, BRALZ2001559, BRALZ2001743, BRALZ2001834, BRALZ2002174, BRALZ2002418, BRALZ2002477, BRALZ2003119, BRALZ2003330, BRALZ2003453, BRALZ2003525, BRALZ2004397, BRALZ2005467, BRALZ2005471, BRALZ2005888, BRALZ2005950, BRALZ2005992, BRALZ2006288, BRALZ2006474, BRALZ2006560, BRALZ2006734, BRALZ2006800, BRALZ2006976, BRALZ2007376, BRALZ2007545, BRALZ2007576, BRALZ2007661, BRALZ2007790, BRALZ2007793, BRALZ2007952, BRALZ2008031, BRALZ2008166, BRALZ2008462, BRALZ2008617, BRALZ2008696, BRALZ2008763, BRALZ2008869, BRALZ2008930, BRALZ2009446, BRALZ2009486, BRALZ2010186, BRALZ2010842, BRALZ2011337, BRALZ2011796, BRALZ2011880, BRALZ2012050, BRALZ2012183, BRALZ2012848, BRALZ2013621, BRALZ2013690, BRALZ2014054, BRALZ2014316, BRALZ2014484, BRALZ2014951, BRALZ2015168, BRALZ2015811, BRALZ2016085, BRALZ2016498, BRALZ2017359, BRALZ2017531, BRALZ2017607, BRALZ2017620, BRALZ2017844, BRALZ2018342, BRALZ2018492, BRALZ2018834, BRALZ2019047, BRAMY1000095, BRAMY1000098, BRAMY1000130, BRAMY1000157, BRAMY1000173, BRAMY2000021, BRAMY2000025, BRAMY2000052, BRAMY2000076, BRAMY2000086, BRAMY2000151, BRAMY2000181, BRAMY2000196, BRAMY2000231, BRAMY2000277, BRAMY2000388, BRAMY2000411, BRAMY2000508, BRAMY2000562, BRAMY2000585, BRAMY2000653, BRAMY2000814, BRAMY2000946, BRAMY2000981, BRAMY2000987, BRAMY2001068, BRAMY2001114, BRAMY2001203, BRAMY2001282, BRAMY2001367, BRAMY2001427, BRAMY2001473, BRAMY2001678, BRAMY2002005, BRAMY2002044, BRAMY2002072, BRAMY2002158, BRAMY2002311, BRAMY2002339, BRAMY2002364, BRAMY2002369, BRAMY2002479, BRAMY2002493, BRAMY2002525, BRAMY2002584, BRAMY2002604, BRAMY2002621, BRAMY2002638, BRAMY2002739, BRAMY2002799, BRAMY2002853, BRAMY2002862, BRAMY2002956, BRAMY2003008, BRAMY2003037, BRAMY2003117, BRAMY2003287, BRAMY2003325, BRAMY2003529, BRAMY2003538, BRAMY2003585, BRAMY2003634, BRAMY2003653, BRAMY2003681, BRAMY2003893, BRAMY2003897, BRAMY2003898, BRAMY2003904, BRAMY2003926, BRAMY2003929, BRAMY2004031, BRAMY2004058, BRAMY2004183, BRAMY2004335, BRAMY2004351, BRAMY2004352, BRAMY2004387, BRAMY2004492, BRAMY2004524, BRAMY2004537, BRAMY2004542, BRAMY2004756, BRAMY2004771, BRAMY2005052, BRAMY2005064, BRAMY2005094, BRAMY2005151, BRAMY2005182, BRAMY2005244, BRAMY2005391, BRAMY2005488, BRAMY2005576, BRAMY2005648, BRAMY2005662, BRAMY2005708, BRAMY2005711, BRAMY2006092, BRAMY2006118, BRAMY2006149, BRAMY2006375, BRAMY2006397, BRAMY2006411, BRAMY2006459, BRAMY2006466, BRAMY2006659, BRAMY2006779, BRAMY2006809, BRAMY2006879, BRAMY2007043, BRAMY2007110, BRAMY2007185, BRAMY2007244, BRAMY2007249, BRAMY2007255, BRAMY2007287, BRAMY2007308, BRAMY2007411, BRAMY2007458, BRAMY2007486, BRAMY2007546, BRAMY2007567, BRAMY2007594, BRAMY2007610, BRAMY2007613, BRAMY2007653, BRAMY2007753, BRAMY2007859, BRAMY2008333, BRAMY2008382, BRAMY2008563, BRAMY2008583, BRAMY2008977, BRAMY2008979, BRAMY2009013, BRAMY2009023, BRAMY2009034, BRAMY2009105, BRAMY2009123, BRAMY2009192, BRAMY2009344, BRAMY2009349, BRAMY2009394, BRAMY2009489, BRAMY2009508, BRAMY2009528, BRAMY2009557, BRAMY2009612, BRAMY2009693, BRAMY2009934, BRAMY2010068, BRAMY2010135, BRAMY2010145, BRAMY2010171, BRAMY2010208, BRAMY2010239, BRAMY2010272, BRAMY2010290, BRAMY2010357, BRAMY2010366, BRAMY2010395, BRAMY2010441, BRAMY2010442, BRAMY2010464, BRAMY2010581, BRAMY2010798, BRAMY2010808, BRAMY2010919, BRAMY2011064, BRAMY2011105, BRAMY2011178, BRAMY2011196, BRAMY2011216, BRAMY2011253, BRAMY2011446, BRAMY2011480, BRAMY2011639, BRAMY2011679, BRAMY2011811, BRAMY2011841, BRAMY2011846, BRAMY2011849, BRAMY2011872, BRAMY2011961, BRAMY2012017, BRAMY2012119, BRAMY2012162, BRAMY2012163, BRAMY2012277, BRAMY2012340, BRAMY2012426, BRAMY2012497, BRAMY2012517, BRAMY2012555, BRAMY2012568, BRAMY2012581, BRAMY2012691, BRAMY2012721, BRAMY2012731, BRAMY2012776, BRAMY2012880, BRAMY2012881, BRAMY2013169, BRAMY2013200, BRAMY2013216, BRAMY2013405, BRAMY2013414, BRAMY2013572, BRAMY2013621, BRAMY2013659, BRAMY2013722, BRAMY2013736, BRAMY2013756, BRAMY2013944, BRAMY2013975, BRAMY2014019, BRAMY2014205, BRAMY2014387, BRAMY2014462, BRAMY2014469, BRAMY2014541, BRAMY2014754, BRAMY2015211, BRAMY2015251, BRAMY2015311, BRAMY2015420, BRAMY2015503, BRAMY2015516, BRAMY2015550, BRAMY2015551, BRAMY2015559, BRAMY2015688, BRAMY2015705, BRAMY2015782, BRAMY2015833, BRAMY2015855, BRAMY2015890, BRAMY2015911, BRAMY2015925, BRAMY2016002, BRAMY2016020, BRAMY2016070, BRAMY2016251, BRAMY2016325, BRAMY2016327, BRAMY2016386, BRAMY2016771, BRAMY2016892, BRAMY2016938, BRAMY2016953, BRAMY2017014, BRAMY2017249, BRAMY2017348, BRAMY2017450, BRAMY2017455, BRAMY2017528, BRAMY2017864, BRAMY2018027, BRAMY2018106, BRAMY2018122, BRAMY2018126, BRAMY2018272, BRAMY2018273, BRAMY2018279, BRAMY2018295, BRAMY2018308, BRAMY2018396, BRAMY2018467, BRAMY2018635, BRAMY2018785, BRAMY2019055, BRAMY2019111, BRAMY2019277, BRAMY2019300, BRAMY2019468, BRAMY2019509, BRAMY2019600, BRAMY2019643, BRAMY2019710, BRAMY2019963, BRAMY2019985, BRAMY2019989, BRAMY2020050, BRAMY2020058, BRAMY2020106, BRAMY2020270, BRAMY2020354, BRAMY2020355, BRAMY2020412, BRAMY2020445, BRAMY2020466, BRAMY2020520, BRAMY2020574, BRAMY2020634, BRAMY2020713, BRAMY2021040, BRAMY2021063, BRAMY2021098, BRAMY2021142, BRAMY2021276, BRAMY2021310, BRAMY2021388, BRAMY2021498, BRAMY2021523, BRAMY2021710, BRAMY2021732, BRAMY2021746, BRAMY2021825, BRAMY2021867, BRAMY2021962, BRAMY2021982, BRAMY2022052, BRAMY2022160, BRAMY2022168, BRAMY2022263, BRAMY2022301, BRAMY2022320, BRAMY2022383, BRAMY2022445, BRAMY2022454, BRAMY2022493, BRAMY2022525, BRAMY2022532, BRAMY2022723, BRAMY2022796, BRAMY2022929, BRAMY2022980, BRAMY2022984, BRAMY2023060, BRAMY2023110, BRAMY2023115, BRAMY2023161, BRAMY2023172, BRAMY2023238, BRAMY2023327, BRAMY2023358, BRAMY2023406, BRAMY2023482, BRAMY2023514, BRAMY2023729, BRAMY2023786, BRAMY2023852, BRAMY2023863, BRAMY2024004, BRAMY2024073, BRAMY2024312, BRAMY2024374, BRAMY2024390, BRAMY2024416, BRAMY2024449, BRAMY2024489, BRAMY2024497, BRAMY2024514, BRAMY2024530, BRAMY2024535, BRAMY2024545, BRAMY2024576, BRAMY2024593, BRAMY2024711, BRAMY2024715, BRAMY2024728, BRAMY2024849, BRAMY2025024, BRAMY2025032, BRAMY2025121, BRAMY2025175, BRAMY2025218, BRAMY2025230, BRAMY2025272, BRAMY2025277, BRAMY2025495, BRAMY2025812, BRAMY2025996, BRAMY2026009, BRAMY2026091, BRAMY2026168, BRAMY2026300, BRAMY2026347, BRAMY2026395, BRAMY2026405, BRAMY2026533, BRAMY2026538, BRAMY2026685, BRAMY2026713, BRAMY2026778, BRAMY2026824, BRAMY2026899, BRAMY2026902, BRAMY2026904, BRAMY2026976, BRAMY2027073, BRAMY2027114, BRAMY2027140, BRAMY2027242, BRAMY2027396, BRAMY2027451, BRAMY2027461, BRAMY2027467, BRAMY2027587, BRAMY2027714, BRAMY2027717, BRAMY2027739, BRAMY2027752, BRAMY2027782, BRAMY2028072, BRAMY2028183, BRAMY2028188, BRAMY2028269, BRAMY2028282, BRAMY2028472, BRAMY2028516, BRAMY2028565, BRAMY2028593, BRAMY2028682, BRAMY2028783, BRAMY2028856, BRAMY2028914, BRAMY2029204, BRAMY2029602, BRAMY2029988, BRAMY2030098, BRAMY2030109, BRAMY2030206, BRAMY2030477, BRAMY2030545, BRAMY2030607, BRAMY2030702, BRAMY2030703, BRAMY2030768, BRAMY2030799, BRAMY2030859, BRAMY2030915, BRAMY2031317, BRAMY2031377, BRAMY2031442, BRAMY2031516, BRAMY2032014, BRAMY2032231, BRAMY2032242, BRAMY2032290, BRAMY2032311, BRAMY2032317, BRAMY2032344, BRAMY2032589, BRAMY2032678, BRAMY2032696, BRAMY2032777, BRAMY2032994, BRAMY2033003, BRAMY2033116, BRAMY2033240, BRAMY2033267, BRAMY2033316, BRAMY2033332, BRAMY2033506, BRAMY2033594, BRAMY2033895, BRAMY2033914, BRAMY2034072, BRAMY2034185, BRAMY2034187, BRAMY2034305, BRAMY2034561, BRAMY2034920, BRAMY2034993, BRAMY2035070, BRAMY2035449, BRAMY2035545, BRAMY2035606, BRAMY2035718, BRAMY2035719, BRAMY2035801, BRAMY2035869, BRAMY2035923, BRAMY2036076, BRAMY2036079, BRAMY2036254, BRAMY2036266, BRAMY2036387, BRAMY2036396, BRAMY2036567, BRAMY2036615, BRAMY2036699, BRAMY2036913, BRAMY2036918, BRAMY2036968, BRAMY2037328, BRAMY2037609, BRAMY2037629, BRAMY2037800, BRAMY2037823, BRAMY2037971, BRAMY2038100, BRAMY2038128, BRAMY2038317, BRAMY2038475, BRAMY2038484, BRAMY2038516, BRAMY2038832, BRAMY2038846, BRAMY2038887, BRAMY2038904, BRAMY2039287, BRAMY2039300, BRAMY2039314, BRAMY2039341, BRAMY2039630, BRAMY2039695, BRAMY2039728, BRAMY2039872, BRAMY2040051, BRAMY2040095, BRAMY2040159, BRAMY2040214, BRAMY2040478, BRAMY2040915, BRAMY2041261, BRAMY2041347, BRAMY2041378, BRAMY2041384, BRAMY2041434, BRAMY2041507, BRAMY2041542, BRAMY2041738, BRAMY2042122, BRAMY2042131, BRAMY2042178, BRAMY2042195, BRAMY2042244, BRAMY2042549, BRAMY2042596, BRAMY2042612, BRAMY2042641, BRAMY2042711, BRAMY2042760, BRAMY2042804, BRAMY2042899, BRAMY2042918, BRAMY2043069, BRAMY2043103, BRAMY2043314, BRAMY2043345, BRAMY2044246, BRAMY2044317, BRAMY2044349, BRAMY2044686, BRAMY2044838, BRAMY2045036, BRAMY2045299, BRAMY2045471, BRAMY2045530, BRAMY2046109, BRAMY2046478, BRAMY2046489, BRAMY2046537, BRAMY2046667, BRAMY2046742, BRAMY2046871, BRAMY2046984, BRAMY2046989, BRAMY2047169, BRAMY2047280, BRAMY2047420, BRAMY2047676, BRAMY2047692, BRAMY2047746, BRAMY2047751, BRAMY2047765, BRAMY2047884, BRAMY2047948, BRAMY3000206, BRAMY3000210, BRAMY3000213, BRAMY3000224, BRAMY3000254, BRAMY3000307, BRAMY3000692, BRAMY3001356, BRAMY3001401, BRAMY3001409, BRAMY3001794, BRAMY3002120, BRAMY3002312, BRAMY3002329, BRAMY3002458, BRAMY3002508, BRAMY3002620, BRAMY3002803, BRAMY3002805, BRAMY3002886, BRAMY3002991, BRAMY3003026, BRAMY3003109, BRAMY3003205, BRAMY3003310, BRAMY3003566, BRAMY3003723, BRAMY3004126, BRAMY3004224, BRAMY3004364, BRAMY3004672, BRAMY3004800, BRAMY3004900, BRAMY3004919, BRAMY3005091, BRAMY3005184, BRAMY3005656, BRAMY3005912, BRAMY3005932, BRAMY3006032, BRAMY3006297, BRAMY3006761, BRAMY3007078, BRAMY3007206, BRAMY3007311, BRAMY3007350, BRAMY3007449, BRAMY3007471, BRAMY3007609, BRAMY3007723, BRAMY3007968, BRAMY3008044, BRAMY3008088, BRAMY3008096, BRAMY3008335, BRAMY3008466, BRAMY3008505, BRAMY3008650, BRAMY3008937, BRAMY3009158, BRAMY3009207, BRAMY3009491, BRAMY3009556, BRAMY3009782, BRAMY3009811, BRAMY3009904, BRAMY3010264, BRAMY3010321, BRAMY3010411, BRAMY3010492, BRAMY3010603, BRAMY3010654, BRAMY4000089, BRAMY4000095, BRAMY4000229, BRAMY4000277, BRAMY4000915, BRAMY4000962, BRAMY4001173, BRAMY4001200, BRAMY4001234, BRAMY4001449, BRAMY4001652, BRAMY4001863, BRAMY4001913, BRAMY4002575, BRAMY4002628, BRASW1000053, BRASW1000125, BRAWH1000001, BRAWH1000002, BRAWH1000037, BRAWH1000045, BRAWH1000083, BRAWH1000094, BRAWH1000116, BRAWH1000127, BRAWH1000130, BRAWH1000157, BRAWH1000162, BRAWH1000164, BRAWH1000168, BRAWH1000174, BRAWH1000180, BRAWH1000369, BRAWH2000034, BRAWH2000048, BRAWH2000071, BRAWH2000082, BRAWH2000093, BRAWH2000109, BRAWH2000131, BRAWH2000142, BRAWH2000169, BRAWH2000177, BRAWH2000218, BRAWH2000232, BRAWH2000248, BRAWH2000256, BRAWH2000274, BRAWH2000323, BRAWH2000353, BRAWH2000370, BRAWH2000409, BRAWH2000417, BRAWH2000443, BRAWH2000471, BRAWH2000476, BRAWH2000482, BRAWH2000494, BRAWH2000500, BRAWH2000522, BRAWH2000554, BRAWH2000595, BRAWH2000636, BRAWH2000643, BRAWH2000651, BRAWH2000682, BRAWH2000686, BRAWH2000752, BRAWH2000859, BRAWH2000866, BRAWH2000892, BRAWH2000901, BRAWH2000926, BRAWH2000944, BRAWH2000984, BRAWH2001019, BRAWH2001037, BRAWH2001052, BRAWH2001103, BRAWH2001129, BRAWH2001137, BRAWH2001159, BRAWH2001186, BRAWH2001203, BRAWH2001238, BRAWH2001239, BRAWH2001255, BRAWH2001321, BRAWH2001355, BRAWH2001378, BRAWH2001395, BRAWH2001406, BRAWH2001412, BRAWH2001418, BRAWH2001424, BRAWH2001436, BRAWH2001438, BRAWH2001459, BRAWH2001461, BRAWH2001492, BRAWH2001503, BRAWH2001519, BRAWH2001530, BRAWH2001535, BRAWH2001589, BRAWH2001662, BRAWH2001666, BRAWH2001679, BRAWH2001686, BRAWH2001701, BRAWH2001842, BRAWH2001862, BRAWH2001873, BRAWH2001940, BRAWH2001973, BRAWH2002047, BRAWH2002060, BRAWH2002062, BRAWH2002125, BRAWH2002191, BRAWH2002318, BRAWH2002333, BRAWH2002352, BRAWH2002383, BRAWH2002549, BRAWH2002560, BRAWH2002601, BRAWH2002623, BRAWH2002630, BRAWH2002635, BRAWH2002662, BRAWH2002725, BRAWH2002761, BRAWH2002811, BRAWH2002861, BRAWH2002911, BRAWH2002963, BRAWH2002967, BRAWH2002976, BRAWH2003000, BRAWH2003135, BRAWH2003240, BRAWH2003307, BRAWH2003355, BRAWH2003366, BRAWH2003662, BRAWH2003689, BRAWH2003693, BRAWH2003818, BRAWH2003832, BRAWH2003948, BRAWH2003964, BRAWH2004044, BRAWH2004068, BRAWH2004078, BRAWH2004136, BRAWH2004217, BRAWH2004580, BRAWH2004731, BRAWH2004779, BRAWH2004842, BRAWH2004884, BRAWH2004923, BRAWH2005008, BRAWH2005068, BRAWH2005074, BRAWH2005315, BRAWH2005517, BRAWH2005524, BRAWH2005533, BRAWH2005578, BRAWH2005812, BRAWH2005974, BRAWH2005998, BRAWH2006044, BRAWH2006083, BRAWH2006207, BRAWH2006301, BRAWH2006395, BRAWH2006405, BRAWH2006450, BRAWH2006493, BRAWH2006526, BRAWH2006543, BRAWH2006622, BRAWH2006760, BRAWH2006960, BRAWH2006989, BRAWH2006996, BRAWH2007069, BRAWH2007308, BRAWH2007406, BRAWH2007550, BRAWH2007570, BRAWH2007591, BRAWH2007605, BRAWH2007658, BRAWH2007664, BRAWH2007800, BRAWH2007808, BRAWH2007825, BRAWH2007862, BRAWH2007890, BRAWH2008058, BRAWH2008128, BRAWH2008255, BRAWH2008292, BRAWH2008297, BRAWH2008366, BRAWH2008380, BRAWH2008540, BRAWH2008577, BRAWH2008790, BRAWH2008903, BRAWH2008956, BRAWH2008993, BRAWH2009112, BRAWH2009227, BRAWH2009238, BRAWH2009261, BRAWH2009263, BRAWH2009298, BRAWH2009304, BRAWH2009307, BRAWH2009360, BRAWH2009393, BRAWH2009485, BRAWH2009490, BRAWH2009558, BRAWH2009590, BRAWH2009626, BRAWH2009678, BRAWH2009695, BRAWH2009907, BRAWH2010000, BRAWH2010069, BRAWH2010084, BRAWH2010318, BRAWH2010329, BRAWH2010354, BRAWH2010364, BRAWH2010536, BRAWH2010552, BRAWH2010584, BRAWH2010618, BRAWH2010619, BRAWH2010754, BRAWH2010980, BRAWH2011066, BRAWH2011079, BRAWH2011096, BRAWH2011155, BRAWH2011166, BRAWH2011204, BRAWH2011286, BRAWH2011294, BRAWH2011400, BRAWH2011762, BRAWH2011795, BRAWH2011796, BRAWH2011812, BRAWH2011823, BRAWH2011860, BRAWH2011920, BRAWH2011958, BRAWH2012054, BRAWH2012077, BRAWH2012161, BRAWH2012164, BRAWH2012258, BRAWH2012277, BRAWH2012326, BRAWH2012538, BRAWH2012540, BRAWH2012619, BRAWH2012698, BRAWH2012749, BRAWH2012827, BRAWH2012866, BRAWH2012963, BRAWH2013047, BRAWH2013219, BRAWH2013294, BRAWH2013866, BRAWH2013871, BRAWH2013914, BRAWH2013941, BRAWH2013955, BRAWH2014053, BRAWH2014234, BRAWH2014379, BRAWH2014414, BRAWH2014473, BRAWH2014511, BRAWH2014645, BRAWH2014662, BRAWH2014717, BRAWH2014729, BRAWH2014876, BRAWH2014954, BRAWH2015247, BRAWH2015349, BRAWH2015375, BRAWH2015385, BRAWH2015595, BRAWH2015728, BRAWH2015853, BRAWH2015866, BRAWH2016028, BRAWH2016106, BRAWH2016160, BRAWH2016166, BRAWH2016209, BRAWH2016221, BRAWH2016223, BRAWH2016269, BRAWH2016305, BRAWH2016439, BRAWH2016446, BRAWH2016514, BRAWH2016562, BRAWH2016655, BRAWH2016679, BRAWH2016702, BRAWH2016724, BRAWH2016785, BRAWH2016792, BRAWH2016800, BRAWH2017002, BRAWH2017103, BRAWH2017250, BRAWH2017294, BRAWH2017304, BRAWH2017305, BRAWH2017379, BRAWH2017407, BRAWH2017433, BRAWH2017523, BRAWH2017534, BRAWH2017542, BRAWH2017635, BRAWH2017913, BRAWH2018206, BRAWH2018267, BRAWH2018282, BRAWH2018317, BRAWH2018506, BRAWH2018514, BRAWH2018527, BRAWH2018601, BRAWH2018729, BRAWH2018745, BRAWH2018875, BRAWH2019053, BRAWH2019055, BRAWH2019198, BRAWH3000078, BRAWH3000088, BRAWH3000100, BRAWH3000166, BRAWH3000314, BRAWH3000329, BRAWH3000410, BRAWH3000446, BRAWH3000491, BRAWH3000604, BRAWH3000884, BRAWH3001053, BRAWH3001319, BRAWH3001326, BRAWH3001475, BRAWH3001636, BRAWH3001638, BRAWH3001712, BRAWH3001760, BRAWH3001783, BRAWH3001833, BRAWH3001879, BRAWH3001891, BRAWH3001918, BRAWH3002433, BRAWH3002467, BRAWH3002513, BRAWH3002600, BRAWH3002819, BRAWH3003019, BRAWH3003136, BRAWH3003244, BRAWH3003343, BRAWH3003411, BRAWH3003522, BRAWH3003573, BRAWH3003598, BRAWH3003727, BRAWH3003801, BRAWH3003975, BRAWH3004222, BRAWH3004335, BRAWH3004350, BRAWH3004453, BRAWH3004530, BRAWH3004666, BRAWH3005037, BRAWH3005047, BRAWH3005132, BRAWH3005292, BRAWH3005300, BRAWH3005422, BRAWH3005534, BRAWH3005886, BRAWH3005892, BRAWH3005896, BRAWH3005912, BRAWH3005981, BRAWH3006547, BRAWH3006548, BRAWH3006761, BRAWH3006792, BRAWH3007129, BRAWH3007221, BRAWH3007441, BRAWH3007455, BRAWH3007506, BRAWH3007726, BRAWH3007783, BRAWH3008167, BRAWH3008341, BRAWH3008559, BRAWH3008697, BRAWH3008867, BRAWH3008931, BRAWH3009017, BRAWH3009285, BRAWH3009297, BRAWH3009546, BRAWH3009961, BRAWH3010461, BRAWH3010560, BRAWH3010602, BRAWH3010657, BRAWH3010726, BRAWH3010833, BRAWH3011101, BRAWH3011331, BRAWH3011402, BRAWH3011577, BRAWH3011623, BRAWH3011637, BRAWH3011685, BRAWH3011907, BRAWH3011929, BRAWH3012005, BRAWH3012662, BRAWH3012779, BRAWH3013009, BRAWH3013049, BRAWH3013197, BRAWH3013264, BRAWH3013508, BRAWH3014609, BRAWH3014639, BRAWH3015017, BRAWH3015175, BRAWH3015260, BRAWH3015610, BRAWH3015825, BRAWH3016123, BRAWH3016715, BRAWH3017259, BRAWH3017260, BRAWH3017477, BRAWH3017537, BRAWH3017980, BRAWH3018063, BRAWH3018369, BRAWH3018548, BRAWH3018969, BRAWH3019026, BRAWH3019529, BRAWH3019594, BRAWH3019629, BRAWH3019820, BRAWH3020200, BRAWH3020318, BRAWH3020486, BRAWH3020884, BRAWH3020928, BRAWH3021012, BRAWH3021545, BRAWH3021580, BRAWH3021641, BRAWH3021643, BRAWH3021724, BRAWH3022347, BRAWH3022431, BRAWH3022459, BRAWH3022542, BRAWH3022719, BRAWH3022866, BRAWH3022900, BRAWH3023156, BRAWH3023168, BRAWH3023274, BRAWH3023421, BRAWH3024231, BRAWH3024242, BRAWH3024469, BRAWH3024506, BRAWH3024613, BRAWH3024989, BRAWH3026349, BRAWH3026394, BRAWH3026529, BRAWH3027420, BRAWH3027440, BRAWH3027533, BRAWH3027574, BRAWH3027607, BRAWH3027616, BRAWH3027675, BRAWH3027806, BRAWH3027880, BRAWH3027927, BRAWH3028202, BRAWH3028223, BRAWH3028306, BRAWH3028461, BRAWH3028645, BRAWH3028754, BRAWH3028796, BRAWH3029254, BRAWH3029313, BRAWH3029538, BRAWH3029556, BRAWH3029806, BRAWH3030613, BRAWH3030772, BRAWH3030810, BRAWH3030892, BRAWH3030910, BRAWH3030950, BRAWH3031054, BRAWH3031710, BRAWH3031902, BRAWH3032298, BRAWH3032340, BRAWH3032571, BRAWH3032620, BRAWH3032930, BRAWH3033117, BRAWH3033293, BRAWH3033448, BRAWH3033513, BRAWH3034097, BRAWH3034114, BRAWH3034134, BRAWH3034668, BRAWH3034743, BRAWH3034775, BRAWH3034890, BRAWH3035154, BRAWH3035403, BRAWH3035904, BRAWH3035914, BRAWH3035936, BRAWH3036077, BRAWH3036247, BRAWH3036270, BRAWH3036561, BRAWH3036738, BRAWH3036951, BRAWH3037265, BRAWH3037394, BRAWH3037533, BRAWH3037979, BRAWH3038055, BRAWH3038230, BRAWH3038252, BRAWH3038324, BRCAN1000065, BRCAN1000076, BRCAN1000105, BRCAN1000149, BRCAN2000148, BRCAN2000149, BRCAN2000209, BRCAN2000239, BRCAN2000346, BRCAN2000364, BRCAN2000383, BRCAN2000418, BRCAN2000523, BRCAN2000541, BRCAN2000563, BRCAN2000577, BRCAN2000620, BRCAN2000639, BRCAN2000763, BRCAN2000832, BRCAN2000923, BRCAN2001223, BRCAN2001866, BRCAN2002173, BRCAN2002416, BRCAN2002473, BRCAN2002562, BRCAN2002662, BRCAN2002826, BRCAN2002854, BRCAN2002856, BRCAN2002892, BRCAN2002944, BRCAN2002948, BRCAN2003070, BRCAN2003269, BRCAN2003389, BRCAN2003628, BRCAN2003703, BRCAN2003746, BRCAN2003814, BRCAN2003987, BRCAN2004173, BRCAN2004355, BRCAN2004371, BRCAN2004653, BRCAN2004699, BRCAN2005436, BRCAN2005449, BRCAN2006019, BRCAN2006051, BRCAN2006063, BRCAN2006117, BRCAN2006174, BRCAN2006290, BRCAN2006297, BRCAN2006323, BRCAN2006401, BRCAN2006411, BRCAN2006450, BRCAN2006955, BRCAN2007119, BRCAN2007144, BRCAN2007409, BRCAN2007426, BRCAN2007525, BRCAN2007700, BRCAN2008494, BRCAN2008528, BRCAN2008701, BRCAN2008894, BRCAN2009156, BRCAN2009168, BRCAN2009203, BRCAN2009432, BRCAN2010374, BRCAN2010376, BRCAN2010547, BRCAN2010581, BRCAN2010665, BRCAN2011254, BRCAN2011316, BRCAN2011602, BRCAN2011946, BRCAN2012110, BRCAN2012355, BRCAN2012402, BRCAN2012408, BRCAN2012481, BRCAN2012613, BRCAN2012713, BRCAN2012929, BRCAN2013655, BRCAN2013660, BRCAN2014143, BRCAN2014229, BRCAN2014370, BRCAN2014602, BRCAN2014652, BRCAN2014788, BRCAN2014881, BRCAN2014952, BRCAN2015402, BRCAN2015464, BRCAN2015719, BRCAN2015757, BRCAN2015886, BRCAN2016025, BRCAN2016046, BRCAN2016174, BRCAN2016433, BRCAN2016619, BRCAN2016762, BRCAN2016814, BRCAN2017442, BRCAN2017905, BRCAN2018240, BRCAN2018269, BRCAN2018490, BRCAN2018566, BRCAN2018667, BRCAN2018748, BRCAN2018935, BRCAN2019002, BRCAN2019387, BRCAN2019653, BRCAN2019773, BRCAN2019907, BRCAN2020234, BRCAN2020331, BRCAN2020412, BRCAN2020467, BRCAN2020710, BRCAN2020880, BRCAN2021024, BRCAN2021028, BRCAN2021325, BRCAN2021452, BRCAN2021669, BRCAN2021718, BRCAN2022126, BRCAN2022191, BRCAN2022472, BRCAN2022474, BRCAN2023347, BRCAN2023724, BRCAN2024451, BRCAN2024563, BRCAN2025009, BRCAN2025093, BRCAN2025349, BRCAN2025368, BRCAN2025712, BRCAN2025982, BRCAN2026117, BRCAN2026340, BRCAN2026711, BRCAN2027310, BRCAN2027334, BRCAN2027355, BRCAN2027513, BRCAN2027593, BRCAN2027970, BRCAN2028021, BRCAN2028040, BRCAN2028319, BRCAN2028338, BRCAN2028378, BRCAN2028460, BRCAN2028545, BRCAN2028634, BRCAN2028702, BRCOC1000087, BRCOC1000094, BRCOC2000004, BRCOC2000047, BRCOC2000152, BRCOC2000184, BRCOC2000186, BRCOC2000333, BRCOC2000360, BRCOC2000404, BRCOC2000487, BRCOC2000637, BRCOC2000670, BRCOC2000816, BRCOC2000850, BRCOC2001355, BRCOC2002085, BRCOC2002155, BRCOC2002323, BRCOC2002659, BRCOC2002664, BRCOC2002686, BRCOC2002751, BRCOC2002756, BRCOC2002777, BRCOC2002835, BRCOC2003100, BRCOC2003125, BRCOC2003513, BRCOC2003732, BRCOC2003740, BRCOC2004036, BRCOC2004354, BRCOC2004455, BRCOC2004950, BRCOC2005542, BRCOC2005903, BRCOC2005951, BRCOC2006164, BRCOC2006189, BRCOC2006243, BRCOC2006270, BRCOC2006639, BRCOC2006942, BRCOC2007034, BRCOC2007593, BRCOC2007733, BRCOC2007769, BRCOC2008064, BRCOC2008225, BRCOC2008642, BRCOC2008993, BRCOC2009052, BRCOC2009196, BRCOC2009380, BRCOC2009638, BRCOC2009937, BRCOC2010115, BRCOC2010510, BRCOC2010730, BRCOC2010980, BRCOC2010994, BRCOC2011010, BRCOC2011398, BRCOC2011418, BRCOC2011506, BRCOC2011769, BRCOC2011996, BRCOC2012172, BRCOC2012229, BRCOC2012386, BRCOC2012551, BRCOC2012813, BRCOC2013448, BRCOC2013573, BRCOC2013675, BRCOC2013780, BRCOC2014013, BRCOC2014033, BRCOC2014400, BRCOC2014748, BRCOC2014833, BRCOC2015597, BRCOC2015824, BRCOC2015908, BRCOC2015944, BRCOC2016525, BRCOC2016661, BRCOC2017061, BRCOC2017652, BRCOC2017856, BRCOC2018775, BRCOC2018877, BRCOC2019549, BRCOC2019841, BRCOC2019896, BRCOC2019903, BRCOC2019910, BRCOC2019934, BRCOC2020122, BRCOC2020142, BRHIP1000058, BRHIP1000072, BRHIP1000104, BRHIP1000108, BRHIP1000129, BRHIP1000174, BRHIP1000258, BRHIP2000021, BRHIP2000079, BRHIP2000087, BRHIP2000163, BRHIP2000210, BRHIP2000239, BRHIP2000245, BRHIP2000312, BRHIP2000359, BRHIP2000445, BRHIP2000506, BRHIP2000532, BRHIP2000621, BRHIP2000691, BRHIP2000819, BRHIP2000826, BRHIP2000920, BRHIP2001074, BRHIP2001099, BRHIP2001686, BRHIP2001782, BRHIP2001802, BRHIP2001805, BRHIP2001886, BRHIP2001927, BRHIP2002122, BRHIP2002143, BRHIP2002172, BRHIP2002339, BRHIP2002346, BRHIP2002510, BRHIP2002664, BRHIP2002722, BRHIP2002929, BRHIP2003048, BRHIP2003062, BRHIP2003242, BRHIP2003272, BRHIP2003748, BRHIP2003786, BRHIP2003828, BRHIP2003917, BRHIP2004312, BRHIP2004355, BRHIP2004359, BRHIP2004814, BRHIP2004883, BRHIP2004902, BRHIP2005010, BRHIP2005236, BRHIP2005271, BRHIP2005354, BRHIP2005600, BRHIP2005719, BRHIP2005724, BRHIP2005752, BRHIP2005932, BRHIP2006617, BRHIP2006782, BRHIP2006800, BRHIP2006819, BRHIP2006921, BRHIP2007307, BRHIP2007616, BRHIP2007690, BRHIP2007741, BRHIP2007928, BRHIP2007969, BRHIP2008269, BRHIP2008389, BRHIP2008607, BRHIP2008756, BRHIP2008909, BRHIP2009019, BRHIP2009177, BRHIP2009340, BRHIP2009351, BRHIP2009414, BRHIP2009474, BRHIP2009617, BRHIP2009685, BRHIP2010217, BRHIP2010309, BRHIP2010444, BRHIP2010487, BRHIP2010571, BRHIP2010593, BRHIP2010610, BRHIP2010723, BRHIP2010744, BRHIP2011080, BRHIP2011120, BRHIP2011199, BRHIP2011491, BRHIP2011508, BRHIP2011576, BRHIP2011616, BRHIP2011783, BRHIP2011838, BRHIP2011891, BRHIP2011933, BRHIP2012054, BRHIP2012059, BRHIP2012141, BRHIP2012314, BRHIP2012360, BRHIP2012545, BRHIP2012580, BRHIP2012627, BRHIP2012642, BRHIP2012750, BRHIP2012922, BRHIP2012923, BRHIP2012972, BRHIP2013286, BRHIP2013447, BRHIP2013510, BRHIP2013699, BRHIP2013723, BRHIP2013958, BRHIP2013972, BRHIP2014063, BRHIP2014228, BRHIP2014285, BRHIP2014291, BRHIP2014373, BRHIP2014386, BRHIP2014387, BRHIP2014954, BRHIP2015153, BRHIP2015224, BRHIP2015356, BRHIP2015360, BRHIP2016005, BRHIP2016125, BRHIP2016788, BRHIP2016968, BRHIP2016990, BRHIP2017010, BRHIP2017315, BRHIP2017385, BRHIP2017404, BRHIP2017542, BRHIP2017553, BRHIP2017642, BRHIP2017714, BRHIP2017780, BRHIP2017945, BRHIP2018014, BRHIP2018369, BRHIP2018612, BRHIP2018635, BRHIP2018650, BRHIP2018712, BRHIP2018719, BRHIP2018805, BRHIP2018998, BRHIP2019007, BRHIP2019047, BRHIP2019149, BRHIP2019177, BRHIP2019186, BRHIP2019291, BRHIP2019494, BRHIP2019589, BRHIP2019641, BRHIP2019819, BRHIP2019884, BRHIP2019972, BRHIP2020182, BRHIP2020509, BRHIP2020573, BRHIP2020622, BRHIP2020695, BRHIP2020743, BRHIP2020799, BRHIP2020842, BRHIP2020859, BRHIP2020930, BRHIP2021102, BRHIP2021289, BRHIP2021495, BRHIP2021615, BRHIP2021744, BRHIP2021858, BRHIP2021929, BRHIP2022006, BRHIP2022054, BRHIP2022221, BRHIP2022228, BRHIP2022298, BRHIP2022467, BRHIP2022708, BRHIP2023071, BRHIP2023272, BRHIP2023292, BRHIP2023309, BRHIP2023369, BRHIP2023735, BRHIP2023773, BRHIP2023860, BRHIP2023869, BRHIP2024046, BRHIP2024165, BRHIP2024201, BRHIP2024347, BRHIP2024398, BRHIP2024549, BRHIP2024742, BRHIP2024789, BRHIP2024911, BRHIP2024941, BRHIP2025245, BRHIP2025366, BRHIP2025448, BRHIP2025679, BRHIP2025739, BRHIP2025797, BRHIP2026021, BRHIP2026061, BRHIP2026155, BRHIP2026214, BRHIP2026288, BRHIP2026346, BRHIP2026557, BRHIP2026723, BRHIP2026877, BRHIP2027017, BRHIP2027054, BRHIP2027563, BRHIP2027685, BRHIP2027762, BRHIP2028187, BRHIP2028303, BRHIP2028330, BRHIP2028480, BRHIP2028583, BRHIP2028593, BRHIP2029176, BRHIP2029283, BRHIP2029393, BRHIP2029529, BRHIP2029643, BRHIP2029663, BRHIP3000017, BRHIP3000060, BRHIP3000070, BRHIP3000081, BRHIP3000240, BRHIP3000377, BRHIP3000457, BRHIP3000475, BRHIP3000488, BRHIP3000526, BRHIP3000626, BRHIP3000859, BRHIP3000907, BRHIP3001076, BRHIP3001079, BRHIP3001141, BRHIP3001283, BRHIP3001338, BRHIP3001360, BRHIP3001481, BRHIP3001878, BRHIP3001964, BRHIP3002114, BRHIP3002124, BRHIP3002141, BRHIP3002363, BRHIP3002691, BRHIP3002920, BRHIP3002931, BRHIP3003063, BRHIP3003126, BRHIP3003306, BRHIP3003340, BRHIP3003395, BRHIP3003484, BRHIP3003644, BRHIP3003688, BRHIP3003795, BRHIP3003984, BRHIP3004193, BRHIP3004416, BRHIP3004710, BRHIP3004725, BRHIP3004774, BRHIP3004786, BRHIP3004863, BRHIP3004968, BRHIP3005037, BRHIP3005137, BRHIP3005142, BRHIP3005231, BRHIP3005307, BRHIP3005574, BRHIP3005673, BRHIP3005768, BRHIP3005801, BRHIP3005944, BRHIP3006279, BRHIP3006294, BRHIP3006390, BRHIP3006449, BRHIP3006683, BRHIP3006717, BRHIP3006786, BRHIP3006950, BRHIP3007172, BRHIP3007183, BRHIP3007195, BRHIP3007223, BRHIP3007239, BRHIP3007291, BRHIP3007409, BRHIP3007424, BRHIP3007483, BRHIP3007586, BRHIP3007609, BRHIP3007640, BRHIP3007960, BRHIP3008082, BRHIP3008183, BRHIP3008314, BRHIP3008320, BRHIP3008344, BRHIP3008405, BRHIP3008565, BRHIP3008598, BRHIP3008606, BRHIP3008691, BRHIP3008714, BRHIP3008997, BRHIP3009099, BRHIP3009140, BRHIP3009181, BRHIP3009318, BRHIP3009427, BRHIP3009448, BRHIP3009672, BRHIP3009753, BRHIP3010135, BRHIP3010289, BRHIP3010529, BRHIP3011082, BRHIP3011241, BRHIP3011269, BRHIP3011460, BRHIP3011567, BRHIP3011831, BRHIP3012185, BRHIP3012289, BRHIP3012357, BRHIP3012736, BRHIP3012745, BRHIP3012868, BRHIP3012997, BRHIP3013078, BRHIP3013271, BRHIP3013588, BRHIP3013698, BRHIP3013765, BRHIP3013897, BRHIP3014237, BRHIP3014675, BRHIP3015620, BRHIP3015751, BRHIP3015854, BRHIP3016032, BRHIP3016213, BRHIP3016302, BRHIP3016421, BRHIP3017109, BRHIP3017146, BRHIP3017256, BRHIP3017325, BRHIP3017558, BRHIP3017637, BRHIP3017855, BRHIP3018278, BRHIP3018784, BRHIP3019643, BRHIP3019824, BRHIP3019880, BRHIP3019956, BRHIP3020155, BRHIP3020182, BRHIP3020733, BRHIP3021019, BRHIP3021499, BRHIP3021534, BRHIP3021778, BRHIP3022656, BRHIP3023922, BRHIP3024118, BRHIP3024533, BRHIP3024703, BRHIP3024725, BRHIP3024820, BRHIP3025161, BRHIP3025702, BRHIP3025795, BRHIP3025844, BRHIP3026052, BRHIP3026097, BRHIP3026231, BRHIP3026335, BRHIP3026651, BRHIP3027105, BRHIP3027137, BRHIP3027160, BRHIP3027191, BRHIP3027501, BRHIP3027594, BRHIP3027651, BRHIP3027854, BRHIP3027947, BRHIP3028570, BRHIP3028742, BRSSN1000056, BRSSN1000059, BRSSN1000092, BRSSN1000153, BRSSN2000097, BRSSN2000175, BRSSN2000197, BRSSN2000244, BRSSN2000293, BRSSN2000295, BRSSN2000312, BRSSN2000518, BRSSN2000561, BRSSN2000566, BRSSN2000684, BRSSN2000715, BRSSN2000832, BRSSN2001213, BRSSN2001275, BRSSN2001342, BRSSN2001426, BRSSN2001503, BRSSN2001579, BRSSN2001758, BRSSN2001810, BRSSN2002857, BRSSN2002859, BRSSN2003086, BRSSN2003093, BRSSN2003820, BRSSN2003841, BRSSN2003937, BRSSN2004142, BRSSN2004303, BRSSN2004304, BRSSN2004496, BRSSN2004657, BRSSN2004679, BRSSN2004686, BRSSN2004710, BRSSN2004719, BRSSN2005847, BRSSN2006133, BRSSN2006390, BRSSN2006575, BRSSN2006611, BRSSN2006644, BRSSN2006892, BRSSN2007076, BRSSN2007168, BRSSN2007202, BRSSN2007338, BRSSN2007464, BRSSN2007504, BRSSN2007819, BRSSN2008125, BRSSN2008419, BRSSN2008464, BRSSN2008549, BRSSN2008797, BRSSN2009119, BRSSN2009378, BRSSN2009389, BRSSN2009395, BRSSN2009518, BRSSN2009627, BRSSN2009630, BRSSN2009702, BRSSN2010019, BRSSN2010110, BRSSN2010587, BRSSN2010596, BRSSN2010830, BRSSN2011653, BRSSN2011738, BRSSN2011843, BRSSN2012081, BRSSN2012103, BRSSN2012157, BRSSN2012198, BRSSN2012254, BRSSN2012439, BRSSN2012622, BRSSN2012691, BRSSN2012838, BRSSN2013095, BRSSN2013544, BRSSN2013696, BRSSN2013702, BRSSN2013733, BRSSN2013753, BRSSN2013874, BRSSN2014112, BRSSN2014294, BRSSN2014299, BRSSN2014424, BRSSN2014513, BRSSN2014556, BRSSN2014573, BRSSN2014636, BRSSN2014685, BRSSN2015199, BRSSN2015238, BRSSN2015369, BRSSN2015493, BRSSN2015497, BRSSN2015554, BRSSN2015707, BRSSN2015773, BRSSN2015907, BRSSN2016589, BRSSN2016768, BRSSN2016905, BRSSN2017297, BRSSN2017422, BRSSN2017530, BRSSN2017682, BRSSN2017757, BRSSN2018218, BRSSN2018440, BRSSN2018447, BRSSN2018581, BRSSN2018731, BRSSN2018771, BRSSN2018925, BRSTN1000097, BRSTN2000058, BRSTN2000070, BRSTN2000220, BRSTN2000312, BRSTN2000367, BRSTN2000536, BRSTN2000872, BRSTN2001067, BRSTN2001613, BRSTN2001801, BRSTN2002105, BRSTN2002400, BRSTN2002532, BRSTN2002691, BRSTN2003590, BRSTN2003835, BRSTN2004869, BRSTN2004987, BRSTN2005721, BRSTN2006306, BRSTN2006466, BRSTN2006580, BRSTN2006583, BRSTN2006638, BRSTN2006865, BRSTN2007000, BRSTN2007118, BRSTN2007284, BRSTN2007765, BRSTN2008052, BRSTN2008283, BRSTN2008367, BRSTN2008418, BRSTN2008457, BRSTN2008475, BRSTN2008930, BRSTN2009247, BRSTN2010107, BRSTN2010363, BRSTN2010416, BRSTN2010500, BRSTN2010569, BRSTN2010750, BRSTN2010923, BRSTN2011211, BRSTN2011597, BRSTN2011688, BRSTN2011799, BRSTN2012089, BRSTN2012284, BRSTN2012320, BRSTN2012380, BRSTN2012451, BRSTN2013171, BRSTN2013354, BRSTN2013931, BRSTN2014633, BRSTN2014751, BRSTN2014770, BRSTN2015015, BRSTN2015978, BRSTN2016066, BRSTN2016335, BRSTN2016678, BRSTN2016892, BRSTN2016918, BRSTN2016992, BRSTN2017151, BRSTN2017237, BRSTN2017379, BRSTN2017761, BRSTN2017771, BRSTN2017995, BRSTN2018077, BRSTN2018083, BRSTN2018596, BRSTN2018692, BRSTN2018712, BRSTN2019079, BRSTN2019129, BRTHA1000021, BRTHA1000063, BRTHA2000057, BRTHA2000474, BRTHA2000514, BRTHA2000574, BRTHA2000855, BRTHA2000969, BRTHA2000972, BRTHA2001304, BRTHA2001370, BRTHA2001462, BRTHA2001717, BRTHA2001812, BRTHA2002091, BRTHA2002115, BRTHA2002133, BRTHA2002281, BRTHA2002376, BRTHA2002442, BRTHA2002493, BRTHA2002565, BRTHA2002608, BRTHA2002702, BRTHA2002721, BRTHA2002741, BRTHA2002896, BRTHA2002903, BRTHA2003030, BRTHA2003110, BRTHA2003116, BRTHA2003436, BRTHA2003759, BRTHA2003794, BRTHA2004361, BRTHA2004371, BRTHA2004582, BRTHA2004629, BRTHA2004639, BRTHA2004642, BRTHA2004812, BRTHA2004821, BRTHA2004978, BRTHA2004992, BRTHA2005005, BRTHA2005013, BRTHA2005448, BRTHA2005579, BRTHA2005831, BRTHA2005942, BRTHA2005956, BRTHA2006075, BRTHA2006146, BRTHA2006194, BRTHA2006232, BRTHA2006720, BRTHA2006735, BRTHA2006974, BRTHA2006975, BRTHA2007060, BRTHA2007122, BRTHA2007422, BRTHA2007603, BRTHA2007665, BRTHA2008316, BRTHA2008335, BRTHA2008502, BRTHA2008513, BRTHA2008527, BRTHA2008535, BRTHA2008598, BRTHA2008669, BRTHA2008955, BRTHA2009311, BRTHA2009349, BRTHA2009486, BRTHA2009803, BRTHA2009846, BRTHA2009886, BRTHA2009972, BRTHA2010008, BRTHA2010033, BRTHA2010073, BRTHA2010097, BRTHA2010191, BRTHA2010397, BRTHA2010608, BRTHA2010672, BRTHA2010884, BRTHA2010907, BRTHA2011062, BRTHA2011194, BRTHA2011321, BRTHA2011351, BRTHA2011500, BRTHA2011641, BRTHA2011691, BRTHA2012129, BRTHA2012183, BRTHA2012189, BRTHA2012351, BRTHA2012466, BRTHA2012555, BRTHA2012562, BRTHA2012714, BRTHA2012980, BRTHA2013054, BRTHA2013262, BRTHA2013275, BRTHA2013426, BRTHA2013460, BRTHA2013515, BRTHA2013540, BRTHA2013595, BRTHA2013610, BRTHA2013707, BRTHA2013942, BRTHA2014287, BRTHA2014334, BRTHA2014381, BRTHA2014578, BRTHA2014647, BRTHA2014663, BRTHA2014792, BRTHA2014828, BRTHA2014909, BRTHA2014975, BRTHA2014997, BRTHA2015406, BRTHA2015478, BRTHA2015696, BRTHA2015700, BRTHA2015853, BRTHA2015878, BRTHA2016179, BRTHA2016215, BRTHA2016267, BRTHA2016318, BRTHA2016496, BRTHA2016543, BRTHA2016552, BRTHA2016577, BRTHA2016918, BRTHA2017178, BRTHA2017353, BRTHA2017364, BRTHA2017972, BRTHA2017985, BRTHA2018011, BRTHA2018129, BRTHA2018165, BRTHA2018304, BRTHA2018344, BRTHA2018420, BRTHA2018443, BRTHA2018504, BRTHA2018558, BRTHA2018591, BRTHA2018624, BRTHA2018706, BRTHA2018707, BRTHA2019014, BRTHA2019022, BRTHA2019048, BRTHA2019073, BRTHA2019726, BRTHA2019743, BRTHA2020400, BRTHA2020566, BRTHA2020642, BRTHA2020695, BRTHA2020721, BRTHA2020781, BRTHA2020811, BRTHA2020910, BRTHA2021212, BRTHA2021440, BRTHA2021450, BRTHA2022074, BRTHA2022914, BRTHA2022968, BRTHA2023402, BRTHA2023437, BRTHA2024177, BRTHA2024354, BRTHA2024712, BRTHA2025869, BRTHA2026071, BRTHA2026290, BRTHA2026311, BRTHA2027227, BRTHA2027250, BRTHA2027546, BRTHA2028297, BRTHA2029969, BRTHA2030036, BRTHA2030213, BRTHA2031517, BRTHA2031800, BRTHA2031917, BRTHA2032763, BRTHA2032845, BRTHA2033122, BRTHA2033155, BRTHA2033264, BRTHA2033320, BRTHA2033469, BRTHA2033683, BRTHA2034281, BRTHA2034576, BRTHA2034874, BRTHA2035448, BRTHA2035743, BRTHA2036055, BRTHA2036295, BRTHA2036660, BRTHA2037247, BRTHA2038279, BRTHA2038345, BRTHA2038353, BRTHA2038396, BRTHA3000252, BRTHA3000273, BRTHA3000296, BRTHA3000297, BRTHA3000325, BRTHA3000456, BRTHA3000633, BRTHA3000789, BRTHA3001221, BRTHA3001623, BRTHA3002265, BRTHA3002401, BRTHA3002411, BRTHA3002427, BRTHA3002864, BRTHA3002933, BRTHA3002955, BRTHA3003000, BRTHA3003023, BRTHA3003074, BRTHA3003225, BRTHA3003339, BRTHA3003343, BRTHA3003417, BRTHA3003449, BRTHA3003474, BRTHA3003704, BRTHA3004307, BRTHA3004432, BRTHA3004475, BRTHA3004502, BRTHA3004610, BRTHA3005046, BRTHA3005735, BRTHA3005988, BRTHA3006318, BRTHA3006593, BRTHA3006856, BRTHA3007113, BRTHA3007130, BRTHA3007148, BRTHA3007319, BRTHA3007469, BRTHA3007532, BRTHA3007662, BRTHA3007685, BRTHA3007769, BRTHA3008143, BRTHA3008293, BRTHA3008310, BRTHA3008386, BRTHA3008520, BRTHA3008608, BRTHA3008694, BRTHA3008778, BRTHA3008826, BRTHA3009037, BRTHA3009090, BRTHA3009291, BRTHA3009858, BRTHA3010366, BRTHA3010469, BRTHA3010530, BRTHA3010540, BRTHA3010717, BRTHA3011149, BRTHA3011187, BRTHA3011194, BRTHA3011229, BRTHA3011361, BRTHA3011510, BRTHA3011892, BRTHA3012265, BRTHA3013860, BRTHA3013882, BRTHA3013884, BRTHA3013981, BRTHA3014000, BRTHA3014105, BRTHA3014507, BRTHA3014547, BRTHA3014691, BRTHA3014835, BRTHA3014854, BRTHA3014908, BRTHA3014920, BRTHA3015815, BRTHA3016616, BRTHA3016835, BRTHA3016845, BRTHA3016917, BRTHA3017047, BRTHA3017589, BRTHA3017848, BRTHA3018409, BRTHA3018514, BRTHA3018617, BRTHA3018623, BRTHA3018656, BRTHA3019048, BRTHA3019105, BRTHA3019183, BRTHA3020000, BRTHA3020314, BRTHA3020369, BRTHA3021569, BRTHA3021708, BRTHA3021786, BRTHA3022641, BRTHA3023403, BRTHA3023523, BRTHA3023590, BRTHA3023929, BRTHA3024233, BRTHA3024600, BRTHA3025073, BRTHA3025789, BRTHA3025826, BRTHA3026161, BRTHA3026180, BRTHA3026507, BRTHA3026556, BRTHA3026916, BRTHA3027171, BRTHA3027318, BRTHA3027638, BRTHA3027820, BRTHA3027879, BRTHA3027957, BRTHA3028339, BRTHA3028505, BRTHA3028782, CD34C2000051, CD34C2000152, CD34C2000175, CD34C2000443, CD34C3000125, CD34C3000252, CD34C3000314, CD34C3000424, CD34C3000494, CERVX1000042, CERVX2000812, CERVX2000968, CERVX2002006, CERVX2002013, CERVX2002430, CHONS1000058, CHONS2000172, CHONS2000797, CHONS2001287, CHONS2001382, CHONS2001797, CHONS2001834, CHONS2002419, COLON1000030, COLON1000084, COLON1000135, COLON2000470, COLON2000557, COLON2000568, COLON2001721, COLON2001829, COLON2001866, COLON2002520, COLON2003043, COLON2003529, COLON2004318, COLON2004351, COLON2004478, COLON2004911, COLON2005126, COLON2005623, COLON2005735, COLON2005772, COLON2006263, COLON2006282, COLON2006417, COLON2007274, COLON2007733, COLON2008105, COLON2009337, COLON2009499, CORDB1000140, CORDB2000061, CORDB2000127, CORDB2000541, CTONG1000010, CTONG1000020, CTONG1000022, CTONG1000040, CTONG1000056, CTONG1000062, CTONG1000086, CTONG1000087, CTONG1000088, CTONG1000093, CTONG1000097, CTONG1000113, CTONG1000137, CTONG1000165, CTONG1000180, CTONG1000181, CTONG1000241, CTONG1000283, CTONG1000288, CTONG1000302, CTONG1000341, CTONG1000476, CTONG1000488, CTONG1000508, CTONG1000540, CTONG2000031, CTONG2000034, CTONG2000201, CTONG2000218, CTONG2000279, CTONG2000303, CTONG2000330, CTONG2000395, CTONG2000465, CTONG2000480, CTONG2000508, CTONG2000766, CTONG2000771, CTONG2000819, CTONG2000827, CTONG2000846, CTONG2000855, CTONG2000977, CTONG2001139, CTONG2001226, CTONG2001366, CTONG2001413, CTONG2001428, CTONG2001524, CTONG2001533, CTONG2001598, CTONG2001681, CTONG2001724, CTONG2001749, CTONG2001800, CTONG2001820, CTONG2001858, CTONG2001877, CTONG2001911, CTONG2001955, CTONG2002066, CTONG2002095, CTONG2002143, CTONG2002395, CTONG2002417, CTONG2002418, CTONG2002558, CTONG2002590, CTONG2002721, CTONG2002766, CTONG2002803, CTONG2002816, CTONG2002820, CTONG2002832, CTONG2002841, CTONG2002965, CTONG2002999, CTONG2003028, CTONG2003100, CTONG2003115, CTONG2003189, CTONG2003245, CTONG2003293, CTONG2003298, CTONG2003348, CTONG2003350, CTONG2003361, CTONG2003372, CTONG2003375, CTONG2003427, CTONG2003517, CTONG2003524, CTONG2003599, CTONG2003680, CTONG2003699, CTONG2003764, CTONG2003782, CTONG2003889, CTONG2003937, CTONG2003945, CTONG2004000, CTONG2004062, CTONG2004115, CTONG2004126, CTONG2004264, CTONG2004305, CTONG2004397, CTONG2004423, CTONG2004454, CTONG2004487, CTONG2004550, CTONG2004669, CTONG2004716, CTONG2004912, CTONG2004941, CTONG2004948, CTONG2005028, CTONG2005049, CTONG2005110, CTONG2005145, CTONG2005265, CTONG2005278, CTONG2005290, CTONG2005374, CTONG2005399, CTONG2005468, CTONG2005567, CTONG2005585, CTONG2005615, CTONG2005635, CTONG2005775, CTONG2005795, CTONG2005890, CTONG2005904, CTONG2006004, CTONG2006129, CTONG2006223, CTONG2006235, CTONG2006273, CTONG2006310, CTONG2006377, CTONG2006393, CTONG2006412, CTONG2006449, CTONG2006515, CTONG2006524, CTONG2006568, CTONG2006611, CTONG2006620, CTONG2006666, CTONG2006691, CTONG2006798, CTONG2006836, CTONG2006942, CTONG2006964, CTONG2007007, CTONG2007009, CTONG2007091, CTONG2007104, CTONG2007168, CTONG2007175, CTONG2007259, CTONG2007272, CTONG2007293, CTONG2007297, CTONG2007399, CTONG2007400, CTONG2007417, CTONG2007441, CTONG2007474, CTONG2007586, CTONG2007623, CTONG2007681, CTONG2007779, CTONG2007898, CTONG2007959, CTONG2007970, CTONG2008014, CTONG2008184, CTONG2008262, CTONG2008269, CTONG2008321, CTONG2008343, CTONG2008402, CTONG2008405, CTONG2008466, CTONG2008521, CTONG2008562, CTONG2008577, CTONG2008595, CTONG2008621, CTONG2008689, CTONG2008720, CTONG2008721, CTONG2008773, CTONG2008792, CTONG2008989, CTONG2009033, CTONG2009108, CTONG2009132, CTONG2009156, CTONG2009181, CTONG2009257, CTONG2009258, CTONG2009268, CTONG2009270, CTONG2009395, CTONG2009423, CTONG2009440, CTONG2009527, CTONG2009529, CTONG2009531, CTONG2009534, CTONG2009570, CTONG2009572, CTONG2009604, CTONG2009643, CTONG2009675, CTONG2009689, CTONG2009725, CTONG2009766, CTONG2009768, CTONG2009844, CTONG2009871, CTONG2009887, CTONG2009891, CTONG2009923, CTONG2009938, CTONG2009955, CTONG2009958, CTONG2009963, CTONG2010018, CTONG2010024, CTONG2010116, CTONG2010133, CTONG2010148, CTONG2010276, CTONG2010330, CTONG2010408, CTONG2010508, CTONG2010566, CTONG2010623, CTONG2010649, CTONG2010652, CTONG2010803, CTONG2011188, CTONG2011429, CTONG2011474, CTONG2011676, CTONG2011716, CTONG2011765, CTONG2011779, CTONG2011801, CTONG2011815, CTONG2011822, CTONG2011920, CTONG2011985, CTONG2012029, CTONG2012050, CTONG2012077, CTONG2012101, CTONG2012123, CTONG2012158, CTONG2012230, CTONG2012422, CTONG2012425, CTONG2012447, CTONG2012453, CTONG2012473, CTONG2012476, CTONG2012533, CTONG2012554, CTONG2012564, CTONG2012661, CTONG2012724, CTONG2012738, CTONG2012745, CTONG2012758, CTONG2012843, CTONG2012901, CTONG2012996, CTONG2013128, CTONG2013178, CTONG2013284, CTONG2013339, CTONG2013348, CTONG2013352, CTONG2013381, CTONG2013393, CTONG2013511, CTONG2013630, CTONG2013803, CTONG2013907, CTONG2013934, CTONG2013985, CTONG2013986, CTONG2014032, CTONG2014058, CTONG2014119, CTONG2014165, CTONG2014191, CTONG2014206, CTONG2014234, CTONG2014264, CTONG2014280, CTONG2014369, CTONG2014389, CTONG2014491, CTONG2014630, CTONG2014635, CTONG2014646, CTONG2014705, CTONG2014898, CTONG2014946, CTONG2014954, CTONG2014959, CTONG2014966, CTONG2014995, CTONG2015204, CTONG2015316, CTONG2015330, CTONG2015345, CTONG2015358, CTONG2015434, CTONG2015518, CTONG2015540, CTONG2015596, CTONG2015633, CTONG2015678, CTONG2015717, CTONG2015804, CTONG2015815, CTONG2015866, CTONG2015914, CTONG2015953, CTONG2016185, CTONG2016217, CTONG2016355, CTONG2016408, CTONG2016499, CTONG2016505, CTONG2016559, CTONG2016658, CTONG2016775, CTONG2016797, CTONG2016824, CTONG2016846, CTONG2016869, CTONG2016904, CTONG2016931, CTONG2016942, CTONG2016953, CTONG2017021, CTONG2017094, CTONG2017292, CTONG2017409, CTONG2017429, CTONG2017444, CTONG2017458, CTONG2017500, CTONG2017604, CTONG2017650, CTONG2017798, CTONG2017804, CTONG2017814, CTONG2017910, CTONG2017939, CTONG2017989, CTONG2017998, CTONG2018062, CTONG2018069, CTONG2018147, CTONG2018211, CTONG2018217, CTONG2018279, CTONG2018334, CTONG2018343, CTONG2018379, CTONG2018413, CTONG2018483, CTONG2018629, CTONG2018637, CTONG2018652, CTONG2018653, CTONG2018655, CTONG2018735, CTONG2018739, CTONG2018808, CTONG2018843, CTONG2018898, CTONG2018900, CTONG2018976, CTONG2019063, CTONG2019144, CTONG2019232, CTONG2019400, CTONG2019652, CTONG2019704, CTONG2019788, CTONG2019822, CTONG2019833, CTONG2020031, CTONG2020108, CTONG2020127, CTONG2020171, CTONG2020374, CTONG2020378, CTONG2020411, CTONG2020522, CTONG2020638, CTONG2020806, CTONG2020831, CTONG2020974, CTONG2021024, CTONG2021132, CTONG2021168, CTONG2021289, CTONG2022153, CTONG2022601, CTONG2022835, CTONG2023021, CTONG2023449, CTONG2023512, CTONG2024206, CTONG2024614, CTONG2024749, CTONG2025496, CTONG2025513, CTONG2025516, CTONG2025610, CTONG2025900, CTONG2026513, CTONG2026770, CTONG2026920, CTONG2026987, CTONG2027150, CTONG2027263, CTONG2027327, CTONG2027361, CTONG2027591, CTONG2027736, CTONG2027783, CTONG2027828, CTONG2027959, CTONG2028097, CTONG2028486, CTONG2028518, CTONG2028687, CTONG2028758, CTONG3000686, CTONG3000707, CTONG3000896, CTONG3001123, CTONG3001501, CTONG3001560, CTONG3001605, CTONG3001746, CTONG3002020, CTONG3002127, CTONG3002370, CTONG3002412, CTONG3002433, CTONG3002518, CTONG3002552, CTONG3002588, CTONG3002728, CTONG3002909, CTONG3002947, CTONG3002983, CTONG3003165, CTONG3003179, CTONG3003483, CTONG3003553, CTONG3003598, CTONG3003652, CTONG3003654, CTONG3003669, CTONG3003737, CTONG3003905, CTONG3003972, CTONG3004072, CTONG3004317, CTONG3004397, CTONG3004550, CTONG3004576, CTONG3004607, CTONG3004712, CTONG3005325, CTONG3005648, CTONG3005713, CTONG3005803, CTONG3005813, CTONG3006067, CTONG3006073, CTONG3006186, CTONG3006629, CTONG3006650, CTONG3006659, CTONG3007244, CTONG3007444, CTONG3007528, CTONG3007586, CTONG3007870, CTONG3008223, CTONG3008252, CTONG3008258, CTONG3008457, CTONG3008496, CTONG3008566, CTONG3008639, CTONG3008831, CTONG3008951, CTONG3008959, CTONG3009028, CTONG3009227, CTONG3009287, CTONG3009328, CTONG3009385, D30ST1000066, D30ST1000238, D30ST1000267, D30ST2000184, D30ST2000618, D30ST2000654, D30ST2000734, D30ST2001328, D30ST2001669, D30ST2001670, D30ST2001788, D30ST2002223, D30ST2002262, D30ST2002272, D30ST2002417, D30ST2002436, D30ST2002648, D30ST2003024, D30ST2003331, D30ST2003607, D30ST2003797, D30ST2004637, D30ST3000195, D30ST3000258, D30ST3000291, D30ST3000388, D30ST3000493, D60ST2000127, D60ST2000169, D60ST2000245, D60ST2000358, D60ST2000464, D60ST2000507, D90ST2000031, D90ST2000278, D90ST2000440, D90ST2000869, D90ST2001319, D90ST2001433, D90ST2002397, D90ST2002608, D90ST2002673, D90ST2003106, D90ST2003108, D90ST2003137, D90ST2003397, D90ST2003580, D90ST2003594, D90ST2003762, D90ST2003791, D90ST2003989, D90ST2004018, D90ST2004073, D90ST2004417, DFNES1000003, DFNES1000107, DFNES2000143, DFNES2000146, DFNES2000153, DFNES2000212, DFNES2000335, DFNES2000426, DFNES2000443, DFNES2000471, DFNES2000526, DFNES2000913, DFNES2001091, DFNES2001096, DFNES2001108, DFNES2001177, DFNES2001404, DFNES2001564, DFNES2001565, DFNES2001647, DFNES2001800, DFNES2001829, DFNES2002220, DFNES2002509, DFNES2002550, DFNES2002588, DFNES2002817, DFNES2002966, DFNES2003081, DFNES2003255, DFNES2003742, DFNES2004346, DFNES2004354, DFNES2004383, DFNES2004608, DFNES2004684, DFNES2005266, DFNES2005527, DFNES2005690, DFNES2005766, DFNES2005779, DFNES2005875, DFNES2006346, DFNES2006944, DFNES2007113, DFNES2007299, DFNES2007332, DFNES2007641, DFNES2007757, DFNES2008088, DFNES2008160, DFNES2008280, DFNES2008881, DFNES2009482, DFNES2010502, DFNES2011192, DFNES2011221, DFNES2011245, DFNES2011380, ERLTF1000021, ERLTF2000324, ERLTF2000465, FCBBF1000023, FCBBF1000038, FCBBF1000063, FCBBF1000069, FCBBF1000115, FCBBF1000117, FCBBF1000118, FCBBF1000121, FCBBF1000125, FCBBF1000131, FCBBF1000155, FCBBF1000157, FCBBF1000171, FCBBF1000174, FCBBF1000198, FCBBF1000206, FCBBF1000220, FCBBF1000232, FCBBF1000233, FCBBF1000243, FCBBF1000270, FCBBF1000272, FCBBF1000280, FCBBF1000297, FCBBF1000305, FCBBF1000314, FCBBF1000322, FCBBF1000349, FCBBF1000374, FCBBF1000376, FCBBF1000377, FCBBF1000395, FCBBF1000397, FCBBF1000403, FCBBF1000437, FCBBF1000476, FCBBF1000506, FCBBF1000509, FCBBF1000546, FCBBF1000550, FCBBF1000556, FCBBF1000574, FCBBF1000581, FCBBF1000582, FCBBF1000598, FCBBF1000604, FCBBF1000618, FCBBF1000627, FCBBF1000671, FCBBF1000675, FCBBF1000684, FCBBF1000686, FCBBF1000687, FCBBF1000691, FCBBF1000732, FCBBF1000748, FCBBF1000760, FCBBF2000038, FCBBF2000087, FCBBF2000094, FCBBF2000105, FCBBF2000123, FCBBF2000195, FCBBF2000199, FCBBF2000214, FCBBF2000232, FCBBF2000259, FCBBF2000276, FCBBF2000291, FCBBF2000362, FCBBF2000379, FCBBF2000473, FCBBF2000576, FCBBF2000677, FCBBF2000678, FCBBF2000733, FCBBF2000782, FCBBF2000808, FCBBF2000815, FCBBF2000825, FCBBF2000940, FCBBF2000951, FCBBF2001001, FCBBF2001088, FCBBF2001116, FCBBF2001183, FCBBF2001188, FCBBF2001211, FCBBF2001238, FCBBF2001243, FCBBF2001291, FCBBF2001299, FCBBF2001400, FCBBF2001427, FCBBF2001480, FCBBF2001529, FCBBF2001594, FCBBF2001672, FCBBF2001675, FCBBF2001718, FCBBF2001720, FCBBF2001817, FCBBF2001868, FCBBF2002044, FCBBF2002111, FCBBF2002281, FCBBF2002370, FCBBF2002541, FCBBF2002626, FCBBF2002801, FCBBF2002897, FCBBF2002898, FCBBF2002904, FCBBF2002928, FCBBF2002953, FCBBF2003083, FCBBF2003102, FCBBF2003269, FCBBF2003293, FCBBF2003297, FCBBF2003395, FCBBF2003528, FCBBF2003543, FCBBF2003549, FCBBF2003567, FCBBF2003636, FCBBF2003823, FCBBF2003895, FCBBF2004066, FCBBF2004090, FCBBF2004138, FCBBF2004217, FCBBF2004256, FCBBF2004373, FCBBF2004448, FCBBF2004671, FCBBF2004707, FCBBF2004788, FCBBF2005069, FCBBF2005122, FCBBF2005428, FCBBF2005439, FCBBF2005538, FCBBF2005645, FCBBF2005658, FCBBF2005733, FCBBF2005909, FCBBF2005966, FCBBF2006131, FCBBF2006380, FCBBF2006418, FCBBF2006452, FCBBF2006781, FCBBF2007012, FCBBF2007186, FCBBF2007265, FCBBF2007302, FCBBF2007556, FCBBF2007610, FCBBF2007633, FCBBF2007840, FCBBF3000102, FCBBF3000110, FCBBF3000115, FCBBF3000120, FCBBF3000168, FCBBF3000175, FCBBF3000227, FCBBF3000229, FCBBF3000233, FCBBF3000269, FCBBF3000361, FCBBF3000367, FCBBF3000388, FCBBF3000462, FCBBF3000473, FCBBF3000501, FCBBF3000518, FCBBF3000536, FCBBF3000550, FCBBF3000847, FCBBF3001018, FCBBF3001020, FCBBF3001235, FCBBF3001281, FCBBF3001302, FCBBF3001377, FCBBF3001470, FCBBF3001594, FCBBF3001632, FCBBF3001818, FCBBF3001855, FCBBF3001912, FCBBF3001914, FCBBF3001918, FCBBF3001924, FCBBF3001977, FCBBF3002163, FCBBF3002188, FCBBF3002190, FCBBF3002268, FCBBF3002475, FCBBF3002556, FCBBF3002592, FCBBF3002658, FCBBF3002782, FCBBF3002818, FCBBF3002925, FCBBF3003216, FCBBF3003305, FCBBF3003373, FCBBF3003435, FCBBF3003475, FCBBF3003481, FCBBF3003557, FCBBF3003787, FCBBF3003800, FCBBF3003902, FCBBF3004041, FCBBF3004323, FCBBF3004390, FCBBF3004409, FCBBF3004502, FCBBF3004715, FCBBF3004842, FCBBF3004847, FCBBF3004955, FCBBF3005160, FCBBF3005218, FCBBF3005444, FCBBF3005698, FCBBF3005729, FCBBF3006171, FCBBF3006249, FCBBF3006288, FCBBF3006399, FCBBF3006628, FCBBF3006821, FCBBF3007077, FCBBF3007150, FCBBF3007152, FCBBF3007242, FCBBF3007244, FCBBF3007248, FCBBF3007453, FCBBF3007462, FCBBF3007540, FCBBF3007597, FCBBF3007604, FCBBF3007631, FCBBF3007829, FCBBF3007855, FCBBF3007859, FCBBF3007860, FCBBF3008073, FCBBF3008100, FCBBF3008153, FCBBF3008159, FCBBF3008251, FCBBF3008311, FCBBF3008362, FCBBF3008382, FCBBF3008475, FCBBF3008556, FCBBF3008689, FCBBF3008748, FCBBF3008870, FCBBF3008938, FCBBF3008944, FCBBF3009069, FCBBF3009101, FCBBF3009152, FCBBF3009256, FCBBF3009317, FCBBF3009428, FCBBF3009464, FCBBF3009479, FCBBF3009526, FCBBF3009703, FCBBF3009717, FCBBF3009888, FCBBF3009949, FCBBF3009978, FCBBF3010008, FCBBF3010012, FCBBF3010124, FCBBF3010130, FCBBF3010142, FCBBF3010149, FCBBF3010211, FCBBF3010361, FCBBF3010508, FCBBF3010544, FCBBF3010586, FCBBF3010601, FCBBF3010665, FCBBF3010695, FCBBF3010729, FCBBF3010733, FCBBF3011003, FCBBF3011418, FCBBF3011485, FCBBF3011523, FCBBF3011570, FCBBF3011592, FCBBF3011867, FCBBF3011889, FCBBF3012170, FCBBF3012182, FCBBF3012288, FCBBF3012332, FCBBF3012347, FCBBF3012443, FCBBF3012588, FCBBF3012667, FCBBF3012842, FCBBF3012901, FCBBF3013041, FCBBF3013058, FCBBF3013205, FCBBF3013266, FCBBF3013307, FCBBF3013341, FCBBF3013506, FCBBF3013589, FCBBF3013623, FCBBF3013800, FCBBF3013846, FCBBF3014229, FCBBF3014355, FCBBF3014567, FCBBF3015100, FCBBF3015119, FCBBF3015131, FCBBF3015317, FCBBF3015727, FCBBF3015758, FCBBF3015809, FCBBF3015870, FCBBF3016018, FCBBF3016134, FCBBF3016178, FCBBF3016451, FCBBF3016618, FCBBF3016622, FCBBF3016644, FCBBF3016667, FCBBF3016928, FCBBF3016987, FCBBF3017059, FCBBF3017071, FCBBF3017123, FCBBF3017233, FCBBF3017255, FCBBF3017288, FCBBF3017396, FCBBF3017531, FCBBF3017535, FCBBF3017681, FCBBF3017729, FCBBF3017873, FCBBF3017918, FCBBF3017974, FCBBF3018067, FCBBF3018173, FCBBF3018453, FCBBF3018591, FCBBF3018753, FCBBF3018796, FCBBF3018826, FCBBF3018949, FCBBF3019085, FCBBF3019320, FCBBF3019437, FCBBF3019455, FCBBF3019564, FCBBF3019569, FCBBF3019570, FCBBF3019663, FCBBF3019714, FCBBF3019716, FCBBF3019784, FCBBF3019839, FCBBF3019867, FCBBF3019961, FCBBF3020030, FCBBF3020138, FCBBF3020140, FCBBF3020163, FCBBF3020232, FCBBF3020599, FCBBF3021026, FCBBF3021221, FCBBF3021501, FCBBF3021506, FCBBF3021524, FCBBF3021807, FCBBF3021940, FCBBF3021985, FCBBF3022005, FCBBF3022291, FCBBF3022311, FCBBF3022504, FCBBF3022566, FCBBF3022593, FCBBF3022765, FCBBF3022767, FCBBF3022894, FCBBF3023061, FCBBF3023078, FCBBF3023368, FCBBF3023372, FCBBF3023443, FCBBF3023599, FCBBF3023704, FCBBF3023887, FCBBF3023895, FCBBF3024002, FCBBF3024096, FCBBF3024225, FCBBF3024266, FCBBF3024364, FCBBF3024623, FCBBF3024793, FCBBF3024911, FCBBF3025098, FCBBF3025252, FCBBF3025280, FCBBF3025285, FCBBF3025417, FCBBF3025528, FCBBF3025568, FCBBF3025650, FCBBF3025674, FCBBF3025730, FCBBF3025737, FCBBF3025905, FCBBF3026021, FCBBF3026048, FCBBF3026251, FCBBF3026308, FCBBF3026651, FCBBF3026678, FCBBF3026692, FCBBF3027104, FCBBF3027199, FCBBF3027328, FCBBF3027559, FCBBF3027717, FCBBF3027755, FCBBF3027768, FCBBF3027854, FCBBF3027863, FCBBF3027903, FCBBF3028102, FCBBF3028143, FCBBF3028188, FCBBF3028202, FCBBF3028472, FCBBF3028528, FCBBF3028582, FCBBF3028593, FCBBF3028671, FCBBF3028794, FCBBF4000017, FCBBF4000061, FCBBF4000076, FCBBF4000142, FCBBF4000173, FCBBF4000192, FCBBF4000193, FCBBF4000268, FCBBF4000282, FCBBF4000399, FCBBF4000415, FCBBF4000500, FCBBF4000529, FCBBF4000548, FCBBF5000041, FCBBF5000061, FCBBF5000165, FCBBF5000261, FCBBF5000325, FCBBF5000353, FCBBF5000384, FCBBF5000483, FCBBF5000495, FEBRA1000005, FEBRA1000008, FEBRA1000022, FEBRA1000030, FEBRA1000057, FEBRA1000088, FEBRA1000138, FEBRA1000148, FEBRA1000149, FEBRA1000183, FEBRA1000188, FEBRA1000189, FEBRA1000190, FEBRA2000007, FEBRA2000021, FEBRA2000035, FEBRA2000053, FEBRA2000126, FEBRA2000129, FEBRA2000210, FEBRA2000220, FEBRA2000228, FEBRA2000253, FEBRA2000282, FEBRA2000286, FEBRA2000297, FEBRA2000311, FEBRA2000321, FEBRA2000333, FEBRA2000377, FEBRA2000378, FEBRA2000391, FEBRA2000394, FEBRA2000397, FEBRA2000399, FEBRA2000409, FEBRA2000415, FEBRA2000436, FEBRA2000438, FEBRA2000452, FEBRA2000454, FEBRA2000462, FEBRA2000468, FEBRA2000491, FEBRA2000504, FEBRA2000532, FEBRA2000536, FEBRA2000538, FEBRA2000575, FEBRA2000656, FEBRA2000659, FEBRA2000680, FEBRA2000690, FEBRA2000727, FEBRA2000734, FEBRA2000740, FEBRA2000757, FEBRA2000762, FEBRA2000771, FEBRA2000772, FEBRA2000782, FEBRA2000790, FEBRA2000793, FEBRA2000803, FEBRA2000805, FEBRA2000809, FEBRA2000815, FEBRA2000856, FEBRA2000862, FEBRA2000877, FEBRA2000880, FEBRA2000901, FEBRA2000909, FEBRA2000917, FEBRA2000928, FEBRA2000936, FEBRA2000937, FEBRA2000959, FEBRA2000972, FEBRA2001004, FEBRA2001012, FEBRA2001020, FEBRA2001093, FEBRA2001124, FEBRA2001133, FEBRA2001146, FEBRA2001161, FEBRA2001175, FEBRA2001197, FEBRA2001217, FEBRA2001227, FEBRA2001245, FEBRA2001267, FEBRA2001294, FEBRA2001334, FEBRA2001351, FEBRA2001383, FEBRA2001438, FEBRA2001440, FEBRA2001487, FEBRA2001492, FEBRA2001523, FEBRA2001561, FEBRA2001571, FEBRA2001581, FEBRA2001584, FEBRA2001590, FEBRA2001591, FEBRA2001610, FEBRA2001620, FEBRA2001659, FEBRA2001669, FEBRA2001698, FEBRA2001705, FEBRA2001706, FEBRA2001715, FEBRA2001745, FEBRA2001752, FEBRA2001772, FEBRA2001790, FEBRA2001814, FEBRA2001828, FEBRA2001867, FEBRA2001914, FEBRA2001974, FEBRA2001989, FEBRA2001990, FEBRA2002009, FEBRA2002027, FEBRA2002086, FEBRA2002109, FEBRA2002191, FEBRA2002260, FEBRA2002352, FEBRA2002399, FEBRA2002410, FEBRA2002429, FEBRA2002442, FEBRA2002456, FEBRA2002508, FEBRA2002525, FEBRA2002527, FEBRA2002552, FEBRA2002574, FEBRA2002601, FEBRA2002611, FEBRA2002628, FEBRA2002662, FEBRA2002682, FEBRA2002707, FEBRA2002727, FEBRA2002781, FEBRA2002783, FEBRA2002792, FEBRA2002818, FEBRA2002858, FEBRA2002882, FEBRA2002897, FEBRA2002908, FEBRA2002931, FEBRA2002962, FEBRA2002986, FEBRA2003054, FEBRA2003115, FEBRA2003128, FEBRA2003155, FEBRA2003163, FEBRA2003181, FEBRA2003198, FEBRA2003253, FEBRA2003258, FEBRA2003275, FEBRA2003308, FEBRA2003327, FEBRA2003429, FEBRA2003436, FEBRA2003454, FEBRA2003468, FEBRA2003470, FEBRA2003520, FEBRA2003524, FEBRA2003541, FEBRA2003675, FEBRA2003707, FEBRA2003711, FEBRA2003726, FEBRA2003822, FEBRA2003897, FEBRA2003907, FEBRA2004023, FEBRA2004026, FEBRA2004029, FEBRA2004053, FEBRA2004056, FEBRA2004091, FEBRA2004110, FEBRA2004191, FEBRA2004202, FEBRA2004219, FEBRA2004224, FEBRA2004237, FEBRA2004268, FEBRA2004329, FEBRA2004331, FEBRA2004443, FEBRA2004485, FEBRA2004490, FEBRA2004538, FEBRA2004592, FEBRA2004620, FEBRA2004651, FEBRA2004767, FEBRA2004813, FEBRA2004840, FEBRA2004852, FEBRA2004867, FEBRA2004914, FEBRA2004933, FEBRA2004987, FEBRA2005014, FEBRA2005036, FEBRA2005079, FEBRA2005114, FEBRA2005216, FEBRA2005291, FEBRA2005361, FEBRA2005377, FEBRA2005380, FEBRA2005427, FEBRA2005458, FEBRA2005476, FEBRA2005701, FEBRA2005726, FEBRA2005752, FEBRA2005778, FEBRA2005787, FEBRA2005788, FEBRA2005995, FEBRA2005998, FEBRA2006061, FEBRA2006092, FEBRA2006150, FEBRA2006165, FEBRA2006255, FEBRA2006315, FEBRA2006346, FEBRA2006354, FEBRA2006357, FEBRA2006368, FEBRA2006370, FEBRA2006379, FEBRA2006396, FEBRA2006401, FEBRA2006409, FEBRA2006418, FEBRA2006427, FEBRA2006476, FEBRA2006485, FEBRA2006491, FEBRA2006521, FEBRA2006627, FEBRA2006664, FEBRA2006667, FEBRA2006726, FEBRA2006736, FEBRA2006793, FEBRA2006808, FEBRA2006817, FEBRA2006873, FEBRA2006890, FEBRA2006942, FEBRA2006977, FEBRA2007017, FEBRA2007176, FEBRA2007200, FEBRA2007247, FEBRA2007280, FEBRA2007414, FEBRA2007436, FEBRA2007449, FEBRA2007458, FEBRA2007534, FEBRA2007544, FEBRA2007551, FEBRA2007566, FEBRA2007589, FEBRA2007613, FEBRA2007620, FEBRA2007622, FEBRA2007708, FEBRA2007714, FEBRA2007793, FEBRA2007801, FEBRA2007818, FEBRA2007823, FEBRA2007880, FEBRA2007900, FEBRA2007901, FEBRA2007931, FEBRA2007957, FEBRA2008009, FEBRA2008036, FEBRA2008086, FEBRA2008134, FEBRA2008135, FEBRA2008159, FEBRA2008165, FEBRA2008172, FEBRA2008201, FEBRA2008210, FEBRA2008265, FEBRA2008266, FEBRA2008282, FEBRA2008287, FEBRA2008311, FEBRA2008341, FEBRA2008360, FEBRA2008459, FEBRA2008468, FEBRA2008475, FEBRA2008481, FEBRA2008542, FEBRA2008583, FEBRA2008660, FEBRA2008662, FEBRA2008681, FEBRA2008692, FEBRA2008741, FEBRA2008755, FEBRA2008836, FEBRA2008859, FEBRA2008861, FEBRA2008866, FEBRA2008881, FEBRA2008928, FEBRA2008983, FEBRA2009016, FEBRA2009022, FEBRA2009029, FEBRA2009074, FEBRA2009117, FEBRA2009120, FEBRA2009162, FEBRA2009185, FEBRA2009240, FEBRA2009265, FEBRA2009289, FEBRA2009327, FEBRA2009328, FEBRA2009352, FEBRA2009362, FEBRA2009385, FEBRA2009416, FEBRA2009437, FEBRA2009478, FEBRA2009507, FEBRA2009514, FEBRA2009567, FEBRA2009588, FEBRA2009731, FEBRA2009754, FEBRA2009780, FEBRA2009846, FEBRA2009986, FEBRA2010141, FEBRA2010299, FEBRA2010484, FEBRA2010719, FEBRA2010746, FEBRA2010768, FEBRA2010802, FEBRA2011063, FEBRA2011090, FEBRA2011356, FEBRA2011392, FEBRA2011414, FEBRA2011593, FEBRA2011665, FEBRA2012090, FEBRA2012120, FEBRA2012181, FEBRA2012195, FEBRA2012418, FEBRA2012507, FEBRA2012625, FEBRA2013019, FEBRA2013069, FEBRA2013274, FEBRA2013465, FEBRA2013570, FEBRA2013699, FEBRA2013905, FEBRA2013951, FEBRA2014010, FEBRA2014122, FEBRA2014198, FEBRA2014213, FEBRA2014297, FEBRA2014443, FEBRA2014578, FEBRA2014939, FEBRA2015076, FEBRA2015085, FEBRA2015175, FEBRA2015292, FEBRA2015588, FEBRA2016112, FEBRA2016398, FEBRA2016572, FEBRA2016583, FEBRA2016621, FEBRA2016654, FEBRA2016739, FEBRA2017024, FEBRA2017098, FEBRA2017138, FEBRA2017154, FEBRA2017200, FEBRA2017223, FEBRA2017333, FEBRA2017502, FEBRA2017533, FEBRA2017680, FEBRA2017736, FEBRA2017780, FEBRA2017811, FEBRA2017850, FEBRA2018051, FEBRA2018203, FEBRA2018407, FEBRA2018433, FEBRA2018746, FEBRA2019172, FEBRA2019242, FEBRA2019298, FEBRA2019389, FEBRA2019457, FEBRA2019519, FEBRA2019582, FEBRA2019637, FEBRA2019663, FEBRA2019690, FEBRA2019711, FEBRA2019867, FEBRA2020406, FEBRA2020566, FEBRA2020582, FEBRA2020668, FEBRA2020801, FEBRA2020845, FEBRA2020886, FEBRA2020977, FEBRA2021032, FEBRA2021134, FEBRA2021171, FEBRA2021339, FEBRA2021431, FEBRA2021497, FEBRA2021550, FEBRA2021571, FEBRA2021636, FEBRA2021864, FEBRA2021892, FEBRA2021908, FEBRA2021966, FEBRA2022013, FEBRA2022148, FEBRA2022204, FEBRA2022255, FEBRA2022322, FEBRA2022601, FEBRA2022696, FEBRA2022729, FEBRA2022787, FEBRA2022911, FEBRA2022956, FEBRA2022963, FEBRA2022972, FEBRA2023227, FEBRA2023285, FEBRA2023351, FEBRA2023377, FEBRA2023399, FEBRA2023498, FEBRA2023550, FEBRA2023721, FEBRA2023989, FEBRA2023990, FEBRA2024019, FEBRA2024136, FEBRA2024150, FEBRA2024343, FEBRA2024570, FEBRA2024693, FEBRA2024727, FEBRA2024744, FEBRA2024797, FEBRA2024987, FEBRA2025249, FEBRA2025427, FEBRA2025463, FEBRA2025477, FEBRA2026474, FEBRA2026582, FEBRA2026629, FEBRA2026769, FEBRA2026879, FEBRA2026890, FEBRA2026977, FEBRA2026984, FEBRA2027082, FEBRA2027297, FEBRA2027352, FEBRA2027364, FEBRA2027609, FEBRA2028158, FEBRA2028222, FEBRA2028366, FEBRA2028457, FEBRA2028477, FEBRA2028503, FEBRA2028516, FEHRT2000325, FEHRT2000364, FEKID1000018, FELIV1000101, FELIV1000137, FELIV1000164, FELNG2000241, HCASM1000021, HCASM1000050, HCASM1000061, HCASM1000115, HCASM1000130, HCASM2000016, HCASM2000138, HCASM2000156, HCASM2000202, HCASM2000214, HCASM2000266, HCASM2000307, HCASM2000534, HCASM2000536, HCASM2000560, HCASM2000871, HCASM2001285, HCASM2001810, HCASM2001866, HCASM2001890, HCASM2002148, HCASM2002502, HCASM2002754, HCASM2002918, HCASM2003018, HCASM2003076, HCASM2003099, HCASM2003212, HCASM2003237, HCASM2003357, HCASM2003415, HCASM2005388, HCASM2005484, HCASM2006131, HCASM2006338, HCASM2006359, HCASM2006632, HCASM2007047, HCASM2007317, HCASM2007737, HCASM2007773, HCASM2008154, HCASM2008536, HCASM2009405, HCASM2009424, HCASM2009463, HCASM2009588, HCHON100015, HCHON1000131, HCHON1000142, HCHON1000176, HCHON1000191, HCHON2000038, HCHON2000100, HCHON2000156, HCHON2000199, HCHON2000212, HCHON2000271, HCHON2000315, HCHON2000323, HCHON2000344, HCHON2000364, HCHON2000395, HCHON2000417, HCHON2000418, HCHON2000473, HCHON2000503, HCHON2000626, HCHON2000660, HCHON2000663, HCHON2000673, HCHON2000676, HCHON2000698, HCHON2000699, HCHON2000705, HCHON2000738, HCHON2000743, HCHON2000751, HCHON2000815, HCHON2000817, HCHON2000818, HCHON2000819, HCHON2000832, HCHON2000851, HCHON2000898, HCHON2000935, HCHON2000942, HCHON2000956, HCHON2000994, HCHON2001050, HCHON2001108, HCHON2001110, HCHON2001116, HCHON2001161, HCHON2001214, HCHON2001233, HCHON2001269, HCHON2001450, HCHON2001453, HCHON2001497, HCHON2001519, HCHON2001523, HCHON2001535, HCHON2001546, HCHON2001548, HCHON2001577, HCHON2001598, HCHON2001604, HCHON2001607, HCHON2001646, HCHON2001665, HCHON2001712, HCHON2001768, HCHON2001801, HCHON2001853, HCHON2002123, HCHON2002194, HCHON2002241, HCHON2002247, HCHON2002354, HCHON2002496, HCHON2002676, HCHON2002770, HCHON2002964, HCHON2002971, HCHON2003131, HCHON2003134, HCHON2003327, HCHON2003513, HCHON2003532, HCHON2003642, HCHON2003659, HCHON2003676, HCHON2004007, HCHON2004279, HCHON2004359, HCHON2004531, HCHON2004776, HCHON2004858, HCHON2005048, HCHON2005118, HCHON2005166, HCHON2005802, HCHON2005987, HCHON2006250, HCHON2006459, HCHON2006714, HCHON2006722, HCHON2006770, HCHON2006786, HCHON2006841, HCHON2006871, HCHON2007046, HCHON2007482, HCHON2007650, HCHON2007674, HCHON2007774, HCHON2007881, HCHON2008112, HCHON2008239, HCHON2008444, HCHON2008582, HCHON2008672, HCHON2008856, HCHON2008871, HCHON2008989, HCHON2009191, HCHON2009384, HCHON2009749, HCHON2009766, HCHON2009795, HCHON2010074, HCHON2010543, HEART1000010, HEART1000099, HEART1000102, HEART1000118, HEART1000132, HEART1000151, HEART1000173, HEART2000024, HEART2000035, HEART2000099, HEART2000298, HEART2000306, HEART2000309, HEART2000411, HEART2000418, HEART2000444, HEART2000448, HEART2000492, HEART2000568, HEART2000611, HEART2000959, HEART2001680, HEART2001756, HEART2002129, HEART2002184, HEART2002220, HEART2002432, HEART2002531, HEART2002598, HEART2002717, HEART2003027, HEART2003168, HEART2003432, HEART2003440, HEART2003781, HEART2003852, HEART2004570, HEART2004764, HEART2004931, HEART2004940, HEART2004941, HEART2004980, HEART2005244, HEART2005310, HEART2005581, HEART2005610, HEART2006131, HEART2006195, HEART2006310, HEART2006334, HEART2006487, HEART2006557, HEART2006787, HEART2006789, HEART2006909, HEART2007031, HEART2007231, HEART2007443, HEART2007767, HEART2008108, HEART2008111, HEART2008257, HEART2008509, HEART2008994, HEART2009000, HEART2009599, HEART2009680, HEART2010391, HEART2010492, HELAC2000158, HELAC2000301, HHDPC1000001, HHDPC1000065, HHDPC1000114, HHDPC1000118, HHDPC2000070, HHDPC2000102, HHDPC2000104, HHDPC2000258, HHDPC2000315, HHDPC2000462, HHDPC2000572, HHDPC2000656, HHDPC2000692, HHDPC2001337, HHDPC2001432, HHDPC2001896, HHDPC2002963, HHDPC2003049, HHDPC2003113, HHDPC2003381, HHDPC2003472, HHDPC2004757, HHDPC2005185, HHDPC2005513, HHDPC2005742, HHDPC2005794, HHDPC2006460, HHDPC2006862, HHDPC2006927, HHDPC2007302, HHDPC2007775, HHDPC2008123, HHDPC2008185, HHDPC2008279, HHDPC2008297, HHDPC2008414, HHDPC2008474, HHDPC2008816, HHDPC2008843, HHDPC2009114, HHDPC2009178, HHDPC2009208, HHDPC2009272, HHDPC2009528, HLUNG1000017, HLUNG1000024, HLUNG1000030, HLUNG1000034, HLUNG1000037, HLUNG1000053, HLUNG1000064, HLUNG1000084, HLUNG1000091, HLUNG1000099, HLUNG1000104, HLUNG1000105, HLUNG1000110, HLUNG1000151, HLUNG1000169, HLUNG2000004, HLUNG2000014, HLUNG2000027, HLUNG2000063, HLUNG2000068, HLUNG2000116, HLUNG2000125, HLUNG2000130, HLUNG2000142, HLUNG2000174, HLUNG2000176, HLUNG2000217, HLUNG2000232, HLUNG2000255, HLUNG2000281, HLUNG2000314, HLUNG2000340, HLUNG2000362, HLUNG2000363, HLUNG2000431, HLUNG2000480, HLUNG2000489, HLUNG2000549, HLUNG2000557, HLUNG2000570, HLUNG2000751, HLUNG2000761, HLUNG2000777, HLUNG2000846, HLUNG2000870, HLUNG2000926, HLUNG2000950, HLUNG2000955, HLUNG2000970, HLUNG2001013, HLUNG2001126, HLUNG2001144, HLUNG2001146, HLUNG2001214, HLUNG2001439, HLUNG2001507, HLUNG2001677, HLUNG2001814, HLUNG2001996, HLUNG2002006, HLUNG2002050, HLUNG2002085, HLUNG2002145, HLUNG2002295, HLUNG2002303, HLUNG2002334, HLUNG2002405, HLUNG2002429, HLUNG2002465, HLUNG2002562, HLUNG2002659, HLUNG2002707, HLUNG2002811, HLUNG2002916, HLUNG2002942, HLUNG2002949, HLUNG2002958, HLUNG2002982, HLUNG2003003, HLUNG2003049, HLUNG2003061, HLUNG2003162, HLUNG2003246, HLUNG2003331, HLUNG2003335, HLUNG2003378, HLUNG2003497, HLUNG2003691, HLUNG2003710, HLUNG2003714, HLUNG2003716, HLUNG2003833, HLUNG2003872, HLUNG2003918, HLUNG2003991, HLUNG2004014, HLUNG2004037, HLUNG2004067, HLUNG2004154, HLUNG2004217, HLUNG2004273, HLUNG2004388, HLUNG2004416, HLUNG2004521, HLUNG2004534, HLUNG2004684, HLUNG2004707, HLUNG2004774, HLUNG2004775, HLUNG2005012, HLUNG2005030, HLUNG2005045, HLUNG2005076, HLUNG2005133, HLUNG2005203, HLUNG2005479, HLUNG2005524, HLUNG2005656, HLUNG2005774, HLUNG2005813, HLUNG2005924, HLUNG2006026, HLUNG2006067, HLUNG2006094, HLUNG2006370, HLUNG2006397, HLUNG2006570, HLUNG2006599, HLUNG2006614, HLUNG2006671, HLUNG2006781, HLUNG2006812, HLUNG2006843, HLUNG2006852, HLUNG2006935, HLUNG2007041, HLUNG2007163, HLUNG2007210, HLUNG2007219, HLUNG2007245, HLUNG2007433, HLUNG2007931, HLUNG2008066, HLUNG2008139, HLUNG2008153, HLUNG2008225, HLUNG2008235, HLUNG2008247, HLUNG2008333, HLUNG2008348, HLUNG2008384, HLUNG2008396, HLUNG2008439, HLUNG2008479, HLUNG2008480, HLUNG2008521, HLUNG2008833, HLUNG2008875, HLUNG2008885, HLUNG2008958, HLUNG2008959, HLUNG2009067, HLUNG2009225, HLUNG2009253, HLUNG2009303, HLUNG2009413, HLUNG2009729, HLUNG2010181, HLUNG2010464, HLUNG2010562, HLUNG2010845, HLUNG2011041, HLUNG2011461, HLUNG2011833, HLUNG2012049, HLUNG2012287, HLUNG2012315, HLUNG2012546, HLUNG2012600, HLUNG2012727, HLUNG2013097, HLUNG2013204, HLUNG2013304, HLUNG2013350, HLUNG2013622, HLUNG2013643, HLUNG2013784, HLUNG2013851, HLUNG2014262, HLUNG2014288, HLUNG2014449, HLUNG2014821, HLUNG2015184, HLUNG2015418, HLUNG2015548, HLUNG2015578, HLUNG2015617, HLUNG2016022, HLUNG2016862, HLUNG2017286, HLUNG2017307, HLUNG2017350, HLUNG2017546, HLUNG2017806, HLUNG2018029, HLUNG2018282, HLUNG2018626, HLUNG2019058, HSYRA1000131, HSYRA1000148, HSYRA2000044, HSYRA2000135, HSYRA2000190, HSYRA2000221, HSYRA2000237, HSYRA2000253, HSYRA2000255, HSYRA2000332, HSYRA2000371, HSYRA2000424, HSYRA2000507, HSYRA2000510, HSYRA2000629, HSYRA2000706, HSYRA2000760, HSYRA2000792, HSYRA2000832, HSYRA2000925, HSYRA2000927, HSYRA2001003, HSYRA2001103, HSYRA2001142, HSYRA2001153, HSYRA2001232, HSYRA2001255, HSYRA2001332, HSYRA2001353, HSYRA2001420, HSYRA2001484, HSYRA2001552, HSYRA2001567, HSYRA2001580, HSYRA2001595, HSYRA2001631, HSYRA2001983, HSYRA2002103, HSYRA2002590, HSYRA2003168, HSYRA2004550, HSYRA2004858, HSYRA2005456, HSYRA2005496, HSYRA2005628, HSYRA2005970, HSYRA2006049, HSYRA2006873, HSYRA2007241, HSYRA2007338, HSYRA2007667, HSYRA2008154, HSYRA2008714, HSYRA2009102, IMR321000155, IMR321000158, IMR321000161, IMR321000165, IMR321000193, IMR321000207, IMR321000230, IMR321000242, IMR321000253, IMR322000010, IMR322000072, IMR322000107, IMR322000152, IMR322000164, IMR322000302, IMR322000374, IMR322000379, IMR322000383, IMR322000418, IMR322000518, IMR322000555, IMR322000604, IMR322000609, IMR322000656, IMR322000672, IMR322000742, IMR322000791, IMR322000819, IMR322000838, IMR322000859, IMR322000863, IMR322000917, IMR322000919, IMR322000953, IMR322000973, IMR322000984, IMR322001018, IMR322001167, IMR322001185, IMR322001245, IMR322001317, IMR322001318, IMR322001322, IMR322001332, IMR322001380, IMR322001438, IMR322001452, IMR322001491, IMR322001534, IMR322001665, IMR322001670, IMR322001710, IMR322001724, IMR322001879, IMR322002035, IMR322002110, IMR322002470, IMR322002993, IMR322003675, IMR322004768, IMR322005293, IMR322005833, IMR322006012, IMR322006222, IMR322006495, IMR322006520, IMR322006886, IMR322006947, IMR322007078, IMR322007225, IMR322007704, IMR322008651, IMR322009710, IMR322009807, IMR322010295, IMR322010953, IMR322011689, IMR322012314, IMR322012529, IMR322013053, IMR322013396, IMR322013731, IMR322013805, IMR322015523, IMR322016146, IMR322017049, IMR322018117, IMR322018192, JCMLC2000273, KIDNE1000008, KIDNE1000012, KIDNE1000015, KIDNE1000028, KIDNE1000036, KIDNE1000064, KIDNE1000104, KIDNE1000121, KIDNE1000143, KIDNE1000152, KIDNE2000026, KIDNE2000041, KIDNE2000046, KIDNE2000051, KIDNE2000070, KIDNE2000167, KIDNE2000174, KIDNE2000192, KIDNE2000227, KIDNE2000244, KIDNE2000245, KIDNE2000266, KIDNE2000287, KIDNE2000315, KIDNE2000317, KIDNE2000328, KIDNE2000330, KIDNE2000335, KIDNE2000349, KIDNE2000375, KIDNE2000394, KIDNE2000422, KIDNE2000493, KIDNE2000510, KIDNE2000513, KIDNE2000519, KIDNE2000555, KIDNE2000624, KIDNE2000665, KIDNE2000678, KIDNE2000717, KIDNE2000721, KIDNE2000722, KIDNE2000777, KIDNE2000801, KIDNE2000832, KIDNE2000833, KIDNE2000846, KIDNE2000867, KIDNE2000947, KIDNE2001117, KIDNE2001140, KIDNE2001269, KIDNE2001361, KIDNE2001373, KIDNE2001713, KIDNE2001802, KIDNE2001840, KIDNE2001847, KIDNE2001857, KIDNE2001873, KIDNE2001897, KIDNE2001931, KIDNE2001979, KIDNE2002015, KIDNE2002162, KIDNE2002168, KIDNE2002191, KIDNE2002198, KIDNE2002252, KIDNE2002262, KIDNE2002265, KIDNE2002438, KIDNE2002483, KIDNE2002725, KIDNE2002768, KIDNE2002795, KIDNE2002798, KIDNE2002839, KIDNE2002845, KIDNE2002872, KIDNE2002882, KIDNE2002991, KIDNE2003185, KIDNE2003188, KIDNE2003233, KIDNE2003316, KIDNE2003335, KIDNE2003357, KIDNE2003373, KIDNE2003377, KIDNE2003507, KIDNE2003752, KIDNE2003764, KIDNE2003837, KIDNE2003941, KIDNE2003994, KIDNE2004034, KIDNE2004054, KIDNE2004084, KIDNE2004095, KIDNE2004115, KIDNE2004233, KIDNE2004262, KIDNE2004279, KIDNE2004294, KIDNE2004295, KIDNE2004305, KIDNE2004344, KIDNE2004394, KIDNE2004519, KIDNE2004520, KIDNE2004531, KIDNE2004534, KIDNE2004562, KIDNE2004579, KIDNE2004681, KIDNE2004828, KIDNE2004846, KIDNE2004864, KIDNE2004879, KIDNE2004981, KIDNE2004985, KIDNE2004999, KIDNE2005038, KIDNE2005042, KIDNE2005062, KIDNE2005266, KIDNE2005296, KIDNE2005321, KIDNE2005327, KIDNE2005336, KIDNE2005400, KIDNE2005424, KIDNE2005477, KIDNE2005526, KIDNE2005543, KIDNE2005603, KIDNE2005629, KIDNE2005781, KIDNE2005798, KIDNE2005854, KIDNE2005908, KIDNE2005937, KIDNE2006014, KIDNE2006030, KIDNE2006039, KIDNE2006053, KIDNE2006062, KIDNE2006092, KIDNE2006145, KIDNE2006149, KIDNE2006210, KIDNE2006299, KIDNE2006334, KIDNE2006353, KIDNE2006376, KIDNE2006378, KIDNE2006465, KIDNE2006580, KIDNE2006652, KIDNE2006687, KIDNE2006733, KIDNE2006760, KIDNE2006775, KIDNE2006811, KIDNE2006820, KIDNE2006880, KIDNE2007005, KIDNE2007040, KIDNE2007077, KIDNE2007186, KIDNE2007222, KIDNE2007422, KIDNE2007569, KIDNE2007810, KIDNE2007811, KIDNE2007910, KIDNE2007944, KIDNE2008022, KIDNE2008069, KIDNE2008072, KIDNE2008117, KIDNE2008218, KIDNE2008315, KIDNE2008362, KIDNE2008378, KIDNE2008404, KIDNE2008446, KIDNE2008473, KIDNE2008480, KIDNE2008649, KIDNE2008666, KIDNE2008697, KIDNE2008758, KIDNE2008788, KIDNE2008795, KIDNE2008824, KIDNE2008832, KIDNE2008869, KIDNE2008914, KIDNE2008975, KIDNE2008987, KIDNE2009019, KIDNE2009109, KIDNE2009180, KIDNE2009191, KIDNE2009332, KIDNE2009367, KIDNE2009426, KIDNE2009467, KIDNE2009490, KIDNE2009553, KIDNE2009605, KIDNE2009628, KIDNE2009647, KIDNE2009676, KIDNE2009723, KIDNE2010007, KIDNE2010049, KIDNE2010052, KIDNE2010084, KIDNE2010137, KIDNE2010151, KIDNE2010264, KIDNE2010265, KIDNE2010271, KIDNE2010419, KIDNE2010574, KIDNE2010674, KIDNE2010739, KIDNE2010750, KIDNE2010762, KIDNE2010863, KIDNE2010973, KIDNE2010989, KIDNE2011200, KIDNE2011314, KIDNE2011508, KIDNE20115320 KIDNE2011635, KIDNE2011752, KIDNE2011782, KIDNE2011858, KIDNE2012009, KIDNE2012025, KIDNE2012188, KIDNE2012291, KIDNE2012316, KIDNE2012361, KIDNE2012453, KIDNE2012563, KIDNE2012601, KIDNE2012613, KIDNE2012710, KIDNE2012745, KIDNE2012775, KIDNE2012784, KIDNE2012945, KIDNE2013045, KIDNE2013095, KIDNE2013158, KIDNE2013218, KIDNE2013263, KIDNE2013346, KIDNE2013388, KIDNE2013413, KIDNE2013489, KIDNE2013639, KIDNE2013731, KIDNE2013734, KIDNE2013775, KIDNE2013801, KIDNE2013866, KIDNE2014087, KIDNE2014112, KIDNE2014119, KIDNE2014170, KIDNE2014184, KIDNE2014268, KIDNE2014298, KIDNE2014320, KIDNE2014415, KIDNE2014489, KIDNE2014496, KIDNE2014661, KIDNE2014717, KIDNE2014789, KIDNE2014808, KIDNE2014890, KIDNE2014978, KIDNE2015073, KIDNE2015221, KIDNE2015244, KIDNE2015313, KIDNE2015433, KIDNE2015483, KIDNE2015515, KIDNE2015546, KIDNE2015556, KIDNE2015598, KIDNE2015660, KIDNE2015710, KIDNE2015987, KIDNE2016000, KIDNE2016036, KIDNE2016096, KIDNE2016101, KIDNE2016142, KIDNE2016188, KIDNE2016327, KIDNE2016388, KIDNE2016464, KIDNE2016539, KIDNE2016570, KIDNE2016918, KIDNE2017007, KIDNE2017052, KIDNE2017151, KIDNE2017153, KIDNE2017315, KIDNE2017332, KIDNE2017343, KIDNE2017454, KIDNE2017603, KIDNE2017956, KIDNE2018071, KIDNE2018166, KIDNE2018167, KIDNE2018217, KIDNE2018254, KIDNE2018268, KIDNE2018269, KIDNE2018287, KIDNE2018294, KIDNE2018352, KIDNE2018462, KIDNE2018617, KIDNE2018678, KIDNE2018727, KIDNE2018863, KIDNE2018891, KIDNE2018989, KIDNE2018996, KIDNE2019074, KIDNE2019187, LIVER1000017, LIVER1000050, LIVER1000055, LIVER1000058, LIVER1000063, LIVER1000067, LIVER1000073, LIVER1000082, LIVER1000099, LIVER1000104, LIVER1000111, LIVER1000126, LIVER1000139, LIVER1000155, LIVER1000165, LIVER1000175, LIVER1000224, LIVER1000230, LIVER1000278, LIVER1000303, LIVER1000397, LIVER1000421, LIVER1000433, LIVER1000479, LIVER1000482, LIVER1000542, LIVER2000003, LIVER2000033, LIVER2000037, LIVER2000158, LIVER2000216, LIVER2000237, LIVER2000247, LIVER2000360, LIVER2000515, LIVER2000592, LIVER2000626, LIVER2000682, LIVER2000769, LIVER2000775, LIVER2001051, LIVER2001076, LIVER2001099, LIVER2001113, LIVER2001164, LIVER2001191, LIVER2001265, LIVER2001329, LIVER2001389, LIVER2001461, LIVER2001835, LIVER2002638, LIVER2002644, LIVER2002660, LIVER2002702, LIVER2003008, LIVER2003065, LIVER2003234, LIVER2003511, LIVER2003524, LIVER2003568, LIVER2003581, LIVER2003800, LIVER2003854, LIVER2004074, LIVER2004392, LIVER2004514, LIVER2004565, LIVER2005198, LIVER2005218, LIVER2005376, LIVER2005385, LIVER2005512, LIVER2005520, LIVER2005527, LIVER2005544, LIVER2005625, LIVER2005728, LIVER2005973, LIVER2006006, LIVER2006251, LIVER2006410, LIVER2006469, LIVER2006644, LIVER2006764, LIVER2007415, LIVER2007548, LIVER2007568, LIVER2007721, LIVER2008053, LIVER2008465, LIVER2008473, LIVER2008580, LIVER2008706, LIVER2008751, LIVER2008945, LIVER2008998, LIVER2009110, LIVER2009118, LIVER2009554, LYMPB1000141, LYMPB1000158, LYMPB2000083, MAMGL1000017, MAMGL1000083, MAMGL1000100, MAMGL1000132, MAMGL1000151, MAMGL1000178, MAMGL1000182, MAMGL1000184, MESAN1000032, MESAN1000035, MESAN1000050, MESAN1000079, MESAN1000080, MESAN1000121, MESAN1000147, MESAN1000180, MESAN2000023, MESAN2000026, MESAN2000067, MESAN2000092, MESAN2000149, MESAN2000167, MESAN2000291, MESAN2000337, MESAN2000434, MESAN2000462, MESAN2000501, MESAN2000711, MESAN2000815, MESAN2000894, MESAN2000909, MESAN2001627, MESAN2001770, MESAN2001979, MESAN2001980, MESAN2002113, MESAN2002122, MESAN2002147, MESAN2002186, MESAN2002424, MESAN2002519, MESAN2002687, MESAN2002709, MESAN2002844, MESAN2002978, MESAN2003037, MESAN2003039, MESAN2003101, MESAN2003190, MESAN2003322, MESAN2003490, MESAN2003529, MESAN2003646, MESAN2003662, MESAN2003709, MESAN2003851, MESAN2004138, MESAN2004288, MESAN2004575, MESAN2005284, MESAN2005371, MESAN2005633, MESAN2005689, MESAN2005724, MESAN2005808, MESAN2005811, MESAN2006022, MESAN2006043, MESAN2006328, MESAN2006401, MESAN2006580, MESAN2006599, MESAN2006953, MESAN2006971, MESAN2007032, MESAN2007440, MESAN2007597, MESAN2007755, MESAN2008222, MESAN2008334, MESAN2008460, MESAN2008536, MESAN2008679, MESAN2008729, MESAN2008821, MESAN2008926, MESAN2009019, MESAN2009081, MESAN2009105, MESAN2009311, MESAN2009418, MESAN2009503, MESAN2009522, MESAN2010031, MESAN2010114, MESAN2010312, MESAN2010321, MESAN2010664, MESAN2010681, MESAN2011545, MESAN2011597, MESAN2011632, MESAN2011977, MESAN2012586, MESAN2012708, MESAN2012735, MESAN2013019, MESAN2013022, MESAN2013183, MESAN2013211, MESAN2013283, MESAN2013284, MESAN2013611, MESAN2013674, MESAN2013845, MESAN2013908, MESAN2013936, MESAN2014192, MESAN2014295, MESAN2014298, MESAN2014412, MESAN2014624, MESAN2015277, MESAN2015365, MESAN2015391, MESAN2015401, MESAN2015501, MESAN2015515, MESAN2015708, MESAN2016159, MESAN2016304, MESAN2016409, MESAN2016552, MESAN2016965, MESAN2017133, MESAN2017152, MESAN2017373, MESAN2017417, MESAN2018209, MESAN2018576, MESAN2018670, MESTC1000042, MESTC1000147, MESTC2000150, MESTC2000153, MESTC2000170, N1ESE2000698, NB9N41000047, NB9N41000121, NB9N41000135, NB9N41000142, NB9N41000146, NB9N41000340, NB9N42000104, NB9N42000122, NB9N42000196, NB9N42000281, NB9N42000314, NB9N42000430, NB9N42000495, NB9N42001300, NCRRP1000129, NESOP1000010, NESOP1000087, NESOP1000108, NESOP2000231, NESOP2000452, NESOP2000499, NESOP2000504, NESOP2000744, NESOP2001144, NESOP2001433, NESOP2001656, NESOP2001694, NESOP2001752, NESOP2002352, NESOP2002418, NESOP2002487, NESOP2002738, NESOP2002780, NETRP1000034, NETRP1000082, NETRP2000086, NETRP2000182, NETRP2000439, NHNPC1000034, NHNPC1000037, NHNPC1000084, NHNPC1000101, NHNPC1000124, NHNPC2000062, NHNPC2000212, NHNPC2000606, NHNPC2000877, NHNPC2001108, NHNPC2001223, NHNPC2001312, NHNPC2001816, NHNPC2002565, NHNPC2002749, NOVAR1000015, NOVAR1000102, NOVAR2000136, NOVAR2000352, NOVAR2000412, NOVAR2000710, NOVAR2000783, NOVAR2000962, NOVAR2001108, NOVAR2001620, NOVAR2001783, NOVAR2001876, NOVAR2002039, NT2NE1000004, NT2NE1000014, NT2NE1000018, NT2NE1000023, NT2NE1000024, NT2NE1000059, NT2NE1000063, NT2NE1000073, NT2NE1000083, NT2NE1000120, NT2NE1000122, NT2NE1000175, NT2NE1000181, NT2NE1000185, NT2NE2000038, NT2NE2000054, NT2NE2000057, NT2NE2000064, NT2NE2000109, NT2NE2000137, NT2NE2000156, NT2NE2000222, NT2NE2000284, NT2NE2000299, NT2NE2000353, NT2NE2000356, NT2NE2000369, NT2NE2000374, NT2NE2000386, NT2NE2000390, NT2NE2000392, NT2NE2000455, NT2NE2000470, NT2NE2000488, NT2NE2000517, NT2NE2000536, NT2NE2000546, NT2NE2000548, NT2NE2000550, NT2NE2000586, NT2NE2000612, NT2NE2000636, NT2NE2000658, NT2NE2000706, NT2NE2000763, NT2NE2000802, NT2NE2000808, NT2NE2000809, NT2NE2000864, NT2NE2000909, NT2NE2000913, NT2NE2000950, NT2NE2000951, NT2NE2000980, NT2NE2001005, NT2NE2001021, NT2NE2001040, NT2NE2001048, NT2NE2001049, NT2NE2001142, NT2NE2001156, NT2NE2001176, NT2NE2001180, NT2NE2001181, NT2NE2001188, NT2NE2001191, NT2NE2001247, NT2NE2001252, NT2NE2001324, NT2NE2001326, NT2NE2001364, NT2NE2001372, NT2NE2001397, NT2NE2001403, NT2NE2001428, NT2NE2001432, NT2NE2001442, NT2NE2001524, NT2NE2001598, NT2NE2001617, NT2NE2001623, NT2NE2001626, NT2NE2001634, NT2NE2001648, NT2NE2001660, NT2NE2001666, NT2NE2001677, NT2NE2001697, NT2NE2001698, NT2NE2001723, NT2NE2001725, NT2NE2001874, NT2NE2001889, NT2NE2001923, NT2NE2002100, NT2NE2002162, NT2NE2002186, NT2NE2002285, NT2NE2002311, NT2NE2002620, NT2NE2002651, NT2NE2002732, NT2NE2002768, NT2NE2002791, NT2NE2002856, NT2NE2003150, NT2NE2003185, NT2NE2003252, NT2NE2003280, NT2NE2003308, NT2NE2003309, NT2NE2003315, NT2NE2003393, NT2NE2003408, NT2NE2003457, NT2NE2003485, NT2NE2003540, NT2NE2003569, NT2NE2003571, NT2NE2003705, NT2NE2003752, NT2NE2003887, NT2NE2003921, NT2NE2004255, NT2NE2004378, NT2NE2004490, NT2NE2004519, NT2NE2004606, NT2NE2004740, NT2NE2004787, NT2NE2004916, NT2NE2005035, NT2NE2005223, NT2NE2005276, NT2NE2005317, NT2NE2005323, NT2NE2005358, NT2NE2005395, NT2NE2005419, NT2NE2005517, NT2NE2005537, NT2NE2005555, NT2NE2005588, NT2NE2005676, NT2NE2005720, NT2NE2005784, NT2NE2005804, NT2NE2005821, NT2NE2005890, NT2NE2005921, NT2NE2005968, NT2NE2006075, NT2NE2006087, NT2NE2006103, NT2NE2006217, NT2NE2006288, NT2NE2006382, NT2NE2006387, NT2NE2006427, NT2NE2006432, NT2NE2006531, NT2NE2006659, NT2NE2006784, NT2NE2006813, NT2NE2006894, NT2NE2006909, NT2NE2006942, NT2NE2006958, NT2NE2007052, NT2NE2007220, NT2NE2007425, NT2NE2007725, NT2NE2007727, NT2NE2007786, NT2NE2007877, NT2NE2007967, NT2NE2008017, NT2NE2008060, NT2NE2008077, NT2NE2008213, NT2NE2008260, NT2NE2008378, NT2NE2008607, NT2NE2008639, NT2NE2008727, NT2NE2008783, NT2NE2008785, NT2NE2008803, NT2NE2008867, NT2NE2008961, NT2NE2008997, NT2NE2009138, NT2NE2009295, NT2NE2009426, NT2NE2009523, NT2NE2009608, NT2NE2009691, NT2NE2010056, NT2NE2010105, NT2NE2010150, NT2NE2010400, NT2NE2010632, NT2NE2010633, NT2NE2010654, NT2NE2010688, NT2NE2010781, NT2NE2010854, NT2NE2011033, NT2NE2011036, NT2NE2011107, NT2NE2011154, NT2NE2011221, NT2NE2011411, NT2NE2011485, NT2NE2011650, NT2NE2011684, NT2NE2011687, NT2NE2011691, NT2NE2011758, NT2NE2011823, NT2NE2011896, NT2NE2011998, NT2NE2012113, NT2NE2012199, NT2NE2012243, NT2NE2012361, NT2NE2012448, NT2NE2012457, NT2NE2012493, NT2NE2012505, NT2NE2012533, NT2NE2012603, NT2NE2012747, NT2NE2012790, NT2NE2012847, NT2NE2013019, NT2NE2013081, NT2NE2013189, NT2NE2013217, NT2NE2013547, NT2NE2014013, NT2NE2014028, NT2NE2014113, NT2NE2014176, NT2NE2014221, NT2NE2014525, NT2NE2014650, NT2NE2014651, NT2NE2014681, NT2NE2014758, NT2NE2014869, NT2NE2014950, NT2NE2015061, NT2NE2015262, NT2NE2015275, NT2NE2015362, NT2NE2015480, NT2NE2015511, NT2NE2015565, NT2NE2015626, NT2NE2015747, NT2NE2015860, NT2NE2015885, NT2NE2015904, NT2NE2015974, NT2NE2016041, NT2NE2016387, NT2NE2016419, NT2NE2016519, NT2NE2016608, NT2NE2016766, NT2NE2016774, NT2NE2016971, NT2NE2017259, NT2NE2017332, NT2NE2017397, NT2NE2017480, NT2NE2017492, NT2NE2017508, NT2NE2017562, NT2NE2017590, NT2NE2017612, NT2NE2017721, NT2NE2017752, NT2NE2017792, NT2NE2017982, NT2NE2018165, NT2NE2018176, NT2NE2018180, NT2NE2018273, NT2NE2018376, NT2NE2018472, NT2NE2018490, NT2NE2018594, NT2NE2018739, NT2NE2018916, NT2NE2019056, NT2NE2019076, NT2NE2019091, NT2NE2019099, NT2RI1000016, NT2RI1000035, NT2RI1000048, NT2RI1000127, NT2RI1000164, NT2RI1000172, NT2RI2000004, NT2RI2000007, NT2RI2000116, NT2RI2000117, NT2RI2000128, NT2RI2000133, NT2RI2000167, NT2RI2000173, NT2RI2000187, NT2RI2000263, NT2RI2000270, NT2RI2000276, NT2RI2000284, NT2RI2000294, NT2RI2000313, NT2RI2000341, NT2RI2000344, NT2RI2000348, NT2RI2000412, NT2RI2000421, NT2RI2000480, NT2RI2000575, NT2RI2000578, NT2RI2000588, NT2RI2000597, NT2RI2000669, NT2RI2000688, NT2RI2000704, NT2RI2000738, NT2RI2000775, NT2RI2000829, NT2RI2000841, NT2RI2000865, NT2RI2000932, NT2RI2000987, NT2RI2001010, NT2RI2001017, NT2RI2001030, NT2RI2001054, NT2RI2001083, NT2RI2001091, NT2RI2001167, NT2RI2001178, NT2RI2001235, NT2RI2001244, NT2RI2001307, NT2RI2001385, NT2RI2001409, NT2RI2001410, NT2RI2001422, NT2RI2001425, NT2RI2001449, NT2RI2001450, NT2RI2001474, NT2RI2001519, NT2RI2001621, NT2RI2001624, NT2RI2001726, NT2RI2001731, NT2RI2001769, NT2RI2001782, NT2RI2001836, NT2RI2001846, NT2RI2001866, NT2RI2001910, NT2RI2001952, NT2RI2002022, NT2RI2002041, NT2RI2002117, NT2RI2002120, NT2RI2002152, NT2RI2002153, NT2RI2002179, NT2RI2002243, NT2RI2002252, NT2RI2002260, NT2RI2002266, NT2RI2002270, NT2RI2002334, NT2RI2002447, NT2RI2002481, NT2RI2002507, NT2RI2002517, NT2RI2002540, NT2RI2002549, NT2RI2002564, NT2RI2002585, NT2RI2002592, NT2RI2002602, NT2RI2002802, NT2RI2002822, NT2RI2002852, NT2RI2002923, NT2RI2002926, NT2RI2002970, NT2RI2003011, NT2RI2003067, NT2RI2003184, NT2RI2003205, NT2RI2003222, NT2RI2003301, NT2RI2003344, NT2RI2003360, NT2RI2003361, NT2RI2003383, NT2RI2003392, NT2RI2003399, NT2RI2003419, NT2RI2003481, NT2RI2003487, NT2RI2003655, NT2RI2003667, NT2RI2003678, NT2RI2003751, NT2RI2003884, NT2RI2003973, NT2RI2004059, NT2RI2004078, NT2RI2004079, NT2RI2004093, NT2RI2004136, NT2RI2004157, NT2RI2004188, NT2RI2004190, NT2RI2004209, NT2RI2004284, NT2RI2004290, NT2RI2004304, NT2RI2004312, NT2RI2004381, NT2RI2004410, NT2RI2004442, NT2RI2004468, NT2RI2004535, NT2RI2004606, NT2RI2004618, NT2RI2004783, NT2RI2004818, NT2RI2004840, NT2RI2004884, NT2RI2004916, NT2RI2004962, NT2RI2004984, NT2RI2004985, NT2RI2005048, NT2RI2005069, NT2RI2005087, NT2RI2005096, NT2RI2005130, NT2RI2005150, NT2RI2005166, NT2RI2005239, NT2RI2005246, NT2RI2005315, NT2RI2005358, NT2RI2005368, NT2RI2005382, NT2RI2005473, NT2RI2005520, NT2RI2005564, NT2RI2005579, NT2RI2005621, NT2RI2005628, NT2RI2005647, NT2RI2005670, NT2RI2005710, NT2RI2005713, NT2RI2005772, NT2RI2005816, NT2RI2005818, NT2RI2005851, NT2RI2006071, NT2RI2006072, NT2RI2006081, NT2RI2006126, NT2RI2006127, NT2RI2006183, NT2RI2006257, NT2RI2006271, NT2RI2006294, NT2RI2006345, NT2RI2006403, NT2RI2006412, NT2RI2006445, NT2RI2006487, NT2RI2006506, NT2RI2006640, NT2RI2006659, NT2RI2006662, NT2RI2006667, NT2RI2006679, NT2RI2006703, NT2RI2006716, NT2RI2006735, NT2RI2006762, NT2RI2006788, NT2RI2006838, NT2RI2006853, NT2RI2006943, NT2RI2006973, NT2RI2007046, NT2RI2007048, NT2RI2007084, NT2RI2007096, NT2RI2007116, NT2RI2007148, NT2RI2007214, NT2RI2007277, NT2RI2007303, NT2RI2007334, NT2RI2007386, NT2RI2007406, NT2RI2007439, NT2RI2007445, NT2RI2007468, NT2RI2007469, NT2RI2007507, NT2RI2007572, NT2RI2007593, NT2RI2007629, NT2RI2007723, NT2RI2007729, NT2RI2007751, NT2RI2007754, NT2RI2007827, NT2RI2007877, NT2RI2007884, NT2RI2007891, NT2RI2007956, NT2RI2007965, NT2RI2008007, NT2RI2008045, NT2RI2008050, NT2RI2008171, NT2RI2008188, NT2RI2008204, NT2RI2008233, NT2RI2008455, NT2RI2008481, NT2RI2008502, NT2RI2008566, NT2RI2008598, NT2RI2008622, NT2RI2008656, NT2RI2008714, NT2RI2008724, NT2RI2008801, NT2RI2008808, NT2RI2008841, NT2RI2008942, NT2RI2008952, NT2RI2009005, NT2RI2009066, NT2RI2009083, NT2RI2009101, NT2RI2009103, NT2RI2009144, NT2RI2009151, NT2RI2009173, NT2RI2009194, NT2RI2009215, NT2RI2009233, NT2RI2009259, NT2RI2009289, NT2RI2009301, NT2RI2009402, NT2RI2009406, NT2RI2009517, NT2RI2009585, NT2RI2009595, NT2RI2009855, NT2RI2010283, NT2RI2010508, NT2RI2010795, NT2RI2011422, NT2RI2011450, NT2RI2011683, NT2RI2011803, NT2RI2012659, NT2RI2012726, NT2RI2013357, NT2RI2013373, NT2RI2014551, NT2RI2014683, NT2RI2014733, NT2RI2015239, NT2RI2016128, NT2RI2016134, NT2RI2017529, NT2RI2018311, NT2RI2018363, NT2RI2018448, NT2RI2018883, NT2RI2018950, NT2RI2019751, NT2RI2019826, NT2RI2020390, NT2RI2020703, NT2RI2021463, NT2RI2021625, NT2RI2022468, NT2RI2022584, NT2RI2023303, NT2RI2023671, NT2RI2024008, NT2RI2024313, NT2RI2024460, NT2RI2024496, NT2RI2024935, NT2RI2025075, NT2RI2025255, NT2RI2025564, NT2RI2025565, NT2RI2025909, NT2RI2025957, NT2RI2025976, NT2RI2026758, NT2RI2027081, NT2RI2027157, NT2RI2027224, NT2RI2027323, NT2RI2027396, NT2RI2027484, NT2RI2027975, NT2RI2028213, NT2RI2028222, NT2RI2028537, NT2RI2028642, NT2RI3000174, NT2RI3000213, NT2RI3000423, NT2RI3000622, NT2RI3001132, NT2RI3001263, NT2RI3001279, NT2RI3001348, NT2RI3001445, NT2RI3001458, NT2RI3001515, NT2RI3001573, NT2RI3001967, NT2RI3002303, NT2RI3002557, NT2RI3002842, NT2RI3003027, NT2RI3003031, NT2RI3003095, NT2RI3003104, NT2RI3003162, NT2RI3003362, NT2RI3003382, NT2RI3003409, NT2RI3003738, NT2RI3003925, NT2RI3004133, NT2RI3004381, NT2RI3004510, NT2RI3005202, NT2RI3005403, NT2RI3005416, NT2RI3005724, NT2RI3005861, NT2RI3005923, NT2RI3005928, NT2RI3006132, NT2RI3006171, NT2RI3006376, NT2RI3006673, NT2RI3006796, NT2RI3007065, NT2RI3007095, NT2RI3007158, NT2RI3007167, NT2RI3007213, NT2RI3007291, NT2RI3007443, NT2RI3007684, NT2RI3007757, NT2RI3007878, NT2RI3007978; NT2RI3008055, NT2RI3008162, NT2RI3008179, NT2RI3008228, NT2RI3008442, NT2RI3008652, NT2RI3008697, NT2RI3008974, NT2RI3009158, NT2RI3009480, NT2RI3009524, NT2RP6000008, NT2RP6000017, NT2RP6000033, NT2RP6000043, NT2RP6000059, NT2RP6000060, NT2RP6000085, NT2RP6000086, NT2RP6000100, NT2RP6000109, NT2RP6000119, NT2RP6000127, NT2RP6000130, NT2RP6000140, NT2RP6000150, NT2RP7000041, NT2RP7000086, NT2RP7000109, NT2RP7000112, NT2RP7000238, NT2RP7000259, NT2RP7000311, NT2RP7000359, NT2RP7000364, NT2RP7000380, NT2RP7000391, NT2RP7000425, NT2RP7000579, NT2RP7000586, NT2RP7000624, NT2RP7000812, NT2RP7000906, NT2RP7000926, NT2RP7001074, NT2RP7001080, NT2RP7001156, NT2RP7001231, NT2RP7001306, NT2RP7001319, NT2RP7001335, NT2RP7001364, NT2RP7001475, NT2RP7001532, NT2RP7001591, NT2RP7001602, NT2RP7001678, NT2RP7001856, NT2RP7002064, NT2RP7002151, NT2RP7002163, NT2RP7002243, NT2RP7002282, NT2RP7002376, NT2RP7002449, NT2RP7002450, NT2RP7002478, NT2RP7002554, NT2RP7002594, NT2RP7002603, NT2RP7002650, NT2RP7002738, NT2RP7002779, NT2RP7002802, NT2RP7002829, NT2RP7002841, NT2RP7002875, NT2RP7002906, NT2RP7002978, NT2RP7003025, NT2RP7003050, NT2RP7003055, NT2RP7003084, NT2RP7003091, NT2RP7003107, NT2RP7003134, NT2RP7003148, NT2RP7003439, NT2RP7003511, NT2RP7003632, NT2RP7003680, NT2RP7003960, NT2RP7004027, NT2RP7004080, NT2RP7004123, NT2RP7004204, NT2RP7004233, NT2RP7004260, NT2RP7004348, NT2RP7004352, NT2RP7004358, NT2RP7004396, NT2RP7004428, NT2RP7004481, NT2RP7004541, NT2RP7004559, NT2RP7004641, NT2RP7004656, NT2RP7004687, NT2RP7004722, NT2RP7004766, NT2RP7004790, NT2RP7004884, NT2RP7004911, NT2RP7004915, NT2RP7004961, NT2RP7004964, NT2RP7004975, NT2RP7005118, NT2RP7005205, NT2RP7005219, NT2RP7005323, NT2RP7005468, NT2RP7005493, NT2RP7005529, NT2RP7005629, NT2RP7005631, NT2RP7005669, NT2RP7005846, NT2RP7006160, NT2RP7006162, NT2RP7006223, NT2RP7006263, NT2RP7006296, NT2RP7006304, NT2RP7006374, NT2RP7006395, NT2RP7006408, NT2RP7006457, NT2RP7006490, NT2RP7006539, NT2RP7006547, NT2RP7006601, NT2RP7006621, NT2RP7006636, NT2RP7006701, NT2RP7006717, NT2RP7006853, NT2RP7006886, NT2RP7006887, NT2RP7006986, NT2RP7006995, NT2RP7007114, NT2RP7007221, NT2RP7007226, NT2RP7007252, NT2RP7007269, NT2RP7007310, NT2RP7007359, NT2RP7007381, NT2RP7007406, NT2RP7007480, NT2RP7007504, NT2RP7007530, NT2RP7007580, NT2RP7007594, NT2RP7007610, NT2RP7007617, NT2RP7007643, NT2RP7007766, NT2RP7007842, NT2RP7007925, NT2RP7007930, NT2RP7008013, NT2RP7008015, NT2RP7008133, NT2RP7008137, NT2RP7008142, NT2RP7008144, NT2RP7008315, NT2RP7008360, NT2RP7008406, NT2RP7008435, NT2RP7008441, NT2RP7008454, NT2RP7008487, NT2RP7008544, NT2RP7008550, NT2RP7008557, NT2RP7008623, NT2RP7008657, NT2RP7008714, NT2RP7008720, NT2RP7008855, NT2RP7008863, NT2RP7009012, NT2RP7009019, NT2RP7009030, NT2RP7009087, NT2RP7009108, NT2RP7009168, NT2RP7009215, NT2RP7009225, NT2RP7009236, NT2RP7009253, NT2RP7009267, NT2RP7009322, NT2RP7009363, NT2RP7009370, NT2RP7009373, NT2RP7009397, NT2RP7009429, NT2RP7009439, NT2RP7009466, NT2RP7009481, NT2RP7009502, NT2RP7009507, NT2RP7009577, NT2RP7009743, NT2RP7009867, NT2RP7010109, NT2RP7010128, NT2RP7010235, NT2RP7010275, NT2RP7010521, NT2RP7010599, NT2RP7010612, NT2RP7010817, NT2RP7011086, NT2RP7011132, NT2RP7011268, NT2RP7011318, NT2RP7011452, NT2RP7011570, NT2RP7011721, NT2RP7011909, NT2RP7012291, NT2RP7012516, NT2RP7012776, NT2RP7013002, NT2RP7013374, NT2RP7013499, NT2RP7013573, NT2RP7013729, NT2RP7013764, NT2RP7013795, NT2RP7013999, NT2RP7014005, NT2RP7014178, NT2RP7014348, NT2RP7014420, NT2RP7014583, NT2RP7014721, NT2RP7014743, NT2RP7014778, NT2RP7014906, NT2RP7015080, NT2RP7015431, NT2RP7015503, NT2RP7015676, NT2RP7015789, NT2RP7015996, NT2RP7016508, NT2RP7016574, NT2RP7016622, NT2RP7016911, NT2RP7017139, NT2RP7017284, NT2RP7017365, NT2RP7017474, NT2RP7017546, NT2RP7017567, NT2RP7017795, NT2RP7017971, NT2RP7018032, NT2RP7018126, NT2RP7018197, NT2RP7018206, NT2RP7018340, NT2RP7018586, NT2RP7018802, NT2RP7018871, NT2RP7019135, NT2RP7019273, NT2RP7019367, NT2RP7019401, NT2RP7019445, NT2RP7019543, NT2RP7019682, NT2RP7019835, NT2RP7020112, NT2RP7020123, NT2RP7020343, NT2RP7020379, NT2RP8000137, NT2RP8000296, NT2RP8000483, NT2RP8000521, NT2RP8000633, NT2RP8001363, NT2RP8001407, NT2RP8001584, NT2RP8001604, NT2RP8001605, NT2RP8003490, NT2RP8003657, NT2RP8003787, NT2RP8004306, NT2RP8005546, NT2RP8006452, NT2RP8006521, NT2RP8007416, NT2RP8007503, NT2RP8007715, NT2RP8008057, NT2RP8009248, NTONG1000006, NTONG1000047, NTONG1000075, NTONG1000087, NTONG1000130, NTONG1000161, NTONG1000172, NTONG1000213, NTONG1000214, NTONG1000246, NTONG1000247, NTONG2000040, NTONG2000107, NTONG2000231, NTONG2000363, NTONG2000413, NTONG2000492, NTONG2000499, NTONG2000531, NTONG2000583, NTONG2000800, NTONG2000966, NTONG2001014, NTONG2001079, NTONG2001137, NTONG2001157, NTONG2001173, NTONG2001222, NTONG2001362, NTONG2001428, NTONG2001532, NTONG2001587, NTONG2001619, NTONG2001642, NTONG2001657, NTONG2001676, NTONG2001762, NTONG2002278, NTONG2002582, NTONG2002807, NTONG2002970, NTONG2002985, NTONG2003158, NTONG2003210, NTONG2003316, NTONG2003409, NTONG2003515, NTONG2003805, NTONG2003839, NTONG2003897, NTONG2003928, NTONG2004095, NTONG2004308, NTONG2004521, NTONG2004690, NTONG2004806, NTONG2004829, NTONG2004918, NTONG2004991, NTONG2005062, NTONG2005086, NTONG2005137, NTONG2005153, NTONG2005265, NTONG2005277, NTONG2005363, NTONG2005373, NTONG2005480, NTONG2005577, NTONG2005657, NTONG2005822, NTONG2005897, NTONG2005969, NTONG2006099, NTONG2006187, NTONG2006301, NTONG2006324, NTONG2006354, NTONG2006440, NTONG2006501, NTONG2006646, NTONG2006709, NTONG2007020, NTONG2007028, NTONG2007249, NTONG2007517, NTONG2007522, NTONG2007693, NTONG2008088, NTONG2008093, NTONG2008143, NTONG2008365, NTONG2008522, NTONG2008672, NTONG2008862, NTONG2008939, NTONG2009068, NTONG2009229, NTONG2009233, NTONG2009468, NTONG2009576, OCBBF1000016, OCBBF1000030, OCBBF1000042, OCBBF1000049, OCBBF1000054, OCBBF1000067, OCBBF1000080, OCBBF1000085, OCBBF1000086, OCBBF1000091, OCBBF1000104, OCBBF1000114, OCBBF1000118, OCBBF1000119, OCBBF1000122, OCBBF1000130, OCBBF1000138, OCBBF1000145, OCBBF1000153, OCBBF1000175, OCBBF1000185, OCBBF1000192, OCBBF1000254, OCBBF2000126, OCBBF2000178, OCBBF2000231, OCBBF2000277, OCBBF2000287, OCBBF2000323, OCBBF2000452, OCBBF2000467, OCBBF2000522, OCBBF2000677, OCBBF2000703, OCBBF2000712, OCBBF2000719, OCBBF2000831, OCBBF2000904, OCBBF2000982, OCBBF2000998, OCBBF2001075, OCBBF2001101, OCBBF2001124, OCBBF2001140, OCBBF2001166, OCBBF2001176, OCBBF2001186, OCBBF2001196, OCBBF2001252, OCBBF2001323, OCBBF2001389, OCBBF2001402, OCBBF2001408, OCBBF2001416, OCBBF2001473, OCBBF2001494, OCBBF2001527, OCBBF2001528, OCBBF2001681, OCBBF2001706, OCBBF2001749, OCBBF2001794, OCBBF2001910, OCBBF2001931, OCBBF2001961, OCBBF2002015, OCBBF2002083, OCBBF2002124, OCBBF2002161, OCBBF2002290, OCBBF2002357, OCBBF2002376, OCBBF2002615, OCBBF2002656, OCBBF2002663, OCBBF2002805, OCBBF2002865, OCBBF2002920, OCBBF2002980, OCBBF2003028, OCBBF2003052, OCBBF2003091, OCBBF2003246, OCBBF2003327, OCBBF2003543, OCBBF2003593, OCBBF2003744, OCBBF2003819, OCBBF2003925, OCBBF2004038, OCBBF2004104, OCBBF2004147, OCBBF2004168, OCBBF2004235, OCBBF2004259, OCBBF2004385, OCBBF2004418, OCBBF2004478, OCBBF2004482, OCBBF2004533, OCBBF2004567, OCBBF2004612, OCBBF2004647, OCBBF2004669, OCBBF2004757, OCBBF2004826, OCBBF2004866, OCBBF2004883, OCBBF2004889, OCBBF2004930, OCBBF2004984, OCBBF2005066, OCBBF2005077, OCBBF2005161, OCBBF2005343, OCBBF2005349, OCBBF2005373, OCBBF2005420, OCBBF2005428, OCBBF2005433, OCBBF2005476, OCBBF2005546, OCBBF2005843, OCBBF2005901, OCBBF2006030, OCBBF2006058, OCBBF2006113, OCBBF2006151, OCBBF2006154, OCBBF2006172, OCBBF2006214, OCBBF2006241, OCBBF2006313, OCBBF2006388, OCBBF2006438, OCBBF2006567, OCBBF2006624, OCBBF2006639, OCBBF2006660, OCBBF2006764, OCBBF2006859, OCBBF2006972, OCBBF2006987, OCBBF2007028, OCBBF2007039, OCBBF2007051, OCBBF2007068, OCBBF2007114, OCBBF2007121, OCBBF2007184, OCBBF2007194, OCBBF2007196, OCBBF2007224, OCBBF2007238, OCBBF2007414, OCBBF2007415, OCBBF2007428, OCBBF2007478, OCBBF2007485, OCBBF2007520, OCBBF2007555, OCBBF2007610, OCBBF2007756, OCBBF2007762, OCBBF2007892, OCBBF2007931, OCBBF2007946, OCBBF2008005, OCBBF2008041, OCBBF2008116, OCBBF2008138, OCBBF2008144, OCBBF2008283, OCBBF2008330, OCBBF2008340, OCBBF2008366, OCBBF2008466, OCBBF2008483, OCBBF2008511, OCBBF2008520, OCBBF2008569, OCBBF2008586, OCBBF2008640, OCBBF2008691, OCBBF2008701, OCBBF2008724, OCBBF2008760, OCBBF2008768, OCBBF2008770, OCBBF2008775, OCBBF2008790, OCBBF2008814, OCBBF2008822, OCBBF2009115, OCBBF2009242, OCBBF2009301, OCBBF2009352, OCBBF2009391, OCBBF2009424, OCBBF2009536, OCBBF2009571, OCBBF2009583, OCBBF2009788, OCBBF2009836, OCBBF2009920, OCBBF2009926, OCBBF2010040, OCBBF2010140, OCBBF2010281, OCBBF2010313, OCBBF2010404, OCBBF2010416, OCBBF2010420, OCBBF2010557, OCBBF2010604, OCBBF2010709, OCBBF2010792, OCBBF2010819, OCBBF2010830, OCBBF2010841, OCBBF2010843, OCBBF2010858, OCBBF2010863, OCBBF2010871, OCBBF2010931, OCBBF2010945, OCBBF2010978, OCBBF2010989, OCBBF2011021, OCBBF2011073, OCBBF2011137, OCBBF2011160, OCBBF2011177, OCBBF2011228, OCBBF2011232, OCBBF2011283, OCBBF2011311, OCBBF2011536, OCBBF2011625, OCBBF2011669, OCBBF2011685, OCBBF2011706, OCBBF2011722, OCBBF2011759, OCBBF2011767, OCBBF2011855, OCBBF2011872, OCBBF2011897, OCBBF2011914, OCBBF2011960, OCBBF2011981, OCBBF2012001, OCBBF2012028, OCBBF2012039, OCBBF2012139, OCBBF2012191, OCBBF2012262, OCBBF2012320, OCBBF2012436, OCBBF2012525, OCBBF2012553, OCBBF2012678, OCBBF2012704, OCBBF2012755, OCBBF2012812, OCBBF2012881, OCBBF2012908, OCBBF2012936, OCBBF2012990, OCBBF2013011, OCBBF2013049, OCBBF2013091, OCBBF2013123, OCBBF2013127, OCBBF2013149, OCBBF2013208, OCBBF2013285, OCBBF2013319, OCBBF2013324, OCBBF2013366, OCBBF2013481, OCBBF2013507, OCBBF2013721, OCBBF2013789, OCBBF2013843, OCBBF2013883, OCBBF2013926, OCBBF2014052, OCBBF2014064, OCBBF2014089, OCBBF2014292, OCBBF2014322, OCBBF2014386, OCBBF2014541, OCBBF2014707, OCBBF2014745, OCBBF2014828, OCBBF2014873, OCBBF2014880, OCBBF2014928, OCBBF2015031, OCBBF2015081, OCBBF2015115, OCBBF2015232, OCBBF2015233, OCBBF2015285, OCBBF2015334, OCBBF2015335, OCBBF2015506, OCBBF2015599, OCBBF2015645, OCBBF2015659, OCBBF2015751, OCBBF2015797, OCBBF2015931, OCBBF2015980, OCBBF2016038, OCBBF2016405, OCBBF2016467, OCBBF2016590, OCBBF2016591, OCBBF2016612, OCBBF2016689, OCBBF2016690, OCBBF2016729, OCBBF2016841, OCBBF2017069, OCBBF2017306, OCBBF2017325, OCBBF2017489, OCBBF2017516, OCBBF2017665, OCBBF2017815, OCBBF2017882, OCBBF2017893, OCBBF2017920, OCBBF2018014, OCBBF2018084, OCBBF2018167, OCBBF2018206, OCBBF2018229, OCBBF2018234, OCBBF2018362, OCBBF2018380, OCBBF2018563, OCBBF2018581, OCBBF2018618, OCBBF2018663, OCBBF2018687, OCBBF2018707, OCBBF2018827, OCBBF2018828, OCBBF2018934, OCBBF2019108, OCBBF2019195, OCBBF2019327, OCBBF2019684, OCBBF2019761, OCBBF2019823, OCBBF2019950, OCBBF2020048, OCBBF2020318, OCBBF2020343, OCBBF2020453, OCBBF2020741, OCBBF2020801, OCBBF2020825, OCBBF2020838, OCBBF2021020, OCBBF2021214, OCBBF2021286, OCBBF2021323, OCBBF2021518, OCBBF2021788, OCBBF2021833, OCBBF2022351, OCBBF2022573, OCBBF2022574, OCBBF2023162, OCBBF2023598, OCBBF2023643, OCBBF2024463, OCBBF2024589, OCBBF2024719, OCBBF2024779, OCBBF2024781, OCBBF2025028, OCBBF2025115, OCBBF2025198, OCBBF2025451, OCBBF2025458, OCBBF2025527, OCBBF2025631, OCBBF2025730, OCBBF2026025, OCBBF2026035, OCBBF2026144, OCBBF2026645, OCBBF2026649, OCBBF2026690, OCBBF2026981, OCBBF2027148, OCBBF2027197, OCBBF2027354, OCBBF2027423, OCBBF2027478, OCBBF2027481, OCBBF2027511, OCBBF2027661, OCBBF2027728, OCBBF2027782, OCBBF2027868, OCBBF2028055, OCBBF2028173, OCBBF2028421, OCBBF2029471, OCBBF2029901, OCBBF2030116, OCBBF2030329, OCBBF2030354, OCBBF2030517, OCBBF2030574, OCBBF2030708, OCBBF2030927, OCBBF2030963, OCBBF2031167, OCBBF2031198, OCBBF2031366, OCBBF2031561, OCBBF2032152, OCBBF2032274, OCBBF2032539, OCBBF2032590, OCBBF2032599, OCBBF2032611, OCBBF2032671, OCBBF2033295, OCBBF2033413, OCBBF2033869, OCBBF2033948, OCBBF2034333, OCBBF2034529, OCBBF2034637, OCBBF2034906, OCBBF2035110, OCBBF2035214, OCBBF2035226, OCBBF2035390, OCBBF2035564, OCBBF2035658, OCBBF2035823, OCBBF2035885, OCBBF2035916, OCBBF2036019, OCBBF2036031, OCBBF2036225, OCBBF2036476, OCBBF2036743, OCBBF2036752, OCBBF2037068, OCBBF2037340, OCBBF2037398, OCBBF2037464, OCBBF2037547, OCBBF2037598, OCBBF2037638, OCBBF2038238, OCBBF2038285, OCBBF2038317, OCBBF3000097, OCBBF3000213, OCBBF3000296, OCBBF3000372, OCBBF3000380, OCBBF3000743, OCBBF3000830, OCBBF3001076, OCBBF3001202, OCBBF3001616, OCBBF3002553, OCBBF3002600, OCBBF3002654, OCBBF3003103, OCBBF3003209, OCBBF3003592, OCBBF3003745, OCBBF3003761, OCBBF3004264, OCBBF3004314, OCBBF3004972, OCBBF3005330, OCBBF3005597, OCBBF3005843, OCBBF3006802, OCBBF3006986, OCBBF3007078, OCBBF3007704, OCBBF3008230, OCBBF3008392, OCBBF3008835, OCBBF3009192, OCBBF3009244, OCBBF3009279, SALGL1000024, SALGL1000028, SALGL1000065, SALGL1000107, SALGL1000171, SKMUS1000014, SKMUS1000030, SKMUS1000067, SKMUS1000102, SKMUS1000104, SKMUS1000110, SKMUS1000118, SKMUS1000124, SKMUS1000129, SKMUS1000176, SKMUS1000177, SKMUS2000020, SKMUS2000061, SKMUS2000074, SKMUS2000078, SKMUS2000117, SKMUS2000137, SKMUS2000198, SKMUS2000243, SKMUS2000271, SKMUS2000287, SKMUS2000317, SKMUS2000330, SKMUS2000339, SKMUS2000343, SKMUS2000365, SKMUS2000390, SKMUS2000416, SKMUS2000467, SKMUS2000468, SKMUS2000484, SKMUS2000690, SKMUS2000701, SKMUS2000705, SKMUS2000710, SKMUS2000724, SKMUS2000726, SKMUS2000757, SKMUS2000774, SKMUS2000780, SKMUS2000821, SKMUS2000847, SKMUS2000863, SKMUS2000894, SKMUS2000898, SKMUS2000902, SKMUS2000933, SKMUS2000945, SKMUS2000954, SKMUS2000961, SKMUS2000973, SKMUS2000980, SKMUS2001014, SKMUS2001164, SKMUS2001199, SKMUS2001215, SKMUS2001247, SKMUS2001254, SKMUS2001271, SKMUS2001287, SKMUS2001323, SKMUS2001364, SKMUS2001398, SKMUS2001412, SKMUS2001492, SKMUS2001501, SKMUS2001528, SKMUS2001543, SKMUS2001580, SKMUS2001585, SKMUS2001608, SKMUS2001631, SKMUS2001662, SKMUS2001663, SKMUS2001671, SKMUS2001683, SKMUS2001703, SKMUS2001740, SKMUS2001742, SKMUS2001823, SKMUS2001850, SKMUS2002077, SKMUS2002084, SKMUS2002153, SKMUS2002475, SKMUS2002602, SKMUS2002693, SKMUS2002821, SKMUS2002840, SKMUS2002920, SKMUS2003034, SKMUS2003074, SKMUS2003194, SKMUS2003744, SKMUS2004044, SKMUS2004047, SKMUS2004483, SKMUS2004897, SKMUS2004908, SKMUS2005428, SKMUS2006394, SKMUS2006481, SKMUS2007315, SKMUS2007359, SKMUS2007568, SKMUS2007740, SKMUS2007816, SKMUS2007915, SKMUS2008338, SKMUS2008407, SKMUS2008474, SKMUS2008585, SKMUS2008607, SKMUS2009190, SKMUS2009232, SKMUS2009479, SKMUS2009557, SKNMC1000110, SKNMC1000123, SKNMC1000124, SKNMC1000159, SKNMC1000229, SKNMC1000251, SKNMC1000264, SKNMC2000065, SKNMC2000224, SKNMC2000256, SKNMC2000305, SKNMC2000356, SKNMC2000374, SKNMC2000583, SKNMC2000593, SKNMC2000612, SKNMC2000622, SKNMC2001113, SKNMC2001324, SKNMC2001503, SKNMC2001555, SKNMC2001596, SKNMC2001623, SKNMC2003639, SKNMC2003924, SKNMC2003987, SKNMC2004457, SKNMC2004643, SKNMC2004651, SKNMC2005772, SKNMC2006173, SKNMC2006327, SKNMC2006998, SKNMC2007134, SKNMC2007502, SKNMC2007504, SKNMC2007961, SKNMC2009450, SKNSH1000086, SKNSH1000174, SKNSH1000301, SKNSH1000308, SKNSH1000416, SKNSH2000051, SKNSH2000101, SKNSH2000151, SKNSH2000163, SKNSH2000250, SKNSH2000319, SKNSH2000482, SKNSH2000516, SKNSH2000550, SKNSH2000716, SKNSH2000819, SKNSH2000971, SKNSH2001222, SKNSH2001875, SKNSH2001931, SKNSH2002054, SKNSH2002325, SKNSH2002866, SKNSH2003064, SKNSH2003174, SKNSH2003422, SKNSH2003466, SKNSH2003483, SKNSH2003633, SKNSH2004039, SKNSH2005061, SKNSH2005120, SKNSH2005194, SKNSH2005240, SKNSH2005792, SKNSH2005816, SKNSH2005981, SKNSH2006234, SKNSH2006304, SKNSH2006432, SKNSH2006822, SKNSH2007142, SKNSH2007149, SKNSH2007429, SKNSH2007739, SKNSH2008043, SKNSH2008969, SKNSH2009197, SKNSH2009357, SKNSH2009435, SKNSH2009991, SKNSH2010015, SMINT1000012, SMINT1000016, SMINT1000039, SMINT1000048, SMINT1000051, SMINT1000054, SMINT1000057, SMINT1000071, SMINT1000075, SMINT1000091, SMINT1000103, SMINT1000118, SMINT1000137, SMINT1000192, SMINT2000007, SMINT2000032, SMINT2000040, SMINT2000060, SMINT2000073, SMINT2000084, SMINT2000145, SMINT2000159, SMINT2000176, SMINT2000185, SMINT2000227, SMINT2000229, SMINT2000232, SMINT2000239, SMINT2000267, SMINT2000400, SMINT2000454, SMINT2000518, SMINT2000529, SMINT2000530, SMINT2000537, SMINT2000538, SMINT2000541, SMINT2000558, SMINT2000562, SMINT2000568, SMINT2000609, SMINT2000629, SMINT2000659, SMINT2000694, SMINT2000747, SMINT2000811, SMINT2000824, SMINT2000984, SMINT2001114, SMINT2001158, SMINT2001183, SMINT2001199, SMINT2001222, SMINT2001348, SMINT2001397, SMINT2001458, SMINT2001461, SMINT2001535, SMINT2001559, SMINT2001609, SMINT2001615, SMINT2001683, SMINT2001731, SMINT2001812, SMINT2001950, SMINT2002126, SMINT2002159, SMINT2002202, SMINT2002210, SMINT2002224, SMINT2002281, SMINT2002311, SMINT2002314, SMINT2002328, SMINT2002414, SMINT2002457, SMINT2002743, SMINT2002778, SMINT2002880, SMINT2002882, SMINT2002884, SMINT2002899, SMINT2002974, SMINT2003003, SMINT2003074, SMINT2003128, SMINT2003150, SMINT2003169, SMINT2003317, SMINT2003340, SMINT2003386, SMINT2003423, SMINT2003551, SMINT2003569, SMINT2003641, SMINT2003644, SMINT2003866, SMINT2003905, SMINT2004037, SMINT2004047, SMINT2004086, SMINT2004144, SMINT2004280, SMINT2004299, SMINT2004339, SMINT2004350, SMINT2004414, SMINT2004473, SMINT2004547, SMINT2004583, SMINT2004589, SMINT2004729, SMINT2004781, SMINT2004872, SMINT2004891, SMINT2004909, SMINT2004972, SMINT2004992, SMINT2005075, SMINT2005161, SMINT2005174, SMINT2005213, SMINT2005330, SMINT2005368, SMINT2005387, SMINT2005402, SMINT2005405, SMINT2005621, SMINT2005623, SMINT2005624, SMINT2005688, SMINT2005800, SMINT2005956, SMINT2006078, SMINT2006205, SMINT2006331, SMINT2006596, SMINT2006641, SMINT2006648, SMINT2006708, SMINT2006716, SMINT2006801, SMINT2007062, SMINT2007101, SMINT2007140, SMINT2007187, SMINT2007219, SMINT2007294, SMINT2007365, SMINT2007391, SMINT2007508, SMINT2007526, SMINT2007579, SMINT2007647, SMINT2007729, SMINT2007790, SMINT2007792, SMINT2007796, SMINT2007867, SMINT2007932, SMINT2008042, SMINT2008054, SMINT2008133, SMINT2008277, SMINT2008329, SMINT2008455, SMINT2008491, SMINT2008531, SMINT2008545, SMINT2008558, SMINT2008625, SMINT2008672, SMINT2008690, SMINT2008715, SMINT2008720, SMINT2008817, SMINT2008844, SMINT2008869, SMINT2009119, SMINT2009121, SMINT2009212, SMINT2009233, SMINT2009259, SMINT2009272, SMINT2009292, SMINT2009363, SMINT2009415, SMINT2009468, SMINT2009505, SMINT2009529, SMINT2009832, SMINT2009895, SMINT2009902, SMINT2009973, SMINT2010015, SMINT2010068, SMINT2010076, SMINT2010144, SMINT2010200, SMINT2010278, SMINT2010324, SMINT2010326, SMINT2010369, SMINT2010426, SMINT2010500, SMINT2010533, SMINT2010629, SMINT2010639, SMINT2010672, SMINT2010753, SMINT2010853, SMINT2010897, SMINT2010959, SMINT2010997, SMINT2011033, SMINT2011066, SMINT2011273, SMINT2011406, SMINT2011509, SMINT2011588, SMINT2011656, SMINT2011888, SMINT2011958, SMINT2012040, SMINT2012179, SMINT2012195, SMINT2012285, SMINT2012291, SMINT2012501, SMINT2012734, SMINT2012793, SMINT2013031, SMINT2013032, SMINT2013129, SMINT2013181, SMINT2013228, SMINT2013613, SMINT2013626, SMINT2013695, SMINT2013833, SMINT2013890, SMINT2014166, SMINT2014282, SMINT2014443, SMINT2014489, SMINT2014721, SMINT2015006, SMINT2015294, SMINT2015306, SMINT2015326, SMINT2015353, SMINT2015454, SMINT2015518, SMINT2015745, SMINT2015787, SMINT2015810, SMINT2016122, SMINT2016146, SMINT2016286, SMINT2016313, SMINT2016396, SMINT2016412, SMINT2016440, SMINT2016477, SMINT2016544, SMINT2016857, SMINT2017134, SMINT2017319, SMINT2017324, SMINT2017410, SMINT2017431, SMINT2017432, SMINT2017436, SMINT2017599, SMINT2017659, SMINT2017736, SMINT2017781, SMINT2017855, SMINT2017884, SMINT2017964, SMINT2017974, SMINT2018343, SMINT2018353, SMINT2018592, SMINT2019017, SMINT2019105, SMINT2019142, SMINT2019153, SMINT2019200, SPLEN1000041, SPLEN1000049, SPLEN1000056, SPLEN1000087, SPLEN1000089, SPLEN1000091, SPLEN1000106, SPLEN1000116, SPLEN1000134, SPLEN1000143, SPLEN1000144, SPLEN1000145, SPLEN1000156, SPLEN1000163, SPLEN1000165, SPLEN1000178, SPLEN2000020, SPLEN2000047, SPLEN2000064, SPLEN2000072, SPLEN2000098, SPLEN2000126, SPLEN2000134, SPLEN2000143, SPLEN2000189, SPLEN2000197, SPLEN2000205, SPLEN2000210, SPLEN2000242, SPLEN2000243, SPLEN2000247, SPLEN2000255, SPLEN2000258, SPLEN2000267, SPLEN2000270, SPLEN2000307, SPLEN2000310, SPLEN2000341, SPLEN2000350, SPLEN2000357, SPLEN2000364, SPLEN2000402, SPLEN2000414, SPLEN2000420, SPLEN2000448, SPLEN2000450, SPLEN2000464, SPLEN2000496, SPLEN2000505, SPLEN2000515, SPLEN2000516, SPLEN2000537, SPLEN2000541, SPLEN2000607, SPLEN2000630, SPLEN2000695, SPLEN2000698, SPLEN2000839, SPLEN2000874, SPLEN2001135, SPLEN2001176, SPLEN2001227, SPLEN2001245, SPLEN2001278, SPLEN2001354, SPLEN2001367, SPLEN2001383, SPLEN2001476, SPLEN2001503, SPLEN2001510, SPLEN2001599, SPLEN2001626, SPLEN2001650, SPLEN2001689, SPLEN2001710, SPLEN2001761, SPLEN2001781, SPLEN2001881, SPLEN2001912, SPLEN2001945, SPLEN2002007, SPLEN2002053, SPLEN2002133, SPLEN2002147, SPLEN2002166, SPLEN2002175, SPLEN2002223, SPLEN2002272, SPLEN2002314, SPLEN2002343, SPLEN2002354, SPLEN2002385, SPLEN2002419, SPLEN2002451, SPLEN2002462, SPLEN2002463, SPLEN2002662, SPLEN2002695, SPLEN2002707, SPLEN2002917, SPLEN2002931, SPLEN2002957, SPLEN2003160, SPLEN2003204, SPLEN2003219, SPLEN2003297, SPLEN2003396, SPLEN2003678, SPLEN2003878, SPLEN2003918, SPLEN2003924, SPLEN2004060, SPLEN2004078, SPLEN2004124, SPLEN2004148, SPLEN2004181, SPLEN2004220, SPLEN2004343, SPLEN2004346, SPLEN2004368, SPLEN2004555, SPLEN2004611, SPLEN2004662, SPLEN2004773, SPLEN2004844, SPLEN2004880, SPLEN2004984, SPLEN2005009, SPLEN2005227, SPLEN2005272, SPLEN2005342, SPLEN2005416, SPLEN2005450, SPLEN2005474, SPLEN2005560, SPLEN2005727, SPLEN2005783, SPLEN2005790, SPLEN2005806, SPLEN2005818, SPLEN2005838, SPLEN2005869, SPLEN2005927, SPLEN2005939, SPLEN2006143, SPLEN2006268, SPLEN2006283, SPLEN2006325, SPLEN2006374, SPLEN2006389, SPLEN2006425, SPLEN2006671, SPLEN2006701, SPLEN2006785, SPLEN2006875, SPLEN2007182, SPLEN2007276, SPLEN2007314, SPLEN2007326, SPLEN2007350, SPLEN2007388, SPLEN2007498, SPLEN2007619, SPLEN2007653, SPLEN2007689, SPLEN2007695, SPLEN2007879, SPLEN2007926, SPLEN2007951, SPLEN2008007, SPLEN2008135, SPLEN2008164, SPLEN2008317, SPLEN2008496, SPLEN2008591, SPLEN2008786, SPLEN2009081, SPLEN2009088, SPLEN2009163, SPLEN2009315, SPLEN2009340, SPLEN2009512, SPLEN2009513, SPLEN2009541, SPLEN2009548, SPLEN2009555, SPLEN2009581, SPLEN2009733, SPLEN2009803, SPLEN2009884, SPLEN2009918, SPLEN2009970, SPLEN2010004, SPLEN2010015, SPLEN2010112, SPLEN2010119, SPLEN2010146, SPLEN2010187, SPLEN2010350, SPLEN2010395, SPLEN2010415, SPLEN2010447, SPLEN2010469, SPLEN2010510, SPLEN2010530, SPLEN2010534, SPLEN2010588, SPLEN2010625, SPLEN2010800, SPLEN2010847, SPLEN2010862, SPLEN2010912, SPLEN2010978, SPLEN2010986, SPLEN2011018, SPLEN2011021, SPLEN2011025, SPLEN2011086, SPLEN2011139, SPLEN2011145, SPLEN2011248, SPLEN2011252, SPLEN2011422, SPLEN2011672, SPLEN2011678, SPLEN2011758, SPLEN2011805, SPLEN2011820, SPLEN2011830, SPLEN2011931, SPLEN2011981, SPLEN2012115, SPLEN2012175, SPLEN2012179, SPLEN2012185, SPLEN2012234, SPLEN2012453, SPLEN2012524, SPLEN2012525, SPLEN2012571, SPLEN2012606, SPLEN2012611, SPLEN2012619, SPLEN2012624, SPLEN2012725, SPLEN2012743, SPLEN2012756, SPLEN2012846, SPLEN2012889, SPLEN2012961, SPLEN2013108, SPLEN2013195, SPLEN2013503, SPLEN2013644, SPLEN2013648, SPLEN2013670, SPLEN2013673, SPLEN2013690, SPLEN2013714, SPLEN2013753, SPLEN2013821, SPLEN2013857, SPLEN2013860, SPLEN2013910, SPLEN2013923, SPLEN2013936, SPLEN2014041, SPLEN2014063, SPLEN2014080, SPLEN2014119, SPLEN2014136, SPLEN2014199, SPLEN2014210, SPLEN2014293, SPLEN2014318, SPLEN2014381, SPLEN2014452, SPLEN2014454, SPLEN2014486, SPLEN2014543, SPLEN2014572, SPLEN2014645, SPLEN2014669, SPLEN2014711, SPLEN2014739, SPLEN2014860, SPLEN2014865, SPLEN2014919, SPLEN2014920, SPLEN2014924, SPLEN2014937, SPLEN2014946, SPLEN2015031, SPLEN2015094, SPLEN2015121, SPLEN2015129, SPLEN2015158, SPLEN2015166, SPLEN2015216, SPLEN2015258, SPLEN2015261, SPLEN2015267, SPLEN2015276, SPLEN2015415, SPLEN2015433, SPLEN2015593, SPLEN2015674, SPLEN2015679, SPLEN2015707, SPLEN2015730, SPLEN2015746, SPLEN2015788, SPLEN2015815, SPLEN2015890, SPLEN2015891, SPLEN2015899, SPLEN2016045, SPLEN2016053, SPLEN2016069, SPLEN2016098, SPLEN2016135, SPLEN2016139, SPLEN2016241, SPLEN2016250, SPLEN2016304, SPLEN2016356, SPLEN2016421, SPLEN2016480, SPLEN2016531, SPLEN2016533, SPLEN2016541, SPLEN2016552, SPLEN2016602, SPLEN2016627, SPLEN2016678, SPLEN2016743, SPLEN2016773, SPLEN2016781, SPLEN2016840, SPLEN2016863, SPLEN2016922, SPLEN2016932, SPLEN2016972, SPLEN2016973, SPLEN2017043, SPLEN2017104, SPLEN2017121, SPLEN2017147, SPLEN2017187, SPLEN2017189, SPLEN2017212, SPLEN2017318, SPLEN2017351, SPLEN2017426, SPLEN2017452, SPLEN2017538, SPLEN2017592, SPLEN2017613, SPLEN2017620, SPLEN2017643, SPLEN2017687, SPLEN2017740, SPLEN2017781, SPLEN2017999, SPLEN2018098, SPLEN2018112, SPLEN2018159, SPLEN2018180, SPLEN2018181, SPLEN2018280, SPLEN2018285, SPLEN2018299, SPLEN2018302, SPLEN2018364, SPLEN2018395, SPLEN2018643, SPLEN2018683, SPLEN2018732, SPLEN2018749, SPLEN2018933, SPLEN2019008, SPLEN2019043, SPLEN2019092, SPLEN2019102, SPLEN2019131, SPLEN2019169, SPLEN2019257, SPLEN2019311, SPLEN2019323, SPLEN2019349, SPLEN2019375, SPLEN2019379, SPLEN2019405, SPLEN2019446, SPLEN2019471, SPLEN2019480, SPLEN2019505, SPLEN2019571, SPLEN2019575, SPLEN2019709, SPLEN2019774, SPLEN2019793, SPLEN2019811, SPLEN2019839, SPLEN2019956, SPLEN2019985, SPLEN2020007, SPLEN2020034, SPLEN2020153, SPLEN2020154, SPLEN2020166, SPLEN2020183, SPLEN2020223, SPLEN2020359, SPLEN2020417, SPLEN2020427, SPLEN2020467, SPLEN2020512, SPLEN2020608, SPLEN2020777, SPLEN2020805, SPLEN2021057, SPLEN2021122, SPLEN2021157, SPLEN2021194, SPLEN2021231, SPLEN2021273, SPLEN2021295, SPLEN2021298, SPLEN2021383, SPLEN2021417, SPLEN2021440, SPLEN2021458, SPLEN2021463, SPLEN2021560, SPLEN2021701, SPLEN2021795, SPLEN2021983, SPLEN2021991, SPLEN2022040, SPLEN2022162, SPLEN2022227, SPLEN2022522, SPLEN2022591, SPLEN2022785, SPLEN2022920, SPLEN2023024, SPLEN2023118, SPLEN2023160, SPLEN2023423, SPLEN2023710, SPLEN2023733, SPLEN2023977, SPLEN2024070, SPLEN2024127, SPLEN2024232, SPLEN2024273, SPLEN2024383, SPLEN2024489, SPLEN2024530, SPLEN2024571, SPLEN2024577, SPLEN2024617, SPLEN2024737, SPLEN2024922, SPLEN2024956, SPLEN2024990, SPLEN2025012, SPLEN2025017, SPLEN2025039, SPLEN2025219, SPLEN2025491, SPLEN2025626, SPLEN2025820, SPLEN2026144, SPLEN2026411, SPLEN2026765, SPLEN2027157, SPLEN2027395, SPLEN2027488, SPLEN2027780, SPLEN2027852, SPLEN2027868, SPLEN2027995, SPLEN2028046, SPLEN2028066, SPLEN2028138, SPLEN2028365, SPLEN2028417, SPLEN2028424, SPLEN2028593, SPLEN2028844, SPLEN2028994, SPLEN2029051, SPLEN2029176, SPLEN2029295, SPLEN2029380, SPLEN2029522, SPLEN2029683, SPLEN2029727, SPLEN2029904, SPLEN2030250, SPLEN2030335, SPLEN2030371, SPLEN2030397, SPLEN2030479, SPLEN2030495, SPLEN2030562, SPLEN2030763, SPLEN2030847, SPLEN2031004, SPLEN2031125, SPLEN2031547, SPLEN2031674, SPLEN2031724, SPLEN2031780, SPLEN2032036, SPLEN2032112, SPLEN2032154, SPLEN2032157, SPLEN2032321, SPLEN2032356, SPLEN2032677, SPLEN2032813, SPLEN2032924, SPLEN2033153, SPLEN2033333, SPLEN2033490, SPLEN2033539, SPLEN2033921, SPLEN2033996, SPLEN2034021, SPLEN2034081, SPLEN2034252, SPLEN2034448, SPLEN2034551, SPLEN2034601, SPLEN2034678, SPLEN2034781, SPLEN2034864, SPLEN2034934, SPLEN2035318, SPLEN2035615, SPLEN2036076, SPLEN2036103, SPLEN2036326, SPLEN2036475, SPLEN2036501, SPLEN2036579, SPLEN2036608, SPLEN2036702, SPLEN2036712, SPLEN2036821, SPLEN2036953, SPLEN2037077, SPLEN2037194, SPLEN2037319, SPLEN2037444, SPLEN2037580, SPLEN2037630, SPLEN2037678, SPLEN2037891, SPLEN2038055, SPLEN2038180, SPLEN2038345, SPLEN2038407, SPLEN2038473, SPLEN2039311, SPLEN2039379, SPLEN2039672, SPLEN2039697, SPLEN2039845, SPLEN2039936, SPLEN2040222, SPLEN2040237, SPLEN2040824, SPLEN2041304, SPLEN2041306, SPLEN2041310, SPLEN2041585, SPLEN2041645, SPLEN2041700, SPLEN2041720, SPLEN2041977, SPLEN2042051, SPLEN2042303, SPLEN2042521, SPLEN2042598, SPLEN2042714, STOMA1000013, STOMA1000047, STOMA1000052, STOMA1000074, STOMA1000091, STOMA1000117, STOMA1000133, STOMA1000175, STOMA1000186, STOMA1000190, STOMA1000191, STOMA2000032, STOMA2000072, STOMA2000088, STOMA2000104, STOMA2000148, STOMA2000168, STOMA2000183, STOMA2000188, STOMA2000279, STOMA2000289, STOMA2000383, STOMA2000386, STOMA2000395, STOMA2000396, STOMA2000478, STOMA2000529, STOMA2000539, STOMA2000567, STOMA2000640, STOMA2000678, STOMA2000686, STOMA2000888, STOMA2001025, STOMA2001389, STOMA2002052, STOMA2002141, STOMA2002367, STOMA2002688, STOMA2002828, STOMA2003158, STOMA2003289, STOMA2003444, STOMA2003477, STOMA2003646, STOMA2003716, STOMA2003781, STOMA2003894, STOMA2004194, STOMA2004294, STOMA2004668, STOMA2004852, STOMA2004873, STOMA2004884, STOMA2004893, STOMA2004925, STOMA2005120, STOMA2005664, STOMA2005667, STOMA2005746, STOMA2005782, STOMA2006181, STOMA2006213, STOMA2006229, STOMA2006325, STOMA2006330, STOMA2006398, STOMA2006447, STOMA2006780, STOMA2006904, STOMA2007269, STOMA2007680, STOMA2007745, STOMA2008050, STOMA2008361, STOMA2008546, STOMA2008614, STOMA2008638, STOMA2008838, STOMA2009250, STOMA2009253, STOMA2009256, STOMA2009289, SYNOV1000045, SYNOV1000049, SYNOV1000190, SYNOV1000256, SYNOV1000374, SYNOV2000152, SYNOV2000171, SYNOV2000173, SYNOV2000177, SYNOV2000178, SYNOV2000193, SYNOV2000251, SYNOV2000279, SYNOV2000291, SYNOV2000297, SYNOV2000397, SYNOV2000426, SYNOV2000601, SYNOV2000700, SYNOV2000820, SYNOV2000824, SYNOV2000923, SYNOV2001014, SYNOV2001035, SYNOV2001088, SYNOV2001111, SYNOV2001144, SYNOV2001212, SYNOV2001251, SYNOV2001300, SYNOV2001356, SYNOV2001390, SYNOV2001451, SYNOV2001457, SYNOV2001581, SYNOV2001648, SYNOV2001660, SYNOV2003326, SYNOV2005216, SYNOV2005448, SYNOV2005541, SYNOV2005673, SYNOV2005817, SYNOV2005962, SYNOV2006430, SYNOV2006620, SYNOV2007758, SYNOV2007965, SYNOV2008765, SYNOV2011233, SYNOV2012326, SYNOV2013365, SYNOV2013637, SYNOV2014157, SYNOV2014364, SYNOV2016124, SYNOV2016837, SYNOV2017055, SYNOV2017179, SYNOV2018921, SYNOV2019280, SYNOV2020085, SYNOV2020463, SYNOV2021320, SYNOV2021953, SYNOV3000184, SYNOV3000231, SYNOV3000302, SYNOV3000345, SYNOV4000249, SYNOV4000472, SYNOV4000598, SYNOV4000706, SYNOV4001224, SYNOV4001326, SYNOV4001342, SYNOV4001395, SYNOV4002001, SYNOV4002392, SYNOV4002875, SYNOV4002883, SYNOV4003174, SYNOV4003322, SYNOV4003681, SYNOV4003981, SYNOV4004184, SYNOV4004741, SYNOV4004823, SYNOV4004914, SYNOV4005256, SYNOV4005570, SYNOV4005739, SYNOV4005889, SYNOV4005981, SYNOV4005989, SYNOV4006256, SYNOV4006327, SYNOV4006542, SYNOV4007012, SYNOV4007215, SYNOV4007360, SYNOV4007430, SYNOV4007521, SYNOV4007553, SYNOV4007711, SYNOV4008245, SYNOV4008336, SYNOV4009129, SYNOV4009139, SYNOV4009298, T1ESE2000116, T1ESE2000609, T1ESE2000904, TBAES2000004, TBAES2000059, TBAES2000255, TBAES2000315, TBAES2000352, TBAES2000932, TBAES2001171, TBAES2001220, TBAES2001229, TBAES2001258, TBAES2001296, TBAES2001492, TBAES2001553, TBAES2001751, TBAES2003435, TBAES2003492, TBAES2003550, TBAES2003702, TBAES2003917, TBAES2004055, TBAES2004105, TBAES2004939, TBAES2005157, TBAES2005361, TBAES2005543, TBAES2006568, TBAES2006881, TBAES2007379, TBAES2007428, TBAES2007481, TBAES2007504, TBAES2007548, TBAES2007697, TBAES2007862, TBAES2007964, TBAES2008133, TCERX2000171, TCERX2000431, TCERX2000613, TCERX2000998, TCERX2002644, TCOLN1000037, TCOLN1000180, TCOLN2000139, TCOLN2000236, TCOLN2000641, TCOLN2001268, TCOLN2002047, TCOLN2002278, TESOP1000127, TESOP1000160, TESOP2000083, TESOP2000090, TESOP2000205, TESOP2000312, TESOP2000390, TESOP2000400, TESOP2000510, TESOP2000527, TESOP2000569, TESOP2000739, TESOP2000801, TESOP2001122, TESOP2001166, TESOP2001345, TESOP2001474, TESOP2001796, TESOP2001818, TESOP2001849, TESOP2001865, TESOP2001901, TESOP2001953, TESOP2002005, TESOP2002110, TESOP2002150, TESOP2002451, TESOP2002489, TESOP2002539, TESOP2002545, TESOP2002804, TESOP2002950, TESOP2003273, TESOP2003308, TESOP2003553, TESOP2003753, TESOP2004110, TESOP2004114, TESOP2004173, TESOP2004214, TESOP2005199, TESOP2005285, TESOP2005485, TESOP2005498, TESOP2005579, TESOP2006041, TESOP2006060, TESOP2006068, TESOP2006110, TESOP2006398, TESOP2006670, TESOP2006704, TESOP2006746, TESOP2006865, TESOP2006893, TESOP2007041, TESOP2007052, TESOP2007262, TESOP2007384, TESOP2007636, TESOP2007674, TESOP2007688, TESOP2007725, TESOP2007912, TESOP2007978, TESOP2008127, TESOP2008552, TESOP2008556, TESOP2008563, TESOP2009121, TESOP2009201, TESOP2009247, TESOP2009555, TESTI1000018, TESTI1000019, TESTI1000025, TESTI1000029, TESTI1000030, TESTI1000042, TESTI1000045, TESTI1000055, TESTI1000070, TESTI1000085, TESTI1000088, TESTI1000093, TESTI1000094, TESTI1000096, TESTI1000109, TESTI1000125, TESTI1000127, TESTI1000128, TESTI1000131, TESTI1000138, TESTI1000157, TESTI1000168, TESTI1000169, TESTI1000179, TESTI1000183, TESTI1000191, TESTI1000257, TESTI1000266, TESTI1000319, TESTI1000330, TESTI1000348, TESTI1000390, TESTI1000391, TESTI1000459, TESTI1000491, TESTI1000545, TESTI2000018, TESTI2000044, TESTI2000100, TESTI2000117, TESTI2000120, TESTI2000147, TESTI2000154, TESTI2000177, TESTI2000179, TESTI2000207, TESTI2000208, TESTI2000221, TESTI2000238, TESTI2000253, TESTI2000272, TESTI2000278, TESTI2000356, TESTI2000358, TESTI2000372, TESTI2000427, TESTI2000431, TESTI2000443, TESTI2000452, TESTI2000462, TESTI2000489, TESTI2000520, TESTI2000571, TESTI2000591, TESTI2000598, TESTI2000600, TESTI2000616, TESTI2000627, TESTI2000644, TESTI2000671, TESTI2000683, TESTI2000689, TESTI2000695, TESTI2000699, TESTI2000707, TESTI2000745, TESTI2000756, TESTI2000762, TESTI2000808, TESTI2000819, TESTI2000830, TESTI2000840, TESTI2000849, TESTI2000850, TESTI2000874, TESTI2000883, TESTI2000909, TESTI2000951, TESTI2000970, TESTI2000981, TESTI2001008, TESTI2001049, TESTI2001082, TESTI2001134, TESTI2001141, TESTI2001180, TESTI2001208, TESTI2001229, TESTI2001236, TESTI2001237, TESTI2001306, TESTI2001313, TESTI2001330, TESTI2001339, TESTI2001345, TESTI2001352, TESTI2001364, TESTI2001412, TESTI2001420, TESTI2001498, TESTI2001511, TESTI2001512, TESTI2001518, TESTI2001556, TESTI2001593, TESTI2001613, TESTI2001621, TESTI2001661, TESTI2001665, TESTI2001671, TESTI2001697, TESTI2001725, TESTI2001758, TESTI2001766, TESTI2001792, TESTI2001793, TESTI2001795, TESTI2001812, TESTI2001815, TESTI2001823, TESTI2001826, TESTI2001827, TESTI2001852, TESTI2001862, TESTI2001869, TESTI2001879, TESTI2001894, TESTI2001898, TESTI2001915, TESTI2001950, TESTI2001959, TESTI2001968, TESTI2001985, TESTI2001991, TESTI2002002, TESTI2002012, TESTI2002036, TESTI2002048, TESTI2002057, TESTI2002081, TESTI2002090, TESTI2002105, TESTI2002149, TESTI2002216, TESTI2002223, TESTI2002245, TESTI2002251, TESTI2002256, TESTI2002264, TESTI2002282, TESTI2002293, TESTI2002294, TESTI2002326, TESTI2002351, TESTI2002361, TESTI2002369, TESTI2002406, TESTI2002415, TESTI2002423, TESTI2002453, TESTI2002461, TESTI2002465, TESTI2002467, TESTI2002498, TESTI2002516, TESTI2002544, TESTI2002578, TESTI2002580, TESTI2002618, TESTI2002632, TESTI2002676, TESTI2002690, TESTI2002696, TESTI2002698, TESTI2002700, TESTI2002707, TESTI2002724, TESTI2002729, TESTI2002752, TESTI2002753, TESTI2002789, TESTI2002802, TESTI2002806, TESTI2002840, TESTI2002866, TESTI2002877, TESTI2002910, TESTI2002912, TESTI2002928, TESTI2002937, TESTI2002965, TESTI2002993, TESTI2003020, TESTI2003031, TESTI2003037, TESTI2003044, TESTI2003059, TESTI2003061, TESTI2003071, TESTI2003074, TESTI2003089, TESTI2003104, TESTI2003109, TESTI2003117, TESTI2003127, TESTI2003130, TESTI2003131, TESTI2003139, TESTI2003141, TESTI2003152, TESTI2003181, TESTI2003193, TESTI2003196, TESTI2003228, TESTI2003236, TESTI2003255, TESTI2003258, TESTI2003277, TESTI2003280, TESTI2003299, TESTI2003311, TESTI2003321, TESTI2003325, TESTI2003327, TESTI2003330, TESTI2003347, TESTI2003354, TESTI2003356, TESTI2003372, TESTI2003376, TESTI2003418, TESTI2003419, TESTI2003432, TESTI2003454, TESTI2003475, TESTI2003476, TESTI2003498, TESTI2003512, TESTI2003541, TESTI2003545, TESTI2003551, TESTI2003574, TESTI2003579, TESTI2003580, TESTI2003589, TESTI2003596, TESTI2003598, TESTI2003615, TESTI2003625, TESTI2003638, TESTI2003649, TESTI2003692, TESTI2003718, TESTI2003727, TESTI2003756, TESTI2003768, TESTI2003781, TESTI2003787, TESTI2003824, TESTI2003827, TESTI2003894, TESTI2003911, TESTI2003914, TESTI2003940, TESTI2003962, TESTI2003998, TESTI2004000, TESTI2004073, TESTI2004080, TESTI2004085, TESTI2004089, TESTI2004111, TESTI2004119, TESTI2004122, TESTI2004163, TESTI2004169, TESTI2004207, TESTI2004215, TESTI2004227, TESTI2004229, TESTI2004243, TESTI2004255, TESTI2004287, TESTI2004295, TESTI2004313, TESTI2004318, TESTI2004322, TESTI2004391, TESTI2004399, TESTI2004423, TESTI2004432, TESTI2004452, TESTI2004459, TESTI2004490, TESTI2004539, TESTI2004552, TESTI2004560, TESTI2004574, TESTI2004601, TESTI2004611, TESTI2004649, TESTI2004654, TESTI2004675, TESTI2004687, TESTI2004689, TESTI2004700, TESTI2004706, TESTI2004712, TESTI2004734, TESTI2004737, TESTI2004783, TESTI2004791, TESTI2004793, TESTI2004860, TESTI2004906, TESTI2004920, TESTI2004936, TESTI2004941, TESTI2004971, TESTI2004982, TESTI2004993, TESTI2004994, TESTI2004999, TESTI2005017, TESTI2005025, TESTI2005040, TESTI2005060, TESTI2005072, TESTI2005085, TESTI2005112, TESTI2005120, TESTI2005153, TESTI2005155, TESTI2005173, TESTI2005267, TESTI2005268, TESTI2005280, TESTI2005307, TESTI2005326, TESTI2005363, TESTI2005376, TESTI2005378, TESTI2005380, TESTI2005391, TESTI2005395, TESTI2005396, TESTI2005415, TESTI2005470, TESTI2005492, TESTI2005568, TESTI2005584, TESTI2005588, TESTI2005590, TESTI2005603, TESTI2005609, TESTI2005610, TESTI2005630, TESTI2005672, TESTI2005683, TESTI2005690, TESTI2005692, TESTI2005703, TESTI2005720, TESTI2005731, TESTI2005739, TESTI2005742, TESTI2005743, TESTI2005759, TESTI2005767, TESTI2005775, TESTI2005827, TESTI2005835, TESTI2005860, TESTI2005892, TESTI2005908, TESTI2005911, TESTI2005933, TESTI2005937, TESTI2005948, TESTI2005979, TESTI2005981, TESTI2005982, TESTI2005984, TESTI2005986, TESTI2005987, TESTI2006007, TESTI2006008, TESTI2006015, TESTI2006016, TESTI2006035, TESTI2006040, TESTI2006041, TESTI2006045, TESTI2006067, TESTI2006083, TESTI2006097, TESTI2006109, TESTI2006111, TESTI2006120, TESTI2006125, TESTI2006179, TESTI2006209, TESTI2006210, TESTI2006212, TESTI2006218, TESTI2006238, TESTI2006255, TESTI2006258, TESTI2006278, TESTI2006333, TESTI2006341, TESTI2006360, TESTI2006383, TESTI2006409, TESTI2006425, TESTI2006437, TESTI2006457, TESTI2006460, TESTI2006465, TESTI2006483, TESTI2006499, TESTI2006523, TESTI2006543, TESTI2006565, TESTI2006572, TESTI2006615, TESTI2006617, TESTI2006624, TESTI2006643, TESTI2006648, TESTI2006659, TESTI2006660, TESTI2006665, TESTI2006667, TESTI2006677, TESTI2006720, TESTI2006735, TESTI2006744, TESTI2006774, TESTI2006853, TESTI2006866, TESTI2006872, TESTI2006877, TESTI2006879, TESTI2006894, TESTI2006940, TESTI2006955, TESTI2006978, TESTI2006979, TESTI2006990, TESTI2007040, TESTI2007074, TESTI2007078, TESTI2007113, TESTI2007152, TESTI2007163, TESTI2007183, TESTI2007211, TESTI2007220, TESTI2007234, TESTI2007311, TESTI2007320, TESTI2007346, TESTI2007358, TESTI2007402, TESTI2007405, TESTI2007422, TESTI2007452, TESTI2007464, TESTI2007466, TESTI2007480, TESTI2007490, TESTI2007502, TESTI2007524, TESTI2007533, TESTI2007576, TESTI2007613, TESTI2007657, TESTI2007685, TESTI2007692, TESTI2007749, TESTI2007750, TESTI2007808, TESTI2007814, TESTI2007829, TESTI2007864, TESTI2007867, TESTI2007872, TESTI2007906, TESTI2007922, TESTI2007951, TESTI2007972, TESTI2007973, TESTI2008014, TESTI2008020, TESTI2008032, TESTI2008033, TESTI2008046, TESTI2008081, TESTI2008099, TESTI2008139, TESTI2008144, TESTI2008161, TESTI2008189, TESTI2008204, TESTI2008219, TESTI2008233, TESTI2008234, TESTI2008237, TESTI2008320, TESTI2008331, TESTI2008343, TESTI2008387, TESTI2008389, TESTI2008394, TESTI2008405, TESTI2008420, TESTI2008425, TESTI2008440, TESTI2008567, TESTI2008595, TESTI2008636, TESTI2008657, TESTI2008684, TESTI2008699, TESTI2008715, TESTI2008762, TESTI2008774, TESTI2008786, TESTI2008822, TESTI2008835, TESTI2008840, TESTI2008847, TESTI2008884, TESTI2008901, TESTI2008929, TESTI2008946, TESTI2008960, TESTI2009018, TESTI2009091, TESTI2009097, TESTI2009136, TESTI2009185, TESTI2009190, TESTI2009217, TESTI2009239, TESTI2009325, TESTI2009388, TESTI2009390, TESTI2009400, TESTI2009402, TESTI2009412, TESTI2009423, TESTI2009447, TESTI2009462, TESTI2009477, TESTI2009497, TESTI2009502, TESTI2009511, TESTI2009544, TESTI2009545, TESTI2009551, TESTI2009585, TESTI2009588, TESTI2009683, TESTI2009727, TESTI2009739, TESTI2009812, TESTI2009835, TESTI2009853, TESTI2009935, TESTI2009977, TESTI2009987, TESTI2010009, TESTI2010154, TESTI2010180, TESTI2010239, TESTI2010280, TESTI2010354, TESTI2010396, TESTI2010400, TESTI2010409, TESTI2010572, TESTI2010587, TESTI2010591, TESTI2010617, TESTI2010682, TESTI2010724, TESTI2010732, TESTI2010734, TESTI2010755, TESTI2010793, TESTI2010806, TESTI2010833, TESTI2010872, TESTI2011009, TESTI2011020, TESTI2011028, TESTI2011033, TESTI2011254, TESTI2011286, TESTI2011294, TESTI2011314, TESTI2011315, TESTI2011394, TESTI2011407, TESTI2011448, TESTI2011480, TESTI2011549, TESTI2011575, TESTI2011605, TESTI2011612, TESTI2011665, TESTI2011680, TESTI2011683, TESTI2011712, TESTI2011750, TESTI2011840, TESTI2011846, TESTI2011915, TESTI2011928, TESTI2011971, TESTI2012019, TESTI2012050, TESTI2012090, TESTI2012095, TESTI2012104, TESTI2012152, TESTI2012171, TESTI2012207, TESTI2012231, TESTI2012244, TESTI2012308, TESTI2012356, TESTI2012387, TESTI2012394, TESTI2012444, TESTI2012511, TESTI2012528, TESTI2012544, TESTI2012550, TESTI2012571, TESTI2012592, TESTI2012617, TESTI2012628, TESTI2012812, TESTI2012834, TESTI2012835, TESTI2012861, TESTI2012900, TESTI2012915, TESTI2012922, TESTI2013001, TESTI2013012, TESTI2013053, TESTI2013144, TESTI2013163, TESTI2013169, TESTI2013212, TESTI2013257, TESTI2013264, TESTI2013268, TESTI2013295, TESTI2013322, TESTI2013381, TESTI2013382, TESTI2013401, TESTI2013427, TESTI2013468, TESTI2013497, TESTI2013545, TESTI2013546, TESTI2013566, TESTI2013601, TESTI2013604, TESTI2013607, TESTI2013610, TESTI2013691, TESTI2013699, TESTI2013737, TESTI2013767, TESTI2013832, TESTI2013873, TESTI2013889, TESTI2014007, TESTI2014036, TESTI2014097, TESTI2014160, TESTI2014248, TESTI2014254, TESTI2014269, TESTI2014274, TESTI2014318, TESTI2014324, TESTI2014339, TESTI2014362, TESTI2014385, TESTI2014415, TESTI2014439, TESTI2014474, TESTI2014505, TESTI2014577, TESTI2014578, TESTI2014716, TESTI2014780, TESTI2014800, TESTI2014838, TESTI2014843, TESTI2014979, TESTI2014988, TESTI2015042, TESTI2015105, TESTI2015180, TESTI2015246, TESTI2015249, TESTI2015327, TESTI2015331, TESTI2015335, TESTI2015350, TESTI2015375, TESTI2015437, TESTI2015590, TESTI2015610, TESTI2015647, TESTI2015675, TESTI2015710, TESTI2015752, TESTI2015830, TESTI2015914, TESTI2015938, TESTI2015947, TESTI2015962, TESTI2015987, TESTI2016033, TESTI2016046, TESTI2016162, TESTI2016197, TESTI2016278, TESTI2016298, TESTI2016331, TESTI2016337, TESTI2016410, TESTI2016421, TESTI2016509, TESTI2016568, TESTI2016583, TESTI2016599, TESTI2016629, TESTI2016663, TESTI2016667, TESTI2016688, TESTI2016701, TESTI2016758, TESTI2016848, TESTI2016863, TESTI2016888, TESTI2016896, TESTI2016922, TESTI2016942, TESTI2016950, TESTI2016996, TESTI2017017, TESTI2017028, TESTI2017035, TESTI2017069, TESTI2017089, TESTI2017102, TESTI2017107, TESTI2017113, TESTI2017125, TESTI2017256, TESTI2017305, TESTI2017311, TESTI2017396, TESTI2017507, TESTI2017537, TESTI2017582, TESTI2017584, TESTI2017645, TESTI2017727, TESTI2017740, TESTI2017775, TESTI2017816, TESTI2017832, TESTI2017923, TESTI2017932, TESTI2017951, TESTI2018014, TESTI2018031, TESTI2018035, TESTI2018060, TESTI2018083, TESTI2018178, TESTI2018221, TESTI2018276, TESTI2018290, TESTI2018335, TESTI2018337, TESTI2018368, TESTI2018421, TESTI2018428, TESTI2018475, TESTI2018482, TESTI2018521, TESTI2018565, TESTI2018581, TESTI2018611, TESTI2018687, TESTI2018697, TESTI2018838, TESTI2018867, TESTI2018941, TESTI2018957, TESTI2018974, TESTI2018975, TESTI2018997, TESTI2019042, TESTI2019077, TESTI2019228, TESTI2019257, TESTI2019280, TESTI2019282, TESTI2019308, TESTI2019336, TESTI2019352, TESTI2019406, TESTI2019430, TESTI2019455, TESTI2019481, TESTI2019488, TESTI2019501, TESTI2019648, TESTI2019669, TESTI2019697, TESTI2019729, TESTI2019760, TESTI2019787, TESTI2019794, TESTI2019854, TESTI2019859, TESTI2019860, TESTI2019872, TESTI2019911, TESTI2019917, TESTI2019975, TESTI2019998, TESTI2020012, TESTI2020026, TESTI2020029, TESTI2020071, TESTI2020084, TESTI2020265, TESTI2020283, TESTI2020316, TESTI2020344, TESTI2020379, TESTI2020426, TESTI2020445, TESTI2020515, TESTI2020525, TESTI2020579, TESTI2020717, TESTI2020840, TESTI2020871, TESTI2020905, TESTI2020906, TESTI2020956, TESTI2020981, TESTI2020999, TESTI2021003, TESTI2021038, TESTI2021057, TESTI2021077, TESTI2021112, TESTI2021114, TESTI2021116, TESTI2021118, TESTI2021122, TESTI2021124, TESTI2021138, TESTI2021358, TESTI2021447, TESTI2021463, TESTI2021531, TESTI2021599, TESTI2021637, TESTI2021654, TESTI2021667, TESTI2021736, TESTI2021785, TESTI2021819, TESTI2021851, TESTI2021895, TESTI2021911, TESTI2021939, TESTI2021999, TESTI2022010, TESTI2022023, TESTI2022065, TESTI2022086, TESTI2022179, TESTI2022203, TESTI2022246, TESTI2022323, TESTI2022338, TESTI2022400, TESTI2022462, TESTI2022495, TESTI2022623, TESTI2022649, TESTI2022652, TESTI2022738, TESTI2022798, TESTI2022812, TESTI2022814, TESTI2022874, TESTI2022940, TESTI2022952, TESTI2023025, TESTI2023053, TESTI2023085, TESTI2023192, TESTI2023194, TESTI2023214, TESTI2023254, TESTI2023386, TESTI2023414, TESTI2023427, TESTI2023436, TESTI2023599, TESTI2023752, TESTI2023800, TESTI2023861, TESTI2023903, TESTI2023942, TESTI2023947, TESTI2023951, TESTI2023968, TESTI2024009, TESTI2024125, TESTI2024153, TESTI2024192, TESTI2024267, TESTI2024283, TESTI2024299, TESTI2024419, TESTI2024422, TESTI2024443, TESTI2024446, TESTI2024473, TESTI2024476, TESTI2024498, TESTI2024560, TESTI2024567, TESTI2024586, TESTI2024598, TESTI2024641, TESTI2024648, TESTI2024718, TESTI2024744, TESTI2024864, TESTI2024885, TESTI2024936, TESTI2024978, TESTI2024999, TESTI2025006, TESTI2025013, TESTI2025022, TESTI2025063, TESTI2025117, TESTI2025144, TESTI2025161, TESTI2025174, TESTI2025229, TESTI2025269, TESTI2025365, TESTI2025403, TESTI2025409, TESTI2025422, TESTI2025448, TESTI2025454, TESTI2025486, TESTI2025582, TESTI2025609, TESTI2025656, TESTI2025757, TESTI2025791, TESTI2025846, TESTI2025872, TESTI2025879, TESTI2025911, TESTI2025920, TESTI2025924, TESTI2026014, TESTI2026064, TESTI2026077, TESTI2026104, TESTI2026116, TESTI2026134, TESTI2026168, TESTI2026196, TESTI2026215, TESTI2026218, TESTI2026233, TESTI2026291, TESTI2026294, TESTI2026401, TESTI2026403, TESTI2026453, TESTI2026461, TESTI2026491, TESTI2026505, TESTI2026515, TESTI2026525, TESTI2026534, TESTI2026537, TESTI2026589, TESTI2026597, TESTI2026605, TESTI2026647, TESTI2026674, TESTI2026794, TESTI2026824, TESTI2026854, TESTI2026925, TESTI2026936, TESTI2026957, TESTI2027013, TESTI2027019, TESTI2027108, TESTI2027165, TESTI2027171, TESTI2027173, TESTI2027179, TESTI2027185, TESTI2027206, TESTI2027238, TESTI2027239, TESTI2027243, TESTI2027271, TESTI2027296, TESTI2027378, TESTI2027411, TESTI2027450, TESTI2027496, TESTI2027503, TESTI2027562, TESTI2027615, TESTI2027645, TESTI2027730, TESTI2027736, TESTI2027791, TESTI2027820, TESTI2027828, TESTI2027840, TESTI2027909, TESTI2028098, TESTI2028151, TESTI2028242, TESTI2028253, TESTI2028254, TESTI2028269, TESTI2028290, TESTI2028296, TESTI2028384, TESTI2028426, TESTI2028488, TESTI2028523, TESTI2028583, TESTI2028613, TESTI2028659, TESTI2028662, TESTI2028670, TESTI2028705, TESTI2028776, TESTI2028811, TESTI2028891, TESTI2028985, TESTI2028997, TESTI2029131, TESTI2029162, TESTI2029196, TESTI2029201, TESTI2029227, TESTI2029244, TESTI2029249, TESTI2029252, TESTI2029259, TESTI2029264, TESTI2029470, TESTI2029672, TESTI2029785, TESTI2029880, TESTI2030136, TESTI2030322, TESTI2030336, TESTI2030342, TESTI2030519, TESTI2030554, TESTI2030556, TESTI2030728, TESTI2030754, TESTI2030770, TESTI2030860, TESTI2030901, TESTI2030917, TESTI2030930, TESTI2031006, TESTI2031007, TESTI2031060, TESTI2031129, TESTI2031356, TESTI2031418, TESTI2031504, TESTI2031529, TESTI2031687, TESTI2031760, TESTI2031809, TESTI2031919, TESTI2031935, TESTI2031986, TESTI2032044, TESTI2032067, TESTI2032079, TESTI2032681, TESTI2032761, TESTI2032768, TESTI2032774, TESTI2032828, TESTI2033031, TESTI2033242, TESTI2033254, TESTI2033300, TESTI2033395, TESTI2033453, TESTI2033505, TESTI2033520, TESTI2033641, TESTI2033710, TESTI2033905, TESTI2034187, TESTI2034243, TESTI2034307, TESTI2034357, TESTI2034401, TESTI2034407, TESTI2034506, TESTI2034520, TESTI2034718, TESTI2034730, TESTI2034749, TESTI2034767, TESTI2034774, TESTI2034777, TESTI2034785, TESTI2034799, TESTI2034847, TESTI2034913, TESTI2034916, TESTI2034931, TESTI2034953, TESTI2034997, TESTI2035003, TESTI2035078, TESTI2035084, TESTI2035107, TESTI2035121, TESTI2035124, TESTI2035183, TESTI2035236, TESTI2035262, TESTI2035309, TESTI2035688, TESTI2035775, TESTI2035793, TESTI2035898, TESTI2035962, TESTI2035981, TESTI2035997, TESTI2036114, TESTI2036129, TESTI2036285, TESTI2036288, TESTI2036513, TESTI2036589, TESTI2036650, TESTI2036684, TESTI2036691, TESTI2036736, TESTI2036822, TESTI2036833, TESTI2036913, TESTI2036922, TESTI2036951, TESTI2036965, TESTI2036969, TESTI2037002, TESTI2037055, TESTI2037081, TESTI2037085, TESTI2037103, TESTI2037106, TESTI2037111, TESTI2037209, TESTI2037255, TESTI2037359, TESTI2037375, TESTI2037382, TESTI2037534, TESTI2037569, TESTI2037572, TESTI2037643, TESTI2037657, TESTI2037673, TESTI2037723, TESTI2037819, TESTI2037830, TESTI2037845, TESTI2037877, TESTI2037976, TESTI2038048, TESTI2038065, TESTI2038104, TESTI2038275, TESTI2038388, TESTI2038573, TESTI2038596, TESTI2038623, TESTI2038644, TESTI2038733, TESTI2038858, TESTI2038958, TESTI2039025, TESTI2039026, TESTI2039038, TESTI2039041, TESTI2039060, TESTI2039113, TESTI2039121, TESTI2039177, TESTI2039209, TESTI2039225, TESTI2039227, TESTI2039276, TESTI2039342, TESTI2039353, TESTI2039544, TESTI2039613, TESTI2039707, TESTI2039732, TESTI2039738, TESTI2039776, TESTI2039867, TESTI2039908, TESTI2040018, TESTI2040094, TESTI2040102, TESTI2040128, TESTI2040143, TESTI2040297, TESTI2040372, TESTI2040377, TESTI2040424, TESTI2040642, TESTI2040815, TESTI2040897, TESTI2040944, TESTI2040964, TESTI2040983, TESTI2040989, TESTI2041330, TESTI2041362, TESTI2041517, TESTI2041564, TESTI2041664, TESTI2041730, TESTI2041734, TESTI2041778, TESTI2041800, TESTI2041947, TESTI2041956, TESTI2041976, TESTI2042062, TESTI2042149, TESTI2042264, TESTI2042295, TESTI2042302, TESTI2042326, TESTI2042400, TESTI2042450, TESTI2042473, TESTI2042507, TESTI2042508, TESTI2042750, TESTI2042783, TESTI2042806, TESTI2042928, TESTI2042946, TESTI2042958, TESTI2043275, TESTI2043277, TESTI2043282, TESTI2043313, TESTI2043477, TESTI2043585, TESTI2043758, TESTI2043817, TESTI2043857, TESTI2043866, TESTI2043869, TESTI2044064, TESTI2044118, TESTI2044194, TESTI2044306, TESTI2044309, TESTI2044413, TESTI2044418, TESTI2044754, TESTI2044788, TESTI2044796, TESTI2044833, TESTI2044892, TESTI2044920, TESTI2044968, TESTI2045139, TESTI2045155, TESTI2045171, TESTI2045199, TESTI2045353, TESTI2045509, TESTI2045562, TESTI2045611, TESTI2045819, TESTI2045850, TESTI2045920, TESTI2045964, TESTI2045983, TESTI2046100, TESTI2046188, TESTI2046347, TESTI2046352, TESTI2046358, TESTI2046439, TESTI2046535, TESTI2046536, TESTI2046552, TESTI2046569, TESTI2046686, TESTI2046732, TESTI2046786, TESTI2046797, TESTI2046863, TESTI2046872, TESTI2047071, TESTI2047141, TESTI2047147, TESTI2047153, TESTI2047212, TESTI2047342, TESTI2047383, TESTI2047605, TESTI2047792, TESTI2047801, TESTI2047818, TESTI2047824, TESTI2047885, TESTI2047930, TESTI2048105, TESTI2048109, TESTI2048465, TESTI2048603, TESTI2048898, TESTI2049041, TESTI2049062, TESTI2049206, TESTI2049246, TESTI2049277, TESTI2049422, TESTI2049452, TESTI2049469, TESTI2049553, TESTI2049576, TESTI2049857, TESTI2049956, TESTI2050137, TESTI2050681, TESTI2050780, TESTI2050987, TESTI2051148, TESTI2051177, TESTI2051279, TESTI2051488, TESTI2051543, TESTI2051627, TESTI2051742, TESTI2051767, TESTI2051791, TESTI2051806, TESTI2051867, TESTI2051873, TESTI2052110, TESTI2052202, TESTI2052211, TESTI2052256, TESTI2052288, TESTI2052525, TESTI2052670, TESTI2052693, TESTI2052698, TESTI2052799, TESTI2052822, TESTI2052985, TESTI2053151, TESTI2053242, TESTI2053399, TESTI2053526, TESTI2053561, TESTI2053621, TESTI2053667, TESTI3000002, TESTI3000005, TESTI4000068, TESTI4000079, TESTI4000093, TESTI4000134, TESTI4000137, TESTI4000153, TESTI4000155, TESTI4000157, TESTI4000183, TESTI4000214, TESTI4000215, TESTI4000228, TESTI4000250, TESTI4000288, TESTI4000319, TESTI4000349, TESTI4000370, TESTI4000394, TESTI4000434, TESTI4000462, TESTI4000530, TESTI4000534, TESTI4000598, TESTI4000600, TESTI4000621, TESTI4000703, TESTI4000724, TESTI4000957, TESTI4000970, TESTI4001036, TESTI4001037, TESTI4001060, TESTI4001106, TESTI4001148, TESTI4001176, TESTI4001195, TESTI4001201, TESTI4001206, TESTI4001348, TESTI4001441, TESTI4001473, TESTI4001517, TESTI4001527, TESTI4001561, TESTI4001569, TESTI4001604, TESTI4001665, TESTI4001679, TESTI4001795, TESTI4001923, TESTI4001925, TESTI4001984, TESTI4002003, TESTI4002141, TESTI4002195, TESTI4002290, TESTI4002319, TESTI4002491, TESTI4002520, TESTI4002552, TESTI4002647, TESTI4002703, TESTI4002754, TESTI4002868, TESTI4002878, TESTI4002889, TESTI4002988, TESTI4003150, TESTI4003179, TESTI4003279, TESTI4003319, TESTI4003404, TESTI4003565, TESTI4003574, TESTI4003579, TESTI4003602, TESTI4003703, TESTI4003733, TESTI4003796, TESTI4003944, TESTI4004003, TESTI4004031, TESTI4004200, TESTI4004210, TESTI4004539, TESTI4004626, TESTI4004653, TESTI4004695, TESTI4004722, TESTI4004887, TESTI4004917, TESTI4005015, TESTI4005039, TESTI4005133, TESTI4005158, TESTI4005317, TESTI4005322, TESTI4005399, TESTI4005470, TESTI4005500, TESTI4005534, TESTI4005543, TESTI4005628, TESTI4005801, TESTI4005805, TESTI4005857, TESTI4005961, TESTI4006053, TESTI4006079, TESTI4006112, TESTI4006137, TESTI4006148, TESTI4006219, TESTI4006234, TESTI4006308, TESTI4006326, TESTI4006393, TESTI4006407, TESTI4006412, TESTI4006420, TESTI4006441, TESTI4006473, TESTI4006539, TESTI4006546, TESTI4006567, TESTI4006704, TESTI4006728, TESTI4006802, TESTI4006819, TESTI4007064, TESTI4007163, TESTI4007176, TESTI4007203, TESTI4007239, TESTI4007369, TESTI4007373, TESTI4007382, TESTI4007404, TESTI4007489, TESTI4007565, TESTI4007671, TESTI4007775, TESTI4007778, TESTI4007799, TESTI4007810, TESTI4007816, TESTI4007965, TESTI4008007, TESTI4008018, TESTI4008050, TESTI4008058, TESTI4008086, TESTI4008097, TESTI4008176, TESTI4008209, TESTI4008219, TESTI4008250, TESTI4008302, TESTI4008305, TESTI4008401, TESTI4008417, TESTI4008429, TESTI4008573, TESTI4008797, TESTI4008816, TESTI4008840, TESTI4008935, TESTI4008993, TESTI4009022, TESTI4009028, TESTI4009034, TESTI4009123, TESTI4009160, TESTI4009215, TESTI4009283, TESTI4009306, TESTI4009374, TESTI4009406, TESTI4009454, TESTI4009457, TESTI4009501, TESTI4009563, TESTI4009608, TESTI4009638, TESTI4009752, TESTI4009881, TESTI4009886, TESTI4009928, TESTI4010076, TESTI4010082, TESTI4010095, TESTI4010211, TESTI4010377, TESTI4010475, TESTI4010544, TESTI4010713, TESTI4010721, TESTI4010789, TESTI4010817, TESTI4010831, TESTI4010902, TESTI4010928, TESTI4010979, TESTI4011070, TESTI4011072, TESTI4011084, TESTI4011118, TESTI4011246, TESTI4011484, TESTI4011505, TESTI4011532, TESTI4011616, TESTI4011744, TESTI4011745, TESTI4011829, TESTI4011926, TESTI4011956, TESTI4012010, TESTI4012086, TESTI4012258, TESTI4012293, TESTI4012329, TESTI4012382, TESTI4012406, TESTI4012448, TESTI4012451, TESTI4012505, TESTI4012556, TESTI4012623, TESTI4012646, TESTI4012679, TESTI4012911, TESTI4012956, TESTI4012960, TESTI4013365, TESTI4013369, TESTI4013410, TESTI4013602, TESTI4013667, TESTI4013675, TESTI4013685, TESTI4013735, TESTI4013742, TESTI4013774, TESTI4013817, TESTI4013830, TESTI4013852, TESTI4013894, TESTI4013924, TESTI4013960, TESTI4013962, TESTI4014159, TESTI4014175, TESTI4014265, TESTI4014276, TESTI4014306, TESTI4014392, TESTI4014415, TESTI4014445, TESTI4014553, TESTI4014661, TESTI4014694, TESTI4014801, TESTI4014818, TESTI4014891, TESTI4014908, TESTI4014924, TESTI4014932, TESTI4014977, TESTI4015012, TESTI4015129, TESTI4015145, TESTI4015204, TESTI4015263, TESTI4015293, TESTI4015299, TESTI4015339, TESTI4015398, TESTI4015442, TESTI4015471, TESTI4015477, TESTI4015600, TESTI4015646, TESTI4015681, TESTI4015688, TESTI4015790, TESTI4016110, TESTI4016238, TESTI4016551, TESTI4016812, TESTI4016822, TESTI4016865, TESTI4016882, TESTI4016925, TESTI4017001, TESTI4017116, TESTI4017137, TESTI4017229, TESTI4017254, TESTI4017269, TESTI4017380, TESTI4017382, TESTI4017543, TESTI4017575, TESTI4017647, TESTI4017714, TESTI4017763, TESTI4017848, TESTI4017854, TESTI4017901, TESTI4017961, TESTI4017984, TESTI4018101, TESTI4018152, TESTI4018208, TESTI4018382, TESTI4018506, TESTI4018555, TESTI4018751, TESTI4018806, TESTI4018835, TESTI4018859, TESTI4018881, TESTI4018886, TESTI4018938, TESTI4019140, TESTI4019149, TESTI4019299, TESTI4019417, TESTI4019440, TESTI4019566, TESTI4019657, TESTI4019756, TESTI4019843, TESTI4020092, TESTI4020102, TESTI4020342, TESTI4020460, TESTI4020596, TESTI4020806, TESTI4020819, TESTI4020920, TESTI4021129, TESTI4021197, TESTI4021294, TESTI4021377, TESTI4021456, TESTI4021491, TESTI4021569, TESTI4021713, TESTI4021821, TESTI4022158, TESTI4022577, TESTI4022716, TESTI4022873, TESTI4023096, TESTI4023172, TESTI4023546, TESTI4023555, TESTI4023654, TESTI4023722, TESTI4023762, TESTI4023942, TESTI4024096, TESTI4024240, TESTI4024245, TESTI4024294, TESTI4024344, TESTI4024387, TESTI4024420, TESTI4024494, TESTI4024740, TESTI4024874, TESTI4024890, TESTI4024907, TESTI4024930, TESTI4025062, TESTI4025268, TESTI4025401, TESTI4025494, TESTI4025547, TESTI4025731, TESTI4025797, TESTI4025865, TESTI4025908, TESTI4025920, TESTI4026079, TESTI4026080, TESTI4026192, TESTI4026207, TESTI4026295, TESTI4026390, TESTI4026456, TESTI4026510, TESTI4026524, TESTI4026680, TESTI4026700, TESTI4026762, TESTI4026785, TESTI4027139, TESTI4027170, TESTI4027262, TESTI4027516, TESTI4027557, TESTI4027660, TESTI4027821, TESTI4027969, TESTI4028042, TESTI4028059, TESTI4028062, TESTI4028182, TESTI4028429, TESTI4028612, TESTI4028692, TESTI4028809, TESTI4028823, TESTI4028880, TESTI4028904, TESTI4028938, TESTI4028958, TESTI4028983, TESTI4029023, TESTI4029348, TESTI4029370, TESTI4029528, TESTI4029651, TESTI4029671, TESTI4029676, TESTI4029690, TESTI4029731, TESTI4029743, TESTI4030069, TESTI4030159, TESTI4030319, TESTI4030505, TESTI4030603, TESTI4030669, TESTI4030673, TESTI4030864, TESTI4031066, TESTI4031173, TESTI4031335, TESTI4031745, TESTI4031818, TESTI4032090, TESTI4032112, TESTI4032128, TESTI4032270, TESTI4032375, TESTI4032834, TESTI4032856, TESTI4032895, TESTI4032913, TESTI4033146, TESTI4033177, TESTI4033433, TESTI4033690, TESTI4034172, TESTI4034212, TESTI4034432, TESTI4034495, TESTI4034632, TESTI4034633, TESTI4034912, TESTI4034973, TESTI4035063, TESTI4035065, TESTI4035498, TESTI4035508, TESTI4035581, TESTI4035602, TESTI4035637, TESTI4035649, TESTI4035770, TESTI4035872, TESTI4035895, TESTI4035898, TESTI4035989, TESTI4036012, TESTI4036042, TESTI4036048, TESTI4036315, TESTI4036319, TESTI4036449, TESTI4036767, TESTI4036909, TESTI4037066, TESTI4037188, TESTI4037228, TESTI4037244, TESTI4037727, TESTI4037949, TESTI4038047, TESTI4038099, TESTI4038156, TESTI4038223, TESTI4038258, TESTI4038339, TESTI4038492, TESTI4038721, TESTI4038758, TESTI4038779, TESTI4038818, TESTI4039038, TESTI4039086, TESTI4039451, TESTI4039575, TESTI4039659, TESTI4039744, TESTI4039904, TESTI4040197, TESTI4040363, TESTI4040535, TESTI4040559, TESTI4040598, TESTI4040800, TESTI4040804, TESTI4040939, TESTI4040956, TESTI4041049, TESTI4041053, TESTI4041086, TESTI4041099, TESTI4041143, TESTI4041482, TESTI4041519, TESTI4041624, TESTI4041629, TESTI4041832, TESTI4041844, TESTI4041903, TESTI4041954, TESTI4041984, TESTI4041985, TESTI4041986, TESTI4042098, TESTI4042420, TESTI4042440, TESTI4042444, TESTI4042711, TESTI4042846, TESTI4043067, TESTI4043129, TESTI4043140, TESTI4043166, TESTI4043203, TESTI4043223, TESTI4043371, TESTI4043378, TESTI4043512, TESTI4043551, TESTI4043710, TESTI4043947, TESTI4044035, TESTI4044076, TESTI4044084, TESTI4044123, TESTI4044186, TESTI4044234, TESTI4044291, TESTI4044296, TESTI4044300, TESTI4044682, TESTI4044770, TESTI4045168, TESTI4045312, TESTI4045330, TESTI4045470, TESTI4045701, TESTI4045908, TESTI4045955, TESTI4045982, TESTI4046073, TESTI4046090, TESTI4046240, TESTI4046245, TESTI4046253, TESTI4046282, TESTI4046328, TESTI4046450, TESTI4046457, TESTI4046487, TESTI4046502, TESTI4046523, TESTI4046819, TESTI4046884, TESTI4046896, TESTI4046903, TESTI4046962, TESTI4047069, TESTI4047119, TESTI4047305, TESTI4047328, TESTI4047437, TESTI4047569, TESTI4047746, TESTI4047808, THYMU1000017, THYMU1000025, THYMU1000029, THYMU1000033, THYMU1000041, THYMU1000060, THYMU1000074, THYMU1000098, THYMU1000103, THYMU1000105, THYMU1000109, THYMU1000136, THYMU1000142, THYMU1000144, THYMU1000158, THYMU1000176, THYMU1000179, THYMU1000191, THYMU1000198, THYMU1000217, THYMU1000240, THYMU1000242, THYMU1000291, THYMU1000316, THYMU1000318, THYMU1000329, THYMU1000331, THYMU1000336, THYMU1000366, THYMU1000374, THYMU1000382, THYMU1000393, THYMU1000399, THYMU1000426, THYMU1000440, THYMU1000459, THYMU1000473, THYMU1000490, THYMU1000491, THYMU1000496, THYMU1000499, THYMU1000527, THYMU1000532, THYMU1000536, THYMU1000554, THYMU1000558, THYMU1000576, THYMU1000600, THYMU1000677, THYMU1000692, THYMU2000022, THYMU2000032, THYMU2000120, THYMU2000138, THYMU2000140, THYMU2000155, THYMU2000162, THYMU2000171, THYMU2000176, THYMU2000179, THYMU2000231, THYMU2000236, THYMU2000276, THYMU2000280, THYMU2000300, THYMU2000317, THYMU2000368, THYMU2000369, THYMU2000418, THYMU2000436, THYMU2000440, THYMU2000489, THYMU2000492, THYMU2000519, THYMU2000570, THYMU2000602, THYMU2000660, THYMU2000671, THYMU2000672, THYMU2000702, THYMU2000767, THYMU2000775, THYMU2000800, THYMU2000879, THYMU2000932, THYMU2000946, THYMU2000950, THYMU2000971, THYMU2000982, THYMU2000990, THYMU2001007, THYMU2001018, THYMU2001053, THYMU2001071, THYMU2001090, THYMU2001139, THYMU2001195, THYMU2001202, THYMU2001203, THYMU2001256, THYMU2001270, THYMU2001291, THYMU2001314, THYMU2001325, THYMU2001357, THYMU2001381, THYMU2001422, THYMU2001443, THYMU2001515, THYMU2001556, THYMU2001622, THYMU2001727, THYMU2001819, THYMU2001825, THYMU2001839, THYMU2001868, THYMU2001898, THYMU2001900, THYMU2001916, THYMU2001926, THYMU2001989, THYMU2002023, THYMU2002037, THYMU2002080, THYMU2002109, THYMU2002147, THYMU2002154, THYMU2002157, THYMU2002162, THYMU2002177, THYMU2002203, THYMU2002242, THYMU2002338, THYMU2002356, THYMU2002376, THYMU2002384, THYMU2002450, THYMU2002490, THYMU2002548, THYMU2002695, THYMU2002756, THYMU2002789, THYMU2002792, THYMU2002815, THYMU2002852, THYMU2002910, THYMU2002950, THYMU2002983, THYMU2003107, THYMU2003124, THYMU2003166, THYMU2003232, THYMU2003242, THYMU2003249, THYMU2003270, THYMU2003282, THYMU2003287, THYMU2003336, THYMU2003366, THYMU2003397, THYMU2003440, THYMU2003446, THYMU2003470, THYMU2003479, THYMU2003499, THYMU2003542, THYMU2003632, THYMU2003650, THYMU2003700, THYMU2003760, THYMU2003803, THYMU2003855, THYMU2003907, THYMU2003932, THYMU2004003, THYMU2004008, THYMU2004042, THYMU2004111, THYMU2004123, THYMU2004139, THYMU2004169, THYMU2004284, THYMU2004336, THYMU2004356, THYMU2004452, THYMU2004508, THYMU2004512, THYMU2004635, THYMU2004639, THYMU2004668, THYMU2004677, THYMU2004688, THYMU2004693, THYMU2004835, THYMU2004843, THYMU2004906, THYMU2004916, THYMU2004986, THYMU2005001, THYMU2005003, THYMU2005046, THYMU2005134, THYMU2005190, THYMU2005225, THYMU2005240, THYMU2005246, THYMU2005270, THYMU2005283, THYMU2005303, THYMU2005321, THYMU2005356, THYMU2005369, THYMU2005439, THYMU2005480, THYMU2005482, THYMU2005507, THYMU2005545, THYMU2005574, THYMU2005576, THYMU2005748, THYMU2005759, THYMU2005807, THYMU2005815, THYMU2005855, THYMU2005881, THYMU2005948, THYMU2005997, THYMU2006001, THYMU2006048, THYMU2006098, THYMU2006160, THYMU2006170, THYMU2006252, THYMU2006261, THYMU2006277, THYMU2006303, THYMU2006324, THYMU2006350, THYMU2006357, THYMU2006365, THYMU2006420, THYMU2006468, THYMU2006610, THYMU2006666, THYMU2006712, THYMU2006913, THYMU2006946, THYMU2006965, THYMU2007025, THYMU2007060, THYMU2007095, THYMU2007146, THYMU2007179, THYMU2007258, THYMU2007307, THYMU2007308, THYMU2007339, THYMU2007350, THYMU2007384, THYMU2007415, THYMU2007467, THYMU2007493, THYMU2007521, THYMU2007528, THYMU2007530, THYMU2007532, THYMU2007561, THYMU2007571, THYMU2007635, THYMU2007658, THYMU2007667, THYMU2007694, THYMU2007725, THYMU2007729, THYMU2007802, THYMU2007824, THYMU2007854, THYMU2007952, THYMU2007969, THYMU2008035, THYMU2008036, THYMU2008049, THYMU2008072, THYMU2008111, THYMU2008145, THYMU2008149, THYMU2008185, THYMU2008191, THYMU2008207, THYMU2008226, THYMU2008282, THYMU2008321, THYMU2008339, THYMU2008350, THYMU2008351, THYMU2008383, THYMU2008452, THYMU2008643, THYMU2008686, THYMU2008691, THYMU2008714, THYMU2008727, THYMU2008781, THYMU2008799, THYMU2008876, THYMU2008910, THYMU2008917, THYMU2008928, THYMU2008990, THYMU2008994, THYMU2009023, THYMU2009046, THYMU2009101, THYMU2009104, THYMU2009134, THYMU2009157, THYMU2009181, THYMU2009186, THYMU2009338, THYMU2009425, THYMU2009516, THYMU2009526, THYMU2009546, THYMU2009592, THYMU2009596, THYMU2009835, THYMU2009906, THYMU2009948, THYMU2010030, THYMU2010041, THYMU2010046, THYMU2010059, THYMU2010082, THYMU2010161, THYMU2010192, THYMU2010448, THYMU2010519, THYMU2010637, THYMU2010671, THYMU2010699, THYMU2010705, THYMU2010779, THYMU2010816, THYMU2010831, THYMU2010848, THYMU2011053, THYMU2011063, THYMU2011072, THYMU2011096, THYMU2011118, THYMU2011142, THYMU2011183, THYMU2011257, THYMU2011259, THYMU2011295, THYMU2011308, THYMU2011390, THYMU2011431, THYMU2011447, THYMU2011482, THYMU2011538, THYMU2011548, THYMU2011551, THYMU2011564, THYMU2011573, THYMU2011585, THYMU2011621, THYMU2011666, THYMU2011736, THYMU2011785, THYMU2011806, THYMU2011852, THYMU2011875, THYMU2011937, THYMU2011939, THYMU2012002, THYMU2012073, THYMU2012104, THYMU2012113, THYMU2012273, THYMU2012401, THYMU2012492, THYMU2012507, THYMU2012565, THYMU2012574, THYMU2012631, THYMU2012665, THYMU2012690, THYMU2012701, THYMU2012807, THYMU2012826, THYMU2012882, THYMU2012891, THYMU2012902, THYMU2012919, THYMU2013023, THYMU2013047, THYMU2013051, THYMU2013089, THYMU2013170, THYMU2013364, THYMU2013386, THYMU2013426, THYMU2013578, THYMU2013705, THYMU2013757, THYMU2013779, THYMU2013863, THYMU2013950, THYMU2013981, THYMU2014067, THYMU2014068, THYMU2014204, THYMU2014297, THYMU2014323, THYMU2014327, THYMU2014353, THYMU2014492, THYMU2014500, THYMU2014599, THYMU2014762, THYMU2014777, THYMU2014801, THYMU2014901, THYMU2014923, THYMU2015161, THYMU2015316, THYMU2015321, THYMU2015439, THYMU2015441, THYMU2015479, THYMU2015762, THYMU2015775, THYMU2015825, THYMU2015918, THYMU2015943, THYMU2015984, THYMU2016113, THYMU2016164, THYMU2016204, THYMU2016219, THYMU2016360, THYMU2016496, THYMU2016523, THYMU2016840, THYMU2016968, THYMU2017008, THYMU2017010, THYMU2017023, THYMU2017085, THYMU2017099, THYMU2017158, THYMU2017162, THYMU2017215, THYMU2017362, THYMU2017366, THYMU2017398, THYMU2017449, THYMU2017479, THYMU2017522, THYMU2017526, THYMU2017601, THYMU2017675, THYMU2017707, THYMU2017831, THYMU2017844, THYMU2017878, THYMU2017948, THYMU2018028, THYMU2018071, THYMU2018189, THYMU2018197, THYMU2018384, THYMU2018455, THYMU2018547, THYMU2018565, THYMU2018639, THYMU2018673, THYMU2018721, THYMU2018772, THYMU2018819, THYMU2018841, THYMU2018997, THYMU2019054, THYMU2019197, THYMU2019210, THYMU2019364, THYMU2019436, THYMU2019442, THYMU2019587, THYMU2019599, THYMU2019686, THYMU2019813, THYMU2020198, THYMU2020289, THYMU2020416, THYMU2020491, THYMU2020499, THYMU2020560, THYMU2020667, THYMU2020830, THYMU2020883, THYMU2020959, THYMU2021361, THYMU2021509, THYMU2021597, THYMU2021684, THYMU2021714, THYMU2022213, THYMU2022289, THYMU2022660, THYMU2022854, THYMU2022922, THYMU2023209, THYMU2023264, THYMU2023576, THYMU2023711, THYMU2023900, THYMU2023943, THYMU2023967, THYMU2024071, THYMU2024121, THYMU2024185, THYMU2024207, THYMU2024616, THYMU2024684, THYMU2024748, THYMU2025042, THYMU2025189, THYMU2025319, THYMU2025325, THYMU2025406, THYMU2025557, THYMU2025572, THYMU2025849, THYMU2025909, THYMU2025939, THYMU2026182, THYMU2026350, THYMU2026530, THYMU2026531, THYMU2026835, THYMU2026904, THYMU2027053, THYMU2027168, THYMU2027249, THYMU2027282, THYMU2027497, THYMU2027695, THYMU2027734, THYMU2027894, THYMU2027996, THYMU2028041, THYMU2028368, THYMU2028379, THYMU2028394, THYMU2028412, THYMU2028632, THYMU2028724, THYMU2028739, THYMU2028942, THYMU2028978, THYMU2029134, THYMU2029578, THYMU2029676, THYMU2029688, THYMU2029788, THYMU2030068, THYMU2030226, THYMU2030264, THYMU2030462, THYMU2030543, THYMU2030637, THYMU2030655, THYMU2030796, THYMU2030912, THYMU2030982, THYMU2031046, THYMU2031139, THYMU2031218, THYMU2031249, THYMU2031258, THYMU2031368, THYMU2031579, THYMU2031847, THYMU2031890, THYMU2031994, THYMU2032014, THYMU2032035, THYMU2032080, THYMU2032150, THYMU2032155, THYMU2032358, THYMU2032437, THYMU2032601, THYMU2032655, THYMU2032696, THYMU2032715, THYMU2032732, THYMU2032825, THYMU2032976, THYMU2033053, THYMU2033059, THYMU2033070, THYMU2033079, THYMU2033085, THYMU2033104, THYMU2033227, THYMU2033263, THYMU2033308, THYMU2033401, THYMU2033583, THYMU2033755, THYMU2033787, THYMU2033816, THYMU2034182, THYMU2034279, THYMU2034314, THYMU2034338, THYMU2034374, THYMU2034647, THYMU2034917, THYMU2035064, THYMU2035078, THYMU2035101, THYMU2035319, THYMU2035321, THYMU2035388, THYMU2035400, THYMU2035554, THYMU2035710, THYMU2036058, THYMU2036105, THYMU2036207, THYMU2036215, THYMU2036252, THYMU2036265, THYMU2036366, THYMU2036459, THYMU2036604, THYMU2036653, THYMU2037081, THYMU2037208, THYMU2037226, THYMU2037233, THYMU2037234, THYMU2037348, THYMU2037406, THYMU2037965, THYMU2038058, THYMU2038189, THYMU2038199, THYMU2038220, THYMU2038301, THYMU2038369, THYMU2038389, THYMU2038615, THYMU2038636, THYMU2038739, THYMU2038772, THYMU2038797, THYMU2038906, THYMU2039305, THYMU2039315, THYMU2039334, THYMU2039350, THYMU2039411, THYMU2039634, THYMU2039719, THYMU2039780, THYMU2039788, THYMU2039989, THYMU2040029, THYMU2040110, THYMU2040114, THYMU2040140, THYMU2040412, THYMU2040427, THYMU2040824, THYMU2040925, THYMU2041007, THYMU2041015, THYMU2041252, THYMU3000028, THYMU3000036, THYMU3000037, THYMU3000082, THYMU3000194, THYMU3000224, THYMU3000269, THYMU3000306, THYMU3000360, THYMU3000390, THYMU3000420, THYMU3000490, THYMU3000504, THYMU3000542, THYMU3000655, THYMU3000776, THYMU3000826, THYMU3000841, THYMU3001077, THYMU3001082, THYMU3001083, THYMU3001133, THYMU3001151, THYMU3001379, THYMU3001472, THYMU3001593, THYMU3001883, THYMU3001939, THYMU3001991, THYMU3002452, THYMU3002578, THYMU3002661, THYMU3003007, THYMU3003092, THYMU3003212, THYMU3003309, THYMU3003350, THYMU3003403, THYMU3003565, THYMU3003763, THYMU3003865, THYMU3003958, THYMU3003965, THYMU3004157, THYMU3004628, THYMU3004632, THYMU3004835, THYMU3004866, THYMU3005050, THYMU3005378, THYMU3005407, THYMU3005415, THYMU3005427, THYMU3005482, THYMU3005491, THYMU3005629, THYMU3005696, THYMU3006118, THYMU3006132, THYMU3006168, THYMU3006172, THYMU3006371, THYMU3006485, THYMU3006640, THYMU3006767, THYMU3006811, THYMU3006963, THYMU3007137, THYMU3007308, THYMU3007368, THYMU3007423, THYMU3007559, THYMU3007845, THYMU3008060, THYMU3008105, THYMU3008136, THYMU3008171, THYMU3008216, THYMU3008436, THYMU3008672, THYMU3008883, THYMU3008935, THYMU3009255, THYMU3009391, THYMU3009643, THYMU3009755, THYMU3010247, THYMU3011012, THYMU3011081, THYMU3011244, THYMU3011360, THYMU3011534, THYMU3011543, THYMU3011556, THYMU3011717, THYMU3011827, THYMU3012402, THYMU3012907, THYMU3012983, THYMU3013114, THYMU3013197, THYMU3013241, THYMU3013470, THYMU3013785, THYMU3013897, THYMU3014038, THYMU3014173, THYMU3014372, THYMU3014555, THYMU3014620, THYMU3014701, THYMU3015042, THYMU3015457, THYMU3015571, THYMU3015592, THYMU3015625, THYMU3015647, THYMU3015962, THYMU3016022, THYMU3016518, THYMU3016797, THYMU3016822, THYMU3016850, THYMU3017562, THYMU3017688, THYMU3017689, THYMU3017761, THYMU3018151, THYMU3018896, THYMU3019095, THYMU3019476, THYMU3019605, THYMU3019916, THYMU3020221, THYMU3020595, THYMU3020713, THYMU3020856, THYMU3020869, THYMU3020970, THYMU3021404, THYMU3021586, THYMU3021755, THYMU3021900, THYMU3022211, THYMU3022434, THYMU3022528, THYMU3022668, THYMU3022982, THYMU3023107, THYMU3023211, THYMU3023216, THYMU3023394, THYMU3023400, THYMU3023797, THYMU3024164, THYMU3024602, THYMU3024879, THYMU3025118, THYMU3025313, THYMU3025683, THYMU3025772, THYMU3025865, THYMU3026000, THYMU3026350, THYMU3026479, THYMU3026532, THYMU3026783, THYMU3026869, THYMU3027251, THYMU3027540, THYMU3027655, THYMU3027671, THYMU3028075, THYMU3028410, THYMU3028461, THYMU3028702, THYMU3029188, THYMU3029318, THYMU3029421, THYMU3029719, THYMU3029774, THYMU3029832, THYMU3030072, THYMU3030231, THYMU3030706, THYMU3030710, THYMU3030752, THYMU3031146, THYMU3031402, THYMU3031610, THYMU3031612, THYMU3031868, THYMU3031878, THYMU3032032, THYMU3032798, THYMU3032867, THYMU3033402, THYMU3033626, THYMU3033630, THYMU3033649, THYMU3033754, THYMU3033759, THYMU3034078, THYMU3034099, THYMU3034453, THYMU3034616, THYMU3034853, THYMU3034867, THYMU3034983, THYMU3036200, THYMU3036310, THYMU3036934, THYMU3036953, THYMU3037052, THYMU3037192, THYMU3037617, THYMU3037772, THYMU3037827, THYMU3037836, THYMU3037856, THYMU3037867, THYMU3037909, THYMU3037980, THYMU3038167, THYMU3038214, THYMU3038266, THYMU3038328, THYMU3038347, THYMU3038375, THYMU3038603, THYMU3038687, THYMU3038759, THYMU3038879, THYMU3038970, THYMU3039807, THYMU3039846, THYMU3040068, THYMU3040126, THYMU3040146, THYMU3040168, THYMU3040172, THYMU3040725, THYMU3040746, THYMU3040816, THYMU3040829, THYMU3040830, THYMU3040986, THYMU3041354, THYMU3041386, THYMU3041428, THYMU3041573, THYMU3041603, THYMU3041736, THYMU3041918, THYMU3042075, THYMU3042321, THYMU3042372, THYMU3042758, THYMU3042929, THYMU3043200, THYMU3043327, THYMU3043482, THYMU3043597, THYMU3043688, THYMU3043779, THYMU3043883, THYMU3043993, THYMU3044175, THYMU3044188, THYMU3044441, THYMU3044445, THYMU3045510, THYMU3045673, THYMU3045692, THYMU3045704, THYMU3046140, THYMU3046350, THYMU3046360, THYMU3046856, THYMU3047144, THYMU3047156, THYMU3047366, THYMU3047513, THYMU3047542, THYMU3047760, THYMU3047891, TKIDN1000001, TKIDN1000044, TKIDN1000062, TKIDN1000171, TKIDN1000192, TKIDN2000127, TKIDN2000240, TKIDN2000246, TKIDN2000319, TKIDN2000464, TKIDN2000521, TKIDN2000701, TKIDN2001529, TKIDN2002318, TKIDN2002329, TKIDN2002424, TKIDN2002632, TKIDN2003044, TKIDN2003059, TKIDN2003062, TKIDN2003078, TKIDN2003366, TKIDN2003396, TKIDN2003413, TKIDN2003601, TKIDN2004185, TKIDN2004386, TKIDN2004458, TKIDN2004748, TKIDN2005487, TKIDN2005721, TKIDN2005934, TKIDN2005947, TKIDN2005956, TKIDN2006525, TKIDN2006761, TKIDN2006852, TKIDN2007605, TKIDN2007667, TKIDN2008176, TKIDN2008778, TKIDN2009092, TKIDN2009330, TKIDN2009481, TKIDN2009641, TKIDN2009794, TKIDN2009889, TKIDN2010200, TKIDN2010232, TKIDN2010278, TKIDN2010602, TKIDN2010812, TKIDN2010934, TKIDN2011051, TKIDN2011160, TKIDN2011289, TKIDN2011324, TKIDN2012034, TKIDN2012771, TKIDN2012824, TKIDN2013134, TKIDN2013287, TKIDN2014570, TKIDN2014757, TKIDN2014771, TKIDN2014964, TKIDN2015025, TKIDN2015071, TKIDN2015161, TKIDN2015263, TKIDN2016309, TKIDN2016399, TKIDN2016846, TKIDN2018926, TKIDN2019116, TLIVE2000023, TLIVE2000142, TLIVE2000292, TLIVE2000762, TLIVE2000979, TLIVE2001327, TLIVE2001616, TLIVE2001684, TLIVE2001828, TLIVE2001927, TLIVE2002336, TLIVE2002338, TLIVE2002562, TLIVE2002690, TLIVE2002882, TLIVE2003197, TLIVE2003200, TLIVE2003225, TLIVE2003381, TLIVE2003737, TLIVE2003961, TLIVE2004110, TLIVE2004320, TLIVE2004331, TLIVE2004601, TLIVE2005180, TLIVE2005390, TLIVE2005516, TLIVE2005731, TLIVE2005866, TLIVE2006236, TLIVE2006359, TLIVE2006529, TLIVE2006621, TLIVE2006733, TLIVE2007000, TLIVE2007016, TLIVE2007132, TLIVE2007192, TLIVE2007528, TLIVE2007607, TLIVE2007736, TLIVE2007816, TLIVE2007919, TLIVE2008083, TLIVE2008213, TLIVE2008221, TLIVE2008229, TLIVE2008712, TLIVE2008797, TLIVE2009087, TLIVE2009163, TLIVE2009489, TLIVE2009541, TLUNG2000179, TOVAR2000476, TOVAR2000575, TOVAR2000649, TOVAR2000904, TOVAR2001281, TOVAR2001556, TOVAR2001730, TOVAR2002247, TOVAR2002514, TOVAR2002549, TOVAR2002800, TRACH1000011, TRACH1000018, TRACH1000057, TRACH1000074, TRACH1000100, TRACH1000125, TRACH1000140, TRACH1000144, TRACH1000181, TRACH1000193, TRACH1000212, TRACH1000240, TRACH2000002, TRACH2000015, TRACH2000024, TRACH2000032, TRACH2000045, TRACH2000047, TRACH2000083, TRACH2000148, TRACH2000185, TRACH2000196, TRACH2000235, TRACH2000237, TRACH2000243, TRACH2000250, TRACH2000259, TRACH2000272, TRACH2000282, TRACH2000287, TRACH2000289, TRACH2000306, TRACH2000312, TRACH2000336, TRACH2000359, TRACH2000393, TRACH2000411, TRACH2000461, TRACH2000496, TRACH2000497, TRACH2000502, TRACH2000522, TRACH2000540, TRACH2000559, TRACH2000660, TRACH2000665, TRACH2000675, TRACH2000677, TRACH2000703, TRACH2000767, TRACH2000775, TRACH2000780, TRACH2000807, TRACH2000862, TRACH2000873, TRACH2000894, TRACH2000898, TRACH2000920, TRACH2000923, TRACH2000926, TRACH2000944, TRACH2000981, TRACH2000986, TRACH2001037, TRACH2001060, TRACH2001085, TRACH2001109, TRACH2001121, TRACH2001147, TRACH2001154, TRACH2001188, TRACH2001192, TRACH2001249, TRACH2001275, TRACH2001335, TRACH2001339, TRACH2001341, TRACH2001347, TRACH2001395, TRACH2001400, TRACH2001403, TRACH2001416, TRACH2001428, TRACH2001432, TRACH2001474, TRACH2001525, TRACH2001532, TRACH2001549, TRACH2001592, TRACH2001596, TRACH2001621, TRACH2001646, TRACH2001651, TRACH2001684, TRACH2001810, TRACH2001933, TRACH2001968, TRACH2001996, TRACH2002043, TRACH2002054, TRACH2002100, TRACH2002138, TRACH2002333, TRACH2002784, TRACH2002803, TRACH2002840, TRACH2002853, TRACH2002862, TRACH2002954, TRACH2002960, TRACH2002988, TRACH2003070, TRACH2003272, TRACH2003347, TRACH2003484, TRACH2003516, TRACH2003605, TRACH2003736, TRACH2003759, TRACH2003941, TRACH2004039, TRACH2004054, TRACH2004087, TRACH2004109, TRACH2004170, TRACH2004183, TRACH2004251, TRACH2004292, TRACH2004336, TRACH2004399, TRACH2004428, TRACH2004458, TRACH2004521, TRACH2004570, TRACH2004845, TRACH2004887, TRACH2004950, TRACH2005004, TRACH2005017, TRACH2005066, TRACH2005159, TRACH2005314, TRACH2005444, TRACH2005541, TRACH2005666, TRACH2005698, TRACH2005710, TRACH2005720, TRACH2005769, TRACH2005796, TRACH2005800, TRACH2006015, TRACH2006049, TRACH2006097, TRACH2006194, TRACH2006327, TRACH2006331, TRACH2006378, TRACH2006387, TRACH2006528, TRACH2006670, TRACH2006866, TRACH2006870, TRACH2006918, TRACH2007059, TRACH2007324, TRACH2007358, TRACH2007483, TRACH2007542, TRACH2007577, TRACH2007674, TRACH2007676, TRACH2007688, TRACH2007733, TRACH2007894, TRACH2007969, TRACH2007988, TRACH2008081, TRACH2008112, TRACH2008113, TRACH2008127, TRACH2008130, TRACH2008278, TRACH2008300, TRACH2008478, TRACH2008540, TRACH2008583, TRACH2008597, TRACH2008716, TRACH2008820, TRACH2008921, TRACH2009060, TRACH2009107, TRACH2009123, TRACH2009268, TRACH2009291, TRACH2009310, TRACH2009340, TRACH2009348, TRACH2009358, TRACH2009661, TRACH2009730, TRACH2009743, TRACH2009754, TRACH2009851, TRACH2009862, TRACH2009934, TRACH2010159, TRACH2010218, TRACH2010251, TRACH2010272, TRACH2010317, TRACH2010419, TRACH2010451, TRACH2010505, TRACH2010587, TRACH2010634, TRACH2010639, TRACH2010677, TRACH2010698, TRACH2010771, TRACH2010824, TRACH2010883, TRACH2010965, TRACH2010974, TRACH2011057, TRACH2011093, TRACH2011113, TRACH2011290, TRACH2011293, TRACH2011302, TRACH2011574, TRACH2011894, TRACH2011956, TRACH2012000, TRACH2012138, TRACH2012242, TRACH2012298, TRACH2012370, TRACH2012376, TRACH2012387, TRACH2012497, TRACH2012562, TRACH2012742, TRACH2012811, TRACH2012823, TRACH2012918, TRACH2013081, TRACH2013123, TRACH2013265, TRACH2013369, TRACH2013450, TRACH2013495, TRACH2013552, TRACH2013585, TRACH2013671, TRACH2013726, TRACH2013902, TRACH2013928, TRACH2013982, TRACH2014018, TRACH2014045, TRACH2014046, TRACH2014077, TRACH2014082, TRACH2014268, TRACH2014284, TRACH2014337, TRACH2014356, TRACH2014371, TRACH2014442, TRACH2014483, TRACH2014495, TRACH2014544, TRACH2014573, TRACH2014725, TRACH2014760, TRACH2014815, TRACH2014839, TRACH2014938, TRACH2014950, TRACH2014972, TRACH2014974, TRACH2014997, TRACH2015180, TRACH2015243, TRACH2015316, TRACH2015381, TRACH2015486, TRACH2015654, TRACH2015987, TRACH2016080, TRACH2016131, TRACH2016286, TRACH2016317, TRACH2016347, TRACH2016380, TRACH2016384, TRACH2016410, TRACH2016481, TRACH2016498, TRACH2016533, TRACH2016551, TRACH2016554, TRACH2016651, TRACH2016690, TRACH2016709, TRACH2016722, TRACH2016835, TRACH2016980, TRACH2017086, TRACH2017498, TRACH2017609, TRACH2017949, TRACH2017965, TRACH2017980, TRACH2018034, TRACH2018084, TRACH2018262, TRACH2018273, TRACH2018278, TRACH2018345, TRACH2018380, TRACH2018449, TRACH2018512, TRACH2018646, TRACH2018663, TRACH2018718, TRACH2018835, TRACH2018882, TRACH2018914, TRACH2018950, TRACH2019024, TRACH2019046, TRACH2019080, TRACH2019151, TRACH2019154, TRACH2019176, TRACH2019248, TRACH2019309, TRACH2019425, TRACH2019473, TRACH2019602, TRACH2019661, TRACH2019672, TRACH2019673, TRACH2019844, TRACH2019879, TRACH2020048, TRACH2020336, TRACH2020525, TRACH2021398, TRACH2021622, TRACH2021635, TRACH2021964, TRACH2022042, TRACH2022113, TRACH2022253, TRACH2022425, TRACH2022553, TRACH2022649, TRACH2022839, TRACH2023246, TRACH2023299, TRACH2023306, TRACH2023416, TRACH2023479, TRACH2023684, TRACH2023860, TRACH2023876, TRACH2024139, TRACH2024187, TRACH2024271, TRACH2024293, TRACH2024408, TRACH2024512, TRACH2024559, TRACH2024647, TRACH2024651, TRACH2024730, TRACH2024735, TRACH2024749, TRACH2024821, TRACH2025057, TRACH2025084, TRACH2025155, TRACH2025224, TRACH2025344, TRACH2025379, TRACH2025507, TRACH2025535, TRACH2025569, TRACH2025705, TRACH2025749, TRACH2025753, TRACH2025810, TRACH2025853, TRACH2025911, TRACH2025932, TRACH3000014, TRACH3000017, TRACH3000043, TRACH3000134, TRACH3000180, TRACH3000342, TRACH3000420, TRACH3000515, TRACH3000530, TRACH3000548, TRACH3000558, TRACH3000586, TRACH3000780, TRACH3000892, TRACH3000926, TRACH3001119, TRACH3001443, TRACH3001550, TRACH3001759, TRACH3002064, TRACH3002107, TRACH3002168, TRACH3002188, TRACH3002245, TRACH3002293, TRACH3002533, TRACH3002561, TRACH3002567, TRACH3002605, TRACH3002650, TRACH3002752, TRACH3002866, TRACH3002871, TRACH3002876, TRACH3002890, TRACH3003009, TRACH3003037, TRACH3003357, TRACH3003379, TRACH3003586, TRACH3003683, TRACH3003780, TRACH3003805, TRACH3003832, TRACH3003872, TRACH3004113, TRACH3004288, TRACH3004303, TRACH3004412, TRACH3004424, TRACH3004456, TRACH3004537, TRACH3004596, TRACH3004651, TRACH3004652, TRACH3004671, TRACH3004721, TRACH3004747, TRACH3004760, TRACH3004783, TRACH3004786, TRACH3004840, TRACH3004931, TRACH3004934, TRACH3005072, TRACH3005085, TRACH3005102, TRACH3005173, TRACH3005191, TRACH3005211, TRACH3005274, TRACH3005294, TRACH3005479, TRACH3005549, TRACH3005702, TRACH3005808, TRACH3005852, TRACH3005896, TRACH3006038, TRACH3006149, TRACH3006228, TRACH3006264, TRACH3006336, TRACH3006379, TRACH3006392, TRACH3006395, TRACH3006397, TRACH3006412, TRACH3006470, TRACH3006589, TRACH3006626, TRACH3006699, TRACH3006800, TRACH3006889, TRACH3006985, TRACH3007097, TRACH3007268, TRACH3007274, TRACH3007277, TRACH3007391, TRACH3007479, TRACH3007541, TRACH3007595, TRACH3007627, TRACH3007689, TRACH3007766, TRACH3007866, TRACH3007995, TRACH3008042, TRACH3008061, TRACH3008093, TRACH3008201, TRACH3008508, TRACH3008535, TRACH3008629, TRACH3008688, TRACH3008697, TRACH3008713, TRACH3008887, TRACH3008902, TRACH3008990, TRACH3009001, TRACH3009008, TRACH3009059, TRACH3009061, TRACH3009455, TRACH3009701, TRACH3009715, TRACH3009894, TRACH3009956, TRACH3010079, TRACH3010167, TRACH3010331, TRACH3010342, TRACH3010382, TRACH3010757, TRACH3010901, TRACH3011004, TRACH3011082, TRACH3011184, TRACH3011282, TRACH3011313, TRACH3011454, TRACH3011485, TRACH3011503, TRACH3011538, TRACH3011542, TRACH3012106, TRACH3012161, TRACH3012232, TRACH3012261, TRACH3012445, TRACH3012460, TRACH3012659, TRACH3012718, TRACH3012864, TRACH3012891, TRACH3012942, TRACH3013043, TRACH3013072, TRACH3013426, TRACH3013454, TRACH3013558, TRACH3013684, TRACH3013693, TRACH3013700, TRACH3013766, TRACH3013900, TRACH3013926, TRACH3014063, TRACH3014183, TRACH3014215, TRACH3014316, TRACH3014415, TRACH3014580, TRACH3014641, TRACH3014885, TRACH3015136, TRACH3015336, TRACH3015346, TRACH3015354, TRACH3015467, TRACH3015626, TRACH3015951, TRACH3016051, TRACH3016120, TRACH3016264, TRACH3016277, TRACH3016368, TRACH3016455, TRACH3016614, TRACH3016992, TRACH3017171, TRACH3017409, TRACH3017934, TRACH3018108, TRACH3018191, TRACH3018240, TRACH3018261, TRACH3018519, TRACH3018524, TRACH3018606, TRACH3018783, TRACH3018907, TRACH3018933, TRACH3018943, TRACH3019018, TRACH3019058, TRACH3019142, TRACH3019290, TRACH3019347, TRACH3019370, TRACH3019447, TRACH3019598, TRACH3019621, TRACH3019662, TRACH3019807, TRACH3019924, TRACH3019977, TRACH3020137, TRACH3020410, TRACH3020563, TRACH3020605, TRACH3020750, TRACH3020769, TRACH3020928, TRACH3020930, TRACH3021023, TRACH3021066, TRACH3021212, TRACH3021335, TRACH3021373, TRACH3021544, TRACH3021778, TRACH3021834, TRACH3021883, TRACH3022170, TRACH3022198, TRACH3022296, TRACH3022482, TRACH3022732, TRACH3022758, TRACH3022875, TRACH3022910, TRACH3022960, TRACH3023063, TRACH3023203, TRACH3023242, TRACH3023373, TRACH3023516, TRACH3023752, TRACH3023945, TRACH3023960, TRACH3024020, TRACH3024081, TRACH3024342, TRACH3024423, TRACH3024428, TRACH3024512, TRACH3024671, TRACH3024823, TRACH3025302, TRACH3025316, TRACH3025346, TRACH3025520, TRACH3026148, TRACH3026283, TRACH3026299, TRACH3026303, TRACH3026542, TRACH3026650, TRACH3026676, TRACH3026744, TRACH3026949, TRACH3027229, TRACH3027527, TRACH3027681, TRACH3027701, TRACH3027885, TRACH3028031, TRACH3028164, TRACH3028180, TRACH3028195, TRACH3028441, TRACH3028597, TRACH3028678, TRACH3028837, TRACH3028847, TRACH3028855, TRACH3029139, TRACH3029329, TRACH3029451, TRACH3029462, TRACH3029520, TRACH3029592, TRACH3029629, TRACH3029665, TRACH3029670, TRACH3029800, TRACH3030111, TRACH3030130, TRACH3030176, TRACH3030252, TRACH3030725, TRACH3030855, TRACH3030883, TRACH3031316, TRACH3031400, TRACH3031463, TRACH3031479, TRACH3031518, TRACH3031660, TRACH3031678, TRACH3031936, TRACH3032044, TRACH3032065, TRACH3032150, TRACH3032372, TRACH3032480, TRACH3032570, TRACH3032755, TRACH3032827, TRACH3032873, TRACH3033535, TRACH3033680, TRACH3033868, TRACH3034145, TRACH3034414, TRACH3034488, TRACH3034680, TRACH3034731, TRACH3034745, TRACH3034762, TRACH3034903, TRACH3035187, TRACH3035199, TRACH3035235, TRACH3035451, TRACH3035482, TRACH3035526, TRACH3036004, TRACH3036103, TRACH3036193, TRACH3036207, TRACH3036278, TRACH3036309, TRACH3036456, TRACH3036609, TRACH3036638, TRACH3036683, TRACH3036750, TRACH3036792, TRACH3036843, TRACH3036897, TRACH3036932, TRACH3036942, TRACH3036997, TRACH3037063, TRACH3037267, TRACH3037288, TRACH3037505, TRACH3037573, TRACH3037696, TRACH3037897, TRACH3038086, TRACH3038399, TSTOM1000135, TSTOM1000186, TSTOM2000235, TSTOM2000442, TSTOM2000569, TSTOM2000588, TSTOM2001195, TSTOM2001274, TSTOM2001571, TSTOM2001996, TSTOM2002265, TSTOM2002505, TSTOM2002561, TSTOM2002611, TSTOM2002672, TSTOM2002682, TUTER1000014, TUTER1000122, TUTER1000137, TUTER2000057, TUTER2000283, TUTER2000425, TUTER2000916, TUTER2001286, TUTER2001341, TUTER2001387, TUTER2001433, TUTER2001461, TUTER2002028, TUTER2002074, TUTER2002158, TUTER2002228, TUTER2002323, TUTER2002356, TUTER2002729, UMVEN1000122, UMVEN1000143, UMVEN1000156, UMVEN2000046, UMVEN2000069, UMVEN2000121, UMVEN2000133, UMVEN2000152, UMVEN2000354, UTERU1000008, UTERU1000015, UTERU1000024, UTERU1000031, UTERU1000032, UTERU1000057, UTERU1000065, UTERU1000077, UTERU1000093, UTERU1000096, UTERU1000106, UTERU1000109, UTERU1000131, UTERU1000138, UTERU1000148, UTERU1000160, UTERU1000183, UTERU1000187, UTERU1000192, UTERU1000249, UTERU1000337, UTERU1000339, UTERU2000023, UTERU2000047, UTERU2000074, UTERU2000099, UTERU2000154, UTERU2000197, UTERU2000218, UTERU2000238, UTERU2000243, UTERU2000260, UTERU2000329, UTERU2000332, UTERU2000349, UTERU2000377, UTERU2000393, UTERU2000418, UTERU2000465, UTERU2000485, UTERU2000517, UTERU2000524, UTERU2000539, UTERU2000541, UTERU2000546, UTERU2000550, UTERU2000569, UTERU2000607, UTERU2000629, UTERU2000649, UTERU2000663, UTERU2000794, UTERU2000830, UTERU2000844, UTERU2000922, UTERU2000925, UTERU2001024, UTERU2001110, UTERU2001176, UTERU2001281, UTERU2001389, UTERU2001409, UTERU2001412, UTERU2001504, UTERU2001747, UTERU2001876, UTERU2002011, UTERU2002176, UTERU2002198, UTERU2002294, UTERU2002332, UTERU2002473, UTERU2002547, UTERU2002662, UTERU2002693, UTERU2002733, UTERU2002736, UTERU2002737, UTERU2002826, UTERU2002841, UTERU2002964, UTERU2002993, UTERU2003035, UTERU2003057, UTERU2003126, UTERU2003135, UTERU2003321, UTERU2003399, UTERU2003411, UTERU2003456, UTERU2003577, UTERU2003973, UTERU2004015, UTERU2004039, UTERU2004061, UTERU2004073, UTERU2004163, UTERU2004299, UTERU2004461, UTERU2004520, UTERU2004564, UTERU2004664, UTERU2004688, UTERU2004698, UTERU2004861, UTERU2005004, UTERU2005050, UTERU2005069, UTERU2005074, UTERU2005179, UTERU2005292, UTERU2005346, UTERU2005446, UTERU2005449, UTERU2005450, UTERU2005533, UTERU2005593, UTERU2005601, UTERU2005621, UTERU2005822, UTERU2005903, UTERU2005905, UTERU2006103, UTERU2006115, UTERU2006137, UTERU2006182, UTERU2006400, UTERU2006412, UTERU2006429, UTERU2006486, UTERU2006524, UTERU2006547, UTERU2006568, UTERU2006643, UTERU2006651, UTERU2006705, UTERU2006899, UTERU2007004, UTERU2007075, UTERU2007128, UTERU2007253, UTERU2007267, UTERU2007444, UTERU2007499, UTERU2007639, UTERU2007724, UTERU2007924, UTERU2007942, UTERU2008018, UTERU2008019, UTERU2008027, UTERU2008077, UTERU2008130, UTERU2008347, UTERU2008426, UTERU2008516, UTERU2008561, UTERU2008653, UTERU2008705, UTERU2008707, UTERU2008747, UTERU2008785, UTERU2008845, UTERU2008901, UTERU2008930, UTERU2008962, UTERU2009094, UTERU2009120, UTERU2009131, UTERU2009147, UTERU2009206, UTERU2009283, UTERU2009335, UTERU2009414, UTERU2009435, UTERU2009483, UTERU2009510, UTERU2009538, UTERU2009540, UTERU2009776, UTERU2009904, UTERU2009951, UTERU2009972, UTERU2010115, UTERU2010124, UTERU2010164, UTERU2010226, UTERU2010231, UTERU2010304, UTERU2010320, UTERU2010431, UTERU2010525, UTERU2010651, UTERU2010724, UTERU2010747, UTERU2011195, UTERU2011199, UTERU2011261, UTERU2011287, UTERU2011410, UTERU2011574, UTERU2011621, UTERU2011657, UTERU2011741, UTERU2011806, UTERU2011811, UTERU2011897, UTERU2011906, UTERU2011962, UTERU2011968, UTERU2012031, UTERU2012101, UTERU2012114, UTERU2012230, UTERU2012252, UTERU2012333, UTERU2012401, UTERU2012526, UTERU2012581, UTERU2012610, UTERU2012615, UTERU2012688, UTERU2012703, UTERU2012715, UTERU2012741, UTERU2012767, UTERU2012786, UTERU2012890, UTERU2012938, UTERU2012976, UTERU2013048, UTERU2013078, UTERU2013231, UTERU2013262, UTERU2013280, UTERU2013322, UTERU2013483, UTERU2013491, UTERU2013586, UTERU2013926, UTERU2013976, UTERU2014001, UTERU2014024, UTERU2014223, UTERU2014398, UTERU2014464, UTERU2014548, UTERU2014601, UTERU2014631, UTERU2014668, UTERU2014678, UTERU2014728, UTERU2014998, UTERU2015062, UTERU2015087, UTERU2015108, UTERU2015190, UTERU2015198, UTERU2015202, UTERU2015405, UTERU2015640, UTERU2015653, UTERU2015830, UTERU2015880, UTERU2016147, UTERU2016157, UTERU2016426, UTERU2016464, UTERU2016669, UTERU2016757, UTERU2016761, UTERU2016799, UTERU2016896, UTERU2016902, UTERU2016981, UTERU2017123, UTERU2017303, UTERU2017421, UTERU2017623, UTERU2017632, UTERU2017761, UTERU2017762, UTERU2017810, UTERU2017988, UTERU2018127, UTERU2018180, UTERU2018200, UTERU2018333, UTERU2018364, UTERU2018514, UTERU2018522, UTERU2018544, UTERU2018566, UTERU2018609, UTERU2018674, UTERU2018712, UTERU2018784, UTERU2018789, UTERU2018811, UTERU2018867, UTERU2018881, UTERU2018955, UTERU2019038, UTERU2019096, UTERU2019163, UTERU2019453, UTERU2019491, UTERU2019534, UTERU2019681, UTERU2019706, UTERU2019710, UTERU2019940, UTERU2019959, UTERU2019964, UTERU2020226, UTERU2020242, UTERU2020292, UTERU2020351, UTERU2020491, UTERU2020718, UTERU2021163, UTERU2021380, UTERU2021649, UTERU2021820, UTERU2022020, UTERU2022773, UTERU2022955, UTERU2022981, UTERU2023039, UTERU2023045, UTERU2023550, UTERU2023651, UTERU2023687, UTERU2023712, UTERU2023941, UTERU2024002, UTERU2024042, UTERU2024141, UTERU2024481, UTERU2024656, UTERU2024758, UTERU2024820, UTERU2024881, UTERU2025025, UTERU2025041, UTERU2025301, UTERU2025366, UTERU2025415, UTERU2025579, UTERU2025645, UTERU2025891, UTERU2026025, UTERU2026090, UTERU2026142, UTERU2026203, UTERU2026775, UTERU2027023, UTERU2027369, UTERU2027591, UTERU2027616, UTERU2027941, UTERU2028377, UTERU2028734, UTERU2029503, UTERU2029660, UTERU2029742, UTERU2029953, UTERU2030213, UTERU2030270, UTERU2030280, UTERU2031060, UTERU2031084, UTERU2031268, UTERU2031295, UTERU2031521, UTERU2031611, UTERU2031703, UTERU2031834, UTERU2031851, UTERU2032075, UTERU2032220, UTERU2032279, UTERU2032726, UTERU2033172, UTERU2033375, UTERU2033382, UTERU2033420, UTERU2033530, UTERU2033577, UTERU2034053, UTERU2034147, UTERU2034695, UTERU2035114, UTERU2035187, UTERU2035231, UTERU2035306, UTERU2035323, UTERU2035328, UTERU2035331, UTERU2035452, UTERU2035469, UTERU2035503, UTERU2035745, UTERU2035908, UTERU2035926, UTERU2035978, UTERU2036089, UTERU2036347, UTERU2036507, UTERU2036512, UTERU2036530, UTERU2036623, UTERU2036690, UTERU2037224, UTERU2037361, UTERU2037423, UTERU2037577, UTERU2037674, UTERU2037791, UTERU2037843, UTERU2038171, UTERU2038251, UTERU3000226, UTERU3000298, UTERU3000402, UTERU3000645, UTERU3000665, UTERU3000670, UTERU3000727, UTERU3000738, UTERU3000828, UTERU3000844, UTERU3000899, UTERU3000959, UTERU3001029, UTERU3001053, UTERU3001059, UTERU3001158, UTERU3001240, UTERU3001394, UTERU3001542, UTERU3001558, UTERU3001571, UTERU3001585, UTERU3001632, UTERU3001652, UTERU3001766, UTERU3001988, UTERU3002209, UTERU3002218, UTERU3002383, UTERU3002600, UTERU3002620, UTERU3002667, UTERU3002701, UTERU3002731, UTERU3002768, UTERU3002786, UTERU3002993, UTERU3003116, UTERU3003135, UTERU3003178, UTERU3003465, UTERU3003495, UTERU3003523, UTERU3003660, UTERU3003774, UTERU3003776, UTERU3004384, UTERU3004418, UTERU3004523, UTERU3004616, UTERU3004635, UTERU3004709, UTERU3004938, UTERU3004992, UTERU3005049, UTERU3005159, UTERU3005205, UTERU3005230, UTERU3005264, UTERU3005422, UTERU3005460, UTERU3005536, UTERU3005585, UTERU3005767, UTERU3005970, UTERU3006008, UTERU3006228, UTERU3006308, UTERU3006538, UTERU3006640, UTERU3006687, UTERU3006720, UTERU3006798, UTERU3006884, UTERU3007021, UTERU3007104, UTERU3007108, UTERU3007134, UTERU3007419, UTERU3007640, UTERU3007731, UTERU3007913, UTERU3008280, UTERU3008463, UTERU3008660, UTERU3008671, UTERU3008722, UTERU3008917, UTERU3009259, UTERU3009490, UTERU3009517, UTERU3009690, UTERU3009775, UTERU3009871, UTERU3009979, UTERU3009987, UTERU3010029, UTERU3010409, UTERU3010526, UTERU3010892, UTERU3010919, UTERU3011063, UTERU3011092, UTERU3011273, UTERU3011398, UTERU3011558, UTERU3011579, UTERU3011795, UTERU3011837, UTERU3012293, UTERU3012414, UTERU3012476, UTERU3012599, UTERU3012999, UTERU3013167, UTERU3013302, UTERU3013781, UTERU3014274, UTERU3014446, UTERU3014611, UTERU3014647, UTERU3014791, UTERU3014906, UTERU3015011, UTERU3015086, UTERU3015299, UTERU3015412, UTERU3015500, UTERU3015647, UTERU3015844, UTERU3016070, UTERU3016273, UTERU3016274, UTERU3016308, UTERU3016789, UTERU3017176, UTERU3017441, UTERU3017626, UTERU3017995, UTERU3018154, UTERU3018172, UTERU3018255, UTERU3018711, UTERU3019078

[0702] Of the 17,176 genes that include the cDNAs of the present invention, genes whose expression levels were high enough to detect in each of the SALGL, SKMUS, SKNMC, SKNSH, SMINT, SPLEN, and STOMA libraries were analyzed for expression frequency. The analysis results are described below. Each is a relative value, where the expression level over all tissues is taken as 100. The larger this value, the greater the level of expression.

TABLE 37

| Clone Name | SALGL | SKMUS | SKNMC | SKNSH | SMINT | SPLEN | STOMA |
|---|---|---|---|---|---|---|---|
| 3NB691000116 | 0 | 0 | 0 | 0 | 0 | 5.658 | 0 |
| 3NB691000173 | 0 | 0 | 6.155 | 5.422 | 0 | 0 | 0 |
| 3NB692000281 | 0 | 0 | 0 | 1.511 | 0 | 0.766 | 0 |
| 3NB692000330 | 0 | 0 | 3.438 | 0 | 0 | 0.767 | 0 |
| 3NB692000545 | 0 | 0 | 0 | 0 | 0 | 4.908 | 0 |
| 3NB692000912 | 0 | 0 | 0 | 9.678 | 1.658 | 0.817 | 0 |
| 3NB692000973 | 0 | 0 | 0 | 48.489 | 0 | 0 | 0 |
| 3NB692001002 | 0 | 0 | 0 | 26.866 | 0 | 0 | 0 |
| 3NB692001022 | 0 | 0 | 19.398 | 0 | 0 | 0 | 0 |
| 3NB692001334 | 0 | 0 | 0 | 3.686 | 0.947 | 0 | 0 |
| 3NB692001339 | 0 | 16.526 | 0 | 0 | 0 | 0 | 0 |
| 3NB692001442 | 0 | 34.046 | 0 | 0 | 0 | 2.101 | 0 |
| 3NB692001459 | 0 | 0 | 0 | 38.816 | 0 | 0 | 0 |
| 3NB692001528 | 0 | 0 | 18.338 | 0 | 0 | 0 | 0 |
| 3NB692001538 | 0 | 0 | 0 | 0 | 7.010 | 0 | 0 |
| ADRGL1000144 | 0 | 0 | 26.053 | 0 | 0 | 0 | 0 |
| ADRGL2000117 | 0 | 0 | 0 | 0 | 30.118 | 14.848 | 0 |
| ADRGL2000323 | 0 | 0 | 0 | 0 | 0 | 23.091 | 0 |
| ADRGL2002477 | 0 | 0 | 13.262 | 0 | 0 | 2.960 | 0 |
| ASTRO1000165 | 0 | 0 | 0 | 15.219 | 0 | 0 | 0 |
| ASTRO2000480 | 0 | 0 | 22.070 | 0 | 0 | 0 | 0 |
| ASTRO2000914 | 0 | 0 | 15.174 | 0 | 0 | 0 | 0 |
| ASTRO2001076 | 0 | 0 | 0 | 9.759 | 0 | 0 | 0 |
| ASTRO2001249 | 0 | 67.038 | 0 | 0 | 0 | 0 | 0 |
| ASTRO2001806 | 0 | 0 | 0 | 9.823 | 0 | 0 | 0 |
| ASTRO2001823 | 0 | 0 | 0 | 9.967 | 0 | 2.525 | 0 |
| ASTRO2003024 | 0 | 6.678 | 0 | 0 | 3.345 | 0 | 0 |
| ASTRO2005360 | 0 | 0 | 0 | 0 | 0 | 10.378 | 0 |
| ASTRO2005553 | 0 | 0 | 0 | 0 | 0 | 4.508 | 0 |
| ASTRO2005687 | 0 | 0 | 0 | 15.307 | 0 | 0 | 0 |
| ASTRO2005896 | 0 | 0 | 69.231 | 0 | 0 | 0 | 0 |
| ASTRO2007047 | 0 | 0 | 0 | 0 | 0 | 3.636 | 0 |
| ASTRO2010819 | 0 | 0 | 5.245 | 0 | 2.374 | 2.341 | 0 |
| ASTRO2012552 | 0 | 0 | 0 | 10.149 | 0 | 0 | 10.059 |
| ASTRO2013585 | 0 | 0 | 0 | 3.347 | 3.440 | 2.544 | 0 |
| ASTRO2016491 | 0 | 0 | 0 | 0 | 1.777 | 0.876 | 0 |
| ASTRO2018540 | 0 | 0 | 12.123 | 0 | 5.488 | 2.705 | 0 |
| BGGI11000123 | 0 | 0 | 0 | 0 | 0 | 2.438 | 0 |
| BGGI12000054 | 0 | 0 | 0 | 0 | 0 | 0.410 | 0 |
| BGGI12000616 | 0 | 6.300 | 0 | 0 | 0 | 0 | 0 |
| BGGI12000839 | 0 | 0 | 0 | 5.063 | 2.602 | 0 | 0 |
| BGGI12001075 | 0 | 13.948 | 0 | 0 | 0 | 0 | 0 |
| BGGI12001714 | 0 | 0 | 0 | 17.511 | 0 | 0 | 0 |
| BLADE2000256 | 0 | 0 | 0 | 0 | 0 | 19.862 | 0 |
| BLADE2001575 | 0 | 0 | 0 | 0 | 33.455 | 0 | 0 |
| BLADE2004849 | 0 | 0 | 0 | 0 | 0 | 12.894 | 0 |
| BNGH41000137 | 0 | 0 | 0 | 0 | 0 | 7.548 | 0 |
| BNGH41000190 | 0 | 0 | 0 | 0 | 0 | 4.402 | 0 |
| BNGH41000235 | 0 | 0 | 0 | 0 | 22.999 | 0 | 0 |
| BNGH42000360 | 0 | 2.217 | 0 | 0 | 0.555 | 0 | 0 |
| BNGH42000739 | 0 | 0 | 0 | 0 | 2.196 | 0 | 0 |
| BNGH42001576 | 0 | 0 | 0 | 0 | 17.218 | 0 | 0 |
| BNGH42002168 | 0 | 0 | 20.744 | 0 | 0 | 0 | 0 |
| BNGH42007366 | 0 | 0 | 0 | 0 | 0 | 0 | 43.520 |
| BNGH42007709 | 0 | 0 | 0 | 1.580 | 0.812 | 1.201 | 3.133 |
| BNGH42009025 | 0 | 0 | 10.868 | 9.572 | 0 | 0 | 0 |
| BRACE1000042 | 0 | 0 | 0 | 0 | 0 | 5.296 | 0 |
| BRACE1000051 | 0 | 0 | 0 | 0 | 0 | 31.184 | 0 |
| BRACE1000115 | 0 | 0 | 0 | 0 | 0.661 | 0 | 0 |
| BRACE1000131 | 0 | 0 | 0 | 0 | 0 | 5.436 | 0 |
| BRACE2000267 | 0 | 0 | 0 | 0 | 0 | 23.250 | 0 |
| BRACE2000307 | 0 | 0 | 0 | 8.088 | 0 | 0 | 0 |
| BRACE2000332 | 0 | 0 | 0 | 18.638 | 0 | 9.444 | 18.472 |
| BRACE2000347 | 0 | 0 | 0 | 0 | 9.122 | 0 | 0 |
| BRACE2000525 | 0 | 0 | 0 | 0 | 0 | 36.744 | 0 |
| BRACE2000753 | 0 | 0 | 0 | 0 | 0 | 52.985 | 0 |
| BRACE2000864 | 0 | 14.875 | 0 | 0 | 0 | 0 | 3.591 |
| BRACE2001151 | 0 | 0 | 0 | 0 | 0 | 11.229 | 0 |
| BRACE2001313 | 0 | 0 | 0 | 0 | 0 | 52.985 | 0 |
| BRACE2001673 | 0 | 0 | 0 | 0 | 0 | 0 | 1.595 |
| BRACE2001709 | 0 | 0 | 0 | 0 | 11.452 | 16.937 | 0 |
| BRACE2002050 | 0 | 0 | 0 | 19.911 | 0 | 0 | 0 |
| BRACE2002091 | 0 | 0 | 0 | 0 | 0 | 3.674 | 0 |
| BRACE2002441 | 0 | 0 | 8.779 | 0 | 0 | 1.959 | 0 |
| BRACE2002661 | 0 | 0 | 0 | 0 | 10.162 | 5.010 | 19.598 |
| BRACE2002677 | 0 | 0 | 0 | 0 | 0 | 3.358 | 0 |
| BRACE2002807 | 0 | 0 | 0 | 0 | 0 | 56.062 | 0 |
| BRACE2002860 | 0 | 0 | 0 | 0 | 0 | 13.139 | 0 |
| BRACE2003172 | 0 | 0 | 2.533 | 0 | 2.294 | 0 | 0 |
| BRACE2003254 | 0 | 0 | 0 | 0 | 3.195 | 0 | 0 |
| BRACE2003319 | 0 | 0 | 0 | 15.732 | 0 | 0 | 0 |
| BRACE2003827 | 0 | 0 | 0 | 6.016 | 0 | 0 | 0 |
| BRACE2003845 | 0 | 0 | 0 | 0 | 48.233 | 7.926 | 0 |
| BRACE2003846 | 0 | 0 | 0 | 0 | 0 | 1.134 | 0 |
| BRACE2003892 | 0 | 0 | 0 | 0 | 0 | 3.797 | 0 |
| BRACE2003904 | 0 | 0 | 0 | 0 | 0 | 9.020 | 17.642 |
| BRACE2003944 | 0 | 3.648 | 0 | 0 | 0 | 0.901 | 0 |
| BRACE2003954 | 0 | 0 | 0 | 0 | 83.254 | 0 | 0 |
| BRACE2005087 | 0 | 0 | 8.086 | 0 | 0 | 3.609 | 0 |
| BRACE2005298 | 0 | 0 | 0 | 0 | 0 | 52.985 | 0 |
| BRACE2005434 | 0 | 0 | 0 | 9.468 | 0 | 0 | 0 |
| BRACE2006055 | 0 | 0 | 15.594 | 0 | 0 | 0 | 0 |
| BRACE2006162 | 0 | 10.903 | 0 | 0 | 0 | 0 | 0 |
| BRACE2006258 | 0 | 0 | 6.385 | 5.624 | 0 | 0 | 0 |
| BRACE2006264 | 0 | 0 | 0 | 0 | 0 | 14.683 | 0 |
| BRACE2006363 | 0 | 0 | 0 | 0 | 32.705 | 0 | 0 |
| BRACE2006397 | 0 | 0 | 0 | 0 | 0 | 1.027 | 2.009 |
| BRACE2006459 | 0 | 0 | 0 | 0 | 0 | 71.023 | 0 |
| BRACE2006514 | 0 | 0 | 13.545 | 0 | 0 | 0 | 0 |
| BRACE2006537 | 0 | 0 | 0 | 0 | 3.798 | 1.872 | 14.648 |
| BRACE2006598 | 0 | 0 | 0 | 0 | 0 | 50.322 | 0 |
| BRACE2006900 | 0 | 0 | 0 | 3.533 | 0 | 3.580 | 0 |
| BRACE2007064 | 0 | 0 | 0 | 0 | 0 | 2.827 | 0 |
| BRACE2007068 | 0 | 0 | 0 | 0 | 0 | 43.567 | 0 |
| BRACE2007089 | 0 | 0 | 0 | 0 | 0 | 2.946 | 0 |
| BRACE2007109 | 0 | 0 | 0 | 0 | 3.368 | 0 | 0 |
| BRACE2007191 | 0 | 0 | 0 | 4.716 | 0 | 2.390 | 0 |
| BRACE2007254 | 0 | 0 | 0 | 0 | 0 | 12.950 | 0 |
| BRACE2007295 | 0 | 0 | 73.303 | 0 | 0 | 0 | 0 |
| BRACE2007518 | 0 | 0 | 0 | 0 | 0 | 3.948 | 0 |
| BRACE2007567 | 0 | 0 | 0 | 0 | 0 | 7.242 | 9.443 |
| BRACE2007671 | 0 | 0 | 12.052 | 0 | 0 | 0 | 0 |
| BRACE2007708 | 0 | 0 | 0 | 0 | 7.499 | 0 | 0 |
| BRACE2007767 | 0 | 21.937 | 0 | 0 | 0 | 0 | 0 |
| BRACE2008216 | 0 | 0 | 0 | 0 | 46.720 | 0 | 0 |
| BRACE2008358 | 0 | 0 | 0 | 0 | 0 | 7.884 | 0 |
| BRACE2008385 | 0 | 0 | 0 | 0 | 0 | 3.633 | 0 |
| BRACE2008553 | 0 | 29.305 | 0 | 0 | 0 | 0 | 0 |
| BRACE2008653 | 0 | 0 | 0 | 0 | 0 | 0.917 | 0 |
| BRACE2008968 | 0 | 4.097 | 0 | 0 | 6.155 | 0 | 0 |
| BRACE2008999 | 0 | 49.592 | 0 | 0 | 0 | 0 | 0 |
| BRACE2009037 | 0 | 2.058 | 0 | 2.005 | 1.030 | 0 | 1.987 |
| BRACE2009044 | 0 | 0 | 0 | 0 | 35.405 | 17.454 | 0 |
| BRACE2009366 | 0 | 0 | 0 | 0 | 0 | 6.285 | 0 |
| BRACE2009517 | 0 | 0 | 0 | 0 | 0 | 14.155 | 0 |
| BRACE2009558 | 0 | 0 | 22.414 | 0 | 0 | 5.002 | 19.567 |
| BRACE2011703 | 0 | 0 | 0 | 0 | 0 | 71.023 | 0 |
| BRACE2012061 | 0 | 0 | 0 | 0 | 0 | 29.308 | 0 |
| BRACE2012528 | 0 | 0 | 0 | 0 | 0 | 0.825 | 0 |
| BRACE2012814 | 0 | 0 | 0 | 0 | 5.411 | 0 | 0 |
| BRACE2013911 | 0 | 0 | 0 | 0 | 0 | 13.077 | 0 |
| BRACE2014818 | 0 | 0 | 0 | 0 | 0 | 71.023 | 0 |
| BRACE2015287 | 0 | 0 | 0 | 0 | 8.104 | 0 | 0 |
| BRACE2015969 | 0 | 0 | 0 | 0 | 0 | 71.023 | 0 |
| BRACE2019244 | 0 | 0 | 0 | 0 | 0 | 71.023 | 0 |
| BRACE2019327 | 0 | 63.143 | 0 | 0 | 0 | 0 | 0 |
| BRACE2019371 | 0 | 0 | 0 | 0 | 52.763 | 26.012 | 0 |
| BRACE2021143 | 0 | 0 | 0 | 0 | 27.925 | 0 | 0 |
| BRACE2021478 | 0 | 0 | 0 | 0 | 45.681 | 0 | 0 |
| BRACE2021541 | 0 | 0 | 0 | 0 | 0 | 27.693 | 0 |
| BRACE2022333 | 0 | 0 | 0 | 0 | 0 | 15.444 | 0 |
| BRACE2022389 | 0 | 0 | 0 | 0 | 0 | 0 | 72.312 |
| BRACE2022638 | 0 | 0 | 11.620 | 5.118 | 0 | 2.593 | 0 |
| BRACE2024627 | 0 | 0 | 0 | 0 | 0 | 0 | 83.309 |
| BRACE2026836 | 0 | 48.621 | 0 | 0 | 0 | 0 | 0 |
| BRACE2037295 | 0 | 0 | 25.571 | 0 | 0 | 0 | 0 |
| BRACE2039624 | 0 | 0 | 15.084 | 0 | 3.414 | 1.683 | 6.584 |
| BRACE2043381 | 0 | 0 | 0 | 0 | 0 | 18.723 | 0 |
| BRACE3005938 | 0 | 0 | 0 | 0 | 0 | 5.747 | 0 |
| BRACE3010428 | 0 | 0 | 0 | 0 | 0 | 1.991 | 0 |
| BRALZ2006288 | 0 | 0 | 0 | 0 | 38.482 | 0 | 0 |
| BRALZ2009482 | 0 | 0 | 0 | 0 | 1.311 | 0 | 0 |
| BRAMY2000231 | 0 | 0 | 0 | 0 | 0 | 63.323 | 0 |
| BRAMY2000354 | 0 | 0 | 0 | 0 | 0 | 2.390 | 0 |
| BRAMY2003325 | 0 | 87.489 | 0 | 0 | 0 | 0 | 0 |
| BRAMY2004521 | 0 | 0 | 18.477 | 0 | 0 | 0 | 0 |
| BRAMY2007613 | 0 | 0 | 0 | 0 | 0 | 2.330 | 0 |
| BRAMY2012426 | 0 | 0 | 0 | 0 | 0 | 0 | 42.064 |
| BRAMY2015782 | 0 | 0 | 0 | 0 | 0 | 6.812 | 0 |
| BRAMY2015833 | 0 | 0 | 0 | 0 | 16.267 | 0 | 31.370 |
| BRAMY2019554 | 0 | 0 | 0 | 0 | 8.448 | 0 | 0 |
| BRAMY2020427 | 0 | 0 | 0 | 4.066 | 0 | 0 | 0 |
| BRAMY2021710 | 0 | 0 | 0 | 0 | 26.542 | 13.085 | 0 |
| BRAMY2023719 | 0 | 0 | 0 | 0 | 0 | 10.401 | 0 |
| BRAMY2027739 | 0 | 0 | 0 | 0 | 0 | 2.341 | 0 |
| BRAMY2029988 | 0 | 0 | 0 | 0 | 0 | 20.491 | 0 |
| BRAMY2038832 | 0 | 0 | 0 | 0 | 43.012 | 0 | 0 |
| BRAMY2040095 | 0 | 0 | 0 | 2.347 | 1.206 | 1.189 | 0 |
| BRAMY2045530 | 0 | 0 | 0 | 0 | 0 | 16.412 | 0 |
| BRAMY3004377 | 0 | 0 | 0 | 0 | 0 | 1.443 | 0 |
| BRAMY3010008 | 0 | 0 | 0 | 0 | 0 | 1.012 | 0 |
| BRAMY4002628 | 0 | 0 | 0 | 0 | 0 | 12.356 | 0 |
| BRAWH1000040 | 0 | 0 | 0 | 0 | 4.856 | 2.394 | 0 |
| BRAWH1000083 | 0 | 0 | 0 | 0 | 0 | 7.882 | 0 |
| BRAWH1000093 | 0 | 0 | 0 | 0 | 0 | 6.419 | 0 |
| BRAWH1000094 | 0 | 0 | 0 | 0 | 14.857 | 0 | 0 |
| BRAWH2000177 | 0 | 0 | 0 | 0 | 0 | 13.909 | 0 |
| BRAWH2000417 | 0 | 0 | 0 | 0 | 0 | 1.075 | 0 |
| BRAWH2000460 | 0 | 0 | 0 | 4.191 | 0 | 0 | 0 |
| BRAWH2000522 | 0 | 0 | 0 | 37.336 | 0 | 0 | 0 |
| BRAWH2000588 | 0 | 0 | 0 | 0 | 0 | 2.183 | 0 |
| BRAWH2000633 | 0 | 0 | 0 | 0 | 4.678 | 2.306 | 0 |
| BRAWH2000839 | 0 | 0 | 0 | 0 | 0 | 2.143 | 0 |
| BRAWH2000924 | 0 | 0 | 0 | 0 | 0 | 0.499 | 0 |
| BRAWH2000944 | 0 | 0 | 0 | 0 | 0 | 9.075 | 0 |
| BRAWH2001092 | 0 | 0 | 2.740 | 1.207 | 1.240 | 1.529 | 0 |
| BRAWH2001103 | 0 | 0 | 0 | 0 | 23.189 | 0 | 0 |
| BRAWH2001141 | 0 | 0 | 0 | 0 | 0 | 26.522 | 0 |
| BRAWH2001166 | 0 | 0 | 0 | 0 | 0 | 5.491 | 0 |
| BRAWH2001186 | 0 | 0 | 0 | 0 | 0 | 9.913 | 0 |
| BRAWH2001321 | 0 | 0 | 0 | 0 | 3.029 | 0 | 0 |
| BRAWH2002318 | 0 | 0 | 0 | 0 | 0 | 46.425 | 0 |
| BRAWH2002601 | 0 | 0 | 0 | 0 | 0 | 17.305 | 0 |
| BRAWH2003025 | 0 | 0 | 0 | 0 | 0 | 10.550 | 0 |
| BRAWH2003818 | 0 | 0 | 0 | 20.781 | 0 | 0 | 0 |
| BRAWH2004095 | 0 | 0 | 0 | 0 | 0 | 4.113 | 0 |
| BRAWH2004580 | 0 | 0 | 0 | 0 | 0 | 63.265 | 0 |
| BRAWH2005661 | 0 | 0 | 0 | 0 | 0 | 2.781 | 10.879 |
| BRAWH2006405 | 0 | 0 | 0 | 0 | 45.793 | 0 | 0 |
| BRAWH2006996 | 0 | 0 | 0 | 0 | 0 | 0 | 23.147 |
| BRAWH2007605 | 0 | 0 | 0 | 0 | 0 | 3.568 | 0 |
| BRAWH2007800 | 0 | 0 | 0 | 0 | 0 | 4.086 | 0 |
| BRAWH2008128 | 0 | 0 | 0 | 0 | 77.919 | 0 | 0 |
| BRAWH2008219 | 0 | 0 | 0 | 0 | 0 | 25.068 | 0 |
| BRAWH2008292 | 0 | 0 | 0 | 0 | 0 | 63.499 | 0 |
| BRAWH2009304 | 0 | 0 | 0 | 26.931 | 0 | 0 | 0 |
| BRAWH2011286 | 0 | 0 | 69.568 | 0 | 0 | 0 | 0 |
| BRAWH2011343 | 0 | 0 | 0 | 0 | 0 | 12.204 | 0 |
| BRAWH2014188 | 0 | 0 | 0 | 0 | 0 | 1.245 | 0 |
| BRAWH2014645 | 0 | 0 | 0 | 0 | 3.730 | 3.678 | 0 |
| BRAWH2016106 | 0 | 0 | 0 | 0 | 0 | 63.499 | 0 |
| BRAWH2016166 | 0 | 0 | 0 | 0 | 0 | 13.156 | 0 |
| BRAWH2016209 | 0 | 58.527 | 0 | 0 | 0 | 14.450 | 0 |
| BRAWH2016269 | 0 | 0 | 10.277 | 0 | 0 | 0 | 0 |
| BRAWH2017685 | 0 | 0 | 0 | 0 | 1.791 | 1.766 | 0 |
| BRAWH2018526 | 0 | 0 | 2.399 | 2.113 | 0 | 0 | 0 |
| BRAWH2018527 | 0 | 59.979 | 0 | 0 | 0 | 0 | 0 |
| BRAWH2018729 | 0 | 0 | 0 | 0 | 0 | 5.184 | 0 |
| BRAWH3002467 | 0 | 0 | 0 | 0 | 0 | 63.499 | 0 |
| BRAWH3002853 | 0 | 0 | 0 | 0 | 5.220 | 1.287 | 0 |
| BRAWH3008931 | 0 | 0 | 0 | 0 | 12.222 | 0 | 0 |
| BRAWH3024989 | 0 | 16.693 | 0 | 0 | 0 | 0 | 0 |
| BRCAN1000149 | 0 | 0 | 0 | 0 | 0 | 43.126 | 0 |
| BRCAN2003944 | 0 | 0 | 2.195 | 5.801 | 0 | 0.490 | 0 |
| BRCAN2007409 | 0 | 0 | 0 | 0 | 0 | 10.439 | 0 |
| BRCAN2007700 | 0 | 0 | 0 | 0 | 0 | 63.468 | 0 |
| BRCAN2016619 | 0 | 0 | 0 | 0 | 0 | 45.836 | 0 |
| BRCAN2018566 | 0 | 0 | 0 | 0 | 0 | 43.126 | 0 |
| BRCAN2028036 | 0 | 0 | 0 | 0 | 0 | 4.200 | 0 |
| BRCOC1000040 | 0 | 0 | 0 | 0 | 0 | 5.130 | 0 |
| BRCOC2003187 | 0 | 0 | 0 | 0 | 8.325 | 0 | 10.704 |
| BRCOC2010730 | 0 | 0 | 0 | 0 | 0 | 18.804 | 0 |
| BRCOC2012172 | 0 | 0 | 0 | 0 | 9.926 | 0 | 0 |
| BRCOC2015908 | 0 | 0 | 0 | 0 | 0 | 32.934 | 0 |
| BRCOC2018877 | 0 | 0 | 0 | 0 | 0 | 32.934 | 0 |
| BRHIP1000104 | 0 | 0 | 0 | 0 | 0 | 1.137 | 0 |
| BRHIP2000021 | 0 | 0 | 88.427 | 0 | 0 | 0 | 0 |
| BRHIP2000534 | 0 | 0 | 0 | 0 | 0 | 0.595 | 0 |
| BRHIP2000819 | 0 | 0 | 0 | 0 | 7.623 | 3.758 | 14.701 |
| BRHIP2008269 | 0 | 0 | 0 | 0 | 0 | 48.408 | 0 |
| BRHIP2010217 | 0 | 0 | 43.536 | 0 | 0 | 0 | 0 |
| BRHIP2011491 | 0 | 11.648 | 0 | 0 | 0 | 0 | 0 |
| BRHIP2014063 | 0 | 0 | 0 | 0 | 0 | 63.033 | 0 |
| BRHIP2015153 | 0 | 0 | 0 | 0 | 0 | 17.429 | 0 |
| BRHIP2018712 | 0 | 14.270 | 0 | 0 | 0 | 14.092 | 0 |
| BRHIP2019186 | 0 | 0 | 0 | 0 | 0 | 0 | 13.430 |
| BRHIP2020799 | 0 | 0 | 0 | 0 | 0 | 8.804 | 0 |
| BRHIP2021762 | 0 | 0 | 0 | 0 | 0 | 4.847 | 0 |
| BRHIP2023888 | 0 | 0 | 0 | 0 | 1.298 | 0 | 0 |
| BRHIP2024398 | 0 | 0 | 0 | 0 | 0 | 14.647 | 0 |
| BRHIP2024742 | 0 | 0 | 0 | 0 | 0 | 2.170 | 0 |
| BRHIP3000017 | 0 | 0 | 0 | 0 | 15.559 | 0 | 0 |
| BRHIP3000111 | 0 | 0 | 0 | 0 | 3.613 | 0 | 0 |
| BRHIP3004215 | 0 | 0 | 0 | 0 | 0 | 23.618 | 0 |
| BRSSN2003012 | 0 | 0 | 0 | 0 | 0 | 7.525 | 0 |
| BRSSN2004679 | 0 | 0 | 0 | 0 | 0 | 26.476 | 0 |
| BRSSN2009119 | 0 | 0 | 0 | 0 | 0 | 31.852 | 0 |
| BRSSN2009518 | 0 | 0 | 0 | 11.827 | 6.078 | 0 | 0 |
| BRSSN2011653 | 0 | 0 | 38.627 | 0 | 0 | 0 | 0 |
| BRSSN2014299 | 0 | 0 | 0 | 0 | 0 | 6.428 | 0 |
| BRSSN2015238 | 0 | 0 | 0 | 0 | 0 | 11.911 | 0 |
| BRSTN1000083 | 0 | 0 | 0 | 0 | 0 | 1.111 | 0 |
| BRSTN2011961 | 0 | 0 | 0 | 0 | 1.022 | 1.008 | 0 |
| BRSTN2012069 | 0 | 0.067 | 0.958 | 0.844 | 1.202 | 0.543 | 1.995 |
| BRSTN2012174 | 0 | 0 | 3.153 | 0 | 0.714 | 0 | 0 |
| BRSTN2013171 | 0 | 0 | 0 | 0 | 0 | 6.028 | 0 |
| BRSTN2016470 | 0 | 6.169 | 0 | 0 | 0 | 0 | 1.490 |
| BRSTN2016992 | 0 | 3.468 | 0 | 0 | 0 | 0 | 0 |
| BRSTN2017104 | 0 | 0 | 0 | 0 | 0 | 3.392 | 0 |
| BRTHA2005864 | 0 | 0 | 0 | 0 | 0 | 2.823 | 11.042 |
| BRTHA2016215 | 0 | 0 | 0 | 0 | 0 | 61.070 | 0 |
| BRTHA2026071 | 0 | 0 | 0 | 0 | 43.314 | 0 | 0 |
| BRTHA2027229 | 0 | 0 | 0 | 0 | 3.230 | 0 | 0 |
| BRTHA2033469 | 0 | 0 | 0 | 0 | 0 | 61.070 | 0 |
| BRTHA3003736 | 0 | 0 | 16.769 | 14.770 | 0 | 0 | 0 |
| BRTHA3011194 | 0 | 0 | 27.553 | 0 | 0 | 0 | 0 |
| BRTHA3021971 | 0 | 0 | 0 | 0 | 6.849 | 0 | 0 |
| CHONS2002829 | 0 | 0 | 0 | 0 | 0 | 2.842 | 11.118 |
| COLON2002443 | 0 | 0 | 0 | 0 | 0 | 0 | 30.687 |
| CTONG1000010 | 0 | 0 | 0 | 0 | 0 | 11.278 | 0 |
| CTONG1000052 | 0 | 0 | 0 | 0 | 0 | 3.153 | 0 |
| CTONG1000094 | 0 | 0 | 0 | 0 | 0 | 0.678 | 0 |
| CTONG1000241 | 0 | 0 | 0 | 0 | 0 | 3.690 | 0 |
| CTONG1000341 | 0 | 0 | 0 | 0 | 0 | 48.294 | 0 |
| CTONG2000063 | 0 | 0 | 16.688 | 0 | 0 | 0 | 0 |
| CTONG2000452 | 0 | 0 | 0 | 0 | 0 | 0 | 19.820 |
| CTONG2000508 | 0 | 0 | 0 | 0 | 0 | 2.748 | 0 |
| CTONG2001226 | 0 | 0 | 0 | 0 | 0 | 0 | 51.655 |
| CTONG2001932 | 0 | 0 | 0 | 0 | 0 | 17.973 | 0 |
| CTONG2002270 | 0 | 0 | 0 | 0 | 0 | 0.923 | 0 |
| CTONG2002558 | 0 | 0 | 0 | 0 | 0 | 48.294 | 0 |
| CTONG2002744 | 0 | 0 | 0 | 0 | 0 | 1.024 | 0 |
| CTONG2003298 | 0 | 0 | 0 | 0 | 0 | 1.262 | 0 |
| CTONG2003361 | 0 | 0 | 0 | 0 | 0 | 40.876 | 0 |
| CTONG2003680 | 0 | 0 | 80.715 | 0 | 0 | 0 | 0 |
| CTONG2004397 | 0 | 0 | 0 | 0 | 0 | 48.294 | 0 |
| CTONG2005553 | 0 | 0 | 0 | 0 | 0 | 1.246 | 0 |
| CTONG2006004 | 0 | 0 | 0 | 0 | 0 | 3.672 | 0 |
| CTONG2006562 | 0 | 0 | 10.914 | 0 | 0 | 0 | 0 |
| CTONG2006611 | 0 | 0 | 0 | 0 | 0 | 12.562 | 0 |
| CTONG2006709 | 0 | 0 | 0 | 0 | 0 | 8.998 | 0 |
| CTONG2006932 | 0 | 0 | 0 | 0 | 0 | 1.914 | 0 |
| CTONG2007007 | 0 | 13.119 | 0 | 0 | 0 | 0 | 0 |
| CTONG2007078 | 0 | 0 | 9.962 | 8.775 | 0 | 0 | 0 |
| CTONG2007500 | 0 | 0 | 0 | 0 | 5.308 | 2.617 | 0 |
| CTONG2008506 | 0 | 0 | 0 | 6.461 | 0 | 0 | 0 |
| CTONG2010348 | 0 | 0 | 0 | 0 | 0 | 3.080 | 0 |
| CTONG2010408 | 0 | 0 | 0 | 0 | 30.235 | 0 | 0 |
| CTONG2011716 | 0 | 0 | 0 | 0 | 0 | 48.294 | 0 |
| CTONG2012425 | 0 | 0 | 0 | 0 | 0 | 48.294 | 0 |
| CTONG2012452 | 0 | 0 | 2.776 | 0 | 2.513 | 0 | 4.847 |
| CTONG2012847 | 0 | 0 | 0 | 0 | 0 | 0 | 11.719 |
| CTONG2013348 | 0 | 0 | 0 | 0 | 0 | 9.570 | 0 |
| CTONG2013907 | 0 | 0 | 16.806 | 0 | 0 | 3.750 | 0 |
| CTONG2013985 | 0 | 0 | 45.651 | 0 | 0 | 0 | 0 |
| CTONG2014165 | 0 | 0 | 0 | 0 | 0 | 16.752 | 0 |
| CTONG2014389 | 0 | 0 | 0 | 0 | 9.321 | 0 | 0 |
| CTONG2014954 | 0 | 0 | 0 | 0 | 43.143 | 0 | 0 |
| CTONG2015091 | 0 | 0 | 6.331 | 0 | 0 | 0 | 0 |
| CTONG2015815 | 0 | 0 | 68.575 | 0 | 0 | 0 | 0 |
| CTONG2016185 | 0 | 0 | 0 | 0 | 0 | 4.522 | 0 |
| CTONG2016575 | 0 | 0 | 3.876 | 0 | 0 | 0.865 | 0 |
| CTONG2016869 | 0 | 0 | 0 | 0 | 0 | 4.595 | 0 |
| CTONG2017444 | 0 | 0 | 0 | 0 | 0 | 0 | 25.060 |
| CTONG2017998 | 0 | 0 | 0 | 0 | 0 | 4.358 | 0 |
| CTONG2018211 | 0 | 0 | 0 | 0 | 12.035 | 0 | 0 |
| CTONG2018383 | 0 | 0 | 0 | 0 | 0 | 7.864 | 0 |
| CTONG2018637 | 0 | 0 | 0 | 0 | 0 | 11.413 | 0 |
| CTONG2018898 | 0 | 0 | 0 | 0 | 0 | 5.027 | 0 |
| CTONG2021289 | 0 | 0 | 0 | 0 | 0 | 17.899 | 0 |
| CTONG2028124 | 0 | 0 | 0 | 0 | 3.547 | 0.874 | 0 |
| CTONG3003972 | 0 | 0 | 0 | 0 | 0 | 48.294 | 0 |
| CTONG3008894 | 0 | 0 | 5.667 | 0 | 0 | 0 | 0 |
| CTONG3009239 | 0 | 0 | 0 | 0 | 0 | 2.512 | 0 |
| D3OST1000270 | 0 | 18.206 | 0 | 0 | 0 | 0 | 0 |
| D3OST2002068 | 0 | 0 | 1.675 | 0 | 0 | 0.374 | 0 |
| D9OST2002608 | 0 | 0 | 0 | 0 | 0 | 19.379 | 0 |
| DFNES1000083 | 0 | 0 | 17.535 | 0 | 0 | 0 | 0 |
| DFNES1000150 | 0 | 0 | 0 | 0 | 0 | 1.943 | 0 |
| DFNES2000153 | 0 | 0 | 0 | 21.984 | 0 | 0 | 0 |
| DFNES2000443 | 0 | 0 | 5.292 | 0 | 0 | 0 | 0 |
| DFNES2003081 | 0 | 0 | 0 | 0 | 0 | 0 | 53.591 |
| DFNES2005766 | 0 | 0 | 0 | 0 | 0 | 3.189 | 0 |
| DFNES2006346 | 0 | 0 | 0 | 0 | 0 | 12.289 | 0 |
| DFNES2007634 | 0 | 0 | 0 | 0 | 0 | 1.546 | 0 |
| FCBBF1000027 | 0 | 0 | 2.855 | 0 | 0 | 1.274 | 0 |
| FCBBF1000077 | 0 | 0 | 0 | 0 | 0 | 1.409 | 0 |
| FCBBF1000197 | 0 | 0 | 0 | 0 | 0 | 1.858 | 0 |
| FCBBF1000294 | 0 | 0 | 0 | 0 | 0 | 1.873 | 0 |
| FCBBF1000367 | 0 | 0 | 11.842 | 0 | 0 | 0 | 0 |
| FCBBF1000403 | 0 | 0 | 0 | 0 | 29.596 | 0 | 0 |
| FCBBF1000412 | 0 | 0 | 0 | 0 | 6.829 | 0 | 0 |
| FCBBF1000437 | 0 | 0 | 0 | 0 | 0 | 44.494 | 0 |
| FCBBF1000466 | 0 | 0 | 4.964 | 0 | 2.247 | 0 | 0 |
| FCBBF1000574 | 0 | 0 | 0 | 0 | 7.325 | 7.222 | 0 |
| FCBBF1000732 | 0 | 39.461 | 0 | 0 | 0 | 4.871 | 0 |
| FCBBF1000760 | 0 | 0 | 0 | 0 | 0 | 3.418 | 0 |
| FCBBF2000591 | 0 | 0 | 0 | 0 | 0 | 0.499 | 0 |
| FCBBF2001211 | 0 | 0 | 0 | 0 | 22.614 | 0 | 0 |
| FCBBF2001291 | 0 | 0 | 0 | 0 | 0 | 6.619 | 0 |
| FCBBF2002801 | 0 | 0 | 0 | 17.821 | 0 | 0 | 0 |
| FCBBF2002928 | 0 | 0 | 24.255 | 0 | 0 | 0 | 0 |
| FCBBF2003549 | 0 | 0 | 0 | 78.798 | 0 | 0 | 0 |
| FCBBF3000110 | 0 | 0 | 0 | 0 | 0 | 11.235 | 0 |
| FCBBF3000115 | 0 | 0 | 0 | 0 | 0 | 6.943 | 0 |
| FCBBF3000227 | 0 | 79.227 | 0 | 0 | 0 | 0 | 0 |
| FCBBF3000388 | 0 | 0 | 0 | 0 | 8.716 | 4.297 | 0 |
| FCBBF3001470 | 0 | 0 | 0 | 0 | 0 | 2.361 | 0 |
| FCBBF3003800 | 0 | 0 | 0 | 0 | 1.390 | 1.371 | 0 |
| FCBBF3004473 | 0 | 0 | 0 | 0 | 0 | 1.999 | 0 |
| FCBBF3005320 | 0 | 0 | 0 | 0 | 0 | 4.746 | 0 |
| FCBBF3005330 | 0 | 0 | 0 | 0 | 2.445 | 0 | 0 |
| FCBBF3005497 | 0 | 0 | 0 | 10.796 | 0 | 1.368 | 0 |
| FCBBF3008153 | 0 | 0 | 0 | 0 | 0 | 9.518 | 0 |
| FCBBF3008938 | 0 | 0 | 0 | 0 | 0 | 48.497 | 0 |
| FCBBF3009479 | 0 | 0 | 0 | 0 | 34.906 | 0 | 0 |
| FCBBF3009541 | 0 | 0 | 12.854 | 0 | 0 | 0 | 0 |
| FCBBF3013589 | 0 | 0 | 64.676 | 0 | 0 | 0 | 0 |
| FCBBF3014260 | 0 | 0 | 17.601 | 0 | 0 | 0 | 0 |
| FCBBF3016928 | 0 | 0 | 0 | 0 | 0 | 1.524 | 0 |
| FCBBF3018796 | 0 | 21.875 | 0 | 0 | 0 | 0 | 0 |
| FCBBF3019714 | 0 | 0 | 0 | 0 | 7.228 | 0 | 0 |
| FCBBF3020599 | 0 | 0 | 0 | 0 | 0 | 48.497 | 0 |
| FCBBF3023667 | 0 | 0 | 1.035 | 2.735 | 0.469 | 0.462 | 0 |
| FCBBF3026308 | 0 | 0 | 0 | 0 | 0 | 22.234 | 0 |
| FCBBF3028593 | 0 | 0 | 0 | 0 | 14.248 | 0 | 0 |
| FCBBF4000446 | 0 | 0 | 0 | 0 | 0 | 0 | 5.112 |
| FCBBF4000500 | 0 | 61.755 | 0 | 0 | 0 | 0 | 0 |
| FEBRA1000022 | 0 | 0 | 41.028 | 0 | 0 | 0 | 0 |
| FEBRA1000190 | 0 | 0 | 61.954 | 0 | 0 | 0 | 0 |
| FEBRA2000105 | 0 | 0 | 0 | 0 | 12.654 | 0 | 0 |
| FEBRA2000129 | 0 | 0 | 0 | 0 | 18.347 | 0 | 0 |
| FEBRA2000210 | 0 | 0 | 0 | 0 | 0 | 1.230 | 0 |
| FEBRA2000228 | 0 | 0 | 0 | 0 | 13.939 | 0 | 0 |
| FEBRA2000452 | 0 | 0 | 0 | 0 | 0 | 1.745 | 0 |
| FEBRA2000510 | 0 | 0 | 0 | 0 | 0 | 6.419 | 0 |
| FEBRA2000733 | 0 | 0 | 1.314 | 3.471 | 1.189 | 0.293 | 2.294 |
| FEBRA2000740 | 0 | 7.969 | 0 | 0 | 0 | 0 | 0 |
| FEBRA2000762 | 0 | 0 | 0 | 0 | 21.951 | 0 | 0 |
| FEBRA2000787 | 0 | 0 | 0 | 0 | 6.970 | 3.436 | 0 |
| FEBRA2000880 | 0 | 0 | 0 | 0 | 0 | 18.435 | 0 |
| FEBRA2001294 | 0 | 0 | 0 | 0 | 0 | 4.204 | 0 |
| FEBRA2001492 | 0 | 0 | 0 | 0 | 0 | 5.630 | 0 |
| FEBRA2001523 | 0 | 0 | 0 | 0 | 0 | 14.791 | 0 |
| FEBRA2001571 | 0 | 0 | 0 | 0 | 0 | 10.945 | 0 |
| FEBRA2001581 | 0 | 0 | 0 | 0 | 0 | 21.399 | 0 |
| FEBRA2001669 | 0 | 0 | 0 | 0 | 0 | 1.864 | 0 |
| FEBRA2001828 | 0 | 0 | 0 | 0 | 0 | 9.465 | 0 |
| FEBRA2002352 | 0 | 0 | 0 | 0 | 0 | 6.039 | 0 |
| FEBRA2002933 | 0 | 0 | 0 | 0 | 0 | 1.288 | 0 |
| FEBRA2003100 | 0 | 0 | 0 | 0 | 2.324 | 0 | 0 |
| FEBRA2003258 | 0 | 0 | 0 | 38.852 | 0 | 0 | 0 |
| FEBRA2003436 | 0 | 0 | 0 | 0 | 19.617 | 0 | 0 |
| FEBRA2003750 | 0 | 0 | 0 | 0 | 0 | 0 | 12.423 |
| FEBRA2003926 | 0 | 0 | 0 | 0 | 2.463 | 0 | 0 |
| FEBRA2003930 | 0 | 0 | 0 | 0 | 6.342 | 3.127 | 0 |
| FEBRA2004042 | 0 | 0 | 0 | 0 | 0 | 3.690 | 0 |
| FEBRA2004224 | 0 | 0 | 0 | 7.949 | 0 | 0 | 0 |
| FEBRA2004293 | 0 | 0 | 0 | 0 | 0 | 9.249 | 0 |
| FEBRA2004412 | 0 | 0 | 0 | 20.159 | 0 | 0 | 0 |
| FEBRA2004628 | 0 | 0 | 0 | 0 | 0 | 14.887 | 0 |
| FEBRA2005572 | 0 | 0 | 0 | 0 | 0 | 6.199 | 0 |
| FEBRA2005734 | 0 | 0 | 0 | 0 | 5.959 | 0 | 0 |
| FEBRA2005778 | 0 | 0 | 0 | 41.192 | 0 | 0 | 0 |
| FEBRA2005788 | 0 | 34.776 | 0 | 0 | 0 | 0 | 0 |
| FEBRA2005824 | 0 | 0 | 0 | 0 | 1.316 | 0.649 | 0 |
| FEBRA2006092 | 0 | 0 | 0 | 4.269 | 2.194 | 0 | 0 |
| FEBRA2006270 | 0 | 0 | 9.113 | 0 | 0 | 0 | 0 |
| FEBRA2006346 | 0 | 0 | 0 | 0 | 52.422 | 0 | 0 |
| FEBRA2006401 | 0 | 0 | 0 | 0 | 0 | 0.437 | 0 |
| FEBRA2006491 | 0 | 0 | 0 | 0 | 0 | 25.833 | 0 |
| FEBRA2006736 | 0 | 0 | 0 | 0 | 52.422 | 0 | 0 |
| FEBRA2007622 | 0 | 0 | 8.042 | 0 | 0 | 0 | 0 |
| FEBRA2007801 | 0 | 0 | 0 | 0 | 0 | 8.589 | 0 |
| FEBRA2007901 | 0 | 0 | 0 | 0 | 0 | 6.447 | 0 |
| FEBRA2008081 | 0 | 0 | 0 | 0 | 0 | 3.696 | 0 |
| FEBRA2008087 | 0 | 0 | 1.397 | 1.231 | 1.265 | 0.312 | 0 |
| FEBRA2008201 | 0 | 0 | 0 | 16.466 | 0 | 0 | 0 |
| FEBRA2008210 | 0 | 0 | 0 | 0 | 23.668 | 0 | 0 |
| FEBRA2008302 | 0 | 0 | 0 | 0 | 0 | 3.703 | 0 |
| FEBRA2008341 | 0 | 0 | 0 | 0 | 23.180 | 11.427 | 0 |
| FEBRA2008475 | 0 | 0 | 0 | 57.933 | 0 | 0 | 0 |
| FEBRA2008583 | 0 | 0 | 0 | 0 | 0.466 | 0 | 0 |
| FEBRA2008755 | 0 | 0 | 0 | 0 | 0 | 2.858 | 0 |
| FEBRA2009022 | 0 | 0 | 26.033 | 0 | 0 | 5.810 | 0 |
| FEBRA2009541 | 0 | 0 | 0 | 0 | 0 | 28.935 | 0 |
| FEBRA2014417 | 0 | 0 | 0 | 3.707 | 0 | 0 | 0 |
| FEBRA2018476 | 0 | 0 | 0 | 7.502 | 0 | 1.901 | 7.436 |
| FEBRA2019711 | 0 | 0 | 16.484 | 0 | 0 | 3.679 | 0 |
| FEBRA2020977 | 0 | 0 | 0 | 0 | 0 | 0 | 35.859 |
| FEBRA2021636 | 0 | 0 | 0 | 0 | 0 | 35.199 | 0 |
| FEBRA2021966 | 0 | 0 | 0 | 29.618 | 0 | 7.504 | 0 |
| FEBRA2022055 | 0 | 0 | 0 | 0 | 0 | 3.703 | 3.621 |
| FEBRA2023227 | 0 | 0 | 39.925 | 0 | 0 | 0 | 0 |
| FEBRA2025427 | 0 | 0 | 0 | 0 | 8.747 | 0 | 0 |
| FEHRT2000364 | 0 | 0 | 0 | 0 | 0 | 7.710 | 0 |
| FELIV1000153 | 0 | 0 | 1.286 | 1.132 | 0 | 1.148 | 1.122 |
| HCASM2000363 | 0 | 0 | 0 | 0 | 0 | 1.183 | 0 |
| HCHON1000015 | 0 | 54.915 | 0 | 0 | 0 | 2.712 | 0 |
| HCHON1000030 | 0 | 0 | 4.242 | 1.245 | 1.920 | 1.893 | 0 |
| HCHON1000131 | 0 | 0 | 0 | 0 | 0 | 14.275 | 0 |
| HCHON1000166 | 0 | 0 | 0 | 0 | 21.230 | 0 | 0 |
| HCHON2000028 | 0 | 0 | 0 | 0 | 0 | 2.760 | 0 |
| HCHON2000056 | 0 | 0 | 0 | 0 | 1.001 | 1.480 | 0 |
| HCHON2000087 | 0 | 0 | 0 | 0 | 0 | 2.152 | 0 |
| HCHON2000160 | 0 | 0 | 15.694 | 0 | 0 | 3.502 | 0 |
| HCHON2000226 | 0 | 0 | 0 | 0 | 0 | 2.806 | 0 |
| HCHON2000244 | 0 | 0 | 0 | 0 | 4.643 | 0 | 0 |
| HCHON2000295 | 0 | 3.086 | 0 | 0 | 0 | 0.762 | 0 |
| HCHON2000323 | 0 | 0 | 0 | 0 | 0 | 3.223 | 0 |
| HCHON2000373 | 0 | 0 | 0 | 0 | 0 | 0 | 6.897 |
| HCHON2000475 | 0 | 0 | 10.376 | 0 | 0 | 0 | 0 |
| HCHON2000626 | 0 | 0 | 0 | 0 | 4.148 | 0 | 0 |
| HCHON2000738 | 0 | 0 | 23.211 | 0 | 0 | 0 | 0 |
| HCHON2000751 | 0 | 0 | 0 | 0 | 0 | 6.211 | 0 |
| HCHON2000826 | 0 | 0 | 0 | 0 | 0 | 0 | 4.870 |
| HCHON2001039 | 0 | 0 | 0 | 0 | 3.937 | 0 | 0 |
| HCHON2001200 | 0 | 0 | 3.372 | 0 | 0 | 0 | 0 |
| HCHON2001217 | 0 | 0 | 0 | 7.147 | 0 | 0 | 0 |
| HCHON2001359 | 0 | 0 | 0 | 0 | 3.004 | 0 | 0 |
| HCHON2001407 | 0 | 0 | 6.156 | 0 | 0 | 0 | 0 |
| HCHON2001505 | 0 | 0 | 0 | 0 | 0 | 7.817 | 0 |
| HCHON2003642 | 0 | 0 | 0 | 0 | 0 | 21.564 | 0 |
| HCHON2004002 | 0 | 0 | 0 | 0 | 2.770 | 5.463 | 5.343 |
| HCHON2006250 | 0 | 0 | 0 | 0 | 0 | 2.722 | 0 |
| HCHON2007650 | 0 | 0 | 0 | 0 | 0 | 10.594 | 0 |
| HEART1000010 | 0 | 0 | 0 | 0 | 0 | 5.943 | 23.250 |
| HEART1000074 | 0 | 0 | 5.918 | 0 | 8.036 | 2.641 | 0 |
| HEART1000132 | 0 | 20.465 | 0 | 0 | 0 | 0 | 0 |
| HEART1000149 | 0 | 0 | 0 | 0 | 6.628 | 0 | 0 |
| HEART1000185 | 0 | 0 | 0 | 0 | 8.369 | 0 | 0 |
| HEART2000444 | 0 | 0 | 0 | 0 | 29.718 | 0 | 0 |
| HEART2000506 | 0 | 0 | 0 | 0 | 0 | 3.051 | 11.934 |
| HEART2000520 | 0 | 40.642 | 0 | 0 | 0 | 0 | 0 |
| HEART2003836 | 0 | 43.489 | 0 | 0 | 0 | 0 | 0 |
| HEART2003852 | 0 | 27.453 | 0 | 0 | 0 | 0 | 0 |
| HEART2006195 | 0 | 0 | 0 | 0 | 0 | 16.487 | 0 |
| HEART2006521 | 0 | 16.853 | 0 | 0 | 0 | 0 | 0 |
| HHDPC1000083 | 0 | 0 | 0 | 6.721 | 3.454 | 0 | 6.661 |
| HHDPC1000163 | 0 | 0 | 0 | 0 | 4.438 | 2.188 | 0 |
| HHDPC2000055 | 0 | 0 | 0 | 0 | 0 | 3.181 | 0 |
| HHDPC2000115 | 0 | 0 | 0 | 17.962 | 0 | 4.551 | 0 |
| HHDPC2000149 | 0 | 0 | 0 | 0 | 15.767 | 0 | 0 |
| HHDPC2003439 | 0 | 0 | 0 | 1.746 | 0.897 | 0.885 | 0 |
| HHDPC2003983 | 0 | 5.886 | 2.171 | 1.912 | 0 | 1.938 | 0 |
| HHDPC2005794 | 0 | 0 | 0 | 0 | 0 | 13.838 | 0 |
| HHDPC2006460 | 0 | 0 | 0 | 0 | 0 | 33.071 | 0 |
| HHDPC2007267 | 0 | 0 | 0 | 0 | 0 | 0.849 | 0 |
| HLUNG1000037 | 0 | 0 | 0 | 0 | 31.007 | 0 | 0 |
| HLUNG1000055 | 0 | 0 | 0 | 0 | 0 | 1.883 | 0 |
| HLUNG1000064 | 0 | 0 | 0 | 0 | 0 | 11.846 | 0 |
| HLUNG2000063 | 0 | 0 | 0 | 0 | 17.406 | 8.581 | 0 |
| HLUNG2000412 | 0 | 0 | 0 | 0 | 9.449 | 0 | 18.222 |
| HLUNG2000501 | 0 | 0 | 0 | 0 | 0 | 1.492 | 5.838 |
| HLUNG2000950 | 0 | 0 | 0 | 0 | 0 | 21.507 | 0 |
| HLUNG2001439 | 0 | 0 | 6.875 | 0 | 0 | 0 | 0 |
| HLUNG2001518 | 0 | 0 | 0 | 0 | 0 | 7.609 | 0 |
| HLUNG2002145 | 0 | 0 | 0 | 0 | 49.034 | 0 | 0 |
| HLUNG2002334 | 0 | 0 | 0 | 0 | 0 | 15.991 | 0 |
| HLUNG2002465 | 0 | 0 | 0 | 0 | 0 | 10.520 | 8.231 |
| HLUNG2002648 | 0 | 0 | 0 | 0 | 12.754 | 0 | 0 |
| HLUNG2002949 | 0 | 0 | 0 | 0 | 0 | 32.171 | 0 |
| HLUNG2003003 | 0 | 0 | 0 | 0 | 0 | 13.902 | 0 |
| HLUNG2003042 | 0 | 0 | 0 | 0 | 8.400 | 0 | 0 |
| HLUNG2003331 | 0 | 0 | 0 | 0 | 0 | 14.402 | 0 |
| HLUNG2003778 | 0 | 0 | 0 | 0 | 0 | 8.974 | 0 |
| HLUNG2004159 | 0 | 0 | 0 | 0 | 0 | 6.308 | 0 |
| HLUNG2004388 | 0 | 0 | 34.807 | 0 | 0 | 7.768 | 0 |
| HLUNG2005230 | 0 | 0 | 0 | 0 | 8.066 | 11.929 | 0 |
| HLUNG2006812 | 0 | 0 | 0 | 0 | 0 | 5.144 | 0 |
| HLUNG2006843 | 0 | 0 | 0 | 0 | 0 | 18.056 | 0 |
| HLUNG2007163 | 0 | 0 | 0 | 0 | 0 | 23.437 | 0 |
| HLUNG2008225 | 0 | 0 | 0 | 0 | 0 | 28.702 | 0 |
| HLUNG2008637 | 0 | 0 | 0 | 0 | 5.961 | 0 | 0 |
| HLUNG2008885 | 0 | 0 | 0 | 0 | 0 | 18.779 | 0 |
| HLUNG2009225 | 0 | 0 | 0 | 0 | 0 | 5.247 | 0 |
| HSYRA1000062 | 0 | 0 | 0 | 2.941 | 0 | 0 | 0 |
| HSYRA1000119 | 0 | 0 | 0 | 3.157 | 3.245 | 1.600 | 0 |
| HSYRA1000137 | 0 | 0 | 0 | 0 | 0 | 6.483 | 0 |
| HSYRA1000178 | 0 | 0 | 0 | 0 | 8.848 | 0 | 0 |
| HSYRA2000159 | 0 | 0 | 0 | 0 | 0.425 | 0 | 0 |
| HSYRA2000190 | 0 | 16.735 | 0 | 0 | 0 | 0 | 0 |
| HSYRA2000224 | 0 | 0 | 0 | 0 | 0 | 0 | 12.237 |
| HSYRA2000232 | 0 | 0 | 0 | 5.077 | 0 | 0 | 0 |
| HSYRA2000248 | 0 | 0 | 0 | 4.667 | 2.398 | 0 | 0 |
| HSYRA2000255 | 0 | 0 | 0 | 0 | 1.583 | 0 | 0 |
| HSYRA2000332 | 0 | 0 | 0 | 0 | 0 | 2.714 | 0 |
| HSYRA2000640 | 0 | 0 | 0 | 0 | 0 | 1.482 | 17.392 |
| HSYRA2000743 | 0 | 0 | 0 | 0 | 0 | 2.693 | 0 |
| HSYRA2000925 | 0 | 0 | 0 | 0 | 0.782 | 0 | 0 |
| HSYRA2001103 | 0 | 0 | 0 | 0 | 5.986 | 0 | 0 |
| HSYRA2001138 | 0 | 1.796 | 0 | 0 | 1.799 | 1.330 | 0 |
| HSYRA2001225 | 0 | 0 | 5.763 | 0 | 0 | 0 | 0 |
| HSYRA2001396 | 0 | 0 | 0 | 0 | 0 | 2.643 | 0 |
| HSYRA2001420 | 0 | 0 | 0 | 0 | 19.661 | 0 | 0 |
| HSYRA2001476 | 0 | 0 | 0 | 0 | 1.704 | 0 | 0 |
| HSYRA2001567 | 0 | 0 | 0 | 0 | 0 | 11.696 | 0 |
| HSYRA2001574 | 0 | 0 | 5.865 | 0 | 0 | 0 | 0 |
| HSYRA2001595 | 0 | 0 | 4.441 | 0 | 0 | 0 | 0 |
| HSYRA2001983 | 0 | 0 | 0 | 0 | 17.031 | 0 | 0 |
| HSYRA2007650 | 0 | 0 | 0 | 0 | 0 | 8.275 | 0 |
| IMR321000158 | 0 | 0 | 0 | 41.812 | 0 | 1.324 | 5.180 |
| IMR321000210 | 0 | 0 | 0 | 0 | 3.577 | 0 | 0 |
| IMR321000219 | 0 | 0 | 4.376 | 1.927 | 0 | 0 | 0 |
| IMR321000242 | 0 | 0 | 0 | 0 | 0 | 9.783 | 0 |
| IMR321000253 | 0 | 0 | 7.940 | 0 | 3.594 | 1.772 | 6.931 |
| IMR322000072 | 0 | 0 | 0 | 0 | 5.663 | 0 | 0 |
| IMR322000121 | 0 | 0 | 0 | 0 | 0 | 1.939 | 0 |
| IMR322000127 | 0 | 0 | 0 | 0 | 5.466 | 5.390 | 0 |
| IMR322000144 | 0 | 11.493 | 0 | 0 | 0 | 0 | 0 |
| IMR322000152 | 0 | 0 | 63.150 | 0 | 0 | 0 | 0 |
| IMR322000178 | 0 | 0 | 0 | 0 | 6.563 | 0 | 0 |
| IMR322000223 | 0 | 0 | 0 | 4.675 | 0 | 2.369 | 0 |
| IMR322000243 | 0 | 0 | 0 | 0 | 0 | 1.493 | 5.838 |
| IMR322000302 | 0 | 0 | 0 | 40.734 | 0 | 0 | 0 |
| IMR322000316 | 0 | 0 | 0 | 2.849 | 0 | 0 | 0 |
| IMR322000374 | 0 | 0 | 0 | 37.822 | 0 | 0 | 0 |
| IMR322000730 | 0 | 0.966 | 0 | 0.941 | 0 | 0.238 | 0.933 |
| IMR322000742 | 0 | 0 | 0 | 0 | 5.843 | 0 | 0 |
| IMR322000935 | 0 | 10.549 | 0 | 0 | 0 | 0 | 0 |
| IMR322000973 | 0 | 0 | 0 | 0 | 2.845 | 0 | 0 |
| IMR322001049 | 0 | 0 | 0 | 0 | 0 | 10.077 | 0 |
| IMR322001218 | 0 | 7.888 | 0 | 0 | 0 | 0 | 0 |
| IMR322001317 | 0 | 38.949 | 0 | 0 | 0 | 0 | 0 |
| IMR322001435 | 0 | 0 | 0 | 0 | 0 | 4.903 | 6.393 |
| IMR322001438 | 0 | 0 | 64.780 | 0 | 0 | 0 | 0 |
| IMR322001541 | 0 | 23.840 | 0 | 0 | 0 | 0 | 0 |
| IMR322001584 | 0 | 0 | 0 | 0 | 0 | 4.343 | 0 |
| IMR322001600 | 0 | 0 | 3.766 | 0 | 0 | 0 | 0 |
| JCMLC2000273 | 0 | 0 | 0 | 0 | 0 | 5.376 | 0 |
| KIDNE1000145 | 0 | 0 | 0 | 0 | 0 | 9.622 | 0 |
| KIDNE2000085 | 0 | 0 | 0 | 0 | 0 | 3.578 | 0 |
| KIDNE2000252 | 0 | 0 | 0 | 5.868 | 0 | 0 | 0 |
| KIDNE2000266 | 0 | 0 | 0 | 0 | 14.858 | 7.325 | 0 |
| KIDNE2000383 | 0 | 0 | 0 | 0 | 0 | 8.567 | 0 |
| KIDNE2000497 | 0 | 22.095 | 0 | 0 | 0 | 0 | 0 |
| KIDNE2000574 | 0 | 0 | 5.835 | 0 | 0 | 1.302 | 0 |
| KIDNE2000777 | 0 | 0 | 0 | 0 | 13.468 | 0 | 12.986 |
| KIDNE2000833 | 0 | 0 | 0 | 49.464 | 25.421 | 0 | 0 |
| KIDNE2000909 | 0 | 0 | 0 | 0 | 14.489 | 3.571 | 0 |
| KIDNE2001162 | 0 | 0 | 0 | 16.024 | 4.941 | 1.624 | 0 |
| KIDNE2001373 | 0 | 0 | 0 | 0 | 25.141 | 0 | 0 |
| KIDNE2001467 | 0 | 0 | 0 | 0 | 0 | 0.453 | 0 |
| KIDNE2002252 | 0 | 0 | 0 | 0 | 0 | 3.792 | 0 |
| KIDNE2002872 | 0 | 0 | 0 | 0 | 0 | 0.995 | 0 |
| KIDNE2002883 | 0 | 0 | 0 | 0 | 0 | 3.946 | 0 |
| KIDNE2003305 | 0 | 0 | 0 | 0 | 2.970 | 0 | 0 |
| KIDNE2003507 | 0 | 0 | 0 | 0 | 0 | 5.890 | 0 |
| KIDNE2003941 | 0 | 0 | 3.932 | 0 | 0 | 0 | 0 |
| KIDNE2003994 | 0 | 0 | 62.857 | 0 | 0 | 0 | 0 |
| KIDNE2004475 | 0 | 0 | 0 | 0 | 0 | 4.478 | 0 |
| KIDNE2004864 | 0 | 0 | 0 | 0 | 34.453 | 16.985 | 0 |
| KIDNE2006009 | 0 | 0 | 0 | 0 | 0 | 6.414 | 0 |
| KIDNE2006014 | 0 | 0 | 0 | 0 | 10.478 | 5.165 | 0 |
| KIDNE2006039 | 0 | 0 | 0 | 0 | 0 | 27.461 | 0 |
| KIDNE2006248 | 0 | 2.191 | 0 | 0 | 0 | 1.082 | 2.116 |
| KIDNE2006353 | 0 | 0 | 0 | 0 | 0 | 6.803 | 0 |
| KIDNE2006811 | 0 | 22.929 | 0 | 0 | 0 | 0 | 0 |
| KIDNE2007005 | 0 | 0 | 0 | 0 | 0 | 33.289 | 0 |
| KIDNE2007186 | 0 | 0 | 0 | 0 | 0 | 33.289 | 0 |
| KIDNE2007328 | 0 | 0 | 0 | 0 | 0 | 3.078 | 0 |
| KIDNE2007352 | 0 | 0 | 0 | 0 | 4.401 | 3.616 | 0 |
| KIDNE2007811 | 0 | 0 | 0 | 0 | 30.232 | 0 | 0 |
| KIDNE2007910 | 0 | 0 | 0 | 0 | 31.979 | 0 | 0 |
| KIDNE2008048 | 0 | 0 | 0 | 0 | 1.893 | 1.866 | 0 |
| KIDNE2008649 | 0 | 0 | 0 | 0 | 9.333 | 1.534 | 0 |
| KIDNE2008987 | 0 | 0 | 0 | 0 | 10.165 | 0 | 0 |
| KIDNE2010265 | 0 | 0 | 0 | 0 | 0 | 4.110 | 0 |
| KIDNE2012025 | 0 | 0 | 0 | 16.112 | 0 | 0 | 0 |
| KIDNE2013845 | 0 | 0 | 0 | 0 | 0 | 7.777 | 7.606 |
| KIDNE2014119 | 0 | 0 | 0 | 0 | 50.303 | 0 | 0 |
| KIDNE2014290 | 0 | 0 | 0 | 0 | 2.474 | 7.317 | 4.771 |
| KIDNE2015445 | 0 | 0 | 0 | 0 | 12.123 | 5.977 | 0 |
| KIDNE2017343 | 0 | 0 | 0 | 0 | 46.618 | 0 | 0 |
| KIDNE2018352 | 0 | 0 | 0 | 0 | 0 | 6.204 | 0 |
| KIDNE2018493 | 0 | 0 | 0 | 0 | 12.574 | 6.199 | 0 |
| KIDNE2018891 | 0 | 0 | 0 | 0 | 21.519 | 10.609 | 0 |
| LIVER1000132 | 0 | 0 | 0 | 0 | 3.532 | 0.871 | 0 |
| LIVER1000421 | 0 | 0 | 0 | 0 | 28.931 | 0 | 0 |
| LIVER2002842 | 0 | 0 | 0 | 0 | 6.736 | 3.321 | 0 |
| LIVER2005789 | 0 | 0 | 0 | 0 | 0 | 1.566 | 6.126 |
| LIVER2007783 | 0 | 0 | 0 | 0 | 0 | 3.569 | 0 |
| LIVER2008751 | 0 | 0 | 0 | 0 | 0 | 15.105 | 0 |
| MAMGL1000032 | 0 | 0 | 0 | 1.106 | 0.569 | 0.280 | 0 |
| MAMGL1000035 | 0 | 0 | 0 | 0 | 0.711 | 0.350 | 0 |
| MAMGL1000173 | 0 | 0 | 0 | 0 | 0.935 | 0 | 0 |
| MAMGL1000178 | 0 | 0 | 0 | 0 | 0 | 0.532 | 0 |
| MESAN1000126 | 0 | 0 | 0 | 12.261 | 0 | 0 | 0 |
| MESAN2000149 | 0 | 0 | 0 | 0 | 17.337 | 0 | 0 |
| MESAN2000264 | 0 | 0 | 0 | 13.531 | 0 | 0 | 0 |
| MESAN2000267 | 0 | 0 | 0 | 0 | 0 | 1.425 | 0 |
| MESAN2000501 | 0 | 0 | 0 | 0 | 0 | 10.438 | 0 |
| MESAN2000608 | 0 | 0 | 6.130 | 0 | 2.775 | 0 | 0 |
| MESAN2001154 | 0 | 0 | 0 | 9.148 | 0 | 0 | 0 |
| MESAN2002086 | 0 | 0 | 0 | 2.858 | 0 | 2.897 | 0 |
| MESAN2002940 | 0 | 0 | 0 | 21.837 | 0 | 0 | 0 |
| MESAN2003444 | 0 | 0 | 0 | 0 | 0 | 6.480 | 0 |
| MESAN2004288 | 0 | 0 | 40.508 | 0 | 0 | 0 | 0 |
| MESAN2005284 | 0 | 0 | 0 | 0 | 0 | 8.436 | 0 |
| MESAN2005689 | 0 | 0 | 0 | 0 | 0 | 10.794 | 0 |
| MESAN2005958 | 0 | 0 | 0 | 0 | 0 | 9.370 | 0 |
| MESAN2006563 | 0 | 0 | 0 | 4.741 | 2.437 | 0 | 0 |
| MESAN2009081 | 0 | 0 | 0 | 0 | 0 | 8.188 | 0 |
| MESAN2009580 | 0 | 0 | 0 | 0 | 0 | 1.932 | 0 |
| MESAN2013284 | 0 | 0 | 9.574 | 0 | 0 | 0 | 0 |
| NB9N41000135 | 0 | 0 | 0 | 15.228 | 0 | 0 | 0 |
| NB9N42000281 | 0 | 0 | 0 | 0 | 0 | 3.326 | 0 |
| NESOP1000087 | 0 | 0 | 0 | 0 | 14.226 | 0 | 0 |
| NHNPC2000062 | 0 | 0 | 0 | 0 | 14.790 | 7.291 | 0 |
| NHNPC2000206 | 0 | 0 | 0 | 0 | 0 | 1.195 | 0 |
| NOVAR1000015 | 0 | 0 | 0 | 0 | 10.715 | 0 | 0 |
| NOVAR2000038 | 0 | 4.377 | 0 | 0 | 0 | 3.242 | 4.227 |
| NT2NE1000163 | 0 | 0 | 0 | 0 | 0 | 0.705 | 0 |
| NT2NE2000056 | 0 | 0 | 0 | 5.395 | 0 | 0.683 | 0 |
| NT2NE2000174 | 0 | 0 | 0 | 5.240 | 0 | 0 | 0 |
| NT2NE2000259 | 0 | 0 | 0 | 0 | 0 | 4.893 | 0 |
| NT2NE2000260 | 0 | 0 | 0 | 0 | 0.426 | 0 | 0 |
| NT2NE2000383 | 0 | 0 | 0 | 0 | 0 | 2.643 | 0 |
| NT2NE2000470 | 0 | 0 | 42.540 | 0 | 0 | 9.493 | 0 |
| NT2NE2000575 | 0 | 0 | 0 | 0 | 2.545 | 2.927 | 0 |
| NT2NE2000707 | 0 | 0 | 0 | 4.596 | 1.181 | 1.164 | 0 |
| NT2NE2000763 | 0 | 0 | 0 | 0 | 0 | 2.088 | 0 |
| NT2NE2000950 | 0 | 0 | 40.857 | 0 | 0 | 0 | 0 |
| NT2NE2000963 | 0 | 0 | 0 | 0 | 1.619 | 0 | 1.561 |
| NT2NE2001000 | 0 | 0 | 0 | 0 | 0 | 4.491 | 0 |
| NT2NE2001049 | 0 | 0 | 0 | 0 | 0 | 15.287 | 0 |
| NT2NE2001156 | 0 | 0 | 43.812 | 0 | 0 | 9.777 | 0 |
| NT2NE2001181 | 0 | 0 | 0 | 0 | 0 | 32.433 | 0 |
| NT2NE2001617 | 0 | 0 | 0 | 0 | 16.009 | 0 | 0 |
| NT2NE2001793 | 0 | 0 | 0 | 0 | 0 | 1.804 | 0 |
| NT2NE2003185 | 0 | 0 | 0 | 0 | 0 | 6.594 | 0 |
| NT2NE2003485 | 0 | 0 | 0 | 0 | 0 | 4.049 | 0 |
| NT2NE2004519 | 0 | 0 | 0 | 0 | 0 | 6.235 | 0 |
| NT2NE2005371 | 0 | 0 | 0 | 0 | 0 | 0 | 37.523 |
| NT2NE2005441 | 0 | 0 | 0 | 0 | 0 | 0 | 21.143 |
| NT2NE2005688 | 0 | 0 | 0 | 0 | 0 | 1.299 | 0 |
| NT2NE2005876 | 0 | 0 | 0 | 10.128 | 0 | 2.566 | 0 |
| NT2NE2006075 | 0 | 0 | 0 | 0 | 0 | 13.704 | 0 |
| NT2NE2006458 | 0 | 0 | 0 | 0 | 0 | 2.459 | 0 |
| NT2NE2011684 | 0 | 0 | 68.264 | 0 | 0 | 0 | 0 |
| NT2NE2012790 | 0 | 42.270 | 0 | 0 | 0 | 0 | 0 |
| NT2NE2018180 | 0 | 0 | 29.311 | 0 | 0 | 0 | 0 |
| NT2RI1000027 | 0 | 0 | 0 | 0 | 0 | 3.518 | 0 |
| NT2RI2000064 | 0 | 0 | 4.196 | 3.696 | 1.899 | 0.936 | 0 |
| NT2RI2000107 | 0 | 0 | 0 | 0 | 0 | 4.029 | 0 |
| NT2RI2000255 | 0 | 0 | 9.331 | 0 | 4.224 | 0 | 8.145 |
| NT2RI2000263 | 0 | 12.053 | 0 | 0 | 0 | 0 | 0 |
| NT2RI2000282 | 0 | 0 | 0 | 6.520 | 3.351 | 1.101 | 0 |
| NT2RI2000284 | 0 | 0 | 0 | 0 | 1.609 | 3.172 | 0 |
| NT2RI2000412 | 0 | 0 | 0 | 0 | 0 | 13.408 | 0 |
| NT2RI2000671 | 0 | 0 | 0 | 0 | 3.712 | 1.830 | 0 |
| NT2RI2000685 | 0 | 0 | 0 | 0 | 0 | 5.171 | 6.742 |
| NT2RI2000689 | 0 | 0 | 0 | 0 | 0 | 2.690 | 0 |
| NT2RI2000727 | 0 | 0 | 2.017 | 1.776 | 0 | 0.900 | 3.521 |
| NT2RI2001054 | 0 | 0 | 0 | 0 | 0 | 1.035 | 0 |
| NT2RI2001091 | 0 | 0 | 0 | 0 | 12.406 | 0 | 0 |
| NT2RI2001230 | 0 | 0 | 0 | 0 | 0 | 1.342 | 0 |
| NT2RI2001385 | 0 | 0 | 0 | 0 | 0 | 6.854 | 0 |
| NT2RI2001409 | 0 | 0 | 0 | 79.073 | 0 | 0 | 0 |
| NT2RI2001422 | 0 | 0 | 0 | 0 | 13.118 | 0 | 0 |
| NT2RI2001540 | 0 | 1.604 | 1.331 | 1.173 | 2.410 | 1.981 | 2.324 |
| NT2RI2001621 | 0 | 0 | 0 | 0 | 0 | 5.325 | 0 |
| NT2RI2001657 | 0 | 0 | 0 | 0 | 0 | 1.862 | 3.641 |
| NT2RI2001726 | 0 | 0 | 0 | 0 | 0 | 18.369 | 0 |
| NT2RI2001859 | 0 | 0 | 0 | 0 | 0 | 3.376 | 0 |
| NT2RI2002091 | 0 | 0 | 1.046 | 1.473 | 1.373 | 0.677 | 0.639 |
| NT2RI2002117 | 0 | 0 | 0 | 32.348 | 0 | 8.196 | 0 |
| NT2RI2002152 | 0 | 0 | 9.803 | 0 | 0 | 0 | 0 |
| NT2RI2002316 | 0 | 5.649 | 0 | 5.505 | 0 | 1.395 | 0 |
| NT2RI2002391 | 0 | 0 | 0 | 0 | 2.862 | 1.411 | 0 |
| NT2RI2002549 | 0 | 0 | 0 | 47.308 | 0 | 23.972 | 0 |
| NT2RI2002554 | 0 | 0 | 0 | 12.450 | 0 | 6.309 | 0 |
| NT2RI2002847 | 0 | 0 | 9.785 | 0 | 0 | 0 | 0 |
| NT2RI2002958 | 0 | 0 | 0 | 0 | 0 | 1.675 | 0 |
| NT2RI2003205 | 0 | 0 | 0 | 0 | 0 | 0 | 21.906 |
| NT2RI2003304 | 0 | 0 | 0 | 0 | 0.926 | 0 | 1.786 |
| NT2RI2003338 | 0 | 0 | 0 | 0 | 0 | 3.523 | 0 |
| NT2RI2003407 | 0 | 0 | 0 | 0 | 0 | 2.106 | 0 |
| NT2RI2003420 | 0 | 0 | 0 | 0 | 0 | 2.679 | 10.480 |
| NT2RI2003695 | 0 | 0 | 0 | 0 | 0 | 1.370 | 0 |
| NT2RI2003738 | 0 | 0 | 0 | 1.201 | 0 | 1.217 | 0 |
| NT2RI2003921 | 0 | 0 | 0 | 3.256 | 1.674 | 0.825 | 0 |
| NT2RI2004059 | 0 | 0 | 0 | 0 | 0 | 11.854 | 0 |
| NT2RI2004188 | 0 | 0 | 0 | 0 | 0 | 4.995 | 0 |
| NT2RI2004608 | 0 | 0 | 28.841 | 0 | 0 | 0 | 0 |
| NT2RI2005115 | 0 | 0 | 0 | 0 | 0 | 21.261 | 0 |
| NT2RI2005150 | 0 | 0 | 0 | 14.194 | 0 | 1.199 | 0 |
| NT2RI2005239 | 0 | 0 | 0 | 0 | 0 | 6.861 | 0 |
| NT2RI2005405 | 0 | 0 | 0 | 0 | 1.981 | 0.488 | 1.910 |
| NT2RI2005713 | 0 | 0 | 0 | 0 | 0 | 2.573 | 0 |
| NT2RI2005723 | 0 | 3.536 | 0 | 0 | 0 | 0.873 | 0 |
| NT2RI2006070 | 0 | 0 | 0 | 0 | 0 | 0 | 13.986 |
| NT2RI2006072 | 0 | 0 | 0 | 0 | 0 | 1.331 | 0 |
| NT2RI2006412 | 0 | 0 | 0 | 0 | 0 | 0 | 5.578 |
| NT2RI2006825 | 0 | 0 | 0 | 0 | 0 | 0 | 18.657 |
| NT2RI2006853 | 0 | 0 | 0 | 0 | 7.915 | 0 | 30.528 |
| NT2RI2006855 | 0 | 0 | 0 | 0 | 0 | 14.996 | 0 |
| NT2RI2006856 | 0 | 0 | 0 | 3.216 | 0 | 2.445 | 0 |
| NT2RI2007054 | 0 | 9.148 | 0 | 0 | 4.581 | 0 | 8.835 |
| NT2RI2007084 | 0 | 0 | 0 | 0 | 3.839 | 0 | 7.404 |
| NT2RI2007096 | 0 | 0 | 0 | 0 | 0 | 9.018 | 0 |
| NT2RI2007133 | 0 | 0 | 0 | 0 | 1.384 | 0.682 | 2.670 |
| NT2RI2007384 | 0 | 0 | 3.376 | 0 | 4.584 | 1.507 | 2.947 |
| NT2RI2007498 | 0 | 0 | 0 | 0 | 0 | 0 | 2.775 |
| NT2RI2007589 | 0 | 0 | 0 | 7.333 | 0 | 0 | 0 |
| NT2RI2007629 | 0 | 0 | 0 | 0 | 7.113 | 3.507 | 0 |
| NT2RI2007723 | 0 | 0 | 0 | 0 | 0 | 0 | 24.075 |
| NT2RI2007827 | 0 | 0 | 58.521 | 0 | 0 | 0 | 0 |
| NT2RI2007884 | 0 | 0 | 0 | 0 | 0 | 4.416 | 0 |
| NT2RI2007987 | 0 | 0 | 0 | 0 | 0 | 3.132 | 12.253 |
| NT2RI2008045 | 0 | 0 | 6.053 | 0 | 0 | 0 | 0 |
| NT2RI2008171 | 0 | 0 | 0 | 30.488 | 0 | 0 | 0 |
| NT2RI2008204 | 0 | 43.734 | 0 | 0 | 0 | 0 | 0 |
| NT2RI2008221 | 0 | 0 | 0 | 15.225 | 0 | 0 | 0 |
| NT2RI2008336 | 0 | 2.823 | 0 | 2.751 | 0 | 0.697 | 2.726 |
| NT2RI2008481 | 0 | 5.211 | 0 | 0 | 0 | 0 | 0 |
| NT2RI2008526 | 0 | 0 | 11.953 | 0 | 0 | 2.668 | 0 |
| NT2RI2008622 | 0 | 0 | 0 | 0 | 11.136 | 0 | 0 |
| NT2RI2008749 | 0 | 0 | 0 | 0 | 0 | 1.967 | 0 |
| NT2RI2008791 | 0 | 0 | 0 | 0 | 0 | 2.030 | 0 |
| NT2RI2008812 | 0 | 0 | 0 | 0 | 0 | 12.594 | 0 |
| NT2RI2009037 | 0 | 0 | 0 | 0 | 0 | 1.467 | 0 |
| NT2RI2009065 | 0 | 0 | 3.641 | 0 | 0 | 1.625 | 0 |
| NT2RI2009083 | 0 | 0 | 0 | 0 | 0 | 35.675 | 0 |
| NT2RI2009173 | 0 | 0 | 0 | 0 | 0 | 5.821 | 7.590 |
| NT2RI2009239 | 0 | 9.849 | 0 | 0 | 4.932 | 0 | 0 |
| NT2RI2009269 | 0 | 0 | 0 | 0 | 0 | 0 | 13.450 |
| NT2RI2009281 | 0 | 0 | 0 | 0 | 0 | 4.897 | 0 |
| NT2RI2009583 | 0 | 0 | 0 | 0 | 0.790 | 0.778 | 7.613 |
| NT2RI2012726 | 0 | 0 | 0 | 0 | 0 | 8.070 | 0 |
| NT2RI2015533 | 0 | 0 | 0 | 0 | 0 | 2.704 | 0 |
| NT2RI2017529 | 0 | 0 | 0 | 0 | 0 | 3.376 | 0 |
| NT2RI2018448 | 0 | 0 | 0 | 0 | 0 | 10.954 | 0 |
| NT2RI2022468 | 0 | 0 | 0 | 0 | 23.655 | 11.662 | 0 |
| NT2RP6000043 | 0 | 0 | 0 | 0 | 0 | 6.607 | 0 |
| NT2RP6000072 | 0 | 0 | 0 | 0 | 5.702 | 0 | 0 |
| NT2RP6000078 | 0 | 0 | 0 | 0 | 2.538 | 6.255 | 2.447 |
| NT2RP6000123 | 0 | 2.758 | 0 | 0 | 1.381 | 1.362 | 2.664 |
| NT2RP7000076 | 0 | 0 | 4.751 | 0 | 0 | 1.060 | 0 |
| NT2RP7000112 | 0 | 0 | 0 | 0 | 0 | 27.942 | 0 |
| NT2RP7000271 | 0 | 0 | 0 | 0 | 0 | 5.276 | 0 |
| NT2RP7000906 | 0 | 0 | 0 | 0 | 0 | 2.269 | 0 |
| NT2RP7001166 | 0 | 0 | 11.660 | 0 | 0 | 1.301 | 0 |
| NT2RP7001283 | 0 | 0 | 4.388 | 0 | 0 | 0.979 | 0 |
| NT2RP7001306 | 0 | 0 | 56.702 | 0 | 0 | 0 | 0 |
| NT2RP7002282 | 0 | 0 | 0 | 0 | 0 | 26.714 | 0 |
| NT2RP7002379 | 0 | 0 | 0 | 0 | 0 | 0.876 | 0 |
| NT2RP7002449 | 0 | 0 | 0 | 0 | 0 | 3.514 | 0 |
| NT2RP7002619 | 0 | 0 | 0 | 0 | 0 | 1.895 | 0 |
| NT2RP7002829 | 0 | 0 | 0 | 0 | 30.855 | 0 | 0 |
| NT2RP7003261 | 0 | 0 | 10.591 | 0 | 0 | 0 | 0 |
| NT2RP7003688 | 0 | 0 | 5.756 | 0 | 0 | 0 | 0 |
| NT2RP7004173 | 0 | 0 | 0 | 0 | 0 | 5.314 | 0 |
| NT2RP7004348 | 0 | 0 | 0 | 0 | 0 | 3.931 | 0 |
| NT2RP7004373 | 0 | 0 | 0 | 0 | 8.306 | 4.095 | 0 |
| NT2RP7004541 | 0 | 0 | 0 | 0 | 0 | 41.921 | 0 |
| NT2RP7004751 | 0 | 0 | 0 | 3.214 | 0 | 1.628 | 0 |
| NT2RP7004884 | 0 | 0 | 0 | 0 | 9.688 | 0 | 0 |
| NT2RP7004925 | 0 | 0 | 0 | 0 | 0 | 2.197 | 0 |
| NT2RP7004946 | 0 | 0 | 0 | 0 | 3.038 | 1.498 | 0 |
| NT2RP7005513 | 0 | 0 | 0 | 0 | 0 | 2.940 | 0 |
| NT2RP7006075 | 0 | 0 | 0 | 0 | 9.245 | 13.674 | 0 |
| NT2RP7006141 | 0 | 0 | 0 | 0 | 0 | 1.285 | 0 |
| NT2RP7006539 | 0 | 0 | 0 | 0 | 0 | 5.061 | 0 |
| NT2RP7006717 | 0 | 0 | 0 | 0 | 0 | 1.145 | 0 |
| NT2RP7006980 | 0 | 0 | 0 | 0 | 0 | 29.339 | 0 |
| NT2RP7007154 | 0 | 0 | 0 | 0 | 4.024 | 2.976 | 0 |
| NT2RP7007387 | 0 | 0 | 0 | 0 | 0 | 3.571 | 0 |
| NT2RP7007530 | 0 | 0 | 0 | 0 | 7.736 | 0 | 0 |
| NT2RP7007842 | 0 | 0 | 0 | 26.339 | 6.768 | 0 | 0 |
| NT2RP7007975 | 0 | 0 | 0 | 0 | 0 | 2.374 | 0 |
| NT2RP7008167 | 0 | 0 | 0 | 6.232 | 0 | 1.579 | 0 |
| NT2RP7008543 | 0 | 0 | 0 | 0 | 0 | 4.786 | 0 |
| NT2RP7009097 | 0 | 0 | 0 | 0 | 0 | 3.128 | 0 |
| NT2RP7009259 | 0 | 3.959 | 4.380 | 0 | 0 | 0 | 0 |
| NT2RP7009394 | 0 | 0 | 0 | 0 | 0 | 2.104 | 0 |
| NT2RP7009482 | 0 | 0 | 0 | 3.182 | 0 | 0 | 0 |
| NT2RP7012776 | 0 | 0 | 0 | 0 | 0 | 14.621 | 0 |
| NT2RP7014910 | 0 | 0 | 0 | 0 | 0 | 2.080 | 0 |
| NTONG1000033 | 0 | 0 | 0 | 0 | 0 | 4.263 | 0 |
| NTONG1000047 | 0 | 0 | 0 | 0 | 0 | 20.905 | 0 |
| NTONG1000052 | 0 | 6.731 | 0 | 0 | 0 | 0 | 0 |
| NTONG1000075 | 0 | 0 | 0 | 0 | 0 | 0 | 45.341 |
| NTONG1000098 | 0 | 0 | 4.967 | 0 | 0 | 0 | 0 |
| NTONG1000182 | 0 | 0 | 0 | 0 | 0 | 2.154 | 0 |
| NTONG1000246 | 0 | 0 | 12.189 | 0 | 0 | 2.720 | 0 |
| NTONG1000257 | 0 | 0 | 0 | 0 | 0 | 3.829 | 0 |
| NTONG2000265 | 0 | 0 | 0 | 5.853 | 0 | 1.483 | 5.801 |
| NTONG2000858 | 0 | 20.351 | 0 | 0 | 0 | 0 | 0 |
| NTONG2000977 | 0 | 0 | 7.663 | 0 | 0 | 0 | 0 |
| NTONG2001567 | 0 | 0 | 0 | 0 | 2.164 | 0 | 0 |
| NTONG2001612 | 0 | 7.910 | 8.751 | 0 | 0 | 1.953 | 0 |
| NTONG2002582 | 0 | 0 | 0 | 0 | 0 | 6.543 | 25.595 |
| NTONG2003454 | 0 | 0 | 0 | 0 | 10.520 | 0 | 0 |
| NTONG2003515 | 0 | 0 | 0 | 0 | 0 | 17.024 | 0 |
| NTONG2003928 | 0 | 0 | 0 | 0 | 0 | 10.134 | 0 |
| NTONG2004806 | 0 | 48.877 | 0 | 0 | 0 | 0 | 0 |
| NTONG2004844 | 0 | 0 | 0 | 0 | 0 | 2.819 | 0 |
| NTONG2005153 | 0 | 0 | 0 | 0 | 27.921 | 13.765 | 0 |
| NTONG2005520 | 0 | 0 | 0 | 0 | 0 | 1.158 | 4.530 |
| NTONG2005822 | 0 | 0 | 0 | 0 | 32.378 | 0 | 0 |
| NTONG2008483 | 0 | 11.259 | 0 | 0 | 2.819 | 0 | 0 |
| NTONG2008522 | 0 | 0 | 30.549 | 0 | 0 | 0 | 0 |
| NTONG2009468 | 0 | 0 | 0 | 0 | 0 | 16.522 | 0 |
| OCBBF1000086 | 0 | 0 | 0 | 0 | 0 | 0 | 5.209 |
| OCBBF1000114 | 0 | 0 | 0 | 52.512 | 0 | 0 | 0 |
| OCBBF1000146 | 0 | 0 | 0 | 0 | 0 | 4.502 | 0 |
| OCBBF2000013 | 0 | 0 | 15.169 | 0 | 0 | 3.385 | 0 |
| OCBBF2000287 | 0 | 0 | 0 | 0 | 73.962 | 0 | 0 |
| OCBBF2000467 | 0 | 0 | 0 | 0 | 0 | 3.509 | 0 |
| OCBBF2000522 | 0 | 0 | 0 | 0 | 17.846 | 4.399 | 0 |
| OCBBF2000712 | 0 | 0 | 7.367 | 0 | 0 | 0 | 0 |
| OCBBF2000982 | 0 | 0 | 0 | 0 | 0 | 4.551 | 0 |
| OCBBF2001196 | 0 | 0 | 0 | 0 | 55.882 | 0 | 0 |
| OCBBF2001794 | 0 | 0 | 0 | 0 | 16.683 | 0 | 0 |
| OCBBF2002086 | 0 | 0 | 0 | 0 | 0 | 5.605 | 0 |
| OCBBF2002376 | 0 | 0 | 59.348 | 0 | 0 | 0 | 0 |
| OCBBF2004104 | 0 | 0 | 10.677 | 0 | 0 | 2.383 | 0 |
| OCBBF2004235 | 0 | 0 | 0 | 0 | 42.087 | 0 | 0 |
| OCBBF2005956 | 0 | 0 | 0 | 0 | 0 | 4.939 | 0 |
| OCBBF2006660 | 0 | 0 | 0 | 0 | 53.263 | 0 | 0 |
| OCBBF2006849 | 0 | 0 | 0 | 0 | 7.132 | 0 | 0 |
| OCBBF2006859 | 0 | 0 | 58.402 | 0 | 0 | 0 | 0 |
| OCBBF2007354 | 0 | 0 | 0 | 6.898 | 0 | 1.748 | 0 |
| OCBBF2007415 | 0 | 0 | 0 | 10.996 | 0 | 1.393 | 0 |
| OCBBF2007622 | 0 | 0 | 0 | 0 | 12.955 | 0 | 0 |
| OCBBF2008005 | 0 | 0 | 0 | 0 | 5.603 | 0 | 0 |
| OCBBF2008466 | 0 | 0 | 0 | 0 | 0 | 14.882 | 0 |
| OCBBF2009836 | 0 | 0 | 0 | 0 | 0 | 28.513 | 0 |
| OCBBF2010830 | 0 | 0 | 0 | 0 | 3.105 | 1.531 | 0 |
| OCBBF2010841 | 0 | 0 | 0 | 0 | 0 | 32.439 | 0 |
| OCBBF2011536 | 0 | 0 | 0 | 0 | 0 | 3.470 | 0 |
| OCBBF2011914 | 0 | 0 | 0 | 25.037 | 0 | 0 | 0 |
| OCBBF2012553 | 0 | 0 | 0 | 0 | 4.139 | 2.040 | 0 |
| OCBBF2012908 | 0 | 0 | 0 | 0 | 0 | 5.701 | 0 |
| OCBBF2013366 | 0 | 0 | 0 | 0 | 0 | 4.696 | 0 |
| OCBBF2014292 | 0 | 0 | 0 | 0 | 0 | 3.604 | 7.048 |
| OCBBF2014541 | 0 | 0 | 0 | 0 | 0 | 13.642 | 0 |
| OCBBF2015751 | 0 | 0 | 0 | 0 | 0 | 4.930 | 0 |
| OCBBF2016841 | 0 | 0 | 47.620 | 0 | 0 | 0 | 0 |
| OCBBF2016928 | 0 | 0 | 42.696 | 0 | 0 | 0 | 0 |
| OCBBF2017398 | 0 | 0 | 0 | 8.833 | 0 | 0 | 0 |
| OCBBF2017791 | 0 | 0 | 19.969 | 0 | 0 | 0 | 0 |
| OCBBF2018084 | 0 | 0 | 34.374 | 0 | 0 | 0 | 0 |
| OCBBF2018707 | 0 | 0 | 17.532 | 0 | 0 | 0 | 0 |
| OCBBF2021020 | 0 | 0 | 0 | 0 | 0 | 4.638 | 0 |
| OCBBF2035226 | 0 | 0 | 4.580 | 0 | 0 | 1.022 | 0 |
| OCBBF3000323 | 0 | 0 | 0 | 0 | 11.736 | 0 | 0 |
| OCBBF3001333 | 0 | 0 | 0 | 0 | 0 | 5.589 | 0 |
| PEBLM1000034 | 0 | 0 | 0 | 47.739 | 0 | 0 | 0 |
| PEBLM2000126 | 0 | 0 | 0 | 0 | 0 | 18.794 | 0 |
| PEBLM2000222 | 0 | 0 | 0 | 0 | 0 | 0 | 3.953 |
| PEBLM2000395 | 0 | 0 | 0 | 0 | 0 | 1.583 | 0 |
| PEBLM2000479 | 0 | 0 | 0 | 0 | 16.426 | 48.586 | 0 |
| PEBLM2001072 | 0 | 12.778 | 0 | 0 | 0 | 3.155 | 0 |
| PEBLM2004666 | 0 | 0 | 0 | 0 | 0 | 6.464 | 0 |
| PEBLM2007296 | 0 | 0 | 0 | 11.874 | 6.102 | 0 | 0 |
| PEBLM2007774 | 0 | 0 | 0 | 0 | 1.063 | 0.524 | 0 |
| PERIC2000478 | 0 | 0 | 0 | 0 | 0 | 18.939 | 0 |
| PERIC2007068 | 0 | 0 | 0 | 10.595 | 10.890 | 2.684 | 0 |
| PLACE5000013 | 0 | 0 | 0 | 0 | 11.203 | 0 | 0 |
| PLACE5000066 | 0 | 0 | 0 | 0 | 32.287 | 0 | 0 |
| PLACE5000113 | 0 | 0 | 0 | 0 | 0 | 2.993 | 0 |
| PLACE5000170 | 0 | 0 | 0 | 0 | 0 | 12.097 | 0 |
| PLACE6000371 | 0 | 0 | 0 | 0 | 0 | 49.431 | 0 |
| PLACE6000379 | 0 | 0 | 0 | 0 | 1.870 | 0.307 | 1.202 |
| PLACE6000414 | 0 | 0 | 0 | 0 | 4.522 | 2.229 | 8.720 |
| PLACE6000463 | 0 | 0 | 0 | 0 | 0 | 13.574 | 0 |
| PLACE6000630 | 0 | 0 | 0 | 0 | 0 | 6.713 | 0 |
| PLACE6001064 | 0 | 0 | 0 | 0 | 2.024 | 0 | 0 |
| PLACE6001443 | 0 | 0 | 0 | 0 | 6.931 | 0 | 13.367 |
| PLACE6001886 | 0 | 0 | 0 | 0 | 0 | 29.462 | 0 |
| PLACE6002011 | 0 | 0 | 0 | 0 | 0 | 49.431 | 0 |
| PLACE6002056 | 0 | 0 | 0 | 0 | 0 | 49.431 | 0 |
| PLACE6002084 | 0 | 0 | 0 | 0 | 0 | 3.855 | 0 |
| PLACE6002419 | 0 | 0 | 0 | 0 | 0 | 0 | 70.943 |
| PLACE6002668 | 0 | 0 | 0 | 0 | 0 | 9.388 | 0 |
| PLACE6002960 | 0 | 0 | 0 | 0 | 0 | 1.931 | 7.553 |
| PLACE6003383 | 0 | 8.410 | 0 | 0 | 0 | 0 | 0 |
| PLACE6003850 | 0 | 0 | 0 | 0 | 39.586 | 0 | 0 |
| PLACE6004005 | 0 | 0 | 0 | 6.779 | 0 | 0 | 0 |
| PLACE6004312 | 0 | 0 | 0 | 0 | 4.256 | 2.098 | 0 |
| PLACE6004464 | 0 | 0 | 0 | 0 | 0 | 32.829 | 0 |
| PLACE6004578 | 0 | 0 | 0 | 0 | 4.374 | 0 | 0 |
| PLACE6006042 | 0 | 0 | 0 | 0 | 19.210 | 0 | 0 |
| PLACE6006418 | 0 | 0 | 0 | 0 | 9.783 | 0 | 0 |
| PLACE6006549 | 0 | 0 | 0 | 0 | 2.818 | 0 | 0 |
| PLACE6008775 | 0 | 0 | 0 | 0 | 6.504 | 0 | 0 |
| PLACE6008793 | 0 | 0 | 12.360 | 0 | 0 | 5.516 | 0 |
| PLACE6009228 | 0 | 0 | 0 | 0 | 0 | 49.431 | 0 |
| PLACE6010077 | 0 | 0 | 6.787 | 0 | 0 | 1.515 | 0 |
| PLACE6010484 | 0 | 0 | 0 | 0 | 5.454 | 5.378 | 0 |
| PLACE6015322 | 0 | 0 | 0 | 0 | 0 | 49.431 | 0 |
| PLACE6016254 | 0 | 0 | 0 | 0 | 0 | 31.784 | 0 |
| PLACE6016942 | 0 | 0 | 0 | 0 | 0 | 6.805 | 0 |
| PROST1000097 | 0 | 4.143 | 0 | 0 | 2.075 | 2.046 | 0 |
| PROST1000120 | 0 | 0 | 0 | 0 | 0 | 5.737 | 0 |
| PROST1000144 | 0 | 0 | 0 | 10.765 | 0 | 0 | 0 |
| PROST1000199 | 0 | 0 | 0 | 0 | 0 | 2.542 | 0 |
| PROST1000215 | 0 | 0 | 0 | 0 | 0 | 17.795 | 0 |
| PROST1000226 | 0 | 0 | 0 | 0 | 6.314 | 18.675 | 0 |
| PROST1000246 | 0 | 0 | 0 | 0 | 38.770 | 0 | 0 |
| PROST1000480 | 0 | 0 | 0 | 0 | 0 | 32.910 | 0 |
| PROST1000526 | 0 | 0 | 19.695 | 0 | 0 | 0 | 0 |
| PROST1000564 | 0 | 0 | 10.479 | 0 | 4.744 | 0 | 0 |
| PROST2000138 | 0 | 0 | 0.676 | 0.595 | 2.753 | 0.302 | 1.180 |
| PROST2001180 | 0 | 0 | 0 | 0 | 8.762 | 4.319 | 0 |
| PROST2001283 | 0 | 14.993 | 0 | 0 | 0 | 0 | 0 |
| PROST2001552 | 0 | 0 | 0 | 0 | 0 | 0 | 5.924 |
| PROST2001739 | 0 | 0 | 0 | 0 | 11.664 | 0 | 0 |
| PROST2001883 | 0 | 0 | 6.962 | 6.133 | 0 | 0 | 0 |
| PROST2002078 | 0 | 0 | 0 | 0 | 8.576 | 0 | 0 |
| PROST2002425 | 0 | 0 | 0 | 0 | 0 | 27.641 | 0 |
| PROST2003232 | 0 | 0 | 0 | 0 | 0 | 2.374 | 0 |
| PROST2003338 | 0 | 0 | 0 | 0 | 0 | 1.947 | 0 |
| PROST2003428 | 0 | 0 | 0 | 0 | 0 | 32.910 | 0 |
| PROST2004095 | 0 | 0 | 0 | 0 | 0 | 0.814 | 0 |
| PROST2004258 | 0 | 0 | 0 | 0 | 0 | 6.637 | 0 |
| PROST2004270 | 0 | 0 | 0 | 0 | 0 | 1.023 | 0 |
| PROST2004416 | 0 | 4.791 | 0 | 0 | 0 | 5.914 | 0 |
| PROST2005143 | 0 | 0 | 0 | 0 | 0 | 11.801 | 0 |
| PROST2005272 | 0 | 0 | 0 | 0 | 28.978 | 14.286 | 0 |
| PROST2006282 | 0 | 0 | 0 | 0 | 62.691 | 0 | 0 |
| PROST2006933 | 0 | 0 | 0 | 0 | 0 | 32.910 | 0 |
| PROST2008360 | 0 | 0 | 0 | 0 | 0 | 0 | 12.248 |
| PROST2009320 | 0 | 0 | 0 | 0 | 49.876 | 0 | 0 |
| PROST2010545 | 0 | 0 | 0 | 0 | 0 | 22.894 | 0 |
| PROST2012745 | 0 | 0 | 0 | 0 | 0 | 0 | 26.318 |
| PROST2012780 | 0 | 0 | 0 | 0 | 25.670 | 0 | 0 |
| PROST2013053 | 0 | 0 | 0 | 0 | 0 | 0 | 20.156 |
| PROST2014862 | 0 | 0 | 0 | 0 | 0 | 27.641 | 0 |
| PROST2015464 | 0 | 0 | 0 | 0 | 6.052 | 2.984 | 0 |
| PROST2016980 | 0 | 0 | 0 | 0 | 0 | 19.696 | 0 |
| PROST2017692 | 0 | 0 | 0 | 5.060 | 0 | 0 | 5.015 |
| PROST2017729 | 0 | 0 | 0 | 0 | 49.876 | 0 | 0 |
| PROST2019164 | 0 | 25.982 | 0 | 0 | 0 | 0 | 0 |
| PROST2019253 | 0 | 0 | 0 | 0 | 0 | 2.923 | 0 |
| PUAEN1000065 | 0 | 0 | 0 | 0 | 0 | 2.330 | 4.558 |
| PUAEN1000164 | 0 | 0 | 0 | 0 | 0 | 0.692 | 0 |
| PUAEN1000322 | 0 | 0 | 19.931 | 0 | 0 | 0 | 0 |
| PUAEN2000535 | 0 | 0 | 6.269 | 0 | 0 | 0 | 0 |
| PUAEN2002568 | 0 | 0 | 0 | 0 | 38.476 | 0 | 0 |
| PUAEN2005502 | 0 | 0 | 0 | 0 | 0 | 18.619 | 0 |
| RECTM2000510 | 0 | 0 | 23.496 | 0 | 0 | 0 | 0 |
| SALGL1000005 | 97.831 | 0 | 0 | 0 | 0 | 0 | 0 |
| SALGL1000024 | 98.036 | 0 | 0 | 0 | 0 | 0 | 0 |
| SALGL1000028 | 100 | 0 | 0 | 0 | 0 | 0 | 0 |
| SALGL1000047 | 95.567 | 0 | 0 | 0 | 0 | 0 | 0 |
| SALGL1000065 | 100 | 0 | 0 | 0 | 0 | 0 | 0 |
| SALGL1000107 | 99.596 | 0 | 0 | 0 | 0 | 0 | 0 |
| SALGL1000157 | 41.950 | 0 | 0 | 0 | 0 | 0.905 | 0 |
| SALGL1000171 | 99.486 | 0 | 0 | 0 | 0 | 0 | 0 |
| SKMUS1000014 | 0 | 51.833 | 0 | 0 | 0 | 0 | 0 |
| SKMUS1000022 | 0 | 2.933 | 3.245 | 0 | 1.469 | 0 | 0 |
| SKMUS1000030 | 0 | 100 | 0 | 0 | 0 | 0 | 0 |
| SKMUS1000064 | 0 | 36.376 | 0 | 0 | 0 | 0 | 0 |
| SKMUS1000067 | 0 | 100 | 0 | 0 | 0 | 0 | 0 |
| SKMUS1000084 | 0 | 10.852 | 0 | 0 | 0 | 0 | 0 |
| SKMUS1000102 | 0 | 68.143 | 0 | 0 | 0 | 0 | 0 |
| SKMUS1000104 | 0 | 100 | 0 | 0 | 0 | 0 | 0 |
| SKMUS1000110 | 0 | 51.909 | 0 | 0 | 0 | 0 | 0 |
| SKMUS1000118 | 0 | 100 | 0 | 0 | 0 | 0 | 0 |
| SKMUS1000124 | 0 | 100 | 0 | 0 | 0 | 0 | 0 |
| SKMUS1000129 | 0 | 100 | 0 | 0 | 0 | 0 | 0 |
| SKMUS1000138 | 0 | 34.510 | 0 | 0 | 0 | 0 | 0 |
| SKMUS1000176 | 0 | 6.079 | 0 | 0 | 0 | 0 | 0 |
| SKMUS1000177 | 0 | 16.639 | 0 | 0 | 0 | 0 | 0 |
| SKMUS1000186 | 0 | 2.828 | 0 | 0 | 1.416 | 0 | 0 |
| SKMUS2000020 | 0 | 25.952 | 0 | 0 | 0 | 0 | 0 |
| SKMUS2000061 | 0 | 100 | 0 | 0 | 0 | 0 | 0 |
| SKMUS2000074 | 0 | 72.072 | 0 | 0 | 0 | 0 | 0 |
| SKMUS2000078 | 0 | 100 | 0 | 0 | 0 | 0 | 0 |
| SKMUS2000117 | 0 | 59.874 | 0 | 0 | 0 | 0 | 0 |
| SKMUS2000137 | 0 | 100 | 0 | 0 | 0 | 0 | 0 |
| SKMUS2000198 | 0 | 55.645 | 0 | 0 | 0 | 0 | 0 |
| SKMUS2000243 | 0 | 71.082 | 0 | 0 | 0 | 0 | 0 |
| SKMUS2000271 | 0 | 44.946 | 0 | 0 | 0 | 0 | 0 |
| SKMUS2000287 | 0 | 100 | 0 | 0 | 0 | 0 | 0 |
| SKMUS2000317 | 0 | 100 | 0 | 0 | 0 | 0 | 0 |
| SKMUS2000330 | 0 | 100 | 0 | 0 | 0 | 0 | 0 |
| SKMUS2000339 | 0 | 100 | 0 | 0 | 0 | 0 | 0 |
| SKMUS2000343 | 0 | 54.290 | 0 | 0 | 0 | 0 | 0 |
| SKMUS2000361 | 0 | 7.535 | 0 | 0 | 0 | 0 | 0 |
| SKMUS2000365 | 0 | 100 | 0 | 0 | 0 | 0 | 0 |
| SKMUS2000380 | 0 | 45.841 | 0 | 0 | 0 | 3.773 | 0 |
| SKMUS2000390 | 0 | 100 | 0 | 0 | 0 | 0 | 0 |
| SKMUS2000416 | 0 | 100 | 0 | 0 | 0 | 0 | 0 |
| SKMUS2000458 | 0 | 80.810 | 0 | 0 | 0 | 0 | 0 |
| SKMUS2000467 | 0 | 79.497 | 0 | 0 | 0 | 0 | 0 |
| SKMUS2000468 | 0 | 100 | 0 | 0 | 0 | 0 | 0 |
| SKMUS2000484 | 0 | 12.373 | 0 | 0 | 0 | 0 | 0 |
| SKMUS2000515 | 0 | 79.836 | 0 | 0 | 0 | 0 | 0 |
| SKMUS2000679 | 0 | 23.603 | 0 | 0 | 0 | 0 | 0 |
| SKMUS2000690 | 0 | 34.321 | 0 | 0 | 0 | 0 | 0 |
| SKMUS2000701 | 0 | 100 | 0 | 0 | 0 | 0 | 0 |
| SKMUS2000705 | 0 | 100 | 0 | 0 | 0 | 0 | 0 |
| SKMUS2000710 | 0 | 100 | 0 | 0 | 0 | 0 | 0 |
| SKMUS2000724 | 0 | 100 | 0 | 0 | 0 | 0 | 0 |
| SKMUS2000726 | 0 | 100 | 0 | 0 | 0 | 0 | 0 |
| SKMUS2000757 | 0 | 34.821 | 0 | 0 | 0 | 8.597 | 0 |
| SKMUS2000774 | 0 | 100 | 0 | 0 | 0 | 0 | 0 |
| SKMUS2000780 | 0 | 67.038 | 0 | 0 | 0 | 0 | 0 |
| SKMUS2000821 | 0 | 78.301 | 0 | 0 | 0 | 0 | 0 |
| SKMUS2000847 | 0 | 100 | 0 | 0 | 0 | 0 | 0 |
| SKMUS2000863 | 0 | 100 | 0 | 0 | 0 | 0 | 0 |
| SKMUS2000873 | 0 | 15.504 | 0 | 0 | 1.941 | 0 | 0 |
| SKMUS2000894 | 0 | 100 | 0 | 0 | 0 | 0 | 0 |
| SKMUS2000898 | 0 | 100 | 0 | 0 | 0 | 0 | 0 |
| SKMUS2000902 | 0 | 38.110 | 0 | 0 | 0 | 0 | 0 |
| SKMUS2000931 | 0 | 7.668 | 4.242 | 3.736 | 1.920 | 0 | 0 |
| SKMUS2000933 | 0 | 43.718 | 0 | 0 | 0 | 0 | 0 |
| SKMUS2000945 | 0 | 100 | 0 | 0 | 0 | 0 | 0 |
| SKMUS2000954 | 0 | 35.928 | 0 | 0 | 5.997 | 0 | 0 |
| SKMUS2000961 | 0 | 46.388 | 0 | 0 | 0 | 0 | 0 |
| SKMUS2000973 | 0 | 100 | 0 | 0 | 0 | 0 | 0 |
| SKMUS2000980 | 0 | 100 | 0 | 0 | 0 | 0 | 0 |
| SKMUS2001008 | 0 | 90.149 | 0 | 0 | 0 | 0 | 0 |
| SKMUS2001014 | 0 | 100 | 0 | 0 | 0 | 0 | 0 |
| SKMUS2001129 | 0 | 35.832 | 0 | 0 | 0 | 0 | 0 |
| SKMUS2001147 | 0 | 39.065 | 0 | 0 | 0 | 0 | 0 |
| SKMUS2001157 | 0 | 75.835 | 0 | 0 | 0 | 0 | 0 |
| SKMUS2001164 | 0 | 100 | 0 | 0 | 0 | 0 | 0 |
| SKMUS2001199 | 0 | 100 | 0 | 0 | 0 | 0 | 0 |
| SKMUS2001201 | 0 | 50.208 | 0 | 0 | 0 | 0 | 0 |
| SKMUS2001215 | 0 | 100 | 0 | 0 | 0 | 0 | 0 |
| SKMUS2001247 | 0 | 100 | 0 | 0 | 0 | 0 | 0 |
| SKMUS2001254 | 0 | 87.489 | 0 | 0 | 0 | 0 | 0 |
| SKMUS2001271 | 0 | 100 | 0 | 0 | 0 | 0 | 0 |
| SKMUS2001287 | 0 | 100 | 0 | 0 | 0 | 0 | 0 |
| SKMUS2001323 | 0 | 12.378 | 0 | 0 | 0 | 0 | 0 |
| SKMUS2001364 | 0 | 100 | 0 | 0 | 0 | 0 | 0 |
| SKMUS2001398 | 0 | 100 | 0 | 0 | 0 | 0 | 0 |
| SKMUS2001402 | 0 | 29.705 | 0 | 0 | 0 | 0 | 0 |
| SKMUS2001412 | 0 | 87.489 | 0 | 0 | 0 | 0 | 0 |
| SKMUS2001454 | 0 | 2.378 | 0 | 0 | 2.382 | 0.587 | 0 |
| SKMUS2001492 | 0 | 100 | 0 | 0 | 0 | 0 | 0 |
| SKMUS2001501 | 0 | 61.433 | 0 | 0 | 0 | 3.792 | 0 |
| SKMUS2001528 | 0 | 8.844 | 0 | 0 | 0 | 0 | 0 |
| SKMUS2001543 | 0 | 76.794 | 0 | 0 | 0 | 0 | 0 |
| SKMUS2001580 | 0 | 100 | 0 | 0 | 0 | 0 | 0 |
| SKMUS2001585 | 0 | 100 | 0 | 0 | 0 | 0 | 0 |
| SKMUS2001608 | 0 | 100 | 0 | 0 | 0 | 0 | 0 |
| SKMUS2001631 | 0 | 100 | 0 | 0 | 0 | 0 | 0 |
| SKMUS2001634 | 0 | 9.225 | 0 | 0 | 0 | 4.555 | 0 |
| SKMUS2001662 | 0 | 100 | 0 | 0 | 0 | 0 | 0 |
| SKMUS2001663 | 0 | 100 | 0 | 0 | 0 | 0 | 0 |
| SKMUS2001668 | 0 | 80.039 | 0 | 0 | 0 | 0 | 0 |
| SKMUS2001671 | 0 | 100 | 0 | 0 | 0 | 0 | 0 |
| SKMUS2001683 | 0 | 100 | 0 | 0 | 0 | 0 | 0 |
| SKMUS2001693 | 0 | 67.659 | 0 | 0 | 0 | 0 | 0 |
| SKMUS2001695 | 0 | 63.549 | 0 | 0 | 0 | 0 | 0 |
| SKMUS2001703 | 0 | 100 | 0 | 0 | 0 | 0 | 0 |
| SKMUS2001740 | 0 | 100 | 0 | 0 | 0 | 0 | 0 |
| SKMUS2001742 | 0 | 100 | 0 | 0 | 0 | 0 | 0 |
| SKMUS2001823 | 0 | 100 | 0 | 0 | 0 | 0 | 0 |
| SKMUS2001850 | 0 | 100 | 0 | 0 | 0 | 0 | 0 |
| SKMUS2002077 | 0 | 100 | 0 | 0 | 0 | 0 | 0 |
| SKMUS2002084 | 0 | 43.995 | 0 | 0 | 0 | 0 | 0 |
| SKMUS2002153 | 0 | 100 | 0 | 0 | 0 | 0 | 0 |
| SKMUS2002475 | 0 | 100 | 0 | 0 | 0 | 0 | 0 |
| SKMUS2002602 | 0 | 100 | 0 | 0 | 0 | 0 | 0 |
| SKMUS2002634 | 0 | 36.218 | 0 | 0 | 0 | 0 | 0 |
| SKMUS2002693 | 0 | 100 | 0 | 0 | 0 | 0 | 0 |
| SKMUS2002821 | 0 | 100 | 0 | 0 | 0 | 0 | 0 |
| SKMUS2002840 | 0 | 100 | 0 | 0 | 0 | 0 | 0 |
| SKMUS2002920 | 0 | 100 | 0 | 0 | 0 | 0 | 0 |
| SKMUS2003034 | 0 | 100 | 0 | 0 | 0 | 0 | 0 |
| SKMUS2003074 | 0 | 100 | 0 | 0 | 0 | 0 | 0 |
| SKMUS2003168 | 0 | 66.520 | 0 | 0 | 0 | 0 | 0 |
| SKMUS2003194 | 0 | 91.511 | 0 | 0 | 0 | 0 | 0 |
| SKMUS2003744 | 0 | 100 | 0 | 0 | 0 | 0 | 0 |
| SKMUS2004044 | 0 | 91.511 | 0 | 0 | 0 | 0 | 0 |
| SKMUS2004047 | 0 | 100 | 0 | 0 | 0 | 0 | 0 |
| SKMUS2004483 | 0 | 100 | 0 | 0 | 0 | 0 | 0 |
| SKMUS2004667 | 0 | 66.520 | 0 | 0 | 0 | 0 | 0 |
| SKMUS2004897 | 0 | 100 | 0 | 0 | 0 | 0 | 0 |
| SKMUS2004903 | 0 | 51.125 | 0 | 0 | 0 | 0 | 0 |
| SKMUS2004908 | 0 | 23.145 | 0 | 0 | 0 | 0 | 0 |
| SKMUS2005428 | 0 | 100 | 0 | 0 | 0 | 0 | 0 |
| SKMUS2006394 | 0 | 67.870 | 0 | 0 | 0 | 0 | 0 |
| SKMUS2006481 | 0 | 100 | 0 | 0 | 0 | 0 | 0 |
| SKMUS2006755 | 0 | 51.125 | 0 | 0 | 0 | 0 | 0 |
| SKMUS2007315 | 0 | 100 | 0 | 0 | 0 | 0 | 0 |
| SKMUS2007359 | 0 | 100 | 0 | 0 | 0 | 0 | 0 |
| SKMUS2007568 | 0 | 100 | 0 | 0 | 0 | 0 | 0 |
| SKMUS2007740 | 0 | 100 | 0 | 0 | 0 | 0 | 0 |
| SKMUS2007816 | 0 | 100 | 0 | 0 | 0 | 0 | 0 |
| SKMUS2007915 | 0 | 100 | 0 | 0 | 0 | 0 | 0 |
| SKMUS2008338 | 0 | 100 | 0 | 0 | 0 | 0 | 0 |
| SKMUS2008407 | 0 | 100 | 0 | 0 | 0 | 0 | 0 |
| SKMUS2008474 | 0 | 100 | 0 | 0 | 0 | 0 | 0 |
| SKMUS2008585 | 0 | 100 | 0 | 0 | 0 | 0 | 0 |
| SKMUS2008607 | 0 | 100 | 0 | 0 | 0 | 0 | 0 |
| SKMUS2009190 | 0 | 100 | 0 | 0 | 0 | 0 | 0 |
| SKMUS2009232 | 0 | 100 | 0 | 0 | 0 | 0 | 0 |
| SKMUS2009479 | 0 | 100 | 0 | 0 | 0 | 0 | 0 |
| SKMUS2009557 | 0 | 100 | 0 | 0 | 0 | 0 | 0 |
| SKNMC1000110 | 0 | 0 | 28.223 | 0 | 0 | 0 | 0 |
| SKNMC1000123 | 0 | 0 | 100 | 0 | 0 | 0 | 0 |
| SKNMC1000124 | 0 | 0 | 100 | 0 | 0 | 0 | 0 |
| SKNMC1000137 | 0 | 0 | 8.264 | 0 | 3.741 | 1.844 | 0 |
| SKNMC1000159 | 0 | 0 | 82.323 | 0 | 0 | 0 | 0 |
| SKNMC1000168 | 0 | 0 | 6.528 | 0 | 0 | 0 | 0 |
| SKNMC1000229 | 0 | 0 | 40.981 | 0 | 0 | 0 | 0 |
| SKNMC1000251 | 0 | 0 | 54.679 | 0 | 0 | 0 | 0 |
| SKNMC1000264 | 0 | 0 | 40.887 | 0 | 0 | 0 | 0 |
| SKNMC2000065 | 0 | 0 | 8.415 | 0 | 0 | 0 | 0 |
| SKNMC2000097 | 0 | 0 | 6.949 | 0 | 0 | 0.775 | 0 |
| SKNMC2000224 | 0 | 0 | 48.830 | 0 | 0 | 0 | 0 |
| SKNMC2000256 | 0 | 0 | 100 | 0 | 0 | 0 | 0 |
| SKNMC2000305 | 0 | 0 | 27.458 | 0 | 0 | 0 | 0 |
| SKNMC2000322 | 0 | 0 | 11.009 | 0 | 4.983 | 0 | 0 |
| SKNMC2000356 | 0 | 0 | 68.922 | 0 | 0 | 0 | 0 |
| SKNMC2000374 | 0 | 0 | 100 | 0 | 0 | 0 | 0 |
| SKNMC2000583 | 0 | 0 | 100 | 0 | 0 | 0 | 0 |
| SKNMC2000593 | 0 | 0 | 68.004 | 0 | 0 | 0 | 0 |
| SKNMC2000612 | 0 | 0 | 100 | 0 | 0 | 0 | 0 |
| SKNMC2000622 | 0 | 0 | 100 | 0 | 0 | 0 | 0 |
| SKNMC2000635 | 0 | 0 | 1.398 | 0 | 0 | 0 | 0 |
| SKNMC2000649 | 0 | 0 | 7.112 | 0 | 0 | 1.587 | 0 |
| SKNMC2000698 | 0 | 0 | 16.101 | 0 | 0 | 0 | 0 |
| SKNMC2000877 | 0 | 0 | 9.237 | 0 | 8.363 | 0 | 0 |
| SKNMC2000966 | 0 | 0 | 63.124 | 0 | 0 | 0 | 0 |
| SKNMC2001113 | 0 | 0 | 76.091 | 0 | 0 | 16.981 | 0 |
| SKNMC2001324 | 0 | 0 | 50.339 | 0 | 0 | 0 | 0 |
| SKNMC2001503 | 0 | 0 | 24.175 | 21.294 | 0 | 0 | 0 |
| SKNMC2001555 | 0 | 0 | 100 | 0 | 0 | 0 | 0 |
| SKNMC2001596 | 0 | 0 | 100 | 0 | 0 | 0 | 0 |
| SKNMC2001623 | 0 | 0 | 78.328 | 0 | 0 | 0 | 0 |
| SKNMC2002402 | 0 | 0 | 57.469 | 0 | 0 | 12.825 | 0 |
| SKNMC2003639 | 0 | 0 | 80.715 | 0 | 0 | 0 | 0 |
| SKNMC2003924 | 0 | 0 | 100 | 0 | 0 | 0 | 0 |
| SKNMC2003987 | 0 | 0 | 100 | 0 | 0 | 0 | 0 |
| SKNMC2004457 | 0 | 0 | 100 | 0 | 0 | 0 | 0 |
| SKNMC2004643 | 0 | 0 | 100 | 0 | 0 | 0 | 0 |
| SKNMC2004651 | 0 | 0 | 100 | 0 | 0 | 0 | 0 |
| SKNMC2005772 | 0 | 0 | 100 | 0 | 0 | 0 | 0 |
| SKNMC2006173 | 0 | 0 | 59.986 | 0 | 0 | 0 | 0 |
| SKNMC2006327 | 0 | 0 | 100 | 0 | 0 | 0 | 0 |
| SKNMC2006998 | 0 | 0 | 100 | 0 | 0 | 0 | 0 |
| SKNMC2007134 | 0 | 0 | 100 | 0 | 0 | 0 | 0 |
| SKNMC2007502 | 0 | 0 | 100 | 0 | 0 | 0 | 0 |
| SKNMC2007504 | 0 | 0 | 100 | 0 | 0 | 0 | 0 |
| SKNMC2007961 | 0 | 0 | 100 | 0 | 0 | 0 | 0 |
| SKNMC2009450 | 0 | 0 | 100 | 0 | 0 | 0 | 0 |
| SKNSH1000002 | 0 | 0 | 0 | 9.869 | 0 | 0 | 0 |
| SKNSH1000086 | 0 | 0 | 0 | 58.629 | 0 | 0 | 0 |
| SKNSH1000101 | 0 | 0 | 0 | 4.411 | 0 | 0 | 4.371 |
| SKNSH1000174 | 0 | 0 | 0 | 100 | 0 | 0 | 0 |
| SKNSH1000301 | 0 | 0 | 0 | 100 | 0 | 0 | 0 |
| SKNSH1000308 | 0 | 0 | 0 | 100 | 0 | 0 | 0 |
| SKNSH1000416 | 0 | 0 | 0 | 100 | 0 | 0 | 0 |
| SKNSH2000051 | 0 | 0 | 0 | 58.015 | 0 | 0 | 0 |
| SKNSH2000101 | 0 | 0 | 0 | 45.247 | 0 | 0 | 0 |
| SKNSH2000151 | 0 | 0 | 0 | 37.354 | 0 | 0 | 0 |
| SKNSH2000163 | 0 | 0 | 0 | 72.863 | 0 | 0 | 0 |
| SKNSH2000250 | 0 | 0 | 0 | 9.674 | 0 | 0 | 0 |
| SKNSH2000319 | 0 | 0 | 0 | 49.241 | 0 | 0 | 0 |
| SKNSH2000347 | 0 | 0 | 0 | 15.406 | 0 | 0 | 0 |
| SKNSH2000482 | 0 | 0 | 0 | 66.928 | 0 | 0 | 0 |
| SKNSH2000516 | 0 | 0 | 0 | 100 | 0 | 0 | 0 |
| SKNSH2000550 | 0 | 0 | 0 | 100 | 0 | 0 | 0 |
| SKNSH2000716 | 0 | 0 | 0 | 11.900 | 0 | 0 | 0 |
| SKNSH2000819 | 0 | 0 | 19.403 | 17.090 | 0 | 0 | 0 |
| SKNSH2000971 | 0 | 0 | 0 | 49.371 | 0 | 0 | 0 |
| SKNSH2001222 | 0 | 0 | 0 | 44.836 | 0 | 0 | 0 |
| SKNSH2001875 | 0 | 0 | 0 | 44.586 | 0 | 11.296 | 0 |
| SKNSH2001931 | 0 | 0 | 0 | 35.089 | 0 | 0 | 0 |
| SKNSH2002054 | 0 | 0 | 0 | 100 | 0 | 0 | 0 |
| SKNSH2002325 | 0 | 0 | 0 | 26.212 | 0 | 0 | 0 |
| SKNSH2002768 | 0 | 0 | 0 | 16.257 | 0 | 8.238 | 0 |
| SKNSH2002866 | 0 | 0 | 0 | 100 | 0 | 0 | 0 |
| SKNSH2003064 | 0 | 0 | 0 | 53.753 | 0 | 0 | 0 |
| SKNSH2003174 | 0 | 0 | 0 | 100 | 0 | 0 | 0 |
| SKNSH2003422 | 0 | 0 | 0 | 100 | 0 | 0 | 0 |
| SKNSH2003466 | 0 | 0 | 0 | 100 | 0 | 0 | 0 |
| SKNSH2003483 | 0 | 0 | 0 | 100 | 0 | 0 | 0 |
| SKNSH2003528 | 0 | 0 | 0 | 20.844 | 0 | 0 | 0 |
| SKNSH2003633 | 0 | 0 | 0 | 46.056 | 0 | 0 | 0 |
| SKNSH2004039 | 0 | 0 | 0 | 100 | 0 | 0 | 0 |
| SKNSH2005061 | 0 | 0 | 0 | 11.640 | 0 | 0 | 0 |
| SKNSH2005120 | 0 | 0 | 0 | 100 | 0 | 0 | 0 |
| SKNSH2005194 | 0 | 0 | 0 | 100 | 0 | 0 | 0 |
| SKNSH2005240 | 0 | 0 | 0 | 91.307 | 0 | 0 | 0 |
| SKNSH2005792 | 0 | 0 | 0 | 100 | 0 | 0 | 0 |
| SKNSH2005816 | 0 | 0 | 0 | 100 | 0 | 0 | 0 |
| SKNSH2005981 | 0 | 0 | 0 | 100 | 0 | 0 | 0 |
| SKNSH2006234 | 0 | 0 | 0 | 24.035 | 0 | 0 | 0 |
| SKNSH2006304 | 0 | 0 | 0 | 100 | 0 | 0 | 0 |
| SKNSH2006432 | 0 | 0 | 0 | 100 | 0 | 0 | 0 |
| SKNSH2006822 | 0 | 0 | 0 | 100 | 0 | 0 | 0 |
| SKNSH2007142 | 0 | 0 | 0 | 100 | 0 | 0 | 0 |
| SKNSH2007149 | 0 | 0 | 0 | 100 | 0 | 0 | 0 |
| SKNSH2007429 | 0 | 0 | 0 | 100 | 0 | 0 | 0 |
| SKNSH2007739 | 0 | 0 | 0 | 100 | 0 | 0 | 0 |
| SKNSH2008043 | 0 | 0 | 0 | 69.524 | 0 | 0 | 0 |
| SKNSH2008940 | 0 | 0 | 0 | 13.166 | 0 | 0 | 0 |
| SKNSH2008969 | 0 | 0 | 0 | 100 | 0 | 0 | 0 |
| SKNSH2009197 | 0 | 0 | 0 | 100 | 0 | 0 | 0 |
| SKNSH2009357 | 0 | 0 | 0 | 65.592 | 0 | 0 | 0 |
| SKNSH2009435 | 0 | 0 | 0 | 100 | 0 | 0 | 0 |
| SKNSH2009991 | 0 | 0 | 0 | 100 | 0 | 0 | 0 |
| SKNSH2010015 | 0 | 0 | 0 | 100 | 0 | 0 | 0 |
| SMINT1000012 | 0 | 0 | 0 | 0 | 100 | 0 | 0 |
| SMINT1000016 | 0 | 0 | 0 | 0 | 8.657 | 0 | 0 |
| SMINT1000039 | 0 | 0 | 0 | 0 | 34.704 | 0 | 0 |
| SMINT1000042 | 0 | 0 | 0 | 0 | 9.454 | 0 | 0 |
| SMINT1000048 | 0 | 0 | 0 | 0 | 27.794 | 27.404 | 0 |
| SMINT1000051 | 0 | 0 | 0 | 0 | 100 | 0 | 0 |
| SMINT1000054 | 0 | 0 | 0 | 0 | 66.007 | 0 | 0 |
| SMINT1000057 | 0 | 0 | 0 | 0 | 62.065 | 0 | 0 |
| SMINT1000071 | 0 | 0 | 0 | 0 | 100 | 0 | 0 |
| SMINT1000075 | 0 | 0 | 0 | 0 | 100 | 0 | 0 |
| SMINT1000078 | 0 | 0 | 0 | 0 | 33.223 | 0 | 0 |
| SMINT1000091 | 0 | 0 | 0 | 0 | 100 | 0 | 0 |
| SMINT1000100 | 0 | 0 | 0 | 0 | 19.647 | 0 | 0 |
| SMINT1000103 | 0 | 0 | 0 | 0 | 100 | 0 | 0 |
| SMINT1000117 | 0 | 0 | 0 | 0 | 4.641 | 0 | 0 |
| SMINT1000118 | 0 | 0 | 0 | 0 | 100 | 0 | 0 |
| SMINT1000131 | 0 | 0 | 0 | 0 | 3.232 | 0 | 6.232 |
| SMINT1000137 | 0 | 0 | 0 | 0 | 66.980 | 33.020 | 0 |
| SMINT1000192 | 0 | 0 | 0 | 0 | 10.508 | 0 | 0 |
| SMINT2000007 | 0 | 0 | 0 | 0 | 42.450 | 10.464 | 0 |
| SMINT2000018 | 0 | 0 | 0 | 0 | 14.856 | 0 | 0 |
| SMINT2000032 | 0 | 0 | 0 | 0 | 100 | 0 | 0 |
| SMINT2000040 | 0 | 0 | 0 | 0 | 100 | 0 | 0 |
| SMINT2000060 | 0 | 0 | 0 | 0 | 100 | 0 | 0 |
| SMINT2000073 | 0 | 0 | 0 | 0 | 30.613 | 0 | 0 |
| SMINT2000084 | 0 | 0 | 0 | 0 | 100 | 0 | 0 |
| SMINT2000145 | 0 | 0 | 0 | 0 | 100 | 0 | 0 |
| SMINT2000159 | 0 | 0 | 0 | 0 | 38.570 | 9.507 | 0 |
| SMINT2000176 | 0 | 0 | 0 | 0 | 49.333 | 0 | 0 |
| SMINT2000185 | 0 | 0 | 0 | 0 | 100 | 0 | 0 |
| SMINT2000227 | 0 | 0 | 0 | 0 | 100 | 0 | 0 |
| SMINT2000229 | 0 | 0 | 0 | 0 | 100 | 0 | 0 |
| SMINT2000232 | 0 | 0 | 0 | 0 | 50.236 | 0 | 0 |
| SMINT2000239 | 0 | 0 | 0 | 0 | 29.598 | 0 | 0 |
| SMINT2000267 | 0 | 0 | 0 | 0 | 76.088 | 0 | 0 |
| SMINT2000277 | 0 | 0 | 0 | 0 | 6.397 | 3.154 | 0 |
| SMINT2000396 | 0 | 0 | 0 | 0 | 4.320 | 2.130 | 0 |
| SMINT2000400 | 0 | 0 | 0 | 0 | 23.606 | 0 | 0 |
| SMINT2000441 | 0 | 0 | 0 | 0 | 1.593 | 1.570 | 0 |
| SMINT2000454 | 0 | 0 | 0 | 0 | 31.537 | 0 | 0 |
| SMINT2000468 | 0 | 0 | 0 | 0 | 8.074 | 0 | 0 |
| SMINT2000518 | 0 | 0 | 0 | 0 | 100 | 0 | 0 |
| SMINT2000529 | 0 | 0 | 0 | 0 | 100 | 0 | 0 |
| SMINT2000530 | 0 | 0 | 0 | 0 | 100 | 0 | 0 |
| SMINT2000537 | 0 | 0 | 0 | 0 | 73.962 | 0 | 0 |
| SMINT2000538 | 0 | 0 | 0 | 0 | 100 | 0 | 0 |
| SMINT2000541 | 0 | 0 | 0 | 0 | 100 | 0 | 0 |
| SMINT2000545 | 0 | 0 | 0 | 0 | 8.365 | 8.248 | 0 |
| SMINT2000558 | 0 | 0 | 0 | 0 | 100 | 0 | 0 |
| SMINT2000562 | 0 | 0 | 0 | 0 | 100 | 0 | 0 |
| SMINT2000568 | 0 | 0 | 0 | 0 | 100 | 0 | 0 |
| SMINT2000602 | 0 | 0 | 0 | 0 | 1.940 | 2.869 | 0 |
| SMINT2000609 | 0 | 0 | 0 | 0 | 66.007 | 0 | 0 |
| SMINT2000629 | 0 | 0 | 0 | 0 | 9.477 | 0 | 0 |
| SMINT2000659 | 0 | 0 | 0 | 0 | 1.961 | 0 | 0 |
| SMINT2000694 | 0 | 0 | 0 | 0 | 4.194 | 0 | 0 |
| SMINT2000747 | 0 | 0 | 0 | 0 | 57.827 | 28.508 | 0 |
| SMINT2000811 | 0 | 0 | 0 | 0 | 100 | 0 | 0 |
| SMINT2000824 | 0 | 0 | 0 | 0 | 100 | 0 | 0 |
| SMINT2000933 | 0 | 0 | 0 | 0 | 3.596 | 10.638 | 0 |
| SMINT2000984 | 0 | 0 | 0 | 0 | 100 | 0 | 0 |
| SMINT2001114 | 0 | 0 | 0 | 0 | 100 | 0 | 0 |
| SMINT2001158 | 0 | 0 | 0 | 0 | 100 | 0 | 0 |
| SMINT2001183 | 0 | 0 | 0 | 0 | 32.042 | 0 | 0 |
| SMINT2001199 | 0 | 0 | 0 | 0 | 35.321 | 0 | 0 |
| SMINT2001222 | 0 | 0 | 0 | 0 | 14.585 | 0 | 0 |
| SMINT2001348 | 0 | 0 | 0 | 0 | 32.736 | 0 | 0 |
| SMINT2001397 | 0 | 0 | 0 | 0 | 100 | 0 | 0 |
| SMINT2001458 | 0 | 0 | 0 | 0 | 100 | 0 | 0 |
| SMINT2001461 | 0 | 0 | 0 | 0 | 100 | 0 | 0 |
| SMINT2001535 | 0 | 0 | 0 | 0 | 100 | 0 | 0 |
| SMINT2001559 | 0 | 0 | 0 | 0 | 100 | 0 | 0 |
| SMINT2001609 | 0 | 0 | 0 | 0 | 100 | 0 | 0 |
| SMINT2001615 | 0 | 0 | 0 | 0 | 59.418 | 0 | 0 |
| SMINT2001683 | 0 | 0 | 0 | 0 | 100 | 0 | 0 |
| SMINT2001731 | 0 | 0 | 0 | 0 | 100 | 0 | 0 |
| SMINT2001812 | 0 | 0 | 0 | 0 | 56.438 | 0 | 0 |
| SMINT2001818 | 0 | 0 | 0 | 0 | 9.924 | 3.261 | 12.758 |
| SMINT2001950 | 0 | 0 | 0 | 0 | 75.408 | 0 | 0 |
| SMINT2002126 | 0 | 0 | 0 | 0 | 100 | 0 | 0 |
| SMINT2002159 | 0 | 0 | 0 | 0 | 24.194 | 0 | 0 |
| SMINT2002202 | 0 | 0 | 0 | 0 | 100 | 0 | 0 |
| SMINT2002210 | 0 | 0 | 0 | 0 | 100 | 0 | 0 |
| SMINT2002224 | 0 | 0 | 0 | 0 | 44.673 | 0 | 0 |
| SMINT2002281 | 0 | 0 | 0 | 0 | 100 | 0 | 0 |
| SMINT2002311 | 0 | 0 | 0 | 0 | 18.692 | 9.215 | 72.094 |
| SMINT2002314 | 0 | 0 | 0 | 0 | 4.271 | 0 | 0 |
| SMINT2002328 | 0 | 0 | 0 | 0 | 65.453 | 0 | 0 |
| SMINT2002414 | 0 | 0 | 0 | 0 | 100 | 0 | 0 |
| SMINT2002457 | 0 | 0 | 0 | 0 | 100 | 0 | 0 |
| SMINT2002620 | 0 | 0 | 0 | 0 | 7.995 | 0 | 0 |
| SMINT2002689 | 0 | 0 | 0 | 0 | 4.148 | 0 | 0 |
| SMINT2002743 | 0 | 0 | 0 | 0 | 100 | 0 | 0 |
| SMINT2002778 | 0 | 0 | 0 | 0 | 74.739 | 0 | 0 |
| SMINT2002880 | 0 | 0 | 0 | 0 | 100 | 0 | 0 |
| SMINT2002882 | 0 | 0 | 0 | 0 | 10.246 | 0 | 0 |
| SMINT2002884 | 0 | 0 | 0 | 0 | 13.034 | 6.426 | 0 |
| SMINT2002899 | 0 | 0 | 0 | 0 | 100 | 0 | 0 |
| SMINT2002974 | 0 | 0 | 0 | 0 | 100 | 0 | 0 |
| SMINT2002976 | 0 | 0 | 0 | 0 | 18.406 | 0 | 0 |
| SMINT2003003 | 0 | 0 | 0 | 0 | 69.568 | 0 | 0 |
| SMINT2003074 | 0 | 0 | 0 | 0 | 4.837 | 0 | 9.328 |
| SMINT2003128 | 0 | 0 | 0 | 0 | 100 | 0 | 0 |
| SMINT2003150 | 0 | 0 | 0 | 0 | 77.788 | 0 | 0 |
| SMINT2003169 | 0 | 0 | 0 | 3.230 | 1.660 | 2.455 | 0 |
| SMINT2003317 | 0 | 0 | 0 | 0 | 100 | 0 | 0 |
| SMINT2003340 | 0 | 0 | 0 | 0 | 10.368 | 5.111 | 0 |
| SMINT2003386 | 0 | 0 | 0 | 0 | 100 | 0 | 0 |
| SMINT2003423 | 0 | 0 | 0 | 0 | 38.336 | 0 | 0 |
| SMINT2003505 | 0 | 0 | 0 | 0 | 11.112 | 5.478 | 0 |
| SMINT2003551 | 0 | 0 | 0 | 0 | 48.952 | 0 | 0 |
| SMINT2003569 | 0 | 0 | 0 | 0 | 100 | 0 | 0 |
| SMINT2003641 | 0 | 0 | 0 | 0 | 100 | 0 | 0 |
| SMINT2003644 | 0 | 0 | 0 | 0 | 100 | 0 | 0 |
| SMINT2003866 | 0 | 0 | 0 | 0 | 100 | 0 | 0 |
| SMINT2003905 | 0 | 0 | 0 | 0 | 2.732 | 0 | 0 |
| SMINT2004023 | 0 | 10.746 | 0 | 0 | 5.382 | 0 | 0 |
| SMINT2004037 | 0 | 0 | 0 | 0 | 67.907 | 0 | 0 |
| SMINT2004047 | 0 | 0 | 0 | 0 | 100 | 0 | 0 |
| SMINT2004086 | 0 | 0 | 0 | 0 | 100 | 0 | 0 |
| SMINT2004144 | 0 | 0 | 0 | 0 | 4.805 | 0 | 0 |
| SMINT2004280 | 0 | 0 | 0 | 0 | 44.959 | 0 | 0 |
| SMINT2004299 | 0 | 0 | 0 | 0 | 31.847 | 0 | 0 |
| SMINT2004339 | 0 | 0 | 0 | 0 | 100 | 0 | 0 |
| SMINT2004350 | 0 | 0 | 0 | 0 | 46.110 | 0 | 0 |
| SMINT2004414 | 0 | 0 | 0 | 0 | 83.254 | 0 | 0 |
| SMINT2004473 | 0 | 0 | 0 | 0 | 100 | 0 | 0 |
| SMINT2004547 | 0 | 0 | 0 | 0 | 100 | 0 | 0 |
| SMINT2004583 | 0 | 0 | 0 | 0 | 13.670 | 0 | 0 |
| SMINT2004589 | 0 | 0 | 0 | 0 | 28.285 | 0 | 27.274 |
| SMINT2004729 | 0 | 0 | 0 | 0 | 45.320 | 0 | 0 |
| SMINT2004781 | 0 | 0 | 0 | 0 | 100 | 0 | 0 |
| SMINT2004872 | 0 | 0 | 0 | 0 | 14.926 | 0 | 0 |
| SMINT2004891 | 0 | 0 | 0 | 0 | 100 | 0 | 0 |
| SMINT2004909 | 0 | 0 | 0 | 0 | 100 | 0 | 0 |
| SMINT2004972 | 0 | 0 | 0 | 0 | 27.951 | 0 | 0 |
| SMINT2004992 | 0 | 0 | 0 | 0 | 100 | 0 | 0 |
| SMINT2005075 | 0 | 0 | 0 | 0 | 100 | 0 | 0 |
| SMINT2005161 | 0 | 0 | 0 | 0 | 100 | 0 | 0 |
| SMINT2005174 | 0 | 0 | 0 | 0 | 100 | 0 | 0 |
| SMINT2005213 | 0 | 0 | 0 | 0 | 100 | 0 | 0 |
| SMINT2005330 | 0 | 0 | 0 | 0 | 48.668 | 0 | 0 |
| SMINT2005368 | 0 | 0 | 0 | 0 | 12.432 | 0 | 0 |
| SMINT2005387 | 0 | 0 | 0 | 0 | 80.886 | 0 | 0 |
| SMINT2005402 | 0 | 0 | 0 | 0 | 83.254 | 0 | 0 |
| SMINT2005405 | 0 | 0 | 0 | 0 | 100 | 0 | 0 |
| SMINT2005621 | 0 | 0 | 0 | 0 | 100 | 0 | 0 |
| SMINT2005623 | 0 | 0 | 0 | 0 | 100 | 0 | 0 |
| SMINT2005624 | 0 | 0 | 0 | 0 | 100 | 0 | 0 |
| SMINT2005688 | 0 | 0 | 0 | 0 | 8.807 | 0 | 0 |
| SMINT2005800 | 0 | 0 | 0 | 0 | 100 | 0 | 0 |
| SMINT2005956 | 0 | 18.546 | 0 | 0 | 9.288 | 0 | 0 |
| SMINT2006078 | 0 | 0 | 0 | 0 | 100 | 0 | 0 |
| SMINT2006205 | 0 | 0 | 0 | 0 | 100 | 0 | 0 |
| SMINT2006331 | 0 | 0 | 0 | 0 | 100 | 0 | 0 |
| SMINT2006596 | 0 | 0 | 0 | 0 | 100 | 0 | 0 |
| SMINT2006641 | 0 | 0 | 0 | 0 | 100 | 0 | 0 |
| SMINT2006648 | 0 | 0 | 0 | 0 | 100 | 0 | 0 |
| SMINT2006708 | 0 | 0 | 0 | 0 | 100 | 0 | 0 |
| SMINT2006716 | 0 | 0 | 0 | 0 | 41.444 | 0 | 0 |
| SMINT2006801 | 0 | 0 | 0 | 0 | 56.833 | 0 | 0 |
| SMINT2007062 | 0 | 0 | 0 | 0 | 80.886 | 0 | 0 |
| SMINT2007101 | 0 | 0 | 0 | 0 | 76.088 | 0 | 0 |
| SMINT2007140 | 0 | 0 | 0 | 0 | 100 | 0 | 0 |
| SMINT2007187 | 0 | 0 | 0 | 0 | 23.689 | 0 | 0 |
| SMINT2007219 | 0 | 0 | 0 | 0 | 100 | 0 | 0 |
| SMINT2007294 | 0 | 0 | 0 | 0 | 100 | 0 | 0 |
| SMINT2007365 | 0 | 0 | 0 | 0 | 100 | 0 | 0 |
| SMINT2007391 | 0 | 0 | 0 | 0 | 100 | 0 | 0 |
| SMINT2007433 | 0 | 0 | 0 | 0 | 29.456 | 0 | 0 |
| SMINT2007508 | 0 | 0 | 0 | 0 | 58.601 | 0 | 0 |
| SMINT2007526 | 0 | 0 | 0 | 0 | 100 | 0 | 0 |
| SMINT2007579 | 0 | 0 | 0 | 0 | 100 | 0 | 0 |
| SMINT2007647 | 0 | 0 | 0 | 0 | 77.788 | 0 | 0 |
| SMINT2007729 | 0 | 0 | 0 | 0 | 20.292 | 0 | 0 |
| SMINT2007790 | 0 | 0 | 0 | 0 | 100 | 0 | 0 |
| SMINT2007792 | 0 | 0 | 0 | 0 | 29.494 | 0 | 0 |
| SMINT2007796 | 0 | 0 | 0 | 0 | 100 | 0 | 0 |
| SMINT2007867 | 0 | 0 | 0 | 0 | 100 | 0 | 0 |
| SMINT2007932 | 0 | 0 | 0 | 0 | 100 | 0 | 0 |
| SMINT2008042 | 0 | 0 | 0 | 0 | 100 | 0 | 0 |
| SMINT2008054 | 0 | 0 | 0 | 0 | 66.980 | 33.020 | 0 |
| SMINT2008133 | 0 | 0 | 0 | 0 | 83.254 | 0 | 0 |
| SMINT2008277 | 0 | 0 | 0 | 0 | 100 | 0 | 0 |
| SMINT2008329 | 0 | 0 | 0 | 0 | 100 | 0 | 0 |
| SMINT2008455 | 0 | 0 | 0 | 0 | 100 | 0 | 0 |
| SMINT2008491 | 0 | 0 | 0 | 0 | 100 | 0 | 0 |
| SMINT2008531 | 0 | 0 | 0 | 0 | 100 | 0 | 0 |
| SMINT2008545 | 0 | 0 | 0 | 0 | 100 | 0 | 0 |
| SMINT2008558 | 0 | 0 | 0 | 0 | 100 | 0 | 0 |
| SMINT2008590 | 0 | 0 | 0 | 0 | 33.779 | 0 | 0 |
| SMINT2008625 | 0 | 0 | 0 | 0 | 100 | 0 | 0 |
| SMINT2008672 | 0 | 0 | 0 | 0 | 47.955 | 0 | 0 |
| SMINT2008690 | 0 | 0 | 0 | 0 | 100 | 0 | 0 |
| SMINT2008715 | 0 | 0 | 0 | 0 | 100 | 0 | 0 |
| SMINT2008720 | 0 | 0 | 0 | 0 | 100 | 0 | 0 |
| SMINT2008817 | 0 | 0 | 0 | 0 | 100 | 0 | 0 |
| SMINT2008844 | 0 | 0 | 0 | 0 | 100 | 0 | 0 |
| SMINT2008869 | 0 | 0 | 0 | 0 | 49.902 | 0 | 0 |
| SMINT2008917 | 0 | 0 | 0 | 0 | 39.482 | 0 | 0 |
| SMINT2008921 | 0 | 0 | 0 | 0 | 3.915 | 0 | 0 |
| SMINT2008960 | 0 | 0 | 0 | 0 | 2.414 | 2.380 | 4.656 |
| SMINT2009119 | 0 | 0 | 0 | 0 | 100 | 0 | 0 |
| SMINT2009121 | 0 | 0 | 0 | 0 | 100 | 0 | 0 |
| SMINT2009212 | 0 | 0 | 0 | 0 | 100 | 0 | 0 |
| SMINT2009216 | 0 | 0 | 0 | 0 | 19.533 | 0 | 0 |
| SMINT2009233 | 0 | 0 | 0 | 0 | 83.254 | 0 | 0 |
| SMINT2009259 | 0 | 0 | 0 | 0 | 100 | 0 | 0 |
| SMINT2009272 | 0 | 0 | 0 | 0 | 100 | 0 | 0 |
| SMINT2009292 | 0 | 0 | 0 | 0 | 12.516 | 0 | 0 |
| SMINT2009363 | 0 | 0 | 0 | 0 | 100 | 0 | 0 |
| SMINT2009415 | 0 | 0 | 0 | 0 | 76.088 | 0 | 0 |
| SMINT2009468 | 0 | 0 | 0 | 0 | 100 | 0 | 0 |
| SMINT2009505 | 0 | 0 | 0 | 0 | 100 | 0 | 0 |
| SMINT2009529 | 0 | 0 | 0 | 0 | 100 | 0 | 0 |
| SMINT2009832 | 0 | 0 | 0 | 0 | 32.604 | 0 | 0 |
| SMINT2009895 | 0 | 0 | 0 | 0 | 100 | 0 | 0 |
| SMINT2009902 | 0 | 0 | 0 | 0 | 100 | 0 | 0 |
| SMINT2009973 | 0 | 0 | 0 | 0 | 100 | 0 | 0 |
| SMINT2010015 | 0 | 0 | 0 | 0 | 100 | 0 | 0 |
| SMINT2010068 | 0 | 0 | 0 | 0 | 100 | 0 | 0 |
| SMINT2010076 | 0 | 0 | 0 | 0 | 100 | 0 | 0 |
| SMINT2010084 | 0 | 0 | 0 | 0 | 12.125 | 5.977 | 0 |
| SMINT2010144 | 0 | 0 | 0 | 0 | 76.088 | 0 | 0 |
| SMINT2010200 | 0 | 0 | 0 | 0 | 33.450 | 0 | 0 |
| SMINT2010278 | 0 | 0 | 0 | 0 | 100 | 0 | 0 |
| SMINT2010324 | 0 | 0 | 0 | 0 | 76.088 | 0 | 0 |
| SMINT2010326 | 0 | 0 | 0 | 0 | 100 | 0 | 0 |
| SMINT2010369 | 0 | 0 | 0 | 0 | 80.886 | 0 | 0 |
| SMINT2010426 | 0 | 0 | 42.229 | 0 | 19.116 | 0 | 0 |
| SMINT2010500 | 0 | 0 | 0 | 0 | 100 | 0 | 0 |
| SMINT2010533 | 0 | 0 | 0 | 0 | 100 | 0 | 0 |
| SMINT2010629 | 0 | 0 | 0 | 0 | 100 | 0 | 0 |
| SMINT2010639 | 0 | 0 | 0 | 0 | 9.559 | 0 | 0 |
| SMINT2010672 | 0 | 0 | 0 | 0 | 100 | 0 | 0 |
| SMINT2010753 | 0 | 0 | 0 | 0 | 100 | 0 | 0 |
| SMINT2010853 | 0 | 0 | 0 | 0 | 100 | 0 | 0 |
| SMINT2010897 | 0 | 0 | 0 | 0 | 100 | 0 | 0 |
| SMINT2010901 | 0 | 0 | 0 | 0 | 12.393 | 6.110 | 0 |
| SMINT2010959 | 0 | 0 | 0 | 0 | 54.616 | 26.925 | 0 |
| SMINT2010997 | 0 | 0 | 0 | 0 | 100 | 0 | 0 |
| SMINT2011033 | 0 | 0 | 0 | 0 | 74.739 | 0 | 0 |
| SMINT2011066 | 0 | 0 | 0 | 0 | 100 | 0 | 0 |
| SMINT2011273 | 0 | 0 | 0 | 0 | 100 | 0 | 0 |
| SMINT2011311 | 0 | 0 | 0 | 0 | 66.474 | 0 | 0 |
| SMINT2011406 | 0 | 0 | 0 | 0 | 100 | 0 | 0 |
| SMINT2011509 | 0 | 0 | 0 | 0 | 100 | 0 | 0 |
| SMINT2011567 | 0 | 0 | 0 | 0 | 33.480 | 0 | 0 |
| SMINT2011588 | 0 | 0 | 0 | 0 | 65.637 | 0 | 0 |
| SMINT2011656 | 0 | 0 | 0 | 0 | 83.254 | 0 | 0 |
| SMINT2011888 | 0 | 0 | 0 | 0 | 100 | 0 | 0 |
| SMINT2011958 | 0 | 0 | 0 | 0 | 100 | 0 | 0 |
| SMINT2012040 | 0 | 0 | 0 | 0 | 100 | 0 | 0 |
| SMINT2012122 | 0 | 0 | 0 | 0 | 12.336 | 0 | 0 |
| SMINT2012179 | 0 | 0 | 0 | 0 | 65.556 | 0 | 0 |
| SMINT2012195 | 0 | 0 | 0 | 0 | 83.254 | 0 | 0 |
| SMINT2012285 | 0 | 0 | 0 | 0 | 100 | 0 | 0 |
| SMINT2012291 | 0 | 0 | 0 | 0 | 16.272 | 0 | 0 |
| SMINT2012501 | 0 | 0 | 0 | 0 | 28.061 | 0 | 0 |
| SMINT2012734 | 0 | 0 | 0 | 0 | 100 | 0 | 0 |
| SMINT2012793 | 0 | 0 | 0 | 0 | 100 | 0 | 0 |
| SMINT2013031 | 0 | 0 | 0 | 0 | 10.952 | 0 | 0 |
| SMINT2013032 | 0 | 0 | 0 | 0 | 42.206 | 0 | 0 |
| SMINT2013129 | 0 | 0 | 0 | 0 | 100 | 0 | 0 |
| SMINT2013170 | 0 | 0 | 0 | 0 | 38.476 | 0 | 0 |
| SMINT2013181 | 0 | 0 | 0 | 0 | 77.788 | 0 | 0 |
| SMINT2013228 | 0 | 0 | 0 | 0 | 100 | 0 | 0 |
| SMINT2013613 | 0 | 0 | 0 | 0 | 100 | 0 | 0 |
| SMINT2013626 | 0 | 0 | 0 | 0 | 100 | 0 | 0 |
| SMINT2013695 | 0 | 0 | 0 | 0 | 74.739 | 0 | 0 |
| SMINT2013833 | 0 | 0 | 0 | 0 | 100 | 0 | 0 |
| SMINT2013890 | 0 | 0 | 0 | 0 | 32.378 | 0 | 0 |
| SMINT2014166 | 0 | 0 | 0 | 0 | 100 | 0 | 0 |
| SMINT2014282 | 0 | 0 | 0 | 0 | 100 | 0 | 0 |
| SMINT2014443 | 0 | 0 | 0 | 0 | 100 | 0 | 0 |
| SMINT2014480 | 0 | 0 | 0 | 0 | 5.606 | 0 | 0 |
| SMINT2014489 | 0 | 0 | 0 | 0 | 100 | 0 | 0 |
| SMINT2014721 | 0 | 0 | 0 | 0 | 100 | 0 | 0 |
| SMINT2015006 | 0 | 0 | 0 | 0 | 100 | 0 | 0 |
| SMINT2015294 | 0 | 0 | 0 | 0 | 28.094 | 0 | 0 |
| SMINT2015306 | 0 | 0 | 0 | 0 | 35.321 | 0 | 0 |
| SMINT2015326 | 0 | 0 | 0 | 0 | 100 | 0 | 0 |
| SMINT2015353 | 0 | 0 | 0 | 0 | 100 | 0 | 0 |
| SMINT2015454 | 0 | 0 | 0 | 0 | 100 | 0 | 0 |
| SMINT2015518 | 0 | 0 | 0 | 0 | 100 | 0 | 0 |
| SMINT2015745 | 0 | 0 | 0 | 0 | 100 | 0 | 0 |
| SMINT2015787 | 0 | 0 | 0 | 0 | 100 | 0 | 0 |
| SMINT2015810 | 0 | 0 | 0 | 0 | 100 | 0 | 0 |
| SMINT2016122 | 0 | 0 | 0 | 0 | 100 | 0 | 0 |
| SMINT2016146 | 0 | 0 | 0 | 0 | 60.601 | 0 | 0 |
| SMINT2016286 | 0 | 0 | 0 | 0 | 100 | 0 | 0 |
| SMINT2016313 | 0 | 0 | 0 | 0 | 100 | 0 | 0 |
| SMINT2016396 | 0 | 0 | 0 | 0 | 49.902 | 0 | 0 |
| SMINT2016412 | 0 | 0 | 0 | 0 | 19.978 | 0 | 0 |
| SMINT2016440 | 0 | 0 | 0 | 0 | 100 | 0 | 0 |
| SMINT2016477 | 0 | 0 | 0 | 0 | 100 | 0 | 0 |
| SMINT2016544 | 0 | 0 | 0 | 0 | 100 | 0 | 0 |
| SMINT2016857 | 0 | 0 | 0 | 0 | 100 | 0 | 0 |
| SMINT2017134 | 0 | 0 | 0 | 0 | 76.088 | 0 | 0 |
| SMINT2017319 | 0 | 0 | 0 | 0 | 100 | 0 | 0 |
| SMINT2017324 | 0 | 0 | 0 | 0 | 100 | 0 | 0 |
| SMINT2017410 | 0 | 0 | 0 | 0 | 100 | 0 | 0 |
| SMINT2017431 | 0 | 0 | 0 | 0 | 100 | 0 | 0 |
| SMINT2017432 | 0 | 0 | 0 | 0 | 100 | 0 | 0 |
| SMINT2017436 | 0 | 0 | 0 | 0 | 100 | 0 | 0 |
| SMINT2017599 | 0 | 0 | 0 | 0 | 14.490 | 0 | 0 |
| SMINT2017659 | 0 | 0 | 0 | 0 | 100 | 0 | 0 |
| SMINT2017736 | 0 | 0 | 0 | 0 | 100 | 0 | 0 |
| SMINT2017781 | 0 | 0 | 0 | 0 | 100 | 0 | 0 |
| SMINT2017855 | 0 | 0 | 0 | 0 | 100 | 0 | 0 |
| SMINT2017884 | 0 | 0 | 0 | 0 | 83.254 | 0 | 0 |
| SMINT2017964 | 0 | 0 | 0 | 0 | 17.105 | 0 | 0 |
| SMINT2017974 | 0 | 0 | 0 | 0 | 100 | 0 | 0 |
| SMINT2018343 | 0 | 0 | 0 | 0 | 100 | 0 | 0 |
| SMINT2018353 | 0 | 0 | 0 | 0 | 34.595 | 0 | 0 |
| SMINT2018592 | 0 | 0 | 0 | 0 | 100 | 0 | 0 |
| SMINT2018681 | 0 | 0 | 0 | 0 | 14.757 | 0 | 0 |
| SMINT2019017 | 0 | 0 | 0 | 0 | 100 | 0 | 0 |
| SMINT2019105 | 0 | 0 | 0 | 0 | 100 | 0 | 0 |
| SMINT2019142 | 0 | 0 | 0 | 0 | 100 | 0 | 0 |
| SMINT2019153 | 0 | 0 | 0 | 0 | 100 | 0 | 0 |
| SMINT2019200 | 0 | 0 | 0 | 0 | 100 | 0 | 0 |
| SPLEN1000013 | 0 | 0 | 0 | 0 | 0 | 16.928 | 0 |
| SPLEN1000041 | 0 | 0 | 0 | 0 | 0 | 67.599 | 0 |
| SPLEN1000049 | 0 | 0 | 0 | 0 | 0 | 37.925 | 0 |
| SPLEN1000056 | 0 | 0 | 0 | 0 | 0 | 67.599 | 0 |
| SPLEN1000087 | 0 | 0 | 0 | 0 | 0 | 100 | 0 |
| SPLEN1000089 | 0 | 0 | 0 | 0 | 0 | 6.913 | 0 |
| SPLEN1000091 | 0 | 0 | 0 | 0 | 0 | 100 | 0 |
| SPLEN1000106 | 0 | 0 | 0 | 0 | 0 | 8.098 | 0 |
| SPLEN1000116 | 0 | 0 | 0 | 0 | 0 | 4.305 | 0 |
| SPLEN1000134 | 0 | 0 | 0 | 0 | 0 | 60.831 | 0 |
| SPLEN1000139 | 0 | 0 | 0 | 0 | 0 | 49.431 | 0 |
| SPLEN1000143 | 0 | 0 | 0 | 0 | 0 | 100 | 0 |
| SPLEN1000144 | 0 | 0 | 0 | 0 | 0 | 18.188 | 0 |
| SPLEN1000145 | 0 | 0 | 0 | 0 | 0 | 100 | 0 |
| SPLEN1000156 | 0 | 0 | 0 | 0 | 0 | 100 | 0 |
| SPLEN1000163 | 0 | 0 | 0 | 0 | 0 | 100 | 0 |
| SPLEN1000165 | 0 | 0 | 0 | 0 | 0 | 8.681 | 0 |
| SPLEN1000166 | 0 | 0 | 0 | 0 | 0 | 1.967 | 7.693 |
| SPLEN1000178 | 0 | 0 | 0 | 0 | 0 | 100 | 0 |
| SPLEN2000020 | 0 | 0 | 0 | 0 | 0 | 100 | 0 |
| SPLEN2000047 | 0 | 0 | 0 | 0 | 0 | 28.708 | 0 |
| SPLEN2000064 | 0 | 0 | 0 | 0 | 0 | 100 | 0 |
| SPLEN2000072 | 0 | 0 | 0 | 0 | 42.383 | 10.447 | 0 |
| SPLEN2000098 | 0 | 0 | 0 | 0 | 0 | 20.954 | 0 |
| SPLEN2000126 | 0 | 0 | 0 | 0 | 0 | 100 | 0 |
| SPLEN2000134 | 0 | 0 | 0 | 0 | 0 | 9.114 | 0 |
| SPLEN2000143 | 0 | 0 | 0 | 0 | 0 | 80.667 | 0 |
| SPLEN2000189 | 0 | 0 | 0 | 0 | 0 | 100 | 0 |
| SPLEN2000197 | 0 | 0 | 0 | 0 | 0 | 61.070 | 0 |
| SPLEN2000205 | 0 | 0 | 0 | 0 | 0 | 100 | 0 |
| SPLEN2000210 | 0 | 0 | 0 | 0 | 0 | 23.091 | 0 |
| SPLEN2000222 | 0 | 0 | 0 | 0 | 0 | 21.249 | 0 |
| SPLEN2000242 | 0 | 0 | 0 | 0 | 0 | 16.714 | 0 |
| SPLEN2000243 | 0 | 0 | 0 | 0 | 0 | 37.818 | 0 |
| SPLEN2000247 | 0 | 0 | 0 | 0 | 0 | 100 | 0 |
| SPLEN2000255 | 0 | 0 | 0 | 0 | 21.677 | 18.702 | 0 |
| SPLEN2000258 | 0 | 0 | 0 | 0 | 15.448 | 7.616 | 0 |
| SPLEN2000267 | 0 | 0 | 0 | 0 | 0 | 10.156 | 0 |
| SPLEN2000270 | 0 | 0 | 0 | 0 | 0 | 100 | 0 |
| SPLEN2000307 | 0 | 0 | 0 | 0 | 0 | 100 | 0 |
| SPLEN2000310 | 0 | 0 | 0 | 0 | 0 | 23.091 | 0 |
| SPLEN2000341 | 0 | 0 | 0 | 0 | 47.783 | 23.557 | 0 |
| SPLEN2000348 | 0 | 0 | 0 | 0 | 0 | 9.733 | 0 |
| SPLEN2000350 | 0 | 0 | 0 | 0 | 0 | 100 | 0 |
| SPLEN2000357 | 0 | 0 | 0 | 0 | 0 | 100 | 0 |
| SPLEN2000364 | 0 | 0 | 0 | 0 | 0 | 100 | 0 |
| SPLEN2000402 | 0 | 0 | 0 | 0 | 0 | 100 | 0 |
| SPLEN2000414 | 0 | 0 | 0 | 0 | 0 | 23.091 | 0 |
| SPLEN2000420 | 0 | 0 | 0 | 0 | 0 | 100 | 0 |
| SPLEN2000443 | 0 | 0 | 0 | 0 | 0 | 38.429 | 0 |
| SPLEN2000448 | 0 | 0 | 0 | 0 | 0 | 100 | 0 |
| SPLEN2000450 | 0 | 0 | 0 | 0 | 0 | 100 | 0 |
| SPLEN2000464 | 0 | 0 | 0 | 0 | 0 | 100 | 0 |
| SPLEN2000496 | 0 | 0 | 0 | 0 | 0 | 100 | 0 |
| SPLEN2000505 | 0 | 0 | 3.285 | 0 | 0 | 0.733 | 0 |
| SPLEN2000515 | 0 | 0 | 0 | 0 | 0 | 100 | 0 |
| SPLEN2000516 | 0 | 0 | 0 | 0 | 0 | 41.589 | 0 |
| SPLEN2000537 | 0 | 0 | 0 | 0 | 0 | 63.499 | 0 |
| SPLEN2000541 | 0 | 0 | 0 | 0 | 0 | 100 | 0 |
| SPLEN2000607 | 0 | 0 | 0 | 0 | 0 | 100 | 0 |
| SPLEN2000630 | 0 | 0 | 0 | 0 | 0 | 100 | 0 |
| SPLEN2000695 | 0 | 0 | 0 | 0 | 0 | 100 | 0 |
| SPLEN2000698 | 0 | 0 | 0 | 0 | 0 | 3.689 | 0 |
| SPLEN2000839 | 0 | 0 | 0 | 0 | 0 | 15.878 | 0 |
| SPLEN2000874 | 0 | 0 | 0 | 3.347 | 0 | 0.848 | 0 |
| SPLEN2000882 | 0 | 0 | 0 | 0 | 6.199 | 12.224 | 0 |
| SPLEN2001135 | 0 | 0 | 0 | 0 | 0 | 100 | 0 |
| SPLEN2001141 | 0 | 0 | 0 | 0 | 0 | 8.214 | 0 |
| SPLEN2001157 | 0 | 0 | 42.883 | 0 | 0 | 9.570 | 0 |
| SPLEN2001176 | 0 | 0 | 0 | 0 | 0 | 100 | 0 |
| SPLEN2001227 | 0 | 0 | 0 | 0 | 0 | 100 | 0 |
| SPLEN2001245 | 0 | 0 | 0 | 0 | 0 | 1.944 | 0 |
| SPLEN2001278 | 0 | 0 | 0 | 0 | 0 | 67.599 | 0 |
| SPLEN2001354 | 0 | 0 | 0 | 0 | 0 | 100 | 0 |
| SPLEN2001367 | 0 | 0 | 0 | 0 | 0 | 100 | 0 |
| SPLEN2001383 | 0 | 0 | 0 | 0 | 0 | 100 | 0 |
| SPLEN2001476 | 0 | 0 | 0 | 0 | 0 | 67.599 | 0 |
| SPLEN2001503 | 0 | 0 | 0 | 0 | 0 | 34.999 | 0 |
| SPLEN2001510 | 0 | 0 | 0 | 0 | 0 | 100 | 0 |
| SPLEN2001599 | 0 | 0 | 0 | 0 | 0 | 24.827 | 0 |
| SPLEN2001626 | 0 | 0 | 0 | 0 | 0 | 32.545 | 0 |
| SPLEN2001650 | 0 | 0 | 0 | 0 | 0 | 100 | 0 |
| SPLEN2001689 | 0 | 0 | 0 | 0 | 0 | 48.561 | 0 |
| SPLEN2001710 | 0 | 0 | 0 | 0 | 0 | 13.491 | 0 |
| SPLEN2001761 | 0 | 0 | 0 | 0 | 0 | 18.511 | 0 |
| SPLEN2001781 | 0 | 0 | 0 | 0 | 0 | 100 | 0 |
| SPLEN2001881 | 0 | 0 | 0 | 0 | 0 | 100 | 0 |
| SPLEN2001912 | 0 | 0 | 0 | 0 | 0 | 100 | 0 |
| SPLEN2001945 | 0 | 0 | 0 | 0 | 0 | 100 | 0 |
| SPLEN2002007 | 0 | 0 | 0 | 0 | 0 | 33.199 | 0 |
| SPLEN2002053 | 0 | 0 | 0 | 0 | 0 | 63.499 | 0 |
| SPLEN2002133 | 0 | 0 | 0 | 0 | 0 | 72.687 | 0 |
| SPLEN2002147 | 0 | 0 | 0 | 0 | 0 | 100 | 0 |
| SPLEN2002166 | 0 | 0 | 0 | 0 | 0 | 100 | 0 |
| SPLEN2002175 | 0 | 0 | 0 | 0 | 0 | 100 | 0 |
| SPLEN2002223 | 0 | 0 | 0 | 0 | 0 | 60.831 | 0 |
| SPLEN2002272 | 0 | 0 | 0 | 0 | 0 | 32.545 | 0 |
| SPLEN2002314 | 0 | 0 | 0 | 0 | 0 | 100 | 0 |
| SPLEN2002335 | 0 | 0 | 0 | 0 | 0 | 3.523 | 0 |
| SPLEN2002343 | 0 | 0 | 0 | 0 | 0 | 100 | 0 |
| SPLEN2002354 | 0 | 0 | 0 | 0 | 0 | 100 | 0 |
| SPLEN2002385 | 0 | 0 | 0 | 0 | 0 | 100 | 0 |
| SPLEN2002419 | 0 | 0 | 0 | 0 | 0 | 100 | 0 |
| SPLEN2002451 | 0 | 0 | 0 | 0 | 0 | 67.599 | 0 |
| SPLEN2002462 | 0 | 0 | 0 | 0 | 0 | 100 | 0 |
| SPLEN2002463 | 0 | 0 | 0 | 0 | 0 | 13.174 | 0 |
| SPLEN2002467 | 0 | 0 | 0 | 0 | 0 | 5.667 | 0 |
| SPLEN2002477 | 0 | 0 | 0 | 0 | 5.734 | 45.229 | 0 |
| SPLEN2002493 | 0 | 0 | 0 | 0 | 0 | 3.011 | 0 |
| SPLEN2002662 | 0 | 0 | 0 | 0 | 0 | 100 | 0 |
| SPLEN2002695 | 0 | 0 | 0 | 0 | 0 | 100 | 0 |
| SPLEN2002707 | 0 | 0 | 0 | 0 | 0 | 100 | 0 |
| SPLEN2002744 | 0 | 0 | 0 | 0 | 0 | 3.880 | 0 |
| SPLEN2002917 | 0 | 0 | 0 | 0 | 0 | 100 | 0 |
| SPLEN2002931 | 0 | 0 | 0 | 0 | 0 | 7.094 | 0 |
| SPLEN2002957 | 0 | 0 | 0 | 0 | 0 | 100 | 0 |
| SPLEN2003160 | 0 | 0 | 0 | 0 | 0 | 100 | 0 |
| SPLEN2003204 | 0 | 0 | 0 | 0 | 0 | 100 | 0 |
| SPLEN2003219 | 0 | 0 | 0 | 0 | 0 | 100 | 0 |
| SPLEN2003297 | 0 | 0 | 0 | 0 | 0 | 46.191 | 0 |
| SPLEN2003396 | 0 | 0 | 0 | 0 | 0 | 32.545 | 0 |
| SPLEN2003678 | 0 | 0 | 0 | 0 | 0 | 61.070 | 0 |
| SPLEN2003878 | 0 | 0 | 0 | 0 | 0 | 100 | 0 |
| SPLEN2003918 | 0 | 0 | 0 | 0 | 0 | 100 | 0 |
| SPLEN2003924 | 0 | 0 | 0 | 0 | 0 | 100 | 0 |
| SPLEN2004060 | 0 | 0 | 0 | 0 | 0 | 100 | 0 |
| SPLEN2004078 | 0 | 0 | 0 | 0 | 0 | 25.996 | 0 |
| SPLEN2004124 | 0 | 0 | 0 | 0 | 0 | 100 | 0 |
| SPLEN2004148 | 0 | 0 | 0 | 0 | 0 | 100 | 0 |
| SPLEN2004181 | 0 | 0 | 0 | 0 | 0 | 13.695 | 0 |
| SPLEN2004220 | 0 | 0 | 0 | 0 | 0 | 10.007 | 0 |
| SPLEN2004343 | 0 | 0 | 0 | 0 | 0 | 31.298 | 0 |
| SPLEN2004346 | 0 | 0 | 0 | 0 | 0 | 100 | 0 |
| SPLEN2004368 | 0 | 0 | 0 | 0 | 0 | 100 | 0 |
| SPLEN2004555 | 0 | 0 | 8.297 | 0 | 0 | 3.703 | 0 |
| SPLEN2004611 | 0 | 0 | 0 | 0 | 0 | 67.599 | 0 |
| SPLEN2004662 | 0 | 0 | 0 | 0 | 0 | 65.533 | 0 |
| SPLEN2004773 | 0 | 0 | 0 | 0 | 0 | 3.714 | 0 |
| SPLEN2004844 | 0 | 0 | 0 | 0 | 0 | 19.862 | 0 |
| SPLEN2004880 | 95.022 | 0 | 0 | 0 | 0 | 1.025 | 2.004 |
| SPLEN2004984 | 0 | 0 | 0 | 0 | 0 | 13.708 | 0 |
| SPLEN2005009 | 0 | 0 | 0 | 0 | 0 | 14.955 | 0 |
| SPLEN2005227 | 0 | 0 | 0 | 0 | 0 | 100 | 0 |
| SPLEN2005272 | 0 | 0 | 0 | 0 | 0 | 100 | 0 |
| SPLEN2005342 | 0 | 0 | 0 | 0 | 0 | 9.281 | 0 |
| SPLEN2005416 | 0 | 0 | 0 | 0 | 0 | 60.831 | 0 |
| SPLEN2005429 | 0 | 0 | 0 | 0 | 0 | 6.373 | 0 |
| SPLEN2005450 | 0 | 0 | 0 | 0 | 0 | 100 | 0 |
| SPLEN2005474 | 0 | 0 | 0 | 0 | 0 | 100 | 0 |
| SPLEN2005560 | 0 | 0 | 0 | 0 | 0 | 1.831 | 0 |
| SPLEN2005727 | 0 | 0 | 0 | 0 | 0 | 100 | 0 |
| SPLEN2005783 | 0 | 0 | 0 | 0 | 0 | 11.340 | 0 |
| SPLEN2005790 | 0 | 0 | 0 | 0 | 0 | 67.599 | 0 |
| SPLEN2005806 | 0 | 0 | 0 | 0 | 0 | 2.128 | 0 |
| SPLEN2005818 | 0 | 0 | 0 | 0 | 0 | 38.781 | 0 |
| SPLEN2005838 | 0 | 0 | 0 | 0 | 0 | 63.033 | 0 |
| SPLEN2005869 | 0 | 0 | 0 | 0 | 0 | 11.172 | 0 |
| SPLEN2005927 | 0 | 0 | 33.569 | 0 | 15.196 | 7.491 | 0 |
| SPLEN2005939 | 0 | 0 | 0 | 0 | 0 | 100 | 0 |
| SPLEN2006122 | 0 | 0 | 0 | 0 | 0 | 2.930 | 0 |
| SPLEN2006133 | 0 | 0 | 0 | 6.514 | 6.695 | 6.601 | 0 |
| SPLEN2006143 | 0 | 0 | 0 | 0 | 0 | 3.892 | 0 |
| SPLEN2006232 | 0 | 0 | 0 | 0 | 0 | 14.970 | 0 |
| SPLEN2006268 | 0 | 0 | 0 | 0 | 0 | 100 | 0 |
| SPLEN2006283 | 0 | 0 | 0 | 0 | 0 | 100 | 0 |
| SPLEN2006305 | 0 | 0 | 0 | 4.337 | 4.458 | 8.791 | 0 |
| SPLEN2006325 | 0 | 0 | 0 | 0 | 0 | 14.493 | 0 |
| SPLEN2006374 | 0 | 0 | 0 | 0 | 0 | 2.644 | 0 |
| SPLEN2006389 | 0 | 0 | 0 | 0 | 0 | 100 | 0 |
| SPLEN2006425 | 0 | 0 | 0 | 0 | 0 | 100 | 0 |
| SPLEN2006671 | 0 | 0 | 0 | 0 | 0 | 32.498 | 0 |
| SPLEN2006701 | 0 | 0 | 0 | 0 | 0 | 100 | 0 |
| SPLEN2006785 | 0 | 0 | 0 | 0 | 0 | 100 | 0 |
| SPLEN2006875 | 0 | 0 | 0 | 0 | 0 | 100 | 0 |
| SPLEN2007182 | 0 | 0 | 0 | 0 | 0 | 22.235 | 0 |
| SPLEN2007276 | 0 | 0 | 0 | 0 | 0 | 4.614 | 0 |
| SPLEN2007314 | 0 | 0 | 0 | 0 | 0 | 100 | 0 |
| SPLEN2007326 | 0 | 0 | 0 | 0 | 0 | 67.599 | 0 |
| SPLEN2007350 | 0 | 0 | 0 | 0 | 0 | 100 | 0 |
| SPLEN2007388 | 0 | 0 | 0 | 0 | 0 | 46.191 | 0 |
| SPLEN2007498 | 0 | 0 | 0 | 0 | 0 | 4.553 | 0 |
| SPLEN2007619 | 0 | 0 | 0 | 0 | 0 | 100 | 0 |
| SPLEN2007653 | 0 | 0 | 0 | 0 | 0 | 100 | 0 |
| SPLEN2007689 | 0 | 0 | 0 | 0 | 0 | 100 | 0 |
| SPLEN2007695 | 0 | 0 | 0 | 0 | 0 | 100 | 0 |
| SPLEN2007739 | 0 | 0 | 0 | 0 | 0 | 10.563 | 0 |
| SPLEN2007750 | 0 | 0 | 0 | 0 | 0 | 16.833 | 0 |
| SPLEN2007794 | 0 | 0 | 0 | 0 | 0 | 17.241 | 0 |
| SPLEN2007879 | 0 | 0 | 0 | 0 | 50.875 | 25.081 | 0 |
| SPLEN2007926 | 0 | 0 | 0 | 0 | 0 | 100 | 0 |
| SPLEN2007951 | 0 | 0 | 0 | 0 | 0 | 41.102 | 0 |
| SPLEN2008007 | 0 | 0 | 0 | 0 | 0 | 100 | 0 |
| SPLEN2008135 | 0 | 0 | 0 | 0 | 0 | 100 | 0 |
| SPLEN2008164 | 0 | 0 | 0 | 0 | 0 | 100 | 0 |
| SPLEN2008317 | 0 | 0 | 0 | 0 | 0 | 100 | 0 |
| SPLEN2008460 | 0 | 0 | 0 | 0 | 0 | 4.558 | 0 |
| SPLEN2008496 | 0 | 0 | 0 | 0 | 0 | 13.469 | 0 |
| SPLEN2008591 | 0 | 0 | 0 | 0 | 0 | 72.687 | 0 |
| SPLEN2008786 | 0 | 0 | 0 | 0 | 0 | 100 | 0 |
| SPLEN2009081 | 0 | 0 | 0 | 0 | 0 | 11.259 | 0 |
| SPLEN2009088 | 0 | 0 | 0 | 0 | 0 | 100 | 0 |
| SPLEN2009163 | 0 | 0 | 0 | 0 | 0 | 31.971 | 0 |
| SPLEN2009315 | 0 | 0 | 0 | 0 | 0 | 59.326 | 0 |
| SPLEN2009340 | 0 | 0 | 0 | 0 | 0 | 100 | 0 |
| SPLEN2009512 | 0 | 0 | 0 | 0 | 0 | 28.811 | 0 |
| SPLEN2009513 | 0 | 0 | 0 | 0 | 0 | 10.785 | 42.191 |
| SPLEN2009541 | 0 | 0 | 0 | 0 | 0 | 100 | 0 |
| SPLEN2009548 | 0 | 0 | 0 | 0 | 0 | 100 | 0 |
| SPLEN2009555 | 0 | 0 | 0 | 0 | 0 | 14.776 | 0 |
| SPLEN2009581 | 0 | 0 | 0 | 0 | 0 | 100 | 0 |
| SPLEN2009733 | 0 | 0 | 0 | 0 | 0 | 100 | 0 |
| SPLEN2009803 | 0 | 0 | 0 | 0 | 0 | 100 | 0 |
| SPLEN2009884 | 0 | 0 | 0 | 0 | 0 | 100 | 0 |
| SPLEN2009918 | 0 | 0 | 0 | 0 | 0 | 100 | 0 |
| SPLEN2009970 | 0 | 0 | 0 | 0 | 0 | 8.872 | 0 |
| SPLEN2010004 | 0 | 0 | 0 | 0 | 0 | 100 | 0 |
| SPLEN2010015 | 0 | 0 | 0 | 0 | 0 | 27.044 | 0 |
| SPLEN2010112 | 0 | 0 | 0 | 0 | 0 | 100 | 0 |
| SPLEN2010119 | 0 | 0 | 0 | 0 | 0 | 100 | 0 |
| SPLEN2010146 | 0 | 0 | 0 | 0 | 0 | 100 | 0 |
| SPLEN2010187 | 0 | 0 | 0 | 0 | 0 | 100 | 0 |
| SPLEN2010195 | 0 | 0 | 0 | 0 | 0 | 2.025 | 0 |
| SPLEN2010350 | 0 | 0 | 0 | 0 | 0 | 100 | 0 |
| SPLEN2010395 | 0 | 0 | 0 | 0 | 0 | 100 | 0 |
| SPLEN2010415 | 0 | 0 | 0 | 0 | 0 | 100 | 0 |
| SPLEN2010447 | 0 | 0 | 0 | 0 | 0 | 100 | 0 |
| SPLEN2010469 | 0 | 0 | 0 | 0 | 0 | 43.126 | 0 |
| SPLEN2010510 | 0 | 0 | 0 | 0 | 0 | 100 | 0 |
| SPLEN2010530 | 0 | 0 | 0 | 0 | 0 | 100 | 0 |
| SPLEN2010534 | 0 | 0 | 0 | 0 | 0 | 100 | 0 |
| SPLEN2010588 | 0 | 0 | 0 | 0 | 0 | 100 | 0 |
| SPLEN2010625 | 0 | 0 | 0 | 0 | 0 | 67.599 | 0 |
| SPLEN2010800 | 0 | 0 | 0 | 0 | 0 | 100 | 0 |
| SPLEN2010846 | 0 | 0 | 0 | 0 | 0 | 39.963 | 0 |
| SPLEN2010847 | 0 | 0 | 0 | 0 | 0 | 28.694 | 0 |
| SPLEN2010862 | 0 | 0 | 0 | 0 | 0 | 100 | 0 |
| SPLEN2010912 | 0 | 0 | 0 | 0 | 0 | 21.546 | 0 |
| SPLEN2010978 | 0 | 0 | 0 | 0 | 0 | 100 | 0 |
| SPLEN2010986 | 0 | 0 | 0 | 0 | 0 | 35.034 | 0 |
| SPLEN2011018 | 0 | 0 | 0 | 0 | 0 | 100 | 0 |
| SPLEN2011021 | 0 | 0 | 0 | 0 | 57.827 | 28.508 | 0 |
| SPLEN2011025 | 0 | 0 | 0 | 0 | 66.980 | 33.020 | 0 |
| SPLEN2011086 | 0 | 0 | 0 | 0 | 0 | 100 | 0 |
| SPLEN2011139 | 0 | 0 | 0 | 0 | 0 | 100 | 0 |
| SPLEN2011145 | 0 | 0 | 0 | 0 | 0 | 100 | 0 |
| SPLEN2011248 | 0 | 0 | 0 | 0 | 0 | 100 | 0 |
| SPLEN2011252 | 0 | 0 | 0 | 0 | 0 | 100 | 0 |
| SPLEN2011419 | 0 | 0 | 0 | 0 | 0 | 4.157 | 0 |
| SPLEN2011422 | 0 | 0 | 0 | 0 | 0 | 100 | 0 |
| SPLEN2011672 | 0 | 0 | 0 | 0 | 0 | 100 | 0 |
| SPLEN2011678 | 0 | 0 | 0 | 0 | 0 | 1.983 | 0 |
| SPLEN2011737 | 0 | 0 | 0 | 0 | 0 | 9.065 | 0 |
| SPLEN2011758 | 0 | 0 | 0 | 0 | 0 | 18.273 | 0 |
| SPLEN2011766 | 0 | 0 | 0 | 0 | 0 | 28.426 | 0 |
| SPLEN2011805 | 0 | 0 | 0 | 0 | 0 | 100 | 0 |
| SPLEN2011820 | 0 | 0 | 0 | 0 | 0 | 100 | 0 |
| SPLEN2011830 | 0 | 0 | 0 | 0 | 0 | 100 | 0 |
| SPLEN2011931 | 0 | 0 | 0 | 0 | 0 | 100 | 0 |
| SPLEN2011981 | 0 | 0 | 0 | 0 | 0 | 100 | 0 |
| SPLEN2012115 | 0 | 0 | 0 | 0 | 0 | 7.120 | 0 |
| SPLEN2012175 | 0 | 0 | 0 | 0 | 0 | 100 | 0 |
| SPLEN2012179 | 0 | 0 | 0 | 0 | 0 | 100 | 0 |
| SPLEN2012185 | 0 | 0 | 0 | 0 | 0 | 100 | 0 |
| SPLEN2012234 | 0 | 0 | 0 | 0 | 0 | 100 | 0 |
| SPLEN2012453 | 0 | 0 | 0 | 0 | 0 | 71.023 | 0 |
| SPLEN2012523 | 0 | 0 | 0 | 0 | 0 | 1.857 | 7.266 |
| SPLEN2012524 | 0 | 0 | 0 | 0 | 0 | 100 | 0 |
| SPLEN2012525 | 0 | 0 | 0 | 0 | 0 | 100 | 0 |
| SPLEN2012571 | 0 | 0 | 0 | 0 | 11.218 | 5.530 | 0 |
| SPLEN2012606 | 0 | 0 | 0 | 0 | 0 | 100 | 0 |
| SPLEN2012611 | 0 | 0 | 0 | 0 | 0 | 49.950 | 0 |
| SPLEN2012619 | 0 | 0 | 0 | 0 | 0 | 63.499 | 0 |
| SPLEN2012624 | 0 | 0 | 0 | 0 | 0 | 17.593 | 0 |
| SPLEN2012725 | 0 | 0 | 0 | 0 | 0 | 100 | 0 |
| SPLEN2012743 | 0 | 0 | 0 | 0 | 0 | 100 | 0 |
| SPLEN2012756 | 0 | 0 | 0 | 0 | 0 | 100 | 0 |
| SPLEN2012800 | 0 | 0 | 0 | 0 | 0 | 0.594 | 0 |
| SPLEN2012846 | 0 | 0 | 0 | 0 | 0 | 47.098 | 0 |
| SPLEN2012889 | 0 | 0 | 0 | 0 | 0 | 67.599 | 0 |
| SPLEN2012961 | 0 | 0 | 0 | 0 | 0 | 100 | 0 |
| SPLEN2013108 | 0 | 0 | 0 | 0 | 0 | 60.831 | 0 |
| SPLEN2013195 | 0 | 0 | 0 | 0 | 0 | 71.023 | 0 |
| SPLEN2013503 | 0 | 0 | 0 | 0 | 0 | 13.099 | 0 |
| SPLEN2013644 | 0 | 0 | 0 | 0 | 0 | 100 | 0 |
| SPLEN2013648 | 0 | 0 | 0 | 0 | 0 | 100 | 0 |
| SPLEN2013670 | 0 | 0 | 0 | 0 | 0 | 20.398 | 0 |
| SPLEN2013673 | 0 | 0 | 0 | 0 | 0 | 100 | 0 |
| SPLEN2013690 | 0 | 0 | 0 | 0 | 0 | 18.787 | 0 |
| SPLEN2013714 | 0 | 0 | 0 | 0 | 0 | 100 | 0 |
| SPLEN2013753 | 0 | 0 | 0 | 0 | 0 | 67.599 | 0 |
| SPLEN2013821 | 0 | 0 | 0 | 0 | 0 | 12.968 | 0 |
| SPLEN2013857 | 0 | 0 | 0 | 0 | 0 | 63.499 | 0 |
| SPLEN2013860 | 0 | 0 | 0 | 0 | 0 | 100 | 0 |
| SPLEN2013910 | 0 | 0 | 0 | 0 | 0 | 100 | 0 |
| SPLEN2013923 | 0 | 0 | 0 | 0 | 0 | 47.098 | 0 |
| SPLEN2013936 | 0 | 0 | 0 | 0 | 0 | 11.607 | 45.406 |
| SPLEN2014041 | 0 | 0 | 0 | 0 | 0 | 67.599 | 0 |
| SPLEN2014063 | 0 | 0 | 0 | 0 | 0 | 100 | 0 |
| SPLEN2014073 | 0 | 0 | 0 | 0 | 0 | 20.525 | 0 |
| SPLEN2014080 | 0 | 0 | 0 | 0 | 0 | 8.242 | 0 |
| SPLEN2014119 | 0 | 0 | 0 | 0 | 0 | 29.033 | 0 |
| SPLEN2014136 | 0 | 0 | 0 | 0 | 0 | 100 | 0 |
| SPLEN2014199 | 0 | 0 | 0 | 0 | 0 | 100 | 0 |
| SPLEN2014210 | 0 | 0 | 0 | 0 | 0 | 100 | 0 |
| SPLEN2014293 | 0 | 0 | 0 | 0 | 0 | 100 | 0 |
| SPLEN2014318 | 0 | 0 | 0 | 0 | 0 | 100 | 0 |
| SPLEN2014381 | 0 | 0 | 0 | 0 | 0 | 25.867 | 0 |
| SPLEN2014452 | 0 | 0 | 0 | 0 | 0 | 31.971 | 0 |
| SPLEN2014454 | 0 | 0 | 0 | 0 | 0 | 100 | 0 |
| SPLEN2014486 | 0 | 0 | 0 | 0 | 0 | 100 | 0 |
| SPLEN2014543 | 0 | 0 | 0 | 0 | 0 | 100 | 0 |
| SPLEN2014572 | 0 | 0 | 0 | 0 | 0 | 10.827 | 0 |
| SPLEN2014645 | 0 | 0 | 0 | 0 | 0 | 31.852 | 0 |
| SPLEN2014669 | 0 | 0 | 0 | 0 | 0 | 100 | 0 |
| SPLEN2014711 | 0 | 0 | 0 | 0 | 0 | 4.614 | 0 |
| SPLEN2014739 | 0 | 0 | 0 | 0 | 0 | 75.784 | 0 |
| SPLEN2014860 | 0 | 0 | 0 | 0 | 0 | 100 | 0 |
| SPLEN2014865 | 0 | 0 | 0 | 0 | 0 | 100 | 0 |
| SPLEN2014911 | 0 | 0 | 0 | 0 | 3.723 | 9.176 | 7.179 |
| SPLEN2014919 | 0 | 0 | 0 | 0 | 0 | 100 | 0 |
| SPLEN2014920 | 0 | 0 | 0 | 0 | 0 | 100 | 0 |
| SPLEN2014924 | 0 | 0 | 0 | 0 | 0 | 100 | 0 |
| SPLEN2014937 | 0 | 0 | 0 | 0 | 0 | 100 | 0 |
| SPLEN2014946 | 0 | 0 | 0 | 0 | 0 | 100 | 0 |
| SPLEN2015031 | 0 | 0 | 0 | 0 | 0 | 100 | 0 |
| SPLEN2015094 | 0 | 0 | 0 | 0 | 0 | 100 | 0 |
| SPLEN2015121 | 0 | 0 | 0 | 0 | 0 | 67.599 | 0 |
| SPLEN2015129 | 0 | 0 | 0 | 0 | 0 | 63.499 | 0 |
| SPLEN2015158 | 0 | 0 | 0 | 0 | 0 | 100 | 0 |
| SPLEN2015166 | 0 | 0 | 0 | 0 | 66.980 | 33.020 | 0 |
| SPLEN2015216 | 0 | 0 | 0 | 0 | 0 | 100 | 0 |
| SPLEN2015258 | 0 | 0 | 0 | 0 | 0 | 100 | 0 |
| SPLEN2015261 | 0 | 0 | 0 | 0 | 0 | 100 | 0 |
| SPLEN2015267 | 0 | 0 | 0 | 0 | 0 | 100 | 0 |
| SPLEN2015276 | 0 | 0 | 0 | 0 | 0 | 100 | 0 |
| SPLEN2015310 | 0 | 0 | 0 | 3.936 | 6.068 | 0.997 | 0 |
| SPLEN2015415 | 0 | 0 | 0 | 0 | 0 | 100 | 0 |
| SPLEN2015433 | 0 | 0 | 0 | 0 | 0 | 100 | 0 |
| SPLEN2015593 | 0 | 0 | 0 | 0 | 0 | 100 | 0 |
| SPLEN2015674 | 0 | 0 | 0 | 0 | 0 | 100 | 0 |
| SPLEN2015679 | 0 | 0 | 0 | 0 | 0 | 100 | 0 |
| SPLEN2015707 | 0 | 0 | 0 | 0 | 0 | 100 | 0 |
| SPLEN2015730 | 0 | 0 | 0 | 0 | 0 | 48.681 | 0 |
| SPLEN2015746 | 0 | 0 | 0 | 0 | 0 | 100 | 0 |
| SPLEN2015788 | 0 | 0 | 0 | 0 | 0 | 25.263 | 32.942 |
| SPLEN2015815 | 0 | 0 | 0 | 0 | 0 | 100 | 0 |
| SPLEN2015890 | 0 | 0 | 0 | 0 | 0 | 71.023 | 0 |
| SPLEN2015891 | 0 | 0 | 0 | 0 | 0 | 100 | 0 |
| SPLEN2015899 | 0 | 0 | 0 | 0 | 0 | 100 | 0 |
| SPLEN2016045 | 0 | 0 | 0 | 0 | 0 | 100 | 0 |
| SPLEN2016053 | 0 | 0 | 0 | 0 | 0 | 100 | 0 |
| SPLEN2016069 | 0 | 0 | 0 | 0 | 0 | 100 | 0 |
| SPLEN2016098 | 0 | 0 | 0 | 0 | 0 | 31.971 | 0 |
| SPLEN2016135 | 0 | 0 | 0 | 0 | 0 | 100 | 0 |
| SPLEN2016139 | 0 | 0 | 0 | 0 | 0 | 2.229 | 0 |
| SPLEN2016241 | 0 | 0 | 0 | 0 | 0 | 100 | 0 |
| SPLEN2016250 | 0 | 0 | 0 | 0 | 0 | 100 | 0 |
| SPLEN2016268 | 0 | 0 | 0 | 2.966 | 1.525 | 1.503 | 0 |
| SPLEN2016304 | 0 | 0 | 0 | 0 | 0 | 100 | 0 |
| SPLEN2016356 | 0 | 0 | 0 | 0 | 0 | 100 | 0 |
| SPLEN2016421 | 0 | 0 | 0 | 0 | 7.310 | 7.208 | 0 |
| SPLEN2016480 | 0 | 0 | 0 | 0 | 0 | 100 | 0 |
| SPLEN2016531 | 0 | 0 | 0 | 0 | 0 | 100 | 0 |
| SPLEN2016533 | 0 | 0 | 0 | 0 | 0 | 61.070 | 0 |
| SPLEN2016541 | 0 | 0 | 0 | 0 | 0 | 100 | 0 |
| SPLEN2016552 | 0 | 0 | 0 | 0 | 0 | 100 | 0 |
| SPLEN2016554 | 0 | 0 | 0 | 0 | 0 | 32.422 | 0 |
| SPLEN2016602 | 0 | 0 | 0 | 0 | 0 | 100 | 0 |
| SPLEN2016627 | 0 | 0 | 0 | 0 | 0 | 100 | 0 |
| SPLEN2016678 | 0 | 0 | 0 | 0 | 0 | 34.278 | 0 |
| SPLEN2016743 | 0 | 0 | 0 | 0 | 20.232 | 9.974 | 0 |
| SPLEN2016773 | 0 | 0 | 0 | 0 | 0 | 71.023 | 0 |
| SPLEN2016781 | 0 | 0 | 0 | 0 | 0 | 67.599 | 0 |
| SPLEN2016840 | 0 | 0 | 0 | 0 | 0 | 100 | 0 |
| SPLEN2016863 | 0 | 0 | 0 | 0 | 0 | 100 | 0 |
| SPLEN2016922 | 0 | 0 | 0 | 0 | 0 | 100 | 0 |
| SPLEN2016932 | 0 | 0 | 0 | 0 | 0 | 61.070 | 0 |
| SPLEN2016972 | 0 | 0 | 0 | 13.923 | 0 | 3.528 | 0 |
| SPLEN2016973 | 0 | 0 | 0 | 0 | 0 | 100 | 0 |
| SPLEN2017043 | 0 | 0 | 0 | 0 | 0 | 18.106 | 0 |
| SPLEN2017104 | 0 | 0 | 0 | 0 | 0 | 100 | 0 |
| SPLEN2017121 | 0 | 0 | 0 | 0 | 0 | 13.487 | 0 |
| SPLEN2017147 | 0 | 0 | 0 | 0 | 0 | 100 | 0 |
| SPLEN2017187 | 0 | 0 | 0 | 0 | 0 | 100 | 0 |
| SPLEN2017189 | 0 | 0 | 0 | 0 | 0 | 100 | 0 |
| SPLEN2017212 | 0 | 0 | 0 | 0 | 0 | 100 | 0 |
| SPLEN2017318 | 0 | 0 | 0 | 0 | 17.905 | 8.827 | 0 |
| SPLEN2017351 | 0 | 0 | 0 | 0 | 0 | 5.233 | 0 |
| SPLEN2017426 | 0 | 0 | 0 | 0 | 0 | 100 | 0 |
| SPLEN2017452 | 0 | 0 | 0 | 0 | 0 | 100 | 0 |
| SPLEN2017538 | 0 | 0 | 0 | 0 | 0 | 100 | 0 |
| SPLEN2017592 | 0 | 0 | 0 | 0 | 0 | 71.023 | 0 |
| SPLEN2017613 | 0 | 0 | 0 | 0 | 0 | 100 | 0 |
| SPLEN2017620 | 0 | 0 | 0 | 0 | 0 | 8.917 | 0 |
| SPLEN2017643 | 0 | 0 | 0 | 0 | 0 | 100 | 0 |
| SPLEN2017687 | 0 | 0 | 0 | 0 | 0 | 100 | 0 |
| SPLEN2017740 | 0 | 0 | 0 | 0 | 0 | 100 | 0 |
| SPLEN2017781 | 0 | 0 | 0 | 0 | 0 | 71.023 | 0 |
| SPLEN2017918 | 0 | 0 | 0 | 0 | 3.217 | 4.758 | 0 |
| SPLEN2017999 | 0 | 0 | 0 | 0 | 0 | 100 | 0 |
| SPLEN2018098 | 0 | 0 | 0 | 0 | 0 | 59.326 | 0 |
| SPLEN2018112 | 0 | 0 | 0 | 0 | 0 | 100 | 0 |
| SPLEN2018157 | 0 | 0 | 0 | 0 | 0 | 12.588 | 16.414 |
| SPLEN2018159 | 0 | 0 | 0 | 0 | 0 | 16.475 | 0 |
| SPLEN2018180 | 0 | 0 | 0 | 0 | 0 | 100 | 0 |
| SPLEN2018181 | 0 | 0 | 0 | 0 | 0 | 100 | 0 |
| SPLEN2018280 | 0 | 0 | 0 | 0 | 0 | 100 | 0 |
| SPLEN2018285 | 0 | 0 | 0 | 0 | 0 | 100 | 0 |
| SPLEN2018299 | 0 | 0 | 0 | 0 | 0 | 35.797 | 0 |
| SPLEN2018302 | 0 | 42.846 | 0 | 0 | 0 | 10.578 | 0 |
| SPLEN2018364 | 0 | 0 | 0 | 0 | 0 | 100 | 0 |
| SPLEN2018395 | 0 | 0 | 0 | 0 | 0 | 100 | 0 |
| SPLEN2018643 | 0 | 0 | 0 | 0 | 0 | 63.499 | 0 |
| SPLEN2018683 | 0 | 0 | 0 | 0 | 0 | 67.599 | 0 |
| SPLEN2018732 | 0 | 0 | 0 | 0 | 0 | 100 | 0 |
| SPLEN2018749 | 0 | 0 | 0 | 0 | 0 | 100 | 0 |
| SPLEN2018933 | 0 | 0 | 0 | 0 | 0 | 100 | 0 |
| SPLEN2019008 | 0 | 0 | 0 | 0 | 0 | 100 | 0 |
| SPLEN2019043 | 0 | 0 | 0 | 0 | 0 | 100 | 0 |
| SPLEN2019077 | 0 | 0 | 0 | 0 | 0 | 18.457 | 0 |
| SPLEN2019092 | 0 | 0 | 0 | 0 | 0 | 48.294 | 0 |
| SPLEN2019102 | 0 | 0 | 0 | 0 | 0 | 100 | 0 |
| SPLEN2019131 | 0 | 0 | 0 | 0 | 0 | 100 | 0 |
| SPLEN2019169 | 0 | 0 | 0 | 0 | 0 | 9.849 | 0 |
| SPLEN2019257 | 0 | 0 | 0 | 0 | 0 | 71.023 | 0 |
| SPLEN2019311 | 0 | 0 | 0 | 0 | 0 | 42.173 | 0 |
| SPLEN2019323 | 0 | 0 | 0 | 0 | 0 | 100 | 0 |
| SPLEN2019349 | 0 | 0 | 0 | 0 | 0 | 63.033 | 0 |
| SPLEN2019375 | 0 | 0 | 0 | 0 | 0 | 100 | 0 |
| SPLEN2019379 | 0 | 0 | 0 | 0 | 0 | 19.862 | 0 |
| SPLEN2019405 | 0 | 0 | 0 | 0 | 0 | 7.474 | 0 |
| SPLEN2019446 | 0 | 0 | 0 | 0 | 0 | 18.102 | 0 |
| SPLEN2019471 | 0 | 0 | 0 | 0 | 0 | 100 | 0 |
| SPLEN2019480 | 0 | 0 | 0 | 0 | 0 | 100 | 0 |
| SPLEN2019505 | 0 | 0 | 0 | 0 | 0 | 8.528 | 0 |
| SPLEN2019571 | 0 | 0 | 0 | 0 | 0 | 100 | 0 |
| SPLEN2019575 | 0 | 0 | 0 | 0 | 0 | 100 | 0 |
| SPLEN2019709 | 0 | 0 | 0 | 0 | 0 | 100 | 0 |
| SPLEN2019774 | 0 | 0 | 0 | 0 | 0 | 15.455 | 0 |
| SPLEN2019793 | 0 | 0 | 0 | 0 | 0 | 100 | 0 |
| SPLEN2019811 | 0 | 0 | 0 | 0 | 0 | 100 | 0 |
| SPLEN2019839 | 0 | 0 | 0 | 0 | 0 | 100 | 0 |
| SPLEN2019956 | 0 | 0 | 0 | 0 | 0 | 52.985 | 0 |
| SPLEN2019985 | 0 | 0 | 0 | 0 | 0 | 100 | 0 |
| SPLEN2020007 | 0 | 0 | 0 | 0 | 0 | 32.498 | 0 |
| SPLEN2020034 | 0 | 0 | 0 | 0 | 0 | 43.126 | 0 |
| SPLEN2020153 | 0 | 0 | 0 | 0 | 0 | 100 | 0 |
| SPLEN2020154 | 0 | 0 | 0 | 0 | 0 | 100 | 0 |
| SPLEN2020166 | 0 | 0 | 0 | 0 | 0 | 100 | 0 |
| SPLEN2020183 | 0 | 0 | 0 | 0 | 0 | 100 | 0 |
| SPLEN2020223 | 0 | 0 | 0 | 0 | 0 | 100 | 0 |
| SPLEN2020359 | 0 | 0 | 0 | 0 | 0 | 100 | 0 |
| SPLEN2020417 | 0 | 0 | 0 | 0 | 0 | 24.283 | 0 |
| SPLEN2020427 | 0 | 0 | 0 | 0 | 0 | 100 | 0 |
| SPLEN2020467 | 0 | 0 | 0 | 0 | 0 | 100 | 0 |
| SPLEN2020512 | 0 | 0 | 0 | 0 | 0 | 100 | 0 |
| SPLEN2020608 | 0 | 0 | 0 | 0 | 0 | 100 | 0 |
| SPLEN2020777 | 0 | 0 | 0 | 0 | 0 | 100 | 0 |
| SPLEN2020805 | 0 | 0 | 0 | 0 | 0 | 100 | 0 |
| SPLEN2021057 | 0 | 0 | 0 | 0 | 0 | 100 | 0 |
| SPLEN2021122 | 0 | 0 | 0 | 0 | 0 | 28.373 | 0 |
| SPLEN2021157 | 0 | 0 | 0 | 0 | 0 | 100 | 0 |
| SPLEN2021194 | 0 | 0 | 0 | 0 | 0 | 5.868 | 0 |
| SPLEN2021231 | 0 | 0 | 0 | 0 | 0 | 100 | 0 |
| SPLEN2021273 | 0 | 0 | 0 | 0 | 0 | 51.310 | 0 |
| SPLEN2021295 | 0 | 0 | 0 | 0 | 0 | 100 | 0 |
| SPLEN2021298 | 0 | 0 | 0 | 0 | 0 | 100 | 0 |
| SPLEN2021383 | 0 | 0 | 0 | 0 | 0 | 100 | 0 |
| SPLEN2021417 | 0 | 0 | 0 | 0 | 0 | 100 | 0 |
| SPLEN2021440 | 0 | 0 | 0 | 0 | 0 | 100 | 0 |
| SPLEN2021458 | 0 | 0 | 0 | 0 | 0 | 61.070 | 0 |
| SPLEN2021463 | 0 | 0 | 0 | 0 | 0 | 100 | 0 |
| SPLEN2021560 | 0 | 0 | 0 | 0 | 0 | 100 | 0 |
| SPLEN2021701 | 0 | 0 | 0 | 0 | 0 | 100 | 0 |
| SPLEN2021795 | 0 | 0 | 0 | 0 | 0 | 100 | 0 |
| SPLEN2021983 | 0 | 0 | 0 | 0 | 0 | 100 | 0 |
| SPLEN2021991 | 0 | 0 | 0 | 0 | 0 | 100 | 0 |
| SPLEN2022040 | 0 | 0 | 0 | 0 | 0 | 100 | 0 |
| SPLEN2022162 | 0 | 0 | 0 | 0 | 0 | 100 | 0 |
| SPLEN2022227 | 0 | 0 | 0 | 0 | 0 | 100 | 0 |
| SPLEN2022522 | 0 | 0 | 0 | 0 | 0 | 4.932 | 0 |
| SPLEN2022591 | 0 | 0 | 0 | 0 | 0 | 100 | 0 |
| SPLEN2022785 | 0 | 0 | 0 | 0 | 0 | 100 | 0 |
| SPLEN2022920 | 0 | 0 | 0 | 0 | 0 | 100 | 0 |
| SPLEN2023024 | 0 | 0 | 0 | 0 | 0 | 100 | 0 |
| SPLEN2023118 | 0 | 0 | 0 | 0 | 0 | 19.364 | 0 |
| SPLEN2023160 | 0 | 0 | 0 | 0 | 0 | 34.195 | 0 |
| SPLEN2023423 | 0 | 0 | 0 | 0 | 0 | 100 | 0 |
| SPLEN2023710 | 0 | 0 | 0 | 0 | 0 | 100 | 0 |
| SPLEN2023733 | 0 | 0 | 0 | 0 | 0 | 70.051 | 0 |
| SPLEN2023791 | 0 | 0 | 0 | 0 | 0 | 49.431 | 0 |
| SPLEN2023977 | 0 | 0 | 0 | 0 | 0 | 100 | 0 |
| SPLEN2024070 | 0 | 0 | 0 | 0 | 0 | 100 | 0 |
| SPLEN2024127 | 0 | 0 | 0 | 0 | 0 | 100 | 0 |
| SPLEN2024232 | 0 | 0 | 0 | 0 | 0 | 11.539 | 0 |
| SPLEN2024273 | 0 | 0 | 0 | 0 | 0 | 100 | 0 |
| SPLEN2024383 | 0 | 0 | 0 | 0 | 0 | 100 | 0 |
| SPLEN2024489 | 0 | 0 | 0 | 0 | 0 | 19.007 | 0 |
| SPLEN2024530 | 0 | 0 | 0 | 0 | 0 | 100 | 0 |
| SPLEN2024571 | 0 | 0 | 0 | 0 | 0 | 100 | 0 |
| SPLEN2024577 | 0 | 0 | 0 | 0 | 0 | 100 | 0 |
| SPLEN2024617 | 0 | 0 | 0 | 0 | 0 | 100 | 0 |
| SPLEN2024737 | 0 | 0 | 0 | 0 | 0 | 100 | 0 |
| SPLEN2024922 | 0 | 0 | 0 | 0 | 0 | 44.836 | 0 |
| SPLEN2024956 | 0 | 0 | 0 | 0 | 0 | 100 | 0 |
| SPLEN2024990 | 0 | 0 | 0 | 0 | 0 | 80.667 | 0 |
| SPLEN2025012 | 0 | 0 | 0 | 0 | 0 | 100 | 0 |
| SPLEN2025017 | 0 | 0 | 0 | 0 | 0 | 58.340 | 0 |
| SPLEN2025039 | 0 | 0 | 0 | 0 | 0 | 71.023 | 0 |
| SPLEN2025219 | 0 | 0 | 0 | 0 | 0 | 100 | 0 |
| SPLEN2025491 | 0 | 0 | 0 | 0 | 0 | 61.070 | 0 |
| SPLEN2025626 | 0 | 0 | 0 | 0 | 0 | 100 | 0 |
| SPLEN2025820 | 0 | 0 | 0 | 0 | 0 | 100 | 0 |
| SPLEN2026144 | 0 | 0 | 0 | 0 | 0 | 100 | 0 |
| SPLEN2026411 | 0 | 0 | 0 | 0 | 0 | 19.827 | 0 |
| SPLEN2026765 | 0 | 0 | 0 | 0 | 0 | 100 | 0 |
| SPLEN2027113 | 0 | 0 | 0 | 0 | 0 | 2.847 | 0 |
| SPLEN2027157 | 0 | 0 | 0 | 0 | 0 | 100 | 0 |
| SPLEN2027395 | 0 | 0 | 0 | 0 | 0 | 100 | 0 |
| SPLEN2027488 | 0 | 0 | 0 | 0 | 0 | 100 | 0 |
| SPLEN2027780 | 0 | 0 | 0 | 0 | 0 | 48.294 | 0 |
| SPLEN2027852 | 0 | 0 | 0 | 0 | 0 | 100 | 0 |
| SPLEN2027868 | 0 | 0 | 0 | 0 | 0 | 100 | 0 |
| SPLEN2027995 | 0 | 0 | 0 | 0 | 0 | 100 | 0 |
| SPLEN2028046 | 0 | 0 | 0 | 0 | 0 | 100 | 0 |
| SPLEN2028066 | 0 | 0 | 0 | 0 | 0 | 100 | 0 |
| SPLEN2028138 | 0 | 0 | 0 | 0 | 0 | 100 | 0 |
| SPLEN2028365 | 0 | 0 | 0 | 0 | 0 | 5.970 | 0 |
| SPLEN2028417 | 0 | 0 | 0 | 0 | 0 | 100 | 0 |
| SPLEN2028424 | 0 | 0 | 0 | 0 | 0 | 48.497 | 0 |
| SPLEN2028466 | 0 | 0 | 0 | 0 | 2.919 | 1.439 | 0 |
| SPLEN2028593 | 0 | 0 | 0 | 0 | 0 | 100 | 0 |
| SPLEN2028844 | 0 | 0 | 0 | 0 | 0 | 100 | 0 |
| SPLEN2028914 | 0 | 0 | 0 | 0 | 0 | 4.858 | 0 |
| SPLEN2028994 | 0 | 0 | 0 | 0 | 0 | 100 | 0 |
| SPLEN2029051 | 0 | 0 | 0 | 0 | 0 | 100 | 0 |
| SPLEN2029176 | 0 | 0 | 0 | 0 | 0 | 100 | 0 |
| SPLEN2029295 | 0 | 0 | 0 | 0 | 0 | 60.831 | 0 |
| SPLEN2029380 | 0 | 0 | 0 | 0 | 0 | 100 | 0 |
| SPLEN2029522 | 0 | 0 | 0 | 0 | 0 | 100 | 0 |
| SPLEN2029683 | 0 | 0 | 0 | 0 | 0 | 60.831 | 0 |
| SPLEN2029727 | 0 | 0 | 0 | 0 | 0 | 100 | 0 |
| SPLEN2029904 | 0 | 0 | 0 | 0 | 0 | 100 | 0 |
| SPLEN2029912 | 0 | 11.510 | 0 | 0 | 0 | 2.842 | 0 |
| SPLEN2030250 | 0 | 0 | 0 | 0 | 0 | 100 | 0 |
| SPLEN2030335 | 0 | 0 | 0 | 0 | 0 | 100 | 0 |
| SPLEN2030371 | 0 | 0 | 0 | 0 | 0 | 100 | 0 |
| SPLEN2030397 | 0 | 0 | 0 | 0 | 0 | 100 | 0 |
| SPLEN2030479 | 0 | 0 | 0 | 0 | 0 | 100 | 0 |
| SPLEN2030495 | 0 | 0 | 0 | 0 | 0 | 100 | 0 |
| SPLEN2030562 | 0 | 0 | 0 | 0 | 0 | 100 | 0 |
| SPLEN2030763 | 0 | 74.205 | 0 | 0 | 0 | 18.320 | 0 |
| SPLEN2030847 | 0 | 0 | 0 | 0 | 0 | 100 | 0 |
| SPLEN2031004 | 0 | 0 | 0 | 0 | 0 | 100 | 0 |
| SPLEN2031125 | 0 | 0 | 0 | 0 | 0 | 100 | 0 |
| SPLEN2031424 | 0 | 0 | 0 | 0 | 0 | 13.247 | 0 |
| SPLEN2031547 | 0 | 0 | 0 | 0 | 0 | 5.478 | 0 |
| SPLEN2031674 | 0 | 0 | 0 | 0 | 0 | 38.519 | 0 |
| SPLEN2031724 | 0 | 0 | 0 | 0 | 0 | 100 | 0 |
| SPLEN2031780 | 0 | 0 | 0 | 0 | 0 | 100 | 0 |
| SPLEN2032036 | 0 | 0 | 0 | 0 | 0 | 100 | 0 |
| SPLEN2032112 | 0 | 0 | 0 | 0 | 0 | 100 | 0 |
| SPLEN2032154 | 0 | 0 | 0 | 0 | 0 | 61.070 | 0 |
| SPLEN2032157 | 0 | 0 | 0 | 0 | 0 | 9.941 | 0 |
| SPLEN2032321 | 0 | 0 | 0 | 0 | 0 | 100 | 0 |
| SPLEN2032356 | 0 | 0 | 0 | 0 | 0 | 33.427 | 0 |
| SPLEN2032677 | 0 | 0 | 0 | 0 | 0 | 100 | 0 |
| SPLEN2032813 | 0 | 0 | 0 | 0 | 0 | 100 | 0 |
| SPLEN2032924 | 0 | 0 | 0 | 0 | 0 | 100 | 0 |
| SPLEN2033098 | 0 | 0 | 0 | 0 | 0 | 25.970 | 0 |
| SPLEN2033153 | 0 | 0 | 0 | 0 | 0 | 100 | 0 |
| SPLEN2033333 | 0 | 0 | 0 | 0 | 0 | 100 | 0 |
| SPLEN2033490 | 0 | 0 | 0 | 0 | 0 | 100 | 0 |
| SPLEN2033539 | 0 | 0 | 0 | 0 | 0 | 100 | 0 |
| SPLEN2033921 | 0 | 0 | 0 | 0 | 0 | 100 | 0 |
| SPLEN2033996 | 0 | 0 | 0 | 0 | 0 | 100 | 0 |
| SPLEN2034021 | 0 | 0 | 0 | 0 | 0 | 100 | 0 |
| SPLEN2034081 | 0 | 0 | 0 | 0 | 0 | 100 | 0 |
| SPLEN2034252 | 0 | 0 | 0 | 0 | 0 | 100 | 0 |
| SPLEN2034448 | 0 | 0 | 0 | 0 | 0 | 18.039 | 0 |
| SPLEN2034551 | 0 | 0 | 0 | 0 | 0 | 100 | 0 |
| SPLEN2034601 | 0 | 0 | 0 | 0 | 0 | 100 | 0 |
| SPLEN2034678 | 0 | 0 | 0 | 0 | 0 | 100 | 0 |
| SPLEN2034781 | 0 | 0 | 0 | 0 | 0 | 48.682 | 0 |
| SPLEN2034864 | 0 | 0 | 0 | 0 | 0 | 100 | 0 |
| SPLEN2034934 | 0 | 0 | 0 | 0 | 0 | 100 | 0 |
| SPLEN2035318 | 0 | 0 | 0 | 0 | 0 | 100 | 0 |
| SPLEN2035615 | 0 | 0 | 0 | 0 | 0 | 100 | 0 |
| SPLEN2036076 | 0 | 0 | 0 | 0 | 0 | 2.858 | 0 |
| SPLEN2036103 | 0 | 0 | 0 | 0 | 0 | 100 | 0 |
| SPLEN2036326 | 0 | 0 | 0 | 0 | 0 | 100 | 0 |
| SPLEN2036475 | 0 | 0 | 0 | 0 | 0 | 100 | 0 |
| SPLEN2036501 | 0 | 0 | 0 | 0 | 0 | 67.599 | 0 |
| SPLEN2036579 | 0 | 0 | 0 | 0 | 0 | 100 | 0 |
| SPLEN2036608 | 0 | 0 | 0 | 0 | 0 | 100 | 0 |
| SPLEN2036702 | 0 | 0 | 0 | 0 | 0 | 100 | 0 |
| SPLEN2036712 | 0 | 0 | 0 | 0 | 0 | 100 | 0 |
| SPLEN2036821 | 0 | 0 | 0 | 0 | 0 | 61.070 | 0 |
| SPLEN2036932 | 0 | 0 | 0 | 0 | 0 | 15.301 | 0 |
| SPLEN2036953 | 0 | 0 | 0 | 0 | 0 | 100 | 0 |
| SPLEN2037077 | 0 | 0 | 0 | 0 | 0 | 100 | 0 |
| SPLEN2037194 | 0 | 0 | 0 | 0 | 0 | 71.023 | 0 |
| SPLEN2037319 | 0 | 0 | 0 | 0 | 0 | 100 | 0 |
| SPLEN2037444 | 0 | 0 | 0 | 0 | 0 | 100 | 0 |
| SPLEN2037580 | 0 | 0 | 0 | 0 | 0 | 100 | 0 |
| SPLEN2037630 | 0 | 0 | 0 | 0 | 0 | 100 | 0 |
| SPLEN2037678 | 0 | 0 | 0 | 0 | 0 | 100 | 0 |
| SPLEN2037722 | 0 | 0 | 0 | 0 | 0 | 14.332 | 0 |
| SPLEN2037891 | 0 | 0 | 0 | 0 | 0 | 100 | 0 |
| SPLEN2038055 | 0 | 0 | 0 | 0 | 0 | 100 | 0 |
| SPLEN2038180 | 0 | 0 | 0 | 0 | 0 | 100 | 0 |
| SPLEN2038345 | 0 | 0 | 0 | 0 | 0 | 51.152 | 0 |
| SPLEN2038407 | 0 | 0 | 0 | 0 | 0 | 100 | 0 |
| SPLEN2038473 | 0 | 0 | 0 | 0 | 0 | 23.929 | 0 |
| SPLEN2038834 | 0 | 0 | 0 | 0 | 0 | 8.059 | 0 |
| SPLEN2039311 | 0 | 0 | 0 | 0 | 0 | 100 | 0 |
| SPLEN2039379 | 0 | 0 | 0 | 0 | 0 | 5.038 | 0 |
| SPLEN2039672 | 0 | 0 | 0 | 0 | 0 | 67.599 | 0 |
| SPLEN2039697 | 0 | 0 | 0 | 0 | 0 | 100 | 0 |
| SPLEN2039845 | 0 | 0 | 0 | 0 | 0 | 100 | 0 |
| SPLEN2039936 | 0 | 0 | 0 | 0 | 0 | 100 | 0 |
| SPLEN2040222 | 0 | 0 | 0 | 0 | 0 | 100 | 0 |
| SPLEN2040237 | 0 | 0 | 0 | 0 | 0 | 71.023 | 0 |
| SPLEN2040824 | 0 | 0 | 0 | 0 | 0 | 35.879 | 0 |
| SPLEN2041304 | 0 | 0 | 0 | 0 | 0 | 100 | 0 |
| SPLEN2041306 | 0 | 0 | 0 | 0 | 0 | 26.797 | 0 |
| SPLEN2041310 | 0 | 0 | 0 | 0 | 0 | 100 | 0 |
| SPLEN2041585 | 0 | 0 | 0 | 0 | 0 | 59.326 | 0 |
| SPLEN2041645 | 0 | 0 | 0 | 0 | 0 | 100 | 0 |
| SPLEN2041700 | 0 | 0 | 0 | 0 | 0 | 100 | 0 |
| SPLEN2041720 | 0 | 0 | 0 | 0 | 0 | 100 | 0 |
| SPLEN2041977 | 0 | 0 | 0 | 0 | 0 | 100 | 0 |
| SPLEN2042051 | 0 | 0 | 0 | 0 | 0 | 100 | 0 |
| SPLEN2042303 | 0 | 0 | 0 | 0 | 0 | 45.591 | 0 |
| SPLEN2042521 | 0 | 0 | 0 | 0 | 0 | 100 | 0 |
| SPLEN2042535 | 0 | 0 | 0 | 0 | 0 | 12.386 | 0 |
| SPLEN2042598 | 0 | 0 | 0 | 0 | 0 | 100 | 0 |
| SPLEN2042714 | 0 | 0 | 0 | 0 | 0 | 59.326 | 0 |
| SPLEN2042920 | 0 | 0 | 0 | 0 | 0 | 4.734 | 0 |
| STOMA1000013 | 0 | 0 | 0 | 0 | 0 | 0 | 100 |
| STOMA1000047 | 0 | 0 | 0 | 0 | 0 | 5.512 | 21.564 |
| STOMA1000052 | 0 | 0 | 0 | 0 | 0 | 0 | 100 |
| STOMA1000074 | 0 | 0 | 0 | 0 | 0 | 0 | 100 |
| STOMA1000091 | 0 | 0 | 0 | 0 | 0 | 0 | 47.337 |
| STOMA1000117 | 0 | 0 | 0 | 0 | 0 | 0 | 100 |
| STOMA1000133 | 0 | 0 | 0 | 0 | 0 | 0 | 100 |
| STOMA1000175 | 0 | 0 | 0 | 0 | 0 | 0 | 100 |
| STOMA1000186 | 0 | 0 | 0 | 0 | 0 | 0 | 85.088 |
| STOMA1000189 | 0 | 0 | 0 | 0 | 0 | 0 | 10.642 |
| STOMA1000190 | 0 | 0 | 0 | 0 | 0 | 0 | 100 |
| STOMA1000191 | 0 | 0 | 0 | 0 | 0 | 0 | 100 |
| STOMA2000032 | 0 | 0 | 0 | 0 | 0 | 0 | 100 |
| STOMA2000072 | 0 | 0 | 0 | 0 | 0 | 0 | 100 |
| STOMA2000088 | 0 | 0 | 0 | 0 | 0 | 0 | 100 |
| STOMA2000104 | 0 | 0 | 0 | 0 | 0 | 0 | 100 |
| STOMA2000121 | 0 | 0 | 9.500 | 0 | 0 | 4.240 | 8.293 |
| STOMA2000148 | 0 | 0 | 0 | 0 | 0 | 20.359 | 79.641 |
| STOMA2000168 | 0 | 0 | 0 | 0 | 0 | 0 | 100 |
| STOMA2000183 | 0 | 0 | 0 | 0 | 0 | 0 | 100 |
| STOMA2000188 | 0 | 0 | 0 | 0 | 0 | 0 | 100 |
| STOMA2000257 | 0 | 0 | 0 | 0 | 6.966 | 0 | 13.433 |
| STOMA2000279 | 0 | 0 | 0 | 0 | 0 | 0 | 100 |
| STOMA2000289 | 0 | 0 | 0 | 0 | 9.613 | 4.739 | 18.539 |
| STOMA2000383 | 0 | 0 | 0 | 0 | 0 | 20.359 | 79.641 |
| STOMA2000386 | 0 | 0 | 0 | 0 | 0 | 0 | 100 |
| STOMA2000395 | 0 | 0 | 0 | 0 | 15.066 | 0 | 14.527 |
| STOMA2000396 | 0 | 0 | 0 | 0 | 0 | 0 | 35.071 |
| STOMA2000478 | 0 | 0 | 0 | 0 | 0 | 0 | 100 |
| STOMA2000482 | 0 | 0 | 0 | 0 | 13.604 | 0 | 26.235 |
| STOMA2000529 | 0 | 0 | 0 | 0 | 0 | 0 | 49.148 |
| STOMA2000539 | 0 | 0 | 0 | 0 | 0 | 0 | 100 |
| STOMA2000567 | 0 | 0 | 0 | 0 | 0 | 0 | 100 |
| STOMA2000640 | 0 | 0 | 0 | 0 | 0 | 0 | 100 |
| STOMA2000678 | 0 | 0 | 0 | 0 | 0 | 0 | 100 |
| STOMA2000686 | 0 | 0 | 0 | 0 | 0 | 0 | 100 |
| STOMA2000888 | 0 | 0 | 0 | 0 | 0 | 0 | 100 |
| STOMA2001025 | 0 | 0 | 0 | 0 | 0 | 0 | 100 |
| STOMA2001389 | 0 | 0 | 0 | 0 | 0 | 0 | 39.303 |
| STOMA2002052 | 0 | 0 | 0 | 0 | 0 | 0 | 37.850 |
| STOMA2002141 | 0 | 0 | 0 | 0 | 0 | 0 | 100 |
| STOMA2002166 | 0 | 4.122 | 0 | 0 | 0 | 0 | 7.963 |
| STOMA2002367 | 0 | 0 | 0 | 0 | 0 | 0 | 100 |
| STOMA2002688 | 0 | 0 | 0 | 0 | 0 | 0 | 100 |
| STOMA2002828 | 0 | 0 | 0 | 0 | 0 | 19.068 | 37.296 |
| STOMA2003158 | 0 | 0 | 0 | 0 | 0 | 53.241 | 41.655 |
| STOMA2003289 | 0 | 0 | 0 | 0 | 0 | 0 | 100 |
| STOMA2003444 | 0 | 0 | 0 | 0 | 0 | 0 | 91.236 |
| STOMA2003477 | 0 | 0 | 0 | 0 | 0 | 0 | 100 |
| STOMA2003646 | 0 | 0 | 0 | 0 | 0 | 0 | 100 |
| STOMA2003716 | 0 | 0 | 0 | 0 | 0 | 0 | 77.692 |
| STOMA2003781 | 0 | 0 | 0 | 0 | 0 | 0 | 85.866 |
| STOMA2003894 | 0 | 0 | 0 | 0 | 0 | 0 | 100 |
| STOMA2004194 | 0 | 0 | 0 | 0 | 0 | 0 | 100 |
| STOMA2004294 | 0 | 0 | 0 | 0 | 0 | 0 | 100 |
| STOMA2004663 | 0 | 0 | 0 | 0 | 0 | 0 | 47.516 |
| STOMA2004668 | 0 | 0 | 0 | 0 | 0 | 0 | 100 |
| STOMA2004852 | 0 | 0 | 0 | 0 | 0 | 0 | 100 |
| STOMA2004873 | 0 | 0 | 0 | 0 | 0 | 0 | 100 |
| STOMA2004884 | 0 | 0 | 0 | 0 | 0 | 0 | 100 |
| STOMA2004893 | 0 | 0 | 0 | 0 | 0 | 0 | 49.171 |
| STOMA2004925 | 0 | 0 | 0 | 0 | 0 | 0 | 85.088 |
| STOMA2005120 | 0 | 0 | 0 | 0 | 0 | 0 | 85.988 |
| STOMA2005664 | 0 | 0 | 0 | 0 | 0 | 0 | 100 |
| STOMA2005667 | 0 | 0 | 0 | 0 | 0 | 0 | 100 |
| STOMA2005746 | 0 | 0 | 0 | 0 | 0 | 0 | 100 |
| STOMA2005782 | 0 | 0 | 0 | 0 | 0 | 0 | 91.236 |
| STOMA2006181 | 0 | 0 | 0 | 0 | 0 | 0 | 100 |
| STOMA2006213 | 0 | 0 | 0 | 0 | 0 | 0 | 100 |
| STOMA2006229 | 0 | 0 | 0 | 0 | 0 | 0 | 40.913 |
| STOMA2006325 | 0 | 0 | 0 | 0 | 0 | 0 | 100 |
| STOMA2006330 | 0 | 0 | 0 | 0 | 0 | 0 | 100 |
| STOMA2006398 | 0 | 0 | 0 | 0 | 0 | 0 | 100 |
| STOMA2006447 | 0 | 0 | 0 | 0 | 0 | 0 | 100 |
| STOMA2006780 | 0 | 0 | 0 | 0 | 0 | 0 | 59.113 |
| STOMA2006904 | 0 | 0 | 0 | 0 | 0 | 0 | 100 |
| STOMA2007269 | 0 | 0 | 0 | 0 | 0 | 0 | 100 |
| STOMA2007680 | 0 | 0 | 0 | 0 | 0 | 0 | 100 |
| STOMA2007745 | 0 | 0 | 0 | 0 | 0 | 0 | 100 |
| STOMA2008050 | 0 | 0 | 0 | 0 | 0 | 0 | 100 |
| STOMA2008361 | 0 | 0 | 0 | 0 | 0 | 0 | 100 |
| STOMA2008546 | 0 | 0 | 0 | 0 | 0 | 0 | 100 |
| STOMA2008614 | 0 | 0 | 0 | 0 | 0 | 0 | 100 |
| STOMA2008638 | 0 | 0 | 0 | 0 | 0 | 0 | 49.866 |
| STOMA2008838 | 0 | 0 | 0 | 0 | 0 | 0 | 100 |
| STOMA2009250 | 0 | 0 | 0 | 0 | 0 | 0 | 100 |
| STOMA2009253 | 0 | 0 | 0 | 0 | 0 | 0 | 100 |
| STOMA2009256 | 0 | 0 | 0 | 0 | 0 | 0 | 100 |
| STOMA2009289 | 0 | 0 | 44.723 | 0 | 0 | 0 | 39.042 |
| SYNOV1000045 | 0 | 0 | 0 | 0 | 0 | 12.220 | 0 |
| SYNOV1000124 | 0 | 0 | 0 | 0 | 0 | 1.935 | 3.785 |
| SYNOV1000164 | 0 | 0 | 0 | 0 | 0 | 6.690 | 0 |
| SYNOV2001033 | 0 | 0 | 9.347 | 0 | 0 | 0 | 0 |
| SYNOV2001239 | 0 | 0 | 0 | 0 | 1.107 | 4.367 | 4.270 |
| SYNOV2001262 | 0 | 0 | 0 | 0 | 0 | 7.259 | 0 |
| SYNOV2001648 | 0 | 0 | 0 | 0 | 0 | 1.885 | 0 |
| SYNOV2009172 | 0 | 0 | 0 | 0 | 0 | 1.811 | 3.541 |
| SYNOV2017055 | 0 | 0 | 0 | 0 | 0 | 29.371 | 0 |
| SYNOV4006327 | 0 | 0 | 0 | 0 | 0 | 53.776 | 0 |
| SYNOV4007671 | 0 | 0 | 0 | 0 | 0 | 0 | 4.989 |
| SYNOV4009575 | 0 | 0 | 0 | 0 | 16.908 | 0 | 0 |
| TBAES2000059 | 0 | 0 | 0 | 0 | 0 | 2.621 | 0 |
| TBAES2009387 | 0 | 0 | 0 | 0 | 0 | 0.930 | 0 |
| TESOP2000527 | 0 | 0 | 0 | 0 | 0 | 17.952 | 0 |
| TESOP2006670 | 0 | 0 | 0 | 0 | 0 | 20.272 | 0 |
| TESTI1000023 | 0 | 0 | 0 | 0 | 2.959 | 1.459 | 0 |
| TESTI1000163 | 0 | 0 | 0 | 0 | 0 | 0 | 28.041 |
| TESTI2000184 | 0 | 0 | 0 | 0 | 0 | 1.966 | 0 |
| TESTI2000598 | 0 | 0 | 0 | 0 | 0 | 8.739 | 0 |
| TESTI2001099 | 0 | 0 | 0 | 0 | 1.729 | 0.852 | 0 |
| TESTI2001153 | 0 | 5.611 | 0 | 0 | 0 | 0 | 0 |
| TESTI2001339 | 0 | 0 | 0 | 0 | 0 | 72.687 | 0 |
| TESTI2001829 | 0 | 0 | 0 | 0 | 0 | 1.477 | 0 |
| TESTI2001862 | 0 | 0 | 0 | 0 | 0 | 9.200 | 0 |
| TESTI2002696 | 0 | 91.511 | 0 | 0 | 0 | 0 | 0 |
| TESTI2003454 | 0 | 0 | 0 | 0 | 18.739 | 0 | 0 |
| TESTI2003533 | 0 | 0 | 0 | 5.953 | 3.059 | 0 | 5.900 |
| TESTI2004000 | 0 | 0 | 0 | 0 | 0 | 0 | 95.417 |
| TESTI2004737 | 0 | 0 | 0 | 12.162 | 0 | 0 | 0 |
| TESTI2004929 | 0 | 60.020 | 0 | 0 | 10.019 | 0 | 0 |
| TESTI2005017 | 0 | 0 | 25.744 | 0 | 0 | 0 | 0 |
| TESTI2005408 | 0 | 0 | 0 | 0 | 0 | 3.082 | 0 |
| TESTI2005743 | 0 | 0 | 17.124 | 0 | 0 | 0 | 0 |
| TESTI2005759 | 0 | 0 | 0 | 0 | 0 | 1.627 | 0 |
| TESTI2006051 | 0 | 14.918 | 0 | 0 | 0 | 0.737 | 0 |
| TESTI2006341 | 0 | 0 | 0 | 0 | 72.130 | 0 | 0 |
| TESTI2006383 | 0 | 0 | 0 | 0 | 14.302 | 0 | 0 |
| TESTI2006588 | 0 | 3.815 | 0 | 0 | 7.642 | 3.767 | 3.684 |
| TESTI2006615 | 0 | 0 | 0 | 0 | 0 | 8.029 | 0 |
| TESTI2007407 | 0 | 0 | 23.927 | 0 | 0 | 0 | 0 |
| TESTI2007422 | 0 | 0 | 0 | 0 | 0 | 53.906 | 0 |
| TESTI2007998 | 0 | 0 | 0 | 10.857 | 0 | 0 | 0 |
| TESTI2008240 | 0 | 0 | 0 | 0 | 0.882 | 1.305 | 1.702 |
| TESTI2008699 | 0 | 0 | 0 | 0 | 0 | 0 | 66.267 |
| TESTI2009785 | 0 | 0 | 0 | 0 | 5.063 | 4.992 | 0 |
| TESTI2010513 | 0 | 0 | 0 | 0 | 1.386 | 0.683 | 0 |
| TESTI2011605 | 0 | 0 | 0 | 0 | 0 | 6.270 | 0 |
| TESTI2011712 | 0 | 0 | 0 | 0 | 72.967 | 0 | 0 |
| TESTI2012104 | 0 | 68.595 | 0 | 0 | 0 | 0 | 0 |
| TESTI2012778 | 0 | 0 | 7.202 | 2.537 | 1.304 | 0.321 | 0 |
| TESTI2013295 | 0 | 0 | 20.764 | 0 | 0 | 0 | 0 |
| TESTI2014505 | 0 | 0 | 0 | 0 | 0 | 34.281 | 0 |
| TESTI2015092 | 0 | 0 | 0 | 0 | 0 | 0 | 22.545 |
| TESTI2015626 | 0 | 0 | 5.127 | 0 | 2.321 | 1.144 | 2.238 |
| TESTI2016033 | 0 | 12.276 | 0 | 0 | 0 | 0 | 0 |
| TESTI2017954 | 0 | 0 | 5.164 | 4.549 | 2.338 | 1.152 | 0 |
| TESTI2018462 | 0 | 0 | 0 | 0 | 0 | 4.916 | 19.231 |
| TESTI2018997 | 0 | 0 | 0 | 0 | 7.349 | 3.623 | 0 |
| TESTI2020026 | 0 | 91.511 | 0 | 0 | 0 | 0 | 0 |
| TESTI2024885 | 0 | 0 | 0 | 91.307 | 0 | 0 | 0 |
| TESTI2025454 | 0 | 0 | 0 | 0 | 39.745 | 19.594 | 0 |
| TESTI2026116 | 0 | 0 | 0 | 0 | 0 | 25.947 | 0 |
| TESTI2027271 | 0 | 0 | 0 | 0 | 18.633 | 0 | 0 |
| TESTI2033441 | 0 | 0 | 0 | 0 | 3.872 | 5.727 | 0 |
| TESTI2034940 | 0 | 0 | 2.031 | 3.577 | 3.677 | 1.360 | 1.773 |
| TESTI2046456 | 0 | 0 | 0 | 0 | 1.633 | 0.805 | 0 |
| TESTI2047605 | 0 | 0 | 0 | 0 | 0 | 25.348 | 0 |
| TESTI4000014 | 0 | 0 | 1.392 | 0 | 1.890 | 0.932 | 0 |
| TESTI4001206 | 0 | 0 | 0 | 0 | 0 | 72.687 | 0 |
| TESTI4002202 | 0 | 0 | 0 | 0 | 0 | 11.535 | 0 |
| TESTI4005534 | 0 | 0 | 0 | 0 | 0 | 48.512 | 0 |
| TESTI4007816 | 0 | 0 | 0 | 0 | 0 | 7.535 | 0 |
| TESTI4009286 | 0 | 0 | 0 | 4.977 | 0 | 1.261 | 0 |
| TESTI4010851 | 0 | 0 | 0 | 3.754 | 0 | 0.951 | 3.720 |
| TESTI4013441 | 0 | 0 | 0 | 0 | 0.553 | 0.273 | 0 |
| TESTI4013474 | 0 | 0 | 0 | 0 | 3.646 | 8.987 | 0 |
| TESTI4037156 | 0 | 0 | 0 | 0 | 1.953 | 1.926 | 0 |
| TESTI4043140 | 0 | 0 | 0 | 0 | 0 | 9.647 | 0 |
| TESTI4044704 | 0 | 0 | 0 | 0 | 17.985 | 0 | 0 |
| THYMU1000010 | 0 | 0 | 0 | 0 | 0 | 14.069 | 0 |
| THYMU1000032 | 0 | 0 | 0 | 0 | 13.772 | 6.789 | 0 |
| THYMU1000083 | 0 | 0 | 0 | 0 | 10.581 | 5.216 | 0 |
| THYMU1000103 | 0 | 0 | 0 | 0 | 0 | 3.067 | 0 |
| THYMU1000109 | 0 | 0 | 0 | 0 | 0 | 0 | 5.356 |
| THYMU1000329 | 0 | 0 | 0 | 0 | 0 | 9.271 | 0 |
| THYMU1000359 | 0 | 0 | 0 | 0 | 3.783 | 26.110 | 0 |
| THYMU1000374 | 0 | 0 | 0 | 0 | 10.570 | 13.028 | 10.193 |
| THYMU1000428 | 0 | 0 | 0 | 0 | 4.012 | 1.978 | 0 |
| THYMU1000473 | 0 | 0 | 0 | 0 | 0 | 5.786 | 0 |
| THYMU1000490 | 0 | 0 | 0 | 0 | 20.235 | 0 | 0 |
| THYMU2000057 | 0 | 0 | 0 | 0 | 0 | 2.359 | 0 |
| THYMU2000120 | 0 | 0 | 0 | 0 | 0 | 67.599 | 0 |
| THYMU2000300 | 0 | 0 | 0 | 0 | 0 | 5.082 | 0 |
| THYMU2000382 | 0 | 0 | 0 | 0 | 2.139 | 6.327 | 0 |
| THYMU2000672 | 0 | 0 | 0 | 0 | 0 | 39.350 | 0 |
| THYMU2000684 | 0 | 0 | 0 | 0 | 14.692 | 0 | 0 |
| THYMU2000775 | 0 | 0 | 0 | 0 | 0 | 16.288 | 0 |
| THYMU2001195 | 0 | 0 | 0 | 0 | 0 | 67.599 | 0 |
| THYMU2001819 | 0 | 0 | 0 | 0 | 80.886 | 0 | 0 |
| THYMU2001839 | 0 | 0 | 0 | 0 | 0 | 27.218 | 0 |
| THYMU2002147 | 0 | 0 | 0 | 0 | 0 | 41.018 | 0 |
| THYMU2002583 | 0 | 0 | 0 | 0 | 1.829 | 0 | 0 |
| THYMU2002756 | 0 | 0 | 0 | 0 | 0 | 12.736 | 0 |
| THYMU2002983 | 0 | 0 | 0 | 0 | 0 | 15.619 | 0 |
| THYMU2003012 | 0 | 0 | 0 | 0 | 3.092 | 4.574 | 0 |
| THYMU2003046 | 0 | 0 | 0 | 0 | 20.350 | 10.033 | 0 |
| THYMU2003133 | 0 | 0 | 0 | 0 | 0 | 18.107 | 0 |
| THYMU2003287 | 0 | 0 | 0 | 0 | 0 | 20.684 | 0 |
| THYMU2003419 | 0 | 0 | 0 | 0 | 0 | 1.747 | 0 |
| THYMU2003446 | 0 | 0 | 0 | 0 | 8.416 | 0 | 0 |
| THYMU2003499 | 0 | 0 | 0 | 0 | 0 | 52.442 | 0 |
| THYMU2003542 | 0 | 0 | 0 | 0 | 0 | 3.760 | 0 |
| THYMU2003891 | 0 | 0 | 0 | 0 | 3.604 | 6.092 | 1.986 |
| THYMU2003932 | 0 | 0 | 0 | 0 | 0 | 33.649 | 0 |
| THYMU2003981 | 0 | 0 | 0 | 0 | 0 | 7.268 | 0 |
| THYMU2004152 | 0 | 0 | 0 | 0 | 3.504 | 13.818 | 0 |
| THYMU2004320 | 0 | 0 | 0 | 0 | 0 | 28.426 | 0 |
| THYMU2004410 | 0 | 0 | 14.936 | 0 | 0 | 9.999 | 0 |
| THYMU2004733 | 0 | 0 | 0 | 0 | 0 | 9.743 | 0 |
| THYMU2004906 | 0 | 0 | 0 | 0 | 0 | 21.804 | 0 |
| THYMU2005439 | 0 | 0 | 0 | 0 | 19.505 | 28.848 | 0 |
| THYMU2005546 | 0 | 11.562 | 0 | 0 | 0 | 0.952 | 0 |
| THYMU2005980 | 0 | 0 | 0 | 0 | 0 | 14.107 | 0 |
| THYMU2006610 | 0 | 0 | 0 | 0 | 0 | 47.241 | 0 |
| THYMU2006813 | 0 | 0 | 0 | 0 | 0 | 2.753 | 0 |
| THYMU2007060 | 0 | 0 | 0 | 0 | 0 | 7.417 | 0 |
| THYMU2007065 | 0 | 0 | 0 | 0 | 0 | 7.054 | 0 |
| THYMU2007415 | 0 | 0 | 0 | 0 | 0 | 8.419 | 0 |
| THYMU2007467 | 0 | 0 | 0 | 0 | 0 | 7.027 | 0 |
| THYMU2007694 | 0 | 0 | 0 | 0 | 0 | 36.067 | 0 |
| THYMU2007886 | 0 | 0 | 10.794 | 0 | 0 | 2.409 | 0 |
| THYMU2008321 | 0 | 0 | 0 | 0 | 0 | 5.029 | 0 |
| THYMU2008686 | 0 | 0 | 0 | 0 | 0 | 21.200 | 0 |
| THYMU2009186 | 0 | 0 | 0 | 0 | 0 | 67.599 | 0 |
| THYMU2009658 | 0 | 0 | 0 | 2.405 | 0 | 0 | 0 |
| THYMU2009792 | 0 | 0 | 0 | 0 | 0 | 4.872 | 0 |
| THYMU2010448 | 0 | 0 | 0 | 0 | 0 | 18.423 | 0 |
| THYMU2010519 | 0 | 0 | 0 | 0 | 0 | 13.829 | 0 |
| THYMU2011063 | 0 | 0 | 0 | 0 | 0 | 9.154 | 0 |
| THYMU2011482 | 0 | 0 | 0 | 0 | 10.832 | 5.340 | 0 |
| THYMU2012492 | 0 | 0 | 0 | 0 | 0 | 45.490 | 0 |
| THYMU2012690 | 0 | 0 | 0 | 0 | 0 | 6.760 | 0 |
| THYMU2013916 | 0 | 0 | 0 | 0 | 0 | 5.788 | 0 |
| THYMU2014167 | 0 | 0 | 0 | 0 | 19.391 | 0 | 0 |
| THYMU2014492 | 0 | 0 | 0 | 0 | 67.907 | 0 | 0 |
| THYMU2015762 | 0 | 0 | 0 | 6.807 | 0 | 1.725 | 0 |
| THYMU2018126 | 0 | 0 | 0 | 0 | 2.567 | 0 | 0 |
| THYMU2018639 | 0 | 0 | 0 | 0 | 0 | 67.599 | 0 |
| THYMU2024121 | 0 | 0 | 0 | 0 | 0 | 51.056 | 0 |
| THYMU2024748 | 0 | 0 | 0 | 0 | 0 | 67.599 | 0 |
| THYMU2027125 | 0 | 1.261 | 0 | 1.229 | 0 | 0.311 | 0 |
| THYMU2027975 | 0 | 0 | 0 | 0 | 0 | 6.953 | 0 |
| THYMU2028629 | 0 | 0 | 0 | 0 | 0 | 31.849 | 0 |
| THYMU2029578 | 0 | 0 | 0 | 0 | 0 | 23.924 | 0 |
| THYMU2032014 | 0 | 0 | 0 | 0 | 0 | 28.708 | 0 |
| THYMU2033263 | 0 | 78.387 | 0 | 0 | 0 | 0 | 0 |
| THYMU2034374 | 0 | 0 | 0 | 0 | 44.389 | 21.883 | 0 |
| THYMU2034647 | 0 | 0 | 0 | 0 | 0 | 67.599 | 0 |
| THYMU3003007 | 0 | 0 | 0 | 0 | 0 | 33.064 | 0 |
| THYMU3003565 | 0 | 0 | 0 | 0 | 0 | 51.056 | 0 |
| THYMU3013386 | 0 | 0 | 0 | 5.140 | 0 | 0 | 0 |
| THYMU3015759 | 0 | 0 | 8.777 | 0 | 0 | 1.959 | 0 |
| THYMU3032798 | 0 | 0 | 0 | 0 | 0 | 3.364 | 0 |
| THYMU3032867 | 0 | 0 | 0 | 0 | 0 | 22.391 | 0 |
| THYMU3040068 | 0 | 0 | 0 | 0 | 0 | 67.599 | 0 |
| THYMU3040816 | 0 | 0 | 90.337 | 0 | 0 | 0 | 0 |
| THYMU3041428 | 0 | 0 | 0 | 0 | 0 | 0.443 | 0 |
| THYMU3045510 | 0 | 0 | 0 | 0 | 0 | 41.018 | 0 |
| THYMU3047115 | 0 | 20.268 | 0 | 0 | 0 | 0 | 0 |
| TKIDN2000464 | 0 | 0 | 0 | 0 | 0 | 31.971 | 0 |
| TKIDN2002738 | 0 | 0 | 3.269 | 0 | 1.480 | 0 | 0 |
| TKIDN2005487 | 0 | 0 | 0 | 4.933 | 0 | 0 | 0 |
| TKIDN2007605 | 0 | 0 | 0 | 0 | 0 | 21.732 | 0 |
| TKIDN2011289 | 0 | 0 | 0 | 0 | 0 | 10.400 | 0 |
| TLIVE2002690 | 0 | 14.154 | 0 | 0 | 0 | 0 | 0 |
| TLIVE2003970 | 0 | 0 | 0 | 0 | 8.161 | 0 | 0 |
| TRACH1000011 | 0 | 0 | 0 | 0 | 0 | 12.805 | 0 |
| TRACH1000030 | 0 | 0 | 0 | 0 | 0 | 2.400 | 0 |
| TRACH1000038 | 0 | 0 | 0 | 0 | 26.581 | 0 | 0 |
| TRACH1000063 | 0 | 0 | 0 | 14.767 | 0 | 0 | 0 |
| TRACH1000106 | 0 | 0 | 0 | 0 | 0 | 10.328 | 0 |
| TRACH2000045 | 0 | 0 | 0 | 0 | 0 | 4.784 | 0 |
| TRACH2000047 | 0 | 0 | 0 | 0 | 0 | 9.317 | 0 |
| TRACH2000237 | 0 | 0 | 0 | 36.917 | 0 | 0 | 0 |
| TRACH2000243 | 99.654 | 0 | 0 | 0 | 0 | 0 | 0 |
| TRACH2000248 | 0 | 0 | 0 | 0 | 0 | 2.427 | 0 |
| TRACH2000282 | 0 | 0 | 0 | 0 | 0 | 60.831 | 0 |
| TRACH2000321 | 0 | 0 | 0 | 0 | 1.734 | 0 | 0 |
| TRACH2000359 | 0 | 0 | 0 | 0 | 0 | 0 | 40.588 |
| TRACH2000472 | 0 | 0 | 0 | 0 | 3.013 | 4.456 | 0 |
| TRACH2000540 | 0 | 0 | 0 | 0 | 5.027 | 4.957 | 0 |
| TRACH2000702 | 0 | 0 | 0 | 26.957 | 0 | 0 | 0 |
| TRACH2000920 | 0 | 0 | 0 | 0 | 0 | 11.535 | 0 |
| TRACH2000972 | 0 | 0 | 0 | 0 | 2.091 | 0 | 0 |
| TRACH2001021 | 0 | 2.950 | 0 | 0 | 2.955 | 1.457 | 0 |
| TRACH2001289 | 0 | 0 | 0 | 0 | 2.399 | 1.774 | 0 |
| TRACH2001428 | 0 | 0 | 0 | 0 | 0 | 2.196 | 0 |
| TRACH2001432 | 0 | 0 | 0 | 0 | 0 | 0 | 7.570 |
| TRACH2001463 | 0 | 0 | 0 | 0 | 10.804 | 10.653 | 0 |
| TRACH2001523 | 0 | 0 | 0 | 11.673 | 0 | 0 | 0 |
| TRACH2001549 | 0 | 0 | 0 | 0 | 0 | 0 | 28.775 |
| TRACH2001596 | 0 | 0 | 0 | 0 | 0 | 35.602 | 0 |
| TRACH2001607 | 0 | 0 | 0 | 6.896 | 0 | 1.747 | 0 |
| TRACH2002043 | 0 | 0 | 8.267 | 0 | 0 | 0 | 0 |
| TRACH2002138 | 0 | 0 | 0 | 0 | 75.905 | 0 | 0 |
| TRACH2002537 | 0 | 0 | 0 | 0 | 3.273 | 0 | 0 |
| TRACH2002664 | 0 | 0 | 0 | 0 | 0 | 0 | 10.356 |
| TRACH2002803 | 0 | 0 | 0 | 0 | 0 | 3.625 | 0 |
| TRACH2002847 | 0 | 0 | 35.382 | 0 | 0 | 0 | 0 |
| TRACH2003323 | 0 | 0 | 0 | 0 | 0 | 3.096 | 0 |
| TRACH2003347 | 0 | 0 | 12.385 | 0 | 0 | 0 | 0 |
| TRACH2004109 | 0 | 0 | 0 | 0 | 0 | 60.831 | 0 |
| TRACH2005811 | 0 | 0 | 8.221 | 0 | 0 | 0 | 0 |
| TRACH2006866 | 0 | 0 | 0 | 0 | 10.505 | 0 | 6.753 |
| TRACH2007399 | 0 | 0 | 0 | 0 | 1.662 | 0 | 0 |
| TRACH2007816 | 0 | 0 | 0 | 0 | 0 | 17.367 | 0 |
| TRACH2008472 | 0 | 0 | 12.231 | 0 | 0 | 0 | 0 |
| TRACH2008478 | 0 | 0 | 0 | 0 | 0 | 62.137 | 0 |
| TRACH2008540 | 0 | 0 | 0 | 0 | 0 | 82.330 | 0 |
| TRACH2008716 | 0 | 0 | 39.545 | 0 | 0 | 0 | 0 |
| TRACH2009006 | 0 | 0 | 0 | 0 | 12.384 | 0 | 0 |
| TRACH2011113 | 0 | 0 | 0 | 0 | 0 | 8.213 | 0 |
| TRACH2011500 | 0 | 0 | 0 | 0 | 0 | 23.489 | 0 |
| TRACH2012298 | 0 | 0 | 11.062 | 0 | 0 | 0 | 0 |
| TRACH2012376 | 0 | 0 | 20.922 | 0 | 0 | 0 | 0 |
| TRACH2012497 | 0 | 0 | 0 | 0 | 0 | 11.261 | 0 |
| TRACH2013495 | 0 | 0 | 87.436 | 0 | 0 | 0 | 0 |
| TRACH2014077 | 0 | 0 | 0 | 0 | 0 | 5.918 | 0 |
| TRACH2014124 | 0 | 0 | 0 | 0 | 10.927 | 7.183 | 0 |
| TRACH2015823 | 0 | 0 | 17.053 | 0 | 0 | 0 | 0 |
| TRACH2016533 | 0 | 0 | 0 | 0 | 0 | 49.869 | 0 |
| TRACH2018317 | 0 | 0 | 0 | 0 | 10.338 | 5.096 | 19.936 |
| TRACH2018950 | 0 | 0 | 0 | 0 | 0 | 0 | 51.111 |
| TRACH2019425 | 0 | 0 | 87.436 | 0 | 0 | 0 | 0 |
| TRACH2024293 | 0 | 0 | 0 | 0 | 0 | 28.081 | 0 |
| TRACH3002192 | 0 | 0 | 4.861 | 0 | 0 | 0 | 0 |
| TRACH3003547 | 0 | 0 | 0 | 0 | 0 | 7.357 | 0 |
| TRACH3005294 | 0 | 0 | 0 | 0 | 0 | 6.461 | 0 |
| TRACH3006717 | 0 | 0 | 0 | 0 | 0 | 6.383 | 0 |
| TRACH3008093 | 0 | 0 | 0 | 0 | 0 | 8.522 | 0 |
| TRACH3009008 | 0 | 0 | 38.190 | 0 | 0 | 0 | 0 |
| TRACH3037067 | 0 | 0 | 0 | 0 | 0 | 2.796 | 0 |
| TSTOM2000315 | 0 | 0 | 17.765 | 0 | 0 | 0 | 0 |
| UMVEN2000133 | 0 | 0 | 0 | 0 | 4.137 | 1.020 | 0 |
| UMVEN2000453 | 0 | 0 | 4.070 | 0 | 0 | 0 | 0 |
| UTERU2000095 | 0 | 0 | 0 | 0 | 0 | 1.440 | 0 |
| UTERU2000332 | 0 | 0 | 0 | 0 | 16.686 | 8.226 | 0 |
| UTERU2000338 | 0 | 0 | 0 | 0 | 0 | 11.607 | 0 |
| UTERU2000424 | 0 | 0 | 0 | 0 | 5.994 | 8.865 | 0 |
| UTERU2000537 | 0 | 0 | 0 | 0 | 18.105 | 8.926 | 0 |
| UTERU2000541 | 0 | 0 | 0 | 0 | 0 | 10.972 | 0 |
| UTERU2002294 | 0 | 0 | 0 | 0 | 0 | 3.158 | 0 |
| UTERU2002410 | 0 | 0 | 0 | 0 | 2.072 | 1.021 | 0 |
| UTERU2003057 | 0 | 0 | 0 | 0 | 9.127 | 0 | 0 |
| UTERU2003456 | 0 | 76.204 | 0 | 0 | 0 | 0 | 0 |
| UTERU2004197 | 0 | 0 | 0 | 0 | 7.095 | 0 | 0 |
| UTERU2004664 | 0 | 0 | 0 | 0 | 5.988 | 0 | 0 |
| UTERU2004807 | 0 | 7.079 | 0 | 0 | 3.545 | 3.495 | 0 |
| UTERU2005292 | 0 | 0 | 0 | 0 | 0 | 5.417 | 0 |
| UTERU2005354 | 0 | 0 | 0 | 0 | 0 | 3.805 | 0 |
| UTERU2005593 | 0 | 0 | 8.750 | 0 | 0 | 0 | 0 |
| UTERU2005621 | 0 | 0 | 0 | 0 | 0 | 3.921 | 0 |
| UTERU2006115 | 0 | 0 | 0 | 0 | 0 | 0 | 53.335 |
| UTERU2006593 | 0 | 0 | 11.510 | 0 | 0 | 0 | 0 |
| UTERU2008085 | 0 | 3.818 | 1.408 | 3.721 | 0.956 | 0.157 | 1.229 |
| UTERU2008302 | 0 | 0 | 10.415 | 0 | 0 | 2.324 | 0 |
| UTERU2008939 | 0 | 0 | 0 | 0 | 0 | 25.840 | 0 |
| UTERU2009538 | 0 | 0 | 0 | 0 | 0 | 59.326 | 0 |
| UTERU2010226 | 0 | 0 | 0 | 0 | 27.836 | 0 | 0 |
| UTERU2010417 | 0 | 0 | 0 | 0 | 1.113 | 0.548 | 0 |
| UTERU2012741 | 0 | 0 | 0 | 0 | 63.521 | 0 | 0 |
| UTERU2012856 | 0 | 0 | 0 | 24.224 | 0 | 0 | 0 |
| UTERU2014898 | 0 | 0 | 0 | 20.896 | 0 | 0 | 0 |
| UTERU2015190 | 0 | 0 | 0 | 0 | 0 | 59.326 | 0 |
| UTERU2016822 | 0 | 0 | 0 | 0 | 0 | 10.490 | 0 |
| UTERU2016979 | 0 | 0 | 0 | 0 | 0 | 17.993 | 0 |
| UTERU2023045 | 0 | 0 | 0 | 0 | 31.937 | 0 | 0 |
| UTERU2023550 | 0 | 59.011 | 0 | 0 | 0 | 0 | 0 |
| UTERU2031084 | 0 | 0 | 0 | 0 | 0 | 37.818 | 0 |
| UTERU3005767 | 0 | 0 | 0 | 0 | 4.200 | 2.071 | 0 |
| UTERU3015011 | 0 | 0 | 0 | 0 | 0 | 12.277 | 0 |

[0703] Genes whose expression levels were negligibly low in each of the above-described libraries are shown with their clone names below.

[0704] 3NB691000018, 3NB691000085, 3NB691000113, 3NB691000129, 3NB691000191, 3NB692000012, 3NB692000029, 3NB692000102, 3NB692000154, 3NB692000276, 3NB692000305, 3NB692000374, 3NB692000429, 3NB692000484, 3NB692000529, 3NB692001034, 3NB692001040, 3NB692001123, 3NB692001267, 3NB692001288, 3NB692001349, 3NB692001366, 3NB692001408, 3NB692001433, 3NB692001471, 3NB692001496, 3NB692001501, 3NB692001507, 3NB692001511, 3NB692001519, 3NB692001520, 3NB692001548, 3NB692001557, 3NB692001637, 3NB692001719, 3NB692001853, 3NB692001861, 3NB692002051, 3NB692002365, 3NB692002685, 3NB692002806, 3NB692003538, 3NB692004045, 3NB692004724, 3NB692005439, 3NB692006952, 3NB692008178, 3NB692008729, ACTVT2000380, ADIPS1000064, ADIPS2000069, ADIPS2000088, ADIPS2000245, ADIPS2000425, ADRGL1000002, ADRGL1000018, ADRGL1000033, ADRGL1000038, ADRGL1000065, ADRGL1000067, ADRGL1000111, ADRGL1000147, ADRGL1000160, ADRGL1000165, ADRGL1000182, ADRGL2000006, ADRGL2000042, ADRGL2000056, ADRGL2000064, ADRGL2000074, ADRGL2000085, ADRGL2000097, ADRGL2000142, ADRGL2000172, ADRGL2000248, ADRGL2000261, ADRGL2000328, ADRGL2000353, ADRGL2000384, ADRGL2000428, ADRGL2000636, ADRGL2000644, ADRGL2000968, ADRGL2001119, ADRGL2001229, ADRGL2001287, ADRGL2001301, ADRGL2001354, ADRGL2001554, ADRGL2001651, ADRGL2001756, ADRGL2001830, ADRGL2001836, ADRGL2001854, ADRGL2002013, ADRGL2002029, ADRGL2002191, ADRGL2002260, ADRGL2002392, ADRGL2002679, ADRGL2002753, ADRGL2002857, ADRGL2003017, ADRGL2003329, ADRGL2003552, ADRGL2003585, ADRGL2003638, ADRGL2003684, ADRGL2003773, ADRGL2003785, ADRGL2004031, ADRGL2004077, ADRGL2004451, ADRGL2004459, ADRGL2004676, ADRGL2004708, ADRGL2004724, ADRGL2004749, ADRGL2004770, ADRGL2004777, ADRGL2004833, ADRGL2005336, ADRGL2005564, ADRGL2005756, ADRGL2005838, ADRGL2005926, ADRGL2005961, ADRGL2006034, ADRGL2006124, ADRGL2006177, ADRGL2006193, ADRGL2006377, ADRGL2006677, ADRGL2006732, ADRGL2006767, ADRGL2006817, ADRGL2006846, ADRGL2006886, ADRGL2007080, ADRGL2007125, ADRGL2007283, ADRGL2007313, ADRGL2007357, ADRGL2007636, ADRGL2007651, ADRGL2007810, ADRGL2007877, ADRGL2007906, ADRGL2007974, ADRGL2008023, ADRGL2008331, ADRGL2008337, ADRGL2008535, ADRGL2008966, ADRGL2009146, ADRGL2009273, ADRGL2009324, ADRGL2009489, ADRGL2009533, ADRGL2009691, ADRGL2009755, ADRGL2010152, ADRGL2010315, ADRGL2010594, ADRGL2010860, ADRGL2010974, ADRGL2011190, ADRGL2011330, ADRGL2012038, ADRGL2012179, AHMSC1000138, ASTRO1000009, ASTRO1000018, ASTRO1000029, ASTRO1000096, ASTRO2000011, ASTRO2000014, ASTRO2000046, ASTRO2000095, ASTRO2000141, ASTRO2000191, ASTRO2000278, ASTRO2000372, ASTRO2000381, ASTRO2000403, ASTRO2000417, ASTRO2000482, ASTRO2000533, ASTRO2000653, ASTRO2000662, ASTRO2000725, ASTRO2000801, ASTRO2001001, ASTRO2001008, ASTRO2001029, ASTRO2001088, ASTRO2001107, ASTRO2001122, ASTRO2001227, ASTRO2001480, ASTRO2002024, ASTRO2002035, ASTRO2002064, ASTRO2002202, ASTRO2002459, ASTRO2002571, ASTRO2002632, ASTRO2002659, ASTRO2002693, ASTRO2002720, ASTRO2002733, ASTRO2002743, ASTRO2002842, ASTRO2003212, ASTRO2003316, ASTRO2003461, ASTRO2003574, ASTRO2003581, ASTRO2003632, ASTRO2003740, ASTRO2003840, ASTRO2003925, ASTRO2003960, ASTRO2004032, ASTRO2004051, ASTRO2004177, ASTRO2004217, ASTRO2004297, ASTRO2004584, ASTRO2004628, ASTRO2004751, ASTRO2004877, ASTRO2004974, ASTRO2005008, ASTRO2005081, ASTRO2005096, ASTRO2005242, ASTRO2005273, ASTRO2005343, ASTRO2005413, ASTRO2005423, ASTRO2005557, ASTRO2005575, ASTRO2005593, ASTRO2005726, ASTRO2005863, ASTRO2005902, ASTRO2006356, ASTRO2006475, ASTRO2006732, ASTRO2006747, ASTRO2006920, ASTRO2006952, ASTRO2007221, ASTRO2007377, ASTRO2007515, ASTRO2007578, ASTRO2007643, ASTRO2007666, ASTRO2007948, ASTRO2007956, ASTRO2007962, ASTRO2008040, ASTRO2008216, ASTRO2008239, ASTRO2008409, ASTRO2008425, ASTRO2008508, ASTRO2008777, ASTRO2008895, ASTRO2008960, ASTRO2008972, ASTRO2009068, ASTRO2009118, ASTRO2009177, ASTRO2009333, ASTRO2009458, ASTRO2009526, ASTRO2009879, ASTRO2010072, ASTRO2010582, ASTRO2010615, ASTRO2010799, ASTRO2010962, ASTRO2010996, ASTRO2011149, ASTRO2011422, ASTRO2011426, ASTRO2011437, ASTRO2011461, ASTRO2011834, ASTRO2011893, ASTRO2013124, ASTRO2013671, ASTRO2013802, ASTRO2014135, ASTRO2014174, ASTRO2014211, ASTRO2014363, ASTRO2014392, ASTRO2014498, ASTRO2014561, ASTRO2014576, ASTRO2014863, ASTRO2014923, ASTRO2014961, ASTRO2015162, ASTRO2015185, ASTRO2015328, ASTRO2015529, ASTRO2015987, ASTRO2016044, ASTRO2016114, ASTRO2016148, ASTRO2016681, ASTRO2016819, ASTRO2016847, ASTRO2016892, ASTRO2017348, ASTRO2017627, ASTRO2018169, ASTRO2018373, ASTRO2019039, ASTRO2019171, ASTRO3000154, ASTRO3000172, ASTRO3000177, ASTRO3000301, ASTRO3000474, ASTRO3000482, BEAST2000454, BGGI11000193, BGGI11000285, BGGI12000022, BGGI12000067, BGGI12000161, BGGI12000533, BGGI12000544, BGGI12000684, BGGI12000693, BGGI12001002, BGGI12001097, BGGI12001241, BGGI12001247, BGGI12001682, BLADE1000176, BLADE2000181, BLADE2000340, BLADE2000389, BLADE2000463, BLADE2000492, BLADE2000579, BLADE2000640, BLADE2000866, BLADE2000938, BLADE2001031, BLADE2001133, BLADE2001138, BLADE2001141, BLADE2001371, BLADE2001458, BLADE2001753, BLADE2001935, BLADE2001940, BLADE2001987, BLADE2002073, BLADE2002310, BLADE2002730, BLADE2002738, BLADE2002744, BLADE2002782, BLADE2002947, BLADE2002972, BLADE2003474, BLADE2003916, BLADE2004089, BLADE2004345, BLADE2004389, BLADE2004462, BLADE2004628, BLADE2004670, BLADE2004722, BLADE2005036, BLADE2005038, BLADE2005229, BLADE2005459, BLADE2005792, BLADE2006043, BLADE2006412, BLADE2006415, BLADE2006607, BLADE2006826, BLADE2006830, BLADE2006849, BLADE2006947, BLADE2007033, BLADE2007043, BLADE2007589, BLADE2007666, BLADE2007722, BLADE2007735, BLADE2007744, BLADE2007799, BLADE2007923, BLADE2007935, BLADE2007958, BLADE2008281, BLADE2008398, BLADE2008454, BLADE2008461, BLADE2008479, BLADE2008539, BLADE2008809, BLADE2008995, BLADE2009452, BLADE2009479, BLADE2009593, BNGH41000098, BNGH41000104, BNGH41000118, BNGH41000153, BNGH41000169, BNGH41000177, BNGH41000198, BNGH41000216, BNGH42000130, BNGH42000132, BNGH42000405, BNGH42000532, BNGH42000675, BNGH42000791, BNGH42000815, BNGH42000994, BNGH42001247, BNGH42001406, BNGH42001724, BNGH42002244, BNGH42002387, BNGH42002487, BNGH42002489, BNGH42003529, BNGH42003570, BNGH42003641, BNGH42004076, BNGH42004291, BNGH42004538, BNGH42004679, BNGH42005017, BNGH42005235, BNGH42005504, BNGH42005968, BNGH42006135, BNGH42006226, BNGH42006234, BNGH42007037, BNGH42007460, BNGH42007594, BNGH42007788, BNGH42007798, BNGH42008199, BNGH42008510, BNGH42008603, BNGH42008649, BNGH42008743, BNGH42008832, BNGH42008850, BNGH42008943, BNGH42009021, BRACE1000020, BRACE1000047, BRACE1000065, BRACE1000070, BRACE1000073, BRACE1000084, BRACE1000087, BRACE1000092, BRACE1000093, BRACE1000101, BRACE1000114, BRACE1000124, BRACE1000132, BRACE1000159, BRACE1000166, BRACE1000169, BRACE1000186, BRACE1000187, BRACE1000239, BRACE1000258, BRACE1000451, BRACE1000475, BRACE1000572, BRACE2000061, BRACE2000077, BRACE2000078, BRACE2000100, BRACE2000109, BRACE2000141, BRACE2000148, BRACE2000183, BRACE2000229, BRACE2000232, BRACE2000245, BRACE2000256, BRACE2000266, BRACE2000280, BRACE2000300, BRACE2000331, BRACE2000351, BRACE2000368, BRACE2000392, BRACE2000441, BRACE2000487, BRACE2000489, BRACE2000505, BRACE2000526, BRACE2000531, BRACE2000545, BRACE2000553, BRACE2000565, BRACE2000577, BRACE2000640, BRACE2000650, BRACE2000677, BRACE2000698, BRACE2000718, BRACE2000733, BRACE2000743, BRACE2000750, BRACE2000815, BRACE2000885, BRACE2000893, BRACE2000905, BRACE2000936, BRACE2000947, BRACE2000965, BRACE2000969, BRACE2000975, BRACE2000988, BRACE2001017, BRACE2001065, BRACE2001070, BRACE2001094, BRACE2001107, BRACE2001117, BRACE2001143, BRACE2001154, BRACE2001188, BRACE2001191, BRACE2001197, BRACE2001236, BRACE2001239, BRACE2001269, BRACE2001312, BRACE2001330, BRACE2001340, BRACE2001352, BRACE2001353, BRACE2001374, BRACE2001375, BRACE2001423, BRACE2001424, BRACE2001445, BRACE2001453, BRACE2001455, BRACE2001477, BRACE2001492, BRACE2001496, BRACE2001497, BRACE2001508, BRACE2001534, BRACE2001543, BRACE2001564, BRACE2001588, BRACE2001607, BRACE2001626, BRACE2001677, BRACE2001692, BRACE2001705, BRACE2001711, BRACE2001726, BRACE2001733, BRACE2001737, BRACE2001742, BRACE2001777, BRACE2001779, BRACE2001834, BRACE2001855, BRACE2001859, BRACE2001865, BRACE2001872, BRACE2001881, BRACE2001892, BRACE2001898, BRACE2001923, BRACE2001942, BRACE2001944, BRACE2001954, BRACE2001971, BRACE2001972, BRACE2001973, BRACE2002026, BRACE2002034, BRACE2002081, BRACE2002139, BRACE2002142, BRACE2002151, BRACE2002157, BRACE2002176, BRACE2002202, BRACE2002206, BRACE2002227, BRACE2002260, BRACE2002297, BRACE2002304, BRACE2002356, BRACE2002392, BRACE2002394, BRACE2002409, BRACE2002431, BRACE2002444, BRACE2002458, BRACE2002467, BRACE2002468, BRACE2002478, BRACE2002495, BRACE2002582, BRACE2002585, BRACE2002589, BRACE2002590, BRACE2002606, BRACE2002613, BRACE2002614, BRACE2002617, BRACE2002623, BRACE2002635, BRACE2002649, BRACE2002676, BRACE2002682, BRACE2002685, BRACE2002695, BRACE2002707, BRACE2002736, BRACE2002752, BRACE2002755, BRACE2002762, BRACE2002772, BRACE2002792, BRACE2002796, BRACE2002803, BRACE2002812, BRACE2002834, BRACE2002849, BRACE2002857, BRACE2002861, BRACE2002884, BRACE2002896, BRACE2002948, BRACE2003037, BRACE2003078, BRACE2003097, BRACE2003110, BRACE2003168, BRACE2003199, BRACE2003210, BRACE2003217, BRACE2003269, BRACE2003285, BRACE2003304, BRACE2003398, BRACE2003420, BRACE2003428, BRACE2003431, BRACE2003512, BRACE2003516, BRACE2003527, BRACE2003539, BRACE2003540, BRACE2003594, BRACE2003598, BRACE2003609, BRACE2003614, BRACE2003628, BRACE2003639, BRACE2003700, BRACE2003713, BRACE2003766, BRACE2003785, BRACE2003788, BRACE2003800, BRACE2003802, BRACE2003825, BRACE2003847, BRACE2003848, BRACE2003873, BRACE2003885, BRACE2003887, BRACE2003905, BRACE2003928, BRACE2003982, BRACE2003987, BRACE2005034, BRACE2005047, BRACE2005063, BRACE2005083, BRACE2005090, BRACE2005099, BRACE2005118, BRACE2005124, BRACE2005138, BRACE2005151, BRACE2005160, BRACE2005169, BRACE2005189, BRACE2005193, BRACE2005196, BRACE2005198, BRACE2005216, BRACE2005231, BRACE2005243, BRACE2005251, BRACE2005253, BRACE2005290, BRACE2005328, BRACE2005329, BRACE2005337, BRACE2005348, BRACE2005363, BRACE2005395, BRACE2005408, BRACE2005433, BRACE2005448, BRACE2005450, BRACE2005453, BRACE2005457, BRACE2005460, BRACE2005489, BRACE2005518, BRACE2005556, BRACE2005562, BRACE2005624, BRACE2005642, BRACE2005661, BRACE2005667, BRACE2005681, BRACE2005719, BRACE2005731, BRACE2005742, BRACE2005762, BRACE2005773, BRACE2005787, BRACE2005795, BRACE2005800, BRACE2005858, BRACE2005869, BRACE2005875, BRACE2005881, BRACE2005898, BRACE2005904, BRACE2005906, BRACE2005907, BRACE2005911, BRACE2005937, BRACE2005949, BRACE2005981, BRACE2005991, BRACE2006072, BRACE2006075, BRACE2006084, BRACE2006089, BRACE2006102, BRACE2006105, BRACE2006122, BRACE2006137, BRACE2006143, BRACE2006167, BRACE2006174, BRACE2006240, BRACE2006245, BRACE2006249, BRACE2006274, BRACE2006281, BRACE2006298, BRACE2006319, BRACE2006344, BRACE2006354, BRACE2006378, BRACE2006380, BRACE2006393, BRACE2006413, BRACE2006417, BRACE2006453, BRACE2006488, BRACE2006534, BRACE2006540, BRACE2006547, BRACE2006564, BRACE2006587, BRACE2006636, BRACE2006685, BRACE2006703, BRACE2006743, BRACE2006753, BRACE2006783, BRACE2006821, BRACE2006833, BRACE2006859, BRACE2006871, BRACE2006909, BRACE2006911, BRACE2006924, BRACE2006935, BRACE2006937, BRACE2006944, BRACE2006951, BRACE2006982, BRACE2006986, BRACE2007013, BRACE2007087, BRACE2007138, BRACE2007174, BRACE2007197, BRACE2007201, BRACE2007203, BRACE2007232, BRACE2007262, BRACE2007274, BRACE2007281, BRACE2007358, BRACE2007396, BRACE2007398, BRACE2007401, BRACE2007411, BRACE2007447, BRACE2007477, BRACE2007502, BRACE2007503, BRACE2007522, BRACE2007527, BRACE2007538, BRACE2007563, BRACE2007577, BRACE2007621, BRACE2007640, BRACE2007641, BRACE2007646, BRACE2007663, BRACE2007682, BRACE2007685, BRACE2007727, BRACE2007749, BRACE2007760, BRACE2007761, BRACE2007764, BRACE2007768, BRACE2007769, BRACE2007784, BRACE2007786, BRACE2007798, BRACE2007799, BRACE2007801, BRACE2007832, BRACE2007836, BRACE2007868, BRACE2007882, BRACE2007888, BRACE2007902, BRACE2007920, BRACE2007937, BRACE2007944, BRACE2007952, BRACE2008008, BRACE2008015, BRACE2008021, BRACE2008097, BRACE2008102, BRACE2008114, BRACE2008144, BRACE2008172, BRACE2008218, BRACE2008251, BRACE2008276, BRACE2008295, BRACE2008308, BRACE2008336, BRACE2008361, BRACE2008380, BRACE2008399, BRACE2008401, BRACE2008402, BRACE2008410, BRACE2008420, BRACE2008443, BRACE2008473, BRACE2008480, BRACE2008481, BRACE2008488, BRACE2008495, BRACE2008500, BRACE2008594, BRACE2008604, BRACE2008615, BRACE2008622, BRACE2008629, BRACE2008655, BRACE2008656, BRACE2008706, BRACE2008708, BRACE2008710, BRACE2008754, BRACE2008797, BRACE2008847, BRACE2008857, BRACE2008861, BRACE2008867, BRACE2008881, BRACE2008883, BRACE2008917, BRACE2008919, BRACE2008941, BRACE2008948, BRACE2008960, BRACE2009014, BRACE2009016, BRACE2009031, BRACE2009045, BRACE2009053, BRACE2009122, BRACE2009131, BRACE2009185, BRACE2009188, BRACE2009212, BRACE2009221, BRACE2009235, BRACE2009238, BRACE2009255, BRACE2009270, BRACE2009272, BRACE2009274, BRACE2009275, BRACE2009291, BRACE2009293, BRACE2009307, BRACE2009311, BRACE2009318, BRACE2009323, BRACE2009421, BRACE2009428, BRACE2009434, BRACE2009437, BRACE2009483, BRACE2009533, BRACE2009566, BRACE2009591, BRACE2009620, BRACE2009654, BRACE2009721, BRACE2009732, BRACE2009754, BRACE2009828, BRACE2009886, BRACE2009907, BRACE2009957, BRACE2010170, BRACE2010171, BRACE2010203, BRACE2010208, BRACE2010336, BRACE2010348, BRACE2010440, BRACE2010444, BRACE2010477, BRACE2010489, BRACE2010535, BRACE2010550, BRACE2010598, BRACE2010632, BRACE2010642, BRACE2010651, BRACE2010669, BRACE2010684, BRACE2010753, BRACE2010813, BRACE2010828, BRACE2010837, BRACE2010888, BRACE2010937, BRACE2010983, BRACE2011007, BRACE2011025, BRACE2011183, BRACE2011199, BRACE2011265, BRACE2011389, BRACE2011478, BRACE2011545, BRACE2011592, BRACE2011611, BRACE2011646, BRACE2011677, BRACE2011747, BRACE2011838, BRACE2011892, BRACE2011904, BRACE2011947, BRACE2012062, BRACE2012185, BRACE2012222, BRACE2012232, BRACE2012291, BRACE2012317, BRACE2012510, BRACE2012625, BRACE2012653, BRACE2012833, BRACE2012838, BRACE2012936, BRACE2012947, BRACE2013009, BRACE2013010, BRACE2013126, BRACE2013132, BRACE2013149, BRACE2013369, BRACE2013806, BRACE2013855, BRACE2014108, BRACE2014161, BRACE2014232, BRACE2014257, BRACE2014268, BRACE2014306, BRACE2014475, BRACE2014657, BRACE2014746, BRACE2014780, BRACE2014821, BRACE2014824, BRACE2014850, BRACE2014854, BRACE2015031, BRACE2015058, BRACE2015132, BRACE2015262, BRACE2015270, BRACE2015314, BRACE2015352, BRACE2015368, BRACE2015412, BRACE2015436, BRACE2015741, BRACE2015756, BRACE2015995, BRACE2016058, BRACE2016194, BRACE2016315, BRACE2016325, BRACE2016335, BRACE2016362, BRACE2016366, BRACE2016465, BRACE2016516, BRACE2016583, BRACE2016708, BRACE2016821, BRACE2016896, BRACE2016981, BRACE2017108, BRACE2017124, BRACE2017298, BRACE2017359, BRACE2017397, BRACE2017410, BRACE2017438, BRACE2017574, BRACE2017580, BRACE2017587, BRACE2017720, BRACE2017844, BRACE2017872, BRACE2017929, BRACE2017934, BRACE2017985, BRACE2017992, BRACE2018337, BRACE2018443, BRACE2018448, BRACE2018568, BRACE2018700, BRACE2018727, BRACE2018736, BRACE2018759, BRACE2018762, BRACE2018782, BRACE2018847, BRACE2019004, BRACE2019044, BRACE2019147, BRACE2019258, BRACE2019348, BRACE2019467, BRACE2019510, BRACE2019519, BRACE2019528, BRACE2019618, BRACE2019696, BRACE2019703, BRACE2019843, BRACE2019865, BRACE2019872, BRACE2019877, BRACE2020028, BRACE2020077, BRACE2020097, BRACE2020157, BRACE2020278, BRACE2020358, BRACE2020467, BRACE2020584, BRACE2020652, BRACE2020709, BRACE2020742, BRACE2020756, BRACE2020863, BRACE2020982, BRACE2021014, BRACE2021148, BRACE2021245, BRACE2021254, BRACE2021264, BRACE2021344, BRACE2021433, BRACE2021670, BRACE2021695, BRACE2021708, BRACE2021721, BRACE2021932, BRACE2021936, BRACE2022030, BRACE2022158, BRACE2022196, BRACE2022270, BRACE2022328, BRACE2022394, BRACE2022435, BRACE2022448, BRACE2022450, BRACE2022549, BRACE2022633, BRACE2022693, BRACE2022848, BRACE2022928, BRACE2022990, BRACE2023069, BRACE2023070, BRACE2023223, BRACE2023268, BRACE2023284, BRACE2023404, BRACE2023451, BRACE2023540, BRACE2023633, BRACE2023718, BRACE2023727, BRACE2023744, BRACE2023800, BRACE2023801, BRACE2024074, BRACE2024222, BRACE2024610, BRACE2024781, BRACE2024826, BRACE2025018, BRACE2025316, BRACE2025333, BRACE2025437, BRACE2025452, BRACE2025492, BRACE2025710, BRACE2025796, BRACE2025992, BRACE2026054, BRACE2026131, BRACE2026141, BRACE2026142, BRACE2026293, BRACE2026294, BRACE2026404, BRACE2026675, BRACE2026725, BRACE2026920, BRACE2026971, BRACE2027018, BRACE2027221, BRACE2027258, BRACE2027312, BRACE2027382, BRACE2027389, BRACE2027408, BRACE2027643, BRACE2027767, BRACE2027770, BRACE2027879, BRACE2027896, BRACE2027970, BRACE2028171, BRACE2028392, BRACE2028410, BRACE2028636, BRACE2028741, BRACE2028956, BRACE2028970, BRACE2029112, BRACE2029356, BRACE2029396, BRACE2029581, BRACE2029644, BRACE2029849, BRACE2030039, BRACE2030096, BRACE2030323, BRACE2030326, BRACE2030341, BRACE2030345, BRACE2030736, BRACE2030883, BRACE2030884, BRACE2031154, BRACE2031232, BRACE2031527, BRACE2031531, BRACE2031553, BRACE2031899, BRACE2032044, BRACE2032090, BRACE2032134, BRACE2032148, BRACE2032182, BRACE2032329, BRACE2032385, BRACE2032436, BRACE2032477, BRACE2032502, BRACE2032538, BRACE2032584, BRACE2032823, BRACE2033128, BRACE2033394, BRACE2033478, BRACE2033720, BRACE2033786, BRACE2034434, BRACE2034523, BRACE2034616, BRACE2034622, BRACE2034870, BRACE2035003, BRACE2035120, BRACE2035124, BRACE2035191, BRACE2035278, BRACE2035381, BRACE2035441, BRACE2035485, BRACE2036005, BRACE2036096, BRACE2036743, BRACE2036830, BRACE2036834, BRACE2036900, BRACE2037132, BRACE2037294, BRACE2037299, BRACE2037310, BRACE2037431, BRACE2037692, BRACE2037847, BRACE2038114, BRACE2038269, BRACE2038271, BRACE2038329, BRACE2038492, BRACE2038551, BRACE2038618, BRACE2039009, BRACE2039128, BRACE2039170, BRACE2039249, BRACE2039286, BRACE2039297, BRACE2039327, BRACE2039362, BRACE2039475, BRACE2039600, BRACE2039607, BRACE2039734, BRACE2039823, BRACE2039832, BRACE2039893, BRACE2039986, BRACE2040138, BRACE2040325, BRACE2040514, BRACE2040640, BRACE2040987, BRACE2041009, BRACE2041095, BRACE2041200, BRACE2041264, BRACE2041890, BRACE2041898, BRACE2042394, BRACE2042398, BRACE2042550, BRACE2042620, BRACE2042628, BRACE2042873, BRACE2043036, BRACE2043105, BRACE2043142, BRACE2043248, BRACE2043349, BRACE2043774, BRACE2043942, BRACE2044057, BRACE2044105, BRACE2044263, BRACE2044286, BRACE2044304, BRACE2044473, BRACE2044510, BRACE2044640, BRACE2044816, BRACE2044946, BRACE2044949, BRACE2045300, BRACE2045428, BRACE2045445, BRACE2045596, BRACE2045772, BRACE2045947, BRACE2045954, BRACE2046251, BRACE2046295, BRACE2046976, BRACE2047011, BRACE2047232, BRACE2047350, BRACE2047377, BRACE2047385, BRACE2047492, BRACE2047558, BRACE2047573, BRACE2047835, BRACE2047893, BRACE2047975, BRACE3000071, BRACE3000404, BRACE3000520, BRACE3000697, BRACE3000840, BRACE3000973, BRACE3001002, BRACE3001058, BRACE3001066, BRACE3001113, BRACE3001217, BRACE3001299, BRACE3001384, BRACE3001391, BRACE3001403, BRACE3001595, BRACE3001754, BRACE3001948, BRACE3001973, BRACE3002184, BRACE3002298, BRACE3002344, BRACE3002390, BRACE3002420, BRACE3002508, BRACE3002541, BRACE3002756, BRACE3003004, BRACE3003026, BRACE3003053, BRACE3003192, BRACE3003413, BRACE3003595, BRACE3003698, BRACE3003866, BRACE3003920, BRACE3004046, BRACE3004058, BRACE3004113, BRACE3004150, BRACE3004205, BRACE3004358, BRACE3004371, BRACE3004435, BRACE3004477, BRACE3004767, BRACE3004772, BRACE3004783, BRACE3004843, BRACE3004862, BRACE3004880, BRACE3004887, BRACE3004981, BRACE3004996, BRACE3004998, BRACE3005103, BRACE3005127, BRACE3005145, BRACE3005217, BRACE3005225, BRACE3005430, BRACE3005499, BRACE3005760, BRACE3005870, BRACE3005903, BRACE3005989, BRACE3006113, BRACE3006185, BRACE3006226, BRACE3006462, BRACE3006463, BRACE3006553, BRACE3006872, BRACE3006917, BRACE3007058, BRACE3007084, BRACE3007085, BRACE3007258, BRACE3007322, BRACE3007472, BRACE3007480, BRACE3007559, BRACE3007625, BRACE3007642, BRACE3007649, BRACE3007767, BRACE3007869, BRACE3008036, BRACE3008066, BRACE3008092, BRACE3008095, BRACE3008137, BRACE3008255, BRACE3008337, BRACE3008384, BRACE3008720, BRACE3008772, BRACE3009044, BRACE3009075, BRACE3009090, BRACE3009127, BRACE3009197, BRACE3009237, BRACE3009265, BRACE3009297, BRACE3009377, BRACE3009392, BRACE3009416, BRACE3009539, BRACE3009574, BRACE3009701, BRACE3009708, BRACE3009724, BRACE3009993, BRACE3010076, BRACE3010079, BRACE3010086, BRACE3010221, BRACE3010283, BRACE3010315, BRACE3010397, BRACE3010416, BRACE3010435, BRACE3010438, BRACE3010702, BRACE3010862, BRACE3011271, BRACE3011421, BRACE3011447, BRACE3011505, BRACE3011634, BRACE3011774, BRACE3012357, BRACE3012574, BRACE3012806, BRACE3012930, BRACE3013119, BRACE3013418, BRACE3013576, BRACE3013740, BRACE3013780, BRACE3013874, BRACE3013936, BRACE3013986, BRACE3014005, BRACE3014068, BRACE3014231, BRACE3014290, BRACE3014317, BRACE3014523, BRACE3014714, BRACE3014807, BRACE3014942, BRACE3015090, BRACE3015121, BRACE3015262, BRACE3015521, BRACE3015808, BRACE3015829, BRACE3015894, BRACE3015898, BRACE3016020, BRACE3016122, BRACE3016167, BRACE3016170, BRACE3016580, BRACE3016788, BRACE3016810, BRACE3016862, BRACE3016884, BRACE3017083, BRACE3017253, BRACE3018083, BRACE3018308, BRACE3018963, BRACE3019055, BRACE3019071, BRACE3019084, BRACE3019570, BRACE3019611, BRACE3019817, BRACE3019828, BRACE3019941, BRACE3020151, BRACE3020194, BRACE3020286, BRACE3020356, BRACE3020594, BRACE3020669, BRACE3020671, BRACE3020890, BRACE3021148, BRACE3021430, BRACE3021517, BRACE3021805, BRACE3022051, BRACE3022303, BRACE3022312, BRACE3022340, BRACE3022847, BRACE3023604, BRACE3023912, BRACE3024073, BRACE3024359, BRACE3024379, BRACE3024444, BRACE3024497, BRACE3024537, BRACE3024659, BRACE3024662, BRACE3024879, BRACE3025153, BRACE3025302, BRACE3025457, BRACE3025531, BRACE3025627, BRACE3025630, BRACE3025719, BRACE3026008, BRACE3026075, BRACE3026161, BRACE3026290, BRACE3026345, BRACE3026456, BRACE3026735, BRACE3026802, BRACE3026844, BRACE3026947, BRACE3026993, BRACE3027242, BRACE3027256, BRACE3027326, BRACE3027478, BRACE3027480, BRACE3027931, BRACE3027976, BRACE3028214, BRACE3028241, BRACE3028360, BRACE3028895, BRACE3028998, BRACE3029005, BRACE3029021, BRACE3029205, BRACE3029447, BRACE3030057, BRACE3030103, BRACE3030538, BRACE3030748, BRACE3030866, BRACE3031161, BRACE3031184, BRACE3031185, BRACE3031315, BRACE3031372, BRACE3031579, BRACE3031728, BRACE3031838, BRACE3031843, BRACE3032427, BRACE3032455, BRACE3032537, BRACE3032538, BRACE3032631, BRACE3032771, BRACE3032980, BRACE3032983, BRACE3033525, BRACE3034159, BRACE3034183, BRACE3034389, BRACE3034964, BRACE3034993, BRACE3035168, BRACE3035227, BRACE3036156, BRACE3036271, BRACE3037612, BRACE3037637, BRACE3037803, BRACE3038012, BRACE3038030, BRACE3038569, BRACE3038570, BRACE3038687, BRACE3038760, BRACE3039288, BRACE3039358, BRACE3039378, BRACE3039454, BRACE3040012, BRACE3040239, BRACE3040504, BRACE3040644, BRACE3040856, BRACE3040863, BRACE3041059, BRACE3041162, BRACE3041827, BRACE3042046, BRACE3042210, BRACE3042326, BRACE3042409, BRACE3042432, BRACE3042594, BRACE3043597, BRACE3044090, BRACE3044172, BRACE3044247, BRACE3044377, BRACE3044389, BRACE3044495, BRACE3045011, BRACE3045033, BRACE3045078, BRACE3045145, BRACE3045424, BRACE3045708, BRACE3045981, BRACE3046049, BRACE3046152, BRACE3046294, BRACE3046450, BRACE3046466, BRACE3046491, BRACE3046609, BRACE3046762, BRACE3046837, BRACE3046855, BRACE3046966, BRACE3047018, BRACE3047482, BRACE3047801, BRALZ1000047, BRALZ1000103, BRALZ2000189, BRALZ2000263, BRALZ2000988, BRALZ2001038, BRALZ2001279, BRALZ2001350, BRALZ2001445, BRALZ2001559, BRALZ2001743, BRALZ2001834, BRALZ2002174, BRALZ2002418, BRALZ2002477, BRALZ2003119, BRALZ2003330, BRALZ2003453, BRALZ2003525, BRALZ2004397, BRALZ2005467, BRALZ2005471, BRALZ2005888, BRALZ2005950, BRALZ2005992, BRALZ2006474, BRALZ2006560, BRALZ2006734, BRALZ2006800, BRALZ2006976, BRALZ2007376, BRALZ2007545, BRALZ2007576, BRALZ2007661, BRALZ2007790, BRALZ2007793, BRALZ2007952, BRALZ2008031, BRALZ2008166, BRALZ2008462, BRALZ2008617, BRALZ2008696, BRALZ2008763, BRALZ2008869, BRALZ2008930, BRALZ2009446, BRALZ2009486, BRALZ2010186, BRALZ2010842, BRALZ2011337, BRALZ2011796, BRALZ2011880, BRALZ2012050, BRALZ2012183, BRALZ2012848, BRALZ2013621, BRALZ2013690, BRALZ2014054, BRALZ2014316, BRALZ2014484, BRALZ2014951, BRALZ2015168, BRALZ2015811, BRALZ2016085, BRALZ2016498, BRALZ2017359, BRALZ2017531, BRALZ2017607, BRALZ2017620, BRALZ2017844, BRALZ2018342, BRALZ2018492, BRALZ2018834, BRALZ2019047, BRAMY1000095, BRAMY1000098, BRAMY1000130, BRAMY1000157, BRAMY1000173, BRAMY2000021, BRAMY2000025, BRAMY2000052, BRAMY2000076, BRAMY2000086, BRAMY2000151, BRAMY2000181, BRAMY2000196, BRAMY2000277, BRAMY2000388, BRAMY2000411, BRAMY2000508, BRAMY2000562, BRAMY2000585, BRAMY2000653, BRAMY2000814, BRAMY2000893, BRAMY2000946, BRAMY2000981, BRAMY2000987, BRAMY2001068, BRAMY2001114, BRAMY2001203, BRAMY2001282, BRAMY2001367, BRAMY2001427, BRAMY2001473, BRAMY2001678, BRAMY2002005, BRAMY2002044, BRAMY2002072, BRAMY2002158, BRAMY2002311, BRAMY2002339, BRAMY2002364, BRAMY2002369, BRAMY2002479, BRAMY2002493, BRAMY2002525, BRAMY2002584, BRAMY2002604, BRAMY2002621, BRAMY2002638, BRAMY2002739, BRAMY2002799, BRAMY2002853, BRAMY2002862, BRAMY2002956, BRAMY2003008, BRAMY2003037, BRAMY2003117, BRAMY2003287, BRAMY2003529, BRAMY2003538, BRAMY2003585, BRAMY2003634, BRAMY2003653, BRAMY2003681, BRAMY2003893, BRAMY2003897, BRAMY2003898, BRAMY2003904, BRAMY2003926, BRAMY2003929, BRAMY2004031, BRAMY2004058, BRAMY2004183, BRAMY2004335, BRAMY2004351, BRAMY2004352, BRAMY2004363, BRAMY2004387, BRAMY2004492, BRAMY2004524, BRAMY2004537, BRAMY2004542, BRAMY2004756, BRAMY2004771, BRAMY2005052, BRAMY2005064, BRAMY2005094, BRAMY2005151, BRAMY2005182, BRAMY2005244, BRAMY2005391, BRAMY2005488, BRAMY2005576, BRAMY2005648, BRAMY2005662, BRAMY2005708, BRAMY2005711, BRAMY2006092, BRAMY2006118, BRAMY2006149, BRAMY2006366, BRAMY2006375, BRAMY2006397, BRAMY2006411, BRAMY2006459, BRAMY2006466, BRAMY2006659, BRAMY2006779, BRAMY2006809, BRAMY2006879, BRAMY2007043, BRAMY2007078, BRAMY2007110, BRAMY2007185, BRAMY2007244, BRAMY2007249, BRAMY2007255, BRAMY2007287, BRAMY2007308, BRAMY2007411, BRAMY2007458, BRAMY2007486, BRAMY2007546, BRAMY2007567, BRAMY2007594, BRAMY2007610, BRAMY2007653, BRAMY2007753, BRAMY2007859, BRAMY2008333, BRAMY2008382, BRAMY2008563, BRAMY2008583, BRAMY2008977, BRAMY2008979, BRAMY2009013, BRAMY2009023, BRAMY2009034, BRAMY2009105, BRAMY2009123, BRAMY2009192, BRAMY2009344, BRAMY2009349, BRAMY2009394, BRAMY2009489, BRAMY2009508, BRAMY2009528, BRAMY2009557, BRAMY2009612, BRAMY2009693, BRAMY2009934, BRAMY2010068, BRAMY2010135, BRAMY2010145, BRAMY2010171, BRAMY2010208, BRAMY2010239, BRAMY2010272, BRAMY2010290, BRAMY2010357, BRAMY2010366, BRAMY2010395, BRAMY2010441, BRAMY2010442, BRAMY2010464, BRAMY2010581, BRAMY2010798, BRAMY2010808, BRAMY2010919, BRAMY2011064, BRAMY2011105, BRAMY2011178, BRAMY2011196, BRAMY2011216, BRAMY2011253, BRAMY2011446, BRAMY2011480, BRAMY2011639, BRAMY2011679, BRAMY2011811, BRAMY2011841, BRAMY2011846, BRAMY2011849, BRAMY2011872, BRAMY2011961, BRAMY2012017, BRAMY2012091, BRAMY2012119, BRAMY2012162, BRAMY2012163, BRAMY2012277, BRAMY2012340, BRAMY2012497, BRAMY2012517, BRAMY2012536, BRAMY2012555, BRAMY2012568, BRAMY2012581, BRAMY2012691, BRAMY2012721, BRAMY2012731, BRAMY2012776, BRAMY2012880, BRAMY2012881, BRAMY2013169, BRAMY2013200, BRAMY2013216, BRAMY2013405, BRAMY2013414, BRAMY2013572, BRAMY2013590, BRAMY2013621, BRAMY2013659, BRAMY2013722, BRAMY2013736, BRAMY2013756, BRAMY2013944, BRAMY2013975, BRAMY2014019, BRAMY2014205, BRAMY2014387, BRAMY2014462, BRAMY2014469, BRAMY2014541, BRAMY2014754, BRAMY2014813, BRAMY2015211, BRAMY2015251, BRAMY2015311, BRAMY2015420, BRAMY2015503, BRAMY2015516, BRAMY2015550, BRAMY2015551, BRAMY2015559, BRAMY2015688, BRAMY2015705, BRAMY2015855, BRAMY2015890, BRAMY2015911, BRAMY2015925, BRAMY2016002, BRAMY2016009, BRAMY2016020, BRAMY2016070, BRAMY2016251, BRAMY2016325, BRAMY2016327, BRAMY2016386, BRAMY2016706, BRAMY2016771, BRAMY2016892, BRAMY2016938, BRAMY2016953, BRAMY2017014, BRAMY2017249, BRAMY2017348, BRAMY2017450, BRAMY2017455, BRAMY2017528, BRAMY2017864, BRAMY2018027, BRAMY2018106, BRAMY2018122, BRAMY2018126, BRAMY2018272, BRAMY2018273, BRAMY2018279, BRAMY2018295, BRAMY2018308, BRAMY2018396, BRAMY2018467, BRAMY2018635, BRAMY2018785, BRAMY2019055, BRAMY2019111, BRAMY2019277, BRAMY2019300, BRAMY2019468, BRAMY2019509, BRAMY2019600, BRAMY2019643, BRAMY2019710, BRAMY2019963, BRAMY2019985, BRAMY2019989, BRAMY2020050, BRAMY2020058, BRAMY2020106, BRAMY2020270, BRAMY2020354, BRAMY2020355, BRAMY2020412, BRAMY2020445, BRAMY2020466, BRAMY2020520, BRAMY2020574, BRAMY2020634, BRAMY2020713, BRAMY2021040, BRAMY2021063, BRAMY2021098, BRAMY2021139, BRAMY2021142, BRAMY2021276, BRAMY2021310, BRAMY2021388, BRAMY2021498, BRAMY2021523, BRAMY2021732, BRAMY2021746, BRAMY2021825, BRAMY2021867, BRAMY2021962, BRAMY2021982, BRAMY2022052, BRAMY2022160, BRAMY2022168, BRAMY2022263, BRAMY2022301, BRAMY2022320, BRAMY2022383, BRAMY2022445, BRAMY2022454, BRAMY2022493, BRAMY2022525, BRAMY2022532, BRAMY2022723, BRAMY2022786, BRAMY2022796, BRAMY2022929, BRAMY2022980, BRAMY2022984, BRAMY2023060, BRAMY2023110, BRAMY2023115, BRAMY2023161, BRAMY2023172, BRAMY2023238, BRAMY2023327, BRAMY2023358, BRAMY2023406, BRAMY2023482, BRAMY2023514, BRAMY2023729, BRAMY2023786, BRAMY2023852, BRAMY2023863, BRAMY2023939, BRAMY2024004, BRAMY2024073, BRAMY2024312, BRAMY2024374, BRAMY2024390, BRAMY2024416, BRAMY2024449, BRAMY2024489, BRAMY2024497, BRAMY2024514, BRAMY2024530, BRAMY2024535, BRAMY2024545, BRAMY2024576, BRAMY2024593, BRAMY2024711, BRAMY2024715, BRAMY2024728, BRAMY2024827, BRAMY2024849, BRAMY2025024, BRAMY2025032, BRAMY2025121, BRAMY2025175, BRAMY2025218, BRAMY2025230, BRAMY2025272, BRAMY2025277, BRAMY2025495, BRAMY2025812, BRAMY2025996, BRAMY2026009, BRAMY2026091, BRAMY2026168, BRAMY2026300, BRAMY2026347, BRAMY2026395, BRAMY2026405, BRAMY2026533, BRAMY2026538, BRAMY2026685, BRAMY2026713, BRAMY2026778, BRAMY2026824, BRAMY2026899, BRAMY2026902, BRAMY2026904, BRAMY2026976, BRAMY2027073, BRAMY2027114, BRAMY2027140, BRAMY2027242, BRAMY2027396, BRAMY2027451, BRAMY2027461, BRAMY2027467, BRAMY2027587, BRAMY2027714, BRAMY2027717, BRAMY2027752, BRAMY2027782, BRAMY2028072, BRAMY2028183, BRAMY2028188, BRAMY2028269, BRAMY2028282, BRAMY2028472, BRAMY2028491, BRAMY2028516, BRAMY2028565, BRAMY2028593, BRAMY2028682, BRAMY2028740, BRAMY2028783, BRAMY2028796, BRAMY2028856, BRAMY2028914, BRAMY2029204, BRAMY2029602, BRAMY2030098, BRAMY2030109, BRAMY2030206, BRAMY2030477, BRAMY2030545, BRAMY2030607, BRAMY2030702, BRAMY2030703, BRAMY2030768, BRAMY2030799, BRAMY2030859, BRAMY2030915, BRAMY2031317, BRAMY2031377, BRAMY2031442, BRAMY2031516, BRAMY2032014, BRAMY2032087, BRAMY2032231, BRAMY2032242, BRAMY2032290, BRAMY2032311, BRAMY2032317, BRAMY2032344, BRAMY2032589, BRAMY2032678, BRAMY2032696, BRAMY2032777, BRAMY2032994, BRAMY2033003, BRAMY2033116, BRAMY2033240, BRAMY2033267, BRAMY2033316, BRAMY2033332, BRAMY2033506, BRAMY2033594, BRAMY2033895, BRAMY2033914, BRAMY2034072, BRAMY2034185, BRAMY2034187, BRAMY2034305, BRAMY2034561, BRAMY2034920, BRAMY2034993, BRAMY2035070, BRAMY2035449, BRAMY2035545, BRAMY2035606, BRAMY2035718, BRAMY2035719, BRAMY2035801, BRAMY2035869, BRAMY2035923, BRAMY2036076, BRAMY2036079, BRAMY2036254, BRAMY2036266, BRAMY2036387, BRAMY2036396, BRAMY2036459, BRAMY2036567, BRAMY2036615, BRAMY2036699, BRAMY2036913, BRAMY2036918, BRAMY2036968, BRAMY2037147, BRAMY2037328, BRAMY2037609, BRAMY2037629, BRAMY2037800, BRAMY2037823, BRAMY2037971, BRAMY2038100, BRAMY2038128, BRAMY2038317, BRAMY2038475, BRAMY2038484, BRAMY2038516, BRAMY2038846, BRAMY2038887, BRAMY2038904, BRAMY2039287, BRAMY2039300, BRAMY2039314, BRAMY2039341, BRAMY2039630, BRAMY2039695, BRAMY2039728, BRAMY2039872, BRAMY2040051, BRAMY2040159, BRAMY2040214, BRAMY2040478, BRAMY2040592, BRAMY2040915, BRAMY2041261, BRAMY2041347, BRAMY2041378, BRAMY2041384, BRAMY2041434, BRAMY2041507, BRAMY2041542, BRAMY2041738, BRAMY2042122, BRAMY2042131, BRAMY2042178, BRAMY2042195, BRAMY2042244, BRAMY2042549, BRAMY2042596, BRAMY2042612, BRAMY2042641, BRAMY2042711, BRAMY2042760, BRAMY2042804, BRAMY2042899, BRAMY2042918, BRAMY2043069, BRAMY2043103, BRAMY2043314, BRAMY2043345, BRAMY2044246, BRAMY2044317, BRAMY2044349, BRAMY2044686, BRAMY2044838, BRAMY2045036, BRAMY2045299, BRAMY2045471, BRAMY2046109, BRAMY2046478, BRAMY2046489, BRAMY2046537, BRAMY2046667, BRAMY2046742, BRAMY2046871, BRAMY2046984, BRAMY2046989, BRAMY2047169, BRAMY2047280, BRAMY2047420, BRAMY2047676, BRAMY2047692, BRAMY2047746, BRAMY2047751, BRAMY2047765, BRAMY2047884, BRAMY2047948, BRAMY3000206, BRAMY3000210, BRAMY3000213, BRAMY3000224, BRAMY3000254, BRAMY3000307, BRAMY3000692, BRAMY3001356, BRAMY3001401, BRAMY3001409, BRAMY3001794, BRAMY3002120, BRAMY3002312, BRAMY3002329, BRAMY3002458, BRAMY3002508, BRAMY3002620, BRAMY3002803, BRAMY3002805, BRAMY3002886, BRAMY3002991, BRAMY3003026, BRAMY3003109, BRAMY3003205, BRAMY3003310, BRAMY3003566, BRAMY3003723, BRAMY3004126, BRAMY3004224, BRAMY3004364, BRAMY3004672, BRAMY3004800, BRAMY3004900, BRAMY3004919, BRAMY3005091, BRAMY3005184, BRAMY3005656, BRAMY3005912, BRAMY3005932, BRAMY3006032, BRAMY3006297, BRAMY3006761, BRAMY3007078, BRAMY3007206, BRAMY3007311, BRAMY3007350, BRAMY3007449, BRAMY3007471, BRAMY3007609, BRAMY3007723, BRAMY3007968, BRAMY3008044, BRAMY3008088, BRAMY3008096, BRAMY3008335, BRAMY3008466, BRAMY3008505, BRAMY3008650, BRAMY3008937, BRAMY3009158, BRAMY3009207, BRAMY3009491, BRAMY3009556, BRAMY3009782, BRAMY3009811, BRAMY3009904, BRAMY3010264, BRAMY3010321, BRAMY3010411, BRAMY3010492, BRAMY3010603, BRAMY3010654, BRAMY4000089, BRAMY4000095, BRAMY4000229, BRAMY4000277, BRAMY4000915, BRAMY4000962, BRAMY4001173, BRAMY4001200, BRAMY4001234, BRAMY4001449, BRAMY4001652, BRAMY4001863, BRAMY4001913, BRAMY4002575, BRASW1000053, BRASW1000125, BRAWH1000001, BRAWH1000002, BRAWH1000007, BRAWH1000037, BRAWH1000045, BRAWH1000116, BRAWH1000127, BRAWH1000130, BRAWH1000157, BRAWH1000162, BRAWH1000164, BRAWH1000168, BRAWH1000174, BRAWH1000180, BRAWH1000369, BRAWH2000034, BRAWH2000048, BRAWH2000071, BRAWH2000082, BRAWH2000093, BRAWH2000109, BRAWH2000131, BRAWH2000142, BRAWH2000169, BRAWH2000218, BRAWH2000232, BRAWH2000248, BRAWH2000256, BRAWH2000274, BRAWH2000323, BRAWH2000353, BRAWH2000370, BRAWH2000409, BRAWH2000443, BRAWH2000471, BRAWH2000476, BRAWH2000482, BRAWH2000488, BRAWH2000494, BRAWH2000500, BRAWH2000503, BRAWH2000554, BRAWH2000595, BRAWH2000636, BRAWH2000643, BRAWH2000651, BRAWH2000682, BRAWH2000686, BRAWH2000697, BRAWH2000752, BRAWH2000859, BRAWH2000866, BRAWH2000892, BRAWH2000901, BRAWH2000926, BRAWH2000984, BRAWH2001019, BRAWH2001037, BRAWH2001052, BRAWH2001129, BRAWH2001137, BRAWH2001159, BRAWH2001171, BRAWH2001203, BRAWH2001238, BRAWH2001239, BRAWH2001255, BRAWH2001355, BRAWH2001378, BRAWH2001395, BRAWH2001406, BRAWH2001412, BRAWH2001418, BRAWH2001424, BRAWH2001436, BRAWH2001438, BRAWH2001439, BRAWH2001459, BRAWH2001461, BRAWH2001484, BRAWH2001492, BRAWH2001503, BRAWH2001519, BRAWH2001530, BRAWH2001535, BRAWH2001589, BRAWH2001662, BRAWH2001666, BRAWH2001671, BRAWH2001679, BRAWH2001686, BRAWH2001701, BRAWH2001842, BRAWH2001862, BRAWH2001873, BRAWH2001940, BRAWH2001973, BRAWH2002047, BRAWH2002060, BRAWH2002062, BRAWH2002125, BRAWH2002191, BRAWH2002333, BRAWH2002352, BRAWH2002383, BRAWH2002549, BRAWH2002560, BRAWH2002623, BRAWH2002630, BRAWH2002635, BRAWH2002662, BRAWH2002679, BRAWH2002725, BRAWH2002761, BRAWH2002811, BRAWH2002861, BRAWH2002911, BRAWH2002963, BRAWH2002967, BRAWH2002976, BRAWH2003000, BRAWH2003135, BRAWH2003240, BRAWH2003307, BRAWH2003355, BRAWH2003366, BRAWH2003662, BRAWH2003689, BRAWH2003693, BRAWH2003832, BRAWH2003948, BRAWH2003964, BRAWH2004044, BRAWH2004068, BRAWH2004078, BRAWH2004136, BRAWH2004217, BRAWH2004731, BRAWH2004779, BRAWH2004842, BRAWH2004884, BRAWH2004923, BRAWH2005008, BRAWH2005068, BRAWH2005074, BRAWH2005225, BRAWH2005315, BRAWH2005517, BRAWH2005524, BRAWH2005533, BRAWH2005578, BRAWH2005812, BRAWH2005974, BRAWH2005998, BRAWH2006044, BRAWH2006083, BRAWH2006207, BRAWH2006301, BRAWH2006395, BRAWH2006450, BRAWH2006493, BRAWH2006526, BRAWH2006543, BRAWH2006622, BRAWH2006760, BRAWH2006960, BRAWH2006989, BRAWH2007069, BRAWH2007308, BRAWH2007406, BRAWH2007550, BRAWH2007570, BRAWH2007591, BRAWH2007658, BRAWH2007664, BRAWH2007808, BRAWH2007825, BRAWH2007862, BRAWH2007890, BRAWH2008058, BRAWH2008255, BRAWH2008297, BRAWH2008366, BRAWH2008380, BRAWH2008540, BRAWH2008577, BRAWH2008706, BRAWH2008790, BRAWH2008903, BRAWH2008956, BRAWH2008993, BRAWH2009112, BRAWH2009227, BRAWH2009238, BRAWH2009261, BRAWH2009263, BRAWH2009298, BRAWH2009307, BRAWH2009360, BRAWH2009393, BRAWH2009485, BRAWH2009490, BRAWH2009558, BRAWH2009590, BRAWH2009626, BRAWH2009678, BRAWH2009695, BRAWH2009907, BRAWH2010000, BRAWH2010069, BRAWH2010084, BRAWH2010136, BRAWH2010318, BRAWH2010329, BRAWH2010354, BRAWH2010364, BRAWH2010536, BRAWH2010552, BRAWH2010584, BRAWH2010618, BRAWH2010619, BRAWH2010754, BRAWH2010980, BRAWH2011066, BRAWH2011079, BRAWH2011096, BRAWH2011155, BRAWH2011166, BRAWH2011204, BRAWH2011294, BRAWH2011400, BRAWH2011762, BRAWH2011795, BRAWH2011796, BRAWH2011812, BRAWH2011823, BRAWH2011860, BRAWH2011920, BRAWH2011958, BRAWH2012054, BRAWH2012077, BRAWH2012161, BRAWH2012162, BRAWH2012164, BRAWH2012258, BRAWH2012277, BRAWH2012326, BRAWH2012538, BRAWH2012540, BRAWH2012619, BRAWH2012698, BRAWH2012749, BRAWH2012827, BRAWH2012866, BRAWH2012963, BRAWH2013047, BRAWH2013219, BRAWH2013294, BRAWH2013748, BRAWH2013866, BRAWH2013871, BRAWH2013914, BRAWH2013941, BRAWH2013955, BRAWH2014053, BRAWH2014234, BRAWH2014379, BRAWH2014414, BRAWH2014473, BRAWH2014511, BRAWH2014662, BRAWH2014717, BRAWH2014729, BRAWH2014876, BRAWH2014934, BRAWH2014954, BRAWH2015247, BRAWH2015349, BRAWH2015375, BRAWH2015385, BRAWH2015595, BRAWH2015728, BRAWH2015853, BRAWH2015866, BRAWH2016028, BRAWH2016160, BRAWH2016221, BRAWH2016223, BRAWH2016305, BRAWH2016439, BRAWH2016446, BRAWH2016514, BRAWH2016562, BRAWH2016655, BRAWH2016679, BRAWH2016702, BRAWH2016724, BRAWH2016785, BRAWH2016792, BRAWH2016800, BRAWH2017002, BRAWH2017103, BRAWH2017250, BRAWH2017294, BRAWH2017304, BRAWH2017305, BRAWH2017379, BRAWH2017407, BRAWH2017433, BRAWH2017523, BRAWH2017534, BRAWH2017542, BRAWH2017635, BRAWH2017913, BRAWH2018206, BRAWH2018267, BRAWH2018282, BRAWH2018317, BRAWH2018506, BRAWH2018514, BRAWH2018601, BRAWH2018745, BRAWH2018875, BRAWH2019053, BRAWH2019055, BRAWH2019198, BRAWH3000078, BRAWH3000088, BRAWH3000100, BRAWH3000166, BRAWH3000314, BRAWH3000329, BRAWH3000410, BRAWH3000446, BRAWH3000491, BRAWH3000604, BRAWH3000884, BRAWH3001053, BRAWH3001319, BRAWH3001326, BRAWH3001475, BRAWH3001636, BRAWH3001638, BRAWH3001712, BRAWH3001760, BRAWH3001783, BRAWH3001833, BRAWH3001879, BRAWH3001891, BRAWH3001918, BRAWH3002433, BRAWH3002513, BRAWH3002574, BRAWH3002600, BRAWH3002819, BRAWH3003019, BRAWH3003136, BRAWH3003244, BRAWH3003343, BRAWH3003411, BRAWH3003522, BRAWH3003573, BRAWH3003598, BRAWH3003727, BRAWH3003801, BRAWH3003975, BRAWH3004222, BRAWH3004335, BRAWH3004350, BRAWH3004453, BRAWH3004530, BRAWH3004666, BRAWH3005037, BRAWH3005047, BRAWH3005132, BRAWH3005146, BRAWH3005292, BRAWH3005300, BRAWH3005422, BRAWH3005534, BRAWH3005886, BRAWH3005892, BRAWH3005896, BRAWH3005912, BRAWH3005981, BRAWH3006547, BRAWH3006548, BRAWH3006761, BRAWH3006792, BRAWH3007129, BRAWH3007221, BRAWH3007441, BRAWH3007455, BRAWH3007506, BRAWH3007726, BRAWH3007783, BRAWH3008167, BRAWH3008341, BRAWH3008559, BRAWH3008697, BRAWH3008867, BRAWH3009017, BRAWH3009285, BRAWH3009297, BRAWH3009546, BRAWH3009961, BRAWH3010461, BRAWH3010560, BRAWH3010602, BRAWH3010657, BRAWH3010726, BRAWH3010833, BRAWH3011101, BRAWH3011331, BRAWH3011402, BRAWH3011577, BRAWH3011623, BRAWH3011637, BRAWH3011685, BRAWH3011907, BRAWH3011929, BRAWH3012005, BRAWH3012662, BRAWH3012779, BRAWH3013009, BRAWH3013049, BRAWH3013197, BRAWH3013264, BRAWH3013508, BRAWH3014609, BRAWH3014639, BRAWH3015017, BRAWH3015175, BRAWH3015260, BRAWH3015610, BRAWH3015825, BRAWH3016123, BRAWH3016271, BRAWH3016715, BRAWH3017259, BRAWH3017260, BRAWH3017477, BRAWH3017537, BRAWH3017980, BRAWH3018063, BRAWH3018369, BRAWH3018548, BRAWH3018969, BRAWH3019026, BRAWH3019529, BRAWH3019594, BRAWH3019629, BRAWH3019820, BRAWH3020200, BRAWH3020318, BRAWH3020486, BRAWH3020884, BRAWH3020928, BRAWH3021012, BRAWH3021545, BRAWH3021574, BRAWH3021580, BRAWH3021641, BRAWH3021643, BRAWH3021724, BRAWH3022347, BRAWH3022431, BRAWH3022459, BRAWH3022542, BRAWH3022719, BRAWH3022866, BRAWH3022900, BRAWH3023156, BRAWH3023168, BRAWH3023172, BRAWH3023274, BRAWH3023421, BRAWH3024231, BRAWH3024242, BRAWH3024469, BRAWH3024506, BRAWH3024613, BRAWH3026349, BRAWH3026394, BRAWH3026529, BRAWH3027420, BRAWH3027440, BRAWH3027533, BRAWH3027574, BRAWH3027607, BRAWH3027616, BRAWH3027675, BRAWH3027806, BRAWH3027880, BRAWH3027927, BRAWH3028202, BRAWH3028223, BRAWH3028306, BRAWH3028461, BRAWH3028645, BRAWH3028754, BRAWH3028796, BRAWH3029254, BRAWH3029313, BRAWH3029538, BRAWH3029556, BRAWH3029806, BRAWH3030613, BRAWH3030772, BRAWH3030810, BRAWH3030892, BRAWH3030910, BRAWH3030950, BRAWH3031054, BRAWH3031710, BRAWH3031902, BRAWH3032298, BRAWH3032340, BRAWH3032571, BRAWH3032620, BRAWH3032930, BRAWH3033117, BRAWH3033293, BRAWH3033448, BRAWH3033513, BRAWH3034097, BRAWH3034114, BRAWH3034134, BRAWH3034668, BRAWH3034743, BRAWH3034775, BRAWH3034890, BRAWH3035154, BRAWH3035403, BRAWH3035904, BRAWH3035914, BRAWH3035936, BRAWH3036077, BRAWH3036247, BRAWH3036270, BRAWH3036561, BRAWH3036738, BRAWH3036951, BRAWH3037265, BRAWH3037394, BRAWH3037533, BRAWH3037979, BRAWH3038055, BRAWH3038230, BRAWH3038252, BRAWH3038324, BRCAN1000065, BRCAN1000076, BRCAN1000105, BRCAN1000168, BRCAN2000148, BRCAN2000149, BRCAN2000209, BRCAN2000239, BRCAN2000346, BRCAN2000364, BRCAN2000383, BRCAN2000418, BRCAN2000523, BRCAN2000541, BRCAN2000563, BRCAN2000577, BRCAN2000620, BRCAN2000639, BRCAN2000763, BRCAN2000832, BRCAN2000923, BRCAN2001223, BRCAN2001866, BRCAN2002173, BRCAN2002416, BRCAN2002473, BRCAN2002562, BRCAN2002662, BRCAN2002826, BRCAN2002854, BRCAN2002856, BRCAN2002892, BRCAN2002944, BRCAN2002948, BRCAN2003070, BRCAN2003269, BRCAN2003389, BRCAN2003628, BRCAN2003703, BRCAN2003746, BRCAN2003814, BRCAN2003987, BRCAN2004173, BRCAN2004355, BRCAN2004371, BRCAN2004653, BRCAN2004699, BRCAN2005436, BRCAN2005449, BRCAN2006019, BRCAN2006051, BRCAN2006063, BRCAN2006117, BRCAN2006174, BRCAN2006290, BRCAN2006297, BRCAN2006323, BRCAN2006401, BRCAN2006411, BRCAN2006450, BRCAN2006955, BRCAN2007119, BRCAN2007144, BRCAN2007426, BRCAN2007525, BRCAN2008494, BRCAN2008528, BRCAN2008701, BRCAN2008894, BRCAN2009156, BRCAN2009168, BRCAN2009203, BRCAN2009432, BRCAN2010374, BRCAN2010376, BRCAN2010547, BRCAN2010581, BRCAN2010665, BRCAN2011254, BRCAN2011316, BRCAN2011602, BRCAN2011946, BRCAN2012110, BRCAN2012355, BRCAN2012402, BRCAN2012408, BRCAN2012481, BRCAN2012613, BRCAN2012713, BRCAN2012929, BRCAN2013655, BRCAN2013660, BRCAN2014143, BRCAN2014229, BRCAN2014370, BRCAN2014602, BRCAN2014652, BRCAN2014788, BRCAN2014881, BRCAN2014952, BRCAN2015371, BRCAN2015402, BRCAN2015464, BRCAN2015719, BRCAN2015757, BRCAN2015886, BRCAN2016025, BRCAN2016046, BRCAN2016174, BRCAN2016433, BRCAN2016762, BRCAN2016814, BRCAN2017442, BRCAN2017905, BRCAN2018240, BRCAN2018269, BRCAN2018490, BRCAN2018667, BRCAN2018748, BRCAN2018935, BRCAN2019002, BRCAN2019387, BRCAN2019653, BRCAN2019773, BRCAN2019907, BRCAN2020234, BRCAN2020331, BRCAN2020412, BRCAN2020467, BRCAN2020710, BRCAN2020880, BRCAN2021024, BRCAN2021028, BRCAN2021325, BRCAN2021452, BRCAN2021669, BRCAN2021718, BRCAN2022126, BRCAN2022191, BRCAN2022472, BRCAN2022474, BRCAN2023347, BRCAN2023724, BRCAN2024451, BRCAN2024563, BRCAN2024572, BRCAN2025009, BRCAN2025093, BRCAN2025349, BRCAN2025368, BRCAN2025712, BRCAN2025982, BRCAN2026117, BRCAN2026197, BRCAN2026340, BRCAN2026711, BRCAN2027150, BRCAN2027310, BRCAN2027334, BRCAN2027355, BRCAN2027364, BRCAN2027513, BRCAN2027593, BRCAN2027970, BRCAN2028021, BRCAN2028040, BRCAN2028319, BRCAN2028338, BRCAN2028355, BRCAN2028378, BRCAN2028460, BRCAN2028545, BRCAN2028634, BRCAN2028702, BRCOC1000087, BRCOC1000094, BRCOC2000004, BRCOC2000047, BRCOC2000152, BRCOC2000184, BRCOC2000186, BRCOC2000333, BRCOC2000360, BRCOC2000404, BRCOC2000487, BRCOC2000637, BRCOC2000670, BRCOC2000816, BRCOC2000850, BRCOC2001355, BRCOC2002085, BRCOC2002155, BRCOC2002323, BRCOC2002659, BRCOC2002664, BRCOC2002686, BRCOC2002751, BRCOC2002756, BRCOC2002777, BRCOC2002835, BRCOC2003100, BRCOC2003125, BRCOC2003213, BRCOC2003513, BRCOC2003732, BRCOC2003740, BRCOC2004036, BRCOC2004175, BRCOC2004354, BRCOC2004455, BRCOC2004950, BRCOC2005542, BRCOC2005903, BRCOC2005951, BRCOC2006164, BRCOC2006189, BRCOC2006243, BRCOC2006270, BRCOC2006639, BRCOC2006942, BRCOC2007034, BRCOC2007593, BRCOC2007733, BRCOC2007769, BRCOC2008064, BRCOC2008225, BRCOC2008642, BRCOC2008993, BRCOC2009052, BRCOC2009196, BRCOC2009380, BRCOC2009638, BRCOC2009937, BRCOC2010115, BRCOC2010123, BRCOC2010510, BRCOC2010980, BRCOC2010994, BRCOC2011010, BRCOC2011398, BRCOC2011418, BRCOC2011506, BRCOC2011769, BRCOC2011996, BRCOC2012229, BRCOC2012386, BRCOC2012551, BRCOC2012813, BRCOC2013448, BRCOC2013573, BRCOC2013675, BRCOC2013780, BRCOC2014013, BRCOC2014033, BRCOC2014400, BRCOC2014748, BRCOC2014833, BRCOC2015597, BRCOC2015824, BRCOC2015944, BRCOC2016525, BRCOC2016661, BRCOC2017061, BRCOC2017652, BRCOC2017856, BRCOC2018775, BRCOC2019255, BRCOC2019549, BRCOC2019841, BRCOC2019896, BRCOC2019903, BRCOC2019910, BRCOC2019934, BRCOC2020122, BRCOC2020142, BRHIP1000058, BRHIP1000072, BRHIP1000108, BRHIP1000129, BRHIP1000174, BRHIP1000258, BRHIP2000079, BRHIP2000087, BRHIP2000163, BRHIP2000210, BRHIP2000239, BRHIP2000245, BRHIP2000312, BRHIP2000359, BRHIP2000445, BRHIP2000506, BRHIP2000532, BRHIP2000553, BRHIP2000621, BRHIP2000691, BRHIP2000826, BRHIP2000920, BRHIP2001074, BRHIP2001099, BRHIP2001686, BRHIP2001782, BRHIP2001802, BRHIP2001805, BRHIP2001886, BRHIP2001927, BRHIP2002122, BRHIP2002143, BRHIP2002172, BRHIP2002339, BRHIP2002346, BRHIP2002510, BRHIP2002664, BRHIP2002722, BRHIP2002929, BRHIP2003048, BRHIP2003062, BRHIP2003242, BRHIP2003272, BRHIP2003748, BRHIP2003786, BRHIP2003828, BRHIP2003917, BRHIP2004312, BRHIP2004355, BRHIP2004359, BRHIP2004814, BRHIP2004883, BRHIP2004902, BRHIP2005010, BRHIP2005236, BRHIP2005271, BRHIP2005354, BRHIP2005600, BRHIP2005719, BRHIP2005724, BRHIP2005752, BRHIP2005932, BRHIP2006617, BRHIP2006782, BRHIP2006800, BRHIP2006819, BRHIP2006921, BRHIP2007305, BRHIP2007307, BRHIP2007616, BRHIP2007690, BRHIP2007741, BRHIP2007928, BRHIP2007969, BRHIP2008389, BRHIP2008607, BRHIP2008756, BRHIP2008909, BRHIP2009019, BRHIP2009177, BRHIP2009340, BRHIP2009351, BRHIP2009414, BRHIP2009474, BRHIP2009617, BRHIP2009685, BRHIP2010309, BRHIP2010444, BRHIP2010487, BRHIP2010571, BRHIP2010593, BRHIP2010610, BRHIP2010723, BRHIP2010744, BRHIP2011080, BRHIP2011120, BRHIP2011199, BRHIP2011508, BRHIP2011576, BRHIP2011616, BRHIP2011783, BRHIP2011838, BRHIP2011891, BRHIP2011933, BRHIP2012054, BRHIP2012059, BRHIP2012141, BRHIP2012314, BRHIP2012360, BRHIP2012545, BRHIP2012580, BRHIP2012627, BRHIP2012642, BRHIP2012750, BRHIP2012922, BRHIP2012923, BRHIP2012972, BRHIP2013286, BRHIP2013447, BRHIP2013510, BRHIP2013699, BRHIP2013723, BRHIP2013958, BRHIP2013972, BRHIP2014228, BRHIP2014285, BRHIP2014291, BRHIP2014373, BRHIP2014386, BRHIP2014387, BRHIP2014954, BRHIP2015224, BRHIP2015245, BRHIP2015356, BRHIP2015360, BRHIP2015679, BRHIP2016005, BRHIP2016125, BRHIP2016788, BRHIP2016968, BRHIP2016990, BRHIP2017010, BRHIP2017315, BRHIP2017385, BRHIP2017404, BRHIP2017542, BRHIP2017553, BRHIP2017642, BRHIP2017714, BRHIP2017780, BRHIP2017945, BRHIP2018014, BRHIP2018369, BRHIP2018612, BRHIP2018635, BRHIP2018650, BRHIP2018719, BRHIP2018805, BRHIP2018998, BRHIP2019007, BRHIP2019047, BRHIP2019149, BRHIP2019177, BRHIP2019291, BRHIP2019494, BRHIP2019589, BRHIP2019641, BRHIP2019819, BRHIP2019884, BRHIP2019972, BRHIP2020182, BRHIP2020509, BRHIP2020573, BRHIP2020622, BRHIP2020695, BRHIP2020743, BRHIP2020842, BRHIP2020859, BRHIP2020930, BRHIP2021102, BRHIP2021289, BRHIP2021495, BRHIP2021615, BRHIP2021744, BRHIP2021858, BRHIP2021870, BRHIP2021929, BRHIP2022006, BRHIP2022054, BRHIP2022221, BRHIP2022228, BRHIP2022298, BRHIP2022326, BRHIP2022467, BRHIP2022708, BRHIP2022986, BRHIP2023071, BRHIP2023229, BRHIP2023272, BRHIP2023292, BRHIP2023309, BRHIP2023369, BRHIP2023438, BRHIP2023695, BRHIP2023735, BRHIP2023762, BRHIP2023773, BRHIP2023860, BRHIP2023869, BRHIP2024046, BRHIP2024165, BRHIP2024201, BRHIP2024347, BRHIP2024549, BRHIP2024789, BRHIP2024911, BRHIP2024941, BRHIP2025245, BRHIP2025366, BRHIP2025448, BRHIP2025679, BRHIP2025739, BRHIP2025797, BRHIP2026021, BRHIP2026061, BRHIP2026155, BRHIP2026214, BRHIP2026288, BRHIP2026346, BRHIP2026557, BRHIP2026723, BRHIP2026877, BRHIP2027017, BRHIP2027054, BRHIP2027077, BRHIP2027563, BRHIP2027685, BRHIP2027762, BRHIP2028187, BRHIP2028303, BRHIP2028330, BRHIP2028480, BRHIP2028583, BRHIP2028593, BRHIP2029176, BRHIP2029283, BRHIP2029393, BRHIP2029529, BRHIP2029643, BRHIP2029663, BRHIP3000060, BRHIP3000070, BRHIP3000081, BRHIP3000131, BRHIP3000240, BRHIP3000377, BRHIP3000457, BRHIP3000475, BRHIP3000488, BRHIP3000526, BRHIP3000626, BRHIP3000859, BRHIP3000907, BRHIP3001076, BRHIP3001079, BRHIP3001141, BRHIP3001283, BRHIP3001338, BRHIP3001360, BRHIP3001481, BRHIP3001878, BRHIP3001964, BRHIP3002114, BRHIP3002124, BRHIP3002141, BRHIP3002363, BRHIP3002691, BRHIP3002920, BRHIP3002931, BRHIP3003063, BRHIP3003126, BRHIP3003306, BRHIP3003340, BRHIP3003395, BRHIP3003484, BRHIP3003644, BRHIP3003688, BRHIP3003795, BRHIP3003961, BRHIP3003984, BRHIP3004193, BRHIP3004416, BRHIP3004710, BRHIP3004725, BRHIP3004774, BRHIP3004786, BRHIP3004863, BRHIP3004968, BRHIP3005037, BRHIP3005137, BRHIP3005142, BRHIP3005231, BRHIP3005307, BRHIP3005574, BRHIP3005673, BRHIP3005768, BRHIP3005801, BRHIP3005944, BRHIP3006279, BRHIP3006294, BRHIP3006390, BRHIP3006449, BRHIP3006683, BRHIP3006717, BRHIP3006786, BRHIP3006950, BRHIP3007172, BRHIP3007183, BRHIP3007195, BRHIP3007223, BRHIP3007239, BRHIP3007291, BRHIP3007409, BRHIP3007424, BRHIP3007483, BRHIP3007586, BRHIP3007609, BRHIP3007640, BRHIP3007960, BRHIP3008082, BRHIP3008183, BRHIP3008314, BRHIP3008320, BRHIP3008344, BRHIP3008405, BRHIP3008565, BRHIP3008598, BRHIP3008606, BRHIP3008691, BRHIP3008714, BRHIP3008997, BRHIP3009099, BRHIP3009140, BRHIP3009181, BRHIP3009318, BRHIP3009427, BRHIP3009448, BRHIP3009672, BRHIP3009753, BRHIP3010135, BRHIP3010289, BRHIP3010529, BRHIP3011082, BRHIP3011241, BRHIP3011269, BRHIP3011460, BRHIP3011567, BRHIP3011831, BRHIP3012185, BRHIP3012289, BRHIP3012357, BRHIP3012736, BRHIP3012745, BRHIP3012868, BRHIP3012997, BRHIP3013078, BRHIP3013271, BRHIP3013588, BRHIP3013698, BRHIP3013765, BRHIP3013897, BRHIP3014237, BRHIP3014675, BRHIP3015620, BRHIP3015751, BRHIP3015854, BRHIP3016032, BRHIP3016213, BRHIP3016302, BRHIP3016421, BRHIP3017109, BRHIP3017146, BRHIP3017256, BRHIP3017325, BRHIP3017558, BRHIP3017637, BRHIP3017855, BRHIP3018278, BRHIP3018784, BRHIP3019643, BRHIP3019824, BRHIP3019880, BRHIP3019956, BRHIP3020046, BRHIP3020155, BRHIP3020182, BRHIP3020733, BRHIP3021019, BRHIP3021499, BRHIP3021534, BRHIP3021778, BRHIP3021987, BRHIP3022656, BRHIP3023922, BRHIP3024118, BRHIP3024533, BRHIP3024703, BRHIP3024725, BRHIP3024820, BRHIP3025161, BRHIP3025702, BRHIP3025795, BRHIP3025844, BRHIP3026052, BRHIP3026097, BRHIP3026231, BRHIP3026335, BRHIP3026651, BRHIP3027105, BRHIP3027137, BRHIP3027160, BRHIP3027191, BRHIP3027501, BRHIP3027594, BRHIP3027651, BRHIP3027854, BRHIP3027947, BRHIP3028570, BRHIP3028742, BRSSN1000056, BRSSN1000059, BRSSN1000092, BRSSN1000153, BRSSN2000097, BRSSN2000175, BRSSN2000197, BRSSN2000244, BRSSN2000293, BRSSN2000295, BRSSN2000312, BRSSN2000498, BRSSN2000518, BRSSN2000561, BRSSN2000566, BRSSN2000684, BRSSN2000715, BRSSN2000832, BRSSN2001213, BRSSN2001275, BRSSN2001342, BRSSN2001426, BRSSN2001503, BRSSN2001579, BRSSN2001758, BRSSN2001810, BRSSN2001869, BRSSN2002857, BRSSN2002859, BRSSN2003086, BRSSN2003093, BRSSN2003820, BRSSN2003841, BRSSN2003937, BRSSN2004142, BRSSN2004303, BRSSN2004304, BRSSN2004496, BRSSN2004657, BRSSN2004686, BRSSN2004710, BRSSN2004719, BRSSN2005847, BRSSN2006133, BRSSN2006390, BRSSN2006575, BRSSN2006611, BRSSN2006644, BRSSN2006892, BRSSN2007076, BRSSN2007168, BRSSN2007202, BRSSN2007338, BRSSN2007464, BRSSN2007504, BRSSN2007819, BRSSN2008125, BRSSN2008419, BRSSN2008464, BRSSN2008549, BRSSN2008797, BRSSN2009378, BRSSN2009389, BRSSN2009395, BRSSN2009627, BRSSN2009630, BRSSN2009702, BRSSN2010019, BRSSN2010110, BRSSN2010587, BRSSN2010596, BRSSN2010830, BRSSN2011262, BRSSN2011738, BRSSN2011843, BRSSN2012081, BRSSN2012103, BRSSN2012157, BRSSN2012198, BRSSN2012254, BRSSN2012439, BRSSN2012622, BRSSN2012691, BRSSN2012838, BRSSN2013095, BRSSN2013544, BRSSN2013696, BRSSN2013702, BRSSN2013733, BRSSN2013753, BRSSN2013874, BRSSN2014112, BRSSN2014294, BRSSN2014424, BRSSN2014513, BRSSN2014556, BRSSN2014573, BRSSN2014610, BRSSN2014636, BRSSN2014685, BRSSN2015199, BRSSN2015369, BRSSN2015493, BRSSN2015497, BRSSN2015554, BRSSN2015707, BRSSN2015773, BRSSN2015907, BRSSN2015982, BRSSN2016589, BRSSN2016768, BRSSN2016905, BRSSN2017297, BRSSN2017422, BRSSN2017530, BRSSN2017682, BRSSN2017757, BRSSN2018218, BRSSN2018440, BRSSN2018447, BRSSN2018581, BRSSN2018731, BRSSN2018771, BRSSN2018925, BRSTN1000097, BRSTN2000058, BRSTN2000070, BRSTN2000220, BRSTN2000312, BRSTN2000367, BRSTN2000536, BRSTN2000872, BRSTN2001067, BRSTN2001613, BRSTN2001801, BRSTN2002105, BRSTN2002400, BRSTN2002532, BRSTN2002691, BRSTN2003590, BRSTN2003835, BRSTN2004863, BRSTN2004869, BRSTN2004987, BRSTN2005721, BRSTN2006306, BRSTN2006466, BRSTN2006580, BRSTN2006583, BRSTN2006638, BRSTN2006865, BRSTN2007000, BRSTN2007118, BRSTN2007284, BRSTN2007765, BRSTN2008052, BRSTN2008283, BRSTN2008367, BRSTN2008418, BRSTN2008457, BRSTN2008475, BRSTN2008930, BRSTN2009247, BRSTN2010089, BRSTN2010107, BRSTN2010363, BRSTN2010416, BRSTN2010500, BRSTN2010569, BRSTN2010750, BRSTN2010923, BRSTN2011211, BRSTN2011597, BRSTN2011688, BRSTN2011799, BRSTN2012089, BRSTN2012284, BRSTN2012320, BRSTN2012380, BRSTN2012451, BRSTN2013354, BRSTN2013502, BRSTN2013931, BRSTN2014490, BRSTN2014633, BRSTN2014751, BRSTN2014770, BRSTN2015015, BRSTN2015889, BRSTN2015978, BRSTN2016066, BRSTN2016335, BRSTN2016678, BRSTN2016892, BRSTN2016918, BRSTN2017151, BRSTN2017237, BRSTN2017379, BRSTN2017761, BRSTN2017771, BRSTN2017995, BRSTN2018077, BRSTN2018083, BRSTN2018596, BRSTN2018692, BRSTN2018712, BRSTN2019079, BRSTN2019129, BRTHA1000021, BRTHA1000063, BRTHA1000311, BRTHA2000057, BRTHA2000474, BRTHA2000514, BRTHA2000574, BRTHA2000855, BRTHA2000969, BRTHA2000972, BRTHA2001304, BRTHA2001370, BRTHA2001462, BRTHA2001717, BRTHA2001812, BRTHA2002091, BRTHA2002115, BRTHA2002133, BRTHA2002281, BRTHA2002376, BRTHA2002442, BRTHA2002493, BRTHA2002565, BRTHA2002608, BRTHA2002702, BRTHA2002721, BRTHA2002726, BRTHA2002741, BRTHA2002808, BRTHA2002896, BRTHA2002903, BRTHA2003030, BRTHA2003110, BRTHA2003116, BRTHA2003436, BRTHA2003759, BRTHA2003794, BRTHA2004361, BRTHA2004371, BRTHA2004582, BRTHA2004629, BRTHA2004639, BRTHA2004642, BRTHA2004812, BRTHA2004821, BRTHA2004978, BRTHA2004992, BRTHA2005005, BRTHA2005013, BRTHA2005448, BRTHA2005579, BRTHA2005831, BRTHA2005942, BRTHA2005956, BRTHA2006075, BRTHA2006146, BRTHA2006194, BRTHA2006232, BRTHA2006720, BRTHA2006735, BRTHA2006974, BRTHA2006975, BRTHA2007060, BRTHA2007122, BRTHA2007422, BRTHA2007603, BRTHA2007665, BRTHA2007998, BRTHA2008316, BRTHA2008335, BRTHA2008502, BRTHA2008513, BRTHA2008527, BRTHA2008535, BRTHA2008598, BRTHA2008669, BRTHA2008955, BRTHA2009311, BRTHA2009349, BRTHA2009486, BRTHA2009803, BRTHA2009846, BRTHA2009886, BRTHA2009972, BRTHA2010008, BRTHA2010033, BRTHA2010073, BRTHA2010097, BRTHA2010191, BRTHA2010397, BRTHA2010608, BRTHA2010672, BRTHA2010884, BRTHA2010907, BRTHA2011062, BRTHA2011194, BRTHA2011321, BRTHA2011351, BRTHA2011500, BRTHA2011641, BRTHA2011691, BRTHA2012129, BRTHA2012183, BRTHA2012189, BRTHA2012351, BRTHA2012392, BRTHA2012466, BRTHA2012555, BRTHA2012562, BRTHA2012714, BRTHA2012980, BRTHA2013054, BRTHA2013262, BRTHA2013275, BRTHA2013426, BRTHA2013460, BRTHA2013515, BRTHA2013540, BRTHA2013595, BRTHA2013610, BRTHA2013707, BRTHA2013942, BRTHA2014287, BRTHA2014334, BRTHA2014381, BRTHA2014578, BRTHA2014647, BRTHA2014663, BRTHA2014792, BRTHA2014828, BRTHA2014909, BRTHA2014975, BRTHA2014997, BRTHA2015406, BRTHA2015478, BRTHA2015696, BRTHA2015700, BRTHA2015853, BRTHA2015878, BRTHA2016179, BRTHA2016267, BRTHA2016318, BRTHA2016496, BRTHA2016543, BRTHA2016552, BRTHA2016577, BRTHA2016765, BRTHA2016918, BRTHA2017178, BRTHA2017353, BRTHA2017364, BRTHA2017972, BRTHA2017985, BRTHA2018011, BRTHA2018129, BRTHA2018165, BRTHA2018304, BRTHA2018344, BRTHA2018420, BRTHA2018443, BRTHA2018504, BRTHA2018558, BRTHA2018591, BRTHA2018624, BRTHA2018706, BRTHA2018707, BRTHA2019014, BRTHA2019022, BRTHA2019048, BRTHA2019073, BRTHA2019726, BRTHA2019743, BRTHA2020400, BRTHA2020566, BRTHA2020642, BRTHA2020695, BRTHA2020721, BRTHA2020781, BRTHA2020811, BRTHA2020910, BRTHA2021212, BRTHA2021440, BRTHA2021450, BRTHA2022074, BRTHA2022914, BRTHA2022968, BRTHA2023402, BRTHA2023437, BRTHA2024177, BRTHA2024354, BRTHA2024712, BRTHA2025869, BRTHA2026290, BRTHA2026311, BRTHA2027227, BRTHA2027250, BRTHA2027546, BRTHA2028297, BRTHA2029969, BRTHA2030036, BRTHA2030213, BRTHA2031517, BRTHA2031800, BRTHA2031917, BRTHA2032763, BRTHA2032845, BRTHA2033122, BRTHA2033155, BRTHA2033264, BRTHA2033320, BRTHA2033683, BRTHA2034281, BRTHA2034576, BRTHA2034874, BRTHA2035448, BRTHA2035743, BRTHA2036055, BRTHA2036295, BRTHA2036660, BRTHA2037247, BRTHA2038279, BRTHA2038345, BRTHA2038353, BRTHA2038396, BRTHA3000252, BRTHA3000273, BRTHA3000296, BRTHA3000297, BRTHA3000325, BRTHA3000456, BRTHA3000633, BRTHA3000789, BRTHA3001221, BRTHA3001623, BRTHA3002265, BRTHA3002401, BRTHA3002411, BRTHA3002427, BRTHA3002864, BRTHA3002933, BRTHA3002955, BRTHA3003000, BRTHA3003023, BRTHA3003074, BRTHA3003225, BRTHA3003339, BRTHA3003343, BRTHA3003417, BRTHA3003449, BRTHA3003474, BRTHA3003490, BRTHA3003704, BRTHA3004307, BRTHA3004432, BRTHA3004475, BRTHA3004502, BRTHA3004610, BRTHA3005046, BRTHA3005735, BRTHA3005988, BRTHA3006318, BRTHA3006593, BRTHA3006856, BRTHA3007113, BRTHA3007130, BRTHA3007148, BRTHA3007319, BRTHA3007469, BRTHA3007472, BRTHA3007532, BRTHA3007662, BRTHA3007685, BRTHA3007769, BRTHA3007922, BRTHA3008143, BRTHA3008293, BRTHA3008310, BRTHA3008386, BRTHA3008520, BRTHA3008608, BRTHA3008694, BRTHA3008778, BRTHA3008826, BRTHA3009037, BRTHA3009090, BRTHA3009291, BRTHA3009858, BRTHA3010135, BRTHA3010366, BRTHA3010469, BRTHA3010530, BRTHA3010540, BRTHA3010717, BRTHA3011149, BRTHA3011187, BRTHA3011229, BRTHA3011265, BRTHA3011361, BRTHA3011510, BRTHA3011892, BRTHA3012265, BRTHA3013860, BRTHA3013882, BRTHA3013884, BRTHA3013981, BRTHA3014000, BRTHA3014105, BRTHA3014507, BRTHA3014547, BRTHA3014691, BRTHA3014835, BRTHA3014854, BRTHA3014908, BRTHA3014920, BRTHA3015815, BRTHA3016616, BRTHA3016835, BRTHA3016845, BRTHA3016917, BRTHA3017047, BRTHA3017589, BRTHA3017848, BRTHA3018409, BRTHA3018514, BRTHA3018617, BRTHA3018623, BRTHA3018656, BRTHA3019048, BRTHA3019105, BRTHA3019183, BRTHA3020000, BRTHA3020314, BRTHA3020369, BRTHA3021569, BRTHA3021708, BRTHA3021786, BRTHA3022641, BRTHA3023403, BRTHA3023523, BRTHA3023590, BRTHA3023929, BRTHA3024233, BRTHA3024600, BRTHA3025073, BRTHA3025789, BRTHA3025826, BRTHA3026161, BRTHA3026180, BRTHA3026507, BRTHA3026556, BRTHA3026916, BRTHA3027171, BRTHA3027318, BRTHA3027638, BRTHA3027820, BRTHA3027879, BRTHA3027957, BRTHA3028339, BRTHA3028505, BRTHA3028782, CD34C2000051, CD34C2000152, CD34C2000175, CD34C2000443, CD34C3000125, CD34C3000252, CD34C3000314, CD34C3000424, CD34C3000494, CERVX1000042, CERVX2000812, CERVX2000968, CERVX2002006, CERVX2002013, CERVX2002430, CERVX2002770, CHONS1000058, CHONS2000172, CHONS2000797, CHONS2001287, CHONS2001382, CHONS2001797, CHONS2001834, CHONS2002419, COLON1000030, COLON1000084, COLON1000135, COLON2000470, COLON2000557, COLON2000568, COLON2001721, COLON2001829, COLON2001866, COLON2002520, COLON2003043, COLON2003529, COLON2004318, COLON2004351, COLON2004478, COLON2004911, COLON2005126, COLON2005623, COLON2005735, COLON2005772, COLON2006263, COLON2006282, COLON2006417, COLON2007274, COLON2007733, COLON2008105, COLON2009337, COLON2009499, CORDB1000140, CORDB2000061, CORDB2000127, CORDB2000541, CTONG1000009, CTONG1000020, CTONG1000022, CTONG1000040, CTONG1000056, CTONG1000062, CTONG1000086, CTONG1000087, CTONG1000088, CTONG1000093, CTONG1000097, CTONG1000113, CTONG1000137, CTONG1000165, CTONG1000175, CTONG1000180, CTONG1000181, CTONG1000218, CTONG1000220, CTONG1000277, CTONG1000283, CTONG1000288, CTONG1000302, CTONG1000467, CTONG1000476, CTONG1000488, CTONG1000508, CTONG1000540, CTONG2000031, CTONG2000034, CTONG2000042, CTONG2000201, CTONG2000218, CTONG2000279, CTONG2000303, CTONG2000330, CTONG2000395, CTONG2000411, CTONG2000465, CTONG2000469, CTONG2000480, CTONG2000561, CTONG2000589, CTONG2000766, CTONG2000771, CTONG2000819, CTONG2000827, CTONG2000846, CTONG2000855, CTONG2000977, CTONG2001139, CTONG2001320, CTONG2001366, CTONG2001413, CTONG2001428, CTONG2001513, CTONG2001524, CTONG2001533, CTONG2001598, CTONG2001681, CTONG2001724, CTONG2001748, CTONG2001749, CTONG2001800, CTONG2001820, CTONG2001858, CTONG2001877, CTONG2001911, CTONG2001955, CTONG2002066, CTONG2002073, CTONG2002095, CTONG2002143, CTONG2002395, CTONG2002417, CTONG2002418, CTONG2002453, CTONG2002520, CTONG2002590, CTONG2002709, CTONG2002721, CTONG2002766, CTONG2002803, CTONG2002816, CTONG2002820, CTONG2002832, CTONG2002841, CTONG2002903, CTONG2002965, CTONG2002999, CTONG2003028, CTONG2003094, CTONG2003100, CTONG2003115, CTONG2003189, CTONG2003245, CTONG2003293, CTONG2003348, CTONG2003350, CTONG2003372, CTONG2003375, CTONG2003427, CTONG2003517, CTONG2003524, CTONG2003599, CTONG2003699, CTONG2003764, CTONG2003782, CTONG2003889, CTONG2003937, CTONG2003945, CTONG2004000, CTONG2004062, CTONG2004115, CTONG2004126, CTONG2004264, CTONG2004305, CTONG2004423, CTONG2004454, CTONG2004487, CTONG2004550, CTONG2004669, CTONG2004716, CTONG2004912, CTONG2004941, CTONG2004948, CTONG2005028, CTONG2005049, CTONG2005110, CTONG2005145, CTONG2005265, CTONG2005278, CTONG2005290, CTONG2005374, CTONG2005399, CTONG2005468, CTONG2005567, CTONG2005585, CTONG2005615, CTONG2005635, CTONG2005775, CTONG2005795, CTONG2005890, CTONG2005904, CTONG2005913, CTONG2006129, CTONG2006223, CTONG2006235, CTONG2006273, CTONG2006310, CTONG2006377, CTONG2006393, CTONG2006412, CTONG2006449, CTONG2006515, CTONG2006524, CTONG2006568, CTONG2006620, CTONG2006666, CTONG2006691, CTONG2006798, CTONG2006836, CTONG2006942, CTONG2006964, CTONG2007009, CTONG2007072, CTONG2007091, CTONG2007104, CTONG2007168, CTONG2007175, CTONG2007259, CTONG2007272, CTONG2007293, CTONG2007297, CTONG2007399, CTONG2007400, CTONG2007417, CTONG2007441, CTONG2007474, CTONG2007586, CTONG2007613, CTONG2007623, CTONG2007681, CTONG2007776, CTONG2007779, CTONG2007898, CTONG2007959, CTONG2007970, CTONG2008014, CTONG2008184, CTONG2008262, CTONG2008269, CTONG2008321, CTONG2008343, CTONG2008398, CTONG2008402, CTONG2008405, CTONG2008466, CTONG2008518, CTONG2008521, CTONG2008562, CTONG2008577, CTONG2008595, CTONG2008621, CTONG2008689, CTONG2008720, CTONG2008721, CTONG2008773, CTONG2008792, CTONG2008989, CTONG2009033, CTONG2009108, CTONG2009132, CTONG2009156, CTONG2009181, CTONG2009257, CTONG2009258, CTONG2009268, CTONG2009270, CTONG2009395, CTONG2009423, CTONG2009440, CTONG2009527, CTONG2009529, CTONG2009531, CTONG2009534, CTONG2009570, CTONG2009572, CTONG2009604, CTONG2009643, CTONG2009675, CTONG2009689, CTONG2009725, CTONG2009766, CTONG2009768, CTONG2009844, CTONG2009871, CTONG2009887, CTONG2009891, CTONG2009923, CTONG2009938, CTONG2009955, CTONG2009958, CTONG2009963, CTONG2010018, CTONG2010024, CTONG2010116, CTONG2010133, CTONG2010148, CTONG2010276, CTONG2010330, CTONG2010508, CTONG2010566, CTONG2010623, CTONG2010649, CTONG2010652, CTONG2010803, CTONG2010821, CTONG2011188, CTONG2011429, CTONG2011474, CTONG2011676, CTONG2011765, CTONG2011779, CTONG2011801, CTONG2011815, CTONG2011822, CTONG2011825, CTONG2011920, CTONG2011985, CTONG2012001, CTONG2012029, CTONG2012050, CTONG2012077, CTONG2012101, CTONG2012123, CTONG2012158, CTONG2012230, CTONG2012401, CTONG2012422, CTONG2012447, CTONG2012453, CTONG2012473, CTONG2012476, CTONG2012533, CTONG2012554, CTONG2012564, CTONG2012607, CTONG2012661, CTONG2012724, CTONG2012738, CTONG2012745, CTONG2012758, CTONG2012843, CTONG2012879, CTONG2012901, CTONG2012996, CTONG2013128, CTONG2013149, CTONG2013156, CTONG2013178, CTONG2013222, CTONG2013284, CTONG2013339, CTONG2013352, CTONG2013381, CTONG2013393, CTONG2013511, CTONG2013630, CTONG2013803, CTONG2013934, CTONG2013986, CTONG2014032, CTONG2014058, CTONG2014119, CTONG2014191, CTONG2014206, CTONG2014234, CTONG2014264, CTONG2014280, CTONG2014369, CTONG2014491, CTONG2014630, CTONG2014635, CTONG2014646, CTONG2014705, CTONG2014898, CTONG2014946, CTONG2014959, CTONG2014966, CTONG2014995, CTONG2015204, CTONG2015316, CTONG2015330, CTONG2015345, CTONG2015358, CTONG2015434, CTONG2015518, CTONG2015540, CTONG2015596, CTONG2015633, CTONG2015678, CTONG2015717, CTONG2015804, CTONG2015866, CTONG2015914, CTONG2015953, CTONG2016056, CTONG2016217, CTONG2016355, CTONG2016408, CTONG2016499, CTONG2016505, CTONG2016559, CTONG2016658, CTONG2016775, CTONG2016797, CTONG2016824, CTONG2016846, CTONG2016904, CTONG2016931, CTONG2016942, CTONG2016953, CTONG2017021, CTONG2017094, CTONG2017292, CTONG2017409, CTONG2017429, CTONG2017458, CTONG2017500, CTONG2017604, CTONG2017650, CTONG2017798, CTONG2017804, CTONG2017814, CTONG2017910, CTONG2017939, CTONG2017989, CTONG2018062, CTONG2018069, CTONG2018147, CTONG2018217, CTONG2018279, CTONG2018334, CTONG2018343, CTONG2018379, CTONG2018413, CTONG2018483, CTONG2018629, CTONG2018632, CTONG2018652, CTONG2018653, CTONG2018655, CTONG2018735, CTONG2018739, CTONG2018808, CTONG2018843, CTONG2018900, CTONG2018976, CTONG2019029, CTONG2019063, CTONG2019144, CTONG2019232, CTONG2019248, CTONG2019400, CTONG2019590, CTONG2019652, CTONG2019704, CTONG2019788, CTONG2019822, CTONG2019833, CTONG2020031, CTONG2020108, CTONG2020127, CTONG2020171, CTONG2020374, CTONG2020378, CTONG2020411, CTONG2020445, CTONG2020484, CTONG2020522, CTONG2020560, CTONG2020582, CTONG2020638, CTONG2020806, CTONG2020831, CTONG2020974, CTONG2021024, CTONG2021132, CTONG2021168, CTONG2022153, CTONG2022601, CTONG2022835, CTONG2023021, CTONG2023449, CTONG2023512, CTONG2024031, CTONG2024206, CTONG2024614, CTONG2024749, CTONG2025496, CTONG2025513, CTONG2025516, CTONG2025610, CTONG2025900, CTONG2026513, CTONG2026770, CTONG2026920, CTONG2026987, CTONG2027150, CTONG2027263, CTONG2027327, CTONG2027361, CTONG2027591, CTONG2027736, CTONG2027783, CTONG2027828, CTONG2027959, CTONG2028097, CTONG2028208, CTONG2028309, CTONG2028486, CTONG2028518, CTONG2028687, CTONG2028758, CTONG3000657, CTONG3000686, CTONG3000707, CTONG3000896, CTONG3001123, CTONG3001420, CTONG3001501, CTONG3001560, CTONG3001605, CTONG3001746, CTONG3002020, CTONG3002127, CTONG3002370, CTONG3002412, CTONG3002433, CTONG3002518, CTONG3002552, CTONG3002588, CTONG3002674, CTONG3002728, CTONG3002835, CTONG3002909, CTONG3002947, CTONG3002983, CTONG3003165, CTONG3003179, CTONG3003483, CTONG3003553, CTONG3003598, CTONG3003652, CTONG3003654, CTONG3003669, CTONG3003737, CTONG3003905, CTONG3004072, CTONG3004317, CTONG3004397, CTONG3004550, CTONG3004576, CTONG3004607, CTONG3004712, CTONG3004726, CTONG3005325, CTONG3005648, CTONG3005713, CTONG3005803, CTONG3005813, CTONG3006067, CTONG3006073, CTONG3006186, CTONG3006629, CTONG3006650, CTONG3006659, CTONG3007244, CTONG3007444, CTONG3007528, CTONG3007586, CTONG3007870, CTONG3008223, CTONG3008252, CTONG3008258, CTONG3008457, CTONG3008496, CTONG3008566, CTONG3008639, CTONG3008831, CTONG3008951, CTONG3008959, CTONG3009028, CTONG3009227, CTONG3009287, CTONG3009328, CTONG3009385, D30ST1000066, D30ST1000109, D30ST1000238, D30ST1000267, D30ST2000184, D30ST2000618, D30ST2000654, D30ST2000734, D30ST2001328, D30ST2001669, D30ST2001670, D30ST2001788, D30ST2002182, D30ST2002223, D30ST2002262, D30ST2002272, D30ST2002417, D30ST2002436, D30ST2002648, D30ST2003024, D30ST2003331, D30ST2003607, D30ST2003797, D30ST2004637, D30ST3000169, D30ST3000195, D30ST3000258, D30ST3000291, D30ST3000388, D30ST3000493, D60ST2000127, D60ST2000169, D60ST2000245, D60ST2000358, D60ST2000464, D60ST2000507, D90ST2000031, D90ST2000278, D90ST2000440, D90ST2000869, D90ST2001319, D90ST2001433, D90ST2002397, D90ST2002673, D90ST2003106, D90ST2003108, D90ST2003137, D90ST2003397, D90ST2003580, D90ST2003594, D90ST2003762, D90ST2003791, D90ST2003989, D90ST2004018, D90ST2004073, D90ST2004417, DFNES1000003, DFNES1000107, DFNES1000185, DFNES2000011, DFNES2000143, DFNES2000146, DFNES2000212, DFNES2000268, DFNES2000292, DFNES2000335, DFNES2000426, DFNES2000432, DFNES2000457, DFNES2000471, DFNES2000526, DFNES2000913, DFNES2001091, DFNES2001096, DFNES2001108, DFNES2001177, DFNES2001404, DFNES2001564, DFNES2001565, DFNES2001647, DFNES2001800, DFNES2001829, DFNES2002220, DFNES2002509, DFNES2002550, DFNES2002588, DFNES2002817, DFNES2002966, DFNES2003192, DFNES2003255, DFNES2003742, DFNES2004346, DFNES2004354, DFNES2004371, DFNES2004383, DFNES2004608, DFNES2004684, DFNES2005266, DFNES2005527, DFNES2005540, DFNES2005690, DFNES2005779, DFNES2005875, DFNES2006944, DFNES2007113, DFNES2007299, DFNES2007332, DFNES2007641, DFNES2007757, DFNES2008088, DFNES2008160, DFNES2008280, DFNES2008881, DFNES2009482, DFNES2010502, DFNES2011192, DFNES2011221, DFNES2011239, DFNES2011245, DFNES2011380, DFNES2011499, ERLTF1000021, ERLTF2000324, ERLTF2000465, FCBBF1000023, FCBBF1000024, FCBBF1000025, FCBBF1000038, FCBBF1000053, FCBBF1000061, FCBBF1000063, FCBBF1000069, FCBBF1000115, FCBBF1000117, FCBBF1000118, FCBBF1000121, FCBBF1000125, FCBBF1000131, FCBBF1000139, FCBBF1000155, FCBBF1000157, FCBBF1000171, FCBBF1000174, FCBBF1000182, FCBBF1000198, FCBBF1000206, FCBBF1000220, FCBBF1000232, FCBBF1000233, FCBBF1000243, FCBBF1000270, FCBBF1000272, FCBBF1000280, FCBBF1000297, FCBBF1000305, FCBBF1000314, FCBBF1000322, FCBBF1000349, FCBBF1000374, FCBBF1000376, FCBBF1000377, FCBBF1000395, FCBBF1000397, FCBBF1000425, FCBBF1000449, FCBBF1000476, FCBBF1000506, FCBBF1000509, FCBBF1000546, FCBBF1000550, FCBBF1000556, FCBBF1000563, FCBBF1000581, FCBBF1000582, FCBBF1000598, FCBBF1000604, FCBBF1000618, FCBBF1000627, FCBBF1000671, FCBBF1000675, FCBBF1000684, FCBBF1000686, FCBBF1000687, FCBBF1000691, FCBBF1000748, FCBBF2000038, FCBBF2000087, FCBBF2000094, FCBBF2000105, FCBBF2000123, FCBBF2000195, FCBBF2000199, FCBBF2000214, FCBBF2000232, FCBBF2000259, FCBBF2000276, FCBBF2000291, FCBBF2000362, FCBBF2000379, FCBBF2000473, FCBBF2000502, FCBBF2000566, FCBBF2000576, FCBBF2000677, FCBBF2000678, FCBBF2000685, FCBBF2000733, FCBBF2000782, FCBBF2000808, FCBBF2000815, FCBBF2000825, FCBBF2000885, FCBBF2000940, FCBBF2000951, FCBBF2001001, FCBBF2001088, FCBBF2001105, FCBBF2001116, FCBBF2001183, FCBBF2001188, FCBBF2001238, FCBBF2001243, FCBBF2001299, FCBBF2001309, FCBBF2001400, FCBBF2001427, FCBBF2001480, FCBBF2001529, FCBBF2001538, FCBBF2001594, FCBBF2001672, FCBBF2001675, FCBBF2001718, FCBBF2001720, FCBBF2001817, FCBBF2001868, FCBBF2002044, FCBBF2002111, FCBBF2002281, FCBBF2002349, FCBBF2002370, FCBBF2002541, FCBBF2002626, FCBBF2002897, FCBBF2002898, FCBBF2002904, FCBBF2002953, FCBBF2003083, FCBBF2003102, FCBBF2003269, FCBBF2003293, FCBBF2003297, FCBBF2003395, FCBBF2003528, FCBBF2003543, FCBBF2003567, FCBBF2003636, FCBBF2003823, FCBBF2003895, FCBBF2004066, FCBBF2004090, FCBBF2004138, FCBBF2004217, FCBBF2004256, FCBBF2004373, FCBBF2004448, FCBBF2004671, FCBBF2004707, FCBBF2004788, FCBBF2005069, FCBBF2005122, FCBBF2005428, FCBBF2005439, FCBBF2005538, FCBBF2005637, FCBBF2005645, FCBBF2005658, FCBBF2005733, FCBBF2005909, FCBBF2005966, FCBBF2006131, FCBBF2006380, FCBBF2006418, FCBBF2006452, FCBBF2006634, FCBBF2006781, FCBBF2007012, FCBBF2007186, FCBBF2007265, FCBBF2007302, FCBBF2007556, FCBBF2007610, FCBBF2007633, FCBBF2007840, FCBBF3000102, FCBBF3000120, FCBBF3000168, FCBBF3000175, FCBBF3000228, FCBBF3000229, FCBBF3000233, FCBBF3000269, FCBBF3000361, FCBBF3000367, FCBBF3000434, FCBBF3000462, FCBBF3000473, FCBBF3000501, FCBBF3000518, FCBBF3000536, FCBBF3000550, FCBBF3000847, FCBBF3001018, FCBBF3001020, FCBBF3001081, FCBBF3001235, FCBBF3001281, FCBBF3001302, FCBBF3001377, FCBBF3001594, FCBBF3001632, FCBBF3001657, FCBBF3001818, FCBBF3001855, FCBBF3001890, FCBBF3001912, FCBBF3001914, FCBBF3001918, FCBBF3001924, FCBBF3001977, FCBBF3002163, FCBBF3002188, FCBBF3002190, FCBBF3002268, FCBBF3002475, FCBBF3002556, FCBBF3002592, FCBBF3002658, FCBBF3002782, FCBBF3002818, FCBBF3002925, FCBBF3003216, FCBBF3003305, FCBBF3003373, FCBBF3003435, FCBBF3003475, FCBBF3003481, FCBBF3003557, FCBBF3003787, FCBBF3003902, FCBBF3004021, FCBBF3004041, FCBBF3004261, FCBBF3004323, FCBBF3004390, FCBBF3004409, FCBBF3004502, FCBBF3004715, FCBBF3004842, FCBBF3004847, FCBBF3004955, FCBBF3005160, FCBBF3005218, FCBBF3005444, FCBBF3005698, FCBBF3005729, FCBBF3006171, FCBBF3006249, FCBBF3006288, FCBBF3006399, FCBBF3006628, FCBBF3006821, FCBBF3007077, FCBBF3007150, FCBBF3007152, FCBBF3007242, FCBBF3007244, FCBBF3007248, FCBBF3007453, FCBBF3007462, FCBBF3007540, FCBBF3007597, FCBBF3007604, FCBBF3007631, FCBBF3007829, FCBBF3007855, FCBBF3007859, FCBBF3007860, FCBBF3008073, FCBBF3008100, FCBBF3008159, FCBBF3008251, FCBBF3008311, FCBBF3008362, FCBBF3008382, FCBBF3008475, FCBBF3008556, FCBBF3008644, FCBBF3008689, FCBBF3008748, FCBBF3008870, FCBBF3008944, FCBBF3009069, FCBBF3009101, FCBBF3009152, FCBBF3009256, FCBBF3009317, FCBBF3009428, FCBBF3009464, FCBBF3009526, FCBBF3009703, FCBBF3009717, FCBBF3009888, FCBBF3009949, FCBBF3009978, FCBBF3010008, FCBBF3010012, FCBBF3010124, FCBBF3010130, FCBBF3010142, FCBBF3010149, FCBBF3010211, FCBBF3010361, FCBBF3010508, FCBBF3010544, FCBBF3010586, FCBBF3010601, FCBBF3010665, FCBBF3010695, FCBBF3010729, FCBBF3010733, FCBBF3011003, FCBBF3011418, FCBBF3011485, FCBBF3011523, FCBBF3011570, FCBBF3011592, FCBBF3011867, FCBBF3011889, FCBBF3012170, FCBBF3012182, FCBBF3012288, FCBBF3012332, FCBBF3012347, FCBBF3012443, FCBBF3012588, FCBBF3012667, FCBBF3012842, FCBBF3012901, FCBBF3013041, FCBBF3013058, FCBBF3013205, FCBBF3013266, FCBBF3013307, FCBBF3013341, FCBBF3013506, FCBBF3013623, FCBBF3013800, FCBBF3013846, FCBBF3014229, FCBBF3014355, FCBBF3014567, FCBBF3014770, FCBBF3015100, FCBBF3015119, FCBBF3015131, FCBBF3015317, FCBBF3015727, FCBBF3015758, FCBBF3015809, FCBBF3015870, FCBBF3016018, FCBBF3016134, FCBBF3016178, FCBBF3016451, FCBBF3016618, FCBBF3016622, FCBBF3016644, FCBBF3016667, FCBBF3016987, FCBBF3017024, FCBBF3017059, FCBBF3017071, FCBBF3017123, FCBBF3017233, FCBBF3017255, FCBBF3017288, FCBBF3017396, FCBBF3017531, FCBBF3017535, FCBBF3017681, FCBBF3017729, FCBBF3017873, FCBBF3017918, FCBBF3017974, FCBBF3018067, FCBBF3018173, FCBBF3018453, FCBBF3018591, FCBBF3018753, FCBBF3018826, FCBBF3018949, FCBBF3019085, FCBBF3019320, FCBBF3019437, FCBBF3019455, FCBBF3019564, FCBBF3019569, FCBBF3019570, FCBBF3019663, FCBBF3019716, FCBBF3019784, FCBBF3019839, FCBBF3019867, FCBBF3019961, FCBBF3020030, FCBBF3020138, FCBBF3020140, FCBBF3020163, FCBBF3020232, FCBBF3021026, FCBBF3021191, FCBBF3021221, FCBBF3021501, FCBBF3021506, FCBBF3021524, FCBBF3021807, FCBBF3021940, FCBBF3021985, FCBBF3022005, FCBBF3022291, FCBBF3022311, FCBBF3022504, FCBBF3022566, FCBBF3022593, FCBBF3022765, FCBBF3022767, FCBBF3022894, FCBBF3023061, FCBBF3023078, FCBBF3023368, FCBBF3023372, FCBBF3023443, FCBBF3023599, FCBBF3023704, FCBBF3023887, FCBBF3023895, FCBBF3024002, FCBBF3024096, FCBBF3024225, FCBBF3024266, FCBBF3024364, FCBBF3024623, FCBBF3024793, FCBBF3024911, FCBBF3025098, FCBBF3025252, FCBBF3025280, FCBBF3025285, FCBBF3025417, FCBBF3025528, FCBBF3025568, FCBBF3025650, FCBBF3025674, FCBBF3025730, FCBBF3025737, FCBBF3025905, FCBBF3026021, FCBBF3026048, FCBBF3026251, FCBBF3026651, FCBBF3026678, FCBBF3026692, FCBBF3027104, FCBBF3027199, FCBBF3027328, FCBBF3027559, FCBBF3027717, FCBBF3027755, FCBBF3027768, FCBBF3027854, FCBBF3027863, FCBBF3027903, FCBBF3028102, FCBBF3028143, FCBBF3028188, FCBBF3028202, FCBBF3028244, FCBBF3028472, FCBBF3028528, FCBBF3028582, FCBBF3028671, FCBBF3028794, FCBBF4000017, FCBBF4000061, FCBBF4000076, FCBBF4000142, FCBBF4000173, FCBBF4000192, FCBBF4000193, FCBBF4000268, FCBBF4000282, FCBBF4000399, FCBBF4000415, FCBBF4000529, FCBBF4000548, FCBBF5000041, FCBBF5000061, FCBBF5000165, FCBBF5000261, FCBBF5000325, FCBBF5000353, FCBBF5000384, FCBBF5000483, FCBBF5000495, FEBRA1000005, FEBRA1000008, FEBRA1000030, FEBRA1000057, FEBRA1000088, FEBRA1000138, FEBRA1000148, FEBRA1000149, FEBRA1000183, FEBRA1000188, FEBRA1000189, FEBRA2000007, FEBRA2000021, FEBRA2000035, FEBRA2000053, FEBRA2000126, FEBRA2000220, FEBRA2000253, FEBRA2000282, FEBRA2000286, FEBRA2000297, FEBRA2000311, FEBRA2000321, FEBRA2000333, FEBRA2000377, FEBRA2000378, FEBRA2000391, FEBRA2000394, FEBRA2000397, FEBRA2000399, FEBRA2000402, FEBRA2000404, FEBRA2000409, FEBRA2000415, FEBRA2000436, FEBRA2000438, FEBRA2000454, FEBRA2000462, FEBRA2000468, FEBRA2000491, FEBRA2000504, FEBRA2000532, FEBRA2000536, FEBRA2000538, FEBRA2000575, FEBRA2000581, FEBRA2000656, FEBRA2000659, FEBRA2000680, FEBRA2000690, FEBRA2000727, FEBRA2000734, FEBRA2000757, FEBRA2000771, FEBRA2000772, FEBRA2000782, FEBRA2000790, FEBRA2000793, FEBRA2000803, FEBRA2000805, FEBRA2000809, FEBRA2000815, FEBRA2000856, FEBRA2000862, FEBRA2000877, FEBRA2000881, FEBRA2000901, FEBRA2000909, FEBRA2000917, FEBRA2000928, FEBRA2000936, FEBRA2000937, FEBRA2000959, FEBRA2000972, FEBRA2001004, FEBRA2001012, FEBRA2001020, FEBRA2001093, FEBRA2001124, FEBRA2001133, FEBRA2001146, FEBRA2001161, FEBRA2001175, FEBRA2001197, FEBRA2001217, FEBRA2001227, FEBRA2001245, FEBRA2001267, FEBRA2001334, FEBRA2001351, FEBRA2001383, FEBRA2001438, FEBRA2001440, FEBRA2001487, FEBRA2001561, FEBRA2001584, FEBRA2001590, FEBRA2001591, FEBRA2001610, FEBRA2001620, FEBRA2001659, FEBRA2001698, FEBRA2001705, FEBRA2001706, FEBRA2001715, FEBRA2001745, FEBRA2001752, FEBRA2001772, FEBRA2001790, FEBRA2001814, FEBRA2001867, FEBRA2001914, FEBRA2001974, FEBRA2001989, FEBRA2001990, FEBRA2002009, FEBRA2002027, FEBRA2002086, FEBRA2002109, FEBRA2002191, FEBRA2002260, FEBRA2002399, FEBRA2002410, FEBRA2002429, FEBRA2002442, FEBRA2002456, FEBRA2002508, FEBRA2002525, FEBRA2002527, FEBRA2002552, FEBRA2002574, FEBRA2002601, FEBRA2002611, FEBRA2002628, FEBRA2002662, FEBRA2002682, FEBRA2002707, FEBRA2002727, FEBRA2002781, FEBRA2002783, FEBRA2002792, FEBRA2002818, FEBRA2002858, FEBRA2002882, FEBRA2002897, FEBRA2002908, FEBRA2002931, FEBRA2002962, FEBRA2002986, FEBRA2003054, FEBRA2003115, FEBRA2003128, FEBRA2003155, FEBRA2003163, FEBRA2003181, FEBRA2003198, FEBRA2003253, FEBRA2003275, FEBRA2003308, FEBRA2003327, FEBRA2003429, FEBRA2003454, FEBRA2003468, FEBRA2003470, FEBRA2003520, FEBRA2003524, FEBRA2003541, FEBRA2003675, FEBRA2003707, FEBRA2003711, FEBRA2003726, FEBRA2003822, FEBRA2003833, FEBRA2003897, FEBRA2003907, FEBRA2004023, FEBRA2004026, FEBRA2004029, FEBRA2004053, FEBRA2004056, FEBRA2004091, FEBRA2004110, FEBRA2004191, FEBRA2004202, FEBRA2004219, FEBRA2004237, FEBRA2004268, FEBRA2004325, FEBRA2004329, FEBRA2004331, FEBRA2004443, FEBRA2004485, FEBRA2004490, FEBRA2004538, FEBRA2004592, FEBRA2004620, FEBRA2004651, FEBRA2004767, FEBRA2004813, FEBRA2004818, FEBRA2004840, FEBRA2004852, FEBRA2004867, FEBRA2004914, FEBRA2004933, FEBRA2004987, FEBRA2005014, FEBRA2005036, FEBRA2005079, FEBRA2005114, FEBRA2005216, FEBRA2005291, FEBRA2005361, FEBRA2005377, FEBRA2005380, FEBRA2005416, FEBRA2005427, FEBRA2005458, FEBRA2005476, FEBRA2005701, FEBRA2005726, FEBRA2005752, FEBRA2005787, FEBRA2005995, FEBRA2005998, FEBRA2006055, FEBRA2006061, FEBRA2006112, FEBRA2006150, FEBRA2006165, FEBRA2006255, FEBRA2006315, FEBRA2006354, FEBRA2006357, FEBRA2006368, FEBRA2006370, FEBRA2006372, FEBRA2006379, FEBRA2006396, FEBRA2006409, FEBRA2006418, FEBRA2006427, FEBRA2006476, FEBRA2006485, FEBRA2006519, FEBRA2006521, FEBRA2006553, FEBRA2006627, FEBRA2006664, FEBRA2006667, FEBRA2006726, FEBRA2006793, FEBRA2006808, FEBRA2006817, FEBRA2006873, FEBRA2006890, FEBRA2006942, FEBRA2006977, FEBRA2007017, FEBRA2007176, FEBRA2007200, FEBRA2007212, FEBRA2007247, FEBRA2007280, FEBRA2007414, FEBRA2007436, FEBRA2007449, FEBRA2007458, FEBRA2007534, FEBRA2007544, FEBRA2007551, FEBRA2007566, FEBRA2007589, FEBRA2007613, FEBRA2007620, FEBRA2007708, FEBRA2007714, FEBRA2007793, FEBRA2007818, FEBRA2007823, FEBRA2007880, FEBRA2007900, FEBRA2007931, FEBRA2007957, FEBRA2008009, FEBRA2008036, FEBRA2008086, FEBRA2008134, FEBRA2008135, FEBRA2008159, FEBRA2008165, FEBRA2008172, FEBRA2008255, FEBRA2008265, FEBRA2008266, FEBRA2008282, FEBRA2008287, FEBRA2008311, FEBRA2008360, FEBRA2008459, FEBRA2008468, FEBRA2008481, FEBRA2008542, FEBRA2008660, FEBRA2008662, FEBRA2008681, FEBRA2008692, FEBRA2008741, FEBRA2008836, FEBRA2008859, FEBRA2008861, FEBRA2008866, FEBRA2008881, FEBRA2008928, FEBRA2008983, FEBRA2009016, FEBRA2009029, FEBRA2009074, FEBRA2009117, FEBRA2009120, FEBRA2009162, FEBRA2009185, FEBRA2009240, FEBRA2009265, FEBRA2009276, FEBRA2009289, FEBRA2009327, FEBRA2009328, FEBRA2009352, FEBRA2009362, FEBRA2009385, FEBRA2009416, FEBRA2009419, FEBRA2009437, FEBRA2009478, FEBRA2009507, FEBRA2009514, FEBRA2009567, FEBRA2009588, FEBRA2009731, FEBRA2009754, FEBRA2009780, FEBRA2009846, FEBRA2009986, FEBRA2010141, FEBRA2010299, FEBRA2010484, FEBRA2010719, FEBRA2010746, FEBRA2010768, FEBRA2010802, FEBRA2011063, FEBRA2011090, FEBRA2011356, FEBRA2011392, FEBRA2011414, FEBRA2011593, FEBRA2011665, FEBRA2012090, FEBRA2012120, FEBRA2012181, FEBRA2012195, FEBRA2012397, FEBRA2012418, FEBRA2012507, FEBRA2012625, FEBRA2013019, FEBRA2013069, FEBRA2013274, FEBRA2013465, FEBRA2013570, FEBRA2013699, FEBRA2013905, FEBRA2013951, FEBRA2014010, FEBRA2014122, FEBRA2014198, FEBRA2014213, FEBRA2014297, FEBRA2014443, FEBRA2014578, FEBRA2014939, FEBRA2015076, FEBRA2015085, FEBRA2015175, FEBRA2015292, FEBRA2015588, FEBRA2016112, FEBRA2016398, FEBRA2016572, FEBRA2016583, FEBRA2016621, FEBRA2016654, FEBRA2016739, FEBRA2017024, FEBRA2017098, FEBRA2017138, FEBRA2017154, FEBRA2017200, FEBRA2017223, FEBRA2017333, FEBRA2017502, FEBRA2017533, FEBRA2017680, FEBRA2017736, FEBRA2017780, FEBRA2017811, FEBRA2017850, FEBRA2018051, FEBRA2018203, FEBRA2018407, FEBRA2018433, FEBRA2018746, FEBRA2019172, FEBRA2019242, FEBRA2019298, FEBRA2019389, FEBRA2019457, FEBRA2019519, FEBRA2019582, FEBRA2019637, FEBRA2019663, FEBRA2019690, FEBRA2019867, FEBRA2020406, FEBRA2020566, FEBRA2020582, FEBRA2020668, FEBRA2020801, FEBRA2020845, FEBRA2020886, FEBRA2021032, FEBRA2021134, FEBRA2021171, FEBRA2021339, FEBRA2021431, FEBRA2021497, FEBRA2021550, FEBRA2021571, FEBRA2021864, FEBRA2021892, FEBRA2021908, FEBRA2022013, FEBRA2022148, FEBRA2022204, FEBRA2022255, FEBRA2022322, FEBRA2022504, FEBRA2022601, FEBRA2022696, FEBRA2022729, FEBRA2022787, FEBRA2022911, FEBRA2022956, FEBRA2022963, FEBRA2022972, FEBRA2023285, FEBRA2023351, FEBRA2023377, FEBRA2023399, FEBRA2023498, FEBRA2023550, FEBRA2023721, FEBRA2023927, FEBRA2023989, FEBRA2023990, FEBRA2024019, FEBRA2024136, FEBRA2024150, FEBRA2024343, FEBRA2024570, FEBRA2024693, FEBRA2024727, FEBRA2024744, FEBRA2024797, FEBRA2024987, FEBRA2025249, FEBRA2025463, FEBRA2025477, FEBRA2025838, FEBRA2026474, FEBRA2026582, FEBRA2026629, FEBRA2026769, FEBRA2026879, FEBRA2026890, FEBRA2026977, FEBRA2026984, FEBRA2027082, FEBRA2027297, FEBRA2027352, FEBRA2027364, FEBRA2027609, FEBRA2028158, FEBRA2028222, FEBRA2028366, FEBRA2028457, FEBRA2028477, FEBRA2028503, FEBRA2028516, FEHRT2000325, FEKID1000018, FELIV1000101, FELIV1000137, FELIV1000164, FELNG2000241, HCASM1000021, HCASM1000050, HCASM1000061, HCASM1000115, HCASM1000130, HCASM2000016, HCASM2000138, HCASM2000156, HCASM2000202, HCASM2000214, HCASM2000266, HCASM2000307, HCASM2000534, HCASM2000536, HCASM2000560, HCASM2000871, HCASM2001285, HCASM2001810, HCASM2001866, HCASM2001890, HCASM2002148, HCASM2002502, HCASM2002754, HCASM2002918, HCASM2003018, HCASM2003076, HCASM2003099, HCASM2003212, HCASM2003237, HCASM2003357, HCASM2003415, HCASM2005388, HCASM2005484, HCASM2006131, HCASM2006338, HCASM2006359, HCASM2006632, HCASM2007047, HCASM2007317, HCASM2007737, HCASM2007773, HCASM2008154, HCASM2008536, HCASM2009405, HCASM2009424, HCASM2009463, HCASM2009588, HCHON1000142, HCHON1000176, HCHON1000191, HCHON2000038, HCHON2000062, HCHON2000100, HCHON2000156, HCHON2000199, HCHON2000212, HCHON2000265, HCHON2000271, HCHON2000315, HCHON2000322, HCHON2000344, HCHON2000364, HCHON2000395, HCHON2000417, HCHON2000418, HCHON2000473, HCHON2000503, HCHON2000508, HCHON2000660, HCHON2000663, HCHON2000673, HCHON2000676, HCHON2000698, HCHON2000699, HCHON2000705, HCHON2000743, HCHON2000815, HCHON2000817, HCHON2000818, HCHON2000819, HCHON2000832, HCHON2000851, HCHON2000898, HCHON2000935, HCHON2000942, HCHON2000956, HCHON2000994, HCHON2001050, HCHON2001084, HCHON2001099, HCHON2001108, HCHON2001110, HCHON2001116, HCHON2001161, HCHON2001214, HCHON2001233, HCHON2001269, HCHON2001434, HCHON2001450, HCHON2001453, HCHON2001497, HCHON2001519, HCHON2001523, HCHON2001535, HCHON2001546, HCHON2001548, HCHON2001577, HCHON2001598, HCHON2001604, HCHON2001607, HCHON2001646, HCHON2001665, HCHON2001712, HCHON2001768, HCHON2001801, HCHON2001853, HCHON2002123, HCHON2002194, HCHON2002241, HCHON2002247, HCHON2002354, HCHON2002496, HCHON2002676, HCHON2002770, HCHON2002964, HCHON2002971, HCHON2003131, HCHON2003134, HCHON2003327, HCHON2003513, HCHON2003532, HCHON2003659, HCHON2003676, HCHON2004007, HCHON2004279, HCHON2004359, HCHON2004531, HCHON2004776, HCHON2004858, HCHON2005048, HCHON2005118, HCHON2005166, HCHON2005802, HCHON2005921, HCHON2005987, HCHON2006459, HCHON2006714, HCHON2006722, HCHON2006770, HCHON2006786, HCHON2006841, HCHON2006871, HCHON2007046, HCHON2007482, HCHON2007674, HCHON2007774, HCHON2007881, HCHON2008112, HCHON2008239, HCHON2008444, HCHON2008582, HCHON2008672, HCHON2008856, HCHON2008871, HCHON2008989, HCHON2009191, HCHON2009384, HCHON2009749, HCHON2009766, HCHON2009795, HCHON2010074, HCHON2010543, HEART1000088, HEART1000099, HEART1000102, HEART1000118, HEART1000139, HEART1000142, HEART1000151, HEART1000173, HEART2000024, HEART2000035, HEART2000099, HEART2000298, HEART2000306, HEART2000309, HEART2000411, HEART2000418, HEART2000448, HEART2000492, HEART2000541, HEART2000568, HEART2000611, HEART2000959, HEART2001680, HEART2001756, HEART2002129, HEART2002184, HEART2002220, HEART2002432, HEART2002531, HEART2002598, HEART2002717, HEART2003027, HEART2003168, HEART2003432, HEART2003440, HEART2003781, HEART2004570, HEART2004764, HEART2004931, HEART2004940, HEART2004941, HEART2004980, HEART2005244, HEART2005310, HEART2005581, HEART2005610, HEART2006131, HEART2006310, HEART2006334, HEART2006487, HEART2006557, HEART2006787, HEART2006789, HEART2006909, HEART2007031, HEART2007231, HEART2007443, HEART2007696, HEART2007767, HEART2008108, HEART2008111, HEART2008257, HEART2008509, HEART2008994, HEART2009000, HEART2009599, HEART2009680, HEART2010391, HEART2010492, HEART2010495, HELAC2000158, HELAC2000301, HHDPC1000001, HHDPC1000065, HHDPC1000114, HHDPC1000118, HHDPC2000070, HHDPC2000102, HHDPC2000104, HHDPC2000258, HHDPC2000315, HHDPC2000455, HHDPC2000456, HHDPC2000462, HHDPC2000572, HHDPC2000656, HHDPC2000692, HHDPC2001337, HHDPC2001432, HHDPC2001896, HHDPC2002963, HHDPC2003049, HHDPC2003113, HHDPC2003381, HHDPC2003472, HHDPC2004757, HHDPC2005185, HHDPC2005513, HHDPC2005742, HHDPC2006862, HHDPC2006927, HHDPC2007302, HHDPC2007775, HHDPC2008123, HHDPC2008185, HHDPC2008279, HHDPC2008297, HHDPC2008414, HHDPC2008474, HHDPC2008816, HHDPC2008843, HHDPC2009114, HHDPC2009178, HHDPC2009208, HHDPC2009272, HHDPC2009528, HLUNG1000017, HLUNG1000024, HLUNG1000030, HLUNG1000034, HLUNG1000053, HLUNG1000076, HLUNG1000084, HLUNG1000091, HLUNG1000099, HLUNG1000104, HLUNG1000105, HLUNG1000110, HLUNG1000151, HLUNG1000169, HLUNG2000004, HLUNG2000014, HLUNG2000027, HLUNG2000068, HLUNG2000116, HLUNG2000125, HLUNG2000130, HLUNG2000142, HLUNG2000174, HLUNG2000176, HLUNG2000217, HLUNG2000232, HLUNG2000255, HLUNG2000281, HLUNG2000314, HLUNG2000315, HLUNG2000340, HLUNG2000362, HLUNG2000363, HLUNG2000431, HLUNG2000480, HLUNG2000489, HLUNG2000549, HLUNG2000557, HLUNG2000570, HLUNG2000751, HLUNG2000761, HLUNG2000777, HLUNG2000846, HLUNG2000870, HLUNG2000884, HLUNG2000926, HLUNG2000955, HLUNG2000970, HLUNG2001013, HLUNG2001126, HLUNG2001144, HLUNG2001146, HLUNG2001214, HLUNG2001459, HLUNG2001507, HLUNG2001633, HLUNG2001677, HLUNG2001712, HLUNG2001814, HLUNG2001996, HLUNG2002006, HLUNG2002050, HLUNG2002059, HLUNG2002085, HLUNG2002295, HLUNG2002303, HLUNG2002405, HLUNG2002429, HLUNG2002562, HLUNG2002659, HLUNG2002707, HLUNG2002811, HLUNG2002916, HLUNG2002942, HLUNG2002958, HLUNG2002982, HLUNG2003049, HLUNG2003061, HLUNG2003162, HLUNG2003246, HLUNG2003306, HLUNG2003335, HLUNG2003378, HLUNG2003497, HLUNG2003691, HLUNG2003710, HLUNG2003714, HLUNG2003716, HLUNG2003833, HLUNG2003872, HLUNG2003918, HLUNG2003991, HLUNG2004014, HLUNG2004037, HLUNG2004067, HLUNG2004154, HLUNG2004170, HLUNG2004217, HLUNG2004273, HLUNG2004416, HLUNG2004521, HLUNG2004534, HLUNG2004684, HLUNG2004707, HLUNG2004774, HLUNG2004775, HLUNG2005012, HLUNG2005030, HLUNG2005045, HLUNG2005076, HLUNG2005133, HLUNG2005203, HLUNG2005479, HLUNG2005524, HLUNG2005656, HLUNG2005738, HLUNG2005774, HLUNG2005813, HLUNG2005924, HLUNG2006026, HLUNG2006067, HLUNG2006094, HLUNG2006370, HLUNG2006397, HLUNG2006570, HLUNG2006599, HLUNG2006614, HLUNG2006671, HLUNG2006781, HLUNG2006852, HLUNG2006935, HLUNG2007041, HLUNG2007210, HLUNG2007219, HLUNG2007245, HLUNG2007433, HLUNG2007931, HLUNG2008066, HLUNG2008139, HLUNG2008153, HLUNG2008235, HLUNG2008247, HLUNG2008333, HLUNG2008348, HLUNG2008384, HLUNG2008396, HLUNG2008439, HLUNG2008479, HLUNG2008480, HLUNG2008521, HLUNG2008833, HLUNG2008875, HLUNG2008958, HLUNG2008959, HLUNG2009067, HLUNG2009215, HLUNG2009253, HLUNG2009303, HLUNG2009413, HLUNG2009729, HLUNG2010181, HLUNG2010464, HLUNG2010562, HLUNG2010845, HLUNG2011041, HLUNG2011298, HLUNG2011461, HLUNG2011833, HLUNG2012049, HLUNG2012287, HLUNG2012315, HLUNG2012546, HLUNG2012600, HLUNG2012727, HLUNG2013097, HLUNG2013204, HLUNG2013304, HLUNG2013350, HLUNG2013622, HLUNG2013643, HLUNG2013784, HLUNG2013851, HLUNG2014262, HLUNG2014288, HLUNG2014449, HLUNG2014821, HLUNG2015184, HLUNG2015418, HLUNG2015548, HLUNG2015578, HLUNG2015617, HLUNG2016022, HLUNG2016862, HLUNG2017262, HLUNG2017286, HLUNG2017307, HLUNG2017350, HLUNG2017546, HLUNG2017806, HLUNG2018029, HLUNG2018282, HLUNG2018626, HLUNG2019058, HSYRA1000131, HSYRA1000148, HSYRA1000152, HSYRA2000044, HSYRA2000135, HSYRA2000137, HSYRA2000221, HSYRA2000237, HSYRA2000253, HSYRA2000371, HSYRA2000424, HSYRA2000507, HSYRA2000510, HSYRA2000605, HSYRA2000629, HSYRA2000706, HSYRA2000760, HSYRA2000787, HSYRA2000792, HSYRA2000828, HSYRA2000832, HSYRA2000927, HSYRA2001003, HSYRA2001105, HSYRA2001142, HSYRA2001153, HSYRA2001232, HSYRA2001255, HSYRA2001332, HSYRA2001353, HSYRA2001484, HSYRA2001552, HSYRA2001580, HSYRA2001615, HSYRA2001621, HSYRA2001631, HSYRA2001638, HSYRA2002103, HSYRA2002590, HSYRA2002741, HSYRA2003168, HSYRA2004550, HSYRA2004858, HSYRA2005456, HSYRA2005496, HSYRA2005628, HSYRA2005970, HSYRA2006049, HSYRA2006873, HSYRA2007241, HSYRA2007338, HSYRA2007667, HSYRA2008154, HSYRA2008714, HSYRA2009102, IMR321000155, IMR321000161, IMR321000165, IMR321000193, IMR321000207, IMR321000230, IMR321000266, IMR322000010, IMR322000107, IMR322000164, IMR322000379, IMR322000383, IMR322000418, IMR322000518, IMR322000555, IMR322000604, IMR322000609, IMR322000656, IMR322000672, IMR322000775, IMR322000791, IMR322000811, IMR322000819, IMR322000838, IMR322000859, IMR322000863, IMR322000917, IMR322000918, IMR322000919, IMR322000953, IMR322000984, IMR322001018, IMR322001167, IMR322001185, IMR322001245, IMR322001318, IMR322001322, IMR322001332, IMR322001380, IMR322001452, IMR322001491, IMR322001534, IMR322001665, IMR322001670, IMR322001710, IMR322001724, IMR322001879, IMR322002035, IMR322002110, IMR322002470, IMR322002993, IMR322003675, IMR322004768, IMR322005293, IMR322005833, IMR322006012, IMR322006222, IMR322006495, IMR322006520, IMR322006886, IMR322006947, IMR322007078, IMR322007225, IMR322007704, IMR322008651, IMR322009710, IMR322009807, IMR322010295, IMR322010953, IMR322011689, IMR322012314, IMR322012529, IMR322013053, IMR322013396, IMR322013731, IMR322013805, IMR322015523, IMR322016146, IMR322017049, IMR322018117, IMR322018192, IMR322019070, KIDNE1000008, KIDNE1000012, KIDNE1000015, KIDNE1000028, KIDNE1000036, KIDNE1000064, KIDNE1000104, KIDNE1000121, KIDNE1000143, KIDNE1000152, KIDNE2000026, KIDNE2000041, KIDNE2000046, KIDNE2000051, KIDNE2000070, KIDNE2000167, KIDNE2000174, KIDNE2000192, KIDNE2000227, KIDNE2000244, KIDNE2000245, KIDNE2000287, KIDNE2000315, KIDNE2000317, KIDNE2000328, KIDNE2000330, KIDNE2000335, KIDNE2000349, KIDNE2000375, KIDNE2000394, KIDNE2000403, KIDNE2000422, KIDNE2000493, KIDNE2000510, KIDNE2000513, KIDNE2000517, KIDNE2000519, KIDNE2000555, KIDNE2000624, KIDNE2000665, KIDNE2000678, KIDNE2000717, KIDNE2000721, KIDNE2000722, KIDNE2000801, KIDNE2000832, KIDNE2000846, KIDNE2000867, KIDNE2000947, KIDNE2001117, KIDNE2001140, KIDNE2001269, KIDNE2001361, KIDNE2001636, KIDNE2001713, KIDNE2001802, KIDNE2001840, KIDNE2001847, KIDNE2001857, KIDNE2001873, KIDNE2001897, KIDNE2001931, KIDNE2001979, KIDNE2002015, KIDNE2002162, KIDNE2002168, KIDNE2002191, KIDNE2002198, KIDNE2002262, KIDNE2002265, KIDNE2002438, KIDNE2002483, KIDNE2002725, KIDNE2002768, KIDNE2002795, KIDNE2002798, KIDNE2002839, KIDNE2002845, KIDNE2002882, KIDNE2002980, KIDNE2002991, KIDNE2003185, KIDNE2003188, KIDNE2003233, KIDNE2003316, KIDNE2003335, KIDNE2003357, KIDNE2003373, KIDNE2003377, KIDNE2003752, KIDNE2003764, KIDNE2003837, KIDNE2004034, KIDNE2004054, KIDNE2004084, KIDNE2004095, KIDNE2004115, KIDNE2004233, KIDNE2004262, KIDNE2004279, KIDNE2004294, KIDNE2004295, KIDNE2004305, KIDNE2004344, KIDNE2004394, KIDNE2004411, KIDNE2004519, KIDNE2004520, KIDNE2004531, KIDNE2004534, KIDNE2004562, KIDNE2004579, KIDNE2004626, KIDNE2004681, KIDNE2004828, KIDNE2004846, KIDNE2004879, KIDNE2004981, KIDNE2004985, KIDNE2004999, KIDNE2005038, KIDNE2005042, KIDNE2005062, KIDNE2005266, KIDNE2005296, KIDNE2005321, KIDNE2005327, KIDNE2005336, KIDNE2005400, KIDNE2005424, KIDNE2005477, KIDNE2005526, KIDNE2005543, KIDNE2005603, KIDNE2005629, KIDNE2005676, KIDNE2005781, KIDNE2005798, KIDNE2005854, KIDNE2005908, KIDNE2005937, KIDNE2006030, KIDNE2006053, KIDNE2006062, KIDNE2006092, KIDNE2006145, KIDNE2006149, KIDNE2006210, KIDNE2006299, KIDNE2006334, KIDNE2006376, KIDNE2006378, KIDNE2006465, KIDNE2006580, KIDNE2006652, KIDNE2006687, KIDNE2006733, KIDNE2006760, KIDNE2006775, KIDNE2006820, KIDNE2006880, KIDNE2007040, KIDNE2007077, KIDNE2007222, KIDNE2007356, KIDNE2007422, KIDNE2007569, KIDNE2007810, KIDNE2007944, KIDNE2007954, KIDNE2008022, KIDNE2008069, KIDNE2008072, KIDNE2008116, KIDNE2008117, KIDNE2008218, KIDNE2008315, KIDNE2008362, KIDNE2008378, KIDNE2008403, KIDNE2008404, KIDNE2008446, KIDNE2008473, KIDNE2008480, KIDNE2008666, KIDNE2008697, KIDNE2008758, KIDNE2008788, KIDNE2008795, KIDNE2008824, KIDNE2008832, KIDNE2008869, KIDNE2008914, KIDNE2008975, KIDNE2009019, KIDNE2009109, KIDNE2009180, KIDNE2009191, KIDNE2009332, KIDNE2009367, KIDNE2009426, KIDNE2009467, KIDNE2009490, KIDNE2009553, KIDNE2009605, KIDNE2009628, KIDNE2009647, KIDNE2009676, KIDNE2009723, KIDNE2010007, KIDNE2010049, KIDNE2010052, KIDNE2010084, KIDNE2010137, KIDNE2010151, KIDNE2010264, KIDNE2010271, KIDNE2010419, KIDNE2010430, KIDNE2010574, KIDNE2010674, KIDNE2010739, KIDNE2010750, KIDNE2010762, KIDNE2010863, KIDNE2010973, KIDNE2010989, KIDNE2011200, KIDNE2011314, KIDNE2011508, KIDNE2011532, KIDNE2011635, KIDNE2011752, KIDNE2011782, KIDNE2011858, KIDNE2012009, KIDNE2012188, KIDNE2012291, KIDNE2012316, KIDNE2012361, KIDNE2012440, KIDNE2012453, KIDNE2012563, KIDNE2012601, KIDNE2012613, KIDNE2012710, KIDNE2012745, KIDNE2012775, KIDNE2012784, KIDNE2012945, KIDNE2013045, KIDNE2013095, KIDNE2013158, KIDNE2013218, KIDNE2013263, KIDNE2013346, KIDNE2013388, KIDNE2013413, KIDNE2013489, KIDNE2013639, KIDNE2013731, KIDNE2013734, KIDNE2013775, KIDNE2013801, KIDNE2013866, KIDNE2014087, KIDNE2014112, KIDNE2014170, KIDNE2014184, KIDNE2014268, KIDNE2014298, KIDNE2014320, KIDNE2014325, KIDNE2014415, KIDNE2014489, KIDNE2014496, KIDNE2014661, KIDNE2014717, KIDNE2014789, KIDNE2014808, KIDNE2014890, KIDNE2014978, KIDNE2015073, KIDNE2015221, KIDNE2015244, KIDNE2015313, KIDNE2015433, KIDNE2015483, KIDNE2015515, KIDNE2015546, KIDNE2015556, KIDNE2015598, KIDNE2015660, KIDNE2015710, KIDNE2015987, KIDNE2016000, KIDNE2016036, KIDNE2016096, KIDNE2016101, KIDNE2016142, KIDNE2016188, KIDNE2016327, KIDNE2016371, KIDNE2016388, KIDNE2016464, KIDNE2016539, KIDNE2016570, KIDNE2016918, KIDNE2017007, KIDNE2017040, KIDNE2017052, KIDNE2017151, KIDNE2017153, KIDNE2017315, KIDNE2017332, KIDNE2017454, KIDNE2017603, KIDNE2017956, KIDNE2018071, KIDNE2018166, KIDNE2018167, KIDNE2018217, KIDNE2018254, KIDNE2018268, KIDNE2018269, KIDNE2018287, KIDNE2018294, KIDNE2018462, KIDNE2018617, KIDNE2018678, KIDNE2018727, KIDNE2018863, KIDNE2018989, KIDNE2018996, KIDNE2019074, KIDNE2019187, LIVER1000017, LIVER1000050, LIVER1000055, LIVER1000058, LIVER1000063, LIVER1000067, LIVER1000073, LIVER1000079, LIVER1000082, LIVER1000099, LIVER1000104, LIVER1000111, LIVER1000126, LIVER1000139, LIVER1000155, LIVER1000165, LIVER1000175, LIVER1000224, LIVER1000230, LIVER1000278, LIVER1000303, LIVER1000397, LIVER1000433, LIVER1000479, LIVER1000482, LIVER1000542, LIVER2000003, LIVER2000033, LIVER2000037, LIVER2000158, LIVER2000216, LIVER2000237, LIVER2000247, LIVER2000360, LIVER2000416, LIVER2000446, LIVER2000515, LIVER2000592, LIVER2000626, LIVER2000682, LIVER2000769, LIVER2000775, LIVER2001051, LIVER2001076, LIVER2001099, LIVER2001113, LIVER2001164, LIVER2001191, LIVER2001265, LIVER2001329, LIVER2001389, LIVER2001461, LIVER2001539, LIVER2001608, LIVER2001835, LIVER2002638, LIVER2002644, LIVER2002660, LIVER2002702, LIVER2003008, LIVER2003065, LIVER2003234, LIVER2003511, LIVER2003524, LIVER2003568, LIVER2003581, LIVER2003800, LIVER2003854, LIVER2004074, LIVER2004392, LIVER2004514, LIVER2004565, LIVER2005028, LIVER2005198, LIVER2005218, LIVER2005376, LIVER2005385, LIVER2005512, LIVER2005520, LIVER2005527, LIVER2005544, LIVER2005625, LIVER2005728, LIVER2005973, LIVER2005981, LIVER2006006, LIVER2006251, LIVER2006410, LIVER2006469, LIVER2006644, LIVER2006764, LIVER2007415, LIVER2007548, LIVER2007568, LIVER2007721, LIVER2008053, LIVER2008465, LIVER2008473, LIVER2008580, LIVER2008706, LIVER2008945, LIVER2008998, LIVER2009110, LIVER2009118, LIVER2009554, LYMPB1000141, LYMPB1000158, LYMPB2000083, MAMGL1000017, MAMGL1000083, MAMGL1000096, MAMGL1000100, MAMGL1000132, MAMGL1000151, MAMGL1000182, MAMGL1000184, MESAN1000032, MESAN1000035, MESAN1000050, MESAN1000079, MESAN1000080, MESAN1000101, MESAN1000121, MESAN1000147, MESAN1000180, MESAN2000023, MESAN2000026, MESAN2000067, MESAN2000092, MESAN2000167, MESAN2000291, MESAN2000337, MESAN2000434, MESAN2000457, MESAN2000462, MESAN2000572, MESAN2000620, MESAN2000711, MESAN2000815, MESAN2000894, MESAN2000909, MESAN2001450, MESAN2001627, MESAN2001770, MESAN2001979, MESAN2001980, MESAN2002113, MESAN2002122, MESAN2002147, MESAN2002186, MESAN2002424, MESAN2002519, MESAN2002687, MESAN2002709, MESAN2002724, MESAN2002790, MESAN2002844, MESAN2002978, MESAN2003035, MESAN2003037, MESAN2003039, MESAN2003058, MESAN2003101, MESAN2003190, MESAN2003322, MESAN2003490, MESAN2003529, MESAN2003622, MESAN2003646, MESAN2003662, MESAN2003709, MESAN2003851, MESAN2004138, MESAN2004575, MESAN2005303, MESAN2005371, MESAN2005633, MESAN2005724, MESAN2005766, MESAN2005808, MESAN2005811, MESAN2005957, MESAN2006022, MESAN2006043, MESAN2006328, MESAN2006401, MESAN2006580, MESAN2006599, MESAN2006743, MESAN2006953, MESAN2006971, MESAN2007032, MESAN2007440, MESAN2007597, MESAN2007755, MESAN2008222, MESAN2008334, MESAN2008415, MESAN2008460, MESAN2008536, MESAN2008679, MESAN2008729, MESAN2008821, MESAN2008926, MESAN2008936, MESAN2009019, MESAN2009105, MESAN2009311, MESAN2009418, MESAN2009503, MESAN2009522, MESAN2010031, MESAN2010114, MESAN2010312, MESAN2010321, MESAN2010664, MESAN2010681, MESAN2011545, MESAN2011597, MESAN2011627, MESAN2011632, MESAN2011977, MESAN2011984, MESAN2012054, MESAN2012113, MESAN2012586, MESAN2012708, MESAN2012735, MESAN2013019, MESAN2013022, MESAN2013183, MESAN2013211, MESAN2013283, MESAN2013611, MESAN2013674, MESAN2013845, MESAN2013908, MESAN2013936, MESAN2014192, MESAN2014295, MESAN2014298, MESAN2014412, MESAN2014624, MESAN2015277, MESAN2015365, MESAN2015391, MESAN2015401, MESAN2015501, MESAN2015515, MESAN2015708, MESAN2016159, MESAN2016304, MESAN2016409, MESAN2016552, MESAN2016965, MESAN2017133, MESAN2017152, MESAN2017373, MESAN2017417, MESAN2018209, MESAN2018576, MESAN2018670, MESAN2018699, MESTC1000042, MESTC1000147, MESTC2000150, MESTC2000153, MESTC2000170, N1ESE2000698, NB9N41000011, NB9N41000047, NB9N41000121, NB9N41000142, NB9N41000146, NB9N41000340, NB9N42000104, NB9N42000122, NB9N42000196, NB9N42000314, NB9N42000342, NB9N42000430, NB9N42000495, NB9N42001300, NCRRP1000129, NESOP1000010, NESOP1000108, NESOP2000231, NESOP2000452, NESOP2000499, NESOP2000504, NESOP2000744, NESOP2001144, NESOP2001433, NESOP2001656, NESOP2001694, NESOP2001752, NESOP2002352, NESOP2002418, NESOP2002487, NESOP2002738, NESOP2002780, NETRP1000034, NETRP1000082, NETRP2000086, NETRP2000182, NETRP2000439, NHNPC1000034, NHNPC1000037, NHNPC1000084, NHNPC1000101, NHNPC1000124, NHNPC2000187, NHNPC2000212, NHNPC2000606, NHNPC2000877, NHNPC2001108, NHNPC2001223, NHNPC2001312, NHNPC2001816, NHNPC2001931, NHNPC2002565, NHNPC2002749, NOVAR1000091, NOVAR1000102, NOVAR2000136, NOVAR2000352, NOVAR2000412, NOVAR2000710, NOVAR2000783, NOVAR2000962, NOVAR2001108, NOVAR2001620, NOVAR2001783, NOVAR2001876, NOVAR2002039, NT2NE1000004, NT2NE1000014, NT2NE1000018, NT2NE1000023, NT2NE1000024, NT2NE1000059, NT2NE1000063, NT2NE1000073, NT2NE1000083, NT2NE1000120, NT2NE1000122, NT2NE1000175, NT2NE1000181, NT2NE1000185, NT2NE2000038, NT2NE2000054, NT2NE2000057, NT2NE2000064, NT2NE2000109, NT2NE2000137, NT2NE2000156, NT2NE2000195, NT2NE2000222, NT2NE2000284, NT2NE2000299, NT2NE2000327, NT2NE2000353, NT2NE2000356, NT2NE2000369, NT2NE2000374, NT2NE2000384, NT2NE2000386, NT2NE2000390, NT2NE2000392, NT2NE2000455, NT2NE2000488, NT2NE2000517, NT2NE2000536, NT2NE2000546, NT2NE2000548, NT2NE2000550, NT2NE2000586, NT2NE2000612, NT2NE2000636, NT2NE2000658, NT2NE2000706, NT2NE2000802, NT2NE2000808, NT2NE2000809, NT2NE2000864, NT2NE2000909, NT2NE2000913, NT2NE2000951, NT2NE2000980, NT2NE2001005, NT2NE2001021, NT2NE2001040, NT2NE2001048, NT2NE2001142, NT2NE2001176, NT2NE2001180, NT2NE2001188, NT2NE2001191, NT2NE2001247, NT2NE2001252, NT2NE2001324, NT2NE2001326, NT2NE2001337, NT2NE2001364, NT2NE2001372, NT2NE2001397, NT2NE2001403, NT2NE2001428, NT2NE2001432, NT2NE2001435, NT2NE2001442, NT2NE2001524, NT2NE2001530, NT2NE2001545, NT2NE2001598, NT2NE2001623, NT2NE2001626, NT2NE2001634, NT2NE2001648, NT2NE2001655, NT2NE2001660, NT2NE2001666, NT2NE2001677, NT2NE2001697, NT2NE2001698, NT2NE2001723, NT2NE2001725, NT2NE2001874, NT2NE2001889, NT2NE2001923, NT2NE2002100, NT2NE2002162, NT2NE2002186, NT2NE2002285, NT2NE2002311, NT2NE2002620, NT2NE2002651, NT2NE2002732, NT2NE2002768, NT2NE2002791, NT2NE2002856, NT2NE2002870, NT2NE2003150, NT2NE2003252, NT2NE2003280, NT2NE2003308, NT2NE2003309, NT2NE2003315, NT2NE2003393, NT2NE2003408, NT2NE2003457, NT2NE2003540, NT2NE2003569, NT2NE2003571, NT2NE2003705, NT2NE2003752, NT2NE2003887, NT2NE2003921, NT2NE2004255, NT2NE2004378, NT2NE2004490, NT2NE2004606, NT2NE2004716, NT2NE2004740, NT2NE2004787, NT2NE2004916, NT2NE2005035, NT2NE2005223, NT2NE2005276, NT2NE2005317, NT2NE2005323, NT2NE2005358, NT2NE2005395, NT2NE2005419, NT2NE2005517, NT2NE2005537, NT2NE2005555, NT2NE2005588, NT2NE2005676, NT2NE2005720, NT2NE2005784, NT2NE2005804, NT2NE2005821, NT2NE2005890, NT2NE2005921, NT2NE2005968, NT2NE2006087, NT2NE2006103, NT2NE2006217, NT2NE2006288, NT2NE2006382, NT2NE2006387, NT2NE2006427, NT2NE2006432, NT2NE2006478, NT2NE2006531, NT2NE2006659, NT2NE2006784, NT2NE2006813, NT2NE2006894, NT2NE2006909, NT2NE2006942, NT2NE2006958, NT2NE2007052, NT2NE2007220, NT2NE2007425, NT2NE2007725, NT2NE2007727, NT2NE2007786, NT2NE2007877, NT2NE2007967, NT2NE2008017, NT2NE2008060, NT2NE2008077, NT2NE2008213, NT2NE2008260, NT2NE2008378, NT2NE2008607, NT2NE2008639, NT2NE2008727, NT2NE2008783, NT2NE2008785, NT2NE2008803, NT2NE2008867, NT2NE2008961, NT2NE2008997, NT2NE2009138, NT2NE2009295, NT2NE2009426, NT2NE2009523, NT2NE2009608, NT2NE2009691, NT2NE2010056, NT2NE2010105, NT2NE2010150, NT2NE2010400, NT2NE2010632, NT2NE2010633, NT2NE2010654, NT2NE2010688, NT2NE2010781, NT2NE2010842, NT2NE2010854, NT2NE2011033, NT2NE2011036, NT2NE2011107, NT2NE2011119, NT2NE2011154, NT2NE2011221, NT2NE2011411, NT2NE2011485, NT2NE2011650, NT2NE2011687, NT2NE2011691, NT2NE2011758, NT2NE2011823, NT2NE2011896, NT2NE2011998, NT2NE2012113, NT2NE2012199, NT2NE2012243, NT2NE2012361, NT2NE2012448, NT2NE2012457, NT2NE2012493, NT2NE2012505, NT2NE2012533, NT2NE2012603, NT2NE2012747, NT2NE2012847, NT2NE2012928, NT2NE2013019, NT2NE2013081, NT2NE2013189, NT2NE2013217, NT2NE2013547, NT2NE2014013, NT2NE2014028, NT2NE2014104, NT2NE2014113, NT2NE2014176, NT2NE2014221, NT2NE2014525, NT2NE2014650, NT2NE2014651, NT2NE2014681, NT2NE2014758, NT2NE2014869, NT2NE2014950, NT2NE2015061, NT2NE2015262, NT2NE2015275, NT2NE2015362, NT2NE2015480, NT2NE2015511, NT2NE2015565, NT2NE2015626, NT2NE2015747, NT2NE2015860, NT2NE2015885, NT2NE2015904, NT2NE2015974, NT2NE2016041, NT2NE2016387, NT2NE2016419, NT2NE2016519, NT2NE2016608, NT2NE2016766, NT2NE2016774, NT2NE2016971, NT2NE2017259, NT2NE2017332, NT2NE2017397, NT2NE2017480, NT2NE2017492, NT2NE2017508, NT2NE2017562, NT2NE2017590, NT2NE2017612, NT2NE2017721, NT2NE2017752, NT2NE2017792, NT2NE2017982, NT2NE2018165, NT2NE2018176, NT2NE2018273, NT2NE2018376, NT2NE2018472, NT2NE2018490, NT2NE2018594, NT2NE2018739, NT2NE2018916, NT2NE2019056, NT2NE2019076, NT2NE2019091, NT2NE2019099, NT2RI1000016, NT2RI1000035, NT2RI1000048, NT2RI1000127, NT2RI1000164, NT2RI1000172, NT2RI2000004, NT2RI2000007, NT2RI2000116, NT2RI2000117, NT2RI2000128, NT2RI2000133, NT2RI2000167, NT2RI2000173, NT2RI2000187, NT2RI2000270, NT2RI2000276, NT2RI2000294, NT2RI2000313, NT2RI2000341, NT2RI2000344, NT2RI2000348, NT2RI2000421, NT2RI2000480, NT2RI2000575, NT2RI2000578, NT2RI2000588, NT2RI2000597, NT2RI2000669, NT2RI2000688, NT2RI2000704, NT2RI2000738, NT2RI2000775, NT2RI2000822, NT2RI2000829, NT2RI2000841, NT2RI2000865, NT2RI2000932, NT2RI2000974, NT2RI2000987, NT2RI2001010, NT2RI2001017, NT2RI2001030, NT2RI2001083, NT2RI2001167, NT2RI2001178, NT2RI2001235, NT2RI2001244, NT2RI2001307, NT2RI2001342, NT2RI2001410, NT2RI2001425, NT2RI2001449, NT2RI2001450, NT2RI2001474, NT2RI2001519, NT2RI2001595, NT2RI2001624, NT2RI2001731, NT2RI2001769, NT2RI2001782, NT2RI2001836, NT2RI2001846, NT2RI2001866, NT2RI2001910, NT2RI2001952, NT2RI2002022, NT2RI2002041, NT2RI2002120, NT2RI2002153, NT2RI2002179, NT2RI2002243, NT2RI2002252, NT2RI2002260, NT2RI2002266, NT2RI2002270, NT2RI2002334, NT2RI2002359, NT2RI2002447, NT2RI2002481, NT2RI2002507, NT2RI2002517, NT2RI2002530, NT2RI2002540, NT2RI2002564, NT2RI2002585, NT2RI2002592, NT2RI2002602, NT2RI2002654, NT2RI2002699, NT2RI2002729, NT2RI2002802, NT2RI2002819, NT2RI2002822, NT2RI2002852, NT2RI2002865, NT2RI2002923, NT2RI2002926, NT2RI2002970, NT2RI2003011, NT2RI2003019, NT2RI2003051, NT2RI2003067, NT2RI2003184, NT2RI2003222, NT2RI2003301, NT2RI2003317, NT2RI2003344, NT2RI2003360, NT2RI2003361, NT2RI2003383, NT2RI2003392, NT2RI2003399, NT2RI2003419, NT2RI2003481, NT2RI2003487, NT2RI2003556, NT2RI2003655, NT2RI2003667, NT2RI2003678, NT2RI2003751, NT2RI2003884, NT2RI2003973, NT2RI2003993, NT2RI2004078, NT2RI2004079, NT2RI2004093, NT2RI2004136, NT2RI2004157, NT2RI2004190, NT2RI2004209, NT2RI2004230, NT2RI2004284, NT2RI2004290, NT2RI2004304, NT2RI2004312, NT2RI2004381, NT2RI2004398, NT2RI2004410, NT2RI2004442, NT2RI2004468, NT2RI2004535, NT2RI2004606, NT2RI2004618, NT2RI2004783, NT2RI2004818, NT2RI2004840, NT2RI2004884, NT2RI2004916, NT2RI2004962, NT2RI2004984, NT2RI2004985, NT2RI2005048, NT2RI2005061, NT2RI2005069, NT2RI2005087, NT2RI2005096, NT2RI2005116, NT2RI2005130, NT2RI2005166, NT2RI2005246, NT2RI2005315, NT2RI2005335, NT2RI2005353, NT2RI2005358, NT2RI2005368, NT2RI2005382, NT2RI2005473, NT2RI2005520, NT2RI2005564, NT2RI2005579, NT2RI2005621, NT2RI2005628, NT2RI2005647, NT2RI2005670, NT2RI2005710, NT2RI2005772, NT2RI2005811, NT2RI2005814, NT2RI2005816, NT2RI2005818, NT2RI2005851, NT2RI2005966, NT2RI2006071, NT2RI2006081, NT2RI2006126, NT2RI2006127, NT2RI2006183, NT2RI2006257, NT2RI2006271, NT2RI2006294, NT2RI2006345, NT2RI2006403, NT2RI2006445, NT2RI2006487, NT2RI2006506, NT2RI2006553, NT2RI2006565, NT2RI2006640, NT2RI2006647, NT2RI2006659, NT2RI2006662, NT2RI2006667, NT2RI2006679, NT2RI2006682, NT2RI2006686, NT2RI2006703, NT2RI2006716, NT2RI2006735, NT2RI2006762, NT2RI2006788, NT2RI2006838, NT2RI2006943, NT2RI2006973, NT2RI2007046, NT2RI2007048, NT2RI2007116, NT2RI2007148, NT2RI2007214, NT2RI2007277, NT2RI2007303, NT2RI2007334, NT2RI2007377, NT2RI2007386, NT2RI2007406, NT2RI2007439, NT2RI2007445, NT2RI2007468, NT2RI2007469, NT2RI2007507, NT2RI2007572, NT2RI2007593, NT2RI2007729, NT2RI2007751, NT2RI2007754, NT2RI2007853, NT2RI2007877, NT2RI2007879, NT2RI2007891, NT2RI2007956, NT2RI2007965, NT2RI2008007, NT2RI2008050, NT2RI2008141, NT2RI2008188, NT2RI2008233, NT2RI2008396, NT2RI2008455, NT2RI2008502, NT2RI2008566, NT2RI2008598, NT2RI2008656, NT2RI2008714, NT2RI2008724, NT2RI2008801, NT2RI2008808, NT2RI2008841, NT2RI2008942, NT2RI2008952, NT2RI2009005, NT2RI2009066, NT2RI2009101, NT2RI2009103, NT2RI2009144, NT2RI2009151, NT2RI2009194, NT2RI2009215, NT2RI2009233, NT2RI2009259, NT2RI2009289, NT2RI2009301, NT2RI2009402, NT2RI2009406, NT2RI2009517, NT2RI2009585, NT2RI2009595, NT2RI2009855, NT2RI2010283, NT2RI2010508, NT2RI2010795, NT2RI2011422, NT2RI2011450, NT2RI2011683, NT2RI2011803, NT2RI2012350, NT2RI2012659, NT2RI2012990, NT2RI2013345, NT2RI2013357, NT2RI2013373, NT2RI2014247, NT2RI2014551, NT2RI2014683, NT2RI2014733, NT2RI2015239, NT2RI2015342, NT2RI2016128, NT2RI2016134, NT2RI2018311, NT2RI2018363, NT2RI2018883, NT2RI2018950, NT2RI2019751, NT2RI2019826, NT2RI2020390, NT2RI2020703, NT2RI2021463, NT2RI2021625, NT2RI2022584, NT2RI2023303, NT2RI2023671, NT2RI2024008, NT2RI2024313, NT2RI2024460, NT2RI2024496, NT2RI2024935, NT2RI2025075, NT2RI2025255, NT2RI2025564, NT2RI2025565, NT2RI2025909, NT2RI2025957, NT2RI2025976, NT2RI2026758, NT2RI2027081, NT2RI2027157, NT2RI2027224, NT2RI2027323, NT2RI2027396, NT2RI2027484, NT2RI2027975, NT2RI2028213, NT2RI2028222, NT2RI2028537, NT2RI2028642, NT2RI3000174, NT2RI3000213, NT2RI3000423, NT2RI3000622, NT2RI3001132, NT2RI3001263, NT2RI3001279, NT2RI3001348, NT2RI3001445, NT2RI3001458, NT2RI3001515, NT2RI3001573, NT2RI3001967, NT2RI3002303, NT2RI3002557, NT2RI3002842, NT2RI3003027, NT2RI3003031, NT2RI3003095, NT2RI3003104, NT2RI3003162, NT2RI3003362, NT2RI3003382, NT2RI3003409, NT2RI3003738, NT2RI3003925, NT2RI3004133, NT2RI3004381, NT2RI3004510, NT2RI3005202, NT2RI3005403, NT2RI3005416, NT2RI3005724, NT2RI3005861, NT2RI3005923, NT2RI3005928, NT2RI3006132, NT2RI3006171, NT2RI3006284, NT2RI3006340, NT2RI3006376, NT2RI3006666, NT2RI3006673, NT2RI3006796, NT2RI3007065, NT2RI3007095, NT2RI3007158, NT2RI3007167, NT2RI3007213, NT2RI3007291, NT2RI3007443, NT2RI3007543, NT2RI3007684, NT2RI3007757, NT2RI3007878, NT2RI3007978, NT2RI3008055, NT2RI3008162, NT2RI3008179, NT2RI3008228, NT2RI3008442, NT2RI3008652, NT2RI3008697, NT2RI3008974, NT2RI3009158, NT2RI3009480, NT2RI3009524, NT2RP6000005, NT2RP6000008, NT2RP6000017, NT2RP6000032, NT2RP6000033, NT2RP6000039, NT2RP6000059, NT2RP6000060, NT2RP6000077, NT2RP6000085, NT2RP6000086, NT2RP6000100, NT2RP6000109, NT2RP6000110, NT2RP6000119, NT2RP6000127, NT2RP6000130, NT2RP6000140, NT2RP6000150, NT2RP7000041, NT2RP7000069, NT2RP7000086, NT2RP7000109, NT2RP7000173, NT2RP7000238, NT2RP7000259, NT2RP7000311, NT2RP7000359, NT2RP7000364, NT2RP7000380, NT2RP7000391, NT2RP7000425, NT2RP7000477, NT2RP7000579, NT2RP7000586, NT2RP7000600, NT2RP7000624, NT2RP7000812, NT2RP7000926, NT2RP7001074, NT2RP7001080, NT2RP7001156, NT2RP7001231, NT2RP7001319, NT2RP7001335, NT2RP7001364, NT2RP7001475, NT2RP7001532, NT2RP7001591, NT2RP7001602, NT2RP7001678, NT2RP7001856, NT2RP7001962, NT2RP7002028, NT2RP7002064, NT2RP7002151, NT2RP7002163, NT2RP7002243, NT2RP7002376, NT2RP7002450, NT2RP7002478, NT2RP7002554, NT2RP7002594, NT2RP7002603, NT2RP7002650, NT2RP7002738, NT2RP7002779, NT2RP7002802, NT2RP7002841, NT2RP7002875, NT2RP7002906, NT2RP7002978, NT2RP7002982, NT2RP7003025, NT2RP7003050, NT2RP7003055, NT2RP7003084, NT2RP7003091, NT2RP7003107, NT2RP7003134, NT2RP7003148, NT2RP7003203, NT2RP7003319, NT2RP7003439, NT2RP7003511, NT2RP7003629, NT2RP7003632, NT2RP7003647, NT2RP7003680, NT2RP7003724, NT2RP7003960, NT2RP7004027, NT2RP7004080, NT2RP7004114, NT2RP7004123, NT2RP7004196, NT2RP7004204, NT2RP7004233, NT2RP7004260, NT2RP7004352, NT2RP7004358, NT2RP7004396, NT2RP7004428, NT2RP7004481, NT2RP7004559, NT2RP7004641, NT2RP7004656, NT2RP7004687, NT2RP7004722, NT2RP7004728, NT2RP7004766, NT2RP7004790, NT2RP7004911, NT2RP7004915, NT2RP7004961, NT2RP7004964, NT2RP7004975, NT2RP7005118, NT2RP7005205, NT2RP7005219, NT2RP7005323, NT2RP7005468, NT2RP7005493, NT2RP7005529, NT2RP7005629, NT2RP7005631, NT2RP7005669, NT2RP7005675, NT2RP7005750, NT2RP7005846, NT2RP7006033, NT2RP7006160, NT2RP7006162, NT2RP7006188, NT2RP7006223, NT2RP7006263, NT2RP7006296, NT2RP7006304, NT2RP7006374, NT2RP7006395, NT2RP7006408, NT2RP7006457, NT2RP7006490, NT2RP7006547, NT2RP7006601, NT2RP7006619, NT2RP7006621, NT2RP7006636, NT2RP7006701, NT2RP7006853, NT2RP7006886, NT2RP7006887, NT2RP7006986, NT2RP7006995, NT2RP7007114, NT2RP7007177, NT2RP7007221, NT2RP7007226, NT2RP7007252, NT2RP7007269, NT2RP7007310, NT2RP7007359, NT2RP7007381, NT2RP7007406, NT2RP7007480, NT2RP7007504, NT2RP7007537, NT2RP7007580, NT2RP7007594, NT2RP7007610, NT2RP7007617, NT2RP7007643, NT2RP7007766, NT2RP7007925, NT2RP7007930, NT2RP7008013, NT2RP7008015, NT2RP7008133, NT2RP7008137, NT2RP7008142, NT2RP7008144, NT2RP7008161, NT2RP7008190, NT2RP7008315, NT2RP7008360, NT2RP7008396, NT2RP7008406, NT2RP7008435, NT2RP7008441, NT2RP7008454, NT2RP7008487, NT2RP7008544, NT2RP7008550, NT2RP7008557, NT2RP7008623, NT2RP7008657, NT2RP7008714, NT2RP7008720, NT2RP7008855, NT2RP7008863, NT2RP7009012, NT2RP7009019, NT2RP7009030, NT2RP7009087, NT2RP7009108, NT2RP7009147, NT2RP7009149, NT2RP7009168, NT2RP7009215, NT2RP7009225, NT2RP7009236, NT2RP7009253, NT2RP7009267, NT2RP7009322, NT2RP7009363, NT2RP7009370, NT2RP7009373, NT2RP7009397, NT2RP7009429, NT2RP7009439, NT2RP7009466, NT2RP7009481, NT2RP7009498, NT2RP7009502, NT2RP7009507, NT2RP7009577, NT2RP7009743, NT2RP7009867, NT2RP7010109, NT2RP7010128, NT2RP7010235, NT2RP7010275, NT2RP7010521, NT2RP7010599, NT2RP7010612, NT2RP7010817, NT2RP7011086, NT2RP7011132, NT2RP7011268, NT2RP7011318, NT2RP7011452, NT2RP7011570, NT2RP7011721, NT2RP7011909, NT2RP7012291, NT2RP7012516, NT2RP7013002, NT2RP7013374, NT2RP7013499, NT2RP7013573, NT2RP7013729, NT2RP7013764, NT2RP7013795, NT2RP7013999, NT2RP7014005, NT2RP7014178, NT2RP7014348, NT2RP7014420, NT2RP7014583, NT2RP7014721, NT2RP7014743, NT2RP7014778, NT2RP7014906, NT2RP7015080, NT2RP7015431, NT2RP7015503, NT2RP7015512, NT2RP7015676, NT2RP7015789, NT2RP7015996, NT2RP7016508, NT2RP7016574, NT2RP7016622, NT2RP7016911, NT2RP7017139, NT2RP7017284, NT2RP7017365, NT2RP7017474, NT2RP7017546, NT2RP7017567, NT2RP7017795, NT2RP7017971, NT2RP7018032, NT2RP7018126, NT2RP7018197, NT2RP7018206, NT2RP7018340, NT2RP7018586, NT2RP7018802, NT2RP7018871, NT2RP7019064, NT2RP7019135, NT2RP7019273, NT2RP7019367, NT2RP7019401, NT2RP7019445, NT2RP7019543, NT2RP7019682, NT2RP7019835, NT2RP7020112, NT2RP7020123, NT2RP7020343, NT2RP7020379, NT2RP8000137, NT2RP8000296, NT2RP8000435, NT2RP8000483, NT2RP8000521, NT2RP8000633, NT2RP8001363, NT2RP8001407, NT2RP8001584, NT2RP8001604, NT2RP8001605, NT2RP8003490, NT2RP8003657, NT2RP8003787, NT2RP8004306, NT2RP8005546, NT2RP8006452, NT2RP8006521, NT2RP8007416, NT2RP8007503, NT2RP8007715, NT2RP8007920, NT2RP8008057, NT2RP8009248, NTONG1000006, NTONG1000087, NTONG1000123, NTONG1000130, NTONG1000161, NTONG1000172, NTONG1000213, NTONG1000214, NTONG1000247, NTONG1000264, NTONG2000040, NTONG2000107, NTONG2000231, NTONG2000334, NTONG2000363, NTONG2000413, NTONG2000492, NTONG2000499, NTONG2000531, NTONG2000583, NTONG2000800, NTONG2000876, NTONG2000878, NTONG2000966, NTONG2000985, NTONG2001014, NTONG2001079, NTONG2001137, NTONG2001157, NTONG2001173, NTONG2001220, NTONG2001222, NTONG2001362, NTONG2001428, NTONG2001532, NTONG2001550, NTONG2001587, NTONG2001619, NTONG2001642, NTONG2001657, NTONG2001676, NTONG2001762, NTONG2002278, NTONG2002807, NTONG2002948, NTONG2002970, NTONG2002985, NTONG2003158, NTONG2003210, NTONG2003316, NTONG2003409, NTONG2003805, NTONG2003839, NTONG2003852, NTONG2003897, NTONG2004095, NTONG2004308, NTONG2004521, NTONG2004614, NTONG2004690, NTONG2004829, NTONG2004918, NTONG2004991, NTONG2005062, NTONG2005086, NTONG2005137, NTONG2005265, NTONG2005277, NTONG2005363, NTONG2005373, NTONG2005391, NTONG2005480, NTONG2005497, NTONG2005577, NTONG2005657, NTONG2005801, NTONG2005897, NTONG2005969, NTONG2006099, NTONG2006187, NTONG2006301, NTONG2006324, NTONG2006354, NTONG2006440, NTONG2006484, NTONG2006501, NTONG2006646, NTONG2006709, NTONG2006783, NTONG2007020, NTONG2007028, NTONG2007034, NTONG2007249, NTONG2007517, NTONG2007522, NTONG2007658, NTONG2007693, NTONG2007756, NTONG2008088, NTONG2008093, NTONG2008143, NTONG2008365, NTONG2008672, NTONG2008862, NTONG2008939, NTONG2008944, NTONG2009060, NTONG2009068, NTONG2009229, NTONG2009233, NTONG2009576, OCBBF1000016, OCBBF1000030, OCBBF1000042, OCBBF1000049, OCBBF1000054, OCBBF1000067, OCBBF1000080, OCBBF1000085, OCBBF1000091, OCBBF1000104, OCBBF1000118, OCBBF1000119, OCBBF1000122, OCBBF1000130, OCBBF1000138, OCBBF1000145, OCBBF1000153, OCBBF1000175, OCBBF1000185, OCBBF1000188, OCBBF1000192, OCBBF1000254, OCBBF1000315, OCBBF2000015, OCBBF2000126, OCBBF2000178, OCBBF2000231, OCBBF2000277, OCBBF2000323, OCBBF2000452, OCBBF2000677, OCBBF2000703, OCBBF2000719, OCBBF2000824, OCBBF2000831, OCBBF2000846, OCBBF2000904, OCBBF2000986, OCBBF2000998, OCBBF2001075, OCBBF2001101, OCBBF2001124, OCBBF2001140, OCBBF2001166, OCBBF2001176, OCBBF2001186, OCBBF2001210, OCBBF2001252, OCBBF2001307, OCBBF2001323, OCBBF2001389, OCBBF2001402, OCBBF2001408, OCBBF2001416, OCBBF2001473, OCBBF2001492, OCBBF2001494, OCBBF2001527, OCBBF2001528, OCBBF2001586, OCBBF2001639, OCBBF2001681, OCBBF2001687, OCBBF2001706, OCBBF2001749, OCBBF2001910, OCBBF2001931, OCBBF2001961, OCBBF2001983, OCBBF2002015, OCBBF2002083, OCBBF2002124, OCBBF2002161, OCBBF2002290, OCBBF2002357, OCBBF2002615, OCBBF2002626, OCBBF2002656, OCBBF2002663, OCBBF2002805, OCBBF2002865, OCBBF2002920, OCBBF2002980, OCBBF2003028, OCBBF2003052, OCBBF2003091, OCBBF2003246, OCBBF2003327, OCBBF2003518, OCBBF2003543, OCBBF2003593, OCBBF2003744, OCBBF2003819, OCBBF2003925, OCBBF2004038, OCBBF2004147, OCBBF2004168, OCBBF2004259, OCBBF2004273, OCBBF2004385, OCBBF2004418, OCBBF2004478, OCBBF2004482, OCBBF2004533, OCBBF2004567, OCBBF2004612, OCBBF2004647, OCBBF2004669, OCBBF2004757, OCBBF2004826, OCBBF2004866, OCBBF2004883, OCBBF2004889, OCBBF2004930, OCBBF2004984, OCBBF2005066, OCBBF2005077, OCBBF2005161, OCBBF2005343, OCBBF2005349, OCBBF2005373, OCBBF2005420, OCBBF2005428, OCBBF2005433, OCBBF2005476, OCBBF2005546, OCBBF2005843, OCBBF2005901, OCBBF2006005, OCBBF2006030, OCBBF2006058, OCBBF2006113, OCBBF2006148, OCBBF2006151, OCBBF2006154, OCBBF2006172, OCBBF2006214, OCBBF2006241, OCBBF2006313, OCBBF2006388, OCBBF2006438, OCBBF2006567, OCBBF2006624, OCBBF2006639, OCBBF2006764, OCBBF2006972, OCBBF2006987, OCBBF2007028, OCBBF2007039, OCBBF2007051, OCBBF2007068, OCBBF2007114, OCBBF2007121, OCBBF2007184, OCBBF2007194, OCBBF2007196, OCBBF2007224, OCBBF2007238, OCBBF2007414, OCBBF2007428, OCBBF2007478, OCBBF2007485, OCBBF2007520, OCBBF2007555, OCBBF2007610, OCBBF2007756, OCBBF2007762, OCBBF2007829, OCBBF2007892, OCBBF2007931, OCBBF2007946, OCBBF2008041, OCBBF2008116, OCBBF2008138, OCBBF2008144, OCBBF2008283, OCBBF2008330, OCBBF2008340, OCBBF2008366, OCBBF2008483, OCBBF2008511, OCBBF2008520, OCBBF2008569, OCBBF2008586, OCBBF2008640, OCBBF2008691, OCBBF2008701, OCBBF2008724, OCBBF2008760, OCBBF2008768, OCBBF2008770, OCBBF2008775, OCBBF2008790, OCBBF2008814, OCBBF2008822, OCBBF2009095, OCBBF2009115, OCBBF2009242, OCBBF2009301, OCBBF2009352, OCBBF2009391, OCBBF2009424, OCBBF2009536, OCBBF2009571, OCBBF2009583, OCBBF2009603, OCBBF2009772, OCBBF2009788, OCBBF2009920, OCBBF2009926, OCBBF2010040, OCBBF2010140, OCBBF2010281, OCBBF2010313, OCBBF2010404, OCBBF2010416, OCBBF2010420, OCBBF2010557, OCBBF2010604, OCBBF2010709, OCBBF2010792, OCBBF2010819, OCBBF2010843, OCBBF2010858, OCBBF2010863, OCBBF2010871, OCBBF2010931, OCBBF2010945, OCBBF2010978, OCBBF2010989, OCBBF2011021, OCBBF2011073, OCBBF2011137, OCBBF2011160, OCBBF2011177, OCBBF2011228, OCBBF2011232, OCBBF2011283, OCBBF2011311, OCBBF2011625, OCBBF2011669, OCBBF2011685, OCBBF2011706, OCBBF2011722, OCBBF2011759, OCBBF2011767, OCBBF2011855, OCBBF2011872, OCBBF2011887, OCBBF2011897, OCBBF2011960, OCBBF2011981, OCBBF2012001, OCBBF2012028, OCBBF2012039, OCBBF2012095, OCBBF2012139, OCBBF2012191, OCBBF2012262, OCBBF2012320, OCBBF2012436, OCBBF2012525, OCBBF2012678, OCBBF2012704, OCBBF2012714, OCBBF2012755, OCBBF2012812, OCBBF2012821, OCBBF2012881, OCBBF2012936, OCBBF2012990, OCBBF2013011, OCBBF2013049, OCBBF2013091, OCBBF2013123, OCBBF2013127, OCBBF2013149, OCBBF2013208, OCBBF2013285, OCBBF2013319, OCBBF2013324, OCBBF2013481, OCBBF2013507, OCBBF2013721, OCBBF2013789, OCBBF2013843, OCBBF2013883, OCBBF2013926, OCBBF2014052, OCBBF2014064, OCBBF2014089, OCBBF2014322, OCBBF2014386, OCBBF2014576, OCBBF2014707, OCBBF2014745, OCBBF2014828, OCBBF2014873, OCBBF2014880, OCBBF2014928, OCBBF2015031, OCBBF2015081, OCBBF2015115, OCBBF2015232, OCBBF2015233, OCBBF2015285, OCBBF2015334, OCBBF2015335, OCBBF2015503, OCBBF2015506, OCBBF2015599, OCBBF2015645, OCBBF2015659, OCBBF2015797, OCBBF2015931, OCBBF2015980, OCBBF2016038, OCBBF2016405, OCBBF2016467, OCBBF2016590, OCBBF2016591, OCBBF2016612, OCBBF2016689, OCBBF2016690, OCBBF2016729, OCBBF2017035, OCBBF2017055, OCBBF2017069, OCBBF2017306, OCBBF2017325, OCBBF2017458, OCBBF2017489, OCBBF2017516, OCBBF2017665, OCBBF2017754, OCBBF2017815, OCBBF2017882, OCBBF2017888, OCBBF2017893, OCBBF2017920, OCBBF2018012, OCBBF2018014, OCBBF2018167, OCBBF2018206, OCBBF2018229, OCBBF2018234, OCBBF2018362, OCBBF2018380, OCBBF2018563, OCBBF2018581, OCBBF2018618, OCBBF2018663, OCBBF2018687, OCBBF2018827, OCBBF2018828, OCBBF2018873, OCBBF2018934, OCBBF2018956, OCBBF2019108, OCBBF2019195, OCBBF2019327, OCBBF2019684, OCBBF2019761, OCBBF2019823, OCBBF2019950, OCBBF2020048, OCBBF2020318, OCBBF2020343, OCBBF2020453, OCBBF2020741, OCBBF2020801, OCBBF2020825, OCBBF2020838, OCBBF2021214, OCBBF2021286, OCBBF2021323, OCBBF2021518, OCBBF2021788, OCBBF2021833, OCBBF2022351, OCBBF2022573, OCBBF2022574, OCBBF2023162, OCBBF2023598, OCBBF2023643, OCBBF2024463, OCBBF2024589, OCBBF2024719, OCBBF2024779, OCBBF2024781, OCBBF2024850, OCBBF2025028, OCBBF2025115, OCBBF2025198, OCBBF2025451, OCBBF2025458, OCBBF2025527, OCBBF2025631, OCBBF2025730, OCBBF2026025, OCBBF2026035, OCBBF2026144, OCBBF2026368, OCBBF2026645, OCBBF2026649, OCBBF2026690, OCBBF2026981, OCBBF2027148, OCBBF2027197, OCBBF2027354, OCBBF2027423, OCBBF2027478, OCBBF2027481, OCBBF2027511, OCBBF2027661, OCBBF2027728, OCBBF2027782, OCBBF2027868, OCBBF2028055, OCBBF2028173, OCBBF2028421, OCBBF2029471, OCBBF2029901, OCBBF2030116, OCBBF2030329, OCBBF2030354, OCBBF2030517, OCBBF2030574, OCBBF2030708, OCBBF2030927, OCBBF2030963, OCBBF2031167, OCBBF2031198, OCBBF2031366, OCBBF2031561, OCBBF2032152, OCBBF2032274, OCBBF2032539, OCBBF2032590, OCBBF2032599, OCBBF2032611, OCBBF2032671, OCBBF2033295, OCBBF2033413, OCBBF2033869, OCBBF2033948, OCBBF2034333, OCBBF2034529, OCBBF2034637, OCBBF2034906, OCBBF2035110, OCBBF2035214, OCBBF2035390, OCBBF2035564, OCBBF2035658, OCBBF2035823, OCBBF2035885, OCBBF2035916, OCBBF2036019, OCBBF2036031, OCBBF2036225, OCBBF2036476, OCBBF2036743, OCBBF2036752, OCBBF2037068, OCBBF2037340, OCBBF2037398, OCBBF2037464, OCBBF2037547, OCBBF2037598, OCBBF2037638, OCBBF2038238, OCBBF2038285, OCBBF2038317, OCBBF3000097, OCBBF3000213, OCBBF3000296, OCBBF3000372, OCBBF3000380, OCBBF3000743, OCBBF3000830, OCBBF3001076, OCBBF3001202, OCBBF3001616, OCBBF3002553, OCBBF3002600, OCBBF3002654, OCBBF3003103, OCBBF3003209, OCBBF3003592, OCBBF3003745, OCBBF3003761, OCBBF3004264, OCBBF3004314, OCBBF3004487, OCBBF3004972, OCBBF3005330, OCBBF3005597, OCBBF3005843, OCBBF3006802, OCBBF3006986, OCBBF3007078, OCBBF3007704, OCBBF3008230, OCBBF3008392, OCBBF3008835, OCBBF3009192, OCBBF3009244, OCBBF3009279, PANCR1000012, PANCR1000021, PANCR1000081, PANCR1000086, PANCR1000091, PANCR1000185, PEBLM1000024, PEBLM1000029, PEBLM1000062, PEBLM1000066, PEBLM1000068, PEBLM1000071, PEBLM1000083, PEBLM1000144, PEBLM1000147, PEBLM1000174, PEBLM1000180, PEBLM2000030, PEBLM2000112, PEBLM2000147, PEBLM2000170, PEBLM2000180, PEBLM2000213, PEBLM2000248, PEBLM2000267, PEBLM2000270, PEBLM2000308, PEBLM2000321, PEBLM2000326, PEBLM2000333, PEBLM2000338, PEBLM2000502, PEBLM2001312, PEBLM2001465, PEBLM2001488, PEBLM2001803, PEBLM2002432, PEBLM2002455, PEBLM2002594, PEBLM2002749, PEBLM2002887, PEBLM2003426, PEBLM2003765, PEBLM2003914, PEBLM2003935, PEBLM2004015, PEBLM2004216, PEBLM2004290, PEBLM2004452, PEBLM2004497, PEBLM2004733, PEBLM2005282, PEBLM2005615, PEBLM2005632, PEBLM2005697, PEBLM2006031, PEBLM2006036, PEBLM2006049, PEBLM2006113, PEBLM2006135, PEBLM2006215, PEBLM2006283, PEBLM2006298, PEBLM2006366, PEBLM2006709, PEBLM2006912, PEBLM2007112, PEBLM2007140, PEBLM2007188, PEBLM2007437, PEBLM2007447, PEBLM2007598, PEBLM2007832, PEBLM2007834, PEBLM2008106, PEBLM2008576, PEBLM2008605, PEBLM2008826, PEBLM2008861, PERIC1000025, PERIC1000147, PERIC2000180, PERIC2000214, PERIC2000386, PERIC2000387, PERIC2000422, PERIC2000473, PERIC2000889, PERIC2000914, PERIC2001227, PERIC2001228, PERIC2001379, PERIC2001504, PERIC2001703, PERIC2001764, PERIC2002243, PERIC2002272, PERIC2002452, PERIC2002766, PERIC2003001, PERIC2003090, PERIC2003287, PERIC2003349, PERIC2003452, PERIC2003699, PERIC2003720, PERIC2003794, PERIC2003834, PERIC2003919, PERIC2003957, PERIC2004028, PERIC2004131, PERIC2004259, PERIC2004379, PERIC2004429, PERIC2004510, PERIC2004613, PERIC2004909, PERIC2005111, PERIC2005117, PERIC2005305, PERIC2005347, PERIC2005370, PERIC2005936, PERIC2006035, PERIC2006121, PERIC2006443, PERIC2006945, PERIC2006960, PERIC2007439, PERIC2007914, PERIC2008008, PERIC2008385, PERIC2009001, PERIC2009086, PERIC2009329, PERIC2009566, PLACE5000001, PLACE5000037, PLACE5000058, PLACE5000067, PLACE5000068, PLACE5000070, PLACE5000080, PLACE5000105, PLACE5000115, PLACE5000116, PLACE5000129, PLACE5000139, PLACE5000153, PLACE5000159, PLACE5000171, PLACE5000172, PLACE5000178, PLACE5000245, PLACE5000260, PLACE5000282, PLACE5000297, PLACE5000372, PLACE5000492, PLACE5000522, PLACE5000527, PLACE6000012, PLACE6000044, PLACE6000055, PLACE6000070, PLACE6000137, PLACE6000145, PLACE6000191, PLACE6000205, PLACE6000231, PLACE6000263, PLACE6000296, PLACE6000314, PLACE6000325, PLACE6000348, PLACE6000424, PLACE6000426, PLACE6000429, PLACE6000450, PLACE6000523, PLACE6000550, PLACE6000552, PLACE6000555, PLACE6000619, PLACE6000953, PLACE6001118, PLACE6001153, PLACE6001185, PLACE6001262, PLACE6001281, PLACE6001294, PLACE6001536, PLACE6001557, PLACE6001712, PLACE6001740, PLACE6001823, PLACE6001923, PLACE6001925, PLACE6001933, PLACE6002016, PLACE6002102, PLACE6002157, PLACE6002312, PLACE6002323, PLACE6002345, PLACE6002462, PLACE6002647, PLACE6002692, PLACE6002699, PLACE6002710, PLACE6002871, PLACE6002949, PLACE6003004, PLACE6003038, PLACE6003077, PLACE6003094, PLACE6003109, PLACE6003204, PLACE6003218, PLACE6003372, PLACE6003393, PLACE6003399, PLACE6003539, PLACE6003621, PLACE6003705, PLACE6003740, PLACE6003745, PLACE6003771, PLACE6003796, PLACE6003839, PLACE6004101, PLACE6004219, PLACE6004336, PLACE6004368, PLACE6004380, PLACE6004396, PLACE6004397, PLACE6004454, PLACE6004491, PLACE6004663, PLACE6004687, PLACE6004738, PLACE6004931, PLACE6004966, PLACE6004993, PLACE6005007, PLACE6005029, PLACE6005108, PLACE6005231, PLACE6005234, PLACE6005283, PLACE6005294, PLACE6005328, PLACE6005351, PLACE6005423, PLACE6005482, PLACE6005487, PLACE6005535, PLACE6005546, PLACE6005559, PLACE6005579, PLACE6005691, PLACE6005786, PLACE6006077, PLACE6006137, PLACE6006158, PLACE6006186, PLACE6006217, PLACE6006222, PLACE6006266, PLACE6006287, PLACE6006394, PLACE6006474, PLACE6006566, PLACE6006697, PLACE6006822, PLACE6006871, PLACE6006905, PLACE6006988, PLACE6007050, PLACE6007180, PLACE6007239, PLACE6007242, PLACE6007309, PLACE6007373, PLACE6007380, PLACE6007433, PLACE6007436, PLACE6007482, PLACE6007687, PLACE6007787, PLACE6007798, PLACE6007807, PLACE6007925, PLACE6008036, PLACE6008094, PLACE6008126, PLACE6008285, PLACE6008444, PLACE6008453, PLACE6008640, PLACE6008750, PLACE6008768, PLACE6008824, PLACE6008989, PLACE6009006, PLACE6009008, PLACE6009237, PLACE6009338, PLACE6009419, PLACE6009430, PLACE6009482, PLACE6009524, PLACE6009527, PLACE6009560, PLACE6009590, PLACE6009821, PLACE6009835, PLACE6009853, PLACE6010463, PLACE6010485, PLACE6010568, PLACE6010701, PLACE6010704, PLACE6010732, PLACE6010765, PLACE6010848, PLACE6010925, PLACE6010936, PLACE6010991, PLACE6011041, PLACE6011057, PLACE6011102, PLACE6011156, PLACE6011211, PLACE6011260, PLACE6011334, PLACE6011627, PLACE6011774, PLACE6011881, PLACE6011907, PLACE6011970, PLACE6011975, PLACE6012028, PLACE6012108, PLACE6012168, PLACE6012297, PLACE6012308, PLACE6012574, PLACE6012908, PLACE6012936, PLACE6012942, PLACE6013222, PLACE6013232, PLACE6013288, PLACE6013386, PLACE6013400, PLACE6013650, PLACE6013672, PLACE6013883, PLACE6013884, PLACE6013885, PLACE6014043, PLACE6014064, PLACE6014516, PLACE6014882, PLACE6015051, PLACE6015211, PLACE6015445, PLACE6015460, PLACE6015513, PLACE6015591, PLACE6015729, PLACE6015731, PLACE6015939, PLACE6016030, PLACE6016093, PLACE6016105, PLACE6016160, PLACE6016210, PLACE6016383, PLACE6016984, PLACE6017002, PLACE6017431, PLACE6017564, PLACE6017578, PLACE6017626, PLACE6017701, PLACE6017714, PLACE6017788, PLACE6017791, PLACE6018031, PLACE6018107, PLACE6018187, PLACE6018235, PLACE6018287, PLACE6018441, PLACE6018487, PLACE6018497, PLACE6018769, PLACE6018834, PLACE6018843, PLACE6018863, PLACE6018938, PLACE6019195, PLACE6019385, PLACE6019542, PLACE6019600, PLACE6019674, PLACE6019676, PLACE6019701, PLACE6019932, PLACE6020031, PLACE6020145, PLACE7000167, PLACE7000170, PLACE7000266, PLACE7000333, PLACE7000410, PLACE7000502, PLACE7000707, PLACE7001022, PLACE7001544, PLACE7001759, PLACE7001936, PLACE7002303, PLACE7002641, PLACE7003639, PLACE7003657, PLACE7003684, PLACE7003985, PLACE7004103, PLACE7004961, PLACE7005169, PLACE7005671, PLACE7005840, PLACE7006051, PLACE7006090, PLACE7006240, PLACE7006268, PLACE7006275, PLACE7006498, PLACE7006540, PLACE7007379, PLACE7007644, PLACE7007973, PLACE7008136, PLACE7008261, PLACE7008431, PLACE7008623, PLACE7008766, PLACE7009563, PROST1000033, PROST1000039, PROST1000065, PROST1000083, PROST1000085, PROST1000110, PROST1000123, PROST1000136, PROST1000145, PROST1000152, PROST1000167, PROST1000184, PROST1000217, PROST1000220, PROST1000262, PROST1000272, PROST1000298, PROST1000322, PROST1000334, PROST1000343, PROST1000362, PROST1000377, PROST1000383, PROST1000412, PROST1000419, PROST1000451, PROST1000485, PROST1000493, PROST1000512, PROST1000527, PROST1000528, PROST1000536, PROST1000559, PROST1000575, PROST2000036, PROST2000053, PROST2000067, PROST2000079, PROST2000105, PROST2000143, PROST2000162, PROST2000165, PROST2000176, PROST2000203, PROST2000206, PROST2000212, PROST2000241, PROST2000267, PROST2000273, PROST2000274, PROST2000277, PROST2000284, PROST2000325, PROST2000337, PROST2000432, PROST2000452, PROST2000463, PROST2000470, PROST2000505, PROST2000567, PROST2000572, PROST2000717, PROST2000760, PROST2000761, PROST2000835, PROST2000893, PROST2000961, PROST2001002, PROST2001116, PROST2001138, PROST2001213, PROST2001414, PROST2001415, PROST2001465, PROST2001521, PROST2001540, PROST2001599, PROST2001611, PROST2001636, PROST2001796, PROST2001805, PROST2001823, PROST2001899, PROST2001997, PROST2001998, PROST2002101, PROST2002162, PROST2002212, PROST2002227, PROST2002338, PROST2002488, PROST2002489, PROST2002527, PROST2002591, PROST2002602, PROST2002633, PROST2002651, PROST2002682, PROST2002685, PROST2002722, PROST2002736, PROST2002842, PROST2002897, PROST2002906, PROST2002927, PROST2002960, PROST2003102, PROST2003117, PROST2003210, PROST2003302, PROST2003303, PROST2003324, PROST2003340, PROST2003396, PROST2003472, PROST2003517, PROST2003537, PROST2003563, PROST2003577, PROST2003583, PROST2003586, PROST2003628, PROST2003635, PROST2003674, PROST2003676, PROST2003725, PROST2003732, PROST2003775, PROST2003922, PROST2003930, PROST2004115, PROST2004142, PROST2004146, PROST2004161, PROST2004251, PROST2004332, PROST2004481, PROST2004526, PROST2004570, PROST2004727, PROST2004739, PROST2004742, PROST2004744, PROST2004817, PROST2005039, PROST2005067, PROST2005076, PROST2005093, PROST2005121, PROST2005131, PROST2005228, PROST2005285, PROST2005426, PROST2005466, PROST2005604, PROST2005630, PROST2005683, PROST2005788, PROST2005793, PROST2005880, PROST2005886, PROST2005904, PROST2005919, PROST2005943, PROST2006008, PROST2006020, PROST2006030, PROST2006060, PROST2006196, PROST2006201, PROST2006260, PROST2006343, PROST2006450, PROST2006491, PROST2006510, PROST2006536, PROST2006579, PROST2006688, PROST2006737, PROST2006766, PROST2006782, PROST2006988, PROST2007122, PROST2007200, PROST2007237, PROST2007248, PROST2007289, PROST2007317, PROST2007328, PROST2007382, PROST2007389, PROST2007416, PROST2007528, PROST2007612, PROST2007818, PROST2007871, PROST2007950, PROST2007956, PROST2007974, PROST2007988, PROST2008079, PROST2008088, PROST2008243, PROST2008245, PROST2008268, PROST2008271, PROST2008447, PROST2008468, PROST2008472, PROST2008489, PROST2008516, PROST2008724, PROST2008770, PROST2008835, PROST2008993, PROST2009022, PROST2009208, PROST2009222, PROST2009254, PROST2009273, PROST2009347, PROST2009365, PROST2009388, PROST2009400, PROST2009470, PROST2009483, PROST2009571, PROST2009731, PROST2009736, PROST2009795, PROST2009901, PROST2009909, PROST2010046, PROST2010219, PROST2010250, PROST2010318, PROST2010326, PROST2010382, PROST2010400, PROST2010579, PROST2010606, PROST2010782, PROST2010885, PROST2011012, PROST2011038, PROST2011105, PROST2011297, PROST2011410, PROST2011439, PROST2011482, PROST2011577, PROST2011631, PROST2011660, PROST2012005, PROST2012007, PROST2012016, PROST2012088, PROST2012140, PROST2012157, PROST2012190, PROST2012249, PROST2012353, PROST2012400, PROST2012448, PROST2012504, PROST2012542, PROST2012550, PROST2012740, PROST2012888, PROST2012890, PROST2013032, PROST2013121, PROST2013260, PROST2013327, PROST2013531, PROST2013605, PROST2013627, PROST2013873, PROST2013880, PROST2014422, PROST2014585, PROST2014601, PROST2014659, PROST2014916, PROST2014925, PROST2015124, PROST2015137, PROST2015198, PROST2015243, PROST2015246, PROST2015251, PROST2015287, PROST2015332, PROST2015457, PROST2015537, PROST2015545, PROST2015551, PROST2015636, PROST2015710, PROST2015756, PROST2015877, PROST2015900, PROST2015924, PROST2015932, PROST2016195, PROST2016246, PROST2016351, PROST2016379, PROST2016444, PROST2016462, PROST2016499, PROST2016512, PROST2016566, PROST2016582, PROST2016668, PROST2016684, PROST2016777, PROST2016829, PROST2016860, PROST2016918, PROST2017098, PROST2017128, PROST2017203, PROST2017367, PROST2017413, PROST2017441, PROST2017529, PROST2017578, PROST2017612, PROST2017617, PROST2017700, PROST2017701, PROST2017836, PROST2017910, PROST2017972, PROST2018030, PROST2018090, PROST2018235, PROST2018437, PROST2018487, PROST2018511, PROST2018583, PROST2018588, PROST2018607, PROST2018788, PROST2018902, PROST2018922, PROST2018977, PROST2019296, PROST2019398, PROST2019487, PROST2019781, PUAEN1000039, PUAEN1000057, PUAEN1000081, PUAEN1000085, PUAEN1000087, PUAEN1000121, PUAEN1000147, PUAEN1000161, PUAEN1000175, PUAEN1000239, PUAEN1000275, PUAEN1000276, PUAEN1000288, PUAEN2000080, PUAEN2000152, PUAEN2000175, PUAEN2000247, PUAEN2000312, PUAEN2000374, PUAEN2000394, PUAEN2000497, PUAEN2000594, PUAEN2000684, PUAEN2000942, PUAEN2001260, PUAEN2001345, PUAEN2001526, PUAEN2001586, PUAEN2001882, PUAEN2002473, PUAEN2002489, PUAEN2002552, PUAEN2002616, PUAEN2002758, PUAEN2003018, PUAEN2003079, PUAEN2003116, PUAEN2003408, PUAEN2003517, PUAEN2003954, PUAEN2004067, PUAEN2004083, PUAEN2004400, PUAEN2004511, PUAEN2004525, PUAEN2004875, PUAEN2005110, PUAEN2005247, PUAEN2005588, PUAEN2005930, PUAEN2006029, PUAEN2006328, PUAEN2006335, PUAEN2006578, PUAEN2006639, PUAEN2006761, PUAEN2007044, PUAEN2007350, PUAEN2007785, PUAEN2007898, PUAEN2008123, PUAEN2008228, PUAEN2008314, PUAEN2008515, PUAEN2008815, PUAEN2008939, PUAEN2008980, PUAEN2008985, PUAEN2009174, PUAEN2009348, PUAEN2009534, PUAEN2009655, PUAEN2009795, PUAEN2009852, PUAEN2010346, PUAEN2010824, RECTM1000051, RECTM1000141, RECTM2000220, RECTM2000349, RECTM2000433, RECTM2001307, RECTM2001347, RECTM2001519, RECTM2001666, RECTM2001691, RECTM2001749, RECTM2002172, RECTM2002602, RECTM2002632, SYNOV1000049, SYNOV1000118, SYNOV1000128, SYNOV1000190, SYNOV1000256, SYNOV1000374, SYNOV2000152, SYNOV2000171, SYNOV2000173, SYNOV2000177, SYNOV2000178, SYNOV2000193, SYNOV2000251, SYNOV2000279, SYNOV2000291, SYNOV2000297, SYNOV2000397, SYNOV2000426, SYNOV2000601, SYNOV2000700, SYNOV2000820, SYNOV2000824, SYNOV2000923, SYNOV2001014, SYNOV2001035, SYNOV2001088, SYNOV2001111, SYNOV2001144, SYNOV2001212, SYNOV2001251, SYNOV2001300, SYNOV2001356, SYNOV2001374, SYNOV2001390, SYNOV2001451, SYNOV2001457, SYNOV2001468, SYNOV2001581, SYNOV2001660, SYNOV2003326, SYNOV2005216, SYNOV2005448, SYNOV2005541, SYNOV2005673, SYNOV2005817, SYNOV2005962, SYNOV2006430, SYNOV2006620, SYNOV2007758, SYNOV2007965, SYNOV2008765, SYNOV2011233, SYNOV2012326, SYNOV2013365, SYNOV2013637, SYNOV2014157, SYNOV2014364, SYNOV2016124, SYNOV2016837, SYNOV2017179, SYNOV2018921, SYNOV2019280, SYNOV2020085, SYNOV2020463, SYNOV2021320, SYNOV2021953, SYNOV3000184, SYNOV3000231, SYNOV3000302, SYNOV3000345, SYNOV4000249, SYNOV4000472, SYNOV4000598, SYNOV4000706, SYNOV4001153, SYNOV4001224, SYNOV4001326, SYNOV4001342, SYNOV4001395, SYNOV4002001, SYNOV4002392, SYNOV4002875, SYNOV4002883, SYNOV4003174, SYNOV4003322, SYNOV4003681, SYNOV4003981, SYNOV4004184, SYNOV4004741, SYNOV4004823, SYNOV4004914, SYNOV4005256, SYNOV4005570, SYNOV4005739, SYNOV4005889, SYNOV4005981, SYNOV4005989, SYNOV4006256, SYNOV4006542, SYNOV4007012, SYNOV4007215, SYNOV4007360, SYNOV4007430, SYNOV4007521, SYNOV4007553, SYNOV4007711, SYNOV4008245, SYNOV4008336, SYNOV4009129, SYNOV4009139, SYNOV4009298, T1ESE2000116, T1ESE2000609, T1ESE2000904, T1ESE2002665, TBAES2000004, TBAES2000116, TBAES2000255, TBAES2000315, TBAES2000352, TBAES2000932, TBAES2001171, TBAES2001220, TBAES2001229, TBAES2001258, TBAES2001296, TBAES2001492, TBAES2001553, TBAES2001751, TBAES2003435, TBAES2003492, TBAES2003550, TBAES2003702, TBAES2003917, TBAES2004055, TBAES2004105, TBAES2004939, TBAES2005157, TBAES2005361, TBAES2005543, TBAES2006568, TBAES2006881, TBAES2007379, TBAES2007428, TBAES2007481, TBAES2007504, TBAES2007548, TBAES2007697, TBAES2007862, TBAES2007964, TBAES2008133, TCERX2000171, TCERX2000431, TCERX2000613, TCERX2000998, TCERX2002644, TCOLN1000037, TCOLN1000180, TCOLN2000139, TCOLN2000236, TCOLN2000641, TCOLN2001268, TCOLN2002047, TCOLN2002278, TESOP1000035, TESOP1000127, TESOP1000160, TESOP2000083, TESOP2000090, TESOP2000205, TESOP2000312, TESOP2000390, TESOP2000400, TESOP2000510, TESOP2000569, TESOP2000739, TESOP2000801, TESOP2001122, TESOP2001166, TESOP2001345, TESOP2001474, TESOP2001796, TESOP2001818, TESOP2001849, TESOP2001865, TESOP2001901, TESOP2001953, TESOP2002005, TESOP2002110, TESOP2002150, TESOP2002273, TESOP2002451, TESOP2002489, TESOP2002539, TESOP2002545, TESOP2002804, TESOP2002950, TESOP2003273, TESOP2003308, TESOP2003553, TESOP2003753, TESOP2004110, TESOP2004114, TESOP2004173, TESOP2004214, TESOP2005199, TESOP2005285, TESOP2005485, TESOP2005498, TESOP2005579, TESOP2006041, TESOP2006053, TESOP2006060, TESOP2006068, TESOP2006110, TESOP2006398, TESOP2006704, TESOP2006746, TESOP2006865, TESOP2006893, TESOP2007041, TESOP2007052, TESOP2007262, TESOP2007384, TESOP2007636, TESOP2007674, TESOP2007688, TESOP2007725, TESOP2007912, TESOP2007978, TESOP2008127, TESOP2008552, TESOP2008556, TESOP2008563, TESOP2008820, TESOP2009121, TESOP2009201, TESOP2009247, TESOP2009555, TESTI1000018, TESTI1000019, TESTI1000025, TESTI1000029, TESTI1000030, TESTI1000042, TESTI1000045, TESTI1000051, TESTI1000055, TESTI1000064, TESTI1000070, TESTI1000085, TESTI1000088, TESTI1000093, TESTI1000094, TESTI1000096, TESTI1000101, TESTI1000109, TESTI1000125, TESTI1000127, TESTI1000128, TESTI1000131, TESTI1000138, TESTI1000142, TESTI1000157, TESTI1000168, TESTI1000169, TESTI1000179, TESTI1000183, TESTI1000191, TESTI1000257, TESTI1000266, TESTI1000319, TESTI1000330, TESTI1000348, TESTI1000390, TESTI1000391, TESTI1000459, TESTI1000491, TESTI1000545, TESTI2000006, TESTI2000018, TESTI2000044, TESTI2000100, TESTI2000117, TESTI2000120, TESTI2000147, TESTI2000154, TESTI2000172, TESTI2000177, TESTI2000179, TESTI2000207, TESTI2000208, TESTI2000221, TESTI2000238, TESTI2000253, TESTI2000272, TESTI2000278, TESTI2000349, TESTI2000356, TESTI2000358, TESTI2000372, TESTI2000427, TESTI2000431, TESTI2000435, TESTI2000443, TESTI2000452, TESTI2000462, TESTI2000489, TESTI2000520, TESTI2000571, TESTI2000591, TESTI2000600, TESTI2000616, TESTI2000627, TESTI2000644, TESTI2000671, TESTI2000683, TESTI2000689, TESTI2000695, TESTI2000699, TESTI2000707, TESTI2000745, TESTI2000756, TESTI2000762, TESTI2000784, TESTI2000808, TESTI2000819, TESTI2000830, TESTI2000840, TESTI2000849, TESTI2000850, TESTI2000874, TESTI2000883, TESTI2000909, TESTI2000951, TESTI2000970, TESTI2000981, TESTI2001008, TESTI2001049, TESTI2001082, TESTI2001120, TESTI2001134, TESTI2001141, TESTI2001180, TESTI2001208, TESTI2001229, TESTI2001236, TESTI2001237, TESTI2001269, TESTI2001306, TESTI2001313, TESTI2001330, TESTI2001345, TESTI2001352, TESTI2001364, TESTI2001412, TESTI2001420, TESTI2001498, TESTI2001511, TESTI2001512, TESTI2001518, TESTI2001556, TESTI2001593, TESTI2001613, TESTI2001621, TESTI2001661, TESTI2001665, TESTI2001671, TESTI2001697, TESTI2001725, TESTI2001758, TESTI2001766, TESTI2001792, TESTI2001793, TESTI2001795, TESTI2001812, TESTI2001815, TESTI2001823, TESTI2001826, TESTI2001827, TESTI2001852, TESTI2001869, TESTI2001879, TESTI2001894, TESTI2001898, TESTI2001915, TESTI2001950, TESTI2001959, TESTI2001968, TESTI2001985, TESTI2001991, TESTI2002002, TESTI2002012, TESTI2002036, TESTI2002048, TESTI2002057, TESTI2002081, TESTI2002090, TESTI2002105, TESTI2002149, TESTI2002216, TESTI2002223, TESTI2002245, TESTI2002251, TESTI2002256, TESTI2002264, TESTI2002282, TESTI2002293, TESTI2002294, TESTI2002326, TESTI2002351, TESTI2002361, TESTI2002365, TESTI2002369, TESTI2002406, TESTI2002415, TESTI2002423, TESTI2002453, TESTI2002461, TESTI2002465, TESTI2002467, TESTI2002498, TESTI2002516, TESTI2002544, TESTI2002578, TESTI2002580, TESTI2002618, TESTI2002632, TESTI2002676, TESTI2002690, TESTI2002698, TESTI2002700, TESTI2002707, TESTI2002724, TESTI2002729, TESTI2002752, TESTI2002753, TESTI2002789, TESTI2002802, TESTI2002806, TESTI2002840, TESTI2002866, TESTI2002877, TESTI2002910, TESTI2002912, TESTI2002928, TESTI2002937, TESTI2002965, TESTI2002993, TESTI2003005, TESTI2003020, TESTI2003031, TESTI2003037, TESTI2003044, TESTI2003059, TESTI2003061, TESTI2003071, TESTI2003074, TESTI2003089, TESTI2003104, TESTI2003109, TESTI2003117, TESTI2003127, TESTI2003130, TESTI2003131, TESTI2003139, TESTI2003141, TESTI2003152, TESTI2003181, TESTI2003193, TESTI2003196, TESTI2003228, TESTI2003236, TESTI2003255, TESTI2003258, TESTI2003277, TESTI2003280, TESTI2003299, TESTI2003311, TESTI2003321, TESTI2003325, TESTI2003327, TESTI2003330, TESTI2003347, TESTI2003354, TESTI2003356, TESTI2003372, TESTI2003376, TESTI2003413, TESTI2003418, TESTI2003419, TESTI2003432, TESTI2003475, TESTI2003476, TESTI2003498, TESTI2003512, TESTI2003539, TESTI2003541, TESTI2003545, TESTI2003551, TESTI2003574, TESTI2003579, TESTI2003580, TESTI2003589, TESTI2003596, TESTI2003598, TESTI2003615, TESTI2003625, TESTI2003638, TESTI2003649, TESTI2003692, TESTI2003718, TESTI2003727, TESTI2003756, TESTI2003768, TESTI2003781, TESTI2003787, TESTI2003824, TESTI2003827, TESTI2003894, TESTI2003911, TESTI2003914, TESTI2003940, TESTI2003962, TESTI2003998, TESTI2004031, TESTI2004073, TESTI2004080, TESTI2004085, TESTI2004089, TESTI2004111, TESTI2004119, TESTI2004122, TESTI2004153, TESTI2004163, TESTI2004169, TESTI2004207, TESTI2004215, TESTI2004227, TESTI2004229, TESTI2004243, TESTI2004255, TESTI2004287, TESTI2004295, TESTI2004313, TESTI2004318, TESTI2004322, TESTI2004391, TESTI2004399, TESTI2004423, TESTI2004431, TESTI2004432, TESTI2004452, TESTI2004459, TESTI2004490, TESTI2004539, TESTI2004552, TESTI2004560, TESTI2004574, TESTI2004601, TESTI2004611, TESTI2004649, TESTI2004654, TESTI2004675, TESTI2004687, TESTI2004689, TESTI2004700, TESTI2004706, TESTI2004712, TESTI2004734, TESTI2004783, TESTI2004791, TESTI2004793, TESTI2004860, TESTI2004906, TESTI2004920, TESTI2004936, TESTI2004941, TESTI2004971, TESTI2004982, TESTI2004993, TESTI2004994, TESTI2004999, TESTI2005025, TESTI2005040, TESTI2005060, TESTI2005072, TESTI2005085, TESTI2005112, TESTI2005120, TESTI2005153, TESTI2005155, TESTI2005173, TESTI2005267, TESTI2005268, TESTI2005280, TESTI2005307, TESTI2005326, TESTI2005363, TESTI2005376, TESTI2005378, TESTI2005380, TESTI2005391, TESTI2005395, TESTI2005396, TESTI2005415, TESTI2005470, TESTI2005492, TESTI2005564, TESTI2005568, TESTI2005584, TESTI2005588, TESTI2005590, TESTI2005603, TESTI2005609, TESTI2005610, TESTI2005630, TESTI2005672, TESTI2005683, TESTI2005690, TESTI2005692, TESTI2005703, TESTI2005720, TESTI2005731, TESTI2005739, TESTI2005742, TESTI2005767, TESTI2005775, TESTI2005784, TESTI2005788, TESTI2005827, TESTI2005835, TESTI2005860, TESTI2005892, TESTI2005908, TESTI2005911, TESTI2005933, TESTI2005937, TESTI2005948, TESTI2005979, TESTI2005981, TESTI2005982, TESTI2005984, TESTI2005986, TESTI2005987, TESTI2006007, TESTI2006008, TESTI2006015, TESTI2006016, TESTI2006035, TESTI2006040, TESTI2006041, TESTI2006045, TESTI2006067, TESTI2006083, TESTI2006097, TESTI2006109, TESTI2006111, TESTI2006120, TESTI2006125, TESTI2006179, TESTI2006209, TESTI2006210, TESTI2006212, TESTI2006218, TESTI2006238, TESTI2006255, TESTI2006258, TESTI2006278, TESTI2006333, TESTI2006360, TESTI2006409, TESTI2006425, TESTI2006437, TESTI2006453, TESTI2006457, TESTI2006460, TESTI2006465, TESTI2006483, TESTI2006499, TESTI2006523, TESTI2006543, TESTI2006565, TESTI2006572, TESTI2006617, TESTI2006624, TESTI2006628, TESTI2006633, TESTI2006643, TESTI2006648, TESTI2006659, TESTI2006660, TESTI2006665, TESTI2006667, TESTI2006677, TESTI2006720, TESTI2006735, TESTI2006744, TESTI2006748, TESTI2006774, TESTI2006853, TESTI2006866, TESTI2006872, TESTI2006877, TESTI2006879, TESTI2006894, TESTI2006940, TESTI2006955, TESTI2006978, TESTI2006979, TESTI2006990, TESTI2007040, TESTI2007074, TESTI2007078, TESTI2007113, TESTI2007152, TESTI2007163, TESTI2007183, TESTI2007211, TESTI2007220, TESTI2007234, TESTI2007311, TESTI2007320, TESTI2007346, TESTI2007358, TESTI2007402, TESTI2007405, TESTI2007452, TESTI2007464, TESTI2007466, TESTI2007480, TESTI2007490, TESTI2007502, TESTI2007524, TESTI2007533, TESTI2007576, TESTI2007613, TESTI2007657, TESTI2007685, TESTI2007692, TESTI2007749, TESTI2007750, TESTI2007808, TESTI2007814, TESTI2007829, TESTI2007864, TESTI2007867, TESTI2007872, TESTI2007906, TESTI2007922, TESTI2007951, TESTI2007972, TESTI2007973, TESTI2008014, TESTI2008020, TESTI2008032, TESTI2008033, TESTI2008046, TESTI2008081, TESTI2008099, TESTI2008139, TESTI2008144, TESTI2008161, TESTI2008189, TESTI2008204, TESTI2008219, TESTI2008233, TESTI2008234, TESTI2008237, TESTI2008278, TESTI2008320, TESTI2008331, TESTI2008343, TESTI2008387, TESTI2008389, TESTI2008394, TESTI2008405, TESTI2008420, TESTI2008425, TESTI2008440, TESTI2008567, TESTI2008595, TESTI2008621, TESTI2008636, TESTI2008657, TESTI2008684, TESTI2008715, TESTI2008762, TESTI2008774, TESTI2008786, TESTI2008822, TESTI2008835, TESTI2008840, TESTI2008847, TESTI2008884, TESTI2008901, TESTI2008929, TESTI2008946, TESTI2008960, TESTI2009018, TESTI2009091, TESTI2009097, TESTI2009136, TESTI2009185, TESTI2009190, TESTI2009217, TESTI2009239, TESTI2009325, TESTI2009388, TESTI2009390, TESTI2009400, TESTI2009402, TESTI2009412, TESTI2009423, TESTI2009447, TESTI2009462, TESTI2009474, TESTI2009477, TESTI2009497, TESTI2009502, TESTI2009511, TESTI2009520, TESTI2009544, TESTI2009545, TESTI2009551, TESTI2009577, TESTI2009585, TESTI2009588, TESTI2009683, TESTI2009727, TESTI2009739, TESTI2009812, TESTI2009835, TESTI2009853, TESTI2009935, TESTI2009977, TESTI2009987, TESTI2010009, TESTI2010154, TESTI2010180, TESTI2010239, TESTI2010280, TESTI2010354, TESTI2010396, TESTI2010400, TESTI2010409, TESTI2010572, TESTI2010587, TESTI2010591, TESTI2010617, TESTI2010682, TESTI2010724, TESTI2010732, TESTI2010734, TESTI2010755, TESTI2010793, TESTI2010806, TESTI2010833, TESTI2010872, TESTI2011009, TESTI2011020, TESTI2011028, TESTI2011033, TESTI2011254, TESTI2011286, TESTI2011294, TESTI2011314, TESTI2011315, TESTI2011394, TESTI2011407, TESTI2011448, TESTI2011480, TESTI2011549, TESTI2011575, TESTI2011612, TESTI2011665, TESTI2011680, TESTI2011683, TESTI2011750, TESTI2011840, TESTI2011846, TESTI2011915, TESTI2011928, TESTI2011971, TESTI2012019, TESTI2012050, TESTI2012090, TESTI2012095, TESTI2012152, TESTI2012155, TESTI2012171, TESTI2012207, TESTI2012231, TESTI2012244, TESTI2012289, TESTI2012308, TESTI2012356, TESTI2012387, TESTI2012394, TESTI2012444, TESTI2012511, TESTI2012528, TESTI2012544, TESTI2012550, TESTI2012571, TESTI2012592, TESTI2012617, TESTI2012628, TESTI2012812, TESTI2012834, TESTI2012835, TESTI2012861, TESTI2012900, TESTI2012915, TESTI2012922, TESTI2013001, TESTI2013012, TESTI2013053, TESTI2013144, TESTI2013163, TESTI2013169, TESTI2013212, TESTI2013231, TESTI2013257, TESTI2013264, TESTI2013268, TESTI2013322, TESTI2013381, TESTI2013382, TESTI2013401, TESTI2013427, TESTI2013468, TESTI2013497, TESTI2013545, TESTI2013546, TESTI2013566, TESTI2013601, TESTI2013604, TESTI2013607, TESTI2013610, TESTI2013691, TESTI2013699, TESTI2013737, TESTI2013767, TESTI2013832, TESTI2013873, TESTI2013889, TESTI2014007, TESTI2014036, TESTI2014097, TESTI2014160, TESTI2014248, TESTI2014254, TESTI2014269, TESTI2014274, TESTI2014318, TESTI2014324, TESTI2014339, TESTI2014362, TESTI2014385, TESTI2014415, TESTI2014439, TESTI2014474, TESTI2014577, TESTI2014578, TESTI2014716, TESTI2014780, TESTI2014800, TESTI2014838, TESTI2014843, TESTI2014979, TESTI2014988, TESTI2015042, TESTI2015105, TESTI2015180, TESTI2015213, TESTI2015246, TESTI2015249, TESTI2015327, TESTI2015331, TESTI2015335, TESTI2015350, TESTI2015375, TESTI2015437, TESTI2015590, TESTI2015610, TESTI2015647, TESTI2015675, TESTI2015710, TESTI2015752, TESTI2015830, TESTI2015914, TESTI2015938, TESTI2015947, TESTI2015962, TESTI2015987, TESTI2016046, TESTI2016101, TESTI2016162, TESTI2016197, TESTI2016278, TESTI2016298, TESTI2016331, TESTI2016337, TESTI2016410, TESTI2016421, TESTI2016509, TESTI2016568, TESTI2016583, TESTI2016599, TESTI2016629, TESTI2016663, TESTI2016667, TESTI2016688, TESTI2016701, TESTI2016758, TESTI2016848, TESTI2016863, TESTI2016888, TESTI2016896, TESTI2016922, TESTI2016942, TESTI2016950, TESTI2016996, TESTI2017017, TESTI2017028, TESTI2017035, TESTI2017069, TESTI2017089, TESTI2017102, TESTI2017107, TESTI2017113, TESTI2017125, TESTI2017256, TESTI2017305, TESTI2017311, TESTI2017396, TESTI2017507, TESTI2017537, TESTI2017582, TESTI2017584, TESTI2017645, TESTI2017727, TESTI2017740, TESTI2017775, TESTI2017816, TESTI2017832, TESTI2017923, TESTI2017932, TESTI2017951, TESTI2018014, TESTI2018031, TESTI2018035, TESTI2018060, TESTI2018083, TESTI2018178, TESTI2018221, TESTI2018276, TESTI2018290, TESTI2018335, TESTI2018337, TESTI2018368, TESTI2018421, TESTI2018428, TESTI2018475, TESTI2018482, TESTI2018521, TESTI2018565, TESTI2018581, TESTI2018611, TESTI2018687, TESTI2018697, TESTI2018838, TESTI2018867, TESTI2018941, TESTI2018957, TESTI2018974, TESTI2018975, TESTI2019042, TESTI2019077, TESTI2019228, TESTI2019257, TESTI2019280, TESTI2019282, TESTI2019308, TESTI2019336, TESTI2019352, TESTI2019406, TESTI2019430, TESTI2019455, TESTI2019481, TESTI2019488, TESTI2019501, TESTI2019648, TESTI2019669, TESTI2019697, TESTI2019729, TESTI2019760, TESTI2019787, TESTI2019794, TESTI2019854, TESTI2019859, TESTI2019860, TESTI2019872, TESTI2019911, TESTI2019917, TESTI2019975, TESTI2019998, TESTI2020012, TESTI2020029, TESTI2020071, TESTI2020084, TESTI2020265, TESTI2020283, TESTI2020316, TESTI2020344, TESTI2020379, TESTI2020426, TESTI2020445, TESTI2020510, TESTI2020515, TESTI2020525, TESTI2020579, TESTI2020717, TESTI2020840, TESTI2020871, TESTI2020905, TESTI2020906, TESTI2020946, TESTI2020956, TESTI2020981, TESTI2020999, TESTI2021003, TESTI2021038, TESTI2021057, TESTI2021077, TESTI2021112, TESTI2021114, TESTI2021116, TESTI2021118, TESTI2021122, TESTI2021124, TESTI2021138, TESTI2021297, TESTI2021315, TESTI2021358, TESTI2021425, TESTI2021447, TESTI2021463, TESTI2021531, TESTI2021599, TESTI2021637, TESTI2021654, TESTI2021667, TESTI2021736, TESTI2021785, TESTI2021819, TESTI2021851, TESTI2021895, TESTI2021911, TESTI2021939, TESTI2021999, TESTI2022010, TESTI2022023, TESTI2022065, TESTI2022086, TESTI2022179, TESTI2022203, TESTI2022246, TESTI2022323, TESTI2022338, TESTI2022400, TESTI2022462, TESTI2022495, TESTI2022623, TESTI2022649, TESTI2022652, TESTI2022738, TESTI2022798, TESTI2022812, TESTI2022814, TESTI2022874, TESTI2022940, TESTI2022952, TESTI2023025, TESTI2023033, TESTI2023053, TESTI2023085, TESTI2023192, TESTI2023194, TESTI2023214, TESTI2023254, TESTI2023386, TESTI2023414, TESTI2023427, TESTI2023436, TESTI2023599, TESTI2023752, TESTI2023800, TESTI2023861, TESTI2023903, TESTI2023942, TESTI2023947, TESTI2023951, TESTI2023968, TESTI2024009, TESTI2024090, TESTI2024125, TESTI2024153, TESTI2024192, TESTI2024267, TESTI2024283, TESTI2024299, TESTI2024419, TESTI2024422, TESTI2024443, TESTI2024446, TESTI2024473, TESTI2024476, TESTI2024498, TESTI2024560, TESTI2024567, TESTI2024586, TESTI2024598, TESTI2024641, TESTI2024648, TESTI2024718, TESTI2024744, TESTI2024844, TESTI2024864, TESTI2024936, TESTI2024978, TESTI2024999, TESTI2025006, TESTI2025013, TESTI2025022, TESTI2025063, TESTI2025117, TESTI2025144, TESTI2025161, TESTI2025174, TESTI2025229, TESTI2025269, TESTI2025365, TESTI2025403, TESTI2025409, TESTI2025422, TESTI2025448, TESTI2025486, TESTI2025546, TESTI2025582, TESTI2025609, TESTI2025656, TESTI2025757, TESTI2025791, TESTI2025846, TESTI2025872, TESTI2025879, TESTI2025911, TESTI2025920, TESTI2025924, TESTI2026014, TESTI2026024, TESTI2026064, TESTI2026077, TESTI2026104, TESTI2026134, TESTI2026168, TESTI2026196, TESTI2026215, TESTI2026218, TESTI2026233, TESTI2026291, TESTI2026294, TESTI2026401, TESTI2026403, TESTI2026453, TESTI2026461, TESTI2026491, TESTI2026505, TESTI2026515, TESTI2026525, TESTI2026534, TESTI2026537, TESTI2026589, TESTI2026597, TESTI2026605, TESTI2026647, TESTI2026674, TESTI2026794, TESTI2026824, TESTI2026854, TESTI2026925, TESTI2026936, TESTI2026957, TESTI2027013, TESTI2027019, TESTI2027108, TESTI2027165, TESTI2027171, TESTI2027173, TESTI2027179, TESTI2027185, TESTI2027206, TESTI2027238, TESTI2027239, TESTI2027243, TESTI2027296, TESTI2027378, TESTI2027411, TESTI2027450, TESTI2027496, TESTI2027503, TESTI2027562, TESTI2027615, TESTI2027645, TESTI2027730, TESTI2027736, TESTI2027791, TESTI2027820, TESTI2027828, TESTI2027840, TESTI2027909, TESTI2028098, TESTI2028151, TESTI2028242, TESTI2028253, TESTI2028254, TESTI2028269, TESTI2028290, TESTI2028296, TESTI2028384, TESTI2028426, TESTI2028488, TESTI2028523, TESTI2028583, TESTI2028613, TESTI2028659, TESTI2028662, TESTI2028670, TESTI2028705, TESTI2028776, TESTI2028811, TESTI2028891, TESTI2028985, TESTI2028997, TESTI2029131, TESTI2029162, TESTI2029196, TESTI2029201, TESTI2029227, TESTI2029244, TESTI2029249, TESTI2029252, TESTI2029259, TESTI2029264, TESTI2029470, TESTI2029672, TESTI2029785, TESTI2029880, TESTI2030136, TESTI2030322, TESTI2030336, TESTI2030342, TESTI2030519, TESTI2030554, TESTI2030556, TESTI2030728, TESTI2030754, TESTI2030770, TESTI2030860, TESTI2030901, TESTI2030917, TESTI2030930, TESTI2031006, TESTI2031007, TESTI2031060, TESTI2031129, TESTI2031356, TESTI2031418, TESTI2031504, TESTI2031529, TESTI2031687, TESTI2031760, TESTI2031809, TESTI2031919, TESTI2031935, TESTI2031986, TESTI2032044, TESTI2032067, TESTI2032079, TESTI2032643, TESTI2032681, TESTI2032761, TESTI2032768, TESTI2032774, TESTI2032828, TESTI2033031, TESTI2033242, TESTI2033254, TESTI2033300, TESTI2033395, TESTI2033453, TESTI2033505, TESTI2033520, TESTI2033641, TESTI2033710, TESTI2033905, TESTI2034187, TESTI2034243, TESTI2034249, TESTI2034307, TESTI2034357, TESTI2034401, TESTI2034407, TESTI2034506, TESTI2034520, TESTI2034718, TESTI2034730, TESTI2034749, TESTI2034767, TESTI2034774, TESTI2034777, TESTI2034785, TESTI2034799, TESTI2034847, TESTI2034913, TESTI2034916, TESTI2034931, TESTI2034953, TESTI2034997, TESTI2035003, TESTI2035078, TESTI2035084, TESTI2035107, TESTI2035121, TESTI2035124, TESTI2035183, TESTI2035236, TESTI2035262, TESTI2035309, TESTI2035688, TESTI2035775, TESTI2035793, TESTI2035898, TESTI2035962, TESTI2035981, TESTI2035997, TESTI2036114, TESTI2036129, TESTI2036285, TESTI2036288, TESTI2036513, TESTI2036589, TESTI2036650, TESTI2036684, TESTI2036691, TESTI2036736, TESTI2036822, TESTI2036833, TESTI2036913, TESTI2036922, TESTI2036951, TESTI2036965, TESTI2036969, TESTI2037002, TESTI2037055, TESTI2037081, TESTI2037085, TESTI2037103, TESTI2037106, TESTI2037111, TESTI2037209, TESTI2037255, TESTI2037359, TESTI2037375, TESTI2037382, TESTI2037534, TESTI2037569, TESTI2037572, TESTI2037643, TESTI2037657, TESTI2037673, TESTI2037723, TESTI2037819, TESTI2037830, TESTI2037845, TESTI2037877, TESTI2037976, TESTI2038048, TESTI2038065, TESTI2038104, TESTI2038275, TESTI2038388, TESTI2038573, TESTI2038596, TESTI2038623, TESTI2038644, TESTI2038733, TESTI2038858, TESTI2038958, TESTI2039025, TESTI2039026, TESTI2039038, TESTI2039041, TESTI2039060, TESTI2039113, TESTI2039121, TESTI2039177, TESTI2039209, TESTI2039225, TESTI2039227, TESTI2039276, TESTI2039342, TESTI2039353, TESTI2039544, TESTI2039613, TESTI2039707, TESTI2039732, TESTI2039738, TESTI2039776, TESTI2039867, TESTI2039908, TESTI2040018, TESTI2040094, TESTI2040102, TESTI2040128, TESTI2040143, TESTI2040297, TESTI2040372, TESTI2040377, TESTI2040424, TESTI2040642, TESTI2040815, TESTI2040897, TESTI2040944, TESTI2040964, TESTI2040983, TESTI2040989, TESTI2041330, TESTI2041362, TESTI2041517, TESTI2041564, TESTI2041664, TESTI2041730, TESTI2041734, TESTI2041778, TESTI2041800, TESTI2041947, TESTI2041956, TESTI2041976, TESTI2042062, TESTI2042149, TESTI2042264, TESTI2042295, TESTI2042302, TESTI2042326, TESTI2042400, TESTI2042450, TESTI2042473, TESTI2042507, TESTI2042508, TESTI2042750, TESTI2042783, TESTI2042806, TESTI2042928, TESTI2042946, TESTI2042958, TESTI2043275, TESTI2043277, TESTI2043282, TESTI2043313, TESTI2043477, TESTI2043585, TESTI2043758, TESTI2043817, TESTI2043857, TESTI2043866, TESTI2043869, TESTI2044064, TESTI2044118, TESTI2044194, TESTI2044276, TESTI2044306, TESTI2044309, TESTI2044413, TESTI2044418, TESTI2044754, TESTI2044788, TESTI2044796, TESTI2044833, TESTI2044892, TESTI2044920, TESTI2044968, TESTI2045139, TESTI2045155, TESTI2045171, TESTI2045199, TESTI2045353, TESTI2045509, TESTI2045562, TESTI2045611, TESTI2045819, TESTI2045850, TESTI2045920, TESTI2045964, TESTI2045983, TESTI2046100, TESTI2046188, TESTI2046347, TESTI2046352, TESTI2046358, TESTI2046439, TESTI2046535, TESTI2046536, TESTI2046552, TESTI2046569, TESTI2046686, TESTI2046721, TESTI2046732, TESTI2046786, TESTI2046797, TESTI2046863, TESTI2046872, TESTI2047071, TESTI2047141, TESTI2047147, TESTI2047153, TESTI2047212, TESTI2047342, TESTI2047383, TESTI2047792, TESTI2047801, TESTI2047818, TESTI2047824, TESTI2047885, TESTI2047930, TESTI2048105, TESTI2048109, TESTI2048465, TESTI2048603, TESTI2048898, TESTI2049041, TESTI2049062, TESTI2049206, TESTI2049246, TESTI2049277, TESTI2049422, TESTI2049452, TESTI2049469, TESTI2049553, TESTI2049576, TESTI2049857, TESTI2049956, TESTI2050137, TESTI2050681, TESTI2050780, TESTI2050987, TESTI2051148, TESTI2051177, TESTI2051279, TESTI2051488, TESTI2051543, TESTI2051627, TESTI2051742, TESTI2051767, TESTI2051791, TESTI2051806, TESTI2051867, TESTI2051873, TESTI2052110, TESTI2052202, TESTI2052211, TESTI2052256, TESTI2052288, TESTI2052525, TESTI2052670, TESTI2052693, TESTI2052698, TESTI2052799, TESTI2052822, TESTI2052985, TESTI2053151, TESTI2053242, TESTI2053399, TESTI2053526, TESTI2053561, TESTI2053621, TESTI2053667, TESTI2053723, TESTI3000002, TESTI3000005, TESTI4000068, TESTI4000079, TESTI4000093, TESTI4000134, TESTI4000137, TESTI4000153, TESTI4000155, TESTI4000157, TESTI4000183, TESTI4000214, TESTI4000215, TESTI4000228, TESTI4000250, TESTI4000288, TESTI4000319, TESTI4000349, TESTI4000370, TESTI4000394, TESTI4000434, TESTI4000462, TESTI4000530, TESTI4000534, TESTI4000598, TESTI4000600, TESTI4000621, TESTI4000703, TESTI4000724, TESTI4000957, TESTI4000970, TESTI4001036, TESTI4001037, TESTI4001060, TESTI4001106, TESTI4001148, TESTI4001176, TESTI4001195, TESTI4001201, TESTI4001348, TESTI4001441, TESTI4001467, TESTI4001473, TESTI4001517, TESTI4001527, TESTI4001561, TESTI4001569, TESTI4001604, TESTI4001665, TESTI4001679, TESTI4001795, TESTI4001923, TESTI4001925, TESTI4001984, TESTI4002003, TESTI4002072, TESTI4002141, TESTI4002195, TESTI4002290, TESTI4002319, TESTI4002491, TESTI4002520, TESTI4002552, TESTI4002647, TESTI4002703, TESTI4002754, TESTI4002799, TESTI4002868, TESTI4002878, TESTI4002889, TESTI4002988, TESTI4003150, TESTI4003179, TESTI4003279, TESTI4003319, TESTI4003404, TESTI4003565, TESTI4003574, TESTI4003579, TESTI4003602, TESTI4003703, TESTI4003733, TESTI4003796, TESTI4003944, TESTI4004003, TESTI4004031, TESTI4004200, TESTI4004210, TESTI4004539, TESTI4004626, TESTI4004653, TESTI4004695, TESTI4004722, TESTI4004887, TESTI4004917, TESTI4005015, TESTI4005039, TESTI4005133, TESTI4005158, TESTI4005317, TESTI4005322, TESTI4005399, TESTI4005470, TESTI4005500, TESTI4005543, TESTI4005628, TESTI4005801, TESTI4005805, TESTI4005857, TESTI4005961, TESTI4006053, TESTI4006079, TESTI4006112, TESTI4006137, TESTI4006148, TESTI4006219, TESTI4006234, TESTI4006308, TESTI4006326, TESTI4006393, TESTI4006407, TESTI4006412, TESTI4006420, TESTI4006441, TESTI4006473, TESTI4006539, TESTI4006546, TESTI4006567, TESTI4006704, TESTI4006728, TESTI4006802, TESTI4006819, TESTI4007064, TESTI4007163, TESTI4007176, TESTI4007203, TESTI4007239, TESTI4007369, TESTI4007373, TESTI4007382, TESTI4007404, TESTI4007489, TESTI4007565, TESTI4007671, TESTI4007775, TESTI4007778, TESTI4007799, TESTI4007810, TESTI4007965, TESTI4008007, TESTI4008018, TESTI4008050, TESTI4008058, TESTI4008086, TESTI4008097, TESTI4008176, TESTI4008209, TESTI4008219, TESTI4008250, TESTI4008302, TESTI4008305, TESTI4008401, TESTI4008417, TESTI4008429, TESTI4008573, TESTI4008797, TESTI4008816, TESTI4008840, TESTI4008935, TESTI4008993, TESTI4009022, TESTI4009028, TESTI4009034, TESTI4009123, TESTI4009160, TESTI4009215, TESTI4009283, TESTI4009306, TESTI4009374, TESTI4009406, TESTI4009454, TESTI4009457, TESTI4009501, TESTI4009563, TESTI4009608, TESTI4009638, TESTI4009752, TESTI4009881, TESTI4009886, TESTI4009928, TESTI4010076, TESTI4010082, TESTI4010095, TESTI4010211, TESTI4010377, TESTI4010475, TESTI4010544, TESTI4010713, TESTI4010721, TESTI4010789, TESTI4010817, TESTI4010831, TESTI4010902, TESTI4010928, TESTI4010979, TESTI4011070, TESTI4011072, TESTI4011084, TESTI4011118, TESTI4011246, TESTI4011484, TESTI4011505, TESTI4011532, TESTI4011616, TESTI4011744, TESTI4011745, TESTI4011829, TESTI4011926, TESTI4011956, TESTI4012010, TESTI4012086, TESTI4012258, TESTI4012293, TESTI4012329, TESTI4012382, TESTI4012406, TESTI4012448, TESTI4012451, TESTI4012505, TESTI4012556, TESTI4012623, TESTI4012646, TESTI4012679, TESTI4012911, TESTI4012956, TESTI4012960, TESTI4013365, TESTI4013369, TESTI4013410, TESTI4013602, TESTI4013667, TESTI4013675, TESTI4013685, TESTI4013735, TESTI4013742, TESTI4013774, TESTI4013817, TESTI4013830, TESTI4013852, TESTI4013894, TESTI4013924, TESTI4013960, TESTI4013962, TESTI4014159, TESTI4014175, TESTI4014265, TESTI4014276, TESTI4014306, TESTI4014392, TESTI4014415, TESTI4014445, TESTI4014553, TESTI4014661, TESTI4014694, TESTI4014801, TESTI4014818, TESTI4014891, TESTI4014908, TESTI4014924, TESTI4014932, TESTI4014977, TESTI4015012, TESTI4015129, TESTI4015145, TESTI4015204, TESTI4015263, TESTI4015293, TESTI4015299, TESTI4015339, TESTI4015398, TESTI4015442, TESTI4015471, TESTI4015477, TESTI4015600, TESTI4015646, TESTI4015681, TESTI4015688, TESTI4015790, TESTI4016110, TESTI4016238, TESTI4016551, TESTI4016812, TESTI4016822, TESTI4016865, TESTI4016882, TESTI4016925, TESTI4017001, TESTI4017116, TESTI4017137, TESTI4017229, TESTI4017254, TESTI4017269, TESTI4017380, TESTI4017382, TESTI4017543, TESTI4017575, TESTI4017647, TESTI4017714, TESTI4017763, TESTI4017848, TESTI4017854, TESTI4017901, TESTI4017961, TESTI4017984, TESTI4018101, TESTI4018152, TESTI4018208, TESTI4018382, TESTI4018436, TESTI4018506, TESTI4018555, TESTI4018751, TESTI4018806, TESTI4018835, TESTI4018859, TESTI4018881, TESTI4018886, TESTI4018938, TESTI4019140, TESTI4019149, TESTI4019299, TESTI4019417, TESTI4019440, TESTI4019566, TESTI4019657, TESTI4019756, TESTI4019843, TESTI4020092, TESTI4020102, TESTI4020342, TESTI4020460, TESTI4020596, TESTI4020806, TESTI4020819, TESTI4020920, TESTI4021129, TESTI4021197, TESTI4021294, TESTI4021377, TESTI4021456, TESTI4021491, TESTI4021569, TESTI4021713, TESTI4021821, TESTI4022158, TESTI4022577, TESTI4022716, TESTI4022873, TESTI4023096, TESTI4023172, TESTI4023546, TESTI4023555, TESTI4023654, TESTI4023722, TESTI4023762, TESTI4023942, TESTI4024096, TESTI4024240, TESTI4024245, TESTI4024294, TESTI4024344, TESTI4024387, TESTI4024420, TESTI4024494, TESTI4024740, TESTI4024874, TESTI4024890, TESTI4024907, TESTI4024930, TESTI4025062, TESTI4025268, TESTI4025401, TESTI4025494, TESTI4025547, TESTI4025731, TESTI4025797, TESTI4025865, TESTI4025908, TESTI4025920, TESTI4026079, TESTI4026080, TESTI4026192, TESTI4026207, TESTI4026295, TESTI4026390, TESTI4026456, TESTI4026510, TESTI4026524, TESTI4026680, TESTI4026700, TESTI4026762, TESTI4026785, TESTI4027139, TESTI4027170, TESTI4027262, TESTI4027516, TESTI4027557, TESTI4027660, TESTI4027821, TESTI4027969, TESTI4028042, TESTI4028059, TESTI4028062, TESTI4028182, TESTI4028429, TESTI4028612, TESTI4028692, TESTI4028809, TESTI4028823, TESTI4028880, TESTI4028904, TESTI4028938, TESTI4028958, TESTI4028983, TESTI4029023, TESTI4029348, TESTI4029370, TESTI4029528, TESTI4029651, TESTI4029671, TESTI4029676, TESTI4029690, TESTI4029731, TESTI4029743, TESTI4030069, TESTI4030159, TESTI4030319, TESTI4030505, TESTI4030603, TESTI4030669, TESTI4030673, TESTI4030864, TESTI4031066, TESTI4031173, TESTI4031335, TESTI4031745, TESTI4031818, TESTI4032090, TESTI4032112, TESTI4032128, TESTI4032270, TESTI4032375, TESTI4032834, TESTI4032856, TESTI4032895, TESTI4032913, TESTI4033146, TESTI4033177, TESTI4033433, TESTI4033690, TESTI4034172, TESTI4034212, TESTI4034432, TESTI4034495, TESTI4034632, TESTI4034633, TESTI4034912, TESTI4034973, TESTI4035063, TESTI4035065, TESTI4035498, TESTI4035508, TESTI4035581, TESTI4035602, TESTI4035637, TESTI4035649, TESTI4035770, TESTI4035872, TESTI4035895, TESTI4035898, TESTI4035989, TESTI4036012, TESTI4036042, TESTI4036048, TESTI4036315, TESTI4036319, TESTI4036449, TESTI4036767, TESTI4036909, TESTI4037066, TESTI4037188, TESTI4037228, TESTI4037244, TESTI4037727, TESTI4037949, TESTI4038047, TESTI4038099, TESTI4038156, TESTI4038223, TESTI4038258, TESTI4038284, TESTI4038339, TESTI4038492, TESTI4038721, TESTI4038758, TESTI4038779, TESTI4038818, TESTI4039038, TESTI4039086, TESTI4039451, TESTI4039575, TESTI4039659, TESTI4039744, TESTI4039904, TESTI4040197, TESTI4040363, TESTI4040535, TESTI4040559, TESTI4040598, TESTI4040800, TESTI4040804, TESTI4040939, TESTI4040956, TESTI4041049, TESTI4041053, TESTI4041086, TESTI4041099, TESTI4041143, TESTI4041482, TESTI4041519, TESTI4041624, TESTI4041629, TESTI4041832, TESTI4041844, TESTI4041903, TESTI4041954, TESTI4041984, TESTI4041985, TESTI4041986, TESTI4042098, TESTI4042420, TESTI4042440, TESTI4042444, TESTI4042711, TESTI4042846, TESTI4043067, TESTI4043129, TESTI4043166, TESTI4043203, TESTI4043223, TESTI4043371, TESTI4043378, TESTI4043512, TESTI4043551, TESTI4043710, TESTI4043947, TESTI4044035, TESTI4044076, TESTI4044084, TESTI4044123, TESTI4044186, TESTI4044234, TESTI4044291, TESTI4044296, TESTI4044300, TESTI4044682, TESTI4044770, TESTI4045168, TESTI4045312, TESTI4045330, TESTI4045470, TESTI4045701, TESTI4045908, TESTI4045955, TESTI4045982, TESTI4046073, TESTI4046090, TESTI4046240, TESTI4046245, TESTI4046253, TESTI4046282, TESTI4046328, TESTI4046450, TESTI4046457, TESTI4046487, TESTI4046502, TESTI4046523, TESTI4046819, TESTI4046873, TESTI4046884, TESTI4046896, TESTI4046903, TESTI4046962, TESTI4047069, TESTI4047119, TESTI4047305, TESTI4047328, TESTI4047437, TESTI4047569, TESTI4047746, TESTI4047808, THYMU1000002, THYMU1000016, THYMU1000017, THYMU1000025, THYMU1000029, THYMU1000033, THYMU1000041, THYMU1000060, THYMU1000074, THYMU1000098, THYMU1000105, THYMU1000136, THYMU1000142, THYMU1000144, THYMU1000158, THYMU1000176, THYMU1000179, THYMU1000191, THYMU1000198, THYMU1000217, THYMU1000240, THYMU1000242, THYMU1000291, THYMU1000316, THYMU1000318, THYMU1000331, THYMU1000336, THYMU1000366, THYMU1000382, THYMU1000393, THYMU1000394, THYMU1000399, THYMU1000426, THYMU1000440, THYMU1000459, THYMU1000491, THYMU1000496, THYMU1000499, THYMU1000527, THYMU1000532, THYMU1000536, THYMU1000554, THYMU1000558, THYMU1000576, THYMU1000600, THYMU1000677, THYMU1000692, THYMU2000022, THYMU2000032, THYMU2000138, THYMU2000140, THYMU2000155, THYMU2000162, THYMU2000171, THYMU2000176, THYMU2000179, THYMU2000231, THYMU2000236, THYMU2000276, THYMU2000280, THYMU2000317, THYMU2000368, THYMU2000369, THYMU2000418, THYMU2000436, THYMU2000440, THYMU2000489, THYMU2000492, THYMU2000519, THYMU2000570, THYMU2000602, THYMU2000660, THYMU2000671, THYMU2000702, THYMU2000767, THYMU2000800, THYMU2000879, THYMU2000932, THYMU2000946, THYMU2000950, THYMU2000971, THYMU2000982, THYMU2000990, THYMU2001007, THYMU2001018, THYMU2001053, THYMU2001071, THYMU2001090, THYMU2001139, THYMU2001202, THYMU2001203, THYMU2001256, THYMU2001270, THYMU2001291, THYMU2001314, THYMU2001325, THYMU2001357, THYMU2001381, THYMU2001422, THYMU2001443, THYMU2001515, THYMU2001521, THYMU2001556, THYMU2001622, THYMU2001727, THYMU2001825, THYMU2001868, THYMU2001898, THYMU2001900, THYMU2001916, THYMU2001926, THYMU2001989, THYMU2002023, THYMU2002037, THYMU2002080, THYMU2002109, THYMU2002154, THYMU2002157, THYMU2002162, THYMU2002177, THYMU2002203, THYMU2002229, THYMU2002242, THYMU2002338, THYMU2002356, THYMU2002376, THYMU2002384, THYMU2002450, THYMU2002490, THYMU2002548, THYMU2002695, THYMU2002745, THYMU2002789, THYMU2002792, THYMU2002815, THYMU2002841, THYMU2002852, THYMU2002910, THYMU2002950, THYMU2003069, THYMU2003107, THYMU2003124, THYMU2003166, THYMU2003232, THYMU2003242, THYMU2003249, THYMU2003270, THYMU2003282, THYMU2003336, THYMU2003366, THYMU2003397, THYMU2003440, THYMU2003470, THYMU2003479, THYMU2003632, THYMU2003650, THYMU2003700, THYMU2003760, THYMU2003803, THYMU2003855, THYMU2003907, THYMU2004003, THYMU2004008, THYMU2004042, THYMU2004108, THYMU2004111, THYMU2004123, THYMU2004139, THYMU2004169, THYMU2004284, THYMU2004336, THYMU2004344, THYMU2004356, THYMU2004452, THYMU2004508, THYMU2004512, THYMU2004635, THYMU2004639, THYMU2004668, THYMU2004677, THYMU2004688, THYMU2004693, THYMU2004835, THYMU2004843, THYMU2004916, THYMU2004986, THYMU2005001, THYMU2005003, THYMU2005046, THYMU2005134, THYMU2005156, THYMU2005190, THYMU2005225, THYMU2005240, THYMU2005246, THYMU2005270, THYMU2005283, THYMU2005303, THYMU2005321, THYMU2005356, THYMU2005369, THYMU2005480, THYMU2005482, THYMU2005507, THYMU2005545, THYMU2005574, THYMU2005576, THYMU2005748, THYMU2005759, THYMU2005807, THYMU2005815, THYMU2005855, THYMU2005881, THYMU2005948, THYMU2005997, THYMU2006001, THYMU2006048, THYMU2006098, THYMU2006160, THYMU2006170, THYMU2006252, THYMU2006261, THYMU2006277, THYMU2006303, THYMU2006324, THYMU2006350, THYMU2006357, THYMU2006365, THYMU2006420, THYMU2006468, THYMU2006505, THYMU2006666, THYMU2006712, THYMU2006913, THYMU2006946, THYMU2006965, THYMU2007025, THYMU2007036, THYMU2007095, THYMU2007112, THYMU2007146, THYMU2007179, THYMU2007258, THYMU2007307, THYMU2007308, THYMU2007339, THYMU2007350, THYMU2007384, THYMU2007493, THYMU2007521, THYMU2007528, THYMU2007530, THYMU2007532, THYMU2007561, THYMU2007571, THYMU2007635, THYMU2007658, THYMU2007667, THYMU2007725, THYMU2007729, THYMU2007802, THYMU2007824, THYMU2007854, THYMU2007952, THYMU2007969, THYMU2008035, THYMU2008036, THYMU2008049, THYMU2008072, THYMU2008111, THYMU2008145, THYMU2008149, THYMU2008185, THYMU2008191, THYMU2008207, THYMU2008226, THYMU2008282, THYMU2008339, THYMU2008350, THYMU2008351, THYMU2008383, THYMU2008452, THYMU2008643, THYMU2008691, THYMU2008714, THYMU2008725, THYMU2008727, THYMU2008781, THYMU2008799, THYMU2008876, THYMU2008910, THYMU2008917, THYMU2008928, THYMU2008990, THYMU2008994, THYMU2009023, THYMU2009046, THYMU2009101, THYMU2009104, THYMU2009134, THYMU2009157, THYMU2009181, THYMU2009338, THYMU2009425, THYMU2009516, THYMU2009526, THYMU2009546, THYMU2009592, THYMU2009596, THYMU2009835, THYMU2009906, THYMU2009948, THYMU2010030, THYMU2010041, THYMU2010046, THYMU2010059, THYMU2010082, THYMU2010094, THYMU2010161, THYMU2010192, THYMU2010637, THYMU2010671, THYMU2010699, THYMU2010705, THYMU2010779, THYMU2010816, THYMU2010831, THYMU2010848, THYMU2011053, THYMU2011072, THYMU2011096, THYMU2011118, THYMU2011142, THYMU2011183, THYMU2011257, THYMU2011259, THYMU2011295, THYMU2011308, THYMU2011390, THYMU2011431, THYMU2011447, THYMU2011538, THYMU2011548, THYMU2011551, THYMU2011564, THYMU2011573, THYMU2011585, THYMU2011621, THYMU2011666, THYMU2011736, THYMU2011785, THYMU2011806, THYMU2011852, THYMU2011875, THYMU2011881, THYMU2011937, THYMU2011939, THYMU2012002, THYMU2012024, THYMU2012073, THYMU2012104, THYMU2012113, THYMU2012273, THYMU2012401, THYMU2012507, THYMU2012565, THYMU2012574, THYMU2012625, THYMU2012631, THYMU2012665, THYMU2012701, THYMU2012807, THYMU2012826, THYMU2012882, THYMU2012891, THYMU2012902, THYMU2012919, THYMU2013023, THYMU2013047, THYMU2013051, THYMU2013089, THYMU2013136, THYMU2013170, THYMU2013364, THYMU2013386, THYMU2013426, THYMU2013578, THYMU2013648, THYMU2013705, THYMU2013757, THYMU2013779, THYMU2013863, THYMU2013950, THYMU2013981, THYMU2014067, THYMU2014068, THYMU2014183, THYMU2014204, THYMU2014297, THYMU2014323, THYMU2014327, THYMU2014353, THYMU2014500, THYMU2014599, THYMU2014762, THYMU2014777, THYMU2014801, THYMU2014901, THYMU2014923, THYMU2015019, THYMU2015161, THYMU2015316, THYMU2015321, THYMU2015439, THYMU2015441, THYMU2015479, THYMU2015775, THYMU2015825, THYMU2015918, THYMU2015943, THYMU2015984, THYMU2016113, THYMU2016164, THYMU2016204, THYMU2016219, THYMU2016360, THYMU2016496, THYMU2016523, THYMU2016840, THYMU2016968, THYMU2017008, THYMU2017010, THYMU2017023, THYMU2017085, THYMU2017099, THYMU2017158, THYMU2017162, THYMU2017215, THYMU2017362, THYMU2017366, THYMU2017398, THYMU2017449, THYMU2017479, THYMU2017522, THYMU2017526, THYMU2017601, THYMU2017675, THYMU2017707, THYMU2017831, THYMU2017844, THYMU2017878, THYMU2017948, THYMU2018028, THYMU2018071, THYMU2018189, THYMU2018197, THYMU2018384, THYMU2018455, THYMU2018547, THYMU2018565, THYMU2018673, THYMU2018721, THYMU2018772, THYMU2018819, THYMU2018841, THYMU2018997, THYMU2019021, THYMU2019054, THYMU2019197, THYMU2019210, THYMU2019364, THYMU2019436, THYMU2019442, THYMU2019587, THYMU2019599, THYMU2019686, THYMU2019813, THYMU2020198, THYMU2020289, THYMU2020416, THYMU2020491, THYMU2020499, THYMU2020560, THYMU2020667, THYMU2020830, THYMU2020883, THYMU2020959, THYMU2021361, THYMU2021509, THYMU2021597, THYMU2021684, THYMU2021714, THYMU2022213, THYMU2022289, THYMU2022660, THYMU2022854, THYMU2022922, THYMU2023209, THYMU2023264, THYMU2023576, THYMU2023711, THYMU2023900, THYMU2023943, THYMU2023967, THYMU2024071, THYMU2024185, THYMU2024207, THYMU2024616, THYMU2024684, THYMU2025042, THYMU2025189, THYMU2025319, THYMU2025325, THYMU2025406, THYMU2025557, THYMU2025572, THYMU2025707, THYMU2025849, THYMU2025909, THYMU2025939, THYMU2026182, THYMU2026350, THYMU2026530, THYMU2026531, THYMU2026835, THYMU2026904, THYMU2027053, THYMU2027168, THYMU2027249, THYMU2027282, THYMU2027497, THYMU2027695, THYMU2027734, THYMU2027894, THYMU2027996, THYMU2028041, THYMU2028368, THYMU2028379, THYMU2028394, THYMU2028412, THYMU2028632, THYMU2028724, THYMU2028739, THYMU2028942, THYMU2028978, THYMU2029134, THYMU2029676, THYMU2029688, THYMU2029788, THYMU2030068, THYMU2030226, THYMU2030264, THYMU2030462, THYMU2030543, THYMU2030637, THYMU2030655, THYMU2030796, THYMU2030912, THYMU2030982, THYMU2031046, THYMU2031139, THYMU2031218, THYMU2031249, THYMU2031258, THYMU2031341, THYMU2031368, THYMU2031579, THYMU2031847, THYMU2031890, THYMU2031994, THYMU2032035, THYMU2032080, THYMU2032150, THYMU2032155, THYMU2032358, THYMU2032437, THYMU2032601, THYMU2032655, THYMU2032696, THYMU2032715, THYMU2032732, THYMU2032825, THYMU2032976, THYMU2033053, THYMU2033059, THYMU2033070, THYMU2033079, THYMU2033085, THYMU2033104, THYMU2033227, THYMU2033308, THYMU2033401, THYMU2033583, THYMU2033755, THYMU2033787, THYMU2033816, THYMU2034182, THYMU2034279, THYMU2034314, THYMU2034338, THYMU2034917, THYMU2035064, THYMU2035078, THYMU2035101, THYMU2035319, THYMU2035321, THYMU2035388, THYMU2035400, THYMU2035554, THYMU2035710, THYMU2035735, THYMU2036058, THYMU2036105, THYMU2036207, THYMU2036215, THYMU2036252, THYMU2036265, THYMU2036366, THYMU2036459, THYMU2036461, THYMU2036604, THYMU2036653, THYMU2037081, THYMU2037208, THYMU2037226, THYMU2037233, THYMU2037234, THYMU2037348, THYMU2037406, THYMU2037965, THYMU2038058, THYMU2038189, THYMU2038199, THYMU2038220, THYMU2038301, THYMU2038369, THYMU2038389, THYMU2038615, THYMU2038636, THYMU2038739, THYMU2038772, THYMU2038797, THYMU2038906, THYMU2039305, THYMU2039315, THYMU2039334, THYMU2039350, THYMU2039411, THYMU2039634, THYMU2039719, THYMU2039780, THYMU2039788, THYMU2039989, THYMU2040029, THYMU2040110, THYMU2040114, THYMU2040140, THYMU2040412, THYMU2040427, THYMU2040824, THYMU2040925, THYMU2041007, THYMU2041015, THYMU2041252, THYMU3000028, THYMU3000036, THYMU3000037, THYMU3000082, THYMU3000194, THYMU3000224, THYMU3000269, THYMU3000306, THYMU3000360, THYMU3000390, THYMU3000420, THYMU3000490, THYMU3000504, THYMU3000542, THYMU3000655, THYMU3000776, THYMU3000826, THYMU3000841, THYMU3001077, THYMU3001082, THYMU3001083, THYMU3001133, THYMU3001151, THYMU3001379, THYMU3001472, THYMU3001593, THYMU3001883, THYMU3001939, THYMU3001991, THYMU3002452, THYMU3002578, THYMU3002661, THYMU3003092, THYMU3003212, THYMU3003309, THYMU3003350, THYMU3003403, THYMU3003763, THYMU3003865, THYMU3003958, THYMU3003965, THYMU3004157, THYMU3004628, THYMU3004632, THYMU3004835, THYMU3004866, THYMU3005050, THYMU3005378, THYMU3005407, THYMU3005415, THYMU3005427, THYMU3005482, THYMU3005491, THYMU3005629, THYMU3005696, THYMU3006118, THYMU3006132, THYMU3006168, THYMU3006172, THYMU3006371, THYMU3006485, THYMU3006640, THYMU3006767, THYMU3006811, THYMU3006963, THYMU3007137, THYMU3007308, THYMU3007368, THYMU3007423, THYMU3007559, THYMU3007845, THYMU3008060, THYMU3008105, THYMU3008136, THYMU3008171, THYMU3008216, THYMU3008436, THYMU3008672, THYMU3008883, THYMU3008935, THYMU3009006, THYMU3009255, THYMU3009391, THYMU3009643, THYMU3009755, THYMU3010247, THYMU3011012, THYMU3011081, THYMU3011244, THYMU3011360, THYMU3011534, THYMU3011543, THYMU3011556, THYMU3011717, THYMU3011827, THYMU3012402, THYMU3012907, THYMU3012983, THYMU3013114, THYMU3013197, THYMU3013241, THYMU3013470, THYMU3013785, THYMU3013897, THYMU3014038, THYMU3014173, THYMU3014372, THYMU3014555, THYMU3014620, THYMU3014701, THYMU3015042, THYMU3015457, THYMU3015571, THYMU3015592, THYMU3015625, THYMU3015647, THYMU3015962, THYMU3016022, THYMU3016518, THYMU3016797, THYMU3016822, THYMU3016850, THYMU3017562, THYMU3017688, THYMU3017689, THYMU3017761, THYMU3018151, THYMU3018896, THYMU3019095, THYMU3019476, THYMU3019605, THYMU3019916, THYMU3020221, THYMU3020595, THYMU3020713, THYMU3020856, THYMU3020869, THYMU3020970, THYMU3021404, THYMU3021586, THYMU3021755, THYMU3021900, THYMU3022211, THYMU3022434, THYMU3022528, THYMU3022668, THYMU3022982, THYMU3023107, THYMU3023211, THYMU3023216, THYMU3023394, THYMU3023400, THYMU3023797, THYMU3024164, THYMU3024339, THYMU3024602, THYMU3024879, THYMU3025118, THYMU3025313, THYMU3025642, THYMU3025683, THYMU3025772, THYMU3025865, THYMU3026000, THYMU3026350, THYMU3026479, THYMU3026532, THYMU3026783, THYMU3026869, THYMU3027251, THYMU3027540, THYMU3027655, THYMU3027671, THYMU3028075, THYMU3028410, THYMU3028461, THYMU3028702, THYMU3029188, THYMU3029318, THYMU3029421, THYMU3029719, THYMU3029774, THYMU3029832, THYMU3030072, THYMU3030231, THYMU3030706, THYMU3030710, THYMU3030752, THYMU3031146, THYMU3031402, THYMU3031610, THYMU3031612, THYMU3031868, THYMU3031878, THYMU3032032, THYMU3033402, THYMU3033626, THYMU3033630, THYMU3033649, THYMU3033754, THYMU3033759, THYMU3034078, THYMU3034099, THYMU3034453, THYMU3034616, THYMU3034671, THYMU3034853, THYMU3034867, THYMU3034983, THYMU3036200, THYMU3036310, THYMU3036934, THYMU3036953, THYMU3037052, THYMU3037192, THYMU3037617, THYMU3037772, THYMU3037827, THYMU3037836, THYMU3037856, THYMU3037867, THYMU3037909, THYMU3037980, THYMU3038158, THYMU3038167, THYMU3038214, THYMU3038266, THYMU3038328, THYMU3038347, THYMU3038375, THYMU3038603, THYMU3038687, THYMU3038759, THYMU3038879, THYMU3038970, THYMU3039807, THYMU3039846, THYMU3040126, THYMU3040146, THYMU3040168, THYMU3040172, THYMU3040725, THYMU3040746, THYMU3040829, THYMU3040830, THYMU3040986, THYMU3041354, THYMU3041386, THYMU3041573, THYMU3041603, THYMU3041736, THYMU3041918, THYMU3042075, THYMU3042321, THYMU3042372, THYMU3042758, THYMU3042929, THYMU3043200, THYMU3043327, THYMU3043482, THYMU3043597, THYMU3043688, THYMU3043779, THYMU3043883, THYMU3043993, THYMU3044175, THYMU3044188, THYMU3044441, THYMU3044445, THYMU3045673, THYMU3045692, THYMU3045704, THYMU3046140, THYMU3046350, THYMU3046360, THYMU3046856, THYMU3047144, THYMU3047156, THYMU3047366, THYMU3047513, THYMU3047542, THYMU3047760, THYMU3047891, TKIDN1000001, TKIDN1000044, TKIDN1000062, TKIDN1000066, TKIDN1000164, TKIDN1000171, TKIDN1000192, TKIDN2000127, TKIDN2000240, TKIDN2000246, TKIDN2000319, TKIDN2000521, TKIDN2000701, TKIDN2001529, TKIDN2001662, TKIDN2002318, TKIDN2002329, TKIDN2002424, TKIDN2002632, TKIDN2003044, TKIDN2003059, TKIDN2003062, TKIDN2003078, TKIDN2003366, TKIDN2003396, TKIDN2003413, TKIDN2003597, TKIDN2003601, TKIDN2004185, TKIDN2004386, TKIDN2004458, TKIDN2004748, TKIDN2005721, TKIDN2005934, TKIDN2005947, TKIDN2005956, TKIDN2006525, TKIDN2006761, TKIDN2006852, TKIDN2007667, TKIDN2007828, TKIDN2008176, TKIDN2008778, TKIDN2009092, TKIDN2009330, TKIDN2009481, TKIDN2009641, TKIDN2009794, TKIDN2009889, TKIDN2010200, TKIDN2010232, TKIDN2010278, TKIDN2010602, TKIDN2010812, TKIDN2010934, TKIDN2011051, TKIDN2011160, TKIDN2011324, TKIDN2012034, TKIDN2012771, TKIDN2012824, TKIDN2013134, TKIDN2013287, TKIDN2014570, TKIDN2014757, TKIDN2014771, TKIDN2014964, TKIDN2015025, TKIDN2015071, TKIDN2015161, TKIDN2015263, TKIDN2015285, TKIDN2015423, TKIDN2015788, TKIDN2016309, TKIDN2016399, TKIDN2016846, TKIDN2018926, TKIDN2019116, TLIVE2000023, TLIVE2000142, TLIVE2000292, TLIVE2000762, TLIVE2000979, TLIVE2001327, TLIVE2001616, TLIVE2001684, TLIVE2001828, TLIVE2001927, TLIVE2002046, TLIVE2002336, TLIVE2002338, TLIVE2002562, TLIVE2002882, TLIVE2003197, TLIVE2003200, TLIVE2003225, TLIVE2003381, TLIVE2003737, TLIVE2003961, TLIVE2004110, TLIVE2004320, TLIVE2004331, TLIVE2004601, TLIVE2005180, TLIVE2005390, TLIVE2005516, TLIVE2005731, TLIVE2005866, TLIVE2006236, TLIVE2006359, TLIVE2006529, TLIVE2006621, TLIVE2006733, TLIVE2007000, TLIVE2007016, TLIVE2007132, TLIVE2007192, TLIVE2007528, TLIVE2007607, TLIVE2007736, TLIVE2007816, TLIVE2007919, TLIVE2008083, TLIVE2008213, TLIVE2008221, TLIVE2008229, TLIVE2008712, TLIVE2008797, TLIVE2009087, TLIVE2009163, TLIVE2009489, TLIVE2009541, TLUNG2000179, TOVAR2000476, TOVAR2000575, TOVAR2000649, TOVAR2000904, TOVAR2001281, TOVAR2001556, TOVAR2001730, TOVAR2002247, TOVAR2002514, TOVAR2002549, TOVAR2002800, TRACH1000018, TRACH1000057, TRACH1000074, TRACH1000100, TRACH1000125, TRACH1000140, TRACH1000144, TRACH1000181, TRACH1000193, TRACH1000205, TRACH1000212, TRACH1000240, TRACH2000002, TRACH2000015, TRACH2000024, TRACH2000032, TRACH2000079, TRACH2000081, TRACH2000083, TRACH2000148, TRACH2000185, TRACH2000196, TRACH2000235, TRACH2000250, TRACH2000259, TRACH2000272, TRACH2000287, TRACH2000289, TRACH2000306, TRACH2000312, TRACH2000336, TRACH2000393, TRACH2000411, TRACH2000420, TRACH2000461, TRACH2000496, TRACH2000497, TRACH2000502, TRACH2000522, TRACH2000559, TRACH2000660, TRACH2000665, TRACH2000675, TRACH2000677, TRACH2000703, TRACH2000767, TRACH2000775, TRACH2000780, TRACH2000807, TRACH2000862, TRACH2000873, TRACH2000894, TRACH2000898, TRACH2000923, TRACH2000926, TRACH2000944, TRACH2000959, TRACH2000981, TRACH2000986, TRACH2001037, TRACH2001060, TRACH2001085, TRACH2001101, TRACH2001109, TRACH2001121, TRACH2001147, TRACH2001154, TRACH2001188, TRACH2001192, TRACH2001249, TRACH2001275, TRACH2001314, TRACH2001335, TRACH2001339, TRACH2001341, TRACH2001347, TRACH2001395, TRACH2001400, TRACH2001403, TRACH2001416, TRACH2001443, TRACH2001474, TRACH2001478, TRACH2001525, TRACH2001532, TRACH2001592, TRACH2001612, TRACH2001621, TRACH2001646, TRACH2001651, TRACH2001684, TRACH2001810, TRACH2001898, TRACH2001933, TRACH2001968, TRACH2001996, TRACH2002054, TRACH2002092, TRACH2002100, TRACH2002333, TRACH2002784, TRACH2002840, TRACH2002853, TRACH2002862, TRACH2002954, TRACH2002960, TRACH2002988, TRACH2003070, TRACH2003272, TRACH2003484, TRACH2003516, TRACH2003605, TRACH2003736, TRACH2003759, TRACH2003941, TRACH2004039, TRACH2004054, TRACH2004087, TRACH2004170, TRACH2004183, TRACH2004251, TRACH2004292, TRACH2004336, TRACH2004399, TRACH2004428, TRACH2004458, TRACH2004499, TRACH2004521, TRACH2004570, TRACH2004845, TRACH2004887, TRACH2004950, TRACH2005004, TRACH2005017, TRACH2005066, TRACH2005159, TRACH2005314, TRACH2005444, TRACH2005541, TRACH2005666, TRACH2005698, TRACH2005710, TRACH2005720, TRACH2005769, TRACH2005796, TRACH2005800, TRACH2006015, TRACH2006049, TRACH2006097, TRACH2006194, TRACH2006327, TRACH2006331, TRACH2006378, TRACH2006387, TRACH2006528, TRACH2006670, TRACH2006762, TRACH2006870, TRACH2006918, TRACH2007059, TRACH2007324, TRACH2007358, TRACH2007483, TRACH2007542, TRACH2007577, TRACH2007674, TRACH2007676, TRACH2007688, TRACH2007733, TRACH2007754, TRACH2007894, TRACH2007969, TRACH2007988, TRACH2008081, TRACH2008112, TRACH2008113, TRACH2008127, TRACH2008130, TRACH2008278, TRACH2008300, TRACH2008583, TRACH2008597, TRACH2008820, TRACH2008891, TRACH2008921, TRACH2009060, TRACH2009107, TRACH2009123, TRACH2009268, TRACH2009291, TRACH2009310, TRACH2009340, TRACH2009348, TRACH2009358, TRACH2009661, TRACH2009730, TRACH2009743, TRACH2009754, TRACH2009851, TRACH2009862, TRACH2009934, TRACH2010159, TRACH2010218, TRACH2010251, TRACH2010272, TRACH2010317, TRACH2010419, TRACH2010451, TRACH2010505, TRACH2010587, TRACH2010600, TRACH2010634, TRACH2010639, TRACH2010677, TRACH2010698, TRACH2010771, TRACH2010824, TRACH2010883, TRACH2010965, TRACH2010974, TRACH2011057, TRACH2011093, TRACH2011290, TRACH2011293, TRACH2011302, TRACH2011574, TRACH2011894, TRACH2011956, TRACH2012000, TRACH2012138, TRACH2012242, TRACH2012370, TRACH2012387, TRACH2012536, TRACH2012562, TRACH2012742, TRACH2012811, TRACH2012823, TRACH2012918, TRACH2013081, TRACH2013123, TRACH2013265, TRACH2013369, TRACH2013450, TRACH2013552, TRACH2013585, TRACH2013671, TRACH2013726, TRACH2013902, TRACH2013928, TRACH2013982, TRACH2013991, TRACH2014018, TRACH2014045, TRACH2014046, TRACH2014082, TRACH2014268, TRACH2014284, TRACH2014337, TRACH2014356, TRACH2014371, TRACH2014442, TRACH2014483, TRACH2014495, TRACH2014544, TRACH2014573, TRACH2014725, TRACH2014760, TRACH2014815, TRACH2014839, TRACH2014938, TRACH2014950, TRACH2014972, TRACH2014974, TRACH2014997, TRACH2015180, TRACH2015243, TRACH2015316, TRACH2015381, TRACH2015486, TRACH2015654, TRACH2015824, TRACH2015939, TRACH2015987, TRACH2016080, TRACH2016131, TRACH2016286, TRACH2016317, TRACH2016347, TRACH2016380, TRACH2016384, TRACH2016410, TRACH2016481, TRACH2016498, TRACH2016551, TRACH2016554, TRACH2016651, TRACH2016690, TRACH2016709, TRACH2016722, TRACH2016835, TRACH2016980, TRACH2017086, TRACH2017368, TRACH2017498, TRACH2017609, TRACH2017949, TRACH2017965, TRACH2017980, TRACH2018034, TRACH2018084, TRACH2018262, TRACH2018273, TRACH2018278, TRACH2018345, TRACH2018380, TRACH2018446, TRACH2018449, TRACH2018512, TRACH2018646, TRACH2018663, TRACH2018718, TRACH2018835, TRACH2018882, TRACH2018914, TRACH2019024, TRACH2019046, TRACH2019080, TRACH2019151, TRACH2019154, TRACH2019176, TRACH2019248, TRACH2019309, TRACH2019473, TRACH2019602, TRACH2019661, TRACH2019672, TRACH2019673, TRACH2019844, TRACH2019879, TRACH2020048, TRACH2020336, TRACH2020525, TRACH2021398, TRACH2021622, TRACH2021635, TRACH2021964, TRACH2022042, TRACH2022113, TRACH2022253, TRACH2022425, TRACH2022553, TRACH2022649, TRACH2022839, TRACH2023246, TRACH2023299, TRACH2023306, TRACH2023416, TRACH2023479, TRACH2023684, TRACH2023860, TRACH2023876, TRACH2024139, TRACH2024187, TRACH2024271, TRACH2024408, TRACH2024512, TRACH2024559, TRACH2024647, TRACH2024651, TRACH2024730, TRACH2024735, TRACH2024749, TRACH2024821, TRACH2025057, TRACH2025084, TRACH2025155, TRACH2025224, TRACH2025344, TRACH2025379, TRACH2025507, TRACH2025535, TRACH2025569, TRACH2025705, TRACH2025749, TRACH2025753, TRACH2025810, TRACH2025853, TRACH2025911, TRACH2025932, TRACH3000014, TRACH3000017, TRACH3000043, TRACH3000134, TRACH3000180, TRACH3000342, TRACH3000420, TRACH3000515, TRACH3000530, TRACH3000548, TRACH3000558, TRACH3000586, TRACH3000692, TRACH3000780, TRACH3000892, TRACH3000926, TRACH3001119, TRACH3001443, TRACH3001550, TRACH3001759, TRACH3002064, TRACH3002107, TRACH3002168, TRACH3002188, TRACH3002245, TRACH3002293, TRACH3002533, TRACH3002561, TRACH3002567, TRACH3002605, TRACH3002650, TRACH3002752, TRACH3002866, TRACH3002871, TRACH3002876, TRACH3002890, TRACH3003009, TRACH3003037, TRACH3003357, TRACH3003379, TRACH3003586, TRACH3003683, TRACH3003780, TRACH3003805, TRACH3003832, TRACH3003872, TRACH3004068, TRACH3004113, TRACH3004288, TRACH3004303, TRACH3004412, TRACH3004424, TRACH3004456, TRACH3004537, TRACH3004596, TRACH3004651, TRACH3004652, TRACH3004671, TRACH3004721, TRACH3004747, TRACH3004760, TRACH3004783, TRACH3004786, TRACH3004840, TRACH3004931, TRACH3004934, TRACH3005072, TRACH3005085, TRACH3005102, TRACH3005173, TRACH3005191, TRACH3005211, TRACH3005274, TRACH3005479, TRACH3005549, TRACH3005699, TRACH3005702, TRACH3005808, TRACH3005852, TRACH3005896, TRACH3006038, TRACH3006149, TRACH3006228, TRACH3006264, TRACH3006336, TRACH3006379, TRACH3006392, TRACH3006395, TRACH3006397, TRACH3006412, TRACH3006470, TRACH3006589, TRACH3006626, TRACH3006699, TRACH3006800, TRACH3006889, TRACH3006985, TRACH3007097, TRACH3007268, TRACH3007274, TRACH3007277, TRACH3007391, TRACH3007479, TRACH3007541, TRACH3007595, TRACH3007625, TRACH3007627, TRACH3007689, TRACH3007766, TRACH3007866, TRACH3007995, TRACH3008042, TRACH3008061, TRACH3008201, TRACH3008508, TRACH3008535, TRACH3008629, TRACH3008632, TRACH3008688, TRACH3008697, TRACH3008713, TRACH3008887, TRACH3008902, TRACH3008990, TRACH3009001, TRACH3009059, TRACH3009061, TRACH3009148, TRACH3009455, TRACH3009701, TRACH3009715, TRACH3009894, TRACH3009956, TRACH3010079, TRACH3010167, TRACH3010331, TRACH3010342, TRACH3010382, TRACH3010757, TRACH3010901, TRACH3011004, TRACH3011082, TRACH3011184, TRACH3011282, TRACH3011313, TRACH3011454, TRACH3011485, TRACH3011503, TRACH3011538, TRACH3011542, TRACH3012106, TRACH3012161, TRACH3012232, TRACH3012261, TRACH3012445, TRACH3012460, TRACH3012659, TRACH3012718, TRACH3012864, TRACH3012891, TRACH3012942, TRACH3013043, TRACH3013072, TRACH3013426, TRACH3013454, TRACH3013558, TRACH3013684, TRACH3013693, TRACH3013700, TRACH3013766, TRACH3013900, TRACH3013926, TRACH3014063, TRACH3014183, TRACH3014215, TRACH3014316, TRACH3014415, TRACH3014580, TRACH3014641, TRACH3014885, TRACH3015136, TRACH3015336, TRACH3015346, TRACH3015354, TRACH3015467, TRACH3015626, TRACH3015951, TRACH3016051, TRACH3016120, TRACH3016264, TRACH3016277, TRACH3016368, TRACH3016455, TRACH3016614, TRACH3016805, TRACH3016992, TRACH3017171, TRACH3017409, TRACH3017934, TRACH3018108, TRACH3018191, TRACH3018240, TRACH3018261, TRACH3018519, TRACH3018524, TRACH3018606, TRACH3018783, TRACH3018907, TRACH3018933, TRACH3018943, TRACH3019018, TRACH3019058, TRACH3019142, TRACH3019290, TRACH3019347, TRACH3019370, TRACH3019447, TRACH3019598, TRACH3019621, TRACH3019662, TRACH3019807, TRACH3019924, TRACH3019977, TRACH3020137, TRACH3020410, TRACH3020563, TRACH3020605, TRACH3020750, TRACH3020769, TRACH3020928, TRACH3020930, TRACH3021023, TRACH3021066, TRACH3021212, TRACH3021335, TRACH3021373, TRACH3021544, TRACH3021778, TRACH3021834, TRACH3021883, TRACH3022170, TRACH3022198, TRACH3022296, TRACH3022482, TRACH3022732, TRACH3022758, TRACH3022875, TRACH3022910, TRACH3022960, TRACH3023063, TRACH3023203, TRACH3023242, TRACH3023373, TRACH3023516, TRACH3023752, TRACH3023945, TRACH3023960, TRACH3024020, TRACH3024081, TRACH3024342, TRACH3024423, TRACH3024428, TRACH3024512, TRACH3024671, TRACH3024823, TRACH3025302, TRACH3025316, TRACH3025346, TRACH3025520, TRACH3026148, TRACH3026283, TRACH3026299, TRACH3026303, TRACH3026542, TRACH3026650, TRACH3026676, TRACH3026744, TRACH3026949, TRACH3027229, TRACH3027527, TRACH3027681, TRACH3027701, TRACH3027885, TRACH3028031, TRACH3028164, TRACH3028180, TRACH3028195, TRACH3028441, TRACH3028597, TRACH3028678, TRACH3028837, TRACH3028847, TRACH3028855, TRACH3029139, TRACH3029329, TRACH3029451, TRACH3029462, TRACH3029520, TRACH3029592, TRACH3029629, TRACH3029665, TRACH3029670, TRACH3029800, TRACH3030111, TRACH3030130, TRACH3030176, TRACH3030252, TRACH3030725, TRACH3030855, TRACH3030883, TRACH3031316, TRACH3031400, TRACH3031463, TRACH3031479, TRACH3031518, TRACH3031660, TRACH3031678, TRACH3031936, TRACH3032044, TRACH3032065, TRACH3032150, TRACH3032372, TRACH3032480, TRACH3032570, TRACH3032755, TRACH3032827, TRACH3032873, TRACH3033535, TRACH3033680, TRACH3033868, TRACH3034145, TRACH3034414, TRACH3034488, TRACH3034680, TRACH3034731, TRACH3034745, TRACH3034762, TRACH3034903, TRACH3035187, TRACH3035199, TRACH3035235, TRACH3035451, TRACH3035482, TRACH3035526, TRACH3036004, TRACH3036103, TRACH3036193, TRACH3036207, TRACH3036278, TRACH3036309, TRACH3036456, TRACH3036609, TRACH3036638, TRACH3036683, TRACH3036750, TRACH3036792, TRACH3036843, TRACH3036897, TRACH3036932, TRACH3036942, TRACH3036997, TRACH3037063, TRACH3037267, TRACH3037288, TRACH3037505, TRACH3037573, TRACH3037696, TRACH3037897, TRACH3038086, TRACH3038399, TSTOM1000135, TSTOM1000186, TSTOM2000139, TSTOM2000235, TSTOM2000442, TSTOM2000553, TSTOM2000569, TSTOM2000588, TSTOM2001195, TSTOM2001274, TSTOM2001571, TSTOM2001996, TSTOM2002265, TSTOM2002505, TSTOM2002561, TSTOM2002611, TSTOM2002672, TSTOM2002682, TUTER1000014, TUTER1000122, TUTER1000137, TUTER2000057, TUTER2000283, TUTER2000425, TUTER2000904, TUTER2000916, TUTER2001286, TUTER2001341, TUTER2001387, TUTER2001433, TUTER2001461, TUTER2002028, TUTER2002074, TUTER2002158, TUTER2002228, TUTER2002323, TUTER2002356, TUTER2002729, UMVEN1000122, UMVEN1000143, UMVEN1000156, UMVEN1000186, UMVEN2000046, UMVEN2000069, UMVEN2000121, UMVEN2000152, UMVEN2000354, UTERU1000008, UTERU1000015, UTERU1000024, UTERU1000031, UTERU1000032, UTERU1000057, UTERU1000065, UTERU1000077, UTERU1000093, UTERU1000096, UTERU1000106, UTERU1000109, UTERU1000131, UTERU1000138, UTERU1000148, UTERU1000160, UTERU1000182, UTERU1000183, UTERU1000187, UTERU1000192, UTERU1000249, UTERU1000337, UTERU1000339, UTERU1000384, UTERU2000023, UTERU2000047, UTERU2000074, UTERU2000099, UTERU2000154, UTERU2000197, UTERU2000218, UTERU2000238, UTERU2000243, UTERU2000260, UTERU2000263, UTERU2000300, UTERU2000329, UTERU2000349, UTERU2000377, UTERU2000393, UTERU2000418, UTERU2000465, UTERU2000485, UTERU2000517, UTERU2000524, UTERU2000539, UTERU2000542, UTERU2000546, UTERU2000550, UTERU2000569, UTERU2000607, UTERU2000629, UTERU2000649, UTERU2000663, UTERU2000696, UTERU2000794, UTERU2000830, UTERU2000844, UTERU2000922, UTERU2000925, UTERU2001024, UTERU2001110, UTERU2001176, UTERU2001281, UTERU2001389, UTERU2001409, UTERU2001412, UTERU2001504, UTERU2001607, UTERU2001658, UTERU2001747, UTERU2001876, UTERU2002001, UTERU2002011, UTERU2002176, UTERU2002198, UTERU2002332, UTERU2002473, UTERU2002547, UTERU2002662, UTERU2002693, UTERU2002733, UTERU2002736, UTERU2002737, UTERU2002826, UTERU2002841, UTERU2002964, UTERU2002993, UTERU2003035, UTERU2003126, UTERU2003135, UTERU2003321, UTERU2003399, UTERU2003411, UTERU2003577, UTERU2003704, UTERU2003926, UTERU2003973, UTERU2004015, UTERU2004037, UTERU2004039, UTERU2004061, UTERU2004073, UTERU2004163, UTERU2004299, UTERU2004461, UTERU2004520, UTERU2004564, UTERU2004688, UTERU2004698, UTERU2004861, UTERU2004929, UTERU2005004, UTERU2005050, UTERU2005069, UTERU2005074, UTERU2005179, UTERU2005346, UTERU2005446, UTERU2005449, UTERU2005450, UTERU2005533, UTERU2005601, UTERU2005664, UTERU2005822, UTERU2005903, UTERU2005905, UTERU2006103, UTERU2006137, UTERU2006182, UTERU2006400, UTERU2006412, UTERU2006429, UTERU2006486, UTERU2006524, UTERU2006547, UTERU2006568, UTERU2006643, UTERU2006651, UTERU2006705, UTERU2006899, UTERU2007004, UTERU2007075, UTERU2007081, UTERU2007128, UTERU2007253, UTERU2007267, UTERU2007444, UTERU2007499, UTERU2007639, UTERU2007724, UTERU2007924, UTERU2007942, UTERU2008018, UTERU2008019, UTERU2008027, UTERU2008040, UTERU2008077, UTERU2008130, UTERU2008347, UTERU2008426, UTERU2008516, UTERU2008561, UTERU2008653, UTERU2008705, UTERU2008707, UTERU2008747, UTERU2008785, UTERU2008845, UTERU2008901, UTERU2008930, UTERU2008938, UTERU2008962, UTERU2009094, UTERU2009120, UTERU2009131, UTERU2009147, UTERU2009206, UTERU2009283, UTERU2009335, UTERU2009414, UTERU2009435, UTERU2009483, UTERU2009510, UTERU2009540, UTERU2009776, UTERU2009904, UTERU2009951, UTERU2009972, UTERU2010115, UTERU2010124, UTERU2010164, UTERU2010231, UTERU2010304, UTERU2010320, UTERU2010431, UTERU2010525, UTERU2010651, UTERU2010724, UTERU2010747, UTERU2011195, UTERU2011199, UTERU2011220, UTERU2011261, UTERU2011287, UTERU2011410, UTERU2011574, UTERU2011621, UTERU2011657, UTERU2011741, UTERU2011806, UTERU2011811, UTERU2011897, UTERU2011906, UTERU2011962, UTERU2011968, UTERU2012031, UTERU2012101, UTERU2012114, UTERU2012230, UTERU2012252, UTERU2012286, UTERU2012333, UTERU2012407, UTERU2012526, UTERU2012581, UTERU2012610, UTERU2012615, UTERU2012688, UTERU2012703, UTERU2012715, UTERU2012767, UTERU2012786, UTERU2012890, UTERU2012938, UTERU2012976, UTERU2013048, UTERU2013078, UTERU2013231, UTERU2013262, UTERU2013280, UTERU2013322, UTERU2013483, UTERU2013491, UTERU2013502, UTERU2013586, UTERU2013926, UTERU2013976, UTERU2014001, UTERU2014024, UTERU2014167, UTERU2014223, UTERU2014398, UTERU2014464, UTERU2014548, UTERU2014601, UTERU2014631, UTERU2014668, UTERU2014678, UTERU2014728, UTERU2014998, UTERU2015062, UTERU2015087, UTERU2015108, UTERU2015198, UTERU2015202, UTERU2015405, UTERU2015640, UTERU2015653, UTERU2015830, UTERU2015880, UTERU2016147, UTERU2016157, UTERU2016426, UTERU2016464, UTERU2016669, UTERU2016757, UTERU2016761, UTERU2016799, UTERU2016896, UTERU2016902, UTERU2016981, UTERU2017123, UTERU2017303, UTERU2017421, UTERU2017492, UTERU2017613, UTERU2017623, UTERU2017632, UTERU2017761, UTERU2017762, UTERU2017810, UTERU2017988, UTERU2018127, UTERU2018180, UTERU2018200, UTERU2018333, UTERU2018364, UTERU2018514, UTERU2018522, UTERU2018523, UTERU2018544, UTERU2018566, UTERU2018609, UTERU2018674, UTERU2018712, UTERU2018784, UTERU2018789, UTERU2018811, UTERU2018867, UTERU2018881, UTERU2018884, UTERU2018955, UTERU2019005, UTERU2019038, UTERU2019096, UTERU2019163, UTERU2019257, UTERU2019453, UTERU2019491, UTERU2019534, UTERU2019681, UTERU2019706, UTERU2019710, UTERU2019940, UTERU2019959, UTERU2019964, UTERU2020226, UTERU2020242, UTERU2020292, UTERU2020351, UTERU2020491, UTERU2020718, UTERU2021163, UTERU2021380, UTERU2021649, UTERU2021820, UTERU2022020, UTERU2022773, UTERU2022955, UTERU2022981, UTERU2023039, UTERU2023175, UTERU2023262, UTERU2023651, UTERU2023687, UTERU2023712, UTERU2023941, UTERU2024002, UTERU2024042, UTERU2024141, UTERU2024481, UTERU2024656, UTERU2024758, UTERU2024820, UTERU2024881, UTERU2024969, UTERU2025025, UTERU2025041, UTERU2025301, UTERU2025366, UTERU2025415, UTERU2025579, UTERU2025645, UTERU2025891, UTERU2026025, UTERU2026090, UTERU2026142, UTERU2026203, UTERU2026775, UTERU2027023, UTERU2027369, UTERU2027591, UTERU2027616, UTERU2027941, UTERU2028377, UTERU2028734, UTERU2029503, UTERU2029660, UTERU2029742, UTERU2029953, UTERU2030213, UTERU2030270, UTERU2030280, UTERU2031060, UTERU2031268, UTERU2031295, UTERU2031521, UTERU2031611, UTERU2031703, UTERU2031834, UTERU2031851, UTERU2032075, UTERU2032220, UTERU2032279, UTERU2032726, UTERU2033172, UTERU2033375, UTERU2033382, UTERU2033420, UTERU2033530, UTERU2033577, UTERU2034053, UTERU2034147, UTERU2034695, UTERU2035114, UTERU2035187, UTERU2035231, UTERU2035306, UTERU2035323, UTERU2035328, UTERU2035331, UTERU2035452, UTERU2035469, UTERU2035503, UTERU2035745, UTERU2035908, UTERU2035926, UTERU2035978, UTERU2036089, UTERU2036347, UTERU2036507, UTERU2036512, UTERU2036530, UTERU2036623, UTERU2036690, UTERU2037224, UTERU2037361, UTERU2037423, UTERU2037577, UTERU2037674, UTERU2037791, UTERU2037843, UTERU2038171, UTERU2038251, UTERU3000226, UTERU3000298, UTERU3000402, UTERU3000645, UTERU3000665, UTERU3000670, UTERU3000727, UTERU3000738, UTERU3000828, UTERU3000844, UTERU3000899, UTERU3000959, UTERU3001029, UTERU3001053, UTERU3001059, UTERU3001158, UTERU3001240, UTERU3001394, UTERU3001542, UTERU3001558, UTERU3001571, UTERU3001585, UTERU3001632, UTERU3001652, UTERU3001766, UTERU3001988, UTERU3002209, UTERU3002218, UTERU3002383, UTERU3002600, UTERU3002620, UTERU3002667, UTERU3002701, UTERU3002731, UTERU3002768, UTERU3002786, UTERU3002993, UTERU3003116, UTERU3003135, UTERU3003178, UTERU3003465, UTERU3003495, UTERU3003523, UTERU3003660, UTERU3003774, UTERU3003776, UTERU3004384, UTERU3004418, UTERU3004477, UTERU3004523, UTERU3004616, UTERU3004635, UTERU3004709, UTERU3004938, UTERU3004992, UTERU3005049, UTERU3005159, UTERU3005205, UTERU3005230, UTERU3005264, UTERU3005422, UTERU3005460, UTERU3005536, UTERU3005585, UTERU3005907, UTERU3005970, UTERU3006008, UTERU3006228, UTERU3006308, UTERU3006538, UTERU3006640, UTERU3006687, UTERU3006720, UTERU3006798, UTERU3006884, UTERU3007021, UTERU3007104, UTERU3007108, UTERU3007134, UTERU3007419, UTERU3007640, UTERU3007731, UTERU3007913, UTERU3008280, UTERU3008463, UTERU3008660, UTERU3008671, UTERU3008722, UTERU3008917, UTERU3009259, UTERU3009490, UTERU3009517, UTERU3009690, UTERU3009775, UTERU3009871, UTERU3009979, UTERU3009987, UTERU3010029, UTERU3010409, UTERU3010526, UTERU3010604, UTERU3010892, UTERU3010919, UTERU3011063, UTERU3011092, UTERU3011273, UTERU3011398, UTERU3011558, UTERU3011579, UTERU3011795, UTERU3011837, UTERU3012293, UTERU3012414, UTERU3012476, UTERU3012599, UTERU3012999, UTERU3013167, UTERU3013302, UTERU3013781, UTERU3014274, UTERU3014446, UTERU3014611, UTERU3014647, UTERU3014791, UTERU3014906, UTERU3015086, UTERU3015299, UTERU3015412, UTERU3015500, UTERU3015647, UTERU3015844, UTERU3016070, UTERU3016273, UTERU3016274, UTERU3016308, UTERU3016789, UTERU3017176, UTERU3017441, UTERU3017626, UTERU3017995, UTERU3018154, UTERU3018172, UTERU3018255, UTERU3018616, UTERU3018711, UTERU3019078

[0705] Of the 17,176 genes that include the cDNAs of the present invention, genes whose expression levels were high enough to detect in each of the SYNOV, T1ESE, TBAES, TCERX, TCOLN, TESOP, and TESTI libraries were analyzed for expression frequency. The analysis results are described below. Each is a relative value, where the expression level over all tissues is taken as 100. The larger this value, the greater the level of expression.

TABLE 38

| Clone Name | SYNOV | T1ESE | TBAES | TCERX | TCOLN | TESOP | TESTI |
|---|---|---|---|---|---|---|---|
| 3NB691000116 | 0 | 0 | 0 | 0 | 34.479 | 0 | 0 |
| 3NB691000173 | 0 | 0 | 5.555 | 0 | 0 | 0 | 2.065 |
| 3NB692000281 | 0 | 4.889 | 0 | 4.646 | 0 | 6.024 | 0 |
| 3NB692000330 | 0.951 | 0 | 0 | 0 | 0 | 0 | 1.153 |
| 3NB692000374 | 0 | 0 | 0 | 0 | 0 | 0 | 0.709 |
| 3NB692000529 | 0 | 0 | 0 | 0 | 0 | 0 | 7.289 |
| 3NB692000545 | 0 | 0 | 0 | 0 | 0 | 0 | 1.844 |
| 3NB692000912 | 1.013 | 0 | 0 | 0 | 0 | 0 | 0 |
| 3NB692001334 | 0 | 0 | 3.777 | 0 | 0 | 0 | 0 |
| 3NB692001366 | 0 | 0 | 0 | 0 | 0 | 0 | 8.225 |
| 3NB692001442 | 0 | 26.830 | 0 | 0 | 0 | 0 | 0.790 |
| 3NB692001496 | 0 | 0 | 0 | 0 | 0 | 0 | 5.032 |
| 3NB692001511 | 0 | 0 | 0 | 0 | 0 | 0 | 5.628 |
| 3NB692001557 | 0 | 0 | 0 | 0 | 0 | 0 | 3.965 |
| 3NB692008178 | 0 | 0 | 0 | 0 | 0 | 0 | 8.225 |
| ADRGL1000018 | 0 | 0 | 0 | 0 | 0 | 0 | 3.161 |
| ADRGL1000065 | 0 | 0 | 0 | 0 | 0 | 0 | 7.373 |
| ADRGL2000006 | 0 | 0 | 0 | 0 | 0 | 0 | 2.039 |
| ADRGL2000042 | 0 | 0 | 0 | 0 | 0 | 0 | 4.980 |
| ADRGL2000097 | 0 | 0 | 15.639 | 0 | 0 | 0 | 0 |
| ADRGL2000117 | 0 | 0 | 0 | 0 | 0 | 0 | 5.579 |
| ADRGL2000328 | 0 | 0 | 0 | 0 | 0 | 0 | 4.401 |
| ADRGL2009273 | 2.996 | 0 | 0 | 0 | 0 | 0 | 1.816 |
| ASTRO2000014 | 0 | 9.121 | 0 | 0 | 0 | 0 | 0 |
| ASTRO2000046 | 0.880 | 0 | 0 | 0 | 0 | 0 | 0.533 |
| ASTRO2000141 | 0 | 0 | 0 | 0 | 32.199 | 0 | 0.993 |
| ASTRO2001029 | 2.705 | 0 | 0 | 0 | 26.586 | 0 | 0 |
| ASTRO2001076 | 3.066 | 0 | 0 | 0 | 0 | 0 | 0 |
| ASTRO2001806 | 0 | 0 | 0 | 0 | 0 | 0 | 5.611 |
| ASTRO2001823 | 0 | 0 | 0 | 0 | 0 | 0 | 1.898 |
| ASTRO2002024 | 0 | 0 | 0 | 0 | 0 | 0 | 8.570 |
| ASTRO2002459 | 0 | 0 | 0 | 0 | 0 | 5.989 | 0 |
| ASTRO2002720 | 0 | 0 | 0 | 0 | 0 | 0 | 15.873 |
| ASTRO2002842 | 0 | 0 | 67.001 | 0 | 0 | 0 | 0 |
| ASTRO2003024 | 0 | 0 | 0 | 0 | 0 | 0 | 1.859 |
| ASTRO2003212 | 0 | 0 | 0 | 0 | 0 | 0 | 9.792 |
| ASTRO2003316 | 0 | 0 | 0 | 0 | 0 | 20.183 | 3.857 |
| ASTRO2003632 | 0 | 0 | 0 | 0 | 8.808 | 0 | 0 |
| ASTRO2003840 | 0 | 0 | 0 | 0 | 0 | 0 | 8.098 |
| ASTRO2004628 | 19.197 | 0 | 0 | 0 | 0 | 0 | 0 |
| ASTRO2005360 | 0 | 0 | 0 | 0 | 0 | 40.816 | 3.900 |
| ASTRO2005687 | 2.404 | 0 | 0 | 0 | 0 | 0 | 0 |
| ASTRO2007047 | 4.507 | 0 | 0 | 0 | 0 | 0 | 0 |
| ASTRO2007948 | 0 | 0 | 0 | 0 | 0 | 17.135 | 0 |
| ASTRO2010819 | 2.903 | 0 | 0 | 0 | 0 | 0 | 7.477 |
| ASTRO2012552 | 0 | 0 | 0 | 0 | 0 | 10.113 | 0 |
| ASTRO2013585 | 0 | 0 | 0 | 0 | 0 | 0 | 1.912 |
| ASTRO2014576 | 0 | 0 | 0 | 0 | 0 | 0 | 7.388 |
| ASTRO2015529 | 0 | 0 | 0 | 0 | 0 | 0 | 7.267 |
| ASTRO2016114 | 0 | 0 | 0 | 0 | 0 | 0 | 9.476 |
| ASTRO2016491 | 2.172 | 0 | 3.542 | 0 | 0 | 3.445 | 1.975 |
| ASTRO2016819 | 0 | 0 | 45.393 | 0 | 0 | 0 | 4.218 |
| ASTRO2018169 | 2.037 | 0 | 0 | 0 | 0 | 0 | 0.617 |
| ASTRO2018540 | 0 | 34.540 | 0 | 0 | 0 | 0 | 0 |
| BGGI11000123 | 1.512 | 0 | 0 | 0 | 0 | 0 | 0.916 |
| BGGI11000193 | 6.438 | 0 | 0 | 0 | 0 | 0 | 0 |
| BGGI12000054 | 0 | 0 | 1.657 | 0 | 0 | 1.611 | 0 |
| BGGI12000616 | 0 | 0 | 0 | 18.869 | 0 | 0 | 0.584 |
| BGGI12000839 | 1.590 | 0 | 0 | 0 | 0 | 0 | 1.446 |
| BGGI12001075 | 0 | 0 | 0 | 0 | 0 | 0 | 2.588 |
| BLADE2002730 | 0 | 0 | 0 | 0 | 0 | 0 | 8.520 |
| BLADE2006830 | 0 | 0 | 0 | 0 | 0 | 0 | 1.099 |
| BNGH41000190 | 0 | 0 | 0 | 0 | 0 | 0 | 1.654 |
| BNGH41000198 | 4.481 | 0 | 0 | 0 | 0 | 0 | 0 |
| BNGH41000235 | 0 | 0 | 0 | 0 | 0 | 0 | 21.303 |
| BNGH42000360 | 0 | 0 | 0 | 0 | 3.335 | 0 | 0.103 |
| BNGH42000739 | 0 | 0 | 0 | 0 | 0 | 0 | 0.407 |
| BNGH42001247 | 0 | 0 | 0 | 0 | 0 | 0 | 3.439 |
| BNGH42001406 | 0 | 0 | 0 | 0 | 0 | 47.011 | 0 |
| BNGH42001576 | 0 | 0 | 0 | 0 | 0 | 0 | 12.758 |
| BNGH42002387 | 0 | 0 | 0 | 0 | 0 | 0 | 6.899 |
| BNGH42004679 | 0 | 0 | 0 | 0 | 0 | 0 | 7.814 |
| BNGH42005968 | 0 | 0 | 0 | 0 | 0 | 0 | 1.501 |
| BNGH42006135 | 1.424 | 0 | 0 | 0 | 13.997 | 0 | 3.884 |
| BNGH42007037 | 0 | 0 | 0 | 0 | 0 | 0 | 4.066 |
| BNGH42007460 | 2.173 | 0 | 0 | 0 | 0 | 0 | 3.952 |
| BNGH42007709 | 0.496 | 0 | 0 | 0 | 0 | 0 | 0.150 |
| BNGH42007798 | 0 | 0 | 0 | 0 | 0 | 0 | 6.420 |
| BNGH42008743 | 3.320 | 34.193 | 0 | 0 | 0 | 0 | 2.013 |
| BNGH42009025 | 0 | 0 | 0 | 0 | 29.557 | 0 | 1.823 |
| BRACE1000073 | 0 | 0 | 0 | 0 | 0 | 0 | 2.756 |
| BRACE1000115 | 0 | 0 | 0 | 3.950 | 0 | 0 | 0.245 |
| BRACE1000131 | 0 | 0 | 7.327 | 0 | 0 | 0 | 1.362 |
| BRACE1000159 | 0 | 0 | 0 | 38.966 | 0 | 0 | 0 |
| BRACE2000077 | 0 | 0 | 0 | 0 | 0 | 0 | 31.530 |
| BRACE2000183 | 0 | 0 | 0 | 96.746 | 0 | 0 | 0 |
| BRACE2000229 | 0 | 0 | 90.835 | 0 | 0 | 0 | 0 |
| BRACE2000347 | 0 | 0 | 18.185 | 0 | 0 | 0 | 3.380 |
| BRACE2000577 | 0 | 0 | 0 | 0 | 0 | 0 | 47.943 |
| BRACE2000885 | 0 | 0 | 0 | 0 | 0 | 0 | 47.943 |
| BRACE2000893 | 0 | 0 | 0 | 0 | 0 | 0 | 2.954 |
| BRACE2000975 | 0 | 0 | 0 | 0 | 0 | 0 | 3.350 |
| BRACE2001107 | 0 | 0 | 0 | 0 | 0 | 0 | 9.621 |
| BRACE2001117 | 0 | 0 | 19.348 | 0 | 0 | 0 | 0 |
| BRACE2001143 | 0 | 0 | 0 | 62.699 | 0 | 0 | 1.942 |
| BRACE2001154 | 0 | 0 | 0 | 0 | 0 | 0 | 6.945 |
| BRACE2001477 | 0 | 0 | 0 | 0 | 0 | 0 | 2.248 |
| BRACE2001497 | 0 | 0 | 0 | 0 | 0 | 12.749 | 0 |
| BRACE2001564 | 0 | 0 | 0 | 0 | 0 | 0 | 31.530 |
| BRACE2001692 | 0 | 0 | 0 | 12.779 | 0 | 0 | 0.396 |
| BRACE2001711 | 0 | 0 | 27.364 | 0 | 0 | 0 | 0 |
| BRACE2001892 | 0 | 0 | 0 | 0 | 0 | 0 | 1.188 |
| BRACE2002050 | 0 | 0 | 0 | 0 | 0 | 0 | 3.791 |
| BRACE2002091 | 0 | 0 | 0 | 0 | 0 | 0 | 6.902 |
| BRACE2002202 | 0 | 0 | 0 | 0 | 0 | 0 | 23.489 |
| BRACE2002356 | 0 | 0 | 0 | 0 | 0 | 0 | 11.877 |
| BRACE2002392 | 0 | 0 | 0 | 0 | 0 | 0 | 1.127 |
| BRACE2002441 | 2.429 | 0 | 0 | 0 | 0 | 0 | 0 |
| BRACE2002649 | 0 | 0 | 0 | 0 | 0 | 0 | 6.921 |
| BRACE2002661 | 0 | 0 | 0 | 0 | 0 | 19.704 | 1.883 |
| BRACE2002677 | 0 | 0 | 0 | 0 | 0 | 0 | 1.262 |
| BRACE2002807 | 0 | 0 | 0 | 0 | 0 | 0 | 21.066 |
| BRACE2002861 | 0 | 0 | 0 | 0 | 55.019 | 0 | 1.696 |
| BRACE2003172 | 2.804 | 0 | 0 | 6.859 | 0 | 0 | 0 |
| BRACE2003527 | 0 | 0 | 0 | 0 | 0 | 0 | 1.685 |
| BRACE2003628 | 0 | 0 | 0 | 0 | 0 | 0 | 4.460 |
| BRACE2003827 | 0 | 0 | 0 | 0 | 0 | 0 | 5.154 |
| BRACE2003846 | 0 | 0 | 0 | 0 | 0 | 4.459 | 0 |
| BRACE2003892 | 4.707 | 0 | 0 | 0 | 0 | 14.932 | 0 |
| BRACE2003904 | 0 | 0 | 18.237 | 0 | 0 | 0 | 0 |
| BRACE2005087 | 0 | 0 | 0 | 0 | 0 | 0 | 3.390 |
| BRACE2005090 | 0 | 0 | 0 | 0 | 0 | 0 | 47.943 |
| BRACE2005151 | 4.532 | 0 | 0 | 0 | 0 | 0 | 0 |
| BRACE2005231 | 0 | 0 | 0 | 0 | 0 | 0 | 2.087 |
| BRACE2005433 | 0 | 0 | 0 | 0 | 0 | 0 | 7.549 |
| BRACE2005434 | 1.487 | 0 | 0 | 0 | 0 | 0 | 2.704 |
| BRACE2006072 | 0 | 0 | 0 | 0 | 0 | 0 | 12.884 |
| BRACE2006105 | 0 | 0 | 0 | 0 | 0 | 0 | 27.736 |
| BRACE2006319 | 0 | 0 | 0 | 0 | 0 | 0 | 11.459 |
| BRACE2006397 | 1.273 | 0 | 0 | 6.229 | 12.516 | 0 | 0 |
| BRACE2006514 | 0 | 0 | 0 | 0 | 0 | 0 | 0.568 |
| BRACE2006547 | 0 | 0 | 0 | 0 | 0 | 0 | 19.561 |
| BRACE2006859 | 0 | 0 | 0 | 0 | 0 | 0 | 6.642 |
| BRACE2006900 | 0 | 0 | 10.859 | 10.859 | 21.818 | 0 | 0.673 |
| BRACE2007064 | 0 | 0 | 0 | 0 | 0 | 11.117 | 0 |
| BRACE2007089 | 0 | 0 | 0 | 0 | 0 | 0 | 0.553 |
| BRACE2007109 | 0 | 0 | 0 | 0 | 0 | 0 | 0.624 |
| BRACE2007191 | 0 | 0 | 4.832 | 0 | 0 | 0 | 0.898 |
| BRACE2007401 | 0 | 0 | 0 | 0 | 38.746 | 0 | 2.389 |
| BRACE2007518 | 4.895 | 0 | 0 | 0 | 0 | 0 | 0 |
| BRACE2007567 | 2.993 | 0 | 0 | 0 | 0 | 0 | 0.907 |
| BRACE2007708 | 0 | 0 | 0 | 0 | 45.054 | 0 | 1.389 |
| BRACE2007801 | 0 | 0 | 0 | 0 | 0 | 0 | 47.943 |
| BRACE2008358 | 0 | 0 | 0 | 0 | 0 | 15.504 | 1.481 |
| BRACE2008385 | 0 | 0 | 0 | 0 | 0 | 0 | 1.365 |
| BRACE2008399 | 0 | 0 | 0 | 0 | 0 | 37.868 | 0 |
| BRACE2008402 | 0 | 0 | 0 | 0 | 0 | 28.691 | 2.741 |
| BRACE2008481 | 6.021 | 0 | 0 | 0 | 0 | 0 | 0 |
| BRACE2008653 | 0 | 0 | 0 | 0 | 0 | 0 | 2.413 |
| BRACE2008706 | 0 | 0 | 0 | 0 | 0 | 0 | 2.148 |
| BRACE2008968 | 0 | 0 | 4.090 | 0 | 0 | 0 | 0.380 |
| BRACE2009037 | 0 | 0 | 0 | 0 | 0 | 0 | 0.764 |
| BRACE2009044 | 0 | 0 | 0 | 0 | 0 | 0 | 13.117 |
| BRACE2009045 | 0 | 0 | 0 | 0 | 0 | 0 | 3.936 |
| BRACE2009291 | 0 | 0 | 0 | 0 | 0 | 0 | 0.865 |
| BRACE2009307 | 0 | 0 | 0 | 0 | 0 | 0 | 29.044 |
| BRACE2009517 | 5.850 | 0 | 0 | 0 | 0 | 0 | 0 |
| BRACE2009558 | 0 | 0 | 0 | 0 | 0 | 0 | 1.880 |
| BRACE2010669 | 0 | 0 | 0 | 0 | 0 | 0 | 4.167 |
| BRACE2012528 | 0 | 0 | 0 | 0 | 0 | 0 | 0.310 |
| BRACE2012814 | 0 | 0 | 0 | 0 | 0 | 0 | 1.002 |
| BRACE2015287 | 0 | 0 | 0 | 0 | 0 | 0 | 1.501 |
| BRACE2016362 | 0 | 0 | 0 | 0 | 0 | 0 | 10.077 |
| BRACE2017397 | 0 | 0 | 0 | 0 | 0 | 0 | 1.542 |
| BRACE2017574 | 0 | 0 | 36.041 | 0 | 0 | 0 | 0 |
| BRACE2018736 | 0 | 0 | 0 | 0 | 0 | 0 | 26.439 |
| BRACE2018847 | 0 | 0 | 0 | 0 | 0 | 0 | 25.504 |
| BRACE2021014 | 0 | 0 | 0 | 0 | 0 | 0 | 11.618 |
| BRACE2021143 | 0 | 0 | 55.669 | 0 | 0 | 0 | 5.173 |
| BRACE2022333 | 0 | 0 | 0 | 0 | 0 | 0 | 5.803 |
| BRACE2022389 | 0 | 0 | 0 | 0 | 0 | 0 | 6.946 |
| BRACE2022638 | 1.608 | 0 | 0 | 0 | 0 | 5.100 | 1.462 |
| BRACE2023718 | 0 | 0 | 0 | 0 | 0 | 0 | 10.491 |
| BRACE2023727 | 0 | 0 | 0 | 0 | 0 | 0 | 12.906 |
| BRACE2024627 | 0 | 0 | 0 | 0 | 0 | 0 | 8.002 |
| BRACE2025437 | 0 | 0 | 0 | 0 | 0 | 0 | 3.991 |
| BRACE2026131 | 0 | 0 | 0 | 0 | 0 | 0 | 47.943 |
| BRACE2030341 | 0 | 0 | 0 | 0 | 0 | 47.323 | 0 |
| BRACE2032477 | 0 | 0 | 0 | 0 | 0 | 38.127 | 0 |
| BRACE2038269 | 0 | 0 | 0 | 0 | 0 | 0 | 47.943 |
| BRACE2039624 | 4.173 | 0 | 0 | 0 | 0 | 0 | 1.265 |
| BRACE2043142 | 0 | 0 | 0 | 0 | 0 | 0 | 47.943 |
| BRACE2043381 | 0 | 0 | 0 | 0 | 0 | 73.638 | 0 |
| BRACE2044105 | 0 | 0 | 0 | 0 | 0 | 0 | 13.155 |
| BRACE3000973 | 0 | 0 | 0 | 0 | 0 | 0 | 35.242 |
| BRACE3004150 | 0 | 0 | 0 | 0 | 0 | 0 | 2.539 |
| BRACE3004205 | 0 | 0 | 0 | 0 | 0 | 0 | 31.530 |
| BRACE3004843 | 0 | 0 | 0 | 0 | 0 | 0 | 20.797 |
| BRACE3005499 | 0 | 0 | 0 | 0 | 0 | 0 | 20.445 |
| BRACE3005938 | 2.375 | 0 | 0 | 0 | 0 | 7.535 | 0.720 |
| BRACE3006553 | 0 | 0 | 0 | 0 | 0 | 0 | 67.311 |
| BRACE3007058 | 0 | 0 | 0 | 0 | 0 | 0 | 47.943 |
| BRACE3009237 | 0 | 0 | 0 | 0 | 0 | 0 | 11.857 |
| BRACE3009416 | 0 | 0 | 0 | 0 | 0 | 0 | 18.656 |
| BRACE3010428 | 0 | 0 | 0 | 0 | 0 | 0 | 0.748 |
| BRACE3010438 | 0 | 39.772 | 0 | 0 | 0 | 0 | 0 |
| BRACE3016884 | 0 | 0 | 90.835 | 0 | 0 | 0 | 0 |
| BRACE3019941 | 0 | 0 | 0 | 0 | 0 | 0 | 15.278 |
| BRACE3021430 | 0 | 0 | 0 | 0 | 0 | 0 | 7.798 |
| BRACE3028895 | 0 | 0 | 0 | 0 | 0 | 0 | 29.749 |
| BRACE3045981 | 0 | 0 | 0 | 0 | 0 | 0 | 17.280 |
| BRALZ2018834 | 0 | 0 | 0 | 0 | 0 | 42.693 | 0 |
| BRAMY2000354 | 0 | 0 | 0 | 0 | 0 | 0 | 0.898 |
| BRAMY2000585 | 0 | 0 | 0 | 0 | 0 | 16.804 | 0 |
| BRAMY2000893 | 0 | 0 | 0 | 0 | 0 | 0 | 0.995 |
| BRAMY2003008 | 0 | 0 | 0 | 0 | 0 | 0 | 17.287 |
| BRAMY2004363 | 4.409 | 0 | 0 | 0 | 0 | 0 | 6.682 |
| BRAMY2005052 | 0 | 0 | 0 | 0 | 0 | 0 | 7.591 |
| BRAMY2005488 | 0 | 0 | 0 | 0 | 0 | 0 | 7.449 |
| BRAMY2006397 | 0 | 0 | 0 | 59.264 | 0 | 0 | 0 |
| BRAMY2007078 | 8.202 | 0 | 0 | 0 | 0 | 0 | 0 |
| BRAMY2007287 | 0 | 0 | 0 | 0 | 0 | 0 | 7.004 |
| BRAMY2008977 | 10.905 | 0 | 0 | 0 | 0 | 0 | 0 |
| BRAMY2009013 | 0 | 0 | 0 | 0 | 0 | 0 | 3.981 |
| BRAMY2009934 | 0 | 0 | 0 | 0 | 0 | 0 | 3.864 |
| BRAMY2011841 | 0 | 0 | 77.624 | 0 | 0 | 0 | 0 |
| BRAMY2012163 | 0 | 0 | 0 | 0 | 0 | 0 | 5.168 |
| BRAMY2012426 | 0 | 0 | 0 | 0 | 0 | 0 | 4.040 |
| BRAMY2012536 | 0 | 0 | 0 | 24.362 | 0 | 0 | 0.377 |
| BRAMY2013756 | 0 | 0 | 0 | 0 | 0 | 0 | 12.344 |
| BRAMY2015833 | 0 | 0 | 0 | 0 | 0 | 0 | 3.013 |
| BRAMY2016325 | 0 | 0 | 26.506 | 0 | 0 | 0 | 0 |
| BRAMY2017864 | 0 | 0 | 0 | 0 | 0 | 0 | 9.032 |
| BRAMY2018635 | 0 | 0 | 0 | 0 | 0 | 0 | 17.756 |
| BRAMY2019468 | 0 | 0 | 0 | 0 | 0 | 0 | 4.966 |
| BRAMY2019554 | 0 | 0 | 0 | 0 | 0 | 5.460 | 1.043 |
| BRAMY2019643 | 0 | 0 | 0 | 0 | 0 | 0 | 39.348 |
| BRAMY2020354 | 0 | 0 | 0 | 0 | 0 | 0 | 39.348 |
| BRAMY2020427 | 0 | 0 | 0 | 0 | 0 | 4.051 | 0.387 |
| BRAMY2020713 | 55.672 | 0 | 0 | 0 | 0 | 0 | 0 |
| BRAMY2021142 | 0 | 0 | 0 | 0 | 0 | 0 | 35.008 |
| BRAMY2023939 | 0 | 0 | 0 | 0 | 0 | 0 | 7.991 |
| BRAMY2024715 | 0 | 0 | 0 | 0 | 0 | 87.164 | 0 |
| BRAMY2026685 | 16.036 | 0 | 0 | 0 | 0 | 16.957 | 0 |
| BRAMY2028740 | 0 | 0 | 0 | 0 | 0 | 0 | 0.609 |
| BRAMY2028796 | 0 | 0 | 0 | 0 | 0 | 0 | 0.972 |
| BRAMY2029988 | 0 | 0 | 0 | 0 | 0 | 0 | 7.700 |
| BRAMY2030098 | 0 | 0 | 0 | 0 | 0 | 0 | 27.569 |
| BRAMY2032087 | 0 | 0 | 0 | 0 | 0 | 0 | 1.583 |
| BRAMY2032317 | 0 | 0 | 0 | 0 | 0 | 0 | 39.348 |
| BRAMY2034187 | 0 | 0 | 87.471 | 0 | 0 | 0 | 0 |
| BRAMY2035869 | 0 | 0 | 0 | 0 | 0 | 0 | 39.348 |
| BRAMY2036459 | 0 | 0 | 0 | 39.773 | 0 | 0 | 0 |
| BRAMY2037823 | 0 | 0 | 0 | 0 | 0 | 0 | 19.391 |
| BRAMY2038904 | 0 | 0 | 0 | 0 | 0 | 0 | 39.348 |
| BRAMY2040095 | 0 | 0 | 2.405 | 0 | 0 | 0 | 0.223 |
| BRAMY2040592 | 7.510 | 0 | 0 | 0 | 0 | 0 | 2.276 |
| BRAMY2047420 | 0 | 0 | 0 | 21.378 | 0 | 0 | 0 |
| BRAMY3002458 | 0 | 0 | 0 | 0 | 0 | 0 | 8.115 |
| BRAMY3003205 | 0 | 0 | 0 | 0 | 0 | 0 | 31.454 |
| BRAMY3004364 | 0 | 0 | 0 | 0 | 0 | 46.478 | 0 |
| BRAMY3004377 | 0 | 0 | 0 | 0 | 0 | 0 | 2.711 |
| BRAMY3008044 | 3.869 | 0 | 0 | 0 | 0 | 0 | 0 |
| BRAMY3009491 | 0 | 0 | 0 | 0 | 0 | 0 | 20.396 |
| BRAMY4000089 | 0 | 0 | 0 | 0 | 0 | 0 | 13.306 |
| BRAWH1000037 | 3.933 | 0 | 0 | 0 | 0 | 0 | 1.192 |
| BRAWH1000040 | 0 | 0 | 4.840 | 0 | 0 | 0 | 0 |
| BRAWH1000083 | 9.772 | 0 | 0 | 0 | 0 | 0 | 2.962 |
| BRAWH1000093 | 1.990 | 0 | 0 | 0 | 0 | 0 | 0 |
| BRAWH2000460 | 1.316 | 0 | 0 | 0 | 0 | 0 | 2.793 |
| BRAWH2000636 | 0 | 0 | 0 | 0 | 0 | 0 | 0.691 |
| BRAWH2000686 | 5.273 | 0 | 0 | 0 | 0 | 0 | 1.598 |
| BRAWH2000697 | 0 | 0 | 7.116 | 0 | 0 | 0 | 0.661 |
| BRAWH2000839 | 0 | 0 | 0 | 0 | 0 | 0 | 0.268 |
| BRAWH2000924 | 0 | 6.374 | 0 | 0 | 0 | 0 | 0 |
| BRAWH2000944 | 0 | 0 | 0 | 0 | 0 | 35.693 | 17.051 |
| BRAWH2001092 | 0.379 | 0 | 1.236 | 0 | 3.726 | 0 | 0.230 |
| BRAWH2001166 | 0 | 0 | 0 | 0 | 0 | 0 | 8.254 |
| BRAWH2001171 | 1.332 | 0 | 0 | 0 | 0 | 0 | 0 |
| BRAWH2001321 | 0 | 0 | 0 | 0 | 0 | 0 | 0.561 |
| BRAWH2001406 | 0 | 0 | 0 | 0 | 0 | 0 | 2.213 |
| BRAWH2001439 | 2.219 | 0 | 0 | 0 | 0 | 0 | 0.673 |
| BRAWH2001461 | 0 | 0 | 0 | 0 | 0 | 0 | 2.324 |
| BRAWH2001940 | 0 | 0 | 0 | 0 | 0 | 0 | 24.447 |
| BRAWH2001973 | 0 | 0 | 0 | 0 | 0 | 0 | 24.447 |
| BRAWH2002601 | 0 | 0 | 0 | 0 | 0 | 0 | 6.502 |
| BRAWH2003025 | 6.540 | 0 | 0 | 0 | 0 | 0 | 0 |
| BRAWH2003818 | 0 | 0 | 21.291 | 0 | 0 | 0 | 0 |
| BRAWH2004095 | 0 | 0 | 0 | 0 | 0 | 0 | 0.773 |
| BRAWH2004136 | 34.318 | 0 | 0 | 0 | 0 | 0 | 0 |
| BRAWH2005068 | 0 | 0 | 0 | 0 | 0 | 0 | 0.263 |
| BRAWH2005661 | 0 | 0 | 0 | 0 | 0 | 10.938 | 0 |
| BRAWH2006044 | 37.947 | 0 | 0 | 0 | 0 | 0 | 0 |
| BRAWH2006395 | 0 | 0 | 87.554 | 0 | 0 | 0 | 0 |
| BRAWH2006405 | 27.990 | 0 | 0 | 0 | 0 | 0 | 0 |
| BRAWH2006450 | 10.830 | 0 | 0 | 0 | 0 | 0 | 0 |
| BRAWH2006493 | 10.970 | 0 | 0 | 0 | 0 | 0 | 0 |
| BRAWH2006996 | 0 | 0 | 23.927 | 0 | 0 | 0 | 0 |
| BRAWH2007605 | 0 | 0 | 0 | 0 | 0 | 0 | 4.022 |
| BRAWH2008219 | 0 | 0 | 0 | 0 | 0 | 0 | 9.419 |
| BRAWH2008366 | 0 | 0 | 0 | 0 | 0 | 87.248 | 0 |
| BRAWH2008706 | 6.202 | 0 | 0 | 0 | 0 | 0 | 0 |
| BRAWH2009238 | 0 | 0 | 0 | 0 | 0 | 0 | 3.408 |
| BRAWH2009307 | 0 | 0 | 14.006 | 0 | 0 | 0 | 0 |
| BRAWH2010364 | 0 | 0 | 0 | 0 | 0 | 0 | 11.264 |
| BRAWH2010980 | 0 | 0 | 49.709 | 0 | 0 | 0 | 0 |
| BRAWH2012077 | 0 | 0 | 0 | 0 | 0 | 0 | 8.190 |
| BRAWH2014053 | 0 | 0 | 0 | 0 | 0 | 0 | 15.180 |
| BRAWH2014188 | 3.088 | 0 | 0 | 0 | 0 | 0 | 0.936 |
| BRAWH2014645 | 0 | 0 | 0 | 0 | 0 | 0 | 0.691 |
| BRAWH2015247 | 0 | 0 | 0 | 0 | 0 | 0 | 6.824 |
| BRAWH2016269 | 0 | 0 | 0 | 0 | 27.951 | 0 | 3.447 |
| BRAWH2016305 | 0 | 95.692 | 0 | 0 | 0 | 0 | 0 |
| BRAWH2016446 | 0 | 0 | 0 | 0 | 0 | 59.524 | 0 |
| BRAWH2017685 | 1.095 | 0 | 0 | 0 | 0 | 0 | 3.317 |
| BRAWH2018526 | 0 | 0 | 2.165 | 0 | 6.525 | 0 | 0.201 |
| BRAWH2018729 | 0 | 0 | 0 | 0 | 0 | 0 | 1.948 |
| BRAWH3001891 | 0 | 0 | 0 | 0 | 0 | 0 | 11.289 |
| BRAWH3002853 | 1.595 | 0 | 5.203 | 0 | 0 | 0 | 0.484 |
| BRAWH3003411 | 0 | 0 | 0 | 0 | 0 | 0 | 15.127 |
| BRAWH3003573 | 0 | 0 | 0 | 0 | 0 | 0 | 26.359 |
| BRAWH3004350 | 0 | 0 | 0 | 0 | 0 | 0 | 10.838 |
| BRAWH3006761 | 0 | 0 | 0 | 0 | 0 | 0 | 13.903 |
| BRAWH3018063 | 0 | 0 | 0 | 0 | 0 | 0 | 5.176 |
| BRAWH3021545 | 0 | 0 | 0 | 0 | 0 | 0 | 11.924 |
| BRAWH3021574 | 0 | 0 | 0 | 0 | 0 | 0 | 6.144 |
| BRAWH3024989 | 0 | 0 | 0 | 0 | 0 | 0 | 4.646 |
| BRAWH3027533 | 0 | 0 | 0 | 0 | 0 | 75.317 | 0 |
| BRAWH3029806 | 0 | 0 | 0 | 0 | 0 | 0 | 11.651 |
| BRCAN1000168 | 0 | 0 | 0 | 0 | 0 | 0 | 0.922 |
| BRCAN2003944 | 0 | 6.255 | 0 | 0 | 5.971 | 1.927 | 0 |
| BRCAN2004653 | 0 | 0 | 0 | 0 | 0 | 0 | 22.174 |
| BRCAN2007409 | 0 | 0 | 0 | 63.318 | 0 | 0 | 0 |
| BRCAN2011946 | 13.639 | 0 | 0 | 0 | 0 | 0 | 4.134 |
| BRCAN2020234 | 0 | 0 | 0 | 0 | 0 | 0 | 16.113 |
| BRCAN2025093 | 0 | 0 | 0 | 0 | 0 | 0 | 28.411 |
| BRCAN2026197 | 3.367 | 0 | 0 | 0 | 0 | 0 | 1.021 |
| BRCAN2027364 | 0 | 0 | 0 | 0 | 0 | 0 | 1.941 |
| BRCAN2028040 | 0 | 0 | 0 | 0 | 0 | 0 | 17.285 |
| BRCOC1000040 | 0 | 0 | 20.746 | 0 | 0 | 0 | 3.856 |
| BRCOC2003125 | 0 | 0 | 39.975 | 0 | 0 | 0 | 0 |
| BRCOC2003187 | 1.696 | 0 | 0 | 0 | 0 | 0 | 0 |
| BRCOC2005903 | 0 | 0 | 0 | 0 | 0 | 60.058 | 0 |
| BRCOC2006189 | 0 | 0 | 0 | 0 | 0 | 0 | 2.170 |
| BRCOC2009937 | 0 | 0 | 0 | 0 | 0 | 0 | 10.502 |
| BRCOC2010123 | 4.726 | 0 | 0 | 0 | 0 | 0 | 0 |
| BRCOC2012172 | 0 | 0 | 0 | 0 | 0 | 0 | 18.387 |
| BRHIP1000104 | 0 | 0 | 0 | 0 | 0 | 0 | 2.136 |
| BRHIP1000174 | 0 | 0 | 0 | 0 | 0 | 0 | 3.314 |
| BRHIP2000163 | 0 | 0 | 0 | 0 | 0 | 0 | 24.447 |
| BRHIP2000534 | 0 | 0 | 2.408 | 0 | 0 | 9.367 | 0.224 |
| BRHIP2000553 | 0 | 0 | 0 | 0 | 0 | 0 | 5.039 |
| BRHIP2001074 | 0 | 0 | 0 | 0 | 0 | 0 | 12.807 |
| BRHIP2003917 | 0 | 0 | 0 | 0 | 0 | 80.343 | 7.676 |
| BRHIP2007305 | 0 | 25.144 | 0 | 0 | 0 | 0 | 1.480 |
| BRHIP2011491 | 0 | 0 | 0 | 0 | 17.524 | 0 | 1.081 |
| BRHIP2011891 | 0 | 0 | 0 | 0 | 0 | 0 | 39.051 |
| BRHIP2013958 | 0 | 0 | 0 | 0 | 0 | 0 | 23.489 |
| BRHIP2014228 | 0 | 0 | 0 | 0 | 0 | 0 | 9.622 |
| BRHIP2015153 | 0 | 0 | 0 | 0 | 0 | 0 | 6.549 |
| BRHIP2015679 | 0 | 0 | 17.647 | 0 | 0 | 0 | 3.280 |
| BRHIP2017010 | 0 | 0 | 0 | 0 | 0 | 0 | 8.986 |
| BRHIP2018635 | 0 | 0 | 0 | 0 | 0 | 0 | 39.051 |
| BRHIP2018712 | 0 | 0 | 0 | 0 | 0 | 13.856 | 1.324 |
| BRHIP2019149 | 0 | 0 | 0 | 0 | 0 | 75.561 | 0 |
| BRHIP2021762 | 0 | 0 | 19.598 | 0 | 0 | 0 | 0 |
| BRHIP2021858 | 0 | 0 | 0 | 70.621 | 0 | 0 | 0 |
| BRHIP2021870 | 19.152 | 0 | 0 | 0 | 0 | 0 | 2.902 |
| BRHIP2022326 | 1.835 | 0 | 0 | 0 | 0 | 0 | 1.112 |
| BRHIP2023762 | 0 | 53.006 | 0 | 0 | 0 | 0 | 0 |
| BRHIP2023869 | 0 | 0 | 0 | 0 | 0 | 0 | 23.489 |
| BRHIP2023888 | 0.794 | 0 | 0 | 0 | 0 | 0 | 2.405 |
| BRHIP2024742 | 0 | 0 | 17.547 | 0 | 0 | 0 | 4.076 |
| BRHIP2024911 | 0 | 0 | 0 | 0 | 0 | 0 | 12.117 |
| BRHIP2027077 | 4.356 | 0 | 0 | 0 | 0 | 0 | 0 |
| BRHIP3000111 | 2.208 | 0 | 7.202 | 0 | 0 | 0 | 0 |
| BRHIP3001481 | 0 | 0 | 0 | 0 | 0 | 0 | 61.565 |
| BRHIP3003306 | 0 | 0 | 0 | 0 | 0 | 0 | 39.051 |
| BRHIP3003961 | 0 | 0 | 0 | 0 | 0 | 0 | 12.398 |
| BRHIP3005037 | 0 | 0 | 0 | 0 | 0 | 0 | 17.599 |
| BRHIP3005142 | 0 | 0 | 0 | 0 | 0 | 0 | 39.051 |
| BRHIP3006294 | 0 | 0 | 0 | 0 | 0 | 0 | 26.066 |
| BRHIP3007183 | 0 | 0 | 0 | 0 | 0 | 0 | 8.961 |
| BRHIP3007195 | 0 | 0 | 0 | 0 | 0 | 0 | 24.263 |
| BRHIP3007223 | 4.349 | 0 | 0 | 0 | 0 | 0 | 3.954 |
| BRHIP3012997 | 0 | 0 | 0 | 0 | 0 | 0 | 0.606 |
| BRHIP3013588 | 0 | 0 | 0 | 0 | 0 | 0 | 39.051 |
| BRHIP3017855 | 0 | 0 | 0 | 0 | 0 | 0 | 7.509 |
| BRHIP3020046 | 2.185 | 0 | 0 | 0 | 0 | 0 | 0 |
| BRSSN2000498 | 2.360 | 0 | 0 | 0 | 0 | 0 | 0.715 |
| BRSSN2000566 | 0 | 0 | 0 | 0 | 0 | 0 | 3.180 |
| BRSSN2000684 | 0 | 0 | 0 | 0 | 0 | 0 | 12.254 |
| BRSSN2001869 | 0 | 0 | 0 | 0 | 0 | 0 | 15.785 |
| BRSSN2004657 | 0 | 0 | 0 | 0 | 0 | 0 | 14.939 |
| BRSSN2009518 | 3.715 | 0 | 0 | 0 | 0 | 0 | 4.504 |
| BRSSN2013696 | 0 | 0 | 0 | 0 | 0 | 0 | 25.682 |
| BRSSN2013702 | 20.460 | 0 | 0 | 0 | 0 | 0 | 0 |
| BRSSN2014299 | 0 | 0 | 0 | 0 | 0 | 0 | 2.415 |
| BRSSN2014610 | 7.700 | 0 | 0 | 0 | 0 | 0 | 0 |
| BRSSN2015238 | 7.384 | 0 | 0 | 0 | 0 | 0 | 0 |
| BRSSN2015497 | 0 | 0 | 0 | 0 | 0 | 0 | 65.450 |
| BRSSN2015982 | 0 | 0 | 0 | 0 | 0 | 0 | 10.620 |
| BRSTN1000083 | 1.377 | 0 | 0 | 0 | 0 | 0 | 0.835 |
| BRSTN2000367 | 0 | 0 | 0 | 0 | 0 | 0 | 15.347 |
| BRSTN2011961 | 0 | 6.433 | 4.075 | 0 | 6.140 | 1.981 | 0.189 |
| BRSTN2012069 | 0.673 | 2.731 | 0.067 | 7.585 | 1.805 | 2.071 | 0.563 |
| BRSTN2012174 | 0 | 4.492 | 0 | 0 | 8.576 | 2.768 | 0.793 |
| BRSTN2013502 | 0 | 0 | 0 | 0 | 0 | 0 | 1.589 |
| BRSTN2015889 | 0 | 0 | 0 | 0 | 0 | 0 | 2.532 |
| BRSTN2016470 | 1.416 | 0 | 0 | 9.238 | 9.281 | 0 | 2.146 |
| BRSTN2016678 | 0 | 0 | 0 | 0 | 0 | 0 | 5.998 |
| BRSTN2017104 | 0 | 0 | 0 | 0 | 0 | 0 | 1.275 |
| BRTHA2006975 | 0 | 50.497 | 0 | 0 | 0 | 0 | 0 |
| BRTHA2008335 | 0 | 0 | 57.267 | 0 | 0 | 0 | 0 |
| BRTHA2012714 | 0 | 27.840 | 0 | 0 | 0 | 0 | 0 |
| BRTHA2013054 | 0 | 0 | 0 | 0 | 0 | 0 | 31.413 |
| BRTHA2016577 | 0 | 0 | 0 | 0 | 0 | 0 | 3.085 |
| BRTHA2016765 | 0 | 0 | 0 | 0 | 0 | 0 | 7.692 |
| BRTHA2018443 | 0 | 0 | 0 | 0 | 0 | 0 | 28.890 |
| BRTHA2035743 | 14.636 | 0 | 0 | 0 | 0 | 0 | 4.436 |
| BRTHA3000456 | 0 | 0 | 0 | 0 | 0 | 0 | 37.085 |
| BRTHA3003074 | 0 | 0 | 0 | 0 | 0 | 0 | 7.360 |
| BRTHA3003490 | 3.501 | 0 | 0 | 0 | 0 | 0 | 1.061 |
| BRTHA3003736 | 0 | 0 | 0 | 0 | 0 | 0 | 1.406 |
| BRTHA3004307 | 0 | 0 | 0 | 0 | 0 | 0 | 1.969 |
| BRTHA3007472 | 0 | 0 | 0 | 0 | 0 | 0 | 7.652 |
| BRTHA3008778 | 0 | 0 | 0 | 0 | 0 | 0 | 16.240 |
| BRTHA3009090 | 25.386 | 0 | 0 | 0 | 0 | 0 | 0 |
| BRTHA3011194 | 0 | 0 | 0 | 0 | 0 | 0 | 2.310 |
| BRTHA3011361 | 0 | 0 | 0 | 0 | 0 | 0 | 37.085 |
| BRTHA3020314 | 0 | 0 | 0 | 0 | 0 | 0 | 13.312 |
| BRTHA3026507 | 0 | 0 | 0 | 0 | 0 | 0 | 9.136 |
| CD34C3000252 | 0 | 0 | 0 | 0 | 0 | 0 | 1.073 |
| CD34C3000424 | 0 | 0 | 0 | 0 | 0 | 0 | 1.497 |
| CHONS2002829 | 0 | 0 | 0 | 0 | 0 | 0 | 5.340 |
| COLON2001721 | 0 | 0 | 0 | 0 | 0 | 0 | 3.616 |
| CTONG1000052 | 1.303 | 0 | 0 | 12.751 | 0 | 0 | 1.580 |
| CTONG1000087 | 0 | 0 | 0 | 0 | 0 | 0 | 9.570 |
| CTONG1000093 | 0 | 0 | 0 | 0 | 0 | 0 | 25.979 |
| CTONG1000218 | 0 | 0 | 3.387 | 0 | 0 | 3.294 | 0.630 |
| CTONG1000241 | 0 | 0 | 0 | 0 | 0 | 0 | 2.773 |
| CTONG2000063 | 4.617 | 0 | 0 | 0 | 0 | 0 | 8.396 |
| CTONG2000201 | 0 | 0 | 13.636 | 0 | 0 | 0 | 0 |
| CTONG2000452 | 0 | 0 | 0 | 0 | 0 | 19.927 | 1.904 |
| CTONG2000469 | 0 | 0 | 0 | 0 | 0 | 0 | 3.818 |
| CTONG2000508 | 0 | 0 | 0 | 0 | 0 | 0 | 1.032 |
| CTONG2001366 | 0 | 0 | 54.528 | 0 | 0 | 0 | 10.134 |
| CTONG2001748 | 0 | 0 | 14.705 | 0 | 0 | 0 | 0 |
| CTONG2001800 | 0 | 0 | 0 | 0 | 0 | 0 | 18.484 |
| CTONG2001858 | 0 | 0 | 0 | 0 | 0 | 50.495 | 0 |
| CTONG2002073 | 3.159 | 0 | 0 | 0 | 0 | 0 | 0.957 |
| CTONG2002095 | 0 | 0 | 0 | 0 | 0 | 0 | 4.578 |
| CTONG2002143 | 0 | 0 | 0 | 0 | 0 | 0 | 25.979 |
| CTONG2002270 | 0 | 0 | 0 | 0 | 0 | 0 | 12.829 |
| CTONG2002744 | 1.270 | 0 | 0 | 0 | 0 | 0 | 0.770 |
| CTONG2002766 | 0 | 0 | 0 | 0 | 0 | 0 | 23.170 |
| CTONG2002803 | 0 | 0 | 0 | 0 | 0 | 0 | 1.925 |
| CTONG2002832 | 24.179 | 0 | 0 | 0 | 0 | 0 | 14.656 |
| CTONG2002841 | 0 | 0 | 0 | 0 | 0 | 0 | 6.924 |
| CTONG2003189 | 0 | 0 | 0 | 0 | 0 | 0 | 25.979 |
| CTONG2003293 | 19.937 | 0 | 0 | 0 | 0 | 0 | 6.042 |
| CTONG2003298 | 1.565 | 16.118 | 0 | 0 | 0 | 0 | 0 |
| CTONG2003361 | 0 | 0 | 0 | 0 | 0 | 0 | 15.360 |
| CTONG2003517 | 24.179 | 0 | 0 | 0 | 0 | 0 | 0 |
| CTONG2003524 | 0 | 0 | 0 | 0 | 0 | 11.025 | 0 |
| CTONG2003945 | 0 | 0 | 0 | 0 | 0 | 73.112 | 6.985 |
| CTONG2004487 | 0 | 0 | 0 | 0 | 0 | 0 | 7.420 |
| CTONG2005278 | 0 | 0 | 20.273 | 0 | 0 | 0 | 0 |
| CTONG2005553 | 1.545 | 0 | 0 | 0 | 0 | 0 | 0.468 |
| CTONG2005615 | 0 | 0 | 0 | 0 | 0 | 0 | 9.325 |
| CTONG2005913 | 0 | 0 | 31.391 | 0 | 0 | 0 | 2.917 |
| CTONG2006004 | 0 | 0 | 0 | 0 | 0 | 0 | 2.070 |
| CTONG2006235 | 0 | 0 | 0 | 0 | 0 | 0 | 1.071 |
| CTONG2006377 | 0 | 0 | 0 | 0 | 0 | 0 | 23.023 |
| CTONG2006412 | 0 | 0 | 0 | 0 | 0 | 0 | 4.058 |
| CTONG2006562 | 0 | 0 | 0 | 0 | 0 | 0 | 0.915 |
| CTONG2006798 | 0 | 0 | 0 | 0 | 0 | 0 | 6.308 |
| CTONG2006932 | 2.373 | 0 | 0 | 0 | 0 | 0 | 0 |
| CTONG2007007 | 0 | 0 | 0 | 0 | 0 | 6.369 | 1.217 |
| CTONG2007072 | 4.640 | 0 | 0 | 0 | 0 | 0 | 0 |
| CTONG2007078 | 2.756 | 0 | 26.969 | 0 | 0 | 0 | 0 |
| CTONG2007104 | 0 | 0 | 0 | 0 | 0 | 0 | 16.263 |
| CTONG2007399 | 0 | 0 | 0 | 0 | 0 | 0 | 53.310 |
| CTONG2007474 | 0 | 0 | 0 | 0 | 0 | 72.676 | 0 |
| CTONG2007500 | 3.244 | 0 | 0 | 0 | 0 | 5.145 | 0.492 |
| CTONG2007586 | 12.963 | 0 | 0 | 0 | 0 | 0 | 0 |
| CTONG2007613 | 18.879 | 0 | 0 | 0 | 0 | 0 | 5.722 |
| CTONG2007776 | 0 | 0 | 0 | 0 | 0 | 0 | 19.462 |
| CTONG2008398 | 0 | 0 | 0 | 0 | 0 | 5.231 | 1.000 |
| CTONG2008405 | 0 | 0 | 0 | 0 | 0 | 0 | 14.385 |
| CTONG2008466 | 0 | 0 | 54.999 | 0 | 0 | 0 | 0 |
| CTONG2008506 | 0 | 0 | 0 | 0 | 0 | 0 | 0.615 |
| CTONG2008518 | 0 | 0 | 0 | 0 | 0 | 0 | 5.035 |
| CTONG2009529 | 0 | 0 | 0 | 0 | 0 | 43.261 | 0 |
| CTONG2009963 | 0 | 0 | 0 | 0 | 0 | 0 | 27.025 |
| CTONG2010652 | 0 | 0 | 0 | 0 | 0 | 0 | 21.013 |
| CTONG2010821 | 4.624 | 0 | 0 | 0 | 0 | 0 | 0.467 |
| CTONG2011801 | 0 | 0 | 0 | 0 | 0 | 20.259 | 1.936 |
| CTONG2012001 | 0 | 0 | 0 | 0 | 0 | 0 | 4.674 |
| CTONG2012050 | 0 | 0 | 0 | 0 | 0 | 0 | 13.931 |
| CTONG2012101 | 34.050 | 0 | 0 | 0 | 0 | 0 | 20.639 |
| CTONG2012452 | 0.768 | 0 | 2.505 | 0 | 0 | 0 | 0.931 |
| CTONG2012607 | 0 | 0 | 0 | 0 | 0 | 0 | 2.261 |
| CTONG2012745 | 0 | 0 | 0 | 0 | 0 | 0 | 3.626 |
| CTONG2012847 | 3.714 | 0 | 0 | 0 | 0 | 0 | 2.251 |
| CTONG2013178 | 0 | 0 | 0 | 0 | 0 | 64.748 | 0 |
| CTONG2013222 | 0 | 0 | 0 | 0 | 79.674 | 0 | 0 |
| CTONG2013348 | 0 | 0 | 0 | 0 | 0 | 0 | 3.596 |
| CTONG2013934 | 0 | 0 | 0 | 0 | 0 | 0 | 4.534 |
| CTONG2014369 | 0 | 0 | 0 | 0 | 0 | 28.473 | 5.441 |
| CTONG2014898 | 12.440 | 0 | 0 | 0 | 0 | 0 | 3.770 |
| CTONG2015091 | 0 | 0 | 0 | 0 | 0 | 0 | 0.531 |
| CTONG2015330 | 0 | 0 | 0 | 0 | 0 | 0 | 18.590 |
| CTONG2015358 | 0 | 0 | 0 | 0 | 0 | 0 | 25.979 |
| CTONG2016185 | 0 | 0 | 0 | 0 | 0 | 17.787 | 0 |
| CTONG2016408 | 7.985 | 0 | 0 | 0 | 0 | 0 | 4.840 |
| CTONG2016575 | 1.072 | 0 | 0 | 0 | 0 | 0 | 2.275 |
| CTONG2016869 | 0 | 0 | 0 | 0 | 0 | 0 | 1.727 |
| CTONG2016931 | 0 | 0 | 0 | 0 | 0 | 0 | 3.990 |
| CTONG2016942 | 0 | 0 | 0 | 0 | 0 | 78.602 | 0 |
| CTONG2017094 | 0 | 0 | 0 | 0 | 0 | 0 | 5.846 |
| CTONG2017429 | 0 | 0 | 0 | 0 | 0 | 0 | 9.435 |
| CTONG2017500 | 0 | 0 | 0 | 0 | 0 | 0 | 10.390 |
| CTONG2017798 | 0 | 0 | 0 | 0 | 0 | 0 | 13.027 |
| CTONG2017998 | 0 | 0 | 0 | 0 | 0 | 0 | 3.275 |
| CTONG2018383 | 9.750 | 0 | 0 | 0 | 0 | 0 | 0 |
| CTONG2018632 | 0 | 0 | 0 | 0 | 0 | 0 | 5.228 |
| CTONG2018637 | 0 | 0 | 0 | 0 | 0 | 0 | 4.288 |
| CTONG2018652 | 0 | 0 | 0 | 0 | 0 | 0 | 25.979 |
| CTONG2018739 | 0 | 0 | 0 | 0 | 0 | 0 | 5.066 |
| CTONG2018808 | 16.987 | 0 | 0 | 0 | 0 | 0 | 10.297 |
| CTONG2018843 | 23.945 | 0 | 0 | 0 | 0 | 0 | 7.257 |
| CTONG2018898 | 2.077 | 0 | 0 | 0 | 0 | 0 | 0 |
| CTONG2019400 | 0 | 0 | 0 | 0 | 0 | 0 | 38.711 |
| CTONG2019788 | 0 | 0 | 0 | 0 | 0 | 0 | 1.999 |
| CTONG2020484 | 0 | 0 | 4.135 | 0 | 0 | 0 | 0 |
| CTONG2020522 | 0 | 0 | 0 | 0 | 0 | 0 | 14.980 |
| CTONG2020560 | 0 | 0 | 0 | 0 | 0 | 10.264 | 4.903 |
| CTONG2020582 | 0 | 0 | 0 | 0 | 0 | 0 | 12.542 |
| CTONG2020638 | 26.704 | 0 | 0 | 0 | 0 | 0 | 0 |
| CTONG2020974 | 0 | 0 | 0 | 0 | 0 | 0 | 25.979 |
| CTONG2021289 | 0 | 0 | 0 | 0 | 0 | 0 | 6.726 |
| CTONG2023449 | 0 | 0 | 0 | 0 | 0 | 78.602 | 0 |
| CTONG2027263 | 0 | 0 | 0 | 0 | 0 | 0 | 21.530 |
| CTONG2028124 | 7.588 | 0 | 0 | 0 | 0 | 0 | 1.314 |
| CTONG2028309 | 15.831 | 0 | 0 | 0 | 0 | 0 | 14.394 |
| CTONG2028758 | 0 | 0 | 0 | 0 | 0 | 0 | 10.513 |
| CTONG3001123 | 0 | 0 | 0 | 0 | 0 | 0 | 15.389 |
| CTONG3002518 | 0 | 0 | 0 | 0 | 0 | 57.732 | 0 |
| CTONG3002835 | 2.370 | 0 | 0 | 0 | 0 | 0 | 5.745 |
| CTONG3006067 | 0 | 0 | 0 | 0 | 0 | 0 | 25.979 |
| CTONG3008894 | 1.568 | 16.146 | 0 | 0 | 0 | 0 | 2.376 |
| CTONG3009028 | 0 | 0 | 0 | 0 | 0 | 0 | 2.104 |
| CTONG3009239 | 0 | 32.069 | 0 | 0 | 0 | 0 | 0 |
| D30ST2001670 | 0 | 0 | 0 | 0 | 0 | 0 | 31.707 |
| D30ST2002068 | 0.463 | 0 | 0 | 0 | 0 | 0 | 0 |
| D30ST2003024 | 0 | 0 | 0 | 0 | 0 | 0 | 5.302 |
| D30ST3000169 | 0 | 0 | 0 | 0 | 0 | 6.696 | 0 |
| D90ST2000031 | 0 | 0 | 0 | 0 | 0 | 0 | 3.088 |
| D90ST2003762 | 0 | 48.412 | 0 | 0 | 0 | 0 | 0 |
| DFNES1000150 | 14.452 | 0 | 0 | 0 | 0 | 0 | 0 |
| DFNES2000011 | 0 | 0 | 0 | 0 | 0 | 0 | 0.357 |
| DFNES2000153 | 0 | 0 | 0 | 0 | 0 | 21.906 | 0 |
| DFNES2000268 | 0 | 24.526 | 0 | 0 | 0 | 0 | 0 |
| DFNES2000335 | 0 | 0 | 0 | 0 | 0 | 0 | 9.291 |
| DFNES2000443 | 0 | 15.077 | 0 | 0 | 0 | 4.644 | 0 |
| DFNES2000526 | 5.960 | 0 | 0 | 0 | 0 | 0 | 0 |
| DFNES2002966 | 0 | 0 | 0 | 0 | 0 | 0 | 9.984 |
| DFNES2003192 | 0 | 66.531 | 0 | 0 | 0 | 0 | 0 |
| DFNES2004346 | 0 | 0 | 0 | 0 | 0 | 0 | 2.046 |
| DFNES2004371 | 0 | 35.042 | 0 | 0 | 0 | 0 | 2.063 |
| DFNES2007113 | 0 | 0 | 0 | 0 | 0 | 45.721 | 0 |
| DFNES2007634 | 5.751 | 0 | 0 | 0 | 0 | 0 | 3.486 |
| DFNES2008088 | 5.670 | 0 | 0 | 0 | 0 | 0 | 0 |
| DFNES2011380 | 0 | 0 | 0 | 0 | 0 | 0 | 7.641 |
| DFNES2011499 | 0 | 0 | 0 | 0 | 0 | 0 | 12.166 |
| FCBBF1000024 | 0 | 0 | 0 | 0 | 0 | 0 | 1.435 |
| FCBBF1000027 | 0.790 | 0 | 0 | 0 | 0 | 2.506 | 0.239 |
| FCBBF1000061 | 0 | 0 | 0 | 0 | 0 | 0 | 1.537 |
| FCBBF1000063 | 0 | 0 | 0 | 0 | 0 | 0 | 3.910 |
| FCBBF1000077 | 0 | 0 | 5.697 | 0 | 0 | 0 | 0 |
| FCBBF1000139 | 0 | 0 | 0 | 0 | 0 | 0 | 1.143 |
| FCBBF1000197 | 0 | 0 | 0 | 0 | 0 | 0 | 2.793 |
| FCBBF1000294 | 0 | 0 | 7.574 | 0 | 0 | 0 | 2.111 |
| FCBBF1000374 | 0 | 0 | 0 | 0 | 0 | 0 | 26.135 |
| FCBBF1000425 | 11.260 | 0 | 0 | 0 | 0 | 0 | 10.238 |
| FCBBF1000563 | 0 | 0 | 0 | 0 | 0 | 0 | 0.982 |
| FCBBF1000574 | 0 | 0 | 0 | 0 | 0 | 0 | 1.357 |
| FCBBF1000760 | 0 | 0 | 0 | 0 | 0 | 0 | 3.425 |
| FCBBF2000087 | 6.222 | 0 | 0 | 0 | 0 | 0 | 0 |
| FCBBF2000195 | 0 | 92.321 | 0 | 0 | 0 | 0 | 0 |
| FCBBF2000199 | 0 | 0 | 0 | 0 | 0 | 0 | 1.829 |
| FCBBF2000576 | 0 | 0 | 79.200 | 0 | 0 | 0 | 0 |
| FCBBF2000591 | 0 | 0 | 0 | 0 | 0 | 0 | 0.375 |
| FCBBF2000885 | 3.311 | 0 | 0 | 0 | 0 | 0 | 2.007 |
| FCBBF2002111 | 0 | 0 | 0 | 0 | 0 | 78.739 | 0 |
| FCBBF2002349 | 0 | 0 | 0 | 0 | 0 | 0 | 7.742 |
| FCBBF2002801 | 0 | 0 | 0 | 0 | 0 | 17.757 | 0 |
| FCBBF2003102 | 0 | 0 | 0 | 0 | 0 | 0 | 13.089 |
| FCBBF2005658 | 0 | 0 | 0 | 0 | 0 | 0 | 5.088 |
| FCBBF3000110 | 13.929 | 0 | 0 | 0 | 0 | 0 | 0 |
| FCBBF3000228 | 38.659 | 0 | 0 | 0 | 0 | 0 | 5.858 |
| FCBBF3000388 | 0 | 0 | 0 | 0 | 0 | 0 | 1.615 |
| FCBBF3000434 | 0 | 0 | 0 | 0 | 0 | 0 | 2.420 |
| FCBBF3000536 | 0 | 0 | 0 | 0 | 0 | 0 | 1.742 |
| FCBBF3001081 | 11.326 | 0 | 18.471 | 0 | 0 | 0 | 0 |
| FCBBF3001281 | 0 | 0 | 0 | 0 | 0 | 0 | 13.310 |
| FCBBF3001377 | 0 | 0 | 0 | 0 | 0 | 0 | 20.193 |
| FCBBF3001470 | 0 | 0 | 0 | 0 | 0 | 0 | 0.887 |
| FCBBF3001632 | 3.330 | 0 | 0 | 0 | 0 | 0 | 1.009 |
| FCBBF3001818 | 0 | 0 | 0 | 0 | 0 | 0 | 5.954 |
| FCBBF3001977 | 0 | 0 | 0 | 0 | 0 | 0 | 4.869 |
| FCBBF3003800 | 0.850 | 0 | 0 | 0 | 0 | 0 | 0.257 |
| FCBBF3004261 | 0 | 0 | 0 | 0 | 0 | 0 | 11.826 |
| FCBBF3004473 | 0 | 0 | 8.082 | 0 | 0 | 0 | 0.751 |
| FCBBF3005330 | 1.494 | 0 | 4.873 | 0 | 0 | 0 | 13.585 |
| FCBBF3005497 | 0 | 0 | 0 | 0 | 0 | 0 | 10.792 |
| FCBBF3006821 | 0 | 0 | 0 | 0 | 0 | 0 | 22.420 |
| FCBBF3007597 | 53.863 | 0 | 0 | 0 | 0 | 0 | 0 |
| FCBBF3008159 | 0 | 0 | 0 | 0 | 0 | 0 | 40.612 |
| FCBBF3008556 | 0 | 0 | 0 | 0 | 0 | 0 | 26.135 |
| FCBBF3009541 | 1.778 | 0 | 0 | 0 | 0 | 0 | 1.347 |
| FCBBF3011485 | 0 | 0 | 0 | 0 | 0 | 0 | 13.111 |
| FCBBF3012288 | 0 | 0 | 0 | 0 | 0 | 0 | 26.135 |
| FCBBF3012347 | 0 | 48.750 | 0 | 0 | 0 | 15.017 | 1.435 |
| FCBBF3013266 | 0 | 0 | 0 | 0 | 0 | 0 | 13.819 |
| FCBBF3013506 | 0 | 0 | 0 | 0 | 0 | 0 | 15.524 |
| FCBBF3014770 | 0 | 0 | 0 | 0 | 0 | 0 | 6.238 |
| FCBBF3015727 | 0 | 0 | 0 | 0 | 0 | 0 | 26.135 |
| FCBBF3016928 | 0 | 19.462 | 0 | 0 | 0 | 0 | 0.573 |
| FCBBF3017396 | 0 | 0 | 0 | 0 | 0 | 0 | 5.338 |
| FCBBF3017531 | 0 | 0 | 0 | 0 | 0 | 10.970 | 0 |
| FCBBF3017918 | 0 | 0 | 0 | 0 | 0 | 0 | 8.560 |
| FCBBF3018796 | 0 | 0 | 21.839 | 0 | 0 | 0 | 2.029 |
| FCBBF3019455 | 0 | 0 | 0 | 0 | 0 | 0 | 10.647 |
| FCBBF3019839 | 0 | 0 | 0 | 0 | 0 | 0 | 2.448 |
| FCBBF3021807 | 9.352 | 0 | 30.500 | 0 | 0 | 0 | 0 |
| FCBBF3021940 | 53.863 | 0 | 0 | 0 | 0 | 0 | 0 |
| FCBBF3023667 | 0 | 0 | 0 | 0 | 0 | 0.909 | 0.434 |
| FCBBF3024002 | 12.241 | 0 | 0 | 0 | 0 | 0 | 3.710 |
| FCBBF3025730 | 0 | 0 | 0 | 0 | 0 | 0 | 38.827 |
| FCBBF3025737 | 0 | 0 | 0 | 0 | 0 | 0 | 4.249 |
| FCBBF3026651 | 0 | 0 | 0 | 0 | 0 | 0 | 19.080 |
| FCBBF3028202 | 0 | 0 | 0 | 0 | 0 | 0 | 15.020 |
| FCBBF3028593 | 0 | 0 | 0 | 0 | 0 | 0 | 2.639 |
| FCBBF4000446 | 0 | 0 | 5.284 | 0 | 0 | 0 | 0 |
| FCBBF4000500 | 0 | 0 | 0 | 0 | 0 | 0 | 5.729 |
| FCBBF4000548 | 31.525 | 0 | 0 | 0 | 0 | 0 | 0 |
| FCBBF5000261 | 0 | 0 | 0 | 0 | 0 | 0 | 6.788 |
| FEBRA1000022 | 11.352 | 0 | 0 | 0 | 0 | 0 | 0 |
| FEBRA1000057 | 0 | 0 | 0 | 0 | 0 | 0 | 28.370 |
| FEBRA1000088 | 0 | 0 | 0 | 0 | 0 | 29.198 | 0 |
| FEBRA2000105 | 0 | 0 | 0 | 0 | 0 | 0 | 0.469 |
| FEBRA2000210 | 0 | 0 | 0 | 14.918 | 0 | 0 | 0 |
| FEBRA2000282 | 0 | 0 | 0 | 0 | 0 | 0 | 20.775 |
| FEBRA2000311 | 0 | 0 | 0 | 0 | 0 | 68.498 | 6.544 |
| FEBRA2000438 | 0 | 0 | 0 | 0 | 0 | 0 | 5.775 |
| FEBRA2000452 | 0 | 0 | 0 | 0 | 0 | 6.862 | 0.656 |
| FEBRA2000510 | 0 | 0 | 0 | 0 | 0 | 25.245 | 0 |
| FEBRA2000532 | 0 | 0 | 0 | 0 | 0 | 21.879 | 0 |
| FEBRA2000733 | 0.727 | 7.486 | 7.113 | 0 | 0 | 1.153 | 0.110 |
| FEBRA2000740 | 0 | 0 | 0 | 0 | 0 | 7.738 | 1.479 |
| FEBRA2000762 | 0 | 0 | 0 | 0 | 0 | 0 | 4.066 |
| FEBRA2000856 | 0 | 0 | 0 | 0 | 0 | 0 | 41.502 |
| FEBRA2000881 | 0 | 0 | 0 | 0 | 0 | 0 | 8.276 |
| FEBRA2000972 | 32.671 | 0 | 0 | 0 | 0 | 0 | 0 |
| FEBRA2001133 | 0 | 0 | 0 | 0 | 0 | 0 | 20.775 |
| FEBRA2001334 | 12.403 | 0 | 0 | 0 | 0 | 0 | 0 |
| FEBRA2001492 | 0 | 0 | 0 | 0 | 0 | 0 | 4.231 |
| FEBRA2001523 | 0 | 0 | 0 | 0 | 0 | 0 | 5.558 |
| FEBRA2001571 | 4.523 | 0 | 0 | 0 | 0 | 0 | 1.371 |
| FEBRA2001752 | 0 | 0 | 0 | 0 | 0 | 0 | 10.296 |
| FEBRA2001828 | 0 | 0 | 0 | 0 | 0 | 0 | 7.113 |
| FEBRA2002429 | 0 | 86.973 | 0 | 0 | 0 | 0 | 0 |
| FEBRA2002527 | 0 | 0 | 0 | 0 | 0 | 0 | 5.616 |
| FEBRA2002707 | 0 | 0 | 0 | 0 | 0 | 0 | 2.355 |
| FEBRA2002933 | 0 | 0 | 2.603 | 0 | 0 | 0 | 0.242 |
| FEBRA2003100 | 1.420 | 0 | 0 | 0 | 0 | 0 | 0.431 |
| FEBRA2003833 | 0 | 0 | 0 | 0 | 0 | 0 | 2.261 |
| FEBRA2003926 | 0 | 15.505 | 4.911 | 0 | 0 | 0 | 0 |
| FEBRA2004023 | 0 | 0 | 0 | 0 | 0 | 0 | 20.775 |
| FEBRA2004191 | 0 | 0 | 0 | 0 | 0 | 0 | 25.927 |
| FEBRA2004224 | 2.497 | 0 | 0 | 0 | 0 | 0 | 0 |
| FEBRA2004293 | 0 | 0 | 0 | 0 | 0 | 0 | 1.738 |
| FEBRA2004412 | 0 | 0 | 0 | 0 | 0 | 0 | 1.919 |
| FEBRA2005416 | 0 | 0 | 0 | 0 | 0 | 0 | 1.404 |
| FEBRA2005734 | 0 | 0 | 5.940 | 0 | 0 | 0 | 0 |
| FEBRA2005752 | 0 | 0 | 0 | 0 | 0 | 0 | 2.721 |
| FEBRA2005995 | 3.024 | 0 | 0 | 0 | 0 | 9.591 | 10.080 |
| FEBRA2006092 | 0 | 0 | 0 | 0 | 0 | 0 | 2.439 |
| FEBRA2006112 | 0 | 0 | 0 | 0 | 0 | 0 | 21.573 |
| FEBRA2006270 | 2.521 | 0 | 0 | 0 | 0 | 0 | 1.528 |
| FEBRA2006368 | 0 | 0 | 0 | 0 | 0 | 0 | 4.062 |
| FEBRA2006372 | 2.897 | 0 | 0 | 0 | 0 | 0 | 0.878 |
| FEBRA2006401 | 0 | 0 | 0 | 0 | 0 | 1.717 | 0 |
| FEBRA2006664 | 0 | 0 | 0 | 0 | 0 | 0 | 20.775 |
| FEBRA2007200 | 0 | 0 | 0 | 0 | 0 | 0 | 20.775 |
| FEBRA2007212 | 0 | 0 | 0 | 0 | 0 | 0 | 10.264 |
| FEBRA2007620 | 0 | 0 | 0 | 0 | 0 | 0 | 20.775 |
| FEBRA2007622 | 2.225 | 0 | 0 | 0 | 0 | 7.059 | 2.023 |
| FEBRA2007708 | 0 | 0 | 0 | 0 | 0 | 0 | 72.628 |
| FEBRA2007801 | 0 | 0 | 0 | 0 | 0 | 0 | 3.227 |
| FEBRA2007900 | 0 | 0 | 0 | 0 | 0 | 0 | 5.067 |
| FEBRA2007901 | 0 | 0 | 0 | 0 | 0 | 0 | 2.423 |
| FEBRA2008036 | 0 | 0 | 0 | 0 | 0 | 0 | 5.602 |
| FEBRA2008081 | 0 | 0 | 9.963 | 0 | 0 | 0 | 0.926 |
| FEBRA2008087 | 1.160 | 0 | 2.522 | 7.566 | 0 | 0 | 0.352 |
| FEBRA2008583 | 0 | 0 | 0 | 0 | 0 | 0.904 | 0.086 |
| FEBRA2008755 | 3.543 | 0 | 0 | 0 | 0 | 0 | 0 |
| FEBRA2008836 | 0 | 0 | 0 | 0 | 0 | 0 | 20.775 |
| FEBRA2009328 | 0 | 0 | 0 | 0 | 0 | 67.807 | 0 |
| FEBRA2009419 | 5.700 | 0 | 0 | 0 | 0 | 0 | 1.727 |
| FEBRA2009514 | 0 | 0 | 0 | 0 | 0 | 45.326 | 2.165 |
| FEBRA2009986 | 0 | 0 | 0 | 0 | 0 | 0 | 4.202 |
| FEBRA2014297 | 0 | 0 | 0 | 0 | 0 | 0 | 2.794 |
| FEBRA2014417 | 0 | 11.993 | 3.798 | 0 | 0 | 0 | 0.353 |
| FEBRA2015085 | 0 | 0 | 0 | 0 | 0 | 0 | 0.997 |
| FEBRA2016572 | 0 | 0 | 0 | 0 | 0 | 0 | 12.844 |
| FEBRA2018476 | 2.357 | 0 | 0 | 23.059 | 0 | 0 | 0.714 |
| FEBRA2018746 | 0 | 0 | 0 | 0 | 0 | 51.169 | 0 |
| FEBRA2019663 | 0 | 0 | 61.269 | 0 | 0 | 0 | 0 |
| FEBRA2019711 | 0 | 0 | 14.875 | 0 | 0 | 0 | 1.382 |
| FEBRA2021339 | 0 | 0 | 0 | 0 | 0 | 0 | 20.775 |
| FEBRA2021966 | 9.304 | 0 | 0 | 0 | 0 | 0 | 0 |
| FEBRA2022013 | 0 | 0 | 66.137 | 0 | 0 | 0 | 0 |
| FEBRA2022055 | 1.148 | 0 | 0 | 0 | 0 | 0 | 0.348 |
| FEBRA2022504 | 0 | 0 | 0 | 0 | 0 | 0 | 3.221 |
| FEBRA2024150 | 0 | 0 | 0 | 0 | 0 | 0 | 44.030 |
| FEBRA2024987 | 0 | 0 | 0 | 0 | 0 | 0 | 6.430 |
| FEBRA2025427 | 0 | 0 | 0 | 0 | 0 | 16.960 | 0 |
| FEBRA2025838 | 0 | 0 | 0 | 17.336 | 0 | 0 | 0.537 |
| FEBRA2026984 | 0 | 0 | 0 | 0 | 0 | 0 | 22.925 |
| FEBRA2028516 | 0 | 0 | 0 | 0 | 0 | 0 | 4.486 |
| FELIV1000153 | 0 | 0 | 1.160 | 0 | 0 | 1.128 | 0.323 |
| HCASM1000115 | 2.236 | 0 | 0 | 0 | 0 | 0 | 0 |
| HCASM2000016 | 0 | 0 | 0 | 0 | 0 | 0 | 0.488 |
| HCASM2000138 | 0 | 0 | 0 | 0 | 0 | 0 | 11.043 |
| HCASM2000363 | 0 | 15.104 | 0 | 14.351 | 0 | 0 | 0 |
| HCASM2003018 | 0 | 0 | 0 | 0 | 0 | 0 | 23.077 |
| HCHON1000030 | 0.782 | 0 | 3.828 | 0 | 3.845 | 0 | 0.356 |
| HCHON1000131 | 0 | 0 | 0 | 0 | 0 | 0 | 5.364 |
| HCHON1000166 | 0 | 0 | 0 | 0 | 0 | 0 | 1.966 |
| HCHON2000056 | 0 | 0 | 1.995 | 0 | 6.013 | 5.822 | 0.371 |
| HCHON2000087 | 1.334 | 0 | 0 | 0 | 0 | 0 | 0 |
| HCHON2000160 | 2.171 | 0 | 0 | 0 | 0 | 0 | 1.316 |
| HCHON2000226 | 0 | 0 | 11.347 | 0 | 17.098 | 0 | 0.264 |
| HCHON2000244 | 0 | 0 | 4.627 | 0 | 0 | 4.501 | 0.430 |
| HCHON2000265 | 0 | 0 | 0 | 0 | 0 | 0 | 1.323 |
| HCHON2000323 | 0 | 0 | 0 | 0 | 0 | 0 | 1.211 |
| HCHON2000373 | 0 | 0 | 0 | 0 | 0 | 6.934 | 0.663 |
| HCHON2000475 | 2.871 | 0 | 0 | 0 | 0 | 9.107 | 0 |
| HCHON2000508 | 4.027 | 0 | 0 | 0 | 0 | 0 | 0 |
| HCHON2000626 | 2.535 | 0 | 0 | 0 | 0 | 0 | 0.768 |
| HCHON2000663 | 18.399 | 0 | 0 | 0 | 0 | 0 | 0 |
| HCHON2000698 | 6.182 | 0 | 0 | 0 | 0 | 0 | 5.621 |
| HCHON2000738 | 0 | 0 | 0 | 0 | 0 | 0 | 5.839 |
| HCHON2000815 | 0 | 0 | 0 | 0 | 0 | 0 | 1.826 |
| HCHON2000826 | 4.631 | 15.897 | 0 | 0 | 0 | 0 | 0.468 |
| HCHON2001039 | 4.813 | 0 | 7.849 | 0 | 0 | 0 | 3.647 |
| HCHON2001099 | 0 | 0 | 0 | 0 | 0 | 0 | 1.783 |
| HCHON2001200 | 0.933 | 0 | 0 | 0 | 0 | 0 | 0 |
| HCHON2001217 | 0 | 0 | 0 | 0 | 0 | 0 | 4.763 |
| HCHON2001359 | 1.836 | 0 | 0 | 0 | 0 | 0 | 0.557 |
| HCHON2001407 | 0 | 0 | 0 | 0 | 0 | 0 | 2.065 |
| HCHON2001505 | 9.692 | 0 | 0 | 0 | 0 | 0 | 2.937 |
| HCHON2001519 | 0 | 0 | 0 | 0 | 0 | 0 | 9.363 |
| HCHON2001535 | 0 | 0 | 0 | 0 | 0 | 0 | 6.028 |
| HCHON2001598 | 0 | 0 | 0 | 0 | 0 | 0 | 1.588 |
| HCHON2001665 | 6.657 | 0 | 0 | 0 | 0 | 10.558 | 1.009 |
| HCHON2002496 | 0 | 0 | 0 | 0 | 0 | 0 | 5.077 |
| HCHON2004002 | 8.467 | 0 | 5.523 | 0 | 0 | 0 | 0 |
| HCHON2005921 | 8.945 | 0 | 0 | 0 | 0 | 0 | 2.711 |
| HCHON2006250 | 0 | 0 | 11.007 | 0 | 0 | 0 | 2.046 |
| HCHON2006770 | 0 | 62.687 | 0 | 0 | 0 | 0 | 0 |
| HEART1000010 | 0 | 0 | 24.034 | 0 | 0 | 0 | 0 |
| HEART1000149 | 0 | 0 | 0 | 0 | 0 | 0 | 0.614 |
| HEART1000185 | 0 | 0 | 0 | 0 | 0 | 0 | 0.517 |
| HEART2000444 | 0 | 0 | 0 | 0 | 0 | 0 | 5.505 |
| HEART2000506 | 3.782 | 0 | 0 | 0 | 0 | 0 | 0 |
| HEART2003836 | 0 | 0 | 0 | 0 | 0 | 0 | 1.345 |
| HEART2004764 | 0 | 0 | 0 | 0 | 0 | 0 | 16.386 |
| HEART2004931 | 0 | 0 | 0 | 0 | 0 | 46.525 | 0 |
| HEART2004941 | 0 | 0 | 0 | 0 | 0 | 0 | 3.105 |
| HEART2005310 | 0 | 0 | 0 | 0 | 0 | 0 | 4.557 |
| HEART2006521 | 5.159 | 0 | 0 | 0 | 0 | 0 | 0 |
| HEART2007696 | 0 | 0 | 0 | 0 | 0 | 0 | 3.256 |
| HHDPC1000083 | 2.111 | 0 | 0 | 0 | 0 | 0 | 0.640 |
| HHDPC1000114 | 0 | 0 | 0 | 0 | 0 | 0 | 0.475 |
| HHDPC1000118 | 0 | 0 | 0 | 0 | 0 | 14.339 | 1.370 |
| HHDPC1000163 | 2.712 | 0 | 0 | 0 | 0 | 0 | 0 |
| HHDPC2000070 | 0 | 0 | 0 | 0 | 0 | 0 | 6.291 |
| HHDPC2000102 | 0 | 0 | 0 | 0 | 0 | 32.486 | 3.104 |
| HHDPC2000104 | 3.990 | 0 | 0 | 0 | 0 | 0 | 0 |
| HHDPC2000115 | 5.642 | 0 | 0 | 0 | 0 | 0 | 0 |
| HHDPC2000455 | 3.556 | 0 | 0 | 0 | 0 | 0 | 0 |
| HHDPC2003439 | 0.549 | 0 | 1.789 | 0 | 0 | 0 | 0.665 |
| HHDPC2003472 | 0 | 0 | 0 | 0 | 0 | 0 | 8.495 |
| HHDPC2003983 | 1.201 | 0 | 0 | 5.877 | 0 | 0 | 1.274 |
| HHDPC2005794 | 0 | 0 | 0 | 0 | 0 | 0 | 5.200 |
| HHDPC2007267 | 0 | 0 | 10.303 | 0 | 0 | 0 | 0.319 |
| HHDPC2009178 | 21.893 | 0 | 0 | 0 | 0 | 0 | 6.635 |
| HHDPC2009528 | 0 | 0 | 0 | 0 | 0 | 0 | 8.497 |
| HLUNG1000037 | 0 | 0 | 0 | 0 | 0 | 0 | 5.744 |
| HLUNG1000055 | 0 | 0 | 3.808 | 0 | 0 | 0 | 1.415 |
| HLUNG1000099 | 0 | 0 | 0 | 0 | 0 | 0 | 28.221 |
| HLUNG1000110 | 0 | 0 | 0 | 0 | 0 | 0 | 15.126 |
| HLUNG2000004 | 0 | 0 | 17.793 | 0 | 0 | 0 | 0 |
| HLUNG2000314 | 0 | 0 | 0 | 0 | 0 | 0 | 1.604 |
| HLUNG2000501 | 0 | 0 | 0 | 0 | 0 | 0 | 1.682 |
| HLUNG2000846 | 0 | 0 | 0 | 0 | 0 | 0 | 2.953 |
| HLUNG2000884 | 0 | 0 | 0 | 0 | 0 | 14.645 | 2.798 |
| HLUNG2001146 | 0 | 0 | 0 | 0 | 0 | 0 | 3.427 |
| HLUNG2001518 | 0 | 0 | 0 | 0 | 0 | 0 | 2.144 |
| HLUNG2002648 | 0 | 0 | 0 | 0 | 0 | 0 | 2.363 |
| HLUNG2003003 | 0 | 0 | 0 | 0 | 0 | 0 | 5.224 |
| HLUNG2003042 | 0 | 0 | 16.745 | 0 | 0 | 0 | 0 |
| HLUNG2004159 | 3.910 | 0 | 0 | 0 | 0 | 0 | 3.555 |
| HLUNG2004534 | 0 | 0 | 20.405 | 0 | 0 | 0 | 0 |
| HLUNG2005133 | 0 | 0 | 0 | 0 | 0 | 0 | 13.892 |
| HLUNG2005230 | 0 | 0 | 16.080 | 0 | 0 | 0 | 0 |
| HLUNG2008139 | 0 | 0 | 0 | 0 | 0 | 0 | 14.983 |
| HLUNG2008225 | 0 | 0 | 0 | 0 | 0 | 0 | 10.785 |
| HLUNG2008637 | 0 | 0 | 11.883 | 0 | 0 | 0 | 2.208 |
| HLUNG2008885 | 0 | 0 | 0 | 0 | 0 | 0 | 7.056 |
| HLUNG2009225 | 6.506 | 0 | 0 | 0 | 0 | 0 | 1.972 |
| HLUNG2017262 | 3.420 | 0 | 0 | 0 | 0 | 0 | 14.513 |
| HSYRA1000062 | 0 | 0 | 0 | 0 | 0 | 0 | 0.280 |
| HSYRA1000119 | 1.983 | 0 | 3.234 | 0 | 0 | 0 | 3.306 |
| HSYRA1000137 | 0 | 0 | 0 | 0 | 0 | 0 | 2.436 |
| HSYRA1000148 | 0 | 0 | 0 | 0 | 0 | 0 | 4.311 |
| HSYRA1000152 | 2.573 | 0 | 0 | 0 | 0 | 0 | 2.339 |
| HSYRA1000178 | 0 | 0 | 0 | 0 | 0 | 0 | 4.917 |
| HSYRA2000159 | 0.520 | 0 | 0 | 0 | 0 | 2.475 | 0 |
| HSYRA2000190 | 0 | 0 | 0 | 0 | 0 | 0 | 4.658 |
| HSYRA2000224 | 3.878 | 0 | 0 | 0 | 0 | 0 | 1.175 |
| HSYRA2000232 | 0 | 0 | 0 | 0 | 0 | 0 | 1.450 |
| HSYRA2000255 | 0 | 29.899 | 0 | 0 | 0 | 0 | 0 |
| HSYRA2000507 | 0 | 0 | 0 | 0 | 0 | 0 | 8.042 |
| HSYRA2000640 | 3.675 | 0 | 0 | 0 | 0 | 5.829 | 2.228 |
| HSYRA2000743 | 3.338 | 0 | 0 | 0 | 0 | 0 | 2.529 |
| HSYRA2000787 | 0 | 0 | 0 | 0 | 0 | 0 | 2.033 |
| HSYRA2001103 | 1.829 | 0 | 0 | 0 | 0 | 0 | 0 |
| HSYRA2001138 | 0 | 0 | 0 | 0 | 0 | 0 | 0.500 |
| HSYRA2001225 | 0 | 0 | 0 | 0 | 0 | 0 | 1.933 |
| HSYRA2001396 | 0 | 0 | 0 | 0 | 0 | 10.394 | 0 |
| HSYRA2001420 | 12.017 | 0 | 0 | 0 | 0 | 0 | 0 |
| HSYRA2001476 | 5.206 | 0 | 0 | 0 | 0 | 0 | 0.316 |
| HSYRA2001567 | 4.834 | 0 | 0 | 0 | 0 | 0 | 0 |
| HSYRA2001595 | 0 | 0 | 4.007 | 0 | 0 | 0 | 2.607 |
| HSYRA2001615 | 0 | 0 | 0 | 0 | 0 | 0 | 1.356 |
| HSYRA2001621 | 0 | 0 | 0 | 0 | 0 | 1.255 | 0 |
| HSYRA2001631 | 0 | 0 | 0 | 0 | 0 | 0 | 3.812 |
| HSYRA2001638 | 4.878 | 0 | 0 | 0 | 0 | 0 | 1.478 |
| IMR321000210 | 0 | 0 | 7.130 | 0 | 0 | 0 | 0.663 |
| IMR321000219 | 1.816 | 6.234 | 0 | 0 | 0 | 0 | 0.183 |
| IMR321000242 | 0 | 0 | 0 | 0 | 0 | 0 | 7.352 |
| IMR321000253 | 2.197 | 0 | 0 | 0 | 0 | 0 | 0.666 |
| IMR321000266 | 0 | 0 | 0 | 0 | 0 | 0 | 1.850 |
| IMR322000010 | 0 | 0 | 66.596 | 0 | 0 | 0 | 0 |
| IMR322000144 | 0 | 0 | 0 | 0 | 0 | 0 | 2.132 |
| IMR322000223 | 0 | 0 | 9.579 | 0 | 0 | 9.317 | 1.780 |
| IMR322000243 | 1.850 | 0 | 0 | 0 | 0 | 0 | 1.682 |
| IMR322000555 | 0 | 0 | 0 | 0 | 0 | 0 | 3.900 |
| IMR322000730 | 0.296 | 3.044 | 0 | 11.570 | 0 | 0.938 | 1.165 |
| IMR322000742 | 0 | 0 | 0 | 0 | 0 | 0 | 1.082 |
| IMR322001332 | 0 | 0 | 0 | 0 | 0 | 18.216 | 6.962 |
| IMR322001380 | 0 | 0 | 0 | 0 | 0 | 0 | 1.296 |
| IMR322001435 | 2.026 | 0 | 0 | 0 | 0 | 0 | 1.228 |
| IMR322001491 | 0 | 0 | 0 | 0 | 0 | 65.975 | 0 |
| IMR322001584 | 0 | 0 | 0 | 0 | 0 | 0 | 0.816 |
| IMR322001600 | 0 | 0 | 1.133 | 0 | 0 | 3.305 | 0 |
| IMR322001710 | 8.366 | 0 | 0 | 0 | 0 | 0 | 6.339 |
| IMR322002993 | 0 | 0 | 0 | 0 | 0 | 0 | 10.175 |
| IMR322019070 | 0 | 0 | 0 | 0 | 0 | 0 | 5.247 |
| KIDNE1000145 | 0 | 0 | 19.453 | 0 | 0 | 0 | 1.808 |
| KIDNE2000085 | 4.436 | 0 | 0 | 0 | 0 | 0 | 0.672 |
| KIDNE2000252 | 1.843 | 0 | 0 | 0 | 0 | 0 | 3.352 |
| KIDNE2000266 | 0 | 0 | 0 | 0 | 0 | 0 | 2.752 |
| KIDNE2000403 | 1.782 | 18.349 | 0 | 0 | 0 | 0 | 1.620 |
| KIDNE2000497 | 0 | 0 | 0 | 0 | 0 | 21.454 | 0 |
| KIDNE2000517 | 0 | 0 | 0 | 0 | 0 | 21.431 | 0 |
| KIDNE2000574 | 0 | 0 | 0 | 0 | 0 | 5.121 | 0.489 |
| KIDNE2000665 | 4.175 | 0 | 0 | 0 | 0 | 0 | 0 |
| KIDNE2000947 | 0 | 0 | 0 | 0 | 0 | 0 | 3.304 |
| KIDNE2001162 | 0 | 0 | 3.283 | 0 | 0 | 0 | 0.610 |
| KIDNE2001467 | 1.124 | 0 | 0 | 0 | 0 | 0 | 2.045 |
| KIDNE2001847 | 0 | 0 | 0 | 0 | 0 | 0 | 2.379 |
| KIDNE2002252 | 0 | 0 | 0 | 0 | 0 | 0 | 14.250 |
| KIDNE2002883 | 4.892 | 0 | 0 | 0 | 0 | 0 | 0 |
| KIDNE2003305 | 0 | 0 | 17.763 | 0 | 0 | 0 | 0 |
| KIDNE2003316 | 0 | 0 | 53.223 | 0 | 0 | 0 | 0 |
| KIDNE2003357 | 31.890 | 0 | 0 | 0 | 0 | 0 | 0 |
| KIDNE2003941 | 0 | 0 | 0 | 0 | 0 | 0 | 0.330 |
| KIDNE2004295 | 0 | 0 | 0 | 0 | 0 | 43.680 | 0 |
| KIDNE2004864 | 0 | 0 | 0 | 0 | 0 | 0 | 6.382 |
| KIDNE2005676 | 0 | 0 | 0 | 0 | 0 | 0 | 3.679 |
| KIDNE2006009 | 0 | 0 | 0 | 0 | 0 | 0 | 9.640 |
| KIDNE2006014 | 0 | 0 | 0 | 0 | 0 | 20.315 | 1.941 |
| KIDNE2006030 | 0 | 0 | 15.012 | 0 | 0 | 0 | 1.395 |
| KIDNE2006248 | 0.671 | 0 | 0 | 0 | 0 | 2.127 | 0 |
| KIDNE2006760 | 0 | 0 | 0 | 0 | 0 | 0 | 4.410 |
| KIDNE2006775 | 0 | 0 | 12.888 | 0 | 0 | 0 | 2.395 |
| KIDNE2007328 | 3.816 | 0 | 0 | 0 | 0 | 0 | 0.578 |
| KIDNE2007352 | 0 | 0 | 0 | 0 | 0 | 0 | 0.543 |
| KIDNE2007910 | 19.546 | 0 | 0 | 0 | 0 | 0 | 0 |
| KIDNE2007954 | 0 | 0 | 29.658 | 0 | 0 | 0 | 0 |
| KIDNE2008022 | 0 | 0 | 0 | 0 | 0 | 0 | 15.790 |
| KIDNE2008048 | 2.314 | 0 | 3.774 | 0 | 0 | 0 | 0.351 |
| KIDNE2009367 | 0 | 0 | 0 | 0 | 0 | 0 | 1.478 |
| KIDNE2010750 | 0 | 0 | 0 | 0 | 0 | 0 | 13.925 |
| KIDNE2013346 | 0 | 0 | 0 | 0 | 0 | 0 | 27.273 |
| KIDNE2013845 | 2.411 | 0 | 0 | 0 | 0 | 0 | 0.731 |
| KIDNE2013866 | 0 | 0 | 0 | 0 | 0 | 0 | 15.790 |
| KIDNE2014290 | 1.512 | 0 | 9.863 | 0 | 0 | 0 | 3.208 |
| KIDNE2015710 | 0 | 0 | 0 | 39.504 | 0 | 0 | 0 |
| KIDNE2016570 | 0 | 0 | 0 | 0 | 0 | 0 | 15.790 |
| KIDNE2018217 | 0 | 0 | 0 | 0 | 0 | 41.518 | 0 |
| KIDNE2018352 | 0 | 0 | 0 | 0 | 0 | 0 | 9.324 |
| LIVER1000079 | 0 | 0 | 0 | 0 | 0 | 0 | 3.436 |
| LIVER1000126 | 0 | 0 | 0 | 0 | 0 | 0 | 5.011 |
| LIVER1000132 | 0 | 11.115 | 0 | 0 | 10.609 | 6.847 | 0.654 |
| LIVER1000542 | 0 | 0 | 0 | 0 | 0 | 0 | 6.883 |
| LIVER2000033 | 0 | 30.726 | 0 | 0 | 0 | 0 | 0 |
| LIVER2000416 | 0 | 0 | 0 | 0 | 0 | 0 | 1.479 |
| LIVER2000446 | 0 | 0 | 0 | 0 | 0 | 28.144 | 0 |
| LIVER2001113 | 0 | 0 | 0 | 0 | 0 | 0 | 7.012 |
| LIVER2001539 | 0 | 0 | 0 | 0 | 0 | 0 | 3.255 |
| LIVER2001608 | 0 | 0 | 0 | 0 | 0 | 8.985 | 0 |
| LIVER2002842 | 0 | 0 | 0 | 0 | 0 | 0 | 1.248 |
| LIVER2003581 | 0 | 0 | 0 | 0 | 70.979 | 0 | 0 |
| LIVER2005789 | 0 | 0 | 6.333 | 37.997 | 0 | 0 | 0 |
| LIVER2007783 | 4.425 | 0 | 0 | 0 | 0 | 0 | 0 |
| LYMPB1000141 | 0 | 0 | 0 | 0 | 0 | 0 | 2.800 |
| MAMGL1000032 | 0.695 | 0 | 1.133 | 6.801 | 0 | 1.102 | 0.421 |
| MAMGL1000035 | 0 | 0 | 0 | 0 | 0 | 0 | 0.658 |
| MAMGL1000100 | 0 | 0 | 0 | 0 | 0 | 0 | 0.193 |
| MAMGL1000173 | 1.143 | 0 | 0 | 0 | 0 | 0 | 0.347 |
| MESAN1000050 | 0 | 0 | 0 | 0 | 0 | 10.983 | 0 |
| MESAN1000080 | 3.079 | 0 | 0 | 0 | 0 | 0 | 1.867 |
| MESAN1000101 | 0 | 0 | 0 | 0 | 0 | 0 | 7.546 |
| MESAN2000092 | 0 | 0 | 0 | 0 | 0 | 0 | 5.784 |
| MESAN2000149 | 0 | 0 | 0 | 0 | 0 | 0 | 1.606 |
| MESAN2000267 | 0 | 0 | 0 | 0 | 0 | 0 | 0.268 |
| MESAN2000291 | 0 | 0 | 0 | 0 | 0 | 0 | 14.987 |
| MESAN2000434 | 0 | 0 | 0 | 0 | 0 | 0 | 14.987 |
| MESAN2000501 | 0 | 66.636 | 0 | 0 | 0 | 0 | 0 |
| MESAN2000909 | 0 | 0 | 0 | 0 | 0 | 0 | 3.610 |
| MESAN2001450 | 0 | 0 | 0 | 0 | 0 | 0 | 1.885 |
| MESAN2002086 | 0.898 | 0 | 0 | 0 | 0 | 2.848 | 0.272 |
| MESAN2002519 | 0 | 0 | 0 | 0 | 0 | 31.731 | 3.032 |
| MESAN2002724 | 25.857 | 0 | 0 | 0 | 0 | 0 | 0.603 |
| MESAN2002790 | 10.550 | 0 | 0 | 0 | 0 | 0 | 0 |
| MESAN2002844 | 0 | 0 | 0 | 0 | 0 | 0 | 4.737 |
| MESAN2002940 | 0 | 0 | 0 | 0 | 0 | 0 | 20.789 |
| MESAN2003444 | 8.035 | 0 | 0 | 0 | 0 | 0 | 4.870 |
| MESAN2003622 | 0 | 0 | 0 | 0 | 0 | 0 | 0.393 |
| MESAN2005633 | 0 | 0 | 0 | 0 | 0 | 0 | 11.221 |
| MESAN2005689 | 0 | 0 | 0 | 0 | 0 | 0 | 4.056 |
| MESAN2005766 | 0 | 0 | 6.937 | 0 | 0 | 0 | 2.578 |
| MESAN2005958 | 5.808 | 0 | 0 | 0 | 0 | 0 | 1.760 |
| MESAN2006563 | 0 | 0 | 0 | 0 | 0 | 0 | 0.451 |
| MESAN2007755 | 0 | 0 | 0 | 0 | 0 | 0 | 5.980 |
| MESAN2008679 | 0 | 0 | 49.292 | 0 | 0 | 0 | 0 |
| MESAN2009580 | 0 | 24.667 | 0 | 0 | 0 | 0 | 0 |
| MESAN2011984 | 3.680 | 0 | 0 | 0 | 0 | 0 | 1.115 |
| MESAN2012054 | 0 | 0 | 35.889 | 0 | 0 | 0 | 1.667 |
| MESAN2013284 | 0 | 0 | 0 | 0 | 0 | 0 | 0.803 |
| MESAN2014412 | 0 | 0 | 0 | 0 | 0 | 0 | 12.581 |
| MESAN2015515 | 0 | 0 | 0 | 0 | 0 | 0 | 1.736 |
| MESAN2016159 | 0 | 0 | 0 | 0 | 0 | 0 | 14.987 |
| NB9N41000121 | 0 | 0 | 0 | 0 | 0 | 5.138 | 1.473 |
| NB9N41000340 | 3.128 | 0 | 0 | 0 | 0 | 0 | 0 |
| NB9N42000104 | 0 | 0 | 0 | 0 | 0 | 0 | 1.626 |
| NB9N42000342 | 0 | 16.015 | 0 | 0 | 15.287 | 4.933 | 0 |
| NHNPC2000187 | 2.928 | 0 | 6.367 | 9.550 | 0 | 0 | 0 |
| NHNPC2000206 | 0 | 0 | 0 | 0 | 0 | 0 | 2.244 |
| NHNPC2000212 | 0 | 0 | 0 | 0 | 0 | 0 | 2.278 |
| NHNPC2001108 | 0 | 0 | 0 | 0 | 0 | 0 | 2.553 |
| NOVAR1000091 | 0 | 0 | 27.245 | 0 | 0 | 0 | 0 |
| NOVAR1000102 | 0 | 0 | 0 | 0 | 0 | 0 | 0.906 |
| NOVAR2000783 | 0 | 0 | 0 | 0 | 0 | 0 | 2.472 |
| NT2NE1000014 | 18.748 | 0 | 0 | 0 | 0 | 0 | 0 |
| NT2NE1000018 | 0 | 0 | 0 | 0 | 0 | 0 | 11.378 |
| NT2NE1000163 | 0 | 0 | 2.849 | 0 | 0 | 0 | 0.265 |
| NT2NE2000056 | 0 | 0 | 0 | 0 | 0 | 0 | 1.027 |
| NT2NE2000174 | 0 | 0 | 2.684 | 0 | 0 | 0 | 0.998 |
| NT2NE2000195 | 0 | 0 | 0 | 0 | 32.590 | 0 | 1.005 |
| NT2NE2000259 | 0 | 0 | 0 | 0 | 0 | 0 | 5.516 |
| NT2NE2000260 | 0 | 0 | 0.850 | 5.099 | 0 | 2.479 | 0 |
| NT2NE2000327 | 0 | 0 | 0 | 0 | 0 | 0 | 27.955 |
| NT2NE2000383 | 0 | 0 | 0 | 0 | 0 | 10.396 | 0.993 |
| NT2NE2000384 | 0 | 0 | 0 | 0 | 0 | 15.747 | 3.009 |
| NT2NE2000575 | 0 | 5.340 | 1.691 | 0 | 0 | 3.290 | 0.943 |
| NT2NE2000707 | 0.722 | 7.433 | 2.354 | 0 | 0 | 0 | 0.656 |
| NT2NE2000763 | 0 | 0 | 0 | 0 | 0 | 0 | 2.353 |
| NT2NE2000809 | 0 | 0 | 0 | 0 | 0 | 0 | 2.216 |
| NT2NE2000950 | 0 | 0 | 0 | 0 | 0 | 0 | 6.852 |
| NT2NE2000963 | 1.484 | 5.095 | 1.614 | 0 | 4.864 | 0 | 0.450 |
| NT2NE2001005 | 0 | 0 | 0 | 0 | 0 | 0 | 15.281 |
| NT2NE2001048 | 0 | 0 | 0 | 0 | 0 | 0 | 1.957 |
| NT2NE2001176 | 2.463 | 0 | 0 | 0 | 0 | 0 | 0 |
| NT2NE2001435 | 0 | 0 | 0 | 0 | 0 | 0 | 2.085 |
| NT2NE2001545 | 0 | 0 | 0 | 0 | 0 | 0 | 2.342 |
| NT2NE2001598 | 0 | 0 | 0 | 0 | 0 | 0 | 8.292 |
| NT2NE2001648 | 0 | 0 | 0 | 0 | 0 | 0 | 5.673 |
| NT2NE2001697 | 0 | 0 | 0 | 0 | 0 | 74.712 | 0 |
| NT2NE2001793 | 2.237 | 0 | 0 | 0 | 0 | 0 | 6.780 |
| NT2NE2002870 | 0 | 0 | 0 | 0 | 0 | 0 | 2.984 |
| NT2NE2003569 | 0 | 0 | 0 | 0 | 0 | 0 | 2.269 |
| NT2NE2003887 | 0 | 0 | 0 | 0 | 0 | 0 | 4.080 |
| NT2NE2003921 | 0 | 0 | 0 | 0 | 0 | 0 | 3.988 |
| NT2NE2004255 | 0 | 0 | 0 | 0 | 0 | 0 | 7.787 |
| NT2NE2005419 | 0 | 0 | 0 | 0 | 0 | 0 | 7.569 |
| NT2NE2005688 | 0 | 0 | 0 | 0 | 0 | 0 | 0.976 |
| NT2NE2006478 | 0 | 0 | 0 | 0 | 0 | 0 | 7.024 |
| NT2NE2006909 | 0 | 0 | 0 | 0 | 0 | 0 | 0.559 |
| NT2NE2008785 | 0 | 0 | 65.999 | 0 | 0 | 0 | 0 |
| NT2NE2010842 | 0 | 0 | 0 | 0 | 0 | 0 | 0.616 |
| NT2NE2010854 | 0 | 0 | 0 | 0 | 0 | 0 | 15.281 |
| NT2NE2011107 | 0 | 0 | 0 | 0 | 0 | 0 | 31.446 |
| NT2NE2011485 | 0 | 0 | 0 | 0 | 0 | 0 | 12.386 |
| NT2NE2012790 | 0 | 0 | 0 | 0 | 0 | 0 | 3.921 |
| NT2NE2014104 | 0 | 0 | 0 | 0 | 0 | 11.484 | 0 |
| NT2NE2017982 | 0 | 0 | 0 | 0 | 0 | 0 | 15.281 |
| NT2NE2018180 | 8.110 | 0 | 0 | 0 | 0 | 0 | 4.916 |
| NT2NE2018490 | 0 | 0 | 0 | 0 | 0 | 0 | 15.281 |
| NT2NE2019091 | 0 | 0 | 0 | 0 | 0 | 12.953 | 0 |
| NT2RI1000027 | 0 | 44.915 | 0 | 0 | 0 | 0 | 0 |
| NT2RI1000048 | 1.831 | 0 | 0 | 0 | 0 | 0 | 0 |
| NT2RI2000064 | 1.161 | 0 | 0 | 0 | 0 | 0 | 1.056 |
| NT2RI2000107 | 0 | 0 | 0 | 0 | 0 | 0 | 4.542 |
| NT2RI2000133 | 0 | 0 | 0 | 0 | 54.324 | 0 | 0 |
| NT2RI2000255 | 0 | 0 | 0 | 0 | 0 | 0 | 0.782 |
| NT2RI2000263 | 0 | 0 | 0 | 0 | 0 | 0 | 2.236 |
| NT2RI2000284 | 1.966 | 0 | 0 | 0 | 0 | 0 | 0.298 |
| NT2RI2000294 | 0 | 0 | 0 | 0 | 0 | 0 | 3.712 |
| NT2RI2000412 | 0 | 0 | 0 | 0 | 0 | 0 | 5.038 |
| NT2RI2000421 | 0 | 0 | 0 | 0 | 0 | 0 | 1.989 |
| NT2RI2000578 | 0 | 0 | 0 | 0 | 0 | 2.288 | 0.874 |
| NT2RI2000685 | 0 | 0 | 6.970 | 0 | 0 | 0 | 8.419 |
| NT2RI2000689 | 0 | 0 | 21.755 | 0 | 0 | 0 | 0 |
| NT2RI2000727 | 0.558 | 0 | 5.460 | 5.460 | 10.970 | 3.540 | 0.338 |
| NT2RI2001091 | 0 | 0 | 0 | 0 | 0 | 0 | 2.298 |
| NT2RI2001167 | 0 | 0 | 0 | 0 | 0 | 0 | 26.455 |
| NT2RI2001230 | 1.664 | 0 | 0 | 0 | 0 | 0 | 0 |
| NT2RI2001342 | 0 | 35.059 | 0 | 0 | 0 | 0 | 0 |
| NT2RI2001422 | 0 | 0 | 0 | 0 | 0 | 0 | 2.430 |
| NT2RI2001540 | 0.859 | 1.264 | 0.801 | 1.201 | 2.414 | 1.168 | 0.707 |
| NT2RI2001621 | 0 | 0 | 0 | 0 | 0 | 0 | 6.003 |
| NT2RI2001657 | 2.308 | 0 | 0 | 0 | 0 | 0 | 0.350 |
| NT2RI2001731 | 0 | 0 | 0 | 0 | 0 | 0 | 1.238 |
| NT2RI2001859 | 0 | 0 | 13.653 | 0 | 0 | 0 | 3.172 |
| NT2RI2001910 | 16.109 | 0 | 0 | 0 | 0 | 0 | 9.765 |
| NT2RI2002091 | 1.215 | 1.192 | 1.698 | 0.849 | 0.853 | 0.734 | 0.123 |
| NT2RI2002117 | 0 | 0 | 0 | 0 | 0 | 0 | 3.080 |
| NT2RI2002152 | 0 | 0 | 0 | 0 | 0 | 0 | 0.822 |
| NT2RI2002243 | 14.189 | 0 | 0 | 0 | 0 | 0 | 0 |
| NT2RI2002266 | 0 | 0 | 0 | 0 | 0 | 0 | 3.277 |
| NT2RI2002316 | 0 | 0 | 11.280 | 0 | 0 | 0 | 0 |
| NT2RI2002554 | 3.911 | 0 | 0 | 0 | 0 | 0 | 3.556 |
| NT2RI2002585 | 0 | 0 | 0 | 0 | 0 | 0 | 50.993 |
| NT2RI2002654 | 0 | 0 | 4.133 | 0 | 0 | 0 | 0 |
| NT2RI2002802 | 0 | 0 | 0 | 0 | 0 | 0 | 18.792 |
| NT2RI2002847 | 0 | 0 | 0 | 0 | 0 | 8.588 | 3.282 |
| NT2RI2002852 | 0 | 0 | 0 | 0 | 0 | 0 | 26.455 |
| NT2RI2003019 | 0 | 0 | 0 | 0 | 0 | 0 | 3.419 |
| NT2RI2003051 | 6.624 | 0 | 0 | 0 | 0 | 0 | 6.692 |
| NT2RI2003205 | 0 | 0 | 0 | 0 | 0 | 22.024 | 0 |
| NT2RI2003304 | 0 | 5.829 | 1.846 | 0 | 0 | 0 | 0.515 |
| NT2RI2003317 | 0 | 0 | 0 | 0 | 0 | 0 | 2.061 |
| NT2RI2003338 | 0 | 0 | 0 | 0 | 0 | 0 | 0.662 |
| NT2RI2003344 | 0 | 0 | 0 | 0 | 0 | 0 | 22.913 |
| NT2RI2003399 | 0 | 0 | 0 | 0 | 0 | 0 | 41.841 |
| NT2RI2003420 | 0 | 0 | 0 | 0 | 0 | 0 | 1.007 |
| NT2RI2003556 | 0 | 0 | 0 | 0 | 0 | 0 | 0.995 |
| NT2RI2003678 | 8.213 | 42.290 | 0 | 0 | 0 | 0 | 1.245 |
| NT2RI2003695 | 0 | 0 | 0 | 16.618 | 0 | 0 | 0.515 |
| NT2RI2003738 | 0 | 0 | 2.461 | 0 | 0 | 0 | 0.114 |
| NT2RI2003921 | 0 | 0 | 0 | 0 | 0 | 0 | 0.310 |
| NT2RI2003993 | 0 | 0 | 0 | 0 | 0 | 0 | 2.482 |
| NT2RI2004188 | 0 | 0 | 0 | 0 | 0 | 0 | 5.631 |
| NT2RI2004209 | 15.835 | 0 | 0 | 0 | 0 | 0 | 0 |
| NT2RI2004398 | 0 | 0 | 0 | 0 | 0 | 0 | 3.256 |
| NT2RI2004410 | 0 | 0 | 0 | 0 | 0 | 0 | 4.891 |
| NT2RI2004535 | 0 | 0 | 0 | 0 | 0 | 0 | 3.754 |
| NT2RI2004608 | 0 | 0 | 0 | 0 | 0 | 0 | 7.255 |
| NT2RI2005061 | 9.409 | 0 | 0 | 0 | 0 | 0 | 2.852 |
| NT2RI2005096 | 0 | 0 | 0 | 0 | 0 | 0 | 26.455 |
| NT2RI2005116 | 11.028 | 0 | 0 | 0 | 0 | 0 | 0.836 |
| NT2RI2005166 | 0 | 0 | 0 | 0 | 0 | 0 | 34.096 |
| NT2RI2005335 | 2.505 | 0 | 0 | 0 | 0 | 0 | 4.555 |
| NT2RI2005405 | 0.605 | 12.470 | 1.975 | 0 | 0 | 1.921 | 0.367 |
| NT2RI2005647 | 0 | 0 | 0 | 0 | 0 | 9.049 | 0 |
| NT2RI2005713 | 0 | 0 | 0 | 0 | 0 | 0 | 0.967 |
| NT2RI2005723 | 1.082 | 0 | 0 | 0 | 0 | 0 | 2.296 |
| NT2RI2005811 | 9.913 | 0 | 0 | 0 | 0 | 0 | 0 |
| NT2RI2005818 | 5.493 | 0 | 0 | 0 | 0 | 0 | 0 |
| NT2RI2006070 | 0 | 0 | 0 | 0 | 0 | 0 | 2.687 |
| NT2RI2006072 | 1.650 | 0 | 0 | 0 | 0 | 0 | 0.500 |
| NT2RI2006412 | 0 | 0 | 0 | 0 | 0 | 0 | 0.536 |
| NT2RI2006506 | 0 | 0 | 0 | 0 | 0 | 0 | 8.806 |
| NT2RI2006553 | 0 | 0 | 26.018 | 0 | 0 | 0 | 0 |
| NT2RI2006647 | 0 | 0 | 0 | 0 | 0 | 0 | 2.997 |
| NT2RI2006735 | 0 | 0 | 0 | 0 | 0 | 0 | 10.288 |
| NT2RI2006825 | 0 | 0 | 0 | 0 | 0 | 0 | 1.792 |
| NT2RI2006855 | 0 | 0 | 0 | 0 | 0 | 0 | 11.270 |
| NT2RI2006856 | 0 | 0 | 0 | 0 | 0 | 0 | 1.531 |
| NT2RI2006943 | 0 | 0 | 0 | 25.667 | 0 | 0 | 0 |
| NT2RI2007054 | 0 | 0 | 0 | 0 | 0 | 0 | 5.941 |
| NT2RI2007133 | 0 | 0 | 0 | 0 | 0 | 0 | 0.256 |
| NT2RI2007148 | 0 | 0 | 0 | 0 | 0 | 0 | 0.617 |
| NT2RI2007384 | 0.934 | 9.619 | 0 | 0 | 0 | 2.963 | 0.849 |
| NT2RI2007445 | 0 | 0 | 0 | 37.840 | 0 | 12.268 | 0 |
| NT2RI2007468 | 0 | 0 | 29.393 | 0 | 0 | 0 | 2.731 |
| NT2RI2007469 | 0 | 0 | 0 | 0 | 0 | 0 | 41.841 |
| NT2RI2007498 | 0 | 9.058 | 0 | 8.606 | 0 | 0 | 0.267 |
| NT2RI2007572 | 3.223 | 0 | 0 | 0 | 0 | 5.112 | 2.930 |
| NT2RI2007589 | 0 | 0 | 0 | 0 | 0 | 0 | 2.792 |
| NT2RI2007723 | 7.630 | 0 | 0 | 0 | 0 | 0 | 0 |
| NT2RI2007729 | 0 | 0 | 0 | 0 | 0 | 79.014 | 0 |
| NT2RI2007853 | 0 | 0 | 15.750 | 0 | 0 | 0 | 0 |
| NT2RI2007879 | 0 | 0 | 0 | 0 | 0 | 10.859 | 0 |
| NT2RI2008007 | 41.744 | 0 | 0 | 0 | 0 | 0 | 0 |
| NT2RI2008045 | 0 | 17.246 | 0 | 0 | 0 | 15.937 | 0 |
| NT2RI2008171 | 0 | 0 | 0 | 0 | 0 | 0 | 5.805 |
| NT2RI2008188 | 0 | 0 | 0 | 0 | 0 | 0 | 18.792 |
| NT2RI2008336 | 1.728 | 8.898 | 5.636 | 0 | 0 | 0 | 0.524 |
| NT2RI2008396 | 2.852 | 0 | 0 | 0 | 9.345 | 0 | 0.576 |
| NT2RI2008526 | 0 | 0 | 5.393 | 0 | 0 | 0 | 0 |
| NT2RI2008656 | 0 | 0 | 0 | 0 | 0 | 0 | 1.775 |
| NT2RI2008724 | 0 | 0 | 0 | 0 | 0 | 0 | 2.401 |
| NT2RI2008749 | 0 | 0 | 0 | 0 | 0 | 0 | 0.370 |
| NT2RI2008808 | 0 | 0 | 0 | 0 | 0 | 0 | 2.963 |
| NT2RI2008942 | 2.262 | 0 | 7.377 | 0 | 0 | 0 | 0.685 |
| NT2RI2009037 | 0 | 0 | 0 | 0 | 0 | 0 | 4.960 |
| NT2RI2009065 | 1.007 | 0 | 0 | 0 | 9.902 | 0 | 0.305 |
| NT2RI2009066 | 0 | 0 | 0 | 0 | 0 | 0 | 16.125 |
| NT2RI2009083 | 0 | 0 | 0 | 0 | 0 | 0 | 26.810 |
| NT2RI2009103 | 0 | 0 | 0 | 0 | 0 | 0 | 41.841 |
| NT2RI2009173 | 0 | 0 | 7.846 | 0 | 0 | 0 | 1.458 |
| NT2RI2009233 | 0 | 0 | 0 | 0 | 0 | 0 | 4.423 |
| NT2RI2009281 | 0 | 0 | 0 | 0 | 0 | 0 | 0.920 |
| NT2RI2009583 | 0 | 0 | 0 | 9.443 | 4.744 | 1.531 | 0.146 |
| NT2RI2012350 | 0.863 | 0 | 0 | 0 | 0 | 0 | 0.262 |
| NT2RI2012726 | 0 | 0 | 0 | 0 | 0 | 0 | 9.097 |
| NT2RI2013357 | 0 | 0 | 0 | 0 | 0 | 0 | 26.455 |
| NT2RI2015342 | 0 | 0 | 0 | 0 | 0 | 10.293 | 0.983 |
| NT2RI2015533 | 0 | 0 | 0 | 0 | 0 | 0 | 4.064 |
| NT2RI2018448 | 0 | 0 | 0 | 0 | 0 | 0 | 4.116 |
| NT2RI2024313 | 0 | 0 | 0 | 0 | 0 | 0 | 28.733 |
| NT2RI2024935 | 0 | 0 | 0 | 0 | 92.105 | 0 | 0 |
| NT2RI3001515 | 0 | 0 | 0 | 0 | 0 | 0 | 7.080 |
| NT2RI3003104 | 0 | 0 | 0 | 0 | 0 | 0 | 71.575 |
| NT2RI3005724 | 0 | 0 | 0 | 0 | 0 | 0 | 7.748 |
| NT2RI3006284 | 8.925 | 0 | 0 | 0 | 0 | 14.156 | 0 |
| NT2RI3006340 | 0 | 0 | 0 | 0 | 0 | 0 | 10.676 |
| NT2RI3007543 | 3.660 | 0 | 0 | 0 | 0 | 0 | 1.109 |
| NT2RI3009158 | 54.273 | 0 | 0 | 0 | 0 | 0 | 0 |
| NT2RP6000017 | 0 | 0 | 0 | 0 | 0 | 0 | 1.956 |
| NT2RP6000039 | 0 | 0 | 0 | 0 | 0 | 0 | 3.516 |
| NT2RP6000043 | 0 | 0 | 26.719 | 0 | 0 | 0 | 0 |
| NT2RP6000072 | 0 | 0 | 11.367 | 0 | 0 | 0 | 1.056 |
| NT2RP6000078 | 6.204 | 0 | 0 | 0 | 0 | 0 | 0 |
| NT2RP6000085 | 0 | 0 | 0 | 0 | 0 | 0 | 27.209 |
| NT2RP6000100 | 47.227 | 0 | 0 | 0 | 0 | 0 | 0 |
| NT2RP6000109 | 4.119 | 0 | 0 | 0 | 0 | 0 | 2.497 |
| NT2RP6000110 | 0 | 0 | 0 | 0 | 0 | 0 | 1.790 |
| NT2RP6000123 | 1.689 | 0 | 0 | 0 | 0 | 0 | 0.768 |
| NT2RP6000130 | 0 | 0 | 0 | 0 | 0 | 0 | 5.232 |
| NT2RP7000069 | 7.265 | 0 | 0 | 0 | 0 | 0 | 13.211 |
| NT2RP7000076 | 0 | 0 | 0 | 0 | 0 | 8.339 | 1.593 |
| NT2RP7000173 | 0 | 12.348 | 0 | 0 | 0 | 0 | 5.088 |
| NT2RP7000238 | 2.792 | 0 | 0 | 0 | 0 | 0 | 0.846 |
| NT2RP7000259 | 0 | 0 | 0 | 0 | 0 | 0 | 8.741 |
| NT2RP7000271 | 0 | 0 | 0 | 0 | 0 | 0 | 3.965 |
| NT2RP7000477 | 0 | 0 | 0 | 0 | 0 | 0 | 1.293 |
| NT2RP7000586 | 0 | 0 | 0 | 0 | 0 | 0 | 7.182 |
| NT2RP7000600 | 4.779 | 0 | 0 | 0 | 0 | 0 | 4.346 |
| NT2RP7000624 | 0 | 0 | 0 | 0 | 0 | 0 | 2.852 |
| NT2RP7000906 | 5.627 | 0 | 0 | 0 | 0 | 0 | 5.969 |
| NT2RP7001080 | 0 | 0 | 0 | 0 | 0 | 0 | 21.879 |
| NT2RP7001156 | 0 | 0 | 0 | 0 | 0 | 0 | 21.336 |
| NT2RP7001166 | 0 | 0 | 5.261 | 0 | 0 | 0 | 4.400 |
| NT2RP7001231 | 0 | 0 | 0 | 0 | 0 | 0 | 2.700 |
| NT2RP7001283 | 0 | 0 | 3.960 | 0 | 0 | 0 | 4.047 |
| NT2RP7001678 | 33.546 | 0 | 0 | 0 | 0 | 0 | 0 |
| NT2RP7001962 | 0 | 0 | 0 | 0 | 0 | 0 | 3.473 |
| NT2RP7002028 | 4.334 | 0 | 0 | 0 | 0 | 0 | 1.314 |
| NT2RP7002379 | 5.429 | 11.181 | 0 | 0 | 0 | 0 | 2.303 |
| NT2RP7002449 | 0 | 0 | 0 | 0 | 0 | 0 | 10.564 |
| NT2RP7002450 | 0 | 0 | 0 | 0 | 0 | 0 | 1.745 |
| NT2RP7002619 | 2.350 | 0 | 0 | 0 | 0 | 7.455 | 2.137 |
| NT2RP7002738 | 0 | 0 | 0 | 0 | 0 | 0 | 3.763 |
| NT2RP7002779 | 0 | 0 | 0 | 0 | 0 | 0 | 21.336 |
| NT2RP7002802 | 7.882 | 0 | 0 | 0 | 0 | 0 | 4.778 |
| NT2RP7002906 | 0 | 0 | 0 | 0 | 0 | 0 | 1.833 |
| NT2RP7002982 | 0 | 0 | 0 | 0 | 0 | 0 | 2.541 |
| NT2RP7003203 | 3.984 | 0 | 0 | 0 | 0 | 0 | 2.415 |
| NT2RP7003261 | 0 | 0 | 0 | 0 | 0 | 0 | 0.888 |
| NT2RP7003319 | 0 | 0 | 0 | 0 | 0 | 0 | 1.193 |
| NT2RP7003629 | 0 | 0 | 0 | 0 | 0 | 0 | 7.396 |
| NT2RP7003647 | 2.538 | 0 | 8.279 | 0 | 0 | 0 | 3.847 |
| NT2RP7003680 | 0 | 0 | 0 | 0 | 0 | 0 | 14.629 |
| NT2RP7003688 | 3.185 | 0 | 0 | 0 | 0 | 5.052 | 3.379 |
| NT2RP7003724 | 0 | 0 | 0 | 0 | 0 | 0 | 12.073 |
| NT2RP7003960 | 0 | 0 | 0 | 0 | 35.126 | 0 | 4.332 |
| NT2RP7004173 | 0 | 0 | 0 | 0 | 0 | 0 | 0.499 |
| NT2RP7004196 | 0 | 0 | 9.217 | 0 | 0 | 0 | 0 |
| NT2RP7004204 | 7.355 | 37.874 | 0 | 0 | 0 | 0 | 2.229 |
| NT2RP7004233 | 0 | 0 | 0 | 0 | 0 | 0 | 15.633 |
| NT2RP7004260 | 0 | 0 | 0 | 0 | 0 | 0 | 16.771 |
| NT2RP7004352 | 0 | 0 | 0 | 0 | 0 | 0 | 4.441 |
| NT2RP7004373 | 5.077 | 0 | 0 | 0 | 0 | 0 | 2.308 |
| NT2RP7004641 | 0 | 0 | 0 | 0 | 0 | 0 | 16.771 |
| NT2RP7004687 | 0 | 0 | 0 | 0 | 0 | 0 | 12.324 |
| NT2RP7004728 | 0 | 0 | 0 | 0 | 0 | 0 | 2.055 |
| NT2RP7004751 | 0 | 0 | 3.293 | 0 | 0 | 3.202 | 0 |
| NT2RP7004911 | 3.802 | 0 | 0 | 0 | 0 | 0 | 5.761 |
| NT2RP7004946 | 1.857 | 0 | 0 | 0 | 0 | 0 | 3.939 |
| NT2RP7005529 | 0 | 0 | 0 | 0 | 0 | 0 | 4.826 |
| NT2RP7005675 | 0 | 0 | 0 | 0 | 0 | 0 | 9.505 |
| NT2RP7005750 | 0 | 0 | 0 | 0 | 0 | 0 | 4.678 |
| NT2RP7006033 | 0 | 0 | 0 | 0 | 0 | 0 | 5.025 |
| NT2RP7006188 | 5.615 | 0 | 0 | 0 | 0 | 0 | 5.105 |
| NT2RP7006223 | 0 | 0 | 0 | 0 | 0 | 0 | 2.762 |
| NT2RP7006296 | 0 | 0 | 0 | 0 | 0 | 0 | 21.336 |
| NT2RP7006304 | 0 | 0 | 0 | 0 | 0 | 0 | 21.336 |
| NT2RP7006539 | 0 | 0 | 0 | 0 | 0 | 39.810 | 0 |
| NT2RP7006547 | 0 | 0 | 0 | 0 | 0 | 0 | 21.336 |
| NT2RP7006717 | 4.257 | 0 | 0 | 0 | 13.948 | 0 | 2.150 |
| NT2RP7007114 | 0 | 0 | 0 | 0 | 0 | 0 | 10.709 |
| NT2RP7007154 | 1.230 | 0 | 0 | 0 | 0 | 0 | 0 |
| NT2RP7007252 | 0 | 0 | 0 | 0 | 0 | 0 | 22.444 |
| NT2RP7007310 | 8.032 | 0 | 0 | 0 | 0 | 0 | 0 |
| NT2RP7007381 | 0 | 0 | 0 | 0 | 0 | 0 | 10.251 |
| NT2RP7007387 | 8.854 | 0 | 0 | 0 | 0 | 0 | 1.342 |
| NT2RP7007537 | 0 | 0 | 0 | 0 | 0 | 0 | 3.215 |
| NT2RP7007580 | 0 | 0 | 0 | 0 | 0 | 0 | 15.624 |
| NT2RP7007643 | 0 | 0 | 0 | 0 | 0 | 0 | 21.336 |
| NT2RP7007842 | 0 | 0 | 0 | 0 | 0 | 0 | 1.254 |
| NT2RP7007930 | 0 | 0 | 0 | 0 | 0 | 0 | 21.336 |
| NT2RP7008167 | 0 | 0 | 0 | 0 | 0 | 0 | 8.306 |
| NT2RP7008190 | 0 | 0 | 0 | 0 | 0 | 9.076 | 3.468 |
| NT2RP7008315 | 0 | 0 | 52.791 | 0 | 0 | 0 | 0 |
| NT2RP7008543 | 11.867 | 0 | 0 | 0 | 0 | 0 | 0 |
| NT2RP7009087 | 0 | 0 | 0 | 0 | 0 | 0 | 4.764 |
| NT2RP7009108 | 1.917 | 0 | 0 | 0 | 0 | 0 | 0 |
| NT2RP7009147 | 0 | 0 | 11.206 | 0 | 0 | 0 | 1.041 |
| NT2RP7009149 | 2.580 | 0 | 0 | 0 | 0 | 0 | 0 |
| NT2RP7009259 | 0 | 0 | 0 | 0 | 0 | 0 | 1.469 |
| NT2RP7009322 | 0 | 0 | 0 | 0 | 0 | 73.950 | 0 |
| NT2RP7009370 | 0 | 0 | 0 | 0 | 0 | 0 | 21.336 |
| NT2RP7009373 | 0 | 0 | 0 | 0 | 0 | 0 | 2.626 |
| NT2RP7009394 | 0 | 0 | 0 | 0 | 25.636 | 0 | 5.533 |
| NT2RP7009481 | 0 | 0 | 0 | 0 | 0 | 0 | 16.063 |
| NT2RP7009482 | 1.000 | 0 | 0 | 0 | 0 | 0 | 0.606 |
| NT2RP7014910 | 0 | 0 | 0 | 0 | 0 | 0 | 1.563 |
| NT2RP7020123 | 0 | 0 | 0 | 89.750 | 0 | 0 | 0 |
| NT2RP8000435 | 0 | 0 | 0 | 0 | 0 | 0 | 8.722 |
| NT2RP8007920 | 4.267 | 0 | 0 | 0 | 0 | 0 | 1.293 |
| NTONG1000033 | 2.643 | 0 | 0 | 0 | 0 | 0 | 4.004 |
| NTONG1000098 | 1.374 | 0 | 0 | 0 | 0 | 0 | 11.245 |
| NTONG1000246 | 0 | 0 | 0 | 0 | 0 | 0 | 6.133 |
| NTONG2000265 | 0 | 0 | 0 | 0 | 0 | 0 | 5.015 |
| NTONG2000334 | 0 | 0 | 0 | 0 | 0 | 0 | 1.336 |
| NTONG2000413 | 0 | 0 | 0 | 0 | 0 | 0 | 7.055 |
| NTONG2000800 | 0 | 0 | 0 | 0 | 0 | 21.737 | 0 |
| NTONG2000878 | 0 | 0 | 8.307 | 0 | 0 | 0 | 0 |
| NTONG2000977 | 2.120 | 0 | 0 | 0 | 0 | 6.726 | 0 |
| NTONG2000985 | 0 | 0 | 0 | 0 | 0 | 0 | 1.219 |
| NTONG2001137 | 2.468 | 25.420 | 0 | 0 | 0 | 7.830 | 0 |
| NTONG2001222 | 0 | 0 | 0 | 0 | 0 | 17.020 | 0 |
| NTONG2001550 | 0 | 0 | 0 | 0 | 0 | 0 | 2.275 |
| NTONG2001567 | 0.661 | 0 | 0 | 0 | 0 | 2.098 | 0.200 |
| NTONG2001587 | 0 | 0 | 0 | 0 | 0 | 12.221 | 0 |
| NTONG2001762 | 3.889 | 0 | 0 | 0 | 0 | 0 | 7.072 |
| NTONG2002582 | 0 | 0 | 0 | 0 | 0 | 0 | 9.834 |
| NTONG2003454 | 0 | 0 | 0 | 0 | 0 | 0 | 1.949 |
| NTONG2003928 | 0 | 0 | 0 | 0 | 0 | 0 | 3.808 |
| NTONG2004844 | 0 | 0 | 0 | 0 | 0 | 0 | 1.059 |
| NTONG2005391 | 0 | 0 | 0 | 0 | 0 | 0 | 7.619 |
| NTONG2005520 | 2.871 | 0 | 0 | 0 | 0 | 4.554 | 2.176 |
| NTONG2005801 | 0 | 0 | 25.065 | 0 | 0 | 0 | 5.823 |
| NTONG2006301 | 11.854 | 0 | 0 | 0 | 0 | 0 | 0 |
| NTONG2006484 | 0 | 0 | 0 | 0 | 0 | 29.574 | 0 |
| NTONG2007658 | 8.632 | 0 | 0 | 0 | 0 | 0 | 0 |
| NTONG2007693 | 0 | 0 | 0 | 0 | 0 | 48.142 | 0 |
| NTONG2008088 | 0 | 0 | 0 | 0 | 0 | 0 | 13.359 |
| NTONG2008483 | 0 | 0 | 0 | 0 | 0 | 0 | 3.133 |
| NTONG2008944 | 0 | 0 | 0 | 0 | 0 | 0 | 7.635 |
| NTONG2009576 | 15.325 | 0 | 0 | 0 | 0 | 0 | 0 |
| OCBBF1000086 | 0 | 0 | 0 | 0 | 0 | 0 | 1.001 |
| OCBBF1000185 | 18.160 | 0 | 0 | 0 | 0 | 0 | 2.752 |
| OCBBF1000188 | 2.246 | 0 | 0 | 0 | 0 | 0 | 2.042 |
| OCBBF1000315 | 0 | 0 | 0 | 0 | 0 | 0 | 22.877 |
| OCBBF2000013 | 4.197 | 0 | 0 | 0 | 0 | 0 | 0 |
| OCBBF2000015 | 0 | 0 | 0 | 0 | 0 | 0 | 0.517 |
| OCBBF2000467 | 0 | 0 | 0 | 0 | 0 | 0 | 1.318 |
| OCBBF2000831 | 0 | 0 | 0 | 0 | 0 | 0 | 9.442 |
| OCBBF2000846 | 0 | 0 | 0 | 0 | 15.515 | 0 | 0 |
| OCBBF2000982 | 0 | 0 | 0 | 0 | 0 | 0 | 1.710 |
| OCBBF2000986 | 6.235 | 0 | 6.779 | 0 | 0 | 0 | 0.630 |
| OCBBF2001140 | 0 | 0 | 0 | 0 | 0 | 0 | 18.479 |
| OCBBF2001166 | 0 | 0 | 0 | 0 | 0 | 0 | 3.583 |
| OCBBF2001186 | 38.181 | 0 | 0 | 0 | 0 | 0 | 0 |
| OCBBF2001210 | 0 | 0 | 0 | 0 | 0 | 0 | 4.740 |
| OCBBF2001252 | 0 | 0 | 0 | 0 | 0 | 0 | 3.009 |
| OCBBF2001408 | 0 | 0 | 0 | 0 | 0 | 0 | 12.622 |
| OCBBF2001416 | 0 | 0 | 0 | 0 | 0 | 0 | 27.283 |
| OCBBF2001492 | 0 | 0 | 9.653 | 0 | 0 | 0 | 0 |
| OCBBF2001528 | 0 | 0 | 0 | 0 | 0 | 0 | 21.673 |
| OCBBF2001586 | 0 | 0 | 0 | 0 | 0 | 0 | 2.344 |
| OCBBF2001687 | 0 | 0 | 0 | 0 | 0 | 0 | 6.287 |
| OCBBF2001794 | 0 | 0 | 0 | 0 | 0 | 0 | 15.452 |
| OCBBF2002083 | 0 | 0 | 0 | 0 | 0 | 0 | 7.183 |
| OCBBF2002086 | 0 | 0 | 0 | 0 | 0 | 0 | 12.636 |
| OCBBF2002656 | 0 | 0 | 0 | 0 | 0 | 0 | 1.081 |
| OCBBF2002865 | 0 | 0 | 0 | 0 | 0 | 0 | 34.478 |
| OCBBF2003052 | 0 | 0 | 0 | 0 | 0 | 0 | 7.449 |
| OCBBF2003518 | 0 | 0 | 0 | 0 | 0 | 0 | 0.674 |
| OCBBF2003819 | 0 | 0 | 0 | 0 | 0 | 0 | 13.773 |
| OCBBF2003925 | 0 | 0 | 0 | 0 | 0 | 0 | 0.545 |
| OCBBF2004273 | 3.867 | 19.909 | 6.305 | 0 | 0 | 0 | 0.586 |
| OCBBF2004757 | 0 | 0 | 0 | 0 | 0 | 0 | 1.620 |
| OCBBF2005476 | 10.083 | 0 | 0 | 0 | 0 | 0 | 0 |
| OCBBF2005956 | 0 | 0 | 0 | 0 | 0 | 0 | 3.711 |
| OCBBF2006005 | 0 | 0 | 0 | 0 | 0 | 0 | 9.349 |
| OCBBF2006151 | 0 | 0 | 0 | 0 | 0 | 0 | 3.769 |
| OCBBF2006987 | 0 | 0 | 0 | 0 | 0 | 0 | 8.449 |
| OCBBF2007028 | 0 | 0 | 0 | 0 | 0 | 0 | 0.903 |
| OCBBF2007224 | 20.365 | 0 | 0 | 0 | 0 | 0 | 6.172 |
| OCBBF2007354 | 2.167 | 0 | 0 | 0 | 0 | 0 | 1.313 |
| OCBBF2007415 | 0 | 0 | 0 | 0 | 0 | 0 | 1.047 |
| OCBBF2007829 | 0 | 0 | 3.862 | 0 | 11.641 | 0 | 0 |
| OCBBF2007892 | 0 | 0 | 0 | 0 | 0 | 0 | 2.785 |
| OCBBF2008041 | 0 | 0 | 0 | 0 | 0 | 0 | 4.099 |
| OCBBF2008144 | 6.220 | 0 | 0 | 0 | 0 | 0 | 1.885 |
| OCBBF2008770 | 0 | 0 | 0 | 0 | 0 | 0 | 8.741 |
| OCBBF2009242 | 0 | 0 | 0 | 0 | 0 | 0 | 3.702 |
| OCBBF2009424 | 0 | 0 | 0 | 0 | 0 | 0 | 9.487 |
| OCBBF2009772 | 0 | 0 | 0 | 0 | 0 | 0 | 0.770 |
| OCBBF2009836 | 0 | 0 | 0 | 0 | 0 | 0 | 2.678 |
| OCBBF2010819 | 0 | 0 | 0 | 0 | 0 | 0 | 8.199 |
| OCBBF2010830 | 0 | 0 | 0 | 0 | 0 | 6.020 | 0.575 |
| OCBBF2011021 | 0 | 0 | 0 | 0 | 0 | 0 | 1.890 |
| OCBBF2011536 | 0 | 0 | 0 | 0 | 0 | 0 | 1.304 |
| OCBBF2011759 | 2.016 | 0 | 0 | 0 | 0 | 0 | 3.054 |
| OCBBF2012001 | 0 | 0 | 0 | 0 | 0 | 0 | 16.277 |
| OCBBF2012553 | 0 | 0 | 0 | 0 | 0 | 0 | 0.767 |
| OCBBF2012821 | 5.397 | 0 | 17.601 | 0 | 0 | 0 | 1.636 |
| OCBBF2014292 | 2.234 | 0 | 0 | 0 | 0 | 0 | 0 |
| OCBBF2014541 | 0 | 0 | 0 | 0 | 0 | 0 | 2.563 |
| OCBBF2014873 | 0 | 0 | 0 | 0 | 0 | 0 | 27.813 |
| OCBBF2015334 | 0 | 0 | 0 | 0 | 0 | 0 | 34.478 |
| OCBBF2015797 | 0 | 0 | 0 | 0 | 0 | 0 | 34.478 |
| OCBBF2016928 | 0 | 0 | 0 | 0 | 0 | 0 | 1.790 |
| OCBBF2017398 | 2.774 | 0 | 0 | 0 | 0 | 0 | 0.841 |
| OCBBF2017458 | 0 | 0 | 0 | 0 | 0 | 0 | 3.639 |
| OCBBF2017754 | 0 | 0 | 0 | 0 | 0 | 0 | 4.909 |
| OCBBF2017791 | 0 | 0 | 0 | 0 | 0 | 0 | 1.675 |
| OCBBF2017815 | 0 | 0 | 0 | 0 | 0 | 0 | 34.478 |
| OCBBF2017893 | 7.482 | 0 | 12.202 | 0 | 0 | 0 | 0 |
| OCBBF2017920 | 0 | 0 | 0 | 0 | 0 | 0 | 8.417 |
| OCBBF2018563 | 0 | 0 | 0 | 0 | 0 | 0 | 26.887 |
| OCBBF2018618 | 0 | 0 | 0 | 0 | 0 | 0 | 10.601 |
| OCBBF2018707 | 0 | 0 | 0 | 0 | 0 | 0 | 1.470 |
| OCBBF2018827 | 10.583 | 0 | 0 | 0 | 0 | 0 | 0 |
| OCBBF2018873 | 0 | 0 | 9.748 | 0 | 0 | 0 | 1.812 |
| OCBBF2018956 | 0 | 0 | 0 | 0 | 0 | 0 | 1.106 |
| OCBBF2020048 | 0 | 0 | 0 | 0 | 0 | 0 | 34.478 |
| OCBBF2021020 | 0 | 0 | 18.756 | 0 | 0 | 0 | 0 |
| OCBBF2024850 | 4.793 | 0 | 0 | 0 | 0 | 0 | 7.263 |
| OCBBF3000296 | 0 | 0 | 0 | 0 | 0 | 0 | 12.384 |
| OCBBF3000323 | 7.173 | 0 | 0 | 0 | 0 | 0 | 0 |
| OCBBF3009244 | 0 | 0 | 0 | 0 | 0 | 0 | 22.513 |
| PEBLM1000066 | 0 | 0 | 0 | 0 | 0 | 32.424 | 0 |
| PEBLM1000144 | 25.871 | 0 | 0 | 0 | 0 | 0 | 0 |
| PEBLM2000030 | 0 | 0 | 0 | 0 | 0 | 0 | 28.870 |
| PEBLM2000222 | 1.253 | 0 | 0 | 0 | 0 | 0 | 0 |
| PEBLM2000267 | 0 | 0 | 0 | 0 | 0 | 0 | 2.757 |
| PEBLM2000308 | 0 | 0 | 0 | 0 | 0 | 0 | 2.592 |
| PEBLM2000326 | 0 | 0 | 0 | 0 | 0 | 0 | 7.097 |
| PEBLM2000338 | 20.527 | 0 | 0 | 0 | 0 | 0 | 0 |
| PEBLM2001072 | 7.823 | 0 | 0 | 0 | 0 | 0 | 0 |
| PEBLM2001803 | 22.296 | 0 | 0 | 0 | 0 | 0 | 0 |
| PEBLM2002749 | 0 | 0 | 48.344 | 0 | 0 | 0 | 0 |
| PEBLM2003914 | 0 | 0 | 0 | 0 | 0 | 0 | 5.556 |
| PEBLM2004452 | 0 | 0 | 0 | 0 | 0 | 0 | 5.293 |
| PEBLM2004666 | 0 | 0 | 26.137 | 0 | 0 | 0 | 2.429 |
| PEBLM2004733 | 0 | 0 | 0 | 0 | 0 | 0 | 6.247 |
| PEBLM2007774 | 0 | 0 | 2.119 | 0 | 0 | 0 | 0.591 |
| PEBLM2008826 | 20.003 | 0 | 0 | 0 | 0 | 0 | 0 |
| PEBLM2008861 | 0 | 0 | 0 | 50.799 | 0 | 0 | 0 |
| PERIC2003794 | 0 | 0 | 0 | 0 | 0 | 0 | 8.846 |
| PERIC2007068 | 0 | 0 | 0 | 0 | 0 | 0 | 6.052 |
| PLACE5000013 | 10.271 | 0 | 0 | 0 | 0 | 0 | 10.376 |
| PLACE5000067 | 0 | 0 | 0 | 0 | 0 | 0 | 26.863 |
| PLACE5000068 | 0 | 0 | 0 | 0 | 0 | 0 | 4.105 |
| PLACE5000113 | 3.711 | 0 | 0 | 0 | 0 | 0 | 8.997 |
| PLACE5000159 | 0 | 0 | 0 | 0 | 0 | 0 | 1.486 |
| PLACE5000170 | 0 | 0 | 0 | 0 | 0 | 0 | 4.545 |
| PLACE6000145 | 0 | 0 | 0 | 0 | 21.972 | 0 | 0 |
| PLACE6000263 | 0 | 0 | 0 | 0 | 0 | 0 | 0.994 |
| PLACE6000379 | 0.762 | 0 | 0 | 0 | 3.745 | 2.417 | 0.808 |
| PLACE6000414 | 11.055 | 0 | 0 | 0 | 0 | 0 | 1.675 |
| PLACE6000463 | 0 | 0 | 0 | 0 | 0 | 0 | 5.100 |
| PLACE6001064 | 2.475 | 0 | 4.036 | 0 | 0 | 3.925 | 2.250 |
| PLACE6001281 | 0 | 0 | 0 | 0 | 0 | 0 | 2.250 |
| PLACE6002084 | 0.797 | 0 | 2.598 | 0 | 0 | 0 | 0.241 |
| PLACE6002102 | 3.046 | 0 | 0 | 0 | 0 | 0 | 2.770 |
| PLACE6002960 | 0 | 0 | 0 | 0 | 0 | 0 | 1.451 |
| PLACE6003038 | 0 | 0 | 0 | 0 | 0 | 0 | 2.359 |
| PLACE6003077 | 54.790 | 0 | 0 | 0 | 0 | 0 | 0 |
| PLACE6003383 | 7.723 | 0 | 0 | 0 | 0 | 0 | 0 |
| PLACE6003393 | 16.378 | 0 | 0 | 0 | 0 | 0 | 0 |
| PLACE6004312 | 0 | 0 | 0 | 0 | 0 | 0 | 0.394 |
| PLACE6004397 | 0 | 0 | 0 | 0 | 0 | 0 | 1.201 |
| PLACE6004578 | 2.674 | 0 | 0 | 0 | 0 | 0 | 1.621 |
| PLACE6005231 | 0 | 0 | 0 | 0 | 0 | 0 | 14.439 |
| PLACE6005482 | 0 | 0 | 0 | 0 | 0 | 0 | 3.457 |
| PLACE6006418 | 5.979 | 0 | 0 | 0 | 0 | 18.968 | 0 |
| PLACE6006549 | 0 | 0 | 22.469 | 0 | 0 | 0 | 0 |
| PLACE6008775 | 0 | 0 | 0 | 0 | 0 | 12.610 | 0 |
| PLACE6008793 | 0 | 0 | 0 | 0 | 0 | 0 | 1.036 |
| PLACE6010077 | 0 | 19.338 | 6.125 | 0 | 0 | 0 | 0 |
| PLACE6010484 | 0 | 0 | 21.747 | 0 | 0 | 0 | 1.010 |
| PLACE6011057 | 0 | 0 | 0 | 0 | 0 | 0 | 5.893 |
| PLACE6011334 | 0 | 0 | 0 | 0 | 0 | 0 | 41.126 |
| PLACE6012028 | 0 | 0 | 0 | 0 | 0 | 0 | 4.103 |
| PLACE6013222 | 0 | 0 | 0 | 0 | 0 | 0 | 9.663 |
| PLACE6015051 | 0 | 0 | 0 | 0 | 0 | 0 | 3.013 |
| PLACE6015513 | 54.790 | 0 | 0 | 0 | 0 | 0 | 0 |
| PLACE6016383 | 13.944 | 0 | 0 | 0 | 0 | 0 | 0 |
| PLACE6017788 | 0 | 0 | 0 | 0 | 0 | 0 | 26.863 |
| PLACE6017791 | 0 | 0 | 0 | 0 | 0 | 0 | 7.180 |
| PLACE6018031 | 0 | 0 | 0 | 0 | 0 | 0 | 4.395 |
| PLACE6018287 | 0 | 0 | 0 | 0 | 0 | 0 | 15.516 |
| PLACE6019195 | 0 | 0 | 0 | 0 | 0 | 0 | 5.547 |
| PLACE7001022 | 0 | 0 | 0 | 0 | 0 | 0 | 18.395 |
| PLACE7004103 | 2.789 | 0 | 0 | 0 | 0 | 0 | 9.299 |
| PROST1000097 | 0 | 0 | 0 | 0 | 12.466 | 4.023 | 0.769 |
| PROST1000144 | 0 | 0 | 0 | 0 | 0 | 0 | 4.099 |
| PROST1000199 | 0 | 0 | 0 | 0 | 0 | 0 | 0.478 |
| PROST1000220 | 0 | 0 | 0 | 0 | 0 | 9.290 | 0 |
| PROST1000226 | 3.859 | 0 | 0 | 0 | 0 | 0 | 0 |
| PROST1000564 | 0 | 0 | 0 | 0 | 0 | 0 | 0.879 |
| PROST2000079 | 0 | 0 | 0 | 0 | 0 | 0 | 1.957 |
| PROST2000138 | 0.374 | 1.925 | 0 | 0 | 0 | 1.186 | 0.567 |
| PROST2000284 | 0 | 0 | 24.634 | 0 | 0 | 0 | 2.289 |
| PROST2000325 | 0 | 0 | 0 | 0 | 0 | 0 | 4.627 |
| PROST2000567 | 0 | 0 | 0 | 0 | 0 | 0 | 18.726 |
| PROST2001180 | 0 | 0 | 0 | 0 | 0 | 0 | 1.623 |
| PROST2001521 | 0 | 0 | 0 | 0 | 25.760 | 0 | 0 |
| PROST2001552 | 0 | 0 | 85.728 | 0 | 0 | 0 | 0 |
| PROST2001883 | 0 | 19.838 | 0 | 0 | 0 | 0 | 0 |
| PROST2001997 | 0 | 0 | 0 | 0 | 0 | 0 | 7.622 |
| PROST2003232 | 2.943 | 0 | 0 | 0 | 0 | 0 | 0.892 |
| PROST2003338 | 0 | 0 | 7.874 | 0 | 0 | 0 | 0 |
| PROST2004095 | 0 | 0 | 0 | 0 | 0 | 3.202 | 0.612 |
| PROST2004258 | 0 | 0 | 0 | 0 | 0 | 0 | 2.494 |
| PROST2004270 | 2.537 | 0 | 0 | 0 | 0 | 0 | 1.538 |
| PROST2004416 | 1.467 | 0 | 4.783 | 0 | 0 | 0 | 0.444 |
| PROST2004739 | 0 | 0 | 0 | 0 | 0 | 0 | 19.443 |
| PROST2005604 | 6.709 | 0 | 0 | 0 | 0 | 0 | 0 |
| PROST2006060 | 14.401 | 0 | 0 | 0 | 0 | 0 | 0 |
| PROST2006282 | 0 | 0 | 0 | 0 | 0 | 0 | 5.807 |
| PROST2006343 | 0 | 0 | 31.103 | 0 | 0 | 0 | 0 |
| PROST2006737 | 0 | 0 | 0 | 0 | 0 | 16.583 | 0 |
| PROST2007317 | 0 | 0 | 0 | 0 | 0 | 0 | 15.564 |
| PROST2007612 | 0 | 0 | 0 | 0 | 0 | 21.849 | 0 |
| PROST2007871 | 0 | 0 | 0 | 0 | 0 | 0 | 7.210 |
| PROST2008489 | 2.794 | 0 | 0 | 0 | 0 | 0 | 0 |
| PROST2008770 | 0 | 0 | 0 | 0 | 0 | 0 | 1.020 |
| PROST2010579 | 0 | 0 | 0 | 0 | 0 | 0 | 12.287 |
| PROST2011105 | 0 | 0 | 0 | 0 | 0 | 0 | 11.632 |
| PROST2011577 | 0 | 0 | 0 | 43.435 | 0 | 0 | 0 |
| PROST2012007 | 0 | 0 | 0 | 23.952 | 0 | 0 | 0.742 |
| PROST2012448 | 0 | 0 | 0 | 0 | 0 | 0 | 10.667 |
| PROST2012745 | 8.341 | 0 | 0 | 0 | 0 | 0 | 0 |
| PROST2013121 | 0 | 0 | 0 | 0 | 0 | 0 | 14.062 |
| PROST2015137 | 0 | 0 | 0 | 0 | 0 | 0 | 12.011 |
| PROST2017203 | 2.801 | 0 | 0 | 0 | 0 | 0 | 0.849 |
| PROST2019164 | 15.906 | 0 | 0 | 0 | 0 | 0 | 0 |
| PROST2019253 | 3.624 | 0 | 0 | 0 | 0 | 0 | 0 |
| PUAEN1000057 | 4.428 | 0 | 0 | 0 | 0 | 0 | 0 |
| PUAEN1000065 | 0 | 0 | 4.712 | 0 | 0 | 0 | 0 |
| PUAEN1000161 | 0 | 0 | 0 | 0 | 0 | 0 | 7.541 |
| PUAEN1000164 | 1.717 | 0 | 0 | 0 | 0 | 0 | 0.260 |
| PUAEN1000239 | 0 | 0 | 0 | 0 | 0 | 0 | 2.026 |
| PUAEN1000322 | 0 | 0 | 0 | 0 | 0 | 8.747 | 0 |
| PUAEN2000152 | 0 | 0 | 0 | 0 | 0 | 0 | 7.759 |
| PUAEN2000247 | 0 | 0 | 0 | 0 | 0 | 0 | 18.058 |
| PUAEN2000374 | 0 | 0 | 0 | 0 | 0 | 0 | 0.628 |
| PUAEN2000535 | 0 | 0 | 0 | 0 | 0 | 0 | 1.577 |
| PUAEN2001586 | 0 | 0 | 0 | 0 | 0 | 0 | 1.867 |
| PUAEN2005502 | 0 | 0 | 0 | 0 | 0 | 0 | 20.989 |
| PUAEN2007044 | 0 | 0 | 0 | 0 | 0 | 0 | 7.496 |
| PUAEN2008985 | 9.570 | 0 | 0 | 0 | 0 | 30.358 | 17.402 |
| RECTM1000051 | 0 | 0 | 0 | 0 | 0 | 15.792 | 0 |
| SALGL1000047 | 0 | 0 | 0 | 0 | 0 | 0 | 0.194 |
| SALGL1000107 | 0 | 0 | 0 | 0 | 0 | 0 | 0.404 |
| SALGL1000157 | 0.561 | 0 | 0 | 0 | 5.514 | 0 | 0 |
| SKMUS1000014 | 0 | 0 | 0 | 0 | 0 | 0 | 4.809 |
| SKMUS1000022 | 0 | 9.245 | 0 | 0 | 0 | 0 | 0 |
| SKMUS1000084 | 0 | 0 | 0 | 0 | 32.651 | 0 | 2.013 |
| SKMUS1000138 | 0 | 0 | 0 | 0 | 0 | 0 | 0.126 |
| SKMUS1000176 | 0 | 0 | 0 | 0 | 18.291 | 0 | 0 |
| SKMUS1000186 | 0.866 | 0 | 0 | 0 | 0 | 0 | 0.787 |
| SKMUS2000243 | 21.758 | 0 | 0 | 0 | 0 | 0 | 0 |
| SKMUS2000361 | 0 | 0 | 0 | 0 | 0 | 0 | 1.398 |
| SKMUS2000484 | 3.787 | 0 | 0 | 0 | 0 | 0 | 0 |
| SKMUS2000679 | 0 | 0 | 0 | 0 | 0 | 0 | 0.438 |
| SKMUS2000902 | 11.665 | 0 | 0 | 0 | 0 | 0 | 0 |
| SKMUS2000931 | 0 | 12.086 | 0 | 0 | 0 | 0 | 0.711 |
| SKMUS2000933 | 13.382 | 0 | 0 | 0 | 0 | 0 | 0 |
| SKMUS2000954 | 7.332 | 0 | 0 | 0 | 0 | 0 | 0 |
| SKMUS2000961 | 0 | 0 | 46.311 | 0 | 0 | 0 | 0 |
| SKMUS2001147 | 0 | 0 | 0 | 0 | 0 | 0 | 1.812 |
| SKMUS2001323 | 0 | 0 | 0 | 37.072 | 0 | 0 | 0 |
| SKMUS2001454 | 0.728 | 0 | 2.374 | 0 | 0 | 0 | 1.324 |
| SKMUS2001528 | 0 | 0 | 8.830 | 0 | 0 | 8.588 | 1.641 |
| SKMUS2001634 | 2.824 | 0 | 0 | 0 | 0 | 0 | 4.279 |
| SKMUS2003194 | 0 | 0 | 0 | 0 | 0 | 0 | 8.489 |
| SKMUS2004044 | 0 | 0 | 0 | 0 | 0 | 0 | 8.489 |
| SKMUS2004908 | 0 | 0 | 0 | 0 | 0 | 0 | 2.147 |
| SKNMC1000137 | 0 | 0 | 0 | 0 | 0 | 0 | 1.386 |
| SKNMC1000159 | 0 | 0 | 0 | 0 | 0 | 0 | 6.903 |
| SKNMC1000168 | 0 | 0 | 0 | 0 | 0 | 0 | 1.095 |
| SKNMC2000065 | 4.657 | 0 | 0 | 0 | 0 | 0 | 2.117 |
| SKNMC2000097 | 0 | 0 | 0 | 0 | 0 | 0 | 0.291 |
| SKNMC2000305 | 0 | 0 | 0 | 0 | 0 | 0 | 4.605 |
| SKNMC2000322 | 0 | 0 | 0 | 0 | 0 | 0 | 3.693 |
| SKNMC2000635 | 0.774 | 3.984 | 0 | 0 | 0 | 0 | 0.117 |
| SKNMC2000649 | 1.968 | 0 | 0 | 0 | 0 | 0 | 0 |
| SKNMC2000877 | 0 | 0 | 0 | 0 | 0 | 0 | 2.324 |
| SKNMC2001324 | 0 | 0 | 0 | 0 | 0 | 0 | 4.221 |
| SKNMC2001623 | 21.672 | 0 | 0 | 0 | 0 | 0 | 0 |
| SKNSH1000101 | 0 | 0 | 0 | 0 | 13.619 | 4.395 | 0 |
| SKNSH2000151 | 0 | 0 | 0 | 0 | 0 | 0 | 3.556 |
| SKNSH2000347 | 0 | 0 | 0 | 0 | 0 | 0 | 1.467 |
| SKNSH2000819 | 0 | 0 | 0 | 0 | 0 | 0 | 4.881 |
| SKNSH2003633 | 0 | 0 | 47.185 | 0 | 0 | 0 | 0 |
| SKNSH2005240 | 0 | 0 | 0 | 0 | 0 | 0 | 8.693 |
| SMINT1000016 | 0 | 0 | 0 | 0 | 0 | 0 | 1.604 |
| SMINT1000057 | 37.935 | 0 | 0 | 0 | 0 | 0 | 0 |
| SMINT1000117 | 0 | 29.214 | 0 | 0 | 0 | 0 | 4.299 |
| SMINT2000018 | 0 | 0 | 29.616 | 0 | 0 | 0 | 0 |
| SMINT2000441 | 0 | 0 | 9.526 | 0 | 0 | 6.176 | 1.180 |
| SMINT2000454 | 0 | 0 | 0 | 0 | 0 | 0 | 11.684 |
| SMINT2000545 | 10.226 | 0 | 0 | 0 | 0 | 0 | 0 |
| SMINT2000629 | 0 | 0 | 0 | 0 | 0 | 0 | 1.755 |
| SMINT2000659 | 0 | 0 | 0 | 0 | 0 | 1.901 | 0.182 |
| SMINT2000694 | 2.564 | 0 | 0 | 0 | 25.200 | 0 | 0 |
| SMINT2000933 | 6.594 | 0 | 0 | 0 | 0 | 0 | 0 |
| SMINT2001812 | 0 | 0 | 0 | 0 | 0 | 0 | 15.682 |
| SMINT2001818 | 2.022 | 0 | 0 | 0 | 0 | 0 | 0 |
| SMINT2002314 | 0 | 0 | 8.514 | 0 | 0 | 0 | 0 |
| SMINT2002689 | 2.535 | 0 | 0 | 0 | 0 | 0 | 0.768 |
| SMINT2002882 | 0 | 0 | 0 | 0 | 0 | 0 | 1.898 |
| SMINT2003074 | 0 | 0 | 0 | 28.929 | 0 | 0 | 0 |
| SMINT2003169 | 0 | 0 | 0 | 0 | 0 | 0 | 0.307 |
| SMINT2003905 | 0 | 0 | 0 | 0 | 0 | 5.297 | 2.024 |
| SMINT2004299 | 0 | 0 | 0 | 0 | 0 | 61.748 | 0 |
| SMINT2004589 | 0 | 0 | 28.193 | 0 | 0 | 0 | 0 |
| SMINT2004872 | 0 | 0 | 29.754 | 0 | 0 | 0 | 0 |
| SMINT2005368 | 2.533 | 26.084 | 0 | 0 | 0 | 8.035 | 0 |
| SMINT2006801 | 0 | 0 | 0 | 0 | 0 | 0 | 10.528 |
| SMINT2007729 | 0 | 0 | 0 | 0 | 0 | 39.345 | 0 |
| SMINT2008921 | 0 | 24.644 | 0 | 0 | 0 | 7.591 | 0.725 |
| SMINT2008960 | 5.902 | 0 | 4.813 | 0 | 0 | 0 | 1.342 |
| SMINT2009292 | 0 | 0 | 0 | 0 | 0 | 24.268 | 4.637 |
| SMINT2010639 | 0 | 0 | 0 | 0 | 0 | 0 | 1.771 |
| SMINT2010901 | 0 | 0 | 0 | 0 | 0 | 0 | 6.887 |
| SMINT2012122 | 7.540 | 0 | 0 | 0 | 0 | 0 | 0 |
| SMINT2013031 | 0 | 0 | 0 | 0 | 0 | 0 | 6.086 |
| SMINT2013032 | 25.797 | 0 | 0 | 0 | 0 | 0 | 0 |
| SMINT2014480 | 0 | 0 | 22.352 | 0 | 0 | 0 | 0 |
| SMINT2015294 | 17.171 | 0 | 0 | 0 | 0 | 0 | 0 |
| SMINT2016412 | 0 | 0 | 0 | 0 | 80.022 | 0 | 0 |
| SPLEN1000106 | 5.020 | 0 | 0 | 0 | 0 | 0 | 6.086 |
| SPLEN1000116 | 0 | 0 | 3.482 | 0 | 0 | 0 | 0 |
| SPLEN1000165 | 0 | 0 | 0 | 0 | 0 | 34.144 | 3.262 |
| SPLEN1000166 | 0 | 0 | 0 | 0 | 0 | 0 | 1.478 |
| SPLEN2000255 | 0 | 0 | 0 | 0 | 0 | 0 | 2.008 |
| SPLEN2000267 | 0 | 0 | 0 | 0 | 0 | 0 | 3.816 |
| SPLEN2000348 | 0 | 0 | 0 | 0 | 0 | 0 | 1.829 |
| SPLEN2000505 | 3.636 | 9.360 | 0 | 0 | 0 | 0 | 0.275 |
| SPLEN2000516 | 25.781 | 0 | 0 | 0 | 0 | 0 | 7.814 |
| SPLEN2000839 | 0 | 0 | 0 | 0 | 0 | 0 | 5.966 |
| SPLEN2000874 | 1.051 | 0 | 0 | 0 | 0 | 0 | 0 |
| SPLEN2000882 | 7.578 | 0 | 0 | 0 | 0 | 12.019 | 0 |
| SPLEN2001141 | 34.624 | 0 | 0 | 0 | 0 | 0 | 1.235 |
| SPLEN2001599 | 0 | 0 | 50.196 | 0 | 0 | 0 | 0 |
| SPLEN2001761 | 22.950 | 0 | 0 | 0 | 0 | 0 | 0 |
| SPLEN2002133 | 0 | 0 | 0 | 0 | 0 | 0 | 27.313 |
| SPLEN2002335 | 0 | 0 | 0 | 0 | 0 | 0 | 0.662 |
| SPLEN2004220 | 0 | 0 | 0 | 0 | 0 | 0 | 1.880 |
| SPLEN2004555 | 0 | 0 | 0 | 0 | 0 | 0 | 4.870 |
| SPLEN2004773 | 0 | 0 | 5.007 | 0 | 0 | 0 | 0 |
| SPLEN2004880 | 0 | 0 | 0 | 0 | 0 | 0 | 0.193 |
| SPLEN2004984 | 11.330 | 0 | 0 | 0 | 0 | 0 | 0 |
| SPLEN2005429 | 0 | 0 | 0 | 0 | 0 | 0 | 2.395 |
| SPLEN2005818 | 24.041 | 0 | 0 | 0 | 0 | 0 | 0 |
| SPLEN2005869 | 13.851 | 0 | 0 | 0 | 0 | 0 | 0 |
| SPLEN2006122 | 0 | 18.706 | 0 | 0 | 0 | 0 | 0.551 |
| SPLEN2006133 | 2.046 | 0 | 0 | 0 | 0 | 0 | 0 |
| SPLEN2006232 | 18.561 | 0 | 0 | 0 | 0 | 0 | 0 |
| SPLEN2006305 | 1.362 | 0 | 4.444 | 0 | 0 | 0 | 1.652 |
| SPLEN2006374 | 0 | 0 | 0 | 0 | 0 | 0 | 0.994 |
| SPLEN2007498 | 0 | 0 | 0 | 0 | 0 | 0 | 3.421 |
| SPLEN2007739 | 0 | 0 | 0 | 0 | 0 | 0 | 3.969 |
| SPLEN2007750 | 10.435 | 0 | 0 | 0 | 0 | 0 | 0 |
| SPLEN2008460 | 2.826 | 0 | 0 | 0 | 0 | 0 | 0 |
| SPLEN2008591 | 0 | 0 | 0 | 0 | 0 | 0 | 27.313 |
| SPLEN2009081 | 0 | 0 | 0 | 0 | 0 | 44.282 | 0 |
| SPLEN2009555 | 18.320 | 0 | 0 | 0 | 0 | 0 | 0 |
| SPLEN2009970 | 10.999 | 0 | 0 | 0 | 0 | 0 | 6.667 |
| SPLEN2010195 | 4.184 | 0 | 2.729 | 0 | 0 | 0 | 0.761 |
| SPLEN2010986 | 0 | 0 | 0 | 0 | 0 | 0 | 13.164 |
| SPLEN2011419 | 5.154 | 0 | 0 | 0 | 0 | 0 | 1.562 |
| SPLEN2012571 | 6.857 | 0 | 0 | 0 | 0 | 0 | 0 |
| SPLEN2012800 | 0.737 | 0 | 2.403 | 0 | 0 | 2.337 | 0 |
| SPLEN2014080 | 0 | 0 | 0 | 0 | 0 | 0 | 3.097 |
| SPLEN2014572 | 13.423 | 0 | 0 | 0 | 0 | 0 | 0 |
| SPLEN2014911 | 0 | 0 | 0 | 0 | 0 | 7.218 | 0 |
| SPLEN2015310 | 0 | 0 | 0 | 0 | 0 | 3.922 | 0.375 |
| SPLEN2015788 | 20.881 | 0 | 0 | 0 | 0 | 0 | 0 |
| SPLEN2016268 | 0.932 | 0 | 0 | 9.118 | 0 | 0 | 1.130 |
| SPLEN2016421 | 4.468 | 0 | 14.573 | 0 | 0 | 14.174 | 1.354 |
| SPLEN2016554 | 0 | 0 | 0 | 0 | 0 | 0 | 12.183 |
| SPLEN2016972 | 0 | 0 | 0 | 0 | 0 | 0 | 2.651 |
| SPLEN2017043 | 0 | 0 | 73.215 | 0 | 0 | 0 | 0 |
| SPLEN2017121 | 0 | 0 | 54.539 | 0 | 0 | 0 | 0 |
| SPLEN2017318 | 0 | 0 | 0 | 0 | 0 | 0 | 3.317 |
| SPLEN2017351 | 6.487 | 0 | 0 | 0 | 0 | 0 | 7.865 |
| SPLEN2019169 | 0 | 0 | 0 | 0 | 0 | 0 | 7.401 |
| SPLEN2019405 | 0 | 0 | 0 | 0 | 0 | 0 | 5.617 |
| SPLEN2021194 | 7.276 | 0 | 0 | 0 | 0 | 0 | 0 |
| SPLEN2022522 | 12.230 | 0 | 0 | 0 | 0 | 0 | 0.927 |
| SPLEN2023160 | 0 | 0 | 0 | 0 | 0 | 0 | 25.698 |
| SPLEN2023733 | 0 | 0 | 0 | 0 | 0 | 0 | 13.161 |
| SPLEN2026411 | 0 | 0 | 80.173 | 0 | 0 | 0 | 0 |
| SPLEN2027113 | 0 | 0 | 0 | 0 | 0 | 0 | 1.070 |
| SPLEN2028466 | 0.892 | 0 | 2.910 | 0 | 0 | 0 | 0 |
| SPLEN2028914 | 6.023 | 0 | 0 | 0 | 0 | 0 | 0 |
| SPLEN2031547 | 3.396 | 0 | 11.076 | 0 | 0 | 0 | 1.029 |
| SPLEN2036076 | 10.630 | 0 | 11.557 | 0 | 0 | 0 | 0 |
| SPLEN2038345 | 0 | 0 | 0 | 0 | 0 | 0 | 19.221 |
| SPLEN2038834 | 0 | 0 | 32.588 | 0 | 0 | 0 | 0 |
| SPLEN2039379 | 0 | 0 | 0 | 0 | 0 | 0 | 7.573 |
| SPLEN2042535 | 0 | 0 | 0 | 0 | 0 | 0 | 4.654 |
| STOMA1000189 | 0 | 0 | 22.002 | 0 | 0 | 0 | 0 |
| STOMA2000121 | 0 | 0 | 0 | 0 | 0 | 8.338 | 0 |
| STOMA2000257 | 4.257 | 0 | 0 | 41.658 | 0 | 0 | 2.581 |
| STOMA2000289 | 0 | 0 | 0 | 0 | 0 | 0 | 3.562 |
| STOMA2000395 | 0 | 0 | 0 | 0 | 0 | 14.605 | 0 |
| STOMA2000396 | 0 | 0 | 0 | 0 | 0 | 0 | 3.369 |
| STOMA2001389 | 0 | 0 | 0 | 0 | 0 | 39.515 | 0 |
| STOMA2002052 | 0 | 0 | 0 | 0 | 0 | 0 | 7.271 |
| STOMA2002166 | 0 | 0 | 0 | 0 | 0 | 0 | 0.765 |
| STOMA2002828 | 0 | 0 | 0 | 0 | 0 | 37.497 | 0 |
| STOMA2003444 | 0 | 0 | 0 | 0 | 0 | 0 | 8.764 |
| STOMA2004893 | 0 | 0 | 50.829 | 0 | 0 | 0 | 0 |
| STOMA2005782 | 0 | 0 | 0 | 0 | 0 | 0 | 8.764 |
| STOMA2006229 | 12.967 | 0 | 0 | 0 | 0 | 0 | 0 |
| STOMA2008638 | 0 | 0 | 0 | 0 | 0 | 50.134 | 0 |
| SYNOV1000045 | 15.151 | 0 | 0 | 0 | 0 | 0 | 0 |
| SYNOV1000049 | 47.227 | 0 | 0 | 0 | 0 | 0 | 0 |
| SYNOV1000118 | 45.640 | 0 | 0 | 0 | 0 | 0 | 0 |
| SYNOV1000124 | 1.200 | 0 | 3.913 | 0 | 0 | 3.806 | 0 |
| SYNOV1000128 | 31.662 | 0 | 0 | 0 | 0 | 0 | 0 |
| SYNOV1000164 | 8.294 | 0 | 0 | 0 | 0 | 0 | 0 |
| SYNOV1000190 | 100 | 0 | 0 | 0 | 0 | 0 | 0 |
| SYNOV1000256 | 100 | 0 | 0 | 0 | 0 | 0 | 0 |
| SYNOV1000374 | 42.798 | 0 | 0 | 0 | 0 | 0 | 12.971 |
| SYNOV2000152 | 100 | 0 | 0 | 0 | 0 | 0 | 0 |
| SYNOV2000171 | 100 | 0 | 0 | 0 | 0 | 0 | 0 |
| SYNOV2000173 | 100 | 0 | 0 | 0 | 0 | 0 | 0 |
| SYNOV2000177 | 100 | 0 | 0 | 0 | 0 | 0 | 0 |
| SYNOV2000178 | 100 | 0 | 0 | 0 | 0 | 0 | 0 |
| SYNOV2000193 | 100 | 0 | 0 | 0 | 0 | 0 | 0 |
| SYNOV2000251 | 100 | 0 | 0 | 0 | 0 | 0 | 0 |
| SYNOV2000279 | 100 | 0 | 0 | 0 | 0 | 0 | 0 |
| SYNOV2000291 | 67.888 | 0 | 0 | 0 | 0 | 0 | 0 |
| SYNOV2000297 | 100 | 0 | 0 | 0 | 0 | 0 | 0 |
| SYNOV2000397 | 51.386 | 0 | 0 | 0 | 0 | 0 | 0 |
| SYNOV2000426 | 100 | 0 | 0 | 0 | 0 | 0 | 0 |
| SYNOV2000601 | 100 | 0 | 0 | 0 | 0 | 0 | 0 |
| SYNOV2000700 | 100 | 0 | 0 | 0 | 0 | 0 | 0 |
| SYNOV2000820 | 75.240 | 0 | 0 | 0 | 0 | 0 | 0 |
| SYNOV2000824 | 100 | 0 | 0 | 0 | 0 | 0 | 0 |
| SYNOV2000923 | 100 | 0 | 0 | 0 | 0 | 0 | 0 |
| SYNOV2001014 | 100 | 0 | 0 | 0 | 0 | 0 | 0 |
| SYNOV2001033 | 1.293 | 13.317 | 4.218 | 0 | 0 | 8.204 | 0.392 |
| SYNOV2001035 | 100 | 0 | 0 | 0 | 0 | 0 | 0 |
| SYNOV2001088 | 100 | 0 | 0 | 0 | 0 | 0 | 0 |
| SYNOV2001111 | 100 | 0 | 0 | 0 | 0 | 0 | 0 |
| SYNOV2001144 | 3.051 | 0 | 0 | 0 | 0 | 9.677 | 0.925 |
| SYNOV2001212 | 23.502 | 0 | 0 | 0 | 0 | 0 | 0 |
| SYNOV2001239 | 0.677 | 0 | 0 | 0 | 0 | 0 | 0 |
| SYNOV2001251 | 100 | 0 | 0 | 0 | 0 | 0 | 0 |
| SYNOV2001262 | 4.500 | 0 | 0 | 0 | 0 | 0 | 1.364 |
| SYNOV2001300 | 100 | 0 | 0 | 0 | 0 | 0 | 0 |
| SYNOV2001356 | 100 | 0 | 0 | 0 | 0 | 0 | 0 |
| SYNOV2001374 | 3.950 | 0 | 0 | 0 | 0 | 0 | 0 |
| SYNOV2001390 | 100 | 0 | 0 | 0 | 0 | 0 | 0 |
| SYNOV2001451 | 100 | 0 | 0 | 0 | 0 | 0 | 0 |
| SYNOV2001457 | 100 | 0 | 0 | 0 | 0 | 0 | 0 |
| SYNOV2001468 | 19.684 | 0 | 0 | 0 | 0 | 0 | 0 |
| SYNOV2001581 | 11.360 | 0 | 0 | 0 | 55.833 | 0 | 0 |
| SYNOV2001648 | 7.012 | 0 | 7.623 | 0 | 22.975 | 0 | 0 |
| SYNOV2001660 | 100 | 0 | 0 | 0 | 0 | 0 | 0 |
| SYNOV2003326 | 100 | 0 | 0 | 0 | 0 | 0 | 0 |
| SYNOV2005216 | 21.061 | 0 | 0 | 0 | 0 | 66.809 | 0 |
| SYNOV2005448 | 100 | 0 | 0 | 0 | 0 | 0 | 0 |
| SYNOV2005541 | 30.878 | 0 | 0 | 0 | 0 | 0 | 0 |
| SYNOV2005673 | 100 | 0 | 0 | 0 | 0 | 0 | 0 |
| SYNOV2005817 | 100 | 0 | 0 | 0 | 0 | 0 | 0 |
| SYNOV2005962 | 100 | 0 | 0 | 0 | 0 | 0 | 0 |
| SYNOV2006430 | 100 | 0 | 0 | 0 | 0 | 0 | 0 |
| SYNOV2006620 | 66.043 | 0 | 0 | 0 | 0 | 0 | 0 |
| SYNOV2007758 | 42.201 | 0 | 0 | 0 | 0 | 0 | 0 |
| SYNOV2007965 | 100 | 0 | 0 | 0 | 0 | 0 | 0 |
| SYNOV2008765 | 3.113 | 0 | 0 | 0 | 0 | 0 | 0 |
| SYNOV2009172 | 1.122 | 0 | 0 | 0 | 0 | 3.560 | 0 |
| SYNOV2011233 | 100 | 0 | 0 | 0 | 0 | 0 | 0 |
| SYNOV2012326 | 100 | 0 | 0 | 0 | 0 | 0 | 0 |
| SYNOV2013365 | 100 | 0 | 0 | 0 | 0 | 0 | 0 |
| SYNOV2013637 | 100 | 0 | 0 | 0 | 0 | 0 | 0 |
| SYNOV2014157 | 76.742 | 0 | 0 | 0 | 0 | 0 | 23.258 |
| SYNOV2014364 | 100 | 0 | 0 | 0 | 0 | 0 | 0 |
| SYNOV2016124 | 100 | 0 | 0 | 0 | 0 | 0 | 0 |
| SYNOV2016837 | 100 | 0 | 0 | 0 | 0 | 0 | 0 |
| SYNOV2017055 | 36.415 | 0 | 0 | 0 | 0 | 0 | 0 |
| SYNOV2017179 | 100 | 0 | 0 | 0 | 0 | 0 | 0 |
| SYNOV2018921 | 100 | 0 | 0 | 0 | 0 | 0 | 0 |
| SYNOV2019280 | 100 | 0 | 0 | 0 | 0 | 0 | 0 |
| SYNOV2020085 | 100 | 0 | 0 | 0 | 0 | 0 | 0 |
| SYNOV2020463 | 9.451 | 0 | 0 | 0 | 0 | 0 | 0 |
| SYNOV2021320 | 100 | 0 | 0 | 0 | 0 | 0 | 0 |
| SYNOV2021953 | 61.927 | 0 | 0 | 0 | 0 | 0 | 31.281 |
| SYNOV3000184 | 100 | 0 | 0 | 0 | 0 | 0 | 0 |
| SYNOV3000231 | 100 | 0 | 0 | 0 | 0 | 0 | 0 |
| SYNOV3000302 | 100 | 0 | 0 | 0 | 0 | 0 | 0 |
| SYNOV3000345 | 100 | 0 | 0 | 0 | 0 | 0 | 0 |
| SYNOV4000249 | 51.386 | 0 | 0 | 0 | 0 | 0 | 0 |
| SYNOV4000472 | 100 | 0 | 0 | 0 | 0 | 0 | 0 |
| SYNOV4000598 | 64.392 | 0 | 0 | 0 | 0 | 0 | 0 |
| SYNOV4000706 | 100 | 0 | 0 | 0 | 0 | 0 | 0 |
| SYNOV4001153 | 5.003 | 0 | 0 | 0 | 0 | 0 | 0 |
| SYNOV4001224 | 64.392 | 0 | 0 | 0 | 0 | 0 | 0 |
| SYNOV4001326 | 65.818 | 0 | 0 | 0 | 0 | 0 | 0 |
| SYNOV4001342 | 100 | 0 | 0 | 0 | 0 | 0 | 0 |
| SYNOV4001395 | 78.340 | 0 | 0 | 0 | 0 | 0 | 0 |
| SYNOV4002001 | 100 | 0 | 0 | 0 | 0 | 0 | 0 |
| SYNOV4002392 | 100 | 0 | 0 | 0 | 0 | 0 | 0 |
| SYNOV4002875 | 100 | 0 | 0 | 0 | 0 | 0 | 0 |
| SYNOV4002883 | 51.635 | 0 | 0 | 0 | 0 | 0 | 0 |
| SYNOV4003174 | 100 | 0 | 0 | 0 | 0 | 0 | 0 |
| SYNOV4003322 | 100 | 0 | 0 | 0 | 0 | 0 | 0 |
| SYNOV4003681 | 100 | 0 | 0 | 0 | 0 | 0 | 0 |
| SYNOV4003981 | 100 | 0 | 0 | 0 | 0 | 0 | 0 |
| SYNOV4004184 | 100 | 0 | 0 | 0 | 0 | 0 | 0 |
| SYNOV4004741 | 100 | 0 | 0 | 0 | 0 | 0 | 0 |
| SYNOV4004823 | 49.051 | 0 | 0 | 0 | 0 | 0 | 0 |
| SYNOV4004914 | 100 | 0 | 0 | 0 | 0 | 0 | 0 |
| SYNOV4005256 | 76.742 | 0 | 0 | 0 | 0 | 0 | 23.258 |
| SYNOV4005570 | 100 | 0 | 0 | 0 | 0 | 0 | 0 |
| SYNOV4005739 | 100 | 0 | 0 | 0 | 0 | 0 | 0 |
| SYNOV4005889 | 100 | 0 | 0 | 0 | 0 | 0 | 0 |
| SYNOV4005981 | 100 | 0 | 0 | 0 | 0 | 0 | 0 |
| SYNOV4005989 | 44.519 | 0 | 0 | 0 | 0 | 0 | 0 |
| SYNOV4006256 | 100 | 0 | 0 | 0 | 0 | 0 | 0 |
| SYNOV4006327 | 33.336 | 0 | 0 | 0 | 0 | 0 | 0 |
| SYNOV4006542 | 87.954 | 0 | 0 | 0 | 0 | 0 | 0 |
| SYNOV4007012 | 72.118 | 0 | 0 | 0 | 0 | 0 | 0 |
| SYNOV4007215 | 100 | 0 | 0 | 0 | 0 | 0 | 0 |
| SYNOV4007360 | 100 | 0 | 0 | 0 | 0 | 0 | 0 |
| SYNOV4007430 | 68.323 | 0 | 0 | 0 | 0 | 0 | 0 |
| SYNOV4007521 | 100 | 0 | 0 | 0 | 0 | 0 | 0 |
| SYNOV4007553 | 72.118 | 0 | 0 | 0 | 0 | 0 | 0 |
| SYNOV4007671 | 1.581 | 0 | 0 | 0 | 0 | 0 | 1.917 |
| SYNOV4007711 | 100 | 0 | 0 | 0 | 0 | 0 | 0 |
| SYNOV4008245 | 19.926 | 0 | 0 | 0 | 0 | 0 | 0 |
| SYNOV4008336 | 100 | 0 | 0 | 0 | 0 | 0 | 0 |
| SYNOV4009129 | 16.744 | 0 | 0 | 0 | 0 | 0 | 0 |
| SYNOV4009139 | 100 | 0 | 0 | 0 | 0 | 0 | 0 |
| SYNOV4009298 | 63.453 | 0 | 0 | 0 | 0 | 0 | 0 |
| SYNOV4009575 | 10.334 | 0 | 0 | 0 | 0 | 0 | 0 |
| T1ESE2000116 | 0 | 96.382 | 0 | 0 | 0 | 0 | 0 |
| T1ESE2000609 | 0 | 50.485 | 0 | 0 | 0 | 0 | 0 |
| T1ESE2000904 | 0 | 51.278 | 0 | 0 | 0 | 0 | 0 |
| T1ESE2002665 | 0 | 92.582 | 0 | 0 | 0 | 0 | 0 |
| TBAES2000004 | 0 | 0 | 100 | 0 | 0 | 0 | 0 |
| TBAES2000059 | 0 | 0 | 84.801 | 0 | 0 | 0 | 0 |
| TBAES2000116 | 0 | 0 | 79.809 | 0 | 0 | 0 | 0 |
| TBAES2000255 | 0 | 0 | 100 | 0 | 0 | 0 | 0 |
| TBAES2000315 | 0 | 0 | 100 | 0 | 0 | 0 | 0 |
| TBAES2000352 | 0 | 0 | 50.050 | 0 | 0 | 0 | 0 |
| TBAES2000932 | 0 | 0 | 100 | 0 | 0 | 0 | 0 |
| TBAES2001171 | 0 | 0 | 100 | 0 | 0 | 0 | 0 |
| TBAES2001220 | 0 | 0 | 100 | 0 | 0 | 0 | 0 |
| TBAES2001229 | 0 | 0 | 100 | 0 | 0 | 0 | 0 |
| TBAES2001258 | 0 | 0 | 66.863 | 0 | 0 | 0 | 0 |
| TBAES2001296 | 0 | 0 | 79.254 | 0 | 0 | 0 | 0 |
| TBAES2001492 | 0 | 0 | 100 | 0 | 0 | 0 | 0 |
| TBAES2001553 | 6.344 | 0 | 20.692 | 62.076 | 0 | 0 | 0 |
| TBAES2001751 | 0 | 0 | 100 | 0 | 0 | 0 | 0 |
| TBAES2003435 | 0 | 0 | 100 | 0 | 0 | 0 | 0 |
| TBAES2003492 | 0 | 0 | 100 | 0 | 0 | 0 | 0 |
| TBAES2003550 | 0 | 0 | 100 | 0 | 0 | 0 | 0 |
| TBAES2003702 | 0 | 0 | 85.503 | 0 | 0 | 0 | 0 |
| TBAES2003917 | 0 | 0 | 100 | 0 | 0 | 0 | 0 |
| TBAES2004055 | 0 | 0 | 100 | 0 | 0 | 0 | 0 |
| TBAES2004105 | 0 | 0 | 100 | 0 | 0 | 0 | 0 |
| TBAES2004939 | 0 | 0 | 100 | 0 | 0 | 0 | 0 |
| TBAES2005157 | 0 | 0 | 100 | 0 | 0 | 0 | 0 |
| TBAES2005361 | 0 | 0 | 100 | 0 | 0 | 0 | 0 |
| TBAES2005543 | 0 | 0 | 100 | 0 | 0 | 0 | 0 |
| TBAES2006568 | 0 | 0 | 100 | 0 | 0 | 0 | 0 |
| TBAES2006881 | 0 | 0 | 100 | 0 | 0 | 0 | 0 |
| TBAES2007379 | 0 | 0 | 100 | 0 | 0 | 0 | 0 |
| TBAES2007428 | 0 | 0 | 37.783 | 0 | 0 | 0 | 0 |
| TBAES2007481 | 0 | 0 | 100 | 0 | 0 | 0 | 0 |
| TBAES2007504 | 0 | 0 | 100 | 0 | 0 | 0 | 0 |
| TBAES2007548 | 0 | 0 | 100 | 0 | 0 | 0 | 0 |
| TBAES2007697 | 0 | 0 | 100 | 0 | 0 | 0 | 0 |
| TBAES2007862 | 0 | 0 | 100 | 0 | 0 | 0 | 0 |
| TBAES2007964 | 0 | 0 | 100 | 0 | 0 | 0 | 0 |
| TBAES2008133 | 0 | 0 | 100 | 0 | 0 | 0 | 0 |
| TBAES2009387 | 0 | 0 | 7.521 | 0 | 0 | 0 | 0.349 |
| TCERX2000171 | 0 | 0 | 0 | 100 | 0 | 0 | 0 |
| TCERX2000431 | 0 | 0 | 0 | 44.331 | 0 | 0 | 0 |
| TCERX2000613 | 0 | 0 | 0 | 85.503 | 0 | 0 | 0 |
| TCERX2000998 | 0 | 0 | 0 | 100 | 0 | 0 | 0 |
| TCERX2002644 | 0 | 0 | 24.136 | 72.407 | 0 | 0 | 0 |
| TCOLN1000037 | 0 | 0 | 0 | 0 | 100 | 0 | 0 |
| TCOLN1000180 | 0 | 0 | 0 | 0 | 51.906 | 0 | 0 |
| TCOLN2000139 | 0 | 0 | 0 | 0 | 100 | 0 | 0 |
| TCOLN2000236 | 0 | 0 | 0 | 0 | 100 | 0 | 0 |
| TCOLN2000641 | 0 | 0 | 0 | 0 | 100 | 0 | 0 |
| TCOLN2001268 | 0 | 0 | 0 | 0 | 100 | 0 | 0 |
| TCOLN2002047 | 0 | 0 | 0 | 0 | 100 | 0 | 0 |
| TCOLN2002278 | 0 | 0 | 0 | 0 | 100 | 0 | 0 |
| TESOP1000035 | 0 | 0 | 0 | 0 | 0 | 30.261 | 0 |
| TESOP1000127 | 0 | 0 | 0 | 0 | 0 | 65.101 | 0 |
| TESOP1000160 | 0 | 0 | 0 | 0 | 0 | 100 | 0 |
| TESOP2000083 | 0 | 0 | 0 | 0 | 0 | 100 | 0 |
| TESOP2000090 | 0 | 0 | 0 | 0 | 0 | 100 | 0 |
| TESOP2000205 | 0 | 0 | 0 | 0 | 0 | 100 | 0 |
| TESOP2000312 | 0 | 0 | 0 | 0 | 0 | 66.097 | 0 |
| TESOP2000390 | 0 | 0 | 0 | 0 | 0 | 100 | 0 |
| TESOP2000400 | 0 | 0 | 0 | 0 | 0 | 100 | 0 |
| TESOP2000510 | 0 | 0 | 0 | 0 | 0 | 100 | 0 |
| TESOP2000527 | 0 | 0 | 0 | 0 | 0 | 70.604 | 0 |
| TESOP2000569 | 0 | 0 | 0 | 0 | 0 | 100 | 0 |
| TESOP2000739 | 0 | 0 | 0 | 0 | 0 | 100 | 0 |
| TESOP2000801 | 0 | 0 | 0 | 0 | 0 | 100 | 0 |
| TESOP2001122 | 0 | 0 | 0 | 0 | 0 | 100 | 0 |
| TESOP2001166 | 0 | 0 | 0 | 0 | 0 | 100 | 0 |
| TESOP2001345 | 0 | 0 | 0 | 0 | 0 | 100 | 0 |
| TESOP2001474 | 0 | 0 | 0 | 0 | 0 | 100 | 0 |
| TESOP2001796 | 0 | 0 | 0 | 0 | 0 | 100 | 0 |
| TESOP2001818 | 0 | 0 | 0 | 0 | 0 | 100 | 0 |
| TESOP2001849 | 0 | 0 | 0 | 0 | 0 | 100 | 0 |
| TESOP2001865 | 0 | 0 | 0 | 0 | 0 | 100 | 0 |
| TESOP2001901 | 0 | 0 | 0 | 0 | 0 | 100 | 0 |
| TESOP2001953 | 0 | 0 | 0 | 0 | 0 | 89.137 | 0 |
| TESOP2002005 | 0 | 0 | 0 | 0 | 0 | 100 | 0 |
| TESOP2002110 | 0 | 0 | 0 | 0 | 0 | 100 | 0 |
| TESOP2002150 | 0 | 0 | 0 | 0 | 0 | 100 | 0 |
| TESOP2002273 | 0 | 0 | 0 | 0 | 0 | 27.770 | 2.653 |
| TESOP2002451 | 0 | 0 | 0 | 0 | 0 | 16.251 | 0 |
| TESOP2002489 | 0 | 0 | 0 | 0 | 0 | 100 | 0 |
| TESOP2002539 | 0 | 0 | 0 | 0 | 0 | 100 | 0 |
| TESOP2002545 | 0 | 0 | 0 | 0 | 0 | 100 | 0 |
| TESOP2002804 | 0 | 0 | 0 | 0 | 0 | 100 | 0 |
| TESOP2002950 | 0 | 0 | 0 | 0 | 0 | 90.601 | 0 |
| TESOP2003273 | 0 | 0 | 0 | 0 | 0 | 100 | 0 |
| TESOP2003308 | 0 | 0 | 0 | 0 | 0 | 100 | 0 |
| TESOP2003553 | 0 | 0 | 0 | 0 | 0 | 100 | 0 |
| TESOP2003753 | 0 | 0 | 0 | 0 | 0 | 100 | 0 |
| TESOP2004110 | 0 | 0 | 0 | 0 | 0 | 100 | 0 |
| TESOP2004114 | 0 | 0 | 0 | 0 | 0 | 100 | 0 |
| TESOP2004173 | 0 | 0 | 0 | 0 | 0 | 100 | 0 |
| TESOP2004214 | 0 | 0 | 0 | 0 | 0 | 100 | 0 |
| TESOP2005199 | 0 | 0 | 0 | 0 | 0 | 100 | 0 |
| TESOP2005285 | 0 | 0 | 0 | 0 | 0 | 100 | 0 |
| TESOP2005485 | 0 | 0 | 0 | 0 | 0 | 100 | 0 |
| TESOP2005498 | 0 | 0 | 0 | 0 | 0 | 100 | 0 |
| TESOP2005579 | 0 | 0 | 0 | 0 | 0 | 100 | 0 |
| TESOP2006041 | 0 | 0 | 0 | 0 | 0 | 100 | 0 |
| TESOP2006053 | 0 | 0 | 0 | 0 | 0 | 50.390 | 0 |
| TESOP2006060 | 0 | 0 | 0 | 0 | 0 | 100 | 0 |
| TESOP2006068 | 0 | 0 | 0 | 0 | 0 | 100 | 0 |
| TESOP2006110 | 0 | 0 | 0 | 0 | 0 | 100 | 0 |
| TESOP2006398 | 0 | 0 | 0 | 0 | 0 | 100 | 0 |
| TESOP2006670 | 0 | 0 | 0 | 0 | 0 | 79.728 | 0 |
| TESOP2006704 | 0 | 0 | 0 | 0 | 0 | 100 | 0 |
| TESOP2006746 | 0 | 0 | 0 | 0 | 0 | 100 | 0 |
| TESOP2006865 | 0 | 0 | 0 | 0 | 0 | 100 | 0 |
| TESOP2006893 | 0 | 0 | 0 | 0 | 0 | 58.778 | 0 |
| TESOP2007041 | 0 | 0 | 0 | 0 | 0 | 100 | 0 |
| TESOP2007052 | 0 | 0 | 0 | 0 | 0 | 100 | 0 |
| TESOP2007262 | 0 | 0 | 0 | 0 | 0 | 100 | 0 |
| TESOP2007384 | 0 | 0 | 0 | 0 | 0 | 13.734 | 0 |
| TESOP2007636 | 0 | 0 | 0 | 0 | 0 | 100 | 0 |
| TESOP2007674 | 0 | 0 | 0 | 0 | 0 | 100 | 0 |
| TESOP2007688 | 0 | 0 | 0 | 0 | 0 | 100 | 0 |
| TESOP2007725 | 0 | 0 | 0 | 0 | 0 | 100 | 0 |
| TESOP2007912 | 0 | 0 | 0 | 0 | 0 | 78.739 | 0 |
| TESOP2007978 | 0 | 0 | 0 | 0 | 0 | 100 | 0 |
| TESOP2008127 | 0 | 0 | 0 | 0 | 0 | 100 | 0 |
| TESOP2008552 | 0 | 0 | 0 | 0 | 0 | 100 | 0 |
| TESOP2008556 | 0 | 0 | 0 | 0 | 0 | 100 | 0 |
| TESOP2008563 | 0 | 0 | 0 | 0 | 0 | 100 | 0 |
| TESOP2008820 | 0 | 0 | 0 | 0 | 0 | 65.779 | 0 |
| TESOP2009121 | 0 | 0 | 0 | 0 | 0 | 100 | 0 |
| TESOP2009201 | 0 | 0 | 0 | 0 | 0 | 100 | 0 |
| TESOP2009247 | 0 | 0 | 0 | 0 | 0 | 100 | 0 |
| TESOP2009555 | 0 | 0 | 0 | 0 | 0 | 100 | 0 |
| TESTI1000018 | 0 | 0 | 0 | 0 | 0 | 0 | 100 |
| TESTI1000019 | 0 | 0 | 0 | 0 | 0 | 0 | 100 |
| TESTI1000023 | 1.809 | 0 | 0 | 0 | 0 | 0 | 1.645 |
| TESTI1000025 | 0 | 0 | 0 | 0 | 0 | 0 | 100 |
| TESTI1000029 | 0 | 0 | 0 | 0 | 0 | 0 | 100 |
| TESTI1000030 | 0 | 0 | 0 | 0 | 0 | 0 | 100 |
| TESTI1000042 | 0 | 0 | 0 | 0 | 0 | 0 | 100 |
| TESTI1000045 | 0 | 0 | 0 | 0 | 0 | 0 | 100 |
| TESTI1000051 | 0 | 0 | 0 | 0 | 0 | 0 | 40.852 |
| TESTI1000055 | 0 | 0 | 0 | 0 | 0 | 0 | 100 |
| TESTI1000064 | 0 | 0 | 0 | 0 | 0 | 0 | 82.736 |
| TESTI1000070 | 0 | 0 | 0 | 0 | 0 | 49.407 | 30.683 |
| TESTI1000085 | 0 | 0 | 0 | 0 | 0 | 0 | 100 |
| TESTI1000088 | 0 | 0 | 0 | 0 | 0 | 0 | 100 |
| TESTI1000093 | 0 | 0 | 0 | 0 | 0 | 0 | 100 |
| TESTI1000094 | 0 | 0 | 0 | 0 | 0 | 0 | 77.371 |
| TESTI1000096 | 0 | 0 | 0 | 0 | 0 | 0 | 11.435 |
| TESTI1000101 | 0 | 0 | 30.131 | 0 | 0 | 0 | 13.999 |
| TESTI1000109 | 0 | 0 | 0 | 0 | 0 | 0 | 100 |
| TESTI1000125 | 0 | 0 | 0 | 0 | 0 | 0 | 100 |
| TESTI1000127 | 0 | 0 | 0 | 0 | 0 | 0 | 100 |
| TESTI1000128 | 0 | 0 | 0 | 0 | 0 | 0 | 100 |
| TESTI1000131 | 0 | 0 | 0 | 0 | 0 | 0 | 100 |
| TESTI1000138 | 0 | 0 | 0 | 0 | 0 | 0 | 19.512 |
| TESTI1000142 | 0 | 0 | 0 | 0 | 0 | 0 | 30.873 |
| TESTI1000157 | 0 | 0 | 0 | 0 | 0 | 0 | 100 |
| TESTI1000163 | 0 | 0 | 0 | 0 | 0 | 0 | 2.693 |
| TESTI1000168 | 0 | 0 | 0 | 0 | 0 | 0 | 51.212 |
| TESTI1000169 | 0 | 0 | 0 | 0 | 0 | 0 | 100 |
| TESTI1000179 | 0 | 0 | 0 | 0 | 0 | 0 | 100 |
| TESTI1000183 | 0 | 0 | 0 | 0 | 0 | 0 | 100 |
| TESTI1000191 | 0 | 0 | 0 | 0 | 0 | 0 | 100 |
| TESTI1000257 | 0 | 0 | 0 | 0 | 0 | 0 | 100 |
| TESTI1000266 | 0 | 0 | 0 | 0 | 0 | 0 | 34.478 |
| TESTI1000319 | 0 | 0 | 0 | 0 | 0 | 0 | 100 |
| TESTI1000330 | 0 | 0 | 0 | 0 | 0 | 0 | 47.943 |
| TESTI1000348 | 0 | 0 | 0 | 0 | 0 | 0 | 100 |
| TESTI1000390 | 0 | 0 | 0 | 0 | 0 | 0 | 100 |
| TESTI1000391 | 0 | 0 | 0 | 0 | 0 | 0 | 100 |
| TESTI1000459 | 0 | 0 | 0 | 0 | 0 | 0 | 100 |
| TESTI1000491 | 0 | 0 | 0 | 0 | 0 | 0 | 100 |
| TESTI1000545 | 0 | 0 | 0 | 0 | 0 | 0 | 100 |
| TESTI2000006 | 0 | 0 | 0 | 0 | 0 | 0 | 6.464 |
| TESTI2000018 | 0 | 0 | 0 | 0 | 0 | 0 | 100 |
| TESTI2000044 | 0 | 0 | 0 | 0 | 0 | 0 | 100 |
| TESTI2000100 | 0 | 0 | 0 | 0 | 0 | 0 | 12.664 |
| TESTI2000117 | 0 | 0 | 0 | 0 | 0 | 0 | 100 |
| TESTI2000120 | 0 | 0 | 0 | 0 | 0 | 0 | 100 |
| TESTI2000147 | 0 | 0 | 0 | 0 | 0 | 0 | 100 |
| TESTI2000154 | 0 | 0 | 0 | 0 | 0 | 0 | 100 |
| TESTI2000172 | 0 | 0 | 0 | 0 | 0 | 0 | 5.592 |
| TESTI2000177 | 0 | 0 | 0 | 0 | 0 | 0 | 47.814 |
| TESTI2000179 | 0 | 0 | 0 | 0 | 0 | 0 | 23.946 |
| TESTI2000184 | 2.438 | 0 | 0 | 0 | 0 | 7.734 | 7.389 |
| TESTI2000207 | 0 | 0 | 0 | 0 | 0 | 0 | 100 |
| TESTI2000208 | 0 | 0 | 0 | 0 | 0 | 0 | 100 |
| TESTI2000221 | 0 | 0 | 0 | 0 | 0 | 0 | 100 |
| TESTI2000238 | 0 | 0 | 0 | 0 | 0 | 0 | 41.440 |
| TESTI2000253 | 0 | 0 | 0 | 0 | 0 | 0 | 61.294 |
| TESTI2000272 | 0 | 0 | 0 | 0 | 0 | 0 | 82.282 |
| TESTI2000278 | 0 | 0 | 0 | 0 | 0 | 0 | 100 |
| TESTI2000349 | 0 | 0 | 0 | 0 | 0 | 0 | 15.564 |
| TESTI2000356 | 0 | 0 | 0 | 0 | 0 | 0 | 22.925 |
| TESTI2000358 | 0 | 0 | 0 | 0 | 0 | 0 | 100 |
| TESTI2000372 | 0 | 0 | 0 | 0 | 0 | 0 | 100 |
| TESTI2000427 | 0 | 0 | 0 | 0 | 0 | 0 | 100 |
| TESTI2000431 | 0 | 0 | 0 | 0 | 0 | 0 | 63.646 |
| TESTI2000435 | 0 | 0 | 0 | 0 | 0 | 0 | 12.571 |
| TESTI2000443 | 0 | 0 | 0 | 0 | 0 | 0 | 100 |
| TESTI2000452 | 0 | 0 | 0 | 0 | 0 | 0 | 100 |
| TESTI2000462 | 0 | 0 | 0 | 0 | 0 | 0 | 100 |
| TESTI2000489 | 0 | 0 | 0 | 0 | 0 | 0 | 42.034 |
| TESTI2000520 | 0 | 0 | 0 | 0 | 79.762 | 0 | 2.459 |
| TESTI2000571 | 0 | 0 | 0 | 0 | 0 | 0 | 100 |
| TESTI2000591 | 0 | 0 | 12.846 | 0 | 0 | 0 | 4.775 |
| TESTI2000598 | 0 | 0 | 0 | 0 | 0 | 0 | 16.418 |
| TESTI2000600 | 0 | 0 | 0 | 0 | 0 | 0 | 24.263 |
| TESTI2000616 | 0 | 0 | 0 | 0 | 0 | 0 | 100 |
| TESTI2000627 | 0 | 0 | 0 | 0 | 0 | 0 | 13.773 |
| TESTI2000644 | 0 | 0 | 0 | 0 | 0 | 0 | 100 |
| TESTI2000671 | 0 | 0 | 0 | 0 | 0 | 0 | 100 |
| TESTI2000683 | 0 | 0 | 0 | 0 | 0 | 0 | 100 |
| TESTI2000689 | 0 | 0 | 0 | 0 | 0 | 0 | 100 |
| TESTI2000695 | 0 | 0 | 0 | 0 | 0 | 0 | 100 |
| TESTI2000699 | 0 | 0 | 0 | 0 | 0 | 0 | 100 |
| TESTI2000707 | 0 | 0 | 0 | 0 | 0 | 0 | 100 |
| TESTI2000745 | 0 | 0 | 0 | 0 | 0 | 0 | 100 |
| TESTI2000756 | 0 | 0 | 0 | 0 | 0 | 0 | 100 |
| TESTI2000762 | 0 | 0 | 0 | 0 | 0 | 0 | 100 |
| TESTI2000784 | 0 | 0 | 15.987 | 0 | 0 | 0 | 26.740 |
| TESTI2000808 | 0 | 0 | 0 | 0 | 0 | 0 | 100 |
| TESTI2000819 | 0 | 0 | 0 | 0 | 0 | 0 | 100 |
| TESTI2000830 | 0 | 0 | 0 | 0 | 0 | 0 | 100 |
| TESTI2000840 | 0 | 0 | 0 | 0 | 0 | 0 | 100 |
| TESTI2000849 | 0 | 0 | 0 | 0 | 0 | 0 | 70.219 |
| TESTI2000850 | 0 | 0 | 0 | 0 | 0 | 0 | 100 |
| TESTI2000874 | 0 | 0 | 0 | 0 | 0 | 0 | 8.171 |
| TESTI2000883 | 0 | 0 | 0 | 0 | 0 | 0 | 14.298 |
| TESTI2000909 | 0 | 0 | 0 | 0 | 0 | 0 | 8.520 |
| TESTI2000951 | 0 | 0 | 0 | 0 | 0 | 0 | 100 |
| TESTI2000970 | 0 | 0 | 0 | 0 | 0 | 0 | 6.355 |
| TESTI2000981 | 0 | 0 | 0 | 0 | 0 | 0 | 100 |
| TESTI2001008 | 0 | 0 | 0 | 0 | 0 | 0 | 100 |
| TESTI2001049 | 0 | 0 | 0 | 0 | 0 | 0 | 100 |
| TESTI2001082 | 0 | 0 | 0 | 0 | 0 | 0 | 100 |
| TESTI2001099 | 1.057 | 0 | 0 | 0 | 0 | 0 | 9.930 |
| TESTI2001120 | 0 | 0 | 0 | 0 | 0 | 0 | 0.632 |
| TESTI2001134 | 0 | 0 | 0 | 0 | 0 | 0 | 100 |
| TESTI2001141 | 0 | 0 | 0 | 0 | 0 | 0 | 49.381 |
| TESTI2001153 | 0 | 0 | 0 | 0 | 0 | 0 | 2.603 |
| TESTI2001180 | 0 | 0 | 0 | 0 | 0 | 0 | 100 |
| TESTI2001208 | 0 | 0 | 0 | 0 | 0 | 0 | 100 |
| TESTI2001229 | 0 | 0 | 0 | 0 | 0 | 0 | 100 |
| TESTI2001236 | 0 | 0 | 0 | 0 | 0 | 0 | 100 |
| TESTI2001237 | 0 | 0 | 0 | 0 | 0 | 0 | 100 |
| TESTI2001269 | 1.177 | 0 | 0 | 0 | 0 | 0 | 1.070 |
| TESTI2001306 | 0 | 0 | 0 | 0 | 0 | 0 | 100 |
| TESTI2001313 | 0 | 0 | 0 | 0 | 0 | 0 | 100 |
| TESTI2001330 | 0 | 0 | 0 | 0 | 0 | 0 | 100 |
| TESTI2001339 | 0 | 0 | 0 | 0 | 0 | 0 | 27.313 |
| TESTI2001345 | 0 | 0 | 0 | 0 | 0 | 0 | 100 |
| TESTI2001352 | 0 | 0 | 0 | 0 | 0 | 0 | 100 |
| TESTI2001364 | 0 | 0 | 0 | 0 | 0 | 0 | 100 |
| TESTI2001412 | 0 | 0 | 0 | 0 | 0 | 0 | 100 |
| TESTI2001420 | 0 | 0 | 0 | 0 | 0 | 0 | 35.404 |
| TESTI2001498 | 0 | 0 | 0 | 0 | 0 | 0 | 100 |
| TESTI2001511 | 0 | 0 | 0 | 0 | 0 | 0 | 1.144 |
| TESTI2001512 | 0 | 0 | 0 | 0 | 0 | 0 | 100 |
| TESTI2001518 | 0 | 0 | 0 | 0 | 0 | 0 | 100 |
| TESTI2001556 | 0 | 0 | 0 | 0 | 0 | 0 | 100 |
| TESTI2001593 | 0 | 0 | 0 | 0 | 0 | 0 | 100 |
| TESTI2001613 | 0 | 0 | 0 | 0 | 0 | 0 | 17.860 |
| TESTI2001621 | 0 | 0 | 0 | 0 | 0 | 0 | 100 |
| TESTI2001661 | 0 | 0 | 0 | 0 | 0 | 0 | 54.042 |
| TESTI2001665 | 0 | 0 | 0 | 0 | 0 | 0 | 100 |
| TESTI2001671 | 0 | 0 | 0 | 0 | 0 | 0 | 100 |
| TESTI2001697 | 0 | 0 | 0 | 0 | 0 | 0 | 100 |
| TESTI2001725 | 0 | 0 | 0 | 0 | 0 | 0 | 100 |
| TESTI2001758 | 0 | 0 | 0 | 0 | 0 | 0 | 100 |
| TESTI2001766 | 0 | 0 | 0 | 0 | 0 | 0 | 100 |
| TESTI2001792 | 0 | 0 | 0 | 0 | 0 | 0 | 100 |
| TESTI2001793 | 0 | 0 | 0 | 0 | 0 | 0 | 100 |
| TESTI2001795 | 0 | 0 | 0 | 0 | 0 | 0 | 100 |
| TESTI2001812 | 0 | 0 | 0 | 0 | 0 | 0 | 100 |
| TESTI2001815 | 76.742 | 0 | 0 | 0 | 0 | 0 | 23.258 |
| TESTI2001823 | 0 | 0 | 0 | 0 | 0 | 0 | 100 |
| TESTI2001826 | 0 | 0 | 0 | 0 | 0 | 0 | 58.511 |
| TESTI2001827 | 0 | 0 | 0 | 0 | 0 | 0 | 100 |
| TESTI2001829 | 0 | 0 | 0 | 0 | 0 | 0 | 1.665 |
| TESTI2001852 | 0 | 0 | 0 | 0 | 0 | 0 | 100 |
| TESTI2001862 | 0 | 0 | 0 | 0 | 0 | 0 | 1.728 |
| TESTI2001869 | 0 | 0 | 0 | 0 | 0 | 0 | 15.600 |
| TESTI2001879 | 0 | 0 | 0 | 0 | 0 | 0 | 36.852 |
| TESTI2001894 | 0 | 0 | 0 | 0 | 0 | 0 | 100 |
| TESTI2001898 | 0 | 0 | 0 | 0 | 0 | 0 | 39.051 |
| TESTI2001915 | 0 | 0 | 0 | 0 | 0 | 0 | 100 |
| TESTI2001950 | 0 | 0 | 0 | 0 | 0 | 0 | 100 |
| TESTI2001959 | 0 | 0 | 0 | 0 | 0 | 0 | 100 |
| TESTI2001968 | 0 | 0 | 0 | 0 | 0 | 0 | 100 |
| TESTI2001985 | 0 | 0 | 0 | 0 | 0 | 0 | 61.396 |
| TESTI2001991 | 0 | 0 | 0 | 0 | 0 | 0 | 100 |
| TESTI2002002 | 0 | 0 | 0 | 0 | 0 | 0 | 100 |
| TESTI2002012 | 0 | 0 | 0 | 0 | 0 | 0 | 100 |
| TESTI2002036 | 0 | 0 | 0 | 0 | 0 | 0 | 100 |
| TESTI2002048 | 0 | 0 | 0 | 0 | 0 | 0 | 100 |
| TESTI2002057 | 0 | 0 | 0 | 0 | 0 | 0 | 100 |
| TESTI2002081 | 0 | 0 | 0 | 0 | 0 | 0 | 100 |
| TESTI2002090 | 0 | 0 | 0 | 0 | 0 | 0 | 100 |
| TESTI2002105 | 0 | 0 | 0 | 0 | 0 | 0 | 85.371 |
| TESTI2002149 | 0 | 0 | 0 | 0 | 0 | 0 | 2.187 |
| TESTI2002216 | 0 | 0 | 0 | 0 | 0 | 0 | 100 |
| TESTI2002223 | 0 | 0 | 0 | 0 | 0 | 0 | 17.976 |
| TESTI2002245 | 0 | 0 | 0 | 0 | 0 | 0 | 100 |
| TESTI2002251 | 0 | 0 | 0 | 0 | 0 | 0 | 100 |
| TESTI2002256 | 0 | 0 | 0 | 0 | 0 | 0 | 22.675 |
| TESTI2002264 | 0 | 0 | 0 | 0 | 0 | 0 | 100 |
| TESTI2002282 | 0 | 0 | 0 | 0 | 0 | 0 | 100 |
| TESTI2002293 | 0 | 0 | 0 | 0 | 0 | 0 | 100 |
| TESTI2002294 | 0 | 0 | 0 | 0 | 0 | 0 | 100 |
| TESTI2002326 | 0 | 0 | 0 | 0 | 0 | 0 | 100 |
| TESTI2002351 | 0 | 0 | 0 | 0 | 0 | 0 | 100 |
| TESTI2002361 | 0 | 0 | 0 | 0 | 0 | 0 | 100 |
| TESTI2002365 | 0 | 0 | 7.682 | 0 | 0 | 0 | 7.138 |
| TESTI2002369 | 0 | 0 | 0 | 0 | 0 | 0 | 19.645 |
| TESTI2002406 | 0 | 0 | 0 | 0 | 0 | 0 | 100 |
| TESTI2002415 | 0 | 0 | 0 | 0 | 0 | 0 | 100 |
| TESTI2002423 | 0 | 0 | 0 | 0 | 0 | 0 | 100 |
| TESTI2002453 | 0 | 0 | 0 | 0 | 0 | 0 | 100 |
| TESTI2002461 | 0 | 0 | 0 | 0 | 0 | 0 | 100 |
| TESTI2002465 | 0 | 0 | 0 | 0 | 0 | 0 | 100 |
| TESTI2002467 | 0 | 0 | 0 | 0 | 0 | 0 | 15.347 |
| TESTI2002498 | 0 | 0 | 0 | 0 | 0 | 0 | 100 |
| TESTI2002516 | 0 | 0 | 0 | 0 | 0 | 0 | 100 |
| TESTI2002544 | 0 | 0 | 0 | 0 | 0 | 0 | 100 |
| TESTI2002578 | 0 | 0 | 0 | 0 | 0 | 0 | 100 |
| TESTI2002580 | 0 | 0 | 0 | 0 | 0 | 0 | 100 |
| TESTI2002618 | 0 | 0 | 0 | 0 | 0 | 0 | 100 |
| TESTI2002632 | 0 | 0 | 0 | 0 | 0 | 0 | 7.077 |
| TESTI2002676 | 0 | 0 | 0 | 0 | 0 | 0 | 100 |
| TESTI2002690 | 0 | 0 | 0 | 0 | 0 | 0 | 100 |
| TESTI2002696 | 0 | 0 | 0 | 0 | 0 | 0 | 8.489 |
| TESTI2002698 | 0 | 0 | 0 | 0 | 0 | 0 | 100 |
| TESTI2002700 | 0 | 0 | 0 | 0 | 0 | 0 | 100 |
| TESTI2002707 | 0 | 0 | 0 | 0 | 0 | 0 | 5.415 |
| TESTI2002724 | 0 | 0 | 0 | 0 | 0 | 0 | 100 |
| TESTI2002729 | 0 | 0 | 0 | 0 | 0 | 0 | 100 |
| TESTI2002752 | 0 | 0 | 0 | 0 | 0 | 0 | 100 |
| TESTI2002753 | 0 | 0 | 0 | 0 | 0 | 0 | 100 |
| TESTI2002789 | 0 | 0 | 0 | 0 | 0 | 0 | 100 |
| TESTI2002802 | 0 | 0 | 0 | 0 | 0 | 0 | 100 |
| TESTI2002806 | 0 | 0 | 0 | 0 | 0 | 0 | 100 |
| TESTI2002840 | 0 | 0 | 0 | 0 | 0 | 0 | 26.135 |
| TESTI2002866 | 0 | 0 | 0 | 0 | 0 | 0 | 13.910 |
| TESTI2002877 | 0 | 0 | 0 | 0 | 0 | 0 | 24.389 |
| TESTI2002910 | 0 | 0 | 0 | 0 | 0 | 0 | 100 |
| TESTI2002912 | 0 | 0 | 0 | 0 | 0 | 0 | 100 |
| TESTI2002928 | 0 | 0 | 0 | 0 | 0 | 0 | 100 |
| TESTI2002937 | 0 | 0 | 0 | 0 | 0 | 0 | 100 |
| TESTI2002965 | 0 | 0 | 0 | 0 | 0 | 0 | 31.989 |
| TESTI2002993 | 0 | 0 | 0 | 0 | 0 | 0 | 100 |
| TESTI2003005 | 0 | 0 | 0 | 0 | 0 | 0 | 1.986 |
| TESTI2003020 | 0 | 0 | 0 | 0 | 0 | 0 | 100 |
| TESTI2003031 | 0 | 0 | 0 | 0 | 0 | 0 | 100 |
| TESTI2003037 | 0 | 0 | 0 | 0 | 0 | 0 | 100 |
| TESTI2003044 | 0 | 0 | 64.204 | 0 | 0 | 0 | 35.796 |
| TESTI2003059 | 0 | 0 | 0 | 0 | 0 | 0 | 100 |
| TESTI2003061 | 0 | 0 | 0 | 0 | 0 | 0 | 67.719 |
| TESTI2003071 | 0 | 0 | 0 | 0 | 0 | 0 | 2.281 |
| TESTI2003074 | 0 | 0 | 0 | 0 | 0 | 0 | 100 |
| TESTI2003089 | 0 | 0 | 0 | 0 | 0 | 0 | 100 |
| TESTI2003104 | 0 | 0 | 0 | 0 | 0 | 0 | 100 |
| TESTI2003109 | 0 | 0 | 0 | 0 | 0 | 0 | 74.476 |
| TESTI2003117 | 0 | 0 | 0 | 0 | 0 | 0 | 100 |
| TESTI2003127 | 0 | 0 | 0 | 0 | 0 | 0 | 6.980 |
| TESTI2003130 | 0 | 0 | 0 | 0 | 0 | 0 | 100 |
| TESTI2003131 | 0 | 0 | 0 | 0 | 0 | 0 | 100 |
| TESTI2003139 | 0 | 0 | 0 | 0 | 0 | 0 | 100 |
| TESTI2003141 | 0 | 0 | 0 | 0 | 0 | 0 | 47.944 |
| TESTI2003152 | 0 | 0 | 0 | 0 | 0 | 0 | 100 |
| TESTI2003181 | 0 | 0 | 0 | 0 | 0 | 0 | 100 |
| TESTI2003193 | 0 | 0 | 0 | 0 | 0 | 0 | 100 |
| TESTI2003196 | 0 | 0 | 0 | 0 | 0 | 0 | 100 |
| TESTI2003228 | 0 | 0 | 0 | 0 | 0 | 0 | 100 |
| TESTI2003236 | 0 | 0 | 0 | 0 | 0 | 0 | 100 |
| TESTI2003255 | 0 | 0 | 0 | 0 | 0 | 0 | 100 |
| TESTI2003258 | 0 | 0 | 0 | 0 | 0 | 0 | 100 |
| TESTI2003277 | 0 | 0 | 0 | 0 | 0 | 0 | 100 |
| TESTI2003280 | 0 | 0 | 0 | 0 | 0 | 0 | 8.044 |
| TESTI2003299 | 0 | 0 | 0 | 0 | 0 | 0 | 100 |
| TESTI2003311 | 0 | 0 | 0 | 0 | 0 | 0 | 100 |
| TESTI2003321 | 0 | 0 | 0 | 0 | 0 | 0 | 100 |
| TESTI2003325 | 0 | 0 | 29.771 | 0 | 0 | 0 | 5.533 |
| TESTI2003327 | 0 | 0 | 0 | 0 | 0 | 0 | 100 |
| TESTI2003330 | 0 | 0 | 0 | 0 | 0 | 0 | 100 |
| TESTI2003347 | 0 | 0 | 0 | 0 | 0 | 0 | 100 |
| TESTI2003354 | 0 | 0 | 0 | 0 | 0 | 0 | 100 |
| TESTI2003356 | 0 | 0 | 0 | 0 | 0 | 0 | 100 |
| TESTI2003372 | 0 | 0 | 0 | 0 | 0 | 0 | 100 |
| TESTI2003376 | 0 | 0 | 0 | 0 | 0 | 0 | 100 |
| TESTI2003413 | 0 | 0 | 0 | 0 | 0 | 0 | 5.106 |
| TESTI2003418 | 0 | 0 | 0 | 0 | 0 | 0 | 100 |
| TESTI2003419 | 0 | 0 | 0 | 0 | 0 | 0 | 100 |
| TESTI2003432 | 0 | 0 | 0 | 0 | 0 | 0 | 100 |
| TESTI2003454 | 0 | 0 | 0 | 0 | 0 | 0 | 3.471 |
| TESTI2003475 | 0 | 0 | 0 | 0 | 0 | 0 | 100 |
| TESTI2003476 | 0 | 0 | 0 | 0 | 0 | 0 | 100 |
| TESTI2003498 | 0 | 0 | 0 | 0 | 0 | 0 | 100 |
| TESTI2003512 | 0 | 0 | 0 | 0 | 0 | 0 | 100 |
| TESTI2003533 | 0 | 0 | 12.198 | 0 | 0 | 0 | 1.133 |
| TESTI2003539 | 0 | 0 | 0 | 0 | 0 | 0 | 15.564 |
| TESTI2003541 | 0 | 0 | 0 | 0 | 0 | 0 | 38.183 |
| TESTI2003545 | 0 | 0 | 0 | 0 | 0 | 0 | 100 |
| TESTI2003551 | 0 | 0 | 0 | 0 | 0 | 0 | 100 |
| TESTI2003574 | 0 | 0 | 0 | 0 | 0 | 0 | 100 |
| TESTI2003579 | 0 | 0 | 0 | 0 | 0 | 0 | 22.717 |
| TESTI2003580 | 0 | 0 | 0 | 0 | 0 | 0 | 100 |
| TESTI2003589 | 0 | 0 | 0 | 0 | 0 | 0 | 100 |
| TESTI2003596 | 8.986 | 0 | 0 | 0 | 0 | 0 | 76.255 |
| TESTI2003598 | 0 | 0 | 0 | 0 | 0 | 0 | 100 |
| TESTI2003615 | 0 | 0 | 0 | 0 | 0 | 0 | 100 |
| TESTI2003625 | 0 | 0 | 0 | 0 | 0 | 0 | 10.007 |
| TESTI2003638 | 0 | 0 | 0 | 0 | 0 | 0 | 100 |
| TESTI2003649 | 0 | 0 | 0 | 0 | 0 | 0 | 100 |
| TESTI2003692 | 0 | 0 | 0 | 0 | 0 | 0 | 39.051 |
| TESTI2003718 | 0 | 0 | 0 | 0 | 0 | 0 | 100 |
| TESTI2003727 | 0 | 0 | 0 | 0 | 0 | 0 | 100 |
| TESTI2003756 | 0 | 0 | 0 | 0 | 0 | 0 | 20.574 |
| TESTI2003768 | 0 | 0 | 0 | 0 | 0 | 0 | 100 |
| TESTI2003781 | 0 | 0 | 0 | 0 | 0 | 0 | 100 |
| TESTI2003787 | 0 | 0 | 0 | 0 | 0 | 0 | 100 |
| TESTI2003824 | 0 | 0 | 0 | 0 | 0 | 0 | 100 |
| TESTI2003827 | 0 | 0 | 0 | 0 | 0 | 0 | 100 |
| TESTI2003894 | 0 | 0 | 0 | 0 | 0 | 0 | 100 |
| TESTI2003911 | 0 | 0 | 0 | 0 | 0 | 0 | 100 |
| TESTI2003914 | 0 | 0 | 0 | 0 | 0 | 0 | 100 |
| TESTI2003940 | 0 | 0 | 0 | 0 | 0 | 0 | 100 |
| TESTI2003962 | 0 | 0 | 0 | 0 | 0 | 0 | 100 |
| TESTI2003998 | 0 | 0 | 0 | 0 | 0 | 0 | 100 |
| TESTI2004000 | 0 | 0 | 0 | 0 | 0 | 0 | 4.583 |
| TESTI2004031 | 0 | 0 | 5.640 | 0 | 0 | 0 | 0.262 |
| TESTI2004073 | 0 | 0 | 0 | 0 | 0 | 0 | 100 |
| TESTI2004080 | 0 | 0 | 0 | 0 | 0 | 0 | 3.190 |
| TESTI2004085 | 0 | 0 | 0 | 0 | 0 | 0 | 100 |
| TESTI2004089 | 0 | 0 | 0 | 0 | 0 | 0 | 100 |
| TESTI2004111 | 0 | 0 | 0 | 0 | 0 | 0 | 100 |
| TESTI2004119 | 0 | 0 | 0 | 0 | 0 | 0 | 100 |
| TESTI2004122 | 0 | 0 | 0 | 0 | 0 | 0 | 9.979 |
| TESTI2004153 | 0 | 0 | 0 | 0 | 0 | 0 | 5.672 |
| TESTI2004163 | 0 | 0 | 0 | 0 | 0 | 0 | 100 |
| TESTI2004169 | 0 | 0 | 0 | 0 | 0 | 0 | 100 |
| TESTI2004207 | 0 | 0 | 0 | 0 | 0 | 0 | 100 |
| TESTI2004215 | 0 | 0 | 0 | 0 | 0 | 0 | 100 |
| TESTI2004227 | 0 | 0 | 0 | 0 | 0 | 0 | 100 |
| TESTI2004229 | 0 | 0 | 0 | 0 | 0 | 0 | 100 |
| TESTI2004243 | 0 | 0 | 0 | 0 | 0 | 0 | 100 |
| TESTI2004255 | 0 | 0 | 0 | 0 | 0 | 0 | 100 |
| TESTI2004287 | 0 | 0 | 0 | 0 | 0 | 0 | 100 |
| TESTI2004295 | 0 | 0 | 0 | 0 | 0 | 0 | 5.353 |
| TESTI2004313 | 0 | 0 | 0 | 0 | 0 | 0 | 100 |
| TESTI2004318 | 0 | 0 | 0 | 0 | 0 | 0 | 100 |
| TESTI2004322 | 0 | 0 | 0 | 0 | 0 | 0 | 100 |
| TESTI2004391 | 0 | 0 | 0 | 0 | 0 | 0 | 71.774 |
| TESTI2004399 | 0 | 0 | 0 | 0 | 0 | 0 | 100 |
| TESTI2004423 | 0 | 0 | 0 | 0 | 0 | 0 | 100 |
| TESTI2004431 | 0 | 0 | 0 | 0 | 0 | 0 | 32.808 |
| TESTI2004432 | 0 | 0 | 0 | 0 | 0 | 0 | 36.852 |
| TESTI2004452 | 0 | 0 | 0 | 0 | 0 | 0 | 100 |
| TESTI2004459 | 0 | 0 | 0 | 0 | 0 | 0 | 100 |
| TESTI2004490 | 0 | 0 | 0 | 0 | 0 | 0 | 100 |
| TESTI2004539 | 0 | 0 | 0 | 0 | 0 | 0 | 100 |
| TESTI2004552 | 0 | 0 | 0 | 0 | 0 | 0 | 100 |
| TESTI2004560 | 0 | 0 | 0 | 0 | 0 | 0 | 100 |
| TESTI2004574 | 0 | 0 | 0 | 0 | 0 | 0 | 100 |
| TESTI2004601 | 0 | 0 | 0 | 0 | 0 | 0 | 100 |
| TESTI2004611 | 0 | 0 | 0 | 0 | 0 | 0 | 100 |
| TESTI2004649 | 0 | 0 | 0 | 0 | 0 | 0 | 100 |
| TESTI2004654 | 0 | 0 | 0 | 0 | 0 | 0 | 100 |
| TESTI2004675 | 0 | 0 | 0 | 0 | 0 | 0 | 100 |
| TESTI2004687 | 0 | 0 | 0 | 0 | 0 | 0 | 100 |
| TESTI2004689 | 0 | 0 | 0 | 0 | 0 | 0 | 100 |
| TESTI2004700 | 0 | 0 | 0 | 0 | 0 | 0 | 100 |
| TESTI2004706 | 0 | 0 | 0 | 0 | 0 | 0 | 100 |
| TESTI2004712 | 0 | 0 | 0 | 0 | 0 | 0 | 0.739 |
| TESTI2004734 | 0 | 0 | 0 | 0 | 0 | 0 | 22.416 |
| TESTI2004737 | 0 | 0 | 24.921 | 0 | 0 | 0 | 5.789 |
| TESTI2004783 | 0 | 0 | 0 | 0 | 0 | 0 | 100 |
| TESTI2004791 | 0 | 0 | 0 | 0 | 0 | 0 | 100 |
| TESTI2004793 | 0 | 0 | 0 | 0 | 0 | 0 | 100 |
| TESTI2004860 | 0 | 0 | 0 | 0 | 0 | 0 | 100 |
| TESTI2004906 | 0 | 0 | 0 | 0 | 0 | 0 | 100 |
| TESTI2004920 | 0 | 0 | 0 | 0 | 0 | 0 | 100 |
| TESTI2004929 | 0 | 0 | 0 | 0 | 0 | 0 | 1.856 |
| TESTI2004936 | 0 | 0 | 0 | 0 | 0 | 0 | 100 |
| TESTI2004941 | 0 | 0 | 0 | 0 | 0 | 0 | 100 |
| TESTI2004971 | 0 | 0 | 0 | 0 | 0 | 0 | 100 |
| TESTI2004982 | 0 | 0 | 0 | 0 | 0 | 0 | 100 |
| TESTI2004993 | 0 | 0 | 0 | 0 | 0 | 0 | 100 |
| TESTI2004994 | 0 | 0 | 0 | 0 | 0 | 0 | 100 |
| TESTI2004999 | 0 | 0 | 0 | 0 | 0 | 0 | 100 |
| TESTI2005017 | 0 | 0 | 0 | 0 | 0 | 0 | 62.603 |
| TESTI2005025 | 0 | 0 | 0 | 0 | 0 | 0 | 100 |
| TESTI2005040 | 0 | 0 | 0 | 0 | 0 | 0 | 41.440 |
| TESTI2005060 | 0 | 0 | 0 | 0 | 0 | 0 | 100 |
| TESTI2005072 | 0 | 0 | 0 | 0 | 0 | 0 | 96.718 |
| TESTI2005085 | 0 | 0 | 0 | 0 | 0 | 0 | 100 |
| TESTI2005112 | 0 | 0 | 0 | 0 | 0 | 0 | 12.718 |
| TESTI2005120 | 0 | 0 | 0 | 0 | 0 | 0 | 100 |
| TESTI2005153 | 0 | 0 | 0 | 0 | 0 | 0 | 100 |
| TESTI2005155 | 0 | 0 | 0 | 0 | 0 | 0 | 100 |
| TESTI2005173 | 0 | 0 | 0 | 0 | 0 | 0 | 47.121 |
| TESTI2005267 | 0 | 0 | 0 | 0 | 0 | 0 | 100 |
| TESTI2005268 | 0 | 0 | 0 | 0 | 0 | 0 | 100 |
| TESTI2005280 | 0 | 0 | 0 | 0 | 0 | 0 | 100 |
| TESTI2005307 | 0 | 0 | 0 | 0 | 0 | 39.547 | 60.453 |
| TESTI2005326 | 0 | 0 | 0 | 0 | 0 | 0 | 14.987 |
| TESTI2005363 | 0 | 0 | 0 | 0 | 0 | 0 | 100 |
| TESTI2005376 | 0 | 0 | 0 | 0 | 0 | 0 | 100 |
| TESTI2005378 | 0 | 0 | 0 | 0 | 0 | 0 | 100 |
| TESTI2005380 | 0 | 0 | 0 | 0 | 0 | 0 | 100 |
| TESTI2005391 | 0 | 0 | 0 | 0 | 0 | 0 | 100 |
| TESTI2005395 | 0 | 0 | 0 | 0 | 0 | 0 | 51.276 |
| TESTI2005396 | 0 | 0 | 0 | 0 | 0 | 0 | 19.291 |
| TESTI2005408 | 3.821 | 0 | 0 | 0 | 0 | 0 | 2.316 |
| TESTI2005415 | 0 | 0 | 0 | 0 | 0 | 0 | 100 |
| TESTI2005470 | 0 | 0 | 0 | 0 | 0 | 0 | 100 |
| TESTI2005492 | 0 | 0 | 0 | 0 | 0 | 0 | 100 |
| TESTI2005564 | 0 | 0 | 25.762 | 0 | 0 | 0 | 11.970 |
| TESTI2005568 | 0 | 0 | 0 | 0 | 0 | 0 | 100 |
| TESTI2005584 | 0 | 0 | 0 | 0 | 0 | 0 | 100 |
| TESTI2005588 | 0 | 0 | 0 | 0 | 0 | 0 | 100 |
| TESTI2005590 | 0 | 0 | 0 | 0 | 0 | 0 | 100 |
| TESTI2005603 | 0 | 0 | 0 | 0 | 0 | 0 | 100 |
| TESTI2005609 | 0 | 0 | 0 | 0 | 0 | 0 | 100 |
| TESTI2005610 | 0 | 0 | 0 | 0 | 0 | 0 | 100 |
| TESTI2005630 | 0 | 0 | 0 | 0 | 0 | 0 | 100 |
| TESTI2005672 | 0 | 0 | 0 | 0 | 0 | 0 | 100 |
| TESTI2005683 | 0 | 0 | 0 | 0 | 0 | 0 | 100 |
| TESTI2005690 | 0 | 0 | 0 | 0 | 0 | 0 | 100 |
| TESTI2005692 | 0 | 0 | 0 | 0 | 0 | 0 | 36.852 |
| TESTI2005703 | 0 | 0 | 0 | 0 | 0 | 0 | 100 |
| TESTI2005720 | 0 | 0 | 0 | 0 | 0 | 0 | 100 |
| TESTI2005731 | 0 | 0 | 0 | 0 | 0 | 0 | 49.675 |
| TESTI2005739 | 0 | 0 | 0 | 0 | 0 | 0 | 100 |
| TESTI2005742 | 0 | 0 | 0 | 0 | 0 | 0 | 13.331 |
| TESTI2005743 | 0 | 0 | 0 | 0 | 0 | 0 | 1.436 |
| TESTI2005759 | 0 | 0 | 0 | 0 | 0 | 6.399 | 3.057 |
| TESTI2005767 | 0 | 0 | 0 | 0 | 0 | 0 | 92.965 |
| TESTI2005775 | 0 | 0 | 0 | 0 | 0 | 0 | 100 |
| TESTI2005784 | 0 | 0 | 0 | 0 | 0 | 0 | 1.944 |
| TESTI2005788 | 0 | 0 | 0 | 0 | 0 | 0 | 21.162 |
| TESTI2005827 | 0 | 0 | 0 | 0 | 0 | 0 | 100 |
| TESTI2005835 | 0 | 0 | 0 | 0 | 0 | 0 | 86.638 |
| TESTI2005860 | 0 | 0 | 0 | 0 | 0 | 0 | 100 |
| TESTI2005892 | 0 | 0 | 0 | 0 | 0 | 0 | 100 |
| TESTI2005908 | 6.792 | 0 | 0 | 0 | 0 | 0 | 1.029 |
| TESTI2005911 | 0 | 0 | 0 | 0 | 0 | 0 | 100 |
| TESTI2005933 | 0 | 0 | 0 | 0 | 0 | 0 | 100 |
| TESTI2005937 | 0 | 0 | 0 | 0 | 0 | 0 | 100 |
| TESTI2005948 | 0 | 0 | 0 | 0 | 0 | 0 | 100 |
| TESTI2005979 | 0 | 0 | 0 | 0 | 0 | 0 | 100 |
| TESTI2005981 | 0 | 0 | 0 | 0 | 0 | 0 | 20.358 |
| TESTI2005982 | 0 | 0 | 0 | 0 | 0 | 0 | 100 |
| TESTI2005984 | 0 | 0 | 0 | 0 | 0 | 0 | 100 |
| TESTI2005986 | 0 | 0 | 0 | 0 | 0 | 0 | 100 |
| TESTI2005987 | 0 | 0 | 0 | 0 | 0 | 0 | 100 |
| TESTI2006007 | 0 | 0 | 0 | 0 | 0 | 91.279 | 8.721 |
| TESTI2006008 | 0 | 0 | 0 | 0 | 0 | 0 | 100 |
| TESTI2006015 | 0 | 0 | 0 | 0 | 0 | 0 | 100 |
| TESTI2006016 | 0 | 0 | 0 | 0 | 0 | 0 | 100 |
| TESTI2006035 | 0 | 0 | 0 | 0 | 0 | 0 | 100 |
| TESTI2006040 | 0 | 0 | 0 | 0 | 0 | 0 | 100 |
| TESTI2006041 | 0 | 0 | 0 | 0 | 0 | 0 | 100 |
| TESTI2006045 | 0 | 0 | 0 | 0 | 0 | 0 | 100 |
| TESTI2006051 | 0 | 0 | 0 | 0 | 8.978 | 0 | 0.554 |
| TESTI2006067 | 0 | 0 | 0 | 0 | 0 | 0 | 100 |
| TESTI2006083 | 0 | 0 | 0 | 0 | 0 | 0 | 100 |
| TESTI2006097 | 0 | 0 | 0 | 0 | 0 | 0 | 13.774 |
| TESTI2006109 | 0 | 0 | 0 | 0 | 0 | 0 | 100 |
| TESTI2006111 | 0 | 0 | 0 | 0 | 0 | 0 | 13.477 |
| TESTI2006120 | 0 | 0 | 0 | 0 | 0 | 0 | 12.690 |
| TESTI2006125 | 0 | 0 | 0 | 0 | 0 | 0 | 100 |
| TESTI2006179 | 0 | 0 | 0 | 0 | 0 | 0 | 100 |
| TESTI2006209 | 0 | 0 | 0 | 0 | 0 | 0 | 100 |
| TESTI2006210 | 0 | 0 | 0 | 0 | 0 | 0 | 33.713 |
| TESTI2006212 | 0 | 0 | 0 | 0 | 0 | 0 | 100 |
| TESTI2006218 | 0 | 0 | 0 | 0 | 0 | 0 | 100 |
| TESTI2006238 | 0 | 0 | 0 | 0 | 0 | 0 | 100 |
| TESTI2006255 | 0 | 0 | 0 | 0 | 0 | 0 | 100 |
| TESTI2006258 | 0 | 0 | 0 | 0 | 0 | 0 | 6.703 |
| TESTI2006278 | 0 | 0 | 0 | 0 | 0 | 0 | 100 |
| TESTI2006333 | 0 | 0 | 0 | 0 | 0 | 0 | 100 |
| TESTI2006341 | 0 | 0 | 0 | 0 | 0 | 0 | 13.362 |
| TESTI2006360 | 0 | 0 | 0 | 0 | 0 | 0 | 100 |
| TESTI2006383 | 8.742 | 0 | 0 | 0 | 0 | 0 | 39.741 |
| TESTI2006409 | 0 | 0 | 0 | 0 | 0 | 0 | 39.051 |
| TESTI2006425 | 0 | 0 | 0 | 0 | 0 | 0 | 100 |
| TESTI2006437 | 0 | 0 | 0 | 0 | 0 | 0 | 100 |
| TESTI2006453 | 3.630 | 0 | 0 | 0 | 0 | 0 | 1.100 |
| TESTI2006457 | 0 | 0 | 0 | 0 | 0 | 0 | 100 |
| TESTI2006460 | 0 | 0 | 0 | 0 | 0 | 0 | 100 |
| TESTI2006465 | 0 | 0 | 0 | 0 | 0 | 0 | 100 |
| TESTI2006483 | 0 | 0 | 0 | 0 | 0 | 0 | 100 |
| TESTI2006499 | 0 | 0 | 0 | 0 | 0 | 0 | 100 |
| TESTI2006523 | 0 | 0 | 0 | 0 | 0 | 0 | 100 |
| TESTI2006543 | 0 | 0 | 0 | 0 | 0 | 0 | 100 |
| TESTI2006565 | 0 | 0 | 0 | 0 | 0 | 0 | 100 |
| TESTI2006572 | 0 | 0 | 0 | 0 | 0 | 0 | 100 |
| TESTI2006588 | 0 | 0 | 0 | 0 | 0 | 0 | 0.708 |
| TESTI2006615 | 0 | 0 | 0 | 0 | 0 | 0 | 72.403 |
| TESTI2006617 | 0 | 0 | 0 | 0 | 0 | 0 | 100 |
| TESTI2006624 | 0 | 0 | 0 | 0 | 0 | 0 | 100 |
| TESTI2006628 | 0 | 0 | 0 | 0 | 0 | 0 | 16.254 |
| TESTI2006633 | 0 | 0 | 0 | 0 | 0 | 0 | 52.424 |
| TESTI2006643 | 0 | 0 | 0 | 0 | 0 | 0 | 100 |
| TESTI2006648 | 0 | 0 | 0 | 0 | 0 | 0 | 100 |
| TESTI2006659 | 0 | 0 | 0 | 0 | 0 | 0 | 100 |
| TESTI2006660 | 0 | 0 | 0 | 0 | 0 | 0 | 100 |
| TESTI2006665 | 0 | 0 | 0 | 0 | 0 | 0 | 100 |
| TESTI2006667 | 0 | 0 | 0 | 0 | 0 | 0 | 100 |
| TESTI2006677 | 0 | 0 | 0 | 0 | 0 | 0 | 100 |
| TESTI2006720 | 0 | 0 | 0 | 0 | 0 | 0 | 43.944 |
| TESTI2006735 | 0 | 0 | 0 | 0 | 0 | 0 | 100 |
| TESTI2006744 | 0 | 0 | 0 | 0 | 0 | 0 | 100 |
| TESTI2006748 | 0 | 0 | 0 | 0 | 0 | 0 | 6.746 |
| TESTI2006774 | 0 | 0 | 0 | 0 | 0 | 0 | 47.943 |
| TESTI2006853 | 0 | 0 | 0 | 0 | 0 | 0 | 100 |
| TESTI2006866 | 0 | 0 | 0 | 0 | 0 | 0 | 100 |
| TESTI2006872 | 0 | 0 | 0 | 0 | 0 | 0 | 21.552 |
| TESTI2006877 | 0 | 0 | 0 | 0 | 0 | 0 | 52.051 |
| TESTI2006879 | 0 | 0 | 0 | 0 | 0 | 0 | 100 |
| TESTI2006894 | 0 | 0 | 0 | 0 | 0 | 0 | 100 |
| TESTI2006940 | 0 | 0 | 0 | 0 | 0 | 0 | 100 |
| TESTI2006955 | 0 | 0 | 0 | 0 | 0 | 0 | 100 |
| TESTI2006978 | 0 | 0 | 0 | 0 | 0 | 0 | 100 |
| TESTI2006979 | 0 | 0 | 0 | 0 | 0 | 0 | 100 |
| TESTI2006990 | 0 | 0 | 0 | 0 | 0 | 0 | 100 |
| TESTI2007040 | 0 | 0 | 0 | 0 | 0 | 0 | 100 |
| TESTI2007074 | 0 | 0 | 0 | 0 | 0 | 0 | 100 |
| TESTI2007078 | 0 | 0 | 0 | 0 | 0 | 0 | 100 |
| TESTI2007113 | 0 | 0 | 0 | 0 | 0 | 0 | 100 |
| TESTI2007152 | 0 | 0 | 0 | 0 | 0 | 0 | 100 |
| TESTI2007163 | 0 | 0 | 0 | 0 | 0 | 0 | 47.943 |
| TESTI2007183 | 0 | 0 | 0 | 0 | 0 | 0 | 100 |
| TESTI2007211 | 0 | 0 | 0 | 0 | 0 | 0 | 2.159 |
| TESTI2007220 | 0 | 0 | 0 | 0 | 0 | 0 | 100 |
| TESTI2007234 | 0 | 0 | 0 | 0 | 0 | 0 | 100 |
| TESTI2007311 | 0 | 0 | 0 | 0 | 0 | 0 | 2.515 |
| TESTI2007320 | 0 | 0 | 0 | 0 | 0 | 0 | 100 |
| TESTI2007346 | 0 | 0 | 0 | 0 | 0 | 0 | 100 |
| TESTI2007358 | 0 | 0 | 0 | 0 | 0 | 0 | 100 |
| TESTI2007402 | 0 | 0 | 0 | 0 | 0 | 0 | 100 |
| TESTI2007405 | 0 | 0 | 0 | 0 | 0 | 0 | 100 |
| TESTI2007407 | 0 | 0 | 0 | 0 | 0 | 0 | 2.006 |
| TESTI2007422 | 0 | 0 | 0 | 0 | 0 | 0 | 20.256 |
| TESTI2007452 | 0 | 0 | 0 | 0 | 0 | 0 | 100 |
| TESTI2007464 | 0 | 0 | 0 | 0 | 0 | 0 | 10.487 |
| TESTI2007466 | 0 | 0 | 0 | 0 | 0 | 0 | 100 |
| TESTI2007480 | 0 | 0 | 0 | 0 | 0 | 0 | 100 |
| TESTI2007490 | 0 | 0 | 0 | 0 | 0 | 0 | 100 |
| TESTI2007502 | 0 | 0 | 0 | 0 | 0 | 0 | 100 |
| TESTI2007524 | 0 | 0 | 0 | 0 | 0 | 0 | 100 |
| TESTI2007533 | 0 | 0 | 0 | 0 | 0 | 0 | 100 |
| TESTI2007576 | 0 | 0 | 0 | 0 | 0 | 0 | 100 |
| TESTI2007613 | 0 | 0 | 0 | 0 | 0 | 0 | 100 |
| TESTI2007657 | 0 | 0 | 0 | 0 | 0 | 0 | 100 |
| TESTI2007685 | 0 | 0 | 0 | 0 | 0 | 0 | 100 |
| TESTI2007692 | 0 | 0 | 0 | 0 | 0 | 0 | 100 |
| TESTI2007749 | 0 | 0 | 0 | 0 | 0 | 0 | 100 |
| TESTI2007750 | 0 | 0 | 0 | 0 | 0 | 0 | 100 |
| TESTI2007808 | 0 | 0 | 0 | 0 | 0 | 0 | 100 |
| TESTI2007814 | 0 | 0 | 0 | 0 | 0 | 0 | 100 |
| TESTI2007829 | 0 | 0 | 0 | 0 | 0 | 0 | 100 |
| TESTI2007864 | 0 | 0 | 0 | 0 | 0 | 0 | 43.944 |
| TESTI2007867 | 0 | 0 | 0 | 0 | 0 | 0 | 100 |
| TESTI2007872 | 0 | 0 | 0 | 0 | 0 | 0 | 100 |
| TESTI2007906 | 0 | 0 | 0 | 0 | 0 | 0 | 100 |
| TESTI2007922 | 0 | 0 | 0 | 0 | 0 | 0 | 10.332 |
| TESTI2007951 | 0 | 0 | 0 | 0 | 0 | 0 | 100 |
| TESTI2007972 | 0 | 0 | 0 | 0 | 0 | 0 | 100 |
| TESTI2007973 | 0 | 0 | 0 | 0 | 0 | 0 | 100 |
| TESTI2007998 | 0 | 0 | 0 | 0 | 0 | 0 | 4.134 |
| TESTI2008014 | 0 | 0 | 0 | 0 | 0 | 0 | 100 |
| TESTI2008020 | 0 | 0 | 0 | 0 | 0 | 0 | 67.687 |
| TESTI2008032 | 0 | 0 | 0 | 0 | 0 | 0 | 100 |
| TESTI2008033 | 0 | 0 | 0 | 0 | 0 | 0 | 100 |
| TESTI2008046 | 0 | 0 | 0 | 0 | 0 | 0 | 100 |
| TESTI2008081 | 0 | 0 | 0 | 0 | 0 | 0 | 100 |
| TESTI2008099 | 0 | 0 | 0 | 0 | 0 | 0 | 100 |
| TESTI2008139 | 0 | 0 | 0 | 0 | 0 | 0 | 100 |
| TESTI2008144 | 0 | 0 | 0 | 0 | 0 | 0 | 100 |
| TESTI2008161 | 0 | 0 | 0 | 0 | 0 | 0 | 100 |
| TESTI2008189 | 0 | 0 | 0 | 0 | 0 | 0 | 100 |
| TESTI2008204 | 0 | 0 | 0 | 0 | 0 | 0 | 100 |
| TESTI2008219 | 0 | 0 | 0 | 0 | 0 | 0 | 100 |
| TESTI2008233 | 28.364 | 0 | 0 | 0 | 0 | 0 | 25.789 |
| TESTI2008234 | 0 | 0 | 0 | 0 | 0 | 0 | 100 |
| TESTI2008237 | 0 | 0 | 0 | 0 | 0 | 0 | 100 |
| TESTI2008240 | 0.539 | 0 | 0 | 0 | 0 | 0 | 1.798 |
| TESTI2008278 | 0 | 0 | 0 | 0 | 0 | 0 | 56.337 |
| TESTI2008320 | 0 | 0 | 0 | 0 | 0 | 0 | 100 |
| TESTI2008331 | 0 | 0 | 0 | 0 | 0 | 0 | 100 |
| TESTI2008343 | 0 | 0 | 0 | 0 | 0 | 0 | 100 |
| TESTI2008387 | 0 | 0 | 0 | 0 | 0 | 0 | 100 |
| TESTI2008389 | 0 | 0 | 0 | 0 | 0 | 0 | 100 |
| TESTI2008394 | 0 | 0 | 0 | 0 | 0 | 0 | 26.135 |
| TESTI2008405 | 0 | 0 | 0 | 0 | 0 | 0 | 3.404 |
| TESTI2008420 | 0 | 0 | 0 | 0 | 0 | 0 | 100 |
| TESTI2008425 | 0 | 0 | 0 | 0 | 0 | 0 | 100 |
| TESTI2008440 | 0 | 0 | 0 | 0 | 0 | 0 | 100 |
| TESTI2008567 | 0 | 0 | 0 | 0 | 0 | 0 | 100 |
| TESTI2008595 | 0 | 0 | 0 | 0 | 0 | 0 | 100 |
| TESTI2008621 | 0 | 0 | 0 | 0 | 0 | 0 | 46.229 |
| TESTI2008636 | 0 | 0 | 0 | 0 | 0 | 0 | 100 |
| TESTI2008657 | 0 | 0 | 0 | 0 | 0 | 0 | 100 |
| TESTI2008684 | 0 | 0 | 0 | 0 | 0 | 0 | 100 |
| TESTI2008699 | 21.003 | 0 | 0 | 0 | 0 | 0 | 12.731 |
| TESTI2008715 | 0 | 0 | 0 | 0 | 0 | 0 | 100 |
| TESTI2008762 | 0 | 0 | 0 | 0 | 0 | 0 | 100 |
| TESTI2008774 | 0 | 0 | 0 | 0 | 0 | 0 | 100 |
| TESTI2008786 | 0 | 0 | 0 | 0 | 0 | 0 | 100 |
| TESTI2008822 | 0 | 0 | 0 | 0 | 0 | 0 | 100 |
| TESTI2008835 | 0 | 0 | 0 | 0 | 0 | 0 | 7.093 |
| TESTI2008840 | 0 | 0 | 0 | 0 | 0 | 0 | 27.035 |
| TESTI2008847 | 0 | 0 | 0 | 0 | 0 | 0 | 56.475 |
| TESTI2008884 | 0 | 0 | 0 | 0 | 0 | 0 | 100 |
| TESTI2008901 | 0 | 0 | 0 | 0 | 0 | 0 | 100 |
| TESTI2008929 | 0 | 0 | 0 | 0 | 0 | 0 | 100 |
| TESTI2008946 | 0 | 0 | 0 | 0 | 0 | 0 | 100 |
| TESTI2008960 | 0 | 0 | 0 | 0 | 0 | 0 | 100 |
| TESTI2009018 | 0 | 0 | 0 | 0 | 0 | 0 | 100 |
| TESTI2009091 | 0 | 0 | 0 | 0 | 0 | 0 | 100 |
| TESTI2009097 | 0 | 0 | 0 | 0 | 0 | 0 | 100 |
| TESTI2009136 | 0 | 0 | 0 | 0 | 0 | 0 | 100 |
| TESTI2009185 | 0 | 0 | 0 | 0 | 0 | 0 | 100 |
| TESTI2009190 | 0 | 0 | 0 | 0 | 0 | 0 | 100 |
| TESTI2009217 | 0 | 0 | 0 | 0 | 0 | 0 | 100 |
| TESTI2009239 | 0 | 0 | 0 | 0 | 0 | 0 | 47.943 |
| TESTI2009325 | 0 | 0 | 0 | 0 | 0 | 0 | 100 |
| TESTI2009388 | 0 | 0 | 0 | 0 | 0 | 0 | 13.106 |
| TESTI2009390 | 0 | 0 | 0 | 0 | 0 | 0 | 100 |
| TESTI2009400 | 0 | 0 | 0 | 0 | 0 | 0 | 100 |
| TESTI2009402 | 0 | 0 | 0 | 0 | 0 | 0 | 5.993 |
| TESTI2009412 | 0 | 0 | 0 | 0 | 0 | 0 | 100 |
| TESTI2009423 | 0 | 0 | 0 | 0 | 0 | 0 | 10.571 |
| TESTI2009447 | 0 | 0 | 0 | 0 | 0 | 0 | 100 |
| TESTI2009462 | 0 | 0 | 0 | 0 | 0 | 0 | 100 |
| TESTI2009474 | 0 | 44.875 | 0 | 0 | 0 | 0 | 2.641 |
| TESTI2009477 | 0 | 0 | 0 | 0 | 0 | 0 | 100 |
| TESTI2009497 | 0 | 0 | 0 | 0 | 0 | 0 | 34.478 |
| TESTI2009502 | 0 | 0 | 0 | 0 | 0 | 0 | 2.954 |
| TESTI2009511 | 0 | 0 | 0 | 0 | 0 | 0 | 100 |
| TESTI2009520 | 0 | 0 | 0 | 0 | 0 | 0 | 6.863 |
| TESTI2009544 | 0 | 0 | 0 | 0 | 0 | 0 | 100 |
| TESTI2009545 | 0 | 0 | 0 | 0 | 0 | 0 | 100 |
| TESTI2009551 | 0 | 0 | 0 | 0 | 0 | 0 | 100 |
| TESTI2009577 | 0 | 0 | 0 | 0 | 0 | 0 | 5.777 |
| TESTI2009585 | 0 | 0 | 0 | 0 | 0 | 0 | 100 |
| TESTI2009588 | 0 | 0 | 0 | 0 | 0 | 0 | 100 |
| TESTI2009683 | 0 | 0 | 0 | 0 | 0 | 0 | 39.348 |
| TESTI2009727 | 0 | 0 | 0 | 0 | 0 | 0 | 100 |
| TESTI2009739 | 0 | 0 | 0 | 0 | 0 | 0 | 100 |
| TESTI2009785 | 0 | 0 | 10.093 | 0 | 0 | 0 | 0.938 |
| TESTI2009812 | 0 | 0 | 0 | 0 | 0 | 0 | 100 |
| TESTI2009835 | 0 | 0 | 0 | 0 | 0 | 0 | 100 |
| TESTI2009853 | 0 | 0 | 0 | 0 | 0 | 0 | 100 |
| TESTI2009935 | 0 | 0 | 0 | 0 | 0 | 0 | 100 |
| TESTI2009977 | 0 | 0 | 0 | 0 | 0 | 0 | 15.790 |
| TESTI2009987 | 0 | 0 | 0 | 0 | 0 | 0 | 10.003 |
| TESTI2010009 | 0 | 0 | 0 | 0 | 0 | 0 | 100 |
| TESTI2010154 | 0 | 0 | 0 | 0 | 0 | 0 | 100 |
| TESTI2010180 | 0 | 0 | 0 | 0 | 0 | 0 | 22.675 |
| TESTI2010239 | 0 | 0 | 0 | 0 | 0 | 0 | 100 |
| TESTI2010280 | 0 | 0 | 0 | 0 | 0 | 0 | 100 |
| TESTI2010354 | 0 | 0 | 0 | 0 | 0 | 0 | 100 |
| TESTI2010396 | 0 | 0 | 0 | 0 | 0 | 0 | 100 |
| TESTI2010400 | 0 | 0 | 0 | 0 | 0 | 0 | 100 |
| TESTI2010409 | 0 | 0 | 0 | 0 | 0 | 0 | 100 |
| TESTI2010513 | 0 | 0 | 0 | 0 | 0 | 0 | 5.136 |
| TESTI2010572 | 0 | 0 | 0 | 0 | 0 | 0 | 100 |
| TESTI2010587 | 0 | 0 | 0 | 0 | 0 | 0 | 100 |
| TESTI2010591 | 0 | 0 | 0 | 0 | 0 | 0 | 100 |
| TESTI2010617 | 0 | 0 | 0 | 0 | 0 | 0 | 4.552 |
| TESTI2010682 | 0 | 0 | 0 | 0 | 0 | 0 | 100 |
| TESTI2010724 | 0 | 0 | 0 | 0 | 0 | 0 | 93.183 |
| TESTI2010732 | 0 | 0 | 0 | 0 | 0 | 0 | 100 |
| TESTI2010734 | 0 | 0 | 0 | 0 | 0 | 0 | 100 |
| TESTI2010755 | 0 | 0 | 0 | 0 | 0 | 0 | 100 |
| TESTI2010793 | 0 | 0 | 0 | 0 | 0 | 0 | 100 |
| TESTI2010806 | 0 | 0 | 0 | 0 | 0 | 0 | 100 |
| TESTI2010833 | 0 | 0 | 0 | 0 | 0 | 0 | 100 |
| TESTI2010872 | 0 | 0 | 0 | 0 | 0 | 0 | 100 |
| TESTI2011009 | 0 | 0 | 0 | 0 | 0 | 0 | 100 |
| TESTI2011020 | 0 | 0 | 0 | 0 | 0 | 0 | 100 |
| TESTI2011028 | 0 | 0 | 0 | 0 | 0 | 0 | 100 |
| TESTI2011033 | 0 | 0 | 0 | 0 | 0 | 0 | 100 |
| TESTI2011254 | 0 | 0 | 0 | 0 | 0 | 0 | 100 |
| TESTI2011286 | 0 | 0 | 0 | 0 | 0 | 0 | 17.123 |
| TESTI2011294 | 0 | 0 | 0 | 0 | 0 | 0 | 100 |
| TESTI2011314 | 0 | 0 | 0 | 0 | 0 | 0 | 100 |
| TESTI2011315 | 0 | 0 | 0 | 0 | 0 | 0 | 100 |
| TESTI2011394 | 0 | 0 | 0 | 0 | 0 | 0 | 100 |
| TESTI2011407 | 0 | 0 | 0 | 0 | 0 | 0 | 100 |
| TESTI2011448 | 0 | 0 | 0 | 0 | 0 | 0 | 100 |
| TESTI2011480 | 0 | 0 | 0 | 0 | 0 | 0 | 100 |
| TESTI2011549 | 0 | 0 | 0 | 0 | 0 | 0 | 39.348 |
| TESTI2011575 | 0 | 0 | 0 | 0 | 0 | 0 | 100 |
| TESTI2011605 | 0 | 0 | 0 | 0 | 0 | 0 | 25.917 |
| TESTI2011612 | 0 | 0 | 0 | 0 | 0 | 0 | 100 |
| TESTI2011665 | 0 | 0 | 0 | 0 | 0 | 0 | 100 |
| TESTI2011680 | 0 | 0 | 0 | 0 | 0 | 0 | 14.670 |
| TESTI2011683 | 0 | 0 | 0 | 0 | 0 | 0 | 21.164 |
| TESTI2011712 | 0 | 0 | 0 | 0 | 0 | 0 | 27.033 |
| TESTI2011750 | 0 | 0 | 0 | 0 | 0 | 0 | 100 |
| TESTI2011840 | 0 | 0 | 0 | 0 | 0 | 0 | 100 |
| TESTI2011846 | 0 | 0 | 0 | 0 | 0 | 0 | 100 |
| TESTI2011915 | 0 | 0 | 0 | 0 | 0 | 0 | 100 |
| TESTI2011928 | 0 | 0 | 0 | 0 | 0 | 0 | 100 |
| TESTI2011971 | 0 | 0 | 0 | 0 | 0 | 0 | 100 |
| TESTI2012019 | 0 | 0 | 0 | 0 | 0 | 0 | 7.602 |
| TESTI2012050 | 0 | 0 | 0 | 0 | 0 | 0 | 100 |
| TESTI2012090 | 0 | 0 | 0 | 0 | 0 | 0 | 100 |
| TESTI2012095 | 0 | 0 | 0 | 0 | 0 | 0 | 100 |
| TESTI2012104 | 0 | 0 | 0 | 0 | 0 | 0 | 6.364 |
| TESTI2012152 | 0 | 0 | 0 | 0 | 0 | 0 | 100 |
| TESTI2012155 | 0 | 0 | 0 | 0 | 0 | 0 | 8.378 |
| TESTI2012171 | 0 | 0 | 0 | 0 | 0 | 0 | 100 |
| TESTI2012207 | 0 | 0 | 0 | 0 | 0 | 0 | 100 |
| TESTI2012231 | 0 | 0 | 0 | 0 | 0 | 0 | 100 |
| TESTI2012244 | 0 | 0 | 0 | 0 | 0 | 0 | 100 |
| TESTI2012289 | 0 | 0 | 0 | 0 | 0 | 0 | 5.642 |
| TESTI2012308 | 0 | 0 | 0 | 0 | 0 | 0 | 100 |
| TESTI2012356 | 0 | 0 | 0 | 0 | 0 | 0 | 1.895 |
| TESTI2012387 | 0 | 0 | 0 | 0 | 0 | 0 | 100 |
| TESTI2012394 | 0 | 0 | 0 | 0 | 0 | 0 | 70.009 |
| TESTI2012444 | 0 | 0 | 0 | 0 | 0 | 0 | 100 |
| TESTI2012511 | 0 | 0 | 0 | 0 | 0 | 0 | 2.806 |
| TESTI2012528 | 0 | 0 | 0 | 0 | 0 | 0 | 100 |
| TESTI2012544 | 0 | 0 | 0 | 0 | 0 | 0 | 100 |
| TESTI2012550 | 0 | 0 | 0 | 0 | 0 | 0 | 100 |
| TESTI2012571 | 0 | 0 | 0 | 0 | 0 | 0 | 26.782 |
| TESTI2012592 | 0 | 0 | 0 | 0 | 0 | 0 | 100 |
| TESTI2012617 | 0 | 0 | 0 | 0 | 0 | 0 | 100 |
| TESTI2012628 | 0 | 0 | 0 | 0 | 0 | 0 | 100 |
| TESTI2012778 | 0 | 4.104 | 0 | 0 | 0 | 0 | 0.845 |
| TESTI2012812 | 0 | 0 | 0 | 0 | 0 | 0 | 100 |
| TESTI2012834 | 0 | 0 | 0 | 0 | 0 | 0 | 100 |
| TESTI2012835 | 0 | 0 | 0 | 0 | 0 | 0 | 100 |
| TESTI2012861 | 0 | 0 | 0 | 0 | 0 | 0 | 100 |
| TESTI2012900 | 0 | 0 | 0 | 0 | 0 | 0 | 100 |
| TESTI2012915 | 0 | 0 | 0 | 0 | 0 | 0 | 100 |
| TESTI2012922 | 0 | 0 | 0 | 0 | 0 | 0 | 100 |
| TESTI2013001 | 0 | 0 | 0 | 0 | 0 | 0 | 100 |
| TESTI2013012 | 0 | 0 | 0 | 0 | 0 | 0 | 100 |
| TESTI2013053 | 0 | 0 | 0 | 0 | 0 | 0 | 100 |
| TESTI2013144 | 0 | 0 | 0 | 0 | 0 | 0 | 100 |
| TESTI2013163 | 0 | 0 | 0 | 0 | 0 | 0 | 100 |
| TESTI2013169 | 0 | 0 | 0 | 0 | 0 | 0 | 100 |
| TESTI2013212 | 0 | 0 | 0 | 0 | 0 | 0 | 100 |
| TESTI2013231 | 0 | 0 | 0 | 0 | 0 | 0 | 1.301 |
| TESTI2013257 | 0 | 0 | 0 | 0 | 0 | 0 | 100 |
| TESTI2013264 | 0 | 0 | 0 | 0 | 0 | 0 | 16.423 |
| TESTI2013268 | 0 | 0 | 0 | 0 | 0 | 0 | 100 |
| TESTI2013295 | 0 | 0 | 0 | 0 | 0 | 0 | 6.964 |
| TESTI2013322 | 0 | 0 | 0 | 0 | 0 | 0 | 100 |
| TESTI2013381 | 0 | 0 | 0 | 0 | 0 | 0 | 100 |
| TESTI2013382 | 0 | 0 | 0 | 0 | 0 | 0 | 100 |
| TESTI2013401 | 0 | 0 | 0 | 0 | 0 | 0 | 100 |
| TESTI2013427 | 0 | 0 | 0 | 0 | 0 | 0 | 100 |
| TESTI2013468 | 0 | 0 | 0 | 0 | 0 | 0 | 100 |
| TESTI2013497 | 0 | 0 | 0 | 0 | 0 | 0 | 100 |
| TESTI2013545 | 0 | 0 | 0 | 0 | 0 | 0 | 100 |
| TESTI2013546 | 0 | 0 | 0 | 0 | 0 | 0 | 100 |
| TESTI2013566 | 0 | 0 | 0 | 0 | 0 | 0 | 100 |
| TESTI2013601 | 0 | 0 | 0 | 0 | 0 | 0 | 100 |
| TESTI2013604 | 0 | 0 | 0 | 0 | 0 | 0 | 100 |
| TESTI2013607 | 0 | 0 | 0 | 0 | 0 | 0 | 100 |
| TESTI2013610 | 0 | 0 | 0 | 0 | 0 | 0 | 100 |
| TESTI2013691 | 0 | 0 | 0 | 0 | 0 | 0 | 100 |
| TESTI2013699 | 0 | 0 | 0 | 0 | 0 | 0 | 100 |
| TESTI2013737 | 0 | 0 | 0 | 0 | 0 | 0 | 100 |
| TESTI2013767 | 0 | 0 | 0 | 0 | 0 | 0 | 100 |
| TESTI2013832 | 0 | 0 | 0 | 0 | 0 | 0 | 100 |
| TESTI2013873 | 0 | 0 | 0 | 0 | 0 | 0 | 100 |
| TESTI2013889 | 0 | 0 | 0 | 0 | 0 | 0 | 100 |
| TESTI2014007 | 0 | 0 | 0 | 0 | 0 | 0 | 100 |
| TESTI2014036 | 0 | 0 | 0 | 0 | 0 | 0 | 100 |
| TESTI2014097 | 0 | 0 | 0 | 0 | 0 | 0 | 100 |
| TESTI2014160 | 0 | 0 | 0 | 0 | 0 | 0 | 100 |
| TESTI2014248 | 0 | 0 | 0 | 0 | 0 | 0 | 100 |
| TESTI2014254 | 0 | 0 | 0 | 0 | 0 | 0 | 100 |
| TESTI2014269 | 0 | 0 | 0 | 0 | 0 | 0 | 100 |
| TESTI2014274 | 0 | 0 | 0 | 0 | 0 | 0 | 100 |
| TESTI2014318 | 0 | 0 | 0 | 0 | 0 | 0 | 18.792 |
| TESTI2014324 | 0 | 0 | 0 | 0 | 0 | 0 | 100 |
| TESTI2014339 | 0 | 0 | 0 | 0 | 0 | 0 | 100 |
| TESTI2014362 | 0 | 0 | 0 | 0 | 0 | 0 | 100 |
| TESTI2014385 | 0 | 0 | 0 | 0 | 0 | 0 | 100 |
| TESTI2014415 | 0 | 0 | 0 | 0 | 0 | 0 | 100 |
| TESTI2014439 | 0 | 0 | 0 | 0 | 0 | 0 | 100 |
| TESTI2014474 | 0 | 0 | 0 | 0 | 0 | 0 | 100 |
| TESTI2014505 | 0 | 0 | 0 | 0 | 0 | 0 | 12.881 |
| TESTI2014577 | 0 | 0 | 0 | 0 | 0 | 0 | 100 |
| TESTI2014578 | 0 | 0 | 0 | 0 | 0 | 0 | 100 |
| TESTI2014716 | 0 | 0 | 0 | 0 | 0 | 0 | 100 |
| TESTI2014780 | 0 | 0 | 0 | 0 | 0 | 0 | 18.563 |
| TESTI2014800 | 0 | 0 | 0 | 0 | 0 | 0 | 100 |
| TESTI2014838 | 0 | 0 | 0 | 0 | 0 | 0 | 77.083 |
| TESTI2014843 | 0 | 0 | 0 | 0 | 0 | 0 | 100 |
| TESTI2014979 | 0 | 0 | 0 | 0 | 0 | 0 | 100 |
| TESTI2014988 | 0 | 0 | 0 | 0 | 0 | 0 | 100 |
| TESTI2015042 | 0 | 0 | 0 | 0 | 0 | 0 | 56.168 |
| TESTI2015092 | 0 | 0 | 0 | 0 | 0 | 0 | 4.331 |
| TESTI2015105 | 0 | 0 | 0 | 0 | 0 | 0 | 100 |
| TESTI2015180 | 0 | 0 | 0 | 0 | 0 | 0 | 100 |
| TESTI2015213 | 0 | 0 | 3.610 | 0 | 0 | 0 | 1.342 |
| TESTI2015246 | 25.535 | 0 | 0 | 0 | 0 | 0 | 15.478 |
| TESTI2015249 | 0 | 0 | 0 | 0 | 0 | 0 | 100 |
| TESTI2015327 | 0 | 0 | 0 | 0 | 0 | 0 | 100 |
| TESTI2015331 | 0 | 0 | 0 | 0 | 0 | 0 | 100 |
| TESTI2015335 | 0 | 0 | 0 | 0 | 0 | 0 | 44.030 |
| TESTI2015350 | 0 | 0 | 0 | 0 | 0 | 0 | 100 |
| TESTI2015375 | 0 | 0 | 0 | 0 | 0 | 0 | 100 |
| TESTI2015437 | 0 | 0 | 0 | 0 | 0 | 0 | 2.669 |
| TESTI2015590 | 0 | 0 | 0 | 0 | 0 | 0 | 100 |
| TESTI2015610 | 0 | 0 | 0 | 0 | 0 | 0 | 100 |
| TESTI2015626 | 0 | 7.305 | 0 | 0 | 0 | 2.250 | 1.720 |
| TESTI2015647 | 0 | 0 | 0 | 0 | 0 | 0 | 100 |
| TESTI2015675 | 0 | 0 | 0 | 0 | 0 | 0 | 100 |
| TESTI2015710 | 0 | 0 | 0 | 0 | 0 | 0 | 100 |
| TESTI2015752 | 0 | 0 | 0 | 0 | 0 | 0 | 100 |
| TESTI2015830 | 0 | 0 | 0 | 0 | 0 | 0 | 100 |
| TESTI2015914 | 0 | 0 | 0 | 0 | 0 | 0 | 100 |
| TESTI2015938 | 0 | 0 | 0 | 0 | 0 | 0 | 100 |
| TESTI2015947 | 0 | 0 | 0 | 0 | 0 | 0 | 100 |
| TESTI2015962 | 0 | 0 | 0 | 0 | 0 | 0 | 2.593 |
| TESTI2015987 | 0 | 0 | 0 | 0 | 0 | 0 | 100 |
| TESTI2016033 | 0 | 0 | 0 | 0 | 0 | 0 | 2.278 |
| TESTI2016046 | 0 | 0 | 0 | 0 | 0 | 0 | 100 |
| TESTI2016101 | 0 | 0 | 0 | 0 | 0 | 0 | 5.668 |
| TESTI2016162 | 0 | 0 | 0 | 0 | 0 | 0 | 100 |
| TESTI2016197 | 0 | 0 | 0 | 0 | 0 | 0 | 100 |
| TESTI2016278 | 0 | 0 | 0 | 0 | 0 | 0 | 37.085 |
| TESTI2016298 | 0 | 0 | 0 | 0 | 0 | 0 | 100 |
| TESTI2016331 | 0 | 0 | 0 | 0 | 0 | 0 | 100 |
| TESTI2016337 | 0 | 0 | 0 | 0 | 0 | 0 | 100 |
| TESTI2016410 | 0 | 0 | 0 | 0 | 0 | 0 | 100 |
| TESTI2016421 | 0 | 0 | 0 | 0 | 0 | 0 | 100 |
| TESTI2016509 | 0 | 0 | 0 | 0 | 0 | 0 | 100 |
| TESTI2016568 | 0 | 0 | 0 | 0 | 0 | 0 | 100 |
| TESTI2016583 | 0 | 0 | 0 | 0 | 0 | 0 | 23.515 |
| TESTI2016599 | 0 | 0 | 0 | 0 | 0 | 0 | 100 |
| TESTI2016629 | 0 | 0 | 0 | 0 | 0 | 0 | 100 |
| TESTI2016663 | 0 | 0 | 0 | 0 | 0 | 0 | 100 |
| TESTI2016667 | 0 | 0 | 0 | 0 | 0 | 0 | 100 |
| TESTI2016688 | 0 | 0 | 0 | 0 | 0 | 0 | 100 |
| TESTI2016701 | 0 | 0 | 0 | 0 | 0 | 0 | 47.943 |
| TESTI2016758 | 0 | 0 | 0 | 0 | 0 | 0 | 100 |
| TESTI2016848 | 0 | 0 | 0 | 0 | 0 | 0 | 100 |
| TESTI2016863 | 0 | 0 | 0 | 0 | 0 | 0 | 100 |
| TESTI2016888 | 0 | 0 | 0 | 0 | 0 | 0 | 100 |
| TESTI2016896 | 0 | 0 | 0 | 0 | 0 | 0 | 56.168 |
| TESTI2016922 | 0 | 0 | 0 | 0 | 0 | 0 | 100 |
| TESTI2016942 | 0 | 0 | 0 | 0 | 0 | 0 | 100 |
| TESTI2016950 | 0 | 0 | 0 | 0 | 0 | 0 | 100 |
| TESTI2016996 | 0 | 0 | 0 | 0 | 0 | 0 | 100 |
| TESTI2017017 | 0 | 0 | 0 | 0 | 0 | 0 | 100 |
| TESTI2017028 | 0 | 0 | 0 | 0 | 0 | 0 | 100 |
| TESTI2017035 | 0 | 0 | 0 | 0 | 0 | 0 | 27.423 |
| TESTI2017069 | 0 | 0 | 0 | 0 | 0 | 0 | 100 |
| TESTI2017089 | 0 | 0 | 0 | 0 | 0 | 0 | 100 |
| TESTI2017102 | 0 | 0 | 0 | 0 | 0 | 0 | 100 |
| TESTI2017107 | 0 | 0 | 0 | 0 | 0 | 0 | 39.348 |
| TESTI2017113 | 0 | 0 | 0 | 0 | 0 | 0 | 100 |
| TESTI2017125 | 0 | 0 | 0 | 0 | 0 | 0 | 100 |
| TESTI2017256 | 0 | 0 | 0 | 0 | 0 | 0 | 100 |
| TESTI2017305 | 0 | 0 | 0 | 0 | 0 | 0 | 100 |
| TESTI2017311 | 0 | 0 | 0 | 0 | 0 | 0 | 100 |
| TESTI2017396 | 0 | 0 | 0 | 0 | 0 | 0 | 100 |
| TESTI2017507 | 0 | 0 | 0 | 0 | 0 | 0 | 100 |
| TESTI2017537 | 0 | 0 | 0 | 0 | 0 | 0 | 100 |
| TESTI2017582 | 0 | 0 | 0 | 0 | 0 | 0 | 100 |
| TESTI2017584 | 0 | 0 | 0 | 0 | 0 | 0 | 100 |
| TESTI2017645 | 0 | 0 | 0 | 0 | 0 | 0 | 21.754 |
| TESTI2017727 | 0 | 0 | 0 | 0 | 0 | 0 | 100 |
| TESTI2017740 | 0 | 0 | 0 | 0 | 0 | 0 | 100 |
| TESTI2017775 | 0 | 0 | 0 | 0 | 0 | 0 | 100 |
| TESTI2017816 | 0 | 0 | 0 | 0 | 0 | 0 | 100 |
| TESTI2017832 | 0 | 0 | 0 | 0 | 0 | 0 | 100 |
| TESTI2017923 | 0 | 0 | 0 | 0 | 0 | 0 | 100 |
| TESTI2017932 | 0 | 0 | 0 | 0 | 0 | 0 | 100 |
| TESTI2017951 | 0 | 0 | 0 | 0 | 0 | 0 | 100 |
| TESTI2017954 | 0 | 14.714 | 0 | 0 | 0 | 0 | 0.866 |
| TESTI2018014 | 0 | 0 | 0 | 0 | 0 | 0 | 5.039 |
| TESTI2018031 | 0 | 0 | 0 | 0 | 0 | 0 | 100 |
| TESTI2018035 | 0 | 0 | 0 | 0 | 0 | 0 | 100 |
| TESTI2018060 | 0 | 0 | 0 | 0 | 0 | 0 | 100 |
| TESTI2018083 | 0 | 0 | 0 | 0 | 0 | 0 | 100 |
| TESTI2018178 | 0 | 0 | 0 | 0 | 0 | 0 | 100 |
| TESTI2018221 | 0 | 0 | 0 | 0 | 0 | 0 | 100 |
| TESTI2018276 | 0 | 0 | 0 | 0 | 0 | 0 | 100 |
| TESTI2018290 | 0 | 0 | 0 | 0 | 0 | 0 | 100 |
| TESTI2018335 | 0 | 0 | 0 | 0 | 0 | 0 | 100 |
| TESTI2018337 | 0 | 0 | 0 | 0 | 0 | 0 | 100 |
| TESTI2018368 | 0 | 0 | 0 | 0 | 0 | 0 | 100 |
| TESTI2018421 | 0 | 0 | 0 | 0 | 0 | 0 | 15.347 |
| TESTI2018428 | 0 | 0 | 0 | 0 | 0 | 0 | 100 |
| TESTI2018462 | 6.095 | 0 | 0 | 0 | 0 | 0 | 9.236 |
| TESTI2018475 | 0 | 0 | 0 | 0 | 0 | 0 | 100 |
| TESTI2018482 | 0 | 0 | 0 | 0 | 0 | 0 | 100 |
| TESTI2018521 | 0 | 0 | 0 | 0 | 0 | 0 | 100 |
| TESTI2018565 | 0 | 0 | 0 | 0 | 0 | 0 | 100 |
| TESTI2018581 | 0 | 0 | 0 | 0 | 0 | 0 | 100 |
| TESTI2018611 | 0 | 0 | 0 | 0 | 0 | 0 | 3.433 |
| TESTI2018687 | 0 | 0 | 0 | 0 | 0 | 0 | 100 |
| TESTI2018697 | 0 | 0 | 0 | 0 | 0 | 0 | 100 |
| TESTI2018838 | 0 | 0 | 0 | 0 | 0 | 0 | 100 |
| TESTI2018867 | 0 | 0 | 0 | 0 | 0 | 0 | 72.596 |
| TESTI2018941 | 0 | 0 | 0 | 0 | 0 | 0 | 100 |
| TESTI2018957 | 0 | 0 | 0 | 0 | 0 | 0 | 100 |
| TESTI2018974 | 0 | 0 | 0 | 0 | 0 | 0 | 100 |
| TESTI2018975 | 0 | 0 | 0 | 0 | 0 | 0 | 100 |
| TESTI2018997 | 0 | 0 | 14.651 | 0 | 0 | 0 | 2.723 |
| TESTI2019042 | 0 | 0 | 0 | 0 | 0 | 0 | 100 |
| TESTI2019077 | 0 | 0 | 0 | 0 | 0 | 0 | 43.944 |
| TESTI2019228 | 0 | 0 | 0 | 0 | 0 | 0 | 100 |
| TESTI2019257 | 0 | 0 | 0 | 0 | 0 | 0 | 100 |
| TESTI2019280 | 0 | 0 | 0 | 0 | 0 | 0 | 100 |
| TESTI2019282 | 0 | 0 | 0 | 0 | 0 | 0 | 100 |
| TESTI2019308 | 0 | 0 | 0 | 0 | 0 | 0 | 100 |
| TESTI2019336 | 0 | 0 | 0 | 0 | 0 | 0 | 100 |
| TESTI2019352 | 0 | 0 | 0 | 0 | 0 | 0 | 100 |
| TESTI2019406 | 0 | 0 | 0 | 0 | 0 | 0 | 100 |
| TESTI2019430 | 0 | 0 | 0 | 0 | 0 | 0 | 100 |
| TESTI2019455 | 0 | 0 | 0 | 0 | 0 | 0 | 100 |
| TESTI2019481 | 0 | 0 | 0 | 0 | 0 | 0 | 100 |
| TESTI2019488 | 0 | 0 | 0 | 0 | 0 | 0 | 100 |
| TESTI2019501 | 0 | 0 | 0 | 0 | 0 | 0 | 100 |
| TESTI2019648 | 0 | 0 | 0 | 0 | 0 | 0 | 100 |
| TESTI2019669 | 0 | 0 | 0 | 0 | 0 | 0 | 100 |
| TESTI2019697 | 0 | 0 | 0 | 0 | 0 | 0 | 100 |
| TESTI2019729 | 0 | 0 | 0 | 0 | 0 | 0 | 25.979 |
| TESTI2019760 | 0 | 0 | 0 | 0 | 0 | 0 | 29.749 |
| TESTI2019787 | 0 | 0 | 0 | 0 | 0 | 0 | 100 |
| TESTI2019794 | 0 | 0 | 0 | 0 | 0 | 0 | 100 |
| TESTI2019854 | 0 | 0 | 0 | 0 | 0 | 0 | 100 |
| TESTI2019859 | 0 | 0 | 0 | 0 | 0 | 0 | 100 |
| TESTI2019860 | 0 | 0 | 0 | 0 | 0 | 0 | 100 |
| TESTI2019872 | 0 | 0 | 0 | 0 | 0 | 0 | 100 |
| TESTI2019911 | 0 | 0 | 0 | 0 | 0 | 0 | 100 |
| TESTI2019917 | 0 | 0 | 0 | 0 | 0 | 0 | 100 |
| TESTI2019975 | 0 | 0 | 0 | 0 | 0 | 0 | 100 |
| TESTI2019998 | 0 | 0 | 0 | 0 | 0 | 0 | 100 |
| TESTI2020012 | 0 | 0 | 0 | 0 | 0 | 0 | 14.939 |
| TESTI2020026 | 0 | 0 | 0 | 0 | 0 | 0 | 8.489 |
| TESTI2020029 | 0 | 0 | 0 | 0 | 0 | 0 | 100 |
| TESTI2020071 | 0 | 0 | 0 | 0 | 0 | 0 | 100 |
| TESTI2020084 | 0 | 0 | 0 | 0 | 0 | 0 | 100 |
| TESTI2020265 | 0 | 0 | 0 | 0 | 0 | 0 | 100 |
| TESTI2020283 | 0 | 0 | 0 | 0 | 0 | 0 | 100 |
| TESTI2020316 | 0 | 0 | 0 | 0 | 0 | 0 | 100 |
| TESTI2020344 | 0 | 0 | 0 | 0 | 0 | 0 | 100 |
| TESTI2020379 | 0 | 0 | 0 | 0 | 0 | 0 | 100 |
| TESTI2020426 | 0 | 0 | 0 | 0 | 0 | 0 | 100 |
| TESTI2020445 | 0 | 0 | 0 | 0 | 0 | 0 | 100 |
| TESTI2020510 | 0 | 0 | 0 | 0 | 0 | 0 | 4.728 |
| TESTI2020515 | 0 | 0 | 0 | 0 | 0 | 0 | 100 |
| TESTI2020525 | 0 | 0 | 0 | 0 | 0 | 0 | 21.336 |
| TESTI2020579 | 0 | 0 | 0 | 0 | 0 | 0 | 100 |
| TESTI2020717 | 0 | 0 | 0 | 0 | 0 | 0 | 100 |
| TESTI2020840 | 0 | 0 | 0 | 0 | 0 | 0 | 74.775 |
| TESTI2020871 | 0 | 0 | 0 | 0 | 0 | 0 | 35.404 |
| TESTI2020905 | 0 | 0 | 0 | 0 | 0 | 0 | 100 |
| TESTI2020906 | 0 | 0 | 0 | 0 | 0 | 0 | 100 |
| TESTI2020946 | 0 | 0 | 0 | 0 | 0 | 0 | 8.001 |
| TESTI2020956 | 0 | 0 | 0 | 0 | 0 | 0 | 2.813 |
| TESTI2020981 | 0 | 0 | 0 | 0 | 0 | 0 | 100 |
| TESTI2020999 | 0 | 0 | 0 | 0 | 0 | 0 | 100 |
| TESTI2021003 | 0 | 0 | 0 | 0 | 0 | 0 | 100 |
| TESTI2021038 | 0 | 0 | 0 | 0 | 0 | 0 | 27.658 |
| TESTI2021057 | 0 | 0 | 0 | 0 | 0 | 0 | 100 |
| TESTI2021077 | 0 | 0 | 0 | 0 | 0 | 0 | 100 |
| TESTI2021112 | 0 | 0 | 0 | 0 | 0 | 0 | 100 |
| TESTI2021114 | 0 | 0 | 0 | 0 | 0 | 0 | 100 |
| TESTI2021116 | 0 | 0 | 0 | 0 | 0 | 0 | 100 |
| TESTI2021118 | 0 | 0 | 0 | 0 | 0 | 0 | 7.012 |
| TESTI2021122 | 0 | 0 | 0 | 0 | 0 | 0 | 100 |
| TESTI2021124 | 0 | 0 | 0 | 0 | 0 | 0 | 3.736 |
| TESTI2021138 | 0 | 0 | 0 | 0 | 0 | 0 | 100 |
| TESTI2021297 | 0 | 0 | 0 | 0 | 0 | 0 | 4.488 |
| TESTI2021315 | 0 | 0 | 0 | 0 | 0 | 0 | 26.494 |
| TESTI2021358 | 0 | 0 | 0 | 0 | 0 | 0 | 22.119 |
| TESTI2021425 | 0 | 0 | 0 | 36.333 | 0 | 0 | 6.752 |
| TESTI2021447 | 0 | 0 | 0 | 0 | 0 | 0 | 67.792 |
| TESTI2021463 | 0 | 0 | 0 | 0 | 0 | 0 | 100 |
| TESTI2021531 | 0 | 0 | 0 | 0 | 0 | 0 | 10.937 |
| TESTI2021599 | 0 | 0 | 0 | 0 | 0 | 0 | 100 |
| TESTI2021637 | 0 | 0 | 0 | 0 | 0 | 0 | 100 |
| TESTI2021654 | 0 | 0 | 0 | 0 | 0 | 0 | 6.389 |
| TESTI2021667 | 0 | 0 | 0 | 0 | 0 | 0 | 100 |
| TESTI2021736 | 0 | 0 | 0 | 0 | 0 | 0 | 100 |
| TESTI2021785 | 0 | 0 | 0 | 0 | 0 | 0 | 100 |
| TESTI2021819 | 0 | 0 | 0 | 0 | 0 | 0 | 100 |
| TESTI2021851 | 0 | 0 | 0 | 0 | 0 | 0 | 12.368 |
| TESTI2021895 | 0 | 0 | 0 | 0 | 0 | 0 | 100 |
| TESTI2021911 | 0 | 0 | 0 | 0 | 0 | 0 | 100 |
| TESTI2021939 | 0 | 0 | 0 | 0 | 0 | 0 | 100 |
| TESTI2021999 | 0 | 0 | 0 | 0 | 0 | 0 | 100 |
| TESTI2022010 | 0 | 0 | 0 | 0 | 0 | 0 | 100 |
| TESTI2022023 | 0 | 0 | 0 | 0 | 0 | 0 | 100 |
| TESTI2022065 | 0 | 0 | 0 | 0 | 0 | 0 | 100 |
| TESTI2022086 | 0 | 0 | 0 | 0 | 0 | 0 | 100 |
| TESTI2022179 | 0 | 0 | 0 | 0 | 0 | 0 | 48.059 |
| TESTI2022203 | 0 | 0 | 0 | 0 | 0 | 0 | 100 |
| TESTI2022246 | 0 | 0 | 0 | 0 | 0 | 0 | 100 |
| TESTI2022323 | 0 | 0 | 0 | 0 | 0 | 0 | 100 |
| TESTI2022338 | 0 | 0 | 0 | 0 | 0 | 0 | 100 |
| TESTI2022400 | 0 | 0 | 0 | 0 | 0 | 0 | 100 |
| TESTI2022462 | 0 | 0 | 0 | 0 | 0 | 0 | 100 |
| TESTI2022495 | 0 | 0 | 0 | 0 | 0 | 0 | 100 |
| TESTI2022623 | 0 | 0 | 0 | 0 | 0 | 0 | 100 |
| TESTI2022649 | 0 | 0 | 0 | 0 | 0 | 0 | 100 |
| TESTI2022652 | 0 | 0 | 0 | 0 | 0 | 0 | 100 |
| TESTI2022738 | 0 | 0 | 0 | 0 | 0 | 0 | 100 |
| TESTI2022798 | 0 | 0 | 0 | 0 | 0 | 0 | 100 |
| TESTI2022812 | 0 | 0 | 0 | 0 | 0 | 0 | 100 |
| TESTI2022814 | 0 | 0 | 0 | 0 | 0 | 0 | 100 |
| TESTI2022874 | 0 | 0 | 0 | 0 | 0 | 0 | 100 |
| TESTI2022940 | 0 | 0 | 0 | 0 | 0 | 0 | 100 |
| TESTI2022952 | 0 | 0 | 0 | 0 | 0 | 0 | 100 |
| TESTI2023025 | 0 | 0 | 0 | 0 | 0 | 0 | 8.225 |
| TESTI2023033 | 0 | 0 | 0 | 0 | 0 | 0 | 35.902 |
| TESTI2023053 | 0 | 0 | 0 | 0 | 0 | 0 | 100 |
| TESTI2023085 | 0 | 0 | 0 | 0 | 0 | 0 | 100 |
| TESTI2023192 | 0 | 0 | 0 | 0 | 0 | 0 | 100 |
| TESTI2023194 | 0 | 0 | 0 | 0 | 0 | 0 | 100 |
| TESTI2023214 | 0 | 0 | 0 | 0 | 0 | 0 | 100 |
| TESTI2023254 | 0 | 0 | 0 | 0 | 0 | 0 | 100 |
| TESTI2023386 | 0 | 0 | 0 | 0 | 0 | 0 | 100 |
| TESTI2023414 | 0 | 0 | 0 | 0 | 0 | 0 | 2.661 |
| TESTI2023427 | 0 | 0 | 0 | 0 | 0 | 0 | 100 |
| TESTI2023436 | 0 | 0 | 0 | 0 | 0 | 0 | 100 |
| TESTI2023599 | 0 | 0 | 0 | 0 | 0 | 0 | 100 |
| TESTI2023752 | 0 | 0 | 0 | 0 | 0 | 0 | 100 |
| TESTI2023800 | 0 | 0 | 0 | 0 | 0 | 0 | 100 |
| TESTI2023861 | 0 | 0 | 0 | 0 | 0 | 0 | 100 |
| TESTI2023903 | 0 | 0 | 0 | 0 | 0 | 0 | 100 |
| TESTI2023942 | 0 | 0 | 0 | 0 | 0 | 0 | 100 |
| TESTI2023947 | 0 | 0 | 0 | 0 | 0 | 0 | 100 |
| TESTI2023951 | 0 | 0 | 0 | 0 | 0 | 0 | 100 |
| TESTI2023968 | 0 | 0 | 0 | 0 | 0 | 0 | 100 |
| TESTI2024009 | 0 | 0 | 0 | 0 | 0 | 0 | 100 |
| TESTI2024090 | 0 | 0 | 0 | 0 | 0 | 0 | 26.863 |
| TESTI2024125 | 76.742 | 0 | 0 | 0 | 0 | 0 | 23.258 |
| TESTI2024153 | 0 | 0 | 0 | 0 | 0 | 0 | 100 |
| TESTI2024192 | 0 | 0 | 0 | 0 | 0 | 0 | 100 |
| TESTI2024267 | 0 | 0 | 0 | 0 | 0 | 0 | 100 |
| TESTI2024283 | 0 | 0 | 0 | 0 | 0 | 0 | 36.852 |
| TESTI2024299 | 0 | 0 | 0 | 0 | 0 | 0 | 100 |
| TESTI2024419 | 0 | 0 | 0 | 0 | 0 | 0 | 100 |
| TESTI2024422 | 0 | 0 | 0 | 0 | 0 | 0 | 100 |
| TESTI2024443 | 0 | 0 | 0 | 0 | 0 | 0 | 100 |
| TESTI2024446 | 0 | 0 | 0 | 0 | 0 | 0 | 100 |
| TESTI2024473 | 0 | 0 | 0 | 0 | 0 | 0 | 100 |
| TESTI2024476 | 0 | 0 | 0 | 0 | 0 | 0 | 100 |
| TESTI2024498 | 0 | 0 | 0 | 0 | 0 | 0 | 100 |
| TESTI2024560 | 0 | 0 | 0 | 0 | 0 | 0 | 100 |
| TESTI2024567 | 0 | 0 | 0 | 0 | 0 | 0 | 100 |
| TESTI2024586 | 0 | 0 | 0 | 0 | 0 | 0 | 100 |
| TESTI2024598 | 0 | 0 | 0 | 0 | 0 | 0 | 39.051 |
| TESTI2024641 | 0 | 0 | 0 | 0 | 0 | 0 | 100 |
| TESTI2024648 | 0 | 0 | 0 | 0 | 0 | 0 | 100 |
| TESTI2024718 | 0 | 0 | 0 | 0 | 0 | 0 | 100 |
| TESTI2024744 | 0 | 0 | 0 | 0 | 0 | 0 | 100 |
| TESTI2024844 | 0 | 0 | 0 | 0 | 0 | 0 | 2.995 |
| TESTI2024864 | 0 | 0 | 0 | 0 | 0 | 0 | 18.051 |
| TESTI2024885 | 0 | 0 | 0 | 0 | 0 | 0 | 8.693 |
| TESTI2024936 | 0 | 0 | 0 | 0 | 0 | 0 | 100 |
| TESTI2024978 | 0 | 0 | 0 | 0 | 0 | 0 | 100 |
| TESTI2024999 | 0 | 0 | 0 | 0 | 0 | 0 | 100 |
| TESTI2025006 | 0 | 0 | 0 | 0 | 0 | 0 | 100 |
| TESTI2025013 | 0 | 0 | 0 | 0 | 0 | 0 | 2.327 |
| TESTI2025022 | 0 | 0 | 0 | 0 | 0 | 0 | 100 |
| TESTI2025063 | 0 | 0 | 0 | 0 | 0 | 0 | 100 |
| TESTI2025117 | 0 | 0 | 0 | 0 | 0 | 0 | 100 |
| TESTI2025144 | 0 | 0 | 0 | 0 | 0 | 0 | 100 |
| TESTI2025161 | 0 | 0 | 0 | 0 | 0 | 0 | 100 |
| TESTI2025174 | 0 | 0 | 0 | 0 | 0 | 0 | 100 |
| TESTI2025229 | 0 | 0 | 0 | 0 | 0 | 0 | 100 |
| TESTI2025269 | 0 | 0 | 0 | 0 | 0 | 0 | 100 |
| TESTI2025365 | 0 | 0 | 0 | 0 | 0 | 0 | 100 |
| TESTI2025403 | 0 | 0 | 0 | 0 | 0 | 0 | 100 |
| TESTI2025409 | 0 | 0 | 0 | 0 | 0 | 0 | 100 |
| TESTI2025422 | 0 | 0 | 0 | 0 | 0 | 0 | 1.622 |
| TESTI2025448 | 0 | 0 | 0 | 0 | 0 | 0 | 100 |
| TESTI2025454 | 0 | 0 | 0 | 0 | 0 | 0 | 7.363 |
| TESTI2025486 | 0 | 0 | 0 | 0 | 0 | 0 | 100 |
| TESTI2025546 | 0 | 0 | 0 | 0 | 0 | 0 | 68.062 |
| TESTI2025582 | 0 | 0 | 0 | 0 | 0 | 0 | 100 |
| TESTI2025609 | 0 | 0 | 0 | 0 | 0 | 0 | 100 |
| TESTI2025656 | 0 | 0 | 0 | 0 | 0 | 0 | 100 |
| TESTI2025757 | 0 | 0 | 0 | 0 | 0 | 0 | 11.084 |
| TESTI2025791 | 0 | 0 | 0 | 0 | 0 | 0 | 100 |
| TESTI2025846 | 0 | 0 | 0 | 0 | 0 | 0 | 13.307 |
| TESTI2025872 | 0 | 0 | 0 | 91.498 | 0 | 0 | 8.502 |
| TESTI2025879 | 0 | 0 | 0 | 0 | 0 | 0 | 100 |
| TESTI2025911 | 0 | 0 | 0 | 0 | 0 | 0 | 100 |
| TESTI2025920 | 0 | 0 | 0 | 0 | 0 | 0 | 100 |
| TESTI2025924 | 0 | 0 | 0 | 0 | 0 | 0 | 100 |
| TESTI2026014 | 0 | 0 | 0 | 0 | 0 | 0 | 100 |
| TESTI2026024 | 0 | 0 | 0 | 0 | 0 | 0 | 15.564 |
| TESTI2026064 | 0 | 0 | 0 | 0 | 0 | 0 | 100 |
| TESTI2026077 | 0 | 0 | 0 | 0 | 0 | 0 | 100 |
| TESTI2026104 | 0 | 0 | 0 | 0 | 0 | 0 | 100 |
| TESTI2026116 | 0 | 0 | 0 | 0 | 0 | 0 | 29.249 |
| TESTI2026134 | 0 | 0 | 0 | 0 | 0 | 0 | 100 |
| TESTI2026168 | 0 | 0 | 0 | 0 | 0 | 0 | 100 |
| TESTI2026196 | 0 | 0 | 0 | 0 | 0 | 0 | 100 |
| TESTI2026215 | 0 | 0 | 48.726 | 0 | 0 | 0 | 4.528 |
| TESTI2026218 | 0 | 0 | 0 | 0 | 0 | 0 | 100 |
| TESTI2026233 | 0 | 0 | 0 | 0 | 0 | 0 | 100 |
| TESTI2026291 | 0 | 0 | 0 | 0 | 0 | 0 | 100 |
| TESTI2026294 | 0 | 0 | 0 | 0 | 0 | 0 | 100 |
| TESTI2026401 | 0 | 0 | 0 | 0 | 0 | 0 | 100 |
| TESTI2026403 | 0 | 0 | 0 | 0 | 0 | 0 | 100 |
| TESTI2026453 | 0 | 0 | 0 | 0 | 0 | 0 | 100 |
| TESTI2026461 | 0 | 0 | 0 | 0 | 0 | 0 | 100 |
| TESTI2026491 | 0 | 0 | 0 | 0 | 0 | 0 | 100 |
| TESTI2026505 | 0 | 0 | 0 | 0 | 0 | 0 | 100 |
| TESTI2026515 | 0 | 0 | 0 | 0 | 0 | 0 | 100 |
| TESTI2026525 | 0 | 0 | 0 | 0 | 0 | 0 | 5.688 |
| TESTI2026534 | 0 | 0 | 0 | 0 | 0 | 0 | 39.051 |
| TESTI2026537 | 0 | 0 | 0 | 0 | 0 | 0 | 100 |
| TESTI2026589 | 0 | 0 | 0 | 0 | 0 | 0 | 100 |
| TESTI2026597 | 0 | 0 | 0 | 0 | 0 | 0 | 100 |
| TESTI2026605 | 0 | 0 | 0 | 0 | 0 | 0 | 100 |
| TESTI2026647 | 0 | 0 | 0 | 0 | 0 | 0 | 7.724 |
| TESTI2026674 | 0 | 0 | 0 | 0 | 0 | 0 | 100 |
| TESTI2026794 | 0 | 0 | 0 | 0 | 0 | 0 | 100 |
| TESTI2026824 | 0 | 0 | 0 | 0 | 0 | 0 | 100 |
| TESTI2026854 | 0 | 0 | 0 | 0 | 0 | 0 | 100 |
| TESTI2026925 | 0 | 0 | 0 | 0 | 0 | 0 | 100 |
| TESTI2026936 | 0 | 0 | 0 | 0 | 0 | 0 | 39.348 |
| TESTI2026957 | 0 | 0 | 0 | 0 | 0 | 0 | 100 |
| TESTI2027013 | 0 | 0 | 0 | 0 | 0 | 0 | 100 |
| TESTI2027019 | 0 | 0 | 0 | 0 | 0 | 0 | 100 |
| TESTI2027108 | 0 | 0 | 0 | 0 | 0 | 0 | 100 |
| TESTI2027165 | 0 | 0 | 0 | 0 | 0 | 0 | 35.404 |
| TESTI2027171 | 0 | 0 | 0 | 0 | 0 | 0 | 100 |
| TESTI2027173 | 0 | 0 | 0 | 0 | 0 | 0 | 100 |
| TESTI2027179 | 0 | 0 | 0 | 0 | 0 | 0 | 100 |
| TESTI2027185 | 0 | 0 | 0 | 0 | 0 | 0 | 100 |
| TESTI2027206 | 0 | 0 | 0 | 0 | 0 | 0 | 100 |
| TESTI2027238 | 0 | 0 | 0 | 0 | 0 | 0 | 100 |
| TESTI2027239 | 0 | 0 | 0 | 0 | 0 | 0 | 100 |
| TESTI2027243 | 0 | 0 | 0 | 0 | 0 | 0 | 100 |
| TESTI2027271 | 0 | 0 | 0 | 0 | 0 | 0 | 6.903 |
| TESTI2027296 | 0 | 0 | 0 | 0 | 0 | 0 | 100 |
| TESTI2027378 | 0 | 0 | 0 | 0 | 0 | 0 | 100 |
| TESTI2027411 | 0 | 0 | 0 | 0 | 0 | 0 | 100 |
| TESTI2027450 | 0 | 0 | 0 | 0 | 0 | 0 | 100 |
| TESTI2027496 | 0 | 0 | 0 | 0 | 0 | 0 | 12.283 |
| TESTI2027503 | 0 | 0 | 0 | 0 | 0 | 0 | 100 |
| TESTI2027562 | 0 | 0 | 0 | 0 | 0 | 0 | 100 |
| TESTI2027615 | 0 | 0 | 0 | 0 | 0 | 0 | 100 |
| TESTI2027645 | 0 | 0 | 0 | 0 | 0 | 0 | 100 |
| TESTI2027730 | 0 | 0 | 0 | 0 | 0 | 0 | 100 |
| TESTI2027736 | 0 | 0 | 0 | 0 | 0 | 0 | 100 |
| TESTI2027791 | 0 | 0 | 0 | 0 | 0 | 0 | 100 |
| TESTI2027820 | 0 | 0 | 0 | 0 | 0 | 0 | 100 |
| TESTI2027828 | 0 | 0 | 0 | 0 | 0 | 0 | 100 |
| TESTI2027840 | 0 | 0 | 0 | 0 | 0 | 0 | 100 |
| TESTI2027909 | 0 | 0 | 0 | 0 | 0 | 0 | 43.944 |
| TESTI2028098 | 0 | 0 | 0 | 0 | 0 | 0 | 100 |
| TESTI2028151 | 0 | 0 | 0 | 0 | 0 | 0 | 100 |
| TESTI2028242 | 0 | 0 | 0 | 0 | 0 | 0 | 100 |
| TESTI2028253 | 0 | 0 | 0 | 0 | 0 | 0 | 100 |
| TESTI2028254 | 0 | 0 | 0 | 0 | 0 | 0 | 100 |
| TESTI2028269 | 0 | 0 | 0 | 0 | 0 | 0 | 100 |
| TESTI2028290 | 0 | 0 | 0 | 0 | 0 | 0 | 100 |
| TESTI2028296 | 0 | 0 | 0 | 0 | 0 | 0 | 1.612 |
| TESTI2028384 | 0 | 0 | 0 | 0 | 0 | 0 | 100 |
| TESTI2028426 | 0 | 0 | 0 | 0 | 0 | 0 | 100 |
| TESTI2028488 | 0 | 0 | 0 | 0 | 0 | 0 | 100 |
| TESTI2028523 | 0 | 0 | 0 | 0 | 0 | 0 | 100 |
| TESTI2028583 | 0 | 0 | 0 | 0 | 0 | 0 | 100 |
| TESTI2028613 | 0 | 0 | 0 | 0 | 0 | 0 | 100 |
| TESTI2028659 | 0 | 0 | 0 | 0 | 0 | 0 | 19.704 |
| TESTI2028662 | 0 | 0 | 0 | 0 | 0 | 0 | 100 |
| TESTI2028670 | 0 | 0 | 0 | 0 | 0 | 0 | 100 |
| TESTI2028705 | 0 | 0 | 0 | 0 | 0 | 0 | 100 |
| TESTI2028776 | 0 | 0 | 0 | 0 | 0 | 0 | 100 |
| TESTI2028811 | 0 | 0 | 0 | 0 | 0 | 0 | 100 |
| TESTI2028891 | 0 | 0 | 0 | 0 | 0 | 0 | 100 |
| TESTI2028985 | 0 | 0 | 0 | 0 | 0 | 0 | 100 |
| TESTI2028997 | 0 | 0 | 0 | 0 | 0 | 0 | 100 |
| TESTI2029131 | 0 | 0 | 0 | 0 | 0 | 0 | 100 |
| TESTI2029162 | 0 | 0 | 0 | 0 | 0 | 0 | 100 |
| TESTI2029196 | 0 | 0 | 0 | 0 | 0 | 0 | 100 |
| TESTI2029201 | 0 | 0 | 0 | 0 | 0 | 0 | 100 |
| TESTI2029227 | 0 | 0 | 0 | 0 | 0 | 0 | 11.641 |
| TESTI2029244 | 0 | 0 | 0 | 0 | 0 | 0 | 100 |
| TESTI2029249 | 0 | 0 | 0 | 0 | 0 | 0 | 100 |
| TESTI2029252 | 0 | 0 | 0 | 0 | 0 | 0 | 100 |
| TESTI2029259 | 0 | 0 | 0 | 0 | 0 | 0 | 2.163 |
| TESTI2029264 | 0 | 0 | 0 | 0 | 0 | 0 | 100 |
| TESTI2029470 | 0 | 0 | 0 | 0 | 0 | 0 | 100 |
| TESTI2029672 | 0 | 0 | 0 | 0 | 0 | 0 | 100 |
| TESTI2029785 | 0 | 0 | 0 | 0 | 0 | 0 | 43.944 |
| TESTI2029880 | 0 | 0 | 0 | 0 | 0 | 0 | 100 |
| TESTI2030136 | 0 | 0 | 0 | 0 | 0 | 0 | 100 |
| TESTI2030322 | 0 | 0 | 0 | 0 | 0 | 0 | 100 |
| TESTI2030336 | 0 | 0 | 0 | 0 | 0 | 0 | 43.944 |
| TESTI2030342 | 0 | 0 | 0 | 0 | 0 | 0 | 100 |
| TESTI2030519 | 0 | 0 | 0 | 0 | 0 | 0 | 100 |
| TESTI2030554 | 0 | 0 | 0 | 0 | 0 | 0 | 70.165 |
| TESTI2030556 | 0 | 0 | 0 | 0 | 0 | 0 | 100 |
| TESTI2030728 | 0 | 0 | 0 | 0 | 0 | 0 | 100 |
| TESTI2030754 | 0 | 0 | 0 | 0 | 0 | 0 | 100 |
| TESTI2030770 | 0 | 0 | 0 | 0 | 0 | 0 | 100 |
| TESTI2030860 | 0 | 0 | 0 | 0 | 0 | 0 | 100 |
| TESTI2030901 | 0 | 0 | 0 | 0 | 0 | 0 | 100 |
| TESTI2030917 | 0 | 0 | 0 | 0 | 0 | 0 | 100 |
| TESTI2030930 | 0 | 0 | 0 | 0 | 0 | 0 | 100 |
| TESTI2031006 | 0 | 0 | 0 | 0 | 0 | 0 | 100 |
| TESTI2031007 | 0 | 0 | 0 | 0 | 0 | 0 | 63.646 |
| TESTI2031060 | 0 | 0 | 0 | 0 | 0 | 0 | 100 |
| TESTI2031129 | 0 | 0 | 0 | 0 | 0 | 0 | 100 |
| TESTI2031356 | 0 | 0 | 0 | 0 | 0 | 0 | 100 |
| TESTI2031418 | 0 | 0 | 0 | 0 | 0 | 0 | 100 |
| TESTI2031504 | 0 | 0 | 0 | 0 | 0 | 0 | 100 |
| TESTI2031529 | 0 | 0 | 0 | 0 | 0 | 0 | 100 |
| TESTI2031687 | 0 | 0 | 0 | 0 | 0 | 0 | 100 |
| TESTI2031760 | 0 | 0 | 0 | 0 | 0 | 0 | 100 |
| TESTI2031809 | 0 | 0 | 0 | 0 | 0 | 0 | 100 |
| TESTI2031919 | 0 | 0 | 0 | 0 | 0 | 0 | 100 |
| TESTI2031935 | 0 | 0 | 0 | 0 | 0 | 0 | 100 |
| TESTI2031986 | 0 | 0 | 0 | 0 | 0 | 0 | 100 |
| TESTI2032044 | 0 | 0 | 0 | 0 | 0 | 0 | 100 |
| TESTI2032067 | 0 | 0 | 0 | 0 | 0 | 0 | 100 |
| TESTI2032079 | 0 | 0 | 0 | 0 | 0 | 0 | 100 |
| TESTI2032643 | 0 | 0 | 0 | 0 | 0 | 0 | 7.949 |
| TESTI2032681 | 0 | 0 | 0 | 0 | 0 | 0 | 100 |
| TESTI2032761 | 0 | 0 | 0 | 0 | 0 | 0 | 100 |
| TESTI2032768 | 0 | 0 | 0 | 0 | 0 | 0 | 100 |
| TESTI2032774 | 0 | 0 | 0 | 0 | 0 | 0 | 100 |
| TESTI2032828 | 0 | 0 | 0 | 0 | 0 | 0 | 100 |
| TESTI2033031 | 0 | 0 | 0 | 0 | 0 | 0 | 40.225 |
| TESTI2033242 | 0 | 0 | 0 | 0 | 0 | 0 | 100 |
| TESTI2033254 | 0 | 0 | 0 | 0 | 0 | 0 | 100 |
| TESTI2033300 | 0 | 0 | 0 | 0 | 0 | 0 | 100 |
| TESTI2033395 | 0 | 0 | 0 | 0 | 0 | 0 | 100 |
| TESTI2033441 | 0 | 0 | 15.439 | 0 | 0 | 7.508 | 1.435 |
| TESTI2033453 | 0 | 0 | 0 | 0 | 0 | 0 | 100 |
| TESTI2033505 | 0 | 0 | 0 | 0 | 0 | 0 | 100 |
| TESTI2033520 | 0 | 0 | 0 | 0 | 0 | 0 | 100 |
| TESTI2033641 | 0 | 0 | 0 | 0 | 0 | 0 | 100 |
| TESTI2033710 | 0 | 0 | 0 | 0 | 0 | 0 | 100 |
| TESTI2033905 | 0 | 0 | 0 | 0 | 0 | 0 | 100 |
| TESTI2034187 | 0 | 0 | 0 | 0 | 0 | 0 | 100 |
| TESTI2034243 | 0 | 0 | 0 | 0 | 0 | 0 | 100 |
| TESTI2034249 | 0 | 0 | 0 | 0 | 0 | 0 | 79.187 |
| TESTI2034307 | 0 | 0 | 0 | 0 | 0 | 0 | 43.944 |
| TESTI2034357 | 0 | 0 | 0 | 0 | 0 | 0 | 100 |
| TESTI2034401 | 0 | 0 | 0 | 0 | 0 | 0 | 100 |
| TESTI2034407 | 0 | 0 | 0 | 0 | 0 | 0 | 100 |
| TESTI2034506 | 0 | 0 | 0 | 0 | 0 | 0 | 100 |
| TESTI2034520 | 0 | 0 | 0 | 0 | 0 | 0 | 100 |
| TESTI2034718 | 0 | 0 | 0 | 0 | 0 | 0 | 100 |
| TESTI2034730 | 0 | 0 | 0 | 0 | 0 | 0 | 100 |
| TESTI2034749 | 0 | 0 | 0 | 0 | 0 | 0 | 100 |
| TESTI2034767 | 0 | 0 | 0 | 0 | 0 | 0 | 100 |
| TESTI2034774 | 0 | 0 | 0 | 0 | 0 | 0 | 100 |
| TESTI2034777 | 0 | 0 | 0 | 0 | 0 | 0 | 100 |
| TESTI2034785 | 0 | 0 | 0 | 0 | 0 | 0 | 100 |
| TESTI2034799 | 0 | 0 | 0 | 0 | 0 | 0 | 100 |
| TESTI2034847 | 0 | 0 | 0 | 0 | 0 | 0 | 100 |
| TESTI2034913 | 0 | 0 | 0 | 0 | 0 | 0 | 100 |
| TESTI2034916 | 0 | 0 | 0 | 0 | 0 | 0 | 9.938 |
| TESTI2034931 | 0 | 0 | 0 | 0 | 0 | 0 | 100 |
| TESTI2034940 | 0 | 0 | 0 | 0 | 0 | 0 | 0.851 |
| TESTI2034953 | 0 | 0 | 0 | 0 | 0 | 0 | 100 |
| TESTI2034997 | 0 | 0 | 0 | 0 | 0 | 0 | 100 |
| TESTI2035003 | 0 | 0 | 0 | 0 | 0 | 0 | 47.943 |
| TESTI2035078 | 0 | 0 | 0 | 0 | 0 | 0 | 100 |
| TESTI2035084 | 0 | 0 | 0 | 0 | 0 | 0 | 100 |
| TESTI2035107 | 0 | 0 | 0 | 0 | 0 | 0 | 100 |
| TESTI2035121 | 0 | 0 | 0 | 0 | 0 | 0 | 100 |
| TESTI2035124 | 0 | 0 | 0 | 0 | 0 | 0 | 100 |
| TESTI2035183 | 0 | 0 | 0 | 0 | 0 | 0 | 100 |
| TESTI2035236 | 0 | 0 | 0 | 0 | 0 | 0 | 16.851 |
| TESTI2035262 | 0 | 0 | 0 | 0 | 0 | 0 | 100 |
| TESTI2035309 | 0 | 0 | 0 | 0 | 0 | 0 | 26.610 |
| TESTI2035688 | 0 | 0 | 0 | 0 | 0 | 0 | 100 |
| TESTI2035775 | 0 | 0 | 0 | 0 | 0 | 0 | 100 |
| TESTI2035793 | 0 | 0 | 0 | 0 | 0 | 0 | 100 |
| TESTI2035898 | 0 | 0 | 0 | 0 | 0 | 0 | 100 |
| TESTI2035962 | 0 | 0 | 0 | 0 | 0 | 0 | 100 |
| TESTI2035981 | 0 | 0 | 0 | 0 | 0 | 0 | 100 |
| TESTI2035997 | 0 | 0 | 0 | 0 | 0 | 0 | 100 |
| TESTI2036114 | 0 | 0 | 0 | 0 | 0 | 0 | 100 |
| TESTI2036129 | 0 | 0 | 0 | 0 | 0 | 0 | 100 |
| TESTI2036285 | 0 | 0 | 0 | 0 | 0 | 0 | 100 |
| TESTI2036288 | 0 | 0 | 0 | 0 | 0 | 0 | 100 |
| TESTI2036513 | 0 | 0 | 0 | 0 | 0 | 0 | 100 |
| TESTI2036589 | 0 | 0 | 0 | 0 | 0 | 0 | 100 |
| TESTI2036650 | 0 | 0 | 0 | 0 | 0 | 0 | 39.348 |
| TESTI2036684 | 0 | 0 | 0 | 0 | 0 | 0 | 100 |
| TESTI2036691 | 0 | 0 | 0 | 0 | 0 | 0 | 15.347 |
| TESTI2036736 | 0 | 0 | 0 | 0 | 0 | 0 | 100 |
| TESTI2036822 | 0 | 0 | 0 | 0 | 0 | 0 | 100 |
| TESTI2036833 | 0 | 0 | 0 | 0 | 0 | 0 | 100 |
| TESTI2036913 | 0 | 0 | 0 | 0 | 0 | 0 | 53.064 |
| TESTI2036922 | 0 | 0 | 0 | 0 | 0 | 0 | 100 |
| TESTI2036951 | 0 | 0 | 0 | 0 | 0 | 0 | 100 |
| TESTI2036965 | 0 | 0 | 0 | 0 | 0 | 0 | 100 |
| TESTI2036969 | 0 | 0 | 0 | 0 | 0 | 0 | 18.789 |
| TESTI2037002 | 0 | 0 | 0 | 0 | 0 | 0 | 100 |
| TESTI2037055 | 0 | 0 | 0 | 0 | 0 | 0 | 100 |
| TESTI2037081 | 0 | 0 | 0 | 0 | 0 | 0 | 100 |
| TESTI2037085 | 0 | 0 | 0 | 0 | 0 | 0 | 100 |
| TESTI2037103 | 0 | 0 | 0 | 0 | 0 | 0 | 100 |
| TESTI2037106 | 0 | 0 | 0 | 0 | 0 | 0 | 100 |
| TESTI2037111 | 0 | 0 | 0 | 0 | 0 | 0 | 100 |
| TESTI2037209 | 0 | 0 | 0 | 0 | 0 | 0 | 100 |
| TESTI2037255 | 0 | 0 | 0 | 0 | 0 | 0 | 100 |
| TESTI2037359 | 0 | 0 | 0 | 0 | 0 | 0 | 100 |
| TESTI2037375 | 0 | 0 | 0 | 0 | 0 | 0 | 100 |
| TESTI2037382 | 0 | 0 | 0 | 0 | 0 | 0 | 100 |
| TESTI2037534 | 0 | 0 | 0 | 0 | 0 | 0 | 100 |
| TESTI2037569 | 0 | 0 | 0 | 0 | 0 | 0 | 100 |
| TESTI2037572 | 0 | 0 | 0 | 0 | 0 | 0 | 100 |
| TESTI2037643 | 0 | 0 | 0 | 0 | 0 | 0 | 100 |
| TESTI2037657 | 0 | 0 | 0 | 0 | 0 | 0 | 100 |
| TESTI2037673 | 0 | 0 | 0 | 0 | 0 | 0 | 100 |
| TESTI2037723 | 0 | 0 | 0 | 0 | 0 | 0 | 100 |
| TESTI2037819 | 0 | 0 | 0 | 0 | 0 | 0 | 100 |
| TESTI2037830 | 0 | 0 | 0 | 0 | 0 | 0 | 100 |
| TESTI2037845 | 0 | 0 | 0 | 0 | 0 | 0 | 100 |
| TESTI2037877 | 0 | 0 | 0 | 0 | 0 | 0 | 100 |
| TESTI2037976 | 0 | 0 | 0 | 0 | 0 | 0 | 100 |
| TESTI2038048 | 0 | 0 | 0 | 0 | 0 | 0 | 100 |
| TESTI2038065 | 0 | 0 | 0 | 0 | 0 | 0 | 100 |
| TESTI2038104 | 0 | 0 | 0 | 0 | 0 | 0 | 100 |
| TESTI2038275 | 0 | 0 | 0 | 0 | 0 | 0 | 100 |
| TESTI2038388 | 0 | 0 | 0 | 0 | 0 | 0 | 100 |
| TESTI2038573 | 0 | 0 | 0 | 0 | 0 | 0 | 100 |
| TESTI2038596 | 0 | 0 | 0 | 0 | 0 | 0 | 100 |
| TESTI2038623 | 0 | 0 | 0 | 0 | 0 | 0 | 100 |
| TESTI2038644 | 0 | 0 | 0 | 0 | 0 | 0 | 100 |
| TESTI2038733 | 0 | 0 | 0 | 0 | 0 | 0 | 100 |
| TESTI2038858 | 0 | 0 | 0 | 0 | 0 | 0 | 100 |
| TESTI2038958 | 0 | 0 | 0 | 0 | 0 | 0 | 100 |
| TESTI2039025 | 0 | 0 | 0 | 0 | 0 | 0 | 100 |
| TESTI2039026 | 0 | 0 | 0 | 0 | 0 | 0 | 100 |
| TESTI2039038 | 0 | 0 | 0 | 0 | 0 | 0 | 100 |
| TESTI2039041 | 0 | 0 | 0 | 0 | 0 | 0 | 100 |
| TESTI2039060 | 0 | 0 | 0 | 0 | 0 | 0 | 100 |
| TESTI2039113 | 0 | 0 | 0 | 0 | 0 | 0 | 100 |
| TESTI2039121 | 0 | 0 | 0 | 0 | 0 | 0 | 100 |
| TESTI2039177 | 0 | 0 | 0 | 0 | 0 | 0 | 16.255 |
| TESTI2039209 | 0 | 0 | 0 | 0 | 0 | 0 | 100 |
| TESTI2039225 | 0 | 0 | 0 | 0 | 0 | 0 | 100 |
| TESTI2039227 | 0 | 0 | 0 | 0 | 0 | 0 | 100 |
| TESTI2039276 | 0 | 0 | 0 | 0 | 0 | 0 | 100 |
| TESTI2039342 | 0 | 0 | 0 | 0 | 0 | 0 | 22.764 |
| TESTI2039353 | 0 | 0 | 0 | 0 | 0 | 0 | 100 |
| TESTI2039544 | 0 | 0 | 0 | 0 | 0 | 0 | 100 |
| TESTI2039613 | 0 | 0 | 0 | 0 | 0 | 0 | 100 |
| TESTI2039707 | 0 | 0 | 0 | 0 | 0 | 0 | 15.009 |
| TESTI2039732 | 0 | 0 | 0 | 0 | 0 | 0 | 100 |
| TESTI2039738 | 0 | 0 | 0 | 0 | 0 | 0 | 100 |
| TESTI2039776 | 0 | 0 | 0 | 0 | 0 | 0 | 100 |
| TESTI2039867 | 0 | 0 | 0 | 0 | 0 | 0 | 100 |
| TESTI2039908 | 0 | 0 | 0 | 0 | 0 | 0 | 100 |
| TESTI2040018 | 0 | 0 | 0 | 0 | 0 | 0 | 100 |
| TESTI2040094 | 0 | 0 | 0 | 0 | 0 | 0 | 8.042 |
| TESTI2040102 | 0 | 0 | 0 | 0 | 0 | 0 | 100 |
| TESTI2040128 | 0 | 0 | 0 | 0 | 0 | 0 | 100 |
| TESTI2040143 | 0 | 0 | 0 | 0 | 0 | 0 | 100 |
| TESTI2040297 | 0 | 0 | 0 | 0 | 0 | 0 | 100 |
| TESTI2040372 | 0 | 0 | 0 | 0 | 0 | 0 | 100 |
| TESTI2040377 | 0 | 0 | 0 | 0 | 0 | 0 | 100 |
| TESTI2040424 | 0 | 0 | 0 | 0 | 0 | 0 | 100 |
| TESTI2040642 | 0 | 0 | 0 | 0 | 0 | 0 | 100 |
| TESTI2040815 | 0 | 0 | 0 | 0 | 0 | 0 | 100 |
| TESTI2040897 | 0 | 0 | 0 | 0 | 0 | 0 | 100 |
| TESTI2040944 | 0 | 0 | 0 | 0 | 0 | 0 | 100 |
| TESTI2040964 | 0 | 0 | 0 | 0 | 0 | 0 | 100 |
| TESTI2040983 | 0 | 0 | 0 | 0 | 0 | 0 | 100 |
| TESTI2040989 | 0 | 0 | 0 | 0 | 0 | 0 | 100 |
| TESTI2041330 | 0 | 0 | 0 | 0 | 0 | 0 | 100 |
| TESTI2041362 | 0 | 0 | 0 | 0 | 0 | 0 | 100 |
| TESTI2041517 | 0 | 0 | 0 | 0 | 0 | 0 | 100 |
| TESTI2041564 | 0 | 0 | 0 | 0 | 0 | 0 | 100 |
| TESTI2041664 | 0 | 0 | 0 | 0 | 0 | 0 | 100 |
| TESTI2041730 | 0 | 0 | 0 | 0 | 0 | 0 | 100 |
| TESTI2041734 | 0 | 0 | 0 | 0 | 0 | 0 | 51.276 |
| TESTI2041778 | 0 | 0 | 0 | 0 | 0 | 0 | 100 |
| TESTI2041800 | 0 | 0 | 0 | 0 | 0 | 0 | 100 |
| TESTI2041947 | 0 | 0 | 0 | 0 | 0 | 0 | 100 |
| TESTI2041956 | 0 | 0 | 0 | 0 | 0 | 0 | 100 |
| TESTI2041976 | 0 | 0 | 0 | 0 | 0 | 0 | 100 |
| TESTI2042062 | 0 | 0 | 0 | 0 | 0 | 0 | 100 |
| TESTI2042149 | 0 | 0 | 0 | 0 | 0 | 0 | 100 |
| TESTI2042264 | 0 | 0 | 0 | 0 | 0 | 0 | 100 |
| TESTI2042295 | 0 | 0 | 0 | 0 | 0 | 0 | 100 |
| TESTI2042302 | 0 | 0 | 0 | 0 | 0 | 0 | 100 |
| TESTI2042326 | 0 | 0 | 0 | 0 | 0 | 0 | 100 |
| TESTI2042400 | 0 | 0 | 0 | 0 | 0 | 0 | 100 |
| TESTI2042450 | 0 | 0 | 0 | 0 | 0 | 0 | 100 |
| TESTI2042473 | 0 | 0 | 0 | 0 | 0 | 0 | 100 |
| TESTI2042507 | 0 | 0 | 0 | 0 | 0 | 0 | 100 |
| TESTI2042508 | 0 | 0 | 0 | 0 | 0 | 0 | 100 |
| TESTI2042750 | 0 | 0 | 0 | 0 | 0 | 0 | 100 |
| TESTI2042783 | 0 | 0 | 0 | 0 | 0 | 0 | 100 |
| TESTI2042806 | 0 | 0 | 0 | 0 | 0 | 0 | 100 |
| TESTI2042928 | 0 | 0 | 0 | 0 | 0 | 0 | 100 |
| TESTI2042946 | 0 | 0 | 0 | 0 | 0 | 0 | 100 |
| TESTI2042958 | 0 | 0 | 0 | 0 | 0 | 0 | 100 |
| TESTI2043275 | 0 | 0 | 62.244 | 0 | 0 | 0 | 5.784 |
| TESTI2043277 | 0 | 0 | 0 | 0 | 0 | 0 | 100 |
| TESTI2043282 | 0 | 0 | 0 | 0 | 0 | 0 | 100 |
| TESTI2043313 | 0 | 0 | 0 | 0 | 0 | 0 | 100 |
| TESTI2043477 | 0 | 0 | 0 | 0 | 0 | 0 | 100 |
| TESTI2043585 | 0 | 0 | 0 | 0 | 0 | 0 | 100 |
| TESTI2043758 | 0 | 0 | 0 | 0 | 0 | 0 | 100 |
| TESTI2043817 | 0 | 0 | 0 | 0 | 0 | 0 | 100 |
| TESTI2043857 | 0 | 0 | 0 | 0 | 0 | 0 | 100 |
| TESTI2043866 | 0 | 0 | 0 | 0 | 0 | 0 | 100 |
| TESTI2043869 | 0 | 0 | 0 | 0 | 0 | 0 | 100 |
| TESTI2044064 | 0 | 0 | 0 | 0 | 0 | 0 | 100 |
| TESTI2044118 | 0 | 0 | 0 | 0 | 0 | 0 | 100 |
| TESTI2044194 | 0 | 0 | 0 | 0 | 0 | 0 | 100 |
| TESTI2044276 | 0 | 0 | 0 | 0 | 0 | 0 | 9.299 |
| TESTI2044306 | 0 | 0 | 0 | 0 | 0 | 0 | 100 |
| TESTI2044309 | 0 | 0 | 0 | 0 | 0 | 0 | 100 |
| TESTI2044413 | 0 | 0 | 0 | 0 | 0 | 0 | 100 |
| TESTI2044418 | 0 | 0 | 0 | 0 | 0 | 0 | 100 |
| TESTI2044754 | 0 | 0 | 0 | 0 | 0 | 0 | 100 |
| TESTI2044788 | 0 | 0 | 0 | 0 | 0 | 0 | 35.404 |
| TESTI2044796 | 0 | 0 | 0 | 0 | 0 | 0 | 100 |
| TESTI2044833 | 0 | 0 | 0 | 0 | 0 | 0 | 100 |
| TESTI2044892 | 0 | 0 | 0 | 0 | 0 | 0 | 100 |
| TESTI2044920 | 0 | 0 | 0 | 0 | 0 | 0 | 100 |
| TESTI2044968 | 0 | 0 | 0 | 0 | 0 | 0 | 100 |
| TESTI2045139 | 0 | 0 | 0 | 0 | 0 | 0 | 100 |
| TESTI2045155 | 0 | 0 | 0 | 0 | 0 | 0 | 7.529 |
| TESTI2045171 | 0 | 0 | 0 | 0 | 0 | 0 | 100 |
| TESTI2045199 | 0 | 0 | 0 | 0 | 0 | 0 | 100 |
| TESTI2045353 | 0 | 0 | 0 | 0 | 0 | 0 | 100 |
| TESTI2045509 | 0 | 0 | 0 | 0 | 0 | 0 | 100 |
| TESTI2045562 | 0 | 0 | 0 | 0 | 0 | 0 | 15.347 |
| TESTI2045611 | 0 | 0 | 0 | 0 | 0 | 0 | 100 |
| TESTI2045819 | 0 | 0 | 0 | 0 | 0 | 0 | 100 |
| TESTI2045850 | 0 | 0 | 0 | 0 | 0 | 0 | 100 |
| TESTI2045920 | 0 | 0 | 0 | 0 | 0 | 0 | 100 |
| TESTI2045964 | 0 | 0 | 0 | 0 | 0 | 0 | 100 |
| TESTI2045983 | 0 | 0 | 0 | 0 | 0 | 0 | 100 |
| TESTI2046100 | 0 | 0 | 0 | 0 | 0 | 0 | 100 |
| TESTI2046188 | 0 | 0 | 0 | 0 | 0 | 0 | 100 |
| TESTI2046347 | 0 | 0 | 0 | 0 | 0 | 0 | 100 |
| TESTI2046352 | 0 | 0 | 0 | 0 | 0 | 0 | 100 |
| TESTI2046358 | 0 | 0 | 0 | 0 | 0 | 0 | 100 |
| TESTI2046439 | 0 | 0 | 0 | 0 | 0 | 0 | 100 |
| TESTI2046456 | 0.998 | 0 | 0 | 0 | 0 | 3.167 | 5.446 |
| TESTI2046535 | 0 | 0 | 0 | 0 | 0 | 0 | 100 |
| TESTI2046536 | 0 | 0 | 0 | 0 | 0 | 0 | 100 |
| TESTI2046552 | 0 | 0 | 0 | 0 | 0 | 0 | 100 |
| TESTI2046569 | 0 | 0 | 0 | 0 | 0 | 0 | 100 |
| TESTI2046686 | 0 | 0 | 0 | 0 | 0 | 0 | 100 |
| TESTI2046721 | 0 | 0 | 0 | 0 | 0 | 0 | 8.001 |
| TESTI2046732 | 0 | 0 | 0 | 0 | 0 | 0 | 100 |
| TESTI2046786 | 0 | 0 | 0 | 0 | 0 | 0 | 100 |
| TESTI2046797 | 0 | 0 | 0 | 0 | 0 | 0 | 100 |
| TESTI2046863 | 0 | 0 | 0 | 0 | 0 | 0 | 100 |
| TESTI2046872 | 0 | 0 | 0 | 0 | 0 | 0 | 100 |
| TESTI2047071 | 0 | 0 | 0 | 0 | 0 | 0 | 100 |
| TESTI2047141 | 0 | 0 | 0 | 0 | 0 | 0 | 100 |
| TESTI2047147 | 0 | 0 | 0 | 0 | 0 | 0 | 100 |
| TESTI2047153 | 0 | 0 | 0 | 0 | 0 | 0 | 100 |
| TESTI2047212 | 0 | 0 | 0 | 0 | 0 | 0 | 100 |
| TESTI2047342 | 0 | 0 | 0 | 0 | 0 | 0 | 100 |
| TESTI2047383 | 0 | 0 | 0 | 0 | 0 | 0 | 100 |
| TESTI2047605 | 31.427 | 0 | 0 | 0 | 0 | 0 | 9.525 |
| TESTI2047792 | 0 | 0 | 0 | 0 | 0 | 0 | 100 |
| TESTI2047801 | 0 | 0 | 0 | 0 | 0 | 0 | 100 |
| TESTI2047818 | 0 | 0 | 0 | 0 | 0 | 0 | 100 |
| TESTI2047824 | 0 | 0 | 0 | 0 | 0 | 0 | 100 |
| TESTI2047885 | 0 | 0 | 0 | 0 | 0 | 0 | 100 |
| TESTI2047930 | 0 | 0 | 0 | 0 | 0 | 0 | 100 |
| TESTI2048105 | 0 | 0 | 0 | 0 | 0 | 0 | 100 |
| TESTI2048109 | 0 | 0 | 0 | 0 | 0 | 0 | 100 |
| TESTI2048465 | 0 | 0 | 0 | 0 | 0 | 0 | 100 |
| TESTI2048603 | 0 | 0 | 0 | 0 | 0 | 0 | 100 |
| TESTI2048898 | 0 | 0 | 0 | 0 | 0 | 0 | 100 |
| TESTI2049041 | 0 | 0 | 0 | 0 | 0 | 0 | 100 |
| TESTI2049062 | 0 | 0 | 0 | 0 | 0 | 0 | 100 |
| TESTI2049206 | 0 | 0 | 0 | 0 | 0 | 0 | 100 |
| TESTI2049246 | 0 | 0 | 0 | 0 | 0 | 0 | 17.188 |
| TESTI2049277 | 0 | 0 | 0 | 0 | 0 | 0 | 100 |
| TESTI2049422 | 0 | 0 | 0 | 0 | 0 | 0 | 100 |
| TESTI2049452 | 0 | 0 | 0 | 0 | 0 | 0 | 100 |
| TESTI2049469 | 0 | 0 | 0 | 0 | 0 | 0 | 100 |
| TESTI2049553 | 0 | 0 | 0 | 0 | 0 | 0 | 100 |
| TESTI2049576 | 0 | 0 | 0 | 0 | 0 | 0 | 100 |
| TESTI2049857 | 0 | 0 | 0 | 0 | 0 | 0 | 100 |
| TESTI2049956 | 0 | 0 | 0 | 0 | 0 | 0 | 100 |
| TESTI2050137 | 0 | 0 | 0 | 0 | 0 | 0 | 100 |
| TESTI2050681 | 0 | 0 | 0 | 0 | 0 | 0 | 100 |
| TESTI2050780 | 0 | 0 | 0 | 0 | 0 | 0 | 100 |
| TESTI2050987 | 0 | 0 | 0 | 0 | 0 | 0 | 100 |
| TESTI2051148 | 0 | 0 | 0 | 0 | 0 | 0 | 100 |
| TESTI2051177 | 0 | 0 | 0 | 0 | 0 | 0 | 15.630 |
| TESTI2051279 | 0 | 0 | 0 | 0 | 0 | 0 | 100 |
| TESTI2051488 | 0 | 0 | 0 | 0 | 0 | 0 | 100 |
| TESTI2051543 | 0 | 0 | 0 | 0 | 0 | 0 | 100 |
| TESTI2051627 | 0 | 0 | 0 | 0 | 0 | 0 | 100 |
| TESTI2051742 | 0 | 0 | 0 | 0 | 0 | 0 | 100 |
| TESTI2051767 | 0 | 0 | 0 | 0 | 0 | 0 | 100 |
| TESTI2051791 | 0 | 0 | 0 | 0 | 0 | 0 | 100 |
| TESTI2051806 | 0 | 0 | 0 | 0 | 0 | 0 | 100 |
| TESTI2051867 | 0 | 0 | 0 | 0 | 0 | 0 | 100 |
| TESTI2051873 | 0 | 0 | 0 | 0 | 0 | 0 | 100 |
| TESTI2052110 | 0 | 0 | 0 | 0 | 0 | 0 | 100 |
| TESTI2052202 | 0 | 0 | 0 | 0 | 0 | 0 | 100 |
| TESTI2052211 | 0 | 0 | 0 | 0 | 0 | 0 | 100 |
| TESTI2052256 | 0 | 0 | 0 | 0 | 0 | 0 | 100 |
| TESTI2052288 | 0 | 0 | 0 | 0 | 0 | 0 | 100 |
| TESTI2052525 | 0 | 0 | 0 | 0 | 0 | 0 | 100 |
| TESTI2052670 | 0 | 0 | 0 | 0 | 0 | 0 | 100 |
| TESTI2052693 | 0 | 0 | 0 | 0 | 35.495 | 0 | 1.094 |
| TESTI2052698 | 0 | 0 | 0 | 0 | 0 | 0 | 100 |
| TESTI2052799 | 0 | 0 | 0 | 0 | 0 | 0 | 100 |
| TESTI2052822 | 0 | 0 | 0 | 0 | 0 | 0 | 100 |
| TESTI2052985 | 0 | 0 | 0 | 0 | 0 | 0 | 100 |
| TESTI2053151 | 0 | 0 | 0 | 0 | 0 | 0 | 100 |
| TESTI2053242 | 0 | 0 | 0 | 0 | 0 | 0 | 100 |
| TESTI2053399 | 0 | 0 | 0 | 0 | 0 | 0 | 100 |
| TESTI2053526 | 0 | 0 | 0 | 0 | 0 | 0 | 100 |
| TESTI2053561 | 0 | 0 | 0 | 0 | 0 | 0 | 100 |
| TESTI2053621 | 0 | 0 | 0 | 0 | 0 | 0 | 100 |
| TESTI2053667 | 0 | 0 | 0 | 0 | 0 | 0 | 36.852 |
| TESTI2053723 | 0 | 0 | 0 | 0 | 0 | 0 | 2.959 |
| TESTI3000002 | 0 | 0 | 0 | 0 | 0 | 0 | 100 |
| TESTI3000005 | 0 | 0 | 0 | 0 | 0 | 0 | 100 |
| TESTI4000014 | 0 | 0 | 1.256 | 0 | 0 | 0 | 3.385 |
| TESTI4000068 | 0 | 0 | 0 | 0 | 0 | 0 | 100 |
| TESTI4000079 | 0 | 0 | 0 | 0 | 0 | 0 | 100 |
| TESTI4000093 | 0 | 0 | 0 | 0 | 0 | 0 | 100 |
| TESTI4000134 | 0 | 0 | 0 | 0 | 0 | 0 | 100 |
| TESTI4000137 | 0 | 0 | 0 | 0 | 0 | 0 | 100 |
| TESTI4000153 | 0 | 0 | 0 | 0 | 0 | 0 | 100 |
| TESTI4000155 | 0 | 0 | 0 | 0 | 0 | 0 | 100 |
| TESTI4000157 | 0 | 0 | 0 | 0 | 0 | 0 | 100 |
| TESTI4000183 | 0 | 0 | 0 | 0 | 0 | 0 | 100 |
| TESTI4000214 | 0 | 0 | 0 | 0 | 0 | 0 | 92.021 |
| TESTI4000215 | 0 | 0 | 0 | 0 | 0 | 0 | 100 |
| TESTI4000228 | 0 | 0 | 0 | 0 | 0 | 0 | 100 |
| TESTI4000250 | 0 | 0 | 0 | 0 | 0 | 0 | 100 |
| TESTI4000288 | 0 | 0 | 0 | 0 | 0 | 0 | 100 |
| TESTI4000319 | 0 | 0 | 0 | 0 | 0 | 0 | 100 |
| TESTI4000349 | 0 | 0 | 0 | 0 | 0 | 0 | 33.984 |
| TESTI4000370 | 0 | 0 | 0 | 0 | 0 | 0 | 100 |
| TESTI4000394 | 0 | 0 | 0 | 0 | 0 | 0 | 100 |
| TESTI4000434 | 0 | 0 | 0 | 0 | 0 | 0 | 59.830 |
| TESTI4000462 | 0 | 0 | 0 | 0 | 0 | 0 | 100 |
| TESTI4000530 | 0 | 0 | 0 | 0 | 0 | 0 | 100 |
| TESTI4000534 | 0 | 0 | 0 | 0 | 0 | 0 | 100 |
| TESTI4000598 | 0 | 0 | 0 | 0 | 0 | 0 | 100 |
| TESTI4000600 | 0 | 0 | 0 | 0 | 0 | 0 | 100 |
| TESTI4000621 | 0 | 0 | 0 | 0 | 0 | 0 | 100 |
| TESTI4000703 | 0 | 0 | 0 | 0 | 0 | 0 | 100 |
| TESTI4000724 | 0 | 0 | 0 | 0 | 0 | 0 | 100 |
| TESTI4000957 | 0 | 0 | 0 | 0 | 0 | 0 | 100 |
| TESTI4000970 | 0 | 0 | 0 | 0 | 0 | 0 | 100 |
| TESTI4001036 | 0 | 0 | 0 | 0 | 0 | 0 | 100 |
| TESTI4001037 | 0 | 0 | 0 | 0 | 0 | 0 | 100 |
| TESTI4001060 | 0 | 0 | 0 | 0 | 0 | 0 | 100 |
| TESTI4001106 | 0 | 0 | 0 | 0 | 0 | 0 | 100 |
| TESTI4001148 | 0 | 0 | 0 | 0 | 0 | 0 | 100 |
| TESTI4001176 | 0 | 0 | 0 | 0 | 0 | 0 | 100 |
| TESTI4001195 | 0 | 0 | 0 | 0 | 0 | 0 | 100 |
| TESTI4001201 | 0 | 0 | 0 | 0 | 0 | 0 | 100 |
| TESTI4001206 | 0 | 0 | 0 | 0 | 0 | 0 | 27.313 |
| TESTI4001348 | 0 | 0 | 0 | 0 | 0 | 0 | 100 |
| TESTI4001441 | 0 | 0 | 0 | 0 | 0 | 0 | 100 |
| TESTI4001467 | 0 | 0 | 0 | 0 | 0 | 0 | 3.619 |
| TESTI4001473 | 0 | 0 | 0 | 0 | 0 | 0 | 100 |
| TESTI4001517 | 0 | 0 | 0 | 0 | 0 | 0 | 100 |
| TESTI4001527 | 0 | 0 | 0 | 0 | 0 | 0 | 100 |
| TESTI4001561 | 0 | 0 | 0 | 0 | 0 | 0 | 26.320 |
| TESTI4001569 | 0 | 0 | 0 | 0 | 0 | 0 | 56.168 |
| TESTI4001604 | 0 | 0 | 0 | 0 | 0 | 0 | 38.043 |
| TESTI4001665 | 0 | 0 | 0 | 0 | 0 | 0 | 100 |
| TESTI4001679 | 0 | 0 | 0 | 0 | 0 | 0 | 100 |
| TESTI4001795 | 0 | 0 | 0 | 0 | 0 | 0 | 100 |
| TESTI4001923 | 0 | 0 | 0 | 0 | 0 | 0 | 100 |
| TESTI4001925 | 0 | 0 | 0 | 0 | 0 | 0 | 100 |
| TESTI4001984 | 0 | 0 | 0 | 0 | 0 | 0 | 39.529 |
| TESTI4002003 | 0 | 0 | 0 | 0 | 0 | 0 | 100 |
| TESTI4002072 | 0 | 0 | 0 | 0 | 0 | 0 | 2.183 |
| TESTI4002141 | 0 | 0 | 0 | 0 | 0 | 0 | 100 |
| TESTI4002195 | 0 | 0 | 0 | 0 | 0 | 0 | 8.747 |
| TESTI4002202 | 0 | 0 | 0 | 0 | 0 | 22.682 | 2.167 |
| TESTI4002290 | 0 | 0 | 0 | 0 | 0 | 0 | 37.085 |
| TESTI4002319 | 0 | 0 | 0 | 0 | 0 | 0 | 100 |
| TESTI4002491 | 0 | 0 | 0 | 0 | 0 | 0 | 100 |
| TESTI4002520 | 0 | 0 | 0 | 0 | 0 | 0 | 100 |
| TESTI4002552 | 0 | 0 | 0 | 0 | 0 | 0 | 100 |
| TESTI4002647 | 0 | 0 | 0 | 0 | 0 | 0 | 34.478 |
| TESTI4002703 | 0 | 0 | 0 | 0 | 0 | 0 | 100 |
| TESTI4002754 | 0 | 0 | 0 | 0 | 0 | 0 | 100 |
| TESTI4002799 | 0 | 0 | 0 | 0 | 0 | 0 | 2.887 |
| TESTI4002868 | 0 | 0 | 0 | 0 | 0 | 0 | 100 |
| TESTI4002878 | 0 | 0 | 0 | 0 | 0 | 0 | 100 |
| TESTI4002889 | 0 | 0 | 0 | 0 | 0 | 0 | 100 |
| TESTI4002988 | 0 | 0 | 0 | 0 | 0 | 0 | 14.176 |
| TESTI4003150 | 0 | 0 | 0 | 0 | 0 | 0 | 19.415 |
| TESTI4003179 | 0 | 0 | 0 | 0 | 0 | 0 | 53.856 |
| TESTI4003279 | 0 | 0 | 0 | 0 | 0 | 0 | 100 |
| TESTI4003319 | 0 | 0 | 0 | 0 | 0 | 0 | 100 |
| TESTI4003404 | 0 | 0 | 0 | 0 | 0 | 0 | 100 |
| TESTI4003565 | 0 | 0 | 0 | 0 | 0 | 0 | 100 |
| TESTI4003574 | 0 | 0 | 0 | 0 | 0 | 0 | 100 |
| TESTI4003579 | 0 | 0 | 0 | 0 | 0 | 0 | 36.852 |
| TESTI4003602 | 0 | 0 | 0 | 0 | 0 | 0 | 33.949 |
| TESTI4003703 | 0 | 0 | 0 | 0 | 0 | 0 | 23.140 |
| TESTI4003733 | 0 | 0 | 0 | 0 | 0 | 0 | 100 |
| TESTI4003796 | 0 | 0 | 0 | 0 | 0 | 0 | 100 |
| TESTI4003944 | 0 | 0 | 0 | 0 | 0 | 0 | 22.803 |
| TESTI4004003 | 0 | 0 | 0 | 0 | 0 | 0 | 100 |
| TESTI4004031 | 0 | 0 | 0 | 0 | 0 | 0 | 100 |
| TESTI4004200 | 0 | 0 | 0 | 0 | 0 | 0 | 100 |
| TESTI4004210 | 0 | 0 | 0 | 0 | 0 | 0 | 23.566 |
| TESTI4004539 | 0 | 0 | 0 | 0 | 0 | 0 | 100 |
| TESTI4004626 | 0 | 0 | 0 | 0 | 0 | 0 | 10.762 |
| TESTI4004653 | 0 | 0 | 0 | 0 | 0 | 0 | 100 |
| TESTI4004695 | 0 | 0 | 0 | 0 | 0 | 0 | 63.878 |
| TESTI4004722 | 0 | 0 | 0 | 0 | 0 | 0 | 100 |
| TESTI4004887 | 0 | 0 | 0 | 0 | 0 | 0 | 100 |
| TESTI4004917 | 0 | 0 | 0 | 0 | 0 | 0 | 100 |
| TESTI4005015 | 0 | 0 | 0 | 0 | 0 | 0 | 100 |
| TESTI4005039 | 0 | 0 | 0 | 0 | 0 | 0 | 100 |
| TESTI4005133 | 0 | 0 | 0 | 0 | 0 | 0 | 7.795 |
| TESTI4005158 | 0 | 0 | 0 | 0 | 0 | 0 | 100 |
| TESTI4005317 | 0 | 0 | 0 | 0 | 0 | 0 | 100 |
| TESTI4005322 | 0 | 0 | 0 | 0 | 0 | 0 | 100 |
| TESTI4005399 | 0 | 0 | 0 | 0 | 0 | 0 | 15.291 |
| TESTI4005470 | 0 | 0 | 0 | 0 | 0 | 0 | 100 |
| TESTI4005500 | 0 | 0 | 0 | 0 | 0 | 0 | 100 |
| TESTI4005534 | 0 | 0 | 0 | 0 | 0 | 0 | 18.229 |
| TESTI4005543 | 0 | 0 | 0 | 0 | 0 | 0 | 100 |
| TESTI4005628 | 0 | 0 | 0 | 0 | 0 | 0 | 100 |
| TESTI4005801 | 0 | 0 | 0 | 0 | 0 | 0 | 100 |
| TESTI4005805 | 0 | 0 | 0 | 0 | 0 | 0 | 100 |
| TESTI4005857 | 0 | 0 | 0 | 0 | 0 | 0 | 20.775 |
| TESTI4005961 | 0 | 0 | 0 | 0 | 0 | 0 | 100 |
| TESTI4006053 | 0 | 0 | 0 | 0 | 0 | 0 | 100 |
| TESTI4006079 | 0 | 0 | 0 | 0 | 0 | 0 | 100 |
| TESTI4006112 | 0 | 0 | 0 | 0 | 0 | 0 | 100 |
| TESTI4006137 | 0 | 0 | 0 | 0 | 0 | 0 | 16.835 |
| TESTI4006148 | 0 | 0 | 0 | 0 | 0 | 0 | 100 |
| TESTI4006219 | 0 | 0 | 0 | 0 | 0 | 0 | 100 |
| TESTI4006234 | 0 | 0 | 0 | 0 | 0 | 0 | 100 |
| TESTI4006308 | 0 | 0 | 0 | 0 | 0 | 0 | 100 |
| TESTI4006326 | 0 | 0 | 0 | 0 | 0 | 0 | 51.276 |
| TESTI4006393 | 0 | 0 | 0 | 0 | 0 | 0 | 100 |
| TESTI4006407 | 0 | 0 | 0 | 0 | 0 | 0 | 37.085 |
| TESTI4006412 | 0 | 0 | 0 | 0 | 0 | 0 | 100 |
| TESTI4006420 | 0 | 0 | 0 | 0 | 0 | 0 | 100 |
| TESTI4006441 | 0 | 0 | 0 | 0 | 0 | 0 | 39.529 |
| TESTI4006473 | 0 | 0 | 0 | 0 | 0 | 0 | 100 |
| TESTI4006539 | 0 | 0 | 0 | 0 | 0 | 0 | 100 |
| TESTI4006546 | 0 | 0 | 0 | 0 | 0 | 0 | 100 |
| TESTI4006567 | 0 | 0 | 0 | 0 | 0 | 0 | 100 |
| TESTI4006704 | 0 | 0 | 0 | 0 | 0 | 0 | 100 |
| TESTI4006728 | 0 | 0 | 0 | 0 | 0 | 0 | 100 |
| TESTI4006802 | 0 | 0 | 0 | 0 | 0 | 0 | 100 |
| TESTI4006819 | 0 | 0 | 0 | 0 | 0 | 0 | 53.856 |
| TESTI4007064 | 0 | 0 | 0 | 0 | 0 | 0 | 100 |
| TESTI4007163 | 0 | 0 | 0 | 0 | 0 | 0 | 100 |
| TESTI4007176 | 0 | 0 | 0 | 0 | 0 | 0 | 100 |
| TESTI4007203 | 0 | 0 | 0 | 0 | 0 | 0 | 100 |
| TESTI4007239 | 0 | 0 | 0 | 0 | 0 | 0 | 100 |
| TESTI4007369 | 0 | 0 | 0 | 0 | 0 | 0 | 8.520 |
| TESTI4007373 | 0 | 0 | 0 | 0 | 0 | 0 | 100 |
| TESTI4007382 | 0 | 0 | 0 | 0 | 0 | 0 | 100 |
| TESTI4007404 | 0 | 0 | 0 | 0 | 0 | 0 | 100 |
| TESTI4007489 | 0 | 0 | 0 | 0 | 0 | 0 | 100 |
| TESTI4007565 | 0 | 0 | 0 | 0 | 0 | 0 | 100 |
| TESTI4007671 | 0 | 0 | 0 | 0 | 0 | 0 | 100 |
| TESTI4007775 | 0 | 0 | 0 | 0 | 0 | 0 | 100 |
| TESTI4007778 | 0 | 0 | 0 | 0 | 0 | 0 | 100 |
| TESTI4007799 | 0 | 0 | 0 | 0 | 0 | 0 | 100 |
| TESTI4007810 | 0 | 0 | 0 | 0 | 0 | 0 | 100 |
| TESTI4007816 | 0 | 0 | 0 | 0 | 0 | 0 | 2.831 |
| TESTI4007965 | 0 | 0 | 0 | 0 | 0 | 0 | 47.189 |
| TESTI4008007 | 0 | 0 | 0 | 0 | 0 | 0 | 100 |
| TESTI4008018 | 0 | 0 | 0 | 0 | 0 | 0 | 25.979 |
| TESTI4008050 | 0 | 0 | 0 | 0 | 0 | 0 | 100 |
| TESTI4008058 | 0 | 0 | 0 | 0 | 0 | 0 | 17.285 |
| TESTI4008086 | 0 | 0 | 0 | 0 | 0 | 0 | 100 |
| TESTI4008097 | 0 | 0 | 0 | 0 | 0 | 0 | 39.529 |
| TESTI4008176 | 0 | 0 | 0 | 0 | 0 | 0 | 100 |
| TESTI4008209 | 0 | 0 | 0 | 0 | 0 | 0 | 100 |
| TESTI4008219 | 0 | 0 | 0 | 0 | 0 | 0 | 100 |
| TESTI4008250 | 0 | 0 | 0 | 0 | 0 | 0 | 100 |
| TESTI4008302 | 0 | 0 | 0 | 0 | 0 | 0 | 100 |
| TESTI4008305 | 0 | 0 | 0 | 0 | 0 | 0 | 100 |
| TESTI4008401 | 0 | 0 | 0 | 0 | 0 | 0 | 100 |
| TESTI4008417 | 0 | 0 | 0 | 0 | 0 | 0 | 100 |
| TESTI4008429 | 0 | 0 | 0 | 0 | 0 | 0 | 100 |
| TESTI4008573 | 0 | 0 | 0 | 0 | 0 | 0 | 100 |
| TESTI4008797 | 0 | 0 | 0 | 0 | 0 | 0 | 32.499 |
| TESTI4008816 | 0 | 0 | 0 | 0 | 0 | 0 | 100 |
| TESTI4008840 | 0 | 0 | 0 | 0 | 0 | 0 | 100 |
| TESTI4008935 | 0 | 0 | 0 | 0 | 0 | 0 | 100 |
| TESTI4008993 | 0 | 0 | 0 | 0 | 0 | 0 | 100 |
| TESTI4009022 | 0 | 0 | 0 | 0 | 0 | 0 | 100 |
| TESTI4009028 | 0 | 0 | 0 | 0 | 0 | 0 | 100 |
| TESTI4009034 | 0 | 0 | 0 | 0 | 0 | 0 | 100 |
| TESTI4009123 | 0 | 0 | 0 | 0 | 0 | 0 | 100 |
| TESTI4009160 | 0 | 0 | 0 | 0 | 0 | 0 | 100 |
| TESTI4009215 | 0 | 0 | 0 | 0 | 0 | 0 | 100 |
| TESTI4009283 | 0 | 0 | 0 | 0 | 0 | 0 | 100 |
| TESTI4009286 | 0 | 0 | 0 | 0 | 0 | 9.920 | 4.265 |
| TESTI4009306 | 0 | 0 | 0 | 0 | 0 | 0 | 100 |
| TESTI4009374 | 0 | 0 | 0 | 0 | 0 | 0 | 100 |
| TESTI4009406 | 0 | 0 | 0 | 0 | 0 | 0 | 100 |
| TESTI4009454 | 0 | 0 | 0 | 0 | 0 | 0 | 2.627 |
| TESTI4009457 | 0 | 0 | 0 | 0 | 0 | 0 | 70.009 |
| TESTI4009501 | 0 | 0 | 0 | 0 | 0 | 0 | 100 |
| TESTI4009563 | 0 | 0 | 0 | 0 | 0 | 0 | 100 |
| TESTI4009608 | 0 | 0 | 0 | 0 | 0 | 0 | 100 |
| TESTI4009638 | 0 | 0 | 0 | 0 | 0 | 0 | 100 |
| TESTI4009752 | 0 | 0 | 0 | 0 | 0 | 0 | 100 |
| TESTI4009881 | 0 | 0 | 0 | 0 | 0 | 0 | 100 |
| TESTI4009886 | 0 | 0 | 0 | 0 | 0 | 0 | 100 |
| TESTI4009928 | 0 | 0 | 0 | 0 | 0 | 0 | 100 |
| TESTI4010076 | 0 | 0 | 0 | 0 | 0 | 0 | 100 |
| TESTI4010082 | 0 | 0 | 0 | 0 | 0 | 0 | 100 |
| TESTI4010095 | 0 | 0 | 0 | 0 | 0 | 0 | 100 |
| TESTI4010211 | 0 | 0 | 0 | 0 | 0 | 0 | 100 |
| TESTI4010377 | 0 | 0 | 0 | 0 | 0 | 0 | 39.051 |
| TESTI4010475 | 0 | 0 | 0 | 0 | 0 | 0 | 100 |
| TESTI4010544 | 0 | 0 | 0 | 0 | 0 | 0 | 100 |
| TESTI4010713 | 0 | 0 | 0 | 0 | 0 | 0 | 100 |
| TESTI4010721 | 0 | 0 | 0 | 0 | 0 | 0 | 100 |
| TESTI4010789 | 0 | 0 | 0 | 0 | 0 | 0 | 100 |
| TESTI4010817 | 0 | 0 | 0 | 0 | 0 | 0 | 100 |
| TESTI4010831 | 0 | 0 | 0 | 0 | 0 | 0 | 100 |
| TESTI4010851 | 3.537 | 12.143 | 0 | 0 | 0 | 3.740 | 4.288 |
| TESTI4010902 | 0 | 0 | 0 | 0 | 0 | 0 | 100 |
| TESTI4010928 | 0 | 0 | 0 | 0 | 0 | 0 | 65.779 |
| TESTI4010979 | 0 | 0 | 0 | 0 | 0 | 0 | 12.844 |
| TESTI4011070 | 0 | 0 | 0 | 0 | 0 | 0 | 100 |
| TESTI4011072 | 0 | 0 | 0 | 0 | 0 | 0 | 100 |
| TESTI4011084 | 0 | 0 | 0 | 0 | 0 | 0 | 39.051 |
| TESTI4011118 | 0 | 0 | 0 | 0 | 0 | 0 | 100 |
| TESTI4011246 | 0 | 0 | 0 | 0 | 0 | 0 | 100 |
| TESTI4011484 | 0 | 0 | 0 | 0 | 0 | 0 | 100 |
| TESTI4011505 | 0 | 0 | 0 | 0 | 0 | 0 | 100 |
| TESTI4011532 | 0 | 0 | 0 | 0 | 0 | 0 | 100 |
| TESTI4011616 | 0 | 0 | 0 | 0 | 0 | 0 | 100 |
| TESTI4011744 | 0 | 0 | 0 | 0 | 0 | 0 | 100 |
| TESTI4011745 | 0 | 0 | 0 | 0 | 0 | 0 | 100 |
| TESTI4011829 | 0 | 0 | 0 | 0 | 0 | 0 | 100 |
| TESTI4011926 | 0 | 0 | 0 | 0 | 0 | 0 | 100 |
| TESTI4011956 | 0 | 0 | 0 | 0 | 0 | 0 | 100 |
| TESTI4012010 | 0 | 0 | 0 | 0 | 0 | 0 | 100 |
| TESTI4012086 | 0 | 0 | 0 | 0 | 0 | 0 | 100 |
| TESTI4012258 | 0 | 0 | 0 | 0 | 0 | 0 | 100 |
| TESTI4012293 | 0 | 0 | 0 | 0 | 0 | 0 | 100 |
| TESTI4012329 | 0 | 0 | 0 | 0 | 0 | 0 | 100 |
| TESTI4012382 | 0 | 0 | 0 | 0 | 0 | 0 | 100 |
| TESTI4012406 | 0 | 0 | 0 | 0 | 0 | 0 | 100 |
| TESTI4012448 | 0 | 0 | 0 | 0 | 0 | 0 | 100 |
| TESTI4012451 | 0 | 0 | 0 | 0 | 0 | 0 | 37.085 |
| TESTI4012505 | 0 | 0 | 0 | 0 | 0 | 0 | 100 |
| TESTI4012556 | 0 | 0 | 0 | 0 | 0 | 0 | 100 |
| TESTI4012623 | 0 | 0 | 0 | 0 | 0 | 0 | 100 |
| TESTI4012646 | 0 | 0 | 0 | 0 | 0 | 0 | 39.529 |
| TESTI4012679 | 0 | 0 | 0 | 0 | 0 | 0 | 100 |
| TESTI4012911 | 0 | 0 | 0 | 0 | 0 | 0 | 100 |
| TESTI4012956 | 0 | 0 | 0 | 0 | 0 | 0 | 100 |
| TESTI4012960 | 0 | 0 | 0 | 0 | 0 | 0 | 9.733 |
| TESTI4013365 | 0 | 0 | 0 | 0 | 0 | 0 | 100 |
| TESTI4013369 | 0 | 0 | 0 | 0 | 0 | 0 | 100 |
| TESTI4013410 | 0 | 0 | 0 | 0 | 0 | 0 | 100 |
| TESTI4013441 | 0.338 | 0 | 0 | 0 | 0 | 2.146 | 0.205 |
| TESTI4013474 | 2.229 | 0 | 0 | 0 | 0 | 0 | 0.675 |
| TESTI4013602 | 0 | 0 | 0 | 0 | 0 | 0 | 100 |
| TESTI4013667 | 0 | 0 | 0 | 0 | 0 | 0 | 100 |
| TESTI4013675 | 0 | 0 | 0 | 0 | 0 | 0 | 32.269 |
| TESTI4013685 | 0 | 0 | 0 | 0 | 0 | 0 | 100 |
| TESTI4013735 | 0 | 0 | 0 | 0 | 0 | 0 | 36.852 |
| TESTI4013742 | 0 | 0 | 0 | 0 | 0 | 0 | 100 |
| TESTI4013774 | 0 | 0 | 0 | 0 | 0 | 0 | 100 |
| TESTI4013817 | 0 | 0 | 0 | 0 | 0 | 0 | 17.756 |
| TESTI4013830 | 0 | 0 | 0 | 0 | 0 | 0 | 100 |
| TESTI4013852 | 0 | 0 | 0 | 0 | 0 | 0 | 100 |
| TESTI4013894 | 0 | 0 | 0 | 0 | 0 | 0 | 18.310 |
| TESTI4013924 | 0 | 0 | 0 | 0 | 0 | 0 | 100 |
| TESTI4013960 | 0 | 0 | 0 | 0 | 0 | 0 | 100 |
| TESTI4013962 | 0 | 0 | 0 | 0 | 0 | 0 | 100 |
| TESTI4014159 | 0 | 0 | 0 | 0 | 0 | 0 | 7.662 |
| TESTI4014175 | 0 | 0 | 0 | 0 | 0 | 0 | 17.462 |
| TESTI4014265 | 0 | 0 | 0 | 0 | 0 | 0 | 100 |
| TESTI4014276 | 0 | 0 | 0 | 0 | 0 | 0 | 100 |
| TESTI4014306 | 0 | 0 | 0 | 0 | 0 | 0 | 47.943 |
| TESTI4014392 | 0 | 0 | 0 | 0 | 0 | 0 | 100 |
| TESTI4014415 | 0 | 0 | 0 | 0 | 0 | 0 | 100 |
| TESTI4014445 | 0 | 0 | 0 | 0 | 0 | 0 | 100 |
| TESTI4014553 | 0 | 0 | 0 | 0 | 0 | 0 | 31.530 |
| TESTI4014661 | 0 | 0 | 0 | 0 | 0 | 0 | 100 |
| TESTI4014694 | 0 | 0 | 0 | 0 | 0 | 0 | 0.728 |
| TESTI4014801 | 0 | 0 | 0 | 0 | 0 | 0 | 100 |
| TESTI4014818 | 0 | 0 | 0 | 0 | 0 | 0 | 39.051 |
| TESTI4014891 | 0 | 0 | 0 | 0 | 0 | 0 | 100 |
| TESTI4014908 | 0 | 0 | 0 | 0 | 0 | 0 | 23.566 |
| TESTI4014924 | 0 | 0 | 0 | 0 | 0 | 0 | 100 |
| TESTI4014932 | 0 | 0 | 0 | 0 | 0 | 0 | 100 |
| TESTI4014977 | 0 | 0 | 0 | 0 | 0 | 0 | 100 |
| TESTI4015012 | 0 | 0 | 0 | 0 | 0 | 0 | 100 |
| TESTI4015129 | 0 | 0 | 0 | 0 | 0 | 0 | 100 |
| TESTI4015145 | 0 | 0 | 0 | 0 | 0 | 0 | 100 |
| TESTI4015204 | 0 | 0 | 0 | 0 | 0 | 0 | 51.491 |
| TESTI4015263 | 0 | 0 | 0 | 0 | 0 | 0 | 100 |
| TESTI4015293 | 0 | 0 | 0 | 0 | 0 | 0 | 100 |
| TESTI4015299 | 0 | 0 | 0 | 0 | 0 | 0 | 100 |
| TESTI4015339 | 0 | 0 | 0 | 0 | 0 | 0 | 100 |
| TESTI4015398 | 0 | 0 | 0 | 0 | 0 | 0 | 100 |
| TESTI4015442 | 0 | 0 | 0 | 0 | 0 | 0 | 26.359 |
| TESTI4015471 | 0 | 0 | 0 | 0 | 0 | 0 | 100 |
| TESTI4015477 | 0 | 0 | 0 | 0 | 0 | 0 | 100 |
| TESTI4015600 | 0 | 0 | 0 | 0 | 0 | 0 | 100 |
| TESTI4015646 | 0 | 0 | 0 | 0 | 0 | 0 | 100 |
| TESTI4015681 | 0 | 0 | 0 | 0 | 0 | 0 | 100 |
| TESTI4015688 | 0 | 0 | 0 | 0 | 0 | 0 | 100 |
| TESTI4015790 | 0 | 0 | 0 | 0 | 0 | 0 | 100 |
| TESTI4016110 | 0 | 0 | 0 | 0 | 0 | 0 | 100 |
| TESTI4016238 | 0 | 0 | 0 | 0 | 0 | 0 | 100 |
| TESTI4016551 | 0 | 0 | 0 | 0 | 0 | 0 | 100 |
| TESTI4016812 | 0 | 0 | 0 | 0 | 0 | 0 | 100 |
| TESTI4016822 | 0 | 0 | 0 | 0 | 0 | 0 | 100 |
| TESTI4016865 | 0 | 0 | 0 | 0 | 0 | 0 | 100 |
| TESTI4016882 | 0 | 0 | 0 | 0 | 0 | 0 | 100 |
| TESTI4016925 | 0 | 0 | 0 | 0 | 0 | 0 | 22.588 |
| TESTI4017001 | 0 | 0 | 0 | 0 | 0 | 0 | 100 |
| TESTI4017116 | 0 | 0 | 0 | 0 | 0 | 0 | 100 |
| TESTI4017137 | 0 | 0 | 0 | 0 | 0 | 0 | 100 |
| TESTI4017229 | 0 | 0 | 0 | 0 | 0 | 0 | 100 |
| TESTI4017254 | 0 | 0 | 0 | 0 | 0 | 0 | 100 |
| TESTI4017269 | 0 | 0 | 0 | 0 | 0 | 0 | 100 |
| TESTI4017380 | 0 | 0 | 0 | 0 | 0 | 0 | 100 |
| TESTI4017382 | 0 | 0 | 0 | 0 | 0 | 0 | 100 |
| TESTI4017543 | 0 | 0 | 0 | 0 | 0 | 0 | 100 |
| TESTI4017575 | 0 | 0 | 0 | 0 | 0 | 0 | 100 |
| TESTI4017647 | 0 | 0 | 0 | 0 | 0 | 0 | 100 |
| TESTI4017714 | 0 | 0 | 0 | 0 | 0 | 0 | 51.276 |
| TESTI4017763 | 0 | 0 | 0 | 0 | 0 | 0 | 100 |
| TESTI4017848 | 0 | 0 | 0 | 0 | 0 | 0 | 100 |
| TESTI4017854 | 0 | 0 | 91.498 | 0 | 0 | 0 | 8.502 |
| TESTI4017901 | 0 | 0 | 0 | 0 | 0 | 0 | 100 |
| TESTI4017961 | 0 | 0 | 0 | 0 | 0 | 0 | 100 |
| TESTI4017984 | 0 | 0 | 0 | 0 | 0 | 0 | 64.813 |
| TESTI4018101 | 0 | 0 | 0 | 0 | 0 | 0 | 100 |
| TESTI4018152 | 0 | 0 | 0 | 0 | 0 | 0 | 28.159 |
| TESTI4018208 | 0 | 0 | 0 | 0 | 0 | 0 | 100 |
| TESTI4018382 | 0 | 0 | 0 | 0 | 0 | 0 | 100 |
| TESTI4018436 | 0 | 0 | 0 | 0 | 0 | 0 | 3.402 |
| TESTI4018506 | 0 | 0 | 0 | 0 | 0 | 0 | 100 |
| TESTI4018555 | 0 | 0 | 0 | 0 | 0 | 0 | 100 |
| TESTI4018751 | 0 | 0 | 0 | 0 | 0 | 0 | 100 |
| TESTI4018806 | 0 | 0 | 0 | 0 | 0 | 0 | 100 |
| TESTI4018835 | 0 | 0 | 0 | 0 | 0 | 0 | 100 |
| TESTI4018859 | 0 | 0 | 0 | 0 | 0 | 0 | 100 |
| TESTI4018881 | 0 | 0 | 0 | 0 | 0 | 0 | 100 |
| TESTI4018886 | 0 | 0 | 0 | 0 | 0 | 0 | 35.404 |
| TESTI4018938 | 0 | 0 | 0 | 0 | 0 | 0 | 45.274 |
| TESTI4019140 | 0 | 0 | 0 | 0 | 0 | 0 | 100 |
| TESTI4019149 | 0 | 0 | 0 | 0 | 0 | 0 | 100 |
| TESTI4019299 | 0 | 0 | 0 | 0 | 0 | 0 | 100 |
| TESTI4019417 | 0 | 0 | 0 | 0 | 0 | 0 | 100 |
| TESTI4019440 | 0 | 0 | 0 | 0 | 0 | 0 | 100 |
| TESTI4019566 | 0 | 0 | 0 | 0 | 0 | 0 | 100 |
| TESTI4019657 | 0 | 0 | 0 | 0 | 0 | 0 | 100 |
| TESTI4019756 | 0 | 0 | 0 | 0 | 0 | 0 | 100 |
| TESTI4019843 | 0 | 0 | 0 | 0 | 0 | 0 | 26.135 |
| TESTI4020092 | 0 | 0 | 0 | 0 | 0 | 0 | 100 |
| TESTI4020102 | 0 | 0 | 0 | 0 | 0 | 0 | 100 |
| TESTI4020342 | 0 | 0 | 0 | 0 | 0 | 0 | 100 |
| TESTI4020460 | 0 | 0 | 0 | 0 | 0 | 0 | 100 |
| TESTI4020596 | 0 | 0 | 0 | 0 | 0 | 0 | 34.478 |
| TESTI4020806 | 0 | 0 | 0 | 0 | 0 | 0 | 100 |
| TESTI4020819 | 0 | 0 | 0 | 0 | 0 | 0 | 100 |
| TESTI4020920 | 0 | 0 | 0 | 0 | 0 | 0 | 100 |
| TESTI4021129 | 0 | 0 | 0 | 0 | 0 | 0 | 100 |
| TESTI4021197 | 0 | 0 | 0 | 0 | 0 | 0 | 100 |
| TESTI4021294 | 0 | 0 | 0 | 0 | 0 | 0 | 100 |
| TESTI4021377 | 0 | 0 | 0 | 0 | 0 | 0 | 100 |
| TESTI4021456 | 0 | 0 | 0 | 0 | 0 | 0 | 100 |
| TESTI4021491 | 0 | 0 | 0 | 0 | 0 | 0 | 100 |
| TESTI4021569 | 0 | 0 | 0 | 0 | 0 | 0 | 100 |
| TESTI4021713 | 0 | 0 | 0 | 0 | 0 | 0 | 100 |
| TESTI4021821 | 0 | 0 | 0 | 0 | 0 | 0 | 100 |
| TESTI4022158 | 0 | 0 | 0 | 0 | 0 | 0 | 8.724 |
| TESTI4022577 | 0 | 0 | 0 | 0 | 0 | 0 | 100 |
| TESTI4022716 | 0 | 0 | 0 | 0 | 0 | 0 | 100 |
| TESTI4022873 | 0 | 0 | 0 | 0 | 0 | 0 | 100 |
| TESTI4023096 | 0 | 0 | 0 | 0 | 0 | 0 | 100 |
| TESTI4023172 | 0 | 0 | 0 | 0 | 0 | 0 | 100 |
| TESTI4023546 | 0 | 0 | 0 | 0 | 0 | 0 | 100 |
| TESTI4023555 | 0 | 0 | 0 | 0 | 0 | 0 | 100 |
| TESTI4023654 | 0 | 0 | 0 | 0 | 0 | 0 | 100 |
| TESTI4023722 | 0 | 0 | 0 | 0 | 0 | 0 | 100 |
| TESTI4023762 | 0 | 0 | 0 | 0 | 0 | 0 | 100 |
| TESTI4023942 | 0 | 0 | 0 | 0 | 0 | 0 | 100 |
| TESTI4024096 | 0 | 0 | 0 | 0 | 0 | 0 | 100 |
| TESTI4024240 | 0 | 0 | 0 | 0 | 0 | 0 | 100 |
| TESTI4024245 | 0 | 0 | 0 | 0 | 0 | 0 | 22.035 |
| TESTI4024294 | 0 | 0 | 0 | 0 | 0 | 0 | 100 |
| TESTI4024344 | 0 | 0 | 0 | 0 | 0 | 0 | 100 |
| TESTI4024387 | 0 | 0 | 0 | 0 | 0 | 0 | 100 |
| TESTI4024420 | 0 | 0 | 0 | 0 | 0 | 0 | 24.447 |
| TESTI4024494 | 0 | 0 | 0 | 0 | 0 | 0 | 100 |
| TESTI4024740 | 0 | 0 | 0 | 0 | 0 | 0 | 23.518 |
| TESTI4024874 | 0 | 0 | 0 | 0 | 0 | 0 | 100 |
| TESTI4024890 | 0 | 0 | 0 | 0 | 0 | 0 | 100 |
| TESTI4024907 | 0 | 0 | 0 | 0 | 0 | 0 | 100 |
| TESTI4024930 | 0 | 0 | 0 | 0 | 0 | 0 | 100 |
| TESTI4025062 | 0 | 0 | 0 | 0 | 0 | 0 | 100 |
| TESTI4025268 | 0 | 0 | 0 | 0 | 0 | 0 | 39.529 |
| TESTI4025401 | 0 | 0 | 0 | 0 | 0 | 0 | 100 |
| TESTI4025494 | 0 | 0 | 0 | 0 | 0 | 0 | 100 |
| TESTI4025547 | 0 | 0 | 0 | 0 | 0 | 0 | 39.051 |
| TESTI4025731 | 0 | 0 | 0 | 0 | 0 | 0 | 100 |
| TESTI4025797 | 0 | 0 | 0 | 0 | 0 | 0 | 100 |
| TESTI4025865 | 0 | 0 | 0 | 0 | 0 | 0 | 100 |
| TESTI4025908 | 0 | 0 | 0 | 0 | 0 | 0 | 100 |
| TESTI4025920 | 0 | 0 | 0 | 0 | 0 | 0 | 100 |
| TESTI4026079 | 54.872 | 0 | 0 | 0 | 0 | 0 | 16.630 |
| TESTI4026080 | 0 | 0 | 0 | 0 | 0 | 0 | 100 |
| TESTI4026192 | 0 | 0 | 0 | 0 | 0 | 0 | 100 |
| TESTI4026207 | 0 | 0 | 0 | 0 | 0 | 0 | 39.051 |
| TESTI4026295 | 0 | 0 | 0 | 0 | 0 | 0 | 100 |
| TESTI4026390 | 0 | 0 | 0 | 0 | 0 | 0 | 47.943 |
| TESTI4026456 | 0 | 0 | 0 | 0 | 0 | 0 | 100 |
| TESTI4026510 | 0 | 0 | 0 | 0 | 0 | 0 | 100 |
| TESTI4026524 | 0 | 0 | 0 | 0 | 0 | 0 | 100 |
| TESTI4026680 | 0 | 0 | 0 | 0 | 0 | 0 | 100 |
| TESTI4026700 | 0 | 0 | 0 | 0 | 0 | 0 | 100 |
| TESTI4026762 | 0 | 0 | 0 | 0 | 0 | 0 | 100 |
| TESTI4026785 | 0 | 0 | 0 | 0 | 0 | 0 | 100 |
| TESTI4027139 | 0 | 0 | 0 | 0 | 0 | 0 | 100 |
| TESTI4027170 | 0 | 0 | 0 | 0 | 0 | 0 | 100 |
| TESTI4027262 | 0 | 0 | 0 | 0 | 0 | 0 | 100 |
| TESTI4027516 | 0 | 0 | 0 | 0 | 0 | 0 | 100 |
| TESTI4027557 | 0 | 0 | 0 | 0 | 0 | 0 | 100 |
| TESTI4027660 | 0 | 0 | 0 | 0 | 0 | 0 | 100 |
| TESTI4027821 | 0 | 0 | 0 | 0 | 0 | 0 | 39.529 |
| TESTI4027969 | 0 | 0 | 0 | 0 | 0 | 0 | 100 |
| TESTI4028042 | 0 | 0 | 0 | 0 | 0 | 0 | 100 |
| TESTI4028059 | 0 | 0 | 0 | 0 | 0 | 0 | 100 |
| TESTI4028062 | 0 | 0 | 0 | 0 | 0 | 0 | 100 |
| TESTI4028182 | 0 | 0 | 0 | 0 | 0 | 0 | 100 |
| TESTI4028429 | 0 | 0 | 0 | 0 | 0 | 0 | 100 |
| TESTI4028612 | 0 | 0 | 0 | 0 | 0 | 0 | 100 |
| TESTI4028692 | 0 | 0 | 0 | 0 | 0 | 0 | 100 |
| TESTI4028809 | 0 | 0 | 0 | 0 | 0 | 0 | 100 |
| TESTI4028823 | 0 | 0 | 0 | 0 | 0 | 0 | 100 |
| TESTI4028880 | 0 | 0 | 0 | 0 | 0 | 0 | 100 |
| TESTI4028904 | 0 | 0 | 0 | 0 | 0 | 0 | 100 |
| TESTI4028938 | 0 | 0 | 0 | 0 | 0 | 0 | 100 |
| TESTI4028958 | 0 | 0 | 0 | 0 | 0 | 0 | 100 |
| TESTI4028983 | 0 | 0 | 0 | 0 | 0 | 0 | 100 |
| TESTI4029023 | 0 | 0 | 0 | 0 | 0 | 0 | 100 |
| TESTI4029348 | 0 | 0 | 0 | 0 | 0 | 0 | 100 |
| TESTI4029370 | 0 | 0 | 0 | 0 | 0 | 0 | 100 |
| TESTI4029528 | 0 | 0 | 0 | 0 | 0 | 0 | 100 |
| TESTI4029651 | 0 | 0 | 0 | 0 | 0 | 0 | 100 |
| TESTI4029671 | 0 | 0 | 0 | 0 | 0 | 0 | 12.158 |
| TESTI4029676 | 0 | 0 | 0 | 0 | 0 | 0 | 100 |
| TESTI4029690 | 0 | 0 | 0 | 0 | 0 | 0 | 100 |
| TESTI4029731 | 0 | 0 | 0 | 0 | 0 | 0 | 100 |
| TESTI4029743 | 0 | 0 | 0 | 0 | 0 | 0 | 100 |
| TESTI4030069 | 0 | 0 | 0 | 0 | 0 | 0 | 100 |
| TESTI4030159 | 0 | 0 | 0 | 0 | 0 | 0 | 100 |
| TESTI4030319 | 0 | 0 | 0 | 0 | 0 | 0 | 100 |
| TESTI4030505 | 0 | 0 | 0 | 0 | 0 | 0 | 100 |
| TESTI4030603 | 0 | 0 | 0 | 0 | 0 | 0 | 100 |
| TESTI4030669 | 0 | 0 | 0 | 0 | 0 | 0 | 100 |
| TESTI4030673 | 0 | 0 | 0 | 0 | 0 | 0 | 100 |
| TESTI4030864 | 0 | 0 | 0 | 0 | 0 | 0 | 100 |
| TESTI4031066 | 0 | 0 | 0 | 0 | 0 | 0 | 100 |
| TESTI4031173 | 0 | 0 | 0 | 0 | 0 | 0 | 100 |
| TESTI4031335 | 0 | 0 | 0 | 0 | 0 | 0 | 100 |
| TESTI4031745 | 0 | 0 | 0 | 0 | 0 | 0 | 100 |
| TESTI4031818 | 0 | 0 | 0 | 0 | 0 | 0 | 100 |
| TESTI4032090 | 0 | 0 | 0 | 0 | 0 | 0 | 39.529 |
| TESTI4032112 | 0 | 0 | 0 | 0 | 0 | 0 | 100 |
| TESTI4032128 | 0 | 0 | 0 | 0 | 0 | 0 | 100 |
| TESTI4032270 | 0 | 0 | 0 | 0 | 0 | 0 | 100 |
| TESTI4032375 | 0 | 0 | 0 | 0 | 0 | 0 | 100 |
| TESTI4032834 | 0 | 0 | 0 | 0 | 0 | 0 | 100 |
| TESTI4032856 | 0 | 0 | 0 | 0 | 0 | 0 | 100 |
| TESTI4032895 | 0 | 0 | 0 | 0 | 0 | 0 | 100 |
| TESTI4032913 | 0 | 0 | 0 | 0 | 0 | 0 | 10.597 |
| TESTI4033146 | 0 | 0 | 0 | 0 | 0 | 0 | 100 |
| TESTI4033177 | 0 | 0 | 0 | 0 | 0 | 0 | 100 |
| TESTI4033433 | 0 | 0 | 0 | 0 | 0 | 0 | 100 |
| TESTI4033690 | 0 | 0 | 0 | 0 | 0 | 0 | 36.852 |
| TESTI4034172 | 0 | 0 | 0 | 0 | 0 | 0 | 100 |
| TESTI4034212 | 0 | 0 | 0 | 0 | 0 | 0 | 100 |
| TESTI4034432 | 0 | 0 | 0 | 0 | 0 | 0 | 100 |
| TESTI4034495 | 0 | 0 | 0 | 0 | 0 | 0 | 100 |
| TESTI4034632 | 0 | 0 | 0 | 0 | 0 | 0 | 100 |
| TESTI4034633 | 0 | 0 | 0 | 0 | 0 | 0 | 100 |
| TESTI4034912 | 0 | 0 | 0 | 0 | 0 | 0 | 100 |
| TESTI4034973 | 0 | 0 | 0 | 0 | 0 | 0 | 100 |
| TESTI4035063 | 0 | 0 | 0 | 0 | 0 | 0 | 100 |
| TESTI4035065 | 0 | 0 | 0 | 0 | 0 | 0 | 100 |
| TESTI4035498 | 0 | 0 | 0 | 0 | 0 | 0 | 100 |
| TESTI4035508 | 0 | 0 | 0 | 0 | 0 | 0 | 100 |
| TESTI4035581 | 0 | 0 | 0 | 0 | 0 | 0 | 100 |
| TESTI4035602 | 0 | 0 | 0 | 0 | 0 | 0 | 100 |
| TESTI4035637 | 0 | 0 | 0 | 0 | 0 | 0 | 100 |
| TESTI4035649 | 0 | 0 | 0 | 0 | 0 | 0 | 100 |
| TESTI4035770 | 0 | 0 | 0 | 0 | 0 | 0 | 34.478 |
| TESTI4035872 | 0 | 0 | 0 | 0 | 0 | 0 | 100 |
| TESTI4035895 | 0 | 0 | 0 | 0 | 0 | 0 | 100 |
| TESTI4035898 | 0 | 0 | 0 | 0 | 0 | 0 | 100 |
| TESTI4035989 | 0 | 0 | 0 | 0 | 0 | 0 | 100 |
| TESTI4036012 | 0 | 0 | 0 | 0 | 0 | 0 | 100 |
| TESTI4036042 | 0 | 0 | 0 | 0 | 0 | 0 | 100 |
| TESTI4036048 | 0 | 0 | 0 | 0 | 0 | 0 | 100 |
| TESTI4036315 | 0 | 0 | 0 | 0 | 0 | 0 | 100 |
| TESTI4036319 | 0 | 0 | 0 | 0 | 0 | 0 | 100 |
| TESTI4036449 | 0 | 0 | 0 | 0 | 0 | 0 | 100 |
| TESTI4036767 | 0 | 0 | 0 | 0 | 0 | 0 | 100 |
| TESTI4036909 | 0 | 0 | 0 | 0 | 0 | 0 | 100 |
| TESTI4037066 | 0 | 0 | 0 | 0 | 0 | 0 | 100 |
| TESTI4037156 | 0 | 0 | 3.893 | 5.840 | 0 | 0 | 0.904 |
| TESTI4037188 | 0 | 0 | 0 | 0 | 0 | 0 | 39.348 |
| TESTI4037228 | 0 | 0 | 0 | 0 | 0 | 0 | 100 |
| TESTI4037244 | 0 | 0 | 0 | 0 | 0 | 0 | 100 |
| TESTI4037727 | 0 | 0 | 0 | 0 | 0 | 0 | 100 |
| TESTI4037949 | 0 | 0 | 0 | 0 | 0 | 0 | 100 |
| TESTI4038047 | 0 | 0 | 0 | 0 | 0 | 0 | 100 |
| TESTI4038099 | 0 | 0 | 0 | 0 | 0 | 0 | 43.258 |
| TESTI4038156 | 0 | 0 | 0 | 0 | 0 | 0 | 100 |
| TESTI4038223 | 0 | 0 | 0 | 0 | 0 | 0 | 100 |
| TESTI4038258 | 0 | 0 | 0 | 0 | 0 | 0 | 100 |
| TESTI4038284 | 0 | 0 | 0 | 0 | 0 | 0 | 7.223 |
| TESTI4038339 | 0 | 0 | 0 | 0 | 0 | 0 | 100 |
| TESTI4038492 | 0 | 0 | 0 | 0 | 0 | 0 | 100 |
| TESTI4038721 | 0 | 0 | 0 | 0 | 0 | 0 | 100 |
| TESTI4038758 | 0 | 0 | 0 | 0 | 0 | 0 | 100 |
| TESTI4038779 | 0 | 0 | 0 | 0 | 0 | 0 | 100 |
| TESTI4038818 | 0 | 0 | 0 | 0 | 0 | 0 | 100 |
| TESTI4039038 | 0 | 0 | 0 | 0 | 0 | 0 | 100 |
| TESTI4039086 | 0 | 0 | 0 | 0 | 0 | 0 | 100 |
| TESTI4039451 | 0 | 0 | 0 | 0 | 0 | 0 | 100 |
| TESTI4039575 | 0 | 0 | 0 | 0 | 0 | 0 | 100 |
| TESTI4039659 | 0 | 0 | 0 | 0 | 0 | 0 | 100 |
| TESTI4039744 | 0 | 0 | 0 | 0 | 0 | 0 | 100 |
| TESTI4039904 | 0 | 0 | 0 | 0 | 0 | 0 | 100 |
| TESTI4040197 | 0 | 0 | 0 | 0 | 0 | 0 | 100 |
| TESTI4040363 | 0 | 0 | 0 | 0 | 0 | 0 | 100 |
| TESTI4040535 | 0 | 0 | 0 | 0 | 0 | 0 | 100 |
| TESTI4040559 | 0 | 0 | 0 | 0 | 0 | 0 | 100 |
| TESTI4040598 | 0 | 0 | 0 | 0 | 0 | 0 | 2.798 |
| TESTI4040800 | 0 | 0 | 0 | 0 | 0 | 0 | 100 |
| TESTI4040804 | 0 | 0 | 0 | 0 | 0 | 0 | 100 |
| TESTI4040939 | 0 | 0 | 0 | 0 | 0 | 0 | 100 |
| TESTI4040956 | 0 | 0 | 0 | 0 | 0 | 0 | 100 |
| TESTI4041049 | 0 | 0 | 0 | 0 | 0 | 0 | 100 |
| TESTI4041053 | 0 | 0 | 0 | 0 | 0 | 0 | 100 |
| TESTI4041086 | 0 | 0 | 0 | 0 | 0 | 0 | 100 |
| TESTI4041099 | 0 | 0 | 0 | 0 | 0 | 0 | 100 |
| TESTI4041143 | 0 | 0 | 0 | 0 | 0 | 0 | 100 |
| TESTI4041482 | 0 | 0 | 0 | 0 | 0 | 0 | 100 |
| TESTI4041519 | 0 | 0 | 0 | 0 | 0 | 0 | 100 |
| TESTI4041624 | 0 | 0 | 0 | 0 | 0 | 0 | 100 |
| TESTI4041629 | 0 | 0 | 0 | 0 | 0 | 0 | 100 |
| TESTI4041832 | 0 | 0 | 0 | 0 | 0 | 0 | 100 |
| TESTI4041844 | 0 | 0 | 0 | 0 | 0 | 0 | 100 |
| TESTI4041903 | 0 | 0 | 0 | 0 | 0 | 0 | 100 |
| TESTI4041954 | 0 | 0 | 0 | 0 | 0 | 0 | 100 |
| TESTI4041984 | 0 | 0 | 0 | 0 | 0 | 0 | 100 |
| TESTI4041985 | 0 | 0 | 0 | 0 | 0 | 0 | 100 |
| TESTI4041986 | 0 | 0 | 0 | 0 | 0 | 0 | 100 |
| TESTI4042098 | 0 | 0 | 0 | 0 | 0 | 0 | 100 |
| TESTI4042420 | 0 | 0 | 0 | 0 | 0 | 0 | 100 |
| TESTI4042440 | 0 | 0 | 0 | 0 | 0 | 0 | 100 |
| TESTI4042444 | 0 | 0 | 0 | 0 | 0 | 0 | 100 |
| TESTI4042711 | 0 | 0 | 0 | 0 | 0 | 0 | 100 |
| TESTI4042846 | 0 | 0 | 0 | 0 | 0 | 0 | 100 |
| TESTI4043067 | 0 | 0 | 0 | 0 | 0 | 0 | 100 |
| TESTI4043129 | 0 | 0 | 0 | 0 | 0 | 0 | 100 |
| TESTI4043140 | 0 | 0 | 0 | 0 | 0 | 0 | 5.438 |
| TESTI4043166 | 0 | 0 | 0 | 0 | 0 | 0 | 100 |
| TESTI4043203 | 0 | 0 | 0 | 0 | 0 | 0 | 100 |
| TESTI4043223 | 0 | 0 | 0 | 0 | 0 | 0 | 18.091 |
| TESTI4043371 | 0 | 0 | 0 | 0 | 0 | 0 | 100 |
| TESTI4043378 | 0 | 0 | 0 | 0 | 0 | 0 | 100 |
| TESTI4043512 | 0 | 0 | 0 | 0 | 0 | 0 | 100 |
| TESTI4043551 | 0 | 0 | 0 | 0 | 0 | 0 | 100 |
| TESTI4043710 | 0 | 0 | 0 | 0 | 0 | 0 | 100 |
| TESTI4043947 | 0 | 0 | 0 | 0 | 0 | 0 | 100 |
| TESTI4044035 | 0 | 0 | 0 | 0 | 0 | 0 | 100 |
| TESTI4044076 | 0 | 0 | 0 | 0 | 0 | 0 | 100 |
| TESTI4044084 | 0 | 0 | 0 | 0 | 0 | 0 | 100 |
| TESTI4044123 | 0 | 0 | 0 | 0 | 0 | 0 | 100 |
| TESTI4044186 | 0 | 0 | 0 | 0 | 0 | 0 | 100 |
| TESTI4044234 | 0 | 0 | 0 | 0 | 0 | 0 | 100 |
| TESTI4044291 | 0 | 0 | 0 | 0 | 0 | 0 | 100 |
| TESTI4044296 | 0 | 0 | 0 | 0 | 0 | 0 | 100 |
| TESTI4044300 | 0 | 0 | 0 | 0 | 0 | 0 | 100 |
| TESTI4044682 | 0 | 0 | 0 | 0 | 0 | 0 | 100 |
| TESTI4044704 | 0 | 0 | 0 | 0 | 0 | 0 | 3.332 |
| TESTI4044770 | 0 | 0 | 0 | 0 | 0 | 0 | 100 |
| TESTI4045168 | 0 | 0 | 0 | 0 | 0 | 0 | 100 |
| TESTI4045312 | 0 | 0 | 0 | 0 | 0 | 0 | 100 |
| TESTI4045330 | 0 | 0 | 0 | 0 | 0 | 0 | 100 |
| TESTI4045470 | 0 | 0 | 0 | 0 | 0 | 0 | 100 |
| TESTI4045701 | 0 | 0 | 0 | 0 | 0 | 0 | 100 |
| TESTI4045908 | 0 | 0 | 0 | 0 | 0 | 0 | 100 |
| TESTI4045955 | 0 | 0 | 0 | 0 | 0 | 0 | 100 |
| TESTI4045982 | 0 | 0 | 0 | 0 | 0 | 0 | 100 |
| TESTI4046073 | 0 | 0 | 0 | 0 | 0 | 0 | 12.411 |
| TESTI4046090 | 0 | 0 | 0 | 0 | 0 | 0 | 100 |
| TESTI4046240 | 0 | 0 | 0 | 0 | 0 | 0 | 100 |
| TESTI4046245 | 0 | 0 | 0 | 0 | 0 | 0 | 100 |
| TESTI4046253 | 0 | 0 | 0 | 0 | 0 | 0 | 100 |
| TESTI4046282 | 0 | 0 | 0 | 0 | 0 | 0 | 100 |
| TESTI4046328 | 0 | 0 | 0 | 0 | 0 | 0 | 100 |
| TESTI4046450 | 0 | 0 | 0 | 0 | 0 | 0 | 100 |
| TESTI4046457 | 0 | 0 | 0 | 0 | 0 | 0 | 100 |
| TESTI4046487 | 0 | 0 | 0 | 0 | 0 | 0 | 100 |
| TESTI4046502 | 0 | 0 | 0 | 0 | 0 | 0 | 56.661 |
| TESTI4046523 | 0 | 0 | 0 | 0 | 0 | 0 | 100 |
| TESTI4046819 | 0 | 0 | 0 | 0 | 0 | 0 | 12.906 |
| TESTI4046873 | 0 | 0 | 0 | 0 | 0 | 0 | 26.863 |
| TESTI4046884 | 0 | 0 | 0 | 0 | 0 | 0 | 100 |
| TESTI4046896 | 0 | 0 | 0 | 0 | 0 | 0 | 100 |
| TESTI4046903 | 0 | 0 | 0 | 0 | 0 | 0 | 100 |
| TESTI4046962 | 0 | 0 | 0 | 0 | 0 | 0 | 100 |
| TESTI4047069 | 0 | 0 | 0 | 0 | 0 | 0 | 100 |
| TESTI4047119 | 0 | 0 | 0 | 0 | 0 | 0 | 100 |
| TESTI4047305 | 0 | 0 | 0 | 0 | 0 | 0 | 100 |
| TESTI4047328 | 0 | 0 | 0 | 0 | 0 | 0 | 100 |
| TESTI4047437 | 0 | 0 | 0 | 0 | 0 | 0 | 100 |
| TESTI4047569 | 0 | 0 | 0 | 0 | 0 | 0 | 100 |
| TESTI4047746 | 0 | 0 | 0 | 0 | 0 | 0 | 100 |
| TESTI4047808 | 0 | 0 | 0 | 0 | 0 | 0 | 100 |
| THYMU1000002 | 0 | 0 | 4.164 | 0 | 0 | 0 | 0 |
| THYMU1000016 | 0.833 | 8.583 | 0 | 0 | 0 | 2.644 | 0.758 |
| THYMU1000083 | 0 | 0 | 0 | 0 | 0 | 0 | 7.840 |
| THYMU1000109 | 1.698 | 0 | 11.073 | 0 | 16.686 | 0 | 0.514 |
| THYMU1000329 | 0 | 0 | 0 | 0 | 0 | 0 | 3.484 |
| THYMU1000331 | 0 | 0 | 0 | 0 | 0 | 0 | 29.749 |
| THYMU1000359 | 3.468 | 0 | 0 | 0 | 0 | 0 | 0 |
| THYMU1000374 | 0 | 0 | 0 | 0 | 0 | 0 | 0.979 |
| THYMU1000428 | 0 | 0 | 3.999 | 0 | 0 | 0 | 1.486 |
| THYMU1000490 | 0 | 0 | 0 | 0 | 0 | 0 | 3.748 |
| THYMU2000382 | 0 | 0 | 0 | 0 | 0 | 4.147 | 0.792 |
| THYMU2000436 | 0 | 0 | 0 | 0 | 0 | 0 | 4.216 |
| THYMU2000946 | 0 | 0 | 10.178 | 0 | 0 | 0 | 0 |
| THYMU2001007 | 11.703 | 0 | 0 | 0 | 0 | 0 | 0 |
| THYMU2001090 | 0 | 0 | 0 | 0 | 0 | 0 | 13.892 |
| THYMU2001381 | 0 | 0 | 47.714 | 0 | 0 | 0 | 0 |
| THYMU2001839 | 33.745 | 0 | 0 | 0 | 0 | 0 | 10.227 |
| THYMU2001926 | 0 | 0 | 0 | 0 | 0 | 0 | 12.687 |
| THYMU2002162 | 23.514 | 0 | 0 | 0 | 0 | 0 | 0 |
| THYMU2002583 | 2.236 | 0 | 0 | 0 | 0 | 0 | 2.371 |
| THYMU2002841 | 0 | 0 | 20.416 | 0 | 0 | 0 | 1.897 |
| THYMU2003012 | 1.890 | 0 | 0 | 0 | 0 | 0 | 0 |
| THYMU2003046 | 4.146 | 0 | 0 | 0 | 0 | 0 | 1.257 |
| THYMU2003419 | 0 | 0 | 0 | 0 | 0 | 0 | 8.207 |
| THYMU2003446 | 0 | 0 | 0 | 0 | 0 | 0 | 3.118 |
| THYMU2003499 | 0 | 0 | 0 | 0 | 0 | 0 | 9.853 |
| THYMU2003891 | 1.888 | 0 | 0 | 0 | 0 | 1.997 | 0 |
| THYMU2003932 | 0 | 0 | 0 | 0 | 0 | 0 | 12.644 |
| THYMU2003981 | 9.011 | 0 | 0 | 0 | 0 | 0 | 0.341 |
| THYMU2004152 | 2.142 | 0 | 0 | 0 | 0 | 0 | 0.649 |
| THYMU2004344 | 0 | 0 | 0 | 0 | 0 | 0 | 1.670 |
| THYMU2004410 | 4.133 | 0 | 0 | 0 | 0 | 0 | 8.767 |
| THYMU2005439 | 0 | 0 | 0 | 0 | 0 | 37.819 | 0 |
| THYMU2005482 | 0 | 0 | 0 | 0 | 0 | 0 | 8.043 |
| THYMU2005546 | 1.180 | 0 | 0 | 0 | 0 | 0 | 0 |
| THYMU2005980 | 0 | 0 | 0 | 0 | 0 | 0 | 10.601 |
| THYMU2006261 | 0 | 0 | 0 | 0 | 0 | 0 | 75.821 |
| THYMU2006813 | 3.413 | 0 | 0 | 0 | 0 | 0 | 1.034 |
| THYMU2007060 | 27.587 | 0 | 0 | 0 | 0 | 0 | 2.787 |
| THYMU2007065 | 0 | 0 | 28.526 | 0 | 0 | 0 | 5.301 |
| THYMU2007112 | 9.864 | 0 | 0 | 0 | 0 | 31.290 | 5.979 |
| THYMU2007146 | 0 | 0 | 0 | 0 | 0 | 0 | 70.165 |
| THYMU2007415 | 5.219 | 0 | 0 | 0 | 0 | 33.113 | 0 |
| THYMU2007467 | 0 | 0 | 56.830 | 0 | 0 | 0 | 0 |
| THYMU2007886 | 2.987 | 0 | 0 | 0 | 0 | 0 | 0 |
| THYMU2008321 | 0 | 0 | 0 | 0 | 0 | 0 | 1.890 |
| THYMU2008383 | 0 | 0 | 0 | 0 | 0 | 0 | 43.944 |
| THYMU2009658 | 0.756 | 7.780 | 2.464 | 0 | 0 | 0 | 0 |
| THYMU2010094 | 0 | 0 | 0 | 0 | 0 | 0 | 7.615 |
| THYMU2010448 | 0 | 0 | 0 | 0 | 0 | 36.228 | 3.461 |
| THYMU2012024 | 0 | 0 | 0 | 0 | 0 | 0 | 1.948 |
| THYMU2012625 | 0 | 0 | 0 | 0 | 0 | 7.107 | 0 |
| THYMU2012826 | 0 | 0 | 0 | 0 | 0 | 0 | 14.477 |
| THYMU2013136 | 1.764 | 0 | 0 | 0 | 0 | 0 | 0 |
| THYMU2013916 | 2.392 | 0 | 0 | 0 | 0 | 0 | 2.175 |
| THYMU2016523 | 0 | 0 | 0 | 0 | 0 | 0 | 21.566 |
| THYMU2017601 | 0 | 0 | 49.678 | 0 | 0 | 0 | 18.465 |
| THYMU2017831 | 0 | 0 | 0 | 0 | 0 | 0 | 43.944 |
| THYMU2017948 | 0 | 0 | 0 | 0 | 0 | 0 | 28.159 |
| THYMU2018126 | 0 | 0 | 0 | 0 | 0 | 4.978 | 0 |
| THYMU2027125 | 1.158 | 3.976 | 0 | 7.555 | 15.180 | 2.449 | 1.521 |
| THYMU2028739 | 0 | 0 | 0 | 0 | 0 | 0 | 43.944 |
| THYMU2031341 | 0 | 0 | 0 | 0 | 0 | 0 | 2.255 |
| THYMU2031368 | 0 | 0 | 0 | 0 | 96.216 | 0 | 0 |
| THYMU2032155 | 0 | 0 | 0 | 0 | 0 | 48.859 | 0 |
| THYMU2032696 | 0 | 0 | 0 | 0 | 0 | 0 | 0.687 |
| THYMU2035735 | 0 | 0 | 0 | 0 | 0 | 0 | 1.725 |
| THYMU2036058 | 0 | 0 | 0 | 0 | 0 | 0 | 43.944 |
| THYMU2039350 | 0 | 0 | 0 | 0 | 0 | 0 | 43.944 |
| THYMU3000776 | 0 | 0 | 0 | 0 | 0 | 0 | 10.200 |
| THYMU3003309 | 0 | 0 | 0 | 0 | 0 | 0 | 19.005 |
| THYMU3003865 | 0 | 0 | 0 | 0 | 0 | 0 | 82.467 |
| THYMU3008883 | 52.467 | 0 | 0 | 0 | 0 | 0 | 0 |
| THYMU3009643 | 0 | 0 | 0 | 0 | 0 | 0 | 79.673 |
| THYMU3012983 | 0 | 0 | 0 | 0 | 0 | 0 | 43.944 |
| THYMU3013386 | 0 | 0 | 5.266 | 0 | 0 | 0 | 1.957 |
| THYMU3015759 | 2.428 | 0 | 0 | 0 | 0 | 0 | 0 |
| THYMU3021586 | 0 | 0 | 0 | 0 | 0 | 0 | 8.100 |
| THYMU3032798 | 4.171 | 0 | 0 | 0 | 0 | 0 | 0 |
| THYMU3033626 | 0 | 0 | 0 | 0 | 0 | 0 | 7.348 |
| THYMU3034671 | 5.144 | 0 | 0 | 0 | 0 | 0 | 0 |
| THYMU3041428 | 0 | 0 | 0 | 0 | 0 | 0 | 0.167 |
| THYMU3047115 | 0 | 0 | 0 | 0 | 0 | 0 | 0.269 |
| TKIDN2000701 | 0 | 0 | 0 | 0 | 0 | 0 | 15.009 |
| TKIDN2005487 | 0 | 0 | 5.054 | 0 | 0 | 4.915 | 0 |
| TKIDN2015423 | 0 | 0 | 0 | 0 | 0 | 0 | 0.832 |
| TLIVE2004110 | 22.269 | 0 | 0 | 0 | 0 | 0 | 6.749 |
| TLIVE2008229 | 0 | 0 | 0 | 0 | 0 | 0 | 8.683 |
| TRACH1000030 | 0 | 0 | 0 | 0 | 0 | 0 | 0.451 |
| TRACH1000038 | 8.123 | 0 | 0 | 0 | 0 | 0 | 9.848 |
| TRACH1000063 | 0 | 0 | 0 | 0 | 0 | 14.715 | 4.218 |
| TRACH1000193 | 0 | 0 | 0 | 0 | 0 | 0 | 14.199 |
| TRACH1000205 | 0 | 0 | 0 | 0 | 0 | 0 | 2.572 |
| TRACH2000079 | 2.337 | 12.032 | 0 | 0 | 0 | 3.706 | 0 |
| TRACH2000237 | 0 | 0 | 0 | 0 | 0 | 0 | 3.515 |
| TRACH2000248 | 3.010 | 0 | 0 | 0 | 0 | 0 | 0 |
| TRACH2000306 | 12.199 | 0 | 0 | 0 | 0 | 0 | 3.697 |
| TRACH2000321 | 1.060 | 0 | 3.456 | 0 | 0 | 0 | 0.963 |
| TRACH2000359 | 0 | 0 | 20.978 | 0 | 0 | 0 | 0 |
| TRACH2000420 | 0 | 0 | 0 | 0 | 0 | 0 | 2.192 |
| TRACH2000461 | 0 | 0 | 0 | 0 | 0 | 0 | 11.208 |
| TRACH2000540 | 3.073 | 0 | 0 | 0 | 0 | 0 | 0 |
| TRACH2000702 | 0 | 0 | 0 | 0 | 0 | 0 | 2.566 |
| TRACH2000780 | 5.655 | 0 | 0 | 0 | 0 | 0 | 7.999 |
| TRACH2000862 | 0 | 0 | 0 | 0 | 0 | 39.606 | 0 |
| TRACH2000920 | 0 | 0 | 0 | 0 | 0 | 0 | 4.334 |
| TRACH2000926 | 0 | 0 | 19.627 | 0 | 0 | 19.089 | 0 |
| TRACH2000959 | 0 | 0 | 0 | 0 | 0 | 0 | 0.160 |
| TRACH2000972 | 0 | 26.327 | 4.169 | 0 | 12.565 | 0 | 0.775 |
| TRACH2001021 | 0 | 0 | 0 | 0 | 0 | 2.865 | 0 |
| TRACH2001101 | 0 | 0 | 0 | 0 | 0 | 18.186 | 0 |
| TRACH2001192 | 0 | 0 | 0 | 0 | 0 | 0 | 22.035 |
| TRACH2001249 | 0 | 0 | 0 | 0 | 0 | 0 | 59.944 |
| TRACH2001289 | 0 | 0 | 0 | 0 | 0 | 0 | 0.222 |
| TRACH2001314 | 0 | 0 | 0 | 0 | 0 | 0 | 11.948 |
| TRACH2001478 | 0 | 0 | 0 | 0 | 0 | 0 | 2.277 |
| TRACH2001607 | 2.166 | 0 | 0 | 0 | 0 | 0 | 7.222 |
| TRACH2001612 | 0 | 0 | 0 | 0 | 0 | 0 | 2.611 |
| TRACH2001810 | 1.675 | 0 | 0 | 0 | 0 | 0 | 0 |
| TRACH2002537 | 0 | 0 | 6.524 | 0 | 0 | 0 | 0.606 |
| TRACH2002664 | 0 | 0 | 10.705 | 0 | 0 | 0 | 0 |
| TRACH2002803 | 0 | 0 | 0 | 0 | 0 | 0 | 5.449 |
| TRACH2003323 | 3.839 | 0 | 0 | 0 | 0 | 0 | 1.163 |
| TRACH2004039 | 0 | 0 | 0 | 0 | 0 | 0 | 36.852 |
| TRACH2004336 | 0 | 0 | 0 | 0 | 0 | 0 | 36.852 |
| TRACH2005541 | 0 | 0 | 68.404 | 0 | 0 | 0 | 0 |
| TRACH2005800 | 2.594 | 0 | 0 | 0 | 0 | 0 | 0 |
| TRACH2005811 | 0 | 0 | 0 | 0 | 0 | 14.431 | 3.447 |
| TRACH2006378 | 0 | 0 | 0 | 0 | 0 | 0 | 5.843 |
| TRACH2006866 | 0 | 0 | 0 | 0 | 21.039 | 0 | 0 |
| TRACH2007399 | 0 | 10.463 | 0 | 0 | 0 | 0 | 0.308 |
| TRACH2007969 | 0 | 0 | 0 | 0 | 0 | 0 | 4.977 |
| TRACH2008081 | 0 | 0 | 0 | 0 | 0 | 0 | 0.835 |
| TRACH2008300 | 0 | 0 | 0 | 0 | 0 | 0 | 1.110 |
| TRACH2008472 | 6.768 | 0 | 11.037 | 0 | 0 | 0 | 4.103 |
| TRACH2008716 | 0 | 0 | 0 | 0 | 0 | 34.708 | 3.316 |
| TRACH2009107 | 0 | 0 | 0 | 0 | 0 | 85.932 | 0 |
| TRACH2009310 | 0 | 0 | 0 | 0 | 0 | 0 | 80.334 |
| TRACH2009340 | 0 | 0 | 0 | 0 | 0 | 67.720 | 12.940 |
| TRACH2009661 | 0 | 0 | 0 | 0 | 0 | 0 | 36.852 |
| TRACH2011113 | 0 | 0 | 0 | 0 | 0 | 0 | 3.086 |
| TRACH2012298 | 0 | 0 | 0 | 0 | 30.085 | 0 | 0 |
| TRACH2012376 | 0 | 0 | 0 | 0 | 0 | 18.363 | 0 |
| TRACH2012387 | 0 | 0 | 0 | 0 | 0 | 0 | 36.852 |
| TRACH2012811 | 0 | 0 | 0 | 0 | 0 | 0 | 5.096 |
| TRACH2014077 | 0 | 0 | 0 | 0 | 0 | 0 | 2.224 |
| TRACH2014124 | 2.226 | 0 | 0 | 0 | 0 | 7.062 | 0 |
| TRACH2015823 | 4.718 | 0 | 0 | 0 | 0 | 0 | 0 |
| TRACH2015824 | 0 | 0 | 16.348 | 0 | 0 | 0 | 0 |
| TRACH2018446 | 9.020 | 0 | 0 | 0 | 0 | 0 | 0 |
| TRACH2018449 | 0 | 0 | 0 | 0 | 0 | 0 | 9.911 |
| TRACH2019080 | 65.818 | 0 | 0 | 0 | 0 | 0 | 0 |
| TRACH2023299 | 0 | 0 | 0 | 0 | 0 | 0 | 4.172 |
| TRACH2025535 | 1.252 | 12.895 | 0 | 0 | 0 | 0 | 3.036 |
| TRACH3002192 | 0 | 0 | 4.387 | 0 | 0 | 0 | 2.446 |
| TRACH3003379 | 0 | 0 | 0 | 0 | 0 | 0 | 15.996 |
| TRACH3003547 | 0 | 0 | 0 | 0 | 0 | 0 | 2.764 |
| TRACH3003832 | 0 | 0 | 0 | 0 | 0 | 0 | 7.937 |
| TRACH3003872 | 5.920 | 0 | 0 | 0 | 0 | 0 | 3.588 |
| TRACH3004068 | 0 | 0 | 10.026 | 0 | 0 | 0 | 0 |
| TRACH3004721 | 0 | 0 | 0 | 0 | 0 | 0 | 5.701 |
| TRACH3005211 | 0 | 0 | 0 | 0 | 0 | 0 | 12.047 |
| TRACH3005479 | 0 | 0 | 0 | 0 | 0 | 0 | 36.852 |
| TRACH3005699 | 0 | 0 | 0 | 0 | 0 | 0 | 6.274 |
| TRACH3006717 | 0 | 0 | 0 | 0 | 0 | 0 | 4.797 |
| TRACH3007479 | 0 | 0 | 0 | 0 | 0 | 0 | 0.703 |
| TRACH3007625 | 0 | 0 | 0 | 0 | 0 | 0 | 2.305 |
| TRACH3008093 | 0 | 0 | 0 | 0 | 0 | 0 | 1.601 |
| TRACH3008508 | 41.320 | 0 | 0 | 0 | 0 | 0 | 0 |
| TRACH3008629 | 0 | 0 | 0 | 0 | 0 | 0 | 2.980 |
| TRACH3009008 | 0 | 0 | 0 | 0 | 0 | 0 | 3.202 |
| TRACH3009148 | 19.345 | 0 | 0 | 0 | 0 | 0 | 0 |
| TRACH3013043 | 0 | 0 | 0 | 0 | 0 | 0 | 53.856 |
| TRACH3016805 | 0 | 0 | 31.673 | 0 | 0 | 0 | 5.886 |
| TRACH3016992 | 0 | 0 | 0 | 0 | 0 | 0 | 46.677 |
| TRACH3019290 | 0 | 0 | 0 | 0 | 0 | 0 | 18.081 |
| TRACH3026303 | 0 | 0 | 0 | 0 | 0 | 0 | 3.664 |
| TRACH3036942 | 0 | 0 | 0 | 0 | 0 | 0 | 0.638 |
| TRACH3037067 | 0 | 35.703 | 0 | 0 | 0 | 0 | 0 |
| TSTOM2000139 | 0 | 0 | 0 | 0 | 0 | 0 | 2.734 |
| TSTOM2000315 | 0 | 0 | 0 | 0 | 0 | 0 | 11.918 |
| TSTOM2000553 | 0 | 0 | 11.859 | 0 | 0 | 0 | 0 |
| TUTER1000122 | 0 | 0 | 0 | 0 | 0 | 0 | 2.134 |
| TUTER2000904 | 0 | 0 | 0 | 0 | 0 | 0 | 3.650 |
| UMVEN1000143 | 1.771 | 0 | 0 | 0 | 0 | 0 | 0 |
| UMVEN2000133 | 1.264 | 0 | 0 | 0 | 0 | 0 | 0.383 |
| UMVEN2000152 | 0 | 0 | 0 | 0 | 0 | 0 | 0.515 |
| UMVEN2000453 | 0 | 0 | 0 | 0 | 0 | 0 | 0.341 |
| UTERU1000182 | 0 | 0 | 5.706 | 0 | 0 | 0 | 0.530 |
| UTERU1000384 | 0 | 0 | 0 | 0 | 0 | 0 | 4.659 |
| UTERU2000023 | 0 | 0 | 0 | 0 | 0 | 0 | 6.692 |
| UTERU2000095 | 3.571 | 0 | 0 | 0 | 0 | 0 | 2.164 |
| UTERU2000263 | 1.105 | 0 | 0 | 0 | 0 | 0 | 0 |
| UTERU2000332 | 0 | 0 | 0 | 0 | 0 | 0 | 3.091 |
| UTERU2000424 | 0 | 0 | 0 | 0 | 0 | 0 | 0.555 |
| UTERU2000542 | 0 | 0 | 0 | 0 | 0 | 0 | 5.902 |
| UTERU2001607 | 3.182 | 0 | 0 | 0 | 0 | 0 | 2.893 |
| UTERU2002198 | 0 | 0 | 0 | 0 | 0 | 0 | 35.404 |
| UTERU2002294 | 0 | 0 | 0 | 0 | 0 | 12.420 | 0 |
| UTERU2002410 | 0 | 0 | 8.261 | 0 | 0 | 0 | 0.384 |
| UTERU2002662 | 0 | 39.520 | 0 | 0 | 0 | 0 | 0 |
| UTERU2002841 | 0 | 0 | 0 | 0 | 0 | 0 | 35.404 |
| UTERU2002993 | 0 | 0 | 0 | 0 | 0 | 0 | 35.404 |
| UTERU2003321 | 0 | 0 | 0 | 0 | 0 | 0 | 52.294 |
| UTERU2004073 | 0 | 0 | 0 | 0 | 0 | 0 | 76.682 |
| UTERU2004197 | 8.674 | 0 | 0 | 0 | 0 | 13.757 | 2.629 |
| UTERU2004664 | 0 | 0 | 11.937 | 0 | 0 | 0 | 0 |
| UTERU2004688 | 0 | 0 | 0 | 70.393 | 0 | 0 | 0 |
| UTERU2004807 | 2.167 | 0 | 0 | 0 | 0 | 0 | 0.657 |
| UTERU2005069 | 0 | 0 | 0 | 0 | 0 | 0 | 35.404 |
| UTERU2005074 | 24.492 | 0 | 0 | 0 | 0 | 0 | 7.423 |
| UTERU2005292 | 0 | 0 | 0 | 0 | 0 | 21.304 | 0 |
| UTERU2005354 | 4.718 | 0 | 0 | 0 | 0 | 0 | 5.720 |
| UTERU2005593 | 0 | 0 | 0 | 0 | 0 | 0 | 2.935 |
| UTERU2005621 | 0 | 0 | 0 | 0 | 0 | 0 | 4.420 |
| UTERU2007444 | 0 | 0 | 0 | 0 | 0 | 0 | 35.404 |
| UTERU2008085 | 0 | 0 | 0 | 0 | 7.659 | 1.854 | 0.708 |
| UTERU2008302 | 0 | 0 | 0 | 0 | 0 | 0 | 0.873 |
| UTERU2008747 | 0 | 0 | 0 | 0 | 0 | 0 | 5.777 |
| UTERU2008938 | 5.308 | 0 | 0 | 0 | 0 | 0 | 0 |
| UTERU2008962 | 0 | 0 | 0 | 0 | 0 | 0 | 35.404 |
| UTERU2009335 | 0 | 0 | 0 | 0 | 0 | 20.751 | 1.983 |
| UTERU2009435 | 0 | 0 | 0 | 0 | 0 | 0 | 3.496 |
| UTERU2010417 | 0 | 0 | 2.218 | 6.653 | 0 | 0 | 0.206 |
| UTERU2012230 | 0 | 0 | 0 | 0 | 0 | 0 | 1.150 |
| UTERU2012286 | 5.464 | 0 | 0 | 0 | 0 | 0 | 1.656 |
| UTERU2013262 | 0 | 0 | 0 | 0 | 0 | 0 | 11.996 |
| UTERU2014024 | 0 | 0 | 0 | 0 | 0 | 0 | 16.943 |
| UTERU2014167 | 0 | 0 | 0 | 19.235 | 0 | 0 | 0 |
| UTERU2014601 | 0 | 0 | 48.719 | 0 | 0 | 0 | 0 |
| UTERU2014898 | 0 | 0 | 0 | 0 | 0 | 0 | 0.995 |
| UTERU2015653 | 1.258 | 0 | 0 | 0 | 0 | 0 | 0 |
| UTERU2016426 | 27.411 | 0 | 0 | 0 | 0 | 0 | 0 |
| UTERU2016822 | 8.670 | 0 | 0 | 0 | 0 | 0 | 0 |
| UTERU2017623 | 0 | 0 | 0 | 0 | 0 | 0 | 35.404 |
| UTERU2017632 | 0 | 0 | 0 | 0 | 0 | 0 | 35.404 |
| UTERU2019096 | 4.968 | 0 | 0 | 0 | 0 | 0 | 1.506 |
| UTERU2020226 | 0 | 0 | 0 | 0 | 0 | 0 | 21.509 |
| UTERU2023175 | 0 | 0 | 0 | 0 | 0 | 10.186 | 0 |
| UTERU2025301 | 0 | 0 | 0 | 91.731 | 0 | 0 | 0 |
| UTERU2030213 | 0 | 0 | 0 | 0 | 0 | 0 | 16.103 |
| UTERU3000844 | 0 | 0 | 0 | 0 | 0 | 0 | 35.404 |
| UTERU3003660 | 0 | 0 | 0 | 0 | 0 | 0 | 4.813 |
| UTERU3005159 | 0 | 0 | 0 | 0 | 0 | 0 | 22.803 |
| UTERU3005767 | 0 | 0 | 0 | 0 | 0 | 8.143 | 0 |
| UTERU3009871 | 0 | 0 | 0 | 0 | 0 | 0 | 23.683 |
| UTERU3010409 | 0 | 0 | 0 | 0 | 0 | 0 | 2.262 |
| UTERU3015011 | 0 | 0 | 0 | 0 | 0 | 48.286 | 0 |
| UTERU3017995 | 0 | 0 | 0 | 0 | 0 | 74.828 | 0 |

[0706] Genes whose expression levels were negligibly low in each of the above-described libraries are shown with their clone names below.

[0707] 3NB691000018, 3NB691000085, 3NB691000113, 3NB691000129, 3NB691000191, 3NB692000012, 3NB692000029, 3NB692000102, 3NB692000154, 3NB692000276, 3NB692000305, 3NB692000429, 3NB692000484, 3NB692000973, 3NB692001002, 3NB692001022, 3NB692001034, 3NB692001040, 3NB692001123, 3NB692001267, 3NB692001288, 3NB692001339, 3NB692001349, 3NB692001408, 3NB692001433, 3NB692001459, 3NB692001471, 3NB692001501, 3NB692001507, 3NB692001519, 3NB692001520, 3NB692001528, 3NB692001538, 3NB692001548, 3NB692001637, 3NB692001719, 3NB692001853, 3NB692001861, 3NB692002051, 3NB692002365, 3NB692002685, 3NB692002806, 3NB692003538, 3NB692004045, 3NB692004724, 3NB692005439, 3NB692006952, 3NB692008729, ACTVT2000380, ADIPS1000064, ADIPS2000069, ADIPS2000088, ADIPS2000245, ADIPS2000425, ADRGL1000002, ADRGL1000033, ADRGL1000038, ADRGL1000067, ADRGL1000111, ADRGL1000144, ADRGL1000147, ADRGL1000160, ADRGL1000165, ADRGL1000182, ADRGL2000056, ADRGL2000064, ADRGL2000074, ADRGL2000085, ADRGL2000142, ADRGL2000172, ADRGL2000248, ADRGL2000261, ADRGL2000323, ADRGL2000353, ADRGL2000384, ADRGL2000428, ADRGL2000636, ADRGL2000644, ADRGL2000968, ADRGL2001119, ADRGL2001229, ADRGL2001287, ADRGL2001301, ADRGL2001354, ADRGL2001554, ADRGL2001651, ADRGL2001756, ADRGL2001830, ADRGL2001836, ADRGL2001854, ADRGL2002013, ADRGL2002029, ADRGL2002191, ADRGL2002260, ADRGL2002392, ADRGL2002477, ADRGL2002679, ADRGL2002753, ADRGL2002857, ADRGL2003017, ADRGL2003329, ADRGL2003552, ADRGL2003585, ADRGL2003638, ADRGL2003684, ADRGL2003773, ADRGL2003785, ADRGL2004031, ADRGL2004077, ADRGL2004451, ADRGL2004459, ADRGL2004676, ADRGL2004708, ADRGL2004724, ADRGL2004749, ADRGL2004770, ADRGL2004777, ADRGL2004833, ADRGL2005336, ADRGL2005564, ADRGL2005756, ADRGL2005838, ADRGL2005926, ADRGL2005961, ADRGL2006034, ADRGL2006124, ADRGL2006177, ADRGL2006193, ADRGL2006377, ADRGL2006677, ADRGL2006732, ADRGL2006767, ADRGL2006817, ADRGL2006846, ADRGL2006886, ADRGL2007080, ADRGL2007125, ADRGL2007283, ADRGL2007313, ADRGL2007357, ADRGL2007636, ADRGL2007651, ADRGL2007810, ADRGL2007877, ADRGL2007906, ADRGL2007974, ADRGL2008023, ADRGL2008331, ADRGL2008337, ADRGL2008535, ADRGL2008966, ADRGL2009146, ADRGL2009324, ADRGL2009489, ADRGL2009533, ADRGL2009691, ADRGL2009755, ADRGL2010152, ADRGL2010315, ADRGL2010594, ADRGL2010860, ADRGL2010974, ADRGL2011190, ADRGL2011330, ADRGL2012038, ADRGL2012179, AHMSC1000138, ASTRO1000009, ASTRO1000018, ASTRO1000029, ASTRO1000096, ASTRO1000165, ASTRO2000011, ASTRO2000095, ASTRO2000191, ASTRO2000278, ASTRO2000372, ASTRO2000381, ASTRO2000403, ASTRO2000417, ASTRO2000480, ASTRO2000482, ASTRO2000533, ASTRO2000653, ASTRO2000662, ASTRO2000725, ASTRO2000801, ASTRO2000914, ASTRO2001001, ASTRO2001008, ASTRO2001088, ASTRO2001107, ASTRO2001122, ASTRO2001227, ASTRO2001249, ASTRO2001480, ASTRO2002035, ASTRO2002064, ASTRO2002202, ASTRO2002571, ASTRO2002632, ASTRO2002659, ASTRO2002693, ASTRO2002733, ASTRO2002743, ASTRO2003461, ASTRO2003574, ASTRO2003581, ASTRO2003740, ASTRO2003925, ASTRO2003960, ASTRO2004032, ASTRO2004051, ASTRO2004177, ASTRO2004217, ASTRO2004297, ASTRO2004584, ASTRO2004751, ASTRO2004877, ASTRO2004974, ASTRO2005008, ASTRO2005081, ASTRO2005096, ASTRO2005242, ASTRO2005273, ASTRO2005343, ASTRO2005413, ASTRO2005423, ASTRO2005553, ASTRO2005557, ASTRO2005575, ASTRO2005593, ASTRO2005726, ASTRO2005863, ASTRO2005896, ASTRO2005902, ASTRO2006356, ASTRO2006475, ASTRO2006732, ASTRO2006747, ASTRO2006920, ASTRO2006952, ASTRO2007221, ASTRO2007377, ASTRO2007515, ASTRO2007578, ASTRO2007643, ASTRO2007666, ASTRO2007956, ASTRO2007962, ASTRO2008040, ASTRO2008216, ASTRO2008239, ASTRO2008409, ASTRO2008425, ASTRO2008508, ASTRO2008777, ASTRO2008895, ASTRO2008960, ASTRO2008972, ASTRO2009068, ASTRO2009118, ASTRO2009177, ASTRO2009333, ASTRO2009458, ASTRO2009526, ASTRO2009879, ASTRO2010072, ASTRO2010582, ASTRO2010615, ASTRO2010799, ASTRO2010962, ASTRO2010996, ASTRO2011149, ASTRO2011422, ASTRO2011426, ASTRO2011437, ASTRO2011461, ASTRO2011834, ASTRO2011893, ASTRO2013124, ASTRO2013671, ASTRO2013802, ASTRO2014135, ASTRO2014174, ASTRO2014211, ASTRO2014363, ASTRO2014392, ASTRO2014498, ASTRO2014561, ASTRO2014863, ASTRO2014923, ASTRO2014961, ASTRO2015162, ASTRO2015185, ASTRO2015328, ASTRO2015987, ASTRO2016044, ASTRO2016148, ASTRO2016681, ASTRO2016847, ASTRO2016892, ASTRO2017348, ASTRO2017627, ASTRO2018373, ASTRO2019039, ASTRO2019171, ASTRO3000154, ASTRO3000172, ASTRO3000177, ASTRO3000301, ASTRO3000474, ASTRO3000482, BEAST2000454, BGGI11000285, BGGI12000022, BGGI12000067, BGGI12000161, BGGI12000533, BGGI12000544, BGGI12000684, BGGI12000693, BGGI12001002, BGGI12001097, BGGI12001241, BGGI12001247, BGGI12001682, BGGI12001714, BLADE1000176, BLADE2000181, BLADE2000256, BLADE2000340, BLADE2000389, BLADE2000463, BLADE2000492, BLADE2000579, BLADE2000640, BLADE2000866, BLADE2000938, BLADE2001031, BLADE2001133, BLADE2001138, BLADE2001141, BLADE2001371, BLADE2001458, BLADE2001575, BLADE2001753, BLADE2001935, BLADE2001940, BLADE2001987, BLADE2002073, BLADE2002310, BLADE2002738, BLADE2002744, BLADE2002782, BLADE2002947, BLADE2002972, BLADE2003474, BLADE2003916, BLADE2004089, BLADE2004345, BLADE2004389, BLADE2004462, BLADE2004628, BLADE2004670, BLADE2004722, BLADE2004849, BLADE2005036, BLADE2005038, BLADE2005229, BLADE2005459, BLADE2005792, BLADE2006043, BLADE2006412, BLADE2006415, BLADE2006607, BLADE2006826, BLADE2006849, BLADE2006947, BLADE2007033, BLADE2007043, BLADE2007589, BLADE2007666, BLADE2007722, BLADE2007735, BLADE2007744, BLADE2007799, BLADE2007923, BLADE2007935, BLADE2007958, BLADE2008281, BLADE2008398, BLADE2008454, BLADE2008461, BLADE2008479, BLADE2008539, BLADE2008809, BLADE2008995, BLADE2009452, BLADE2009479, BLADE2009593, BNGH41000098, BNGH41000104, BNGH41000118, BNGH41000137, BNGH41000153, BNGH41000169, BNGH41000177, BNGH41000216, BNGH42000130, BNGH42000132, BNGH42000405, BNGH42000532, BNGH42000675, BNGH42000791, BNGH42000815, BNGH42000994, BNGH42001724, BNGH42002168, BNGH42002244, BNGH42002487, BNGH42002489, BNGH42003529, BNGH42003570, BNGH42003641, BNGH42004076, BNGH42004291, BNGH42004538, BNGH42005017, BNGH42005235, BNGH42005504, BNGH42006226, BNGH42006234, BNGH42007366, BNGH42007594, BNGH42007788, BNGH42008199, BNGH42008510, BNGH42008603, BNGH42008649, BNGH42008832, BNGH42008850, BNGH42008943, BNGH42009021, BRACE1000020, BRACE1000042, BRACE1000047, BRACE1000051, BRACE1000065, BRACE1000070, BRACE1000084, BRACE1000087, BRACE1000092, BRACE1000093, BRACE1000101, BRACE1000114, BRACE1000124, BRACE1000132, BRACE1000166, BRACE1000169, BRACE1000186, BRACE1000187, BRACE1000239, BRACE1000258, BRACE1000451, BRACE1000475, BRACE1000572, BRACE2000061, BRACE2000078, BRACE2000100, BRACE2000109, BRACE2000141, BRACE2000148, BRACE2000232, BRACE2000245, BRACE2000256, BRACE2000266, BRACE2000267, BRACE2000280, BRACE2000300, BRACE2000307, BRACE2000331, BRACE2000332, BRACE2000351, BRACE2000368, BRACE2000392, BRACE2000441, BRACE2000487, BRACE2000489, BRACE2000505, BRACE2000525, BRACE2000526, BRACE2000531, BRACE2000545, BRACE2000553, BRACE2000565, BRACE2000640, BRACE2000650, BRACE2000677, BRACE2000698, BRACE2000718, BRACE2000733, BRACE2000743, BRACE2000750, BRACE2000753, BRACE2000815, BRACE2000864, BRACE2000905, BRACE2000936, BRACE2000947, BRACE2000965, BRACE2000969, BRACE2000988, BRACE2001017, BRACE2001065, BRACE2001070, BRACE2001094, BRACE2001151, BRACE2001188, BRACE2001191, BRACE2001197, BRACE2001236, BRACE2001239, BRACE2001269, BRACE2001312, BRACE2001313, BRACE2001330, BRACE2001340, BRACE2001352, BRACE2001353, BRACE2001374, BRACE2001375, BRACE2001423, BRACE2001424, BRACE2001445, BRACE2001453, BRACE2001455, BRACE2001492, BRACE2001496, BRACE2001508, BRACE2001534, BRACE2001543, BRACE2001588, BRACE2001607, BRACE2001626, BRACE2001673, BRACE2001677, BRACE2001705, BRACE2001709, BRACE2001726, BRACE2001733, BRACE2001737, BRACE2001742, BRACE2001777, BRACE2001779, BRACE2001834, BRACE2001855, BRACE2001859, BRACE2001865, BRACE2001872, BRACE2001881, BRACE2001898, BRACE2001923, BRACE2001942, BRACE2001944, BRACE2001954, BRACE2001971, BRACE2001972, BRACE2001973, BRACE2002026, BRACE2002034, BRACE2002081, BRACE2002139, BRACE2002142, BRACE2002151, BRACE2002157, BRACE2002176, BRACE2002206, BRACE2002227, BRACE2002260, BRACE2002297, BRACE2002304, BRACE2002394, BRACE2002409, BRACE2002431, BRACE2002444, BRACE2002458, BRACE2002467, BRACE2002468, BRACE2002478, BRACE2002495, BRACE2002582, BRACE2002585, BRACE2002589, BRACE2002590, BRACE2002606, BRACE2002613, BRACE2002614, BRACE2002617, BRACE2002623, BRACE2002635, BRACE2002676, BRACE2002682, BRACE2002685, BRACE2002695, BRACE2002707, BRACE2002736, BRACE2002752, BRACE2002755, BRACE2002762, BRACE2002772, BRACE2002792, BRACE2002796, BRACE2002803, BRACE2002812, BRACE2002834, BRACE2002849, BRACE2002857, BRACE2002860, BRACE2002884, BRACE2002896, BRACE2002948, BRACE2003037, BRACE2003078, BRACE2003097, BRACE2003110, BRACE2003168, BRACE2003199, BRACE2003210, BRACE2003217, BRACE2003254, BRACE2003269, BRACE2003285, BRACE2003304, BRACE2003319, BRACE2003398, BRACE2003420, BRACE2003428, BRACE2003431, BRACE2003512, BRACE2003516, BRACE2003539, BRACE2003540, BRACE2003594, BRACE2003598, BRACE2003609, BRACE2003614, BRACE2003639, BRACE2003700, BRACE2003713, BRACE2003766, BRACE2003785, BRACE2003788, BRACE2003800, BRACE2003802, BRACE2003825, BRACE2003845, BRACE2003847, BRACE2003848, BRACE2003873, BRACE2003885, BRACE2003887, BRACE2003905, BRACE2003928, BRACE2003944, BRACE2003954, BRACE2003982, BRACE2003987, BRACE2005034, BRACE2005047, BRACE2005063, BRACE2005083, BRACE2005099, BRACE2005118, BRACE2005124, BRACE2005138, BRACE2005160, BRACE2005169, BRACE2005189, BRACE2005193, BRACE2005196, BRACE2005198, BRACE2005216, BRACE2005243, BRACE2005251, BRACE2005253, BRACE2005290, BRACE2005298, BRACE2005328, BRACE2005329, BRACE2005337, BRACE2005348, BRACE2005363, BRACE2005395, BRACE2005408, BRACE2005448, BRACE2005450, BRACE2005453, BRACE2005457, BRACE2005460, BRACE2005489, BRACE2005518, BRACE2005556, BRACE2005562, BRACE2005624, BRACE2005642, BRACE2005661, BRACE2005667, BRACE2005681, BRACE2005719, BRACE2005731, BRACE2005742, BRACE2005762, BRACE2005773, BRACE2005787, BRACE2005795, BRACE2005800, BRACE2005858, BRACE2005869, BRACE2005875, BRACE2005881, BRACE2005898, BRACE2005904, BRACE2005906, BRACE2005907, BRACE2005911, BRACE2005937, BRACE2005949, BRACE2005981, BRACE2005991, BRACE2006055, BRACE2006075, BRACE2006084, BRACE2006089, BRACE2006102, BRACE2006122, BRACE2006137, BRACE2006143, BRACE2006162, BRACE2006167, BRACE2006174, BRACE2006240, BRACE2006245, BRACE2006249, BRACE2006258, BRACE2006264, BRACE2006274, BRACE2006281, BRACE2006298, BRACE2006344, BRACE2006354, BRACE2006363, BRACE2006378, BRACE2006380, BRACE2006393, BRACE2006413, BRACE2006417, BRACE2006453, BRACE2006459, BRACE2006488, BRACE2006534, BRACE2006537, BRACE2006540, BRACE2006564, BRACE2006587, BRACE2006598, BRACE2006636, BRACE2006685, BRACE2006703, BRACE2006743, BRACE2006753, BRACE2006783, BRACE2006821, BRACE2006833, BRACE2006871, BRACE2006909, BRACE2006911, BRACE2006924, BRACE2006935, BRACE2006937, BRACE2006944, BRACE2006951, BRACE2006982, BRACE2006986, BRACE2007013, BRACE2007068, BRACE2007087, BRACE2007138, BRACE2007174, BRACE2007197, BRACE2007201, BRACE2007203, BRACE2007232, BRACE2007254, BRACE2007262, BRACE2007274, BRACE2007281, BRACE2007295, BRACE2007358, BRACE2007396, BRACE2007398, BRACE2007411, BRACE2007447, BRACE2007477, BRACE2007502, BRACE2007503, BRACE2007522, BRACE2007527, BRACE2007538, BRACE2007563, BRACE2007577, BRACE2007621, BRACE2007640, BRACE2007641, BRACE2007646, BRACE2007663, BRACE2007671, BRACE2007682, BRACE2007685, BRACE2007727, BRACE2007749, BRACE2007760, BRACE2007761, BRACE2007764, BRACE2007767, BRACE2007768, BRACE2007769, BRACE2007784, BRACE2007786, BRACE2007798, BRACE2007799, BRACE2007832, BRACE2007836, BRACE2007868, BRACE2007882, BRACE2007888, BRACE2007902, BRACE2007920, BRACE2007937, BRACE2007944, BRACE2007952, BRACE2008008, BRACE2008015, BRACE2008021, BRACE2008097, BRACE2008102, BRACE2008114, BRACE2008144, BRACE2008172, BRACE2008216, BRACE2008218, BRACE2008251, BRACE2008276, BRACE2008295, BRACE2008308, BRACE2008336, BRACE2008361, BRACE2008380, BRACE2008401, BRACE2008410, BRACE2008420, BRACE2008443, BRACE2008473, BRACE2008480, BRACE2008488, BRACE2008495, BRACE2008500, BRACE2008553, BRACE2008594, BRACE2008604, BRACE2008615, BRACE2008622, BRACE2008629, BRACE2008655, BRACE2008656, BRACE2008708, BRACE2008710, BRACE2008754, BRACE2008797, BRACE2008847, BRACE2008857, BRACE2008861, BRACE2008867, BRACE2008881, BRACE2008883, BRACE2008917, BRACE2008919, BRACE2008941, BRACE2008948, BRACE2008960, BRACE2008999, BRACE2009014, BRACE2009016, BRACE2009031, BRACE2009053, BRACE2009122, BRACE2009131, BRACE2009185, BRACE2009188, BRACE2009212, BRACE2009221, BRACE2009235, BRACE2009238, BRACE2009255, BRACE2009270, BRACE2009272, BRACE2009274, BRACE2009275, BRACE2009293, BRACE2009311, BRACE2009318, BRACE2009323, BRACE2009366, BRACE2009421, BRACE2009428, BRACE2009434, BRACE2009437, BRACE2009483, BRACE2009533, BRACE2009566, BRACE2009591, BRACE2009620, BRACE2009654, BRACE2009721, BRACE2009732, BRACE2009754, BRACE2009828, BRACE2009886, BRACE2009907, BRACE2009957, BRACE2010170, BRACE2010171, BRACE2010203, BRACE2010208, BRACE2010336, BRACE2010348, BRACE2010440, BRACE2010444, BRACE2010477, BRACE2010489, BRACE2010535, BRACE2010550, BRACE2010598, BRACE2010632, BRACE2010642, BRACE2010651, BRACE2010684, BRACE2010753, BRACE2010813, BRACE2010828, BRACE2010837, BRACE2010888, BRACE2010937, BRACE2010983, BRACE2011007, BRACE2011025, BRACE2011183, BRACE2011199, BRACE2011265, BRACE2011389, BRACE2011478, BRACE2011545, BRACE2011592, BRACE2011611, BRACE2011646, BRACE2011677, BRACE2011703, BRACE2011747, BRACE2011838, BRACE2011892, BRACE2011904, BRACE2011947, BRACE2012061, BRACE2012062, BRACE2012185, BRACE2012222, BRACE2012232, BRACE2012291, BRACE2012317, BRACE2012510, BRACE2012625, BRACE2012653, BRACE2012833, BRACE2012838, BRACE2012936, BRACE2012947, BRACE2013009, BRACE2013010, BRACE2013126, BRACE2013132, BRACE2013149, BRACE2013369, BRACE2013806, BRACE2013855, BRACE2013911, BRACE2014108, BRACE2014161, BRACE2014232, BRACE2014257, BRACE2014268, BRACE2014306, BRACE2014475, BRACE2014657, BRACE2014746, BRACE2014780, BRACE2014818, BRACE2014821, BRACE2014824, BRACE2014850, BRACE2014854, BRACE2015031, BRACE2015058, BRACE2015132, BRACE2015262, BRACE2015270, BRACE2015314, BRACE2015352, BRACE2015368, BRACE2015412, BRACE2015436, BRACE2015741, BRACE2015756, BRACE2015969, BRACE2015995, BRACE2016058, BRACE2016194, BRACE2016315, BRACE2016325, BRACE2016335, BRACE2016366, BRACE2016465, BRACE2016516, BRACE2016583, BRACE2016708, BRACE2016821, BRACE2016896, BRACE2016981, BRACE2017108, BRACE2017124, BRACE2017298, BRACE2017359, BRACE2017410, BRACE2017438, BRACE2017580, BRACE2017587, BRACE2017720, BRACE2017844, BRACE2017872, BRACE2017929, BRACE2017934, BRACE2017985, BRACE2017992, BRACE2018337, BRACE2018443, BRACE2018448, BRACE2018568, BRACE2018700, BRACE2018727, BRACE2018759, BRACE2018762, BRACE2018782, BRACE2019004, BRACE2019044, BRACE2019147, BRACE2019244, BRACE2019258, BRACE2019327, BRACE2019348, BRACE2019371, BRACE2019467, BRACE2019510, BRACE2019519, BRACE2019528, BRACE2019618, BRACE2019696, BRACE2019703, BRACE2019843, BRACE2019865, BRACE2019872, BRACE2019877, BRACE2020028, BRACE2020077, BRACE2020097, BRACE2020157, BRACE2020278, BRACE2020358, BRACE2020467, BRACE2020584, BRACE2020652, BRACE2020709, BRACE2020742, BRACE2020756, BRACE2020863, BRACE2020982, BRACE2021148, BRACE2021245, BRACE2021254, BRACE2021264, BRACE2021344, BRACE2021433, BRACE2021478, BRACE2021541, BRACE2021670, BRACE2021695, BRACE2021708, BRACE2021721, BRACE2021932, BRACE2021936, BRACE2022030, BRACE2022158, BRACE2022196, BRACE2022270, BRACE2022328, BRACE2022394, BRACE2022435, BRACE2022448, BRACE2022450, BRACE2022549, BRACE2022633, BRACE2022693, BRACE2022848, BRACE2022928, BRACE2022990, BRACE2023069, BRACE2023070, BRACE2023223, BRACE2023268, BRACE2023284, BRACE2023404, BRACE2023451, BRACE2023540, BRACE2023633, BRACE2023744, BRACE2023800, BRACE2023801, BRACE2024074, BRACE2024222, BRACE2024610, BRACE2024781, BRACE2024826, BRACE2025018, BRACE2025316, BRACE2025333, BRACE2025452, BRACE2025492, BRACE2025710, BRACE2025796, BRACE2025992, BRACE2026054, BRACE2026141, BRACE2026142, BRACE2026293, BRACE2026294, BRACE2026404, BRACE2026675, BRACE2026725, BRACE2026836, BRACE2026920, BRACE2026971, BRACE2027018, BRACE2027221, BRACE2027258, BRACE2027312, BRACE2027382, BRACE2027389, BRACE2027408, BRACE2027643, BRACE2027767, BRACE2027770, BRACE2027879, BRACE2027896, BRACE2027970, BRACE2028171, BRACE2028392, BRACE2028410, BRACE2028636, BRACE2028741, BRACE2028956, BRACE2028970, BRACE2029112, BRACE2029356, BRACE2029396, BRACE2029581, BRACE2029644, BRACE2029849, BRACE2030039, BRACE2030096, BRACE2030323, BRACE2030326, BRACE2030345, BRACE2030736, BRACE2030883, BRACE2030884, BRACE2031154, BRACE2031232, BRACE2031527, BRACE2031531, BRACE2031553, BRACE2031899, BRACE2032044, BRACE2032090, BRACE2032134, BRACE2032148, BRACE2032182, BRACE2032329, BRACE2032385, BRACE2032436, BRACE2032502, BRACE2032538, BRACE2032584, BRACE2032823, BRACE2033128, BRACE2033394, BRACE2033478, BRACE2033720, BRACE2033786, BRACE2034434, BRACE2034523, BRACE2034616, BRACE2034622, BRACE2034870, BRACE2035003, BRACE2035120, BRACE2035124, BRACE2035191, BRACE2035278, BRACE2035381, BRACE2035441, BRACE2035485, BRACE2036005, BRACE2036096, BRACE2036743, BRACE2036830, BRACE2036834, BRACE2036900, BRACE2037132, BRACE2037294, BRACE2037295, BRACE2037299, BRACE2037310, BRACE2037431, BRACE2037692, BRACE2037847, BRACE2038114, BRACE2038271, BRACE2038329, BRACE2038492, BRACE2038551, BRACE2038618, BRACE2039009, BRACE2039128, BRACE2039170, BRACE2039249, BRACE2039286, BRACE2039297, BRACE2039327, BRACE2039362, BRACE2039475, BRACE2039600, BRACE2039607, BRACE2039734, BRACE2039823, BRACE2039832, BRACE2039893, BRACE2039986, BRACE2040138, BRACE2040325, BRACE2040514, BRACE2040640, BRACE2040987, BRACE2041009, BRACE2041095, BRACE2041200, BRACE2041264, BRACE2041890, BRACE2041898, BRACE2042394, BRACE2042398, BRACE2042550, BRACE2042620, BRACE2042628, BRACE2042873, BRACE2043036, BRACE2043105, BRACE2043248, BRACE2043349, BRACE2043774, BRACE2043942, BRACE2044057, BRACE2044263, BRACE2044286, BRACE2044304, BRACE2044473, BRACE2044510, BRACE2044640, BRACE2044816, BRACE2044946, BRACE2044949, BRACE2045300, BRACE2045428, BRACE2045445, BRACE2045596, BRACE2045772, BRACE2045947, BRACE2045954, BRACE2046251, BRACE2046295, BRACE2046976, BRACE2047011, BRACE2047232, BRACE2047350, BRACE2047377, BRACE2047385, BRACE2047492, BRACE2047558, BRACE2047573, BRACE2047835, BRACE2047893, BRACE2047975, BRACE3000071, BRACE3000404, BRACE3000520, BRACE3000697, BRACE3000840, BRACE3001002, BRACE3001058, BRACE3001066, BRACE3001113, BRACE3001217, BRACE3001299, BRACE3001384, BRACE3001391, BRACE3001403, BRACE3001595, BRACE3001754, BRACE3001948, BRACE3001973, BRACE3002184, BRACE3002298, BRACE3002344, BRACE3002390, BRACE3002420, BRACE3002508, BRACE3002541, BRACE3002756, BRACE3003004, BRACE3003026, BRACE3003053, BRACE3003192, BRACE3003413, BRACE3003595, BRACE3003698, BRACE3003866, BRACE3003920, BRACE3004046, BRACE3004058, BRACE3004113, BRACE3004358, BRACE3004371, BRACE3004435, BRACE3004477, BRACE3004767, BRACE3004772, BRACE3004783, BRACE3004862, BRACE3004880, BRACE3004887, BRACE3004981, BRACE3004996, BRACE3004998, BRACE3005103, BRACE3005127, BRACE3005145, BRACE3005217, BRACE3005225, BRACE3005430, BRACE3005760, BRACE3005870, BRACE3005903, BRACE3005989, BRACE3006113, BRACE3006185, BRACE3006226, BRACE3006462, BRACE3006463, BRACE3006872, BRACE3006917, BRACE3007084, BRACE3007085, BRACE3007258, BRACE3007322, BRACE3007472, BRACE3007480, BRACE3007559, BRACE3007625, BRACE3007642, BRACE3007649, BRACE3007767, BRACE3007869, BRACE3008036, BRACE3008066, BRACE3008092, BRACE3008095, BRACE3008137, BRACE3008255, BRACE3008337, BRACE3008384, BRACE3008720, BRACE3008772, BRACE3009044, BRACE3009075, BRACE3009090, BRACE3009127, BRACE3009197, BRACE3009265, BRACE3009297, BRACE3009377, BRACE3009392, BRACE3009539, BRACE3009574, BRACE3009701, BRACE3009708, BRACE3009724, BRACE3009993, BRACE3010076, BRACE3010079, BRACE3010086, BRACE3010221, BRACE3010283, BRACE3010315, BRACE3010397, BRACE3010416, BRACE3010435, BRACE3010702, BRACE3010862, BRACE3011271, BRACE3011421, BRACE3011447, BRACE3011505, BRACE3011634, BRACE3011774, BRACE3012357, BRACE3012574, BRACE3012806, BRACE3012930, BRACE3013119, BRACE3013418, BRACE3013576, BRACE3013740, BRACE3013780, BRACE3013874, BRACE3013936, BRACE3013986, BRACE3014005, BRACE3014068, BRACE3014231, BRACE3014290, BRACE3014317, BRACE3014523, BRACE3014714, BRACE3014807, BRACE3014942, BRACE3015090, BRACE3015121, BRACE3015262, BRACE3015521, BRACE3015808, BRACE3015829, BRACE3015894, BRACE3015898, BRACE3016020, BRACE3016122, BRACE3016167, BRACE3016170, BRACE3016580, BRACE3016788, BRACE3016810, BRACE3016862, BRACE3017083, BRACE3017253, BRACE3018083, BRACE3018308, BRACE3018963, BRACE3019055, BRACE3019071, BRACE3019084, BRACE3019570, BRACE3019611, BRACE3019817, BRACE3019828, BRACE3020151, BRACE3020194, BRACE3020286, BRACE3020356, BRACE3020594, BRACE3020669, BRACE3020671, BRACE3020890, BRACE3021148, BRACE3021517, BRACE3021805, BRACE3022051, BRACE3022303, BRACE3022312, BRACE3022340, BRACE3022847, BRACE3023604, BRACE3023912, BRACE3024073, BRACE3024359, BRACE3024379, BRACE3024444, BRACE3024497, BRACE3024537, BRACE3024659, BRACE3024662, BRACE3024879, BRACE3025153, BRACE3025302, BRACE3025457, BRACE3025531, BRACE3025627, BRACE3025630, BRACE3025719, BRACE3026008, BRACE3026075, BRACE3026161, BRACE3026290, BRACE3026345, BRACE3026456, BRACE3026735, BRACE3026802, BRACE3026844, BRACE3026947, BRACE3026993, BRACE3027242, BRACE3027256, BRACE3027326, BRACE3027478, BRACE3027480, BRACE3027931, BRACE3027976, BRACE3028214, BRACE3028241, BRACE3028360, BRACE3028998, BRACE3029005, BRACE3029021, BRACE3029205, BRACE3029447, BRACE3030057, BRACE3030103, BRACE3030538, BRACE3030748, BRACE3030866, BRACE3031161, BRACE3031184, BRACE3031185, BRACE3031315, BRACE3031372, BRACE3031579, BRACE3031728, BRACE3031838, BRACE3031843, BRACE3032427, BRACE3032455, BRACE3032537, BRACE3032538, BRACE3032631, BRACE3032771, BRACE3032980, BRACE3032983, BRACE3033525, BRACE3034159, BRACE3034183, BRACE3034389, BRACE3034964, BRACE3034993, BRACE3035168, BRACE3035227, BRACE3036156, BRACE3036271, BRACE3037612, BRACE3037637, BRACE3037803, BRACE3038012, BRACE3038030, BRACE3038569, BRACE3038570, BRACE3038687, BRACE3038760, BRACE3039288, BRACE3039358, BRACE3039378, BRACE3039454, BRACE3040012, BRACE3040239, BRACE3040504, BRACE3040644, BRACE3040856, BRACE3040863, BRACE3041059, BRACE3041162, BRACE3041827, BRACE3042046, BRACE3042210, BRACE3042326, BRACE3042409, BRACE3042432, BRACE3042594, BRACE3043597, BRACE3044090, BRACE3044172, BRACE3044247, BRACE3044377, BRACE3044389, BRACE3044495, BRACE3045011, BRACE3045033, BRACE3045078, BRACE3045145, BRACE3045424, BRACE3045708, BRACE3046049, BRACE3046152, BRACE3046294, BRACE3046450, BRACE3046466, BRACE3046491, BRACE3046609, BRACE3046762, BRACE3046837, BRACE3046855, BRACE3046966, BRACE3047018, BRACE3047482, BRACE3047801, BRALZ1000047, BRALZ1000103, BRALZ2000189, BRALZ2000263, BRALZ2000988, BRALZ2001038, BRALZ2001279, BRALZ2001350, BRALZ2001445, BRALZ2001559, BRALZ2001743, BRALZ2001834, BRALZ2002174, BRALZ2002418, BRALZ2002477, BRALZ2003119, BRALZ2003330, BRALZ2003453, BRALZ2003525, BRALZ2004397, BRALZ2005467, BRALZ2005471, BRALZ2005888, BRALZ2005950, BRALZ2005992, BRALZ2006288, BRALZ2006474, BRALZ2006560, BRALZ2006734, BRALZ2006800, BRALZ2006976, BRALZ2007376, BRALZ2007545, BRALZ2007576, BRALZ2007661, BRALZ2007790, BRALZ2007793, BRALZ2007952, BRALZ2008031, BRALZ2008166, BRALZ2008462, BRALZ2008617, BRALZ2008696, BRALZ2008763, BRALZ2008869, BRALZ2008930, BRALZ2009446, BRALZ2009482, BRALZ2009486, BRALZ2010186, BRALZ2010842, BRALZ2011337, BRALZ2011796, BRALZ2011880, BRALZ2012050, BRALZ2012183, BRALZ2012848, BRALZ2013621, BRALZ2013690, BRALZ2014054, BRALZ2014316, BRALZ2014484, BRALZ2014951, BRALZ2015168, BRALZ2015811, BRALZ2016085, BRALZ2016498, BRALZ2017359, BRALZ2017531, BRALZ2017607, BRALZ2017620, BRALZ2017844, BRALZ2018342, BRALZ2018492, BRALZ2019047, BRAMY1000095, BRAMY1000098, BRAMY1000130, BRAMY1000157, BRAMY1000173, BRAMY2000021, BRAMY2000025, BRAMY2000052, BRAMY2000076, BRAMY2000086, BRAMY2000151, BRAMY2000181, BRAMY2000196, BRAMY2000231, BRAMY2000277, BRAMY2000388, BRAMY2000411, BRAMY2000508, BRAMY2000562, BRAMY2000653, BRAMY2000814, BRAMY2000946, BRAMY2000981, BRAMY2000987, BRAMY2001068, BRAMY2001114, BRAMY2001203, BRAMY2001282, BRAMY2001367, BRAMY2001427, BRAMY2001473, BRAMY2001678, BRAMY2002005, BRAMY2002044, BRAMY2002072, BRAMY2002158, BRAMY2002311, BRAMY2002339, BRAMY2002364, BRAMY2002369, BRAMY2002479, BRAMY2002493, BRAMY2002525, BRAMY2002584, BRAMY2002604, BRAMY2002621, BRAMY2002638, BRAMY2002739, BRAMY2002799, BRAMY2002853, BRAMY2002862, BRAMY2002956, BRAMY2003037, BRAMY2003117, BRAMY2003287, BRAMY2003325, BRAMY2003529, BRAMY2003538, BRAMY2003585, BRAMY2003634, BRAMY2003653, BRAMY2003681, BRAMY2003893, BRAMY2003897, BRAMY2003898, BRAMY2003904, BRAMY2003926, BRAMY2003929, BRAMY2004031, BRAMY2004058, BRAMY2004183, BRAMY2004335, BRAMY2004351, BRAMY2004352, BRAMY2004387, BRAMY2004492, BRAMY2004521, BRAMY2004524, BRAMY2004537, BRAMY2004542, BRAMY2004756, BRAMY2004771, BRAMY2005064, BRAMY2005094, BRAMY2005151, BRAMY2005182, BRAMY2005244, BRAMY2005391, BRAMY2005576, BRAMY2005648, BRAMY2005662, BRAMY2005708, BRAMY2005711, BRAMY2006092, BRAMY2006118, BRAMY2006149, BRAMY2006366, BRAMY2006375, BRAMY2006411, BRAMY2006459, BRAMY2006466, BRAMY2006659, BRAMY2006779, BRAMY2006809, BRAMY2006879, BRAMY2007043, BRAMY2007110, BRAMY2007185, BRAMY2007244, BRAMY2007249, BRAMY2007255, BRAMY2007308, BRAMY2007411, BRAMY2007458, BRAMY2007486, BRAMY2007546, BRAMY2007567, BRAMY2007594, BRAMY2007610, BRAMY2007613, BRAMY2007653, BRAMY2007753, BRAMY2007859, BRAMY2008333, BRAMY2008382, BRAMY2008563, BRAMY2008583, BRAMY2008979, BRAMY2009023, BRAMY2009034, BRAMY2009105, BRAMY2009123, BRAMY2009192, BRAMY2009344, BRAMY2009349, BRAMY2009394, BRAMY2009489, BRAMY2009508, BRAMY2009528, BRAMY2009557, BRAMY2009612, BRAMY2009693, BRAMY2010068, BRAMY2010135, BRAMY2010145, BRAMY2010171, BRAMY2010208, BRAMY2010239, BRAMY2010272, BRAMY2010290, BRAMY2010357, BRAMY2010366, BRAMY2010395, BRAMY2010441, BRAMY2010442, BRAMY2010464, BRAMY2010581, BRAMY2010798, BRAMY2010808, BRAMY2010919, BRAMY2011064, BRAMY2011105, BRAMY2011178, BRAMY2011196, BRAMY2011216, BRAMY2011253, BRAMY2011446, BRAMY2011480, BRAMY2011639, BRAMY2011679, BRAMY2011811, BRAMY2011846, BRAMY2011849, BRAMY2011872, BRAMY2011961, BRAMY2012017, BRAMY2012091, BRAMY2012119, BRAMY2012162, BRAMY2012277, BRAMY2012340, BRAMY2012497, BRAMY2012517, BRAMY2012555, BRAMY2012568, BRAMY2012581, BRAMY2012691, BRAMY2012721, BRAMY2012731, BRAMY2012776, BRAMY2012880, BRAMY2012881, BRAMY2013169, BRAMY2013200, BRAMY2013216, BRAMY2013405, BRAMY2013414, BRAMY2013572, BRAMY2013590, BRAMY2013621, BRAMY2013659, BRAMY2013722, BRAMY2013736, BRAMY2013944, BRAMY2013975, BRAMY2014019, BRAMY2014205, BRAMY2014387, BRAMY2014462, BRAMY2014469, BRAMY2014541, BRAMY2014754, BRAMY2014813, BRAMY2015211, BRAMY2015251, BRAMY2015311, BRAMY2015420, BRAMY2015503, BRAMY2015516, BRAMY2015550, BRAMY2015551, BRAMY2015559, BRAMY2015688, BRAMY2015705, BRAMY2015782, BRAMY2015855, BRAMY2015890, BRAMY2015911, BRAMY2015925, BRAMY2016002, BRAMY2016009, BRAMY2016020, BRAMY2016070, BRAMY2016251, BRAMY2016327, BRAMY2016386, BRAMY2016706, BRAMY2016771, BRAMY2016892, BRAMY2016938, BRAMY2016953, BRAMY2017014, BRAMY2017249, BRAMY2017348, BRAMY2017450, BRAMY2017455, BRAMY2017528, BRAMY2018027, BRAMY2018106, BRAMY2018122, BRAMY2018126, BRAMY2018272, BRAMY2018273, BRAMY2018279, BRAMY2018295, BRAMY2018308, BRAMY2018396, BRAMY2018467, BRAMY2018785, BRAMY2019055, BRAMY2019111, BRAMY2019277, BRAMY2019300, BRAMY2019509, BRAMY2019600, BRAMY2019710, BRAMY2019963, BRAMY2019985, BRAMY2019989, BRAMY2020050, BRAMY2020058, BRAMY2020106, BRAMY2020270, BRAMY2020355, BRAMY2020412, BRAMY2020445, BRAMY2020466, BRAMY2020520, BRAMY2020574, BRAMY2020634, BRAMY2021040, BRAMY2021063, BRAMY2021098, BRAMY2021139, BRAMY2021276, BRAMY2021310, BRAMY2021388, BRAMY2021498, BRAMY2021523, BRAMY2021710, BRAMY2021732, BRAMY2021746, BRAMY2021825, BRAMY2021867, BRAMY2021962, BRAMY2021982, BRAMY2022052, BRAMY2022160, BRAMY2022168, BRAMY2022263, BRAMY2022301, BRAMY2022320, BRAMY2022383, BRAMY2022445, BRAMY2022454, BRAMY2022493, BRAMY2022525, BRAMY2022532, BRAMY2022723, BRAMY2022786, BRAMY2022796, BRAMY2022929, BRAMY2022980, BRAMY2022984, BRAMY2023060, BRAMY2023110, BRAMY2023115, BRAMY2023161, BRAMY2023172, BRAMY2023238, BRAMY2023327, BRAMY2023358, BRAMY2023406, BRAMY2023482, BRAMY2023514, BRAMY2023719, BRAMY2023729, BRAMY2023786, BRAMY2023852, BRAMY2023863, BRAMY2024004, BRAMY2024073, BRAMY2024312, BRAMY2024374, BRAMY2024390, BRAMY2024416, BRAMY2024449, BRAMY2024489, BRAMY2024497, BRAMY2024514, BRAMY2024530, BRAMY2024535, BRAMY2024545, BRAMY2024576, BRAMY2024593, BRAMY2024711, BRAMY2024728, BRAMY2024827, BRAMY2024849, BRAMY2025024, BRAMY2025032, BRAMY2025121, BRAMY2025175, BRAMY2025218, BRAMY2025230, BRAMY2025272, BRAMY2025277, BRAMY2025495, BRAMY2025812, BRAMY2025996, BRAMY2026009, BRAMY2026091, BRAMY2026168, BRAMY2026300, BRAMY2026347, BRAMY2026395, BRAMY2026405, BRAMY2026533, BRAMY2026538, BRAMY2026713, BRAMY2026778, BRAMY2026824, BRAMY2026899, BRAMY2026902, BRAMY2026904, BRAMY2026976, BRAMY2027073, BRAMY2027114, BRAMY2027140, BRAMY2027242, BRAMY2027396, BRAMY2027451, BRAMY2027461, BRAMY2027467, BRAMY2027587, BRAMY2027714, BRAMY2027717, BRAMY2027739, BRAMY2027752, BRAMY2027782, BRAMY2028072, BRAMY2028183, BRAMY2028188, BRAMY2028269, BRAMY2028282, BRAMY2028472, BRAMY2028491, BRAMY2028516, BRAMY2028565, BRAMY2028593, BRAMY2028682, BRAMY2028783, BRAMY2028856, BRAMY2028914, BRAMY2029204, BRAMY2029602, BRAMY2030109, BRAMY2030206, BRAMY2030477, BRAMY2030545, BRAMY2030607, BRAMY2030702, BRAMY2030703, BRAMY2030768, BRAMY2030799, BRAMY2030859, BRAMY2030915, BRAMY2031317, BRAMY2031377, BRAMY2031442, BRAMY2031516, BRAMY2032014, BRAMY2032231, BRAMY2032242, BRAMY2032290, BRAMY2032311, BRAMY2032344, BRAMY2032589, BRAMY2032678, BRAMY2032696, BRAMY2032777, BRAMY2032994, BRAMY2033003, BRAMY2033116, BRAMY2033240, BRAMY2033267, BRAMY2033316, BRAMY2033332, BRAMY2033506, BRAMY2033594, BRAMY2033895, BRAMY2033914, BRAMY2034072, BRAMY2034185, BRAMY2034305, BRAMY2034561, BRAMY2034920, BRAMY2034993, BRAMY2035070, BRAMY2035449, BRAMY2035545, BRAMY2035606, BRAMY2035718, BRAMY2035719, BRAMY2035801, BRAMY2035923, BRAMY2036076, BRAMY2036079, BRAMY2036254, BRAMY2036266, BRAMY2036387, BRAMY2036396, BRAMY2036567, BRAMY2036615, BRAMY2036699, BRAMY2036913, BRAMY2036918, BRAMY2036968, BRAMY2037147, BRAMY2037328, BRAMY2037609, BRAMY2037629, BRAMY2037800, BRAMY2037971, BRAMY2038100, BRAMY2038128, BRAMY2038317, BRAMY2038475, BRAMY2038484, BRAMY2038516, BRAMY2038832, BRAMY2038846, BRAMY2038887, BRAMY2039287, BRAMY2039300, BRAMY2039314, BRAMY2039341, BRAMY2039630, BRAMY2039695, BRAMY2039728, BRAMY2039872, BRAMY2040051, BRAMY2040159, BRAMY2040214, BRAMY2040478, BRAMY2040915, BRAMY2041261, BRAMY2041347, BRAMY2041378, BRAMY2041384, BRAMY2041434, BRAMY2041507, BRAMY2041542, BRAMY2041738, BRAMY2042122, BRAMY2042131, BRAMY2042178, BRAMY2042195, BRAMY2042244, BRAMY2042549, BRAMY2042596, BRAMY2042612, BRAMY2042641, BRAMY2042711, BRAMY2042760, BRAMY2042804, BRAMY2042899, BRAMY2042918, BRAMY2043069, BRAMY2043103, BRAMY2043314, BRAMY2043345, BRAMY2044246, BRAMY2044317, BRAMY2044349, BRAMY2044686, BRAMY2044838, BRAMY2045036, BRAMY2045299, BRAMY2045471, BRAMY2045530, BRAMY2046109, BRAMY2046478, BRAMY2046489, BRAMY2046537, BRAMY2046667, BRAMY2046742, BRAMY2046871, BRAMY2046984, BRAMY2046989, BRAMY2047169, BRAMY2047280, BRAMY2047676, BRAMY2047692, BRAMY2047746, BRAMY2047751, BRAMY2047765, BRAMY2047884, BRAMY2047948, BRAMY3000206, BRAMY3000210, BRAMY3000213, BRAMY3000224, BRAMY3000254, BRAMY3000307, BRAMY3000692, BRAMY3001356, BRAMY3001401, BRAMY3001409, BRAMY3001794, BRAMY3002120, BRAMY3002312, BRAMY3002329, BRAMY3002508, BRAMY3002620, BRAMY3002803, BRAMY3002805, BRAMY3002886, BRAMY3002991, BRAMY3003026, BRAMY3003109, BRAMY3003310, BRAMY3003566, BRAMY3003723, BRAMY3004126, BRAMY3004224, BRAMY3004672, BRAMY3004800, BRAMY3004900, BRAMY3004919, BRAMY3005091, BRAMY3005184, BRAMY3005656, BRAMY3005912, BRAMY3005932, BRAMY3006032, BRAMY3006297, BRAMY3006761, BRAMY3007078, BRAMY3007206, BRAMY3007311, BRAMY3007350, BRAMY3007449, BRAMY3007471, BRAMY3007609, BRAMY3007723, BRAMY3007968, BRAMY3008088, BRAMY3008096, BRAMY3008335, BRAMY3008466, BRAMY3008505, BRAMY3008650, BRAMY3008937, BRAMY3009158, BRAMY3009207, BRAMY3009556, BRAMY3009782, BRAMY3009811, BRAMY3009904, BRAMY3010008, BRAMY3010264, BRAMY3010321, BRAMY3010411, BRAMY3010492, BRAMY3010603, BRAMY3010654, BRAMY4000095, BRAMY4000229, BRAMY4000277, BRAMY4000915, BRAMY4000962, BRAMY4001173, BRAMY4001200, BRAMY4001234, BRAMY4001449, BRAMY4001652, BRAMY4001863, BRAMY4001913, BRAMY4002575, BRAMY4002628, BRASW1000053, BRASW1000125, BRAWH1000001, BRAWH1000002, BRAWH1000007, BRAWH1000045, BRAWH1000094, BRAWH1000116, BRAWH1000127, BRAWH1000130, BRAWH1000157, BRAWH1000162, BRAWH1000164, BRAWH1000168, BRAWH1000174, BRAWH1000180, BRAWH1000369, BRAWH2000034, BRAWH2000048, BRAWH2000071, BRAWH2000082, BRAWH2000093, BRAWH2000109, BRAWH2000131, BRAWH2000142, BRAWH2000169, BRAWH2000177, BRAWH2000218, BRAWH2000232, BRAWH2000248, BRAWH2000256, BRAWH2000274, BRAWH2000323, BRAWH2000353, BRAWH2000370, BRAWH2000409, BRAWH2000417, BRAWH2000443, BRAWH2000471, BRAWH2000476, BRAWH2000482, BRAWH2000488, BRAWH2000494, BRAWH2000500, BRAWH2000503, BRAWH2000522, BRAWH2000554, BRAWH2000588, BRAWH2000595, BRAWH2000633, BRAWH2000643, BRAWH2000651, BRAWH2000682, BRAWH2000752, BRAWH2000859, BRAWH2000866, BRAWH2000892, BRAWH2000901, BRAWH2000926, BRAWH2000984, BRAWH2001019, BRAWH2001037, BRAWH2001052, BRAWH2001103, BRAWH2001129, BRAWH2001137, BRAWH2001141, BRAWH2001159, BRAWH2001186, BRAWH2001203, BRAWH2001238, BRAWH2001239, BRAWH2001255, BRAWH2001355, BRAWH2001378, BRAWH2001395, BRAWH2001412, BRAWH2001418, BRAWH2001424, BRAWH2001436, BRAWH2001438, BRAWH2001459, BRAWH2001484, BRAWH2001492, BRAWH2001503, BRAWH2001519, BRAWH2001530, BRAWH2001535, BRAWH2001589, BRAWH2001662, BRAWH2001666, BRAWH2001671, BRAWH2001679, BRAWH2001686, BRAWH2001701, BRAWH2001842, BRAWH2001862, BRAWH2001873, BRAWH2002047, BRAWH2002060, BRAWH2002062, BRAWH2002125, BRAWH2002191, BRAWH2002318, BRAWH2002333, BRAWH2002352, BRAWH2002383, BRAWH2002549, BRAWH2002560, BRAWH2002623, BRAWH2002630, BRAWH2002635, BRAWH2002662, BRAWH2002679, BRAWH2002725, BRAWH2002761, BRAWH2002811, BRAWH2002861, BRAWH2002911, BRAWH2002963, BRAWH2002967, BRAWH2002976, BRAWH2003000, BRAWH2003135, BRAWH2003240, BRAWH2003307, BRAWH2003355, BRAWH2003366, BRAWH2003662, BRAWH2003689, BRAWH2003693, BRAWH2003832, BRAWH2003948, BRAWH2003964, BRAWH2004044, BRAWH2004068, BRAWH2004078, BRAWH2004217, BRAWH2004580, BRAWH2004731, BRAWH2004779, BRAWH2004842, BRAWH2004884, BRAWH2004923, BRAWH2005008, BRAWH2005074, BRAWH2005225, BRAWH2005315, BRAWH2005517, BRAWH2005524, BRAWH2005533, BRAWH2005578, BRAWH2005812, BRAWH2005974, BRAWH2005998, BRAWH2006083, BRAWH2006207, BRAWH2006301, BRAWH2006526, BRAWH2006543, BRAWH2006622, BRAWH2006760, BRAWH2006960, BRAWH2006989, BRAWH2007069, BRAWH2007308, BRAWH2007406, BRAWH2007550, BRAWH2007570, BRAWH2007591, BRAWH2007658, BRAWH2007664, BRAWH2007800, BRAWH2007808, BRAWH2007825, BRAWH2007862, BRAWH2007890, BRAWH2008058, BRAWH2008128, BRAWH2008255, BRAWH2008292, BRAWH2008297, BRAWH2008380, BRAWH2008540, BRAWH2008577, BRAWH2008790, BRAWH2008903, BRAWH2008956, BRAWH2008993, BRAWH2009112, BRAWH2009227, BRAWH2009261, BRAWH2009263, BRAWH2009298, BRAWH2009304, BRAWH2009360, BRAWH2009393, BRAWH2009485, BRAWH2009490, BRAWH2009558, BRAWH2009590, BRAWH2009626, BRAWH2009678, BRAWH2009695, BRAWH2009907, BRAWH2010000, BRAWH2010069, BRAWH2010084, BRAWH2010136, BRAWH2010318, BRAWH2010329, BRAWH2010354, BRAWH2010536, BRAWH2010552, BRAWH2010584, BRAWH2010618, BRAWH2010619, BRAWH2010754, BRAWH2011066, BRAWH2011079, BRAWH2011096, BRAWH2011155, BRAWH2011166, BRAWH2011204, BRAWH2011286, BRAWH2011294, BRAWH2011343, BRAWH2011400, BRAWH2011762, BRAWH2011795, BRAWH2011796, BRAWH2011812, BRAWH2011823, BRAWH2011860, BRAWH2011920, BRAWH2011958, BRAWH2012054, BRAWH2012161, BRAWH2012162, BRAWH2012164, BRAWH2012258, BRAWH2012277, BRAWH2012326, BRAWH2012538, BRAWH2012540, BRAWH2012619, BRAWH2012698, BRAWH2012749, BRAWH2012827, BRAWH2012866, BRAWH2012963, BRAWH2013047, BRAWH2013219, BRAWH2013294, BRAWH2013748, BRAWH2013866, BRAWH2013871, BRAWH2013914, BRAWH2013941, BRAWH2013955, BRAWH2014234, BRAWH2014379, BRAWH2014414, BRAWH2014473, BRAWH2014511, BRAWH2014662, BRAWH2014717, BRAWH2014729, BRAWH2014876, BRAWH2014934, BRAWH2014954, BRAWH2015349, BRAWH2015375, BRAWH2015385, BRAWH2015595, BRAWH2015728, BRAWH2015853, BRAWH2015866, BRAWH2016028, BRAWH2016106, BRAWH2016160, BRAWH2016166, BRAWH2016209, BRAWH2016221, BRAWH2016223, BRAWH2016439, BRAWH2016514, BRAWH2016562, BRAWH2016655, BRAWH2016679, BRAWH2016702, BRAWH2016724, BRAWH2016785, BRAWH2016792, BRAWH2016800, BRAWH2017002, BRAWH2017103, BRAWH2017250, BRAWH2017294, BRAWH2017304, BRAWH2017305, BRAWH2017379, BRAWH2017407, BRAWH2017433, BRAWH2017523, BRAWH2017534, BRAWH2017542, BRAWH2017635, BRAWH2017913, BRAWH2018206, BRAWH2018267, BRAWH2018282, BRAWH2018317, BRAWH2018506, BRAWH2018514, BRAWH2018527, BRAWH2018601, BRAWH2018745, BRAWH2018875, BRAWH2019053, BRAWH2019055, BRAWH2019198, BRAWH3000078, BRAWH3000088, BRAWH3000100, BRAWH3000166, BRAWH3000314, BRAWH3000329, BRAWH3000410, BRAWH3000446, BRAWH3000491, BRAWH3000604, BRAWH3000884, BRAWH3001053, BRAWH3001319, BRAWH3001326, BRAWH3001475, BRAWH3001636, BRAWH3001638, BRAWH3001712, BRAWH3001760, BRAWH3001783, BRAWH3001833, BRAWH3001879, BRAWH3001918, BRAWH3002433, BRAWH3002467, BRAWH3002513, BRAWH3002574, BRAWH3002600, BRAWH3002819, BRAWH3003019, BRAWH3003136, BRAWH3003244, BRAWH3003343, BRAWH3003522, BRAWH3003598, BRAWH3003727, BRAWH3003801, BRAWH3003975, BRAWH3004222, BRAWH3004335, BRAWH3004453, BRAWH3004530, BRAWH3004666, BRAWH3005037, BRAWH3005047, BRAWH3005132, BRAWH3005146, BRAWH3005292, BRAWH3005300, BRAWH3005422, BRAWH3005534, BRAWH3005886, BRAWH3005892, BRAWH3005896, BRAWH3005912, BRAWH3005981, BRAWH3006547, BRAWH3006548, BRAWH3006792, BRAWH3007129, BRAWH3007221, BRAWH3007441, BRAWH3007455, BRAWH3007506, BRAWH3007726, BRAWH3007783, BRAWH3008167, BRAWH3008341, BRAWH3008559, BRAWH3008697, BRAWH3008867, BRAWH3008931, BRAWH3009017, BRAWH3009285, BRAWH3009297, BRAWH3009546, BRAWH3009961, BRAWH3010461, BRAWH3010560, BRAWH3010602, BRAWH3010657, BRAWH3010726, BRAWH3010833, BRAWH3011101, BRAWH3011331, BRAWH3011402, BRAWH3011577, BRAWH3011623, BRAWH3011637, BRAWH3011685, BRAWH3011907, BRAWH3011929, BRAWH3012005, BRAWH3012662, BRAWH3012779, BRAWH3013009, BRAWH3013049, BRAWH3013197, BRAWH3013264, BRAWH3013508, BRAWH3014609, BRAWH3014639, BRAWH3015017, BRAWH3015175, BRAWH3015260, BRAWH3015610, BRAWH3015825, BRAWH3016123, BRAWH3016271, BRAWH3016715, BRAWH3017259, BRAWH3017260, BRAWH3017477, BRAWH3017537, BRAWH3017980, BRAWH3018369, BRAWH3018548, BRAWH3018969, BRAWH3019026, BRAWH3019529, BRAWH3019594, BRAWH3019629, BRAWH3019820, BRAWH3020200, BRAWH3020318, BRAWH3020486, BRAWH3020884, BRAWH3020928, BRAWH3021012, BRAWH3021580, BRAWH3021641, BRAWH3021643, BRAWH3021724, BRAWH3022347, BRAWH3022431, BRAWH3022459, BRAWH3022542, BRAWH3022719, BRAWH3022866, BRAWH3022900, BRAWH3023156, BRAWH3023168, BRAWH3023172, BRAWH3023274, BRAWH3023421, BRAWH3024231, BRAWH3024242, BRAWH3024469, BRAWH3024506, BRAWH3024613, BRAWH3026349, BRAWH3026394, BRAWH3026529, BRAWH3027420, BRAWH3027440, BRAWH3027574, BRAWH3027607, BRAWH3027616, BRAWH3027675, BRAWH3027806, BRAWH3027880, BRAWH3027927, BRAWH3028202, BRAWH3028223, BRAWH3028306, BRAWH3028461, BRAWH3028645, BRAWH3028754, BRAWH3028796, BRAWH3029254, BRAWH3029313, BRAWH3029538, BRAWH3029556, BRAWH3030613, BRAWH3030772, BRAWH3030810, BRAWH3030892, BRAWH3030910, BRAWH3030950, BRAWH3031054, BRAWH3031710, BRAWH3031902, BRAWH3032298, BRAWH3032340, BRAWH3032571, BRAWH3032620, BRAWH3032930, BRAWH3033117, BRAWH3033293, BRAWH3033448, BRAWH3033513, BRAWH3034097, BRAWH3034114, BRAWH3034134, BRAWH3034668, BRAWH3034743, BRAWH3034775, BRAWH3034890, BRAWH3035154, BRAWH3035403, BRAWH3035904, BRAWH3035914, BRAWH3035936, BRAWH3036077, BRAWH3036247, BRAWH3036270, BRAWH3036561, BRAWH3036738, BRAWH3036951, BRAWH3037265, BRAWH3037394, BRAWH3037533, BRAWH3037979, BRAWH3038055, BRAWH3038230, BRAWH3038252, BRAWH3038324, BRCAN1000065, BRCAN1000076, BRCAN1000105, BRCAN1000149, BRCAN2000148, BRCAN2000149, BRCAN2000209, BRCAN2000239, BRCAN2000346, BRCAN2000364, BRCAN2000383, BRCAN2000418, BRCAN2000523, BRCAN2000541, BRCAN2000563, BRCAN2000577, BRCAN2000620, BRCAN2000639, BRCAN2000763, BRCAN2000832, BRCAN2000923, BRCAN2001223, BRCAN2001866, BRCAN2002173, BRCAN2002416, BRCAN2002473, BRCAN2002562, BRCAN2002662, BRCAN2002826, BRCAN2002854, BRCAN2002856, BRCAN2002892, BRCAN2002944, BRCAN2002948, BRCAN2003070, BRCAN2003269, BRCAN2003389, BRCAN2003628, BRCAN2003703, BRCAN2003746, BRCAN2003814, BRCAN2003987, BRCAN2004173, BRCAN2004355, BRCAN2004371, BRCAN2004699, BRCAN2005436, BRCAN2005449, BRCAN2006019, BRCAN2006051, BRCAN2006063, BRCAN2006117, BRCAN2006174, BRCAN2006290, BRCAN2006297, BRCAN2006323, BRCAN2006401, BRCAN2006411, BRCAN2006450, BRCAN2006955, BRCAN2007119, BRCAN2007144, BRCAN2007426, BRCAN2007525, BRCAN2007700, BRCAN2008494, BRCAN2008528, BRCAN2008701, BRCAN2008894, BRCAN2009156, BRCAN2009168, BRCAN2009203, BRCAN2009432, BRCAN2010374, BRCAN2010376, BRCAN2010547, BRCAN2010581, BRCAN2010665, BRCAN2011254, BRCAN2011316, BRCAN2011602, BRCAN2012110, BRCAN2012355, BRCAN2012402, BRCAN2012408, BRCAN2012481, BRCAN2012613, BRCAN2012713, BRCAN2012929, BRCAN2013655, BRCAN2013660, BRCAN2014143, BRCAN2014229, BRCAN2014370, BRCAN2014602, BRCAN2014652, BRCAN2014788, BRCAN2014881, BRCAN2014952, BRCAN2015371, BRCAN2015402, BRCAN2015464, BRCAN2015719, BRCAN2015757, BRCAN2015886, BRCAN2016025, BRCAN2016046, BRCAN2016174, BRCAN2016433, BRCAN2016619, BRCAN2016762, BRCAN2016814, BRCAN2017442, BRCAN2017905, BRCAN2018240, BRCAN2018269, BRCAN2018490, BRCAN2018566, BRCAN2018667, BRCAN2018748, BRCAN2018935, BRCAN2019002, BRCAN2019387, BRCAN2019653, BRCAN2019773, BRCAN2019907, BRCAN2020331, BRCAN2020412, BRCAN2020467, BRCAN2020710, BRCAN2020880, BRCAN2021024, BRCAN2021028, BRCAN2021325, BRCAN2021452, BRCAN2021669, BRCAN2021718, BRCAN2022126, BRCAN2022191, BRCAN2022472, BRCAN2022474, BRCAN2023347, BRCAN2023724, BRCAN2024451, BRCAN2024563, BRCAN2024572, BRCAN2025009, BRCAN2025349, BRCAN2025368, BRCAN2025712, BRCAN2025982, BRCAN2026117, BRCAN2026340, BRCAN2026711, BRCAN2027150, BRCAN2027310, BRCAN2027334, BRCAN2027355, BRCAN2027513, BRCAN2027593, BRCAN2027970, BRCAN2028021, BRCAN2028036, BRCAN2028319, BRCAN2028338, BRCAN2028355, BRCAN2028378, BRCAN2028460, BRCAN2028545, BRCAN2028634, BRCAN2028702, BRCOC1000087, BRCOC1000094, BRCOC2000004, BRCOC2000047, BRCOC2000152, BRCOC2000184, BRCOC2000186, BRCOC2000333, BRCOC2000360, BRCOC2000404, BRCOC2000487, BRCOC2000637, BRCOC2000670, BRCOC2000816, BRCOC2000850, BRCOC2001355, BRCOC2002085, BRCOC2002155, BRCOC2002323, BRCOC2002659, BRCOC2002664, BRCOC2002686, BRCOC2002751, BRCOC2002756, BRCOC2002777, BRCOC2002835, BRCOC2003100, BRCOC2003213, BRCOC2003513, BRCOC2003732, BRCOC2003740, BRCOC2004036, BRCOC2004175, BRCOC2004354, BRCOC2004455, BRCOC2004950, BRCOC2005542, BRCOC2005951, BRCOC2006164, BRCOC2006243, BRCOC2006270, BRCOC2006639, BRCOC2006942, BRCOC2007034, BRCOC2007593, BRCOC2007733, BRCOC2007769, BRCOC2008064, BRCOC2008225, BRCOC2008642, BRCOC2008993, BRCOC2009052, BRCOC2009196, BRCOC2009380, BRCOC2009638, BRCOC2010115, BRCOC2010510, BRCOC2010730, BRCOC2010980, BRCOC2010994, BRCOC2011010, BRCOC2011398, BRCOC2011418, BRCOC2011506, BRCOC2011769, BRCOC2011996, BRCOC2012229, BRCOC2012386, BRCOC2012551, BRCOC2012813, BRCOC2013448, BRCOC2013573, BRCOC2013675, BRCOC2013780, BRCOC2014013, BRCOC2014033, BRCOC2014400, BRCOC2014748, BRCOC2014833, BRCOC2015597, BRCOC2015824, BRCOC2015908, BRCOC2015944, BRCOC2016525, BRCOC2016661, BRCOC2017061, BRCOC2017652, BRCOC2017856, BRCOC2018775, BRCOC2018877, BRCOC2019255, BRCOC2019549, BRCOC2019841, BRCOC2019896, BRCOC2019903, BRCOC2019910, BRCOC2019934, BRCOC2020122, BRCOC2020142, BRHIP1000058, BRHIP1000072, BRHIP1000108, BRHIP1000129, BRHIP1000258, BRHIP2000021, BRHIP2000079, BRHIP2000087, BRHIP2000210, BRHIP2000239, BRHIP2000245, BRHIP2000312, BRHIP2000359, BRHIP2000445, BRHIP2000506, BRHIP2000532, BRHIP2000621, BRHIP2000691, BRHIP2000819, BRHIP2000826, BRHIP2000920, BRHIP2001099, BRHIP2001686, BRHIP2001782, BRHIP2001802, BRHIP2001805, BRHIP2001886, BRHIP2001927, BRHIP2002122, BRHIP2002143, BRHIP2002172, BRHIP2002339, BRHIP2002346, BRHIP2002510, BRHIP2002664, BRHIP2002722, BRHIP2002929, BRHIP2003048, BRHIP2003062, BRHIP2003242, BRHIP2003272, BRHIP2003748, BRHIP2003786, BRHIP2003828, BRHIP2004312, BRHIP2004355, BRHIP2004359, BRHIP2004814, BRHIP2004883, BRHIP2004902, BRHIP2005010, BRHIP2005236, BRHIP2005271, BRHIP2005354, BRHIP2005600, BRHIP2005719, BRHIP2005724, BRHIP2005752, BRHIP2005932, BRHIP2006617, BRHIP2006782, BRHIP2006800, BRHIP2006819, BRHIP2006921, BRHIP2007307, BRHIP2007616, BRHIP2007690, BRHIP2007741, BRHIP2007928, BRHIP2007969, BRHIP2008269, BRHIP2008389, BRHIP2008607, BRHIP2008756, BRHIP2008909, BRHIP2009019, BRHIP2009177, BRHIP2009340, BRHIP2009351, BRHIP2009414, BRHIP2009474, BRHIP2009617, BRHIP2009685, BRHIP2010217, BRHIP2010309, BRHIP2010444, BRHIP2010487, BRHIP2010571, BRHIP2010593, BRHIP2010610, BRHIP2010723, BRHIP2010744, BRHIP2011080, BRHIP2011120, BRHIP2011199, BRHIP2011508, BRHIP2011576, BRHIP2011616, BRHIP2011783, BRHIP2011838, BRHIP2011933, BRHIP2012054, BRHIP2012059, BRHIP2012141, BRHIP2012314, BRHIP2012360, BRHIP2012545, BRHIP2012580, BRHIP2012627, BRHIP2012642, BRHIP2012750, BRHIP2012922, BRHIP2012923, BRHIP2012972, BRHIP2013286, BRHIP2013447, BRHIP2013510, BRHIP2013699, BRHIP2013723, BRHIP2013972, BRHIP2014063, BRHIP2014285, BRHIP2014291, BRHIP2014373, BRHIP2014386, BRHIP2014387, BRHIP2014954, BRHIP2015224, BRHIP2015245, BRHIP2015356, BRHIP2015360, BRHIP2016005, BRHIP2016125, BRHIP2016788, BRHIP2016968, BRHIP2016990, BRHIP2017315, BRHIP2017385, BRHIP2017404, BRHIP2017542, BRHIP2017553, BRHIP2017642, BRHIP2017714, BRHIP2017780, BRHIP2017945, BRHIP2018014, BRHIP2018369, BRHIP2018612, BRHIP2018650, BRHIP2018719, BRHIP2018805, BRHIP2018998, BRHIP2019007, BRHIP2019047, BRHIP2019177, BRHIP2019186, BRHIP2019291, BRHIP2019494, BRHIP2019589, BRHIP2019641, BRHIP2019819, BRHIP2019884, BRHIP2019972, BRHIP2020182, BRHIP2020509, BRHIP2020573, BRHIP2020622, BRHIP2020695, BRHIP2020743, BRHIP2020799, BRHIP2020842, BRHIP2020859, BRHIP2020930, BRHIP2021102, BRHIP2021289, BRHIP2021495, BRHIP2021615, BRHIP2021744, BRHIP2021929, BRHIP2022006, BRHIP2022054, BRHIP2022221, BRHIP2022228, BRHIP2022298, BRHIP2022467, BRHIP2022708, BRHIP2022986, BRHIP2023071, BRHIP2023229, BRHIP2023272, BRHIP2023292, BRHIP2023309, BRHIP2023369, BRHIP2023438, BRHIP2023695, BRHIP2023735, BRHIP2023773, BRHIP2023860, BRHIP2024046, BRHIP2024165, BRHIP2024201, BRHIP2024347, BRHIP2024398, BRHIP2024549, BRHIP2024789, BRHIP2024941, BRHIP2025245, BRHIP2025366, BRHIP2025448, BRHIP2025679, BRHIP2025739, BRHIP2025797, BRHIP2026021, BRHIP2026061, BRHIP2026155, BRHIP2026214, BRHIP2026288, BRHIP2026346, BRHIP2026557, BRHIP2026723, BRHIP2026877, BRHIP2027017, BRHIP2027054, BRHIP2027563, BRHIP2027685, BRHIP2027762, BRHIP2028187, BRHIP2028303, BRHIP2028330, BRHIP2028480, BRHIP2028583, BRHIP2028593, BRHIP2029176, BRHIP2029283, BRHIP2029393, BRHIP2029529, BRHIP2029643, BRHIP2029663, BRHIP3000017, BRHIP3000060, BRHIP3000070, BRHIP3000081, BRHIP3000131, BRHIP3000240, BRHIP3000377, BRHIP3000457, BRHIP3000475, BRHIP3000488, BRHIP3000526, BRHIP3000626, BRHIP3000859, BRHIP3000907, BRHIP3001076, BRHIP3001079, BRHIP3001141, BRHIP3001283, BRHIP3001338, BRHIP3001360, BRHIP3001878, BRHIP3001964, BRHIP3002114, BRHIP3002124, BRHIP3002141, BRHIP3002363, BRHIP3002691, BRHIP3002920, BRHIP3002931, BRHIP3003063, BRHIP3003126, BRHIP3003340, BRHIP3003395, BRHIP3003484, BRHIP3003644, BRHIP3003688, BRHIP3003795, BRHIP3003984, BRHIP3004193, BRHIP3004215, BRHIP3004416, BRHIP3004710, BRHIP3004725, BRHIP3004774, BRHIP3004786, BRHIP3004863, BRHIP3004968, BRHIP3005137, BRHIP3005231, BRHIP3005307, BRHIP3005574, BRHIP3005673, BRHIP3005768, BRHIP3005801, BRHIP3005944, BRHIP3006279, BRHIP3006390, BRHIP3006449, BRHIP3006683, BRHIP3006717, BRHIP3006786, BRHIP3006950, BRHIP3007172, BRHIP3007239, BRHIP3007291, BRHIP3007409, BRHIP3007424, BRHIP3007483, BRHIP3007586, BRHIP3007609, BRHIP3007640, BRHIP3007960, BRHIP3008082, BRHIP3008183, BRHIP3008314, BRHIP3008320, BRHIP3008344, BRHIP3008405, BRHIP3008565, BRHIP3008598, BRHIP3008606, BRHIP3008691, BRHIP3008714, BRHIP3008997, BRHIP3009099, BRHIP3009140, BRHIP3009181, BRHIP3009318, BRHIP3009427, BRHIP3009448, BRHIP3009672, BRHIP3009753, BRHIP3010135, BRHIP3010289, BRHIP3010529, BRHIP3011082, BRHIP3011241, BRHIP3011269, BRHIP3011460, BRHIP3011567, BRHIP3011831, BRHIP3012185, BRHIP3012289, BRHIP3012357, BRHIP3012736, BRHIP3012745, BRHIP3012868, BRHIP3013078, BRHIP3013271, BRHIP3013698, BRHIP3013765, BRHIP3013897, BRHIP3014237, BRHIP3014675, BRHIP3015620, BRHIP3015751, BRHIP3015854, BRHIP3016032, BRHIP3016213, BRHIP3016302, BRHIP3016421, BRHIP3017109, BRHIP3017146, BRHIP3017256, BRHIP3017325, BRHIP3017558, BRHIP3017637, BRHIP3018278, BRHIP3018784, BRHIP3019643, BRHIP3019824, BRHIP3019880, BRHIP3019956, BRHIP3020155, BRHIP3020182, BRHIP3020733, BRHIP3021019, BRHIP3021499, BRHIP3021534, BRHIP3021778, BRHIP3021987, BRHIP3022656, BRHIP3023922, BRHIP3024118, BRHIP3024533, BRHIP3024703, BRHIP3024725, BRHIP3024820, BRHIP3025161, BRHIP3025702, BRHIP3025795, BRHIP3025844, BRHIP3026052, BRHIP3026097, BRHIP3026231, BRHIP3026335, BRHIP3026651, BRHIP3027105, BRHIP3027137, BRHIP3027160, BRHIP3027191, BRHIP3027501, BRHIP3027594, BRHIP3027651, BRHIP3027854, BRHIP3027947, BRHIP3028570, BRHIP3028742, BRSSN1000056, BRSSN1000059, BRSSN1000092, BRSSN1000153, BRSSN2000097, BRSSN2000175, BRSSN2000197, BRSSN2000244, BRSSN2000293, BRSSN2000295, BRSSN2000312, BRSSN2000518, BRSSN2000561, BRSSN2000715, BRSSN2000832, BRSSN2001213, BRSSN2001275, BRSSN2001342, BRSSN2001426, BRSSN2001503, BRSSN2001579, BRSSN2001758, BRSSN2001810, BRSSN2002857, BRSSN2002859, BRSSN2003012, BRSSN2003086, BRSSN2003093, BRSSN2003820, BRSSN2003841, BRSSN2003937, BRSSN2004142, BRSSN2004303, BRSSN2004304, BRSSN2004496, BRSSN2004679, BRSSN2004686, BRSSN2004710, BRSSN2004719, BRSSN2005847, BRSSN2006133, BRSSN2006390, BRSSN2006575, BRSSN2006611, BRSSN2006644, BRSSN2006892, BRSSN2007076, BRSSN2007168, BRSSN2007202, BRSSN2007338, BRSSN2007464, BRSSN2007504, BRSSN2007819, BRSSN2008125, BRSSN2008419, BRSSN2008464, BRSSN2008549, BRSSN2008797, BRSSN2009119, BRSSN2009378, BRSSN2009389, BRSSN2009395, BRSSN2009627, BRSSN2009630, BRSSN2009702, BRSSN2010019, BRSSN2010110, BRSSN2010587, BRSSN2010596, BRSSN2010830, BRSSN2011262, BRSSN2011653, BRSSN2011738, BRSSN2011843, BRSSN2012081, BRSSN2012103, BRSSN2012157, BRSSN2012198, BRSSN2012254, BRSSN2012439, BRSSN2012622, BRSSN2012691, BRSSN2012838, BRSSN2013095, BRSSN2013544, BRSSN2013733, BRSSN2013753, BRSSN2013874, BRSSN2014112, BRSSN2014294, BRSSN2014424, BRSSN2014513, BRSSN2014556, BRSSN2014573, BRSSN2014636, BRSSN2014685, BRSSN2015199, BRSSN2015369, BRSSN2015493, BRSSN2015554, BRSSN2015707, BRSSN2015773, BRSSN2015907, BRSSN2016589, BRSSN2016768, BRSSN2016905, BRSSN2017297, BRSSN2017422, BRSSN2017530, BRSSN2017682, BRSSN2017757, BRSSN2018218, BRSSN2018440, BRSSN2018447, BRSSN2018581, BRSSN2018731, BRSSN2018771, BRSSN2018925, BRSTN1000097, BRSTN2000058, BRSTN2000070, BRSTN2000220, BRSTN2000312, BRSTN2000536, BRSTN2000872, BRSTN2001067, BRSTN2001613, BRSTN2001801, BRSTN2002105, BRSTN2002400, BRSTN2002532, BRSTN2002691, BRSTN2003590, BRSTN2003835, BRSTN2004863, BRSTN2004869, BRSTN2004987, BRSTN2005721, BRSTN2006306, BRSTN2006466, BRSTN2006580, BRSTN2006583, BRSTN2006638, BRSTN2006865, BRSTN2007000, BRSTN2007118, BRSTN2007284, BRSTN2007765, BRSTN2008052, BRSTN2008283, BRSTN2008367, BRSTN2008418, BRSTN2008457, BRSTN2008475, BRSTN2008930, BRSTN2009247, BRSTN2010089, BRSTN2010107, BRSTN2010363, BRSTN2010416, BRSTN2010500, BRSTN2010569, BRSTN2010750, BRSTN2010923, BRSTN2011211, BRSTN2011597, BRSTN2011688, BRSTN2011799, BRSTN2012089, BRSTN2012284, BRSTN2012320, BRSTN2012380, BRSTN2012451, BRSTN2013171, BRSTN2013354, BRSTN2013931, BRSTN2014490, BRSTN2014633, BRSTN2014751, BRSTN2014770, BRSTN2015015, BRSTN2015978, BRSTN2016066, BRSTN2016335, BRSTN2016892, BRSTN2016918, BRSTN2016992, BRSTN2017151, BRSTN2017237, BRSTN2017379, BRSTN2017761, BRSTN2017771, BRSTN2017995, BRSTN2018077, BRSTN2018083, BRSTN2018596, BRSTN2018692, BRSTN2018712, BRSTN2019079, BRSTN2019129, BRTHA1000021, BRTHA1000063, BRTHA1000311, BRTHA2000057, BRTHA2000474, BRTHA2000514, BRTHA2000574, BRTHA2000855, BRTHA2000969, BRTHA2000972, BRTHA2001304, BRTHA2001370, BRTHA2001462, BRTHA2001717, BRTHA2001812, BRTHA2002091, BRTHA2002115, BRTHA2002133, BRTHA2002281, BRTHA2002376, BRTHA2002442, BRTHA2002493, BRTHA2002565, BRTHA2002608, BRTHA2002702, BRTHA2002721, BRTHA2002726, BRTHA2002741, BRTHA2002808, BRTHA2002896, BRTHA2002903, BRTHA2003030, BRTHA2003110, BRTHA2003116, BRTHA2003436, BRTHA2003759, BRTHA2003794, BRTHA2004361, BRTHA2004371, BRTHA2004582, BRTHA2004629, BRTHA2004639, BRTHA2004642, BRTHA2004812, BRTHA2004821, BRTHA2004978, BRTHA2004992, BRTHA2005005, BRTHA2005013, BRTHA2005448, BRTHA2005579, BRTHA2005831, BRTHA2005864, BRTHA2005942, BRTHA2005956, BRTHA2006075, BRTHA2006146, BRTHA2006194, BRTHA2006232, BRTHA2006720, BRTHA2006735, BRTHA2006974, BRTHA2007060, BRTHA2007122, BRTHA2007422, BRTHA2007603, BRTHA2007665, BRTHA2007998, BRTHA2008316, BRTHA2008502, BRTHA2008513, BRTHA2008527, BRTHA2008535, BRTHA2008598, BRTHA2008669, BRTHA2008955, BRTHA2009311, BRTHA2009349, BRTHA2009486, BRTHA2009803, BRTHA2009846, BRTHA2009886, BRTHA2009972, BRTHA2010008, BRTHA2010033, BRTHA2010073, BRTHA2010097, BRTHA2010191, BRTHA2010397, BRTHA2010608, BRTHA2010672, BRTHA2010884, BRTHA2010907, BRTHA2011062, BRTHA2011194, BRTHA2011321, BRTHA2011351, BRTHA2011500, BRTHA2011641, BRTHA2011691, BRTHA2012129, BRTHA2012183, BRTHA2012189, BRTHA2012351, BRTHA2012392, BRTHA2012466, BRTHA2012555, BRTHA2012562, BRTHA2012980, BRTHA2013262, BRTHA2013275, BRTHA2013426, BRTHA2013460, BRTHA2013515, BRTHA2013540, BRTHA2013595, BRTHA2013610, BRTHA2013707, BRTHA2013942, BRTHA2014287, BRTHA2014334, BRTHA2014381, BRTHA2014578, BRTHA2014647, BRTHA2014663, BRTHA2014792, BRTHA2014828, BRTHA2014909, BRTHA2014975, BRTHA2014997, BRTHA2015406, BRTHA2015478, BRTHA2015696, BRTHA2015700, BRTHA2015853, BRTHA2015878, BRTHA2016179, BRTHA2016215, BRTHA2016267, BRTHA2016318, BRTHA2016496, BRTHA2016543, BRTHA2016552, BRTHA2016918, BRTHA2017178, BRTHA2017353, BRTHA2017364, BRTHA2017972, BRTHA2017985, BRTHA2018011, BRTHA2018129, BRTHA2018165, BRTHA2018304, BRTHA2018344, BRTHA2018420, BRTHA2018504, BRTHA2018558, BRTHA2018591, BRTHA2018624, BRTHA2018706, BRTHA2018707, BRTHA2019014, BRTHA2019022, BRTHA2019048, BRTHA2019073, BRTHA2019726, BRTHA2019743, BRTHA2020400, BRTHA2020566, BRTHA2020642, BRTHA2020695, BRTHA2020721, BRTHA2020781, BRTHA2020811, BRTHA2020910, BRTHA2021212, BRTHA2021440, BRTHA2021450, BRTHA2022074, BRTHA2022914, BRTHA2022968, BRTHA2023402, BRTHA2023437, BRTHA2024177, BRTHA2024354, BRTHA2024712, BRTHA2025869, BRTHA2026071, BRTHA2026290, BRTHA2026311, BRTHA2027227, BRTHA2027229, BRTHA2027250, BRTHA2027546, BRTHA2028297, BRTHA2029969, BRTHA2030036, BRTHA2030213, BRTHA2031517, BRTHA2031800, BRTHA2031917, BRTHA2032763, BRTHA2032845, BRTHA2033122, BRTHA2033155, BRTHA2033264, BRTHA2033320, BRTHA2033469, BRTHA2033683, BRTHA2034281, BRTHA2034576, BRTHA2034874, BRTHA2035448, BRTHA2036055, BRTHA2036295, BRTHA2036660, BRTHA2037247, BRTHA2038279, BRTHA2038345, BRTHA2038353, BRTHA2038396, BRTHA3000252, BRTHA3000273, BRTHA3000296, BRTHA3000297, BRTHA3000325, BRTHA3000633, BRTHA3000789, BRTHA3001221, BRTHA3001623, BRTHA3002265, BRTHA3002401, BRTHA3002411, BRTHA3002427, BRTHA3002864, BRTHA3002933, BRTHA3002955, BRTHA3003000, BRTHA3003023, BRTHA3003225, BRTHA3003339, BRTHA3003343, BRTHA3003417, BRTHA3003449, BRTHA3003474, BRTHA3003704, BRTHA3004432, BRTHA3004475, BRTHA3004502, BRTHA3004610, BRTHA3005046, BRTHA3005735, BRTHA3005988, BRTHA3006318, BRTHA3006593, BRTHA3006856, BRTHA3007113, BRTHA3007130, BRTHA3007148, BRTHA3007319, BRTHA3007469, BRTHA3007532, BRTHA3007662, BRTHA3007685, BRTHA3007769, BRTHA3007922, BRTHA3008143, BRTHA3008293, BRTHA3008310, BRTHA3008386, BRTHA3008520, BRTHA3008608, BRTHA3008694, BRTHA3008826, BRTHA3009037, BRTHA3009291, BRTHA3009858, BRTHA3010135, BRTHA3010366, BRTHA3010469, BRTHA3010530, BRTHA3010540, BRTHA3010717, BRTHA3011149, BRTHA3011187, BRTHA3011229, BRTHA3011265, BRTHA3011510, BRTHA3011892, BRTHA3012265, BRTHA3013860, BRTHA3013882, BRTHA3013884, BRTHA3013981, BRTHA3014000, BRTHA3014105, BRTHA3014507, BRTHA3014547, BRTHA3014691, BRTHA3014835, BRTHA3014854, BRTHA3014908, BRTHA3014920, BRTHA3015815, BRTHA3016616, BRTHA3016835, BRTHA3016845, BRTHA3016917, BRTHA3017047, BRTHA3017589, BRTHA3017848, BRTHA3018409, BRTHA3018514, BRTHA3018617, BRTHA3018623, BRTHA3018656, BRTHA3019048, BRTHA3019105, BRTHA3019183, BRTHA3020000, BRTHA3020369, BRTHA3021569, BRTHA3021708, BRTHA3021786, BRTHA3021971, BRTHA3022641, BRTHA3023403, BRTHA3023523, BRTHA3023590, BRTHA3023929, BRTHA3024233, BRTHA3024600, BRTHA3025073, BRTHA3025789, BRTHA3025826, BRTHA3026161, BRTHA3026180, BRTHA3026556, BRTHA3026916, BRTHA3027171, BRTHA3027318, BRTHA3027638, BRTHA3027820, BRTHA3027879, BRTHA3027957, BRTHA3028339, BRTHA3028505, BRTHA3028782, CD34C2000051, CD34C2000152, CD34C2000175, CD34C2000443, CD34C3000125, CD34C3000314, CD34C3000494, CERVX1000042, CERVX2000812, CERVX2000968, CERVX2002006, CERVX2002013, CERVX2002430, CERVX2002770, CHONS1000058, CHONS2000172, CHONS2000797, CHONS2001287, CHONS2001382, CHONS2001797, CHONS2001834, CHONS2002419, COLON1000030, COLON1000084, COLON1000135, COLON2000470, COLON2000557, COLON2000568, COLON2001829, COLON2001866, COLON2002443, COLON2002520, COLON2003043, COLON2003529, COLON2004318, COLON2004351, COLON2004478, COLON2004911, COLON2005126, COLON2005623, COLON2005735, COLON2005772, COLON2006263, COLON2006282, COLON2006417, COLON2007274, COLON2007733, COLON2008105, COLON2009337, COLON2009499, CORDB1000140, CORDB2000061, CORDB2000127, CORDB2000541, CTONG1000009, CTONG1000010, CTONG1000020, CTONG1000022, CTONG1000040, CTONG1000056, CTONG1000062, CTONG1000086, CTONG1000088, CTONG1000094, CTONG1000097, CTONG1000113, CTONG1000137, CTONG1000165, CTONG1000175, CTONG1000180, CTONG1000181, CTONG1000220, CTONG1000277, CTONG1000283, CTONG1000288, CTONG1000302, CTONG1000341, CTONG1000467, CTONG1000476, CTONG1000488, CTONG1000508, CTONG1000540, CTONG2000031, CTONG2000034, CTONG2000042, CTONG2000218, CTONG2000279, CTONG2000303, CTONG2000330, CTONG2000395, CTONG2000411, CTONG2000465, CTONG2000480, CTONG2000561, CTONG2000589, CTONG2000766, CTONG2000771, CTONG2000819, CTONG2000827, CTONG2000846, CTONG2000855, CTONG2000977, CTONG2001139, CTONG2001226, CTONG2001320, CTONG2001413, CTONG2001428, CTONG2001513, CTONG2001524, CTONG2001533, CTONG2001598, CTONG2001681, CTONG2001724, CTONG2001749, CTONG2001820, CTONG2001877, CTONG2001911, CTONG2001932, CTONG2001955, CTONG2002066, CTONG2002395, CTONG2002417, CTONG2002418, CTONG2002453, CTONG2002520, CTONG2002558, CTONG2002590, CTONG2002709, CTONG2002721, CTONG2002816, CTONG2002820, CTONG2002903, CTONG2002965, CTONG2002999, CTONG2003028, CTONG2003094, CTONG2003100, CTONG2003115, CTONG2003245, CTONG2003348, CTONG2003350, CTONG2003372, CTONG2003375, CTONG2003427, CTONG2003599, CTONG2003680, CTONG2003699, CTONG2003764, CTONG2003782, CTONG2003889, CTONG2003937, CTONG2004000, CTONG2004062, CTONG2004115, CTONG2004126, CTONG2004264, CTONG2004305, CTONG2004397, CTONG2004423, CTONG2004454, CTONG2004550, CTONG2004669, CTONG2004716, CTONG2004912, CTONG2004941, CTONG2004948, CTONG2005028, CTONG2005049, CTONG2005110, CTONG2005145, CTONG2005265, CTONG2005290, CTONG2005374, CTONG2005399, CTONG2005468, CTONG2005567, CTONG2005585, CTONG2005635, CTONG2005775, CTONG2005795, CTONG2005890, CTONG2005904, CTONG2006129, CTONG2006223, CTONG2006273, CTONG2006310, CTONG2006393, CTONG2006449, CTONG2006515, CTONG2006524, CTONG2006568, CTONG2006611, CTONG2006620, CTONG2006666, CTONG2006691, CTONG2006709, CTONG2006836, CTONG2006942, CTONG2006964, CTONG2007009, CTONG2007091, CTONG2007168, CTONG2007175, CTONG2007259, CTONG2007272, CTONG2007293, CTONG2007297, CTONG2007400, CTONG2007417, CTONG2007441, CTONG2007623, CTONG2007681, CTONG2007779, CTONG2007898, CTONG2007959, CTONG2007970, CTONG2008014, CTONG2008184, CTONG2008262, CTONG2008269, CTONG2008321, CTONG2008343, CTONG2008402, CTONG2008521, CTONG2008562, CTONG2008577, CTONG2008595, CTONG2008621, CTONG2008689, CTONG2008720, CTONG2008721, CTONG2008773, CTONG2008792, CTONG2008989, CTONG2009033, CTONG2009108, CTONG2009132, CTONG2009156, CTONG2009181, CTONG2009257, CTONG2009258, CTONG2009268, CTONG2009270, CTONG2009395, CTONG2009423, CTONG2009440, CTONG2009527, CTONG2009531, CTONG2009534, CTONG2009570, CTONG2009572, CTONG2009604, CTONG2009643, CTONG2009675, CTONG2009689, CTONG2009725, CTONG2009766, CTONG2009768, CTONG2009844, CTONG2009871, CTONG2009887, CTONG2009891, CTONG2009923, CTONG2009938, CTONG2009955, CTONG2009958, CTONG2010018, CTONG2010024, CTONG2010116, CTONG2010133, CTONG2010148, CTONG2010276, CTONG2010330, CTONG2010348, CTONG2010408, CTONG2010508, CTONG2010566, CTONG2010623, CTONG2010649, CTONG2010803, CTONG2011188, CTONG2011429, CTONG2011474, CTONG2011676, CTONG2011716, CTONG2011765, CTONG2011779, CTONG2011815, CTONG2011822, CTONG2011825, CTONG2011920, CTONG2011985, CTONG2012029, CTONG2012077, CTONG2012123, CTONG2012158, CTONG2012230, CTONG2012401, CTONG2012422, CTONG2012425, CTONG2012447, CTONG2012453, CTONG2012473, CTONG2012476, CTONG2012533, CTONG2012554, CTONG2012564, CTONG2012661, CTONG2012724, CTONG2012738, CTONG2012758, CTONG2012843, CTONG2012879, CTONG2012901, CTONG2012996, CTONG2013128, CTONG2013149, CTONG2013156, CTONG2013284, CTONG2013339, CTONG2013352, CTONG2013381, CTONG2013393, CTONG2013511, CTONG2013630, CTONG2013803, CTONG2013907, CTONG2013985, CTONG2013986, CTONG2014032, CTONG2014058, CTONG2014119, CTONG2014165, CTONG2014191, CTONG2014206, CTONG2014234, CTONG2014264, CTONG2014280, CTONG2014389, CTONG2014491, CTONG2014630, CTONG2014635, CTONG2014646, CTONG2014705, CTONG2014946, CTONG2014954, CTONG2014959, CTONG2014966, CTONG2014995, CTONG2015204, CTONG2015316, CTONG2015345, CTONG2015434, CTONG2015518, CTONG2015540, CTONG2015596, CTONG2015633, CTONG2015678, CTONG2015717, CTONG2015804, CTONG2015815, CTONG2015866, CTONG2015914, CTONG2015953, CTONG2016056, CTONG2016217, CTONG2016355, CTONG2016499, CTONG2016505, CTONG2016559, CTONG2016658, CTONG2016775, CTONG2016797, CTONG2016824, CTONG2016846, CTONG2016904, CTONG2016953, CTONG2017021, CTONG2017292, CTONG2017409, CTONG2017444, CTONG2017458, CTONG2017604, CTONG2017650, CTONG2017804, CTONG2017814, CTONG2017910, CTONG2017939, CTONG2017989, CTONG2018062, CTONG2018069, CTONG2018147, CTONG2018211, CTONG2018217, CTONG2018279, CTONG2018334, CTONG2018343, CTONG2018379, CTONG2018413, CTONG2018483, CTONG2018629, CTONG2018653, CTONG2018655, CTONG2018735, CTONG2018900, CTONG2018976, CTONG2019029, CTONG2019063, CTONG2019144, CTONG2019232, CTONG2019248, CTONG2019590, CTONG2019652, CTONG2019704, CTONG2019822, CTONG2019833, CTONG2020031, CTONG2020108, CTONG2020127, CTONG2020171, CTONG2020374, CTONG2020378, CTONG2020411, CTONG2020445, CTONG2020806, CTONG2020831, CTONG2021024, CTONG2021132, CTONG2021168, CTONG2022153, CTONG2022601, CTONG2022835, CTONG2023021, CTONG2023512, CTONG2024031, CTONG2024206, CTONG2024614, CTONG2024749, CTONG2025496, CTONG2025513, CTONG2025516, CTONG2025610, CTONG2025900, CTONG2026513, CTONG2026770, CTONG2026920, CTONG2026987, CTONG2027150, CTONG2027327, CTONG2027361, CTONG2027591, CTONG2027736, CTONG2027783, CTONG2027828, CTONG2027959, CTONG2028097, CTONG2028208, CTONG2028486, CTONG2028518, CTONG2028687, CTONG3000657, CTONG3000686, CTONG3000707, CTONG3000896, CTONG3001420, CTONG3001501, CTONG3001560, CTONG3001605, CTONG3001746, CTONG3002020, CTONG3002127, CTONG3002370, CTONG3002412, CTONG3002433, CTONG3002552, CTONG3002588, CTONG3002674, CTONG3002728, CTONG3002909, CTONG3002947, CTONG3002983, CTONG3003165, CTONG3003179, CTONG3003483, CTONG3003553, CTONG3003598, CTONG3003652, CTONG3003654, CTONG3003669, CTONG3003737, CTONG3003905, CTONG3003972, CTONG3004072, CTONG3004317, CTONG3004397, CTONG3004550, CTONG3004576, CTONG3004607, CTONG3004712, CTONG3004726, CTONG3005325, CTONG3005648, CTONG3005713, CTONG3005803, CTONG3005813, CTONG3006073, CTONG3006186, CTONG3006629, CTONG3006650, CTONG3006659, CTONG3007244, CTONG3007444, CTONG3007528, CTONG3007586, CTONG3007870, CTONG3008223, CTONG3008252, CTONG3008258, CTONG3008457, CTONG3008496, CTONG3008566, CTONG3008639, CTONG3008831, CTONG3008951, CTONG3008959, CTONG3009227, CTONG3009287, CTONG3009328, CTONG3009385, D30ST1000066, D30ST1000109, D30ST1000238, D30ST1000267, D30ST1000270, D30ST2000184, D30ST2000618, D30ST2000654, D30ST2000734, D30ST2001328, D30ST2001669, D30ST2001788, D30ST2002182, D30ST2002223, D30ST2002262, D30ST2002272, D30ST2002417, D30ST2002436, D30ST2002648, D30ST2003331, D30ST2003607, D30ST2003797, D30ST2004637, D30ST3000195, D30ST3000258, D30ST3000291, D30ST3000388, D30ST3000493, D60ST2000127, D60ST2000169, D60ST2000245, D60ST2000358, D60ST2000464, D60ST2000507, D90ST2000278, D90ST2000440, D90ST2000869, D90ST2001319, D90ST2001433, D90ST2002397, D90ST2002608, D90ST2002673, D90ST2003106, D90ST2003108, D90ST2003137, D90ST2003397, D90ST2003580, D90ST2003594, D90ST2003791, D90ST2003989, D90ST2004018, D90ST2004073, D90ST2004417, DFNES1000003, DFNES1000083, DFNES1000107, DFNES1000185, DFNES2000143, DFNES2000146, DFNES2000212, DFNES2000292, DFNES2000426, DFNES2000432, DFNES2000457, DFNES2000471, DFNES2000913, DFNES2001091, DFNES2001096, DFNES2001108, DFNES2001177, DFNES2001404, DFNES2001564, DFNES2001565, DFNES2001647, DFNES2001800, DFNES2001829, DFNES2002220, DFNES2002509, DFNES2002550, DFNES2002588, DFNES2002817, DFNES2003081, DFNES2003255, DFNES2003742, DFNES2004354, DFNES2004383, DFNES2004608, DFNES2004684, DFNES2005266, DFNES2005527, DFNES2005540, DFNES2005690, DFNES2005766, DFNES2005779, DFNES2005875, DFNES2006346, DFNES2006944, DFNES2007299, DFNES2007332, DFNES2007641, DFNES2007757, DFNES2008160, DFNES2008280, DFNES2008881, DFNES2009482, DFNES2010502, DFNES2011192, DFNES2011221, DFNES2011239, DFNES2011245, ERLTF1000021, ERLTF2000324, ERLTF2000465, FCBBF1000023, FCBBF1000025, FCBBF1000038, FCBBF1000053, FCBBF1000069, FCBBF1000115, FCBBF1000117, FCBBF1000118, FCBBF1000121, FCBBF1000125, FCBBF1000131, FCBBF1000155, FCBBF1000157, FCBBF1000171, FCBBF1000174, FCBBF1000182, FCBBF1000198, FCBBF1000206, FCBBF1000220, FCBBF1000232, FCBBF1000233, FCBBF1000243, FCBBF1000270, FCBBF1000272, FCBBF1000280, FCBBF1000297, FCBBF1000305, FCBBF1000314, FCBBF1000322, FCBBF1000349, FCBBF1000367, FCBBF1000376, FCBBF1000377, FCBBF1000395, FCBBF1000397, FCBBF1000403, FCBBF1000412, FCBBF1000437, FCBBF1000449, FCBBF1000466, FCBBF1000476, FCBBF1000506, FCBBF1000509, FCBBF1000546, FCBBF1000550, FCBBF1000556, FCBBF1000581, FCBBF1000582, FCBBF1000598, FCBBF1000604, FCBBF1000618, FCBBF1000627, FCBBF1000671, FCBBF1000675, FCBBF1000684, FCBBF1000686, FCBBF1000687, FCBBF1000691, FCBBF1000732, FCBBF1000748, FCBBF2000038, FCBBF2000094, FCBBF2000105, FCBBF2000123, FCBBF2000214, FCBBF2000232, FCBBF2000259, FCBBF2000276, FCBBF2000291, FCBBF2000362, FCBBF2000379, FCBBF2000473, FCBBF2000502, FCBBF2000566, FCBBF2000677, FCBBF2000678, FCBBF2000685, FCBBF2000733, FCBBF2000782, FCBBF2000808, FCBBF2000815, FCBBF2000825, FCBBF2000940, FCBBF2000951, FCBBF2001001, FCBBF2001088, FCBBF2001105, FCBBF2001116, FCBBF2001183, FCBBF2001188, FCBBF2001211, FCBBF2001238, FCBBF2001243, FCBBF2001291, FCBBF2001299, FCBBF2001309, FCBBF2001400, FCBBF2001427, FCBBF2001480, FCBBF2001529, FCBBF2001538, FCBBF2001594, FCBBF2001672, FCBBF2001675, FCBBF2001718, FCBBF2001720, FCBBF2001817, FCBBF2001868, FCBBF2002044, FCBBF2002281, FCBBF2002370, FCBBF2002541, FCBBF2002626, FCBBF2002897, FCBBF2002898, FCBBF2002904, FCBBF2002928, FCBBF2002953, FCBBF2003083, FCBBF2003269, FCBBF2003293, FCBBF2003297, FCBBF2003395, FCBBF2003528, FCBBF2003543, FCBBF2003549, FCBBF2003567, FCBBF2003636, FCBBF2003823, FCBBF2003895, FCBBF2004066, FCBBF2004090, FCBBF2004138, FCBBF2004217, FCBBF2004256, FCBBF2004373, FCBBF2004448, FCBBF2004671, FCBBF2004707, FCBBF2004788, FCBBF2005069, FCBBF2005122, FCBBF2005428, FCBBF2005439, FCBBF2005538, FCBBF2005637, FCBBF2005645, FCBBF2005733, FCBBF2005909, FCBBF2005966, FCBBF2006131, FCBBF2006380, FCBBF2006418, FCBBF2006452, FCBBF2006634, FCBBF2006781, FCBBF2007012, FCBBF2007186, FCBBF2007265, FCBBF2007302, FCBBF2007556, FCBBF2007610, FCBBF2007633, FCBBF2007840, FCBBF3000102, FCBBF3000115, FCBBF3000120, FCBBF3000168, FCBBF3000175, FCBBF3000227, FCBBF3000229, FCBBF3000233, FCBBF3000269, FCBBF3000361, FCBBF3000367, FCBBF3000462, FCBBF3000473, FCBBF3000501, FCBBF3000518, FCBBF3000550, FCBBF3000847, FCBBF3001018, FCBBF3001020, FCBBF3001235, FCBBF3001302, FCBBF3001594, FCBBF3001657, FCBBF3001855, FCBBF3001890, FCBBF3001912, FCBBF3001914, FCBBF3001918, FCBBF3001924, FCBBF3002163, FCBBF3002188, FCBBF3002190, FCBBF3002268, FCBBF3002475, FCBBF3002556, FCBBF3002592, FCBBF3002658, FCBBF3002782, FCBBF3002818, FCBBF3002925, FCBBF3003216, FCBBF3003305, FCBBF3003373, FCBBF3003435, FCBBF3003475, FCBBF3003481, FCBBF3003557, FCBBF3003787, FCBBF3003902, FCBBF3004021, FCBBF3004041, FCBBF3004323, FCBBF3004390, FCBBF3004409, FCBBF3004502, FCBBF3004715, FCBBF3004842, FCBBF3004847, FCBBF3004955, FCBBF3005160, FCBBF3005218, FCBBF3005320, FCBBF3005444, FCBBF3005698, FCBBF3005729, FCBBF3006171, FCBBF3006249, FCBBF3006288, FCBBF3006399, FCBBF3006628, FCBBF3007077, FCBBF3007150, FCBBF3007152, FCBBF3007242, FCBBF3007244, FCBBF3007248, FCBBF3007453, FCBBF3007462, FCBBF3007540, FCBBF3007604, FCBBF3007631, FCBBF3007829, FCBBF3007855, FCBBF3007859, FCBBF3007860, FCBBF3008073, FCBBF3008100, FCBBF3008153, FCBBF3008251, FCBBF3008311, FCBBF3008362, FCBBF3008382, FCBBF3008475, FCBBF3008644, FCBBF3008689, FCBBF3008748, FCBBF3008870, FCBBF3008938, FCBBF3008944, FCBBF3009069, FCBBF3009101, FCBBF3009152, FCBBF3009256, FCBBF3009317, FCBBF3009428, FCBBF3009464, FCBBF3009479, FCBBF3009526, FCBBF3009703, FCBBF3009717, FCBBF3009888, FCBBF3009949, FCBBF3009978, FCBBF3010008, FCBBF3010012, FCBBF3010124, FCBBF3010130, FCBBF3010142, FCBBF3010149, FCBBF3010211, FCBBF3010361, FCBBF3010508, FCBBF3010544, FCBBF3010586, FCBBF3010601, FCBBF3010665, FCBBF3010695, FCBBF3010729, FCBBF3010733, FCBBF3011003, FCBBF3011418, FCBBF3011523, FCBBF3011570, FCBBF3011592, FCBBF3011867, FCBBF3011889, FCBBF3012170, FCBBF3012182, FCBBF3012332, FCBBF3012443, FCBBF3012588, FCBBF3012667, FCBBF3012842, FCBBF3012901, FCBBF3013041, FCBBF3013058, FCBBF3013205, FCBBF3013307, FCBBF3013341, FCBBF3013589, FCBBF3013623, FCBBF3013800, FCBBF3013846, FCBBF3014229, FCBBF3014260, FCBBF3014355, FCBBF3014567, FCBBF3015100, FCBBF3015119, FCBBF3015131, FCBBF3015317, FCBBF3015758, FCBBF3015809, FCBBF3015870, FCBBF3016018, FCBBF3016134, FCBBF3016178, FCBBF3016451, FCBBF3016618, FCBBF3016622, FCBBF3016644, FCBBF3016667, FCBBF3016987, FCBBF3017024, FCBBF3017059, FCBBF3017071, FCBBF3017123, FCBBF3017233, FCBBF3017255, FCBBF3017288, FCBBF3017535, FCBBF3017681, FCBBF3017729, FCBBF3017873, FCBBF3017974, FCBBF3018067, FCBBF3018173, FCBBF3018453, FCBBF3018591, FCBBF3018753, FCBBF3018826, FCBBF3018949, FCBBF3019085, FCBBF3019320, FCBBF3019437, FCBBF3019564, FCBBF3019569, FCBBF3019570, FCBBF3019663, FCBBF3019714, FCBBF3019716, FCBBF3019784, FCBBF3019867, FCBBF3019961, FCBBF3020030, FCBBF3020138, FCBBF3020140, FCBBF3020163, FCBBF3020232, FCBBF3020599, FCBBF3021026, FCBBF3021191, FCBBF3021221, FCBBF3021501, FCBBF3021506, FCBBF3021524, FCBBF3021985, FCBBF3022005, FCBBF3022291, FCBBF3022311, FCBBF3022504, FCBBF3022566, FCBBF3022593, FCBBF3022765, FCBBF3022767, FCBBF3022894, FCBBF3023061, FCBBF3023078, FCBBF3023368, FCBBF3023372, FCBBF3023443, FCBBF3023599, FCBBF3023704, FCBBF3023887, FCBBF3023895, FCBBF3024096, FCBBF3024225, FCBBF3024266, FCBBF3024364, FCBBF3024623, FCBBF3024793, FCBBF3024911, FCBBF3025098, FCBBF3025252, FCBBF3025280, FCBBF3025285, FCBBF3025417, FCBBF3025528, FCBBF3025568, FCBBF3025650, FCBBF3025674, FCBBF3025905, FCBBF3026021, FCBBF3026048, FCBBF3026251, FCBBF3026308, FCBBF3026678, FCBBF3026692, FCBBF3027104, FCBBF3027199, FCBBF3027328, FCBBF3027559, FCBBF3027717, FCBBF3027755, FCBBF3027768, FCBBF3027854, FCBBF3027863, FCBBF3027903, FCBBF3028102, FCBBF3028143, FCBBF3028188, FCBBF3028244, FCBBF3028472, FCBBF3028528, FCBBF3028582, FCBBF3028671, FCBBF3028794, FCBBF4000017, FCBBF4000061, FCBBF4000076, FCBBF4000142, FCBBF4000173, FCBBF4000192, FCBBF4000193, FCBBF4000268, FCBBF4000282, FCBBF4000399, FCBBF4000415, FCBBF4000529, FCBBF5000041, FCBBF5000061, FCBBF5000165, FCBBF5000325, FCBBF5000353, FCBBF5000384, FCBBF5000483, FCBBF5000495, FEBRA1000005, FEBRA1000008, FEBRA1000030, FEBRA1000138, FEBRA1000148, FEBRA1000149, FEBRA1000183, FEBRA1000188, FEBRA1000189, FEBRA1000190, FEBRA2000007, FEBRA2000021, FEBRA2000035, FEBRA2000053, FEBRA2000126, FEBRA2000129, FEBRA2000220, FEBRA2000228, FEBRA2000253, FEBRA2000286, FEBRA2000297, FEBRA2000321, FEBRA2000333, FEBRA2000377, FEBRA2000378, FEBRA2000391, FEBRA2000394, FEBRA2000397, FEBRA2000399, FEBRA2000402, FEBRA2000404, FEBRA2000409, FEBRA2000415, FEBRA2000436, FEBRA2000454, FEBRA2000462, FEBRA2000468, FEBRA2000491, FEBRA2000504, FEBRA2000536, FEBRA2000538, FEBRA2000575, FEBRA2000581, FEBRA2000656, FEBRA2000659, FEBRA2000680, FEBRA2000690, FEBRA2000727, FEBRA2000734, FEBRA2000757, FEBRA2000771, FEBRA2000772, FEBRA2000782, FEBRA2000787, FEBRA2000790, FEBRA2000793, FEBRA2000803, FEBRA2000805, FEBRA2000809, FEBRA2000815, FEBRA2000862, FEBRA2000877, FEBRA2000880, FEBRA2000901, FEBRA2000909, FEBRA2000917, FEBRA2000928, FEBRA2000936, FEBRA2000937, FEBRA2000959, FEBRA2001004, FEBRA2001012, FEBRA2001020, FEBRA2001093, FEBRA2001124, FEBRA2001146, FEBRA2001161, FEBRA2001175, FEBRA2001197, FEBRA2001217, FEBRA2001227, FEBRA2001245, FEBRA2001267, FEBRA2001294, FEBRA2001351, FEBRA2001383, FEBRA2001438, FEBRA2001440, FEBRA2001487, FEBRA2001561, FEBRA2001581, FEBRA2001584, FEBRA2001590, FEBRA2001591, FEBRA2001610, FEBRA2001620, FEBRA2001659, FEBRA2001669, FEBRA2001698, FEBRA2001705, FEBRA2001706, FEBRA2001715, FEBRA2001745, FEBRA2001772, FEBRA2001790, FEBRA2001814, FEBRA2001867, FEBRA2001914, FEBRA2001974, FEBRA2001989, FEBRA2001990, FEBRA2002009, FEBRA2002027, FEBRA2002086, FEBRA2002109, FEBRA2002191, FEBRA2002260, FEBRA2002352, FEBRA2002399, FEBRA2002410, FEBRA2002442, FEBRA2002456, FEBRA2002508, FEBRA2002525, FEBRA2002552, FEBRA2002574, FEBRA2002601, FEBRA2002611, FEBRA2002628, FEBRA2002662, FEBRA2002682, FEBRA2002727, FEBRA2002781, FEBRA2002783, FEBRA2002792, FEBRA2002818, FEBRA2002858, FEBRA2002882, FEBRA2002897, FEBRA2002908, FEBRA2002931, FEBRA2002962, FEBRA2002986, FEBRA2003054, FEBRA2003115, FEBRA2003128, FEBRA2003155, FEBRA2003163, FEBRA2003181, FEBRA2003198, FEBRA2003253, FEBRA2003258, FEBRA2003275, FEBRA2003308, FEBRA2003327, FEBRA2003429, FEBRA2003436, FEBRA2003454, FEBRA2003468, FEBRA2003470, FEBRA2003520, FEBRA2003524, FEBRA2003541, FEBRA2003675, FEBRA2003707, FEBRA2003711, FEBRA2003726, FEBRA2003750, FEBRA2003822, FEBRA2003897, FEBRA2003907, FEBRA2003930, FEBRA2004026, FEBRA2004029, FEBRA2004042, FEBRA2004053, FEBRA2004056, FEBRA2004091, FEBRA2004110, FEBRA2004202, FEBRA2004219, FEBRA2004237, FEBRA2004268, FEBRA2004325, FEBRA2004329, FEBRA2004331, FEBRA2004443, FEBRA2004485, FEBRA2004490, FEBRA2004538, FEBRA2004592, FEBRA2004620, FEBRA2004628, FEBRA2004651, FEBRA2004767, FEBRA2004813, FEBRA2004818, FEBRA2004840, FEBRA2004852, FEBRA2004867, FEBRA2004914, FEBRA2004933, FEBRA2004987, FEBRA2005014, FEBRA2005036, FEBRA2005079, FEBRA2005114, FEBRA2005216, FEBRA2005291, FEBRA2005361, FEBRA2005377, FEBRA2005380, FEBRA2005427, FEBRA2005458, FEBRA2005476, FEBRA2005572, FEBRA2005701, FEBRA2005726, FEBRA2005778, FEBRA2005787, FEBRA2005788, FEBRA2005824, FEBRA2005998, FEBRA2006055, FEBRA2006061, FEBRA2006150, FEBRA2006165, FEBRA2006255, FEBRA2006315, FEBRA2006346, FEBRA2006354, FEBRA2006357, FEBRA2006370, FEBRA2006379, FEBRA2006396, FEBRA2006409, FEBRA2006418, FEBRA2006427, FEBRA2006476, FEBRA2006485, FEBRA2006491, FEBRA2006519, FEBRA2006521, FEBRA2006553, FEBRA2006627, FEBRA2006667, FEBRA2006726, FEBRA2006736, FEBRA2006793, FEBRA2006808, FEBRA2006817, FEBRA2006873, FEBRA2006890, FEBRA2006942, FEBRA2006977, FEBRA2007017, FEBRA2007176, FEBRA2007247, FEBRA2007280, FEBRA2007414, FEBRA2007436, FEBRA2007449, FEBRA2007458, FEBRA2007534, FEBRA2007544, FEBRA2007551, FEBRA2007566, FEBRA2007589, FEBRA2007613, FEBRA2007714, FEBRA2007793, FEBRA2007818, FEBRA2007823, FEBRA2007880, FEBRA2007931, FEBRA2007957, FEBRA2008009, FEBRA2008086, FEBRA2008134, FEBRA2008135, FEBRA2008159, FEBRA2008165, FEBRA2008172, FEBRA2008201, FEBRA2008210, FEBRA2008255, FEBRA2008265, FEBRA2008266, FEBRA2008282, FEBRA2008287, FEBRA2008302, FEBRA2008311, FEBRA2008341, FEBRA2008360, FEBRA2008459, FEBRA2008468, FEBRA2008475, FEBRA2008481, FEBRA2008542, FEBRA2008660, FEBRA2008662, FEBRA2008681, FEBRA2008692, FEBRA2008741, FEBRA2008859, FEBRA2008861, FEBRA2008866, FEBRA2008881, FEBRA2008928, FEBRA2008983, FEBRA2009016, FEBRA2009022, FEBRA2009029, FEBRA2009074, FEBRA2009117, FEBRA2009120, FEBRA2009162, FEBRA2009185, FEBRA2009240, FEBRA2009265, FEBRA2009276, FEBRA2009289, FEBRA2009327, FEBRA2009352, FEBRA2009362, FEBRA2009385, FEBRA2009416, FEBRA2009437, FEBRA2009478, FEBRA2009507, FEBRA2009541, FEBRA2009567, FEBRA2009588, FEBRA2009731, FEBRA2009754, FEBRA2009780, FEBRA2009846, FEBRA2010141, FEBRA2010299, FEBRA2010484, FEBRA2010719, FEBRA2010746, FEBRA2010768, FEBRA2010802, FEBRA2011063, FEBRA2011090, FEBRA2011356, FEBRA2011392, FEBRA2011414, FEBRA2011593, FEBRA2011665, FEBRA2012090, FEBRA2012120, FEBRA2012181, FEBRA2012195, FEBRA2012397, FEBRA2012418, FEBRA2012507, FEBRA2012625, FEBRA2013019, FEBRA2013069, FEBRA2013274, FEBRA2013465, FEBRA2013570, FEBRA2013699, FEBRA2013905, FEBRA2013951, FEBRA2014010, FEBRA2014122, FEBRA2014198, FEBRA2014213, FEBRA2014443, FEBRA2014578, FEBRA2014939, FEBRA2015076, FEBRA2015175, FEBRA2015292, FEBRA2015588, FEBRA2016112, FEBRA2016398, FEBRA2016583, FEBRA2016621, FEBRA2016654, FEBRA2016739, FEBRA2017024, FEBRA2017098, FEBRA2017138, FEBRA2017154, FEBRA2017200, FEBRA2017223, FEBRA2017333, FEBRA2017502, FEBRA2017533, FEBRA2017680, FEBRA2017736, FEBRA2017780, FEBRA2017811, FEBRA2017850, FEBRA2018051, FEBRA2018203, FEBRA2018407, FEBRA2018433, FEBRA2019172, FEBRA2019242, FEBRA2019298, FEBRA2019389, FEBRA2019457, FEBRA2019519, FEBRA2019582, FEBRA2019637, FEBRA2019690, FEBRA2019867, FEBRA2020406, FEBRA2020566, FEBRA2020582, FEBRA2020668, FEBRA2020801, FEBRA2020845, FEBRA2020886, FEBRA2020977, FEBRA2021032, FEBRA2021134, FEBRA2021171, FEBRA2021431, FEBRA2021497, FEBRA2021550, FEBRA2021571, FEBRA2021636, FEBRA2021864, FEBRA2021892, FEBRA2021908, FEBRA2022148, FEBRA2022204, FEBRA2022255, FEBRA2022322, FEBRA2022601, FEBRA2022696, FEBRA2022729, FEBRA2022787, FEBRA2022911, FEBRA2022956, FEBRA2022963, FEBRA2022972, FEBRA2023227, FEBRA2023285, FEBRA2023351, FEBRA2023377, FEBRA2023399, FEBRA2023498, FEBRA2023550, FEBRA2023721, FEBRA2023927, FEBRA2023989, FEBRA2023990, FEBRA2024019, FEBRA2024136, FEBRA2024343, FEBRA2024570, FEBRA2024693, FEBRA2024727, FEBRA2024744, FEBRA2024797, FEBRA2025249, FEBRA2025463, FEBRA2025477, FEBRA2026474, FEBRA2026582, FEBRA2026629, FEBRA2026769, FEBRA2026879, FEBRA2026890, FEBRA2026977, FEBRA2027082, FEBRA2027297, FEBRA2027352, FEBRA2027364, FEBRA2027609, FEBRA2028158, FEBRA2028222, FEBRA2028366, FEBRA2028457, FEBRA2028477, FEBRA2028503, FEHRT2000325, FEHRT2000364, FEKID1000018, FELIV1000101, FELIV1000137, FELIV1000164, FELNG2000241, HCASM1000021, HCASM1000050, HCASM1000061, HCASM1000130, HCASM2000156, HCASM2000202, HCASM2000214, HCASM2000266, HCASM2000307, HCASM2000534, HCASM2000536, HCASM2000560, HCASM2000871, HCASM2001285, HCASM2001810, HCASM2001866, HCASM2001890, HCASM2002148, HCASM2002502, HCASM2002754, HCASM2002918, HCASM2003076, HCASM2003099, HCASM2003212, HCASM2003237, HCASM2003357, HCASM2003415, HCASM2005388, HCASM2005484, HCASM2006131, HCASM2006338, HCASM2006359, HCASM2006632, HCASM2007047, HCASM2007317, HCASM2007737, HCASM2007773, HCASM2008154, HCASM2018536, HCASM2009405, HCASM2009424, HCASM2009463, HCASM2009588, HCHON1000015, HCHON1000142, HCHON1000176, HCHON1000191, HCHON2000028, HCHON2000038, HCHON2000062, HCHON2000100, HCHON2000156, HCHON2000199, HCHON2000212, HCHON2000271, HCHON2000295, HCHON2000315, HCHON2000322, HCHON2000344, HCHON2000364, HCHON2000395, HCHON2000417, HCHON2000418, HCHON2000473, HCHON2000503, HCHON2000660, HCHON2000673, HCHON2000676, HCHON2000699, HCHON2000705, HCHON2000743, HCHON2000751, HCHON2000817, HCHON2000818, HCHON2000819, HCHON2000832, HCHON2000851, HCHON2000898, HCHON2000935, HCHON2000942, HCHON2000956, HCHON2000994, HCHON2001050, HCHON2001084, HCHON2001108, HCHON2001110, HCHON2001116, HCHON2001161, HCHON2001214, HCHON2001233, HCHON2001269, HCHON2001434, HCHON2001450, HCHON2001453, HCHON2001497, HCHON2001523, HCHON2001546, HCHON2001548, HCHON2001577, HCHON2001604, HCHON2001607, HCHON2001646, HCHON2001712, HCHON2001768, HCHON2001801, HCHON2001853, HCHON2002123, HCHON2002194, HCHON2002241, HCHON2002247, HCHON2002354, HCHON2002676, HCHON2002770, HCHON2002964, HCHON2002971, HCHON2003131, HCHON2003134, HCHON2003327, HCHON2003513, HCHON2003532, HCHON2003642, HCHON2003659, HCHON2003676, HCHON2004007, HCHON2004279, HCHON2004359, HCHON2004531, HCHON2004776, HCHON2004858, HCHON2005048, HCHON2005118, HCHON2005166, HCHON2005802, HCHON2005987, HCHON2006459, HCHON2006714, HCHON2006722, HCHON2006786, HCHON2006841, HCHON2006871, HCHON2007046, HCHON2007482, HCHON2007650, HCHON2007674, HCHON2007774, HCHON2007881, HCHON2008112, HCHON2008239, HCHON2008444, HCHON2008582, HCHON2008672, HCHON2008856, HCHON2008871, HCHON2008989, HCHON2009191, HCHON2009384, HCHON2009749, HCHON2009766, HCHON2009795, HCHON2010074, HCHON2010543, HEART1000074, HEART1000088, HEART1000099, HEART1000102, HEART1000118, HEART1000132, HEART1000139, HEART1000142, HEART1000151, HEART1000173, HEART2000024, HEART2000035, HEART2000099, HEART2000298, HEART2000306, HEART2000309, HEART2000411, HEART2000418, HEART2000448, HEART2000492, HEART2000520, HEART2000541, HEART2000568, HEART2000611, HEART2000959, HEART2001680, HEART2001756, HEART2002129, HEART2002184, HEART2002220, HEART2002432, HEART2002531, HEART2002598, HEART2002717, HEART2003027, HEART2003168, HEART2003432, HEART2003440, HEART2003781, HEART2003852, HEART2004570, HEART2004940, HEART2004980, HEART2005244, HEART2005581, HEART2005610, HEART2006131, HEART2006195, HEART2006310, HEART2006334, HEART2006487, HEART2006557, HEART2006787, HEART2006789, HEART2006909, HEART2007031, HEART2007231, HEART2007443, HEART2007767, HEART2008108, HEART2008111, HEART2008257, HEART2008509, HEART2008994, HEART2009000, HEART2009599, HEART2009680, HEART2010391, HEART2010492, HEART2010495, HELAC2000158, HELAC2000301, HHDPC1000001, HHDPC1000065, HHDPC2000055, HHDPC2000149, HHDPC2000258, HHDPC2000315, HHDPC2000456, HHDPC2000462, HHDPC2000572, HHDPC2000656, HHDPC2000692, HHDPC2001337, HHDPC2001432, HHDPC2001896, HHDPC2002963, HHDPC2003049, HHDPC2003113, HHDPC2003381, HHDPC2004757, HHDPC2005185, HHDPC2005513, HHDPC2005742, HHDPC2006460, HHDPC2006862, HHDPC2006927, HHDPC2007302, HHDPC2007775, HHDPC2008123, HHDPC2008185, HHDPC2008279, HHDPC2008297, HHDPC2008414, HHDPC2008474, HHDPC2008816, HHDPC2008843, HHDPC2009114, HHDPC2009208, HHDPC2009272, HLUNG1000017, HLUNG1000024, HLUNG1000030, HLUNG1000034, HLUNG1000053, HLUNG1000064, HLUNG1000076, HLUNG1000084, HLUNG1000091, HLUNG1000104, HLUNG1000105, HLUNG1000151, HLUNG1000169, HLUNG2000014, HLUNG2000027, HLUNG2000063, HLUNG2000068, HLUNG2000116, HLUNG2000125, HLUNG2000130, HLUNG2000142, HLUNG2000174, HLUNG2000176, HLUNG2000217, HLUNG2000232, HLUNG2000255, HLUNG2000281, HLUNG2000315, HLUNG2000340, HLUNG2000362, HLUNG2000363, HLUNG2000412, HLUNG2000431, HLUNG2000480, HLUNG2000489, HLUNG2000549, HLUNG2000557, HLUNG2000570, HLUNG2000751, HLUNG2000761, HLUNG2000777, HLUNG2000870, HLUNG2000926, HLUNG2000950, HLUNG2000955, HLUNG2000970, HLUNG2001013, HLUNG2001126, HLUNG2001144, HLUNG2001214, HLUNG2001439, HLUNG2001459, HLUNG2001507, HLUNG2001633, HLUNG2001677, HLUNG2001712, HLUNG2001814, HLUNG2001996, HLUNG2002006, HLUNG2002050, HLUNG2002059, HLUNG2002085, HLUNG2002145, HLUNG2002295, HLUNG2002303, HLUNG2002334, HLUNG2002405, HLUNG2002429, HLUNG2002465, HLUNG2002562, HLUNG2002659, HLUNG2002707, HLUNG2002811, HLUNG2002916, HLUNG2002942, HLUNG2002949, HLUNG2002958, HLUNG2002982, HLUNG2003049, HLUNG2003061, HLUNG2003162, HLUNG2003246, HLUNG2003306, HLUNG2003331, HLUNG2003335, HLUNG2003378, HLUNG2003497, HLUNG2003691, HLUNG2003710, HLUNG2003714, HLUNG2003716, HLUNG2003778, HLUNG2003833, HLUNG2003872, HLUNG2003918, HLUNG2003991, HLUNG2004014, HLUNG2004037, HLUNG2004067, HLUNG2004154, HLUNG2004170, HLUNG2004217, HLUNG2004273, HLUNG2004388, HLUNG2004416, HLUNG2004521, HLUNG2004684, HLUNG2004707, HLUNG2004774, HLUNG2004775, HLUNG2005012, HLUNG2005030, HLUNG2005045, HLUNG2005076, HLUNG2005203, HLUNG2005479, HLUNG2005524, HLUNG2005656, HLUNG2005738, HLUNG2005774, HLUNG2005813, HLUNG2005924, HLUNG2006026, HLUNG2006067, HLUNG2006094, HLUNG2006370, HLUNG2006397, HLUNG2006570, HLUNG2006599, HLUNG2006614, HLUNG2006671, HLUNG2006781, HLUNG2006812, HLUNG2006843, HLUNG2006852, HLUNG2006935, HLUNG2007041, HLUNG2007163, HLUNG2007210, HLUNG2007219, HLUNG2007245, HLUNG2007433, HLUNG2007931, HLUNG2008066, HLUNG2008153, HLUNG2008235, HLUNG2008247, HLUNG2008333, HLUNG2008348, HLUNG2008384, HLUNG2008396, HLUNG2008439, HLUNG2008479, HLUNG2008480, HLUNG2008521, HLUNG2008833, HLUNG2008875, HLUNG2008958, HLUNG2008959, HLUNG2009067, HLUNG2009215, HLUNG2009253, HLUNG2009303, HLUNG2009413, HLUNG2009729, HLUNG2010181, HLUNG2010464, HLUNG2010562, HLUNG2010845, HLUNG2011041, HLUNG2011298, HLUNG2011461, HLUNG2011833, HLUNG2012049, HLUNG2012287, HLUNG2012315, HLUNG2012546, HLUNG2012600, HLUNG2012727, HLUNG2013097, HLUNG2013204, HLUNG2013304, HLUNG2013350, HLUNG2013622, HLUNG2013643, HLUNG2013784, HLUNG2013851, HLUNG2014262, HLUNG2014288, HLUNG2014449, HLUNG2014821, HLUNG2015184, HLUNG2015418, HLUNG2015548, HLUNG2015578, HLUNG2015617, HLUNG2016022, HLUNG2016862, HLUNG2017286, HLUNG2017307, HLUNG2017350, HLUNG2017546, HLUNG2017806, HLUNG2018029, HLUNG2018282, HLUNG2018626, HLUNG2019058, HSYRA1000131, HSYRA2000044, HSYRA2000135, HSYRA2000137, HSYRA2000221, HSYRA2000237, HSYRA2000248, HSYRA2000253, HSYRA2000332, HSYRA2000371, HSYRA2000424, HSYRA2000510, HSYRA2000605, HSYRA2000629, HSYRA2000706, HSYRA2000760, HSYRA2000792, HSYRA2000828, HSYRA2000832, HSYRA2000925, HSYRA2000927, HSYRA2001003, HSYRA2001105, HSYRA2001142, HSYRA2001153, HSYRA2001232, HSYRA2001255, HSYRA2001332, HSYRA2001353, HSYRA2001484, HSYRA2001552, HSYRA2001574, HSYRA2001580, HSYRA2001983, HSYRA2002103, HSYRA2002590, HSYRA2002741, HSYRA2003168, HSYRA2004550, HSYRA2004858, HSYRA2005456, HSYRA2005496, HSYRA2005628, HSYRA2005970, HSYRA2006049, HSYRA2006873, HSYRA2007241, HSYRA2007338, HSYRA2007650, HSYRA2007667, HSYRA2008154, HSYRA2008714, HSYRA2009102, IMR321000155, IMR321000158, IMR321000161, IMR321000165, IMR321000193, IMR321000207, IMR321000230, IMR322000072, IMR322000107, IMR322000121, IMR322000127, IMR322000152, IMR322000164, IMR322000178, IMR322000302, IMR322000316, IMR322000374, IMR322000379, IMR322000383, IMR322000418, IMR322000518, IMR322000604, IMR322000609, IMR322000656, IMR322000672, IMR322000775, IMR322000791, IMR322000811, IMR322000819, IMR322000838, IMR322000859, IMR322000863, IMR322000917, IMR322000918, IMR322000919, IMR322000935, IMR322000953, IMR322000973, IMR322000984, IMR322001018, IMR322001049, IMR322001167, IMR322001185, IMR322001218, IMR322001245, IMR322001317, IMR322001318, IMR322001322, IMR322001438, IMR322001452, IMR322001534, IMR322001541, IMR322001665, IMR322001670, IMR322001724, IMR322001879, IMR322002035, IMR322002110, IMR322002470, IMR322003675, IMR322004768, IMR322005293, IMR322005833, IMR322006012, IMR322006222, IMR322006495, IMR322006520, IMR322006886, IMR322006947, IMR322007078, IMR322007225, IMR322007704, IMR322008651, IMR322009710, IMR322009807, IMR322010295, IMR322010953, IMR322011689, IMR322012314, IMR322012529, IMR322013053, IMR322013396, IMR322013731, IMR322013805, IMR322015523, IMR322016146, IMR322017049, IMR322018117, IMR322018192, JCMLC2000273, KIDNE1000008, KIDNE1000012, KIDNE1000015, KIDNE1000028, KIDNE1000036, KIDNE1000064, KIDNE1000104, KIDNE1000121, KIDNE1000143, KIDNE1000152, KIDNE2000026, KIDNE2000041, KIDNE2000046, KIDNE2000051, KIDNE2000070, KIDNE2000167, KIDNE2000174, KIDNE2000192, KIDNE2000227, KIDNE2000244, KIDNE2000245, KIDNE2000287, KIDNE2000315, KIDNE2000317, KIDNE2000328, KIDNE2000330, KIDNE2000335, KIDNE2000349, KIDNE2000375, KIDNE2000383, KIDNE2000394, KIDNE2000422, KIDNE2000493, KIDNE2000510, KIDNE2000513, KIDNE2000519, KIDNE2000555, KIDNE2000624, KIDNE2000678, KIDNE2000717, KIDNE2000721, KIDNE2000722, KIDNE2000777, KIDNE2000801, KIDNE2000832, KIDNE2000833, KIDNE2000846, KIDNE2000867, KIDNE2000909, KIDNE2001117, KIDNE2001140, KIDNE2001269, KIDNE2001361, KIDNE2001373, KIDNE2001636, KIDNE2001713, KIDNE2001802, KIDNE2001840, KIDNE2001857, KIDNE2001873, KIDNE2001897, KIDNE2001931, KIDNE2001979, KIDNE2002015, KIDNE2002162, KIDNE2002168, KIDNE2002191, KIDNE2002198, KIDNE2002262, KIDNE2002265, KIDNE2002438, KIDNE2002483, KIDNE2002725, KIDNE2002768, KIDNE2002795, KIDNE2002798, KIDNE2002839, KIDNE2002845, KIDNE2002872, KIDNE2002882, KIDNE2002980, KIDNE2002991, KIDNE2003185, KIDNE2003188, KIDNE2003233, KIDNE2003335, KIDNE2003373, KIDNE2003377, KIDNE2003507, KIDNE2003752, KIDNE2003764, KIDNE2003837, KIDNE2003994, KIDNE2004034, KIDNE2004054, KIDNE2004084, KIDNE2004095, KIDNE2004115, KIDNE2004233, KIDNE2004262, KIDNE2004279, KIDNE2004294, KIDNE2004305, KIDNE2004344, KIDNE2004394, KIDNE2004411, KIDNE2004475, KIDNE2004519, KIDNE2004520, KIDNE2004531, KIDNE2004534, KIDNE2004562, KIDNE2004579, KIDNE2004626, KIDNE2004681, KIDNE2004828, KIDNE2004846, KIDNE2004879, KIDNE2004981, KIDNE2004985, KIDNE2004999, KIDNE2005038, KIDNE2005042, KIDNE2005062, KIDNE2005266, KIDNE2005296, KIDNE2005321, KIDNE2005327, KIDNE2005336, KIDNE2005400, KIDNE2005424, KIDNE2005477, KIDNE2005526, KIDNE2005543, KIDNE2005603, KIDNE2005629, KIDNE2005781, KIDNE2005798, KIDNE2005854, KIDNE2005908, KIDNE2005937, KIDNE2006039, KIDNE2006053, KIDNE2006062, KIDNE2006092, KIDNE2006145, KIDNE2006149, KIDNE2006210, KIDNE2006299, KIDNE2006334, KIDNE2006353, KIDNE2006376, KIDNE2006378, KIDNE2006465, KIDNE2006580, KIDNE2006652, KIDNE2006687, KIDNE2006733, KIDNE2006811, KIDNE2006820, KIDNE2006880, KIDNE2007005, KIDNE2007040, KIDNE2007077, KIDNE2007186, KIDNE2007222, KIDNE2007356, KIDNE2007422, KIDNE2007569, KIDNE2007810, KIDNE2007811, KIDNE2007944, KIDNE2008069, KIDNE2008072, KIDNE2008116, KIDNE2008117, KIDNE2008218, KIDNE2008315, KIDNE2008362, KIDNE2008378, KIDNE2008403, KIDNE2008404, KIDNE2008446, KIDNE2008473, KIDNE2008480, KIDNE2008649, KIDNE2008666, KIDNE2008697, KIDNE2008758, KIDNE2008788, KIDNE2008795, KIDNE2008824, KIDNE2008832, KIDNE2008869, KIDNE2008914, KIDNE2008975, KIDNE2008987, KIDNE2009019, KIDNE2009109, KIDNE2009180, KIDNE2009191, KIDNE2009332, KIDNE2009426, KIDNE2009467, KIDNE2009490, KIDNE2009553, KIDNE2009605, KIDNE2009628, KIDNE2009647, KIDNE2009676, KIDNE2009723, KIDNE2010007, KIDNE2010049, KIDNE2010052, KIDNE2010084, KIDNE2010137, KIDNE2010151, KIDNE2010264, KIDNE2010265, KIDNE2010271, KIDNE2010419, KIDNE2010430, KIDNE2010574, KIDNE2010674, KIDNE2010739, KIDNE2010762, KIDNE2010863, KIDNE2010973, KIDNE2010989, KIDNE2011200, KIDNE2011314, KIDNE2011508, KIDNE2011532, KIDNE2011635, KIDNE2011752, KIDNE2011782, KIDNE2011858, KIDNE2012009, KIDNE2012025, KIDNE2012188, KIDNE2012291, KIDNE2012316, KIDNE2012361, KIDNE2012440, KIDNE2012453, KIDNE2012563, KIDNE2012601, KIDNE2012613, KIDNE2012710, KIDNE2012745, KIDNE2012775, KIDNE2012784, KIDNE2012945, KIDNE2013045, KIDNE2013095, KIDNE2013158, KIDNE2013218, KIDNE2013263, KIDNE2013388, KIDNE2013413, KIDNE2013489, KIDNE2013639, KIDNE2013731, KIDNE2013734, KIDNE2013775, KIDNE2013801, KIDNE2014087, KIDNE2014112, KIDNE2014119, KIDNE2014170, KIDNE2014184, KIDNE2014268, KIDNE2014298, KIDNE2014320, KIDNE2014325, KIDNE2014415, KIDNE2014489, KIDNE2014496, KIDNE2014661, KIDNE2014717, KIDNE2014789, KIDNE2014808, KIDNE2014890, KIDNE2014978, KIDNE2015073, KIDNE2015221, KIDNE2015244, KIDNE2015313, KIDNE2015433, KIDNE2015445, KIDNE2015483, KIDNE2015515, KIDNE2015546, KIDNE2015556, KIDNE2015598, KIDNE2015660, KIDNE2015987, KIDNE2016000, KIDNE2016036, KIDNE2016096, KIDNE2016101, KIDNE2016142, KIDNE2016188, KIDNE2016327, KIDNE2016371, KIDNE2016388, KIDNE2016464, KIDNE2016539, KIDNE2016918, KIDNE2017007, KIDNE2017040, KIDNE2017052, KIDNE2017151, KIDNE2017153, KIDNE2017315, KIDNE2017332, KIDNE2017343, KIDNE2017454, KIDNE2017603, KIDNE2017956, KIDNE2018071, KIDNE2018166, KIDNE2018167, KIDNE2018254, KIDNE2018268, KIDNE2018269, KIDNE2018287, KIDNE2018294, KIDNE2018462, KIDNE2018493, KIDNE2018617, KIDNE2018678, KIDNE2018727, KIDNE2018863, KIDNE2018891, KIDNE2018989, KIDNE2018996, KIDNE2019074, KIDNE2019187, LIVER1000017, LIVER1000050, LIVER1000055, LIVER1000058, LIVER1000063, LIVER1000067, LIVER1000073, LIVER1000082, LIVER1000099, LIVER1000104, LIVER1000111, LIVER1000139, LIVER1000155, LIVER1000165, LIVER1000175, LIVER1000224, LIVER1000230, LIVER1000278, LIVER1000303, LIVER1000397, LIVER1000421, LIVER1000433, LIVER1000479, LIVER1000482, LIVER2000003, LIVER2000037, LIVER2000158, LIVER2000216, LIVER2000237, LIVER2000247, LIVER2000360, LIVER2000515, LIVER2000592, LIVER2000626, LIVER2000682, LIVER2000769, LIVER2000775, LIVER2001051, LIVER2001076, LIVER2001099, LIVER2001164, LIVER2001191, LIVER2001265, LIVER2001329, LIVER2001389, LIVER2001461, LIVER2001835, LIVER2002638, LIVER2002644, LIVER2002660, LIVER2002702, LIVER2003008, LIVER2003065, LIVER2003234, LIVER2003511, LIVER2003524, LIVER2003568, LIVER2003800, LIVER2003854, LIVER2004074, LIVER2004392, LIVER2004514, LIVER2004565, LIVER2005028, LIVER2005198, LIVER2005218, LIVER2005376, LIVER2005385, LIVER2005512, LIVER2005520, LIVER2005527, LIVER2005544, LIVER2005625, LIVER2005728, LIVER2005973, LIVER2005981, LIVER2006006, LIVER2006251, LIVER2006410, LIVER2006469, LIVER2006644, LIVER2006764, LIVER2007415, LIVER2007548, LIVER2007568, LIVER2007721, LIVER2008053, LIVER2008465, LIVER2008473, LIVER2008580, LIVER2008706, LIVER2008751, LIVER2008945, LIVER2008998, LIVER2009110, LIVER2009118, LIVER2009554, LYMPB1000158, LYMPB2000083, MAMGL1000017, MAMGL1000083, MAMGL1000096, MAMGL1000132, MAMGL1000151, MAMGL1000178, MAMGL1000182, MAMGL1000184, MESAN1000032, MESAN1000035, MESAN1000079, MESAN1000121, MESAN1000126, MESAN1000147, MESAN1000180, MESAN2000023, MESAN2000026, MESAN2000067, MESAN2000167, MESAN2000264, MESAN2000337, MESAN2000457, MESAN2000462, MESAN2000572, MESAN2000608, MESAN2000620, MESAN2000711, MESAN2000815, MESAN2000894, MESAN2001154, MESAN2001627, MESAN2001770, MESAN2001979, MESAN2001980, MESAN2002113, MESAN2002122, MESAN2002147, MESAN2002186, MESAN2002424, MESAN2002687, MESAN2002709, MESAN2002978, MESAN2003035, MESAN2003037, MESAN2003039, MESAN2003058, MESAN2003101, MESAN2003190, MESAN2003322, MESAN2003490, MESAN2003529, MESAN2003646, MESAN2003662, MESAN2003709, MESAN2003851, MESAN2004138, MESAN2004288, MESAN2004575, MESAN2005284, MESAN2005303, MESAN2005371, MESAN2005724, MESAN2005808, MESAN2005811, MESAN2005957, MESAN2006022, MESAN2006043, MESAN2006328, MESAN2006401, MESAN2006580, MESAN2006599, MESAN2006743, MESAN2006953, MESAN2006971, MESAN2007032, MESAN2007440, MESAN2007597, MESAN2008222, MESAN2008334, MESAN2008415, MESAN2008460, MESAN2008536, MESAN2008729, MESAN2008821, MESAN2008926, MESAN2008936, MESAN2009019, MESAN2009081, MESAN2009105, MESAN2009311, MESAN2009418, MESAN2009503, MESAN2009522, MESAN2010031, MESAN2010114, MESAN2010312, MESAN2010321, MESAN2010664, MESAN2010681, MESAN2011545, MESAN2011597, MESAN2011627, MESAN2011632, MESAN2011977, MESAN2012113, MESAN2012586, MESAN2012708, MESAN2012735, MESAN2013019, MESAN2013022, MESAN2013183, MESAN2013211, MESAN2013283, MESAN2013611, MESAN2013674, MESAN2013845, MESAN2013908, MESAN2013936, MESAN2014192, MESAN2014295, MESAN2014298, MESAN2014624, MESAN2015277, MESAN2015365, MESAN2015391, MESAN2015401, MESAN2015501, MESAN2015708, MESAN2016304, MESAN2016409, MESAN2016552, MESAN2016965, MESAN2017133, MESAN2017152, MESAN2017373, MESAN2017417, MESAN2018209, MESAN2018576, MESAN2018670, MESAN2018699, MESTC1000042, MESTC1000147, MESTC2000150, MESTC2000153, MESTC2000170, N1ESE2000698, NB9N41000011, NB9N41000047, NB9N41000135, NB9N41000142, NB9N41000146, NB9N42000122, NB9N42000196, NB9N42000281, NB9N42000314, NB9N42000430, NB9N42000495, NB9N42001300, NCRRP1000129, NESOP1000010, NESOP1000087, NESOP1000108, NESOP2000231, NESOP2000452, NESOP2000499, NESOP2000504, NESOP2000744, NESOP2001144, NESOP2001433, NESOP2001656, NESOP2001694, NESOP2001752, NESOP2002352, NESOP2002418, NESOP2002487, NESOP2002738, NESOP2002780, NETRP1000034, NETRP1000082, NETRP2000086, NETRP2000182, NETRP2000439, NHNPC1000034, NHNPC1000037, NHNPC1000084, NHNPC1000101, NHNPC1000124, NHNPC2000062, NHNPC2000606, NHNPC2000877, NHNPC2001223, NHNPC2001312, NHNPC2001816, NHNPC2001931, NHNPC2002565, NHNPC2002749, NOVAR1000015, NOVAR2000038, NOVAR2000136, NOVAR2000352, NOVAR2000412, NOVAR2000710, NOVAR2000962, NOVAR2001108, NOVAR2001620, NOVAR2001783, NOVAR2001876, NOVAR2002039, NT2NE1000004, NT2NE1000023, NT2NE1000024, NT2NE1000059, NT2NE1000063, NT2NE1000073, NT2NE1000083, NT2NE1000120, NT2NE1000122, NT2NE1000175, NT2NE1000181, NT2NE1000185, NT2NE2000038, NT2NE2000054, NT2NE2000057, NT2NE2000064, NT2NE2000109, NT2NE2000137, NT2NE2000156, NT2NE2000222, NT2NE2000284, NT2NE2000299, NT2NE2000353, NT2NE2000356, NT2NE2000369, NT2NE2000374, NT2NE2000386, NT2NE2000390, NT2NE2000392, NT2NE2000455, NT2NE2000470, NT2NE2000488, NT2NE2000517, NT2NE2000536, NT2NE2000546, NT2NE2000548, NT2NE2000550, NT2NE2000586, NT2NE2000612, NT2NE2000636, NT2NE2000658, NT2NE2000706, NT2NE2000802, NT2NE2000808, NT2NE2000864, NT2NE2000909, NT2NE2000913, NT2NE2000951, NT2NE2000980, NT2NE2001000, NT2NE2001021, NT2NE2001040, NT2NE2001049, NT2NE2001142, NT2NE2001156, NT2NE2001180, NT2NE2001181, NT2NE2001188, NT2NE2001191, NT2NE2001247, NT2NE2001252, NT2NE2001324, NT2NE2001326, NT2NE2001337, NT2NE2001364, NT2NE2001372, NT2NE2001397, NT2NE2001403, NT2NE2001428, NT2NE2001432, NT2NE2001442, NT2NE2001524, NT2NE2001530, NT2NE2001617, NT2NE2001623, NT2NE2001626, NT2NE2001634, NT2NE2001655, NT2NE2001660, NT2NE2001666, NT2NE2001677, NT2NE2001698, NT2NE2001723, NT2NE2001725, NT2NE2001874, NT2NE2001889, NT2NE2001923, NT2NE2002100, NT2NE2002162, NT2NE2002186, NT2NE2002285, NT2NE2002311, NT2NE2002620, NT2NE2002651, NT2NE2002732, NT2NE2002768, NT2NE2002791, NT2NE2002856, NT2NE2003150, NT2NE2003185, NT2NE2003252, NT2NE2003280, NT2NE2003308, NT2NE2003309, NT2NE2003315, NT2NE2003393, NT2NE2003408, NT2NE2003457, NT2NE2003485, NT2NE2003540, NT2NE2003571, NT2NE2003705, NT2NE2003752, NT2NE2004378, NT2NE2004490, NT2NE2004519, NT2NE2004606, NT2NE2004716, NT2NE2004740, NT2NE2004787, NT2NE2004916, NT2NE2005035, NT2NE2005223, NT2NE2005276, NT2NE2005317, NT2NE2005323, NT2NE2005358, NT2NE2005371, NT2NE2005395, NT2NE2005441, NT2NE2005517, NT2NE2005537, NT2NE2005555, NT2NE2005588, NT2NE2005676, NT2NE2005720, NT2NE2005784, NT2NE2005804, NT2NE2005821, NT2NE2005876, NT2NE2005890, NT2NE2005921, NT2NE2005968, NT2NE2006075, NT2NE2006087, NT2NE2006103, NT2NE2006217, NT2NE2006288, NT2NE2006382, NT2NE2006387, NT2NE2006427, NT2NE2006432, NT2NE2006458, NT2NE2006531, NT2NE2006659, NT2NE2006784, NT2NE2006813, NT2NE2006894, NT2NE2006942, NT2NE2006958, NT2NE2007052, NT2NE2007220, NT2NE2007425, NT2NE2007725, NT2NE2007727, NT2NE2007786, NT2NE2007877, NT2NE2007967, NT2NE2008017, NT2NE2008060, NT2NE2008077, NT2NE2008213, NT2NE2008260, NT2NE2008378, NT2NE2008607, NT2NE2008639, NT2NE2008727, NT2NE2008783, NT2NE2008803, NT2NE2008867, NT2NE2008961, NT2NE2008997, NT2NE2009138, NT2NE2009295, NT2NE2009426, NT2NE2009523, NT2NE2009608, NT2NE2009691, NT2NE2010056, NT2NE2010105, NT2NE2010150, NT2NE2010400, NT2NE2010632, NT2NE2010633, NT2NE2010654, NT2NE2010688, NT2NE2010781, NT2NE2011033, NT2NE2011036, NT2NE2011119, NT2NE2011154, NT2NE2011221, NT2NE2011411, NT2NE2011650, NT2NE2011684, NT2NE2011687, NT2NE2011691, NT2NE2011758, NT2NE2011823, NT2NE2011896, NT2NE2011998, NT2NE2012113, NT2NE2012199, NT2NE2012243, NT2NE2012361, NT2NE2012448, NT2NE2012457, NT2NE2012493, NT2NE2012505, NT2NE2012533, NT2NE2012603, NT2NE2012747, NT2NE2012847, NT2NE2012928, NT2NE2013019, NT2NE2013081, NT2NE2013189, NT2NE2013217, NT2NE2013547, NT2NE2014013, NT2NE2014028, NT2NE2014113, NT2NE2014176, NT2NE2014221, NT2NE2014525, NT2NE2014650, NT2NE2014651, NT2NE2014681, NT2NE2014758, NT2NE2014869, NT2NE2014950, NT2NE2015061, NT2NE2015262, NT2NE2015275, NT2NE2015362, NT2NE2015480, NT2NE2015511, NT2NE2015565, NT2NE2015626, NT2NE2015747, NT2NE2015860, NT2NE2015885, NT2NE2015904, NT2NE2015974, NT2NE2016041, NT2NE2016387, NT2NE2016419, NT2NE2016519, NT2NE2016608, NT2NE2016766, NT2NE2016774, NT2NE2016971, NT2NE2017259, NT2NE2017332, NT2NE2017397, NT2NE2017480, NT2NE2017492, NT2NE2017508, NT2NE2017562, NT2NE2017590, NT2NE2017612, NT2NE2017721, NT2NE2017752, NT2NE2017792, NT2NE2018165, NT2NE2018176, NT2NE2018273, NT2NE2018376, NT2NE2018472, NT2NE2018594, NT2NE2018739, NT2NE2018916, NT2NE2019056, NT2NE2019076, NT2NE2019099, NT2RI1000016, NT2RI1000035, NT2RI1000127, NT2RI1000164, NT2RI1000172, NT2RI2000004, NT2RI2000007, NT2RI2000116, NT2RI2000117, NT2RI2000128, NT2RI2000167, NT2RI2000173, NT2RI2000187, NT2RI2000270, NT2RI2000276, NT2RI2000282, NT2RI2000313, NT2RI2000341, NT2RI2000344, NT2RI2000348, NT2RI2000480, NT2RI2000575, NT2RI2000588, NT2RI2000597, NT2RI2000669, NT2RI2000671, NT2RI2000688, NT2RI2000704, NT2RI2000738, NT2RI2000775, NT2RI2000822, NT2RI2000829, NT2RI2000841, NT2RI2000865, NT2RI2000932, NT2RI2000974, NT2RI2000987, NT2RI2001010, NT2RI2001017, NT2RI2001030, NT2RI2001054, NT2RI2001083, NT2RI2001178, NT2RI2001235, NT2RI2001244, NT2RI2001307, NT2RI2001385, NT2RI2001409, NT2RI2001410, NT2RI2001425, NT2RI2001449, NT2RI2001450, NT2RI2001474, NT2RI2001519, NT2RI2001595, NT2RI2001624, NT2RI2001726, NT2RI2001769, NT2RI2001782, NT2RI2001836, NT2RI2001846, NT2RI2001866, NT2RI2001952, NT2RI2002022, NT2RI2002041, NT2RI2002120, NT2RI2002153, NT2RI2002179, NT2RI2002252, NT2RI2002260, NT2RI2002270, NT2RI2002334, NT2RI2002359, NT2RI2002391, NT2RI2002447, NT2RI2002481, NT2RI2002507, NT2RI2002517, NT2RI2002530, NT2RI2002540, NT2RI2002549, NT2RI2002564, NT2RI2002592, NT2RI2002602, NT2RI2002699, NT2RI2002729, NT2RI2002819, NT2RI2002822, NT2RI2002865, NT2RI2002923, NT2RI2002926, NT2RI2002958, NT2RI2002970, NT2RI2003011, NT2RI2003067, NT2RI2003184, NT2RI2003222, NT2RI2003301, NT2RI2003360, NT2RI2003361, NT2RI2003383, NT2RI2003392, NT2RI2003407, NT2RI2003419, NT2RI2003481, NT2RI2003487, NT2RI2003655, NT2RI2003667, NT2RI2003751, NT2RI2003884, NT2RI2003973, NT2RI2004059, NT2RI2004078, NT2RI2004079, NT2RI2004093, NT2RI2004136, NT2RI2004157, NT2RI2004190, NT2RI2004230, NT2RI2004284, NT2RI2004290, NT2RI2004304, NT2RI2004312, NT2RI2004381, NT2RI2004442, NT2RI2004468, NT2RI2004606, NT2RI2004618, NT2RI2004783, NT2RI2004818, NT2RI2004840, NT2RI2004884, NT2RI2004916, NT2RI2004962, NT2RI2004984, NT2RI2004985, NT2RI2005048, NT2RI2005069, NT2RI2005087, NT2RI2005115, NT2RI2005130, NT2RI2005150, NT2RI2005239, NT2RI2005246, NT2RI2005315, NT2RI2005353, NT2RI2005358, NT2RI2005368, NT2RI2005382, NT2RI2005473, NT2RI2005520, NT2RI2005564, NT2RI2005579, NT2RI2005621, NT2RI2005628, NT2RI2005670, NT2RI2005710, NT2RI2005772, NT2RI2005814, NT2RI2005816, NT2RI2005851, NT2RI2005966, NT2RI2006071, NT2RI2006081, NT2RI2006126, NT2RI2006127, NT2RI2006183, NT2RI2006257, NT2RI2006271, NT2RI2006294, NT2RI2006345, NT2RI2006403, NT2RI2006445, NT2RI2006487, NT2RI2006565, NT2RI2006640, NT2RI2006659, NT2RI2006662, NT2RI2006667, NT2RI2006679, NT2RI2006682, NT2RI2006686, NT2RI2006703, NT2RI2006716, NT2RI2006762, NT2RI2006788, NT2RI2006838, NT2RI2006853, NT2RI2006973, NT2RI2007046, NT2RI2007048, NT2RI2007084, NT2RI2007096, NT2RI2007116, NT2RI2007214, NT2RI2007277, NT2RI2007303, NT2RI2007334, NT2RI2007377, NT2RI2007386, NT2RI2007406, NT2RI2007439, NT2RI2007507, NT2RI2007593, NT2RI2007629, NT2RI2007751, NT2RI2007754, NT2RI2007827, NT2RI2007877, NT2RI2007884, NT2RI2007891, NT2RI2007956, NT2RI2007965, NT2RI2007987, NT2RI2008050, NT2RI2008141, NT2RI2008204, NT2RI2008221, NT2RI2008233, NT2RI2008455, NT2RI2008481, NT2RI2008502, NT2RI2008566, NT2RI2008598, NT2RI2008622, NT2RI2008714, NT2RI2008791, NT2RI2008801, NT2RI2008812, NT2RI2008841, NT2RI2008952, NT2RI2009005, NT2RI2009101, NT2RI2009144, NT2RI2009151, NT2RI2009194, NT2RI2009215, NT2RI2009239, NT2RI2009259, NT2RI2009269, NT2RI2009289, NT2RI2009301, NT2RI2009402, NT2RI2009406, NT2RI2009517, NT2RI2009585, NT2RI2009595, NT2RI2009855, NT2RI2010283, NT2RI2010508, NT2RI2010795, NT2RI2011422, NT2RI2011450, NT2RI2011683, NT2RI2011803, NT2RI2012659, NT2RI2012990, NT2RI2013345, NT2RI2013373, NT2RI2014247, NT2RI2014551, NT2RI2014683, NT2RI2014733, NT2RI2015239, NT2RI2016128, NT2RI2016134, NT2RI2017529, NT2RI2018311, NT2RI2018363, NT2RI2018883, NT2RI2018950, NT2RI2019751, NT2RI2019826, NT2RI2020390, NT2RI2020703, NT2RI2021463, NT2RI2021625, NT2RI2022468, NT2RI2022584, NT2RI2023303, NT2RI2023671, NT2RI2024008, NT2RI2024460, NT2RI2024496, NT2RI2025075, NT2RI2025255, NT2RI2025564, NT2RI2025565, NT2RI2025909, NT2RI2025957, NT2RI2025976, NT2RI2026758, NT2RI2027081, NT2RI2027157, NT2RI2027224, NT2RI2027323, NT2RI2027396, NT2RI2027484, NT2RI2027975, NT2RI2028213, NT2RI2028222, NT2RI2028537, NT2RI2028642, NT2RI3000174, NT2RI3000213, NT2RI3000423, NT2RI3000622, NT2RI3001132, NT2RI3001263, NT2RI3001279, NT2RI3001348, NT2RI3001445, NT2RI3001458, NT2RI3001573, NT2RI3001967, NT2RI3002303, NT2RI3002557, NT2RI3002842, NT2RI3003027, NT2RI3003031, NT2RI3003095, NT2RI3003162, NT2RI3003362, NT2RI3003382, NT2RI3003409, NT2RI3003738, NT2RI3003925, NT2RI3004133, NT2RI3004381, NT2RI3004510, NT2RI3005202, NT2RI3005403, NT2RI3005416, NT2RI3005861, NT2RI3005923, NT2RI3005928, NT2RI3006132, NT2RI3006171, NT2RI3006376, NT2RI3006666, NT2RI3006673, NT2RI3006796, NT2RI3007065, NT2RI3007095, NT2RI3007158, NT2RI3007167, NT2RI3007213, NT2RI3007291, NT2RI3007443, NT2RI3007684, NT2RI3007757, NT2RI3007878, NT2RI3007978, NT2RI3008055, NT2RI3008162, NT2RI3008179, NT2RI3008228, NT2RI3008442, NT2RI3008652, NT2RI3008697, NT2RI3008974, NT2RI3009480, NT2RI3009524, NT2RP6000005, NT2RP6000008, NT2RP6000032, NT2RP6000033, NT2RP6000059, NT2RP6000060, NT2RP6000077, NT2RP6000086, NT2RP6000119, NT2RP6000127, NT2RP6000140, NT2RP6000150, NT2RP7000041, NT2RP7000086, NT2RP7000109, NT2RP7000112, NT2RP7000311, NT2RP7000359, NT2RP7000364, NT2RP7000380, NT2RP7000391, NT2RP7000425, NT2RP7000579, NT2RP7000812, NT2RP7000926, NT2RP7001074, NT2RP7001306, NT2RP7001319, NT2RP7001335, NT2RP7001364, NT2RP7001475, NT2RP7001532, NT2RP7001591, NT2RP7001602, NT2RP7001856, NT2RP7002064, NT2RP7002151, NT2RP7002163, NT2RP7002243, NT2RP7002282, NT2RP7002376, NT2RP7002478, NT2RP7002554, NT2RP7002594, NT2RP7002603, NT2RP7002650, NT2RP7002829, NT2RP7002841, NT2RP7002875, NT2RP7002978, NT2RP7003025, NT2RP7003050, NT2RP7003055, NT2RP7003084, NT2RP7003091, NT2RP7003107, NT2RP7003134, NT2RP7003148, NT2RP7003439, NT2RP7003511, NT2RP7003632, NT2RP7004027, NT2RP7004080, NT2RP7004114, NT2RP7004123, NT2RP7004348, NT2RP7004358, NT2RP7004396, NT2RP7004428, NT2RP7004481, NT2RP7004541, NT2RP7004559, NT2RP7004656, NT2RP7004722, NT2RP7004766, NT2RP7004790, NT2RP7004884, NT2RP7004915, NT2RP7004925, NT2RP7004961, NT2RP7004964, NT2RP7004975, NT2RP7005118, NT2RP7005205, NT2RP7005219, NT2RP7005323, NT2RP7005468, NT2RP7005493, NT2RP7005513, NT2RP7005629, NT2RP7005631, NT2RP7005669, NT2RP7005846, NT2RP7006075, NT2RP7006141, NT2RP7006160, NT2RP7006162, NT2RP7006263, NT2RP7006374, NT2RP7006395, NT2RP7006408, NT2RP7006457, NT2RP7006490, NT2RP7006601, NT2RP7006619, NT2RP7006621, NT2RP7006636, NT2RP7006701, NT2RP7006853, NT2RP7006886, NT2RP7006887, NT2RP7006980, NT2RP7006986, NT2RP7006995, NT2RP7007177, NT2RP7007221, NT2RP7007226, NT2RP7007269, NT2RP7007359, NT2RP7007406, NT2RP7007480, NT2RP7007504, NT2RP7007530, NT2RP7007594, NT2RP7007610, NT2RP7007617, NT2RP7007766, NT2RP7007925, NT2RP7007975, NT2RP7008013, NT2RP7008015, NT2RP7008133, NT2RP7008137, NT2RP7008142, NT2RP7008144, NT2RP7008161, NT2RP7008360, NT2RP7008396, NT2RP7008406, NT2RP7008435, NT2RP7008441, NT2RP7008454, NT2RP7008487, NT2RP7008544, NT2RP7008550, NT2RP7008557, NT2RP7008623, NT2RP7008657, NT2RP7008714, NT2RP7008720, NT2RP7008855, NT2RP7008863, NT2RP7009012, NT2RP7009019, NT2RP7009030, NT2RP7009097, NT2RP7009168, NT2RP7009215, NT2RP7009225, NT2RP7009236, NT2RP7009253, NT2RP7009267, NT2RP7009363, NT2RP7009397, NT2RP7009429, NT2RP7009439, NT2RP7009466, NT2RP7009498, NT2RP7009502, NT2RP7009507, NT2RP7009577, NT2RP7009743, NT2RP7009867, NT2RP7010109, NT2RP7010128, NT2RP7010235, NT2RP7010275, NT2RP7010521, NT2RP7010599, NT2RP7010612, NT2RP7010817, NT2RP7011086, NT2RP7011132, NT2RP7011268, NT2RP7011318, NT2RP7011452, NT2RP7011570, NT2RP7011721, NT2RP7011909, NT2RP7012291, NT2RP7012516, NT2RP7012776, NT2RP7013002, NT2RP7013374, NT2RP7013499, NT2RP7013573, NT2RP7013729, NT2RP7013764, NT2RP7013795, NT2RP7013999, NT2RP7014005, NT2RP7014178, NT2RP7014348, NT2RP7014420, NT2RP7014583, NT2RP7014721, NT2RP7014743, NT2RP7014778, NT2RP7014906, NT2RP7015080, NT2RP7015431, NT2RP7015503, NT2RP7015512, NT2RP7015676, NT2RP7015789, NT2RP7015996, NT2RP7016508, NT2RP7016574, NT2RP7016622, NT2RP7016911, NT2RP7017139, NT2RP7017284, NT2RP7017365, NT2RP7017474, NT2RP7017546, NT2RP7017567, NT2RP7017795, NT2RP7017971, NT2RP7018032, NT2RP7018126, NT2RP7018197, NT2RP7018206, NT2RP7018340, NT2RP7018586, NT2RP7018802, NT2RP7018871, NT2RP7019064, NT2RP7019135, NT2RP7019273, NT2RP7019367, NT2RP7019401, NT2RP7019445, NT2RP7019543, NT2RP7019682, NT2RP7019835, NT2RP7020112, NT2RP7020343, NT2RP7020379, NT2RP8000137, NT2RP8000296, NT2RP8000483, NT2RP8000521, NT2RP8000633, NT2RP8001363, NT2RP8001407, NT2RP8001584, NT2RP8001604, NT2RP8001605, NT2RP8003490, NT2RP8003657, NT2RP8003787, NT2RP8004306, NT2RP8005546, NT2RP8006452, NT2RP8006521, NT2RP8007416, NT2RP8007503, NT2RP8007715, NT2RP8008057, NT2RP8009248, NTONG1000006, NTONG1000047, NTONG1000052, NTONG1000075, NTONG1000087, NTONG1000123, NTONG1000130, NTONG1000161, NTONG1000172, NTONG1000182, NTONG1000213, NTONG1000214, NTONG1000247, NTONG1000257, NTONG1000264, NTONG2000040, NTONG2000107, NTONG2000231, NTONG2000363, NTONG2000492, NTONG2000499, NTONG2000531, NTONG2000583, NTONG2000858, NTONG2000876, NTONG2000966, NTONG2001014, NTONG2001079, NTONG2001157, NTONG2001173, NTONG2001220, NTONG2001362, NTONG2001428, NTONG2001532, NTONG2001612, NTONG2001619, NTONG2001642, NTONG2001657, NTONG2001676, NTONG2002278, NTONG2002807, NTONG2002948, NTONG2002970, NTONG2002985, NTONG2003158, NTONG2003210, NTONG2003316, NTONG2003409, NTONG2003515, NTONG2003805, NTONG2003839, NTONG2003852, NTONG2003897, NTONG2004095, NTONG2004308, NTONG2004521, NTONG2004614, NTONG2004690, NTONG2004806, NTONG2004829, NTONG2004918, NTONG2004991, NTONG2005062, NTONG2005086, NTONG2005137, NTONG2005153, NTONG2005265, NTONG2005277, NTONG2005363, NTONG2005373, NTONG2005480, NTONG2005497, NTONG2005577, NTONG2005657, NTONG2005822, NTONG2005897, NTONG2005969, NTONG2006099, NTONG2006187, NTONG2006324, NTONG2006354, NTONG2006440, NTONG2006501, NTONG2006646, NTONG2006709, NTONG2006783, NTONG2007020, NTONG2007028, NTONG2007034, NTONG2007249, NTONG2007517, NTONG2007522, NTONG2007756, NTONG2008093, NTONG2008143, NTONG2008365, NTONG2008522, NTONG2008672, NTONG2008862, NTONG2008939, NTONG2009060, NTONG2009068, NTONG2009229, NTONG2009233, NTONG2009468, OCBBF1000016, OCBBF1000030, OCBBF1000042, OCBBF1000049, OCBBF1000054, OCBBF1000067, OCBBF1000080, OCBBF1000085, OCBBF1000091, OCBBF1000104, OCBBF1000114, OCBBF1000118, OCBBF1000119, OCBBF1000122, OCBBF1000130, OCBBF1000138, OCBBF1000145, OCBBF1000146, OCBBF1000153, OCBBF1000175, OCBBF1000192, OCBBF1000254, OCBBF2000126, OCBBF2000178, OCBBF2000231, OCBBF2000277, OCBBF2000287, OCBBF2000323, OCBBF2000452, OCBBF2000522, OCBBF2000677, OCBBF2000703, OCBBF2000712, OCBBF2000719, OCBBF2000824, OCBBF2000904, OCBBF2000998, OCBBF2001075, OCBBF2001101, OCBBF2001124, OCBBF2001176, OCBBF2001196, OCBBF2001307, OCBBF2001323, OCBBF2001389, OCBBF2001402, OCBBF2001473, OCBBF2001494, OCBBF2001527, OCBBF2001639, OCBBF2001681, OCBBF2001706, OCBBF2001749, OCBBF2001910, OCBBF2001931, OCBBF2001961, OCBBF2001983, OCBBF2002015, OCBBF2002124, OCBBF2002161, OCBBF2002290, OCBBF2002357, OCBBF2002376, OCBBF2002615, OCBBF2002626, OCBBF2002663, OCBBF2002805, OCBBF2002920, OCBBF2002980, OCBBF2003028, OCBBF2003091, OCBBF2003246, OCBBF2003327, OCBBF2003543, OCBBF2003593, OCBBF2003744, OCBBF2004038, OCBBF2004104, OCBBF2004147, OCBBF2004168, OCBBF2004235, OCBBF2004259, OCBBF2004385, OCBBF2004418, OCBBF2004478, OCBBF2004482, OCBBF2004533, OCBBF2004567, OCBBF2004612, OCBBF2004647, OCBBF2004669, OCBBF2004826, OCBBF2004866, OCBBF2004883, OCBBF2004889, OCBBF2004930, OCBBF2004984, OCBBF2005066, OCBBF2005077, OCBBF2005161, OCBBF2005343, OCBBF2005349, OCBBF2005373, OCBBF2005420, OCBBF2005428, OCBBF2005433, OCBBF2005546, OCBBF2005843, OCBBF2005901, OCBBF2006030, OCBBF2006058, OCBBF2006113, OCBBF2006148, OCBBF2006154, OCBBF2006172, OCBBF2006214, OCBBF2006241, OCBBF2006313, OCBBF2006388, OCBBF2006438, OCBBF2006567, OCBBF2006624, OCBBF2006639, OCBBF2006660, OCBBF2006764, OCBBF2006849, OCBBF2006859, OCBBF2006972, OCBBF2007039, OCBBF2007051, OCBBF2007068, OCBBF2007114, OCBBF2007121, OCBBF2007184, OCBBF2007194, OCBBF2007196, OCBBF2007238, OCBBF2007414, OCBBF2007428, OCBBF2007478, OCBBF2007485, OCBBF2007520, OCBBF2007555, OCBBF2007610, OCBBF2007622, OCBBF2007756, OCBBF2007762, OCBBF2007931, OCBBF2007946, OCBBF2008005, OCBBF2008116, OCBBF2008138, OCBBF2008283, OCBBF2008330, OCBBF2008340, OCBBF2008366, OCBBF2008466, OCBBF2008483, OCBBF2008511, OCBBF2008520, OCBBF2008569, OCBBF2008586, OCBBF2008640, OCBBF2008691, OCBBF2008701, OCBBF2008724, OCBBF2008760, OCBBF2008768, OCBBF2008775, OCBBF2008790, OCBBF2008814, OCBBF2008822, OCBBF2009095, OCBBF2009115, OCBBF2009301, OCBBF2009352, OCBBF2009391, OCBBF2009536, OCBBF2009571, OCBBF2009583, OCBBF2009603, OCBBF2009788, OCBBF2009920, OCBBF2009926, OCBBF2010040, OCBBF2010140, OCBBF2010281, OCBBF2010313, OCBBF2010404, OCBBF2010416, OCBBF2010420, OCBBF2010557, OCBBF2010604, OCBBF2010709, OCBBF2010792, OCBBF2010841, OCBBF2010843, OCBBF2010858, OCBBF2010863, OCBBF2010871, OCBBF2010931, OCBBF2010945, OCBBF2010978, OCBBF2010989, OCBBF2011073, OCBBF2011137, OCBBF2011160, OCBBF2011177, OCBBF2011228, OCBBF2011232, OCBBF2011283, OCBBF2011311, OCBBF2011625, OCBBF2011669, OCBBF2011685, OCBBF2011706, OCBBF2011722, OCBBF2011767, OCBBF2011855, OCBBF2011872, OCBBF2011887, OCBBF2011897, OCBBF2011914, OCBBF2011960, OCBBF2011981, OCBBF2012028, OCBBF2012039, OCBBF2012095, OCBBF2012139, OCBBF2012191, OCBBF2012262, OCBBF2012320, OCBBF2012436, OCBBF2012525, OCBBF2012678, OCBBF2012704, OCBBF2012714, OCBBF2012755, OCBBF2012812, OCBBF2012881, OCBBF2012908, OCBBF2012936, OCBBF2012990, OCBBF2013011, OCBBF2013049, OCBBF2013091, OCBBF2013123, OCBBF2013127, OCBBF2013149, OCBBF2013208, OCBBF2013285, OCBBF2013319, OCBBF2013324, OCBBF2013366, OCBBF2013481, OCBBF2013507, OCBBF2013721, OCBBF2013789, OCBBF2013843, OCBBF2013883, OCBBF2013926, OCBBF2014052, OCBBF2014064, OCBBF2014089, OCBBF2014322, OCBBF2014386, OCBBF2014576, OCBBF2014707, OCBBF2014745, OCBBF2014828, OCBBF2014880, OCBBF2014928, OCBBF2015031, OCBBF2015081, OCBBF2015115, OCBBF2015232, OCBBF2015233, OCBBF2015285, OCBBF2015335, OCBBF2015503, OCBBF2015506, OCBBF2015599, OCBBF2015645, OCBBF2015659, OCBBF2015751, OCBBF2015931, OCBBF2015980, OCBBF2016038, OCBBF2016405, OCBBF2016467, OCBBF2016590, OCBBF2016591, OCBBF2016612, OCBBF2016689, OCBBF2016690, OCBBF2016729, OCBBF2016841, OCBBF2017035, OCBBF2017055, OCBBF2017069, OCBBF2017306, OCBBF2017325, OCBBF2017489, OCBBF2017516, OCBBF2017665, OCBBF2017882, OCBBF2017888, OCBBF2018012, OCBBF2018014, OCBBF2018084, OCBBF2018167, OCBBF2018206, OCBBF2018229, OCBBF2018234, OCBBF2018362, OCBBF2018380, OCBBF2018581, OCBBF2018663, OCBBF2018687, OCBBF2018828, OCBBF2018934, OCBBF2019108, OCBBF2019195, OCBBF2019327, OCBBF2019684, OCBBF2019761, OCBBF2019823, OCBBF2019950, OCBBF2020318, OCBBF2020343, OCBBF2020453, OCBBF2020741, OCBBF2020801, OCBBF2020825, OCBBF2020838, OCBBF2021214, OCBBF2021286, OCBBF2021323, OCBBF2021518, OCBBF2021788, OCBBF2021833, OCBBF2022351, OCBBF2022573, OCBBF2022574, OCBBF2023162, OCBBF2023598, OCBBF2023643, OCBBF2024463, OCBBF2024589, OCBBF2024719, OCBBF2024779, OCBBF2024781, OCBBF2025028, OCBBF2025115, OCBBF2025198, OCBBF2025451, OCBBF2025458, OCBBF2025527, OCBBF2025631, OCBBF2025730, OCBBF2026025, OCBBF2026035, OCBBF2026144, OCBBF2026368, OCBBF2026645, OCBBF2026649, OCBBF2026690, OCBBF2026981, OCBBF2027148, OCBBF2027197, OCBBF2027354, OCBBF2027423, OCBBF2027478, OCBBF2027481, OCBBF2027511, OCBBF2027661, OCBBF2027728, OCBBF2027782, OCBBF2027868, OCBBF2028055, OCBBF2028173, OCBBF2028421, OCBBF2029471, OCBBF2029901, OCBBF2030116, OCBBF2030329, OCBBF2030354, OCBBF2030517, OCBBF2030574, OCBBF2030708, OCBBF2030927, OCBBF2030963, OCBBF2031167, OCBBF2031198, OCBBF2031366, OCBBF2031561, OCBBF2032152, OCBBF2032274, OCBBF2032539, OCBBF2032590, OCBBF2032599, OCBBF2032611, OCBBF2032671, OCBBF2033295, OCBBF2033413, OCBBF2033869, OCBBF2033948, OCBBF2034333, OCBBF2034529, OCBBF2034637, OCBBF2034906, OCBBF2035110, OCBBF2035214, OCBBF2035226, OCBBF2035390, OCBBF2035564, OCBBF2035658, OCBBF2035823, OCBBF2035885, OCBBF2035916, OCBBF2036019, OCBBF2036031, OCBBF2036225, OCBBF2036476, OCBBF2036743, OCBBF2036752, OCBBF2037068, OCBBF2037340, OCBBF2037398, OCBBF2037464, OCBBF2037547, OCBBF2037598, OCBBF2037638, OCBBF2038238, OCBBF2038285, OCBBF2038317, OCBBF3000097, OCBBF3000213, OCBBF3000372, OCBBF3000380, OCBBF3000743, OCBBF3000830, OCBBF3001076, OCBBF3001202, OCBBF3001333, OCBBF3001616, OCBBF3002553, OCBBF3002600, OCBBF3002654, OCBBF3003103, OCBBF3003209, OCBBF3003592, OCBBF3003745, OCBBF3003761, OCBBF3004264, OCBBF3004314, OCBBF3004487, OCBBF3004972, OCBBF3005330, OCBBF3005597, OCBBF3005843, OCBBF3006802, OCBBF3006986, OCBBF3007078, OCBBF3007704, OCBBF3008230, OCBBF3008392, OCBBF3008835, OCBBF3009192, OCBBF3009279, PANCR1000012, PANCR1000021, PANCR1000081, PANCR1000086, PANCR1000091, PANCR1000185, PEBLM1000024, PEBLM1000029, PEBLM1000034, PEBLM1000062, PEBLM1000068, PEBLM1000071, PEBLM1000083, PEBLM1000147, PEBLM1000174, PEBLM1000180, PEBLM2000112, PEBLM2000126, PEBLM2000147, PEBLM2000170, PEBLM2000180, PEBLM2000213, PEBLM2000248, PEBLM2000270, PEBLM2000321, PEBLM2000333, PEBLM2000395, PEBLM2000479, PEBLM2000502, PEBLM2001312, PEBLM2001465, PEBLM2001488, PEBLM2002432, PEBLM2002455, PEBLM2002594, PEBLM2002887, PEBLM2003426, PEBLM2003765, PEBLM2003935, PEBLM2004015, PEBLM2004216, PEBLM2004290, PEBLM2004497, PEBLM2005282, PEBLM2005615, PEBLM2005632, PEBLM2005697, PEBLM2006031, PEBLM2006036, PEBLM2006049, PEBLM2006113, PEBLM2006135, PEBLM2006215, PEBLM2006283, PEBLM2006298, PEBLM2006366, PEBLM2006709, PEBLM2006912, PEBLM2007112, PEBLM2007140, PEBLM2007188, PEBLM2007296, PEBLM2007437, PEBLM2007447, PEBLM2007598, PEBLM2007832, PEBLM2007834, PEBLM2008106, PEBLM2008576, PEBLM2008605, PERIC1000025, PERIC1000147, PERIC2000180, PERIC2000214, PERIC2000386, PERIC2000387, PERIC2000422, PERIC2000473, PERIC2000478, PERIC2000889, PERIC2000914, PERIC2001227, PERIC2001228, PERIC2001379, PERIC2001504, PERIC2001703, PERIC2001764, PERIC2002243, PERIC2002272, PERIC2002452, PERIC2002766, PERIC2003001, PERIC2003090, PERIC2003287, PERIC2003349, PERIC2003452, PERIC2003699, PERIC2003720, PERIC2003834, PERIC2003919, PERIC2003957, PERIC2004028, PERIC2004131, PERIC2004259, PERIC2004379, PERIC2004429, PERIC2004510, PERIC2004613, PERIC2004909, PERIC2005111, PERIC2005117, PERIC2005305, PERIC2005347, PERIC2005370, PERIC2005936, PERIC2006035, PERIC2006121, PERIC2006443, PERIC2006945, PERIC2006960, PERIC2007439, PERIC2007914, PERIC2008008, PERIC2008385, PERIC2009001, PERIC2009086, PERIC2009329, PERIC2009566, PLACE5000001, PLACE5000037, PLACE5000058, PLACE5000066, PLACE5000070, PLACE5000080, PLACE5000105, PLACE5000115, PLACE5000116, PLACE5000129, PLACE5000139, PLACE5000153, PLACE5000171, PLACE5000172, PLACE5000178, PLACE5000245, PLACE5000260, PLACE5000282, PLACE5000297, PLACE5000372, PLACE5000492, PLACE5000522, PLACE5000527, PLACE6000012, PLACE6000044, PLACE6000055, PLACE6000070, PLACE6000137, PLACE6000191, PLACE6000205, PLACE6000231, PLACE6000296, PLACE6000314, PLACE6000325, PLACE6000348, PLACE6000371, PLACE6000424, PLACE6000426, PLACE6000429, PLACE6000450, PLACE6000523, PLACE6000550, PLACE6000552, PLACE6000555, PLACE6000619, PLACE6000630, PLACE6000953, PLACE6001118, PLACE6001153, PLACE6001185, PLACE6001262, PLACE6001294, PLACE6001443, PLACE6001536, PLACE6001557, PLACE6001712, PLACE6001740, PLACE6001823, PLACE6001886, PLACE6001923, PLACE6001925, PLACE6001933, PLACE6002011, PLACE6002016, PLACE6002056, PLACE6002157, PLACE6002312, PLACE6002323, PLACE6002345, PLACE6002419, PLACE6002462, PLACE6002647, PLACE6002668, PLACE6002692, PLACE6002699, PLACE6002710, PLACE6002871, PLACE6002949, PLACE6003004, PLACE6003094, PLACE6003109, PLACE6003204, PLACE6003218, PLACE6003372, PLACE6003399, PLACE6003539, PLACE6003621, PLACE6003705, PLACE6003740, PLACE6003745, PLACE6003771, PLACE6003796, PLACE6003839, PLACE6003850, PLACE6004005, PLACE6004101, PLACE6004219, PLACE6004336, PLACE6004368, PLACE6004380, PLACE6004396, PLACE6004454, PLACE6004464, PLACE6004491, PLACE6004663, PLACE6004687, PLACE6004738, PLACE6004931, PLACE6004966, PLACE6004993, PLACE6005007, PLACE6005029, PLACE6005108, PLACE6005234, PLACE6005283, PLACE6005294, PLACE6005328, PLACE6005351, PLACE6005423, PLACE6005487, PLACE6005535, PLACE6005546, PLACE6005559, PLACE6005579, PLACE6005691, PLACE6005786, PLACE6006042, PLACE6006077, PLACE6006137, PLACE6006158, PLACE6006186, PLACE6006217, PLACE6006222, PLACE6006266, PLACE6006287, PLACE6006394, PLACE6006474, PLACE6006566, PLACE6006697, PLACE6006822, PLACE6006871, PLACE6006905, PLACE6006988, PLACE6007050, PLACE6007180, PLACE6007239, PLACE6007242, PLACE6007309, PLACE6007373, PLACE6007380, PLACE6007433, PLACE6007436, PLACE6007482, PLACE6007687, PLACE6007787, PLACE6007798, PLACE6007807, PLACE6007925, PLACE6008036, PLACE6008094, PLACE6008126, PLACE6008285, PLACE6008444, PLACE6008453, PLACE6008640, PLACE6008750, PLACE6008768, PLACE6008824, PLACE6008989, PLACE6009006, PLACE6009008, PLACE6009228, PLACE6009237, PLACE6009338, PLACE6009419, PLACE6009430, PLACE6009482, PLACE6009524, PLACE6009527, PLACE6009560, PLACE6009590, PLACE6009821, PLACE6009835, PLACE6009853, PLACE6010463, PLACE6010485, PLACE6010568, PLACE6010701, PLACE6010704, PLACE6010732, PLACE6010765, PLACE6010848, PLACE6010925, PLACE6010936, PLACE6010991, PLACE6011041, PLACE6011102, PLACE6011156, PLACE6011211, PLACE6011260, PLACE6011627, PLACE6011774, PLACE6011881, PLACE6011907, PLACE6011970, PLACE6011975, PLACE6012108, PLACE6012168, PLACE6012297, PLACE6012308, PLACE6012574, PLACE6012908, PLACE6012936, PLACE6012942, PLACE6013232, PLACE6013288, PLACE6013386, PLACE6013400, PLACE6013650, PLACE6013672, PLACE6013883, PLACE6013884, PLACE6013885, PLACE6014043, PLACE6014064, PLACE6014516, PLACE6014882, PLACE6015211, PLACE6015322, PLACE6015445, PLACE6015460, PLACE6015591, PLACE6015729, PLACE6015731, PLACE6015939, PLACE6016030, PLACE6016093, PLACE6016105, PLACE6016160, PLACE6016210, PLACE6016254, PLACE6016942, PLACE6016984, PLACE6017002, PLACE6017431, PLACE6017564, PLACE6017578, PLACE6017626, PLACE6017701, PLACE6017714, PLACE6018107, PLACE6018187, PLACE6018235, PLACE6018441, PLACE6018487, PLACE6018497, PLACE6018769, PLACE6018834, PLACE6018843, PLACE6018863, PLACE6018938, PLACE6019385, PLACE6019542, PLACE6019600, PLACE6019674, PLACE6019676, PLACE6019701, PLACE6019932, PLACE6020031, PLACE6020145, PLACE7000167, PLACE7000170, PLACE7000266, PLACE7000333, PLACE7000410, PLACE7000502, PLACE7000707, PLACE7001544, PLACE7001759, PLACE7001936, PLACE7002303, PLACE7002641, PLACE7003639, PLACE7003657, PLACE7003684, PLACE7003985, PLACE7004961, PLACE7005169, PLACE7005671, PLACE7005840, PLACE7006051, PLACE7006090, PLACE7006240, PLACE7006268, PLACE7006275, PLACE7006498, PLACE7006540, PLACE7007379, PLACE7007644, PLACE7007973, PLACE7008136, PLACE7008261, PLACE7008431, PLACE7008623, PLACE7008766, PLACE7009563, PROST1000033, PROST1000039, PROST1000065, PROST1000083, PROST1000085, PROST1000110, PROST1000120, PROST1000123, PROST1000136, PROST1000145, PROST1000152, PROST1000167, PROST1000184, PROST1000215, PROST1000217, PROST1000246, PROST1000262, PROST1000272, PROST1000298, PROST1000322, PROST1000334, PROST1000343, PROST1000362, PROST1000377, PROST1000383, PROST1000412, PROST1000419, PROST1000451, PROST1000480, PROST1000485, PROST1000493, PROST1000512, PROST1000526, PROST1000527, PROST1000528, PROST1000536, PROST1000559, PROST1000575, PROST2000036, PROST2000053, PROST2000067, PROST2000105, PROST2000143, PROST2000162, PROST2000165, PROST2000176, PROST2000203, PROST2000206, PROST2000212, PROST2000241, PROST2000267, PROST2000273, PROST2000274, PROST2000277, PROST2000337, PROST2000432, PROST2000452, PROST2000463, PROST2000470, PROST2000505, PROST2000572, PROST2000717, PROST2000760, PROST2000761, PROST2000835, PROST2000893, PROST2000961, PROST2001002, PROST2001116, PROST2001138, PROST2001213, PROST2001283, PROST2001414, PROST2001415, PROST2001465, PROST2001540, PROST2001599, PROST2001611, PROST2001636, PROST2001739, PROST2001796, PROST2001805, PROST2001823, PROST2001899, PROST2001998, PROST2002078, PROST2002101, PROST2002162, PROST2002212, PROST2002227, PROST2002338, PROST2002425, PROST2002488, PROST2002489, PROST2002527, PROST2002591, PROST2002602, PROST2002633, PROST2002651, PROST2002682, PROST2002685, PROST2002722, PROST2002736, PROST2002842, PROST2002897, PROST2002906, PROST2002927, PROST2002960, PROST2003102, PROST2003117, PROST2003210, PROST2003302, PROST2003303, PROST2003324, PROST2003340, PROST2003396, PROST2003428, PROST2003472, PROST2003517, PROST2003537, PROST2003563, PROST2003577, PROST2003583, PROST2003586, PROST2003628, PROST2003635, PROST2003674, PROST2003676, PROST2003725, PROST2003732, PROST2003775, PROST2003922, PROST2003930, PROST2004115, PROST2004142, PROST2004146, PROST2004161, PROST2004251, PROST2004332, PROST2004481, PROST2004526, PROST2004570, PROST2004727, PROST2004742, PROST2004744, PROST2004817, PROST2005039, PROST2005067, PROST2005076, PROST2005093, PROST2005121, PROST2005131, PROST2005143, PROST2005228, PROST2005272, PROST2005285, PROST2005426, PROST2005466, PROST2005630, PROST2005683, PROST2005788, PROST2005793, PROST2005880, PROST2005886, PROST2005904, PROST2005919, PROST2005943, PROST2006008, PROST2006020, PROST2006030, PROST2006196, PROST2006201, PROST2006260, PROST2006450, PROST2006491, PROST2006510, PROST2006536, PROST2006579, PROST2006688, PROST2006766, PROST2006782, PROST2006933, PROST2006988, PROST2007122, PROST2007200, PROST2007237, PROST2007248, PROST2007289, PROST2007328, PROST2007382, PROST2007389, PROST2007416, PROST2007528, PROST2007818, PROST2007950, PROST2007956, PROST2007974, PROST2007988, PROST2008079, PROST2008088, PROST2008243, PROST2008245, PROST2008268, PROST2008271, PROST2008360, PROST2008447, PROST2008468, PROST2008472, PROST2008516, PROST2008724, PROST2008835, PROST2008993, PROST2009022, PROST2009208, PROST2009222, PROST2009254, PROST2009273, PROST2009320, PROST2009347, PROST2009365, PROST2009388, PROST2009400, PROST2009470, PROST2009483, PROST2009571, PROST2009731, PROST2009736, PROST2009795, PROST2009901, PROST2009909, PROST2010046, PROST2010219, PROST2010250, PROST2010318, PROST2010326, PROST2010382, PROST2010400, PROST2010545, PROST2010606, PROST2010782, PROST2010885, PROST2011012, PROST2011038, PROST2011297, PROST2011410, PROST2011439, PROST2011482, PROST2011631, PROST2011660, PROST2012005, PROST2012016, PROST2012088, PROST2012140, PROST2012157, PROST2012190, PROST2012249, PROST2012353, PROST2012400, PROST2012504, PROST2012542, PROST2012550, PROST2012740, PROST2012780, PROST2012888, PROST2012890, PROST2013032, PROST2013053, PROST2013260, PROST2013327, PROST2013531, PROST2013605, PROST2013627, PROST2013873, PROST2013880, PROST2014422, PROST2014585, PROST2014601, PROST2014659, PROST2014862, PROST2014916, PROST2014925, PROST2015124, PROST2015198, PROST2015243, PROST2015246, PROST2015251, PROST2015287, PROST2015332, PROST2015457, PROST2015464, PROST2015537, PROST2015545, PROST2015551, PROST2015636, PROST2015710, PROST2015756, PROST2015877, PROST2015900, PROST2015924, PROST2015932, PROST2016195, PROST2016246, PROST2016351, PROST2016379, PROST2016444, PROST2016462, PROST20164999, PROST2016512, PROST2016566, PROST2016582, PROST2016668, PROST2016684, PROST2016777, PROST2016829, PROST2016860, PROST2016918, PROST2016980, PROST2017098, PROST2017128, PROST2017367, PROST2017413, PROST2017441, PROST2017529, PROST2017578, PROST2017612, PROST2017617, PROST2017692, PROST2017700, PROST2017701, PROST2017729, PROST2017836, PROST2017910, PROST2017972, PROST2018030, PROST2018090, PROST2018235, PROST2018437, PROST2018487, PROST2018511, PROST2018583, PROST2018588, PROST2018607, PROST2018788, PROST2018902, PROST2018922, PROST2018977, PROST2019296, PROST2019398, PROST2019487, PROST2019781, PUAEN1000039, PUAEN1000081, PUAEN1000085, PUAEN1000087, PUAEN1000121, PUAEN1000147, PUAEN1000175, PUAEN1000275, PUAEN1000276, PUAEN1000288, PUAEN2000080, PUAEN2000175, PUAEN2000312, PUAEN2000394, PUAEN2000497, PUAEN2000594, PUAEN2000684, PUAEN2000942, PUAEN2001260, PUAEN2001345, PUAEN2001526, PUAEN2001882, PUAEN2002473, PUAEN2002489, PUAEN2002552, PUAEN2002568, PUAEN2002616, PUAEN2002758, PUAEN2003018, PUAEN2003079, PUAEN2003116, PUAEN2003408, PUAEN2003517, PUAEN2003954, PUAEN2004067, PUAEN2004083, PUAEN2004400, PUAEN2004511, PUAEN2004525, PUAEN2004875, PUAEN2005110, PUAEN2005247, PUAEN2005588, PUAEN2005930, PUAEN2006029, PUAEN2006328, PUAEN2006335, PUAEN2006578, PUAEN2006639, PUAEN2006761, PUAEN2007350, PUAEN2007785, PUAEN2007898, PUAEN2008123, PUAEN2008228, PUAEN2008314, PUAEN2008515, PUAEN2008815, PUAEN2008939, PUAEN2008980, PUAEN2009174, PUAEN2009348, PUAEN2009534, PUAEN2009655, PUAEN2009795, PUAEN2009852, PUAEN2010346, PUAEN2010824, RECTM1000141, RECTM2000220, RECTM2000349, RECTM2000433, RECTM2000510, RECTM2001307, RECTM2001347, RECTM2001519, RECTM2001666, RECTM2001691, RECTM2001749, RECTM2002172, RECTM2002602, RECTM2002632, SALGL1000005, SALGL1000024, SALGL1000028, SALGL1000065, SALGL1000171, SKMUS1000030, SKMUS1000064, SKMUS1000067, SKMUS1000102, SKMUS1000104, SKMUS1000110, SKMUS1000118, SKMUS1000124, SKMUS1000129, SKMUS1000177, SKMUS2000020, SKMUS2000061, SKMUS2000074, SKMUS2000078, SKMUS2000117, SKMUS2000137, SKMUS2000198, SKMUS2000271, SKMUS2000287, SKMUS2000317, SKMUS2000330, SKMUS2000339, SKMUS2000343, SKMUS2000365, SKMUS2000380, SKMUS2000390, SKMUS2000416, SKMUS2000458, SKMUS2000467, SKMUS2000468, SKMUS2000515, SKMUS2000690, SKMUS2000701, SKMUS2000705, SKMUS2000710, SKMUS2000724, SKMUS2000726, SKMUS2000757, SKMUS2000774, SKMUS2000780, SKMUS2000821, SKMUS2000847, SKMUS2000863, SKMUS2000873, SKMUS2000894, SKMUS2000898, SKMUS2000945, SKMUS2000973, SKMUS2000980, SKMUS2001008, SKMUS2001014, SKMUS2001129, SKMUS2001157, SKMUS2001164, SKMUS2001199, SKMUS2001201, SKMUS2001215, SKMUS2001247, SKMUS2001254, SKMUS2001271, SKMUS2001287, SKMUS2001364, SKMUS2001398, SKMUS2001402, SKMUS2001412, SKMUS2001492, SKMUS2001501, SKMUS2001543, SKMUS2001580, SKMUS2001585, SKMUS2001608, SKMUS2001631, SKMUS2001662, SKMUS2001663, SKMUS2001668, SKMUS2001671, SKMUS2001683, SKMUS2001693, SKMUS2001695, SKMUS2001703, SKMUS2001740, SKMUS2001742, SKMUS2001823, SKMUS2001850, SKMUS2002077, SKMUS2002084, SKMUS2002153, SKMUS2002475, SKMUS2002602, SKMUS2002634, SKMUS2002693, SKMUS2002821, SKMUS2002840, SKMUS2002920, SKMUS2003034, SKMUS2003074, SKMUS2003168, SKMUS2003744, SKMUS2004047, SKMUS2004483, SKMUS2004667, SKMUS2004897, SKMUS2004903, SKMUS2005428, SKMUS2006394, SKMUS2006481, SKMUS2006755, SKMUS2007315, SKMUS2007359, SKMUS2007568, SKMUS2007740, SKMUS2007816, SKMUS2007915, SKMUS2008338, SKMUS2008407, SKMUS2008474, SKMUS2008585, SKMUS2008607, SKMUS2009190, SKMUS2009232, SKMUS2009479, SKMUS2009557, SKNMC1000110, SKNMC1000123, SKNMC1000124, SKNMC1000229, SKNMC1000251, SKNMC1000264, SKNMC2000224, SKNMC2000256, SKNMC2000356, SKNMC2000374, SKNMC2000583, SKNMC2000593, SKNMC2000612, SKNMC2000622, SKNMC2000698, SKNMC2000966, SKNMC2001113, SKNMC2001503, SKNMC2001555, SKNMC2001596, SKNMC2002402, SKNMC2003639, SKNMC2003924, SKNMC2003987, SKNMC2004457, SKNMC2004643, SKNMC2004651, SKNMC2005772, SKNMC2006173, SKNMC2006327, SKNMC2006998, SKNMC2007134, SKNMC2007502, SKNMC2007504, SKNMC2007961, SKNMC2009450, SKNSH1000002, SKNSH1000086, SKNSH1000174, SKNSH1000301, SKNSH1000308, SKNSH1000416, SKNSH2000051, SKNSH2000101, SKNSH2000163, SKNSH2000250, SKNSH2000319, SKNSH2000482, SKNSH2000516, SKNSH2000550, SKNSH2000716, SKNSH2000971, SKNSH2001222, SKNSH2001875, SKNSH2001931, SKNSH2002054, SKNSH2002325, SKNSH2002768, SKNSH2002866, SKNSH2003064, SKNSH2003174, SKNSH2003422, SKNSH2003466, SKNSH2003483, SKNSH2003528, SKNSH2004039, SKNSH2005061, SKNSH2005120, SKNSH2005194, SKNSH2005792, SKNSH2005816, SKNSH2005981, SKNSH2006234, SKNSH2006304, SKNSH2006432, SKNSH2006822, SKNSH2007142, SKNSH2007149, SKNSH2007429, SKNSH2007739, SKNSH2008043, SKNSH2008940, SKNSH2008969, SKNSH2009197, SKNSH2009357, SKNSH2009435, SKNSH2009991, SKNSH2010015, SMINT1000012, SMINT1000039, SMINT1000042, SMINT1000048, SMINT1000051, SMINT1000054, SMINT1000071, SMINT1000075, SMINT1000078, SMINT1000091, SMINT1000100, SMINT1000103, SMINT1000118, SMINT1000131, SMINT1000137, SMINT1000192, SMINT2000007, SMINT2000032, SMINT2000040, SMINT2000060, SMINT2000073, SMINT2000084, SMINT2000145, SMINT2000159, SMINT2000176, SMINT2000185, SMINT2000227, SMINT2000229, SMINT2000232, SMINT2000239, SMINT2000267, SMINT2000277, SMINT2000396, SMINT2000400, SMINT2000468, SMINT2000518, SMINT2000529, SMINT2000530, SMINT2000537, SMINT2000538, SMINT2000541, SMINT2000558, SMINT2000562, SMINT2000568, SMINT2000602, SMINT2000609, SMINT2000747, SMINT2000811, SMINT2000824, SMINT2000984, SMINT2001114, SMINT2001158, SMINT2001183, SMINT2001199, SMINT2001222, SMINT2001348, SMINT2001397, SMINT2001458, SMINT2001461, SMINT2001535, SMINT2001559, SMINT2001609, SMINT2001615, SMINT2001683, SMINT2001731, SMINT2001950, SMINT2002126, SMINT2002159, SMINT2002202, SMINT2002210, SMINT2002224, SMINT2002281, SMINT2002311, SMINT2002328, SMINT2002414, SMINT2002457, SMINT2002620, SMINT2002743, SMINT2002778, SMINT2002880, SMINT2002884, SMINT2002899, SMINT2002974, SMINT2002976, SMINT2003003, SMINT2003128, SMINT2003150, SMINT2003317, SMINT2003340, SMINT2003386, SMINT2003423, SMINT2003505, SMINT2003551, SMINT2003569, SMINT2003641, SMINT2003644, SMINT2003866, SMINT2004023, SMINT2004037, SMINT2004047, SMINT2004086, SMINT2004144, SMINT2004280, SMINT2004339, SMINT2004350, SMINT2004414, SMINT2004473, SMINT2004547, SMINT2004583, SMINT2004729, SMINT2004781, SMINT2004891, SMINT2004909, SMINT2004972, SMINT2004992, SMINT2005075, SMINT2005161, SMINT2005174, SMINT2005213, SMINT2005330, SMINT2005387, SMINT2005402, SMINT2005405, SMINT2005621, SMINT2005623, SMINT2005624, SMINT2005688, SMINT2005800, SMINT2005956, SMINT2006078, SMINT2006205, SMINT2006331, SMINT2006596, SMINT2006641, SMINT2006648, SMINT2006708, SMINT2006716, SMINT2007062, SMINT2007101, SMINT2007140, SMINT2007187, SMINT2007219, SMINT2007294, SMINT2007365, SMINT2007391, SMINT2007433, SMINT2007508, SMINT2007526, SMINT2007579, SMINT2007647, SMINT2007790, SMINT2007792, SMINT2007796, SMINT2007867, SMINT2007932, SMINT2008042, SMINT2008054, SMINT2008133, SMINT2008277, SMINT2008329, SMINT2008455, SMINT2008491, SMINT2008531, SMINT2008545, SMINT2008558, SMINT2008590, SMINT2008625, SMINT2008672, SMINT2008690, SMINT2008715, SMINT2008720, SMINT2008817, SMINT2008844, SMINT2008869, SMINT2008917, SMINT2009119, SMINT2009121, SMINT2009212, SMINT2009216, SMINT2009233, SMINT2009259, SMINT2009272, SMINT2009363, SMINT2009415, SMINT2009468, SMINT2009505, SMINT2009529, SMINT2009832, SMINT2009895, SMINT2009902, SMINT2009973, SMINT2010015, SMINT2010068, SMINT2010076, SMINT2010084, SMINT2010144, SMINT2010200, SMINT2010278, SMINT2010324, SMINT2010326, SMINT2010369, SMINT2010426, SMINT2010500, SMINT2010533, SMINT2010629, SMINT2010672, SMINT2010753, SMINT2010853, SMINT2010897, SMINT2010959, SMINT2010997, SMINT2011033, SMINT2011066, SMINT2011273, SMINT2011311, SMINT2011406, SMINT2011509, SMINT2011567, SMINT2011588, SMINT2011656, SMINT2011888, SMINT2011958, SMINT2012040, SMINT2012179, SMINT2012195, SMINT2012285, SMINT2012291, SMINT2012501, SMINT2012734, SMINT2012793, SMINT2013129, SMINT2013170, SMINT2013181, SMINT2013228, SMINT2013613, SMINT2013626, SMINT2013695, SMINT2013833, SMINT2013890, SMINT2014166, SMINT2014282, SMINT2014443, SMINT2014489, SMINT2014721, SMINT2015006, SMINT2015306, SMINT2015326, SMINT2015353, SMINT2015454, SMINT2015518, SMINT2015745, SMINT2015787, SMINT2015810, SMINT2016122, SMINT2016146, SMINT2016286, SMINT2016313, SMINT2016396, SMINT2016440, SMINT2016477, SMINT2016544, SMINT2016857, SMINT2017134, SMINT2017319, SMINT2017324, SMINT2017410, SMINT2017431, SMINT2017432, SMINT2017436, SMINT2017599, SMINT2017659, SMINT2017736, SMINT2017781, SMINT2017855, SMINT2017884, SMINT2017964, SMINT2017974, SMINT2018343, SMINT2018353, SMINT2018592, SMINT2018681, SMINT2019017, SMINT2019105, SMINT2019142, SMINT2019153, SMINT2019200, SPLEN1000013, SPLEN1000041, SPLEN1000049, SPLEN1000056, SPLEN1000087, SPLEN1000089, SPLEN1000091, SPLEN1000134, SPLEN1000139, SPLEN1000143, SPLEN1000144, SPLEN1000145, SPLEN1000156, SPLEN1000163, SPLEN1000178, SPLEN2000020, SPLEN2000047, SPLEN2000064, SPLEN2000072, SPLEN2000098, SPLEN2000126, SPLEN2000134, SPLEN2000143, SPLEN2000189, SPLEN2000197, SPLEN2000205, SPLEN2000210, SPLEN2000222, SPLEN2000242, SPLEN2000243, SPLEN2000247, SPLEN2000258, SPLEN2000270, SPLEN2000307, SPLEN2000310, SPLEN2000341, SPLEN2000350, SPLEN2000357, SPLEN2000364, SPLEN2000402, SPLEN2000414, SPLEN2000420, SPLEN2000443, SPLEN2000448, SPLEN2000450, SPLEN2000464, SPLEN2000496, SPLEN2000515, SPLEN2000537, SPLEN2000541, SPLEN2000607, SPLEN2000630, SPLEN2000695, SPLEN2000698, SPLEN2001135, SPLEN2001157, SPLEN2001176, SPLEN2001227, SPLEN2001245, SPLEN2001278, SPLEN2001354, SPLEN2001367, SPLEN2001383, SPLEN2001476, SPLEN2001503, SPLEN2001510, SPLEN2001626, SPLEN2001650, SPLEN2001689, SPLEN2001710, SPLEN2001781, SPLEN2001881, SPLEN2001912, SPLEN2001945, SPLEN2002007, SPLEN2002053, SPLEN2002147, SPLEN2002166, SPLEN2002175, SPLEN2002223, SPLEN2002272, SPLEN2002314, SPLEN2002343, SPLEN2002354, SPLEN2002385, SPLEN2002419, SPLEN2002451, SPLEN2002462, SPLEN2002463, SPLEN2002467, SPLEN2002477, SPLEN2002493, SPLEN2002662, SPLEN2002695, SPLEN2002707, SPLEN2002744, SPLEN2002917, SPLEN2002931, SPLEN2002957, SPLEN2003160, SPLEN2003204, SPLEN2003219, SPLEN2003297, SPLEN2003396, SPLEN2003678, SPLEN2003878, SPLEN2003918, SPLEN2003924, SPLEN2004060, SPLEN2004078, SPLEN2004124, SPLEN2004148, SPLEN2004181, SPLEN2004343, SPLEN2004346, SPLEN2004368, SPLEN2004611, SPLEN2004662, SPLEN2004844, SPLEN2005009, SPLEN2005227, SPLEN2005272, SPLEN2005342, SPLEN2005416, SPLEN2005450, SPLEN2005474, SPLEN2005560, SPLEN2005727, SPLEN2005783, SPLEN2005790, SPLEN2005806, SPLEN2005838, SPLEN2005927, SPLEN2005939, SPLEN2006143, SPLEN2006268, SPLEN2006283, SPLEN2006325, SPLEN2006389, SPLEN2006425, SPLEN2006671, SPLEN2006701, SPLEN2006785, SPLEN2006875, SPLEN2007182, SPLEN2007276, SPLEN2007314, SPLEN2007326, SPLEN2007350, SPLEN2007388, SPLEN2007619, SPLEN2007653, SPLEN2007689, SPLEN2007695, SPLEN2007794, SPLEN2007879, SPLEN2007926, SPLEN2007951, SPLEN2008007, SPLEN2008135, SPLEN2008164, SPLEN2008317, SPLEN2008496, SPLEN2008786, SPLEN2009088, SPLEN2009163, SPLEN2009315, SPLEN2009340, SPLEN2009512, SPLEN2009513, SPLEN2009541, SPLEN2009548, SPLEN2009581, SPLEN2009733, SPLEN2009803, SPLEN2009884, SPLEN2009918, SPLEN2010004, SPLEN2010015, SPLEN2010112, SPLEN2010119, SPLEN2010146, SPLEN2010187, SPLEN2010350, SPLEN2010395, SPLEN2010415, SPLEN2010447, SPLEN2010469, SPLEN2010510, SPLEN2010530, SPLEN2010534, SPLEN2010588, SPLEN2010625, SPLEN2010800, SPLEN2010846, SPLEN2010847, SPLEN2010862, SPLEN2010912, SPLEN2010978, SPLEN2011018, SPLEN2011021, SPLEN2011025, SPLEN2011086, SPLEN2011139, SPLEN2011145, SPLEN2011248, SPLEN2011252, SPLEN2011422, SPLEN2011672, SPLEN2011678, SPLEN2011737, SPLEN2011758, SPLEN2011766, SPLEN2011805, SPLEN2011820, SPLEN2011830, SPLEN2011931, SPLEN2011981, SPLEN2012115, SPLEN2012175, SPLEN2012179, SPLEN2012185, SPLEN2012234, SPLEN2012453, SPLEN2012523, SPLEN2012524, SPLEN2012525, SPLEN2012606, SPLEN2012611, SPLEN2012619, SPLEN2012624, SPLEN2012725, SPLEN2012743, SPLEN2012756, SPLEN2012846, SPLEN2012889, SPLEN2012961, SPLEN2013108, SPLEN2013195, SPLEN2013503, SPLEN2013644, SPLEN2013648, SPLEN2013670, SPLEN2013673, SPLEN2013690, SPLEN2013714, SPLEN2013753, SPLEN2013821, SPLEN2013857, SPLEN2013860, SPLEN2013910, SPLEN2013923, SPLEN2013936, SPLEN2014041, SPLEN2014063, SPLEN2014073, SPLEN2014119, SPLEN2014136, SPLEN2014199, SPLEN2014210, SPLEN2014293, SPLEN2014318, SPLEN2014381, SPLEN2014452, SPLEN2014454, SPLEN2014486, SPLEN2014543, SPLEN2014645, SPLEN2014669, SPLEN2014711, SPLEN2014739, SPLEN2014860, SPLEN2014865, SPLEN2014919, SPLEN2014920, SPLEN2014924, SPLEN2014937, SPLEN2014946, SPLEN2015031, SPLEN2015094, SPLEN2015121, SPLEN2015129, SPLEN2015158, SPLEN2015166, SPLEN2015216, SPLEN2015258, SPLEN2015261, SPLEN2015267, SPLEN2015276, SPLEN2015415, SPLEN2015433, SPLEN2015593, SPLEN2015674, SPLEN2015679, SPLEN2015707, SPLEN2015730, SPLEN2015746, SPLEN2015815, SPLEN2015890, SPLEN2015891, SPLEN2015899, SPLEN2016045, SPLEN2016053, SPLEN2016069, SPLEN2016098, SPLEN2016135, SPLEN2016139, SPLEN2016241, SPLEN2016250, SPLEN2016304, SPLEN2016356, SPLEN2016480, SPLEN2016531, SPLEN2016533, SPLEN2016541, SPLEN2016552, SPLEN2016602, SPLEN2016627, SPLEN2016678, SPLEN2016743, SPLEN2016773, SPLEN2016781, SPLEN2016840, SPLEN2016863, SPLEN2016922, SPLEN2016932, SPLEN2016973, SPLEN2017104, SPLEN2017147, SPLEN2017187, SPLEN2017189, SPLEN2017212, SPLEN2017426, SPLEN2017452, SPLEN2017538, SPLEN2017592, SPLEN2017613, SPLEN2017620, SPLEN2017643, SPLEN2017687, SPLEN2017740, SPLEN2017781, SPLEN2017918, SPLEN2017999, SPLEN2018098, SPLEN2018112, SPLEN2018157, SPLEN2018159, SPLEN2018180, SPLEN2018181, SPLEN2018280, SPLEN2018285, SPLEN2018299, SPLEN2018302, SPLEN2018364, SPLEN2018395, SPLEN2018643, SPLEN2018683, SPLEN2018732, SPLEN2018749, SPLEN2018933, SPLEN2019008, SPLEN2019043, SPLEN2019077, SPLEN2019092, SPLEN2019102, SPLEN2019131, SPLEN2019257, SPLEN2019311, SPLEN2019323, SPLEN2019349, SPLEN2019375, SPLEN2019379, SPLEN2019446, SPLEN2019471, SPLEN2019480, SPLEN2019505, SPLEN2019571, SPLEN2019575, SPLEN2019709, SPLEN2019774, SPLEN2019793, SPLEN2019811, SPLEN2019839, SPLEN2019956, SPLEN2019985, SPLEN2020007, SPLEN2020034, SPLEN2020153, SPLEN2020154, SPLEN2020166, SPLEN2020183, SPLEN2020223, SPLEN2020359, SPLEN2020417, SPLEN2020427, SPLEN2020467, SPLEN2020512, SPLEN2020608, SPLEN2020777, SPLEN2020805, SPLEN2021057, SPLEN2021122, SPLEN2021157, SPLEN2021231, SPLEN2021273, SPLEN2021295, SPLEN2021298, SPLEN2021383, SPLEN2021417, SPLEN2021440, SPLEN2021458, SPLEN2021463, SPLEN2021560, SPLEN2021701, SPLEN2021795, SPLEN2021983, SPLEN2021991, SPLEN2022040, SPLEN2022162, SPLEN2022227, SPLEN2022591, SPLEN2022785, SPLEN2022920, SPLEN2023024, SPLEN2023118, SPLEN2023423, SPLEN2023710, SPLEN2023791, SPLEN2023977, SPLEN2024070, SPLEN2024127, SPLEN2024232, SPLEN2024273, SPLEN2024383, SPLEN2024489, SPLEN2024530, SPLEN2024571, SPLEN2024577, SPLEN2024617, SPLEN2024737, SPLEN2024922, SPLEN2024956, SPLEN2024990, SPLEN2025012, SPLEN2025017, SPLEN2025039, SPLEN2025219, SPLEN2025491, SPLEN2025626, SPLEN2025820, SPLEN2026144, SPLEN2026765, SPLEN2027157, SPLEN2027395, SPLEN2027488, SPLEN2027780, SPLEN2027852, SPLEN2027868, SPLEN2027995, SPLEN2028046, SPLEN2028066, SPLEN2028138, SPLEN2028365, SPLEN2028417, SPLEN2028424, SPLEN2028593, SPLEN2028844, SPLEN2028994, SPLEN2029051, SPLEN2029176, SPLEN2029295, SPLEN2029380, SPLEN2029522, SPLEN2029683, SPLEN2029727, SPLEN2029904, SPLEN2029912, SPLEN2030250, SPLEN2030335, SPLEN2030371, SPLEN2030397, SPLEN2030479, SPLEN2030495, SPLEN2030562, SPLEN2030763, SPLEN2030847, SPLEN2031004, SPLEN2031125, SPLEN2031424, SPLEN2031674, SPLEN2031724, SPLEN2031780, SPLEN2032036, SPLEN2032112, SPLEN2032154, SPLEN2032157, SPLEN2032321, SPLEN2032356, SPLEN2032677, SPLEN2032813, SPLEN2032924, SPLEN2033098, SPLEN2033153, SPLEN2033333, SPLEN2033490, SPLEN2033539, SPLEN2033921, SPLEN2033996, SPLEN2034021, SPLEN2034081, SPLEN2034252, SPLEN2034448, SPLEN2034551, SPLEN2034601, SPLEN2034678, SPLEN2034781, SPLEN2034864, SPLEN2034934, SPLEN2035318, SPLEN2035615, SPLEN2036103, SPLEN2036326, SPLEN2036475, SPLEN2036501, SPLEN2036579, SPLEN2036608, SPLEN2036702, SPLEN2036712, SPLEN2036821, SPLEN2036932, SPLEN2036953, SPLEN2037077, SPLEN2037194, SPLEN2037319, SPLEN2037444, SPLEN2037580, SPLEN2037630, SPLEN2037678, SPLEN2037722, SPLEN2037891, SPLEN2038055, SPLEN2038180, SPLEN2038407, SPLEN2038473, SPLEN2039311, SPLEN2039672, SPLEN2039697, SPLEN2039845, SPLEN2039936, SPLEN2040222, SPLEN2040237, SPLEN2040824, SPLEN2041304, SPLEN2041306, SPLEN2041310, SPLEN2041585, SPLEN2041645, SPLEN2041700, SPLEN2041720, SPLEN2041977, SPLEN2042051, SPLEN2042303, SPLEN2042521, SPLEN2042598, SPLEN2042714, SPLEN2042920, STOMA1000013, STOMA1000047, STOMA1000052, STOMA1000074, STOMA1000091, STOMA1000117, STOMA1000133, STOMA1000175, STOMA1000186, STOMA1000190, STOMA1000191, STOMA2000032, STOMA2000072, STOMA2000088, STOMA2000104, STOMA2000148, STOMA2000168, STOMA2000183, STOMA2000188, STOMA2000279, STOMA2000383, STOMA2000386, STOMA2000478, STOMA2000482, STOMA2000529, STOMA2000539, STOMA2000567, STOMA2000640, STOMA2000678, STOMA2000686, STOMA2000888, STOMA2001025, STOMA2002141, STOMA2002367, STOMA2002688, STOMA2003158, STOMA2003289, STOMA2003477, STOMA2003646, STOMA2003716, STOMA2003781, STOMA2003894, STOMA2004194, STOMA2004294, STOMA2004663, STOMA2004668, STOMA2004852, STOMA2004873, STOMA2004884, STOMA2004925, STOMA2005120, STOMA2005664, STOMA2005667, STOMA2005746, STOMA2006181, STOMA2006213, STOMA2006325, STOMA2006330, STOMA2006398, STOMA2006447, STOMA2006780, STOMA2006904, STOMA2007269, STOMA2007680, STOMA2007745, STOMA2008050, STOMA2008361, STOMA2008546, STOMA2008614, STOMA2008838, STOMA2009250, STOMA2009253, STOMA2009256, STOMA2009289, THYMU1000010, THYMU1000017, THYMU1000025, THYMU1000029, THYMU1000032, THYMU1000033, THYMU1000041, THYMU1000060, THYMU1000074, THYMU1000098, THYMU1000103, THYMU1000105, THYMU1000136, THYMU1000142, THYMU1000144, THYMU1000158, THYMU1000176, THYMU1000179, THYMU1000191, THYMU1000198, THYMU1000217, THYMU1000240, THYMU1000242, THYMU1000291, THYMU1000316, THYMU1000318, THYMU1000336, THYMU1000366, THYMU1000382, THYMU1000393, THYMU1000394, THYMU1000399, THYMU1000426, THYMU1000440, THYMU1000459, THYMU1000473, THYMU1000491, THYMU1000496, THYMU1000499, THYMU1000527, THYMU1000532, THYMU1000536, THYMU1000554, THYMU1000558, THYMU1000576, THYMU1000600, THYMU1000677, THYMU1000692, THYMU2000022, THYMU2000032, THYMU2000057, THYMU2000120, THYMU2000138, THYMU2000140, THYMU2000155, THYMU2000162, THYMU2000171, THYMU2000176, THYMU2000179, THYMU2000231, THYMU2000236, THYMU2000276, THYMU2000280, THYMU2000300, THYMU2000317, THYMU2000368, THYMU2000369, THYMU2000418, THYMU2000440, THYMU2000489, THYMU2000492, THYMU2000519, THYMU2000570, THYMU2000602, THYMU2000660, THYMU2000671, THYMU2000672, THYMU2000684, THYMU2000702, THYMU2000767, THYMU2000775, THYMU2000800, THYMU2000879, THYMU2000932, THYMU2000950, THYMU2000971, THYMU2000982, THYMU2000990, THYMU2001018, THYMU2001053, THYMU2001071, THYMU2001139, THYMU2001195, THYMU2001202, THYMU2001203, THYMU2001256, THYMU2001270, THYMU2001291, THYMU2001314, THYMU2001325, THYMU2001357, THYMU2001422, THYMU2001443, THYMU2001515, THYMU2001521, THYMU2001556, THYMU2001622, THYMU2001727, THYMU2001819, THYMU2001825, THYMU2001868, THYMU2001898, THYMU2001900, THYMU2001916, THYMU2001989, THYMU2002023, THYMU2002037, THYMU2002080, THYMU2002109, THYMU2002147, THYMU2002154, THYMU2002157, THYMU2002177, THYMU2002203, THYMU2002229, THYMU2002242, THYMU2002338, THYMU2002356, THYMU2002376, THYMU2002384, THYMU2002450, THYMU2002490, THYMU2002548, THYMU2002695, THYMU2002745, THYMU2002756, THYMU2002789, THYMU2002792, THYMU2002815, THYMU2002852, THYMU2002910, THYMU2002950, THYMU2002983, THYMU2003069, THYMU2003107, THYMU2003124, THYMU2003133, THYMU2003166, THYMU2003232, THYMU2003242, THYMU2003249, THYMU2003270, THYMU2003282, THYMU2003287, THYMU2003336, THYMU2003366, THYMU2003397, THYMU2003440, THYMU2003470, THYMU2003479, THYMU2003542, THYMU2003632, THYMU2003650, THYMU2003700, THYMU2003760, THYMU2003803, THYMU2003855, THYMU2003907, THYMU2004003, THYMU2004008, THYMU2004042, THYMU2004108, THYMU2004111, THYMU2004123, THYMU2004139, THYMU2004169, THYMU2004284, THYMU2004320, THYMU2004336, THYMU2004356, THYMU2004452, THYMU2004508, THYMU2004512, THYMU2004635, THYMU2004639, THYMU2004668, THYMU2004677, THYMU2004688, THYMU2004693, THYMU2004733, THYMU2004835, THYMU2004843, THYMU2004906, THYMU2004916, THYMU2004986, THYMU2005001, THYMU2005003, THYMU2005046, THYMU2005134, THYMU2005156, THYMU2005190, THYMU2005225, THYMU2005240, THYMU2005246, THYMU2005270, THYMU2005283, THYMU2005303, THYMU2005321, THYMU2005356, THYMU2005369, THYMU2005480, THYMU2005507, THYMU2005545, THYMU2005574, THYMU2005576, THYMU2005748, THYMU2005759, THYMU2005807, THYMU2005815, THYMU2005855, THYMU2005881, THYMU2005948, THYMU2005997, THYMU2006001, THYMU2006048, THYMU2006098, THYMU2006160, THYMU2006170, THYMU2006252, THYMU2006277, THYMU2006303, THYMU2006324, THYMU2006350, THYMU2006357, THYMU2006365, THYMU2006420, THYMU2006468, THYMU2006505, THYMU2006610, THYMU2006666, THYMU2006712, THYMU2006913, THYMU2006946, THYMU2006965, THYMU2007025, THYMU2007036, THYMU2007095, THYMU2007179, THYMU2007258, THYMU2007307, THYMU2007308, THYMU2007339, THYMU2007350, THYMU2007384, THYMU2007493, THYMU2007521, THYMU2007528, THYMU2007530, THYMU2007532, THYMU2007561, THYMU2007571, THYMU2007635, THYMU2007658, THYMU2007667, THYMU2007694, THYMU2007725, THYMU2007729, THYMU2007802, THYMU2007824, THYMU2007854, THYMU2007952, THYMU2007969, THYMU2008035, THYMU2008036, THYMU2008049, THYMU2008072, THYMU2008111, THYMU2008145, THYMU2008149, THYMU2008185, THYMU2008191, THYMU2008207, THYMU2008226, THYMU2008282, THYMU2008339, THYMU2008350, THYMU2008351, THYMU2008452, THYMU2008643, THYMU2008686, THYMU2008691, THYMU2008714, THYMU2008725, THYMU2008727, THYMU2008781, THYMU2008799, THYMU2008876, THYMU2008910, THYMU2008917, THYMU2008928, THYMU2008990, THYMU2008994, THYMU2009023, THYMU2009046, THYMU2009101, THYMU2009104, THYMU2009134, THYMU2009157, THYMU2009181, THYMU2009186, THYMU2009338, THYMU2009425, THYMU2009516, THYMU2009526, THYMU2009546, THYMU2009592, THYMU2009596, THYMU2009792, THYMU2009835, THYMU2009906, THYMU2009948, THYMU2010030, THYMU2010041, THYMU2010046, THYMU2010059, THYMU2010082, THYMU2010161, THYMU2010192, THYMU2010519, THYMU2010637, THYMU2010671, THYMU2010699, THYMU2010705, THYMU2010779, THYMU2010816, THYMU2010831, THYMU2010848, THYMU2011053, THYMU2011063, THYMU2011072, THYMU2011096, THYMU2011118, THYMU2011142, THYMU2011183, THYMU2011257, THYMU2011259, THYMU2011295, THYMU2011308, THYMU2011390, THYMU2011431, THYMU2011447, THYMU2011482, THYMU2011538, THYMU2011548, THYMU2011551, THYMU2011564, THYMU2011573, THYMU2011585, THYMU2011621, THYMU2011666, THYMU2011736, THYMU2011785, THYMU2011806, THYMU2011852, THYMU2011875, THYMU2011881, THYMU2011937, THYMU2011939, THYMU2012002, THYMU2012073, THYMU2012104, THYMU2012113, THYMU2012273, THYMU2012401, THYMU2012492, THYMU2012507, THYMU2012565, THYMU2012574, THYMU2012631, THYMU2012665, THYMU2012690, THYMU2012701, THYMU2012807, THYMU2012882, THYMU2012891, THYMU2012902, THYMU2012919, THYMU2013023, THYMU2013047, THYMU2013051, THYMU2013089, THYMU2013170, THYMU2013364, THYMU2013386, THYMU2013426, THYMU2013578, THYMU2013648, THYMU2013705, THYMU2013757, THYMU2013779, THYMU2013863, THYMU2013950, THYMU2013981, THYMU2014067, THYMU2014068, THYMU2014167, THYMU2014183, THYMU2014204, THYMU2014297, THYMU2014323, THYMU2014327, THYMU2014353, THYMU2014492, THYMU2014500, THYMU2014599, THYMU2014762, THYMU2014777, THYMU2014801, THYMU2014901, THYMU2014923, THYMU2015019, THYMU2015161, THYMU2015316, THYMU2015321, THYMU2015439, THYMU2015441, THYMU2015479, THYMU2015762, THYMU2015775, THYMU2015825, THYMU2015918, THYMU2015943, THYMU2015984, THYMU2016113, THYMU2016164, THYMU2016204, THYMU2016219, THYMU2016360, THYMU2016496, THYMU2016840, THYMU2016968, THYMU2017008, THYMU2017010, THYMU2017023, THYMU2017085, THYMU2017099, THYMU2017158, THYMU2017162, THYMU2017215, THYMU2017362, THYMU2017366, THYMU2017398, THYMU2017449, THYMU2017479, THYMU2017522, THYMU2017526, THYMU2017675, THYMU2017707, THYMU2017844, THYMU2017878, THYMU2018028, THYMU2018071, THYMU2018189, THYMU2018197, THYMU2018384, THYMU2018455, THYMU2018547, THYMU2018565, THYMU2018639, THYMU2018673, THYMU2018721, THYMU2018772, THYMU2018819, THYMU2018841, THYMU2018997, THYMU2019021, THYMU2019054, THYMU2019197, THYMU2019210, THYMU2019364, THYMU2019436, THYMU2019442, THYMU2019587, THYMU2019599, THYMU2019686, THYMU2019813, THYMU2020198, THYMU2020289, THYMU2020416, THYMU2020491, THYMU2020499, THYMU2020560, THYMU2020667, THYMU2020830, THYMU2020883, THYMU2020959, THYMU2021361, THYMU2021509, THYMU2021597, THYMU2021684, THYMU2021714, THYMU2022213, THYMU2022289, THYMU2022660, THYMU2022854, THYMU2022922, THYMU2023209, THYMU2023264, THYMU2023576, THYMU2023711, THYMU2023900, THYMU2023943, THYMU2023967, THYMU2024071, THYMU2024121, THYMU2024185, THYMU2024207, THYMU2024616, THYMU2024684, THYMU2024748, THYMU2025042, THYMU2025189, THYMU2025319, THYMU2025325, THYMU2025406, THYMU2025557, THYMU2025572, THYMU2025707, THYMU2025849, THYMU2025909, THYMU2025939, THYMU2026182, THYMU2026350, THYMU2026530, THYMU2026531, THYMU2026835, THYMU2026904, THYMU2027053, THYMU2027168, THYMU2027249, THYMU2027282, THYMU2027497, THYMU2027695, THYMU2027734, THYMU2027894, THYMU2027975, THYMU2027996, THYMU2028041, THYMU2028368, THYMU2028379, THYMU2028394, THYMU2028412, THYMU2028629, THYMU2028632, THYMU2028724, THYMU2028942, THYMU2028978, THYMU2029134, THYMU2029578, THYMU2029676, THYMU2029688, THYMU2029788, THYMU2030068, THYMU2030226, THYMU2030264, THYMU2030462, THYMU2030543, THYMU2030637, THYMU2030655, THYMU2030796, THYMU2030912, THYMU2030982, THYMU2031046, THYMU2031139, THYMU2031218, THYMU2031249, THYMU2031258, THYMU2031579, THYMU2031847, THYMU2031890, THYMU2031994, THYMU2032014, THYMU2032035, THYMU2032080, THYMU2032150, THYMU2032358, THYMU2032437, THYMU2032601, THYMU2032655, THYMU2032715, THYMU2032732, THYMU2032825, THYMU2032976, THYMU2033053, THYMU2033059, THYMU2033070, THYMU2033079, THYMU2033085, THYMU2033104, THYMU2033227, THYMU2033263, THYMU2033308, THYMU2033401, THYMU2033583, THYMU2033755, THYMU2033787, THYMU2033816, THYMU2034182, THYMU2034279, THYMU2034314, THYMU2034338, THYMU2034374, THYMU2034647, THYMU2034917, THYMU2035064, THYMU2035078, THYMU2035101, THYMU2035319, THYMU2035321, THYMU2035388, THYMU2035400, THYMU2035554, THYMU2035710, THYMU2036105, THYMU2036207, THYMU2036215, THYMU2036252, THYMU2036265, THYMU2036366, THYMU2036459, THYMU2036461, THYMU2036604, THYMU2036653, THYMU2037081, THYMU2037208, THYMU2037226, THYMU2037233, THYMU2037234, THYMU2037348, THYMU2037406, THYMU2037965, THYMU2038058, THYMU2038189, THYMU2038199, THYMU2038220, THYMU2038301, THYMU2038369, THYMU2038389, THYMU2038615, THYMU2038636, THYMU2038739, THYMU2038772, THYMU2038797, THYMU2038906, THYMU2039305, THYMU2039315, THYMU2039334, THYMU2039411, THYMU2039634, THYMU2039719, THYMU2039780, THYMU2039788, THYMU2039989, THYMU2040029, THYMU2040110, THYMU2040114, THYMU2040140, THYMU2040412, THYMU2040427, THYMU2040824, THYMU2040925, THYMU2041007, THYMU2041015, THYMU2041252, THYMU3000028, THYMU3000036, THYMU3000037, THYMU3000082, THYMU3000194, THYMU3000224, THYMU3000269, THYMU3000306, THYMU3000360, THYMU3000390, THYMU3000420, THYMU3000490, THYMU3000504, THYMU3000542, THYMU3000655, THYMU3000826, THYMU3000841, THYMU3001077, THYMU3001082, THYMU3001083, THYMU3001133, THYMU3001151, THYMU3001379, THYMU3001472, THYMU3001593, THYMU3001883, THYMU3001939, THYMU3001991, THYMU3002452, THYMU3002578, THYMU3002661, THYMU3003007, THYMU3003092, THYMU3003212, THYMU3003350, THYMU3003403, THYMU3003565, THYMU3003763, THYMU3003958, THYMU3003965, THYMU3004157, THYMU3004628, THYMU3004632, THYMU3004835, THYMU3004866, THYMU3005050, THYMU3005378, THYMU3005407, THYMU3005415, THYMU3005427, THYMU3005482, THYMU3005491, THYMU3005629, THYMU3005696, THYMU3006118, THYMU3006132, THYMU3006168, THYMU3006172, THYMU3006371, THYMU3006485, THYMU3006640, THYMU3006767, THYMU3006811, THYMU3006963, THYMU3007137, THYMU3007308, THYMU3007368, THYMU3007423, THYMU3007559, THYMU3007845, THYMU3008060, THYMU3008105, THYMU3008136, THYMU3008171, THYMU3008216, THYMU3008436, THYMU3008672, THYMU3008935, THYMU3009006, THYMU3009255, THYMU3009391, THYMU3009755, THYMU3010247, THYMU3011012, THYMU3011081, THYMU3011244, THYMU3011360, THYMU3011534, THYMU3011543, THYMU3011556, THYMU3011717, THYMU3011827, THYMU3012402, THYMU3012907, THYMU3013114, THYMU3013197, THYMU3013241, THYMU3013470, THYMU3013785, THYMU3013897, THYMU3014038, THYMU3014173, THYMU3014372, THYMU3014555, THYMU3014620, THYMU3014701, THYMU3015042, THYMU3015457, THYMU3015571, THYMU3015592, THYMU3015625, THYMU3015647, THYMU3015962, THYMU3016022, THYMU3016518, THYMU3016797, THYMU3016822, THYMU3016850, THYMU3017562, THYMU3017688, THYMU3017689, THYMU3017761, THYMU3018151, THYMU3018896, THYMU3019095, THYMU3019476, THYMU3019605, THYMU3019916, THYMU3020221, THYMU3020595, THYMU3020713, THYMU3020856, THYMU3020869, THYMU3020970, THYMU31021404, THYMU3021755, THYMU3021900, THYMU3022211, THYMU3022434, THYMU3022528, THYMU3022668, THYMU3022982, THYMU3023107, THYMU3023211, THYMU3023216, THYMU3023394, THYMU3023400, THYMU3023797, THYMU3024164, THYMU3024339, THYMU3024602, THYMU3024879, THYMU3025118, THYMU3025313, THYMU3025642, THYMU3025683, THYMU3025772, THYMU3025865, THYMU3026000, THYMU3026350, THYMU3026479, THYMU3026532, THYMU3026783, THYMU3026869, THYMU3027251, THYMU3027540, THYMU3027655, THYMU3027671, THYMU3028075, THYMU3028410, THYMU3028461, THYMU3028702, THYMU3029188, THYMU3029318, THYMU3029421, THYMU3029719, THYMU3029774, THYMU3029832, THYMU3030072, THYMU3030231, THYMU3030706, THYMU3030710, THYMU3030752, THYMU3031146, THYMU3031402, THYMU3031610, THYMU3031612, THYMU3031868, THYMU3031878, THYMU3032032, THYMU3032867, THYMU3033402, THYMU3033630, THYMU3033649, THYMU3033754, THYMU3033759, THYMU3034078, THYMU3034099, THYMU3034453, THYMU3034616, THYMU3034853, THYMU3034867, THYMU3034983, THYMU3036200, THYMU3036310, THYMU3036934, THYMU3036953, THYMU3037052, THYMU3037192, THYMU3037617, THYMU3037772, THYMU3037827, THYMU3037836, THYMU3037856, THYMU3037867, THYMU3037909, THYMU3037980, THYMU3038158, THYMU3038167, THYMU3038214, THYMU3038266, THYMU3038328, THYMU3038347, THYMU3038375, THYMU3038603, THYMU3038687, THYMU3038759, THYMU3038879, THYMU3038970, THYMU3039807, THYMU3039846, THYMU3040068, THYMU3040126, THYMU3040146, THYMU3040168, THYMU3040172, THYMU3040725, THYMU3040746, THYMU3040816, THYMU3040829, THYMU3040830, THYMU3040986, THYMU3041354, THYMU3041386, THYMU3041573, THYMU3041603, THYMU3041736, THYMU3041918, THYMU3042075, THYMU3042321, THYMU3042372, THYMU3042758, THYMU3042929, THYMU3043200, THYMU3043327, THYMU3043482, THYMU3043597, THYMU3043688, THYMU3043779, THYMU3043883, THYMU3043993, THYMU3044175, THYMU3044188, THYMU3044441, THYMU3044445, THYMU3045510, THYMU3045673, THYMU3045692, THYMU3045704, THYMU3046140, THYMU3046350, THYMU3046360, THYMU3046856, THYMU3047144, THYMU3047156, THYMU3047366, THYMU3047513, THYMU3047542, THYMU3047760, THYMU3047891, TKIDN1000001, TKIDN1000044, TKIDN1000062, TKIDN1000066, TKIDN1000164, TKIDN1000171, TKIDN1000192, TKIDN2000127, TKIDN2000240, TKIDN2000246, TKIDN2000319, TKIDN2000464, TKIDN2000521, TKIDN2001529, TKIDN2001662, TKIDN2002318, TKIDN2002329, TKIDN2002424, TKIDN2002632, TKIDN2002738, TKIDN2003044, TKIDN2003059, TKIDN2003062, TKIDN2003078, TKIDN2003366, TKIDN2003396, TKIDN2003413, TKIDN2003597, TKIDN2003601, TKIDN2004185, TKIDN2004386, TKIDN2004458, TKIDN2004748, TKIDN2005721, TKIDN2005934, TKIDN2005947, TKIDN2005956, TKIDN2006525, TKIDN2006761, TKIDN2006852, TKIDN2007605, TKIDN2007667, TKIDN2007828, TKIDN2008176, TKIDN2008778, TKIDN2009092, TKIDN2009330, TKIDN2009481, TKIDN2009641, TKIDN2009794, TKIDN2009889, TKIDN2010200, TKIDN2010232, TKIDN2010278, TKIDN2010602, TKIDN2010812, TKIDN2010934, TKIDN2011051, TKIDN2011160, TKIDN2011289, TKIDN2011324, TKIDN2012034, TKIDN2012771, TKIDN2012824, TKIDN2013134, TKIDN2013287, TKIDN2014570, TKIDN2014757, TKIDN2014771, TKIDN2014964, TKIDN2015025, TKIDN2015071, TKIDN2015161, TKIDN2015263, TKIDN2015285, TKIDN2015788, TKIDN2016309, TKIDN2016399, TKIDN2016846, TKIDN2018926, TKIDN2019116, TLIVE2000023, TLIVE2000142, TLIVE2000292, TLIVE2000762, TLIVE2000979, TLIVE2001327, TLIVE2001616, TLIVE2001684, TLIVE2001828, TLIVE2001927, TLIVE2002046, TLIVE2002336, TLIVE2002338, TLIVE2002562, TLIVE2002690, TLIVE2002882, TLIVE2003197, TLIVE2003200, TLIVE2003225, TLIVE2003381, TLIVE2003737, TLIVE2003961, TLIVE2003970, TLIVE2004320, TLIVE2004331, TLIVE2004601, TLIVE2005180, TLIVE2005390, TLIVE2005516, TLIVE2005731, TLIVE2005866, TLIVE2006236, TLIVE2006359, TLIVE2006529, TLIVE2006621, TLIVE2006733, TLIVE2007000, TLIVE2007016, TLIVE2007132, TLIVE2007192, TLIVE2007528, TLIVE2007607, TLIVE2007736, TLIVE2007816, TLIVE2007919, TLIVE2008083, TLIVE2008213, TLIVE2008221, TLIVE2008712, TLIVE2008797, TLIVE2009087, TLIVE2009163, TLIVE2009489, TLIVE2009541, TLUNG2000179, TOVAR2000476, TOVAR2000575, TOVAR2000649, TOVAR2000904, TOVAR2001281, TOVAR2001556, TOVAR2001730, TOVAR2002247, TOVAR2002514, TOVAR2002549, TOVAR2002800, TRACH1000011, TRACH1000018, TRACH1000057, TRACH1000074, TRACH1000100, TRACH1000106, TRACH1000125, TRACH1000140, TRACH1000144, TRACH1000181, TRACH1000212, TRACH1000240, TRACH2000002, TRACH2000015, TRACH2000024, TRACH2000032, TRACH2000045, TRACH2000047, TRACH2000081, TRACH2000083, TRACH2000148, TRACH2000185, TRACH2000196, TRACH2000235, TRACH2000243, TRACH2000250, TRACH2000259, TRACH2000272, TRACH2000282, TRACH2000287, TRACH2000289, TRACH2000312, TRACH2000336, TRACH2000393, TRACH2000411, TRACH2000472, TRACH2000496, TRACH2000497, TRACH2000502, TRACH2000522, TRACH2000559, TRACH2000660, TRACH2000665, TRACH2000675, TRACH2000677, TRACH2000703, TRACH2000767, TRACH2000775, TRACH2000807, TRACH2000873, TRACH2000894, TRACH2000898, TRACH2000923, TRACH2000944, TRACH2000981, TRACH2000986, TRACH2001037, TRACH2001060, TRACH2001085, TRACH2001109, TRACH2001121, TRACH2001147, TRACH2001154, TRACH2001188, TRACH2001275, TRACH2001335, TRACH2001339, TRACH2001341, TRACH2001347, TRACH2001395, TRACH2001400, TRACH2001403, TRACH2001416, TRACH2001428, TRACH2001432, TRACH2001443, TRACH2001463, TRACH2001474, TRACH2001523, TRACH2001525, TRACH2001532, TRACH2001549, TRACH2001592, TRACH2001596, TRACH2001621, TRACH2001646, TRACH2001651, TRACH2001684, TRACH2001898, TRACH2001933, TRACH2001968, TRACH2001996, TRACH2002043, TRACH2002054, TRACH2002092, TRACH2002100, TRACH2002138, TRACH2002333, TRACH2002784, TRACH2002840, TRACH2002847, TRACH2002853, TRACH2002862, TRACH2002954, TRACH2002960, TRACH2002988, TRACH2003070, TRACH2003272, TRACH2003347, TRACH2003484, TRACH2003516, TRACH2003605, TRACH2003736, TRACH2003759, TRACH2003941, TRACH2004054, TRACH2004087, TRACH2004109, TRACH2004170, TRACH2004183, TRACH2004251, TRACH2004292, TRACH2004399, TRACH2004428, TRACH2004458, TRACH2004499, TRACH2004521, TRACH2004570, TRACH2004845, TRACH2004887, TRACH2004950, TRACH2005004, TRACH2005017, TRACH2005066, TRACH2005159, TRACH2005314, TRACH2005444, TRACH2005666, TRACH2005698, TRACH2005710, TRACH2005720, TRACH2005769, TRACH2005796, TRACH2006015, TRACH2006049, TRACH2006097, TRACH2006194, TRACH2006327, TRACH2006331, TRACH2006387, TRACH2006528, TRACH2006670, TRACH2006762, TRACH2006870, TRACH2006918, TRACH2007059, TRACH2007324, TRACH2007358, TRACH2007483, TRACH2007542, TRACH2007577, TRACH2007674, TRACH2007676, TRACH2007688, TRACH2007733, TRACH2007754, TRACH2007816, TRACH2007894, TRACH2007988, TRACH2008112, TRACH2008113, TRACH2008127, TRACH2008130, TRACH2008278, TRACH2008478, TRACH2008540, TRACH2008583, TRACH2008597, TRACH2008820, TRACH2008891, TRACH2008921, TRACH2009006, TRACH2009060, TRACH2009123, TRACH2009268, TRACH2009291, TRACH2009348, TRACH2009358, TRACH2009730, TRACH2009743, TRACH2009754, TRACH2009851, TRACH2009862, TRACH2009934, TRACH2010159, TRACH2010218, TRACH2010251, TRACH2010272, TRACH2010317, TRACH2010419, TRACH2010451, TRACH2010505, TRACH2010587, TRACH2010600, TRACH2010634, TRACH2010639, TRACH2010677, TRACH2010698, TRACH2010771, TRACH2010824, TRACH2010883, TRACH2010965, TRACH2010974, TRACH2011057, TRACH2011093, TRACH2011290, TRACH2011293, TRACH2011302, TRACH2011500, TRACH2011574, TRACH2011894, TRACH2011956, TRACH2012000, TRACH2012138, TRACH2012242, TRACH2012370, TRACH2012497, TRACH2012536, TRACH2012562, TRACH2012742, TRACH2012823, TRACH2012918, TRACH2013081, TRACH2013123, TRACH2013265, TRACH2013369, TRACH2013450, TRACH2013495, TRACH2013552, TRACH2013585, TRACH2013671, TRACH2013726, TRACH2013902, TRACH2013928, TRACH2013982, TRACH2013991, TRACH2014018, TRACH2014045, TRACH2014046, TRACH2014082, TRACH2014268, TRACH2014284, TRACH2014337, TRACH2014356, TRACH2014371, TRACH2014442, TRACH2014483, TRACH2014495, TRACH2014544, TRACH2014573, TRACH2014725, TRACH2014760, TRACH2014815, TRACH2014839, TRACH2014938, TRACH2014950, TRACH2014972, TRACH2014974, TRACH2014997, TRACH2015180, TRACH2015243, TRACH2015316, TRACH2015381, TRACH2015486, TRACH2015654, TRACH2015939, TRACH2015987, TRACH2016080, TRACH2016131, TRACH2016286, TRACH2016317, TRACH2016347, TRACH2016380, TRACH2016384, TRACH2016410, TRACH2016481, TRACH2016498, TRACH2016533, TRACH2016551, TRACH2016554, TRACH2016651, TRACH2016690, TRACH2016709, TRACH2016722, TRACH2016835, TRACH2016980, TRACH2017086, TRACH2017368, TRACH2017498, TRACH2017609, TRACH2017949, TRACH2017965, TRACH2017980, TRACH2018034, TRACH2018084, TRACH2018262, TRACH2018273, TRACH2018278, TRACH2018317, TRACH2018345, TRACH2018380, TRACH2018512, TRACH2018646, TRACH2018663, TRACH2018718, TRACH2018835, TRACH2018882, TRACH2018914, TRACH2018950, TRACH2019024, TRACH2019046, TRACH2019151, TRACH2019154, TRACH2019176, TRACH2019248, TRACH2019309, TRACH2019425, TRACH2019473, TRACH2019602, TRACH2019661, TRACH2019672, TRACH2019673, TRACH2019844, TRACH2019879, TRACH2020048, TRACH2020336, TRACH2020525, TRACH2021398, TRACH2021622, TRACH2021635, TRACH2021964, TRACH2022042, TRACH2022113, TRACH2022253, TRACH2022425, TRACH2022553, TRACH2022649, TRACH2022839, TRACH2023246, TRACH2023306, TRACH2023416, TRACH2023479, TRACH2023684, TRACH2023860, TRACH2023876, TRACH2024139, TRACH2024187, TRACH2024271, TRACH2024293, TRACH2024408, TRACH2024512, TRACH2024559, TRACH2024647, TRACH2024651, TRACH2024730, TRACH2024735, TRACH2024749, TRACH2024821, TRACH2025057, TRACH2025084, TRACH2025155, TRACH2025224, TRACH2025344, TRACH2025379, TRACH2025507, TRACH2025569, TRACH2025705, TRACH2025749, TRACH2025753, TRACH2025810, TRACH2025853, TRACH2025911, TRACH2025932, TRACH3000014, TRACH3000017, TRACH3000043, TRACH3000134, TRACH3000180, TRACH3000342, TRACH3000420, TRACH3000515, TRACH3000530, TRACH3000548, TRACH3000558, TRACH3000586, TRACH3000692, TRACH3000780, TRACH3000892, TRACH3000926, TRACH3001119, TRACH3001443, TRACH3001550, TRACH3001759, TRACH3002064, TRACH3002107, TRACH3002168, TRACH3002188, TRACH3002245, TRACH3002293, TRACH3002533, TRACH3002561, TRACH3002567, TRACH3002605, TRACH3002650, TRACH3002752, TRACH3002866, TRACH3002871, TRACH3002876, TRACH3002890, TRACH3003009, TRACH3003037, TRACH3003357, TRACH3003586, TRACH3003683, TRACH3003780, TRACH3003805, TRACH3004113, TRACH3004288, TRACH3004303, TRACH3004412, TRACH3004424, TRACH3004456, TRACH3004537, TRACH3004596, TRACH3004651, TRACH3004652, TRACH3004671, TRACH3004747, TRACH3004760, TRACH3004783, TRACH3004786, TRACH3004840, TRACH3004931, TRACH3004934, TRACH3005072, TRACH3005085, TRACH3005102, TRACH3005173, TRACH3005191, TRACH3005274, TRACH3005294, TRACH3005549, TRACH3005702, TRACH3005808, TRACH3005852, TRACH3005896, TRACH3006038, TRACH3006149, TRACH3006228, TRACH3006264, TRACH3006336, TRACH3006379, TRACH3006392, TRACH3006395, TRACH3006397, TRACH3006412, TRACH3006470, TRACH3006589, TRACH3006626, TRACH3006699, TRACH3006800, TRACH3006889, TRACH3006985, TRACH3007097, TRACH3007268, TRACH3007274, TRACH3007277, TRACH3007391, TRACH3007541, TRACH3007595, TRACH3007627, TRACH3007689, TRACH3007766, TRACH3007866, TRACH3007995, TRACH3008042, TRACH3008061, TRACH3008201, TRACH3008535, TRACH3008632, TRACH3008688, TRACH3008697, TRACH3008713, TRACH3008887, TRACH3008902, TRACH3008990, TRACH3009001, TRACH3009059, TRACH3009061, TRACH3009455, TRACH3009701, TRACH3009715, TRACH3009894, TRACH3009956, TRACH3010079, TRACH3010167, TRACH3010331, TRACH3010342, TRACH3010382, TRACH3010757, TRACH3010901, TRACH3011004, TRACH3011082, TRACH3011184, TRACH3011282, TRACH3011313, TRACH3011454, TRACH3011485, TRACH3011503, TRACH3011538, TRACH3011542, TRACH3012106, TRACH3012161, TRACH3012232, TRACH3012261, TRACH3012445, TRACH3012460, TRACH3012659, TRACH3012718, TRACH3012864, TRACH3012891, TRACH3012942, TRACH3013072, TRACH3013426, TRACH3013454, TRACH3013558, TRACH3013684, TRACH3013693, TRACH3013700, TRACH3013766, TRACH3013900, TRACH3013926, TRACH3014063, TRACH3014183, TRACH3014215, TRACH3014316, TRACH3014415, TRACH3014580, TRACH3014641, TRACH3014885, TRACH3015136, TRACH3015336, TRACH3015346, TRACH3015354, TRACH3015467, TRACH3015626, TRACH3015951, TRACH3016051, TRACH3016120, TRACH3016264, TRACH3016277, TRACH3016368, TRACH3016455, TRACH3016614, TRACH3017171, TRACH3017409, TRACH3017934, TRACH3018108, TRACH3018191, TRACH3018240, TRACH3018261, TRACH3018519, TRACH3018524, TRACH3018606, TRACH3018783, TRACH3018907, TRACH3018933, TRACH3018943, TRACH3019018, TRACH3019058, TRACH3019142, TRACH3019347, TRACH3019370, TRACH3019447, TRACH3019598, TRACH3019621, TRACH3019662, TRACH3019807, TRACH3019924, TRACH3019977, TRACH3020137, TRACH3020410, TRACH3020563, TRACH3020605, TRACH3020750, TRACH3020769, TRACH3020928, TRACH3020930, TRACH3021023, TRACH3021066, TRACH3021212, TRACH3021335, TRACH3021373, TRACH3021544, TRACH3021778, TRACH3021834, TRACH3021883, TRACH3022170, TRACH3022198, TRACH3022296, TRACH3022482, TRACH3022732, TRACH3022758, TRACH3022875, TRACH3022910, TRACH3022960, TRACH3023063, TRACH3023203, TRACH3023242, TRACH3023373, TRACH3023516, TRACH3023752, TRACH3023945, TRACH3023960, TRACH3024020, TRACH3024081, TRACH3024342, TRACH3024423, TRACH3024428, TRACH3024512, TRACH3024671, TRACH3024823, TRACH3025302, TRACH3025316, TRACH3025346, TRACH3025520, TRACH3026148, TRACH3026283, TRACH3026299, TRACH3026542, TRACH3026650, TRACH3026676, TRACH3026744, TRACH3026949, TRACH3027229, TRACH3027527, TRACH3027681, TRACH3027701, TRACH3027885, TRACH3028031, TRACH3028164, TRACH3028180, TRACH3028195, TRACH3028441, TRACH3028597, TRACH3028678, TRACH3028837, TRACH3028847, TRACH3028855, TRACH3029139, TRACH3029329, TRACH3029451, TRACH3029462, TRACH3029520, TRACH3029592, TRACH3029629, TRACH3029665, TRACH3029670, TRACH3029800, TRACH3030111, TRACH3030130, TRACH3030176, TRACH3030252, TRACH3030725, TRACH3030855, TRACH3030883, TRACH3031316, TRACH3031400, TRACH3031463, TRACH3031479, TRACH3031518, TRACH3031660, TRACH3031678, TRACH3031936, TRACH3032044, TRACH3032065, TRACH3032150, TRACH3032372, TRACH3032480, TRACH3032570, TRACH3032755, TRACH3032827, TRACH3032873, TRACH3033535, TRACH3033680, TRACH3033868, TRACH3034145, TRACH3034414, TRACH3034488, TRACH3034680, TRACH3034731, TRACH3034745, TRACH3034762, TRACH3034903, TRACH3035187, TRACH3035199, TRACH3035235, TRACH3035451, TRACH3035482, TRACH3035526, TRACH3036004, TRACH3036103, TRACH3036193, TRACH3036207, TRACH3036278, TRACH3036309, TRACH3036456, TRACH3036609, TRACH3036638, TRACH3036683, TRACH3036750, TRACH3036792, TRACH3036843, TRACH3036897, TRACH3036932, TRACH3036997, TRACH3037063, TRACH3037267, TRACH3037288, TRACH3037505, TRACH3037573, TRACH3037696, TRACH3037897, TRACH3038086, TRACH3038399, TSTOM1000135, TSTOM1000186, TSTOM2000235, TSTOM2000442, TSTOM2000569, TSTOM2000588, TSTOM2001195, TSTOM2001274, TSTOM2001571, TSTOM2001996, TSTOM2002265, TSTOM2002505, TSTOM2002561, TSTOM2002611, TSTOM2002672, TSTOM2002682, TUTER1000014, TUTER1000137, TUTER2000057, TUTER2000283, TUTER2000425, TUTER2000916, TUTER2001286, TUTER2001341, TUTER2001387, TUTER2001433, TUTER2001461, TUTER2002028, TUTER2002074, TUTER2002158, TUTER2002228, TUTER2002323, TUTER2002356, TUTER2002729, UMVEN1000122, UMVEN1000156, UMVEN1000186, UMVEN2000046, UMVEN2000069, UMVEN2000121, UMVEN2000354, UTERU1000008, UTERU1000015, UTERU1000024, UTERU1000031, UTERU1000032, UTERU1000057, UTERU1000065, UTERU1000077, UTERU1000093, UTERU1000096, UTERU1000106, UTERU1000109, UTERU1000131, UTERU1000138, UTERU1000148, UTERU1000160, UTERU1000183, UTERU1000187, UTERU1000192, UTERU1000249, UTERU1000337, UTERU1000339, UTERU2000047, UTERU2000074, UTERU2000099, UTERU2000154, UTERU2000197, UTERU2000218, UTERU2000238, UTERU2000243, UTERU2000260, UTERU2000300, UTERU2000329, UTERU2000338, UTERU2000349, UTERU2000377, UTERU2000393, UTERU2000418, =UTERU2000465, UTERU2000485, UTERU2000517, UTERU2000524, UTERU2000537, UTERU2000539, UTERU2000541, UTERU2000546, UTERU2000550, UTERU2000569, UTERU2000607, UTERU2000629, UTERU2000649, UTERU2000663, UTERU2000696, UTERU2000794, UTERU2000830, UTERU2000844, UTERU2000922, UTERU2000925, UTERU2001024, UTERU2001110, UTERU2001176, UTERU2001281, UTERU2001389, UTERU2001409, UTERU2001412, UTERU2001504, UTERU2001658, UTERU2001747, UTERU2001876, UTERU2002001, UTERU2002011, UTERU2002176, UTERU2002332, UTERU2002473, UTERU2002547, UTERU2002693, UTERU2002733, UTERU2002736, UTERU2002737, UTERU2002826, UTERU2002964, UTERU2003035, UTERU2003057, UTERU2003126, UTERU2003135, UTERU2003399, UTERU2003411, UTERU2003456, UTERU2003577, UTERU2003704, UTERU2003926, UTERU2003973, UTERU2004015, UTERU2004037, UTERU2004039, UTERU2004061, UTERU2004163, UTERU2004299, UTERU2004461, UTERU2004520, UTERU2004564, UTERU2004698, UTERU2004861, UTERU2004929, UTERU2005004, UTERU2005050, UTERU2005179, UTERU2005346, UTERU2005446, UTERU2005449, UTERU2005450, UTERU2005533, UTERU2005601, UTERU2005664, UTERU2005822, UTERU2005903, UTERU2005905, UTERU2006103, UTERU2006115, UTERU2006137, UTERU2006182, UTERU2006400, UTERU2006412, UTERU2006429, UTERU2006486, UTERU2006524, UTERU2006547, UTERU2006568, UTERU2006593, UTERU2006643, UTERU2006651, UTERU2006705, UTERU2006899, UTERU2007004, UTERU2007075, UTERU2007081, UTERU2007128, UTERU2007253, UTERU2007267, UTERU2007499, UTERU2007639, UTERU2007724, UTERU2007924, UTERU2007942, UTERU2008018, UTERU2008019, UTERU2008027, UTERU2008040, UTERU2008077, UTERU2008130, UTERU2008347, UTERU2008426, UTERU2008516, UTERU2008561, UTERU2008653, UTERU2008705, UTERU2008707, UTERU2008785, UTERU2008845, UTERU2008901, UTERU2008930, UTERU2008939, UTERU2009094, UTERU2009120, UTERU2009131, UTERU2009147, UTERU2009206, UTERU2009283, UTERU2009414, UTERU2009483, UTERU2009510, UTERU2009538, UTERU2009540, UTERU2009776, UTERU2009904, UTERU2009951, UTERU2009972, UTERU2010115, UTERU2010124, UTERU2010164, UTERU2010226, UTERU2010231, UTERU2010304, UTERU2010320, UTERU2010431, UTERU2010525, UTERU2010651, UTERU2010724, UTERU2010747, UTERU2011195, UTERU2011199, UTERU2011220, UTERU2011261, UTERU2011287, UTERU2011410, UTERU2011574, UTERU2011621, UTERU2011657, UTERU2011741, UTERU2011806, UTERU2011811, UTERU2011897, UTERU2011906, UTERU2011962, UTERU2011968, UTERU2012031, UTERU2012101, UTERU2012114, UTERU2012252, UTERU2012333, UTERU2012407, UTERU2012526, UTERU2012581, UTERU2012610, UTERU2012615, UTERU2012688, UTERU2012703, UTERU2012715, UTERU2012741, UTERU2012767, UTERU2012786, UTERU2012856, UTERU2012890, UTERU2012938, UTERU2012976, UTERU2013048, UTERU2013078, UTERU2013231, UTERU2013280, UTERU2013322, UTERU2013483, UTERU2013491, UTERU2013502, UTERU2013586, UTERU2013926, UTERU2013976, UTERU2014001, UTERU2014223, UTERU2014398, UTERU2014464, UTERU2014548, UTERU2014631, UTERU2014668, UTERU2014678, UTERU2014728, UTERU2014998, UTERU2015062, UTERU2015087, UTERU2015108, UTERU2015190, UTERU2015198, UTERU2015202, UTERU2015405, UTERU2015640, UTERU2015830, UTERU2015880, UTERU2016147, UTERU2016157, UTERU2016464, UTERU2016669, UTERU2016757, UTERU2016761, UTERU2016799, UTERU2016896, UTERU2016902, UTERU2016979, UTERU2016981, UTERU2017123, UTERU2017303, UTERU2017421, UTERU2017492, UTERU2017613, UTERU2017761, UTERU2017762, UTERU2017810, UTERU2017988, UTERU2018127, UTERU2018180, UTERU2018200, UTERU2018333, UTERU2018364, UTERU2018514, UTERU2018522, UTERU2018523, UTERU2018544, UTERU2018566, UTERU2018609, UTERU2018674, UTERU2018712, UTERU2018784, UTERU2018789, UTERU2018811, UTERU2018867, UTERU2018881, UTERU2018884, UTERU2018955, UTERU2019005, UTERU2019038, UTERU2019163, UTERU2019257, UTERU2019453, UTERU2019491, UTERU2019534, UTERU2019681, UTERU2019706, UTERU2019710, UTERU2019940, UTERU2019959, UTERU2019964, UTERU2020242, UTERU2020292, UTERU2020351, UTERU2020491, UTERU2020718, UTERU2021163, UTERU2021380, UTERU2021649, UTERU2021820, UTERU2022020, UTERU2022773, UTERU2022955, UTERU2022981, UTERU2023039, UTERU2023045, UTERU2023262, UTERU2023550, UTERU2023651, UTERU2023687, UTERU2023712, UTERU2023941, UTERU2024002, UTERU2024042, UTERU2024141, UTERU2024481, UTERU2024656, UTERU2024758, UTERU2024820, UTERU2024881, UTERU2024969, UTERU2025025, UTERU2025041, UTERU2025366, UTERU2025415, UTERU2025579, UTERU2025645, UTERU2025891, UTERU2026025, UTERU2026090, UTERU2026142, UTERU2026203, UTERU2026775, UTERU2027023, UTERU2027369, UTERU2027591, UTERU2027616, UTERU2027941, UTERU2028377, UTERU2028734, UTERU2029503, UTERU2029660, UTERU2029742, UTERU2029953, UTERU2030270, UTERU2030280, UTERU2031060, UTERU2031084, UTERU2031268, UTERU2031295, UTERU2031521, UTERU2031611, UTERU2031703, UTERU2031834, UTERU2031851, UTERU2032075, UTERU2032220, UTERU2032279, UTERU2032726, UTERU2033172, UTERU2033375, UTERU2033382, UTERU2033420, UTERU2033530, UTERU2033577, UTERU2034053, UTERU2034147, UTERU2034695, UTERU2035114, UTERU2035187, UTERU2035231, UTERU2035306, UTERU2035323, UTERU2035328, UTERU2035331, UTERU2035452, UTERU2035469, UTERU2035503, UTERU2035745, UTERU2035908, UTERU2035926, UTERU2035978, UTERU2036089, UTERU2036347, UTERU2036507, UTERU2036512, UTERU2036530, UTERU2036623, UTERU2036690, UTERU2037224, UTERU2037361, UTERU2037423, UTERU2037577, UTERU2037674, UTERU2037791, UTERU2037843, UTERU2038171, UTERU2038251, UTERU3000226, UTERU3000298, UTERU3000402, UTERU3000645, UTERU3000665, UTERU3000670, UTERU3000727, UTERU3000738, UTERU3000828, UTERU3000899, UTERU3000959, UTERU3001029, UTERU3001053, UTERU3001059, UTERU3001158, UTERU3001240, UTERU3001394, UTERU3001542, UTERU3001558, UTERU3001571, UTERU3001585, UTERU3001632, UTERU3001652, UTERU3001766, UTERU3001988, UTERU3002209, UTERU3002218, UTERU3002383, UTERU3002600, UTERU3002620, UTERU3002667, UTERU3002701, UTERU3002731, UTERU3002768, UTERU3002786, UTERU3002993, UTERU3003116, UTERU3003135, UTERU3003178, UTERU3003465, UTERU3003495, UTERU3003523, UTERU3003774, UTERU3003776, UTERU3004384, UTERU3004418, UTERU3004477, UTERU3004523, UTERU3004616, UTERU3004635, UTERU3004709, UTERU3004938, UTERU3004992, UTERU3005049, UTERU3005205, UTERU3005230, UTERU3005264, UTERU3005422, UTERU3005460, UTERU3005536, UTERU3005585, UTERU3005907, UTERU3005970, UTERU3006008, UTERU3006228, UTERU3006308, UTERU3006538, UTERU3006640, UTERU3006687, UTERU3006720, UTERU3006798, UTERU3006884, UTERU3007021, UTERU3007104, UTERU3007108, UTERU3007134, UTERU3007419, UTERU3007640, UTERU3007731, UTERU3007913, UTERU3008280, UTERU3008463, UTERU3008660, UTERU3008671, UTERU3008722, UTERU3008917, UTERU3009259, UTERU3009490, UTERU3009517, UTERU3009690, UTERU3009775, UTERU3009979, UTERU3009987, UTERU3010029, UTERU3010526, UTERU3010604, UTERU3010892, UTERU3010919, UTERU3011063, UTERU3011092, UTERU3011273, UTERU3011398, UTERU3011558, UTERU3011579, UTERU3011795, UTERU3011837, UTERU3012293, UTERU3012414, UTERU3012476, UTERU3012599, UTERU3012999, UTERU3013167, UTERU3013302, UTERU3013781, UTERU3014274, UTERU3014446, UTERU3014611, UTERU3014647, UTERU3014791, UTERU3014906, UTERU3015086, UTERU3015299, UTERU3015412, UTERU3015500, UTERU3015647, UTERU3015844, UTERU3016070, UTERU3016273, UTERU3016274, UTERU3016308, UTERU3016789, UTERU3017176, UTERU3017441, UTERU3017626, UTERU3018154, UTERU3018172, UTERU3018255, UTERU3018616, UTERU3018711, UTERU3019078

[0708] Of the 17,176 genes that include the cDNAs of the present invention, genes whose expression levels were high enough to detect in each of the THYMU, TKIDN, TLIVE, TLUNG, TOVAR, TRACH, and TSTOM libraries were analyzed for expression frequency. The analysis results are described below. Each is a relative value, where the expression level over all tissues is taken as 100. The larger this value, the greater the level of expression.

TABLE 39

| Clone Name | THYMU | TKIDN | TLIVE | TLUNG | TOVAR | TRACH | TSTOM |
|---|---|---|---|---|---|---|---|
| 3NB691000116 | 0 | 0 | 0 | 0 | 0 | 1.822 | 0 |
| 3NB691000173 | 0 | 0 | 5.429 | 0 | 0 | 0 | 0 |
| 3NB692000281 | 0 | 0.815 | 1.513 | 0 | 4.795 | 0.247 | 0 |
| 3NB692000330 | 0.736 | 0 | 3.032 | 0 | 0 | 0.494 | 9.473 |
| 3NB692000374 | 0 | 8.029 | 0 | 0 | 0 | 0 | 0 |
| 3NB692000545 | 2.352 | 0 | 0 | 0 | 0 | 0 | 0 |
| 3NB692000912 | 1.175 | 1.739 | 0 | 0 | 0 | 0 | 0 |
| 3NB692001022 | 0 | 0 | 8.554 | 0 | 0 | 0 | 0 |
| 3NB692001288 | 0 | 22.184 | 0 | 0 | 0 | 1.678 | 0 |
| 3NB692001334 | 0.224 | 2.981 | 0 | 0 | 0 | 0.601 | 0 |
| 3NB692001442 | 2.014 | 0 | 0 | 0 | 0 | 0 | 0 |
| 3NB692001520 | 10.259 | 0 | 0 | 0 | 0 | 0 | 0 |
| 3NB692001538 | 0 | 0 | 0 | 0 | 0 | 2.225 | 0 |
| 3NB692001853 | 0 | 0 | 0 | 0 | 0 | 0 | 56.236 |
| 3NB692002051 | 0 | 31.623 | 0 | 0 | 0 | 0 | 0 |
| ADRGL1000002 | 0 | 6.095 | 0 | 0 | 0 | 0 | 0 |
| ADRGL1000018 | 4.032 | 0 | 0 | 0 | 0 | 0 | 0 |
| ADRGL1000111 | 12.580 | 0 | 0 | 0 | 0 | 0 | 0 |
| ADRGL2000056 | 12.580 | 0 | 0 | 0 | 0 | 0 | 0 |
| ADRGL2000097 | 0 | 0 | 0 | 0 | 0 | 2.490 | 0 |
| ADRGL2002260 | 12.580 | 0 | 0 | 0 | 0 | 0 | 0 |
| ADRGL2002477 | 0 | 6.297 | 0 | 0 | 0 | 3.811 | 0 |
| ADRGL2004676 | 3.635 | 0 | 0 | 0 | 0 | 0 | 0 |
| ADRGL2007313 | 0 | 36.270 | 0 | 0 | 0 | 0 | 0 |
| ADRGL2008535 | 12.580 | 0 | 0 | 0 | 0 | 0 | 0 |
| ADRGL2009273 | 0 | 5.142 | 0 | 0 | 0 | 4.668 | 0 |
| ADRGL2011330 | 12.580 | 0 | 0 | 0 | 0 | 0 | 0 |
| ADRGL2012038 | 1.714 | 0 | 0 | 0 | 0 | 0 | 0 |
| ASTRO2000046 | 0.340 | 3.021 | 0 | 0 | 0 | 11.427 | 0 |
| ASTRO2000141 | 1.266 | 0 | 10.441 | 0 | 0 | 0 | 0 |
| ASTRO2000278 | 32.494 | 0 | 0 | 0 | 0 | 0 | 0 |
| ASTRO2000480 | 4.722 | 0 | 0 | 0 | 0 | 3.171 | 0 |
| ASTRO2000801 | 0 | 3.776 | 0 | 0 | 0 | 0 | 0 |
| ASTRO2000914 | 0 | 0 | 0 | 0 | 0 | 2.180 | 0 |
| ASTRO2001029 | 2.091 | 0 | 0 | 0 | 0 | 0 | 0 |
| ASTRO2001076 | 1.185 | 0 | 0 | 0 | 0 | 0 | 0 |
| ASTRO2001806 | 0 | 0 | 0 | 0 | 0 | 1.603 | 0 |
| ASTRO2001823 | 3.631 | 0 | 0 | 0 | 0 | 0 | 0 |
| ASTRO2002024 | 32.797 | 0 | 0 | 0 | 0 | 0 | 0 |
| ASTRO2002064 | 0 | 51.654 | 0 | 0 | 0 | 0 | 0 |
| ASTRO2002202 | 3.843 | 0 | 0 | 0 | 0 | 5.163 | 0 |
| ASTRO2003024 | 1.581 | 0 | 0 | 0 | 0 | 1.062 | 0 |
| ASTRO2003316 | 2.460 | 0 | 0 | 0 | 0 | 16.521 | 0 |
| ASTRO2003461 | 4.967 | 0 | 0 | 0 | 0 | 6.672 | 0 |
| ASTRO2003632 | 0 | 0 | 0 | 8.597 | 9.049 | 0.931 | 8.922 |
| ASTRO2003840 | 5.165 | 0 | 0 | 0 | 0 | 0 | 0 |
| ASTRO2004628 | 7.422 | 0 | 0 | 0 | 0 | 0 | 0 |
| ASTRO2004974 | 3.240 | 0 | 0 | 0 | 0 | 0 | 0 |
| ASTRO2005360 | 4.974 | 0 | 0 | 0 | 0 | 6.682 | 0 |
| ASTRO2005423 | 2.871 | 0 | 0 | 0 | 0 | 3.857 | 0 |
| ASTRO2005593 | 0 | 51.654 | 0 | 0 | 0 | 0 | 0 |
| ASTRO2005687 | 0 | 0 | 0 | 0 | 0 | 4.994 | 0 |
| ASTRO2006920 | 10.005 | 0 | 0 | 0 | 0 | 0 | 0 |
| ASTRO2007047 | 1.743 | 0 | 0 | 0 | 0 | 0 | 0 |
| ASTRO2007948 | 2.088 | 18.541 | 0 | 0 | 0 | 2.805 | 0 |
| ASTRO2008216 | 2.661 | 0 | 0 | 0 | 0 | 0 | 0 |
| ASTRO2009068 | 4.718 | 20.946 | 0 | 0 | 0 | 0 | 0 |
| ASTRO2009118 | 0 | 0 | 0 | 0 | 0 | 17.497 | 0 |
| ASTRO2010582 | 0 | 0 | 0 | 0 | 0 | 19.388 | 0 |
| ASTRO2010819 | 4.489 | 0 | 0 | 13.924 | 0 | 2.261 | 0 |
| ASTRO2012552 | 1.233 | 0 | 10.162 | 0 | 0 | 0 | 0 |
| ASTRO2013585 | 1.219 | 5.414 | 0 | 0 | 0 | 0 | 0 |
| ASTRO2013671 | 19.399 | 0 | 0 | 0 | 0 | 0 | 0 |
| ASTRO2014135 | 0 | 0 | 0 | 0 | 75.660 | 0 | 0 |
| ASTRO2014561 | 0 | 0 | 60.587 | 0 | 0 | 0 | 0 |
| ASTRO2014863 | 0 | 0 | 0 | 0 | 0 | 3.784 | 0 |
| ASTRO2015529 | 0 | 0 | 0 | 38.341 | 0 | 0 | 0 |
| ASTRO2016491 | 1.260 | 1.864 | 0 | 0 | 0 | 2.256 | 0 |
| ASTRO2018169 | 1.575 | 3.496 | 0 | 0 | 0 | 1.058 | 0 |
| ASTRO2018373 | 0 | 51.654 | 0 | 0 | 0 | 0 | 0 |
| BGGI11000123 | 0.584 | 0 | 0 | 0 | 0 | 1.570 | 0 |
| BGGI12000054 | 0.393 | 4.359 | 1.619 | 4.874 | 0 | 1.319 | 0 |
| BGGI12000533 | 0 | 0 | 0 | 0 | 0 | 2.529 | 0 |
| BGGI12000839 | 0.615 | 0 | 5.070 | 0 | 0 | 0.826 | 15.837 |
| BGGI12001002 | 0 | 0 | 12.205 | 0 | 0 | 0 | 0 |
| BGGI12001075 | 1.651 | 0 | 0 | 0 | 0 | 4.435 | 0 |
| BGGI12001682 | 0 | 3.823 | 0 | 0 | 0 | 0 | 0 |
| BLADE2000492 | 0 | 0 | 0 | 0 | 0 | 0 | 75.368 |
| BLADE2004089 | 0 | 0 | 0 | 0 | 0 | 11.100 | 0 |
| BLADE2006412 | 5.063 | 0 | 0 | 0 | 0 | 0 | 0 |
| BLADE2006830 | 0 | 6.222 | 0 | 0 | 0 | 0 | 0 |
| BLADE2007589 | 12.366 | 0 | 0 | 0 | 0 | 0 | 0 |
| BLADE2007666 | 5.682 | 0 | 0 | 0 | 0 | 0 | 0 |
| BLADE2008398 | 0 | 0 | 0 | 0 | 0 | 6.946 | 0 |
| BLADE2008461 | 6.201 | 0 | 0 | 0 | 0 | 0 | 0 |
| BNGH41000098 | 0 | 0 | 0 | 0 | 0 | 2.839 | 0 |
| BNGH41000137 | 3.618 | 0 | 0 | 0 | 0 | 0 | 0 |
| BNGH41000153 | 0 | 0 | 0 | 0 | 0 | 5.264 | 0 |
| BNGH41000190 | 4.220 | 0 | 0 | 0 | 0 | 5.669 | 0 |
| BNGH41000235 | 5.435 | 0 | 0 | 0 | 0 | 0 | 0 |
| BNGH42000360 | 0.131 | 0 | 0 | 0 | 0 | 0.176 | 0 |
| BNGH42000739 | 0.519 | 2.303 | 0 | 0 | 0 | 1.394 | 0 |
| BNGH42002168 | 0 | 0 | 0 | 0 | 0 | 1.490 | 0 |
| BNGH42005968 | 3.830 | 0 | 0 | 0 | 0 | 5.146 | 0 |
| BNGH42006135 | 2.753 | 0 | 0 | 0 | 14.381 | 2.958 | 0 |
| BNGH42007366 | 0 | 0 | 0 | 0 | 0 | 7.163 | 0 |
| BNGH42007460 | 0 | 3.730 | 0 | 0 | 0 | 0 | 0 |
| BNGH42007709 | 0.192 | 0.852 | 0 | 0 | 0 | 0.516 | 4.943 |
| BNGH42007788 | 2.567 | 0 | 0 | 0 | 0 | 3.448 | 0 |
| BNGH42008603 | 1.206 | 10.708 | 0 | 0 | 0 | 0 | 0 |
| BNGH42008743 | 0 | 0 | 0 | 0 | 0 | 1.724 | 33.061 |
| BRACE1000020 | 0 | 0 | 0 | 0 | 0 | 12.608 | 0 |
| BRACE1000042 | 1.269 | 0 | 0 | 0 | 0 | 0 | 0 |
| BRACE1000070 | 1.491 | 0 | 12.290 | 0 | 0 | 2.002 | 0 |
| BRACE1000073 | 0 | 31.214 | 0 | 0 | 0 | 0 | 0 |
| BRACE1000115 | 0.156 | 0 | 0 | 0 | 0 | 0 | 0 |
| BRACE1000131 | 2.606 | 0 | 0 | 0 | 0 | 2.333 | 0 |
| BRACE1000159 | 1.540 | 6.835 | 0 | 0 | 0 | 0 | 0 |
| BRACE1000166 | 54.019 | 0 | 0 | 0 | 0 | 0 | 0 |
| BRACE1000186 | 0 | 16.007 | 0 | 0 | 0 | 0 | 0 |
| BRACE2000061 | 32.684 | 0 | 0 | 0 | 0 | 0 | 0 |
| BRACE2000245 | 14.749 | 0 | 0 | 0 | 0 | 0 | 0 |
| BRACE2000300 | 0 | 39.353 | 0 | 0 | 0 | 0 | 0 |
| BRACE2000332 | 0 | 0 | 0 | 0 | 0 | 3.040 | 0 |
| BRACE2000347 | 2.156 | 0 | 17.773 | 0 | 0 | 5.791 | 0 |
| BRACE2000487 | 6.842 | 0 | 0 | 0 | 0 | 0 | 0 |
| BRACE2000525 | 0 | 18.043 | 0 | 0 | 0 | 1.820 | 0 |
| BRACE2000565 | 0 | 53.096 | 0 | 0 | 0 | 0 | 0 |
| BRACE2000753 | 25.397 | 0 | 0 | 0 | 0 | 0 | 0 |
| BRACE2000864 | 0 | 9.768 | 0 | 0 | 0 | 0 | 0 |
| BRACE2000893 | 0 | 16.728 | 0 | 0 | 0 | 5.062 | 0 |
| BRACE2000975 | 0 | 9.485 | 0 | 0 | 0 | 0 | 0 |
| BRACE2001065 | 0 | 24.580 | 0 | 0 | 0 | 7.438 | 0 |
| BRACE2001117 | 2.293 | 0 | 0 | 0 | 0 | 0 | 0 |
| BRACE2001143 | 0 | 5.499 | 0 | 0 | 0 | 0 | 0 |
| BRACE2001154 | 8.859 | 39.329 | 0 | 0 | 0 | 0 | 0 |
| BRACE2001188 | 0 | 0 | 0 | 0 | 61.486 | 0 | 0 |
| BRACE2001313 | 25.397 | 0 | 0 | 0 | 0 | 0 | 0 |
| BRACE2001477 | 2.868 | 0 | 0 | 0 | 0 | 3.852 | 0 |
| BRACE2001496 | 0 | 17.958 | 0 | 0 | 0 | 0 | 0 |
| BRACE2001497 | 0 | 13.795 | 0 | 0 | 0 | 2.087 | 0 |
| BRACE2001673 | 0 | 0.868 | 0 | 0 | 0 | 0 | 0 |
| BRACE2001692 | 1.010 | 2.241 | 4.163 | 0 | 0 | 0.678 | 0 |
| BRACE2001709 | 2.706 | 0 | 0 | 0 | 0 | 0 | 0 |
| BRACE2001711 | 0 | 0 | 26.743 | 0 | 0 | 0 | 0 |
| BRACE2001834 | 0 | 14.049 | 0 | 0 | 0 | 0 | 0 |
| BRACE2001855 | 1.919 | 0 | 0 | 0 | 0 | 0 | 0 |
| BRACE2001892 | 0 | 4.485 | 0 | 0 | 0 | 0 | 0 |
| BRACE2001942 | 54.019 | 0 | 0 | 0 | 0 | 0 | 0 |
| BRACE2001944 | 0 | 23.221 | 0 | 0 | 0 | 0 | 0 |
| BRACE2001971 | 0 | 0 | 0 | 0 | 0 | 2.512 | 0 |
| BRACE2002050 | 0 | 0 | 0 | 0 | 0 | 3.248 | 0 |
| BRACE2002081 | 16.001 | 0 | 0 | 0 | 0 | 0 | 0 |
| BRACE2002091 | 5.283 | 0 | 0 | 0 | 0 | 0 | 0 |
| BRACE2002392 | 0 | 6.380 | 0 | 0 | 0 | 0 | 0 |
| BRACE2002649 | 8.829 | 0 | 0 | 0 | 0 | 23.719 | 0 |
| BRACE2002661 | 2.401 | 0 | 19.799 | 0 | 0 | 0 | 0 |
| BRACE2002677 | 1.610 | 0 | 0 | 0 | 0 | 2.162 | 41.460 |
| BRACE2002685 | 0 | 12.688 | 0 | 0 | 0 | 0 | 0 |
| BRACE2002755 | 0 | 0 | 0 | 0 | 0 | 61.213 | 0 |
| BRACE2002812 | 0 | 21.753 | 0 | 0 | 0 | 0 | 0 |
| BRACE2002860 | 4.199 | 0 | 0 | 0 | 0 | 0 | 0 |
| BRACE2003037 | 0 | 7.993 | 0 | 0 | 0 | 0 | 0 |
| BRACE2003172 | 0 | 1.203 | 0 | 0 | 0 | 0.728 | 0 |
| BRACE2003254 | 0 | 0 | 0 | 0 | 0 | 1.014 | 0 |
| BRACE2003304 | 1.823 | 0 | 0 | 0 | 0 | 2.449 | 0 |
| BRACE2003527 | 4.299 | 0 | 0 | 0 | 0 | 0 | 0 |
| BRACE2003594 | 9.736 | 0 | 0 | 0 | 0 | 0 | 0 |
| BRACE2003628 | 5.689 | 0 | 0 | 0 | 0 | 0 | 0 |
| BRACE2003785 | 0 | 3.597 | 0 | 0 | 0 | 0 | 0 |
| BRACE2003788 | 32.523 | 0 | 0 | 0 | 0 | 0 | 0 |
| BRACE2003800 | 0 | 0 | 0 | 0 | 0 | 30.700 | 0 |
| BRACE2003827 | 0.731 | 3.243 | 0 | 0 | 0 | 1.963 | 0 |
| BRACE2003845 | 7.598 | 0 | 0 | 0 | 0 | 0 | 0 |
| BRACE2003846 | 1.087 | 0 | 0 | 0 | 0 | 2.920 | 0 |
| BRACE2003848 | 0 | 0 | 0 | 0 | 0 | 61.213 | 0 |
| BRACE2003892 | 1.820 | 0 | 0 | 0 | 0 | 2.445 | 0 |
| BRACE2003944 | 0 | 0 | 0 | 0 | 0 | 1.740 | 0 |
| BRACE2003982 | 0 | 45.699 | 0 | 0 | 0 | 0 | 0 |
| BRACE2005087 | 4.325 | 0 | 0 | 0 | 0 | 4.648 | 0 |
| BRACE2005099 | 0 | 14.762 | 0 | 0 | 0 | 0 | 0 |
| BRACE2005231 | 2.662 | 0 | 0 | 0 | 0 | 0 | 0 |
| BRACE2005298 | 25.397 | 0 | 0 | 0 | 0 | 0 | 0 |
| BRACE2005395 | 23.586 | 0 | 0 | 0 | 0 | 0 | 0 |
| BRACE2005408 | 15.862 | 35.208 | 0 | 0 | 0 | 10.654 | 0 |
| BRACE2005433 | 9.630 | 0 | 0 | 0 | 0 | 0 | 0 |
| BRACE2006055 | 0 | 7.405 | 0 | 0 | 0 | 0 | 0 |
| BRACE2006084 | 0 | 0 | 0 | 0 | 0 | 0 | 65.917 |
| BRACE2006102 | 70.146 | 0 | 0 | 0 | 0 | 0 | 0 |
| BRACE2006105 | 17.691 | 0 | 0 | 0 | 0 | 0 | 0 |
| BRACE2006162 | 0 | 0 | 0 | 32.021 | 0 | 0 | 0 |
| BRACE2006249 | 54.019 | 0 | 0 | 0 | 0 | 0 | 0 |
| BRACE2006258 | 0 | 0 | 0 | 16.951 | 0 | 0 | 0 |
| BRACE2006264 | 0 | 0 | 0 | 0 | 0 | 9.454 | 0 |
| BRACE2006319 | 8.770 | 0 | 0 | 0 | 0 | 0 | 0 |
| BRACE2006363 | 0 | 0 | 0 | 0 | 0 | 10.381 | 0 |
| BRACE2006378 | 0 | 0 | 0 | 0 | 0 | 61.213 | 0 |
| BRACE2006397 | 0.246 | 1.093 | 0 | 6.108 | 0 | 0.661 | 0 |
| BRACE2006514 | 1.449 | 3.216 | 0 | 0 | 0 | 1.946 | 0 |
| BRACE2006537 | 1.795 | 7.968 | 0 | 0 | 0 | 2.411 | 0 |
| BRACE2006547 | 0 | 0 | 0 | 0 | 0 | 16.759 | 0 |
| BRACE2006564 | 70.146 | 0 | 0 | 0 | 0 | 0 | 0 |
| BRACE2006753 | 0 | 22.762 | 0 | 0 | 0 | 0 | 0 |
| BRACE2006871 | 0.834 | 0 | 0 | 0 | 0 | 1.120 | 0 |
| BRACE2006900 | 2.145 | 0 | 0 | 0 | 11.207 | 0.576 | 0 |
| BRACE2006937 | 0 | 4.954 | 0 | 0 | 0 | 0 | 0 |
| BRACE2006982 | 0 | 4.802 | 0 | 0 | 0 | 0 | 0 |
| BRACE2007064 | 4.065 | 0 | 0 | 0 | 0 | 7.280 | 0 |
| BRACE2007068 | 20.883 | 0 | 0 | 0 | 0 | 0 | 0 |
| BRACE2007089 | 1.412 | 0 | 0 | 0 | 0 | 0 | 0 |
| BRACE2007109 | 0 | 7.067 | 0 | 0 | 0 | 0 | 0 |
| BRACE2007174 | 13.027 | 0 | 0 | 0 | 0 | 0 | 0 |
| BRACE2007191 | 6.300 | 2.543 | 0 | 0 | 0 | 0 | 0 |
| BRACE2007254 | 6.207 | 0 | 0 | 0 | 0 | 8.338 | 0 |
| BRACE2007518 | 0 | 0 | 0 | 0 | 0 | 2.542 | 0 |
| BRACE2007567 | 0 | 5.136 | 0 | 0 | 0 | 0 | 0 |
| BRACE2007767 | 0 | 0 | 0 | 0 | 0 | 0 | 66.860 |
| BRACE2007798 | 0 | 11.487 | 0 | 0 | 0 | 0 | 0 |
| BRACE2008097 | 4.003 | 0 | 0 | 0 | 0 | 0 | 0 |
| BRACE2008358 | 1.890 | 0 | 0 | 0 | 0 | 0 | 0 |
| BRACE2008380 | 0 | 7.232 | 0 | 0 | 0 | 0 | 0 |
| BRACE2008385 | 0 | 15.462 | 0 | 0 | 0 | 0 | 0 |
| BRACE2008399 | 0 | 20.487 | 0 | 0 | 0 | 0 | 0 |
| BRACE2008402 | 0 | 0 | 28.830 | 0 | 0 | 0 | 0 |
| BRACE2008653 | 2.639 | 1.952 | 0 | 0 | 0 | 3.545 | 0 |
| BRACE2008706 | 2.740 | 0 | 0 | 0 | 0 | 0 | 0 |
| BRACE2008968 | 0.485 | 2.152 | 0 | 0 | 0 | 0 | 0 |
| BRACE2009037 | 0.487 | 1.081 | 2.008 | 0 | 0 | 0.327 | 0 |
| BRACE2009044 | 8.366 | 0 | 0 | 0 | 0 | 0 | 0 |
| BRACE2009291 | 1.103 | 0 | 0 | 0 | 0 | 1.482 | 0 |
| BRACE2009483 | 7.327 | 0 | 0 | 0 | 0 | 0 | 0 |
| BRACE2009558 | 2.398 | 0 | 0 | 0 | 0 | 3.221 | 0 |
| BRACE2009620 | 16.001 | 0 | 0 | 0 | 0 | 0 | 0 |
| BRACE2010651 | 0 | 68.405 | 0 | 0 | 0 | 0 | 0 |
| BRACE2010669 | 10.631 | 0 | 0 | 0 | 0 | 0 | 0 |
| BRACE2010684 | 0 | 0 | 0 | 0 | 0 | 61.213 | 0 |
| BRACE2011183 | 0 | 23.795 | 0 | 0 | 0 | 0 | 0 |
| BRACE2011265 | 0 | 0 | 0 | 0 | 0 | 0 | 79.669 |
| BRACE2012317 | 0 | 0 | 0 | 0 | 0 | 2.306 | 0 |
| BRACE2012528 | 0.395 | 14.044 | 0 | 0 | 0 | 0 | 0 |
| BRACE2012814 | 2.557 | 0 | 0 | 0 | 0 | 1.718 | 0 |
| BRACE2013855 | 6.688 | 0 | 0 | 0 | 0 | 0 | 0 |
| BRACE2013911 | 6.268 | 0 | 0 | 0 | 0 | 0 | 0 |
| BRACE2014257 | 20.681 | 0 | 0 | 0 | 0 | 0 | 0 |
| BRACE2014306 | 0 | 18.017 | 0 | 0 | 0 | 0 | 0 |
| BRACE2014746 | 0 | 25.830 | 0 | 0 | 0 | 0 | 0 |
| BRACE2014850 | 6.254 | 0 | 0 | 0 | 0 | 0 | 0 |
| BRACE2015058 | 0 | 16.230 | 0 | 0 | 0 | 0 | 0 |
| BRACE2015287 | 3.830 | 8.501 | 15.788 | 0 | 0 | 0 | 0 |
| BRACE2016362 | 12.854 | 0 | 0 | 0 | 0 | 0 | 0 |
| BRACE2016981 | 0 | 83.911 | 0 | 0 | 0 | 0 | 0 |
| BRACE2017397 | 1.967 | 0 | 0 | 0 | 0 | 2.642 | 0 |
| BRACE2017574 | 4.272 | 0 | 0 | 0 | 0 | 0 | 0 |
| BRACE2017985 | 0 | 0 | 0 | 0 | 0 | 61.213 | 0 |
| BRACE2018337 | 0 | 8.817 | 0 | 0 | 0 | 0 | 0 |
| BRACE2018443 | 54.019 | 0 | 0 | 0 | 0 | 0 | 0 |
| BRACE2019519 | 0 | 0 | 0 | 0 | 0 | 20.849 | 0 |
| BRACE2019877 | 5.065 | 22.483 | 0 | 0 | 0 | 0 | 0 |
| BRACE2021014 | 4.940 | 0 | 0 | 0 | 0 | 6.636 | 0 |
| BRACE2021708 | 49.377 | 0 | 0 | 0 | 0 | 0 | 0 |
| BRACE2022638 | 1.243 | 0 | 0 | 0 | 0 | 0 | 0 |
| BRACE2023727 | 0 | 73.082 | 0 | 0 | 0 | 0 | 0 |
| BRACE2023801 | 31.304 | 0 | 0 | 0 | 0 | 42.051 | 0 |
| BRACE2024074 | 54.019 | 0 | 0 | 0 | 0 | 0 | 0 |
| BRACE2025437 | 2.546 | 11.301 | 0 | 0 | 0 | 3.420 | 65.567 |
| BRACE2026725 | 0 | 0 | 0 | 0 | 0 | 20.538 | 0 |
| BRACE2027643 | 12.010 | 0 | 0 | 0 | 0 | 0 | 0 |
| BRACE2027970 | 54.019 | 0 | 0 | 0 | 0 | 0 | 0 |
| BRACE2029356 | 54.019 | 0 | 0 | 0 | 0 | 0 | 0 |
| BRACE2029644 | 54.019 | 0 | 0 | 0 | 0 | 0 | 0 |
| BRACE2030323 | 0 | 0 | 0 | 0 | 0 | 35.088 | 0 |
| BRACE2030345 | 54.019 | 0 | 0 | 0 | 0 | 0 | 0 |
| BRACE2032477 | 4.647 | 0 | 0 | 0 | 0 | 12.484 | 0 |
| BRACE2035381 | 0 | 0 | 0 | 0 | 0 | 11.400 | 0 |
| BRACE2039624 | 0.807 | 0 | 0 | 0 | 0 | 0 | 0 |
| BRACE2041200 | 0 | 0 | 0 | 0 | 0 | 61.213 | 0 |
| BRACE2044286 | 0 | 0 | 0 | 0 | 0 | 20.910 | 0 |
| BRACE2047350 | 54.019 | 0 | 0 | 0 | 0 | 0 | 0 |
| BRACE3000973 | 22.478 | 0 | 0 | 0 | 0 | 0 | 0 |
| BRACE3001754 | 0 | 0 | 0 | 0 | 0 | 61.213 | 0 |
| BRACE3003413 | 54.019 | 0 | 0 | 0 | 0 | 0 | 0 |
| BRACE3003698 | 54.019 | 0 | 0 | 0 | 0 | 0 | 0 |
| BRACE3004862 | 0 | 0 | 0 | 0 | 0 | 61.213 | 0 |
| BRACE3005499 | 26.080 | 0 | 0 | 0 | 0 | 0 | 0 |
| BRACE3005938 | 0.918 | 4.076 | 0 | 0 | 0 | 2.467 | 0 |
| BRACE3005989 | 0 | 0 | 0 | 0 | 0 | 0.262 | 0 |
| BRACE3006553 | 0 | 0 | 0 | 0 | 0 | 14.418 | 0 |
| BRACE3007258 | 10.851 | 0 | 0 | 0 | 0 | 0 | 0 |
| BRACE3008036 | 0 | 68.309 | 0 | 0 | 0 | 0 | 0 |
| BRACE3008095 | 54.019 | 0 | 0 | 0 | 0 | 0 | 0 |
| BRACE3009416 | 0 | 0 | 0 | 0 | 0 | 31.969 | 0 |
| BRACE3010283 | 0 | 0 | 0 | 0 | 0 | 61.213 | 0 |
| BRACE3010428 | 1.909 | 0 | 0 | 0 | 0 | 0 | 0 |
| BRACE3010438 | 1.493 | 0 | 0 | 0 | 0 | 4.012 | 0 |
| BRACE3011421 | 0 | 0 | 0 | 0 | 0 | 31.645 | 0 |
| BRACE3012806 | 54.019 | 0 | 0 | 0 | 0 | 0 | 0 |
| BRACE3012930 | 0 | 0 | 0 | 0 | 0 | 61.213 | 0 |
| BRACE3017253 | 0 | 0 | 0 | 0 | 0 | 44.106 | 0 |
| BRACE3019941 | 0 | 0 | 0 | 0 | 0 | 3.273 | 0 |
| BRACE3020669 | 0 | 0 | 0 | 0 | 0 | 61.213 | 0 |
| BRACE3022312 | 0 | 0 | 0 | 0 | 0 | 38.115 | 0 |
| BRACE3025719 | 0 | 0 | 0 | 0 | 0 | 20.176 | 0 |
| BRACE3027478 | 0 | 0 | 0 | 0 | 0 | 17.928 | 0 |
| BRACE3027976 | 54.019 | 0 | 0 | 0 | 0 | 0 | 0 |
| BRACE3028895 | 37.949 | 0 | 0 | 0 | 0 | 0 | 0 |
| BRACE3032631 | 10.516 | 0 | 0 | 0 | 0 | 0 | 0 |
| BRACE3035168 | 70.146 | 0 | 0 | 0 | 0 | 0 | 0 |
| BRACE3040863 | 29.832 | 0 | 0 | 0 | 0 | 0 | 0 |
| BRACE3042326 | 0 | 0 | 0 | 0 | 0 | 39.301 | 0 |
| BRALZ2000988 | 4.328 | 19.213 | 0 | 0 | 0 | 0 | 0 |
| BRALZ2001038 | 0 | 0 | 0 | 0 | 0 | 18.205 | 0 |
| BRALZ2009482 | 0.310 | 0 | 2.555 | 7.690 | 0 | 2.914 | 0 |
| BRALZ2011796 | 4.596 | 0 | 0 | 0 | 0 | 0 | 0 |
| BRALZ2011880 | 5.085 | 0 | 0 | 0 | 0 | 0 | 0 |
| BRALZ2017844 | 0 | 50.604 | 0 | 0 | 0 | 0 | 0 |
| BRAMY2000354 | 3.437 | 0 | 0 | 0 | 0 | 0 | 0 |
| BRAMY2000388 | 0 | 45.295 | 0 | 0 | 0 | 0 | 0 |
| BRAMY2000508 | 29.346 | 0 | 0 | 0 | 0 | 0 | 0 |
| BRAMY2000562 | 1.602 | 21.340 | 0 | 0 | 0 | 0 | 0 |
| BRAMY2000585 | 2.048 | 0 | 0 | 0 | 0 | 0 | 0 |
| BRAMY2000814 | 0 | 78.604 | 0 | 0 | 0 | 0 | 0 |
| BRAMY2000893 | 0 | 0 | 0 | 0 | 0 | 1.705 | 0 |
| BRAMY2001678 | 62.337 | 0 | 0 | 0 | 0 | 0 | 0 |
| BRAMY2003008 | 0 | 0 | 0 | 0 | 0 | 29.622 | 0 |
| BRAMY2004363 | 3.409 | 0 | 0 | 0 | 0 | 6.870 | 0 |
| BRAMY2004521 | 5.929 | 0 | 0 | 0 | 0 | 2.655 | 0 |
| BRAMY2005488 | 9.502 | 0 | 0 | 0 | 0 | 0 | 0 |
| BRAMY2005576 | 0 | 78.604 | 0 | 0 | 0 | 0 | 0 |
| BRAMY2006366 | 0 | 0 | 63.335 | 0 | 0 | 0 | 0 |
| BRAMY2006375 | 59.294 | 0 | 0 | 0 | 0 | 0 | 0 |
| BRAMY2009013 | 5.079 | 0 | 0 | 0 | 0 | 0 | 0 |
| BRAMY2009023 | 11.054 | 49.073 | 0 | 0 | 0 | 0 | 0 |
| BRAMY2011105 | 0 | 11.213 | 0 | 0 | 0 | 0 | 0 |
| BRAMY2012091 | 4.951 | 0 | 0 | 0 | 0 | 0 | 0 |
| BRAMY2012536 | 0.963 | 4.273 | 0 | 0 | 0 | 0 | 0 |
| BRAMY2012581 | 0 | 0 | 0 | 0 | 0 | 25.588 | 0 |
| BRAMY2013169 | 0 | 0 | 0 | 0 | 0 | 12.737 | 0 |
| BRAMY2013590 | 18.015 | 0 | 0 | 0 | 0 | 0 | 0 |
| BRAMY2014754 | 1.168 | 5.185 | 0 | 0 | 0 | 0 | 0 |
| BRAMY2014813 | 8.044 | 0 | 0 | 0 | 0 | 0 | 0 |
| BRAMY2015211 | 0 | 0 | 0 | 0 | 0 | 14.550 | 0 |
| BRAMY2015550 | 28.262 | 0 | 0 | 0 | 0 | 0 | 0 |
| BRAMY2015782 | 0 | 0 | 0 | 0 | 85.296 | 0 | 0 |
| BRAMY2015833 | 3.844 | 0 | 0 | 0 | 0 | 0 | 0 |
| BRAMY2016009 | 13.082 | 0 | 0 | 0 | 0 | 0 | 0 |
| BRAMY2016386 | 45.282 | 0 | 0 | 0 | 0 | 0 | 0 |
| BRAMY2016706 | 0 | 0 | 34.076 | 0 | 0 | 0 | 0 |
| BRAMY2017864 | 11.521 | 0 | 0 | 0 | 0 | 0 | 0 |
| BRAMY2018122 | 0 | 0 | 87.217 | 0 | 0 | 0 | 0 |
| BRAMY2018785 | 0 | 25.173 | 0 | 0 | 0 | 0 | 0 |
| BRAMY2019554 | 1.996 | 0 | 0 | 0 | 0 | 1.788 | 0 |
| BRAMY2019600 | 6.733 | 0 | 0 | 0 | 0 | 0 | 0 |
| BRAMY2019963 | 0 | 25.206 | 0 | 0 | 0 | 7.628 | 0 |
| BRAMY2019989 | 3.216 | 3.569 | 0 | 0 | 0 | 1.080 | 0 |
| BRAMY2020412 | 8.951 | 0 | 0 | 0 | 0 | 0 | 0 |
| BRAMY2020427 | 1.481 | 2.192 | 0 | 0 | 0 | 0 | 0 |
| BRAMY2021139 | 0 | 0 | 0 | 0 | 0 | 28.667 | 0 |
| BRAMY2022160 | 10.505 | 0 | 0 | 0 | 0 | 0 | 0 |
| BRAMY2022168 | 11.280 | 0 | 0 | 0 | 0 | 15.152 | 0 |
| BRAMY2022445 | 0 | 0 | 0 | 0 | 0 | 52.645 | 0 |
| BRAMY2022493 | 4.424 | 0 | 0 | 0 | 0 | 2.972 | 0 |
| BRAMY2022786 | 0 | 9.238 | 0 | 0 | 0 | 1.398 | 0 |
| BRAMY2023406 | 0 | 0 | 45.388 | 0 | 0 | 0 | 0 |
| BRAMY2023729 | 0 | 0 | 0 | 0 | 0 | 52.645 | 0 |
| BRAMY2024390 | 29.138 | 0 | 0 | 0 | 0 | 0 | 0 |
| BRAMY2024416 | 0 | 16.750 | 0 | 0 | 0 | 0 | 0 |
| BRAMY2024827 | 1.663 | 0 | 0 | 0 | 0 | 0 | 0 |
| BRAMY2026009 | 0 | 55.048 | 0 | 0 | 0 | 0 | 0 |
| BRAMY2026685 | 8.266 | 0 | 0 | 0 | 0 | 13.881 | 0 |
| BRAMY2027114 | 0 | 63.622 | 0 | 0 | 0 | 0 | 0 |
| BRAMY2027587 | 33.403 | 0 | 0 | 0 | 0 | 0 | 0 |
| BRAMY2027739 | 1.122 | 0 | 0 | 0 | 0 | 0 | 0 |
| BRAMY2028516 | 0 | 0 | 81.346 | 0 | 0 | 0 | 0 |
| BRAMY2028682 | 0 | 78.604 | 0 | 0 | 0 | 0 | 0 |
| BRAMY2028740 | 0.776 | 0 | 0 | 0 | 0 | 5.214 | 0 |
| BRAMY2028796 | 0 | 0 | 0 | 0 | 0 | 1.665 | 0 |
| BRAMY2031516 | 0 | 0 | 0 | 0 | 0 | 16.547 | 0 |
| BRAMY2032087 | 9.088 | 0 | 0 | 0 | 0 | 8.139 | 0 |
| BRAMY2032696 | 0 | 78.604 | 0 | 0 | 0 | 0 | 0 |
| BRAMY2033316 | 45.282 | 0 | 0 | 0 | 0 | 0 | 0 |
| BRAMY2035070 | 45.282 | 0 | 0 | 0 | 0 | 0 | 0 |
| BRAMY2035719 | 12.665 | 0 | 0 | 0 | 0 | 0 | 0 |
| BRAMY2036076 | 0 | 40.038 | 0 | 0 | 0 | 0 | 0 |
| BRAMY2036459 | 1.571 | 0 | 0 | 0 | 0 | 4.222 | 0 |
| BRAMY2038846 | 0 | 0 | 0 | 0 | 0 | 52.645 | 0 |
| BRAMY2039872 | 16.531 | 0 | 0 | 0 | 0 | 0 | 0 |
| BRAMY2040095 | 1.140 | 0 | 2.350 | 0 | 0 | 0 | 0 |
| BRAMY2043069 | 0 | 78.604 | 0 | 0 | 0 | 0 | 0 |
| BRAMY2045530 | 7.866 | 0 | 0 | 0 | 0 | 0 | 0 |
| BRAMY2047420 | 0.845 | 0 | 0 | 0 | 0 | 0 | 0 |
| BRAMY3002120 | 45.282 | 0 | 0 | 0 | 0 | 0 | 0 |
| BRAMY3002458 | 0 | 0 | 0 | 0 | 0 | 13.906 | 0 |
| BRAMY3003205 | 20.062 | 0 | 0 | 0 | 0 | 0 | 0 |
| BRAMY3003310 | 45.282 | 0 | 0 | 0 | 0 | 0 | 0 |
| BRAMY3004364 | 11.329 | 0 | 0 | 0 | 0 | 0 | 0 |
| BRAMY3004377 | 0.692 | 0 | 0 | 0 | 18.065 | 1.858 | 0 |
| BRAMY3007311 | 0 | 29.082 | 0 | 0 | 0 | 0 | 0 |
| BRAMY3008044 | 0 | 0 | 0 | 0 | 0 | 2.009 | 0 |
| BRAMY3009491 | 26.018 | 0 | 0 | 0 | 0 | 0 | 0 |
| BRAMY3010008 | 0.485 | 0 | 0 | 0 | 0 | 0 | 0 |
| BRAMY3010492 | 14.407 | 0 | 0 | 0 | 0 | 0 | 0 |
| BRAMY4000089 | 16.974 | 0 | 0 | 0 | 0 | 5.700 | 0 |
| BRAMY4001234 | 45.282 | 0 | 0 | 0 | 0 | 0 | 0 |
| BRAMY4001863 | 12.491 | 0 | 0 | 0 | 0 | 0 | 0 |
| BRAMY4002628 | 17.768 | 0 | 0 | 0 | 0 | 23.868 | 0 |
| BRAWH1000001 | 2.775 | 0 | 0 | 0 | 0 | 0 | 0 |
| BRAWH1000007 | 7.493 | 0 | 0 | 0 | 0 | 0 | 0 |
| BRAWH1000037 | 0 | 6.750 | 0 | 0 | 0 | 0 | 0 |
| BRAWH1000040 | 0 | 5.094 | 0 | 0 | 0 | 0.771 | 0 |
| BRAWH1000045 | 0 | 7.411 | 0 | 0 | 0 | 0 | 0 |
| BRAWH1000083 | 3.778 | 0 | 0 | 0 | 0 | 0 | 0 |
| BRAWH1000093 | 3.461 | 0 | 0 | 0 | 0 | 0 | 0 |
| BRAWH1000127 | 0 | 11.833 | 0 | 0 | 0 | 0 | 0 |
| BRAWH1000162 | 0 | 20.267 | 0 | 0 | 0 | 0 | 0 |
| BRAWH1000174 | 0 | 10.605 | 0 | 0 | 0 | 0 | 0 |
| BRAWH2000082 | 0 | 9.939 | 0 | 0 | 0 | 0 | 0 |
| BRAWH2000417 | 0 | 18.297 | 0 | 0 | 0 | 0 | 0 |
| BRAWH2000460 | 2.545 | 0 | 0 | 0 | 0 | 0 | 0 |
| BRAWH2000488 | 0 | 0 | 0 | 0 | 0 | 11.293 | 0 |
| BRAWH2000494 | 0 | 33.652 | 0 | 0 | 0 | 0 | 0 |
| BRAWH2000588 | 0 | 0 | 0 | 0 | 0 | 1.405 | 0 |
| BRAWH2000633 | 0 | 0 | 0 | 0 | 0 | 2.970 | 0 |
| BRAWH2000636 | 0 | 7.824 | 0 | 0 | 0 | 6.511 | 0 |
| BRAWH2000686 | 0 | 9.050 | 0 | 0 | 0 | 0 | 0 |
| BRAWH2000697 | 0 | 0 | 0 | 0 | 0 | 2.266 | 0 |
| BRAWH2000839 | 2.055 | 0 | 2.824 | 0 | 0 | 1.380 | 0 |
| BRAWH2000859 | 0 | 0 | 0 | 0 | 0 | 52.833 | 0 |
| BRAWH2000924 | 0.239 | 7.436 | 0 | 0 | 0 | 0 | 0 |
| BRAWH2000944 | 4.350 | 0 | 0 | 0 | 0 | 0 | 0 |
| BRAWH2001019 | 1.902 | 8.442 | 0 | 0 | 0 | 0 | 0 |
| BRAWH2001092 | 0.879 | 1.301 | 3.625 | 0 | 0 | 0.394 | 0 |
| BRAWH2001129 | 0 | 0 | 0 | 0 | 0 | 52.833 | 0 |
| BRAWH2001171 | 0.515 | 0 | 0 | 0 | 0 | 0.692 | 0 |
| BRAWH2001186 | 2.376 | 0 | 0 | 0 | 0 | 0 | 0 |
| BRAWH2001239 | 6.084 | 0 | 0 | 0 | 0 | 0 | 0 |
| BRAWH2001321 | 0 | 12.711 | 0 | 0 | 0 | 0 | 0 |
| BRAWH2001395 | 0 | 9.335 | 0 | 0 | 0 | 0 | 0 |
| BRAWH2001406 | 5.646 | 0 | 0 | 0 | 0 | 0 | 72.702 |
| BRAWH2001412 | 12.538 | 0 | 0 | 0 | 0 | 0 | 0 |
| BRAWH2001418 | 0 | 9.547 | 0 | 0 | 0 | 0 | 0 |
| BRAWH2001424 | 0 | 0 | 0 | 0 | 0 | 5.703 | 0 |
| BRAWH2001439 | 4.290 | 7.617 | 0 | 0 | 0 | 1.153 | 0 |
| BRAWH2001459 | 0 | 18.107 | 0 | 0 | 0 | 0 | 0 |
| BRAWH2001461 | 0 | 0 | 0 | 73.560 | 0 | 0 | 0 |
| BRAWH2001530 | 0 | 0 | 0 | 0 | 0 | 8.550 | 0 |
| BRAWH2001535 | 0 | 12.794 | 0 | 0 | 0 | 0 | 0 |
| BRAWH2001671 | 0 | 14.075 | 0 | 0 | 0 | 0 | 0 |
| BRAWH2002062 | 45.470 | 0 | 0 | 0 | 0 | 0 | 0 |
| BRAWH2002601 | 4.147 | 0 | 0 | 0 | 0 | 5.571 | 0 |
| BRAWH2003240 | 0 | 29.050 | 0 | 0 | 0 | 0 | 0 |
| BRAWH2003689 | 0 | 0 | 0 | 0 | 0 | 52.833 | 0 |
| BRAWH2003693 | 5.706 | 12.664 | 0 | 0 | 0 | 3.832 | 0 |
| BRAWH2003818 | 2.524 | 0 | 0 | 0 | 0 | 0 | 0 |
| BRAWH2004095 | 2.957 | 0 | 0 | 0 | 0 | 0 | 0 |
| BRAWH2004136 | 13.267 | 0 | 0 | 0 | 0 | 0 | 0 |
| BRAWH2004217 | 45.470 | 0 | 0 | 0 | 0 | 0 | 0 |
| BRAWH2004842 | 0 | 14.755 | 0 | 0 | 0 | 0 | 0 |
| BRAWH2005008 | 13.767 | 0 | 0 | 0 | 0 | 0 | 0 |
| BRAWH2005068 | 0.335 | 0 | 2.765 | 0 | 8.761 | 0 | 0 |
| BRAWH2005225 | 19.334 | 0 | 0 | 0 | 0 | 0 | 0 |
| BRAWH2005578 | 0 | 0 | 0 | 0 | 0 | 15.011 | 0 |
| BRAWH2005661 | 5.332 | 5.918 | 0 | 0 | 0 | 0 | 0 |
| BRAWH2006450 | 4.187 | 18.587 | 0 | 0 | 0 | 0 | 0 |
| BRAWH2006493 | 4.241 | 0 | 0 | 0 | 0 | 0 | 0 |
| BRAWH2006526 | 45.470 | 0 | 0 | 0 | 0 | 0 | 0 |
| BRAWH2006543 | 0 | 16.237 | 0 | 0 | 0 | 4.913 | 0 |
| BRAWH2007605 | 8.552 | 0 | 0 | 0 | 0 | 2.298 | 0 |
| BRAWH2007808 | 62.515 | 0 | 0 | 0 | 0 | 0 | 0 |
| BRAWH2008058 | 19.533 | 0 | 0 | 0 | 0 | 0 | 0 |
| BRAWH2008540 | 45.470 | 0 | 0 | 0 | 0 | 0 | 0 |
| BRAWH2008706 | 0 | 0 | 0 | 0 | 0 | 6.442 | 0 |
| BRAWH2008956 | 0 | 0 | 0 | 0 | 0 | 17.441 | 0 |
| BRAWH2009238 | 13.041 | 0 | 0 | 0 | 0 | 0 | 0 |
| BRAWH2009304 | 13.082 | 0 | 0 | 0 | 0 | 0 | 0 |
| BRAWH2009307 | 0 | 7.370 | 0 | 0 | 43.369 | 0 | 0 |
| BRAWH2009360 | 0 | 0 | 0 | 0 | 0 | 9.693 | 0 |
| BRAWH2009678 | 0 | 78.731 | 0 | 0 | 0 | 0 | 0 |
| BRAWH2010329 | 2.086 | 0 | 0 | 0 | 0 | 0 | 0 |
| BRAWH2010354 | 0 | 48.038 | 0 | 0 | 0 | 0 | 0 |
| BRAWH2011096 | 45.470 | 0 | 0 | 0 | 0 | 0 | 0 |
| BRAWH2011343 | 17.548 | 0 | 0 | 0 | 0 | 0 | 0 |
| BRAWH2013219 | 0 | 35.860 | 0 | 0 | 0 | 0 | 0 |
| BRAWH2013294 | 0 | 36.500 | 0 | 0 | 0 | 0 | 0 |
| BRAWH2013871 | 62.515 | 0 | 0 | 0 | 0 | 0 | 0 |
| BRAWH2014053 | 19.364 | 0 | 0 | 0 | 0 | 0 | 0 |
| BRAWH2014188 | 4.179 | 0 | 0 | 0 | 0 | 9.623 | 0 |
| BRAWH2014645 | 7.933 | 3.913 | 0 | 0 | 0 | 3.552 | 22.702 |
| BRAWH2016166 | 0 | 0 | 0 | 0 | 0 | 25.413 | 0 |
| BRAWH2016209 | 6.926 | 0 | 0 | 0 | 0 | 0 | 0 |
| BRAWH2016514 | 29.216 | 0 | 0 | 0 | 0 | 0 | 0 |
| BRAWH2017002 | 0 | 27.634 | 0 | 0 | 0 | 0 | 0 |
| BRAWH2017685 | 1.270 | 0 | 0 | 0 | 0 | 0.568 | 0 |
| BRAWH2018206 | 0 | 40.908 | 0 | 0 | 0 | 0 | 0 |
| BRAWH2018527 | 0 | 31.509 | 0 | 0 | 0 | 0 | 0 |
| BRAWH3000088 | 0 | 8.564 | 0 | 0 | 0 | 0 | 0 |
| BRAWH3000604 | 45.470 | 0 | 0 | 0 | 0 | 0 | 0 |
| BRAWH3001319 | 22.759 | 0 | 0 | 0 | 0 | 30.573 | 0 |
| BRAWH3001918 | 0 | 0 | 0 | 0 | 0 | 15.554 | 0 |
| BRAWH3002853 | 4.317 | 0 | 0 | 0 | 0 | 0 | 0 |
| BRAWH3003411 | 38.592 | 0 | 0 | 0 | 0 | 0 | 0 |
| BRAWH3003573 | 16.812 | 0 | 0 | 0 | 0 | 0 | 0 |
| BRAWH3003727 | 0 | 0 | 0 | 0 | 0 | 33.790 | 0 |
| BRAWH3004350 | 13.825 | 0 | 0 | 0 | 0 | 0 | 0 |
| BRAWH3004530 | 0 | 0 | 0 | 0 | 0 | 19.759 | 0 |
| BRAWH3005146 | 8.444 | 0 | 0 | 0 | 0 | 11.343 | 0 |
| BRAWH3005300 | 0 | 0 | 0 | 0 | 0 | 52.833 | 0 |
| BRAWH3007726 | 45.470 | 0 | 0 | 0 | 0 | 0 | 0 |
| BRAWH3008931 | 8.664 | 0 | 0 | 0 | 0 | 0 | 0 |
| BRAWH3011637 | 0 | 0 | 0 | 0 | 0 | 69.138 | 0 |
| BRAWH3012662 | 0 | 41.917 | 0 | 0 | 0 | 0 | 0 |
| BRAWH3018063 | 0 | 0 | 0 | 0 | 0 | 2.956 | 0 |
| BRAWH3021545 | 15.210 | 0 | 0 | 0 | 0 | 8.173 | 0 |
| BRAWH3021574 | 0 | 17.397 | 0 | 0 | 0 | 0 | 0 |
| BRAWH3024242 | 0 | 0 | 0 | 0 | 0 | 35.669 | 0 |
| BRAWH3024989 | 0 | 0 | 0 | 0 | 0 | 55.728 | 0 |
| BRAWH3029806 | 0 | 0 | 0 | 0 | 0 | 9.982 | 0 |
| BRAWH3035403 | 0 | 0 | 0 | 0 | 0 | 39.582 | 0 |
| BRAWH3035936 | 29.425 | 0 | 0 | 0 | 0 | 0 | 0 |
| BRAWH3036247 | 45.470 | 0 | 0 | 0 | 0 | 0 | 0 |
| BRCAN1000076 | 2.454 | 0 | 0 | 0 | 0 | 0 | 0 |
| BRCAN2000209 | 0 | 61.737 | 0 | 0 | 0 | 0 | 0 |
| BRCAN2002173 | 0 | 14.721 | 0 | 0 | 0 | 0 | 0 |
| BRCAN2002944 | 26.657 | 0 | 0 | 0 | 0 | 0 | 0 |
| BRCAN2003944 | 0.470 | 2.085 | 0 | 0 | 0 | 0.631 | 0 |
| BRCAN2006019 | 0 | 13.906 | 0 | 0 | 0 | 0 | 0 |
| BRCAN2007409 | 5.004 | 0 | 0 | 0 | 0 | 0 | 0 |
| BRCAN2009432 | 2.196 | 0 | 0 | 0 | 0 | 0 | 0 |
| BRCAN2015719 | 0 | 0 | 0 | 0 | 0 | 3.382 | 64.842 |
| BRCAN2019653 | 5.200 | 0 | 0 | 0 | 0 | 0 | 0 |
| BRCAN2020412 | 0 | 0 | 74.979 | 0 | 0 | 0 | 0 |
| BRCAN2021024 | 8.551 | 0 | 0 | 0 | 0 | 0 | 0 |
| BRCAN2022126 | 0 | 17.973 | 0 | 0 | 0 | 0 | 0 |
| BRCAN2026197 | 0 | 11.558 | 0 | 0 | 0 | 0 | 0 |
| BRCAN2028040 | 22.049 | 0 | 0 | 0 | 0 | 0 | 0 |
| BRCAN2028319 | 21.704 | 0 | 0 | 0 | 0 | 0 | 0 |
| BRCAN2028355 | 0 | 0 | 0 | 0 | 0 | 0 | 31.728 |
| BRCOC1000040 | 9.836 | 0 | 0 | 0 | 0 | 0 | 0 |
| BRCOC1000094 | 0 | 10.574 | 0 | 0 | 0 | 0 | 0 |
| BRCOC2000004 | 0 | 6.663 | 0 | 0 | 0 | 0 | 0 |
| BRCOC2000186 | 0 | 0 | 20.450 | 0 | 64.790 | 0 | 0 |
| BRCOC2000487 | 0 | 1.072 | 0 | 0 | 0 | 0 | 0 |
| BRCOC2002155 | 0 | 0 | 0 | 0 | 0 | 24.023 | 0 |
| BRCOC2003187 | 0.656 | 0 | 0 | 0 | 0 | 0.881 | 0 |
| BRCOC2003213 | 8.657 | 0 | 0 | 0 | 0 | 0 | 0 |
| BRCOC2003732 | 0 | 0 | 0 | 0 | 0 | 24.023 | 0 |
| BRCOC2006164 | 0 | 0 | 0 | 0 | 0 | 16.280 | 0 |
| BRCOC2010123 | 0.913 | 0 | 0 | 0 | 0 | 0 | 0 |
| BRCOC2010730 | 18.026 | 0 | 0 | 0 | 0 | 0 | 0 |
| BRCOC2012172 | 0 | 0 | 0 | 0 | 0 | 28.357 | 0 |
| BRCOC2012551 | 6.014 | 0 | 0 | 0 | 0 | 24.237 | 0 |
| BRCOC2014013 | 4.522 | 20.075 | 37.284 | 0 | 0 | 0 | 0 |
| BRCOC2014033 | 13.036 | 0 | 0 | 0 | 0 | 0 | 0 |
| BRCOC2017652 | 0 | 51.098 | 0 | 0 | 0 | 0 | 0 |
| BRCOC2019903 | 13.365 | 0 | 0 | 0 | 0 | 0 | 0 |
| BRCOC2019910 | 0 | 4.627 | 0 | 0 | 0 | 0 | 0 |
| BRHIP1000104 | 0.545 | 9.678 | 0 | 0 | 0 | 0 | 0 |
| BRHIP1000108 | 0 | 15.953 | 0 | 0 | 0 | 0 | 0 |
| BRHIP2000087 | 0 | 24.363 | 0 | 0 | 0 | 0 | 0 |
| BRHIP2000239 | 0 | 0 | 0 | 0 | 0 | 52.334 | 0 |
| BRHIP2000245 | 44.974 | 0 | 0 | 0 | 0 | 0 | 0 |
| BRHIP2000534 | 0.856 | 0 | 0 | 0 | 0 | 0 | 0 |
| BRHIP2000553 | 4.285 | 0 | 0 | 0 | 0 | 0 | 0 |
| BRHIP2000819 | 12.609 | 0 | 0 | 0 | 0 | 0 | 46.392 |
| BRHIP2001099 | 17.341 | 0 | 0 | 0 | 0 | 0 | 0 |
| BRHIP2003062 | 7.921 | 0 | 0 | 0 | 0 | 0 | 0 |
| BRHIP2004359 | 40.602 | 0 | 0 | 0 | 0 | 0 | 0 |
| BRHIP2005271 | 0 | 0 | 0 | 0 | 0 | 63.472 | 0 |
| BRHIP2007305 | 3.776 | 0 | 0 | 0 | 0 | 0 | 0 |
| BRHIP2007741 | 1.447 | 0 | 0 | 0 | 0 | 0 | 0 |
| BRHIP2008269 | 23.203 | 0 | 0 | 0 | 0 | 0 | 0 |
| BRHIP2009685 | 0 | 0 | 0 | 73.716 | 0 | 3.990 | 0 |
| BRHIP2010571 | 12.840 | 0 | 0 | 0 | 0 | 0 | 0 |
| BRHIP2010593 | 0 | 12.963 | 0 | 0 | 0 | 0 | 0 |
| BRHIP2011199 | 44.974 | 0 | 0 | 0 | 0 | 0 | 0 |
| BRHIP2011508 | 54.020 | 0 | 0 | 0 | 0 | 0 | 0 |
| BRHIP2014373 | 28.142 | 0 | 0 | 0 | 0 | 0 | 0 |
| BRHIP2014386 | 44.974 | 0 | 0 | 0 | 0 | 0 | 0 |
| BRHIP2015153 | 0 | 0 | 0 | 0 | 0 | 11.223 | 0 |
| BRHIP2015245 | 9.898 | 0 | 0 | 0 | 0 | 5.318 | 0 |
| BRHIP2015679 | 2.092 | 0 | 0 | 0 | 0 | 0 | 0 |
| BRHIP2017010 | 0 | 0 | 0 | 0 | 0 | 76.989 | 0 |
| BRHIP2017945 | 2.688 | 0 | 0 | 0 | 0 | 0 | 0 |
| BRHIP2018712 | 1.689 | 7.496 | 0 | 0 | 0 | 4.537 | 0 |
| BRHIP2019819 | 0 | 32.096 | 0 | 0 | 0 | 0 | 0 |
| BRHIP2020509 | 15.614 | 0 | 0 | 0 | 0 | 0 | 0 |
| BRHIP2020573 | 0 | 0 | 0 | 0 | 0 | 10.137 | 0 |
| BRHIP2020799 | 4.220 | 0 | 0 | 0 | 0 | 0 | 0 |
| BRHIP2022228 | 7.619 | 0 | 0 | 0 | 0 | 30.706 | 0 |
| BRHIP2022326 | 1.419 | 3.149 | 0 | 0 | 0 | 1.906 | 0 |
| BRHIP2022986 | 2.373 | 0 | 0 | 0 | 0 | 0 | 0 |
| BRHIP2023272 | 0 | 0 | 0 | 0 | 0 | 0 | 72.484 |
| BRHIP2023309 | 0 | 43.183 | 0 | 0 | 0 | 13.067 | 0 |
| BRHIP2023369 | 0 | 64.693 | 0 | 0 | 0 | 0 | 0 |
| BRHIP2023438 | 0 | 0 | 0 | 0 | 0 | 28.574 | 0 |
| BRHIP2023888 | 3.375 | 1.362 | 0 | 0 | 0 | 1.649 | 0 |
| BRHIP2024046 | 0 | 0 | 0 | 0 | 0 | 68.709 | 0 |
| BRHIP2024398 | 14.041 | 0 | 0 | 0 | 0 | 9.431 | 0 |
| BRHIP2024742 | 0 | 0 | 0 | 0 | 0 | 5.588 | 0 |
| BRHIP2025245 | 0 | 0 | 0 | 0 | 0 | 52.334 | 0 |
| BRHIP2027017 | 0 | 0 | 0 | 0 | 0 | 12.895 | 0 |
| BRHIP2027077 | 1.684 | 0 | 0 | 0 | 0 | 4.525 | 0 |
| BRHIP3000017 | 0 | 0 | 0 | 0 | 0 | 9.878 | 0 |
| BRHIP3000111 | 0 | 3.790 | 0 | 0 | 0 | 1.147 | 0 |
| BRHIP3000131 | 9.186 | 0 | 0 | 0 | 0 | 4.113 | 0 |
| BRHIP3000475 | 0 | 0 | 0 | 0 | 0 | 24.219 | 0 |
| BRHIP3002114 | 32.523 | 0 | 0 | 0 | 0 | 0 | 0 |
| BRHIP3002141 | 26.166 | 0 | 0 | 0 | 0 | 0 | 0 |
| BRHIP3002691 | 0 | 30.700 | 0 | 0 | 0 | 0 | 0 |
| BRHIP3005673 | 21.480 | 0 | 0 | 0 | 0 | 0 | 0 |
| BRHIP3006294 | 33.251 | 0 | 0 | 0 | 0 | 0 | 0 |
| BRHIP3007223 | 0 | 0 | 0 | 0 | 0 | 6.775 | 0 |
| BRHIP3008405 | 14.670 | 0 | 0 | 0 | 0 | 19.707 | 0 |
| BRHIP3012997 | 0 | 3.431 | 0 | 0 | 0 | 0 | 0 |
| BRHIP3014675 | 15.812 | 0 | 0 | 0 | 0 | 0 | 0 |
| BRHIP3017855 | 6.386 | 0 | 0 | 0 | 0 | 4.289 | 0 |
| BRHIP3018278 | 32.523 | 0 | 0 | 0 | 0 | 0 | 0 |
| BRHIP3018784 | 5.779 | 0 | 0 | 0 | 0 | 0 | 0 |
| BRHIP3020046 | 0.845 | 3.749 | 0 | 0 | 0 | 1.135 | 0 |
| BRHIP3020733 | 44.974 | 0 | 0 | 0 | 0 | 0 | 0 |
| BRSSN2000097 | 0 | 25.630 | 0 | 0 | 0 | 0 | 0 |
| BRSSN2000197 | 18.303 | 0 | 0 | 0 | 0 | 0 | 0 |
| BRSSN2000244 | 0 | 49.863 | 0 | 0 | 0 | 0 | 0 |
| BRSSN2000295 | 0 | 25.637 | 0 | 0 | 0 | 0 | 0 |
| BRSSN2000498 | 2.737 | 0 | 0 | 0 | 0 | 2.451 | 23.500 |
| BRSSN2000684 | 0 | 17.348 | 0 | 0 | 0 | 0 | 0 |
| BRSSN2000832 | 10.039 | 0 | 0 | 0 | 0 | 0 | 0 |
| BRSSN2001579 | 0 | 49.863 | 0 | 0 | 0 | 0 | 0 |
| BRSSN2001869 | 2.517 | 0 | 0 | 0 | 0 | 6.762 | 0 |
| BRSSN2003012 | 0 | 0 | 0 | 0 | 0 | 4.846 | 0 |
| BRSSN2004719 | 0 | 19.395 | 0 | 0 | 0 | 0 | 0 |
| BRSSN2005847 | 18.303 | 0 | 0 | 0 | 0 | 0 | 0 |
| BRSSN2006892 | 12.911 | 0 | 0 | 0 | 0 | 0 | 0 |
| BRSSN2007338 | 0 | 27.359 | 0 | 0 | 0 | 0 | 0 |
| BRSSN2007464 | 0 | 15.148 | 0 | 0 | 0 | 0 | 0 |
| BRSSN2009518 | 1.436 | 0 | 0 | 0 | 0 | 3.859 | 0 |
| BRSSN2010019 | 0 | 42.961 | 0 | 0 | 0 | 0 | 0 |
| BRSSN2011262 | 7.050 | 0 | 0 | 0 | 0 | 0 | 0 |
| BRSSN2011738 | 8.770 | 0 | 0 | 0 | 0 | 0 | 0 |
| BRSSN2011843 | 9.980 | 0 | 0 | 0 | 0 | 0 | 0 |
| BRSSN2012439 | 18.303 | 0 | 0 | 0 | 0 | 0 | 0 |
| BRSSN2013702 | 0 | 0 | 0 | 0 | 0 | 10.626 | 0 |
| BRSSN2014299 | 3.081 | 0 | 0 | 0 | 0 | 0 | 0 |
| BRSSN2014610 | 2.977 | 0 | 0 | 0 | 0 | 7.998 | 0 |
| BRSSN2014685 | 0 | 0 | 0 | 0 | 0 | 15.906 | 0 |
| BRSSN2015238 | 2.855 | 0 | 0 | 0 | 0 | 3.835 | 0 |
| BRSSN2018447 | 0 | 24.191 | 0 | 0 | 0 | 7.320 | 0 |
| BRSSN2018581 | 0 | 49.863 | 0 | 0 | 0 | 0 | 0 |
| BRSTN1000083 | 1.065 | 0 | 0 | 0 | 0 | 0.715 | 0 |
| BRSTN2000058 | 0 | 8.929 | 0 | 0 | 0 | 0 | 0 |
| BRSTN2001067 | 5.162 | 0 | 0 | 0 | 0 | 6.935 | 0 |
| BRSTN2004869 | 0 | 0 | 0 | 0 | 0 | 23.702 | 0 |
| BRSTN2010089 | 5.501 | 0 | 0 | 0 | 0 | 0 | 0 |
| BRSTN2010107 | 0 | 24.765 | 0 | 0 | 0 | 0 | 0 |
| BRSTN2011961 | 0.241 | 0 | 0 | 0 | 0 | 0.324 | 0 |
| BRSTN2012069 | 0.631 | 0.140 | 0.390 | 0 | 6.386 | 0.095 | 4.062 |
| BRSTN2012089 | 0 | 21.471 | 0 | 0 | 0 | 0 | 0 |
| BRSTN2012174 | 0.506 | 1.497 | 0 | 0 | 0 | 0.680 | 0 |
| BRSTN2012451 | 0 | 0 | 0 | 0 | 17.990 | 0 | 0 |
| BRSTN2013502 | 2.027 | 0 | 0 | 0 | 0 | 0 | 0 |
| BRSTN2013931 | 0 | 0 | 0 | 0 | 0 | 1.082 | 0 |
| BRSTN2014490 | 0 | 34.105 | 0 | 0 | 0 | 0 | 0 |
| BRSTN2015889 | 9.690 | 0 | 0 | 0 | 0 | 0 | 0 |
| BRSTN2015978 | 0 | 10.107 | 0 | 0 | 0 | 0 | 0 |
| BRSTN2016470 | 0.365 | 0.810 | 0 | 0 | 0 | 0 | 0 |
| BRSTN2016992 | 0.410 | 1.822 | 0 | 0 | 0 | 0.551 | 0 |
| BRSTN2017104 | 4.877 | 0 | 0 | 0 | 0 | 0 | 0 |
| BRSTN2017761 | 0 | 0 | 0 | 0 | 0 | 23.702 | 0 |
| BRTHA1000311 | 2.460 | 10.923 | 0 | 0 | 0 | 3.305 | 0 |
| BRTHA2005013 | 9.305 | 0 | 0 | 0 | 0 | 0 | 0 |
| BRTHA2005864 | 9.471 | 0 | 0 | 0 | 0 | 1.817 | 34.846 |
| BRTHA2007998 | 0 | 0 | 0 | 0 | 0 | 0.966 | 0 |
| BRTHA2008335 | 0 | 0 | 0 | 0 | 0 | 9.119 | 0 |
| BRTHA2009886 | 0 | 76.948 | 0 | 0 | 0 | 0 | 0 |
| BRTHA2011691 | 42.920 | 0 | 0 | 0 | 0 | 0 | 0 |
| BRTHA2012714 | 0 | 4.640 | 0 | 0 | 0 | 0 | 0 |
| BRTHA2012980 | 0 | 0 | 86.110 | 0 | 0 | 0 | 0 |
| BRTHA2013054 | 0 | 0 | 0 | 0 | 0 | 13.457 | 0 |
| BRTHA2013275 | 0 | 0 | 0 | 0 | 0 | 50.251 | 0 |
| BRTHA2013540 | 28.262 | 0 | 0 | 0 | 0 | 0 | 0 |
| BRTHA2014663 | 14.773 | 65.580 | 0 | 0 | 0 | 0 | 0 |
| BRTHA2014997 | 42.920 | 0 | 0 | 0 | 0 | 0 | 0 |
| BRTHA2016577 | 1.967 | 0 | 0 | 0 | 0 | 0 | 0 |
| BRTHA2016918 | 0 | 0 | 67.390 | 0 | 0 | 0 | 0 |
| BRTHA2017985 | 0 | 0 | 0 | 0 | 0 | 50.251 | 0 |
| BRTHA2018504 | 28.335 | 0 | 0 | 0 | 0 | 0 | 0 |
| BRTHA2018707 | 42.920 | 0 | 0 | 0 | 0 | 0 | 0 |
| BRTHA2019073 | 42.920 | 0 | 0 | 0 | 0 | 0 | 0 |
| BRTHA2021440 | 42.920 | 0 | 0 | 0 | 0 | 0 | 0 |
| BRTHA2026071 | 30.706 | 0 | 0 | 0 | 0 | 0 | 0 |
| BRTHA2035743 | 11.317 | 0 | 0 | 0 | 0 | 7.601 | 0 |
| BRTHA3000273 | 42.920 | 0 | 0 | 0 | 0 | 0 | 0 |
| BRTHA3002427 | 0 | 10.582 | 19.655 | 0 | 0 | 0 | 0 |
| BRTHA3002864 | 42.920 | 0 | 0 | 0 | 0 | 0 | 0 |
| BRTHA3003417 | 0 | 0 | 0 | 0 | 0 | 34.473 | 0 |
| BRTHA3003490 | 6.768 | 0 | 0 | 0 | 0 | 0 | 34.864 |
| BRTHA3003736 | 5.381 | 0 | 0 | 0 | 0 | 0 | 0 |
| BRTHA3004307 | 5.024 | 0 | 0 | 0 | 0 | 6.749 | 0 |
| BRTHA3007472 | 3.254 | 0 | 0 | 0 | 0 | 0 | 0 |
| BRTHA3010530 | 23.316 | 0 | 0 | 0 | 0 | 0 | 0 |
| BRTHA3011194 | 0 | 0 | 0 | 0 | 0 | 3.959 | 0 |
| BRTHA3011265 | 0 | 0 | 0 | 0 | 0 | 9.557 | 0 |
| BRTHA3020314 | 0 | 0 | 0 | 0 | 0 | 22.812 | 0 |
| BRTHA3021971 | 3.237 | 0 | 0 | 0 | 0 | 0 | 0 |
| BRTHA3022641 | 14.751 | 0 | 0 | 0 | 0 | 0 | 0 |
| CD34C3000252 | 0 | 3.038 | 0 | 0 | 0 | 0.919 | 0 |
| CHONS2000797 | 3.627 | 0 | 0 | 0 | 0 | 0 | 0 |
| CHONS2002829 | 4.087 | 0 | 0 | 0 | 0 | 3.660 | 0 |
| COLON2002443 | 3.760 | 0 | 0 | 0 | 0 | 0 | 0 |
| CTONG1000009 | 8.100 | 0 | 0 | 0 | 0 | 10.881 | 0 |
| CTONG1000010 | 5.406 | 0 | 0 | 0 | 0 | 0 | 0 |
| CTONG1000052 | 8.565 | 0 | 0 | 0 | 0 | 4.061 | 0 |
| CTONG1000087 | 0 | 0 | 0 | 0 | 0 | 3.514 | 0 |
| CTONG1000094 | 0.649 | 1.442 | 0 | 0 | 0 | 0.436 | 0 |
| CTONG1000175 | 9.827 | 0 | 0 | 0 | 0 | 5.658 | 0 |
| CTONG1000218 | 0.803 | 0 | 0 | 0 | 0 | 2.157 | 0 |
| CTONG1000241 | 8.844 | 0 | 0 | 0 | 0 | 0 | 0 |
| CTONG1000288 | 3.805 | 0 | 0 | 0 | 0 | 0 | 0 |
| CTONG1000467 | 0 | 0 | 0 | 0 | 0 | 19.250 | 0 |
| CTONG2000063 | 0 | 7.924 | 0 | 0 | 0 | 4.796 | 0 |
| CTONG2000201 | 0 | 0 | 0 | 0 | 0 | 23.884 | 0 |
| CTONG2000411 | 0 | 0 | 0 | 0 | 0 | 6.446 | 0 |
| CTONG2000465 | 30.924 | 0 | 0 | 0 | 0 | 0 | 0 |
| CTONG2000469 | 0 | 0 | 0 | 0 | 0 | 6.542 | 0 |
| CTONG2000508 | 1.317 | 2.923 | 5.429 | 0 | 0 | 9.730 | 0 |
| CTONG2000561 | 0 | 0 | 0 | 0 | 0 | 8.129 | 0 |
| CTONG2001366 | 6.463 | 0 | 0 | 0 | 0 | 0 | 0 |
| CTONG2001428 | 0 | 0 | 0 | 0 | 0 | 37.554 | 0 |
| CTONG2001748 | 3.486 | 0 | 0 | 0 | 0 | 4.683 | 0 |
| CTONG2001858 | 0 | 0 | 0 | 0 | 0 | 8.267 | 0 |
| CTONG2002073 | 3.664 | 0 | 0 | 0 | 0 | 1.641 | 0 |
| CTONG2002270 | 5.750 | 0 | 0 | 0 | 0 | 6.536 | 0 |
| CTONG2002395 | 30.924 | 0 | 0 | 0 | 0 | 0 | 0 |
| CTONG2002721 | 30.924 | 0 | 0 | 0 | 0 | 0 | 0 |
| CTONG2002744 | 2.946 | 0 | 4.049 | 0 | 0 | 2.639 | 0 |
| CTONG2002803 | 1.228 | 0 | 0 | 0 | 0 | 0 | 0 |
| CTONG2002820 | 9.379 | 0 | 0 | 0 | 0 | 0 | 0 |
| CTONG2002903 | 0 | 0 | 0 | 0 | 0 | 3.450 | 0 |
| CTONG2003094 | 0 | 13.564 | 0 | 0 | 0 | 4.105 | 0 |
| CTONG2003100 | 0 | 0 | 0 | 0 | 0 | 0 | 92.019 |
| CTONG2003298 | 0 | 0 | 0 | 0 | 0 | 7.316 | 0 |
| CTONG2003524 | 1.344 | 5.965 | 0 | 0 | 0 | 7.220 | 0 |
| CTONG2004423 | 0 | 0 | 0 | 0 | 0 | 12.872 | 0 |
| CTONG2004487 | 0.789 | 0 | 6.503 | 0 | 0 | 7.417 | 0 |
| CTONG2005028 | 0 | 0 | 0 | 0 | 0 | 7.668 | 0 |
| CTONG2005278 | 7.209 | 0 | 0 | 0 | 0 | 0 | 0 |
| CTONG2005468 | 0 | 0 | 0 | 0 | 0 | 16.699 | 0 |
| CTONG2005553 | 1.791 | 0 | 0 | 0 | 0 | 1.604 | 0 |
| CTONG2005615 | 0 | 0 | 0 | 0 | 0 | 63.916 | 0 |
| CTONG2006004 | 0.880 | 0 | 0 | 0 | 22.990 | 2.365 | 0 |
| CTONG2006235 | 1.366 | 6.064 | 0 | 0 | 0 | 9.174 | 0 |
| CTONG2006377 | 29.368 | 0 | 0 | 0 | 0 | 0 | 0 |
| CTONG2006562 | 1.167 | 0 | 0 | 0 | 0 | 1.568 | 0 |
| CTONG2006666 | 21.848 | 0 | 0 | 0 | 0 | 29.349 | 0 |
| CTONG2006709 | 2.156 | 0 | 0 | 0 | 0 | 2.897 | 0 |
| CTONG2006798 | 8.046 | 0 | 0 | 0 | 0 | 10.808 | 0 |
| CTONG2006932 | 0 | 0 | 7.565 | 0 | 0 | 0 | 0 |
| CTONG2007007 | 0 | 3.446 | 0 | 0 | 0 | 3.128 | 0 |
| CTONG2007072 | 7.175 | 0 | 0 | 0 | 0 | 9.639 | 0 |
| CTONG2007078 | 3.197 | 0 | 0 | 0 | 0 | 4.294 | 0 |
| CTONG2007168 | 0 | 0 | 0 | 0 | 0 | 20.314 | 0 |
| CTONG2007400 | 0 | 0 | 0 | 0 | 0 | 12.889 | 0 |
| CTONG2007417 | 35.948 | 0 | 0 | 0 | 0 | 0 | 0 |
| CTONG2007441 | 0 | 0 | 0 | 0 | 0 | 23.118 | 0 |
| CTONG2007500 | 1.881 | 0 | 0 | 0 | 0 | 0.842 | 0 |
| CTONG2007586 | 0 | 0 | 0 | 0 | 0 | 6.732 | 0 |
| CTONG2007776 | 3.547 | 0 | 0 | 0 | 0 | 0 | 0 |
| CTONG2008398 | 0 | 0 | 0 | 0 | 0 | 1.713 | 16.419 |
| CTONG2008466 | 6.519 | 0 | 0 | 0 | 0 | 0 | 0 |
| CTONG2008506 | 4.708 | 0 | 0 | 0 | 0 | 4.216 | 0 |
| CTONG2008621 | 0 | 0 | 0 | 0 | 0 | 37.554 | 0 |
| CTONG2008720 | 22.512 | 0 | 0 | 0 | 0 | 0 | 0 |
| CTONG2008792 | 0 | 27.199 | 0 | 0 | 0 | 0 | 0 |
| CTONG2009534 | 0 | 0 | 0 | 0 | 0 | 8.614 | 0 |
| CTONG2009844 | 0 | 66.526 | 0 | 0 | 0 | 0 | 0 |
| CTONG2009938 | 16.683 | 0 | 0 | 0 | 0 | 0 | 0 |
| CTONG2009963 | 34.474 | 0 | 0 | 0 | 0 | 0 | 0 |
| CTONG2010348 | 4.430 | 0 | 0 | 0 | 0 | 1.983 | 0 |
| CTONG2010408 | 14.289 | 0 | 0 | 0 | 0 | 0 | 0 |
| CTONG2010649 | 0 | 5.788 | 0 | 0 | 0 | 1.752 | 0 |
| CTONG2010652 | 13.402 | 0 | 0 | 0 | 0 | 0 | 0 |
| CTONG2010821 | 8.938 | 0 | 0 | 0 | 0 | 0.800 | 0 |
| CTONG2011801 | 2.469 | 0 | 0 | 0 | 0 | 0 | 0 |
| CTONG2011825 | 0 | 0 | 0 | 0 | 0 | 19.233 | 0 |
| CTONG2012001 | 11.925 | 0 | 0 | 0 | 0 | 0 | 0 |
| CTONG2012050 | 0 | 0 | 0 | 0 | 0 | 23.871 | 0 |
| CTONG2012401 | 0 | 0 | 0 | 0 | 0 | 4.712 | 0 |
| CTONG2012422 | 30.924 | 0 | 0 | 0 | 0 | 0 | 0 |
| CTONG2012452 | 0.594 | 1.318 | 0 | 7.369 | 0 | 1.595 | 0 |
| CTONG2012453 | 18.839 | 0 | 0 | 0 | 0 | 0 | 0 |
| CTONG2012607 | 1.442 | 0 | 0 | 0 | 0 | 0 | 0 |
| CTONG2012661 | 34.944 | 0 | 0 | 0 | 0 | 0 | 0 |
| CTONG2012745 | 4.625 | 0 | 0 | 0 | 0 | 0 | 0 |
| CTONG2012847 | 0 | 0 | 0 | 0 | 0 | 3.858 | 0 |
| CTONG2012996 | 7.304 | 0 | 0 | 0 | 0 | 3.271 | 0 |
| CTONG2013348 | 4.587 | 0 | 0 | 0 | 0 | 0 | 0 |
| CTONG2013907 | 0 | 0 | 0 | 0 | 0 | 2.415 | 0 |
| CTONG2013934 | 11.568 | 0 | 0 | 0 | 0 | 7.770 | 0 |
| CTONG2014119 | 60.822 | 0 | 0 | 0 | 0 | 0 | 0 |
| CTONG2014165 | 4.015 | 0 | 0 | 0 | 0 | 0 | 0 |
| CTONG2014280 | 20.963 | 0 | 0 | 0 | 0 | 0 | 0 |
| CTONG2014389 | 0 | 0 | 0 | 0 | 0 | 2.959 | 56.729 |
| CTONG2014491 | 0 | 0 | 0 | 0 | 0 | 37.554 | 0 |
| CTONG2014898 | 4.810 | 0 | 0 | 0 | 0 | 0 | 0 |
| CTONG2014954 | 20.390 | 0 | 0 | 0 | 0 | 13.695 | 0 |
| CTONG2015091 | 0.677 | 6.012 | 0 | 0 | 0 | 0 | 0 |
| CTONG2015345 | 7.118 | 0 | 0 | 0 | 0 | 19.125 | 0 |
| CTONG2015678 | 0 | 0 | 0 | 0 | 0 | 37.554 | 0 |
| CTONG2016056 | 1.658 | 0 | 0 | 0 | 0 | 0 | 0 |
| CTONG2016185 | 0 | 0 | 0 | 0 | 0 | 26.208 | 0 |
| CTONG2016505 | 0 | 66.526 | 0 | 0 | 0 | 0 | 0 |
| CTONG2016575 | 0.829 | 0 | 0 | 0 | 0 | 5.012 | 0 |
| CTONG2016869 | 37.440 | 0 | 0 | 0 | 0 | 2.959 | 0 |
| CTONG2016931 | 2.545 | 0 | 0 | 0 | 0 | 0 | 0 |
| CTONG2017429 | 0 | 0 | 0 | 0 | 0 | 16.168 | 0 |
| CTONG2017500 | 2.209 | 0 | 0 | 0 | 0 | 5.935 | 0 |
| CTONG2017798 | 49.854 | 0 | 0 | 0 | 0 | 0 | 0 |
| CTONG2017998 | 8.355 | 0 | 0 | 0 | 0 | 8.418 | 0 |
| CTONG2018211 | 2.844 | 0 | 0 | 0 | 0 | 0 | 0 |
| CTONG2018334 | 0 | 0 | 0 | 0 | 0 | 8.193 | 0 |
| CTONG2018629 | 0 | 0 | 0 | 0 | 0 | 23.118 | 0 |
| CTONG2018637 | 0 | 0 | 0 | 0 | 0 | 7.349 | 0 |
| CTONG2018735 | 30.924 | 0 | 0 | 0 | 0 | 0 | 0 |
| CTONG2018739 | 22.620 | 0 | 0 | 0 | 0 | 0 | 0 |
| CTONG2018843 | 9.257 | 0 | 0 | 0 | 0 | 0 | 0 |
| CTONG2018898 | 0.402 | 3.565 | 0 | 0 | 0 | 1.618 | 0 |
| CTONG2018976 | 30.924 | 0 | 0 | 0 | 0 | 0 | 0 |
| CTONG2019029 | 0 | 0 | 0 | 0 | 0 | 9.064 | 0 |
| CTONG2019248 | 0 | 0 | 0 | 0 | 0 | 16.946 | 0 |
| CTONG2019590 | 8.973 | 0 | 0 | 0 | 0 | 0 | 0 |
| CTONG2019704 | 0 | 0 | 0 | 0 | 0 | 37.554 | 0 |
| CTONG2019788 | 0 | 0 | 0 | 0 | 0 | 3.425 | 0 |
| CTONG2019822 | 2.711 | 0 | 0 | 0 | 0 | 3.642 | 0 |
| CTONG2020108 | 30.924 | 0 | 0 | 0 | 0 | 0 | 0 |
| CTONG2020378 | 0 | 0 | 0 | 0 | 0 | 18.079 | 0 |
| CTONG2020484 | 0 | 2.176 | 0 | 0 | 0 | 0 | 0 |
| CTONG2020560 | 0 | 0 | 0 | 0 | 0 | 8.402 | 0 |
| CTONG2020582 | 1.600 | 0 | 0 | 0 | 0 | 6.448 | 0 |
| CTONG2020638 | 0 | 0 | 0 | 0 | 0 | 27.737 | 0 |
| CTONG2021024 | 0 | 0 | 0 | 0 | 0 | 37.554 | 0 |
| CTONG2021289 | 34.318 | 0 | 0 | 0 | 0 | 11.525 | 0 |
| CTONG2022835 | 0 | 0 | 0 | 0 | 0 | 1.922 | 0 |
| CTONG2024031 | 0 | 0 | 0 | 0 | 0 | 2.895 | 0 |
| CTONG2027327 | 47.240 | 0 | 0 | 0 | 0 | 0 | 0 |
| CTONG2028124 | 0.838 | 0 | 3.455 | 0 | 0 | 1.689 | 0 |
| CTONG2028309 | 24.482 | 0 | 0 | 0 | 0 | 0 | 0 |
| CTONG2028758 | 0 | 59.532 | 0 | 0 | 0 | 0 | 0 |
| CTONG3000657 | 0 | 14.362 | 0 | 0 | 0 | 0 | 0 |
| CTONG3001123 | 6.543 | 0 | 0 | 0 | 0 | 0 | 0 |
| CTONG3001746 | 0 | 0 | 0 | 0 | 0 | 16.024 | 0 |
| CTONG3002127 | 0 | 0 | 0 | 0 | 0 | 37.554 | 0 |
| CTONG3002518 | 7.036 | 0 | 0 | 0 | 0 | 9.452 | 0 |
| CTONG3002674 | 18.629 | 0 | 0 | 0 | 0 | 0 | 0 |
| CTONG3002835 | 19.238 | 0 | 0 | 0 | 0 | 3.692 | 0 |
| CTONG3003905 | 16.329 | 0 | 0 | 0 | 0 | 0 | 0 |
| CTONG3004072 | 0 | 0 | 0 | 0 | 0 | 43.729 | 0 |
| CTONG3004576 | 0 | 0 | 0 | 0 | 0 | 37.554 | 0 |
| CTONG3008894 | 2.425 | 0 | 0 | 0 | 0 | 0.814 | 0 |
| CTONG3009028 | 4.026 | 0 | 0 | 0 | 0 | 3.605 | 0 |
| D30ST2000734 | 6.666 | 0 | 0 | 0 | 0 | 0 | 0 |
| D30ST2001670 | 3.111 | 0 | 0 | 0 | 0 | 0 | 0 |
| D30ST2001788 | 2.432 | 0 | 0 | 0 | 63.521 | 0 | 0 |
| D30ST2002068 | 0 | 0 | 0 | 0 | 0 | 0 | 4.614 |
| D30ST3000258 | 5.183 | 0 | 0 | 0 | 0 | 0 | 0 |
| D30ST3000291 | 6.666 | 0 | 0 | 0 | 0 | 0 | 0 |
| D60ST2000358 | 0 | 0 | 0 | 0 | 0 | 1.592 | 0 |
| D60ST2000464 | 0.914 | 0 | 0 | 0 | 0 | 0 | 0 |
| D90ST2002608 | 5.573 | 8.247 | 0 | 0 | 0 | 7.487 | 0 |
| D90ST2003791 | 10.203 | 0 | 0 | 0 | 0 | 0 | 0 |
| DFNES1000083 | 0 | 0 | 0 | 0 | 0 | 2.520 | 0 |
| DFNES1000150 | 1.862 | 0 | 7.678 | 0 | 0 | 3.753 | 0 |
| DFNES2000011 | 1.824 | 6.073 | 0 | 0 | 0 | 4.900 | 0 |
| DFNES2000426 | 10.529 | 0 | 0 | 0 | 0 | 0 | 0 |
| DFNES2000443 | 0 | 2.513 | 0 | 0 | 0 | 0 | 0 |
| DFNES2000526 | 2.304 | 0 | 0 | 0 | 0 | 0 | 0 |
| DFNES2001404 | 0 | 38.579 | 0 | 0 | 0 | 0 | 0 |
| DFNES2003742 | 0 | 38.579 | 0 | 0 | 0 | 0 | 0 |
| DFNES2004346 | 0 | 0 | 0 | 0 | 68.168 | 0 | 0 |
| DFNES2004371 | 2.631 | 0 | 0 | 0 | 0 | 5.302 | 0 |
| DFNES2005540 | 2.521 | 0 | 0 | 0 | 0 | 0 | 0 |
| DFNES2005690 | 0 | 0 | 0 | 0 | 0 | 5.687 | 0 |
| DFNES2005766 | 0 | 0 | 0 | 0 | 0 | 2.054 | 0 |
| DFNES2006346 | 0 | 0 | 0 | 0 | 0 | 15.826 | 0 |
| DFNES2007113 | 0 | 0 | 0 | 0 | 0 | 7.485 | 0 |
| DFNES2007332 | 3.095 | 0 | 25.515 | 0 | 0 | 0 | 0 |
| DFNES2007634 | 2.965 | 3.290 | 0 | 0 | 0 | 0 | 0 |
| DFNES2008088 | 0 | 9.731 | 0 | 0 | 0 | 0 | 0 |
| DFNES2008160 | 3.736 | 0 | 0 | 0 | 0 | 0 | 0 |
| DFNES2009482 | 0 | 0 | 0 | 0 | 30.893 | 0 | 0 |
| DFNES2011221 | 0 | 0 | 0 | 0 | 0 | 15.971 | 0 |
| DFNES2011499 | 0 | 0 | 0 | 0 | 0 | 6.949 | 0 |
| FCBBF1000024 | 1.831 | 0 | 0 | 0 | 0 | 4.919 | 0 |
| FCBBF1000025 | 0 | 11.846 | 0 | 0 | 0 | 3.585 | 0 |
| FCBBF1000027 | 2.138 | 2.712 | 0 | 0 | 0 | 1.231 | 0 |
| FCBBF1000038 | 9.368 | 0 | 0 | 0 | 0 | 0 | 0 |
| FCBBF1000053 | 2.257 | 10.018 | 18.606 | 0 | 0 | 3.031 | 0 |
| FCBBF1000061 | 1.961 | 8.706 | 16.169 | 0 | 0 | 2.634 | 0 |
| FCBBF1000063 | 4.987 | 0 | 0 | 0 | 0 | 13.399 | 0 |
| FCBBF1000077 | 0 | 2.998 | 0 | 0 | 0 | 0 | 0 |
| FCBBF1000115 | 0 | 0 | 0 | 0 | 0 | 22.769 | 0 |
| FCBBF1000139 | 0 | 6.471 | 0 | 0 | 0 | 3.916 | 0 |
| FCBBF1000197 | 2.672 | 0 | 0 | 0 | 0 | 4.786 | 0 |
| FCBBF1000294 | 6.284 | 0 | 7.402 | 0 | 0 | 1.206 | 0 |
| FCBBF1000367 | 1.267 | 0 | 0 | 0 | 0 | 0 | 0 |
| FCBBF1000412 | 0 | 0 | 0 | 0 | 0 | 6.503 | 0 |
| FCBBF1000425 | 0 | 0 | 0 | 0 | 0 | 23.391 | 0 |
| FCBBF1000466 | 3.186 | 2.357 | 0 | 0 | 0 | 13.554 | 0 |
| FCBBF1000509 | 0 | 6.907 | 0 | 0 | 0 | 0 | 0 |
| FCBBF1000556 | 0 | 3.946 | 0 | 0 | 0 | 0 | 0 |
| FCBBF1000563 | 0 | 0 | 0 | 0 | 0 | 3.365 | 0 |
| FCBBF1000574 | 12.116 | 0 | 0 | 0 | 0 | 0 | 0 |
| FCBBF1000687 | 0 | 0 | 0 | 0 | 0 | 9.676 | 0 |
| FCBBF1000760 | 2.730 | 0 | 0 | 0 | 0 | 0.734 | 0 |
| FCBBF2000087 | 0 | 0 | 0 | 0 | 0 | 3.231 | 0 |
| FCBBF2000199 | 2.333 | 0 | 0 | 0 | 0 | 0 | 0 |
| FCBBF2000782 | 31.099 | 0 | 0 | 0 | 0 | 0 | 0 |
| FCBBF2000885 | 1.280 | 0 | 0 | 0 | 0 | 5.158 | 0 |
| FCBBF2001088 | 13.520 | 0 | 0 | 0 | 0 | 0 | 0 |
| FCBBF2001183 | 0 | 12.243 | 0 | 0 | 0 | 0 | 0 |
| FCBBF2001291 | 3.173 | 0 | 0 | 0 | 0 | 2.131 | 0 |
| FCBBF2001309 | 3.628 | 16.105 | 0 | 0 | 0 | 0 | 0 |
| FCBBF2001400 | 16.981 | 0 | 0 | 0 | 0 | 22.812 | 0 |
| FCBBF2001538 | 27.955 | 5.641 | 0 | 0 | 0 | 0 | 0 |
| FCBBF2002349 | 0 | 0 | 0 | 0 | 0 | 4.422 | 0 |
| FCBBF2002801 | 6.492 | 0 | 0 | 0 | 0 | 0 | 0 |
| FCBBF2002928 | 0 | 0 | 0 | 0 | 0 | 0 | 66.822 |
| FCBBF2005909 | 5.204 | 0 | 0 | 0 | 0 | 0 | 0 |
| FCBBF2007556 | 7.620 | 0 | 0 | 0 | 0 | 0 | 0 |
| FCBBF3000110 | 0 | 0 | 0 | 0 | 0 | 7.234 | 0 |
| FCBBF3000115 | 13.311 | 0 | 0 | 0 | 0 | 0 | 0 |
| FCBBF3000228 | 7.473 | 0 | 0 | 0 | 0 | 0 | 0 |
| FCBBF3000434 | 1.544 | 6.853 | 0 | 0 | 0 | 0 | 0 |
| FCBBF3000536 | 4.445 | 0 | 0 | 0 | 0 | 2.986 | 0 |
| FCBBF3001081 | 4.379 | 0 | 0 | 0 | 0 | 2.941 | 0 |
| FCBBF3001302 | 2.772 | 0 | 0 | 0 | 0 | 0 | 0 |
| FCBBF3001470 | 2.264 | 0 | 0 | 0 | 0 | 0 | 0 |
| FCBBF3001818 | 0 | 0 | 0 | 0 | 0 | 20.406 | 0 |
| FCBBF3001890 | 0 | 20.364 | 0 | 0 | 0 | 0 | 0 |
| FCBBF3003800 | 0 | 2.916 | 0 | 0 | 0 | 1.765 | 0 |
| FCBBF3004473 | 2.874 | 0 | 0 | 0 | 0 | 0 | 0 |
| FCBBF3004715 | 3.122 | 0 | 0 | 0 | 81.563 | 0 | 0 |
| FCBBF3005320 | 2.275 | 0 | 0 | 0 | 0 | 0 | 0 |
| FCBBF3005330 | 1.733 | 0 | 0 | 0 | 0 | 4.656 | 0 |
| FCBBF3005497 | 5.244 | 0 | 0 | 0 | 0 | 0.881 | 0 |
| FCBBF3006821 | 4.767 | 0 | 0 | 0 | 0 | 12.806 | 0 |
| FCBBF3007244 | 12.945 | 0 | 0 | 0 | 0 | 0 | 0 |
| FCBBF3008153 | 13.686 | 0 | 0 | 0 | 0 | 6.128 | 0 |
| FCBBF3008382 | 0 | 39.870 | 0 | 0 | 0 | 0 | 0 |
| FCBBF3009256 | 31.099 | 0 | 0 | 0 | 0 | 0 | 0 |
| FCBBF3009541 | 0 | 0 | 2.834 | 0 | 0 | 1.847 | 0 |
| FCBBF3010665 | 21.935 | 0 | 0 | 0 | 0 | 29.466 | 0 |
| FCBBF3010695 | 0 | 9.180 | 0 | 0 | 0 | 2.778 | 0 |
| FCBBF3011523 | 0 | 66.707 | 0 | 0 | 0 | 0 | 0 |
| FCBBF3012347 | 1.830 | 0 | 0 | 0 | 0 | 2.459 | 0 |
| FCBBF3013266 | 0 | 0 | 0 | 0 | 0 | 23.680 | 0 |
| FCBBF3016667 | 0 | 47.387 | 0 | 0 | 0 | 0 | 0 |
| FCBBF3016928 | 0 | 3.243 | 0 | 0 | 0 | 3.926 | 0 |
| FCBBF3017024 | 0 | 0 | 0 | 0 | 0 | 11.482 | 0 |
| FCBBF3017531 | 1.337 | 0 | 0 | 0 | 0 | 0 | 0 |
| FCBBF3017918 | 5.460 | 0 | 0 | 0 | 0 | 7.334 | 0 |
| FCBBF3018796 | 2.589 | 11.492 | 0 | 0 | 0 | 0 | 0 |
| FCBBF3019320 | 49.450 | 0 | 0 | 0 | 0 | 0 | 0 |
| FCBBF3019839 | 6.245 | 13.863 | 0 | 0 | 0 | 0 | 0 |
| FCBBF3020140 | 47.443 | 0 | 0 | 0 | 0 | 0 | 0 |
| FCBBF3022504 | 12.995 | 0 | 0 | 0 | 0 | 0 | 0 |
| FCBBF3022593 | 0 | 25.647 | 0 | 0 | 0 | 0 | 0 |
| FCBBF3022767 | 16.981 | 0 | 0 | 0 | 0 | 22.812 | 0 |
| FCBBF3023368 | 0 | 0 | 0 | 0 | 0 | 2.748 | 0 |
| FCBBF3023667 | 0.332 | 0.492 | 0.913 | 0 | 2.893 | 0.149 | 0 |
| FCBBF3024002 | 4.732 | 0 | 0 | 0 | 0 | 6.357 | 0 |
| FCBBF3024793 | 0 | 59.143 | 0 | 0 | 0 | 0 | 0 |
| FCBBF3025737 | 0 | 0 | 0 | 0 | 0 | 3.640 | 0 |
| FCBBF3025905 | 40.015 | 0 | 0 | 0 | 0 | 0 | 0 |
| FCBBF3026308 | 10.657 | 0 | 0 | 0 | 0 | 0 | 0 |
| FCBBF3026651 | 0 | 0 | 0 | 0 | 0 | 8.174 | 0 |
| FCBBF3028202 | 0 | 42.529 | 0 | 0 | 0 | 0 | 0 |
| FCBBF3028244 | 2.323 | 3.437 | 0 | 0 | 0 | 3.120 | 0 |
| FCBBF3028593 | 6.733 | 0 | 0 | 0 | 0 | 0 | 0 |
| FCBBF4000017 | 7.406 | 0 | 0 | 0 | 0 | 0 | 0 |
| FCBBF4000446 | 0 | 2.780 | 0 | 0 | 0 | 1.683 | 0 |
| FCBBF4000548 | 0 | 0 | 0 | 0 | 0 | 16.372 | 0 |
| FCBBF5000261 | 4.329 | 0 | 35.696 | 0 | 0 | 0 | 0 |
| FEBRA1000057 | 0 | 6.426 | 0 | 0 | 0 | 0 | 0 |
| FEBRA2000105 | 1.196 | 0 | 19.724 | 0 | 0 | 2.410 | 0 |
| FEBRA2000129 | 4.335 | 0 | 0 | 0 | 0 | 2.912 | 0 |
| FEBRA2000210 | 1.768 | 0 | 0 | 0 | 0 | 0.792 | 0 |
| FEBRA2000228 | 3.294 | 0 | 0 | 0 | 0 | 4.425 | 0 |
| FEBRA2000253 | 12.206 | 0 | 0 | 0 | 0 | 0 | 0 |
| FEBRA2000377 | 8.342 | 0 | 0 | 0 | 0 | 0 | 0 |
| FEBRA2000402 | 4.622 | 0 | 0 | 0 | 0 | 0 | 0 |
| FEBRA2000438 | 14.734 | 0 | 0 | 0 | 0 | 0 | 0 |
| FEBRA2000452 | 0 | 3.713 | 0 | 0 | 21.846 | 4.494 | 0 |
| FEBRA2000454 | 25.065 | 0 | 0 | 0 | 0 | 0 | 0 |
| FEBRA2000510 | 3.077 | 0 | 0 | 0 | 0 | 4.133 | 0 |
| FEBRA2000532 | 0 | 0 | 0 | 66.176 | 0 | 0 | 0 |
| FEBRA2000536 | 0 | 11.660 | 0 | 0 | 0 | 3.528 | 0 |
| FEBRA2000733 | 0.141 | 0 | 0 | 0 | 0 | 0 | 0 |
| FEBRA2000740 | 3.772 | 0 | 0 | 0 | 0 | 5.067 | 0 |
| FEBRA2000757 | 2.553 | 0 | 0 | 0 | 0 | 0 | 0 |
| FEBRA2000787 | 4.941 | 0 | 0 | 0 | 0 | 0 | 0 |
| FEBRA2000815 | 0 | 13.382 | 0 | 0 | 0 | 0 | 0 |
| FEBRA2000881 | 0 | 0 | 0 | 0 | 0 | 3.546 | 0 |
| FEBRA2001146 | 18.649 | 0 | 0 | 0 | 0 | 12.526 | 0 |
| FEBRA2001227 | 0 | 13.686 | 0 | 0 | 0 | 0 | 0 |
| FEBRA2001294 | 2.015 | 0 | 0 | 0 | 0 | 2.707 | 0 |
| FEBRA2001492 | 2.699 | 0 | 0 | 0 | 0 | 0 | 0 |
| FEBRA2001523 | 0 | 0 | 58.455 | 0 | 0 | 0 | 0 |
| FEBRA2001571 | 1.749 | 15.525 | 0 | 0 | 0 | 2.349 | 0 |
| FEBRA2001581 | 3.419 | 0 | 0 | 0 | 0 | 0 | 0 |
| FEBRA2001669 | 0.893 | 0 | 0 | 0 | 0 | 0 | 0 |
| FEBRA2001698 | 0 | 45.061 | 0 | 0 | 0 | 0 | 0 |
| FEBRA2001715 | 0 | 3.691 | 0 | 0 | 0 | 0 | 0 |
| FEBRA2001745 | 0 | 0 | 0 | 0 | 0 | 1.404 | 0 |
| FEBRA2001814 | 0 | 9.795 | 0 | 0 | 0 | 1.482 | 0 |
| FEBRA2001828 | 4.537 | 0 | 0 | 0 | 0 | 0 | 0 |
| FEBRA2001867 | 6.181 | 13.719 | 0 | 0 | 0 | 0 | 0 |
| FEBRA2001974 | 19.431 | 0 | 0 | 0 | 0 | 13.051 | 0 |
| FEBRA2001989 | 25.065 | 0 | 0 | 0 | 0 | 0 | 0 |
| FEBRA2001990 | 0 | 13.433 | 0 | 0 | 0 | 0 | 0 |
| FEBRA2002352 | 0 | 12.850 | 0 | 0 | 0 | 0 | 0 |
| FEBRA2002429 | 3.265 | 0 | 0 | 0 | 0 | 0 | 0 |
| FEBRA2002456 | 0 | 4.037 | 0 | 0 | 0 | 0 | 0 |
| FEBRA2002574 | 25.065 | 0 | 0 | 0 | 0 | 0 | 0 |
| FEBRA2002601 | 0 | 0 | 73.389 | 0 | 0 | 0 | 0 |
| FEBRA2002707 | 0 | 0 | 0 | 0 | 0 | 4.036 | 0 |
| FEBRA2002792 | 0 | 0 | 9.202 | 0 | 0 | 0 | 0 |
| FEBRA2002933 | 0.309 | 0 | 0 | 0 | 0 | 0.415 | 0 |
| FEBRA2003115 | 0 | 0 | 0 | 0 | 0 | 24.282 | 0 |
| FEBRA2003181 | 25.065 | 0 | 0 | 0 | 0 | 0 | 0 |
| FEBRA2003258 | 0 | 0 | 0 | 0 | 0 | 3.169 | 0 |
| FEBRA2003436 | 4.635 | 0 | 0 | 0 | 0 | 0 | 0 |
| FEBRA2003726 | 0.830 | 0 | 0 | 0 | 0 | 0 | 0 |
| FEBRA2003750 | 0 | 6.758 | 0 | 0 | 0 | 8.179 | 0 |
| FEBRA2003833 | 1.442 | 0 | 0 | 0 | 0 | 3.874 | 0 |
| FEBRA2003926 | 1.164 | 0 | 0 | 0 | 0 | 0.782 | 0 |
| FEBRA2003930 | 1.499 | 0 | 0 | 0 | 0 | 0 | 0 |
| FEBRA2004042 | 1.769 | 0 | 0 | 0 | 0 | 0 | 0 |
| FEBRA2004293 | 6.650 | 0 | 0 | 0 | 0 | 5.955 | 0 |
| FEBRA2004331 | 25.065 | 0 | 0 | 0 | 0 | 0 | 0 |
| FEBRA2004485 | 0 | 25.690 | 0 | 0 | 0 | 0 | 0 |
| FEBRA2004628 | 0 | 10.559 | 0 | 0 | 0 | 0 | 0 |
| FEBRA2004818 | 0 | 0 | 0 | 0 | 0 | 4.576 | 0 |
| FEBRA2005114 | 0 | 24.839 | 0 | 0 | 0 | 0 | 0 |
| FEBRA2005291 | 0 | 0 | 0 | 0 | 0 | 0 | 77.883 |
| FEBRA2005361 | 0 | 5.185 | 0 | 0 | 0 | 0 | 0 |
| FEBRA2005416 | 1.791 | 0 | 0 | 0 | 0 | 0 | 0 |
| FEBRA2005476 | 0 | 0 | 0 | 0 | 0 | 0 | 55.937 |
| FEBRA2005572 | 11.886 | 0 | 0 | 0 | 0 | 1.996 | 0 |
| FEBRA2005734 | 0.704 | 0 | 0 | 0 | 0 | 0 | 0 |
| FEBRA2005778 | 0 | 0 | 0 | 0 | 0 | 3.360 | 0 |
| FEBRA2005787 | 25.065 | 0 | 0 | 0 | 0 | 0 | 0 |
| FEBRA2005824 | 0 | 5.523 | 0 | 0 | 0 | 0 | 0 |
| FEBRA2005995 | 0 | 15.568 | 0 | 0 | 0 | 0 | 0 |
| FEBRA2006092 | 0 | 0 | 0 | 0 | 0 | 1.393 | 0 |
| FEBRA2006255 | 0 | 4.823 | 0 | 0 | 0 | 0 | 0 |
| FEBRA2006270 | 5.849 | 0 | 0 | 0 | 0 | 0 | 0 |
| FEBRA2006357 | 0 | 2.452 | 0 | 0 | 0 | 0 | 0 |
| FEBRA2006368 | 0 | 11.502 | 0 | 0 | 0 | 0 | 0 |
| FEBRA2006372 | 2.240 | 0 | 9.233 | 0 | 0 | 1.504 | 0 |
| FEBRA2006401 | 0 | 0 | 0 | 0 | 0 | 1.125 | 0 |
| FEBRA2006485 | 2.537 | 0 | 0 | 0 | 0 | 3.407 | 0 |
| FEBRA2006491 | 37.148 | 0 | 0 | 0 | 0 | 0 | 0 |
| FEBRA2006553 | 0 | 14.645 | 0 | 0 | 0 | 0 | 0 |
| FEBRA2006808 | 0 | 15.195 | 0 | 0 | 0 | 0 | 0 |
| FEBRA2006873 | 3.744 | 0 | 0 | 0 | 0 | 0 | 0 |
| FEBRA2007212 | 0 | 14.531 | 0 | 0 | 0 | 4.397 | 0 |
| FEBRA2007544 | 0 | 0 | 0 | 0 | 0 | 5.485 | 0 |
| FEBRA2007613 | 5.534 | 12.283 | 0 | 0 | 0 | 7.434 | 0 |
| FEBRA2007622 | 1.721 | 0 | 7.093 | 0 | 0 | 2.311 | 0 |
| FEBRA2007801 | 0 | 0 | 0 | 0 | 0 | 2.765 | 0 |
| FEBRA2007880 | 18.830 | 0 | 0 | 0 | 0 | 0 | 0 |
| FEBRA2007900 | 6.463 | 0 | 0 | 0 | 0 | 8.682 | 0 |
| FEBRA2007901 | 3.090 | 0 | 0 | 0 | 0 | 0 | 0 |
| FEBRA2008036 | 0 | 5.287 | 0 | 0 | 0 | 0 | 0 |
| FEBRA2008081 | 2.362 | 2.621 | 0 | 14.654 | 0 | 3.173 | 0 |
| FEBRA2008087 | 0.299 | 0 | 2.465 | 3.709 | 11.713 | 0 | 0 |
| FEBRA2008201 | 3.999 | 0 | 0 | 0 | 0 | 0 | 0 |
| FEBRA2008266 | 0 | 67.271 | 0 | 0 | 0 | 0 | 0 |
| FEBRA2008287 | 0 | 10.911 | 0 | 0 | 0 | 0 | 0 |
| FEBRA2008302 | 0 | 7.879 | 0 | 0 | 0 | 0 | 0 |
| FEBRA2008341 | 10.955 | 0 | 0 | 0 | 0 | 0 | 0 |
| FEBRA2008583 | 0 | 3.425 | 0 | 0 | 0 | 0.592 | 0 |
| FEBRA2008662 | 0 | 17.626 | 0 | 0 | 0 | 0 | 0 |
| FEBRA2008692 | 0 | 0 | 0 | 0 | 0 | 27.483 | 52.692 |
| FEBRA2008755 | 2.739 | 0 | 0 | 0 | 0 | 0 | 70.553 |
| FEBRA2009185 | 0 | 13.453 | 0 | 0 | 0 | 0 | 0 |
| FEBRA2009419 | 2.204 | 4.891 | 0 | 0 | 0 | 2.960 | 0 |
| FEBRA2009514 | 2.762 | 0 | 0 | 0 | 0 | 0 | 0 |
| FEBRA2009780 | 0 | 0 | 0 | 0 | 0 | 31.003 | 0 |
| FEBRA2009986 | 10.719 | 0 | 0 | 0 | 0 | 0 | 0 |
| FEBRA2011090 | 14.472 | 0 | 0 | 0 | 0 | 0 | 0 |
| FEBRA2012120 | 0 | 59.757 | 0 | 0 | 0 | 0 | 0 |
| FEBRA2012181 | 13.767 | 0 | 0 | 0 | 0 | 0 | 0 |
| FEBRA2013699 | 11.935 | 0 | 0 | 0 | 0 | 0 | 0 |
| FEBRA2014010 | 0 | 59.757 | 0 | 0 | 0 | 0 | 0 |
| FEBRA2014213 | 0 | 0 | 0 | 0 | 85.773 | 4.411 | 0 |
| FEBRA2014297 | 1.782 | 0 | 0 | 0 | 0 | 0 | 45.899 |
| FEBRA2014417 | 0.900 | 1.999 | 3.712 | 0 | 0 | 1.210 | 0 |
| FEBRA2014578 | 18.250 | 0 | 0 | 0 | 0 | 0 | 0 |
| FEBRA2015085 | 1.271 | 0 | 0 | 0 | 0 | 0 | 0 |
| FEBRA2016572 | 16.384 | 0 | 0 | 0 | 0 | 0 | 0 |
| FEBRA2017024 | 0 | 35.715 | 0 | 0 | 0 | 0 | 0 |
| FEBRA2017680 | 0 | 35.198 | 0 | 0 | 0 | 0 | 0 |
| FEBRA2018476 | 1.822 | 0 | 0 | 0 | 0 | 1.224 | 0 |
| FEBRA2018746 | 6.236 | 0 | 0 | 0 | 0 | 0 | 0 |
| FEBRA2019242 | 6.765 | 0 | 0 | 0 | 0 | 0 | 0 |
| FEBRA2019663 | 7.263 | 0 | 0 | 0 | 0 | 9.756 | 0 |
| FEBRA2019690 | 0 | 59.757 | 0 | 0 | 0 | 0 | 0 |
| FEBRA2021032 | 8.941 | 0 | 0 | 0 | 0 | 0 | 0 |
| FEBRA2022504 | 1.369 | 0 | 0 | 0 | 0 | 0 | 0 |
| FEBRA2023227 | 4.271 | 0 | 0 | 0 | 0 | 0 | 0 |
| FEBRA2023927 | 6.792 | 0 | 0 | 0 | 0 | 13.687 | 0 |
| FEBRA2024019 | 0 | 9.928 | 0 | 0 | 0 | 0 | 0 |
| FEBRA2024136 | 28.699 | 0 | 0 | 0 | 0 | 0 | 0 |
| FEBRA2025427 | 0 | 0 | 0 | 0 | 0 | 2.777 | 0 |
| FEBRA2025838 | 0.685 | 0 | 5.648 | 0 | 0 | 0 | 0 |
| FEBRA2028158 | 0 | 0 | 0 | 0 | 0 | 31.003 | 0 |
| FEBRA2028516 | 0 | 4.234 | 0 | 0 | 0 | 2.562 | 0 |
| FEKID1000018 | 0 | 14.612 | 0 | 0 | 0 | 0 | 0 |
| FELIV1000101 | 0.259 | 0 | 0 | 0 | 0 | 0 | 0 |
| FELIV1000137 | 0 | 0 | 0 | 0 | 0 | 0.347 | 0 |
| FELIV1000153 | 0 | 0 | 2.268 | 3.413 | 3.592 | 0 | 0 |
| FELIV1000164 | 0 | 0 | 0 | 0 | 0 | 0.651 | 0 |
| HCASM1000115 | 0.864 | 0 | 0 | 0 | 0 | 0 | 0 |
| HCASM2000016 | 2.489 | 2.763 | 0 | 0 | 0 | 3.344 | 0 |
| HCASM2000138 | 3.522 | 0 | 0 | 0 | 0 | 4.731 | 0 |
| HCASM2000363 | 0.567 | 0 | 0 | 0 | 0 | 0 | 0 |
| HCASM2003018 | 7.359 | 0 | 0 | 0 | 0 | 0 | 0 |
| HCASM2005388 | 2.949 | 0 | 0 | 0 | 0 | 3.962 | 0 |
| HCHON1000030 | 1.210 | 2.686 | 1.247 | 0 | 0 | 0.203 | 3.895 |
| HCHON1000166 | 2.508 | 0 | 0 | 0 | 0 | 0 | 0 |
| HCHON2000028 | 1.323 | 5.873 | 0 | 0 | 0 | 0 | 0 |
| HCHON2000056 | 0.709 | 0 | 1.950 | 0 | 0 | 2.224 | 0 |
| HCHON2000062 | 0 | 0 | 0 | 0 | 0 | 4.695 | 0 |
| HCHON2000087 | 0.516 | 0 | 0 | 0 | 0 | 2.772 | 0 |
| HCHON2000160 | 0.839 | 0 | 0 | 0 | 0 | 1.128 | 0 |
| HCHON2000226 | 0 | 0 | 0 | 0 | 0 | 0.903 | 8.660 |
| HCHON2000265 | 1.687 | 0 | 0 | 0 | 0 | 0 | 0 |
| HCHON2000295 | 0 | 3.243 | 0 | 0 | 0 | 0 | 0 |
| HCHON2000323 | 1.545 | 0 | 0 | 0 | 40.348 | 0 | 0 |
| HCHON2000364 | 0 | 0 | 0 | 0 | 0 | 0.498 | 0 |
| HCHON2000473 | 0 | 0 | 0 | 0 | 0 | 13.113 | 0 |
| HCHON2000508 | 2.180 | 1.382 | 0 | 0 | 0 | 0.837 | 0 |
| HCHON2000626 | 0.980 | 0 | 0 | 0 | 0 | 0 | 0 |
| HCHON2000698 | 2.390 | 0 | 0 | 0 | 0 | 3.211 | 0 |
| HCHON2000699 | 11.644 | 0 | 0 | 0 | 0 | 0 | 0 |
| HCHON2000738 | 0 | 0 | 0 | 0 | 0 | 3.335 | 0 |
| HCHON2000743 | 0 | 0 | 0 | 0 | 0 | 13.678 | 0 |
| HCHON2000751 | 8.931 | 0 | 0 | 0 | 0 | 0 | 0 |
| HCHON2000826 | 1.194 | 0 | 0 | 0 | 0 | 2.405 | 0 |
| HCHON2000832 | 0 | 13.096 | 0 | 0 | 0 | 0 | 0 |
| HCHON2001039 | 22.330 | 0 | 0 | 0 | 0 | 6.249 | 0 |
| HCHON2001084 | 1.915 | 0 | 0 | 0 | 0 | 2.572 | 0 |
| HCHON2001200 | 1.443 | 1.601 | 0 | 0 | 0 | 0.484 | 0 |
| HCHON2001217 | 2.604 | 0 | 0 | 0 | 0 | 3.498 | 0 |
| HCHON2001359 | 1.420 | 0 | 0 | 0 | 0 | 0.954 | 0 |
| HCHON2001434 | 3.821 | 0 | 0 | 0 | 0 | 1.711 | 0 |
| HCHON2001665 | 0 | 0 | 0 | 0 | 0 | 5.186 | 0 |
| HCHON2001712 | 11.644 | 0 | 0 | 0 | 0 | 0 | 0 |
| HCHON2001853 | 0 | 0 | 38.504 | 0 | 0 | 0 | 0 |
| HCHON2002247 | 2.341 | 0 | 0 | 0 | 0 | 0 | 0 |
| HCHON2002354 | 10.594 | 0 | 0 | 0 | 0 | 0 | 0 |
| HCHON2002971 | 11.644 | 0 | 0 | 0 | 0 | 0 | 0 |
| HCHON2004002 | 3.273 | 0 | 0 | 0 | 0 | 3.518 | 0 |
| HCHON2005987 | 0 | 36.909 | 0 | 0 | 0 | 0 | 0 |
| HCHON2006250 | 0 | 0 | 0 | 32.381 | 0 | 0 | 0 |
| HCHON2006459 | 0 | 0 | 0 | 0 | 0 | 12.090 | 0 |
| HCHON2007650 | 5.078 | 0 | 0 | 0 | 0 | 0 | 0 |
| HCHON2008856 | 0 | 36.909 | 0 | 0 | 0 | 0 | 0 |
| HEART1000074 | 3.165 | 0 | 0 | 0 | 0 | 0.850 | 0 |
| HEART1000149 | 0 | 3.476 | 0 | 0 | 0 | 1.052 | 0 |
| HEART2000506 | 0 | 0 | 0 | 0 | 0 | 1.964 | 0 |
| HEART2006195 | 0 | 0 | 0 | 0 | 0 | 10.616 | 0 |
| HEART2006521 | 0 | 0 | 0 | 0 | 0 | 2.679 | 0 |
| HEART2007231 | 8.078 | 0 | 0 | 0 | 0 | 0 | 0 |
| HHDPC1000065 | 7.625 | 0 | 0 | 0 | 0 | 0 | 0 |
| HHDPC1000083 | 0.816 | 0 | 0 | 0 | 0 | 0 | 0 |
| HHDPC1000163 | 0 | 0 | 8.646 | 0 | 0 | 0 | 0 |
| HHDPC2000055 | 0 | 0 | 0 | 0 | 39.829 | 2.048 | 0 |
| HHDPC2000070 | 8.024 | 0 | 0 | 0 | 0 | 0 | 0 |
| HHDPC2000104 | 0 | 0 | 0 | 0 | 0 | 2.072 | 0 |
| HHDPC2000149 | 3.726 | 0 | 0 | 0 | 0 | 0 | 0 |
| HHDPC2000455 | 0.458 | 0 | 0 | 0 | 0 | 1.231 | 0 |
| HHDPC2000456 | 1.295 | 0 | 0 | 0 | 0 | 3.478 | 0 |
| HHDPC2000572 | 0 | 0 | 0 | 0 | 0 | 22.001 | 0 |
| HHDPC2003439 | 0.424 | 0 | 0 | 0 | 0 | 0.285 | 0 |
| HHDPC2003983 | 0.929 | 1.031 | 3.829 | 0 | 0 | 0.936 | 0 |
| HHDPC2005742 | 10.588 | 0 | 0 | 0 | 0 | 0 | 0 |
| HHDPC2007267 | 0 | 0 | 0 | 0 | 10.634 | 3.828 | 0 |
| HHDPC2008123 | 10.588 | 0 | 0 | 0 | 0 | 0 | 0 |
| HHDPC2009272 | 0 | 0 | 0 | 0 | 0 | 13.725 | 0 |
| HLUNG1000037 | 0 | 0 | 0 | 0 | 0 | 9.843 | 0 |
| HLUNG1000055 | 4.062 | 2.004 | 3.721 | 0 | 0 | 0.606 | 11.625 |
| HLUNG1000076 | 0.701 | 0 | 0 | 0 | 0 | 0 | 0 |
| HLUNG1000099 | 0 | 0 | 0 | 0 | 0 | 12.090 | 0 |
| HLUNG2000004 | 0 | 0 | 0 | 0 | 0 | 5.667 | 0 |
| HLUNG2000063 | 4.113 | 0 | 0 | 0 | 0 | 0 | 0 |
| HLUNG2000125 | 0 | 0 | 0 | 73.829 | 0 | 0 | 0 |
| HLUNG2000176 | 18.523 | 0 | 0 | 0 | 0 | 0 | 0 |
| HLUNG2000412 | 8.931 | 0 | 0 | 0 | 0 | 2.999 | 0 |
| HLUNG2000751 | 0 | 0 | 0 | 0 | 0 | 19.353 | 0 |
| HLUNG2000846 | 0 | 0 | 0 | 0 | 0 | 5.061 | 0 |
| HLUNG2000884 | 0 | 0 | 0 | 0 | 0 | 2.398 | 0 |
| HLUNG2000950 | 10.309 | 0 | 0 | 0 | 0 | 0 | 0 |
| HLUNG2001146 | 0 | 0 | 0 | 0 | 0 | 11.743 | 0 |
| HLUNG2001439 | 2.206 | 0 | 0 | 0 | 0 | 0 | 0 |
| HLUNG2001518 | 6.383 | 0 | 0 | 0 | 0 | 4.899 | 0 |
| HLUNG2001633 | 0 | 0 | 0 | 0 | 0 | 17.937 | 0 |
| HLUNG2001677 | 0 | 0 | 0 | 0 | 76.536 | 0 | 0 |
| HLUNG2001712 | 2.749 | 0 | 0 | 0 | 0 | 0 | 0 |
| HLUNG2002059 | 0 | 0 | 0 | 0 | 0 | 12.273 | 0 |
| HLUNG2002465 | 0 | 0 | 0 | 0 | 0 | 1.355 | 0 |
| HLUNG2002648 | 6.028 | 0 | 0 | 0 | 0 | 0 | 0 |
| HLUNG2003003 | 6.664 | 0 | 0 | 0 | 0 | 0 | 0 |
| HLUNG2003042 | 0 | 0 | 0 | 0 | 0 | 2.666 | 0 |
| HLUNG2003306 | 0 | 0 | 0 | 0 | 0 | 14.343 | 0 |
| HLUNG2003378 | 0 | 0 | 0 | 0 | 0 | 10.370 | 0 |
| HLUNG2003497 | 18.523 | 0 | 0 | 0 | 0 | 0 | 0 |
| HLUNG2004154 | 0 | 0 | 0 | 0 | 0 | 23.297 | 0 |
| HLUNG2004159 | 3.024 | 0 | 0 | 0 | 0 | 6.092 | 0 |
| HLUNG2004534 | 0 | 0 | 0 | 0 | 0 | 3.249 | 0 |
| HLUNG2005203 | 0 | 0 | 0 | 0 | 0 | 23.395 | 0 |
| HLUNG2006370 | 10.207 | 0 | 0 | 0 | 0 | 0 | 0 |
| HLUNG2006570 | 0 | 0 | 0 | 0 | 0 | 21.718 | 0 |
| HLUNG2006812 | 2.466 | 0 | 0 | 0 | 0 | 6.624 | 0 |
| HLUNG2007219 | 18.523 | 0 | 0 | 0 | 0 | 0 | 0 |
| HLUNG2008153 | 5.676 | 0 | 0 | 0 | 0 | 0 | 0 |
| HLUNG2008637 | 1.409 | 0 | 11.613 | 0 | 0 | 0 | 0 |
| HLUNG2009225 | 5.030 | 0 | 10.368 | 0 | 0 | 1.689 | 0 |
| HLUNG2011833 | 0 | 0 | 0 | 84.945 | 0 | 0 | 0 |
| HLUNG2014821 | 0 | 0 | 0 | 0 | 0 | 37.919 | 0 |
| HLUNG2015184 | 21.837 | 0 | 0 | 0 | 0 | 0 | 0 |
| HLUNG2015418 | 0 | 0 | 0 | 0 | 0 | 23.395 | 0 |
| HLUNG2017262 | 1.322 | 0 | 0 | 0 | 0 | 7.105 | 0 |
| HLUNG2017546 | 2.943 | 0 | 0 | 0 | 0 | 0 | 0 |
| HSYRA1000062 | 0.714 | 0 | 0 | 0 | 9.330 | 0.960 | 0 |
| HSYRA1000119 | 1.150 | 0 | 0 | 0 | 10.015 | 0.515 | 0 |
| HSYRA1000152 | 0 | 0 | 0 | 0 | 0 | 1.336 | 25.615 |
| HSYRA1000178 | 0 | 0 | 0 | 0 | 0 | 16.852 | 0 |
| HSYRA2000044 | 10.037 | 0 | 0 | 0 | 0 | 0 | 0 |
| HSYRA2000159 | 0.402 | 3.124 | 0.829 | 0 | 0 | 1.350 | 2.589 |
| HSYRA2000224 | 1.499 | 0 | 0 | 0 | 0 | 2.014 | 0 |
| HSYRA2000232 | 1.233 | 0 | 0 | 0 | 0 | 0 | 0 |
| HSYRA2000248 | 0.567 | 2.516 | 0 | 0 | 0 | 0.761 | 0 |
| HSYRA2000253 | 7.045 | 0 | 0 | 0 | 0 | 0 | 0 |
| HSYRA2000255 | 0 | 0 | 0 | 0 | 0 | 1.005 | 0 |
| HSYRA2000424 | 0 | 0 | 0 | 0 | 0 | 13.033 | 0 |
| HSYRA2000629 | 2.783 | 12.354 | 0 | 0 | 0 | 0 | 0 |
| HSYRA2000640 | 2.841 | 6.307 | 0 | 0 | 0 | 4.771 | 0 |
| HSYRA2000743 | 10.325 | 2.865 | 0 | 0 | 0 | 1.734 | 0 |
| HSYRA2000787 | 2.594 | 0 | 0 | 0 | 0 | 3.484 | 0 |
| HSYRA2000828 | 1.188 | 5.274 | 0 | 0 | 0 | 1.596 | 0 |
| HSYRA2000925 | 0.924 | 0 | 0 | 0 | 0 | 0 | 0 |
| HSYRA2001103 | 0 | 0 | 5.831 | 0 | 0 | 1.900 | 36.429 |
| HSYRA2001105 | 2.297 | 0 | 0 | 0 | 0 | 3.086 | 0 |
| HSYRA2001138 | 0.213 | 3.775 | 0 | 0 | 0 | 1.142 | 0 |
| HSYRA2001225 | 0.616 | 0 | 0 | 0 | 0 | 0 | 0 |
| HSYRA2001353 | 0 | 37.564 | 0 | 0 | 0 | 0 | 0 |
| HSYRA2001396 | 2.534 | 0 | 0 | 0 | 33.091 | 0 | 0 |
| HSYRA2001420 | 0 | 0 | 0 | 0 | 0 | 6.241 | 0 |
| HSYRA2001476 | 1.208 | 0 | 3.319 | 0 | 0 | 2.704 | 0 |
| HSYRA2001567 | 3.737 | 0 | 0 | 0 | 0 | 2.510 | 0 |
| HSYRA2001595 | 2.375 | 2.109 | 0 | 0 | 12.408 | 0.638 | 0 |
| HSYRA2001621 | 0 | 2.038 | 0 | 0 | 0 | 0.411 | 3.941 |
| HSYRA2001638 | 5.658 | 0 | 0 | 0 | 0 | 0 | 0 |
| HSYRA2001983 | 0 | 17.866 | 0 | 0 | 0 | 0 | 0 |
| IMR321000161 | 19.114 | 0 | 0 | 0 | 0 | 0 | 0 |
| IMR321000210 | 0 | 3.752 | 0 | 0 | 0 | 0 | 0 |
| IMR321000219 | 1.170 | 1.039 | 0 | 0 | 0 | 1.886 | 0 |
| IMR321000253 | 0 | 0 | 0 | 0 | 0 | 1.141 | 0 |
| IMR321000266 | 0 | 0 | 0 | 0 | 0 | 6.340 | 0 |
| IMR322000121 | 0 | 4.126 | 0 | 0 | 0 | 0 | 0 |
| IMR322000127 | 3.875 | 0 | 0 | 0 | 0 | 0 | 0 |
| IMR322000178 | 1.551 | 0 | 0 | 0 | 0 | 0 | 0 |
| IMR322000223 | 0.568 | 0 | 0 | 0 | 0 | 0.763 | 0 |
| IMR322000243 | 1.431 | 0 | 0 | 0 | 0 | 2.883 | 0 |
| IMR322000316 | 0 | 1.536 | 0 | 0 | 0 | 0.465 | 0 |
| IMR322000374 | 0 | 0 | 0 | 0 | 0 | 6.170 | 0 |
| IMR322000730 | 0.229 | 0 | 1.885 | 2.836 | 2.985 | 0.154 | 5.887 |
| IMR322000918 | 2.444 | 0 | 0 | 0 | 0 | 0 | 0 |
| IMR322000935 | 0 | 5.542 | 0 | 0 | 0 | 1.677 | 0 |
| IMR322000973 | 0.672 | 0 | 0 | 0 | 0 | 0 | 0 |
| IMR322001435 | 2.350 | 0 | 0 | 0 | 0 | 1.052 | 0 |
| IMR322001541 | 2.821 | 0 | 0 | 0 | 0 | 0 | 0 |
| IMR322001584 | 3.123 | 0 | 0 | 0 | 0 | 0 | 0 |
| IMR322001600 | 0.134 | 0 | 0 | 0 | 0 | 0.180 | 6.916 |
| IMR322001710 | 1.617 | 0 | 0 | 0 | 0 | 4.345 | 0 |
| IMR322013805 | 11.264 | 0 | 0 | 0 | 0 | 0 | 0 |
| IMR322019070 | 4.462 | 0 | 0 | 0 | 0 | 5.994 | 0 |
| JCMLC2000273 | 2.577 | 0 | 0 | 0 | 0 | 0 | 0 |
| KIDNE1000104 | 13.829 | 0 | 0 | 0 | 0 | 0 | 0 |
| KIDNE1000145 | 9.224 | 0 | 0 | 0 | 0 | 0 | 0 |
| KIDNE2000085 | 4.287 | 0 | 7.070 | 0 | 0 | 1.152 | 0 |
| KIDNE2000252 | 0.713 | 0 | 0 | 0 | 0 | 0.957 | 0 |
| KIDNE2000266 | 10.533 | 0 | 0 | 0 | 0 | 0 | 0 |
| KIDNE2000349 | 0 | 2.341 | 0 | 0 | 0 | 0 | 0 |
| KIDNE2000383 | 4.107 | 0 | 0 | 0 | 0 | 11.033 | 0 |
| KIDNE2000403 | 2.755 | 0 | 0 | 0 | 0 | 2.776 | 0 |
| KIDNE2000517 | 0 | 5.797 | 0 | 0 | 0 | 0 | 0 |
| KIDNE2000574 | 0 | 2.771 | 0 | 0 | 0 | 0 | 0 |
| KIDNE2000947 | 2.107 | 0 | 0 | 0 | 0 | 0 | 0 |
| KIDNE2001162 | 0.778 | 0 | 3.209 | 0 | 0 | 0.523 | 10.024 |
| KIDNE2001361 | 19.301 | 0 | 0 | 0 | 0 | 0 | 0 |
| KIDNE2001467 | 0.869 | 0 | 0 | 0 | 0 | 2.920 | 0 |
| KIDNE2001636 | 11.821 | 0 | 0 | 0 | 0 | 0 | 0 |
| KIDNE2001713 | 0 | 0 | 0 | 0 | 0 | 17.356 | 0 |
| KIDNE2001847 | 0 | 0 | 0 | 0 | 0 | 0 | 78.156 |
| KIDNE2002252 | 1.818 | 0 | 0 | 0 | 0 | 7.325 | 0 |
| KIDNE2002725 | 0 | 0 | 0 | 0 | 0 | 11.525 | 0 |
| KIDNE2002883 | 1.891 | 0 | 0 | 0 | 0 | 0 | 0 |
| KIDNE2003305 | 2.807 | 0 | 11.573 | 0 | 0 | 0 | 0 |
| KIDNE2003316 | 6.309 | 0 | 0 | 0 | 0 | 0 | 0 |
| KIDNE2003357 | 0 | 0 | 0 | 0 | 0 | 16.562 | 0 |
| KIDNE2003373 | 0 | 0 | 0 | 0 | 0 | 17.356 | 0 |
| KIDNE2003941 | 0 | 3.734 | 0 | 0 | 0 | 1.130 | 0 |
| KIDNE2003994 | 0 | 0 | 0 | 0 | 0 | 9.032 | 0 |
| KIDNE2004295 | 10.647 | 0 | 0 | 0 | 0 | 0 | 0 |
| KIDNE2004344 | 19.301 | 0 | 0 | 0 | 0 | 0 | 0 |
| KIDNE2004411 | 0 | 0 | 0 | 0 | 0 | 9.545 | 0 |
| KIDNE2004475 | 2.146 | 9.528 | 0 | 0 | 0 | 0 | 0 |
| KIDNE2004531 | 19.301 | 0 | 0 | 0 | 0 | 0 | 0 |
| KIDNE2004534 | 3.112 | 0 | 25.661 | 0 | 0 | 0 | 0 |
| KIDNE2004864 | 8.141 | 0 | 0 | 0 | 0 | 0 | 0 |
| KIDNE2005676 | 1.173 | 0 | 0 | 0 | 0 | 4.728 | 0 |
| KIDNE2006009 | 0 | 0 | 0 | 0 | 0 | 4.130 | 0 |
| KIDNE2006014 | 0 | 0 | 0 | 0 | 0 | 3.326 | 0 |
| KIDNE2006248 | 0 | 1.151 | 2.138 | 0 | 6.772 | 0 | 0 |
| KIDNE2006353 | 65.219 | 0 | 0 | 0 | 0 | 0 | 0 |
| KIDNE2006465 | 0 | 11.454 | 0 | 0 | 0 | 0 | 0 |
| KIDNE2006652 | 0 | 0 | 0 | 0 | 0 | 9.674 | 0 |
| KIDNE2006775 | 3.055 | 0 | 0 | 0 | 0 | 0 | 0 |
| KIDNE2006811 | 0 | 0 | 0 | 0 | 0 | 3.645 | 0 |
| KIDNE2006880 | 2.677 | 0 | 0 | 0 | 0 | 0 | 0 |
| KIDNE2007328 | 7.377 | 0 | 0 | 0 | 0 | 7.928 | 0 |
| KIDNE2007352 | 0.693 | 1.539 | 0 | 0 | 0 | 0 | 0 |
| KIDNE2007954 | 5.273 | 0 | 0 | 0 | 0 | 2.361 | 0 |
| KIDNE2008048 | 3.131 | 0 | 0 | 0 | 0 | 3.605 | 0 |
| KIDNE2008403 | 0 | 0 | 0 | 0 | 0 | 10.663 | 0 |
| KIDNE2008987 | 0 | 0 | 0 | 0 | 62.744 | 0 | 0 |
| KIDNE2009367 | 0.628 | 2.790 | 0 | 0 | 0 | 2.533 | 0 |
| KIDNE2009605 | 12.593 | 0 | 0 | 0 | 0 | 0 | 0 |
| KIDNE2010049 | 0 | 0 | 0 | 0 | 0 | 3.851 | 0 |
| KIDNE2011635 | 0 | 51.498 | 0 | 0 | 0 | 0 | 0 |
| KIDNE2012440 | 1.476 | 0 | 0 | 0 | 0 | 0 | 0 |
| KIDNE2012710 | 0 | 0 | 0 | 0 | 0 | 21.213 | 0 |
| KIDNE2013158 | 15.126 | 0 | 0 | 0 | 0 | 0 | 0 |
| KIDNE2013845 | 6.524 | 0 | 0 | 0 | 0 | 5.008 | 0 |
| KIDNE2014290 | 2.923 | 0 | 0 | 0 | 0 | 2.356 | 0 |
| KIDNE2014325 | 6.309 | 0 | 0 | 0 | 0 | 0 | 0 |
| KIDNE2014808 | 0 | 0 | 0 | 0 | 0 | 24.317 | 0 |
| KIDNE2015445 | 0 | 0 | 23.619 | 0 | 0 | 0 | 0 |
| KIDNE2015546 | 0 | 51.498 | 0 | 0 | 0 | 0 | 0 |
| KIDNE2015598 | 19.301 | 0 | 0 | 0 | 0 | 0 | 0 |
| KIDNE2016327 | 0 | 0 | 0 | 0 | 0 | 19.599 | 0 |
| KIDNE2016371 | 7.513 | 0 | 0 | 0 | 0 | 0 | 0 |
| KIDNE2017040 | 2.804 | 0 | 0 | 0 | 0 | 0 | 0 |
| KIDNE2017052 | 19.301 | 0 | 0 | 0 | 0 | 0 | 0 |
| KIDNE2018352 | 0 | 0 | 24.516 | 0 | 0 | 0 | 0 |
| KIDNE2018493 | 8.914 | 0 | 0 | 0 | 0 | 0 | 0 |
| KIDNE2018891 | 10.170 | 0 | 0 | 0 | 0 | 6.831 | 0 |
| LIVER1000017 | 0 | 0 | 19.417 | 0 | 0 | 0 | 0 |
| LIVER1000067 | 0 | 0 | 9.545 | 0 | 0 | 0 | 0 |
| LIVER1000079 | 0 | 0 | 12.046 | 0 | 0 | 1.963 | 0 |
| LIVER1000104 | 0 | 0 | 7.084 | 0 | 0 | 0 | 0 |
| LIVER1000111 | 0 | 23.377 | 0 | 0 | 0 | 0 | 0 |
| LIVER1000132 | 0.835 | 0 | 0 | 0 | 0 | 0 | 0 |
| LIVER1000230 | 0 | 0 | 0 | 0 | 0 | 6.496 | 0 |
| LIVER1000303 | 22.395 | 0 | 0 | 0 | 0 | 0 | 0 |
| LIVER2000037 | 0 | 0 | 7.394 | 0 | 0 | 0 | 0 |
| LIVER2001539 | 4.152 | 0 | 0 | 0 | 0 | 0 | 0 |
| LIVER2001608 | 1.095 | 0 | 9.029 | 0 | 0 | 1.471 | 0 |
| LIVER2002842 | 3.184 | 0 | 0 | 0 | 0 | 2.138 | 0 |
| LIVER2003065 | 0 | 0 | 44.231 | 0 | 0 | 0 | 0 |
| LIVER2004514 | 0 | 0 | 0 | 0 | 0 | 11.443 | 0 |
| LIVER2005789 | 0 | 0 | 6.189 | 0 | 0 | 0 | 0 |
| LIVER2006006 | 0 | 0 | 4.889 | 0 | 0 | 0 | 0 |
| LIVER2007783 | 0 | 7.595 | 0 | 0 | 0 | 0 | 0 |
| LIVER2008706 | 0 | 0 | 61.334 | 0 | 0 | 0 | 0 |
| MAMGL1000017 | 0.254 | 0 | 0 | 0 | 0 | 0 | 0 |
| MAMGL1000032 | 0 | 0 | 0 | 0 | 7.019 | 0 | 0 |
| MAMGL1000035 | 0.504 | 0 | 1.384 | 0 | 0 | 0 | 0 |
| MAMGL1000083 | 0 | 0 | 0 | 0 | 0 | 4.867 | 0 |
| MAMGL1000173 | 0.221 | 0 | 0 | 0 | 0 | 0.297 | 0 |
| MAMGL1000178 | 0.255 | 0 | 0 | 0 | 0 | 0 | 0 |
| MESAN1000050 | 0 | 5.942 | 0 | 0 | 0 | 5.395 | 0 |
| MESAN1000079 | 0 | 0 | 0 | 0 | 0 | 16.100 | 0 |
| MESAN1000101 | 4.813 | 0 | 0 | 0 | 0 | 6.465 | 0 |
| MESAN1000126 | 1.489 | 0 | 0 | 0 | 0 | 2.000 | 0 |
| MESAN2000092 | 0 | 0 | 0 | 0 | 0 | 9.912 | 0 |
| MESAN2000149 | 2.048 | 0 | 0 | 0 | 0 | 2.752 | 0 |
| MESAN2000267 | 1.366 | 0 | 0 | 0 | 0 | 0.459 | 0 |
| MESAN2000572 | 12.788 | 0 | 7.029 | 0 | 0 | 2.290 | 0 |
| MESAN2000608 | 0.656 | 2.911 | 0 | 0 | 0 | 0 | 0 |
| MESAN2000815 | 13.020 | 0 | 0 | 0 | 0 | 0 | 0 |
| MESAN2001450 | 0 | 0 | 0 | 59.680 | 0 | 0 | 0 |
| MESAN2001627 | 0 | 0 | 0 | 0 | 0 | 14.651 | 0 |
| MESAN2002086 | 0.694 | 1.541 | 0 | 0 | 0 | 1.865 | 0 |
| MESAN2002724 | 0 | 0 | 0 | 0 | 0 | 1.033 | 0 |
| MESAN2002790 | 4.079 | 0 | 0 | 0 | 0 | 0 | 0 |
| MESAN2002940 | 0 | 0 | 0 | 0 | 0 | 3.562 | 0 |
| MESAN2003035 | 11.952 | 0 | 0 | 0 | 0 | 0 | 0 |
| MESAN2003058 | 14.982 | 0 | 0 | 0 | 0 | 0 | 0 |
| MESAN2003190 | 14.756 | 0 | 0 | 0 | 0 | 0 | 0 |
| MESAN2003444 | 6.212 | 0 | 0 | 0 | 0 | 0 | 0 |
| MESAN2003622 | 0.501 | 0 | 4.132 | 0 | 0 | 0 | 0 |
| MESAN2005284 | 4.043 | 0 | 0 | 0 | 0 | 5.432 | 0 |
| MESAN2005303 | 0 | 29.326 | 0 | 0 | 0 | 17.748 | 0 |
| MESAN2005633 | 14.314 | 0 | 0 | 0 | 0 | 0 | 0 |
| MESAN2005689 | 2.587 | 0 | 0 | 0 | 0 | 0 | 0 |
| MESAN2005766 | 3.289 | 0 | 0 | 0 | 0 | 2.209 | 0 |
| MESAN2005957 | 0 | 0 | 0 | 0 | 0 | 11.061 | 0 |
| MESAN2005958 | 6.737 | 0 | 0 | 0 | 0 | 0 | 0 |
| MESAN2006401 | 1.508 | 0 | 0 | 0 | 0 | 2.026 | 0 |
| MESAN2006563 | 1.727 | 0 | 0 | 0 | 0 | 0 | 0 |
| MESAN2007755 | 0 | 33.863 | 0 | 0 | 0 | 0 | 0 |
| MESAN2008926 | 2.662 | 0 | 0 | 0 | 0 | 0 | 0 |
| MESAN2008936 | 3.317 | 0 | 0 | 0 | 0 | 4.456 | 0 |
| MESAN2009580 | 0.926 | 0 | 0 | 0 | 0 | 0 | 23.850 |
| MESAN2010664 | 0 | 32.125 | 0 | 0 | 0 | 0 | 0 |
| MESAN2011984 | 7.113 | 0 | 0 | 0 | 0 | 0 | 0 |
| MESAN2012054 | 2.127 | 0 | 0 | 0 | 0 | 0 | 0 |
| MESAN2013284 | 6.145 | 0 | 0 | 0 | 0 | 0 | 0 |
| MESAN2013908 | 5.753 | 0 | 0 | 0 | 0 | 0 | 0 |
| MESAN2014192 | 18.359 | 0 | 0 | 0 | 0 | 0 | 0 |
| MESAN2014412 | 16.049 | 0 | 0 | 0 | 0 | 0 | 0 |
| MESAN2016552 | 10.145 | 0 | 0 | 0 | 0 | 0 | 0 |
| MESAN2017133 | 7.316 | 0 | 0 | 0 | 0 | 0 | 0 |
| N1ESE2000698 | 3.542 | 0 | 0 | 0 | 0 | 0 | 0 |
| NB9N41000121 | 0.626 | 0 | 0 | 0 | 0 | 0 | 0 |
| NB9N41000340 | 0 | 0 | 0 | 0 | 0 | 1.625 | 0 |
| NB9N42000104 | 1.382 | 0 | 0 | 0 | 0 | 0.929 | 0 |
| NESOP2000504 | 3.771 | 0 | 0 | 0 | 0 | 0 | 0 |
| NESOP2001656 | 0 | 14.819 | 0 | 0 | 0 | 0 | 0 |
| NHNPC2000062 | 1.747 | 0 | 0 | 0 | 0 | 0 | 0 |
| NHNPC2000206 | 4.581 | 0 | 0 | 0 | 0 | 0 | 0 |
| NOVAR1000015 | 2.532 | 0 | 0 | 0 | 0 | 0 | 0 |
| NOVAR1000091 | 1.615 | 0 | 0 | 0 | 0 | 2.169 | 0 |
| NOVAR2000038 | 0.518 | 2.299 | 0 | 0 | 0 | 0.696 | 0 |
| NOVAR2000710 | 0 | 0 | 0 | 0 | 0 | 11.838 | 0 |
| NOVAR2002039 | 3.380 | 0 | 0 | 0 | 0 | 0 | 0 |
| NT2NE1000014 | 7.248 | 0 | 0 | 0 | 0 | 9.737 | 0 |
| NT2NE1000122 | 18.705 | 0 | 0 | 0 | 0 | 0 | 0 |
| NT2NE1000163 | 0.338 | 0 | 0 | 0 | 0 | 2.269 | 0 |
| NT2NE1000181 | 15.221 | 0 | 0 | 0 | 0 | 0 | 0 |
| NT2NE2000056 | 0.983 | 2.908 | 0 | 0 | 0 | 4.840 | 0 |
| NT2NE2000174 | 0 | 0 | 0 | 0 | 0 | 0 | 8.195 |
| NT2NE2000195 | 0 | 5.690 | 10.568 | 0 | 0 | 0 | 0 |
| NT2NE2000260 | 0 | 0.447 | 2.491 | 0 | 0 | 0 | 5.189 |
| NT2NE2000356 | 18.705 | 0 | 0 | 0 | 0 | 0 | 0 |
| NT2NE2000383 | 3.801 | 0 | 0 | 0 | 0 | 5.106 | 0 |
| NT2NE2000384 | 1.919 | 0 | 0 | 0 | 0 | 5.156 | 0 |
| NT2NE2000392 | 0 | 3.305 | 0 | 0 | 0 | 0 | 0 |
| NT2NE2000470 | 4.550 | 0 | 0 | 0 | 0 | 0 | 0 |
| NT2NE2000536 | 0 | 0 | 59.169 | 0 | 0 | 9.640 | 0 |
| NT2NE2000575 | 2.205 | 3.559 | 1.653 | 0 | 0 | 0.808 | 0 |
| NT2NE2000707 | 0.837 | 6.194 | 0 | 0 | 0 | 3.748 | 0 |
| NT2NE2000763 | 7.005 | 8.885 | 0 | 0 | 0 | 0 | 0 |
| NT2NE2000809 | 8.479 | 0 | 0 | 0 | 0 | 0 | 0 |
| NT2NE2000909 | 0 | 12.117 | 0 | 0 | 0 | 0 | 0 |
| NT2NE2000950 | 4.370 | 19.401 | 0 | 0 | 0 | 0 | 0 |
| NT2NE2000963 | 0.191 | 0 | 0 | 0 | 4.997 | 0 | 0 |
| NT2NE2001000 | 0.718 | 0 | 0 | 0 | 0 | 0 | 0 |
| NT2NE2001048 | 1.248 | 0 | 0 | 0 | 0 | 1.677 | 0 |
| NT2NE2001326 | 0 | 0 | 0 | 0 | 0 | 23.610 | 0 |
| NT2NE2001403 | 4.326 | 0 | 0 | 0 | 0 | 0 | 0 |
| NT2NE2001435 | 7.978 | 0 | 0 | 0 | 0 | 0 | 0 |
| NT2NE2001545 | 5.976 | 0 | 0 | 0 | 0 | 2.007 | 0 |
| NT2NE2001617 | 0 | 0 | 0 | 0 | 0 | 5.082 | 0 |
| NT2NE2001648 | 0 | 32.127 | 0 | 0 | 0 | 0 | 0 |
| NT2NE2001655 | 0 | 5.182 | 0 | 0 | 0 | 1.568 | 0 |
| NT2NE2001660 | 0 | 28.992 | 0 | 0 | 0 | 8.773 | 0 |
| NT2NE2001793 | 0.865 | 0 | 0 | 0 | 0 | 4.647 | 0 |
| NT2NE2002100 | 18.705 | 0 | 0 | 0 | 0 | 0 | 0 |
| NT2NE2002162 | 10.194 | 0 | 0 | 0 | 0 | 0 | 0 |
| NT2NE2003485 | 1.941 | 0 | 0 | 0 | 0 | 5.215 | 0 |
| NT2NE2003569 | 0 | 0 | 0 | 0 | 0 | 1.944 | 0 |
| NT2NE2003887 | 5.204 | 0 | 0 | 0 | 0 | 0 | 0 |
| NT2NE2004255 | 0 | 0 | 0 | 0 | 0 | 6.672 | 0 |
| NT2NE2004740 | 0 | 0 | 0 | 0 | 0 | 23.610 | 0 |
| NT2NE2005317 | 0 | 0 | 0 | 0 | 0 | 14.244 | 0 |
| NT2NE2005323 | 18.705 | 0 | 0 | 0 | 0 | 0 | 0 |
| NT2NE2005371 | 9.195 | 0 | 0 | 0 | 0 | 0 | 0 |
| NT2NE2005688 | 0 | 0 | 0 | 0 | 0 | 0.836 | 0 |
| NT2NE2005876 | 0 | 5.460 | 0 | 0 | 0 | 0 | 0 |
| NT2NE2006458 | 0 | 0 | 0 | 0 | 30.788 | 0 | 0 |
| NT2NE2006478 | 0 | 0 | 0 | 0 | 0 | 12.036 | 0 |
| NT2NE2006909 | 0.238 | 0 | 0 | 0 | 0 | 0.320 | 0 |
| NT2NE2007786 | 0 | 0 | 0 | 0 | 0 | 0 | 85.561 |
| NT2NE2010842 | 3.145 | 0 | 0 | 0 | 0 | 3.168 | 0 |
| NT2NE2011107 | 10.028 | 0 | 0 | 0 | 0 | 0 | 0 |
| NT2NE2011119 | 0 | 0 | 0 | 0 | 0 | 5.187 | 0 |
| NT2NE2012505 | 0 | 0 | 0 | 0 | 0 | 20.538 | 0 |
| NT2NE2014113 | 0 | 33.588 | 0 | 0 | 0 | 0 | 0 |
| NT2NE2015262 | 18.705 | 0 | 0 | 0 | 0 | 0 | 0 |
| NT2NE2015362 | 0 | 0 | 0 | 0 | 0 | 20.538 | 0 |
| NT2NE2015974 | 6.370 | 0 | 0 | 0 | 0 | 0 | 0 |
| NT2NE2018180 | 3.135 | 0 | 0 | 0 | 0 | 0 | 0 |
| NT2NE2019091 | 0 | 21.023 | 0 | 0 | 0 | 0 | 0 |
| NT2RI1000016 | 0 | 0 | 0 | 0 | 0 | 28.303 | 0 |
| NT2RI1000027 | 1.686 | 0 | 0 | 0 | 0 | 0 | 0 |
| NT2RI1000048 | 2.124 | 0 | 0 | 0 | 0 | 0 | 0 |
| NT2RI1000127 | 0 | 0 | 0 | 0 | 0 | 2.033 | 0 |
| NT2RI2000064 | 0.449 | 0 | 0 | 0 | 0 | 0.603 | 0 |
| NT2RI2000107 | 3.863 | 0 | 0 | 0 | 0 | 5.189 | 0 |
| NT2RI2000116 | 0 | 2.153 | 0 | 0 | 0 | 0 | 0 |
| NT2RI2000167 | 0 | 42.766 | 0 | 0 | 0 | 0 | 0 |
| NT2RI2000255 | 0 | 4.431 | 0 | 0 | 0 | 0 | 0 |
| NT2RI2000263 | 0 | 0 | 0 | 0 | 37.259 | 1.916 | 0 |
| NT2RI2000282 | 0 | 0 | 0 | 0 | 0 | 0.355 | 0 |
| NT2RI2000284 | 0 | 3.375 | 0 | 0 | 0 | 0 | 9.790 |
| NT2RI2000294 | 0 | 0 | 0 | 0 | 41.225 | 0 | 0 |
| NT2RI2000348 | 7.389 | 0 | 0 | 0 | 0 | 0 | 0 |
| NT2RI2000412 | 6.427 | 0 | 0 | 0 | 0 | 0 | 0 |
| NT2RI2000578 | 0 | 1.238 | 0 | 0 | 0 | 0 | 0 |
| NT2RI2000671 | 0.877 | 0 | 0 | 0 | 0 | 1.178 | 0 |
| NT2RI2000685 | 5.783 | 0 | 0 | 0 | 0 | 0 | 0 |
| NT2RI2000727 | 0 | 2.873 | 0 | 0 | 0 | 0.290 | 5.556 |
| NT2RI2000775 | 0 | 0 | 0 | 0 | 0 | 19.103 | 0 |
| NT2RI2000822 | 8.883 | 0 | 0 | 0 | 0 | 0 | 0 |
| NT2RI2000829 | 0 | 28.277 | 0 | 0 | 0 | 0 | 0 |
| NT2RI2000974 | 0 | 0 | 0 | 0 | 0 | 2.416 | 0 |
| NT2RI2001010 | 31.453 | 0 | 0 | 0 | 0 | 0 | 0 |
| NT2RI2001342 | 1.316 | 0 | 0 | 0 | 0 | 0 | 0 |
| NT2RI2001422 | 0 | 13.761 | 0 | 0 | 0 | 0 | 0 |
| NT2RI2001540 | 0.997 | 0 | 0.783 | 0 | 6.200 | 0.255 | 1.223 |
| NT2RI2001657 | 4.015 | 0 | 0 | 0 | 0 | 0 | 0 |
| NT2RI2001726 | 8.805 | 0 | 0 | 0 | 0 | 0 | 0 |
| NT2RI2001731 | 3.158 | 0 | 0 | 0 | 0 | 0 | 0 |
| NT2RI2001846 | 0 | 0 | 0 | 0 | 0 | 11.040 | 0 |
| NT2RI2001859 | 4.855 | 0 | 0 | 0 | 0 | 0 | 0 |
| NT2RI2001866 | 12.100 | 0 | 0 | 0 | 0 | 16.255 | 0 |
| NT2RI2001910 | 6.228 | 0 | 0 | 0 | 0 | 0 | 0 |
| NT2RI2002091 | 0.157 | 0.099 | 0.553 | 1.110 | 0.876 | 0.346 | 0.576 |
| NT2RI2002152 | 0 | 4.655 | 0 | 0 | 0 | 0 | 0 |
| NT2RI2002316 | 0.669 | 0 | 0 | 0 | 0 | 3.592 | 0 |
| NT2RI2002391 | 0 | 0 | 0 | 0 | 0 | 1.817 | 0 |
| NT2RI2002540 | 0 | 6.399 | 0 | 0 | 0 | 0 | 0 |
| NT2RI2002654 | 1.470 | 0 | 0 | 0 | 0 | 0.658 | 0 |
| NT2RI2002847 | 1.047 | 0 | 0 | 0 | 0 | 4.218 | 0 |
| NT2RI2002865 | 0 | 0 | 0 | 0 | 0 | 7.595 | 0 |
| NT2RI2002958 | 0 | 21.383 | 0 | 0 | 0 | 1.078 | 0 |
| NT2RI2003011 | 0 | 0 | 0 | 71.453 | 0 | 0 | 0 |
| NT2RI2003019 | 8.722 | 0 | 0 | 0 | 0 | 0 | 0 |
| NT2RI2003051 | 18.780 | 0 | 0 | 0 | 0 | 0 | 0 |
| NT2RI2003304 | 2.407 | 0 | 0 | 0 | 0 | 1.470 | 0 |
| NT2RI2003317 | 1.314 | 0 | 0 | 0 | 0 | 0 | 0 |
| NT2RI2003338 | 0.844 | 7.496 | 0 | 0 | 0 | 1.134 | 0 |
| NT2RI2003344 | 3.248 | 0 | 0 | 0 | 0 | 4.363 | 0 |
| NT2RI2003407 | 4.037 | 0 | 0 | 0 | 0 | 0 | 25.993 |
| NT2RI2003420 | 2.568 | 0 | 0 | 0 | 0 | 1.725 | 0 |
| NT2RI2003678 | 7.938 | 0 | 0 | 0 | 0 | 2.133 | 0 |
| NT2RI2003695 | 0.657 | 2.915 | 0 | 0 | 0 | 0.882 | 0 |
| NT2RI2003738 | 0.438 | 0 | 2.405 | 0 | 0 | 1.372 | 3.757 |
| NT2RI2003921 | 0.791 | 0 | 0 | 0 | 0 | 0 | 0 |
| NT2RI2004059 | 5.682 | 0 | 0 | 0 | 0 | 0 | 0 |
| NT2RI2004304 | 17.362 | 0 | 0 | 0 | 0 | 4.665 | 0 |
| NT2RI2004535 | 0 | 0 | 0 | 0 | 0 | 2.144 | 0 |
| NT2RI2004608 | 3.085 | 0 | 0 | 0 | 0 | 0 | 0 |
| NT2RI2004884 | 0.644 | 0 | 0 | 0 | 0 | 0 | 0 |
| NT2RI2005061 | 0 | 0 | 0 | 0 | 0 | 4.886 | 0 |
| NT2RI2005116 | 1.066 | 0 | 0 | 0 | 0 | 0 | 0 |
| NT2RI2005150 | 0 | 2.551 | 0 | 0 | 0 | 0.772 | 0 |
| NT2RI2005335 | 3.228 | 2.866 | 0 | 0 | 0 | 3.469 | 0 |
| NT2RI2005353 | 0.961 | 4.264 | 7.919 | 0 | 0 | 0 | 0 |
| NT2RI2005405 | 0.234 | 1.039 | 0 | 0 | 12.229 | 0 | 0 |
| NT2RI2005473 | 0 | 0 | 0 | 0 | 71.141 | 0 | 0 |
| NT2RI2005647 | 0 | 0 | 0 | 0 | 0 | 0.741 | 0 |
| NT2RI2005710 | 0 | 0 | 0 | 0 | 0 | 5.847 | 0 |
| NT2RI2005713 | 1.233 | 0 | 0 | 0 | 0 | 0 | 0 |
| NT2RI2005723 | 2.092 | 0 | 0 | 0 | 0 | 0.562 | 10.777 |
| NT2RI2005811 | 1.277 | 5.671 | 0 | 0 | 0 | 0 | 0 |
| NT2RI2005814 | 0 | 0 | 0 | 0 | 0 | 1.459 | 0 |
| NT2RI2005818 | 2.124 | 0 | 0 | 0 | 0 | 0 | 0 |
| NT2RI2006070 | 8.569 | 0 | 0 | 42.530 | 0 | 0 | 0 |
| NT2RI2006072 | 3.828 | 0 | 0 | 0 | 0 | 0 | 0 |
| NT2RI2006271 | 0 | 10.339 | 0 | 0 | 0 | 0 | 0 |
| NT2RI2006412 | 0 | 3.034 | 0 | 0 | 0 | 0.918 | 0 |
| NT2RI2006565 | 0 | 0 | 0 | 0 | 0 | 13.386 | 0 |
| NT2RI2006640 | 0 | 23.265 | 0 | 0 | 0 | 0 | 0 |
| NT2RI2006682 | 2.052 | 0 | 0 | 0 | 0 | 5.513 | 0 |
| NT2RI2006703 | 13.514 | 0 | 0 | 0 | 0 | 0 | 0 |
| NT2RI2006853 | 0 | 0 | 0 | 0 | 0 | 5.025 | 0 |
| NT2RI2006856 | 1.172 | 0 | 0 | 0 | 0 | 0 | 0 |
| NT2RI2006943 | 0 | 4.502 | 0 | 0 | 0 | 0 | 0 |
| NT2RI2007054 | 1.083 | 4.806 | 0 | 0 | 0 | 0 | 0 |
| NT2RI2007084 | 0.907 | 0 | 0 | 0 | 0 | 0 | 0 |
| NT2RI2007096 | 4.323 | 0 | 0 | 0 | 0 | 0 | 0 |
| NT2RI2007133 | 0.327 | 0 | 2.697 | 0 | 0 | 0.879 | 0 |
| NT2RI2007277 | 0 | 3.629 | 0 | 0 | 0 | 1.098 | 0 |
| NT2RI2007377 | 0.977 | 8.671 | 0 | 0 | 0 | 0 | 0 |
| NT2RI2007384 | 0 | 0 | 0 | 0 | 0 | 0.485 | 0 |
| NT2RI2007445 | 1.495 | 0 | 0 | 0 | 0 | 0 | 0 |
| NT2RI2007468 | 6.968 | 0 | 0 | 0 | 0 | 0 | 0 |
| NT2RI2007572 | 0.623 | 0 | 5.137 | 0 | 0 | 0.837 | 0 |
| NT2RI2007589 | 0 | 3.953 | 0 | 0 | 0 | 0 | 0 |
| NT2RI2007629 | 0 | 7.462 | 0 | 0 | 0 | 0 | 0 |
| NT2RI2007723 | 2.950 | 0 | 0 | 0 | 0 | 0 | 0 |
| NT2RI2007884 | 2.117 | 0 | 0 | 0 | 0 | 0 | 0 |
| NT2RI2007987 | 4.504 | 6.665 | 0 | 0 | 0 | 2.017 | 0 |
| NT2RI2008045 | 0 | 0 | 0 | 0 | 0 | 2.609 | 0 |
| NT2RI2008141 | 0 | 0 | 0 | 0 | 0 | 4.790 | 0 |
| NT2RI2008336 | 0 | 1.483 | 0 | 0 | 8.726 | 0.897 | 0 |
| NT2RI2008396 | 2.205 | 0 | 0 | 0 | 0 | 0.494 | 0 |
| NT2RI2008526 | 1.279 | 0 | 0 | 0 | 0 | 0 | 0 |
| NT2RI2008566 | 7.843 | 0 | 0 | 0 | 0 | 0 | 0 |
| NT2RI2008714 | 0 | 0 | 0 | 0 | 0 | 16.436 | 0 |
| NT2RI2008724 | 3.063 | 0 | 12.626 | 0 | 0 | 0 | 0 |
| NT2RI2008791 | 0 | 0 | 0 | 0 | 0 | 1.307 | 0 |
| NT2RI2008808 | 3.780 | 0 | 0 | 0 | 0 | 5.078 | 0 |
| NT2RI2008942 | 1.749 | 0 | 0 | 0 | 0 | 11.746 | 0 |
| NT2RI2009037 | 2.812 | 0 | 0 | 0 | 18.363 | 1.889 | 0 |
| NT2RI2009065 | 1.558 | 1.729 | 0 | 0 | 0 | 0.523 | 0 |
| NT2RI2009066 | 0 | 0 | 0 | 0 | 0 | 6.140 | 0 |
| NT2RI2009083 | 8.550 | 0 | 0 | 0 | 0 | 0 | 0 |
| NT2RI2009173 | 0.930 | 0 | 0 | 0 | 0 | 0 | 0 |
| NT2RI2009194 | 0 | 3.638 | 0 | 0 | 0 | 0 | 0 |
| NT2RI2009239 | 3.496 | 0 | 0 | 0 | 0 | 0 | 0 |
| NT2RI2009259 | 9.759 | 0 | 0 | 0 | 0 | 0 | 0 |
| NT2RI2009269 | 0 | 7.316 | 0 | 0 | 0 | 0 | 0 |
| NT2RI2009406 | 0 | 0 | 0 | 0 | 0 | 3.151 | 0 |
| NT2RI2009583 | 0 | 0.828 | 4.615 | 13.890 | 0 | 0.752 | 0 |
| NT2RI2010283 | 0 | 0 | 50.879 | 0 | 0 | 0 | 0 |
| NT2RI2011450 | 0 | 0 | 0 | 0 | 0 | 28.449 | 0 |
| NT2RI2012726 | 3.868 | 0 | 0 | 0 | 0 | 0 | 0 |
| NT2RI2015342 | 0 | 5.569 | 0 | 0 | 0 | 0 | 0 |
| NT2RI2015533 | 1.296 | 11.506 | 0 | 0 | 0 | 3.482 | 0 |
| NT2RI2018448 | 0 | 0 | 0 | 0 | 0 | 14.106 | 0 |
| NT2RI2024008 | 0 | 0 | 0 | 0 | 0 | 38.134 | 0 |
| NT2RI2024313 | 12.217 | 0 | 0 | 0 | 0 | 0 | 0 |
| NT2RI2027224 | 0 | 0 | 0 | 0 | 0 | 38.134 | 0 |
| NT2RI3000174 | 0 | 0 | 0 | 0 | 0 | 38.134 | 0 |
| NT2RI3000423 | 8.019 | 0 | 0 | 0 | 0 | 48.475 | 0 |
| NT2RI3001445 | 5.281 | 0 | 0 | 0 | 0 | 0 | 0 |
| NT2RI3003738 | 15.123 | 0 | 0 | 0 | 0 | 0 | 0 |
| NT2RI3005923 | 0 | 0 | 0 | 0 | 0 | 21.835 | 0 |
| NT2RI3006284 | 0 | 0 | 0 | 0 | 0 | 13.906 | 0 |
| NT2RI3006673 | 0 | 0 | 0 | 0 | 0 | 11.178 | 0 |
| NT2RI3007291 | 0 | 0 | 0 | 0 | 0 | 14.020 | 0 |
| NT2RI3007543 | 1.415 | 0 | 0 | 0 | 0 | 2.851 | 0 |
| NT2RI3009480 | 31.453 | 0 | 0 | 0 | 0 | 0 | 0 |
| NT2RP6000017 | 2.495 | 0 | 0 | 0 | 0 | 1.676 | 0 |
| NT2RP6000039 | 1.495 | 0 | 0 | 0 | 0 | 0 | 0 |
| NT2RP6000072 | 12.126 | 5.981 | 0 | 0 | 0 | 0 | 0 |
| NT2RP6000078 | 32.080 | 1.331 | 2.472 | 0 | 0 | 0.805 | 7.722 |
| NT2RP6000085 | 0 | 0 | 0 | 0 | 0 | 10.361 | 0 |
| NT2RP6000110 | 0 | 0 | 0 | 0 | 0 | 6.135 | 0 |
| NT2RP6000123 | 0.979 | 1.449 | 0 | 0 | 0 | 0.877 | 0 |
| NT2RP7000069 | 8.426 | 0 | 0 | 0 | 0 | 7.546 | 0 |
| NT2RP7000076 | 2.541 | 6.768 | 0 | 0 | 0 | 1.365 | 0 |
| NT2RP7000086 | 0 | 0 | 0 | 0 | 0 | 14.324 | 0 |
| NT2RP7000112 | 13.393 | 0 | 0 | 0 | 0 | 0 | 0 |
| NT2RP7000173 | 0.464 | 0 | 0 | 0 | 0 | 2.491 | 0 |
| NT2RP7000238 | 6.476 | 0 | 0 | 0 | 0 | 1.450 | 0 |
| NT2RP7000259 | 0 | 0 | 0 | 0 | 0 | 14.979 | 0 |
| NT2RP7000271 | 5.058 | 0 | 0 | 0 | 0 | 3.397 | 0 |
| NT2RP7000477 | 0 | 0 | 0 | 0 | 0 | 2.216 | 0 |
| NT2RP7000600 | 5.543 | 0 | 0 | 0 | 0 | 4.964 | 0 |
| NT2RP7000906 | 0 | 0 | 0 | 0 | 0 | 7.306 | 0 |
| NT2RP7001166 | 3.118 | 2.768 | 0 | 0 | 0 | 1.675 | 0 |
| NT2RP7001231 | 3.444 | 0 | 0 | 0 | 0 | 9.252 | 0 |
| NT2RP7001283 | 0.469 | 0 | 0 | 0 | 0 | 1.891 | 0 |
| NT2RP7001335 | 0 | 15.467 | 0 | 0 | 0 | 0 | 0 |
| NT2RP7001591 | 2.168 | 0 | 0 | 0 | 0 | 0 | 0 |
| NT2RP7001962 | 0 | 0 | 0 | 0 | 0 | 2.976 | 0 |
| NT2RP7002028 | 3.351 | 7.439 | 0 | 0 | 0 | 2.251 | 0 |
| NT2RP7002282 | 0 | 0 | 0 | 0 | 0 | 17.201 | 0 |
| NT2RP7002376 | 20.234 | 0 | 0 | 0 | 0 | 0 | 0 |
| NT2RP7002379 | 1.679 | 1.863 | 0 | 0 | 0 | 1.128 | 0 |
| NT2RP7002449 | 0 | 7.478 | 0 | 0 | 0 | 2.263 | 0 |
| NT2RP7002450 | 0 | 0 | 0 | 0 | 0 | 2.990 | 0 |
| NT2RP7002619 | 0.909 | 0 | 0 | 0 | 0 | 0 | 0 |
| NT2RP7002802 | 3.047 | 0 | 0 | 0 | 0 | 0 | 0 |
| NT2RP7002829 | 0 | 0 | 0 | 0 | 0 | 9.794 | 0 |
| NT2RP7002875 | 1.539 | 3.416 | 0 | 0 | 0 | 0 | 0 |
| NT2RP7003203 | 1.540 | 0 | 0 | 0 | 0 | 0 | 0 |
| NT2RP7003319 | 0.761 | 0 | 0 | 0 | 0 | 6.132 | 0 |
| NT2RP7003511 | 24.799 | 0 | 0 | 0 | 0 | 0 | 0 |
| NT2RP7003629 | 9.435 | 0 | 0 | 0 | 0 | 12.674 | 0 |
| NT2RP7003632 | 2.716 | 0 | 0 | 0 | 0 | 0 | 0 |
| NT2RP7003647 | 3.925 | 0 | 0 | 0 | 0 | 10.546 | 0 |
| NT2RP7003688 | 4.926 | 0 | 0 | 0 | 0 | 4.963 | 0 |
| NT2RP7003960 | 0 | 0 | 0 | 0 | 0 | 1.856 | 0 |
| NT2RP7004114 | 4.650 | 0 | 0 | 0 | 0 | 6.246 | 0 |
| NT2RP7004123 | 1.600 | 0 | 0 | 0 | 0 | 2.149 | 0 |
| NT2RP7004173 | 0.637 | 0 | 0 | 0 | 0 | 2.566 | 0 |
| NT2RP7004196 | 1.093 | 0 | 0 | 0 | 0 | 0 | 0 |
| NT2RP7004204 | 1.422 | 0 | 0 | 0 | 0 | 0 | 0 |
| NT2RP7004260 | 21.394 | 0 | 0 | 0 | 0 | 0 | 0 |
| NT2RP7004348 | 5.653 | 0 | 0 | 0 | 0 | 2.531 | 0 |
| NT2RP7004352 | 5.665 | 0 | 0 | 0 | 0 | 3.805 | 0 |
| NT2RP7004373 | 5.888 | 0 | 8.092 | 0 | 0 | 7.910 | 0 |
| NT2RP7004428 | 5.624 | 0 | 0 | 0 | 0 | 3.778 | 0 |
| NT2RP7004641 | 21.394 | 0 | 0 | 0 | 0 | 0 | 0 |
| NT2RP7004656 | 0 | 0 | 0 | 0 | 0 | 48.174 | 0 |
| NT2RP7004687 | 0 | 0 | 0 | 0 | 0 | 42.237 | 0 |
| NT2RP7004728 | 2.621 | 0 | 0 | 0 | 0 | 3.521 | 0 |
| NT2RP7004751 | 0 | 1.733 | 0 | 0 | 0 | 0.524 | 0 |
| NT2RP7004884 | 0 | 10.162 | 0 | 0 | 0 | 3.075 | 0 |
| NT2RP7004911 | 2.939 | 6.524 | 0 | 0 | 0 | 0 | 0 |
| NT2RP7004925 | 4.211 | 0 | 0 | 0 | 0 | 5.657 | 0 |
| NT2RP7004946 | 2.871 | 3.187 | 0 | 0 | 0 | 0.964 | 0 |
| NT2RP7004961 | 0 | 0 | 0 | 0 | 0 | 18.856 | 0 |
| NT2RP7005493 | 0 | 0 | 0 | 0 | 0 | 27.110 | 0 |
| NT2RP7005529 | 0 | 0 | 0 | 0 | 0 | 8.270 | 0 |
| NT2RP7005675 | 0 | 0 | 0 | 0 | 0 | 22.803 | 0 |
| NT2RP7005750 | 5.967 | 0 | 0 | 0 | 0 | 0 | 0 |
| NT2RP7006141 | 3.079 | 0 | 15.231 | 15.282 | 0 | 0 | 0 |
| NT2RP7006188 | 4.342 | 0 | 0 | 0 | 0 | 2.916 | 0 |
| NT2RP7006223 | 0 | 0 | 0 | 0 | 0 | 9.466 | 0 |
| NT2RP7006490 | 0 | 0 | 0 | 0 | 0 | 2.404 | 0 |
| NT2RP7006539 | 0 | 0 | 0 | 0 | 0 | 6.518 | 0 |
| NT2RP7006601 | 0 | 0 | 0 | 0 | 0 | 31.730 | 0 |
| NT2RP7006619 | 0 | 8.170 | 0 | 0 | 0 | 0 | 0 |
| NT2RP7006701 | 4.192 | 0 | 0 | 0 | 0 | 0 | 0 |
| NT2RP7006717 | 2.194 | 0 | 0 | 0 | 0 | 3.685 | 0 |
| NT2RP7006886 | 0 | 0 | 0 | 0 | 0 | 10.654 | 0 |
| NT2RP7006986 | 0 | 27.811 | 0 | 0 | 0 | 0 | 0 |
| NT2RP7006995 | 0 | 0 | 0 | 0 | 0 | 48.174 | 0 |
| NT2RP7007154 | 0 | 2.111 | 0 | 0 | 0 | 1.277 | 0 |
| NT2RP7007177 | 5.678 | 0 | 0 | 0 | 0 | 0 | 0 |
| NT2RP7007252 | 5.726 | 0 | 0 | 0 | 0 | 0 | 0 |
| NT2RP7007381 | 0 | 0 | 0 | 0 | 0 | 17.566 | 0 |
| NT2RP7007387 | 1.712 | 0 | 0 | 0 | 0 | 4.598 | 0 |
| NT2RP7007406 | 25.705 | 0 | 0 | 0 | 0 | 0 | 0 |
| NT2RP7007530 | 3.656 | 0 | 0 | 0 | 0 | 4.911 | 0 |
| NT2RP7007537 | 2.051 | 0 | 0 | 0 | 0 | 5.509 | 0 |
| NT2RP7007580 | 0 | 0 | 0 | 0 | 0 | 26.772 | 0 |
| NT2RP7007610 | 2.413 | 21.426 | 0 | 0 | 0 | 3.242 | 0 |
| NT2RP7007766 | 25.705 | 0 | 0 | 0 | 0 | 0 | 0 |
| NT2RP7007975 | 0 | 0 | 0 | 0 | 0 | 1.529 | 29.307 |
| NT2RP7008015 | 1.683 | 0 | 0 | 0 | 0 | 1.130 | 0 |
| NT2RP7008161 | 5.235 | 0 | 0 | 0 | 0 | 0 | 0 |
| NT2RP7008167 | 1.514 | 0 | 0 | 0 | 0 | 6.100 | 0 |
| NT2RP7008315 | 12.515 | 0 | 0 | 0 | 0 | 0 | 0 |
| NT2RP7008543 | 2.294 | 0 | 0 | 0 | 0 | 6.163 | 0 |
| NT2RP7009087 | 6.077 | 0 | 0 | 0 | 0 | 5.442 | 0 |
| NT2RP7009097 | 0 | 13.310 | 0 | 0 | 0 | 0 | 0 |
| NT2RP7009108 | 0 | 3.290 | 0 | 0 | 0 | 0 | 0 |
| NT2RP7009147 | 1.328 | 0 | 0 | 0 | 0 | 7.137 | 0 |
| NT2RP7009149 | 0 | 0 | 0 | 0 | 0 | 1.340 | 0 |
| NT2RP7009259 | 0.468 | 0 | 0 | 0 | 0 | 2.517 | 0 |
| NT2RP7009394 | 0 | 0 | 0 | 0 | 0 | 2.709 | 0 |
| NT2RP7009466 | 25.705 | 0 | 0 | 0 | 0 | 0 | 0 |
| NT2RP7009481 | 0 | 0 | 0 | 0 | 0 | 9.175 | 0 |
| NT2RP7009482 | 1.546 | 0 | 0 | 0 | 0 | 1.557 | 0 |
| NT2RP7009498 | 0.840 | 0 | 0 | 0 | 0 | 0 | 0 |
| NT2RP7010109 | 13.103 | 0 | 0 | 0 | 0 | 0 | 0 |
| NT2RP7013573 | 6.009 | 0 | 0 | 0 | 0 | 0 | 0 |
| NT2RP7013764 | 0 | 0 | 0 | 0 | 0 | 12.717 | 0 |
| NT2RP7013795 | 0 | 0 | 0 | 89.568 | 0 | 0 | 0 |
| NT2RP7014005 | 4.851 | 0 | 0 | 0 | 0 | 6.517 | 0 |
| NT2RP7014583 | 0 | 60.566 | 0 | 0 | 0 | 0 | 0 |
| NT2RP7014910 | 1.994 | 0 | 0 | 0 | 0 | 1.339 | 0 |
| NT2RP8000435 | 11.126 | 0 | 0 | 0 | 0 | 0 | 0 |
| NT2RP8005546 | 40.897 | 0 | 0 | 0 | 0 | 0 | 0 |
| NT2RP8007920 | 1.649 | 0 | 0 | 0 | 0 | 2.216 | 0 |
| NT2RP8008057 | 0 | 0 | 0 | 0 | 0 | 31.730 | 0 |
| NTONG1000033 | 6.130 | 0 | 0 | 0 | 0 | 5.489 | 0 |
| NTONG1000075 | 5.556 | 0 | 0 | 0 | 0 | 0 | 0 |
| NTONG1000098 | 3.188 | 0 | 0 | 0 | 0 | 4.282 | 0 |
| NTONG1000130 | 0 | 0 | 0 | 0 | 0 | 13.193 | 0 |
| NTONG1000182 | 0 | 0 | 0 | 0 | 0 | 1.387 | 0 |
| NTONG1000214 | 9.258 | 0 | 0 | 0 | 0 | 0 | 0 |
| NTONG1000246 | 2.608 | 5.788 | 0 | 0 | 0 | 1.751 | 0 |
| NTONG1000264 | 1.625 | 7.216 | 0 | 0 | 0 | 2.184 | 0 |
| NTONG2000265 | 2.133 | 0 | 0 | 0 | 0 | 1.910 | 0 |
| NTONG2000800 | 0 | 0 | 0 | 0 | 0 | 0.593 | 0 |
| NTONG2000876 | 0 | 5.154 | 0 | 0 | 0 | 0 | 0 |
| NTONG2000977 | 0 | 0 | 0 | 0 | 0 | 1.101 | 21.112 |
| NTONG2000985 | 0 | 0 | 0 | 0 | 0 | 2.088 | 0 |
| NTONG2001137 | 0.954 | 0 | 0 | 0 | 0 | 1.282 | 0 |
| NTONG2001550 | 2.902 | 0 | 0 | 0 | 0 | 3.899 | 0 |
| NTONG2001567 | 0 | 0 | 0 | 0 | 0 | 0.687 | 6.585 |
| NTONG2001612 | 0 | 4.155 | 0 | 0 | 0 | 0 | 0 |
| NTONG2001762 | 1.504 | 0 | 0 | 0 | 0 | 0 | 0 |
| NTONG2002582 | 0 | 0 | 0 | 0 | 0 | 16.852 | 0 |
| NTONG2003454 | 2.486 | 0 | 0 | 0 | 0 | 3.339 | 0 |
| NTONG2003928 | 0 | 43.126 | 0 | 0 | 0 | 0 | 0 |
| NTONG2004095 | 22.967 | 0 | 0 | 0 | 0 | 0 | 0 |
| NTONG2004308 | 0 | 0 | 0 | 0 | 0 | 13.193 | 0 |
| NTONG2004614 | 4.938 | 0 | 0 | 0 | 0 | 0 | 0 |
| NTONG2004918 | 5.400 | 0 | 0 | 0 | 0 | 0 | 0 |
| NTONG2005373 | 0 | 0 | 0 | 0 | 0 | 6.601 | 0 |
| NTONG2005391 | 0 | 0 | 0 | 0 | 0 | 2.611 | 0 |
| NTONG2005520 | 0 | 0 | 0 | 0 | 0 | 1.491 | 0 |
| NTONG2005801 | 1.486 | 0 | 0 | 0 | 0 | 1.996 | 0 |
| NTONG2005969 | 0 | 11.891 | 0 | 0 | 0 | 0 | 0 |
| NTONG2006484 | 0 | 0 | 0 | 0 | 0 | 4.842 | 0 |
| NTONG2008143 | 9.060 | 0 | 0 | 0 | 0 | 0 | 0 |
| NTONG2008483 | 0 | 0 | 0 | 0 | 0 | 1.790 | 0 |
| NTONG2008522 | 0 | 0 | 0 | 0 | 0 | 4.390 | 0 |
| NTONG2008944 | 4.869 | 0 | 0 | 0 | 0 | 3.271 | 0 |
| NTONG2009060 | 0 | 0 | 0 | 0 | 60.694 | 0 | 0 |
| NTONG2009576 | 0 | 0 | 0 | 0 | 0 | 7.959 | 0 |
| OCBBF1000080 | 0 | 0 | 0 | 0 | 0 | 21.417 | 0 |
| OCBBF1000086 | 0.638 | 0 | 0 | 0 | 0 | 0 | 0 |
| OCBBF1000104 | 0 | 0 | 0 | 0 | 0 | 11.536 | 0 |
| OCBBF1000146 | 0 | 6.386 | 0 | 0 | 0 | 0 | 0 |
| OCBBF1000315 | 14.591 | 0 | 0 | 0 | 0 | 0 | 0 |
| OCBBF2000013 | 3.245 | 0 | 0 | 0 | 0 | 0 | 0 |
| OCBBF2000015 | 1.979 | 0 | 0 | 0 | 0 | 4.431 | 0 |
| OCBBF2000126 | 0 | 14.387 | 0 | 0 | 0 | 0 | 0 |
| OCBBF2000178 | 0 | 4.036 | 0 | 0 | 0 | 0 | 0 |
| OCBBF2000231 | 0 | 14.500 | 0 | 0 | 0 | 0 | 0 |
| OCBBF2000522 | 0 | 0 | 0 | 0 | 0 | 2.832 | 0 |
| OCBBF2000677 | 13.583 | 0 | 0 | 0 | 0 | 0 | 0 |
| OCBBF2000831 | 0 | 0 | 0 | 0 | 0 | 5.393 | 0 |
| OCBBF2000846 | 0.610 | 0 | 0 | 0 | 0 | 2.459 | 0 |
| OCBBF2000982 | 0.727 | 0 | 0 | 0 | 0 | 0.977 | 0 |
| OCBBF2000986 | 1.607 | 0 | 0 | 0 | 0 | 0 | 0 |
| OCBBF2001166 | 0 | 0 | 0 | 0 | 0 | 18.418 | 0 |
| OCBBF2001196 | 13.205 | 0 | 0 | 0 | 0 | 0 | 0 |
| OCBBF2001307 | 0 | 6.157 | 0 | 0 | 0 | 0 | 0 |
| OCBBF2001492 | 1.716 | 2.540 | 0 | 0 | 0 | 1.537 | 0 |
| OCBBF2001528 | 0 | 0 | 0 | 0 | 0 | 37.138 | 0 |
| OCBBF2001639 | 3.921 | 17.407 | 0 | 0 | 0 | 0 | 0 |
| OCBBF2001687 | 0 | 0 | 0 | 0 | 0 | 4.309 | 0 |
| OCBBF2001706 | 40.164 | 0 | 0 | 0 | 0 | 0 | 0 |
| OCBBF2001983 | 0 | 26.741 | 0 | 0 | 0 | 0 | 0 |
| OCBBF2002015 | 57.664 | 0 | 0 | 0 | 0 | 0 | 0 |
| OCBBF2002086 | 2.686 | 0 | 0 | 0 | 0 | 0 | 0 |
| OCBBF2002290 | 0 | 37.332 | 0 | 0 | 0 | 0 | 0 |
| OCBBF2002656 | 1.379 | 0 | 11.372 | 0 | 0 | 1.853 | 35.524 |
| OCBBF2003052 | 0 | 14.060 | 0 | 0 | 0 | 0 | 0 |
| OCBBF2003518 | 0 | 0 | 0 | 0 | 0 | 1.155 | 0 |
| OCBBF2003543 | 40.164 | 0 | 0 | 0 | 0 | 0 | 0 |
| OCBBF2003744 | 0 | 0 | 0 | 0 | 0 | 47.415 | 0 |
| OCBBF2003819 | 0 | 0 | 0 | 0 | 0 | 23.601 | 0 |
| OCBBF2003925 | 0 | 3.084 | 0 | 0 | 0 | 0 | 0 |
| OCBBF2004104 | 0 | 10.140 | 0 | 0 | 0 | 0 | 0 |
| OCBBF2004273 | 0 | 3.318 | 0 | 0 | 0 | 1.004 | 0 |
| OCBBF2006660 | 12.586 | 0 | 0 | 0 | 0 | 0 | 0 |
| OCBBF2006849 | 6.741 | 0 | 0 | 0 | 0 | 4.528 | 0 |
| OCBBF2007028 | 1.151 | 0 | 0 | 0 | 0 | 0 | 0 |
| OCBBF2007121 | 0 | 0 | 0 | 0 | 0 | 47.415 | 0 |
| OCBBF2007224 | 0 | 0 | 0 | 0 | 0 | 10.576 | 0 |
| OCBBF2007354 | 0.838 | 0 | 6.907 | 0 | 0 | 3.376 | 0 |
| OCBBF2007414 | 40.164 | 0 | 0 | 0 | 0 | 0 | 0 |
| OCBBF2007415 | 0.668 | 11.856 | 0 | 0 | 0 | 0.897 | 0 |
| OCBBF2007829 | 0.458 | 0 | 0 | 0 | 0 | 0.615 | 0 |
| OCBBF2007892 | 10.657 | 0 | 0 | 0 | 0 | 0 | 0 |
| OCBBF2008005 | 0 | 11.755 | 0 | 0 | 0 | 0 | 0 |
| OCBBF2008041 | 1.743 | 0 | 0 | 0 | 0 | 0 | 0 |
| OCBBF2008822 | 0 | 0 | 16.388 | 0 | 0 | 0 | 0 |
| OCBBF2009242 | 11.805 | 0 | 0 | 0 | 0 | 3.172 | 0 |
| OCBBF2009301 | 0 | 0 | 0 | 0 | 0 | 4.644 | 0 |
| OCBBF2009772 | 0.982 | 8.718 | 0 | 0 | 0 | 0 | 0 |
| OCBBF2009836 | 0 | 15.168 | 0 | 0 | 0 | 0 | 0 |
| OCBBF2010140 | 27.107 | 0 | 0 | 0 | 0 | 0 | 0 |
| OCBBF2010281 | 0 | 0 | 0 | 0 | 0 | 47.415 | 0 |
| OCBBF2010557 | 0 | 0 | 0 | 0 | 0 | 20.524 | 0 |
| OCBBF2010830 | 0 | 0 | 6.049 | 0 | 0 | 0 | 0 |
| OCBBF2010841 | 0 | 0 | 0 | 0 | 0 | 13.925 | 0 |
| OCBBF2011021 | 0 | 0 | 0 | 0 | 0 | 4.857 | 0 |
| OCBBF2011759 | 0.779 | 0 | 0 | 0 | 0 | 5.234 | 0 |
| OCBBF2011767 | 0 | 0 | 0 | 0 | 0 | 33.313 | 0 |
| OCBBF2011887 | 0 | 17.408 | 0 | 0 | 0 | 5.268 | 0 |
| OCBBF2012001 | 0 | 0 | 0 | 0 | 0 | 27.891 | 0 |
| OCBBF2012436 | 40.164 | 0 | 0 | 0 | 0 | 0 | 0 |
| OCBBF2012553 | 0.978 | 4.341 | 0 | 0 | 0 | 0 | 0 |
| OCBBF2012714 | 0 | 0 | 0 | 0 | 0 | 6.502 | 0 |
| OCBBF2012821 | 0 | 0 | 0 | 0 | 0 | 2.803 | 0 |
| OCBBF2013011 | 0 | 27.949 | 0 | 0 | 0 | 0 | 0 |
| OCBBF2013123 | 0 | 0 | 0 | 0 | 0 | 25.558 | 0 |
| OCBBF2013149 | 0 | 34.448 | 0 | 0 | 0 | 0 | 0 |
| OCBBF2013366 | 2.251 | 0 | 0 | 0 | 0 | 0 | 0 |
| OCBBF2013843 | 0.446 | 1.978 | 0 | 0 | 0 | 0.599 | 0 |
| OCBBF2014052 | 0 | 0 | 0 | 0 | 0 | 47.415 | 0 |
| OCBBF2014064 | 0 | 5.056 | 0 | 0 | 0 | 1.530 | 0 |
| OCBBF2016612 | 0 | 0 | 0 | 0 | 0 | 47.415 | 0 |
| OCBBF2016729 | 0 | 0 | 0 | 0 | 0 | 20.422 | 0 |
| OCBBF2017035 | 0 | 4.488 | 0 | 0 | 0 | 0 | 0 |
| OCBBF2017055 | 14.962 | 0 | 0 | 0 | 0 | 0 | 0 |
| OCBBF2017398 | 1.073 | 9.523 | 0 | 0 | 0 | 2.882 | 0 |
| OCBBF2017754 | 6.261 | 0 | 0 | 0 | 0 | 4.206 | 0 |
| OCBBF2017791 | 0 | 0 | 0 | 0 | 0 | 2.869 | 0 |
| OCBBF2017893 | 4.339 | 0 | 0 | 35.895 | 0 | 0 | 0 |
| OCBBF2018012 | 0 | 0 | 0 | 0 | 0 | 6.288 | 0 |
| OCBBF2018563 | 0 | 0 | 0 | 0 | 0 | 23.036 | 0 |
| OCBBF2018581 | 0 | 15.925 | 0 | 0 | 0 | 0 | 0 |
| OCBBF2018827 | 0 | 18.163 | 0 | 0 | 0 | 5.496 | 0 |
| OCBBF2018956 | 1.411 | 0 | 0 | 0 | 0 | 0 | 0 |
| OCBBF2019108 | 57.310 | 0 | 0 | 0 | 0 | 0 | 0 |
| OCBBF2020318 | 40.164 | 0 | 0 | 0 | 0 | 0 | 0 |
| OCBBF2020801 | 40.164 | 0 | 0 | 0 | 0 | 0 | 0 |
| OCBBF2024850 | 0 | 0 | 0 | 0 | 0 | 4.979 | 0 |
| OCBBF2028421 | 0 | 0 | 0 | 0 | 0 | 47.415 | 0 |
| OCBBF2031561 | 26.180 | 0 | 0 | 0 | 0 | 0 | 0 |
| OCBBF2035823 | 57.310 | 0 | 0 | 0 | 0 | 0 | 0 |
| OCBBF2036743 | 9.217 | 0 | 0 | 0 | 0 | 0 | 0 |
| OCBBF3000296 | 0 | 0 | 0 | 0 | 0 | 21.220 | 0 |
| OCBBF3000323 | 16.639 | 0 | 0 | 0 | 0 | 0 | 0 |
| OCBBF3001333 | 16.074 | 0 | 0 | 0 | 0 | 0 | 0 |
| OCBBF3004487 | 3.778 | 16.771 | 0 | 0 | 0 | 10.150 | 0 |
| PANCR1000091 | 0 | 1.114 | 0 | 0 | 0 | 0 | 0 |
| PEBLM1000066 | 3.952 | 0 | 0 | 0 | 0 | 5.308 | 0 |
| PEBLM1000144 | 5.001 | 0 | 0 | 0 | 0 | 0 | 0 |
| PEBLM2000030 | 6.138 | 0 | 0 | 0 | 0 | 28.858 | 0 |
| PEBLM2000147 | 5.319 | 4.722 | 0 | 0 | 0 | 2.858 | 0 |
| PEBLM2000222 | 0.484 | 2.150 | 0 | 0 | 0 | 0 | 12.475 |
| PEBLM2000308 | 6.612 | 7.338 | 0 | 0 | 0 | 0 | 0 |
| PEBLM2000326 | 13.579 | 0 | 0 | 0 | 0 | 0 | 0 |
| PEBLM2000338 | 7.936 | 0 | 0 | 0 | 0 | 0 | 0 |
| PEBLM2000395 | 0 | 6.738 | 0 | 0 | 0 | 1.020 | 0 |
| PEBLM2001072 | 1.512 | 20.138 | 0 | 0 | 0 | 2.031 | 0 |
| PEBLM2003914 | 7.087 | 0 | 0 | 0 | 0 | 7.140 | 0 |
| PEBLM2004452 | 1.125 | 0 | 0 | 0 | 0 | 7.559 | 0 |
| PEBLM2004666 | 3.098 | 0 | 0 | 0 | 0 | 0 | 0 |
| PEBLM2006036 | 9.986 | 0 | 0 | 0 | 0 | 0 | 0 |
| PEBLM2006709 | 0 | 0 | 0 | 0 | 0 | 6.232 | 0 |
| PEBLM2007188 | 7.279 | 0 | 0 | 0 | 0 | 0 | 0 |
| PEBLM2007296 | 4.326 | 0 | 0 | 0 | 0 | 0 | 0 |
| PEBLM2007447 | 9.986 | 0 | 0 | 0 | 0 | 0 | 0 |
| PEBLM2007774 | 0.502 | 0 | 0 | 0 | 6.560 | 0.337 | 0 |
| PERIC2000889 | 14.835 | 0 | 0 | 0 | 0 | 9.964 | 0 |
| PERIC2007068 | 1.287 | 0 | 0 | 0 | 0 | 8.642 | 0 |
| PLACE5000013 | 6.618 | 0 | 0 | 0 | 0 | 1.778 | 0 |
| PLACE5000068 | 0 | 23.246 | 0 | 0 | 0 | 7.034 | 0 |
| PLACE5000113 | 0 | 0 | 0 | 0 | 0 | 1.927 | 0 |
| PLACE5000159 | 0 | 0 | 0 | 0 | 0 | 5.091 | 0 |
| PLACE5000170 | 0 | 0 | 0 | 0 | 0 | 3.894 | 0 |
| PLACE6000145 | 0 | 0 | 0 | 0 | 0 | 1.161 | 0 |
| PLACE6000325 | 6.755 | 0 | 0 | 0 | 0 | 0 | 0 |
| PLACE6000379 | 4.566 | 1.961 | 0 | 0 | 3.847 | 0.791 | 0 |
| PLACE6000414 | 7.479 | 0 | 0 | 0 | 0 | 1.435 | 0 |
| PLACE6000463 | 6.506 | 0 | 0 | 0 | 0 | 0 | 0 |
| PLACE6000630 | 0 | 0 | 0 | 0 | 0 | 4.322 | 0 |
| PLACE6001064 | 0.957 | 0 | 0 | 0 | 0 | 5.784 | 0 |
| PLACE6001281 | 2.871 | 0 | 0 | 0 | 0 | 0 | 0 |
| PLACE6001443 | 1.638 | 14.542 | 0 | 0 | 0 | 0 | 0 |
| PLACE6002084 | 0.924 | 0 | 0 | 7.643 | 0 | 0.414 | 0 |
| PLACE6002102 | 1.178 | 0 | 0 | 0 | 0 | 0 | 0 |
| PLACE6002668 | 0 | 0 | 0 | 0 | 0 | 6.045 | 0 |
| PLACE6002960 | 1.851 | 0 | 0 | 0 | 0 | 6.216 | 0 |
| PLACE6003218 | 0 | 0 | 0 | 0 | 0 | 16.300 | 0 |
| PLACE6003383 | 0.995 | 0 | 0 | 0 | 0 | 5.348 | 0 |
| PLACE6003745 | 0 | 0 | 0 | 0 | 0 | 11.772 | 0 |
| PLACE6004005 | 0 | 7.309 | 0 | 0 | 0 | 0 | 0 |
| PLACE6004312 | 2.012 | 4.465 | 0 | 0 | 0 | 1.351 | 0 |
| PLACE6004397 | 1.533 | 6.804 | 0 | 0 | 0 | 0 | 0 |
| PLACE6005231 | 9.210 | 0 | 0 | 0 | 0 | 0 | 0 |
| PLACE6005294 | 0 | 0 | 0 | 0 | 0 | 13.488 | 0 |
| PLACE6005482 | 2.205 | 0 | 0 | 0 | 0 | 23.695 | 0 |
| PLACE6006042 | 4.539 | 0 | 0 | 0 | 0 | 0 | 0 |
| PLACE6006137 | 0 | 12.643 | 0 | 0 | 0 | 0 | 0 |
| PLACE6006186 | 0 | 0 | 0 | 0 | 0 | 8.102 | 0 |
| PLACE6006549 | 0 | 0 | 5.490 | 0 | 0 | 0.894 | 0 |
| PLACE6007239 | 0 | 0 | 0 | 0 | 0 | 4.618 | 0 |
| PLACE6008775 | 1.537 | 0 | 0 | 0 | 0 | 6.194 | 0 |
| PLACE6008793 | 0 | 5.869 | 0 | 0 | 0 | 0 | 0 |
| PLACE6009237 | 0 | 0 | 0 | 0 | 0 | 0 | 92.347 |
| PLACE6010077 | 0 | 0 | 5.986 | 0 | 0 | 1.951 | 0 |
| PLACE6010484 | 5.155 | 0 | 0 | 0 | 0 | 0 | 0 |
| PLACE6010848 | 6.823 | 0 | 0 | 0 | 0 | 9.166 | 0 |
| PLACE6011057 | 1.879 | 0 | 0 | 0 | 0 | 10.098 | 0 |
| PLACE6011970 | 21.626 | 0 | 0 | 0 | 0 | 0 | 0 |
| PLACE6012028 | 0 | 23.236 | 0 | 0 | 0 | 0 | 0 |
| PLACE6012936 | 31.905 | 0 | 0 | 0 | 0 | 0 | 0 |
| PLACE6013222 | 0 | 18.239 | 0 | 0 | 0 | 0 | 0 |
| PLACE6013232 | 0 | 0 | 79.437 | 0 | 0 | 0 | 0 |
| PLACE6013672 | 23.027 | 0 | 0 | 0 | 0 | 0 | 0 |
| PLACE6016254 | 15.235 | 0 | 0 | 0 | 0 | 20.465 | 0 |
| PLACE6016942 | 0 | 0 | 26.895 | 0 | 0 | 0 | 0 |
| PLACE6016984 | 15.403 | 0 | 0 | 0 | 0 | 0 | 0 |
| PLACE6018031 | 5.606 | 0 | 0 | 0 | 0 | 0 | 0 |
| PLACE6018487 | 0.556 | 0 | 0 | 0 | 0 | 0 | 0 |
| PLACE6018938 | 0 | 0 | 0 | 0 | 0 | 8.594 | 0 |
| PLACE6019195 | 0 | 0 | 0 | 0 | 0 | 9.505 | 0 |
| PLACE7001022 | 0 | 0 | 0 | 0 | 0 | 31.522 | 0 |
| PLACE7004103 | 1.078 | 0 | 0 | 0 | 0 | 7.243 | 0 |
| PLACE7005840 | 31.905 | 0 | 0 | 0 | 0 | 0 | 0 |
| PROST1000097 | 3.432 | 0 | 0 | 0 | 0 | 0.659 | 0 |
| PROST1000120 | 0 | 0 | 0 | 0 | 0 | 3.694 | 0 |
| PROST1000199 | 2.437 | 2.705 | 0 | 0 | 0 | 1.637 | 0 |
| PROST1000215 | 4.265 | 0 | 0 | 0 | 0 | 0 | 0 |
| PROST1000220 | 0 | 0 | 0 | 0 | 0 | 0.761 | 0 |
| PROST1000226 | 5.968 | 0 | 0 | 0 | 0 | 0 | 0 |
| PROST1000246 | 9.161 | 0 | 0 | 0 | 0 | 0 | 0 |
| PROST1000343 | 7.106 | 0 | 0 | 0 | 0 | 3.182 | 0 |
| PROST1000526 | 2.107 | 0 | 0 | 0 | 0 | 2.830 | 0 |
| PROST1000536 | 0 | 0 | 0 | 0 | 0 | 6.735 | 0 |
| PROST1000564 | 5.604 | 0 | 0 | 0 | 0 | 1.506 | 0 |
| PROST2000036 | 2.344 | 10.406 | 0 | 0 | 0 | 0 | 0 |
| PROST2000138 | 0.145 | 0.321 | 2.383 | 0 | 0 | 1.650 | 0 |
| PROST2000241 | 0 | 0 | 0 | 0 | 0 | 6.855 | 0 |
| PROST2000274 | 8.605 | 0 | 0 | 0 | 0 | 11.559 | 0 |
| PROST2000277 | 0 | 0 | 0 | 0 | 0 | 24.004 | 0 |
| PROST2000284 | 8.760 | 0 | 0 | 0 | 0 | 0 | 0 |
| PROST2000567 | 0 | 0 | 0 | 0 | 0 | 16.044 | 0 |
| PROST2000760 | 0 | 10.384 | 0 | 0 | 0 | 0 | 60.243 |
| PROST2000835 | 0 | 0 | 0 | 0 | 0 | 24.004 | 0 |
| PROST2001002 | 16.382 | 0 | 0 | 0 | 0 | 0 | 0 |
| PROST2001116 | 0 | 0 | 0 | 0 | 0 | 24.004 | 0 |
| PROST2001180 | 2.070 | 9.191 | 0 | 0 | 0 | 0 | 0 |
| PROST2001883 | 0 | 3.306 | 0 | 0 | 0 | 0 | 0 |
| PROST2001997 | 0 | 0 | 40.082 | 0 | 0 | 0 | 0 |
| PROST2002651 | 0 | 0 | 0 | 0 | 0 | 3.350 | 0 |
| PROST2002897 | 0 | 0 | 0 | 0 | 0 | 24.004 | 0 |
| PROST2002960 | 11.208 | 0 | 0 | 0 | 0 | 0 | 0 |
| PROST2003232 | 1.707 | 0 | 0 | 0 | 0 | 0 | 0 |
| PROST2003338 | 0.933 | 0 | 0 | 0 | 0 | 1.254 | 0 |
| PROST2003396 | 0 | 0 | 0 | 0 | 0 | 26.768 | 0 |
| PROST2003517 | 2.195 | 0 | 0 | 0 | 0 | 2.949 | 0 |
| PROST2003537 | 0 | 0 | 0 | 0 | 0 | 24.004 | 0 |
| PROST2003725 | 19.037 | 0 | 0 | 0 | 0 | 0 | 0 |
| PROST2004095 | 0.390 | 1.733 | 0 | 0 | 0 | 0.524 | 0 |
| PROST2004270 | 0.981 | 2.177 | 4.043 | 0 | 0 | 0.659 | 0 |
| PROST2004416 | 0.567 | 0 | 0 | 0 | 0 | 1.523 | 0 |
| PROST2004739 | 0 | 0 | 0 | 0 | 0 | 8.329 | 0 |
| PROST2004744 | 4.408 | 0 | 0 | 0 | 0 | 0 | 0 |
| PROST2005067 | 13.451 | 0 | 0 | 0 | 0 | 0 | 0 |
| PROST2005143 | 5.657 | 25.111 | 0 | 0 | 0 | 7.599 | 0 |
| PROST2005272 | 0 | 0 | 0 | 0 | 0 | 9.199 | 0 |
| PROST2005285 | 18.671 | 0 | 0 | 0 | 0 | 0 | 0 |
| PROST2005604 | 5.187 | 0 | 0 | 0 | 0 | 17.421 | 0 |
| PROST2005793 | 0 | 0 | 0 | 0 | 0 | 13.178 | 0 |
| PROST2006030 | 0 | 0 | 0 | 0 | 0 | 12.715 | 0 |
| PROST2006060 | 5.567 | 0 | 0 | 0 | 0 | 0 | 0 |
| PROST2006260 | 0 | 0 | 0 | 0 | 0 | 9.122 | 0 |
| PROST2006343 | 0 | 0 | 0 | 0 | 0 | 4.953 | 0 |
| PROST2006536 | 0 | 0 | 0 | 0 | 0 | 4.971 | 0 |
| PROST2006737 | 2.021 | 0 | 16.663 | 0 | 0 | 2.715 | 0 |
| PROST2007612 | 7.988 | 0 | 0 | 0 | 0 | 0 | 0 |
| PROST2008271 | 6.536 | 0 | 0 | 0 | 0 | 13.169 | 0 |
| PROST2008360 | 1.501 | 0 | 0 | 0 | 0 | 2.016 | 38.653 |
| PROST2008489 | 0.540 | 0 | 0 | 13.402 | 0 | 0 | 0 |
| PROST2008770 | 5.203 | 2.887 | 0 | 0 | 16.991 | 0.874 | 0 |
| PROST2010219 | 0 | 0 | 0 | 0 | 0 | 24.004 | 0 |
| PROST2010545 | 0 | 0 | 0 | 0 | 0 | 14.741 | 0 |
| PROST2010579 | 0 | 0 | 0 | 0 | 0 | 21.054 | 0 |
| PROST2010782 | 0.203 | 0 | 0 | 0 | 0 | 0 | 5.223 |
| PROST2011577 | 0 | 0 | 0 | 0 | 0 | 2.305 | 0 |
| PROST2012007 | 0.946 | 0 | 0 | 0 | 0 | 0 | 0 |
| PROST2012448 | 0 | 0 | 0 | 0 | 0 | 9.139 | 0 |
| PROST2012504 | 19.037 | 0 | 0 | 0 | 0 | 0 | 0 |
| PROST2012745 | 0 | 0 | 0 | 0 | 0 | 4.332 | 0 |
| PROST2013121 | 8.969 | 0 | 0 | 0 | 0 | 12.048 | 0 |
| PROST2015287 | 0 | 0 | 0 | 0 | 0 | 24.050 | 0 |
| PROST2015924 | 16.951 | 0 | 0 | 0 | 0 | 0 | 0 |
| PROST2017128 | 0 | 0 | 0 | 0 | 0 | 9.026 | 0 |
| PROST2017203 | 1.083 | 0 | 0 | 0 | 0 | 1.455 | 0 |
| PROST2017612 | 0 | 0 | 0 | 0 | 0 | 24.004 | 0 |
| PROST2019164 | 3.075 | 0 | 0 | 0 | 0 | 12.391 | 0 |
| PROST2019253 | 0 | 0 | 0 | 0 | 0 | 1.882 | 0 |
| PUAEN1000057 | 0 | 0 | 0 | 0 | 0 | 2.300 | 0 |
| PUAEN1000065 | 0 | 0 | 0 | 0 | 0 | 0.750 | 0 |
| PUAEN1000147 | 7.775 | 0 | 0 | 0 | 0 | 20.890 | 0 |
| PUAEN1000161 | 0 | 0 | 0 | 0 | 0 | 6.461 | 0 |
| PUAEN1000164 | 3.319 | 0 | 0 | 0 | 0 | 1.338 | 0 |
| PUAEN2000152 | 0 | 0 | 0 | 0 | 0 | 6.648 | 0 |
| PUAEN2000312 | 7.382 | 0 | 0 | 0 | 0 | 0 | 0 |
| PUAEN2000374 | 1.334 | 0 | 0 | 0 | 0 | 1.076 | 0 |
| PUAEN2000535 | 2.012 | 0 | 0 | 0 | 0 | 0.901 | 0 |
| PUAEN2001586 | 0 | 0 | 0 | 0 | 62.197 | 6.397 | 0 |
| PUAEN2004400 | 0 | 26.668 | 0 | 0 | 0 | 0 | 0 |
| PUAEN2005930 | 0 | 0 | 0 | 0 | 0 | 10.284 | 0 |
| PUAEN2006328 | 0 | 0 | 0 | 0 | 0 | 0 | 79.193 |
| PUAEN2007044 | 1.195 | 0 | 0 | 0 | 0 | 14.450 | 0 |
| PUAEN2008939 | 0 | 0 | 0 | 0 | 0 | 3.844 | 0 |
| PUAEN2008985 | 3.700 | 0 | 0 | 0 | 0 | 4.970 | 0 |
| PUAEN2009174 | 2.363 | 0 | 0 | 0 | 0 | 0 | 0 |
| PUAEN2010346 | 8.323 | 0 | 0 | 0 | 0 | 0 | 0 |
| RECTM2002172 | 0 | 14.539 | 0 | 0 | 0 | 0 | 0 |
| SALGL1000047 | 0.247 | 0 | 0 | 0 | 0 | 0 | 0 |
| SALGL1000157 | 0.759 | 0 | 5.364 | 0 | 0 | 0.146 | 0 |
| SALGL1000171 | 0.514 | 0 | 0 | 0 | 0 | 0 | 0 |
| SKMUS1000014 | 0 | 27.230 | 0 | 0 | 0 | 0 | 0 |
| SKMUS1000022 | 0 | 0 | 0 | 0 | 0 | 3.730 | 0 |
| SKMUS1000084 | 5.137 | 0 | 0 | 0 | 0 | 1.725 | 0 |
| SKMUS1000110 | 0 | 27.270 | 0 | 0 | 0 | 0 | 0 |
| SKMUS1000177 | 1.969 | 0 | 0 | 0 | 0 | 26.451 | 0 |
| SKMUS1000186 | 1.339 | 4.457 | 0 | 0 | 0 | 0.450 | 0 |
| SKMUS2000343 | 0 | 0 | 0 | 0 | 0 | 8.630 | 0 |
| SKMUS2000484 | 1.464 | 0 | 0 | 0 | 0 | 0 | 0 |
| SKMUS2000679 | 0 | 0 | 18.423 | 0 | 0 | 0 | 0 |
| SKMUS2000757 | 0 | 18.292 | 0 | 0 | 0 | 0 | 0 |
| SKMUS2000931 | 1.361 | 6.043 | 0 | 0 | 0 | 1.829 | 0 |
| SKMUS2000933 | 0 | 0 | 0 | 0 | 0 | 6.950 | 0 |
| SKMUS2000954 | 0 | 0 | 0 | 0 | 37.020 | 0 | 0 |
| SKMUS2001454 | 0.281 | 1.249 | 0 | 0 | 0 | 0.378 | 0 |
| SKMUS2001528 | 0 | 0 | 0 | 0 | 0 | 0 | 26.957 |
| SKMUS2001634 | 0 | 0 | 0 | 0 | 0 | 1.466 | 0 |
| SKMUS2004908 | 0 | 0 | 0 | 0 | 0 | 3.679 | 0 |
| SKNMC1000137 | 0.884 | 0 | 0 | 0 | 0 | 0 | 0 |
| SKNMC1000168 | 0.698 | 0 | 0 | 0 | 0 | 0.938 | 0 |
| SKNMC1000229 | 4.384 | 0 | 0 | 0 | 0 | 0 | 0 |
| SKNMC1000251 | 5.849 | 0 | 0 | 0 | 0 | 0 | 0 |
| SKNMC1000264 | 4.374 | 0 | 0 | 0 | 0 | 0 | 0 |
| SKNMC2000065 | 1.800 | 0 | 0 | 0 | 0 | 0 | 0 |
| SKNMC2000097 | 1.115 | 0 | 0 | 0 | 0 | 0 | 0 |
| SKNMC2000224 | 5.223 | 0 | 0 | 0 | 0 | 0 | 0 |
| SKNMC2000356 | 14.745 | 0 | 0 | 0 | 0 | 0 | 0 |
| SKNMC2000649 | 0 | 0 | 0 | 0 | 0 | 4.088 | 19.593 |
| SKNMC2000698 | 5.167 | 0 | 0 | 0 | 0 | 0 | 0 |
| SKNMC2000877 | 1.976 | 4.386 | 0 | 0 | 0 | 1.327 | 0 |
| SKNMC2006173 | 0 | 0 | 0 | 0 | 0 | 8.620 | 0 |
| SKNSH1000002 | 0 | 0 | 0 | 0 | 31.308 | 0 | 0 |
| SKNSH1000101 | 0.536 | 0 | 0 | 0 | 0 | 0 | 0 |
| SKNSH2000101 | 0 | 0 | 0 | 0 | 0 | 14.763 | 0 |
| SKNSH2000250 | 0 | 5.215 | 0 | 0 | 0 | 0 | 0 |
| SKNSH2000347 | 0 | 0 | 0 | 0 | 0 | 2.513 | 0 |
| SKNSH2000819 | 2.075 | 0 | 0 | 0 | 0 | 2.788 | 0 |
| SKNSH2001222 | 0 | 0 | 0 | 0 | 0 | 7.314 | 0 |
| SKNSH2002325 | 0 | 0 | 0 | 0 | 0 | 4.276 | 0 |
| SKNSH2002768 | 5.923 | 0 | 0 | 0 | 0 | 0 | 0 |
| SKNSH2003528 | 0 | 0 | 0 | 0 | 0 | 3.400 | 0 |
| SKNSH2006234 | 0 | 0 | 0 | 0 | 0 | 3.921 | 0 |
| SMINT1000016 | 0 | 9.081 | 33.733 | 0 | 0 | 0 | 0 |
| SMINT1000042 | 0 | 0 | 0 | 0 | 0 | 6.002 | 0 |
| SMINT1000117 | 1.097 | 0 | 0 | 0 | 0 | 2.947 | 0 |
| SMINT1000192 | 2.483 | 0 | 0 | 0 | 0 | 0 | 0 |
| SMINT2000007 | 10.031 | 0 | 0 | 0 | 0 | 0 | 0 |
| SMINT2000159 | 0 | 20.230 | 0 | 0 | 0 | 6.122 | 0 |
| SMINT2000232 | 11.871 | 0 | 0 | 0 | 0 | 0 | 0 |
| SMINT2000239 | 0 | 0 | 0 | 0 | 0 | 9.395 | 0 |
| SMINT2000277 | 1.512 | 0 | 0 | 0 | 0 | 2.031 | 0 |
| SMINT2000396 | 2.041 | 4.531 | 0 | 0 | 0 | 8.227 | 0 |
| SMINT2000441 | 0.753 | 3.342 | 0 | 0 | 0 | 1.011 | 0 |
| SMINT2000454 | 0 | 0 | 0 | 0 | 0 | 20.021 | 0 |
| SMINT2000468 | 0 | 0 | 0 | 0 | 0 | 2.563 | 0 |
| SMINT2000545 | 21.744 | 0 | 16.298 | 0 | 0 | 7.966 | 0 |
| SMINT2000602 | 0.458 | 0 | 0 | 0 | 0 | 0 | 0 |
| SMINT2000629 | 4.479 | 0 | 0 | 0 | 0 | 3.008 | 0 |
| SMINT2000659 | 0 | 0 | 0 | 0 | 0 | 0.311 | 0 |
| SMINT2000694 | 0.991 | 0 | 0 | 0 | 0 | 0 | 0 |
| SMINT2000747 | 13.665 | 0 | 0 | 0 | 0 | 0 | 0 |
| SMINT2000933 | 0 | 0 | 7.007 | 0 | 0 | 0 | 21.887 |
| SMINT2001818 | 5.472 | 0 | 0 | 0 | 0 | 1.050 | 0 |
| SMINT2002159 | 0 | 0 | 0 | 0 | 0 | 15.360 | 0 |
| SMINT2002224 | 10.556 | 0 | 0 | 0 | 0 | 0 | 0 |
| SMINT2002620 | 1.889 | 0 | 0 | 0 | 0 | 2.538 | 48.656 |
| SMINT2002689 | 5.881 | 0 | 0 | 0 | 0 | 2.633 | 0 |
| SMINT2002882 | 0 | 0 | 0 | 60.089 | 0 | 0 | 0 |
| SMINT2002976 | 4.349 | 0 | 0 | 0 | 0 | 0 | 0 |
| SMINT2003003 | 16.439 | 0 | 0 | 0 | 0 | 0 | 0 |
| SMINT2003074 | 2.286 | 0 | 0 | 0 | 0 | 1.535 | 0 |
| SMINT2003169 | 0 | 1.741 | 0 | 0 | 0 | 0 | 0 |
| SMINT2003340 | 7.350 | 0 | 0 | 0 | 0 | 0 | 0 |
| SMINT2003423 | 9.059 | 0 | 0 | 0 | 0 | 12.169 | 0 |
| SMINT2003505 | 2.626 | 0 | 0 | 0 | 0 | 0 | 0 |
| SMINT2003905 | 0 | 2.866 | 0 | 0 | 0 | 0 | 0 |
| SMINT2004023 | 1.272 | 0 | 0 | 0 | 0 | 0 | 0 |
| SMINT2004037 | 32.093 | 0 | 0 | 0 | 0 | 0 | 0 |
| SMINT2004144 | 0 | 0 | 12.482 | 0 | 0 | 0 | 0 |
| SMINT2004280 | 10.624 | 0 | 0 | 0 | 0 | 0 | 0 |
| SMINT2004589 | 3.342 | 0 | 0 | 0 | 0 | 0 | 0 |
| SMINT2005387 | 19.114 | 0 | 0 | 0 | 0 | 0 | 0 |
| SMINT2005956 | 0 | 19.486 | 0 | 0 | 0 | 2.948 | 0 |
| SMINT2006801 | 13.430 | 0 | 0 | 0 | 0 | 0 | 0 |
| SMINT2007062 | 19.114 | 0 | 0 | 0 | 0 | 0 | 0 |
| SMINT2007187 | 16.793 | 0 | 0 | 0 | 0 | 0 | 0 |
| SMINT2007792 | 6.970 | 0 | 0 | 0 | 0 | 18.725 | 0 |
| SMINT2008921 | 11.102 | 4.107 | 0 | 0 | 0 | 0 | 0 |
| SMINT2008960 | 0.570 | 0 | 4.704 | 0 | 0 | 0 | 0 |
| SMINT2009292 | 5.915 | 0 | 0 | 0 | 0 | 3.973 | 0 |
| SMINT2010084 | 0 | 0 | 0 | 0 | 0 | 15.395 | 0 |
| SMINT2010369 | 19.114 | 0 | 0 | 0 | 0 | 0 | 0 |
| SMINT2010901 | 11.714 | 0 | 0 | 0 | 0 | 0 | 0 |
| SMINT2012179 | 15.491 | 0 | 0 | 0 | 0 | 0 | 0 |
| SMINT2012291 | 3.845 | 0 | 0 | 0 | 0 | 0 | 0 |
| SMINT2013031 | 7.764 | 0 | 0 | 0 | 0 | 0 | 0 |
| SMINT2013032 | 19.946 | 0 | 0 | 0 | 0 | 0 | 0 |
| SMINT2015294 | 0 | 0 | 54.735 | 0 | 0 | 0 | 0 |
| SMINT2017964 | 0 | 0 | 0 | 0 | 0 | 48.865 | 0 |
| SPLEN1000041 | 32.401 | 0 | 0 | 0 | 0 | 0 | 0 |
| SPLEN1000056 | 32.401 | 0 | 0 | 0 | 0 | 0 | 0 |
| SPLEN1000106 | 3.882 | 0 | 0 | 0 | 0 | 20.857 | 0 |
| SPLEN1000116 | 1.238 | 0 | 0 | 0 | 0 | 0.554 | 0 |
| SPLEN1000134 | 0 | 0 | 0 | 0 | 0 | 39.169 | 0 |
| SPLEN1000166 | 0.943 | 0 | 0 | 0 | 0 | 1.266 | 0 |
| SPLEN2000047 | 13.760 | 0 | 0 | 0 | 0 | 0 | 0 |
| SPLEN2000072 | 5.008 | 0 | 0 | 0 | 0 | 0 | 0 |
| SPLEN2000098 | 0 | 0 | 0 | 0 | 0 | 13.492 | 0 |
| SPLEN2000143 | 19.333 | 0 | 0 | 0 | 0 | 0 | 0 |
| SPLEN2000243 | 36.254 | 0 | 0 | 0 | 0 | 0 | 0 |
| SPLEN2000255 | 8.964 | 0 | 0 | 0 | 0 | 0 | 0 |
| SPLEN2000267 | 14.604 | 0 | 0 | 0 | 0 | 6.539 | 0 |
| SPLEN2000505 | 2.460 | 1.560 | 0 | 0 | 0 | 0 | 0 |
| SPLEN2000516 | 9.967 | 0 | 0 | 0 | 0 | 0 | 0 |
| SPLEN2000874 | 0 | 0 | 0 | 0 | 0 | 0.546 | 0 |
| SPLEN2000882 | 4.394 | 0 | 0 | 0 | 0 | 3.935 | 0 |
| SPLEN2001141 | 11.811 | 0 | 0 | 0 | 0 | 0 | 0 |
| SPLEN2001157 | 9.174 | 0 | 0 | 0 | 0 | 0 | 0 |
| SPLEN2001278 | 32.401 | 0 | 0 | 0 | 0 | 0 | 0 |
| SPLEN2001476 | 32.401 | 0 | 0 | 0 | 0 | 0 | 0 |
| SPLEN2001710 | 3.233 | 0 | 0 | 0 | 0 | 0 | 83.275 |
| SPLEN2002223 | 0 | 0 | 0 | 0 | 0 | 39.169 | 0 |
| SPLEN2002335 | 2.533 | 3.748 | 0 | 0 | 0 | 3.403 | 0 |
| SPLEN2002451 | 32.401 | 0 | 0 | 0 | 0 | 0 | 0 |
| SPLEN2002463 | 6.314 | 0 | 0 | 0 | 0 | 8.482 | 0 |
| SPLEN2002493 | 0 | 6.407 | 0 | 0 | 0 | 5.816 | 0 |
| SPLEN2002744 | 1.860 | 0 | 0 | 0 | 0 | 0 | 0 |
| SPLEN2002931 | 0 | 0 | 0 | 0 | 88.828 | 0 | 0 |
| SPLEN2003297 | 22.140 | 0 | 0 | 0 | 0 | 0 | 0 |
| SPLEN2004181 | 6.564 | 0 | 0 | 0 | 0 | 0 | 0 |
| SPLEN2004220 | 2.398 | 0 | 0 | 0 | 0 | 3.222 | 0 |
| SPLEN2004555 | 0.888 | 0 | 0 | 0 | 23.184 | 4.769 | 0 |
| SPLEN2004611 | 32.401 | 0 | 0 | 0 | 0 | 0 | 0 |
| SPLEN2004662 | 0 | 0 | 0 | 0 | 0 | 21.098 | 0 |
| SPLEN2004773 | 0.593 | 5.269 | 4.893 | 0 | 0 | 3.986 | 0 |
| SPLEN2004984 | 2.190 | 0 | 0 | 0 | 0 | 0 | 0 |
| SPLEN2005342 | 17.794 | 0 | 0 | 0 | 0 | 0 | 0 |
| SPLEN2005416 | 0 | 0 | 0 | 0 | 0 | 39.169 | 0 |
| SPLEN2005429 | 6.110 | 0 | 0 | 0 | 0 | 8.208 | 0 |
| SPLEN2005560 | 0.878 | 0 | 0 | 0 | 0 | 1.179 | 0 |
| SPLEN2005783 | 5.436 | 24.131 | 0 | 0 | 0 | 0 | 0 |
| SPLEN2005790 | 32.401 | 0 | 0 | 0 | 0 | 0 | 0 |
| SPLEN2005806 | 0.510 | 0 | 0 | 0 | 0 | 0 | 0 |
| SPLEN2005818 | 37.178 | 0 | 0 | 0 | 0 | 0 | 0 |
| SPLEN2006122 | 0 | 0 | 0 | 0 | 0 | 0.943 | 0 |
| SPLEN2006133 | 2.373 | 0 | 0 | 0 | 0 | 0 | 0 |
| SPLEN2006143 | 5.597 | 0 | 0 | 0 | 0 | 2.506 | 0 |
| SPLEN2006232 | 4.784 | 0 | 0 | 0 | 0 | 3.213 | 0 |
| SPLEN2006305 | 13.695 | 0 | 0 | 0 | 0 | 4.953 | 0 |
| SPLEN2006374 | 3.802 | 0 | 0 | 0 | 0 | 3.405 | 0 |
| SPLEN2007182 | 0 | 0 | 0 | 0 | 0 | 14.317 | 0 |
| SPLEN2007326 | 32.401 | 0 | 0 | 0 | 0 | 0 | 0 |
| SPLEN2007388 | 22.140 | 0 | 0 | 0 | 0 | 0 | 0 |
| SPLEN2007498 | 4.364 | 0 | 0 | 0 | 0 | 2.931 | 0 |
| SPLEN2007739 | 10.126 | 0 | 0 | 0 | 0 | 13.603 | 0 |
| SPLEN2007794 | 8.264 | 0 | 0 | 0 | 0 | 0 | 0 |
| SPLEN2007879 | 24.044 | 0 | 0 | 0 | 0 | 0 | 0 |
| SPLEN2008460 | 5.462 | 0 | 0 | 0 | 0 | 1.467 | 0 |
| SPLEN2009081 | 5.397 | 0 | 0 | 0 | 0 | 0 | 0 |
| SPLEN2009163 | 0 | 68.029 | 0 | 0 | 0 | 0 | 0 |
| SPLEN2009512 | 13.810 | 0 | 0 | 0 | 0 | 0 | 0 |
| SPLEN2009513 | 0 | 0 | 42.623 | 0 | 0 | 0 | 0 |
| SPLEN2009970 | 8.505 | 0 | 0 | 0 | 0 | 0 | 0 |
| SPLEN2010015 | 12.963 | 0 | 0 | 0 | 0 | 0 | 0 |
| SPLEN2010195 | 2.588 | 0 | 0 | 0 | 0 | 3.911 | 0 |
| SPLEN2010625 | 32.401 | 0 | 0 | 0 | 0 | 0 | 0 |
| SPLEN2010846 | 19.155 | 0 | 0 | 0 | 0 | 0 | 0 |
| SPLEN2010912 | 10.327 | 0 | 0 | 0 | 0 | 0 | 0 |
| SPLEN2011021 | 13.665 | 0 | 0 | 0 | 0 | 0 | 0 |
| SPLEN2011737 | 8.690 | 0 | 0 | 0 | 0 | 5.837 | 0 |
| SPLEN2011758 | 0 | 0 | 0 | 0 | 0 | 5.883 | 0 |
| SPLEN2011766 | 13.625 | 0 | 0 | 0 | 0 | 0 | 0 |
| SPLEN2012523 | 0 | 0 | 0 | 0 | 0 | 0 | 22.930 |
| SPLEN2012571 | 2.651 | 0 | 0 | 0 | 0 | 0 | 0 |
| SPLEN2012624 | 21.081 | 0 | 0 | 0 | 0 | 0 | 0 |
| SPLEN2012800 | 0.570 | 0 | 0 | 0 | 0 | 0 | 0 |
| SPLEN2012846 | 22.575 | 0 | 0 | 0 | 0 | 30.326 | 0 |
| SPLEN2012889 | 32.401 | 0 | 0 | 0 | 0 | 0 | 0 |
| SPLEN2013108 | 0 | 0 | 0 | 0 | 0 | 39.169 | 0 |
| SPLEN2013670 | 19.554 | 43.403 | 0 | 0 | 0 | 0 | 0 |
| SPLEN2013753 | 32.401 | 0 | 0 | 0 | 0 | 0 | 0 |
| SPLEN2013923 | 22.575 | 0 | 0 | 0 | 0 | 30.326 | 0 |
| SPLEN2014041 | 32.401 | 0 | 0 | 0 | 0 | 0 | 0 |
| SPLEN2014080 | 3.951 | 0 | 0 | 0 | 0 | 0 | 0 |
| SPLEN2014452 | 0 | 68.029 | 0 | 0 | 0 | 0 | 0 |
| SPLEN2014739 | 24.216 | 0 | 0 | 0 | 0 | 0 | 0 |
| SPLEN2014911 | 5.278 | 0 | 0 | 0 | 0 | 1.182 | 0 |
| SPLEN2015121 | 32.401 | 0 | 0 | 0 | 0 | 0 | 0 |
| SPLEN2015310 | 0.478 | 0 | 0 | 0 | 0 | 0 | 0 |
| SPLEN2015788 | 12.109 | 0 | 0 | 0 | 0 | 0 | 0 |
| SPLEN2016098 | 0 | 68.029 | 0 | 0 | 0 | 0 | 0 |
| SPLEN2016139 | 0 | 0 | 0 | 0 | 0 | 1.435 | 0 |
| SPLEN2016268 | 1.801 | 0 | 0 | 8.941 | 0 | 0 | 0 |
| SPLEN2016421 | 0 | 0 | 0 | 0 | 0 | 4.641 | 0 |
| SPLEN2016678 | 65.722 | 0 | 0 | 0 | 0 | 0 | 0 |
| SPLEN2016743 | 4.781 | 0 | 0 | 0 | 0 | 0 | 0 |
| SPLEN2016781 | 32.401 | 0 | 0 | 0 | 0 | 0 | 0 |
| SPLEN2017043 | 8.679 | 0 | 0 | 0 | 0 | 0 | 0 |
| SPLEN2017318 | 16.924 | 0 | 0 | 0 | 0 | 11.367 | 0 |
| SPLEN2017351 | 5.016 | 0 | 0 | 0 | 0 | 10.107 | 0 |
| SPLEN2018157 | 0 | 0 | 0 | 0 | 0 | 5.404 | 0 |
| SPLEN2018299 | 0 | 0 | 0 | 0 | 0 | 23.049 | 0 |
| SPLEN2018683 | 32.401 | 0 | 0 | 0 | 0 | 0 | 0 |
| SPLEN2019077 | 4.424 | 0 | 0 | 0 | 0 | 0 | 0 |
| SPLEN2019169 | 18.883 | 0 | 0 | 0 | 0 | 6.341 | 0 |
| SPLEN2019405 | 7.165 | 0 | 0 | 0 | 0 | 0 | 0 |
| SPLEN2019446 | 8.677 | 0 | 0 | 0 | 0 | 0 | 0 |
| SPLEN2019505 | 4.088 | 0 | 0 | 0 | 0 | 0 | 0 |
| SPLEN2019956 | 25.397 | 0 | 0 | 0 | 0 | 0 | 0 |
| SPLEN2021194 | 2.813 | 0 | 0 | 0 | 0 | 0 | 0 |
| SPLEN2022522 | 2.364 | 0 | 0 | 0 | 0 | 0 | 0 |
| SPLEN2023118 | 0 | 41.203 | 0 | 0 | 0 | 0 | 0 |
| SPLEN2023733 | 16.788 | 0 | 0 | 0 | 0 | 0 | 0 |
| SPLEN2024232 | 0 | 0 | 45.601 | 0 | 0 | 0 | 0 |
| SPLEN2024489 | 0 | 0 | 0 | 0 | 0 | 12.238 | 0 |
| SPLEN2024922 | 0 | 0 | 0 | 0 | 0 | 28.869 | 0 |
| SPLEN2024990 | 19.333 | 0 | 0 | 0 | 0 | 0 | 0 |
| SPLEN2027113 | 0 | 0 | 0 | 0 | 0 | 5.499 | 0 |
| SPLEN2028466 | 0.690 | 1.531 | 0 | 0 | 0 | 0.463 | 0 |
| SPLEN2028914 | 0 | 0 | 0 | 0 | 0 | 3.128 | 0 |
| SPLEN2029295 | 0 | 0 | 0 | 0 | 0 | 39.169 | 0 |
| SPLEN2029683 | 0 | 0 | 0 | 0 | 0 | 39.169 | 0 |
| SPLEN2029912 | 1.362 | 0 | 0 | 0 | 0 | 0 | 0 |
| SPLEN2031547 | 10.503 | 0 | 0 | 0 | 0 | 3.527 | 0 |
| SPLEN2031674 | 36.926 | 0 | 0 | 0 | 0 | 0 | 0 |
| SPLEN2032157 | 4.765 | 0 | 0 | 0 | 0 | 0 | 0 |
| SPLEN2033098 | 16.597 | 0 | 34.211 | 0 | 0 | 5.574 | 0 |
| SPLEN2034448 | 17.293 | 0 | 0 | 0 | 0 | 5.808 | 0 |
| SPLEN2034781 | 23.334 | 0 | 0 | 0 | 0 | 0 | 0 |
| SPLEN2036076 | 21.918 | 0 | 0 | 0 | 0 | 1.840 | 35.281 |
| SPLEN2036501 | 32.401 | 0 | 0 | 0 | 0 | 0 | 0 |
| SPLEN2037722 | 1.374 | 0 | 0 | 0 | 0 | 1.846 | 0 |
| SPLEN2038834 | 0 | 34.296 | 0 | 0 | 0 | 0 | 0 |
| SPLEN2039379 | 2.415 | 0 | 0 | 0 | 0 | 0 | 0 |
| SPLEN2039672 | 32.401 | 0 | 0 | 0 | 0 | 0 | 0 |
| SPLEN2041306 | 44.955 | 0 | 0 | 0 | 0 | 0 | 0 |
| SPLEN2042303 | 21.853 | 0 | 0 | 0 | 0 | 0 | 0 |
| SPLEN2042535 | 5.937 | 0 | 0 | 0 | 0 | 0 | 0 |
| STOMA1000047 | 13.211 | 0 | 0 | 0 | 0 | 0 | 0 |
| STOMA1000189 | 0 | 0 | 0 | 0 | 0 | 3.503 | 0 |
| STOMA2000121 | 0 | 4.511 | 0 | 0 | 0 | 0 | 0 |
| STOMA2000257 | 0 | 7.307 | 0 | 0 | 0 | 2.211 | 0 |
| STOMA2000395 | 8.900 | 0 | 0 | 0 | 0 | 0 | 0 |
| STOMA2002052 | 4.638 | 0 | 0 | 0 | 0 | 12.460 | 0 |
| STOMA2002166 | 0.488 | 0 | 0 | 12.107 | 0 | 0 | 0 |
| STOMA2002828 | 0 | 0 | 0 | 0 | 0 | 6.139 | 0 |
| STOMA2003158 | 5.104 | 0 | 0 | 0 | 0 | 0 | 0 |
| STOMA2003716 | 9.520 | 0 | 0 | 0 | 0 | 12.788 | 0 |
| STOMA2003781 | 0 | 0 | 0 | 0 | 0 | 14.134 | 0 |
| STOMA2009289 | 0 | 0 | 0 | 0 | 0 | 6.426 | 0 |
| SYNOV1000124 | 0.928 | 0 | 0 | 0 | 12.116 | 1.246 | 0 |
| SYNOV1000164 | 6.413 | 0 | 0 | 0 | 0 | 0 | 0 |
| SYNOV1000374 | 0 | 0 | 0 | 0 | 0 | 22.227 | 0 |
| SYNOV2001033 | 2.000 | 0 | 0 | 0 | 0 | 1.343 | 0 |
| SYNOV2001239 | 7.587 | 0 | 0 | 6.493 | 13.668 | 0 | 6.738 |
| SYNOV2001262 | 6.959 | 0 | 0 | 0 | 0 | 4.674 | 0 |
| SYNOV2001374 | 1.527 | 0 | 0 | 0 | 0 | 0 | 0 |
| SYNOV2001581 | 0 | 9.748 | 0 | 0 | 0 | 0 | 0 |
| SYNOV2001648 | 0 | 0 | 7.450 | 44.851 | 0 | 0 | 0 |
| SYNOV2005541 | 0 | 0 | 0 | 0 | 0 | 16.036 | 0 |
| SYNOV2007758 | 16.315 | 0 | 0 | 0 | 0 | 21.917 | 0 |
| SYNOV2009172 | 0.434 | 0 | 0 | 0 | 0 | 0 | 0 |
| SYNOV2017055 | 14.078 | 0 | 0 | 0 | 0 | 0 | 0 |
| SYNOV4001153 | 5.802 | 0 | 0 | 0 | 0 | 2.598 | 0 |
| SYNOV4001326 | 0 | 0 | 0 | 0 | 0 | 34.182 | 0 |
| SYNOV4004823 | 0 | 0 | 0 | 0 | 0 | 50.949 | 0 |
| SYNOV4005989 | 34.423 | 0 | 0 | 0 | 0 | 0 | 0 |
| SYNOV4006327 | 12.888 | 0 | 0 | 0 | 0 | 0 | 0 |
| SYNOV4006542 | 0 | 0 | 0 | 0 | 0 | 4.153 | 0 |
| SYNOV4007012 | 27.882 | 0 | 0 | 0 | 0 | 0 | 0 |
| SYNOV4007553 | 27.882 | 0 | 0 | 0 | 0 | 0 | 0 |
| SYNOV4007671 | 0 | 5.427 | 0 | 0 | 0 | 0 | 0 |
| SYNOV4008245 | 15.407 | 0 | 0 | 0 | 0 | 10.349 | 0 |
| T1ESE2000116 | 3.618 | 0 | 0 | 0 | 0 | 0 | 0 |
| T1ESE2000609 | 1.895 | 0 | 0 | 0 | 0 | 0 | 0 |
| T1ESE2000904 | 0 | 0 | 0 | 0 | 0 | 2.586 | 0 |
| TBAES2001296 | 9.394 | 0 | 0 | 0 | 0 | 0 | 0 |
| TBAES2001553 | 0 | 10.888 | 0 | 0 | 0 | 0 | 0 |
| TCOLN1000180 | 2.041 | 0 | 0 | 0 | 0 | 0 | 0 |
| TESOP2001953 | 10.863 | 0 | 0 | 0 | 0 | 0 | 0 |
| TESOP2002451 | 0 | 0 | 16.330 | 0 | 0 | 0 | 0 |
| TESOP2007384 | 0 | 0 | 0 | 0 | 0 | 4.497 | 0 |
| TESTI1000023 | 2.098 | 3.104 | 0 | 0 | 0 | 3.758 | 0 |
| TESTI1000051 | 0 | 0 | 0 | 0 | 0 | 17.501 | 0 |
| TESTI1000096 | 14.587 | 0 | 0 | 0 | 0 | 0 | 0 |
| TESTI1000138 | 24.890 | 0 | 0 | 0 | 0 | 0 | 0 |
| TESTI1000142 | 0 | 0 | 0 | 0 | 0 | 22.673 | 0 |
| TESTI1000168 | 0 | 0 | 0 | 0 | 0 | 14.041 | 0 |
| TESTI2000006 | 8.245 | 0 | 0 | 0 | 0 | 0 | 0 |
| TESTI2000177 | 0 | 0 | 0 | 0 | 0 | 27.311 | 0 |
| TESTI2000179 | 30.546 | 0 | 0 | 0 | 0 | 0 | 0 |
| TESTI2000184 | 3.770 | 0 | 0 | 0 | 0 | 11.396 | 0 |
| TESTI2000272 | 0 | 0 | 0 | 0 | 0 | 10.846 | 0 |
| TESTI2000431 | 0 | 0 | 0 | 0 | 0 | 36.354 | 0 |
| TESTI2000520 | 0 | 0 | 0 | 0 | 0 | 4.214 | 0 |
| TESTI2000598 | 4.189 | 0 | 0 | 0 | 0 | 0 | 0 |
| TESTI2000627 | 0 | 0 | 0 | 0 | 0 | 23.601 | 0 |
| TESTI2000784 | 7.580 | 0 | 0 | 0 | 0 | 5.091 | 0 |
| TESTI2000970 | 0 | 17.994 | 0 | 0 | 0 | 0 | 0 |
| TESTI2001099 | 4.495 | 1.814 | 0 | 0 | 0 | 4.391 | 0 |
| TESTI2001120 | 0.806 | 0 | 0 | 0 | 0 | 0 | 0 |
| TESTI2001153 | 0 | 0 | 0 | 0 | 0 | 0.446 | 0 |
| TESTI2001269 | 0.455 | 0 | 0 | 0 | 0 | 2.446 | 0 |
| TESTI2001511 | 0 | 0 | 0 | 0 | 0 | 1.960 | 0 |
| TESTI2001661 | 45.958 | 0 | 0 | 0 | 0 | 0 | 0 |
| TESTI2001862 | 4.410 | 0 | 0 | 0 | 0 | 2.962 | 0 |
| TESTI2001879 | 0 | 0 | 0 | 0 | 0 | 63.148 | 0 |
| TESTI2002105 | 0 | 0 | 0 | 0 | 0 | 14.629 | 0 |
| TESTI2002223 | 0 | 0 | 0 | 0 | 0 | 30.804 | 0 |
| TESTI2002256 | 0 | 0 | 0 | 0 | 0 | 38.856 | 0 |
| TESTI2002365 | 5.463 | 0 | 15.015 | 0 | 23.785 | 1.223 | 0 |
| TESTI2002369 | 0 | 0 | 0 | 0 | 0 | 16.832 | 0 |
| TESTI2002707 | 0 | 0 | 0 | 0 | 0 | 1.856 | 0 |
| TESTI2002866 | 17.744 | 0 | 0 | 0 | 0 | 11.918 | 0 |
| TESTI2002877 | 31.111 | 0 | 0 | 0 | 0 | 0 | 0 |
| TESTI2002965 | 68.011 | 0 | 0 | 0 | 0 | 0 | 0 |
| TESTI2003109 | 0 | 0 | 0 | 0 | 0 | 25.524 | 0 |
| TESTI2003280 | 0 | 15.184 | 0 | 0 | 0 | 0 | 0 |
| TESTI2003413 | 2.171 | 0 | 0 | 0 | 0 | 0 | 0 |
| TESTI2003454 | 4.428 | 0 | 0 | 0 | 0 | 5.948 | 0 |
| TESTI2003533 | 0.723 | 0 | 0 | 0 | 0 | 0 | 0 |
| TESTI2003625 | 0 | 0 | 0 | 0 | 0 | 25.720 | 0 |
| TESTI2004031 | 0.334 | 0 | 0 | 0 | 8.732 | 0 | 0 |
| TESTI2004080 | 0 | 0 | 33.552 | 0 | 0 | 0 | 0 |
| TESTI2004295 | 0 | 0 | 0 | 0 | 0 | 9.172 | 0 |
| TESTI2004432 | 0 | 0 | 0 | 0 | 0 | 63.148 | 0 |
| TESTI2004737 | 2.954 | 0 | 0 | 0 | 0 | 0 | 0 |
| TESTI2005408 | 1.477 | 6.558 | 0 | 0 | 0 | 0 | 0 |
| TESTI2005564 | 0 | 0 | 0 | 0 | 0 | 8.204 | 0 |
| TESTI2005692 | 0 | 0 | 0 | 0 | 0 | 63.148 | 0 |
| TESTI2005731 | 0 | 0 | 0 | 0 | 0 | 37.009 | 0 |
| TESTI2005743 | 1.832 | 0 | 0 | 0 | 0 | 0 | 47.175 |
| TESTI2005759 | 0 | 0 | 0 | 0 | 0 | 1.048 | 0 |
| TESTI2005784 | 0 | 0 | 0 | 0 | 0 | 9.995 | 0 |
| TESTI2005788 | 3.856 | 0 | 31.796 | 0 | 0 | 0 | 0 |
| TESTI2005908 | 0 | 0 | 0 | 0 | 0 | 1.764 | 0 |
| TESTI2006120 | 0 | 17.965 | 0 | 0 | 0 | 0 | 0 |
| TESTI2006258 | 8.550 | 0 | 0 | 0 | 0 | 0 | 0 |
| TESTI2006383 | 0 | 0 | 0 | 0 | 0 | 4.540 | 0 |
| TESTI2006453 | 2.807 | 0 | 0 | 0 | 0 | 0 | 0 |
| TESTI2006588 | 2.257 | 0 | 0 | 0 | 0 | 0.606 | 0 |
| TESTI2006615 | 0 | 0 | 0 | 0 | 0 | 5.170 | 0 |
| TESTI2006720 | 56.056 | 0 | 0 | 0 | 0 | 0 | 0 |
| TESTI2006872 | 4.582 | 0 | 0 | 0 | 0 | 24.621 | 0 |
| TESTI2006877 | 0 | 0 | 0 | 0 | 0 | 14.866 | 0 |
| TESTI2007211 | 8.262 | 12.226 | 0 | 0 | 0 | 0 | 0 |
| TESTI2007407 | 0 | 22.724 | 0 | 0 | 0 | 0 | 0 |
| TESTI2007422 | 25.838 | 0 | 0 | 0 | 0 | 0 | 0 |
| TESTI2007464 | 3.344 | 0 | 0 | 0 | 0 | 0 | 0 |
| TESTI2007864 | 56.056 | 0 | 0 | 0 | 0 | 0 | 0 |
| TESTI2007998 | 1.318 | 0 | 0 | 0 | 0 | 0 | 0 |
| TESTI2008020 | 3.198 | 0 | 0 | 0 | 0 | 4.296 | 0 |
| TESTI2008240 | 0.834 | 0.926 | 0 | 0 | 0 | 1.961 | 0 |
| TESTI2008405 | 0 | 0 | 35.801 | 0 | 0 | 0 | 0 |
| TESTI2009402 | 7.644 | 0 | 0 | 0 | 0 | 20.538 | 0 |
| TESTI2009474 | 5.054 | 0 | 0 | 0 | 0 | 2.263 | 0 |
| TESTI2009502 | 0 | 0 | 0 | 0 | 0 | 0 | 97.046 |
| TESTI2009520 | 2.501 | 0 | 0 | 0 | 0 | 4.200 | 0 |
| TESTI2009577 | 5.895 | 0 | 0 | 0 | 0 | 3.959 | 0 |
| TESTI2009785 | 9.571 | 0 | 0 | 0 | 0 | 3.214 | 0 |
| TESTI2009987 | 0 | 0 | 0 | 0 | 0 | 5.714 | 0 |
| TESTI2010180 | 0 | 0 | 0 | 0 | 0 | 38.856 | 0 |
| TESTI2010513 | 1.966 | 0 | 0 | 0 | 0 | 5.281 | 0 |
| TESTI2012394 | 0 | 0 | 0 | 0 | 0 | 29.991 | 0 |
| TESTI2012778 | 0.616 | 0 | 0 | 0 | 0 | 0 | 0 |
| TESTI2013231 | 0 | 0 | 13.680 | 0 | 0 | 0 | 0 |
| TESTI2013264 | 20.949 | 0 | 0 | 0 | 0 | 0 | 0 |
| TESTI2013295 | 2.221 | 0 | 0 | 0 | 0 | 5.967 | 0 |
| TESTI2014505 | 16.432 | 0 | 0 | 0 | 0 | 0 | 0 |
| TESTI2014838 | 1.105 | 0 | 0 | 0 | 0 | 11.873 | 0 |
| TESTI2015092 | 0 | 0 | 0 | 0 | 0 | 7.422 | 0 |
| TESTI2015213 | 1.284 | 0 | 0 | 0 | 0 | 0 | 11.022 |
| TESTI2015626 | 0.548 | 4.869 | 2.261 | 0 | 7.163 | 1.105 | 0 |
| TESTI2015962 | 0 | 14.684 | 0 | 0 | 0 | 0 | 0 |
| TESTI2016033 | 0 | 0 | 11.978 | 36.053 | 0 | 0 | 37.415 |
| TESTI2017954 | 2.210 | 4.904 | 0 | 0 | 0 | 0.742 | 0 |
| TESTI2018014 | 3.214 | 0 | 0 | 0 | 0 | 4.318 | 0 |
| TESTI2018462 | 0 | 0 | 0 | 0 | 0 | 6.331 | 0 |
| TESTI2018867 | 2.374 | 0 | 0 | 0 | 0 | 0 | 0 |
| TESTI2018997 | 1.737 | 0 | 0 | 0 | 0 | 0 | 0 |
| TESTI2019077 | 56.056 | 0 | 0 | 0 | 0 | 0 | 0 |
| TESTI2019760 | 37.949 | 0 | 0 | 0 | 0 | 0 | 0 |
| TESTI2020510 | 6.032 | 0 | 0 | 0 | 0 | 8.102 | 0 |
| TESTI2020840 | 13.626 | 0 | 0 | 0 | 0 | 0 | 0 |
| TESTI2020956 | 0 | 0 | 0 | 0 | 0 | 0 | 92.415 |
| TESTI2021124 | 0 | 0 | 0 | 0 | 0 | 12.804 | 0 |
| TESTI2021297 | 5.724 | 0 | 0 | 0 | 0 | 0 | 0 |
| TESTI2021425 | 2.871 | 0 | 0 | 0 | 0 | 1.928 | 0 |
| TESTI2022179 | 8.758 | 0 | 0 | 0 | 0 | 0 | 0 |
| TESTI2023414 | 0 | 0 | 0 | 0 | 0 | 50.153 | 0 |
| TESTI2024283 | 0 | 0 | 0 | 0 | 0 | 63.148 | 0 |
| TESTI2024844 | 0 | 4.241 | 0 | 0 | 0 | 0 | 0 |
| TESTI2024864 | 0 | 0 | 0 | 0 | 0 | 30.932 | 0 |
| TESTI2025757 | 14.139 | 0 | 0 | 0 | 0 | 0 | 0 |
| TESTI2027271 | 4.403 | 0 | 0 | 0 | 0 | 0 | 0 |
| TESTI2027909 | 56.056 | 0 | 0 | 0 | 0 | 0 | 0 |
| TESTI2028659 | 25.135 | 0 | 0 | 0 | 0 | 33.765 | 0 |
| TESTI2029227 | 0 | 0 | 0 | 0 | 0 | 13.298 | 0 |
| TESTI2029259 | 2.760 | 0 | 0 | 0 | 0 | 3.707 | 0 |
| TESTI2029785 | 56.056 | 0 | 0 | 0 | 0 | 0 | 0 |
| TESTI2030336 | 56.056 | 0 | 0 | 0 | 0 | 0 | 0 |
| TESTI2030554 | 29.835 | 0 | 0 | 0 | 0 | 0 | 0 |
| TESTI2031007 | 0 | 0 | 0 | 0 | 0 | 36.354 | 0 |
| TESTI2032643 | 10.140 | 0 | 0 | 0 | 0 | 0 | 0 |
| TESTI2033031 | 25.656 | 0 | 0 | 0 | 0 | 0 | 0 |
| TESTI2033441 | 7.320 | 0 | 0 | 0 | 0 | 0 | 0 |
| TESTI2034307 | 56.056 | 0 | 0 | 0 | 0 | 0 | 0 |
| TESTI2034916 | 6.339 | 0 | 0 | 0 | 0 | 8.515 | 0 |
| TESTI2034940 | 1.521 | 1.929 | 0 | 0 | 5.674 | 0.292 | 0 |
| TESTI2036913 | 0 | 0 | 0 | 0 | 0 | 22.732 | 0 |
| TESTI2036969 | 2.996 | 0 | 0 | 0 | 0 | 0 | 0 |
| TESTI2039177 | 0 | 0 | 0 | 0 | 0 | 9.285 | 0 |
| TESTI2039707 | 0 | 84.991 | 0 | 0 | 0 | 0 | 0 |
| TESTI2044276 | 3.954 | 0 | 0 | 0 | 0 | 10.623 | 0 |
| TESTI2046456 | 1.544 | 3.427 | 3.182 | 0 | 0 | 5.185 | 0 |
| TESTI2047605 | 0 | 0 | 0 | 0 | 0 | 16.321 | 0 |
| TESTI2053667 | 0 | 0 | 0 | 0 | 0 | 63.148 | 0 |
| TESTI2053723 | 3.775 | 0 | 0 | 0 | 0 | 0 | 0 |
| TESTI4000014 | 0.596 | 0 | 0 | 0 | 0 | 2.800 | 3.835 |
| TESTI4000349 | 0 | 0 | 0 | 0 | 0 | 29.117 | 0 |
| TESTI4000434 | 0 | 0 | 0 | 0 | 0 | 14.646 | 0 |
| TESTI4001467 | 4.616 | 0 | 0 | 0 | 0 | 0 | 0 |
| TESTI4001561 | 0 | 0 | 0 | 0 | 0 | 45.102 | 0 |
| TESTI4002202 | 0 | 0 | 22.792 | 0 | 0 | 0 | 0 |
| TESTI4002799 | 0.368 | 0 | 0 | 0 | 0 | 1.979 | 0 |
| TESTI4002988 | 0 | 0 | 0 | 0 | 0 | 48.582 | 0 |
| TESTI4003150 | 12.383 | 0 | 0 | 0 | 0 | 0 | 0 |
| TESTI4003179 | 0 | 0 | 0 | 0 | 0 | 46.144 | 0 |
| TESTI4003579 | 0 | 0 | 0 | 0 | 0 | 63.148 | 0 |
| TESTI4003602 | 21.653 | 0 | 0 | 0 | 0 | 0 | 0 |
| TESTI4003703 | 0 | 0 | 0 | 0 | 0 | 4.956 | 0 |
| TESTI4004210 | 0 | 0 | 0 | 0 | 0 | 40.382 | 0 |
| TESTI4005133 | 9.943 | 0 | 0 | 0 | 0 | 13.357 | 0 |
| TESTI4005399 | 6.502 | 0 | 0 | 0 | 0 | 8.734 | 0 |
| TESTI4006137 | 0 | 0 | 0 | 0 | 0 | 28.849 | 0 |
| TESTI4006819 | 0 | 0 | 0 | 0 | 0 | 46.144 | 0 |
| TESTI4007816 | 0 | 0 | 0 | 89.634 | 0 | 0 | 0 |
| TESTI4009286 | 3.627 | 0 | 0 | 0 | 0 | 4.060 | 0 |
| TESTI4009454 | 0 | 0 | 0 | 0 | 0 | 9.004 | 0 |
| TESTI4009457 | 0 | 0 | 0 | 0 | 0 | 29.991 | 0 |
| TESTI4010851 | 3.191 | 0 | 0 | 0 | 0 | 1.837 | 0 |
| TESTI4010979 | 16.384 | 0 | 0 | 0 | 0 | 0 | 0 |
| TESTI4013441 | 0.915 | 0 | 1.078 | 0 | 0 | 0.176 | 0 |
| TESTI4013474 | 8.616 | 0 | 7.104 | 0 | 0 | 0 | 0 |
| TESTI4013735 | 0 | 0 | 0 | 0 | 0 | 63.148 | 0 |
| TESTI4014908 | 0 | 0 | 0 | 0 | 0 | 40.382 | 0 |
| TESTI4016925 | 0 | 0 | 0 | 0 | 0 | 77.412 | 0 |
| TESTI4018152 | 71.841 | 0 | 0 | 0 | 0 | 0 | 0 |
| TESTI4018938 | 0 | 0 | 0 | 0 | 0 | 19.395 | 0 |
| TESTI4024245 | 0 | 0 | 0 | 0 | 0 | 37.759 | 0 |
| TESTI4024740 | 15.000 | 0 | 0 | 0 | 0 | 0 | 0 |
| TESTI4026079 | 0 | 0 | 0 | 0 | 0 | 28.497 | 0 |
| TESTI4029671 | 0 | 0 | 0 | 0 | 0 | 20.833 | 0 |
| TESTI4032913 | 6.759 | 0 | 0 | 0 | 0 | 0 | 0 |
| TESTI4033690 | 0 | 0 | 0 | 0 | 0 | 63.148 | 0 |
| TESTI4037156 | 0.923 | 0 | 0 | 0 | 0 | 0.620 | 0 |
| TESTI4038284 | 0 | 0 | 0 | 0 | 0 | 4.126 | 0 |
| TESTI4043140 | 4.624 | 0 | 0 | 0 | 0 | 3.106 | 0 |
| TESTI4044704 | 4.250 | 0 | 0 | 0 | 0 | 0 | 0 |
| TESTI4046819 | 0 | 73.082 | 0 | 0 | 0 | 0 | 0 |
| THYMU1000002 | 0.494 | 2.191 | 0 | 0 | 0 | 0.663 | 0 |
| THYMU1000010 | 4.496 | 0 | 0 | 0 | 0 | 0 | 0 |
| THYMU1000016 | 1.289 | 0 | 0 | 0 | 0 | 1.299 | 0 |
| THYMU1000017 | 25.065 | 0 | 0 | 0 | 0 | 0 | 0 |
| THYMU1000025 | 100 | 0 | 0 | 0 | 0 | 0 | 0 |
| THYMU1000029 | 44.974 | 0 | 0 | 0 | 0 | 0 | 0 |
| THYMU1000032 | 50.116 | 0 | 0 | 0 | 0 | 0.874 | 0 |
| THYMU1000033 | 100 | 0 | 0 | 0 | 0 | 0 | 0 |
| THYMU1000041 | 11.897 | 0 | 0 | 0 | 0 | 13.318 | 0 |
| THYMU1000060 | 100 | 0 | 0 | 0 | 0 | 0 | 0 |
| THYMU1000074 | 100 | 0 | 0 | 0 | 0 | 0 | 0 |
| THYMU1000083 | 7.501 | 0 | 0 | 0 | 0 | 3.359 | 0 |
| THYMU1000098 | 100 | 0 | 0 | 0 | 0 | 0 | 0 |
| THYMU1000103 | 14.701 | 0 | 0 | 0 | 0 | 1.975 | 0 |
| THYMU1000105 | 12.511 | 55.541 | 0 | 0 | 0 | 0 | 0 |
| THYMU1000109 | 2.625 | 0 | 0 | 0 | 17.143 | 0 | 0 |
| THYMU1000136 | 100 | 0 | 0 | 0 | 0 | 0 | 0 |
| THYMU1000142 | 41.147 | 0 | 0 | 0 | 0 | 0 | 0 |
| THYMU1000144 | 32.353 | 0 | 0 | 0 | 0 | 0 | 0 |
| THYMU1000158 | 100 | 0 | 0 | 0 | 0 | 0 | 0 |
| THYMU1000176 | 100 | 0 | 0 | 0 | 0 | 0 | 0 |
| THYMU1000179 | 42.674 | 0 | 0 | 0 | 0 | 57.326 | 0 |
| THYMU1000191 | 100 | 0 | 0 | 0 | 0 | 0 | 0 |
| THYMU1000198 | 45.282 | 0 | 0 | 0 | 0 | 0 | 0 |
| THYMU1000217 | 100 | 0 | 0 | 0 | 0 | 0 | 0 |
| THYMU1000240 | 100 | 0 | 0 | 0 | 0 | 0 | 0 |
| THYMU1000242 | 100 | 0 | 0 | 0 | 0 | 0 | 0 |
| THYMU1000291 | 100 | 0 | 0 | 0 | 0 | 0 | 0 |
| THYMU1000316 | 41.147 | 0 | 0 | 0 | 0 | 0 | 0 |
| THYMU1000318 | 100 | 0 | 0 | 0 | 0 | 0 | 0 |
| THYMU1000329 | 4.444 | 0 | 0 | 0 | 0 | 0 | 0 |
| THYMU1000331 | 37.949 | 0 | 0 | 0 | 0 | 0 | 0 |
| THYMU1000336 | 100 | 0 | 0 | 0 | 0 | 0 | 0 |
| THYMU1000359 | 12.068 | 0 | 0 | 0 | 0 | 0 | 0 |
| THYMU1000366 | 100 | 0 | 0 | 0 | 0 | 0 | 0 |
| THYMU1000374 | 11.240 | 0 | 0 | 0 | 0 | 3.355 | 0 |
| THYMU1000382 | 100 | 0 | 0 | 0 | 0 | 0 | 0 |
| THYMU1000393 | 100 | 0 | 0 | 0 | 0 | 0 | 0 |
| THYMU1000394 | 12.297 | 0 | 0 | 0 | 0 | 0 | 0 |
| THYMU1000399 | 100 | 0 | 0 | 0 | 0 | 0 | 0 |
| THYMU1000426 | 100 | 0 | 0 | 0 | 0 | 0 | 0 |
| THYMU1000428 | 0.948 | 2.104 | 0 | 0 | 0 | 0.637 | 0 |
| THYMU1000440 | 100 | 0 | 0 | 0 | 0 | 0 | 0 |
| THYMU1000459 | 100 | 0 | 0 | 0 | 0 | 0 | 0 |
| THYMU1000473 | 2.774 | 0 | 0 | 0 | 0 | 0 | 0 |
| THYMU1000490 | 4.781 | 0 | 0 | 0 | 0 | 6.423 | 0 |
| THYMU1000491 | 100 | 0 | 0 | 0 | 0 | 0 | 0 |
| THYMU1000496 | 100 | 0 | 0 | 0 | 0 | 0 | 0 |
| THYMU1000499 | 4.759 | 0 | 0 | 0 | 0 | 0 | 0 |
| THYMU1000527 | 100 | 0 | 0 | 0 | 0 | 0 | 0 |
| THYMU1000532 | 100 | 0 | 0 | 0 | 0 | 0 | 0 |
| THYMU1000536 | 100 | 0 | 0 | 0 | 0 | 0 | 0 |
| THYMU1000554 | 100 | 0 | 0 | 0 | 0 | 0 | 0 |
| THYMU1000558 | 100 | 0 | 0 | 0 | 0 | 0 | 0 |
| THYMU1000576 | 100 | 0 | 0 | 0 | 0 | 0 | 0 |
| THYMU1000600 | 100 | 0 | 0 | 0 | 0 | 0 | 0 |
| THYMU1000677 | 100 | 0 | 0 | 0 | 0 | 0 | 0 |
| THYMU1000692 | 100 | 0 | 0 | 0 | 0 | 0 | 0 |
| THYMU2000022 | 100 | 0 | 0 | 0 | 0 | 0 | 0 |
| THYMU2000032 | 100 | 0 | 0 | 0 | 0 | 0 | 0 |
| THYMU2000057 | 6.785 | 0 | 18.649 | 0 | 0 | 1.519 | 0 |
| THYMU2000120 | 32.401 | 0 | 0 | 0 | 0 | 0 | 0 |
| THYMU2000138 | 53.005 | 0 | 0 | 0 | 0 | 0 | 0 |
| THYMU2000140 | 100 | 0 | 0 | 0 | 0 | 0 | 0 |
| THYMU2000155 | 42.920 | 0 | 0 | 0 | 0 | 0 | 0 |
| THYMU2000162 | 54.019 | 0 | 0 | 0 | 0 | 0 | 0 |
| THYMU2000171 | 100 | 0 | 0 | 0 | 0 | 0 | 0 |
| THYMU2000176 | 100 | 0 | 0 | 0 | 0 | 0 | 0 |
| THYMU2000179 | 100 | 0 | 0 | 0 | 0 | 0 | 0 |
| THYMU2000231 | 100 | 0 | 0 | 0 | 0 | 0 | 0 |
| THYMU2000236 | 18.303 | 0 | 0 | 0 | 0 | 0 | 0 |
| THYMU2000276 | 100 | 0 | 0 | 0 | 0 | 0 | 0 |
| THYMU2000280 | 100 | 0 | 0 | 0 | 0 | 0 | 0 |
| THYMU2000300 | 73.082 | 0 | 0 | 0 | 0 | 0 | 0 |
| THYMU2000317 | 100 | 0 | 0 | 0 | 0 | 0 | 0 |
| THYMU2000368 | 100 | 0 | 0 | 0 | 0 | 0 | 0 |
| THYMU2000369 | 14.991 | 0 | 0 | 0 | 0 | 0 | 0 |
| THYMU2000382 | 1.516 | 2.244 | 0 | 0 | 13.202 | 0 | 0 |
| THYMU2000418 | 100 | 0 | 0 | 0 | 0 | 0 | 0 |
| THYMU2000436 | 3.842 | 3.411 | 0 | 0 | 0 | 0 | 0 |
| THYMU2000440 | 100 | 0 | 0 | 0 | 0 | 0 | 0 |
| THYMU2000489 | 45.282 | 0 | 0 | 0 | 0 | 0 | 0 |
| THYMU2000492 | 100 | 0 | 0 | 0 | 0 | 0 | 0 |
| THYMU2000519 | 100 | 0 | 0 | 0 | 0 | 0 | 0 |
| THYMU2000570 | 100 | 0 | 0 | 0 | 0 | 0 | 0 |
| THYMU2000602 | 100 | 0 | 0 | 0 | 0 | 0 | 0 |
| THYMU2000660 | 100 | 0 | 0 | 0 | 0 | 0 | 0 |
| THYMU2000671 | 100 | 0 | 0 | 0 | 0 | 0 | 0 |
| THYMU2000672 | 18.861 | 0 | 0 | 0 | 0 | 0 | 0 |
| THYMU2000684 | 6.944 | 15.412 | 0 | 0 | 0 | 0 | 0 |
| THYMU2000702 | 2.609 | 0 | 0 | 0 | 0 | 0 | 0 |
| THYMU2000767 | 100 | 0 | 0 | 0 | 0 | 0 | 0 |
| THYMU2000775 | 15.614 | 0 | 0 | 0 | 0 | 0 | 0 |
| THYMU2000800 | 100 | 0 | 0 | 0 | 0 | 0 | 0 |
| THYMU2000879 | 100 | 0 | 0 | 0 | 0 | 0 | 0 |
| THYMU2000932 | 100 | 0 | 0 | 0 | 0 | 0 | 0 |
| THYMU2000946 | 1.206 | 0 | 0 | 0 | 0 | 0 | 0 |
| THYMU2000950 | 18.385 | 81.615 | 0 | 0 | 0 | 0 | 0 |
| THYMU2000971 | 42.920 | 0 | 0 | 0 | 0 | 0 | 0 |
| THYMU2000982 | 100 | 0 | 0 | 0 | 0 | 0 | 0 |
| THYMU2000990 | 100 | 0 | 0 | 0 | 0 | 0 | 0 |
| THYMU2001007 | 15.835 | 0 | 0 | 0 | 0 | 18.233 | 0 |
| THYMU2001018 | 7.531 | 0 | 0 | 0 | 0 | 0 | 0 |
| THYMU2001053 | 100 | 0 | 0 | 0 | 0 | 0 | 0 |
| THYMU2001071 | 100 | 0 | 0 | 0 | 0 | 0 | 0 |
| THYMU2001090 | 17.721 | 0 | 0 | 0 | 0 | 0 | 0 |
| THYMU2001139 | 100 | 0 | 0 | 0 | 0 | 0 | 0 |
| THYMU2001195 | 32.401 | 0 | 0 | 0 | 0 | 0 | 0 |
| THYMU2001202 | 100 | 0 | 0 | 0 | 0 | 0 | 0 |
| THYMU2001203 | 100 | 0 | 0 | 0 | 0 | 0 | 0 |
| THYMU2001256 | 100 | 0 | 0 | 0 | 0 | 0 | 0 |
| THYMU2001270 | 100 | 0 | 0 | 0 | 0 | 0 | 0 |
| THYMU2001291 | 100 | 0 | 0 | 0 | 0 | 0 | 0 |
| THYMU2001314 | 100 | 0 | 0 | 0 | 0 | 0 | 0 |
| THYMU2001325 | 100 | 0 | 0 | 0 | 0 | 0 | 0 |
| THYMU2001357 | 100 | 0 | 0 | 0 | 0 | 0 | 0 |
| THYMU2001381 | 5.656 | 0 | 46.631 | 0 | 0 | 0 | 0 |
| THYMU2001422 | 10.386 | 0 | 0 | 0 | 0 | 0 | 0 |
| THYMU2001443 | 100 | 0 | 0 | 0 | 0 | 0 | 0 |
| THYMU2001515 | 85.122 | 0 | 0 | 0 | 0 | 0 | 0 |
| THYMU2001521 | 16.572 | 0 | 0 | 0 | 0 | 0 | 0 |
| THYMU2001556 | 100 | 0 | 0 | 0 | 0 | 0 | 0 |
| THYMU2001622 | 100 | 0 | 0 | 0 | 0 | 0 | 0 |
| THYMU2001727 | 100 | 0 | 0 | 0 | 0 | 0 | 0 |
| THYMU2001819 | 19.114 | 0 | 0 | 0 | 0 | 0 | 0 |
| THYMU2001825 | 100 | 0 | 0 | 0 | 0 | 0 | 0 |
| THYMU2001839 | 13.046 | 0 | 0 | 0 | 0 | 0 | 0 |
| THYMU2001868 | 26.657 | 0 | 0 | 0 | 0 | 0 | 0 |
| THYMU2001898 | 100 | 0 | 0 | 0 | 0 | 0 | 0 |
| THYMU2001900 | 100 | 0 | 0 | 0 | 0 | 0 | 0 |
| THYMU2001916 | 100 | 0 | 0 | 0 | 0 | 0 | 0 |
| THYMU2001926 | 16.184 | 0 | 0 | 0 | 0 | 0 | 0 |
| THYMU2001989 | 100 | 0 | 0 | 0 | 0 | 0 | 0 |
| THYMU2002023 | 22.349 | 0 | 0 | 0 | 0 | 0 | 0 |
| THYMU2002037 | 100 | 0 | 0 | 0 | 0 | 0 | 0 |
| THYMU2002080 | 12.409 | 0 | 0 | 0 | 0 | 0 | 0 |
| THYMU2002109 | 100 | 0 | 0 | 0 | 0 | 0 | 0 |
| THYMU2002147 | 58.982 | 0 | 0 | 0 | 0 | 0 | 0 |
| THYMU2002154 | 100 | 0 | 0 | 0 | 0 | 0 | 0 |
| THYMU2002157 | 100 | 0 | 0 | 0 | 0 | 0 | 0 |
| THYMU2002162 | 18.182 | 0 | 0 | 0 | 0 | 0 | 0 |
| THYMU2002177 | 100 | 0 | 0 | 0 | 0 | 0 | 0 |
| THYMU2002203 | 100 | 0 | 0 | 0 | 0 | 0 | 0 |
| THYMU2002229 | 18.158 | 0 | 0 | 0 | 0 | 0 | 0 |
| THYMU2002242 | 100 | 0 | 0 | 0 | 0 | 0 | 0 |
| THYMU2002338 | 100 | 0 | 0 | 0 | 0 | 0 | 0 |
| THYMU2002356 | 100 | 0 | 0 | 0 | 0 | 0 | 0 |
| THYMU2002376 | 100 | 0 | 0 | 0 | 0 | 0 | 0 |
| THYMU2002384 | 100 | 0 | 0 | 0 | 0 | 0 | 0 |
| THYMU2002450 | 35.978 | 0 | 0 | 0 | 0 | 24.165 | 0 |
| THYMU2002490 | 100 | 0 | 0 | 0 | 0 | 0 | 0 |
| THYMU2002548 | 100 | 0 | 0 | 0 | 0 | 0 | 0 |
| THYMU2002583 | 2.161 | 1.918 | 3.563 | 0 | 11.289 | 2.322 | 0 |
| THYMU2002695 | 100 | 0 | 0 | 0 | 0 | 0 | 0 |
| THYMU2002745 | 3.192 | 0 | 0 | 0 | 0 | 0 | 0 |
| THYMU2002756 | 12.209 | 0 | 0 | 0 | 0 | 8.200 | 0 |
| THYMU2002789 | 100 | 0 | 0 | 0 | 0 | 0 | 0 |
| THYMU2002792 | 100 | 0 | 0 | 0 | 0 | 0 | 0 |
| THYMU2002815 | 27.551 | 0 | 0 | 0 | 0 | 0 | 0 |
| THYMU2002841 | 4.840 | 0 | 0 | 0 | 0 | 0 | 0 |
| THYMU2002852 | 100 | 0 | 0 | 0 | 0 | 0 | 0 |
| THYMU2002910 | 100 | 0 | 0 | 0 | 0 | 0 | 0 |
| THYMU2002950 | 100 | 0 | 0 | 0 | 0 | 0 | 0 |
| THYMU2002983 | 2.495 | 0 | 0 | 0 | 0 | 0 | 0 |
| THYMU2003012 | 1.461 | 0 | 0 | 0 | 0 | 0.982 | 0 |
| THYMU2003046 | 20.838 | 0 | 0 | 0 | 0 | 0 | 0 |
| THYMU2003069 | 92.134 | 0 | 0 | 0 | 0 | 0 | 0 |
| THYMU2003107 | 100 | 0 | 0 | 0 | 0 | 0 | 0 |
| THYMU2003124 | 100 | 0 | 0 | 0 | 0 | 0 | 0 |
| THYMU2003133 | 14.465 | 0 | 0 | 0 | 0 | 3.886 | 0 |
| THYMU2003166 | 100 | 0 | 0 | 0 | 0 | 0 | 0 |
| THYMU2003232 | 100 | 0 | 0 | 0 | 0 | 0 | 0 |
| THYMU2003242 | 100 | 0 | 0 | 0 | 0 | 0 | 0 |
| THYMU2003249 | 100 | 0 | 0 | 0 | 0 | 0 | 0 |
| THYMU2003270 | 100 | 0 | 0 | 0 | 0 | 0 | 0 |
| THYMU2003282 | 100 | 0 | 0 | 0 | 0 | 0 | 0 |
| THYMU2003287 | 79.316 | 0 | 0 | 0 | 0 | 0 | 0 |
| THYMU2003336 | 100 | 0 | 0 | 0 | 0 | 0 | 0 |
| THYMU2003366 | 100 | 0 | 0 | 0 | 0 | 0 | 0 |
| THYMU2003397 | 100 | 0 | 0 | 0 | 0 | 0 | 0 |
| THYMU2003419 | 6.700 | 0 | 0 | 0 | 0 | 2.250 | 0 |
| THYMU2003440 | 19.399 | 0 | 0 | 0 | 0 | 0 | 0 |
| THYMU2003446 | 5.966 | 0 | 0 | 0 | 0 | 0 | 0 |
| THYMU2003470 | 100 | 0 | 0 | 0 | 0 | 0 | 0 |
| THYMU2003479 | 100 | 0 | 0 | 0 | 0 | 0 | 0 |
| THYMU2003499 | 37.705 | 0 | 0 | 0 | 0 | 0 | 0 |
| THYMU2003542 | 1.802 | 0 | 0 | 0 | 0 | 0 | 0 |
| THYMU2003632 | 100 | 0 | 0 | 0 | 0 | 0 | 0 |
| THYMU2003650 | 100 | 0 | 0 | 0 | 0 | 0 | 0 |
| THYMU2003700 | 100 | 0 | 0 | 0 | 0 | 0 | 0 |
| THYMU2003760 | 100 | 0 | 0 | 0 | 0 | 0 | 0 |
| THYMU2003803 | 100 | 0 | 0 | 0 | 0 | 0 | 0 |
| THYMU2003855 | 100 | 0 | 0 | 0 | 0 | 0 | 0 |
| THYMU2003891 | 4.380 | 0 | 0 | 0 | 0 | 0.163 | 3.134 |
| THYMU2003907 | 9.456 | 0 | 77.967 | 0 | 0 | 0 | 0 |
| THYMU2003932 | 32.257 | 0 | 0 | 0 | 0 | 0 | 0 |
| THYMU2003981 | 2.613 | 0 | 0 | 0 | 0 | 3.510 | 11.216 |
| THYMU2004003 | 100 | 0 | 0 | 0 | 0 | 0 | 0 |
| THYMU2004008 | 100 | 0 | 0 | 0 | 0 | 0 | 0 |
| THYMU2004042 | 100 | 0 | 0 | 0 | 0 | 0 | 0 |
| THYMU2004108 | 11.015 | 0 | 0 | 0 | 0 | 0 | 0 |
| THYMU2004111 | 100 | 0 | 0 | 0 | 0 | 0 | 0 |
| THYMU2004123 | 100 | 0 | 0 | 0 | 0 | 0 | 0 |
| THYMU2004139 | 100 | 0 | 0 | 0 | 0 | 0 | 0 |
| THYMU2004152 | 9.107 | 0 | 0 | 0 | 0 | 0 | 21.324 |
| THYMU2004169 | 100 | 0 | 0 | 0 | 0 | 0 | 0 |
| THYMU2004284 | 5.601 | 0 | 0 | 0 | 0 | 0 | 0 |
| THYMU2004320 | 13.625 | 0 | 0 | 0 | 0 | 0 | 0 |
| THYMU2004336 | 100 | 0 | 0 | 0 | 0 | 0 | 0 |
| THYMU2004344 | 2.130 | 0 | 0 | 0 | 0 | 0 | 0 |
| THYMU2004356 | 100 | 0 | 0 | 0 | 0 | 0 | 0 |
| THYMU2004410 | 3.195 | 0 | 0 | 0 | 0 | 2.146 | 0 |
| THYMU2004452 | 19.272 | 0 | 0 | 0 | 0 | 0 | 0 |
| THYMU2004508 | 54.019 | 0 | 0 | 0 | 0 | 0 | 0 |
| THYMU2004512 | 100 | 0 | 0 | 0 | 0 | 0 | 0 |
| THYMU2004635 | 44.974 | 0 | 0 | 0 | 0 | 0 | 0 |
| THYMU2004639 | 100 | 0 | 0 | 0 | 0 | 0 | 0 |
| THYMU2004668 | 100 | 0 | 0 | 0 | 0 | 0 | 0 |
| THYMU2004677 | 100 | 0 | 0 | 0 | 0 | 0 | 0 |
| THYMU2004688 | 100 | 0 | 0 | 0 | 0 | 0 | 0 |
| THYMU2004693 | 100 | 0 | 0 | 0 | 0 | 0 | 0 |
| THYMU2004733 | 9.340 | 0 | 0 | 0 | 0 | 0 | 0 |
| THYMU2004835 | 100 | 0 | 0 | 0 | 0 | 0 | 0 |
| THYMU2004843 | 100 | 0 | 0 | 0 | 0 | 0 | 0 |
| THYMU2004906 | 10.451 | 0 | 0 | 0 | 0 | 0 | 0 |
| THYMU2004916 | 2.602 | 0 | 0 | 0 | 33.990 | 0 | 0 |
| THYMU2004986 | 100 | 0 | 0 | 0 | 0 | 0 | 0 |
| THYMU2005001 | 100 | 0 | 0 | 0 | 0 | 0 | 0 |
| THYMU2005003 | 11.644 | 0 | 0 | 0 | 0 | 0 | 0 |
| THYMU2005046 | 100 | 0 | 0 | 0 | 0 | 0 | 0 |
| THYMU2005134 | 100 | 0 | 0 | 0 | 0 | 0 | 0 |
| THYMU2005156 | 31.905 | 0 | 0 | 0 | 0 | 0 | 0 |
| THYMU2005190 | 100 | 0 | 0 | 0 | 0 | 0 | 0 |
| THYMU2005225 | 100 | 0 | 0 | 0 | 0 | 0 | 0 |
| THYMU2005240 | 100 | 0 | 0 | 0 | 0 | 0 | 0 |
| THYMU2005246 | 42.674 | 0 | 0 | 0 | 0 | 57.326 | 0 |
| THYMU2005270 | 100 | 0 | 0 | 0 | 0 | 0 | 0 |
| THYMU2005283 | 100 | 0 | 0 | 0 | 0 | 0 | 0 |
| THYMU2005303 | 100 | 0 | 0 | 0 | 0 | 0 | 0 |
| THYMU2005321 | 100 | 0 | 0 | 0 | 0 | 0 | 0 |
| THYMU2005356 | 100 | 0 | 0 | 0 | 0 | 0 | 0 |
| THYMU2005369 | 100 | 0 | 0 | 0 | 0 | 0 | 0 |
| THYMU2005439 | 13.827 | 0 | 0 | 0 | 0 | 0 | 0 |
| THYMU2005480 | 100 | 0 | 0 | 0 | 0 | 0 | 0 |
| THYMU2005482 | 10.260 | 0 | 0 | 0 | 0 | 0 | 0 |
| THYMU2005507 | 100 | 0 | 0 | 0 | 0 | 0 | 0 |
| THYMU2005545 | 100 | 0 | 0 | 0 | 0 | 0 | 0 |
| THYMU2005546 | 2.737 | 0 | 0 | 0 | 0 | 0.613 | 0 |
| THYMU2005574 | 54.019 | 0 | 0 | 0 | 0 | 0 | 0 |
| THYMU2005576 | 100 | 0 | 0 | 0 | 0 | 0 | 0 |
| THYMU2005748 | 100 | 0 | 0 | 0 | 0 | 0 | 0 |
| THYMU2005759 | 100 | 0 | 0 | 0 | 0 | 0 | 0 |
| THYMU2005807 | 54.019 | 0 | 0 | 0 | 0 | 0 | 0 |
| THYMU2005815 | 100 | 0 | 0 | 0 | 0 | 0 | 0 |
| THYMU2005855 | 100 | 0 | 0 | 0 | 0 | 0 | 0 |
| THYMU2005881 | 100 | 0 | 0 | 0 | 0 | 0 | 0 |
| THYMU2005948 | 100 | 0 | 0 | 0 | 0 | 0 | 0 |
| THYMU2005980 | 6.762 | 0 | 0 | 0 | 0 | 0 | 0 |
| THYMU2005997 | 26.854 | 0 | 0 | 0 | 0 | 0 | 0 |
| THYMU2006001 | 100 | 0 | 0 | 0 | 0 | 0 | 0 |
| THYMU2006048 | 100 | 0 | 0 | 0 | 0 | 0 | 0 |
| THYMU2006098 | 100 | 0 | 0 | 0 | 0 | 0 | 0 |
| THYMU2006160 | 100 | 0 | 0 | 0 | 0 | 0 | 0 |
| THYMU2006170 | 100 | 0 | 0 | 0 | 0 | 0 | 0 |
| THYMU2006252 | 100 | 0 | 0 | 0 | 0 | 0 | 0 |
| THYMU2006261 | 24.179 | 0 | 0 | 0 | 0 | 0 | 0 |
| THYMU2006277 | 0.967 | 0 | 0 | 0 | 0 | 0 | 0 |
| THYMU2006303 | 100 | 0 | 0 | 0 | 0 | 0 | 0 |
| THYMU2006324 | 100 | 0 | 0 | 0 | 0 | 0 | 0 |
| THYMU2006350 | 100 | 0 | 0 | 0 | 0 | 0 | 0 |
| THYMU2006357 | 100 | 0 | 0 | 0 | 0 | 0 | 0 |
| THYMU2006365 | 100 | 0 | 0 | 0 | 0 | 0 | 0 |
| THYMU2006420 | 100 | 0 | 0 | 0 | 0 | 0 | 0 |
| THYMU2006468 | 100 | 0 | 0 | 0 | 0 | 0 | 0 |
| THYMU2006505 | 2.277 | 0 | 0 | 0 | 0 | 0 | 0 |
| THYMU2006610 | 22.644 | 0 | 0 | 0 | 0 | 0 | 0 |
| THYMU2006666 | 100 | 0 | 0 | 0 | 0 | 0 | 0 |
| THYMU2006712 | 100 | 0 | 0 | 0 | 0 | 0 | 0 |
| THYMU2006813 | 9.236 | 0 | 0 | 0 | 0 | 3.545 | 0 |
| THYMU2006913 | 100 | 0 | 0 | 0 | 0 | 0 | 0 |
| THYMU2006946 | 100 | 0 | 0 | 0 | 0 | 0 | 0 |
| THYMU2006965 | 100 | 0 | 0 | 0 | 0 | 0 | 0 |
| THYMU2007025 | 100 | 0 | 0 | 0 | 0 | 0 | 0 |
| THYMU2007036 | 6.438 | 0 | 0 | 0 | 0 | 0 | 0 |
| THYMU2007060 | 7.110 | 0 | 0 | 0 | 0 | 0 | 0 |
| THYMU2007065 | 10.144 | 0 | 0 | 0 | 0 | 0 | 0 |
| THYMU2007095 | 100 | 0 | 0 | 0 | 0 | 0 | 0 |
| THYMU2007112 | 3.813 | 0 | 0 | 0 | 0 | 0 | 0 |
| THYMU2007146 | 29.835 | 0 | 0 | 0 | 0 | 0 | 0 |
| THYMU2007179 | 100 | 0 | 0 | 0 | 0 | 0 | 0 |
| THYMU2007258 | 100 | 0 | 0 | 0 | 0 | 0 | 0 |
| THYMU2007307 | 100 | 0 | 0 | 0 | 0 | 0 | 0 |
| THYMU2007308 | 100 | 0 | 0 | 0 | 0 | 0 | 0 |
| THYMU2007339 | 25.705 | 0 | 0 | 0 | 0 | 0 | 0 |
| THYMU2007350 | 100 | 0 | 0 | 0 | 0 | 0 | 0 |
| THYMU2007384 | 100 | 0 | 0 | 0 | 0 | 0 | 0 |
| THYMU2007415 | 8.071 | 0 | 0 | 0 | 0 | 0 | 0 |
| THYMU2007467 | 6.736 | 0 | 0 | 0 | 0 | 0 | 0 |
| THYMU2007493 | 100 | 0 | 0 | 0 | 0 | 0 | 0 |
| THYMU2007521 | 100 | 0 | 0 | 0 | 0 | 0 | 0 |
| THYMU2007528 | 100 | 0 | 0 | 0 | 0 | 0 | 0 |
| THYMU2007530 | 100 | 0 | 0 | 0 | 0 | 0 | 0 |
| THYMU2007532 | 26.053 | 0 | 0 | 0 | 0 | 17.499 | 0 |
| THYMU2007561 | 100 | 0 | 0 | 0 | 0 | 0 | 0 |
| THYMU2007571 | 100 | 0 | 0 | 0 | 0 | 0 | 0 |
| THYMU2007635 | 100 | 0 | 0 | 0 | 0 | 0 | 0 |
| THYMU2007658 | 100 | 0 | 0 | 0 | 0 | 0 | 0 |
| THYMU2007667 | 100 | 0 | 0 | 0 | 0 | 0 | 0 |
| THYMU2007694 | 17.288 | 0 | 0 | 0 | 0 | 0 | 0 |
| THYMU2007725 | 100 | 0 | 0 | 0 | 0 | 0 | 0 |
| THYMU2007729 | 8.151 | 0 | 0 | 0 | 0 | 0 | 0 |
| THYMU2007802 | 25.065 | 0 | 0 | 0 | 0 | 0 | 0 |
| THYMU2007824 | 100 | 0 | 0 | 0 | 0 | 0 | 0 |
| THYMU2007854 | 100 | 0 | 0 | 0 | 0 | 0 | 0 |
| THYMU2007886 | 1.155 | 0 | 0 | 0 | 0 | 0 | 0 |
| THYMU2007952 | 100 | 0 | 0 | 0 | 0 | 0 | 0 |
| THYMU2007969 | 100 | 0 | 0 | 0 | 0 | 0 | 0 |
| THYMU2008035 | 45.470 | 0 | 0 | 0 | 0 | 0 | 0 |
| THYMU2008036 | 45.282 | 0 | 0 | 0 | 0 | 0 | 0 |
| THYMU2008049 | 18.834 | 0 | 0 | 0 | 0 | 0 | 0 |
| THYMU2008072 | 100 | 0 | 0 | 0 | 0 | 0 | 0 |
| THYMU2008111 | 100 | 0 | 0 | 0 | 0 | 0 | 0 |
| THYMU2008145 | 100 | 0 | 0 | 0 | 0 | 0 | 0 |
| THYMU2008149 | 73.674 | 0 | 0 | 0 | 0 | 19.794 | 0 |
| THYMU2008185 | 2.405 | 0 | 0 | 0 | 0 | 0 | 0 |
| THYMU2008191 | 100 | 0 | 0 | 0 | 0 | 0 | 0 |
| THYMU2008207 | 100 | 0 | 0 | 0 | 0 | 0 | 0 |
| THYMU2008226 | 100 | 0 | 0 | 0 | 0 | 0 | 0 |
| THYMU2008282 | 100 | 0 | 0 | 0 | 0 | 0 | 0 |
| THYMU2008321 | 2.411 | 0 | 0 | 0 | 0 | 0 | 0 |
| THYMU2008339 | 100 | 0 | 0 | 0 | 0 | 0 | 0 |
| THYMU2008350 | 100 | 0 | 0 | 0 | 0 | 0 | 0 |
| THYMU2008351 | 100 | 0 | 0 | 0 | 0 | 0 | 0 |
| THYMU2008383 | 56.056 | 0 | 0 | 0 | 0 | 0 | 0 |
| THYMU2008452 | 100 | 0 | 0 | 0 | 0 | 0 | 0 |
| THYMU2008643 | 100 | 0 | 0 | 0 | 0 | 0 | 0 |
| THYMU2008686 | 20.324 | 0 | 0 | 0 | 0 | 0 | 0 |
| THYMU2008691 | 100 | 0 | 0 | 0 | 0 | 0 | 0 |
| THYMU2008714 | 100 | 0 | 0 | 0 | 0 | 0 | 0 |
| THYMU2008725 | 10.873 | 0 | 0 | 0 | 0 | 0 | 0 |
| THYMU2008727 | 12.395 | 0 | 0 | 0 | 0 | 0 | 0 |
| THYMU2008781 | 100 | 0 | 0 | 0 | 0 | 0 | 0 |
| THYMU2008799 | 100 | 0 | 0 | 0 | 0 | 0 | 0 |
| THYMU2008876 | 100 | 0 | 0 | 0 | 0 | 0 | 0 |
| THYMU2008910 | 100 | 0 | 0 | 0 | 0 | 0 | 0 |
| THYMU2008917 | 100 | 0 | 0 | 0 | 0 | 0 | 0 |
| THYMU2008928 | 100 | 0 | 0 | 0 | 0 | 0 | 0 |
| THYMU2008990 | 100 | 0 | 0 | 0 | 0 | 0 | 0 |
| THYMU2008994 | 100 | 0 | 0 | 0 | 0 | 0 | 0 |
| THYMU2009023 | 100 | 0 | 0 | 0 | 0 | 0 | 0 |
| THYMU2009046 | 100 | 0 | 0 | 0 | 0 | 0 | 0 |
| THYMU2009101 | 100 | 0 | 0 | 0 | 0 | 0 | 0 |
| THYMU2009104 | 100 | 0 | 0 | 0 | 0 | 0 | 0 |
| THYMU2009134 | 100 | 0 | 0 | 0 | 0 | 0 | 0 |
| THYMU2009157 | 100 | 0 | 0 | 0 | 0 | 0 | 0 |
| THYMU2009181 | 100 | 0 | 0 | 0 | 0 | 0 | 0 |
| THYMU2009186 | 32.401 | 0 | 0 | 0 | 0 | 0 | 0 |
| THYMU2009338 | 42.920 | 0 | 0 | 0 | 0 | 0 | 0 |
| THYMU2009425 | 100 | 0 | 0 | 0 | 0 | 0 | 0 |
| THYMU2009516 | 100 | 0 | 0 | 0 | 0 | 0 | 0 |
| THYMU2009526 | 100 | 0 | 0 | 0 | 0 | 0 | 0 |
| THYMU2009546 | 100 | 0 | 0 | 0 | 0 | 0 | 0 |
| THYMU2009592 | 46.072 | 0 | 0 | 0 | 0 | 0 | 0 |
| THYMU2009596 | 100 | 0 | 0 | 0 | 0 | 0 | 0 |
| THYMU2009658 | 0.584 | 0 | 0 | 0 | 0 | 0.392 | 7.523 |
| THYMU2009792 | 2.335 | 0 | 0 | 0 | 0 | 0 | 0 |
| THYMU2009835 | 100 | 0 | 0 | 0 | 0 | 0 | 0 |
| THYMU2009906 | 100 | 0 | 0 | 0 | 0 | 0 | 0 |
| THYMU2009948 | 100 | 0 | 0 | 0 | 0 | 0 | 0 |
| THYMU2010030 | 100 | 0 | 0 | 0 | 0 | 0 | 0 |
| THYMU2010041 | 62.190 | 0 | 0 | 0 | 0 | 0 | 0 |
| THYMU2010046 | 100 | 0 | 0 | 0 | 0 | 0 | 0 |
| THYMU2010059 | 100 | 0 | 0 | 0 | 0 | 0 | 0 |
| THYMU2010082 | 100 | 0 | 0 | 0 | 0 | 0 | 0 |
| THYMU2010094 | 24.284 | 0 | 0 | 0 | 0 | 6.524 | 0 |
| THYMU2010161 | 12.580 | 0 | 0 | 0 | 0 | 0 | 0 |
| THYMU2010192 | 42.920 | 0 | 0 | 0 | 0 | 0 | 0 |
| THYMU2010448 | 4.415 | 0 | 0 | 0 | 0 | 0 | 0 |
| THYMU2010519 | 86.171 | 0 | 0 | 0 | 0 | 0 | 0 |
| THYMU2010637 | 100 | 0 | 0 | 0 | 0 | 0 | 0 |
| THYMU2010671 | 100 | 0 | 0 | 0 | 0 | 0 | 0 |
| THYMU2010699 | 100 | 0 | 0 | 0 | 0 | 0 | 0 |
| THYMU2010705 | 100 | 0 | 0 | 0 | 0 | 0 | 0 |
| THYMU2010779 | 70.146 | 0 | 0 | 0 | 0 | 0 | 0 |
| THYMU2010816 | 10.870 | 48.256 | 0 | 0 | 0 | 14.603 | 0 |
| THYMU2010831 | 45.470 | 0 | 0 | 0 | 0 | 0 | 0 |
| THYMU2010848 | 100 | 0 | 0 | 0 | 0 | 0 | 0 |
| THYMU2011053 | 42.674 | 0 | 0 | 0 | 0 | 57.326 | 0 |
| THYMU2011063 | 4.388 | 0 | 0 | 0 | 0 | 0 | 0 |
| THYMU2011072 | 100 | 0 | 0 | 0 | 0 | 0 | 0 |
| THYMU2011096 | 100 | 0 | 0 | 0 | 0 | 0 | 0 |
| THYMU2011118 | 100 | 0 | 0 | 0 | 0 | 0 | 0 |
| THYMU2011142 | 100 | 0 | 0 | 0 | 0 | 0 | 0 |
| THYMU2011183 | 100 | 0 | 0 | 0 | 0 | 0 | 0 |
| THYMU2011257 | 100 | 0 | 0 | 0 | 0 | 0 | 0 |
| THYMU2011259 | 100 | 0 | 0 | 0 | 0 | 0 | 0 |
| THYMU2011295 | 100 | 0 | 0 | 0 | 0 | 0 | 0 |
| THYMU2011308 | 7.001 | 0 | 0 | 0 | 0 | 0 | 0 |
| THYMU2011390 | 100 | 0 | 0 | 0 | 0 | 0 | 0 |
| THYMU2011431 | 100 | 0 | 0 | 0 | 0 | 0 | 0 |
| THYMU2011447 | 100 | 0 | 0 | 0 | 0 | 0 | 0 |
| THYMU2011482 | 10.238 | 0 | 0 | 0 | 0 | 0 | 0 |
| THYMU2011538 | 100 | 0 | 0 | 0 | 0 | 0 | 0 |
| THYMU2011548 | 100 | 0 | 0 | 0 | 0 | 0 | 0 |
| THYMU2011551 | 100 | 0 | 0 | 0 | 0 | 0 | 0 |
| THYMU2011564 | 100 | 0 | 0 | 0 | 0 | 0 | 0 |
| THYMU2011573 | 100 | 0 | 0 | 0 | 0 | 0 | 0 |
| THYMU2011585 | 100 | 0 | 0 | 0 | 0 | 0 | 0 |
| THYMU2011621 | 100 | 0 | 0 | 0 | 0 | 0 | 0 |
| THYMU2011666 | 100 | 0 | 0 | 0 | 0 | 0 | 0 |
| THYMU2011736 | 25.065 | 0 | 0 | 0 | 0 | 0 | 0 |
| THYMU2011785 | 100 | 0 | 0 | 0 | 0 | 0 | 0 |
| THYMU2011806 | 100 | 0 | 0 | 0 | 0 | 0 | 0 |
| THYMU2011852 | 100 | 0 | 0 | 0 | 0 | 0 | 0 |
| THYMU2011875 | 18.705 | 0 | 0 | 0 | 0 | 0 | 0 |
| THYMU2011881 | 8.692 | 0 | 0 | 0 | 0 | 0 | 0 |
| THYMU2011937 | 100 | 0 | 0 | 0 | 0 | 0 | 0 |
| THYMU2011939 | 54.019 | 0 | 0 | 0 | 0 | 0 | 0 |
| THYMU2012002 | 21.171 | 0 | 0 | 0 | 0 | 0 | 0 |
| THYMU2012024 | 9.940 | 0 | 0 | 0 | 0 | 3.338 | 0 |
| THYMU2012073 | 100 | 0 | 0 | 0 | 0 | 0 | 0 |
| THYMU2012104 | 22.558 | 0 | 0 | 0 | 0 | 0 | 0 |
| THYMU2012113 | 100 | 0 | 0 | 0 | 0 | 0 | 0 |
| THYMU2012273 | 100 | 0 | 0 | 0 | 0 | 0 | 0 |
| THYMU2012401 | 19.301 | 0 | 0 | 0 | 0 | 0 | 0 |
| THYMU2012492 | 54.510 | 0 | 0 | 0 | 0 | 0 | 0 |
| THYMU2012507 | 100 | 0 | 0 | 0 | 0 | 0 | 0 |
| THYMU2012565 | 100 | 0 | 0 | 0 | 0 | 0 | 0 |
| THYMU2012574 | 100 | 0 | 0 | 0 | 0 | 0 | 0 |
| THYMU2012625 | 2.599 | 0 | 0 | 0 | 0 | 0 | 22.310 |
| THYMU2012631 | 100 | 0 | 0 | 0 | 0 | 0 | 0 |
| THYMU2012665 | 100 | 0 | 0 | 0 | 0 | 0 | 0 |
| THYMU2012690 | 3.240 | 0 | 0 | 0 | 0 | 0 | 0 |
| THYMU2012701 | 100 | 0 | 0 | 0 | 0 | 0 | 0 |
| THYMU2012807 | 100 | 0 | 0 | 0 | 0 | 0 | 0 |
| THYMU2012826 | 18.467 | 0 | 0 | 0 | 0 | 0 | 0 |
| THYMU2012882 | 100 | 0 | 0 | 0 | 0 | 0 | 0 |
| THYMU2012891 | 100 | 0 | 0 | 0 | 0 | 0 | 0 |
| THYMU2012902 | 100 | 0 | 0 | 0 | 0 | 0 | 0 |
| THYMU2012919 | 100 | 0 | 0 | 0 | 0 | 0 | 0 |
| THYMU2013023 | 100 | 0 | 0 | 0 | 0 | 0 | 0 |
| THYMU2013047 | 100 | 0 | 0 | 0 | 0 | 0 | 0 |
| THYMU2013051 | 18.782 | 0 | 0 | 0 | 0 | 0 | 0 |
| THYMU2013089 | 100 | 0 | 0 | 0 | 0 | 0 | 0 |
| THYMU2013136 | 2.046 | 0 | 0 | 0 | 0 | 2.748 | 0 |
| THYMU2013170 | 19.114 | 0 | 0 | 0 | 0 | 0 | 0 |
| THYMU2013364 | 100 | 0 | 0 | 0 | 0 | 0 | 0 |
| THYMU2013386 | 100 | 0 | 0 | 0 | 0 | 0 | 0 |
| THYMU2013426 | 100 | 0 | 0 | 0 | 0 | 0 | 0 |
| THYMU2013578 | 100 | 0 | 0 | 0 | 0 | 0 | 0 |
| THYMU2013648 | 9.986 | 0 | 0 | 0 | 0 | 0 | 0 |
| THYMU2013705 | 100 | 0 | 0 | 0 | 0 | 0 | 0 |
| THYMU2013757 | 100 | 0 | 0 | 0 | 0 | 0 | 0 |
| THYMU2013779 | 100 | 0 | 0 | 0 | 0 | 0 | 0 |
| THYMU2013863 | 100 | 0 | 0 | 0 | 0 | 0 | 0 |
| THYMU2013916 | 0.925 | 8.211 | 0 | 0 | 0 | 1.242 | 0 |
| THYMU2013950 | 100 | 0 | 0 | 0 | 0 | 0 | 0 |
| THYMU2013981 | 100 | 0 | 0 | 0 | 0 | 0 | 0 |
| THYMU2014067 | 12.580 | 0 | 0 | 0 | 0 | 0 | 0 |
| THYMU2014068 | 100 | 0 | 0 | 0 | 0 | 0 | 0 |
| THYMU2014167 | 4.582 | 0 | 0 | 0 | 0 | 0 | 0 |
| THYMU2014183 | 16.202 | 0 | 0 | 0 | 0 | 0 | 0 |
| THYMU2014204 | 100 | 0 | 0 | 0 | 0 | 0 | 0 |
| THYMU2014297 | 100 | 0 | 0 | 0 | 0 | 0 | 0 |
| THYMU2014323 | 45.282 | 0 | 0 | 0 | 0 | 0 | 0 |
| THYMU2014327 | 100 | 0 | 0 | 0 | 0 | 0 | 0 |
| THYMU2014353 | 62.337 | 0 | 0 | 0 | 0 | 0 | 0 |
| THYMU2014492 | 32.093 | 0 | 0 | 0 | 0 | 0 | 0 |
| THYMU2014500 | 100 | 0 | 0 | 0 | 0 | 0 | 0 |
| THYMU2014599 | 47.240 | 0 | 0 | 0 | 0 | 0 | 0 |
| THYMU2014762 | 100 | 0 | 0 | 0 | 0 | 0 | 0 |
| THYMU2014777 | 100 | 0 | 0 | 0 | 0 | 0 | 0 |
| THYMU2014801 | 100 | 0 | 0 | 0 | 0 | 0 | 0 |
| THYMU2014901 | 100 | 0 | 0 | 0 | 0 | 0 | 0 |
| THYMU2014923 | 100 | 0 | 0 | 0 | 0 | 0 | 0 |
| THYMU2015019 | 22.813 | 0 | 0 | 0 | 0 | 0 | 0 |
| THYMU2015161 | 100 | 0 | 0 | 0 | 0 | 0 | 0 |
| THYMU2015316 | 100 | 0 | 0 | 0 | 0 | 0 | 0 |
| THYMU2015321 | 41.147 | 0 | 0 | 0 | 0 | 0 | 0 |
| THYMU2015439 | 100 | 0 | 0 | 0 | 0 | 0 | 0 |
| THYMU2015441 | 18.750 | 0 | 0 | 0 | 0 | 0 | 0 |
| THYMU2015479 | 100 | 0 | 0 | 0 | 0 | 0 | 0 |
| THYMU2015762 | 0.827 | 3.670 | 0 | 0 | 0 | 0 | 0 |
| THYMU2015775 | 18.523 | 0 | 0 | 0 | 0 | 0 | 0 |
| THYMU2015825 | 100 | 0 | 0 | 0 | 0 | 0 | 0 |
| THYMU2015918 | 44.974 | 0 | 0 | 0 | 0 | 0 | 0 |
| THYMU2015943 | 100 | 0 | 0 | 0 | 0 | 0 | 0 |
| THYMU2015984 | 100 | 0 | 0 | 0 | 0 | 0 | 0 |
| THYMU2016113 | 100 | 0 | 0 | 0 | 0 | 0 | 0 |
| THYMU2016164 | 100 | 0 | 0 | 0 | 0 | 0 | 0 |
| THYMU2016204 | 40.164 | 0 | 0 | 0 | 0 | 0 | 0 |
| THYMU2016219 | 100 | 0 | 0 | 0 | 0 | 0 | 0 |
| THYMU2016360 | 100 | 0 | 0 | 0 | 0 | 0 | 0 |
| THYMU2016496 | 100 | 0 | 0 | 0 | 0 | 0 | 0 |
| THYMU2016523 | 55.019 | 0 | 0 | 0 | 0 | 0 | 0 |
| THYMU2016840 | 18.750 | 0 | 0 | 0 | 0 | 0 | 0 |
| THYMU2016968 | 6.163 | 0 | 0 | 0 | 0 | 0 | 0 |
| THYMU2017008 | 100 | 0 | 0 | 0 | 0 | 0 | 0 |
| THYMU2017010 | 100 | 0 | 0 | 0 | 0 | 0 | 0 |
| THYMU2017023 | 100 | 0 | 0 | 0 | 0 | 0 | 0 |
| THYMU2017085 | 100 | 0 | 0 | 0 | 0 | 0 | 0 |
| THYMU2017099 | 100 | 0 | 0 | 0 | 0 | 0 | 0 |
| THYMU2017158 | 40.164 | 0 | 0 | 0 | 0 | 0 | 0 |
| THYMU2017162 | 100 | 0 | 0 | 0 | 0 | 0 | 0 |
| THYMU2017215 | 100 | 0 | 0 | 0 | 0 | 0 | 0 |
| THYMU2017362 | 100 | 0 | 0 | 0 | 0 | 0 | 0 |
| THYMU2017366 | 100 | 0 | 0 | 0 | 0 | 0 | 0 |
| THYMU2017398 | 100 | 0 | 0 | 0 | 0 | 0 | 0 |
| THYMU2017449 | 100 | 0 | 0 | 0 | 0 | 0 | 0 |
| THYMU2017479 | 100 | 0 | 0 | 0 | 0 | 0 | 0 |
| THYMU2017522 | 100 | 0 | 0 | 0 | 0 | 0 | 0 |
| THYMU2017526 | 100 | 0 | 0 | 0 | 0 | 0 | 0 |
| THYMU2017601 | 5.889 | 0 | 0 | 0 | 0 | 7.910 | 0 |
| THYMU2017675 | 100 | 0 | 0 | 0 | 0 | 0 | 0 |
| THYMU2017707 | 100 | 0 | 0 | 0 | 0 | 0 | 0 |
| THYMU2017831 | 56.056 | 0 | 0 | 0 | 0 | 0 | 0 |
| THYMU2017844 | 100 | 0 | 0 | 0 | 0 | 0 | 0 |
| THYMU2017878 | 54.019 | 0 | 0 | 0 | 0 | 0 | 0 |
| THYMU2017948 | 71.841 | 0 | 0 | 0 | 0 | 0 | 0 |
| THYMU2018028 | 25.065 | 0 | 0 | 0 | 0 | 0 | 0 |
| THYMU2018071 | 100 | 0 | 0 | 0 | 0 | 0 | 0 |
| THYMU2018126 | 1.820 | 0 | 0 | 0 | 15.847 | 0 | 0 |
| THYMU2018189 | 100 | 0 | 0 | 0 | 0 | 0 | 0 |
| THYMU2018197 | 100 | 0 | 0 | 0 | 0 | 0 | 0 |
| THYMU2018384 | 100 | 0 | 0 | 0 | 0 | 0 | 0 |
| THYMU2018455 | 100 | 0 | 0 | 0 | 0 | 0 | 0 |
| THYMU2018547 | 100 | 0 | 0 | 0 | 0 | 0 | 0 |
| THYMU2018565 | 100 | 0 | 0 | 0 | 0 | 0 | 0 |
| THYMU2018639 | 32.401 | 0 | 0 | 0 | 0 | 0 | 0 |
| THYMU2018673 | 100 | 0 | 0 | 0 | 0 | 0 | 0 |
| THYMU2018721 | 100 | 0 | 0 | 0 | 0 | 0 | 0 |
| THYMU2018772 | 100 | 0 | 0 | 0 | 0 | 0 | 0 |
| THYMU2018819 | 100 | 0 | 0 | 0 | 0 | 0 | 0 |
| THYMU2018841 | 100 | 0 | 0 | 0 | 0 | 0 | 0 |
| THYMU2018997 | 100 | 0 | 0 | 0 | 0 | 0 | 0 |
| THYMU2019021 | 8.105 | 0 | 0 | 0 | 0 | 0 | 0 |
| THYMU2019054 | 100 | 0 | 0 | 0 | 0 | 0 | 0 |
| THYMU2019197 | 100 | 0 | 0 | 0 | 0 | 0 | 0 |
| THYMU2019210 | 100 | 0 | 0 | 0 | 0 | 0 | 0 |
| THYMU2019364 | 70.146 | 0 | 0 | 0 | 0 | 0 | 0 |
| THYMU2019436 | 100 | 0 | 0 | 0 | 0 | 0 | 0 |
| THYMU2019442 | 100 | 0 | 0 | 0 | 0 | 0 | 0 |
| THYMU2019587 | 100 | 0 | 0 | 0 | 0 | 0 | 0 |
| THYMU2019599 | 100 | 0 | 0 | 0 | 0 | 0 | 0 |
| THYMU2019686 | 100 | 0 | 0 | 0 | 0 | 0 | 0 |
| THYMU2019813 | 100 | 0 | 0 | 0 | 0 | 0 | 0 |
| THYMU2020198 | 100 | 0 | 0 | 0 | 0 | 0 | 0 |
| THYMU2020289 | 100 | 0 | 0 | 0 | 0 | 0 | 0 |
| THYMU2020416 | 11.429 | 0 | 0 | 0 | 0 | 0 | 0 |
| THYMU2020491 | 100 | 0 | 0 | 0 | 0 | 0 | 0 |
| THYMU2020499 | 100 | 0 | 0 | 0 | 0 | 0 | 0 |
| THYMU2020560 | 100 | 0 | 0 | 0 | 0 | 0 | 0 |
| THYMU2020667 | 58.303 | 0 | 0 | 0 | 0 | 0 | 0 |
| THYMU2020830 | 100 | 0 | 0 | 0 | 0 | 0 | 0 |
| THYMU2020883 | 42.920 | 0 | 0 | 0 | 0 | 0 | 0 |
| THYMU2020959 | 18.487 | 0 | 0 | 0 | 0 | 24.834 | 0 |
| THYMU2021361 | 100 | 0 | 0 | 0 | 0 | 0 | 0 |
| THYMU2021509 | 100 | 0 | 0 | 0 | 0 | 0 | 0 |
| THYMU2021597 | 100 | 0 | 0 | 0 | 0 | 0 | 0 |
| THYMU2021684 | 41.147 | 0 | 0 | 0 | 0 | 0 | 0 |
| THYMU2021714 | 100 | 0 | 0 | 0 | 0 | 0 | 0 |
| THYMU2022213 | 100 | 0 | 0 | 0 | 0 | 0 | 0 |
| THYMU2022289 | 100 | 0 | 0 | 0 | 0 | 0 | 0 |
| THYMU2022660 | 19.114 | 0 | 0 | 0 | 0 | 0 | 0 |
| THYMU2022854 | 100 | 0 | 0 | 0 | 0 | 0 | 0 |
| THYMU2022922 | 100 | 0 | 0 | 0 | 0 | 0 | 0 |
| THYMU2023209 | 100 | 0 | 0 | 0 | 0 | 0 | 0 |
| THYMU2023264 | 45.282 | 0 | 0 | 0 | 0 | 0 | 0 |
| THYMU2023576 | 26.584 | 0 | 0 | 0 | 0 | 0 | 0 |
| THYMU2023711 | 100 | 0 | 0 | 0 | 0 | 0 | 0 |
| THYMU2023900 | 100 | 0 | 0 | 0 | 0 | 0 | 0 |
| THYMU2023943 | 45.470 | 0 | 0 | 0 | 0 | 0 | 0 |
| THYMU2023967 | 25.472 | 0 | 0 | 0 | 0 | 0 | 0 |
| THYMU2024071 | 27.482 | 0 | 0 | 0 | 0 | 0 | 0 |
| THYMU2024121 | 48.944 | 0 | 0 | 0 | 0 | 0 | 0 |
| THYMU2024185 | 100 | 0 | 0 | 0 | 0 | 0 | 0 |
| THYMU2024207 | 100 | 0 | 0 | 0 | 0 | 0 | 0 |
| THYMU2024616 | 100 | 0 | 0 | 0 | 0 | 0 | 0 |
| THYMU2024684 | 100 | 0 | 0 | 0 | 0 | 0 | 0 |
| THYMU2024748 | 32.401 | 0 | 0 | 0 | 0 | 0 | 0 |
| THYMU2025042 | 100 | 0 | 0 | 0 | 0 | 0 | 0 |
| THYMU2025189 | 100 | 0 | 0 | 0 | 0 | 0 | 0 |
| THYMU2025319 | 27.551 | 0 | 0 | 0 | 0 | 0 | 0 |
| THYMU2025325 | 10.860 | 0 | 0 | 0 | 0 | 0 | 0 |
| THYMU2025406 | 100 | 0 | 0 | 0 | 0 | 0 | 0 |
| THYMU2025557 | 100 | 0 | 0 | 0 | 0 | 0 | 0 |
| THYMU2025572 | 100 | 0 | 0 | 0 | 0 | 0 | 0 |
| THYMU2025707 | 7.715 | 0 | 0 | 0 | 0 | 0 | 0 |
| THYMU2025849 | 100 | 0 | 0 | 0 | 0 | 0 | 0 |
| THYMU2025909 | 100 | 0 | 0 | 0 | 0 | 0 | 0 |
| THYMU2025939 | 26.596 | 0 | 0 | 0 | 0 | 53.592 | 0 |
| THYMU2026182 | 100 | 0 | 0 | 0 | 0 | 0 | 0 |
| THYMU2026350 | 40.164 | 0 | 0 | 0 | 0 | 0 | 0 |
| THYMU2026530 | 100 | 0 | 0 | 0 | 0 | 0 | 0 |
| THYMU2026531 | 100 | 0 | 0 | 0 | 0 | 0 | 0 |
| THYMU2026835 | 44.974 | 0 | 0 | 0 | 0 | 0 | 0 |
| THYMU2026904 | 100 | 0 | 0 | 0 | 0 | 0 | 0 |
| THYMU2027053 | 100 | 0 | 0 | 0 | 0 | 0 | 0 |
| THYMU2027125 | 0.299 | 0 | 0 | 0 | 0 | 0 | 0 |
| THYMU2027168 | 100 | 0 | 0 | 0 | 0 | 0 | 0 |
| THYMU2027249 | 100 | 0 | 0 | 0 | 0 | 0 | 0 |
| THYMU2027282 | 100 | 0 | 0 | 0 | 0 | 0 | 0 |
| THYMU2027497 | 100 | 0 | 0 | 0 | 0 | 0 | 0 |
| THYMU2027695 | 100 | 0 | 0 | 0 | 0 | 0 | 0 |
| THYMU2027734 | 100 | 0 | 0 | 0 | 0 | 0 | 0 |
| THYMU2027894 | 100 | 0 | 0 | 0 | 0 | 0 | 0 |
| THYMU2027975 | 3.333 | 0 | 0 | 0 | 0 | 0 | 0 |
| THYMU2027996 | 100 | 0 | 0 | 0 | 0 | 0 | 0 |
| THYMU2028041 | 100 | 0 | 0 | 0 | 0 | 0 | 0 |
| THYMU2028368 | 100 | 0 | 0 | 0 | 0 | 0 | 0 |
| THYMU2028379 | 100 | 0 | 0 | 0 | 0 | 0 | 0 |
| THYMU2028394 | 100 | 0 | 0 | 0 | 0 | 0 | 0 |
| THYMU2028412 | 100 | 0 | 0 | 0 | 0 | 0 | 0 |
| THYMU2028629 | 15.266 | 0 | 0 | 0 | 0 | 0 | 0 |
| THYMU2028632 | 100 | 0 | 0 | 0 | 0 | 0 | 0 |
| THYMU2028724 | 100 | 0 | 0 | 0 | 0 | 0 | 0 |
| THYMU2028739 | 56.056 | 0 | 0 | 0 | 0 | 0 | 0 |
| THYMU2028942 | 100 | 0 | 0 | 0 | 0 | 0 | 0 |
| THYMU2028978 | 100 | 0 | 0 | 0 | 0 | 0 | 0 |
| THYMU2029134 | 100 | 0 | 0 | 0 | 0 | 0 | 0 |
| THYMU2029578 | 22.934 | 0 | 0 | 0 | 0 | 0 | 0 |
| THYMU2029676 | 100 | 0 | 0 | 0 | 0 | 0 | 0 |
| THYMU2029688 | 100 | 0 | 0 | 0 | 0 | 0 | 0 |
| THYMU2029788 | 100 | 0 | 0 | 0 | 0 | 0 | 0 |
| THYMU2030068 | 100 | 0 | 0 | 0 | 0 | 0 | 0 |
| THYMU2030226 | 100 | 0 | 0 | 0 | 0 | 0 | 0 |
| THYMU2030264 | 54.019 | 0 | 0 | 0 | 0 | 0 | 0 |
| THYMU2030462 | 100 | 0 | 0 | 0 | 0 | 0 | 0 |
| THYMU2030543 | 100 | 0 | 0 | 0 | 0 | 0 | 0 |
| THYMU2030637 | 100 | 0 | 0 | 0 | 0 | 0 | 0 |
| THYMU2030655 | 18.385 | 81.615 | 0 | 0 | 0 | 0 | 0 |
| THYMU2030796 | 100 | 0 | 0 | 0 | 0 | 0 | 0 |
| THYMU2030912 | 100 | 0 | 0 | 0 | 0 | 0 | 0 |
| THYMU2030982 | 100 | 0 | 0 | 0 | 0 | 0 | 0 |
| THYMU2031046 | 100 | 0 | 0 | 0 | 0 | 0 | 0 |
| THYMU2031139 | 100 | 0 | 0 | 0 | 0 | 0 | 0 |
| THYMU2031218 | 100 | 0 | 0 | 0 | 0 | 0 | 0 |
| THYMU2031249 | 100 | 0 | 0 | 0 | 0 | 0 | 0 |
| THYMU2031258 | 100 | 0 | 0 | 0 | 0 | 0 | 0 |
| THYMU2031341 | 2.877 | 0 | 0 | 0 | 0 | 0 | 0 |
| THYMU2031368 | 3.784 | 0 | 0 | 0 | 0 | 0 | 0 |
| THYMU2031579 | 100 | 0 | 0 | 0 | 0 | 0 | 0 |
| THYMU2031847 | 30.924 | 0 | 0 | 0 | 0 | 0 | 0 |
| THYMU2031890 | 14.805 | 0 | 0 | 0 | 0 | 0 | 0 |
| THYMU2031994 | 100 | 0 | 0 | 0 | 0 | 0 | 0 |
| THYMU2032014 | 13.760 | 0 | 0 | 0 | 0 | 0 | 0 |
| THYMU2032035 | 100 | 0 | 0 | 0 | 0 | 0 | 0 |
| THYMU2032080 | 100 | 0 | 0 | 0 | 0 | 0 | 0 |
| THYMU2032150 | 100 | 0 | 0 | 0 | 0 | 0 | 0 |
| THYMU2032155 | 5.955 | 0 | 0 | 0 | 0 | 0 | 0 |
| THYMU2032358 | 100 | 0 | 0 | 0 | 0 | 0 | 0 |
| THYMU2032437 | 100 | 0 | 0 | 0 | 0 | 0 | 0 |
| THYMU2032601 | 100 | 0 | 0 | 0 | 0 | 0 | 0 |
| THYMU2032655 | 100 | 0 | 0 | 0 | 0 | 0 | 0 |
| THYMU2032696 | 0.876 | 0 | 0 | 0 | 0 | 0 | 0 |
| THYMU2032715 | 100 | 0 | 0 | 0 | 0 | 0 | 0 |
| THYMU2032732 | 100 | 0 | 0 | 0 | 0 | 0 | 0 |
| THYMU2032825 | 7.752 | 0 | 0 | 0 | 0 | 0 | 0 |
| THYMU2032976 | 100 | 0 | 0 | 0 | 0 | 0 | 0 |
| THYMU2033053 | 100 | 0 | 0 | 0 | 0 | 0 | 0 |
| THYMU2033059 | 18.523 | 0 | 0 | 0 | 0 | 0 | 0 |
| THYMU2033070 | 41.147 | 0 | 0 | 0 | 0 | 0 | 0 |
| THYMU2033079 | 100 | 0 | 0 | 0 | 0 | 0 | 0 |
| THYMU2033085 | 100 | 0 | 0 | 0 | 0 | 0 | 0 |
| THYMU2033104 | 100 | 0 | 0 | 0 | 0 | 0 | 0 |
| THYMU2033227 | 100 | 0 | 0 | 0 | 0 | 0 | 0 |
| THYMU2033263 | 9.276 | 0 | 0 | 0 | 0 | 0 | 0 |
| THYMU2033308 | 11.644 | 0 | 0 | 0 | 0 | 0 | 0 |
| THYMU2033401 | 100 | 0 | 0 | 0 | 0 | 0 | 0 |
| THYMU2033583 | 42.674 | 0 | 0 | 0 | 0 | 57.326 | 0 |
| THYMU2033755 | 100 | 0 | 0 | 0 | 0 | 0 | 0 |
| THYMU2033787 | 42.920 | 0 | 0 | 0 | 0 | 0 | 0 |
| THYMU2033816 | 100 | 0 | 0 | 0 | 0 | 0 | 0 |
| THYMU2034182 | 100 | 0 | 0 | 0 | 0 | 0 | 0 |
| THYMU2034279 | 100 | 0 | 0 | 0 | 0 | 0 | 0 |
| THYMU2034314 | 100 | 0 | 0 | 0 | 0 | 0 | 0 |
| THYMU2034338 | 100 | 0 | 0 | 0 | 0 | 0 | 0 |
| THYMU2034374 | 10.489 | 0 | 0 | 0 | 0 | 0 | 0 |
| THYMU2034647 | 32.401 | 0 | 0 | 0 | 0 | 0 | 0 |
| THYMU2034917 | 16.203 | 0 | 0 | 0 | 0 | 0 | 0 |
| THYMU2035064 | 100 | 0 | 0 | 0 | 0 | 0 | 0 |
| THYMU2035078 | 100 | 0 | 0 | 0 | 0 | 0 | 0 |
| THYMU2035101 | 100 | 0 | 0 | 0 | 0 | 0 | 0 |
| THYMU2035319 | 100 | 0 | 0 | 0 | 0 | 0 | 0 |
| THYMU2035321 | 100 | 0 | 0 | 0 | 0 | 0 | 0 |
| THYMU2035388 | 100 | 0 | 0 | 0 | 0 | 0 | 0 |
| THYMU2035400 | 100 | 0 | 0 | 0 | 0 | 0 | 0 |
| THYMU2035554 | 100 | 0 | 0 | 0 | 0 | 0 | 0 |
| THYMU2035710 | 100 | 0 | 0 | 0 | 0 | 0 | 0 |
| THYMU2035735 | 2.200 | 0 | 0 | 0 | 0 | 5.911 | 28.332 |
| THYMU2036058 | 56.056 | 0 | 0 | 0 | 0 | 0 | 0 |
| THYMU2036105 | 100 | 0 | 0 | 0 | 0 | 0 | 0 |
| THYMU2036207 | 100 | 0 | 0 | 0 | 0 | 0 | 0 |
| THYMU2036215 | 19.182 | 0 | 0 | 0 | 0 | 0 | 0 |
| THYMU2036252 | 100 | 0 | 0 | 0 | 0 | 0 | 0 |
| THYMU2036265 | 100 | 0 | 0 | 0 | 0 | 0 | 0 |
| THYMU2036366 | 100 | 0 | 0 | 0 | 0 | 0 | 0 |
| THYMU2036459 | 100 | 0 | 0 | 0 | 0 | 0 | 0 |
| THYMU2036461 | 12.647 | 0 | 0 | 0 | 0 | 0 | 0 |
| THYMU2036604 | 100 | 0 | 0 | 0 | 0 | 0 | 0 |
| THYMU2036653 | 100 | 0 | 0 | 0 | 0 | 0 | 0 |
| THYMU2037081 | 100 | 0 | 0 | 0 | 0 | 0 | 0 |
| THYMU2037208 | 100 | 0 | 0 | 0 | 0 | 0 | 0 |
| THYMU2037226 | 28.577 | 0 | 0 | 0 | 0 | 19.194 | 0 |
| THYMU2037233 | 100 | 0 | 0 | 0 | 0 | 0 | 0 |
| THYMU2037234 | 100 | 0 | 0 | 0 | 0 | 0 | 0 |
| THYMU2037348 | 100 | 0 | 0 | 0 | 0 | 0 | 0 |
| THYMU2037406 | 100 | 0 | 0 | 0 | 0 | 0 | 0 |
| THYMU2037965 | 100 | 0 | 0 | 0 | 0 | 0 | 0 |
| THYMU2038058 | 100 | 0 | 0 | 0 | 0 | 0 | 0 |
| THYMU2038189 | 100 | 0 | 0 | 0 | 0 | 0 | 0 |
| THYMU2038199 | 100 | 0 | 0 | 0 | 0 | 0 | 0 |
| THYMU2038220 | 16.844 | 0 | 0 | 0 | 0 | 0 | 0 |
| THYMU2038301 | 100 | 0 | 0 | 0 | 0 | 0 | 0 |
| THYMU2038369 | 100 | 0 | 0 | 0 | 0 | 0 | 0 |
| THYMU2038389 | 100 | 0 | 0 | 0 | 0 | 0 | 0 |
| THYMU2038615 | 100 | 0 | 0 | 0 | 0 | 0 | 0 |
| THYMU2038636 | 100 | 0 | 0 | 0 | 0 | 0 | 0 |
| THYMU2038739 | 100 | 0 | 0 | 0 | 0 | 0 | 0 |
| THYMU2038772 | 100 | 0 | 0 | 0 | 0 | 0 | 0 |
| THYMU2038797 | 100 | 0 | 0 | 0 | 0 | 0 | 0 |
| THYMU2038906 | 100 | 0 | 0 | 0 | 0 | 0 | 0 |
| THYMU2039305 | 100 | 0 | 0 | 0 | 0 | 0 | 0 |
| THYMU2039315 | 45.470 | 0 | 0 | 0 | 0 | 0 | 0 |
| THYMU2039334 | 0.947 | 0 | 0 | 0 | 0 | 0 | 0 |
| THYMU2039350 | 56.056 | 0 | 0 | 0 | 0 | 0 | 0 |
| THYMU2039411 | 100 | 0 | 0 | 0 | 0 | 0 | 0 |
| THYMU2039634 | 45.470 | 0 | 0 | 0 | 0 | 0 | 0 |
| THYMU2039719 | 100 | 0 | 0 | 0 | 0 | 0 | 0 |
| THYMU2039780 | 54.019 | 0 | 0 | 0 | 0 | 0 | 0 |
| THYMU2039788 | 100 | 0 | 0 | 0 | 0 | 0 | 0 |
| THYMU2039989 | 100 | 0 | 0 | 0 | 0 | 0 | 0 |
| THYMU2040029 | 100 | 0 | 0 | 0 | 0 | 0 | 0 |
| THYMU2040110 | 100 | 0 | 0 | 0 | 0 | 0 | 0 |
| THYMU2040114 | 26.657 | 0 | 0 | 0 | 0 | 0 | 0 |
| THYMU2040140 | 100 | 0 | 0 | 0 | 0 | 0 | 0 |
| THYMU2040412 | 100 | 0 | 0 | 0 | 0 | 0 | 0 |
| THYMU2040427 | 54.019 | 0 | 0 | 0 | 0 | 0 | 0 |
| THYMU2040824 | 100 | 0 | 0 | 0 | 0 | 0 | 0 |
| THYMU2040925 | 54.019 | 0 | 0 | 0 | 0 | 0 | 0 |
| THYMU2041007 | 100 | 0 | 0 | 0 | 0 | 0 | 0 |
| THYMU2041015 | 100 | 0 | 0 | 0 | 0 | 0 | 0 |
| THYMU2041252 | 100 | 0 | 0 | 0 | 0 | 0 | 0 |
| THYMU3000028 | 100 | 0 | 0 | 0 | 0 | 0 | 0 |
| THYMU3000036 | 100 | 0 | 0 | 0 | 0 | 0 | 0 |
| THYMU3000037 | 100 | 0 | 0 | 0 | 0 | 0 | 0 |
| THYMU3000082 | 100 | 0 | 0 | 0 | 0 | 0 | 0 |
| THYMU3000194 | 100 | 0 | 0 | 0 | 0 | 0 | 0 |
| THYMU3000224 | 100 | 0 | 0 | 0 | 0 | 0 | 0 |
| THYMU3000269 | 100 | 0 | 0 | 0 | 0 | 0 | 0 |
| THYMU3000306 | 100 | 0 | 0 | 0 | 0 | 0 | 0 |
| THYMU3000360 | 32.782 | 0 | 0 | 0 | 0 | 0 | 0 |
| THYMU3000390 | 100 | 0 | 0 | 0 | 0 | 0 | 0 |
| THYMU3000420 | 32.782 | 0 | 0 | 0 | 0 | 0 | 0 |
| THYMU3000490 | 100 | 0 | 0 | 0 | 0 | 0 | 0 |
| THYMU3000504 | 100 | 0 | 0 | 0 | 0 | 0 | 0 |
| THYMU3000542 | 100 | 0 | 0 | 0 | 0 | 0 | 0 |
| THYMU3000655 | 42.674 | 0 | 0 | 0 | 0 | 57.326 | 0 |
| THYMU3000776 | 52.046 | 0 | 0 | 0 | 0 | 0 | 0 |
| THYMU3000826 | 100 | 0 | 0 | 0 | 0 | 0 | 0 |
| THYMU3000841 | 100 | 0 | 0 | 0 | 0 | 0 | 0 |
| THYMU3001077 | 25.065 | 0 | 0 | 0 | 0 | 0 | 0 |
| THYMU3001082 | 100 | 0 | 0 | 0 | 0 | 0 | 0 |
| THYMU3001083 | 54.019 | 0 | 0 | 0 | 0 | 0 | 0 |
| THYMU3001133 | 100 | 0 | 0 | 0 | 0 | 0 | 0 |
| THYMU3001151 | 100 | 0 | 0 | 0 | 0 | 0 | 0 |
| THYMU3001379 | 21.000 | 0 | 0 | 0 | 0 | 0 | 0 |
| THYMU3001472 | 42.153 | 0 | 0 | 0 | 0 | 37.750 | 0 |
| THYMU3001593 | 100 | 0 | 0 | 0 | 0 | 0 | 0 |
| THYMU3001883 | 100 | 0 | 0 | 0 | 0 | 0 | 0 |
| THYMU3001939 | 40.164 | 0 | 0 | 0 | 0 | 0 | 0 |
| THYMU3001991 | 100 | 0 | 0 | 0 | 0 | 0 | 0 |
| THYMU3002452 | 100 | 0 | 0 | 0 | 0 | 0 | 0 |
| THYMU3002578 | 25.509 | 0 | 0 | 0 | 0 | 0 | 0 |
| THYMU3002661 | 100 | 0 | 0 | 0 | 0 | 0 | 0 |
| THYMU3003007 | 47.545 | 0 | 0 | 0 | 0 | 0 | 0 |
| THYMU3003092 | 100 | 0 | 0 | 0 | 0 | 0 | 0 |
| THYMU3003212 | 100 | 0 | 0 | 0 | 0 | 0 | 0 |
| THYMU3003309 | 24.243 | 0 | 0 | 0 | 0 | 0 | 0 |
| THYMU3003350 | 45.470 | 0 | 0 | 0 | 0 | 0 | 0 |
| THYMU3003403 | 100 | 0 | 0 | 0 | 0 | 0 | 0 |
| THYMU3003565 | 48.944 | 0 | 0 | 0 | 0 | 0 | 0 |
| THYMU3003763 | 100 | 0 | 0 | 0 | 0 | 0 | 0 |
| THYMU3003865 | 17.533 | 0 | 0 | 0 | 0 | 0 | 0 |
| THYMU3003958 | 100 | 0 | 0 | 0 | 0 | 0 | 0 |
| THYMU3003965 | 44.974 | 0 | 0 | 0 | 0 | 0 | 0 |
| THYMU3004157 | 100 | 0 | 0 | 0 | 0 | 0 | 0 |
| THYMU3004628 | 100 | 0 | 0 | 0 | 0 | 0 | 0 |
| THYMU3004632 | 100 | 0 | 0 | 0 | 0 | 0 | 0 |
| THYMU3004835 | 16.380 | 0 | 0 | 0 | 0 | 22.003 | 0 |
| THYMU3004866 | 100 | 0 | 0 | 0 | 0 | 0 | 0 |
| THYMU3005050 | 100 | 0 | 0 | 0 | 0 | 0 | 0 |
| THYMU3005378 | 100 | 0 | 0 | 0 | 0 | 0 | 0 |
| THYMU3005407 | 100 | 0 | 0 | 0 | 0 | 0 | 0 |
| THYMU3005415 | 100 | 0 | 0 | 0 | 0 | 0 | 0 |
| THYMU3005427 | 19.680 | 0 | 0 | 0 | 0 | 0 | 0 |
| THYMU3005482 | 100 | 0 | 0 | 0 | 0 | 0 | 0 |
| THYMU3005491 | 42.920 | 0 | 0 | 0 | 0 | 0 | 0 |
| THYMU3005629 | 12.599 | 0 | 0 | 0 | 0 | 0 | 0 |
| THYMU3005696 | 100 | 0 | 0 | 0 | 0 | 0 | 0 |
| THYMU3006118 | 100 | 0 | 0 | 0 | 0 | 0 | 0 |
| THYMU3006132 | 100 | 0 | 0 | 0 | 0 | 0 | 0 |
| THYMU3006168 | 100 | 0 | 0 | 0 | 0 | 0 | 0 |
| THYMU3006172 | 42.674 | 0 | 0 | 0 | 0 | 57.326 | 0 |
| THYMU3006371 | 100 | 0 | 0 | 0 | 0 | 0 | 0 |
| THYMU3006485 | 54.019 | 0 | 0 | 0 | 0 | 0 | 0 |
| THYMU3006640 | 100 | 0 | 0 | 0 | 0 | 0 | 0 |
| THYMU3006767 | 42.674 | 0 | 0 | 0 | 0 | 57.326 | 0 |
| THYMU3006811 | 42.674 | 0 | 0 | 0 | 0 | 57.326 | 0 |
| THYMU3006963 | 100 | 0 | 0 | 0 | 0 | 0 | 0 |
| THYMU3007137 | 62.044 | 0 | 0 | 0 | 0 | 0 | 0 |
| THYMU3007308 | 32.523 | 0 | 0 | 0 | 0 | 0 | 0 |
| THYMU3007368 | 100 | 0 | 0 | 0 | 0 | 0 | 0 |
| THYMU3007423 | 24.596 | 0 | 0 | 0 | 0 | 11.014 | 0 |
| THYMU3007559 | 100 | 0 | 0 | 0 | 0 | 0 | 0 |
| THYMU3007845 | 100 | 0 | 0 | 0 | 0 | 0 | 0 |
| THYMU3008060 | 100 | 0 | 0 | 0 | 0 | 0 | 0 |
| THYMU3008105 | 33.774 | 0 | 0 | 0 | 0 | 0 | 0 |
| THYMU3008136 | 100 | 0 | 0 | 0 | 0 | 0 | 0 |
| THYMU3008171 | 33.638 | 0 | 0 | 0 | 0 | 11.297 | 0 |
| THYMU3008216 | 100 | 0 | 0 | 0 | 0 | 0 | 0 |
| THYMU3008436 | 100 | 0 | 0 | 0 | 0 | 0 | 0 |
| THYMU3008672 | 100 | 0 | 0 | 0 | 0 | 0 | 0 |
| THYMU3008883 | 20.284 | 0 | 0 | 0 | 0 | 27.248 | 0 |
| THYMU3008935 | 100 | 0 | 0 | 0 | 0 | 0 | 0 |
| THYMU3009006 | 46.409 | 0 | 0 | 0 | 0 | 0 | 0 |
| THYMU3009255 | 100 | 0 | 0 | 0 | 0 | 0 | 0 |
| THYMU3009391 | 100 | 0 | 0 | 0 | 0 | 0 | 0 |
| THYMU3009643 | 20.327 | 0 | 0 | 0 | 0 | 0 | 0 |
| THYMU3009755 | 100 | 0 | 0 | 0 | 0 | 0 | 0 |
| THYMU3010247 | 100 | 0 | 0 | 0 | 0 | 0 | 0 |
| THYMU3011012 | 100 | 0 | 0 | 0 | 0 | 0 | 0 |
| THYMU3011081 | 100 | 0 | 0 | 0 | 0 | 0 | 0 |
| THYMU3011244 | 100 | 0 | 0 | 0 | 0 | 0 | 0 |
| THYMU3011360 | 100 | 0 | 0 | 0 | 0 | 0 | 0 |
| THYMU3011534 | 100 | 0 | 0 | 0 | 0 | 0 | 0 |
| THYMU3011543 | 100 | 0 | 0 | 0 | 0 | 0 | 0 |
| THYMU3011556 | 100 | 0 | 0 | 0 | 0 | 0 | 0 |
| THYMU3011717 | 100 | 0 | 0 | 0 | 0 | 0 | 0 |
| THYMU3011827 | 19.368 | 0 | 0 | 0 | 0 | 26.018 | 0 |
| THYMU3012402 | 100 | 0 | 0 | 0 | 0 | 0 | 0 |
| THYMU3012907 | 100 | 0 | 0 | 0 | 0 | 0 | 0 |
| THYMU3012983 | 56.056 | 0 | 0 | 0 | 0 | 0 | 0 |
| THYMU3013114 | 100 | 0 | 0 | 0 | 0 | 0 | 0 |
| THYMU3013197 | 100 | 0 | 0 | 0 | 0 | 0 | 0 |
| THYMU3013241 | 100 | 0 | 0 | 0 | 0 | 0 | 0 |
| THYMU3013386 | 3.121 | 0 | 0 | 0 | 0 | 0 | 0 |
| THYMU3013470 | 100 | 0 | 0 | 0 | 0 | 0 | 0 |
| THYMU3013785 | 100 | 0 | 0 | 0 | 0 | 0 | 0 |
| THYMU3013897 | 100 | 0 | 0 | 0 | 0 | 0 | 0 |
| THYMU3014038 | 100 | 0 | 0 | 0 | 0 | 0 | 0 |
| THYMU3014173 | 100 | 0 | 0 | 0 | 0 | 0 | 0 |
| THYMU3014372 | 100 | 0 | 0 | 0 | 0 | 0 | 0 |
| THYMU3014555 | 100 | 0 | 0 | 0 | 0 | 0 | 0 |
| THYMU3014620 | 100 | 0 | 0 | 0 | 0 | 0 | 0 |
| THYMU3014701 | 100 | 0 | 0 | 0 | 0 | 0 | 0 |
| THYMU3015042 | 100 | 0 | 0 | 0 | 0 | 0 | 0 |
| THYMU3015457 | 100 | 0 | 0 | 0 | 0 | 0 | 0 |
| THYMU3015571 | 26.275 | 0 | 0 | 0 | 0 | 0 | 0 |
| THYMU3015592 | 100 | 0 | 0 | 0 | 0 | 0 | 0 |
| THYMU3015625 | 100 | 0 | 0 | 0 | 0 | 0 | 0 |
| THYMU3015647 | 100 | 0 | 0 | 0 | 0 | 0 | 0 |
| THYMU3015759 | 8.449 | 0 | 0 | 23.299 | 0 | 1.261 | 0 |
| THYMU3015962 | 100 | 0 | 0 | 0 | 0 | 0 | 0 |
| THYMU3016022 | 100 | 0 | 0 | 0 | 0 | 0 | 0 |
| THYMU3016518 | 100 | 0 | 0 | 0 | 0 | 0 | 0 |
| THYMU3016797 | 100 | 0 | 0 | 0 | 0 | 0 | 0 |
| THYMU3016822 | 100 | 0 | 0 | 0 | 0 | 0 | 0 |
| THYMU3016850 | 100 | 0 | 0 | 0 | 0 | 0 | 0 |
| THYMU3017562 | 100 | 0 | 0 | 0 | 0 | 0 | 0 |
| THYMU3017688 | 100 | 0 | 0 | 0 | 0 | 0 | 0 |
| THYMU3017689 | 100 | 0 | 0 | 0 | 0 | 0 | 0 |
| THYMU3017761 | 100 | 0 | 0 | 0 | 0 | 0 | 0 |
| THYMU3018151 | 100 | 0 | 0 | 0 | 0 | 0 | 0 |
| THYMU3018896 | 100 | 0 | 0 | 0 | 0 | 0 | 0 |
| THYMU3019095 | 100 | 0 | 0 | 0 | 0 | 0 | 0 |
| THYMU3019476 | 45.282 | 0 | 0 | 0 | 0 | 0 | 0 |
| THYMU3019605 | 100 | 0 | 0 | 0 | 0 | 0 | 0 |
| THYMU3019916 | 100 | 0 | 0 | 0 | 0 | 0 | 0 |
| THYMU3020221 | 100 | 0 | 0 | 0 | 0 | 0 | 0 |
| THYMU3020595 | 100 | 0 | 0 | 0 | 0 | 0 | 0 |
| THYMU3020713 | 100 | 0 | 0 | 0 | 0 | 0 | 0 |
| THYMU3020856 | 100 | 0 | 0 | 0 | 0 | 0 | 0 |
| THYMU3020869 | 100 | 0 | 0 | 0 | 0 | 0 | 0 |
| THYMU3020970 | 100 | 0 | 0 | 0 | 0 | 0 | 0 |
| THYMU3021404 | 100 | 0 | 0 | 0 | 0 | 0 | 0 |
| THYMU3021586 | 13.776 | 0 | 0 | 0 | 0 | 4.626 | 0 |
| THYMU3021755 | 100 | 0 | 0 | 0 | 0 | 0 | 0 |
| THYMU3021900 | 100 | 0 | 0 | 0 | 0 | 0 | 0 |
| THYMU3022211 | 100 | 0 | 0 | 0 | 0 | 0 | 0 |
| THYMU3022434 | 100 | 0 | 0 | 0 | 0 | 0 | 0 |
| THYMU3022528 | 100 | 0 | 0 | 0 | 0 | 0 | 0 |
| THYMU3022668 | 100 | 0 | 0 | 0 | 0 | 0 | 0 |
| THYMU3022982 | 100 | 0 | 0 | 0 | 0 | 0 | 0 |
| THYMU3023107 | 100 | 0 | 0 | 0 | 0 | 0 | 0 |
| THYMU3023211 | 100 | 0 | 0 | 0 | 0 | 0 | 0 |
| THYMU3023216 | 100 | 0 | 0 | 0 | 0 | 0 | 0 |
| THYMU3023394 | 100 | 0 | 0 | 0 | 0 | 0 | 0 |
| THYMU3023400 | 100 | 0 | 0 | 0 | 0 | 0 | 0 |
| THYMU3023797 | 100 | 0 | 0 | 0 | 0 | 0 | 0 |
| THYMU3024164 | 100 | 0 | 0 | 0 | 0 | 0 | 0 |
| THYMU3024339 | 48.376 | 0 | 0 | 0 | 0 | 0 | 0 |
| THYMU3024602 | 100 | 0 | 0 | 0 | 0 | 0 | 0 |
| THYMU3024879 | 100 | 0 | 0 | 0 | 0 | 0 | 0 |
| THYMU3025118 | 100 | 0 | 0 | 0 | 0 | 0 | 0 |
| THYMU3025313 | 100 | 0 | 0 | 0 | 0 | 0 | 0 |
| THYMU3025642 | 31.905 | 0 | 0 | 0 | 0 | 0 | 0 |
| THYMU3025683 | 100 | 0 | 0 | 0 | 0 | 0 | 0 |
| THYMU3025772 | 100 | 0 | 0 | 0 | 0 | 0 | 0 |
| THYMU3025865 | 100 | 0 | 0 | 0 | 0 | 0 | 0 |
| THYMU3026000 | 20.457 | 0 | 0 | 0 | 0 | 0 | 0 |
| THYMU3026350 | 23.834 | 0 | 0 | 0 | 0 | 0 | 0 |
| THYMU3026479 | 100 | 0 | 0 | 0 | 0 | 0 | 0 |
| THYMU3026532 | 100 | 0 | 0 | 0 | 0 | 0 | 0 |
| THYMU3026783 | 100 | 0 | 0 | 0 | 0 | 0 | 0 |
| THYMU3026869 | 100 | 0 | 0 | 0 | 0 | 0 | 0 |
| THYMU3027251 | 100 | 0 | 0 | 0 | 0 | 0 | 0 |
| THYMU3027540 | 100 | 0 | 0 | 0 | 0 | 0 | 0 |
| THYMU3027655 | 100 | 0 | 0 | 0 | 0 | 0 | 0 |
| THYMU3027671 | 100 | 0 | 0 | 0 | 0 | 0 | 0 |
| THYMU3028075 | 100 | 0 | 0 | 0 | 0 | 0 | 0 |
| THYMU3028410 | 41.147 | 0 | 0 | 0 | 0 | 0 | 0 |
| THYMU3028461 | 100 | 0 | 0 | 0 | 0 | 0 | 0 |
| THYMU3028702 | 100 | 0 | 0 | 0 | 0 | 0 | 0 |
| THYMU3029188 | 100 | 0 | 0 | 0 | 0 | 0 | 0 |
| THYMU3029318 | 100 | 0 | 0 | 0 | 0 | 0 | 0 |
| THYMU3029421 | 100 | 0 | 0 | 0 | 0 | 0 | 0 |
| THYMU3029719 | 100 | 0 | 0 | 0 | 0 | 0 | 0 |
| THYMU3029774 | 100 | 0 | 0 | 0 | 0 | 0 | 0 |
| THYMU3029832 | 100 | 0 | 0 | 0 | 0 | 0 | 0 |
| THYMU3030072 | 100 | 0 | 0 | 0 | 0 | 0 | 0 |
| THYMU3030231 | 100 | 0 | 0 | 0 | 0 | 0 | 0 |
| THYMU3030706 | 100 | 0 | 0 | 0 | 0 | 0 | 0 |
| THYMU3030710 | 100 | 0 | 0 | 0 | 0 | 0 | 0 |
| THYMU3030752 | 100 | 0 | 0 | 0 | 0 | 0 | 0 |
| THYMU3031146 | 100 | 0 | 0 | 0 | 0 | 0 | 0 |
| THYMU3031402 | 100 | 0 | 0 | 0 | 0 | 0 | 0 |
| THYMU3031610 | 100 | 0 | 0 | 0 | 0 | 0 | 0 |
| THYMU3031612 | 100 | 0 | 0 | 0 | 0 | 0 | 0 |
| THYMU3031868 | 100 | 0 | 0 | 0 | 0 | 0 | 0 |
| THYMU3031878 | 100 | 0 | 0 | 0 | 0 | 0 | 0 |
| THYMU3032032 | 100 | 0 | 0 | 0 | 0 | 0 | 0 |
| THYMU3032798 | 17.736 | 0 | 0 | 0 | 0 | 2.166 | 0 |
| THYMU3032867 | 10.732 | 0 | 0 | 0 | 0 | 0 | 0 |
| THYMU3033402 | 100 | 0 | 0 | 0 | 0 | 0 | 0 |
| THYMU3033626 | 9.374 | 0 | 0 | 0 | 0 | 0 | 0 |
| THYMU3033630 | 100 | 0 | 0 | 0 | 0 | 0 | 0 |
| THYMU3033649 | 100 | 0 | 0 | 0 | 0 | 0 | 0 |
| THYMU3033754 | 100 | 0 | 0 | 0 | 0 | 0 | 0 |
| THYMU3033759 | 100 | 0 | 0 | 0 | 0 | 0 | 0 |
| THYMU3034078 | 100 | 0 | 0 | 0 | 0 | 0 | 0 |
| THYMU3034099 | 100 | 0 | 0 | 0 | 0 | 0 | 0 |
| THYMU3034453 | 100 | 0 | 0 | 0 | 0 | 0 | 0 |
| THYMU3034616 | 41.147 | 0 | 0 | 0 | 0 | 0 | 0 |
| THYMU3034671 | 9.943 | 0 | 0 | 0 | 0 | 5.343 | 0 |
| THYMU3034853 | 100 | 0 | 0 | 0 | 0 | 0 | 0 |
| THYMU3034867 | 100 | 0 | 0 | 0 | 0 | 0 | 0 |
| THYMU3034983 | 100 | 0 | 0 | 0 | 0 | 0 | 0 |
| THYMU3036200 | 100 | 0 | 0 | 0 | 0 | 0 | 0 |
| THYMU3036310 | 100 | 0 | 0 | 0 | 0 | 0 | 0 |
| THYMU3036934 | 100 | 0 | 0 | 0 | 0 | 0 | 0 |
| THYMU3036953 | 100 | 0 | 0 | 0 | 0 | 0 | 0 |
| THYMU3037052 | 100 | 0 | 0 | 0 | 0 | 0 | 0 |
| THYMU3037192 | 100 | 0 | 0 | 0 | 0 | 0 | 0 |
| THYMU3037617 | 100 | 0 | 0 | 0 | 0 | 0 | 0 |
| THYMU3037772 | 100 | 0 | 0 | 0 | 0 | 0 | 0 |
| THYMU3037827 | 45.470 | 0 | 0 | 0 | 0 | 0 | 0 |
| THYMU3037836 | 100 | 0 | 0 | 0 | 0 | 0 | 0 |
| THYMU3037856 | 100 | 0 | 0 | 0 | 0 | 0 | 0 |
| THYMU3037867 | 100 | 0 | 0 | 0 | 0 | 0 | 0 |
| THYMU3037909 | 100 | 0 | 0 | 0 | 0 | 0 | 0 |
| THYMU3037980 | 100 | 0 | 0 | 0 | 0 | 0 | 0 |
| THYMU3038158 | 5.135 | 0 | 0 | 0 | 0 | 0 | 0 |
| THYMU3038167 | 100 | 0 | 0 | 0 | 0 | 0 | 0 |
| THYMU3038214 | 32.782 | 0 | 0 | 0 | 0 | 0 | 0 |
| THYMU3038266 | 100 | 0 | 0 | 0 | 0 | 0 | 0 |
| THYMU3038328 | 100 | 0 | 0 | 0 | 0 | 0 | 0 |
| THYMU3038347 | 100 | 0 | 0 | 0 | 0 | 0 | 0 |
| THYMU3038375 | 100 | 0 | 0 | 0 | 0 | 0 | 0 |
| THYMU3038603 | 100 | 0 | 0 | 0 | 0 | 0 | 0 |
| THYMU3038687 | 100 | 0 | 0 | 0 | 0 | 0 | 0 |
| THYMU3038759 | 100 | 0 | 0 | 0 | 0 | 0 | 0 |
| THYMU3038879 | 100 | 0 | 0 | 0 | 0 | 0 | 0 |
| THYMU3038970 | 100 | 0 | 0 | 0 | 0 | 0 | 0 |
| THYMU3039807 | 100 | 0 | 0 | 0 | 0 | 0 | 0 |
| THYMU3039846 | 100 | 0 | 0 | 0 | 0 | 0 | 0 |
| THYMU3040068 | 32.401 | 0 | 0 | 0 | 0 | 0 | 0 |
| THYMU3040126 | 100 | 0 | 0 | 0 | 0 | 0 | 0 |
| THYMU3040146 | 100 | 0 | 0 | 0 | 0 | 0 | 0 |
| THYMU3040168 | 100 | 0 | 0 | 0 | 0 | 0 | 0 |
| THYMU3040172 | 100 | 0 | 0 | 0 | 0 | 0 | 0 |
| THYMU3040725 | 100 | 0 | 0 | 0 | 0 | 0 | 0 |
| THYMU3040746 | 100 | 0 | 0 | 0 | 0 | 0 | 0 |
| THYMU3040816 | 9.663 | 0 | 0 | 0 | 0 | 0 | 0 |
| THYMU3040829 | 100 | 0 | 0 | 0 | 0 | 0 | 0 |
| THYMU3040830 | 100 | 0 | 0 | 0 | 0 | 0 | 0 |
| THYMU3040986 | 100 | 0 | 0 | 0 | 0 | 0 | 0 |
| THYMU3041354 | 100 | 0 | 0 | 0 | 0 | 0 | 0 |
| THYMU3041386 | 100 | 0 | 0 | 0 | 0 | 0 | 0 |
| THYMU3041428 | 0.213 | 0 | 0 | 0 | 0 | 0 | 0 |
| THYMU3041573 | 100 | 0 | 0 | 0 | 0 | 0 | 0 |
| THYMU3041603 | 100 | 0 | 0 | 0 | 0 | 0 | 0 |
| THYMU3041736 | 100 | 0 | 0 | 0 | 0 | 0 | 0 |
| THYMU3041918 | 100 | 0 | 0 | 0 | 0 | 0 | 0 |
| THYMU3042075 | 100 | 0 | 0 | 0 | 0 | 0 | 0 |
| THYMU3042321 | 100 | 0 | 0 | 0 | 0 | 0 | 0 |
| THYMU3042372 | 100 | 0 | 0 | 0 | 0 | 0 | 0 |
| THYMU3042758 | 100 | 0 | 0 | 0 | 0 | 0 | 0 |
| THYMU3042929 | 100 | 0 | 0 | 0 | 0 | 0 | 0 |
| THYMU3043200 | 100 | 0 | 0 | 0 | 0 | 0 | 0 |
| THYMU3043327 | 100 | 0 | 0 | 0 | 0 | 0 | 0 |
| THYMU3043482 | 100 | 0 | 0 | 0 | 0 | 0 | 0 |
| THYMU3043597 | 100 | 0 | 0 | 0 | 0 | 0 | 0 |
| THYMU3043688 | 100 | 0 | 0 | 0 | 0 | 0 | 0 |
| THYMU3043779 | 100 | 0 | 0 | 0 | 0 | 0 | 0 |
| THYMU3043883 | 100 | 0 | 0 | 0 | 0 | 0 | 0 |
| THYMU3043993 | 100 | 0 | 0 | 0 | 0 | 0 | 0 |
| THYMU3044175 | 100 | 0 | 0 | 0 | 0 | 0 | 0 |
| THYMU3044188 | 3.732 | 0 | 0 | 0 | 0 | 0 | 0 |
| THYMU3044441 | 100 | 0 | 0 | 0 | 0 | 0 | 0 |
| THYMU3044445 | 100 | 0 | 0 | 0 | 0 | 0 | 0 |
| THYMU3045510 | 58.982 | 0 | 0 | 0 | 0 | 0 | 0 |
| THYMU3045673 | 100 | 0 | 0 | 0 | 0 | 0 | 0 |
| THYMU3045692 | 100 | 0 | 0 | 0 | 0 | 0 | 0 |
| THYMU3045704 | 100 | 0 | 0 | 0 | 0 | 0 | 0 |
| THYMU3046140 | 100 | 0 | 0 | 0 | 0 | 0 | 0 |
| THYMU3046350 | 5.760 | 0 | 47.489 | 0 | 0 | 0 | 0 |
| THYMU3046360 | 100 | 0 | 0 | 0 | 0 | 0 | 0 |
| THYMU3046856 | 100 | 0 | 0 | 0 | 0 | 0 | 0 |
| THYMU3047115 | 0.343 | 0 | 0 | 0 | 0 | 0 | 0 |
| THYMU3047144 | 100 | 0 | 0 | 0 | 0 | 0 | 0 |
| THYMU3047156 | 100 | 0 | 0 | 0 | 0 | 0 | 0 |
| THYMU3047366 | 100 | 0 | 0 | 0 | 0 | 0 | 0 |
| THYMU3047513 | 100 | 0 | 0 | 0 | 0 | 0 | 0 |
| THYMU3047542 | 100 | 0 | 0 | 0 | 0 | 0 | 0 |
| THYMU3047760 | 100 | 0 | 0 | 0 | 0 | 0 | 0 |
| THYMU3047891 | 100 | 0 | 0 | 0 | 0 | 0 | 0 |
| TKIDN1000001 | 0 | 41.198 | 0 | 0 | 0 | 0 | 0 |
| TKIDN1000044 | 0 | 34.663 | 0 | 0 | 0 | 0 | 0 |
| TKIDN1000062 | 0 | 100 | 0 | 0 | 0 | 0 | 0 |
| TKIDN1000066 | 0 | 35.464 | 0 | 0 | 0 | 0 | 0 |
| TKIDN1000164 | 0 | 22.887 | 0 | 0 | 0 | 0 | 0 |
| TKIDN1000171 | 0 | 100 | 0 | 0 | 0 | 0 | 0 |
| TKIDN1000192 | 0 | 20.450 | 0 | 0 | 0 | 12.377 | 0 |
| TKIDN2000127 | 0 | 67.072 | 0 | 0 | 0 | 0 | 0 |
| TKIDN2000240 | 0 | 100 | 0 | 0 | 0 | 0 | 0 |
| TKIDN2000246 | 0 | 7.882 | 0 | 0 | 0 | 0 | 0 |
| TKIDN2000319 | 0 | 78.393 | 0 | 0 | 0 | 0 | 0 |
| TKIDN2000464 | 0 | 68.029 | 0 | 0 | 0 | 0 | 0 |
| TKIDN2000521 | 0 | 55.069 | 0 | 0 | 0 | 0 | 0 |
| TKIDN2000701 | 0 | 84.991 | 0 | 0 | 0 | 0 | 0 |
| TKIDN2001529 | 0 | 74.873 | 0 | 0 | 0 | 0 | 0 |
| TKIDN2001662 | 18.188 | 40.370 | 0 | 0 | 0 | 0 | 0 |
| TKIDN2002318 | 0 | 39.706 | 0 | 0 | 0 | 0 | 0 |
| TKIDN2002329 | 0 | 100 | 0 | 0 | 0 | 0 | 0 |
| TKIDN2002424 | 0 | 100 | 0 | 0 | 0 | 0 | 0 |
| TKIDN2002632 | 0 | 100 | 0 | 0 | 0 | 0 | 0 |
| TKIDN2002738 | 0 | 1.552 | 0 | 0 | 0 | 0 | 0 |
| TKIDN2003044 | 0 | 100 | 0 | 0 | 0 | 0 | 0 |
| TKIDN2003059 | 0 | 78.393 | 0 | 0 | 0 | 0 | 0 |
| TKIDN2003062 | 0 | 100 | 0 | 0 | 0 | 0 | 0 |
| TKIDN2003078 | 0 | 51.264 | 0 | 0 | 0 | 0 | 0 |
| TKIDN2003366 | 0 | 100 | 0 | 0 | 0 | 0 | 0 |
| TKIDN2003396 | 0 | 100 | 0 | 0 | 0 | 0 | 0 |
| TKIDN2003413 | 0 | 100 | 0 | 0 | 0 | 0 | 0 |
| TKIDN2003597 | 0 | 28.918 | 0 | 0 | 0 | 0 | 0 |
| TKIDN2003601 | 15.897 | 70.571 | 0 | 0 | 0 | 0 | 0 |
| TKIDN2004185 | 0 | 14.684 | 0 | 0 | 0 | 0 | 0 |
| TKIDN2004386 | 0 | 100 | 0 | 0 | 0 | 0 | 0 |
| TKIDN2004458 | 0 | 100 | 0 | 0 | 0 | 0 | 0 |
| TKIDN2004748 | 0 | 35.796 | 0 | 0 | 0 | 0 | 0 |
| TKIDN2005487 | 0 | 2.659 | 0 | 0 | 0 | 0 | 0 |
| TKIDN2005721 | 0 | 100 | 0 | 0 | 0 | 0 | 0 |
| TKIDN2005934 | 0 | 100 | 0 | 0 | 0 | 0 | 0 |
| TKIDN2005947 | 0 | 100 | 0 | 0 | 0 | 0 | 0 |
| TKIDN2005956 | 0 | 100 | 0 | 0 | 0 | 0 | 0 |
| TKIDN2006525 | 0 | 100 | 0 | 0 | 0 | 0 | 0 |
| TKIDN2006761 | 0 | 78.604 | 0 | 0 | 0 | 0 | 0 |
| TKIDN2006852 | 0 | 100 | 0 | 0 | 0 | 0 | 0 |
| TKIDN2007605 | 10.416 | 46.241 | 0 | 0 | 0 | 0 | 0 |
| TKIDN2007667 | 0 | 100 | 0 | 0 | 0 | 0 | 0 |
| TKIDN2007828 | 0 | 24.698 | 0 | 0 | 0 | 0 | 0 |
| TKIDN2008176 | 0 | 78.604 | 0 | 0 | 0 | 0 | 0 |
| TKIDN2008778 | 0 | 100 | 0 | 0 | 0 | 0 | 0 |
| TKIDN2009092 | 0 | 100 | 0 | 0 | 0 | 0 | 0 |
| TKIDN2009330 | 0 | 76.948 | 0 | 0 | 0 | 0 | 0 |
| TKIDN2009481 | 0 | 100 | 0 | 0 | 0 | 0 | 0 |
| TKIDN2009641 | 0 | 21.402 | 0 | 0 | 0 | 0 | 0 |
| TKIDN2009794 | 0 | 53.409 | 0 | 0 | 0 | 16.162 | 0 |
| TKIDN2009889 | 0 | 64.923 | 0 | 0 | 0 | 0 | 0 |
| TKIDN2010200 | 0 | 100 | 0 | 0 | 0 | 0 | 0 |
| TKIDN2010232 | 0 | 100 | 0 | 0 | 0 | 0 | 0 |
| TKIDN2010278 | 0 | 100 | 0 | 0 | 0 | 0 | 0 |
| TKIDN2010602 | 0 | 100 | 0 | 0 | 0 | 0 | 0 |
| TKIDN2010812 | 0 | 39.464 | 0 | 0 | 0 | 0 | 0 |
| TKIDN2010934 | 0 | 74.873 | 0 | 0 | 0 | 0 | 0 |
| TKIDN2011051 | 0 | 100 | 0 | 0 | 0 | 0 | 0 |
| TKIDN2011160 | 0 | 100 | 0 | 0 | 0 | 0 | 0 |
| TKIDN2011289 | 0 | 22.129 | 0 | 0 | 0 | 0 | 0 |
| TKIDN2011324 | 0 | 100 | 0 | 0 | 0 | 0 | 0 |
| TKIDN2012034 | 0 | 100 | 0 | 0 | 0 | 0 | 0 |
| TKIDN2012771 | 0 | 100 | 0 | 0 | 0 | 0 | 0 |
| TKIDN2012824 | 0 | 100 | 0 | 0 | 0 | 0 | 0 |
| TKIDN2013134 | 0 | 100 | 0 | 0 | 0 | 0 | 0 |
| TKIDN2013287 | 14.432 | 64.067 | 0 | 0 | 0 | 0 | 0 |
| TKIDN2014570 | 0 | 78.731 | 0 | 0 | 0 | 0 | 0 |
| TKIDN2014757 | 0 | 100 | 0 | 0 | 0 | 0 | 0 |
| TKIDN2014771 | 0 | 100 | 0 | 0 | 0 | 0 | 0 |
| TKIDN2014964 | 0 | 40.568 | 0 | 0 | 0 | 0 | 0 |
| TKIDN2015025 | 0 | 100 | 0 | 0 | 0 | 0 | 0 |
| TKIDN2015071 | 0 | 48.016 | 0 | 0 | 0 | 0 | 0 |
| TKIDN2015161 | 0 | 100 | 0 | 0 | 0 | 0 | 0 |
| TKIDN2015263 | 0 | 100 | 0 | 0 | 0 | 0 | 0 |
| TKIDN2015285 | 0 | 36.749 | 0 | 0 | 0 | 0 | 0 |
| TKIDN2015423 | 0.531 | 2.357 | 0 | 0 | 0 | 0 | 0 |
| TKIDN2015788 | 2.193 | 9.737 | 0 | 0 | 0 | 2.946 | 0 |
| TKIDN2016309 | 0 | 100 | 0 | 0 | 0 | 0 | 0 |
| TKIDN2016399 | 0 | 34.998 | 65.002 | 0 | 0 | 0 | 0 |
| TKIDN2016846 | 0 | 83.911 | 0 | 0 | 0 | 0 | 0 |
| TKIDN2018926 | 0 | 78.604 | 0 | 0 | 0 | 0 | 0 |
| TKIDN2019116 | 0 | 100 | 0 | 0 | 0 | 0 | 0 |
| TLIVE2000023 | 0 | 0 | 100 | 0 | 0 | 0 | 0 |
| TLIVE2000142 | 0 | 0 | 100 | 0 | 0 | 0 | 0 |
| TLIVE2000292 | 0 | 0 | 100 | 0 | 0 | 0 | 0 |
| TLIVE2000762 | 0 | 0 | 100 | 0 | 0 | 0 | 0 |
| TLIVE2000979 | 0 | 0 | 73.389 | 0 | 0 | 0 | 0 |
| TLIVE2001327 | 0 | 0 | 64.491 | 0 | 0 | 0 | 0 |
| TLIVE2001616 | 0 | 0 | 100 | 0 | 0 | 0 | 0 |
| TLIVE2001684 | 0 | 0 | 100 | 0 | 0 | 0 | 0 |
| TLIVE2001828 | 10.817 | 0 | 89.183 | 0 | 0 | 0 | 0 |
| TLIVE2001927 | 0 | 0 | 100 | 0 | 0 | 0 | 0 |
| TLIVE2002046 | 3.027 | 0 | 12.478 | 0 | 0 | 2.033 | 0 |
| TLIVE2002336 | 0 | 0 | 100 | 0 | 0 | 0 | 0 |
| TLIVE2002338 | 0 | 0 | 100 | 0 | 0 | 0 | 0 |
| TLIVE2002562 | 0 | 0 | 100 | 0 | 0 | 0 | 0 |
| TLIVE2002690 | 0 | 0 | 41.431 | 0 | 0 | 0 | 0 |
| TLIVE2002882 | 0 | 0 | 100 | 0 | 0 | 0 | 0 |
| TLIVE2003197 | 0 | 0 | 100 | 0 | 0 | 0 | 0 |
| TLIVE2003200 | 0 | 0 | 87.078 | 0 | 0 | 0 | 0 |
| TLIVE2003225 | 0 | 0 | 100 | 0 | 0 | 0 | 0 |
| TLIVE2003381 | 0 | 0 | 100 | 0 | 0 | 0 | 0 |
| TLIVE2003737 | 0 | 0 | 100 | 0 | 0 | 0 | 0 |
| TLIVE2003961 | 0 | 0 | 100 | 0 | 0 | 0 | 0 |
| TLIVE2003970 | 0 | 0 | 15.901 | 0 | 0 | 5.181 | 0 |
| TLIVE2004110 | 0 | 0 | 70.982 | 0 | 0 | 0 | 0 |
| TLIVE2004320 | 0 | 0 | 87.217 | 0 | 0 | 0 | 0 |
| TLIVE2004331 | 0 | 0 | 100 | 0 | 0 | 0 | 0 |
| TLIVE2004601 | 0 | 0 | 100 | 0 | 0 | 0 | 0 |
| TLIVE2005180 | 0 | 0 | 100 | 0 | 0 | 0 | 0 |
| TLIVE2005390 | 0 | 0 | 100 | 0 | 0 | 0 | 0 |
| TLIVE2005516 | 0 | 0 | 100 | 0 | 0 | 0 | 0 |
| TLIVE2005731 | 0 | 0 | 100 | 0 | 0 | 0 | 0 |
| TLIVE2005866 | 0 | 0 | 100 | 0 | 0 | 0 | 0 |
| TLIVE2006236 | 0 | 0 | 100 | 0 | 0 | 0 | 0 |
| TLIVE2006359 | 0 | 0 | 100 | 0 | 0 | 0 | 0 |
| TLIVE2006529 | 0 | 0 | 100 | 0 | 0 | 0 | 0 |
| TLIVE2006621 | 0 | 0 | 100 | 0 | 0 | 0 | 0 |
| TLIVE2006733 | 0 | 0 | 100 | 0 | 0 | 0 | 0 |
| TLIVE2007000 | 0 | 0 | 100 | 0 | 0 | 0 | 0 |
| TLIVE2007016 | 0 | 0 | 100 | 0 | 0 | 0 | 0 |
| TLIVE2007132 | 0 | 0 | 100 | 0 | 0 | 0 | 0 |
| TLIVE2007192 | 0 | 0 | 100 | 0 | 0 | 0 | 0 |
| TLIVE2007528 | 0 | 0 | 100 | 0 | 0 | 0 | 0 |
| TLIVE2007607 | 0 | 0 | 100 | 0 | 0 | 0 | 0 |
| TLIVE2007736 | 0 | 0 | 90.642 | 0 | 0 | 0 | 0 |
| TLIVE2007816 | 0 | 0 | 100 | 0 | 0 | 0 | 0 |
| TLIVE2007919 | 0 | 0 | 100 | 0 | 0 | 0 | 0 |
| TLIVE2008083 | 0 | 0 | 100 | 0 | 0 | 0 | 0 |
| TLIVE2008213 | 0 | 0 | 100 | 0 | 0 | 0 | 0 |
| TLIVE2008221 | 0 | 0 | 100 | 0 | 0 | 0 | 0 |
| TLIVE2008229 | 0 | 0 | 91.317 | 0 | 0 | 0 | 0 |
| TLIVE2008712 | 0 | 0 | 100 | 0 | 0 | 0 | 0 |
| TLIVE2008797 | 0 | 0 | 100 | 0 | 0 | 0 | 0 |
| TLIVE2009087 | 0 | 0 | 100 | 0 | 0 | 0 | 0 |
| TLIVE2009163 | 0 | 0 | 100 | 0 | 0 | 0 | 0 |
| TLIVE2009489 | 0 | 0 | 100 | 0 | 0 | 0 | 0 |
| TLIVE2009541 | 0 | 0 | 100 | 0 | 0 | 0 | 0 |
| TLUNG2000179 | 0 | 0 | 0 | 96.684 | 0 | 0 | 0 |
| TOVAR2000476 | 0 | 0 | 0 | 0 | 49.428 | 0 | 0 |
| TOVAR2000575 | 3.687 | 0 | 0 | 0 | 96.313 | 0 | 0 |
| TOVAR2000649 | 0 | 0 | 0 | 0 | 100 | 0 | 0 |
| TOVAR2000904 | 0 | 0 | 0 | 0 | 95.526 | 0 | 0 |
| TOVAR2001281 | 0 | 0 | 0 | 0 | 100 | 0 | 0 |
| TOVAR2001556 | 0 | 0 | 0 | 0 | 100 | 0 | 0 |
| TOVAR2001730 | 0 | 0 | 0 | 0 | 100 | 0 | 0 |
| TOVAR2002247 | 0 | 0 | 0 | 0 | 100 | 0 | 0 |
| TOVAR2002514 | 0 | 0 | 0 | 0 | 100 | 0 | 0 |
| TOVAR2002549 | 0 | 0 | 0 | 0 | 100 | 0 | 0 |
| TOVAR2002800 | 0 | 0 | 0 | 0 | 100 | 0 | 0 |
| TRACH1000011 | 0 | 0 | 0 | 0 | 0 | 8.245 | 0 |
| TRACH1000018 | 0 | 0 | 0 | 0 | 0 | 23.133 | 0 |
| TRACH1000030 | 2.876 | 5.107 | 4.743 | 0 | 0 | 0.773 | 0 |
| TRACH1000038 | 0 | 0 | 0 | 0 | 0 | 21.094 | 0 |
| TRACH1000057 | 0 | 0 | 0 | 0 | 0 | 100 | 0 |
| TRACH1000063 | 0 | 0 | 0 | 0 | 0 | 2.409 | 0 |
| TRACH1000074 | 0 | 0 | 0 | 0 | 0 | 100 | 0 |
| TRACH1000100 | 0 | 0 | 0 | 0 | 0 | 100 | 0 |
| TRACH1000106 | 0 | 0 | 0 | 0 | 0 | 6.650 | 0 |
| TRACH1000125 | 42.674 | 0 | 0 | 0 | 0 | 57.326 | 0 |
| TRACH1000140 | 0 | 0 | 0 | 0 | 0 | 100 | 0 |
| TRACH1000144 | 0 | 0 | 0 | 0 | 0 | 100 | 0 |
| TRACH1000181 | 0 | 0 | 0 | 0 | 0 | 5.307 | 0 |
| TRACH1000193 | 0 | 0 | 0 | 0 | 0 | 48.662 | 0 |
| TRACH1000205 | 0 | 0 | 0 | 0 | 0 | 8.816 | 0 |
| TRACH1000212 | 0 | 0 | 0 | 0 | 0 | 100 | 0 |
| TRACH1000240 | 0 | 0 | 0 | 0 | 0 | 100 | 0 |
| TRACH2000002 | 0 | 0 | 0 | 0 | 0 | 100 | 0 |
| TRACH2000015 | 0 | 0 | 0 | 0 | 0 | 100 | 0 |
| TRACH2000024 | 0 | 0 | 0 | 0 | 0 | 100 | 0 |
| TRACH2000032 | 27.125 | 0 | 0 | 0 | 0 | 72.875 | 0 |
| TRACH2000045 | 0 | 0 | 0 | 0 | 0 | 6.160 | 0 |
| TRACH2000047 | 4.466 | 0 | 0 | 0 | 0 | 11.998 | 0 |
| TRACH2000079 | 0 | 2.005 | 0 | 0 | 0 | 2.427 | 0 |
| TRACH2000081 | 0 | 0 | 0 | 0 | 0 | 14.258 | 0 |
| TRACH2000083 | 0 | 0 | 0 | 0 | 0 | 100 | 0 |
| TRACH2000148 | 0 | 0 | 0 | 0 | 0 | 100 | 0 |
| TRACH2000185 | 0 | 0 | 0 | 0 | 0 | 100 | 0 |
| TRACH2000196 | 0 | 0 | 0 | 0 | 0 | 14.774 | 0 |
| TRACH2000235 | 0 | 0 | 0 | 0 | 0 | 100 | 0 |
| TRACH2000237 | 0 | 0 | 0 | 0 | 0 | 6.022 | 0 |
| TRACH2000243 | 0 | 0 | 0 | 0 | 0 | 0.346 | 0 |
| TRACH2000248 | 0 | 0 | 0 | 0 | 0 | 3.126 | 0 |
| TRACH2000250 | 15.327 | 0 | 0 | 0 | 0 | 20.590 | 0 |
| TRACH2000259 | 0 | 0 | 0 | 0 | 0 | 100 | 0 |
| TRACH2000272 | 0 | 0 | 0 | 0 | 0 | 100 | 0 |
| TRACH2000282 | 0 | 0 | 0 | 0 | 0 | 39.169 | 0 |
| TRACH2000287 | 0 | 0 | 0 | 0 | 0 | 100 | 0 |
| TRACH2000289 | 0 | 0 | 0 | 0 | 0 | 100 | 0 |
| TRACH2000306 | 0 | 0 | 77.769 | 0 | 0 | 6.335 | 0 |
| TRACH2000312 | 0 | 0 | 0 | 0 | 0 | 100 | 0 |
| TRACH2000321 | 1.639 | 0 | 3.378 | 0 | 0 | 1.651 | 0 |
| TRACH2000336 | 0 | 0 | 0 | 0 | 0 | 100 | 0 |
| TRACH2000359 | 0 | 11.039 | 0 | 0 | 0 | 13.362 | 0 |
| TRACH2000393 | 0 | 0 | 0 | 0 | 0 | 38.115 | 0 |
| TRACH2000411 | 0 | 0 | 0 | 0 | 0 | 100 | 0 |
| TRACH2000420 | 0 | 0 | 0 | 0 | 0 | 45.073 | 0 |
| TRACH2000461 | 4.289 | 0 | 0 | 0 | 0 | 5.762 | 0 |
| TRACH2000472 | 0.712 | 0 | 0 | 0 | 0 | 1.913 | 0 |
| TRACH2000496 | 0 | 0 | 0 | 0 | 0 | 100 | 0 |
| TRACH2000497 | 0 | 0 | 0 | 0 | 0 | 100 | 0 |
| TRACH2000502 | 0 | 0 | 0 | 0 | 0 | 52.833 | 0 |
| TRACH2000522 | 0 | 0 | 0 | 0 | 0 | 100 | 0 |
| TRACH2000540 | 2.376 | 0 | 0 | 0 | 0 | 1.596 | 0 |
| TRACH2000559 | 0 | 0 | 0 | 0 | 0 | 4.362 | 0 |
| TRACH2000660 | 21.151 | 0 | 0 | 0 | 0 | 28.413 | 0 |
| TRACH2000665 | 0 | 0 | 0 | 0 | 0 | 100 | 0 |
| TRACH2000675 | 0 | 0 | 0 | 0 | 0 | 100 | 0 |
| TRACH2000677 | 0 | 0 | 0 | 0 | 0 | 31.577 | 0 |
| TRACH2000702 | 0 | 0 | 0 | 0 | 0 | 4.398 | 0 |
| TRACH2000703 | 0 | 0 | 0 | 0 | 0 | 100 | 0 |
| TRACH2000767 | 59.821 | 0 | 0 | 0 | 0 | 40.179 | 0 |
| TRACH2000775 | 0 | 0 | 0 | 0 | 0 | 100 | 0 |
| TRACH2000780 | 2.186 | 0 | 0 | 0 | 0 | 7.832 | 0 |
| TRACH2000807 | 0 | 0 | 0 | 0 | 0 | 100 | 0 |
| TRACH2000862 | 0 | 0 | 0 | 0 | 0 | 6.484 | 0 |
| TRACH2000873 | 0 | 0 | 0 | 0 | 0 | 52.645 | 0 |
| TRACH2000894 | 0 | 0 | 0 | 0 | 0 | 100 | 0 |
| TRACH2000898 | 0 | 0 | 0 | 0 | 0 | 100 | 0 |
| TRACH2000920 | 2.764 | 0 | 0 | 0 | 0 | 3.713 | 0 |
| TRACH2000923 | 0 | 0 | 0 | 0 | 0 | 100 | 0 |
| TRACH2000926 | 0 | 0 | 0 | 0 | 0 | 3.125 | 0 |
| TRACH2000944 | 0 | 0 | 0 | 0 | 0 | 100 | 0 |
| TRACH2000959 | 0.611 | 0 | 0 | 0 | 0 | 0.273 | 0 |
| TRACH2000972 | 0 | 0 | 0 | 0 | 0 | 0.664 | 0 |
| TRACH2000981 | 0 | 0 | 0 | 0 | 0 | 100 | 0 |
| TRACH2000986 | 0 | 0 | 0 | 0 | 0 | 100 | 0 |
| TRACH2001021 | 0.698 | 0 | 5.757 | 0 | 0 | 0.938 | 8.992 |
| TRACH2001037 | 0 | 0 | 0 | 0 | 0 | 100 | 0 |
| TRACH2001060 | 0 | 0 | 0 | 0 | 0 | 37.554 | 0 |
| TRACH2001085 | 0 | 0 | 0 | 0 | 0 | 23.133 | 0 |
| TRACH2001101 | 0 | 0 | 0 | 0 | 0 | 23.819 | 0 |
| TRACH2001109 | 0 | 0.775 | 0 | 0 | 0 | 0.234 | 0 |
| TRACH2001121 | 0 | 0 | 0 | 0 | 0 | 100 | 0 |
| TRACH2001147 | 0 | 0 | 0 | 0 | 0 | 100 | 0 |
| TRACH2001154 | 0 | 0 | 0 | 0 | 0 | 100 | 0 |
| TRACH2001188 | 0 | 0 | 0 | 0 | 0 | 100 | 0 |
| TRACH2001192 | 0 | 0 | 0 | 0 | 0 | 37.759 | 0 |
| TRACH2001249 | 0 | 0 | 0 | 0 | 0 | 30.816 | 0 |
| TRACH2001275 | 0 | 0 | 0 | 0 | 0 | 100 | 0 |
| TRACH2001289 | 0.567 | 0 | 0 | 0 | 0 | 2.665 | 0 |
| TRACH2001314 | 1.524 | 0 | 0 | 0 | 0 | 8.190 | 0 |
| TRACH2001335 | 0 | 0 | 0 | 0 | 0 | 100 | 0 |
| TRACH2001339 | 0 | 0 | 0 | 0 | 0 | 32.807 | 0 |
| TRACH2001341 | 0 | 0 | 0 | 0 | 0 | 7.139 | 0 |
| TRACH2001347 | 0 | 0 | 0 | 0 | 0 | 100 | 0 |
| TRACH2001395 | 0 | 0 | 0 | 0 | 0 | 100 | 0 |
| TRACH2001400 | 0 | 0 | 0 | 0 | 0 | 100 | 0 |
| TRACH2001403 | 0 | 0 | 0 | 0 | 0 | 100 | 0 |
| TRACH2001416 | 0 | 0 | 0 | 0 | 0 | 100 | 0 |
| TRACH2001428 | 2.105 | 0 | 0 | 0 | 0 | 1.414 | 0 |
| TRACH2001432 | 0 | 4.118 | 7.648 | 0 | 0 | 1.246 | 0 |
| TRACH2001443 | 0 | 34.396 | 0 | 0 | 0 | 20.817 | 0 |
| TRACH2001463 | 2.553 | 0 | 0 | 0 | 0 | 3.430 | 0 |
| TRACH2001474 | 0 | 0 | 0 | 0 | 0 | 100 | 0 |
| TRACH2001478 | 0.968 | 0 | 0 | 0 | 0 | 3.251 | 0 |
| TRACH2001523 | 0 | 0 | 0 | 0 | 0 | 1.904 | 0 |
| TRACH2001525 | 0 | 0 | 0 | 0 | 0 | 100 | 0 |
| TRACH2001532 | 0 | 0 | 0 | 0 | 0 | 100 | 0 |
| TRACH2001549 | 3.526 | 0 | 0 | 0 | 0 | 23.681 | 0 |
| TRACH2001592 | 0 | 0 | 0 | 0 | 0 | 100 | 0 |
| TRACH2001596 | 17.065 | 0 | 0 | 0 | 0 | 22.924 | 0 |
| TRACH2001607 | 3.350 | 0 | 0 | 0 | 0 | 1.125 | 0 |
| TRACH2001612 | 0 | 0 | 0 | 0 | 0 | 4.474 | 0 |
| TRACH2001621 | 0 | 0 | 0 | 0 | 0 | 100 | 0 |
| TRACH2001646 | 0 | 0 | 0 | 0 | 0 | 25.331 | 0 |
| TRACH2001651 | 0 | 0 | 0 | 0 | 0 | 100 | 0 |
| TRACH2001684 | 0 | 0 | 0 | 0 | 0 | 19.952 | 0 |
| TRACH2001810 | 1.295 | 0 | 0 | 0 | 0 | 4.349 | 0 |
| TRACH2001898 | 0 | 0 | 0 | 0 | 0 | 1.142 | 0 |
| TRACH2001933 | 0 | 0 | 0 | 0 | 0 | 100 | 0 |
| TRACH2001968 | 0 | 0 | 0 | 0 | 0 | 100 | 0 |
| TRACH2001996 | 0 | 0 | 0 | 0 | 0 | 32.807 | 0 |
| TRACH2002043 | 0 | 0 | 0 | 0 | 0 | 1.188 | 0 |
| TRACH2002054 | 0 | 0 | 0 | 0 | 0 | 48.432 | 0 |
| TRACH2002092 | 0 | 0 | 0 | 0 | 0 | 3.144 | 0 |
| TRACH2002100 | 0 | 0 | 0 | 0 | 0 | 19.210 | 0 |
| TRACH2002138 | 0 | 0 | 0 | 0 | 0 | 24.095 | 0 |
| TRACH2002333 | 0 | 0 | 0 | 0 | 0 | 16.466 | 0 |
| TRACH2002537 | 0 | 0 | 6.376 | 0 | 0 | 2.078 | 0 |
| TRACH2002664 | 0 | 0 | 0 | 0 | 0 | 6.819 | 0 |
| TRACH2002784 | 0 | 0 | 0 | 0 | 0 | 100 | 0 |
| TRACH2002803 | 0 | 7.714 | 0 | 0 | 0 | 23.342 | 0 |
| TRACH2002840 | 0 | 0 | 0 | 0 | 0 | 100 | 0 |
| TRACH2002847 | 0 | 0 | 0 | 0 | 0 | 5.084 | 0 |
| TRACH2002853 | 0 | 0 | 0 | 0 | 0 | 100 | 0 |
| TRACH2002862 | 0 | 0 | 0 | 0 | 0 | 100 | 0 |
| TRACH2002954 | 0 | 0 | 0 | 0 | 0 | 100 | 0 |
| TRACH2002960 | 0 | 0 | 0 | 0 | 0 | 100 | 0 |
| TRACH2002988 | 42.674 | 0 | 0 | 0 | 0 | 57.326 | 0 |
| TRACH2003070 | 42.674 | 0 | 0 | 0 | 0 | 57.326 | 0 |
| TRACH2003272 | 6.179 | 0 | 0 | 0 | 0 | 4.150 | 0 |
| TRACH2003323 | 0 | 0 | 0 | 0 | 0 | 7.974 | 0 |
| TRACH2003347 | 1.325 | 5.881 | 0 | 0 | 0 | 5.339 | 34.119 |
| TRACH2003484 | 0 | 0 | 0 | 0 | 0 | 61.213 | 0 |
| TRACH2003516 | 0 | 0 | 0 | 0 | 0 | 100 | 0 |
| TRACH2003605 | 42.674 | 0 | 0 | 0 | 0 | 57.326 | 0 |
| TRACH2003736 | 0 | 0 | 0 | 0 | 0 | 100 | 0 |
| TRACH2003759 | 0 | 0 | 0 | 0 | 0 | 100 | 0 |
| TRACH2003941 | 0 | 0 | 0 | 0 | 0 | 100 | 0 |
| TRACH2004039 | 0 | 0 | 0 | 0 | 0 | 63.148 | 0 |
| TRACH2004054 | 0 | 0 | 0 | 0 | 0 | 100 | 0 |
| TRACH2004087 | 0 | 0 | 0 | 0 | 0 | 100 | 0 |
| TRACH2004109 | 0 | 0 | 0 | 0 | 0 | 39.169 | 0 |
| TRACH2004170 | 0 | 0 | 0 | 0 | 0 | 100 | 0 |
| TRACH2004183 | 0 | 0 | 0 | 0 | 0 | 100 | 0 |
| TRACH2004251 | 0 | 0 | 0 | 0 | 0 | 100 | 0 |
| TRACH2004292 | 0 | 0 | 0 | 0 | 0 | 100 | 0 |
| TRACH2004336 | 0 | 0 | 0 | 0 | 0 | 63.148 | 0 |
| TRACH2004399 | 24.718 | 0 | 0 | 0 | 0 | 33.204 | 0 |
| TRACH2004428 | 0 | 0 | 0 | 0 | 0 | 100 | 0 |
| TRACH2004458 | 0 | 0 | 0 | 0 | 0 | 23.664 | 0 |
| TRACH2004499 | 0 | 0 | 0 | 0 | 0 | 3.292 | 0 |
| TRACH2004521 | 0 | 0 | 0 | 0 | 0 | 100 | 0 |
| TRACH2004570 | 0 | 0 | 0 | 0 | 0 | 100 | 0 |
| TRACH2004845 | 0 | 0 | 0 | 0 | 0 | 100 | 0 |
| TRACH2004887 | 0 | 0 | 0 | 0 | 0 | 100 | 0 |
| TRACH2004950 | 0 | 0 | 0 | 0 | 0 | 100 | 0 |
| TRACH2005004 | 0 | 0 | 0 | 0 | 0 | 100 | 0 |
| TRACH2005017 | 0 | 0 | 0 | 0 | 0 | 100 | 0 |
| TRACH2005066 | 0 | 0 | 0 | 0 | 0 | 100 | 0 |
| TRACH2005159 | 0 | 0 | 0 | 0 | 0 | 100 | 0 |
| TRACH2005314 | 0 | 0 | 0 | 0 | 0 | 100 | 0 |
| TRACH2005444 | 0 | 0 | 0 | 0 | 0 | 100 | 0 |
| TRACH2005541 | 0 | 0 | 0 | 0 | 0 | 10.892 | 0 |
| TRACH2005666 | 0 | 0 | 0 | 0 | 0 | 100 | 0 |
| TRACH2005698 | 42.674 | 0 | 0 | 0 | 0 | 57.326 | 0 |
| TRACH2005710 | 0 | 0 | 0 | 0 | 0 | 15.040 | 0 |
| TRACH2005720 | 0 | 0 | 0 | 0 | 0 | 100 | 0 |
| TRACH2005769 | 0 | 0 | 0 | 0 | 0 | 100 | 0 |
| TRACH2005796 | 0 | 0 | 0 | 0 | 0 | 50.251 | 0 |
| TRACH2005800 | 0 | 0 | 0 | 0 | 0 | 2.695 | 0 |
| TRACH2005811 | 4.397 | 0 | 0 | 0 | 0 | 3.544 | 22.648 |
| TRACH2006015 | 0 | 0 | 0 | 0 | 0 | 100 | 0 |
| TRACH2006049 | 0 | 0 | 0 | 0 | 0 | 52.833 | 0 |
| TRACH2006097 | 0 | 0 | 0 | 0 | 0 | 100 | 0 |
| TRACH2006194 | 0 | 0 | 0 | 0 | 0 | 100 | 0 |
| TRACH2006327 | 0 | 0 | 0 | 0 | 0 | 100 | 0 |
| TRACH2006331 | 0 | 0 | 0 | 0 | 0 | 100 | 0 |
| TRACH2006378 | 0 | 0 | 0 | 0 | 0 | 20.023 | 0 |
| TRACH2006387 | 0 | 0 | 0 | 0 | 0 | 100 | 0 |
| TRACH2006528 | 0 | 0 | 0 | 0 | 0 | 100 | 0 |
| TRACH2006670 | 0 | 0 | 0 | 0 | 0 | 100 | 0 |
| TRACH2006762 | 0 | 0 | 0 | 0 | 0 | 24.004 | 0 |
| TRACH2006866 | 0 | 0 | 0 | 0 | 0 | 5.558 | 21.311 |
| TRACH2006870 | 0 | 0 | 0 | 0 | 0 | 100 | 0 |
| TRACH2006918 | 0 | 0 | 0 | 0 | 0 | 100 | 0 |
| TRACH2007059 | 0 | 0 | 0 | 0 | 0 | 37.554 | 0 |
| TRACH2007324 | 0 | 0 | 0 | 0 | 0 | 100 | 0 |
| TRACH2007358 | 0 | 0 | 0 | 0 | 0 | 13.193 | 0 |
| TRACH2007399 | 0 | 0 | 0 | 0 | 0 | 3.693 | 0 |
| TRACH2007483 | 0 | 0 | 0 | 0 | 0 | 100 | 0 |
| TRACH2007542 | 0 | 0 | 0 | 0 | 0 | 100 | 0 |
| TRACH2007577 | 0 | 0 | 0 | 0 | 0 | 100 | 0 |
| TRACH2007674 | 0 | 0 | 0 | 0 | 0 | 100 | 0 |
| TRACH2007676 | 0 | 0 | 0 | 0 | 0 | 100 | 0 |
| TRACH2007688 | 0 | 0 | 0 | 0 | 0 | 100 | 0 |
| TRACH2007733 | 0 | 0 | 0 | 0 | 0 | 100 | 0 |
| TRACH2007754 | 0 | 0 | 30.987 | 0 | 0 | 1.683 | 0 |
| TRACH2007816 | 16.648 | 0 | 0 | 0 | 0 | 11.182 | 0 |
| TRACH2007894 | 42.674 | 0 | 0 | 0 | 0 | 57.326 | 0 |
| TRACH2007969 | 2.116 | 0 | 0 | 0 | 55.276 | 5.685 | 0 |
| TRACH2007988 | 0 | 0 | 0 | 0 | 0 | 100 | 0 |
| TRACH2008081 | 2.130 | 0 | 0 | 0 | 0 | 1.431 | 0 |
| TRACH2008112 | 0 | 0 | 0 | 0 | 0 | 100 | 0 |
| TRACH2008113 | 0 | 0 | 0 | 0 | 0 | 20.849 | 0 |
| TRACH2008127 | 0 | 0 | 0 | 0 | 0 | 100 | 0 |
| TRACH2008130 | 0 | 0 | 0 | 0 | 0 | 47.415 | 0 |
| TRACH2008278 | 0 | 0 | 0 | 0 | 0 | 100 | 0 |
| TRACH2008300 | 0 | 6.284 | 0 | 0 | 0 | 1.902 | 0 |
| TRACH2008472 | 6.542 | 0 | 0 | 0 | 0 | 3.515 | 0 |
| TRACH2008478 | 0 | 0 | 0 | 0 | 0 | 20.004 | 0 |
| TRACH2008540 | 0 | 0 | 0 | 0 | 0 | 17.670 | 0 |
| TRACH2008583 | 0 | 0 | 0 | 0 | 0 | 100 | 0 |
| TRACH2008597 | 42.674 | 0 | 0 | 0 | 0 | 57.326 | 0 |
| TRACH2008716 | 0 | 0 | 0 | 0 | 0 | 5.682 | 0 |
| TRACH2008820 | 0 | 0 | 0 | 0 | 0 | 100 | 0 |
| TRACH2008891 | 0 | 0 | 0 | 0 | 0 | 24.300 | 0 |
| TRACH2008921 | 0 | 0 | 0 | 0 | 0 | 100 | 0 |
| TRACH2009006 | 11.705 | 0 | 0 | 0 | 0 | 15.724 | 0 |
| TRACH2009060 | 0 | 0 | 0 | 0 | 0 | 100 | 0 |
| TRACH2009107 | 0 | 0 | 0 | 0 | 0 | 14.068 | 0 |
| TRACH2009123 | 0 | 0 | 0 | 0 | 0 | 100 | 0 |
| TRACH2009268 | 0 | 0 | 0 | 0 | 0 | 100 | 0 |
| TRACH2009291 | 0 | 0 | 0 | 0 | 0 | 23.395 | 0 |
| TRACH2009310 | 0 | 0 | 0 | 0 | 0 | 19.666 | 0 |
| TRACH2009340 | 8.253 | 0 | 0 | 0 | 0 | 11.087 | 0 |
| TRACH2009348 | 0 | 0 | 0 | 0 | 0 | 100 | 0 |
| TRACH2009358 | 0 | 0 | 0 | 0 | 0 | 100 | 0 |
| TRACH2009661 | 0 | 0 | 0 | 0 | 0 | 63.148 | 0 |
| TRACH2009730 | 0 | 0 | 0 | 0 | 0 | 100 | 0 |
| TRACH2009743 | 0 | 0 | 0 | 0 | 0 | 100 | 0 |
| TRACH2009754 | 0 | 0 | 0 | 0 | 0 | 100 | 0 |
| TRACH2009851 | 0 | 0 | 0 | 0 | 0 | 16.843 | 0 |
| TRACH2009862 | 0 | 0 | 0 | 0 | 0 | 100 | 0 |
| TRACH2009934 | 42.674 | 0 | 0 | 0 | 0 | 57.326 | 0 |
| TRACH2010159 | 0 | 0 | 0 | 0 | 0 | 100 | 0 |
| TRACH2010218 | 0 | 0 | 0 | 0 | 0 | 100 | 0 |
| TRACH2010251 | 0 | 0 | 0 | 0 | 0 | 100 | 0 |
| TRACH2010272 | 0 | 0 | 0 | 0 | 0 | 100 | 0 |
| TRACH2010317 | 42.674 | 0 | 0 | 0 | 0 | 57.326 | 0 |
| TRACH2010419 | 0 | 0 | 0 | 0 | 0 | 100 | 0 |
| TRACH2010451 | 0 | 0 | 0 | 0 | 0 | 100 | 0 |
| TRACH2010505 | 0 | 0 | 0 | 0 | 0 | 100 | 0 |
| TRACH2010587 | 0 | 0 | 0 | 0 | 0 | 100 | 0 |
| TRACH2010600 | 0 | 0 | 0 | 0 | 0 | 38.628 | 0 |
| TRACH2010634 | 0 | 0 | 0 | 0 | 0 | 38.834 | 0 |
| TRACH2010639 | 0 | 0 | 0 | 0 | 0 | 100 | 0 |
| TRACH2010677 | 0 | 0 | 0 | 0 | 0 | 100 | 0 |
| TRACH2010698 | 0 | 0 | 0 | 0 | 0 | 100 | 0 |
| TRACH2010771 | 0 | 0 | 0 | 0 | 0 | 38.134 | 0 |
| TRACH2010824 | 14.977 | 0 | 0 | 0 | 0 | 20.120 | 0 |
| TRACH2010883 | 0 | 0 | 0 | 0 | 0 | 100 | 0 |
| TRACH2010965 | 0 | 0 | 0 | 0 | 0 | 100 | 0 |
| TRACH2010974 | 0 | 0 | 0 | 0 | 0 | 100 | 0 |
| TRACH2011057 | 0 | 0 | 0 | 0 | 0 | 100 | 0 |
| TRACH2011093 | 0 | 0 | 0 | 0 | 0 | 100 | 0 |
| TRACH2011113 | 7.874 | 0 | 0 | 0 | 0 | 5.288 | 0 |
| TRACH2011290 | 0 | 0 | 0 | 0 | 0 | 47.415 | 0 |
| TRACH2011293 | 0 | 0 | 0 | 0 | 0 | 5.001 | 0 |
| TRACH2011302 | 0 | 0 | 0 | 0 | 0 | 13.725 | 0 |
| TRACH2011500 | 0 | 0 | 0 | 0 | 0 | 15.124 | 0 |
| TRACH2011574 | 0 | 0 | 0 | 0 | 0 | 100 | 0 |
| TRACH2011894 | 0 | 0 | 0 | 0 | 0 | 9.961 | 0 |
| TRACH2011956 | 0 | 0 | 0 | 0 | 0 | 100 | 0 |
| TRACH2012000 | 0 | 0 | 0 | 0 | 0 | 100 | 0 |
| TRACH2012138 | 0 | 0 | 0 | 0 | 0 | 100 | 0 |
| TRACH2012242 | 0 | 0 | 0 | 0 | 0 | 100 | 0 |
| TRACH2012298 | 0 | 0 | 0 | 0 | 0 | 1.589 | 0 |
| TRACH2012370 | 0 | 0 | 0 | 0 | 0 | 100 | 0 |
| TRACH2012376 | 0 | 0 | 0 | 0 | 0 | 3.006 | 0 |
| TRACH2012387 | 0 | 0 | 0 | 0 | 0 | 63.148 | 0 |
| TRACH2012497 | 0 | 0 | 0 | 0 | 0 | 7.251 | 0 |
| TRACH2012536 | 0 | 0 | 0 | 0 | 0 | 38.628 | 0 |
| TRACH2012562 | 0 | 0 | 0 | 0 | 0 | 100 | 0 |
| TRACH2012742 | 0 | 0 | 0 | 0 | 0 | 100 | 0 |
| TRACH2012811 | 0 | 0 | 0 | 0 | 0 | 8.733 | 0 |
| TRACH2012823 | 0 | 0 | 0 | 0 | 0 | 100 | 0 |
| TRACH2012918 | 0 | 0 | 0 | 0 | 0 | 100 | 0 |
| TRACH2013081 | 0 | 0 | 0 | 0 | 0 | 13.033 | 0 |
| TRACH2013123 | 0 | 0 | 0 | 0 | 0 | 26.942 | 0 |
| TRACH2013265 | 0 | 0 | 0 | 0 | 0 | 100 | 0 |
| TRACH2013369 | 0 | 0 | 0 | 0 | 0 | 100 | 0 |
| TRACH2013450 | 0 | 0 | 0 | 0 | 0 | 100 | 0 |
| TRACH2013495 | 0 | 0 | 0 | 0 | 0 | 12.564 | 0 |
| TRACH2013552 | 0 | 0 | 0 | 0 | 0 | 11.637 | 0 |
| TRACH2013585 | 0 | 0 | 0 | 0 | 0 | 52.582 | 0 |
| TRACH2013671 | 0 | 0 | 0 | 0 | 0 | 100 | 0 |
| TRACH2013726 | 0 | 0 | 0 | 0 | 0 | 100 | 0 |
| TRACH2013902 | 0 | 0 | 0 | 0 | 0 | 100 | 0 |
| TRACH2013928 | 0 | 0 | 0 | 0 | 0 | 100 | 0 |
| TRACH2013982 | 0 | 0 | 0 | 0 | 0 | 100 | 0 |
| TRACH2013991 | 0 | 0 | 0 | 0 | 0 | 14.258 | 0 |
| TRACH2014018 | 0 | 0 | 0 | 0 | 0 | 100 | 0 |
| TRACH2014045 | 0 | 0 | 0 | 0 | 0 | 100 | 0 |
| TRACH2014046 | 0 | 0 | 0 | 0 | 0 | 100 | 0 |
| TRACH2014077 | 0 | 0 | 0 | 0 | 0 | 11.431 | 0 |
| TRACH2014082 | 0 | 0 | 0 | 0 | 0 | 100 | 0 |
| TRACH2014124 | 9.468 | 0 | 0 | 0 | 0 | 1.156 | 0 |
| TRACH2014268 | 0 | 0 | 0 | 0 | 0 | 100 | 0 |
| TRACH2014284 | 0 | 0 | 0 | 0 | 0 | 100 | 0 |
| TRACH2014337 | 0 | 0 | 0 | 0 | 0 | 100 | 0 |
| TRACH2014356 | 0 | 0 | 0 | 0 | 0 | 100 | 0 |
| TRACH2014371 | 0 | 0 | 0 | 0 | 0 | 100 | 0 |
| TRACH2014442 | 0 | 0 | 0 | 0 | 0 | 2.522 | 0 |
| TRACH2014483 | 0 | 0 | 0 | 0 | 0 | 100 | 0 |
| TRACH2014495 | 0 | 0 | 0 | 0 | 0 | 100 | 0 |
| TRACH2014544 | 0 | 0 | 0 | 0 | 0 | 100 | 0 |
| TRACH2014573 | 0 | 0 | 0 | 0 | 0 | 100 | 0 |
| TRACH2014725 | 0 | 0 | 0 | 0 | 0 | 100 | 0 |
| TRACH2014760 | 0 | 0 | 0 | 0 | 0 | 100 | 0 |
| TRACH2014815 | 0 | 0 | 0 | 0 | 0 | 100 | 0 |
| TRACH2014839 | 0 | 0 | 0 | 0 | 0 | 100 | 0 |
| TRACH2014938 | 0 | 0 | 0 | 0 | 0 | 100 | 0 |
| TRACH2014950 | 0 | 0 | 0 | 0 | 0 | 100 | 0 |
| TRACH2014972 | 0 | 0 | 0 | 0 | 0 | 100 | 0 |
| TRACH2014974 | 0 | 0 | 0 | 0 | 0 | 100 | 0 |
| TRACH2014997 | 0 | 0 | 0 | 0 | 0 | 15.851 | 0 |
| TRACH2015180 | 0 | 0 | 0 | 0 | 0 | 100 | 0 |
| TRACH2015243 | 0 | 0 | 0 | 0 | 0 | 100 | 0 |
| TRACH2015316 | 0 | 0 | 0 | 0 | 0 | 100 | 0 |
| TRACH2015381 | 0 | 0 | 0 | 0 | 0 | 100 | 0 |
| TRACH2015486 | 0 | 0 | 0 | 0 | 0 | 100 | 0 |
| TRACH2015654 | 0 | 0 | 0 | 0 | 0 | 23.395 | 0 |
| TRACH2015823 | 10.944 | 0 | 0 | 0 | 0 | 7.351 | 0 |
| TRACH2015824 | 0 | 0 | 0 | 0 | 0 | 2.603 | 0 |
| TRACH2015939 | 14.052 | 0 | 0 | 0 | 0 | 18.877 | 0 |
| TRACH2015987 | 0 | 0 | 0 | 0 | 0 | 100 | 0 |
| TRACH2016080 | 0 | 0 | 0 | 0 | 0 | 100 | 0 |
| TRACH2016131 | 0 | 0 | 0 | 0 | 0 | 32.807 | 0 |
| TRACH2016286 | 0 | 0 | 0 | 0 | 0 | 100 | 0 |
| TRACH2016317 | 0 | 0 | 0 | 0 | 0 | 17.467 | 0 |
| TRACH2016347 | 0 | 0 | 0 | 0 | 0 | 100 | 0 |
| TRACH2016380 | 0 | 0 | 0 | 0 | 0 | 100 | 0 |
| TRACH2016384 | 0 | 0 | 0 | 0 | 0 | 100 | 0 |
| TRACH2016410 | 0 | 0 | 0 | 0 | 0 | 100 | 0 |
| TRACH2016481 | 0 | 0 | 0 | 0 | 0 | 48.432 | 0 |
| TRACH2016498 | 0 | 0 | 0 | 0 | 0 | 100 | 0 |
| TRACH2016533 | 23.903 | 0 | 0 | 0 | 0 | 16.055 | 0 |
| TRACH2016551 | 0 | 0 | 0 | 0 | 0 | 100 | 0 |
| TRACH2016554 | 0 | 0 | 0 | 0 | 0 | 100 | 0 |
| TRACH2016651 | 0 | 0 | 0 | 0 | 0 | 100 | 0 |
| TRACH2016690 | 0 | 0 | 0 | 0 | 0 | 100 | 0 |
| TRACH2016709 | 0 | 0 | 0 | 0 | 0 | 100 | 0 |
| TRACH2016722 | 0 | 0 | 0 | 0 | 0 | 100 | 0 |
| TRACH2016835 | 15.389 | 0 | 0 | 0 | 0 | 20.672 | 0 |
| TRACH2016980 | 0 | 0 | 0 | 0 | 0 | 100 | 0 |
| TRACH2017086 | 0 | 0 | 0 | 0 | 0 | 100 | 0 |
| TRACH2017368 | 0 | 0 | 0 | 0 | 0 | 4.896 | 0 |
| TRACH2017498 | 0 | 0 | 0 | 0 | 0 | 100 | 0 |
| TRACH2017609 | 26.499 | 0 | 0 | 0 | 0 | 35.597 | 0 |
| TRACH2017949 | 0 | 0 | 0 | 0 | 0 | 100 | 0 |
| TRACH2017965 | 0 | 0 | 0 | 0 | 0 | 100 | 0 |
| TRACH2017980 | 0 | 0 | 0 | 0 | 0 | 100 | 0 |
| TRACH2018034 | 0 | 0 | 0 | 0 | 0 | 50.251 | 0 |
| TRACH2018084 | 0 | 0 | 0 | 0 | 0 | 100 | 0 |
| TRACH2018262 | 0 | 0 | 0 | 0 | 0 | 100 | 0 |
| TRACH2018273 | 0 | 0 | 0 | 0 | 0 | 100 | 0 |
| TRACH2018278 | 0 | 0 | 0 | 0 | 0 | 100 | 0 |
| TRACH2018317 | 0 | 10.844 | 0 | 0 | 0 | 3.281 | 0 |
| TRACH2018345 | 0 | 0 | 0 | 0 | 0 | 100 | 0 |
| TRACH2018380 | 0 | 0 | 0 | 0 | 0 | 100 | 0 |
| TRACH2018446 | 6.974 | 0 | 0 | 0 | 0 | 9.369 | 0 |
| TRACH2018449 | 0 | 56.123 | 0 | 0 | 0 | 33.966 | 0 |
| TRACH2018512 | 0 | 0 | 0 | 0 | 0 | 100 | 0 |
| TRACH2018646 | 0 | 0 | 0 | 0 | 0 | 100 | 0 |
| TRACH2018663 | 0 | 0 | 0 | 0 | 0 | 100 | 0 |
| TRACH2018718 | 0 | 0 | 0 | 0 | 0 | 100 | 0 |
| TRACH2018835 | 0 | 0 | 0 | 0 | 0 | 100 | 0 |
| TRACH2018882 | 0 | 0 | 0 | 0 | 0 | 100 | 0 |
| TRACH2018914 | 0 | 0 | 0 | 0 | 0 | 100 | 0 |
| TRACH2018950 | 0 | 0 | 0 | 0 | 0 | 8.413 | 0 |
| TRACH2019024 | 0 | 0 | 0 | 0 | 0 | 100 | 0 |
| TRACH2019046 | 0 | 0 | 0 | 0 | 0 | 100 | 0 |
| TRACH2019080 | 0 | 0 | 0 | 0 | 0 | 34.182 | 0 |
| TRACH2019151 | 0 | 0 | 0 | 0 | 0 | 100 | 0 |
| TRACH2019154 | 0 | 0 | 0 | 0 | 0 | 100 | 0 |
| TRACH2019176 | 0 | 0 | 0 | 0 | 0 | 100 | 0 |
| TRACH2019248 | 0 | 0 | 0 | 0 | 0 | 100 | 0 |
| TRACH2019309 | 0 | 0 | 0 | 0 | 0 | 100 | 0 |
| TRACH2019425 | 0 | 0 | 0 | 0 | 0 | 12.564 | 0 |
| TRACH2019473 | 0 | 0 | 0 | 0 | 0 | 100 | 0 |
| TRACH2019602 | 0 | 0 | 0 | 0 | 0 | 100 | 0 |
| TRACH2019661 | 0 | 0 | 0 | 0 | 0 | 100 | 0 |
| TRACH2019672 | 0 | 0 | 0 | 0 | 0 | 23.395 | 0 |
| TRACH2019673 | 0 | 0 | 0 | 0 | 0 | 100 | 0 |
| TRACH2019844 | 0 | 0 | 0 | 0 | 0 | 100 | 0 |
| TRACH2019879 | 0 | 0 | 0 | 0 | 0 | 100 | 0 |
| TRACH2020048 | 0 | 0 | 0 | 0 | 0 | 100 | 0 |
| TRACH2020336 | 0 | 0 | 0 | 0 | 0 | 100 | 0 |
| TRACH2020525 | 0 | 0 | 0 | 0 | 0 | 100 | 0 |
| TRACH2021398 | 0 | 0 | 0 | 0 | 0 | 100 | 0 |
| TRACH2021622 | 0 | 0 | 0 | 0 | 0 | 100 | 0 |
| TRACH2021635 | 0 | 0 | 0 | 0 | 0 | 100 | 0 |
| TRACH2021964 | 0 | 0 | 0 | 0 | 0 | 100 | 0 |
| TRACH2022042 | 0 | 0 | 0 | 0 | 0 | 100 | 0 |
| TRACH2022113 | 0 | 0 | 0 | 0 | 0 | 100 | 0 |
| TRACH2022253 | 0 | 0 | 0 | 0 | 0 | 100 | 0 |
| TRACH2022425 | 0 | 0 | 0 | 0 | 0 | 100 | 0 |
| TRACH2022553 | 0 | 0 | 0 | 0 | 0 | 100 | 0 |
| TRACH2022649 | 0 | 0 | 0 | 0 | 0 | 100 | 0 |
| TRACH2022839 | 0 | 0 | 0 | 0 | 0 | 100 | 0 |
| TRACH2023246 | 0 | 0 | 0 | 0 | 0 | 100 | 0 |
| TRACH2023299 | 0 | 0 | 0 | 0 | 0 | 7.150 | 0 |
| TRACH2023306 | 0 | 0 | 0 | 0 | 0 | 100 | 0 |
| TRACH2023416 | 0 | 0 | 0 | 0 | 0 | 100 | 0 |
| TRACH2023479 | 0 | 0 | 0 | 0 | 0 | 100 | 0 |
| TRACH2023684 | 0 | 0 | 0 | 0 | 0 | 100 | 0 |
| TRACH2023860 | 0 | 0 | 0 | 0 | 0 | 100 | 0 |
| TRACH2023876 | 0 | 0 | 0 | 0 | 0 | 100 | 0 |
| TRACH2024139 | 0 | 0 | 0 | 0 | 0 | 100 | 0 |
| TRACH2024187 | 0 | 0 | 0 | 0 | 0 | 100 | 0 |
| TRACH2024271 | 0 | 0 | 0 | 0 | 0 | 100 | 0 |
| TRACH2024293 | 53.839 | 0 | 0 | 0 | 0 | 18.081 | 0 |
| TRACH2024408 | 0 | 0 | 0 | 0 | 0 | 100 | 0 |
| TRACH2024512 | 0 | 0 | 0 | 0 | 0 | 100 | 0 |
| TRACH2024559 | 0 | 0 | 0 | 0 | 0 | 100 | 0 |
| TRACH2024647 | 0 | 0 | 0 | 0 | 0 | 100 | 0 |
| TRACH2024651 | 0 | 0 | 0 | 0 | 0 | 100 | 0 |
| TRACH2024730 | 0 | 0 | 0 | 0 | 0 | 100 | 0 |
| TRACH2024735 | 0 | 0 | 0 | 0 | 0 | 100 | 0 |
| TRACH2024749 | 0 | 0 | 0 | 0 | 0 | 100 | 0 |
| TRACH2024821 | 0 | 0 | 0 | 0 | 0 | 100 | 0 |
| TRACH2025057 | 0 | 0 | 0 | 0 | 0 | 100 | 0 |
| TRACH2025084 | 0 | 0 | 0 | 0 | 0 | 100 | 0 |
| TRACH2025155 | 0 | 0 | 0 | 0 | 0 | 100 | 0 |
| TRACH2025224 | 0 | 0 | 0 | 0 | 0 | 100 | 0 |
| TRACH2025344 | 0 | 0 | 0 | 0 | 0 | 11.031 | 0 |
| TRACH2025379 | 0 | 0 | 0 | 0 | 0 | 100 | 0 |
| TRACH2025507 | 0 | 0 | 0 | 0 | 0 | 100 | 0 |
| TRACH2025535 | 0.968 | 0 | 0 | 0 | 0 | 2.601 | 12.468 |
| TRACH2025569 | 0 | 0 | 0 | 0 | 0 | 100 | 0 |
| TRACH2025705 | 0 | 0 | 0 | 0 | 0 | 100 | 0 |
| TRACH2025749 | 0 | 0 | 0 | 0 | 0 | 100 | 0 |
| TRACH2025753 | 0 | 0 | 0 | 0 | 0 | 100 | 0 |
| TRACH2025810 | 0 | 0 | 0 | 0 | 0 | 100 | 0 |
| TRACH2025853 | 0 | 0 | 0 | 0 | 0 | 100 | 0 |
| TRACH2025911 | 0 | 0 | 0 | 0 | 0 | 52.645 | 0 |
| TRACH2025932 | 0 | 0 | 0 | 0 | 0 | 100 | 0 |
| TRACH3000014 | 0 | 0 | 0 | 0 | 0 | 81.453 | 0 |
| TRACH3000017 | 0 | 0 | 0 | 0 | 0 | 100 | 0 |
| TRACH3000043 | 0 | 0 | 0 | 0 | 0 | 100 | 0 |
| TRACH3000134 | 0 | 0 | 0 | 0 | 0 | 20.255 | 0 |
| TRACH3000180 | 0 | 0 | 0 | 0 | 0 | 100 | 0 |
| TRACH3000342 | 0 | 0 | 0 | 0 | 0 | 100 | 0 |
| TRACH3000420 | 0 | 0 | 0 | 0 | 0 | 100 | 0 |
| TRACH3000515 | 0 | 0 | 0 | 0 | 0 | 100 | 0 |
| TRACH3000530 | 0 | 0 | 0 | 0 | 0 | 100 | 0 |
| TRACH3000548 | 0 | 0 | 0 | 0 | 0 | 100 | 0 |
| TRACH3000558 | 0 | 0 | 0 | 0 | 0 | 100 | 0 |
| TRACH3000586 | 0 | 0 | 0 | 0 | 0 | 100 | 0 |
| TRACH3000692 | 0 | 0 | 0 | 0 | 0 | 15.750 | 0 |
| TRACH3000780 | 0 | 0 | 0 | 0 | 0 | 52.334 | 0 |
| TRACH3000892 | 0 | 0 | 0 | 0 | 0 | 100 | 0 |
| TRACH3000926 | 0 | 0 | 0 | 0 | 0 | 100 | 0 |
| TRACH3001119 | 0 | 0 | 0 | 0 | 0 | 100 | 0 |
| TRACH3001443 | 0 | 0 | 0 | 0 | 0 | 100 | 0 |
| TRACH3001550 | 0 | 0 | 0 | 0 | 0 | 52.334 | 0 |
| TRACH3001759 | 0 | 0 | 0 | 0 | 0 | 100 | 0 |
| TRACH3002064 | 0 | 0 | 0 | 0 | 0 | 100 | 0 |
| TRACH3002107 | 0 | 0 | 0 | 0 | 0 | 100 | 0 |
| TRACH3002168 | 0 | 0 | 0 | 0 | 0 | 100 | 0 |
| TRACH3002188 | 0 | 0 | 0 | 0 | 0 | 100 | 0 |
| TRACH3002192 | 2.600 | 0 | 0 | 0 | 0 | 3.493 | 0 |
| TRACH3002245 | 0 | 0 | 0 | 0 | 0 | 100 | 0 |
| TRACH3002293 | 0 | 0 | 0 | 0 | 0 | 100 | 0 |
| TRACH3002533 | 0 | 0 | 0 | 0 | 0 | 100 | 0 |
| TRACH3002561 | 0 | 0 | 0 | 0 | 0 | 100 | 0 |
| TRACH3002567 | 0 | 0 | 0 | 0 | 0 | 100 | 0 |
| TRACH3002605 | 0 | 0 | 0 | 0 | 0 | 52.334 | 0 |
| TRACH3002650 | 0 | 0 | 0 | 0 | 0 | 100 | 0 |
| TRACH3002752 | 0 | 0 | 0 | 0 | 0 | 11.442 | 0 |
| TRACH3002866 | 0 | 0 | 0 | 0 | 0 | 100 | 0 |
| TRACH3002871 | 0 | 0 | 0 | 0 | 0 | 100 | 0 |
| TRACH3002876 | 0 | 0 | 0 | 0 | 0 | 100 | 0 |
| TRACH3002890 | 0 | 0 | 0 | 0 | 0 | 100 | 0 |
| TRACH3003009 | 0 | 0 | 0 | 0 | 0 | 100 | 0 |
| TRACH3003037 | 0 | 0 | 0 | 0 | 0 | 35.900 | 0 |
| TRACH3003357 | 0 | 0 | 0 | 0 | 0 | 100 | 0 |
| TRACH3003379 | 0 | 0 | 0 | 0 | 0 | 54.819 | 0 |
| TRACH3003547 | 3.526 | 0 | 29.074 | 0 | 0 | 9.474 | 0 |
| TRACH3003586 | 0 | 0 | 0 | 0 | 0 | 100 | 0 |
| TRACH3003683 | 0 | 0 | 0 | 0 | 0 | 100 | 0 |
| TRACH3003780 | 0 | 0 | 0 | 0 | 0 | 100 | 0 |
| TRACH3003805 | 0 | 0 | 0 | 0 | 0 | 100 | 0 |
| TRACH3003832 | 0 | 0 | 0 | 0 | 0 | 13.601 | 0 |
| TRACH3003872 | 0 | 0 | 0 | 0 | 0 | 46.116 | 0 |
| TRACH3004068 | 0 | 0 | 0 | 0 | 31.044 | 1.596 | 0 |
| TRACH3004113 | 0 | 0 | 0 | 0 | 0 | 100 | 0 |
| TRACH3004288 | 0 | 0 | 0 | 0 | 0 | 100 | 0 |
| TRACH3004303 | 0 | 0 | 0 | 0 | 0 | 100 | 0 |
| TRACH3004412 | 0 | 0 | 0 | 0 | 0 | 100 | 0 |
| TRACH3004424 | 14.181 | 0 | 0 | 0 | 0 | 19.049 | 0 |
| TRACH3004456 | 0 | 0 | 0 | 0 | 0 | 100 | 0 |
| TRACH3004537 | 0 | 0 | 0 | 0 | 0 | 100 | 0 |
| TRACH3004596 | 0 | 0 | 0 | 0 | 0 | 100 | 0 |
| TRACH3004651 | 0 | 0 | 0 | 0 | 0 | 100 | 0 |
| TRACH3004652 | 0 | 0 | 0 | 0 | 0 | 100 | 0 |
| TRACH3004671 | 0 | 0 | 0 | 0 | 0 | 100 | 0 |
| TRACH3004721 | 2.424 | 0 | 0 | 0 | 0 | 3.256 | 0 |
| TRACH3004747 | 0 | 0 | 0 | 0 | 0 | 100 | 0 |
| TRACH3004760 | 0 | 0 | 0 | 0 | 0 | 100 | 0 |
| TRACH3004783 | 0 | 0 | 0 | 0 | 0 | 100 | 0 |
| TRACH3004786 | 0 | 0 | 0 | 0 | 0 | 100 | 0 |
| TRACH3004840 | 0 | 0 | 0 | 0 | 0 | 100 | 0 |
| TRACH3004931 | 0 | 0 | 0 | 0 | 0 | 100 | 0 |
| TRACH3004934 | 0 | 0 | 0 | 0 | 0 | 100 | 0 |
| TRACH3005072 | 0 | 0 | 0 | 0 | 0 | 100 | 0 |
| TRACH3005085 | 0 | 0 | 0 | 0 | 0 | 100 | 0 |
| TRACH3005102 | 0 | 0 | 0 | 0 | 0 | 100 | 0 |
| TRACH3005173 | 0 | 0 | 0 | 0 | 0 | 100 | 0 |
| TRACH3005191 | 0 | 0 | 0 | 0 | 0 | 100 | 0 |
| TRACH3005211 | 0 | 0 | 0 | 0 | 0 | 20.643 | 0 |
| TRACH3005274 | 0 | 0 | 0 | 0 | 0 | 100 | 0 |
| TRACH3005294 | 0 | 0 | 0 | 0 | 0 | 4.160 | 0 |
| TRACH3005479 | 0 | 0 | 0 | 0 | 0 | 63.148 | 0 |
| TRACH3005549 | 0 | 0 | 0 | 0 | 0 | 100 | 0 |
| TRACH3005699 | 0 | 0 | 0 | 0 | 0 | 53.752 | 0 |
| TRACH3005702 | 0 | 0 | 0 | 0 | 0 | 100 | 0 |
| TRACH3005808 | 0 | 0 | 0 | 0 | 0 | 100 | 0 |
| TRACH3005852 | 0 | 0 | 0 | 0 | 0 | 100 | 0 |
| TRACH3005896 | 0 | 0 | 0 | 0 | 0 | 100 | 0 |
| TRACH3006038 | 0 | 0 | 0 | 0 | 0 | 61.213 | 0 |
| TRACH3006149 | 0 | 0 | 0 | 0 | 0 | 100 | 0 |
| TRACH3006228 | 0 | 0 | 0 | 0 | 0 | 100 | 0 |
| TRACH3006264 | 0 | 0 | 0 | 0 | 0 | 100 | 0 |
| TRACH3006336 | 0 | 0 | 0 | 0 | 0 | 100 | 0 |
| TRACH3006379 | 0 | 0 | 0 | 0 | 0 | 100 | 0 |
| TRACH3006392 | 0 | 0 | 0 | 0 | 0 | 100 | 0 |
| TRACH3006395 | 0 | 0 | 0 | 0 | 0 | 100 | 0 |
| TRACH3006397 | 0 | 0 | 0 | 0 | 0 | 100 | 0 |
| TRACH3006412 | 0 | 0 | 0 | 0 | 0 | 61.213 | 0 |
| TRACH3006470 | 0 | 0 | 0 | 0 | 0 | 100 | 0 |
| TRACH3006589 | 0 | 0 | 0 | 0 | 0 | 100 | 0 |
| TRACH3006626 | 0 | 0 | 0 | 0 | 0 | 100 | 0 |
| TRACH3006699 | 0 | 0 | 0 | 0 | 0 | 100 | 0 |
| TRACH3006717 | 3.060 | 0 | 0 | 0 | 0 | 4.110 | 0 |
| TRACH3006800 | 0 | 0 | 0 | 0 | 0 | 65.258 | 0 |
| TRACH3006889 | 0 | 0 | 0 | 0 | 0 | 100 | 0 |
| TRACH3006985 | 0 | 0 | 0 | 0 | 0 | 100 | 0 |
| TRACH3007097 | 0 | 0 | 0 | 0 | 0 | 100 | 0 |
| TRACH3007268 | 0 | 0 | 0 | 0 | 0 | 100 | 0 |
| TRACH3007274 | 0 | 0 | 0 | 0 | 0 | 100 | 0 |
| TRACH3007277 | 0 | 0 | 0 | 0 | 0 | 100 | 0 |
| TRACH3007391 | 0 | 0 | 0 | 0 | 0 | 100 | 0 |
| TRACH3007479 | 0 | 0 | 0 | 0 | 0 | 26.502 | 0 |
| TRACH3007541 | 42.674 | 0 | 0 | 0 | 0 | 57.326 | 0 |
| TRACH3007595 | 0 | 0 | 0 | 0 | 0 | 100 | 0 |
| TRACH3007625 | 2.941 | 0 | 0 | 0 | 0 | 2.633 | 0 |
| TRACH3007627 | 0 | 0 | 0 | 0 | 0 | 100 | 0 |
| TRACH3007689 | 0 | 0 | 0 | 0 | 0 | 52.833 | 0 |
| TRACH3007766 | 0 | 0 | 0 | 0 | 0 | 100 | 0 |
| TRACH3007866 | 0 | 0 | 0 | 0 | 0 | 100 | 0 |
| TRACH3007995 | 0 | 0 | 0 | 0 | 0 | 61.213 | 0 |
| TRACH3008042 | 0 | 0 | 0 | 0 | 0 | 100 | 0 |
| TRACH3008061 | 0 | 0 | 0 | 0 | 0 | 100 | 0 |
| TRACH3008093 | 2.042 | 0 | 0 | 0 | 0 | 2.744 | 0 |
| TRACH3008201 | 0 | 0 | 0 | 0 | 0 | 52.833 | 0 |
| TRACH3008508 | 15.975 | 0 | 0 | 0 | 0 | 21.459 | 0 |
| TRACH3008535 | 0 | 0 | 0 | 0 | 0 | 31.730 | 0 |
| TRACH3008629 | 0 | 0 | 0 | 0 | 0 | 97.020 | 0 |
| TRACH3008632 | 0 | 0 | 0 | 0 | 0 | 9.465 | 0 |
| TRACH3008688 | 0 | 0 | 0 | 0 | 0 | 100 | 0 |
| TRACH3008697 | 0 | 0 | 0 | 0 | 0 | 100 | 0 |
| TRACH3008713 | 0 | 0 | 0 | 0 | 0 | 31.730 | 0 |
| TRACH3008887 | 0 | 0 | 0 | 0 | 0 | 100 | 0 |
| TRACH3008902 | 0 | 0 | 0 | 0 | 0 | 100 | 0 |
| TRACH3008990 | 0 | 0 | 0 | 0 | 0 | 100 | 0 |
| TRACH3009001 | 0 | 0 | 0 | 0 | 0 | 52.489 | 0 |
| TRACH3009008 | 0 | 0 | 0 | 0 | 0 | 16.463 | 0 |
| TRACH3009059 | 0 | 0 | 0 | 0 | 0 | 100 | 0 |
| TRACH3009061 | 0 | 0 | 0 | 0 | 0 | 100 | 0 |
| TRACH3009148 | 0 | 0 | 0 | 0 | 0 | 20.094 | 0 |
| TRACH3009455 | 0 | 0 | 0 | 0 | 0 | 52.833 | 0 |
| TRACH3009701 | 0 | 0 | 0 | 0 | 0 | 100 | 0 |
| TRACH3009715 | 0 | 0 | 0 | 0 | 0 | 100 | 0 |
| TRACH3009894 | 0 | 0 | 0 | 0 | 0 | 100 | 0 |
| TRACH3009956 | 0 | 0 | 0 | 0 | 0 | 44.106 | 0 |
| TRACH3010079 | 0 | 0 | 0 | 0 | 0 | 27.054 | 0 |
| TRACH3010167 | 0 | 0 | 0 | 0 | 0 | 100 | 0 |
| TRACH3010331 | 0 | 0 | 0 | 0 | 0 | 100 | 0 |
| TRACH3010342 | 0 | 0 | 0 | 0 | 0 | 100 | 0 |
| TRACH3010382 | 0 | 0 | 0 | 0 | 0 | 100 | 0 |
| TRACH3010757 | 0 | 0 | 0 | 0 | 0 | 100 | 0 |
| TRACH3010901 | 0 | 0 | 0 | 0 | 0 | 100 | 0 |
| TRACH3011004 | 0 | 0 | 0 | 0 | 0 | 100 | 0 |
| TRACH3011082 | 0 | 0 | 0 | 0 | 0 | 100 | 0 |
| TRACH3011184 | 0 | 0 | 0 | 0 | 0 | 100 | 0 |
| TRACH3011282 | 0 | 0 | 0 | 0 | 0 | 100 | 0 |
| TRACH3011313 | 0 | 0 | 0 | 0 | 0 | 100 | 0 |
| TRACH3011454 | 0 | 0 | 0 | 0 | 0 | 100 | 0 |
| TRACH3011485 | 0 | 0 | 0 | 0 | 0 | 100 | 0 |
| TRACH3011503 | 0 | 0 | 0 | 0 | 0 | 100 | 0 |
| TRACH3011538 | 0 | 0 | 0 | 0 | 0 | 100 | 0 |
| TRACH3011542 | 0 | 0 | 0 | 0 | 0 | 100 | 0 |
| TRACH3012106 | 0 | 0 | 0 | 0 | 0 | 100 | 0 |
| TRACH3012161 | 0 | 0 | 0 | 0 | 0 | 100 | 0 |
| TRACH3012232 | 0 | 0 | 0 | 0 | 0 | 100 | 0 |
| TRACH3012261 | 0 | 0 | 0 | 0 | 0 | 100 | 0 |
| TRACH3012445 | 0 | 0 | 0 | 0 | 0 | 100 | 0 |
| TRACH3012460 | 0 | 0 | 0 | 0 | 0 | 100 | 0 |
| TRACH3012659 | 0 | 0 | 0 | 0 | 0 | 100 | 0 |
| TRACH3012718 | 0 | 0 | 0 | 0 | 0 | 100 | 0 |
| TRACH3012864 | 0 | 0 | 0 | 0 | 0 | 100 | 0 |
| TRACH3012891 | 0 | 0 | 0 | 0 | 0 | 100 | 0 |
| TRACH3012942 | 0 | 0 | 0 | 0 | 0 | 100 | 0 |
| TRACH3013043 | 0 | 0 | 0 | 0 | 0 | 46.144 | 0 |
| TRACH3013072 | 42.674 | 0 | 0 | 0 | 0 | 57.326 | 0 |
| TRACH3013426 | 0 | 0 | 0 | 0 | 0 | 100 | 0 |
| TRACH3013454 | 0 | 0 | 0 | 0 | 0 | 100 | 0 |
| TRACH3013558 | 0 | 0 | 0 | 0 | 0 | 61.213 | 0 |
| TRACH3013684 | 0 | 0 | 0 | 0 | 0 | 100 | 0 |
| TRACH3013693 | 0 | 0 | 0 | 0 | 0 | 100 | 0 |
| TRACH3013700 | 0 | 0 | 0 | 0 | 0 | 100 | 0 |
| TRACH3013766 | 0 | 0 | 0 | 0 | 0 | 100 | 0 |
| TRACH3013900 | 0 | 0 | 0 | 0 | 0 | 100 | 0 |
| TRACH3013926 | 0 | 0 | 0 | 0 | 0 | 100 | 0 |
| TRACH3014063 | 0 | 0 | 0 | 0 | 0 | 100 | 0 |
| TRACH3014183 | 0 | 0 | 0 | 0 | 0 | 100 | 0 |
| TRACH3014215 | 0 | 0 | 0 | 0 | 0 | 100 | 0 |
| TRACH3014316 | 0 | 0 | 0 | 0 | 0 | 47.415 | 0 |
| TRACH3014415 | 0 | 0 | 0 | 0 | 0 | 100 | 0 |
| TRACH3014580 | 0 | 0 | 0 | 0 | 0 | 100 | 0 |
| TRACH3014641 | 0 | 0 | 0 | 0 | 0 | 100 | 0 |
| TRACH3014885 | 0 | 0 | 0 | 0 | 0 | 100 | 0 |
| TRACH3015136 | 0 | 0 | 0 | 0 | 0 | 100 | 0 |
| TRACH3015336 | 0 | 0 | 0 | 0 | 0 | 100 | 0 |
| TRACH3015346 | 0 | 0 | 0 | 0 | 0 | 100 | 0 |
| TRACH3015354 | 0 | 0 | 0 | 0 | 0 | 100 | 0 |
| TRACH3015467 | 0 | 0 | 0 | 0 | 0 | 100 | 0 |
| TRACH3015626 | 0 | 0 | 0 | 0 | 0 | 100 | 0 |
| TRACH3015951 | 0 | 0 | 0 | 0 | 0 | 100 | 0 |
| TRACH3016051 | 0 | 0 | 0 | 0 | 0 | 100 | 0 |
| TRACH3016120 | 0 | 0 | 0 | 0 | 0 | 100 | 0 |
| TRACH3016264 | 0 | 0 | 0 | 0 | 0 | 100 | 0 |
| TRACH3016277 | 0 | 0 | 0 | 0 | 0 | 100 | 0 |
| TRACH3016368 | 0 | 0 | 0 | 0 | 0 | 100 | 0 |
| TRACH3016455 | 0 | 0 | 0 | 0 | 0 | 100 | 0 |
| TRACH3016614 | 0 | 0 | 0 | 0 | 0 | 100 | 0 |
| TRACH3016805 | 11.263 | 0 | 0 | 0 | 0 | 5.043 | 0 |
| TRACH3016992 | 0 | 0 | 0 | 0 | 0 | 53.323 | 0 |
| TRACH3017171 | 0 | 0 | 0 | 0 | 0 | 100 | 0 |
| TRACH3017409 | 0 | 0 | 0 | 0 | 0 | 100 | 0 |
| TRACH3017934 | 0 | 0 | 0 | 0 | 0 | 100 | 0 |
| TRACH3018108 | 0 | 0 | 0 | 0 | 0 | 100 | 0 |
| TRACH3018191 | 0 | 0 | 0 | 0 | 0 | 100 | 0 |
| TRACH3018240 | 0 | 0 | 0 | 0 | 0 | 100 | 0 |
| TRACH3018261 | 0 | 0 | 0 | 0 | 0 | 100 | 0 |
| TRACH3018519 | 0 | 0 | 0 | 0 | 0 | 100 | 0 |
| TRACH3018524 | 0 | 0 | 0 | 0 | 0 | 100 | 0 |
| TRACH3018606 | 0 | 0 | 0 | 0 | 0 | 100 | 0 |
| TRACH3018783 | 0 | 0 | 0 | 0 | 0 | 100 | 0 |
| TRACH3018907 | 0 | 0 | 0 | 0 | 0 | 100 | 0 |
| TRACH3018933 | 0 | 0 | 0 | 0 | 0 | 100 | 0 |
| TRACH3018943 | 0 | 0 | 0 | 0 | 0 | 100 | 0 |
| TRACH3019018 | 0 | 0 | 0 | 0 | 0 | 100 | 0 |
| TRACH3019058 | 0 | 0 | 0 | 0 | 0 | 100 | 0 |
| TRACH3019142 | 0 | 0 | 0 | 0 | 0 | 100 | 0 |
| TRACH3019290 | 23.065 | 0 | 0 | 0 | 0 | 30.984 | 0 |
| TRACH3019347 | 0 | 0 | 0 | 0 | 0 | 100 | 0 |
| TRACH3019370 | 0 | 0 | 0 | 0 | 0 | 100 | 0 |
| TRACH3019447 | 0 | 0 | 0 | 0 | 0 | 100 | 0 |
| TRACH3019598 | 0 | 0 | 0 | 0 | 0 | 100 | 0 |
| TRACH3019621 | 0 | 0 | 0 | 0 | 0 | 100 | 0 |
| TRACH3019662 | 0 | 0 | 0 | 0 | 0 | 100 | 0 |
| TRACH3019807 | 0 | 0 | 0 | 0 | 0 | 100 | 0 |
| TRACH3019924 | 0 | 0 | 0 | 0 | 0 | 100 | 0 |
| TRACH3019977 | 0 | 0 | 0 | 0 | 0 | 100 | 0 |
| TRACH3020137 | 0 | 0 | 0 | 0 | 0 | 100 | 0 |
| TRACH3020410 | 0 | 0 | 0 | 0 | 0 | 100 | 0 |
| TRACH3020563 | 0 | 0 | 0 | 0 | 0 | 100 | 0 |
| TRACH3020605 | 0 | 0 | 0 | 0 | 0 | 100 | 0 |
| TRACH3020750 | 0 | 0 | 0 | 0 | 0 | 100 | 0 |
| TRACH3020769 | 0 | 0 | 0 | 0 | 0 | 100 | 0 |
| TRACH3020928 | 0 | 0 | 0 | 0 | 0 | 100 | 0 |
| TRACH3020930 | 0 | 0 | 0 | 0 | 0 | 100 | 0 |
| TRACH3021023 | 0 | 0 | 0 | 0 | 0 | 100 | 0 |
| TRACH3021066 | 0 | 0 | 0 | 0 | 0 | 100 | 0 |
| TRACH3021212 | 0 | 0 | 0 | 0 | 0 | 100 | 0 |
| TRACH3021335 | 0 | 0 | 0 | 0 | 0 | 100 | 0 |
| TRACH3021373 | 0 | 0 | 0 | 0 | 0 | 100 | 0 |
| TRACH3021544 | 0 | 0 | 0 | 0 | 0 | 47.415 | 0 |
| TRACH3021778 | 0 | 0 | 0 | 0 | 0 | 100 | 0 |
| TRACH3021834 | 0 | 0 | 0 | 0 | 0 | 100 | 0 |
| TRACH3021883 | 0 | 0 | 0 | 0 | 0 | 100 | 0 |
| TRACH3022170 | 0 | 0 | 0 | 0 | 0 | 100 | 0 |
| TRACH3022198 | 20.791 | 0 | 0 | 0 | 0 | 9.310 | 0 |
| TRACH3022296 | 0 | 0 | 0 | 0 | 0 | 100 | 0 |
| TRACH3022482 | 0 | 0 | 0 | 0 | 0 | 100 | 0 |
| TRACH3022732 | 0 | 0 | 0 | 0 | 0 | 100 | 0 |
| TRACH3022758 | 0 | 0 | 0 | 0 | 0 | 100 | 0 |
| TRACH3022875 | 0 | 0 | 0 | 0 | 0 | 100 | 0 |
| TRACH3022910 | 0 | 0 | 0 | 0 | 0 | 100 | 0 |
| TRACH3022960 | 0 | 0 | 0 | 0 | 0 | 100 | 0 |
| TRACH3023063 | 0 | 0 | 0 | 0 | 0 | 100 | 0 |
| TRACH3023203 | 0 | 0 | 0 | 0 | 0 | 100 | 0 |
| TRACH3023242 | 0 | 0 | 0 | 0 | 0 | 100 | 0 |
| TRACH3023373 | 0 | 0 | 0 | 0 | 0 | 100 | 0 |
| TRACH3023516 | 0 | 0 | 0 | 0 | 0 | 100 | 0 |
| TRACH3023752 | 0 | 0 | 0 | 0 | 0 | 100 | 0 |
| TRACH3023945 | 0 | 0 | 0 | 0 | 0 | 100 | 0 |
| TRACH3023960 | 0 | 0 | 0 | 0 | 0 | 100 | 0 |
| TRACH3024020 | 0 | 0 | 0 | 0 | 0 | 100 | 0 |
| TRACH3024081 | 0 | 0 | 0 | 0 | 0 | 100 | 0 |
| TRACH3024342 | 0 | 0 | 0 | 0 | 0 | 52.833 | 0 |
| TRACH3024423 | 0 | 0 | 0 | 0 | 0 | 100 | 0 |
| TRACH3024428 | 0 | 0 | 0 | 0 | 0 | 100 | 0 |
| TRACH3024512 | 0 | 0 | 0 | 0 | 0 | 100 | 0 |
| TRACH3024671 | 0 | 0 | 0 | 0 | 0 | 52.833 | 0 |
| TRACH3024823 | 0 | 0 | 0 | 0 | 0 | 100 | 0 |
| TRACH3025302 | 0 | 0 | 0 | 0 | 0 | 100 | 0 |
| TRACH3025316 | 0 | 0 | 0 | 0 | 0 | 68.709 | 0 |
| TRACH3025346 | 0 | 0 | 0 | 0 | 0 | 100 | 0 |
| TRACH3025520 | 0 | 0 | 0 | 0 | 0 | 100 | 0 |
| TRACH3026148 | 0 | 0 | 0 | 0 | 0 | 100 | 0 |
| TRACH3026283 | 0 | 0 | 0 | 0 | 0 | 100 | 0 |
| TRACH3026299 | 0 | 0 | 0 | 0 | 0 | 100 | 0 |
| TRACH3026303 | 0 | 0 | 0 | 0 | 0 | 31.391 | 0 |
| TRACH3026542 | 0 | 0 | 0 | 0 | 0 | 100 | 0 |
| TRACH3026650 | 0 | 0 | 0 | 0 | 0 | 100 | 0 |
| TRACH3026676 | 9.699 | 0 | 0 | 0 | 0 | 39.086 | 0 |
| TRACH3026744 | 0 | 0 | 0 | 0 | 0 | 100 | 0 |
| TRACH3026949 | 0 | 0 | 0 | 0 | 0 | 100 | 0 |
| TRACH3027229 | 0 | 0 | 0 | 0 | 0 | 6.069 | 0 |
| TRACH3027527 | 0 | 0 | 0 | 0 | 0 | 100 | 0 |
| TRACH3027681 | 0 | 0 | 0 | 0 | 0 | 100 | 0 |
| TRACH3027701 | 0 | 0 | 0 | 0 | 0 | 100 | 0 |
| TRACH3027885 | 0 | 0 | 0 | 0 | 0 | 100 | 0 |
| TRACH3028031 | 0 | 0 | 0 | 0 | 0 | 100 | 0 |
| TRACH3028164 | 0 | 0 | 0 | 0 | 0 | 100 | 0 |
| TRACH3028180 | 0 | 0 | 0 | 0 | 0 | 100 | 0 |
| TRACH3028195 | 0 | 0 | 0 | 0 | 0 | 100 | 0 |
| TRACH3028441 | 0 | 0 | 0 | 0 | 0 | 100 | 0 |
| TRACH3028597 | 0 | 0 | 0 | 0 | 0 | 100 | 0 |
| TRACH3028678 | 0 | 0 | 0 | 0 | 0 | 100 | 0 |
| TRACH3028837 | 0 | 0 | 0 | 0 | 0 | 100 | 0 |
| TRACH3028847 | 0 | 0 | 0 | 0 | 0 | 100 | 0 |
| TRACH3028855 | 0 | 0 | 0 | 0 | 0 | 49.978 | 0 |
| TRACH3029139 | 0 | 0 | 0 | 0 | 0 | 100 | 0 |
| TRACH3029329 | 0 | 0 | 0 | 0 | 0 | 100 | 0 |
| TRACH3029451 | 0 | 0 | 0 | 0 | 0 | 100 | 0 |
| TRACH3029462 | 0 | 0 | 0 | 0 | 0 | 100 | 0 |
| TRACH3029520 | 0 | 0 | 0 | 0 | 0 | 100 | 0 |
| TRACH3029592 | 0 | 0 | 0 | 0 | 0 | 100 | 0 |
| TRACH3029629 | 0 | 0 | 0 | 0 | 0 | 100 | 0 |
| TRACH3029665 | 0 | 0 | 0 | 0 | 0 | 100 | 0 |
| TRACH3029670 | 0 | 0 | 0 | 0 | 0 | 100 | 0 |
| TRACH3029800 | 0 | 0 | 0 | 0 | 0 | 100 | 0 |
| TRACH3030111 | 0 | 0 | 0 | 0 | 0 | 100 | 0 |
| TRACH3030130 | 0 | 0 | 0 | 0 | 0 | 100 | 0 |
| TRACH3030176 | 0 | 0 | 0 | 0 | 0 | 100 | 0 |
| TRACH3030252 | 0 | 0 | 0 | 0 | 0 | 100 | 0 |
| TRACH3030725 | 0 | 0 | 0 | 0 | 0 | 100 | 0 |
| TRACH3030855 | 0 | 0 | 0 | 0 | 0 | 100 | 0 |
| TRACH3030883 | 0 | 0 | 0 | 0 | 0 | 100 | 0 |
| TRACH3031316 | 0 | 0 | 0 | 0 | 0 | 100 | 0 |
| TRACH3031400 | 0 | 0 | 0 | 0 | 0 | 100 | 0 |
| TRACH3031463 | 0 | 0 | 0 | 0 | 0 | 100 | 0 |
| TRACH3031479 | 0 | 0 | 0 | 0 | 0 | 100 | 0 |
| TRACH3031518 | 0 | 0 | 0 | 0 | 0 | 100 | 0 |
| TRACH3031660 | 0 | 0 | 0 | 0 | 0 | 100 | 0 |
| TRACH3031678 | 0 | 0 | 0 | 0 | 0 | 100 | 0 |
| TRACH3031936 | 0 | 0 | 0 | 0 | 0 | 100 | 0 |
| TRACH3032044 | 0 | 0 | 0 | 0 | 0 | 100 | 0 |
| TRACH3032065 | 0 | 0 | 0 | 0 | 0 | 100 | 0 |
| TRACH3032150 | 0 | 0 | 0 | 0 | 0 | 100 | 0 |
| TRACH3032372 | 0 | 0 | 0 | 0 | 0 | 100 | 0 |
| TRACH3032480 | 0 | 0 | 0 | 0 | 0 | 100 | 0 |
| TRACH3032570 | 0 | 0 | 0 | 0 | 0 | 52.833 | 0 |
| TRACH3032755 | 0 | 0 | 0 | 0 | 0 | 100 | 0 |
| TRACH3032827 | 0 | 0 | 0 | 0 | 0 | 100 | 0 |
| TRACH3032873 | 0 | 0 | 0 | 0 | 0 | 100 | 0 |
| TRACH3033535 | 0 | 0 | 0 | 0 | 0 | 100 | 0 |
| TRACH3033680 | 0 | 0 | 0 | 0 | 0 | 100 | 0 |
| TRACH3033868 | 0 | 0 | 0 | 0 | 0 | 100 | 0 |
| TRACH3034145 | 0 | 0 | 0 | 0 | 0 | 100 | 0 |
| TRACH3034414 | 0 | 0 | 0 | 0 | 0 | 100 | 0 |
| TRACH3034488 | 0 | 0 | 0 | 0 | 0 | 100 | 0 |
| TRACH3034680 | 0 | 0 | 0 | 0 | 0 | 100 | 0 |
| TRACH3034731 | 0 | 0 | 0 | 0 | 0 | 100 | 0 |
| TRACH3034745 | 0 | 0 | 0 | 0 | 0 | 100 | 0 |
| TRACH3034762 | 0 | 0 | 0 | 0 | 0 | 100 | 0 |
| TRACH3034903 | 0 | 0 | 0 | 0 | 0 | 100 | 0 |
| TRACH3035187 | 0 | 0 | 0 | 0 | 0 | 100 | 0 |
| TRACH3035199 | 0 | 0 | 0 | 0 | 0 | 100 | 0 |
| TRACH3035235 | 0 | 0 | 0 | 0 | 0 | 100 | 0 |
| TRACH3035451 | 0 | 0 | 0 | 0 | 0 | 100 | 0 |
| TRACH3035482 | 0 | 0 | 0 | 0 | 0 | 100 | 0 |
| TRACH3035526 | 0 | 0 | 0 | 0 | 0 | 100 | 0 |
| TRACH3036004 | 0 | 0 | 0 | 0 | 0 | 100 | 0 |
| TRACH3036103 | 0 | 0 | 0 | 0 | 0 | 100 | 0 |
| TRACH3036193 | 0 | 0 | 0 | 0 | 0 | 100 | 0 |
| TRACH3036207 | 0 | 0 | 0 | 0 | 0 | 100 | 0 |
| TRACH3036278 | 0 | 0 | 0 | 0 | 0 | 100 | 0 |
| TRACH3036309 | 0 | 0 | 0 | 0 | 0 | 100 | 0 |
| TRACH3036456 | 0 | 0 | 0 | 0 | 0 | 100 | 0 |
| TRACH3036609 | 0 | 0 | 0 | 0 | 0 | 100 | 0 |
| TRACH3036638 | 0 | 0 | 0 | 0 | 0 | 100 | 0 |
| TRACH3036683 | 0 | 0 | 0 | 0 | 0 | 100 | 0 |
| TRACH3036750 | 0 | 0 | 0 | 0 | 0 | 100 | 0 |
| TRACH3036792 | 0 | 0 | 0 | 0 | 0 | 100 | 0 |
| TRACH3036843 | 0 | 0 | 0 | 0 | 0 | 100 | 0 |
| TRACH3036897 | 0 | 0 | 0 | 0 | 0 | 100 | 0 |
| TRACH3036932 | 0 | 0 | 0 | 0 | 0 | 16.420 | 0 |
| TRACH3036942 | 0 | 0 | 0 | 0 | 0 | 0.273 | 0 |
| TRACH3036997 | 0 | 0 | 0 | 0 | 0 | 100 | 0 |
| TRACH3037063 | 0 | 0 | 0 | 0 | 0 | 100 | 0 |
| TRACH3037067 | 1.340 | 0 | 0 | 0 | 0 | 3.601 | 0 |
| TRACH3037267 | 0 | 0 | 0 | 0 | 0 | 100 | 0 |
| TRACH3037288 | 0 | 0 | 0 | 0 | 0 | 100 | 0 |
| TRACH3037505 | 0 | 0 | 0 | 0 | 0 | 100 | 0 |
| TRACH3037573 | 0 | 0 | 0 | 0 | 0 | 100 | 0 |
| TRACH3037696 | 0 | 0 | 0 | 0 | 0 | 100 | 0 |
| TRACH3037897 | 0 | 0 | 0 | 0 | 0 | 100 | 0 |
| TRACH3038086 | 0 | 0 | 0 | 0 | 0 | 100 | 0 |
| TRACH3038399 | 0 | 0 | 0 | 0 | 0 | 41.787 | 0 |
| TSTOM1000135 | 0 | 0 | 0 | 0 | 0 | 0 | 90.639 |
| TSTOM1000186 | 0 | 0 | 0 | 0 | 0 | 0 | 100 |
| TSTOM2000139 | 0 | 0 | 0 | 0 | 0 | 0 | 89.823 |
| TSTOM2000235 | 0 | 0 | 0 | 0 | 0 | 0 | 95.465 |
| TSTOM2000315 | 0 | 0 | 0 | 0 | 0 | 0 | 48.943 |
| TSTOM2000442 | 0 | 0 | 0 | 0 | 0 | 0 | 100 |
| TSTOM2000553 | 0 | 0 | 0 | 0 | 0 | 24.547 | 36.203 |
| TSTOM2000569 | 0 | 0 | 0 | 0 | 0 | 0 | 100 |
| TSTOM2000588 | 0 | 0 | 0 | 0 | 0 | 0 | 100 |
| TSTOM2001195 | 0 | 0 | 0 | 0 | 0 | 0 | 100 |
| TSTOM2001274 | 0 | 0 | 0 | 0 | 0 | 0 | 100 |
| TSTOM2001571 | 0 | 0 | 0 | 0 | 0 | 0 | 100 |
| TSTOM2001996 | 0 | 0 | 0 | 0 | 0 | 0 | 100 |
| TSTOM2002265 | 0 | 0 | 0 | 0 | 0 | 0 | 100 |
| TSTOM2002505 | 0 | 0 | 0 | 0 | 0 | 0 | 100 |
| TSTOM2002561 | 0 | 0 | 0 | 0 | 0 | 0 | 100 |
| TSTOM2002611 | 0 | 0 | 0 | 0 | 0 | 0 | 100 |
| TSTOM2002672 | 0 | 0 | 0 | 0 | 0 | 0 | 100 |
| TSTOM2002682 | 0 | 0 | 0 | 0 | 0 | 0 | 100 |
| TUTER1000122 | 2.722 | 0 | 0 | 0 | 0 | 10.968 | 0 |
| TUTER2000904 | 0 | 0 | 0 | 0 | 0 | 3.127 | 0 |
| TUTER2002323 | 2.716 | 0 | 22.391 | 0 | 0 | 0 | 0 |
| UMVEN1000143 | 0 | 0 | 0 | 0 | 17.888 | 0 | 0 |
| UMVEN2000121 | 0 | 0 | 0 | 0 | 0 | 1.161 | 0 |
| UMVEN2000133 | 0.977 | 0 | 0 | 0 | 0 | 0.657 | 0 |
| UMVEN2000152 | 1.314 | 0 | 0 | 0 | 0 | 0 | 0 |
| UMVEN2000354 | 0 | 3.049 | 0 | 0 | 0 | 0 | 0 |
| UMVEN2000453 | 8.708 | 0 | 0 | 0 | 0 | 0 | 0 |
| UTERU1000008 | 41.147 | 0 | 0 | 0 | 0 | 0 | 0 |
| UTERU1000106 | 4.805 | 0 | 39.618 | 0 | 0 | 0 | 0 |
| UTERU1000182 | 0.676 | 0 | 0 | 0 | 0 | 1.817 | 0 |
| UTERU1000384 | 0 | 0 | 0 | 0 | 0 | 15.967 | 0 |
| UTERU2000095 | 0.690 | 1.532 | 0 | 0 | 0 | 1.854 | 0 |
| UTERU2000260 | 52.081 | 0 | 0 | 0 | 0 | 0 | 0 |
| UTERU2000263 | 0 | 0 | 0 | 0 | 0 | 1.722 | 11.004 |
| UTERU2000424 | 1.416 | 3.144 | 0 | 0 | 18.499 | 0 | 0 |
| UTERU2000537 | 4.278 | 0 | 0 | 0 | 0 | 0 | 0 |
| UTERU2001607 | 1.230 | 0 | 0 | 0 | 0 | 6.609 | 0 |
| UTERU2002294 | 0 | 0 | 12.480 | 0 | 0 | 0 | 0 |
| UTERU2002410 | 0.979 | 2.173 | 4.037 | 0 | 0 | 1.315 | 0 |
| UTERU2002662 | 1.484 | 0 | 0 | 0 | 0 | 1.993 | 0 |
| UTERU2003704 | 0 | 0 | 0 | 0 | 0 | 19.280 | 0 |
| UTERU2004037 | 0 | 0 | 0 | 0 | 0 | 2.456 | 0 |
| UTERU2004197 | 3.353 | 0 | 0 | 0 | 0 | 0 | 0 |
| UTERU2004807 | 2.513 | 0 | 0 | 0 | 0 | 3.376 | 0 |
| UTERU2004861 | 19.728 | 0 | 0 | 0 | 0 | 0 | 0 |
| UTERU2005004 | 58.303 | 0 | 0 | 0 | 0 | 0 | 0 |
| UTERU2005074 | 28.406 | 0 | 0 | 0 | 0 | 0 | 0 |
| UTERU2005292 | 2.596 | 0 | 0 | 0 | 0 | 0 | 0 |
| UTERU2005354 | 5.472 | 8.097 | 0 | 0 | 0 | 0 | 0 |
| UTERU2005449 | 27.302 | 0 | 0 | 0 | 0 | 36.676 | 0 |
| UTERU2005593 | 0.936 | 12.464 | 15.433 | 0 | 0 | 7.543 | 0 |
| UTERU2005601 | 0 | 0 | 0 | 0 | 0 | 88.511 | 0 |
| UTERU2005621 | 1.880 | 0 | 0 | 0 | 0 | 2.525 | 0 |
| UTERU2006115 | 6.535 | 0 | 0 | 0 | 0 | 0 | 0 |
| UTERU2006593 | 0 | 0 | 10.151 | 0 | 0 | 28.116 | 0 |
| UTERU2008085 | 0.527 | 1.003 | 0 | 0 | 1.967 | 0.101 | 1.939 |
| UTERU2008302 | 1.114 | 0 | 0 | 0 | 0 | 1.496 | 0 |
| UTERU2008426 | 0 | 0 | 0 | 0 | 0 | 49.324 | 0 |
| UTERU2009335 | 0 | 0 | 0 | 0 | 0 | 3.397 | 0 |
| UTERU2009435 | 4.459 | 0 | 0 | 0 | 0 | 11.980 | 0 |
| UTERU2009972 | 2.954 | 0 | 0 | 0 | 0 | 7.937 | 0 |
| UTERU2010226 | 19.733 | 0 | 0 | 0 | 0 | 8.836 | 0 |
| UTERU2010417 | 0.263 | 0 | 0 | 0 | 0 | 2.825 | 6.771 |
| UTERU2011220 | 1.632 | 0 | 0 | 0 | 0 | 0 | 0 |
| UTERU2011287 | 27.368 | 0 | 0 | 0 | 0 | 0 | 0 |
| UTERU2011621 | 16.560 | 0 | 0 | 0 | 0 | 0 | 0 |
| UTERU2011741 | 9.823 | 0 | 0 | 0 | 0 | 0 | 0 |
| UTERU2011906 | 11.373 | 0 | 0 | 0 | 0 | 15.277 | 0 |
| UTERU2012230 | 0 | 0 | 0 | 0 | 0 | 1.971 | 0 |
| UTERU2012286 | 2.113 | 0 | 0 | 0 | 0 | 2.838 | 0 |
| UTERU2012688 | 0 | 0 | 0 | 0 | 0 | 48.432 | 0 |
| UTERU2012741 | 15.010 | 0 | 0 | 0 | 0 | 0 | 0 |
| UTERU2012767 | 0 | 0 | 36.610 | 0 | 0 | 5.965 | 0 |
| UTERU2015653 | 0 | 0 | 0 | 0 | 0 | 1.307 | 0 |
| UTERU2015830 | 41.147 | 0 | 0 | 0 | 0 | 0 | 0 |
| UTERU2016799 | 0 | 0 | 0 | 0 | 0 | 13.028 | 0 |
| UTERU2016822 | 0 | 0 | 0 | 0 | 0 | 15.760 | 0 |
| UTERU2018884 | 1.292 | 0 | 0 | 0 | 0 | 3.471 | 0 |
| UTERU2019005 | 0 | 0 | 0 | 0 | 0 | 7.234 | 0 |
| UTERU2019096 | 3.842 | 0 | 0 | 0 | 0 | 2.580 | 0 |
| UTERU2023175 | 2.483 | 0 | 0 | 0 | 0 | 0 | 0 |
| UTERU2023550 | 0 | 31.001 | 0 | 0 | 0 | 0 | 0 |
| UTERU2023651 | 41.897 | 0 | 0 | 0 | 0 | 28.140 | 0 |
| UTERU2024656 | 0 | 0 | 0 | 0 | 0 | 48.432 | 0 |
| UTERU2024969 | 13.389 | 0 | 0 | 0 | 0 | 3.597 | 0 |
| UTERU2028734 | 0 | 0 | 0 | 0 | 0 | 24.591 | 0 |
| UTERU2031084 | 36.254 | 0 | 0 | 0 | 0 | 0 | 0 |
| UTERU2034147 | 41.147 | 0 | 0 | 0 | 0 | 0 | 0 |
| UTERU2035114 | 0 | 0 | 0 | 0 | 0 | 48.432 | 0 |
| UTERU2036347 | 26.499 | 0 | 0 | 0 | 0 | 35.597 | 0 |
| UTERU3000298 | 3.858 | 0 | 0 | 0 | 0 | 20.730 | 0 |
| UTERU3000645 | 0 | 0 | 0 | 0 | 0 | 65.258 | 0 |
| UTERU3000738 | 58.303 | 0 | 0 | 0 | 0 | 0 | 0 |
| UTERU3001542 | 41.147 | 0 | 0 | 0 | 0 | 0 | 0 |
| UTERU3002218 | 0 | 0 | 0 | 0 | 0 | 48.432 | 0 |
| UTERU3002786 | 0 | 0 | 0 | 0 | 0 | 48.432 | 0 |
| UTERU3003135 | 27.368 | 0 | 0 | 0 | 0 | 0 | 0 |
| UTERU3003660 | 0 | 0 | 0 | 0 | 0 | 8.247 | 0 |
| UTERU3005049 | 41.147 | 0 | 0 | 0 | 0 | 0 | 0 |
| UTERU3005422 | 53.061 | 0 | 0 | 0 | 0 | 0 | 0 |
| UTERU3007021 | 0 | 0 | 0 | 0 | 0 | 65.258 | 0 |
| UTERU3007104 | 0 | 0 | 0 | 0 | 0 | 48.432 | 0 |
| UTERU3010409 | 0 | 0 | 0 | 0 | 0 | 7.754 | 0 |
| UTERU3011579 | 0 | 0 | 0 | 0 | 0 | 65.258 | 0 |
| UTERU3013302 | 41.147 | 0 | 0 | 0 | 0 | 0 | 0 |
| UTERU3018172 | 26.594 | 0 | 0 | 0 | 0 | 0 | 0 |
| UTERU3018711 | 0 | 0 | 0 | 0 | 0 | 13.534 | 0 |

[0709] Genes whose expression levels were negligibly low in each of the above-described libraries are shown with their clone names below.

[0710] 3NB691000018, 3NB691000085, 3NB691000113, 3NB691000129, 3NB691000191, 3NB692000012, 3NB692000029, 3NB692000102, 3NB692000154, 3NB692000276, 3NB692000305, 3NB692000429, 3NB692000484, 3NB692000529, 3NB692000973, 3NB692001002, 3NB692001034, 3NB692001040, 3NB692001123, 3NB692001267, 3NB692001339, 3NB692001349, 3NB692001366, 3NB692001408, 3NB692001433, 3NB692001459, 3NB692001471, 3NB692001496, 3NB692001501, 3NB692001507, 3NB692001511, 3NB692001519, 3NB692001528, 3NB692001548, 3NB692001557, 3NB692001637, 3NB692001719, 3NB692001861, 3NB692002365, 3NB692002685, 3NB692002806, 3NB692003538, 3NB692004045, 3NB692004724, 3NB692005439, 3NB692006952, 3NB692008178, 3NB692008729, ACTVT2000380, ADIPS1000064, ADIPS2000069, ADIPS2000088, ADIPS2000245, ADIPS2000425, ADRGL1000033, ADRGL1000038, ADRGL1000065, ADRGL1000067, ADRGL1000144, ADRGL1000147, ADRGL1000160, ADRGL1000165, ADRGL1000182, ADRGL2000006, ADRGL2000042, ADRGL2000064, ADRGL2000074, ADRGL2000085, ADRGL2000117, ADRGL2000142, ADRGL2000172, ADRGL2000248, ADRGL2000261, ADRGL2000323, ADRGL2000328, ADRGL2000353, ADRGL2000384, ADRGL2000428, ADRGL2000636, ADRGL2000644, ADRGL2000968, ADRGL2001119, ADRGL2001229, ADRGL2001287, ADRGL2001301, ADRGL2001354, ADRGL2001554, ADRGL2001651, ADRGL2001756, ADRGL2001830, ADRGL2001836, ADRGL2001854, ADRGL2002013, ADRGL2002029, ADRGL2002191, ADRGL2002392, ADRGL2002679, ADRGL2002753, ADRGL2002857, ADRGL2003017, ADRGL2003329, ADRGL2003552, ADRGL2003585, ADRGL2003638, ADRGL2003684, ADRGL2003773, ADRGL2003785, ADRGL2004031, ADRGL2004077, ADRGL2004451, ADRGL2004459, ADRGL2004708, ADRGL2004724, ADRGL2004749, ADRGL2004770, ADRGL2004777, ADRGL2004833, ADRGL2005336, ADRGL2005564, ADRGL2005756, ADRGL2005838, ADRGL2005926, ADRGL2005961, ADRGL2006034, ADRGL2006124, ADRGL2006177, ADRGL2006193, ADRGL2006377, ADRGL2006677, ADRGL2006732, ADRGL2006767, ADRGL2006817, ADRGL2006846, ADRGL2006886, ADRGL2007080, ADRGL2007125, ADRGL2007283, ADRGL2007357, ADRGL2007636, ADRGL2007651, ADRGL2007810, ADRGL2007877, ADRGL2007906, ADRGL2007974, ADRGL2008023, ADRGL2008331, ADRGL2008337, ADRGL2008966, ADRGL2009146, ADRGL2009324, ADRGL2009489, ADRGL2009533, ADRGL2009691, ADRGL2009755, ADRGL2010152, ADRGL2010315, ADRGL2010594, ADRGL2010860, ADRGL2010974, ADRGL2011190, ADRGL2012179, AHMSC1000138, ASTRO1000009, ASTRO1000018, ASTRO1000029, ASTRO1000096, ASTRO1000165, ASTRO2000011, ASTRO2000014, ASTRO2000095, ASTRO2000191, ASTRO2000372, ASTRO2000381, ASTRO2000403, ASTRO2000417, ASTRO2000482, ASTRO2000533, ASTRO2000653, ASTRO2000662, ASTRO2000725, ASTRO2001001, ASTRO2001008, ASTRO2001088, ASTRO2001107, ASTRO2001122, ASTRO2001227, ASTRO2001249, ASTRO2001480, ASTRO2002035, ASTRO2002459, ASTRO2002571, ASTRO2002632, ASTRO2002659, ASTRO2002693, ASTRO2002720, ASTRO2002733, ASTRO2002743, ASTRO2002842, ASTRO2003212, ASTRO2003574, ASTRO2003581, ASTRO2003740, ASTRO2003925, ASTRO2003960, ASTRO2004032, ASTRO2004051, ASTRO2004177, ASTRO2004217, ASTRO2004297, ASTRO2004584, ASTRO2004751, ASTRO2004877, ASTRO2005008, ASTRO2005081, ASTRO2005096, ASTRO2005242, ASTRO2005273, ASTRO2005343, ASTRO2005413, ASTRO2005553, ASTRO2005557, ASTRO2005575, ASTRO2005726, ASTRO2005863, ASTRO2005896, ASTRO2005902, ASTRO2006356, ASTRO2006475, ASTRO2006732, ASTRO2006747, ASTRO2006952, ASTRO2007221, ASTRO2007377, ASTRO2007515, ASTRO2007578, ASTRO2007643, ASTRO2007666, ASTRO2007956, ASTRO2007962, ASTRO2008040, ASTRO2008239, ASTRO2008409, ASTRO2008425, ASTRO2008508, ASTRO2008777, ASTRO2008895, ASTRO2008960, ASTRO2008972, ASTRO2009177, ASTRO2009333, ASTRO2009458, ASTRO2009526, ASTRO2009879, ASTRO2010072, ASTRO2010615, ASTRO2010799, ASTRO2010962, ASTRO2010996, ASTRO2011149, ASTRO2011422, ASTRO2011426, ASTRO2011437, ASTRO2011461, ASTRO2011834, ASTRO2011893, ASTRO2013124, ASTRO2013802, ASTRO2014174, ASTRO2014211, ASTRO2014363, ASTRO2014392, ASTRO2014498, ASTRO2014576, ASTRO2014923, ASTRO2014961, ASTRO2015162, ASTRO2015185, ASTRO2015328, ASTRO2015987, ASTRO2016044, ASTRO2016114, ASTRO2016148, ASTRO2016681, ASTRO2016819, ASTRO2016847, ASTRO2016892, ASTRO2017348, ASTRO2017627, ASTRO2018540, ASTRO2019039, ASTRO2019171, ASTRO3000154, ASTRO3000172, ASTRO3000177, ASTRO3000301, ASTRO3000474, ASTRO3000482, BEAST2000454, BGGI11000193, BGGI11000285, BGGI12000022, BGGI12000067, BGGI12000161, BGGI12000544, BGGI12000616, BGGI12000684, BGGI12000693, BGGI12001097, BGGI12001241, BGGI12001247, BGGI12001714, BLADE1000176, BLADE2000181, BLADE2000256, BLADE2000340, BLADE2000389, BLADE2000463, BLADE2000579, BLADE2000640, BLADE2000866, BLADE2000938, BLADE2001031, BLADE2001133, BLADE2001138, BLADE2001141, BLADE2001371, BLADE2001458, BLADE2001575, BLADE2001753, BLADE2001935, BLADE2001940, BLADE2001987, BLADE2002073, BLADE2002310, BLADE2002730, BLADE2002738, BLADE2002744, BLADE2002782, BLADE2002947, BLADE2002972, BLADE2003474, BLADE2003916, BLADE2004345, BLADE2004389, BLADE2004462, BLADE2004628, BLADE2004670, BLADE2004722, BLADE2004849, BLADE2005036, BLADE2005038, BLADE2005229, BLADE2005459, BLADE2005792, BLADE2006043, BLADE2006415, BLADE2006607, BLADE2006826, BLADE2006849, BLADE2006947, BLADE2007033, BLADE2007043, BLADE2007722, BLADE2007735, BLADE2007744, BLADE2007799, BLADE2007923, BLADE2007935, BLADE2007958, BLADE2008281, BLADE2008454, BLADE2008479, BLADE2008539, BLADE2008809, BLADE2008995, BLADE2009452, BLADE2009479, BLADE2009593, BNGH41000104, BNGH41000118, BNGH41000169, BNGH41000177, BNGH41000198, BNGH41000216, BNGH42000130, BNGH42000132, BNGH42000405, BNGH42600532, BNGH42000675, BNGH42000791, BNGH42000815, BNGH42000994, BNGH42001247, BNGH42001406, BNGH42001576, BNGH42001724, BNGH42002244, BNGH42002387, BNGH42002487, BNGH42002489, BNGH42003529, BNGH42003570, BNGH42003641, BNGH42004076, BNGH42004291, BNGH42004538, BNGH42004679, BNGH42005017, BNGH42005235, BNGH42005504, BNGH42006226, BNGH42006234, BNGH42007037, BNGH42007594, BNGH42007798, BNGH42008199, BNGH42008510, BNGH42008649, BNGH42008832, BNGH42008850, BNGH42008943, BNGH42009021, BNGH42009025, BRACE1000047, BRACE1000051, BRACE1000065, BRACE1000084, BRACE1000087, BRACE1000092, BRACE1000093, BRACE1000101, BRACE1000114, BRACE1000124, BRACE1000132, BRACE1000169, BRACE1000187, BRACE1000239, BRACE1000258, BRACE1000451, BRACE1000475, BRACE1000572, BRACE2000077, BRACE2000078, BRACE2000100, BRACE2000109, BRACE2000141, BRACE2000148, BRACE2000183, BRACE2000229, BRACE2000232, BRACE2000256, BRACE2000266, BRACE2000267, BRACE2000280, BRACE2000307, BRACE2000331, BRACE2000351, BRACE2000368, BRACE2000392, BRACE2000441, BRACE2000489, BRACE2000505, BRACE2000526, BRACE2000531, BRACE2000545, BRACE2000553, BRACE2000577, BRACE2000640, BRACE2000650, BRACE2000677, BRACE2000698, BRACE2000718, BRACE2000733, BRACE2000743, BRACE2000750, BRACE2000815, BRACE2000885, BRACE2000905, BRACE2000936, BRACE2000947, BRACE2000965, BRACE2000969, BRACE2000988, BRACE2001017, BRACE2001070, BRACE2001094, BRACE2001107, BRACE2001151, BRACE2001191, BRACE2001197, BRACE2001236, BRACE2001239, BRACE2001269, BRACE2001312, BRACE2001330, BRACE2001340, BRACE2001352, BRACE2001353, BRACE2001374, BRACE2001375, BRACE2001423, BRACE2001424, BRACE2001445, BRACE2001453, BRACE2001455, BRACE2001492, BRACE2001508, BRACE2001534, BRACE2001543, BRACE2001564, BRACE2001588, BRACE2001607, BRACE2001626, BRACE2001677, BRACE2001705, BRACE2001726, BRACE2001733, BRACE2001737, BRACE2001742, BRACE2001777, BRACE2001779, BRACE2001859, BRACE2001865, BRACE2001872, BRACE2001881, BRACE2001898, BRACE2001923, BRACE2001954, BRACE2001972, BRACE2001973, BRACE2002026, BRACE2002034, BRACE2002139, BRACE2002142, BRACE2002151, BRACE2002157, BRACE2002176, BRACE2002202, BRACE2002206, BRACE2002227, BRACE2002260, BRACE2002297, BRACE2002304, BRACE2002356, BRACE2002394, BRACE2002409, BRACE2002431, BRACE2002441, BRACE2002444, BRACE2002458, BRACE2002467, BRACE2002468, BRACE2002478, BRACE2002495, BRACE2002582, BRACE2002585, BRACE2002589, BRACE2002590, BRACE2002606, BRACE2002613, BRACE2002614, BRACE2002617, BRACE2002623, BRACE2002635, BRACE2002676, BRACE2002682, BRACE2002695, BRACE2002707, BRACE2002736, BRACE2002752, BRACE2002762, BRACE2002772, BRACE2002792, BRACE2002796, BRACE2002803, BRACE2002807, BRACE2002834, BRACE2002849, BRACE2002857, BRACE2002861, BRACE2002884, BRACE2002896, BRACE2002948, BRACE2003078, BRACE2003097, BRACE2003110, BRACE2003168, BRACE2003199, BRACE2003210, BRACE2003217, BRACE2003269, BRACE2003285, BRACE2003319, BRACE2003398, BRACE2003420, BRACE2003428, BRACE2003431, BRACE2003512, BRACE2003516, BRACE2003539, BRACE2003540, BRACE2003598, BRACE2003609, BRACE2003614, BRACE2003639, BRACE2003700, BRACE2003713, BRACE2003766, BRACE2003802, BRACE2003825, BRACE2003847, BRACE2003873, BRACE2003885, BRACE2003887, BRACE2003904, BRACE2003905, BRACE2003928, BRACE2003954, BRACE2003987, BRACE2005034, BRACE2005047, BRACE2005063, BRACE2005083, BRACE2005090, BRACE2005118, BRACE2005124, BRACE2005138, BRACE2005151, BRACE2005160, BRACE2005169, BRACE2005189, BRACE2005193, BRACE2005196, BRACE2005198, BRACE2005216, BRACE2005243, BRACE2005251, BRACE2005253, BRACE2005290, BRACE2005328, BRACE2005329, BRACE2005337, BRACE2005348, BRACE2005363, BRACE2005434, BRACE2005448, BRACE2005450, BRACE2005453, BRACE2005457, BRACE2005460, BRACE2005489, BRACE2005518, BRACE2005556, BRACE2005562, BRACE2005624, BRACE2005642, BRACE2005661, BRACE2005667, BRACE2005681, BRACE2005719, BRACE2005731, BRACE2005742, BRACE2005762, BRACE2005773, BRACE2005787, BRACE2005795, BRACE2005800, BRACE2005858, BRACE2005869, BRACE2005875, BRACE2005881, BRACE2005898, BRACE2005904, BRACE2005906, BRACE2005907, BRACE2005911, BRACE2005937, BRACE2005949, BRACE2005981, BRACE2005991, BRACE2006072, BRACE2006075, BRACE2006089, BRACE2006122, BRACE2006137, BRACE2006143, BRACE2006167, BRACE2006174, BRACE2006240, BRACE2006245, BRACE2006274, BRACE2006281, BRACE2006298, BRACE2006344, BRACE2006354, BRACE2006380, BRACE2006393, BRACE2006413, BRACE2006417, BRACE2006453, BRACE2006459, BRACE2006488, BRACE2006534, BRACE2006540, BRACE2006587, BRACE2006598, BRACE2006636, BRACE2006685, BRACE2006703, BRACE2006743, BRACE2006783, BRACE2006821, BRACE2006833, BRACE2006859, BRACE2006909, BRACE2006911, BRACE2006924, BRACE2006935, BRACE2006944, BRACE2006951, BRACE2006986, BRACE2007013, BRACE2007087, BRACE2007138, BRACE2007197, BRACE2007201, BRACE2007203, BRACE2007232, BRACE2007262, BRACE2007274, BRACE2007281, BRACE2007295, BRACE2007358, BRACE2007396, BRACE2007398, BRACE2007401, BRACE2007411, BRACE2007447, BRACE2007477, BRACE2007502, BRACE2007503, BRACE2007522, BRACE2007527, BRACE2007538, BRACE2007563, BRACE2007577, BRACE2007621, BRACE2007640, BRACE2007641, BRACE2007646, BRACE2007663, BRACE2007671, BRACE2007682, BRACE2007685, BRACE2007708, BRACE2007727, BRACE2007749, BRACE2007760, BRACE2007761, BRACE2007764, BRACE2007768, BRACE2007769, BRACE2007784, BRACE2007786, BRACE2007799, BRACE2007801, BRACE2007832, BRACE2007836, BRACE2007868, BRACE2007882, BRACE2007888, BRACE2007902, BRACE2007920, BRACE2007937, BRACE2007944, BRACE2007952, BRACE2008008, BRACE2008015, BRACE2008021, BRACE2008102, BRACE2008114, BRACE2008144, BRACE2008172, BRACE2008216, BRACE2008218, BRACE2008251, BRACE2008276, BRACE2008295, BRACE2008308, BRACE2008336, BRACE2008361, BRACE2008401, BRACE2008410, BRACE2008420, BRACE2008443, BRACE2008473, BRACE2008480, BRACE2008481, BRACE2008488, BRACE2008495, BRACE2008500, BRACE2008553, BRACE2008594, BRACE2008604, BRACE2008615, BRACE2008622, BRACE2008629, BRACE2008655, BRACE2008656, BRACE2008708, BRACE2008710, BRACE2008754, BRACE2008797, BRACE2008847, BRACE2008857, BRACE2008861, BRACE2008867, BRACE2008881, BRACE2008883, BRACE2008917, BRACE2008919, BRACE2008941, BRACE2008948, BRACE2008960, BRACE2008999, BRACE2009014, BRACE2009016, BRACE2009031, BRACE2009045, BRACE2009053, BRACE2009122, BRACE2009131, BRACE2009185, BRACE2009188, BRACE2009212, BRACE2009221, BRACE2009235, BRACE2009238, BRACE2009255, BRACE2009270, BRACE2009272, BRACE2009274, BRACE2009275, BRACE2009293, BRACE2009307, BRACE2009311, BRACE2009318, BRACE2009323, BRACE2009366, BRACE2009421, BRACE2009428, BRACE2009434, BRACE2009437, BRACE2009517, BRACE2009533, BRACE2009566, BRACE2009591, BRACE2009654, BRACE2009721, BRACE2009732, BRACE2009754, BRACE2009828, BRACE2009886, BRACE2009907, BRACE2009957, BRACE2010170, BRACE2010171, BRACE2010203, BRACE2010208, BRACE2010336, BRACE2010348, BRACE2010440, BRACE2010444, BRACE2010477, BRACE2010489, BRACE2010535, BRACE2010550, BRACE2010598, BRACE2010632, BRACE2010642, BRACE2010753, BRACE2010813, BRACE2010828, BRACE2010837, BRACE2010888, BRACE2010937, BRACE2010983, BRACE2011007, BRACE2011025, BRACE2011199, BRACE2011389, BRACE2011478, BRACE2011545, BRACE2011592, BRACE2011611, BRACE2011646, BRACE2011677, BRACE2011703, BRACE2011747, BRACE2011838, BRACE2011892, BRACE2011904, BRACE2011947, BRACE2012061, BRACE2012062, BRACE2012185, BRACE2012222, BRACE2012232, BRACE2012291, BRACE2012510, BRACE2012625, BRACE2012653, BRACE2012833, BRACE2012838, BRACE2012936, BRACE2012947, BRACE2013009, BRACE2013010, BRACE2013126, BRACE2013132, BRACE2013149, BRACE2013369, BRACE2013806, BRACE2014108, BRACE2014161, BRACE2014232, BRACE2014268, BRACE2014475, BRACE2014657, BRACE2014780, BRACE2014818, BRACE2014821, BRACE2014824, BRACE2014854, BRACE2015031, BRACE2015132, BRACE2015262, BRACE2015270, BRACE2015314, BRACE2015352, BRACE2015368, BRACE2015412, BRACE2015436, BRACE2015741, BRACE2015756, BRACE2015969, BRACE2015995, BRACE2016058, BRACE2016194, BRACE2016315, BRACE2016325, BRACE2016335, BRACE2016366, BRACE2016465, BRACE2016516, BRACE2016583, BRACE2016708, BRACE2016821, BRACE2016896, BRACE2017108, BRACE2017124, BRACE2017298, BRACE2017359, BRACE2017410, BRACE2017438, BRACE2017580, BRACE2017587, BRACE2017720, BRACE2017844, BRACE2017872, BRACE2017929, BRACE2017934, BRACE2017992, BRACE2018448, BRACE2018568, BRACE2018700, BRACE2018727, BRACE2018736, BRACE2018759, BRACE2018762, BRACE2018782, BRACE2018847, BRACE2019004, BRACE2019044, BRACE2019147, BRACE2019244, BRACE2019258, BRACE2019327, BRACE2019348, BRACE2019371, BRACE2019467, BRACE2019510, BRACE2019528, BRACE2019618, BRACE2019696, BRACE2019703, BRACE2019843, BRACE2019865, BRACE2019872, BRACE2020028, BRACE2020077, BRACE2020097, BRACE2020157, BRACE2020278, BRACE2020358, BRACE2020467, BRACE2020584, BRACE2020652, BRACE2020709, BRACE2020742, BRACE2020756, BRACE2020863, BRACE2020982, BRACE2021143, BRACE2021148, BRACE2021245, BRACE2021254, BRACE2021264, BRACE2021344, BRACE2021433, BRACE2021478, BRACE2021541, BRACE2021670, BRACE2021695, BRACE2021721, BRACE2021932, BRACE2021936, BRACE2022030, BRACE2022158, BRACE2022196, BRACE2022270, BRACE2022328, BRACE2022333, BRACE2022389, BRACE2022394, BRACE2022435, BRACE2022448, BRACE2022450, BRACE2022549, BRACE2022633, BRACE2022693, BRACE2022848, BRACE2022928, BRACE2022990, BRACE2023069, BRACE2023070, BRACE2023223, BRACE2023268, BRACE2023284, BRACE2023404, BRACE2023451, BRACE2023540, BRACE2023633, BRACE2023718, BRACE2023744, BRACE2023800, BRACE2024222, BRACE2024610, BRACE2024627, BRACE2024781, BRACE2024826, BRACE2025018, BRACE2025316, BRACE2025333, BRACE2025452, BRACE2025492, BRACE2025710, BRACE2025796, BRACE2025992, BRACE2026054, BRACE2026131, BRACE2026141, BRACE2026142, BRACE2026293, BRACE2026294, BRACE2026404, BRACE2026675, BRACE2026836, BRACE2026920, BRACE2026971, BRACE2027018, BRACE2027221, BRACE2027258, BRACE2027312, BRACE2027382, BRACE2027389, BRACE2027408, BRACE2027767, BRACE2027770, BRACE2027879, BRACE2027896, BRACE2028171, BRACE2028392, BRACE2028410, BRACE2028636, BRACE2028741, BRACE2028956, BRACE2028970, BRACE2029112, BRACE2029396, BRACE2029581, BRACE2029849, BRACE2030039, BRACE2030096, BRACE2030326, BRACE2030341, BRACE2030736, BRACE2030883, BRACE2030884, BRACE2031154, BRACE2031232, BRACE2031527, BRACE2031531, BRACE2031553, BRACE2031899, BRACE2032044, BRACE2032090, BRACE2032134, BRACE2032148, BRACE2032182, BRACE2032329, BRACE2032385, BRACE2032436, BRACE2032502, BRACE2032538, BRACE2032584, BRACE2032823, BRACE2033128, BRACE2033394, BRACE2033478, BRACE2033720, BRACE2033786, BRACE2034434, BRACE2034523, BRACE2034616, BRACE2034622, BRACE2034870, BRACE2035003, BRACE2035120, BRACE2035124, BRACE2035191, BRACE2035278, BRACE2035441, BRACE2035485, BRACE2036005, BRACE2036096, BRACE2036743, BRACE2036830, BRACE2036834, BRACE2036900, BRACE2037132, BRACE2037294, BRACE2037295, BRACE2037299, BRACE2037310, BRACE2037431, BRACE2037692, BRACE2037847, BRACE2038114, BRACE2038269, BRACE2038271, BRACE2038329, BRACE2038492, BRACE2038551, BRACE2038618, BRACE2039009, BRACE2039128, BRACE2039170, BRACE2039249, BRACE2039286, BRACE2039297, BRACE2039327, BRACE2039362, BRACE2039475, BRACE2039600, BRACE2039607, BRACE2039734, BRACE2039823, BRACE2039832, BRACE2039893, BRACE2039986, BRACE2040138, BRACE2040325, BRACE2040514, BRACE2040640, BRACE2040987, BRACE2041009, BRACE2041095, BRACE2041264, BRACE2041890, BRACE2041898, BRACE2042394, BRACE2042398, BRACE2042550, BRACE2042620, BRACE2042628, BRACE2042873, BRACE2043036, BRACE2043105, BRACE2043142, BRACE2043248, BRACE2043349, BRACE2043381, BRACE2043774, BRACE2043942, BRACE2044057, BRACE2044105, BRACE2044263, BRACE2044304, BRACE2044473, BRACE2044510, BRACE2044640, BRACE2044816, BRACE2044946, BRACE2044949, BRACE2045300, BRACE2045428, BRACE2045445, BRACE2045596, BRACE2045772, BRACE2045947, BRACE2045954, BRACE2046251, BRACE2046295, BRACE2046976, BRACE2047011, BRACE2047232, BRACE2047377, BRACE2047385, BRACE2047492, BRACE2047558, BRACE2047573, BRACE2047835, BRACE2047893, BRACE2047975, BRACE3000071, BRACE3000404, BRACE3000520, BRACE3000697, BRACE3000840, BRACE3001002, BRACE3001058, BRACE3001066, BRACE3001113, BRACE3001217, BRACE3001299, BRACE3001384, BRACE3001391, BRACE3001403, BRACE3001595, BRACE3001948, BRACE3001973, BRACE3002184, BRACE3002298, BRACE3002344, BRACE3002390, BRACE3002420, BRACE3002508, BRACE3002541, BRACE3002756, BRACE3003004, BRACE3003026, BRACE3003053, BRACE3003192, BRACE3003595, BRACE3003866, BRACE3003920, BRACE3004046, BRACE3004058, BRACE3004113, BRACE3004150, BRACE3004205, BRACE3004358, BRACE3004371, BRACE3004435, BRACE3004477, BRACE3004767, BRACE3004772, BRACE3004783, BRACE3004843, BRACE3004880, BRACE3004887, BRACE3004981, BRACE3004996, BRACE3004998, BRACE3005103, BRACE3005127, BRACE3005145, BRACE3005217, BRACE3005225, BRACE3005430, BRACE3005760, BRACE3005870, BRACE3005903, BRACE3006113, BRACE3006185, BRACE3006226, BRACE3006462, BRACE3006463, BRACE3006872, BRACE3006917, BRACE3007058, BRACE3007084, BRACE3007085, BRACE3007322, BRACE3007472, BRACE3007480, BRACE3007559, BRACE3007625, BRACE3007642, BRACE3007649, BRACE3007767, BRACE3007869, BRACE3008066, BRACE3008092, BRACE3008137, BRACE3008255, BRACE3008337, BRACE3008384, BRACE3008720, BRACE3008772, BRACE3009044, BRACE3009075, BRACE3009090, BRACE3009127, BRACE3009197, BRACE3009237, BRACE3009265, BRACE3009297, BRACE3009377, BRACE3009392, BRACE3009539, BRACE3009574, BRACE3009701, BRACE3009708, BRACE3009724, BRACE3009993, BRACE3010076, BRACE3010079, BRACE3010086, BRACE3010221, BRACE3010315, BRACE3010397, BRACE3010416, BRACE3010435, BRACE3010702, BRACE3010862, BRACE3011271, BRACE3011447, BRACE3011505, BRACE3011634, BRACE3011774, BRACE3012357, BRACE3012574, BRACE3013119, BRACE3013418, BRACE3013576, BRACE3013740, BRACE3013780, BRACE3013874, BRACE3013936, BRACE3013986, BRACE3014005, BRACE3014068, BRACE3014231, BRACE3014290, BRACE3014317, BRACE3014523, BRACE3014714, BRACE3014807, BRACE3014942, BRACE3015090, BRACE3015121, BRACE3015262, BRACE3015521, BRACE3015808, BRACE3015829, BRACE3015894, BRACE3015898, BRACE3016020, BRACE3016122, BRACE3016167, BRACE3016170, BRACE3016580, BRACE3016788, BRACE3016810, BRACE3016862, BRACE3016884, BRACE3017083, BRACE3018083, BRACE3018308, BRACE3018963, BRACE3019055, BRACE3019071, BRACE3019084, BRACE3019570, BRACE3019611, BRACE3019817, BRACE3019828, BRACE3020151, BRACE3020194, BRACE3020286, BRACE3020356, BRACE3020594, BRACE3020671, BRACE3020890, BRACE3021148, BRACE3021430, BRACE3021517, BRACE3021805, BRACE3022051, BRACE3022303, BRACE3022340, BRACE3022847, BRACE3023604, BRACE3023912, BRACE3024073, BRACE3024359, BRACE3024379, BRACE3024444, BRACE3024497, BRACE3024537, BRACE3024659, BRACE3024662, BRACE3024879, BRACE3025153, BRACE3025302, BRACE3025457, BRACE3025531, BRACE3025627, BRACE3025630, BRACE3026008, BRACE3026075, BRACE3026161, BRACE3026290, BRACE3026345, BRACE3026456, BRACE3026735, BRACE3026802, BRACE3026844, BRACE3026947, BRACE3026993, BRACE3027242, BRACE3027256, BRACE3027326, BRACE3027480, BRACE3027931, BRACE3028214, BRACE3028241, BRACE3028360, BRACE3028998, BRACE3029005, BRACE3029021, BRACE3029205, BRACE3029447, BRACE3030057, BRACE3030103, BRACE3030538, BRACE3030748, BRACE3030866, BRACE3031161, BRACE3031184, BRACE3031185, BRACE3031315, BRACE3031372, BRACE3031579, BRACE3031728, BRACE3031838, BRACE3031843, BRACE3032427, BRACE3032455, BRACE3032537, BRACE3032538, BRACE3032771, BRACE3032980, BRACE3032983, BRACE3033525, BRACE3034159, BRACE3034183, BRACE3034389, BRACE3034964, BRACE3034993, BRACE3035227, BRACE3036156, BRACE3036271, BRACE3037612, BRACE3037637, BRACE3037803, BRACE3038012, BRACE3038030, BRACE3038569, BRACE3038570, BRACE3038687, BRACE3038760, BRACE3039288, BRACE3039358, BRACE3039378, BRACE3039454, BRACE3040012, BRACE3040239, BRACE3040504, BRACE3040644, BRACE3040856, BRACE3041059, BRACE3041162, BRACE3041827, BRACE3042046, BRACE3042210, BRACE3042409, BRACE3042432, BRACE3042594, BRACE3043597, BRACE3044090, BRACE3044172, BRACE3044247, BRACE3044377, BRACE3044389, BRACE3044495, BRACE3045011, BRACE3045033, BRACE3045078, BRACE3045145, BRACE3045424, BRACE3045708, BRACE3045981, BRACE3046049, BRACE3046152, BRACE3046294, BRACE3046450, BRACE3046466, BRACE3046491, BRACE3046609, BRACE3046762, BRACE3046837, BRACE3046855, BRACE3046966, BRACE3047018, BRACE3047482, BRACE3047801, BRALZ1000047, BRALZ1000103, BRALZ2000189, BRALZ2000263, BRALZ2001279, BRALZ2001350, BRALZ2001445, BRALZ2001559, BRALZ2001743, BRALZ2001834, BRALZ2002174, BRALZ2002418, BRALZ2002477, BRALZ2003119, BRALZ2003330, BRALZ2003453, BRALZ2003525, BRALZ2004397, BRALZ2005467, BRALZ2005471, BRALZ2005888, BRALZ2005950, BRALZ2005992, BRALZ2006288, BRALZ2006474, BRALZ2006560, BRALZ2006734, BRALZ2006800, BRALZ2006976, BRALZ2007376, BRALZ2007545, BRALZ2007576, BRALZ2007661, BRALZ2007790, BRALZ2007793, BRALZ2007952, BRALZ2008031, BRALZ2008166, BRALZ2008462, BRALZ2008617, BRALZ2008696, BRALZ2008763, BRALZ2008869, BRALZ2008930, BRALZ2009446, BRALZ2009486, BRALZ2010186, BRALZ2010842, BRALZ2011337, BRALZ2012050, BRALZ2012183, BRALZ2012848, BRALZ2013621, BRALZ2013690, BRALZ2014054, BRALZ2014316, BRALZ2014484, BRALZ2014951, BRALZ2015168, BRALZ2015811, BRALZ2016085, BRALZ2016498, BRALZ2017359, BRALZ2017531, BRALZ2017607, BRALZ2017620, BRALZ2018342, BRALZ2018492, BRALZ2018834, BRALZ2019047, BRAMY1000095, BRAMY1000098, BRAMY1000130, BRAMY1000157, BRAMY1000173, BRAMY2000021, BRAMY2000025, BRAMY2000052, BRAMY2000076, BRAMY2000086, BRAMY2000151, BRAMY2000181, BRAMY2000196, BRAMY2000231, BRAMY2000277, BRAMY2000411, BRAMY2000653, BRAMY2000946, BRAMY2000981, BRAMY2000987, BRAMY2001068, BRAMY2001114, BRAMY2001203, BRAMY2001282, BRAMY2001367, BRAMY2001427, BRAMY2001473, BRAMY2002005, BRAMY2002044, BRAMY2002072, BRAMY2002158, BRAMY2002311, BRAMY2002339, BRAMY2002364, BRAMY2002369, BRAMY2002479, BRAMY2002493, BRAMY2002525, BRAMY2002584, BRAMY2002604, BRAMY2002621, BRAMY2002638, BRAMY2002739, BRAMY2002799, BRAMY2002853, BRAMY2002862, BRAMY2002956, BRAMY2003037, BRAMY2003117, BRAMY2003287, BRAMY2003325, BRAMY2003529, BRAMY2003538, BRAMY2003585, BRAMY2003634, BRAMY2003653, BRAMY2003681, BRAMY2003893, BRAMY2003897, BRAMY2003898, BRAMY2003904, BRAMY2003926, BRAMY2003929, BRAMY2004031, BRAMY2004058, BRAMY2004183, BRAMY2004335, BRAMY2004351, BRAMY2004352, BRAMY2004387, BRAMY2004492, BRAMY2004524, BRAMY2004537, BRAMY2004542, BRAMY2004756, BRAMY2004771, BRAMY2005052, BRAMY2005064, BRAMY2005094, BRAMY2005151, BRAMY2005182, BRAMY2005244, BRAMY2005391, BRAMY2005648, BRAMY2005662, BRAMY2005708, BRAMY2005711, BRAMY2006092, BRAMY2006118, BRAMY2006149, BRAMY2006397, BRAMY2006411, BRAMY2006459, BRAMY2006466, BRAMY2006659, BRAMY2006779, BRAMY2006809, BRAMY2006879, BRAMY2007043, BRAMY2007078, BRAMY2007110, BRAMY2007185, BRAMY2007244, BRAMY2007249, BRAMY2007255, BRAMY2007287, BRAMY2007308, BRAMY2007411, BRAMY2007458, BRAMY2007486, BRAMY2007546, BRAMY2007567, BRAMY2007594, BRAMY2007610, BRAMY2007613, BRAMY2007653, BRAMY2007753, BRAMY2007859, BRAMY2008333, BRAMY2008382, BRAMY2008563, BRAMY2008583, BRAMY2008977, BRAMY2008979, BRAMY2009034, BRAMY2009105, BRAMY2009123, BRAMY2009192, BRAMY2009344, BRAMY2009349, BRAMY2009394, BRAMY2009489, BRAMY2009508, BRAMY2009528, BRAMY2009557, BRAMY2009612, BRAMY2009693, BRAMY2009934, BRAMY2010068, BRAMY2010135, BRAMY2010145, BRAMY2010171, BRAMY2010208, BRAMY2010239, BRAMY2010272, BRAMY2010290, BRAMY2010357, BRAMY2010366, BRAMY2010395, BRAMY2010441, BRAMY2010442, BRAMY2010464, BRAMY2010581, BRAMY2010798, BRAMY2010808, BRAMY2010919, BRAMY2011064, BRAMY2011178, BRAMY2011196, BRAMY2011216, BRAMY2011253, BRAMY2011446, BRAMY2011480, BRAMY2011639, BRAMY2011679, BRAMY2011811, BRAMY2011841, BRAMY2011846, BRAMY2011849, BRAMY2011872, BRAMY2011961, BRAMY2012017, BRAMY2012119, BRAMY2012162, BRAMY2012163, BRAMY2012277, BRAMY2012340, BRAMY2012426, BRAMY2012497, BRAMY2012517, BRAMY2012555, BRAMY2012568, BRAMY2012691, BRAMY2012721, BRAMY2012731, BRAMY2012776, BRAMY2012880, BRAMY2012881, BRAMY2013200, BRAMY2013216, BRAMY2013405, BRAMY2013414, BRAMY2013572, BRAMY2013621, BRAMY2013659, BRAMY2013722, BRAMY2013736, BRAMY2013756, BRAMY2013944, BRAMY2013975, BRAMY2014019, BRAMY2014205, BRAMY2014387, BRAMY2014462, BRAMY2014469, BRAMY2014541, BRAMY2015251, BRAMY2015311, BRAMY2015420, BRAMY2015503, BRAMY2015516, BRAMY2015551, BRAMY2015559, BRAMY2015688, BRAMY2015705, BRAMY2015855, BRAMY2015890, BRAMY2015911, BRAMY2015925, BRAMY2016002, BRAMY2016020, BRAMY2016070, BRAMY2016251, BRAMY2016325, BRAMY2016327, BRAMY2016771, BRAMY2016892, BRAMY2016938, BRAMY2016953, BRAMY2017014, BRAMY2017249, BRAMY2017348, BRAMY2017450, BRAMY2017455, BRAMY2017528, BRAMY2018027, BRAMY2018106, BRAMY2018126, BRAMY2018272, BRAMY2018273, BRAMY2018279, BRAMY2018295, BRAMY2018308, BRAMY2018396, BRAMY2018467, BRAMY2018635, BRAMY2019055, BRAMY2019111, BRAMY2019277, BRAMY2019300, BRAMY2019468, BRAMY2019509, BRAMY2019643, BRAMY2019710, BRAMY2019985, BRAMY2020050, BRAMY2020058, BRAMY2020106, BRAMY2020270, BRAMY2020354, BRAMY2020355, BRAMY2020445, BRAMY2020466, BRAMY2020520, BRAMY2020574, BRAMY2020634, BRAMY2020713, BRAMY2021040, BRAMY2021063, BRAMY2021098, BRAMY2021142, BRAMY2021276, BRAMY2021310, BRAMY2021388, BRAMY2021498, BRAMY2021523, BRAMY2021710, BRAMY2021732, BRAMY2021746, BRAMY2021825, BRAMY2021867, BRAMY2021962, BRAMY2021982, BRAMY2022052, BRAMY2022263, BRAMY2022301, BRAMY2022320, BRAMY2022383, BRAMY2022454, BRAMY2022525, BRAMY2022532, BRAMY2022723, BRAMY2022796, BRAMY2022929, BRAMY2022980, BRAMY2022984, BRAMY2023060, BRAMY2023110, BRAMY2023115, BRAMY2023161, BRAMY2023172, BRAMY2023238, BRAMY2023327, BRAMY2023358, BRAMY2023482, BRAMY2023514, BRAMY2023719, BRAMY2023786, BRAMY2023852, BRAMY2023863, BRAMY2023939, BRAMY2024004, BRAMY2024073, BRAMY2024312, BRAMY2024374, BRAMY2024449, BRAMY2024489, BRAMY2024497, BRAMY2024514, BRAMY2024530, BRAMY2024535, BRAMY2024545, BRAMY2024576, BRAMY2024593, BRAMY2024711, BRAMY2024715, BRAMY2024728, BRAMY2024849, BRAMY2025024, BRAMY2025032, BRAMY2025121, BRAMY2025175, BRAMY2025218, BRAMY2025230, BRAMY2025272, BRAMY2025277, BRAMY2025495, BRAMY2025812, BRAMY2025996, BRAMY2026091, BRAMY2026168, BRAMY2026300, BRAMY2026347, BRAMY2026395, BRAMY2026405, BRAMY2026533, BRAMY2026538, BRAMY2026713, BRAMY2026778, BRAMY2026824, BRAMY2026899, BRAMY2026902, BRAMY2026904, BRAMY2026976, BRAMY2027073, BRAMY2027140, BRAMY2027242, BRAMY2027396, BRAMY2027451, BRAMY2027461, BRAMY2027467, BRAMY2027714, BRAMY2027717, BRAMY2027752, BRAMY2027782, BRAMY2028072, BRAMY2028183, BRAMY2028188, BRAMY2028269, BRAMY2028282, BRAMY2028472, BRAMY2028491, BRAMY2028565, BRAMY2028593, BRAMY2028783, BRAMY2028856, BRAMY2028914, BRAMY2029204, BRAMY2029602, BRAMY2029988, BRAMY2030098, BRAMY2030109, BRAMY2030206, BRAMY2030477, BRAMY2030545, BRAMY2030607, BRAMY2030702, BRAMY2030703, BRAMY2030768, BRAMY2030799, BRAMY2030859, BRAMY2030915, BRAMY2031317, BRAMY2031377, BRAMY2031442, BRAMY2032014, BRAMY2032231, BRAMY2032242, BRAMY2032290, BRAMY2032311, BRAMY2032317, BRAMY2032344, BRAMY2032589, BRAMY2032618, BRAMY2032777, BRAMY2032994, BRAMY2033003, BRAMY2033116, BRAMY2033240, BRAMY2033267, BRAMY2033332, BRAMY2033506, BRAMY2033594, BRAMY2033895, BRAMY2033914, BRAMY2034072, BRAMY2034185, BRAMY2034187, BRAMY2034305, BRAMY2034561, BRAMY2034920, BRAMY2034993, BRAMY2035449, BRAMY2035545, BRAMY2035606, BRAMY2035718, BRAMY2035801, BRAMY2035869, BRAMY2035923, BRAMY2036079, BRAMY2036254, BRAMY2036266, BRAMY2036387, BRAMY2036396, BRAMY2036567, BRAMY2036615, BRAMY2036699, BRAMY2036913, BRAMY2036918, BRAMY2036968, BRAMY2037147, BRAMY2037328, BRAMY2037609, BRAMY2037629, BRAMY2037800, BRAMY2037823, BRAMY2037971, BRAMY2038100, BRAMY2038128, BRAMY2038317, BRAMY2038475, BRAMY2038484, BRAMY2038516, BRAMY2038832, BRAMY2038887, BRAMY2038904, BRAMY2039287, BRAMY2039300, BRAMY2039314, BRAMY2039341, BRAMY2039630, BRAMY2039695, BRAMY2039728, BRAMY2040051, BRAMY2040159, BRAMY2040214, BRAMY2040478, BRAMY2040592, BRAMY2040915, BRAMY2041261, BRAMY2041347, BRAMY2041378, BRAMY2041384, BRAMY2041434, BRAMY2041507, BRAMY2041542, BRAMY2041738, BRAMY2042122, BRAMY2042131, BRAMY2042178, BRAMY2042195, BRAMY2042244, BRAMY2042549, BRAMY2042596, BRAMY2042612, BRAMY2042641, BRAMY2042711, BRAMY2042760, BRAMY2042804, BRAMY2042899, BRAMY2042918, BRAMY2043103, BRAMY2043314, BRAMY2043345, BRAMY2044246, BRAMY2044317, BRAMY2044349, BRAMY2044686, BRAMY2044838, BRAMY2045036, BRAMY2045299, BRAMY2045471, BRAMY2046109, BRAMY2046478, BRAMY2046489, BRAMY2046537, BRAMY2046667, BRAMY2046742, BRAMY2046871, BRAMY2046984, BRAMY2046989, BRAMY2047169, BRAMY2047280, BRAMY2047676, BRAMY2047692, BRAMY2047746, BRAMY2047751, BRAMY2047765, BRAMY2047884, BRAMY2047948, BRAMY3000206, BRAMY3000210, BRAMY3000213, BRAMY3000224, BRAMY3000254, BRAMY3000307, BRAMY3000692, BRAMY3001356, BRAMY3001401, BRAMY3001409, BRAMY3001794, BRAMY3002312, BRAMY3002329, BRAMY3002508, BRAMY3002620, BRAMY3002803, BRAMY3002805, BRAMY3002886, BRAMY3002991, BRAMY3003026, BRAMY3003109, BRAMY3003566, BRAMY3003723, BRAMY3004126, BRAMY3004224, BRAMY3004672, BRAMY3004800, BRAMY3004900, BRAMY3004919, BRAMY3005091, BRAMY3005184, BRAMY3005656, BRAMY3005912, BRAMY3005932, BRAMY3006032, BRAMY3006297, BRAMY3006761, BRAMY3007078, BRAMY3007206, BRAMY3007350, BRAMY3007449, BRAMY3007471, BRAMY3007609, BRAMY3007723, BRAMY3007968, BRAMY3008088, BRAMY3008096, BRAMY3008335, BRAMY3008466, BRAMY3008505, BRAMY3008650, BRAMY3008937, BRAMY3009158, BRAMY3009207, BRAMY3009556, BRAMY3009782, BRAMY3009811, BRAMY3009904, BRAMY3010264, BRAMY3010321, BRAMY3010411, BRAMY3010603, BRAMY3010654, BRAMY4000095, BRAMY4000229, BRAMY4000277, BRAMY4000915, BRAMY4000962, BRAMY4001173, BRAMY4001200, BRAMY4001449, BRAMY4001652, BRAMY4001913, BRAMY4002575, BRASW1000053, BRASW1000125, BRAWH1000002, BRAWH1000094, BRAWH1000116, BRAWH1000130, BRAWH1000157, BRAWH1000164, BRAWH1000168, BRAWH1000180, BRAWH1000369, BRAWH2000034, BRAWH2000048, BRAWH2000071, BRAWH2000093, BRAWH2000109, BRAWH2000131, BRAWH2000142, BRAWH2000169, BRAWH2000177, BRAWH2000218, BRAWH2000232, BRAWH2000248, BRAWH2000256, BRAWH2000274, BRAWH2000323, BRAWH2000353, BRAWH2000370, BRAWH2000409, BRAWH2000443, BRAWH2000471, BRAWH2000476, BRAWH2000482, BRAWH2000500, BRAWH2000503, BRAWH2000522, BRAWH2000554, BRAWH2000595, BRAWH2000643, BRAWH2000651, BRAWH2000682, BRAWH2000752, BRAWH2000866, BRAWH2000892, BRAWH2000901, BRAWH2000926, BRAWH2000984, BRAWH2001037, BRAWH2001052, BRAWH2001103, BRAWH2001137, BRAWH2001141, BRAWH2001159, BRAWH2001166, BRAWH2001203, BRAWH2001238, BRAWH2001255, BRAWH2001355, BRAWH2001378, BRAWH2001436, BRAWH2001438, BRAWH2001484, BRAWH2001492, BRAWH2001503, BRAWH2001519, BRAWH2001589, BRAWH2001662, BRAWH2001666, BRAWH2001679, BRAWH2001686, BRAWH2001701, BRAWH2001842, BRAWH2001862, BRAWH2001873, BRAWH2001940, BRAWH2001973, BRAWH2002047, BRAWH2002060, BRAWH2002125, BRAWH2002191, BRAWH2002318, BRAWH2002333, BRAWH2002352, BRAWH2002383, BRAWH2002549, BRAWH2002560, BRAWH2002623, BRAWH2002630, BRAWH2002635, BRAWH2002662, BRAWH2002679, BRAWH2002725, BRAWH2002761, BRAWH2002811, BRAWH2002861, BRAWH2002911, BRAWH2002963, BRAWH2002967, BRAWH2002976, BRAWH2003000, BRAWH2003025, BRAWH2003135, BRAWH2003307, BRAWH2003355, BRAWH2003366, BRAWH2003662, BRAWH2003832, BRAWH2003948, BRAWH2003964, BRAWH2004044, BRAWH2004068, BRAWH2004078, BRAWH2004580, BRAWH2004731, BRAWH2004779, BRAWH2004884, BRAWH2004923, BRAWH2005074, BRAWH2005315, BRAWH2005517, BRAWH2005524, BRAWH2005533, BRAWH2005812, BRAWH2005974, BRAWH2005998, BRAWH2006044, BRAWH2006083, BRAWH2006207, BRAWH2006301, BRAWH2006395, BRAWH2006405, BRAWH2006622, BRAWH2006760, BRAWH2006960, BRAWH2006989, BRAWH2006996, BRAWH2007069, BRAWH2007308, BRAWH2007406, BRAWH2007550, BRAWH2007570, BRAWH2007591, BRAWH2007658, BRAWH2007664, BRAWH2007800, BRAWH2007825, BRAWH2007862, BRAWH2007890, BRAWH2008128, BRAWH2008219, BRAWH2008255, BRAWH2008292, BRAWH2008297, BRAWH2008366, BRAWH2008380, BRAWH2008577, BRAWH2008790, BRAWH2008903, BRAWH2008993, BRAWH2009112, BRAWH2009227, BRAWH2009261, BRAWH2009263, BRAWH2009298, BRAWH2009393, BRAWH2009485, BRAWH2009490, BRAWH2009558, BRAWH2009590, BRAWH2009626, BRAWH2009695, BRAWH2009907, BRAWH2010000, BRAWH2010069, BRAWH2010084, BRAWH2010136, BRAWH2010318, BRAWH2010364, BRAWH2010536, BRAWH2010552, BRAWH2010584, BRAWH2010618, BRAWH2010619, BRAWH2010754, BRAWH2010980, BRAWH2011066, BRAWH2011079, BRAWH2011155, BRAWH2011166, BRAWH2011204, BRAWH2011286, BRAWH2011294, BRAWH2011400, BRAWH2011762, BRAWH2011795, BRAWH2011796, BRAWH2011812, BRAWH2011823, BRAWH2011860, BRAWH2011920, BRAWH2011958, BRAWH2012054, BRAWH2012077, BRAWH2012161, BRAWH2012162, BRAWH2012164, BRAWH2012258, BRAWH2012277, BRAWH2012326, BRAWH2012538, BRAWH2012540, BRAWH2012619, BRAWH2012698, BRAWH2012749, BRAWH2012827, BRAWH2012866, BRAWH2012963, BRAWH2013047, BRAWH2013748, BRAWH2013866, BRAWH2013914, BRAWH2013941, BRAWH2013955, BRAWH2014234, BRAWH2014379, BRAWH2014414, BRAWH2014473, BRAWH2014511, BRAWH2014662, BRAWH2014717, BRAWH2014729, BRAWH2014876, BRAWH2014934, BRAWH2014954, BRAWH2015247, BRAWH2015349, BRAWH2015375, BRAWH2015385, BRAWH2015595, BRAWH2015728, BRAWH2015853, BRAWH2015866, BRAWH2016028, BRAWH2016106, BRAWH2016160, BRAWH2016221, BRAWH2016223, BRAWH2016269, BRAWH2016305, BRAWH2016439, BRAWH2016446, BRAWH2016562, BRAWH2016655, BRAWH2016679, BRAWH2016702, BRAWH2016724, BRAWH2016785, BRAWH2016792, BRAWH2016800, BRAWH2017103, BRAWH2017250, BRAWH2017294, BRAWH2017304, BRAWH2017305, BRAWH2017379, BRAWH2017407, BRAWH2017433, BRAWH2017523, BRAWH2017534, BRAWH2017542, BRAWH2017635, BRAWH2017913, BRAWH2018267, BRAWH2018282, BRAWH2018317, BRAWH2018506, BRAWH2018514, BRAWH2018526, BRAWH2018601, BRAWH2018729, BRAWH2018745, BRAWH2018875, BRAWH2019053, BRAWH2019055, BRAWH2019198, BRAWH3000078, BRAWH3000100, BRAWH3000166, BRAWH3000314, BRAWH3000329, BRAWH3000410, BRAWH3000446, BRAWH3000491, BRAWH3000884, BRAWH3001053, BRAWH3001326, BRAWH3001475, BRAWH3001636, BRAWH3001638, BRAWH3001712, BRAWH3001760, BRAWH3001783, BRAWH3001833, BRAWH3001879, BRAWH3001891, BRAWH3002433, BRAWH3002467, BRAWH3002513, BRAWH3002574, BRAWH3002600, BRAWH3002819, BRAWH3003019, BRAWH3003136, BRAWH3003244, BRAWH3003343, BRAWH3003522, BRAWH3003598, BRAWH3003801, BRAWH3003975, BRAWH3004222, BRAWH3004335, BRAWH3004453, BRAWH3004666, BRAWH3005037, BRAWH3005047, BRAWH3005132, BRAWH3005292, BRAWH3005422, BRAWH3005534, BRAWH3005886, BRAWH3005892, BRAWH3005896, BRAWH3005912, BRAWH3005981, BRAWH3006547, BRAWH3006548, BRAWH3006761, BRAWH3006792, BRAWH3007129, BRAWH3007221, BRAWH3007441, BRAWH3007455, BRAWH3007506, BRAWH3007783, BRAWH3008167, BRAWH3008341, BRAWH3008559, BRAWH3008697, BRAWH3008867, BRAWH3009017, BRAWH3009285, BRAWH3009297, BRAWH3009546, BRAWH3009961, BRAWH3010461, BRAWH3010560, BRAWH3010602, BRAWH3010657, BRAWH3010726, BRAWH3010833, BRAWH3011101, BRAWH3011331, BRAWH3011402, BRAWH3011577, BRAWH3011623, BRAWH3011685, BRAWH3011907, BRAWH3011929, BRAWH3012005, BRAWH3012779, BRAWH3013009, BRAWH3013049, BRAWH3013197, BRAWH3013264, BRAWH3013508, BRAWH3014609, BRAWH3014639, BRAWH3015017, BRAWH3015175, BRAWH3015260, BRAWH3015610, BRAWH3015825, BRAWH3016123, BRAWH3016271, BRAWH3016715, BRAWH3017259, BRAWH3017260, BRAWH3017477, BRAWH3017537, BRAWH3017980, BRAWH3018369, BRAWH3018548, BRAWH3018969, BRAWH3019026, BRAWH3019529, BRAWH3019594, BRAWH3019629, BRAWH3019820, BRAWH3020200, BRAWH3020318, BRAWH3020486, BRAWH3020884, BRAWH3020928, BRAWH3021012, BRAWH3021580, BRAWH3021641, BRAWH3021643, BRAWH3021724, BRAWH3022347, BRAWH3022431, BRAWH3022459, BRAWH3022542, BRAWH3022719, BRAWH3022866, BRAWH3022900, BRAWH3023156, BRAWH3023168, BRAWH3023172, BRAWH3023274, BRAWH3023421, BRAWH3024231, BRAWH3024469, BRAWH3024506, BRAWH3024613, BRAWH3026349, BRAWH3026394, BRAWH3026529, BRAWH3027420, BRAWH3027440, BRAWH3027533, BRAWH3027574, BRAWH3027607, BRAWH3027616, BRAWH3027675, BRAWH3027806, BRAWH3027880, BRAWH3027927, BRAWH3028202, BRAWH3028223, BRAWH3028306, BRAWH3028461, BRAWH3028645, BRAWH3028754, BRAWH3028796, BRAWH3029254, BRAWH3029313, BRAWH3029538, BRAWH3029556, BRAWH3030613, BRAWH3030772, BRAWH3030810, BRAWH3030892, BRAWH3030910, BRAWH3030950, BRAWH3031054, BRAWH3031710, BRAWH3031902, BRAWH3032298, BRAWH3032340, BRAWH3032571, BRAWH3032620, BRAWH3032930, BRAWH3033117, BRAWH3033293, BRAWH3033448, BRAWH3033513, BRAWH3034097, BRAWH3034114, BRAWH3034134, BRAWH3034668, BRAWH3034743, BRAWH3034775, BRAWH3034890, BRAWH3035154, BRAWH3035904, BRAWH3035914, BRAWH3036077, BRAWH3036270, BRAWH3036561, BRAWH3036738, BRAWH3036951, BRAWH3037265, BRAWH3037394, BRAWH3037533, BRAWH3037979, BRAWH3038055, BRAWH3038230, BRAWH3038252, BRAWH3038324, BRCAN1000065, BRCAN1000105, BRCAN1000149, BRCAN1000168, BRCAN2000148, BRCAN2000149, BRCAN2000239, BRCAN2000346, BRCAN2000364, BRCAN2000383, BRCAN2000418, BRCAN2000523, BRCAN2000541, BRCAN2000563, BRCAN2000577, BRCAN2000620, BRCAN2000639, BRCAN2000763, BRCAN2000832, BRCAN2000923, BRCAN2001223, BRCAN2001866, BRCAN2002416, BRCAN2002473, BRCAN2002562, BRCAN2002662, BRCAN2002826, BRCAN2002854, BRCAN2002856, BRCAN2002892, BRCAN2002948, BRCAN2003070, BRCAN2003269, BRCAN2003389, BRCAN2003628, BRCAN2003703, BRCAN2003746, BRCAN2003814, BRCAN2003987, BRCAN2004173, BRCAN2004355, BRCAN2004371, BRCAN2004653, BRCAN2004699, BRCAN2005436, BRCAN2005449, BRCAN2006051, BRCAN2006063, BRCAN2006117, BRCAN2006174, BRCAN2006290, BRCAN2006297, BRCAN2006323, BRCAN2006401, BRCAN2006411, BRCAN2006450, BRCAN2006955, BRCAN2007119, BRCAN2007144, BRCAN2007426, BRCAN2007525, BRCAN2007700, BRCAN2008494, BRCAN2008528, BRCAN2008701, BRCAN2008894, BRCAN2009156, BRCAN2009168, BRCAN2009203, BRCAN2010374, BRCAN2010376, BRCAN2010547, BRCAN2010581, BRCAN2010665, BRCAN2011254, BRCAN2011316, BRCAN2011602, BRCAN2011946, BRCAN2012110, BRCAN2012355, BRCAN2012402, BRCAN2012408, BRCAN2012481, BRCAN2012613, BRCAN2012713, BRCAN2012929, BRCAN2013655, BRCAN2013660, BRCAN2014143, BRCAN2014229, BRCAN2014370, BRCAN2014602, BRCAN2014652, BRCAN2014788, BRCAN2014881, BRCAN2014952, BRCAN2015371, BRCAN2015402, BRCAN2015464, BRCAN2015757, BRCAN2015886, BRCAN2016025, BRCAN2016046, BRCAN2016174, BRCAN2016433, BRCAN2016619, BRCAN2016762, BRCAN2016814, BRCAN2017442, BRCAN2017905, BRCAN2018240, BRCAN2018269, BRCAN2018490, BRCAN2018566, BRCAN2018667, BRCAN2018748, BRCAN2018935, BRCAN2019002, BRCAN2019387, BRCAN2019773, BRCAN2019907, BRCAN2020234, BRCAN2020331, BRCAN2020467, BRCAN2020710, BRCAN2020880, BRCAN2021028, BRCAN2021325, BRCAN2021452, BRCAN2021669, BRCAN2021718, BRCAN2022191, BRCAN2022472, BRCAN2022474, BRCAN2023347, BRCAN2023724, BRCAN2024451, BRCAN2024563, BRCAN2024572, BRCAN2025009, BRCAN2025093, BRCAN2025349, BRCAN2025368, BRCAN2025712, BRCAN2025982, BRCAN2026117, BRCAN2026340, BRCAN2026711, BRCAN2027150, BRCAN2027310, BRCAN2027334, BRCAN2027355, BRCAN2027364, BRCAN2027513, BRCAN2027593, BRCAN2027970, BRCAN2028021, BRCAN2028036, BRCAN2028338, BRCAN2028378, BRCAN2028460, BRCAN2028545, BRCAN2028634, BRCAN2028702, BRCOC1000087, BRCOC2000047, BRCOC2000152, BRCOC2000184, BRCOC2000333, BRCOC2000360, BRCOC2000404, BRCOC2000637, BRCOC2000670, BRCOC2000816, BRCOC2000850, BRCOC2001355, BRCOC2002085, BRCOC2002323, BRCOC2002659, BRCOC2002664, BRCOC2002686, BRCOC2002751, BRCOC2002756, BRCOC2002777, BRCOC2002835, BRCOC2003100, BRCOC2003125, BRCOC2003513, BRCOC2003740, BRCOC2004036, BRCOC2004175, BRCOC2004354, BRCOC2004455, BRCOC2004950, BRCOC2005542, BRCOC2005903, BRCOC2005951, BRCOC2006189, BRCOC2006243, BRCOC2006270, BRCOC2006639, BRCOC2006942, BRCOC2007034, BRCOC2007593, BRCOC2007733, BRCOC2007769, BRCOC2008064, BRCOC2008225, BRCOC2008642, BRCOC2008993, BRCOC2009052, BRCOC2009196, BRCOC2009380, BRCOC2009638, BRCOC2009937, BRCOC2010115, BRCOC2010510, BRCOC2010980, BRCOC2010994, BRCOC2011010, BRCOC2011398, BRCOC2011418, BRCOC2011506, BRCOC2011769, BRCOC2011996, BRCOC2012229, BRCOC2012386, BRCOC2012813, BRCOC2013448, BRCOC2013573, BRCOC2013675, BRCOC2013780, BRCOC2014400, BRCOC2014748, BRCOC2014833, BRCOC2015597, BRCOC2015824, BRCOC2015908, BRCOC2015944, BRCOC2016525, BRCOC2016661, BRCOC2017061, BRCOC2017856, BRCOC2018775, BRCOC2018877, BRCOC2019255, BRCOC2019549, BRCOC2019841, BRCOC2019896, BRCOC2019934, BRCOC2020122, BRCOC2020142, BRHIP1000058, BRHIP1000072, BRHIP1000129, BRHIP1000174, BRHIP1000258, BRHIP2000021, BRHIP2000079, BRHIP2000163, BRHIP2000210, BRHIP2000312, BRHIP2000359, BRHIP2000445, BRHIP2000506, BRHIP2000532, BRHIP2000621, BRHIP2000691, BRHIP2000826, BRHIP2000920, BRHIP2001074, BRHIP2001686, BRHIP2001782, BRHIP2001802, BRHIP2001805, BRHIP2001886, BRHIP2001927, BRHIP2002122, BRHIP2002143, BRHIP2002172, BRHIP2002339, BRHIP2002346, BRHIP2002510, BRHIP2002664, BRHIP2002722, BRHIP2002929, BRHIP2003048, BRHIP2003242, BRHIP2003272, BRHIP2003748, BRHIP2003786, BRHIP2003828, BRHIP2003917, BRHIP2004312, BRHIP2004355, BRHIP2004814, BRHIP2004883, BRHIP2004902, BRHIP2005010, BRHIP2005236, BRHIP2005354, BRHIP2005600, BRHIP2005719, BRHIP2005724, BRHIP2005752, BRHIP2005932, BRHIP2006617, BRHIP2006782, BRHIP2006800, BRHIP2006819, BRHIP2006921, BRHIP2007307, BRHIP2007616, BRHIP2007690, BRHIP2007928, BRHIP2007969, BRHIP2008389, BRHIP2008607, BRHIP2008756, BRHIP2008909, BRHIP2009019, BRHIP2009177, BRHIP2009340, BRHIP2009351, BRHIP2009414, BRHIP2009474, BRHIP2009617, BRHIP2010217, BRHIP2010309, BRHIP2010444, BRHIP2010487, BRHIP2010610, BRHIP2010723, BRHIP2010744, BRHIP2011080, BRHIP2011120, BRHIP2011491, BRHIP2011576, BRHIP2011616, BRHIP2011783, BRHIP2011838, BRHIP2011891, BRHIP2011933, BRHIP2012054, BRHIP2012059, BRHIP2012141, BRHIP2012314, BRHIP2012360, BRHIP2012545, BRHIP2012580, BRHIP2012627, BRHIP2012642, BRHIP2012750, BRHIP2012922, BRHIP2012923, BRHIP2012972, BRHIP2013286, BRHIP2013447, BRHIP2013510, BRHIP2013699, BRHIP2013723, BRHIP2013958, BRHIP2013972, BRHIP2014063, BRHIP2014228, BRHIP2014285, BRHIP2014291, BRHIP2014387, BRHIP2014954, BRHIP2015224, BRHIP2015356, BRHIP2015360, BRHIP2016005, BRHIP2016125, BRHIP2016788, BRHIP2016968, BRHIP2016990, BRHIP2017315, BRHIP2017385, BRHIP2017404, BRHIP2017542, BRHIP2017553, BRHIP2017642, BRHIP2017714, BRHIP2017780, BRHIP2018014, BRHIP2018369, BRHIP2018612, BRHIP2018635, BRHIP2018650, BRHIP2018719, BRHIP2018805, BRHIP2018998, BRHIP2019007, BRHIP2019047, BRHIP2019149, BRHIP2019177, BRHIP2019186, BRHIP2019291, BRHIP2019494, BRHIP2019589, BRHIP2019641, BRHIP2019884, BRHIP2019972, BRHIP2020182, BRHIP2020622, BRHIP2020695, BRHIP2020743, BRHIP2020842, BRHIP2020859, BRHIP2020930, BRHIP2021102, BRHIP2021289, BRHIP2021495, BRHIP2021615, BRHIP2021744, BRHIP2021762, BRHIP2021858, BRHIP2021870, BRHIP2021929, BRHIP2022006, BRHIP2022054, BRHIP2022221, BRHIP2022298, BRHIP2022467, BRHIP2022708, BRHIP2023071, BRHIP2023229, BRHIP2023292, BRHIP2023695, BRHIP2023735, BRHIP2023762, BRHIP2023773, BRHIP2023860, BRHIP2023869, BRHIP2024165, BRHIP2024201, BRHIP2024347, BRHIP2024549, BRHIP2024789, BRHIP2024911, BRHIP2024941, BRHIP2025366, BRHIP2025448, BRHIP2025679, BRHIP2025739, BRHIP2025797, BRHIP2026021, BRHIP2026061, BRHIP2026155, BRHIP2026214, BRHIP2026288, BRHIP2026346, BRHIP2026557, BRHIP2026723, BRHIP2026877, BRHIP2027054, BRHIP2027563, BRHIP2027685, BRHIP2027762, BRHIP2028187, BRHIP2028303, BRHIP2028330, BRHIP2028480, BRHIP2028583, BRHIP2028593, BRHIP2029176, BRHIP2029283, BRHIP2029393, BRHIP2029529, BRHIP2029643, BRHIP2029663, BRHIP3000060, BRHIP3000070, BRHIP3000081, BRHIP3000240, BRHIP3000377, BRHIP3000457, BRHIP3000488, BRHIP3000526, BRHIP3000626, BRHIP3000859, BRHIP3000907, BRHIP3001076, BRHIP3001079, BRHIP3001141, BRHIP3001283, BRHIP3001338, BRHIP3001360, BRHIP3001481, BRHIP3001878, BRHIP3001964, BRHIP3002124, BRHIP3002363, BRHIP3002920, BRHIP3002931, BRHIP3003063, BRHIP3003126, BRHIP3003306, BRHIP3003340, BRHIP3003395, BRHIP3003484, BRHIP3003644, BRHIP3003688, BRHIP3003795, BRHIP3003961, BRHIP3003984, BRHIP3004193, BRHIP3004215, BRHIP3004416, BRHIP3004710, BRHIP3004725, BRHIP3004774, BRHIP3004786, BRHIP3004863, BRHIP3004968, BRHIP3005037, BRHIP3005137, BRHIP3005142, BRHIP3005231, BRHIP3005307, BRHIP3005574, BRHIP3005768, BRHIP3005801, BRHIP3005944, BRHIP3006279, BRHIP3006390, BRHIP3006449, BRHIP3006683, BRHIP3006717, BRHIP3006786, BRHIP3006950, BRHIP3007172, BRHIP3007183, BRHIP3007195, BRHIP3007239, BRHIP3007291, BRHIP3007409, BRHIP3007424, BRHIP3007483, BRHIP3007586, BRHIP3007609, BRHIP3007640, BRHIP3007960, BRHIP3008082, BRHIP3008183, BRHIP3008314, BRHIP3008320, BRHIP3008344, BRHIP3008565, BRHIP3008598, BRHIP3008606, BRHIP3008691, BRHIP3008714, BRHIP3008997, BRHIP3009099, BRHIP3009140, BRHIP3009181, BRHIP3009318, BRHIP3009427, BRHIP3009448, BRHIP3009672, BRHIP3009753, BRHIP3010135, BRHIP3010289, BRHIP3010529, BRHIP3011082, BRHIP3011241, BRHIP3011269, BRHIP3011460, BRHIP3011567, BRHIP3011831, BRHIP3012185, BRHIP3012289, BRHIP3012357, BRHIP3012736, BRHIP3012745, BRHIP3012868, BRHIP3013078, BRHIP3013271, BRHIP3013588, BRHIP3013698, BRHIP3013765, BRHIP3013897, BRHIP3014237, BRHIP3015620, BRHIP3015751, BRHIP3015854, BRHIP3016032, BRHIP3016213, BRHIP3016302, BRHIP3016421, BRHIP3017109, BRHIP3017146, BRHIP3017256, BRHIP3017325, BRHIP3017558, BRHIP3017637, BRHIP3019643, BRHIP3019824, BRHIP3019880, BRHIP3019956, BRHIP3020155, BRHIP3020182, BRHIP3021019, BRHIP3021499, BRHIP3021534, BRHIP3021778, BRHIP3021987, BRHIP3022656, BRHIP3023922, BRHIP3024118, BRHIP3024533, BRHIP3024703, BRHIP3024725, BRHIP3024820, BRHIP3025161, BRHIP3025702, BRHIP3025795, BRHIP3025844, BRHIP3026052, BRHIP3026097, BRHIP3026231, BRHIP3026335, BRHIP3026651, BRHIP3027105, BRHIP3027137, BRHIP3027160, BRHIP3027191, BRHIP3027501, BRHIP3027594, BRHIP3027651, BRHIP3027854, BRHIP3027947, BRHIP3028570, BRHIP3028742, BRSSN1000056, BRSSN1000059, BRSSN1000092, BRSSN1000153, BRSSN2000175, BRSSN2000293, BRSSN2000312, BRSSN2000518, BRSSN2000561, BRSSN2000566, BRSSN2000715, BRSSN2001213, BRSSN2001275, BRSSN2001342, BRSSN2001426, BRSSN2001503, BRSSN2001758, BRSSN2001810, BRSSN2002857, BRSSN2002859, BRSSN2003086, BRSSN2003093, BRSSN2003820, BRSSN2003841, BRSSN2003937, BRSSN2004142, BRSSN2004303, BRSSN2004304, BRSSN2004496, BRSSN2004657, BRSSN2004679, BRSSN2004686, BRSSN2004710, BRSSN2006133, BRSSN2006390, BRSSN2006575, BRSSN2006611, BRSSN2006644, BRSSN2007076, BRSSN2007168, BRSSN2007202, BRSSN2007504, BRSSN2007819, BRSSN2008125, BRSSN2008419, BRSSN2008464, BRSSN2008549, BRSSN2008797, BRSSN2009119, BRSSN2009378, BRSSN2009389, BRSSN2009395, BRSSN2009627, BRSSN2009630, BRSSN2009702, BRSSN2010110, BRSSN2010587, BRSSN2010596, BRSSN2010830, BRSSN2011653, BRSSN2012081, BRSSN2012103, BRSSN2012157, BRSSN2012198, BRSSN2012254, BRSSN2012622, BRSSN2012691, BRSSN2012838, BRSSN2013095, BRSSN2013544, BRSSN2013696, BRSSN2013733, BRSSN2013753, BRSSN2013874, BRSSN2014112, BRSSN2014294, BRSSN2014424, BRSSN2014513, BRSSN2014556, BRSSN2014573, BRSSN2014636, BRSSN2015199, BRSSN2015369, BRSSN2015493, BRSSN2015497, BRSSN2015554, BRSSN2015707, BRSSN2015773, BRSSN2015907, BRSSN2015982, BRSSN2016589, BRSSN2016768, BRSSN2016905, BRSSN2017297, BRSSN2017422, BRSSN2017530, BRSSN2017682, BRSSN2017757, BRSSN2018218, BRSSN2018440, BRSSN2018731, BRSSN2018771, BRSSN2018925, BRSTN1000097, BRSTN2000070, BRSTN2000220, BRSTN2000312, BRSTN2000367, BRSTN2000536, BRSTN2000872, BRSTN2001613, BRSTN2001801, BRSTN2002105, BRSTN2002400, BRSTN2002532, BRSTN2002691, BRSTN2003590, BRSTN2003835, BRSTN2004863, BRSTN2004987, BRSTN2005721, BRSTN2006306, BRSTN2006466, BRSTN2006580, BRSTN2006583, BRSTN2006638, BRSTN2006865, BRSTN2007000, BRSTN2007118, BRSTN2007284, BRSTN2007765, BRSTN2008052, BRSTN2008283, BRSTN2008367, BRSTN2008418, BRSTN2008457, BRSTN2008475, BRSTN2008930, BRSTN2009247, BRSTN2010363, BRSTN2010416, BRSTN2010500, BRSTN2010569, BRSTN2010750, BRSTN2010923, BRSTN2011211, BRSTN2011597, BRSTN2011688, BRSTN2011799, BRSTN2012284, BRSTN2012320, BRSTN2012380, BRSTN2013171, BRSTN2013354, BRSTN2014633, BRSTN2014751, BRSTN2014770, BRSTN2015015, BRSTN2016066, BRSTN2016335, BRSTN2016678, BRSTN2016892, BRSTN2016918, BRSTN2017151, BRSTN2017237, BRSTN2017379, BRSTN2017771, BRSTN2017995, BRSTN2018077, BRSTN2018083, BRSTN2018596, BRSTN2018692, BRSTN2018712, BRSTN2019079, BRSTN2019129, BRTHA1000021, BRTHA1000063, BRTHA2000057, BRTHA2000474, BRTHA2000514, BRTHA2000574, BRTHA2000855, BRTHA2000969, BRTHA2000972, BRTHA2001304, BRTHA2001370, BRTHA2001462, BRTHA2001717, BRTHA2001812, BRTHA2002091, BRTHA2002115, BRTHA2002133, BRTHA2002281, BRTHA2002376, BRTHA2002442, BRTHA2002493, BRTHA2002565, BRTHA2002608, BRTHA2002702, BRTHA2002721, BRTHA2002726, BRTHA2002741, BRTHA2002808, BRTHA2002896, BRTHA2002903, BRTHA2003030, BRTHA2003110, BRTHA2003116, BRTHA2003436, BRTHA2003759, BRTHA2003794, BRTHA2004361, BRTHA2004371, BRTHA2004582, BRTHA2004629, BRTHA2004639, BRTHA2004642, BRTHA2004812, BRTHA2004821, BRTHA2004978, BRTHA2004992, BRTHA2005005, BRTHA2005448, BRTHA2005579, BRTHA2005831, BRTHA2005942, BRTHA2005956, BRTHA2006075, BRTHA2006146, BRTHA2006194, BRTHA2006232, BRTHA2006720, BRTHA2006735, BRTHA2006974, BRTHA2006975, BRTHA2007060, BRTHA2007122, BRTHA2007422, BRTHA2007603, BRTHA2007665, BRTHA2008316, BRTHA2008502, BRTHA2008513, BRTHA2008527, BRTHA2008535, BRTHA2008598, BRTHA2008669, BRTHA2008955, BRTHA2009311, BRTHA2009349, BRTHA2009486, BRTHA2009803, BRTHA2009846, BRTHA2009972, BRTHA2010008, BRTHA2010033, BRTHA2010073, BRTHA2010097, BRTHA2010191, BRTHA2010397, BRTHA2010608, BRTHA2010672, BRTHA2010884, BRTHA2010907, BRTHA2011062, BRTHA2011194, BRTHA2011321, BRTHA2011351, BRTHA2011500, BRTHA2011641, BRTHA2012129, BRTHA2012183, BRTHA2012189, BRTHA2012351, BRTHA2012392, BRTHA2012466, BRTHA2012555, BRTHA2012562, BRTHA2013262, BRTHA2013426, BRTHA2013460, BRTHA2013515, BRTHA2013595, BRTHA2013610, BRTHA2013707, BRTHA2013942, BRTHA2014287, BRTHA2014334, BRTHA2014381, BRTHA2014578, BRTHA2014647, BRTHA2014792, BRTHA2014828, BRTHA2014909, BRTHA2014975, BRTHA2015406, BRTHA2015478, BRTHA2015696, BRTHA2015700, BRTHA2015853, BRTHA2015878, BRTHA2016179, BRTHA2016215, BRTHA2016267, BRTHA2016318, BRTHA2016496, BRTHA2016543, BRTHA2016552, BRTHA2016765, BRTHA2017178, BRTHA2017353, BRTHA2017364, BRTHA2017972, BRTHA2018011, BRTHA2018129, BRTHA2018165, BRTHA2018304, BRTHA2018344, BRTHA2018420, BRTHA2018443, BRTHA2018558, BRTHA2018591, BRTHA2018624, BRTHA2018706, BRTHA2019014, BRTHA2019022, BRTHA2019048, BRTHA2019726, BRTHA2019743, BRTHA2020400, BRTHA2020566, BRTHA2020642, BRTHA2020695, BRTHA2020721, BRTHA2020781, BRTHA2020811, BRTHA2020910, BRTHA2021212, BRTHA2021450, BRTHA2022074, BRTHA2022914, BRTHA2022968, BRTHA2023402, BRTHA2023437, BRTHA2024177, BRTHA2024354, BRTHA2024712, BRTHA2025869, BRTHA2026290, BRTHA2026311, BRTHA2027227, BRTHA2027229, BRTHA2027250, BRTHA2027546, BRTHA2028297, BRTHA2029969, BRTHA2030036, BRTHA2030213, BRTHA2031517, BRTHA2031800, BRTHA2031917, BRTHA2032763, BRTHA2032845, BRTHA2033122, BRTHA2033155, BRTHA2033264, BRTHA2033320, BRTHA2033469, BRTHA2033683, BRTHA2034281, BRTHA2034576, BRTHA2034874, BRTHA2035448, BRTHA2036055, BRTHA2036295, BRTHA2036660, BRTHA2037247, BRTHA2038279, BRTHA2038345, BRTHA2038353, BRTHA2038396, BRTHA3000252, BRTHA3000296, BRTHA3000297, BRTHA3000325, BRTHA3000456, BRTHA3000633, BRTHA3000789, BRTHA3001221, BRTHA3001623, BRTHA3002265, BRTHA3002401, BRTHA3002411, BRTHA3002933, BRTHA3002955, BRTHA3003000, BRTHA3003023, BRTHA3003074, BRTHA3003225, BRTHA3003339, BRTHA3003343, BRTHA3003449, BRTHA3003474, BRTHA3003704, BRTHA3004432, BRTHA3004475, BRTHA3004502, BRTHA3004610, BRTHA3005046, BRTHA3005735, BRTHA3005988, BRTHA3006318, BRTHA3006593, BRTHA3006856, BRTHA3007113, BRTHA3007130, BRTHA3007148, BRTHA3007319, BRTHA3007469, BRTHA3007532, BRTHA3007662, BRTHA3007685, BRTHA3007769, BRTHA3007922, BRTHA3008143, BRTHA3008293, BRTHA3008310, BRTHA3008386, BRTHA3008520, BRTHA3008608, BRTHA3008694, BRTHA3008778, BRTHA3008826, BRTHA3009037, BRTHA3009090, BRTHA3009291, BRTHA3009858, BRTHA3010135, BRTHA3010366, BRTHA3010469, BRTHA3010540, BRTHA3010717, BRTHA3011149, BRTHA3011187, BRTHA3011229, BRTHA3011361, BRTHA3011510, BRTHA3011892, BRTHA3012265, BRTHA3013860, BRTHA3013882, BRTHA3013884, BRTHA3013981, BRTHA3014000, BRTHA3014105, BRTHA3014507, BRTHA3014547, BRTHA3014691, BRTHA3014835, BRTHA3014854, BRTHA3014908, BRTHA3014920, BRTHA3015815, BRTHA3016616, BRTHA3016835, BRTHA3016845, BRTHA3016917, BRTHA3017047, BRTHA3017589, BRTHA3017848, BRTHA3018409, BRTHA3018514, BRTHA3018617, BRTHA3018623, BRTHA3018656, BRTHA3019048, BRTHA3019105, BRTHA3019183, BRTHA3020000, BRTHA3020369, BRTHA3021569, BRTHA3021708, BRTHA3021786, BRTHA3023403, BRTHA3023523, BRTHA3023590, BRTHA3023929, BRTHA3024233, BRTHA3024600, BRTHA3025073, BRTHA3025789, BRTHA3025826, BRTHA3026161, BRTHA3026180, BRTHA3026507, BRTHA3026556, BRTHA3026916, BRTHA3027171, BRTHA3027318, BRTHA3027638, BRTHA3027820, BRTHA3027879, BRTHA3027957, BRTHA3028339, BRTHA3028505, BRTHA3028782, CD34C2000051, CD34C2000152, CD34C2000175, CD34C2000443, CD34C3000125, CD34C3000314, CD34C3000424, CD34C3000494, CERVX1000042, CERVX2000812, CERVX2000968, CERVX2002006, CERVX2002013, CERVX2002430, CERVX2002770, CHONS1000058, CHONS2000172, CHONS2001287, CHONS2001382, CHONS2001797, CHONS2001834, CHONS2002419, COLON1000030, COLON1000084, COLON1000135, COLON2000470, COLON2000557, COLON2000568, COLON2001721, COLON2001829, COLON2001866, COLON2002520, COLON2003043, COLON2003529, COLON2004318, COLON2004351, COLON2004478, COLON2004911, COLON2005126, COLON2005623, COLON2005735, COLON2005772, COLON2006263, COLON2006282, COLON2006417, COLON2007274, COLON2007733, COLON2008105, COLON2009337, COLON2009499, CORDB1000140, CORDB2000061, CORDB2000127, CORDB2000541, CTONG1000020, CTONG1000022, CTONG1000040, CTONG1000056, CTONG1000062, CTONG1000086, CTONG1000088, CTONG1000093, CTONG1000097, CTONG1000113, CTONG1000137, CTONG1000165, CTONG1000180, CTONG1000181, CTONG1000220, CTONG1000277, CTONG1000283, CTONG1000302, CTONG1000341, CTONG1000476, CTONG1000488, CTONG1000508, CTONG1000540, CTONG2000031, CTONG2000034, CTONG2000042, CTONG2000218, CTONG2000279, CTONG2000303, CTONG2000330, CTONG2000395, CTONG2000452, CTONG2000480, CTONG2000589, CTONG2000766, CTONG2000771, CTONG2000819, CTONG2000827, CTONG2000846, CTONG2000855, CTONG2000977, CTONG2001139, CTONG2001226, CTONG2001320, CTONG2001413, CTONG2001513, CTONG2001524, CTONG2001533, CTONG2001598, CTONG2001681, CTONG2001724, CTONG2001749, CTONG2001800, CTONG2001820, CTONG2001877, CTONG2001911, CTONG2001932, CTONG2001955, CTONG2002066, CTONG2002095, CTONG2002143, CTONG2002417, CTONG2002418, CTONG2002453, CTONG2002520, CTONG2002558, CTONG2002590, CTONG2002709, CTONG2002766, CTONG2002816, CTONG2002832, CTONG2002841, CTONG2002965, CTONG2002999, CTONG2003028, CTONG2003115, CTONG2003189, CTONG2003245, CTONG2003293, CTONG2003348, CTONG2003350, CTONG2003361, CTONG2003372, CTONG2003375, CTONG2003427, CTONG2003517, CTONG2003599, CTONG2003680, CTONG2003699, CTONG2003764, CTONG2003782, CTONG2003889, CTONG2003937, CTONG2003945, CTONG2004000, CTONG2004062, CTONG2004115, CTONG2004126, CTONG2004264, CTONG2004305, CTONG2004397, CTONG2004454, CTONG2004550, CTONG2004669, CTONG2004716, CTONG2004912, CTONG2004941, CTONG2004948, CTONG2005049, CTONG2005110, CTONG2005145, CTONG2005265, CTONG2005290, CTONG2005374, CTONG2005399, CTONG2005567, CTONG2005585, CTONG2005635, CTONG2005775, CTONG2005795, CTONG2005890, CTONG2005904, CTONG2005913, CTONG2006129, CTONG2006223, CTONG2006273, CTONG2006310, CTONG2006393, CTONG2006412, CTONG2006449, CTONG2006515, CTONG2006524, CTONG2006568, CTONG2006611, CTONG2006620, CTONG2006691, CTONG2006836, CTONG2006942, CTONG2006964, CTONG2007009, CTONG2007091, CTONG2007104, CTONG2007175, CTONG2007259, CTONG2007272, CTONG2007293, CTONG2007297, CTONG2007399, CTONG2007474, CTONG2007613, CTONG2007623, CTONG2007681, CTONG2007779, CTONG2007898, CTONG2007959, CTONG2007970, CTONG2008014, CTONG2008184, CTONG2008262, CTONG2008269, CTONG2008321, CTONG2008343, CTONG2008402, CTONG2008405, CTONG2008518, CTONG2008521, CTONG2008562, CTONG2008577, CTONG2008595, CTONG2008689, CTONG2008721, CTONG2008773, CTONG2008989, CTONG2009033, CTONG2009108, CTONG2009132, CTONG2009156, CTONG2009181, CTONG2009257, CTONG2009258, CTONG2009268, CTONG2009270, CTONG2009395, CTONG2009423, CTONG2009440, CTONG2009527, CTONG2009529, CTONG2009531, CTONG2009570, CTONG2009572, CTONG2009604, CTONG2009643, CTONG2009675, CTONG2009689, CTONG2009725, CTONG2009766, CTONG2009768, CTONG2009871, CTONG2009887, CTONG2009891, CTONG2009923, CTONG2009955, CTONG2009958, CTONG2010018, CTONG2010024, CTONG2010116, CTONG2010133, CTONG2010148, CTONG2010276, CTONG2010330, CTONG2010508, CTONG2010566, CTONG2010623, CTONG2010803, CTONG2011188, CTONG2011429, CTONG2011474, CTONG2011676, CTONG2011716, CTONG2011765, CTONG2011779, CTONG2011815, CTONG2011822, CTONG2011920, CTONG2011985, CTONG2012029, CTONG2012077, CTONG2012101, CTONG2012123, CTONG2012158, CTONG2012230, CTONG2012425, CTONG2012447, CTONG2012473, CTONG2012476, CTONG2012533, CTONG2012554, CTONG2012564, CTONG2012724, CTONG2012738, CTONG2012758, CTONG2012843, CTONG2012879, CTONG2012901, CTONG2013128, CTONG2013149, CTONG2013156, CTONG2013178, CTONG2013222, CTONG2013284, CTONG2013339, CTONG2013352, CTONG2013381, CTONG2013393, CTONG2013511, CTONG2013630, CTONG2013803, CTONG2013985, CTONG2013986, CTONG2014032, CTONG2014058, CTONG2014191, CTONG2014206, CTONG2014234, CTONG2014264, CTONG2014369, CTONG2014630, CTONG2014635, CTONG2014646, CTONG2014705, CTONG2014946, CTONG2014959, CTONG2014966, CTONG2014995, CTONG2015204, CTONG2015316, CTONG2015330, CTONG2015358, CTONG2015434, CTONG2015518, CTONG2015540, CTONG2015596, CTONG2015633, CTONG2015717, CTONG2015804, CTONG2015815, CTONG2015866, CTONG2015914, CTONG2015953, CTONG2016217, CTONG2016355, CTONG2016408, CTONG2016499, CTONG2016559, CTONG2016658, CTONG2016775, CTONG2016797, CTONG2016824, CTONG2016846, CTONG2016904, CTONG2016942, CTONG2016953, CTONG2017021, CTONG2017094, CTONG2017292, CTONG2017409, CTONG2017444, CTONG2017458, CTONG2017604, CTONG2017650, CTONG2017804, CTONG2017814, CTONG2017910, CTONG2017939, CTONG2017989, CTONG2018062, CTONG2018069, CTONG2018147, CTONG2018217, CTONG2018279, CTONG2018343, CTONG2018379, CTONG2018383, CTONG2018413, CTONG2018483, CTONG2018632, CTONG2018652, CTONG2018653, CTONG2018655, CTONG2018808, CTONG2018900, CTONG2019063, CTONG2019144, CTONG2019232, CTONG2019400, CTONG2019652, CTONG2019833, CTONG2020031, CTONG2020127, CTONG2020171, CTONG2020374, CTONG2020411, CTONG2020445, CTONG2020522, CTONG2020806, CTONG2020831, CTONG2020974, CTONG2021132, CTONG2021168, CTONG2022153, CTONG2022601, CTONG2023021, CTONG2023449, CTONG2023512, CTONG2024206, CTONG2024614, CTONG2024749, CTONG2025496, CTONG2025513, CTONG2025516, CTONG2025610, CTONG2025900, CTONG2026513, CTONG2026770, CTONG2026920, CTONG2026987, CTONG2027150, CTONG2027263, CTONG2027361, CTONG2027591, CTONG2027736, CTONG2027783, CTONG2027828, CTONG2027959, CTONG2028097, CTONG2028208, CTONG2028486, CTONG2028518, CTONG2028687, CTONG3000686, CTONG3000707, CTONG3000896, CTONG3001420, CTONG3001501, CTONG3001560, CTONG3001605, CTONG3002020, CTONG3002370, CTONG3002412, CTONG3002433, CTONG3002552, CTONG3002588, CTONG3002728, CTONG3002909, CTONG3002947, CTONG3002983, CTONG3003165, CTONG3003179, CTONG3003483, CTONG3003553, CTONG3003598, CTONG3003652, CTONG3003654, CTONG3003669, CTONG3003737, CTONG3003972, CTONG3004317, CTONG3004397, CTONG3004550, CTONG3004607, CTONG3004712, CTONG3004726, CTONG3005325, CTONG3005648, CTONG3005713, CTONG3005803, CTONG3005813, CTONG3006067, CTONG3006073, CTONG3006186, CTONG3006629, CTONG3006650, CTONG3006659, CTONG3007244, CTONG3007444, CTONG3007528, CTONG3007586, CTONG3007870, CTONG3008223, CTONG3008252, CTONG3008258, CTONG3008457, CTONG3008496, CTONG3008566, CTONG3008639, CTONG3008831, CTONG3008951, CTONG3008959, CTONG3009227, CTONG3009239, CTONG3009287, CTONG3009328, CTONG3009385, D30ST1000066, D30ST1000109, D30ST1000238, D30ST1000267, D30ST1000270, D30ST2000184, D30ST2000618, D30ST2000654, D30ST2001328, D30ST2001669, D30ST2002182, D30ST2002223, D30ST2002262, D30ST2002272, D30ST2002417, D30ST2002436, D30ST2002648, D30ST2003024, D30ST2003331, D30ST2003607, D30ST2003797, D30ST2004637, D30ST3000169, D30ST3000195, D30ST3000388, D30ST3000493, D60ST2000127, D60ST2000169, D60ST2000245, D60ST2000507, D90ST2000031, D90ST2000278, D90ST2000440, D90ST2000869, D90ST2001319, D90ST2001433, D90ST2002397, D90ST2002673, D90ST2003106, D90ST2003108, D90ST2003137, D90ST2003397, D90ST2003580, D90ST2003594, D90ST2003762, D90ST2003989, D90ST2004018, D90ST2004073, D90ST2004417, DFNES1000003, DFNES1000107, DFNES1000185, DFNES2000143, DFNES2000146, DFNES2000153, DFNES2000212, DFNES2000268, DFNES2000292, DFNES2000335, DFNES2000432, DFNES2000457, DFNES2000471, DFNES2000913, DFNES2001091, DFNES2001096, DFNES2001108, DFNES2001177, DFNES2001564, DFNES2001565, DFNES2001647, DFNES2001800, DFNES2001829, DFNES2002220, DFNES2002509, DFNES2002550, DFNES2002588, DFNES2002817, DFNES2002966, DFNES2003081, DFNES2003192, DFNES2003255, DFNES2004354, DFNES2004383, DFNES2004608, DFNES2004684, DFNES2005266, DFNES2005527, DFNES2005779, DFNES2005875, DFNES2006944, DFNES2007299, DFNES2007641, DFNES2007757, DFNES2008280, DFNES2008881, DFNES2010502, DFNES2011192, DFNES2011239, DFNES2011245, DFNES2011380, ERLTF1000021, ERLTF2000324, ERLTF2000465, FCBBF1000023, FCBBF1000069, FCBBF1000117, FCBBF1000118, FCBBF1000121, FCBBF1000125, FCBBF1000131, FCBBF1000155, FCBBF1000157, FCBBF1000171, FCBBF1000174, FCBBF1000182, FCBBF1000198, FCBBF1000206, FCBBF1000220, FCBBF1000232, FCBBF1000233, FCBBF1000243, FCBBF1000270, FCBBF1000272, FCBBF1000280, FCBBF1000297, FCBBF1000305, FCBBF1000314, FCBBF1000322, FCBBF1000349, FCBBF1000374, FCBBF1000376, FCBBF1000377, FCBBF1000395, FCBBF1000397, FCBBF1000403, FCBBF1000437, FCBBF1000449, FCBBF1000476, FCBBF1000506, FCBBF1000546, FCBBF1000550, FCBBF1000581, FCBBF1000582, FCBBF1000598, FCBBF1000604, FCBBF1000618, FCBBF1000627, FCBBF1000671, FCBBF1000675, FCBBF1000684, FCBBF1000686, FCBBF1000691, FCBBF1000732, FCBBF1000748, FCBBF2000038, FCBBF2000094, FCBBF2000105, FCBBF2000123, FCBBF2000195, FCBBF2000214, FCBBF2000232, FCBBF2000259, FCBBF2000276, FCBBF2000291, FCBBF2000362, FCBBF2000379, FCBBF2000473, FCBBF2000502, FCBBF2000566, FCBBF2000576, FCBBF2000591, FCBBF2000677, FCBBF2000678, FCBBF2000685, FCBBF2000733, FCBBF2000808, FCBBF2000815, FCBBF2000825, FCBBF2000940, FCBBF2000951, FCBBF2001001, FCBBF2001105, FCBBF2001116, FCBBF2001188, FCBBF2001211, FCBBF2001238, FCBBF2001243, FCBBF2001299, FCBBF2001427, FCBBF2001480, FCBBF2001529, FCBBF2001594, FCBBF2001672, FCBBF2001675, FCBBF2001718, FCBBF2001720, FCBBF2001817, FCBBF2001868, FCBBF2002044, FCBBF2002111, FCBBF2002281, FCBBF2002370, FCBBF2002541, FCBBF2002626, FCBBF2002897, FCBBF2002898, FCBBF2002904, FCBBF2002953, FCBBF2003083, FCBBF2003102, FCBBF2003269, FCBBF2003293, FCBBF2003297, FCBBF2003395, FCBBF2003528, FCBBF2003543, FCBBF2003549, FCBBF2003567, FCBBF2003636, FCBBF2003823, FCBBF2003895, FCBBF2004066, FCBBF2004090, FCBBF2004138, FCBBF2004217, FCBBF2004256, FCBBF2004373, FCBBF2004448, FCBBF2004671, FCBBF2004707, FCBBF2004788, FCBBF2005069, FCBBF2005122, FCBBF2005428, FCBBF2005439, FCBBF2005538, FCBBF2005637, FCBBF2005645, FCBBF2005658, FCBBF2005733, FCBBF2005966, FCBBF2006131, FCBBF2006380, FCBBF2006418, FCBBF2006452, FCBBF2006634, FCBBF2006781, FCBBF2007012, FCBBF2007186, FCBBF2007265, FCBBF2007302, FCBBF2007610, FCBBF2007633, FCBBF2007840, FCBBF3000102, FCBBF3000120, FCBBF3000168, FCBBF3000175, FCBBF3000227, FCBBF3000229, FCBBF3000233, FCBBF3000269, FCBBF3000361, FCBBF3000367, FCBBF3000388, FCBBF3000462, FCBBF3000473, FCBBF3000501, FCBBF3000518, FCBBF3000550, FCBBF3000847, FCBBF3001018, FCBBF3001020, FCBBF3001235, FCBBF3001281, FCBBF3001377, FCBBF3001594, FCBBF3001632, FCBBF3001657, FCBBF3001855, FCBBF3001912, FCBBF3001914, FCBBF3001918, FCBBF3001924, FCBBF3001977, FCBBF3002163, FCBBF3002188, FCBBF3002190, FCBBF3002268, FCBBF3002475, FCBBF3002556, FCBBF3002592, FCBBF3002658, FCBBF3002782, FCBBF3002818, FCBBF3002925, FCBBF3003216, FCBBF3003305, FCBBF3003373, FCBBF3003435, FCBBF3003475, FCBBF3003481, FCBBF3003557, FCBBF3003787, FCBBF3003902, FCBBF3004021, FCBBF3004041, FCBBF3004261, FCBBF3004323, FCBBF3004390, FCBBF3004409, FCBBF3004502, FCBBF3004842, FCBBF3004847, FCBBF3004955, FCBBF3005160, FCBBF3005218, FCBBF3005444, FCBBF3005698, FCBBF3005729, FCBBF3006171, FCBBF3006249, FCBBF3006288, FCBBF3006399, FCBBF3006628, FCBBF3007077, FCBBF3007150, FCBBF3007152, FCBBF3007242, FCBBF3007248, FCBBF3007453, FCBBF3007462, FCBBF3007540, FCBBF3007597, FCBBF3007604, FCBBF3007631, FCBBF3007829, FCBBF3007855, FCBBF3007859, FCBBF3007860, FCBBF3008073, FCBBF3008100, FCBBF3008159, FCBBF3008251, FCBBF3008311, FCBBF3008362, FCBBF3008475, FCBBF3008556, FCBBF3008644, FCBBF3008689, FCBBF3008748, FCBBF3008870, FCBBF3008938, FCBBF3008944, FCBBF3009069, FCBBF3009101, FCBBF3009152, FCBBF3009317, FCBBF3009428, FCBBF3009464, FCBBF3009479, FCBBF3009526, FCBBF3009703, FCBBF3009717, FCBBF3009888, FCBBF3009949, FCBBF3009978, FCBBF3010008, FCBBF3010012, FCBBF3010124, FCBBF3010130, FCBBF3010142, FCBBF3010149, FCBBF3010211, FCBBF3010361, FCBBF3010508, FCBBF3010544, FCBBF3010586, FCBBF3010601, FCBBF3010729, FCBBF3010733, FCBBF3011003, FCBBF3011418, FCBBF3011485, FCBBF3011570, FCBBF3011592, FCBBF3011867, FCBBF3011889, FCBBF3012170, FCBBF3012182, FCBBF3012288, FCBBF3012332, FCBBF3012443, FCBBF3012588, FCBBF3012667, FCBBF3012842, FCBBF3012901, FCBBF3013041, FCBBF3013058, FCBBF3013205, FCBBF3013307, FCBBF3013341, FCBBF3013506, FCBBF3013589, FCBBF3013623, FCBBF3013800, FCBBF3013846, FCBBF3014229, FCBBF3014260, FCBBF3014355, FCBBF3014567, FCBBF3014770, FCBBF3015100, FCBBF3015119, FCBBF3015131, FCBBF3015317, FCBBF3015727, FCBBF3015758, FCBBF3015809, FCBBF3015870, FCBBF3016018, FCBBF3016134, FCBBF3016178, FCBBF3016451, FCBBF3016618, FCBBF3016622, FCBBF3016644, FCBBF3016987, FCBBF3017059, FCBBF3017071, FCBBF3017123, FCBBF3017233, FCBBF3017255, FCBBF3017288, FCBBF3017396, FCBBF3017535, FCBBF3017681, FCBBF3017729, FCBBF3017873, FCBBF3017974, FCBBF3018067, FCBBF3018173, FCBBF3018453, FCBBF3018591, FCBBF3018753, FCBBF3018826, FCBBF3018949, FCBBF3019085, FCBBF3019437, FCBBF3019455, FCBBF3019564, FCBBF3019569, FCBBF3019570, FCBBF3019663, FCBBF3019714, FCBBF3019716, FCBBF3019784, FCBBF3019867, FCBBF3019961, FCBBF3020030, FCBBF3020138, FCBBF3020163, FCBBF3020232, FCBBF3020599, FCBBF3021026, FCBBF3021191, FCBBF3021221, FCBBF3021501, FCBBF3021506, FCBBF3021524, FCBBF3021807, FCBBF3021940, FCBBF3021985, FCBBF3022005, FCBBF3022291, FCBBF3022311, FCBBF3022566, FCBBF3022765, FCBBF3022894, FCBBF3023061, FCBBF3023078, FCBBF3023372, FCBBF3023443, FCBBF3023599, FCBBF3023704, FCBBF3023887, FCBBF3023895, FCBBF3024096, FCBBF3024225, FCBBF3024266, FCBBF3024364, FCBBF3024623, FCBBF3024911, FCBBF3025098, FCBBF3025252, FCBBF3025280, FCBBF3025285, FCBBF3025417, FCBBF3025528, FCBBF3025568, FCBBF3025650, FCBBF3025674, FCBBF3025730, FCBBF3026021, FCBBF3026048, FCBBF3026251, FCBBF3026678, FCBBF3026692, FCBBF3027104, FCBBF3027199, FCBBF3027328, FCBBF3027559, FCBBF3027717, FCBBF3027755, FCBBF3027768, FCBBF3027854, FCBBF3027863, FCBBF3027903, FCBBF3028102, FCBBF3028143, FCBBF3028188, FCBBF3028472, FCBBF3028528, FCBBF3028582, FCBBF3028671, FCBBF3028794, FCBBF4000061, FCBBF4000076, FCBBF4000142, FCBBF4000173, FCBBF4000192, FCBBF4000193, FCBBF4000268, FCBBF4000282, FCBBF4000399, FCBBF4000415, FCBBF4000500, FCBBF4000529, FCBBF5000041, FCBBF5000061, FCBBF5000165, FCBBF5000325, FCBBF5000353, FCBBF5000384, FCBBF5000483, FCBBF5000495, FEBRA1000005, FEBRA1000008, FEBRA1000022, FEBRA1000030, FEBRA1000088, FEBRA1000138, FEBRA1000148, FEBRA1000149, FEBRA1000183, FEBRA1000188, FEBRA1000189, FEBRA1000190, FEBRA2000007, FEBRA2000021, FEBRA2000035, FEBRA2000053, FEBRA2000126, FEBRA2000220, FEBRA2000282, FEBRA2000286, FEBRA2000297, FEBRA2000311, FEBRA2000321, FEBRA2000333, FEBRA2000378, FEBRA2000391, FEBRA2000394, FEBRA2000397, FEBRA2000399, FEBRA2000404, FEBRA2000409, FEBRA2000415, FEBRA2000436, FEBRA2000462, FEBRA2000468, FEBRA2000491, FEBRA2000504, FEBRA2000538, FEBRA2000575, FEBRA2000581, FEBRA2000656, FEBRA2000659, FEBRA2000680, FEBRA2000690, FEBRA2000727, FEBRA2000734, FEBRA2000762, FEBRA2000771, FEBRA2000772, FEBRA2000782, FEBRA2000790, FEBRA2000793, FEBRA2000803, FEBRA2000805, FEBRA2000809, FEBRA2000856, FEBRA2000862, FEBRA2000877, FEBRA2000880, FEBRA2000901, FEBRA2000909, FEBRA2000917, FEBRA2000928, FEBRA2000936, FEBRA2000937, FEBRA2000959, FEBRA2000972, FEBRA2001004, FEBRA2001012, FEBRA2001020, FEBRA2001093, FEBRA2001124, FEBRA2001133, FEBRA2001161, FEBRA2001175, FEBRA2001197, FEBRA2001217, FEBRA2001245, FEBRA2001267, FEBRA2001334, FEBRA2001351, FEBRA2001383, FEBRA2001438, FEBRA2001440, FEBRA2001487, FEBRA2001561, FEBRA2001584, FEBRA2001590, FEBRA2001591, FEBRA2001610, FEBRA2001620, FEBRA2001659, FEBRA2001705, FEBRA2001706, FEBRA2001752, FEBRA2001772, FEBRA2001790, FEBRA2001914, FEBRA2002009, FEBRA2002027, FEBRA2002086, FEBRA2002109, FEBRA2002191, FEBRA2002260, FEBRA2002399, FEBRA2002410, FEBRA2002442, FEBRA2002508, FEBRA2002525, FEBRA2002527, FEBRA2002552, FEBRA2002611, FEBRA2002628, FEBRA2002662, FEBRA2002682, FEBRA2002727, FEBRA2002781, FEBRA2002783, FEBRA2002818, FEBRA2002858, FEBRA2002882, FEBRA2002897, FEBRA2002908, FEBRA2002931, FEBRA2002962, FEBRA2002986, FEBRA2003054, FEBRA2003100, FEBRA2003128, FEBRA2003155, FEBRA2003163, FEBRA2003198, FEBRA2003253, FEBRA2003275, FEBRA2003308, FEBRA2003327, FEBRA2003429, FEBRA2003454, FEBRA2003468, FEBRA2003470, FEBRA2003520, FEBRA2003524, FEBRA2003541, FEBRA2003675, FEBRA2003707, FEBRA2003711, FEBRA2003822, FEBRA2003897, FEBRA2003907, FEBRA2004023, FEBRA2004026, FEBRA2004029, FEBRA2004053, FEBRA2004056, FEBRA2004091, FEBRA2004110, FEBRA2004191, FEBRA2004202, FEBRA2004219, FEBRA2004224, FEBRA2004237, FEBRA2004268, FEBRA2004325, FEBRA2004329, FEBRA2004412, FEBRA2004443, FEBRA2004490, FEBRA2004538, FEBRA2004592, FEBRA2004620, FEBRA2004651, FEBRA2004767, FEBRA2004813, FEBRA2004840, FEBRA2004852, FEBRA2004867, FEBRA2004914, FEBRA2004933, FEBRA2004987, FEBRA2005014, FEBRA2005036, FEBRA2005079, FEBRA2005216, FEBRA2005377, FEBRA2005380, FEBRA2005427, FEBRA2005458, FEBRA2005701, FEBRA2005726, FEBRA2005752, FEBRA2005788, FEBRA2005998, FEBRA2006055, FEBRA2006061, FEBRA2006112, FEBRA2006150, FEBRA2006165, FEBRA2006315, FEBRA2006346, FEBRA2006354, FEBRA2006370, FEBRA2006379, FEBRA2006396, FEBRA2006409, FEBRA2006418, FEBRA2006427, FEBRA2006476, FEBRA2006519, FEBRA2006521, FEBRA2006627, FEBRA2006664, FEBRA2006667, FEBRA2006726, FEBRA2006736, FEBRA2006793, FEBRA2006817, FEBRA2006890, FEBRA2006942, FEBRA2006977, FEBRA2007017, FEBRA2007176, FEBRA2007200, FEBRA2007247, FEBRA2007280, FEBRA2007414, FEBRA2007436, FEBRA2007449, FEBRA2007458, FEBRA2007534, FEBRA2007551, FEBRA2007566, FEBRA2007589, FEBRA2007620, FEBRA2007708, FEBRA2007714, FEBRA2007793, FEBRA2007818, FEBRA2007823, FEBRA2007931, FEBRA2007957, FEBRA2008009, FEBRA2008086, FEBRA2008134, FEBRA2008135, FEBRA2008159, FEBRA2008165, FEBRA2008172, FEBRA2008210, FEBRA2008255, FEBRA2008265, FEBRA2008282, FEBRA2008311, FEBRA2008360, FEBRA2008459, FEBRA2008468, FEBRA2008475, FEBRA2008481, FEBRA2008542, FEBRA2008660, FEBRA2008681, FEBRA2008741, FEBRA2008836, FEBRA2008859, FEBRA2008861, FEBRA2008866, FEBRA2008881, FEBRA2008928, FEBRA2008983, FEBRA2009016, FEBRA2009022, FEBRA2009029, FEBRA2009074, FEBRA2009117, FEBRA2009120, FEBRA2009162, FEBRA2009240, FEBRA2009265, FEBRA2009276, FEBRA2009289, FEBRA2009327, FEBRA2009328, FEBRA2009352, FEBRA2009362, FEBRA2009385, FEBRA2009416, FEBRA2009437, FEBRA2009478, FEBRA2009507, FEBRA2009541, FEBRA2009567, FEBRA2009588, FEBRA2009731, FEBRA2009754, FEBRA2009846, FEBRA2010141, FEBRA2010299, FEBRA2010484, FEBRA2010719, FEBRA2010746, FEBRA2010768, FEBRA2010802, FEBRA2011063, FEBRA2011356, FEBRA2011392, FEBRA2011414, FEBRA2011593, FEBRA2011665, FEBRA2012090, FEBRA2012195, FEBRA2012397, FEBRA2012418, FEBRA2012507, FEBRA2012625, FEBRA2013019, FEBRA2013069, FEBRA2013274, FEBRA2013465, FEBRA2013570, FEBRA2013905, FEBRA2013951, FEBRA2014122, FEBRA2014198, FEBRA2014443, FEBRA2014939, FEBRA2015076, FEBRA2015175, FEBRA2015292, FEBRA2015588, FEBRA2016112, FEBRA2016398, FEBRA2016583, FEBRA2016621, FEBRA2016654, FEBRA2016739, FEBRA2017098, FEBRA2017138, FEBRA2017154, FEBRA2017200, FEBRA2017223, FEBRA2017333, FEBRA2017502, FEBRA2017533, FEBRA2017736, FEBRA2017780, FEBRA2017811, FEBRA2017850, FEBRA2018051, FEBRA2018203, FEBRA2018407, FEBRA2018433, FEBRA2019172, FEBRA2019298, FEBRA2019389, FEBRA2019457, FEBRA2019519, FEBRA2019582, FEBRA2019637, FEBRA2019711, FEBRA2019867, FEBRA2020406, FEBRA2020566, FEBRA2020582, FEBRA2020668, FEBRA2020801, FEBRA2020845, FEBRA2020886, FEBRA2020977, FEBRA2021134, FEBRA2021171, FEBRA2021339, FEBRA2021431, FEBRA2021497, FEBRA2021550, FEBRA2021571, FEBRA2021636, FEBRA2021864, FEBRA2021892, FEBRA2021908, FEBRA-2021966, FEBRA2022013, FEBRA2022055, FEBRA2022148, FEBRA2022204, FEBRA2022255, FEBRA2022322, FEBRA2022601, FEBRA2022696, FEBRA2022729, FEBRA2022787, FEBRA2022911, FEBRA2022956, FEBRA2022963, FEBRA2022972, FEBRA2023285, FEBRA2023351, FEBRA2023377, FEBRA2023399, FEBRA2023498, FEBRA2023550, FEBRA2023721, FEBRA2023989, FEBRA2023990, FEBRA2024150, FEBRA2024343, FEBRA2024570, FEBRA2024693, FEBRA2024727, FEBRA2024744, FEBRA2024797, FEBRA2024987, FEBRA2025249, FEBRA2025463, FEBRA2025477, FEBRA2026474, FEBRA2026582, FEBRA2026629, FEBRA2026769, FEBRA2026879, FEBRA2026890, FEBRA2026977, FEBRA2026984, FEBRA2027082, FEBRA2027297, FEBRA2027352, FEBRA2027364, FEBRA2027609, FEBRA2028222, FEBRA2028366, FEBRA2028457, FEBRA2028477, FEBRA2028503, FEHRT2000325, FEHRT2000364, FELNG2000241, HCASM1000021, HCASM1000050, HCASM1000061, HCASM1000130, HCASM2000156, HCASM2000202, HCASM2000214, HCASM2000266, HCASM2000307, HCASM2000534, HCASM2000536, HCASM2000560, HCASM2000871, HCASM2001285, HCASM2001810, HCASM2001866, HCASM2001890, HCASM2002148, HCASM2002502, HCASM2002754, HCASM2002918, HCASM2003076, HCASM2003099, HCASM2003212, HCASM2003237, HCASM2003357, HCASM2003415, HCASM2005484, HCASM2006131, HCASM2006338, HCASM2006359, HCASM2006632, HCASM2007047, HCASM2007317, HCASM2007737, HCASM2007773, HCASM2008154, HCASM2008536, HCASM2009405, HCASM2009424, HCASM2009463, HCASM2009588, HCHON1000015, HCHON1000131, HCHON1000142, HCHON1000176, HCHON1000191, HCHON2000038, HCHON2000100, HCHON2000156, HCHON2000199, HCHON2000212, HCHON2000244, HCHON2000271, HCHON2000315, HCHON2000322, HCHON2000344, HCHON2000373, HCHON2000395, HCHON2000417, HCHON2000418, HCHON2000475, HCHON2000503, HCHON2000660, HCHON2000663, HCHON2000673, HCHON2000676, HCHON2000705, HCHON2000815, HCHON2000817, HCHON2000818, HCHON2000819, HCHON2000851, HCHON2000898, HCHON2000935, HCHON2000942, HCHON2000956, HCHON2000994, HCHON2001050, HCHON2001099, HCHON2001108, HCHON2001110, HCHON2001116, HCHON2001161, HCHON2001214, HCHON2001233, HCHON2001269, HCHON2001407, HCHON2001450, HCHON2001453, HCHON2001497, HCHON2001505, HCHON2001519, HCHON2001523, HCHON2001535, HCHON2001546, HCHON2001548, HCHON2001577, HCHON2001598, HCHON2001604, HCHON2001607, HCHON2001646, HCHON2001768, HCHON2001801, HCHON2002123, HCHON2002194, HCHON2002241, HCHON2002496, HCHON2002676, HCHON2002770, HCHON2002964, HCHON2003131, HCHON2003134, HCHON2003327, HCHON2003513, HCHON2003532, HCHON2003642, HCHON2003659, HCHON2003676, HCHON2004007, HCHON2004279, HCHON2004359, HCHON2004531, HCHON2004776, HCHON2004858, HCHON2005048, HCHON2005118, HCHON2005166, HCHON2005802, HCHON2005921, HCHON2006714, HCHON2006722, HCHON2006770, HCHON2006786, HCHON2006841, HCHON2006871, HCHON2007046, HCHON2007482, HCHON2007674, HCHON2007774, HCHON2007881, HCHON2008112, HCHON2008239, HCHON2008444, HCHON2008582, HCHON2008672, HCHON2008871, HCHON2008989, HCHON2009191, HCHON2009384, HCHON2009749, HCHON2009766, HCHON2009795, HCHON2010074, HCHON2010543, HEART1000010, HEART1000088, HEART1000099, HEART1000102, HEART1000118, HEART1000132, HEART1000139, HEART1000142, HEART1000151, HEART1000173, HEART1000185, HEART2000024, HEART2000035, HEART2000099, HEART2000298, HEART2000306, HEART2000309, HEART2000411, HEART2000418, HEART2000444, HEART2000448, HEART2000492, HEART2000520, HEART2000541, HEART2000568, HEART2000611, HEART2000959, HEART2001680, HEART2001756, HEART2002129, HEART2002184, HEART2002220, HEART2002432, HEART2002531, HEART2002598, HEART2002717, HEART2003027, HEART2003168, HEART2003432, HEART2003440, HEART2003781, HEART2003836, HEART2003852, HEART2004570, HEART2004764, HEART2004931, HEART2004940, HEART2004941, HEART2004980, HEART2005244, HEART2005310, HEART2005581, HEART2005610, HEART2006131, HEART2006310, HEART2006334, HEART2006487, HEART2006557, HEART2006787, HEART2006789, HEART2006909, HEART2007031, HEART2007443, HEART2007696, HEART2007767, HEART2008108, HEART2008111, HEART2008257, HEART2008509, HEART2008994, HEART2009000, HEART2009599, HEART2009680, HEART2010391, HEART2010492, HEART2010495, HELAC2000158, HELAC2000301, HHDPC1000001, HHDPC1000114, HHDPC1000118, HHDPC2000102, HHDPC2000115, HHDPC2000258, HHDPC2000315, HHDPC2000462, HHDPC2000656, HHDPC2000692, HHDPC2001337, HHDPC2001432, HHDPC2001896, HHDPC2002963, HHDPC2003049, HHDPC2003113, HHDPC2003381, HHDPC2003472, HHDPC2004757, HHDPC2005185, HHDPC2005513, HHDPC2005794, HHDPC2006460, HHDPC2006862, HHDPC2006927, HHDPC2007302, HHDPC2007775, HHDPC2008185, HHDPC2008279, HHDPC2008297, HHDPC2008414, HHDPC2008474, HHDPC2008816, HHDPC2008843, HHDPC2009114, HHDPC2009178, HHDPC2009208, HHDPC2009528, HLUNG1000017, HLUNG1000024, HLUNG1000030, HLUNG1000034, HLUNG1000053, HLUNG1000064, HLUNG1000084, HLUNG1000091, HLUNG1000104, HLUNG1000105, HLUNG1000110, HLUNG1000151, HLUNG1000169, HLUNG2000014, HLUNG2000027, HLUNG2000068, HLUNG2000116, HLUNG2000130, HLUNG2000142, HLUNG2000174, HLUNG2000217, HLUNG2000232, HLUNG2000255, HLUNG2000281, HLUNG2000314, HLUNG2000315, HLUNG2000340, HLUNG2000362, HLUNG2000363, HLUNG2000431, HLUNG2000480, HLUNG2000489, HLUNG2000501, HLUNG2000549, HLUNG2000557, HLUNG2000570, HLUNG2000761, HLUNG2000777, HLUNG2000870, HLUNG2000926, HLUNG2000955, HLUNG2000970, HLUNG2001013, HLUNG2001126, HLUNG2001144, HLUNG2001214, HLUNG2001459, HLUNG2001507, HLUNG2001814, HLUNG2001996, HLUNG2002006, HLUNG2002050, HLUNG2002085, HLUNG2002145, HLUNG2002295, HLUNG2002303, HLUNG2002334, HLUNG2002405, HLUNG2002429, HLUNG2002562, HLUNG2002659, HLUNG2002707, HLUNG2002811, HLUNG2002916, HLUNG2002942, HLUNG2002949, HLUNG2002958, HLUNG2002982, HLUNG2003049, HLUNG2003061, HLUNG2003162, HLUNG2003246, HLUNG2003331, HLUNG2003335, HLUNG2003691, HLUNG2003710, HLUNG2003714, HLUNG2003716, HLUNG2003778, HLUNG2003833, HLUNG2003872, HLUNG2003918, HLUNG2003991, HLUNG2004014, HLUNG2004037, HLUNG2004067, HLUNG2004170, HLUNG2004217, HLUNG2004273, HLUNG2004388, HLUNG2004416, HLUNG2004521, HLUNG2004684, HLUNG2004707, HLUNG2004774, HLUNG2004775, HLUNG2005012, HLUNG2005030, HLUNG2005045, HLUNG2005076, HLUNG2005133, HLUNG2005230, HLUNG2005479, HLUNG2005524, HLUNG2005656, HLUNG2005738, HLUNG2005774, HLUNG2005813, HLUNG2005924, HLUNG2006026, HLUNG2006067, HLUNG2006094, HLUNG2006397, HLUNG2006599, HLUNG2006614, HLUNG2006671, HLUNG2006781, HLUNG2006843, HLUNG2006852, HLUNG2006935, HLUNG2007041, HLUNG2007163, HLUNG2007210, HLUNG2007245, HLUNG2007433, HLUNG2007931, HLUNG2008066, HLUNG2008139, HLUNG2008225, HLUNG2008235, HLUNG2008247, HLUNG2008333, HLUNG2008348, HLUNG2008384, HLUNG2008396, HLUNG2008439, HLUNG2008479, HLUNG2008480, HLUNG2008521, HLUNG2008833, HLUNG2008875, HLUNG2008885, HLUNG2008958, HLUNG2008959, HLUNG2009067, HLUNG2009215, HLUNG2009253, HLUNG2009303, HLUNG2009413, HLUNG2009729, HLUNG2010181, HLUNG2010464, HLUNG2010562, HLUNG2010845, HLUNG2011041, HLUNG2011298, HLUNG2011461, HLUNG2012049, HLUNG2012287, HLUNG2012315, HLUNG2012546, HLUNG2012600, HLUNG2012727, HLUNG2013097, HLUNG2013204, HLUNG2013304, HLUNG2013350, HLUNG2013622, HLUNG2013643, HLUNG2013784, HLUNG2013851, HLUNG2014262, HLUNG2014288, HLUNG2014449, HLUNG2015548, HLUNG2015578, HLUNG2015617, HLUNG2016022, HLUNG2016862, HLUNG2017286, HLUNG2017307, HLUNG2017350, HLUNG2017806, HLUNG2018029, HLUNG2018282, HLUNG2018626, HLUNG2019058, HSYRA1000131, HSYRA1000137, HSYRA1000148, HSYRA2000135, HSYRA2000137, HSYRA2000190, HSYRA2000221, HSYRA2000237, HSYRA2000332, HSYRA2000371, HSYRA2000507, HSYRA2000510, HSYRA2000605, HSYRA2000706, HSYRA2000760, HSYRA2000792, HSYRA2000832, HSYRA2000927, HSYRA2001003, HSYRA2001142, HSYRA2001153, HSYRA2001232, HSYRA2001255, HSYRA2001332, HSYRA2001484, HSYRA2001552, HSYRA2001574, HSYRA2001580, HSYRA2001615, HSYRA2001631, HSYRA2002103, HSYRA2002590, HSYRA2002741, HSYRA2003168, HSYRA2004550, HSYRA2004858, HSYRA2005456, HSYRA2005496, HSYRA2005628, HSYRA2005970, HSYRA2006049, HSYRA2006873, HSYRA2007241, HSYRA2007338, HSYRA2007650, HSYRA2007667, HSYRA2008154, HSYRA2008714, HSYRA2009102, IMR321000155, IMR321000158, IMR321000165, IMR321000193, IMR321000207, IMR321000230, IMR321000242, IMR322000010, IMR322000072, IMR322000107, IMR322000144, IMR322000152, IMR322000164, IMR322000302, IMR322000379, IMR322000383, IMR322000418, IMR322000518, IMR322000555, IMR322000604, IMR322000609, IMR322000656, IMR322000672, IMR322000742, IMR322000775, IMR322000791, IMR322000811, IMR322000819, IMR322000838, IMR322000859, IMR322000863, IMR322000917, IMR322000919, IMR322000953, IMR322000984, IMR322001018, IMR322001049, IMR322001167, IMR322001185, IMR322001218, IMR322001245, IMR322001317, IMR322001318, IMR322001322, IMR322001332, IMR322001380, IMR322001438, IMR322001452, IMR322001491, IMR322001534, IMR322001665, IMR322001670, IMR322001724, IMR322001879, IMR322002035, IMR322002110, IMR322002470, IMR322002993, IMR322003675, IMR322004768, IMR322005293, IMR322005833, IMR322006012, IMR322006222, IMR322006495, IMR322006520, IMR322006886, IMR322006947, IMR322007078, IMR322007225, IMR322007704, IMR322008651, IMR322009710, IMR322009807, IMR322010295, IMR322010953, IMR322011689, IMR322012314, IMR322012529, IMR322013053, IMR322013396, IMR322013731, IMR322015523, IMR322016146, IMR322017049, IMR322018117, IMR322018192, KIDNE1000008, KIDNE1000012, KIDNE1000015, KIDNE1000028, KIDNE1000036, KIDNE1000064, KIDNE1000121, KIDNE1000143, KIDNE1000152, KIDNE2000026, KIDNE2000041, KIDNE2000046, KIDNE2000051, KIDNE2000070, KIDNE2000167, KIDNE2000174, KIDNE2000192, KIDNE2000227, KIDNE2000244, KIDNE2000245, KIDNE2000287, KIDNE2000315, KIDNE2000317, KIDNE2000328, KIDNE2000330, KIDNE2000335, KIDNE2000375, KIDNE2000394, KIDNE2000422, KIDNE2000493, KIDNE2000497, KIDNE2000510, KIDNE2000513, KIDNE2000519, KIDNE2000555, KIDNE2000624, KIDNE2000665, KIDNE2000678, KIDNE2000717, KIDNE2000721, KIDNE2000722, KIDNE2000777, KIDNE2000801, KIDNE2000832, KIDNE2000833, KIDNE2000846, KIDNE2000867, KIDNE2000909, KIDNE2001117, KIDNE2001140, KIDNE2001269, KIDNE2001373, KIDNE2001802, KIDNE2001840, KIDNE2001857, KIDNE2001873, KIDNE2001897, KIDNE2001931, KIDNE2001979, KIDNE2002015, KIDNE2002162, KIDNE2002168, KIDNE2002191, KIDNE2002198, KIDNE2002262, KIDNE2002265, KIDNE2002438, KIDNE2002483, KIDNE2002768, KIDNE2002795, KIDNE2002798, KIDNE2002839, KIDNE2002845, KIDNE2002872, KIDNE2002882, KIDNE2002980, KIDNE2002991, KIDNE2003185, KIDNE2003188, KIDNE2003233, KIDNE2003335, KIDNE2003377, KIDNE2003507, KIDNE2003752, KIDNE2003764, KIDNE2003837, KIDNE2004034, KIDNE2004054, KIDNE2004084, KIDNE2004095, KIDNE2004115, KIDNE2004233, KIDNE2004262, KIDNE2004279, KIDNE2004294, KIDNE2004305, KIDNE2004394, KIDNE2004519, KIDNE2004520, KIDNE2004562, KIDNE2004579, KIDNE2004626, KIDNE2004681, KIDNE2004828, KIDNE2004846, KIDNE2004879, KIDNE2004981, KIDNE2004985, KIDNE2004999, KIDNE2005038, KIDNE2005042, KIDNE2005062, KIDNE2005266, KIDNE2005296, KIDNE2005321, KIDNE2005327, KIDNE2005336, KIDNE2005400, KIDNE2005424, KIDNE2005477, KIDNE2005526, KIDNE2005543, KIDNE2005603, KIDNE2005629, KIDNE2005781, KIDNE2005798, KIDNE2005854, KIDNE2005908, KIDNE2005937, KIDNE2006030, KIDNE2006039, KIDNE2006053, KIDNE2006062, KIDNE2006092, KIDNE2006145, KIDNE2006149, KIDNE2006210, KIDNE2006299, KIDNE2006334, KIDNE2006376, KIDNE2006378, KIDNE2006580, KIDNE2006687, KIDNE2006733, KIDNE2006760, KIDNE2006820, KIDNE2007005, KIDNE2007040, KIDNE2007077, KIDNE2007186, KIDNE2007222, KIDNE2007356, KIDNE2007422, KIDNE2007569, KIDNE2007810, KIDNE2007811, KIDNE2007910, KIDNE2007944, KIDNE2008022, KIDNE2008069, KIDNE2008072, KIDNE2008116, KIDNE2008117, KIDNE2008218, KIDNE2008315, KIDNE2008362, KIDNE2008378, KIDNE2008404, KIDNE2008446, KIDNE2008473, KIDNE2008480, KIDNE2008649, KIDNE2008666, KIDNE2008697, KIDNE2008758, KIDNE2008788, KIDNE2008795, KIDNE2008824, KIDNE2008832, KIDNE2008869, KIDNE2008914, KIDNE2008975, KIDNE2009019, KIDNE2009109, KIDNE2009180, KIDNE2009191, KIDNE2009332, KIDNE2009426, KIDNE2009467, KIDNE2009490, KIDNE2009553, KIDNE2009628, KIDNE2009647, KIDNE2009676, KIDNE2009723, KIDNE2010007, KIDNE2010052, KIDNE2010084, KIDNE2010137, KIDNE2010151, KIDNE2010264, KIDNE2010265, KIDNE2010271, KIDNE2010419, KIDNE2010430, KIDNE2010574, KIDNE2010674, KIDNE2010739, KIDNE2010750, KIDNE2010762, KIDNE2010863, KIDNE2010973, KIDNE2010989, KIDNE2011200, KIDNE2011314, KIDNE2011508, KIDNE2011532, KIDNE2011752, KIDNE2011782, KIDNE2011858, KIDNE2012009, KIDNE2012025, KIDNE2012188, KIDNE2012291, KIDNE2012316, KIDNE2012361, KIDNE2012453, KIDNE2012563, KIDNE2012601, KIDNE2012613, KIDNE2012745, KIDNE2012775, KIDNE2012784, KIDNE2012945, KIDNE2013045, KIDNE2013095, KIDNE2013218, KIDNE2013263, KIDNE2013346, KIDNE2013388, KIDNE2013413, KIDNE2013489, KIDNE2013639, KIDNE2013731, KIDNE2013734, KIDNE2013775, KIDNE2013801, KIDNE2013866, KIDNE2014087, KIDNE2014112, KIDNE2014119, KIDNE2014170, KIDNE2014184, KIDNE2014268, KIDNE2014298, KIDNE2014320, KIDNE2014415, KIDNE2014489, KIDNE2014496, KIDNE2014661, KIDNE2014717, KIDNE2014789, KIDNE2014890, KIDNE2014978, KIDNE2015073, KIDNE2015221, KIDNE2015244, KIDNE2015313, KIDNE2015433, KIDNE2015483, KIDNE2015515, KIDNE2015556, KIDNE2015660, KIDNE2015710, KIDNE2015987, KIDNE2016000, KIDNE2016036, KIDNE2016096, KIDNE2016101, KIDNE2016142, KIDNE2016188, KIDNE2016388, KIDNE2016464, KIDNE2016539, KIDNE2016570, KIDNE2016918, KIDNE2017007, KIDNE2017151, KIDNE2017153, KIDNE2017315, KIDNE2017332, KIDNE2017343, KIDNE2017454, KIDNE2017603, KIDNE2017956, KIDNE2018071, KIDNE2018166, KIDNE2018167, KIDNE2018217, KIDNE2018254, KIDNE2018268, KIDNE2018269, KIDNE2018287, KIDNE2018294, KIDNE2018462, KIDNE2018617, KIDNE2018678, KIDNE2018727, KIDNE2018863, KIDNE2018989, KIDNE2018996, KIDNE2019074, KIDNE2019187, LIVER1000050, LIVER1000055, LIVER1000058, LIVER1000063, LIVER1000073, LIVER1000082, LIVER1000099, LIVER1000126, LIVER1000139, LIVER1000155, LIVER1000165, LIVER1000175, LIVER1000224, LIVER1000278, LIVER1000397, LIVER1000421, LIVER1000433, LIVER1000479, LIVER1000482, LIVER1000542, LIVER2000003, LIVER2000033, LIVER2000158, LIVER2000216, LIVER2000237, LIVER2000247, LIVER2000360, LIVER2000416, LIVER2000446, LIVER2000515, LIVER2000592, LIVER2000626, LIVER2000682, LIVER2000769, LIVER2000775, LIVER2001051, LIVER2001076, LIVER2001099, LIVER2001113, LIVER2001164, LIVER2001191, LIVER2001265, LIVER2001329, LIVER2001389, LIVER2001461, LIVER2001835, LIVER2002638, LIVER2002644, LIVER2002660, LIVER2002702, LIVER2003008, LIVER2003234, LIVER2003511, LIVER2003524, LIVER2003568, LIVER2003581, LIVER2003800, LIVER2003854, LIVER2004074, LIVER2004392, LIVER2004565, LIVER2005028, LIVER2005198, LIVER2005218, LIVER2005376, LIVER2005385, LIVER2005512, LIVER2005520, LIVER2005527, LIVER2005544, LIVER2005625, LIVER2005728, LIVER2005973, LIVER2005981, LIVER2006251, LIVER2006410, LIVER2006469, LIVER2006644, LIVER2006764, LIVER2007415, LIVER2007548, LIVER2007568, LIVER2007721, LIVER2008053, LIVER2008465, LIVER2008473, LIVER2008580, LIVER2008751, LIVER2008945, LIVER2008998, LIVER2009110, LIVER2009118, LIVER2009554, LYMPB1000141, LYMPB1000158, LYMPB2000083, MAMGL1000096, MAMGL1000100, MAMGL1000132, MAMGL1000151, MAMGL1000182, MAMGL1000184, MESAN1000032, MESAN1000035, MESAN1000080, MESAN1000121, MESAN1000147, MESAN1000180, MESAN2000023, MESAN2000026, MESAN2000067, MESAN2000167, MESAN2000264, MESAN2000291, MESAN2000337, MESAN2000434, MESAN2000457, MESAN2000462, MESAN2000501, MESAN2000620, MESAN2000711, MESAN2000894, MESAN2000909, MESAN2001154, MESAN2001770, MESAN2001979, MESAN2001980, MESAN2002113, MESAN2002122, MESAN2002147, MESAN2002186, MESAN2002424, MESAN2002519, MESAN2002687, MESAN2002709, MESAN2002844, MESAN2002978, MESAN2003037, MESAN2003039, MESAN2003101, MESAN2003322, MESAN2003490, MESAN2003529, MESAN2003646, MESAN2003662, MESAN2003709, MESAN2003851, MESAN2004138, MESAN2004288, MESAN2004575, MESAN2005371, MESAN2005724, MESAN2005808, MESAN2005811, MESAN2006022, MESAN2006043, MESAN2006328, MESAN2006580, MESAN2006599, MESAN2006743, MESAN2006953, MESAN2006971, MESAN2007032, MESAN2007440, MESAN2007597, MESAN2008222, MESAN2008334, MESAN2008415, MESAN2008460, MESAN2008536, MESAN2008679, MESAN2008729, MESAN2008821, MESAN2009019, MESAN2009081, MESAN2009105, MESAN2009311, MESAN2009418, MESAN2009503, MESAN2009522, MESAN2010031, MESAN2010114, MESAN2010312, MESAN2010321, MESAN2010681, MESAN2011545, MESAN2011597, MESAN2011627, MESAN2011632, MESAN2011977, MESAN2012113, MESAN2012586, MESAN2012708, MESAN2012735, MESAN2013019, MESAN2013022, MESAN2013183, MESAN2013211, MESAN2013283, MESAN2013611, MESAN2013674, MESAN2013845, MESAN2013936, MESAN2014295, MESAN2014298, MESAN2014624, MESAN2015277, MESAN2015365, MESAN2015391, MESAN2015401, MESAN2015501, MESAN2015515, MESAN2015708, MESAN2016159, MESAN2016304, MESAN2016409, MESAN2016965, MESAN2017152, MESAN2017373, MESAN2017417, MESAN2018209, MESAN2018576, MESAN2018670, MESAN2018699, MESTC1000042, MESTC1000147, MESTC2000150, MESTC2000153, MESTC2000170, NB9N41000011, NB9N41000047, NB9N41000135, NB9N41000142, NB9N41000146, NB9N42000122, NB9N42000196, NB9N42000281, NB9N42000314, NB9N42000342, NB9N42000430, NB9N42000495, NB9N42001300, NCRRP1000129, NESOP1000010, NESOP1000087, NESOP1000108, NESOP2000231, NESOP2000452, NESOP2000499, NESOP2000744, NESOP2001144, NESOP2001433, NESOP2001694, NESOP2001752, NESOP2002352, NESOP2002418, NESOP2002487, NESOP2002738, NESOP2002780, NETRP1000034, NETRP1000082, NETRP2000086, NETRP2000182, NETRP2000439, NHNPC1000034, NHNPC1000037, NHNPC1000084, NHNPC1000101, NHNPC1000124, NHNPC2000187, NHNPC2000212, NHNPC2000606, NHNPC2000877, NHNPC2001108, NHNPC2001223, NHNPC2001312, NHNPC2001816, NHNPC2001931, NHNPC2002565, NHNPC2002749, NOVAR1000102, NOVAR2000136, NOVAR2000352, NOVAR2000412, NOVAR2000783, NOVAR2000962, NOVAR2001108, NOVAR2001620, NOVAR2001783, NOVAR2001876, NT2NE1000004, NT2NE1000018, NT2NE1000023, NT2NE1000024, NT2NE1000059, NT2NE1000063, NT2NE1000073, NT2NE1000083, NT2NE1000120, NT2NE1000175, NT2NE1000185, NT2NE2000038, NT2NE2000054, NT2NE2000057, NT2NE2000064, NT2NE2000109, NT2NE2000137, NT2NE2000156, NT2NE2000222, NT2NE2000259, NT2NE2000284, NT2NE2000299, NT2NE2000327, NT2NE2000353, NT2NE2000369, NT2NE2000374, NT2NE2000386, NT2NE2000390, NT2NE2000455, NT2NE2000488, NT2NE2000517, NT2NE2000546, NT2NE2000548, NT2NE2000550, NT2NE2000586, NT2NE2000612, NT2NE2000636, NT2NE2000658, NT2NE2000706, NT2NE2000802, NT2NE2000808, NT2NE2000864, NT2NE2000913, NT2NE2000951, NT2NE2000980, NT2NE2001005, NT2NE2001021, NT2NE2001040, NT2NE2001049, NT2NE2001142, NT2NE2001156, NT2NE2001176, NT2NE2001180, NT2NE2001181, NT2NE2001188, NT2NE2001191, NT2NE2001247, NT2NE2001252, NT2NE2001324, NT2NE2001337, NT2NE2001364, NT2NE2001372, NT2NE2001397, NT2NE2001428, NT2NE2001432, NT2NE2001442, NT2NE2001524, NT2NE2001530, NT2NE2001598, NT2NE2001623, NT2NE2001626, NT2NE2001634, NT2NE2001666, NT2NE2001677, NT2NE2001697, NT2NE2001698, NT2NE2001723, NT2NE2001725, NT2NE2001874, NT2NE2001889, NT2NE2001923, NT2NE2002186, NT2NE2002285, NT2NE2002311, NT2NE2002620, NT2NE2002651, NT2NE2002732, NT2NE2002768, NT2NE2002791, NT2NE2002856, NT2NE2002870, NT2NE2003150, NT2NE2003185, NT2NE2003252, NT2NE2003280, NT2NE2003308, NT2NE2003309, NT2NE2003315, NT2NE2003393, NT2NE2003408, NT2NE2003457, NT2NE2003540, NT2NE2003571, NT2NE2003705, NT2NE2003752, NT2NE2003921, NT2NE2004378, NT2NE2004490, NT2NE2004519, NT2NE2004606, NT2NE2004716, NT2NE2004787, NT2NE2004916, NT2NE2005035, NT2NE2005223, NT2NE2005276, NT2NE2005358, NT2NE2005395, NT2NE2005419, NT2NE2005441, NT2NE2005517, NT2NE2005537, NT2NE2005555, NT2NE2005588, NT2NE2005676, NT2NE2005720, NT2NE2005784, NT2NE2005804, NT2NE2005821, NT2NE2005890, NT2NE2005921, NT2NE2005968, NT2NE2006075, NT2NE2006087, NT2NE2006103, NT2NE2006217, NT2NE2006288, NT2NE2006382, NT2NE2006387, NT2NE2006427, NT2NE2006432, NT2NE2006531, NT2NE2006659, NT2NE2006784, NT2NE2006813, NT2NE2006894, NT2NE2006942, NT2NE2006958, NT2NE2007052, NT2NE2007220, NT2NE2007425, NT2NE2007725, NT2NE2007727, NT2NE2007877, NT2NE2007967, NT2NE2008017, NT2NE2008060, NT2NE2008077, NT2NE2008213, NT2NE2008260, NT2NE2008378, NT2NE2008607, NT2NE2008639, NT2NE2008727, NT2NE2008783, NT2NE2008785, NT2NE2008803, NT2NE2008867, NT2NE2008961, NT2NE2008997, NT2NE2009138, NT2NE2009295, NT2NE2009426, NT2NE2009523, NT2NE2009608, NT2NE2009691, NT2NE2010056, NT2NE2010105, NT2NE2010150, NT2NE2010400, NT2NE2010632, NT2NE2010633, NT2NE2010654, NT2NE2010688, NT2NE2010781, NT2NE2010854, NT2NE2011033, NT2NE2011036, NT2NE2011154, NT2NE2011221, NT2NE2011411, NT2NE2011485, NT2NE2011650, NT2NE2011684, NT2NE2011687, NT2NE2011691, NT2NE2011758, NT2NE2011823, NT2NE2011896, NT2NE2011998, NT2NE2012113, NT2NE2012199, NT2NE2012243, NT2NE2012361, NT2NE2012448, NT2NE2012457, NT2NE2012493, NT2NE2012533, NT2NE2012603, NT2NE2012747, NT2NE2012790, NT2NE2012847, NT2NE2012928, NT2NE2013019, NT2NE2013081, NT2NE2013189, NT2NE2013217, NT2NE2013547, NT2NE2014013, NT2NE2014028, NT2NE2014104, NT2NE2014176, NT2NE2014221, NT2NE2014525, NT2NE2014650, NT2NE2014651, NT2NE2014681, NT2NE2014758, NT2NE2014869, NT2NE2014950, NT2NE2015061, NT2NE2015275, NT2NE2015480, NT2NE2015511, NT2NE2015565, NT2NE2015626, NT2NE2015747, NT2NE2015860, NT2NE2015885, NT2NE2015904, NT2NE2016041, NT2NE2016387, NT2NE2016419, NT2NE2016519, NT2NE2016608, NT2NE2016766, NT2NE2016774, NT2NE2016971, NT2NE2017259, NT2NE2017332, NT2NE2017397, NT2NE2017480, NT2NE2017492, NT2NE2017508, NT2NE2017562, NT2NE2017590, NT2NE2017612, NT2NE2017721, NT2NE2017752, NT2NE2017792, NT2NE2017982, NT2NE2018165, NT2NE2018176, NT2NE2018273, NT2NE2018376, NT2NE2018472, NT2NE2018490, NT2NE2018594, NT2NE2018739, NT2NE2018916, NT2NE2019056, NT2NE2019076, NT2NE2019099, NT2RI1000035, NT2RI1000164, NT2RI1000172, NT2RI2000004, NT2RI2000007, NT2RI2000117, NT2RI2000128, NT2RI2000133, NT2RI2000173, NT2RI2000187, NT2RI2000270, NT2RI2000276, NT2RI2000313, NT2RI2000341, NT2RI2000344, NT2RI2000421, NT2RI2000480, NT2RI2000575, NT2RI2000588, NT2RI2000597, NT2RI2000669, NT2RI2000688, NT2RI2000689, NT2RI2000704, NT2RI2000738, NT2RI2000841, NT2RI2000865, NT2RI2000932, NT2RI2000987, NT2RI2001017, NT2RI2001030, NT2RI2001054, NT2RI2001083, NT2RI2001091, NT2RI2001167, NT2RI2001178, NT2RI2001230, NT2RI2001235, NT2RI2001244, NT2RI2001307, NT2RI2001385, NT2RI2001409, NT2RI2001410, NT2RI2001425, NT2RI2001449, NT2RI2001450, NT2RI2001474, NT2RI2001519, NT2RI2001595, NT2RI2001621, NT2RI2001624, NT2RI2001769, NT2RI2001782, NT2RI2001836, NT2RI2001952, NT2RI2002022, NT2RI2002041, NT2RI2002117, NT2RI2002120, NT2RI2002153, NT2RI2002179, NT2RI2002243, NT2RI2002252, NT2RI2002260, NT2RI2002266, NT2RI2002270, NT2RI2002334, NT2RI2002359, NT2RI2002447, NT2RI2002481, NT2RI2002507, NT2RI2002517, NT2RI2002530, NT2RI2002549, NT2RI2002554, NT2RI2002564, NT2RI2002585, NT2RI2002592, NT2RI2002602, NT2RI2002699, NT2RI2002729, NT2RI2002802, NT2RI2002819, NT2RI2002822, NT2RI2002852, NT2RI2002923, NT2RI2002926, NT2RI2002970, NT2RI2003067, NT2RI2003184, NT2RI2003205, NT2RI2003222, NT2RI2003301, NT2RI2003360, NT2RI2003361, NT2RI2003383, NT2RI2003392, NT2RI2003399, NT2RI2003419, NT2RI2003481, NT2RI2003487, NT2RI2003556, NT2RI2003655, NT2RI2003667, NT2RI2003751, NT2RI2003884, NT2RI2003973, NT2RI2003993, NT2RI2004078, NT2RI2004079, NT2RI2004093, NT2RI2004136, NT2RI2004157, NT2RI2004188, NT2RI2004190, NT2RI2004209, NT2RI2004230, NT2RI2004284, NT2RI2004290, NT2RI2004312, NT2RI2004381, NT2RI2004398, NT2RI2004410, NT2RI2004442, NT2RI2004468, NT2RI2004606, NT2RI2004618, NT2RI2004783, NT2RI2004818, NT2RI2004840, NT2RI2004916, NT2RI2004962, NT2RI2004984, NT2RI2004985, NT2RI2005048, NT2RI2005069, NT2RI2005087, NT2RI2005096, NT2RI2005115, NT2RI2005130, NT2RI2005166, NT2RI2005239, NT2RI2005246, NT2RI2005315, NT2RI2005358, NT2RI2005368, NT2RI2005382, NT2RI2005520, NT2RI2005564, NT2RI2005579, NT2RI2005621, NT2RI2005628, NT2RI2005670, NT2RI2005772, NT2RI2005816, NT2RI2005851, NT2RI2005966, NT2RI2006071, NT2RI2006081, NT2RI2006126, NT2RI2006127, NT2RI2006183, NT2RI2006257, NT2RI2006294, NT2RI2006345, NT2RI2006403, NT2RI2006445, NT2RI2006487, NT2RI2006506, NT2RI2006553, NT2RI2006647, NT2RI2006659, NT2RI2006662, NT2RI2006667, NT2RI2006679, NT2RI2006686, NT2RI2006716, NT2RI2006735, NT2RI2006762, NT2RI2006788, NT2RI2006825, NT2RI2006838, NT2RI2006855, NT2RI2006973, NT2RI2007046, NT2RI2007048, NT2RI2007116, NT2RI2007148, NT2RI2007214, NT2RI2007303, NT2RI2007334, NT2RI2007386, NT2RI2007406, NT2RI2007439, NT2RI2007469, NT2RI2007498, NT2RI2007507, NT2RI2007593, NT2RI2007729, NT2RI2007751, NT2RI2007754, NT2RI2007827, NT2RI2007853, NT2RI2007877, NT2RI2007879, NT2RI2007891, NT2RI2007956, NT2RI2007965, NT2RI2008007, NT2RI2008050, NT2RI2008171, NT2RI2008188, NT2RI2008204, NT2RI2008221, NT2RI2008233, NT2RI2008455, NT2RI2008481, NT2RI2008502, NT2RI2008598, NT2RI2008622, NT2RI2008656, NT2RI2008749, NT2RI2008801, NT2RI2008812, NT2RI2008841, NT2RI2008952, NT2RI2009005, NT2RI2009101, NT2RI2009103, NT2RI2009144, NT2RI2009151, NT2RI2009215, NT2RI2009233, NT2RI2009281, NT2RI2009289, NT2RI2009301, NT2RI2009402, NT2RI2009517, NT2RI2009585, NT2RI2009595, NT2RI2009855, NT2RI2010508, NT2RI2010795, NT2RI2011422, NT2RI2011683, NT2RI2011803, NT2RI2012350, NT2RI2012659, NT2RI2012990, NT2RI2013345, NT2RI2013357, NT2RI2013373, NT2RI2014247, NT2RI2014551, NT2RI2014683, NT2RI2014733, NT2RI2015239, NT2RI2016128, NT2RI2016134, NT2RI2017529, NT2RI2018311, NT2RI2018363, NT2RI2018883, NT2RI2018950, NT2RI2019751, NT2RI2019826, NT2RI2020390, NT2RI2020703, NT2RI2021463, NT2RI2021625, NT2RI2022468, NT2RI2022584, NT2RI2023303, NT2RI2023671, NT2RI2024460, NT2RI2024496, NT2RI2024935, NT2RI2025075, NT2RI2025255, NT2RI2025564, NT2RI2025565, NT2RI2025909, NT2RI2025957, NT2RI2025976, NT2RI2026758, NT2RI2027081, NT2RI2027157, NT2RI2027323, NT2RI2027396, NT2RI2027484, NT2RI2027975, NT2RI2028213, NT2RI2028222, NT2RI2028537, NT2RI2028642, NT2RI3000213, NT2RI3000622, NT2RI3001132, NT2RI3001263, NT2RI3001279, NT2RI3001348, NT2RI3001458, NT2RI3001515, NT2RI3001573, NT2RI3001967, NT2RI3002303, NT2RI3002557, NT2RI3002842, NT2RI3003027, NT2RI3003031, NT2RI3003095, NT2RI3003104, NT2RI3003162, NT2RI3003362, NT2RI3003382, NT2RI3003409, NT2RI3003925, NT2RI3004133, NT2RI3004381, NT2RI3004510, NT2RI3005202, NT2RI3005403, NT2RI3005416, NT2RI3005724, NT2RI3005861, NT2RI3005928, NT2RI3006132, NT2RI3006171, NT2RI3006340, NT2RI3006376, NT2RI3006666, NT2RI3006796, NT2RI3007065, NT2RI3007095, NT2RI3007158, NT2RI3007167, NT2RI3007213, NT2RI3007443, NT2RI3007684, NT2RI3007757, NT2RI3007878, NT2RI3007978, NT2RI3008055, NT2RI3008162, NT2RI3008179, NT2RI3008228, NT2RI3008442, NT2RI3008652, NT2RI3008697, NT2RI3008974, NT2RI3009158, NT2RI3009524, NT2RP6000005, NT2RP6000008, NT2RP6000032, NT2RP6000033, NT2RP6000043, NT2RP6000059, NT2RP6000060, NT2RP6000077, NT2RP6000086, NT2RP6000100, NT2RP6000109, NT2RP6000119, NT2RP6000127, NT2RP6000130, NT2RP6000140, NT2RP6000150, NT2RP7000041, NT2RP7000109, NT2RP7000311, NT2RP7000359, NT2RP7000364, NT2RP7000380, NT2RP7000391, NT2RP7000425, NT2RP7000579, NT2RP7000586, NT2RP7000624, NT2RP7000812, NT2RP7000926, NT2RP7001074, NT2RP7001080, NT2RP7001156, NT2RP7001306, NT2RP7001319, NT2RP7001364, NT2RP7001475, NT2RP7001532, NT2RP7001602, NT2RP7001678, NT2RP7001856, NT2RP7002064, NT2RP7002151, NT2RP7002163, NT2RP7002243, NT2RP7002478, NT2RP7002554, NT2RP7002594, NT2RP7002603, NT2RP7002650, NT2RP7002738, NT2RP7002779, NT2RP7002841, NT2RP7002906, NT2RP7002978, NT2RP7002982, NT2RP7003025, NT2RP7003050, NT2RP7003055, NT2RP7003084, NT2RP7003091, NT2RP7003107, NT2RP7003134, NT2RP7003148, NT2RP7003261, NT2RP7003439, NT2RP7003680, NT2RP7003724, NT2RP7004027, NT2RP7004080, NT2RP7004233, NT2RP7004358, NT2RP7004396, NT2RP7004481, NT2RP7004541, NT2RP7004559, NT2RP7004722, NT2RP7004766, NT2RP7004790, NT2RP7004915, NT2RP7004964, NT2RP7004975, NT2RP7005118, NT2RP7005205, NT2RP7005219, NT2RP7005323, NT2RP7005468, NT2RP7005513, NT2RP7005629, NT2RP7005631, NT2RP7005669, NT2RP7005846, NT2RP7006033, NT2RP7006075, NT2RP7006160, NT2RP7006162, NT2RP7006263, NT2RP7006296, NT2RP7006304, NT2RP7006374, NT2RP7006395, NT2RP7006408, NT2RP7006457, NT2RP7006547, NT2RP7006621, NT2RP7006636, NT2RP7006853, NT2RP7006887, NT2RP7006980, NT2RP7007114, NT2RP7007221, NT2RP7007226, NT2RP7007269, NT2RP7007310, NT2RP7007359, NT2RP7007480, NT2RP7007504, NT2RP7007594, NT2RP7007617, NT2RP7007643, NT2RP7007842, NT2RP7007925, NT2RP7007930, NT2RP7008013, NT2RP7008133, NT2RP7008137, NT2RP7008142, NT2RP7008144, NT2RP7008190, NT2RP7008360, NT2RP7008396, NT2RP7008406, NT2RP7008435, NT2RP7008441, NT2RP7008454, NT2RP7008487, NT2RP7008544, NT2RP7008550, NT2RP7008557, NT2RP7008623, NT2RP7008657, NT2RP7008714, NT2RP7008720, NT2RP7008855, NT2RP7008863, NT2RP7009012, NT2RP7009019, NT2RP7009030, NT2RP7009168, NT2RP7009215, NT2RP7009225, NT2RP7009236, NT2RP7009253, NT2RP7009267, NT2RP7009322, NT2RP7009363, NT2RP7009370, NT2RP7009373, NT2RP7009397, NT2RP7009429, NT2RP7009439, NT2RP7009502, NT2RP7009507, NT2RP7009577, NT2RP7009743, NT2RP7009867, NT2RP7010128, NT2RP7010235, NT2RP7010275, NT2RP7010521, NT2RP7010599, NT2RP7010612, NT2RP7010817, NT2RP7011086, NT2RP7011132, NT2RP7011268, NT2RP7011318, NT2RP7011452, NT2RP7011570, NT2RP7011721, NT2RP7011909, NT2RP7012291, NT2RP7012516, NT2RP7012776, NT2RP7013002, NT2RP7013374, NT2RP7013499, NT2RP7013729, NT2RP7013999, NT2RP7014178, NT2RP7014348, NT2RP7014420, NT2RP7014721, NT2RP7014743, NT2RP7014778, NT2RP7014906, NT2RP7015080, NT2RP7015431, NT2RP7015503, NT2RP7015512, NT2RP7015676, NT2RP7015789, NT2RP7015996, NT2RP7016508, NT2RP7016574, NT2RP7016622, NT2RP7016911, NT2RP7017139, NT2RP7017284, NT2RP7017365, NT2RP7017474, NT2RP7017546, NT2RP7017567, NT2RP7017795, NT2RP7017971, NT2RP7018032, NT2RP7018126, NT2RP7018197, NT2RP7018206, NT2RP7018340, NT2RP7018586, NT2RP7018802, NT2RP7018871, NT2RP7019064, NT2RP7019135, NT2RP7019273, NT2RP7019367, NT2RP7019401, NT2RP7019445, NT2RP7019543, NT2RP7019682, NT2RP7019835, NT2RP7020112, NT2RP7020123, NT2RP7020343, NT2RP7020379, NT2RP8000137, NT2RP8000296, NT2RP8000483, NT2RP8000521, NT2RP8000633, NT2RP8001363, NT2RP8001407, NT2RP8001584, NT2RP8001604, NT2RP8001605, NT2RP8003490, NT2RP8003657, NT2RP8003787, NT2RP8004306, NT2RP8006452, NT2RP8006521, NT2RP8007416, NT2RP8007503, NT2RP8007715, NT2RP8009248, NTONG1000006, NTONG1000047, NTONG1000052, NTONG1000087, NTONG1000123, NTONG1000161, NTONG1000172, NTONG1000213, NTONG1000247, NTONG1000257, NTONG2000040, NTONG2000107, NTONG2000231, NTONG2000334, NTONG2000363, NTONG2000413, NTONG2000492, NTONG2000499, NTONG2000531, NTONG2000583, NTONG2000858, NTONG2000878, NTONG2000966, NTONG2001014, NTONG2001079, NTONG2001157, NTONG2001173, NTONG2001220, NTONG2001222, NTONG2001362, NTONG2001428, NTONG2001532, NTONG2001587, NTONG2001619, NTONG2001642, NTONG2001657, NTONG2001676, NTONG2002278, NTONG2002807, NTONG2002948, NTONG2002970, NTONG2002985, NTONG2003158, NTONG2003210, NTONG2003316, NTONG2003409, NTONG2003515, NTONG2003805, NTONG2003839, NTONG2003852, NTONG2003897, NTONG2004521, NTONG2004690, NTONG2004806, NTONG2004829, NTONG2004844, NTONG2004991, NTONG2005062, NTONG2005086, NTONG2005137, NTONG2005153, NTONG2005265, NTONG2005277, NTONG2005363, NTONG2005480, NTONG2005497, NTONG2005577, NTONG2005657, NTONG2005822, NTONG2005897, NTONG2006099, NTONG2006187, NTONG2006301, NTONG2006324, NTONG2006354, NTONG2006440, NTONG2006501, NTONG2006646, NTONG2006709, NTONG2006783, NTONG2007020, NTONG2007028, NTONG2007034, NTONG2007249, NTONG2007517, NTONG2007522, NTONG2007658, NTONG2007693, NTONG2007756, NTONG2008088, NTONG2008093, NTONG2008365, NTONG2008672, NTONG2008862, NTONG2008939, NTONG2009068, NTONG2009229, NTONG2009233, NTONG2009468, OCBBF1000016, OCBBF1000030, OCBBF1000042, OCBBF1000049, OCBBF1000054, OCBBF1000067, OCBBF1000085, OCBBF1000091, OCBBF1000114, OCBBF1000118, OCBBF1000119, OCBBF1000122, OCBBF1000130, OCBBF1000138, OCBBF1000145, OCBBF1000153, OCBBF1000175, OCBBF1000185, OCBBF1000188, OCBBF1000192, OCBBF1000254, OCBBF2000277, OCBBF2000287, OCBBF2000323, OCBBF2000452, OCBBF2000467, OCBBF2000703, OCBBF2000712, OCBBF2000719, OCBBF2000824, OCBBF2000904, OCBBF2000998, OCBBF2001075, OCBBF2001101, OCBBF2001124, OCBBF2001140, OCBBF2001176, OCBBF2001186, OCBBF2001210, OCBBF2001252, OCBBF2001323, OCBBF2001389, OCBBF2001402, OCBBF2001408, OCBBF2001416, OCBBF2001473, OCBBF2001494, OCBBF2001527, OCBBF2001586, OCBBF2001681, OCBBF2001749, OCBBF2001794, OCBBF2001910, OCBBF2001931, OCBBF2001961, OCBBF2002083, OCBBF2002124, OCBBF2002161, OCBBF2002357, OCBBF2002376, OCBBF2002615, OCBBF2002626, OCBBF2002663, OCBBF2002805, OCBBF2002865, OCBBF2002920, OCBBF2002980, OCBBF2003028, OCBBF2003091, OCBBF2003246, OCBBF2003327, OCBBF2003593, OCBBF2004038, OCBBF2004147, OCBBF2004168, OCBBF2004235, OCBBF2004259, OCBBF2004385, OCBBF2004418, OCBBF2004478, OCBBF2004482, OCBBF2004533, OCBBF2004567, OCBBF2004612, OCBBF2004647, OCBBF2004669, OCBBF2004757, OCBBF2004826, OCBBF2004866, OCBBF2004883, OCBBF2004889, OCBBF2004930, OCBBF2004984, OCBBF2005066, OCBBF2005077, OCBBF2005161, OCBBF2005343, OCBBF2005349, OCBBF2005373, OCBBF2005420, OCBBF2005428, OCBBF2005433, OCBBF2005476, OCBBF2005546, OCBBF2005843, OCBBF2005901, OCBBF2005956, OCBBF2006005, OCBBF2006030, OCBBF2006058, OCBBF2006113, OCBBF2006148, OCBBF2006151, OCBBF2006154, OCBBF2006172, OCBBF2006214, OCBBF2006241, OCBBF2006313, OCBBF2006388, OCBBF2006438, OCBBF2006567, OCBBF2006624, OCBBF2006639, OCBBF2006764, OCBBF2006859, OCBBF2006972, OCBBF2006987, OCBBF2007039, OCBBF2007051, OCBBF2007068, OCBBF2007114, OCBBF2007184, OCBBF2007194, OCBBF2007196, OCBBF2007238, OCBBF2007428, OCBBF2007478, OCBBF2007485, OCBBF2007520, OCBBF2007555, OCBBF2007610, OCBBF2007622, OCBBF2007756, OCBBF2007762, OCBBF2007931, OCBBF2007946, OCBBF2008116, OCBBF2008138, OCBBF2008144, OCBBF2008283, OCBBF2008330, OCBBF2008340, OCBBF2008366, OCBBF2008466, OCBBF2008483, OCBBF2008511, OCBBF2008520, OCBBF2008569, OCBBF2008586, OCBBF2008640, OCBBF2008691, OCBBF2008701, OCBBF2008724, OCBBF2008760, OCBBF2008768, OCBBF2008770, OCBBF2008775, OCBBF2008790, OCBBF2008814, OCBBF2009095, OCBBF2009115, OCBBF2009352, OCBBF2009391, OCBBF2009424, OCBBF2009536, OCBBF2009571, OCBBF2009583, OCBBF2009603, OCBBF2009788, OCBBF2009920, OCBBF2009926, OCBBF2010040, OCBBF2010313, OCBBF2010404, OCBBF2010416, OCBBF2010420, OCBBF2010604, OCBBF2010709, OCBBF2010792, OCBBF2010819, OCBBF2010843, OCBBF2010858, OCBBF2010863, OCBBF2010871, OCBBF2010931, OCBBF2010945, OCBBF2010978, OCBBF2010989, OCBBF2011073, OCBBF2011137, OCBBF2011160, OCBBF2011177, OCBBF2011228, OCBBF2011232, OCBBF2011283, OCBBF2011311, OCBBF2011536, OCBBF2011625, OCBBF2011669, OCBBF2011685, OCBBF2011706, OCBBF2011722, OCBBF2011855, OCBBF2011872, OCBBF2011897, OCBBF2011914, OCBBF2011960, OCBBF2011981, OCBBF2012028, OCBBF2012039, OCBBF2012095, OCBBF2012139, OCBBF2012191, OCBBF2012262, OCBBF2012320, OCBBF2012525, OCBBF2012678, OCBBF2012704, OCBBF2012755, OCBBF2012812, OCBBF2012881, OCBBF2012908, OCBBF2012936, OCBBF2012990, OCBBF2013049, OCBBF2013091, OCBBF2013127, OCBBF2013208, OCBBF2013285, OCBBF2013319, OCBBF2013324, OCBBF2013481, OCBBF2013507, OCBBF2013721, OCBBF2013789, OCBBF2013883, OCBBF2013926, OCBBF2014089, OCBBF2014292, OCBBF2014322, OCBBF2014386, OCBBF2014541, OCBBF2014576, OCBBF2014707, OCBBF2014745, OCBBF2014828, OCBBF2014873, OCBBF2014880, OCBBF2014928, OCBBF2015031, OCBBF2015081, OCBBF2015115, OCBBF2015232, OCBBF2015233, OCBBF2015285, OCBBF2015334, OCBBF2015335, OCBBF2015503, OCBBF2015506, OCBBF2015599, OCBBF2015645, OCBBF2015659, OCBBF2015751, OCBBF2015797, OCBBF2015931, OCBBF2015980, OCBBF2016038, OCBBF2016405, OCBBF2016467, OCBBF2016590, OCBBF2016591, OCBBF2016689, OCBBF2016690, OCBBF2016841, OCBBF2016928, OCBBF2017069, OCBBF2017306, OCBBF2017325, OCBBF2017458, OCBBF2017489, OCBBF2017516, OCBBF2017665, OCBBF2017815, OCBBF2017882, OCBBF2017888, OCBBF2017920, OCBBF2018014, OCBBF2018084, OCBBF2018167, OCBBF2018206, OCBBF2018229, OCBBF2018234, OCBBF2018362, OCBBF2018380, OCBBF2018618, OCBBF2018663, OCBBF2018687, OCBBF2018707, OCBBF2018828, OCBBF2018873, OCBBF2018934, OCBBF2019195, OCBBF2019327, OCBBF2019684, OCBBF2019761, OCBBF2019823, OCBBF2019950, OCBBF2020048, OCBBF2020343, OCBBF2020453, OCBBF2020741, OCBBF2020825, OCBBF2020838, OCBBF2021020, OCBBF2021214, OCBBF2021286, OCBBF2021323, OCBBF2021518, OCBBF2021788, OCBBF2021833, OCBBF2022351, OCBBF2022573, OCBBF2022574, OCBBF2023162, OCBBF2023598, OCBBF2023643, OCBBF2024463, OCBBF2024589, OCBBF2024719, OCBBF2024779, OCBBF2024781, OCBBF2025028, OCBBF2025115, OCBBF2025198, OCBBF2025451, OCBBF2025458, OCBBF2025527, OCBBF2025631, OCBBF2025730, OCBBF2026025, OCBBF2026035, OCBBF2026144, OCBBF2026368, OCBBF2026645, OCBBF2026649, OCBBF2026690, OCBBF2026981, OCBBF2027148, OCBBF2027197, OCBBF2027354, OCBBF2027423, OCBBF2027478, OCBBF2027481, OCBBF2027511, OCBBF2027661, OCBBF2027728, OCBBF2027782, OCBBF2027868, OCBBF2028055, OCBBF2028173, OCBBF2029471, OCBBF2029901, OCBBF2030116, OCBBF2030329, OCBBF2030354, OCBBF2030517, OCBBF2030574, OCBBF2030708, OCBBF2030927, OCBBF2030963, OCBBF2031167, OCBBF2031198, OCBBF2031366, OCBBF2032152, OCBBF2032274, OCBBF2032539, OCBBF2032590, OCBBF2032599, OCBBF2032611, OCBBF2032671, OCBBF2033295, OCBBF2033413, OCBBF2033869, OCBBF2033948, OCBBF2034333, OCBBF2034529, OCBBF2034637, OCBBF2034906, OCBBF2035110, OCBBF2035214, OCBBF2035226, OCBBF2035390, OCBBF2035564, OCBBF2035658, OCBBF2035885, OCBBF2035916, OCBBF2036019, OCBBF2036031, OCBBF2036225, OCBBF2036476, OCBBF2036752, OCBBF2037068, OCBBF2037340, OCBBF2037398, OCBBF2037464, OCBBF2037547, OCBBF2037598, OCBBF2037638, OCBBF2038238, OCBBF2038285, OCBBF2038317, OCBBF3000097, OCBBF3000213, OCBBF3000372, OCBBF3000380, OCBBF3000743, OCBBF3000830, OCBBF3001076, OCBBF3001202, OCBBF3001616, OCBBF3002553, OCBBF3002600, OCBBF3002654, OCBBF3003103, OCBBF3003209, OCBBF3003592, OCBBF3003745, OCBBF3003761, OCBBF3004264, OCBBF3004314, OCBBF3004972, OCBBF3005330, OCBBF3005597, OCBBF3005843, OCBBF3006802, OCBBF3006986, OCBBF3007078, OCBBF3007704, OCBBF3008230, OCBBF3008392, OCBBF3008835, OCBBF3009192, OCBBF3009244, OCBBF3009279, PANCR1000012, PANCR1000021, PANCR1000081, PANCR1000086, PANCR1000185, PEBLM1000024, PEBLM1000029, PEBLM1000034, PEBLM1000062, PEBLM1000068, PEBLM1000071, PEBLM1000083, PEBLM1000147, PEBLM1000174, PEBLM1000180, PEBLM2000112, PEBLM2000126, PEBLM2000170, PEBLM2000180, PEBLM2000213, PEBLM2000248, PEBLM2000267, PEBLM2000270, PEBLM2000321, PEBLM2000333, PEBLM2000479, PEBLM2000502, PEBLM2001312, PEBLM2001465, PEBLM2001488, PEBLM2001803, PEBLM2002432, PEBLM2002455, PEBLM2002594, PEBLM2002749, PEBLM2002887, PEBLM2003426, PEBLM2003765, PEBLM2003935, PEBLM2004015, PEBLM2004216, PEBLM2004290, PEBLM2004497, PEBLM2004733, PEBLM2005282, PEBLM2005615, PEBLM2005632, PEBLM2005697, PEBLM2006031, PEBLM2006049, PEBLM2006113, PEBLM2006135, PEBLM2006215, PEBLM2006283, PEBLM2006298, PEBLM2006366, PEBLM2006912, PEBLM2007112, PEBLM2007140, PEBLM2007437, PEBLM2007598, PEBLM2007832, PEBLM2007834, PEBLM2008106, PEBLM2008576, PEBLM2008605, PEBLM2008826, PEBLM2008861, PERIC1000025, PERIC1000147, PERIC2000180, PERIC2000214, PERIC2000386, PERIC2000387, PERIC2000422, PERIC2000473, PERIC2000478, PERIC2000914, PERIC2001227, PERIC2001228, PERIC2001379, PERIC2001504, PERIC2001703, PERIC2001764, PERIC2002243, PERIC2002272, PERIC2002452, PERIC2002766, PERIC2003001, PERIC20030920, PERIC2003287, PERIC2003349, PERIC2003452, PERIC2003699, PERIC2003720, PERIC2003794, PERIC2003834, PERIC2003919, PERIC2003957, PERIC2004028, PERIC2004131, PERIC2004259, PERIC2004379, PERIC2004429, PERIC2004510, PERIC2004613, PERIC2004909, PERIC2005111, PERIC2005117, PERIC2005305, PERIC2005347, PERIC2005370, PERIC2005936, PERIC2006035, PERIC2006121, PERIC2006443, PERIC2006945, PERIC2006960, PERIC2007439, PERIC2007914, PERIC2008008, PERIC2008385, PERIC2009001, PERIC2009086, PERIC2009329, PERIC2009566, PLACE5000001, PLACE5000037, PLACE5000058, PLACE5000066, PLACE5000067, PLACE5000070, PLACE5000080, PLACE5000105, PLACE5000115, PLACE5000116, PLACE5000129, PLACE5000139, PLACE5000153, PLACE5000171, PLACE5000172, PLACE5000178, PLACE5000245, PLACE5000260, PLACE5000282, PLACE5000297, PLACE5000372, PLACE5000492, PLACE5000522, PLACE5000527, PLACE6000012, PLACE6000044, PLACE6000055, PLACE6000070, PLACE6000137, PLACE6000191, PLACE6000205, PLACE6000231, PLACE6000263, PLACE6000296, PLACE6000314, PLACE6000348, PLACE6000371, PLACE6000424, PLACE6000426, PLACE6000429, PLACE6000450, PLACE6000523, PLACE6000550, PLACE6000552, PLACE6000555, PLACE6000619, PLACE6000953, PLACE6001118, PLACE6001153, PLACE6001185, PLACE6001262, PLACE6001294, PLACE6001536, PLACE6001557, PLACE6001712, PLACE6001740, PLACE6001823, PLACE6001886, PLACE6001923, PLACE6001925, PLACE6001933, PLACE6002011, PLACE6002016, PLACE6002056, PLACE6002157, PLACE6002312, PLACE6002323, PLACE6002345, PLACE6002419, PLACE6002462, PLACE6002647, PLACE6002692, PLACE6002699, PLACE6002710, PLACE6002871, PLACE6002949, PLACE6003004, PLACE6003038, PLACE6003077, PLACE6003094, PLACE6003109, PLACE6003204, PLACE6003372, PLACE6003393, PLACE6003399, PLACE6003539, PLACE6003621, PLACE6003705, PLACE6003740, PLACE6003771, PLACE6003796, PLACE6003839, PLACE6003850, PLACE6004101, PLACE6004219, PLACE6004336, PLACE6004368, PLACE6004380, PLACE6004396, PLACE6004454, PLACE6004464, PLACE6004491, PLACE6004578, PLACE6004663, PLACE6004687, PLACE6004738, PLACE6004931, PLACE6004966, PLACE6004993, PLACE6005007, PLACE6005029, PLACE6005108, PLACE6005234, PLACE6005283, PLACE6005328, PLACE6005351, PLACE6005423, PLACE6005487, PLACE6005535, PLACE6005546, PLACE6005559, PLACE6005579, PLACE6005691, PLACE6005786, PLACE6006077, PLACE6006158, PLACE6006217, PLACE6006222, PLACE6006266, PLACE6006287, PLACE6006394, PLACE6006418, PLACE6006474, PLACE6006566, PLACE6006697, PLACE6006822, PLACE6006871, PLACE6006905, PLACE6006988, PLACE6007050, PLACE6007180, PLACE6007242, PLACE6007309, PLACE6007373, PLACE6007380, PLACE6007433, PLACE6007436, PLACE6007482, PLACE6007687, PLACE6007787, PLACE6007798, PLACE6007807, PLACE6007925, PLACE6008036, PLACE6008094, PLACE6008126, PLACE6008285, PLACE6008444, PLACE6008453, PLACE6008640, PLACE6008750, PLACE6008768, PLACE6008824, PLACE6008989, PLACE6009006, PLACE6009008, PLACE6009228, PLACE6009338, PLACE6009419, PLACE6009430, PLACE6009482, PLACE6009524, PLACE6009527, PLACE6009560, PLACE6009590, PLACE6009821, PLACE6009835, PLACE6009853, PLACE6010463, PLACE6010485, PLACE6010568, PLACE6010701, PLACE6010704, PLACE6010732, PLACE6010765, PLACE6010925, PLACE6010936, PLACE6010991, PLACE6011041, PLACE6011102, PLACE6011156, PLACE6011211, PLACE6011260, PLACE6011334, PLACE6011627, PLACE6011774, PLACE6011881, PLACE6011907, PLACE6011975, PLACE6012108, PLACE6012168, PLACE6012297, PLACE6012308, PLACE6012574, PLACE6012908, PLACE6012942, PLACE6013288, PLACE6013386, PLACE6013400, PLACE6013650, PLACE6013883, PLACE6013884, PLACE6013885, PLACE6014043, PLACE6014064, PLACE6014516, PLACE6014882, PLACE6015051, PLACE6015211, PLACE6015322, PLACE6015445, PLACE6015460, PLACE6015513, PLACE6015591, PLACE6015729, PLACE6015731, PLACE6015939, PLACE6016030, PLACE6016093, PLACE6016105, PLACE6016160, PLACE6016210, PLACE6016383, PLACE6017002, PLACE6017431, PLACE6017564, PLACE6017578, PLACE6017626, PLACE6017701, PLACE6017714, PLACE6017788, PLACE6017791, PLACE6018107, PLACE6018187, PLACE6018235, PLACE6018287, PLACE6018441, PLACE6018497, PLACE6018769, PLACE6018834, PLACE6018843, PLACE6018863, PLACE6019385, PLACE6019542, PLACE6019600, PLACE6019674, PLACE6019676, PLACE6019701, PLACE6019932, PLACE6020031, PLACE6020145, PLACE7000167, PLACE7000170, PLACE7000266, PLACE7000333, PLACE7000410, PLACE7000502, PLACE7000707, PLACE7001544, PLACE7001759, PLACE7001936, PLACE7002303, PLACE7002641, PLACE7003639, PLACE7003657, PLACE7003684, PLACE7003985, PLACE7004961, PLACE7005169, PLACE7005671, PLACE7006051, PLACE7006090, PLACE7006240, PLACE7006268, PLACE7006275, PLACE7006498, PLACE7006540, PLACE7007379, PLACE7007644, PLACE7007973, PLACE7008136, PLACE7008261, PLACE7008431, PLACE7008623, PLACE7008766, PLACE7009563, PROST1000033, PROST1000039, PROST1000065, PROST1000083, PROST1000085, PROST1000110, PROST1000123, PROST1000136, PROST1000144, PROST1000145, PROST1000152, PROST1000167, PROST1000184, PROST1000217, PROST1000262, PROST1000272, PROST1000298, PROST1000322, PROST1000334, PROST1000362, PROST1000377, PROST1000383, PROST1000412, PROST1000419, PROST1000451, PROST1000480, PROST1000485, PROST1000493, PROST1000512, PROST1000527, PROST1000528, PROST1000559, PROST1000575, PROST2000053, PROST2000067, PROST2000079, PROST2000105, PROST2000143, PROST2000162, PROST2000165, PROST2000176, PROST2000203, PROST2000206, PROST2000212, PROST2000267, PROST2000273, PROST2000325, PROST2000337, PROST2000432, PROST2000452, PROST2000463, PROST2000470, PROST2000505, PROST2000572, PROST2000717, PROST2000761, PROST2000893, PROST2000961, PROST2001138, PROST2001213, PROST2001283, PROST2001414, PROST2001415, PROST2001465, PROST2001521, PROST2001540, PROST2001552, PROST2001599, PROST2001611, PROST2001636, PROST2001739, PROST2001796, PROST2001805, PROST2001823, PROST2001899, PROST2001998, PROST2002078, PROST2002101, PROST2002162, PROST2002212, PROST2002227, PROST2002338, PROST2002425, PROST2002488, PROST2002489, PROST2002527, PROST2002591, PROST2002602, PROST2002633, PROST2002682, PROST2002685, PROST2002722, PROST2002736, PROST2002842, PROST2002906, PROST2002927, PROST2003102, PROST2003117, PROST2003210, PROST2003302, PROST2003303, PROST2003324, PROST2003340, PROST2003428, PROST2003472, PROST2003563, PROST2003577, PROST2003583, PROST2003586, PROST2003628, PROST2003635, PROST2003674, PROST2003676, PROST2003732, PROST2003775, PROST2003922, PROST2003930, PROST2004115, PROST2004142, PROST2004146, PROST2004161, PROST2004251, PROST2004258, PROST2004332, PROST2004481, PROST2004526, PROST2004570, PROST2004727, PROST2004742, PROST2004817, PROST2005039, PROST2005076, PROST2005093, PROST2005121, PROST2005131, PROST2005228, PROST2005426, PROST2005466, PROST2005630, PROST2005683, PROST2005788, PROST2005880, PROST2005886, PROST2005904, PROST2005919, PROST2005943, PROST2006008, PROST2006020, PROST2006196, PROST2006201, PROST2006282, PROST2006450, PROST2006491, PROST2006510, PROST2006579, PROST2006688, PROST2006766, PROST2006782, PROST2006933, PROST2006988, PROST2007122, PROST2007200, PROST2007237, PROST2007248, PROST2007289, PROST2007317, PROST2007328, PROST2007382, PROST2007389, PROST2007416, PROST2007528, PROST2007818, PROST2007871, PROST2007950, PROST2007956, PROST2007974, PROST2007988, PROST2008079, PROST2008088, PROST2008243, PROST2008245, PROST2008268, PROST2008447, PROST2008468, PROST2008472, PROST2008516, PROST2008724, PROST2008835, PROST2008993, PROST2009022, PROST2009208, PROST2009222, PROST2009254, PROST2009273, PROST2009320, PROST2009347, PROST2009365, PROST2009388, PROST2009400, PROST2009470, PROST2009483, PROST2009571, PROST2009731, PROST2009736, PROST2009795, PROST2009901, PROST2009909, PROST2010046, PROST2010250, PROST2010318, PROST2010326, PROST2010382, PROST2010400, PROST2010606, PROST2010885, PROST2011012, PROST2011038, PROST2011105, PROST2011297, PROST2011410, PROST2011439, PROST2011482, PROST2011631, PROST2011660, PROST2012005, PROST2012016, PROST2012088, PROST2012140, PROST2012157, PROST2012190, PROST2012249, PROST2012353, PROST2012400, PROST2012542, PROST2012550, PROST2012740, PROST2012780, PROST2012888, PROST2012890, PROST2013032, PROST2013053, PROST2013260, PROST2013327, PROST2013531, PROST2013605, PROST2013627, PROST2013873, PROST2013880, PROST2014422, PROST2014585, PROST2014601, PROST2014659, PROST2014862, PROST2014916, PROST2014925, PROST2015124, PROST2015137, PROST2015198, PROST2015243, PROST2015246, PROST2015251, PROST2015332, PROST2015457, PROST2015464, PROST2015537, PROST2015545, PROST2015551, PROST2015636, PROST2015710, PROST2015756, PROST2015877, PROST2015900, PROST2015932, PROST2016195, PROST2016246, PROST2016351, PROST2016379, PROST2016444, PROST2016462, PROST2016499, PROST2016512, PROST2016566, PROST2016582, PROST2016668, PROST2016684, PROST2016777, PROST2016829, PROST2016860, PROST2016918, PROST2016980, PROST2017098, PROST2017367, PROST2017413, PROST2017441, PROST2017529, PROST2017578, PROST2017617, PROST2017692, PROST2017700, PROST2017701, PROST2017729, PROST2017836, PROST2017910, PROST2017972, PROST2018030, PROST2018090, PROST2018235, PROST2018437, PROST2018487, PROST2018511, PROST2018583, PROST2018588, PROST2018607, PROST2018788, PROST2018902, PROST2018922, PROST2018977, PROST2019296, PROST2019398, PROST2019487, PROST2019781, PUAEN1000039, PUAEN1000081, PUAEN1000085, PUAEN1000087, PUAEN1000121, PUAEN1000175, PUAEN1000239, PUAEN1000275, PUAEN1000276, PUAEN1000288, PUAEN1000322, PUAEN2000080, PUAEN2000175, PUAEN2000247, PUAEN2000394, PUAEN2000497, PUAEN2000594, PUAEN2000684, PUAEN2000942, PUAEN2001260, PUAEN2001345, PUAEN2001526, PUAEN2001882, PUAEN2002473, PUAEN2002489, PUAEN2002552, PUAEN2002568, PUAEN2002616, PUAEN2002758, PUAEN2003018, PUAEN2003079, PUAEN2003116, PUAEN2003408, PUAEN2003517, PUAEN2003954, PUAEN2004067, PUAEN2004083, PUAEN2004511, PUAEN2004525, PUAEN2004875, PUAEN2005110, PUAEN2005247, PUAEN2005502, PUAEN2005588, PUAEN2006029, PUAEN2006335, PUAEN2006578, PUAEN2006639, PUAEN2006761, PUAEN2007350, PUAEN2007785, PUAEN2007898, PUAEN2008123, PUAEN2008228, PUAEN2008314, PUAEN2008515, PUAEN2008815, PUAEN2008980, PUAEN2009348, PUAEN2009534, PUAEN2009655, PUAEN2009795, PUAEN2009852, PUAEN2010824, RECTM1000051, RECTM1000141, RECTM2000220, RECTM2000349, RECTM2000433, RECTM2000510, RECTM2001307, RECTM2001347, RECTM2001519, RECTM2001666, RECTM2001691, RECTM2001749, RECTM2002602, RECTM2002632, SALGL1000005, SALGL1000024, SALGL1000028, SALGL1000065, SALGL1000107, SKMUS1000030, SKMUS1000064, SKMUS1000067, SKMUS1000102, SKMUS1000104, SKMUS1000118, SKMUS1000124, SKMUS1000129, SKMUS1000138, SKMUS1000176, SKMUS2000020, SKMUS2000061, SKMUS2000074, SKMUS2000078, SKMUS2000117, SKMUS2000137, SKMUS2000198, SKMUS2000243, SKMUS2000271, SKMUS2000287, SKMUS2000317, SKMUS2000330, SKMUS2000339, SKMUS2000361, SKMUS2000365, SKMUS2000380, SKMUS2000390, SKMUS2000416, SKMUS2000458, SKMUS2000467, SKMUS2000468, SKMUS2000515, SKMUS2000690, SKMUS2000701, SKMUS2000705, SKMUS2000710, SKMUS2000724, SKMUS2000726, SKMUS2000774, SKMUS2000780, SKMUS2000821, SKMUS2000847, SKMUS2000863, SKMUS2000873, SKMUS2000894, SKMUS2000898, SKMUS2000902, SKMUS2000945, SKMUS2000961, SKMUS2000973, SKMUS2000980, SKMUS2001008, SKMUS2001014, SKMUS2001129, SKMUS2001147, SKMUS2001157, SKMUS2001164, SKMUS2001199, SKMUS2001201, SKMUS2001215, SKMUS2001247, SKMUS2001254, SKMUS2001271, SKMUS2001287, SKMUS2001323, SKMUS2001364, SKMUS2001398, SKMUS2001402, SKMUS2001412, SKMUS2001492, SKMUS2001501, SKMUS2001543, SKMUS2001580, SKMUS2001585, SKMUS2001608, SKMUS2001631, SKMUS2001662, SKMUS2001663, SKMUS2001668, SKMUS2001671, SKMUS2001683, SKMUS2001693, SKMUS2001695, SKMUS2001703, SKMUS2001740, SKMUS2001742, SKMUS2001823, SKMUS2001850, SKMUS2002077, SKMUS2002084, SKMUS2002153, SKMUS2002475, SKMUS2002602, SKMUS2002634, SKMUS2002693, SKMUS2002821, SKMUS2002840, SKMUS2002920, SKMUS2003034, SKMUS2003074, SKMUS2003168, SKMUS2003194, SKMUS2003744, SKMUS2004044, SKMUS2004047, SKMUS2004483, SKMUS2004667, SKMUS2004897, SKMUS2004903, SKMUS2005428, SKMUS2006394, SKMUS2006481, SKMUS2006755, SKMUS2007315, SKMUS2007359, SKMUS2007568, SKMUS2007740, SKMUS2007816, SKMUS2007915, SKMUS2008338, SKMUS2008407, SKMUS2008474, SKMUS2008585, SKMUS2008607, SKMUS2009190, SKMUS2009232, SKMUS2009479, SKMUS2009557, SKNMC1000110, SKNMC1000123, SKNMC1000124, SKNMC1000159, SKNMC2000256, SKNMC2000305, SKNMC2000322, SKNMC2000374, SKNMC2000583, SKNMC2000593, SKNMC2000612, SKNMC2000622, SKNMC2000635, SKNMC2000966, SKNMC2001113, SKNMC2001324, SKNMC2001503, SKNMC2001555, SKNMC2001596, SKNMC2001623, SKNMC2002402, SKNMC2003639, SKNMC2003924, SKNMC2003987, SKNMC2004457, SKNMC2004643, SKNMC2004651, SKNMC2005772, SKNMC2006327, SKNMC2006998, SKNMC2007134, SKNMC2007502, SKNMC2007504, SKNMC2007961, SKNMC2009450, SKNSH1000086, SKNSH1000174, SKNSH1000301, SKNSH1000308, SKNSH1000416, SKNSH2000051, SKNSH2000151, SKNSH2000163, SKNSH2000319, SKNSH2000482, SKNSH2000516, SKNSH2000550, SKNSH2000716, SKNSH2000971, SKNSH2001875, SKNSH2001931, SKNSH2002054, SKNSH2002866, SKNSH2003064, SKNSH2003174, SKNSH2003422, SKNSH2003466, SKNSH2003483, SKNSH2003633, SKNSH2004039, SKNSH2005061, SKNSH2005120, SKNSH2005194, SKNSH2005240, SKNSH2005792, SKNSH2005816, SKNSH2005981, SKNSH2006304, SKNSH2006432, SKNSH2006822, SKNSH2007142, SKNSH2007149, SKNSH2007429, SKNSH2007739, SKNSH2008043, SKNSH2008940, SKNSH2008969, SKNSH2009197, SKNSH2009357, SKNSH2009435, SKNSH2009991, SKNSH2010015, SMINT1000012, SMINT1000039, SMINT1000048, SMINT1000051, SMINT1000054, SMINT1000057, SMINT1000071, SMINT1000075, SMINT1000078, SMINT1000091, SMINT1000100, SMINT1000103, SMINT1000118, SMINT1000131, SMINT1000137, SMINT2000018, SMINT2000032, SMINT2000040, SMINT2000060, SMINT2000073, SMINT2000084, SMINT2000145, SMINT2000176, SMINT2000185, SMINT2000227, SMINT2000229, SMINT2000267, SMINT2000400, SMINT2000518, SMINT2000529, SMINT2000530, SMINT2000537, SMINT2000538, SMINT2000541, SMINT2000558, SMINT2000562, SMINT2000568, SMINT2000609, SMINT2000811, SMINT2000824, SMINT2000984, SMINT2001114, SMINT2001158, SMINT2001183, SMINT2001199, SMINT2001222, SMINT2001348, SMINT2001397, SMINT2001458, SMINT2001461, SMINT2001535, SMINT2001559, SMINT2001609, SMINT2001615, SMINT2001683, SMINT2001731, SMINT2001812, SMINT2001950, SMINT2002126, SMINT2002202, SMINT2002210, SMINT2002281, SMINT2002311, SMINT2002314, SMINT2002328, SMINT2002414, SMINT2002457, SMINT2002743, SMINT2002778, SMINT2002880, SMINT2002884, SMINT2002899, SMINT2002974, SMINT2003128, SMINT2003150, SMINT2003317, SMINT2003386, SMINT2003551, SMINT2003569, SMINT2003641, SMINT2003644, SMINT2003866, SMINT2004047, SMINT2004086, SMINT2004299, SMINT2004339, SMINT2004350, SMINT2004414, SMINT2004473, SMINT2004547, SMINT2004583, SMINT2004729, SMINT2004781, SMINT2004872, SMINT2004891, SMINT2004909, SMINT2004972, SMINT2004992, SMINT2005075, SMINT2005161, SMINT2005174, SMINT2005213, SMINT2005330, SMINT2005368, SMINT2005402, SMINT2005405, SMINT2005621, SMINT2005623, SMINT2005624, SMINT2005688, SMINT2005800, SMINT2006078, SMINT2006205, SMINT2006331, SMINT2006596, SMINT2006641, SMINT2006648, SMINT2006708, SMINT2006716, SMINT2007101, SMINT2007140, SMINT2007219, SMINT2007294, SMINT2007365, SMINT2007391, SMINT2007433, SMINT2007508, SMINT2007526, SMINT2007579, SMINT2007647, SMINT2007729, SMINT2007790, SMINT2007796, SMINT2007867, SMINT2007932, SMINT2008042, SMINT2008054, SMINT2008133, SMINT2008277, SMINT2008329, SMINT2008455, SMINT2008491, SMINT2008531, SMINT2008545, SMINT2008558, SMINT2008590, SMINT2008625, SMINT2008672, SMINT2008690, SMINT2008715, SMINT2008720, SMINT2008817, SMINT2008844, SMINT2008869, SMINT2008917, SMINT2009119, SMINT2009121, SMINT2009212, SMINT2009216, SMINT2009233, SMINT2009259, SMINT2009272, SMINT2009363, SMINT2009415, SMINT2009468, SMINT2009505, SMINT2009529, SMINT2009832, SMINT2009895, SMINT2009902, SMINT2009973, SMINT2010015, SMINT2010068, SMINT2010076, SMINT2010144, SMINT2010200, SMINT2010278, SMINT2010324, SMINT2010326, SMINT2010426, SMINT2010500, SMINT2010533, SMINT2010629, SMINT2010639, SMINT2010672, SMINT2010753, SMINT2010853, SMINT2010897, SMINT2010959, SMINT2010997, SMINT2011033, SMINT2011066, SMINT2011273, SMINT2011311, SMINT2011406, SMINT2011509, SMINT2011567, SMINT2011588, SMINT2011656, SMINT2011888, SMINT2011958, SMINT2012040, SMINT2012122, SMINT2012195, SMINT2012285, SMINT2012501, SMINT2012734, SMINT2012793, SMINT2013129, SMINT2013170, SMINT2013181, SMINT2013228, SMINT2013613, SMINT2013626, SMINT2013695, SMINT2013833, SMINT2013890, SMINT2014166, SMINT2014282, SMINT2014443, SMINT2014480, SMINT2014489, SMINT2014721, SMINT2015006, SMINT2015306, SMINT2015326, SMINT2015353, SMINT2015454, SMINT2015518, SMINT2015745, SMINT2015787, SMINT2015810, SMINT2016122, SMINT2016146, SMINT2016286, SMINT2016313, SMINT2016396, SMINT2016412, SMINT2016440, SMINT2016477, SMINT2016544, SMINT2016857, SMINT2017134, SMINT2017319, SMINT2017324, SMINT2017410, SMINT2017431, SMINT2017432, SMINT2017436, SMINT2017599, SMINT2017659, SMINT2017736, SMINT2017781, SMINT2017855, SMINT2017884, SMINT2017974, SMINT2018343, SMINT2018353, SMINT2018592, SMINT2018681, SMINT2019017, SMINT2019105, SMINT2019142, SMINT2019153, SMINT2019200, SPLEN1000013, SPLEN1000049, SPLEN1000087, SPLEN1000089, SPLEN1000091, SPLEN1000139, SPLEN1000143, SPLEN1000144, SPLEN1000145, SPLEN1000156, SPLEN1000163, SPLEN1000165, SPLEN1000178, SPLEN2000020, SPLEN2000064, SPLEN2000126, SPLEN2000134, SPLEN2000189, SPLEN2000197, SPLEN2000205, SPLEN2000210, SPLEN2000222, SPLEN2000242, SPLEN2000247, SPLEN2000258, SPLEN2000270, SPLEN2000307, SPLEN2000310, SPLEN2000341, SPLEN2000348, SPLEN2000350, SPLEN2000357, SPLEN2000364, SPLEN2000402, SPLEN2000414, SPLEN2000420, SPLEN2000443, SPLEN2000448, SPLEN2000450, SPLEN2000464, SPLEN2000496, SPLEN2000515, SPLEN2000537, SPLEN2000541, SPLEN2000607, SPLEN2000630, SPLEN2000695, SPLEN2000698, SPLEN2000839, SPLEN2001135, SPLEN2001176, SPLEN2001227, SPLEN2001245, SPLEN2001354, SPLEN2001367, SPLEN2001383, SPLEN2001503, SPLEN2001510, SPLEN2001599, SPLEN2001626, SPLEN2001650, SPLEN2001689, SPLEN2001761, SPLEN2001781, SPLEN2001881, SPLEN2001912, SPLEN2001945, SPLEN2002007, SPLEN2002053, SPLEN2002133, SPLEN2002147, SPLEN2002166, SPLEN2002175, SPLEN2002272, SPLEN2002314, SPLEN2002343, SPLEN2002354, SPLEN2002385, SPLEN2002419, SPLEN2002462, SPLEN2002467, SPLEN2002477, SPLEN2002662, SPLEN2002695, SPLEN2002707, SPLEN2002917, SPLEN2002957, SPLEN2003160, SPLEN2003204, SPLEN2003219, SPLEN2003396, SPLEN2003678, SPLEN2003878, SPLEN2003918, SPLEN2003924, SPLEN2004060, SPLEN2004078, SPLEN2004124, SPLEN2004148, SPLEN2004343, SPLEN2004346, SPLEN2004368, SPLEN2004844, SPLEN2004880, SPLEN2005009, SPLEN2005227, SPLEN2005272, SPLEN2005450, SPLEN2005474, SPLEN2005727, SPLEN2005838, SPLEN2005869, SPLEN2005927, SPLEN2005939, SPLEN2006268, SPLEN2006283, SPLEN2006325, SPLEN2006389, SPLEN2006425, SPLEN2006671, SPLEN2006701, SPLEN2006785, SPLEN2006875, SPLEN2007276, SPLEN2007314, SPLEN2007350, SPLEN2007619, SPLEN2007653, SPLEN2007689, SPLEN2007695, SPLEN2007750, SPLEN2007926, SPLEN2007951, SPLEN2008007, SPLEN2008135, SPLEN2008164, SPLEN2008317, SPLEN2008496, SPLEN2008591, SPLEN2008786, SPLEN2009088, SPLEN2009315, SPLEN2009340, SPLEN2009541, SPLEN2009548, SPLEN2009555, SPLEN2009581, SPLEN2009733, SPLEN2009803, SPLEN2009884, SPLEN2009918, SPLEN2010004, SPLEN2010112, SPLEN2010119, SPLEN2010146, SPLEN2010187, SPLEN2010350, SPLEN2010395, SPLEN2010415, SPLEN2010447, SPLEN2010469, SPLEN2010510, SPLEN2010530, SPLEN2010534, SPLEN2010588, SPLEN2010800, SPLEN2010847, SPLEN2010862, SPLEN2010978, SPLEN2010986, SPLEN2011018, SPLEN2011025, SPLEN2011086, SPLEN2011139, SPLEN2011145, SPLEN2011248, SPLEN2011252, SPLEN2011419, SPLEN2011422, SPLEN2011672, SPLEN2011678, SPLEN2011805, SPLEN2011820, SPLEN2011830, SPLEN2011931, SPLEN2011981, SPLEN2012115, SPLEN2012175, SPLEN2012179, SPLEN2012185, SPLEN2012234, SPLEN2012453, SPLEN2012524, SPLEN2012525, SPLEN2012606, SPLEN2012611, SPLEN2012619, SPLEN2012725, SPLEN2012743, SPLEN2012756, SPLEN2012961, SPLEN2013195, SPLEN2013503, SPLEN2013644, SPLEN2013648, SPLEN2013673, SPLEN2013690, SPLEN2013714, SPLEN2013821, SPLEN2013857, SPLEN2013860, SPLEN2013910, SPLEN2013936, SPLEN2014063, SPLEN2014073, SPLEN2014119, SPLEN2014136, SPLEN2014199, SPLEN2014210, SPLEN2014293, SPLEN2014318, SPLEN2014381, SPLEN2014454, SPLEN2014486, SPLEN2014543, SPLEN2014572, SPLEN2014645, SPLEN2014669, SPLEN2014711, SPLEN2014860, SPLEN2014865, SPLEN2014919, SPLEN2014920, SPLEN2014924, SPLEN2014937, SPLEN2014946, SPLEN2015031, SPLEN2015094, SPLEN2015129, SPLEN2015158, SPLEN2015166, SPLEN2015216, SPLEN2015258, SPLEN2015261, SPLEN2015267, SPLEN2015276, SPLEN2015415, SPLEN2015433, SPLEN2015593, SPLEN2015674, SPLEN2015679, SPLEN2015707, SPLEN2015730, SPLEN2015746, SPLEN2015815, SPLEN2015890, SPLEN2015891, SPLEN2015899, SPLEN2016045, SPLEN2016053, SPLEN2016069, SPLEN2016135, SPLEN2016241, SPLEN2016250, SPLEN2016304, SPLEN2016356, SPLEN2016480, SPLEN2016531, SPLEN2016533, SPLEN2016541, SPLEN2016552, SPLEN2016554, SPLEN2016602, SPLEN2016627, SPLEN2016773, SPLEN2016840, SPLEN2016863, SPLEN2016922, SPLEN2016932, SPLEN2016972, SPLEN2016973, SPLEN2017104, SPLEN2017121, SPLEN2017147, SPLEN2017187, SPLEN2017189, SPLEN2017212, SPLEN2017426, SPLEN2017452, SPLEN2017538, SPLEN2017592, SPLEN2017613, SPLEN2017620, SPLEN2017643, SPLEN2017687, SPLEN2017740, SPLEN2017781, SPLEN2017918, SPLEN2017999, SPLEN2018098, SPLEN2018112, SPLEN2018159, SPLEN2018180, SPLEN2018181, SPLEN2018280, SPLEN2018285, SPLEN2018302, SPLEN2018364, SPLEN2018395, SPLEN2018643, SPLEN2018732, SPLEN2018749, SPLEN2018933, SPLEN2019008, SPLEN2019043, SPLEN2019092, SPLEN2019102, SPLEN2019131, SPLEN2019257, SPLEN2019311, SPLEN2019323, SPLEN2019349, SPLEN2019375, SPLEN2019379, SPLEN2019471, SPLEN2019480, SPLEN2019571, SPLEN2019575, SPLEN2019709, SPLEN2019774, SPLEN2019793, SPLEN2019811, SPLEN2019839, SPLEN2019985, SPLEN2020007, SPLEN2020034, SPLEN2020153, SPLEN2020154, SPLEN2020166, SPLEN2020183, SPLEN2020223, SPLEN2020359, SPLEN2020417, SPLEN2020427, SPLEN2020467, SPLEN2020512, SPLEN2020608, SPLEN2020777, SPLEN2020805, SPLEN2021057, SPLEN2021122, SPLEN2021157, SPLEN2021231, SPLEN2021273, SPLEN2021295, SPLEN2021298, SPLEN2021383, SPLEN2021417, SPLEN2021440, SPLEN2021458, SPLEN2021463, SPLEN2021560, SPLEN2021701, SPLEN2021795, SPLEN2021983, SPLEN2021991, SPLEN2022040, SPLEN2022162, SPLEN2022227, SPLEN2022591, SPLEN2022785, SPLEN2022920, SPLEN2023024, SPLEN2023160, SPLEN2023423, SPLEN2023710, SPLEN2023791, SPLEN2023977, SPLEN2024070, SPLEN2024127, SPLEN2024273, SPLEN2024383, SPLEN2024530, SPLEN2024571, SPLEN2024577, SPLEN2024617, SPLEN2024737, SPLEN2024956, SPLEN2025012, SPLEN2025017, SPLEN2025039, SPLEN2025219, SPLEN2025491, SPLEN2025626, SPLEN2025820, SPLEN2026144, SPLEN2026411, SPLEN2026765, SPLEN2027157, SPLEN2027395, SPLEN2027488, SPLEN2027780, SPLEN2027852, SPLEN2027868, SPLEN2027995, SPLEN2028046, SPLEN2028066, SPLEN2028138, SPLEN2028365, SPLEN2028417, SPLEN2028424, SPLEN2028593, SPLEN2028844, SPLEN2028994, SPLEN2029051, SPLEN2029176, SPLEN2029380, SPLEN2029522, SPLEN2029727, SPLEN2029904, SPLEN2030250, SPLEN2030335, SPLEN2030371, SPLEN2030397, SPLEN2030479, SPLEN2030495, SPLEN2030562, SPLEN2030763, SPLEN2030847, SPLEN2031004, SPLEN2031125, SPLEN2031424, SPLEN2031724, SPLEN2031780, SPLEN2032036, SPLEN2032112, SPLEN2032154, SPLEN2032321, SPLEN2032356, SPLEN2032677, SPLEN2032813, SPLEN2032924, SPLEN2033153, SPLEN2033333, SPLEN2033490, SPLEN2033539, SPLEN2033921, SPLEN2033996, SPLEN2034021, SPLEN2034081, SPLEN2034252, SPLEN2034551, SPLEN2034601, SPLEN2034678, SPLEN2034864, SPLEN2034934, SPLEN2035318, SPLEN2035615, SPLEN2036103, SPLEN2036326, SPLEN2036475, SPLEN2036579, SPLEN2036608, SPLEN2036702, SPLEN2036712, SPLEN2036821, SPLEN2036932, SPLEN2036953, SPLEN2037077, SPLEN2037194, SPLEN2037319, SPLEN2037444, SPLEN2037580, SPLEN2037630, SPLEN2037678, SPLEN2037891, SPLEN2038055, SPLEN2038180, SPLEN2038345, SPLEN2038407, SPLEN2038473, SPLEN2039311, SPLEN2039697, SPLEN2039845, SPLEN2039936, SPLEN2040222, SPLEN2040237, SPLEN2040824, SPLEN2041304, SPLEN2041310, SPLEN2041585, SPLEN2041645, SPLEN2041700, SPLEN2041720, SPLEN2041977, SPLEN2042051, SPLEN2042521, SPLEN2042598, SPLEN2042714, SPLEN2042920, STOMA1000013, STOMA1000052, STOMA1000074, STOMA1000091, STOMA1000117, STOMA1000133, STOMA1000175, STOMA1000186, STOMA1000190, STOMA1000191, STOMA2000032, STOMA2000072, STOMA2000088, STOMA2000104, STOMA2000148, STOMA2000168, STOMA2000183, STOMA2000188, STOMA2000279, STOMA2000289, STOMA2000383, STOMA2000386, STOMA2000396, STOMA2000478, STOMA2000482, STOMA2000529, STOMA2000539, STOMA2000567, STOMA2000640, STOMA2000678, STOMA2000686, STOMA2000888, STOMA2001025, STOMA2001389, STOMA2002141, STOMA2002367, STOMA2002688, STOMA2003289, STOMA2003444, STOMA2003477, STOMA2003646, STOMA2003894, STOMA2004194, STOMA2004294, STOMA2004663, STOMA2004668, STOMA2004852, STOMA2004873, STOMA2004884, STOMA2004893, STOMA2004925, STOMA2005120, STOMA2005664, STOMA2005667, STOMA2005746, STOMA2005782, STOMA2006181, STOMA2006213, STOMA2006229, STOMA2006325, STOMA2006330, STOMA2006398, STOMA2006447, STOMA2006780, STOMA2006904, STOMA2007269, STOMA2007680, STOMA2007745, STOMA2008050, STOMA2008361, STOMA2008546, STOMA2008614, STOMA2008638, STOMA2008838, STOMA2009250, STOMA2009253, STOMA2009256, SYNOV1000045, SYNOV1000049, SYNOV1000118, SYNOV1000128, SYNOV1000190, SYNOV1000256, SYNOV2000152, SYNOV2000171, SYNOV2000173, SYNOV2000177, SYNOV2000178, SYNOV2000193, SYNOV2000251, SYNOV2000279, SYNOV2000291, SYNOV2000297, SYNOV2000397, SYNOV2000426, SYNOV2000601, SYNOV2000700, SYNOV2000820, SYNOV2000824, SYNOV2000923, SYNOV2001014, SYNOV2001035, SYNOV2001088, SYNOV2001111, SYNOV2001144, SYNOV2001212, SYNOV2001251, SYNOV2001300, SYNOV2001356, SYNOV2001390, SYNOV2001451, SYNOV2001457, SYNOV2001468, SYNOV2001660, SYNOV2003326, SYNOV2005216, SYNOV2005448, SYNOV2005673, SYNOV2005817, SYNOV2005962, SYNOV2006430, SYNOV2006620, SYNOV2007965, SYNOV2008765, SYNOV2011233, SYNOV2012326, SYNOV2013365, SYNOV2013637, SYNOV2014157, SYNOV2014364, SYNOV2016124, SYNOV2016837, SYNOV2017179, SYNOV2018921, SYNOV2019280, SYNOV2020085, SYNOV2020463, SYNOV2021320, SYNOV2021953, SYNOV3000184, SYNOV3000231, SYNOV3000302, SYNOV3000345, SYNOV4000249, SYNOV4000472, SYNOV4000598, SYNOV4000706, SYNOV4001224, SYNOV4001342, SYNOV4001395, SYNOV4002001, SYNOV4002392, SYNOV4002875, SYNOV4002883, SYNOV4003174, SYNOV4003322, SYNOV4003681, SYNOV4003981, SYNOV4004184, SYNOV4004741, SYNOV4004914, SYNOV4005256, SYNOV4005570, SYNOV4005739, SYNOV4005889, SYNOV4005981, SYNOV4006256, SYNOV4007215, SYNOV4007360, SYNOV4007430, SYNOV4007521, SYNOV4007711, SYNOV4008336, SYNOV4009129, SYNOV4009139, SYNOV4009298, SYNOV4009575, T1ESE2002665, TBAES2000004, TBAES2000059, TBAES2000116, TBAES2000255, TBAES2000315, TBAES2000352, TBAES2000932, TBAES2001171, TBAES2001220, TBAES2001229, TBAES2001258, TBAES2001492, TBAES2001751, TBAES2003435, TBAES2003492, TBAES2003550, TBAES2003702, TBAES2003917, TBAES2004055, TBAES2004105, TBAES2004939, TBAES2005157, TBAES2005361, TBAES2005543, TBAES2006568, TBAES2006881, TBAES2007379, TBAES2007428, TBAES2007481, TBAES2007504, TBAES2007548, TBAES2007697, TBAES2007862, TBAES2007964, TBAES2008133, TBAES2009387, TCERX2000171, TCERX2000431, TCERX2000613, TCERX2000998, TCERX2002644, TCOLN1000037, TCOLN2000139, TCOLN2000236, TCOLN2000641, TCOLN2001268, TCOLN2002047, TCOLN2002278, TESOP1000035, TESOP1000127, TESOP1000160, TESOP2000083, TESOP2000090, TESOP2000205, TESOP2000312, TESOP2000390, TESOP2000400, TESOP2000510, TESOP2000527, TESOP2000569, TESOP2000739, TESOP2000801, TESOP2001122, TESOP2001166, TESOP2001345, TESOP2001474, TESOP2001796, TESOP2001818, TESOP2001849, TESOP2001865, TESOP2001901, TESOP2002005, TESOP2002110, TESOP2002150, TESOP2002273, TESOP2002489, TESOP2002539, TESOP2002545, TESOP2002804, TESOP2002950, TESOP2003273, TESOP2003308, TESOP2003553, TESOP2003753, TESOP2004110, TESOP2004114, TESOP2004173, TESOP2004214, TESOP2005199, TESOP2005285, TESOP2005485, TESOP2005498, TESOP2005579, TESOP2006041, TESOP2006053, TESOP2006060, TESOP2006068, TESOP2006110, TESOP2006398, TESOP2006670, TESOP2006704, TESOP2006746, TESOP2006865, TESOP2006893, TESOP2007041, TESOP2007052, TESOP2007262, TESOP2007636, TESOP2007674, TESOP2007688, TESOP2007725, TESOP2007912, TESOP2007978, TESOP2008127, TESOP2008552, TESOP2008556, TESOP2008563, TESOP2008820, TESOP2009121, TESOP2009201, TESOP2009247, TESOP2009555, TESTI1000018, TESTI1000019, TESTI1000025, TESTI1000029, TESTI1000030, TESTI1000042, TESTI1000045, TESTI1000055, TESTI1000064, TESTI1000070, TESTI1000085, TESTI1000088, TESTI1000093, TESTI1000094, TESTI1000101, TESTI1000109, TESTI1000125, TESTI1000127, TESTI1000128, TESTI1000131, TESTI1000157, TESTI1000163, TESTI1000169, TESTI1000179, TESTI1000183, TESTI1000191, TESTI1000257, TESTI1000266, TESTI1000319, TESTI1000330, TESTI1000348, TESTI1000390, TESTI1000391, TESTI1000459, TESTI1000491, TESTI1000545, TESTI2000018, TESTI2000044, TESTI2000100, TESTI2000117, TESTI2000120, TESTI2000147, TESTI2000154, TESTI2000172, TESTI2000207, TESTI2000208, TESTI2000221, TESTI2000238, TESTI2000253, TESTI2000278, TESTI2000349, TESTI2000356, TESTI2000358, TESTI2000372, TESTI2000427, TESTI2000435, TESTI2000443, TESTI2000452, TESTI2000462, TESTI2000489, TESTI2000571, TESTI2000591, TESTI2000600, TESTI2000616, TESTI2000644, TESTI2000671, TESTI2000683, TESTI2000689, TESTI2000695, TESTI2000699, TESTI2000707, TESTI2000745, TESTI2000756, TESTI2000762, TESTI2000808, TESTI2000819, TESTI2000830, TESTI2000840, TESTI2000849, TESTI2000850, TESTI2000874, TESTI2000883, TESTI2000909, TESTI2000951, TESTI2000981, TESTI2001008, TESTI2001049, TESTI2001082, TESTI2001134, TESTI2001141, TESTI2001180, TESTI2001208, TESTI2001229, TESTI2001236, TESTI2001237, TESTI2001306, TESTI2001313, TESTI2001330, TESTI2001339, TESTI2001345, TESTI2001352, TESTI2001364, TESTI2001412, TESTI2001420, TESTI2001498, TESTI2001512, TESTI2001518, TESTI2001556, TESTI2001593, TESTI2001613, TESTI2001621, TESTI2001665, TESTI2001671, TESTI2001697, TESTI2001725, TESTI2001758, TESTI2001766, TESTI2001792, TESTI2001793, TESTI2001795, TESTI2001812, TESTI2001815, TESTI2001823, TESTI2001826, TESTI2001827, TESTI2001829, TESTI2001852, TESTI2001869, TESTI2001894, TESTI2001898, TESTI2001915, TESTI2001950, TESTI2001959, TESTI2001968, TESTI2001985, TESTI2001991, TESTI2002002, TESTI2002012, TESTI2002036, TESTI2002048, TESTI2002057, TESTI2002081, TESTI2002090, TESTI2002149, TESTI2002216, TESTI2002245, TESTI2002251, TESTI2002264, TESTI2002282, TESTI2002293, TESTI2002294, TESTI2002326, TESTI2002351, TESTI2002361, TESTI2002406, TESTI2002415, TESTI2002423, TESTI2002453, TESTI2002461, TESTI2002465, TESTI2002467, TESTI2002498, TESTI2002516, TESTI2002544, TESTI2002578, TESTI2002580, TESTI2002618, TESTI2002632, TESTI2002676, TESTI2002690, TESTI2002696, TESTI2002698, TESTI2002700, TESTI2002724, TESTI2002729, TESTI2002752, TESTI2002753, TESTI2002789, TESTI2002802, TESTI2002806, TESTI2002840, TESTI2002910, TESTI2002912, TESTI2002928, TESTI2002937, TESTI2002993, TESTI2003005, TESTI2003020, TESTI2003031, TESTI2003037, TESTI2003044, TESTI2003059, TESTI2003061, TESTI2003071, TESTI2003074, TESTI2003089, TESTI2003104, TESTI2003117, TESTI2003127, TESTI2003130, TESTI2003131, TESTI2003139, TESTI2003141, TESTI2003152, TESTI2003181, TESTI2003193, TESTI2003196, TESTI2003228, TESTI2003236, TESTI2003255, TESTI2003258, TESTI2003277, TESTI2003299, TESTI2003311, TESTI2003321, TESTI2003325, TESTI2003327, TESTI2003330, TESTI2003347, TESTI2003354, TESTI2003356, TESTI2003372, TESTI2003376, TESTI2003418, TESTI2003419, TESTI2003432, TESTI2003475, TESTI2003476, TESTI2003498, TESTI2003512, TESTI2003539, TESTI2003541, TESTI2003545, TESTI2003551, TESTI2003574, TESTI2003579, TESTI2003580, TESTI2003589, TESTI2003596, TESTI2003598, TESTI2003615, TESTI2003638, TESTI2003649, TESTI2003692, TESTI2003718, TESTI2003727, TESTI2003756, TESTI2003768, TESTI2003781, TESTI2003787, TESTI2003824, TESTI2003827, TESTI2003894, TESTI2003911, TESTI2003914, TESTI2003940, TESTI2003962, TESTI2003998, TESTI2004000, TESTI2004073, TESTI2004085, TESTI2004089, TESTI2004111, TESTI2004119, TESTI2004122, TESTI2004153, TESTI2004163, TESTI2004169, TESTI2004207, TESTI2004215, TESTI2004227, TESTI2004229, TESTI2004243, TESTI2004255, TESTI2004287, TESTI2004313, TESTI2004318, TESTI2004322, TESTI2004391, TESTI2004399, TESTI2004423, TESTI2004431, TESTI2004452, TESTI2004459, TESTI2004490, TESTI2004539, TESTI2004552, TESTI2004560, TESTI2004574, TESTI2004601, TESTI2004611, TESTI2004649, TESTI2004654, TESTI2004675, TESTI2004687, TESTI2004689, TESTI2004700, TESTI2004706, TESTI2004712, TESTI2004734, TESTI2004783, TESTI2004791, TESTI2004793, TESTI2004860, TESTI2004906, TESTI2004920, TESTI2004929, TESTI2004936, TESTI2004941, TESTI2004971, TESTI2004982, TESTI2004993, TESTI2004994, TESTI2004999, TESTI2005017, TESTI2005025, TESTI2005040, TESTI2005060, TESTI2005072, TESTI2005085, TESTI2005112, TESTI2005120, TESTI2005153, TESTI2005155, TESTI2005173, TESTI2005267, TESTI2005268, TESTI2005280, TESTI2005307, TESTI2005326, TESTI2005363, TESTI2005376, TESTI2005378, TESTI2005380, TESTI2005391, TESTI2005395, TESTI2005396, TESTI2005415, TESTI2005470, TESTI2005492, TESTI2005568, TESTI2005584, TESTI2005588, TESTI2005590, TESTI2005603, TESTI2005609, TESTI2005610, TESTI2005630, TESTI2005672, TESTI2005683, TESTI2005690, TESTI2005703, TESTI2005720, TESTI2005739, TESTI2005742, TESTI2005767, TESTI2005775, TESTI2005827, TESTI2005835, TESTI2005860, TESTI2005892, TESTI2005911, TESTI2005933, TESTI2005937, TESTI2005948, TESTI2005979, TESTI2005981, TESTI2005982, TESTI2005984, TESTI2005986, TESTI2005987, TESTI2006007, TESTI2006008, TESTI2006015, TESTI2006016, TESTI2006035, TESTI2006040, TESTI2006041, TESTI2006045, TESTI2006051, TESTI2006067, TESTI2006083, TESTI2006097, TESTI2006109, TESTI2006111, TESTI2006125, TESTI2006179, TESTI2006209, TESTI2006210, TESTI2006212, TESTI2006218, TESTI2006238, TESTI2006255, TESTI2006278, TESTI2006333, TESTI2006341, TESTI2006360, TESTI2006409, TESTI2006425, TESTI2006437, TESTI2006457, TESTI2006460, TESTI2006465, TESTI2006483, TESTI2006499, TESTI2006523, TESTI2006543, TESTI2006565, TESTI2006572, TESTI2006617, TESTI2006624, TESTI2006628, TESTI2006633, TESTI2006643, TESTI2006648, TESTI2006659, TESTI2006660, TESTI2006665, TESTI2006667, TESTI2006677, TESTI2006735, TESTI2006744, TESTI2006748, TESTI2006774, TESTI2006853, TESTI2006866, TESTI2006879, TESTI2006894, TESTI2006940, TESTI2006955, TESTI2006978, TESTI2006979, TESTI2006990, TESTI2007040, TESTI2007074, TESTI2007078, TESTI2007113, TESTI2007152, TESTI2007163, TESTI2007183, TESTI2007220, TESTI2007234, TESTI2007311, TESTI2007320, TESTI2007346, TESTI2007358, TESTI2007402, TESTI2007405, TESTI2007452, TESTI2007466, TESTI2007480, TESTI2007490, TESTI2007502, TESTI2007524, TESTI2007533, TESTI2007576, TESTI2007613, TESTI2007657, TESTI2007685, TESTI2007692, TESTI2007749, TESTI2007750, TESTI2007808, TESTI2007814, TESTI2007829, TESTI2007867, TESTI2007872, TESTI2007906, TESTI2007922, TESTI2007951, TESTI2007972, TESTI2007973, TESTI2008014, TESTI2008032, TESTI2008033, TESTI2008046, TESTI2008081, TESTI2008099, TESTI2008139, TESTI2008144, TESTI2008161, TESTI2008189, TESTI2008204, TESTI2008219, TESTI2008233, TESTI2008234, TESTI2008237, TESTI2008278, TESTI2008320, TESTI2008331, TESTI2008343, TESTI2008387, TESTI2008389, TESTI2008394, TESTI2008420, TESTI2008425, TESTI2008440, TESTI2008567, TESTI2008595, TESTI2008621, TESTI2008636, TESTI2008657, TESTI2008684, TESTI2008699, TESTI2008715, TESTI2008762, TESTI2008774, TESTI2008786, TESTI2008822, TESTI2008835, TESTI2008840, TESTI2008847, TESTI2008884, TESTI2008901, TESTI2008929, TESTI2008946, TESTI2008960, TESTI2009018, TESTI2009091, TESTI2009097, TESTI2009136, TESTI2009185, TESTI2009190, TESTI2009217, TESTI2009239, TESTI2009325, TESTI2009388, TESTI2009390, TESTI2009400, TESTI2009412, TESTI2009423, TESTI2009447, TESTI2009462, TESTI2009477, TESTI2009497, TESTI2009511, TESTI2009544, TESTI2009545, TESTI2009551, TESTI2009585, TESTI2009588, TESTI2009683, TESTI2009727, TESTI2009739, TESTI2009812, TESTI2009835, TESTI2009853, TESTI2009935, TESTI2009977, TESTI2010009, TESTI2010154, TESTI2010239, TESTI2010280, TESTI2010354, TESTI2010396, TESTI2010400, TESTI2010409, TESTI2010572, TESTI2010587, TESTI2010591, TESTI2010617, TESTI2010682, TESTI2010724, TESTI2010732, TESTI2010734, TESTI2010755, TESTI2010793, TESTI2010806, TESTI2010833, TESTI2010872, TESTI2011009, TESTI2011020, TESTI2011028, TESTI2011033, TESTI2011254, TESTI2011286, TESTI2011294, TESTI2011314, TESTI2011315, TESTI2011394, TESTI2011407, TESTI2011448, TESTI2011480, TESTI2011549, TESTI2011575, TESTI2011605, TESTI2011612, TESTI2011665, TESTI2011680, TESTI2011683, TESTI2011712, TESTI2011750, TESTI2011840, TESTI2011846, TESTI2011915, TESTI2011928, TESTI2011971, TESTI2012019, TESTI2012050, TESTI2012090, TESTI2012095, TESTI2012104, TESTI2012152, TESTI2012155, TESTI2012171, TESTI2012207, TESTI2012231, TESTI2012244, TESTI2012289, TESTI2012308, TESTI2012356, TESTI2012387, TESTI2012444, TESTI2012511, TESTI2012528, TESTI2012544, TESTI2012550, TESTI2012571, TESTI2012592, TESTI2012617, TESTI2012628, TESTI2012812, TESTI2012834, TESTI2012835, TESTI2012861, TESTI2012900, TESTI2012915, TESTI2012922, TESTI2013001, TESTI2013012, TESTI2013053, TESTI2013144, TESTI2013163, TESTI2013169, TESTI2013212, TESTI2013257, TESTI2013268, TESTI2013322, TESTI2013381, TESTI2013382, TESTI2013401, TESTI2013427, TESTI2013468, TESTI2013497, TESTI2013545, TESTI2013546, TESTI2013566, TESTI2013601, TESTI2013604, TESTI2013607, TESTI2013610, TESTI2013691, TESTI2013699, TESTI2013737, TESTI2013767, TESTI2013832, TESTI2013873, TESTI2013889, TESTI2014007, TESTI2014036, TESTI2014097, TESTI2014160, TESTI2014248, TESTI2014254, TESTI2014269, TESTI2014274, TESTI2014318, TESTI2014324, TESTI2014339, TESTI2014362, TESTI2014385, TESTI2014415, TESTI2014439, TESTI2014474, TESTI2014577, TESTI2014578, TESTI2014716, TESTI2014780, TESTI2014800, TESTI2014843, TESTI2014979, TESTI2014988, TESTI2015042, TESTI2015105, TESTI2015180, TESTI2015246, TESTI2015249, TESTI2015327, TESTI2015331, TESTI2015335, TESTI2015350, TESTI2015375, TESTI2015437, TESTI2015590, TESTI2015610, TESTI2015647, TESTI2015675, TESTI2015710, TESTI2015752, TESTI2015830, TESTI2015914, TESTI2015938, TESTI2015947, TESTI2015987, TESTI2016046, TESTI2016101, TESTI2016162, TESTI2016197, TESTI2016278, TESTI2016298, TESTI2016331, TESTI2016337, TESTI2016410, TESTI2016421, TESTI2016509, TESTI2016568, TESTI2016583, TESTI2016599, TESTI2016629, TESTI2016663, TESTI2016667, TESTI2016688, TESTI2016701, TESTI2016758, TESTI2016848, TESTI2016863, TESTI2016888, TESTI2016896, TESTI2016922, TESTI2016942, TESTI2016950, TESTI2016996, TESTI2017017, TESTI2017028, TESTI2017035, TESTI2017069, TESTI2017089, TESTI2017102, TESTI2017107, TESTI2017113, TESTI2017125, TESTI2017256, TESTI2017305, TESTI2017311, TESTI2017396, TESTI2017507, TESTI2017537, TESTI2017582, TESTI2017584, TESTI2017645, TESTI2017727, TESTI2017740, TESTI2017775, TESTI2017816, TESTI2017832, TESTI2017923, TESTI2017932, =TESTI2017951, TESTI2018031, TESTI2018035, TESTI2018060, TESTI2018083, TESTI2018178, TESTI2018221, TESTI2018276, TESTI2018290, TESTI2018335, TESTI2018337, TESTI2018368, TESTI2018421, TESTI2018428, TESTI2018475, TESTI2018482, TESTI2018521, TESTI2018565, TESTI2018581, TESTI2018611, TESTI2018687, TESTI2018697, TESTI2018838, TESTI2018941, TESTI2018957, TESTI2018974, TESTI2018975, TESTI2019042, TESTI2019228, TESTI2019257, TESTI2019280, TESTI2019282, TESTI2019308, TESTI2019336, TESTI2019352, TESTI2019406, TESTI2019430, TESTI2019455, TESTI2019481, TESTI2019488, TESTI2019501, TESTI2019648, TESTI2019669, TESTI2019697, TESTI2019729, TESTI2019787, TESTI2019794, TESTI2019854, TESTI2019859, TESTI2019860, TESTI2019872, TESTI2019911, TESTI2019917, TESTI2019975, TESTI2019998, TESTI2020012, TESTI2020026, TESTI2020029, TESTI2020071, TESTI2020084, TESTI2020265, TESTI2020283, TESTI2020316, TESTI2020344, TESTI2020379, TESTI2020426, TESTI2020445, TESTI2020515, TESTI2020525, TESTI2020579, TESTI2020717, TESTI2020871, TESTI2020905, TESTI2020906, TESTI2020946, TESTI2020981, TESTI2020999, TESTI2021003, TESTI2021038, TESTI2021057, TESTI2021077, TESTI2021112, TESTI2021114, TESTI2021116, TESTI2021118, TESTI2021122, TESTI2021138, TESTI2021315, TESTI2021358, TESTI2021447, TESTI2021463, TESTI2021531, TESTI2021599, TESTI2021637, TESTI2021654, TESTI2021667, TESTI2021736, TESTI2021785, TESTI2021819, TESTI2021851, TESTI2021895, TESTI2021911, TESTI2021939, TESTI2021999, TESTI2022010, TESTI2022023, TESTI2022065, TESTI2022086, TESTI2022203, TESTI2022246, TESTI2022323, TESTI2022338, TESTI2022400, TESTI2022462, TESTI2022495, TESTI2022623, TESTI2022649, TESTI2022652, TESTI2022738, TESTI2022798, TESTI2022812, TESTI2022814, TESTI2022874, TESTI2022940, TESTI2022952, TESTI2023025, TESTI2023033, TESTI2023053, TESTI2023085, TESTI2023192, TESTI2023194, TESTI2023214, TESTI2023254, TESTI2023386, TESTI2023427, TESTI2023436, TESTI2023599, TESTI2023752, TESTI2023800, TESTI2023861, TESTI2023903, TESTI2023942, TESTI2023947, TESTI2023951, TESTI2023968, TESTI2024009, TESTI2024090, TESTI2024125, TESTI2024153, TESTI2024192, TESTI2024267, TESTI2024299, TESTI2024419, TESTI2024422, TESTI2024443, TESTI2024446, TESTI2024473, TESTI2024476, TESTI2024498, TESTI2024560, TESTI2024567, TESTI2024586, TESTI2024598, TESTI2024641, TESTI2024648, TESTI2024718, TESTI2024744, TESTI2024885, TESTI2024936, TESTI2024978, TESTI2024999, TESTI2025006, TESTI2025013, TESTI2025022, TESTI2025063, TESTI2025117, TESTI2025144, TESTI2025161, TESTI2025174, TESTI2025229, TESTI2025269, TESTI2025365, TESTI2025403, TESTI2025409, TESTI2025422, TESTI2025448, TESTI2025454, TESTI2025486, TESTI2025546, TESTI2025582, TESTI2025609, TESTI2025656, TESTI2025791, TESTI2025846, TESTI2025872, TESTI2025879, TESTI2025911, TESTI2025920, TESTI2025924, TESTI2026014, TESTI2026024, TESTI2026064, TESTI2026077, TESTI2026104, TESTI2026116, TESTI2026134, TESTI2026168, TESTI2026196, TESTI2026215, TESTI2026218, TESTI2026233, TESTI2026291, TESTI2026294, TESTI2026401, TESTI2026403, TESTI2026453, TESTI2026461, TESTI2026491, TESTI2026505, TESTI2026515, TESTI2026525, TESTI2026534, TESTI2026537, TESTI2026589, TESTI2026597, TESTI2026605, TESTI2026647, TESTI2026674, TESTI2026794, TESTI2026824, TESTI2026854, TESTI2026925, TESTI2026936, TESTI2026957, TESTI2027013, TESTI2027019, TESTI2027108, TESTI2027165, TESTI2027171, TESTI2027173, TESTI2027179, TESTI2027185, TESTI2027206, TESTI2027238, TESTI2027239, TESTI2027243, TESTI2027296, TESTI2027378, TESTI2027411, TESTI2027450, TESTI2027496, TESTI2027503, TESTI2027562, TESTI2027615, TESTI2027645, TESTI2027730, TESTI2027736, TESTI2027791, TESTI2027820, TESTI2027828, TESTI2027840, TESTI2028098, TESTI2028151, TESTI2028242, TESTI2028253, TESTI2028254, TESTI2028269, TESTI2028290, TESTI2028296, TESTI2028384, TESTI2028426, TESTI2028488, TESTI2028523, TESTI2028583, TESTI2028613, TESTI2028662, TESTI2028670, TESTI2028705, TESTI2028776, TESTI2028811, TESTI2028891, TESTI2028985, TESTI2028997, TESTI2029131, TESTI2029162, TESTI2029196, TESTI2029201, TESTI2029244, TESTI2029249, TESTI2029252, TESTI2029264, TESTI2029470, TESTI2029672, TESTI2029880, TESTI2030136, TESTI2030322, TESTI2030342, TESTI2030519, TESTI2030556, TESTI2030728, TESTI2030754, TESTI2030770, TESTI2030860, TESTI2030901, TESTI2030917, TESTI2030930, TESTI2031006, TESTI2031060, TESTI2031129, TESTI2031356, TESTI2031418, TESTI2031504, TESTI2031529, TESTI2031687, TESTI2031760, TESTI2031809, TESTI2031919, TESTI2031935, TESTI2031986, TESTI2032044, TESTI2032067, TESTI2032079, TESTI2032681, TESTI2032761, TESTI2032768, TESTI2032774, TESTI2032828, TESTI2033242, TESTI2033254, TESTI2033300, TESTI2033395, TESTI2033453, TESTI2033505, TESTI2033520, TESTI2033641, TESTI2033710, TESTI2033905, TESTI2034187, TESTI2034243, TESTI2034249, TESTI2034357, TESTI2034401, TESTI2034407, TESTI2034506, TESTI2034520, TESTI2034718, TESTI2034730, TESTI2034749, TESTI2034767, TESTI2034774, TESTI2034777, TESTI2034785, TESTI2034799, TESTI2034847, TESTI2034913, TESTI2034931, TESTI2034953, TESTI2034997, TESTI2035003, TESTI2035078, TESTI2035084, TESTI2035107, TESTI2035121, TESTI2035124, TESTI2035183, TESTI2035236, TESTI2035262, TESTI2035309, TESTI2035688, TESTI2035775, TESTI2035793, TESTI2035898, TESTI2035962, TESTI2035981, TESTI2035997, TESTI2036114, TESTI2036129, TESTI2036285, TESTI2036288, TESTI2036513, TESTI2036589, TESTI2036650, TESTI2036684, TESTI2036691, TESTI2036736, TESTI2036822, TESTI2036833, TESTI2036922, TESTI2036951, TESTI2036965, TESTI2037002, TESTI2037055, TESTI2037081, TESTI2037085, TESTI2037103, TESTI2037106, TESTI2037111, TESTI2037209, TESTI2037255, TESTI2037359, TESTI2037375, TESTI2037382, TESTI2037534, TESTI2037569, TESTI2037572, TESTI2037643, TESTI2037657, TESTI2037673, TESTI2037723, TESTI2037819, TESTI2037830, TESTI2037845, TESTI2037877, TESTI2037976, TESTI2038048, TESTI2038065, TESTI2038104, TESTI2038275, TESTI2038388, TESTI2038573, TESTI2038596, TESTI2038623, TESTI2038644, TESTI2038733, TESTI2038858, TESTI2038958, TESTI2039025, TESTI2039026, TESTI2039038, TESTI2039041, TESTI2039060, TESTI2039113, TESTI2039121, TESTI2039209, TESTI2039225, TESTI2039227, TESTI2039276, TESTI2039342, TESTI2039353, TESTI2039544, TESTI2039613, TESTI2039732, TESTI2039738, TESTI2039776, TESTI2039867, TESTI2039908, TESTI2040018, TESTI2040094, TESTI2040102, TESTI2040128, TESTI2040143, TESTI2040297, TESTI2040372, TESTI2040377, TESTI2040424, TESTI2040642, TESTI2040815, TESTI2040897, TESTI2040944, TESTI2040964, TESTI2040983, TESTI2040989, TESTI2041330, TESTI2041362, TESTI2041517, TESTI2041564, TESTI2041664, TESTI2041730, TESTI2041734, TESTI2041778, TESTI2041800, TESTI2041947, TESTI2041956, TESTI2041976, TESTI2042062, TESTI2042149, TESTI2042264, TESTI2042295, TESTI2042302, TESTI2042326, TESTI2042400, TESTI2042450, TESTI2042473, TESTI2042507, TESTI2042508, TESTI2042750, TESTI2042783, TESTI2042806, TESTI2042928, TESTI2042946, TESTI2042958, TESTI2043275, TESTI2043277, TESTI2043282, TESTI2043313, TESTI2043477, TESTI2043585, TESTI2043758, TESTI2043817, TESTI2043857, TESTI2043866, TESTI2043869, TESTI2044064, TESTI2044118, TESTI2044194, TESTI2044306, TESTI2044309, TESTI2044413, TESTI2044418, TESTI2044754, TESTI2044788, TESTI2044796, TESTI2044833, TESTI2044892, TESTI2044920, TESTI2044968, TESTI2045139, TESTI2045155, TESTI2045171, TESTI2045199, TESTI2045353, TESTI2045509, TESTI2045562, TESTI2045611, TESTI2045819, TESTI2045850, TESTI2045920, TESTI2045964, TESTI2045983, TESTI2046100, TESTI2046188, TESTI2046347, TESTI2046352, TESTI2046358, TESTI2046439, TESTI2046535, TESTI2046536, TESTI2046552, TESTI2046569, TESTI2046686, TESTI2046721, TESTI2046732, TESTI2046786, TESTI2046797, TESTI2046863, TESTI2046872, TESTI2047071, TESTI2047141, TESTI2047147, TESTI2047153, TESTI2047212, TESTI2047342, TESTI2047383, TESTI2047792, TESTI2047801, TESTI2047818, TESTI2047824, TESTI2047885, TESTI2047930, TESTI2048105, TESTI2048109, TESTI2048465, TESTI2048603, TESTI2048898, TESTI2049041, TESTI2049062, TESTI2049206, TESTI2049246, TESTI2049277, TESTI2049422, TESTI2049452, TESTI2049469, TESTI2049553, TESTI2049576, TESTI2049857, TESTI2049956, TESTI2050137, TESTI2050681, TESTI2050780, TESTI2050987, TESTI2051148, TESTI2051177, TESTI2051279, TESTI2051488, TESTI2051543, TESTI2051627, TESTI2051742, TESTI2051767, TESTI2051791, TESTI2051806, TESTI2051867, TESTI2051873, TESTI2052110, TESTI2052202, TESTI2052211, TESTI2052256, TESTI2052288, TESTI2052525, TESTI2052670, TESTI2052693, TESTI2052698, TESTI2052799, TESTI2052822, TESTI2052985, TESTI2053151, TESTI2053242, TESTI2053399, TESTI2053526, TESTI2053561, TESTI2053621, TESTI3000002, TESTI3000005, TESTI4000068, TESTI4000079, TESTI4000093, TESTI4000134, TESTI4000137, TESTI4000153, TESTI4000155, TESTI4000157, TESTI4000183; TESTI4000214, TESTI4000215, TESTI4000228, TESTI4000250, TESTI4000288, TESTI4000319, TESTI4000370, TESTI4000394, TESTI4000462, TESTI4000530, TESTI4000534, TESTI4000598, TESTI4000600, TESTI4000621, TESTI4000703, TESTI4000724, TESTI4000957, TESTI4000970, TESTI4001036, TESTI4001037, TESTI4001060, TESTI4001106, TESTI4001148, TESTI4001176, TESTI4001195, TESTI4001201, TESTI4001206, TESTI4001348, TESTI4001441, TESTI4001473, TESTI4001517, TESTI4001527, TESTI4001569, TESTI4001604, TESTI4001665, TESTI4001679, TESTI4001795, TESTI4001923, TESTI4001925, TESTI4001984, TESTI4002003, TESTI4002072, TESTI4002141, TESTI4002195, TESTI4002290, TESTI4002319, TESTI4002491, TESTI4002520, TESTI4002552, TESTI4002647, TESTI4002703, TESTI4002754, TESTI4002868, TESTI4002878, TESTI4002889, TESTI4003279, TESTI4003319, TESTI4003404, TESTI4003565, TESTI4003574, TESTI4003733, TESTI4003796, TESTI4003944, TESTI4004003, TESTI4004031, TESTI4004200, TESTI4004539, TESTI4004626, TESTI4004653, TESTI4004695, TESTI4004722, TESTI4004887, TESTI4004917, TESTI4005015, TESTI4005039, TESTI4005158, TESTI4005317, TESTI4005322, TESTI4005470, TESTI4005500, TESTI4005534, TESTI4005543, TESTI4005628, TESTI4005801, TESTI4005805, TESTI4005857, TESTI4005961, TESTI4006053, TESTI4006079, TESTI4006112, TESTI4006148, TESTI4006219, TESTI4006234, TESTI4006308, TESTI4006326, TESTI4006393, TESTI4006407, TESTI4006412, TESTI4006420, TESTI4006441, TESTI4006473, TESTI4006539, TESTI4006546, TESTI4006567, TESTI4006704, TESTI4006728, TESTI4006802, TESTI4007064, TESTI4007163, TESTI4007176, TESTI4007203, TESTI4007239, TESTI4007369, TESTI4007373, TESTI4007382, TESTI4007404, TESTI4007489, TESTI4007565, TESTI4007671, TESTI4007775, TESTI4007778, TESTI4007799, TESTI4007810, TESTI4007965, TESTI4008007, TESTI4008018, TESTI4008050, TESTI4008058, TESTI4008086, TESTI4008097, TESTI4008176, TESTI4008209, TESTI4008219, TESTI4008250, TESTI4008302, TESTI4008305, TESTI4008401, TESTI4008417, TESTI4008429, TESTI4008573, TESTI4008797, TESTI4008816, TESTI4008840, TESTI4008935, TESTI4008993, TESTI4009022, TESTI4009028, TESTI4009034, TESTI4009123, TESTI4009160, TESTI4009215, TESTI4009283, TESTI4009306, TESTI4009374, TESTI4009406, TESTI4009501, TESTI4009563, TESTI4009608, TESTI4009638, TESTI4009752, TESTI4009881, TESTI4009886, TESTI4009928, TESTI4010076, TESTI4010082, TESTI4010095, TESTI4010211, TESTI4010377, TESTI4010475, TESTI4010544, TESTI4010713, TESTI4010721, TESTI4010789, TESTI4010817, TESTI4010831, TESTI4010902, TESTI4010928, TESTI4011070, TESTI4011072, TESTI4011084, TESTI4011118, TESTI4011246, TESTI4011484, TESTI4011505, TESTI4011532, TESTI4011616, TESTI4011744, TESTI4011745, TESTI4011829, TESTI4011926, TESTI4011956, TESTI4012010, TESTI4012086, TESTI4012258, TESTI4012293, TESTI4012329, TESTI4012382, TESTI4012406, TESTI4012448, TESTI4012451, TESTI4012505, TESTI4012556, TESTI4012623, TESTI4012646, TESTI4012679, TESTI4012911, TESTI4012956, TESTI4012960, TESTI4013365, TESTI4013369, TESTI4013410, TESTI4013602, TESTI4013667, TESTI4013675, TESTI4013685, TESTI4013742, TESTI4013774, TESTI4013817, TESTI4013830, TESTI4013852, TESTI4013894, TESTI4013924, TESTI4013960, TESTI4013962, TESTI4014159, TESTI4014175, TESTI4014265, TESTI4014276, TESTI4014306, TESTI4014392, TESTI4014415, TESTI4014445, TESTI4014553, TESTI4014661, TESTI4014694, TESTI4014801, TESTI4014818, TESTI4014891, TESTI4014924, TESTI4014932, TESTI4014977, TESTI4015012, TESTI4015129, TESTI4015145, TESTI4015204, TESTI4015263, TESTI4015293, TESTI4015299, TESTI4015339, TESTI4015398, TESTI4015442, TESTI4015471, TESTI4015477, TESTI4015600, TESTI4015646, TESTI4015681, TESTI4015688, TESTI4015790, TESTI4016110, TESTI4016238, TESTI4016551, TESTI4016812, TESTI4016822, TESTI4016865, TESTI4016882, TESTI4017001, TESTI4017116, TESTI4017137, TESTI4017229, TESTI4017254, TESTI4017269, TESTI4017380, TESTI4017382, TESTI4017543, TESTI4017575, TESTI4017647, TESTI4017714, TESTI4017763, TESTI4017848, TESTI4017854, TESTI4017901, TESTI4017961, TESTI4017984, TESTI4018101, TESTI4018208, TESTI4018382, TESTI4018436, TESTI4018506, TESTI4018555, TESTI4018751, TESTI4018806, TESTI4018835, TESTI4018859, TESTI4018881, TESTI4018886, TESTI4019140, TESTI4019149, TESTI4019299, TESTI4019417, TESTI4019440, TESTI4019566, TESTI4019657, TESTI4019756, TESTI4019843, TESTI4020092, TESTI4020102, TESTI4020342, TESTI4020460, TESTI4020596, TESTI4020806, TESTI4020819, TESTI4020920, TESTI4021129, TESTI4021197, TESTI4021294, TESTI4021377, TESTI4021456, TESTI4021491, TESTI4021569, TESTI4021713, TESTI4021821, TESTI4022158, TESTI4022577, TESTI4022716, TESTI4022873, TESTI4023096, TESTI4023172, TESTI4023546, TESTI4023555, TESTI4023654, TESTI4023722, TESTI4023762, TESTI4023942, TESTI4024096, TESTI4024240, TESTI4024294, TESTI4024344, TESTI4024387, TESTI4024420, TESTI4024494, TESTI4024874, TESTI4024890, TESTI4024907, TESTI4024930, TESTI4025062, TESTI4025268, TESTI4025401, TESTI4025494, TESTI4025547, TESTI4025731, TESTI4025797, TESTI4025865, TESTI4025908, TESTI4025920, TESTI4026080, TESTI4026192, TESTI4026207, TESTI4026295, TESTI4026390, TESTI4026456, TESTI4026510, TESTI4026524, TESTI4026680, TESTI4026700, TESTI4026762, TESTI4026785, TESTI4027139, TESTI4027170, TESTI4027262, TESTI4027516, TESTI4027557, TESTI4027660, TESTI4027821, TESTI4027969, TESTI4028042, TESTI4028059, TESTI4028062, TESTI4028182, TESTI4028429, TESTI4028612, TESTI4028692, TESTI4028809, TESTI4028823, TESTI4028880, TESTI4028904, TESTI4028938, TESTI4028958, TESTI4028983, TESTI4029023, TESTI4029348, TESTI4029370, TESTI4029528, TESTI4029651, TESTI4029676, TESTI4029690, TESTI4029731, TESTI4029743, TESTI4030069, TESTI4030159, TESTI4030319, TESTI4030505, TESTI4030603, TESTI4030669, TESTI4030673, TESTI4030864, TESTI4031066, TESTI4031173, TESTI4031335, TESTI4031745, TESTI4031818, TESTI4032090, TESTI4032112, TESTI4032128, TESTI4032270, TESTI4032375, TESTI4032834, TESTI4032856, TESTI4032895, TESTI4033146, TESTI4033177, TESTI4033433, TESTI4034172, TESTI4034212, TESTI4034432, TESTI4034495, TESTI4034632, TESTI4034633, TESTI4034912, TESTI4034973, TESTI4035063, TESTI4035065, TESTI4035498, TESTI4035508, TESTI4035581, TESTI4035602, TESTI4035637, TESTI4035649, TESTI4035770, TESTI4035872, TESTI4035895, TESTI4035898, TESTI4035989, TESTI4036012, TESTI4036042, TESTI4036048, TESTI4036315, TESTI4036319, TESTI4036449, TESTI4036767, TESTI4036909, TESTI4037066, TESTI4037188, TESTI4037228, TESTI4037244, TESTI4037727, TESTI4037949, TESTI4038047, TESTI4038099, TESTI4038156, TESTI4038223, TESTI4038258, TESTI4038339, TESTI4038492, TESTI4038721, TESTI4038758, TESTI4038779, TESTI4038818, TESTI4039038, TESTI4039086, TESTI4039451, TESTI4039575, TESTI4039659, TESTI4039744, TESTI4039904, TESTI4040197, TESTI4040363, TESTI4040535, TESTI4040559, TESTI4040598, TESTI4040800, TESTI4040804, TESTI4040939, TESTI4040956, TESTI4041049, TESTI4041053, TESTI4041086, TESTI4041099, TESTI4041143, TESTI4041482, TESTI4041519, TESTI4041624, TESTI4041629, TESTI4041832, TESTI4041844, TESTI4041903, TESTI4041954, TESTI4041984, TESTI4041985, TESTI4041986, TESTI4042098, TESTI4042420, TESTI4042440, TESTI4042444, TESTI4042711, TESTI4042846, TESTI4043067, TESTI4043129, TESTI4043166, TESTI4043203, TESTI4043223, TESTI4043371, TESTI4043378, TESTI4043512, TESTI4043551, TESTI4043710, TESTI4043947, TESTI4044035, TESTI4044076, TESTI4044084, TESTI4044123, TESTI4044186, TESTI4044234, TESTI4044291, TESTI4044296, TESTI4044300, TESTI4044682, TESTI4044770, TESTI4045168, TESTI4045312, TESTI4045330, TESTI4045470, TESTI4045701, TESTI4045908, TESTI4045955, TESTI4045982, TESTI4046073, TESTI4046090, TESTI4046240, TESTI4046245, TESTI4046253, TESTI4046282, TESTI4046328, TESTI4046450, TESTI4046457, TESTI4046487, TESTI4046502, TESTI4046523, TESTI4046873, TESTI4046884, TESTI4046896, TESTI4046903, TESTI4046962, TESTI4047069, TESTI4047119, TESTI4047305, TESTI4047328, TESTI4047437, TESTI4047569, TESTI4047746, TESTI4047808, TUTER1000014, TUTER1000137, TUTER2000057, TUTER2000283, TUTER2000425, TUTER2000916, TUTER2001286, TUTER2001341, TUTER2001387, TUTER2001433, TUTER2001461, TUTER2002028, TUTER2002074, TUTER2002158, TUTER2002228, TUTER2002356, TUTER2002729, UMVEN1000122, UMVEN1000156, UMVEN1000186, UMVEN2000046, UMVEN2000069, UTERU1000015, UTERU1000024, UTERU1000031, UTERU1000032, UTERU1000057, UTERU1000065, UTERU1000077, UTERU1000093, UTERU1000096, UTERU1000109, UTERU1000131, UTERU1000138, UTERU1000148, UTERU1000160, UTERU1000183, UTERU1000187, UTERU1000192, UTERU1000249, UTERU1000337, UTERU1000339, UTERU2000023, UTERU2000047, UTERU2000074, UTERU2000099, UTERU2000154, UTERU2000197, UTERU2000218, UTERU2000238, UTERU2000243, UTERU2000300, UTERU2000329, UTERU2000332, UTERU2000338, UTERU2000349, UTERU2000377, UTERU2000393, UTERU2000418, UTERU2000465, UTERU2000485, UTERU2000517, UTERU2000524, UTERU2000539, UTERU2000541, UTERU2000542, UTERU2000546, UTERU2000550, UTERU2000569, UTERU2000607, UTERU2000629, UTERU2000649, UTERU2000663, UTERU2000696, UTERU2000794, UTERU2000830, UTERU2000844, UTERU2000922, UTERU2000925, UTERU2001024, UTERU2001110, UTERU2001176, UTERU2001281, UTERU2001389, UTERU2001409, UTERU2001412, UTERU2001504, UTERU2001658, UTERU2001747, UTERU2001876, UTERU2002001, UTERU2002011, UTERU2002176, UTERU2002198, UTERU2002332, UTERU2002473, UTERU2002547, UTERU2002693, UTERU2002733, UTERU2002736, UTERU2002737, UTERU2002826, UTERU2002841, UTERU2002964, UTERU2002993, UTERU2003035, UTERU2003057, UTERU2003126, UTERU2003135, UTERU2003321, UTERU2003399, UTERU2003411, UTERU2003456, UTERU2003577, UTERU2003926, UTERU2003973, UTERU2004015, UTERU2004039, UTERU2004061, UTERU2004073, UTERU2004163, UTERU2004299, UTERU2004461, UTERU2004520, UTERU2004564, UTERU2004664, UTERU2004688, UTERU2004698, UTERU2004929, UTERU2005050, UTERU2005069, UTERU2005179, UTERU2005346, UTERU2005446, UTERU2005450, UTERU2005533, UTERU2005664, UTERU2005822, UTERU2005903, UTERU2005905, UTERU2006103, UTERU2006137, UTERU2006182, UTERU2006400, UTERU2006412, UTERU2006429, UTERU2006486, UTERU2006524, UTERU2006547, UTERU2006568, UTERU2006643, UTERU2006651, UTERU2006705, UTERU2006899, UTERU2007004, UTERU2007075, UTERU2007081, UTERU2007128, UTERU2007253, UTERU2007267, UTERU2007444, UTERU2007499, UTERU2007639, UTERU2007724, UTERU2007924, UTERU2007942, UTERU2008018, UTERU2008019, UTERU2008027, UTERU2008040, UTERU2008077, UTERU2008130, UTERU2008347, UTERU2008516, UTERU2008561, UTERU2008653, UTERU2008705, UTERU2008707, UTERU2008747, UTERU2008785, UTERU2008845, UTERU2008901, UTERU2008930, UTERU2008938, UTERU2008939, UTERU2008962, UTERU2009094, UTERU2009120, UTERU2009131, UTERU2009147, UTERU2009206, UTERU2009283, UTERU2009414, UTERU2009483, UTERU2009510, UTERU2009538, UTERU2009540, UTERU2009776, UTERU2009904, UTERU2009951, UTERU2010115, UTERU2010124, UTERU2010164, UTERU2010231, UTERU2010304, UTERU2010320, UTERU2010431, UTERU2010525, UTERU2010651, UTERU2010724, UTERU2010747, UTERU2011195, UTERU2011199, UTERU2011261, UTERU2011410, UTERU2011574, UTERU2011657, UTERU2011806, UTERU2011811, UTERU2011897, UTERU2011962, UTERU2011968, UTERU2012031, UTERU2012101, UTERU2012114, UTERU2012252, UTERU2012333, UTERU2012407, UTERU2012526, UTERU2012581, UTERU2012610, UTERU2012615, UTERU2012703, UTERU2012715, UTERU2012786, UTERU2012856, UTERU2012890, UTERU2012938, UTERU2012976, UTERU2013048, UTERU2013078, UTERU2013231, UTERU2013262, UTERU2013280, UTERU2013322, UTERU2013483, UTERU2013491, UTERU2013502, UTERU2013586, UTERU2013926, UTERU2013976, UTERU2014001, UTERU2014024, UTERU2014167, UTERU2014223, UTERU2014398, UTERU2014464, UTERU2014548, UTERU2014601, UTERU2014631, UTERU2014668, UTERU2014678, UTERU2014728, UTERU2014898, UTERU2014998, UTERU2015062, UTERU2015087, UTERU2015108, UTERU2015190, UTERU2015198, UTERU2015202, UTERU2015405, UTERU2015640, UTERU2015880, UTERU2016147, UTERU2016157, UTERU2016426, UTERU2016464, UTERU2016669, UTERU2016757, UTERU2016761, UTERU2016896, UTERU2016902, UTERU2016979, UTERU2016981, UTERU2017123, UTERU2017303, UTERU2017421, UTERU2017492, UTERU2017613, UTERU2017623, UTERU2017632, UTERU2017761, UTERU2017762, UTERU2017810, UTERU2017988, UTERU2018127, UTERU2018180, UTERU2018200, UTERU2018333, UTERU2018364, UTERU2018514, UTERU2018522, UTERU2018523, UTERU2018544, UTERU2018566, UTERU2018609, UTERU2018674, UTERU2018712, UTERU2018784, UTERU2018789, UTERU2018811, UTERU2018867, UTERU2018881, UTERU2018955, UTERU2019038, UTERU2019163, UTERU2019257, UTERU2019453, UTERU2019491, UTERU2019534, UTERU2019681, UTERU2019706, UTERU2019710, UTERU2019940, UTERU2019959, UTERU2019964, UTERU2020226, UTERU2020242, UTERU2020292, UTERU2020351, UTERU2020491, UTERU2020718, UTERU2021163, UTERU2021380, UTERU2021649, UTERU2021820, UTERU2022020, UTERU2022773, UTERU2022955, UTERU2022981, UTERU2023039, UTERU2023045, UTERU2023262, UTERU2023687, UTERU2023712, UTERU2023941, UTERU2024002, UTERU2024042, UTERU2024141, UTERU2024481, UTERU2024758, UTERU2024820, UTERU2024881, UTERU2025025, UTERU2025041, UTERU2025301, UTERU2025366, UTERU2025415, UTERU2025579, UTERU2025645, UTERU2025891, UTERU2026025, UTERU2026090, UTERU2026142, UTERU2026203, UTERU2026775, UTERU2027023, UTERU2027369, UTERU2027591, UTERU2027616, UTERU2027941, UTERU2028377, UTERU2029503, UTERU2029660, UTERU2029742, UTERU2029953, UTERU2030213, UTERU2030270, UTERU2030280, UTERU2031060, UTERU2031268, UTERU2031295, UTERU2031521, UTERU2031611, UTERU2031703, UTERU2031834, UTERU2031851, UTERU2032075, UTERU2032220, UTERU2032279, UTERU2032726, UTERU2033172, UTERU2033375, UTERU2033382, UTERU2033420, UTERU2033530, UTERU2033577, UTERU2034053, UTERU2034695, UTERU2035187, UTERU2035231, UTERU2035306, UTERU2035323, UTERU2035328, UTERU2035331, UTERU2035452, UTERU2035469, UTERU2035503, UTERU2035745, UTERU2035908, UTERU2035926, UTERU2035978, UTERU2036089, UTERU2036507, UTERU2036512, UTERU2036530, UTERU2036623, UTERU2036690, UTERU2037224, UTERU2037361, UTERU2037423, UTERU2037577, UTERU2037674, UTERU2037791, UTERU2037843, UTERU2038171, UTERU2038251, UTERU3000226, UTERU3000402, UTERU3000665, UTERU3000670, UTERU3000727, UTERU3000828, UTERU3000844, UTERU3000899, UTERU3000959, UTERU3001029, UTERU3001053, UTERU3001059, UTERU3001158, UTERU3001240, UTERU3001394, UTERU3001558, UTERU3001571, UTERU3001585, UTERU3001632, UTERU3001652, UTERU3001766, UTERU3001988, UTERU3002209, UTERU3002383, UTERU3002600, UTERU3002620, UTERU3002667, UTERU3002701, UTERU3002731, UTERU3002768, UTERU3002993, UTERU3003116, UTERU3003178, UTERU3003465, UTERU3003495, UTERU3003523, UTERU3003774, UTERU3003776, UTERU3004384, UTERU3004418, UTERU3004477, UTERU3004523, UTERU3004616, UTERU3004635, UTERU3004709, UTERU3004938, UTERU3004992, UTERU3005159, UTERU3005205, UTERU3005230, UTERU3005264, UTERU3005460, UTERU3005536, UTERU3005585, UTERU3005767, UTERU3005907, UTERU3005970, UTERU3006008, UTERU3006228, UTERU3006308, UTERU3006538, UTERU3006640, UTERU3006687, UTERU3006720, UTERU3006798, UTERU3006884, UTERU3007108, UTERU3007134, UTERU3007419, UTERU3007640, UTERU3007731, UTERU3007913, UTERU3008280, UTERU3008463, UTERU3008660, UTERU3008671, UTERU3008722, UTERU3008917, UTERU3009259, UTERU3009490, UTERU3009517, UTERU3009690, UTERU3009775, UTERU3009871, UTERU3009979, UTERU3009987, UTERU3010029, UTERU3010526, UTERU3010604, UTERU3010892, UTERU3010919, UTERU3011063, UTERU3011092, UTERU3011273, UTERU3011398, UTERU3011558, UTERU3011795, UTERU3011837, UTERU3012293, UTERU3012414, UTERU3012476, UTERU3012599, UTERU3012999, UTERU3013167, UTERU3013781, UTERU3014274, UTERU3014446, UTERU3014611, UTERU3014647, UTERU3014791, UTERU3014906, UTERU3015011, UTERU3015086, UTERU3015299, UTERU3015412, UTERU3015500, UTERU3015647, UTERU3015844, UTERU3016070, UTERU3016273, UTERU3016274, UTERU3016308, UTERU3016789, UTERU3017176, UTERU3017441, UTERU3017626, UTERU3017995, UTERU3018154, UTERU3018255, UTERU3018616, UTERU3019078

[0711] Of the 17,176 genes that include the cDNAs of the present invention, genes whose expression levels were high enough to detect in each of the TUTER, UMVEN, and UTERU libraries were analyzed for expression frequency. The analysis results are described below. Each is a relative value, where the expression level over all tissues is taken as 100. The larger this value, the greater the level of expression.

TABLE 40

| Clone Name | TUTER | UMVEN | UTERU |
|---|---|---|---|
| 3NB691000173 | 0 | 0.000 | 0.942 |
| 3NB692000281 | 9.812 | 0 | 0.525 |
| 3NB692000545 | 0 | 0.000 | 3.365 |
| 3NB692000912 | 0 | 0.000 | 0.560 |
| 3NB692001334 | 5.982 | 0 | 0.000 |
| 3NB692001853 | 0 | 0.000 | 3.123 |
| ADRGL2000006 | 0 | 0.000 | 1.240 |
| ADRGL2000042 | 0 | 0.000 | 3.029 |
| ADRGL2000328 | 0 | 0.000 | 8.029 |
| ADRGL2002013 | 0 | 0.000 | 10.729 |
| ADRGL2004676 | 0 | 0.000 | 5.199 |
| ADRGL2009273 | 0 | 0.000 | 1.657 |
| ASTRO2000046 | 0 | 0.000 | 0.487 |
| ASTRO2000480 | 0 | 0.000 | 3.377 |
| ASTRO2000801 | 0 | 0.000 | 1.217 |
| ASTRO2000914 | 43.380 | 0 | 0.000 |
| ASTRO2001076 | 0 | 0.000 | 1.695 |
| ASTRO2001823 | 0 | 0.000 | 1.731 |
| ASTRO2003024 | 21.123 | 0 | 2.261 |
| ASTRO2003316 | 0 | 0.000 | 10.555 |
| ASTRO2003925 | 0 | 0.000 | 25.609 |
| ASTRO2005863 | 0 | 0.000 | 4.534 |
| ASTRO2006732 | 0 | 0.000 | 18.293 |
| ASTRO2007047 | 0 | 0.000 | 4.985 |
| ASTRO2007948 | 0 | 0.000 | 2.987 |
| ASTRO2008216 | 0 | 0.000 | 3.806 |
| ASTRO2008508 | 0 | 0.000 | 10.726 |
| ASTRO2010582 | 0 | 0.000 | 20.644 |
| ASTRO2010819 | 0 | 0.000 | 3.210 |
| ASTRO2013585 | 0 | 0.000 | 0.581 |
| ASTRO2016491 | 0 | 0.000 | 0.601 |
| BGGI12000054 | 0 | 0.000 | 0.281 |
| BGGI12001002 | 0 | 0.000 | 4.235 |
| BLADE2004722 | 0 | 0.000 | 11.937 |
| BLADE2006412 | 0 | 0.000 | 7.241 |
| BLADE2007589 | 0 | 0.000 | 11.792 |
| BNGH41000137 | 0 | 0.000 | 15.524 |
| BNGH42000739 | 0 | 0.000 | 0.742 |
| BNGH42002487 | 0 | 0.000 | 11.163 |
| BNGH42006135 | 0 | 0.000 | 7.087 |
| BNGH42007460 | 0 | 0.000 | 2.404 |
| BNGH42007709 | 0 | 0.000 | 1.373 |
| BNGH42007788 | 0 | 0.000 | 3.672 |
| BRACE1000042 | 0 | 0.000 | 7.262 |
| BRACE1000070 | 0 | 0.000 | 2.132 |
| BRACE1000131 | 0 | 0.000 | 3.727 |
| BRACE1000186 | 0 | 0.000 | 2.579 |
| BRACE2000347 | 0 | 0.000 | 6.166 |
| BRACE2000750 | 0 | 0.000 | 24.547 |
| BRACE2001065 | 0 | 0.000 | 7.920 |
| BRACE2001143 | 0 | 0.000 | 1.772 |
| BRACE2001188 | 0 | 0.000 | 3.367 |
| BRACE2001692 | 0 | 0.000 | 0.722 |
| BRACE2001855 | 0 | 0.000 | 1.372 |
| BRACE2001971 | 0 | 0.000 | 2.675 |
| BRACE2002176 | 0 | 0.000 | 62.692 |
| BRACE2002409 | 0 | 0.000 | 62.692 |
| BRACE2002478 | 0 | 0.000 | 17.287 |
| BRACE2002649 | 0 | 0.000 | 12.628 |
| BRACE2002677 | 0 | 0.000 | 6.908 |
| BRACE2003172 | 0 | 0.000 | 6.590 |
| BRACE2003254 | 0 | 0.000 | 1.080 |
| BRACE2003512 | 0 | 0.000 | 77.068 |
| BRACE2003516 | 0 | 0.000 | 62.692 |
| BRACE2003527 | 0 | 0.000 | 3.074 |
| BRACE2003785 | 0 | 0.000 | 1.159 |
| BRACE2003846 | 0 | 0.000 | 0.777 |
| BRACE2003892 | 0 | 0.000 | 2.603 |
| BRACE2003904 | 0 | 0.000 | 3.092 |
| BRACE2005087 | 0 | 0.000 | 8.660 |
| BRACE2005196 | 0 | 0.000 | 37.926 |
| BRACE2005231 | 0 | 0.000 | 3.808 |
| BRACE2005290 | 0 | 0.000 | 30.346 |
| BRACE2005719 | 0 | 0.000 | 3.542 |
| BRACE2006084 | 0 | 0.000 | 3.661 |
| BRACE2006354 | 0 | 0.000 | 7.422 |
| BRACE2006397 | 6.578 | 0 | 0.352 |
| BRACE2006537 | 0 | 0.000 | 2.567 |
| BRACE2006636 | 0 | 0.000 | 16.351 |
| BRACE2006900 | 0 | 0.000 | 1.227 |
| BRACE2006944 | 0 | 0.000 | 13.911 |
| BRACE2007064 | 0 | 0.000 | 3.876 |
| BRACE2007174 | 0 | 0.000 | 18.633 |
| BRACE2007518 | 0 | 0.000 | 2.707 |
| BRACE2007798 | 0 | 0.000 | 1.234 |
| BRACE2008653 | 0 | 0.000 | 4.403 |
| BRACE2008941 | 0 | 0.000 | 11.920 |
| BRACE2009037 | 0 | 0.000 | 0.697 |
| BRACE2009517 | 0 | 0.000 | 6.470 |
| BRACE2011183 | 0 | 0.000 | 7.667 |
| BRACE2012528 | 0 | 0.000 | 0.566 |
| BRACE2017397 | 0 | 0.000 | 11.252 |
| BRACE2017574 | 0 | 0.000 | 6.110 |
| BRACE2019147 | 0 | 0.000 | 2.554 |
| BRACE2020584 | 0 | 0.000 | 62.692 |
| BRACE2022333 | 0 | 0.000 | 10.589 |
| BRACE2022638 | 0 | 0.000 | 2.667 |
| BRACE2027896 | 0 | 0.000 | 30.503 |
| BRACE2030341 | 0 | 0.000 | 16.499 |
| BRACE2037310 | 0 | 0.000 | 23.401 |
| BRACE2045445 | 0 | 0.000 | 62.692 |
| BRACE3004371 | 0 | 0.000 | 4.481 |
| BRACE3005938 | 0 | 0.000 | 1.313 |
| BRACE3007258 | 0 | 0.000 | 15.521 |
| BRACE3008772 | 0 | 0.000 | 62.692 |
| BRACE3010428 | 0 | 0.000 | 5.461 |
| BRACE3027478 | 0 | 0.000 | 19.089 |
| BRACE3040863 | 0 | 0.000 | 21.335 |
| BRALZ2009446 | 0 | 0.000 | 5.561 |
| BRALZ2009482 | 0 | 0.000 | 0.443 |
| BRALZ2017359 | 0 | 0.000 | 24.816 |
| BRAMY2000585 | 0 | 0.000 | 2.929 |
| BRAMY2004363 | 0 | 0.000 | 12.191 |
| BRAMY2004521 | 0 | 0.000 | 5.654 |
| BRAMY2006366 | 0 | 0.000 | 10.987 |
| BRAMY2009123 | 0 | 0.000 | 54.206 |
| BRAMY2009934 | 0 | 0.000 | 7.051 |
| BRAMY2011105 | 67.510 | 0 | 0.000 |
| BRAMY2012536 | 0 | 0.000 | 0.688 |
| BRAMY2013659 | 0 | 0.000 | 34.645 |
| BRAMY2019989 | 0 | 0.000 | 1.150 |
| BRAMY2020427 | 0 | 0.000 | 0.706 |
| BRAMY2022168 | 0 | 0.000 | 16.134 |
| BRAMY2026685 | 0 | 0.000 | 2.956 |
| BRAMY2028740 | 0 | 0.000 | 1.110 |
| BRAMY2031516 | 0 | 0.000 | 8.809 |
| BRAMY2032087 | 0 | 0.000 | 4.333 |
| BRAMY2040095 | 0 | 0.000 | 0.815 |
| BRAMY3002458 | 0 | 0.000 | 14.807 |
| BRAMY3005184 | 0 | 0.000 | 26.725 |
| BRAWH1000040 | 0 | 0.000 | 2.462 |
| BRAWH1000093 | 10.279 | 0 | 2.200 |
| BRAWH2000082 | 0 | 0.000 | 0.457 |
| BRAWH2000488 | 0 | 0.000 | 12.025 |
| BRAWH2000588 | 0 | 0.000 | 1.496 |
| BRAWH2000633 | 0 | 0.000 | 1.581 |
| BRAWH2000697 | 0 | 0.000 | 1.206 |
| BRAWH2000839 | 0 | 0.000 | 0.980 |
| BRAWH2001092 | 0 | 0.000 | 1.677 |
| BRAWH2001141 | 0 | 0.000 | 6.061 |
| BRAWH2001412 | 0 | 0.000 | 17.933 |
| BRAWH2001439 | 0 | 0.000 | 1.227 |
| BRAWH2002601 | 0 | 0.000 | 5.932 |
| BRAWH2003693 | 0 | 0.000 | 4.080 |
| BRAWH2004078 | 0 | 0.000 | 6.285 |
| BRAWH2005578 | 0 | 0.000 | 15.983 |
| BRAWH2005661 | 0 | 0.000 | 1.907 |
| BRAWH2007605 | 0 | 0.000 | 2.446 |
| BRAWH2008058 | 0 | 0.000 | 27.939 |
| BRAWH2009238 | 0 | 0.000 | 6.217 |
| BRAWH2011343 | 0 | 0.000 | 8.367 |
| BRAWH2012698 | 0 | 0.000 | 22.868 |
| BRAWH2014188 | 0 | 0.000 | 11.100 |
| BRAWH2014473 | 0 | 0.000 | 54.394 |
| BRAWH2014645 | 0 | 0.000 | 2.522 |
| BRAWH2016166 | 0 | 0.000 | 18.040 |
| BRAWH2017304 | 0 | 0.000 | 19.804 |
| BRAWH2017685 | 0 | 0.000 | 1.211 |
| BRAWH2018526 | 0 | 0.000 | 0.367 |
| BRAWH2018745 | 0 | 0.000 | 54.394 |
| BRAWH3000314 | 0 | 0.000 | 28.447 |
| BRAWH3001326 | 0 | 0.000 | 54.394 |
| BRAWH3002574 | 0 | 0.000 | 7.885 |
| BRAWH3002853 | 0 | 0.000 | 1.764 |
| BRAWH3003727 | 0 | 0.000 | 11.993 |
| BRAWH3004350 | 0 | 0.000 | 19.774 |
| BRAWH3016271 | 0 | 0.000 | 6.433 |
| BRAWH3021545 | 0 | 0.000 | 17.404 |
| BRAWH3026529 | 0 | 0.000 | 54.394 |
| BRAWH3029806 | 0 | 0.000 | 10.629 |
| BRCAN2003944 | 0 | 0.000 | 0.336 |
| BRCAN2009432 | 29.345 | 0 | 3.141 |
| BRCAN2011946 | 0 | 0.000 | 7.542 |
| BRCAN2021024 | 0 | 0.000 | 24.461 |
| BRCAN2022126 | 0 | 0.000 | 5.791 |
| BRCAN2024572 | 0 | 0.000 | 3.257 |
| BRCAN2028355 | 0 | 0.000 | 1.762 |
| BRCOC1000040 | 0 | 0.000 | 14.069 |
| BRCOC2000333 | 0 | 0.000 | 14.286 |
| BRCOC2003187 | 0 | 0.000 | 0.938 |
| BRCOC2010730 | 0 | 0.000 | 12.892 |
| BRCOC2012172 | 0 | 0.000 | 6.710 |
| BRCOC2012551 | 0 | 0.000 | 8.602 |
| BRCOC2015597 | 0 | 0.000 | 25.187 |
| BRHIP2001099 | 0 | 0.000 | 8.268 |
| BRHIP2003062 | 0 | 0.000 | 56.647 |
| BRHIP2007305 | 0 | 0.000 | 1.350 |
| BRHIP2010487 | 91.660 | 0 | 0.000 |
| BRHIP2010571 | 0 | 0.000 | 18.366 |
| BRHIP2011491 | 0 | 0.000 | 0.986 |
| BRHIP2011616 | 0 | 0.000 | 53.896 |
| BRHIP2015245 | 0 | 0.000 | 5.663 |
| BRHIP2018712 | 0 | 0.000 | 9.661 |
| BRHIP2019149 | 0 | 0.000 | 13.172 |
| BRHIP2020799 | 0 | 0.000 | 12.072 |
| BRHIP2021762 | 0 | 0.000 | 6.646 |
| BRHIP2022228 | 0 | 0.000 | 10.898 |
| BRHIP2022326 | 0 | 0.000 | 1.015 |
| BRHIP2023888 | 0 | 0.000 | 0.439 |
| BRHIP2024742 | 0 | 0.000 | 1.487 |
| BRHIP2024911 | 0 | 0.000 | 11.054 |
| BRHIP2027017 | 0 | 0.000 | 13.730 |
| BRHIP3000017 | 0 | 0.000 | 15.777 |
| BRHIP3000377 | 0 | 0.000 | 6.870 |
| BRHIP3001076 | 0 | 0.000 | 53.896 |
| BRHIP3002141 | 0 | 0.000 | 18.713 |
| BRHIP3005307 | 0 | 0.000 | 53.896 |
| BRHIP3007223 | 0 | 0.000 | 2.405 |
| BRHIP3007586 | 0 | 0.000 | 4.116 |
| BRHIP3008344 | 0 | 0.000 | 53.896 |
| BRHIP3008565 | 0 | 0.000 | 53.896 |
| BRHIP3012997 | 0 | 87.379 | 0.000 |
| BRHIP3017855 | 0 | 0.000 | 27.401 |
| BRHIP3020046 | 0 | 0.000 | 1.208 |
| BRSSN2000295 | 0 | 0.000 | 8.260 |
| BRSSN2000498 | 0 | 0.000 | 2.610 |
| BRSSN2001213 | 0 | 0.000 | 24.268 |
| BRSSN2001869 | 0 | 0.000 | 3.600 |
| BRSSN2006892 | 0 | 0.000 | 18.468 |
| BRSSN2009518 | 0 | 0.000 | 2.054 |
| BRSSN2010019 | 0 | 0.000 | 13.842 |
| BRSSN2014685 | 0 | 0.000 | 16.936 |
| BRSSN2017422 | 0 | 0.000 | 17.148 |
| BRSTN2001067 | 0 | 0.000 | 7.384 |
| BRSTN2010089 | 0 | 0.000 | 7.869 |
| BRSTN2011961 | 0 | 0.000 | 0.345 |
| BRSTN2012069 | 3.583 | 1.784 | 0.271 |
| BRSTN2012174 | 0 | 0.000 | 0.482 |
| BRSTN2013502 | 0 | 0.000 | 5.797 |
| BRSTN2013931 | 0 | 0.000 | 3.457 |
| BRSTN2016470 | 0 | 0.000 | 0.522 |
| BRSTN2016892 | 0 | 0.000 | 3.559 |
| BRTHA2000057 | 0 | 0.000 | 51.819 |
| BRTHA2004361 | 0 | 0.000 | 51.819 |
| BRTHA2005831 | 0 | 0.000 | 51.819 |
| BRTHA2005864 | 0 | 0.000 | 1.935 |
| BRTHA2010608 | 0 | 0.000 | 51.819 |
| BRTHA2012183 | 0 | 0.000 | 51.819 |
| BRTHA2012714 | 0 | 0.000 | 5.980 |
| BRTHA2017178 | 0 | 0.000 | 51.819 |
| BRTHA3003023 | 0 | 0.000 | 2.410 |
| BRTHA3003074 | 0 | 0.000 | 13.429 |
| BRTHA3003736 | 0 | 0.000 | 5.131 |
| BRTHA3004307 | 0 | 0.000 | 17.964 |
| BRTHA3011265 | 0 | 0.000 | 10.176 |
| BRTHA3020314 | 0 | 0.000 | 12.144 |
| BRTHA3023403 | 0 | 0.000 | 26.579 |
| BRTHA3026507 | 0 | 0.000 | 4.167 |
| BRTHA3027879 | 0 | 0.000 | 51.819 |
| CHONS2002829 | 0 | 0.000 | 11.691 |
| CTONG1000052 | 0 | 0.000 | 2.162 |
| CTONG1000087 | 0 | 0.000 | 2.494 |
| CTONG1000094 | 0 | 0.000 | 0.464 |
| CTONG1000137 | 0 | 0.000 | 39.037 |
| CTONG1000180 | 0 | 0.000 | 28.641 |
| CTONG1000241 | 0 | 0.000 | 7.590 |
| CTONG1000277 | 0 | 0.000 | 24.668 |
| CTONG1000467 | 0 | 0.000 | 10.248 |
| CTONG2000411 | 0 | 0.000 | 6.864 |
| CTONG2000508 | 0 | 0.000 | 4.709 |
| CTONG2001748 | 0 | 0.000 | 2.493 |
| CTONG2001932 | 0 | 0.000 | 12.322 |
| CTONG2002073 | 32.643 | 0 | 1.747 |
| CTONG2002270 | 0 | 0.000 | 0.633 |
| CTONG2002744 | 0 | 0.000 | 0.702 |
| CTONG2002766 | 0 | 0.000 | 14.092 |
| CTONG2002803 | 32.814 | 0 | 0.000 |
| CTONG2003298 | 0 | 0.000 | 1.731 |
| CTONG2003348 | 0 | 0.000 | 39.037 |
| CTONG2003517 | 0 | 0.000 | 13.371 |
| CTONG2003524 | 0 | 0.000 | 1.922 |
| CTONG2004423 | 0 | 0.000 | 13.705 |
| CTONG2005145 | 0 | 0.000 | 29.265 |
| CTONG2005615 | 0 | 0.000 | 5.671 |
| CTONG2006235 | 0 | 0.000 | 1.954 |
| CTONG2006377 | 0 | 0.000 | 14.002 |
| CTONG2006562 | 0 | 0.000 | 5.010 |
| CTONG2006932 | 0 | 0.000 | 2.625 |
| CTONG2007078 | 0 | 0.000 | 3.048 |
| CTONG2007500 | 0 | 0.000 | 8.072 |
| CTONG2008343 | 0 | 0.000 | 39.037 |
| CTONG2008398 | 0 | 0.000 | 0.912 |
| CTONG2008518 | 0 | 0.000 | 4.593 |
| CTONG2008689 | 0 | 0.000 | 24.924 |
| CTONG2009529 | 0 | 0.000 | 7.541 |
| CTONG2009923 | 0 | 0.000 | 39.037 |
| CTONG2009938 | 0 | 0.000 | 23.863 |
| CTONG2010348 | 0 | 0.000 | 6.336 |
| CTONG2010408 | 0 | 0.000 | 10.219 |
| CTONG2010649 | 0 | 0.000 | 5.595 |
| CTONG2010821 | 0 | 0.000 | 2.557 |
| CTONG2011801 | 0 | 0.000 | 3.532 |
| CTONG2011825 | 0 | 0.000 | 10.239 |
| CTONG2012452 | 7.936 | 0 | 0.000 |
| CTONG2012847 | 38.378 | 0 | 2.054 |
| CTONG2012879 | 0 | 0.000 | 4.056 |
| CTONG2012996 | 0 | 0.000 | 3.482 |
| CTONG2013128 | 0 | 0.000 | 39.037 |
| CTONG2013156 | 0 | 0.000 | 24.668 |
| CTONG2013907 | 0 | 0.000 | 2.571 |
| CTONG2013934 | 0 | 0.000 | 8.273 |
| CTONG2014369 | 0 | 0.000 | 4.963 |
| CTONG2014898 | 0 | 0.000 | 13.759 |
| CTONG2015345 | 0 | 0.000 | 10.182 |
| CTONG2016056 | 0 | 0.000 | 2.372 |
| CTONG2016408 | 0 | 0.000 | 4.416 |
| CTONG2016575 | 0 | 0.000 | 1.779 |
| CTONG2016869 | 0 | 0.000 | 3.150 |
| CTONG2017094 | 0 | 0.000 | 2.666 |
| CTONG2017429 | 0 | 0.000 | 8.607 |
| CTONG2017998 | 0 | 0.000 | 5.976 |
| CTONG2018211 | 0 | 0.000 | 4.068 |
| CTONG2018637 | 0 | 0.000 | 15.649 |
| CTONG2018898 | 0 | 0.000 | 2.298 |
| CTONG2019822 | 0 | 0.000 | 7.755 |
| CTONG2020378 | 0 | 0.000 | 19.250 |
| CTONG2020411 | 0 | 0.000 | 32.844 |
| CTONG2020484 | 0 | 55.423 | 0.000 |
| CTONG2020560 | 0 | 0.000 | 5.368 |
| CTONG2024031 | 0 | 0.000 | 6.165 |
| CTONG2027263 | 0 | 0.000 | 19.641 |
| CTONG2028124 | 0 | 0.000 | 2.997 |
| CTONG3001123 | 0 | 0.000 | 9.359 |
| CTONG3002518 | 0 | 0.000 | 10.064 |
| CTONG3004317 | 0 | 0.000 | 39.037 |
| CTONG3008894 | 0 | 0.000 | 0.867 |
| CTONG3009028 | 0 | 0.000 | 3.839 |
| CTONG3009239 | 0 | 0.000 | 1.722 |
| D30ST3000258 | 0 | 0.000 | 22.242 |
| D60ST2000464 | 0 | 0.000 | 1.307 |
| D90ST2002608 | 0 | 0.000 | 2.657 |
| D90ST2003791 | 0 | 0.000 | 7.297 |
| DFNES1000185 | 29.393 | 0 | 0.000 |
| DFNES2000011 | 0 | 0.000 | 4.565 |
| DFNES2000426 | 0 | 0.000 | 15.059 |
| DFNES2000443 | 0 | 0.000 | 0.810 |
| DFNES2001829 | 0 | 0.000 | 11.006 |
| DFNES2006346 | 0 | 0.000 | 8.425 |
| DFNES2007634 | 0 | 0.000 | 7.421 |
| FCBBF1000024 | 0 | 0.000 | 5.237 |
| FCBBF1000027 | 0 | 0.000 | 2.621 |
| FCBBF1000061 | 0 | 0.000 | 2.805 |
| FCBBF1000182 | 0 | 0.000 | 10.114 |
| FCBBF1000197 | 0 | 0.000 | 2.548 |
| FCBBF1000294 | 0 | 0.000 | 1.284 |
| FCBBF1000367 | 0 | 0.000 | 1.812 |
| FCBBF1000412 | 0 | 0.000 | 2.308 |
| FCBBF1000425 | 0 | 0.000 | 6.226 |
| FCBBF1000466 | 14.193 | 0 | 0.760 |
| FCBBF1000574 | 0 | 0.000 | 4.952 |
| FCBBF1000760 | 0 | 0.000 | 0.781 |
| FCBBF2000087 | 0 | 0.000 | 3.441 |
| FCBBF2000591 | 0 | 0.000 | 0.342 |
| FCBBF2000685 | 0 | 0.000 | 8.114 |
| FCBBF2000885 | 0 | 0.000 | 3.661 |
| FCBBF2001001 | 0 | 0.000 | 11.399 |
| FCBBF2001291 | 0 | 0.000 | 2.269 |
| FCBBF2006380 | 0 | 0.000 | 39.231 |
| FCBBF3000115 | 0 | 0.000 | 9.520 |
| FCBBF3000536 | 0 | 0.000 | 3.179 |
| FCBBF3001470 | 0 | 0.000 | 1.619 |
| FCBBF3003800 | 0 | 0.000 | 1.409 |
| FCBBF3004473 | 25.604 | 0 | 1.370 |
| FCBBF3004847 | 0 | 0.000 | 39.231 |
| FCBBF3006821 | 0 | 0.000 | 13.636 |
| FCBBF3007244 | 0 | 0.000 | 9.258 |
| FCBBF3007859 | 0 | 0.000 | 7.748 |
| FCBBF3008153 | 0 | 0.000 | 6.525 |
| FCBBF3010695 | 0 | 0.000 | 2.958 |
| FCBBF3016928 | 0 | 0.000 | 1.045 |
| FCBBF3017396 | 0 | 0.000 | 7.305 |
| FCBBF3017531 | 0 | 0.000 | 1.912 |
| FCBBF3018796 | 0 | 0.000 | 7.405 |
| FCBBF3019714 | 0 | 0.000 | 2.443 |
| FCBBF3019839 | 0 | 0.000 | 17.866 |
| FCBBF3021807 | 0 | 0.000 | 5.171 |
| FCBBF3023667 | 0 | 0.000 | 0.317 |
| FCBBF3024002 | 0 | 0.000 | 6.769 |
| FCBBF3024623 | 0 | 0.000 | 6.682 |
| FCBBF3025528 | 0 | 0.000 | 5.758 |
| FCBBF3025568 | 0 | 0.000 | 19.615 |
| FCBBF3025737 | 0 | 0.000 | 7.752 |
| FCBBF3025905 | 0 | 0.000 | 19.079 |
| FCBBF4000142 | 0 | 0.000 | 4.360 |
| FCBBF4000446 | 0 | 0.000 | 0.896 |
| FCBBF5000261 | 0 | 0.000 | 6.193 |
| FEBRA1000022 | 0 | 0.000 | 12.554 |
| FEBRA1000088 | 0 | 0.000 | 5.090 |
| FEBRA2000105 | 0 | 0.000 | 1.711 |
| FEBRA2000129 | 0 | 0.000 | 3.100 |
| FEBRA2000210 | 0 | 0.000 | 0.843 |
| FEBRA2000462 | 0 | 0.000 | 6.733 |
| FEBRA2000510 | 0 | 0.000 | 4.401 |
| FEBRA2000536 | 0 | 0.000 | 3.757 |
| FEBRA2000581 | 0 | 0.000 | 0.949 |
| FEBRA2000680 | 0 | 0.000 | 33.628 |
| FEBRA2000733 | 3.756 | 0 | 1.206 |
| FEBRA2000740 | 0 | 0.000 | 9.442 |
| FEBRA2000757 | 0 | 0.000 | 3.652 |
| FEBRA2000856 | 0 | 0.000 | 18.931 |
| FEBRA2000880 | 0 | 0.000 | 12.639 |
| FEBRA2001745 | 0 | 0.000 | 1.495 |
| FEBRA2001828 | 0 | 0.000 | 6.489 |
| FEBRA2002527 | 0 | 0.000 | 3.416 |
| FEBRA2003436 | 0 | 0.000 | 6.630 |
| FEBRA2003750 | 0 | 0.000 | 19.596 |
| FEBRA2003833 | 0 | 0.000 | 14.436 |
| FEBRA2003926 | 0 | 0.000 | 4.163 |
| FEBRA2004042 | 47.274 | 0 | 0.000 |
| FEBRA2004412 | 0 | 0.000 | 3.502 |
| FEBRA2004852 | 0 | 0.000 | 32.361 |
| FEBRA2005752 | 0 | 0.000 | 4.964 |
| FEBRA2006092 | 0 | 0.000 | 2.225 |
| FEBRA2007714 | 0 | 0.000 | 9.952 |
| FEBRA2007818 | 0 | 0.000 | 6.669 |
| FEBRA2007901 | 0 | 0.000 | 4.420 |
| FEBRA2008081 | 0 | 0.000 | 0.845 |
| FEBRA2008087 | 3.995 | 0 | 0.214 |
| FEBRA2008210 | 0 | 0.000 | 15.999 |
| FEBRA2008255 | 0 | 0.000 | 6.035 |
| FEBRA2008302 | 0 | 0.000 | 1.269 |
| FEBRA2008583 | 0 | 0.000 | 0.315 |
| FEBRA2009419 | 0 | 0.000 | 1.576 |
| FEBRA2011090 | 0 | 0.000 | 20.700 |
| FEBRA2011392 | 0 | 0.000 | 32.361 |
| FEBRA2014417 | 0 | 0.000 | 1.288 |
| FEBRA2022055 | 0 | 0.000 | 5.712 |
| FEBRA2022504 | 0 | 0.000 | 1.959 |
| FEBRA2023927 | 0 | 0.000 | 4.858 |
| FEBRA2025838 | 0 | 0.000 | 0.980 |
| FEBRA2026984 | 0 | 0.000 | 20.914 |
| FEBRA2028516 | 0 | 0.000 | 1.364 |
| FELIV1000153 | 0 | 0.000 | 0.197 |
| HCASM2000016 | 0 | 0.000 | 1.780 |
| HCASM2000138 | 0 | 0.000 | 10.075 |
| HCASM2000363 | 0 | 0.000 | 0.811 |
| HCASM2001890 | 0 | 0.000 | 15.228 |
| HCASM2008536 | 0 | 0.000 | 15.228 |
| HCHON1000030 | 0 | 0.000 | 0.216 |
| HCHON1000131 | 0 | 0.000 | 9.787 |
| HCHON1000142 | 0 | 0.000 | 15.860 |
| HCHON2000056 | 0 | 0.000 | 1.353 |
| HCHON2000087 | 0 | 58.329 | 0.738 |
| HCHON2000160 | 0 | 0.000 | 1.201 |
| HCHON2000226 | 0 | 0.000 | 0.962 |
| HCHON2000244 | 0 | 0.000 | 1.569 |
| HCHON2000265 | 0 | 0.000 | 2.413 |
| HCHON2000295 | 0 | 0.000 | 1.045 |
| HCHON2000323 | 0 | 0.000 | 2.209 |
| HCHON2000418 | 0 | 0.000 | 15.860 |
| HCHON2000475 | 0 | 0.000 | 3.175 |
| HCHON2000626 | 0 | 0.000 | 5.608 |
| HCHON2000698 | 0 | 0.000 | 10.256 |
| HCHON2000738 | 0 | 0.000 | 3.551 |
| HCHON2000743 | 0 | 0.000 | 7.282 |
| HCHON2000826 | 0 | 0.000 | 0.854 |
| HCHON2001039 | 0 | 0.000 | 2.662 |
| HCHON2001084 | 0 | 0.000 | 2.739 |
| HCHON2001200 | 0 | 40.779 | 1.032 |
| HCHON2001217 | 0 | 0.000 | 4.966 |
| HCHON2001434 | 0 | 0.000 | 3.644 |
| HCHON2001505 | 0 | 0.000 | 16.079 |
| HCHON2001598 | 0 | 0.000 | 5.796 |
| HCHON2001665 | 0 | 0.000 | 1.840 |
| HCHON2001853 | 0 | 0.000 | 6.680 |
| HCHON2002247 | 0 | 0.000 | 3.348 |
| HCHON2004002 | 0 | 0.000 | 0.936 |
| HCHON2005921 | 0 | 0.000 | 24.732 |
| HCHON2006250 | 34.872 | 0 | 0.000 |
| HCHON2007650 | 0 | 0.000 | 7.263 |
| HCHON2008444 | 0 | 0.000 | 15.860 |
| HEART1000149 | 0 | 0.000 | 4.480 |
| HEART1000185 | 0 | 0.000 | 5.657 |
| HEART2000506 | 0 | 0.000 | 4.183 |
| HEART2004931 | 0 | 0.000 | 8.110 |
| HEART2007231 | 0 | 0.000 | 11.555 |
| HHDPC1000114 | 0 | 0.000 | 0.867 |
| HHDPC1000163 | 0 | 0.000 | 1.500 |
| HHDPC2000455 | 0 | 0.000 | 3.932 |
| HHDPC2000572 | 0 | 0.000 | 7.809 |
| HHDPC2000656 | 0 | 0.000 | 10.195 |
| HHDPC2003439 | 0 | 0.000 | 1.517 |
| HHDPC2003983 | 0 | 0.000 | 2.657 |
| HHDPC2007267 | 0 | 0.000 | 0.582 |
| HHDPC2007775 | 0 | 0.000 | 12.888 |
| HLUNG1000055 | 0 | 0.000 | 1.937 |
| HLUNG1000064 | 0 | 0.000 | 8.121 |
| HLUNG1000076 | 0 | 0.000 | 1.003 |
| HLUNG2000004 | 0 | 0.000 | 3.017 |
| HLUNG2000063 | 0 | 0.000 | 5.883 |
| HLUNG2000314 | 0 | 0.000 | 5.852 |
| HLUNG2000412 | 0 | 0.000 | 3.194 |
| HLUNG2000501 | 0 | 0.000 | 1.023 |
| HLUNG2000846 | 0 | 0.000 | 5.388 |
| HLUNG2000884 | 0 | 0.000 | 2.553 |
| HLUNG2001146 | 0 | 0.000 | 6.252 |
| HLUNG2001507 | 0 | 0.000 | 5.972 |
| HLUNG2001518 | 0 | 0.000 | 5.217 |
| HLUNG2001677 | 0 | 0.000 | 4.191 |
| HLUNG2002648 | 0 | 0.000 | 4.311 |
| HLUNG2002811 | 0 | 0.000 | 2.906 |
| HLUNG2003003 | 0 | 0.000 | 28.594 |
| HLUNG2004159 | 0 | 0.000 | 2.162 |
| HLUNG2004170 | 0 | 0.000 | 7.349 |
| HLUNG2004684 | 75.236 | 0 | 0.000 |
| HLUNG2006812 | 0 | 0.000 | 7.053 |
| HLUNG2008333 | 0 | 0.000 | 24.539 |
| HLUNG2008637 | 0 | 0.000 | 2.015 |
| HLUNG2009225 | 0 | 0.000 | 5.396 |
| HLUNG2015184 | 0 | 0.000 | 15.617 |
| HLUNG2017262 | 0 | 0.000 | 3.783 |
| HSYRA1000062 | 0 | 0.000 | 0.511 |
| HSYRA1000152 | 0 | 0.000 | 1.423 |
| HSYRA1000178 | 0 | 0.000 | 2.991 |
| HSYRA2000159 | 0 | 0.000 | 0.719 |
| HSYRA2000224 | 0 | 0.000 | 2.145 |
| HSYRA2000232 | 0 | 0.000 | 0.882 |
| HSYRA2000248 | 0 | 0.000 | 4.053 |
| HSYRA2000255 | 0 | 0.000 | 2.141 |
| HSYRA2000640 | 0 | 0.000 | 4.064 |
| HSYRA2000743 | 0 | 0.000 | 10.153 |
| HSYRA2001105 | 0 | 0.000 | 3.286 |
| HSYRA2001138 | 0 | 0.000 | 0.304 |
| HSYRA2001396 | 0 | 0.000 | 5.436 |
| HSYRA2001476 | 0 | 0.000 | 5.182 |
| HSYRA2001567 | 0 | 0.000 | 2.673 |
| HSYRA2001574 | 0 | 0.000 | 0.897 |
| HSYRA2001580 | 0 | 0.000 | 13.073 |
| HSYRA2001615 | 0 | 0.000 | 2.473 |
| HSYRA2001621 | 0 | 17.301 | 0.000 |
| HSYRA2007650 | 0 | 0.000 | 5.673 |
| IMR321000158 | 0 | 0.000 | 1.816 |
| IMR321000210 | 0 | 0.000 | 1.209 |
| IMR321000219 | 0 | 0.000 | 3.013 |
| IMR321000242 | 0 | 0.000 | 6.707 |
| IMR321000266 | 0 | 0.000 | 3.375 |
| IMR322000121 | 0 | 0.000 | 1.330 |
| IMR322000730 | 3.055 | 0 | 0.327 |
| IMR322000935 | 0 | 0.000 | 1.786 |
| IMR322001049 | 0 | 0.000 | 6.909 |
| IMR322001435 | 0 | 0.000 | 3.361 |
| IMR322001534 | 0 | 0.000 | 9.855 |
| IMR322001600 | 0 | 15.181 | 0.960 |
| IMR322001710 | 0 | 0.000 | 2.313 |
| IMR322001879 | 0 | 0.000 | 11.495 |
| IMR322019070 | 0 | 0.000 | 3.191 |
| KIDNE1000036 | 0 | 0.000 | 25.490 |
| KIDNE1000145 | 0 | 0.000 | 16.491 |
| KIDNE2000085 | 0 | 0.000 | 3.679 |
| KIDNE2000330 | 76.084 | 0 | 0.000 |
| KIDNE2000403 | 0 | 0.000 | 1.971 |
| KIDNE2001162 | 0 | 0.000 | 1.670 |
| KIDNE2001467 | 0 | 0.000 | 0.933 |
| KIDNE2001979 | 0 | 0.000 | 7.027 |
| KIDNE2002252 | 0 | 0.000 | 2.600 |
| KIDNE2003305 | 0 | 0.000 | 1.004 |
| KIDNE2003941 | 0 | 0.000 | 0.602 |
| KIDNE2005321 | 0 | 0.000 | 11.785 |
| KIDNE2005676 | 0 | 0.000 | 5.034 |
| KIDNE2006014 | 0 | 0.000 | 3.541 |
| KIDNE2006030 | 0 | 0.000 | 7.636 |
| KIDNE2006248 | 0 | 0.000 | 1.112 |
| KIDNE2006465 | 0 | 0.000 | 3.690 |
| KIDNE2007040 | 0 | 0.000 | 25.490 |
| KIDNE2007328 | 0 | 0.000 | 2.110 |
| KIDNE2007352 | 0 | 0.000 | 0.992 |
| KIDNE2007811 | 0 | 0.000 | 10.218 |
| KIDNE2007954 | 0 | 0.000 | 2.514 |
| KIDNE2008048 | 0 | 0.000 | 3.839 |
| KIDNE2009367 | 0 | 0.000 | 9.888 |
| KIDNE2009605 | 0 | 0.000 | 18.012 |
| KIDNE2010049 | 76.623 | 0 | 4.101 |
| KIDNE2012784 | 0 | 0.000 | 40.625 |
| KIDNE2013158 | 0 | 0.000 | 21.635 |
| KIDNE2013845 | 0 | 0.000 | 2.666 |
| KIDNE2014290 | 0 | 0.000 | 3.345 |
| KIDNE2014325 | 0 | 0.000 | 4.512 |
| KIDNE2017040 | 0 | 0.000 | 4.011 |
| LIVER1000079 | 0 | 0.000 | 2.090 |
| LIVER1000132 | 0 | 0.000 | 0.597 |
| LIVER2000033 | 0 | 0.000 | 1.650 |
| LIVER2001539 | 0 | 0.000 | 5.939 |
| LIVER2001608 | 29.267 | 0 | 1.566 |
| LIVER2002842 | 0 | 0.000 | 9.107 |
| LIVER2003234 | 0 | 0.000 | 12.095 |
| LIVER2005218 | 0 | 0.000 | 5.883 |
| LIVER2007783 | 0 | 0.000 | 4.894 |
| LIVER2008465 | 0 | 0.000 | 7.893 |
| MAMGL1000083 | 0 | 0.000 | 0.346 |
| MESAN2000264 | 0 | 0.000 | 2.350 |
| MESAN2000267 | 0 | 0.000 | 2.930 |
| MESAN2000894 | 0 | 0.000 | 24.337 |
| MESAN2001154 | 0 | 0.000 | 1.589 |
| MESAN2002086 | 0 | 0.000 | 2.482 |
| MESAN2002424 | 0 | 0.000 | 24.337 |
| MESAN2002724 | 0 | 0.000 | 5.499 |
| MESAN2002844 | 0 | 0.000 | 8.642 |
| MESAN2003039 | 0 | 0.000 | 19.415 |
| MESAN2003058 | 0 | 0.000 | 7.143 |
| MESAN2003444 | 0 | 0.000 | 8.886 |
| MESAN2003709 | 0 | 0.000 | 9.892 |
| MESAN2005303 | 0 | 0.000 | 9.449 |
| MESAN2005957 | 0 | 0.000 | 17.666 |
| MESAN2006043 | 0 | 0.000 | 9.499 |
| MESAN2006580 | 0 | 0.000 | 24.337 |
| MESAN2006743 | 0 | 0.000 | 13.792 |
| MESAN2009580 | 0 | 0.000 | 1.325 |
| MESAN2013284 | 0 | 0.000 | 2.930 |
| MESAN2014295 | 0 | 0.000 | 24.337 |
| MESAN2016552 | 0 | 0.000 | 14.511 |
| MESAN2017152 | 0 | 0.000 | 24.337 |
| NB9N41000121 | 16.735 | 0 | 0.000 |
| NB9N42000281 | 0 | 0.000 | 2.280 |
| NOVAR1000015 | 0 | 0.000 | 3.622 |
| NOVAR1000091 | 0 | 0.000 | 2.310 |
| NOVAR2000710 | 0 | 0.000 | 4.201 |
| NT2NE1000163 | 0 | 0.000 | 2.899 |
| NT2NE2000056 | 8.755 | 0 | 3.280 |
| NT2NE2000327 | 0 | 0.000 | 3.000 |
| NT2NE2000383 | 0 | 0.000 | 5.437 |
| NT2NE2000384 | 0 | 0.000 | 2.745 |
| NT2NE2000455 | 0 | 0.000 | 24.761 |
| NT2NE2000575 | 0 | 0.000 | 1.720 |
| NT2NE2000707 | 0 | 0.000 | 1.596 |
| NT2NE2000963 | 5.112 | 0 | 0.547 |
| NT2NE2001000 | 0 | 0.000 | 2.053 |
| NT2NE2001176 | 0 | 0.000 | 1.362 |
| NT2NE2001337 | 0 | 0.000 | 5.420 |
| NT2NE2001435 | 0 | 0.000 | 5.072 |
| NT2NE2001545 | 0 | 0.000 | 2.137 |
| NT2NE2001617 | 0 | 0.000 | 5.411 |
| NT2NE2001660 | 0 | 0.000 | 9.341 |
| NT2NE2001793 | 0 | 0.000 | 7.422 |
| NT2NE2002620 | 0 | 90.183 | 0.000 |
| NT2NE2003185 | 0 | 0.000 | 4.521 |
| NT2NE2003485 | 0 | 0.000 | 5.552 |
| NT2NE2003569 | 0 | 0.000 | 2.070 |
| NT2NE2004519 | 0 | 0.000 | 2.137 |
| NT2NE2004716 | 0 | 0.000 | 4.578 |
| NT2NE2005358 | 0 | 0.000 | 24.761 |
| NT2NE2006458 | 0 | 0.000 | 3.372 |
| NT2NE2006659 | 0 | 0.000 | 21.581 |
| NT2NE2009295 | 0 | 0.000 | 2.379 |
| NT2NE2015974 | 0 | 0.000 | 9.111 |
| NT2NE2017492 | 0 | 0.000 | 20.127 |
| NT2RI1000127 | 0 | 0.000 | 2.165 |
| NT2RI2000007 | 0 | 0.000 | 39.625 |
| NT2RI2000064 | 0 | 0.000 | 3.210 |
| NT2RI2000282 | 0 | 0.000 | 0.378 |
| NT2RI2000294 | 0 | 0.000 | 2.257 |
| NT2RI2000344 | 0 | 76.334 | 0.000 |
| NT2RI2000578 | 7.452 | 31.528 | 0.399 |
| NT2RI2000671 | 0 | 0.000 | 1.255 |
| NT2RI2000685 | 0 | 0.000 | 3.545 |
| NT2RI2000689 | 34.460 | 0 | 1.844 |
| NT2RI2000727 | 0 | 0.000 | 0.617 |
| NT2RI2001091 | 0 | 0.000 | 4.193 |
| NT2RI2001230 | 0 | 0.000 | 0.920 |
| NT2RI2001540 | 1.269 | 0 | 1.494 |
| NT2RI2001657 | 0 | 0.000 | 1.914 |
| NT2RI2001859 | 0 | 0.000 | 1.157 |
| NT2RI2002091 | 0.897 | 2.529 | 0.976 |
| NT2RI2002152 | 0 | 0.000 | 3.000 |
| NT2RI2002316 | 0 | 0.000 | 0.956 |
| NT2RI2002391 | 18.073 | 0 | 0.000 |
| NT2RI2002654 | 13.092 | 0 | 0.000 |
| NT2RI2002865 | 0 | 0.000 | 8.087 |
| NT2RI2003304 | 5.848 | 0 | 0.000 |
| NT2RI2003317 | 0 | 0.000 | 3.760 |
| NT2RI2003338 | 0 | 0.000 | 4.831 |
| NT2RI2003344 | 0 | 0.000 | 6.968 |
| NT2RI2003407 | 0 | 0.000 | 1.444 |
| NT2RI2003420 | 0 | 0.000 | 1.837 |
| NT2RI2003556 | 0 | 0.000 | 0.908 |
| NT2RI2003695 | 0 | 0.000 | 0.939 |
| NT2RI2003738 | 0 | 0.000 | 1.252 |
| NT2RI2003751 | 0 | 0.000 | 1.652 |
| NT2RI2004157 | 0 | 0.000 | 39.625 |
| NT2RI2004188 | 0 | 0.000 | 3.425 |
| NT2RI2004230 | 0 | 0.000 | 6.843 |
| NT2RI2004535 | 0 | 0.000 | 2.283 |
| NT2RI2005116 | 0 | 0.000 | 1.525 |
| NT2RI2005335 | 0 | 0.000 | 3.232 |
| NT2RI2005358 | 0 | 0.000 | 24.478 |
| NT2RI2005405 | 0 | 0.000 | 1.004 |
| NT2RI2005713 | 0 | 0.000 | 1.764 |
| NT2RI2005723 | 11.184 | 0 | 1.197 |
| NT2RI2005811 | 0 | 0.000 | 1.827 |
| NT2RI2005814 | 0 | 0.000 | 1.553 |
| NT2RI2005818 | 0 | 0.000 | 3.038 |
| NT2RI2006412 | 0 | 0.000 | 0.978 |
| NT2RI2006825 | 0 | 0.000 | 3.270 |
| NT2RI2007054 | 0 | 0.000 | 3.097 |
| NT2RI2007148 | 0 | 0.000 | 2.253 |
| NT2RI2007277 | 0 | 0.000 | 1.169 |
| NT2RI2007384 | 9.651 | 0 | 1.033 |
| NT2RI2007445 | 0 | 0.000 | 2.139 |
| NT2RI2007498 | 0 | 0.000 | 0.486 |
| NT2RI2007589 | 23.800 | 0 | 0.000 |
| NT2RI2007629 | 0 | 0.000 | 2.404 |
| NT2RI2007987 | 0 | 0.000 | 2.147 |
| NT2RI2008007 | 0 | 0.000 | 23.084 |
| NT2RI2008045 | 0 | 0.000 | 0.926 |
| NT2RI2008336 | 0 | 0.000 | 0.956 |
| NT2RI2008481 | 0 | 0.000 | 2.646 |
| NT2RI2008526 | 17.086 | 0 | 0.000 |
| NT2RI2008724 | 0 | 0.000 | 2.190 |
| NT2RI2008749 | 0 | 0.000 | 2.023 |
| NT2RI2008791 | 0 | 0.000 | 1.392 |
| NT2RI2008942 | 0 | 0.000 | 16.259 |
| NT2RI2009037 | 0 | 0.000 | 1.005 |
| NT2RI2009065 | 10.408 | 0 | 0.000 |
| NT2RI2009269 | 0 | 0.000 | 1.179 |
| NT2RI2009402 | 0 | 0.000 | 7.482 |
| NT2RI2009406 | 0 | 0.000 | 3.356 |
| NT2RI2009583 | 0 | 0.000 | 0.267 |
| NT2RI2014247 | 0 | 0.000 | 18.191 |
| NT2RI2014733 | 0 | 0.000 | 29.743 |
| NT2RI2017529 | 0 | 0.000 | 1.157 |
| NT2RI2022468 | 0 | 0.000 | 7.995 |
| NT2RI2024313 | 0 | 0.000 | 17.475 |
| NT2RI2027323 | 0 | 0.000 | 39.625 |
| NT2RI3001445 | 0 | 0.000 | 7.554 |
| NT2RI3005724 | 0 | 0.000 | 7.069 |
| NT2RI3005923 | 0 | 0.000 | 23.249 |
| NT2RI3006284 | 46.111 | 0 | 0.000 |
| NT2RI3006340 | 0 | 0.000 | 19.479 |
| NT2RI3006666 | 0 | 0.000 | 24.901 |
| NT2RI3006673 | 0 | 0.000 | 11.902 |
| NT2RI3007291 | 0 | 0.000 | 14.928 |
| NT2RI3007543 | 0 | 0.000 | 1.012 |
| NT2RP6000017 | 0 | 0.000 | 3.569 |
| NT2RP6000039 | 0 | 0.000 | 4.277 |
| NT2RP6000059 | 0 | 0.000 | 25.869 |
| NT2RP6000077 | 0 | 0.000 | 30.666 |
| NT2RP6000078 | 0 | 0.000 | 0.429 |
| NT2RP6000085 | 0 | 0.000 | 11.032 |
| NT2RP6000123 | 0 | 0.000 | 0.467 |
| NT2RP7000069 | 0 | 0.000 | 8.035 |
| NT2RP7000076 | 0 | 0.000 | 0.727 |
| NT2RP7000173 | 0 | 0.000 | 0.663 |
| NT2RP7000477 | 0 | 0.000 | 2.360 |
| NT2RP7000586 | 0 | 0.000 | 13.104 |
| NT2RP7000600 | 0 | 0.000 | 7.929 |
| NT2RP7000906 | 0 | 0.000 | 3.112 |
| NT2RP7001166 | 0 | 0.000 | 2.676 |
| NT2RP7001962 | 0 | 0.000 | 3.168 |
| NT2RP7002028 | 0 | 0.000 | 7.190 |
| NT2RP7002376 | 0 | 0.000 | 14.471 |
| NT2RP7002379 | 0 | 0.000 | 2.402 |
| NT2RP7002449 | 0 | 0.000 | 2.409 |
| NT2RP7002802 | 0 | 0.000 | 8.717 |
| NT2RP7002875 | 0 | 0.000 | 1.101 |
| NT2RP7002982 | 0 | 0.000 | 9.273 |
| NT2RP7003055 | 0 | 0.000 | 12.585 |
| NT2RP7003203 | 0 | 0.000 | 4.406 |
| NT2RP7003319 | 0 | 0.000 | 31.557 |
| NT2RP7003632 | 0 | 0.000 | 1.942 |
| NT2RP7003647 | 0 | 0.000 | 5.615 |
| NT2RP7003688 | 0 | 0.000 | 0.881 |
| NT2RP7004114 | 0 | 0.000 | 6.650 |
| NT2RP7004123 | 0 | 0.000 | 2.289 |
| NT2RP7004196 | 0 | 0.000 | 1.563 |
| NT2RP7004348 | 0 | 0.000 | 2.695 |
| NT2RP7004352 | 0 | 0.000 | 6.077 |
| NT2RP7004373 | 0 | 0.000 | 2.807 |
| NT2RP7004559 | 0 | 0.000 | 10.166 |
| NT2RP7004728 | 0 | 0.000 | 1.875 |
| NT2RP7004751 | 0 | 44.129 | 1.116 |
| NT2RP7004915 | 0 | 0.000 | 17.708 |
| NT2RP7004925 | 0 | 0.000 | 1.506 |
| NT2RP7004946 | 0 | 0.000 | 2.053 |
| NT2RP7005513 | 0 | 0.000 | 2.016 |
| NT2RP7005529 | 0 | 0.000 | 8.806 |
| NT2RP7005675 | 0 | 0.000 | 10.406 |
| NT2RP7005750 | 0 | 0.000 | 4.268 |
| NT2RP7006223 | 0 | 0.000 | 5.039 |
| NT2RP7006490 | 0 | 0.000 | 2.560 |
| NT2RP7006539 | 0 | 0.000 | 10.410 |
| NT2RP7006619 | 0 | 0.000 | 2.633 |
| NT2RP7006717 | 0 | 0.000 | 5.493 |
| NT2RP7006886 | 0 | 0.000 | 11.344 |
| NT2RP7007114 | 0 | 0.000 | 19.540 |
| NT2RP7007154 | 0 | 0.000 | 1.360 |
| NT2RP7007252 | 0 | 0.000 | 8.190 |
| NT2RP7007310 | 82.993 | 0 | 0.000 |
| NT2RP7007381 | 0 | 0.000 | 18.704 |
| NT2RP7007537 | 27.403 | 0 | 0.000 |
| NT2RP7007610 | 0 | 0.000 | 3.452 |
| NT2RP7008161 | 0 | 0.000 | 7.488 |
| NT2RP7008167 | 0 | 0.000 | 2.165 |
| NT2RP7008190 | 0 | 0.000 | 1.582 |
| NT2RP7008315 | 0 | 0.000 | 8.950 |
| NT2RP7008543 | 0 | 0.000 | 3.281 |
| NT2RP7009087 | 0 | 0.000 | 2.897 |
| NT2RP7009097 | 40.067 | 0 | 0.000 |
| NT2RP7009147 | 0 | 0.000 | 1.900 |
| NT2RP7009259 | 0 | 0.000 | 2.010 |
| NT2RP7009482 | 0 | 0.000 | 5.527 |
| NT2RP7010612 | 0 | 0.000 | 25.799 |
| NT2RP7013573 | 0 | 0.000 | 8.594 |
| NT2RP7017474 | 0 | 0.000 | 22.450 |
| NTONG1000033 | 0 | 0.000 | 1.461 |
| NTONG1000098 | 0 | 0.000 | 0.760 |
| NTONG1000182 | 0 | 0.000 | 1.477 |
| NTONG1000246 | 0 | 0.000 | 1.865 |
| NTONG2000265 | 0 | 0.000 | 1.017 |
| NTONG2000876 | 0 | 0.000 | 1.661 |
| NTONG2001550 | 0 | 0.000 | 4.151 |
| NTONG2001567 | 0 | 0.000 | 1.097 |
| NTONG2002582 | 0 | 0.000 | 13.457 |
| NTONG2003454 | 0 | 0.000 | 24.889 |
| NTONG2003839 | 0 | 0.000 | 6.254 |
| NTONG2004844 | 0 | 0.000 | 1.933 |
| NTONG2005363 | 0 | 0.000 | 13.929 |
| NTONG2005391 | 0 | 0.000 | 13.902 |
| NTONG2005520 | 0 | 0.000 | 0.794 |
| NTONG2005801 | 0 | 0.000 | 4.250 |
| NTONG2005897 | 0 | 0.000 | 8.187 |
| NTONG2008944 | 0 | 0.000 | 6.965 |
| OCBBF1000086 | 0 | 0.000 | 1.826 |
| OCBBF1000175 | 0 | 0.000 | 8.591 |
| OCBBF2000015 | 17.632 | 0 | 3.774 |
| OCBBF2000467 | 0 | 0.000 | 2.406 |
| OCBBF2000677 | 0 | 0.000 | 19.428 |
| OCBBF2000986 | 0 | 0.000 | 1.149 |
| OCBBF2001166 | 0 | 0.000 | 6.537 |
| OCBBF2001210 | 0 | 0.000 | 4.324 |
| OCBBF2001323 | 0 | 0.000 | 10.255 |
| OCBBF2001586 | 0 | 0.000 | 8.553 |
| OCBBF2001961 | 0 | 0.000 | 48.981 |
| OCBBF2002086 | 0 | 0.000 | 15.370 |
| OCBBF2002656 | 0 | 0.000 | 1.973 |
| OCBBF2003246 | 0 | 0.000 | 11.672 |
| OCBBF2003925 | 0 | 0.000 | 0.994 |
| OCBBF2004273 | 19.976 | 0 | 0.000 |
| OCBBF2004757 | 0 | 0.000 | 2.956 |
| OCBBF2005476 | 0 | 0.000 | 16.727 |
| OCBBF2005956 | 0 | 0.000 | 3.386 |
| OCBBF2006313 | 0 | 0.000 | 6.810 |
| OCBBF2006849 | 0 | 0.000 | 2.410 |
| OCBBF2007028 | 0 | 0.000 | 8.234 |
| OCBBF2007415 | 0 | 0.000 | 0.955 |
| OCBBF2007829 | 0 | 0.000 | 7.203 |
| OCBBF2008005 | 0 | 0.000 | 3.787 |
| OCBBF2008144 | 0 | 0.000 | 3.440 |
| OCBBF2009242 | 0 | 0.000 | 3.377 |
| OCBBF2009301 | 46.196 | 0 | 0.000 |
| OCBBF2009424 | 0 | 0.000 | 8.655 |
| OCBBF2009772 | 0 | 0.000 | 1.404 |
| OCBBF2010313 | 0 | 0.000 | 16.359 |
| OCBBF2010557 | 0 | 0.000 | 43.708 |
| OCBBF2010830 | 0 | 0.000 | 2.099 |
| OCBBF2010945 | 0 | 0.000 | 48.981 |
| OCBBF2011021 | 0 | 0.000 | 1.724 |
| OCBBF2011228 | 0 | 0.000 | 25.500 |
| OCBBF2011232 | 0 | 0.000 | 9.556 |
| OCBBF2011536 | 0 | 0.000 | 2.379 |
| OCBBF2011759 | 0 | 0.000 | 3.344 |
| OCBBF2013149 | 0 | 0.000 | 1.850 |
| OCBBF2013843 | 0 | 50.379 | 0.637 |
| OCBBF2014064 | 0 | 0.000 | 3.258 |
| OCBBF2014292 | 0 | 0.000 | 3.706 |
| OCBBF2017398 | 0 | 0.000 | 3.068 |
| OCBBF2017754 | 0 | 0.000 | 8.956 |
| OCBBF2017791 | 0 | 0.000 | 9.166 |
| OCBBF2017882 | 0 | 0.000 | 8.510 |
| OCBBF2018012 | 0 | 0.000 | 10.043 |
| OCBBF2018563 | 0 | 0.000 | 24.528 |
| OCBBF2018873 | 0 | 0.000 | 6.611 |
| OCBBF2018956 | 0 | 0.000 | 2.019 |
| OCBBF2020741 | 0 | 0.000 | 33.655 |
| OCBBF2021833 | 0 | 0.000 | 17.297 |
| OCBBF2024850 | 0 | 0.000 | 26.505 |
| OCBBF2026368 | 0 | 0.000 | 19.710 |
| OCBBF2027148 | 0 | 0.000 | 27.753 |
| OCBBF2036743 | 0 | 0.000 | 13.183 |
| OCBBF3001333 | 0 | 0.000 | 3.832 |
| OCBBF3004487 | 0 | 0.000 | 5.404 |
| PEBLM1000144 | 0 | 0.000 | 7.153 |
| PEBLM2000030 | 0 | 0.000 | 4.390 |
| PEBLM2000147 | 0 | 0.000 | 1.522 |
| PEBLM2000326 | 0 | 0.000 | 6.474 |
| PEBLM2004452 | 0 | 0.000 | 6.439 |
| PEBLM2006366 | 0 | 0.000 | 3.301 |
| PEBLM2006709 | 0 | 0.000 | 6.636 |
| PERIC2006443 | 0 | 0.000 | 5.792 |
| PERIC2007068 | 0 | 0.000 | 5.521 |
| PLACE5000013 | 0 | 0.000 | 9.466 |
| PLACE5000113 | 0 | 0.000 | 10.260 |
| PLACE5000159 | 0 | 0.000 | 8.132 |
| PLACE5000170 | 0 | 0.000 | 4.147 |
| PLACE5000372 | 0 | 0.000 | 40.126 |
| PLACE6000145 | 23.096 | 0 | 0.000 |
| PLACE6000263 | 0 | 0.000 | 1.813 |
| PLACE6000379 | 0 | 0.000 | 1.264 |
| PLACE6000414 | 0 | 0.000 | 6.113 |
| PLACE6001064 | 0 | 0.000 | 3.421 |
| PLACE6001185 | 0 | 0.000 | 25.473 |
| PLACE6001281 | 0 | 0.000 | 4.106 |
| PLACE6001443 | 0 | 0.000 | 11.713 |
| PLACE6001886 | 0 | 0.000 | 40.398 |
| PLACE6002084 | 0 | 0.000 | 0.881 |
| PLACE6002102 | 0 | 0.000 | 6.738 |
| PLACE6002668 | 0 | 0.000 | 6.437 |
| PLACE6002960 | 0 | 0.000 | 2.647 |
| PLACE6003218 | 0 | 0.000 | 17.355 |
| PLACE6003383 | 0 | 0.000 | 1.424 |
| PLACE6004005 | 0 | 0.000 | 1.178 |
| PLACE6004312 | 0 | 0.000 | 0.719 |
| PLACE6004397 | 0 | 0.000 | 2.192 |
| PLACE6004491 | 0 | 0.000 | 40.126 |
| PLACE6004738 | 0 | 0.000 | 25.098 |
| PLACE6005482 | 0 | 0.000 | 22.076 |
| PLACE6006042 | 0 | 0.000 | 6.493 |
| PLACE6006137 | 0 | 0.000 | 4.074 |
| PLACE6006186 | 0 | 0.000 | 25.880 |
| PLACE6006549 | 0 | 0.000 | 1.905 |
| PLACE6008775 | 0 | 0.000 | 6.595 |
| PLACE6008824 | 0 | 0.000 | 40.126 |
| PLACE6009338 | 0 | 0.000 | 29.967 |
| PLACE6010077 | 0 | 0.000 | 2.077 |
| PLACE6011057 | 0 | 0.000 | 2.688 |
| PLACE6012942 | 0 | 0.000 | 40.126 |
| PLACE6015731 | 0 | 0.000 | 18.307 |
| PLACE6016383 | 0 | 0.000 | 7.710 |
| PLACE6017431 | 0 | 0.000 | 40.126 |
| PLACE6018938 | 0 | 0.000 | 18.301 |
| PLACE7006240 | 0 | 0.000 | 30.024 |
| PROST1000097 | 0 | 0.000 | 7.013 |
| PROST1000199 | 16.283 | 0 | 4.357 |
| PROST1000220 | 0 | 0.000 | 0.810 |
| PROST1000226 | 0 | 0.000 | 2.134 |
| PROST1000246 | 0 | 0.000 | 13.104 |
| PROST1000526 | 0 | 0.000 | 3.013 |
| PROST1000564 | 0 | 0.000 | 1.603 |
| PROST2000138 | 5.795 | 0 | 5.479 |
| PROST2000273 | 0 | 0.000 | 25.167 |
| PROST2002651 | 0 | 0.000 | 7.133 |
| PROST2003232 | 0 | 0.000 | 0.814 |
| PROST2003338 | 0 | 0.000 | 4.005 |
| PROST2003396 | 0 | 0.000 | 7.125 |
| PROST2004095 | 0 | 0.000 | 1.116 |
| PROST2004258 | 0 | 0.000 | 9.101 |
| PROST2004270 | 0 | 0.000 | 2.104 |
| PROST2004416 | 0 | 0.000 | 0.811 |
| PROST2005285 | 0 | 0.000 | 8.902 |
| PROST2005604 | 0 | 0.000 | 7.420 |
| PROST2006030 | 0 | 0.000 | 4.513 |
| PROST2006536 | 0 | 0.000 | 2.647 |
| PROST2006737 | 0 | 0.000 | 8.672 |
| PROST2007200 | 0 | 0.000 | 14.088 |
| PROST2008271 | 0 | 0.000 | 4.674 |
| PROST2008489 | 14.433 | 0 | 0.772 |
| PROST2008770 | 0 | 0.000 | 0.930 |
| PROST2010318 | 0 | 0.000 | 14.395 |
| PROST2010545 | 0 | 0.000 | 15.696 |
| PROST2010782 | 0 | 0.000 | 0.290 |
| PROST2012007 | 0 | 0.000 | 1.354 |
| PROST2012448 | 0 | 0.000 | 9.731 |
| PROST2012890 | 0 | 0.000 | 18.191 |
| PROST2014916 | 0 | 0.000 | 4.345 |
| PROST2015924 | 0 | 0.000 | 8.082 |
| PROST2016918 | 0 | 0.000 | 15.159 |
| PROST2017203 | 0 | 0.000 | 1.549 |
| PROST2017617 | 0 | 0.000 | 25.167 |
| PROST2017692 | 0 | 0.000 | 0.879 |
| PROST2018977 | 0 | 0.000 | 15.499 |
| PUAEN1000057 | 0 | 0.000 | 7.346 |
| PUAEN1000065 | 0 | 0.000 | 1.598 |
| PUAEN1000164 | 0 | 0.000 | 0.475 |
| PUAEN1000239 | 0 | 0.000 | 3.697 |
| PUAEN2000374 | 0 | 0.000 | 1.145 |
| PUAEN2001586 | 0 | 0.000 | 3.406 |
| PUAEN2007044 | 0 | 0.000 | 1.710 |
| PUAEN2008228 | 0 | 0.000 | 17.449 |
| PUAEN2009655 | 0 | 0.000 | 4.359 |
| SALGL1000157 | 0 | 0.000 | 0.465 |
| SKMUS1000014 | 0 | 0.000 | 8.773 |
| SKMUS1000022 | 0 | 0.000 | 0.496 |
| SKMUS1000084 | 0 | 0.000 | 3.674 |
| SKMUS1000138 | 0 | 0.000 | 0.344 |
| SKMUS1000177 | 0 | 0.000 | 14.082 |
| SKMUS1000186 | 0 | 0.000 | 0.479 |
| SKMUS2000020 | 0 | 0.000 | 4.393 |
| SKMUS2000343 | 0 | 0.000 | 18.379 |
| SKMUS2000361 | 0 | 0.000 | 1.275 |
| SKMUS2000380 | 0 | 0.000 | 2.586 |
| SKMUS2000873 | 0 | 0.000 | 1.312 |
| SKMUS2000902 | 0 | 0.000 | 12.901 |
| SKMUS2000931 | 0 | 0.000 | 0.649 |
| SKMUS2000954 | 0 | 0.000 | 2.027 |
| SKMUS2001129 | 0 | 0.000 | 12.130 |
| SKMUS2001454 | 7.522 | 0 | 0.403 |
| SKMUS2001501 | 0 | 0.000 | 2.600 |
| SKNMC1000110 | 0 | 0.000 | 4.318 |
| SKNMC1000137 | 0 | 0.000 | 1.264 |
| SKNMC1000168 | 0 | 0.000 | 1.997 |
| SKNMC1000251 | 0 | 0.000 | 8.366 |
| SKNMC2000065 | 0 | 0.000 | 2.575 |
| SKNMC2000097 | 0 | 0.000 | 1.063 |
| SKNMC2000305 | 0 | 0.000 | 4.201 |
| SKNMC2000635 | 0 | 0.000 | 0.856 |
| SKNMC2000649 | 0 | 0.000 | 2.176 |
| SKNMC2000877 | 0 | 0.000 | 2.827 |
| SKNSH1000086 | 0 | 0.000 | 10.184 |
| SKNSH2000347 | 0 | 0.000 | 8.028 |
| SKNSH2000482 | 0 | 0.000 | 23.251 |
| SKNSH2000819 | 0 | 0.000 | 5.937 |
| SKNSH2002325 | 0 | 0.000 | 4.553 |
| SKNSH2003528 | 0 | 0.000 | 3.621 |
| SKNSH2008043 | 0 | 0.000 | 12.076 |
| SMINT1000042 | 59.707 | 0 | 6.391 |
| SMINT1000100 | 0 | 0.000 | 6.640 |
| SMINT1000117 | 0 | 0.000 | 1.569 |
| SMINT1000131 | 0 | 0.000 | 3.277 |
| SMINT2000159 | 0 | 0.000 | 6.518 |
| SMINT2000277 | 0 | 0.000 | 2.162 |
| SMINT2000396 | 0 | 0.000 | 5.840 |
| SMINT2000441 | 0 | 0.000 | 1.615 |
| SMINT2000468 | 0 | 0.000 | 5.458 |
| SMINT2000545 | 0 | 0.000 | 2.827 |
| SMINT2000629 | 0 | 0.000 | 3.203 |
| SMINT2001950 | 0 | 0.000 | 12.743 |
| SMINT2002159 | 0 | 0.000 | 8.177 |
| SMINT2002314 | 53.944 | 0 | 0.000 |
| SMINT2002689 | 0 | 0.000 | 51.875 |
| SMINT2002778 | 0 | 0.000 | 25.261 |
| SMINT2002976 | 0 | 0.000 | 6.221 |
| SMINT2003169 | 0 | 0.000 | 0.561 |
| SMINT2004589 | 0 | 0.000 | 4.780 |
| SMINT2005368 | 0 | 0.000 | 1.401 |
| SMINT2005956 | 0 | 0.000 | 6.278 |
| SMINT2006801 | 0 | 0.000 | 19.209 |
| SMINT2007187 | 0 | 0.000 | 8.007 |
| SMINT2008960 | 0 | 0.000 | 0.816 |
| SMINT2010959 | 0 | 0.000 | 18.459 |
| SMINT2011033 | 0 | 0.000 | 25.261 |
| SMINT2012122 | 0 | 0.000 | 4.169 |
| SMINT2013031 | 0 | 0.000 | 7.403 |
| SMINT2013695 | 0 | 0.000 | 25.261 |
| SMINT2014480 | 35.406 | 0 | 0.000 |
| SMINT2018681 | 0 | 0.000 | 4.988 |
| SPLEN1000106 | 0 | 0.000 | 13.880 |
| SPLEN1000116 | 0 | 0.000 | 0.590 |
| SPLEN1000166 | 0 | 0.000 | 2.696 |
| SPLEN2000243 | 0 | 0.000 | 25.928 |
| SPLEN2000255 | 0 | 0.000 | 5.495 |
| SPLEN2000505 | 0 | 0.000 | 0.503 |
| SPLEN2000839 | 0 | 0.000 | 10.886 |
| SPLEN2001141 | 0 | 0.000 | 2.253 |
| SPLEN2001157 | 0 | 0.000 | 3.280 |
| SPLEN2001689 | 0 | 0.000 | 16.646 |
| SPLEN2002335 | 0 | 0.000 | 6.038 |
| SPLEN2002463 | 0 | 0.000 | 9.032 |
| SPLEN2003297 | 0 | 0.000 | 31.668 |
| SPLEN2004220 | 0 | 0.000 | 3.430 |
| SPLEN2005009 | 0 | 0.000 | 10.253 |
| SPLEN2005429 | 0 | 0.000 | 17.478 |
| SPLEN2005927 | 0 | 0.000 | 5.136 |
| SPLEN2006122 | 18.769 | 0 | 0.000 |
| SPLEN2006133 | 21.141 | 0 | 2.263 |
| SPLEN2006143 | 0 | 0.000 | 2.668 |
| SPLEN2006232 | 0 | 0.000 | 3.421 |
| SPLEN2006305 | 0 | 0.000 | 1.507 |
| SPLEN2006374 | 0 | 0.000 | 5.438 |
| SPLEN2007388 | 0 | 0.000 | 31.668 |
| SPLEN2007498 | 0 | 0.000 | 3.121 |
| SPLEN2009315 | 0 | 0.000 | 40.674 |
| SPLEN2010195 | 0 | 0.000 | 4.164 |
| SPLEN2011419 | 0 | 0.000 | 2.850 |
| SPLEN2011737 | 0 | 0.000 | 3.107 |
| SPLEN2012571 | 0 | 0.000 | 3.792 |
| SPLEN2012800 | 0 | 0.000 | 0.407 |
| SPLEN2013690 | 0 | 0.000 | 12.880 |
| SPLEN2014080 | 0 | 0.000 | 5.651 |
| SPLEN2014572 | 0 | 0.000 | 7.423 |
| SPLEN2016268 | 9.628 | 0 | 0.000 |
| SPLEN2016421 | 0 | 0.000 | 2.471 |
| SPLEN2016554 | 0 | 0.000 | 22.228 |
| SPLEN2016972 | 0 | 0.000 | 4.837 |
| SPLEN2017318 | 0 | 0.000 | 6.052 |
| SPLEN2017918 | 0 | 0.000 | 3.262 |
| SPLEN2018098 | 0 | 0.000 | 40.674 |
| SPLEN2018157 | 0 | 0.000 | 5.754 |
| SPLEN2019169 | 0 | 0.000 | 6.752 |
| SPLEN2019311 | 0 | 0.000 | 57.827 |
| SPLEN2019405 | 0 | 0.000 | 3.416 |
| SPLEN2021194 | 0 | 0.000 | 8.047 |
| SPLEN2021273 | 0 | 0.000 | 17.589 |
| SPLEN2022522 | 0 | 0.000 | 1.691 |
| SPLEN2027113 | 0 | 0.000 | 1.952 |
| SPLEN2028466 | 0 | 0.000 | 0.987 |
| SPLEN2031547 | 0 | 0.000 | 5.633 |
| SPLEN2036932 | 0 | 0.000 | 3.497 |
| SPLEN2039379 | 0 | 0.000 | 10.362 |
| SPLEN2041585 | 0 | 0.000 | 40.674 |
| SPLEN2042714 | 0 | 0.000 | 40.674 |
| STOMA1000186 | 0 | 0.000 | 14.912 |
| STOMA1000189 | 0 | 0.000 | 1.865 |
| STOMA2000289 | 0 | 0.000 | 6.498 |
| STOMA2000395 | 0 | 0.000 | 5.092 |
| STOMA2000396 | 0 | 0.000 | 6.147 |
| STOMA2002052 | 0 | 0.000 | 6.634 |
| STOMA2004925 | 0 | 0.000 | 14.912 |
| SYNOV1000124 | 0 | 0.000 | 1.327 |
| SYNOV2001033 | 0 | 0.000 | 0.715 |
| SYNOV2001239 | 6.992 | 0 | 0.374 |
| SYNOV2001262 | 0 | 0.000 | 4.977 |
| SYNOV2017055 | 0 | 0.000 | 20.136 |
| SYNOV4000598 | 0 | 0.000 | 35.608 |
| SYNOV4001224 | 0 | 0.000 | 35.608 |
| SYNOV4001395 | 0 | 0.000 | 21.660 |
| SYNOV4009575 | 0 | 0.000 | 5.715 |
| T1ESE2000904 | 0 | 0.000 | 2.754 |
| TBAES2000059 | 0 | 0.000 | 1.797 |
| TBAES2003702 | 0 | 0.000 | 14.497 |
| TBAES2009387 | 0 | 0.000 | 0.638 |
| TCERX2000613 | 0 | 0.000 | 14.497 |
| TESOP2002273 | 0 | 0.000 | 4.841 |
| TESOP2006893 | 0 | 0.000 | 10.246 |
| TESTI1000023 | 0 | 0.000 | 2.000 |
| TESTI2000184 | 0 | 0.000 | 4.045 |
| TESTI2000356 | 0 | 0.000 | 20.914 |
| TESTI2000784 | 0 | 0.000 | 5.421 |
| TESTI2000970 | 0 | 0.000 | 5.798 |
| TESTI2001099 | 0 | 0.000 | 4.091 |
| TESTI2001153 | 0 | 0.000 | 5.699 |
| TESTI2001420 | 0 | 0.000 | 64.596 |
| TESTI2001829 | 0 | 0.000 | 1.013 |
| TESTI2001862 | 0 | 0.000 | 3.154 |
| TESTI2002149 | 0 | 0.000 | 3.990 |
| TESTI2002365 | 0 | 0.000 | 3.907 |
| TESTI2002632 | 0 | 0.000 | 12.913 |
| TESTI2002877 | 0 | 0.000 | 44.500 |
| TESTI2003005 | 0 | 0.000 | 3.623 |
| TESTI2003533 | 0 | 0.000 | 1.034 |
| TESTI2004031 | 8.934 | 0 | 0.478 |
| TESTI2004295 | 0 | 0.000 | 9.766 |
| TESTI2004737 | 0 | 0.000 | 2.113 |
| TESTI2004929 | 0 | 0.000 | 3.386 |
| TESTI2005731 | 0 | 0.000 | 3.941 |
| TESTI2005759 | 0 | 0.000 | 2.231 |
| TESTI2005908 | 0 | 0.000 | 1.878 |
| TESTI2006051 | 0 | 0.000 | 0.505 |
| TESTI2006111 | 0 | 0.000 | 24.590 |
| TESTI2006588 | 0 | 0.000 | 4.520 |
| TESTI2007211 | 0 | 0.000 | 3.939 |
| TESTI2007407 | 0 | 0.000 | 7.322 |
| TESTI2008240 | 0 | 0.000 | 2.982 |
| TESTI2008835 | 0 | 0.000 | 12.941 |
| TESTI2009520 | 0 | 0.000 | 0.894 |
| TESTI2009577 | 0 | 0.000 | 2.108 |
| TESTI2009785 | 0 | 0.000 | 6.845 |
| TESTI2010513 | 8.756 | 0 | 1.874 |
| TESTI2011683 | 0 | 0.000 | 38.615 |
| TESTI2014838 | 0 | 0.000 | 3.160 |
| TESTI2015213 | 0 | 0.000 | 0.612 |
| TESTI2015626 | 7.329 | 0 | 0.784 |
| TESTI2017954 | 0 | 0.000 | 0.790 |
| TESTI2018462 | 0 | 0.000 | 3.370 |
| TESTI2020871 | 0 | 0.000 | 64.596 |
| TESTI2021124 | 0 | 0.000 | 6.816 |
| TESTI2021358 | 0 | 0.000 | 40.357 |
| TESTI2021425 | 0 | 0.000 | 4.107 |
| TESTI2027165 | 0 | 0.000 | 64.596 |
| TESTI2029259 | 73.757 | 0 | 3.947 |
| TESTI2033441 | 0 | 0.000 | 2.618 |
| TESTI2034940 | 0 | 0.000 | 1.864 |
| TESTI2036913 | 0 | 0.000 | 24.204 |
| TESTI2036969 | 0 | 0.000 | 4.285 |
| TESTI2039177 | 0 | 0.000 | 4.943 |
| TESTI2044788 | 0 | 0.000 | 64.596 |
| TESTI2046456 | 0 | 0.000 | 1.104 |
| TESTI2047605 | 0 | 0.000 | 17.379 |
| TESTI2053723 | 0 | 0.000 | 5.399 |
| TESTI4000014 | 0 | 0.000 | 0.639 |
| TESTI4001467 | 0 | 0.000 | 6.603 |
| TESTI4002072 | 0 | 0.000 | 3.983 |
| TESTI4002195 | 0 | 0.000 | 15.959 |
| TESTI4002799 | 9.842 | 0 | 1.053 |
| TESTI4003703 | 0 | 0.000 | 5.277 |
| TESTI4003944 | 0 | 0.000 | 41.606 |
| TESTI4005399 | 0 | 0.000 | 9.300 |
| TESTI4005534 | 0 | 0.000 | 33.259 |
| TESTI4008797 | 0 | 0.000 | 14.824 |
| TESTI4009286 | 0 | 0.000 | 2.594 |
| TESTI4013441 | 0 | 14.788 | 0.374 |
| TESTI4013675 | 0 | 0.000 | 35.326 |
| TESTI4013894 | 0 | 0.000 | 33.408 |
| TESTI4014159 | 0 | 0.000 | 13.979 |
| TESTI4018886 | 0 | 0.000 | 64.596 |
| TESTI4024245 | 0 | 0.000 | 40.205 |
| TESTI4029671 | 0 | 0.000 | 22.183 |
| TESTI4037156 | 0 | 0.000 | 1.320 |
| TESTI4038284 | 41.043 | 0 | 0.000 |
| THYMU1000002 | 13.191 | 0 | 0.000 |
| THYMU1000016 | 0 | 0.000 | 2.304 |
| THYMU1000041 | 0 | 0.000 | 5.672 |
| THYMU1000083 | 0 | 0.000 | 10.729 |
| THYMU1000103 | 0 | 0.000 | 2.103 |
| THYMU1000109 | 0 | 0.000 | 0.939 |
| THYMU1000142 | 0 | 0.000 | 58.853 |
| THYMU1000316 | 0 | 0.000 | 58.853 |
| THYMU1000359 | 0 | 0.000 | 1.918 |
| THYMU1000374 | 0 | 0.000 | 3.573 |
| THYMU1000394 | 0 | 0.000 | 11.726 |
| THYMU1000428 | 0 | 0.000 | 0.678 |
| THYMU2000382 | 0 | 0.000 | 2.892 |
| THYMU2000436 | 20.534 | 0 | 1.099 |
| THYMU2000684 | 0 | 0.000 | 4.966 |
| THYMU2001007 | 0 | 0.000 | 6.471 |
| THYMU2001422 | 0 | 0.000 | 14.855 |
| THYMU2002583 | 0 | 0.000 | 0.618 |
| THYMU2002815 | 0 | 0.000 | 39.408 |
| THYMU2003012 | 0 | 0.000 | 2.090 |
| THYMU2003046 | 0 | 0.000 | 4.585 |
| THYMU2003419 | 0 | 0.000 | 3.594 |
| THYMU2003446 | 0 | 0.000 | 2.845 |
| THYMU2003891 | 0 | 0.000 | 0.174 |
| THYMU2003981 | 0 | 0.000 | 2.491 |
| THYMU2004152 | 0 | 0.000 | 1.184 |
| THYMU2004410 | 0 | 0.000 | 2.285 |
| THYMU2005546 | 12.190 | 0 | 0.000 |
| THYMU2006505 | 0 | 0.000 | 6.513 |
| THYMU2006813 | 0 | 0.000 | 1.887 |
| THYMU2007415 | 0 | 0.000 | 8.658 |
| THYMU2007467 | 0 | 0.000 | 4.818 |
| THYMU2007886 | 30.859 | 0 | 0.000 |
| THYMU2008686 | 0 | 0.000 | 14.535 |
| THYMU2008725 | 0 | 0.000 | 15.552 |
| THYMU2009658 | 0 | 0.000 | 0.418 |
| THYMU2010094 | 0 | 0.000 | 6.947 |
| THYMU2010448 | 0 | 0.000 | 6.315 |
| THYMU2012024 | 0 | 0.000 | 3.554 |
| THYMU2013916 | 0 | 0.000 | 2.646 |
| THYMU2015321 | 0 | 0.000 | 58.853 |
| THYMU2019021 | 0 | 0.000 | 5.796 |
| THYMU2020667 | 0 | 0.000 | 41.697 |
| THYMU2021684 | 0 | 0.000 | 58.853 |
| THYMU2024071 | 0 | 0.000 | 39.309 |
| THYMU2025319 | 0 | 0.000 | 39.408 |
| THYMU2031890 | 0 | 0.000 | 21.176 |
| THYMU2033070 | 0 | 0.000 | 58.853 |
| THYMU2034917 | 0 | 0.000 | 23.175 |
| THYMU2035735 | 0 | 0.000 | 11.014 |
| THYMU2036461 | 0 | 0.000 | 18.090 |
| THYMU3001472 | 0 | 0.000 | 20.097 |
| THYMU3002578 | 0 | 0.000 | 36.487 |
| THYMU3013386 | 0 | 0.000 | 1.786 |
| THYMU3021586 | 0 | 0.000 | 4.926 |
| THYMU3026350 | 0 | 0.000 | 17.045 |
| THYMU3028410 | 0 | 0.000 | 58.853 |
| THYMU3032798 | 0 | 0.000 | 2.306 |
| THYMU3034616 | 0 | 0.000 | 58.853 |
| THYMU3034671 | 0 | 0.000 | 19.911 |
| TOVAR2000476 | 50.572 | 0 | 0.000 |
| TRACH1000030 | 0 | 0.000 | 5.760 |
| TRACH1000038 | 0 | 0.000 | 8.984 |
| TRACH1000063 | 0 | 0.000 | 2.565 |
| TRACH1000181 | 0 | 0.000 | 5.650 |
| TRACH1000205 | 0 | 0.000 | 4.694 |
| TRACH2000079 | 0 | 0.000 | 0.646 |
| TRACH2000237 | 0 | 0.000 | 6.412 |
| TRACH2000248 | 0 | 0.000 | 2.496 |
| TRACH2000321 | 0 | 0.000 | 2.344 |
| TRACH2000359 | 0 | 0.000 | 3.557 |
| TRACH2000461 | 0 | 0.000 | 2.045 |
| TRACH2000472 | 0 | 0.000 | 9.166 |
| TRACH2000780 | 0 | 0.000 | 5.212 |
| TRACH2000959 | 0 | 0.000 | 0.582 |
| TRACH2001021 | 9.332 | 0 | 1.498 |
| TRACH2001192 | 0 | 0.000 | 40.205 |
| TRACH2001289 | 0 | 0.000 | 1.622 |
| TRACH2001432 | 0 | 0.000 | 1.327 |
| TRACH2001443 | 0 | 0.000 | 11.083 |
| TRACH2001463 | 0 | 0.000 | 3.652 |
| TRACH2001549 | 0 | 0.000 | 5.043 |
| TRACH2001596 | 0 | 0.000 | 24.409 |
| TRACH2001612 | 0 | 0.000 | 4.764 |
| TRACH2001810 | 0 | 0.000 | 0.926 |
| TRACH2002054 | 0 | 0.000 | 51.568 |
| TRACH2002537 | 0 | 0.000 | 2.212 |
| TRACH2003272 | 0 | 0.000 | 4.419 |
| TRACH2003323 | 0 | 0.000 | 2.123 |
| TRACH2005811 | 0 | 0.000 | 1.258 |
| TRACH2007399 | 0 | 0.000 | 1.685 |
| TRACH2008300 | 0 | 0.000 | 2.025 |
| TRACH2014124 | 0 | 0.000 | 3.693 |
| TRACH2014442 | 50.173 | 0 | 0.000 |
| TRACH2014997 | 0 | 0.000 | 25.316 |
| TRACH2015823 | 0 | 0.000 | 5.218 |
| TRACH2016481 | 0 | 0.000 | 51.568 |
| TRACH2017609 | 0 | 0.000 | 37.903 |
| TRACH2018950 | 0 | 0.000 | 17.915 |
| TRACH3000692 | 0 | 0.000 | 5.590 |
| TRACH3002192 | 0 | 0.000 | 4.463 |
| TRACH3003379 | 0 | 0.000 | 29.185 |
| TRACH3003547 | 0 | 0.000 | 5.044 |
| TRACH3003872 | 0 | 0.000 | 9.820 |
| TRACH3004068 | 0 | 0.000 | 1.700 |
| TRACH3004721 | 0 | 0.000 | 3.467 |
| TRACH3005699 | 0 | 0.000 | 22.893 |
| TRACH3006800 | 0 | 0.000 | 34.742 |
| TRACH3007479 | 0 | 0.000 | 3.848 |
| TRACH3008632 | 0 | 0.000 | 20.157 |
| TRACH3009008 | 0 | 0.000 | 5.843 |
| TRACH3009148 | 0 | 0.000 | 10.698 |
| TUTER1000014 | 100.000 | 0 | 0.000 |
| TUTER1000122 | 72.738 | 0 | 0.000 |
| TUTER1000137 | 95.706 | 0 | 0.000 |
| TUTER2000057 | 92.461 | 0 | 0.000 |
| TUTER2000283 | 100.000 | 0 | 0.000 |
| TUTER2000425 | 100.000 | 0 | 0.000 |
| TUTER2000904 | 62.217 | 0 | 3.330 |
| TUTER2000916 | 100.000 | 0 | 0.000 |
| TUTER2001286 | 100.000 | 0 | 0.000 |
| TUTER2001341 | 100.000 | 0 | 0.000 |
| TUTER2001387 | 100.000 | 0 | 0.000 |
| TUTER2001433 | 100.000 | 0 | 0.000 |
| TUTER2001461 | 100.000 | 0 | 0.000 |
| TUTER2002028 | 100.000 | 0 | 0.000 |
| TUTER2002074 | 100.000 | 0 | 0.000 |
| TUTER2002158 | 100.000 | 0 | 0.000 |
| TUTER2002228 | 100.000 | 0 | 0.000 |
| TUTER2002323 | 72.582 | 0 | 0.000 |
| TUTER2002356 | 100.000 | 0 | 0.000 |
| TUTER2002729 | 100.000 | 0 | 0.000 |
| UMVEN1000122 | 0 | 92.143 | 0.000 |
| UMVEN1000143 | 0 | 77.431 | 0.000 |
| UMVEN1000156 | 0 | 97.424 | 0.000 |
| UMVEN1000186 | 0 | 74.732 | 0.630 |
| UMVEN2000046 | 0 | 100.000 | 0.000 |
| UMVEN2000069 | 0 | 100.000 | 0.000 |
| UMVEN2000121 | 0 | 97.690 | 0.000 |
| UMVEN2000133 | 0 | 55.263 | 2.097 |
| UMVEN2000152 | 0 | 74.264 | 0.000 |
| UMVEN2000354 | 0 | 77.661 | 0.000 |
| UMVEN2000453 | 0 | 49.229 | 1.245 |
| UTERU1000008 | 0 | 0.000 | 58.853 |
| UTERU1000015 | 0 | 0.000 | 100.000 |
| UTERU1000024 | 0 | 0.000 | 100.000 |
| UTERU1000031 | 0 | 0.000 | 100.000 |
| UTERU1000032 | 0 | 0.000 | 100.000 |
| UTERU1000057 | 0 | 0.000 | 100.000 |
| UTERU1000065 | 0 | 0.000 | 100.000 |
| UTERU1000077 | 0 | 0.000 | 100.000 |
| UTERU1000093 | 0 | 0.000 | 100.000 |
| UTERU1000096 | 0 | 0.000 | 24.268 |
| UTERU1000106 | 0 | 0.000 | 6.873 |
| UTERU1000109 | 0 | 0.000 | 100.000 |
| UTERU1000131 | 0 | 0.000 | 100.000 |
| UTERU1000138 | 0 | 0.000 | 100.000 |
| UTERU1000148 | 0 | 0.000 | 100.000 |
| UTERU1000160 | 0 | 0.000 | 100.000 |
| UTERU1000182 | 0 | 0.000 | 1.935 |
| UTERU1000183 | 0 | 0.000 | 100.000 |
| UTERU1000187 | 0 | 0.000 | 100.000 |
| UTERU1000192 | 0 | 0.000 | 100.000 |
| UTERU1000249 | 0 | 0.000 | 100.000 |
| UTERU1000337 | 0 | 0.000 | 100.000 |
| UTERU1000339 | 0 | 0.000 | 100.000 |
| UTERU1000384 | 0 | 0.000 | 8.500 |
| UTERU2000023 | 0 | 0.000 | 24.419 |
| UTERU2000047 | 0 | 0.000 | 100.000 |
| UTERU2000074 | 0 | 0.000 | 62.692 |
| UTERU2000095 | 0 | 0.000 | 0.987 |
| UTERU2000099 | 0 | 0.000 | 100.000 |
| UTERU2000154 | 0 | 0.000 | 100.000 |
| UTERU2000197 | 0 | 0.000 | 39.231 |
| UTERU2000218 | 0 | 0.000 | 100.000 |
| UTERU2000238 | 0 | 0.000 | 100.000 |
| UTERU2000243 | 0 | 0.000 | 100.000 |
| UTERU2000260 | 0 | 0.000 | 24.831 |
| UTERU2000263 | 0 | 0.000 | 2.444 |
| UTERU2000300 | 0 | 0.000 | 11.765 |
| UTERU2000329 | 0 | 0.000 | 68.264 |
| UTERU2000332 | 0 | 0.000 | 5.640 |
| UTERU2000338 | 0 | 0.000 | 3.979 |
| UTERU2000349 | 0 | 0.000 | 100.000 |
| UTERU2000377 | 0 | 0.000 | 100.000 |
| UTERU2000393 | 0 | 0.000 | 100.000 |
| UTERU2000418 | 0 | 0.000 | 34.205 |
| UTERU2000424 | 0 | 0.000 | 1.013 |
| UTERU2000465 | 0 | 0.000 | 100.000 |
| UTERU2000485 | 0 | 0.000 | 15.228 |
| UTERU2000517 | 0 | 0.000 | 100.000 |
| UTERU2000524 | 0 | 0.000 | 100.000 |
| UTERU2000537 | 0 | 0.000 | 12.239 |
| UTERU2000539 | 0 | 0.000 | 100.000 |
| UTERU2000541 | 0 | 0.000 | 7.522 |
| UTERU2000542 | 0 | 0.000 | 10.769 |
| UTERU2000546 | 0 | 0.000 | 100.000 |
| UTERU2000550 | 0 | 0.000 | 100.000 |
| UTERU2000569 | 0 | 0.000 | 100.000 |
| UTERU2000607 | 0 | 0.000 | 100.000 |
| UTERU2000629 | 0 | 0.000 | 100.000 |
| UTERU2000649 | 0 | 0.000 | 100.000 |
| UTERU2000663 | 0 | 0.000 | 100.000 |
| UTERU2000696 | 63.416 | 0 | 3.394 |
| UTERU2000794 | 0 | 0.000 | 100.000 |
| UTERU2000830 | 0 | 0.000 | 100.000 |
| UTERU2000844 | 0 | 0.000 | 100.000 |
| UTERU2000922 | 0 | 0.000 | 100.000 |
| UTERU2000925 | 0 | 0.000 | 12.420 |
| UTERU2001024 | 0 | 0.000 | 100.000 |
| UTERU2001110 | 0 | 0.000 | 24.268 |
| UTERU2001176 | 0 | 0.000 | 100.000 |
| UTERU2001281 | 0 | 0.000 | 100.000 |
| UTERU2001389 | 0 | 0.000 | 100.000 |
| UTERU2001409 | 0 | 0.000 | 100.000 |
| UTERU2001412 | 0 | 0.000 | 100.000 |
| UTERU2001504 | 0 | 0.000 | 100.000 |
| UTERU2001607 | 0 | 0.000 | 1.759 |
| UTERU2001658 | 0 | 0.000 | 10.564 |
| UTERU2001747 | 0 | 0.000 | 100.000 |
| UTERU2001876 | 0 | 0.000 | 100.000 |
| UTERU2002001 | 0 | 0.000 | 40.126 |
| UTERU2002011 | 0 | 0.000 | 100.000 |
| UTERU2002176 | 0 | 0.000 | 100.000 |
| UTERU2002198 | 0 | 0.000 | 64.596 |
| UTERU2002294 | 0 | 0.000 | 2.165 |
| UTERU2002332 | 0 | 0.000 | 100.000 |
| UTERU2002410 | 13.085 | 0 | 0.700 |
| UTERU2002473 | 0 | 0.000 | 100.000 |
| UTERU2002547 | 0 | 0.000 | 100.000 |
| UTERU2002662 | 0 | 0.000 | 4.244 |
| UTERU2002693 | 0 | 0.000 | 100.000 |
| UTERU2002733 | 0 | 0.000 | 100.000 |
| UTERU2002736 | 0 | 0.000 | 100.000 |
| UTERU2002737 | 0 | 0.000 | 100.000 |
| UTERU2002826 | 82.260 | 0 | 4.402 |
| UTERU2002841 | 0 | 0.000 | 64.596 |
| UTERU2002964 | 0 | 0.000 | 25.187 |
| UTERU2002993 | 0 | 0.000 | 64.596 |
| UTERU2003035 | 0 | 0.000 | 100.000 |
| UTERU2003057 | 0 | 0.000 | 3.085 |
| UTERU2003126 | 0 | 0.000 | 100.000 |
| UTERU2003135 | 0 | 0.000 | 100.000 |
| UTERU2003321 | 0 | 0.000 | 47.706 |
| UTERU2003399 | 0 | 0.000 | 100.000 |
| UTERU2003411 | 0 | 0.000 | 0.360 |
| UTERU2003456 | 0 | 0.000 | 12.899 |
| UTERU2003577 | 0 | 0.000 | 100.000 |
| UTERU2003704 | 0 | 0.000 | 20.529 |
| UTERU2003926 | 0 | 0.000 | 40.126 |
| UTERU2003973 | 0 | 0.000 | 100.000 |
| UTERU2004015 | 0 | 0.000 | 100.000 |
| UTERU2004037 | 0 | 0.000 | 5.230 |
| UTERU2004039 | 0 | 0.000 | 100.000 |
| UTERU2004061 | 0 | 0.000 | 100.000 |
| UTERU2004073 | 0 | 0.000 | 23.318 |
| UTERU2004163 | 0 | 0.000 | 100.000 |
| UTERU2004197 | 0 | 0.000 | 4.796 |
| UTERU2004299 | 0 | 0.000 | 100.000 |
| UTERU2004461 | 0 | 0.000 | 32.361 |
| UTERU2004520 | 0 | 0.000 | 39.037 |
| UTERU2004564 | 0 | 0.000 | 100.000 |
| UTERU2004664 | 0 | 0.000 | 4.048 |
| UTERU2004688 | 0 | 0.000 | 6.630 |
| UTERU2004698 | 0 | 0.000 | 100.000 |
| UTERU2004807 | 0 | 0.000 | 17.972 |
| UTERU2004861 | 0 | 0.000 | 56.434 |
| UTERU2004929 | 0 | 0.000 | 13.845 |
| UTERU2005004 | 0 | 0.000 | 41.697 |
| UTERU2005050 | 0 | 0.000 | 100.000 |
| UTERU2005069 | 0 | 0.000 | 64.596 |
| UTERU2005074 | 0 | 0.000 | 27.087 |
| UTERU2005179 | 0 | 0.000 | 100.000 |
| UTERU2005292 | 0 | 0.000 | 3.714 |
| UTERU2005346 | 0 | 0.000 | 100.000 |
| UTERU2005354 | 0 | 0.000 | 2.609 |
| UTERU2005446 | 0 | 0.000 | 24.816 |
| UTERU2005449 | 0 | 0.000 | 19.526 |
| UTERU2005450 | 0 | 0.000 | 100.000 |
| UTERU2005533 | 0 | 0.000 | 100.000 |
| UTERU2005593 | 0 | 0.000 | 4.016 |
| UTERU2005601 | 0 | 0.000 | 3.040 |
| UTERU2005621 | 0 | 0.000 | 5.377 |
| UTERU2005664 | 0 | 0.000 | 13.328 |
| UTERU2005822 | 0 | 0.000 | 100.000 |
| UTERU2005903 | 0 | 0.000 | 100.000 |
| UTERU2005905 | 0 | 0.000 | 100.000 |
| UTERU2006103 | 0 | 0.000 | 100.000 |
| UTERU2006115 | 0 | 0.000 | 9.347 |
| UTERU2006137 | 0 | 0.000 | 9.269 |
| UTERU2006182 | 0 | 0.000 | 100.000 |
| UTERU2006400 | 0 | 0.000 | 15.228 |
| UTERU2006412 | 0 | 0.000 | 100.000 |
| UTERU2006429 | 0 | 0.000 | 100.000 |
| UTERU2006486 | 0 | 0.000 | 51.819 |
| UTERU2006524 | 0 | 0.000 | 53.896 |
| UTERU2006547 | 0 | 0.000 | 24.268 |
| UTERU2006568 | 0 | 0.000 | 100.000 |
| UTERU2006593 | 0 | 0.000 | 3.522 |
| UTERU2006643 | 0 | 0.000 | 10.128 |
| UTERU2006651 | 0 | 0.000 | 100.000 |
| UTERU2006705 | 0 | 0.000 | 100.000 |
| UTERU2006899 | 0 | 0.000 | 100.000 |
| UTERU2007004 | 0 | 0.000 | 24.856 |
| UTERU2007075 | 0 | 0.000 | 100.000 |
| UTERU2007081 | 0 | 0.000 | 17.449 |
| UTERU2007128 | 0 | 0.000 | 100.000 |
| UTERU2007253 | 0 | 0.000 | 12.290 |
| UTERU2007267 | 0 | 0.000 | 100.000 |
| UTERU2007444 | 0 | 0.000 | 64.596 |
| UTERU2007499 | 0 | 0.000 | 100.000 |
| UTERU2007639 | 0 | 0.000 | 100.000 |
| UTERU2007724 | 0 | 0.000 | 15.672 |
| UTERU2007924 | 0 | 0.000 | 3.190 |
| UTERU2007942 | 0 | 0.000 | 100.000 |
| UTERU2008018 | 0 | 0.000 | 24.856 |
| UTERU2008019 | 0 | 0.000 | 100.000 |
| UTERU2008027 | 0 | 0.000 | 4.562 |
| UTERU2008040 | 0 | 0.000 | 14.037 |
| UTERU2008077 | 0 | 0.000 | 100.000 |
| UTERU2008085 | 0 | 0.000 | 0.323 |
| UTERU2008130 | 0 | 0.000 | 53.896 |
| UTERU2008302 | 0 | 0.000 | 3.187 |
| UTERU2008347 | 0 | 0.000 | 100.000 |
| UTERU2008426 | 0 | 0.000 | 26.260 |
| UTERU2008516 | 0 | 0.000 | 100.000 |
| UTERU2008561 | 0 | 0.000 | 100.000 |
| UTERU2008653 | 0 | 0.000 | 48.981 |
| UTERU2008705 | 0 | 0.000 | 100.000 |
| UTERU2008707 | 0 | 0.000 | 100.000 |
| UTERU2008747 | 0 | 0.000 | 10.541 |
| UTERU2008785 | 0 | 0.000 | 100.000 |
| UTERU2008845 | 0 | 0.000 | 100.000 |
| UTERU2008901 | 0 | 0.000 | 100.000 |
| UTERU2008930 | 0 | 0.000 | 100.000 |
| UTERU2008938 | 0 | 0.000 | 8.806 |
| UTERU2008939 | 0 | 0.000 | 17.716 |
| UTERU2008962 | 0 | 0.000 | 64.596 |
| UTERU2009094 | 0 | 0.000 | 100.000 |
| UTERU2009120 | 0 | 0.000 | 100.000 |
| UTERU2009131 | 0 | 0.000 | 100.000 |
| UTERU2009147 | 0 | 0.000 | 100.000 |
| UTERU2009206 | 0 | 0.000 | 100.000 |
| UTERU2009283 | 0 | 0.000 | 100.000 |
| UTERU2009335 | 0 | 0.000 | 10.852 |
| UTERU2009414 | 0 | 0.000 | 100.000 |
| UTERU2009435 | 0 | 0.000 | 12.756 |
| UTERU2009483 | 0 | 0.000 | 100.000 |
| UTERU2009510 | 0 | 0.000 | 17.926 |
| UTERU2009538 | 0 | 0.000 | 40.674 |
| UTERU2009540 | 0 | 0.000 | 100.000 |
| UTERU2009776 | 0 | 0.000 | 100.000 |
| UTERU2009904 | 0 | 0.000 | 100.000 |
| UTERU2009951 | 0 | 0.000 | 100.000 |
| UTERU2009972 | 0 | 0.000 | 16.901 |
| UTERU2010115 | 0 | 0.000 | 100.000 |
| UTERU2010124 | 0 | 0.000 | 100.000 |
| UTERU2010164 | 0 | 0.000 | 100.000 |
| UTERU2010226 | 0 | 0.000 | 9.408 |
| UTERU2010231 | 0 | 0.000 | 100.000 |
| UTERU2010304 | 0 | 0.000 | 100.000 |
| UTERU2010320 | 0 | 0.000 | 25.187 |
| UTERU2010417 | 7.026 | 0 | 1.128 |
| UTERU2010431 | 0 | 0.000 | 100.000 |
| UTERU2010525 | 0 | 0.000 | 14.053 |
| UTERU2010651 | 0 | 0.000 | 100.000 |
| UTERU2010724 | 0 | 0.000 | 100.000 |
| UTERU2010747 | 0 | 0.000 | 62.692 |
| UTERU2011195 | 0 | 0.000 | 100.000 |
| UTERU2011199 | 0 | 0.000 | 100.000 |
| UTERU2011220 | 0 | 0.000 | 4.669 |
| UTERU2011261 | 0 | 0.000 | 100.000 |
| UTERU2011287 | 0 | 0.000 | 39.146 |
| UTERU2011410 | 0 | 0.000 | 100.000 |
| UTERU2011574 | 0 | 0.000 | 100.000 |
| UTERU2011621 | 0 | 0.000 | 11.843 |
| UTERU2011657 | 0 | 0.000 | 100.000 |
| UTERU2011741 | 0 | 0.000 | 14.051 |
| UTERU2011806 | 0 | 0.000 | 49.807 |
| UTERU2011811 | 0 | 0.000 | 100.000 |
| UTERU2011897 | 0 | 0.000 | 100.000 |
| UTERU2011906 | 0 | 0.000 | 16.267 |
| UTERU2011962 | 0 | 0.000 | 100.000 |
| UTERU2011968 | 0 | 0.000 | 100.000 |
| UTERU2012031 | 0 | 0.000 | 53.896 |
| UTERU2012101 | 0 | 0.000 | 100.000 |
| UTERU2012114 | 0 | 0.000 | 100.000 |
| UTERU2012230 | 0 | 0.000 | 18.890 |
| UTERU2012252 | 0 | 0.000 | 25.609 |
| UTERU2012286 | 0 | 0.000 | 3.022 |
| UTERU2012333 | 0 | 0.000 | 100.000 |
| UTERU2012407 | 0 | 0.000 | 29.356 |
| UTERU2012526 | 0 | 0.000 | 11.013 |
| UTERU2012581 | 0 | 0.000 | 100.000 |
| UTERU2012610 | 0 | 0.000 | 100.000 |
| UTERU2012615 | 0 | 0.000 | 100.000 |
| UTERU2012688 | 0 | 0.000 | 51.568 |
| UTERU2012703 | 0 | 0.000 | 24.539 |
| UTERU2012715 | 0 | 0.000 | 34.205 |
| UTERU2012741 | 0 | 0.000 | 21.469 |
| UTERU2012767 | 0 | 0.000 | 6.351 |
| UTERU2012786 | 0 | 0.000 | 100.000 |
| UTERU2012856 | 0 | 0.000 | 8.416 |
| UTERU2012890 | 0 | 0.000 | 100.000 |
| UTERU2012938 | 0 | 0.000 | 48.981 |
| UTERU2012976 | 0 | 0.000 | 100.000 |
| UTERU2013048 | 0 | 0.000 | 100.000 |
| UTERU2013078 | 0 | 0.000 | 16.358 |
| UTERU2013231 | 0 | 0.000 | 100.000 |
| UTERU2013262 | 0 | 0.000 | 43.775 |
| UTERU2013280 | 0 | 0.000 | 100.000 |
| UTERU2013322 | 0 | 0.000 | 100.000 |
| UTERU2013483 | 0 | 0.000 | 100.000 |
| UTERU2013491 | 0 | 0.000 | 13.929 |
| UTERU2013502 | 0 | 0.000 | 40.214 |
| UTERU2013586 | 0 | 0.000 | 7.858 |
| UTERU2013926 | 0 | 0.000 | 100.000 |
| UTERU2013976 | 0 | 0.000 | 100.000 |
| UTERU2014001 | 0 | 0.000 | 100.000 |
| UTERU2014024 | 0 | 0.000 | 15.457 |
| UTERU2014167 | 0 | 0.000 | 1.087 |
| UTERU2014223 | 0 | 0.000 | 100.000 |
| UTERU2014398 | 0 | 0.000 | 100.000 |
| UTERU2014464 | 0 | 0.000 | 16.101 |
| UTERU2014548 | 0 | 0.000 | 39.231 |
| UTERU2014601 | 0 | 0.000 | 16.520 |
| UTERU2014631 | 0 | 0.000 | 100.000 |
| UTERU2014668 | 0 | 0.000 | 39.231 |
| UTERU2014678 | 0 | 0.000 | 48.981 |
| UTERU2014728 | 0 | 0.000 | 100.000 |
| UTERU2014898 | 0 | 0.000 | 1.815 |
| UTERU2014998 | 0 | 0.000 | 100.000 |
| UTERU2015062 | 0 | 0.000 | 17.070 |
| UTERU2015087 | 0 | 0.000 | 100.000 |
| UTERU2015108 | 0 | 0.000 | 7.526 |
| UTERU2015190 | 0 | 0.000 | 40.674 |
| UTERU2015198 | 0 | 0.000 | 100.000 |
| UTERU2015202 | 0 | 0.000 | 100.000 |
| UTERU2015405 | 0 | 0.000 | 100.000 |
| UTERU2015640 | 0 | 0.000 | 100.000 |
| UTERU2015653 | 0 | 0.000 | 4.175 |
| UTERU2015830 | 0 | 0.000 | 58.853 |
| UTERU2015880 | 0 | 0.000 | 100.000 |
| UTERU2016147 | 0 | 0.000 | 100.000 |
| UTERU2016157 | 0 | 0.000 | 100.000 |
| UTERU2016426 | 0 | 0.000 | 15.158 |
| UTERU2016464 | 0 | 0.000 | 100.000 |
| UTERU2016669 | 0 | 0.000 | 9.848 |
| UTERU2016757 | 0 | 0.000 | 54.394 |
| UTERU2016761 | 0 | 0.000 | 100.000 |
| UTERU2016799 | 0 | 0.000 | 10.404 |
| UTERU2016822 | 0 | 0.000 | 19.178 |
| UTERU2016896 | 0 | 0.000 | 100.000 |
| UTERU2016902 | 0 | 0.000 | 100.000 |
| UTERU2016979 | 0 | 0.000 | 12.336 |
| UTERU2016981 | 0 | 0.000 | 100.000 |
| UTERU2017123 | 0 | 0.000 | 100.000 |
| UTERU2017303 | 0 | 0.000 | 100.000 |
| UTERU2017421 | 0 | 0.000 | 100.000 |
| UTERU2017492 | 0 | 0.000 | 5.197 |
| UTERU2017613 | 0 | 0.000 | 12.264 |
| UTERU2017623 | 0 | 0.000 | 64.596 |
| UTERU2017632 | 0 | 0.000 | 64.596 |
| UTERU2017761 | 0 | 0.000 | 62.692 |
| UTERU2017762 | 0 | 0.000 | 39.037 |
| UTERU2017810 | 0 | 0.000 | 100.000 |
| UTERU2017988 | 0 | 0.000 | 100.000 |
| UTERU2018127 | 0 | 0.000 | 100.000 |
| UTERU2018180 | 0 | 0.000 | 100.000 |
| UTERU2018200 | 0 | 0.000 | 28.946 |
| UTERU2018333 | 0 | 0.000 | 100.000 |
| UTERU2018364 | 0 | 0.000 | 53.896 |
| UTERU2018514 | 0 | 0.000 | 100.000 |
| UTERU2018522 | 0 | 0.000 | 100.000 |
| UTERU2018523 | 0 | 0.000 | 40.126 |
| UTERU2018544 | 0 | 0.000 | 100.000 |
| UTERU2018566 | 0 | 0.000 | 21.258 |
| UTERU2018609 | 0 | 0.000 | 100.000 |
| UTERU2018674 | 0 | 0.000 | 100.000 |
| UTERU2018712 | 0 | 0.000 | 54.206 |
| UTERU2018784 | 0 | 0.000 | 100.000 |
| UTERU2018789 | 0 | 0.000 | 100.000 |
| UTERU2018811 | 0 | 0.000 | 100.000 |
| UTERU2018867 | 0 | 0.000 | 100.000 |
| UTERU2018881 | 0 | 0.000 | 100.000 |
| UTERU2018884 | 0 | 0.000 | 1.848 |
| UTERU2018955 | 0 | 0.000 | 100.000 |
| UTERU2019005 | 0 | 0.000 | 7.703 |
| UTERU2019038 | 0 | 0.000 | 100.000 |
| UTERU2019096 | 0 | 0.000 | 5.495 |
| UTERU2019163 | 0 | 0.000 | 100.000 |
| UTERU2019257 | 0 | 0.000 | 57.271 |
| UTERU2019453 | 0 | 0.000 | 100.000 |
| UTERU2019491 | 0 | 0.000 | 100.000 |
| UTERU2019534 | 0 | 0.000 | 100.000 |
| UTERU2019681 | 0 | 0.000 | 100.000 |
| UTERU2019706 | 0 | 0.000 | 54.394 |
| UTERU2019710 | 0 | 0.000 | 100.000 |
| UTERU2019940 | 0 | 0.000 | 51.819 |
| UTERU2019959 | 0 | 0.000 | 100.000 |
| UTERU2019964 | 0 | 0.000 | 100.000 |
| UTERU2020226 | 0 | 0.000 | 78.491 |
| UTERU2020242 | 0 | 0.000 | 100.000 |
| UTERU2020292 | 0 | 0.000 | 100.000 |
| UTERU2020351 | 0 | 0.000 | 100.000 |
| UTERU2020491 | 0 | 0.000 | 100.000 |
| UTERU2020718 | 0 | 0.000 | 100.000 |
| UTERU2021163 | 0 | 0.000 | 53.896 |
| UTERU2021380 | 0 | 0.000 | 100.000 |
| UTERU2021649 | 0 | 0.000 | 100.000 |
| UTERU2021820 | 0 | 0.000 | 29.732 |
| UTERU2022020 | 0 | 0.000 | 100.000 |
| UTERU2022773 | 0 | 0.000 | 100.000 |
| UTERU2022955 | 0 | 0.000 | 100.000 |
| UTERU2022981 | 0 | 0.000 | 100.000 |
| UTERU2023039 | 0 | 0.000 | 54.394 |
| UTERU2023045 | 0 | 0.000 | 10.794 |
| UTERU2023175 | 0 | 0.000 | 7.103 |
| UTERU2023262 | 0 | 0.000 | 15.042 |
| UTERU2023550 | 0 | 0.000 | 9.988 |
| UTERU2023651 | 0 | 0.000 | 29.963 |
| UTERU2023687 | 0 | 0.000 | 100.000 |
| UTERU2023712 | 0 | 0.000 | 100.000 |
| UTERU2023941 | 0 | 0.000 | 100.000 |
| UTERU2024002 | 0 | 0.000 | 100.000 |
| UTERU2024042 | 0 | 0.000 | 100.000 |
| UTERU2024141 | 0 | 0.000 | 100.000 |
| UTERU2024481 | 0 | 0.000 | 100.000 |
| UTERU2024656 | 0 | 0.000 | 51.568 |
| UTERU2024758 | 0 | 0.000 | 100.000 |
| UTERU2024820 | 0 | 0.000 | 100.000 |
| UTERU2024881 | 0 | 0.000 | 100.000 |
| UTERU2024969 | 0 | 0.000 | 11.490 |
| UTERU2025025 | 0 | 0.000 | 100.000 |
| UTERU2025041 | 0 | 0.000 | 100.000 |
| UTERU2025301 | 0 | 0.000 | 5.184 |
| UTERU2025366 | 0 | 0.000 | 100.000 |
| UTERU2025415 | 0 | 0.000 | 100.000 |
| UTERU2025579 | 0 | 0.000 | 100.000 |
| UTERU2025645 | 0 | 0.000 | 100.000 |
| UTERU2025891 | 0 | 0.000 | 100.000 |
| UTERU2026025 | 0 | 0.000 | 100.000 |
| UTERU2026090 | 0 | 0.000 | 100.000 |
| UTERU2026142 | 0 | 0.000 | 100.000 |
| UTERU2026203 | 0 | 0.000 | 54.394 |
| UTERU2026775 | 0 | 0.000 | 100.000 |
| UTERU2027023 | 0 | 0.000 | 100.000 |
| UTERU2027369 | 0 | 0.000 | 39.231 |
| UTERU2027591 | 0 | 0.000 | 100.000 |
| UTERU2027616 | 0 | 0.000 | 100.000 |
| UTERU2027941 | 0 | 0.000 | 100.000 |
| UTERU2028377 | 0 | 0.000 | 100.000 |
| UTERU2028734 | 0 | 0.000 | 26.183 |
| UTERU2029503 | 0 | 0.000 | 100.000 |
| UTERU2029660 | 0 | 0.000 | 100.000 |
| UTERU2029742 | 0 | 0.000 | 100.000 |
| UTERU2029953 | 0 | 0.000 | 100.000 |
| UTERU2030213 | 0 | 0.000 | 58.763 |
| UTERU2030270 | 0 | 0.000 | 100.000 |
| UTERU2030280 | 0 | 0.000 | 51.819 |
| UTERU2031060 | 0 | 0.000 | 100.000 |
| UTERU2031084 | 0 | 0.000 | 25.928 |
| UTERU2031268 | 0 | 0.000 | 100.000 |
| UTERU2031295 | 0 | 0.000 | 100.000 |
| UTERU2031521 | 0 | 0.000 | 100.000 |
| UTERU2031611 | 0 | 0.000 | 100.000 |
| UTERU2031703 | 0 | 0.000 | 100.000 |
| UTERU2031834 | 0 | 0.000 | 100.000 |
| UTERU2031851 | 0 | 0.000 | 100.000 |
| UTERU2032075 | 0 | 0.000 | 100.000 |
| UTERU2032220 | 0 | 0.000 | 100.000 |
| UTERU2032279 | 0 | 0.000 | 100.000 |
| UTERU2032726 | 0 | 0.000 | 100.000 |
| UTERU2033172 | 0 | 0.000 | 100.000 |
| UTERU2033375 | 0 | 0.000 | 1.385 |
| UTERU2033382 | 0 | 0.000 | 100.000 |
| UTERU2033420 | 0 | 0.000 | 100.000 |
| UTERU2033530 | 0 | 0.000 | 100.000 |
| UTERU2033577 | 0 | 0.000 | 100.000 |
| UTERU2034053 | 0 | 0.000 | 100.000 |
| UTERU2034147 | 0 | 0.000 | 58.853 |
| UTERU2034695 | 0 | 0.000 | 100.000 |
| UTERU2035114 | 0 | 0.000 | 51.568 |
| UTERU2035187 | 0 | 0.000 | 100.000 |
| UTERU2035231 | 0 | 0.000 | 100.000 |
| UTERU2035306 | 0 | 0.000 | 100.000 |
| UTERU2035323 | 0 | 0.000 | 100.000 |
| UTERU2035328 | 0 | 0.000 | 100.000 |
| UTERU2035331 | 0 | 0.000 | 100.000 |
| UTERU2035452 | 0 | 0.000 | 100.000 |
| UTERU2035469 | 0 | 0.000 | 100.000 |
| UTERU2035503 | 0 | 0.000 | 100.000 |
| UTERU2035745 | 0 | 0.000 | 100.000 |
| UTERU2035908 | 0 | 0.000 | 100.000 |
| UTERU2035926 | 0 | 0.000 | 100.000 |
| UTERU2035978 | 0 | 0.000 | 100.000 |
| UTERU2036089 | 0 | 0.000 | 100.000 |
| UTERU2036347 | 0 | 0.000 | 37.903 |
| UTERU2036507 | 0 | 0.000 | 100.000 |
| UTERU2036512 | 0 | 0.000 | 100.000 |
| UTERU2036530 | 0 | 0.000 | 100.000 |
| UTERU2036623 | 0 | 0.000 | 100.000 |
| UTERU2036690 | 0 | 0.000 | 100.000 |
| UTERU2037224 | 0 | 0.000 | 100.000 |
| UTERU2037361 | 0 | 0.000 | 100.000 |
| UTERU2037423 | 0 | 0.000 | 100.000 |
| UTERU2037577 | 0 | 0.000 | 100.000 |
| UTERU2037674 | 0 | 0.000 | 100.000 |
| UTERU2037791 | 0 | 0.000 | 100.000 |
| UTERU2037843 | 0 | 0.000 | 100.000 |
| UTERU2038171 | 0 | 0.000 | 100.000 |
| UTERU2038251 | 0 | 0.000 | 100.000 |
| UTERU3000226 | 0 | 0.000 | 62.692 |
| UTERU3000298 | 0 | 0.000 | 11.036 |
| UTERU3000402 | 0 | 0.000 | 100.000 |
| UTERU3000645 | 0 | 0.000 | 34.742 |
| UTERU3000665 | 0 | 0.000 | 100.000 |
| UTERU3000670 | 0 | 0.000 | 83.447 |
| UTERU3000727 | 0 | 0.000 | 26.926 |
| UTERU3000738 | 0 | 0.000 | 41.697 |
| UTERU3000828 | 0 | 0.000 | 100.000 |
| UTERU3000844 | 0 | 0.000 | 64.596 |
| UTERU3000899 | 0 | 0.000 | 33.654 |
| UTERU3000959 | 0 | 0.000 | 100.000 |
| UTERU3001029 | 0 | 0.000 | 100.000 |
| UTERU3001053 | 0 | 0.000 | 100.000 |
| UTERU3001059 | 0 | 0.000 | 100.000 |
| UTERU3001158 | 0 | 0.000 | 39.606 |
| UTERU3001240 | 0 | 0.000 | 100.000 |
| UTERU3001394 | 0 | 0.000 | 100.000 |
| UTERU3001542 | 0 | 0.000 | 58.853 |
| UTERU3001558 | 0 | 0.000 | 100.000 |
| UTERU3001571 | 0 | 0.000 | 51.819 |
| UTERU3001585 | 0 | 0.000 | 100.000 |
| UTERU3001632 | 0 | 0.000 | 100.000 |
| UTERU3001652 | 0 | 0.000 | 100.000 |
| UTERU3001766 | 0 | 0.000 | 54.206 |
| UTERU3001988 | 0 | 0.000 | 100.000 |
| UTERU3002209 | 0 | 0.000 | 100.000 |
| UTERU3002218 | 0 | 0.000 | 51.568 |
| UTERU3002383 | 0 | 0.000 | 100.000 |
| UTERU3002600 | 0 | 0.000 | 100.000 |
| UTERU3002620 | 0 | 0.000 | 100.000 |
| UTERU3002667 | 0 | 0.000 | 100.000 |
| UTERU3002701 | 0 | 0.000 | 100.000 |
| UTERU3002731 | 0 | 0.000 | 100.000 |
| UTERU3002768 | 0 | 0.000 | 100.000 |
| UTERU3002786 | 0 | 0.000 | 51.568 |
| UTERU3002993 | 0 | 0.000 | 100.000 |
| UTERU3003116 | 0 | 0.000 | 100.000 |
| UTERU3003135 | 0 | 0.000 | 39.146 |
| UTERU3003178 | 0 | 0.000 | 100.000 |
| UTERU3003465 | 0 | 0.000 | 100.000 |
| UTERU3003495 | 0 | 0.000 | 100.000 |
| UTERU3003523 | 0 | 0.000 | 100.000 |
| UTERU3003660 | 0 | 0.000 | 8.781 |
| UTERU3003774 | 0 | 0.000 | 100.000 |
| UTERU3003776 | 0 | 0.000 | 100.000 |
| UTERU3004384 | 0 | 0.000 | 53.896 |
| UTERU3004418 | 0 | 0.000 | 34.722 |
| UTERU3004477 | 0 | 0.000 | 57.271 |
| UTERU3004523 | 0 | 0.000 | 100.000 |
| UTERU3004616 | 0 | 0.000 | 100.000 |
| UTERU3004635 | 0 | 0.000 | 100.000 |
| UTERU3004709 | 0 | 0.000 | 51.819 |
| UTERU3004938 | 0 | 0.000 | 100.000 |
| UTERU3004992 | 0 | 0.000 | 100.000 |
| UTERU3005049 | 0 | 0.000 | 58.853 |
| UTERU3005159 | 0 | 0.000 | 41.606 |
| UTERU3005205 | 0 | 0.000 | 100.000 |
| UTERU3005230 | 0 | 0.000 | 58.249 |
| UTERU3005264 | 0 | 0.000 | 100.000 |
| UTERU3005422 | 0 | 0.000 | 25.298 |
| UTERU3005460 | 0 | 0.000 | 62.692 |
| UTERU3005536 | 0 | 0.000 | 62.692 |
| UTERU3005585 | 0 | 0.000 | 100.000 |
| UTERU3005767 | 26.525 | 0 | 7.098 |
| UTERU3005907 | 0 | 0.000 | 15.610 |
| UTERU3005970 | 0 | 0.000 | 62.692 |
| UTERU3006008 | 0 | 0.000 | 100.000 |
| UTERU3006228 | 0 | 0.000 | 100.000 |
| UTERU3006308 | 0 | 0.000 | 62.692 |
| UTERU3006538 | 0 | 0.000 | 100.000 |
| UTERU3006640 | 0 | 0.000 | 100.000 |
| UTERU3006687 | 0 | 0.000 | 100.000 |
| UTERU3006720 | 0 | 0.000 | 100.000 |
| UTERU3006798 | 0 | 0.000 | 100.000 |
| UTERU3006884 | 0 | 0.000 | 100.000 |
| UTERU3007021 | 0 | 0.000 | 34.742 |
| UTERU3007104 | 0 | 0.000 | 51.568 |
| UTERU3007108 | 0 | 0.000 | 100.000 |
| UTERU3007134 | 0 | 0.000 | 100.000 |
| UTERU3007419 | 0 | 0.000 | 62.692 |
| UTERU3007640 | 0 | 0.000 | 54.394 |
| UTERU3007731 | 0 | 0.000 | 100.000 |
| UTERU3007913 | 0 | 0.000 | 87.049 |
| UTERU3008280 | 0 | 0.000 | 37.121 |
| UTERU3008463 | 0 | 0.000 | 100.000 |
| UTERU3008660 | 0 | 0.000 | 100.000 |
| UTERU3008671 | 0 | 0.000 | 100.000 |
| UTERU3008722 | 0 | 0.000 | 100.000 |
| UTERU3008917 | 0 | 0.000 | 100.000 |
| UTERU3009259 | 0 | 0.000 | 53.896 |
| UTERU3009490 | 0 | 0.000 | 100.000 |
| UTERU3009517 | 0 | 0.000 | 54.206 |
| UTERU3009690 | 0 | 0.000 | 100.000 |
| UTERU3009775 | 0 | 0.000 | 100.000 |
| UTERU3009871 | 0 | 0.000 | 21.605 |
| UTERU3009979 | 0 | 0.000 | 100.000 |
| UTERU3009987 | 0 | 0.000 | 100.000 |
| UTERU3010029 | 0 | 0.000 | 100.000 |
| UTERU3010409 | 0 | 0.000 | 53.665 |
| UTERU3010526 | 0 | 0.000 | 100.000 |
| UTERU3010604 | 0 | 0.000 | 40.126 |
| UTERU3010892 | 0 | 0.000 | 100.000 |
| UTERU3010919 | 0 | 0.000 | 100.000 |
| UTERU3011063 | 0 | 0.000 | 100.000 |
| UTERU3011092 | 0 | 0.000 | 100.000 |
| UTERU3011273 | 0 | 0.000 | 100.000 |
| UTERU3011398 | 0 | 0.000 | 100.000 |
| UTERU3011558 | 0 | 0.000 | 100.000 |
| UTERU3011579 | 0 | 0.000 | 34.742 |
| UTERU3011795 | 0 | 0.000 | 100.000 |
| UTERU3011837 | 0 | 0.000 | 100.000 |
| UTERU3012293 | 0 | 0.000 | 100.000 |
| UTERU3012414 | 0 | 0.000 | 51.819 |
| UTERU3012476 | 0 | 0.000 | 100.000 |
| UTERU3012599 | 0 | 0.000 | 100.000 |
| UTERU3012999 | 0 | 0.000 | 100.000 |
| UTERU3013167 | 0 | 0.000 | 54.394 |
| UTERU3013302 | 0 | 0.000 | 58.853 |
| UTERU3013781 | 0 | 0.000 | 100.000 |
| UTERU3014274 | 0 | 0.000 | 100.000 |
| UTERU3014446 | 0 | 0.000 | 100.000 |
| UTERU3014611 | 0 | 0.000 | 100.000 |
| UTERU3014647 | 0 | 0.000 | 100.000 |
| UTERU3014791 | 0 | 0.000 | 100.000 |
| UTERU3014906 | 0 | 0.000 | 100.000 |
| UTERU3015011 | 0 | 0.000 | 16.834 |
| UTERU3015086 | 0 | 0.000 | 100.000 |
| UTERU3015299 | 0 | 0.000 | 100.000 |
| UTERU3015412 | 0 | 0.000 | 100.000 |
| UTERU3015500 | 0 | 0.000 | 100.000 |
| UTERU3015647 | 0 | 0.000 | 100.000 |
| UTERU3015844 | 0 | 0.000 | 100.000 |
| UTERU3016070 | 0 | 0.000 | 100.000 |
| UTERU3016273 | 0 | 0.000 | 53.896 |
| UTERU3016274 | 0 | 0.000 | 100.000 |
| UTERU3016308 | 0 | 0.000 | 100.000 |
| UTERU3016789 | 0 | 0.000 | 100.000 |
| UTERU3017176 | 0 | 0.000 | 100.000 |
| UTERU3017441 | 0 | 0.000 | 100.000 |
| UTERU3017626 | 0 | 0.000 | 100.000 |
| UTERU3017995 | 0 | 0.000 | 13.044 |
| UTERU3018154 | 0 | 0.000 | 100.000 |
| UTERU3018172 | 0 | 0.000 | 38.038 |
| UTERU3018255 | 0 | 0.000 | 100.000 |
| UTERU3018616 | 0 | 0.000 | 25.167 |
| UTERU3018711 | 0 | 0.000 | 86.466 |
| UTERU3019078 | 0 | 0.000 | 100.000 |

[0712] Genes whose expression levels were negligibly low in each of the above-described libraries are shown with their clone names below.

[0713] 3NB691000018, 3NB691000085, 3NB691000113, 3NB691000116, 3NB691000129, 3NB691000191, 3NB692000012, 3NB692000029, 3NB692000102, 3NB692000154, 3NB692000276, 3NB692000305, 3NB692000330, 3NB692000374, 3NB692000429, 3NB692000484, 3NB692000529, 3NB692000973, 3NB692001002, 3NB692001022, 3NB692001034, 3NB692001040, 3NB692001123, 3NB692001267, 3NB692001288, 3NB692001339, 3NB692001349, 3NB692001366, 3NB692001408, 3NB692001433, 3NB692001442, 3NB692001459, 3NB692001471, 3NB692001496, 3NB692001501, 3NB692001507, 3NB692001511, 3NB692001519, 3NB692001520, 3NB692001528, 3NB692001538, 3NB692001548, 3NB692001557, 3NB692001637, 3NB692001719, 3NB692001861, 3NB692002051, 3NB692002365, 3NB692002685, 3NB692002806, 3NB692003538, 3NB692004045, 3NB692004724, 3NB692005439, 3NB692006952, 3NB692008178, 3NB692008729, ACTVT2000380, ADIPS1000064, ADIPS2000069, ADIPS2000088, ADIPS2000245, ADIPS2000425, ADRGL1000002, ADRGL1000018, ADRGL1000033, ADRGL1000038, ADRGL1000065, ADRGL1000067, ADRGL1000111, ADRGL1000144, ADRGL1000147, ADRGL1000160, ADRGL1000165, ADRGL1000182, ADRGL2000056, ADRGL2000064, ADRGL2000074, ADRGL2000085, ADRGL2000097, ADRGL2000117, ADRGL2000142, ADRGL2000172, ADRGL2000248, ADRGL2000261, ADRGL2000323, ADRGL2000353, ADRGL2000384, ADRGL2000428, ADRGL2000636, ADRGL2000644, ADRGL2000968, ADRGL2001119, ADRGL2001229, ADRGL2001287, ADRGL2001301, ADRGL2001354, ADRGL2001554, ADRGL2001651, ADRGL2001756, ADRGL2001830, ADRGL2001836, ADRGL2001854, ADRGL2002029, ADRGL2002191, ADRGL2002260, ADRGL2002392, ADRGL2002477, ADRGL2002679, ADRGL2002753, ADRGL2002857, ADRGL2003017, ADRGL2003329, ADRGL2003552, ADRGL2003585, ADRGL2003638, ADRGL2003684, ADRGL2003773, ADRGL2003785, ADRGL2004031, ADRGL2004077, ADRGL2004451, ADRGL2004459, ADRGL2004708, ADRGL2004724, ADRGL2004749, ADRGL2004770, ADRGL2004777, ADRGL2004833, ADRGL2005336, ADRGL2005564, ADRGL2005756, ADRGL2005838, ADRGL2005926, ADRGL2005961, ADRGL2006034, ADRGL2006124, ADRGL2006177, ADRGL2006193, ADRGL2006377, ADRGL2006677, ADRGL2006732, ADRGL2006767, ADRGL2006817, ADRGL2006846, ADRGL2006886, ADRGL2007080, ADRGL2007125, ADRGL2007283, ADRGL2007313, ADRGL2007357, ADRGL2007636, ADRGL2007651, ADRGL2007810, ADRGL2007877, ADRGL2007906, ADRGL2007974, ADRGL2008023, ADRGL2008331, ADRGL2008337, ADRGL2008535, ADRGL2008966, ADRGL2009146, ADRGL2009324, ADRGL2009489, ADRGL2009533, ADRGL2009691, ADRGL2009755, ADRGL2010152, ADRGL2010315, ADRGL2010594, ADRGL2010860, ADRGL2010974, ADRGL2011190, ADRGL2011330, ADRGL2012038, ADRGL2012179, AHMSC1000138, ASTRO1000009, ASTRO1000018, ASTRO1000029, ASTRO1000096, ASTRO1000165, ASTRO2000011, ASTRO2000014, ASTRO2000095, ASTRO2000141, ASTRO2000191, ASTRO2000278, ASTRO2000372, ASTRO2000381, ASTRO2000403, ASTRO2000417, ASTRO2000482, ASTRO2000533, ASTRO2000653, ASTRO2000662, ASTRO2000725, ASTRO2001001, ASTRO2001008, ASTRO2001029, ASTRO2001088, ASTRO2001107, ASTRO2001122, ASTRO2001227, ASTRO2001249, ASTRO2001480, ASTRO2001806, ASTRO2002024, ASTRO2002035, ASTRO2002064, ASTRO2002202, ASTRO2002459, ASTRO2002571, ASTRO2002632, ASTRO2002659, ASTRO2002693, ASTRO2002720, ASTRO2002733, ASTRO2002743, ASTRO2002842, ASTRO2003212, ASTRO2003461, ASTRO2003574, ASTRO2003581, ASTRO2003632, ASTRO2003740, ASTRO2003840, ASTRO2003960, ASTRO2004032, ASTRO2004051, ASTRO2004177, ASTRO2004217, ASTRO2004297, ASTRO2004584, ASTRO2004628, ASTRO2004751, ASTRO2004877, ASTRO2004974, ASTRO2005008, ASTRO2005081, ASTRO2005096, ASTRO2005242, ASTRO2005273, ASTRO2005343, ASTRO2005360, ASTRO2005413, ASTRO2005423, ASTRO2005553, ASTRO2005557, ASTRO2005575, ASTRO2005593, ASTRO2005687, ASTRO2005726, ASTRO2005896, ASTRO2005902, ASTRO2006356, ASTRO2006475, ASTRO2006747, ASTRO2006920, ASTRO2006952, ASTRO2007221, ASTRO2007377, ASTRO2007515, ASTRO2007578, ASTRO2007643, ASTRO2007666, ASTRO2007956, ASTRO2007962, ASTRO2008040, ASTRO2008239, ASTRO2008409, ASTRO2008425, ASTRO2008777, ASTRO2008895, ASTRO2008960, ASTRO2008972, ASTRO2009068, ASTRO2009118, ASTRO2009177, ASTRO2009333, ASTRO2009458, ASTRO2009526, ASTRO2009879, ASTRO2010072, ASTRO2010615, ASTRO2010799, ASTRO2010962, ASTRO2010996, ASTRO2011149, ASTRO2011422, ASTRO2011426, ASTRO2011437, ASTRO2011461, ASTRO2011834, ASTRO2011893, ASTRO2012552, ASTRO2013124, ASTRO2013671, ASTRO2013802, ASTRO2014135, ASTRO2014174, ASTRO2014211, ASTRO2014363, ASTRO2014392, ASTRO2014498, ASTRO2014561, ASTRO2014576, ASTRO2014863, ASTRO2014923, ASTRO2014961, ASTRO2015162, ASTRO2015185, ASTRO2015328, ASTRO2015529, ASTRO2015987, ASTRO2016044, ASTRO2016114, ASTRO2016148, ASTRO2016681, ASTRO2016819, ASTRO2016847, ASTRO2016892, ASTRO2017348, ASTRO2017627, ASTRO2018169, ASTRO2018373, ASTRO2018540, ASTRO2019039, ASTRO2019171, ASTRO3000154, ASTRO3000172, ASTRO3000177, ASTRO3000301, ASTRO3000474, ASTRO3000482, BEAST2000454, BGGI11000123, BGGI11000193, BGGI11000285, BGGI12000022, BGGI12000067, BGGI12000161, BGGI12000533, BGGI12000544, BGGI12000616, BGGI12000684, BGGI12000693, BGGI12000839, BGGI12001075, BGGI12001097, BGGI12001241, BGGI12001247, BGGI12001682, BGGI12001714, BLADE1000176, BLADE2000181, BLADE2000256, BLADE2000340, BLADE2000389, BLADE2000463, BLADE2000492, BLADE2000579, BLADE2000640, BLADE2000866, BLADE2000938, BLADE2001031, BLADE2001133, BLADE2001138, BLADE2001141, BLADE2001371, BLADE2001458, BLADE2001575, BLADE2001753, BLADE2001935, BLADE2001940, BLADE2001987, BLADE2002073, BLADE2002310, BLADE2002730, BLADE2002738, BLADE2002744, BLADE2002782, BLADE2002947, BLADE2002972, BLADE2003474, BLADE2003916, BLADE2004089, BLADE2004345, BLADE2004389, BLADE2004462, BLADE2004628, BLADE2004670, BLADE2004849, BLADE2005036, BLADE2005038, BLADE2005229, BLADE2005459, BLADE2005792, BLADE2006043, BLADE2006415, BLADE2006607, BLADE2006826, BLADE2006830, BLADE2006849, BLADE2006947, BLADE2007033, BLADE2007043, BLADE2007666, BLADE2007722, BLADE2007735, BLADE2007744, BLADE2007799, BLADE2007923, BLADE2007935, BLADE2007958, BLADE2008281, BLADE2008398, BLADE2008454, BLADE2008461, BLADE2008479, BLADE2008539, BLADE2008809, BLADE2008995, BLADE2009452, BLADE2009479, BLADE2009593, BNGH41000098, BNGH41000104, BNGH41000118, BNGH41000153, BNGH41000169, BNGH41000177, BNGH41000190, BNGH41000198, BNGH41000216, BNGH41000235, BNGH42000130, BNGH42000132, BNGH42000360, BNGH42000405, BNGH42000532, BNGH42000675, BNGH42000791, BNGH42000815, BNGH42000994, BNGH42001247, BNGH42001406, BNGH42001576, BNGH42001724, BNGH42002168, BNGH42002244, BNGH42002387, BNGH42002489, BNGH42003529, BNGH42003570, BNGH42003641, BNGH42004076, BNGH42004291, BNGH42004538, BNGH42004679, BNGH42005017, BNGH42005235, BNGH42005504, BNGH42005968, BNGH42006226, BNGH42006234, BNGH42007037, BNGH42007366, BNGH42007594, BNGH42007798, BNGH42008199, BNGH42008510, BNGH42008603, BNGH42008649, BNGH42008743, BNGH42008832, BNGH42008850, BNGH42008943, BNGH42009021, BNGH42009025, BRACE1000020, BRACE1000047, BRACE1000051, BRACE1000065, BRACE1000073, BRACE1000084, BRACE1000087, BRACE1000092, BRACE1000093, BRACE1000101, BRACE1000114, BRACE1000115, BRACE1000124, BRACE1000132, BRACE1000159, BRACE1000166, BRACE1000169, BRACE1000187, BRACE1000239, BRACE1000258, BRACE1000451, BRACE1000475, BRACE1000572, BRACE2000061, BRACE2000077, BRACE2000078, BRACE2000100, BRACE2000109, BRACE2000141, BRACE2000148, BRACE2000183, BRACE2000229, BRACE2000232, BRACE2000245, BRACE2000256, BRACE2000266, BRACE2000267, BRACE2000280, BRACE2000300, BRACE2000307, BRACE2000331, BRACE2000332, BRACE2000351, BRACE2000368, BRACE2000392, BRACE2000441, BRACE2000487, BRACE2000489, BRACE2000505, BRACE2000525, BRACE2000526, BRACE2000531, BRACE2000545, BRACE2000553, BRACE2000565, BRACE2000577, BRACE2000640, BRACE2000650, BRACE2000677, BRACE2000698, BRACE2000718, BRACE2000733, BRACE2000743, BRACE2000753, BRACE2000815, BRACE2000864, BRACE2000885, BRACE2000893, BRACE2000905, BRACE2000936, BRACE2000947, BRACE2000965, BRACE2000969, BRACE2000975, BRACE2000988, BRACE2001017, BRACE2001070, BRACE2001094, BRACE2001107, BRACE2001117, BRACE2001151, BRACE2001154, BRACE2001191, BRACE2001197, BRACE2001236, BRACE2001239, BRACE2001269, BRACE2001312, BRACE2001313, BRACE2001330, BRACE2001340, BRACE2001352, BRACE2001353, BRACE2001374, BRACE2001375, BRACE2001423, BRACE2001424, BRACE2001445, BRACE2001453, BRACE2001455, BRACE2001477, BRACE2001492, BRACE2001496, BRACE2001497, BRACE2001508, BRACE2001534, BRACE2001543, BRACE2001564, BRACE2001588, BRACE2001607, BRACE2001626, BRACE2001673, BRACE2001677, BRACE2001705, BRACE2001709, BRACE2001711, BRACE2001726, BRACE2001733, BRACE2001737, BRACE2001742, BRACE2001777, BRACE2001779, BRACE2001834, BRACE2001859, BRACE2001865, BRACE2001872, BRACE2001881, BRACE2001892, BRACE2001898, BRACE2001923, BRACE2001942, BRACE2001944, BRACE2001954, BRACE2001972, BRACE2001973, BRACE2002026, BRACE2002034, BRACE2002050, BRACE2002081, BRACE2002091, BRACE2002139, BRACE2002142, BRACE2002151, BRACE2002157, BRACE2002202, BRACE2002206, BRACE2002227, BRACE2002260, BRACE2002297, BRACE2002304, BRACE2002356, BRACE2002392, BRACE2002394, BRACE2002431, BRACE2002441, BRACE2002444, BRACE2002458, BRACE2002467, BRACE2002468, BRACE2002495, BRACE2002582, BRACE2002585, BRACE2002589, BRACE2002590, BRACE2002606, BRACE2002613, BRACE2002614, BRACE2002617, BRACE2002623, BRACE2002635, BRACE2002661, BRACE2002676, BRACE2002682, BRACE2002685, BRACE2002695, BRACE2002707, BRACE2002736, BRACE2002752, BRACE2002755, BRACE2002762, BRACE2002772, BRACE2002792, BRACE2002796, BRACE2002803, BRACE2002807, BRACE2002812, BRACE2002834, BRACE2002849, BRACE2002857, BRACE2002860, BRACE2002861, BRACE2002884, BRACE2002896, BRACE2002948, BRACE2003037, BRACE2003078, BRACE2003097, BRACE2003110, BRACE2003168, BRACE2003199, BRACE2003210, BRACE2003217, BRACE2003269, BRACE2003285, BRACE2003304, BRACE2003319, BRACE2003398, BRACE2003420, BRACE2003428, BRACE2003431, BRACE2003539, BRACE2003540, BRACE2003594, BRACE2003598, BRACE2003609, BRACE2003614, BRACE2003628, BRACE2003639, BRACE2003700, BRACE2003713, BRACE2003766, BRACE2003788, BRACE2003800, BRACE2003802, BRACE2003825, BRACE2003827, BRACE2003845, BRACE2003847, BRACE2003848, BRACE2003873, BRACE2003885, BRACE2003887, BRACE2003905, BRACE2003928, BRACE2003944, BRACE2003954, BRACE2003982, BRACE2003987, BRACE2005034, BRACE2005047, BRACE2005063, BRACE2005083, BRACE2005090, BRACE2005099, BRACE2005118, BRACE2005124, BRACE2005138, BRACE2005151, BRACE2005160, BRACE2005169, BRACE2005189, BRACE2005193, BRACE2005198, BRACE2005216, BRACE2005243, BRACE2005251, BRACE2005253, BRACE2005298, BRACE2005328, BRACE2005329, BRACE2005337, BRACE2005348, BRACE2005363, BRACE2005395, BRACE2005408, BRACE2005433, BRACE2005434, BRACE2005448, BRACE2005450, BRACE2005453, BRACE2005457, BRACE2005460, BRACE2005489, BRACE2005518, BRACE2005556, BRACE2005562, BRACE2005624, BRACE2005642, BRACE2005661, BRACE2005667, BRACE2005681, BRACE2005731, BRACE2005742, BRACE2005762, BRACE2005773, BRACE2005787, BRACE2005795, BRACE2005800, BRACE2005858, BRACE2005869, BRACE2005875, BRACE2005881, BRACE2005898, BRACE2005904, BRACE2005906, BRACE2005907, BRACE2005911, BRACE2005937, BRACE2005949, BRACE2005981, BRACE2005991, BRACE2006055, BRACE2006072, BRACE2006075, BRACE2006089, BRACE2006102, BRACE2006105, BRACE2006122, BRACE2006137, BRACE2006143, BRACE2006162, BRACE2006167, BRACE2006174, BRACE2006240, BRACE2006245, BRACE2006249, BRACE2006258, BRACE2006264, BRACE2006274, BRACE2006281, BRACE2006298, BRACE2006319, BRACE2006344, BRACE2006363, BRACE2006378, BRACE2006380, BRACE2006393, BRACE2006413, BRACE2006417, BRACE2006453, BRACE2006459, BRACE2006488, BRACE2006514, BRACE2006534, BRACE2006540, BRACE2006547, BRACE2006564, BRACE2006587, BRACE2006598, BRACE2006685, BRACE2006703, BRACE2006743, BRACE2006753, BRACE2006783, BRACE2006821, BRACE2006833, BRACE2006859, BRACE2006871, BRACE2006909, BRACE2006911, BRACE2006924, BRACE2006935, BRACE2006937, BRACE2006951, BRACE2006982, BRACE2006986, BRACE2007013, BRACE2007068, BRACE2007087, BRACE2007089, BRACE2007109, BRACE2007138, BRACE2007191, BRACE2007197, BRACE2007201, BRACE2007203, BRACE2007232, BRACE2007254, BRACE2007262, BRACE2007274, BRACE2007281, BRACE2007295, BRACE2007358, BRACE2007396, BRACE2007398, BRACE2007401, BRACE2007411, BRACE2007447, BRACE2007477, BRACE2007502, BRACE2007503, BRACE2007522, BRACE2007527, BRACE2007538, BRACE2007563, BRACE2007567, BRACE2007577, BRACE2007621, BRACE2007640, BRACE2007641, BRACE2007646, BRACE2007663, BRACE2007671, BRACE2007682, BRACE2007685, BRACE2007708, BRACE2007727, BRACE2007749, BRACE2007760, BRACE2007761, BRACE2007764, BRACE2007767, BRACE2007768, BRACE2007769, BRACE2007784, BRACE2007786, BRACE2007799, BRACE2007801, BRACE2007832, BRACE2007836, BRACE2007868, BRACE2007882, BRACE2007888, BRACE2007902, BRACE2007920, BRACE2007937, BRACE2007944, BRACE2007952, BRACE2008008, BRACE2008015, BRACE2008021, BRACE2008097, BRACE2008102, BRACE2008114, BRACE2008144, BRACE2008172, BRACE2008216, BRACE2008218, BRACE2008251, BRACE2008276, BRACE2008295, BRACE2008308, BRACE2008336, BRACE2008358, BRACE2008361, BRACE2008380, BRACE2008385, BRACE2008399, BRACE2008401, BRACE2008402, BRACE2008410, BRACE2008420, BRACE2008443, BRACE2008473, BRACE2008480, BRACE2008481, BRACE2008488, BRACE2008495, BRACE2008500, BRACE2008553, BRACE2008594, BRACE2008604, BRACE2008615, BRACE2008622, BRACE2008629, BRACE2008655, BRACE2008656, BRACE2008706, BRACE2008708, BRACE2008710, BRACE2008754, BRACE2008797, BRACE2008847, BRACE2008857, BRACE2008861, BRACE2008867, BRACE2008881, BRACE2008883, BRACE2008917, BRACE2008919, BRACE2008948, BRACE2008960, BRACE2008968, BRACE2008999, BRACE2009014, BRACE2009016, BRACE2009031, BRACE2009044, BRACE2009045, BRACE2009053, BRACE2009122, BRACE2009131, BRACE2009185, BRACE2009188, BRACE2009212, BRACE2009221, BRACE2009235, BRACE2009238, BRACE2009255, BRACE2009270, BRACE2009272, BRACE2009274, BRACE2009275, BRACE2009291, BRACE2009293, BRACE2009307, BRACE2009311, BRACE2009318, BRACE2009323, BRACE2009366, BRACE2009421, BRACE2009428, BRACE2009434, BRACE2009437, BRACE2009483, BRACE2009533, BRACE2009558, BRACE2009566, BRACE2009591, BRACE2009620, BRACE2009654, BRACE2009721, BRACE2009732, BRACE2009754, BRACE2009828, BRACE2009886, BRACE2009907, BRACE2009957, BRACE2010170, BRACE2010171, BRACE2010203, BRACE2010208, BRACE2010336, BRACE2010348, BRACE2010440, BRACE2010444, BRACE2010477, BRACE2010489, BRACE2010535, BRACE2010550, BRACE2010598, BRACE2010632, BRACE2010642, BRACE2010651, BRACE2010669, BRACE2010684, BRACE2010753, BRACE2010813, BRACE2010828, BRACE2010837, BRACE2010888, BRACE2010937, BRACE2010983, BRACE2011007, BRACE2011025, BRACE2011199, BRACE2011265, BRACE2011389, BRACE2011478, BRACE2011545, BRACE2011592, BRACE2011611, BRACE2011646, BRACE2011677, BRACE2011703, BRACE2011747, BRACE2011838, BRACE2011892, BRACE2011904, BRACE2011947, BRACE2012061, BRACE2012062, BRACE2012185, BRACE2012222, BRACE2012232, BRACE2012291, BRACE2012317, BRACE2012510, BRACE2012625, BRACE2012653, BRACE2012814, BRACE2012833, BRACE2012838, BRACE2012936, BRACE2012947, BRACE2013009, BRACE2013010, BRACE2013126, BRACE2013132, BRACE2013149, BRACE2013369, BRACE2013806, BRACE2013855, BRACE2013911, BRACE2014108, BRACE2014161, BRACE2014232, BRACE2014257, BRACE2014268, BRACE2014306, BRACE2014475, BRACE2014657, BRACE2014746, BRACE2014780, BRACE2014818, BRACE2014821, BRACE2014824, BRACE2014850, BRACE2014854, BRACE2015031, BRACE2015058, BRACE2015132, BRACE2015262, BRACE2015270, BRACE2015287, BRACE2015314, BRACE2015352, BRACE2015368, BRACE2015412, BRACE2015436, BRACE2015741, BRACE2015756, BRACE2015969, BRACE2015995, BRACE2016058, BRACE2016194, BRACE2016315, BRACE2016325, BRACE2016335, BRACE2016362, BRACE2016366, BRACE2016465, BRACE2016516, BRACE2016583, BRACE2016708, BRACE2016821, BRACE2016896, BRACE2016981, BRACE2017108, BRACE2017124, BRACE2017298, BRACE2017359, BRACE2017410, BRACE2017438, BRACE2017580, BRACE2017587, BRACE2017720, BRACE2017844, BRACE2017872, BRACE2017929, BRACE2017934, BRACE2017985, BRACE2017992, BRACE2018337, BRACE2018443, BRACE2018448, BRACE2018568, BRACE2018700, BRACE2018727, BRACE2018736, BRACE2018759, BRACE2018762, BRACE2018782, BRACE2018847, BRACE2019004, BRACE2019044, BRACE2019244, BRACE2019258, BRACE2019327, BRACE2019348, BRACE2019371, BRACE2019467, BRACE2019510, BRACE2019519, BRACE2019528, BRACE2019618, BRACE2019696, BRACE2019703, BRACE2019843, BRACE2019865, BRACE2019872, BRACE2019877, BRACE2020028, BRACE2020077, BRACE2020097, BRACE2020157, BRACE2020278, BRACE2020358, BRACE2020467, BRACE2020652, BRACE2020709, BRACE2020742, BRACE2020756, BRACE2020863, BRACE2020982, BRACE2021014, BRACE2021143, BRACE2021148, BRACE2021245, BRACE2021254, BRACE2021264, BRACE2021344, BRACE2021433, BRACE2021478, BRACE2021541, BRACE2021670, BRACE2021695, BRACE2021708, BRACE2021721, BRACE2021932, BRACE2021936, BRACE2022030, BRACE2022158, BRACE2022196, BRACE2022270, BRACE2022328, BRACE2022389, BRACE2022394, BRACE2022435, BRACE2022448, BRACE2022450, BRACE2022549, BRACE2022633, BRACE2022693, BRACE2022848, BRACE2022928, BRACE2022990, BRACE2023069, BRACE2023070, BRACE2023223, BRACE2023268, BRACE2023284, BRACE2023404, BRACE2023451, BRACE2023540, BRACE2023633, BRACE2023718, BRACE2023727, BRACE2023744, BRACE2023800, BRACE2023801, BRACE2024074, BRACE2024222, BRACE2024610, BRACE2024627, BRACE2024781, BRACE2024826, BRACE2025018, BRACE2025316, BRACE2025333, BRACE2025437, BRACE2025452, BRACE2025492, BRACE2025710, BRACE2025796, BRACE2025992, BRACE2026054, BRACE2026131, BRACE2026141, BRACE2026142, BRACE2026293, BRACE2026294, BRACE2026404, BRACE2026675, BRACE2026725, BRACE2026836, BRACE2026920, BRACE2026971, BRACE2027018, BRACE2027221, BRACE2027258, BRACE2027312, BRACE2027382, BRACE2027389, BRACE2027408, BRACE2027643, BRACE2027767, BRACE2027770, BRACE2027879, BRACE2027970, BRACE2028171, BRACE2028392, BRACE2028410, BRACE2028636, BRACE2028741, BRACE2028956, BRACE2028970, BRACE2029112, BRACE2029356, BRACE2029396, BRACE2029581, BRACE2029644, BRACE2029849, BRACE2030039, BRACE2030096, BRACE2030323, BRACE2030326, BRACE2030345, BRACE2030736, BRACE2030883, BRACE2030884, BRACE2031154, BRACE2031232, BRACE2031527, BRACE2031531, BRACE2031553, BRACE2031899, BRACE2032044, BRACE2032090, BRACE2032134, BRACE2032148, BRACE2032182, BRACE2032329, BRACE2032385, BRACE2032436, BRACE2032477, BRACE2032502, BRACE2032538, BRACE2032584, BRACE2032823, BRACE2033128, BRACE2033394, BRACE2033478, BRACE2033720, BRACE2033786, BRACE2034434, BRACE2034523, BRACE2034616, BRACE2034622, BRACE2034870, BRACE2035003, BRACE2035120, BRACE2035124, BRACE2035191, BRACE2035278, BRACE2035381, BRACE2035441, BRACE2035485, BRACE2036005, BRACE2036096, BRACE2036743, BRACE2036830, BRACE2036834, BRACE2036900, BRACE2037132, BRACE2037294, BRACE2037295, BRACE2037299, BRACE2037431, BRACE2037692, BRACE2037847, BRACE2038114, BRACE2038269, BRACE2038271, BRACE2038329, BRACE2038492, BRACE2038551, BRACE2038618, BRACE2039009, BRACE2039128, BRACE2039170, BRACE2039249, BRACE2039286, BRACE2039297, BRACE2039327, BRACE2039362, BRACE2039475, BRACE2039600, BRACE2039607, BRACE2039624, BRACE2039734, BRACE2039823, BRACE2039832, BRACE2039893, BRACE2039986, BRACE2040138, BRACE2040325, BRACE2040514, BRACE2040640, BRACE2040987, BRACE2041009, BRACE2041095, BRACE2041200, BRACE2041264, BRACE2041890, BRACE2041898, BRACE2042394, BRACE2042398, BRACE2042550, BRACE2042620, BRACE2042628, BRACE2042873, BRACE2043036, BRACE2043105, BRACE2043142, BRACE2043248, BRACE2043349, BRACE2043381, BRACE2043774, BRACE2043942, BRACE2044057, BRACE2044105, BRACE2044263, BRACE2044286, BRACE2044304, BRACE2044473, BRACE2044510, BRACE2044640, BRACE2044816, BRACE2044946, BRACE2044949, BRACE2045300, BRACE2045428, BRACE2045596, BRACE2045772, BRACE2045947, BRACE2045954, BRACE2046251, BRACE2046295, BRACE2046976, BRACE2047011, BRACE2047232, BRACE2047350, BRACE2047377, BRACE2047385, BRACE2047492, BRACE2047558, BRACE2047573, BRACE2047835, BRACE2047893, BRACE2047975, BRACE3000071, BRACE3000404, BRACE3000520, BRACE3000697, BRACE3000840, BRACE3000973, BRACE3001002, BRACE3001058, BRACE3001066, BRACE3001113, BRACE3001217, BRACE3001299, BRACE3001384, BRACE3001391, BRACE3001403, BRACE3001595, BRACE3001754, BRACE3001948, BRACE3001973, BRACE3002184, BRACE3002298, BRACE3002344, BRACE3002390, BRACE3002420, BRACE3002508, BRACE3002541, BRACE3002756, BRACE3003004, BRACE3003026, BRACE3003053, BRACE3003192, BRACE3003413, BRACE3003595, BRACE3003698, BRACE3003866, BRACE3003920, BRACE3004046, BRACE3004058, BRACE3004113, BRACE3004150, BRACE3004205, BRACE3004358, BRACE3004435, BRACE3004477, BRACE3004767, BRACE3004772, BRACE3004783, BRACE3004843, BRACE3004862, BRACE3004880, BRACE3004887, BRACE3004981, BRACE3004996, BRACE3004998, BRACE3005103, BRACE3005127, BRACE3005145, BRACE3005217, BRACE3005225, BRACE3005430, BRACE3005499, BRACE3005760, BRACE3005870, BRACE3005903, BRACE3005989, BRACE3006113, BRACE3006185, BRACE3006226, BRACE3006462, BRACE3006463, BRACE3006553, BRACE3006872, BRACE3006917, BRACE3007058, BRACE3007084, BRACE3007085, BRACE3007322, BRACE3007472, BRACE3007480, BRACE3007559, BRACE3007625, BRACE3007642, BRACE3007649, BRACE3007767, BRACE3007869, BRACE3008036, BRACE3008066, BRACE3008092, BRACE3008095, BRACE3008137, BRACE3008255, BRACE3008337, BRACE3008384, BRACE3008720, BRACE3009044, BRACE3009075, BRACE3009090, BRACE3009127, BRACE3009197, BRACE3009237, BRACE3009265, BRACE3009297, BRACE3009377, BRACE3009392, BRACE3009416, BRACE3009539, BRACE3009574, BRACE3009701, BRACE3009708, BRACE3009724, BRACE3009993, BRACE3010076, BRACE3010079, BRACE3010086, BRACE3010221, BRACE3010283, BRACE3010315, BRACE3010397, BRACE3010416, BRACE3010435, BRACE3010438, BRACE3010702, BRACE3010862, BRACE3011271, BRACE3011421, BRACE3011447, BRACE3011505, BRACE3011634, BRACE3011774, BRACE3012357, BRACE3012574, BRACE3012806, BRACE3012930, BRACE3013119, BRACE3013418, BRACE3013576, BRACE3013740, BRACE3013780, BRACE3013874, BRACE3013936, BRACE3013986, BRACE3014005, BRACE3014068, BRACE3014231, BRACE3014290, BRACE3014317, BRACE3014523, BRACE3014714, BRACE3014807, BRACE3014942, BRACE3015090, BRACE3015121, BRACE3015262, BRACE3015521, BRACE3015808, BRACE3015829, BRACE3015894, BRACE3015898, BRACE3016020, BRACE3016122, BRACE3016167, BRACE3016170, BRACE3016580, BRACE3016788, BRACE3016810, BRACE3016862, BRACE3016884, BRACE3017083, BRACE3017253, BRACE3018083, BRACE3018308, BRACE3018963, BRACE3019055, BRACE3019071, BRACE3019084, BRACE3019570, BRACE3019611, BRACE3019817, BRACE3019828, BRACE3019941, BRACE3020151, BRACE3020194, BRACE3020286, BRACE3020356, BRACE3020594, BRACE3020669, BRACE3020671, BRACE3020890, BRACE3021148, BRACE3021430, BRACE3021517, BRACE3021805, BRACE3022051, BRACE3022303, BRACE3022312, BRACE3022340, BRACE3022847, BRACE3023604, BRACE3023912, BRACE3024073, BRACE3024359, BRACE3024379, BRACE3024444, BRACE3024497, BRACE3024537, BRACE3024659, BRACE3024662, BRACE3024879, BRACE3025153, BRACE3025302, BRACE3025457, BRACE3025531, BRACE3025627, BRACE3025630, BRACE3025719, BRACE3026008, BRACE3026075, BRACE3026161, BRACE3026290, BRACE3026345, BRACE3026456, BRACE3026735, BRACE3026802, BRACE3026844, BRACE3026947, BRACE3026993, BRACE3027242, BRACE3027256, BRACE3027326, BRACE3027480, BRACE3027931, BRACE3027976, BRACE3028214, BRACE3028241, BRACE3028360, BRACE3028895, BRACE3028998, BRACE3029005, BRACE3029021, BRACE3029205, BRACE3029447, BRACE3030057, BRACE3030103, BRACE3030538, BRACE3030748, BRACE3030866, BRACE3031161, BRACE3031184, BRACE3031185, BRACE3031315, BRACE3031372, BRACE3031579, BRACE3031728, BRACE3031838, BRACE3031843, BRACE3032427, BRACE3032455, BRACE3032537, BRACE3032538, BRACE3032631, BRACE3032771, BRACE3032980, BRACE3032983, BRACE3033525, BRACE3034159, BRACE3034183, BRACE3034389, BRACE3034964, BRACE3034993, BRACE3035168, BRACE3035227, BRACE3036156, BRACE3036271, BRACE3037612, BRACE3037637, BRACE3037803, BRACE3038012, BRACE3038030, BRACE3038569, BRACE3038570, BRACE3038687, BRACE3038760, BRACE3039288, BRACE3039358, BRACE3039378, BRACE3039454, BRACE3040012, BRACE3040239, BRACE3040504, BRACE3040644, BRACE3040856, BRACE3041059, BRACE3041162, BRACE3041827, BRACE3042046, BRACE3042210, BRACE3042326, BRACE3042409, BRACE3042432, BRACE3042594, BRACE3043597, BRACE3044090, BRACE3044172, BRACE3044247, BRACE3044377, BRACE3044389, BRACE3044495, BRACE3045011, BRACE3045033, BRACE3045078, BRACE3045145, BRACE3045424, BRACE3045708, BRACE3045981, BRACE3046049, BRACE3046152, BRACE3046294, BRACE3046450, BRACE3046466, BRACE3046491, BRACE3046609, BRACE3046762, BRACE3046837, BRACE3046855, BRACE3046966, BRACE3047018, BRACE3047482, BRACE3047801, BRALZ1000047, BRALZ1000103, BRALZ2000189, BRALZ2000263, BRALZ2000988, BRALZ2001038, BRALZ2001279, BRALZ2001350, BRALZ2001445, BRALZ2001559, BRALZ2001743, BRALZ2001834, BRALZ2002174, BRALZ2002418, BRALZ2002477, BRALZ2003119, BRALZ2003330, BRALZ2003453, BRALZ2003525, BRALZ2004397, BRALZ2005467, BRALZ2005471, BRALZ2005888, BRALZ2005950, BRALZ2005992, BRALZ2006288, BRALZ2006474, BRALZ2006560, BRALZ2006734, BRALZ2006800, BRALZ2006976, BRALZ2007376, BRALZ2007545, BRALZ2007576, BRALZ2007661, BRALZ2007790, BRALZ2007793, BRALZ2007952, BRALZ2008031, BRALZ2008166, BRALZ2008462, BRALZ2008617, BRALZ2008696, BRALZ2008763, BRALZ2008869, BRALZ2008930, BRALZ2009486, BRALZ2010186, BRALZ2010842, BRALZ2011337, BRALZ2011796, BRALZ2011880, BRALZ2012050, BRALZ2012183, BRALZ2012848, BRALZ2013621, BRALZ2013690, BRALZ2014054, BRALZ2014316, BRALZ2014484, BRALZ2014951, BRALZ2015168, BRALZ2015811, BRALZ2016085, BRALZ2016498, BRALZ2017531, BRALZ2017607, BRALZ2017620, BRALZ2017844, BRALZ2018342, BRALZ2018492, BRALZ2018834, BRALZ2019047, BRAMY1000095, BRAMY1000098, BRAMY1000130, BRAMY1000157, BRAMY1000173, BRAMY2000021, BRAMY2000025, BRAMY2000052, BRAMY2000076, BRAMY2000086, BRAMY2000151, BRAMY2000181, BRAMY2000196, BRAMY2000231, BRAMY2000277, BRAMY2000354, BRAMY2000388, BRAMY2000411, BRAMY2000508, BRAMY2000562, BRAMY2000653, BRAMY2000814, BRAMY2000893, BRAMY2000946, BRAMY2000981, BRAMY2000987, BRAMY2001068, BRAMY2001114, BRAMY2001203, BRAMY2001282, BRAMY2001367, BRAMY2001427, BRAMY2001473, BRAMY2001678, BRAMY2002005, BRAMY2002044, BRAMY2002072, BRAMY2002158, BRAMY2002311, BRAMY2002339, BRAMY2002364, BRAMY2002369, BRAMY2002479, BRAMY2002493, BRAMY2002525, BRAMY2002584, BRAMY2002604, BRAMY2002621, BRAMY2002638, BRAMY2002739, BRAMY2002799, BRAMY2002853, BRAMY2002862, BRAMY2002956, BRAMY2003008, BRAMY2003037, BRAMY2003117, BRAMY2003287, BRAMY2003325, BRAMY2003529, BRAMY2003538, BRAMY2003585, BRAMY2003634, BRAMY2003653, BRAMY2003681, BRAMY2003893, BRAMY2003897, BRAMY2003898, BRAMY2003904, BRAMY2003926, BRAMY2003929, BRAMY2004031, BRAMY2004058, BRAMY2004183, BRAMY2004335, BRAMY2004351, BRAMY2004352, BRAMY2004387, BRAMY2004492, BRAMY2004524, BRAMY2004537, BRAMY2004542, BRAMY2004756, BRAMY2004771, BRAMY2005052, BRAMY2005064, BRAMY2005094, BRAMY2005151, BRAMY2005182, BRAMY2005244, BRAMY2005391, BRAMY2005488, BRAMY2005576, BRAMY2005648, BRAMY2005662, BRAMY2005708, BRAMY2005711, BRAMY2006092, BRAMY2006118, BRAMY2006149, BRAMY2006375, BRAMY2006397, BRAMY2006411, BRAMY2006459, BRAMY2006466, BRAMY2006659, BRAMY2006779, BRAMY2006809, BRAMY2006879, BRAMY2007043, BRAMY2007078, BRAMY2007110, BRAMY2007185, BRAMY2007244, BRAMY2007249, BRAMY2007255, BRAMY2007287, BRAMY2007308, BRAMY2007411, BRAMY2007458, BRAMY2007486, BRAMY2007546, BRAMY2007567, BRAMY2007594, BRAMY2007610, BRAMY2007613, BRAMY2007653, BRAMY2007753, BRAMY2007859, BRAMY2008333, BRAMY2008382, BRAMY2008563, BRAMY2008583, BRAMY2008977, BRAMY2008979, BRAMY2009013, BRAMY2009023, BRAMY2009034, BRAMY2009105, BRAMY2009192, BRAMY2009344, BRAMY2009349, BRAMY2009394, BRAMY2009489, BRAMY2009508, BRAMY2009528, BRAMY2009557, BRAMY2009612, BRAMY2009693, BRAMY2010068, BRAMY2010135, BRAMY2010145, BRAMY2010171, BRAMY2010208, BRAMY2010239, BRAMY2010272, BRAMY2010290, BRAMY2010357, BRAMY2010366, BRAMY2010395, BRAMY2010441, BRAMY2010442, BRAMY2010464, BRAMY2010581, BRAMY2010798, BRAMY2010808, BRAMY2010919, BRAMY2011064, BRAMY2011178, BRAMY2011196, BRAMY2011216, BRAMY2011253, BRAMY2011446, BRAMY2011480, BRAMY2011639, BRAMY2011679, BRAMY2011811, BRAMY2011841, BRAMY2011846, BRAMY2011849, BRAMY2011872, BRAMY2011961, BRAMY2012017, BRAMY2012091, BRAMY2012119, BRAMY2012162, BRAMY2012163, BRAMY2012277, BRAMY2012340, BRAMY2012426, BRAMY2012497, BRAMY2012517, BRAMY2012555, BRAMY2012568, BRAMY2012581, BRAMY2012691, BRAMY2012721, BRAMY2012731, BRAMY2012776, BRAMY2012880, BRAMY2012881, BRAMY2013169, BRAMY2013200, BRAMY2013216, BRAMY2013405, BRAMY2013414, BRAMY2013572, BRAMY2013590, BRAMY2013621, BRAMY2013722, BRAMY2013736, BRAMY2013756, BRAMY2013944, BRAMY2013975, BRAMY2014019, BRAMY2014205, BRAMY2014387, BRAMY2014462, BRAMY2014469, BRAMY2014541, BRAMY2014754, BRAMY2014813, BRAMY2015211, BRAMY2015251, BRAMY2015311, BRAMY2015420, BRAMY2015503, BRAMY2015516, BRAMY2015550, BRAMY2015551, BRAMY2015559, BRAMY2015688, BRAMY2015705, BRAMY2015782, BRAMY2015833, BRAMY2015855, BRAMY2015890, BRAMY2015911, BRAMY2015925, BRAMY2016002, BRAMY2016009, BRAMY2016020, BRAMY2016070, BRAMY2016251, BRAMY2016325, BRAMY2016327, BRAMY2016386, BRAMY2016706, BRAMY2016771, BRAMY2016892, BRAMY2016938, BRAMY2016953, BRAMY2017014, BRAMY2017249, BRAMY2017348, BRAMY2017450, BRAMY2017455, BRAMY2017528, BRAMY2017864, BRAMY2018027, BRAMY2018106, BRAMY2018122, BRAMY2018126, BRAMY2018272, BRAMY2018273, BRAMY2018279, BRAMY2018295, BRAMY2018308, BRAMY2018396, BRAMY2018467, BRAMY2018635, BRAMY2018785, BRAMY2019055, BRAMY2019111, BRAMY2019277, BRAMY2019300, BRAMY2019468, BRAMY2019509, BRAMY2019554, BRAMY2019600, BRAMY2019643, BRAMY2019710, BRAMY2019963, BRAMY2019985, BRAMY2020050, BRAMY2020058, BRAMY2020106, BRAMY2020270, BRAMY2020354, BRAMY2020355, BRAMY2020412, BRAMY2020445, BRAMY2020466, BRAMY2020520, BRAMY2020574, BRAMY2020634, BRAMY2020713, BRAMY2021040, BRAMY2021063, BRAMY2021098, BRAMY2021139, BRAMY2021142, BRAMY2021276, BRAMY2021310, BRAMY2021388, BRAMY2021498, BRAMY2021523, BRAMY2021710, BRAMY2021732, BRAMY2021746, BRAMY2021825, BRAMY2021867, BRAMY2021962, BRAMY2021982, BRAMY2022052, BRAMY2022160, BRAMY2022263, BRAMY2022301, BRAMY2022320, BRAMY2022383, BRAMY2022445, BRAMY2022454, BRAMY2022493, BRAMY2022525, BRAMY2022532, BRAMY2022723, BRAMY2022786, BRAMY2022796, BRAMY2022929, BRAMY2022980, BRAMY2022984, BRAMY2023060, BRAMY2023110, BRAMY2023115, BRAMY2023161, BRAMY2023172, BRAMY2023238, BRAMY2023327, BRAMY2023358, BRAMY2023406, BRAMY2023482, BRAMY2023514, BRAMY2023719, BRAMY2023729, BRAMY2023786, BRAMY2023852, BRAMY2023863, BRAMY2023939, BRAMY2024004, BRAMY2024073, BRAMY2024312, BRAMY2024374, BRAMY2024390, BRAMY2024416, BRAMY2024449, BRAMY2024489, BRAMY2024497, BRAMY2024514, BRAMY2024530, BRAMY2024535, BRAMY2024545, BRAMY2024576, BRAMY2024593, BRAMY2024711, BRAMY2024715, BRAMY2024728, BRAMY2024827, BRAMY2024849, BRAMY2025024, BRAMY2025032, BRAMY2025121, BRAMY2025175, BRAMY2025218, BRAMY2025230, BRAMY2025272, BRAMY2025277, BRAMY2025495, BRAMY2025812, BRAMY2025996, BRAMY2026009, BRAMY2026091, BRAMY2026168, BRAMY2026300, BRAMY2026347, BRAMY2026395, BRAMY2026405, BRAMY2026533, BRAMY2026538, BRAMY2026713, BRAMY2026778, BRAMY2026824, BRAMY2026899, BRAMY2026902, BRAMY2026904, BRAMY2026976, BRAMY2027073, BRAMY2027114, BRAMY2027140, BRAMY2027242, BRAMY2027396, BRAMY2027451, BRAMY2027461, BRAMY2027467, BRAMY2027587, BRAMY2027714, BRAMY2027717, BRAMY2027739, BRAMY2027752, BRAMY2027782, BRAMY2028072, BRAMY2028183, BRAMY2028188, BRAMY2028269, BRAMY2028282, BRAMY2028472, BRAMY2028491, BRAMY2028516, BRAMY2028565, BRAMY2028593, BRAMY2028682, BRAMY2028783, BRAMY2028796, BRAMY2028856, BRAMY2028914, BRAMY2029204, BRAMY2029602, BRAMY2029988, BRAMY2030098, BRAMY2030109, BRAMY2030206, BRAMY2030477, BRAMY2030545, BRAMY2030607, BRAMY2030702, BRAMY2030703, BRAMY2030768, BRAMY2030799, BRAMY2030859, BRAMY2030915, BRAMY2031317, BRAMY2031377, BRAMY2031442, BRAMY2032014, BRAMY2032231, BRAMY2032242, BRAMY2032290, BRAMY2032311, BRAMY2032317, BRAMY2032344, BRAMY2032589, BRAMY2032678, BRAMY2032696, BRAMY2032777, BRAMY2032994, BRAMY2033003, BRAMY2033116, BRAMY2033240, BRAMY2033267, BRAMY2033316, BRAMY2033332, BRAMY2033506, BRAMY2033594, BRAMY2033895, BRAMY2033914, BRAMY2034072, BRAMY2034185, BRAMY2034187, BRAMY2034305, BRAMY2034561, BRAMY2034920, BRAMY2034993, BRAMY2035070, BRAMY2035449, BRAMY2035545, BRAMY2035606, BRAMY2035718, BRAMY2035719, BRAMY2035801, BRAMY2035869, BRAMY2035923, BRAMY2036076, BRAMY2036079, BRAMY2036254, BRAMY2036266, BRAMY2036387, BRAMY2036396, BRAMY2036459, BRAMY2036567, BRAMY2036615, BRAMY2036699, BRAMY2036913, BRAMY2036918, BRAMY2036968, BRAMY2037147, BRAMY2037328, BRAMY2037609, BRAMY2037629, BRAMY2037800, BRAMY2037823, BRAMY2037971, BRAMY2038100, BRAMY2038128, BRAMY2038317, BRAMY2038475, BRAMY2038484, BRAMY2038516, BRAMY2038832, BRAMY2038846, BRAMY2038887, BRAMY2038904, BRAMY2039287, BRAMY2039300, BRAMY2039314, BRAMY2039341, BRAMY2039630, BRAMY2039695, BRAMY2039728, BRAMY2039872, BRAMY2040051, BRAMY2040159, BRAMY2040214, BRAMY2040478, BRAMY2040592, BRAMY2040915, BRAMY2041261, BRAMY2041347, BRAMY2041378, BRAMY2041384, BRAMY2041434, BRAMY2041507, BRAMY2041542, BRAMY2041738, BRAMY2042122, BRAMY2042131, BRAMY2042178, BRAMY2042195, BRAMY2042244, BRAMY2042549, BRAMY2042596, BRAMY2042612, BRAMY2042641, BRAMY2042711, BRAMY2042760, BRAMY2042804, BRAMY2042899, BRAMY2042918, BRAMY2043069, BRAMY2043103, BRAMY2043314, BRAMY2043345, BRAMY2044246, BRAMY2044317, BRAMY2044349, BRAMY2044686, BRAMY2044838, BRAMY2045036, BRAMY2045299, BRAMY2045471, BRAMY2045530, BRAMY2046109, BRAMY2046478, BRAMY2046489, BRAMY2046537, BRAMY2046667, BRAMY2046742, BRAMY2046871, BRAMY2046984, BRAMY2046989, BRAMY2047169, BRAMY2047280, BRAMY2047420, BRAMY2047676, BRAMY2047692, BRAMY2047746, BRAMY2047751, BRAMY2047765, BRAMY2047884, BRAMY2047948, BRAMY3000206, BRAMY3000210, BRAMY3000213, BRAMY3000224, BRAMY3000254, BRAMY3000307, BRAMY3000692, BRAMY3001356, BRAMY3001401, BRAMY3001409, BRAMY3001794, BRAMY3002120, BRAMY3002312, BRAMY3002329, BRAMY3002508, BRAMY3002620, BRAMY3002803, BRAMY3002805, BRAMY3002886, BRAMY3002991, BRAMY3003026, BRAMY3003109, BRAMY3003205, BRAMY3003310, BRAMY3003566, BRAMY3003723, BRAMY3004126, BRAMY3004224, BRAMY3004364, BRAMY3004377, BRAMY3004672, BRAMY3004800, BRAMY3004900, BRAMY3004919, BRAMY3005091, BRAMY3005656, BRAMY3005912, BRAMY3005932, BRAMY3006032, BRAMY3006297, BRAMY3006761, BRAMY3007078, BRAMY3007206, BRAMY3007311, BRAMY3007350, BRAMY3007449, BRAMY3007471, BRAMY3007609, BRAMY3007723, BRAMY3007968, BRAMY3008044, BRAMY3008088, BRAMY3008096, BRAMY3008335, BRAMY3008466, BRAMY3008505, BRAMY3008650, BRAMY3008937, BRAMY3009158, BRAMY3009207, BRAMY3009491, BRAMY3009556, BRAMY3009782, BRAMY3009811, BRAMY3009904, BRAMY3010008, BRAMY3010264, BRAMY3010321, BRAMY3010411, BRAMY3010492, BRAMY3010603, BRAMY3010654, BRAMY4000089, BRAMY4000095, BRAMY4000229, BRAMY4000277, BRAMY4000915, BRAMY4000962, BRAMY4001173, BRAMY4001200, BRAMY4001234, BRAMY4001449, BRAMY4001652, BRAMY4001863, BRAMY4001913, BRAMY4002575, BRAMY4002628, BRASW1000053, BRASW1000125, BRAWH1000001, BRAWH1000002, BRAWH1000007, BRAWH1000037, BRAWH1000045, BRAWH1000083, BRAWH1000094, BRAWH1000116, BRAWH1000127, BRAWH1000130, BRAWH1000157, BRAWH1000162, BRAWH1000164, BRAWH1000168, BRAWH1000174, BRAWH1000180, BRAWH1000369, BRAWH2000034, BRAWH2000048, BRAWH2000071, BRAWH2000093, BRAWH2000109, BRAWH2000131, BRAWH2000142, BRAWH2000169, BRAWH2000177, BRAWH2000218, BRAWH2000232, BRAWH2000248, BRAWH2000256, BRAWH2000274, BRAWH2000323, BRAWH2000353, BRAWH2000370, BRAWH2000409, BRAWH2000417, BRAWH2000443, BRAWH2000460, BRAWH2000471, BRAWH2000476, BRAWH2000482, BRAWH2000494, BRAWH2000500, BRAWH2000503, BRAWH2000522, BRAWH2000554, BRAWH2000595, BRAWH2000636, BRAWH2000643, BRAWH2000651, BRAWH2000682, BRAWH2000686, BRAWH2000752, BRAWH2000859, BRAWH2000866, BRAWH2000892, BRAWH2000901, BRAWH2000924, BRAWH2000926, BRAWH2000944, BRAWH2000984, BRAWH2001019, BRAWH2001037, BRAWH2001052, BRAWH2001103, BRAWH2001129, BRAWH2001137, BRAWH2001159, BRAWH2001166, BRAWH2001171, BRAWH2001186, BRAWH2001203, BRAWH2001238, BRAWH2001239, BRAWH2001255, BRAWH2001321, BRAWH2001355, BRAWH2001378, BRAWH2001395, BRAWH2001406, BRAWH2001418, BRAWH2001424, BRAWH2001436, BRAWH2001438, BRAWH2001459, BRAWH2001461, BRAWH2001484, BRAWH2001492, BRAWH2001503, BRAWH2001519, BRAWH2001530, BRAWH2001535, BRAWH2001589, BRAWH2001662, BRAWH2001666, BRAWH2001671, BRAWH2001679, BRAWH2001686, BRAWH2001701, BRAWH2001842, BRAWH2001862, BRAWH2001873, BRAWH2001940, BRAWH2001973, BRAWH2002047, BRAWH2002060, BRAWH2002062, BRAWH2002125, BRAWH2002191, BRAWH2002318, BRAWH2002333, BRAWH2002352, BRAWH2002383, BRAWH2002549, BRAWH2002560, BRAWH2002623, BRAWH2002630, BRAWH2002635, BRAWH2002662, BRAWH2002679, BRAWH2002725, BRAWH2002761, BRAWH2002811, BRAWH2002861, BRAWH2002911, BRAWH2002963, BRAWH2002967, BRAWH2002976, BRAWH2003000, BRAWH2003025, BRAWH2003135, BRAWH2003240, BRAWH2003307, BRAWH2003355, BRAWH2003366, BRAWH2003662, BRAWH2003689, BRAWH2003818, BRAWH2003832, BRAWH2003948, BRAWH2003964, BRAWH2004044, BRAWH2004068, BRAWH2004095, BRAWH2004136, BRAWH2004217, BRAWH2004580, BRAWH2004731, BRAWH2004779, BRAWH2004842, BRAWH2004884, BRAWH2004923, BRAWH2005008, BRAWH2005068, BRAWH2005074, BRAWH2005225, BRAWH2005315, BRAWH2005517, BRAWH2005524, BRAWH2005533, BRAWH2005812, BRAWH2005974, BRAWH2005998, BRAWH2006044, BRAWH2006083, BRAWH2006207, BRAWH2006301, BRAWH2006395, BRAWH2006405, BRAWH2006450, BRAWH2006493, BRAWH2006526, BRAWH2006543, BRAWH2006622, BRAWH2006760, BRAWH2006960, BRAWH2006989, BRAWH2006996, BRAWH2007069, BRAWH2007308, BRAWH2007406, BRAWH2007550, BRAWH2007570, BRAWH2007591, BRAWH2007658, BRAWH2007664, BRAWH2007800, BRAWH2007808, BRAWH2007825, BRAWH2007862, BRAWH2007890, BRAWH2008128, BRAWH2008219, BRAWH2008255, BRAWH2008292, BRAWH2008297, BRAWH2008366, BRAWH2008380, BRAWH2008540, BRAWH2008577, BRAWH2008706, BRAWH2008790, BRAWH2008903, BRAWH2008956, BRAWH2008993, BRAWH2009112, BRAWH2009227, BRAWH2009261, BRAWH2009263, BRAWH2009298, BRAWH2009304, BRAWH2009307, BRAWH2009360, BRAWH2009393, BRAWH2009485, BRAWH2009490, BRAWH2009558, BRAWH2009590, BRAWH2009626, BRAWH2009678, BRAWH2009695, BRAWH2009907, BRAWH2010000, BRAWH2010069, BRAWH2010084, BRAWH2010136, BRAWH2010318, BRAWH2010329, BRAWH2010354, BRAWH2010364, BRAWH2010536, BRAWH2010552, BRAWH2010584, BRAWH2010618, BRAWH2010619, BRAWH2010754, BRAWH2010980, BRAWH2011066, BRAWH2011079, BRAWH2011096, BRAWH2011155, BRAWH2011166, BRAWH2011204, BRAWH2011286, BRAWH2011294, BRAWH2011400, BRAWH2011762, BRAWH2011795, BRAWH2011796, BRAWH2011812, BRAWH2011823, BRAWH2011860, BRAWH2011920, BRAWH2011958, BRAWH2012054, BRAWH2012077, BRAWH2012161, BRAWH2012162, BRAWH2012164, BRAWH2012258, BRAWH2012277, BRAWH2012326, BRAWH2012538, BRAWH2012540, BRAWH2012619, BRAWH2012749, BRAWH2012827, BRAWH2012866, BRAWH2012963, BRAWH2013047, BRAWH2013219, BRAWH2013294, BRAWH2013748, BRAWH2013866, BRAWH2013871, BRAWH2013914, BRAWH2013941, BRAWH2013955, BRAWH2014053, BRAWH2014234, BRAWH2014379, BRAWH2014414, BRAWH2014511, BRAWH2014662, BRAWH2014717, BRAWH2014729, BRAWH2014876, BRAWH2014934, BRAWH2014954, BRAWH2015247, BRAWH2015349, BRAWH2015375, BRAWH2015385, BRAWH2015595, BRAWH2015728, BRAWH2015853, BRAWH2015866, BRAWH2016028, BRAWH2016106, BRAWH2016160, BRAWH2016209, BRAWH2016221, BRAWH2016223, BRAWH2016269, BRAWH2016305, BRAWH2016439, BRAWH2016446, BRAWH2016514, BRAWH2016562, BRAWH2016655, BRAWH2016679, BRAWH2016702, BRAWH2016724, BRAWH2016785, BRAWH2016792, BRAWH2016800, BRAWH2017002, BRAWH2017103, BRAWH2017250, BRAWH2017294, BRAWH2017305, BRAWH2017379, BRAWH2017407, BRAWH2017433, BRAWH2017523, BRAWH2017534, BRAWH2017542, BRAWH2017635, BRAWH2017913, BRAWH2018206, BRAWH2018267, BRAWH2018282, BRAWH2018317, BRAWH2018506, BRAWH2018514, BRAWH2018527, BRAWH2018601, BRAWH2018729, BRAWH2018875, BRAWH2019053, BRAWH2019055, BRAWH2019198, BRAWH3000078, BRAWH3000088, BRAWH3000100, BRAWH3000166, BRAWH3000329, BRAWH3000410, BRAWH3000446, BRAWH3000491, BRAWH3000604, BRAWH3000884, BRAWH3001053, BRAWH3001319, BRAWH3001475, BRAWH3001636, BRAWH3001638, BRAWH3001712, BRAWH3001760, BRAWH3001783, BRAWH3001833, BRAWH3001879, BRAWH3001891, BRAWH3001918, BRAWH3002433, BRAWH3002467, BRAWH3002513, BRAWH3002600, BRAWH3002819, BRAWH3003019, BRAWH3003136, BRAWH3003244, BRAWH3003343, BRAWH3003411, BRAWH3003522, BRAWH3003573, BRAWH3003598, BRAWH3003801, BRAWH3003975, BRAWH3004222, BRAWH3004335, BRAWH3004453, BRAWH3004530, BRAWH3004666, BRAWH3005037, BRAWH3005047, BRAWH3005132, BRAWH3005146, BRAWH3005292, BRAWH3005300, BRAWH3005422, BRAWH3005534, BRAWH3005886, BRAWH3005892, BRAWH3005896, BRAWH3005912, BRAWH3005981, BRAWH3006547, BRAWH3006548, BRAWH3006761, BRAWH3006792, BRAWH3007129, BRAWH3007221, BRAWH3007441, BRAWH3007455, BRAWH3007506, BRAWH3007726, BRAWH3007783, BRAWH3008167, BRAWH3008341, BRAWH3008559, BRAWH3008697, BRAWH3008867, BRAWH3008931, BRAWH3009017, BRAWH3009285, BRAWH3009297, BRAWH3009546, BRAWH3009961, BRAWH3010461, BRAWH3010560, BRAWH3010602, BRAWH3010657, BRAWH3010726, BRAWH3010833, BRAWH3011101, BRAWH3011331, BRAWH3011402, BRAWH3011577, BRAWH3011623, BRAWH3011637, BRAWH3011685, BRAWH3011907, BRAWH3011929, BRAWH3012005, BRAWH3012662, BRAWH3012779, BRAWH3013009, BRAWH3013049, BRAWH3013197, BRAWH3013264, BRAWH3013508, BRAWH3014609, BRAWH3014639, BRAWH3015017, BRAWH3015175, BRAWH3015260, BRAWH3015610, BRAWH3015825, BRAWH3016123, BRAWH3016715, BRAWH3017259, BRAWH3017260, BRAWH3017477, BRAWH3017537, BRAWH3017980, BRAWH3018063, BRAWH3018369, BRAWH3018548, BRAWH3018969, BRAWH3019026, BRAWH3019529, BRAWH3019594, BRAWH3019629, BRAWH3019820, BRAWH3020200, BRAWH3020318, BRAWH3020486, BRAWH3020884, BRAWH3020928, BRAWH3021012, BRAWH3021574, BRAWH3021580, BRAWH3021641, BRAWH3021643, BRAWH3021724, BRAWH3022347, BRAWH3022431, BRAWH3022459, BRAWH3022542, BRAWH3022719, BRAWH3022866, BRAWH3022900, BRAWH3023156, BRAWH3023168, BRAWH3023172, BRAWH3023274, BRAWH3023421, BRAWH3024231, BRAWH3024242, BRAWH3024469, BRAWH3024506, BRAWH3024613, BRAWH3024989, BRAWH3026349, BRAWH3026394, BRAWH3027420, BRAWH3027440, BRAWH3027533, BRAWH3027574, BRAWH3027607, BRAWH3027616, BRAWH3027675, BRAWH3027806, BRAWH3027880, BRAWH3027927, BRAWH3028202, BRAWH3028223, BRAWH3028306, BRAWH3028461, BRAWH3028645, BRAWH3028754, BRAWH3028796, BRAWH3029254, BRAWH3029313, BRAWH3029538, BRAWH3029556, BRAWH3030613, BRAWH3030772, BRAWH3030810, BRAWH3030892, BRAWH3030910, BRAWH3030950, BRAWH3031054, BRAWH3031710, BRAWH3031902, BRAWH3032298, BRAWH3032340, BRAWH3032571, BRAWH3032620, BRAWH3032930, BRAWH3033117, BRAWH3033293, BRAWH3033448, BRAWH3033513, BRAWH3034097, BRAWH3034114, BRAWH3034134, BRAWH3034668, BRAWH3034743, BRAWH3034775, BRAWH3034890, BRAWH3035154, BRAWH3035403, BRAWH3035904, BRAWH3035914, BRAWH3035936, BRAWH3036077, BRAWH3036247, BRAWH3036270, BRAWH3036561, BRAWH3036738, BRAWH3036951, BRAWH3037265, BRAWH3037394, BRAWH3037533, BRAWH3037979, BRAWH3038055, BRAWH3038230, BRAWH3038252, BRAWH3038324, BRCAN1000065, BRCAN1000076, BRCAN1000105, BRCAN1000149, BRCAN1000168, BRCAN2000148, BRCAN2000149, BRCAN2000209, BRCAN2000239, BRCAN2000346, BRCAN2000364, BRCAN2000383, BRCAN2000418, BRCAN2000523, BRCAN2000541, BRCAN2000563, BRCAN2000577, BRCAN2000620, BRCAN2000639, BRCAN2000763, BRCAN2000832, BRCAN2000923, BRCAN2001223, BRCAN2001866, BRCAN2002173, BRCAN2002416, BRCAN2002473, BRCAN2002562, BRCAN2002662, BRCAN2002826, BRCAN2002854, BRCAN2002856, BRCAN2002892, BRCAN2002944, BRCAN2002948, BRCAN2003070, BRCAN2003269, BRCAN2003389, BRCAN2003628, BRCAN2003703, BRCAN2003746, BRCAN2003814, BRCAN2003987, BRCAN2004173, BRCAN2004355, BRCAN2004371, BRCAN2004653, BRCAN2004699, BRCAN2005436, BRCAN2005449, BRCAN2006019, BRCAN2006051, BRCAN2006063, BRCAN2006117, BRCAN2006174, BRCAN2006290, BRCAN2006297, BRCAN2006323, BRCAN2006401, BRCAN2006411, BRCAN2006450, BRCAN2006955, BRCAN2007119, BRCAN2007144, BRCAN2007409, BRCAN2007426, BRCAN2007525, BRCAN2007700, BRCAN2008494, BRCAN2008528, BRCAN2008701, BRCAN2008894, BRCAN2009156, BRCAN2009168, BRCAN2009203, BRCAN2010374, BRCAN2010376, BRCAN2010547, BRCAN2010581, BRCAN2010665, BRCAN2011254, BRCAN2011316, BRCAN2011602, BRCAN2012110, BRCAN2012355, BRCAN2012402, BRCAN2012408, BRCAN2012481, BRCAN2012613, BRCAN2012713, BRCAN2012929, BRCAN2013655, BRCAN2013660, BRCAN2014143, BRCAN2014229, BRCAN2014370, BRCAN2014602, BRCAN2014652, BRCAN2014788, BRCAN2014881, BRCAN2014952, BRCAN2015371, BRCAN2015402, BRCAN2015464, BRCAN2015719, BRCAN2015757, BRCAN2015886, BRCAN2016025, BRCAN2016046, BRCAN2016174, BRCAN2016433, BRCAN2016619, BRCAN2016762, BRCAN2016814, BRCAN2017442, BRCAN2017905, BRCAN2018240, BRCAN2018269, BRCAN2018490, BRCAN2018566, BRCAN2018667, BRCAN2018748, BRCAN2018935, BRCAN2019002, BRCAN2019387, BRCAN2019653, BRCAN2019773, BRCAN2019907, BRCAN2020234, BRCAN2020331, BRCAN2020412, BRCAN2020467, BRCAN2020710, BRCAN2020880, BRCAN2021028, BRCAN2021325, BRCAN2021452, BRCAN2021669, BRCAN2021718, BRCAN2022191, BRCAN2022472, BRCAN2022474, BRCAN2023347, BRCAN2023724, BRCAN2024451, BRCAN2024563, BRCAN2025009, BRCAN2025093, BRCAN2025349, BRCAN2025368, BRCAN2025712, BRCAN2025982, BRCAN2026117, BRCAN2026197, BRCAN2026340, BRCAN2026711, BRCAN2027150, BRCAN2027310, BRCAN2027334, BRCAN2027355, BRCAN2027364, BRCAN2027513, BRCAN2027593, BRCAN2027970, BRCAN2028021, BRCAN2028036, BRCAN2028040, BRCAN2028319, BRCAN2028338, BRCAN2028378, BRCAN2028460, BRCAN2028545, BRCAN2028634, BRCAN2028702, BRCOC1000087, BRCOC1000094, BRCOC2000004, BRCOC2000047, BRCOC2000152, BRCOC2000184, BRCOC2000186, BRCOC2000360, BRCOC2000404, BRCOC2000487, BRCOC2000637, BRCOC2000670, BRCOC2000816, BRCOC2000850, BRCOC2001355, BRCOC2002085, BRCOC2002155, BRCOC2002323, BRCOC2002659, BRCOC2002664, BRCOC2002686, BRCOC2002751, BRCOC2002756, BRCOC2002777, BRCOC2002835, BRCOC2003100, BRCOC2003125, BRCOC2003213, BRCOC2003513, BRCOC2003732, BRCOC2003740, BRCOC2004036, BRCOC2004175, BRCOC2004354, BRCOC2004455, BRCOC2004950, BRCOC2005542, BRCOC2005903, BRCOC2005951, BRCOC2006164, BRCOC2006189, BRCOC2006243, BRCOC2006270, BRCOC2006639, BRCOC2006942, BRCOC2007034, BRCOC2007593, BRCOC2007733, BRCOC2007769, BRCOC2008064, BRCOC2008225, BRCOC2008642, BRCOC2008993, BRCOC2009052, BRCOC2009196, BRCOC2009380, BRCOC2009638, BRCOC2009937, BRCOC2010115, BRCOC2010123, BRCOC2010510, BRCOC2010980, BRCOC2010994, BRCOC2011010, BRCOC2011398, BRCOC2011418, BRCOC2011506, BRCOC2011769, BRCOC2011996, BRCOC2012229, BRCOC2012386, BRCOC2012813, BRCOC2013448, BRCOC2013573, BRCOC2013675, BRCOC2013780, BRCOC2014013, BRCOC2014033, BRCOC2014400, BRCOC2014748, BRCOC2014833, BRCOC2015824, BRCOC2015908, BRCOC2015944, BRCOC2016525, BRCOC2016661, BRCOC2017061, BRCOC2017652, BRCOC2017856, BRCOC2018775, BRCOC2018877, BRCOC2019255, BRCOC2019549, BRCOC2019841, BRCOC2019896, BRCOC2019903, BRCOC2019910, BRCOC2019934, BRCOC2020122, BRCOC2020142, BRHIP1000058, BRHIP1000072, BRHIP1000104, BRHIP1000108, BRHIP1000129, BRHIP1000174, BRHIP1000258, BRHIP2000021, BRHIP2000079, BRHIP2000087, BRHIP2000163, BRHIP2000210, BRHIP2000239, BRHIP2000245, BRHIP2000312, BRHIP2000359, BRHIP2000445, BRHIP2000506, BRHIP2000532, BRHIP2000534, BRHIP2000553, BRHIP2000621, BRHIP2000691, BRHIP2000819, BRHIP2000826, BRHIP2000920, BRHIP2001074, BRHIP2001686, BRHIP2001782, BRHIP2001802, BRHIP2001805, BRHIP2001886, BRHIP2001927, BRHIP2002122, BRHIP2002143, BRHIP2002172, BRHIP2002339, BRHIP2002346, BRHIP2002510, BRHIP2002664, BRHIP2002722, BRHIP2002929, BRHIP2003048, BRHIP2003242, BRHIP2003272, BRHIP2003748, BRHIP2003786, BRHIP2003828, BRHIP2003917, BRHIP2004312, BRHIP2004355, BRHIP2004359, BRHIP2004814, BRHIP2004883, BRHIP2004902, BRHIP2005010, BRHIP2005236, BRHIP2005271, BRHIP2005354, BRHIP2005600, BRHIP2005719, BRHIP2005724, BRHIP2005752, BRHIP2005932, BRHIP2006617, BRHIP2006782, BRHIP2006800, BRHIP2006819, BRHIP2006921, BRHIP2007307, BRHIP2007616, BRHIP2007690, BRHIP2007741, BRHIP2007928, BRHIP2007969, BRHIP2008269, BRHIP2008389, BRHIP2008607, BRHIP2008756, BRHIP2008909, BRHIP2009019, BRHIP2009177, BRHIP2009340, BRHIP2009351, BRHIP2009414, BRHIP2009474, BRHIP2009617, BRHIP2009685, BRHIP2010217, BRHIP2010309, BRHIP2010444, BRHIP2010593, BRHIP2010610, BRHIP2010723, BRHIP2010744, BRHIP2011080, BRHIP2011120, BRHIP2011199, BRHIP2011508, BRHIP2011576, BRHIP2011783, BRHIP2011838, BRHIP2011891, BRHIP2011933, BRHIP2012054, BRHIP2012059, BRHIP2012141, BRHIP2012314, BRHIP2012360, BRHIP2012545, BRHIP2012580, BRHIP2012627, BRHIP2012642, BRHIP2012750, BRHIP2012922, BRHIP2012923, BRHIP2012972, BRHIP2013286, BRHIP2013447, BRHIP2013510, BRHIP2013699, BRHIP2013723, BRHIP2013958, BRHIP2013972, BRHIP2014063, BRHIP2014228, BRHIP2014285, BRHIP2014291, BRHIP2014373, BRHIP2014386, BRHIP2014387, BRHIP2014954, BRHIP2015153, BRHIP2015224, BRHIP2015356, BRHIP2015360, BRHIP2015679, BRHIP2016005, BRHIP2016125, BRHIP2016788, BRHIP2016968, BRHIP2016990, BRHIP2017010, BRHIP2017315, BRHIP2017385, BRHIP2017404, BRHIP2017542, BRHIP2017553, BRHIP2017642, BRHIP2017714, BRHIP2017780, BRHIP2017945, BRHIP2018014, BRHIP2018369, BRHIP2018612, BRHIP2018635, BRHIP2018650, BRHIP2018719, BRHIP2018805, BRHIP2018998, BRHIP2019007, BRHIP2019047, BRHIP2019177, BRHIP2019186, BRHIP2019291, BRHIP2019494, BRHIP2019589, BRHIP2019641, BRHIP2019819, BRHIP2019884, BRHIP2019972, BRHIP2020182, BRHIP2020509, BRHIP2020573, BRHIP2020622, BRHIP2020695, BRHIP2020743, BRHIP2020842, BRHIP2020859, BRHIP2020930, BRHIP2021102, BRHIP2021289, BRHIP2021495, BRHIP2021615, BRHIP2021744, BRHIP2021858, BRHIP2021870, BRHIP2021929, BRHIP2022006, BRHIP2022054, BRHIP2022221, BRHIP2022298, BRHIP2022467, BRHIP2022708, BRHIP2022986, BRHIP2023071, BRHIP2023229, BRHIP2023272, BRHIP2023292, BRHIP2023309, BRHIP2023369, BRHIP2023438, BRHIP2023695, BRHIP2023735, BRHIP2023762, BRHIP2023773, BRHIP2023860, BRHIP2023869, BRHIP2024046, BRHIP2024165, BRHIP2024201, BRHIP2024347, BRHIP2024398, BRHIP2024549, BRHIP2024789, BRHIP2024941, BRHIP2025245, BRHIP2025366, BRHIP2025448, BRHIP2025679, BRHIP2025739, BRHIP2025797, BRHIP2026021, BRHIP2026061, BRHIP2026155, BRHIP2026214, BRHIP2026288, BRHIP2026346, BRHIP2026557, BRHIP2026723, BRHIP2026877, BRHIP2027054, BRHIP2027077, BRHIP2027563, BRHIP2027685, BRHIP2027762, BRHIP2028187, BRHIP2028303, BRHIP2028330, BRHIP2028480, BRHIP2028583, BRHIP2028593, BRHIP2029176, BRHIP2029283, BRHIP2029393, BRHIP2029529, BRHIP2029643, BRHIP2029663, BRHIP3000060, BRHIP3000070, BRHIP3000081, BRHIP3000111, BRHIP3000131, BRHIP3000240, BRHIP3000457, BRHIP3000475, BRHIP3000488, BRHIP3000526, BRHIP3000626, BRHIP3000859, BRHIP3000907, BRHIP3001079, BRHIP3001141, BRHIP3001283, BRHIP3001338, BRHIP3001360, BRHIP3001481, BRHIP3001878, BRHIP3001964, BRHIP3002114, BRHIP3002124, BRHIP3002363, BRHIP3002691, BRHIP3002920, BRHIP3002931, BRHIP3003063, BRHIP3003126, BRHIP3003306, BRHIP3003340, BRHIP3003395, BRHIP3003484, BRHIP3003644, BRHIP3003688, BRHIP3003795, BRHIP3003961, BRHIP3003984, BRHIP3004193, BRHIP3004215, BRHIP3004416, BRHIP3004710, BRHIP3004725, BRHIP3004774, BRHIP3004786, BRHIP3004863, BRHIP3004968, BRHIP3005037, BRHIP3005137, BRHIP3005142, BRHIP3005231, BRHIP3005574, BRHIP3005673, BRHIP3005768, BRHIP3005801, BRHIP3005944, BRHIP3006279, BRHIP3006294, BRHIP3006390, BRHIP3006449, BRHIP3006683, BRHIP3006717, BRHIP3006786, BRHIP3006950, BRHIP3007172, BRHIP3007183, BRHIP3007195, BRHIP3007239, BRHIP3007291, BRHIP3007409, BRHIP3007424, BRHIP3007483, BRHIP3007609, BRHIP3007640, BRHIP3007960, BRHIP3008082, BRHIP3008183, BRHIP3008314, BRHIP3008320, BRHIP3008405, BRHIP3008598, BRHIP3008606, BRHIP3008691, BRHIP3008714, BRHIP3008997, BRHIP3009099, BRHIP3009140, BRHIP3009181, BRHIP3009318, BRHIP3009427, BRHIP3009448, BRHIP3009672, BRHIP3009753, BRHIP3010135, BRHIP3010289, BRHIP3010529, BRHIP3011082, BRHIP3011241, BRHIP3011269, BRHIP3011460, BRHIP3011567, BRHIP3011831, BRHIP3012185, BRHIP3012289, BRHIP3012357, BRHIP3012736, BRHIP3012745, BRHIP3012868, BRHIP3013078, BRHIP3013271, BRHIP3013588, BRHIP3013698, BRHIP3013765, BRHIP3013897, BRHIP3014237, BRHIP3014675, BRHIP3015620, BRHIP3015751, BRHIP3015854, BRHIP3016032, BRHIP3016213, BRHIP3016302, BRHIP3016421, BRHIP3017109, BRHIP3017146, BRHIP3017256, BRHIP3017325, BRHIP3017558, BRHIP3017637, BRHIP3018278, BRHIP3018784, BRHIP3019643, BRHIP3019824, BRHIP3019880, BRHIP3019956, BRHIP3020155, BRHIP3020182, BRHIP3020733, BRHIP3021019, BRHIP3021499, BRHIP3021534, BRHIP3021778, BRHIP3021987, BRHIP3022656, BRHIP3023922, BRHIP3024118, BRHIP3024533, BRHIP3024703, BRHIP3024725, BRHIP3024820, BRHIP3025161, BRHIP3025702, BRHIP3025795, BRHIP3025844, BRHIP3026052, BRHIP3026097, BRHIP3026231, BRHIP3026335, BRHIP3026651, BRHIP3027105, BRHIP3027137, BRHIP3027160, BRHIP3027191, BRHIP3027501, BRHIP3027594, BRHIP3027651, BRHIP3027854, BRHIP3027947, BRHIP3028570, BRHIP3028742, BRSSN1000056, BRSSN1000059, BRSSN1000092, BRSSN1000153, BRSSN2000097, BRSSN2000175, BRSSN2000197, BRSSN2000244, BRSSN2000293, BRSSN2000312, BRSSN2000518, BRSSN2000561, BRSSN2000566, BRSSN2000684, BRSSN2000715, BRSSN2000832, BRSSN2001275, BRSSN2001342, BRSSN2001426, BRSSN2001503, BRSSN2001579, BRSSN2001758, BRSSN2001810, BRSSN2002857, BRSSN2002859, BRSSN2003012, BRSSN2003086, BRSSN2003093, BRSSN2003820, BRSSN2003841, BRSSN2003937, BRSSN2004142, BRSSN2004303, BRSSN2004304, BRSSN2004496, BRSSN2004657, BRSSN2004679, BRSSN2004686, BRSSN2004710, BRSSN2004719, BRSSN2005847, BRSSN2006133, BRSSN2006390, BRSSN2006575, BRSSN2006611, BRSSN2006644, BRSSN2007076, BRSSN2007168, BRSSN2007202, BRSSN2007338, BRSSN2007464, BRSSN2007504, BRSSN2007819, BRSSN2008125, BRSSN2008419, BRSSN2008464, BRSSN2008549, BRSSN2008797, BRSSN2009119, BRSSN2009378, BRSSN2009389, BRSSN2009395, BRSSN2009627, BRSSN2009630, BRSSN2009702, BRSSN2010110, BRSSN2010587, BRSSN2010596, BRSSN2010830, BRSSN2011262, BRSSN2011653, BRSSN2011738, BRSSN2011843, BRSSN2012081, BRSSN2012103, BRSSN2012157, BRSSN2012198, BRSSN2012254, BRSSN2012439, BRSSN2012622, BRSSN2012691, BRSSN2012838, BRSSN2013095, BRSSN2013544, BRSSN2013696, BRSSN2013702, BRSSN2013733, BRSSN2013753, BRSSN2013874, BRSSN2014112, BRSSN2014294, BRSSN2014299, BRSSN2014424, BRSSN2014513, BRSSN2014556, BRSSN2014573, BRSSN2014610, BRSSN2014636, BRSSN2015199, BRSSN2015238, BRSSN2015369, BRSSN2015493, BRSSN2015497, BRSSN2015554, BRSSN2015707, BRSSN2015773, BRSSN2015907, BRSSN2015982, BRSSN2016589, BRSSN2016768, BRSSN2016905, BRSSN2017297, BRSSN2017530, BRSSN2017682, BRSSN2017757, BRSSN2018218, BRSSN2018440, BRSSN2018447, BRSSN2018581, BRSSN2018731, BRSSN2018771, BRSSN2018925, BRSTN1000083, BRSTN1000097, BRSTN2000058, BRSTN2000070, BRSTN2000220, BRSTN2000312, BRSTN2000367, BRSTN2000536, BRSTN2000872, BRSTN2001613, BRSTN2001801, BRSTN2002105, BRSTN2002400, BRSTN2002532, BRSTN2002691, BRSTN2003590, BRSTN2003835, BRSTN2004863, BRSTN2004869, BRSTN2004987, BRSTN2005721, BRSTN2006306, BRSTN2006466, BRSTN2006580, BRSTN2006583, BRSTN2006638, BRSTN2006865, BRSTN2007000, BRSTN2007118, BRSTN2007284, BRSTN2007765, BRSTN2008052, BRSTN2008283, BRSTN2008367, BRSTN2008418, BRSTN2008457, BRSTN2008475, BRSTN2008930, BRSTN2009247, BRSTN2010107, BRSTN2010363, BRSTN2010416, BRSTN2010500, BRSTN2010569, BRSTN2010750, BRSTN2010923, BRSTN2011211, BRSTN2011597, BRSTN2011688, BRSTN2011799, BRSTN2012089, BRSTN2012284, BRSTN2012320, BRSTN2012380, BRSTN2012451, BRSTN2013171, BRSTN2013354, BRSTN2014490, BRSTN2014633, BRSTN2014751, BRSTN2014770, BRSTN2015015, BRSTN2015889, BRSTN2015978, BRSTN2016066, BRSTN2016335, BRSTN2016678, BRSTN2016918, BRSTN2016992, BRSTN2017104, BRSTN2017151, BRSTN2017237, BRSTN2017379, BRSTN2017761, BRSTN2017771, BRSTN2017995, BRSTN2018077, BRSTN2018083, BRSTN2018596, BRSTN2018692, BRSTN2018712, BRSTN2019079, BRSTN2019129, BRTHA1000021, BRTHA1000063, BRTHA1000311, BRTHA2000474, BRTHA2000514, BRTHA2000574, BRTHA2000855, BRTHA2000969, BRTHA2000972, BRTHA2001304, BRTHA2001370, BRTHA2001462, BRTHA2001717, BRTHA2001812, BRTHA2002091, BRTHA2002115, BRTHA2002133, BRTHA2002281, BRTHA2002376, BRTHA2002442, BRTHA2002493, BRTHA2002565, BRTHA2002608, BRTHA2002702, BRTHA2002721, BRTHA2002726, BRTHA2002741, BRTHA2002808, BRTHA2002896, BRTHA2002903, BRTHA2003030, BRTHA2003110, BRTHA2003116, BRTHA2003436, BRTHA2003759, BRTHA2003794, BRTHA2004371, BRTHA2004582, BRTHA2004629, BRTHA2004639, BRTHA2004642, BRTHA2004812, BRTHA2004821, BRTHA2004978, BRTHA2004992, BRTHA2005005, BRTHA2005013, BRTHA2005448, BRTHA2005579, BRTHA2005942, BRTHA2005956, BRTHA2006075, BRTHA2006146, BRTHA2006194, BRTHA2006232, BRTHA2006720, BRTHA2006735, BRTHA2006974, BRTHA2006975, BRTHA2007060, BRTHA2007122, BRTHA2007422, BRTHA2007603, BRTHA2007665, BRTHA2007998, BRTHA2008316, BRTHA2008335, BRTHA2008502, BRTHA2008513, BRTHA2008527, BRTHA2008535, BRTHA2008598, BRTHA2008669, BRTHA2008955, BRTHA2009311, BRTHA2009349, BRTHA2009486, BRTHA2009803, BRTHA2009846, BRTHA2009886, BRTHA2009972, BRTHA2010008, BRTHA2010033, BRTHA2010073, BRTHA2010097, BRTHA2010191, BRTHA2010397, BRTHA2010672, BRTHA2010884, BRTHA2010907, BRTHA2011062, BRTHA2011194, BRTHA2011321, BRTHA2011351, BRTHA2011500, BRTHA2011641, BRTHA2011691, BRTHA2012129, BRTHA2012189, BRTHA2012351, BRTHA2012392, BRTHA2012466, BRTHA2012555, BRTHA2012562, BRTHA2012980, BRTHA2013054, BRTHA2013262, BRTHA2013275, BRTHA2013426, BRTHA2013460, BRTHA2013515, BRTHA2013540, BRTHA2013595, BRTHA2013610, BRTHA2013707, BRTHA2013942, BRTHA2014287, BRTHA2014334, BRTHA2014381, BRTHA2014578, BRTHA2014647, BRTHA2014663, BRTHA2014792, BRTHA2014828, BRTHA2014909, BRTHA2014975, BRTHA2014997, BRTHA2015406, BRTHA2015478, BRTHA2015696, BRTHA2015700, BRTHA2015853, BRTHA2015878, BRTHA2016179, BRTHA2016215, BRTHA2016267, BRTHA2016318, BRTHA2016496, BRTHA2016543, BRTHA2016552, BRTHA2016577, BRTHA2016765, BRTHA2016918, BRTHA2017353, BRTHA2017364, BRTHA2017972, BRTHA2017985, BRTHA2018011, BRTHA2018129, BRTHA2018165, BRTHA2018304, BRTHA2018344, BRTHA2018420, BRTHA2018443, BRTHA2018504, BRTHA2018558, BRTHA2018591, BRTHA2018624, BRTHA2018706, BRTHA2018707, BRTHA2019014, BRTHA2019022, BRTHA2019048, BRTHA2019073, BRTHA2019726, BRTHA2019743, BRTHA2020400, BRTHA2020566, BRTHA2020642, BRTHA2020695, BRTHA2020721, BRTHA2020781, BRTHA2020811, BRTHA2020910, BRTHA2021212, BRTHA2021440, BRTHA2021450, BRTHA2022074, BRTHA2022914, BRTHA2022968, BRTHA2023402, BRTHA2023437, BRTHA2024177, BRTHA2024354, BRTHA2024712, BRTHA2025869, BRTHA2026071, BRTHA2026290, BRTHA2026311, BRTHA2027227, BRTHA2027229, BRTHA2027250, BRTHA2027546, BRTHA2028297, BRTHA2029969, BRTHA2030036, BRTHA2030213, BRTHA2031517, BRTHA2031800, BRTHA2031917, BRTHA2032763, BRTHA2032845, BRTHA2033122, BRTHA2033155, BRTHA2033264, BRTHA2033320, BRTHA2033469, BRTHA2033683, BRTHA2034281, BRTHA2034576, BRTHA2034874, BRTHA2035448, BRTHA2035743, BRTHA2036055, BRTHA2036295, BRTHA2036660, BRTHA2037247, BRTHA2038279, BRTHA2038345, BRTHA2038353, BRTHA2038396, BRTHA3000252, BRTHA3000273, BRTHA3000296, BRTHA3000297, BRTHA3000325, BRTHA3000456, BRTHA3000633, BRTHA3000789, BRTHA3001221, BRTHA3001623, BRTHA3002265, BRTHA3002401, BRTHA3002411, BRTHA3002427, BRTHA3002864, BRTHA3002933, BRTHA3002955, BRTHA3003000, BRTHA3003225, BRTHA3003339, BRTHA3003343, BRTHA3003417, BRTHA3003449, BRTHA3003474, BRTHA3003490, BRTHA3003704, BRTHA3004432, BRTHA3004475, BRTHA3004502, BRTHA3004610, BRTHA3005046, BRTHA3005735, BRTHA3005988, BRTHA3006318, BRTHA3006593, BRTHA3006856, BRTHA3007113, BRTHA3007130, BRTHA3007148, BRTHA3007319, BRTHA3007469, BRTHA3007472, BRTHA3007532, BRTHA3007662, BRTHA3007685, BRTHA3007769, BRTHA3007922, BRTHA3008143, BRTHA3008293, BRTHA3008310, BRTHA3008386, BRTHA3008520, BRTHA3008608, BRTHA3008694, BRTHA3008778, BRTHA3008826, BRTHA3009037, BRTHA3009090, BRTHA3009291, BRTHA3009858, BRTHA3010135, BRTHA3010366, BRTHA3010469, BRTHA3010530, BRTHA3010540, BRTHA3010717, BRTHA3011149, BRTHA3011187, BRTHA3011194, BRTHA3011229, BRTHA3011361, BRTHA3011510, BRTHA3011892, BRTHA3012265, BRTHA3013860, BRTHA3013882, BRTHA3013884, BRTHA3013981, BRTHA3014000, BRTHA3014105, BRTHA3014507, BRTHA3014547, BRTHA3014691, BRTHA3014835, BRTHA3014854, BRTHA3014908, BRTHA3014920, BRTHA3015815, BRTHA3016616, BRTHA3016835, BRTHA3016845, BRTHA3016917, BRTHA3017047, BRTHA3017589, BRTHA3017848, BRTHA3018409, BRTHA3018514, BRTHA3018617, BRTHA3018623, BRTHA3018656, BRTHA3019048, BRTHA3019105, BRTHA3019183, BRTHA3020000, BRTHA3020369, BRTHA3021569, BRTHA3021708, BRTHA3021786, BRTHA3021971, BRTHA3022641, BRTHA3023523, BRTHA3023590, BRTHA3023929, BRTHA3024233, BRTHA3024600, BRTHA3025073, BRTHA3025789, BRTHA3025826, BRTHA3026161, BRTHA3026180, BRTHA3026556, BRTHA3026916, BRTHA3027171, BRTHA3027318, BRTHA3027638, BRTHA3027820, BRTHA3027957, BRTHA3028339, BRTHA3028505, BRTHA3028782, CD34C2000051, CD34C2000152, CD34C2000175, CD34C2000443, CD34C3000125, CD34C3000252, CD34C3000314, CD34C3000424, CD34C3000494, CERVX1000042, CERVX2000812, CERVX2000968, CERVX2002006, CERVX2002013, CERVX2002430, CERVX2002770, CHONS1000058, CHONS2000172, CHONS2000797, CHONS2001287, CHONS2001382, CHONS2001797, CHONS2001834, CHONS2002419, COLON1000030, COLON1000084, COLON1000135, COLON2000470, COLON2000557, COLON2000568, COLON2001721, COLON2001829, COLON2001866, COLON2002443, COLON2002520, COLON2003043, COLON2003529, COLON2004318, COLON2004351, COLON2004478, COLON2004911, COLON2005126, COLON2005623, COLON2005735, COLON2005772, COLON2006263, COLON2006282, COLON2006417, COLON2007274, COLON2007733, COLON2008105, COLON2009337, COLON2009499, CORDB1000140, CORDB2000061, CORDB2000127, CORDB2000541, CTONG1000009, CTONG1000010, CTONG1000020, CTONG1000022, CTONG1000040, CTONG1000056, CTONG1000062, CTONG1000086, CTONG1000088, CTONG1000093, CTONG1000097, CTONG1000113, CTONG1000165, CTONG1000175, CTONG1000181, CTONG1000218, CTONG1000220, CTONG1000283, CTONG1000288, CTONG1000302, CTONG1000341, CTONG1000476, CTONG1000488, CTONG1000508, CTONG1000540, CTONG2000031, CTONG2000034, CTONG2000042, CTONG2000063, CTONG2000201, CTONG2000218, CTONG2000279, CTONG2000303, CTONG2000330, CTONG2000395, CTONG2000452, CTONG2000465, CTONG2000469, CTONG2000480, CTONG2000561, CTONG2000589, CTONG2000766, CTONG2000771, CTONG2000819, CTONG2000827, CTONG2000846, CTONG2000855, CTONG2000977, CTONG2001139, CTONG2001226, CTONG2001320, CTONG2001366, CTONG2001413, CTONG2001428, CTONG2001513, CTONG2001524, CTONG2001533, CTONG2001598, CTONG2001681, CTONG2001724, CTONG2001749, CTONG2001800, CTONG2001820, CTONG2001858, CTONG2001877, CTONG2001911, CTONG2001955, CTONG2002066, CTONG2002095, CTONG2002143, CTONG2002395, CTONG2002417, CTONG2002418, CTONG2002453, CTONG2002520, CTONG2002558, CTONG2002590, CTONG2002709, CTONG2002721, CTONG2002816, CTONG2002820, CTONG2002832, CTONG2002841, CTONG2002903, CTONG2002965, CTONG2002999, CTONG2003028, CTONG2003094, CTONG2003100, CTONG2003115, CTONG2003189, CTONG2003245, CTONG2003293, CTONG2003350, CTONG2003361, CTONG2003372, CTONG2003375, CTONG2003427, CTONG2003599, CTONG2003680, CTONG2003699, CTONG2003764, CTONG2003782, CTONG2003889, CTONG2003937, CTONG2003945, CTONG2004000, CTONG2004062, CTONG2004115, CTONG2004126, CTONG2004264, CTONG2004305, CTONG2004397, CTONG2004454, CTONG2004487, CTONG2004550, CTONG2004669, CTONG2004716, CTONG2004912, CTONG2004941, CTONG2004948, CTONG2005028, CTONG2005049, CTONG2005110, CTONG2005265, CTONG2005278, CTONG2005290, CTONG2005374, CTONG2005399, CTONG2005468, CTONG2005553, CTONG2005567, CTONG2005585, CTONG2005635, CTONG2005775, CTONG2005795, CTONG2005890, CTONG2005904, CTONG2005913, CTONG2006004, CTONG2006129, CTONG2006223, CTONG2006273, CTONG2006310, CTONG2006393, CTONG2006412, CTONG2006449, CTONG2006515, CTONG2006524, CTONG2006568, CTONG2006611, CTONG2006620, CTONG2006666, CTONG2006691, CTONG2006709, CTONG2006798, CTONG2006836, CTONG2006942, CTONG2006964, CTONG2007007, CTONG2007009, CTONG2007072, CTONG2007091, CTONG2007104, CTONG2007168, CTONG2007175, CTONG2007259, CTONG2007272, CTONG2007293, CTONG2007297, CTONG2007399, CTONG2007400, CTONG2007417, CTONG2007441, CTONG2007474, CTONG2007586, CTONG2007613, CTONG2007623, CTONG2007681, CTONG2007776, CTONG2007779, CTONG2007898, CTONG2007959, CTONG2007970, CTONG2008014, CTONG2008184, CTONG2008262, CTONG2008269, CTONG2008321, CTONG2008402, CTONG2008405, CTONG2008466, CTONG2008506, CTONG2008521, CTONG2008562, CTONG2008577, CTONG2008595, CTONG2008621, CTONG2008720, CTONG2008721, CTONG2008773, CTONG2008792, CTONG2008989, CTONG2009033, CTONG2009108, CTONG2009132, CTONG2009156, CTONG2009181, CTONG2009257, CTONG2009258, CTONG2009268, CTONG2009270, CTONG2009395, CTONG2009423, CTONG2009440, CTONG2009527, CTONG2009531, CTONG2009534, CTONG2009570, CTONG2009572, CTONG2009604, CTONG2009643, CTONG2009675, CTONG2009689, CTONG2009725, CTONG2009766, CTONG2009768, CTONG2009844, CTONG2009871, CTONG2009887, CTONG2009891, CTONG2009955, CTONG2009958, CTONG2009963, CTONG2010018, CTONG2010024, CTONG2010116, CTONG2010133, CTONG2010148, CTONG2010276, CTONG2010330, CTONG2010508, CTONG2010566, CTONG2010623, CTONG2010652, CTONG2010803, CTONG2011188, CTONG2011429, CTONG2011474, CTONG2011676, CTONG2011716, CTONG2011765, CTONG2011779, CTONG2011815, CTONG2011822, CTONG2011920, CTONG2011985, CTONG2012001, CTONG2012029, CTONG2012050, CTONG2012077, CTONG2012101, CTONG2012123, CTONG2012158, CTONG2012230, CTONG2012401, CTONG2012422, CTONG2012425, CTONG2012447, CTONG2012453, CTONG2012473, CTONG2012476, CTONG2012533, CTONG2012554, CTONG2012564, CTONG2012607, CTONG2012661, CTONG2012724, CTONG2012738, CTONG2012745, CTONG2012758, CTONG2012843, CTONG2012901, CTONG2013149, CTONG2013178, CTONG2013222, CTONG2013284, CTONG2013339, CTONG2013348, CTONG2013352, CTONG2013381, CTONG2013393, CTONG2013511, CTONG2013630, CTONG2013803, CTONG2013985, CTONG2013986, CTONG2014032, CTONG2014058, CTONG2014119, CTONG2014165, CTONG2014191, CTONG2014206, CTONG2014234, CTONG2014264, CTONG2014280, CTONG2014389, CTONG2014491, CTONG2014630, CTONG2014635, CTONG2014646, CTONG2014705, CTONG2014946, CTONG2014954, CTONG2014959, CTONG2014966, CTONG2014995, CTONG2015091, CTONG2015204, CTONG2015316, CTONG2015330, CTONG2015358, CTONG2015434, CTONG2015518, CTONG2015540, CTONG2015596, CTONG2015633, CTONG2015678, CTONG2015717, CTONG2015804, CTONG2015815, CTONG2015866, CTONG2015914, CTONG2015953, CTONG2016185, CTONG2016217, CTONG2016355, CTONG2016499, CTONG2016505, CTONG2016559, CTONG2016658, CTONG2016775, CTONG2016797, CTONG2016824, CTONG2016846, CTONG2016904, CTONG2016931, CTONG2016942, CTONG2016953, CTONG2017021, CTONG2017292, CTONG2017409, CTONG2017444, CTONG2017458, CTONG2017500, CTONG2017604, CTONG2017650, CTONG2017798, CTONG2017804, CTONG2017814, CTONG2017910, CTONG2017939, CTONG2017989, CTONG2018062, CTONG2018069, CTONG2018147, CTONG2018217, CTONG2018279, CTONG2018334, CTONG2018343, CTONG2018379, CTONG2018383, CTONG2018413, CTONG2018483, CTONG2018629, CTONG2018632, CTONG2018652, CTONG2018653, CTONG2018655, CTONG2018735, CTONG2018739, CTONG2018808, CTONG2018843, CTONG2018900, CTONG2018976, CTONG2019029, CTONG2019063, CTONG2019144, CTONG2019232, CTONG2019248, CTONG2019400, CTONG2019590, CTONG2019652, CTONG2019704, CTONG2019788, CTONG2019833, CTONG2020031, CTONG2020108, CTONG2020127, CTONG2020171, CTONG2020374, CTONG2020445, CTONG2020522, CTONG2020582, CTONG2020638, CTONG2020806, CTONG2020831, CTONG2020974, CTONG2021024, CTONG2021132, CTONG2021168, CTONG2021289, CTONG2022153, CTONG2022601, CTONG2022835, CTONG2023021, CTONG2023449, CTONG2023512, CTONG2024206, CTONG2024614, CTONG2024749, CTONG2025496, CTONG2025513, CTONG2025516, CTONG2025610, CTONG2025900, CTONG2026513, CTONG2026770, CTONG2026920, CTONG2026987, CTONG2027150, CTONG2027327, CTONG2027361, CTONG2027591, CTONG2027736, CTONG2027783, CTONG2027828, CTONG2027959, CTONG2028097, CTONG2028208, CTONG2028309, CTONG2028486, CTONG2028518, CTONG2028687, CTONG2028758, CTONG3000657, CTONG3000686, CTONG3000707, CTONG3000896, CTONG3001420, CTONG3001501, CTONG3001560, CTONG3001605, CTONG3001746, CTONG3002020, CTONG3002127, CTONG3002370, CTONG3002412, CTONG3002433, CTONG3002552, CTONG3002588, CTONG3002674, CTONG3002728, CTONG3002835, CTONG3002909, CTONG3002947, CTONG3002983, CTONG3003165, CTONG3003179, CTONG3003483, CTONG3003553, CTONG3003598, CTONG3003652, CTONG3003654, CTONG3003669, CTONG3003737, CTONG3003905, CTONG3003972, CTONG3004072, CTONG3004397, CTONG3004550, CTONG3004576, CTONG3004607, CTONG3004712, CTONG3004726, CTONG3005325, CTONG3005648, CTONG3005713, CTONG3005803, CTONG3005813, CTONG3006067, CTONG3006073, CTONG3006186, CTONG3006629, CTONG3006650, CTONG3006659, CTONG3007244, CTONG3007444, CTONG3007528, CTONG3007586, CTONG3007870, CTONG3008223, CTONG3008252, CTONG3008258, CTONG3008457, CTONG3008496, CTONG3008566, CTONG3008639, CTONG3008831, CTONG3008951, CTONG3008959, CTONG3009227, CTONG3009287, CTONG3009328, CTONG3009385, D30ST1000066, D30ST1000109, D30ST1000238, D30ST1000267, D30ST1000270, D30ST2000184, D30ST2000618, D30ST2000654, D30ST2000734, D30ST2001328, D30ST2001669, D30ST2001670, D30ST2001788, D30ST2002068, D30ST2002182, D30ST2002223, D30ST2002262, D30ST2002272, D30ST2002417, D30ST2002436, D30ST2002648, D30ST2003024, D30ST2003331, D30ST2003607, D30ST2003797, D30ST2004637, D30ST3000169, D30ST3000195, D30ST3000291, D30ST3000388, D30ST3000493, D60ST2000127, D60ST2000169, D60ST2000245, D60ST2000358, D60ST2000507, D90ST2000031, D90ST2000278, D90ST2000440, D90ST2000869, D90ST2001319, D90ST2001433, D90ST2002397, D90ST2002673, D90ST2003106, D90ST2003108, D90ST2003137, D90ST2003397, D90ST2003580, D90ST2003594, D90ST2003762, D90ST2003989, D90ST2004018, D90ST2004073, D90ST2004417, DFNES1000003, DFNES1000083, DFNES1000107, DFNES1000150, DFNES2000143, DFNES2000146, DFNES2000153, DFNES2000212, DFNES2000268, DFNES2000292, DFNES2000335, DFNES2000432, DFNES2000457, DFNES2000471, DFNES2000526, DFNES2000913, DFNES2001091, DFNES2001096, DFNES2001108, DFNES2001177, DFNES2001404, DFNES2001564, DFNES2001565, DFNES2001647, DFNES2001800, DFNES2002220, DFNES2002509, DFNES2002550, DFNES2002588, DFNES2002817, DFNES2002966, DFNES2003081, DFNES2003192, DFNES2003255, DFNES2003742, DFNES2004346, DFNES2004354, DFNES2004371, DFNES2004383, DFNES2004608, DFNES2004684, DFNES2005266, DFNES2005527, DFNES2005540, DFNES2005690, DFNES2005766, DFNES2005779, DFNES2005875, DFNES2006944, DFNES2007113, DFNES2007299, DFNES2007332, DFNES2007641, DFNES2007757, DFNES2008088, DFNES2008160, DFNES2008280, DFNES2008881, DFNES2009482, DFNES2010502, DFNES2011192, DFNES2011221, DFNES2011239, DFNES2011245, DFNES2011380, DFNES2011499, ERLTF1000021, ERLTF2000324, ERLTF2000465, FCBBF1000023, FCBBF1000025, FCBBF1000038, FCBBF1000053, FCBBF1000063, FCBBF1000069, FCBBF1000077, FCBBF1000115, FCBBF1000117, FCBBF1000118, FCBBF1000121, FCBBF1000125, FCBBF1000131, FCBBF1000139, FCBBF1000155, FCBBF1000157, FCBBF1000171, FCBBF1000174, FCBBF1000198, FCBBF1000206, FCBBF1000220, FCBBF1000232, FCBBF1000233, FCBBF1000243, FCBBF1000270, FCBBF1000272, FCBBF1000280, FCBBF1000297, FCBBF1000305, FCBBF1000314, FCBBF1000322, FCBBF1000349, FCBBF1000374, FCBBF1000376, FCBBF1000377, FCBBF1000395, FCBBF1000397, FCBBF1000403, FCBBF1000437, FCBBF1000449, FCBBF1000476, FCBBF1000506, FCBBF1000509, FCBBF1000546, FCBBF1000550, FCBBF1000556, FCBBF1000563, FCBBF1000581, FCBBF1000582, FCBBF1000598, FCBBF1000604, FCBBF1000618, FCBBF1000627, FCBBF1000671, FCBBF1000675, FCBBF1000684, FCBBF1000686, FCBBF1000687, FCBBF1000691, FCBBF1000732, FCBBF1000748, FCBBF2000038, FCBBF2000094, FCBBF2000105, FCBBF2000123, FCBBF2000195, FCBBF2000199, FCBBF2000214, FCBBF2000232, FCBBF2000259, FCBBF2000276, FCBBF2000291, FCBBF2000362, FCBBF2000379, FCBBF2000473, FCBBF2000502, FCBBF2000566, FCBBF2000576, FCBBF2000677, FCBBF2000678, FCBBF2000733, FCBBF2000782, FCBBF2000808, FCBBF2000815, FCBBF2000825, FCBBF2000940, FCBBF2000951, FCBBF2001088, FCBBF2001105, FCBBF2001116, FCBBF2001183, FCBBF2001188, FCBBF2001211, FCBBF2001238, FCBBF2001243, FCBBF2001299, FCBBF2001309, FCBBF2001400, FCBBF2001427, FCBBF2001480, FCBBF2001529, FCBBF2001538, FCBBF2001594, FCBBF2001672, FCBBF2001675, FCBBF2001718, FCBBF2001720, FCBBF2001817, FCBBF2001868, FCBBF2002044, FCBBF2002111, FCBBF2002281, FCBBF2002349, FCBBF2002370, FCBBF2002541, FCBBF2002626, FCBBF2002801, FCBBF2002897, FCBBF2002898, FCBBF2002904, FCBBF2002928, FCBBF2002953, FCBBF2003083, FCBBF2003102, FCBBF2003269, FCBBF2003293, FCBBF2003297, FCBBF2003395, FCBBF2003528, FCBBF2003543, FCBBF2003549, FCBBF2003567, FCBBF2003636, FCBBF2003823, FCBBF2003895, FCBBF2004066, FCBBF2004090, FCBBF2004138, FCBBF2004217, FCBBF2004256, FCBBF2004373, FCBBF2004448, FCBBF2004671, FCBBF2004707, FCBBF2004788, FCBBF2005069, FCBBF2005122, FCBBF2005428, FCBBF2005439, FCBBF2005538, FCBBF2005637, FCBBF2005645, FCBBF2005658, FCBBF2005733, FCBBF2005909, FCBBF2005966, FCBBF2006131, FCBBF2006418, FCBBF2006452, FCBBF2006634, FCBBF2006781, FCBBF2007012, FCBBF2007186, FCBBF2007265, FCBBF2007302, FCBBF2007556, FCBBF2007610, FCBBF2007633, FCBBF2007840, FCBBF3000102, FCBBF3000110, FCBBF3000120, FCBBF3000168, FCBBF3000175, FCBBF3000227, FCBBF3000228, FCBBF3000229, FCBBF3000233, FCBBF3000269, FCBBF3000361, FCBBF3000367, FCBBF3000388, FCBBF3000434, FCBBF3000462, FCBBF3000473, FCBBF3000501, FCBBF3000518, FCBBF3000550, FCBBF3000847, FCBBF3001018, FCBBF3001020, FCBBF3001081, FCBBF3001235, FCBBF3001281, FCBBF3001302, FCBBF3001377, FCBBF3001594, FCBBF3001632, FCBBF3001657, FCBBF3001818, FCBBF3001855, FCBBF3001890, FCBBF3001912, FCBBF3001914, FCBBF3001918, FCBBF3001924, FCBBF3001977, FCBBF3002163, FCBBF3002188, FCBBF3002190, FCBBF3002268, FCBBF3002475, FCBBF3002556, FCBBF3002592, FCBBF3002658, FCBBF3002782, FCBBF3002818, FCBBF3002925, FCBBF3003216, FCBBF3003305, FCBBF3003373, FCBBF3003435, FCBBF3003475, FCBBF3003481, FCBBF3003557, FCBBF3003787, FCBBF3003902, FCBBF3004021, FCBBF3004041, FCBBF3004261, FCBBF3004323, FCBBF3004390, FCBBF3004409, FCBBF3004502, FCBBF3004715, FCBBF3004842, FCBBF3004955, FCBBF3005160, FCBBF3005218, FCBBF3005320, FCBBF3005330, FCBBF3005444, FCBBF3005497, FCBBF3005698, FCBBF3005729, FCBBF3006171, FCBBF3006249, FCBBF3006288, FCBBF3006399, FCBBF3006628, FCBBF3007077, FCBBF3007150, FCBBF3007152, FCBBF3007242, FCBBF3007248, FCBBF3007453, FCBBF3007462, FCBBF3007540, FCBBF3007597, FCBBF3007604, FCBBF3007631, FCBBF3007829, FCBBF3007855, FCBBF3007860, FCBBF3008073, FCBBF3008100, FCBBF3008159, FCBBF3008251, FCBBF3008311, FCBBF3008362, FCBBF3008382, FCBBF3008475, FCBBF3008556, FCBBF3008644, FCBBF3008689, FCBBF3008748, FCBBF3008870, FCBBF3008938, FCBBF3008944, FCBBF3009069, FCBBF3009101, FCBBF3009152, FCBBF3009256, FCBBF3009317, FCBBF3009428, FCBBF3009464, FCBBF3009479, FCBBF3009526, FCBBF3009541, FCBBF3009703, FCBBF3009717, FCBBF3009888, FCBBF3009949, FCBBF3009978, FCBBF3010008, FCBBF3010012, FCBBF3010124, FCBBF3010130, FCBBF3010142, FCBBF3010149, FCBBF3010211, FCBBF3010361, FCBBF3010508, FCBBF3010544, FCBBF3010586, FCBBF3010601, FCBBF3010665, FCBBF3010729, FCBBF3010733, FCBBF3011003, FCBBF3011418, FCBBF3011485, FCBBF3011523, FCBBF3011570, FCBBF3011592, FCBBF3011867, FCBBF3011889, FCBBF3012170, FCBBF3012182, FCBBF3012288, FCBBF3012332, FCBBF3012347, FCBBF3012443, FCBBF3012588, FCBBF3012667, FCBBF3012842, FCBBF3012901, FCBBF3013041, FCBBF3013058, FCBBF3013205, FCBBF3013266, FCBBF3013307, FCBBF3013341, FCBBF3013506, FCBBF3013589, FCBBF3013623, FCBBF3013800, FCBBF3013846, FCBBF3014229, FCBBF3014260, FCBBF3014355, FCBBF3014567, FCBBF3014770, FCBBF3015100, FCBBF3015119, FCBBF3015131, FCBBF3015317, FCBBF3015727, FCBBF3015758, FCBBF3015809, FCBBF3015870, FCBBF3016018, FCBBF3016134, FCBBF3016178, FCBBF3016451, FCBBF3016618, FCBBF3016622, FCBBF3016644, FCBBF3016667, FCBBF3016987, FCBBF3017024, FCBBF3017059, FCBBF3017071, FCBBF3017123, FCBBF3017233, FCBBF3017255, FCBBF3017288, FCBBF3017535, FCBBF3017681, FCBBF3017729, FCBBF3017873, FCBBF3017918, FCBBF3017974, FCBBF3018067, FCBBF3018173, FCBBF3018453, FCBBF3018591, FCBBF3018753, FCBBF3018826, FCBBF3018949, FCBBF3019085, FCBBF3019320, FCBBF3019437, FCBBF3019455, FCBBF3019564, FCBBF3019569, FCBBF3019570, FCBBF3019663, FCBBF3019716, FCBBF3019784, FCBBF3019867, FCBBF3019961, FCBBF3020030, FCBBF3020138, FCBBF3020140, FCBBF3020163, FCBBF3020232, FCBBF3020599, FCBBF3021026, FCBBF3021191, FCBBF3021221, FCBBF3021501, FCBBF3021506, FCBBF3021524, FCBBF3021940, FCBBF3021985, FCBBF3022005, FCBBF3022291, FCBBF3022311, FCBBF3022504, FCBBF3022566, FCBBF3022593, FCBBF3022765, FCBBF3022767, FCBBF3022894, FCBBF3023061, FCBBF3023078, FCBBF3023368, FCBBF3023372, FCBBF3023443, FCBBF3023599, FCBBF3023704, FCBBF3023887, FCBBF3023895, FCBBF3024096, FCBBF3024225, FCBBF3024266, FCBBF3024364, FCBBF3024793, FCBBF3024911, FCBBF3025098, FCBBF3025252, FCBBF3025280, FCBBF3025285, FCBBF3025417, FCBBF3025650, FCBBF3025674, FCBBF3025730, FCBBF3026021, FCBBF3026048, FCBBF3026251, FCBBF3026308, FCBBF3026651, FCBBF3026678, FCBBF3026692, FCBBF3027104, FCBBF3027199, FCBBF3027328, FCBBF3027559, FCBBF3027717, FCBBF3027755, FCBBF3027768, FCBBF3027854, FCBBF3027863, FCBBF3027903, FCBBF3028102, FCBBF3028143, FCBBF3028188, FCBBF3028202, FCBBF3028244, FCBBF3028472, FCBBF3028528, FCBBF3028582, FCBBF3028593, FCBBF3028671, FCBBF3028794, FCBBF4000017, FCBBF4000061, FCBBF4000076, FCBBF4000173, FCBBF4000192, FCBBF4000193, FCBBF4000268, FCBBF4000282, FCBBF4000399, FCBBF4000415, FCBBF4000500, FCBBF4000529, FCBBF4000548, FCBBF5000041, FCBBF5000061, FCBBF5000165, FCBBF5000325, FCBBF5000353, FCBBF5000384, FCBBF5000483, FCBBF5000495, FEBRA1000005, FEBRA1000008, FEBRA1000030, FEBRA1000057, FEBRA1000138, FEBRA1000148, FEBRA1000149, FEBRA1000183, FEBRA1000188, FEBRA1000189, FEBRA1000190, FEBRA2000007, FEBRA2000021, FEBRA2000035, FEBRA2000053, FEBRA2000126, FEBRA2000220, FEBRA2000228, FEBRA2000253, FEBRA2000282, FEBRA2000286, FEBRA2000297, FEBRA2000311, FEBRA2000321, FEBRA2000333, FEBRA2000377, FEBRA2000378, FEBRA2000391, FEBRA2000394, FEBRA2000397, FEBRA2000399, FEBRA2000402, FEBRA2000404, FEBRA2000409, FEBRA2000415, FEBRA2000436, FEBRA2000438, FEBRA2000452, FEBRA2000454, FEBRA2000468, FEBRA2000491, FEBRA2000504, FEBRA2000532, FEBRA2000538, FEBRA2000575, FEBRA2000656, FEBRA2000659, FEBRA2000690, FEBRA2000727, FEBRA2000734, FEBRA2000762, FEBRA2000771, FEBRA2000772, FEBRA2000782, FEBRA2000787, FEBRA2000790, FEBRA2000793, FEBRA2000803, FEBRA2000805, FEBRA2000809, FEBRA2000815, FEBRA2000862, FEBRA2000877, FEBRA2000881, FEBRA2000901, FEBRA2000909, FEBRA2000917, FEBRA2000928, FEBRA2000936, FEBRA2000937, FEBRA2000959, FEBRA2000972, FEBRA2001004, FEBRA2001012, FEBRA2001020, FEBRA2001093, FEBRA2001124, FEBRA2001133, FEBRA2001146, FEBRA2001161, FEBRA2001175, FEBRA2001197, FEBRA2001217, FEBRA2001227, FEBRA2001245, FEBRA2001267, FEBRA2001294, FEBRA2001334, FEBRA2001351, FEBRA2001383, FEBRA2001438, FEBRA2001440, FEBRA2001487, FEBRA2001492, FEBRA2001523, FEBRA2001561, FEBRA2001571, FEBRA2001581, FEBRA2001584, FEBRA2001590, FEBRA2001591, FEBRA2001610, FEBRA2001620, FEBRA2001659, FEBRA2001669, FEBRA2001698, FEBRA2001705, FEBRA2001706, FEBRA2001715, FEBRA2001752, FEBRA2001772, FEBRA2001790, FEBRA2001814, FEBRA2001867, FEBRA2001914, FEBRA2001974, FEBRA2001989, FEBRA2001990, FEBRA2002009, FEBRA2002027, FEBRA2002086, FEBRA2002109, FEBRA2002191, FEBRA2002260, FEBRA2002352, FEBRA2002399, FEBRA2002410, FEBRA2002429, FEBRA2002442, FEBRA2002456, FEBRA2002508, FEBRA2002525, FEBRA2002552, FEBRA2002574, FEBRA2002601, FEBRA2002611, FEBRA2002628, FEBRA2002662, FEBRA2002682, FEBRA2002707, FEBRA2002727, FEBRA2002781, FEBRA2002783, FEBRA2002792, FEBRA2002818, FEBRA2002858, FEBRA2002882, FEBRA2002897, FEBRA2002908, FEBRA2002931, FEBRA2002933, FEBRA2002962, FEBRA2002986, FEBRA2003054, FEBRA2003100, FEBRA2003115, FEBRA2003128, FEBRA2003155, FEBRA2003163, FEBRA2003181, FEBRA2003198, FEBRA2003253, FEBRA2003258, FEBRA2003275, FEBRA2003308, FEBRA2003327, FEBRA2003429, FEBRA2003454, FEBRA2003468, FEBRA2003470, FEBRA2003520, FEBRA2003524, FEBRA2003541, FEBRA2003675, FEBRA2003707, FEBRA2003711, FEBRA2003726, FEBRA2003822, FEBRA2003897, FEBRA2003907, FEBRA2003930, FEBRA2004023, FEBRA2004026, FEBRA2004029, FEBRA2004053, FEBRA2004056, FEBRA2004091, FEBRA2004110, FEBRA2004191, FEBRA2004202, FEBRA2004219, FEBRA2004224, FEBRA2004237, FEBRA2004268, FEBRA2004293, FEBRA2004325, FEBRA2004329, FEBRA2004331, FEBRA2004443, FEBRA2004485, FEBRA2004490, FEBRA2004538, FEBRA2004592, FEBRA2004620, FEBRA2004628, FEBRA2004651, FEBRA2004767, FEBRA2004813, FEBRA2004818, FEBRA2004840, FEBRA2004867, FEBRA2004914, FEBRA2004933, FEBRA2004987, FEBRA2005014, FEBRA2005036, FEBRA2005079, FEBRA2005114, FEBRA2005216, FEBRA2005291, FEBRA2005361, FEBRA2005377, FEBRA2005380, FEBRA2005416, FEBRA2005427, FEBRA2005458, FEBRA2005476, FEBRA2005572, FEBRA2005701, FEBRA2005726, FEBRA2005734, FEBRA2005778, FEBRA2005787, FEBRA2005788, FEBRA2005824, FEBRA2005995, FEBRA2005998, FEBRA2006055, FEBRA2006061, FEBRA2006112, FEBRA2006150, FEBRA2006165, FEBRA2006255, FEBRA2006270, FEBRA2006315, FEBRA2006346, FEBRA2006354, FEBRA2006357, FEBRA2006368, FEBRA2006370, FEBRA2006372, FEBRA2006379, FEBRA2006396, FEBRA2006401, FEBRA2006409, FEBRA2006418, FEBRA2006427, FEBRA2006476, FEBRA2006485, FEBRA2006491, FEBRA2006519, FEBRA2006521, FEBRA2006553, FEBRA2006627, FEBRA2006664, FEBRA2006667, FEBRA2006726, FEBRA2006736, FEBRA2006793, FEBRA2006808, FEBRA2006817, FEBRA2006873, FEBRA2006890, FEBRA2006942, FEBRA2006977, FEBRA2007017, FEBRA2007176, FEBRA2007200, FEBRA2007212, FEBRA2007247, FEBRA2007280, FEBRA2007414, FEBRA2007436, FEBRA2007449, FEBRA2007458, FEBRA2007534, FEBRA2007544, FEBRA2007551, FEBRA2007566, FEBRA2007589, FEBRA2007613, FEBRA2007620, FEBRA2007622, FEBRA2007708, FEBRA2007793, FEBRA2007801, FEBRA2007823, FEBRA2007880, FEBRA2007900, FEBRA2007931, FEBRA2007957, FEBRA-2008009, FEBRA-2008036, FEBRA2008086, FEBRA2008134, FEBRA2008135, FEBRA2008159, FEBRA2008165, FEBRA2008172, FEBRA2008201, FEBRA2008265, FEBRA2008266, FEBRA2008282, FEBRA2008287, FEBRA2008311, FEBRA2008341, FEBRA2008360, FEBRA2008459, FEBRA2008468, FEBRA2008475, FEBRA2008481, FEBRA2008542, FEBRA2008660, FEBRA2008662, FEBRA2008681, FEBRA2008692, FEBRA2008741, FEBRA2008755, FEBRA2008836, FEBRA2008859, FEBRA2008861, FEBRA2008866, FEBRA2008881, FEBRA2008928, FEBRA2008983, FEBRA2009016, FEBRA2009022, FEBRA2009029, FEBRA2009074, FEBRA2009117, FEBRA2009120, FEBRA2009162, FEBRA2009185, FEBRA2009240, FEBRA2009265, FEBRA2009276, FEBRA2009289, FEBRA2009327, FEBRA2009328, FEBRA2009352, FEBRA2009362, FEBRA2009385, FEBRA2009416, FEBRA2009437, FEBRA2009478, FEBRA2009507, FEBRA2009514, FEBRA2009541, FEBRA2009567, FEBRA2009588, FEBRA2009731, FEBRA2009754, FEBRA2009780, FEBRA2009846, FEBRA2009986, FEBRA2010141, FEBRA2010299, FEBRA2010484, FEBRA2010719, FEBRA2010746, FEBRA2010768, FEBRA2010802, FEBRA2011063, FEBRA2011356, FEBRA2011414, FEBRA2011593, FEBRA2011665, FEBRA2012090, FEBRA2012120, FEBRA2012181, FEBRA2012195, FEBRA2012397, FEBRA2012418, FEBRA2012507, FEBRA2012625, FEBRA2013019, FEBRA2013069, FEBRA2013274, FEBRA2013465, FEBRA2013570, FEBRA2013699, FEBRA2013905, FEBRA2013951, FEBRA2014010, FEBRA2014122, FEBRA2014198, FEBRA2014213, FEBRA2014297, FEBRA2014443, FEBRA2014578, FEBRA2014939, FEBRA2015076, FEBRA2015085, FEBRA2015175, FEBRA2015292, FEBRA2015588, FEBRA2016112, FEBRA2016398, FEBRA2016572, FEBRA2016583, FEBRA2016621, FEBRA2016654, FEBRA2016739, FEBRA2017024, FEBRA2017098, FEBRA2017138, FEBRA2017154, FEBRA2017200, FEBRA2017223, FEBRA2017333, FEBRA2017502, FEBRA2017533, FEBRA2017680, FEBRA2017736, FEBRA2017780, FEBRA2017811, FEBRA2017850, FEBRA2018051, FEBRA2018203, FEBRA2018407, FEBRA2018433, FEBRA2018476, FEBRA2018746, FEBRA2019172, FEBRA2019242, FEBRA2019298, FEBRA2019389, FEBRA2019457, FEBRA2019519, FEBRA2019582, FEBRA2019637, FEBRA2019663, FEBRA2019690, FEBRA2019711, FEBRA2019867, FEBRA2020406, FEBRA2020566, FEBRA2020582, FEBRA2020668, FEBRA2020801, FEBRA2020845, FEBRA2020886, FEBRA2020977, FEBRA2021032, FEBRA2021134, FEBRA2021171, FEBRA2021339, FEBRA2021431, FEBRA2021497, FEBRA2021550, FEBRA2021571, FEBRA2021636, FEBRA2021864, FEBRA2021892, FEBRA2021908, FEBRA2021966, FEBRA2022013, FEBRA2022148, FEBRA2022204, FEBRA2022255, FEBRA2022322, FEBRA2022601, FEBRA2022696, FEBRA2022729, FEBRA2022787, FEBRA2022911, FEBRA2022956, FEBRA2022963, FEBRA2022972, FEBRA2023227, FEBRA2023285, FEBRA2023351, FEBRA2023377, FEBRA2023399, FEBRA2023498, FEBRA2023550, FEBRA2023721, FEBRA2023989, FEBRA2023990, FEBRA2024019, FEBRA2024136, FEBRA2024150, FEBRA2024343, FEBRA2024570, FEBRA2024693, FEBRA2024727, FEBRA2024744, FEBRA2024797, FEBRA2024987, FEBRA2025249, FEBRA2025427, FEBRA2025463, FEBRA2025477, FEBRA2026474, FEBRA2026582, FEBRA2026629, FEBRA2026769, FEBRA2026879, FEBRA2026890, FEBRA2026977, FEBRA2027082, FEBRA2027297, FEBRA2027352, FEBRA2027364, FEBRA2027609, FEBRA2028158, FEBRA2028222, FEBRA2028366, FEBRA2028457, FEBRA2028477, FEBRA2028503, FEHRT2000325, FEHRT2000364, FEKID1000018, FELIV1000101, FELIV1000137, FELIV1000164, FELNG2000241, HCASM1000021, HCASM1000050, HCASM1000061, HCASM1000115, HCASM1000130, HCASM2000156, HCASM2000202, HCASM2000214, HCASM2000266, HCASM2000307, HCASM2000534, HCASM2000536, HCASM2000560, HCASM2000871, HCASM2001285, HCASM2001810, HCASM2001866, HCASM2002148, HCASM2002502, HCASM2002754, HCASM2002918, HCASM2003018, HCASM2003076, HCASM2003099, HCASM2003212, HCASM2003237, HCASM2003357, HCASM2003415, HCASM2005388, HCASM2005484, HCASM2006131, HCASM2006338, HCASM2006359, HCASM2006632, HCASM2007047, HCASM2007317, HCASM2007737, HCASM2007773, HCASM2008154, HCASM2009405, HCASM2009424, HCASM2009463, HCASM2009588, HCHON1000015, HCHON1000166, HCHON1000176, HCHON1000191, HCHON2000028, HCHON2000038, HCHON2000062, HCHON2200015, HCHON2000199, HCHON2000212, HCHON2000271, HCHON2000315, HCHON2000322, HCHON2000344, HCHON2000364, HCHON2000373, HCHON2000395, HCHON2000417, HCHON2000473, HCHON2000503, HCHON2000508, HCHON2000660, HCHON2000663, HCHON2000673, HCHON2000676, HCHON2000699, HCHON2000705, HCHON2000751, HCHON2000815, HCHON2000817, HCHON2000818, HCHON2000819, HCHON2000832, HCHON2000851, HCHON2000898, HCHON2000935, HCHON2000942, HCHON2000956, HCHON2000994, HCHON2001050, HCHON2001099, HCHON2001108, HCHON2001110, HCHON2001116, HCHON2001161, HCHON2001214, HCHON2001233, HCHON2001269, HCHON2001359, HCHON2001407, HCHON2001450, HCHON2001453, HCHON2001497, HCHON2001519, HCHON2001523, HCHON2001535, HCHON2001546, HCHON2001548, HCHON2001577, HCHON2001604, HCHON2001607, HCHON2001646, HCHON2001712, HCHON2001768, HCHON2001801, HCHON2002123, HCHON2002194, HCHON2002241, HCHON2002354, HCHON2002496, HCHON2002676, HCHON2002770, HCHON2002964, HCHON2002971, HCHON2003131, HCHON2003134, HCHON2003327, HCHON2003513, HCHON2003532, HCHON2003642, HCHON2003659, HCHON2003676, HCHON2004007, HCHON2004279, HCHON2004359, HCHON2004531, HCHON2004776, HCHON2004858, HCHON2005048, HCHON2005118, HCHON2005166, HCHON2005802, HCHON2005987, HCHON2006459, HCHON2006714, HCHON2006722, HCHON2006770, HCHON2006786, HCHON2006841, HCHON2006871, HCHON2007046, HCHON2007482, HCHON2007674, HCHON2007774, HCHON2007881, HCHON2008112, HCHON2008239, HCHON2008582, HCHON2008672, HCHON2008856, HCHON2008871, HCHON2008989, HCHON2009191, HCHON2009384, HCHON2009749, HCHON2009766, HCHON2009795, HCHON2010074, HCHON2010543, HEART1000010, HEART1000074, HEART1000088, HEART1000099, HEART1000102, HEART1000118, HEART1000132, HEART1000139, HEART1000142, HEART1000151, HEART1000173, HEART2000024, HEART2000035, HEART2000099, HEART2000298, HEART2000306, HEART2000309, HEART2000411, HEART2000418, HEART2000444, HEART2000448, HEART2000492, HEART2000520, HEART2000541, HEART2000568, HEART2000611, HEART2000959, HEART2001680, HEART2001756, HEART2002129, HEART2002184, HEART2002220, HEART2002432, HEART2002531, HEART2002598, HEART2002717, HEART2003027, HEART2003168, HEART2003432, HEART2003440, HEART2003781, HEART2003836, HEART2003852, HEART2004570, HEART2004764, HEART2004940, HEART2004941, HEART2004980, HEART2005244, HEART2005310, HEART2005581, HEART2005610, HEART2006131, HEART2006195, HEART2006310, HEART2006334, HEART2006487, HEART2006521, HEART2006557, HEART2006787, HEART2006789, HEART2006909, HEART2007031, HEART2007443, HEART2007696, HEART2007767, HEART2008108, HEART2008111, HEART2008257, HEART2008509, HEART2008994, HEART2009000, HEART2009599, HEART2009680, HEART2010391, HEART2010492, HEART2010495, HELAC2000158, HELAC2000301, HHDPC1000001, HHDPC1000065, HHDPC1000083, HHDPC1000118, HHDPC2000055, HHDPC2000070, HHDPC2000102, HHDPC2000104, HHDPC2000115, HHDPC2000149, HHDPC2000258, HHDPC2000315, HHDPC2000456, HHDPC2000462, HHDPC2000692, HHDPC2001337, HHDPC2001432, HHDPC2001896, HHDPC2002963, HHDPC2003049, HHDPC2003113, HHDPC2003381, HHDPC2003472, HHDPC2004757, HHDPC2005185, HHDPC2005513, HHDPC2005742, HHDPC2005794, HHDPC2006460, HHDPC2006862, HHDPC2006927, HHDPC2007302, HHDPC2008123, HHDPC2008185, HHDPC2008279, HHDPC2008297, HHDPC2008414, HHDPC2008474, HHDPC2008816, HHDPC2008843, HHDPC2009114, HHDPC2009178, HHDPC2009208, HHDPC2009272, HHDPC2009528, HLUNG1000017, HLUNG1000024, HLUNG1000030, HLUNG1000034, HLUNG1000037, HLUNG1000053, HLUNG1000084, HLUNG1000091, HLUNG1000099, HLUNG1000104, HLUNG1000105, HLUNG1000110, HLUNG1000151, HLUNG1000169, HLUNG2000014, HLUNG2000027, HLUNG2000068, HLUNG2000116, HLUNG2000125, HLUNG2000130, HLUNG2000142, HLUNG2000174, HLUNG2000176, HLUNG2000217, HLUNG2000232, HLUNG2000255, HLUNG2000281, HLUNG2000315, HLUNG2000340, HLUNG2000362, HLUNG2000363, HLUNG2000431, HLUNG2000480, HLUNG2000489, HLUNG2000549, HLUNG2000557, HLUNG2000570, HLUNG2000751, HLUNG2000761, HLUNG2000777, HLUNG2000870, HLUNG2000926, HLUNG2000950, HLUNG2000955, HLUNG2000970, HLUNG2001013, HLUNG2001126, HLUNG2001144, HLUNG2001214, HLUNG2001439, HLUNG2001459, HLUNG2001633, HLUNG2001712, HLUNG2001814, HLUNG2001996, HLUNG2002006, HLUNG2002050, HLUNG2002059, HLUNG2002085, HLUNG2002145, HLUNG2002295, HLUNG2002303, HLUNG2002334, HLUNG2002405, HLUNG2002429, HLUNG2002465, HLUNG2002562, HLUNG2002659, HLUNG2002707, HLUNG2002916, HLUNG2002942, HLUNG2002949, HLUNG2002958, HLUNG2002982, HLUNG2003042, HLUNG2003049, HLUNG2003061, HLUNG2003162, HLUNG2003246, HLUNG2003306, HLUNG2003331, HLUNG2003335, HLUNG2003378, HLUNG2003497, HLUNG2003691, HLUNG2003710, HLUNG2003714, HLUNG2003716, HLUNG2003778, HLUNG2003833, HLUNG2003872, HLUNG2003918, HLUNG2003991, HLUNG2004014, HLUNG2004037, HLUNG2004067, HLUNG2004154, HLUNG2004217, HLUNG2004273, HLUNG2004388, HLUNG2004416, HLUNG2004521, HLUNG2004534, HLUNG2004707, HLUNG2004774, HLUNG2004775, HLUNG2005012, HLUNG2005030, HLUNG2005045, HLUNG2005076, HLUNG2005133, HLUNG2005203, HLUNG2005230, HLUNG2005479, HLUNG2005524, HLUNG2005656, HLUNG2005738, HLUNG2005774, HLUNG2005813, HLUNG2005924, HLUNG2006026, HLUNG2006067, HLUNG2006094, HLUNG2006370, HLUNG2006397, HLUNG2006570, HLUNG2006599, HLUNG2006614, HLUNG2006671, HLUNG2006781, HLUNG2006843, HLUNG2006852, HLUNG2006935, HLUNG2007041, HLUNG2007163, HLUNG2007210, HLUNG2007219, HLUNG2007245, HLUNG2007433, HLUNG2007931, HLUNG2008066, HLUNG2008139, HLUNG2008153, HLUNG2008225, HLUNG2008235, HLUNG2008247, HLUNG2008348, HLUNG2008384, HLUNG2008396, HLUNG2008439, HLUNG2008479, HLUNG2008480, HLUNG2008521, HLUNG2008833, HLUNG2008875, HLUNG2008885, HLUNG2008958, HLUNG2008959, HLUNG2009067, HLUNG2009215, HLUNG2009253, HLUNG2009303, HLUNG2009413, HLUNG2009729, HLUNG2010181, HLUNG2010464, HLUNG2010562, HLUNG2010845, HLUNG2011041, HLUNG2011298, HLUNG2011461, HLUNG2011833, HLUNG2012049, HLUNG2012287, HLUNG2012315, HLUNG2012546, HLUNG2012600, HLUNG2012727, HLUNG2013097, HLUNG2013204, HLUNG2013304, HLUNG2013350, HLUNG2013622, HLUNG2013643, HLUNG2013784, HLUNG2013851, HLUNG2014262, HLUNG2014288, HLUNG2014449, HLUNG2014821, HLUNG2015418, HLUNG2015548, HLUNG2015578, HLUNG2015617, HLUNG2016022, HLUNG2016862, HLUNG2017286, HLUNG2017307, HLUNG2017350, HLUNG2017546, HLUNG2017806, HLUNG2018029, HLUNG2018282, HLUNG2018626, HLUNG2019058, HSYRA1000119, HSYRA1000131, HSYRA1000137, HSYRA1000148, HSYRA2000044, HSYRA2000135, HSYRA2000137, HSYRA2000190, HSYRA2000221, HSYRA2000237, HSYRA2000253, HSYRA2000332, HSYRA2000371, HSYRA2000424, HSYRA2000507, HSYRA2000510, HSYRA2000605, HSYRA2000629, HSYRA2000706, HSYRA2000760, HSYRA2000787, HSYRA2000792, HSYRA2000828, HSYRA2000832, HSYRA2000925, HSYRA2000927, HSYRA2001003, HSYRA2001103, HSYRA2001142, HSYRA2001153, HSYRA2001225, HSYRA2001232, HSYRA2001255, HSYRA2001332, HSYRA2001353, HSYRA2001420, HSYRA2001484, HSYRA2001552, HSYRA2001595, HSYRA2001631, HSYRA2001638, HSYRA2001983, HSYRA2002103, HSYRA2002590, HSYRA2002741, HSYRA2003168, HSYRA2004550, HSYRA2004858, HSYRA2005456, HSYRA2005496, HSYRA2005628, HSYRA2005970, HSYRA2006049, HSYRA2006873, HSYRA2007241, HSYRA2007338, HSYRA2007667, HSYRA2008154, HSYRA2008714, HSYRA2009102, IMR321000155, IMR321000161, IMR321000165, IMR321000193, IMR321000207, IMR321000230, IMR321000253, IMR322000010, IMR322000072, IMR322000107, IMR322000127, IMR322000144, IMR322000152, IMR322000164, IMR322000178, IMR322000223, IMR322000243, IMR322000302, IMR322000316, IMR322000374, IMR322000379, IMR322000383, IMR322000418, IMR322000518, IMR322000555, IMR322000604, IMR322000609, IMR322000656, IMR322000672, IMR322000742, IMR322000775, IMR322000791, IMR322000811, IMR322000819, IMR322000838, IMR322000859, IMR322000863, IMR322000917, IMR322000918, IMR322000919, IMR322000953, IMR322000973, IMR322000984, IMR322001018, IMR322001167, IMR322001185, IMR322001218, IMR322001245, IMR322001317, IMR322001318, IMR322001322, IMR322001332, IMR322001380, IMR322001438, IMR322001452, IMR322001491, IMR322001541, IMR322001584, IMR322001665, IMR322001670, IMR322001724, IMR322002035, IMR322002110, IMR322002470, IMR322002993, IMR322003675, IMR322004768, IMR322005293, IMR322005833, IMR322006012, IMR322006222, IMR322006495, IMR322006520, IMR322006886, IMR322006947, IMR322007078, IMR322007225, IMR322007704, IMR322008651, IMR322009710, IMR322009807, IMR322010295, IMR322010953, IMR322011689, IMR322012314, IMR322012529, IMR322013053, IMR322013396, IMR322013731, IMR322013805, IMR322015523, IMR322016146, IMR322017049, IMR322018117, IMR322018192, JCMLC2000273, KIDNE1000008, KIDNE1000012, KIDNE1000015, KIDNE1000028, KIDNE1000064, KIDNE1000104, KIDNE1000121, KIDNE1000143, KIDNE1000152, KIDNE2000026, KIDNE2000041, KIDNE2000046, KIDNE2000051, KIDNE2000070, KIDNE2000167, KIDNE2000174, KIDNE2000192, KIDNE2000227, KIDNE2000244, KIDNE2000245, KIDNE2000252, KIDNE2000266, KIDNE2000287, KIDNE2000315, KIDNE2000317, KIDNE2000328, KIDNE2000335, KIDNE2000349, KIDNE2000375, KIDNE2000383, KIDNE2000394, KIDNE2000422, KIDNE2000493, KIDNE2000497, KIDNE2000510, KIDNE2000513, KIDNE2000517, KIDNE2000519, KIDNE2000555, KIDNE2000574, KIDNE2000624, KIDNE2000665, KIDNE2000678, KIDNE2000717, KIDNE2000721, KIDNE2000722, KIDNE2000777, KIDNE2000801, KIDNE2000832, KIDNE2000833, KIDNE2000846, KIDNE2000867, KIDNE2000909, KIDNE2000947, KIDNE2001117, KIDNE2001140, KIDNE2001269, KIDNE2001361, KIDNE2001373, KIDNE2001636, KIDNE2001713, KIDNE2001802, KIDNE2001840, KIDNE2001847, KIDNE2001857, KIDNE2001873, KIDNE2001897, KIDNE2001931, KIDNE2002015, KIDNE2002162, KIDNE2002168, KIDNE2002191, KIDNE2002198, KIDNE2002262, KIDNE2002265, KIDNE2002438, KIDNE2002483, KIDNE2002725, KIDNE2002768, KIDNE2002795, KIDNE2002798, KIDNE2002839, KIDNE2002845, KIDNE2002872, KIDNE2002882, KIDNE2002883, KIDNE2002980, KIDNE2002991, KIDNE2003185, KIDNE2003188, KIDNE2003233, KIDNE2003316, KIDNE2003335, KIDNE2003357, KIDNE2003373, KIDNE2003377, KIDNE2003507, KIDNE2003752, KIDNE2003764, KIDNE2003837, KIDNE2003994, KIDNE2004034, KIDNE2004054, KIDNE2004084, KIDNE2004095, KIDNE2004115, KIDNE2004233, KIDNE2004262, KIDNE2004279, KIDNE2004294, KIDNE2004295, KIDNE2004305, KIDNE2004344, KIDNE2004394, KIDNE2004411, KIDNE2004475, KIDNE2004519, KIDNE2004520, KIDNE2004531, KIDNE2004534, KIDNE2004562, KIDNE2004579, KIDNE2004626, KIDNE2004681, KIDNE2004828, KIDNE2004846, KIDNE2004864, KIDNE2004879, KIDNE2004981, KIDNE2004985, KIDNE2004999, KIDNE2005038, KIDNE2005042, KIDNE2005062, KIDNE2005266, KIDNE2005296, KIDNE2005327, KIDNE2005336, KIDNE2005400, KIDNE2005424, KIDNE2005477, KIDNE2005526, KIDNE2005543, KIDNE2005603, KIDNE2005629, KIDNE2005781, KIDNE2005798, KIDNE2005854, KIDNE2005908, KIDNE2005937, KIDNE2006009, KIDNE2006039, KIDNE2006053, KIDNE2006062, KIDNE2006092, KIDNE2006145, KIDNE2006149, KIDNE2006210, KIDNE2006299, KIDNE2006334, KIDNE2006353, KIDNE2006376, KIDNE2006378, KIDNE2006580, KIDNE2006652, KIDNE2006687, KIDNE2006733, KIDNE2006760, KIDNE2006775, KIDNE2006811, KIDNE2006820, KIDNE2006880, KIDNE2007005, KIDNE2007077, KIDNE2007186, KIDNE2007222, KIDNE2007356, KIDNE2007422, KIDNE2007569, KIDNE2007810, KIDNE2007910, KIDNE2007944, KIDNE2008022, KIDNE2008069, KIDNE2008072, KIDNE2008116, KIDNE2008117, KIDNE2008218, KIDNE2008315, KIDNE2008362, KIDNE2008378, KIDNE2008403, KIDNE2008404, KIDNE2008446, KIDNE2008473, KIDNE2008480, KIDNE2008649, KIDNE2008666, KIDNE2008697, KIDNE2008758, KIDNE2008788, KIDNE2008795, KIDNE2008824, KIDNE2008832, KIDNE2008869, KIDNE2008914, KIDNE2008975, KIDNE2008987, KIDNE2009019, KIDNE2009109, KIDNE2009180, KIDNE2009191, KIDNE2009332, KIDNE2009426, KIDNE2009467, KIDNE2009490, KIDNE2009553, KIDNE2009628, KIDNE2009647, KIDNE2009676, KIDNE2009723, KIDNE2010007, KIDNE2010052, KIDNE2010084, KIDNE2010137, KIDNE2010151, KIDNE2010264, KIDNE2010265, KIDNE2010271, KIDNE2010419, KIDNE2010430, KIDNE2010574, KIDNE2010674, KIDNE2010739, KIDNE2010750, KIDNE2010762, KIDNE2010863, KIDNE2010973, KIDNE2010989, KIDNE2011200, KIDNE2011314, KIDNE2011508, KIDNE2011532, KIDNE2011635, KIDNE2011752, KIDNE2011782, KIDNE2011858, KIDNE2012009, KIDNE2012025, KIDNE2012188, KIDNE2012291, KIDNE2012316, KIDNE2012361, KIDNE2012440, KIDNE2012453, KIDNE2012563, KIDNE2012601, KIDNE2012613, KIDNE2012710, KIDNE2012745, KIDNE2012775, KIDNE2012945, KIDNE2013045, KIDNE2013095, KIDNE2013218, KIDNE2013263, KIDNE2013346, KIDNE2013388, KIDNE2013413, KIDNE2013489, KIDNE2013639, KIDNE2013731, KIDNE2013734, KIDNE2013775, KIDNE2013801, KIDNE2013866, KIDNE2014087, KIDNE2014112, KIDNE2014119, KIDNE2014170; KIDNE2014184, KIDNE2014268, KIDNE2014298, KIDNE2014320, KIDNE2014415, KIDNE2014489, KIDNE2014496, KIDNE2014661, KIDNE2014717, KIDNE2014789, KIDNE2014808, KIDNE2014890, KIDNE2014978, KIDNE2015073, KIDNE2015221, KIDNE2015244, KIDNE2015313, KIDNE2015433, KIDNE2015445, KIDNE2015483, KIDNE2015515, KIDNE2015546, KIDNE2015556, KIDNE2015598, KIDNE2015660, KIDNE2015710, KIDNE2015987, KIDNE2016000, KIDNE2016036, KIDNE2016096, KIDNE2016101, KIDNE2016142, KIDNE2016188, KIDNE2016327, KIDNE2016371, KIDNE2016388, KIDNE2016464, KIDNE2016539, KIDNE2016570, KIDNE2016918, KIDNE2017007, KIDNE2017052, KIDNE2017151, KIDNE2017153, KIDNE2017315, KIDNE2017332, KIDNE2017343, KIDNE2017454, KIDNE2017603, KIDNE2017956, KIDNE2018071, KIDNE2018166, KIDNE2018167, KIDNE2018217, KIDNE2018254, KIDNE2018268, KIDNE2018269, KIDNE2018287, KIDNE2018294, KIDNE2018352, KIDNE2018462, KIDNE2018493, KIDNE2018617, KIDNE2018678, KIDNE2018727, KIDNE2018863, KIDNE2018891, KIDNE2018989, KIDNE2018996, KIDNE2019074, KIDNE2019187, LIVER1000017, LIVER1000050, LIVER1000055, LIVER1000058, LIVER1000063, LIVER1000067, LIVER1000073, LIVER1000082, LIVER1000099, LIVER1000104, LIVER1000111, LIVER1000126, LIVER1000139, LIVER1000155, LIVER1000165, LIVER1000175, LIVER1000224, LIVER1000230, LIVER1000278, LIVER1000303, LIVER1000397, LIVER1000421, LIVER1000433, LIVER1000479, LIVER1000482, LIVER1000542, LIVER2000003, LIVER2000037, LIVER2000158, LIVER2000216, LIVER2000237, LIVER2000247, LIVER2000360, LIVER2000416, LIVER2000446, LIVER2000515, LIVER2000592, LIVER2000626, LIVER2000682, LIVER2000769, LIVER2000775, LIVER2001051, LIVER2001076, LIVER2001099, LIVER2001113, LIVER2001164, LIVER2001191, LIVER2001265, LIVER2001329, LIVER2001389, LIVER2001461, LIVER2001835, LIVER2002638, LIVER2002644, LIVER2002660, LIVER2002702, LIVER2003008, LIVER2003065, LIVER2003511, LIVER2003524, LIVER2003568, LIVER2003581, LIVER2003800, LIVER2003854, LIVER2004074, LIVER2004392, LIVER2004514, LIVER2004565, LIVER2005028, LIVER2005198, LIVER2005376, LIVER2005385, LIVER2005512, LIVER2005520, LIVER2005527, LIVER2005544, LIVER2005625, LIVER2005728, LIVER2005789, LIVER2005973, LIVER2005981, LIVER2006006, LIVER2006251, LIVER2006410, LIVER2006469, LIVER2006644, LIVER2006764, LIVER2007415, LIVER2007548, LIVER2007568, LIVER2007721, LIVER2008053, LIVER2008473, LIVER2008580, LIVER2008706, LIVER2008751, LIVER2008945, LIVER2008998, LIVER2009110, LIVER2009118, LIVER2009554, LYMPB1000141, LYMPB1000158, LYMPB2000083, MAMGL1000017, MAMGL1000032, MAMGL1000035, MAMGL1000096, MAMGL1000100, MAMGL1000132, MAMGL1000151, MAMGL1000173, MAMGL1000178, MAMGL1000182, MAMGL1000184, MESAN1000032, MESAN1000035, MESAN1000050, MESAN1000079, MESAN1000080, MESAN1000101, MESAN1000121, MESAN1000126, MESAN1000147, MESAN1000180, MESAN2000023, MESAN2000026, MESAN2000067, MESAN2000092, MESAN2000149, MESAN2000167, MESAN2000291, MESAN2000337, MESAN2000434, MESAN2000457, MESAN2000462, MESAN2000501, MESAN2000572, MESAN2000608, MESAN2000620, MESAN2000711, MESAN2000815, MESAN2000909, MESAN2001450, MESAN2001627, MESAN2001770, MESAN2001979, MESAN2001980, MESAN2002113, MESAN2002122, MESAN2002147, MESAN2002186, MESAN2002519, MESAN2002687, MESAN2002709, MESAN2002790, MESAN2002940, MESAN2002978, MESAN2003035, MESAN2003037, MESAN2003101, MESAN2003190, MESAN2003322, MESAN2003490, MESAN2003529, MESAN2003622, MESAN2003646, MESAN2003662, MESAN2003851, MESAN2004138, MESAN2004288, MESAN2004575, MESAN2005284, MESAN2005371, MESAN2005633, MESAN2005689, MESAN2005724, MESAN2005766, MESAN2005808, MESAN2005811, MESAN2005958, MESAN2006022, MESAN2006328, MESAN2006401, MESAN2006563, MESAN2006599, MESAN2006953, MESAN2006971, MESAN2007032, MESAN2007440, MESAN2007597, MESAN2007755, MESAN2008222, MESAN2008334, MESAN2008415, MESAN2008460, MESAN2008536, MESAN2008679, MESAN2008729, MESAN2008821, MESAN2008926, MESAN2008936, MESAN2009019, MESAN2009081, MESAN2009105, MESAN2009311, MESAN2009418, MESAN2009503, MESAN2009522, MESAN2010031, MESAN2010114, MESAN2010312, MESAN2010321, MESAN2010664, MESAN2010681, MESAN2011545, MESAN2011597, MESAN2011627, MESAN2011632, MESAN2011977, MESAN2011984, MESAN2012054, MESAN2012113, MESAN2012586, MESAN2012708, MESAN2012735, MESAN2013019, MESAN2013022, MESAN2013183, MESAN2013211, MESAN2013283, MESAN2013611, MESAN2013674, MESAN2013845, MESAN2013908, MESAN2013936, MESAN2014192, MESAN2014298, MESAN2014412, MESAN2014624, MESAN2015277, MESAN2015365, MESAN2015391, MESAN2015401, MESAN2015501, MESAN2015515, MESAN2015708, MESAN2016159, MESAN2016304, MESAN2016409, MESAN2016965, MESAN2017133, MESAN2017373, MESAN2017417, MESAN2018209, MESAN2018576, MESAN2018670, MESAN2018699, MESTC1000042, MESTC1000147, MESTC2000150, MESTC2000153, MESTC2000170, N1ESE2000698, NB9N41000011, NB9N41000047, NB9N41000135, NB9N41000142, NB9N41000146, NB9N41000340, NB9N42000104, NB9N42000122, NB9N42000196, NB9N42000314, NB9N42000342, NB9N42000430, NB9N42000495, NB9N42001300, NCRRP1000129, NESOP1000010, NESOP1000087, NESOP1000108, NESOP2000231, NESOP2000452, NESOP2000499, NESOP2000504, NESOP2000744, NESOP2001144, NESOP2001433, NESOP2001656, NESOP2001694, NESOP2001752, NESOP2002352, NESOP2002418, NESOP2002487, NESOP2002738, NESOP2002780, NETRP1000034, NETRP1000082, NETRP2000086, NETRP2000182, NETRP2000439, NHNPC1000034, NHNPC1000037, NHNPC1000084, NHNPC1000101, NHNPC1000124, NHNPC2000062, NHNPC2000187, NHNPC2000206, NHNPC2000212, NHNPC2000606, NHNPC2000877, NHNPC2001108, NHNPC2001223, NHNPC2001312, NHNPC2001816, NHNPC2001931, NHNPC2002565, NHNPC2002749, NOVAR1000102, NOVAR2000038, NOVAR2000136, NOVAR2000352, NOVAR2000412, NOVAR2000783, NOVAR2000962, NOVAR2001108, NOVAR2001620, NOVAR2001783, NOVAR2001876, NOVAR2002039, NT2NE1000004, NT2NE1000014, NT2NE1000018, NT2NE1000023, NT2NE1000024, NT2NE1000059, NT2NE1000063, NT2NE1000073, NT2NE1000083, NT2NE1000120, NT2NE1000122, NT2NE1000175, NT2NE1000181, NT2NE1000185, NT2NE2000038, NT2NE2000054, NT2NE2000057, NT2NE2000064, NT2NE2000109, NT2NE2000137, NT2NE2000156, NT2NE2000174, NT2NE2000195, NT2NE2000222, NT2NE2000259, NT2NE2000260, NT2NE2000284, NT2NE2000299, NT2NE2000353, NT2NE2000356, NT2NE2000369, NT2NE2000374, NT2NE2000386, NT2NE2000390, NT2NE2000392, NT2NE2000470, NT2NE2000488, NT2NE2000517, NT2NE2000536, NT2NE2000546, NT2NE2000548, NT2NE2000550, NT2NE2000586, NT2NE2000612, NT2NE2000636, NT2NE2000658, NT2NE2000706, NT2NE2000763, NT2NE2000802, NT2NE2000808, NT2NE2000809, NT2NE2000864, NT2NE2000909, NT2NE2000913, NT2NE2000950, NT2NE2000951, NT2NE2000980, NT2NE2001005, NT2NE2001021, NT2NE2001040, NT2NE2001048, NT2NE2001049, NT2NE2001142, NT2NE2001156, NT2NE2001180, NT2NE2001181, NT2NE2001188, NT2NE2001191, NT2NE2001247, NT2NE2001252, NT2NE2001324, NT2NE2001326, NT2NE2001364, NT2NE2001372, NT2NE2001397, NT2NE2001403, NT2NE2001428, NT2NE2001432, NT2NE2001442, NT2NE2001524, NT2NE2001530, NT2NE2001598, NT2NE2001623, NT2NE2001626, NT2NE2001634, NT2NE2001648, NT2NE2001655, NT2NE2001666, NT2NE2001677, NT2NE2001697, NT2NE2001698, NT2NE2001723, NT2NE2001725, NT2NE2001874, NT2NE2001889, NT2NE2001923, NT2NE2002100, NT2NE2002162, NT2NE2002186, NT2NE2002285, NT2NE2002311, NT2NE2002651, NT2NE2002732, NT2NE2002768, NT2NE2002791, NT2NE2002856, NT2NE2002870, NT2NE2003150, NT2NE2003252, NT2NE2003280, NT2NE2003308, NT2NE2003309, NT2NE2003315, NT2NE2003393, NT2NE2003408, NT2NE2003457, NT2NE2003540, NT2NE2003571, NT2NE2003705, NT2NE2003752, NT2NE2003887, NT2NE2003921, NT2NE2004255, NT2NE2004378, NT2NE2004490, NT2NE2004606, NT2NE2004740, NT2NE2004787, NT2NE2004916, NT2NE2005035, NT2NE2005223, NT2NE2005276, NT2NE2005317, NT2NE2005323, NT2NE2005371, NT2NE2005395, NT2NE2005419, NT2NE2005441, NT2NE2005517, NT2NE2005537, NT2NE2005555, NT2NE2005588, NT2NE2005676, NT2NE2005688, NT2NE2005720, NT2NE2005784, NT2NE2005804, NT2NE2005821, NT2NE2005876, NT2NE2005890, NT2NE2005921, NT2NE2005968, NT2NE2006075, NT2NE2006087, NT2NE2006103, NT2NE2006217, NT2NE2006288, NT2NE2006382, NT2NE2006387, NT2NE2006427, NT2NE2006432, NT2NE2006478, NT2NE2006531, NT2NE2006784, NT2NE2006813, NT2NE2006894, NT2NE2006909, NT2NE2006942, NT2NE2006958, NT2NE2007052, NT2NE2007220, NT2NE2007425, NT2NE2007725, NT2NE2007727, NT2NE2007786, NT2NE2007877, NT2NE2007967, NT2NE2008017, NT2NE2008060, NT2NE2008077, NT2NE2008213, NT2NE2008260, NT2NE2008378, NT2NE2008607, NT2NE2008639, NT2NE2008727, NT2NE2008783, NT2NE2008785, NT2NE2008803, NT2NE2008867, NT2NE2008961, NT2NE2008997, NT2NE2009138, NT2NE2009426, NT2NE2009523, NT2NE2009608, NT2NE2009691, NT2NE2010056, NT2NE2010105, NT2NE2010150, NT2NE2010400, NT2NE2010632, NT2NE2010633, NT2NE2010654, NT2NE2010688, NT2NE2010781, NT2NE2010842, NT2NE2010854, NT2NE2011033, NT2NE2011036, NT2NE2011107, NT2NE2011119, NT2NE2011154, NT2NE2011221, NT2NE2011411, NT2NE2011485, NT2NE2011650, NT2NE2011684, NT2NE2011687, NT2NE2011691, NT2NE2011758, NT2NE2011823, NT2NE2011896, NT2NE2011998, NT2NE2012113, NT2NE2012199, NT2NE2012243, NT2NE2012361, NT2NE2012448, NT2NE2012457, NT2NE2012493, NT2NE2012505, NT2NE2012533, NT2NE2012603, NT2NE2012747, NT2NE2012790, NT2NE2012847, NT2NE2012928, NT2NE2013019, NT2NE2013081, NT2NE2013189, NT2NE2013217, NT2NE2013547, NT2NE2014013, NT2NE2014028, NT2NE2014104, NT2NE2014113, NT2NE2014176, NT2NE2014221, NT2NE2014525, NT2NE2014650, NT2NE2014651, NT2NE2014681, NT2NE2014758, NT2NE2014869, NT2NE2014950, NT2NE2015061, NT2NE2015262, NT2NE2015275, NT2NE2015362, NT2NE2015480, NT2NE2015511, NT2NE2015565, NT2NE2015626, NT2NE2015747, NT2NE2015860, NT2NE2015885, NT2NE2015904, NT2NE2016041, NT2NE2016387, NT2NE2016419, NT2NE2016519, NT2NE2016608, NT2NE2016766, NT2NE2016774, NT2NE2016971, NT2NE2017259, NT2NE2017332, NT2NE2017397, NT2NE2017480, NT2NE2017508, NT2NE2017562, NT2NE2017590, NT2NE2017612, NT2NE2017721, NT2NE2017752, NT2NE2017792, NT2NE2017982, NT2NE2018165, NT2NE2018176, NT2NE2018180, NT2NE2018273, NT2NE2018376, NT2NE2018472, NT2NE2018490, NT2NE2018594, NT2NE2018739, NT2NE2018916, NT2NE2019056, NT2NE2019076, NT2NE2019091, NT2NE2019099, NT2RI1000016, NT2RI1000027, NT2RI1000035, NT2RI1000048, NT2RI1000164, NT2RI1000172, NT2RI2000004, NT2RI2000107, NT2RI2000116, NT2RI2000117, NT2RI2000128, NT2RI2000133, NT2RI2000167, NT2RI2000173, NT2RI2000187, NT2RI2000255, NT2RI2000263, NT2RI2000270, NT2RI2000276, NT2RI2000284, NT2RI2000313, NT2RI2000341, NT2RI2000348, NT2RI2000412, NT2RI2000421, NT2RI2000480, NT2RI2000575, NT2RI2000588, NT2RI2000597, NT2RI2000669, NT2RI2000688, NT2RI2000704, NT2RI2000738, NT2RI2000775, NT2RI2000822, NT2RI2000829, NT2RI2000841, NT2RI2000865, NT2RI2000932, NT2RI2000974, NT2RI2000987, NT2RI2001010, NT2RI2001017, NT2RI2001030, NT2RI2001054, NT2RI2001083, NT2RI2001167, NT2RI2001178, NT2RI2001235, NT2RI2001244, NT2RI2001307, NT2RI2001342, NT2RI2001385, NT2RI2001409, NT2RI2001410, NT2RI2001422, NT2RI2001425, NT2RI2001449, NT2RI2001450, NT2RI2001474, NT2RI2001519, NT2RI2001595, NT2RI2001621, NT2RI2001624, NT2RI2001726, NT2RI2001731, NT2RI2001769, NT2RI2001782, NT2RI2001836, NT2RI2001846, NT2RI2001866, NT2RI2001910, NT2RI2001952, NT2RI2002022, NT2RI2002041, NT2RI2002117, NT2RI2002120, NT2RI2002153, NT2RI2002179, NT2RI2002243, NT2RI2002252, NT2RI2002260, NT2RI2002266, NT2RI2002270, NT2RI2002334, NT2RI2002359, NT2RI2002447, NT2RI2002481, NT2RI2002507, NT2RI2002517, NT2RI2002530, NT2RI2002540, NT2RI2002549, NT2RI2002554, NT2RI2002564, NT2RI2002585, NT2RI2002592, NT2RI2002602, NT2RI2002699, NT2RI2002729, NT2RI2002802, NT2RI2002819, NT2RI2002822, NT2RI2002847, NT2RI2002852, NT2RI2002923, NT2RI2002926, NT2RI2002958, NT2RI2002970, NT2RI2003011, NT2RI2003019, NT2RI2003051, NT2RI2003067, NT2RI2003184, NT2RI2003205, NT2RI2003222, NT2RI2003301, NT2RI2003360, NT2RI2003361, NT2RI2003383, NT2RI2003392, NT2RI2003399, NT2RI2003419, NT2RI2003481, NT2RI2003487, NT2RI2003655, NT2RI2003667, NT2RI2003678, NT2RI2003884, NT2RI2003921, NT2RI2003973, NT2RI2003993, NT2RI2004059, NT2RI2004078, NT2RI2004079, NT2RI2004093, NT2RI2004136, NT2RI2004190, NT2RI2004209, NT2RI2004284, NT2RI2004290, NT2RI2004304, NT2RI2004312, NT2RI2004381, NT2RI2004398, NT2RI2004410, NT2RI2004442, NT2RI2004468, NT2RI2004606, NT2RI2004608, NT2RI2004618, NT2RI2004783, NT2RI2004818, NT2RI2004840, NT2RI2004884, NT2RI2004916, NT2RI2004962, NT2RI2004984, NT2RI2004985, NT2RI2005048, NT2RI2005061, NT2RI2005069, NT2RI2005087, NT2RI2005096, NT2RI2005115, NT2RI2005130, NT2RI2005150, NT2RI2005166, NT2RI2005239, NT2RI2005246, NT2RI2005315, NT2RI2005353, NT2RI2005368, NT2RI2005382, NT2RI2005473, NT2RI2005520, NT2RI2005564, NT2RI2005579, NT2RI2005621, NT2RI2005628, NT2RI2005647, NT2RI2005670, NT2RI2005710, NT2RI2005772, NT2RI2005816, NT2RI2005851, NT2RI2005966, NT2RI2006070, NT2RI2006071, NT2RI2006072, NT2RI2006081, NT2RI2006126, NT2RI2006127, NT2RI2006183, NT2RI2006257, NT2RI2006271, NT2RI2006294, NT2RI2006345, NT2RI2006403, NT2RI2006445, NT2RI2006487, NT2RI2006506, NT2RI2006553, NT2RI2006565, NT2RI2006640, NT2RI2006647, NT2RI2006659, NT2RI2006662, NT2RI2006667, NT2RI2006679, NT2RI2006682, NT2RI2006686, NT2RI2006703, NT2RI2006716, NT2RI2006735, NT2RI2006762, NT2RI2006788, NT2RI2006838, NT2RI2006853, NT2RI2006855, NT2RI2006856, NT2RI2006943, NT2RI2006973, NT2RI2007046, NT2RI2007048, NT2RI2007084, NT2RI2007096, NT2RI2007116, NT2RI2007133, NT2RI2007214, NT2RI2007303, NT2RI2007334, NT2RI2007377, NT2RI2007386, NT2RI2007406, NT2RI2007439, NT2RI2007468, NT2RI2007469, NT2RI2007507, NT2RI2007572, NT2RI2007593, NT2RI2007723, NT2RI2007729, NT2RI2007751, NT2RI2007754, NT2RI2007827, NT2RI2007853, NT2RI2007877, NT2RI2007879, NT2RI2007884, NT2RI2007891, NT2RI2007956, NT2RI2007965, NT2RI2008050, NT2RI2008141, NT2RI2008171, NT2RI2008188, NT2RI2008204, NT2RI2008221, NT2RI2008233, NT2RI2008396, NT2RI2008455, NT2RI2008502, NT2RI2008566, NT2RI2008598, NT2RI2008622, NT2RI2008656, NT2RI2008714, NT2RI2008801, NT2RI2008808, NT2RI2008812, NT2RI2008841, NT2RI2008952, NT2RI2009005, NT2RI2009066, NT2RI2009083, NT2RI2009101, NT2RI2009103, NT2RI2009144, NT2RI2009151, NT2RI2009173, NT2RI2009194, NT2RI2009215, NT2RI2009233, NT2RI2009239, NT2RI2009259, NT2RI2009281, NT2RI2009289, NT2RI2009301, NT2RI2009517, NT2RI2009585, NT2RI2009595, NT2RI2009855, NT2RI2010283, NT2RI2010508, NT2RI2010795, NT2RI2011422, NT2RI2011450, NT2RI2011683, NT2RI2011803, NT2RI2012350, NT2RI2012659, NT2RI2012726, NT2RI2012990, NT2RI2013345, NT2RI2013357, NT2RI2013373, NT2RI2014551, NT2RI2014683, NT2RI2015239, NT2RI2015342, NT2RI2015533, NT2RI2016128, NT2RI2016134, NT2RI2018311, NT2RI2018363, NT2RI2018448, NT2RI2018883, NT2RI2018950, NT2RI2019751, NT2RI2019826, NT2RI2020390, NT2RI2020703, NT2RI2021463, NT2RI2021625, NT2RI2022584, NT2RI2023303, NT2RI2023671, NT2RI2024008, NT2RI2024460, NT2RI2024496, NT2RI2024935, NT2RI2025075, NT2RI2025255, NT2RI2025564, NT2RI2025565, NT2RI2025909, NT2RI2025957, NT2RI2025976, NT2RI2026758, NT2RI2027081, NT2RI2027157, NT2RI2027224, NT2RI2027396, NT2RI2027484, NT2RI2027975, NT2RI2028213, NT2RI2028222, NT2RI2028537, NT2RI2028642, NT2RI3000174, NT2RI3000213, NT2RI3000423, NT2RI3000622, NT2RI3001132, NT2RI3001263, NT2RI3001279, NT2RI3001348, NT2RI3001458, NT2RI3001515, NT2RI3001573, NT2RI3001967, NT2RI3002303, NT2RI3002557, NT2RI3002842, NT2RI3003027, NT2RI3003031, NT2RI3003095, NT2RI3003104, NT2RI3003162, NT2RI3003362, NT2RI3003382, NT2RI3003409, NT2RI3003738, NT2RI3003925, NT2RI3004133, NT2RI3004381, NT2RI3004510, NT2RI3005202, NT2RI3005403, NT2RI3005416, NT2RI3005861, NT2RI3005928, NT2RI3006132, NT2RI3006171, NT2RI3006376, NT2RI3006796, NT2RI3007065, NT2RI3007095, NT2RI3007158, NT2RI3007167, NT2RI3007213, NT2RI3007443, NT2RI3007684, NT2RI3007757, NT2RI3007878, NT2RI3007978, NT2RI3008055, NT2RI3008162, NT2RI3008179, NT2RI3008228, NT2RI3008442, NT2RI3008652, NT2RI3008697, NT2RI3008974, NT2RI3009158, NT2RI3009480, NT2RI3009524, NT2RP6000005, NT2RP6000008, NT2RP6000032, NT2RP6000033, NT2RP6000043, NT2RP6000060, NT2RP6000072, NT2RP6000086, NT2RP6000100, NT2RP6000109, NT2RP6000110, NT2RP6000119, NT2RP6000127, NT2RP6000130, NT2RP6000140, NT2RP6000150, NT2RP7000041, NT2RP7000086, NT2RP7000109, NT2RP7000112, NT2RP7000238, NT2RP7000259, NT2RP7000271, NT2RP7000311, NT2RP7000359, NT2RP7000364, NT2RP7000380, NT2RP7000391, NT2RP7000425, NT2RP7000579, NT2RP7000624, NT2RP7000812, NT2RP7000926, NT2RP7001074, NT2RP7001080, NT2RP7001156, NT2RP7001231, NT2RP7001283, NT2RP7001306, NT2RP7001319, NT2RP7001335, NT2RP7001364, NT2RP7001475, NT2RP7001532, NT2RP7001591, NT2RP7001602, NT2RP7001678, NT2RP7001856, NT2RP7002064, NT2RP7002151, NT2RP7002163, NT2RP7002243, NT2RP7002282, NT2RP7002450, NT2RP7002478, NT2RP7002554, NT2RP7002594, NT2RP7002603, NT2RP7002619, NT2RP7002650, NT2RP7002738, NT2RP7002779, NT2RP7002829, NT2RP7002841, NT2RP7002906, NT2RP7002978, NT2RP7003025, NT2RP7003050, NT2RP7003084, NT2RP7003091, NT2RP7003107, NT2RP7003134, NT2RP7003148, NT2RP7003261, NT2RP7003439, NT2RP7003511, NT2RP7003629, NT2RP7003680, NT2RP7003724, NT2RP7003960, NT2RP7004027, NT2RP7004080, NT2RP7004173, NT2RP7004204, NT2RP7004233, NT2RP7004260, NT2RP7004358, NT2RP7004396, NT2RP7004428, NT2RP7004481, NT2RP7004541, NT2RP7004641, NT2RP7004656, NT2RP7004687, NT2RP7004722, NT2RP7004766, NT2RP7004790, NT2RP7004884, NT2RP7004911, NT2RP7004961, NT2RP7004964, NT2RP7004975, NT2RP7005118, NT2RP7005205, NT2RP7005219, NT2RP7005323, NT2RP7005468, NT2RP7005493, NT2RP7005629, NT2RP7005631, NT2RP7005669, NT2RP7005846, NT2RP7006033, NT2RP7006075, NT2RP7006141, NT2RP7006160, NT2RP7006162, NT2RP7006188, NT2RP7006263, NT2RP7006296, NT2RP7006304, NT2RP7006374, NT2RP7006395, NT2RP7006408, NT2RP7006457, NT2RP7006547, NT2RP7006601, NT2RP7006621, NT2RP7006636, NT2RP7006701, NT2RP7006853, NT2RP7006887, NT2RP7006980, NT2RP7006986, NT2RP7006995, NT2RP7007177, NT2RP7007221, NT2RP7007226, NT2RP7007269, NT2RP7007359, NT2RP7007387, NT2RP7007406, NT2RP7007480, NT2RP7007504, NT2RP7007530, NT2RP7007580, NT2RP7007594, NT2RP7007617, NT2RP7007643, NT2RP7007766, NT2RP7007842, NT2RP7007925, NT2RP7007930, NT2RP7007975, NT2RP7008013, NT2RP7008015, NT2RP7008133, NT2RP7008137, NT2RP7008142, NT2RP7008144, NT2RP7008360, NT2RP7008396, NT2RP7008406, NT2RP7008435, NT2RP7008441, NT2RP7008454, NT2RP7008487, NT2RP7008544, NT2RP7008550, NT2RP7008557, NT2RP7008623, NT2RP7008657, NT2RP7008714, NT2RP7008720, NT2RP7008855, NT2RP7008863, NT2RP7009012, NT2RP7009019, NT2RP7009030, NT2RP7009108, NT2RP7009149, NT2RP7009168, NT2RP7009215, NT2RP7009225, NT2RP7009236, NT2RP7009253, NT2RP7009267, NT2RP7009322, NT2RP7009363, NT2RP7009370, NT2RP7009373, NT2RP7009394, NT2RP7009397, NT2RP7009429, NT2RP7009439, NT2RP7009466, NT2RP7009481, NT2RP7009498, NT2RP7009502, NT2RP7009507, NT2RP7009577, NT2RP7009743, NT2RP7009867, NT2RP7010109, NT2RP7010128, NT2RP7010235, NT2RP7010275, NT2RP7010521, NT2RP7010599, NT2RP7010817, NT2RP7011086, NT2RP7011132, NT2RP7011268, NT2RP7011318, NT2RP7011452, NT2RP7011570, NT2RP7011721, NT2RP7011909, NT2RP7012291, NT2RP7012516, NT2RP7012776, NT2RP7013002, NT2RP7013374, NT2RP7013499, NT2RP7013729, NT2RP7013764, NT2RP7013795, NT2RP7013999, NT2RP7014005, NT2RP7014178, NT2RP7014348, NT2RP7014420, NT2RP7014583, NT2RP7014721, NT2RP7014743, NT2RP7014778, NT2RP7014906, NT2RP7014910, NT2RP7015080, NT2RP7015431, NT2RP7015503, NT2RP7015512, NT2RP7015676, NT2RP7015789, NT2RP7015996, NT2RP7016508, NT2RP7016574, NT2RP7016622, NT2RP7016911, NT2RP7017139, NT2RP7017284, NT2RP7017365, NT2RP7017546, NT2RP7017567, NT2RP7017795, NT2RP7017971, NT2RP7018032, NT2RP7018126, NT2RP7018197, NT2RP7018206, NT2RP7018340, NT2RP7018586, NT2RP7018802, NT2RP7018871, NT2RP7019064, NT2RP7019135, NT2RP7019273, NT2RP7019367, NT2RP7019401, NT2RP7019445, NT2RP7019543, NT2RP7019682, NT2RP7019835, NT2RP7020112, NT2RP7020123, NT2RP7020343, NT2RP7020379, NT2RP8000137, NT2RP8000296, NT2RP8000435, NT2RP8000483, NT2RP8000521, NT2RP8000633, NT2RP8001363, NT2RP8001407, NT2RP8001584, NT2RP8001604, NT2RP8001605, NT2RP8003490, NT2RP8003657, NT2RP8003787, NT2RP8004306, NT2RP8005546, NT2RP8006452, NT2RP8006521, NT2RP8007416, NT2RP8007503, NT2RP8007715, NT2RP8007920, NT2RP8008057, NT2RP8009248, NTONG1000006, NTONG1000047, NTONG1000052, NTONG1000075, NTONG1000087, NTONG1000123, NTONG1000130, NTONG1000161, NTONG1000172, NTONG1000213, NTONG1000214, NTONG1000247, NTONG1000257, NTONG1000264, NTONG2000040, NTONG2000107, NTONG2000231, NTONG2000334, NTONG2000363, NTONG2000413, NTONG2000492, NTONG2000499, NTONG2000531, NTONG2000583, NTONG2000800, NTONG2000858, NTONG2000878, NTONG2000966, NTONG2000977, NTONG2000985, NTONG2001014, NTONG2001079, NTONG2001137, NTONG2001157, NTONG2001173, NTONG2001220, NTONG2001222, NTONG2001362, NTONG2001428, NTONG2001532, NTONG2001587, NTONG2001612, NTONG2001619, NTONG2001642, NTONG2001657, NTONG2001676, NTONG2001762, NTONG2002278, NTONG2002807, NTONG2002948, NTONG2002970, NTONG2002985, NTONG2003158, NTONG2003210, NTONG2003316, NTONG2003409, NTONG2003515, NTONG2003805, NTONG2003852, NTONG2003897, NTONG2003928, NTONG2004095, NTONG2004308, NTONG2004521, NTONG2004614, NTONG2004690, NTONG2004806, NTONG2004829, NTONG2004918, NTONG2004991, NTONG2005062, NTONG2005086, NTONG2005137, NTONG2005153, NTONG2005265, NTONG2005277, NTONG2005373, NTONG2005480, NTONG2005497, NTONG2005577, NTONG2005657, NTONG2005822, NTONG2005969, NTONG2006099, NTONG2006187, NTONG2006301, NTONG2006324, NTONG2006354, NTONG2006440, NTONG2006484, NTONG2006501, NTONG2006646, NTONG2006709, NTONG2006783, NTONG2007020, NTONG2007028, NTONG2007034, NTONG2007249, NTONG2007517, NTONG2007522, NTONG2007658, NTONG2007693, NTONG2007756, NTONG2008088, NTONG2008093, NTONG2008143, NTONG2008365, NTONG2008483, NTONG2008522, NTONG2008672, NTONG2008862, NTONG2008939, NTONG2009060, NTONG2009068, NTONG2009229, NTONG2009233, NTONG2009468, NTONG2009576, OCBBF1000016, OCBBF1000030, OCBBF1000042, OCBBF1000049, OCBBF1000054, OCBBF1000067, OCBBF1000080, OCBBF1000085, OCBBF1000091, OCBBF1000104, OCBBF1000114, OCBBF1000118, OCBBF1000119, OCBBF1000122, OCBBF1000130, OCBBF1000138, OCBBF1000145, OCBBF1000146, OCBBF1000153, OCBBF1000185, OCBBF1000188, OCBBF1000192, OCBBF1000254, OCBBF1000315, OCBBF2000013, OCBBF2000126, OCBBF2000178, OCBBF2000231, OCBBF2000277, OCBBF2000287, OCBBF2000323, OCBBF2000452, OCBBF2000522, OCBBF2000703, OCBBF2000712, OCBBF2000719, OCBBF2000824, OCBBF2000831, OCBBF2000846, OCBBF2000904, OCBBF2000982, OCBBF2000998, OCBBF2001075, OCBBF2001101, OCBBF2001124, OCBBF2001140, OCBBF2001176, OCBBF2001186, OCBBF2001196, OCBBF2001252, OCBBF2001307, OCBBF2001389, OCBBF2001402, OCBBF2001408, OCBBF2001416, OCBBF2001473, OCBBF2001492, OCBBF2001494, OCBBF2001527, OCBBF2001528, OCBBF2001639, OCBBF2001681, OCBBF2001687, OCBBF2001706, OCBBF2001749, OCBBF2001794, OCBBF2001910, OCBBF2001931, OCBBF2001983, OCBBF2002015, OCBBF2002083, OCBBF2002124, OCBBF2002161, OCBBF2002290, OCBBF2002357, OCBBF2002376, OCBBF2002615, OCBBF2002626, OCBBF2002663, OCBBF2002805, OCBBF2002865, OCBBF2002920, OCBBF2002980, OCBBF2003028, OCBBF2003052, OCBBF2003091, OCBBF2003327, OCBBF2003518, OCBBF2003543, OCBBF2003593, OCBBF2003744, OCBBF2003819, OCBBF2004038, OCBBF2004104, OCBBF2004147, OCBBF2004168, OCBBF2004235, OCBBF2004259, OCBBF2004385, OCBBF2004418, OCBBF2004478, OCBBF2004482, OCBBF2004533, OCBBF2004567, OCBBF2004612, OCBBF2004647, OCBBF2004669, OCBBF2004826, OCBBF2004866, OCBBF2004883, OCBBF2004889, OCBBF2004930, OCBBF2004984, OCBBF2005066, OCBBF2005077, OCBBF2005161, OCBBF2005343, OCBBF2005349, OCBBF2005373, OCBBF2005420, OCBBF2005428, OCBBF2005433, OCBBF2005546, OCBBF2005843, OCBBF2005901, OCBBF2006005, OCBBF2006030, OCBBF2006058, OCBBF2006113, OCBBF2006148, OCBBF2006151, OCBBF2006154, OCBBF2006172, OCBBF2006214, OCBBF2006241, OCBBF2006388, OCBBF2006438, OCBBF2006567, OCBBF2006624, OCBBF2006639, OCBBF2006660, OCBBF2006764, OCBBF2006859, OCBBF2006972, OCBBF2006987, OCBBF2007039, OCBBF2007051, OCBBF2007068, OCBBF2007114, OCBBF2007121, OCBBF2007184, OCBBF2007194, OCBBF2007196, OCBBF2007224, OCBBF2007238, OCBBF2007354, OCBBF2007414, OCBBF2007428, OCBBF2007478, OCBBF2007485, OCBBF2007520, OCBBF2007555, OCBBF2007610, OCBBF2007622, OCBBF2007756, OCBBF2007762, OCBBF2007892, OCBBF2007931, OCBBF2007946, OCBBF2008041, OCBBF2008116, OCBBF2008138, OCBBF2008283, OCBBF2008330, OCBBF2008340, OCBBF2008366, OCBBF2008466, OCBBF2008483, OCBBF2008511, OCBBF2008520, OCBBF2008569, OCBBF2008586, OCBBF2008640, OCBBF2008691, OCBBF2008701, OCBBF2008724, OCBBF2008760, OCBBF2008768, OCBBF2008770, OCBBF2008775, OCBBF2008790, OCBBF2008814, OCBBF2008822, OCBBF2009095, OCBBF2009115, OCBBF2009352, OCBBF2009391, OCBBF2009536, OCBBF2009571, OCBBF2009583, OCBBF2009603, OCBBF2009788, OCBBF2009836, OCBBF2009920, OCBBF2009926, OCBBF2010040, OCBBF2010140, OCBBF2010281, OCBBF2010404, OCBBF2010416, OCBBF2010420, OCBBF2010604, OCBBF2010709, OCBBF2010792, OCBBF2010819, OCBBF2010841, OCBBF2010843, OCBBF2010858, OCBBF2010863, OCBBF2010871, OCBBF2010931, OCBBF2010978, OCBBF2010989, OCBBF2011073, OCBBF2011137, OCBBF2011160, OCBBF2011177, OCBBF2011283, OCBBF2011311, OCBBF2011625, OCBBF2011669, OCBBF2011685, OCBBF2011706, OCBBF2011722, OCBBF2011767, OCBBF2011855, OCBBF2011872, OCBBF2011887, OCBBF2011897, OCBBF2011914, OCBBF2011960, OCBBF2011981, OCBBF2012001, OCBBF2012028, OCBBF2012039, OCBBF2012095, OCBBF2012139, OCBBF2012191, OCBBF2012262, OCBBF2012320, OCBBF2012436, OCBBF2012525, OCBBF2012553, OCBBF2012678, OCBBF2012704, OCBBF2012714, OCBBF2012755, OCBBF2012812, OCBBF2012821, OCBBF2012881, OCBBF2012908, OCBBF2012936, OCBBF2012990, OCBBF2013011, OCBBF2013049, OCBBF2013091, OCBBF2013123, OCBBF2013127, OCBBF2013208, OCBBF2013285, OCBBF2013319, OCBBF2013324, OCBBF2013366, OCBBF2013481, OCBBF2013507, OCBBF2013721, OCBBF2013789, OCBBF2013883, OCBBF2013926, OCBBF2014052, OCBBF2014089, OCBBF2014322, OCBBF2014386, OCBBF2014541, OCBBF2014576, OCBBF2014707, OCBBF2014745, OCBBF2014828, OCBBF2014873, OCBBF2014880, OCBBF2014928, OCBBF2015031, OCBBF2015081, OCBBF2015115, OCBBF2015232, OCBBF2015233, OCBBF2015285, OCBBF2015334, OCBBF2015335, OCBBF2015503, OCBBF2015506, OCBBF2015599, OCBBF2015645, OCBBF2015659, OCBBF2015751, OCBBF2015797, OCBBF2015931, OCBBF2015980, OCBBF2016038, OCBBF2016405, OCBBF2016467, OCBBF2016590, OCBBF2016591, OCBBF2016612, OCBBF2016689, OCBBF2016690, OCBBF2016729, OCBBF2016841, OCBBF2016928, OCBBF2017035, OCBBF2017055, OCBBF2017069, OCBBF2017306, OCBBF2017325, OCBBF2017458, OCBBF2017489, OCBBF2017516, OCBBF2017665, OCBBF2017815, OCBBF2017888, OCBBF2017893, OCBBF2017920, OCBBF2018014, OCBBF2018084, OCBBF2018167, OCBBF2018206, OCBBF2018229, OCBBF2018234, OCBBF2018362, OCBBF2018380, OCBBF2018581, OCBBF2018618, OCBBF2018663, OCBBF2018687, OCBBF2018707, OCBBF2018827, OCBBF2018828, OCBBF2018934, OCBBF2019108, OCBBF2019195, OCBBF2019327, OCBBF2019684, OCBBF2019761, OCBBF2019823, OCBBF2019950, OCBBF2020048, OCBBF2020318, OCBBF2020343, OCBBF2020453, OCBBF2020801, OCBBF2020825, OCBBF2020838, OCBBF2021020, OCBBF2021214, OCBBF2021286, OCBBF2021323, OCBBF2021518, OCBBF2021788, OCBBF2022351, OCBBF2022573, OCBBF2022574, OCBBF2023162, OCBBF2023598, OCBBF2023643, OCBBF2024463, OCBBF2024589, OCBBF2024719, OCBBF2024779, OCBBF2024781, OCBBF2025028, OCBBF2025115, OCBBF2025198, OCBBF2025451, OCBBF2025458, OCBBF2025527, OCBBF2025631, OCBBF2025730, OCBBF2026025, OCBBF2026035, OCBBF2026144, OCBBF2026645, OCBBF2026649, OCBBF2026690, OCBBF2026981, OCBBF2027197, OCBBF2027354, OCBBF2027423, OCBBF2027478, OCBBF2027481, OCBBF2027511, OCBBF2027661, OCBBF2027728, OCBBF2027782, OCBBF2027868, OCBBF2028055, OCBBF2028173, OCBBF2028421, OCBBF2029471, OCBBF2029901, OCBBF2030116, OCBBF2030329, OCBBF2030354, OCBBF2030517, OCBBF2030574, OCBBF2030708, OCBBF2030927, OCBBF2030963, OCBBF2031167, OCBBF2031198, OCBBF2031366, OCBBF2031561, OCBBF2032152, OCBBF2032274, OCBBF2032539, OCBBF2032590, OCBBF2032599, OCBBF2032611, OCBBF2032671, OCBBF2033295, OCBBF2033413, OCBBF2033869, OCBBF2033948, OCBBF2034333, OCBBF2034529, OCBBF2034637, OCBBF2034906, OCBBF2035110, OCBBF2035214, OCBBF2035226, OCBBF2035390, OCBBF2035564, OCBBF2035658, OCBBF2035823, OCBBF2035885, OCBBF2035916, OCBBF2036019, OCBBF2036031, OCBBF2036225, OCBBF2036476, OCBBF2036752, OCBBF2037068, OCBBF2037340, OCBBF2037398, OCBBF2037464, OCBBF2037547, OCBBF2037598, OCBBF2037638, OCBBF2038238, OCBBF2038285, OCBBF2038317, OCBBF3000097, OCBBF3000213, OCBBF3000296, OCBBF3000323, OCBBF3000372, OCBBF3000380, OCBBF3000743, OCBBF3000830, OCBBF3001076, OCBBF3001202, OCBBF3001616, OCBBF3002553, OCBBF3002600, OCBBF3002654, OCBBF3003103, OCBBF3003209, OCBBF3003592, OCBBF3003745, OCBBF3003761, OCBBF3004264, OCBBF3004314, OCBBF3004972, OCBBF3005330, OCBBF3005597, OCBBF3005843, OCBBF3006802, OCBBF3006986, OCBBF3007078, OCBBF3007704, OCBBF3008230, OCBBF3008392, OCBBF3008835, OCBBF3009192, OCBBF3009244, OCBBF3009279, PANCR1000012, PANCR1000021, PANCR1000081, PANCR1000086, PANCR1000091, PANCR1000185, PEBLM1000024, PEBLM1000029, PEBLM1000034, PEBLM1000062, PEBLM1000066, PEBLM1000068, PEBLM1000071, PEBLM1000083, PEBLM1000147, PEBLM1000174, PEBLM1000180, PEBLM2000112, PEBLM2000126, PEBLM2000170, PEBLM2000180, PEBLM2000213, PEBLM2000222, PEBLM2000248, PEBLM2000267, PEBLM2000270, PEBLM2000308, PEBLM2000321, PEBLM2000333, PEBLM2000338, PEBLM2000395, PEBLM2000479, PEBLM2000502, PEBLM2001072, PEBLM2001312, PEBLM2001465, PEBLM2001488, PEBLM2001803, PEBLM2002432, PEBLM2002455, PEBLM2002594, PEBLM2002749, PEBLM2002887, PEBLM2003426, PEBLM2003765, PEBLM2003914, PEBLM2003935, PEBLM2004015, PEBLM2004216, PEBLM2004290, PEBLM2004497, PEBLM2004666, PEBLM2004733, PEBLM2005282, PEBLM2005615, PEBLM2005632, PEBLM2005697, PEBLM2006031, PEBLM2006036, PEBLM2006049, PEBLM2006113, PEBLM2006135, PEBLM2006215, PEBLM2006283, PEBLM2006298, PEBLM2006912, PEBLM2007112, PEBLM2007140, PEBLM2007188, PEBLM2007296, PEBLM2007437, PEBLM2007447, PEBLM2007598, PEBLM2007774, PEBLM2007832, PEBLM2007834, PEBLM2008106, PEBLM2008576, PEBLM2008605, PEBLM2008826, PEBLM2008861, PERIC1000025, PERIC1000147, PERIC2000180, PERIC2000214, PERIC2000386, PERIC2000387, PERIC2000422, PERIC2000473, PERIC2000478, PERIC2000889, PERIC2000914, PERIC2001227, PERIC2001228, PERIC2001379, PERIC2001504, PERIC2001703, PERIC2001764, PERIC2002243, PERIC2002272, PERIC2002452, PERIC2002766, PERIC2003001, PERIC2003090, PERIC2003287, PERIC2003349, PERIC2003452, PERIC2003699, PERIC2003720, PERIC2003794, PERIC2003834, PERIC2003919, PERIC2003957, PERIC2004028, PERIC2004131, PERIC2004259, PERIC2004379, PERIC2004429, PERIC2004510, PERIC2004613, PERIC2004909, PERIC2005111, PERIC2005117, PERIC2005305, PERIC2005347, PERIC2005370, PERIC2005936, PERIC2006035, PERIC2006121, PERIC2006945, PERIC2006960, PERIC2007439, PERIC2007914, PERIC2008008, PERIC2008385, PERIC2009001, PERIC2009086, PERIC2009329, PERIC2009566, PLACE5000001, PLACE5000037, PLACE5000058, PLACE5000066, PLACE5000067, PLACE5000068, PLACE5000070, PLACE5000080, PLACE5000105, PLACE5000115, PLACE5000116, PLACE5000129, PLACE5000139, PLACE5000153, PLACE5000171, PLACE5000172, PLACE5000178, PLACE5000245, PLACE5000260, PLACE5000282, PLACE5000297, PLACE5000492, PLACE5000522, PLACE5000527, PLACE6000012, PLACE6000044, PLACE6000055, PLACE6000070, PLACE6000137, PLACE6000191, PLACE6000205, PLACE6000231, PLACE6000296, PLACE6000314, PLACE6000325, PLACE6000348, PLACE6000371, PLACE6000424, PLACE6000426, PLACE6000429, PLACE6000450, PLACE6000463, PLACE6000523, PLACE6000550, PLACE6000552, PLACE6000555, PLACE6000619, PLACE6000630, PLACE6000953, PLACE6001118, PLACE6001153, PLACE6001262, PLACE6001294, PLACE6001536, PLACE6001557, PLACE6001712, PLACE6001740, PLACE6001823, PLACE6001923, PLACE6001925, PLACE6001933, PLACE6002011, PLACE6002016, PLACE6002056, PLACE6002157, PLACE6002312, PLACE6002323, PLACE6002345, PLACE6002419, PLACE6002462, PLACE6002647, PLACE6002692, PLACE6002699, PLACE6002710, PLACE6002871, PLACE6002949, PLACE6003004, PLACE6003038, PLACE6003077, PLACE6003094, PLACE6003109, PLACE6003204, PLACE6003372, PLACE6003393, PLACE6003399, PLACE6003539, PLACE6003621, PLACE6003705, PLACE6003740, PLACE6003745, PLACE6003771, PLACE6003796, PLACE6003839, PLACE6003850, PLACE6004101, PLACE6004219, PLACE6004336, PLACE6004368, PLACE6004380, PLACE6004396, PLACE6004454, PLACE6004464, PLACE6004578, PLACE6004663, PLACE6004687, PLACE6004931, PLACE6004966, PLACE6004993, PLACE6005007, PLACE6005029, PLACE6005108, PLACE6005231, PLACE6005234, PLACE6005283, PLACE6005294, PLACE6005328, PLACE6005351, PLACE6005423, PLACE6005487, PLACE6005535, PLACE6005546, PLACE6005559, PLACE6005579, PLACE6005691, PLACE6005786, PLACE6006077, PLACE6006158, PLACE6006217, PLACE6006222, PLACE6006266, PLACE6006287, PLACE6006394, PLACE6006418, PLACE6006474, PLACE6006566, PLACE6006697, PLACE6006822, PLACE6006871, PLACE6006905, PLACE6006988, PLACE6007050, PLACE6007180, PLACE6007239, PLACE6007242, PLACE6007309, PLACE6007373, PLACE6007380, PLACE6007433, PLACE6007436, PLACE6007482, PLACE6007687, PLACE6007787, PLACE6007798, PLACE6007807, PLACE6007925, PLACE6008036, PLACE6008094, PLACE6008126, PLACE6008285, PLACE6008444, PLACE6008453, PLACE6008640, PLACE6008750, PLACE6008768, PLACE6008793, PLACE6008989, PLACE6009006, PLACE6009008, PLACE6009228, PLACE6009237, PLACE6009419, PLACE6009430, PLACE6009482, PLACE6009524, PLACE6009527, PLACE6009560, PLACE6009590, PLACE6009821, PLACE6009835, PLACE6009853, PLACE6010463, PLACE6010484, PLACE6010485, PLACE6010568, PLACE6010701, PLACE6010704, PLACE6010732, PLACE6010765, PLACE6010848, PLACE6010925, PLACE6010936, PLACE6010991, PLACE6011041, PLACE6011102, PLACE6011156, PLACE6011211, PLACE6011260, PLACE6011334, PLACE6011627, PLACE6011774, PLACE6011881, PLACE6011907, PLACE6011970, PLACE6011975, PLACE6012028, PLACE6012108, PLACE6012168, PLACE6012297, PLACE6012308, PLACE6012574, PLACE6012908, PLACE6012936, PLACE6013222, PLACE6013232, PLACE6013288, PLACE6013386, PLACE6013400, PLACE6013650, PLACE6013672, PLACE6013883, PLACE6013884, PLACE6013885, PLACE6014043, PLACE6014064, PLACE6014516, PLACE6014882, PLACE6015051, PLACE6015211, PLACE6015322, PLACE6015445, PLACE6015460, PLACE6015513, PLACE6015591, PLACE6015729, PLACE6015939, PLACE6016030, PLACE6016093, PLACE6016105, PLACE6016160, PLACE6016210, PLACE6016254, PLACE6016942, PLACE6016984, PLACE6017002, PLACE6017564, PLACE6017578, PLACE6017626, PLACE6017701, PLACE6017714, PLACE6017788, PLACE6017791, PLACE6018031, PLACE6018107, PLACE6018187, PLACE6018235, PLACE6018287, PLACE6018441, PLACE6018487, PLACE6018497, PLACE6018769, PLACE6018834, PLACE6018843, PLACE6018863, PLACE6019195, PLACE6019385, PLACE6019542, PLACE6019600, PLACE6019674, PLACE6019676, PLACE6019701, PLACE6019932, PLACE6020031, PLACE6020145, PLACE7000167, PLACE7000170, PLACE7000266, PLACE7000333, PLACE7000410, PLACE7000502, PLACE7000707, PLACE7001022, PLACE7001544, PLACE7001759, PLACE7001936, PLACE7002303, PLACE7002641, PLACE7003639, PLACE7003657, PLACE7003684, PLACE7003985, PLACE7004103, PLACE7004961, PLACE7005169, PLACE7005671, PLACE7005840, PLACE7006051, PLACE7006090, PLACE7006268, PLACE7006275, PLACE7006498, PLACE7006540, PLACE7007379, PLACE7007644, PLACE7007973, PLACE7008136, PLACE7008261, PLACE7008431, PLACE7008623, PLACE7008766, PLACE7009563, PROST1000033, PROST1000039, PROST1000065, PROST1000083, PROST1000085, PROST1000110, PROST1000120, PROST1000123, PROST1000136, PROST1000144, PROST1000145, PROST1000152, PROST1000167, PROST1000184, PROST1000215, PROST1000217, PROST1000262, PROST1000272, PROST1000298, PROST1000322, PROST1000334, PROST1000343, PROST1000362, PROST1000377, PROST1000383, PROST1000412, PROST1000419, PROST1000451, PROST1000480, PROST1000485, PROST1000493, PROST1000512, PROST1000527, PROST1000528, PROST1000536, PROST1000559, PROST1000575, PROST2000036, PROST2000053, PROST2000067, PROST2000079, PROST2000105, PROST2000143, PROST2000162, PROST2000165, PROST2000176, PROST2000203, PROST2000206, PROST2000212, PROST2000241, PROST2000267, PROST2000274, PROST2000277, PROST2000284, PROST2000325, PROST2000337, PROST2000432, PROST2000452, PROST2000463, PROST2000470, PROST2000505, PROST2000567, PROST2000572, PROST2000717, PROST2000760, PROST2000761, PROST2000835, PROST2000893, PROST2000961, PROST2001002, PROST2001116, PROST2001138, PROST2001180, PROST2001213, PROST2001283, PROST2001414, PROST2001415, PROST2001465, PROST2001521, PROST2001540, PROST2001552, PROST2001599, PROST2001611, PROST2001636, PROST2001739, PROST2001796, PROST2001805, PROST2001823, PROST2001883, PROST2001899, PROST2001997, PROST2001998, PROST2002078, PROST2002101, PROST2002162, PROST2002212, PROST2002227, PROST2002338, PROST2002425, PROST2002488, PROST2002489, PROST2002527, PROST2002591, PROST2002602, PROST2002633, PROST2002682, PROST2002685, PROST2002722, PROST2002736, PROST2002842, PROST2002897, PROST2002906, PROST2002927, PROST2002960, PROST2003102, PROST2003117, PROST2003210, PROST2003302, PROST2003303, PROST2003324, PROST2003340, PROST2003428, PROST2003472, PROST2003517, PROST2003537, PROST2003563, PROST2003577, PROST2003583, PROST2003586, PROST2003628, PROST2003635, PROST2003674, PROST2003676, PROST2003725, PROST2003732, PROST2003775, PROST2003922, PROST2003930, PROST2004115, PROST2004142, PROST2004146, PROST2004161, PROST2004251, PROST2004332, PROST2004481, PROST2004526, PROST2004570, PROST2004727, PROST2004739, PROST2004742, PROST2004744, PROST2004817, PROST2005039, PROST2005067, PROST2005076, PROST2005093, PROST2005121, PROST2005131, PROST2005143, PROST2005228, PROST2005272, PROST2005426, PROST2005466, PROST2005630, PROST2005683, PROST2005788, PROST2005793, PROST2005880, PROST2005886, PROST2005904, PROST2005919, PROST2005943, PROST2006008, PROST2006020, PROST2006060, PROST2006196, PROST2006201, PROST2006260, PROST2006282, PROST2006343, PROST2006450, PROST2006491, PROST2006510, PROST2006579, PROST2006688, PROST2006766, PROST2006782, PROST2006933, PROST2006988, PROST2007122, PROST2007237, PROST2007248, PROST2007289, PROST2007317, PROST2007328, PROST2007382, PROST2007389, PROST2007416, PROST2007528, PROST2007612, PROST2007818, PROST2007871, PROST2007950, PROST2007956, PROST2007974, PROST2007988, PROST2008079, PROST2008088, PROST2008243, PROST2008245, PROST2008268, PROST2008360, PROST2008447, PROST2008468, PROST2008472, PROST2008516, PROST2008724, PROST2008835, PROST2008993, PROST2009022, PROST2009208, PROST2009222, PROST2009254, PROST2009273, PROST2009320, PROST2009347, PROST2009365, PROST2009388, PROST2009400, PROST2009470, PROST2009483, PROST2009571, PROST2009731, PROST2009736, PROST2009795, PROST2009901, PROST2009909, PROST2010046, PROST2010219, PROST2010250, PROST2010326, PROST2010382, PROST2010400, PROST2010579, PROST2010606, PROST2010885, PROST2011012, PROST2011038, PROST2011105, PROST2011297, PROST2011410, PROST2011439, PROST2011482, PROST2011577, PROST2011631, PROST2011660, PROST2012005, PROST2012016, PROST2012088, PROST2012140, PROST2012157, PROST2012190, PROST2012249, PROST2012353, PROST2012400, PROST2012504, PROST2012542, PROST2012550, PROST2012740, PROST2012745, PROST2012780, PROST2012888, PROST2013032, PROST2013053, PROST2013121, PROST2013260, PROST2013327, PROST2013531, PROST2013605, PROST2013627, PROST2013873, PROST2013880, PROST2014422, PROST2014585, PROST2014601, PROST2014659, PROST2014862, PROST2014925, PROST2015124, PROST2015137, PROST2015198, PROST2015243, PROST2015246, PROST2015251, PROST2015287, PROST2015332, PROST2015457, PROST2015464, PROST2015537, PROST2015545, PROST2015551, PROST2015636, PROST2015710, PROST2015756, PROST2015877, PROST2015900, PROST2015932, PROST2016195, PROST2016246, PROST2016351, PROST2016379, PROST2016444, PROST2016462, PROST2016499, PROST2016512, PROST2016566, PROST2016582, PROST2016668, PROST2016684, PROST2016777, PROST2016829, PROST2016860, PROST2016980, PROST2017098, PROST2017128, PROST2017367, PROST2017413, PROST2017441, PROST2017529, PROST2017578, PROST2017612, PROST2017700, PROST2017701, PROST2017729, PROST2017836, PROST2017910, PROST2017972, PROST2018030, PROST2018090, PROST2018235, PROST2018437, PROST2018487, PROST2018511, PROST2018583, PROST2018588, PROST2018607, PROST2018788, PROST2018902, PROST2018922, PROST2019164, PROST2019253, PROST2019296, PROST2019398, PROST2019487, PROST2019781, PUAEN1000039, PUAEN1000081, PUAEN1000085, PUAEN1000087, PUAEN1000121, PUAEN1000147, PUAEN1000161, PUAEN1000175, PUAEN1000275, PUAEN1000276, PUAEN1000288, PUAEN1000322, PUAEN2000080, PUAEN2000152, PUAEN2000175, PUAEN2000247, PUAEN2000312, PUAEN2000394, PUAEN2000497, PUAEN2000535, PUAEN2000594, PUAEN2000684, PUAEN2000942, PUAEN2001260, PUAEN2001345, PUAEN2001526, PUAEN2001882, PUAEN2002473, PUAEN2002489, PUAEN2002552, PUAEN2002568, PUAEN2002616, PUAEN2002758, PUAEN2003018, PUAEN2003079, PUAEN2003116, PUAEN2003408, PUAEN2003517, PUAEN2003954, PUAEN2004067, PUAEN2004083, PUAEN2004400, PUAEN2004511, PUAEN2004525, PUAEN2004875, PUAEN2005110, PUAEN2005247, PUAEN2005502, PUAEN2005588, PUAEN2005930, PUAEN2006029, PUAEN2006328, PUAEN2006335, PUAEN2006578, PUAEN2006639, PUAEN2006761, PUAEN2007350, PUAEN2007785, PUAEN2007898, PUAEN2008123, PUAEN2008314, PUAEN2008515, PUAEN2008815, PUAEN2008939, PUAEN2008980, PUAEN2008985, PUAEN2009174, PUAEN2009348, PUAEN2009534, PUAEN2009795, PUAEN2009852, PUAEN2010346, PUAEN2010824, RECTM1000051, RECTM1000141, RECTM2000220, RECTM2000349, RECTM2000433, RECTM2000510, RECTM2001307, RECTM2001347, RECTM2001519, RECTM2001666, RECTM2001691, RECTM2001749, RECTM2002172, RECTM2002602, RECTM2002632, SALGL1000005, SALGL1000024, SALGL1000028, SALGL1000047, SALGL1000065, SALGL1000107, SALGL1000171, SKMUS1000030, SKMUS1000064, SKMUS1000067, SKMUS1000102, SKMUS1000104, SKMUS1000110, SKMUS1000118, SKMUS1000124, SKMUS1000129, SKMUS1000176, SKMUS2000061, SKMUS2000074, SKMUS2000078, SKMUS2000117, SKMUS2000137, SKMUS2000198, SKMUS2000243, SKMUS2000271, SKMUS2000287, SKMUS2000317, SKMUS2000330, SKMUS2000339, SKMUS2000365, SKMUS2000390, SKMUS2000416, SKMUS2000458, SKMUS2000467, SKMUS2000468, SKMUS2000484, SKMUS2000515, SKMUS2000679, SKMUS2000690, SKMUS2000701, SKMUS2000705, SKMUS2000710, SKMUS2000724, SKMUS2000726, SKMUS2000757, SKMUS2000774, SKMUS2000780, SKMUS2000821, SKMUS2000847, SKMUS2000863, SKMUS2000894, SKMUS2000898, SKMUS2000933, SKMUS2000945, SKMUS2000961, SKMUS2000973, SKMUS2000980, SKMUS2001008, SKMUS2001014, SKMUS2001147, SKMUS2001157, SKMUS2001164, SKMUS2001199, SKMUS2001201, SKMUS2001215, SKMUS2001247, SKMUS2001254, SKMUS2001271, SKMUS2001287, SKMUS2001323, SKMUS2001364, SKMUS2001398, SKMUS2001402, SKMUS2001412, SKMUS2001492, SKMUS2001528, SKMUS2001543, SKMUS2001580, SKMUS2001585, SKMUS2001608, SKMUS2001631, SKMUS2001634, SKMUS2001662, SKMUS2001663, SKMUS2001668, SKMUS2001671, SKMUS2001683, SKMUS2001693, SKMUS2001695, SKMUS2001703, SKMUS2001740, SKMUS2001742, SKMUS2001823, SKMUS2001850, SKMUS2002077, SKMUS2002084, SKMUS2002153, SKMUS2002475, SKMUS2002602, SKMUS2002634, SKMUS2002693, SKMUS2002821, SKMUS2002840, SKMUS2002920, SKMUS2003034, SKMUS2003074, SKMUS2003168, SKMUS2003194, SKMUS2003744, SKMUS2004044, SKMUS2004047, SKMUS2004483, SKMUS2004667, SKMUS2004897, SKMUS2004903, SKMUS2004908, SKMUS2005428, SKMUS2006394, SKMUS2006481, SKMUS2006755, SKMUS2007315, SKMUS2007359, SKMUS2007568, SKMUS2007740, SKMUS2007816, SKMUS2007915, SKMUS2008338, SKMUS2008407, SKMUS2008474, SKMUS2008585, SKMUS2008607, SKMUS2009190, SKMUS2009232, SKMUS2009479, SKMUS2009557, SKNMC1000123, SKNMC1000124, SKNMC1000159, SKNMC1000229, SKNMC1000264, SKNMC2000224, SKNMC2000256, SKNMC2000322, SKNMC2000356, SKNMC2000374, SKNMC2000583, SKNMC2000593, SKNMC2000612, SKNMC2000622, SKNMC2000698, SKNMC2000966, SKNMC2001113, SKNMC2001324, SKNMC2001503, SKNMC2001555, SKNMC2001596, SKNMC2001623, SKNMC2002402, SKNMC2003639, SKNMC2003924, SKNMC2003987, SKNMC2004457, SKNMC2004643, SKNMC2004651, SKNMC2005772, SKNMC2006173, SKNMC2006327, SKNMC2006998, SKNMC2007134, SKNMC2007502, SKNMC2007504, SKNMC2007961, SKNMC2009450, SKNSH1000002, SKNSH1000101, SKNSH1000174, SKNSH1000301, SKNSH1000308, SKNSH1000416, SKNSH2000051, SKNSH2000101, SKNSH2000151, SKNSH2000163, SKNSH2000250, SKNSH2000319, SKNSH2000516, SKNSH2000550, SKNSH2000716, SKNSH2000971, SKNSH2001222, SKNSH2001875, SKNSH2001931, SKNSH2002054, SKNSH2002768, SKNSH2002866, SKNSH2003064, SKNSH2003174, SKNSH2003422, SKNSH2003466, SKNSH2003483, SKNSH2003633, SKNSH2004039, SKNSH2005061, SKNSH2005120, SKNSH2005194, SKNSH2005240, SKNSH2005792, SKNSH2005816, SKNSH2005981, SKNSH2006234, SKNSH2006304, SKNSH2006432, SKNSH2006822, SKNSH2007142, SKNSH2007149, SKNSH2007429, SKNSH2007739, SKNSH2008940, SKNSH2008969, SKNSH2009197, SKNSH2009357, SKNSH2009435, SKNSH2009991, SKNSH2010015, SMINT1000012, SMINT1000016, SMINT1000039, SMINT1000048, SMINT1000051, SMINT1000054, SMINT1000057, SMINT1000071, SMINT1000075, SMINT1000078, SMINT1000091, SMINT1000103, SMINT1000118, SMINT1000137, SMINT1000192, SMINT2000007, SMINT2000018, SMINT2000032, SMINT2000040, SMINT2000060, SMINT2000073, SMINT2000084, SMINT2000145, SMINT2000176, SMINT2000185, SMINT2000227, SMINT2000229, SMINT2000232, SMINT2000239, SMINT2000267, SMINT2000400, SMINT2000454, SMINT2000518, SMINT2000529, SMINT2000530, SMINT2000537, SMINT2000538, SMINT2000541, SMINT2000558, SMINT2000562, SMINT2000568, SMINT2000602, SMINT2000609, SMINT2000659, SMINT2000694, SMINT2000747, SMINT2000811, SMINT2000824, SMINT2000933, SMINT2000984, SMINT2001114, SMINT2001158, SMINT2001183, SMINT2001199, SMINT2001222, SMINT2001348, SMINT2001397, SMINT2001458, SMINT2001461, SMINT2001535, SMINT2001559, SMINT2001609, SMINT2001615, SMINT2001683, SMINT2001731, SMINT2001812, SMINT2001818, SMINT2002126, SMINT2002202, SMINT2002210, SMINT2002224, SMINT2002281, SMINT2002311, SMINT2002328, SMINT2002414, SMINT2002457, SMINT2002620, SMINT2002743, SMINT2002880, SMINT2002882, SMINT2002884, SMINT2002899, SMINT2002974, SMINT2003003, SMINT2003074, SMINT2003128, SMINT2003150, SMINT2003317, SMINT2003340, SMINT2003386, SMINT2003423, SMINT2003505, SMINT2003551, SMINT2003569, SMINT2003641, SMINT2003644, SMINT2003866, SMINT2003905, SMINT2004023, SMINT2004037, SMINT2004047, SMINT2004086, SMINT2004144, SMINT2004280, SMINT2004299, SMINT2004339, SMINT2004350, SMINT2004414, SMINT2004473, SMINT2004547, SMINT2004583, SMINT2004729, SMINT2004781, SMINT2004872, SMINT2004891, SMINT2004909, SMINT2004972, SMINT2004992, SMINT2005075, SMINT2005161, SMINT2005174, SMINT2005213, SMINT2005330, SMINT2005387, SMINT2005402, SMINT2005405, SMINT2005621, SMINT2005623, SMINT2005624, SMINT2005688, SMINT2005800, SMINT2006078, SMINT2006205, SMINT2006331, SMINT2006596, SMINT2006641, SMINT2006648, SMINT2006708, SMINT2006716, SMINT2007062, SMINT2007101, SMINT2007140, SMINT2007219, SMINT2007294, SMINT2007365, SMINT2007391, SMINT2007433, SMINT2007508, SMINT2007526, SMINT2007579, SMINT2007647, SMINT2007729, SMINT2007790, SMINT2007792, SMINT2007796, SMINT2007867, SMINT2007932, SMINT2008042, SMINT2008054, SMINT2008133, SMINT2008277, SMINT2008329, SMINT2008455, SMINT2008491, SMINT2008531, SMINT2008545, SMINT2008558, SMINT2008590, SMINT2008625, SMINT2008672, SMINT2008690, SMINT2008715, SMINT2008720, SMINT2008817, SMINT2008844, SMINT2008869, SMINT2008917, SMINT2008921, SMINT2009119, SMINT2009121, SMINT2009212, SMINT2009216, SMINT2009233, SMINT2009259, SMINT2009272, SMINT2009292, SMINT2009363, SMINT2009415, SMINT2009468, SMINT2009505, SMINT2009529, SMINT2009832, SMINT2009895, SMINT2009902, SMINT2009973, SMINT2010015, SMINT2010068, SMINT2010076, SMINT2010084, SMINT2010144, SMINT2010200, SMINT2010278, SMINT2010324, SMINT2010326, SMINT2010369, SMINT2010426, SMINT2010500, SMINT2010533, SMINT2010629, SMINT2010639, SMINT2010672, SMINT2010753, SMINT2010853, SMINT2010897, SMINT2010901, SMINT2010997, SMINT2011066, SMINT2011273, SMINT2011311, SMINT2011406, SMINT2011509, SMINT2011567, SMINT2011588, SMINT2011656, SMINT2011888, SMINT2011958, SMINT2012040, SMINT2012179, SMINT2012195, SMINT2012285, SMINT2012291, SMINT2012501, SMINT2012734, SMINT2012793, SMINT2013032, SMINT2013129, SMINT2013170, SMINT2013181, SMINT2013228, SMINT2013613, SMINT2013626, SMINT2013833, SMINT2013890, SMINT2014166, SMINT2014282, SMINT2014443, SMINT2014489, SMINT2014721, SMINT2015006, SMINT2015294, SMINT2015306, SMINT2015326, SMINT2015353, SMINT2015454, SMINT2015518, SMINT2015745, SMINT2015787, SMINT2015810, SMINT2016122, SMINT2016146, SMINT2016286, SMINT2016313, SMINT2016396, SMINT2016412, SMINT2016440, SMINT2016477, SMINT2016544, SMINT2016857, SMINT2017134, SMINT2017319, SMINT2017324, SMINT2017410, SMINT2017431, SMINT2017432, SMINT2017436, SMINT2017599, SMINT2017659, SMINT2017736, SMINT2017781, SMINT2017855, SMINT2017884, SMINT2017964, SMINT2017974, SMINT2018343, SMINT2018353, SMINT2018592, SMINT2019017, SMINT2019105, SMINT2019142, SMINT2019153, SMINT2019200, SPLEN1000013, SPLEN1000041, SPLEN1000049, SPLEN1000056, SPLEN1000087, SPLEN1000089, SPLEN1000091, SPLEN1000134, SPLEN1000139, SPLEN1000143, SPLEN1000144, SPLEN1000145, SPLEN1000156, SPLEN1000163, SPLEN1000165, SPLEN1000178, SPLEN2000020, SPLEN2000047, SPLEN2000064, SPLEN2000072, SPLEN2000098, SPLEN2000126, SPLEN2000134, SPLEN2000143, SPLEN2000189, SPLEN2000197, SPLEN2000205, SPLEN2000210, SPLEN2000222, SPLEN2000242, SPLEN2000247, SPLEN2000258, SPLEN2000267, SPLEN2000270, SPLEN2000307, SPLEN2000310, SPLEN2000341, SPLEN2000348, SPLEN2000350, SPLEN2000357, SPLEN2000364, SPLEN2000402, SPLEN2000414, SPLEN2000420, SPLEN2000443, SPLEN2000448, SPLEN2000450, SPLEN2000464, SPLEN2000496, SPLEN2000515, SPLEN2000516, SPLEN2000537, SPLEN2000541, SPLEN2000607, SPLEN2000630, SPLEN2000695, SPLEN2000698, SPLEN2000874, SPLEN2000882, SPLEN2001135, SPLEN2001176, SPLEN2001227, SPLEN2001245, SPLEN2001278, SPLEN2001354, SPLEN2001367, SPLEN2001383, SPLEN2001476, SPLEN2001503, SPLEN2001510, SPLEN2001599, SPLEN2001626, SPLEN2001650, SPLEN2001710, SPLEN2001761, SPLEN2001781, SPLEN2001881, SPLEN2001912, SPLEN2001945, SPLEN2002007, SPLEN2002053, SPLEN2002133, SPLEN2002147, SPLEN2002166, SPLEN2002175, SPLEN2002223, SPLEN2002272, SPLEN2002314, SPLEN2002343, SPLEN2002354, SPLEN2002385, SPLEN2002419, SPLEN2002451, SPLEN2002462, SPLEN2002467, SPLEN2002477, SPLEN2002493, SPLEN2002662, SPLEN2002695, SPLEN2002707, SPLEN2002744, SPLEN2002917, SPLEN2002931, SPLEN2002957, SPLEN2003160, SPLEN2003204, SPLEN2003219, SPLEN2003396, SPLEN2003678, SPLEN2003878, SPLEN2003918, SPLEN2003924, SPLEN2004060, SPLEN2004078, SPLEN2004124, SPLEN2004148, SPLEN2004181, SPLEN2004343, SPLEN2004346, SPLEN2004368, SPLEN2004555, SPLEN2004611, SPLEN2004662, SPLEN2004773, SPLEN2004844, SPLEN2004880, SPLEN2004984, SPLEN2005227, SPLEN2005272, SPLEN2005342, SPLEN2005416, SPLEN2005450, SPLEN2005474, SPLEN2005560, SPLEN2005727, SPLEN2005783, SPLEN2005790, SPLEN2005806, SPLEN2005818, SPLEN2005838, SPLEN2005869, SPLEN2005939, SPLEN2006268, SPLEN2006283, SPLEN2006325, SPLEN2006389, SPLEN2006425, SPLEN2006671, SPLEN2006701, SPLEN2006785, SPLEN2006875, SPLEN2007182, SPLEN2007276, SPLEN2007314, SPLEN2007326, SPLEN2007350, SPLEN2007619, SPLEN2007653, SPLEN2007689, SPLEN2007695, SPLEN2007739, SPLEN2007750, SPLEN2007794, SPLEN2007879, SPLEN2007926, SPLEN2007951, SPLEN2008007, SPLEN2008135, SPLEN2008164, SPLEN2008317, SPLEN2008460, SPLEN2008496, SPLEN2008591, SPLEN2008786, SPLEN2009081, SPLEN2009088, SPLEN2009163, SPLEN2009340, SPLEN2009512, SPLEN2009513, SPLEN2009541, SPLEN2009548, SPLEN2009555, SPLEN2009581, SPLEN2009733, SPLEN2009803, SPLEN2009884, SPLEN2009918, SPLEN2009970, SPLEN2010004, SPLEN2010015, SPLEN2010112, SPLEN2010119, SPLEN2010146, SPLEN2010187, SPLEN2010350, SPLEN2010395, SPLEN2010415, SPLEN2010447, SPLEN2010469, SPLEN2010510, SPLEN2010530, SPLEN2010534, SPLEN2010588, SPLEN2010625, SPLEN2010800, SPLEN2010846, SPLEN2010847, SPLEN2010862, SPLEN2010912, SPLEN2010978, SPLEN2010986, SPLEN2011018, SPLEN2011021, SPLEN2011025, SPLEN2011086, SPLEN2011139, SPLEN2011145, SPLEN2011248, SPLEN2011252, SPLEN2011422, SPLEN2011672, SPLEN2011678, SPLEN2011758, SPLEN2011766, SPLEN2011805, SPLEN2011820, SPLEN2011830, SPLEN2011931, SPLEN2011981, SPLEN2012115, SPLEN2012175, SPLEN2012179, SPLEN2012185, SPLEN2012234, SPLEN2012453, SPLEN2012523, SPLEN2012524, SPLEN2012525, SPLEN2012606, SPLEN2012611, SPLEN2012619, SPLEN2012624, SPLEN2012725, SPLEN2012743, SPLEN2012756, SPLEN2012846, SPLEN2012889, SPLEN2012961, SPLEN2013108, SPLEN2013195, SPLEN2013503, SPLEN2013644, SPLEN2013648, SPLEN2013670, SPLEN2013673, SPLEN2013714, SPLEN2013753, SPLEN2013821, SPLEN2013857, SPLEN2013860, SPLEN2013910, SPLEN2013923, SPLEN2013936, SPLEN2014041, SPLEN2014063, SPLEN2014073, SPLEN2014119, SPLEN2014136, SPLEN2014199, SPLEN2014210, SPLEN2014293, SPLEN2014318, SPLEN2014381, SPLEN2014452, SPLEN2014454, SPLEN2014486, SPLEN2014543, SPLEN2014645, SPLEN2014669, SPLEN2014711, SPLEN2014739, SPLEN2014860, SPLEN2014865, SPLEN2014911, SPLEN2014919, SPLEN2014920, SPLEN2014924, SPLEN2014937, SPLEN2014946, SPLEN2015031, SPLEN2015094, SPLEN2015121, SPLEN2015129, SPLEN2015158, SPLEN2015166, SPLEN2015216, SPLEN2015258, SPLEN2015261, SPLEN2015267, SPLEN2015276, SPLEN2015310, SPLEN2015415, SPLEN2015433, SPLEN2015593, SPLEN2015674, SPLEN2015679, SPLEN2015707, SPLEN2015730, SPLEN2015746, SPLEN2015788, SPLEN2015815, SPLEN2015890, SPLEN2015891, SPLEN2015899, SPLEN2016045, SPLEN2016053, SPLEN2016069, SPLEN2016098, SPLEN2016135, SPLEN2016139, SPLEN2016241, SPLEN2016250, SPLEN2016304, SPLEN2016356, SPLEN2016480, SPLEN2016531, SPLEN2016533, SPLEN2016541, SPLEN2016552, SPLEN2016602, SPLEN2016627, SPLEN2016678, SPLEN2016743, SPLEN2016773, SPLEN2016781, SPLEN2016840, SPLEN2016863, SPLEN2016922, SPLEN2016932, SPLEN2016973, SPLEN2017043, SPLEN2017104, SPLEN2017121, SPLEN2017147, SPLEN2017187, SPLEN2017189, SPLEN2017212, SPLEN2017351, SPLEN2017426, SPLEN2017452, SPLEN2017538, SPLEN2017592, SPLEN2017613, SPLEN2017620, SPLEN2017643, SPLEN2017687, SPLEN2017740, SPLEN2017781, SPLEN2017999, SPLEN2018112, SPLEN2018159, SPLEN2018180, SPLEN2018181, SPLEN2018280, SPLEN2018285, SPLEN2018299, SPLEN2018302, SPLEN2018364, SPLEN2018395, SPLEN2018643, SPLEN2018683, SPLEN2018732, SPLEN2018749, SPLEN2018933, SPLEN2019008, SPLEN2019043, SPLEN2019077, SPLEN2019092, SPLEN2019102, SPLEN2019131, SPLEN2019257, SPLEN2019323, SPLEN2019349, SPLEN2019375, SPLEN2019379, SPLEN2019446, SPLEN2019471, SPLEN2019480, SPLEN2019505, SPLEN2019571, SPLEN2019575, SPLEN2019709, SPLEN2019774, SPLEN2019793, SPLEN2019811, SPLEN2019839, SPLEN2019956, SPLEN2019985, SPLEN2020007, SPLEN2020034, SPLEN2020153, SPLEN2020154, SPLEN2020166, SPLEN2020183, SPLEN2020223, SPLEN2020359, SPLEN2020417, SPLEN2020427, SPLEN2020467, SPLEN2020512, SPLEN2020608, SPLEN2020777, SPLEN2020805, SPLEN2021057, SPLEN2021122, SPLEN2021157, SPLEN2021231, SPLEN2021295, SPLEN2021298, SPLEN2021383, SPLEN2021417, SPLEN2021440, SPLEN2021458, SPLEN2021463, SPLEN2021560, SPLEN2021701, SPLEN2021795, SPLEN2021983, SPLEN2021991, SPLEN2022040, SPLEN2022162, SPLEN2022227, SPLEN2022591, SPLEN2022785, SPLEN2022920, SPLEN2023024, SPLEN2023118, SPLEN2023160, SPLEN2023423, SPLEN2023710, SPLEN2023733, SPLEN2023791, SPLEN2023977, SPLEN2024070, SPLEN2024127, SPLEN2024232, SPLEN2024273, SPLEN2024383, SPLEN2024489, SPLEN2024530, SPLEN2024571, SPLEN2024577, SPLEN2024617, SPLEN2024737, SPLEN2024922, SPLEN2024956, SPLEN2024990, SPLEN2025012, SPLEN2025017, SPLEN2025039, SPLEN2025219, SPLEN2025491, SPLEN2025626, SPLEN2025820, SPLEN2026144, SPLEN2026411, SPLEN2026765, SPLEN2027157, SPLEN2027395, SPLEN2027488, SPLEN2027780, SPLEN2027852, SPLEN2027868, SPLEN2027995, SPLEN2028046, SPLEN2028066, SPLEN2028138, SPLEN2028365, SPLEN2028417, SPLEN2028424, SPLEN2028593, SPLEN2028844, SPLEN2028914, SPLEN2028994, SPLEN2029051, SPLEN2029176, SPLEN2029295, SPLEN2029380, SPLEN2029522, SPLEN2029683, SPLEN2029727, SPLEN2029904, SPLEN2029912, SPLEN2030250, SPLEN2030335, SPLEN2030371, SPLEN2030397, SPLEN2030479, SPLEN2030495, SPLEN2030562, SPLEN2030763, SPLEN2030847, SPLEN2031004, SPLEN2031125, SPLEN2031424, SPLEN2031674, SPLEN2031724, SPLEN2031780, SPLEN2032036, SPLEN2032112, SPLEN2032154, SPLEN2032157, SPLEN2032321, SPLEN2032356, SPLEN2032677, SPLEN2032813, SPLEN2032924, SPLEN2033098, SPLEN2033153, SPLEN2033333, SPLEN2033490, SPLEN2033539, SPLEN2033921, SPLEN2033996, SPLEN2034021, SPLEN2034081, SPLEN2034252, SPLEN2034448, SPLEN2034551, SPLEN2034601, SPLEN2034678, SPLEN2034781, SPLEN2034864, SPLEN2034934, SPLEN2035318, SPLEN2035615, SPLEN2036076, SPLEN2036103, SPLEN2036326, SPLEN2036475, SPLEN2036501, SPLEN2036579, SPLEN2036608, SPLEN2036702, SPLEN2036712, SPLEN2036821, SPLEN2036953, SPLEN2037077, SPLEN2037194, SPLEN2037319, SPLEN2037444, SPLEN2037580, SPLEN2037630, SPLEN2037678, SPLEN2037722, SPLEN2037891, SPLEN2038055, SPLEN2038180, SPLEN2038345, SPLEN2038407, SPLEN2038473, SPLEN2038834, SPLEN2039311, SPLEN2039672, SPLEN2039697, SPLEN2039845, SPLEN2039936, SPLEN2040222, SPLEN2040237, SPLEN2040824, SPLEN2041304, SPLEN2041306, SPLEN2041310, SPLEN2041645, SPLEN2041700, SPLEN2041720, SPLEN2041977, SPLEN2042051, SPLEN2042303, SPLEN2042521, SPLEN2042535, SPLEN2042598, SPLEN2042920, STOMA1000013, STOMA1000047, STOMA1000052, STOMA1000074, STOMA1000091, STOMA1000117, STOMA1000133, STOMA1000175, STOMA1000190, STOMA1000191, STOMA2000032, STOMA2000072, STOMA2000088, STOMA2000104, STOMA2000121, STOMA2000148, STOMA2000168, STOMA2000183, STOMA2000188, STOMA2000257, STOMA2000279, STOMA2000383, STOMA2000386, STOMA2000478, STOMA2000482, STOMA2000529, STOMA2000539, STOMA2000567, STOMA2000640, STOMA2000678, STOMA2000686, STOMA2000888, STOMA2001025, STOMA2001389, STOMA2002141, STOMA2002166, STOMA2002367, STOMA2002688, STOMA2002828, STOMA2003158, STOMA2003289, STOMA2003444, STOMA2003477, STOMA2003646, STOMA2003716, STOMA2003781, STOMA2003894, STOMA2004194, STOMA2004294, STOMA2004663, STOMA2004668, STOMA2004852, STOMA2004873, STOMA2004884, STOMA2004893, STOMA2005120, STOMA2005664, STOMA2005667, STOMA2005746, STOMA2005782, STOMA2006181, STOMA2006213, STOMA2006229, STOMA2006325, STOMA2006330, STOMA2006398, STOMA2006447, STOMA2006780, STOMA2006904, STOMA2007269, STOMA2007680, STOMA2007745, STOMA2008050, STOMA2008361, STOMA2008546, STOMA2008614, STOMA2008638, STOMA2008838, STOMA2009250, STOMA2009253, STOMA2009256, STOMA2009289, SYNOV1000045, SYNOV1000049, SYNOV1000118, SYNOV1000128, SYNOV1000164, SYNOV1000190, SYNOV1000256, SYNOV1000374 SYNOV2000152, SYNOV2000171, SYNOV2000173, SYNOV2000177, SYNOV2000178, SYNOV2000193, SYNOV2000251, SYNOV2000279, SYNOV2000291, SYNOV2000297, SYNOV2000397, SYNOV2000426, SYNOV2000601, SYNOV2000700, SYNOV2000820, SYNOV2000824, SYNOV2000923, SYNOV2001014, SYNOV2001035, SYNOV2001088, SYNOV2001111, SYNOV2001144, SYNOV2001212, SYNOV2001251, SYNOV2001300, SYNOV2001356, SYNOV2001374, SYNOV2001390, SYNOV2001451, SYNOV2001457, SYNOV2001468, SYNOV2001581, SYNOV2001648, SYNOV2001660, SYNOV2003326, SYNOV2005216, SYNOV2005448, SYNOV2005541, SYNOV2005673, SYNOV2005817, SYNOV2005962, SYNOV2006430, SYNOV2006620, SYNOV2007758, SYNOV2007965, SYNOV2008765, SYNOV2009172, SYNOV2011233, SYNOV2012326, SYNOV2013365, SYNOV2013637, SYNOV2014157, SYNOV2014364, SYNOV2016124, SYNOV2016837, SYNOV2017179, SYNOV2018921, SYNOV2019280, SYNOV2020085, SYNOV2020463, SYNOV2021320, SYNOV2021953, SYNOV3000184, SYNOV3000231, SYNOV3000302, SYNOV3000345, SYNOV4000249, SYNOV4000472, SYNOV4000706, SYNOV4001153, SYNOV4001326, SYNOV4001342, SYNOV4002001, SYNOV4002392, SYNOV4002875, SYNOV4002883, SYNOV4003174, SYNOV4003322, SYNOV4003681, SYNOV4003981, SYNOV4004184, SYNOV4004741, SYNOV4004823, SYNOV4004914, SYNOV4005256, SYNOV4005570, SYNOV4005739, SYNOV4005889, SYNOV4005981, SYNOV4005989, SYNOV4006256, SYNOV4006327, SYNOV4006542, SYNOV4007012, SYNOV4007215, SYNOV4007360, SYNOV4007430, SYNOV4007521, SYNOV4007553, SYNOV4007671, SYNOV4007711, SYNOV4008245, SYNOV4008336, SYNOV4009129, SYNOV4009139, SYNOV4009298, T1ESE2000116, T1ESE2000609, T1ESE2002665, TBAES2000004, TBAES2000116, TBAES2000255, TBAES2000315, TBAES2000352, TBAES2000932, TBAES2001171, TBAES2001220, TBAES2001229, TBAES2001258, TBAES2001296, TBAES2001492, TBAES2001553, TBAES2001751, TBAES2003435, TBAES2003492, TBAES2003550, TBAES2003917, TBAES2004055, TBAES2004105, TBAES2004939, TBAES2005157, TBAES2005361, TBAES2005543, TBAES2006568, TBAES2006881, TBAES2007379, TBAES2007428, TBAES2007481, TBAES2007504, TBAES2007548, TBAES2007697, TBAES2007862, TBAES2007964, TBAES2008133, TCERX2000171, TCERX2000431, TCERX2000998, TCERX2002644, TCOLN1000037, TCOLN1000180, TCOLN2000139, TCOLN2000236, TCOLN2000641, TCOLN2001268, TCOLN2002047, TCOLN2002278, TESOP1000035, TESOP1000127, TESOP1000160, TESOP2000083, TESOP2000090, TESOP2000205, TESOP2000312, TESOP2000390, TESOP2000400, TESOP2000510, TESOP2000527, TESOP2000569, TESOP2000739, TESOP2000801, TESOP2001122, TESOP2001166, TESOP2001345, TESOP2001474, TESOP2001796, TESOP2001818, TESOP2001849, TESOP2001865, TESOP2001901, TESOP2001953, TESOP2002005, TESOP2002110, TESOP2002150, TESOP2002451, TESOP2002489, TESOP2002539, TESOP2002545, TESOP2002804, TESOP2002950, TESOP2003273, TESOP2003308, TESOP2003553, TESOP2003753, TESOP2004110, TESOP2004114, TESOP2004173, TESOP2004214, TESOP2005199, TESOP2005285, TESOP2005485, TESOP2005498, TESOP2005579, TESOP2006041, TESOP2006053, TESOP2006060, TESOP2006068, TESOP2006110, TESOP2006398, TESOP2006670, TESOP2006704, TESOP2006746, TESOP2006865, TESOP2007041, TESOP2007052, TESOP2007262, TESOP2007384, TESOP2007636, TESOP2007674, TESOP2007688, TESOP2007725, TESOP2007912, TESOP2007978, TESOP2008127, TESOP2008552, TESOP2008556, TESOP2008563, TESOP2008820, TESOP2009121, TESOP2009201, TESOP2009247, TESOP2009555, TESTI1000018, TESTI1000019, TESTI1000025, TESTI1000029, TESTI1000030, TESTI1000042, TESTI1000045, TESTI1000051, TESTI1000055, TESTI1000064, TESTI1000070, TESTI1000085, TESTI1000088, TESTI1000093, TESTI1000094, TESTI1000096, TESTI1000101, TESTI1000109, TESTI1000125, TESTI1000127, TESTI1000128, TESTI1000131, TESTI1000138, TESTI1000142, TESTI1000157, TESTI1000163, TESTI1000168, TESTI1000169, TESTI1000179, TESTI1000183, TESTI1000191, TESTI1000257, TESTI1000266, TESTI1000319, TESTI1000330, TESTI1000348, TESTI1000390, TESTI1000391, TESTI1000459, TESTI1000491, TESTI1000545, TESTI2000006, TESTI2000018, TESTI2000044, TESTI2000100, TESTI2000117, TESTI2000120, TESTI2000147, TESTI2000154, TESTI2000172, TESTI2000177, TESTI2000179, TESTI2000207, TESTI2000208, TESTI2000221, TESTI2000238, TESTI2000253, TESTI2000272, TESTI2000278, TESTI2000349, TESTI2000358, TESTI2000372, TESTI2000427, TESTI2000431, TESTI2000435, TESTI2000443, TESTI2000452, TESTI2000462, TESTI2000489, TESTI2000520, TESTI2000571, TESTI2000591, TESTI2000598, TESTI2000600, TESTI2000616, TESTI2000627, TESTI2000644, TESTI2000671, TESTI2000683, TESTI2000689, TESTI2000695, TESTI2000699, TESTI2000707, TESTI2000745, TESTI2000756, TESTI2000762, TESTI2000808, TESTI2000819, TESTI2000830, TESTI2000840, TESTI2000849, TESTI2000850, TESTI2000874, TESTI2000883, TESTI2000909, TESTI2000951, TESTI2000981, TESTI2001008, TESTI2001049, TESTI2001082, TESTI2001120, TESTI2001134, TESTI2001141, TESTI2001180, TESTI2001208, TESTI2001229, TESTI2001236, TESTI2001237, TESTI2001269, TESTI2001306, TESTI2001313, TESTI2001330, TESTI2001339, TESTI2001345, TESTI2001352, TESTI2001364, TESTI2001412, TESTI2001498, TESTI2001511, TESTI2001512, TESTI2001518, TESTI2001556, TESTI2001593, TESTI2001613, TESTI2001621, TESTI2001661, TESTI2001665, TESTI2001671, TESTI2001697, TESTI2001725, TESTI2001758, TESTI2001766, TESTI2001792, TESTI2001793, TESTI2001795, TESTI2001812, TESTI2001815, TESTI2001823, TESTI2001826, TESTI2001827, TESTI2001852, TESTI2001869, TESTI2001879, TESTI2001894, TESTI2001898, TESTI2001915, TESTI2001950, TESTI2001959, TESTI2001968, TESTI2001985, TESTI2001991, TESTI2002002, TESTI2002012, TESTI2002036, TESTI2002048, TESTI2002057, TESTI2002081, TESTI2002090, TESTI2002105, TESTI2002216, TESTI2002223, TESTI2002245, TESTI2002251, TESTI2002256, TESTI2002264, TESTI2002282, TESTI2002293, TESTI2002294, TESTI2002326, TESTI2002351, TESTI2002361, TESTI2002369, TESTI2002406, TESTI2002415, TESTI2002423, TESTI2002453, TESTI2002461, TESTI2002465, TESTI2002467, TESTI2002498, TESTI2002516, TESTI2002544, TESTI2002578, TESTI2002580, TESTI2002618, TESTI2002676, TESTI2002690, TESTI2002696, TESTI2002698, TESTI2002700, TESTI2002707, TESTI2002724, TESTI2002729, TESTI2002752, TESTI2002753, TESTI2002789, TESTI2002802, TESTI2002806, TESTI2002840, TESTI2002866, TESTI2002910, TESTI2002912, TESTI2002928, TESTI2002937, TESTI2002965, TESTI2002993, TESTI2003020, TESTI2003031, TESTI2003037, TESTI2003044, TESTI2003059, TESTI2003061, TESTI2003071, TESTI2003074, TESTI2003089, TESTI2003104, TESTI2003109, TESTI2003117, TESTI2003127, TESTI2003130, TESTI2003131, TESTI2003139, TESTI2003141, TESTI2003152, TESTI2003181, TESTI2003193, TESTI2003196, TESTI2003228, TESTI2003236, TESTI2003255, TESTI2003258, TESTI2003277, TESTI2003280, TESTI2003299, TESTI2003311, TESTI2003321, TESTI2003325, TESTI2003327, TESTI2003330, TESTI2003347, TESTI2003354, TESTI2003356, TESTI2003372, TESTI2003376, TESTI2003413, TESTI2003418, TESTI2003419, TESTI2003432, TESTI2003454, TESTI2003475, TESTI2003476, TESTI2003498, TESTI2003512, TESTI2003539, TESTI2003541, TESTI2003545, TESTI2003551, TESTI2003574, TESTI2003579, TESTI2003580, TESTI2003589, TESTI2003596, TESTI2003598, TESTI2003615, TESTI2003625, TESTI2003638, TESTI2003649, TESTI2003692, TESTI2003718, TESTI2003727, TESTI2003756, TESTI2003768, TESTI2003781, TESTI2003787, TESTI2003824, TESTI2003827, TESTI2003894, TESTI2003911, TESTI2003914, TESTI2003940, TESTI2003962, TESTI2003998, TESTI2004000, TESTI2004073, TESTI2004080, TESTI2004085, TESTI2004089, TESTI2004111, TESTI2004119, TESTI2004122, TESTI2004153, TESTI2004163, TESTI2004169, TESTI2004207, TESTI2004215, TESTI2004227, TESTI2004229, TESTI2004243, TESTI2004255, TESTI2004287, TESTI2004313, TESTI2004318, TESTI2004322, TESTI2004391, TESTI2004399, TESTI2004423, TESTI2004431, TESTI2004432, TESTI2004452, TESTI2004459, TESTI2004490, TESTI2004539, TESTI2004552, TESTI2004560, TESTI2004574, TESTI2004601, TESTI2004611, TESTI2004649, TESTI2004654, TESTI2004675, TESTI2004687, TESTI2004689, TESTI2004700, TESTI2004706, TESTI2004712, TESTI2004734, TESTI2004783, TESTI2004791, TESTI2004793, TESTI2004860, TESTI2004906, TESTI2004920, TESTI2004936, TESTI2004941, TESTI2004971, TESTI2004982, TESTI2004993, TESTI2004994, TESTI2004999, TESTI2005017, TESTI2005025, TESTI2005040, TESTI2005060, TESTI2005072, TESTI2005085, TESTI2005112, TESTI2005120, TESTI2005153, TESTI2005155, TESTI2005173, TESTI2005267, TESTI2005268, TESTI2005280, TESTI2005307, TESTI2005326, TESTI2005363, TESTI2005376, TESTI2005378, TESTI2005380, TESTI2005391, TESTI2005395, TESTI2005396, TESTI2005408, TESTI2005415, TESTI2005470, TESTI2005492, TESTI2005564, TESTI2005568, TESTI2005584, TESTI2005588, TESTI2005590, TESTI2005603, TESTI2005609, TESTI2005610, TESTI2005630, TESTI2005672, TESTI2005683, TESTI2005690, TESTI2005692, TESTI2005703, TESTI2005720, TESTI2005739, TESTI2005742, TESTI2005743, TESTI2005767, TESTI2005775, TESTI2005784, TESTI2005788, TESTI2005827, TESTI2005835, TESTI2005860, TESTI2005892, TESTI2005911, TESTI2005933, TESTI2005937, TESTI2005948, TESTI2005979, TESTI2005981, TESTI2005982, TESTI2005984, TESTI2005986, TESTI2005987, TESTI2006007, TESTI2006008, TESTI2006015, TESTI2006016, TESTI2006035, TESTI2006040, TESTI2006041, TESTI2006045, TESTI2006067, TESTI2006083, TESTI2006097, TESTI2006109, TESTI2006120, TESTI2006125, TESTI2006179, TESTI2006209, TESTI2006210, TESTI2006212, TESTI2006218, TESTI2006238, TESTI2006255, TESTI2006258, TESTI2006278, TESTI2006333, TESTI2006341, TESTI2006360, TESTI2006383, TESTI2006409, TESTI2006425, TESTI2006437, TESTI2006453, TESTI2006457, TESTI2006460, TESTI2006465, TESTI2006483, TESTI2006499, TESTI2006523, TESTI2006543, TESTI2006565, TESTI2006572, TESTI2006615, TESTI2006617, TESTI2006624, TESTI2006628, TESTI2006633, TESTI2006643, TESTI2006648, TESTI2006659, TESTI2006660, TESTI2006665, TESTI2006667, TESTI2006677, TESTI2006720, TESTI2006735, TESTI2006744, TESTI2006748, TESTI2006774, TESTI2006853, TESTI2006866, TESTI2006872, TESTI2006877, TESTI2006879, TESTI2006894, TESTI2006940, TESTI2006955, TESTI2006978, TESTI2006979, TESTI2006990, TESTI2007040, TESTI2007074, TESTI2007078, TESTI2007113, TESTI2007152, TESTI2007163, TESTI2007183, TESTI2007220, TESTI2007234, TESTI2007311, TESTI2007320, TESTI2007346, TESTI2007358, TESTI2007402, TESTI2007405, TESTI2007422, TESTI2007452, TESTI2007464, TESTI2007466, TESTI2007480, TESTI2007490, TESTI2007502, TESTI2007524, TESTI2007533, TESTI2007576, TESTI2007613, TESTI2007657, TESTI2007685, TESTI2007692, TESTI2007749, TESTI2007750, TESTI2007808, TESTI2007814, TESTI2007829, TESTI2007864, TESTI2007867, TESTI2007872, TESTI2007906, TESTI2007922, TESTI2007951, TESTI2007972, TESTI2007973, TESTI2007998, TESTI2008014, TESTI2008020, TESTI2008032, TESTI2008033, TESTI2008046, TESTI2008081, TESTI2008099, TESTI2008139, TESTI2008144, TESTI2008161, TESTI2008189, TESTI2008204, TESTI2008219, TESTI2008233, TESTI2008234, TESTI2008237, TESTI2008278, TESTI2008320, TESTI2008331, TESTI2008343, TESTI2008387, TESTI2008389, TESTI2008394, TESTI2008405, TESTI2008420, TESTI2008425, TESTI2008440, TESTI2008567, TESTI2008595, TESTI2008621, TESTI2008636, TESTI2008657, TESTI2008684, TESTI2008699, TESTI2008715, TESTI2008762, TESTI2008774, TESTI2008786, TESTI2008822, TESTI2008840, TESTI2008847, TESTI2008884, TESTI2008901, TESTI2008929, TESTI2008946, TESTI2008960, TESTI2009018, TESTI2009091, TESTI2009097, TESTI2009136, TESTI2009185, TESTI2009190, TESTI2009217, TESTI2009239, TESTI2009325, TESTI2009388, TESTI2009390, TESTI2009400, TESTI2009402, TESTI2009412, TESTI2009423, TESTI2009447, TESTI2009462, TESTI2009474, TESTI2009477, TESTI2009497, TESTI2009502, TESTI2009511, TESTI2009544, TESTI2009545, TESTI2009551, TESTI2009585, TESTI2009588, TESTI2009683, TESTI2009727, TESTI2009739, TESTI2009812, TESTI2009835, TESTI2009853, TESTI2009935, TESTI2009977, TESTI2009987, TESTI2010009, TESTI2010154, TESTI2010180, TESTI2010239, TESTI2010280, TESTI2010354, TESTI2010396, TESTI2010400, TESTI2010409, TESTI2010572, TESTI2010587, TESTI2010591, TESTI2010617, TESTI2010682, TESTI2010724, TESTI2010732, TESTI2010734, TESTI2010755, TESTI2010793, TESTI2010806, TESTI2010833, TESTI2010872, TESTI2011009, TESTI2011020, TESTI2011028, TESTI2011033, TESTI2011254, TESTI2011286, TESTI2011294, TESTI2011314, TESTI2011315, TESTI2011394, TESTI2011407, TESTI2011448, TESTI2011480, TESTI2011549, TESTI2011575, TESTI2011605, TESTI2011612, TESTI2011665, TESTI2011680, TESTI2011712, TESTI2011750, TESTI2011840, TESTI2011846, TESTI2011915, TESTI2011928, TESTI2011971, TESTI2012019, TESTI2012050, TESTI2012090, TESTI2012095, TESTI2012104, TESTI2012152, TESTI2012155, TESTI2012171, TESTI2012207, TESTI2012231, TESTI2012244, TESTI2012289, TESTI2012308, TESTI2012356, TESTI2012387, TESTI2012394, TESTI2012444, TESTI2012511, TESTI2012528, TESTI2012544, TESTI2012550, TESTI2012571, TESTI2012592, TESTI2012617, TESTI2012628, TESTI2012778, TESTI2012812, TESTI2012834, TESTI2012835, TESTI2012861, TESTI2012900, TESTI2012915, TESTI2012922, TESTI2013001, TESTI2013012, TESTI2013053, TESTI2013144, TESTI2013163, TESTI2013169, TESTI2013212, TESTI2013231, TESTI2013257, TESTI2013264, TESTI2013268, TESTI2013295, TESTI2013322, TESTI2013381, TESTI2013382, TESTI2013401, TESTI2013427, TESTI2013468, TESTI2013497, TESTI2013545, TESTI2013546, TESTI2013566, TESTI2013601, TESTI2013604, TESTI2013607, TESTI2013610, TESTI2013691, TESTI2013699, TESTI2013737, TESTI2013767, TESTI2013832, TESTI2013873, TESTI2013889, TESTI2014007, TESTI2014036, TESTI2014097, TESTI2014160, TESTI2014248, TESTI2014254, TESTI2014269, TESTI2014274, TESTI2014318, TESTI2014324, TESTI2014339, TESTI2014362, TESTI2014385, TESTI2014415, TESTI2014439, TESTI2014474, TESTI2014505, TESTI2014577, TESTI2014578, TESTI2014716, TESTI2014780, TESTI2014800, TESTI2014843, TESTI2014979, TESTI2014988, TESTI2015042, TESTI2015092, TESTI2015105, TESTI2015180, TESTI2015246, TESTI2015249, TESTI2015327, TESTI2015331, TESTI2015335, TESTI2015350, TESTI2015375, TESTI2015437, TESTI2015590, TESTI2015610, TESTI2015647, TESTI2015675, TESTI2015710, TESTI2015752, TESTI2015830, TESTI2015914, TESTI2015938, TESTI2015947, TESTI2015962, TESTI2015987, TESTI2016033, TESTI2016046, TESTI2016101, TESTI2016162, TESTI2016197, TESTI2016278, TESTI2016298, TESTI2016331, TESTI2016337, TESTI2016410, TESTI2016421, TESTI2016509, TESTI2016568, TESTI2016583, TESTI2016599, TESTI2016629, TESTI2016663, TESTI2016667, TESTI2016688, TESTI2016701, TESTI2016758, TESTI2016848, TESTI2016863, TESTI2016888, TESTI2016896, TESTI2016922, TESTI2016942, TESTI2016950, TESTI2016996, TESTI2017017, TESTI2017028, TESTI2017035, TESTI2017069, TESTI2017089, TESTI2017102, TESTI2017107, TESTI2017113, TESTI2017125, TESTI2017256, TESTI2017305, TESTI2017311, TESTI2017396, TESTI2017507, TESTI2017537, TESTI2017582, TESTI2017584, TESTI2017645, TESTI2017727, TESTI2017740, TESTI2017775, TESTI2017816, TESTI2017832, TESTI2017923, TESTI2017932, TESTI2017951, TESTI2018014, TESTI2018031, TESTI2018035, TESTI2018060, TESTI2018083, TESTI2018178, TESTI2018221, TESTI2018276, TESTI2018290, TESTI2018335, TESTI2018337, TESTI2018368, TESTI2018421, TESTI2018428, TESTI2018475, TESTI2018482, TESTI2018521, TESTI2018565, TESTI2018581, TESTI2018611, TESTI2018687, TESTI2018697, TESTI2018838, TESTI2018867, TESTI2018941, TESTI2018957, TESTI2018974, TESTI2018975, TESTI2018997, TESTI2019042, TESTI2019077, TESTI2019228, TESTI2019257, TESTI2019280, TESTI2019282, TESTI2019308, TESTI2019336, TESTI2019352, TESTI2019406, TESTI2019430, TESTI2019455, TESTI2019481, TESTI2019488, TESTI2019501, TESTI2019648, TESTI2019669, TESTI2019697, TESTI2019729, TESTI2019760, TESTI2019787, TESTI2019794, TESTI2019854, TESTI2019859, TESTI2019860, TESTI2019872, TESTI2019911, TESTI2019917, TESTI2019975, TESTI2019998, TESTI2020012, TESTI2020026, TESTI2020029, TESTI2020071, TESTI2020084, TESTI2020265, TESTI2020283, TESTI2020316, TESTI2020344, TESTI2020379, TESTI2020426, TESTI2020445, TESTI2020510, TESTI2020515, TESTI2020525, TESTI2020579, TESTI2020717, TESTI2020840, TESTI2020905, TESTI2020906, TESTI2020946, TESTI2020956, TESTI2020981, TESTI2020999, TESTI2021003, TESTI2021038, TESTI2021057, TESTI2021077, TESTI2021112, TESTI2021114, TESTI2021116, TESTI2021118, TESTI2021122, TESTI2021138, TESTI2021297, TESTI2021315, TESTI2021447, TESTI2021463, TESTI2021531, TESTI2021599, TESTI2021637, TESTI2021654, TESTI2021667, TESTI2021736, TESTI2021785, TESTI2021819, TESTI2021851, TESTI2021895, TESTI2021911, TESTI2021939, TESTI2021999, TESTI2022010, TESTI2022023, TESTI2022065, TESTI2022086, TESTI2022179, TESTI2022203, TESTI2022246, TESTI2022323, TESTI2022338, TESTI2022400, TESTI2022462, TESTI2022495, TESTI2022623, TESTI2022649, TESTI2022652, TESTI2022738, TESTI2022798, TESTI2022812, TESTI2022814, TESTI2022874, TESTI2022940, TESTI2022952, TESTI2023025, TESTI2023033, TESTI2023053, TESTI2023085, TESTI2023192, TESTI2023194, TESTI2023214, TESTI2023254, TESTI2023386, TESTI2023414, TESTI2023427, TESTI2023436, TESTI2023599, TESTI2023752, TESTI2023800, TESTI2023861, TESTI2023903, TESTI2023942, TESTI2023947, TESTI2023951, TESTI2023968, TESTI2024009, TESTI2024090, TESTI2024125, TESTI2024153, TESTI2024192, TESTI2024267, TESTI2024283, TESTI2024299, TESTI2024419, TESTI2024422, TESTI2024443, TESTI2024446, TESTI2024473, TESTI2024476, TESTI2024498, TESTI2024560, TESTI2024567, TESTI2024586, TESTI2024598, TESTI2024641, TESTI2024648, TESTI2024718, TESTI2024744, TESTI2024844, TESTI2024864, TESTI2024885, TESTI2024936, TESTI2024978, TESTI2024999, TESTI2025006, TESTI2025013, TESTI2025022, TESTI2025063, TESTI2025117, TESTI2025144, TESTI2025161, TESTI2025174, TESTI2025229, TESTI2025269, TESTI2025365, TESTI2025403, TESTI2025409, TESTI2025422, TESTI2025448, TESTI2025454, TESTI2025486, TESTI2025546, TESTI2025582, TESTI2025609, TESTI2025656, TESTI2025757, TESTI2025791, TESTI2025846, TESTI2025872, TESTI2025879, TESTI2025911, TESTI2025920, TESTI2025924, TESTI2026014, TESTI2026024, TESTI2026064, TESTI2026077, TESTI2026104, TESTI2026116, TESTI2026134, TESTI2026168, TESTI2026196, TESTI2026215, TESTI2026218, TESTI2026233, TESTI2026291, TESTI2026294, TESTI2026401, TESTI2026403, TESTI2026453, TESTI2026461, TESTI2026491, TESTI2026505, TESTI2026515, TESTI2026525, TESTI2026534, TESTI2026537, TESTI2026589, TESTI2026597, TESTI2026605, TESTI2026647, TESTI2026674, TESTI2026794, TESTI2026824, TESTI2026854, TESTI2026925, TESTI2026936, TESTI2026957, TESTI2027013, TESTI2027019, TESTI2027108, TESTI2027171, TESTI2027173, TESTI2027179, TESTI2027185, TESTI2027206, TESTI2027238, TESTI2027239, TESTI2027243, TESTI2027271, TESTI2027296, TESTI2027378, TESTI2027411, TESTI2027450, TESTI2027496, TESTI2027503, TESTI2027562, TESTI2027615, TESTI2027645, TESTI2027730, TESTI2027736, TESTI2027791, TESTI2027820, TESTI2027828, TESTI2027840, TESTI2027909, TESTI2028098, TESTI2028151, TESTI2028242, TESTI2028253, TESTI2028254, TESTI2028269, TESTI2028290, TESTI2028296, TESTI2028384, TESTI2028426, TESTI2028488, TESTI2028523, TESTI2028583, TESTI2028613, TESTI2028659, TESTI2028662, TESTI2028670, TESTI2028705, TESTI2028776, TESTI2028811, TESTI2028891, TESTI2028985, TESTI2028997, TESTI2029131, TESTI2029162, TESTI2029196, TESTI2029201, TESTI2029227, TESTI2029244, TESTI2029249, TESTI2029252, TESTI2029264, TESTI2029470, TESTI2029672, TESTI2029785, TESTI2029880, TESTI2030136, TESTI2030322, TESTI2030336, TESTI2030342, TESTI2030519, TESTI2030554, TESTI2030556, TESTI2030728, TESTI2030754, TESTI2030770, TESTI2030860, TESTI2030901, TESTI2030917, TESTI2030930, TESTI2031006, TESTI2031007, TESTI2031060, TESTI2031129, TESTI2031356, TESTI2031418, TESTI2031504, TESTI2031529, TESTI2031687, TESTI2031760, TESTI2031809, TESTI2031919, TESTI2031935, TESTI2031986, TESTI2032044, TESTI2032067, TESTI2032079, TESTI2032643, TESTI2032681, TESTI2032761, TESTI2032768, TESTI2032774, TESTI2032828, TESTI2033031, TESTI2033242, TESTI2033254, TESTI2033300, TESTI2033395, TESTI2033453, TESTI2033505, TESTI2033520, TESTI2033641, TESTI2033710, TESTI2033905, TESTI2034187, TESTI2034243, TESTI2034249, TESTI2034307, TESTI2034357, TESTI2034401, TESTI2034407, TESTI2034506, TESTI2034520, TESTI2034718, TESTI2034730, TESTI2034749, TESTI2034767, TESTI2034774, TESTI2034777, TESTI2034785, TESTI2034799, TESTI2034847, TESTI2034913, TESTI2034916, TESTI2034931, TESTI2034953, TESTI2034997, TESTI2035003, TESTI2035078, TESTI2035084, TESTI2035107, TESTI2035121, TESTI2035124, TESTI2035183, TESTI2035236, TESTI2035262, TESTI2035309, TESTI2035688, TESTI2035775, TESTI2035793, TESTI2035898, TESTI2035962, TESTI2035981, TESTI2035997, TESTI2036114, TESTI2036129, TESTI2036285, TESTI2036288, TESTI2036513, TESTI2036589, TESTI2036650, TESTI2036684, TESTI2036691, TESTI2036736, TESTI2036822, TESTI2036833, TESTI2036922, TESTI2036951, TESTI2036965, TESTI2037002, TESTI2037055, TESTI2037081, TESTI2037085, TESTI2037103, TESTI2037106, TESTI2037111, TESTI2037209, TESTI2037255, TESTI2037359, TESTI2037375, TESTI2037382, TESTI2037534, TESTI2037569, TESTI2037572, TESTI2037643, TESTI2037657, TESTI2037673, TESTI2037723, TESTI2037819, TESTI2037830, TESTI2037845, TESTI2037877, TESTI2037976, TESTI2038048, TESTI2038065, TESTI2038104, TESTI2038275, TESTI2038388, TESTI2038573, TESTI2038596, TESTI2038623, TESTI2038644, TESTI2038733, TESTI2038858, TESTI2038958, TESTI2039025, TESTI2039026, TESTI2039038, TESTI2039041, TESTI2039060, TESTI2039113, TESTI2039121, TESTI2039209, TESTI2039225, TESTI2039227, TESTI2039276, TESTI2039342, TESTI2039353, TESTI2039544, TESTI2039613, TESTI2039707, TESTI2039732, TESTI2039738, TESTI2039776, TESTI2039867, TESTI2039908, TESTI2040018, TESTI2040094, TESTI2040102, TESTI2040128, TESTI2040143, TESTI2040297, TESTI2040372, TESTI2040377, TESTI2040424, TESTI2040642, TESTI2040815, TESTI2040897, TESTI2040944, TESTI2040964, TESTI2040983, TESTI2040989, TESTI2041330, TESTI2041362, TESTI2041517, TESTI2041564, TESTI2041664, TESTI2041730, TESTI2041734, TESTI2041778, TESTI2041800, TESTI2041947, TESTI2041956, TESTI2041976, TESTI2042062, TESTI2042149, TESTI2042264, TESTI2042295, TESTI2042302, TESTI2042326, TESTI2042400, TESTI2042450, TESTI2042473, TESTI2042507, TESTI2042508, TESTI2042750, TESTI2042783, TESTI2042806, TESTI2042928, TESTI2042946, TESTI2042958, TESTI2043275, TESTI2043277, TESTI2043282, TESTI2043313, TESTI2043477, TESTI2043585, TESTI2043758, TESTI2043817, TESTI2043857, TESTI2043866, TESTI2043869, TESTI2044064, TESTI2044118, TESTI2044194, TESTI2044276, TESTI2044306, TESTI2044309, TESTI2044413, TESTI2044418, TESTI2044754, TESTI2044796, TESTI2044833, TESTI2044892, TESTI2044920, TESTI2044968, TESTI2045139, TESTI2045155, TESTI2045171, TESTI2045199, TESTI2045353, TESTI2045509, TESTI2045562, TESTI2045611, TESTI2045819, TESTI2045850, TESTI2045920, TESTI2045964, TESTI2045983, TESTI2046100, TESTI2046188, TESTI2046347, TESTI2046352, TESTI2046358, TESTI2046439, TESTI2046535, TESTI2046536, TESTI2046552, TESTI2046569, TESTI2046686, TESTI2046721, TESTI2046732, TESTI2046786, TESTI2046797, TESTI2046863, TESTI2046872, TESTI2047071, TESTI2047141, TESTI2047147, TESTI2047153, TESTI2047212, TESTI2047342, TESTI2047383, TESTI2047792, TESTI2047801, TESTI2047818, TESTI2047824, TESTI2047885, TESTI2047930, TESTI2048105, TESTI2048109, TESTI2048465, TESTI2048603, TESTI2048898, TESTI2049041, TESTI2049062, TESTI2049206, TESTI2049246, TESTI2049277, TESTI2049422, TESTI2049452, TESTI2049469, TESTI2049553, TESTI2049576, TESTI2049857, TESTI2049956, TESTI2050137, TESTI2050681, TESTI2050780, TESTI2050987, TESTI2051148, TESTI2051177, TESTI2051279, TESTI2051488, TESTI2051543, TESTI2051627, TESTI2051742, TESTI2051767, TESTI2051791, TESTI2051806, TESTI2051867, TESTI2051873, TESTI2052110, TESTI2052202, TESTI2052211, TESTI2052256, TESTI2052288, TESTI2052525, TESTI2052670, TESTI2052693, TESTI2052698, TESTI2052799, TESTI2052822, TESTI2052985, TESTI2053151, TESTI2053242, TESTI2053399, TESTI2053526, TESTI2053561, TESTI2053621, TESTI2053667, TESTI3000002, TESTI3000005, TESTI4000068, TESTI4000079, TESTI4000093, TESTI4000134, TESTI4000137, TESTI4000153, TESTI4000155, TESTI4000157, TESTI4000183, TESTI4000214, TESTI4000215, TESTI4000228, TESTI4000250, TESTI4000288, TESTI4000319, TESTI4000349, TESTI4000370, TESTI4000394, TESTI4000434, TESTI4000462, TESTI4000530, TESTI4000534, TESTI4000598, TESTI4000600, TESTI4000621, TESTI4000703, TESTI4000724, TESTI4000957, TESTI4000970, TESTI4001036, TESTI4001037, TESTI4001060, TESTI4001106, TESTI4001148, TESTI4001176, TESTI4001195, TESTI4001201, TESTI4001206, TESTI4001348, TESTI4001441, TESTI4001473, TESTI4001517, TESTI4001527, TESTI4001561, TESTI4001569, TESTI4001604, TESTI4001665, TESTI4001679, TESTI4001795, TESTI4001923, TESTI4001925, TESTI4001984, TESTI4002003, TESTI4002141, TESTI4002202, TESTI4002290, TESTI4002319, TESTI4002491, TESTI4002520, TESTI4002552, TESTI4002647, TESTI4002703, TESTI4002754, TESTI4002868, TESTI4002878, TESTI4002889, TESTI4002988, TESTI4003150, TESTI4003179, TESTI4003279, TESTI4003319, TESTI4003404, TESTI4003565, TESTI4003574, TESTI4003579, TESTI4003602, TESTI4003733, TESTI4003796, TESTI4004003, TESTI4004031, TESTI4004200, TESTI4004210, TESTI4004539, TESTI4004626, TESTI4004653, TESTI4004695, TESTI4004722, TESTI4004887, TESTI4004917, TESTI4005015, TESTI4005039, TESTI4005133, TESTI4005158, TESTI4005317, TESTI4005322, TESTI4005470, TESTI4005500, TESTI4005543, TESTI4005628, TESTI4005801, TESTI4005805, TESTI4005857, TESTI4005961, TESTI4006053, TESTI4006079, TESTI4006112, TESTI4006137, TESTI4006148, TESTI4006219, TESTI4006234, TESTI4006308, TESTI4006326, TESTI4006393, TESTI4006407, TESTI4006412, TESTI4006420, TESTI4006441, TESTI4006473, TESTI4006539, TESTI4006546, TESTI4006567, TESTI4006704, TESTI4006728, TESTI4006802, TESTI4006819, TESTI4007064, TESTI4007163, TESTI4007176, TESTI4007203, TESTI4007239, TESTI4007369, TESTI4007373, TESTI4007382, TESTI4007404, TESTI4007489, TESTI4007565, TESTI4007671, TESTI4007775, TESTI4007778, TESTI4007799, TESTI4007810, TESTI4007816, TESTI4007965, TESTI4008007, TESTI4008018, TESTI4008050, TESTI4008058, TESTI4008086, TESTI4008097, TESTI4008176, TESTI4008209, TESTI4008219, TESTI4008250, TESTI4008302, TESTI4008305, TESTI4008401, TESTI4008417, TESTI4008429, TESTI4008573, TESTI4008816, TESTI4008840, TESTI4008935, TESTI4008993, TESTI4009022, TESTI4009028, TESTI4009034, TESTI4009123, TESTI4009160, TESTI4009215, TESTI4009283, TESTI4009306, TESTI4009374, TESTI4009406, TESTI4009454, TESTI4009457, TESTI4009501, TESTI4009563, TESTI4009608, TESTI4009638, TESTI4009752, TESTI4009881, TESTI4009886, TESTI4009928, TESTI4010076, TESTI4010082, TESTI4010095, TESTI4010211, TESTI4010377, TESTI4010475, TESTI4010544, TESTI4010713, TESTI4010721, TESTI4010789, TESTI4010817, TESTI4010831, TESTI4010851, TESTI4010902, TESTI4010928, TESTI4010979, TESTI4011070, TESTI4011072, TESTI4011084, TESTI4011118, TESTI4011246, TESTI4011484, TESTI4011505, TESTI4011532, TESTI4011616, TESTI4011744, TESTI4011745, TESTI4011829, TESTI4011926, TESTI4011956, TESTI4012010, TESTI4012086, TESTI4012258, TESTI4012293, TESTI4012329, TESTI4012382, TESTI4012406, TESTI4012448, TESTI4012451, TESTI4012505, TESTI4012556, TESTI4012623, TESTI4012646, TESTI4012679, TESTI4012911, TESTI4012956, TESTI4012960, TESTI4013365, TESTI4013369, TESTI4013410, TESTI4013474, TESTI4013602, TESTI4013667, TESTI4013685, TESTI4013735, TESTI4013742, TESTI4013774, TESTI4013817, TESTI4013830, TESTI4013852, TESTI4013924, TESTI4013960, TESTI4013962, TESTI4014175, TESTI4014265, TESTI4014276, TESTI4014306, TESTI4014392, TESTI4014415, TESTI4014445, TESTI4014553, TESTI4014661, TESTI4014694, TESTI4014801, TESTI4014818, TESTI4014891, TESTI4014908, TESTI4014924, TESTI4014932, TESTI4014977, TESTI4015012, TESTI4015129, TESTI4015145, TESTI4015204, TESTI4015263, TESTI4015293, TESTI4015299, TESTI4015339, TESTI4015398, TESTI4015442, TESTI4015471, TESTI4015477, TESTI4015600, TESTI4015646, TESTI4015681, TESTI4015688, TESTI4015790, TESTI4016110, TESTI4016238, TESTI4016551, TESTI4016812, TESTI4016822, TESTI4016865, TESTI4016882, TESTI4016925, TESTI4017001, TESTI4017116, TESTI4017137, TESTI4017229, TESTI4017254, TESTI4017269, TESTI4017380, TESTI4017382, TESTI4017543, TESTI4017575, TESTI4017647, TESTI4017714, TESTI4017763, TESTI4017848, TESTI4017854, TESTI4011901, TESTI4017961, TESTI4017984, TESTI4018101, TESTI4018152, TESTI4018208, TESTI4018382, TESTI4018436, TESTI4018506, TESTI4018555, TESTI4018751, TESTI4018806, TESTI4018835, TESTI4018859, TESTI4018881, TESTI4018938, TESTI4019140, TESTI4019149, TESTI4019299, TESTI4019417, TESTI4019440, TESTI4019566, TESTI4019657, TESTI4019756, TESTI4019843, TESTI4020092, TESTI4020102, TESTI4020342, TESTI4020460, TESTI4020596, TESTI4020806, TESTI4020819, TESTI4020920, TESTI4021129, TESTI4021197, TESTI4021294, TESTI4021377, TESTI4021456, TESTI4021491, TESTI4021569, TESTI4021713, TESTI4021821, TESTI4022158, TESTI4022577, TESTI4022716, TESTI4022873, TESTI4023096, TESTI4023172, TESTI4023546, TESTI4023555, TESTI4023654, TESTI4023722, TESTI4023762, TESTI4023942, TESTI4024096, TESTI4024240, TESTI4024294, TESTI4024344, TESTI4024387, TESTI4024420, TESTI4024494, TESTI4024740, TESTI4024874, TESTI4024890, TESTI4024907, TESTI4024930, TESTI4025062, TESTI4025268, TESTI4025401, TESTI4025494, TESTI4025547, TESTI4025731, TESTI4025797, TESTI4025865, TESTI4025908, TESTI4025920, TESTI4026079, TESTI4026080, TESTI4026192, TESTI4026207, TESTI4026295, TESTI4026390, TESTI4026456, TESTI4026510, TESTI4026524, TESTI4026680, TESTI4026700, TESTI4026762, TESTI4026785, TESTI4027139, TESTI4027170, TESTI4027262, TESTI4027516, TESTI4027557, TESTI4027660, TESTI4027821, TESTI4027969, TESTI4028042, TESTI4028059, TESTI4028062, TESTI4028182, TESTI4028429, TESTI4028612, TESTI4028692, TESTI4028809, TESTI4028823, TESTI4028880, TESTI4028904, TESTI4028938, TESTI4028958, TESTI4028983, TESTI4029023, TESTI4029348, TESTI4029370, TESTI4029528, TESTI4029651, TESTI4029676, TESTI4029690, TESTI4029731, TESTI4029743, TESTI4030069, TESTI4030159, TESTI4030319, TESTI4030505, TESTI4030603, TESTI4030669, TESTI4030673, TESTI4030864, TESTI4031066, TESTI4031173, TESTI4031335, TESTI4031745, TESTI4031818, TESTI4032090, TESTI4032112, TESTI4032128, TESTI4032270, TESTI4032375, TESTI4032834, TESTI4032856, TESTI4032895, TESTI4032913, TESTI4033146, TESTI4033177, TESTI4033433, TESTI4033690, TESTI4034172, TESTI4034212, TESTI4034432, TESTI4034495, TESTI4034632, TESTI4034633, TESTI4034912, TESTI4034973, TESTI4035063, TESTI4035065, TESTI4035498, TESTI4035508, TESTI4035581, TESTI4035602, TESTI4035637, TESTI4035649, TESTI4035770, TESTI4035872, TESTI4035895, TESTI4035898, TESTI4035989, TESTI4036012, TESTI4036042, TESTI4036048, TESTI4036315, TESTI4036319, TESTI4036449, TESTI4036767, TESTI4036909, TESTI4037066, TESTI4037188, TESTI4037228, TESTI4037244, TESTI4037727, TESTI4037949, TESTI4038047, TESTI4038099, TESTI4038156, TESTI4038223, TESTI4038258, TESTI4038339, TESTI4038492, TESTI4038721, TESTI4038758, TESTI4038779, TESTI4038818, TESTI4039038, TESTI4039086, TESTI4039451, TESTI4039575, TESTI4039659, TESTI4039744, TESTI4039904, TESTI4040197, TESTI4040363, TESTI4040535, TESTI4040559, TESTI4040598, TESTI4040800, TESTI4040804, TESTI4040939, TESTI4040956, TESTI4041049, TESTI4041053, TESTI4041086, TESTI4041099, TESTI4041143, TESTI4041482, TESTI4041519, TESTI4041624, TESTI4041629, TESTI4041832, TESTI4041844, TESTI4041903, TESTI4041954, TESTI4041984, TESTI4041985, TESTI4041986, TESTI4042098, TESTI4042420, TESTI4042440, TESTI4042444, TESTI4042711, TESTI4042846, TESTI4043067, TESTI4043129, TESTI4043140, TESTI4043166, TESTI4043203, TESTI4043223, TESTI4043371, TESTI4043378, TESTI4043512, TESTI4043551, TESTI4043710, TESTI4043947, TESTI4044035, TESTI4044076, TESTI4044084, TESTI4044123, TESTI4044186, TESTI4044234, TESTI4044291, TESTI4044296, TESTI4044300, TESTI4044682, TESTI4044704, TESTI4044770, TESTI4045168, TESTI4045312, TESTI4045330, TESTI4045470, TESTI4045701, TESTI4045908, TESTI4045955, TESTI4045982, TESTI4046073, TESTI4046090, TESTI4046240, TESTI4046245, TESTI4046253, TESTI4046282, TESTI4046328, TESTI4046450, TESTI4046457, TESTI4046487, TESTI4046502, TESTI4046523, TESTI4046819, TESTI4046873, TESTI4046884, TESTI4046896, TESTI4046903, TESTI4046962, TESTI4047069, TESTI4047119, TESTI4047305, TESTI4047328, TESTI4047437, TESTI4047569, TESTI4047746, TESTI4047808, THYMU1000010, THYMU1000017, THYMU1000025, THYMU1000029, THYMU1000032, THYMU1000033, THYMU1000060, THYMU1000074, THYMU1000098, THYMU1000105, THYMU1000136, THYMU1000144, THYMU1000158, THYMU1000176, THYMU1000179, THYMU1000191, THYMU1000198, THYMU1000217, THYMU1000240, THYMU1000242, THYMU1000291, THYMU1000318, THYMU1000329, THYMU1000331, THYMU1000336, THYMU1000366, THYMU1000382, THYMU1000393, THYMU1000399, THYMU1000426, THYMU1000440, THYMU1000459, THYMU1000473, THYMU1000490, THYMU1000491, THYMU1000496, THYMU1000499, THYMU1000527, THYMU1000532, THYMU1000536, THYMU1000554, THYMU1000558, THYMU1000576, THYMU1000600, THYMU1000677, THYMU1000692, THYMU2000022, THYMU2000032, THYMU2000057, THYMU2000120, THYMU2000138, THYMU2000140, THYMU2000155, THYMU2000162, THYMU2000171, THYMU2000176, THYMU2000179, THYMU2000231, THYMU2000236, THYMU2000276, THYMU2000280, THYMU2000300, THYMU2000317, THYMU2000368, THYMU2000369, THYMU2000418, THYMU2000440, THYMU2000489, THYMU2000492, THYMU2000519, THYMU2000570, THYMU2000602, THYMU2000660, THYMU2000671, THYMU2000672, THYMU2000702, THYMU2000767, THYMU2000775, THYMU2000800, THYMU2000879, THYMU2000932, THYMU2000946, THYMU2000950, THYMU2000971, THYMU2000982, THYMU2000990, THYMU2001018, THYMU2001053, THYMU2001071, THYMU2001090, THYMU2001139, THYMU2001195, THYMU2001202, THYMU2001203, THYMU2001256, THYMU2001270, THYMU2001291, THYMU2001314, THYMU2001325, THYMU2001357, THYMU2001381, THYMU2001443, THYMU2001515, THYMU2001521, THYMU2001556, THYMU2001622, THYMU2001727, THYMU2001819, THYMU2001825, THYMU2001839, THYMU2001868, THYMU2001898, THYMU2001900, THYMU2001916, THYMU2001926, THYMU2001989, THYMU2002023, THYMU2002037, THYMU2002080, THYMU2002109, THYMU2002147, THYMU2002154, THYMU2002157, THYMU2002162, THYMU2002177, THYMU2002203, THYMU2002229, THYMU2002242, THYMU2002338, THYMU2002356, THYMU2002376, THYMU2002384, THYMU2002450, THYMU2002490, THYMU2002548, THYMU2002695, THYMU2002745, THYMU2002756, THYMU2002789, THYMU2002792, THYMU2002841, THYMU2002852, THYMU2002910, THYMU2002950, THYMU2002983, THYMU2003069, THYMU2003107, THYMU2003124, THYMU2003133, THYMU2003166, THYMU2003232, THYMU2003242, THYMU2003249, THYMU2003270, THYMU2003282, THYMU2003287, THYMU2003336, THYMU2003366, THYMU2003397, THYMU2003440, THYMU2003470, THYMU2003479, THYMU2003499, THYMU2003542, THYMU2003632, THYMU2003650, THYMU2003700, THYMU2003760, THYMU2003803, THYMU2003855, THYMU2003907, THYMU2003932, THYMU2004003, THYMU2004008, THYMU2004042, THYMU2004108, THYMU2004111, THYMU2004123, THYMU2004139, THYMU2004169, THYMU2004284, THYMU2004320, THYMU2004336, THYMU2004344, THYMU2004356, THYMU2004452, THYMU2004508, THYMU2004512, THYMU2004635, THYMU2004639, THYMU2004668, THYMU2004677, THYMU2004688, THYMU2004693, THYMU2004733, THYMU2004835, THYMU2004843, THYMU2004906, THYMU2004916, THYMU2004986, THYMU2005001, THYMU2005003, THYMU2005046, THYMU2005134, THYMU2005156, THYMU2005190, THYMU2005225, THYMU2005240, THYMU2005246, THYMU2005270, THYMU2005283, THYMU2005303, THYMU2005321, THYMU2005356, THYMU2005369, THYMU2005439, THYMU2005480, THYMU2005482, THYMU2005507, THYMU2005545, THYMU2005574, THYMU2005576, THYMU2005748, THYMU2005759, THYMU2005807, THYMU2005815, THYMU2005855, THYMU2005881, THYMU2005948, THYMU2005980, THYMU2005997, THYMU2006001, THYMU2006048, THYMU2006098, THYMU2006160, THYMU2006170, THYMU2006252, THYMU2006261, THYMU2006277, THYMU2006303, THYMU2006324, THYMU2006350, THYMU2006357, THYMU2006365, THYMU2006420, THYMU2006468, THYMU2006610, THYMU2006666, THYMU2006712, THYMU2006913, THYMU2006946, THYMU2006965, THYMU2007025, THYMU2007036, THYMU2007060, THYMU2007065, THYMU2007095, THYMU2007112, THYMU2007146, THYMU2007179, THYMU2007258, THYMU2007307, THYMU2007308, THYMU2007339, THYMU2007350, THYMU2007384, THYMU2007493, THYMU2007521, THYMU2007528, THYMU2007530, THYMU2007532, THYMU2007561, THYMU2007571, THYMU2007635, THYMU2007658, THYMU2007667, THYMU2007694, THYMU2007725, THYMU2007729, THYMU2007802, THYMU2007824, THYMU2007854, THYMU2007952, THYMU2007969, THYMU2008035, THYMU2008036, THYMU2008049, THYMU2008072, THYMU2008111, THYMU2008145, THYMU2008149, THYMU2008185, THYMU2008191, THYMU2008207, THYMU2008226, THYMU2008282, THYMU2008321, THYMU2008339, THYMU2008350, THYMU2008351, THYMU2008383, THYMU2008452, THYMU2008643, THYMU2008691, THYMU2008714, THYMU2008727, THYMU2008781, THYMU2008799, THYMU2008876, THYMU2008910, THYMU2008917, THYMU2008928, THYMU2008990, THYMU2008994, THYMU2009023, THYMU2009046, THYMU2009101, THYMU2009104, THYMU2009134, THYMU2009157, THYMU2009181, THYMU2009186, THYMU2009338, THYMU2009425, THYMU2009516, THYMU2009526, THYMU2009546, THYMU2009592, THYMU2009596, THYMU2009792, THYMU2009835, THYMU2009906, THYMU2009948, THYMU2010030, THYMU2010041, THYMU2010046, THYMU2010059, THYMU2010082, THYMU2010161, THYMU2010192, THYMU2010519, THYMU2010637, THYMU2010671, THYMU2010699, THYMU2010705, THYMU2010779, THYMU2010816, THYMU2010831, THYMU2010848, THYMU2011053, THYMU2011063, THYMU2011072, THYMU2011096, THYMU2011118, THYMU2011142, THYMU2011183, THYMU2011257, THYMU2011259, THYMU2011295, THYMU2011308, THYMU2011390, THYMU2011431, THYMU2011447, THYMU2011482, THYMU2011538, THYMU2011548, THYMU2011551, THYMU2011564, THYMU2011573, THYMU2011585, THYMU2011621, THYMU2011666, THYMU2011736, THYMU2011785, THYMU2011806, THYMU2011852, THYMU2011875, THYMU2011881, THYMU2011937, THYMU2011939, THYMU2012002, THYMU2012073, THYMU2012104, THYMU2012113, THYMU2012273, THYMU2012401, THYMU2012492, THYMU2012507, THYMU2012565, THYMU2012574, THYMU2012625, THYMU2012631, THYMU2012665, THYMU2012690, THYMU2012701, THYMU2012807, THYMU2012826, THYMU2012882, THYMU2012891, THYMU2012902, THYMU2012919, THYMU2013023, THYMU2013047, THYMU2013051, THYMU2013089, THYMU2013136, THYMU2013170, THYMU2013364, THYMU2013386, THYMU2013426, THYMU2013578, THYMU2013648, THYMU2013705, THYMU2013757, THYMU2013779, THYMU2013863, THYMU2013950, THYMU2013981, THYMU2014067, THYMU2014068, THYMU2014167, THYMU2014183, THYMU2014204, THYMU2014297, THYMU2014323, THYMU2014327, THYMU2014353, THYMU2014492, THYMU2014500, THYMU2014599, THYMU2014762, THYMU2014777, THYMU2014801, THYMU2014901, THYMU2014923, THYMU2015019, THYMU2015161, THYMU2015316, THYMU2015439, THYMU2015441, THYMU2015479, THYMU2015762, THYMU2015775, THYMU2015825, THYMU2015918, THYMU2015943, THYMU2015984, THYMU2016113, THYMU2016164, THYMU2016204, THYMU2016219, THYMU2016360, THYMU2016496, THYMU2016523, THYMU2016840, THYMU2016968, THYMU2017008, THYMU2017010, THYMU2017023, THYMU2017085, THYMU2017099, THYMU2017158, THYMU2017162, THYMU2017215, THYMU2017362, THYMU2017366, THYMU2017398, THYMU2017449, THYMU2017479, THYMU2017522, THYMU2017526, THYMU2017601, THYMU2017675, THYMU2017707, THYMU2017831, THYMU2017844, THYMU2017878, THYMU2017948, THYMU2018028, THYMU2018071, THYMU2018126, THYMU2018189, THYMU2018197, THYMU2018384, THYMU2018455, THYMU2018547, THYMU2018565, THYMU2018639, THYMU2018673, THYMU2018721, THYMU2018772, THYMU2018819, THYMU2018841, THYMU2018997, THYMU2019054, THYMU2019197, THYMU2019210, THYMU2019364, THYMU2019436, THYMU2019442, THYMU2019587, THYMU2019599, THYMU2019686, THYMU2019813, THYMU2020198, THYMU2020289, THYMU2020416, THYMU2020491, THYMU2020499, THYMU2020560, THYMU2020830, THYMU2020883, THYMU2020959, THYMU2021361, THYMU2021509, THYMU2021597, THYMU2021714, THYMU2022213, THYMU2022289, THYMU2022660, THYMU2022854, THYMU2022922, THYMU2023209, THYMU2023264, THYMU2023576, THYMU2023711, THYMU2023900, THYMU2023943, THYMU2023967, THYMU2024121, THYMU2024185, THYMU2024207, THYMU2024616, THYMU2024684, THYMU2024748, THYMU2025042, THYMU2025189, THYMU2025325, THYMU2025406, THYMU2025557, THYMU2025572, THYMU2025707, THYMU2025849, THYMU2025909, THYMU2025939, THYMU2026182, THYMU2026350, THYMU2026530, THYMU2026531, THYMU2026835, THYMU2026904, THYMU2027053, THYMU2027125, THYMU2027168, THYMU2027249, THYMU2027282, THYMU2027497, THYMU2027695, THYMU2027734, THYMU2027894, THYMU2027975, THYMU2027996, THYMU2028041, THYMU2028368, THYMU2028379, THYMU2028394, THYMU2028412, THYMU2028629, THYMU2028632, THYMU2028724, THYMU2028739, THYMU2028942, THYMU2028978, THYMU2029134, THYMU2029578, THYMU2029676, THYMU2029688, THYMU2029788, THYMU2030068, THYMU2030226, THYMU2030264, THYMU2030462, THYMU2030543, THYMU2030637, THYMU2030655, THYMU2030796, THYMU2030912, THYMU2030982, THYMU2031046, THYMU2031139, THYMU2031218, THYMU2031249, THYMU2031258, THYMU2031341, THYMU2031368, THYMU2031579, THYMU2031847, THYMU2031994, THYMU2032014, THYMU2032035, THYMU2032080, THYMU2032150, THYMU2032155, THYMU2032358, THYMU2032437, THYMU2032601, THYMU2032655, THYMU2032696, THYMU2032715, THYMU2032732, THYMU2032825, THYMU2032976, THYMU2033053, THYMU2033059, THYMU2033079, THYMU2033085, THYMU2033104, THYMU2033227, THYMU2033263, THYMU2033308, THYMU2033401, THYMU2033583, THYMU2033755, THYMU2033787, THYMU2033816, THYMU2034182, THYMU2034279, THYMU2034314, THYMU2034338, THYMU2034374, THYMU2034647, THYMU2035064, THYMU2035078, THYMU2035101, THYMU2035319, THYMU2035321, THYMU2035388, THYMU2035400, THYMU2035554, THYMU2035710, THYMU2036058, THYMU2036105, THYMU2036207, THYMU2036215, THYMU2036252, THYMU2036265, THYMU2036366, THYMU2036459, THYMU2036604, THYMU2036653, THYMU2037081, THYMU2037208, THYMU2037226, THYMU2037233, THYMU2037234, THYMU2037348, THYMU2037406, THYMU2037965, THYMU2038058, THYMU2038189, THYMU2038199, THYMU2038220, THYMU2038301, THYMU2038369, THYMU2038389, THYMU2038615, THYMU2038636, THYMU2038739, THYMU2038772, THYMU2038797, THYMU2038906, THYMU2039305, THYMU2039315, THYMU2039334, THYMU2039350, THYMU2039411, THYMU2039634, THYMU2039719, THYMU2039780, THYMU2039788, THYMU2039989, THYMU2040029, THYMU2040110, THYMU2040114, THYMU2040140, THYMU2040412, THYMU2040427, THYMU2040824, THYMU2040925, THYMU2041007, THYMU2041015, THYMU2041252, THYMU3000028, THYMU3000036, THYMU3000037, THYMU3000082, THYMU3000194, THYMU3000224, THYMU3000269, THYMU3000306, THYMU3000360, THYMU3000390, THYMU3000420, THYMU3000490, THYMU3000504, THYMU3000542, THYMU3000655, THYMU3000776, THYMU3000826, THYMU3000841, THYMU3001077, THYMU3001082, THYMU3001083, THYMU3001133, THYMU3001151, THYMU3001379, THYMU3001593, THYMU3001883, THYMU3001939, THYMU3001991, THYMU3002452, THYMU3002661, THYMU3003007, THYMU3003092, THYMU3003212, THYMU3003309, THYMU3003350, THYMU3003403, THYMU3003565, THYMU3003763, THYMU3003865, THYMU3003958, THYMU3003965, THYMU3004157, THYMU3004628, THYMU3004632, THYMU3004835, THYMU3004866, THYMU3005050, THYMU3005378, THYMU3005407, THYMU3005415, THYMU3005427, THYMU3005482, THYMU3005491, THYMU3005629, THYMU3005696, THYMU3006118, THYMU3006132, THYMU3006168, THYMU3006172, THYMU3006371, THYMU3006485, THYMU3006640, THYMU3006767, THYMU3006811, THYMU3006963, THYMU3007137, THYMU3007308, THYMU3007368, THYMU3007423, THYMU3007559, THYMU3007845, THYMU3008060, THYMU3008105, THYMU3008136, THYMU3008171, THYMU3008216, THYMU3008436, THYMU3008672, THYMU3008883, THYMU3008935, THYMU3009006, THYMU3009255, THYMU3009391, THYMU3009643, THYMU3009755, THYMU3010247, THYMU3011012, THYMU3011081, THYMU3011244, THYMU3011360, THYMU3011534, THYMU3011543, THYMU3011556, THYMU3011717, THYMU3011827, THYMU3012402, THYMU3012907, THYMU3012983, THYMU3013114, THYMU3013197, THYMU3013241, THYMU3013470, THYMU3013785, THYMU3013897, THYMU3014038, THYMU3014173, THYMU3014372, THYMU3014555, THYMU3014620, THYMU3014701, THYMU3015042, THYMU3015457, THYMU3015571, THYMU3015592, THYMU3015625, THYMU3015647, THYMU3015759, THYMU3015962, THYMU3016022, THYMU3016518, THYMU3016797, THYMU3016822, THYMU3016850, THYMU3017562, THYMU3017688, THYMU3017689, THYMU3017761, THYMU3018151, THYMU3018896, THYMU3019095, THYMU3019476, THYMU3019605, THYMU3019916, THYMU3020221, THYMU3020595, THYMU3020713, THYMU3020856, THYMU3020869, THYMU3020970, THYMU3021404, THYMU3021755, THYMU3021900, THYMU3022211, THYMU3022434, THYMU3022528, THYMU3022668, THYMU3022982, THYMU3023107, THYMU3023211, THYMU3023216, THYMU3023394, THYMU3023400, THYMU3023797, THYMU3024164, THYMU3024339, THYMU3024602, THYMU3024879, THYMU3025118, THYMU3025313, THYMU3025642, THYMU3025683, THYMU3025772, THYMU3025865, THYMU3026000, THYMU3026479, THYMU3026532, THYMU3026783, THYMU3026869, THYMU3027251, THYMU3027540, THYMU3027655, THYMU3027671, THYMU3028075, THYMU3028461, THYMU3028702, THYMU3029188, THYMU3029318, THYMU3029421, THYMU3029719, THYMU3029774, THYMU3029832, THYMU3030072, THYMU3030231, THYMU3030706, THYMU3030710, THYMU3030752, THYMU3031146, THYMU3031402, THYMU3031610, THYMU3031612, THYMU3031868, THYMU3031878, THYMU3032032, THYMU3032867, THYMU3033402, THYMU3033626, THYMU3033630, THYMU3033649, THYMU3033754, THYMU3033759, THYMU3034078, THYMU3034099, THYMU3034453, THYMU3034853, THYMU3034867, THYMU3034983, THYMU3036200, THYMU3036310, THYMU3036934, THYMU3036953, THYMU3037052, THYMU3037192, THYMU3037617, THYMU3037772, THYMU3037827, THYMU3037836, THYMU3037856, THYMU3037867, THYMU3037909, THYMU3037980, THYMU3038158, THYMU3038167, THYMU3038214, THYMU3038266, THYMU3038328, THYMU3038347, THYMU3038375, THYMU3038603, THYMU3038687, THYMU3038759, THYMU3038879, THYMU3038970, THYMU3039807, THYMU3039846, THYMU3040068, THYMU3040126, THYMU3040146, THYMU3040168, THYMU3040172, THYMU3040725, THYMU3040746, THYMU3040816, THYMU3040829, THYMU3040830, THYMU3040986, THYMU3041354, THYMU3041386, THYMU3041428, THYMU3041573, THYMU3041603, THYMU3041736, THYMU3041918, THYMU3042075, THYMU3042321, THYMU3042372, THYMU3042758, THYMU3042929, THYMU3043200, THYMU3043327, THYMU3043482, THYMU3043597, THYMU3043688, THYMU3043779, THYMU3043883, THYMU3043993, THYMU3044175, THYMU3044188, THYMU3044441, THYMU3044445, THYMU3045510, THYMU3045673, THYMU3045692, THYMU3045704, THYMU3046140, THYMU3046350, THYMU3046360, THYMU3046856, THYMU3047115, THYMU3047144, THYMU3047156, THYMU3047366, THYMU3047513, THYMU3047542, THYMU3047760, THYMU3047891, TKIDN1000001, TKIDN1000044, TKIDN1000062, TKIDN1000066, TKIDN1000164, TKIDN1000171, TKIDN1000192, TKIDN2000127, TKIDN2000240, TKIDN2000246, TKIDN2000319, TKIDN2000464, TKIDN2000521, TKIDN2000701, TKIDN2001529, TKIDN2001662, TKIDN2002318, TKIDN2002329, TKIDN2002424, TKIDN2002632, TKIDN2002738, TKIDN2003044, TKIDN2003059, TKIDN2003062, TKIDN2003078, TKIDN2003366, TKIDN2003396, TKIDN2003413, TKIDN2003597, TKIDN2003601, TKIDN2004185, TKIDN2004386, TKIDN2004458, TKIDN2004748, TKIDN2005487, TKIDN2005721, TKIDN2005934, TKIDN2005947, TKIDN2005956, TKIDN2006525, TKIDN2006761, TKIDN2006852, TKIDN2007605, TKIDN2007667, TKIDN2007828, TKIDN2008176, TKIDN2008778, TKIDN2009092, TKIDN2009330, TKIDN2009481, TKIDN2009641, TKIDN2009794, TKIDN2009889, TKIDN2010200, TKIDN2010232, TKIDN2010278, TKIDN2010602, TKIDN2010812, TKIDN2010934, TKIDN2011051, TKIDN2011160, TKIDN2011289, TKIDN2011324, TKIDN2012034, TKIDN2012771, TKIDN2012824, TKIDN2013134, TKIDN2013287, TKIDN2014570, TKIDN2014757, TKIDN2014771, TKIDN2014964, TKIDN2015025, TKIDN2015071, TKIDN2015161, TKIDN2015263, TKIDN2015285, TKIDN2015423, TKIDN2015788, TKIDN2016309, TKIDN2016399, TKIDN2016846, TKIDN2018926, TKIDN2019116, TLIVE2000023, TLIVE2000142, TLIVE2000292, TLIVE2000762, TLIVE2000979, TLIVE2001327, TLIVE2001616, TLIVE2001684, TLIVE2001828, TLIVE2001927, TLIVE2002046, TLIVE2002336, TLIVE2002338, TLIVE2002562, TLIVE2002690, TLIVE2002882, TLIVE2003197, TLIVE2003200, TLIVE2003225, TLIVE2003381, TLIVE2003737, TLIVE2003961, TLIVE2003970, TLIVE2004110, TLIVE2004320, TLIVE2004331, TLIVE2004601, TLIVE2005180, TLIVE2005390, TLIVE2005516, TLIVE2005731, TLIVE2005866, TLIVE2006236, TLIVE2006359, TLIVE2006529, TLIVE2006621, TLIVE2006733, TLIVE2007000, TLIVE2007016, TLIVE2007132, TLIVE2007192, TLIVE2007528, TLIVE2007607, TLIVE2007736, TLIVE2007816, TLIVE2007919, TLIVE2008083, TLIVE2008213, TLIVE2008221, TLIVE2008229, TLIVE2008712, TLIVE2008797, TLIVE2009087, TLIVE2009163, TLIVE2009489, TLIVE2009541, TLUNG2000179, TOVAR2000575, TOVAR2000649, TOVAR2000904, TOVAR2001281, TOVAR2001556, TOVAR2001730, TOVAR2002247, TOVAR2002514, TOVAR2002549, TOVAR2002800, TRACH1000011, TRACH1000018, TRACH1000057, TRACH1000074, TRACH1000100, TRACH1000106, TRACH1000125, TRACH1000140, TRACH1000144, TRACH1000193, TRACH1000212, TRACH1000240, TRACH2000002, TRACH2000015, TRACH2000024, TRACH2000032, TRACH2000045, TRACH2000047, TRACH2000081, TRACH2000083, TRACH2000148, TRACH2000185, TRACH2000196, TRACH2000235, TRACH2000243, TRACH2000250, TRACH2000259, TRACH2000272, TRACH2000282, TRACH2000287, TRACH2000289, TRACH2000306, TRACH2000312, TRACH2000336, TRACH2000393, TRACH2000411, TRACH2000420, TRACH2000496, TRACH2000497, TRACH2000502, TRACH2000522, TRACH2000540, TRACH2000559, TRACH2000660, TRACH2000665, TRACH2000675, TRACH2000677, TRACH2000702, TRACH2000703, TRACH2000767, TRACH2000775, TRACH2000807, TRACH2000862, TRACH2000873, TRACH2000894, TRACH2000898, TRACH2000920, TRACH2000923, TRACH2000926, TRACH2000944, TRACH2000972, TRACH2000981, TRACH2000986, TRACH2001037, TRACH2001060, TRACH2001085, TRACH2001101, TRACH2001109, TRACH2001121, TRACH2001147, TRACH2001154, TRACH2001188, TRACH2001249, TRACH2001275, TRACH2001314, TRACH2001335, TRACH2001339, TRACH2001341, TRACH2001347, TRACH2001395, TRACH2001400, TRACH2001403, TRACH2001416, TRACH2001428, TRACH2001474, TRACH2001478, TRACH2001523, TRACH2001525, TRACH2001532, TRACH2001592, TRACH2001607, TRACH2001621, TRACH2001646, TRACH2001651, TRACH2001684, TRACH2001898, TRACH2001933, TRACH2001968, TRACH2001996, TRACH2002043, TRACH2002092, TRACH2002100, TRACH2002138, TRACH2002333, TRACH2002664, TRACH2002784, TRACH2002803, TRACH2002840, TRACH2002847, TRACH2002853, TRACH2002862, TRACH2002954, TRACH2002960, TRACH2002988, TRACH2003070, TRACH2003347, TRACH2003484, TRACH2003516, TRACH2003605, TRACH2003736, TRACH2003759, TRACH2003941, TRACH2004039, TRACH2004054, TRACH2004087, TRACH2004109, TRACH2004170, TRACH2004183, TRACH2004251, TRACH2004292, TRACH2004336, TRACH2004399, TRACH2004428, TRACH2004458, TRACH2004499, TRACH2004521, TRACH2004570, TRACH2004845, TRACH2004887, TRACH2004950, TRACH2005004, TRACH2005017, TRACH2005066, TRACH2005159, TRACH2005314, TRACH2005444, TRACH2005541, TRACH2005666, TRACH2005698, TRACH2005710, TRACH2005720, TRACH2005769, TRACH2005796, TRACH2005800, TRACH2006015, TRACH2006049, TRACH2006097, TRACH2006194, TRACH2006327, TRACH2006331, TRACH2006378, TRACH2006387, TRACH2006528, TRACH2006670, TRACH2006762, TRACH2006866, TRACH2006870, TRACH2006918, TRACH2007059, TRACH2007324, TRACH2007358, TRACH2007483, TRACH2007542, TRACH2007577, TRACH2007674, TRACH2007676, TRACH2007688, TRACH2007733, TRACH2007754, TRACH2007816, TRACH2007894, TRACH2007969, TRACH2007988, TRACH2008081, TRACH2008112, TRACH2008113, TRACH2008127, TRACH2008130, TRACH2008278, TRACH2008472, TRACH2008478, TRACH2008540, TRACH2008583, TRACH2008597, TRACH2008716, TRACH2008820, TRACH2008891, TRACH2008921, TRACH2009006, TRACH2009060, TRACH2009107, TRACH2009123, TRACH2009268, TRACH2009291, TRACH2009310, TRACH2009340, TRACH2009348, TRACH2009358, TRACH2009661, TRACH2009730, TRACH2009743, TRACH2009754, TRACH2009851, TRACH2009862, TRACH2009934, TRACH2010159, TRACH2010218, TRACH2010251, TRACH2010272, TRACH2010317, TRACH2010419, TRACH2010451, TRACH2010505, TRACH2010587, TRACH2010600, TRACH2010634, TRACH2010639, TRACH2010677, TRACH2010698, TRACH2010771, TRACH2010824, TRACH2010883, TRACH2010965, TRACH2010974, TRACH2011057, TRACH2011093, TRACH2011113, TRACH2011290, TRACH2011293, TRACH2011302, TRACH2011500, TRACH2011574, TRACH2011894, TRACH2011956, TRACH2012000, TRACH2012138, TRACH2012242, TRACH2012298, TRACH2012370, TRACH2012376, TRACH2012387, TRACH2012497, TRACH2012536, TRACH2012562, TRACH2012742, TRACH2012811, TRACH2012823, TRACH2012918, TRACH2013081, TRACH2013123, TRACH2013265, TRACH2013369, TRACH2013450, TRACH2013495, TRACH2013552, TRACH2013585, TRACH2013671, TRACH2013726, TRACH2013902, TRACH2013928, TRACH2013982, TRACH2013991, TRACH2014018, TRACH2014045, TRACH2014046, TRACH2014077, TRACH2014082, TRACH2014268, TRACH2014284, TRACH2014337, TRACH2014356, TRACH2014371, TRACH2014483, TRACH2014495, TRACH2014544, TRACH2014573, TRACH2014725, TRACH2014760, TRACH2014815, TRACH2014839, TRACH2014938, TRACH2014950, TRACH2014972, TRACH2014974, TRACH2015180, TRACH2015243, TRACH2015316, TRACH2015381, TRACH2015486, TRACH2015654, TRACH2015824, TRACH2015939, TRACH2015987, TRACH2016080, TRACH2016131, TRACH2016286, TRACH2016317, TRACH2016347, TRACH2016380, TRACH2016384, TRACH2016410, TRACH2016498, TRACH2016533, TRACH2016551, TRACH2016554, TRACH2016651, TRACH2016690, TRACH2016709, TRACH2016722, TRACH2016835, TRACH2016980, TRACH2017086, TRACH2017368, TRACH2017498, TRACH2017949, TRACH2017965, TRACH2017980, TRACH2018034, TRACH2018084, TRACH2018262, TRACH2018273, TRACH2018278, TRACH2018317, TRACH2018345, TRACH2018380, TRACH2018446, TRACH2018449, TRACH2018512, TRACH2018646, TRACH2018663, TRACH2018718, TRACH2018835, TRACH2018882, TRACH2018914, TRACH2019024, TRACH2019046, TRACH2019080, TRACH2019151, TRACH2019154, TRACH2019176, TRACH2019248, TRACH2019309, TRACH2019425, TRACH2019473, TRACH2019602, TRACH2019661, TRACH2019672, TRACH2019673, TRACH2019844, TRACH2019879, TRACH2020048, TRACH2020336, TRACH2020525, TRACH2021398, TRACH2021622, TRACH2021635, TRACH2021964, TRACH2022042, TRACH2022113, TRACH2022253, TRACH2022425, TRACH2022553, TRACH2022649, TRACH2022839, TRACH2023246, TRACH2023299, TRACH2023306, TRACH2023416, TRACH2023479, TRACH2023684, TRACH2023860, TRACH2023876, TRACH2024139, TRACH2024187, TRACH2024271, TRACH2024293, TRACH2024408, TRACH2024512, TRACH2024559, TRACH2024647, TRACH2024651, TRACH2024730, TRACH2024735, TRACH2024749, TRACH2024821, TRACH2025057, TRACH2025084, TRACH2025155, TRACH2025224, TRACH2025344, TRACH2025379, TRACH2025507, TRACH2025535, TRACH2025569, TRACH2025705, TRACH2025749, TRACH2025753, TRACH2025810, TRACH2025853, TRACH2025911, TRACH2025932, TRACH3000014, TRACH3000017, TRACH3000043, TRACH3000134, TRACH3000180, TRACH3000342, TRACH3000420, TRACH3000515, TRACH3000530, TRACH3000548, TRACH3000558, TRACH3000586, TRACH3000780, TRACH3000892, TRACH3000926, TRACH3001119, TRACH3001443, TRACH3001550, TRACH3001759, TRACH3002064, TRACH3002107, TRACH3002168, TRACH3002188, TRACH3002245, TRACH3002293, TRACH3002533, TRACH3002561, TRACH3002567, TRACH3002605, TRACH3002650, TRACH3002752, TRACH3002866, TRACH3002871, TRACH3002876, TRACH3002890, TRACH3003009, TRACH3003037, TRACH3003357, TRACH3003586, TRACH3003683, TRACH3003780, TRACH3003805, TRACH3003832, TRACH3004113, TRACH3004288, TRACH3004303, TRACH3004412, TRACH3004424, TRACH3004456, TRACH3004537, TRACH3004596, TRACH3004651, TRACH3004652, TRACH3004671, TRACH3004747, TRACH3004760, TRACH3004783, TRACH3004786, TRACH3004840, TRACH3004931, TRACH3004934, TRACH3005072, TRACH3005085, TRACH3005102, TRACH3005173, TRACH3005191, TRACH3005211, TRACH3005274, TRACH3005294, TRACH3005479, TRACH3005549, TRACH3005702, TRACH3005808, TRACH3005852, TRACH3005896, TRACH3006038, TRACH3006149, TRACH3006228, TRACH3006264, TRACH3006336, TRACH3006379, TRACH3006392, TRACH3006395, TRACH3006397, TRACH3006412, TRACH3006470, TRACH3006589, TRACH3006626, TRACH3006699, TRACH3006717, TRACH3006889, TRACH3006985, TRACH3007097, TRACH3007268, TRACH3007274, TRACH3007277, TRACH3007391, TRACH3007541, TRACH3007595, TRACH3007625, TRACH3007627, TRACH3007689, TRACH3007766, TRACH3007866, TRACH3007995, TRACH3008042, TRACH3008061, TRACH3008093, TRACH3008201, TRACH3008508, TRACH3008535, TRACH3008629, TRACH3008688, TRACH3008697, TRACH3008713, TRACH3008887, TRACH3008902, TRACH3008990, TRACH3009001, TRACH3009059, TRACH3009061, TRACH3009455, TRACH3009701, TRACH3009715, TRACH3009894, TRACH3009956, TRACH3010079, TRACH3010167, TRACH3010331, TRACH3010342, TRACH3010382, TRACH3010757, TRACH3010901, TRACH3011004, TRACH3011082, TRACH3011184, TRACH3011282, TRACH3011313, TRACH3011454, TRACH3011485, TRACH3011503, TRACH3011538, TRACH3011542, TRACH3012106, TRACH3012161, TRACH3012232, TRACH3012261, TRACH3012445, TRACH3012460, TRACH3012659, TRACH3012718, TRACH3012864, TRACH3012891, TRACH3012942, TRACH3013043, TRACH3013072, TRACH3013426, TRACH3013454, TRACH3013558, TRACH3013684, TRACH3013693, TRACH3013700, TRACH3013766, TRACH3013900, TRACH3013926, TRACH3014063, TRACH3014183, TRACH3014215, TRACH3014316, TRACH3014415, TRACH3014580, TRACH3014641, TRACH3014885, TRACH3015136, TRACH3015336, TRACH3015346, TRACH3015354, TRACH3015467, TRACH3015626, TRACH3015951, TRACH3016051, TRACH3016120, TRACH3016264, TRACH3016277, TRACH3016368, TRACH3016455, TRACH3016614, TRACH3016805, TRACH3016992, TRACH3017171, TRACH3017409, TRACH3017934, TRACH3018108, TRACH3018191, TRACH3018240, TRACH3018261, TRACH3018519, TRACH3018524, TRACH3018606, TRACH3018783, TRACH3018907, TRACH3018933, TRACH3018943, TRACH3019018, TRACH3019058, TRACH3019142, TRACH3019290, TRACH3019347, TRACH3019370, TRACH3019447, TRACH3019598, TRACH3019621, TRACH3019662, TRACH3019807, TRACH3019924, TRACH3019977, TRACH3020137, TRACH3020410, TRACH3020563, TRACH3020605, TRACH3020750, TRACH3020769, TRACH3020928, TRACH3020930, TRACH3021023, TRACH3021066, TRACH3021212, TRACH3021335, TRACH3021373, TRACH3021544, TRACH3021778, TRACH3021834, TRACH3021883, TRACH3022170, TRACH3022198, TRACH3022296, TRACH3022482, TRACH3022732, TRACH3022758, TRACH3022875, TRACH3022910, TRACH3022960, TRACH3023063, TRACH3023203, TRACH3023242, TRACH3023373, TRACH3023516, TRACH3023752, TRACH3023945, TRACH3023960, TRACH3024020, TRACH3024081, TRACH3024342, TRACH3024423, TRACH3024428, TRACH3024512, TRACH3024671, TRACH3024823, TRACH3025302, TRACH3025316, TRACH3025346, TRACH3025520, TRACH3026148, TRACH3026283, TRACH3026299, TRACH3026303, TRACH3026542, TRACH3026650, TRACH3026676, TRACH3026744, TRACH3026949, TRACH3027229, TRACH3027527, TRACH3027681, TRACH3027701, TRACH3027885, TRACH3028031, TRACH3028164, TRACH3028180, TRACH3028195, TRACH3028441, TRACH3028597, TRACH3028678, TRACH3028837, TRACH3028847, TRACH3028855, TRACH3029139, TRACH3029329, TRACH3029451, TRACH3029462, TRACH3029520, TRACH3029592, TRACH3029629, TRACH3029665, TRACH3029670, TRACH3029800, TRACH3030111, TRACH3030130, TRACH3030176, TRACH3030252, TRACH3030725, TRACH3030855, TRACH3030883, TRACH3031316, TRACH3031400, TRACH3031463, TRACH3031479, TRACH3031518, TRACH3031660, TRACH3031678, TRACH3031936, TRACH3032044, TRACH3032065, TRACH3032150, TRACH3032372, TRACH3032480, TRACH3032570, TRACH3032755, TRACH3032827, TRACH3032873, TRACH3033535, TRACH3033680, TRACH3033868, TRACH3034145, TRACH3034414, TRACH3034488, TRACH3034680, TRACH3034731, TRACH3034745, TRACH3034762, TRACH3034903, TRACH3035187, TRACH3035199, TRACH3035235, TRACH3035451, TRACH3035482, TRACH3035526, TRACH3036004, TRACH3036103, TRACH3036193, TRACH3036207, TRACH3036278, TRACH3036309, TRACH3036456, TRACH3036609, TRACH3036638, TRACH3036683, TRACH3036750, TRACH3036792, TRACH3036843, TRACH3036897, TRACH3036932, TRACH3036942, TRACH3036997, TRACH3037063, TRACH3037067, TRACH3037267, TRACH3037288, TRACH3037505, TRACH3037573, TRACH3037696, TRACH3037897, TRACH3038086, TRACH3038399, TSTOM1000135, TSTOM1000186, TSTOM2000139, TSTOM2000235, TSTOM2000315, TSTOM2000442, TSTOM2000553, TSTOM2000569, TSTOM2000588, TSTOM2001195, TSTOM2001274, TSTOM2001571, TSTOM2001996, TSTOM2002265, TSTOM2002505, TSTOM2002561, TSTOM2002611, TSTOM2002672, TSTOM2002682

Homology Search Data

[0714] Homology search data for full-length nucleotide sequences and the deduced amino acid sequences are shown below.

[0715] Each piece of data is punctuated with a double slash mark (//) and shown in order: Sequence Name, Definition of hit data, P value, Length of sequence compared, Homology, and Accession Number of hit data. Sequences which did not show hit data in the homology search list only the Clone name.

3NB692004045//Sodium/bile acid cotransporter (Na(+)/bile acid cotransporter) (Na(+)/taurocholate transport protein) (Sodium/taurocholate cotransporting polypeptide).//3.00E-50//99aa//35%

ADIPS2000069//Ig alpha-1 chain C region.//0//325aa//92%

ADRGL2010315

ADRGL2010594

AHMSC1000138

ASTRO2008972//Tubulin-tyrosine ligase (EC 6.3.2.25) (TTL).//6.00E-57//108aa//91%

ASTRO2015162//CTL2 gene [Homo sapiens]//1.00E-124//222aa//87%

ASTRO2016114//Zinc finger protein 85 (Zinc finger protein HPF4) (HTF1).//1.00E-141//227aa//70%

ASTRO3000154//Jumonji protein.//7.00E-56//105aa//100%

BEAST2000981//g1-related zinc finger protein [Mus musculus]//4.00E-55//118aa//45%

BLADE2000256//suppression of tumorigenicity 5-[Homo sapiens]//1.00E-135//255aa//65%

BLADE2001031

BLADE2002310//SH3-domain binding protein 1 [Homo sapiens]//0//408aa//85%

BLADE2002744

BLADE2004849

BLADE2006043

BLADE2007735

BLADE2007744

BLADE2007799//Hepatocellular carcinoma-associated antigen 66.//0//401aa//97%

BLADE2008809

BRACE1000475//Delta3,5-delta2,4-dienoyl-CoA isomerase, mitochondrial precursor (EC 5.3.3.-).//2.00E-74//144aa//93%

BRACE2002392//differential display and activated by p53; p53-regulated DDA3 [Mus musculus]//6.00E-75//143aa//72%

BRACE2003628//transmembrane protein induced by tumor necrosis factor alpha [Homo sapiens]//1.00E-131//220aa//65%

BRACE2005991

BRACE2010336

BRACE2012528//NDRG family, member 4; KIAM1180 protein [Homo sapiens]//0//342aa//92%

BRACE2012625

BRACE2012833

BRACE2012838//Complexin 1 (Synaphin 2).//1.00E-38//86aa//64%

BRACE2012936

BRACE2012947//Heat shock factor protein 1 (HSF 1) (Heat shock transcription factor 1) (HSTF 1).//3.00E-26//57aa//96%

BRACE2013009//EH-domain containing protein 1 (Testilin) (hPAST1).//1.00E-111//204aa//88%

BRACE2013126

BRACE2013132//Adenosine deaminase (EC 3.5.4.4) (Adenosine aminohydrolase).//2.00E-11//52aa//23%

BRACE2016896//Lysyl-tRNA synthetase (EC 6.1.1.6) (Lysine-tRNA ligase) (LysRS).//0//337aa//87%

BRACE2017359//Mus musculus suppressor of Ty 6 homolog (S. cerevisiae) (Supt6h)//1.00E-82//144aa//100%

BRACE2017397//Cartilage matrix protein precursor (Matrilin-1).//6.00E-36//83aa//40%

BRACE2017580//Glycerol-3-phosphate transporter (G-3-P transporter) (G-3-P permease).//2.00E-15//50aa//40%

BRACE2017844

BRACE2017872//nuclear receptor-binding SET-domain protein 1 [Mus musculus]//1.00E-154//268aa//85%

BRACE2017992

BRACE2019348//Zinc finger protein ZIC4 (Zinc finger protein of the cerebellum 4).//4.00E-45//82aa//78%

BRACE2023633

BRACE2023744//Translationally controlled tumor protein (TCTP) (p23) (Histamine-releasing factor) (HRF).//7.00E-62//118aa//88%

BRACE2025452

BRACE2026404

BRACE2027312

BRACE2027382//Opa-interacting protein OIP2 [Homo sapiens].//1.00E-61//101aa//93%

BRACE2028956

BRACE2030039

BRACE2032584

BRACE2033128

BRACE2034434

BRACE2035120//phosphatidylinositol (4,5) bisphosphate 5-phosphatase, A [Homo sapiens].//0//582aa//94%

BRACE2035191

BRACE2039362

BRACE2039607

BRACE2042541

BRACE2046976

BRACE2047232

BRACE2047975

BRACE3001403//Dipeptidyl peptidase IV like protein (Dipeptidyl aminopeptidase-related protein) (Dipeptidylpeptidase VI) (DPPX).//1.00E-57//107aa//97%

BRACE3001973//Cadherin-related-tumor suppressor homolog-precursor (Fat protein homolog).//1.00E-157//344aa//36%

BRACE3002264//Voltage-dependent L-type calcium channel alpha-1D subunit (Calcium channel, L type, alpha-1 polypeptide, isoform 2) (RAT brain class D) (RBD).//5.00E-55//193aa//26%

BRACE3002344//Vegetatible incompatibility protein HET-E-1.//7.00E-19//127aa//24%

BRACE3002541

BRACE3002756//protein tyrosine phosphatase, receptor type, f polypeptide (PTPRF), interacting protein (liprin), alpha 2 [Homo sapiens]//0//427aa//68%

BRACE3003866

BRACE3004046

BRACE3004371

BRACE3004767//Spectrin beta chain, brain (Spectrin, non-erythroid beta chain) (Fodrin beta chain).//4.00E-43//86aa//52%

BRACE3004887

BRACE3004981

BRACE3005870

BRACE3005903

BRACE3006553

BRACE3007649

BRACE3007869

BRACE3009075

BRACE3009265

BRACE3009392//Neutral amino acid transporter A (SATT) (Alanine/serine/cysteine/threonine transporter) (ASCT1).//1.00E-143//258aa//88%

BRACE3009416//testis specific ankyrin-like protein 1 [Homo sapiens]//1.00E-119//209aa//92%

BRACE3009539

BRACE3010702

BRACE3011447

BRACE3011774

BRACE3013418//ankyrin 1, isoform 2; ankyrin-1, erythrocytic; ankyrin-R [Homo sapiens]//0//969aa//95%

BRACE3013874

BRACE3013986

BRACE3014523

BRACE3014714//116 kDa U5 small nuclear ribonucleoprotein component (U5 snRNP-specific protein, 116 kDa) (U5-116 kDa).//1.00E-120//209aa//99%

BRACE3015090

BRACE3015898

BRACE3016020//SBBI31 protein [Homo sapiens]//7.00E-20//47aa//49%

BRACE3016167

BRACE3016580

BRACE3016788

BRACE3016810

BRACE3016862

BRACE3017253//LA0/A0 transport system kinase (EC 2.7.-.-).//2.00E-65//130aa//45%

BRACE3018083//junctophilin 3; junctophilin type3 [Homo sapiens]//0//331aa//91%

BRACE3019570//SNAP-25-interacting protein [Rattus norvegicus]//0//785aa//81%

BRACE3019611

BRACE3019817

BRACE3019941//Recessive polycystic kidney disease protein Tg737 homolog.//0//685aa//99%

BRACE3020356

BRACE3020669//Eukaryotic translation initiation factor 3 subunit 9 (eIF-3 eta) (eIF3 p116) (eIF3 p110).//5.00E-66//118aa//92%

BRACE3021430

BRACE3021517

BRACE3021805//sulfhydryl oxidase [Mus musculus]//3.00E-51//102aa//47%

BRACE3022051

BRACE3022303//Pax transcription activation domain interacting protein [Mus musculus]//1.00E-144//246aa//84%

BRACE3022312

BRACE3022340//SNAP-25-interacting protein [Rattus norvegicus]//0//745aa//80%

BRACE3022847

BRACE3023604

BRACE3024379

BRACE3024444

BRACE3024497

BRACE3024537

BRACE3024879

BRACE3025627

BRACE3025719//ring finger protein 22, isoform alpha; brain expressed ring finger; tripartite motif protein TRIM3 [Homo sapiens]//0//430aa//95%

BRACE3026161

BRACE3026290//Homo sapiens lethal giant larvae homolog 2 [Homo sapiens]//0//914aa//95%

BRACE3026345//Insulin-like growth factor II precursor (IGF-II) (Somatomedin A).//6.00E-87//153aa//85%

BRACE3026456

BRACE3026802//Homo sapiens tweety homolog 1 (Drosophila) (TTYH1), mRNA.//2.00E-97//190aa//66%

BRACE3026844//Zinc finger protein 84 (Zinc finger protein HPF2).//0//315aa//48%

BRACE3026947

BRACE3027256

BRACE3027931

BRACE3028360

BRACE3028895

BRACE3028998//D-beta-hydroxybutyrate dehydrogenase precursor (EC 1.1.1.30) (BDH) (3-hydroxybutyrate dehydrogenase).//8.00E-30//62aa//100%

BRACE3029005

BRACE3029021

BRACE3029205

BRACE3029447

BRACE3030538//putative tumor suppressor [Homo sapiens]//1.00E-35//77aa//45%

BRACE3031161

BRACE3031184

BRACE3031185

BRACE3031315//activated p21cdc42Hs kinase [Homo sapiens]//0//328aa//73%

BRACE3031372

BRACE3031579

BRACE3031728

BRACE3031743//Homo sapiens bruno-like 4, RNA binding protein (Drosophila) (BRUNOL4), mRNA.//2.00E-42//91 aa//72%

BRACE3031843

BRACE3032385//Voltage-dependent L-type calcium channel alpha-1D subunit (Calcium channel, L type, alpha-1 polypeptide, isoform 2) (RAT brain class D) (RBD).//2.00E-31//124aa//26%

BRACE3032537

BRACE3032538

BRACE3032631//F-box protein FBX13 [Mus musculus].//0//276aa//94%

BRACE3032980

BRACE3033525

BRACE3034183//Zinc finger protein 84 (Zinc finger protein HPF2).//1.00E-141//216aa//55%

BRACE3034389

BRACE3034964//Brain development-related molecule 1.//1.00E-151//259aa//87%

BRACE3034993

BRACE3035168

BRACE3036156

BRACE3036271

BRACE3036283//Cyclin G-associated kinase (EC 2.7.1.-).//1.00E-69//138aa//71%

BRACE3037612

BRACE3037637

BRACE3037803

BRACE3038012

BRACE3038030

BRACE3038570

BRACE3038760

BRACE3039288

BRACE3039358//integral membrane glycoprotein [Mus musculus]//0//581aa//78%

BRACE3039378//Metabotropic glutamate receptor 4 precursor.//0//569aa//96%

BRACE3039454

BRACE3040012

BRACE3040239//Deltex3 [Mus musculus]//1.00E-158//276aa//79%

BRACE3040504

BRACE3040644//low density lipoprotein receptor-related protein 3 [Homo sapiens]//0//549aa//89%

BRACE3040863

BRACE3041059//Ubiquitin carboxyl-terminal hydrolase 4 (EC 3.1.2.15) (Ubiquitin thiolesterase 4) (Ubiquitin-specific processing protease 4) (Deubiquitinating enzyme 4) (Ubiquitous nuclear protein homolog).//6.00E-39//82aa//39%

BRACE3041162//zinc finger protein 14 (KOX 6); GIOT-4 for gonadotropin inducible transcription repressor-4 [Homo sapiens]//1.00E-67//110aa//60%

BRACE3041827

BRACE3042046//Proto-oncogene DBL precursor [Contains: MCF2].//9.00E-19//190aa//26%

BRACE3042210

BRACE3042326//Protein dpy-19.//2.00E-59//166aa//28%

BRACE3042409//Putative fatty-acid-CoA ligase fadD26 (EC 6.2.1.-) (Acyl-CoA synthetase).//5.00E-21//135aa//25%

BRACE3042432//Vasoactive intestinal polypeptide receptor 1 precursor (VIP-R-1) (Pituitary adenylate cyclase activating polypeptide type II receptor) (PACAP type II receptor) (PACAP-R-2).//8.00E-67//123aa//98%

BRACE3042594

BRACE3043597//60S ribosomal protein L26.//3.00E-68//128aa//88%

BRACE3044090

BRACE3044172//FKBP-rapamycin associated protein (FRAP) (Rapamycin target protein).//0//709aa//94%

BRACE3044247

BRACE3044377

BRACE3044495//GROS1-L protein [Homo sapiens]//3.00E-55//150aa//44%

BRACE3045078

BRACE3045145

BRACE3045424

BRACE3045708

BRACE3045981

BRACE3046049

BRACE3046152//putative homeodomain transcription factor; putative homeodomain transcription factor 1 [Homo sapiens]//0//375aa//93%

BRACE3046294

BRACE3046466//Crumbs protein homolog 1 precursor.//1.00E-126//284aa//29%

BRACE3046491//Channel associated protein of synapse-110 (Chapsyn-110) (Synaptic density protein PSD-93) (Discs, large homolog 2).//0//686aa//89%

BRACE3046609//putative BTK-binding protein [Homo sapiens].//1.00E-30//195aa//100%

BRACE3046837

BRACE3046855

BRACE3046966

BRACE3047018

BRACE3047482//tripartite motif-containing 9 [Homo sapiens]//0//448aa//60%

BRACE3047801

BRACE3048483

BRACE3048565

BRACE3048615

BRACE3048677

BRACE3048756

BRACE3048904

BRACE3048905

BRACE3049186

BRACE3049714//NYD-TSPG protein [Homo sapiens]//4.00E-47//119aa//32%

BRACE3050270

BRACE3050504

BRACE3051144

BRACE3051621//Polycystin precursor (Autosomal dominant polycystic kidney disease protein 1).//0//387aa//83%

BRACE3051627

BRACE3051722

BRACE3051819//Myosin heavy chain, cardiac muscle alpha isoform (MyHC-alpha).//0//513aa//55%

BRACE3051879

BRACE3052321//spectrin SH3 domain binding protein 1; eps8 binding protein; interactor protein AbIBP4; AbI-interactor protein 1 long [Homo sapiens]//0//388aa//73%

BRACE3052410//IDN3 protein [Homo sapiens]//0//532aa//94%

BRACE3052486

BRACE3052595//Nim2 [Rattus norvegicus]//1.00E-80//145aa//62%

BRALZ2003119

BRALZ2007661

BRALZ2008930

BRALZ2010842//Mitochondrial carnitine/acylcarnitine carrier protein (Carnitine/acylcarnitine translocase) (CAC).//4.00E-22//73aa//31%

BRALZ2011337

BRALZ2013621//Heterogeneous nuclear ribonucleoprotein K (hnRNP K) (DC-stretch binding protein) (CSBP) (Transformation upregulated nuclear protein) (TUNP).//5.00E-37//87aa//65%

BRALZ2013690

BRALZ2014054//cenexin 2 [Rattus norvegicus].//4.00E-50//96aa//87%

BRAMY2015516

BRAMY2021098

BRAMY2022320

BRAMY2023939

BRAMY2025495

BRAMY2031516

BRAMY2033895

BRAMY2035801

BRAMY2036254

BRAMY2036266

BRAMY2037609

BRAMY2039630

BRAMY2040915//LISCH protein [Homo sapiens]//1.00E-121//234aa//68%

BRAMY2041347

BRAMY2041384//Annexin VI (Lipocortin VI) (P68) (P70) (Protein III) (Chromobindin 20) (67 kDa calelectrin) (Calphobindin-II) (CPB-II).//0//471aa//96%

BRAMY2041507

BRAMY2044686

BRAMY2046489

BRAMY2046537//lipoma HMGIC fusion partner [Homo sapiens]//5.00E-14//53aa//28%

BRAMY3000692//Zinc finger protein 91 (Zinc finger protein HTF10) (HPF7).//3.00E-30//56aa//72%

BRAMY3001409

BRAMY3002329

BRAMY3002508

BRAMY3002886//ancient conserved domain protein 4 [Homo sapiens]//1.00E-125//252aa//49%

BRAMY3004126//Putative G protein-coupled receptor GPR17 (R12).//0//322aa//94%

BRAMY3004364

BRAMY3005184//ankyrin 3, epithelial [Mus musculus]//0//769aa//82%

BRAMY3005656

BRAMY3005912

BRAMY3007078//Peregrin (Bromodomain and PHD finger-containing protein 1) (BR140 protein).//5.00E-29//62aa//45%

BRAMY3007449

BRAMY3007471//gene trap locus F3b; transcript expressed during hematopoiesis 2 [Mus musculus]//3.00E-56//104aa//92%

BRAMY3008436

BRAMY3009158

BRAMY3009491//Phosphatidylinositol 4-kinase alpha (EC 2.7.1.67) (PI4-kinase) (Ptdins-4-kinase) (PI4K-alpha).//1.00E-129//222aa//97%

BRAMY3009556//TGFB1-induced anti-apoptotic factor 1 (12 kDa TGF-beta1-induced antiapoptotic factor).//4.00E-56//104aa//90%

BRAMY3009904

BRAMY3010321//MRIP-1 protein [Homo sapiens]//2.00E-18//56aa//31%

BRAMY3010603

BRAMY3010654

BRAMY3010902

BRAMY3011501//Heterogenous nuclear ribonucleoprotein U (hnRNP U) (Scaffold attachment factor A) (SAF-A).//0//469aa//79%

BRAMY3011581//DNA topoisomerase III alpha (EC 5.99.1.2).//0//410aa//90%

BRAMY3011865

BRAMY3014027//Zinc finger protein 44 (Zinc finger protein KOX7) (Gonadotropin inducible transcription repressor-2) (GIOT-2).//0//339aa//56%

BRAMY3014555

BRAMY3014613//SH3-domain binding protein 1 [Homo sapiens]//0//420aa//86%

BRAMY3015086//E4L1_HUMAN Band 4.1-like protein 1.//0//477aa//94%

BRAMY3015547//Rho guanine nucleotide exchange factor 10 [Homo sapiens]//0//461aa//44%

BRAMY3015549//Homo sapiens cell adhesion molecule with homology to L1CAM (close homolog of L1) (CHL1)//0//1076aa//95%

BRAMY3016829

BRAMY3017827

BRAMY3017920//Active breakpoint cluster region-related protein.//1.00E-161//279aa//98%

BRAMY3017965

BRAMY3018121

BRAMY3018248//ATP-binding cassette, sub-family B, member 8, mitochondrial precursor (Mitochondrial ATP-binding cassette 1) (M-ABC1).//3.00E-27//57aa//100%

BRAMY3018340

BRAMY3018754//junction-mediating and regulatory protein; p300 transcriptional cofactor JMY [Mus musculus]//7.00E-72//160aa//35%

BRAMY4000915//Ankyrin 1 (Erythrocyte ankyrin).//2.00E-68//190aa//27%

BRAMY4000962//putative RNA binding protein [Homo sapiens]//2.00E-16//65aa//29%

BRAMY4001234

BRAMY4001652//Ankyrin 1 (Erythrocyte ankyrin).//2.00E-58//197aa//29%

BRAMY4001863//Mus musculus enabled homolog (Drosophila) (Enah), mRNA//1.00E-84//161aa//81%

BRAMY4001913

BRAMY4002575

BRAMY4002628

BRAWH2000256//prestin [Rattus norvegicus]//1.00E-121//223aa//93%

BRAWH2002333//Calcium/calmodulin-dependent 3′,5′-cyclic nucleotide phosphodiesterase 1B (EC 3.1.4.17) (CamPDE 1B) (63 kDa Cam-PDE).//1.00E-175//302aa//90%

BRAWH2004078

BRAWH2010364

BRAWH2010619

BRAWH2011796//S-100 protein, alpha chain.//6.00E-30//65aa//69%

BRAWH2011812//VPS10 domain receptor protein SORCS [Mus musculus]//0//966aa//95%

BRAWH2011958

BRAWH2012054

BRAWH2012866//Synaptotagmin I (SytI) (p65).//0//335aa//79%

BRAWH2013955

BRAWH2014053//AFG3-like protein 2 (EC 3.4.24.-) (Paraplegin-like protein).//4.00E-18//42aa//89%

BRAWH2016209//autocrine motility factor receptor [Mus musculus]//2.00E-28//89aa//28%

BRAWH2016223

BRAWH2016305

BRAWH2016514

BRAWH2016562

BRAWH2016785

BRAWH3000446//Kruppel-like zinc finger protein GLIS2 [Homo sapiens]//0//300aa//84%

BRAWH3000884

BRAWH3001053

BRAWH3001638//SUMO-1-specific protease 1 (EC 3.4.22.-) (Sentrin-specific protease SENP6) (Protease FKSG6).//0//1009aa//90%

BRAWH3001783//protocadherin 15 [Homo sapiens]//0//688aa//92%

BRAWH3001833

BRAWH3003244

BRAWH3003573//45 kDa calcium-binding protein precursor (Stromal cell-derived factor 4) (SDF-4).//9.00E-69//121aa//93%

BRAWH3003975

BRAWH3004335//heparan sulfate D-glucosaminyl 3-O-sulfotransferase 1 precursor; heparin-glucosamine 3-O-sulfotransferase [Homo sapiens]//5.00E-72//118aa//49%

BRAWH3004350//Spindlin (Ovarian cancer-related protein).//3.00E-96//170aa//77%

BRAWH3005037

BRAWH3005886//Zinc-finger protein cer-d4.//1.00E-160//273aa//78%

BRAWH3005892

BRAWH3005896

BRAWH3008167//CUB and Sushi multiple domains 1 [Homo sapiens]//0//727aa//96%

BRAWH3008559

BRAWH3008867

BRAWH3009961//Nim2 [Rattus norvegicus]//2.00E-95//174aa//69%

BRAWH3010461//secretory carrier membrane protein 5 [Mus musculus]//1.00E-107//186aa//79%

BRAWH3010602//Gamma-soluble NSF attachment protein (SNAP-gamma) (N-ethylmaleimide-sensitive factor attachment protein, gamma).//1.00E-113//203aa//90%

BRAWH3010657

BRAWH3010726//phosphatidylinositol transfer protein, membrane-associated; Drosophila retinal degeneration B [Homo sapiens]//0//509aa//96%

BRAWH3010833

BRAWH3011101

BRAWH3011331//heparan sulfate 6-O-sulfotransferase 3 [Mus musculus]//1.00E-130//219aa//87%

BRAWH3011402

BRAWH3011577//Zinc finger protein 175 (Zinc finger protein OTK18).//1.00E-30//65aa//51%

BRAWH3011623//Heterogeneous nuclear ribonucleoproteins C1/C2 (hnRNP C1/hnRNP C2).//2.00E-97//192aa//74%

BRAWH3011685

BRAWH3011907

BRAWH3011929

BRAWH3012005

BRAWH3012662//Mus musculus tweety homolog 1 (Drosophila) (Ttyh1), mRNA.//3.00E-15//42aa//37%

BRAWH3012779

BRAWH3013009//zinc finger protein 35 [Mus musculus]//1.00E-136//280aa//49%

BRAWH3013049

BRAWH3013264//SWI/SNF related, matrix associated, actin dependent regulator of chromatin, subfamily a, member 3 [Mus musculus]//3.00E-20//75aa//27%

BRAWH3013508

BRAWH3014609//Insulin-like growth factor binding protein complex acid labile chain precursor (ALS).//1.00E-25//79aa//30%

BRAWH3014639

BRAWH3015017//axonemal dynein light chain p33.//3.00E-22//34aa//84%

BRAWH3015175//Myosin heavy chain, muscle.//6.00E-08//68aa//21%

BRAWH3015610

BRAWH3015825

BRAWH3016123

BRAWH3016715

BRAWH3017180//Diacylglycerol kinase, zeta (EC 2.7.1.107) (Diglyceride kinase) (DGK-zeta) (DAG kinase zeta).//0//837aa//90%

BRAWH3017259//protein tyrosine phosphatase, receptor type, f polypeptide (PTPRF), interacting protein (liprin), alpha 2 [Homo sapiens]//0//1068aa//86%

BRAWH3017260

BRAWH3017477//AE-binding protein 2 [Mus musculus]//1.00E-162//273aa//92%

BRAWH3017980

BRAWH3018063//tulip 1 [Rattus norvegicus]//0//444aa//86%

BRAWH3018369

BRAWH3018548//Vinculin (Metavinculin).//0//877aa//90%

BRAWH3018969

BRAWH3019026//Echinoderm microtubule-associated protein-like 1 (EMAP-1) (HuEMAP-1).//0//612aa//95%

BRAWH3019529

BRAWH3019594

BRAWH3019820

BRAWH3020200

BRAWH3020318

BRAWH3020884

BRAWH3020928//mitogen-activated protein kinase phosphatase x [Homo sapiens]//2.00E-35//66aa//100%

BRAWH3021012//AP1 gamma subunit binding protein 1; gamma-synergin [Homo sapiens]//1.00E-172//302aa//92%

BRAWH3021574

BRAWH3021580//Restin (Cytoplasmic linker protein-170 alpha-2) (CLIP-170) (Reed-Sternberg intermediate filament associated protein).//0//340aa//72%

BRAWH3021641

BRAWH3021643

BRAWH3021724//kyphoscoliosis [Mus musculus]//1.00E-136//248aa//68%

BRAWH3022347

BRAWH3022431

BRAWH3022459

BRAWH3022542

BRAWH3022651//ubiquitin-protein ligase e3 componen n-recognin [Mus musculus]//1.00E-24//82aa//30%

BRAWH3022719

BRAWH3022900

BRAWH3023156//Gamma-aminobutyric-acid receptor beta-1 subunit precursor (GABA(A) receptor).//4.00E-62//115aa//100%

BRAWH3023168

BRAWH3023172//Mothers against decapentaplegic homolog interacting protein (Madh-interacting protein) (Smad anchor for receptor activation) (Receptor activation anchor) (hSARA) (Novel serine protease) (NSP).//1.00E-109//198aa//56%

BRAWH3023274

BRAWH3023415//alpha 1,2-mannosidase [Homo sapiens]//5.00E-57//105aa//100%

BRAWH3023421//Protein-arginine deiminase type II (EC 3.5.3.15) (Peptidylarginine deiminase II) (PAD-H19).//1.00E-106//180aa//99%

BRAWH3024186//LAR protein precursor (Leukocyte antigen related) (EC 3.1.3.48).//0//862aa//90%

BRAWH3024231//Tetratricopeptide repeat protein 4.//1.00E-151//261aa//94%

BRAWH3024242

BRAWH3024506//Probable leucyl-tRNA synthetase (EC 6.1.1.4) (Leucine-tRNA ligase) (LeuRS).//2.00E-61//128aa//38%

BRAWH3024989

BRAWH3025157

BRAWH3026349//Sorting nexin 7.//2.00E-94//160aa//49%

BRAWH3026938//semaF cytoplasmic domain associated protein 3; semaphorin cytoplasmic domain-associated protein 3A [Mus musculus]//0//354aa//45%

BRAWH3027420

BRAWH3027440//Probable kinesin light chain 3 (KLC 3).//1.00E-159//283aa//85%

BRAWH3027533//rap2 interacting protein x [Homo sapiens].//1.00E-117//390aa//64%

BRAWH3027574//vascular Rab-GAP/TBC-containing [Homo sapiens]//0//427aa//45%

BRAWH3027607

BRAWH3027616

BRAWH3027675

BRAWH3027806//Echinoderm microtubule-associated protein-like 2 (EMAP-2) (HuEMAP-2).//2.00E-92//211aa//34%

BRAWH3027880

BRAWH3028202

BRAWH3028223

BRAWH3028461

BRAWH3028754

BRAWH3028796//makorin, ring finger protein, 1 [Homo sapiens]//0//362aa//86%

BRAWH3029313

BRAWH3029385//Dynamin 2 (EC 3.6.1.50).//1.00E-131//237aa//88%

BRAWH3029538//myelin-associated oligodendrocyte basic protein [Homo sapiens]//5.00E-39//184aa//99%

BRAWH3029806//Adenylate cyclase, type II (EC 4.6.1.1) (ATP pyrophosphate-lyase) (Adenylyl cyclase).//0//758aa//90%

BRAWH3030772

BRAWH3030810

BRAWH3030910//Sec23-interacting protein p125 [Homo sapiens]//5.00E-92//180aa//51%

BRAWH3031054

BRAWH3031342//Zinc finger protein 91 (Zinc finger protein HTF10) (HPF7).//0//301aa//59%

BRAWH3031710//serologically defined colon cancer antigen 33 [Homo sapiens]//0//653aa//96%

BRAWH3032298//Homo sapiens tenascin R (restrictin, janusin) (TNR), mRNA//0//472aa//36%

BRAWH3032340//Rho-specific guanine nucleotide exchange factor p114 [Homo sapiens]//0//824aa//81%

BRAWH3032571//Chromodomain helicase-DNA-binding protein 4 (CHD-4) (Mi-2 autoantigen 218 kDa protein) (Mi2-beta).//0//714aa//69%

BRAWH3033117

BRAWH3033293//synaptopodin [Homo sapiens]//0//580aa//85%

BRAWH3033448

BRAWH3033513//3-ketoacyl-CoA thiolase, peroxisomal precursor (EC 2.3.1.16) (Beta-ketothiolase) (Acetyl-CoA acyltransferase) (Peroxisomal 3-oxoacyl-CoA thiolase).//1.00E-60//114aa//87%

BRAWH3034097

BRAWH3034114

BRAWH3034134

BRAWH3034668//Ubiquitin carboxyl-terminal hydrolase 4 (EC 3.1.2.15) (Ubiquitin thiolesterase 4) (Ubiquitin-specific processing protease 4) (Deubiquitinating enzyme 4) (Ubiquitous nuclear protein homolog).//0//624aa//90%

BRAWH3034743

BRAWH3034775//E1B-55 kDa-associated protein 5 [Homo sapiens]//1.00E-164//283aa//93%

BRAWH3034890//CAGH32 [Homo sapiens].//9.00E-29//131aa//94%

BRAWH3035403

BRAWH3035904

BRAWH3035914

BRAWH3035936//Zinc finger protein 208.//0//354aa//51%

BRAWH3036077

BRAWH3036247//Zinc finger protein 228.//2.00E-54//96aa//39%

BRAWH3036270//Hb2E [Homo sapiens].//1.00E-109//233aa//97%

BRAWH3036334//Zinc finger protein 91 (Zinc finger protein HTF10) (HPF7).//0//436aa//60%

BRAWH3036561

BRAWH3037265

BRAWH3037394

BRAWH3037428//RAB37, member of RAS oncogene family; GTPase Rab37 [Mus musculus]//1.00E-76//140aa//88%

BRAWH3037533

BRAWH3037979//Ubiquitin carboxyl-terminal hydrolase 24 (EC 3.1.2.15) (Ubiquitin thiolesterase 24) (Ubiquitin-specific processing protease 24) (Deubiquitinating enzyme 24) (Fragment).//0//415aa//97%

BRAWH3038055//synaptic nuclei expressed gene 2 [Homo sapiens]//0//551aa//47%

BRAWH3038230

BRAWH3038252//Formin 1 isoform IV (Limb deformity protein).//0//411aa//89%

BRAWH3038324//Reticulon protein 3 (Neuroendocrine-specific protein-like 2) (NSP-like protein II) (NSPLII).//1.00E-101//189aa//99%

BRAWH3038827//leucine-zipper-like transcriptional regulator, 1; Leucine-zipper-like regulator-1 [Homo sapiens]//0//530aa//96%

BRAWH3039258

BRAWH3039623

BRAWH3040297

BRAWH3040695//Inner nuclear membrane protein Man1.//1.00E-33//66aa//47%

BRAWH3040711

BRAWH3040900//Homo sapiens cadherin, EGF LAG seven-pass G-type receptor 2 (flamingo homolog, Drosophila) (CELSR2) mRNA//1.00E-49//97aa//82%

BRAWH3041492//erythrocyte membrane protein band 4.1 (elliptocytosis 1, RH-linked); Erythrocyte surface protein band 4.1 [Homo sapiens]//1.00E-66//129aa//64%

[0716] BRAWH3041556//C-1-tetrahydrofolate synthase, cytoplasmic (C1-THF synthase) [Includes: Methylenetetrahydrofolate dehydrogenase (EC 1.5.1.5); Methenyltetrahydrofolate cyclohydrolase (EC 3.5.4.9); Formyltetrahydrofolate synthetase (EC 6.3.4.3)].//0//536aa//58%

BRAWH3041928

BRAWH3042132

BRAWH3042438//Diacylglycerol kinase, alpha (EC 2.7.1.107) (Diglyceride kinase) (DGK-alpha) (DAG kinase alpha) (80 kDa diacylglycerol kinase).//5.00E-56//103aa//100%

BRAWH3042447//p53 inducible protein [Homo sapiens].//0//694aa//86%

BRAWH3042568//ventral anterior homeobox containing gene 1 [Mus musculus]//5.00E-76//137aa//95%

BRAWH3042772//Zinc transporter 3 (ZnT-3).//3.00E-71//135aa//87%

BRAWH3042787

BRAWH3042820

BRAWH3042996

BRAWH3043034//Mus musculus neuregulin 1 (Nrg1)//0//924aa//92%

BRAWH3043295//Inorganic pyrophosphatase (EC 3.6.1.1) (Pyrophosphate phospho-hydrolase) (PPase).//7.00E-53//95aa//98%

BRAWH3043498

BRAWH3043623//Cadherin-related tumor suppressor homolog precursor (Fat protein homolog).//8.00E-24//74aa//36%

BRAWH3043944

BRAWH3044122//Munc13-1 [Rattus norvegicus]//0//888aa//98%

BRAWH3044151//ADAM-TS 9 precursor (EC 3.4.24.-) (A disintegrin and metalloproteinase with thrombospondin motifs 9) (ADAMTS-9) (ADAM-TS9).//7.00E-45//118aa//31%

BRAWH3044487

BRAWH3044585

BRAWH3044676

BRAWH3044985

BRAWH3045118

BRAWH3045229

BRAWH3045625

BRAWH3046196

BRAWH3046209

BRAWH3046424//Histone deacetylase 6 (HD6).//0//530aa//93%

BRAWH3046802

BRAWH3046959

BRAWH3047063

BRAWH3047539

BRAWH3047565//TOLLIP protein [Homo sapiens]//1.00E-101//177aa//86%

BRAWH3047644//Rho guanine nucleotide exchange factor 4, isoform b; APC-stimulated guanine nucleotide exchange factor [Homo sapiens]//3.00E-84//142aa//100%

BRAWH3047692//Lon protease homolog 1, mitochondrial precursor (EC 3.4.21.-).//1.00E-164//297aa//51%

BRAWH3047946

BRAWH3048374//CUB and Sushi multiple domains 1 [Homo sapiens]//0//715aa//96%

BRAWH3048548

BRAWH3048724

BRAWH3049068

BRAWH3049544//Polypeptide N-acetylgalactosaminyltransferase (EC 2.4.1.41) (Protein-UDP acetylgalactosaminyltransferase) (UDP-GalNAc:polypeptide, N-acetylgalactosaminyltransferase) (GalNAc-T1).//1.00E-119//230aa//43%

BRAWH3049726

BRAWH3049858

BRCAN2000923//Putative ADP-ribosylation factor 2.//2.00E-29//180aa//32%

BRCAN2002662

BRCAN2002892//Ras-related protein Rab-7.//7.00E-47//96aa//50%

BRCAN2003269//Multidrug resistance protein 3 (P-glycoprotein 3).//4.00E-93//171aa//55%

BRCAN2003814//Variant-surface-glycoprotein phospholipase C (EC 3.1.4.47) (VSG lipase) (Glycosylphosphatidylinositol-specific phospholipase C) (GPI-PLC).//3.00E-18//78aa//26%

BRCAN2006051//AFG3-like protein 2 (EC 3.4.24.-) (Paraplegin-like protein).//3.00E-50//97aa//66%

BRCAN2006955

BRCAN2007525

BRCAN2008701

BRCAN2009168

BRCAN2010547

BRCAN2010581

BRCAN2010665//Channel associated protein of synapse-110 (Chapsyn-110) (Discs, large homolog 2).//0//422aa//96%

BRCAN2015402//Cytochrome P450 2G1 (EC 1.14.14.1) (CYPIIG1) (P450-NMB) (Olfactive).//3.00E-73//129aa//88%

BRCAN2015757

BRCAN2018269

BRCAN2018667

BRCAN2019653

BRCAN2019907//vascular Rab-GAP//TBC-containing [Homo sapiens]//8.00E-18//44aa//57%

BRCAN2019953

BRCAN2020234//Quiescence-specific protein precursor (P20K) (CH21 protein).//2.00E-06//70aa//27%

BRCAN2020331//G-rich sequence factor-1 (GRSF-1).//0//360aa//80%

BRCAN2020412//phosphatidylinositol glycan, class S [Homo sapiens]//6.00E-89//195aa//99%

BRCAN2020467//Nuclear movement protein NUDC.//5.00E-12//130aa//32%

BRCAN2020880

BRCAN2020972

BRCAN2021325//Carboxypeptidase H precursor (EC 3.4.17.10) (CPH) (Carboxypeptidase E) (CPE) (Enkephalin convertase) (Prohormone processing carboxypeptidase).//0//389aa//100%

BRCAN2021452

BRCAN2021718

BRCAN2022126//glutamate receptor delta-1 subunit [Rattus norvegicus]//0//949aa//94%

BRCAN2025093

BRCAN2027593

BRCAN2028702

BRCOC2001355

BRCOC2002777

BRCOC2006164

BRCOC2006639

BRCOC2006942

BRCOC2009638

BRCOC2010115

BRCOC2012386//Zinc finger protein 184.//2.00E-85//166aa//42%

BRHIP2006819

BRHIP2006921

BRHIP2008756//Homo sapiens pescadillo homolog 1, containing BRCT domain (zebrafish) (PES1), mRNA//0//352aa//78%

BRHIP2009177

BRHIP2011199

BRHIP2013958

BRHIP2015153

BRHIP2016125

BRHIP2017714

BRHIP2020930

BRHIP2021929

BRHIP2023735//Zinc-finger protein neuro-d4.//3.00E-46//87aa//87%

BRHIP2024941

BRHIP2026346//lymphocyte specific formin related protein; formin-related gene in leukocytes [Mus musculus]//1.00E-114//216aa//47%

BRHIP2027077//Flt3 interacting zinc finger protein 1 [Mus musculus]//4.00E-14//54aa//56%

BRHIP2027563//host cell factor homolog [Homo sapiens]//2.00E-95//166aa//47%

BRHIP2029529//TFIIH basal transcription factor complex p62 subunit//0//414aa//95%

BRHIP2029643

BRHIP2029663

BRHIP3000626

BRHIP3000859

BRHIP3001076//murine retrovirus integration site 1 homolog; inositol 1,4,5-triphosphate-associated cGMP kinase substrate; JAW1-related protein [Homo sapiens]//0//482aa//80%

BRHIP3001141

BRHIP3001338

BRHIP3001360

BRHIP3001481//Protein-tyrosine phosphatase, non-receptor type 7 (EC 3.1.3.48) (Protein-tyrosine phosphatase LC-PTP) (Hematopoietic protein-tyrosine phosphatase) (HEPTP).//0//359aa//99%

BRHIP3001573

BRHIP3001878//peptide transporter 3 [Homo sapiens]//7.00E-74//131aa//86%

BRHIP3002000

BRHIP3002114//rTS beta protein [Homo sapiens]//1.00E-148//248aa//94%

BRHIP3002124

BRHIP3002141

BRHIP3002363

BRHIP3002691

BRHIP3002920

BRHIP3002931

BRHIP3003063//Alpha-2 catenin (Alpha N-catenin) (Neural alpha-catenin).//0//867aa//95%

BRHIP3003126//Homo sapiens ubiquitin-protein isopeptide ligase (E3) (KIMA0010),mRNA.//2.00E-88//195aa//37%

BRHIP3003306//tulip 1 [Rattus norvegicus]//1.00E-148//272aa//49%

BRHIP3003340//Actin, alpha skeletal muscle 2.//3.00E-30//63aa//96%

BRHIP3003395

BRHIP3003688

BRHIP3003795//cytochrome P450 retinoid metabolizing protein [Homo sapiens]//1.00E-28//97aa//51%

BRHIP3003845

BRHIP3003961

BRHIP3003984//IkappaB kinase complex-associated protein (IKK complex-associated protein) (p150).//0//930aa//94%

BRHIP3004215//80 kda MCM3-associated protein (GANP protein).//0//792aa//87%

BRHIP3004710

BRHIP3004725//DNA-binding protein SATB1 (Special AT-rich sequence binding protein 1).//0//711aa//93%

BRHIP3004774

BRHIP3004786

BRHIP3005037//Metastasis-associated protein MTA1.//0//339aa//66%

BRHIP3005142

BRHIP3005231

BRHIP3005307//neuropathy target esterase [Homo sapiens]//1.00E-176//308aa//63%

BRHIP3005673//Glutathione S-transferase Mu 5 (EC 2.5.1.18) (GSTM5-5) (GST class-Mu 5).//5.00E-58//111aa//82%

BRHIP3005801//VAMP (vesicle-associated membrane protein)-associated protein

B and C; VAMP-associated protein C; VAMP-associated protein B; VAMP-associated 33 kDa protein [Homo sapiens]//4.00E-63//118aa//99%

BRHIP3005944//Antigen WC1.1 precursor.//1.00E-50//100aa//39%

BRHIP3006279

BRHIP3006294//Cdc42 GTPase-activating protein [Mus musculus]//5.00E-77//144aa//60%

BRHIP3006449//catenin (cadherin-associated protein), delta 2 (neural plakophilin-related arm-repeat protein); catenin (cadherin-associated protein), delta 2 [Homo sapiens]//0//756aa//95%

BRHIP3006786//peptidylprolyl isomerase (cyclophilin)-like 2; cyclophilin-like protein CyP-60 [Homo sapiens]//1.00E-123//210aa//99%

BRHIP3006950

BRHIP3007172

BRHIP3007195//Potential phospholipid-transporting ATPase IB (EC 3.6.3.13).//0//1049aa//91%

BRHIP3007223//Ubiquitin carboxyl-terminal hydrolase 64E (EC 3.1.2.15) (Ubiquitin thiolesterase 64E) (Ubiquitin-specific processing protease 64E) (Deubiquitinating enzyme 64E).//1.00E-139//272aa//47%

BRHIP3007291

BRHIP3007409

BRHIP3007424//WNT-14 protein precursor.//4.00E-83//143aa//58%

BRHIP3007609//Homo sapiens Smcy homolog, Y chromosome (mouse) (SMCY)//0//571aa//83%

BRHIP3007960

BRHIP3008082

BRHIP3008320//Rattus norvegicus potassium channel subunit (Slack) (Slack)//0//1063aa//90%

BRHIP3008714

BRHIP3009672

BRHIP3009753

BRHIP3010289//Attractin precursor (Mahogany homolog) (DPPT-L).//0//738aa//58%

BRHIP3010916

BRHIP3011082//Homo sapiens ubiquitin-protein isopeptide ligase (E3) (KIM0010)//0//415aa//99%

BRHIP3011269//Prenylcysteine lyase precursor (EC 4.4.1.18).//7.00E-80//154aa//39%

BRHIP3011460//Rho guanine exchange factor 16; putative neuroblastoma protein [Homo sapiens]//1.00E-120//227aa//52%

BRHIP3011567//Dihydropyridine-sensitive L-type, channel beta-1-B2 subunit (Beta-1 isoform A).//1.00E-173//310aa//83%

BRHIP3011831

BRHIP3012185

BRHIP3012289

BRHIP3012357//cerebral cell adhesion molecule [Homo sapiens]//2.00E-61//105aa//55%

BRHIP3012736

BRHIP3012997

BRHIP3013078//BAI1-associated protein 2, isoform 2 [Homo sapiens]//2.00E-40//77aa//100%

BRHIP3013588

BRHIP3013698

BRHIP3014675

BRHIP3015854

BRHIP3016032

BRHIP3016421

BRHIP3017109//Socs-5 [Mus musculus]//1.00E-69//118aa//84%

BRHIP3017146//solute carrier family 30 (zinc transporter), member 3//6.00E-96//92aa//97%

BRHIP3017256

BRHIP3017558//Monocarboxylate transporter 3 (MCT 3) (Retinal epithelial membrane protein).//2.00E-60//137aa//30%

BRHIP3017855//nuclear pore complex interacting protein [Homo sapiens]//4.00E-58//107aa//82%

BRHIP3018784

BRHIP3019643//Homo sapiens gamma tubulin ring complex protein (76p gene) (76P), mRNA//1.00E-104//187aa//93%

BRHIP3019824

BRHIP3019880

BRHIP3019956

BRHIP3020046//ubiquitin-protein ligase e3 componen n-recognin [Mus musculus]//3.00E-96//167aa//47%

BRHIP3020155

BRHIP3020733

BRHIP3021019//Protein-tyrosine phosphatase, non-receptor type 5 (EC 3.1.3.48) (Protein-tyrosine phosphatase striatum-enriched) (STEP) (Neural-specific protein-tyrosine phosphatase) (Fragment).//0//440aa//81%

BRHIP3021499

BRHIP3021987

BRHIP3022656

BRHIP3023922//5-methyltetrahydrofolate-homocysteine methyltransferase (EC 2.1.1.13) (Methionine synthase, vitamin-B12 dependent) (MS).//4.00E-72//134aa//95%

BRHIP3024703

BRHIP3024820

BRHIP3025795//Monocarboxylate transporter 4 (MCT 4) (MCT 3).//0//392aa//84%

BRHIP3025844//germ cell-specific gene 1 [Mus musculus]//9.00E-14//43aa//47%

BRHIP3026231

BRHIP3026651

BRHIP3027160

BRHIP3027191//150 kDa oxygen-regulated protein precursor (Orp150).//0//904aa//90%

BRHIP3027651//Bromodomain-containing protein 1 (BR140-like protein).//2.00E-59//149aa//31%

BRHIP3027947

BRHIP3028246//PHD finger protein 2 [Mus musculus]//2.00E-67//125aa//42%

BRHIP3028570

BRHIP3028742//vanilloid receptor subtype 1 [Homo sapiens]//1.00E-55//108aa//50%

BRHIP3029409//secreted frizzled-related protein 1; secreted apoptosis-related protein 2 [Homo sapiens]//2.00E-43//87aa//65%

BRHIP3029530

BRHIP3029670

BRHIP3029866

BRHIP3030230//Neuronal pentraxin I precursor (NP-I) (NP1).//0//386aa//93%

BRHIP3031733

BRHIP3031890

BRHIP3032148//brain-enriched guanylate kinase-associated [Rattus norvegicus]//1.00E-16//49aa//40%

BRHIP3032311

BRHIP3032374//neuropathy target esterase [Homo sapiens]//0//369aa//62%

BRHIP3033481

BRHIP3033557//N-methyl-D-aspartate receptor splice variant NR3A-2//0//852aa//93%

BRHIP3033734

BRHIP3033806

BRHIP3035006//Synthase [Homo sapiens]//1.00E-161//276aa//95%

BRHIP3035222

BRHIP3035754

BRHIP3036371

BRHIP3036715//HLA class I histocompatibility antigen, alpha chain H precursor (HLA-AR) (HLA-12.4).//2.00E-60//108aa//67%

BRHIP3036936//astrotactin 2 [Mus musculus]//0//858aa//96%

BRHIP3037543//cyclin G associated kinase [Homo sapiens]//4.00E-40//84aa//78%

BRHIP3037810

BRHIP3038030

BRHIP3038735

BRHIP3039430

BRHIP3039509//Amiloride-sensitive sodium channel delta-subunit (Epithelial Na+ channel delta subunit) (Delta ENaC) (Nonvoltage-gated sodium channel 1 delta subunit) (SCNED) (Delta NaCH).//0//588aa//92%

BRHIP3039592

BRHIP3040878

BRHIP3041587//Myosin light chain kinase, skeletal muscle (EC 2.7.1.117) (MLCK).//2.00E-24//76aa//61%

BRHIP3042817

BRHIP3043012

BRSSN2004303

BRSSN2004710//cAMP-dependent 3′,5′-cyclic phosphodiesterase 4B (EC 3.1.4.17) (DPDE4) (PDE32).//1.00E-59//108aa//88%

BRSSN2008464

BRSSN2011843

BRSSN2012157

BRSSN2012198

BRSSN2013696

BRSSN2015497//putative RNA binding protein [Homo sapiens]//4.00E-16//65aa//29%

BRSSN2018218

BRSTN2000312

BRSTN2006466//Glutamate decarboxylase, 65 kDa isoform (EC 4.1.1.15) (GAD-65) (65 kDa glutamic acid decarboxylase).//2.00E-77//140aa//80%

BRSTN2006638//synaptotagmin interacting protein 1 [Rattus norvegicus]//2.00E-74//147aa//45%

BRSTN2008475//growth arrest-specific 11; growth arrest specific 11 [Homo sapiens]//6.00E-36//71aa//98%

BRSTN2009247

BRSTN2010089//tumor differentially expressed 1, like; membrane protein TMS-2 [Mus musculus]//0//413aa//91%

BRSTN2010416

BRSTN2011688

BRSTN2011899

BRSTN2011961//Protein disulfide isomerase precursor (PDI) (EC 5.3.4.1) (Prolyl 4-hydroxylase beta subunit) (Cellular thyroid hormone binding protein) (P55).//3.00E-90//160aa//86%

BRSTN2012069//Elongation factor 1-alpha 1 (EF-1-alpha-1) (Elongation factor 1 A-1) (eEF1A-1) (Elongation factor Tu) (EF-Tu).//0//441aa//95%

BRSTN2015699

BRSTN2015788

BRSTN2016892//BUP protein [Homo sapiens]//1.00E-56//105aa//100%

BRSTN2016918//Glial fibrillary acidic protein, astrocyte (GFAP).//0//367aa//86%

BRSTN2016992//DRR1 protein (TU3A protein).//4.00E-62//118aa//81%

BRSTN2017104

BRSTN2017151//COP9 (constitutive photomorphogenic), subunit 7a (Arabidopsis); COP9 complex S7a [Mus musculus]//7.00E-24//54aa//98%

BRSTN2017184

BRSTN2018712

BRTHA2000969

BRTHA2001304

BRTHA2001953

BRTHA2002091

BRTHA2003759

BRTHA2005448//calpain 12 [Mus musculus]//0//300aa//87%

BRTHA2006720

BRTHA2008502

BRTHA2008598

BRTHA2010672//neutral protease large subunit [Homo sapiens].//3.00E-39//117aa//71%

BRTHA2012189

BRTHA2014647

BRTHA2018304

BRTHA2019726//Ig gamma-1 chain C region.//0//314aa//95%

BRTHA2019743

BRTHA2020400//Ig lambda chain V-IV region Bau.//2.00E-45//82aa//78%

BRTHA2020566

BRTHA2020642//DRR1 protein (TU3A protein).//5.00E-19//120aa//50%

BRTHA2020695

BRTHA2020721//Ig gamma-1 chain C region.//0//315aa//95%

BRTHA2020781

BRTHA2020910//Tubulin beta-4 chain (Tubulin beta-III).//1.00E-163//283aa//93%

BRTHA2021212

BRTHA2021440

BRTHA2021450

BRTHA2022074

BRTHA2022914

BRTHA2022968//NG-CAM related cell adhesion molecule precursor (NR-CAM) (BRAVO).//7.00E-45//95aa//54%

BRTHA2023402

BRTHA2023437

BRTHA2024177

BRTHA2024354

BRTHA2024712//T-box transcription factor TBX2 (T-box protein 2).//6.00E-65//123aa//83%

BRTHA2025869//Neurofilament triplet L protein (68 kDa neurofilament protein) (Neurofilament light polypeptide) (NF-L).//1.00E-157//306aa//80%

BRTHA2026071//TH1 drosophila homolog [Homo sapiens]//7.00E-21//45aa//100%

BRTHA2026290//Ra-1 guanine nucleotide dissociation stimulator-like 2 (RalGDS-like factor) (RAS-associated protein RAB2L).//3.00E-17//116aa//24%

BRTHA2026311//Protein disulfide isomerase A6 precursor (EC 5.3.4.1) (Protein disulfide isomerase P5).//0//379aa//87%

BRTHA2027227

BRTHA2027229

BRTHA2027250//Synaptotagmin B (Synaptic vesicle protein O-P65-B).//6.00E-46//99aa//35%

BRTHA2028297

BRTHA2029969

BRTHA2030036

BRTHA2030213

BRTHA2031517

BRTHA2031917//Ciliary neurotrophic factor receptor alpha precursor (CNTFR alpha).//1.00E-107//181aa//88%

BRTHA2032763

BRTHA2033122

BRTHA2033155//Beta-1,4 N-acetylgalactosaminyltransferase (EC 2.4.1.92) ((N-acetyineuraminyl)-galactosylglucosylceramide) (GM2/GD2 synthase) (GalNAc-T).//2.00E-43//95aa//65%

BRTHA2033320

BRTHA2033469

BRTHA2033683//Urea transporter, erythrocyte.//1.00E-153//259aa//93%

BRTHA2034281

BRTHA2034576

BRTHA2035743//activated p21cdc42Hs kinase [Homo sapiens]//0//417aa//73%

BRTHA2036055

BRTHA2036295

BRTHA2037247

BRTHA2038279

BRTHA2038345

BRTHA2038353

BRTHA3000456//Zinc finger protein HZF10.//1.00E-134//212aa//57%

BRTHA3002411

BRTHA3003225

BRTHA3003417

[0717] BRTHA3003736//TFIIH-basal transcription factor complex helicase XPB subunit-(EC 3.6.1.-) (Basic transcription factor 2 89 kDa subunit) (BTF2-p89) (TFIIH 89 kDa subunit) (DNA-repair protein complementing XP-B cells) (Xeroderma pigmentosum group B complementing protein) (DNA excision repair protein ERCC-3).//0//520aa//96%

BRTHA3005988

BRTHA3006593

BRTHA3007469

BRTHA3007662

BRTHA3009858

BRTHA3010135//LAR protein precursor (Leukocyte antigen related) (EC 3.1.3.48).//0//422aa//100%

BRTHA3010212//Zinc finger protein 91 (Zinc finger protein HTF10) (HPF7).//0//397aa//69%

BRTHA3010469//NMN adenylyltransferase; nicotinamide mononucleotide adenylyl transferase [Homo sapiens]//2.00E-30//61aa//50%

BRTHA3010530//ubiquitin-protein ligase e3 componen n-recognin [Mus musculus]//1.00E-161//264aa//85%

BRTHA3010540

BRTHA3010717//secretory carrier membrane protein 5 [Mus musculus]//1.00E-107//186aa//79%

BRTHA3011187//hect domain and RLD 2 [Homo sapiens]//7.00E-17//51aa//34%

BRTHA3011194//Chloride channel protein 3 (CIC-3).//0//622aa//89%

BRTHA3011229

BRTHA3011265//Spindlin (30000 Mr metaphase complex) (SSEC P).//5.00E-69//120aa//91%

BRTHA3011306

BRTHA3011361

BRTHA3011510

BRTHA3011892

BRTHA3011998//rhomboid (veinlet, Drosophila)-like; Rhomboid, drosophila, homolog of [Homo sapiens]//9.00E-31//110aa//51%

BRTHA3012265//pendrin [Homo sapiens].//8.00E-44//300aa//34%

BRTHA3013860

BRTHA3013882

BRTHA3014000//rapa-1 [Homo sapiens]//0//1059aa//90%

BRTHA3014105

BRTHA3014507

BRTHA3014547//Ankyrin 1 (Erythrocyte ankyrin) (Ankyrin R) (Ankyrins 2.1 and 2.2).//3.00E-85//205aa//34%

BRTHA3014835

BRTHA3014854

BRTHA3014920

BRTHA3016616

BRTHA3017791

BRTHA3018409//synaptotagmin-like 4; granuphilin-a; granuphilin-b; granuphilin//2.00E-56//160aa//41%

BRTHA3018623

BRTHA3019183//Ca<2+>dependent activator protein for secretion; Ca2+-dependent activator protein for secretion [Mus musculus]//4.00E-67//122aa//96%

BRTHA3020369

BRTHA3020771

BRTHA3021569

BRTHA3021708//FERM, RhoGEF, and pleckstrin domain protein 1; chondrocyte-derived ezrin-like protein [Homo sapiens]//2.00E-66//122aa//64%

BRTHA3021786

BRTHA3021971//oxidation resistance 1; oxidation resistance 1; hypothetical protein FLJ10125 [Homo sapiens]//1.00E-76//136aa//50%

BRTHA3022641

BRTHA3023403//phospholipase C, epsilon [Homo sapiens]//0//689aa//90%

BRTHA3023590

BRTHA3023929

BRTHA3024600

BRTHA3025073//Actin cross-linking family protein 7 (Macrophin) (Trabeculin-alpha) (620 kDa actin-binding protein) (ABP620).//0//685aa//97%

BRTHA3026161

BRTHA3026180

BRTHA3026556

BRTHA3026916//RaI guanine nucleotide dissociation stimulator (RaIGEF) (RaIGDS).//0//728aa//85%

BRTHA3027171

BRTHA3027318

BRTHA3027638

BRTHA3027820

BRTHA3027879

BRTHA3027957//megacaryocytic acute leukemia protein [Homo sapiens]//3.00E-36//95aa//41%

BRTHA3028339//YY1-associated factor 2 [Homo sapiens]//4.00E-26//55aa//63%

BRTHA3028505

CERVX2000812

CERVX2000968//F-actin binding protein b-Nexilin [Rattus norvegicus].//1.00E-112//312aa//92%

CHONS2000797//T-box transcription factor TBX15 (T-box protein 15) (MmTBx8).//0//451aa//90%

CHONS2001287//Insulin-like growth factor binding protein 3 precursor (IGFBP-3) (IBP-3) (IGF-binding protein 3).//1.00E-117//201aa//77%

CHONS2001797

CHONS2001834//tumor endothelial marker 7 precursor [Homo sapiens]//1.00E-147//246aa//98%

CHONS2002419

CHONS2002829//adipocyte enhancer binding protein 1 precursor [Homo sapiens]//0//542aa//77%

COLON2001829//Dopamine- and cAMP-regulated neuronal phosphoprotein (DARPP-32).//6.00E-84//157aa//77%

COLON2001866

COLON2004351//Probable beta-1,3-galactosyltransferase 8 (EC 2.4.1.-) (UDP-galactose:beta-N-acetylglucosamine beta-1,3-galactosyltransferase 8)//4.00E-46//93aa//47%

COLON2004911//Oxygen-regulated protein 1 (Retinitis pigmentosa RP1 protein) (Retinitis pigmentosa 1 protein).//2.00E-31//110aa//48%

COLON2005623//2-19 protein precursor.//3.00E-68//121aa//54%

COLON2005735//Blood group RH(CE) polypeptide (Rhesus C/E antigens) (RH30A) (RHIXB) (RH polypeptide 1) (RHPI).//0//353aa//95%

CTONG2001932//bromodomain adjacent to zinc finger domain, 2B [Homo sapiens]//0//385aa//66%

CTONG2003517

CTONG2006235//ubiquitin-protein ligase e3 componen n-recognin [Mus musculus]//1.00E-24//82aa//30%

CTONG2008989//Gap junction beta-5 protein (Connexin 31.1) (Cx31.1).//7.00E-74//123aa//57%

CTONG2009033

CTONG2009570//rab11 binding protein [Bos taurus].//0//400aa//90%

CTONG2010330//Homo sapiens phospholipase A2, group IVB (cytosolic) (PLA2G4B)//1.00E-122//222aa//45%

CTONG2010633

CTONG2011801//Zinc finger protein 91 (Zinc finger protein HTF10) (HPF7).//3.00E-62//104aa//50%

CTONG2012123//Mus musculus enabled homolog (Drosophila) (Enah), mRNA//1.00E-77//155aa//74%

CTONG2014206//oxidation resistance 1; oxidation resistance 1; hypothetical protein FLJ10125 [Homo sapiens]//1.00E-127//221aa//82%

CTONG2014959

CTONG2020582//Acetyl-coenzyme A synthetase (EC 6.2.1.1) (Acetate-CoA ligase) (Acyl-activating enzyme).//1.00E-157//269aa//54%

CTONG2026987

CTONG2027150

CTONG2027591//Mus musculus pecanex homolog (Drosophila) (Pcnx), mRNA.//0//347aa//81%

CTONG2027783

CTONG2027959

CTONG3001605//putative tumor suppressor [Homo sapiens]//1.00E-35//77aa//45%

CTONG3002518

CTONG3002588

CTONG3003669//high-glucose-regulated protein 8 [Homo sapiens]//1.00E-101//170aa//79%

CTONG3008223

D90ST2003106//Homo sapiens SMART/HDAC1 associated repressor protein (SHARP), mRNA//0//486aa//82%

D90ST2003989

D90ST2004417//60S ribosomal protein L13 (Breast basic conserved protein 1).//1.00E-100//185aa//88%

DFNES2001829

DFNES2011221

ERLTF2001452

ERLTF2001835

ERLTF2002178//Kelch-like protein X.//1.00E-138//251aa//50%

ERLTF2002369

FCBBF3001018//Hydroxymethylglutaryl-CoA lyase (EC 4.1.3.4) (HMG-CoA lyase) (HL) (3-hydroxy-3-methylglutarate-CoA lyase).//5.00E-88//152aa//73%

FCBBF3002188

FCBBF3005160

FCBBF3012443

FCBBF3020030//Transcription intermediary factor 1-alpha (TIF1-alpha).//0//423aa//80%

FCBBF3021191//Protein phosphatase 2C gamma isoform (EC 3.1.3.16) (PP2C-gamma) (Protein phosphatase magnesium-dependent 1 gamma) (Protein phosphatase 1C).//0//441aa//80%

FCBBF3024911//WHSC1L1 protein isoform short; Wolf-Hirschhorn syndrome candidate 1-like 1 protein [Homo sapiens]//1.00E-124//217aa//91%

FCBBF5000384//SWI/SNF related, matrix associated, actin dependent regulator of chromatin, subfamily d, member 3; Rsc6p [Homo sapiens]//0//394aa//84%

FEBRA2000805

FEBRA2002260

FEBRA2012625

FEBRA2013069

FEBRA2013570//2-oxoisovalerate dehydrogenase alpha subunit, mitochondrial precursor (EC 1.2.4.4) (Branched-chain alpha-keto acid dehydrogenase component alpha chain (E1)) (BCKDH E1-alpha).//0//391aa//95%

FEBRA2017736

FEBRA2017811

FEBRA2023498//Leucine-rich repeat protein LRRC3 precursor.//2.00E-63//116aa//86%

FEBRA2026582//Homo sapiens protein (peptidyl-prolyl cis/trans isomerase)

NIMA-interacting, 4 (parvulin) (PIN4)//7.00E-25//79aa//100%

FEBRA2026977

FEBRA2028222

FEBRA2028457//Nucleolin (Protein C23).//0//360aa//82%

FEHRT2001482

FEHRT2002708//solute carrier family 22 (organic cation transporter)-like 2 [Mus musculus].//6.00E-42//90aa//44%

FEKID2001001

FEKID2001201

FEKID2002231

FEKID2002493//WNT-14 protein precursor.//1.00E-100//174aa//61%

FEKID2002637//Serine/threonine protein phosphatase PP1-alpha 1 catalytic subunit (EC 3.1.3.16) (PP-1A).//0//297aa//99%

FELNG2000720//CD166 antigen precursor (Activated leukocyte-cell adhesion molecule) (ALCAM).//1.00E-123//219aa//91%

FELNG2001613

FELNG2001706//transcriptional co-activator with PDZ-binding motif (TAZ); transcriptional co-activator with PDZ-binding motif (TAZ); DKFZP58611419 protein [Homo sapiens]//2.00E-21//45aa//97%

FELNG2001953//JAK binding protein [Homo sapiens]//6.00E-96//174aa//82%

HCASM2007773

HCASM2008154//RNA-binding protein EWS (EWS oncogene) (Ewing sarcoma breakpoint region 1 protein).//1.00E-104//219aa//48%

HCHON2009766

HEART2002531

HHDPC2008185//jerky [Mus musculus]//0//397aa//75%

HLUNG2012600

HSYRA2004550//Potential phospholipid-transporting ATPase IIB (EC 3.6.3.13).//0//433aa//92%

HSYRA2007338

JCMLC1000159//Interferon-gamma receptor alpha chain precursor (CDw119).//4.00E-65//122aa//78%

JCMLC2000273//Integrin alpha-M precursor (Cell surface glycoprotein MAC-1 alpha subunit) (CR-3 alpha chain) (CD11b) (Leukocyte adhesion receptor M01) (Neutrophil adherence receptor).//0//536aa//96%

JCMLC2002095//P-selectin glycoprotein ligand 1 precursor (PSGL-1) (Selectin P ligand) (CD162 antigen).//1.00E-21//48aa//72%

JCMLC2002751//Von Willebrand factor precursor (vWF).//2.00E-42//83aa//37%

KIDNE2004531//Lag protein [Mus musculus]//1.00E-109//197aa//78%

KIDNE2010049//Glycerol kinase 2 (EC 2.7.1.30) (ATP:glycerol 3-phosphotransferase 2) (Glycerokinase 2) (GK 2).//8.00E-87//176aa//34%

KIDNE2014496

KIDNE2015987//Uromodulin precursor (Tamm-Horsfall urinary glycoprotein) (THP).//0//433aa//86%

KIDNE2016464

KIDNE2017153

KIDNE2018268

LIVER2008465

LYMPB1000158

LYMPB2001387

LYMPB2002236//Gene terminal protein (Membrane protein LMP-2A/LMP-2B).//3.00E-75//153aa//55%

LYMPB2002344

LYMPB2002458//Tenascin precursor (TN) (Hexabrachion) (Cytotactin) (Neuronectin) (GMEM) (JI) (Miotendinous antigen) (Glioma-associated-extracellular matrix antigen) (GP 150-225).//1.00E-115//193aa//45%

LYMPB2002478

MESAN2007032

MESAN2009156

MESAN2014624//tumor differentially expressed 1, like; membrane protein TMS-2 [Mus musculus]//2.00E-71//124aa//52%

MESAN2016304

MESAN2017133

MESTC2000170

[0718] N1ESE2000698//WD-repeat protein 1 (Actin interacting protein 1) (NORI-1).//0//558aa//92%

NETRP2000439

NETRP2000961//Cytosolic purine 5′-nucleotidase (EC 3.1.3.5).//0//368aa//100%

NETRP2002082

NETRP2003103

NETRP2003268

NETRP2003448//Ras-related protein RAL-B.//4.00E-97//189aa//83%

NETRP2003539

NETRP2004017//nuclear transcription factor Y, gamma; CCAMT-binding transcription factor-subunit C; transactivator HSM-1; histone Hi transcription factor large subunit 2A [Homo sapiens]//6.00E-90//193aa//59%

NETRP2004090

NETRP2004434

NETRP2005282

NETRP2005849

NETRP2005972

NETRP2006468

NETRP2007945

NETRP2008488

NETRP2008582//Adipophilin (Adipose differentiation-related protein) (ADRP).//1.00E-19//100aa//44%

NOVAR2000783

NT2NE2011107

NT2NE2016041

NT2RI2004818//1-phosphatidylinositol-4,5-bisphosphate phosphodiesterase beta 1 (EC 3.1.4.11) (PLC-beta-1) (Phospholipase C-beta-1) (PLC-I) (PLC-154).//0//883aa//91%

NT2RI2009233

NT2RI2010795

NT2RI2012542

NT2RI2015533

NT2RI2023671

NT2RI2028537

NT2RI3001573//F-box protein FBL10 [Mus musculus].//3.00E-78//223aa//62%

NT2RI3001967//Ankyrin homolog precursor.//6.00E-13//68aa//30%

NT2RI3005861

NT2RI3005923//Cadherin-related tumor suppressor precursor (Fat protein).//1.00E-116//370aa//28%.

NT2RI3007095//Mus musculus neuregulin 1 (Nrg1), mRNA.//0//861aa//96%

NT2RI3008179//thyroid hormone receptor-associated protein, 240 kDa subunit [Homo sapiens]//0//562aa//43%

NT2RI3009480//Transcription factor Sp3 (SPR-2) (Fragment).//1.00E-43//78aa//69%

NT2RI3009524//Crumbs protein homolog 1 precursor.//1.00E-178//375aa//31%

NT2RP7003439

NT2RP7007387

NT2RP7014178

NT2RP7014778

NT2RP7016508//YN21_CAEEL Putative ATP-dependent RNA helicase T26G10.1 in chromosome III//1.00E-157//388aa//69%

NT2RP70117139

NT2RP7019682

NT2RP7020343

NT2RP8000633

NT2RP8001363//signal peptide, CUB domain, EGF-like 1 [Mus musculus]//0//357aa//87%

NT2RP8001407

NT2RP8001584//alpha integrin binding protein 63 [Homo sapiens]//1.00E-17//74aa//30%

NT2RP8001604//CUB and Sushi multiple domains 1 [Homo sapiens]//0//754aa//65%

NT2RP8001605

NT2RP8003490//LIM/homeobox protein LMX1A (LMX-1) (L1M-homeobox protein 1).//0//344aa//90%

NT2RP8003657

[0719] NT2RP8003787//vanilloid receptor-related osmotically activated channel; OSM9-like transient receptor potential channel 4; transient receptor potential channel 12; transient receptor potential, drosophila, homolog of, 12 [Homo sapiens]//1.00E-118//221aa//44%

NT2RP8005546//schlafen 3 [Mus musculus]//1.00E-34//92aa//29%

NT2RP8006452//Flightless-I protein.//1.00E-14//79aa//30%

NT2RP8006521

NT2RP8007416

NT2RP8007503

NT2RP8007920

NT2RP8008057//cartilage intermediate layer protein [Homo sapiens]//0//564aa//49%

NT2RP8009119

NT2RP8009248

NTONG2002278

NTONG2003805//Zinc finger protein 45 (BRC1744).//0//438aa//98%

NTONG2004829

NTONG2008483//zinc finger protein 106 [Homo sapiens]//0//607aa//72%

NTONG2009468

OCBBF2000831//AMBP protein precursor [Contains: Alpha-1-microglobulin; Inter-alpha-trypsin inhibitor light chain (ITI-LC) (Bikunin) (Hl-30)].//9.00E-23//54aa//36%

OCBBF2003518//Myosin heavy chain, non-muscle (Zipper protein) (Myosin II).//3.00E-14//118aa//21%

OCBBF2004478//Homo sapiens cadherin, EGF LAG seven-pass G-type receptor 2 (flamingo homolog, Drosophila) (CELSR2), mRNA//4.00E-96//177aa//80%

OCBBF2007039//ADAM-TS 7 precursor (EC 3.4.24.-) (A disintegrin and metalloproteinase with thrombospondin motifs 7) (ADAMTS-7) (ADAM-TS7).//1.00E-143//293aa//36%

OCBBF2009536//Mus musculus amiloride-sensitive cation channel 1, neuronal (degenerin) (Accn1)//0//471aa//95%

OCBBF2014745

OCBBF2016928//zinc finger protein [Homo sapiens]//0//449aa//88%

OCBBF2018229

OCBBF2018618//Adenosine A1 receptor.//1.00E-155//273aa//83%

OCBBF2019761

OCBBF2024589//Dihydropyrimidinase related protein-1 (DRP-1) (Collapsin response mediator protein 1) (CRMP-1).//0//528aa//92%

OCBBF2024779

OCBBF2025631

OCBBF2030927//matrilin 4 isoform 2 precursor [Homo sapiens]//2.00E-39//138aa//28%

OCBBF2036019//NADH-ubiquinone oxidoreductase 20 kDa subunit, mitochondrial precursor (EC 1.6.5.3) (EC 1.6.99.3) (Complex I-20KD) (CI-20KD) (PSST subunit).//7.00E-36//76aa//97%

OCBBF3000743

OCBBF3000830

OCBBF3001076

OCBBF3001202//suppression of tumorigenicity 5 [Homo sapiens]//0//532aa//87%

OCBBF3001333//ubiquitin UBF-fl [Homo sapiens]//1.00E-166//279aa//58%

OCBBF3001616

OCBBF3003745

OCBBF3004487//Probable ATP-dependent RNA helicase p47.//1.00E-140//245aa//100%

OCBBF3004908

OCBBF3005330//FYVE finger-containing phosphoinositide kinase (EC 2.7.1.68) (1-phosphatidylinositol-4-phosphate kinase) (PIP5K) (Ptdins(4)P-5-kinase) (p235).//0//878aa//86%

OCBBF3005843

OCBBF3006986//CDC4-like protein (Beige-like protein) (Fragment).//1.00E-112//299aa//33%

OCBBF3007078

OCBBF3007704

OCBBF3008392//bromodomain adjacent to zinc finger domain, 2A; TTF-I interacting peptide 5 [Homo sapiens]//0//504aa//92%

OCBBF3008835

OCBBF3009244//pantothenate kinase 1 beta [Mus musculus]//1.00E-154//267aa//89%

OCBBF3019269//Homo sapiens Dvl-binding protein IDAX (inhibition of the Dvl and Axin complex) (IDAX)//1.00E-100//168aa//84%

OCBBF3020263//Zinc finger protein 135.//4.00E-90//144aa//59%

OCBBF3020414

OCBBF3021086

OCBBF3021166

OCBBF3021361//rapa-1 [Homo sapiens]//3.00E-50//330aa//50%

OCBBF3021502

OCBBF3021515

OCBBF3022123

[0720] OCBBF3022166//Nuclear receptor co-repressor 2 (N-CoR2) (Silencing mediator of retinoic acid and thyroid hormone receptor) (SMRT) (SMRTe) (Thyroid-, retinoic-acid-receptor-associated co-repressor) (T3 receptor-associating factor) (TRAC) (CTG26).//2.00E-38//75aa//92%

OCBBF3022576

OCBBF3022827//putative Rab5 GDP/GTP exchange factor homologue [Homo sapiens]//0//384aa//90%

OCBBF3023175//LPS-responsive beige-like anchor [Mus musculus]//0//999aa//63%

OCBBF3023543

OCBBF3023913//Mus musculus protein phosphatase 1, regulatory (inhibitor) subunit 1C (Ppp1r1c)//1.00E-154//302aa//44%

OCBBF3023993

OCBBF3025127

OCBBF3025131

OCBBF3025475//Renal sodium/dicarboxylate cotransporter (Na(+)/dicarboxylate cotransporter).//1.00E-155//279aa//50%

OCBBF3025503//Eyes absent homolog 1.//0//423aa//89%

OCBBF3025630//Brefeldin A-inhibited guanine nucleotide-exchange protein 1 (Brefeldin A-inhibited GEP 1) (p200 ARF-GEP1) (p200 ARF guanine nucleotide exchange factor).//1.00E-132//235aa//96%

OCBBF3025887

OCBBF3025901

OCBBF3026088

OCBBF3026361

OCBBF3026979//Protein kinase C-binding protein NELL1 precursor (NEL-like protein 1) (Nel-related protein 1).//0//795aa//94%

OCBBF3027969//myosin IIIA [Homo sapiens]//3.00E-84//187aa//36%

OCBBF3028001//Rattus norvegicus potassium channel subunit (Slack) (Slack), mRNA//oil 407aa//76%

PEBLM2001803

PEBLM2003935

PEBLM2005615//C-C chemokine receptor type 7 precursor (C-C CKR-7) (CC-CKR-7) (CCR-7) (MIP-3 beta receptor) (EBV-induced G protein-coupled receptor 1) (EBI1) (BLR2).//0//351aa//92%

PEBLM2006298

PERIC2003349

PLACE5000492//1-phosphatidylinositol-4,5-bisphosphate phosphodiesterase delta 1 (EC 3.1.4.11) (PLC-delta-1) (Phospholipase C-delta-1) (PLC-III).//0//505aa//91%

PLACE5000522

PLACE5000527

PLACE6000012//cation-chloride cotransporter-interacting protein [Homo sapiens]//3.00E-19//54aa//54%

PLACE6000055//neuronal differentiation related protein [Mus musculus]//0//416aa//90%

PLACE6001933//Epidermal growth factor receptor precursor (EC 2.7.1.112).//1.00E-40//79aa//98%

PLACE6003004//rTS beta protein [Homo sapiens]//0//388aa//93%

PLACE6008315//similar to ALPHA-ACTININ, SARCOMERIC (F-ACTIN CROSS LINKING

PROTEIN) (D. melanogaster) [Homo sapiens].//1.00E-76//121aa//100%

PLACE6010925//NY-REN-50 antigen [Homo sapiens]//0//345aa//98%

PLACE6010936//orphan G protein-coupled receptor GPR26 [Rattus norvegicus].//1.00E-62//112aa//63%

PLACE6016030//Wilms tumor 1-associating protein (WT1-associated protein).//1.00E-73//138aa//91%

PLACE6019542

PLACE6019600//Ras-related protein Rab-12 (Fragment).//1.00E-45//92aa//85%

PLACE6019674

PLACE7000266//titin [Homo sapiens]//2.00E-36//218aa//24%

PLACE7000707

PLACE7001759//Arylacetamide deacetylase (EC 3.1.1.-) (MADAC).//8.00E-41//97aa//36%

PLACE7002303//Pituitary homeobox 2 (RIEG bicoid-related homeobox transcription factor) (Solurshin) (ALL1 responsive protein ARP1).//1.00E-145//256aa//80%

PLACE7003639

PLACE7003684

PLACE7003985//Estradiol 17 beta-dehydrogenase 1 (EC 1.1.1.62) (17-beta-HSD 1) (Placental 17-beta-hydroxysteroid dehydrogenase) (20 alpha-hydroxysteroid dehydrogenase) (20-alpha-HSD) (E2DH).//1.00E-164//293aa//89%

PLACE7004103//Vigilin (High density lipoprotein-binding protein) (HDL-binding protein).//0//701aa//91%

PLACE7004961//Dynamin-1 (EC 3.6.1.50) (D100) (Dynamin, brain) (B-dynamin).//2.00E-18//49aa//68%

PLACE7005169//zinc finger protein 292 [Mus musculus]//0//953aa//76%

PLACE7005671

PLACE7005840

PLACE7006090//Maltase-glucoamylase, intestinal [Includes: Maltase (EC 3.2.1.20) (Alpha-glucosidase); Glucoamylase (EC 3.2.1.3) (Glucan 1,4-alpha-glucosidase)].//9.00E-59//107aa//86%

PLACE7006240

PLACE7006268//Histone acetyltransferase type B catalytic subunit (EC 2.3.1.48).//1.00E-67//124aa//100%

PLACE7006498//Guanine nucleotide-binding protein, alpha-12 subunit (G alpha 12).//1.00E-160//277aa//99%

PLACE7006540

PLACE7007379//carboxypeptidase Z precursor [Homo sapiens]//1.00E-149//245aa//99%

PLACE7007973

PLACE7008136

PLACE7008766

PLACE7009563//Melanoma-associated antigen 11 (MAGE-11 antigen).//1.00E-162//284aa//89%

PLACE7009757//Transcription factor Sp3 (SPR-2) (Fragment).//3.00E-44//79aa//70%

PLACE7009936//Active breakpoint cluster region-related protein.//1.00E-114//204aa//99%

PLACE7010567

PLACE7011269

PLACE7011559//Death-associated protein kinase 1 (EC 2.7.1.-) (DAP kinase 1).//1.00E-153//263aa//88%

PLACE7012111//ADAM 12 precursor (EC 3.4.24.-) (A disintegrin and metalloproteinase domain 12) (Meltrin alpha).//0//662aa//96%

PLACE7012127//AAA-ATPase TOB3 [Homo sapiens]//9.00E-64//118aa//91%

PLACE7013060

PLACE7014247//Phosphatidylinositol 3-kinase catalytic subunit, gamma isoform (EC 2.7.1.137) (PI3-kinase P110 subunit gamma) (Ptdins-3-kinase P110) (PI3K) (PI3 Kgamma).//4.00E-50//93aa//100%

PLACE7014396

PLACE7015238

PLACE7015647

PLACE7016214

PLACE7016321

PLACE7016454

PLACE7016526//Lon-protease homolog, mitochondrial precursor (EC 3.4.21.-) (Lon protease-like protein) (LONP) (LONHs).//0//865aa//90%

PLACE7018304

PLACE7018349

PLACE7018452

PLACE7018479

PLACE7018512

PROST2002078//RNA-binding protein with multiple splicing homolog (RBP-MS) (HEart, RRM Expressed Sequence) (Hermes).//7.00E-90//161aa//77%

PROST2007444

PROST2016566//erythroblast macrophage protein [Mus musculus]//6.00E-82//144aa//91%

PROST2017578

PROST2017729

PROST2017749

PROST2017910

PUAEN2000594//Polyadenylate-binding protein 1 (Poly(A)-binding protein 1) (PABP 1) (PABP1).//5.00E-60//117aa//92%

PUAEN2000684//Mus musculus soc-2 (suppressor of clear) homolog//5.00E-28//107aa//26%

PUAEN2006639//Vegetatible incompatibility protein HET-E-1.//1.00E-46//89aa//36%

RECTM2001519

SKMUS2008585//protein phosphatase [Homo sapiens]//1.00E-112//198aa//100%

SKMUS2009479

SKMUS2009557

SKNMC2003639

SKNSH2007306//Sperm-specific antigen 2 (Cleavage signal-1 protein) (CS-1).//1.00E-102//194aa//85%

SMINT2003641

SMINT2009292

SMINT2009895

SMINT2010753//Probable kinesin light chain 3 (KLC 3).//0//528aa//85%

SMINT2011406//Interferon-regulated resistance GTP-binding protein MxB (P78-related protein).//1.00E-90//165aa//100%

SMINT2011509//Homo sapiens polymerase (DNA directed), lambda (POLL), mRNA//1.00E-145//254aa//95%

SMINT2012040

SMINT2012179//LCAT-like lysophospholipase [Homo sapiens]//1.00E-123//205aa//99%

SMINT2014166

SMINT2014721//Peroxisomal carnitine octanoyltransferase (EC 2.3.1.-) (COT).//0//611aa//95%

SMINT2017964

SMINT2019105

SPLEN2001227

SPLEN2007689//Neutrophil cytosol factor 1 (NCF-1) (Neutrophil NADPH oxidase factor 1) (47 kDa neutrophil oxidase factor) (p47-phox) (NCF-47K) (47 kDa autosomal chronic granulomatous disease protein).//2.00E-75//135aa//99%

SPLEN2011252

SPLEN2012571//Zinc finger protein 202.//1.00E-77//203aa//32%

SPLEN2017999

SPLEN2019092

SPLEN2019480

SPLEN2021231

SPLEN2021991

SPLEN2022785

SPLEN2022920

SPLEN2024571

SPLEN2025012//Ig alpha-1 chain C region.//0//318aa//92%

SPLEN2027852

SPLEN2028417//Homeobox protein HLX1 (Homeobox protein HB24).//0//364aa//74%

SPLEN2028593

SPLEN2031004

SPLEN2032677

SPLEN2033996//pan-hematopoietic expression; tumor-suppressing STF cDNA 6; TSSC6 tumor-suppressing STF cDNA 6; tumor suppressing subtransferable candidate 6 [Homo sapiens]//2.00E-63//111aa//100%

SPLEN2034551//LIS1-interacting protein NUDE1, rat homolog [Homo sapiens]//2.00E-71//136aa//100%

SPLEN2034601

SPLEN2034934//shroom [Mus musculus]//2.00E-49//90aa//68%

SPLEN2035615

SPLEN2036608

SPLEN2037077

SPLEN2042051

STOMA2003894

STOMA2004663//T-cell receptor alpha chain V region RL-5 precursor.//9.00E-36//75aa//65%

SYNOV2003326//Glucocorticoid-induced leucine zipper protein (Delta sleep-inducing peptide immunoreactor) (DSIP-immunoreactive peptide) (DIP protein) (hDIP) (TSC-22-like protein) (TSC-22R).//3.00E-65//125aa//93%

SYNOV2017179//EBP50-PDZ interactor of 64 kD [Homo sapiens]//0//485aa//94%

SYNOV3000345//upregulated by 1,25-dihydroxyvitamin D-3 [Homo sapiens]//5.00E-65//142aa//36%

SYNOV4000598

SYNOV4003174//unconventional myosin from rat 4 for myosin I heavy chain [Rattus norvegicus]//0//650aa//97%

SYNOV4004210

SYNOV4009139//hyaluronoglucosaminidase 2; lysosomal hyaluronidase; PH-20 homolog; hyaluronidase 2 [Homo sapiens]//0//429aa//90%

SYNOV4009575

T1ESE2000609//SON protein (SON3).//1.00E-177//315aa//86%

T1ESE2000904//zinc finger protein 304 [Homo sapiens]//0//325aa//49%

T1ESE2002665//Bumetanide-sensitive sodium-(potassium)-chloride cotransporter 1 (Basolateral Na—K—Cl symporter).//6.00E-60//129aa//31%

TBAES2003917//NG28 protein [Mus musculus]//0//479aa//58%

TBAES2005361

TBAES2007428//N-acetylglucosamine-1-phosphodiester alpha-N-acetylglucosaminidase [Homo sapiens]//0//427aa//82%

TBAES2007548

TBAES2007862

TESOP2002005

TESOP2003308

TESOP2004110

TESOP2008556

TESTI1000459

TESTI2001364//lactate dehydrogenase A-like [Homo sapiens]//1.00E-113//204aa//81%-

TESTI2001915//actin filament associated protein [Homo sapiens]//1.00E-96//183aa//81%

TESTI2003768//Chloride channel protein 3 (CIC-3).//2.00E-23//47aa//90%

TESTI2004452

TESTI2004601//NYD-TSPG protein [Homo sapiens]//1.00E-45//116aa//35%

TESTI2004971

TESTI2005112//NADH-ubiquinone oxidoreductase 30 kDa subunit, mitochondrial precursor (EC 1.6.5.3) (EC 1.6.99.3) (Complex I-30KD) (CI-30KD).//1.00E-110//189aa//100%

TESTI2005153

TESTI2005564

TESTI2006543

TESTI2007490//2-hydroxyacylsphingosine 1-beta-galactosyltransferase precursor (EC 2.4.1.45) (UDP-galactose-ceramide galactosyltransferase) (Ceramide UDP-galactosyltransferase) (Cerebroside synthase).//0//510aa//94%

TESTI2008636

TESTI2009497//GPI-anchored protein p137 (p137GPI).//0//455aa//76%

TESTI2009739//Myosin heavy chain, smooth muscle isoform (SMMHC).//3.00E-14//104aa//20%

TESTI2011020

TESTI2011033

TESTI2018335

TESTI2018687

TESTI2018867

TESTI2021112

TESTI2021654//thymidylate kinase family LPS-inducible member; thymidylate kinase homologue [Mus musculus]//9.00E-19//196aa//74%

TESTI2022323//Olfactory receptor 2H1 (Hs6M1-16) (Olfactory receptor 6-2) (OR6-2) (OLFR42A-9004.14/9026.2).//1.00E-174//303aa//95%

TESTI2023053

TESTI2023903//ubiquilin 1 [Homo sapiens]//2.00E-53//156aa//34%

TESTI2024267

TESTI2026024//early development regulator 2 (homolog of polyhomeotic 2); polyhomeotic 2 protein [Mus musculus]//1.00E-116//198aa//89%

TESTI2026284

TESTI2028613

TESTI2030519

TESTI2030901//glutathione S-transferase theta 1 [Homo sapiens]//4.00E-18//68aa//57%

TESTI2033905

TESTI2034913//Keratin, type II cytoskeletal 8 (Cytokeratin 8) (K8) (CK 8).//1.00E-64//137aa//69%

TESTI2035962

TESTI2036285//ubiquitin C [Rattus norvegicus]//1.00E-78//166aa//91%

TESTI2036822

TESTI2037085

TESTI2037209

TESTI2037572

TESTI2037657//Integral membrane glycoprotein gp210 precursor.//1.00E-147//260aa//48%

TESTI2037877

TESTI2038733

TESTI2039342

TESTI2039732

TESTI2039738

TESTI2040372

TESTI2040377//Mitogen-activated protein kinase kinase kinase 1 (EC 2.7.1.-) (MAPK/ERK kinase kinase 1) (MEK kinase 1) (MEKK 1).//1.00E-13//56aa//28%

TESTI2041362

TESTI2041976

TESTI2046188

TESTI2049041

TESTI2049062//peroxisomal 2,4-dienoyl-CoA reductase [Homo sapiens]//6.00E-51//106aa//63%

TESTI2051742

TESTI2052110

TESTI2052202

TESTI2052670//Basement membrane-specific heparan sulfate proteoglycan core protein precursor (HSPG) (Perlecan) (PLC).//2.00E-44//139aa//32%

TESTI2052799

TESTI4000370

TESTI4000534

TESTI4000600

TESTI4000621//Snf2-related CBP activator protein [Homo sapiens]//0//1397aa//62%

TESTI4000703

TESTI4000957

TESTI4001037

TESTI4001348

TESTI4001517//Keratin, type I cytoskeletal 18 (Cytokeratin 18) (K18) (CK 18).//7.00E-52//103aa//78%

TESTI4001569

TESTI4001679//RING finger protein 4.//2.00E-92//165aa//86%

TESTI4002003

TESTI4002072

TESTI4002141

TESTI4002195

TESTI4002520

TESTI4002774//oxysterol binding protein 2 [Mus musculus]//3.00E-48//125aa//35%

TESTI4002799//DNA-directed RNA polymerase I 135 kDa polypeptide (EC 2.7.7.6) (RNA polymerase I subunit 2) (RPA135).//0//1001aa//88%

TESTI4002868//DNA-binding protein RFX5 (Regulatory factor X subunit 5).//5.00E-40//76aa//47%

TESTI4002889

TESTI4003179

TESTI4003279

TESTI4003319

TESTI4003404

TESTI4003565

TESTI4003574

TESTI4003579//FH1/FH2 domains-containing protein (Formin homolog overexpressed in spleen) (FHOS).//1.00E-111//207aa//53%

TESTI4003602

TESTI4003703//retinoblastoma-associated protein RAP140 [Homo sapiens]//5.00E-46//101aa//40%

TESTI4003733

TESTI4003796//Zinc finger protein 189.//1.00E-79//148aa//45%

TESTI4003944//Zinc finger protein 91 (Zinc finger protein HTF10) (HPF7).//8.00E-32//162aa//23%

TESTI4004031

TESTI4004210

TESTI4004539

TESTI4004653//CTL2 gene [Homo sapiens]//0//292aa//51%

TESTI4004695

TESTI4004917//Dynein beta chain, ciliary.//0//560aa//73%

TESTI4005013

TESTI4005322//Zinc finger protein 85 (Zinc finger protein HPF4) (HTF1).//0//339aa//69%

TESTI4005399

TESTI4005470//Transcriptional repressor CTCF.//1.00E-155//249aa//68%

TESTI4005653//SON DNA binding protein; SON DNA-binding protein; SON DNA-binding protein, KIMA1019; NRE-binding protein [Homo sapiens]//0//1122aa//77%

TESTI4006441

TESTI4006539

TESTI4007565

TESTI4007671//Mus musculus quiescin 06 (Oson6), mRNA.//1.00E-111//207aa//44%

TESTI4007965//Adapter-related protein complex 1 gamma 1 subunit (Gamma-adaptin) (Golgi adaptor HA1/AP1 adaptin gamma subunit) (Clathrin assembly protein complex 1 gamma large chain).//0//766aa//93%

TESTI4008086

TESTI4008305

TESTI4009501

TESTI4010544

TESTI4010721

TESTI4010902//Echinoderm microtubule-associated protein-like 4 (EMAP-4) (Restrictedly overexpressed proliferation-associated protein) (Ropp 120).//1.00E-56//135aa//35%

TESTI4010979

TESTI4011616

TESTI4011744

TESTI4011926

TESTI4012258

TESTI4012382

TESTI4012623

TESTI4012956

TESTI4012960

TESTI4013474//PTPL1-associated RhoGAP 1 [Homo sapiens]//1.00E-133//283aa//33%

TESTI4013742//antigen identified by monoclonal antibody 2A8 [Mus musculus]//0//640aa//70%

TESTI4013774

TESTI4013960

TESTI4013962

TESTI4014262

TESTI4014415

TESTI4014891

TESTI4014908//dedicator of cyto-kinesis 2 [Mus musculus]//0//825aa//92%

TESTI4014932//Integral membrane glycoprotein gp210 precursor.//0//580aa//40%

TESTI4014977

TESTI4015129

TESTI4015339

TESTI4016848

TESTI4017229

TESTI4017382//Copine VII.//1.00E-152//250aa//72%

TESTI4017647//homolog-like; Jerky, mouse, homolog-like [Homo sapiens]//2.00E-07//67aa//37%

TESTI4017854

TESTI4018436//Ubiquitin fusion degradation protein 1 homolog (UB fusion protein 1).//5.00E-70//125aa//100%

TESTI4018506//tomosyn [Rattus norvegicus]//0//689aa//85%

TESTI4019149

TESTI4020342//H326 [Homo sapiens]//0//370aa//61%

TESTI4020596//calpain 5 [Homo sapiens]//0//629aa//98%

TESTI4020819//complement-c1q tumor necrosis factor-related protein 6 [Homo sapiens]//2.00E-74//135aa//87%

TESTI4021129

TESTI4021197//Regulator of G-protein signaling 3 (RGS3) (RGP3).//0//479aa//92%

TESTI4021377

TESTI4021569//ATP-binding cassette, sub-family B, member 8, mitochondrial precursor (Mitochondrial ATP-binding cassette 1) (M-ABC1).//0//343aa//77%

TESTI4021713//synaptonemal complex protein 2 [Homo sapiens]//1.00E-46//108aa//40%

TESTI4021821

TESTI4022158//transmembrane receptor Unc5H2 [Rattus norvegicus]//0//812aa//87%

TESTI4023096//solute carrier family 12 (potassium/chloride transporters), member 6; potassium/chloride transporter 3 [Homo sapiens]//0//901aa//89%

TESTI4023172

TESTI4023654

TESTI4024240

TESTI4024245

TESTI4024294//WW domain binding protein 2 [Mus musculus]//3.00E-30//68aa//48%

TESTI4024494//zinc-binding protein Rbcc728 [Homo sapiens]//1.00E-111//190aa//46%

TESTI4025062

TESTI4025401

TESTI4025908

TESTI4026080//family member, chromosome-associated protein C [Homo sapiens]//0//1137aa//88%

TESTI4026680

TESTI4027139

TESTI4027170

TESTI4027262

TESTI4027660

TESTI4028042//NYD-SP11 protein [Homo sapiens]//0//610aa//90%

TESTI4028182//116 kDa U5 small nuclear ribonucleoprotein component (U5 snRNP-specific protein, 116 kDa) (U5-116 kDa).//0//642aa//95%

TESTI4029023

TESTI4029297

TESTI4029651

TESTI4029676

TESTI4029731

TESTI4029743

TESTI4030319

TESTI4030673

TESTI4030864

TESTI4031066

TESTI4031173//Contactin 2 precursor (Axonin-1) (Axonal glycoprotein TAG-1) (Transient axonal glycoprotein 1) (TAX-1).//1.00E-29//93aa//30%

TESTI4031818

TESTI4032128//Amyloid-like protein 2 precursor (Amyloid protein homolog) (APPH) (CDEI-box binding protein) (CDEBP).//0//564aa//84%

TESTI4032270

TESTI4032375

TESTI4032834//trinucleotide repeat containing 11 (THR-associated protein, 230 kDa subunit); thyroid hormone receptor-associated protein, 230 kDa subunit [Homo sapiens]//0//359aa//66%

TESTI4032856

TESTI4032913//Ankyrin 2 (Brain ankyrin) (Ankyrin B) (Ankyrin, nonerythroid).//1.00E-30//106aa//30%

TESTI4033177//Dual specificity protein phosphatase 8 (EC 3.1.3.48) (EC 3.1.3.16) (Dual specificity protein phosphatase hVH-5).//2.00E-57//110aa//92%

TESTI4034633

TESTI4034973

TESTI4035770

TESTI4035872

TESTI4035898

TESTI4035989

TESTI4036012

TESTI4036048//Sorting nexin 1.//0//457aa//90%

TESTI4037228

TESTI4037949//Kelch-like protein X.//1.00E-129//241aa//44%

TESTI4038047

TESTI4038758

TESTI4039451//B29 protein [Homo sapiens]//3.00E-34//73aa//38%

TESTI4039575//Telomeric repeat binding factor 1.//2.00E-12//62aa//100%

TESTI4039744

TESTI4039904//Zinc finger protein 85 (Zinc finger protein HPF4) (HTF1).//0//298aa//72%

TESTI4040197

TESTI4040559//Cyclic-nucleotide-gated olfactory channel (Cyclic-nucleotide-gated cation channel 2) (CNG channel 2) (CNG-2) (CNG2) (Aorta CNG channel) (RACNG).//0//600aa//90%

TESTI4040598

TESTI4040804

TESTI4041049//leucine-rich neuronal protein [Homo sapiens]//2.00E-72//136aa//90%

TESTI4041482//Rattus norvegicus SEC15 homolog (S. cerevisiae) (Sec15), mRNA//0//700aa//88%

TESTI4041832

TESTI4041984//latent transforming growth factor beta binding protein 4 [Homo sapiens]//0//732aa//86%

TESTI4042420

TESTI4042846

TESTI4043067

TESTI4043166//lymphocyte specific formin related protein; formin-related gene in leukocytes [Mus musculus]//1.00E-137//257aa//60%

TESTI4043223

TESTI4043371

TESTI4043378

TESTI4044076

TESTI4044291

TESTI4044770

TESTI4045168

TESTI4045330

TESTI4045470

TESTI4046073//Rho-GTPase-activating protein 6 (Rho-type GTPase-activating protein RhoGAPX-1).//1.00E-75//177aa//36%

TESTI4046090

TESTI4046245

TESTI4046328

TESTI4046450

TESTI14046873

TESTI4046962

TESTI4047119//AIM-1 protein [Homo sapiens]//1.00E-38//82aa//35%

TESTI4047305

TESTI4047328//otogelin [Mus musculus]//0//1009aa//65%

TESTI4047437

TESTI4047569

TESTI4047746

TESTI4047808

TESTI4048232

TESTI4048296

TESTI4048545

TESTI4048619

TESTI4049110

TESTI4049552

TESTI4049562

TESTI4049677

TESTI4049786//Hexokinase, type I (EC 2.7.1.1) (HK I) (Brain form hexokinase).//0//892aa//99%

TESTI4049863

TESTI4049899//deleted in malignant brain tumors 1 isoform c precursor [Homo sapiens]//6.00E-44//79aa//45%

TESTI4050293

TESTI4050954

TESTI4051015//Aquaporin 7 (Aquaporin-7 like) (Aquaporin adipose) (AQPap).//7.00E-17//45aa//86%

TESTI4051054

TESTI4051388

TESTI4051424//M-protein, striated muscle.//0//511aa//43%

TESTI4051504

TESTI4051747

TESTI4051858

TESTI4051865//Tight junction protein ZO-3 (Zonula occludens 3 protein) (Zona occludens 3 protein) (Tight junction protein 3).//0//825aa//88%

TESTI4051952

TESTI4052132

TESTI4052217

TESTI4052219//Potential phospholipid-transporting ATPase IH (EC 3.6.3.13).//0//670aa//92%

TESTI4052430

TESTI4052598//C-type lectin-like receptor-1 [Homo sapiens]//7.00E-29//67aa//33%

TESTI4052775//Krueppel-related zinc finger protein 1 (HKR1 protein) (Fragment).//1.00E-29//78aa//32%

THYMU2008207

THYMU2038199

THYMU3000390

THYMU3000776

THYMU3001082

THYMU3001593

THYMU3001776

THYMU3002825//alpha 1,2-mannosidase [Homo sapiens]//1.00E-169//282aa//100%

THYMU3002887

THYMU3003007

THYMU3003350

THYMU3003958

THYMU3004628

THYMU3004632

THYMU3007308

THYMU3007559

THYMU3008105//Zinc finger protein 74.//0//490aa//90%

THYMU3008935

THYMU3009643

THYMU3009755

THYMU3011012

THYMU3011244

THYMU3011360

THYMU3011534

THYMU3011556

THYMU3011717//exocyst component protein 70 kDa homolog (S. cerevisiae)//1.00E-25//62aa//100%

THYMU3012402//Importin alpha-1 subunit (Karyopherin alpha-1 subunit) (SRP1-beta) (RAG cohort protein 2) (Nucleoprotein interactor 1) (NPI-1).//0//322aa//95%

THYMU3012907

THYMU3012983//zinc finger protein 14 (KOX 6); GIOT-4 for gonadotropin inducible transcription repressor-4 [Homo sapiens]//1.00E-156//265aa//54%

THYMU3013114

THYMU3013197

THYMU3013241

THYMU3013470

THYMU3013785//novel SH2-containing protein 3 [Homo sapiens]//0//457aa//90%

THYMU3013897

THYMU3014038

THYMU3014173//HLA class I histocompatibility antigen, alpha chain E*0101/E*0102 precursor.//8.00E-26//60aa//57%

THYMU3014372//DNA replication licensing factor MCM2 (Nuclear protein BM28).//0//743aa//96%

THYMU3014620//F-box protein Lilina [Homo sapiens].//1.00E-123//239aa//100%

THYMU3014701

THYMU3015042

THYMU3015457

THYMU3015571//10 kDa heat shock protein, mitochondrial (Hsp10) (10 kDa chaperonin) (CPN10).//5.00E-18//44aa//100%

THYMU3015647//serpentine receptor (secretin receptor superfamily member with s; serpentine receptor; secretin receptor [Mus musculus]//4.00E-57//151aa//30%

THYMU3016518//Ig gamma-1 chain C region.//0//304aa//94%

THYMU3016822//erythroblast macrophage protein [Mus musculus]//1.00E-42//80aa//97%

THYMU3017761

THYMU3018151

THYMU3018896

THYMU3019095

THYMU3019476

THYMU3019605

THYMU3019916

THYMU3020221//Ig gamma-1 chain C region.//0//315aa//95%

THYMU3020869//BMAL1 protein (Brain and muscle ARNT-like 1) (Member of PAS protein 3) (MOP3) (BHLH-PAS protein JAP3).//1.00E-45//89aa//83%

THYMU3020970

THYMU3021404//differentiation-associated Na-dependent inorganic phosphate cotr; differentiation-associated Na-dependent inorganic phosphate cotransporter [Homo sapiens]//0//417aa//75%

THYMU3021586//Sterol regulatory element binding protein-1 (SREBP-1) (Sterol regulatory element-binding transcription factor 1).//0//774aa//86%

THYMU3021755//solute carrier family 4, sodium bicarbonate cotransporter, member 8 [Homo sapiens]//1.00E-169//294aa//93%

THYMU3021900

THYMU3022211

THYMU3022434//Monocytic leukemia zinc finger protein (Zinc finger protein 220).//0//537aa//81%

THYMU3022528

THYMU3022668

THYMU3022982

THYMU3023107

THYMU3023394

THYMU3023400//amino acid transporter 2 [Homo sapiens]//4.00E-19//71aa//25%

THYMU3023797

THYMU3024164

THYMU3024339

THYMU3025118//Cell surface glycoprotein MUC18 precursor (Melanoma-associated antigen MUC18) (Melanoma-associated antigen A32) (S-endo 1 endothelial-associated antigen) (CD146 antigen) (Melanoma adhesion molecule).//0//493aa//95%

THYMU3025313

THYMU3025642

THYMU3025683//Ras interaction/interference protein 1.//8.00E-36//111aa//30%

THYMU3025772

THYMU3026000//zinc finger protein interacting with K protein 1 [Mus musculus]//0//335aa//70%

THYMU3026306//alpha 1,2-mannosidase [Homo sapiens]//1.00E-169//282aa//100%

THYMU3026350

THYMU3026479//secretory pathway component Sec31B-1 [Homo sapiens]//0//385aa//95%

THYMU3026532//Integrin beta-2 precursor (Cell surface adhesion glycoproteins

LFA-1/CR3/p150, 95 beta-subunit) (CD18) (Complement receptor C3 beta-subunit).//0//701aa//93%

THYMU3026783

THYMU3026869

THYMU3027251

THYMU3027540

THYMU3027655

THYMU3027671//extra spindle poles, S. cerevisiae, homolog of [Homo sapiens]//1.00E-176//306aa//91%

THYMU3028075

THYMU3028461

THYMU3028702//chromosome condensation-related SMC-associated protein 1; chromosome condensation-related SMC-associated protein 1; KIMA0159 gene product [Homo sapiens]//0//1278aa//91%

THYMU3029188

THYMU3029318

THYMU3029421

THYMU3029719//AAA-ATPase TOB3 [Homo sapiens]//6.00E-52//105aa//85%

THYMU3029774

THYMU3029795

THYMU3030072//Zinc finger protein 84 (Zinc finger protein HPF2).//0//365aa//51%

THYMU3030706

THYMU3030752

THYMU3031146

THYMU3031402

THYMU3031612

THYMU3031868

THYMU3031878

THYMU3032032//Natural killer cell receptor BY55 precursor (CD160 antigen).//2.00E-20//46aa//95%

THYMU3032798//Focal adhesion kinase 2 (EC 2.7.1.112) (FADK 2) (Proline-rich tyrosine kinase 2) (Cell adhesion kinase beta) (CAK beta).//0//512aa//85%

THYMU3032867

THYMU3033626

THYMU3033630

THYMU3033649//T-cell surface glycoprotein CD3 zeta chain precursor (T-cell receptor T3 zeta chain).//2.00E-57//110aa//94%

THYMU3033754//basement membrane-induced gene [Homo sapiens]//6.00E-25//89aa//32%

THYMU3033759//Eukaryotic translation initiation factor 4 gamma (eIF-4-gamma) (eIF-4G) (eIF4G) (P220).//0//522aa//68%

THYMU3034099

THYMU3034453

THYMU3034616

THYMU3034671//histone deacetylase 7A, isoform b; histone deacetylase 7A; histone deacetylase 7 [Homo sapiens]//0//412aa//96%

THYMU3034853

THYMU3034867

THYMU3034983

THYMU3036200

THYMU3036310

THYMU3036934

THYMU3036953//mosaic serine protease [Homo sapiens]//3.00E-13//100aa//39%

THYMU3037052//HIV TAT specific factor 1; cofactor required for Tat activation of HIV-1 transcription [Homo sapiens]//1.00E-31//80aa//45%

THYMU3037192//potassium large conductance calcium-activated channel, subfamily M, alpha member 1 [Mus musculus]//8.00E-94//166aa//100%

THYMU3037617

THYMU3037772//Ig gamma-1 chain C region.//0//313aa//94%

THYMU3037827

THYMU3037856

THYMU3037867

THYMU3037909

THYMU3037980

THYMU3038158//Acetylcholinesterase collagenic tail peptide precursor (AChE 0 subunit) (Acetylcholinesterase-associated collagen).//1.00E-138//237aa//79%

THYMU3038167

THYMU3038214

THYMU3038266

THYMU3038347//tumor stroma and activated macrophage protein DLM-1 [Homo sapiens]//3.00E-93//159aa//100%

THYMU3038375//interrupting locus; SCL interrupting locus [Homo sapiens]//0//573aa//96%

THYMU3038603//WW domain binding protein 2 [Mus musculus]//3.00E-48//113aa//98%

THYMU3038687

THYMU3038759

THYMU3038879

THYMU3038970

THYMU3039807

THYMU3039846

THYMU3040068

THYMU3040126

THYMU3040146

THYMU3040168

THYMU3040172//T-cell differentiation antigen CD6 precursor (T12) (TP120).//0//563aa//84%

THYMU3040725

THYMU3040746//Ig gamma-2 chain C region.//1.00E-166//282aa//88%

THYMU3040816//VAMP (vesicle-associated membrane protein)-associated protein

B and C; VAMP-associated protein C; VAMP-associated protein B; VAMP-associated 33 kDa protein [Homo sapiens]//1.00E-45//91aa//100%

THYMU3040829//Cold-inducible RNA-binding protein (Glycine-rich RNA-binding protein CIRP) (A18 hnRNP).//7.00E-34//70aa//100%

THYMU3040830//AD-012 protein [Homo sapiens]//1.00E-28//84aa//97%

THYMU3041354

THYMU3041386

THYMU3041428//Homo sapiens prp28, U5 snRNP 100 kd protein [Homo sapiens]//0//599aa//87%

THYMU3041573

THYMU3041603//gamma-tubulin complex protein 2 [Homo sapiens]//1.00E-27//59aa//100%

THYMU3041736

THYMU3041918

THYMU3042075

THYMU3042321

THYMU3042758

THYMU3043200//Splicing factor 3A subunit 3 (Spliceosome associated protein 61) (SAP 61) (SF3a60).//0//479aa//95%

THYMU3043327

THYMU3043482

THYMU3043688

THYMU3043779//Phospholipid scramblase 4 (PL scramblase 4) (Ca2+ dependent phospholipid scramblase 4).//6.00E-69//123aa//93%

THYMU3043883

THYMU3043993

THYMU3044075

THYMU3044188

THYMU3044441

THYMU3044445

THYMU3045510//dedicator of cyto-kinesis 2 [Mus musculus]//0//321aa//85%

THYMU3045673

THYMU3045692

THYMU3045704

THYMU3046140

THYMU3046360//F-box only protein 3.//0//393aa//95%

THYMU3047115//Sarcoplasmic/endoplasmic reticulum calcium ATPase 1 (EC 3.6.3.8) (Calcium pump 1)₃ (SERCA1) (SR Ca(2+)-ATPase 1)-(Calcium-transporting

ATPase sarcoplasmic reticulum type, fast twitch skeletal muscle isoform) (Endoplasmic reticulum class ½ Ca(2+) ATPase).//0//826aa//95%

THYMU3047144

THYMU3047156

THYMU3047513

THYMU3047542

THYMU3047760//cleft lip and palate associated transmembrane protein 1 [Homo sapiens]//3.00E-46//80aa//59%

THYMU3047891//oxidoreductase UCPA [Homo sapiens]//8.00E-59//111aa//84%

TKIDN2000319

TKIDN2003396//Homo sapiens paternally expressed 10 (PEG10), mRNA//3.00E-17//310aa//22%

TKIDN2010602

TKIDN2011051

TKIDN2011160//ADAM-TS 3 precursor (EC 3.4.24.-) (A disintegrin and metalloproteinase with thrombospondin motifs 3) (ADAMTS-3) (ADAM-TS3) (Fragment).//1.00E-114//176aa//64%

TLIVE2000142

TLIVE2001616//Zinc finger protein 84 (Zinc finger protein HPF2).//1.00E-177//285aa//50%

TLIVE2007736//solute carrier family 9 (sodium/hydrogen exchanger), isoform 3 regulatory factor 1 [Homo sapiens]//2.00E-95//172aa//85%

TLIVE2008797

TLUNG2000654//Keratin, type II cytoskeletal 7 (Cytokeratin 7) (K7) (CK 7).//0//361aa//79%

TLUNG2001445//Ig alpha-1 chain C region.//0//326aa//92%

TLUNG2001600//Ig gamma-4 chain C region.//0//311aa//95%

TLUNG2001810

TLUNG2002055

TRACH2011057//D-type cyclin-interacting protein 1; MAID protein [Homo sapiens]//3.00E-89//161aa//89%

TRACH2013585

TRACH2019080

TRACH2022113

TRACH2024730//SH3-domain binding protein 4 [Homo sapiens]//1.00E-178//320aa//47%

TRACH3002188

TRACH3002293

TRACH3002752//ubiquitin-protein ligase e3 componen n-recognin [Mus musculus]//1.00E-24//82aa//30%

TRACH3002890

TRACH3003037//Putative Rho/Rac guanine nucleotide exchange factor (Rho/Rac

GEF) (Faciogenital dysplasia protein homolog).//3.00E-75//175aa//30%

TRACH3003357//SH3 domain protein D19; SH3 domain containing protein D 19; SH3 domain-containing protein [Mus musculus]//0//321aa//76%

TRACH3003458//Zinc finger protein 208.//0//436aa//62%

TRACH3003872

TRACH3004113

TRACH3004288

TRACH3004412//clusterin-like 1 (retinal); unknown prepropeptide specific to rod photoreceptor [Homo sapiens]//0//445aa//95%

TRACH3004424//Zinc finger protein 91 (Zinc finger protein HTF10) (HPF7).//0//559aa//59%

TRACH3004596

TRACH3004747//organic anion transporter OATP-E [Homo sapiens]//1.00E-129//251aa//40%

TRACH3005173//Breakpoint cluster region protein (EC 2.7.1.-).//9.00E-85//157aa//83%

TRACH3005191//androgen-induced prostate proliferative shutoff associated protein [Homo sapiens]//0//516aa//87%

TRACH3005274//Glycosyltransferase ALG11 (EC 2.4.1.-).//1.00E-47//104aa//37%

TRACH3005699//mucin 16; CA125 ovarian cancer antigen [Homo sapiens]//0//1037aa//90%

TRACH3006379//Keratin, type II cytoskeletal 7 (Cytokeratin 7) (K7) (CK 7).//1.00E-106//212aa//74%

TRACH3006397

TRACH3006717

TRACH3006800//mucin 16; CA125 ovarian cancer antigen [Homo sapiens]//0//901aa//90%

TRACH3007274

TRACH3007625//Hemolysin III (HLY-III).//8.00E-06//60aa//25%

TRACH3007689

TRACH3007995

TRACH3008042//Membrane component, chromosome 17, surface marker 2 (Ovarian carcinoma antigen CA125) (1A1-3B) (Next to BRCA1 gene 1 protein).//0//327aa//100%

TRACH3008508//GC-rich sequence DNA-binding factor homolog.//1.00E-109//198aa//85%

TRACH3008632

TRACH3009008//Thioredoxin reductase (EC 1.6.4.5).//0//456aa//95%

TRACH3009061//ATP-binding cassette, sub-family A, member 1 (ATP-binding cassette transporter 1) (ATP-binding cassette 1) (ABC-1).//1.00E-138//265aa//41%

TRACH3009701//dynein, axonemal, heavy polypeptide 9, isoform 2//1.00E-165//329aa//36%

TRACH3010079//Homo sapiens COP9 constitutive photomorphogenic homolog subunit 5 (Arabidopsis) (COPS5)//1.00E-143//246aa//91%

TRACH3010167//Transcription factor Sp3 (SPR-2) (Fragment).//1.00E-40//72aa//67%

TRACH3010342//Nuclear receptor. ROR-gamma (Nuclear receptor RZR-gamma).//4.00E-46//86aa//100%

TRACH3010382

TRACH3011082//Ig kappa chain V-III region HAH precursor.//3.00E-51//100aa//77%

TRACH3011184//Ig kappa chain V-III region CLL precursor (Rheumatoid factor).//5.00E-53//101aa//78%

TRACH3011282//Allograft inflammatory factor-1 (AIF-1) (ionized calcium-binding adapter molecule 1).//5.00E-46//94aa//56%

TRACH3011313//Branched-chain amino acid aminotransferase, cytosolic (EC 2.6.1.42) (BCAT(C)) (ECA39 protein).//0//320aa//88%

TRACH3011454

[0721] TRACH3011503//UDP-N-acetylhexosamine pyrophosphorylase (Antigen X) (AGX) (Sperrr, associated antigen 2) [Includes: UDP-N-acetylgalactosamine pyrophosphorylase (EC 2.7.7.-) (AGX-1); UDP-N-acetylglucosamine pyrophosphorylase (EC 2.7.7.23) (AGX-2)].//1.00E-109//197aa//55%

TRACH3011538

TRACH3012106//erythrocyte protein band 4.1-like 3 [Mus musculus]//0//610aa//74%

TRACH3012460

TRACH3012659//Ig heavy chain V-III region VH26 precursor.//4.00E-51//95aa//86%

TRACH3012718

TRACH3012864

[0722] TRACH3012891//ATPase, Class I, type 8B, member 1; benign recurrent intrahepatic cholestasis; progressive familial intrahepatic cholestasis 1, Byler disease; familial intrahepatic cholestasis 1, (progressive, Byler disease and benign recurrent); ATPase, Class I, type 8B, member 1 [Homo sapiens]//6.00E-42//85aa//84%

TRACH3013043

TRACH3013072

TRACH3013684

TRACH3013900

TRACH3014063

TRACH3014183

TRACH3014580

TRACH3015136//Polypeptide N-acetylgalactosaminyltransferase (EC 2.4.1.41) (Protein-UDP acetylgalactosaminyltransferase) (UDP-GalNAc:polypeptide, N-acetylgalactosaminyltransferase) (GalNAc-T1).//3.00E-67//117aa//56%

TRACH3015346

TRACH3015354

TRACH3015467

TRACH3015951//Zinc finger protein 151 (Myc-interacting zinc finger protein) (Miz-1 protein).//4.00E-53//156aa//26%

TRACH3016264

TRACH3016368

TRACH3016455//calpain 10, isoform e; calcium-activated neutral protease [Homo sapiens]//1.00E-162//267aa//91%

TRACH3016805//Ankyrin 2 (Brain ankyrin) (Ankyrin B) (Ankyrin, nonerythroid).//1.00E-30//106aa//30%

TRACH3016885

TRACH3016992

TRACH3017409

TRACH3018108//51 kDa FK506-binding protein (FKBP51) (Peptidyl-prolyl cis-trans isomerase) (EC 5.2.1.8) (PPiase) (Rotamase).//0//407aa//89%

TRACH3018191

TRACH3018240

TRACH3018261//1,2-alpha-mannosidase IC [Homo sapiens]//4.00E-76//139aa//100%

TRACH3018519//Coatomer beta′ subunit (Beta′-coat protein) (Beta′-COP) (p102).//1.00E-22//47aa//100%

TRACH3018524//Protein-tyrosine phosphatase beta precursor (EC 3.1.3.48) (R-PTP-beta).//0//1251aa//96%

TRACH3018606//SH3/ankyrin domain gene 3 [Rattus norvegicus]//8.00E-26//80aa//68%

TRACH3018783

TRACH3018907//Ig alpha-1 chain C region.//0//325aa//92%

TRACH3018943

TRACH3019058//Ig delta chain C region.//1.00E-78//137aa//99%

TRACH3019370//ATP-binding cassette, sub-family A, member 1 (ATP-binding cassette transporter 1) (ATP-binding cassette 1) (ABC-1).//1.00E-122//264aa//34%

TRACH3019621//UDP-N-acetylglucosamine-dolichyl-phosphate N-acetylglucosaminephosphotransferase (EC 2.7.8.15) (GPT) (G1PT) (N-acetylglucosamine-1-phosphate transferase) (GlcNAc-1-P transferase).//0//367aa//89%

TRACH3019807//Antigen LY-9 precursor.//4.00E-47//103aa//48%

TRACH3020137

TRACH3020563

TRACH3020605

TRACH3020769//Myosin heavy chain, nonmuscle type B (Cellular myosin heavy chain, type B) (Nonmuscle myosin heavy chain-B) (NMMHC-B).//2.00E-31//159aa//21%

TRACH3020930//Ig gamma-1 chain C region.//1.00E-166//284aa//80%

TRACH3021023//Ig delta chain C region.//0//354aa//92%

TRACH3021335

TRACH3021373//autoantigen [Homo sapiens]//0//836aa//86%

TRACH3021544//ubiquitin-specific processing protease [Homo sapiens]//1.00E-127//276aa//44%

TRACH3021778//Nucleolin (Protein C23).//6.00E-50//100aa//85%

TRACH3021834

TRACH3021883//Neuronal PAS domain protein 2 (Neuronal PAS2) (Member of PAS protein 4) (MOP4).//2.00E-73//140aa//75%

TRACH3022109//rec [Homo sapiens]//1.00E-107//173aa//59%

TRACH3022198

TRACH3022296//DnaJ homolog subfamily B member 1 (Heat shock 40 kDa protein 1) (Heat shock protein 40) (HSP40).//9.00E-32//63aa//56%

TRACH3022732

TRACH3022758//dual oxidase 1 [Homo sapiens]//0//546aa//97%

TRACH3022960//Dynein beta chain, ciliary.//0//386aa//35%

TRACH3023063

TRACH3023203

TRACH3023242

TRACH3023373//Colorectal mutant cancer protein (MCC protein).//0//638aa//84%

TRACH3023516//65 kDa FK506-binding protein precursor (EC 5.2.1.8) (FKBP65) (FKBPRP) (Peptidyl-prolyl cis-trans isomerase) (PPiase) (Rotamase) (Immunophilin FKBP65).//0//333aa//60%

TRACH3023752

TRACH3023945

TRACH3023960//dynein, axonemal, heavy polypeptide 8 [Homo sapiens]//0//551aa//69%

TRACH3024020//calcium/calmodulin-dependent protein kinase kinase 1, alpha [Rattus norvegicus]//1.00E-119//208aa//91%

TRACH3024081//Potential phospholipid-transporting ATPase ID (EC 3.6.3.13) (Fragment).//5.00E-79//136aa//72%

TRACH3024342

TRACH3024423

TRACH3024428

TRACH3024512

TRACH3024671//squamous cell carcinoma antigen recognized by T cell [Homo sapiens]//0//602aa//96%

TRACH3024823

TRACH3025316//Importin alpha-6 subunit (Karyopherin alpha-5 subunit) (Importin alpha S2).//1.00E-165//288aa//92%

TRACH3025346//Organic cation/carnitine transporter 2 (Solute carrier family 22, member 5) (High-affinity sodium-dependent carnitine cotransporter).//1.00E-108//195aa//88%

TRACH3025520

TRACH3026283//ataxin 2; olivopontocerebellar ataxia 2, autosomal dominant [Homo sapiens]//1.00E-100//179aa//69%

TRACH3026299//Ig delta chain C region.//0//353aa//92%

TRACH3026303

TRACH3026542

TRACH3026650//Actin cross-linking family protein 7 (Macrophin) (Trabeculin-alpha) (620 kDa actin-binding protein) (ABP620).//0//351aa//82%

TRACH3026676

TRACH3026949

TRACH3027229//Homo sapiens diacylglycerol O-acyltransferase homolog 2 (mouse) (DGAT2), mRNA//1.00E-64//252aa//48%

TRACH3027681

TRACH3027701//phosphatidylinositol 4-kinase type II [Homo sapiens]//1.00E-158//265aa//68%

TRACH3028164

TRACH3028180//Zinc finger protein 29 (Zfp-29).//0//530aa//86%

TRACH3028441//Ig delta chain C region.//0//355aa//92%

TRACH3028597//pallidin [Homo sapiens]//4.00E-21//48aa//100%

TRACH3028837//Smoothelin.//0//564aa//60%

TRACH3028855

TRACH3029139

TRACH3029329

TRACH3029462//Actin cross-linking family protein 7 (Macrophin) (Trabeculin-alpha) (620 kDa actin-binding protein) (ABP620).//0//735aa//59%

TRACH3029520

TRACH3029592

TRACH3029670//Ig delta chain C region.//0//355aa//92%

TRACH3030176//CDC4-like protein (Beige-like protein) (Fragment).//1.00E-123//278aa//37%

TRACH3030855//Placental thrombin inhibitor (Cytoplasmic antiproteinase) (CAP) (Protease inhibitor 6).//1.00E-157//272aa//94%

TRACH3031316//Ig kappa chain V-IV region B17 precursor.//2.00E-57//109aa//81%

TRACH3031660//cAMP-dependent protein kinase type II-beta regulatory chain.//0//384aa//92%

TRACH3031678//Natural resistance-associated macrophage protein 2 (NRAMP 2) (Divalent metal transporter 1) (DMT1).//0//358aa//91%

TRACH3032044

TRACH3032150//Cysteine sulfinic acid decarboxylase (EC 4.1.1.29) (Sulfinoalanine decarboxylase) (Cysteine-sulfinate decarboxylase).//1.00E-126//205aa//60%

TRACH3032480

TRACH3032570//Homo sapiens syndecan binding protein (syntenin) (SDCBP), mRNA//1.00E-167//296aa//99%

TRACH3033535

TRACH3034680//Ig delta chain C region.//1.00E-150//293aa//63%

TRACH3035451

TRACH3036004

TRACH3036103//Ig heavy chain V-III region VH26 precursor.//3.00E-48//88aa//75%

TRACH3036278

TRACH3036750//Zinc finger protein 135.//3.00E-94//148aa//48%

TRACH3036792

TRACH3036897

TRACH3036932

TRACH3037505//Ig delta chain C region.//0//354aa//92%

TRACH3038399//Eukaryotic translation initiation factor 2-alpha kinase 3 precursor (EC 2.7.1.-) (PRKR-like endoplasmic reticulum kinase) (Pancreatic eIF2-alpha kinase) (HsPEK).//0//912aa//94%

TSTOM2000235

TSTOM2001571//Casein kinase 1, delta isoform (EC 2.7.1.-) (CKI-delta).//1.00E-144//248aa//93%

TSTOM2002611//thiamin pyrophosphokinase [Mus musculus]//6.00E-64//119aa//65%

TSTOM2002682

TUTER1000014

TUTER2001433//Ig alpha-1 chain C region.//0//320aa//92%

UTERU2000300

UTERU2014998

UTERU2016464

UTERU2016669

UTERU2020226

UTERU2022955

UTERU2023941

UTERU2024042//Casein kinase I, gamma 2 isoform (EC 2.7.1.-) (CKI-gamma 2).//9.00E-46//88aa//73%

UTERU2027369

UTERU2028377

UTERU2029660

UTERU2035926

UTERU2037423//Zinc finger protein 135.//4.00E-90//144aa//59%

UTERU3000670//shroom [Mus musculus]//0//1134aa//62%

UTERU3001029//Echinoderm microtubule-associated protein-like 4 (EMAP-4) (Restrictedly overexpressed proliferation-associated protein) (Ropp 120).//0//388aa//58%

UTERU3001394

UTERU3001946//mucin 16; CA125 ovarian cancer antigen [Homo sapiens]//0//613aa//89%

UTERU3004635//Neuroblast differentiation associated protein AHNAK (Desmoyokin) (Fragments).//0//1453aa//78%

UTERU3005264

UTERU3005422

UTERU3006538

UTERU3006720

UTERU3007108

UTERU3009775//PAPIN [Rattus norvegicus]//2.00E-28//95aa//90%

UTERU3010029

UTERU3010409//Aortic preferentially expressed protein 1 (APEG-1).//3.00E-61//113aa//100%

UTERU3010604//Indoleamine 2,3-dioxygenase (EC 1.13.11.42) (ID0) (Indoleamine-pyrrole 2,3-dioxygenase).//2.00E-38//72aa//55%

UTERU3010892//adaptor-related protein complex 3, delta 1 subunit; adaptin, delta [Homo sapiens]//3.00E-48//91aa//100%

UTERU3010919//Serine/threonine-protein kinase NEK1 (EC 2.7.1.-) (NimA-related protein kinase 1).//2.00E-58//106aa//43%

UTERU3011092

UTERU3011398//Collagen alpha 2(VI) chain precursor.//1.00E-103//184aa//92%

UTERU3011558

UTERU3011579

UTERU3011837//NG-CAM related cell adhesion molecule precursor (NR-CAM) (BRAVO).//1.00E-47//126aa//61%

UTERU3012293//zinc finger protein 14 (KOX 6); GIOT-4 for gonadotropin inducible transcription repressor-4 [Homo sapiens]//1.00E-160//278aa//48%

UTERU3012414//Guanine nucleotide-binding protein, alpha-12 subunit (G alpha 12).//1.00E-116//211aa//89%

UTERU3012476

UTERU3012599

UTERU3012999//Homo sapiens CD21-binding (Siva) protein (SIVA), transcript variant 1, mRNA//1.00E-56//104aa//100%

UTERU3013167

UTERU3013302//nuclear protein [Homo sapiens]//0//515aa//92%

UTERU3014274

UTERU3014647//Sorting nexin 7.//4.00E-26//48aa//44%

UTERU3014906

UTERU3015011//Paxillin.//1.00E-168//262aa//93%

UTERU3015299//NADH-ubiquinone oxidoreductase 20 kDa subunit, mitochondrial precursor (EC 1.6.5.3) (EC 1.6.99.3) (Complex I-20KD) (CI-20KD) (PSST subunit).//1.00E-51//97aa//98%

UTERU3015647//Embigin precursor (Teratocarcinoma glycoprotein GP-70).//8.00E-48//93aa//78%

UTERU3015844

UTERU3016070//Zinc finger protein 29 (Zfp-29).//1.00E-94//196aa//39%

UTERU3016273

UTERU3016274

UTERU3016308//Smoothelin.//0//405aa//65%

UTERU3017441//plakophilin 4 [Homo sapiens]//0//922aa//88%=

UTERU3017626//potassium voltage-gated channel, subfamily G, member 1; potassium channel KH2 [Homo sapiens]//1.00E-119//219aa//87%

UTERU3017995//p47 [Homo sapiens]//3.00E-55//113aa//87%

UTERU3018172

UTERU3018255

UTERU3019708//Regulator of nonsense transcripts 1 (Nonsense mRNA reducing factor 1) (NORF1) (Up-frameshift suppressor 1 homolog).//0//336aa//90%

UTERU3020090

UTERU3021231//five SH3 domains [Mus musculus]//3.00E-59//101aa//78%

UTERU3021850//ADAM-TS 7 precursor (EC 3.4.24.-) (A disintegrin and metalloproteinase with thrombospondin motifs 7) (ADAMTS-7) (ADAM-TS7).//2.00E-80//163aa//39%

UTERU3022168//membrane bound C2 domain containing protein [Rattus norvegicus]//0//810aa//77%

UTERU3022588//Cyclic-AMP-dependent transcription factor ATF-2 (Activating transcription factor 2) (cAMP response element binding protein CRE-BP1) (HB16).//0//415aa//85%

UTERU3022922

UTERU3023141

UTERU3023413

ADRGL2011190//cGMP-dependent 3′,5′-cyclic phosphodiesterase (EC 3.1.4.17) (Cyclic GMP stimulated phosphodiesterase) (CGS-PDE).//0//570aa//97%//000408

BRACE3002184//Zinc finger protein 85 (Zinc finger protein HPF4) (HTF1).//0//435aa//76%//003923

BRACE3026993//plectin 1, intermediate filament binding protein, 500 kD [Homo sapiens]//4.00E-09//107aa//21%//NM_{—}000445

BRACE3046450//Interleukin-16 precursor (IL-16) (Lymphocyte chemoattractant factor) (LCF).//0//530aa//83%//Q14005

BRAMY3008096

BRAMY3016953

BRAWH3013197//Metabotropic-glutamate receptor 4 precursor.//0//675aa//91%//014833

BRAWH3028645//CL1BA protein [Rattus norvegicus]//2.00E-61//126aa//38%//NM_{—}022962

BRAWH3046240//Probable G protein-coupled receptor GPR35.//1.00E-157//273aa//88%//09HC97

BRCAN2019772//Orphan nuclear receptor NR2E1 (Nuclear receptor TLX) (Tailless homolog) (TII) (hTII).//0//347aa//92%//Q9Y466

BRHIP3030064//Homo sapiens renal tumor antigen (RAGE), mRNA//8.00E-49//92aa//98%//NM_{—}014226

BRHIP3038037

BRTHA3004432

BRTHA3024233//Probable low-affinity copper uptake protein 2 (hCTR2) (Copper transporter 2).//4.00E-70//128aa//90%//015432

CTONG2002832//Zinc finger protein 264.//0//430aa//72%//043296

CTONG2003764//Protein kinase C, delta type (EC 2.7.1.-) (NPKC-delta).//2.00E-91//163aa//91%//005655

PLACE7013963//Nik related kinase [Mus musculus]//0//447aa//46%//NM_{—}013724

PROST2010326//G protein-coupled receptor 56; EGF-TM7-like [Homo sapiens]//0//463aa//94%//NM_{—}005682

TBAES2004105//ADAM-TS 6 precursor (EC 3.4.24.-) (A disintegrin and metalloproteinase with thrombospondin motifs 6) (ADAMTS-6) (ADAM-TS6).//1.00E-57//110aa//41%//Q9UKP5

TBAES2007379//CEGP1 protein [Homo sapiens]//0//545aa//67%//NM_{—}020974

TBAES2007481//Cyclin I.//5.00E-51//111aa//44%//Q9Z2V9

TBAES2008133//semaF cytoplasmic domain associated protein 3; semaphorin cytoplasmic domain-associated protein 3A [Mus musculus]//0//422aa//54%//NM_{—}018884

TESTI2043585//Olfactory receptor 5V1 (Hs6M1-21).//1.00E-79//141aa//47%//Q9UGF6

TESTI2046536//Sperm histone P2 precursor (Protamine P2) (HP2, HP3, and HP4) (Basic proteins HPS1, HPS2, HPI2, and HPI1).//1.00E-10//33aa//64%//P04554

TESTI4002988//Zinc finger protein 208.//0//311aa//52%//043345

TESTI4005158//Amiloride-sensitive sodium channel delta-subunit (Epithelial Na+ channel delta subunit) (Delta ENaC) (Nonvoltage-gated sodium channel 1 delta subunit) (SCNED) (Delta NaCH).//0//592aa//87%//P51172

TESTI4005500//Zinc finger protein 184.//0//340aa//47%//099676

TESTI4052089

THYMU3024602//Cell surface glycoprotein EMR1 precursor (EMR1 hormone receptor).//0//795aa//86%//014246

THYMU3044175//Putative adenosylhomocysteinase (EC 3.3.1.1) (S-adenosyl-L-homocysteine hydrolase) (AdoHcyase).//1.00E-161//266aa//93%//043865

THYMU3046350//Sodium and chloride-dependent betaine transporter (Na+/Cl-betaine/GABA transporter) (BGT-1).//0//440aa//88%//P48065

TLIVE2007192

TRACH1000193//Orphan nuclear receptor HMR (Early response protein NAK1) (TR3 orphan receptor).//0//503aa//84%//P22736

TRACH3019290//Zinc finger protein 93 (Zinc finger protein HTF34) (Fragment).//0//387aa//73%//P35789

TRACH3021066//Receptor protein-tyrosine kinase ERBB-2 precursor (EC 2.7.1.112) (p185erbB2) (NEU proto-oncogene) (C-erbB-2) (Tyrosine kinase-type cell surface receptor HER2) (MLN 19).//0//360aa//88%//P04626

UTERU2017492//Calcipressin 1 (Down syndrome critical region protein 1) (Myocyte-enriched calcineurin interacting protein 1) (MCIP1) (Adapt78).//2.00E-83//150aa//88%//P53805

UTERU2025415

UTERU2036507//ADAM-TS 6 precursor (EC 3.4.24.-) (A disintegrin and metalloproteinase with thrombospondin motifs 6) (ADAMTS-6) (ADAM-TS6).//6.00E-48//104aa//37%//09UKP5

[0723] UTERU3020583

LENGTHY TABLE
The patent application contains a lengthy table section. A copy of the table is available in electronic form from the USPTO web site (http://seqdata.uspto.gov/?pageRequest=docDetail&DocID=US20070048740A1). An electronic copy of the table will also be available from the USPTO upon request and payment of the fee set forth in 37 CFR 1.19(b)(3).

The application's sequence listing, which the Patent Office published only in electronic form, follows.

SEQUENCE LISTING (3994 sequences)

SEQ ID NO: 1 - DNA, 1437 bp, Homo sapiens
acccggggggccgcgctgcgcggagtgccaggctgcgggcggctgcagacctgggagcggagaccggcccgccgcccccgacgccgccgagcacgtcagcggcgcgcagccggggctcggagaccgacgggcagaacgacgggcggcgactgcggcgaccgcgggacggcgagaggcacgcggcgggaggggaccggaatccgcagctccggccgcgccatggacggcaacgacaacgtgaccctgctcttcgcccctctgctgcgggacaactacaccctggcgcccaatgccagcagcctgggccccggcacggacctcgccctcgcccctgcctccagcgccggccccggccctgggctcagcctcgggccgggtccgagcttcggcttcagccccggccccactccgaccccggagcccacgaccagcggcctcgcgggcggcgcggcgagccacggcccttccccgttccctcggccctgggcgccccacgcgctcccgttctgggacacgccgctgaaccacgggctgaacgtgttcgtgggcgccgccctgtgcatcaccatgctgggcctgggctgcacggtggacgtgaaccacttcggggcgcacgtccgtcggcccgtgggcgcgctgctggcagcgctctgccagttcggcctcctgccgctgctggccttcctgctggccctcgccttcaagctggacgaggtggccgccgtggcggtgctcctgtgtggctgctgtcccggcggcaatctctccaatcttatgtccctgctggttgacggcgacatgaacctcagcatcatcatgaccatctcctccacgcttctggccctcgtcttgatgcccctgtgcctgtggatctacagctgggcttggatcaacacccctatcgtgcagttactacccctagggaccgtgaccctgactctctgcagcactctcatacctatcgggttgggcgtcttcattcgctacaaatacagccgggtggctgactacattgtgaaggtttccctgtggtctctgctagtgactctggtggtccttttcataatgaccggcactatgttaggacctgaactgctggcaagtatccctgcagctgtttatgtgatagcaatttttatgcctttggcaggctacgcttcaggttatggtttagctactctcttccatcttccacccaactgcaagaggactgtatgtctggaaacaggtagtcagaatgtgcagctctgtacagccattctaaaactggcctttccaccgcaattcataggaagcatgtacatgtttcctttgctgtatgcacttttccagtctgcagaagcggggatttttgttttaatctataaaatgtatggaagtgaaatgttgcacaagcgagatcctctagatgaagatgaagatacagatatttcttat

SEQ ID NO: 2 - DNA, 1582 bp, Homo sapiens
aacaaccacatccctcctcagaagcccccagagcacaacgcctcaccatggactgggcctggaggatcctctttttggtggcagcggccacaggtgtccactcccaggcccagcttgtgcagtctggggctgaggcgaagaagcctggggcctccgtgaaaatttcctgcaaggcttctggataccccttcagtggctatgttttacactggctgcgacaggcccccggacaaggacttgagtggctgggaagcatcaccgctggctacgatgccacaaaatattcacagaggttccaggacagaatcaccattaccagggacacatccgcgagcacagtttacttggaatggagcagcctgacatccgacgacacggctgtcctttactgtgcgagggagggtgatgaggactacggtgactctcttggcgcttttgatgtctggggccaagggacactggtcaccgtctctccagcatccccgaccagccccaaggtcttcccgctgagcctctgcagcacccagccagatgggaacgtggtcatcgcctgcctggtccagggcttcttcccccaggagccactcagtgtgacctggagcgaaagcggacagggcgtgaccgccagaaacttcccacccagccaggatgcctccggggacctgtacaccacgagcagccagctgaccctgccggccacacagtgcctagccggcaagtccgtgacatgccacgtgaagcactacacgaatcccagccaggatgtgactgtgccctgcccagttccctcaactccacctaccccatctccctcaactccacctaccccatctccctcatgctgccacccccgactgtcactgcaccgaccggccctcgaggacctgctcttaggttcagaagcgaacctcacgtgcacactgaccggcctgagagatgcctcaggtgtcaccttcacctggacgccctcaagtgggaagagcgctgttcaaggaccacctgaccgtgacctctgtggctgctacagcgtgtccagtgtcctgccgggctgtgccgagccatggaaccatgggaagaccttcacttgcactgctgcctaccccgagtccaagaccccgctaaccgccaccctctcaaaatccggaaacacattccggcccgaggtccacctgctgccgccgccgtcggaggagctggccctgaacgagctggtgacgctgacgtgcctggcacgtggcttcagccccaaggatgtgctggttcgctggctgcaggggtcacaggagctgccccgcgagaagtacctgacttgggcatcccggcaggagcccagccagggcaccaccaccttcgctgtgaccagcatactgcgcgtggcagccgaggactggaagaagggggacaccttctcctgcatggtgggccacgaggccctgccgctggccttcacacagaagaccatcgaccgcttggcgggtaaacccacccatgtcaatgtgtctgttgtcatggcggaggtggacggcacctgctactgagccgcccgcctgtccccacccctgaataaactccatgctccccc

SEQ ID NO: 3 - DNA, 2034 bp, Homo sapiens
cactcgctcccagattaggtcgctctggggctatcaggccagcatggacgctggcaaagcggggcagaccctgaagactcactgctcagcccaggtgagagccttctgagctgtgcctggggctggggggacagggccctggaaccccagcagccggcgggtctgggagctgctgtccttgagttggttgggccctgggaagctgggttctggcagcctggtccctgaatgggtccagcctgtacagctggggtcccaggtgggggtgggacaggagccatgagatctgagtcccaagaatgggggctgggctgggtttcggctcagtagctccccactccccaaagcgcccagatgtctgcaggtggctgagccccttcatcctctcctgctgcgtgtacttctgcctctggattcccgaggaccagctgtcctggttcgctgccctggtcaagtgcctgcccgtcctctgcctggctgggttcctgtgggtcatgtccccaagcgggggctacacccagctcctccagggagcccttgtgtgctcggctgtgggggacgcttgcctcatctggccggcagccttcgtccctggtgagtggaaggtgctgtgacgctttccagatgcccgtgtgagagaggccccagcacttggatgggagcctgggtgcagagggctcctgtgagagctccagtggtcaaaggcacagtggggggcgcagccgtgaccgaggcagctcacgctccagcgaggggtgggggcaggcggtgttagggcagtagctgaggtggcgcagagggcagtgaggacccgctggaggtactgcagtttgaagcagggttgctgaggaaggtctcactgaggaagtcacatttgggcagagctgaagggctgtatgcctgtgtggaggaagggcgagtgtaaaggctccggggcagggacgtgtcaggtgcttgtagcccagcaggccagggtggctggcgcagagtggctggagagctggaggccatggggctttggaggccaagggaaggtggggcctcctggcagttctgagcagagcaaggatggacactgcatgtggggagacctgcaaggaggctcggccagggtggggcctggtgctctgggatggtccttctcttaggccctgaggggtgacctcggggccattcccaggatgggccttcctcactggtaccccacccctctcccgccaggcatggccgcctttgccaccgcccacctcctctacgtctgggccttcggcttctctcccctgcagcccggcctgctgctgctcatcatcctggcccctggcccctacctcagccttgtgctccagcacctcgagccggatatggtcctgccggtggcagcctatgggctgatcctgatggccatgctgtggcgcggcctggcccagggcgggagtgccggctggggcgcgctgctcttcacgctctctgatggcgtgctggcctgggacaccttcgcccagcccctgccccatgcccacctggtgatcatgaccacctactatgctgcccagctcctcatcacactgtcagccctcaggagcccggtgcccaagactgactgactagggagcttgaagggccggtgttcaggccctctcctcctgcaaggacctgggcctcccagcccagcccagcctgagaaataccctcagcagcgaagcttcctgacgcctgtctgcaggcgccgctgccgccgtcgcttctggctgaagacgtttgaggacgatttgcggaattccaagtccactactgggttccagctgccttcccccggttctgactccagatccctggctcctcagccaggcccacatggagccctcccagccaccagcctgcctccatgttcactgtcggccccacagcctgcccgccccctgctgctgctctgaatccgttttccctgtgggtgtggaaccgtagatgttgctgttaccgtaggagaggcctcggggagggtcatgattgtgataaaccatcgcggttaatgac

SEQ ID NO: 4 - DNA, 2312 bp, Homo sapiens
tttacagaattcttcctatcaaagattattaaaatttaggcctaaagggaaaccatgccccaaggaaattccaaaagaatcaaaagacccagaagtcttagtttgggaagaatgtgtggctgatactgcagtggtactacaaaacaataaatttggaactattatagactaggccccttgaggccaattatattatgactgtatgggccagacccactcatgttcacaggctccatctgtctggcccactaatccggcctatgttagtgatttaactaaaaggctagaccaggtttatagaaggctagaatcaccctatccatggaaatggggtgaaaagaggatttcatcaccccgaccaaagttagttagtcctgttgttggtcctgaacacccagaattatggaagctcactgtggcctcataccacattagaatttggtctggaaatcaagttatgggaacaagaaatcataagccatattatactattaacctaaattacaatctgaaaattcctttgcaaagttgtgtaaaaccaccttatatgctagttgtaggaaacatagctattaaaccagattcccaaactacaaccagtgaaaattgtagattgtttacttgcattgattcaacttttgattggcagaatggtactctgtaagagcaagagaaggcgtgtggatccctgtgtccatggatcgaccgtgggaggcttctccatccgtacatatcttaagtattaaaaggagttctaactagatctaaaagattcatttttactttgattgcagtgattatgggtcttattgcagtcacagctactgctgcacctgctggaattgctttacactcctctgttcaaactgcagaatatgtgaataattggcaaaagaattcctcaaaattgtggaattcttagactcaaatagatcaaaaattgacaaatcaaattaatgatcttagacaaactgttatttggatgagagataggctcatgagcttagaatatctttttcagttacagtgtgactggaatacatcagatttttgtattaaacctcgagcctataatgaatctgaacatcactgggacatggttagacgccatctataaggaaaagaagataatcttaccttagatatttctaaattgaaagaacaaatttttgaaacatcaaaagcccagttaaatctggtgtcagaaacggaggcaatggtaaaagctgttgacagcctcacaaatcttaaccctgtcacttgggttaaaaccattggaaattccactattgcaaattttgtattaattcttgtatgtctgtcctctctattgttagtctacaggtatatccagcagctccggagagacagcgaccagcgagaaggggccatgatgacgatggcggttttgtcaaaaagaaaagggggaaatgtagggaaaagcgagagatcagactgtcactgtgtctatgtagaaagggaagacataagagactccattttgaaaaagatctgtactctaacaattgctttgctgagatgttgttcgtttgtagctttgccccagccactttgcctcagtcactttgacccaacttggagttcacaaaaacatgtgttgtataaaatcaaggtttaagggatctagggctgtgcaggacgtgccttgttaaccaaatgtttacaagcagtatacttggtaaaagtcattgccattctctagtcacaataaaccaggggcacaatgcaccgtggaaagccgcagggagccctgcccttgaaagcagtgtattgtccaaggtttctccccatgtgatagtctgaaatatggcctcgtgggatgagaaagacctgactgtcccccagcctgacacccgtaaagcgtctgcgctgaggtggattagtaaaagaggaaagcctcttgcagttgagatggaggaaggccactgtctcctgcttgcccctgggaattgaatgtctcggtgtaaacctgattgtacatttgttcaagtctgagctcggagaaaagctgccctgtggcgggaggcgagacatgttgcagtaatgctgccttgttattctttactccactgagatatttgggtggagagaaacataaatctggcctacgtgcaagtccagtcatagtaccttcccttgaacttaattatgatatagattcttttgctcacatgttttttgttgaccttctccttattatcaccctgttctcctattacattcctttttgctgaaataatgaaaatcataatcaataaaaactgagggaactcagaggccagttcccctgc

SEQ ID NO: 5 - DNA, 2547 bp, Homo sapiens
agaagctgaaattgtcaaccacaattatgtaaaagtttccctagggaaaaaaaaaaagaaatatccaactcttcctggaacagggaagaaggaagggaagaaggaaagcagaaagagagggaatccacgaaagcatgaagtcttgggaaaactttgctttcagagtctcctcgctctgttgccagtctggagtacagtggcacgatctcggcccactgcaacctccgcctaccaggttcaagcgattatcctgcctcagcttcccaagtagctgggattacaagtgcacactaccacacccagatgttcctgcaccatttgttgaagactgttctctccctgttgaattgtcctggcactcctgtcaaaagcaatttaccagaattgtaagggtttatttttggactctacccctctatcttgtctcaaatgttactgataaagtgaaagactgaagggagaaaaaaatgaatccaggtggtggaaattctccatgtgagttagcacaagtgatgagctttgcttcccattccctgtagtgtttggggagctcttcattgacaggcatcagctaatggaagtagtacttgaatgttaccaatgtcctcctacaagtcaaattaagttgtcctttatttcagtaatgtcccctgacatttggcattgctatccacttctagaaacttggctttgttctccttttacctctgtaattcttcttcagtctacttcaccatcttacttttttctctaactatccataccttaaaagttggttttccacagagatttatcttcatacttctctttatatttaaagacttctggttgccatacaatatccattcttatgcattgtgcacaacagaagatcaacttttatctggacacattgcttcagaactaaatgatgacatgtcccaacctcccttgcatgtttttattgccatgtgtcttaactctggatagtaatatggaagcaaaagtgttgtatgaatctggaaaatgtcttaattggttagggaatgcattcttgttttgctcttcctgttgctggtaacctggaacacagtggggatggctggagacccagttaagtcatgatccttttggaatttttttaattatacgtagcaaacctaattataattgagaaaccatcaaaggctatgtattcatgtatcgttgaaccaatatttattaagcatctactacctatcatgtactgtgacaggtatcatggtgatgtgatgctgtcctcaggaagtccacagcctatagggaaatacataaatgtatacacacataaaacccttaatggtaatttttataataatattattatagaaaatatgtggtgtgccagggtaatacaaggaataaaacaattaatcctgtcaaggttttataaagctttgtgaggaagcaatatttgtattgagactcgatagactttgtaaataaaagaggaaaaccattatagataatgtagggtttacaaatgtatggattgtacagctgtgaatgttcatgattagtttaaaaatgcattattagttatgtctagagaaaaggctgttatgtgtgtgtgacagagagagagagagagagagacggagatgaaaagagggagggaagggagaagacagagacatacaggagagagatcctgggaagcagcaagtgatcagagaggaacagcaacagagagtgttcccaggaaataggaatttggggtattgcatgtagaattgagaatgtatgtctcagcttatgaatcagagatagaaaatatgtttgaatccttatgtcaactctaattttgcctgcctaaagtactacattgagaagaatcctgaatttacacctgagctcaggaaagagtgacataaagtattagaaatgctggcatgacatctacagccatatctccctgtaggtggctgatcttatctgatctcagaaaccaagtagagctgggcctggttagtacttggatgaaatgtctgcatgagtttgggacatgtggtggttaattttatgtgtcaacttggctgagccacagtgatcgggtatgtgatcaaacattattctagatgtctctctgaggatatttttggacgggattaacatttaaacttatggactttgagtaaaactggtagtcgatcacaatgtgagtgacctcaccaatgagttgaagccccaagtaaaataaaagaatgacctccctgaacaaggcagaattctgcatctcatggcctttgaacttgaactgcagtatcaacccgtgtctccagctgatgtcctttgaatttgaactgcagcattggcttttctccaagtctccagcctattggcccaacccacagattttgaacttaccacccttcataaccacatgacacaatttcttaaaataaatctctctattgctctctctctatatatatatcctattggttctgtttctctagagaaccccaagtaacaccaacggattgaatattcacatgtgaggaattaaaaagagttttgaaccttggc

SEQ ID NO: 6 - DNA, 3601 bp, Homo sapiens
tccagcacagaatggaattcagccaccaatcagtaactcaaggacagatgaaagagaattctttctcgcctcttataacagaaagaaagaggatggagagggcaacgtttggattgcaaagtcatcagccggtgccaaaggtgaaggcattctcatctcctcagaggcttcagagcttctcgatttcatagacaaccagggccaagtgcacgtgatccagaaatatcttgagcaccctctgctgcttgagccaggtcatcgcaagtttgacatccgaagctgggtcttggtggatcatcagtataatatctacctctatagagagggtgtgcttcggactgcttcagaaccatatcatgttgataatttccaagacaaaacctgccatttgaccaatcactgcattcaaaaagagtattcaaagaactacgggaagtatgaagaaggaaatgaaatgttcttcaaggagttcaatcagtacctaacaagtgctttgaacattaccctagaaagtagtatcttactacaaatcaaacatataataaggaactgcctcctgagcgtggagcctgccattagcaccaagcacctcccttaccagagcttccagctcttcggctttgacttcatggtcgatgaggagctgaaggtgtggctcattgaggtcaacggtgcccctgcatgtgctcagaagctctatgcagaactgtgccaaggcatcgtggacatagccatttccagtgtcttcccacccccagatgtggagcaacctcagacccagccagctgccttcatcaagctgtgacagagggcactccctgctgccttggaaaaagcacggggtcctgctccagggaatggtgaaatgactggattgctctttatccagcccacagcaggggaaagaaaggcaactcgcaaagatgagatggaagaaggcacgtgagcagaggaggcagctcccaaagagagggctgctcagggggcttcccaggtgtagctctcagcagtgctgttgagacttttgaaaacaactttggtacacaaaggcagctttgtgagcagagctccttcccctctccccgggaacggcagggcactgggacctctggtcggtgcctcccacccactgcagccctagtgccttagctccatgcccggctgcagccccactgctctggactatggattggacgtcagagcatattggaggttgcctgtgtgttccccacccatcccttcggtaacactctgccacactaagctctgtacaagcatgcaccaacagtccttagttttgtgctgtgcactggcctctcggcaaaggtggtttccctcatcaccttcctgatggtgtttggtcagtcacctgtcagggtttgtgcgggttgggccccaaaacagcatatgctgctctaagtctgctctctgcatgttttagaaacaaagtggcaagtctgccctgaacctgtaagcatcaaataagcatgagagagaaaaaaacatgatatattgctttacttaataggttgaatatggtaggtctttgaaaatatgatgattcaattttctcaattttctttgctttaaccaaaattctaaatgcagttttgcctagttccctttttttttctttttttacttttttttaaacgtttgtaaaaacctctttgaggatgaggagtcagtaaaattccactccccaagtggccctgccccagacaaaggttgctttccccctttttgttctttttatgccccgaagcactttctgcagtagctagagggacaggtttccttccaggaaggattcgagttcctgtgcctgtgggtattaggagagtatatatcctgcctgaatggggaagtcttctaaaatgggaaagaagtggtttcatctccacacagtgtcttgtaaatctcaacaaatgtgtactgttagaagtggcttccgcttactggattaactaatactttataggcttttcaggaggccacatcactagcagtagggagaacaagatgtcatttgtgttcagtgtaagctgagtaaacaggcccttcctagagtgtcctggaaatcacagcaacccattgaaaactgccctccccaccagaacgtgctacgttctttcttcatgcctatgtgtgctccattcctcatttctacttggctcaagaaaacatttctgcagtcaggtgagacttttacaaaagaggagaaaatcaatgcctccttgaacatgatgagatgtgagaacttacaatgaaaaaggcaataatgatagaaattatttcttaggtacagcaatagttgataggatgtgagggtgttaccttggggtgaagtggagaaggtcccaggtgaattggctctcatggaaatttggaattacgaaataaacgtcctgggggttacccagaatacagatttaaaagtttgcctgtagagcaaaataaaacagtcagttgtagtcattaatccttgaggcccaacgcagccgatgggttggtgtttgggaaattctgagatgggagtgagatctgatcggatcctgggaagatgtatacccagttagaacgtgtagggttctgggtccctggcaagtctaggtgggcgggtgacagggaaagcatgggcatttttgtattgctgtcacatgctaacagaggtttgtaattatcttttggacccaaattatagagacattcacgagttttctagccctcacagtaacagagctaagaattcagatgtcaggaagtctgtgaatcttgatggattttctgagaaacctgactcaatggcatatataagagggaagtaagacttttaagaaaagaaaaagttatgcctcattcctcatgtggcttccaataagtatcttaggaacttatttcctttttaaaaaatattttttaaatttttaaaatttgattttaaatttcaaataaatttaaataaattttaaataaattttaaataaaattttacagagacgtggtctcactatgttgcccaggctggattgcagtggctattcgcagttgtaatcatagcacactgcagcctcgaatttctgggcttgagcagtcctcccgtctcagcctcctgagtagctgagactacaggtgcacaccaccaagcctggctttatgtatttatttctgttcatgcggaatgattggttcagaactgttcctttcccttccatgatgtccttgacacagaaggttatgcctggctcccagtcaggcttcatacttttggtccatgtaagtgctacccgttgctgggggaggagtcatggtttatttggaaatgtcagttgcaatcatggttctgtcatttgactgcacagtatcagaggagcctgttaacctctctgtgccttagtttcttagcccatgaaagagatcattgcctgacccagggactacctcaagggcttttgatgaggacaagtgacagtaggaagatgcaagagcctttagtaccaaggttctcaacactgactacatgctgaaatgactgctgaaataaggcgattgtatgaatatttaaaatgcctggaacactaaagtaaagtaatgatatttc

SEQ ID NO: 7 - DNA, 2121 bp, Homo sapiens
ctgtgcctctgcatcgcctactgggccagcactgctgtcttcctgtccacttccaacgaagcggtctataagatctttgatgacagcccctgcccatttactgcgaaaacctgcaacccagagaccttcccctcctccaatgagtcccgccaatgccccaatgcccgttgccagttcgccttctacggtggtgagtcgggctaccaccgggccctgctgggcctgcagatcttcaatgccttcatgttcttctggttggccaacttcgtgctggcgctgggccaggtcacgctggccggggcctttgcctcctactactgggccctgcgcaagccggacgacctgccggccttcccgctcatcctggccattgtgcagatcatccgtgtgatactcgagtacctggatcagcggctgaaagctgcagagaacaagtttgccaagtgcctcatgacctgtctcaaatgctgcttctggtgcctggagaagttcatcaaattccttaataggaatgcctacatcatgattgccatctacggcaccaatttctgcacctcggccaggaatgccttcttcctgctcatgagaaacatcatcagagtggctgtcctggataaagttactgacttcctcttcctgttgggcaaacttctgatcgttggtagtgtggggatcctggctttcttcttcttcacccaccgtatcaggatcgtgcaggatacagcaccacccctcaattattactgggttcctatactgacggtgatcgttggctcctacttgattgcacacggtttcttcagcgtctatggcatgtgtgtggacacgctgttcctctgcttcttggaggacctggagaggaatgacggctcggccgagaggccttacttcatgtcttccaccctcaagaaactcttgaacaagaccaacaagaaggcagcggagtcctgaaggccccgtgctccccacctctcaaggagtctcatgccgcagggtgctcagtagctgggtctgttcccccagccccttgggctcacctgaagtcctatcactgccgctctgcccctccccatgagccagatcccaccagtttctggacgtggagagtctggggcatctccttcttatgccaaggggcgcttggagttttcatggctgcccctccagactgcgagaaacaagtaaaacccattggggcctcttgatgtctgggatggcacgtggcccgacctccacaagctccctcatgcttcctgtcccccgcttacacgacaacgggccagaccacgggaaggacggtgtttgtgtctgagggagctgctggccacagtgaacacccacgtttattcctgcctgctccggccaggactgaaccccttctccacacctgaacagttggctcaagggccaccagaagcatttctttattattattattttttaacctggacatgcattaaagggtctattagctttctttccgtctgtctcaacagctgagatggggccgccaaggagtgccttccttttgctccctcctagctgggagtgacgggtgggagtgtgtgtgcccaggtgggggtgtctcctggctgggaaggagggaaagggagggagagttttgcgggggttggcagtggagagcaggctggagaggagatggctaatagctgtttaatggaaacctgctgggctggagggagttaggctgaatttcccgacttcctctgccagttattgacacagctctctttgtaagagaggaaagaaactaaacccacccaagggatgatttcagggggagaggtggagggcagatgtcctgggcaaaccgggcccctctgcccacacacctcacttgatccttttgccaaacttgtcaaactcaggggaactggcttcccagttgcccctttgccatattccaagtccccctcagacttcatgtctctgctcatcagcactgtcccaggatcctggagagggagaacccctggccccaggggaaagaggggggggtctcccgtttcctgtgcctgcaccagccctgcccccattgcgtctgcacacccctgcgtgtaactgcattccaaccactaataaagtgcctattgtacaggt

SEQ ID NO: 8 - DNA, 2453 bp, Homo sapiens
cttttgtctctcgctgtagccggagctccaggttttgctctcagttctctgtgtcttctgctcctaggggcctagcctgtgtggccctctgacctgcagatattgggagatccacagctaagacgccaggaccccctagaagcctagaaatggatgacccgaggtatggaatgtgtcctctcaagggagcaagtggatgccctggggctgagaggagtcttctggtgcagtcttattttgaaaaggggccattgacgtttagggatgtggccatagaattctctctggaggagtggcaatgcctggacagtgctcagcagggtttgtataggaaagtgatgttagagaactacagaaacctggtcttcttggcaggtattgctctcactaagccagacctgatcacctgtctggagcaaggaaaagagccctggaatataaagagacatgagatggtagccaaacccccagttatatgttctcattttccccaagacctttgggcagagcaggacattaaagattcttttcaagaagcgattctgaaaaaatatggaaaatatggacatgacaatttacagttacaaaaaggctgtaaaagtgtggatgagtgtaaagtgcacaaagaacatgataacaaattaaaccagtgtttgataactacccagagcaacatatttcaatgtgatccatctgcaaaagtctttcatacattttcaaattcaaacagacataagataagacatactagaaagaaacctttcaaatgtaaaaaaatgtgaaaaatcattttgcatgcttttacacctaactcaacataaaagatttcatattacagagaattcctaccaatgtaaagattgtggcaaagccttcaactggttctcaacccttactacacacaggagaattcatactggagagaaaccctacaaatgtgaagaatgtgggaaagcatttaaccggtcctcacaccttactacacataagataattcatactggagagaaaccatacagatgtgaagaatgtgggaaagcttttaaccggtcttcacaccttactacacataaaagaattcatactggagtgaaaccctacaaatgtacagaatgtggcaaagcttttaaccggtcctcacaccttactacacacaggataattcatactggagagaaaccctacaaatgtgaagaatgtggcaaagcctttaaccagtcctcaacccttactacacataagataactcatgctggagagaaaccttacaaatgtgaagaatgtggcaaagctttttaccgattctcataccttactaaacataagacaagtcatactggagagaaattctacaaatgtgaagaatgcggcaaaggctttaactggtcctcagccctcactaaacataagagaattcatactggagagaaaccctacaaatgtgaagaatgtggcaaagcttttaatgagtcctcaaaccttactacccataagatgattcatactggagagaaaccctacaaatgtgacgaatgtggcaaagcctttaaccggtcctcacaactaactgcacataagatgattcatactggagagaaaccctacaaatgtgaggaatgtggcaaagcttttaaccgatcctcaacccatactaaacataagataactcatactggagagaaatcttacaaatgggaagaatgtggtaaagactttaaccagtccctaagccttattaaacaaaataactcatactggagagaaaccctacaaatgtgaaaaatgtggcaaagccttttaccagtcctcaactcttactaaacataaaaaaattcatactggagggaactcctgtgactgtgaagaatatggcaaagcctttaataaattctcaattcctaacagacataagataattcatactagagagaaattctacaaaccagaaagatgtgacagtgctttgaaaacacctcaaacttttcaaaacataaatcatagtgttgagaaatcctagaaatgtgaagaatgtgataaagttttaaatggttgtcacacttgattgtaggtaaggtaagttatactggagaaaacttctacatgtgtgaacagtgtgacaaaacttttaactaatgctcacaccttcacaggaaagcatttatacttgagaaatattgtacaaatataaagactgtgaaaaagccattaatacatgctcacatcttactcaacatcagagagttcatactcaataaaaacataagtgcaactactgtcaaaatatctttaagaaaatataagcttttaaagtgaagagtattttgaagaagaacattgtagtagaattgtaatatgtttacttgtatcacagatcttactgtacacgttttgtattagaggaaacctctgaagcagttgctcaaactttgttcaatatcagggaatttatattg

SEQ ID NO: 9 - DNA, 4792 bp, Homo sapiens
tgcaggtgagcctggctccttccccaactctctgtgcatttgtagagggcagggtttactgttcctgtctggagggccgagggagccacgtattccttgtgaggacattatcaggtgctgctcctgcagtggcctctgttaacagaaggagggtgcagtgctggagcctcagaagaggctcgtggaggccgcagtgtgtctggttctgatttctaggggtttgtgaacatctgtttgtggtttgaaggctttttggctcaccaggtgggtcagatctccataaaagatgagcatctcgcaacgcggatgcactgtggtttggctgtgtgctaggtggacgtggcactgctgccatgggaaatgggagccagcagtgaccaggcacccagccaggccagtgcgccatccctgccggcgtggagcagagcctctcccatgtgtgctcgggtccctgagggtgacgggggtggcccagtacatgcaggaggcccttgtcaagtctctgcttgtctcttgtgtctctcaatgacccaggtattgcattcctgctgaggaggagaacaagctggaagatgtggtccacaccctgctgcaagccaatggcaccccagggctgcagatgctggaaagcaacgtcatggtgcgtccactcagccaccgcctccagcaggagctgtaggacctcctaggcacttgaacatggtttcccatgaacccgcctttcaaaggcaatgaggacacagcaaaacaaatccccagggtgcaaagggaaaggtcctctgacacaaaagcgaaactgaccttccatcagattgcacagggcgctggggttttgcacggcctttgcatctgttttggggcttgtttgtgttgtgggctgctgtgggccctgggatttcttgtgcccgccgctcctaccttctgggcatgtgagaggaatgagcacaaaggcttcacctgttttcaggaagtcatggggctggtgagttcctgggaagtgctgctttgagctgagttctgaccagcttctctggcctctgctgaccctgccggtcccgcctgtccatcttagagaagagatggacgggggactcctttgtaagcccagcctgtgggcctgtggcctacttggctctggagatgagcccggcagcctcctggttgtgtaaccttgtcctgtttccagccctggcattgccacgtggggacagaggggcctgtgtggtcatcatgtcctcagctgtgcatgaacctgacatcactcttggaccagtgcagtttagaagctccttcttgtgttatgaatgacgtctttttattttccacataaaacaatcttatctccttgagagcaggcctcttagggtgcgcatacgtcacctgaagactgcaggtgtccctgcgcacagggaggggtgcctcagcctggccctgtctccccagatctccccggaggtgctgtgcaaagaggggatcaaggtgcacaggaccgtgcagcagagtggccagtttgtcgtctgcttcccgggatcctttgtgtccaaagtgtgctgtgggtacagcgtgtctgagaccgtgcactttgctaccacccagtggacaagtatgggctttgagaccgccaaggtgagcagagccggcctcctcccgcttgctgcccccgcatccctgtgagtgccgtgcgtgagcgcacacagaagcatccctgcgtgtgcgtgtctatttgtcaatagttccttttggaatatgtctttgaaattcttaagacgtggttgaaaggtcttctaggaatgaaaagttgttagggatttgtttgtatcacaaagagttttgatcagaccgttactgacagacccctccagtattggaaaactgttgaagatgctcaaggtaattgcttagaatggacagagaacctccacccatcgtgagggagtggcagctgcctctgggtagcggcgaagtgctatgacttttcctggtatgtggtgcctttctcacagggaggcaaagttttgaagagtttttaatctaaatgcaattcaagatttagaaattcagacagcctgcctgccccccccaccaagaagaaccttgacagctgcctagtaatgaaaatccaccctaaagggatgtgactcctctttcaggaaatgaagcgtcgccatatagctaagccattctccatggagaagttactctaccagattgcacaagcagaagcaaaaaaagaaaacggtcccactctcagtaccatctcagccctcctggatgagctcagggatacagagctacggcagcgcaggcagctgttcgaggctggcctccactcctccgcacgctatggcagccacgatggcagcagcacggtggcggacgggaagaaaaagcctcgaaagtggctgcagttggagacgtcagagaggaggtgtcagatctgccagcacctgtgctacctgtccatggtgagcccgcctggccctgccggcgccctcgcatgtagtgcttggcctgagagctccggggttgcccccagaagagggagggcgctctctgcccaggagacctgctgtgctcccatctctggagccggctgtgggacctcggcggagcttctggccgccggaggtggctgcctcacccacagtgaccaggccacacagaggctgtccctctgttctgcccacgcgtggccctccctcggtcctgcagtgcgtccttcctccctggggagcaggtggcctccctctccgccctactttgtcactccagcccccacgcactctgctcttacccattctttctgaggcagtgaggggcggatttccagtactgggcagcgtctgccattccctgtggcctgtgcctggtgcacctgggcccatggcctctgccctttggctctgttcttggtttcctggtcctgctcagctacatgatctgcctcagcccccgaggacttcagaatctatccttggtgaaagctgatgttcctcctgtcccatctgggatcagagatgcttttctggcacagccactccaggccacagcaggctgcattcctcttgccttctcgactgtgccctgctggcttcctcgtgcccacctgcctgcctcagctttggggttaataccaaacacctcctccccctgctcacccctgttccagcccagaggtgggctcagaaaagcccttccatggcgactggatggctgtggccctcgccatgcttcttccagtctccccttgacctctcaccagagagctgccctgacacactctgggtagggacgcccagctggcactgcagatggctccacagcactacacaccttagcctggaacagagagcatgcccgaagggcctgacctgcctccccgggcctcgtccctttccacagtgcctcacatctccagtacagaagcctagcttaggaggtgcccaccccatatgctgtgtggtgcctgtgtcccacaggtgcccccttcggctgcacactcgctgagaggccagtgcctctgcgtccctctgcttgtccatggtgggccaggactgagacccgggtcgactctccttggcctcccagtgtgactgtgtcatgccgtctcaccccgagtcctggcgtgccctgtagaagagggaggacacagcctctcccggatgagtcagatcgtcagatcgtcagatcagggctttgtaacatttgaaagagctaaaaactcggtgtgtcctcatctcctccttacctaaggacgcaaatcacattgtatcagataggcccaccctcatggcctcatttgagctgatttacctctttagaggccctacccccaactgcagtcacagctgagatcctggaggttcaacgtttgcatttgatgggggacaaatgcagtccgtgaccgccctgcctcctgtcctgtagatttccttctgtctggttttttcccccagacttctcaaaatgtattacctagagccatttggttcttaaaagaaaatgacgataagcattttcccagatcttcaaagtatcttataaacatcactgataaaagctgcatagcttggtgtgctctctctctgttcttttttttttgtttgtttgagacagtcttgctctgttgcctaggatggaatgcgtgctgtgatcctgtctcactgtagcctcaacctcctggtcatcctcccacctcagcctcctgagtagctgggacagcaggtgtaccaccacgcctggttaacttttttttttttgtggtagagatggggttttgctgttacccataggctgcctacttcagcctcccagagccccaggattataggcatgggccactgcgcccagctgtccatcctcttgctggaacacgctattcatttccatgcactgagggctgtatggtagttacacctgggggtgaagctggtctgtccctgtgaggtggcaccaggtggcctcattttcaagccatccttcagaaacttcagagttgtcacctggcatttcctgtcagcctgaaagttattttaagaagaatgtattgtgaggccgggcatggtaggccaatcccagtgcttcgggaggcaacggtgggcagatcactcgaggccaggagtgcgagaccagcctgggtgacagagggagactaatctctacaaagaatacaaaaaattaactgggtgtggtggcgggggtatcacttgagcccagaagttcaaggctacagtgagccatgatcacaccactgtactccagcctgggtgacagagtgacaacctgtctcttt

SEQ ID NO: 10 - DNA, 2630 bp, Homo sapiens
agaggttatgttgctagaggtgagatcagttacctacgtgcaactgaaatttcaaacttctgttcagcagggacgtgagtggacaatggtgactgatagttggaaatatcagcaaacatcttaaattttatactcaaatgaatgagcaatgaaccaggagaataggtccagttttttttggctccttgtaatttttacctttttacttaaaattacagcatctttttcaatgagtgcctatgtgactgtgacttattacaatgaaaccagcaactacactgcaatagagacatgtgaatgtggcgtttatggattagcttcaccagtggctaatgctatgggagtggtaggcatccctaagaacaataactaccaagcttgtgaccacaacaccgagtttagtaatactaagaagccctggattgcgctgatagaaagaggtaattgtacattttcagaaaaaattcaaacagcgggcagaagaaatgctgatgctgttgtgatttacaatgctccagagactggcaatcagacgatacagatggcaaattttggtgcagtagacattgttgcaatcatgatcggcaatctgaaaggcacaaaaattctgcaatctattcaaagaggcatacaagtgacaatggtcatagaagtagggaaaaaacatggcccttgggtgaatcactattcaatttttttcgtttctgtgtccttttttattattacggcggcaactgtgggctattttatcttttattctgctcgaaggctacggaatgcaagagctcaaagcaggaagcagaggcaattaaaggcagatgctaaaaaagctattggaaggcttcaactacgcacactgaaacaaggagacaaggaaattggccctgatggagatagttgtgctgtgtgcattgaattgtataaaccaaatgatttggtacgcatcttaacgtgcaaccatattttccataagacatgtgttgacccatggctgttagaacacaggacttgccccatgtgcaaatgtgacatactcaaagctttgggaattgaggtggatgttgaagatggatcagtgtctttacaagtccctgtatccaatgaaatatctaatagtgcctcctcccatgaagaggataatcgcagcgagaccgcatcatctggatatgcttcagtacagggaacagatgaaccgcctctggaggaacacgtgcagtcaacaaatgaaagtctacagctggtaaaccatgaagcaaattctgtggcagtggatgttattcctcatgttgacaacccaacctttgaagaagacgaaactcctaatcaagagactgctgttcgagaaattaaatcttaaaatctgtgtaaatagaaaacttgaaccattagtaataacagaactgccaatcagggcctagtttctattaataaattggataaatttaataaaataagagtgatactgaaagtgctcagatgactaatattatgctatagttaaatggcttaaaatatttaacctgttaacttttttccacaaactcattataatatttttcataggcaagtttcctctcagtagtgataacaacatttttagacattcaaaactgtcttcaagaagtcacgtttttcatttataacaattttcttataaaaacatgttgcttttaaaatgtggagtagctgtaatcactttattttatgatagtatcttaatgaaaaataccacttctttagcttgggctacatgtgtcagggtttttctccaggtgcttatattgatctggaattgtaatgtaaaaagcaatgcaaacttaggcgagtacttcttgaaatgtctatttaagctgctttaagttaatagaaaagattaaagcaaaatattcatttttactttttcttatttttaaaattaggctgaatgtacttcatgtgatttgtcaaccatagtttatcagagattatggacttaattgattggtatattagtgacatcaacttgacacaagattagacaaaaaattccttacaaaaatactgtgtaactatttctcaaacttgtgggatttttcaaaagctcagtatatgaatcatcatactgtttgaaattgctaatgacagagtaagtaacactaatattggtcattgatcttcgttcatgaattagtctacagaaaaaaaatgttctgtaaaattagtctgttgaaaatgttttccaaacaatgttactttgaaaattgagtttatgtttgacctaaatgggctaaaattacattagataaactaaaattctgtccgtgtaactataaattttgtgaatgcattttcctggtgtttgaaaaagaagggggggagaattccaggtgccttaatataaagtttgaagcttcatccaccaaagttaaatagagctatttaaaaatgcactttatttgtactctgtgtggcttttgttttagaattttgttcaaattatagcagaatttaggcaaaaataaaacagacatgtatttttgtttgctgaatggatgaaaccattgcattcttgtacactgatttgaaatgctgtaaatatgtcccaatttgtattgattctctttaaatataaaatgtaaataaaatattcc

SEQ ID NO: 11 - DNA, 2255 bp, Homo sapiens
tccagacccagacaactcttggtcggatggtgaggagcccggccgcagcccggggcgcggatgcctgcccgccgcccgccctctctgcaggagcggctcctcctccgggccgcgcggctcccggcgagaccccatccaggcgccgcgcccggcccggctggggaacgcagagatttcacaccctttggagagtttctttcttggataattcagggtcttgctgtgttgctcgggctgctcttgaactcctgggctcaaacagtcctcttgcgtcagcctcccaacgtgctgggattacgggagcaagccaccccactgtgtgcagcccagaagttgagcctgagaggaagatgagagactgcttaggcgccaccactagtaccatgagtccctgcactggttaaagccatcgccacaacctggacaggcagcaagggctctgggtttgcagagagccgaaatgaccatgactgccaacaagaattccagcatcacccacggagctggtggcactaaagcccctcgggggactctgagcaggtctcagtcagtctctccacctccagttctctccccaccaaggagtcccatctacccgctcagtgatagtgaaacctcagcctgcaggtaccccagccactccagctcccgggtgctcctcaaggaccggcaccccccagctccttcaccccagaatcctcaagatccctccccagatacttccccacccacctgtcccttcaagaccgccagcttcggttatttggacagaagcccttcggcgtgcaagagagacgcccaaaaggaaagtgtccaaggcgcagcccaggatgtagcaggggtcgctgcctgcctcccccttgcccagagcacgccattcccggggccagcagctggcccccggggcgtcttgctgacccgtaccggtacccgcgcccacagcctgggcatccgggaggagatatcagcatgggaaggtcgccgagaggcgtcgcccaggatgagcatgtgtggagagaagcgggagggctctgggagcgagtgggcggccagtgagggctgccccagcctgggctgtcccagcgtggtgccgtccccctgcagctctgaaaagacctttgatttcaagggcctccggaggatgagcaggaccttctccgagtgttcctacccagagactgaggaggagggagaggcgctccctgtccgggactctttctaccggctggagaaacggctgggccggagtgagcccagcgccttcctcagggggcgtggcagcaggaaggagagctcagcagtgctgagccggatccagaaaattgaacaggtcctgaaggagcagccgggccgggggctcccccagctccccagcagctgctacagcgtggaccgggggaaaaggaacactggaaccttgggctccttggaggagccggcagggggcgcgagtgtgagcgctggcagccgggcagtcggagtggctggtgttgcgggggaggcgggcccacccccagagagggaaggcagtggttccactaagcccgggacccctggaaatagccctagctcccagcggctgccatcgaagagttccctcgatcccgctgtgaaccctatcctccaagccagcccacctctgccttcatcatatcccaggatactgtttgtaaataatctgctgtaagctttcttaactgttttttgtaacaagcaaagagaatatggcaaatatttgtatattcccaaggggccgggtgctttcctgtcctgccagagcatggatgaagtttcgctgggtgctcgtgactggccagttttgtgcagctgactgtctcagccaaaccactgatcttccctggaggccttcggcctgcctgcctgcctgcctgaggtccccgctgccagtcccgggccctggagagcagatgctgtcttgttatgtacaggaggaccttttaaaaaaatcaagtttctattttttgctggtagtccgcatacccataccctctgtttttgaaaggcaaaggccaatcagtccccatttgtagcatggcaccagggtcttaggcctagtcctctcattcctcccaccctccgagatggtcagtgtgtcatgggaagcccacccccagctctgccagtgctctctgggcctggctcccagtcagtggtggccacgatgcggtacagggcatccctccttcccatctacgggtgttctcaataaacaatgtacagttgtttgggcccag

SEQ ID NO: 12 - DNA, 2078 bp, Homo sapiens
atgggcaccttcccctgcctctctccatgtgggtccccgcccccagcctcgccctcagcatctctctctctcccactcgtgggcctcagtgctccaagagctgcagctcgggcactcggaggcgacaggtcatctgtgccattgggccgcccagccactgcgggagcctgcagcactccaagcctgtggatgtggagccttgtaacacgcagccctgtcatctcccccagggtaaggacaggagggcagggaggagtccggcctctgacctctctcccactcgctacaaacccagcaagcatgtcctgcctcggggcctctgcctgcactgtgtcatccctctggaccccacttctcccatgtctccccccgctgaaccctttgccatctctaaggcccacctggtgtgcagcccaccaggcagccctgctttcctccactcagcggtagcatgcccctgcccctctggcccccatagcatgctgtcatttctgtgggacccttagattcatttccttgtgctgctgtggttgtatacggcttgtcagacctacccactataagcttcttgaggactgggtccccaacttccatattcctctttatacccccatagaacttacctgacacagttaggtactcagtgaatgtctgttgaatgactgagtgactgactgtgtgctgagggagggaggcagtccaggaaggagtgtctccacatgccacttctgcctctgtcttcttcccttcatccccatcccactgtgaaaggagcctcacaggcatgagggcctgctggagaaagggcactgaggccagtgtttgcgtggtgtgaggatgccacattgaggaagggtgtgggttgtggtgagctggggatgggggtgggtgcgtagcctcccaatactgcagggaggcatgtttggccttgactcactcgtgatggggactctatgagctgtagggaccttgagatgaaggaaggcagaatttctatgagacatgtgacaggtgtggctaagaaccagtggcctcagagtcaacagcaggcttgggttccgatccactccgttgctgaccagttgtgtggccttgggcaagtgccccacctctctgattctcagtttgcccatctgcacagtggggttaaaaagagcgactttccagaccgtggtggtcatgcagcacaacgcctgaccgcatggggtgcttgctagctaagcagagggtggaaggggtggtggtgaggccttgtgggggagctcggccatccggagggcccctggtgcctcagctggggcctggtccttggggctcaccagcaggagagccttggactcccaggggtccagctctccatggagccagtctgttccccagggccttgttggcttctaaaagaggtgatcttaagcctgtcccagggactagcaggacccatatagaaaggaagaaaaagggccaggtgaggattaatcccaaagtgctgggattgcgggcgggagcccgtgctttgctcattatctagtgtctttctatccctttgtctattcatccaatttttttaaatatggaatttttttatggaggtgaaatttacattcagttaacccttttaaagtgtacaggttggtggtatttagcgcattatttcaatctctttgattatagacatcctagtgggtgggaagcaggacctcattgtggttttgatttgcatttccctgatgactaatgatgttgagtatctttttacgtgtttgttggccatttgcatatcatctttggagaaatgcgcaagttctttacccactttttaattggattgtttgcctttcatcagtccaattttttaaaaaagtatgttctgttttttgttttatgtggctgggatcataacacgtgcacattttatagctggtactttttgctgaacatgtaagattagcatttttcatgctgggtgcagtggcttacacccataatcccagcattttggggggctgagtcaggaggatcgcttgagcccgggagtttgagacaagcctgggcaatatagaaagaccctatctctaaag

SEQ ID NO: 13 - DNA, 2616 bp, Homo sapiens
aaactggactcaggtggaaatatccccaggtctcccagctcccacccccagcctctgagccggtggcacggaggccggaagtttggggagcctctcagagcctgtcttctctgctcctcttcccccagcctcaggagttccccattctctgggtccagggaggggactgggtgtccagagacctggttctagtctcacactggcacagatgcctacatagcctggacagtcagaccaccttgcagtgggccttggcatcccccatgtgtccccaggtgggggccaagggcctgtgcacccctgcccacagctgtagtccagagtgctgtgtgactgtgcctaggagtctgagctcctgcacttcccgttcttggggccagctaatactcctcatcccggggtgggctgaggatttgggagtgggcagaaaagaggcttctgtgtcccaaagctgggccccgggtgggtctctcagcctcccctttagtttcatctgtccgccctctctcaggacacagccctgggtggaggaggaaaaacccatgtatcctattcccacccccatggaatgtgctccgactgggatgaagcaactgggccacccagggcaggcctcagctgggagggacagtggaagcactggggtccaggtgccctgctgcggggaagggaagtagggggcgttctaacccaggcaggctcagcagaagcactctcccccccccccccaccactccccgcagcaccccggagaccgctgagttcctgggtgaggacctgctgcaggtagaacagcggctggagccggccaagcgggcagcccacaacatccacaagcggctgcaggcctgtctgcagggccagagcggggcagacatggacaagcgggtgaagaagcttcccctcatggctctgtccaccacgatggctgagagcttcaaggagctggaccctgattccagcatggggtgagcacagacggggcccagccctcacctggggataccaagacgtgatctcagctgggagggggtccaggtggtgagggcatccacatcagaagaatgaccaggctggggacagttcccaggaaggccttggagatgagctgtgccatccagaatcagctggcccgcatcctggccgagtttgagatgaccctggagagggacgtcctgcagccactcagcaggctgagtgaggaggagctgccagccatcctcaaacacaagaaaagcctccagaagctcgtgtccgactggaacacactcaagagcaggctcagtcaggcaaccaagaattcaggcagcagtcaaggcctaggaggcagcccgggtagtcacagccatacgaccatggccaacaaggtggagacgctgaaggaggaggaggaggagctgaagaggaaagtggagcaatgcagggacgagtacttggctgacctgtaccactttgttaccaaggaggactcctatgccaactacttcattcgtctcctggagattcaggccgattaccatcgcaggtcactgagctcgctggacacagccctggctgagctgagggagaaccacggccaagcagaccactccccttcgatgacagccacccacttccccagggtgtatggggtgtcgctggcaacccacctgcaagagctgggccgggagattgccctgcccatcgaggcctgcgtcatgatgctgctttctgagggcatgaaggaagagggtctcttccgtctggctgctggggcctcggtgctgaagcgtctcaagcagacaatggcctcggacccccacagcctggaggagttctgctccgacccgcacgctgtggcaggtgccctcaagtcctatctgcgggagctgccagagcctctgatgaccttcgacctctatgatgactggatgagggcagccagcctgaaggagccaggggcccggctgcaggccctccaagaggtgtgcagccgcctaccccccgagaacctcagcaacctcaggtacctgatgaagttcctggcacggctggccgaggagcaggaggtgaacaagatgacacccagcaacatcgccatagtcctgggacccaacttgctgtggccacctgagaaagaaggggaccaggcccagctggatgcagcctccgtgtcttccatccaggtggtgggcgtcgtcgaggcgctgatccagagcgcagacaccctcttccctggagacatcaacttcaacgtgtcaggcctcttctcagctgttaccctccaggacacagtcagtgacaggctggcctctgaggaacttccgtccactgccgtgcccaccccagccaccaccccggctccggctccggctccagctccagctccggccccagccttggcttcagcagctaccaaggaaaggacagagtctgaggtgcctcccagaccagcctcccccaaggtcaccaggagtcccccggagacagctgccccagtggaggacatggctcggaggagtcctaggggagccaccggaaggaaggagaggtttgcctgctcctacgggactgattcttctcttgtcgacatgttttttgtaaggctggtaaataaattattttggacaaaactgg

SEQ ID NO: 14 - DNA, 2182 bp, Homo sapiens
catattggattttgttttcttttttgattatttttatggcttcatttttaaaaatgtaaatctttaatcctttgaaggttaatgtggatggacagaatgagatgtggaccctcccttatttatatacatgtttatttgtttatctctggatgggctaagttgtcccagttgtcctgtgacctttcactgacaagtctgtctttccccatgacctgtgatggcatctttagtgcgtcctgggtcccggctgtgctggggtctggtagcagcggctggtttagtgtgtcctgggtcctggctgtgctggggtctgttagcagcggctggtttagtgtgtcctgggtcctaactttgctggagtctggtagcgacggctggtttagtgtgtcctgggtcccaactgtgctggagtctagtagcggcggctggtttagtgcgtcctgggtcccggctgtgctggggtctggtggcagcagctggtttggtggtcctctctgttgcccctgctgagctgtcacagagtgagtttgctcctcagagctggagtcaagctgcaggagtaccccacttggaggggtggccctagagtggagaagggatggtggtctctgccagtgagcctgtgggtgttggacatccgtgatgtcaaaacaccagcaggaattctctctgtctccttggtgccctggccttatgggtagagactacctggcccacctgtttggcccccctcagctcctgggcacaaggatacaaaagccacactgccttctccctggggtcccatgatgggccagcctgccccagggttcccctgggagcctccacctcagacatagcctctcacctgtggcagccaggtcccacccacccactgccccagcctctgcttgactcaggcagtagtagcaggtcacagttgggagcagaggggaaacagggcgtgtttaagtggccttattcccagaatcctggctccagagctgtgtctgaaagggagaggaactacttcgtctgtaatacatcgggggcagggattgctggaagagcaagtctgtttccaggtgagaaataatgaacaactttttcttattttcttttttgagacaaggtcttgctctttcacccaggctggagtgcagtggtgcaatcacggctcactgcagcctcaacctcctgggctcaagcaatcctcccacctcgtccttccaagtagccgagagcacaggcttatatggtagtgacagtgaggatggagaatagtaaaaatgtttgaggaattttttttttaattttatttttattatgaaaatgtccaattaggctgggcctggtggctcacccctgtaatcctagcactttgggaggccatagcgggaggattgtttgaactcaggagtttgagaccagcctgaacaacacagtgaaaccctacctctatattaaaaataagtaaataaatttaaaacttaagaaaatgtccaacatgcagaaaagtaaaaataatttttttatttttgagacagaatcttgctctgtcaccaggctggagggctgtggcacaatctcagctcaccgcagtctctaccttccaggttcaagtgattctcatgtctcagcctcctgagtagctggaattacaggcacatgcctggctaatttttgtatttttagtagagatagggttttaccatgttggccaggctggtcttgaactcctgatctcaagagatccacctacctctgcctcccaaggtgctgggattgcaggtgtgagccaccatgcccggccaaaaagaattttttttttttttttgagaccaagtcttgctctgtcacccaggctggagtgcaatggcatgatctcgtcttactgcaacctctgcctcccgggctcaagtgatactcctgcctcagcctcccgagtagctgggattacaggcatatgccaccatgccccgctaatttttgtatttttagtagaggaggggttttgccgtgttggccaggctggtctcgaactcttgacctcaggtgatccgcctgcctcggcctcccaaagtgctgggattacaggcatgagccaccacactgagccaaaaataatatttttgaaaaacgaatacaattacctattgcctagatttaacaatacttgctccttgctggctgctctactagg

SEQ ID NO: 15 - DNA, 1955 bp, Homo sapiens
atcttcaccactgctctctcagagatccaggtccgggagatgacagtggctcccagaaagcccaggattcaatcgctgagagagtgcttaggcccgaatgccggcccaaatcgttctactcaccgtgtcggaggccgaggccgaggccgagagcgatgagagtgcagggaagtggggaagagggggtggccgccaggctcctccgcttccctgggtccacggcggatccctcccgcttgtcaggaggcggccagcgggtaagctgactggcggaaatgcgagagaggagaagggaaaggtggaaggctaaagggggcaaactgaggggaggcgggtcccgcaaccgagactgggatcgtctcccctccgcaaagcgaacccaaaatggcggcgggagcggcggcggcggcggcggcagcagcagagtggcggcggtggcggcggcagctcctccagagggagggagcgaagggcgcctagcgcccccctcaacctcccactcctccctcctcgcgttcttccccaccgtcccccgctccgcccgactccgtccgcgtagcgcgcacgcccgcccgcacgcgtacgagtgtctacgggctcgtcgctggctgctcccaccaaccaccaccttcggccgccccgcgcgccagccagcccgtacgcgctcacccacaggaaccccctcgtccagtccctcactacccctcaggccctgtcaagccggcgccggcgcaggccctcacgcgtaccttcaacggcgcaagcccaagcctcctcctcctcctcctccacctcctcttctctcctccccccccttccccgcccccacggccaccaaccgccgccacggccgccgccgccgccgccagccccccctaccaccctccacccctcgcgcgtgcgcctcccacaatcccccccgcgggactgttccattcctgtcggctgcaggggcaggagaggaagggacgggccgagcgggtcggggcttgccgtttgactggaattgccagaatggcggaccgagccccacgacaacctacctccctgggctcctcgccgcagcgctgcggctcgcctccctctgctcctcctcctccgccggatcgcggcgagcggatcgaggactgcctagcgcccctctgcccaccggtggttggaggccgcggcggctgcgcgttgagtcgtttcctgccggttgacctgagcctacttcgcagtagcaggaccgctgctgtggagctggtcgcaggcggtgtgtgccggtcgcctagtcaggagaactagtcctcgactcacggtgagggaatggaccgacacgggtattgtaccgctgagggaaaggagcgggactccggacctccaggaggtagggagtgaggccagtaggaccggcgcgcctccggggggattcctcccgggcgttgagttgccaacctgggacccgaggaagatcggcgtggtggtgtgctttttgttgttgttaaccctcctcggatttctcgaatttcacaccactgtccatatgcgatgatgtttgtttgcccttgacgcacttactcatggatggtacttcttcagcctcgttagacagcctggtgatggaggatgaagaaaccatgtgcttttcattcagttctggacttagtctcccttttcttccttcagcaagttatttttgttagttccttatcaaaaagtgtacataaaaattaggcaactccaaacatgcctccagggttaatgtgtgaaataataagataatatatgtaaagtggaattagctcctaggcatagggaaagtgcagaatattgccgtgttgtcatttacagttctgttgatgtcgataacgtttgtgggtgtaattggtagtgttctgtccctccaaggagttaataaaacaaagcaaacataggcctgttaggtttctgtggctactgaatatttgtttctc

SEQ ID NO: 16 - DNA, 2723 bp, Homo sapiens
gtcccagaagcggagcatccaggcaggtaggggcttccgctacttacctaactcccacaactcagtgggggtgtaggcactatatgaagtgtgctccaccacggtagggggtccctgggcccacccttggggcccaagtggctgttcatgctctattttctggcagaccacagggtgagcctgcagcaggggttcttcctcctcggtatcagatggaatgggagtctctggccaggaaggcaggctcaagcctgcacttacggcagttacccattctcattccaagctttgtatttgggcctccaggcactcagctagcacctggaggttccttacctgtgctgtatcccgcagggactgggcatgcactttccatagcatagtcaaaaatgcccatccaactctgctggcaaaggcaccctccttctcggtgttgtatgcttccaggtgcttcagggccttctccatgctcatgggggacctgtctacctctgcccatgtttccaccagggcccatctggacagcacagctgccaccaagtaccgcaacccatgttggggccacatggccaaccagggatcatcaggtgctgaggactcactcacttcagaatcctgctaactacaccaattgtccggttccaacctaagctggagtccgaggggagttggtggacgggtggcaggtagttgaaagaacacttgggggtccggaggcaggggctttattatgtgcccctctcacagtgtcagtgatacatttttgcacctcagagccagttgatgagctcacttataacatggttacataactgtgattatataatgcacaggattgtacacacgcactccaatcctgctgtgtcacgctgcaccagatgtttaccttggcctactcttgactgccatgcagcctttttccttacatatatataccatggaatactatgcagccataaaaaagaatgaaatcatgtcctttgcagcaacatggatgaagctggaggtcactatctgaagtgaattaatgtgggaacagaaaaccaaacactacatgttctcacttataagtgggagtgaaacattgggtactcatggaaataatgatggcaacaatagaaactgggaactactggggggaaggttgagagactaaccattaggtactatgctcagtacctgggtgatggaaccattcataccccaaacctcagcatcgtgcaatatacccaggtaagaaagctgcacatgttcccccaatctaaagtaaaagttgagaaaaaaagaaaatttgattttgtgcattctatcttatgctcagttttggtctgagttttgttgttgttgttgttgttgttgttttattttttatttttttcgagacagggtctctaaaaaaggcccaggctggtttcaaactcctgggttcaagcaatcctgcctcaccctcccaacatgctgggattataggtgtgagccactgcccccagccaagttgttttttatatgagacaatttggtaagggatcaaaagatgaaaatacagaaataaatggcatataaattttgcataacagatgaagcttctagtactgatgatggcagctcaagaaatggactttgctttggaaggaacagagtagtccacaactttccttcctatacttgcaggaaactgctacttgaaaaagatgaaacatctttagataggtttctcaaaaagtagtcaagtgcccttaagtgagtacttccattaatctcaagatgcctttgaaaattacccaaagaagttctgatttctttttttttttttttttttttttgagacggagtctcgctctgtcgcccaggctggagtgcagtggcgcgatctcggctcactgcaagctccgcctcccgggttcacgccattctcctgcctcagcctcccgagtagctgggactgcaggcgcccgctaccacgcccggctaattttctgtatttttagtagagacggggtttcaccgtgttggccaggatggtctcgatctcctgacctcgtgatccgcccgcctcggcctcccaaagtgctgggattacaggcatgagccaccgcgcccggccagaagttctgatttctatggcttcagtgctttttcacctgatttgttgcaatacaaataatacgagggttaaaaagtagggattttgcacctttctgaattccagagtacataagtggtctttgaagagattttcaaatacaggtaggttaactactatttaaggcaaagtctttagttacattgcaaacataaattaaatacttaggaggtaatgttttggactcttcctggctatcactcatcagttaattagggtcttttagaatttggtttggctgggtgtagtggctcacacctataatctcagcgctctgggaggccaaggtggtaggattgcttgaacctaggagtttgagagaccaacctgggcaacatagtgagactccatctctacaacataaaaaattaaaataaataaattagccaggcatggtggcatgcacatgtagttccagctacttgggaggctgaggtagcaggatgatttgaccccggggagttgaggctgcagtgagccatgatcatgccactgcactccagcctgggcaacagagcaagaccctgtctcaaaaaaagaaaaatacaatgccaaatgttgcatgggacacacttatact

SEQ ID NO: 17 - DNA, 2269 bp, Homo sapiens
ttaaacattatccaggtgtggtggtgtccacctgtgatcccagctacttaggaggccgaggcaggagaatcgcttgagcccaggagttcgagactgcagtgagccatggtggtgccactgtgctccagcctgggtgacagatggagaccttgtctctaaattcatgtgttgagcctggttgcagtttgggtggtgaagtagaaaggacactggtcttggagtcaggtggattggttggaatcccaggtcttactgcgtgtgactttagcccagtgatttcacccccccgagccttcactttcccatgggatgatggccatgctaatgcttcctttgcagggctttctggaggataaagccaggagagcatgggaggccctgcctccaaggtgctcacaatgctccttcattccttttctcccttgcttcctcctacccagtgcgttcagccccaggcattgcctgcccccctccccccgccccgccatccagaccttgaccttggccttgagttccatgaggccttcggaaatggctttggctgctacctcggagggagctgccccgatccacttgcagatcagaatctccgggcaccccttgccagggctttcatgttgttgctttatttcacaagaaccccggcatttgtttagcaactgggtggaatttttagaacttaaaagtaattctgctcttcgaggaatgcgcctgtggatgtaaccccaactcaggccaggcctggacccagagggagtgggcactctgccctgggcctccccacctccacatctttgctccagttgaatgcaggacaccctcagtctgccctgtccggcttgacttcttcccgcctgctggtcttgaccccagggcaggggctggtggggtgggcacaacagtgtcagcctgtggttagctaaataatgcccgccccccaagatgtccatgatataatccctggaacctgtggatatattatatggcaagagggactttgcagctgtgacggaggatcttgagatgggaagatgatctggattgtctgggtgggccctgggtaatcgtggggtacttatagaggaaggttggcagatcagagagagggaaggagatgtgagactggaaaaaggtcagagtcagagagatctgaaggtgccctgttgctgactttcaggctagaggacagggccagcagccatgggatgcaggcggcctctaaaggctgggaaaggcaaggaaacaaattctcccctatagcctccggtgggagcctggccctgccaacaccctgattttggcccagtgaaacctaatttggacttctgatccttaaaactataaaataatacatcagtgttgttttaagccacaaagttggtggtaatttgttacagcaacaataggattctaatgcacaacccagagcccccgtccctccttggagcacctcattcaaagtagggctgaggaggcacctcggggggtacagagggtgtcgtgagagagccactctaacctgtagccaaatgctgcccggccactgtacccctctgaacctccagtaacccctctggaaagcaaggttcattcctcctagaactgttgggaagaatttttgaggatgggaaggacctagcccagcccctggcatggaataagcacaaaattactcagccgtgtatattgtttgtttctctgctgaaaaaggcagggaaagagggggtgtgcctggcacagtgcttgtacgtttggatcaacattaggcaacctggattcaaattccagctttggccgggtgcagtggctcacgcctgtaatcccaacgctttgggaggccaaggcgggagaatcacttgagcccaaaagttcaagaccagactgggcaacatagcaagaccctatctctaaaaaaatttaaacattatccaggtgtggtggtgtccacctgtgatcccagctacttaggaggctgaggcacttgagcccaggagttcgagactgcagtgagccatggtggtgccactgcgctccagcctgggtgacagatggagaccttgcctctaaaaaataaataaaaatcccagcttccccaaacccagcaaaggtggtggtgcattgcaggtaaagttctgcaacatggctgggcgtggtggttcacgcctgtaatcccagcactttgggaggctgaggcgggtggatcacttgaagtcaggagtttaagaccagcctggccaacagggcgaaaccccatctctactaaaaatac

SEQ ID NO: 18 - DNA, 1944 bp, Homo sapiens
tcatagtccatcaagcagggctgtgactggtcacatgtgggctactggtggcactgcacatttggagagaagatgatgtgcttggtttaggaggtgctgagggtgatggcttgggtaacatcctggcagagacacccaggtggctggaatgtgggtctggggctcaggaatgacgtccgagttgagctgatgagggtgctgtctgccctcaagggtacagggagcacatggagatcagagccctcacacgctgtcctctgctctgcctatgccaggcgccttcgccaaggtgaaggagagccaacgcatgagtgacgagggccgcatggtgcaggacgaggcagacggcattcgcaggcgctgccgcgtggtgggtttcgccctgcaggccgagatgaaccacttccaccagcgccgtgagctcgacttcaagcacatgatgcagaactacttgcgccagcagatcctcttctaccagcgggtgggccagcagctggagaagaccctgcgcatgtatgacaacctctgaccgcgtgtgcctgggccccctccttcccctgggcctggtcactgcagtgtaccccactttcccgacctccctataccagcagtgactgggggaggggtcagcggtgggggagataagcggcctgtcctgcctcctgggagaaggagctttcaaggagtcatgggtgcccctgggaaattccccactccttagaagtggggcacagcaggggtgagaatagagtcaggagccctcgaggccaaggcctgggctgccggtcagccagtgaaggtcaggccagggtctcagcctcccctagagcctattttgcttgctcacctggccactgctgccttatccattcagcagacaccgaggcctgctgcacccttgggtcggatgctgggcacccagggctgtgacatgcctgctcttcaggagtcctcagtgaaggtcggggtcagacacagacagagtcaatgcagtatgactgatgtttaagtgagggatttctggaagctcatagaagggaccacagcattccactggtcagggaagactccatagagtaggcaacatttgggcagtgttttgaagaatgacaagggcctgccagacagtacatgggggagaaggactttcaggggagaggaacagcatgggcaaagttatggaggcatgcaaacatctccctcttctctcccttactttccaagcaagttaggtacgctttccatggggattctggcctgtgtggtaggaagggatctcccttgctcccatgttgctggctgtccgtacatcaccctgtcccctgcaggagggggctacaggccatctccctcctgtaggcctctgactcccctccacttttgggccctcagcttatctcgggcaggggaccattgcagcatcctcccctcctcggactcaaggtgctgaggtataagccctgggccccagatccctggtgacaccttcctggagaagactctcaaaagtgactgtatatttgagttcaccagcaataactccccacactcgaagcaggtccaaacccaggatctcagggtccttgggctctgtggcactgtcttcccaagatccttcctgttgcacaatgggaaacctaagaggaaaaagacaggggcctgcttgcccagccatgcgagggattccatgcccacctgccctctgtctgcctcgctggaatgtgggcccctgctccccgtcaggttgtgctgtctctgacctatgtttacatccccgaggggtttctgcctcctccccacccaggtcagggtgtggtccagcagcttgctgtggggtgctgacatgtgtcaccactgccccccttgcccccgggggggtcatggtctcctcctggatgctgctccttgaatcttttttcttgataaaccttttacaattaagat

SEQ ID NO: 19 - DNA, 2343 bp, Homo sapiens
ggcttctttgccttgtcttcctcttttctccatgttctttctgtctccttttcttgagatagatacctggtagtacttcctttctctcttcggggacttactcccttatggatggtgccttagaacatttgagggccaagctttagataaaatcccaaataagagaaagaatgtattggaagctgcactgttttctgagtcatttgtcaggataaaagagaaactgctatttaattcttttttttttttttttttttttgagatggagtctcgctcttgttgctcaggcaggagtgcaatggtgtgttcttggctcactgcaacctccacgcccggggttcaaacgattctcctgcctcagcccccgaagtggctgggattgtaggtgtgcaccaccatgccccgctaacttttgtatttttggtggagatggggttttaccatgttgggcaggctggtctcgaactcctgacctcaagtgatccgcccgcctggcctcccaaggtgctgggattacaggcatgagccaccgtgcccagcctgctatttaattcttaaatgaaagttaagcctgggtgtggtggctcatgcctttaatcccagcactttgggaggctgaggcgggaggatcacttgaggtcagttgtttcaggccaggcagcaacgtggcaggatcctgtctctacaaaaaataaaagtaaaaaaattatctgagtgtgatggaatgcacctctaatcctagctactcaggaggctgaggcaaggggatcacttgagtgcaggaattcatggccgaaatgagctgtcatcaccagtgcactccagcttgggtgacagagcgagaccctgtctcaaaaaaattttaaaaagcatctccaaagattttcagtttatttctcttctgtagtactttaggatggagctgatgcatgctgaaaaactgaggaaggagaaggaagaatttgaaaaagccagtatggatgtggagaatcctgattattctgaagaaatccttaagggcgagttggcatggatcatctacaaaaattctgtaagcataattaaaggtgcagaatttcacgtgtcactgctttcgattgcacagctatttgactttgccaaagatctacaaaaagagatttatgatgaccttcaggctctacacacagatgatcctctcacttgggattatgtggcaaggcgagaattagagattgagtcacagacagaagagcagcctacaacgaaacaagccaaagcagtggaggtcggccggaaggaggagaggtgctgtgctgtgtatgaagaggcagtgaagactctgccaacagaggccatgtggaagtgttacatcaccttttgcttggaaagatttactaagaagtcaaatagtgggttccttagagggaagaggttggaaagaaccatgactgtattcaggaaggcacatgaactgaagcttctgtcagaatgccaatacaagcagttgagtgtttcgttgctgtgttataacttcctgagggaagctctggaagtggcagtagctggaactgaattgtttagagactctgggacaatgtggcagctgaagctgcaggtgctgatcgagtcaaagagccctgacatagccatgctttttgaagaagcctttgtgcacctgaaaccccaggtttgtctgccattgtggatttcctgggcagagtggagtgaaggtgccaaaagccaagaagacactgaggcagtctttaagaaagctctcttagctgtcataggtgccgactcagtaaccctgaagaataagtacctggattgggcttatcgaagtggtggctacaaaaaggccagagctgtgtttaaaagtttacaggagagccgaccattttcagttgactttttcaggaaaatgattcagtttgaaaaggagcaagaatcctgcaatatggcgaacataagagaatattatgagagagctttgagagagtttggatccgcagattctgatctttggatggattatatgaaagaagaattgaaccacccccttggtagacctgagaactgtggacagatctactggcgagcgatgaaaatgttgcagggagagtcagcagaggcatttgtagctaaacatgctatgcatcagactggccatttatgaagatgaagaatacagtcagctttgtgaaatagtattgcaagcaagccccgtgggcaaatttgtattgagtccatctgtaatttgctcagtgatggcagacaagatggctgtctggttttgagacacactttaattttatgttaacttgttaaatctttttaaaaattaaaaaatttttatgattg

SEQ ID NO: 20 - DNA, 2762 bp, Homo sapiens
ttttgggtcgccttccatgctgtggaagctttgttcttttgctctttgcaataaatcttgctgctgctcactctttgggtctgtgccgcctttatgaggtgtaacactcaccgcgaaggtctgcagcttcattcctgaagtcaccgagaccaggaacccaccaggaggaatgaacaactccagacatgccgcctttatgaactgtaacactcaccgcgaaggtctgcagcttcactcttgaagtcagcgagaccacgaacccaccagaaggaagaaactctggacatgtccgaacatcagaaggaacaaactctggacacaccatctttaagaactgtaacactcactgtgagggtccatggcttcattcttgaagtcagcaagaccaagaacccaccaattccagacacattttggccacccagatgggaccatcgcccatcgccaggcggtgagactaatgcctattgccaaatgaatcatgtcaaccctgccatggacttcacgcagactccacctgggatgttggctctggacaacatgctgtactttgccaagcaccaccaagatgcctacatccggattgtgcttgagaacagtagtcgagaagacaagcatgaatgtccctttggccgcagtagtatagagctgaccaagatgctatgtgagatcttgaaagtgggcgagttgcctagtgagacctgcaacgacttccacccgatgttcttcacccacgacagatcctttgaggagtttttctgcatctgtatccagctcctgaacaagacatggaaggaaatgagggcaacttctgaagacttcaacaaggtaatgcaggtggtgaaggagcaggttatgagagcacttacaaccaagcctagctccctggaccagttcaagagcaaactgcagaacctgagctacactgagatcctgaaaatccgccagtccgagaggatgaaccaggaagatttccagtcccgcccgattttggaactaaaggagaagattcagccagaaatcttagagctgatcaaacagcaacgcctgaaccgccttgtggaagggacctgctttaggaaactcaatgcccggcggaggcaagacaagttttggtattgtcggctttcgccaaatcacaaagtcctgcattacggagacttagaagagagtcctcagggagaagtgccccacgattccttgcaggacaaactgccggtggcagatatcaaagccgtggtgacgggaaaggactgccctcatatgaaagagaaaggtgcccttaaacaaaacaaggaggtgcttgaactcgctttctccatcttgtatgactcaaactgccaactgaacttcatcgctcctgacaagcatgagtactgtatctggacggatggactgaatgcgctactcgggaaggacatgatgagcgacctgacgcggaatgacctggacaccctgctcagcatggaaatcaagctccgcctcctggacctggaaaacatccagatccctgacgcacctccgccgattcccaaggagcccagcaactatgacttcgtctatgactgtaactgaagtggccgggcccagacatgccccttccaaaactggaacacctagctaacaggagagaggaatgaaaacacacccacgccttggaaccgtcctttggtaaagggaagctgtgggtccacattcccttcagcatcacctctagccctggcaactttcagcccctagctggcatcttgctcaccgccctgattctgttcctcggctccactgcttcaggtcacttcccatggctgcagtccactggtgggacaagagcaaagcccactgccagtaagaaggccaaagggcccttccatcctagccctctgcaggcatgcccttccttcccttgggcaggaaagccagcagccccagactgcccaaaaacttgcccaccagaccaagggcagtgccccaaggcccctgtctggaggaaatggcctagctatttgatgagaagaccaaaccccacatcctcctttcccctctctctagaatcatctcgcaccaccagttacacttgaattaagatctgcgctcaaatctcctcccacctctctccctgcttttgccttgctctgttcctctttggtcccaagagcagcagccgcagcctcctcgtgatcctccctagcataaatttcccaaacagtccacaggtcccatgcccactttgcgtctgcactgtgatcgtgacaaatcttccctcctcaccagctagtctggggtttcctctccctgccccaggccagaactgccttcttcatttccacccacgctcccagcctcttagctgaaagcacaaatggtgaaatcagtagtctcgctccatctctaatagactaaacctaaatgcctctaggacggactgttgctatccaagcgtttggtgttaccttctcctgggaggtcctgctgcaactcaagttccacaggatggtcaagctgtcagacatccaagtttacatcattgtaattattactggtatttacaatttgcaagagttttgggttagtttttttttttttttgctttgtttttgtacaaaagagtctaacattttttgccaaacagatatatatttaatgaaaagaagagatacataaatgtgtgaatttccagtttttttttaattattttaatcccaaacatcttcctgaaaataacattcccttaaacatgctgtggaataaaatggattgtgatg

SEQ ID NO: 21 - DNA, 3660 bp, Homo sapiens
tttacaatcccttagctagacataaacgttctccaagtccccaccagattagctagatacagagtgctgattggtgcatttacagtccctcagctagacataaatgttctccaaatccccactagactcaggagctcagctggcttcacccagtggatcctgcaccagggccgcaggcggagcactcctcagcccttgggcagttgatgggaccaggcgccgccgagcagtgggtggcgctcctcggggaggctcgggctgtgcaggagcccacggcggcggggggaggctcgggcatggcaggctgcaggtcccaagccctgccccacagggaggcagctgaggcccggcaagtattcgagtgcagcaccagcgggccggcactgctgggggacccggtgtaccctccgcagctgctggcccaggtgctaagcccctcgctgctcagggcaggtggcgccggcccaccactccgagtgcggggtcgccgagctcacacccacccggaacttgcgctggccggagagcactgcgtgcagcctgggttcccgcccgcgcctctccctccacacctccctgcaagcagagggagccggctccgatcttggccagcccagagaggggctcccatagtgcagcagcaggctgaagggctcctcaagcatggccagagtgggctctgaggccagcgagcaagggctgccagcatgctgtcacctctcacttccttctctctctctttctttcatttttgagacagggtctccctctgtcacccaggctggagtgcagtggcgcgatcatagctgaccgcagcctgcaactcctgggctcaaacgatccgcccacctcagcctccgaaagtgctgggattacaggtgaccatgcccagcctcatgtgcagctaattttttcattgtttgtagagaagaggtcttgcaatgttgcccaggctgttctcaaaatcttagcctcaagccatcctcctgcctctgccttccaaagtgctgggattgcaggtgtgagccactacgcccagccccaaaatatacttttttattcatttgtttgcctccccatgaggacagggactgttgtctgtattgatcatttattgagcagcttgtgtgcgccaggccctgtgctaggcccaggggatgcagcagtggacagaaagacaaaaactcctgtgttctcagagctcacattctagaaagggagtcagaccctcaagcagataaggacctaattataggatagcagctgtgcagcccggaggtaaggcggggtcaggatgcgggggatggggccatcgttgagccaggttggccagggagggcctctctaggaggtgacctttgagctatagctgaaggaagtgaaggagtcagtctgtggctgttgaagagggagggatggttgtcagcccaaaggtccttggctccctccctctcctctgggtctttactcaaggtcaccttctcaatgagaagattctgtaccactgcacagccctcaggcagtgatctggatcctatttccacttgtcttttcacctctctgtcctgccattttcttttctttttattttttatttttgagcctgggcgacaagagcgagactctgtctgaaataaaaaaaataaaataaaaaaaaagaggatctgacccaagaaggtgtccactggcttcccctggctgcctgtagggaatagactggggacacaggtggagacagggagagcagggtgggctcatggagaacaactgatgcaggaaaggtcagattcaggatcatcttgaagttggagccacagaaattgctgcatcgtgagatgtttctcatctcaggaaacatcatcaccattgactgcattgctcacgctgcagaccttgagtcccgggctgtctggcatcttggggaaaagcatggcctctggagccagctgcatggttccagattttaaaatcctacttctgatgcggcatggtggctcacacgtgtaatcccagtgctttgggatgccaaggtgggaggatcgcttgagcccaggagttcaagagcagcctcggcacagtcccagccactcaggaggctgaggtgggaggattgcttgaacctgggagttcgaggctgcagtgagccatgatcgtgccactgcactctagctggtgtaacagagtgagaccctgtctctaaaaacattaatgagttaatttaaatagttcattactcactactcaccagccagtgtgacccccttgggcaagtgcttaacctctctgtgccttagtttacccattggtaacacaaatagtaataggacctagctggtacggttgctgtgaggattctgtgagtaatgactccacagatattagcttttatttccttcccacccaacatgcaatcaatccctcaccaagtcctgtgtgagttgttttttttccgccttggtggtttgggggttcgaacctgctgtgcctgggttctgatccctggttgagtcaatgggtggggcctgggagcctggatgagctccatcatgccttctcaccaggtattgacctgatggacatggcttcggacatcctgcagcccaaaggagatgatgtggcccggatcagctggtacctccgtgacatcatcactcgataccaggagaccttcaacgtcatcgagagggtgactctaggggtctggaggggatctttctccatacgcgcctcccctgggccagccctgaccccactcttcctgttccctctcagtgccccaagcccgtgattgctgccgtccatgggggctgcattggcggaggtgagtctgcggctatcctcctgctcgggtgctccccaggtggggctgctgctccgatgccgcggccactggcatccagcctcagctctgtcatgggccagactgtgtcccaagaggcagccccacctcccgggagccagggttggttctggtggtcattcagcatccctggcctctacctcctaggtgtggaccttgtcaccgcctgtgacatccggtactgtgcccaggatgctttcttccaggtgaaggaggtggacgtgggtttggctgccgatgtaggaacactgcagcgcctgcccaaggtcatcaggaaccagagcctggtcaacgagctggccttcaccgcccgcaagatgatggctgacgaggccctgggcagtgggctggtcagccgggtgttcccagacaaagaggtcatgctggatgctgccttagcgctggcggccgagatttccagcaagagccccgtggcggtgcagagcaccaaggtcaacctgctgtattcccgcgaccattcggtggccgagagcctcaactacgtggcgtcctggaacatgagcatgctgcagacccaagacctcgtgaagtcggtccaggccacgactgagaacaaggaactgaaaaccgtcaccttctccaagctctgagagccctcgcgtcccaggccccagccagggggccggccttgtcccgcctcatccacagaaagggaggatgggcgatgacagttgtttctatgccttctgacccagtttcccagtttataactttatgacaatgagtttctcaagcccaaggccttatcttcaccccacaaacaataaagcaaagtaaag

SEQ ID NO: 22 - DNA, 1572 bp, Homo sapiens
aagataaggcggcgcgggaagtggacacagggtgggctggagatctaactggactctcgctcctgctggctggacatggaggatttggaggaagatgtaaggtttattgtggatgagaccttggactttggggggctgtcaccatctgacagccgtgaggaggaagacataacagtgttggtgactccagagaaaccacttcgacggggcctctcccaccgaagtgacccaaatgcagtggcacctgccccccagggtgtgaggctcagcctaggccccctcagtccagagaagctggaggagatcctcgatgaggccaaccggctggccgctcagctggagcagtgtgccctgcaggatcgggagagcgcaggcgagggcctggggcctcgccgagtgaagcccagtcctcggcgggagacctttgtgctgaaggatagtcctgtccgagacctgctgcccactgtgaactctttgacgcggagcaccccctccccaagcagcctgacgcctcgactccggagtaatgataggaaggggtcagtcagggctctccgggctacatctggaaagaggccctccaacatgaagagggagtcacccacttgcaatctgttccctgcatccaaaagcccagcatcttctcctcttacccgatcgactcccccagtccgggggagagccgggcccagtgggagagcagcagccagtgaggagaccagagcagccaagttgcgggcctgccagccgaatgccactcaccagccggagtgtgccacctggcagaggtgccctacctccggattctctgtcaactcgaaaagggcttccaagaccaagcactgcaggacacagagtgcgggaaagtggacacaaggttcctgtttcccagcgactaaatcttcctgtcatgggtgccactcgcagcaatctgcagccccccaggaaagtggcagtcccaggacctaccaggtaaagagatcaggacagcaagcaagacttcagtagcaaaccactacagtcagtacctggactcgcctctacccagcagaccctgactccagcagattctggcccagggacaggaggaagagatgccaccagggctggtctcccaggagtagagaccatgggaaatggggtggattaggattgagctggagaagacttaaactctctgggttgaaagaagattaggggaaaagaggtcaccttccagcagtgaaatgaacaaatagaagatgagaagtacaggcaagtggtttgtctttatccacccccactgttgtggtcagccccagagaattttatcttcttccttggcattggttcactggacatttccacgtgagcggcctccgtagctaacctccctgccctctgaggagccatcttcctgaatcgcattctctactggactctggcctgcttggagaggtggcagcaggcacctggtcttcagaaattgtttcctgtgaattctgtgactcctaataggccagtttgtgataagcttactctatgagtcttcatttttctaaaataaagtgaatgtatttttatattctctgt

SEQ ID NO: 23 - DNA, 2254 bp, Homo sapiens
agttgcgcgcgtggctctggctgcgcaggaacagctggtgcctccgagggcggtcggcgagcgcgcgggcgtggggcgctggggggccggtcgggcagcgctgcgggagcagccgccggcaccgccgccttgcaccatcgcatcatgtccgggcagctggagcgttgcgagcgcgaatggcacgagctggagggagaatttcaagaactgcaggagacgcacaggatctacaagcagaagctggaggagctggctgcgctgcagacgctgtgtagcagttccatcagtaagcagaagaagcacctcaaggacttgaagcttacactccagaggtgcaaacgccatgccagtcgggaggaggcggagctcgttcagcagatggcagcgaacatcaaggagcggcaggacgtcttcttcgacatggaggcctacctgcccaagaagaacgggctctacttgaacctggtcctcggcaatgtgaacgtgaccctcctcagcaaccaggccaagttcgcctacaaggacgaatatgagaagttcaagctctacctgaccatcatcctgctcctgggtgccgtggcatgtcgatttgtccttcactacagggtgactgacgaagtcttcaacttcctgctggtgtggtattactgcaccctgaccattcgggagagcattctcatcagcaacggctcaagaattaaaggctggtgggtgtctcaccactacgtctccacattcctgtccggagtgatgctgacctggcctaatggacccatttatcagaagtttcgcaaccagttcttagcattttccatttttcagagctgcgtccagttcctgcaatattattaccagaggggctgcctctaccggctgcgggccctgggggagaggaaccacctggatctcacagtggaagggttccagtcctggatgtggcggggcctcacctttctcctgcccttcctcttctgtggccatttctggcagctctacaatgccgtcacgctgtttgagctctccagccacgaggaatgcagagaatggcaggtgttcgtactggcgttcaccttcctcatcctcttcctcggcaacttcctgaccacgctcaaagtcgtgcatgccaagctccagaagaacagaggcaagacaaagcagccgtgagcctcgggctcctgtgccctcggcccggacttcagactgcagggggctcccgggctccttcccagcagccctctcaggcccgtggcatcgctgggagagggcccaggccctggtcccccagtggaccccagtggtctagaggaatgtgagccccgcctgtccgcacagtgtccgcccacctatttatgacatatttaatgctgggtcccccatcgtccctggaacccgaggcctcactcctgtgcttgaaggtggctgaggccgggccagtcttcctggggatggggcctgaagcctcagggagcccctctgttcccactcctgtcatttgaacccctctgggtggggtttggatgtgcctcgcggggttggatttatgctgacctgctacttaccaggcccaggctggggtggtgtgaaccctcagtgtcctgtggcgcccccaccccggggccactctgcttctgctgtgagccccctcctcgcccaccccgccacgtggtgagggttattttaagttctcagagacccaccgcctcgtgctcttcttgcccctggagcgctgggggcatcctgagtcaggctgtgagaagattcgccaccagagggcgccccgggccctgggtcgtccaaggggacaaggacgttcccgtctgtgcttcggggttccctgacccccccatcctgcagcccaccttcctgcagtgtcgtggcaggcgacaccgactcctaggcgccctccagagccaagcagcttgcgacttctggtaggcaccggaatcccctgggatgcttgttttaaaagtcctgggccgggcacggtggctcgcgcctgtagtcccagcactttggggggctggggcgggtggatcgcgaggtcgggagttcgggaccggcctggccagcatggtgaggccctgtctctactggaagtacaaaaattagccggacgtggtggtgtgcgcatgtggtcccggctgctcgggaggctgaggcgggggagtcgcttgggcccggggggtggagcttgcagtgggccgagatcgtgccgctgcgctctagcctgagtgacagagtgagactctgtccc

SEQ ID NO: 24 - DNA, 2977 bp, Homo sapiens
aagcagaggcgttggcggcgtgaggctcaggactgtacatcagaggaagccaaaagccagctggaatacttcctgaatacagttttaatcttgtttgcaattatttcgaaggggagaaatcatctggatcagaattaagatgctctggtttcaaggaaatagcatgcaacttgccagatcctcctttggactcttcttgagaaattgctctgcctctaagacaactctgcctgtgttgaccttattcacaaaggagtttctcagcacaaggtctctctttgcctgctgccatccatgtaagatgtgacttgctcctccttgccttccgccatcattatgaggcctccccagccatgtggaactgacccatgccccctttgtgatgaagccaaggaagtactcaagccttatgaaaacgggcaaccctacaaggatcagaagctgccaggaacaaggagaagacgctccccttcctcaccttcccacccccacatggcttctcagtcggggaaaagatacaacttaactttaaaccaagtcttaagttttgattatgacatgggattagatgcaccaaaaacaatttcaagtgactgtggggcattctattgcctgagaatgttcaagagtcctgatatgacctgttgtttttatcctaaacagtgaaaaattcatccaccaaatatataggaatagagggagacagaaagatgctttctgaaggtatcccatatttagagtattggttacatatacctaatgttggttttaacctatagctcttcaataaacttactcatcaattcttatttcagagaggaatatggtcatgtgactaggaatcctgcagatcttcagcaaacccatgggtcccaacagctggcaaaatgaaaggtagatacctacaaacatggcatctaaaaggtggtttgattatcccactgtcaagtatcagtgttatgtcacctattactgtgattttcatgtgatgtttgtagcagcaattacttttcctttctgaaattatgtttgcaaagatcaatttgtttttatataaagattaactttgatataagaagctcatcattcacctccaaaggaaaaggtgatacaagcttcctttttttcccccttcaagctaatgccttatgaaggagtggaatagtttgggacttcatattgctgctctagaatagtgcctctttcttccacatgtctcttcataacattatgagcttactggaacacatagctctttggccagtttattgcacgaaacaagggtatactcagactggggttttttaaataatgcagcaatctcatggacatctgacagtaggaatcacaatacagccaggcttcagaagtacaattaaagaaccacccaaaactgaaacatcacccttctcacagtgccttggcttattttcttccttgttctctcctggctcacagctcccctgcttacacacactatctgcttcctcatagctgcagcctgcttatgcccatcattactgctaacctttctgttcagcaatacagcaccctgagcctctcaggcttctctattctgaaatcctaaaaggaattttactcagcttatattttacaaccaggcacccatgacctaagttggctgaccaaatctatagaaggagccacctttaggacagaagcctatccctgggccaactggctatggaagcggtatgcaaatcacagtcactgcccactggcagaggccagaagcaggacaggcaatgaccagcaactctggcacgcctccaaaaagcttaagaatgtgacattctaccatactcaagagaagtcaggagggacacattggtaagttcacttatatcctactccataggagtaataaggacatgaaccaaagcaatgggagtcagacagaaagagatatcaggagatatttaggagtgaggttgacaaaacttcatgactgactggatgggtcggtagtgatgtggagaggggagtagagagaaagcatggattctgggataactcccagttttcttgcttacactactgggtgaattctgatactttttattccctgaggcagagaatgtaagaggaaggaaaagttagttttgggctgtgcttggtggatgggaaaggtaagacatggtgaattctccatgcttgtgggatatcaaggtaaagataaaagttagaagtgcaaaacaaaggtctggggttaaggtatacatttgagagcccactgagtatggttggaaatgtggccacctggcatataaggagaaaagcaagctattcccaaaccatggagaatactaatcttgacccatgagaatagaggaagttgctagtgaaggaaaatgagagagtggtggtggaactaggaatgggagaagctcatccaatttacattacgtgatgccttttgtgatttgatagtggcaggtattattccaagcactggggataaaacaacaaacaagatagccaggattcctactctcagagtcttgcattttaagggagagacagacaataaagatatcgtatcagaggaaaataatcatgaaagtcagggaggagcttttcccagagtaactgacagtatcaaatagcaagagagttaggatgaggactgaacagaagacatcagatttgaaaattagaaaatcagtgctgctataggaagaatagtccccaaagatacccaggtcctaattcctggaacctgtcacttatatgcataaaggactttgcagatttaagttaaggatcttgagatgggaaaattatattgcattatctaagcaggtcctaatgtaatcacaggtgtctctataagagggagtcagaaggagatttgactagggaaaagagagtaggaaattcgacaatggaagcaaaaggttggagtgatacaagaaagcagccatgagccaaggaatgtgaatggcctccagaagct

SEQ ID NO: 25 - DNA, 2166 bp, Homo sapiens
gtcagagtgcctagaaagagccatgaagtttgcctttgaggaattccacctgtggtaccagtttgctctgtccctgatggctgctggaaaatctgcccgtgccgtgaaggtgctgaaagagtgtatccgcctgaagccggacgatgccaccatccctctcctcgctgccaagctctgcatgggctccctgcactggttggaagaggctgaaaagtttgccaaaactgtcgttgatgtgggagagaaaacgtcagagttcaaggccaaaggctacttagctctggggctcacgtacagtctgcaggccactgacgcttctttgcgagggatgcaggaggtcctacagagaaaggcgcttcttgcatttcagagggcccacagcctgtcacccacagatcaccaagcagctttctacctggctctgcagcttgccatctccagacagatcccagaggctctggggtatgtccgccaagctcttcagcttcaaggtgacgatgccaactccctgcacctccttgccctcctgctgtcagcacagaagcattaccatgacgctctgaacatcatcgacatggccctgagtgaatacccagaaaatttcatactactgttttccaaagtgaagttgcagtcactctgccgaggcccggacgaggcactgctgacttgtaagcacatgctgcagatatggaaatcctgctacaacctcaccaaccccagtgattctggacgtgggagcagcctcttagatagaaccattgctgacagacgacagcttaatacaattactttgccagacttcagcgatcccgagacaggctccgtccatgccacatcggtagcagcctcaagagtggagcaggcactgtcggaagtggcttcgtctctgcagagcagtgcccctaagcagggcccgctgcacccctggatgacgctggcacagatctggctccatgcagctgaagtctatatcggcatcgggaagcctgcagaagccacagcctgtacccaagaagctgccaacctcttcccaatgtcccacaatgtcctctacatgcgcggccagattgctgagctccggggaagcatggacgaggcgcggcggtggtatgaagaggccttagccatcagccccacccacgtgaagagcatgcagcgactggccctgatccttcaccagctaggccgctacagtctggcggagaagatcctccgggacgcggtgcaggtgaactcgacagcccacgaggtctggaacgggctgggcgaggtcctccaagctcagggcaacgatgcggcggctacggagtgcttcctgacagccttggagctggaggccagcagccccgccgtgcccttcaccatcatcccccgcgtgctctgagcaggcgcctgccagcctcacctgccgctcaggcctcagaggccctgccgggcaccagggcttgtgccatcgccccaaggggatgaatctgccgcactgaggccagggacgagtgttcagtgggccacagtgaaccaaccaaaccaaccccgaatcatcgctctcgccatgtgcgtttctcttgttttttttgccagcccaatggtagtttctgaacctattgacattgttcaaaatggatcatgtgccatattttgttagttgacatctgagttttcagtaaaatgattatggaattaatcagcaaatgtagaagaatatattcaaagttaaaattcagtggcagcacagattatttttatcagagctgtaaagaaaacaactgtccttttctccccaccacccctcctgccccactttggcccagaaaccaaatgtgaacttcctgtctcccacctcagcactagtccatgccaggacaccagctgacaatttcttggttttactgtcaataattgtaccatgtgatcaattactgtcctcacttagaacaaagcctgagtccgagaatatttatattttaccaatatatgcctgttacaagagaaggaaatatgagttatttaagtttaacttttttatgtgaattcagagtttatttatcgagggaaatatgtacaaagaagcttcaaatggaatatttaccgacattccttatacatgacagacacttggccacatgggaagatgatgttaataataaaatgatttttaaatgg

SEQ ID NO: 26 - DNA, 3120 bp, Homo sapiens
gctccgcgctctcctgccgctccgctccgggtctcccgcgctcctctccccggctcggccgagcgcgctgccccgacgccgccacccagagccgggccgcgccgggcgccgagatgaaggtgctgggacaccggctggagctgctcacaggcctcctgctccacgacgtgaccatggccgggctgcaggagctgcgattccctgaggagaagccgctgctccggggccaggacgccaccgagctggagagctccgatgccttcctcttggctgcagacacagactggaaggaacatgacatcgagacaccctacggccttctgcatgtagtgatccggggctcccccaaggggaaccgcccagccatcctcacctaccatgatgtgggcctcaaccacaaactatgcttcaacaccttcttcaacttcgaggacatgcaggagatcaccaagcactttgtggtgtgtcacgtggatgcccctggacaacaggtgggggcgtcgcagtttcctcaggggtaccagttcccctccatggagcagctggctgccatgctccccagcgtggtgcagcatttcgggttcaagtatgtgattggcatcggagtgggcgccggagcctatgtgctggccaagtttgcactcatcttccccgacctggtggaggggctggtgctggtgaacatcgaccccaatggcaaaggctggatagactgggctgccaccaagctctccggcctaactagcactttacccgacacggtgctctcccacctcttcagccaggaggagctggtgaacaacacagagttggtgcagagctaccggcagcagattgggaacgtggtgaaccaggccaacctgcagctcttctggaacatgtacaacagccgcagagacctggacattaaccggcctggaacggtgcccaatgccaagacgctccgctgccccgtgatgctggtggttggggataatgcacccgctgaggacggggtggtggagtgcaactccaaactggacccgaccactacgaccttcctgaagatggcagactctggagggctgccccaggtcacacagccagggaagctgactgaagccttcaaatacttcctgcaaggcatgggctacatgccctcagccagcatgacccgcctggcacgctcccgcactgcatccctcaccagtgccagctcggtggatggcagccgcccacaggcctgcacccactcggagagcagcgaggggctgggccaggtcaaccacaccatggaggtgtcctgttgaagcccttgatcccgctgacgacgcccacgtcgaggccccaccgccatccttgcgccggctcatgttccctttagtttatttttgtgagggcaaaggggaggaaatggggttctgtttgaaaaaaatgaggggatcttagatgctgcagcagaacagtctccaggtgttttaaggggctcagtcctcctcatcccatctcactctccgtggtaacttagccaacttgacccctctcatcccactcccggcggcccaggcacagaagggcagggccatagggagggagattcgctacggatccaggccattcctgggtgagcccttgggcaggcatgtttggagatgagagaggcttcgagagggtgggtgctgggccacaggggtgcggggccagctcaggcactggcgtgggagccctgggagaccccttcccccaccctccaccaagcacacctgtttctgtctcatagcacatgtgacaatcatctggacaacagccacaagggggcgctcggaccaggcagccactttcctggtgctctctgggcccagctggtgctgtagggccacgcaggcaggggcgtcaaggggtttctctgcccaaggaagacagaacatggagaaccgtcagggcaggaaccccacagactgtcccttccagcccacactctgccacctcctggccctgtcccaattctgagccaaggcctccccgaggcagaagttgcctggtcctctgtccccacagtgacctgactgggggtgagggagaaggaggagagagcccatgtgtggtgtgtgtgcccctgagaacttcgtggtgactgcctttgggagcccgcaggtggccagaggcaggggtagctgagttcctggagaccccttttttgcccccaggttccccagagggcaacgccatcagtagcagtgtggtgtttcaggcagagctctggccaggctgtgccagtgtgtcccggacgcatcactaaggaagagagagtttatttagtcaactggcccaaggcagcgaggcttctacagtcccacaccccatagccgcctgggctggggcttactgggggctgaaggttctggacatgaacaagggtcaggtagaagagaaaggcttcccctacaccccagcctcctgctgtcccctgaagcccaggactgcgttgtatgctttccatccactcaccttaccccatagcatcttgcggcccagaaaccagagccatttgtctcagaccctaaatcaataatcacaaaccccaaaacgggagagagcagtgaaaacatgcagggctgtggacgggggaagggttgtggcgggtgttctgaggctgagaggacacctatatgcgtatttcctctacacacatcaccccccttctataatcttaagccatgactagcctggtggcgtgttagtttctgcccagttctaccccctcatgtgcttcttctgaatactgaatgtgactgtttgaaagctggtagaattcatccctcttactgtagataacactgcaaatcttggaattttgttttttgctgtttccagatgtatctataaatatctatacattatatgtgtgtgtgtgtgtgtgtgtgtacatcgggtcctcccatgtgtggtgttcttctggaggttgtctctttggtcaaggtgaacttttaatgtttattattttcttctccgcacaaagtaaagagcctaattttgtgtattctggtggctgctgtcatgagatgataaaatgtaaaacaaaactctagtcaacgtagaaagagttaactgtgctgaaaaactaataaagaacctaagaag

SEQ ID NO: 27 - DNA, 1671 bp, Homo sapiens
aaaggcttgggtgtgagacagcagcggtggcagacaccgcagaagcaaagagcagtgaggctcctgcattcgggtggagcaccatggacgaagctggcagctctgcgagcggcgggggcttccgcccgggcgtggacagcctggacgaaccgcccaacagccgcatcttccttgtgatcagcaagtacacacctgagtcggtgctgagggagcgcttctcgccttttggcgacatccaggacatctgggtggtgcgggacaagcacaccaagcccatcaaggttttcattgctcagtcccgatcatctggaagtcaccgagatgttgaagatgaagaacttacaagaatctttgttatgataccaaagtcctacacagaagaagatctgcgggaaaaatttaaggtgtatggagatatcgagtattgcagcattattaagaataaagtgactggagaaagtaaaggtttgggctacgtacgatacttaaaaccatcacaagctgcccaagcaatagaaaactgtgatcgaagttttagagcaatcttggctgaacctaaaaataaagcatctgaatcctctgaacaagattattatagtaatatgaggcaagaagctttgggacatgaacctagagtaaatatgtttccatttgaacaacaatctgaattttcaagttttgacaagaatgatagccgaggccaggaagcaatctccaaacgcttgtcagttgtatcaagagttcctttcactgaagaacagcttttcagcatttttgatatagtaccaggattggaatattgtgaagttcaacgagatccttattcaaattatggtcatggagtggttcagtattttaatgtagcatcagctatttatgcaaaatacaaattacatggatttcagtaccctcctgggaaccgaataggtgtttccttcattgatgatggaagtaatgcaacagatctccttagaaaaatggcaacacagatggtagctgcacagcttgcatcaatggtgtggaataacccaagtcagcaacaatttatgcaatttggaggaagctctggatcacagttgcctcaaatccagacagatgttgtacttccatcatgcaaaaaaaaagctcctgctgaaactcctgtgaaagaaagactttttattgtgtttaatcctcatcctttacctttagacgtattagaagatatattctgtcgttttggtaacctgatcgaagtttaccttgtgtcaggaaaaaatgtggggtatgccaagtatgccgatagaataagtgctaatgatgccattgccactctacatggaaagattctgaatggggtgagacttaaagttatgctggcagattcgccaagagaagaatctaacaaacggcaaagaacttactgattcttgagaacaaagactaaataatgacataatcctcagctgactgactgaaaatgtgactggacgcattccctgtggacagttgacagctttttttttttccatatacctgatagtctgtgtacagcattgttttgtctgggaagcagggattgctgacatgtatttttgaatccatacattaatgctaaaacgaatatagtagttgttccttagagcaatatgttgttacgtgtagcagaaataaagttttctttgcttaact

SEQ ID NO: 28 - DNA, 2148 bp, Homo sapiens
acactcagtctctgattttatccctgccctggcttaattaagtgctctgaagacataaataggttttttgtttactcaagcttgggagaagctggcagaaaaggccttttcagctaaaagctccttacagccggaaggtgtgaagcggcaagtttccagccgggaagaagcctctcagccgtaggcgtctttgcccggagctgtgagcccccctcccaactcccaaatcccccggcgtcggagatgaggccccggatgctgccagtgttctttggggagagcatcaaggtgagcccggaacccacgcatgagatccgctgcaactctgaggtcaagtacgcctcggagaagcatttccaggacaaggtcttctatgcgcccgtacccaccgtcacggcctacagcgagaccatcgtggcagcacccaactgcacgtggcgcaactaccgcagccagctgaccctggagccacgcccgcgcgccctgcgcttccgcagcaccaccatcatcttccccaagcatgccaggagcactttccggaccaccctgcactgcagcctgggccggcccagccgctggttcaccgccagcgtgcagctgcagctttgccaggaccctgcccccagcctcctgggccctgccacgctctgacggggctggggccggcccggggtgctggaggagccgggagccctggggagaagccgggaggatggacacgatgagctcggcctggcactcgggcaggaggcgggaagggaggctgccagaccaaggacccgtgtggaaggaggcggctccccgctgcctgccctgacctacaggctaggtggtggtctccttgttttggtgtcaaggactcagtaaaagcatctatttttttagcacttaagctggcaaggcggtaggggcatgcactgttaggtggtggccacccccagggtcaggggaaaagaatgggtccatggagtgcccttgaagcagagaacagccccgagcagtgtgaggacagaggcatcccagcctcagccggtggggacggctgccactcccccagagccctgccaccccatgtgtcctaggctggtggccaaggccatgtgtgagggaagaggggtacctctcttccctgctgctggcctggggtatttccaaaacagccttttcgcacacatgcaggttgcaccgagaggtctggagctgtggctgagccacctctggcggatgttgagccaggaggttgggcaaaggccggatgctgatgccagcgctggaggtggtgatactgggggcggggaaggcctagaaatactttgagccatggccttgccagtgtcccgtgccctccagtgtcaaagatttggggcactgcccgtcgaaatggaaaggttggtgctcagcctctggagcctcacctgcagggcgtccccagctaacacccatccacgcaccacctccaggacgagaacccttgatgtcaaaaccaagtgcccagtggaggcggtgaagctctcggaaatgctgccacctgtgtgaggccgggtctgaactcgagggagtcggagctcagctgtcggtttaaagagacactgaggggaccgggctgccgccctcagcctgcattcctgtgcgcaatcgattccgcaatgacagcaccttactccttcctgcggcaggctcacccctgcctgtgggatgttgtgagaggaacatgagccagacaaagacttggctcagggctccgtggaacaagccaggatgcacggggagctgggggagcccccagcctggggcagcccagcaggccgctgaacaaacaccccagaagccagcactgtggcagggtgctggggagatgcccctctgagccttcctcccccctcagacctgaatgcactccacagttgggggctgcccctgccactcccctggtaatgcataaaaggggaggggaaggttccctggggcttgagctccctctgtggaggtgaggaggggagattccgttcacatccaggaggggcaaaatgactgatgtatttttatgtatctacacagagagtgcattttctctccagagatgctgtctggttaacaaaggaataacttaagaaattgattgattatcttaataaactgtgcaaaccc

SEQ ID NO: 29 - DNA, 2011 bp, Homo sapiens
agccggcccgagcgcgccccgccgctgaccgcccgcgccccgggaaggaagaacactcgctcccggccatacttgcgtgtgagttctgacccctggaggagccactgtggaagcagagcaatcgccatggagtttgtgatgaagcaggctctaggaggggccaccaaggacatggggaagatgctggggggtgacgaggagaaggacccagacgccgccaagaaggaggaggagcggcaggaggcgctgcgccagggcatccgagacaagtacggcatcaagaagaaggaggagcgcgaggccgaggcccaggccgccatggaggccaactccgaggggagcttgacgcggcccaagaaggccatcccgccgggctgcggggacgaggtggaggaggaggacgagagcatcctggacaccgtcatcaagtacctgcccgggccgctgcaggacatgctcaagaagtagccgcgcgcgggacagcggccccgcggagcccccgcccctccccctacagatcctccgcggaggcccctgagggacgagcagagcgcagcccccacgccgatataagccatagccccaggcccgccctgcccgcgcccgccgcctccctcacccggcaaggggcgcgcgcccccaggacccccccagtccgccccgtgctcctctgcccgcgggtggctggagccccatcgcctgggacgcccctttctcttgctgtttaccgcccacccagcagcgcccgaggccagggccgccgaagggcagccccgcgaccacccctgtgcgcgcgttcgcggcggtgggcgcctgtcgggcccgcactcaggagcacagccatagcagacgggggggtgcgggcggggcgagggcggcggggcctgggtccccctcctgcacgcggactccggggttcggatcgctccgccgtgagtatttgcgtccgcacgcggccgctctccgccccccggcctggccccctcgcgcccctgtccatccgtctctgtccgcgtcctttcctctcctctctggaaggttttgcttcttacgaacgccacggccgtgttcacttctaaactaaaggaaacaaagcaataggtttgggggacgcccagcccccacccccgtcaccccgctcttcccaagtcctcgccccccgcccggcctcctagcctctccgcccacgcggctgctgcttctccctggggaggacccctgccctcggccattgaacactgcaccctccacaggagccgcagaggcccgaggcaccggacgctggagaccctgcgcccctgcccagcacctcctccgtgggcagctcctcgggtggggcctgcggggttccctgcgcgcagccggcgcgtgtgtggcctaatccacctggtggccctgcggggcggcatccgagcccctgtttctcctccattcatgtttaatttgcatcacaatttgttgaatctcaggtaaatgaggtctttgcatttaatgagttttatcttgacaggcgccgcctcgcccccgggccctttcgtccacatcaaaaatgcatcaagtctccacgtgtttcgggccagggcgtggcttggcattgaccttcatgaccttacatagctttagagaagccataacgttagactgcaatactaacgaccgacgcccctccgggcagagaccaccgcgcccctctgcgccccagcgacgcggcccgcggggacgtcgctgtccgtcctgctcgccctgtgccctctcactgacttctcccgggtcgtgtcttttaaaaactcctgttttcacaccttacaaagccagctctgagcagacagggcgtcctctcgtagaacctgcgcaccccgttcccagcgcatggcgccccgggccgcgagcttagcttagaccgtggtgtcctctgtccgtctgtcctgcgcctgcgcctcctcctgcatgtcggggcccctgcgtgtgttctctccggatggaatcacagccaataaacaccagtgatttc

SEQ ID NO: 30 - DNA, 2024 bp, Homo sapiens
tcgcagccccatgatggacgttctggaaccactcccgggcctcatgtttacaaagagaccgagaggcccatcgtccagggtcacagggatggcaggtggcagagaggacacaaatgagtctgcaaccctcaatgtctgaaactcaatagctggaagacggatacccccagcccctgcccctccccgaggtcccacctatccacctatgttaccgggggaggggagaagtcatagctggaactctgggggtttcccagaaccagccctgctgactgcgaacagcgtcccagcatggagaggctgagaacagtacgtaccctaagacctggaaaagattggggcacaaatccacgctcggcacagccatcacacacggccacacccagagagccacccatggcctgggaagcagggctgccacccgcacctccctgggctgcccagatgagggcgggtgaacagaagggcagcccagggccatgtgtcaggattcgggccacctgcccaggcagcccagagctccacccaccaccccccaccctcaactgcacagcagggtccctcagcagccccctgcgtcacacggaccaatgacctacacactgagccggggctcatgccaactgaaaattgggacccggcccagtctgccggtttagttgctgagatgatgtggggagcgggacagagcacgtggatgcagagaggcagagctgccagatgggcatgtccccaagacaacagcttccttgggatcagagcgcccgggacagcacgccagccaagggaagcgtgtcagctccaaaagcgggcctcgggcgttttgggcgactggctgccaggcttaggtcaggagctgggtacatgcacagacaagggacgaaggaacagcagccaggaaggggtccaaatccatacaggaatgtactttgtgagaaaggtgggatttcacagctgtaagcaaaagacaggtgctctcgacaggtggggctgagaagaaaactgagccaagatctaaagaaaaaattacatcagctccatcccaccatgttacataataacatgctccagctggatcaaagcttcaaccatggaaacaagcaagcagtcaaggagaagccagaagaaaagctctggaggccgggcacggtggctcatgcctggaatcccggcactttgggaggccgaggcggtcggatcacgagattaggagagcgagaccatcccggccaacatggtgaaacctcatctctaaaatacaaaagttagcccgggtgtggtggcgtgcacctgtagtcccagctacttgggaggctgaggcaggtgaattgcttgaacccgggaagcagaggttgcagtgagctgagattgcgccactgcactccagcctggtgacagcaagactctgtctcaaaaaaaaaaaaaaaaaaagcactggagaggccacaaaagaattctctcagcatggaaatggggaaggcatttctaagaatgaccccaaacccaaaagccatgaactaaaactgacacatttaattatacagagatcaaaaaatcctacacagcaaagtgaccataagcagagccaacatagaagcaactagagggaaacatgtgcaactcatatcataggcaaaagcctaaattgcctaatatgtaaagagtgctgccgggcacggtggctcccgcctgtaatcccagcactttgggaggccgaggcgggcggatcacgaggtcaggagatcgagaccatcctggctaacatggtgaggccccgtctctactaaaaatacaaagaatcagctgggcgtggtggcggttcgcctgtggtcccagctactcgggaggctgaggcgggagaatggtgtggacctcgtaggcggagcttgcagtgagcagagatggcgccactgcactccagcctgggcgacagagtgagactctgtctcaaaaaaaaaaaaaaaaaaaaaaaaagagtgcctacaaatcactaataaaaagacaaactatctactaaataatgt

SEQ ID NO: 31 - DNA, 1725 bp, Homo sapiens
ttttgtatcttgcagtttggctcgcactccacagatgtctagggtcgcccgcctcttcccctgcccctcttcctctccgcatggccaagtccagccagggttagcgctgaccccactggggagggaggagggctctgccagcgctcgggccctcccacacagccgtggaccagacccagcctggccgggcatgagcgtcgggcctgggcggcagcagccgagacccctctgtggcgggggctcagtgtcgtcatggctcccctggccacgggcctgtggtcattgcctgtgacagggatgacagggacaggcctccctgctctggcacggcctctggtgttggcaggatccagactgcggtgctgactgcacttcctgtcaggcagggtctccagggcacctctgggacccagcctggctgtccgtcccatagcccaggtgtgccctgtggcctagggctttcttggtcacagccaccagaccgtgggtctcatccccacagcagcaccagggcagggactgagccacccacacactgagcagagccccacctgttttcccagtgcaacgggaaacctcaccaaccctgaacactgaaatccctgatccttgtgctggagctgaatacgccccttgtctcctgggtccactgccaccaaggcccccaggccctcatggcaaagggatgcccagcataggcccagccgcacccctgcagggcacagagcctccactgccttccaggccgtcctcgaatgcgctgccccctccagcctgtgcaggcgtacacgggggtgcagcctggggggtacagtcaaggggagcccttctcccacaggagggcattggggtgtggggcctggggcactggttcaggtaccgccttatcccgggccaggaatgagctcagtgaccacttggatgctatggactccaacctggataacctgcagaccatgctgagcagccacggcttcagcgtggacaccagtgccctgctggacctgttcagcccctcggtgaccgtgcccgacatgagcctgcctgaccttgacagcagcctggccagtgtgcgtaggcgggcggggggtgagggggaacgaggcagagaacagcagcccggattcagggaagcagctggtgcactacacagcgcagccgctgttcctgctggaccccggctccgtggacaccgggagcaacgacctgccggtgctgtttgagctgggagagggctcctacttctccgaaggggacggcttcgccgaggaccccaccatctccctgctgacaggctcggagcctcccaaagccaaggaccccactgtctcctagaggccccggaggagctgggccagccgcccacccccacccccagtgcagggctggtcttggggaggcagggcagcctcgcggccttgggcactggtgggtcggccgccatagccccagtaggacaaacgggctcgggtctgggcagcacctctggtcaggagggtcaccctggcctgccagtctgccttcccccaaccccgtgtcctgtggtttggttggggcttcacagccacacctggactgaccctgcaggttgttcatagtcagaattgtattttggatttttacacaactgtcccgttccccgctccacagagatacacagatatatacacacagtggatggacggacaagacaggcagagatctataaacagacaggctctatgc

SEQ ID NO: 32 - DNA, 3083 bp, Homo sapiens
aaatccttcgtcatccgagctgtgatgatggagtggagcgtggcacgggcccattggagttctgtgggctccatcggcactcagcagggatttggacgtgcaggctggtgggccctgcaggaagcctgctccctgctctgctgcgtgggagggggcagctcgggggaagggggcttgcagagaaacagaagaacatgggctgtggggcaccttcagcagcctggggttccaatcccagctcctccatgtgggggccaagcaccccaggcagcctttcccagccttgcttagggccgggttgggagaatcccaccccgcagggctgtggtgagggttgagcggagggtgtgtggtgagggttgagcggagggtgtgtgatgcgtggtgagggttgagcggagggtgtgtgatgcgtggtgagggttgaacagagggtgtgtgatgtgcccagtggtacacgacaaattgccttctttgggttgacagactgggttttactcttcctgaatcatcacaatgatccgtgcaaggccaaggctgttgtcttctgtttcaagtgcgttttcctgtcctgtcctctgtcctgtggcagtggacagctgtggctcttgccagattgtgtctgctcctaggactgtgggagccggtggtggtagcggccttgagcttgacccatccctcctgcttccctgttcctgagcgagcaccttggagtatccttggagtgtccttggaggctctgctctcgggggcagcctgggccaagagagcgcctgatgctcaccccgtcctcacaggttcacgcctacatcatcagctccctcaagaaagagatgcccaatgtctttggtaaagagagcaaaaagaaagagctggtgaacaacctgggagagatctaccagaagattgagcgcgagcaccagatctcccctggggacttcccgagcctccgcaagatgcaggaactcctgcagacccaggacttcagcaagttccaggcgctgaagcccaagctgctggacacggtggatgacatgctggccaacgacatcgcgcggctgatggtgatggtgcggcaggaggagtccctgatgccttcccaggtggtcaagggcggcgcctttgacggcaccatgaacgggccgttcgggcacggctacggcgagggggccggcgagggcatcgacgacgtggagtgggtggtgggcaaggacaagcccacctacgacgagatcttctacacgctgtcccctgtcaacggcaagatcacgggcgccaacgccaagaaggagatggtgaagtccaagctccccaacaccgtgctagggaagatctggaagctggccgacgtggacaaggacgggctgctggacgacgaggagttcgcgctggccaaccacctcatcaaggtcaagctggagggccacgagctgcccgccgacccgcccccgcacctggtgccgccctccaagcgcagacatgagtgatggcgcccggccccgcacctgccatttgcacgcccggccgggaggcagagacggggggaggggaagcctcaccatttctcaaggtccataaagactgagcggatgtttcctcgcctctcgaaaaggaaaaccaccatctttcttttaaggctgttcctgggcctggcgggggaggcaggggtgagaggatggaattgtgtgcacaagaactgtggctattttaatatataatgttagaggctgcgttctttgtcgccgcctcccctgtgtgccagccctgtgtgcacggcctctgccccccggcctttgctgtggctggagctggacagtgcagtgactgcgaccgtgggggagccaggtcgcccttttggcagctgctaggctgaggctgcatggacaggaacaccaggcaccctccgtgtgcttctgagctgaggttgcttcacgggaccgtggcttccttcctcacctggctctgcctcccccgtgctctcgggcgaagtgggttcttgtgccttcccctcccgggcccaggctccccgtgcgcgggccctgccctttcctcccgcgccccaccggctccgacgcgcaaccccgctcagcagtcacagaagcagggcccagccaccttggtctttttttgggagttcaggggagtaggagaatgtcttccagaaaaatacataagctagtttctgttctgtaaagtgatacctttcatacttgaccaaagttcccaataacttcccaaccactgttcaaaagctgtgatttttgtctccccttcccaccctccagccaaggagcagccctgcccagggggcattaggtgtgggtacccggggagcaccccgttcctggaccccagtgttgcatttcctggctgaggaagggtggtcatcccagctcctgccctaccctctcacttaactggagctttgggacgcaccctccacagtgggaggtggtggtgggtggcggtggcggggcctcacgacagcttggtgctggtaagaggaagcccgtggttctggctaggctctcatgtccagacagcggggaccaggggaaaacccagccccttctgtaatcccccttcatttcctaccttccttcctcctctgtttagcaaaggagggcagctcacttggatgtccttacaacgcccctggccccaggttgagcaataagaaaccagaacctcgcggcccagtggcccgggccagttcaggccgcctccccctcctctgcctggggccattgagcccagcctccagggcccgggtgcgtttgcaggccagtggccactgtccgggctgtgatggcaccaaggcaggtggagcaccaggtaccacacagctgggcttcccaccaggctttcccgcgggggtctcagggagcttctccccagcgctgctcggagtctgcaggaactggccttgttctccttagcccgtcactccatacagtattaggtgaggatggatgcgggcgctgtccttgccgggaagtcactgttgaagttgcagtggcttgttcacacctgtgggaagagaagtgaagactttctccttgcattaaaaagtctgaactgtg

SEQ ID NO: 33 - DNA, 1831 bp, Homo sapiens
acccatcttctgttatgttccttcctgttcctgagacccagggtctcctctttcttagttcacacctttgttttggtggagctttgtgggtgttctggtgtggaagataaaattctgacatgtcccatatctgaaacacattgtctagccctcaacattagattgaagtttggctggaagaattctttttattagtacagtcacagacctttttttatcactattgttggtgagctttttcagtttgaaattcacatctctcagttctgggaaactgccttgaaatttttttttatttccttcccttctattgctctgctccctgtttctgggatgcctcttacttggctattggcatctgggatgggtcctttaatgttcttatcttttcactccaattttccattcctttgtctttctactctattttcctggaaattttctcacttgtatctttcagaccttctgttaagattttcatttctggtagctttttttttggtggggggagggggtctcactatttcacacagactagagcacagtggtgccatcatagcttactgtaaccttgaactcctgggctcaagtgatcctctcgcctcagcctcccaagtatctgggactgcaggcatgtgtcactgtacctgactcatttttaatttttttatttttttgtggaaacaggttctcactatgttgccagggctggtcttaaattcctggcttcaagtgatgctcccgcctcagcctcccagagtgctgggattacaggcatgagctgcttcatctggtctcttgtagcatatttttactttccaagagtgtttttattctctgaatgttcatctttttagctgcctcctgttgttctttcatttacaatgtctttccttatttctctgagaacagcagtaactttttaaaaaaaaacagtgtgttctctattctctcctagttgttggcttatatgcaagagaggggcaccacaaatctggctgacagctctgagcaggtagatgtggggcttactggctggaagggacataggggaaccccactccccaaggagacccttttcttagggtatgtgagcaagcagcttgagtatgagtggatgctgcaaacagatccatagggcaatgtggctaggccattttgggggcactcttcctccaagcatgtttcgttccatcgtctgaatcctgcaagaaggtaacttcagcctcctgccagcatccttgggaaagagattaacatctcagcatccaatgggactgtttacctaataaccctgactttctcagtacggtttctcacccttaacatagccttctgccaggatgggagaagaaatccagaagtaagtcatggcagtgcatactgttggctcagaattctgtgcagacagagcccacagcagcagccctgcccagcatctgcttctgaaacagcctctccagcctggctggtgccctgctcattcacttgcatggccagaagtaccaggtacctccaactcctgagtttttagaatcttcttagccaggcgcagccgctcatgcctgtaatcccggcactttgggaggcggaggcgggtgggttgtttgagtccaggagttcgagaccatcctgggcaacatggcagaaccctgtctctactaaaaaataatacagaaaactagctgggcatggtggcacgtacttgtggtcccagctgcttgggaggctgaggtgggagaatcacccaagccagggaagtcaaggctgcagtgagctgagatggtgccagtgcacaccagtctgggcaatgggggtgagacccagtctc

SEQ ID NO: 34 - DNA, 2742 bp, Homo sapiens
aaagaatttgcagatgacggcgtcaagtacctggaactaaggagcacacccagaagagaaaatgctaccggaatgactaaagagacttatgtggaatctatacttgaaggtataaaacagtccaaacaagaaaacttggacactgatgttaggtatttgatagcagttgacagaagaggtggccctttagtagccaaggagactgtaaaacttgccgaggagttcttcctttctactgagggtacagttcttggccttgacctcagtggagaccctactgtaggacaagcaaaagacttcttggaacctcttttagaagctaagaaagcaggtctgaagttagcattgcatctttcagagattccaaaccaaaaaaaagaaacacaaatactcctggatctgcttcctgacagaatcgggcatggaacatttctcaactccggtgagggaggatccctggatctggtggactttgtgaggcaacatcggataccactggaactctgtttgacctcaaacgtcaaaagtcagacagttccatcttatgaccagcaccatttcggattctggtacagcattgcccatccttctgtgatctgtactgatgataagggtgtttttgcaacacacctttctcaagagtaccagctggcagctgaaacatttaatttgacccagtctcaggtgtgggatctgtcttatgaatccatcaactacatctttgcttctgacagcaccagatctgaactgaggaagaaatggaatcacctgaagcccagagtgttacatatttaagctataatgaggtgaactacttctgagtatgtgtttcaatcaagttcctgccatatcccacttagtaaaacagtccaccactcctttgaagcatagcaaccaagttccttgggctctatcaccagcaccttacacatggcaggtactcagtaaacacgtgtcttcaactgactcacaagctctcaggtgcttactgggtgggacttgactgttgttgctaattaaatccccattccaccagtgattattgtgactcagcagtccttccctattagtgatcataaaatttcagggaaatcgaagtttctcatcaggaaatgttttggaattactagtataaagttaggaaagtggggaaattaggttactgccgagacctttaagccttctaaacagctttatattttattgtgcatactttaatcagactcccttcactcgctttaagtttttaaaagtattccccagccggatgtgatggctcatgcctgtaatcccagcactttgggaagccaaagtgggcagattgcttgatcctaggagttcagtagcagcctaggcaacatggagaaaccctgtctctacaaaaacaaaaaaacaaaaaaccggaaattagccaggcacggtggtacacacctgtagtctcagccaccagggaggctaaggtgggaggagacctgatcccagggatgtttgaggctgcagtgagctgtgatgctacagcactccagcctgggcaacagagtgaaaccctgtttcaagaaaaagaaaagtattctccaagatcccaagaccattgacaccaggccacattgtataccagggatttatgtgaatgcctagggatgaccgtagtgacagataaagctaggtgctgagatctggttttgccctctttatgattgtcccatcggtactagaaagtgaagtcattgctccaattttggaagaggagagaataactggctgaggggtgagaaagacagaaatagctgcagctctcttttttttttttttcaacaaaggctctcactctgttccccaggctggagtgcagtgacatgatcacagatcactgcagctttcagttttaaaacagcttctattacattttctttgtggaagctgtatttctaccttagtactcactttctgcttggtctgaaagatacctctagtagtggcaacattgtgttaagtagagttcattgggtctcttgtaaccctacccctacataatggaccactggtgcaggcttacataaacacacatactgtggcgacttcagctgaagacaagggacaaactaagatagttctgaaaggtaaaaaaacaaacaaacaaaaaacaaaaacaaaattattagataccaagttatgcttgaattgctttgctctttagaacgtgtgtttttccctggtatcagaagaagttaaggctgatgacacccctaatttaaattactaaggatttctgataggttttctgtctttctgtgatatcgtaaagtatttatttggtctttgaccctgtttcctggcatactgctcctaaaatccttagagtctccagagtgatggctttttgtatctaatgagttgactgctggctggcagcccctaggggctggtcactggaaagacaaatgcatgattagagttgggactttcagtcctcccccaaactcttgggagaagggctgaaggttaagttgatcaccagtgaccagtggtaatcataccttcataatgaagcctccataaaactccagaagaacagattttggagcatttccaggtaactgaacatatggaggtccctagagggtgctgtacctgaagagggtagagggtataggagctccctgtcccttcccacatgccttgctctatccatttcttcatctctatcctttgtactgtcctttataataaaccagtgaacct

SEQ ID NO: 35 - DNA, 1463 bp, Homo sapiens
acttttgggtcgggccctccgggaagatggcggccgtgcaggcggccgaggtgaaagtggatggcagcgagccgaaactgagcaagaatgagctgaagagacgcctgaaagctgagaagaaagtagcagagaaggaggccaaacagaaagagctcagtgagaaacagctaagccaagccactgctgctgccaccaaccacaccactgataatggtgtgggtcctgaggaagagagcgtggacccaaatcaatactacaaaatccgcagtcaagcaattcatcttcactttggcctcaaagacaaggaaacaaggtatcgccagagatacttggacttgatcctgaatgactttgtgaggcagaaatttatcatccgctctaagatcatcacatatataagaagtttcttagatgagctgggattcctagagattgaaactcccatgatgaacatcatcccagagggagccgtggccaagcctttcatcacttatcacaacgagctggacatgaacttatatatgagaattgctccagaactctatcataagatgcttgtggttggtggcatcgaccgggtttatgaaattggacgccagttccggaatgaggggattgatttgacgcacaatcctgagttcaccacctgtgagttctacatggcctatgcagactatcacgatctcatggaaatcacggagaagatggtttcagggatggtgaagctgccagaaacgaacctctttgaaactgaagaaactcgcaaaattcttgatgatatctgtgtggcaaaagctgttgaatgccctccacctcggaccacagccaggctccttgacaagcttgttggggagttcctggaagtgacttgcatcaatcctacattcatctgtgatcacccacagataatgagccctttggctaaatggcaccgctctaaagagggtctgactgagcgctttgagctgtttgtcatgaagaaagagatatgcaatgcgtatactgagctgaatgatcccatgcggcagcggcagctttttgaagaacaggccaaggccaaggctgcaggtgatgatgaggccatgttcatagatgaaaacttctgtactgccctggaatatgggctgccccccacagctggctggggcatgggcattgatcgagtcgccatgtttctcacggactccaacaacatcaaggaagtacttctgtttcctgccatgaaacccgaagacaagaaggagaatgtagcaaccactgatacactggaaagcacaacagttggcacttctgtctagaaaataataattgcaagttgtataactcaggcgtctttgcatttctgcgaaagatcaaggtctgcaagggaattcttgtgtgctgctttccatttgacaccgcagttctgttcagccatcagaagagagacaaggaattaaaaatttctttttaatcctgttacc

SEQ ID NO: 36 - DNA, 1969 bp, Homo sapiens
ttgacctcttcctctccagaagttatcaactcagtctttggaggatcttttccacgggcacatagctcctcattcagtaatggaaatcagtggggaaataggcttcaagttctaaaacttcattttccactcagctttgctgtaacactccacgaataacataggtccatgtgagtgcacgggcaagaccagcctgggaaggctttatgggggaaaatagctatcagcaaattttcaaaggtttttttcccctttcttgatttatcttattatgagactcatataagttcatcatataaaattcaacatatagaaatattatgcagaaagtggaagtcccccataatcccaccccccagagataactaccataacaattttatgtatactacagtttttctaaattttatttttgctatgcatttactaactacccatttactacaaaaatgggatcatatggttcatagtgtttttgcagtgcatttttcacgtatcaatatattgtggccatctttccatgtcagcacacatagatctacctcattcttgttaatggctgtatagtattccattgtatggaggtgccctaatttatttaaccagttccccattggtggacatttgggttgttactagaagcttatcgttctatatcctgttccttttctgcctttcctccagcactgactcatatattgaagtccttgatggttcccgtgtccaccctgagacttatgagtgggctaggaagatggcagtggatgccctggaatacgatgaatcagccgaggatgccaatcctgcaggagcccttgaagaaatcttggaaaacccagagcgactgaaagacctggaccttgatgcctttgcagaagagctggagaggcagggctatggtgacaaacacatcacactctatgacatccgggcagagctgagctgtcgatataaggacctccggacagcctaccgctctcccaacacagaggagatcttcaatatgttaaccaaagaaacaccagagaccttctacattggaaagctcatcatctgcaatgtcactggcattgcccacaggcgtccccagggtgagagctatgaccaggcgatccgcaatgatgagacagggctgtggcagtgccccttctgtcagcaggacaatttccctgaactaagcgaggtgtgtgctgcagcattatcctgctcagtggatttccttggttgaatgatctcggtgcctagaagggaatcagaaatgagggtgttctagatcattctctcaccaaacaagtacacaaagaaggaagacggacgggaaacacacaggtttagcatgaagtcccttctgagaaggctgacatagctgggcacggtggctcacgcctataatcctagcactttgggggccaaggtgggcggttcatctgagatcaggggttcgagaccagcctggccaagatggtgaacccccgtctctactaaaaatacaaaaattagccagttgtggtggcatacgcctgtaatcctagctactcgagaggctgaggcaggagaataacttgaaccgaggaggcggagtttgcagtgagccgagatcataccactgcactgcagcctgggtgacagaatgagacttcatctcagaaaaggaaaaaaaaaggctgacttagaaacttcttatggtcggccgggcgcagtagctcacgcctgtaatcccagcactttgggaggccgaggcgggcggatcatgaggtcaggagatcgagaccatcctggctaacacggtgaaaccccgtctctactaaaaatacaaaaaattagccaggcacggtggcggccacctgtagtcccagccactcaggaggctgagacaggagaatggcgtgaacccaggagatggagcttgcagtgagccaagatagcagcattgcactccagcctgggcgaaagagcgagactccgtctc

SEQ ID NO: 37 - DNA, 2735 bp, Homo sapiens
ccccctggcgcaacactcagctggctgcgaccgcaaccccgagcctggacactgcgccaggaatcctaaaaccaaaatattagaacgaaaacagaaacatggctcactatattacatttctctgcatggttttggtgctgcttcttcagaattctgtgttagctgaagatggggaagtaagatcaagttgtcgtactgctccgacagatttagttttcatcttagatggctcttatagtgttggcccagaaaactttgaaatagtgaaaaagtggcttgtcaatatcacaaaaaactttgacatagggccgaagtttattcaagttggagtggttcaatatagtgactaccctgtgctggagattcctctcggaagctatgattcaggagaacatttgacggcagcagtggaatccatactctacttaggaggaaacacaaagacagggaaggccatccagtttgcgctcgattacctttttgccaagtcctcacgatttctgactaagatagcagtggtacttacggatggcaagtcccaagatgacgtcaaggatgcagctcaagcagcaagagatagtaagataacattatttgctattggtgttggttcagaaacagaagatgccgaacttagagctattgccaacaagccttcgtctacttatgtgttttatgtggaaggctatattgcaatatccaaaataagggaagtgatgaagcagaaactttgtgaagaatctgtctgtccaacacgaattccagtggcagctcgtgatgaaaggggatttgatattcttttaggtttagatgtaaataaaaaggttaagaaaagaatacagctttcaccaaaaaaagataaaaggatatgaagtaacatcaaaagttgatttatcagaactcacaagcaatgttttcccagaaggtcttcctccatcatatgtatttgtgtctactcaaagatttaaagtcaagaaaatttgggatttatggagaatattaactattgatggaaggccacaaatagcagttaccttaaatggtgtggacaaaatcttattatttacaacaaccagcgtaattaatggctcacaagtggttacctttgctaaccctcaagttaagacgttgtttgatgaaggctggcaccaaattcgtctcttagtaacagaacaagatgtgactttgtatattgatgaccaacaaattgaaaacaagcccttacatccagttttagggatcttgatcaatgggcaaacccaaattggaaaatattctggaaaagaagaaactgttcagtttgatgtccaaaagttgcgaatctactgtgacccagaacagaacaaccgggagacagcatgtgagattcctggatttaatggagagtgccttaatggtcccagtgatgtaggttcaactccagctccctgtatttgtcctccgggaaaaccaggacttcaaggccccaaaggtgaccctggactgcctgggaaccctggctaccctggacaacctggtcaagatgggatatcagggaattgcagggacaccaggtgttccaggatctccaggaatacaaggagctcgaggactaccaggttacaaaggagaaccagggcgagatggtgacaagggtgatcgtggacttcctggttttcctgggcttcatggcatgccaggatcaaagggtgaaatgggtgccaaaggagacaaaggatcacctggattttatggcaaaaagggtgcaaaaggtgaaaaggggaatgctggcttccctggcctccctggacctgctggagaaccaggaagacatggaaaggatggattaatgggtagtcccggtttcaaggaatgttccctgtgcatatgagaagggagaagcaggatcccctggtgctccggggcaggatggaacacggggagagcctggaatcccaggatttcctggaaaccgaggattaatgggccaaaagggagaaattgggcctccaggacagcaaggaaaaaaaaggagccccagggatgcctggtttaatgggaagcaatggctcaccaggccagcctggaacaccgggatctaagggaagcaaaggtgaacctggaattcaagggatgcctggggcttctgggctcaagggagaaccaggagcaacgggttccccaggagaaccaggatacatgggtttacccgggattcaaggaaaaaagggggacaaaggaaatcaaggtgaaaaaggtattcagggtcaaaagggagaaaatggaagacagggaattccagggcaacagggaattcaaggccatcatggtgcaaaaggagagagaggtgaaaagggagaacctggtgtccgaggtgccattggatcaaaaggagaatctggggtggatggcttgatggggcccgcaggtcctaaggggcaacctggggatccaggtcctcagggacccccaggtttggatgggaagcccggaagagagttttcagaacaatttattcgacaagtttgcacagatgtaataagagcccagctaccagtcttacttcagagtggaagaattagaaattgtgatcattgcctgtcccaacatggctccccgggtattcctgggccacctggtccgataggcccagagggtcccagaggattacctggtttgccaggaagagatggtgttcctggattagtgggtgtccctggacgtccaggtgtcagaggattaaaaggcctaccagg

SEQ ID NO: 38 - DNA, 2493 bp, Homo sapiens
cttggggtacatggaactgattccagcagtgggaccagattcacctgggccatcgcatgcctgattcatgggcagcctcactgagagcagtggcagatagagtcacctgctccattgcagtggctttttcctctttgctcttttttttcaatattcctggttgaatttgtgtagtggaatgatcatatgatgcaactaccgtaatagaatttatttgacaagctagtgcaattagttattaatgaatgtaaacttcacaggattagaagggctatgtgtttcactatttttgtatctttgggttctacaaaatatactagagtgtcacataattcgagaagggatttcaggtacgtggatgttaactactaatagtttgaaaatgatactatctgggggtttccttttttttccacttctctccaacatattaagaaaactattcggatattattttgccttatgcagtagattgctagtggttgtgaattgtgttttaataagaacctgtttatgacttcaggattttttattggtggaccttctaatatgattagttctgctatttctgcggacttgggtcgccaggagctcatccaaaggagcagtgaagctttggccactgtcacaggaattgtggatggttcggggagcattggagctgcagtgggccagtatttagtgtctctgatccgggacaagctaggatggatgtgggttttctactttttcattctcatgacaagttgtacaattgtgtttatctcgccattaatagtgagggaaatattctctctcgtgctaaggagacaggctcacatattgagggagtgaccggtgcccgcgagacagaaagaacaatgtcagccacatcaggaccgctggggcttcgagtctgccctaatttgggtttgtctaggagctccagcctgatcttggattgtcaggcgtctctcaacactgccagccacctgagatgctgaccagcagtgaaggctgcactagttttctacactacaggaattactgttgatgatttttgctgttgtttcatgaatgtgccgagtgacttctgactctgccagcatctttgacctctgactctgcccgcgtctttgtttggcctattgaggtttagcgttttaaccttaactgttgttttggacttgaactttctctagccttgaaaatggagtgaacaggaggcaaagccacgcgtggtttgtgttggtggtatgttccacaaatggaagagatcattgcattttgctttggtaatgagtttacagagagtgggtcatctttgaagcatcaaatcctgatcaaatgctcaagctggaccgagctgcaagcctgccttggacaaagaatccctctgttcactgtggtgggaaagatcacactacatgcctgttgattggctcagtcactctgtgtctgatctaaacgtcattcagccctagaagcatgaattgcttcaaattattgtcaacttgttctcttccattttcattcaaattaactttgactcctggaagtattgagtcttcctttcaaggaccataaggtacatcagttatcttgaacattctgacgtgtaaaggaccataaggtacatcatttatcttgaacattccgacgtgtaactcacagccgaagcactccatcccagatttgttgtctgggaactttaggatcctctaggaagctaatctgcttagtctatttttagaggattgatctctggcacaaccagcttcctggagttacctcagcagaagactagaattagagaaaagggaaagaccttttcttctagtaagtgtcaagtacagatgctctttgacttatgatggggttatgtcccagtaaacccattggaagtcaaatgcatttaatacccctgactggacaccacagcttagcctcgtccaccctaaatgtactcagaacacttagaattgcccacagttgggcagaatcatctaacacaaactctattttataatcgagtgttgaatatatcatgtaatttattgaatattgtacattatgttgaaattgcaaccatttcacaccattgtaaagtccaaaaatcagaagctgaggactgtctgtacatgacattgaatcacatgaatggattactagggcctgaggggtgtccgttctttagaaaaatgtagagtatatatatcttcagggctgtgaattccatactagttatcaatattttaagatcattctgtatatacatattttaaattatgcaagcaaactaggaggagaatgtgcaattttgagggatacctaatttgcattcggttaggggatatttttcaacctcttgctttatactctgatatggggtgtgtttatgaacttgttaatgttatttaatcatgcagatttccagtcagtgtattgctcatttactgacaaaaagggaaaatacgaaacacagaaagggaaaataaactgacttttataatg

SEQ ID NO: 39 - DNA, 2015 bp, Homo sapiens
cgagacaaaacaatccatatgtttagggaaccagaaaagtcccctggtctgtcccttctttggggagcagggcctcgacagctccagctcccttgacctaccttcctccccgcaccccgcccccaccttgtgcccctgtgtccagccccccagggggcctgtgtctgtgtctgtgcctgtgtctgtgatggggagccgcctcgcacccctgttgtctgcttgtctctttgtgtctgttatcctgggcaggatggtcattctcaaaaaccctggggtcctgggccagagacaggcagggcccagtccaggggccccaggcctccccagtcccagtgtgcgagccccacttggacacaagtgttcagagaggtccccctctgccacttgacagggaccttcaaacctcgacagtgatgcaaggacacagagagtaccagataggtagcagagaccaaggcgcagggtgcttcagatgagcaagagaacccagtcgaaccagataccccaggtgggccggagggaccccagaccttcagagggctgccctggtgttctccacagtgcagtccctctgtattcccagggtgggatcggggctttcagccccaccctgatgcctgccctccaggatggctggtttagtctgggtccatgtcccagacccctctattctgctccaggacagcaggacttcaggtcttcctgggggtggatataggagaaaatttctgcctggcacacacctggctccaaccactgccaagtgatcactcttaggcccaggggaacacaatgactatcattactgatgcagacctggctgtggagagcagctaatgtgtggcccagagagcctgtctgtgtggagcacgtagtgcacagaatacgtgagagttgctctggcaggggcaggatcctcacaggatcgcctgggaggtgaggtgtgtgtgacccactggatgggagggcaatgagtgtgcacatacaaatggggcagtgtgcatgcaacacacttaggggaggagtggccccagaattcagcacgcacacaacacacaagggagagaacccccagatgagaaaataggaaggagcaatcatttgtagatgggtgaaaaaagaatgaggttcaagggagcgtgcaccaggtgaggtgagcgtgtgtgctctcagggaagggcccaggctcccatgcctgggaggagctgccagagagaagcaaaaaggcggctgtggatcgccctgggctgggcaccagtgacaggtcaggatctccaaacatggacgtcctcccctccaaatccagaagctcccagaaggtgtccttaactgcaaagctgtgcagggtactcctccagatggaatcaggaagtcgagacaccatcccaggtgtgtgtaagagagagagagagaacatggaggatacagaagtattgcagcccagatcccctatcagggggacagctggtgggcaaagcagccaccccacagccttgtggctagagtacagtggggtggaccctccagccccaatagccctagtacccagctggcagggttgcccacccctgctgtccacctgctccatcctctagggttccacaggcccctgaccgcacagggaggctggggccagcctggtctcccaggcctgaggacatgcctcccaccaaatgtcccctgctccagtcccactcctgtcactccacgctctgcactggggagaaaacgggaggtgctcgtgctggccctgggtgggagcggggagtcctggtgagaccccggtgagatggaccatcctgcccgcgtgggggatcccctttcccacatccgtgctgtgtcattgttgctctgcttcctttcaatgtgtcagtgcctggggggaggggaggagcaccccctcagcccccctgaacctgaccaaaagccatggctgttgctcccccctttgtatgatgcaaatgctgaaatgtacaaaatcaaccatgacaacaaagaaaaagaccttgtacagc

SEQ ID NO: 40 - DNA, 1404 bp, Homo sapiens
ctgctcagcttggtctgtggtggtggtggtggtggtggtgtgggtttggggtgcggccgggtagggggttcgcctgcggccgcgtctgctcggggcctgaggcctcgaagaccccagcccaagcccccaagttgatgccggcccaggatggatcagacctgtgaactacccagaagaaattgtctgctgcccttttccaatccagtgaatttagatgcccctgaagacaaggacagccctttcggtaatggtcaatccaatttttctgagccacttaatgggtgtactatgcagttatcgactgtcagtggaacatcccaaaatgcttatggacaagattctccatcttgttacattccactgcggagactacaggatttggcctccatgatcaatgtagagtatttaaatgggtctgctgatggatcagaatcctttcaagaccctgaaaaaagtgattcaagagctcagacgccaattgtttgcacttccttgagtcctggtggtcctacagcacttgctatgaaacaggaaccctcttgtaataactcccctgaactccaggtaaaagtaacaaagactatcaagaatggccttctgcactttgagaattttacttgtgtggacgatgcagatgtagattctgaaatggacccagaacagccagtcacagaggatgagagtatagaggagatctttgaggaaactcagaccaatgccacctgcaattatgagactaaatcagagaatggtgtaaaagtggccatgggaagtgaacaagacagcacaccagagagtagacacggtgcagtcaaatcgccattcttgccattagctcctcagactgaaacacagaaaaataagcaaagaaatgaagtggacggcagcaatgaaaaagcagcccttctcccagcccccttttcactaggagacacaaacattacaatagaagagcaattaaactcaataaatttatcttttcaggatgatccagattccagtaccagtacattaggaaacatgctagaattacctggaacttcatcatcatctacttcacaggaattgccattttgtcaacctaagaaaaagtctacgccactgaagtatgaagttggagatctcatctgggcaaaattcaagagacgcccatggtggccctgcaggatttgttctgatccgttgattaacacacattcaaaaatgaaagtttccaaccggaggccctatcggcagtactacgtggaggcttttggagatccttctgagagagcctgggtggctggaaaagcaatcgtcatgtttgaaggcagacatcaattcgaagagctacctgtccttaggagagaggaaagaaagaaagaaagaaaaagaaagaggaaagagaaagaaagaaagaaagag

SEQ ID NO: 41 - DNA, 2052 bp, Homo sapiens
tttcatagataagaagactgaggttcagagagaagaggtcacttgcacaggtctaccctgctcacaaaagcagagggaacagcatgtgcaaaggcccagggtagggaggcagcctagagtttccaaagcccagatcagagtttgactctctctggattaaaccatttgtggctccctagtgccatctggacaaagtcctaactccttagtttagcatccatctgtccatccatcccctgagcccctctgtgcccagccctgtgctgggtaatgttggggacacaacagtgaccatgacagcctcagccctgccctcatggggcacaaagtctagtgaaggggacagacccatccccagatggtgatgccccagaacgggcagggctgggatggtgaagccaaggaactggaggagctcacagggggcgggtgttggacctgggatggggggaggtgtttagagagggcttcctggaggagggggcatctgacccagactagaggattcaaggagggctgcctggaggagaggactttggaggtgagaccagcagaatgggaggagtgaagcaggagaggagcatctgcagagggaatagcacgtgccaaggccaggagagcttggaaatctcgtggctgtgagacagccccagccccctacacacaaggaggaagttctctttggactgggttgaggcaggcggccggacaggtggctaatgaattcagggccagcagaaaagccctggggatgagagtggaggcctgcacagggcttatgcatggaggcgggtgctggaggccgagcctgggagagagatgggcaggcgtatccaggccaggtagggcagtgggcgactcagctctttcatggccaagtgtgggtagggatggtctggggtgagtgtcaggggacctttggggtcagtagtgatggaggggtcttctcatcccactgcctggctgcccagtgggctcttttctctgctcctttctgtctccttttctgtctctccactcctgatcatggctcactgtagcctcgacctccccaggttaagcgatcctctggcctcagcctcccaagtggctgagactacaggcgtgcgccaccatacctggctaatttttatttttatttttgtagagacgggtctcgctttgttccccaggctggtctcgaactcctgggctcaagcgatccccctgcctctgcctcccaaagtgttggggttacaggcatgagtcaccgcgcccagcctcctgtctctctttctctctctccatttcgtctatttcttcatgacttcttctctctcttcccatgtcgttctctctgactccctccaggtctgtctctgtcctactctgcctgtctctctccttgttctctgtctctgtctgtaggtctctccctccctcacctccactctgattctctgtctccctctttctcgtcactgcgtctcttctctctgtgaccctcccacatccctgtgccattccccgccagccactctctctgtgtccccctcacattggggctgttgaggcctgcacagatgggctggggtggggccaggccccctgcccgctcctgacttggcctctcctcccctctccacagacccagcctccggctgtgacccccagcctcacacctgcctctggttcccgcctggtcctccagcttcaggaccccacctccaaaggcccctctgctcaatgcctacctccctagggccctgctgggacatgggggcctgagtgcccatccaagggctctcaaggacaccggcaaggcctccaggccctgagccccacttctgccttcacctctgcctgggacccgagctgggctcctgggccttggtccccagaagatggcggctagggcctcgccgccaggacagagaagggacggggtggctgggcagtcagggaaggagggtcgcccggatccgacattttggagagattccttcactctcctgtcccccctacctcccttctctaatttcttcttttttttaatgataaagtcttaaaaac

SEQ ID NO: 42 - DNA, 3317 bp, Homo sapiens
atttattccgcatctttctatcactgttttataaaatggtgccagtgtcccgcgaaatggcaggtgccaacaccttccagactgttcagtgtactagctgtgctcctgtagggtgggaatccagcgaccaggtggtgccggagacccgggctcaggagccgctgattgcgcagaagcgcaggttgtgcgcaaacctctctgtccgagcctcaacagggctcgggaattggggctttgtttgttctaaccagccccaaagcgcctgtttttcctggatgcggcgggagaagcaactacaaaggcaacagttctccagctgcgcgtcttcctcctcagctagacgctaggtagccggtcccttaactcagagcgctgggaggcagccatttgtttaaagcgcccagaaaccttcttcccccatttccgcagcacttgcagctccggcaggaatctaggcttccgggttctcggggtcctttcctctcctacacgtcagcgaattcagctggccgtgagctccccgattggggctcggtccggccaatattgtcactctaacgtgcactcgcgccttccctcggctctacagggcatcgcagccaccgatcccagcccctccccggcctatgccagccgcctggtggccctccgggctgcggagccaggcctggcctgacagcagcagctgttttcttcccgaagccgcagcgctcaagggcgtggttgcggtagacacctcggatcccatttggcctgtgcggaccctaccgcgccaacccctcgtcttaggaccgagaggcccgacagccaggtgggggtggtctgggcagaccggtcgacatcgcaagtcagtgcggactgggagggccagctgcccacagcacggtctccaggaagcctctggagcagcgtaatgaaatattattactggcgagcgtatctggagggatcccggaaggtttaggcaagatttgaagaatgctgctaaatgtttgccctcagggggtagaaggaaagagggagggggctccattcctgtaaaaatctcttctgaagtgaatcattgctcagaatacctctccctgcagcacgaatccactttatgcacacacaatgtgcatcggctgcgcatccttaaattatttcatcgctttggcgtttgcgcaaaacctactttaggaaacaatttgggccaggatgggggtgggtgggggggatgaacggctgggcggggtagcggcagagaagttagtctgaaacagcaactttaaatcgagcagatgtgagcttccccgttaactatattgtgagctcctccgttaatgtatttccgagcagaggtgcttctggttccaagtggagaaaatttggaggaaacaacccgagtggatcaggattttcgaggatggaaactcgactaagatggagtcactgtcgctcctcctccataccctccccatgagcccagaggaggaaggcgggagggatggaggcgttcaagagagggcaccgggggcgctctctgcacgagggaaaggggtgctcgacctgaggcgccgtggaaagggatttctgaaaatattttgtagttcttttccagaaaatgagagacgaatgggggagggtggcaagcacctgacgggaacacgacccacaagcactaatgtctctgcgttgcctccgccaggcgagaagcccttcagatgcgagttcgagggctgcgagcggcgcttcgccaacagcagcgaccgtaagaagcattcgcacgtgcacactagcgacaagccatacacgtgcaaggtgcggggctgcgacaagtgctacacgcaccccagctcgctgcgtaagcacatgaaggtgcacgggcgctcgccgccgcccagctctggctacgattcggctacaccgtctgccctcgtgtcgccctcgtcggactgcggccacaagtcccaggtggcctcctcggcggcggtggcggcgcgtaccgccgacttgagcgaatgatgtccaccgcgttgctcgcaaggtaatctcgctccgcgcagctgagcgccccgcatctcgcgcctgctacatcaaagggcccgcgcacaaagcagtgtttcttcgccacggtgcatcttcatggtaagttaggatttctatggcaatgtgcaagtcgcactgaaatcctgaaaggccaagcctggagcccgtccaggcttttcattaaggacataatatttacgtctaacagaccttttttcttgtgtatacaagtatatatttttgtttgacgcggactaaatcattttcatttaatttccggtaaacaaaacccacgcgaatgggcacttgtacccgatcataataaaaatggataataatgtgaaggaagaaaagagccgcttgaatcgccgctcagccccctttgtttctgctttctgcggtgatcagagggcgcgtttgggtttgatggcgagtttctaaaggcgaggaaatggtttgtaagaggggaaagaaaaggagaaaggtctaatcaagctcgggttgttcaaagagtcgggttttggggttgaaagtgtgagtttgacggtgcatcagcatgccgcgttaggctcgccatggaaatacgcgcggggagcggccgcttcaaaggcggcacacttcactacagacactctattaagatacatttgcgctgacctttgctttcacgccatttaatactgtcactgcgctctccagtatatacttcctttctagaacccggcttgcccacgtttaggggttcactctgcaccctgatgtgggaggctttggcgcaggggacactttcaggaaagggaggagcacaaggactctgtgcatcttgactgcaccccaaagaggctccaggatcaggagtgaaagattttaaagcagcctccgaagcttaacaaatgagcattccaagctcagttttgtgcaaatcgcctttctgactcttgagtaggatggaggcttaaatttaatggcgacttggggggaagggagccaccctgggggagtctgaggagttcagactgtgcccttgggaatttccactctggctttccgtgccactcttcttcctttccatcccaaaagtctcttgcggcccctgaaacttgtttctttctaaggcagggtgtgtggtacccttaggcctggactagtcctagatgcaaactcaagagcccaaggccaaggggatgtggggaagatggcaggaaagttagaagtccatgttcccttaattgtcttgttgtttattttatccaagtaccccagtgaataggggaaaaataaacacagtg

SEQ ID NO: 43 - DNA, 1749 bp, Homo sapiens
gaaagggggagtgggggagggcagagcctgtggttggtatttcagctaccggcaaagccctcctcaaatcaaaccctccagggaaggcgggtattagcagggtggctgaggggcacctgcaatgcggagattaatcccctttttgttttctttcgggtctatctcagcactgctgagtggaagaatttatgttggcctccttcctagaaggaagctgcaggctcagaaaagaggatgtgtcatcagatgtcacctctcagggtgcctctgttgctatctgtctgtcgctctgcccctccctaggtctctgcccctccctgccaatcagttctaccttcctttcactcctcagagttttatttctgtggctcgaattctgatttcgtaccagaggaagacaacaacagctctattaccaggtcccctgctcctctccaatgtgccccagacaggtattcggcgaccagaggagagctgagctgggctttgatcacactctgcctctgcatccgcggagcttgctgggccatgcagatgtcttctgcaagtgagctaaggccatggaaaagatccctcgggggccatttgagatgtagctcacagtggccttcaacatttttatttaagctgtggagtcattttctggaaaataaaatatcattgacaacctcactatgtgaaatggatagcgtgctcttattgtacaggggtgagaagaggatagaggaggcctgaagttagcccactgagccctccacttcccaggaccctgaggccactgagcacaggcccttgtgcagccctgctcccggacccaccgtgactgtgatgtcctggaggaataagtgccctccttccattcatacaaaggttcccaactggctaccaaaggctatggccagtccctggaaggcatgctgtttccaccaggatcctgaaatcccaggttctcaaatagggtcctacattttcaccaaggagctgcacactttcccagtgtatatgtgactattcgtcgccagcatgtgcacgggaccattttggtgtgtgattttttcatatactttccagggtgtttatgactagggtgcaattttagaaatgagagctttggtagcaaggtcctgaccatcccagagaaggattttggcaaaaaatagtagttgctagttatttactcttcctctttttgctagatcaggtggcagaaaagatgagttattgtcttactatcttatcttccccagtatttcatttcccaatactgaagacagtggaggcattttggacctaagaaccagtgtttcagaagatggcatttaccctacaatggccgtgcccaaggtaaactctgggctttgggctgcatggccccaatccagagaacagagggactattcctggctccttcctgagctgctctaacatcctgcccgactgagcccagttatgcttcatttacaagaagaggccgcgttagctcctggctcatgtggagttaaatagagatgagatgtaacactttttttctaacagcacaaaactccttcctgaagagtcaccttgaagagagatggtttcttgtgcagaatcgcagtctgggcaattaagtcagagaactctgagtttatatgctgtgcgttttcattgactgactctgtggctttttggagaattacatttcctctctgatattgttaattgatgaagtctcacaacttcactagggaataaacttatgctgacaag

SEQ ID NO: 44 - DNA, 2268 bp, Homo sapiens
cttaatgcctttttcagtttgattgtctacatggagatcagggtgataagtttcaataaacatatagacgcccccccacccacccccattagctagaaaagaccaggactgggttgctttaaatgaaccaagcttgaccaacaaacaagacagccatttgttcactcagatctagccgaggtaactcacaagtgcaccttgagatcctccatgtgtctgtcaacagcgataggcaggatctgcgcccagctcatgctgcattctaagaactctcatttcatttgcatataaaattcattacaggaagtaattaactgaaggaacagcatcatcaaaggctcaaggataatggaaaccgtcatcatgattacctactgggacctcatcagccacagtgagatgttctctgacagttacatgagccaggaaattgcagacgggctgcgcctggaggtggaagggaagatagtcagtaggacagaaggtaacatttttgactcgctcattggtggaaatgcctctgctgaaggccctgagggcaaaggtaccgaaagcacagtaatcactggtgtcgatagtgtcatgaatcatcacctgcaagaaacaagcttcacaaaagaagcctacaataagtgcatcaaagattacatgaaatcaatcaaaggcaaactggaagaacagagaccaaaaagagtaaaaccttttatgacaggagctgcagaacagatcaagcacatccttgctaatttcaaaaactaccagaaaacatgaatccagatggcatggttgctctgcggactactgtgaggatggtgtgacctgatatatgattttctttaaggatggtttagaaatggaaaaatgttaacaaatttggcaattactttggatctatcacctgtcatcataactggcttctgtttgtcatccacataacaccaggacttaagacaaatgggactgatatcatcttgagttcttcattattttgactgatttatttggagtggaggcattgttttttagaaaaacatgtcatgtaggttgtctaaaagtaaaatgcatttaaacttaaaaaaaaatacctgagactgggtaatttagaaaaacaatagatttctttatcttgtggttctataggctgagaagttcaagggcatggccctggtttctggcaagggcttttgtgctgtgtcacaacatagtggagaaggtcaaagagaaagtggacacatgcaaagaggggaaaacctgagtggcatcccggctttataacaacccactgtcacaggaactaatccattcctgagagaactaatccagtcttgtgagactgagaattcactcactcctgcaagactgccaccaagccattcatgaaggatccatccccatgacccagacacctcccactaggacccaccttccaacatttggggatcaaatttcaacatgagttttgatggagacaaataaaccacatccaaaccatagcacagggactgctaaataccccaacaacagaaatagaaagctcccctaaacaccttctttaactgagacctggctgtctcctgagaaccccacttcgcctgtaggcctctcctcagagattctttccctcccccaaatacttctgcatctggaggtggagtgggccccttctttgctccccactgcaccttccagaccatgaccgctgtacctctcaggcacttccctccattctatccttttgcccaccccctagtcttgcccaaatccaaatcacttcaacattcatgtgaaagatctatcccacttcccacacttcttgtttcttcggcctactcacctctgttgccctccctttctgctccagtcacccactctcagggccccaagtggatcttgcgatggcccagaactgctgcaccactgaaatcttaacttcaatccccacaacctcacatctttctaactttcccatctgattacttcattacactgttcagctttgttgagacttgtatgagctcatcacaaaagaagaaatcccaatgtccaataaacatggaaaggtgcttaacctcatctactgtcagggaaacgaagaatgagggagaatggggcatgaggaaggagcatgagaaaactttttgaggtaatagatatgtgcattatcttgattgtggctctggtttcaaggatgtttactaatcaaattgtcacttaaaacgtgcagtttgttgtacatcaattatatatcaataaagttgtaaaatatac

SEQ ID NO: 45 - DNA, 1884 bp, Homo sapiens
attcagctgcccggccaggagagacactcagctgcccagcagcccaagctggacatgcccctcccaggaaccccaggacctgtcaccacctccccacagacccccaccccccgccccctcaccaccgactggcgcatcttgtccggcaaggggtccgggggctcggcccgggctgtctccaagctgcgctcctccagctcagggaacagcttgctccggatcagagacctgggggtgaggaagagtcaggaggaggccgcccctccttccccccggccccagtcacgggcacatgcacagaccacaaacccctactgggcagacacaaacacacgacccggagcacacccaccagagcacggtggggtcgctgctctgccggctcaggtggtaggacagtgccaccaggaggccacagaagactgagaagaggacagggacgtgctgctctggccacggagtctgcggagagaatccatgctggtcaggggaggtgaggtaagcatggggcccgggctgcccccgtgtgagaagccactgctgagcccagttcacagccccgccccaaccacccttacgcactgcagcatgcccccacctcgcaagccacccctaccttgatggccccaaggcagaaaccgtagagcagggcagcagccagcaggctgcgggagaggctgaagactgccgtgagcgggctggtggcagctgtgtggaagggagaagtacagcccagctctcacttgcaggtaccccacctcaaccctagccgcgcttcccctcaactcccagaggctggcctccctggaaaggcacccccagcccattgttctctgctgccccaagccccaagcggcctttagagcttccaagattctcagatataaaccacttgcctggggagggaaggagaggggagaaggcagaaaccttgagtctgcagtacagacgcaggagaaggttccgcaagggtggagccaaggacccaatccgagggccctcctgggcctccacacgggccccatccctgagccacctgtgggcatcatacctgtgcccccgaagccgtgcatatctatttgctccagcaggtacatgaggcaggtgttgacctggggcaggaggcccaggaggaagacgaaggggaagcacagggtgaacactggcagggaggggacacgaaggcctggtcagcctgctggctttccgcggcccaccctcggggactcactctcctgggccacctcatccctgccccagcctcaccagtggccacgtctcgggcacagaagaagaaggaggcagagaagagcgtgaggccgtagagggagacaggtgggaagggctgagctgagcccagggcgtccagcagccagatgagcagacagcagatgcagaagtagacaggacggctgtacgcgatcacccagttgtggccctgaggggtcagcccatgaggagctgggtctccccgactggccacacctctgacacatgcacacactcaagggccccaggcctggccctgggtccaagctggagagcctggccaggtgggggtgatgggggtggtgagggagccccagccctccataccctaccctcctccccacctggtctcagcccctcccggggcctcctggccagaggcgctgctccatgggtactcacgtgcatgggggacgccgcatcaggctgcacgctctggaagagacagggctacgttggcaactagagccgatgcccacgggatggtcagaggccccagacctgttcagctccaccactaggcagttatgagtgaccaggtcaggcccccgaactgtcctgagcctcagttttcttgcttgtaaaagagctggccagctctaggaaaccacacag

SEQ ID NO: 46 - DNA, 1570 bp, Homo sapiens
cattgacttgtcagggcccgccagaggcccagagcgcccccgcagcccgcagccagagctgccgagatgtctgttcttcccgcccactcctgccacccccaactcccctcctactcccttccgttgagaacaaggaatttccagcctgtagcaaagggaaagaggcaaagacaaagacggagaccatgggaaactatagaaaaacataaagagacaggtgtgtgtgtgtggggggggagtggtgacaaaaagggagtggggacaaatacaaaaattttcatttgtttcctgcatgggacctgttctcccctgtgtccccttggctcactcaaagaaggaccacttctgtgcctgactcacctgctctccccatccccagtgctctcaaagacagaccagaggaactgatctcgtgataaaaaggattaatattcttttatctgtgctggtctcctccgtgaagggaaacagtatcctcagtcctagttttccaagaaaaggggaaacgattgcgaggaaagggaggaaagtgggcggaagaggagtgcagagactgtcgtccctacgcgcacgtgtagattttcatctagcagattgctctgctcactcctcccccaacgtctccactgggccagatccgactcactcagcaaggtttggctcaccctctccttcctggaccccttccactcctccaggcagaattaattcctcccacccctcggtggcctcctcattgctctttgtacacatttccaattatagttgcttgtttcagccgaaatccaggacctctccaggataggcctgttatctggtggaccctctgaaatgaataaattgatcctattcacaggcctgtgcaactttgaaagggcacatgacacagattttactcccaaaggggctgagcctgggcaaaactgtttaagtgaagacatttgttttccatatctctttcccttgtaaagtttccagtgagtcccacaaatctggctccttggccttctaaaatgtccaccattctggtaaattaattcacactcagatgctaaaggtagtaggccgaagtcctggctggtaatagaaaagtataaagtaatgatcccttttttctctttcagtaacatggcagaatttatcatctaaggaatgttgtccttcaagttagttattttacaagaaatgtttcactcctgaaagacagataatcctaaccactgcctttaaggagctcacagactaataggggaaatagacctataaacgaataattacaacatagtgcaatgatatgggtacaacaatgacagaagtataagagggtgagtgatctgttctgcttggagttgtgaggggccttggtttagacaggcatccaaaggaggtgatgatgcagtcagtatgagatttccaggagtggccagggcggtggctcacacctgtaatcatagcacttcaggaggctgaggtgggaggaacatttgagcccagaagttgaaggctgcagtgagccttgatggcgccactgcatccctgcaccacagagcaaaaagtgagtctcaaaaac

SEQ ID NO: 47 - DNA, 1667 bp, Homo sapiens
ctaactttttcagatcatgttcttttttgagaatattaattttttctctagaaaaaatacacatacaggtaaaactatctatctattaacttcctgggaggcataaagagcccctgaagtccaaccatggatcacaggttaatcaactcccaattgtaatggtctgtgtttacttttcacattagttttacttgaatagtatttgtcccaaacctacttaagagatcctgacatttttttacattattgtttgcatgttcctccattcacttaatgaaaccaagagcacatctctcacaaagctcatgtgcagcccctctgacattacccacagcacaacaggtggaatcagtgattcattgagacagctatcattccagggagcttgggctcagggatggtggagcgacccatctgctgccatctgctgccatattcttctcatgggctcccgtccccagactgaaggtatgggggcaataaataaacactcatgtaggggtttggccatcaatgcccaagctcccagagtcctaggcaggccagtgtctagggtgaggcagtcccaaaagggaacaaagacagaggacctcagccaatggtggcagaggaaaggacacagcagcctgggcaagcaagaggggtggaggcaagcgacctccatggtcgcttggcctcctggccacactggtgggtggggcacagtacaaatgtccctcacatgtgggctgaagctgctgctgtgctcccagcttgatatggtttggctgtatccccacccaaatctcatcttgaattgtagttcccataattcccacgtgttatgggagggacctggtgggagataattgagtcatgggggcagcttccccatactcttctcatggtagtgaagaagtcttacaagatctgatggttttatatgaggaaacccctttcgtttggctctcattctctcttgtctgctgccatgtaagacatgcctttcaccttccaccatgattgtcaggcctctccagccacgtggaactgtgagtccattaaacatttttctttgtaaattacccagtctctttaagtatgtcttcatcagtagcatgagaacagactaatacacagctataggtagaagtggctgatgaactgggccggaaagggacatgggttagttcagcttgaagagctaggaagaagaaaagaaaggagaagactgaaggtggcccctccagaaacactgcagactgtcagccttgtcaaatgcttgggttcttgcatgaagcgctcccttttccttgtggcttagtggcagcaagtatgaaaaatggaagtattgatggaaaaaatatacattggcagaagatgggtagttggggactctattggttagaaatgcacatgcaaacggctgggcgtggtggctcacacctctaatcctagcactttgggaggccgaggcaggtggatcacttcaggtcaggagtttgagaccagcctggcttctactaaaactacaaaaattagctgggcgttgtgatgtacgcctatagtcccgactactcaggctcctggggcagaagaatcacttgagcctggtaggtggaggttgcggtgagccgagatcatgccactgtgctccagcctgggtgatagagtgaaactccgtctcg

SEQ ID NO: 48 - DNA, 2189 bp, Homo sapiens
agattgaggtattttgaaagatatcaggaaaactcgtaaaggatttagaattgaggtctaaaatagattttttaaaaaggcatatgggggaaaaatgtcagaaaaatagaaatttcatggctgggagtcttagagagaccaaacagaatataactataatgttacaatgtattctactcagaagagcctgtccatggccacagttgcctttactgtggattgataatacctttaacacttcagtaatccataaattgaaaagtttaggccgggcatggtggctcacacctgtaacctcagcactttgcgaggctgaggcgggcggatcacgaggtcaggcgatcgagaccatcttggccaatatggtaaaaccctgtctactaaaatacaaaaaattagccgggcgtggtggcgtgtgcctgtaatctcagctacttgggaggctgaggcaaggaaatctcttgaacctgggaggtagaggttgcagtaagctgagatcgcaccaatgcactccagcctggcaacagagcaagactccatctcaaaaaaaaaaaaaaaaaaaaaaggtttagttcatagctgcagagtgtttcttccagttcctaatgtggatctaccacccctgtgttcatcgagattccggtctggacctcctggagaagaggcccaagtggctagccaattcattgcagatgtcattgaaaagtaagagcaccatgataaaattttattacaattcattttcagatagttttgggcttttcatttactttgctctttgtcattaaatcaagttcacagataattcagaaagaggacttatgcatttctccaggaaaggtaagaggaatagagaagctataagttcttattaattctgaagggattttttttttgtgggggaaagtgaacaaggaaattaaaaccaccaatcaaagtagctttaaatatggatgtcttacagattttagagattcagtaatttcttactctataattctctaaatgaaccatattgtttataaaaaaacaagtttgactaacttactgcctgtctgggagctaccttttaaactgaagtaatttttttcccccttaacttttaaagttcaatcattttttattccttatagcagattataacattaatcatgttaacatatgtttatggtgaatccacacagtagattccaaagtctatttgaaaatgtaaaactaggttgattagaacctagagaggctttcctactagatcatataaactgatacattagcactgtaaaacttaaacatttcatgtattatgagaaagtgcattttgaattttagctagggctttcaaaaccatctcccttatctgaaacctcccaatgagaatggaaattccttctacatctgtagctccattaagggaaatggacatgtttgtcatttgtcagcctggcaatcaaaagccagctttcacaaaacctgtccactttcttctggttttctatagaactttaaaaaggtgaagcattttcttaaggtttttgagccttgaaagttatcttgcttgtttaaccaagggttctgtggttcttaagtctaagcgaatagcatgttctacccattagaagactttaatttccttttgtgtttaattctattttagcttgtctgggttctatactgtgatctcatttgcctcgactacgatggaaacattttggatgcctgcacatttgctttgctagcggctttaaaaaatgttgcctgaagttactataaatgaagaaactgctttagcagaagttaatttaaagaagaaaagttatttgaatattagaactcatccagttgcaacttcctttgctgtgtttgatgacactttgcttatagttgaccctactggagaggaggaacatctggcaacaggaaccttaacaatagtaatggatgaggaaggcaaactctgttgtcttcacaaaccaggtggtagtgggctaactggagctaaacttcaggactgtatgagccgagcagttacaagacacaaagaagttaaaaaactgatggatgaagtaattaagagtatgaaacccaaataaacagccaccacattttcaaaacagatttgtaaaaattgtatttgttaacactgtgcacaaacgttttatactaaataaatatcaaactacattcttctg

SEQ ID NO: 49 - DNA, 2223 bp, Homo sapiens
catggtgctaataaggacatacccgagactgggaaaatttacaaaagaggtttcattggactcacagctcctcgtagctggggaagcctcacaatcatggcataaggcagggaggagcaagtcacatcttacatggatggcggcaggcaaagagagaatgaggaagatgtaaaagcagaaacctctgataatatcatcagatctcgtgagacttactgtcacaagaacaacacgggaaagacccgcctccataattcagtcatctcccactgggtccctcccacaacacgtgggaattatgggagctacaagatgagatttgggtggggatacagagccaaaccatatctttctgcccctggcccctcccaaatctcatatcttcacatttcaaaaccaattatgccttcccaacagtctcccaaagtctcaactcttttcagcattaacccaaaaatccaagtccaaagtctcatctgagacaaggcaagtcccttctgcctaggagcctgtaaaatcaaaagcaagttagttacttcctagatagaatgggggtacaggcattggataaatacagccattacaaatgggagaaattggctaaaacaaagaggctactggcaccagtaggaactcagtgtggtgggtctgaccccacatttcccttccacactgccctagcagaggttctccatgagggccccacccctgcagcaaacttttgcctgggcatacaggcatttccatacatctgaaatctaggcagaggctcccaaacctcagttgttgacttctgtgtacccacaggctcaacaccatgtggaagctgcttccaccctctgaagcaacagcccaagctgtacattggcccctttagtcatggctggagcagctaggatgtggggctccaagtccctaggctgcacacagcacagggcccaccccaaaaagccacttttccctcctggcccacaaaaatactttttcctcctaggcctctaggtctgtggatgggaggggctgccatgaagacctctgacatgccctggagacattttcccccattgtcttggggattaagattccgctccttgttacttatgcaaatttctccagccagaaactcccccttatgatactatcagatctcatgagactttctttatcacaagaccagcatgggaaagacccatccccataattcaatcacctcccaccgggtccctcccacaacacatgggaattatgggagctacaagataagatttgggtggggaaacagagccaaaccatatcactgcactctggatgaatttagagattcctgaaaaaattttgttttaagagctttgtggaactcagcttcattagagaaaggacagcaataaggaggttaagatgaatgagctcctggaagggagatgtgcttccctctctgcctccaccccacttttccatttggccttgcttcttttccttcctctctcactatttctcctcttccttgcccttctcccctcttgcctttaaaagcagtagagatgccactttgatgacctgaaagcttccccagtttcccagtttaaacaagagagtatcatatttactggatgaacttattattatttttgagatagagtctcactctgtcacccaggctggagtgcagtgatgcgatctcggctcactgcaacccccgccttccgggttcaagcgattctatgcctcggcctcctgagtagctgggattacagacgcccgccacacgtctggctaatttttgtatttttggtagagatggggtttcgacatcttggccaggccagccttgaactcctgacctcgtgatccacccaccttggactcccaaggtgctgggattacaggcgtgagccaccatgcctggcctggatgaacttattaatgaaagaaaagttggcagggtgcggtggctcacacctataatcccagcactttgagaagccaaggtgggtggattacttggggacaggagttcaagaccagcctggccaacatggtgaaaccccatctctaccaaaaatacaaaaaaattagctgggcgtggtggcacatgcctgtaatcccagctactagggaggctgaggcaggagaatcgcttgaacccgggaggcagaggttgcagtgagcggagattatgccactgcactccagcctgggtgacacagagagagactccgtctc

SEQ ID NO: 50 - DNA, 2206 bp, Homo sapiens
atggtgtgtgcacgtgtgcactgtgtatgcatggtgtgtgcatgtgtgcactgtatgcatagtgtgcacgtgtgcactgtgtgtggatgcatggtaatgtgcacgtgtgcactgtgtgtggtgtgtatgcatggtgtgtgcacgtgtgcacggtgtgtggtgtgtatgcatggtgtgtgcacatgtgcactgtgtatgcatggtgtgtgcacgtgtgcactgtgtatgcatggtgtgtgcacgtgtgcactgtgtggtgtgtatgcatggtgtgtgcacatgtgcactgtgtatgcatggtaatgtgcacgcgtgcactgtgtgtatgcatggtaatgtgcacgtgtgcactgtgtgtggtgtgtatgcatggtgtgtgcacgtgtgcactgtgtatgcatggtaatgtgcacgtgtgcactgtgtggtgtgtatgcatggtgtgtgcacgtgtgcactgtgtatgcatagtgtgtgcacgtgtgcactgtgtgtggatgcatggtaatgtgcacgtgtgcactgtgtgtggtgtgtatgcatggtgtgtgcacgtgtgcacggtgtgtggtgtgtatgcatggtgtgtgcacgtgtgcactgtgtgcatgcgtgtgtggtgtgtgtgcatgtatgcatggtgtgtgcatacgtgtgcagcagcacctggtcccatctccagtgcccagcagcatcacacgcactttggtgctttataaatgcatggtcagtgaggctgacagcaccaagctgtccctttaccataacacctggaatagtcacctgtgataagctatcacataggaaacatttttaaaatttcattctcattattttctgtaatcttgagaggttccaatcaacatttattgccttattctttttatctcattcctttttgaatgtgtttatctcctaagattttatctgtgatggagatgggatgcctgtgaatacaaaagttgcagtggtggcaccagggtgggggggtgcggccggggccaccatggtctcccctgagagggggtgctgtcttaggtgccccaagaggccctcgggcagcaagcgtggggtgctgccaaaatacagctccccctgggtgggcaggacacacgtggcctcctggcagacaggtgcctgggtgagcccgctgctcctgattagtcatgaatggcacctggtctgggcgacagtcacccgcaggaagccctgagctggccaccatcaccctgggcagtggctcccggggtgccaacaagacctgggcccctcgttctttggtgctgagagccccagctgaggctgtggaggaggccctggacctggtctggtgtctgtcagaggcaggtgcccagtcctttgacttgcttctctgaattgtcataattgtgctggaattgtgccagaaactggtagtgataacagctcctggaaggcctgtggctgctgagggctgcctggtccccctcaggacggccgggggagcctctccagaagcaccagctttgtctgcaggtggacgttgaaggggggcagttgggtcaggttcagactcacacctgtggtccccacgacgctggccaggacccggtgtgtgtccctgtagagggccaggagcccaggggccgcctccatgaggatgtgtgtgtatgccagcatgcctgtccccggctgcacatcctccctcttgtcgtacctgtgggatgagagctggtggtcctgcccagggcccccacatcgccctgtcccccgcccccaaggggccctcacatggcctctgggagggccgtgctgtgtgtggatcctacctccaggcgctgttgacttggagaaaccgagacacacctgtctgggcggctgccacgtcaatgtgcagaaggacgtctaggaaaaccaggcctgccgtcagagcccagccctgcagtcggagccacagcagtccccaggcagtgcccccagcacccacctgtctgggggggcaccagctggtgcagcctctgcattgcgacgccacctgggtagttgaaatgggacacatacagggccgtggctgagtaggcggcattcaccacgaggtgtccgatcacaagcagagaccccgctttgtacagccaagactttttatagttattcagcctgaaaaaagaatggttacacatcataggcagaacgtaatgacaataaaattaatctacctacaaaacat

SEQ ID NO: 51 - DNA, 1847 bp, Homo sapiens
ttcgtatgcgtgtgtgtgtttaacctcaataaaaaatattttaaaaaatgagggtggaattaaaacatcctcagatgtcttagtctttttgtgctgctataacaaaataccttaagactggataatttatgaagaacagaaatttgtttcccacagttctgaaggttgggggaagtccaaaatcaaggctccagcagatacagtgtttgataagttgccctctgctttcaagatggtcccttgtttctgtgtcctcacttggcagaaggaatgaacttgctcccttgagtccttatataaagtcattaatcctatccataagggtggagctagtatggcctaatcatctcatgaaagccccacctctttattttttatttttggtagagatggagtctcactgtgttgcccaggctggtgtcaaattcctaggctcaagtgatccttctgcttgggcctcaaaagtgctgtggttacaggtgtgagccacacctcttaatcctgttgcattggggattaagtttcaaaatgaattttggaggaacacaaacactaaaactacagcaccagatgattcaaaagcttaacgagtttgttaccactagatctcccttcatgaaggaagtcatgaaggttgaaataaaaggacattagacaggaaatcaaatctgtatgaagatataatcatgtctgataaaggtaaatacatgaaaaattataaaagctagtagtgtttctgttttctacatgatttaagagacttatgtatcaagaagttattagtctgtgttttggacacacaacacattgagatgtagttttgtggcattaatggctgaaaggtgatggggttggagctgtataggagcagtttttatatgttattgaagttaacttggtatacattcacatcagagtagtataacttcagggtgttaaatatcagccccatggtaaccaaaaagaaaataactgtaggatatacacaaaaggaaatgaaaaggggattaaaatgtttttctacaaagatcaactaaacacaaaataagataataatgcaggaaataggggacaaaacaactgtgaggcatatatacaaaacaaacagcaaaatgacaaaagttctgccttatcagtgtttaaatgtaaatagcttaaaccctgcagtccaaagacagattggcagaatggatagaaaaacatccagcttctagccataagagacccactttagatgaaagacaaaaaaatttaatgtgacaggatggaaaaagatactctcttcatatagtaaccaaaagagatcggggttgctacactaatatcagacaaaatatactttaaatcaaaaaagtttacgagacaaagcaggacattatatattaataaaaggtttaatacggcaaaaagacaaaacacactaataacagaccactcaaatatgtgaaacatgactgataatggaagggagaaatagttctacagcagtagttggggactttaatgggtagaagaaccaggcagaaggtaagtagggaaatagaatatagtacttgaacaatataagaagccaagtagatcttacagacatacacggggcattctactcaacaacagaatgcatcttcttcttaagtggacttaggaccttctttaggatagaccatacattaggccagaaattaagattcaagagatttttaaaaatacgataccaagtattttctttgacaaaatgggatgaagtgagaaatcagtaacagaaggaaaactggagactttatgtaaattaagtaacaccctcttcaagaaccagtggtcaaaggagaaatcacaagggcaattag

SEQ ID NO: 52 - DNA, 1928 bp, Homo sapiens
ttaatagaattacaaaggggttggcttagatcagggggtcaggaaaggcttctcacaggaagaggtgggcaggagagttcaggcagaaggcctgaggagaatgggcttagctgggcacccttgaggaatggacaggagggtgtggtgctttccctgaaagaaggttccattctgtgcggctgaaaggaccagagcaaggggcaagggttttattctaagtgcagtgggagagcactgaaggggtttaagcagcacaggattcagtgtgcatttaagacgtgcactctgcccatctatggagaggctgagagtggatcccagggatggtcacgaacctccagagagccactttatagtttccaaagcttccacaaacaccatctcaccacttgttttaaatgcagcccgagaagtcaaaggaggtggggtatggggggagcatttctgtgttcaccctttctgtgactcagagaaggattctaaggtggagctacagagccaggaagtggcagaggattttaatcgcctccttggaggagaggaaggagcctctgaggccagaatgtatcccagccagaagtcagaggaccattccctaccctcagtcatcagaagggctcctgacctcaggggctgctgggggcagcctgtgaggggcacaaggctggggctgtgatgacgatgctccttggacatgcctggaagggatggaggtgggggctgactgcccaccagggcctctgctccctcactgctgcctcctcatcccccagcctcctctgggattgtccttctcagggtcagccagctcccactgcagtgcagggaccaacatgcccatctcctcccacatcctggcccccaccacagccaacctggccccgtgcctcatgccctgccctcctgaccagcttcctaactcactgatactggcttccactcggagagcctacagctctctgccatctacccacctaagcttgggaatgtctttctctgcttgtgctctgtagccagctcacatgtcaccaggctgatgcacactcagctcagtggggctgcatttacctttcctagggattccccagcctgtggtgccctccccagtgtgggtagagaatagggtctgctgcctcctcttgcaggtatctcttctcggatgggaatgggcgcccccagctcccactggccacctttaagagatcagagggcaaccgggcactgtggctcatgcctgtaatctcagcactttgggaggccaaggtgggagaagcgcttgagtccgggagttcgagaccagcttggataacatagcaagactatctctattaaaataaataaaataaaaagatcagaaggctggctgggtgctaggcacagagggcatggctgtaggcatggggctctggcctgaaggtagctgtcagcctgacagcatgaggttcctgatgtgcccatactggtagtgggtagggtgtgggtagggtagtgggtaggttgggggaagtcctggggaggtgaggagcacagagaacccaacccagccgagtccaagacgtccaggatcttgggtctctcttgacttcacgtttgactaatttcctcctcccatctgagtaatcataatgataaagatagcagcattgggccaggtatggtggctcacgcctgtaatcccagcactttgggaggctgaggcgggcagatcacttgaggtcaggaatttgagaccagcctggccaatatggtaaagcccagtctttactaaaaatacaaaaagttgccaggcatggtggcacatacctgtaatcccagctacttgggaggctgaggcacgagaatcgcttgaacctgggaggcaaaggttgcagtgagctgagatcacgctactgcactccagcctgggcgacagagtgagactgcgtctc

SEQ ID NO: 53 - DNA, 2767 bp, Homo sapiens
catacattttacttctacatatgttattcccaaaattcattgtcattatttttgttttaaactgttaattaactttttaaaagatttaaacatgagagaaaattgtcttttaagtttatccacgtattcactatttctggcaatgttctttcctttgtgcagtttcagatttccatatggtgtcattttctttcttttaaagagctttctttaatatctctttagcatatatctgctagttatgagttttctcggcttttgattatctggaagagtattttgccttcatttttgaaggtttaaaaaattttaaagacggtgtcttgctctgtcacccaggctcaatcatggctcactgcaaccttggcctcctgggctcgggtggtcctcctgcctcggcctcccgggcggctggagctgctggcgtgtaccaccacatctggctttttttttttttttttttttgtaaagacagggatttgggccgggcgtggtggctcacgcctgtggtcccggctcttcgggaggccgaggcaggtggattacctgaggtcaggagttcgggaacagcctggtcaacatgttgaagcctcgtctttactaaaatgcaaagattagccaggtgtggtggcgggtgcctgtggtcccggctgcccgggaggctgaggcgggagaatcgcttgagcccgggaggcggaggttgcagtgagccgggatcgctccgttgcactccagcctgagtgacaagagcgagactttgtctcaaaaaaaaaaaaaaaaagacgggtttgccatcttgcctaggttggtttctgaggtatttttgctagaaagagaatcctgcgttgatatttttctcccaggagtttaagcatgttttactgtgccttatttggttactgatgagcatcctactgccagtcccaccttcgtgtctctgtctgccttcatgatctctttatcacttttttgtttgtttgttttgttttgagacggagttttgctctgtcatcccaggctggagtgcagtggcgtgatcttggctcactgcaacctctgcctcccgggttcaagtgattctcctgcctcatcctcctgagtagctgggattgcaggcgtgcgccaccacgcccggctaatttttgtatttttggtagagtcggggtttcgccatgttgtccgggctggtcttgagctcctgacctcaggtgatccacctgcctcggtctcccgaagtgctgggattataggtgtgagctaacacactcggcctatcactggtttttagcaatttgattatgatgtatttgggtgtggttctcctcatgtttcttctgcttaggtttcattagaattgttgagtgtgttgggttttagttatcaaatttgaaaaatcttctggacctgtggtgcagcctcagtgaggagggtcaccctgcacccgtcgccggccccggtctcccagggcctcacccgagtgatgccccgctattgcgcggcgatttgttgtaagaactgccggggatgaaacaataaagaccggaagctgagtttttatccatttcctctacatgacaaagaaagactggaaaagtggttaaacaatatgaagcgagattcatgggttcccggtaaataccagtttctgtgtagtgaccattttactcctgactctcttgacatcagatggggtattcgatatttaaaacaaagtgcagttccaacaatattttctttgcctgaagacaatcagggaaaagacccttctaaaaaaaaatcccagaagaaaaacttggaagatgagaagtatgcccaaaagccaagtcagaagaatcagttgtattaaatgagacaaagaaaaatatagttaacacaaatgtgctccctcaacatccagaattacttcattcatcttccttggtaaagccaccagctcccaaaacaggaagtatacaaaataacatgttaactcttaatctagttaaacaacatactgggaaaccagaatctaccttggaaacatcagttaaccaagatacaggtgtaggtggttttcacacatgtttttataatctaaattctacaactattactttgacaatttcaaattcagaaagtattcatcaatctttggaaacccaagaagttcttgaagtaacttctagttatcttgctaatccaaactttacaagtaattccatggaaataaagtcagcacaggaaaatccattcttattcagcacaattaagcaaacagttgaagaattaaacacaaataaagaatctgttattgccatttttgtacctgccaaaaattctaaactttcagttaattcttttatatctgcacaaaaagaaaccacggaagtggaagacatagacatcgaagactccttgtataaggatgtagactatgggacagaagttttacaaatagaacattcttactgcagacaagatataaataaggagcatctttggcagaaagtctctaagctacattcaaagataactcttctagagttcaaagagcaacaaactctaggtagattgaagtctttggaagctcttataaggcagctaaagcaggaaaactggctatctgaagaaaatgtcaagatcatagaaaaccgttttacaacatatgaagtcactatgatatagaataactaggttttaaaactatggctgttaaataagctttttccagccaaaccaaactacatgtaaagtgaactttttcctgtataaagttctcatcttaatg

SEQ ID NO: 54 - DNA, 2215 bp, Homo sapiens
aggctgccgggggctgcagacatggagggccagagcagcaggggcagcaggaggccagggacccgggctggcctgggttccctgcccatgccccagggtgttgcccaaactggggcaccctccaaggtggactcaagttttcagctcccagcaaagaagaacgcagccctaggaccctcggaaccaaggatcactgtggtcacatggaacgtgggcactgccatgcccccagacgatgtcacatccctcctccacctgggcggtggtgacgacagcgacggcgcagacatgatcgccatagggttgcaggaagtgaactccatgctcaacaagcgactcaaggacgccctcttcacggaccagtggagtgagctgttcatggatgcgctagggcccttcaacttcgtgctggtgagttcagtgaggatgcagggtgtcatcctgctgctgttcgccaagtactaccacctgcccttcctgcgagacgtgcagaccgactgcacgcgcactggcctgggcggctactggggtaacaagggtggcgtgagcgtgcgcctggcggccttcgggcacatgctctgcttcctgaactgccacttgcctgcgcatatggacaaggcggagcagcgcaaagacaacttccagaccatcctcagcctccagcagttccaagggccgggcgcacagggcatcctggatcatgacctcgtgttctggttcggggacctgaacttccgcattgagagctatgacctgcactttgtcaagtttgccatcgacagtgaccagctccatcagctctgggagaaggaccagctcaacatggccaagaacacctggcccattctgaagggctttcaggaggggcccctcaacttcgctcccaccttcaagtttgatgcgggtaccaacaaatacgataccagtgccaagaaacggaagccagcttggacagaccgtatcctatggaaggtcaaggctccaggtgggggtcccagcccctcaggacggaagagccaccgactccaggtgacgcagcacagctaccgcagccacatggaatacacagtcagcgaccacaagcctgtggctgcccagttcctcctgcagtttgccttcagggacgacatgccactggtgcggctggaggtggcagatgagtgggtgcggcccgagcaggcggtggtgaggtaccgcatggaaacagtgttcgcccgcagctcctgggactggatcggcttataccgggtgggtttccgccattgcaaggactatgtggcttatgtctgggccaaacatgaagatgtggatgggaatacctaccaggtaacattcagtgaggaatcactgcccaagggccatggagacttcatcctgggctactatagtcacaaccacagcatcctcatcggcatcactgaacccttccagatctcgctgccttcctcggagttggccagcagcagcacagacagctcaggcaccagctcagagggagaggatgacagcacactggagctccttgcacccaagtcccgcagccccagtcctggcaagtccaagcgacaccgcagccgcagcccgggactggccaggttccctgggcttgccctacggccctcatcccgtgaacgccgtggtgccagccgtagcccctcaccccagagccgccgcctgtcccgagtggctcctgacaggagcagtaatggcagcagccggggcagtagtgaagaggggccctctgggttgcctggcccctgggccttcccaccagctgtgcctcgaagcctgggcctgttgcccgccttgcgcctagagactgtagaccctggtggtggtggctcctggggacctgatcgggaggccctggcgcccaacagcctgtctcctagtccccagggccatcgggggctggaggaagggggcctggggccctgagggtggggtaggcagatgggccaaggtgaccaccattctgcctcaatcttttgcaagcccacctgcctctctcctgctgctcctccagctgtatctgcacctgcctctctgtcctggccaggggtggacaactggggtcccccaaaactcagtcctggcacctcaactgtgacaatcagcaaagccccacccaggcccccatctgggatgatgggagagctctggcagatgtcccaatcctggaggtcatccattaggaattaaattctccagcctc

SEQ ID NO: 55 - DNA, 2221 bp, Homo sapiens
actaataggagaattttaaatttccttgtacatgtttttatttttggaaactacccttttaccaatatagtgaaaccctggctctactaaaatacaaaaaaattagccaggtgtgatggcacacacctgtaatcccagctgctcgggaggctgaggctggagaatcgcttgagcctggtaggtggaggttgcagtgagccggggtcatgccactgcactccagcctgggcacgcagagtgagacttgtctgaaaaaaagagaaataaagaaagaaactacccttttaattcatcagagcgttttttgtttcataatacaaggaagtaagtcctctctaaccctctttccgaaaaagctgactagtatctcaaaaccacttaattttgtattactttctttgggactttggaagttgcataagacatacaggttaacttgtaaagaatatctttccagaatatgggttgccaaatttttactagattcatttagggtattttttgtgaggatactgtattcttgggcattttgttctttttaattccttttatgagtatacactctctgattgtcttttcttatttcgcacccagattttctgcagtagctcagtggaatattttgagcttagtgtaagatagaccgtttgtaaataaatgtaaagtattgcatagaagaatttatttgtcttagacccttaagcagcccctatgctcccccagtgaagttgatttagatgtgtagacaaccttgaggaaagagaagggctcttcagctgctctcctgtctccaagtttatctaaatctagggttctgtgaaatgatttagtcttcagtgtggattttgctctgtgggatagcctctgagtgtaaatgcttcctgtcctaagacccccgaaaccagacgagctacctaagaacagctaaaagagcacacccgtctatgtagcaaaatagtgggaagatttataggtagaggcgacaaacctaccgagcctggtgatagctggttgtccaagatagaatcttagttcaactttaaatttgcccacagaaccctctaaatccccttgtaaatttaactgttagtccaaagaggaacagctctttggacactaggaaaaaaccttgtagagagagtaaaaaatttaacacccatagtaggcctaaaagcagccaccaattaagaaagcgttcaagctcaacacccactacctaaaaaatcccaaacatataactgaactcctcacacccaattggaccaatctatcaccctatagaagaactaatgttagtataagtaacatgaaaacattctcctccgcataagcctgcgtcagattaaaacactgaactgacaattaacagcccaatatctacaatcaaccaacaagtccattattaccctcactgtcaacccaacacaggcatgctcataaggaaaggttaaaaaaagtaaaaggaactcggcaaatcttaccccgcctgtttaccaaaaacatcacctctagcatcaccagtattagaggcaccgcctgcccagtgacacatgtttaacggccgcggtaccctaaccgtgcaaaggtagcataatcacttgttccttaattagggacctgtatgaatggctccacgagggttcagctgtctcttacttttaaccagtgaaattgacctgcccgtgaagaggcgggcatgacacagcaagacgagaagaccctatggagctttaatttattaatgcaaacagtacctaacaaacctacaggtcctaaactaccaaacctgcattaaaaatttcggttggggcgacctcggagcagaacccaacctccgagcagtacatgctaagacttcaccagtcaaagcgaactactatactcaattgatccaataacttgaccaacggaacaagttaccctagggataacagcgcaatcctattctagagtccatatcaacaatagggtttacgacctcgatgttggatcaggacatcccgatggtgcagccgctattaaaggttcgtttgttcaacgattaaagtcctacgtgatctgagttcagaccggagtaatccaggtcggtttctatctacttcaaattcctccctgtacgaaaggacaagagaaataaggcctacttcacaaagcgccttcccccgtaaatgatatcatctcaacttagtattatacccacacccacccaagaacagggttt

SEQ ID NO: 56 - DNA, 2007 bp, Homo sapiens
catgcacagggcctgagagccggtgggtgaggtagggctgttcaagggagggtgggctggccttgccctgccctgcccagatgttgacaacgtcacccattcccgccaccagcagtcccctctgggagaaggccaggtgccctgctccatggggcagggtccgagtgctcagaggctggtacgtccctcgcaagtcaaagatcttcagctggtggtctaggccagaggtggccatgtacctggtgagagaagagggatcaattaatatgtcagtaaatgggtttaccaagcaagctgtggccaagtccaggcatcaagtctggctggggagaaaaagattaatagtaataaccactgccatcaccctgaacactccacaggcatcctctcagttaagctgcacacaactcatactatttttatttccctttaagaggtgaggaaactgaagctcagggaaaggaaagctaggtcagtgaatggtcaggcctgtctctttagcatctgcctctaacctgctaacaccacacagccctctcaagacacgggcgtcaaaaggaacgcccacacgacaggctgcacccaaatgtgatgtccccctgtacacacatgcagcacacagcccagcaaggggaaggagcatgtgcagtggtcagaaaggcttcatgggaaaggtgggatttgagccattctagataattctcaaaaaattacaggaagtagatacacagcaggttcaaatgcattaacaccagagtgttgagactgagagggaagcagaggtttgttaggattggtgggaaacatggtcaggaaaatcaggagcagacaatttgtgaggtttctttaaagtcagactgaggacccacagctcatgatcccaacattgctctctggcagtgacaaatcacaaagtgaaggctccaaggacttgagaagacctactcagggaagtggtgaagtaatgcactggaggcccttgccctgcccctctgtgtgctttccctggaaggaaggagggaaggttggtgaccaaatcctctccaggaatcatgtactgcataagttgtttactttcagaagttggagttccttttctttttttgagacggggtctctctgttgcccaggctggagtgcagtggcatgaccctggctcactgcagcctctgcctccctggttcaggtgattctcgtgcctcggcctcccgggtagctgggattacaggcatgcgccaccaccgctaatttttggtggagccggggtttcgccatgttgaccacgctggtcttgaactcctggcctcaaatgacctgcccaccttggcctcccagcatcctggagactttgaataagctggtggccaagctggatgtggtggctcacagtaattactctgtaatcccagtactttgggaggccgaggtgggcggatcacctgaggtcaggagtttgagaccagccaagccaacatggcaaaaccccgtctctactaaaaatacaaaaattagcgcatgcagtggcatgcacttgtactcccagctacttggaggctgaggcagaacaatcacttgagcctgggaggcggaggttgtagtgagccgggatcgcgccactgcactccagcctgggtgatagatcaagactccgtctcgaaaaatagtaataaaataaataaatgcatcacctggccaatcattctcaaaaaccatagccatggccgggtgcagtggctcacgcctgtaatcccaacacttgcactttgggaggccgaagcaggtggatcacgatgtcaggagttcaagaccagcctggccaagatggtgaaaccccgtctctactaaacattaaaaaattaactgggcgtggttcgtgggcgcctgtagtcccagctactcaggaggctgaggcaggagaatcgcttgaaccccggggggcagaggttgtggtgagctgagattgtgccactgcactccagcctgggtgacagatcaagactctgtctc

SEQ ID NO: 57 - DNA, 2886 bp, Homo sapiens
ttgaagaatgtaaaataacatgtggacacatggaaagatgcaccatgatttatggtggggaggccacacaaaaatgccagttcactcaaagaattcccattcgaatctgaacagggtttttatttattttttatttttttgagacagggtctcgctctgtcacccaggcttgagtgagtgcagtggcacgatcatggctcacttgcttggccttgacttcccaggctcaagcaatcctcttgtctcagcctcgcaggtagctgggactatacatatgcaccatcagtggtggaccctattccagccagaggcgttttccctagggtgtaataagaatttcacaccctgtggaagaactctgtgtacccaaatcctagcaggtgcctgagatacacacagcaggcactcagtaaatgtaccattgcccagctagcaaagactgacctaataagcagggcaaacactgtcaaaactctagtataaagttgcctctgtgtgctttatcggaatcctcttgttttaatcctctcctggtacgtctccatcccatcttagagtgttaagtgcagagtcccttcggaagcttaagtctttgtggctgccagagtcagaatgacgtgacgagcagagggaggctttggaattgaagttttcattcacctctcatcagctttaccagtataagcctggttatttcatccttcggagctctatctcttctataaaatggggatcgtctttaaagccctggagtgctgttgtcaagatggagataaagtatgccaagctgctagaagaatattcagtaactttccggtattttgcttcctgtctgtgaactcttcttatcaggaatccagattactcgggaaagcataagtagttcacataatagaggtgtggattattttgaaaatgcctcctgcgtgttgagtttgcattggagaaccccgaagacgcgcaaactagtcctagcgtgagtgagcagcaagcagtggtacttccttgtgaatcggggtgggaacccttcagaaccgcgagctcccactttctgtcgatcgctctgctcatgcggccctgagtctcatggttactgtggtctcagtcacagcaagtgctgccaagctcaggcgacgctgccagagccttctgagagccgggcggggctggtgccactggtagcctcatccctggacatgtttttcaacttgaagggagagcagactggctgtgtgtttgcatttcctgacaaaagcagccattgacgtcaagagttccctctgttgttaagaagtgacacctgtgtgtttttctttagctttgcacgttattgggcttcagataatatttatttttaccaactttggcccaaattgtatcattactttgaatctgtacagcacttttatgttttcaaaacatttcatgtatttttcagtgttacccttgcaacagccttgtgagttaaccatttcaagtgcaacctgttgtttcgtgaggaaactgaggctcctctgctatgcatgtgaccagcccagcatcacatggtcttgcagcagtggaactgagatgagctcctggcctcctgactgcccagggctccctcccactgcattgtggagcctgggcacttggggaggagtggggcaggacccagtcctgccactgtttgcttcctcaccacctctgggtttcaggtcatgagaagcattgccttttcccctgggaacaccagttgcttgctttcgagttttataatgagagccaaggaccttctgcaggcgtaattgttcatcttttaccaagcctttgcatttcaagtatccaaagacctacgtggaatgttagtatggagagagaagaggagggagggactgggacagtcatcctgccatccaggaaatgcctgagctcgacatcgcccaagctagcctcaggctgctgcccctggcctagcaggatgcgtgcttgcccttgttgggatgctggcatccagctccttgttctggtctcaggagggagatgtcgggaaggttcacagggtctgtttatagaccctagaggtggtcgttggtggtgcccagtgacggagcctctattggcaaaacctgtatctctgcagtcgcagctgttggcccagtggatagagcagccttacttaaagcattttcacttttctgtcctcatatggcatgttcctcctccctctctccctccctccctctctccctccctccctttctccctccctccctttctccctccctccctctctcccttgcttaattccaagaaatggggaccaacattcttcttacaattagaagattctttgttgttcataacagtggagtcacaggtgtcccaaggtttttcccaggcagttcagcaggcctgaaggcttctggatggagtgcagaaaatcacttgtaagcacaaagagtgtggcaagtgatgtgaggtagctaactggaatccacattgaggaccagctgcgtgcttggaacagcagctccaagtgtcactgcatcatcgttgagagttattgacggtgaaaacacaaacatattaccgaacactaccttgctagctttgtggccctagcgaagtcacttcaattctctgcctcagtgtccatatttgttaatgaggaaaataatagtacccacctcacaggtttgtggtgaagattaaacacttagagaaaacataaaatgcctcttgtgaagtaagtattttttgaatattagccatgattatgttattgaatcaatgttatgtatcaagctgttaccgaattatatcggtgttagccgttgctgtcatcatctccattatccttgtatttcagacatgtgagctttggaaattaaaatctttgaaaat

SEQ ID NO: 58 - DNA, 2289 bp, Homo sapiens
ttctgtcttttggaaacttccagctggtcaaagagattgccgatgaagaccccagccacgtgaacttggtcaatggggacggggcgacgccactgatgctagcagctgttacggggcagctggctctggtgcagctgctggtggagaggcacgcggatgttgacaagcaggacagcgtgcatggctggacggccctcatgcaggcaacctaccatgggaataaggaaattgtgaaatatctgctaaaccaaggggccgatgtcactcttcgtgcaaaaaatggatacacggcctttgacctggtgatgctgctgaatgatcccgacacggaacttgttcgactgctggcatctgtctgcatgcaggtgaataaagacaaaggccggccgagccaccagcctcccctgccccactcgaaggtccgacagccctggagcatcccagtgctgcccgatgacaagggtggactgaagtcctggtggaaccgaatgtccaatcggttccgaaagctcaaactgatgcagacgctgccccgtgggctgtccagcaaccagcctttgcctttctctgacgagcctgagccagctctggactccacaatgagggctgccccccaggacaagacaagccgctctgcactccctgatgcggcccctgtgaccaaagacaatggtcctgggagcacaagaggagaaaaggaagacacgttattgacaaccatgcttcgaaacggagctcccctcaccagactcccgagtgacaagctgaaagcagtcatccccccattcctacccccttccagttttgagctgtggagctctgatcggtcccggacgcgtcacaacgggaaggcagaccccatgaagactgcgctgccccagagagccagcaggggccaccccgtgggcggcgggggcacagacactacacccgtcaggcctgttaaatttccaagcctccccagaagcccagcctcttctgccaattctggaaacttcaaccactcgcctcattcatcgggcggctccagtgggataggtgtgagccggcacggtggggagctgcttaaccgctcaggtggcagcatagacaatgtcttgtcccaaatcgctgcccagaggaaaaaagcagccggattattggagcagaaacccagccatcggtcaagccctgtggggccagcaccggggtccagcccgtctgagcttccagcctcccctgcaggtggcagcgctcctgttggcaagaaattggagaccagcaaaaggcctccatctggaacttccactacctccaagagcacctctccaaccctcacgccctccccctcacccaaagggcacactgcagagtcctcagtgtcttcctcgtcatcccatcggcagtccaagagcagtgggggctccagcagtggcaccatcacagatgaggatgaactgactggaatccttaagaaattatcacttgagaaatatcagcccatttttgaggaacaagagtctgtctctgtctcgtgcgtggtgagggagatgaggtggacatggaagcgttcctcacactgactgacggtgacttgaaggagctgggaattaagacagatgggtccaggcagcagattctggcagcgatttctgaactgaacgcaggcaagggacgcgagagacaaattttacaggaaaccattcacaactttcactcttcctttgagagcagtgccagcaacaccagggcccctggcaacagcccctccatggttgggtgggtgaggccagaagaaactgcctccggcaagaggtagcagccgctcaggtggctctgctggcatcggagcccacagaagtgaggagtggccgatggacctgccctccaaatgtgcctgactctgggtcttgctgtcactggatttcctggcatggcagacagaaagaaagatagtttgaccaagtcgtagaagctgatccagcgggtaaaaagggggcagggaactcgtcccttttattcttgcctcagagctgcctgaagacatgggccaggccggaggctggacaactttggataacgctgacctgtacttccaagtaaatgcctcctgaagagcccgggacccttcctgggagaattctgcagccagaatgaaggtgccatcagcaggaggcactgtgaagcaccatcctgtcgctgtccttgtccattcctagcaagttaatcgtgtcttgttaaccagcagttcctgttcaacgtgtaaagagacctgatgttttccctaataaagctgataacagattttgc

SEQ ID NO: 59 - DNA, 2404 bp, Homo sapiens
accggaggcgcggccgccctgggctgagaagacgccgtcggcccaggtggcatcagaacccacaggaggaagacagccagcccaggaggagccatggggggcctctggggatcgcaagggtcgaccccatcctccctgaaacaaggccggaggttgaggaggtctccgcccagccccgcagctgacaaccggtggagaaaccgcacctgccacgggaggggccgcggggtgggctcgagccaccatggggctggtacaagcaccctctccgctcaggacctcggccctcatcccagggcaccagggctcacagggggatgggcccgggtggggacgagggtgtggaggggcaggaagcacggcgggtggagcggggccgggtgcgggggtcgcgggggaccgcggggacggggccttgtgatgcaggagacggagggggctggtgacggagaacgggaggccgcaaggatgggggacgcgacatccttttcccctcccaccggctcaccagggatgcgcctccgcgactgcccgccccaatcccagggcggaggcctcgcgcaaaacccaggcgccgcggctccgcgctccggctgagggtccgcgccgccgcccgcccgctccttcccgctcggccgcggcctcagggacggatactccagcgcgcggttccaaccgaggcccatggcgggtttagccccatgaagatgaactgggcacccgcgaatggctgggctctgctacaggaggccgccttcctctgcgtgcggccgcggagggctccgcgggggctcgagaggggcctcgagggtgtgtgtgaggccggcgctgtgctatggtgccccgggctcctccctgcgcgtggctgcggccggggcggcgggctcaggctggagaagggccgcgggacccagggaacgcggcctggaggacgaggaggactgggttcccggaggcaacaggaccggctcggcatctacagctactgtacgtggacttcgggcgctggacccacgggcggcctgtgcctctgtgtcgggctgggtggcgccctcggtgccctggggctgctgcggccctaggcctcgctgggctcggtgaccacatctggcccccgggccgcaccgtcccccaggatcctccggcctgggctcccccttcctcccttgcccacagtcttggagccccagtgggtgcaggagctgctggctgcccctgtggacccgccatccaccgtcctgcccatgctgcctcgccatccacctgcctgcccacgccgcctcagcctcccacctcccacctagaggagaccatgggccctgccccacctgctccaggatgttagggtcccctcagccaaaaaggcagtggcctgtggctcctgtaccaacagcccagccacgctccagagccgcccaaagggaggtgccaaggccaggaacccaagccaccccagctccccacgcctgcccaggggccgtggtaacccatggacggggaggtgacctcaggctggttctgccactgaggccctgaggaatcaggccctccccaaaagaagtaatgaaatggaccaaaggacttaagaatttggggggaagtaaggggaaaacgttaggtgctaaccacctgcccagaagagtggatctcacagcccaggaacattcccaagcaggaaaaccatccgtccaggaaccctaaccctaaaactaagcacaacccctacccctaacccctgaccctaacgctgacccttaaccataacccttaaccctaaccactaacgcaaaacactaacccttaaccctaacccctaacacctaacccccacctcaagcactaaaccctaagcctaaaccttaaccctaactgctaacactaacccataaccctaagccctagccccaaccctaaacttgaccctgaacccaagcctccaacccaaccccgacacaaacccctaaccctaacccctaattctagccctaatccctaaatccaacaccaacccttgaccggacccctgacccctaaccctaacctcaactcataacctcaacccctactcctacacctaacccctaccctaatgctagccataaacctaacacccaaacccaaactcgaacctatgcctacccctaaaaccctagcccgaaccgtaaccacaaatcctaacccacaacgctacccctaaacctaccactaccccaccccaaaccctgacaccgaaccctgaagctaaccctaacaacactaagcctaacccctaacccttaacccaactgtaactcctaatgctaaccctaacccttaactctaaccccttaccctaaactgtaacccctaaccctaatcccaaccccaacacgtaaccctaaccccctctaccccctctagagcc

SEQ ID NO: 60 - DNA, 2716 bp, Homo sapiens
ttctccttttcctctgggctggtgctcagatggtgagagcactgtgctgatgaggtgggccctggggtggaacccatggccccctccgactcccaggagacctggccagctgcagcggcccccgtggaccagcagagggacaagagaggagctgacgtggaggagccgaggcccactgggggctcctggagagtccgtccgcctgtggacagcagctcaggtgttcagctgcttccagagaggaagcacctcttcctagactgaggcatcgttttgattaaaaaaaaaaaagttgatttttttcaccttggtgtaaatttttgtttgtaacaatatgttagttgtcacagttaccactatttgtttttctttctttcttttttttttttttttttacatttttgaaattatttacagagatgggctctcgctacgttgtccaggctggtctcagactcctggcctcagtggtcctcccaccttggcctcccaaagtgctgggactacaggtgtgagccgtggcacctggcctgtttttctttattactacagatattatctgaagctttaaatcctcctggagtgaaagctagttcataaccacgctgtttggagcgaagaaaactacctggaattcttgttctccaaagatatggaattatcccagcaacagccatccttcgctgctctgtcctgaggaccctcaggtgtggcccatccagcccctcagtgtttacctctgtcctaaggactctcaggtgtgggcggtccagccccttagtgtttccctctgttttggagatcctcaggtatggtcaatcctattagtgttttcctttgtactggggatgctcaggtgtgatctatccatcttctcagtgttttacctctttcctggagaccctcaggttccatccatccatccaattggtttttacctctgtcctggagaccctgaggtgtggtctatccatcccattagtgtttacctctgtcctggggaccctcagttgtggtcaatccatcccattagtgtttttccattgtcctcgagactctcaggtgtagtctatccgtcccattagtgtttacatctatcctgggaacgcttaggtgtggtctatccatttctttagtgtttacctctgccttgggcccctcagatgtggtcgatccccaaagtgttttatctctattctggggaatctcagttgtggttcatccatccgcttagtgtttacctctgtcctggggaccctgaggtgtggcccatccccttattgtttacctttgtcctgggggccctcagatatggcccatccatcccctgagtgttttacctcggtcctcgagaccctcaggtgtggtctattaatttagtgtttaccgcaccctggggactcacaggtttggtctatcccaatagtttttttatgtcggccctgggaactctcagatgtggcccatccatcccgtcagtgtttccctctgtcctggggtcactcaggtgtggtccatccaccccctcagtgtttccctcggtcctgaggatgctcaggtgtggcccatccagcccctcagtgttttcctcggtcctggggatgctcaagtgtggtccatccatcccctcagtgtttccctcggtcctgaggatgctcaggtgtggcccatccagcccctcagtgttttcctcggtcctggggatgctcaggtgtggtccatccagcccctcagtgtttccctcggtcctgaggatgctcaggtgtggcccatccctcccctcagtgttttcctcggtcctggggatgctcagttgtggcccatccatcccctcagtgttttcctcggtcctgaggatgctcaggtgtggcccatccatcccctcagtgttttcctcggtcctgaggatgctcaggtgtggcccatccatcccctcagtgttttcctctgtcctggggatgcccatccccttagtgttttacctccaactttctctattttttgtttccagtcttcccacacaggttgagagaggaggggatccaattgcctgtgaggaggacacggctcctgggtggaccctgcagattgtgaagttcaagtcacagctcctgggaaggtctctgtgtgtaaagatcatgggggtgagacagattcagggaccacactctgctctgctctgtacctctgagtgtcgatccagctgccttgtgaccaggacacttagaagaagcatggaccctgcaagaggagacagggtatcaccagtctcctgggacctccgcctcccgggatggtctccatctcctgacctcgtgatccgcctgcctctgtctcccaaagtgctgggattacaggcctgagccaccgcgcccggccagatgggctcaaggacagcttgcctgactgcagccataagggtgaagcctcttcagggtcttactctgtcacccaggctagagtgcagtcagtgtgccactgtggctcaacctccgtctcctgggctcaatcaatcgttccacctcggcctcccaaagtgctgggactacaggcgtgagccactgcgcccggcctccccaaggagcacttttacagccaaacccacctctctcagctctcactcctgcttatatccctgcaacccaggagactgttttctatttgtaaaattttgccatttcaagacagttgtattaatgaaatcactgtgtgtgtc

SEQ ID NO: 61 - DNA, 1900 bp, Homo sapiens
tgaaacagtgctctaaatggcatctttgcaattgattatggacaattaagtacttagaagaaggaatatcaagccaatcagaaattaagagaaagctgatttgaaattatgattgaaatgggatatgtatgagtatgtgtgctttaagttttttattatgtagcagaaaaagctaatatcttgagttgtagggactcatgtgggcacaggtttcccgggacgtcccgaccacctgaatggccgggtgccctgatttcagctgaatgcccctccccgcatccttctccataggcccgtcatggaagtgccctgtgacaagcccttctcggaggagcaagctcgcctctacctgcgggacgtcatcctgggcctcgagtactgtgagtgcggggcagcttgcccactggggctggggctaggggatctggcaggcggcagagcccaggctgagcagactctgagcagctcccgtcagtcagagctgacctgccaatcagcttcagtgggagtggggcatgcacgtgtggcggggccaaaggcctttttgtggggtggggcgggcggtggactccactgggcatgtgccagatccttcgtcgtgtctggtcctgtgggtctgagtcctggctgttctgtatctttcttctgctgagttcttagcctagcttagcgttgccacggggcttcaagagatgcgggaaggaagggatttatgtccagctgctggggagagtctgtcctggcatggggccggggcatggtggcagggtggatttacctgtgaggggccctagtctgataagagctcaggagggtgatgtgagcttggcctctgtctcatttcattcattagctacattcacttgcctgggggcataggggtgaaagacccagacccgagttcacggcctagtgggagggacaggaatctaggcaggcagataatacagcgtggtgcctgccaaggctggggagcctagaggctgtaggagtgccggggggctggggaagtctccctgaagaggctacttatgattcgggtcctgagggatgagtagacttccctgctcaggttttgagggatgggcgtggaagacgatgtgcctggcataggcgtgtactctgagtctggggagaagtggagtctggctgaagcctccagtgggcagaggagggccgtggttagtgaaagatgatgctggaaacactgtccgggccacagcatgagggctgggaatccctcccctgaggtctttgctgactgcatcctgccagctctgtgaggccctgagagctttaagcatggggaggggcgtgatgggatttgtgcctgagaaagctctgtctggcagctgtgtggtggctggattggagtgtgtcatcggagggtgagaggcagccagctggccagggaggaggctgtttctgcagcccaagtgacagatggtgaggcctggattaaggcagtggcagcaggatggggataggaaggaggtggggtggtcagcatggagtgacttgccggtctggggagaggagagcccctagacacctagggtcctggcgtgggttggggaccaggggagatgcccatctctaaaatcttagcttgggccaggcgcaggggctcatgcctgtaatcccagcactttgggaggccgaggtgggtagatcacctgaggtcaggggtttgagaccagcctggccaacgtggcaaaagcctgtctctactacaaatacaaaaattagccttgtgtggtggtgggcacctgtaatcccagctactcgggaggctgaggcaggagaatcgcttgaacctgggaggtggaggttgcagtgagccgagatcacgccattgcactccagcctgggtgacaagagtgaaactccatctcaaaat

SEQ ID NO: 62 - DNA, 4081 bp, Homo sapiens
atacatgctcacccatacacctgctcacacacacatgctcacccataaacatgctcacacacacacatgctcatacacgtttacccatacacatgctcacacgattacatacacctgctcacacacacacgtgctcacaaattacatacacatgctcacacatacatgctcacaaacacgactacatacacctactcacacacacatgctcacacaattacatacaccgactcacgcacacatgctcacacaattacatacacctgctcacccatacacacatgctcacatgattacacatgctcccacatacatacatgctcacacacattacatacacatgctcacacacgctcacacatacacacgagtacatacacgctgacacatgctcacacacacgattacatacacatgctcacacatacacatgctcacccacacacacgctcacacatacactcacacacacctgctcacacatacccatacatgctcacccatacacatgctcacacacacatgctcacccatacacatgctcacacacatgctcacccatacacatgctcacacacacatgctcatacacgtttacccatacacatgctcacacacgattacatacacctcccacatacacgattacatgcacctgctcacacacacacatgctcacaaattacatacacatgctcacacatacacatacatgctcacaaacatgattacatacacctactcacacacacatgctcacacaattacatacgcctactcacacacacatgctcacacaaattacatacacctgctcatacacacacacatgctcacacgattacatacacatgctcccacatgctcacctatacacatgctcacatacacacgagtacatacacatgctgacacatgctcacacacacgattacatacacatgctcacacacattcacattcacatgttcacgcacacatgctcacatgctcacccatacatacacacgattacatacacatgctcatacatacacgattacatacacatgctcacacaggctcatacacatgctcttacccatacatgctcacacacacacatgctcacacacaagcacacatgatcacacaggcacacatgatcacacatacacaggcttgcacaagtttacacacatactcatacatgctcacacaggcatacacacatgctcacatatgcacacactctcacatgtataggcacacacaggattacacatgctcacacatgtgcttatacacatacacccatgcacatgttcacacgtttatacacacatatcacacacacacccccatatactcacacacacgctgccacatgctctgtctctcacacatacctgacagttccgtgctgtcccgtttccctcggggtcttcccttcggaggctgcagctcgtctgagcatccagccttgaaggcactgagcaggcaaggaggtagggcttttctctggggaggcctgcgttgcagtacggcttcctcatccccaccaagggcagggaagggcaggagtctaggacttacctgaatacagaacacctgggagcgtctgtctcgtgtcggccttgtgctgagcatgtgcagaccaggacttgcgccctaagccacttgttggcccctccctcagaatcatgtgcagtggcttggcctcacccacagacaagggaggcggtaagaaatgccataaagagacgctgagcctgaaggacagcaccttacacctgtgcagtccacacttgcctttccaattcgccgttgcatttcatcctcacgtcccttgacaccaaggcccagaagcggagaaggcgcacgtcgcataatgctgagttggaagggagtttgcttttcatctcttgttactgccccgtgaacaactttccaagtgacacattttgtaaaaggagagaacctgcatggaactggctgctctggggctgtctccctgcccgaggctgcttcatgctgagttactgccaggactcctaactgtcttctctctgcgctttctccaggattacggtggctacctgagcacctacatcctcccagcaaagggagaaaatcaaggccagacattcacctgcggctctgctctctctccaataacagacttcaaactctatgcctctgcgttttccgagaggtacttgggcctccatggacttgacaacagagcatacgagatgaccaaggtagcccatcgagtctccgcgctggaagaacagcagttcctgatcattcatcccactgccgatgaaaaaattcatttccagcacacagcagaactcattacacaactaattaggggaaaggctaattacagcttacaggtacagtacgcatgttactctgttttgaacctggagcaagacattcctttcatggagaaagacctgacgggtgttcagggccttctactgcagcagacacgcctgtgctgtggtggtcggtgttgagcaaggtcccagcaggttggaaaatcagcacatgctcaacgttttcttataattaatgatagctccgctctgtacttcagcccggtttaaatccctttaggacaaccatctccccgtactcccaccccagccctgctcccctcctccgggcagtgagaagaaccaagccagcacccaccctgcccagcagtgtggctggggctatcccgctgcggagagtgggactgttgttctgggttggtgagagtggtgctggtgggccctgagccttgccccactgcttccctctgaccaacaccacatgttactacgcactagcaggatgtcctggggccatctgtagctaggcagtagtgaaagaggggtacccttcccagaactgaactcactttcccacaaccaacccgtggcccgtccacaacagcatcaagtgctgacccagcagcctcaaacctgggctcttcccagtaatgcacagggatgtctctggaaacttctgccatttccttcctgccttctgctcctttggtggaacaggtatgacccaatggtctcttcaggtccaacatgaatgaatgggagagctccttggggacagatgacaggcaggcaccctgcctccctcagagagctcttgccctgggctgatcactgccttggcctccagcatccctgcctgtgggagggagggaccacctgtgggcttgatcaggcagggagagctccagccagaagggagttggaccccagtgtggatgaagaggggcagaaggacggggttacaccacacttgagttcccttgtgaaagacgttcagatttcagactttttcaaagtaagtgtggcagttgcatggcagtgttaagcacactgaccatggacgctccaaaggtccatgtgtatgtgttcatgtgggcaactccccaagatatggggcaagctgaaccccccaggtacagagcagcctgcatcgctgcaggctccatgggtatcagggagcaggacccacccagggacacacatgtgggcacagcaaaggccttcacagacaccccatgcatctggagccaggcccagccccaggtaagagcacgggagacgggggcctgaggcaggaggagaaagcttcctgcccatatcctcttgtactacttgatgttttaatgacatatcatagcctaatgacagcattaataaatacttcaaaataaagatgaatttcaccctccaaaaacatacaaagaaggcaggaagaggcagtctagtgtcatagaaagatgtaggttttgggccagatgcagtggctcacacctgtagtccctgcactttgggaggctgaggtgcggggattgccttgagctcaggagtttgagaccagcctgggcaacagagcgagaccccatctctacaaaaagtttttagaaaatagccggacgtagtcatgtgtgcctgtggtcccagctgcacgggaggctgaggtgggagagtcacttgagcccaggaggttgaggctgcagtgagctatggtaacaccatggcattccagcctgggcgacagagtgagaccctgtctg

SEQ ID NO: 63 - DNA, 3600 bp, Homo sapiens
ctgaggacttcgtggggctgcacatgcatgggttccggcgcaccctgcggaatgcagtcctcacccagaagcaggacagcctgcgcatcatcagcatccagcccgtggcaggcaccaaccaactggacatgctgtttgcggtggagatgcacagcagcgagttctacaagccagcctacctgatccagaagctgtccaatgctagaagacacctggagaatatcatgcgcatctcagccatcttggagaagaactgctcagggctggactgtcaggaacagcattgtgagcaaggcttgtcactcgattcccacgcgctcatgacctacagcacggctcgcatcagctttgtgtgtccgcgtttctacaggaacgtgcgttgcacctgcaatggaggactgtgtccggggtccaacgatccttgtgtggagaagccgtgtccaggggacatgcagtgtgtcggttatgaagccagcaggagaccgttcctctgccagtgtccaccagggaagctcggagagtgctcagggcacacttctctcagctttgctggaaacagttacatcaaatatcggctttctgaaaatagcaaagaagaggatttcaaactagctctgcgtcttcgaacactgcaaagcaatgggattataatgtacaccagagcaaatccctgcataattctgaagattgtggatggcaagctgtggttccagctggactgcggcagcggccctggaatcttgggcatctcgggccgtgctgtcaacgacgggagctggcactcggtcttcctggagctcaaccgcaacttcacgagcctgtccctggatgacagctacgtggagcggcgccgggcgcccctctacttccagacgctgagcactgagagtagcatctacttcggcgccctggtgcaagcggataacatccgcagcctgactgacacgcgggtcacgcaggtgctcagcggcttccagggctgcctggactcggtgatactgaataacaatgagctgccgctgcagaacaagcgcagcagcttcgcggaggtggtgggcctgacggagctgaagctgggctgcgtgctctatcccgacgcctgcaagcgcagcccgtgccagcacgggggcagctgcactggcctgccatcggggggctatcagtgtacctgtctctcacagtttacggggagaaactgtgaatctgagattacagcctgcttcccaaacccctgccggaatggaggatcctgcgatccaataggaaacactttcatctgcaattgtaaagctgggctcactggagtcacgtgtgaggaggacatcaatgagtgcgaacgagaggagtgtgagaacggaggctcctgcgtgaacgtgttcggctccttcctctgcaactgcacgccgggctacgtgggccagtactgcgggctgcgccccgtggtggtacccaatatccaggctggccactcctacgtggggaaggaggagctcatcggcatcgccgtggtcctcttcgtcatcttcatcctggtggttctcttcatagtcttccgcaagaaggtcttccgcaagaactactcccgcaacaacatcacgctagtgcaggacccggccaccgccgccctgcttaacaagagcaatggcatcccgttccggaacctgcgcggcagtggggacggccgcaacgtctaccaggaggtggggcccccgcaggtccccgtgcgccccatggcctacacaccctgcttccagagtgactccaggagcaacctggataagatcgtggacgggctgggaggcgagcaccaggaaatgaccacgtttcaccctgagtcgccccgcatcctgacagcccggcggggcgtggtcgtgtgcagtgtggcccccaacctccccgccgtgtcaccctgccgctccgactgcgactccatccggaagaatggctgggacgcgggaactgagaacaaaggggttgatgacccgggagaagtgacctgctttgcaggtagtaataaaggcagcaactctgaagttcagtccctcagctccttccagtcagattctggtgacgacaatgcctatcactgggacacctctgattggatgccaggggcccgcctgtcggacatagaggaagtgcccaactatgagaaccaggatggagggtctgcacaccaggggagcacacgggagctggagagcgattactacctgggtggttatgacattgacagtgaatacccaccccctcatgaagaggagttcttgagtcaggaccagctgcctcctcctctcccagaggacttcccagaccaatatgaggccctgccaccctcccagcctgtctccctggccagcacactgagcccagactgcaggagaaggccccagtttcatcctagccagtatctccctcctcacccattccccaacgaaacggatttggtgggcccgcctgccagctgtgaatttagtacttttgctgtgagcatgaaccagggcacagagcccacaggcccagcagacagcgtgtctctgtccttgcacaattccagaggcacctcatcctcggatgtgtctgccaactgcggctttgacgattccgaagtagccatgagtgactacgagagcgtgggagagctcagcctcgccagccttcacattccctttgtggaggctcagcatcagactcaagtgtagacatcacatcttgggtacttcaccctgtttgttacagaaaagtggaagcagattggctgggcttctgtcccagtggagcattgtctgtggaatgagaagggaatactgtattttttcactagaaacttcttcacaagtcatactgtcccaacaagcaagcttgattccagttgggtgaaaatgaaaggctcagaaattgtttttgagaggtgactggtaatccttgatgtaggtacctatgttcacagctaaaaatgcaaagagggaaaaattatttcacccactaagttatacagccagtcttgtatggctttgtgcagtattgtgccctggaaagtgctacagcatcagtccttgcagtattaaaaactggcaacaatcaaagaggcattgttgcatgtaattttgagccaatgaaatgaaaatagtagtaatgattgttggaaaagttagtctcttaggcgaaagagaagagaaacaaatattattaaacaaaccagaaaatgggctgaagccttttaaatcaactctatttttttgataagctgcccaattttcagctataaaattaggcttgaataacatgtttagtatgctcagttatttctgtttgtttgtgttaagcatccaatctaatatagttgggttttatgatcttcaagaaaggtatcaatgaagagcaacatgaggctttttgggttccatttggtgggtgggggaggaagttaaagttgtttgaacattagaaagaatgtgattatctggttggttttgtgttttctggtaaatattccagttggtaaatctaacattgctacagaagttggctttgttcatatagcttctctacaattagatatttttagaagtttaagcaaaactcacaaattcagggggg

SEQ ID NO: 64 - DNA, 4387 bp, Homo sapiens
aaactttgactcaagatcattccaatacagtgagatatagaaatgcacaaagagaagacagtgaaataaagatgattcaggaaaaaaaggagcaagcagagatgaaaaggaaagtgcaagaagaggaactcagagagaaccacccatacttcgataagccactgttcattgtcgggcgagaacacaggttcagaaacttttgccgggtggtggtccgagcacgcttcaacgcatctaaaacagaccctgtcacaggagctgtgaaaaatacaaagtaccatcaactttatgatttgctgggattggtcacttacctggactgggtcatgatcatcgtaaccatctgctcttgcatttccatgatgtttgagtccccgtttcgaagagtcatgcatgcacctactttgcagattgctgagtatgtgtttgtgatattcatgagcattgagcttaatctgaagattatggcagatggcttatttttcactccaactgctgtcatcagggacttcggtggagtaatggacatatttatatatcttgtgagcttgatatttctttgttggatgcctcaaaatgtacctgctgaatcgggagctcagcttctaatggtccttcggtgcctgagacctctgcgcatattcaaactggtgccccagatgaggaaagttgttcgagaacttttcagcggcttcaaggaaatttttttggtctccattcttttgctgacattaatgctcgtttttgcaagctttggagttcagctttttgctggaaaactggccaagtgcaatgatcccaacattattagaagggaagattgcaatggcatattcagaattaatgtcagtgtgtcaaagaatttaaatttaaaattgaggcctggagagaaaaaacctggattttgggtgccccgtgtttgggcgaatcctcggaactttaatttcgacaatgtgggaaacgctatgctggcgttgtttgaagttctctccttgaaaggctgggtggaagtgagagatgttattattcatcgtgtggggccgatccatggaatctatattcatgtttttgtattcctgggttgcatgattggactgaccctttttgttggagtagttattgctaatttcaatgaaaacaaggggacggctttgctgaccgtcgatcagagaagatgggaagacctgaagagccgactgaagatcgcacagcctcttcatctcccgcctcgcccggataatgatggttttagagctaaaatgtatgacataacccagcatccattttttaagaggacaatcgcattactcgtcctggcccagtcggtgttgctctctgtcaagtgggacgtcgaggacccggtgaccgtacctttggcaacaatgtcagttgttttcaccttcatctttgttctggaggttaccatgaagatcatagcaatgtcgcctgctggcttctggcaaagcagaagaaaccgatacgatctcctggtgacgtcgcttggcgttgtatgggtggtgcttcactttgccctcctgaatgcatatacttacatgatgggcgcttgtgtgattgtatttaggtttttctccatctgtggaaaacatgtaacgctaaagatgctcctcttgacagtggtcgtcagcatgtacaagagcttctttatcatagtaggcatgtttctcttgctgctgtgttacgcttttgctggagttgttttatttggtactgtgaaatatggggagaatattaacaggcatgcaaatttttcttcggctggaaaagctattaccgtactgttccgaattgtcacaggtgaagactggaacaagattatgcgtgactgtatggttcagcctccgttttgtactccagatgaatttacatactgggcaacagactgtggaaattatgctggggcacttatgtatttctgttcattttatgtcatcattgcctacatcatgctaaatctgcttgtagccataattgtggagaatttctccttgttttattccactgaggaggaccagcttttaagttacaatgatcttcgccactttcaaatcatatggaacatggtggatgataaaagagagggggtgatccccacgttccgcgtcaagttcctgctgcggctactgcgtgggaggctggaggtggacctggacaaggacaagctcctgtttaagcacatgtgctacgaaatggagaggctccacaatggcggcgacgtcaccttccatgatgtcctgagcatgctttcataccggtccgtggacatccggaagagcttgcagctggaggaactcctggcgagggagcagctggagtacaccatagaggaggaggtggccaagcagaccatccgcatgtggctcaagaagtgcctgaagcgcatcagagctaaacagcagcagtcgtgcagtatcatccacagcctgagagagagtcagcagcaagagctgagccggtttctgaacccgcccagcatcgagaccacccagcccagtgaggacacgaatgccaacagtcaggacaacagcatgcaacctgagacaagcagccagcagcagctcctgagccccacgctgtcggatcgaggaggaagtcggcaagatgcagccgacgcagggaaaccccagaggaaatttgggcagtggcgtctgccctcagccccaaaaccaataagccattcagtgtcctcagtcaacttacggtttggaggaaggacaaccatgaaatctgtcgtgtgcaaaatgaaccccatgactgacgcggcttcctgcggttctgaagttaagaagtggtggacccggcagctgactgtggagagcgacgaaagtggggatgaccttctggatatttaggtggatgtcaatgtagatgaatttctagtggtggaaaccgttttctaataatgtccttgattgtccagtgagcaatctgtaattgatctataactgaattccagcttgtcacaagatgtttataaattgattttcatcctgccacagaaaggcataagctgcatgtatgatgggttactatcaatcattgctcaaaaaaatttttgtataatgacagtactgataatattagaaatgataccgcaagcaaatgtatatcacttaaaaatgtcatatattctgtctgcgtaaactaaggtatatattcatatgtgctctaatgcagtattatcaccgccccgcaaaagagtgctaagcccaaagtggctgatatttagggtacaggggttatagctttagttcacatctttcccatttccactagaaatatttctcttgagagaatttattatttatgattgatctgaaagggtcagcactgaacttatgctaaaatgatagtagttttacaaactacagattctgaattttaaaaagtatcttctttttctcgtgttatatttttaaatatacacaagacatttggtgaccagaacaagttgatttctgtcctcagttatgttaatgaaactgttgcctccttctaagaaaattgtgtgtgcaagcaccaggcaaagaaatggactcaggatgcttagcggtttaaaacaaacctgtagataaatcacttgagtgacatagttgcgcaaagatgttaagtttcttaagaaaccttttaataactgagtttagcaaaaagaataaaactatatagctcaatttatttaaaaaaatctttgcatgtgtgatgttatcattggcttcatttcttacccaaggtatgtctgttttgccataaatcagcagagtcatttcattctgggtgatcctaacacaccattgctacgttagatttgaaatgacatctctgttaaaagaatcttctatggaaataatggtgccctgcaaaatcttcctttgaactcacaggttagggatcacacaacttacttaatcgttttttgtttttgttttttttccttatatgtcaatggcccatgtcctccgggaaaattagaaaagcaaaatgattacaaagtgctgttagatttcttgtgctgggccagccaagtagaagtggacttgacttggacctttaactattttattacagattggacatttgctgttcagatgttttttaacagagggattatctcagaatcctgtgacctccaggttgttttataatctatttttctctatttaacattcctcagatagataggcaaataggacattccttctgtgtcacagaagtatcgtggtagtggcagtctacagtttatatgattcattgtaactatgagataaagaacaaccagtcatgtggccaaaaggattagatttgatttgatgttcacttggagtttactttttgtacatacaagataaaataaatattggatttgtaaaat

SEQ ID NO: 65 - DNA, 3593 bp, Homo sapiens
gggcctcggtggcgaggtggtcgttctggcaaaggcgcacactgactttgacgtccaggccttccgggtcaccttttttgatgaaaccaggtgatgcagccgcccatccacgatgttgggagagggtctgggcccggagtgggggccgaggcccgagcacctccccctggcttggctgtgcgtctctgcgtctcccggtgggtcagggcgctgcgagctgcggcagtgctcagtcctcattccttgcaggatggcgtcgtgcgggcagggcagtgtgcggctctggcggctgcgtggcggggtgctgcgttcctgccccgtggacttaggggagcaccacgcgctgcagttcaccgacctggccttcaagcaggcccgggacggctgcccggagccctcggctgccatgctcttcgtgtgcagccgcagtggccacatcttggagattgactgtcagcgcatggtcgtgcggcatgcccgccgcctgctccccacacggactccaggcggtccccacccacagaagcagaccttcagctcaggccccggcattgccatcagcagcctcagcgtctccccggccatgtgtgctgtgggctctgaggacggcttcttgcggctctggcccctggacttctcctcggtgctcctggaggcagagcacgagggccccgtcagctcagtctgtgtcagccccgatggcctccgtgtgctgtctgccacctcctcgggccacctgggcttcctggacacgctgtcccgggtgtaccacatgctggctcgctcccacaccgccccggtgttggccctcgccatggagcagaggcggggacagctggccaccgtgtcccaggaccgtaccgtccgcatctgggacctggccaccctgcagcagctatacgacttcacatcatcagaggacgccccgtgcgctgtcaccttccaccccacaaggccaacctttttctgtggctttagcagtggggccgtgcgctccttcagcctggaggccgctgaggtcctggtggaacacacgtgccaccgaggagctgtcaccggcctgaccgccacccctgacggccgcctgctcttcagctcctgctcccagggctccctggcccagtacagctgtgcggacccccagtggcatgtcctccgagtggcagcggacatggtatgcccggatgcccccgcgagccccagcgccctggcagtcagcagggatggccgcctgctggcctttgtgggaccctccaggtgcacagtgacagtcatgggctcggcctcccttgatgagctgctgcgagttgacatcggcactctggacctggccagcagccgcctggactcagccatggctgtgtgctttggccctgcagctctgggccacctgctggtgtccacctcgtccaacagagtcgtggtgctggatgctgtgtcgggccgcatcatccgggagctgcccggtgtccaccctgagccctgcccctccttgacgctcagtgaggacgcccgcttcctgctgattgccgccggccggaccatcaaggtgtgggactacgccacacaggccagcccaggcccccaggtgtacatcggccactcggaacccgtgcaggctgtggccttctctcctgaccagcagcaggtcctcagcgcaggggacgccgtcttcctctgggatgtcctggcccctactgagagcgaccaaagcttccccggggcccccccagcctgcaagacaggcccgggcgcaggaccgctggaggacgcagcgtccagggccagcgagctcccccggcagcaggtccccaagccatgtcaggcatctccaccacggctgggcgtctgtgccaggcctcccgaaggtggcgatggcgccagggacaccaggaattcgggggccccacgcaccacctacctggcttcctgcaaggccttcacgcctgccagggtcagctgcagcccccactctgccaagggcacttgcccgcctcccgccagcggtgggtggctgcgtctgaaggctgtcgtcggttacagcgggaatgggcgggccaacatggtctggaggccggacacaggcttctttgcctacacgtgcggccgcctggtggtggtggaggacctgcactctggcgcccagcagcactggtccggccactctgcggagatctccacgctggccctcagccacagtgcccaggtcctggcctctgcctcgggccgaagcagcacgaccgcccattgtcagatccgcgtctgggacgtgtctggcggcctctgccagcatctcattttcccccatagcaccaccgtgctggccctggccttctcaccagatgacaggcttcttgtcacactgggggaccacgatggccgcaccctcgccctgtggggcacggccacctatgacctcgtgtcctccacccgcctcccggagccggtgcatggtgtggccttcaacccctgggacgccggcgagctcacctgtgtgggccagggcactgtcaccttctggctccttcagcagcgtggggcagacatcagccttcaggtgcgtcgagagccagtcccagaggcagtgggggctggagagctgacctcgctctgctacggggcacctcccctgctctattgtggcaccagctctggccaggtctgtgtctgggacacgcgtgccggccgctgcttcttgtcctgggaggcggatgacggtggcattgggctgttgctgttctcgggttctcgattggtcagcggcagcagcacggggcggctgcgcctgtgggccgtgggggctgtgtcggagctgaggtgcaagggctcaggcgccagttctgtgttcatggaacacgagctggtgctggacggggctgtggtgagtgccagcttcgatgacagcgtggacatgggcgtcgtgggcaccacggcgggcacgctgtggtttgtcagctgggccgagggcaccagcacacgtctcatcagtggccacaggagcaaggtgagggacttccagcctgggcagaggcggggcagccgaacctggtgccctccctgcctgccggctccatctccaccagcccagatgattccaagtcctgccgtcactggctcgcagcggccgccttggggttcccagcggggaagtcttgggtgtgcacgtcccctcaaagccgtcccggttgtgtctgcacaagcgagccgcctggcaggccttgcaggtcttctcaaactgtcctttccctgctattgctttgcgtttttttgtttgtttgttttttgttttttgtaattgtcaaagaaatcacatcagtccgggcgtggtggttcatgcctgtgatcccagcactctgggaggccaaggcaggtggatcacctggggtcaggagttcgagaccagcctggtcggcatggcgaagtcccgtctctgctgaaaatacaaaaattagccgggcctcttgatgtatacctgtagtcccagctactctggaggctgagacaagagagtcgcttgaacccgggaggcggaggttgcagtgagccaggattgcgccgctgcgctccagcctgggcgacagagactccatctc

SEQ ID NO: 66 - DNA, 4596 bp, Homo sapiens
agcggcgaggacccgggtctggcgctgtgggccgggagccgtggggcggcatggaggggctggttgtcgccgccggcggggacgtctccctgcacaacttcagcgcgaggctgtgggagcagctggtccacttccacgtcatgcggctgacggactcgctgttcctgtgggtgggggccacgccgcacctgcgcaacctcgccgtggccatgtgcagccgctacgactccatccccgtgtctacctccctccttggagacacttccgacacgacctctactggccttgcccagcgcctaggtatgtacccacagctggcgctgcatggccagccaggtggggcccactctttaatggaaccatgaagcaagtcccttcggaagtaaagcatctttatgctaagaaccgtcacctcattgctgctgggaagcacagacctttgcacgttgggtcttatttaaggggcacattccatgctcgcctgtcatcaccaccgtcccagggctggcctgttcccaaaggactcccacctcgtccttgggtgtgtccttgagtccatgagctgatttagttgccttccgtaagtgcatcacctcctcctgggaggagagcatgagaagtgcccacagcccctgtgggtggtggctcaaggtagcctcccgggccttaggaggagtcagtgcagctggtggagcaggtgtcacctctgtgcaggaaggactgtcctcactcagtgtgataccgttcagggctcggagggaagactggcctggcctgtgagtgtggcgtagagcggggattaagcaaacgtcatgaggctgaatgctccacttctcccacaccccaacacacttcctgtgggccaggtaaggcttccatgtgctctgcaacccccagccccagtgcctgtggccagtgtgcacaggatgcctgtctcctgcccaggcctggcgttctccagtaggcccagctgcttccgctctggagtcttctctgtgtctcaggcacaggacctggtacctgacaagcaggaacctctgtgtcagtcacactgaggcaaatgcacacgaatagcatggcacgtggcccagggggaaggcagggcagggtggagtgtcaccagcaggcccatgacagtatgtggataggacaggtcagggagggcacaggtcagcatttcaggaactcgcagtattctttttccctcccttggaggtggggacctgacttgtaagttaatttggtaatttttaactaggaagtaaatttaaaatttacagaaaagttgcaaagaagatagaatttctgcttagcttttgccccaatttcccacttgccacccttccctctttgtgtttgtatctttttttttctgagccacatgaaagtaaagccgccttttgtgtctgtgtcactctgtgtgtgtgactgtgtaaggggtagcacacttacatggaacaggttactgcgtgtgggagaaggctcaggaaggtattcatatttatacagacggaaagctgggtggggttgcggacacactcccatagagaaggtggtgtgagcttgtctggcaggccgtgaataactttcatatcaataaggtaaattagtctccagaatatttgcgagatggaggcctagtatctatatgcaaaaaagaggggttcccagtatctcgactgtctcgacaagtcacgggtgtgccgtggcttccagcgtctcttaaaggactggtgctgcagatctcggaccaagaaggttttccagcaaagtcccatgctttgccagttgccttgagcctgggtctgggccctcaagttgaatattaatgcactataatgaaaagggagaggtgtcctgaatcagtatcttatatgagagatgaaagcaggtagggaaagagaaggcctggggggttctcagtagctctggaagcatcgcaggagttggtgtggccaaggggacccaacctcctatggccctggaggggcacagcttgggtctgaggggctcagtgcctccagacacagcgttgttcctcagaaatcctgtctctgcagttagaacagttggaataccaggggggcccccttggggtaaagggggatgttcctgcccctgggatatagggcagggtgtgacttacaggctcctcctaggcagccttggtgagccccagcttcttaccacactgcctgctttagatcaccctctacatgagtggtcccagcctgcctaacacagctaggaaaggatgaggttggtccctaatggtgggggaagcctaagaggcttcctcactccccgcagggctgagcagataactgggcacaactctccgcctcaggggcacactgcacccagcacactggtgggaggctctgtgctaagtactgtaagctgttctttaaacaccagctcttggaataaccgaacagctgcctttgtccagacacattccttttttttttttaataaaaaaacagctttaccgagacgtaaacacatgtcatacaattcagcagctgtcctcaggcagaggctgtgcttgccgccgccttgcttttccataggtgcgttggctgcctcgtaaggacagtcagtgagttaatacccaagacctttccagccctaaaaatcacgcagccttgtacagcggaaaaacaggcttttggggtcctgggctctccctttcctcaatttccaaacaaagctgggagaggtttccaggccacggtggggactgggcctgctcctgcacctgtgcccctgagccacactgcctctcagggttcttggtgggaccatagctcagatggcagcaactgaaaggacagaactgctgcccagatgagatcccatgatgtgtgttctaaatcggcctttagtaatggtgcaggtggcctggtgccctcagcctcaccgcaccacccttttgccttttggtgatgaggctaagtacatgcttgccatatgttgaggtgggggcgggtcagtgcctctccaggggtgagtagttctgcactggccctgcgtatgggtgaggctaaaggaggaggccgcacagtggggcaggcaacatccaactgctttagcctttttgcccacgtattttcaggatattggctttcagattgcaggtatatgactctgcttgatttttgcagttggcccgatgtgcacctcagccattttctattgattctgtagaaagggactcaaacttacattcagtagaaaattacgtgtgtgtccatatgcctatctgtgcgcacacacacacacacaaatatatttgtgtgtatacacatatatgcaaatgcatggaaatgtaggagggagggaagtggaactggttggggtggggtgctgaaggagaactttaatattttattttaaatactttattattttttttttgagacggagtcttgctctatcgcccaggctggagtgcagtggcgcgatctcggctcactgcaagctccgcctcccgggttcacgccattctcctgcctcagcctcctgagtagctgggactacaggcgcccgccaccacgcccggctaattttttgtatttttagtagagacggggtttcaacgtgttagccaggatggtctcgatctcctgaccttatgatccacccgtctcggcctcccaaagtgctgggattatgggcgtgagccaccgctcccggccattttttgtgtttaaattttttttttttttttaaatcaaaacaccagaaacccctctgtgtagggcagaggttcttaagcagtgcggggcacctgcaggatctgttccagcagacagctggccccaaatcctggctttctgggtcaagagggctgggtggggcccaggagctgcctctcgaacaagttccagggaggctgctgaggtggggcctgcccttcagaagcccgggtctggtggagagactgggagaggcctgagtgactcgtctgcatttgcagcacctgtctgaagagaggcatggagattagagctttcttctctccctacaaccccatcctctttctgagcatttcccagctgcacgtggctgtgaggaacacggggcctgcagtatttcaggagtggctgtatcaatgtgttttctctttttagccaggaagaccaacaaacaggtgtttgtcagctataaccttcagaacacagacagtaacttcgcattacttgtagaaaacaggatcaaggaagagatggaggctttccccgaaaagttctagctgagtggcagaagtgagaatttgtaaacttatgtacaatgtacgtgtaaataaatggattgaatttcagtttgtcatcaggccgcgctcccgttttgtttttaaggggttaatcttttgagcttccttctcagcagtgtgtgggccaaaaggctcatactgacccacctggtgaaggagaggcaaagtgggcagtatatacttcctcatttggctgtgagtgatagagggatgaaatgggatttttgttgggattgaagactgtaatctaagagtttcaatcagacatgactgtaacgtgcatcctcaattagaattaaagtgatatataaatatgc

SEQ ID NO: 67 - DNA, 5046 bp, Homo sapiens
gattttctctggcttgtgtttctgacagtgttagggcctcctaaagcttcctaggcataggggtatgcctggcttgaattttaaccagggactcagtccagattatggggagacccgaggaaaagtgctgggtagaagaccaaagaacaaagaccctcagagtgaaaagggcctctagacatcatcccttccaacatctcccagtgcctggagccctcctgcgccacgtgtgtcagatggccggagagcctctgctcgaatacctctttgatggggagctcaactttttaaaagccaccagttgcatcgtaagccaactcttgccattagaagatccttcttatgccagacggaaaaccgctctctggaactttctcccctggctcattctgacccctggagcaccagggcatacgtctgctctcttgcttacacggcagcccttcagacatttgtgacagctctgtgtcctgctaagatgtctcttctctgagctgaagatcccttgactctttgggcccactgggtgtgagctgggggtctcagtcctcagggcctgtcttttctctcccccatcaccgctcaaggtcgcacatgggcagtgcagcagacgtgcggttctccctgggcacaaccacacacgcacccccaggcgtgcatcgccgctactcggcattgagggaagagtctgccaaggactgggagacttctccactgcctgggatgctggccccggcagctggccctgcctttgacagtgaccctgagatctccgacgtggatgaggatgagccagggggtctggtgggctctgcggatgttgtctcccccagcggccactcagatgcccagaccctggccatgatgctgcaggagcagctggatgccatcaatgaggaaatcaggatgattcaggaagagaaggagtccacggagctccgcgcggaggagattgagacgcgtgtaaccagtggcagcatggaagccctaaacctgaagcagctgcgcaagcgtggttccatccccacctctctgacggccctgtccctggccagcgcgtccccaccactcagcggccgctccacacctaagctcacctcccgcagtgctgcccaggacctggaccgaatgggggtcatgaccctgcccagtgacttaagaaagcataggaggaagctgctgtcgccagtgtctcgggaagagaaccgagaggataaagccaccataaaatgtgagacttctcctccttcctcacccaggacgctgcggctagagaagcttggccacccagccctgagccaggaagaaggcaagagtgccttggaggatcagggcagcaaccccagcagcagcaacagcagccaggactccctgcacaagggcgccaagcgcaagggcatcaagtcgtccattggccgcctgtttgggaagaaggagaagggcaggctgatccagctgagtcgggatggagccacaggccatgttctgctaacagactccgaattcagtatgcaggagcctatggtgcctgccaagctggggacccaggcagagaaggaccggcggctaaagaagaaacaccagctgcttgaagatgcccgcaggaaaggaatgccctttgcccagtgggatggtcctactgtggtctcctggttggagctctgggtggggatgcctgcctggtatgtggcagcctgccgggccaacgtcaagagtggtgccatcatgtccgctctgtcggacacagagatccagcgggagatcggcatcagcaatgccctgcaccggctcaagctccgcctggccattcaggagatggtgtcattgaccagcccctctgccccacccacctccaggacttcttctgggaatgtctgggtcacccatgaagagatggaaactctggaaacatctactaaaacagacagtgaggagggcagctgggctcagaccctggcctatggggacatgaaccatgagtggattgggaatgaatggctacccagcctggggctcccgcagtaccgcagctacttcatggagtgcctggtggacgcccgcatgctggaccacctcaccaagaaggacctgcgggtccacctgaagatggtggacagcttccatcgaaccagtcttcagtatggcatcatgtgtctgaagaggctgaattatgaccggaaggagctggagaagaggcgagaggagagccagcatgagatcaaggatgtgttagtctggaccaacgaccaggtggttcattgggtccagtctattgggctccgggactacgcaggaaacctgcatgagagtggtgtgcatggagccttgctggccctggacgagaacttcgaccacaacacactggccctgatcctccagatccccacacagaacacccaggcacgccaagtgatggaaagagagttcaataacctgttggccttgggcacagaccggaagctggatgacggggatgacaaggtgtttcgccgcgcgccctcctggaggaagcgcttccggccgcgggagcaccacggtcgcggcggcatgctcagcgcttccgcggagaccctcccggcgggcttccgtgtgtccaccctggggaccctgcagcccccaccggccccgccaaagaagatcatgcctgaagctcactcccactatctctacggacacatgctctccgccttccgggactagccatggcccccagggctggcttcctccttctgggtttcacaggctcctctggccctgacccctcttgctcgttccccttccttccgcagctcctagtctcgtccgtgactttccggttgccctggatctcagaatatattcgtccaccccctcggcaccccattaccccgagtcccaccgtgtgtccgttgtaagtccggtggatgtggctggggtttcctggtattgtggaggcacccaggttgtccatgcttgggattctgggggaaggagagaagggcagctcagggtggatgtgaagccacccttcctcttctggacccagcctggtctgcactgcaacctccaccaggaccaggatcctgggccacaggctgggatgatccttccaagaaagggtcatttcagacgcagccctgcttgggctattcaatcttagggtgtctatccacgtctggctgtgccaaatggtctggcagctggttttggcatccccagcatcaccactctcccaacccatcaccgtgactgcagttcctgcccccattctcttggggtcagggaggggctgggaagggctactgaaggccccattctcccacaggatggtgaggctgggaggaggaagactgaggtagagattccaggccctggcataagctgaatcccaaatttgggtttgggaagaaccagagagaaatggatccctgagctctgagccaagggtgaggatggggaaactctaagctcccacctaataagaagcataggcagaccagccagagggagagccaatggcctctggtagccttaagcccaaagggcagtgggaatgtcccctgccccaaccatcgggtggagctcctgctgggctatggggaagggaggttgtgcggatcttgactctagggcagaacagatctaaccatgcattgctagctctgctcccagcatcccttccccttctctcctcctctgcctcacttctttagtaatcccaaccctataaaaatgaacctaatgggtggattgaatatacattgagcccaaagtcaagtttggggaaaaggcagactaaggcctcctttctctgacctcccaggaagaaaatagcttctcctacagtgattcatgtcccaggtccaggaaatccaatgttggtgaaggcagccactctcttgcttgtccccaaatcacctaaccctcatccagggctattttggtgggcagggactgcctcctcccggaattcctaagatccgcccagctgccaccattttcattgctttccccagcagcatgatgggaacccaagctgagggatacaggtcctgatttggtaggaatattattcccaagaaatacccgctcctcacctactccctcatcctaccaaggtgcctgaaaatgttcaagacttatgttcagggtgggatgatggaaccgagggcttcatcaaagtgagaggaaaggaaaagcatctggcatgtgtttcttggataggggccagtgcagtgccatcctacaggtggctggagcagctgctttgcaacctgatcaccttgagttctgagcagggactaggcttgcaggtgagataatgggccagggcacccagtccagaaggagcaatggcacctgggcagtgccagggcttaaagcccgctgctccttttcggtagaggagaggcccatcactggtgtggtggggtgggctctcccttaggcttgggcaaggcagccacctgcccttgctctcccttagtgttccctggcctccctgccatcaggttgctgggagtggagatggagggattattgagcagaaaatgagttggatggagataaacagctcccatccctgggtaatggatggtaagatgatggagattcctaagattggtggagttgggcaatgcatagccatctgactccttcagggtgctcttgatgggctggctgtaagggagactcagtcccagcctctcccctctacaactcctgccactgttggccatgtcgtaaggcagcagctgtgccaggatagctgggtccattcagagcaccttgagaagtgttgcagggaggtgttaagaagagaaatctgtgcaaacagtgatggaaggctgttgtcttggtgtatcccttgcctcatagtcaatatatttttttttttggcgagtcaccagtgacccgagccctccacaccagcctcctgtatctcatcaggtcccttctcagtactgtatttgctcagtgcatcaggaatgggtgtatgggtgtgtgtgggtgggtgtgagtgtgggtgtgtacgtaccaataaacaacctggttttaagacaatgt

SEQ ID NO: 68 - DNA, 3777 bp, Homo sapiens
cagtttgagttattaacacgaggaaaataaaacacatatccatataaagaaatgaattcaagtatttacagcagctttatttgtaatatacaaaaatctataaataatataaatgtccctaaacacatggataaacactgacttatccatagaacagcatgatactcagcaatacaaagattcatcatttttgaatctcaaaataattatacagcatgaagaaaaccagtaagtatatatatatacacacacacatatataaacacatatgtatatatatacgtatacgtatatgcgtatgcgtgtgtgtgtgtgtgtgtgtgtgtgtgtatgtatctcagtaaaaactccagaaaatgcaaactaatttactgtaaaggaaatcagttgaacctgaagagctggggaagggagaaagattataaaaagatacaaggtaaatatatgggtgacacacaaattcatttttatggttgtaatgatggtttcatggctttaccaaactgtacactttggatacgtgtactttgttgcatgtcagttatacaaattagaccttcaaaaagctttaaaaagtggctcaaaattaagagcctagatgttcctttttttttaatcagggtggcagcctgatatggacttcaccatctctctctctcctcatgccctgagagaggcaaccttgcctcaggggcagcaaattttggcaagcagtgaaggctgttgccacctgaattaataggaatgttggctgagtcacaaaagccacatccctggaccgcggaatgatccttctctctattcttgttctcctgcctgcatagcaatggccttgaggtgaacagcccagacaggatacaaggagccacaaaacctttatagactattttcttttttttttttggagacggagtctcactctgttgcctgggctggagtgcagtggtgcaatctcagctcactgcaacttccgccttctgggttcaagcgattctcctgcctcggcctcccaagtggctgggactataggcgcatgctgccacgcctggctaattttttgtattttagtagacatgggatttcaccatgttgcccaggctggtcttgaactcctgagctcaggcaatccgcccgccttggcctcccaaagtgttaggattacaccatgcccggccagactattttctgataatgatctcagcgatagtaaacagaagatcctgagaatttctgtatgcactgatcctacacaaccatattcactggaaaatttgtagatgaacttttagaagagtcattccatctaatttactgcagtcttctccactccccatttacctggagtttctgtcccaattactgttgaacctgtaatttcacctccacacctatagtctgataacaaatggcaccagtctacactgacttatatgccatggcacatggctcctttgcaggacctgggcaacagattcccctcaccagtgctaggaattatgtggatctcctgtggacaactgaacaaaattcacgttcacagaagcactggggattgtcacaactgcctcctttttatggtgacctctgacctgacaaaaatggcaccaggccacaatacaggaacacaaagcctggcagtctttactttgaggccttgggcagcaggccaattagagcaatacagaacaaagagctgtcttctgccatcacattgtcccttctgagtacagaaagtttgggatctccacaaaatctattcaccccttcatgctgacatcactattctgcttacaagtcattctatgcaatgaatagaacacccaagattaaaggtgcgtaaatttttttaaaacctttataaaaacattataaattaaagcaatgtgcaccaagcagtttccaggctggtgaatcagaatgtggaaaaattcattacaggcatcatgtgagaccgacaatgttccttaaaaaggtaatccttagaaagctgacagcacaactcagattctctggaccacaactgggtcaggtgtatactctaaagtcagagaaaagacatgaagaccctacatgcttgggctattaataatttccccaagcaaatgggagagtacagaggtttgcttctctgagcactgtgggggagtgactcatgcacatggtgtgcacctgccaggtggtaggggtgaaatgtgaaatggcttcagcctcagaaattggcagtgacatgaatcaggctataggcctcggcagattagaaattacaatgaacctcctcagagcttcccacatacctgaaacttatgaagaataccccactgtgggtgctcaaagtttaaatttacgaagatggctaccacagtctcctccagtgctattatactgaataaagaaatagcacattcccttcacatttagggcctttcttcagtgtgaactctccgatgtcgaatgaggttagatttgcggctaaaggatttcccacattcactgcattcataaggcctttctccagtgtgaactctttggtgctgaataaggtctgatttgtgggtaaagggtttcccacattgactgcactcataaggtctttctccagtgtgacctctctggtgttgaatgaggctagagctctggctaaaggatttcccacattcactgcattcatggggcctttctccagtgtgaactctctggtgttgaatgaggctagcactttggctaaaagactttccacattcactacattcataaggcctttctccagtatgaagtctccggtgctgaatgaggccagagcgctgtctaaaagatttgccacattcactgcactcataaggtcttgtgccagtatgaattctccggtgttgaatgaggtcagatttgcgggtaaaggattttccacattcactgcattcatagggtctttctccagtgtgaactctttggtgttgaatcaggataaatttgcggctaaaggatttctcacattcactgcactcataaggcctatcaccagtgtgaatgctgcggtgtcgaatgaggttagagaattgtctaaaggatttcccacattctctgcattcataaggtctttctccactgtgaattctctggtgttgaatgagttccgatttgcagctaaaagatttcccacaatcactgcactgataaggcatttctccagtgtgaactcttctatgtcgaatgagattgaagatttgtctaaaggatttcccacactcacagcactgataaggcctttctccagagtgaactctctggtgtcgaaaaaggctagagctttgtctaaaggatttcccgcactcgccacattcataaggcctttctccagtgtgaactctctggtgttcaatgaggttagatttgtagctaaaggttttcctacattcaccacactcatgacgcactcctccagtgtgacgtctctggtggtgaatgaattcagatttatggataaaggctttctcacgatcactgcattcataaggcctttctccagtgtgaattatcttgtgtaagattaggtggcactttttgctaaaggattcctcacattcactacactcaaacatcttttgtccagtgtgaatttgctggtgctgaacaagtgtgttcttgcaagtgaaggctttctcacatttgctacactcataaagccctccttcagaacagacactctgatgctgaacaagtgtgtgtttgtggcttgaagcttttctgtattcaccccacttgtaataactttttgcattg

SEQ ID NO: 69 - DNA, 3716 bp, Homo sapiens
acgtacttgctgacccagaatgctctttgacatgctgccaaaaaataaacctgtcctcccacaaaaacctcaattgtcctttcatgaagaatgaaaattttgagcttagaattaccactttaatgcttgatttcaactagttaagtaaattaataggtatgtatcaatatatttgccttcaagcagcttagattgtagctggaacaaaagctataacagggatgaaatcggtgcaagattgtacaagcccctggctctgccttttagggaggctaaagaagagagaggcatgtatgggtttgttgacttgggaactcagagtaggtttgagcccacccttttgtgtggtcagccttcctgtccagaggaaaagtgtagagtgggaatgagaagggtaggaggaaaagatcactggggagcaggaaaatgggcagctgtgttatatctcctcatctctttcctcccctctactggggatgccagagaagaaatttcttttttttttttttttttttttgagacggagtcttgctctgttgcccaggctggagtgcagtggcaccatctcagctaactgcaaccttcgcctcctgggtttaagtgatcctcctgcctcagccccccagtagctgtaattacaggcatgcaccaccacgcccagctaatttttctatttttagtagagacggggttttgccatgttggccaggctgatctcgaactcgtgacctcaggtgatccacccgcctcagcctcccaaagcactgggattacaggcgtgagccaccgcgcccggcccaccagagaagaaatttctaaaggcaggagtggaaagagtttagaaagagaagctagtcagagaggcagtcagccttgtggaagaatgctgtgtaatcctgtgtcaccaaaggctgttcttttctcaagaagctgagatccaggattagagtggaaaacaagaaaaacagatatatcattttgttggcactcaattgccttggcgttttgttttatgtgattgcctgcaagaccacactttcaatcccttccttcaataagcatttgttatgcacccaatgaaacacaaaacataaaatcatctttaacactccttcttctctaatagacctaaagaattcattgagtgtgtctcccatatccgactgttgtcctggctgctgctgggttccctcactcacaatgcagtgtgcccaaatgcctcctctccctgcctgcccattcctctggatgcaggctcccacgttgcagaccatcttattgttatcctgattggatttccagagcaatcaaaggtaagtgatttctgcaagattaagaccgtatgcatcgcaattgctaatggaaaccttatcagccaattatgtttcttctgagaagaaaatacatcttatcatttgccctcctgtggatgttagaaacacaactttgtgctaatgtcttatttaaagttgtttagattcccagactgtctttccccccgcccccaaattgtttttcggcttacttttataaagataaatcatggagtcaagcaagagttggcttcccaggcatttctgtctcaaaataatgaagagaaataaaaggctagaaatataatcaaaattctgtgatcagtttttaaaaccagagacaaaacaaaggaaaattcattctctatctaattcttcatgtaccatcttttcaactgaaatctctagagatacaggaaaatacaaaatgaaaacaagaaggccagttgggaactcactaaagcacacattggcatgacctacacaggggaactttgtaaattgcagagacaggtgatgtgctaaaggaagaaagtagacccaaggcaggcaccagtcatgagcctgtgcaggcaaaccggacacattggtactaatcagctccgaggagccaggggaccttcacagagcttcggcaagttctgggaggtcacattggtcttggggacagctcgggtttgggacagggcaagctgacgatgtgataaaatggcgcacccatcccaatgatccaaatgatgttcacaaaaggaattaggcagtcgattcctaatatttctactcagatccgggtttgattcctaactatggtacttgcgattttgtgagcttgacaagtgtgtctaacctctctattattcagattttcatctgtgaaatagacgaggggatggttggagagtgatggaggtgatataggaaaagcctctggcgccatctctggcgtgttgtaggtgctctctctgcacgtgctttccgctaggaggaggatctccgctgctgctgctatgattatgaacttctgggcgtgtattcacgtatatcacctgctttactcccatgctttgaagagactactattatccccattttacagatgaggaaacatcctaacatggcagaatgattattctccctaatctagtttagggatgggaatgtcagtttcattaaagggcaagggggtgggtagatttcttcagcaaattaaggtgccttctcttcaaaaatgtgctttgttctctgagcacactcccactggtggagaagagagcacagcagatagtttcaaggtgatgaatcatgactttgtaactctgagataacgttatgcctttgtgcttcccctgtgctccctggcaagaccaaagccatgcgggaggactccgtggagggccacagcctgctgggatgcaatgcactgatgccgtcttcttccttttcagacctccgtgctgcacatgtgctccctcttccacgcgttcatctttgctcagctgtggacagtttattgcgagcaaagtgccgtcgctacaaatctccaaaatcagaatgaattcagcttcacggcgatactgacagcactagaattttggagtagggtgacacccagcatccttcagctaatggcccataacaaagtgatggtagaaatggtgtgtctccatgtgattagtttaatggaggcattgcaggaatgcaattcgaccatttttgtcaagctgatacctatgtggttgccaatgattcagtcaaatatcaagcacttatctgcgggactccagcttcgcctccaggctattcagaaccacgtgaaccaccacagcctaaggacgctgccgggctcgggccagagcagtgctggcctggcagccctccgaaagtggttgcagtgcactcagttcaaaatggcccaggtggagatccagtcctcggaagcagcctctcaattttatcctctatgagtggactcctcggcgctcagtgtcaacactctggtttagcaataatgggtttaaaaacaaacaatttgatccaagcaggttggggaacatattggtactgtacattctctttctagtttagtaaaagatgtgcaaaggccagagagggccgaaaatgaagctttcttgctacacatatttctgatgactccttgggctatctgattaagtgtttccttacattattttttaaaaaccaaatcatttttctttaactaacttctattttttttaagaaaaaaaaatagactggtgggtactcacagaaaagttgtataagtccccctgttgctatttttgatgatagagaataaatagggtttttgaaacctttgtagtgttttttcttaaaatccactcttggcaatgcaataaaaaaaaccgtcaccataagccagtg

SEQ ID NO: 70 - DNA, 4050 bp, Homo sapiens
atccacccgccttggcctcccaaagtgctgggattacaggcgtgagccactgcgccgggccctcaaaggagccttttcacgtgggagggctgtgccgactctcaccaccttcctgttcaacatctgtcctgtttccttgttttccttcagatggagttttgtcttgtttactacccgagagcccataggtgtgcctcccaaagggccctcctgcagaccagagcaagctcctctaggccaagccggggcgccgccagcacgtgcccttctgctggaaccgggaggtctagagccaggcccagaacaatctgtgatttcttgtgtttttacttgacttggtggtttctcttttgccaaaaggtccttacttgacttctgaaggctgtttgtaccaaatacttttcaaaagcccaagcctggtctcctcacagcttcctaaggcagtgctctcccccctcccagtgctatgcgctgggcaacttggggtgccccccatgaggccaagggaggaccctggggtcgagtttccttcgggggcattgtgtggaggggcaggcagctcgctccaactgctgggagtgggggaatcccagctctgcccatccctgccaagttggggttgtgtgtggatcttggtgttaactcttgcttccttctctgcttctgccatgcttccaagcagcagctactccatccgccactcaataagtatgccagccatgaggtaatgtatgcctgctcgctgcggctccagagccgggtgtctctggtgggggttggggcagctcccgccggttacaccttgcccttcccatattcctggattaattgaggactccattcccttggcaacctctgatgactaagggccggtaaaaaccccctctaggctgacgaggaagagctggtagggggtcaggctcttcacctgcagcctccagaggagatccttgtgtcaaactgggccgtgtcctttccaagtcctgaccctggctgcctgcagtgggtggggtggggttcgaggggctcgcacacagatcctggcacttgccctggtgggctgtcactcaggacacttcacggtctcagccttcacggaaacacccagagctgtggtccttattctgtgcctgtcaggcaccaccctgattctcaggattctgtgcctgtgccgtgaggcactgccctgattctcaggagagcccagaactgtggtccctattctgtgcctgcgccgtcaggcaccgccctgattctcaggagagccctgttctccttgtggggactctggctgggtgtcgcagacgtgctggcctctagagtccccgggcctgggaggggtatctgtttgtgtgggagggactgagtgggatggagctggcctgctttctcctcttgtctccttatcactctgctgtcccagaagtgtccttggtcttccgtttgcttctctgagagatgtgcatgaagaactgcacagacttttcataacttcagtacgagagcccagggtgtccctgtaggggacagcagagaggggccgacagccccccaactgcgcagacttttcataacctcagtacgagagcccagggtgtccctgtaggggatagcagagaggggccgacagccccccaactgcacagacttttcataacctcaatacgagagcccggggtatccctgtaggggacagcagagaggggccgacagccccccaactgcgcagacttttcataacctcagtacgagagcccagggtgtccctgtaggggatagcagagaggggccgacagccccccaactgcacagacttttcataacctcagtacgagagcccggggtatccctgtaggggacagcagagaggggccgacagccccccaactgcgcagacttttcataacctcagtacgagagcccggggtgtccctgtaggggacagcagagaggggccgacagccccccaactgcacagacttttcataacctcagtacgagagcccgggatgtccctgtagggtatgacagagaggggccgacatctccccagctgcacagtcaaggggtttccagttgccttgtgtgacgtctggacctgtccctgtggttgttgggcatggccgacctcacttttgacctggggagtctccggaatgacctggctgtctcacagttttgccatgagatcttgggatgttgttagggaccctttggaggctggccctaaccctgaggcccttccgagttaggagagcagcacaaccctctcctcttgacaccgacactcttccctctctctttaaaggaactctgcgaccttcaagtcgtttgaggaccgagttgggaccataaagtctaaggttgtgggtgacagagagaacggcagtgacaacctcccttcctcagcggggagtagtgacaagcccctgtcggatcccgcacctttctaagcctgtggttgcttcacccgctgcagagcacacgcaacccagcctcagcatcacagccgcagctctgttcagcggagcagccagccagggcggatgagcagagccggccctgaggacagtcctgcccatccacgcggagatgtggctgccgcgtttgcatgaatttgaagaacacaggcttgtacacagatgttttacactcacgtttgtagatgaaacagatcactgtgctgtccttcctaggggtgcaggaagtggacagggcggagggtttgaaagaatattgagtcaaagcccaggctccctttgggaatcatgttagcccatcagaatgttgaaggattgaagagttctaagcataaaataagtggcattttctgacttcttcctcctcctccttccctgactcacagaaggaatgcaatcacccagcaagtcctacctgttacgcaattttttatctcaaaatgccgaacgagaaaactgtccattttctgagacccccagaaaggaaactgaccctcagcagctgcctgattgttacgcgaatctagctttaacggaagcaaattcattatttttttaaatgcagtggacttttcaaaaagtttaaattaggcaaagcagctttagcctcatagaatattatttctttggactcaagctgaaatacaagccttacattgccttatgctttatttctttctaatttttatatgtatatagatgagggttccttaatggttgtgagcattgtgtggaattttacacctggcctgcgtggcagcctcttccagttgaggtgttttatgtcacgcacactccatcccagtgtacaaaacctgcttctcttctcaaccgtggcagctcccgctggctcctatgccctgccctaaagggctcttgagcctctgggaatgggaggggccaagagaaggaaaaccctgtctttagcaccctttaaaagaactgtgccccccttctcagtgctgcctttgcatgggcctggcccggctcacattcgtcagtgactccaaccctcctgcttgctgtacttgggatgaaacgaccccacaggtcaggtggagggtggggcgtgggcatcagccaggattgccgttacagtctttttctcaggagctacaaagatctcttcctgttactaaatagtcgcaccccagcagcctctctcgcacaccggggccctgcgtgtcagatggcgtggtctgcagggggagctctgtgccttagtggctcttggcaggacactgagggcctgcctgtggtgtgcccggctctgccactcccgggaggggaagggctgctcagctcaaggtgtcctgttcggtagagcaagtgtcctctgacagccgtgtccccggacagttcagacacccttggggatggcactccacacacgacagagatgcaggggccagggaagcccagcgctcggtgcccttcgtccagggttaaaatcggcctgtggggtgtggtgagaaggcaggttgtgcgggtgttgaccgatgtatcttttccttaaagttattataataatgggtaatttgtcaataaagcattcctttgggggaaagtc

SEQ ID NO: 71 - DNA, 4741 bp, Homo sapiens
tctctacaggagcagtcaggaacgccaaagaaatctttgcatacattggaaaacccccattttccaaagccaacctgtgacctggccacataatttttgatcgcactggcatagcctctgaatgtccctgccaaggaatgtgggccaggcacccattaagaggaaacagaagaaaggtgggattaagttgggagtcagtcctggcaaaatccatctctattttcagaggacagttttctaaaggaaggaaaatggaatggaagtataggaagaaaatgtagacatggaggtctctagtaaaaccaatcccaggagggcagaggctgggtaagaggggcaaacatggctgagagggtctggcaagcttccctccctatatctgccatggctgcttctctgagacccaagggcagggagagcactgatggtagcaggagcagcagtgcagcccatgtcccctcctctggaacctactcccgcccctcttggaggaaaagcagggcctccccagatgtatacccaagtcagagcgcaggatccacagaaagaccccaagcccaggcttccagtcccatccctgcctctcctgctcttcctccctgctacggtgatccaggcagggctttggggcctccagatccttgtggccaatgctggctcattgcagacactctagggtccaaaggctgccagatgcatagagaggagtggcctggccacaaccctcaggggcgctaaggtgggaaaagatgaacaccataaagatgggataaaagctcaggtctgtccattttgggagtgcatattccgaactgcctcctatacctattagctttgttgtcaccaggaaatgcagagtcctcaattcttagtctgtcttgggagaattcggccaagagaccaagtagtaatgtaagcaaaaggtttactgaaggaaaataaagagcagggattgtatttatttatttattttgtgacagagtctcactctgtctcctaggctggagtgcagtggtgtgatctcggctcactgcaacctccacctcccgggttcaagcgattctcctgcctcagcctcccaagtagctgggactacaggcacgtgccaccacgcccagctaattttttgtatttttagtagagacagggtttcactgtgttagccaggatggtctcaatctcctgatctcgtgatccacctgcctcggcctcccaaagtgttgggattacaggcgtgagctaccatgcccggcctgggagtttattgaagtagactccaagagaggagccagcaggtccgcctgggaagcagcagtattcacagcaagagtgaggtagcagcagagacaatacactctgaaagatgaggcagagcaggctgctcgaaagatgagccagcaactagagagttctgccttgcggtttttattaggtcacactctatttaggttcctgcctctgtctcaagtctccacctttgtctaatttcctgcctctatcttatgtctccatcttttcgccccacctagttcccgccccaggtttgtgggactctcccttactgtcagctgatgaacctgcaggggcgggtgtcggatatgaatcctatcgaatggtgatgttgctaattactgccactccaggaagggtgtatattggtatttattgcacgtgcatatctcgtaggaatttctcctttgctttctttccctccttagcatgcagctggctacattcccacaggttaactgcagagtgatgactgggcatcttaaggggtgtcttggggtgttccttcctgcatagatatttcccctcctctctgctcatatctagggtgaatgttttggatggtctctggggtgtgagactttccagacctccctttctcagaggctttcccacctgctcatatttatctgcctactccgacagtataaccttgggcaagtcacttgacctctctgagcactggttttctcattatagatcgaaagcattagactaagtcagtggtttccaaactttcccagccacataaccctttctttaaatgaaatcttactggaaccctaccatgtaacctgtttactgaacagtcctaatttgatgagatacaaacatgaccagttttatctttcttgcaaccactgccttccaacgtctccattgagccccccttcccattcctaaggccacctcaggcagaccctggtcactttcagtggataaaaagtctgcccagttgtttcagtttaaagcttcgatctgatgtccaacatggggcccacatcctcccatcctccatcctctgtttcgggtttgccccatagtctaaaggattcagaccagggaggagaacatggtctgctctctcctggctccttccctctcctccccagcactcttctggacctctgtcttcagctgttggggcagggaggagggagcagaaaaagaaccttttctgacctcctggctgaagatgtccttggtgcttcaggcatccagctgcttgggggccttcctacctcttgctgaaaggtgtttagcagtcaggtctttgggaccgggtcctggccagatggctccagtgaggctgccttccttggtgctcacttggcacggaggagacccacccattcttgccccacctggcaatgggaggccgcccgctgctgccccaatctgtcctgccctctctttcttctgccccaacaggcaaaagggcagatcagcaaggtctagcataaggagatgcccagccagggaatggcaggtcagcttccccttctcgtgggcacctgtatgtcatacagtgagtggcaccattggaggcccctcccttgacttgggcaggggccaggcatccccaggtctccacagggaggtgcagggaggtaaagaccacagcagttccccaaggctgtgcctccttacgagggggattctcaactcctgctgaacattagatcccatgaaatgctcagtaagagataccaatgtgccgacccccggggccagttaactcagcatcttgagatggagcctgagaatgtttcttttgaaagcacctgaggtgattgcggaaggcagccagggttaggaaccactgccctgtccaaaaagttcccatcaaatgatggagaaaggacctgttagacctgctgatggccagggagggtctgggttctccctttgtaaggtggcaggggcgggcagacttaggacctggtacccttagttttagggctttaggcacaatttgaaagtaccagaagagttcccattcaacattctactataagtggttgccgaacttgtcttagcagcagaactttcctcatacgagtgtctggctgcagcaaggggaggggccagagctttgccagcagcattggaacctgccccccctcacacccctttaatgaaataatcactcaggcccctttggctcactctgagaaccttccgttgctatgttacattggagagagggggccaccctgcagctctctgaagggagaatggggtggaaatggagccagaagcacaggcagagtagagaagcaagggggcacccatagcaggttgtgggagagccagggtgggccaggaggtgggagtagaaaggaagtaggcttgggggtgtggagagggtggctgctgacctcccaattttgctgagaacagccatctctaagccagagtacccagaaaggtgtgctcctccctatgccctgagcagggggaagaagagggaacgtggcctcagaacctgcagcagccaccaccgccgggtcagcacaaggatgggcagaaatccactggggatgagaggcccaccacggagcccctctttaaggtcctagatacgcctctgagcgagggtgatgagcccgcaacgctgccggccccgcgggaccatgggcagagtgtgcagatggaaggctacctgggccgcaagcatgacctggaggggcccaacaagaaggcttccaacaggtcctggaacaacctgtactgtgtgctcaggaacagtgagctaaccttctacaaggatgccaaggacctggccctggggatgccctaccatggggaggaacccctggccctgagacatgccatctgtgagattgctgccaactacaagaagaagaagcacgtctttaagctgaggctgagtaatggcagcgagtggctcttccatggcaaggatgaggaggagatgctgtcctggctgcagggcgtgagcaccgccatcaacgagtcccagagcatccgcgtcaaggcgcagagcctgcccctgccttccctctccggccccgacgccagcctcggcaagaaagacaaggagaagagattcagcttcttccccaaaaagaagtagcaggtggggctggcgggcgcggcggagtcgggacgcgcagagaccgggcagcccaggccttggcctcctctcgccgccgcccgccggtcgaatcgagatgagtcgagtcgcgggccgggcccccgggccccacgctgcactgcaaaagctgccttcgcccgcgtgtcctgggccgacgccccctccatgccctcgcccgcgctggctccgctccagggacaggggctcccagctcctctggcgcctttggggcctccaggcctgggggcaggaaacggttctctgaggcacacgccctcctctcccaccctcctcctgagccgagggggcacaggccccttacccccaacc

SEQ ID NO: 72 - DNA, 4321 bp, Homo sapiens
ttttactactgttaaacagggtcgcagtgaattacatcctgattttttggctaaattacaagatgctgttcaaaatctgtctctgatgattacgctcaaggtattctccttcatatgttagcttttgagaatgcgaaccatgagtgtaaagtggtcatgcgttctgtctaatgacaaagtttacctgatcacgaggtgtgcctgcatatattaaagcttgtgaaagcattggatcagagacccacaaagctattctgtgggcacgggccatgaaggatggcaatcaaactggcttgactgaattcttttcttggagcctgctataattgtggtcaacttcatcatacccaaaaaaattgcactgttaaaagcggccaagccagctcaacaaacatggccaaatgctcctgctactgtttgccctcattgtcgtaaaggtaaacactgggcaagtacttgccactctaagtctgatatagatggcaatcccttgccacagaaccagggaaatgggaagcagggccagtcccaggccccagtatcaaatgggacacctcagactcagaccaatattgtgtttctgcttcaagcggtcccaatacagcccccagcacaggcaaatttacctacagccaacccagatgggtcccagtcgcttcttctgtctcagtacaatgcttgtctacctccacagtagggggcagggcggtcaatctctgtagtaccactcctctaaatttactaccgaattctttgcctttaattgtccccacgggggccactggccctttacctcaaggtttggtgggcctggtgttaggtagggcatccacctctgctaaaggtatcatagttcatactggtctcattaattctgattcctctgatgagattaaaataatcgtgtctgccaaggttcctgtttccattccggccagtgagtcaattgctcaactacttttactacctaatattgttttaaacaaaggagataagacagggggccctgggatgggctctggcggtgaaaaagccgcttattggattaaagtaatttctaaacaacagcccacctgcaccatacatattaaaggaaaaaagtttgagggcctagtagatactggggctgatgtttctattatttcctctaatttatggccttcttcctggcttaaacatcccactaacatgggactagtaagggttggaaaagctgatgaagttcaccaaagcacatttatcttgccttgcactgggcctgatggtcaaaagggaacaattcagccttatatcatgccaatccccattaatctttggggtagacatttgctggaacaatggggggctgaaattaatattccacataactcttctcgtgctcccagtcaacatataatggaaaacgtggggactgttcctggactcagtctcggtccaaaacatgaaggaattactaaattcctttatggtttaaaagcataatttaaccactccccactcccaattccatttagcattgtttactttaaactttctaaatgttcctaaagacaatactctgactgcagccgaacaccattatacaggcaaaaaattctccctaaatgaaagcaagccagtgttatggaaaaactcccagacaaatacctgggaacctggaacaattataatgtggggaagagggtatgcttgtgtttcaccaggagatcatcaatcccctgtctgggtgcccactagaagactttaacttcgtgtgaatactgacaatgaaaaacacagggaagagatgtccacgtcagagactgccctcatacctggtgagatctgtgccaactcctcaaaaactggcacaccaaatcaaaatggatctcattcaatcctccctaatggcaacagagacccctctaactaatcccacttctcctaattacctttctttttctccttacaaacctgaaaatctcaccatttctattagcctgaaaataacatccctctgttcttctcttcctccttcagcactggatctcgcttacaataggttttatttaataattctactccttatactttctgtctcaccagtttcccctcacactgatttgcctgctacacaaaattattcttattgggcttatgtgccttttcctccacttattcgacctctcacctggatgaatgctcctgcggaaatctacactaacgatagtgtgtagatgcctggagctatagatgaccattgccctgctcaaccaggagaagaaggcactgcatttaatgttactatgggttatagataccctcctctgtgcctcaggcatgcaactcgttgtatccatctagaaactcaagtctgggctgcttatcttctggagagattagctacaggaaaatggggacatttggtctccggcctctccctttgtcctttaagacaaatgaaaaggggagtaataggagataccccatactttcaatataaacctgtaggaaaactatgtcctaaaaattttgagggcccatctaaaactttaatttggggagattgtgttaactcacatgcagtagtattaaaaaatgactcatatgctttagtaatagactgggcaccaaagggctatttaaaaaacacttgctcctctgggggaggggaattcctggaggctacttattttatttcttattgggaggacgaggatcatcatcctactttgcataggtggttcggctcattctttaccttaaaatgggaagataaggacattaccctccacccccaaggccttgtatgatattccccattctgagcccagaacacccagaactttcgaaattggctattgtcatgtctggactgccagtatctgtgattctgaaccccatgataaatcccctttgaacctttttcctctttttgatgccgatcctcctttacgggactccaattggcattacgataattcttatcgacccaggtatgcccctctacttcttcagcatccccaggcacctcggtttgcttctttatggtggagaacatcgggcattgccaccgccgctcctctccctcagtatcaacatagattcaagcattctgctttgtttacctccaacctgactattcctatacagagttgtgttaagcttccttacatgctgttagtggcaaatatcaaaatttggacaaacaatcaaactgtccaatgcattgtcatttatacacttgtgttgactcccgttttgactccaggaaaagtgtaatgttggttggagctcgagaaggaatctggatactgtgtgccggaccagccaaagaatcctgtgtcaaaaccgagagaacgaataagccttcatcaccatggcacatttatataaaaagaaagggagagatgttgcgggaagtcagggaccccgaatggagggactgactggagccgcggcagaggaacataaattgcaaatatttcattttaatatggacatttatcagttcccaaattattactttttacatttcttacgcctgtcttactttaatctcttaatcctgttatcttcataagctgaggatatatgtcacctcaggaccactgtgataattgtgttaactgtacaaattgattgtaaaacatgtgtgtttgcacaatatgaaatcagtgcaccttgaagaagaacagaataacagtgatttttaggcaacaagagaagacaaccataaggtctgactgcgtgcagggtcaggcaaaatagagccatatttttcttcttgcagggagcctataaatggacatggaagtagggaagatattgctaaattcttttcctagcaaggaatattactattaatactctgggaaaggaatgcattcctggggggaggtctataaacggccactctgggaatgtctgtcctatgcagttgagacaaggactgaagtacaccctggtctcctgcagtaccctcaggcttactagggtggggaaaaacctggccctggcaaatctgtggtcagactggttctctgctcttgaaccctgtgttctgttgtttaagatgtttatcaagacaatacgtgcactgctgaacatagacccttatcaggagttctacttttgcccttgtcctgtttcctcagaagcatgtgatctctgttctgctttttgccccttaaagcatgtgatctttgtacctaccccccgttcgtacaccccctccccttttgcaatccttaataaaaacttgctggttttgaggctcgggccggcatcacggtcctactgatatgtgatgtcacccctggcggcccagctgtaaaattcc

SEQ ID NO: 73 - DNA, 4234 bp, Homo sapiens
ccacgaagcttggccaactcctggtccttgccttccttttccgtcagggcatgagccagtgcctcttgcagggtagcgaactccacacgctgctcgttgagggcgttctgcagccgcatctcaagctctgctctggccgccttctccagggcaaggtcagcctgggcacggccccgctcctgggtcagccgcgccacctccctttcctgctgcccacgctcctcctgctgctgcccctggctctccatcagcgcggcccgcagccgttccagctcattgcccatctgctctgcctcccgctccatagcctgcagcgctgcctgtgtgctgcagaactggcgtccctgttgctcttccagccactcgggctgtctgtctcctgccctcgcaggctccttgactaactcccgggaggctgtttcctgctgctcacctgccttgcgcaccaaggtctccaagcgggccacctctttgctggtggcagccatcttttcctgcagagtggagaggtcatctgcaagcttctgggccctgacttccttctcttggacctgctggagtgctctggccaggttggcatggagctcagctagttcgttctgctgccggcttatctggagctcgctgtgggattctatgcctgccaccttctcctttgcctcctgcagctcctggcgggccttctcacattcctccttcaaagtcatcagctgttcctggaacatggcgccatactgtgcctcctcttgctggctatcctcataccgctcacgccgggcagctacttctttgacgagctgctcacactcactctcagctgtgtgctgggcagccatggcctctgccagctcccgccgcaggacttcagtctcagcctgatgggcctccccaagctgctgtaatcgagcctccagccccttgcgcccagccctctcttcttccagctcctttcgttcccgcttatgctgctccaccaggcttcgggtctctgccttcagctcagagatacaacgctgctgctcttccagggcatctgcagccctgcgcttctcctcttcaaggctgcccttggtgaccttcaaggactctttgagggcctggagctgctcctggagctggtccttctcctgggccaccctttctttctcagttgctttttgctgctcagaccgcagctgcaactctagctctgcaacctgggcctgggcctcatgctgttcctggcgggctgtctcaacacaggcctggagttcctccaccttccggctcagctctgccttctcccgctgggcctgtgtcactgaggtctgggcactgtcccgggcttcattagccacctgaagttgctgctgcagaatctccagcttggcagccttctccttctccagtgcctccagctgcttgagagccgcatcccgctcccttaaggaggcctctcgctcctctgcagcagtggccagttgctgggcatggtcctgcctagttgcctcctgcttctccgctacctccttcaactgctgctccttctgcttcaggctactgcttagctgctccacctggtggcggaggccctgggaggcctgttcttgctgttggagggtctgtgctagctgggcctgcttctctttggcctgctgcttcaggccagccagttcttgatcctgttgctggatggtggcattgagtgtggtgagctcagaggtcagagaggccacctgggcagtcaaccgggccccatgagcctgggaggcctgctccagctcttccttggcctggctgaggttggagatggagctctgcaggtcagtgatcaggctagacagctgctgcttttctttttcgaagtggccccgctcagcaagcagcttggcttcctgctggcctcgctcagtctccagcatctctaccctggcttggagctgtgtgttgtttgcagcaagagtggctgcctcttgcttcaaggtttccagctggtggtataaagagacaaactgggatcagcatgactcctcagtcatcaagactcctctggaaatggaggaacaccaggaacccaaatgtactgaatgtgagtccacaccaaccagcagcacacaggtctttctgtgcattcctacctgcaagacatcacccagcacctcgcccttctcctggggtgggttatcctgcagctgggacaagtgttcttccagctgtgaaagttttccctgaaggatttcgttcttctcttcaaggcatttctgggagtaaatgagacccatgtgaacagagagggggaacaggcaccagattaccacacaagccctcataaacatcagcaaacatggggcccatcatcttgttaccaagatctccttttgccctggcctagaaaaaagcagaaaccatggaactgggagcatgagggacctgattctctagacctagttctaaggcacaataaagtcataatgtaacctgcttactacttccccaaggctgctgagtttacttcaaatttccttaccgtatacccttcctcagataagtcttgagtcctagattatccaaatcaccaccagctgcccaccatcctctgggcagcaataccactggcagcagctactcgttactactcccattttagggaaaggatgcttagaaaaacagactgattaacttgtccaagatccacatcttgtgaacagcagagataggattgaaaggtgtactataaagtgagggcattgactggggaaaaaaaaaaataagttaaaaaaaaaaggtgtactagactgaagcccacaatctttcaattacagcacactattgaaccttgaagagaaagcaacttaatacccaaaggcccagaaaagcacagtggtaaactggactcagctttgcacatgtggtcaagactgtggctgtgaccccagcagagggttaccttgtcctgcagggctgcgctgagctccttctccagctgggcctgcttctctagccactcctgagtggccttgctgtgctcctccgtcagctcattgagggcatcctgtagctgctgcagatgactggcaaactcccgcagctgagacgggcaagtgagaatccccatcacccagagtcaacgctgaccccaccactgctgtctgctcccagaaccccaggggctggatgcctccaattatcctgccaaccctctacaaaccaatcacagccatcacacctctaattcagaactacaaatcaacatttagggtcacagcccagtacccgggaagccgccaattatgggataaggaaaggggcaaaatatgcaggtctctggagagactgaagcataagacaggtgctgggacattcttctcaaccctctcttggggagccttccagaccacctcagccctgaggggcctccatgcacacaccaccttaacacccaccttaaaggaaaggtctccattctcctccgaaagctggttgattttgcgatccatctggctcttctctgtcttcaggtcctggcactgcttcagggtttcatgcagccgcatgcaagctgcttcttcagccgtctcatctggaactgtggggtctgcaggatatcacccatgggagaagctggagaacctgagagaaagctgaggagggagaaggcccatatgcattggtctcatgaggaacctgaatacaaggaacatcaaactcaacggctagaactcgcctagacctccttcttacattcctatcatccaccagctgacctcttcatcagaagaccagcagaacgatcactctttctactgtagtaccagccgaggccattgatatattccgtacttagattccttatcattatttcctggtttatgtatctgcctttccacctagaacatgcactacatgacgggaaaaacattttttaaaagactgtgggccgggcgcagtggctcatgcctgtattcctaacactttgggaggccgaggcaggtggatcacctgatgtcaggagttcgagaccagcctgatcaacatggtgaaaccccgtctctacaaaaaatacaaaaattagccaggtgtggtggcgtgcgcctgtagtcccggctgctcgggaggctgagcaggagaattgcttgaacacgggaagtggagattgcagtgagctgagatcgcaccactacactccagcctgggcgacagagagagactctgtctcaaaaaaaaataaaaataaaaataaaaagactgtattctc

SEQ ID NO: 74 - DNA, 4136 bp, Homo sapiens
aggtatggaggtgtcccgggggcggcgtcgcggggcgcctcatgcccagacttcagggggctgtgcgtgcggctggcggcggagctggcgacgctgggcgccctcgagcagcagcgagaggcgggcgcggaggtgccgagcgccggcgacggccctggcgcggaggaggactttctgcggcagctcggcagcctgctgcgggagctgcactgcccggatcgcgcgctctgcggcggggatggcgcggctgcgcttcgggaacccggtgccggactgcgcctgctgcgctttctctgctcagagctccaagccacccgcctcctgtgcctccgctctctgctggatccgagtcctaggccaccccttggtgaaggggtagtggagggagccggcatggtccaagaactggaccttaccctccaagccctggggctgcccagacctgcaccagggacccccgccagccagctgctgcaggggttgcatgctaagatctcagagctgcagccttctctgcccccagggtccctgcagcccctcctcagctgctcgctagatgcacccagatgggaagcgttggagtctctgtcccaaagcctcagagatcagtaccgctgccgccgctgcctcctcctcaagcgccttgacctcactacatctgctttccactggagtgaccgggcagaggtgtggtgggcaggggaccatgcagaattggagaggcccagttgtgggggctgcagttgcagggaggaggaatgagggccaggagtatcaccctcttgcaggttctcaggccatggacattttataattttttgaggtttggggctcctagaatctcagggtcccagggtattgttgaattcccagctctgagctggcagtatattcagaggcataccccatcatttttttttttttttttgagacggggtctcactctgttgccaggctggagtgtggtggtgcgatctcagctcactgcaacctccgactcccgggttcaagtgattctcctgcctcagcctcctgagtagctgggattacgggcacatgccaccatgcccagctaatttttgtatttttagtagagacagggtttcaccatgttggctaggatggtctcgatctcctgaccttgtgatctgcctgtcttggcctcccaaggtgctgggattgcgggcatgagccactgcacccagccttttttttttattttttattttttgagacggagttttgcttttgttggccacgctggagtgcaatggtgcgatcttggctcaccgcagcctccgcctcctgggttcaagtgattttcttgcctcagcctcccgagtggctgggatttcaggcatgcaccaccacgccgggctaattttgtattttttggtacagacagggtttctccatgttggttaggctggtctcaaactcccaacctcaggtgatctgcctgccttggccttccagggttctgggattgcaggcatgagccaccacgcctggccaagtgtaccccatctttaagagatacgagcagagtcaggcacagtggctcatgcctgttatcccagcactttgggaggccaaggcaggaggatcacttgagctcagaagtttgagaccaccttgggcaacatggcaagacccccgtctctactaaaaattaaaaaaaaaaaaattagctgggcatggtggcgcatgcttgtccatctcagttactcgggaggctgaggtaggaggatcacttgagcccaggagattgaggctgcggtgagccaccatcgcgccaccacactccaggctgggtgacagcgagaccctgtctcaaaaaataaatatttatttgagctgtgggcagtgaggtcttgaatggtaaagtaatgcttccaagatgacaggtcccacgtggggaagggctccagggtaccttctcttacctcctccccactccaggcccaaggagaggccatgagggcagtgctgatcccaattcgagaggttctgaccccagaatcggacatctccattgcacacgttctggctgcccgagccgacctgtcttgtctcgtcccagccaccagcgtggctgtccgcagagggacctgctgtgccatcaacaaggtgggcatctggggtagggaagggccctggcatccttggccttcagattggcctttcagcctctgctccagtccaagtttcagacttaccacctctaatccacccactagacatggcagctagaaggacctcgctcacacaaaaactgactgtggactccccagctcagaatgcttccgtggctccctaatgatctgaaaacaaagtctagctatttactgagtccctggctacttctccagcttgggcttaaaatccttccctatcaccaaacactacctatttgttgttttttaacctttttttttttcaagacagagtcttgctctgtcacccaggctgcaatgcagtggcttgatcttggctcactgcaacctccacctcccgggttcaagcgattctcctgcctcagcctaccgagtagctgggattacaggcacccaccaccatgtccggctaatttttgtatctttagtagtgacggggtttcgccgtgttggtcaggctggtcttgaactcctgaccttgtgatctacccgccgtggcctcctaaagtgctgggattacaggtgtgagaaaccgcacccttttaaccatttaaaaaaaaaaaacaaagacagaaataggccaggcacagtggctcacgcctgtaatcccagcactttgggaggccgaggcgggcggatcacgaggttaggagatcgagaccatcctggctaacacggtggaaccccatctctactaaaaatacaaaaaaaaaattagccgggcgtggtggcagacacctgtagtcccggctactcgggaggctgaggcaggagaatggcgtgaacccgggaggcggagcttgcagtgagccaggatggcaccactgcactccagcctgggcgacagagcaagactctgtctcaaacaaacaaacaaacaaaaaacagaaataccctctgttttagtgattaggtatctagccgcatgcctctgtaagtagtcttatgtaaaatgagtattagggaataaagtctaacacagcaactattgaggcaaaatttaagttaagaaaaaaactgagcccgaggtgggtggatcacttgagcccaggagcagaggttgcagtgagccgggttctcgccactgagctccagcctgggcgacagagcctaggcgactctgtctcaaaaaaaaaaaaagaaaagaaaagtaggctgggtgcagtggctcacgcttgtaatcccggcactttgggaggccaaggtgggcggatcacagggtcaggagatcgagaccatcctggctagcacggtgaaaccctgtctctactaaagatataaaaaattagccaggcgtggtggcgcgcacctgtggtcccagctgcttgggaggctgaggcaggagaatctcttgaacccggtaggtggaggttgcagtgagctgagatcacaccactgcactccagcctgggcaacagagtgagactccgtctcaaaaaaaagaaaagaaaaaagaaagctcatgctagtatcttccaccagttcagtcccccctcccccagccactgtactcaaatagtcaacatctgctgtttcttcttcagcctcatgctgttcccttcgctctctggcccccttgtccaagatactttttttctctgcaactcaaatctcataaactctcaggtgcttatgggcaacgttccagaccgggggggccgcccaaatgagctggagcctcccatgcccacctggaggagccgaagagaggatggaggcccccagtgttggggtcgcaagaagaagaagaagaagtaaagggggactggtggtcgggggcggggggtcctccatgagatgctaatgctatcggtaatctctggggagtccgtttaaggctttccttggtatttggcacccaagccccccatctcctattcctgagtccccaaatgccctgctcccattcacgtcaataccaagaaccatgttctccagagaataaatttaatttatgac

SEQ ID NO: 75 - DNA, 3703 bp, Homo sapiens
gatgtgttttctgcctttctggactactttgcctctaagatgcagaaactgagtacaagggaaaggactccaaatccccagtatgtcccctgcaggagcagagttgaaggaggtcccaccaggtctggtgggtggccctgctcaggcttacctcccccttgtaggggtcactgggaactgtcaactgcgaaggactgtgatttccagtctggtatggtctgctctggggtccaagtgaggaaagcataaatcgggcaactctctcccagtgagaagatagaaggagcttctacagagaaggacgagattgaggagctgcgggccgagatgctggagatgcgggacgtctatatggaggaggacgtgtatcagctgcaggagctgcgacagcagctggaccaggccagcaagacctgccgcatcctgcagtatcggctgcgcaaagccgagcgccgcagtctccgtgccgcccagaccggccaggtggacggcgagcttatccgtggtctggagcaggatgtcaaggtctctaaggacatctccatgcggctgcataaggagctcgaggtggtggagaagaaacgggcgcggctggaggaggagaacgaagagcttcgtcagcggctcatcgagactgagctggctaagcaggtgctgcagacggagctggagcgaccgagagagcattccttgaagaaaagaggaacccgctccctggggaaggccgataagaagactttggtgcaggaggacagtgcagacctgaagtgccagttgcactttgcaaaggaggagtcagccctcatgtgcaagaagctcactaagcttgccaaggagaatgacagcatgaaggaggagctgctgaagtaccgctcgctctatggggacctggacagcgcgctgtcagccgaggagctggccgatgccccccactcgcgggagaccgagctgaaggtgcacctgaagctggtggaggaggaagccaacctgctgagccgccgcatcgtggagctggaggtggagaaccgaggcctgcgggctgagatggacgacatgaaggatcatggaggtggctgtgggggtcctgaggcacgcctggccttctccgcgctgggtggcggagagtgcggggagagcttggcagagctgcggcgacacctgcagtttgtcgaagaggaggccgagctgctgcggcgctcctctgccgagctcgaggaccagaacaagctgctgctgaacgagctggccaagttccgctcggagcacgagctggacgtggcgctgtcggaggacagttgttctgtgctcagcgaaccttcacaggaggagctggcggccgccaagctgcagatcggcgagctcagcggcaaggtcaagaagctgcagtacgagaaccgcgtgctcctctccaacctccagcgctgtgacctcgcctcctgccagagtacgcggcccatgctggagacggacgccgaggccggggactctgcccagtgtgtgcctgctcccctgggcgagacacacgagtcccatgcggtccgactctgcagagccagggaggccgaggtgctgcctgggctgagagagcaggccgccctggtcagtaaggccatcgatgtcctggtggctgatgccaatggcttcacggctggcctccggctgtgtctggacaacgagtgtgctgacttccggctgcatgaggcccccgacaacagcgagggccccagggacaccaagctcatccatgccatcctggtgcgcctgagcgtgctgcagcaggagctgaatgccttcacgcggaaggcagatgcagtcctcgggtgctctgtcaaggaacagcaggagtccttctcatcactgccccccttgggctcccaggggctctctaaggagattcttctggcaaaagaccttggctcagactttcagccacctgacttcagggacctgccggaatgggagcccaggatccgagaggctttccgcactggtgacttggactctaagcccgaccccagccggagcttcaggccttaccgagctgaagacaatgattcctatgcctctgagatcaaggagctgcagctggtgctggctgaggcccacgacagcctccggggcttgcaagagcagctctcccaggagcggcagctacgaaaggaggaggccgacaatttcaaccagaaaatggtccagctgaaggaggaccagcagagggcgctcctgaggcgggagtttgagctgcagagtctgagcctccagcggaggctggagcagaaattctggagccaggagaagaacatgctggtgcaggagtcccagcaattcaagcacaacttcctgctgctcttcatgaagctcaggtggttcctcaagcgctggcggcagggcaaggttttgcccagcgaaggggatgacttcctcgaggtgaacagcatgaaggagctgtacttgctgatggaggaagaggagataaacgctcagcattctgataacaaggcctgcacgggggacagctggacccagaacacgcccaatgagtacatcaagacactggccgacatgaaggtgacgctgaaggagctgtgctggctgctccgggatgaacgccgtggtctgacggagcttcagcaacagtttgccaaggccaaggctacctgggagacagagcgggcagagctcaagggccatacctcccagatggagctgaagacagggaagggggccggggagcgggcagggcccgactggaaggcagccctacagcgggagcgtgaggagcagcagcacctcctagctgagtcctacagcgctgtcatggagctgactcggcagctgcagatcagtgagcgcaactggagccaggaaaagctgcagctggtggagcggctgcagggtgagaagcagcaggtggagcagcaggtgaaggagctgcagaaccgcctaagccagctgcagaaggctgccgacccctgggtcctgaagcactcggagctggagaagcaggacaacagctggaaggagacacgcagtgagaagatccacgacaaggaggctgtttccgaagttgagcttggaggaaatggtttaaagagaaccaaatctgtttcttccatgtctgagtttgaaagtttgctcgactgttccccttaccttgctggcggagatgcccggggcaagaagctgcctaacaaccctgcctttggctttgtgagctccgagccaggggatccagagaaagacaccaaggagaagcctgggctctcgtcgagggactgcaaccacctgggtgccctggcctgccaggaccccccagggaggcagaagctgcccttcctcctcatcctggcccctccccagcccccgccaatactgtgaacccccttcccactcagcctggtttcctggtgagggtcctgcagtcatgggccctgggggacccccagggcaaggcccatgggagggaagggaccaagggcatccttgggccaactgtccacctctcttgtccactattctctcctttccacttctgtcttcaaaaggctccttcctaggatggatcgggtgctaggacaactgcagtccaatccaccagctctccctgcccctgtgtcttatttcagacatgagaataactgtacagtgtaaacttataaagcgtttttaatggttgtagattggaaataaagtatgtcatatg

SEQ ID NO: 76 - DNA, 3711 bp, Homo sapiens
cttccctggccagattcctgcctgtctcccagcagcctagacaggcccaggtcttgcctcacactggcctctctacatccagctcatgcctcacggtggcctctccaggctcaactcctgtcccaggacgtcatctccgggcccaaaacttaaagtcagactctctagtcccaactgctgcctcctggtggattatgaaggcccaaaatctcctcaagttgacctctacaggcccagctcctgcctcctgtcagcgtctacaggcccaacctctgccttatgggggcttctccaggcccacctcttcctcttggctgggtctacaggcacaactgctgcctcacaacagccttttttggcccagttcctgcccagctcccagcggccctggtagacccacaacttcccgaagccaagctccccaggcccaggtcaggcctcacggtggcctctccaagctcagctcctgccctccaatggcatctgcaggccccaaatggtctccagtcggtgggctcctccacgccaagcttgggcctcttggcgacctctgcaggcccaagttgtcctgaagtcggcctctcccggccctgcctcccagcaagtaagcaagctcttttggctcaactactgccgagctcccaaccgcctttctaggccccgaactttctccagccaagctcttcgggcctacttcctgcctcccggtggcctgtacaggcccagcactggttggagaacagcctctgcgggccccactcttgcctcccaggggcctctccaggcccagctcttgcccccacggcggcctcccggggccaggtccctgcctgcctcccagcagcccgcgtgcggcccagctccttctcacggtggcctgttgatgcccaactcatgcctctggcaccctgcccagagacatgagcccctgcctctcactggctcctcccacgctgagacaggtcagcgtgagcccttgcctcacaccggcccctcccacgctgggaggtcagcgtgagccccttgcctcacgccggcccctcccacgctgagagaggtcagcgtgagcccttgcctcacgccggccctctcccacgctgagagaggtcagcgtgagcccttgcctcacgccggcccctcccacgctgggagaggtcagcgtgagcccttgcctcacaccggcccctcccacgctgacagaggtcagcctgagccccttgcctcacaccggcccctcccacgctgacagaggtcagcctgagccccttgcgtcacaccggcccctccctcgctgacagaggtcagcgtgagcccctagcctcacaccggcccctcccaggctgacagaggtcagcgtgagccccttgcctcacaccggcccctcccacgctgacagaggtcagcctgagccccttgcctcacaccggcccctcccacgctgacagaagtcagcctgagccccttgcctcacaccggcccctccctcgctgacagaagtcagcgtgagccccttgcctcacaccggcccctcccacgctgacagaggtcagcgggagccccttgcctcacaccggcccctcccatgctgacagaggtcagcctgagccccttgcctcacaccggcccctcccacgctgacagaggtcagcctgagccccttgcgtcacaccggcccctcccacgctgacataggtcagcctgagccccttgcctcacaccggcccctcccacgctgacagaggtcagcgggagccccttgcctcacaccggcccctcccaggctgacagaggtccgcgggagcccctagcctcacaccggcccctccgacactgacagaggtccgcgggagccccttgcctcacaccggccactcccatgctgacagaggtcagcgtgagccccttgcctcacaccggcccctcccacgctgacagaggtcagcctgagccccttgcctcacaccggcccctcccacgctgacaggtcagcctcagctcctagcctcacaccggcccctcccaggctgacagaggtccgcgggagcccctagcctcacaccggcccctcccacgctgagagaggtcaacgtgagccccttgcctcacaccggcccctcccacgctgacagaggtcagcgggagcccctagcctcacgccagcccctcccacgctgacagaggtcagcgggagccccttgcctcacaccggccccttccacgctgagagacgtcagcgtgagcccttgcctcacatcggccccttccacgctgagagaggtcagcgtgagcccctgcctcaacaggccaccgtgggggaggagcgggcttgcacgcgggctgctgggaggcaggcggggacttgggcctgggaggtcaccgtggggcgagagctgggcctggagacacccctgggaggcaacagcggggcctgcagacgctcttctccagccggagctgggactgttcaggctactggtggcgggatgtgggcctgagggcttggttgcagaaacttcggggtctgcaaaggccggcgggagctgagccgggggagcttgtttgctgggaggcaggagctgggccgggagatgcagccgggaggaacagctgggcctgaagaggcccccatgcgggaggcagaggccgggcctcctcaagttggcctctccagacccacttgcagcctcccagcgtcctctccgggcccagctcttcctcccggctgcgtctccaggcccgactctggcctcccaacaacgtctttggactcagctcctgcccagctcccagcggccctggtagacccacaacttcctgaagccaagctccccaggcccagctcaggcctcacggtggcctctcccggctcagctcctgccctccgatggcatctgcaggccccaaatggcctccggtcggtgggctcctctaggcccagcttgggcctcccggcggcctctgcaggcccaaaacgtcccgaagtcggcctctccaggcccagctccggcctcccggcggcctttgcaggcccaagtcgtcctcaagtcggcctggaattaggcctggaagagcagcaagtcagcctctccgggcccagctccatcctctcggcggcctctccaggtgcaaaacttcctcgagtcagcctctccaggcccagctcctcctgcctcccattggcctctttcagcccagcccagcccagctcatggctctcggcggccttcccaggccccgcttttgacttttggcggcctcttcaggcccagaacttgccctccagtggacctttgcaggcccggcctcggcctcggcctcacagcggactctccacgcccagctagctctcacctcactgcggcctccccagtccaaagctcctgcctttcggccgcttcggcaggtccagctcctgcctgccagtggcctctttaggcccagctcattcctcacaatggtcttcccaggccccgtttttcccttctggcagcctcttggcctctaatttgtttatcttttgtgtataaatcccaaaatatggaattttggaatatttccaccattatatgaatattttggtaggtaatttatttggagttagtttctgcaccatgcccgaattttttattttattttccttattatttggtgttaaacagatttaatgacggtcatggcaactttttggcacaatgaaaaatatcgcccatg

SEQ ID NO: 77 - DNA, 5937 bp, Homo sapiens
tgcaggtaacaagggcaacagcctgagcatctcagagcccagaggcagagcgttagccgattgcttccagcatcatctggggcacagtggggtcttggttcctcaatgggcctgagtggatctaactctgcgaagttagatcccaacagccatcacagtttgcagacaatgtcattaagaccatccagataacttcctaactccagttttgtgcccaccaagcatccttctgatttcaaattggcctcgcatgccatgtgcaactgggagagagtgtgtggacagaaatggggccaattgactatttcccttggctgtcatatttttcattaataaactaactctccagccacaaatacacactcagaatgcctcttgctactccagatcctccattcactgtgaaggcaatcatggggattatgaattccatctcccaggtgtggattaaactgcatgccaggggaggtttctgtggttccaatctaccccgcttagtacatcagggctcaacaggatcaggtcaaagctggaaggatcctgagagcccacagaaataatgactcctgtgctgaggttcacaggagtagcactggggtctgtgaattcttggcaaaaattcagaaaacctaagggaatccatgcattagctgataatgaggccatacagactaactaaagcatcagccacctcattaaactgggaagcttaatactgtttttattgcacaatcatttctaaatgtcttttattaataaaattggggaaatgaatttgttattctttaataagtgcagtgtgtttagctgacaaaatttttacaaagatggggatcaatgggttgcaagaatactaaaagatgttcttgttctgcagggttggaagcccctaagccaccatgcactacccatcattttacaaaagaaggagaaactgaggaacaaagaaacacatattttccctcaagcttcagattccctttaaactcttaggatatcccataaccccctgtagcttatggcagctagattcatgacagacaatctctctagagtcaatttggtttttctcttaactcactcaagcctctgggaatgaaaggtctagcccttgaaggctacttttggtagaagacgaggttcagtattaaaaaggaggacagaggatggaaaagaacacaactacatcaatagtttctccacattatttgatgttcagaacagtcccatgaagaagatataatattccctttctacagaccaaaaaattaatatttggagaggtagaaagaccacccaagggaacacatatttagacggaaagcccagttctgtctagtgtttaagtcctggcccattcagctactctgctctgtaactatcacccatttcagcaccgcggacagaggcagagccctcagtcttccctgtaggtgggatggaggcagagggtggtaagatgggtgctaagtcccagggaagatatgtatccaccaaagtgcctgaatgatgagagggaagtcagagctaaggaaggacacatcatggacatctctttacatgtgtatcaaattgcgttctgtttagaaccattttctagcctcccaccaaggacgtaaacaggacaagcactgtcatctgtaaagtgccactcccagactgccacccagagttcataaaaggctcagatgaatcaataggtgggaaagttatctggaatttataaaaattcactgttaaggagacgactatcacagacaaaccccaaaatcagcggtttaacacaatagacattttttctgacttgtgtaaagccccagacagggatcgctgcctgtcaaaaggcctgactggcacttgtcttgaggcacactctggtgcccaggccccttgctccttgttgctctgccacctctgaagtggcttctaaggtcactgtatttatctgtgtcaagacagaggaaaaaatcatgaataaataaacccagggagatttgtatgagccaagcctgaaattggcacacatcactttggctcatacgtggaggactgggagtgcagaaagatgaggaaatgggtcttactgaacacagaaccacagaactctgtctccctcctctccaaagctgagaaattgccacaatcagaaagtgtgattcccatctgagagtttaagagcaggaatagattaaagacaaatcatgtaaaataccttgactcctagacttgccgaagcattcagcctgagccatctttacatgtggataatcttggatttcccaactgggcttcttgcacactccatggtagaacgtcagaggaaatttttttcaagcaagagctgttagatcatgagattccccagaaagatacagatacaggtatatgtcatattactggagattctaattcagctaccttcacaggcctgggaatgtgtttttgacacaggggcattaggattgtttcagctgcaagtgacagaagtctagctcacacggtcttaagcaagaaaggaaatgtattgattcctataagtgcaccaggatctagatacactgtcaggcacagctggatgcagactccaacagtctcattgggatacccaccctctcctcccatctctgaccatcccaggtggctcccttcatgggtcaaagtggccaccagaagctccagatacatctttttatcaacagccccaggagaacttctctttctcagtaaaatcccacaaggtattttttggcactaattgtcttggcttggtcccattcttatccctgaaccaaccactgtgaccaaaaacgtggtattctctgattatccaagcctgattcacgagcccacccatgagtctgatatgaggtccagtccatacaatctacacaagctaggtctggggcatggtggtgccccaaggacagctggggtgcctttcctagaagaaagggggcagggaatgggtgctggaccagcatcagcagcagaattcttaggcactagactgtggggggctcagagaggcatgggagccctgaggtccccacaaggtgtgggatagtctttcagaccttcagggggggtctctgctcactaacctgctcaaagcaccctggcccacaccgtgggcagctggaaggtgccagtccactgaacatgtgtgattggcatgaatctcctgctttcctttgtcagaaggctaggagtggatttgacccgtttactcagaccctctcagtggccctgctcccacaggctcaccccagcagggcccagtgcttggctgccaatgacgccaaggatattagctgacagtgacttaaaacaggggttcatgacctcagggtaaccgaggaacccctgaatctgaattcatcagtctgtgtatatgaatgtgagtgcctctcctttccccacaggaaaaaatctacaactttcatcaaattactcagggagactttattctaaagagactgaaaacgaccaacatcaattttgactcctatgggcatctgtaaatagcttcaaggttttaaggtgaaatgtcatgtaccaaaatacacattctggagaagcaggaagctacagaccaacttgagatgaaagtctcatatcaatgttttcccaagtgtgctccttggaatacaggttgacatgatatgatgcccagcaagggaaacaaaacatattcatgttcaaattagttggggaaatgctggactaaataaggtttgatgggattcttttttctgcaggacttctcagaaggggctagagtaggcaaagtttcccagatttacctaataaaagcattgtttctgtgggagtttcatttgttattacatgtttcctgaatgcagattcatagactatcctttggggaaccctcgtcctcacgggatgtatgttcatggtggtgtcttcgagtttgtgcccttgtgaagcattctggcagcaagcgtctgaacacttccaaaagggggcgatatttaggagaaatcgctcagcctgaattagaacaaatgcagctgctggtgtctcttggtgcctgggagccctagagtgtcagagggaggagcgtgcacactggaaccagcagcctggtgctgcgtctcagctctgtcgctaactggctatgcacctctgggcatggcacttaacccttctgagccccagcccgccatctgtaaaaagggcttgatgtgaggattgaatgagatcatgcagggaacacaatgtctggcacttggaagcgtccaccataaagagccaaggcagtagatggcccagctgggtttgttccaggcagagtttaccctctgccctggaggctccaggaaatgctgccacgtggctcctattgccttaaccacatccgacctgttcctgacagctccccacatctccagctcctttgctggtgctccaggcacctccaaacgtggcgagcccctctcccctgccctcttgtggcagctgacctggcaggagtgggaccaagacatccaaggcagctcctttccacctgcatgggcactttcctcaggacatccttgcccctggcaccaccttgggccagcaagccacatggaaatggatgcagaggcaccactgtttgctgacaattatacactgtccttaaggtcacccttggcgatctgtcaccaggagcagacaaacccacacctcaaccatcccatcagagcttgtttctatctgcatctgtcatcgctgatcgcatttgaatgggtttagtctctattttaaataaaagatttatgccttagctgtcagagcctgcctttatttgaaaatttaatcttgtttctaggagtctagattaacttattagatttaggcgtccctcgtgggtctctgagagaggaggagtagattctcctccctgcattcggccctgcacacccgacagtgagagccaagagctggatgggcttctccatccagcacgcccaggctggacagaggcccccaactcaggcaactttgtcgggtaaccgtgtgtccagggagtgctttcttgcacgctccgtctccgggccagcttccaggacctgtgctcactgcaagggacacccatcgagccggccctttctcagaggttttggggaggcttcaggaaggacccccagtgggggcccagcttgtcaacatgggctgtgccaaggagttctgagtttccttcaggtctgtattgtatcttccaccccctcagagctccctccctactgcttagaccacacgaagctgtggggctgtgggcagccagttcacttccctgaccttgtctgcaggtggagacagtggcagtgcccctcccgggctgctgcgtcactcagtgtaaaagcagggaggcactggagagctgctgtctgcaagtttgttgctacttcaaaaggtgcaggtgggccctcacctcctttagaggtgaggatgagctacccaaagtgaaaaggagcttctcagcgtcgcaatggagtcacggccaggctgcccacaccagccgtccggacctgcaccagtgccacggggtctgccccatcttctcttccctctccttcccctctccctctctctccctgtctctttctcctctctccatgctattgactgaatgtttgaattccctgcaaatgcattcctaacccccaatgtgactgtgtttggagacagggtctttaggaggtaactgaggttaaatgaggttgtaaagatggggccctgaaccgatgggactggggtccttatgagaagaggaaaaggggtccctccccatggagggacgaccacagcgaggcagcagccgcccacacgccagagaaggggactcagagggaagccttgcttcaccggcaccttgatcttgactcctagcctccagaattgtgataaataaatttctgttgcttaagcccc

SEQ ID NO: 78 - DNA, 3879 bp, Homo sapiens
cttttttaaaatcacaaggctgacacttgggagatgctggataactgcctcgctgatcaataaggctgtgatgggcacctttatcttcaaccttaataacctcctgattcaagtccaggtccctatagcaaggaatgaggacctctcggtgtgaggctctgccctgcctaatgtgcttctttgcccagcatctgcccaggccctgtaccgagtgctactctacagagtgaggagggcttgggcttgcagtcttttaggattacctgcagctgtgggcacccatcccagaccatgggtgagtgggtgctgcattgtggcagaggccacagggagattcccaaagctgtagagcccctaagagggagatgctcctccaccccttgctgcctgcctcgcttatgccaccccaggcggcatgcccacatgctggccccctcagctcatcaggcttccaagctcctgcagctctcaagttccctcccacctctttgtcagcacagcgactgccctagctcagcattttcccttgctgggccactcggacttgccctcttgcctgctctcttgtgcaactcagtctgttctcccccagcagctcttgcacacacagatctggctgcttgaaccccatcaggggctccctggtgtcctcaggttgaagtccaacagggtcctccaagacctgcccccatcccccaggcttcccatctcaccataacctggcccttctctccccgtcagcacctagctgacccttcttcagtctttccttaggtatcgcctcctccagaaagccttcctagactgtgattggaatggtctagctgcacagcctctgtgctgctttccacaactccctgagcctcgttttctctgctcctgtggatggttttaacattttctgtttgtgtatttgacaagctcctggagaatgaagcatccccggcttgaggacggggactggctctttcacttagtaattccagcacatagtgctgtgctcagtcagcttcgggtctctccttctctgtatgtgggtctcccatttctccctttctgtctgttttgtcacccagccgctgtcccccaccacatgcctcagctcccaccctgccctgcttctctgctgcattcacctttccatgctttgcacctccccacacttcctcagggatgcccgtttccccttcctgccctctacccaccacaacccttccctgctctctggcctggcagaggcgcacctctctgctgccatccccttgaccttcatggttttgctcttcctcctgtctctcctccagctctgcccccaccagatctgcttatttccaccctcctgcccttctcatctctctgtgtggttgtctccatctcctgtctctgtggacgtctctctcttctctttgtcccactgctagtctctttctctctttgtctctcttgccttttctccgtggcctctgtacaatgcacatatgccgactttggcatgggggatgctgggggttggggggccctgccctggggtgtcgtctttcacctctgaggggtgatcactgagggagccacctgaacacaggctggtctgaggcctctacgggctgcatccttggctggggggccctcacctgagcagctgcctcttggtcccgaccccctctgcaagtgtgtgtgggtgtgtgtctgaatgtgagaatgagtgtgtaggactgtatgtatctgtgcatgtgtgtgcatgtgtggaaatgaaccagggagaaggagccgcagacctgggcacagtgaggaaaccccagggcagcctcctcccagagggctgctcccctagaatctccttggggccatgatggcaaagaagcccagtcccttgtatagagccagctgggacttgggaaccagatttccagccttttctggaaccagattttccagatccttccagtcgtttaggatctaaattttgataacacctaatcagcagttctcaaagtgtgggccccaaaccagcctcagtttcacctgggagcttttttgaaatgcaaattatggggctccataccaggcagattgattcagaaacctggagctggggggtggtgagcagcaaggaggtattctgacaccccttctgccccagtttgagaaccacggatttacatgataaggtgtggtgagtgccctgtcagataaatcatgcaaaacagatatgaaggagttgttttcaccttccatctctcaggcaacatagctgaacaacatagccaaattttcagcctgagccagaggcttcttagatctttccaccgaagacaaggaggttacaagcatggcagggagcaaaagcaaggcaagcggcaggtaacgtgaaacagctccagcaagggacagtagcattgacatttcatgctttgatttaaaatcctatgcagatttagtggctcctgggaccatcctggacttcctgcactcttccctctaagtctgaacctgcagctgctgccagtgactggaagggcaagtccctgattgcctcctggaagagctgctcctcaatttggagagcaagagtggggcctctggaactgggaggaaggccttggagatccactgacagcccacagccccttcccagatgcccctgggccagaccagtcctgggcagtgccccccaggtcctgcttatccctgttcttctgtgtctgcccccctcaggagttctctccttcagagatcagcagagagccttctcattacagtggggaccccaccaccaccaccccggttacatcatttcattccctgcactgagctcccagcccttaccacctccttggggctaaatacctccaggcattgccattgctgcatttcagcccgttatatttgtaaagagcaggctttggttgccagggtctcttcttgatcaaagatgtttcaaactcctgttcccaagaacagggcttatctcccaggttaccggttacagctgtactcagcttgtgcagtgccttgggcgaatgttttttgtgtgtgggacctgtgtctatataaacaatttgattttaaaatgtaattaaaaattcttggcctatatgaggtattatgatgtattgatgaaggtttacaataatgaggagaaaagaggtagtaacatatttgtttattttccaatctgtgcatgtgaagattctttggcagtgtccaagaattatcttttcttgttcaggtccaggaaccatctctttgtgttctttattgtcaaatgtcactcctggctaatttcttatctcccaccatgaggaaaagatgacaatgctgctgttattcacaatgccatggctcttagggatctatttgtattaaaataatatgaatctccttgcctctgcagttccctatgtcccctactactgtgtatttaatgctggttgcatctgtatttacatgtactgagtactgaatattgagtactgagtacagaacaggtggctggggcaggatgggaaaggaaggttacagggaaattcctcagaaactaacaaagaaactcatttaaatgtgcttgggcagctctttaaagagatatttaccatccagatcactatcccaaattcttccacagcctggggcatggcttttagatgtcaatcatccattccctcctctctgcttccttcgcactttcttccaaaagaacaaaatcctgattaagtgctttctgccatcatcaaaaataggaattcaagattaggaataataacatagctgggcacagtggctcgtgcctgtggtcccagcactgtgggcggctgaggctggaggattgagtccaggagttggagaccaacctgggcaatacagtgagacccagtctct

SEQ ID NO: 79 - DNA, 4647 bp, Homo sapiens
atttgctgaccgtggccttttcggtccaaggtgggaggccacagggagcagagggtcggaggtacagagcccagaggcccccaggacccaggcaagctgaagccctcggacagcccatatccagcctcttctttgctttcagataagaactttaaaaagaaaacatcctacagaaaagaagctcagcttttccccgctgctggctgagtgggtttcctaagagcgggtatttcctccaccccagcagcgcttttcagcgaggagcatctccgtctccacggagggcagcctggaatgggggaacgcagtcaggctgacattgctgtgacctccgcggctcggggtgggctgctgaccgtgaccaccggctccgaggaagaaagagcccagatggggagtgtctgccaatacctgtggtgcaaatgctcccaccggggctggcttcgagctgccaaggggacatgctgcaggcaggggcgggcaccctgcggtgacacccacgtgacccgacctcagacagacacgacccacgaccaacctctggatcctggaggagcgcacagggccgcagcgtgagaggcagtggcgcgtgctgtgttcagcgcttctgtttttagtgacttctttatttgtaagttcttatgatttaatttgtttttgagatatggttttgctccatcactcaggctggagggcagtggcgcaaccacagctcactgcagcctcaacctcctgggctcaagtgatcctcctgtctcagcctcccgaggagctgggaccgcaggtacacgccaccacatccagcttatttatttatttatttatttatttatttatttatttatttctgagacagagtctcgctctgtcacccaggctggagtgtagccgcgcgatctcggctcactgaaagctccgcctcccgggctcacgccattctcctgcctcagcctcccaagtagctgggactacgggcgcctgccaccacatttggctaacttttttgtatttttagttgagacgggttttcaccgtgttagccaggattgtctgtctcctgacctcgtgatccgcctgcctcagcctcccaaagtgctgggattacaggtgtgagccaccgcgcccggcctatttatttttttatctgcagagatgagatcttgctgtgttgcccaggctggtctctcactcctgtcctcaagccatcctccctcctcggactcctggcgtgctggggttacagcatgagcccccacgccaggctgatttaattttaatagttctgtgtatgacggccagctcacccgattccaggacatgaaggctcagctcttaggagctggctctgcacaccacctgtgcgacggctgcaattcacaccagaccccaacaagaccgaggctttggtctgaccgtgaaggccccggcgaggacagcaccaccctcagccccaggcaagaggggacctgtagttcccctccagccccgctgaggcctgagctgccttcgcaatcccatcctgagtacctcaaggccctggggttcccgaggctcctgccccaaaggtcccacgagcaccacgtgtcttcctcttccaagtcctctgcctgcggtgctgggcctggtgtgggggcagccaagggcgctctgtgcaggacccggacccagcatggccactcggagtgcgggcccggcatcccgaagcccccttcccgtgagagtgaagccgaaggcgatggagggaggcaggaggcatggctgtgtgtcctcgggaagctgagatttctaaccttgagtctgaacgtccaggctggtgtgaagtctgtcacggcgggagcacggaggctactctgcgagttccacggggcatcagccggggcggtgttatttaacgccaggacgtgcagtgtatgggcctctcttggtctctgggccctgcctgcgttagggcatcggccgggtcggctgtatttaaatgcccatgtagtgcctgggcctccacagagctctaggccccgtccatgacggtgcaggcgtgttctcggtggaaacacagccggtgaaggcgggaggaggtaagagtgagctctccctgcctgggagtctccgaggggtccagactgagggttgggggtgcaggaggggaggccccagggctcagcggatcccaggttgtgcagggttcagtgggtttcattgaggaatttggactctgccccaggggtgacgggagccaacaggcagcggctacctcctgcctcctctccgtgatccaggtgctcagaggagccaggcagcatggctgaggccacacagacgtgcaggagggagtgcagagcagggccccgtcgtgcctgaggatagaaggtgcttccttcctggggcagcagcctccctgcgagaaggcggctctccagggctgcctggaacgcataaccgacggcttgcaatctgcaccctgtgatttatttatatggggttgaagtactgcaggggtcccgtgctgctgtgtcaggattgggcccacgtagcgcgcagaccatttgccttgcatgaaaaatgcatgatggcgtcgggaagccgctgggaagtttcgcgacgcccgtgcaggggtcctcgcacggccgactggctgtcagcgccccggtcctgccgcccatgttgccaatggatgagccaaatgtccctcgtgcgaggggccttgtagatcctgcagacaccgcgcctctcaccagggagtaagggaatggtcttcccctgggacccacgagttcatcctcagctccaccttcacccacaggccacggggaaaccgcccggttgcagggggctcagcacaccaccaagagccttttaaaaaggctttgggtaacagggaggaagaaagcccagttttaaacaccaagtgtggtctgcgggaacttcctagggcagcctgtccagtgggagtgtctgtggtgatgggaatgcccgtgtctgtgtgagccacgtggtggtcactggtcacatgtggagacgggaatgcccgtgtctgtgtgagccacgcggtgggtcactggtcacatgtggagacgggaatccttgtgtctgtgtgagccacgcggtggtcactggtcacacgtggcgggaatgcccgtgtctgtgtgagccacgtggtggtcactggtcacgtgtggctgctgagcccttgaaatgtggctcgtacagttgaggaagtgtggcctgtgcagttgaggagccggcttttaaattttatttaattttaatgaatttaagtgtaaacataaatagctaccatatcggaccatgtctaggttgatgacatattgtctttttttttttggctttttaaagtggttgtatcgttattattatttaattaaatcaattaatttttgagacagggccttgctgtgtcgcccaggctgcagtgcaggggggtgatcacagctcactgcagcctcaacttcccatgctcaagccgtcctcccaccttagcctcccgagtacctgggactacaggcacgtgccaccacgcatggctaatcttgtactttttgtagacatgaggtctcgctatgttgcccaggccggtcttgaactcctaggctcaactcatcttcctgtcttggcttcttgaagtgttgggattacaggcgtgagccacctgtgcctggcctattttttatttgtaaatataaggggtacaagtgcagttacatggaaacactgtgtagtggtgaagtcggggctgtcagtgtagccatcaccagagagcgtacatcaaacgcaccgggaactttctcatccctcgccccaccctcctgagcatccacgggtgagtgttccccactctgtgtccacgtgcacacatcatttagctcccacctgtaagtgaggacacgtgctctttgtccttctgtttctgaactgtttgactcagcactatgttctcccgttccatccacgttcctgcaaagggcacaattgtacactttttcatggctgaatagtactccatcgtgtatatgcaccacattctctttctccagccgtctgttggtggagccctaggctgatttcgtgtctttgctgttgtgaacggtgctgtgatggacgtgcacgtgcaggtgtctttttgatgtaatcatttccttcgagtagctgcccggcagtgggattgctggatgagttctgttttcagttctttgataaatctctttactggggcagtgggattgctggatgagttctgttttcagttctttgataaatctctttactgtgctccacaggggctgacaatattcccggtgagggtttgggagacgcaggtgtgtgcacgtctcagaactcatctcacggaactgttaagatctgtgaattccactgtaaattttacctaaaacaagagaactgttgacagatattggattctagttaatacttctgaaatatttgtattgaaatatactgttgtctacaacttcctgtgaaatgcatccaataaaataagatgggttgacggaggggtggggggacggagaggtgactgggtctatggtgaagaaatgagccagtgttgatcgtagaatccaggcagaggtgccgggcttcgcaataaagtgctgaagaagctccaaatac

SEQ ID NO: 80 - DNA, 3633 bp, Homo sapiens
ctgtcctcagcaggtgccctggccctgaccccgaccccagggtgggcgacacagtggcagagcccttcagcttcctggtggcttgcacgccccacccaacccctgtggctcgagccacagcaccctcccctgagccttgcaggcatgaggacacccagaacttcctgagggctgtggagtttggaaaccaggggccactggcaccagggccccagctgccaccctctgtgcactggccagtcctgggccaccgaccaacatggacgaccaccggcctccaccccacaccagcctctgcctctgtccactaggagggagcccactgtccccacaggccgtccctgcccatccccctgaactcgccctcctgcttttgccccggcctcccccgatcgtgggttcctgggggcaaggtctttgctactttgttccctgggctcagaaggtcccaacaaagtgggggcagggagcccgcaggcccccaggccatacctgcaccagcgccgtgcacagcccaaagatgcccacagccagcaggttctcctgaagccacaccttcaccgtctcgtagcacggctgcagggagggatgtcatgcgtgtcacggcagggcctgctggtcccgccctctaggcccctaccagcccccagggtgggggtctcactcaccgccttccaccaggtgccgggggcgtgcagcccacagctctcactgaactccaagcagcaggagtcaggtacccgcgtggcgttgtacacctcgaaccagtcagtgtagttggagacgccacagcagcggaactggggggcaagctcaggtcgggctgaggcaggaggggagggggcacccgccgaccccgcccacctgcccacgcctcacgtcggtctggatgatgctccaggcgttggtgaggcccacgttgccctgcgtgccgtacaggtgcaagcctttcttcaggtcttgctgggcatacctgtcaatctgggggtgtggggggggtcagcagggcccctcccactgtaccccgcctccctcatccagaccccttcgccggcccctaagctgggcccctcctgcgcctggtcttgtgtcccccgcgcctcctagcccaccaagctgcagacacaccggccccatgtcctcccagcagccctgaggcccagggcccccacctctgggcttcctccccaggctgggggaggaccatgggtcctggggggacagaggacagggacataggtgcctccacgtatcgggacacgtgcagccatgctctgtgagctgaaagccaggggctatgagcgctgagcccacccagcaccctggcctcggtccccaatattcagtgaggacccagagcaccctggagaaggggctgattcctgggccagggcagggaatgaaggagcctggagcgccctgcagtgccaggaagtcaggacgtgccccaaaatgaaaagtctgttgatgggggcacgtcaggggacccagcagcagacggcagaagctccccagggccaaggacggacagtgtgattcacaaaacaaagtagtgttgtgttctagctcggagtgcaacctcaatagccaggacttcatcccaatataaacaaatggctgaatatatgagtgagtgaccaagaagaggccgctctacagagcagaaccccacggtgcgcggcccggatggggcgctgggagcagacggctcaggacgctgcgtcagagggcgggggacaacctggggcgcaccctccgggtggggtagcagtgcccttgtgccccagtcgctatagagccacagcacagcctcccagggtcgctggcgctgcccctccaggcctggtaaatccacacccgctgtcctggccgcccgtgagggcacatgcagggccactctgtccacaccgggcccacagtgctccctgggagtgaggatggagcccccagccctgcagttgggcctgcggccaaggcagccgtaccttgtccgtgtaggcgaagaagaggatggcgatggtggcctccagcaggaacaccagcagcagcagcaggaagaactgtggagggggcaggctcagacagggacccgaaaggccgcacagcctccgccccacagcatgccaggggccagggccacgtacctcatggatacctggtgctgccaggaaacctctgccaggcccccactcccagagagcccagaacgccgcccccacctcagaacccttggccccaggtccagggactgtggctgttgtgtcctgctcagcccctgagtgtggggccctgggctggcctgggctcccctcccctgcccccatccctggggcaacccagacacccccaagtgggcacaaatccctgttcctgaggccccagcccctgtcagctgccttcaggacacctccatccaggggcctctgagtgtctggcaggtgcctcgctgggtgcctgtcttcatggtgggaagatgtcccagcaggggccacagctgggctgcagaggccccttctgcccacacgtcacagtcctcagggcagccagcgtggctgatgccccctccagcaagaccacaggctgcaagccccacctctgaccatgcaagcttcccccgcctggcggcagccccaaagctcagcctgaccccagccctgctgctcctccatgcgggggtcagtgacacccacaaaagaggagggcaggcatggacagcatgtgtccaggagctggggggcccaggcagagtgggcgtgagtggggcagacagggtgctgggctaaggacacaggagtccttcacccccaggaggtacccagggttctggtcccaagtcacccatgggaaagggggttgggcttcggtccctgcaggcctggtggggcccacacacagcagcttcctcaactgaggagctccaagccccagtagggctgccacagacccccaccgactgcctccaggggtctctgggccccaacctgatgccagggaggctgatagacttggggcttgcccccaggaaggggtacggaggggagtggactggctgaggcgacctaagggaggccccaacccatccagggcttcccagacaaaggagtgatcggaagcctcgtgatttaggacctcagcaggctgcacaccctccgcagggcccacggcctcggccaggcatgttaatcagtagcaagcctgtgtttccatctaggagcccttttcctttttaattatctgtgattaacatttctaaggaggataaacatatccctgcctgtaagtccatccccgaggcgaggtgggggctgggatcgtcccagcagccggtcccagggagctgagagaccaggcccccaacaagaagctggggaaggggccacagtgggggtggggtggtcaggaatgagtcacggagaccgcaagcccgtgaaaggctgcgcatgcgtgtgagtgggggtgggaggcgaggtgcatgcaagcgggggtgcatgtgagccggggtgcgtgtgagcaggcgtgaatgtgagccaggtgcatgggagcctggggtgtgtgggccccgaggccccagcgtgctggcagacccacacagataaaatgcgtgcacgtggttaataaaattacctgcaattt

SEQ ID NO: 81 - DNA, 5789 bp, Homo sapiens
atacattgctgcataacaaactactacacatttaacagcttaaacagcttaaaatctcacatatttactatcctacagtctctctggggtcaggaatcttgggacagtttagttaggtcctctgcttcagagtctcttacaaggctgcaatcggaggtgttggtcagggctaggttcttacccacaggtccacctggggagagattcacctctgaggtcatgttgttgttggcagaattcagttccttgaagtttggactgggagcctcagttggctcttggctggagaccacctgcagtttctagtctcgtgggcctttctaacatagcagcttgcttcatcaaagtatgcaagcagaagacaataagaagagtcagctagcacaatggaagctacaaccttatgtaaccaaatcgtggatgtgacatcccatcacctttgctgcatttgttcattagaagcaagtcataggtccacccagactaaagggattacccaaaggtgtgaataccaggaggccatcttagactctgcctgccacagctgggttgcagccagacctgcctacctctgaaacccaatgcactgcaaatagttgcctggagatcctggtgagcaacccagcttcttacagaagtaagaattagtggataagtttgacacaaattgttaagaatgatccagagtcttttgctcttctagacttactcttcttgcaggaagtgagaacaaatggactgtcagctggaatagaatttcttgtatatcaagaccagcatcctacacagagccctcagtaaaactatttgcatgaacagattttgggctccatcagctcgattgccctacttttataacaaatgtttataatatccttaattctaagatgaaatccataaataaaatgtccctgcccacataatttcaaaatatcaatatgatgtaactgtaatatacaaaaggaaaataattataacaaaaacaatgtgtctcaatatatacatgctctaaaataaagtggttgaatgcttactcctgaactcagaatcactgctaatgaaatagttataaatgcagactgttacttgacactgggtgtggaattagggactcagattctacaatttgcactggtggtgtgattttccaggaagacaaataatatttggaaacattctgaacaaagcaaaacaaaaaccaccccataatttacaaggagttacacttctggaaaattcagcgtatgttcaaattgtgaaaaacagaaccttgttttggaattagtttagtcttgagtaattataggtaaggtttttatctacacgtatgtcatgcaagacattggagggccttgagataattcattatacaggactctactgcatttaacaggacaaatgtgtgggacctggcatttctccctacacactccccccaattggggaatgcctcaattttgcaacaataaaaacgcccttggatttcactagtgagcagtgacacttgacattgcaaaccactgcaatggtgcctaacctctaggtgagaggaaagcaatgcagttatagacttggttggacaccattaagttcagatatcaaggagtaccatgagagagatggaaatgaaaatcagtggcttcaaagtatctactgtggcccagcagcgcaggcacagttagggtgcttaaatcaagcaaaaggtgcagtgtcagctaggggtggagagagaacactgtgttagggttttagaagtggacatctcaaagcagatactttgcacactgaattttaagaatactgatgaagacaggtaccatggctcacgcctgtagtcccaacactttgggaggctgaggcaggaggatcacttgagcccaaaagttcaaggctgcagtgagctgcaatcacaccactgcactccagcctgggcaacagggacctcatctctaaaaaattgttttaaaagaatactgacagaatgctttcttttccaacagaaacctgtttccctccaatcttgtggttgcagctttccgtacgtatgcaaccgattataaagtcgtgacccagaacagcagctctggaaatgtaacccatgaaaagatccccataggcactgagatagaagggatgaacattttaggattggtcctgtttgctctggtgttaggagtggccttaaagaaactaggctccgaaggagaagacctcatccgtttcttcaattccctcaacgaggcgacgatggtgctggtgtcctggattatgtggtacgtacctgtgggcatcatgttccttgttggaagcaagatcgtggaaatgaaagacatcatcgtgctggtgaccagcctggggaaatacatcttcgcatctatattgggccatgttattcatggaggaattgttctgccacttatttattttgttttcacacgaaaaaacccattcagattcctcctgggcctcctcgccccatttgcgacagcatttgctacctgctccagctcagcgacccttccctctatgatgaagtgcattgaagagaacaatggtgtggacaagaggatcagcaggtttattctccccatcggggccaccgtgaacatggacggagcagccatcttccagtgtgtggccgcggtgttcattgcgcaactcaacaacgtagagctcaacgcaggacagattttcaccattctagtgactgccacagcgtccagtgttggagcagcaggcgtgccagctggaggggtcctcaccattgccattatcctggaggccattgggctgcctactcatgacctgcctctgatcctggctgtggactggattgtggaccggaccaccacggtggtgaatgtggaaggggatgccctgggtgcaggcattctccaccacctgaatcagaaggcaacaaagaaaggcgagcaggaacttgctgaggtgaaagtggaagccatccccaactgcaagtctgaggaggagacatcgcccctggtgacacaccagaaccccgctggccccgtggccagtgccccagaactggaatccaaggagtcggttctgtgatggggctgggctttgggcttgcctgccagcagtgatgtcccaccctgttcacccagccgccagtcatggacacagggcactgcccttgccaacttttaccctcccaagcaatgctttggcccagtcgctggcctgaggcttacctctcggcactggcattgggctccccagccggaactggttaccaaggacaaggacactctgacattcggcttgatccatgtccaggtgcaactgtgtgtacaccagggatctgtttggaaacaaccccttgagctgccaggctcaagaaatcatggactcacagggtcctgtgtggttacatcttggaaaaaatgcagatgtatttcactctccccggtcagctctgcatcaggtgttttctgagcaaaccaagggggtttatagtcatctgtcgcattgcctcgagttgcagtaattgaaaaaatgctcaaattcttagccatggctggcctttgctgagctgggactcaggtgtttaaagagtttgtgctatagctaggtgtggatagcttctgatccctgggttctgggagactgcaggtgccgcacattgtcaagttagaaatactccaggtgggtgttagcactgtggtggtctctggtccacagccttaggtaaacaacttagattctgaggtcaaagaaaaaaggagagggaatgcagccttgtgggggagaagcggggcagagggttctctaatctaatcaggacaggacaggtttcacatacaattgtcccagttcgcatcccagccctggggcacttttctgcttccttccagaggcctgggcctctgataacactttggctttttctccattcacgctgatttggcaaaaggccagagatgggcctccttccctggggaggtgtgatgtagttatcacattcaggacccttgttgatttatcatctattatttgaattcaactggacactctgtagaatgctgcactgcagcaaaaacaaaaccaccaccaccccagagaaaaccatgtactaattggagtggggtacccccattcacaggttcccaggtcccctggctttggctgatttcaaaatatagagccctttcttgccagtacatccaagtttaaaattatcagcgaaatggtccatgtttttccaattacctgctgacacggttctaagctaagtgaaggggaagatctgagagcgtgctgtttgtggctgttgatgcatattcgtgatgtaacaggtcctggggcctcactttaccccatttgtaaaatggggctaatgtcacctgcctcttacctacctcagagggatttggtgaagcaaactgttaatcttcgaaaacgaccatttcacttcttggatatcaagtgctaacccagtatgttcttcttttttatgtaagggacagctttctccacagagtcctttctgctggtgaggacagcatttctgagcagggctttgttctctatgtgcattaggacttttatcatgcccttgttctgtgtgtagttacttgacagcatcaaatgccgcctcttcctaatgtccttcaagttttcatgaactagcaaccccaccttccaccatggttctgggcgcctgattttgctgtgactcccagacccagccactgtttctgccaccctgtaacaggccattaaagctccccagtgttcagcctccttcactcccttgttttccctgttgctatgtgtcacctgggccctacagacaggggcacacgcttatggatgtgtgtaccattgagatgagaatgggtagatggaacggagaccatcaagccacacccccttcttaaaactggggacatgagcctgagcagaaagggtgaagaagagccatgggacacagagttgacccagccagggggaaagcccagctctctttaaaccagctaagccattccagtctcctgtgaagccaaaagggaccaggaaccgtgcaaaggaaactggaaacttttccccgctgggtagagcatgttgctgatactcttctgttttcaagggaaacaatcacattgtttgattccaaatggtaaatgaacactcactattcttcaggcttcagtaaatctttttttcttccttcatatatatatacacaacacacacacacatatgtatatctatacacacatgtgtgttgtgtatatgcatgtgtgtgtgtgcgtgtgtgtatagttttagctccaagccaagcaagtttgtgtttggatagaggggaacttaactattaactacaagttgtatgtctgtggtatcttgattttcccatttctaaagatgaatttcacaaagccataaagcgtgaaattagagctggacttaagactcattggccgaccatcctgtgtcctggcctggccctgcagtaagaagcgtgtctgggtctggagaagggtgcttccgagagtgtgcaggtggcccttccccttggaggcgagaagagagaatgtgctgtctatcttcctggttttcagtccacagagtcggtagaccaggggttacgtgactggggaaaatctcacatctccttgtctgaaaacatttcccctgctgttctctttctaacatgttgtggtaaatctgttcagatactgctcatccgactgttttgtacatgtgacaattgccttaaaacctagcacagtcctcagaaatgaataccgtgtttccactgg

SEQ ID NO: 82 - DNA, 4762 bp, Homo sapiens
atccattcatctacccacctacctacccattcatccactcacccgcccatccagtcatccatcaatccacccatgccacatccattcatccagccatccattcatctatccccctacctacccattcacccacccacccatccattcatccatcaacctactcatgcaacattcatccacccacccacccatccattcatccagccatccacccacacacctacctattcatctacccatccagccatccattcatccatcaattcatgcatgcaatatccattcatgcagccatccattcatctacctacccacctacccatttgtccacccacccacccgtccagtcattcatcagtccacccacttaacatccatttatccagccatccactcatctacccacccacctacccattaattcacccactcacccacctttccatccattcatccatcagtatactcacgcaacattgatccacccaccaaccccttcatccatcagtccacccatggaacatccattcatccagccatccattcatctacccatctacctactcattcatctacctacccacccacccatccattcatccatcagtctacccatgcaacatccattcatccaaccatccattcatccaaccatccattcatctacccacctacctacccagtcatccactcacctacccatctatccatccatcaatctattcatgcatctttcatccatccacccacccatccattcatccatcaatccaccaatgcggcacccattcatccacccacccacttatccatctattcatctacccacccacttatccatctattcatccacccacccatccatccatcttcccacccacccatccattcatccacccacccatccattcatccatcaattcactcatgcaacatacatccacctacccaaccatccatccatccatcatgcagacatcaactgggcttgtaattgttgaagactgttaggtacagaagcatctataatgcacaggttctcgattgtgaaaaggggttgtgtacacaccaggaggcatcagtgttgtgtgatgagtaagccatgagataatgcatgttgtctactcagacaaaaatggatgagcagagggtggaatgtgggtgttggtgctgagactggaaccacatgtatgttggtctccatcctacccagggcctttgctgttacagcccatttcttagcaaacacccagatgaatcagagatgcatggatgtactcgcagccagcacattcctgtcgggacagacatatagcccaagcatcttgacctccaggtggcatgcctgcaccaccgtgtgcaacctagtggatcgtgagcagctgggggtgcagctgccagcactcagggtgcctgaggagtgaacagtggggggctgagccacaagagggagaggcattggagggaggtggtccagctggaccctttctcgtgggaggtgcagaacctggtctaggaccactgaaacttgttgtgttgccaggaacaagccagctcacaccagctggaacatgggcgccatcctggaggggaagcgcagtggctttgcaccctgtgggcccaaagagcaactttccatggagatgatcctaaaggctgaggaagggaaccacgaatggatttgtgggatcctgaaggacaactttgctagtgctgacgtggcggacgcaaagggctacactgtgcttgctgcggctgctgtaagccccacaccctcccagctggtgcccgcagcagcttagctgtgagggtcacacatgtgggtggccctctgtggccccctctgcaggagcagagctgaggtacatggggacactgattgtccacacctccacctcgccgttcagcagaaacccactcagctgagtgtgacactcgtggtccagtgcagaagggtttggggcagagtgcctgttccattcctctgtcccacacttgtccctttgccaagctcccgaatgagcactggttcctgccctgccatggggtggcctcatgagggcatcaggacacccagtgacccttcccacccctgagggccaggtgcatcatcctgagtcctgcctcatctccctccagactcactgccacaacgacattgtcaaccctctcctggactgtggggccgacgtgaacaagtgctcagatgagggtctcacggcactcagcatgtgtttcctcctccactaccccgcccagtccttcaagcccaatgttgctgaacggaccatacctgagccccaggaacctccaaaattcccagttgttccaatcctttcatcatcatttatggacacaaacctggagtctctgtactatgaggtgaacgtgccttcccagggtagctatgagctgaggccaccgccagcaccactgctcctgccacgcgtctcaggcagccacgagggcggccacttccaggacaccgggcagtgtggggggtccatggaccacaggagcagctctctgaagggggactccccgttggtgaagggcagccttggccatgtggaaagcgggcttgaggacgtgttgggaaacacagaccggggcagtctgtgcagtgctgagacgaaatttgagtccaacgtgtgtgtgtgcgacttctccatcgagctctcgcaggccatgctggagagaagcgcccagtcccacagcttgctgaagatggcctcgccctcaccgtgcaccagcagcttcgacaaagggaccatgcggaggatggcgctgtccatgatcgagtaggtcctggcaccagctggtgggggtggagggccaccatcagggctgaatcctatgctcagcagacccacgtctcttccctgtgccagtgggaggcgttgtgtctggagatgtgtgtctgaatgtgtgagcatccctgtgtcggtggctccacgccatggccagccctgtgggggtgccacggtgacgggctgttttcagtgccaccccagccctgtgggggtgccacggtgacgggctgttttcagtaccacgccagccctgctttggcctttggcactggcctgaagtgtctctgtgggagcctcagcaggggccactgtcaggggtcctatcctagccatagtgcacgtgagtgacacctgcctgggcagctctcacacccctgctgtccaccctgtctataccagtgtgtctcaaaatgtggtctatgcacccccgggggtccaagaccctttcagggagtctgtggggtcaaaatgattctcttgataaccctgagactctgttagccttctccttgtgttgatgttggtggatggtatgaagacagggccgtgcagaccaccagcccccagcgtgcagggcagcagtgcccggcctgcttgggggcatggtattccttcaccacggtgtgcacttgcggggatgcctgtctcactgaagaatgcctttgacaaagcagaaaagcaatgacaaattgcattaaatcttgctccttgcgtactcacccctcgaatattctgggtcggaaaacatgggaaggacactgatgtgtgtctgccacagaccaaggcacaccgcttccccgcaagaagcgcttcccccagggccagagtagcaacagaatgcggcatcttcccaacctcctgccccatttttgattggaagaatgaccactggtatgtggctgttcattctcctgaacacagcctgccactttaaggaaaacatatgacactatttgttgctggcgaaatttacattttcaagtgaatagcagaattctggacacttgccaccaccaccaagaccttcatagcttcccttaactttgagacatgggtgttcagaggtttttcacgtgagatggcgttagcagcgcagttttgtgatactgcctgaagacatgccgacagtgcccagatctcttctattggtgagccagcttttcccacacggccaagttctgatgttgaaccattgccaggtgggtgaagatccattgacagtgagaggtgggcccgtgggcttcagtgcagccaggcgcagaaggctggttcatgagtgtccagctccgccaggtagctagctcaccacccccagcctgggttcatgtagttcaaataggaagaccacgatgatcagaaaggctgctcaaatactccttcgtccagccgcgtacctgggggaggctgaatctccactcacttccaccaaggctgtgcagagcagataggggaatccagcaaaggtggaaaacagtgccatccttctccccaactggttttgttttgtaaaataactttttgtgacagtgttacttattagtaacatgcagtaggtttgttatggttaacaagttggtgagcattattgagaggtgaagccagctgagcttctgggttgggtggggacttggagaacttttgtgtcaagctaaaggattgtaaatgcaccaatcaatgctcagtgtctagctaaaggattgtaaatgcaccaatcagcactctgtaaatcagcactctgtaaaatcgaccaatcagcgttctgtaaaatggaccaatcagtggtctgtaaaatggaccagtcagcaggatgtgggcggggccaaaaaagggaataaaagctggccaccgccaggctccccaccagcctgcagcgacaacctgcttagtttcctttctgtgctgtggaagctttgttctttcagtcttcacaataaatcttgctgctgctc

SEQ ID NO: 83 - DNA, 2393 bp, Homo sapiens
acacacaaaaatagaaagatgttccatgttcatggattggtataatcaatgatgttaaactttctatactacccaaagaattctacagattcagtgcaatccctatcagaataccaatgacattcatcacagaaattgaagaaataattctaaaattcatgtggagccacaaaagacacagaatagccaaagctatcctgagcaaaaagaacaaaactgaaggaatcacattgcctttcttcaaattatactacagcgctatagtaactgaaaaagcatggtactgccataaaaacagacacgtagaccaatggaacacaatagagaacccagaaacaaatccatacacctacagtgaactcatttttgacaaaggtgccaagagtatacattggagaaaggaaggtctcttcaataaatcgtgctgggaacactggatatctatatgaataataatgaaacttgacccctatctcttgccatatacaaaaatcaaattaaaacggattaaagacctaaatctaatacctaaatctatgaaactattacaagaaaacattcaagaaaccccctgagacattcatcttggcaacaatttcttgagtaataccccacacacaggcaaacaaagcaaaagtagacaaaagggcacagtggctcgcgcctgtaatcccagcactttgggaggccaaggcgggcggatcacgaggtcaggagatcgagaccatcctggctaacacggtgaaaccccgtctctactaaaaatacaaaaaaaaatagcaggcgtggtggcgggcacctgtagtcccagctactcggaaggctgaggcaggagaatggcgtgaacctgggaggcggagcttgcagtgagccgagatcgcgccactgcactccagcctgggcgacagagcgagactccatctcagaacaaaaaaggaaaaaaaaaagtagacaaaagggatcatatcaagttaaaaagcttctgcacagcaaaggaaataatgaagatacaacccacagaatgggaggaaatatttgcaaagaaactatccatctcagaagggattaatagccagaatgtattaggaactcaaacaactgtataggaaaaaaatccaataagccagttaaaaaataggtaaaagattttaatagagatttctcaaaagaagacatacaaatagcaaccgggcatatcagaagattctcaacatcattgatcatcagagaaatgcaaatcaaaactacaatgacatgttatctcactccagtcaaaatggcttatatcctaaaacaataacaaatgctggtaaatatgtggagaaaagggagcccttgtacactattggttggaattaaattagtacaccctctatggagaacagtttggaggttcctcaaaaaaactaaaaatagagctaccatatgatccactatcccactggtgggtatatacccaaaagaagggaaatcgttatatcaaaggcatatttgccctgtcatatttgttgcagtactgttcacaatagccaagatttggaagcaacctacatgtccataatggatacagaaaatgtatttatgcatggtggagtactattcagccagaaagaaatgagatcctgtcacttgtaacaacatggatggaactggaggtcgttatatcaagtgaaataagccaggcacagaaacacaaacattgcatgttgtcacttatttgtgggatataaaaatcaaaacaatttaacatatggagatggagactagtaggatgattaccagaggctgggatgggtcgcagtgggtgaaggggatgtggcaatggttaacgggtacaaataatagaaataataaatagaacctagtatttgatagcacaacagggtgactatagtcaaaataatttaattgtgcatttaaaaataactaaaagagtataatcggggccaggcacggtggcttacgcctgtggtcccggcactttgggaggccaaggcggatggataatgaggtcaggagttcgagaccagcctggccaatatggtgaaaccccgtctctactaaaaatacaaaaattggccgagcatggtggtgcgcgcctgtagtcccagctacttggaaggctgagtcaggaaaatcacttgaatctgggaggcggaggttgcagtgagccaggattgtgccactgcactccagcctgggcaacaaagcaagactctgtctcaaaaaaaaaaaaaaaaaaaaaaaaaaaaaaagagtataattggattctgtgtaacacaaaagatgaatgcttgaagggatggatttgggattattaagtattttgtgcccttatcaatatatctcctgtactccataaatacatacacctactatgtactcacaaagtt

SEQ ID NO: 84 - DNA, 3651 bp, Homo sapiens
gcgcctcaccttcagcagcgcctaccagggcaacagcctcatgtaccatgacagcccctgctccaacggctatgtctacatccccctggccttcctgctcatgttgtacgccgtctacctggtggagtgttggcactgccaagcccgccatgagctgcagcaccgtgttgatgtgagcagtgtgcgggaacgtgtgggccgcatgcagcaagccacgccctgcatctggtggaaggccatcagctaccactatgtccgccgcacccgccaggtcaccagataccgcaatggagacgcctataccaccacccaggtaccaggctgcctaggaagccaggtggtgcctttaagatctccatggagaaacgcacagctcgacgcaggatccgacgaagaaccagcctaaaggggttcagagcccagacatgaacccccagcggctcatgcccttccagactcacgggggacctgacatcccagggaagacgccatcagagatgcagacactgagtgtgcggatgtggtcagccaccacgcggtacgctgtgtctgtgcgcccctcgtctgccacccctactcggcccaagtaagggggtgccctgcagccctgggaagcagaagagtcagccagtggccctgcctgacctggcccaggtgggtgctctttatcgcctctagagcatctgccctcagccctaaagccaaccacatccagaatggccttgccagtccagtcctgggctgagaagcctcacagatgagcacaagccaggccctgccctcacggggctcatatttggtgctacaagtgaacatatctgtgaccatttactgaatttctactatcagaactgggtgctaattgcagtgattttctggaatctaagggatgttttgccaacacaacaccctctggcaaaagtgtcagttcctcatcttcagtggaaacaggcccaagtgtcagtgagcctcctggcctccccagagtgtctgcttacgtagacaccactgctgacttggatcggaaactctccttctcacattctgatcactcctctgaaatgtcgttgcctgaagtccaaaaggataaatatcctgaggaattcagcctgcttaagttgcagacgaaagatgggcatcgtcctgagtggacattttacccaaggtttagcagcaacatccacacctaccacgtcggaaagcagtgcttctttaatggagtcttcctcggcaacaagaggtctctatcagagaggacggtggacaagtgctttgggagaaagaaatacgatattgatcccaggaatggaatcccaaagttaactccaggcgacaatccatatatgtacccagaacagagtaaaggcttccacaaagcaggatcaatgctcccaccagtgaatttttcaatagtgccttatgaaaagaaatttgatacatttattccacttgagcctcttccacaaattcccaacttgcctttctgggtgaaggagaaggccaacagtttgaaaaatgagatacaagaggttgaggagcttgacaactggcagccagcagtgcccttaatgcacatgctacacctttctggtgctttggactttccaagacaatcctgagcataaacaggcccacaaaacatgtgctgactgcactctggcgacccttttccagttgatgttttttgtcatgtgactgttctaaatccagtgtttgacccttatgaggaagtgttgtgctttgcttttttaaaactttatattttgaaaactttcacatttacataaaagttgcaagaattgtacaacaaacacctgcatatccttcacatagattctatcattgttaatatttgttcaaactttctctctctcacaatattacagttaccattttgctgaactctttgagagtgagtggcagatattgtaaccctttacacctgtatacctacatacctcagcatgtatcttctaaggtcaaggatgttgtctaacaaccacaacacaaataccaaactcacagaatttaacactgataaaatattattaacatttagtccacattcaattttagtcaattatatttagttttctaaggatgccctcaaatcaatcataaaatacagacatgatgtgagtgtcttagcctgttcaggctgcaataacaaaacgccataaacagaatggcttataaacaataggaattcatttcttacagttctggaggctgggaagtccaagcgcagggtgctggcaggttcagtgtctgctgagggccagccttctggctcatagatagtaccttcttgctgtgtcctcatatgatagaaagggtgagctagttctctggggtctcttttacaagggcactaatctcattcatgagggctctggtctcatgacctaatcgcctcccaatggccttacctcctaataccatcaccttggggattaggtttcgacatatgcattttggggtggggaggacaaacatttagaccatagcagtgaactttcattgcttttggtaaaacttttcattttattaataccttttggaatgtttctctaatgttaacttggtacatgtcagaaaaacatgaaggctggatctataccaggtaagtaatactattgccctgtagctgcattccccagtttagtattgcctatctacaatagccaagcagggtgagagctcagtgaccaccagtcatgagttttagggcctcctgtcaatcagacaagaagcaaacatttggaggaaaaggtgaaaacaaaagctgcctcacaggctttgacacagtcaaactagtgactcacggcatttttacagccaatctctttctccactagggaacccccttggctggctaatgaaggctgcagatctagtatctccaaaaccttaaagtggaaagagattggggtccatgctgagactcaacatgtctatgacatgagcatgatctatttcccaaaatgtttgttgtctccagtcacagccaaagtgaatgaagcaggtttagaacacgatacatttagccaggtgtggtggctcatgcctgtaatcccagcacttttggaggccgaggcaggcgaatcacttgaggtcaggagttcgagaccagcctggtcaacatggcgaaacctgtctctactaaaatcacaaaaattagccaggcaagatggtgggcacctgtaatccctggtactcgggaggctgaggcaggagaatctcttgaacccaggaggcagaggttgcagtgagccaagaccatgccattgcactccagcctgggcgacaagagcgaaactccatcccaaaaacaaagaagcaaacaaaaaccacaatgcattcatggcaccttcatatgtgcctctagactaactggcagagagcatggtgccgactgccagctgctgtgcctgaccactccttgggttaacatcagcatacatccgtgctaatcctctggcccctgggtcacaggcccacccctgctcccaaagtgctgggattacaggagtgagacaccgcatcaaactttttcacctaaagtgaattgtccttcaagtctaggctcggagcttcccacataaattgcagagtctctggaatctttgagaaaatatatacctttatttt

SEQ ID NO: 85 - DNA, 5840 bp, Homo sapiens
gcgatccccaccacaccaccaacccggccgcacggggcactgagccgggtgctgagcaccggaggccccgccgaggccgggactcaggtaaagggctggagcttgcggggagggttccaaaggtgggcagcagcccctgctgcccagcgtcctagaggcaagaagtaactccgactcggagcagtagaagggggcggtggagcagcatggaaccgggcttttgtctggggtgtatgccgggggcttcgagtgtccacggtgcgcccgcccctcgccgccccctttttgatggggtgcttctacaaagtgggcaagttttcccgggaatccgaaggcggcattttgtacggagttgaaagagagggagggggtcctgggggtggtacggtggccccccagagagctgcctctggactccagagagcttccagggttgctggtggaagagcagggagaggtgcatgtgatgcaggtgggcctccatttcccagaggaccgaaaggcctccaactgccttggtccggagcgcgagcaaccaggtgcccccggagggttgggaatggggcgccgcgggtactcctgacctacgtggagcgcagcgcgcagggccggcggattctgcacgttggcgccaggttcagcaccacccggcagccctgggcgagcgcgggagcccagccttcgccaccgccgcaggaggcaccggcaccgcgcccacctggaccctcagccagaacttgggaggacttggtgcttaatgccccatctttggttcgccctaggtaacctgctctggcttcagcagagcccagaggctttccagagagctgataaccacgaacaaacttggctgtcaaaagcaaatcaatgctttaccttgttttctgggtgcctagtctatccaacacaaactatccccgaagtttagtcaggatttacgctaaatatattacttatatagtaagttattcgatataacatttttggtcaattttctaggctacagttttgatgtgttttttaaaaatcttgaattaactgaataacagttcatattgaaggtggattctcccattccctgcacccaggattttccgttgttccatcaaattctgtaaatcggtatgccctaacagtttcttatatttgagttggcttcagcttcgagaaattcttcaggcaggtttaggcagagggctgaggaagctagagaagattccgaagagaaaggatgattatttgttgcatgattatagcttcttttaaaacttctaataggaaaacccttccactttcctggaccaaatgcagagtaaagtcattttctattatctgttgcaataattaataataaatatgtaaatgcagaaaacatggttagtacccatatcattgccagaaaccagtcccgctctccctccaccatcaaaaaaaagtcctcgcaagtaggaattagataaaataatttaacctgcaattttgcaacaactcagactttcagcaccaccgaccccctaataacatccctactggtttcttccattttttgtgtaggcaagtggaataacaggtatccttcatatccataggaagagcattgggaggagccaaagatatggggaggtagatcaagacattaggaaatcttttctggcttctgactttgagtctgaaaaggtggtgtgaattggttggtgtctgaatctttatcaggacacattatggtggtctggggtggatctggccatgcaactcaagctagaggatgacaactacagagatgtggtcacattttcaagttttacttccttacctcaatctttcaaacccctaattaattaggtaataaaaattgtatatatttatgatgcacacaacacagtattttgaaacagtaatacattgtagaatggcccaaccaacataattaacctatatgtattacgtcacatttttatcttttgtttttttttttttggtgtggtgagaacacttcaaatctaccatcttaacaattttcaaaattgtgactatagtgactatagtcactatgttgcacaatagatctcttaaacttattgctcctatctaactgaaattttgtatcctttgacaaacatctcttcaccccaaccctaactactggtaaccagggttctactctattctctgagttcaacaattttagattcaagtctcccttcccttcccttcccctcccttcccctcccttcccttcccttcccttcccttcccttcccttcccttcccttcccttccctcctctcccctcccctcctctgccctcccctcttttccttccctcttttcttctctctcttctctctctctctttcttctcactgcagcctcgacttcaccaggctcgggtgatcctcgcacctcagcctcccgagtagctgggactacaggcgtgtgccaccacacccaggtaatttctgtgtttttgtagagatggggtttcgccatggttcccaagctggattacaggcatgagccactgtgcccagctgacttccctttttttttttttttttgagatggagtttcactcttttttttgagatggagttttgctgttgtcacccaggctggagtgcagtggctcaatcttggcttactgcaacctctgcctcccgggttcaagcagttcttctgcctcagcctcccgagtagctggcattacaggtgcgtgccaccatgcctggctaattttttgtatctttagtagagatggggtttcaccatgttggccaggctggtctcgaacttctgacctcaggtgatcaacccgcctcagcctcccaaagtgctgggattacaggcgtgagccaccacgcctgactgatttccttctttttcaagtctgaattagtctcctattgtgtgtgtgtgtgtgtgtgtgtgtgtgtgtgtgtgtgtgtatcacatttcttcatccattcatccacttatagacatttaggttgattccatatcttggctatggtgaataatgctgcaaggaacatggaagtgcagctatctcttcaatataatgctttcctttgggtatatagtgagattgctggatcatatggtagttccatttttaatttttctgaggaaccactgtattgttttccatcatggctttccaagatagtatcacttaatgacttcaattttaattaatgattgcaaaaatgtatgtattttgagctacttagccttttcttctggaggttcttggcagacaccaaagtaacccttatggatgatgagactgaactataacaaaacaccaagttcaaaaaaaagaacacatggtccctgcctccaaatgtttagtgagaaaaatagatttacaaatatctgcattacaagatagtataaatggagtcatagggtagaacatcaatagtgtgctactgaatgacaaaggaaaggagaggttcattcaaggctaagtgtgaagaaaagttgtggggtgggcgtagcaatttaggaagaggatttccttgatggaaaagaggcctgctggaacaagagaatagcacagagataaggaagtctagtgtgtttataggaagcaaagcagtttggagtagctgaaacctagaatttaagacagataaggctgggaggtgggatggggctagattatagagactatgacatgtcatgctaagaaattaaaatatgattgaacattattggtatatttacataaacagtatcaacatccttaactgtactttttgcctttaatttcagttttatgagtttccttctaaaataagtagttgattaaaatctcaatattcacttcctatcagtttctttcaatcagtaaaagaataatgtattcctaatatccttcaatgctttatctaaatccaacagtgttttacccccaaacctgcattcctatgatattaatagctcttagcttgattaaaacttccgatagaaaaacacttccactttcctggggcaatatgcagtgtatagtcattttctattctctgttgcaatcattaataataataattaatgtttattaaacatgttatgtcaagggagccacatagccttatgttatctagggaggcattattttgatcttagactgagaatttttacaaggtcacacaactaagtaaagggaccaaggagtctacccccagagtctgtgctttgaactattgtactatcatgtaacggggcatagtgtatgataattattgttaatattagatagaaactgggcctgattcctgtagcaggactgtttctctgtttttttttttctttgcatcttaattttcatcatttggattaattttatcttacactttcagtgacgggacatattttaatgttttaatacacttttaaactactcatgggatctcgtatttttatgacccacccaaaagaaactcttaaactctgagaagagacaggatgtgggacgaaaaaaaatgttagcaacagtgatggcacaagatgtgaagaccaggcctctggaagaatgttgattaccaatattctcatgattcccaataaactccccaaatcaccagatctttttgcatttcagcatcccatatatttttctgtgtgtcttgatttttttattatgaaggtaatacaataaacatactactttgtacatgacatactaaagtatgtatttagacaacagatcaaacatcacatgatcatgtataaattgtgcaaaacgtttgctaactgaaagaacacgtcagtgttattatcatagatttcttcaccagaacactattctcaggccaagctctgcaggagagggttgtgtggagtagagagaagctgaaatgagagcctggcagtccagtgaccctggtaacagtgtgggacacagggagatgatgataccaatgtatctcagtgtctggccctcactctgcctaaatttaactgttacatctttatttttgtatttactttgttaaatatttggacctttccatcttttctcaggctctgagtggtttacagattctgctattttcacttttgagtttgagagtaggacttagaaatagatgactcttcaatggattgttgagtaaaggatcctgaaactgttctctcctttagcatgacgtctctcaacttcagtttcctcatgggtagattgagggattgaataagataagtggtggcaatcacaaatcttcacaaggtttacccggatgagacaggcatcataaatgagcaaagaagactgggggcagtggttgggtagtaggtgtgtggaggtatgggggatagcacaggtgaaactaaatgcaaggcaacgttagtcctgcgtcagggagatattagggagtagaaggacctggagagaaaatgcctcatccaatgagagccagacttactcagttccagttaattgttatgtaagaatgagggcccagtgttatcagaactttcaatgttttgaaagaatcctaaagttcagatttttatgtgaaatctattctagtgttaaaacatcagcaatttggccgggcgcagtggctcacgcctgtcatcccagcactttggaggcagaggcgggcggatcacgaggtcaggatattgagaccatcctggctaacagggcgaaaccccgtctctactaaaaaaataccaaaagaattagccaggcatggtggcgggcacctgtagtcccagctacctgggaggctgaagcaggagaatggcgtgaacccgggaggtggagcttgcagtgagccgagatctcgccactgcactccggcctgggcgacacagcaagacttcgtctc

SEQ ID NO: 86 - DNA, 3992 bp, Homo sapiens
atcctccgcggacgcccgctgccatggcgactctgctgcgccctgtcctccgtcggctctgcgggctcccgggcctacagcggcctgcggcagaaatgcccctccgggctaggagcgacggcgccggcccgctatactcgcaccacctccccacctccccgctgcagaaagcgctgttggccgccggctccgcggcgatggcgctctataacccctaccgccacgtcttgcctttcagggagcgtccccggatttcgacatccaccctcgacctgggcaagctccagagcctgccggaaggctccctcggtcgcgagtatctccgtttcctggatgtgaacgtgagttttcagctcctgtgtatctggcagtcaccagacaggacagaggaatagcacaggcatgacaccctgaggaaagaggagccctgagctgccaccattggcaggagtgctcttcaggctcatgccaaggctttgtcattttctatgggataggcaaatgggtgggaacatgcctgcaattgataatactggccagtgttcattaacctcgcactgcatgcctgatgccagcctcatccgtgatcttgctgaatccccccacaactctgtcaagtatgttctattattatcctcttttagtagataaggaaacagaggctcagagcagtgaagcaaacttgctaattccacataactggtattaatggagatagtaatcaatcccagatcatgctcttcactgctgtactgtatccctttattccagggacattgctttccctacggtatggcaggtgtggcactctccagcccctccagccccaggcagggaggacaaggagagggggaaagggggtgtcccgactattggcaaactcattcactaactgaggctctgctatgtgccatccctttttttttttgagtcgctctgtcgcccaggctggagtgcggtggtgcgatctctgctcactgcaagctccgcctcccgggtacacgccattctcctgcctcagcctcccgagtggctgggactacgggcgcccgccacgacgcccggctgattttttgtattttttagtagagacggggtttcaccgtgctagccaggatggtctcgatctcctgaccacgtggtccgcccgcatcagcctccagagtgctgggattacaggcgtgagccactgcgctccggcctgggcgacagagtgggactctgtctccaacaaaacaaaacaaaaaaattcatataaaaatacaggtaaaatgtttcaagtaattagaatattctggcactggtccatgcgtgttggctcatgcctgtaatcctaatactttggggggctgaagtgggcggatcgcttgagcccgggagtttgagaccggcctggacagcatggtgaaaccctgtctctgcaagaagtgcaaaagttggccgggtgtggtggtgtgtgcccgtggtcccagctacctgggagggagtttgaggtaggaggatcagttgagcccaggaggtcgagggcggtgagccgtaatcacaccactgcactccagcttggacaacagagcaagactctgtctcaaaaataaaaaaaagtataccagcactattgtcagcagttgggatacagtggacaaaaccagcaaaaagcctgcctttgtggaacttacattctagcagctatgaagagaacaagttagtgtgatagaagacagctttggtattgggaagggtacagccacttctgactgggtggtcagggccggctcctctgaggagacttggaaggtaaggaggagccaaccctgtggagagctgaggaggagcattctgagtagagggaatggcaagggcaaaggccccttgtgtttaggaaaaggaaggttgaccagtgtggccgcagaggagggagtagcagggagacagtgagtgggctggaaggggagccagggctgcgccctgtaggccaccagaaggaggagtctgtattttgtaataggagcagtaggaaacttgtggaaggttttgagcaggacagtaaagtgacctgatttgtaaaggaccttaggatccagttggcccatcttccctgtccctgtcccatcttccctccctcctgcaacacagatacatcccatcaaggcacccctgccaaatggcgagccagtctggctgatggaggtgaggggtctccaaaggttgccctagaacagtttctcaagccgggcatgttaatgtttaggctggatcactctttgttgtgggggcggtcctgagcctggtaggatgtttagtggcatccctggcttctacccactggatgccaggagcacccccccgtcaagttgtgacaaccacagatgtctccagagattacagatgttccctggtgggcagttgagaaccactgctctgaatggttattgtccccgagacgatgttctgttcctcacagtctcctgcacagctaccttgacggggcgatcacctgcactattttaaaccatctctctcagatttcaccaggatgcaagtcatttcatcagtgggaaactcaccagggtgacctgcctcaagtgctacacagggagggacagtctgaatttcccccagtctttagccctgtcgctgtggaggggagggggtagcagggacaggactgctaggacaccttgctcagccacagccccacttgtaaccgcgctggcgattgtgacacttgtagagcaaggaaatcagcagctcatggaatgtgaaggagcacctttgtccccagagagatttagataaaggttcaaggtgaggctaccctcccctccctgaggctgattttggtgagaggtgtggtcatcttgtagtatcaagactacaggcatgggcttgagaattaggaggagcctgagtgagaatcctggctctcttcccagctttacaagcctggacaaatcctttgacctcgctgagtctcaggttcctcatcagaagtaagaggacctcccatatatcttccagggcacttatcggccttggtaatggatattaaggccactggctttggaatccagcagactttgtttcaaatgctgactcggccactttactagctgtgtgatcttgggcaaattactttatctctctgagccttgttttccttatttttatttatttatttatttttttgagtctcgctctgtcacccaggctggagggcagtggcacaatcttggctcactgcaacctccacctcctggcaattctcctgcctcggcctcctgagtagctgggactacgggcgcacgccaccaggcctggctattttttgtatttttagtataggcgggatttcatcatgttggccaggctggtctcgagctcctgacctcaagtgatccgctggccttggcctcccaaagtgttgggattacaggcatgagccaccacgcccggcccttgttttccttatctatatctgcagtaataacagtatttacctccaagattgcaaggatgaaaggataatatatgtaaaagacaccctaggtgccggcacctggtggatactctatgatcaccttcagcttcacacagcaggctaaggccattctttgggaacaggaagaccaggctgttcccactgtgtatgggtgctgctgagtactcagaggcagtgggcagttaagaggagaagagttctgggatcagaaaagtgcccaggactgtccttttattcatatgttcaagaggtgttcattcatccaggccctggatcaggctactggaggtaaaagaataagtgaaacagagccagtcctgcccttgtgtagcagacaggctgtctggatactgtccataaaaataaaatgtgatcggctgggcacggtggctcacaactgtaatcccggctctctgggaggcccgggcgggtggatcacgaggtcaggagtttgagaccggcctgaccaacatggtgaaaccctgtctctact

SEQ ID NO: 87 - DNA, 3588 bp, Homo sapiens
gatcaaacacggcgtcatggtggacgccaccacccggatgggctacactcccctccatgtggccagtcactatggaaacatcaagctggtgaagtttctgctgcagcaccaggcagatgtcaatgccaagaccaagctaggatacagccccctgcaccaggcagcccagcagggacacacagacatcgtgactctgcttctgaaaaacggtgcttccccaaacgaggtcagctcggatggaaccacacctctggccatagccaagcgcttgggctacatttctgtcaccgacgtgctcaaggtcgtcacggatgaaaccagtttcgtgttagtcagtgataagcatcgaatgagtttccctgagacagttgatgagatcctggatgtctcggaagatgaaggaactgctcatataactataatgggggaagaactcatcagcttcaaggctgagaggcgggattccagggatgttgatgaagagaaggagctgctggattttgtgccgaagctagaccaagtggtggaatctccagccatccccaggattccctgtgccatgcctgagacagtggtgatcaggtcagaagagcaggagcaggcatctaaagagtatgatgaggactccctcatccccagcagcccggccaccgagacctcagacaacatcagcccggtggccagcccggtgcatacagggtttctggtgagcttcatggttgacgcccggggtggttccatgagaggaagtcgccacaacggcctgcgagtggtgatcccgccacggacgtgcgcagcgcccacccgcatcacctgccgcctggtcaagccccagaagctcagcacgccgcccccactggccgaggaggagggcctcgccagcaggatcatagcactggggcccacgggggcacagttcctgagccctgtaatcgtggagatcccgcactttgcctcccatggccgtggagaccgcgagctcgtggttctgaggagcgaaaacggctccgtgtggaaggagcacaggagccgctatggagagagctacctggatcagatcctcaacgggatggacgaagagctggggagcctggaggagctagagaagaagagggtgtgccgaatcatcaccaccgacttcccgctgtacttcgtgatcatgtcacggctctgccaggactacgacaccatcggtcccgaagggggctccctgaagagcaagctggtgcccctggtacaggcaacgttcccggagaatgccgtcaccaagagagtgaagctggctctgcaggcccagcctgtcccggatgagcttgtcactaagctcctgggcaaccaggccacattcagccccattgtcaccgtggagccccggcgccggaagttccaccgccccattgggcttcggatcccactacctccttcctggaccgacaacccgagggacagcggggagggagacaccaccagcctgcgcctgctttgcagcgtcattggaggaacagaccaagcccagtgggaagacataacaggaaccaccaaacttgtatatgccaacgagtgcgccaacttcaccaccaatgtctctgccaggttttggctgtcggactgtcctcggactgctgaggctgtgaactttgccaccctgctgtacaaagagctcactgcagtgccctacatggccaaattcgtcatctttgccaagatgaatgacccccgagaggggcgcctgcgctgctactgcatgacagatgataaagtggacaagaccctggagcagcatgagaacttcgtggaggtggcccggagcagggacatagaggtgttggaaggaatgtccctgtttgcagaactctctgggaacctggtgcctgtgaagaaagctgcccagcagcggagcttccacttccagtcatttcgggagaaccgtctggccatgcctgtaaaggtgagggacagcagtcgagagccgggagggtccctgtcgtttctgcgcaaggcgatgaagtacgaggacacccagcacattctctgccacctgaacatcaccatgcccccctgcgccaagggaagtggagccgaagataggagaaggaccccgacgcccctggccctgcgatacagcattctcagtgagtccacaccaggttctctcagtgggacagagcaggcagagatgaagatggctgttatctcagagcacctcggtctcagctgggcagagttggcccgggagctgcagttcagtgtggaagacatcaacaggatccgagtggaaaatcccaactccctgttggagcagagtgtggccttgctgaacctctgggtcatccgtgaaggccaaaacgcaaacatggagaatctgtacacagccctgcagagcattgaccgtggcgagatcgtgaacatgctggagggttccggccgacagagccgcaacttgaagccagacaggcggcacaccgaccgcgactactcgctgtcaccctcccagatgaatggccatcagagggggcaagcccgaatcacacattcccccaccgtgagtcaggtgacggagaggagtcaggacagactgcaggactgggatgcagacggctcgattgtctcatacctgcaagatgctgcacaaggttcctggcaagaggaggtcacgcaaggtccacactcattccagggaacaagtaccatgactgaagggctagagcccggtggatctcaggagtacgagaaggtcctggtgtctgtaagtgagcacacgtggacagaacagcccgaggctgagagctcccaggccgacagggaccggaggcagcaaggccaagaagagcaggtgcaggaggccaagaacaccttcacccaagtggtgcaggggaatgagtttcagaatattccaggggagcaggtgacagaggagcaattcacggatgagcagggcaacattgtcaccaagaagatcattcgcaaggtggttcgacagatagacttgtccagcgccgatgccgcccaggagcacgaggaggtggagctgagagggagtggcctacagccggacctgatagagggcaggaagggggcgcagatagtgaagcgggccagcctgaaaagggggaaacagtgaccccgagccgctctccttggagtagcctctcgggaggatcacacctcgacacccaacccctgaaccccacacactctgccatgcacacaggaggagagctggacctgagggccaccgcagcggtgcacacattcctctgggctgacggcatgacctctgtaagggactcctgctagtcccctcttggcatgaatgactgactgtagacgcatgacctccaggcttcaatcctgcctcttgcaatgacagctgatctgtcggaaccaggacacaaaagcagcaagaagcggggagagagagggatagaaaacaagcgcaggagagcctgcgaacgcaaaagtgaatgagggctttttgtggctggggatgggttttggttttggggtttttttttttaaattgttttgacttcgtacagggtactttttcccaacctcatctgtcagaaatccatgtgggcttcctgg

SEQ ID NO: 88 - DNA, 3781 bp, Homo sapiens
cttagaccttggttagatttgaaccaaggccctcctcggcctcccaaagtgctgggattacaggcgtgagccactgcccagctgaaaattgatacatttttcaaatgagaagtatttttttcaaatgggtgttggaaagtgagtttcctcacattgttcatgttgtgacactaggttggtgctatgtaatgacatggatatgaacgagctgcctacgaacctccccgtggacactgtgaagcttcgcatagagaagactgtcatccgcagaatctctgcggaggccttctattacctggtggagctccagtatctctgggtgacttacaattccgtggccagcattgaccccagcagcttttacaacctgaagcaactgcatgagttgcgcttggatgggaattctctggctgctttcccttgggcatctctgctggacatgccccttctgaggaccctggacttgcacaataacaaaataaccagtgtgccaaatgaggcgctcaggtatctgaagaaccttgcctacttggatttatcaagcaacagactcaccacattgccaccagatttcctggagaactggactcatttagtttcaacaccttctggagtcctggacctttccccaagcaggattattcttggctgatagaacgttatggctgtaaaaagctctagcatttatctagtcaactctcccattttgccgatgagaaaacaggctcagcaaggttgcatcacccaggtcacagaattaactaatggttgagcctcatcaggaacccaggcacagtaaagttggtctacaggacaatccttggttctgtgactgtcatatttccaaaatgattgagttgtcaaaggtcgttgaccctgctatagtgcttctggatccactgatgacttgcagtgaacctgagcgcctcacaggaattttgtttcagcgggctgaattggagcattgtctgaaaccatcagtgatgacctcagccaccaaaatcatgtctgctctgggcagtaatgttctactgcggtgtgatgccactggcttccccaccccacagatcacatggaccagatctgacagctcgccagttaattatacagtaatacaagaatctccagaggaaggagtcagatggtccataatgagcttgacaggcatttcttccaaagacgctggggattacaaatgtaaggccaaaaatctggctgggttgtcagaagctgtggttactgtgacagtgcttggcattaccacaactccaataccaccagacacttctgaaagaactggagatcatcctgagtgggatgtccagccgggatctggaagatctacatctgtatctagcgcatcatcatatctttggtcctcttccttctcccccacatcttctttttctgcttctactttgtctcctccctctactgcttccttctctttatctcctttctcctcctccactgtttcttcaaccacaactctgagcacaagcatctcagcaagtaccaccatggccaacaagcgatcattccagctccaccaaggtgggaaaagaaatttaaaggtggcaaagaatggaagtaagcttcctccagccagcacaagtaagaaagaagagctggcattgttggatcaaacaatgcttacggagacaaatgccgcaatagaaaacctcagggtggtcagtgagactaaagagagtgtgacattgacgtggaatatgatcaacaccacacataactctgcagtgactgtgttgtattccaagtatggtgggaaggacctgctgctgttgaatgcagactccagcaagaaccaagtaaccatagatggcttggaacccggtgggcaatacatggcctgtgtctgtccaaaaggagtgcctccccagaaagaccaatgcatcaccttttctactgaaagagttgaaggagatgattctcaatggtctctccttctcgtggtgaccagtactgcctgtgttgttatcttaccattgatttgtttcttgttgtacaaagtttgcaaactgcaatgtaaatcagaacctttttgggaagatgatttggcaaaggagacttatatccaatttgagaccctgtttcccaggtctcaaagtgtaggtgagctctggacacgaagccacagggatgactcagagaaattgctgctttgttctaggtcaagtgtggaatctcaggtgacttttaaaagtgaaggttccagaccagagtattattgctaaggttctgcagctcaggtgcatgtgagctacaaaactagcatctaagggtataattgaccctaggtttggatgacttttggacagactttcacattgtacatgaaaatcacaaatggaatgcttttaagtatgtttaaaaaataccatgagacctctgaactgaaaagacaaataatgttgatttttttttcttgtgtggaaaaggtctacagaaataatttttagagtggtgcttaataaattattaatactttttagggtaatgttttagttcttaaaaataagttcatgtgaaagtagcaagtgaactctgtatttaaaaatatagttttttgagtcatgaggaaacattagcaaaaccagctaagccttgatgtttattcatgttcgaagtgcattatagcatttgctgtggatgttttctgacattgcctaatggagagcgtgggatcataaaggattttgtgttcactaaggttaaatctaactcacgggagagagagggctctgtctcttggtaccattatgcattgtgatactatagagttgtgttcatatttcttgtaagaaaaatttttgcttttctttagaaatataggtattagcaaaagtaagtatacaaagaggattatgacaaatagaccatttctttaaaaatggtaactgttgcatttaaacacatcggctgacagattatatggatatttaaaaataactttaaatcaatcttttaatattttgctgtttgctcttatgttctcccttctttcttccttccttgtcttccctccctttccttccttcattctttctttcttctgctctgtcagaagatatacaagtagccaaagcatcacgagccaagctgtttgtcttttgccatattgtcttttgattctcttgataaagagaaagcttttgaaattacttactgccctttgaaagtctgttttacaaccccaaaggatattttaggactttaaaagggaagcttcagtggattcatttggttagattcttttcctaggttaaaaacatcggggaacttaaatacataggaaaggagttcacaaataaaatttagtttttttagaaagagaatattttaataactgtagtataccacaagaaacatctcatggctttaagattaacgatagcgataaggcccactcaagcatctcacagtggtgatattacatgtcacttagcaggatgcaacctggcctagggatttccagaagacaaggccacctcagcacagatgcaactttcataaattttagaacaaagcctaaccttactagattaaacttgctctatgaaagaaacacttggtaattgacccagactgaatacatgtataagaaatgggaaagatctcccaaactctgagaacggtcctcaaatagaagctctcctagtcagttggtcatctgacctctgactatatccggcctatgacaccagccagctcctgctttctgtcttgtaagagcactgctggaataaactacttgagcatt

SEQ ID NO: 89 - DNA, 3848 bp, Homo sapiens
gatacttaaaacgaatacaatcttgtacagtaaatgtttaacaccccaaaataacgaaaagtaattattagcattcatttatatctaaatctcagtcaatatgatctaaatatttgtgtttaaagactccccctttccatatagataatgaagggctttgaaataagtgtaggaaaccctaagtttggtctcaggcttcctattcattcactatgctttttcgtgtgctgtttacagtttcctttttctggaatgcctttccctgcttttttcccccgccaacatttcagcttcccacagacacacatttgtgccctcctggttgtcctgcaggatgacctttgtttttgtttttgtcttttgtttttcgagacagggtctcgctctgtcgtccgggatggagtgcagtggtgtgatctctgctcactgcggcttccgccatccggtctcaagtgaccctcccaccgcaacctcccaagtggctgggaggagcggcgcgcgccaccatgtctggctagtttttgtattttttgtagagacggagtttccccatgttgcccaggctgctctcagactcctgagctcaagcgatctgccgcctgcctggccctcccaaagttctgggattacaggtgtgagccactgtgcctggccaggatgacctttttgaagtcacctagtcattgaagctttccctctcagccttttcctctgtggccccatgcttatagagcctcccacattgatttgcagtgccttcgttcgttcactttatttccacctaccaaacagtaagatcttgaagacagaaacggcattattcgtttatatatccccggtatctagtacaatttttctgtttgcaataataaatgtcttaaaacttaagaaaggagtaagtcttctcaaagactttttttaaaaaagacccagattcagcacttattgtatgtaagacagaccttccttttacattacatttttcatcagtaaaagtactgggccaggcgcggtggctcacgcataatctcagcactttgggaggctgaagcgggtggatcgcttcaggtcatgagttaaagacccacctggccaacatggtaaagccccatctctactaaaagtggaaggattggccgaatgtggtggctcgcgcctgtaatcccagctactcgggaggctgagacagaggagtcgcttgaacccgggaggcggaggttgcagtgagccgaggtccgccactgcgctccagcccggatgacagagcaagactccatccccaaaaaaaggtactagtatttcatgttaataaaatggaattcttatataaacatatataaattaaaaattattttaagagttgaacagatttctctgcaaatccccctatatttttatattttttaaactaactgtattcagcaaagctttttattatttaatttattccaaaccacattaatcagtatttctctgaactcctacagcacatttaaaacagtactgtttctctaggtgtgggtgagtaaaaaaatatttaatatatgttaattaacttccgcatctcctgaccccactaaggtttgaataggagcctccccctttataaaccctttttatatacccacactacctagcctaattggggcacatattagctgcttcatacatacttttcaactgcctaatttgctgattaggcataaaagtatatacttctggaaaagtctccacaaggtgaaaatgattatccaaataataaaggcccacaatgccagtgagtacattatctgcattatgctgatatttgactcctttcaactctctttggttgtagaaacatgaccgatgattatattacacttttaactctttaaatattattagcttgctttggactgtggaaaactaactacaatcatttttattcctcagaatatattttgcggccgggcacggtggctcatgcctgtatacccagcactttgggaggccgaggtgggcagatcacgaggccaggagttcgagaccagcctggccgatatggtgtaaccccgtctctgctaagagtacaaacattgggtgggcatggtgctgcaagcctgtagtcctagctactcgggaggctgaggcggaagaatcacttgaacccgggaggcagaggttgcagtgagccaagatcatggcattgcactccagcctgggtgacagagcaagactccatcttaaaaaatatatatatatagatagatagatagatagatagatgtatatatacatatacgtatacatatacgtatatgtatacgtatacatatatgtggagtatatatacatctacgtatatgtatactctacatatatgtgtatatatacatatatacatctacatatatacacatatatatgtatatggcttctgagctatagcttgagtaacttgttaacttgtaatacttgagtaacttgtaatattgtatgctgccaaagcattttttcacttaaacatctcatcgtgattttcagaaatttagaatcggaaaatcgtttttgatcccactcatggatatataaacttagggctaaatcagaaaagcaagcacatagttttagacaatgacacttatttgcttaattactctatggagccaggtggatatgtacaggttatgtccttttgcatgcttgaatttatagtgagttgaatctgttcagacagccatcagtgatgtgtccgtgaggaacacagaaaatgtttctttttgtttaaaggaatttatttatttacttatttttacttttttttttaatcatactttaagttctaggatacatgtgcacaacgtgcaggtttgttacgtatgtatatatgtgccatgttggtgtgctggacccattaactcgtcgtttacattcggtatatctcctaatgctatccctcccctctccccccaaaaatgtttcttttgaatgcagttgactcagttacctaagatgtgagtgaagtggaaagggtaagtggtgggaataatgcaaaatgatagtttaaaaatccttcatgcccgtttactttcctaatatggagataattgaaatctggactgggaataatttttttttaaaaaaactggattttccttgggcattgccatttactaatctcatgatcctgggcgagtcatgtaatctctttaaaacttattaactcataaaaatagaagtaacaatgtccaaacttcctattttagagttttcacgaggcgcaatagatgtaactgaaagcttcgagaagtttaaaggacttgcaaggaaatctactgaaataagccccattccacctgggcagaagcactcagacgccaaaccccaccttctgtcctgaaattcaccttccactaggagagtttgcttttctaatgcttcaaatgcacaacgggagatgttctgacttcagggtttctacccttcactgctgtaatctgctgcctgtatgacatgcgatctggtttacaccgtacagcttatcatcttcagcttgtggccccttccttgtttccaccttgctattcaggagggcctgtaagggtatctggattccttgagctgtagatgcaggacagtgagagggagggaggtagttctctggtctaatttcagtttcctaactgagggtacatgccttccctgaatgatcatcatcaaaaatatccagcccttcatggaagacaccacccctcctcatagatgagtccctgagcttatgatctcaaaaggaaatccttatcagaatacaacagaataaggacatagtttcattacagttataataataaaagtagttcttcttt

SEQ ID NO: 90 - DNA, 3546 bp, Homo sapiens
tgccctttagagcctggagagggcatgcagagggcctgtggcttgtcccagccggaggttccccttaaggggaccagctgccttctctggggagctgtctatggggtccccgcagccctccagtggaggcagaggccctggctcctgaccgcacttgttttgcataggactgggctaagcctgggccctatgaccagcctctggtgaacaccctgcagcgccgcaaagagaagcgagaaccggaccccaacgggggaggacccactaccgccagcggcccacctgcagcagctgaggaggctcagagaccacggagcatgactgtatcggctgccaccagggtgatgctcttgttctcagtagctggttggggccacctcagcctggctggggatcacattctggccagcaactggggggccaaggcagccttgcagctggagggacctgggctccattccctgacttcctgctctacagcaaagtccctgggaaaaaaaccttgtgtgggaatgagagaggcagaactttctagggtcagagtgggacccaagcaagtcaatagccccctggccccacagacatgtagtgctcacgggggcagaacaggagtgctgttgagccccccccctaaagcagcctgtgtatttctctcctccaacctgcagcctggtgaggagatggaggcttgtgaggagctggccctggccctgtctcggggcctgcagctggacacccagaggagcagccgggactcgcttcagtgctccagcggctacagcacccagacaaccaccccctgctgctctgaggacaccatcccttcccaagtttcagattatgattatttctctgtaagtggtgaccaggaggcagatcagcaggagttcgacaagtcctccaccattccaagaaacagcgacatcagccagtcctaccgacggatgttccaagccaagcgtccagcctcaactgctggcctccccaccaccctgggacctgctatggtcactccaggggttgcaactatccgacggaccccttccaccaagccttctgtccgccggggaaccattggagctggtcccatccccatcaagacacccgtgatccctgtcaagaccccaaccgtcccagacctcccaggggtgttgccagcccctccagatgggccagaagagcggggggagcacagccctgagtcgccatctgtgggtgagggcccccaaggtgtcaccagcatgccctcctcaatgtggagcggccaagcttccgttaaccctccacttccaggcccgaagcccagtatccctgaggagcacagacaggcaattccagaaagtgaagctgaagaccaggaacgggaacccccaagtgccactgtctccccaggccagattccagagagtgaccctgcagacctgagcccaagggatgctccacaaggagaagacatgctgaacgccatccgaaggggcgtgaaactgaagaagaccacgacaaacgatcgctcagcccctcgcttttcttaggttcacaagaaatgcgccggtggggaatgaactgtttcattaataaaacctaatttgtcttgatccattccactctataataaaacaaaagattttgtaggcaactcggaatatagctcttttgaaagtactcgacacctttagataagaattaaaaccaacctatgtaactgacataatcttgatcttttaatttgtaaatattgacaattttctttctgcacattttaatcttagtttcccttttgatttttctgaaggtgccaaattccatttaacttttttacaagtctttgtaaaattttaaatgcataaagggggttggggcaggggaaccacgaagtagttaattttagaaaaggatttactatacttcactcttcttttttttccccacaagcttttgtagatgcattgtagtagtctagcttagaagcaaatgcaagttattttaatgtacaaactaaatgggtaagaggtaaaatcttcatttaaatatactatgttctggatgaaaagagcaggagtaacaattgatgagcaatattcagagtgaagtaaatctggaaatggtagactgtgttgggataggggggagggccatgggaggggtacatcgtcaacatagccgatcctgttacatttaagagtagcctcgtaggttgaatttcttctggtagcttcatggtaaatgcatccgaataagccatactggattgcaatgtttgtttctgtagggtgtttaaggacttgacttcctttctcccatgattcctctggactgcacacagcacccacaaccagccccatgcatgctgctgcctctgggcagtcgtagaatctcccacttcagtttctcgttgattgtactcacctttatggaatccaaatacatccaaaagggtaaggcagttttaaaaatgtgaaaacatttaaaaatgataatagcagggaattcttagattatagtaaatgccttttacttaactgtgcccagcaggctgggtgcgttaaaaagcccaagtattttgaaaaaactcgaacagatttgacaagggtagccagcttggagtctagcaacttgccaatgtgtttaccaatctgggggcttgtttttcttttcttctttcaaataaatggcagttaactggctttacagtaaacattgaagagaggaggatttgtttattgtcactgggaatctgaccactatactgtcctttttttgtattctgggtaatgttttttggaaaagatttgtcttttctaagtggaagttaaatttgttatactgcccatcccctaaagccaacagagatttgtagatttaaagggatcacatttgaagacaatagtgtttaagaaagcaagcaagtcccttagcagtcaggtcataacagggcacatttctgaccgaaccctctcaaggcagaggaggagtttggtgggtttcatacaccctgcagattcctgttggctctaaccctcaattacctaatcttatgctttaacacataactgcattggatgtgagagtaacgtaccgtatggtcattgttctatatattaacattgaacactgctgcgattgctcaaggacattttatgttacggctttaaagcaaaggcatgattattagaaactatttaagcttttttctttgaaaaacaagctccttttacagaatataaacaacagtagtgcctgtggtttagcccaccaatcttgatgactaaaagtagctgatgcattgtgcatatgatgcttgagatggtttttgcaaaagcagaaatcgctgcaaggtaatcacaatagataaaagtggtattttaaacctttaaaataaatggatgtaactgtaccttggtacagcttttctcttgtttagtttttaaacgttagtacaatctgaataaataaaatgttgccaaattcaatgtagaaagaatgtgacaacacaccttgggtagttctgcttgtgtttttgcatattgtaaaagcagtgtcacagct

SEQ ID NO: 91 - DNA, 3675 bp, Homo sapiens
ctgatttctggtcacaggagtaatgcccactttcccacccttgcctccccatccccatgagcacagtcaggcctgaatgcaaagcctgatgttgccaccgctagtgctatgaccttgggaacattactcacatttcctgagcctcaaggccttggtctataacacgagcataataaaatgtgagcggttgttatgagatttaaataagattaaggaagtgttacggttgtgttcagcatgttgcctggcagatactaaagatttaacaaatggtagctaatcttgtcagtcctggcttttaaaaacatctttcccagccatttcttaggctgtctagtttcttatcataaatacacagccagttgagaattgagttacatcttaagaggaaatttgggacagtaagtaatcttgccaatagtgcctctctgctatcttaaatctgtgtctcttcctcaatgcccttatcctcccaaaaaaaaaaaaagagaatatttttgctctgccatgtctcctattcatccttctcagagggatggggtagaacatggtttggagatgagactacctcatctttctctagctcctcatagagctcatgtccttgctgtcaaggaagatggcggggagtagtacttccccggagcatagatgtggttgaagctgcaccctgtcccctcttccagggccccctgatgtgccacactactaagatgtacagcacagatgatggagtccagtttcacgcctttggccgggtgctgagtggcaccattcatgctgggcagcctgtgaaggtactgggggagaactacaccctggaggatgaggaagactcccagatatgcaccgtgggccgcctttggatctctgtggccaggtaccacatcgaggtgaaccgtgttcctgctggcaactgggttctgattgaaggtgttgatcaaccaattgtgaagacagcaaccataaccgaaccccgaggcaatgaggaggtagagtttctgaagagaccaactgggttggcttaagctagatggtcccacggacacacatgagcacaaacgggactaatccacagtcattgccatgtcctggtttcaggcttagccttctagatatgaccctgctggattctccctgtactcagttcagatgcgaggaattaggacgggtgccttttattattttcctcctctctttgttctgccagaatacctgggaagaaatggcccttcaggttacccccactcagcaccaggctcctggttggggaatacatagtctgatcctaagcaagtcctcttctcttctcatacctctgcactttctgtgcctgctcatgccagttgccctcagtcctttgtgctttggatctcaggctcagattttccgacccttgaagttcaataccacatctgttatcaagattgctgtggagccagtcaacccctcagagctgcccaagatgcttgatggcctgcgcaaggtcaacaagagctatccatccctcaccaccaaggtggaggagtctggcgagcatgtgatcctgggcactggggagctctacctggactgtgtgatgcatgatttgcggaagatgtactcagagatagacatcaaggtggctgacccagttgtcacgttttgtgagacggtggtggaaacatcctccctcaagtgctttgctgaaacgcctaataagaagaacaagatcaccatgattgctgagcctcttgagaagggcctggcagaggacatagagaatgaggtggtccagattacgtggaacaggaagaagctgggagagttcttccagaccaagtacgattgggatctgctggctgcccgttccatctgggcttttggccctgatgcgactggccccaacattctggtggatgatactctgccctctgaggtggacaaggctcttcttggttcagtgaaggacagcatcgttcaaggtttccagtggggaaccagggagggccccctctgtgatgaatgtaagtccaccagcactcccccaccccagtcctcgagggtccttgcagccaggcatatgagtgggatgggctcaccatctttaggattcggcaggagaagcagcttggggtacacaggaccatcccaagtcctgggccagcttcttcccttttccttccttatcctggtggtgtagcctggaaatggaaatttaagtcatttctaaactgtcatttgctcctcatttctgagaagggtttggcgttggacgtatttgagaagagatatcaagaggatgatgagattggaatggtttatagaccctgattgggcttcatggaccaaatgtacaattctggaatttattctacatccacaaaaatgtaaatatgtgcagaagaaggaaataaacttctaggaaagctctaagtctgagcatggcctgaagcaaacactaagaacatatgcttaacttctgacctctgccatgggccttgcttattcagttagaacgcccacctcccatttgatttctgtaccatgtctttcatgactgcaagacagctgcagtgttgcaggagactgctactctgccatggccccatgacaggcccagaacctctccccagtcactccctccacctcctttacagtgattcggaatgtcaagtttaagatcctggatgcggtggttgcccaggagcccctgcaccggggcgggggccagatcatccccacagccaggagagtcgtctactctgccttcctcatggctactcctcgtctgatggagccttactactttgtagaggtccaggcccctgcagattgcgtctctgcagtttataccgtcctggccaggcgcagggggcacgtgactcaggatgcacccatcccaggctcccctctgtacaccatcaaagcttttatcccggccatcgactcttttggctttgagactgatctccggactcacacccagggacaagccttttctctgtctgtcttccaccactggcagattgtgcctggtgatcccctggacaagagcattgtcatccgccccttggagccacagccagctcctcacctggcccgggaattcatgatcaaaacccgccgtaggaagggcctcagtgaagatgtgagcatcagcaaattcttcgatgatcctatgttgctggaacttgccaaacaggatgttgtgctcaattaccccatgtgagtgcgtggactcctgggagctcctgctccctacagtgggctgcaactcctgtacttgaagctgagacctcatatgacgtggccttcgtgttgtcagagagtgtctggaagctgctgttgccatcttgaacaactcaccaacctccaacccagagccccagtgagagaggagcatttggcctcctgcttccttctgtggcctctgccgggctccattcccaaggaaaagagaggagcttgggctcacagaaagagaaggggatgaaaccccaaggggccctatctttgggatttacatggaattttattttctacaagtttgaccttagccatggtttgcaagtgaacagaacattctgacctctgtcttgctctgctcctttcatcctcgtctcccctgccccgtctggtgcttacattctgaatatatgtcatctcccaagaggcttcactgcctctgcttcc

SEQ ID NO: 92 - DNA, 3700 bp, Homo sapiens
catatagaccaatggaacaggttagagaacccggaaataaggctgcatacctacagctatctgatctttgacaaacctgataaacacaagcaatggggaaaggactccctatttagtaaatggtgctgggatagctggctagccatatgcagaagattgaaactataccccttccttataccatatacaaaaattagctgaagatggattaaagacttaaatgtaaaacccaaaaactgtaacaaccctggaagaaaacctagaaaatactattctggacaaaggaatgggtgaagatttcatgatgaagatgccgaaagcaattgcaaccaaagaaaaaattgacaaacggaatctaattaaactaaataacttttgcacagcaaaagaaactagcaatagagtgaaaagacaacctagagaatgggagcaaatttttgtaagctatccatctgacaaaggtctaatatataatatctataaggaacttaagcaaatttataagaacaaaacaagcaaccccattaaaaaatgggcaaaggacatgaacagacacatctcaaaagaaggcatacatatggctaacaatcatatgaaactattttcatatcactgatcattagagaaatgcaaatcaaaaccacaatgacatatcatctcacaccagtcagaatggctattaaaaagtcaaaacataacaggtgctggtgaacttgtggagaaaaaggaatgctcttatactgttgttgggagtgtaaattagttcatccattgtgaaaggcagtgtgacaattcctcaaagacctaaaaacagaaatactaacagctattactaaaaagtcaaaaattaagagatgctggtgaacttgtggagaaaaaggaacacttttacactgttggtgggagtggatattaatgcatccattgtggaaggcaatgtgatgattcctcaaagacctaaaaacagaaataccattggacccagcaatcccaatactgggtgtatacccaaaggaatataagtagttttatcataaagacacatgcacatgtatgttcattgcagcactattcacaatagcaaagacatagaatcagcctaaatgcccatcaagagtagactggataaagaaaatgtggtacatatacaccatggcatactacgcagccataaaagagaatgagatcatttcccttgcagccacatggatggagctggatgccattatccttagcaaactaacacaggaacagaaaaccaaataccacatattctcgcttgtatgtaggagctaaatgatgagaacacacggatacatagaggggaacaacagacactggggcctatcagaggatggggtggagggtaggggcaggaataggttcaagaaaaaggtcatctaatgggtattaggcttaatacctgggtgatgaaataatctgtacaataaacctccatgacacaagtttacctatataaaaaacctgcacatgtacccctgaacttaaaataaaagttaaatttaaaataagaaaaaacacaaaaaatcaataaaataaaaagttggttttttgaaaagataaaaacattgaaaaacattttagtcagactaagaaaaaacgtgaagacccaaataagtaaaatcagagatgaaaaagacatcattacagctgatactgcagaaattcaaaggatcattagagactactgtgagcaattatctgccaataagctggaaaacctagaataaatggagaaattcctatatatgtttaacttatcaagattgaactgtgaagaaatccaaaacttgaacagaccaataacaagtaatgagattgaagctgtaataaaatttctcccagcaaagaaaaaccagggacctgatggcttcattcctgaagtttaccaaatatttaaagaagagctaataccaaactattccaagaaatagagaaggagggaacccttccaaactcattctgtgaagtcaatattaccctgatgccataaccagacattgtattagtctgttttcacactgctgtaaagaactacctgagactgggtaatttatgaagaaaagaggtttcattgactcacagttcagcaggcttaacaggaagcatgactggaaggcctcaggaaacttacaatcatagtggaaggcaaaggggaagcaagcatgtcttaccatggcggcagaagagagagagagagaacaaagggggaaatgccacacactttcaaacaaccagctttcttgagaactcactcactaccacaagaacagcaagggagaagtctgcctcatgattcaatcacctctcaccaggccctgcccctgacatgtgagtattccaatttgagataatatttggttggggacacagagccaaaccatatcacacatcaaaaagacaaaattataggccaatatcccttataacattggtggaaaaatcttcaacaaaagcatagtaaactgaatttgacaacaattaaaaaattattctttataaccaaatggaatttatctcagtaataaaaagatggttcaacatatgctaattaatcaatgtgctatatcatatcagcagagtgaaggacaaaaaccatgtgattatttcgattgatgctgaaaaacatttggtaaaattcaacatcccttcatgataaaaactctaaagaactgggtatagagggaacatacctcagcgccataaaaaccatatatgacagaccaacagctagtatcatatgaataggaaaaagctgaaagccttttttctaagatgtggaacatgacaaggatgacaactttcatcactgttattcaacatagtactggaagtcctagctagagcaatcagacaagaggaaaaaataaagggcttccaaattggaaaggaagagtcaaattatccttgtttgcagaagatatgatcttatattcagaaaatcctaaagactccaccaaaacgctattagaactgataaacaaattcagcaaagttgcaggatacaaaatcagcatacaaaaatcagtagcatttctatatgccaatagtgaacaatctgaaaaagaaatcatgaaagtaatcccatttgcaatagctgcaaataaaataagatacttaggaataaacttaaacaaataagtgaaagatctctgcaatgaaaactagagaacattgatgcaactaattgaagagagcataaaatggaaagatattccatatttatggattggaagaatcaagattgttaaaatgtccataggacccaaagcactctacagattaaatgcaatccccatcagtgtaccaatgacattctttatagaaatagaaaaaacaatcctaaaatttatatggaaccacaaatgacccagaatattcaaagccatcctgaacaaaaagactaaaactggaggaatcacattacttgacttcaaattatgctacagagatattgtaaccaaaacagcatggaattgacatgaaaacagacacatagaccaatgaaacagaatagagaacccagaaataaatccatacatctgcagtgaactcatttttaacaaaggtgccaaaacatacattgggaaaaggatagtgtctttaataaatggtgctagagaaactagatatctatatgcagaagaatgaaactagacccctatctctcactatatac

SEQ ID NO: 93 - DNA, 4906 bp, Homo sapiens
atattcttcttgccctattccttgactctctttttctccttactgccacccctactactccattatccccttcggctccagctcccccggcgtggatgctcctggcttgccttctgggatgatacccagggcttccctaattgttgccacagcctacccagcccgctcctccctctggactgactcacttcgccaggcacagagggcccatagcctgcaatcctccccagtcagtgaatccctcccccttccacagagatcttcagaagaggtgtcgccacaccctttgcccaggcgccaccctcccgcgtcagtgtgcgtcaccgtggggatggtctttgttgtttccctctcaagcagggccctccttttcctcttgttctgtacacactggagagggagaacagatggtcctcctgccgggggccagccctcctggcagaggtgaccaaaccacccggctttcccatctcaggggcatcatggacacccctcagctataggttctgtttctggggatcccttgggttttctgtgtgtcccccccttcccccttccaaggtctctgagacctgctgacctatgcagctcaagcccagagagaagacaccaggcaggactggtggtgctaaaagatggtagaaatcagtttgtccctcctccgtgctgtttgtgattttgatttcaacctgggacgagttgaaaacagtcccccgcgcagctcacccggcccacgttacccactatcttcccggactcacagctgtctccacccatgcttgcctactggcaggcctttccggctttattttgcctagtggtgttaccaaaatgtctcctggttgaacttgactcttgttatatcttccaatttctcccgtgtccagatttccagaccttacccactgtggaaggcatcacactgaagcccagacatgagttctgggtctgctcttacccagtccagtgaccctgggaaagtcaacaaacctctctgagccagtttcctcatctgcaggatcaggatgttaccagcctgttctgaggatcaaatgagcgaataaatgcaaagattctttgtaaactgtaaaccaacattctccaaactgcattctgcagaccctgctctcaggagaggtgttcataaactatttaggaaaacaaaaaagttttaggtcaagtttgaggaaggctagcctaaacaaagcaaactagatttcctcactctagaatttctcagaaactaacttgccaatgtgcatagcaaatctccaagagcagggtagaaaacatggctttatgtcaaaactgcttttttcatggactacttattaacttctttaggttagtggtttccacagagcatagcatatattaatattatttctcctacaaataataatgtgaatctttccacaagatttattccatcatccaagtcactaatcctgggtaataccagttaatcagtgtctgaaaaaagtattgctggagtccctgcctttaatcttctgggcattgtgctctgtgctgtgggggagaggggacctgctattgaaggcctctgccattggactccagccctaactcccgccatccccatgccgcactctgcccctgcagcttagtgaacccgctgccctgtgtatgcatcttttgtcttcctgttccctgcctttgttccatccttctccctgccaaggtgcctccctcccatttctaccagtacagttgtcacccattcctcaagtcttagcccaaatcccaacttctccatggaaatttttctaactaaagcgatgtgttctacacaggactactgaccccttgaactcaactctaagcccctaaaggcagagagcattacttatacttcctgattttctccaaaaaccagcattcatttgtgggttgattgattgctcccttccaccccaccccccaagaaccataaggcacacagttgtaccttgggaacttcaacccagaggtatgggtccttcagagctggggagtcagtggtgagtttacttatttcattcagtagacacttattgctggggaactgctgggaactcaaagttgaacaagacaaggtctctgcctttaagaagctcttggtctagacaaaagcataaaaacgtcattgcaagtcaatgtgctgagtttaataattgaaaaaatactggagcacaaaattgggttcgtggtgagagtaagtggaaatcgaggcaggcttgtggagaggatgtcacctggagcagatgtggccgggttatggggaagaaggacctctgagaggggattcagatctgttccctgggtcacagggaggaatgttgtaatggagccagtaggttacagcagttgctgaaagagggtgtgagatgggacctttgcatcatacacacacaaacacacacacacacacacacacacacacgtctgtgggaatcccacttccctgcttttccatcataccctctcaccccttcttccttctcaccttgactcattcttcctctcctcgtctctcacctccgggtcctggggccatccatcgttacctcatcgggacagccccgtgtctgctgtctgttggtagctagaggcctgctttggtgacaggctggtcagtgcggtgcccactccccatggggggccctcaggagggagagcagcctcaactcaccactttctcttttcttcccacagaaaaccaaaagagacgtcaataattttgaccaagactttacccgggaagagccggtactcacccttgtggacgaagcaattgtaaagcagatcaaccaggaggaattcaaaggtttctcctactttggtgaagacctgatgccctgagagcccactgcagttggactttgccgatgctgcaagaaggggtgcagagaagactcctgtgttggagacactcagcaggtcttgaactacttctcctcctcggagccccagtcccatgtccactgtctatttattgcattcccttgccccaggccacctcctccccctcccacctggtgaccagaaggcgctctcggttcttgtctcaccagtaatgcagactcattgggtcagcaattagctgtatacactgccgtgtttggaccattggcaagcctggttccactcctcaggggctcctggcagtgaagcaacttcagttcttttactgcaaagaacagaaaaaagaaagaaagcaaacaagaagactccggctctgctatcggacacagatcctgatccctcttgcttcttttccctcctgcaccgcagcttgccatccctgcccttctgtcctggagaagagactggtgcttctccgcacacacgagggagggcgcccttgaggcatgccctctgagggagggagaccagagatgcagggattggccagctgggttggtttgctctggaatggctaactcttacctgctttggttttagcttttcagcatgccaaagtcatgtaagtttgtgtcttgtggaagaaatcctctttgtggaaaaagaaacagggttttgaactctgttaacatttgaaaaatatattttcaaattcactttctaattggccaaaagagatgagttccagtctgaatacaggtagatattaaagggctaataaaaaatgagaaaccggtcgtccaaggtggatgctgtcaatgcccgagtgacacatgagagctgtatgaattgagagaaaaggcaacaagtagcattcttcatcattcaagttctacctggacacaaaggcgaggaccctggggttccaacaaagctcagctcccagattctctttccagtttcatcctaagttcctagcataaacactatttattttctgcagcagtgtgttatttttgcgcacttatacaaaatggtagtactactgtgttgtggtttttaaacattaaacatgtaaagttatatacgaaatatctgcttttggaataagcagaatgaggctaaacatgggttatacaaagggtatctggaaactgaagagcaacttgttagaaaactgacaatgtcgcaagatgtactcagttttgtttctgtgtgacatgcaatggcaactcatgtggacactattgaagggatgtgacattacctcctgtagatatgctaacagtgttattctttcatttccaagggttctctgtggctttgtgtatatgtttcccagaggtcatttgattacctaatttactgaactgatttagcagggaatggaatccattccaactattgcacgtggatttcccagctgcccctaaatatatatacttgtgagtggcaaagtggcactaatgaagcttttgccttttgtacatttgagatttttgtatatagtgtttgctgcaaggcctgtggaattaattcgttgcatatagaggtatcaactgctgcatgttcaggcatattataaaactttagtctatgaaagaataattataataatgtccaggtgcaatactctgtaagtctattggttcaagttaccgagagataggtgtgttcctttatgggggatgggggggtgtgttggggattctttgtattgtttatttcattttggtttattttaaaagatgtaaacatatattaagctatattaaatctcacatacagttcttctgtgctctattataccctgatagagatgggggagagaaaggaatgtttttgatggtggtttcaaagctcggacagtaactatcttgagcccattagagagtctgtgtccatatttgcatctggctggtcatagcctttgttactaatgatgacattcagttctcttttgtttttattttttaaaaactcaggtgtaattattatctgttcttaagataattgcaaatattaaatattatgatatatc

SEQ ID NO: 94 - DNA, 3713 bp, Homo sapiens
ccgctccgggagagttagggctccgagccgagcgcgcggagcagctggggccggggcgcggatgctggaagttcacatcccgtcggtggggcccgaggccgaggggcccaggcagagcccggagaaaagccacatgatcaagaagctgtacaaagtgcccgacttcccctcgaaacgcctgcccaactggaggaccagagggttggaacagcgccggcagggcttggaggcttacatccagggcatcctgtacctgaaccaggaggtgcccaaggagttactggaattcctgagacttcggcacttccccacagaccccaaggctagcaactggggcaccctgagggagttcctgcctggcgacagcagctcccagcagcaccagcggcctgtcctgagcttccatgtggatccctatgtttgcaacccctccccaggtgaggaggtgcctagatatggggctacagggctgggttgtgggctttgcatttctcggctcctgggaccctcagacagcatctccttcctgctgcccacctctggagccactacctcctgctcctgtcccctggagcctgctttgtagacacaaggaaaacaagtttggcttccctggtctccatttcttcagcagcctgacttctttaccaagctgatgtgaaaagaatgtgacctgggaatgcggaggcttcatttggggtggacagctgctgtctgctgccttggcaggggctcctactcccaagtgggggctgagcccatgagcaggagctcaaggagctgcaggtctgaggccagacctgtttaattctatcccacagagtcgctgcccaacgtggtggtgaatggtgtgctccagggcctctacagcttcagcatcagcccagataaagcccagccaaaggcggcctgtcaccctgctcctctgccaccgatgccctgatcagtccagaggcctttggctgcctcctaagaaagtcatgtgcctctgtcctatgaactccatataaggctgggtcctcctttggcctggacccaggacttaattacccagtgcccagttgtgccacattcccactcaaggctcagaacttggctcgcattggtagctggaggtggtagaatttgtatgctcttagagcccaacagccaaggcagggtcaagaagataagtaataaaagaggaagtcagccaggcgcggtggctcgtgcctgtaatcccagcactttgggaggccaagatgggtggatcgcctgaagtcaggagttcgagaccagcctgaccaccatggagaaaccccgtctctactggaaatgcaaaattagctgggattgcaggcatccgccaccatgcccggctaatttttgtatttttaatggagatgggtttcaccacgttggccaggctggtcttgtactcctgacgtcaggtgatccacccgcctcggcttcccaaagtgctgggattacgggcgtgagccaccgtgctcggcccaaggcaggagaatctcttgaagccaggaggcggaagttgtggtgagccgagatcgcgccactgcactccagcctgggcaacaagagtgaaactccgtctcaaaataaataaataataaaggaagaggtcagctgggtgcagaggctcatgcctgtaatcccaatactttaggaggccaaggcaggaggatgcttgggtctggaagtttgagaccagccagcgcaacatagtgagacctgtctctaccaaaaaaaaaaaaaaaaaaaaaaaatcaatttagaggtaggctatgaaaaagtacagatacatcccttaacatagactggagggtggtggcaaggggagcaaatgtggaggcccagtagctggcaaagtttagaagcagggggcaaaagctcctgcctgacttttcctgggtagctcctgggtcaaaatttcaggcaggatcccagggaaggggcaggcacccattgccacaggagagttgcaggcatgttgggatgtaggcctaggggaggtgctgcaggctcaagaaccaggcccacacattatatattaaaaaaaaaaaaacccacatttttttttattggtcagtgttggtaggagtttgttacaaaagtgagtccatgggcctgtggaatgtgaggggagtgggtccgctccaccagatgccagcaccggggccagtgcagctcagagccctgtggcggactacagggcctgcacagacggtcactcaaagaaagatgtccctgtgccctactccttggcgatggcaaagggcttctccacctcgatcttgccgcagtctgcgatgatcacatccttcaggggtttatcccggctgtctgtcttggtgctctccaccttccgcaccacctcctggaaaagaaaggtggaagcaggagggcatggtggatcaggaggtccaccgctcaggagaaaggccccagcgtatggctcaggagggctaagacccacaagtgatcaacagcacacaaaactggaggcaccaaaattctaacagactcctggccagagcagggagaatgcagatttgacgagggggtacaggaattttgttcctttgaagtaagacccaggttgggccaagggtgaggaggaggaagagggtgaccagggcatgtggcttctcagggacattgcgttcagctgcactctgtatacctcaggggtgggaccagcacgtcactgagtgaaggaggggagggaggctctggcagttgtgcagccttcctggctgggctctgagggggctggaagaatttagaaccttggaggcatggaggtacagggtttattctggacaggagcactgggctgcatctgtgggttgggtccttttgggaaagggatggacacatggagctcctgccctggggtctgtgttgaatccccggtgaggattgcccagtagtagcccttgcttccacaactcaccatgccctctagaactttgccaaacaccacatgcttgccatctagccaggctgtcttgactgtcgtgatgaagaactgggagccgttggtgtctttgcctgcgttggccatgctcacccagccaggcccgtagtgcttcagtttgaagttctcatcggggaagcgctcaccgtagatgctctttcctgggaaaaaagacagagcaggtcaggggcgctggattgcgccaaaccaagcagacattcggggccaggactgagggggcttaacctgtcctctgtgccaggctaggctggagtggactacaaggacataaaagcagcgtccttcctatcttctggcctcagagccaagccatgctgactgaggccaagtggggcatcaggccaggctgatgtggtgaacagctcacagaaggattactttgagaagatagttttgtggcttttaaataaggcgcatgttatcagctccccttagctatggcccaggcctgccacggagggactttggtggagggaagtgccgtgcaggatgcaggggagtcaacagggtcggaactctccagaaaaggaggactgctgtggctgaccagcctgttttcctatgagcacaaaagacacaggcatagctgcagaggagaaagcagccagagatgtgtggggaggggcagaaaagaggggctgccccttggattctggagagtcaaagcctcttaacaaggaatgaacaggaataaaagacagctgtgagtgtg

SEQ ID NO: 95 - DNA, 3226 bp, Homo sapiens
aatagaactgggagctgagcctggagcggttctgggcttttggttctctgcatcaacacagccagcatgcctatgatttctgtgctgggcaaaatgtttctgtggcagcgtgaagggcctggaggacgatggacttgtcagacaagtcgcagagtgtcctcggaccccgcttgggctgtggagtggatcgaacttcctcggggtctctctctatcctctttgggatctgctcgaaccctccgaggctggagcaggtcctcccgcccttcctcggtggacagtcaggacttgccagaggtgctgggcccctggtggtggggggaaggaggacgtcatccatataaaggggatctgcagcccccacccacgcctggccagccagcttctggctcccttttccggcgggcggaggcgctatccggcggcgggccgggaggccgcccccgtgccggtctgctctgctcggcgctgtgccagcaggcggagagctcgcgccttccgcgctgacgtcagcgcatcccgggccgtatcccgggagaccctgttgcgtggtgatgggttgccagggagacatacaccttttctctgggcctgggccgcagctgcgcggagcgccgggcacggatggcggcggctgaggggagcgaagcgagggagggagagcaagctaagaaacacccagcaggtgctcccccgcctaggcctggctggaggctactggcgccaccctgggggccctgtcagccaggtacccaaggggagggatcgagggtgggcctcaggtcaaggggcagtgttggctgcccttgtgagggacgggaacgtgatagaagagagctgggcaatgccggggagggatgtgtgcctccaacttcattaagtgagggaaacatttgctggggcttgtcagggagccctgagccaggtacagggtggagttaggaacttacgtgcatcagacttaggccttgccatcctgagctccctcgggagacaggcaagggcaatgatgggggcggggtgtgtcagagaaaagaagaggctgtcggctgaaagcattatttgcaggtgacacttgagatgggccttaagtgatggcaagcattttttcacgtaaggatggcattcttggcccagaggaaagctgagttccttttcctggaggcaggcgggctgcttgctgacagggattggtggagaagggtttttgttttttgttatttatttttatgtatttatttatttgagacggagtttcgctcttgttgcccaggctggaatgcaatggtgcgatctcggctcaccgcagcctctgcctccggggttcaagcgattatcctgcctcagcctccagagtagctgggattacaggcatgcgctgccacgcccggctgattttgtatttttagtagaggcggggtttcaccatgttggccaggctggtctccaactcccgacctcaggtgatccgcctgcttcggcctcccaaaatgctgggattacaggcgtgagccactgcgcccggcctgagaaggggggttttattgggcagaggagatcagcagtggattcaaaggaggcttggaaggaggcaagggtgtcacagagtgggatccttcagggcctgggtatgatgcctgcactaacctcactggacagtagcgtaggctagacaagattttagagatgtgttgtgaccagctgcactccaggaaaactgtttacattatatcttacctcattcatccagcctttgcatttttgtttgcttgtttttgagacagagtctttttctgtcgcccaggctggagtgcagtggcacaatcttggctcactgcaatctccgcctcctgggttcaagcaattctcctgcctcagcctcctgagtagctgggataacaggcacccgccaccatgccctgcccattttttaaattatttttagtggagatggggtttcaccatgttggcctggctggtctcaaactcctgacctcagatgatctacccaccttggccccttggcctcccaaagtgctggaattacaggcgtgagccaccacgcctggcccagcctatgcattttttttttttttttttttttgagatggagtcttgcaccgtagcctaagctggagtgcagtggtgcgatctcggctcaccgcaacctccgcctcccgggtcctggttcaagcaattttcttgcctcagcctcctgagtagctgggattacaggaacgtgccaccatgcccagctaatttttgtatttttagtagagacggggtttcaccatgttggccaggctggtcttgaactcgtgacctcatgatccgctcacctcggcctcccaaagtgctgggattacaggcatgagccactgacgcctggccagcctatgcatttttaagaaattattctgtattaggtgctgtgctaaacattgggcactacagtgaccaaaacagactgaattccccaagagccaaagaccagtgagggagaccaacaaggaacaggaaatgcaaaagagaccattattactcactatgactaagggccacaaatggggtacgttgatggagagtgatttgttaagagactacagagggaggacagactaccaagaggggggccaggaaagctcctctgacgaggtggtatttcagcccaaactggaagaatgagaaagagctagccagccatcagaatagtccagaagagatggggagcactacactcactacactttggcctgagaaaatagcatgggattggaggaggctgggggaacaccacttctgccgacctgggcaggaggcattgagggcttgagaaagggcaatggcagtagcagtagaaaggacagggtaggagcagggactttgcaggtggaatcattaggtcttatcaacagatatgggcaagcaaagccaggggagaattgatggtaatgctgaggtttggagccaggctagatgggacagtggtgggtgatgcaaaggaaagaggtcaggaagcagggccagacgtggggagaaggtgtgggggtttggtttccatcttgccgagtctgccggaatgtggatgggaagaccaagaggaggagcaaggggcagaggggaagggaatcttaaagaagtcctggatgccacactcttcttccttcctcctcttccctctcctcagaggtctcactcgtggttcttcatttcctgcccaccctcc

SEQ ID NO: 96 - DNA, 3804 bp, Homo sapiens
cagaagagtctaacataagagaaatggtcagataggagggcagaatggatcactgttaattatgaggactttggaggcaaactgcccagattcaaatccctgttccaccccttgctagcagtgtgaccccaagcaagtcatttaacttctctgtacttcatctgtcaaattcactcatcacaatacttaactcacagggctgccgttaattagttaatgtccacatgtatctgattagaagagcacactgtgtaacacagcccattacgactgctctaattccagcccacagggccagctggccggggcccctttccacagcagtggtgagtccagatgggccacacctgctgctgctccagggctgcatccccttgtgctgtcctcccaaggctacatctgcaagtggagaggatttggctatcactcactgggggagagataagtgtggaagcaggagggggaattggggaaggagggaggctgcgtgtgggacaccttcggaagcccttgtcttcttcgtagtccccagggaaaggaacgcctgcctgctctgtagagggcaggctgagctctgagtgtgggcttcctattctcacagcagctagtttcatacttaaaagtctgaagccagatatattctgccaccagattaatttttttctgaagctcccatttggtctgttggaggaattcacattcctccggctgtcataactttgctctgtctttcaagagctcacacccctggccttgttttgcaaatagagcattctttctctcctgcctgtcctttaccttacaaagcttccccatactgaacaaaaacattttcaactgctctgtagtggaaggtagggaggccggggtggaagtaaagggtaattaaataatttctgctgcagcacgaaaagctgaacagcatgaagtattattaatacgatgtgctcttcctaatgaattaacacaggcaatccctctctcctgtctggtgttcagtaaatatttgttgaatgaatgaataacagcttatgattctgtctttcctgctctgatgaattatgaagtccatgtagccaaatcagcatcaaacccattttatatgcagtctgtgttttgagccccaggtcaaagtgaataaaatatgtgtgaaaatgaagtaataatgtccattggagaccactggcttcctgtatttgtaggggatagggtctacctggcttggtattggtgacttgagagtagccttccagctgcttttctctggttcccaggtaaaccagggtcaggctgtcccttctaggtggaactctgttgagaccccacaggcagctctggtgaatgaccagcatgtgcaaactcattgctctccagctgaccccaaaaccatgcaggaagaagggcaattcctgcaggactgagtctgcccccggctgagccttgctttgctcattgcagatatttaagtctctccatagtgctgtgactcacctgtctgtccttggttggaattccacagggaaatcacatgcagaacctggtcactatctgtacacaaagcacatggagagattctagggacaatcatttctaagtaaattacctaagggcagaagagtctgcccgggagctgggggagaatggagcagggacaggagatgggaataagtgacttgtacattaatcacaaagcaatcagcagatgacaaggggccttggaaccaccacgtctgtctagctggacgaggtgaaagaaaaggtcacccttgtctgggaactctcatccatcttcaagacacacacttacctggcttgcatgtgcctgagcttcctgtttttcccgcccagcagagatgctgccctggcctggttcattgtccattatttgccctctgggccatcccagcatccacctggcctgccccacctggcccaggccacagaggagggcatggctttggctagttgacctttaggaagtcatttactgggtgtaacccacctcagttcctgagacctgtaaactcctctttctctgccctgaatcttccccagttatcagggcccaagcaggagagtgggcgtgaactctcagcgctcttcccctaactttttcccttgatcctccccagcttcttccctctcctggcaacccaccccctgcccactgtcccctgaacacagaggctcctgatggatggagctgtcttcttacttccgctggccctccctgggctgtacactagcccttggatcaaaacctgttcccaagttcagatcaatttctttctgacatattttcacaaaagtgggttttgtctcccaggtcatttgaatttgaactggagcaatgtccttgcccaggtgtaacccttggcagtggattttggcagtggtgatgagtttggagtagaaaaaaagagtcctgattagaatggctactccatggctcagatcacagatagagcatgagatttggatttaggccttggatttattttattgattgattgattgattgattgattgagacggagtttcatgctttcgcccgggctggagtgaagtggtgcaatcttggcttactgcaacctccaccacccctcccccggccctcaccaggttcaagtgattctcctgcctcagcctcccgagtagctgggattattggcacctcccagcactttgggaggccgaggtgggcagatcacctgaggtcaggaatttgagaccggcctggctaacatggcaaaaccctgtctctactaaaaatacaaaaattagtgaggtgtggtggcacatgcctgtaatcccagctactcgggaggttgaggcacaagaatcacttgaaccctagaggcagaggttgcagtgagccgagatcgcaccactgcattccagtctggacgacaaagtgagactccatctcaaaaaaaaaaaaaaaaaaaaaaaaaggacaatgcctgagcaacattacctgggtcccctagcccagcagggttctccttgtttcagccaaagatgggaagctgacttggttaggctgggcatccagacaccgaggctgaatagaaaagagataagaaaattacaacttacagactgaccctggggatgccagagggtggtccagatggagtaaaccccaaaaatgaccttctctggtgttagcctccacatgcattctgtctattgtgctgcatggcttgtgctatggtctgaacactggtgtctccccaaaattcatatgttgaaacttaattcccgaggtgatagtattaagaggtggggactctgggagatgatgagatcatgaaagcagagccctcatgaatgggacaagtgcctttataaaagaggctagaggaaagctgtttgcccttctgccacgtgaggacacatagagagcaccacccataaagaatgggctctcaccagacaccgaatctgccagcaccttgatcttggacttcccagcctctagaattgtgagcaataaacaactcataaagatatttatgaggccaggcacggtgactcatgcctgtaatcccagcactttgggaggccaaggcaggtggatcacttgaggtcaggagtttgagaacagactggccaacatggtgaagccccatctctactaaaaatacaaaaattagctgagtgtggtggtgcacacctgtaatcccagttactagggaggctgaagcacgagaattgcttgagcccgggaagtggatgttgcaatgagtggagattgtgctactgtactccagcatgggcaacagagtgagaccctgtctc

SEQ ID NO: 97 - DNA, 4865 bp, Homo sapiens
ggcctttttttttttttttttgtcatttatttatttatgtgcagacttcaagtgctcaggcttagataacttttggtaaaagtacactctcatctttcgcccactgggtcctctttctttctttgctattctttgaactcgttctctgtggtttatttttctatgccaggagcatatattatttgtatcagtcctaatgcttagcttacaatagtctgacatggtcctccttacagagttactcattactcatcctctagtctgtttttttttttaacctttctttgttgttttggttttttaaaaaaaacctttcccttctcccttttgatcacttgttccctaacttgcatcttttcattttgacgggcctcaaaatctatgtctcattctgcacttcactactcatacatccattctttctttcatttaggttctttttcattgtcaaatgtcagaggcatatatttgagttacacataccccttagtccataatcacctgatatcgctttgtgtgttgccctattacttagtgattcactggtttttttctatttatatattgattgcctagccatcaaagcggatgaaccatggtcttgtgtacacacactctcatcctggcttgcttacttctttacctatttacttgtttattcattctctcttgcttcactcattcattcatctggtcatttattatacaatgcaatagataccagtgaaacaacctctcaacaacaacagcaacaaaactcagaacattcacagtatctttggcattcctgcttcttctcactgagtcaccaaccaaggtacacacagcccacagtccagaaacacacacaaatggcggatgcagagcagagacacagtgaatgttaagtttactcccagatccttctggggctcgcgtcctaaacatactgggggcagatctgagatgagggcccacgttccccaggccccctgggcaaggcaagcgccgcctgttctgcccctctggaccgtggtgaatgaccatccccatgagaaacctgtttcaagaccccagaatacatagagacacacacatggtacatagtctcctggtgggaaacgacggacatggagttcatttttaaataggtggctttgtctgtggcaatataaaaatattttggcctttcaaggcaaatacaaaagaaactacccattaacatggctgagtgtctcagtcccaaacaataaagaacttgaagaggtttagccggaaactttgaagacagaaaatctgcccattatgttttccagacatttcgagggagcgagcggaggtcattggagcttgaagcccatttggaaggctggtccctcggcctgcgttttctccttggccctttgaagggccccccagctcacagggcacttccatcctagtctgccctgcggcacaagagccaaagggagactcaataatgaaagagccattcatttagaagagtgaaaaagaagaaattcttttggggtccgacatttgaagcccgcctatagaattcttttgccacagagacaacacaaggaggcagggggctcctgtcttagaaaacaggagcccccaggtctgcacttggcttgactcgatgggcacccacctcccggtgcacagacccccggccagtgcccgccagcccctccacgaggtccgcctggcggtgtgctccgggcagctggccccaccctcagcagcaaggccacatgtgtgttctttacactccagccacttacgatttcgagctggagaggggctggggtcccacattcgaggtcccttcccacgtaggcatccaggtgatggcttccgcccaaaccaggaaggagacgagaggcccgccaggaagaagacttgggtccgggatggtgggccccatcagggcctcttccgcagcttccatccgcagttcttcagccgacccagccgggccacggcccacgtgccttggggaagggcagagagttagaatcatggcaaggcaagggccccggaaaagccaaacacaccgaagaaagactcggggcacggcctcacctgcagtttacttttcggtggagtggggtgactactgggggatgcccaatgacaggaaaaggtgcaaagcagcaacgggctgggttaggggcagccccaaatccagaactgagtggggagcaagggaccgggcggggcagaggccaggactctcagggccacggcggaggcaaaggcaggcgggggcaacacccaccagggcacgatcacgaggggtctctgggatgggacaggagtctgtccatagccctgaggccaggcccacaggaggaggcactggaggatgcttggcaggagatggagacaccagcaggggcttgtcaggggcactgggaacctgctggaaacaggcagctggagtgggagtggctcctggggcaggggagtggtactcagaccacaggagggccaggtgaccacaggtatgggcgtggcagggagaaccagcctgctaggcagagggctgtggagctgagccctggagcccagggactgaggcagagaaggggaggttggtcaggcccacctcaggagacagagcaaagcggagtgccgggtgggtgaggaagctggccgctggagagccaccagggagagcaagccagcagccgggcagaagcagagcctgcagatgctccctggaggtttcccctgctggtcctcggcatgggaggtgggccccagcagctgctagagagtgaaggagctggaccaagccccgggggaggaaggcatcacggcaagggaagggtcgcagtcacaaccacacctcgagagggagacctgtggccaaagcccgggggggcacacactacagctgttcccgtgcccactttggtcctgagagactcagggccaggggtccagaacagttcagcatcaggaatggggcggggaaggcagagagggagaaggggctggctccgaccagagcagagccctggggatagcttgaatctgccctcacaccctccggcctacctctatggagccacagtccactgctccagcccctgggcaaccccccggcccgccctcctggggacacagaggccatcaagggatgggctacggtggccggtgcccaggccagaccagggccgtgggcgtgctcagttaggatcaactgttggatgacgggatggccgcgcgggtgaatgcagggacgcgaccagcaaggcccccgttcaaatggggcaggggtcggaagctgctcacacacctctcaaaaatgaattccaccctccagcctttgcacctagaactcttcgcatggcccagctagtggctcagctgtggtggtcgagtcctttcattcactcacctggcgaaaccaacatcccacatactctaactgagccccactctgtgccaggctggtgctgggacaccctgaggagacacggggctggtcaagggcaccccgggatggccaggtcaggaactggggagggacaaagagagggagatattgagagagaggaagacgaggaagaaggcaacagaagcagaaaaagtagggactcaaggagccaggttaaagggctgcccctacactcaagggagcaacgagacccctctgccggtgcctcagaaaagtccagaaacccaagcaggatggggacgtggggagttaacttttgaaagtttttagggctccaggagccttgggcacaaaaccccagagaacctgccgggggccagctgatttcttccacgccctctccgggctttccaatgtccacaggagctactgcagcactaacagtggctttggggcctgtatgtgaatgactgccatgtgtttgagggtgaggagagtgccatggattcttcattactattgaaagtcttctcatttagaaacatcaggcgtgctctatttttctactctccaacagctacatggcggggaggccaggttttcgtgtgatctcagcttcagaggtctacacccgagtccacccatagtcagagtggccaactacatcaccgtcactggaaagtctcgccttggcaaaaggggatgaaagattgcctcaggcttttgccccaaccggccaatgggagatccttccacattcttcctcgtggggtgctggggtagagttggttttgctaacttggaaacagtatccgattctaattcacgaagccagagaacctttagccaacagactcactaagggaggaaggtcccgtaaggtttcaactaataacattttcttgctccaactacctcccttatcccctagtttttttttccatttggctgaaggtctgactggagcctaaagtttaattggagtgatttaatcatgattgatccgccttggggtgagaaatgtccagagcttgggacaaataagggcatgtttcagactcgggacatacctgctctaaagaattatgggctctagggagctcaaagatcagaacaaaaagaggaggagggttcaggcagggtacaggacatgtgggtgaggatattaaggggcaaaagaagaactactatagggctgggcatggtggctcacgcctgtaatcccagcactttgggaggccaaggcaggtggatcacctgaggtcgggagttcaagaccagcctgaccaacatggagaaaccccatctctactagaaatacaaaattagccaggcatggtggtgcatgcctgtaatcccagctactcgggaggctgaagcaggagaatcgcttaaatccgggaggcggaggttgctgtgagccgagatcgcgccatttccagcctgggcaacaagagggaaactccgtctc

SEQ ID NO: 98 - DNA, 4762 bp, Homo sapiens
tgcccaacaaaactaaatagaattcctacctattgtagagccccctttgtacacttcaatatgaatttatttgtaggtttactccttactttagtatagcaaagtacaaccaggatggattccaacctccaggcccacatctcccataaatactcctgtagaaagggaaggtaggttctttaatggaaaccacaagtatctctttgaggcagacatctgaagtcatgaccaactttttagaaaatgtactcaaagggctgggcgcggtggctcatgcctgtaatcccagcactttgggaggccgaggtgggtggatcatgaggtcgggagttcgagaccggcctggccaatatggtgaagccccgtctctactagtaatgcaagaattagccgggcgtggtggcgcgcacctgtggtcccagctgcttgggaggctgaggcgggggaatcgcttgaacccaggaggcggaggttgcagtgggctgagatcgtgccactgcactctagcctgggcaacagagcgagactccatctcaaaaaaaagaaaatgtattcaaggaaggaaatatcagtaatatcagtaactgccttgctttttaatgatttgcttcttcagttgtagataatcatgtcattcttgcttggagctattttaggcagcctttactgactccttccttctactacatagtaccaggaattgggagaggtgtggtttaagtcattctttttgtggttggtatatttagggaaagatttggtataggagaaggtcaaactaatatttcaatgatggttttagactgtgcatggctttcaatcatctgagcaacttctacttcaccatccctggcccctaacatatataactagttgaccaggattactgagtcacttggccttggattttttttttttatgcctcccaagttccatatgaatacatttaaagcagggagtttagagcaggtggaaagttggaagtctgtttgattttgtcgaccgtaggaaatatggataaagatacatttgctagaactaaggagaaataagagtagctttaatgctgtgtagctctccctaaggcccaaacaggagacgcaaactaatgtgatgatgtaagaatttttctatttctcacaccatcccttgcttccactccaagcatggtagtatctgggtatttaggtgattggtgaaacacaccaattgagtagccaaaatgaatgtgtctgaatgactccccatgacatggtttctataccttgaggagagacaacatgtttcttcaggagacaagaagttgctttccctgtgtgctccactgtcttagtcctttttgtgctgctataacagtgtacctgagcctgggtaattcataaggacctgagattgatttctcactgttctgaaggtcaggaagtccaagagcaaggcgccataggtttggtgtctctacttccaggatggctccttgaacactacatcctctagggggttggagaacgctggtactcatgtggcagaagaatggaaggggcaagagaaggagagagggccaacttgccttttataacaagcctagtgccactctaacaacctactcctgaaaaaaaacaaaaaacaaacaaacaaacaaaaacagtattaatccattcataagggtgaagacctgatggtctaatcacctcttaaagactccacctgttaacactgttactgttaaagcagcaattacatttcaatgtgagttttgggggggataaacattccagccatagcacccaccctacccctaactctctctgttgggcgccaccccaggagctacatccctcttgacccacccccatttctcagccacctgccctggccatccatccttggatcccaggctacctgctgccctcctgggtgcatgaaaggaatgttggccagtaccaacatttttttaaagtggctactttgtaaaagtaggaactcttggcatacactagagcatgggcaccacctgcaccattccacgggtacctgcctctgccagatacccctgagggaagaggatgttctataaccaggccgacaggttagcatttgtgaacacagttctgacgttgttgggagggtttgtttgccagaaacatccccatgcgctactctttcaaccagaggtcaagaagtcctttacttttgtgtcttttttgtttgtttgtttgagacggagtttcactcttgttgcccaggctggagtgcaatggcgcaatctcggcttaccacaacctctgcctcccaggttcaagcaattctcctgcctcagcctcccgagtagctgggatcacaggtgcccaccaccacgcctgctaatttttgtacttttcgtagagacagggtttcactgtgttagtcaggctggtcttgaactcctgacctcaggtgatctgcccgcttcggccccccaaaatgctgggattacaggtgtgagccaccgcgcccagccttcgtgtcttttaagctgcactcggagcacaggcaaggtgcttcctcagagggaggttgcttaacatggggagacatccacacaggagaccacagctgatccatcccttgactgtcagcagcaagtccccctctctgcattttccagctcatgacatagtttggaaatagccctgccctggggtctgctctgtggttgtaacagtggagccctccggtgacatctgtgggccaagtcatttcaccatgacctttggccatgccacatgcagtcatctgaaagctgcaccttctggggtctgaggggtttcttgggtattttttcctgattgagacacatctgctgggcccctgagagaatgggggatacctggcgggaccagcattcttcacggagctattccacgagctactatgagaacatggtgactcagagaggctcacgtgtctgcactaaattcagacctaaagtaataagcagattcttgggaactttttttttaactgtacttgatgtcctttttgtttttgttttaaccagacccaagttcaggacctctgtgtttatcacaagcaggacttgttccatttgggaacgaggacctagagaacagcagcaaaaagctgagccttcccaggacctggaggagggtgttctgtgagcttccacagagcagatgccttaaaaacgaaggagctgtctggaaaaaatcaggagagagagagagattgagatttgcaggaaagcctttactgccaatgctcaacagaaagtctgagtgttccactaagaaaactgctccccgagggagaagtgggtcccatcctcttgagtttgatgagggtgggaatcagctttgtaatttttattttttggcctgtggatggttcgtaagctggaaagggtttgggtccccaagagctccccgatgcacagctctcctgtgtcctgtgtggggctatttaaggatgaaaggccaggactgtgaatcctgatggtcacagctctctcagcttaaagctaggggaccccgctcgaaggggaccctgaagtaccctgcaccccaatatctgaaagtcctctgacctcgcttgcaccccctggagcctcggcactcagtgcctttgctgaaagtagcagccgccgcaccagtagtggtggatcagaggttagttttcccaggagcctggcactattggatcaggtttcttttcaggagaaagagcagggagacagggagctaacccaatcacccacgtctatgctctttggccttagacacagcttggccaggtggggaggcgtccttccctttgcagagcccagagcagcccaggttcgggtctggcagtcactgtgagcagttttcaagcctgtcccttttctaccctctccttctagaaggtgctggacgaatgccagaaccagcgggcctgccacctcctggtcaatagccgtgtttttggacctgacctttgtccaggaagcagtaaatacctcctggtctcctttaaatgccaacctagtaagtaacttcggagggggacagtgtgtttggggtgtggttctcgtttccttcacactcctggtcaaaattctctgcccgttggcatttgtccaactttgaaactcattaacagacacattgggctccatcctacccagttttttagagacagagagagaaagaaagacagagaaagaaagagagagagattttgtgtgtgtgagtctgcacatgccttcattttcttacaaatgcctgaattttaaaaatcctttccaatatgtaaaactcagttgtactgatgctacaactctcaggggtggtgagagactgcaattgctgttcctcaaagtgaggagctggttctgcgtttcagaggtgtcttgtgctgagattgagaggctgcctgtttttccttgaggcccagtggcccacttgccacctgcgcccactgcttcagatctttaagaaccagctcctcccgccctcacccacggcaggggctccttgttccccaggagaatgagaggggatatggctggagccatctcttttattctgattcttgttgttttctccattgacttttgccatttctaatacgcatcagctttgtgatgggcaaaaataatccatcttccgtgggtgggtcacacttccaggagccaagagcctgcctgagataaatcataggtcactgtggcattagaggttcttgcacactttgttgcaaagaaacgatagcagtgtgtttaacc

SEQ ID NO: 99 - DNA, 4312 bp, Homo sapiens
tcattttttaggtgacattagaaatccggatcatgttaaatctagtttttaaatattggcaacaaatccacttgttaaaaactgcaatgatcaaacatgtccataggtcaaatctggccataggccaacagtccatgctctccagctggacatgtcaaggaccaaatcttctcaggcaactgctgatcgaacctccatcaagcctcagggactggggcaaaatagggtgtctacctagtggcccacaggccacacaggctattccagaatctggccctcaacaacgacttgagaaggtcacctcaattcctttcactgaaccttttttgttttgagacagggttttgccctgtcacccaggctggagtgcagcagcaggatctcggctcacttcaacctccacctcccaggttcaagcaattcccctgcctcagcctcctgggtagctgggattacaggcatacaccaccacacccagctaatttttgtatttttagtagagacggggtttcaccatgttggccaggttggtcttgaactactgacctcaagtgatctgcccgcctcagcctcccaaagtgctgggatgataagcatgagccaccaagcccagccctttcactgaactcttaaatggccctttccaggccaaatagcgttgcctggaaccatttagtaccatgtaccatggttctcagatccagaaacaggatccgatcacctatgcattttctaatacataagccctaagttattttaggtctataaaaactatacgctaaggtgggggtaaaaaatctcacatcaaatataaaaaatttaagtcattaaaggagatgaggcatttgtaaagaacttttaaaaatatcttaagagctggaggggtctttttgttggttggtttgggttgggttttattggtttgtgtttagagtctggagtatttgctttttaaaaaggcagtgaaagaaaaaaaacgaaccccttccaaacacatttgtcatttttatatactatatcatgcatgtttatgctggctacattaggaacaagcttgaattacaacccccggtttacctaatggagttctgaaaagccgtccaatcttcctggaagagggagttgggaggaatgtggtccagtttgcacttctttcgtatggactggagagtgctggtgaaatcagacacatacctgccgggaaagggaagaaaatggtagggaggtcaccactgattccccaactctaaagagacctggaattctacagctctggacaaattgctaatggccttgagagcatctttagaggctcccaccgacgagtgagactgcttgtaaacctctgaacacaaaaagttcttctctatgtggcaagactgtcttcaccacctggttgagcagtttctaaaagagatgcccaagaggagaaggaaggaataatcgtgaagttgactccagggagcaaccaggtgagagatgatgctgataaatcccccctcatccagataagtacatttctgtgaaagcaggtttgaagaactgtttaaacatcacggtcccatggtaataactgactgtgacctgggataacgtaaggaaggtcatgacatccaaggtacctctgcatcattctcatcctctaaatttagattaaatacccgtggcaaaaagattaaagtttcacggctggcaagtgtctgactttaatgggacagacgcatgaaagtggattcaaagccaggagatcctccctcacaggctgcgttgtttgctctcactgtacacacatacttttccctcacagcatctaaaacactgtaattaaacagcttgtttagacagggcatggtggctcacgcctgtaatcccagcaccttgggaggctgaggaaggaggatcgcttgagctcaaggagttcgagacctgcctgggcaacagggtgagatcccatctctaaaaaaaacaaaaaaattaggcgggtgtggtggctcatgcctgtaatcacagcgctttgggaggccgaggtaggaggaccacttgtgcatggaagttcgggaccacactgggtgacgtggcggagctttgtctctgcaaagaatgcaaggattagcctggcgtggtggcgcatgcctgtggtcccagctgctcaggaggctggggtggaaagatggcttgagcctaggaggtcagggctgcagtgggccatgagcacgccactgcactccagcctgggtggcagagcaagaccctgtctccagataaagaaatagcttgtatgatgcttattgctgctgctagactttaagctctgggagaacagagtctgtgcctcatacttatatccccaggaactagcacagagctggacataaaggagggagtcatgtcctctgaaagctacgaaacctgtgcctcatacttatatccccaggaactagcacagagctggacataaaggagggagtcatgtcctctgaaagctacgaaacctgtgacatttgcatgcatcacaagaggccttgccgcttgcccctcccaaaacgaagctctaaatgaggaaagtgaaatgtgaggacccagggcacagccccaaaaggtcagtccatgcagtggagacacaggccactcaatgaaccaactggaagaaacggcttcaggtcactccactgactgcaaatgatcctgctgctccctttacagagagctcgatgctttcaggtggaaagctgcaaaacccagagtaccactgacaacaccttccccttgcaccaagagaggtgacagctttctagggttataagtcccaggaaggagaggggctggcctcaagcacaaactgacaggggaatgttaaggaacatgattgtgctttagccatgggaagttaaacaaccatgtcaccacctctgcaactatggcaaatatccatgtgctctgcagaaagagcaggtacacactgcaggagaaggagttttgtttagccactattctcaggtatggttataagcaaatgctttctctatttcattagctgtcaatccagaattctaaatggtttgtcatgaaatctcagaggaaaagtgtagctttcatcacatcatttttgttcccaaaccctccagctgtttctcacaatacacatttccaattgtcaaccatgtcagagtcaccgtgttaggggctttaatgatatgcttttggttgatattcacaacctccttggaaaggagatattgtcatcatcagtttactcagagaggaacactaccatctctaaggtccccactagtaagtgtccagagctcccatgcccatcacagtcttaatacccctccttcttgaaccaccggttggccactatactctatgcttcatcctagttcgagttaggccaacctgcacctgcctttcctgcgtaccctgttctccttgcccctgcctcccttaatacccttccccaaaccctcctcactactgaacaatgtgccatttgaaccctgctcaagttagcttcaacctgatttccctgattttataagcatcagctattttggtaacttcaaaatcttcccttttagagaagatggcctgggttttccagatatacttttgtacagtttgaatgcttaatatggaaatgtattattttgatttttttttattttttattttttgagacagagttttgttcttgttgcacaggctggagtgccatggcacagtcttggctcactgcaagctctgcctcttggattcagcaatttttatgtctcagcctcctgagcggctgggattacaggcatccaccatcatgcctacctgatttttgcgtttttggtagagatgagcttcgccgcgttgaccagggtggtttcgaactcctgacctcaagtgatccacctgcctcggccacccaaggtgctgggattgcaggcgtgagccaccacacccagcctgatgtttctttttctgcaggaacacattcaggctcatccggccacaccagatgatgtgttcctatagaaatgcctacgtggaactgccctgggaggtgctggatgcccgatggcaatgccagggagctctgggtccaaggagcctccacagttcacagaggcatgctcagtatttctggaacaatcagagacagggcttcgccatgttggccaggctggtctcgagctcctgagtttaagcggtccacctgtcttggcctcccaaggtgctgggattacaggcgtgattcaccgcaccaggccaaaggtcctttttcttgttcaaataaactttgttaaatttaacttgtcag

SEQ ID NO: 100 - DNA, 4599 bp, Homo sapiens
acttccgtggcttcgggcggggaggtcacaatcacattgagccaaaacgcatccagtgttttctccagttacaaataaaacgaatatgcccatgctgctaccacatcctcaccagcatttcctaaaaggccttttaagagcacctttccgatgttaccacttcatctttcactcaagtactcatctcggatcaggaatcccatgtgctcagccgtttaattctcttggactccattgtacaaagtggatgctgctgtcagatggcttaaagagaaaattatgtgtacaaacaaccttaaaggaccacacagaaggactttctgataaagagcaaagatttgtggataaactttatactggtttaatccaagggcaaagggcctgtttagcagaggccataactcttgtagaatcaactcacagcaggaaaaaggagttagcccaggtgcttcttcagaaagtattactttaccacagagaacaagaacaatcaaataaaggaaaaccactagcatttcgagtaggattgtctgggccccctggtgctggaaaatcaacatttatagaatattttggaaaaatgcttactgagagagggcacaaattatctgtgctagctgtggacccttcttcttgtactagtggtggatcactcttaggtgataaaacccgaatgactgagttatcaagagatatgaatgcatacatcaggccatctcctactagaggaactttaggaggcgtgacaaggaccacaaatgaagctattctgttgtgtgaaggagcgggatatgacataattcttattgaaaccgttggtgtgggtcagtcggagtttgctgttgctgacatggttgacatgtttgttttactactgccaccagcaggaggagatgagctgcagggtatcaaaaggggtataatcgagatggcagatctggtagctgtaactaaatctgatggagacttgattgtgccagctcgaaggatacaagcggaatatgtgagtgcactgaaattactccgcaaacgttcacaagtctggaaaccaaaggtaattcgtatttctgcccgaagtggagaggggatctctgaaatgtgggataaaatgaaagatttccaggacctaatgcttgccagtggggagctgactgccaaacgacggaagcaacagaaagtttggatgtggaatctcattcaggaaagtgtgttagagcatttcaggacccaccccacagtccgggaacagattccacttctggaacaaaaggttctcattggggccctgtccccaggactagcagcagacttcttgttaaaagcttttaaaagcagagactaataaaattcatcctgtataataattttacatatcatttcataaagtattttaatagaaaaatcacttgtatgcttatattttcagtaattattgtatggtgctcttgtcttctttgtttgtgacccatgcttgaaaacttgaaggaagttagatatgaatggcaaaagttaggcagtatttataaggtacctgttttatgttactgatatctgtttccttctcttcttataccctggcatggtggcctgtagggtagtttcttcttaatagtcaagaacagagaaagctgaggagagcagaaaatatcttgcactttaaaatgcttattttgattccatattatctgaatttccagagaggatgtaaacaagagtgaccatatttttggagtccttcttgaagccagaacaacacacagtgggttgctaagagccgacaatcataattgacatttagtgtaccagattattctaagaatttctgaaattaccatgtacatgagtaatgaaacaactggaataatgtgatgatgtgaacacaattttaaagtctgcttgtctggatttgcaggtacccttccgccaccccccaacatgataggtaagagggcaaaagggaaccgggaaaaatcagctacaaataaaatgggtgactaatccccagttcttggacccattatatttgtagccaattggagtaaacccctaaaagacaaagtgaggtcagaatgattcaaggattattcagtttgaagactaccaaaggcttttgcttctcttcttccttggccatttcacttcattttagtattttaaaaatcttttttcttgatggtgaacaagttttgtcctatgctatggaggaggcatagcacagtgattaagagcttgggctctgtagttggactatgtgggtttaaactttaaacccagatcaattgtatattagctacatgagctaatctctttaagcttccatttcctccctggtaaaatgaaattggcaaataactttctaaggttagtgaagataggaaatactcgaaggctgcttactatccttattacattaaagttatgggtatcttgaaactacaaacctgatgtataatttcagttttctctcatggtcttgttactaccatcatactcttgatattttaggatactttaggattacctttgaagaaccctttctagttaattctttgaatatgttttatacttatttgatggtagttgtaactgtgtacatttgaataaaatttctaaccataaaatttcgccattgcacaaaaagcctttatagaagtttctaacatattctattctgaaccctgtagaatattttatgtagtatagcagcttgcattgttacttactgtactggaatcaaacctcttgagcattattttaacaaacatccctttacattttttggaaagatttttagtactccattggcatagctatttcatacaaggattaggagaaactttgaaaggttatccacttgacttttctgattttagaaaggactaccattaaaccaccctatcagacaaaaaaaactggtttttagaaacctgagagaaggaattttataatttccctgagtaagctgttacagggaataacaaatctcctgccacatgtggcacagtgtaagtaatgctggagcacacatactgcattgtaaagaaggtaggaaaggtggggggacttttgttagctttaattttaaggctaaaagcatttcttctcagtttgaactacttttaaatgttataaatgtcatcataaaaatcattagaaaactcatttctccttatgttgtcgttgtaccattgggtattgtatagagaccaatttctaagagattttttcacctctgtttctgttatttgctatactggaggtaatataataataatgaaatatagctttttttttcaactcagaaatcctattccctctccccatctgtgattatattgtactggacttctgacttggtcaaaagcataggttttgacttagatacatgtgggggcagatctcagctctatcactaactagctatatgatatttggcaagttttttctctatgtgcagtagtttctttatctgtaaaattaagataatagctactttacagggttggaagaattaatttagaaattgtacagtgcttagcctcaataattggtaggtggtggtgtaaatattttacatagatacttgtgacagttctttgttctacaaaacagactaatattaatttcagattggccaagctacttaatttctctgtgcctcagtttcctcactattaaatggggatgacaatagtgtccacctagagcaggactattttagtattacatataatccttggatataaatgctgatgaagtttggatatttgtccccacccaagtctcatgttgaaatgtaatccccaatcttggaggtggagcctggtgggaggtgtatggattagatcagatctctcatgaatgacttgggccatcctttgggtggtaagtgagctcttgctccgagttcacacgaggtctagatctggtcatttaaaagtgtgtggcacctccccatccctcactctatcacttgctcctactttcgtcatatgacatgcctgctcccctttcaccttctgccatgattgtaagcttcctgaggcctccctagaagctgagcagatgccagcaccatgcttcctgtagtctgtagaaccataagccaattaaacatcttttctttataaatttataaattacccagtcgcagatatttatagaaagaacagcctaatacaggtgctaaatacatatctgacaataagtggtagttatctcttagaactgttatgaggattaaacgagttacagtgtccatcttaaaaagataattctgaaaaaaatctcataggttcactttgccttgtcaagaatatgattaccattaacttctgtagataggaaaaaaatgtgctgagctccaaaactgacagacattttgctaaaacaatatcaaatctcattaaaatgatgacagttatttcaatagttgacagtagctatcccaatacaacctaacaaggcattttctcttcagaatcactcgatcatatggccatttccctaagcttttatagctattgcccagtgtacactgaagacaacagctaacgaacaacatacgtgtgataatttatgtagttgaacctctaaggc

SEQ ID NO: 101 - DNA, 4023 bp, Homo sapiens
tttaaaatttatttctcattaaaattataacacagcctcgtaaaaatactaaaacagcgagacagatgtgtcaggggttatgtatatgaaggaggtagcacagttctcatcacgggtgtgcttagtgtccccctaaagttcatgccagtgaatgtgatcgtgactgtaattggaaatagggtcgttgcagatataattaagatgaggtccttctggagtcgagtgggactggtgtccttagaggagaagagacacggacacacagaatgccacgtgggacagaggcctgctgtctacacccgtgcagaggagacaacaaggagagtggggcatgacccctgcccacgacactcgcctccaggaaggcagccagctgcccatctttggtgcggtcatctctgcaggcaacagaatggcagagtggcagtctgatcactctactccatcgtgtgagagtctccaggatgaagaccaggctccccagcaggacgtgcggccctcatggagttctggccttgttttcggctgttgcctggctgatattctgcacatctgcccaccgtcctctgggcggtccacgaatacattgtgccttcctctttgcatatgctggtccctctgctggcaatgcccttccttcttggtgagctccaatgcatccctcaagactcagttcagatgcgcctctctggactcatccccaactcccagacggggttggctgctcccttttttcagatcctgaaacacttacttttccccctttatgtgagcatttatctgatagtagagtttttctgtactgttggaatggtgagttccctgaagctaggtcagcttccttctcagcattcagcaggcggtgggggaggagggaaggagaggaacttcctaataaagatgaacacctctttgtggttaggtcagaccagcctgtgcctgtgcgacctggtgcagaccttcacctctcagagcctcggtttcctcatctgagcctcaggcacgacaatctgctagactctgcttcccggtggcagctggggaatgggatgggaaggagccctgggatgctcaggtcatccctgccaccagaatgtccccagagtcatgaccatcagcacctcagcctcgctgctttttccttggggtccgcaggggcaggacgcaaacccgacacgctcgctgcgcagtaagctgcaggggcttctccagcagcacctctgaggcctgcctaccacgtggagatgctgctcccgtgggctctgaccaccgctctgccctcttctcacaggaaccagcgaccactcggcccggcgtaaccacgcatgtccactggtcacctggtggccttcgacaggaacgtgtgataaatccctgccggagtgcggctccgggaaaacactgtcaccgcaaaccagctcctctttgttgcagtcccccgggggcatggcccggacctcccactctcgggcaaaggccgaggcagccctcacagcagctcagaaagcccaggaggaggcgcggatcgccaggatcactgccaaagagttctccccttccttccagcaccgggaaaacgggctggagtaccagaggccgaagcgtcagacctcctgtgacgacatcgaggtgctgtccaccgggacacccctgcagcaggagagccccgagctgtaccgcaagggcaccactccctccgacctgacccccgacgacagccccctgcagagcttccccaccagccccgcggccaccccgccgcccgcgcccgccgccaggaacaaggtcgcccacttctcgaggcaggtgtcggtggacgaggagcggggcggggacatccagatgctcctggagggccgggccggggactgcgcccgcagcagctggggcgaggagcaggccgggggctccaggggtgtccgcagcggtgccctgcgcggcggcctgctcgtggatgacttccgcacccgaggttcgggccgcaagcagcccgggaaccccaagccgcgggagcggcggacggagtcaccccccgtgttcacgtggacttcccaccaccgggccagcaaccacagccccggaggctccaggctgctggagctgcaggaggagaagctgagcaactaccggatggagatgaaacccttgctgaggatggagacgcatccccagaaaagacgctacagcaagggcggcgcctgccggggcttgggggacgaccaccgccccgaggaccggggcttcggggtgcagagactgcggtccaaggcccagaacaaggagaacttcaggccggcctcctccgcggagcccgccgtgcagaaactggcgagcctgcggctgggcggggccgagccccggttgctgcgttgggacttgaccttctccccgccccagaaatccttgcctgtcgctctagagtccgacgaggagaatggggatgagctcaagtccagtacgggctcagcgcctatcctggtggtcatggtgatcttgctcaacatcggagtcgccattctgtttattaactttttcatctgatgagatgtcgcggtagcaaaaatagagaaagggtagaaaaaagggacattaaaattaaaagcaaaaccacaagaagggaaagaccgcaactcggacagcccagcgacttccaagtcctctcacagaagaaccacacgattgggtatcactcacagtttgcctttttttctgggtaatgttttttggattttagccaaaattctttgcttgtataacactctgctgtgtggcatggcagatggaggccagcacgcagcccctccagctccacgtggagacagaagggatcccggcacatcagtggtaacagcggacgttgtcctcgtggtcacacgtcccgtcttgggtgtggatggagggcagcccggggcagagcctcagccccgcggcccctgagtggcagggctgactcccgtcgacacgagcttagaaagtggattcactgctttctctgtctagaacagacgggtgacaagtatgggcaggaggcatggggcagggtggcccaccccagtgggcagtagcctggcctttttctgtgtgagatctgtgctgcacacctgagggagggggagggatcggccacctcctccctgtgagacggatgcaggtccttccctcttctcggcactgcccccggccttccatgagaagccgactccccacaccgagttttaaagcaaagcccttttcttctgctgcccactcactgtgggtcccattcggctgtttcccccaccagaccccagggaagccggggcccactccgatccgcctgggctcagctaagcacggaagccaagggggctgtgccgtggagctgggctcgcgccggggctctgggtgtgtgcgcttggcgtgcagggtggacgcgtggggttccgtgtccccagcagtgagggccctagaggacgccttctcccatggttactgatctccacgggttttcacatctctgtactgtgcctgcctcaacttcccctaacaaatatgcatattccttccagatgcctcagtgctacaccacagtgggcctggtcccaggacaggaatgcggttcaaacccagtggcttgaaacttcctgagaaactgtagcatatccagccccctaaaatgtacaatgtaacttgttcagtccaacaaaaacaggttccttatgtttctgccttctccaccagggtcgctccatcacccaaacaaaagaacaaggtttgccaggatgtccgagtgccccctggccctggctctcgtgtgcatggacgtgcctgaggggtccgggcacggccatacgcaggacccctgtgcccggggaggcgctgcagggattccccatccggtcgtcttggggccagcccgtcttatggactctgccttgctttgcttatgtttagctgtttctctgctacctttcgagcagacttctttactacactgcactggattgctatatttttaaccagaaataaactaaagattagagc

SEQ ID NO: 102 - DNA, 5205 bp, Homo sapiens
tcagccccttctccccaagcaaccccagctctctccatctctctctcgccctcagcatccccacccgacccctttccctccaagcctcctctctccctcttgcttccttttctgtccctttctttcatccctcccttctctcccatctcccttctctaactctctccaacctctctctccctcagctcacttcccctcagtttccgccccacctgctctgcccccacttccatttccttgtccaagttccttcaactgcctggagtccagtgggtgccttgagaggctggagagccggcctggcgcccccgccggcagcatgagaggtgcctgggtgcatctgcactcgggggcggcgtctagcctcagaccctgccgctgcggggctggcgcagctccgaaaagctccccgcgctctcctggagggcggcgtggagacggcagcagtgacagcgagggcggcgtctccttcgcaggggtgctgttcctgcagttcggggaggagactcggcgcgtgcacatcacgcacgaggtcagcagcctggacacgctgcacgcactcatcgcgcacatgttcccgcagaagctcaccatgggcatgcttaagtcgcccaataccgccatcctcatcaaagacgaggctcgcaacgtcttctacgagctggaggacgtccgggacatccaggaccgcagtattatcaagatctacagaaaggagcccctctacgctgccttccctggctcacatctcaccaacggggacctccggagagagatggtgtacgcatcgcgggagtcctcgcccacgcggcgcctcaacaacctgtcaccagcgccgcacctggcatccggctcgccgccgcccgggctgccgtcggggctgccgtccgggctgcagtccggttcgccgtcgcgttcgcgcctatcgtacgccggggggcgcccgccttcgtacgccggcagcccggtgcaccacgcggccgagaggctgggaggcgccccggccgcccagggcgtcagccccagccccagcgccatcctggagcggcgcgacgtgaagccggacgaggacctggcgagcaaggcgggcggcatggtgctggtgaaaggcgagggcctctatgctgacccctacgggctgctgcacgagggccgtctgagcctggccgcggccgccggcgacccgttcgcctacccgggcgccggcggcctctacaagcgcggctcggtgcgctcgctcagcacctactcggccgccgcgctgcagtccgatctggaggactccctgtacaaggcggcgggcggcggcggcccgctgtacggcgacggctacggcttccgcctgccgccttcgtcaccgcagaagctggccgacgtggcagcaccccccggaggtcccccgccaccgcacagcccctactcggggccgcccagccgcggctcgccagtgcgccagtccttccgcaaggactcgggctcctcgtccgtctttgccgagagtcctggagggaagacccgcagcgcggggagcgcctcgacggccggagctcccccttcggagctcttccctgggcctggggaacgctcgctggttgggttcgggccgccagtgccagccaaggacacggagaccagggagcgcatggaggccatggagaagcagattgccagcctcacaggcctggtgcagagcgccttactgcgaggctctgagcctgagacccccagcgagaagattgaaggctccaatggagcagccatcccctcagcaccctgtgggtcaggcggccggagcagcggggccaccccggtgtccggcccgcccccgccctcggccagcagcacccccgcaggtcagcctaccgccgttagccggctgcagatgcagcttcacctgcgaggcctgcagaacagcgccagtgacttgcgcggccagctccagcagttgcgcaagctccagctacagaaccaggagtcggtgcgcgcgctgctgaagcgcacggaggcggagctgagcatgcgcgtgtcggaggcggcgcggcggcaggaggacccgctgcagcggcagcgcaccctggtggaagaggaacggctgcgctatctcaacgacgaggagcttattacccagcagctcaatgacctggagaaatcggtggagaagatccagagagacgtgtcccacaaccaccggctggtgcccggccctgagctggaggagaaggcactggtgctgaagcagctcggggagacgctgacagagctcaaggctcacttcccgggcctgcagagcaagatgcgggtggtgctgcgcgtggaggtggaggcggtgaagttcctgaaggaggagccccagcgcctggatgggctcctcaagcgctgccgcggggtcacggacacgctggcccagatccgaaggcaagtggatgagggtgtgtggccaccccccaacaatctcctgagtcagtcccccaagaaggtgacggcagagactgacttcaacaagagcgtggacttcgaaatgccaccccccagccccccgctgaacctgcatgagctgagcgggccagctgaaggagcctctcttacccccaaggggggcaaccccaccaaaggcctggacactcctggcaagagaagcgtggacaaagctgtgtctgttgaggctgcagagcgagactgggaggagaagcgggcagccctgacccagtacagtgccaaggacatcaaccggctgctggaagagacacaggcagagctgctcaaggccatccctgacctggactgtgccagcaaggcccatccaggcccggcccccactccagatcacaagccccccaaggccccccacggccagaaggcagccccccgaacggagcccagtgggaggaggggctcagatgagttgaccgtgccccgataccgcacagagaagccctccaagtcgcccccaccgccccctccccgccggagcttcccctcctcccatggcctgaccaccacacgtaccggagaggtggtggtcaccagcaagaaggactcggccttcatcaagaaggctgagtccgaggagctggaggtgcagaagccccaggtgaagctgcgccgggctgtgtctgaggtggcccgcccagcctccacaccacccatcatggcctcggccatcaaggacgaggatgacgaggatcgcatcatcgcagagctagagagtggcggaggcagtgtaccacccatgaaggtggtgactccgggggcctctcggctgaaggcggcccagggccaggcgggcagccccgacaaaagcaaacatggcaagcagagggccgagtacatgcggatccaggcccagcagcaggtctaatgagcaggcgcggaggctgtgtggagagtggacatacctcacctgtgggtgtttactgcccttgtggcctggtcagaggctgcagggtggctcctggacccagatgttgtgagagacccttagtgcactcgtttgatttagttaatatttatgagcagctcctgtatgacaggcccattctgggtgtgagggtgggggctgtgatatgtccagatgctctcacttaaagaaggttctagactcagaggcaagacgttagagaaggttctagactcagaggcaagaggttagagatgggtgagtccatctctttttcagatgagggggcagctcagaggaggagaggggcttcccaaaggtgcacagcaaggtggcatcacagccaggatcgggacctaggaatcttggaacccttccctgcactggccctgggacagccctgggcacccaaggccctgcctccctactggctcccaggagaatttctcaaaaagcagccctccagccccccgcagcttctccacagctcccacctgcctcctcatggcccccagacaccctgcgagccccacctccagatctttttcctgccactgccagggatgagttccccttgtcctgtccgggctggaccctcctgggtgcccagcagagcagctgacactgacagagctttcgctggggccaggcatgcgcattatctcatctcacactcaccacactgaggaaggtctattacccccatgtgacgggggcggaaactgaggcttaatccaaggccacacggctagcaagtggggggcaggacacaagtccagactgcctccctccccaccacaaagtgcttcagcctctccagcagccccttccctcagctctaatgatgttgcactgtttcccaccctagtccctccctccccagagcccagctcctccgctgtggtgtcagcctcatgcctttatggcccagcctccaccccatctccggggttgcctgggtctccagtgacatcgagatgggctcttttcacccccctcccccactgctctgcagcatgtggccttgtagaccccccccacacctgcatagggctgtgcagaccctctgttcctcagcatcctctccccagcctccacctggagcctctgggctcctttctgggtgactccctctattttttgagacggagtcttgctctgtctcccaggctggagtccagtggtgtgatctcagctcactgcagcctccgcctcctgggttcaagtgattctcgtgcctcagcctcccgagcagctgagactacaggctaattaccacactggctaatttttgtatttttagtagagacggggtttcaccatgttggccaggctggtctcaaactcctgagctcaggtgatcctcccacctcagcctcccaaagtgctgggattacaggcgtgagccattgcaccctgcctgggcgactctcctttgcctgcctcttcccttcctgtgccccactcctcagcctcttctcctcacaccatgccttcctctcctcaggcaccaggtgcactgcttagtccctgcccccacccaggtctccattctgagctccagtcacccacacacgcttccccgggcatccccaggctcctcgaatgcgtgtgtccagacataatgctcccccgaccacgctgccccagccggtacgaggctgccccagctgctgtctccctcaggaagggtcgcccacccccagccttcccaagcccctccgtgcccctgtctcacttccagtgctccagtagcctttcttataaacatggcttctttcttgtaaagtaataaatgtttacagtgg

SEQ ID NO: 103 - DNA, 3723 bp, Homo sapiens
taaactataactagatgagctctattttttagggcaatggaagaacatgggctttggatccacacacagagagccaggttcaatccttgctccatcactcactagctgtgcaactctgggaaattacgtattgagccttagtctccttatctgggaaaatgggaataatgatattttccttactcagttgtgaagaccagataggtaacgtgtaaagtgcatttgctgggtgttcaatgagggtagttcttttccttctctctttcctgtctcccgtcacagagtggagcatggtgtttgcacagaggctgacagctttccttctgttcacccctttttcttttttctctcttttttttttgagacagagtctcgctctgtcacccagggtggagtgcaatggtgtgatctcagctcactgcaacctccacctcccaggttcaagtgattctccctgccatagcctcccgagtagctgggattacaggtgcatgccaccaggcctggctaatttttgtatttcagtagagacggggtttcaccatgttggccaggctggtctcgaactcctgacctcaggtgatccacctgccttggcctccccaagtgctgggattacaggtgtgagccactgcgcccggcctctgttcacccctttcttgaccaagactcatcctctaatctctgcccttttcaactgagggcagaatcttagatggacaggatttttttttttttttttttgagacggagtttcgctcttgttgcccaggctggagtacaatggtgcgatcttggctcactgcaaactccacccctgggttcaagcgattctcctgcctcagcctcccaagtagctgagactataggcaggctccaccacgcccagctaattttgtatttttagtacagacagagcttctccatgttggtcaggctggtctcaaactcccaacctcaggtgatctgcccacctcgccctcccaaagtgctgggattacaggcctgagccaccacacccggccaggatttaaatctagtctactcagccatagagttcacttcttagccctcttgattgctgggtctagagagacccattattccagagcaaagagtagaaattgtgcccaggctcacatttggacagaagcagctaataagtggatcaaaactattctggcctttccctgcatgtcttctttttttcttttttccgaagatcctttccaagtcatccctgcatttaaaactatcattctatcatctctaaatcttaccttctatatttaaaaagaaaacaaacagtactttgattcttcccttttaattctacctatctcttctagacccttccccttttataaatatttaaggagagcttactttgtgcaaataagttttgtccaaaagagagagaaagaacgagtatggcagggaatgagacaagcaggaaaaggagtgttgtaaagggcaaagaaagatcgctaaggcagagaagaggagggaggaagaagggaaggagagagggagaggtaaggaagtgaagaggaagatgaagctaggtcttgatttgcatatattgaatcttttccaggcctcccagctctggcaccagattgggatggtggcctgtccccagtgagaaggaggtggcaaggaggctgtctcttgcactttgcaagatgcttaaggtgggcatgagtagattgggtgaggtgtgaggagaaaagggtaggctcaggaagaagatgggggtggtagggagcagacaggaggagaagggaagcggtaggctgaaaccacacacgttcacatttgcatggatttgctgaggtgtgctgcagagtgtctgctactgatgggggtgggtgtccaggagaggaggcatctcccttgatgacttggaaagtgttggatgtgttaggacagcagtgtggagctgctctgctgcacagatctatgtgattttatagtacactggagagactcacatcctgctagatgtggttctctcgttctacataccacaggcttagacaaccacgaaccagctcggaacccttcttctgtatgagcactcagggagttgtccccttaaattcagaatcaggatcctatctgatccttgcatgggggaccgctgaagaatttggtctcccagaacttggtaggaaaacattctttttttttttttggagatggtgtctctgttgccaggctgaagtgcagtggtgtgatctcggctcacggcaatctctgtctcctgggttcaagcaattcccctgcctcagcctcccgagtagctgggattacaggcgcgtaccaccacaagcagctaattttttgtattttggtagagacagggtttcaccgtgttgtccgggatggtctctatctcctgactacctgacccgcccaccttggcctgggattacaggcgtgagccactgcgcccggctggaaggaaaacattctgagtgaccgtgtatgtaaataagtctttctggttattttattctgtgaacctgtgtgatgtaatgactgcatttaaatagtattacaacaaaaactaattgtaataatagtaaatagctaacatctttaaatgtttgccatgggccaggcaccgtgctaggccctcggcaagtatcacatcacctaatcctccacttcaatctgatgcaatagatgtagctattcattcctattttacaaacatggagactgatttagatgggttaagtaatttttaagatctcctgcttaaaaagaagtagagttgagattggaactcaggtagcctgatgtcagtacctctgctcttgggttaatttgtaagcttctgaactctggctggtatgcattttgaatgaggtcttttgagtctgattgtattactctgtgtgtcaccttgagcatatgtgctatcatgttccgcctgaaggtgctagatggctgtcttccatttggtttgtttcttagtataagatggaccagaagaggagcactgctttgcgcaactccagggtgcgtcattcacactgcagtccatgcaggggcactggccatgccctgtgtgaaggaagggaaggagcgggagggagggagtgggaacaggagggaagggatagataatggcgggtagtgttctttgaatgatatgtgtacccatttgtgacaacatctcttaaagttgaaggtctacacatgtgtatccatattagcatatgaacttcatcagacaagcactctccctccaacagagggagaccctgtctcaaaaaacaaaaaaaaatagcctttagagtcagacagacctggaatcaaattctagttctgtttcttaatatgtaaatgacctcaggtaagttgcgtaaggtctcaatttagtctcttcatatagagaatggggcaggccgggcacgcgcctataattccagcactttgggaggccgaggtgggtggatcattggaggtcaggagcttgagaccagcctggccaacacggtgaagccctgtctctactaaaaatacaaaaaaaatgagccgggcgtggtggcatgcgcctgtaatcccagctactcaggaggctgaggcagaagaatcgcttgaacccgggaagcagaggttgtagtgagccgagattgcaccactgcactccagcctgggtgacagagtgagaccctgtctaaaaacaaacacatcagaaacagaaaacag

SEQ ID NO: 104 - DNA, 3635 bp, Homo sapiens
taaaaaatgaaagtaaataaaaaaataaaattggagccccagtgtctagaatttttttcagacagggtctctctctttgtcacccaggccggagtgcagtggtgcaaacacagctcactgcagcctcaacatccttggctcaagcaatcctccaacctcaatttccagagtagcttggactataggtgcatgccacaatggccggctaattttcgtattttttgtagagacgagatttcaccgtgttgcccaggccggtctcgaactcctgagctcaagcaatccaccagcctcaacttcccagagtgctgcgattacaggcatgggccatcgtgtctggcctagatttttttttttaagccagcgtttctgttgctcacctaggcagagacccctcaggatgcaacatctaaacaccattgccatctctccagtccccaacagcctggtggagatgggcctgcagctgcacccatcacagcccctgctcacagtgtgcagactgtaccctgcacaggagatcccactgaggagatgtggggcctgaaatccagtcataccctacaaccaaggcacacagtacattccctcatcttcccaggaacaggcaccacttcctaatttaccatgttacccattcaatacaaatacagggagacttgtgctctcctctgctgtgggacacagataggggctcctcaggatgcaggcccaggatgaattcctgtaggagataatgcttgggtcaagtttggtttagggaatagaagcaaagaagtcacctctctactttttacctccccaatccaggctaccccaccccatgactccctgtggttatcagggacatcaccattctcctggccactgacagggacactttaataacagtacacattggccaggcgcggtggcccacctcggcctcccgaagtgctgggattacaggcgtgagccacagcacctggcctaatttatttttaattttaatttttaaatttttctcagactttagtgagcataagaatgggcagagatttttagagtcacacagaatagtattccggttctggctctaagagcttttcagggggcttgggcacccataccctcatctgtaagctgcagagaccccctcgcaggctgcatgagtattgagcccagtgctgaaatgcccagcacagggctggcccctccctgcccagtgttcctcctgccagcttcatgggtctccccagcctgccatttccccctcattgtgtgtgttggtggtggggggtggcggggtgcagatgaaggcagatcctcttccccagaatgaggagagcagggggctcacagcctgctgcactggcccacctccacagccctgtccccactggccgcctctctgtacttgcctctgccaactctctgggtctttggcctttctttccaagatgcagaacgtttgtaaaacgaaggggttggaccagaagaactcaaaagtccattttgagaaggggaagctaaagttcagatgccttaaagttctgtgtcttttctaggaggtccaaactcccagcatatctgactgggctgcccccaggggactgggacatctgcttttgtgtcacctggctccatcatttctccctcctctcttttctttctcttacatgactaaagttgtttgagctcttaaacaatttgccgtgcattgtataggcattttacataatccatctgaattttttttttttttaagatagagttttgctcttgttgcccaagctggagtgcaatggcatgatctcggctcactgcaacctctgcctcctgggttcaagcaattatcctgccttagcctcctgcagctgggattacaggtgcctgccaccatgcccggcaaatttttgtatttttagtagagatggggtttcaccatgttggtcaggctggtcttgaactcctgacctcaggtgatccagccacctcggcctcccaaagtgctgggattacagacatgagctgctgtgcccggccccgattgaatccttaaaacaaccttgtgaagtaaatactattcttttttatcccattttatagatgaggaaactgaggttcagagagggtcaggtcactcatccactgctaattagaggcagagccagcaggctgcttgctctctcaatgccattttccagatggcgggggtcccattctggcttgaattcatggggctcaatatggcagtgcctgtgctcacctcttctttccagttttttccaaatggtctctgactcagtccctggatacgctcgcctagcaggatctcctgggctgctgggtgtgtcccgtagaccctggccgacctacggatgaaatgagtagtcagacaggtatgcagtgtaacagcagctagatgactacctggctctagtggccagagagcagccccgagaagctggggctgcttgcttttattccgtgcaggcacaatgccggaaacctggagccaacacaacctgtaggtaattaacatttattcttcccctttcagggaacttcatgtgcagataatcaaaggtcagtttctggtcaacataagtaaacaagcctgtttaagataaattcccccacactcccttggggagctgagtgaaggggggtgccatctactcaaacaagcctggagaaggagtaggtgtggggggatggatggaggggaacaatggtttcatttggccatcatggcagaccttgctggctgctctccccaagctccttcttctgctttctctttagatcttcaagagctagaaggttccctaagagaccacccgaaacaagcctctccatccacgtattcattgaatgaatacacctccagtcctcctacttaccaggcagtgttaggtcctgaggatacagcgatggacaaggcagacaaggtctctgcccttgtttacatcctggggggagaagacagactataaaagagattaggatgagtgctgtgaggatgaaaagggtgatataacagacaatgactgtgggcaggtgcagtgtgttcctggcaaagggaactgctagtgccaaggcctgatggcaggaactagcaggtgtgaggaaggagcctaagtgaggccctcttggctggatgaggtgggcaaggggaccccatacaaggaggtgctcagggtccagctgtgtagcctggggccagggcgagggtttggttatagtctgcatgatgcagttttgaagggctttaaggggggagtgatgtgatcagattacatgtgtaaagaattcttcagccaccaggaggagaatggacggtaaggagagccggagtgcacaagggagagagatgagagtggcttggacagtgaggtggagggtcatggttagattcaggatctaggtcatggtgaagataacaggagctgttggactggatgtgggcatgcagtgagggctgactcttgggcttttcccttataacagaaacctgaaaagtgttttattttgttgtttttgttgtttgaaatgaaaggtctcacatatttattactgaacccagccaaccaacgcattcataacagattcagagaggaaaaatgtattcccaataaaacatgtctaactgc

SEQ ID NO: 105 - DNA, 3932 bp, Homo sapiens
aaataaaacggacaccttaagcgctacaatcaaggtgcgcacggggtgctacagaacaatacgcagacaggaggaggtggggggaaaggtgagacttcccaggcaggtgtcatcccagaataacttttacacagggtgactaagcgagttagtgactgcgcggaaaacgggcttccaaggttcacaaggctcgtgcagcggctccgggagttatgtcacagtaagcttactatcatcctttgggcatctgctttacggatgagttcatcaggatttaaaggatcttggttccatatccttccccttcctcacagaggccgccagcccggagcccctctaggccctcctccctcctgcatctactggccgcgagcctttccctccccgcccccttcacacaggccgcccccagcctcccaaccccccggttccgttccacgggaggccccggcctccctgccctctcctccaccgttctacccgcatcgcccggcttcccgcaagccgctggcaccgtcccctcaacaccctccgcccaccgccactcccttccactgagggggaccgggctgccttctctctgacccgccgttctccgcccccacccacttccccaggcctcccgcaccacccccttcccgccgcgctctctcccgcccccgcgcttccggccccgcccgcccccgcgcggaggactgtgggagcggcttccttggattccgcgcttggcaacggctcggcgtcgcgctttggccaaccgctgcgtcgtccctgggcccgaataactgtcgcccgcttccctcagcgtgaggtgaagcacttcaaattgcctgatgaaagttgaatcaggaatgaagataaaagtacacaacaatgcagaaagcggtacttagcctcacaaagatggaaacattccaaaaacgtgaagtactgttgtcccaagattctttctaagcctaaaattacacttttactagtccgattttctggttgtgagttttttttgtttgtttttttttttttcgagaaactgcagtaggcttcttggaagtagaccaagggtgtccaatctttggcttccctgggccacatcggaagaagaattgtcttgggccacacatgaaattcacaaacactaaggtacaaatgatgcaaaatgtgcacctggctccagagacagatgaagatgatctttattccggctataatgactacaatccaatctatgatatcgaggaattggagaatgatgcagcttttcagcaagctgtgaggactagtcatggcagaagacctccaataactgctaaaatatcaagcacggcagttactagacctatagctactggatatgggtccaagacatctctggcatcatcaataggaagaccaatgacaggggctattcaggatggagttactagacccatgacagcagtgagagcagctggttttaccaaagcagctttgagaggctctgcatttgacccccttagtcagtcaaggggccctgcttcccctttggaagccaagaaaaaagatagcccagaggaaaaaataaagcaattagagaaggaagtaaatgagttggtagaagaaagctgtattgccaatagttgtggagacttaaaattggccttagaaaaggcaaaagatgcaggaagaaaagagagagtcctggtgagacagcgagaacaagttacaactccagaaaatatcaatttggatttaacttactcagttcttttcaatttggccagtcagtattcagttaatgaaatgtatgccgaagcacttaacacttatcaagttatagtcaaaaataagatgtttagcaatgcaggaatattgaaaatgaatatgggaaatatctatttaaagcaaagaaattattccaaagccattaaattctaccgaatggcattagaccaagttccaagtgtcaataagcaaatgaggattaaaataatgcagaatattggagttacatttattcaggctggtcagtattcagatgctattaattcatatgagcacataatgagcatggcaccaaatctgaaggcaggctacaacctaactatctgttattttgctattggagaccgagaaaaaatgaagaaggcattccaaaaattgattactgttccattagaaattgatgaagataaatatatttcaccaagtgatgatcctcatactaacttagtaactgaagctataaaaaatgatcacctcaggcaaatggaacgtgaaaggaaagccatggcagaaaaatatattatgacatctgcaaaactcattgctcctgtaattgaaacatcttttgctgcaggttatgattggtgcgtggaagtggtgaaagcttctcaatatgtagagctagccaatgatctggaaataaacaaagcagttacatacttgagacaaaaagactataaccaagctgtagagttcttaaaagtgttggaaaaaaaggacaatagagtgaaaagtgcagctgcaaccaatctctcagccctgtattatatgggaaaggattttgcacaagccagcagctatgcagatatagctgtgaactctgatagatataatctagcagctcttactaataaagggaatacagtttttgcaaatggtgattatgagaaggccgctgaattctataaagaggctctaagaaatgattcttcttgtactgaagcactttataatattggccttacctatgagaaactaaatcggctagatgaggctttggactgtttcctgaaacttcacgcaatcctacgaaacagtgccgaagttctttaccagatagcaaatatatatgaattaatggaaaatcccagtcaagctattgaatggctaatgcaggtggtcagtgttattccaaccgatcctcaagttttatctaagctaggagaattatatgatcgtgaaggagataaatctcaagcatttcaatattactatgagtcatataggtattttccttgtaatattgaagtcattgagtggcttggagcctattacattgacacccaattttgggaaaaagctattcagtactttgaaagagcttctcttatacagcctacacaagtgaaatggcagctgatggtagctagttgtttcagaagaagtggtaactaccaaaaagcattagatacttacaaagatactcacagaaaatttccggaaaatgtcgaatgttctggcagcgtgaggacaggacacatggagagagaccctttaaacctccttccaaggaagtcagttctccctggtccagagattgcaaagcgtaattatttttcaggagaaaaatactatttgtctgcgtttcttagttcgtctctgcacagatcttggattaaaagatgctcaagaatatgccagaaaactgaagaggttggaaaaaatgaaagaaataagggaacagcgcataaagtcaggcagagatggcagtgggggctcccgtggcaaaagagaaggaagtgctagcggtgatagtggccagaactatagtgccagtagtaaaggtgaacgactaagtgccagactcagagctttacctgggacaaatgaaccttatgaaagtagcagtaacaaagaaatagatgcctcctatgtggacccacttggccctcaaatagaacgaccaaaaactgcagccaagaaaaggatcgatgaggatgattttgctgatgaagaattaggagatgatttgcttccagaataatattcactttaatatttattaaaggaaagaaattgccttatgagatcatcctcatgttaaaccttggattaaatatctaacctgtaattattttttttcactgtcaaaacttaagtaagtgtattctattctgtatgtatgcatttaagttgtttttttcttttaaggaataaaaacaggtaaaact

SEQ ID NO: 106 - DNA, 3820 bp, Homo sapiens
gagtcaagcctcaagcactgccggggacagctgggactggacaccacccagaagccagctggctggccctgccctgccctgctggaggcaccatctctggtgagtgggggcatgtctgactcccctgcggctctcccaccattacctggggccccagctgagtcaggggtggcctcaaatcccaggcaagagggtggcatcagtgagtgggtctcctgaagtctttggtggcagtggctggagaaggtgttaaagggctgaatggccctgcaggtaggggaggctgcagtgtgtgccaggcggatgtgactttaggaggccagtggccaccagcagaatagggatgggaaatgaagatgggcgggcagggagacacagccctgccacaggccaggcaattgccccgtgcagtgcggtcttgaagctggcgtctgaaggtgaagggattgttggaagaagggagggtggccaagcccgtttccagcttgacaacagttatgtgttttccagtatcctccttcattcatttattcccttacaagtattaattgaggcagggccccaggggaaacacaaagatgggtcaggcacacatcttcccttcccaagagcttataccttggctggggacataaagcatgacagaaataaccatcgataaggcagaaaatgtcagggctatataagagataagagaagtgtactggggagcacggtacagtgaggtgcaagtccagcaggctaaaggaagatagttctaatctacagctagccactgagtctctatgaacctcagtctttaaatatataagatggagacaataacatctgccttatggaggcttatagggttgtaagcatcaaatatatataaaaggtgcttgaaattgtacagcaatatacagaggtaagctattatgggtatcgtattatccaactagccagcatctctctgaacttctccgcctggaattctgggagccacagggagcccaggatctgagtactgggttcttgtcagcagcaaagcaaagtctagaccctgaggcctcctttccccttatagaaggctgacagcctctctcagctcttggccaatcaatccaattgatccacagatatgtagtgcccattttttggatgtataaagcactgtgctagggaccatgggcgtggagaggcatgaaatccagagtccattccctacagacctatcatgagccagggaggcaagatctctgtttataagatacacctggccgggcacggtggctcatgcctataaccccagcactttgggaggccaacatgggcggatcagcagaggtgaggagtttgagacgagcctggccaacatagtgaaaccctgtctctactaaaaatacaaaaaaaaaaaaaactagctgggtgtggtggtgggcgcctgtaatcccagttacttgggaggctgaggcaggagaatcgcttgaacccaggaggcagaggttgcagtgagccaagattgcaccactgtgctccagcctgggcaacagagtaagaatccgtctcaaaaaaaaacgaaaaagatacatctaaggcagagccatgtaagagtagcaaatgcatgccagaggtgggatcccaggagagcagagggaggaagaggactacagggtggggggtaccagcaaaagcctctgggaggagccaagggctttaaagggggatggaatcaagaggtcgagaggaggagagaggcatcctggattgagaatacgggacatgtgagcgaactcacaggaaggcaagtgcgggggcgaggcagactcagagcaggcttctcaggctggagtgaccatttcctgtgggggaacaggaaggagaagaggctggagtcaaggctaggtacaggttgcagaggccttgaatgccaggcaagggagcctggactttcacataaaggcaccaggagccagtgaaggtgttaggaatgaaaggtgttggggtgaagtcagtgaaggtcctgccccggatgggggtttgcagggtgactggagaagactgccaccaggggccatcactctgggggctggtgtagccactgcagcaaggtagaaggaatgctccccccgaaatgctcacagattggggtgagacgcttcctgaaggtaggggaacaaattgcagtgagggctacacgtttccattttgattttgatagaggcaggctgactgagtggcctggatccctggacccttggccttgatgtctggttctcaggatttgcgcagtctgtggatggaggctgaccagatcagagcagctcaggggaccccgttctctccttccacagggagttggttagcggccactgagccctgggcagggagggggatgagggaggagcagattttgcagccatgggggagggtttagcatcaggtgacattccagtggactctgcccaaggcctgcttccgggtacacttccagagcgatcacccatgggcagccagttgtggtgaatgagggtttcactcgcctgctccctggccctggcttcctccttcttaaggggccacgatgggacccgagtcctttcaaaaaactaggcagttcccgctgctccaagcagaaagtcctatgagcctaagagaaaaagagatttggccagacactgcagccagggcaggaaccagttaatatgagcctgggagcaaggagaggtgaaatgctgtttaccagcagccggctgtgggttgcagggcacccagccacctagcacaggattccaggccccaacttgtcaggaagcaggagccccaccctcagctcagtgagggactattcctccccatctggggcctggctgcaagacctagggctctccactccccaggtagagggagcaggccttctactctgtggaggaggaaatggctcctgttggagattctgcagggtgagactgcaatccagaactcctgctgcccaggcaaactgggaagtccctctaaacaacacaactgacctctggctctccctgggtaggcctctccatgcccaaagccggggtgccagggcctcctgccctcatctctgatgcagggcattgcagccccatggcaggtgacttctccagtaggcactggggcttgcctgcttctcagaaagtggggtacgggaggcagggcaggggtggtgctgtttgcaaggctgctggtgtgagggggaagatcggccgtggccagccacagaataacggatattccacaagcatttactgaaaacatttacccacacccgtctgagtgccagatgccagggaaaacaagatgagtgagacatgtccctggctctctagaagggcacagtgtaattggagaaaaaacaatttagaaggctaattatgatacactaggataaatgataaataaatgaatgtgtaacaggctgtgggtaaatagggcaactcacaatgggtctttcgtgggaaggtgaggatcgcttcacagaggaaggaacattggagctgagctttggggcagggcagattttttaaaactttttggtcacaaagaaaaaggatggtaagaggcataaaatgttcgaggtggaaggaacatcacacagagcatggcatggcaaagctattccaatcatggtgaaacagaactgaaagaatgccagcttctgcaagagtttgggttaaaaaccattaggccaagcacggtggctcatgcctgtaatcccagcactttgggaggacaaggagggaggattgcttgagcctaggagttccagaccagcctgggcaacatagtgagaccccatctctac

SEQ ID NO: 107 - DNA, 3745 bp, Homo sapiens
ggacatactcctgccagtccccagtctgggtcaggtgcctttgaccagggtgcgcagagctgttgcacacagctgtactctgcccccgtgcacccggttccaggggtgccacactgcacccacctggggctcgctcctcacagtggtgcgtgggccctcgcctgtctcacggcacctgctgcctgtgccctcagctcctcacttcatcctggggtctctgctcagcacagagcccggtgcccgcggggattgaatgagccattgcttgttgcttcataggcgtggggtgtgtgtgtgtggtagccaggaggtggcgatgggctgtgttcctcacacaggactctggctgccagctgccctcctgcagagccatgggtttggccctgtaccaggaaggggttggaatctcctggccgcacctttcgcagcatgattctgtgaggagtttagttttcactttgctagagcttggcagggtgcgtggtgccctcagttggcagtggattacaagattggctgtttcattaattctggttgatagaaacatatgggcaattgcagactgtccagagacttttgtaagtcttctaggtcataaaacataggcaagcagaggcaccttgtaccttccaaacatgctgcgtgacacgcctctcctgaggtttggcatggacgctggggccaccgcatgggctccatcccatgcccgtggctgttggggttttcgcttgtgcaagtctgagacccctgcccctgccagggtgcactgccctcccacatctcctcccctcctccccacgtcagcctgccccatgcctcttttttggatgtaccacaggctgaggggagagaggccacaggttgtcagctctgtttgagatgcagggagcatatgctctgagggggacttgagccagccccagctggccttcacttctcactgttccagcggctctgcccgagatccattccggaagtaagagttagtacctgcaaagatgatgactgtagtcagtttcaacaagcatacagcttatccaaagacgccttgtcgctaggagagtggctttggtcttttggggtcacacgtctctgacatctctctgttggggtccctgcagcagtgaacatttgctgtaaagggaattctttgtccagttacctcaggaaataagatagtattgttttgaaatactcctgtcgcatcttcttttttttcccatttaaagtatggatcatgacttagggggtacttggcgatggactttgtaaaattgttttccgaggtggtccagcattaccagctctgccctcatgggcagcatgagcacggccaagtcctccagccttggctgccccggcactgtggaagccctcgcagctcgtgacgggcgcgctctttcctttcagagatgttcgacaagcagcaggcgaacaccatcttctggagcccccaaggacagttcgtggtgttggcgggcctgaggaggtaggtgtctgcgctctgagcctgtccgccctgtgagtagcgctctgctgtggcagagacccctcaggcgcctgcacccggcttcttggtagagagagtattgtgcgctgaaagggttgccccggtgtcagtggataggacttcattgaacctctgcagacccacggtactccaggactcaggccaagcccgcacagagtgaaataagcgctcccagatgctttcgtgaagtgaccaggcagacccgtctgcgggttgtggttctctgtggttaaacaagtgccttccagccatccagtaacctccccccgggggtcagtcccttgtcttctagtgggaagggtattcgttacacagctgtgaggctgccttacctttgtggttggtgtcacggtgtcggtctcagctgtgttccagcagtgtgtcgaaatcatggagaagcttccagctttctgctctgagttaaaagaatacccttttgttgctgctctcccttgcttcattgtccacacttgctactgtatttttggaggcttacttagcctcagataacatttccagtaaaaataatatgatggcagtcgtatgtaatactcactgcacactctgcatctgtgatttggtaagtctcacagcggccaccagaggctgttgctgtgcttgtttccatgttaacgccgaggctggctccctggggaccccatgccgcagcacctctcaggagtgggatgccaggaggtatgcgtctccatgaagcctgacggtcctgtctgtctttgcagtatgaacggtgccttagcgtttgtggacacttcggactgcacggtcatgaacatcgcagagcactacatggcttccgacgtcgaatgggatcctactgggcgctacgtcgtcacctctgtgtcctggtggagccataaggtggacaacgcgtactggctgtggactttccagggacgcctcctgcagaagaacaacaaggaccgcttctgccagctgctgtggcggccccggcctcccacactcctgagccaggaacagatcaagcaaattaaaaaggatctgaagaaatactctaaaatctttgaacagaaggatcgtttgagtcagtccaaagcctcaaaggtgagcctcattcccaaaatgagggctgtgctgtgacatccgccatcatggcaaaggcggggctgcggggagctgctgtgtatgtgctcagagttgcctctgctccgaagacactggttctgttcccccccaggagggatgcactggggaactggggttggcacggggacttggagttggtgacctcactgctgccttgtgggtggggggcagcgttgggggaaaagtgagaatgaatggactggccattcctgcttgagtgtctctgtatgctgtccttctggcaccgtccgcctgggtgtgggctcttcgcgatggggaggcacttgtcttaccagttctgtgctttccccaacctcatgcataggaattggtggagagaaggcgcaccatgatggaagatttccggaagtaccggaaaatggcccaggagctctatatggagcagaaaaacgagcgcctggagttgcgaggaggggtggacactgacgagctggacagcaacgtggacgactgggaagaggagaccattgagttcttcgtcactgaagaaatcattcccctcgggaatcaggagtgacctggagcactgtggggacggactccgcctgctgttcccgcgctgagctacaggactcccgagtgtgagccgcggttcctctgttgcagcgcagccgtgtgtgctgtggagccgaggccgtcctgcaggaagccgcgtgactcccgcctcctccctgtgctctctggctctggactgtgactgcgcctggattctgccattgcgacacatttttgtgcctttcagcccctggtgtctgcagtgggggatttaaggcacccgcttccacttctttcttgtttggagttttctgttggaaccgccggcgttggctccgaagacttagcgacgccactggcggcaccttctcctgcgcccagtgatgtttccacggtgcctgtacacagccgagcagcatttccgttgaaggacttgcatccccattgcgggcagtgctggacgtgtcccggagacccaccgggagggcgccgccatgccttgtacccccaccgtgcaggttgtggccggttttctccgcaggttgaacatggaaataaaagcaaacttgtatg

SEQ ID NO: 108 - DNA, 3599 bp, Homo sapiens
aatccgagtggcgactgaaggtggaggtaagattgaagaggcggatgcccgggccgtggctcagcaagaagttgttgaggggcgactcctcgtggaggagcgcccagctctggtgcgccaggcgcggcagcggggcggccgacgcgcggaagtctgtgccgtagaagagcagcgcgcgcgtccgcgagtccctcagcgctcggcggttccgggacgccacgcacgcgccgcgcgcacactcgatgcgctccgagtctcccgggaagtgggggaatagccctgggctccaccacagcagtaccggcaagtcccccgcctcctccctccctggccgcggcgtcccagagctgcgcgtcacccccactgcgcccagcgccgagggcggccggaaaaccgcgccatcccacggttccgcccactccgcctccccgccggcctccctctccgctacggacccatggccgctggctgcacagacactgagcacccctagaaggaccaacaccaccctaatggggccggccgccatgtccactccggcagccggcgccccctcggccagcaccgaccccgcccagcggatagtcgtgaccggacgaggccctacgccacgggggcacgtggcgcatgcgcagctcgctcagccgacggccaggactaaaagcaaagtgagctttcgggagtaaagatgaggctaatggttacatcttaatttattttatttctttacaaattaaagatgcattgaaaaataaaccaatgaagagaaatgagaggtccagagcaggggcatcccaggtggggagcaggcaagcctggccaccatcaagcctagcccttgtcctgcccccaagccagttggggttggaagataactgtcagccactcagtcaataccaaagcccaagcggtgtcccagcaggagagaacggcgctccagctgcctctgcctctctccccaacaaccccgggcctggagaagcagtgtttctcgtgggagctcagagtgggatgtgaactggctctgtgaggtattgcaagttgatgaccaggctccctaggctccctacagaaccatccagtgttggggcctctccagctggaaaggaagctggtacctctaccagatcttaatatattttgcaactcagttctccggtcacctctgacagtgtgcctctctatccacggagtgatcatcaatcattgcaggagagagcgagcgagcagtgaaagcagagaaacttgactgctaacctccaggcccaagaaggactgaccacttttctctccaccacctatgggctataccccagctcttgtgcacctatatgttttatccctaatataggaagttgtggatgacactgagccccctgtagtaaccttaggatccccactctttcctgcctgcccctctcctcttgggagactggtccaaagggacacataatattgccagggtctgggtgcctccaaacccccaataccgaatcatatacagtgaactgagaagctacattcattatgacaggattagcaggaaaaagagggtagaatgagggaacaggggcaccttccatcagcaggacatgacagagtggcaggatacttgagcccagaaagaaggtgtctccttatatctccccctccccccagagagactgaggtcagcttacataagatatgttactgtcccaatttctctgacatcctggggtgctttctggaagctagcctgggccctatgccatttacccacttgctttagctcagtagctgccgaatctccttgtgcatatgacagagaaagtccacataagatgctcccccactcagactcttgtcttccaccaggaagtgcttgaacagcatctccatcttgtcttcctgtttcaccacggtaagctacggccagaattcagggttcataaggcaaggccaaaggaaattaaacatgcccagaaatctcattaggcagtcacttactcattccccacccaacccccacttctaggtgaggacttgacaaggtaagaaatccagggttcagatcagtgttaccttcatgtaccgggatctctgtgcccgtaagctatcaatgaggcctcgaaccttcttggacagtggattatccagaactggcagaacactctagaacacaaaattcatttatccttatggtaaggcactctgagttcagtcaaggtggggcagcatacatgtatgcatcatctgaaacaggcaaacctgggaagaatgacagcaactgcccttgtccccaagtgttccctgatatttgagggtactagcacactaactatattggctcccaattgtttcacaaagtatacttccacacccatattctccttgactccctgccctcaccaaaccactggtgatctgactgaaggaggagacgctgaaaaggctctggacaacaccctgttggacgcttgctcccacccagaggaagaggttgagcccattctccagtaaatatatatccccattgcttagacgctcttcagaggctcgaactgctggtggttcggtagtactctcaacgggagactttgtctagacaaaaggaagggagcaaaaggttaccaaggaccataagacaagtctgcccccccgcaccacacacaaaattttgaaagctaagtcctcagacaccaccccttctggggtctcagtaactctctcagtgtgaaaattacatcagctaaaatacataaaaacaaattccactagtgtctgactgatactagcctatcctttcctcctcctaagaggccctttgctccgtgcaagatctcatactccaaccctcaatcgcaccaaaggtaagagccgagggtagaagaagacattggtctcagtcacatccatggaggtaactagctgtcggacataggcacggtcatcagtagtgacttcagctccaggctgcaggacatcactcttcaacacacagttcaggtaaactgggagtagcttcatgcactcaggaaggatcaactgaggggattatcaaaataaagtcaatgatcatgagaaatccctcccaaatgcaaacatttgtcccaacaaccccacctcccactaatatacttgccccacctgtcctgcagaggaggggctagcacagttctttctgtaacaggccaggatctgggcacactgggtgatgagcgtgtcacgaacagccttcacagggctattcaggactccccgatatgctggatgggaaagcaaagatagtcactggtcagctgcccatcatgtgtgcattcccaccatcacaactacccactcaccatcctggacctctcagccccaatcccaccctgccctgcttctaccctcaccaaacttggccatgtagttgatgagcgtgtcagtctcacagtttcgatatagatcagccagctgggtgcagcagttcagggccagattatggatgcggagccgacgctgccctgcacagctggtgtaaagcagggcacactaggggaaaggagaaagggggaactcacacccctccctcacaaaggccctttgctacactattaaactggaagagagaaatg

SEQ ID NO: 109 - DNA, 3693 bp, Homo sapiens
cacatatagctgtcaaagtgctcgtgtccagaatatataagtaacttttacaaattactaagttaatccaatagaaaaatgggcaaaagacacagaagcacttcaaaaatgacatacaaaagtccaataaacaaaggaaaagttgcttcattagtgatcatcagggaaataaataatattaaaacgacaataatagctctatacattggcaaaaaggatgtggcaaagtgggaggtttcatgcattgctgtgggaggagtataaatgggtacaaccactttggagaatagttttgcattttctcctaaagttgaagataacattccctaccaaagtcaccactctgtacacctccagaagcttcattcatgttgttatctatagaaatgctactgcctcaagttgtacagtagtacatggcctgtgtggctatacacatttcccctttgtttcccctatgacccagttgtatatatctcagttctggatatatactctagaaaacctgtatacaagtgtatgacgatgcacgttgatagcagtactattcacagtagccaagaactgaaaatgacccaaacgccaacttctagtagaacaaatgaattgtggaatattcatagatggaatactatagagcaatgagaacaaatgacctgaacctaacaaaaacaacatggatgcacagtacaaacgtaatactgaacgaaatacataattttaatatacacaatatgattccagctttataaaaacagtcaaaactacattggtttaggcatatacagacacacaaaagtggcagaggtatttggaaaaaaaaaccaaggaagtgataaaagtcaggaaaataggagggaggggagaaggtggggaaggattaccaggggcaaagaaaacttttggcatgatgagtatgtcttgttagattgtggtgatgatttcacaggtgtatagtatatatcagaacttatcaaattgtgtgtatactttgaatatgtacagtttattatatgtcaaggatacatcaataaaacttttaaaatcaacattttacattttaaatattgttaataactgcactattcttatttatatttttaataataaaaattggataaaagtggatccgatagggaaagcctaaagctatttctattagtggcactatccttctcagtggcccttgaggcaccttcaataaagccctagccctctgaagaagagtttgaaaatttctgttttaaactaagtcttaaccacaggctcttaagccagctgacaaaatttatattaatttttaaattacatttctttccaaatagtctcacagcaatttcctgtaataatttttttggagatacatgcaaactttgatactgccaataatttttaattttcaatttttgtgggtacataggtatatatatttatggagtacatgagatatttttatacaggtctgcaatgtgtaacaatcacatcatggaaaatgggggtagccatctcctcaagcatttatcctttgttttacaaacaatcgaattatactttattatattaaaatgtacaactgaattattttgactatagtcaccctgttgggctatcaaacagtaggtcttattcattctatttttttaatacccattaaccatccccacctcccctccaccctcacccccactatcctttccagcctctggtaaccatccatgaatttaatcattttgattttggatcctactaataaatgagaacatgtgatgtttgtctttctgtgcctgacttgtttcacttaacataatgatcttcgagttccatccatgttgcaaatgacaagatctcattctctttaaggctgaatagtattccattgtgtatgagtaccacattttctttatctactcatctgttgatggatacttaagttgtttccaaatattggctattgtggacaaacatgggagtgcaggttatctctttgatatactgatttcctttcttttgggtagatatgtagcagtgggattgctggatcttacagcagctctattttcagtttcttgaggaacctctaaactgttctccatagtggttgtactaatttaaatttccaccagcagtgtacaagggttctcttttctccacatcctcaccagcatttaatattgcctgtcttttggataaaatccattctaactagggtaagatgatatctcattgtagttttgatctgcatttctctgatgatcaatgatgttgagcacattttcatatgcctgtttgccatttatcacttcttttttgacaaatgtctattcaaatcctttgcccattaattggattagattttcttcctatagaggtgtttggacatacagcttatatattctggttattaatccctttgagaggtgacagcatgctggcagtcctcacagccctcgctcgctctcagcgcctcctctgcctgggctcccactttggcagcacttgaggagcccttcggcccaccactgcactgtgggagcccctttcagggctggccaaggccggagccggctccctcagcttgcagagaggtgtggagggagaggcgcgagcaggaactgggccggtgcttgcgggccggctggagttctgggtgggtgtgggcttggcgggccccacactcggagcagccggccggccctgccagccccaggtaatgacgggcttagcacctgggccagtggctgcagagggtatactgggtccccctgcagtgccagcccaccggcgctgcactcaatttctcaccaggccttagctgccttcccacagggcagggctcgggacctgcagcccaccatgcctgagcctcccaccccctccatgggctcctgtgtggcccgagcctccccgacgagcgccgccccctgctccacagcacccagtcccatcgaccacccaagggctgaggagtgcaggcacacggcgtgggactggcaggcagctccacctgcagccctggtgtgggacccactgggtgaagccagctgtgctcctgagtctggtggggccttagagaagctttatgtctagctcaaggattgtaaatacaccaatcgcactctgtatctagctcaaggtttgtaaacacaccaatcagcaccctgtgtctagctcagggattgtaaatacatcaatcagcacactgtgtctagctcagggtttgtgaatgcaccaattgacactgtatctagctactctggtggggccttggagaacctttatgtctagctcagggattgtaaatacaccaattggcactctgtatctagctcaaggtttgtaaacacaccaatcagcagcctgtgtctagctcagggtttgtgaatgcaccaattgacactctgtatctagttactctggtggggccttggagaacctttgtgtcgacactctgtatctagctaatctggaggggatgtggagaaactttgtgtctagctcagggattgtaaacgcaccaatcagcgccctgtcaaaacagaccactcagctctaccaatcagcaggatgtgggtggggccagataagagaataaaagcaggctgcctgagccagcagtggcaaccggctcgggtccccttccacactgtggaagctttgttcttttgctctttgcaataaatcttgctactactc

SEQ ID NO: 110 - DNA, 3696 bp, Homo sapiens
cttatttgaagtcattgccggatgtgaggaaaaaatcgcttcccttgcctgaaaagccacacaaagaagaaaattcagaaatcgtggtttggagagaatttgacaagcaagtgttcctcttgaactgaagcccccggagacagtcgaagctgtacacggtggacctggagtcagggctacactacctcctgcgggtggagctggcagcccacaagtccctggccggagcagagctgaagacgctcaaggactttgtgactgtcttggccaagctgttccctggacggccgccagtcaagaagctgttggagatgctgcaggagtggctggccagccttcccctggacaggatcccctacaacgccgtgcttgacctggtcaacaacaagatgcggatttctggaatattccttactaatcacataaagtgggttggatgtcaaggaagccgatctgagttgaggggttacccgtgttctctctggaaactgttccacactttgactgttgaagcctcgacccacccagatgcactggttggcacaggctttgaagacgacccccaggctgtgctgcagacaatgaggaggtacgttcacaccttctttgggtgtaaggaatgtggtgagcactttgaggaaatggctaaagaatccatggactcggtgaaaaccccagaccaagccatcctctggctgtggaagaagcataatatggtgaacggccgcctggcaggccatctgagtgaggatccccggtttccaaagcttcagtggcccactccggacctctgcccagcctgccatgaggaaattaagggcctggccagctgggatgaaggccacgtgctcacattcttgaagcagcactatggccgcgacaacctcttagacacgtattccgcagaccaggggggttccagtgaaggaggaaccctggccaggggtgaggaagaggagaaaagactcactcccccagaggtgtcccatggagaccgagacacccagagcgtccgtccacctggtgcactgggccccaggcctgcccttccagagagcttgcatcacagcttggacgggaaactccagagtctggatgggcccggggcccacaaggaggtgggcggggccgcacccttcctcggggttgacttctccagcctggacatgagtctctgtgtcgtgctgtacgtggcttcatccctgttcctcatggtgatgtacttcttcttccaggtgaggtccaggcggtggaaggtcaagcaccaccacccggccgtgtgagtgcccgggtgctgccagccacggcggaagctcccttggaggcagccctgccccgtgccacctgcagctttaatatttatgatcagggattttataaacatgcgggcctggtttcacatcggatggcaccttttggcttcaaagtcctggttttacaaacgctcttctaacaagggaagaacacggggtaattttgtggggatatttgcattcctggcgtactcaagtctgttcatgctccttttgcaggtcttacagcaaaaagacttctgtatttttactcttctagatgtgaaaagagggtgcagagtccaggccagatagtcttccccacacactttcatctcgtttcctccactccgccccatcctgcagggccttgtttttgtatttggagaacctcgcccatcccccccgcggctcctggctcccccccccccaccttggccctccctgcaccctccactcccctcgctccccctccccccgctccccccacgccccctgctccaggctgccaagtgttttcctttagccgggcggggacagacagagccggaagcgcagtcggcctctgcagcccctccaagcaagtgctccagggactatcctgtgtttgtagctgcttccctagggcaggttcctgagggctctccttgttcctccgggtgttcgacaccagacgtggggatttcaacaggggaggagccaaggaattctgtggctgtgctgcgtttcagaaaataacccccagaggccttgggctgtggacctgggggttggaaggatgggggctcatttaaccctcagaggcagcgcctttgtctgtctatctggtgacaagagagagacaagtaaatgggggccgttgggacggcgggtgcctggagggcagctctgggctcagcgggcagtgcttagagcacaggcccctctgttgggggatggggaggagagcagtctgcccttgggagcgtaggccccagggagacttctaaagccccccctgtcgtctgctcttcacccagcaccacagaggcacctgctgcacacacaagcatctcactcggcccacggagggggccaggcttcctttgcctgaagctgttttgggaagggtctccacacaggcactgatctcccaagctttggtcatgatgtcttttaccatttgataattttaaacattgtttttaaacccaaaacatttagtggtccgttgcctctgaagatgtaaacaaacaaatacactatttctgggaacatttatattgagattctttgtggctattggtgtgtctcacaggcaaaatttgatttggctaaaataggctcagatgtatttgtgtgcccgtgtgtgtgtgtgtgtgtgtgtgtgtgtgtgtgtatgagagagagagagactttgacggttgtagatattttttccgctttgcctactctatgttgtataatcatgtgtttactaacaagttgatgacatggatgtattcataagaccatgtaatattgatgtgattgttgtcgcttgagaaaaaaaggcaacagctgattctttcaacaactgtcacagaatggctgggctgagaacgctgcccagggccctgcagctggcaggagaggtgtctggtgggagcggtgtctggtgcgtcagcctgctgcttcgtgtctcactcgagagttgcttctggtttcacactttttaacccctctgtgctttagcagccgtgaccttgccttcattgcttcatccagtgcaggcctgggttattgaagacaccaaagtgtttctcttccagtttgaaaaccaggcaggtttacacgtgggtttcagtgtatttgcctttgaacccttcaaactaaactttagccttttggctggtgttaaatgtctttagctggggtgacctggagtgacctgggacggtgttgtggtttaccgtctccagcttcagcctttccagaaacccttgtggagggcagtgttggctgcaggtttcatcatattgcagtttgaggtcaccactatttggggaacaagcttgcgtcctgctgaggggcaggattttcagcagagcgtcggtggggctgggccgtcgtggaggtggccccaggagtcatatggccatactcagacacaccttgtgtggcctgctcagagctggatgccacctttaggcaatgtttagagtctattttctaaagttttaagtattttaagaggtattgagactaatgaatataatagttcagtaatttaaatgcttatttattttcagtggaaggatttttattaaaaagaagctaattgacatggaaatgtcagtgaaatttcttacctgcaaggaaagtgaacattttgtatttaagtaaactataatgtgcacattttaataaagaaatctgacatttg

SEQ ID NO: 111 - DNA, 3520 bp, Homo sapiens
aactaatgattaatgatattcatatataatcatatctaagatctatatctggtataactattcttgttttatattttattatactggaacagcccgtgtcctctgtctcttgcttcggcgcctggatggcttgccgcccacacaagagcaccttaaaaccagaactgcttaacctatttctgagactccaaaaagctgttcgctctcatgctgccccttttcatatttctcatatccgatctcacacacaacttcctggggccactatctctaggtaatgatagagcagataaattcatcagttctatatttcaacaagcccaagcttcccatgctttactgcatcagaacaacttgcccttactcgtatgtttcatctgcctcgcagccaggcttgagttattgtgcaagcctgccccacttgccagcatgtccctggtgttgcacctgtggaaggatgcaacccacgaggcttggctccaaatgaaatctggcagatggatgttacatatatatagcagcctttggctaactccgctatgttcatgtaatatagacacttactcccatatgttacatgccacatgccaaactggggaaacagctggtcatgtctgacgatactgtctgtcgtcatttgcccatatgggggtccctaaacaatttaaaactgacagtggactcgcttatgttagtcatgctttcccaattttttacaattgtgggcaatcaatcataaaacaggaattccatacaatccctgagggccaggcattattgagcgggtacatcaaacactacaacgcatgctgaaaaaacaaaaagggagaataggggaccaattaccacttcaaacaaaattacatttagccttgtttactttaaattgtttgactcctggtacggatggcaagaccccagcagaacgacactggcaactgctagaggaaaagaggcaagtttatccaaaagtgttatggaaatccccagaagaaggacaatggaaaggtccggtggatttgctgacgtggggacgagggtatgcttgtgtttttacaggagatggacaaaccgtgtgggtgccctccaggtgtgtgtgaccatggaacgggagaccggagggatccatggtattcaaccgtgggcctgttacctccagtacgagccatgagccagcggaatctgaatgcaaagacagaacaagggccgaccggagtcacaatgacatccaaccccataacatggggacagatcaagaaaacgacacaagaagctgagaaactactggagcgccagggtcaggcaaaaacccctgactccatgttcttggccatgctagctgtagtgtcctgtgcggtatgtttcccctgtgtagaggcaaaaacatattgggcatatgttcctaacccactggtagtacgactggtactctggagcgacactcctcctgagatatattatgatcagggagcgtgggcaccaggacccctaactccgtctgacacagagcaatagcatcaattacaccggcccattggaaggactccctttatgtatcaccatggatacgtcactcaactgcagctgtcttgcagtccaatctcaggcatggttaagtcaccatggaaaaattatgtatttattaggcctcagctttattaatgttactggcgtgttcaccaatcactcctagccccatcactcaaattgtatggattatatggaatgggctccctttgatatttctcacccccctccttggacccagtgtcttggccccttggccagacaacagtctatgttaatgggaaacattgactggggtccccgtggccatttagaggggagagatgaaaatcagacctcttggcacaaacttcactggcactggtggtggaccttcaacacctcttcatcacatcacactgggattcagtcccccagttggctgcacaacttgcttggtataggacaggctttaacccgcccttacctcagtgacgtcatctaggaaacagaggcccaattcaggaatcgatatggaaggcaacactcccatttatgaataacagcatctgggtcagaacattatccaacaatagtaatattactcaacacagttttaatatcacctttgtaaaaaatattaccactcaatttacggtttgtgggttttttgttgttgttgttaactgtttgagatggagtctcactctgtcgcccaggctggagtgcagtggcgcagtctcgggtcgctgcaacctttgcctcccgggttcaagcaattgtctgcctcagcctcccgagtggctgggattacaggcgcccgccaccgtgccaggctattttttgttttttgtatttttaatagaaacgggatttcaccttcttggccaggctgctcttgaattcctgacctcgtgatccacccgccttggcttcccaaagtgctgggattacaggcgtgagccaccatgcccggccagtttgtgtttttaatccctatgtttttctagcatctaagaaggaccaactccacgtaaacatcacccagttgacttgtgactcttgtcaactgtatcactgcctcaatcatagcacaatacaaacacacaacatatccactctaataattctgggtcgtatccctggattatggatccctgtcaatttgtgcaaaccttgggctgccacccctgctttacattttgtaaaactccttcttacccagctcactcatcgtgcacgtaaagccttaaacatagtaatttttactgtaatctccttagtcacactaataacctcggttgtagtgtcctcagtagcactacatagttctattcaaacagcccaatatgtagaaaattggacatgtacagccaatcaggcatggatgcttcaaaataaaattaataccgaattacaaacaaaggtagcaatgttaaaggctactgttctgtggctgggaaagcaggtacaaagtttgcaattgtagcagcaattgcactgtcatttcaatcatattcatatttgtgtgaccaatttggaatagaaccaaagtgaatatccatggaaccttgtaaaagctcatttgcagggagcttttacatccaatattacttttgatatcagtaacttacagagtaaaattcttaacttgaataagcaaactcaaaaataacagccctttttagaagcttaaacagaattccagcagggcttagaaagcctcaaccctggccgggtgcggtggctcacgcctataatcccagcactttgggaggccgaggcgggcagatcacgaggtcagaagatcgagaccatcctggctaaaacagtgaaaccccatctctactaaaaatacaaaaaaattagctgggtgtggtggcgggcgcctgtggtcccagctaatcgggaggctgaggtgggagaatgacgtgaacccgggaggcagagcttgcggtgagccgagatggcgccactgcactccagcctgggtgacagagcgagactccatctc

SEQ ID NO: 112 - DNA, 3792 bp, Homo sapiens
caataaagtaagctaaagaaaagaaaatgttattaagaaaatcataaggaagagaaaatatatgtactattcattaaggggaagtatatcatcataaaggtcttcatcctcgtcgttttcacgatgagtgggcctaggaggaggagggacaggaggggctggtcttactccctcaggggtggcagaggtggaagaaaatccagctatcagtggacccacacagttcacacctgtgttgcttaagtataggtgatactacattcattttctcttgctgtgtaacagattatctcaaaacccagtggcttaaaacaataaacattacctctcagtttggtcgtgggtcagaaatcctgcaacagcttggcagggcggttgtggctcagctatctcctgaggttgcagtcaggatgccagcagaggctgcaggagccccttccaggatggttccgtcacatggctgtgggctggaggcctcagctcctcaccacagaggctctccagagggctggttgtgtgtcttcacagcatgacagctggctcccttccccagggggtgtgacccaagatagagggaaaacccgcagcgttatggtgtcttttgtgactgagttatgggagactcccactgtcaattccaccatattaagtgactaagtctagaccatatttaaggctaggggagtaaagctccaactcttagagggaggagtatacagtaatttgcagacatattatagaaccaccatatgtacatttttcatagagtttgggaatgaaatagtaaaaggtatatagaaaactaagaaaagggaaaattccggggggctgggatgaggaagtgattagcaccagggaaaaccaaagtttataccagaaaggaactctaatcttaggctgccatattaagccatgtggctgggctacattgtgttaagtcactgatgaatgatctaaacaagagtctggatataaccaaatcaggaaggcttgaagaatgtgtgtgttattggggggaacggtgtccacagtaggaggtagatggttatgtaaaactagagaaaaggaactaatataaagtgttagttggaatatattaataattgtcagtggaaacagcttaaagtgctaaatgtgcttcaggggagtgaaaagcagggatgggtgaggaacctgtggttttgtcctgtgcctcattaaactatatttatgcttagccataggaaaaataaacattcacatcttaaaagtagtaagtgaaagaatcggttttcttagggggcaggtctttttaaagtttatatttcacctaataggccgtcagattctcctttttccatgtacaatattttgagttctgaagaatgtccagggtcgtgcagctgtcacagcccggacacagagcaattccttcccccagaaaaccagatgtgttttgagaagaaactgttgggatttactaatttcattctgatttgctttttatttccctttttaagggaggtggatctgcccaccatagacctttggcagtatctgaagatctttagtagtcgcggctagggggctgctgctggcatagggtgggtagaagttggggacactgccaaacattctcctctgtacaggacagcccccacttcccagaactccctggtccagagtggcagttacattgagcttgagaagccctggagtgcattccattgttcttctcttgtttcctgggaattcagattaaatttagagtattggagttcattttcattgtatggtgctgggtagaaaagtccgtaaatagaactgttacatgtccttgatactttgaggaaatacatgatataaatatatgatagagtcttttaatagctgccttatttgaaattggaattctcctctattctgagtgattgatgactgcattggtcgggtctttgtgtgtagataatccaggcacatggcggcactgttgaccccaccttcacgagtcgatgcacgcaccttctctgtgagagtcaagtcagcagcgcgtatgcacaggcaataagagaaagaaagagatgtgttactgcacactggttaaacacagtcttaaagaagaagaaaatggtaccgccgcaccgagcccttcacttcccagtggccttcccaccaggaggaaagccatgttcacagcatattatttctgtgactggatttgttgatagtgacagagatgacctaaaattaatggcttatttggcaggtgccaaatatacgggttatctatgccgcagcaacacagtcctcatctgtaaagaaccaactggtttaaagtatgaaaaagccaaagagtggaggataccctgtgtcaacgcccagtggcttggcgacattcttctgggaaactttgaggcactgaggcagattcagtatagtcgctacacggcattcagtctgcaggatccatttgcccctacccagcatttagttttaaatcttttagatgcttggagagttcccttaaaagtgtctgcagagttgttgatgagtataagactacctcccaaactgaaacagaatgaagtagctaatgtccagccttcttccaaaagagccagaattgaagacgtaccacctcccactaaaaagctaactccagaattgaccccttttgtgcttttcactggattcgagcctgtccaggttcaacagtatattaagaagctctacattcttggtggagaggttgcggagtctgcacagaagtgcacacacctcattgccagcaaagtgactcgcaccgtgaagttcctgacggcgatttctgtcgtgaagcacatagtgacgccagagtggctggaagaatgcttcaggtgtcagaagttcattgatgagcagaactacattctccgagatgctgaggcagaagtacttttctctttcagcttggaagaatccttaaaacgggcacacgtttctccactctttaaggtacactttaagggaaaagtaaatcagtccaagtaagcataacacacggacctgctcaagggaactaccaggcaaaatatttttacatcacacctggaatctgcccaagtctttccactatgaaggcaatcgtagagtgtgcaggaggaaaggtgttatccaagcagccatctttccggaagctcgtggagcacaagcagaactcgagtttgtcggaaataattttaatatcctgtgaaaatgaccttcatttatgccgagaatattttgccagaggcatagatgttcacaatgcagagttcgttctgactggagtgctcactcaaacgctggactatgaatcatataagtttaactgatggcgtctaggctgccgtgcatgtcgactcctgcggtgcggggctggctgtctggctggcgaggagctgctgcgcttccttcacatgctcttgttttccagctgctttcctgggggatcagactgtgaagcaggaagacagatataataaatatactgcatctttttaagatgtgcaattttattctgaggaaacataaattatgttttgtattatatgactttaagagcccacattaggttttatgattcatttgccaggtttttaaatgttttcacaaaactgttacgggacttcaactagaaataaaatggtgtaaataaagaccttgctatctctaaattatggatgttaaagatttgaaatgttttgtactttgattatttttatttcttatactctgttttcttttatattgatatcttgcccacattttaaataaatgtacttttgaacttag

SEQ ID NO: 113 - DNA, 3972 bp, Homo sapiens
cttattcgacgaatattttaatgatgattcaatcgaaaccaggactattgatgatgttccatttaaaacaagtacagatagtaaagaccattgctgtatgttagagttttcaaaaatattgtgtacaaaaaataacaagcagaacaatgaattttgtaaatgtatagaaacagttccccaagattcatgtaaaacctgctttcctcagcaggaccaaagagatacactctccattcttgtcccccatggggataaagagagttcagataaaaaaattgctgtaggaactgaatgggacattccaagaaatgaaagttcagacagtgcccttggggatagtgaaagtgaagatacaggtcatgatatgactagacaagttagcagttattatggaggagagcaagaagattgggcagaagaggatgagataccttttcctgggtcaaagttaatcgaagtgagtgctgttcagcccaacattgccaacttcgggaggtccttgctgggtggctactgctcatcttatgtgcctgactttgttcttcaaggaattgggagtgatgagaggttccgtcagtgtctgatgtcagatttatctcatgctgtgcagcatccagttttggatgaaccaatagcagaagctgtctgtattatagctgacatggataaatggactgttcaagtggccagtagccagagacgagtgacagataataaattgggaaaggaagtattggtttccagtcttgtttccaatctgcttcattccacacttcagctttataagcataacttgtctccaaatttttgtgtaatgcatcttgaagaccggttgcaggagctatacttcaaaagtaaaatgctgtctgaatacctgagggggcagatgcgtgttcatgtcaaggagctgggagtggttctggggattgaatccagtgatcttccacttctggctgctgtagcaagcactcactctccatatgttgcacaaatactcctttaatatacctaaaaattgttagaaattggtgggaaaataggtagaaaccaaggaagcagacacaacatgcatttatggagattctttttcccttttagacttccatctgaatgagtcagtcaccagggtattctgcatagcattgtatattctgtgtatgtcagatggctttttctttttgactggacttttgggtggtggtagatttttaaacaaatgaaattaaagcaacaataattttgaagcatttgaaaaagccaaagtgtacggtagaaatttctacaaaatgaatattatcaagagtttcatgtgatcactgcagtgttgtcacagctcataaatagcaacagtgtttcatgatttaatggctcagaaatagttattcattagtttttaatttttaatttctaaggtacagagatctataaaaccttgattatttgttagttttgcaattcaaaacagctaatgtctggttatttctcaaagtaagtattttaaacagcctgttaattataagaaactcagaataatgagtgtaaatgtgttatgttatccacccaagtgtacatatgtacctatttttttttaaaaagcagaaatagaaatacaagactggtaaacatgcctttaaaaatatatatattttcaactagtattgtctataatgctgaaatattacttattggtgatttttctgtttcacacactctaaaatataagtaaagccaaccttttttttaaggctgagattcccaaaatgagaatactactttataccatttgtttataagtatgaactgttcttataaatattaatatttacatattcactaatttaacataaatgaaaattaggattaaaaattgcaccaaagcatcggcaaaaacaatactatattctttaaaagtgctcaggtagccaaggcccttgcttttggtatcaaccctcatgaacccataggagctgaatatttgtttcactgcttaataatcctcaatttacactattcataactcttaaaattattctcttttttttctaagagcccctcccttccaaaagtgtatttttttcaaagattttcacttctcaattgttgcctttgtacatactatagagtgttgcttgtaagaaaggctaatatggaaccaaactcttgtaagtaatgtaaatagaaaggtgggtggataaagttttcaatactttctactacctcagtttacttgagtactacattatagtttattctttgcttatctggtctaagagacttttaatgctagtagtaaagttggtttctgctttcattgactattttcatcataatttcatcattgattaaaaaaagaaaaccacttgtttattcagttattaaatatatttactatataacacatccattcttgctgtttaaattttcaatagttaatggaaagttgtctttgaccttgaatttacagcattgggtcacattttgccttgctgtgtatgtattcaagagacttccaactagacaaagaaaaaattgttgttttaatggaatgtaaacctgaaattggtgtgtctgcaatctgtttggcccatgaccttttacctagtcccagttattacctgagtctcccatggatgacttgctgccaaggagtgtttgtggatatattttctttggcttaattttcttattctgtgcattaacaaaattatccagttgtctgattttggaattctatgagtcaatctttttggcagaattcagaatattaaaaagttcatacatttgcgggccattgtacctttttttttttttttttttttgacggagtttcactcttgttacccaggctggagtgcaatggtgcgatctcagctcactgcaacctccgcctcccagttcaagtgattctcctgcctcagcccccaagtagctgggattacaagtgtgcgccaccacacccagctaattttttatttttagtagagatgagatttcaccatgtgttggtcaggctggtcttgaactcctgaactcaagtgatccacctgcctcgacctcccaaagtactgggattacaggcgtgagccactgtgcccagccttgtacttttttttttttttattgtagctctgtatagcacttggataatgtctgggtgtctccttaaccatcaaactgttctttatttaaaatgtttaattaccgtttagaaattctagtcctcaataagtgggtggctcatgctattgttgttcctaaagctaagctttgctgggaaggaaatgacctatagtttcttaaagaatcattaatccttataggattcctgagttactgttttgttcctccccactgcttcccattcctgagttttgtaattcctaatccttctataatttctattaccttcaccatagtcattctttccttacgcaaagcccaaggaatgagctgctgctactttaaagtgtggtcattatgatgaatgtgaaaagagttttggcttgttctaaataatttttacaagttatggtacagacagttgttacatatcaaaaaaaacctgtttattgaaacaggaaataaaaaagggatcttttacattatagaattaaaactaattttttcttgtatataaactaattggtttgattttaaatatttctggcttttattaatatgtcttaattttgagtttgaaaatgttaagtgcaataaaaacatactagtacagattttgttttgttccaattggcatactctggggatgatcacttaaaaaaacagattttacataatgcctacttctggtagatgtcttatgagattgttctgctttttctaagttacttagatgttggatatgtacatagctgtttcttgttctgtatacatttctcaaatgtacacttgtattataataacctcccagttctaggggatatttgtgcaataaatacacatgtcaacttg

SEQ ID NO: 114 - DNA, 4632 bp, Homo sapiens
gttcccgcagaagctcaccatgggcatgcttaagtcgcccaataccgccatcctcatcaaagacgaggctcgcaacgtcttctacgagctggaggacgtccgggacatccaggaccgcagtattatcaagatctacagaaaggagcccctctacgctgccttccctggctcacatctcaccaacggggacctccggagagagatggtgtacgcatcgcgggagtcctcgcccacgcggcgcctcaacaacctgtcaccagcgccgcacctggcatccggctcgccgccgcccgggctgccgtcggggctgccgtccgggctgcagtccggttcgccgtcgcgttcgcgcctatcgtacgccggggggcgcccgccttcgtacgccggcagcccggtgcaccacgcggccgagaggctgggaggcgccccggccgcccagggcgtcagccccagccccagcgccatcctggagcggcgcgacgtgaagccggacgaggacctggcgagcaaggcgggcggcatggtgctggtgaaaggcgagggcctctatgctgacccctacgggctgctgcacgagggccgtctgagcctggccgcggccgccggcgacccgttcgcctacccgggcgccggcggcctctacaagcgcggctcggtgcgctcgctcagcacctactcggccgccgcgctgcagtccgatctggaggactccctgtacaaggcggcgggcggcggcggcccgctgtacggcgacggctacggcttccgcctgccgccttcgtcaccgcagaagctggccgacgtggcagcaccccccggaggtcccccgccaccgcacagcccctactcggggccgcccagccgcggctcgccagtgcgccagtccttccgcaaggactcgggctcctcgtccgtctttgccgagagtcctggagggaagacccccagcgcggggagcgcctcgacggccggagctcccccttcggagctcttccctgggcctggggaacgctcgctggttgggttcgggccgccagtgccagccaaggacacggagaccagggagcgcatggaggccatggagaagcagattgccagcctcacaggcctggtgcagagcgccttactgcgaggctctgagcctgagacccccagcgagaagattgaaggctccaatggagcagccaccccctcagcaccctgtgggtcaggcggccggagcagcggggccaccccggtgtccggcccgcccccgccctcggccagcagcacccccgcaggtcagcctaccgccgttagccggctgcagatgcagcttcacctgcgaggcctgcagaacagcgccagtgacttgcgcggccagctccagcagttgcgcaagctccagctacagaaccaggagtcggtgcgcgcgctgctgaagcgcacggaggcagagctgagcatgcgcgtgtcggaggcggcgcggcggcaggaggacccgctgcagcggcagcgcaccctggtggaagaggaacggctgcgctatctcaacgacgaggagcttattacccagcagctcaatgacctggagaaatcggtggagaagatccagagagacgtgtcccacaaccaccggctggtgcccggccctgagctggaggagaaggcactggtgctgaagcagctcggggagacgctgacagagctcaaggctcacttcccgggcctgcagagcaagatgcgggtggtgctgcgcgtggaggtggaggcggtgaagttcctgaaggaggagccccagcgcctggatgggctcctcaagcgctgccgcggggtcacggacacgctggcccagatccgaaggcaagtggatgagggtgtgtggccaccccccaacaatctcctgagtcagtcccccaagaaggtgacggcagagactgacttcaacaagagcgtggacttcgaaatgccaccccccagccccccgctgaacctgcatgagctgagcgggccagctgaaggagcctctcttacccccaaggggggcaaccccaccaaaggcctggacactcctggcaagagaagcgtggacaaagctgtgtctgttgaggctgcagagcgagactgggaggagaagcgggcagccctgacccagtacagtgccaaggacatcaaccggctgctggaagagacacaggcagagctgctcaaggccatccctgacctggactgtgccagcaaggcccatccaggcccggcccccactccagatcacaagccccccaaggccccccacggccagaaggcagccccccgaacggagcccagtgggaggaggggctcagatgagttgaccgtgccccgataccgcacagagaagccctccaagtcgcccccaccgccccctccccgccggagcttcccctcctcccatggcctgaccaccacacgtaccggagaggtggtggtcaccagcaagaaggactcggccttcatcaagaaggctgagtccgaggagctggaggtgcagaagccccaggtgaagctgcgccgggctgtgtctgaggtggcccgcccagcctccacaccacccatcatggcctcggccatcaaggacgaggatgacgaggatcgcatcatcgcagagctagagagtggcggaggcagtgtaccacccatgaaggtggtgactccgggggcctctcggctgaaggcggcccagggccaggcgggcagccccgacaaaagcaaacatggcaagcagagggccgagtacatgcggatccaggcccagcagcaggtctaatgagcaggcgcggaggctgtgtggagagtggacatacctcacctgtgggtgtttactgcccttgtggcctggtcagaggctgcagggtggctcctggacccagatgttgtgagagacccttagtgcactcgtttgatttagttaatatttatgagcagctcctgtatgacaggcccattctgggtgtgagggtgggggctgtgatatgtccagatgctctcacttaaagaaggttctagactcagaggcaagacgttagagaaggttctagactcagaggcaagaggttagagatgggtgagtccatctctttttcagatgagggggcagctcagaggaggagaggggcttcccaaaggtgcacagcaaggtggcatcacagccaggatcgggacctaggaatcttggaacccttccctgcactggccctgggacagccctgggcacccaaggccctgcctccctactggctcccaggagaatttctcaaaaagcagccctccagccccccgcagcctctccacagctcccacctgcctcctcatggcccccagacaccctgcgagccccacctccagatctttttcctgccactgccagggatgagttccccttgtcctgtccgggctggaccctcctgggtgcccagcagagcagctgacactgacagagctttcgctggggccaggcatgcgcattatctcatctcacactcaccacactgaggaaggtctattacccccatgtgacgggggcggaaactgaggcttaatccaaggccacacggctagcaagtggggggcaggacacaagtccagactgcctccctccccaccacaaagtgcttcagcctctccagcagccccttccctcagctctaatgatgttgcactgtttcccaccctagtccctccctccccagagcccagctcctccgctgtggtgtcagcctcatgcctttatggcccagcctccaccccatctccggggttgcctgggtctccagtgacatcgagatgggctcttttcacccccctcccccactgctctgcagcatgtggccttgtagaccccccccacacctgcatagggctgtgcagaccctctgttcctcagcatcctctccccagcctccacctggagcctctgggctcctttctgggtgactccctctattttttgagacggagtcttgctctgtctcccaggctggagtccagtggtgtgatctcagctcactgcagcctccgcctcctgggttcaagtgattctcttgcctcagcctcccgagcagctgagactacaggctaattaccacactggctaatttttgtatttttagtagagacggggtttcaccatgttggccaggctggtctcgaactcctgagctcaggtgatcctcccacctcggcctcccaaagtgctgggattacaggcgtgagccattgcaccctgcctgggcgactctcctttgcctgcctcttcccttcctgtgccccactcctcagcctcttctcctcacaccatgccttcctctcctcaggcaccaggtgcactgcttagtccctgcccccacccaggtctccattctgagctccagtcacccacacacgcttccccgggcatccccaggctcctcgaatgcgtgtgtccagacataatgctcccccgaccacgctgccccagccggtacgaggctgccccagctgctgtctccctcaggaagggtcgcccacccccagccttcccaagcccctccgtgcccctgtctcacttccagtgctccagtagcctttcttataaacatggcttctttcttgtaaagtaataaatgtttacagtgg

SEQ ID NO: 115 - DNA, 3625 bp, Homo sapiens
acggcctcagtgaaagggaaccgctggtgacagggcctacagaccccgaccaaaaagcgcatataactcacgtgcaggcttcgatgcacaaagaccccgggggccggcggagcagggtcggagagcgcgacagcccctgccctgagaccccggctttatgtgctacgcatccacgcgtggcactgccccttccatgcagtctccttccgtggataaagtgacacattttgttttgttttttttttttaagatgcagtctcgctctgtcgccaggctggagtgcagtggcgctgcctcggctcgctgcaacctccgcctcccggagtcgggcaattctcctgcctcagcctcccgagtagctgggactacaagcacgcgccaccatgcccccctagttttggtatttttagtagagacggggtttccccaggttggccaggatagtctccatctcttatcctcgtgatctgcccgccttggcctcccaaagtgccgggattacaggcgtgagccaccgcacctggccgagtgacacactttgtaagacaaaagccatctcatgaacttctacacccatgaagtgtgtctgggaggccccctcctctgggcaccactgccctacgatggctccatctgtagcctccttttccaagaggacttaagaccgacaataaatggatcccagatacagattcccctgcaagcggcaaacgtccatccccattaccggaaacctccagatacttcacacttactggcagcccaggacacggggacccaaatccttgcctgccctgagcagtggctctcgaggccaggaaggggggctcgtgctcagagccaggctggcctgcctgctcacttctgtttgccagggcaccatcatctcccaccaaggatgaacctgaagcttcagggcaacgaagagaaacccagaagcgaagggacttgcaaccaaggctgcccaaagtggcccctgtccaggcccatctctaaatacaacccacaccgaggatgcctggtggggcagaagtccctgggtctcgttcccgtcaggggcgagtgaaccttcacaacctcccggggctttggaatttgacttaatgatgaagggcaacatggaccactggacaaagacctggagttcccactacctgcaccgctctggccaatcccatttggaaatcagtcagcaagattcactctcctctggactctgagcccccgggaggagaggatgggagaggtcaagcgtgtgcaattctgttgcagcctcacaaccaacaagcagccgtgttccgacggctctgcgggaagcccagagggactcccgtggctcaaacgggggcagagacgtgcagggccccggggaacgtgaaggtgagagacagaacataccgtgaagaagccactgagagtgggagacagaggcaggaacagggatgacactggaggacagcaggcctgcctggaggccagcattctctacaaccttccacaaaccaacagcaaagcccgctccgggccacgtgcctggcagctgctcggccactgccccgctcctccctaggcaaaatcccagggaagcaccttgcgtcgtttccatttcctcacctcttactcttccttgaacagtccccccaagaaactgcctacccaccatcaacaactggcacagggcagatccacgggtcaggctgtgtgcacctgaccgcttcataacccctgcgtgggcagccagcaccctccatcagaaatcgtttgatcccgtggcctctgggtctccatcattcgagctcgggagcaacatcccatcaccatctcctctcctcggtgggcccctcctcgtgttcacccctgcactggggggaacccaggctccactcacagaggagccaacctctgggcagcctgccagctcgctgtgaaagtcctcacggccctgactcctcctggagctctgctggcagcacctaagtgcccactcagacctgaatggtggcaccagcggatgcatgaaatgccagcccagcacccgccccggtctctcccagctcagcagcagacaccgctgtgcactaggcttgagggccacctcccaggagccgcccctgactccattctcttgaccggtctgtcatcagacctcgaccacggcccctgcccctgctctcctgcccgttctcccgcctggcctaggagaagccacagcaaaccccacgttccccgccacaaagagaaggaagtccagagtcagtgccaggctgccacggctcaggggcccagcccaccacagcctttcatgcccccccacacactcctgcccaggagctgaaagagccccacactgccgccagcccctacccagccctaagactcttggcagcgcatcttgctgccgggaagcctctgacacggatcgtcagtgcacgtccagctcctccaccaaaatcgaagcttctcgtgggcagagacgccacccggcatagcagcgcatccccatcacccatcaacctgcacttggcaagcacctccaaacagagagagcacacacactccgccggcagccgaaggagctgcaggatggtgctgagagtgggagcaggccagaacgaagctctaacacagaagagccgggtgctggggagagacggggaggacaggtgggaggactcaggcccctccccaggcaggatggggaggccacgacacttgggccagcttggagggtggcgggggaggagaagagcagatgcagactgcacctgctgggggtgacgacggtgcggcgtggccagcccagccactggcaggcccacaggtcagctggatggggcagaggtggggcccaccccaacttccaccgggccttgcctcccagattcctgagccaaggtttaataacagaaaagatggagctctaggggagcaagggacgccgaccaagcaagccgcagcagagaggactgtgctggagccacatcggtggcttctccgggaggtaacgtcctgtgcagactcccagccacaccctggcgctgcctcggctgcctccctgaatgtcagcggcctgagggaccccactcggcagggagcgggggctgcttgtgggaacacacagggtctgattccaagtgagaggggtgactggtgtggcttcagacggcaccaaccacgcaaaggatacacagcttctcgtcgtcctgaaatgtgaagtaaagcttaacaaagaaggggtgatccaggcgcgacatgacatcccgctctctggttacataggggaccttgttctcttttatgatatgtcgcttctccagaattttaacttcaggtgagagagaagtgagttactatcagaaacaacaaaaaacactaaagacatgactcacaaaggtaactggtacaaattaaagtctttcaaacattgtacacaacagcctggtggtctctaaagccaacagtgtcctgtaccctgaaatcagcacagaaacaccggccctgccaccccagccgccctgcacggagccgcttgccctgctcccggacgcacagctccctgcagcccatactcactcgcatattctctggaggttgccagttctcgagccaggacaacctggttggg

SEQ ID NO: 116 - DNA, 1057 bp, Homo sapiens
aatcccagcactctgggaggccaaggtgtaaggctcactttaggccaggagtttgagactggactaggcaatgtggtgaaatcctgttactacaaaaaatacaaaaattagttaggcatggtggcatgcatctgtagtcccagctactgggaggctgaggttggaggatcgcttgagctgaagaggtgtaggctgcagtgagcaatgttcagtgcactgcacttcagccaggacactggagttgagagaaaggaaggaaataaggaaggaaggaaggaaagaaggaaggaaggaaagaaagaaggaaggaaggaaggaaagaaggaaggaaggaaagaaagaaggaaggaaggaatgaagggaaggaaggaaggaagggaaggaaggggaagaaagaaagatgaaagaaagagagaaagagaaagaaagaaagagagagaaaaagaaagaaagaaagaaagagaaagaaagaaagataaaaagaaagaattttgtcccaggaagagggccggcctgaaaagaaagagcaatcacataaaaacataaaacacagatctccaacatgctgtgttgagacgcctcttctgggttaaaacaaaatgaaaacagtcacagacgaggcaggggaaagtgctggcaaagcgtgggctcctcgcagacagctccaggtcctccggccgcaggcgacgaaggcagagcggctggagagcgcggagccccggcggagagcggagcgcagcggctgcggactcaccccgccgcccggccccgcggcagcagctgccgctgccgcctccgcctcccggctctcccgctcgcggctcacctcggccgcggtccccgcgcagtacccacctctgcgccgccgtgttggcgtccagcaccccggcgccctgcatccacgtccgcaccgcgttcatgccgctgcccagcggctcttccttcatgctgcttccactccgttggatgctttcctgaatcccaaacatgaaaacaaccttttcttgtggaaaatctcctcccccttgaaaaaaattaaaaaaaaaaaaaaggaaag

SEQ ID NO: 117 - DNA, 3903 bp, Homo sapiens
atctaaagatcatgtcatcaacagacagacaatttaactttttcctttgcgatttggacaaattttatttctttctcttgactaattgttctggctaggatttccaatactgttttcaatagaagtgtctggaataagcattcttgtcttattactaatcttacgaaaaaaactttcaattttcactattcaatatgatgttagctgtgggcttatcgtacatgacccttactgtgttgaggtccattccttctgtgcctaatttattgagagtttttaatcatgaaaggatgtttaattttgttgaatacctttctccatcaattgagatgatcaggttgggcgtggtggctcacgcctgtaatcccggcactttgggaggctgaggtgggcggatcacgggatcaggagatggagaccgtcctggctagtttttgtattttcagtagagatgggtcctcgccatgttggccaggctgctctcaaactcctgacctcaagtctgcctgccttcgcctcccaaagtgctgggattacagacatgagcctggcctggatgatctttttaatgtgttgttgaatttggtttgctggtcttgctttgtcacccaggctggagtgcagtggcataatcttggtttactgcaggccttaaactcctgggctcaagtaatcctcctgtctcagtcttttaaagtgctggtattacaggtgtgagccacattgcacctggccttattgaggatttttgtatctatgctgatgtagtcccattggtctataattttcttttcttgtagtgtccttgtctggctattgttcacgagcatgttgttcaatttctttgtatttgtgaaattttccaaaattctttttattatttctagtttcataccattgtggtcagaaaagatacttggtatgatttcagtcttctaaagtttattaagactcgttttgtggcctaacatgtgagttgtcctcaagaatgttccatgtgcacttgggaagaatgtattttctgctgctgttggatggaatgttctctatgtctgttagtttcctttggtctaaagtgtagttcaagtttgatgtttcctttttgattttctggctttattgaaagtggactattgaagtctcctactattattattattatggaaatggagtcctgctttgtcacccaggctggagtgcagtggcgggatctcggctcactgaaacctcctcctcccgggttcgagtgattctcctccctcagcctcctgagtagctgagattacaggtgggagccaccatgtccggctgatttttgtatttttggtagagatgtgatttcgccatgttggccaggctggtcttgaacccttgagttccggtgatctgcccacgtcggcctcccaaagtgctggggttacaggtgtgagccaccacacctggcctaaagtcccctactattattgtattataatctctctctctctagatgtattgatatttgccttatgtatctagaagctttgatgttggatgtatttacagttgtcccttggtgtgggattgcttccagtacctctgtgtgtaacaaaagctgcaccattcaagtcccacagttgccctgcgaaacctctgtatatgaaaagttggccctccatgtacatgggtttcccatcctgtgagtactgtatttttgatcctcatttggttggaaaaaatctgcatataagtggacctgtgcagttcaaacccgtgttgttcaagggtcagctgtatatttacagttgttatattgtcttgataaattgatcctctgtcattatgtaatgatgttctttgtcttgttttacagtttttacttagtctgttttaagtatagctacccctgctctctttggtttccatttgcctgaaatgtctttttctagcctttcactttcattctatgtgtgttcttaaatgtgaagttaatcttcataggccacatatagttgggtctgtttttaaatttttgatagtatccaacctaatgggtgtgaggtgataattctttgtggttttgatttgcatttctctaatgattagtgatgttgagcatctttacatatgattgttggccatttgtgtcccttctttggagactattcaaagtcctttacccattttaaaaatgaaggcatttgccctttgttgttgagttgtaggaattttaaaaatatattctggatagtaaatccttttcagatataagatttgcaaatgttttttcccattctgtgggttgtcttttcactctttttctttttcttttttttttttttttttttttgagacaaggtcttgctctgttatcactggagtacagtggcgtgaatgtggctcactgcagtctcgaccttcctggctcaagggatgctcccgcctcggcctcccaaatagctgggactatagacgcatgtcaccacatctggctaattttttattttttgtagagatgagatttcaccatattacccaggctgttcttgaactcctaggctcaagtgatttgtctgcctcagcctcccaaagtgttgggattgcaggtgtgagccactgcacccggctgccctttcactcctaattgtatcctctgttgcacagaaatttttaagtttgatgtagtcccatatgtctccttttttttccccatgctttttatgatttctagcatctttttgtgggcttattgtgcttgtatatcttctttggagaaatgtctgttcaattcctttgcccttttttgaatggggttgtttggtttttctgttgtggaatatttaaatttctctatgtatcctcaatgttaagccatactagagatatgcttttcaaatattttcccccattctgtgcatcaccttttttactctgctgaaagtgctgtttgatgcaaaaaagtgtttaattttcatgaggtccaatatatctattttttcttttgttgcctgtgccttgggtgttatattcaagaaatcattgacaaatccaatgatatgctcttctacactcttaaaaattatagacaaccccaaataacttttatttagtggttttaacaatatttaccatgtctgaaatatgataaacattaaaattagtattttggaaaaatgccatattagaaactgatgatttaaaagtaacaacaatgaatccattacatgtgaacatactgtttttttgtttgtttgtttgtttgttttgagacggagtttcactcttttgcccaggctggagtgcagtggtgcgattgcggctcactgtagtcttcgcctcccaggctcaagtgattctcatgcctcggcctcctgagtagctgggattacaggtgctcaccaccacacccggctaatttttgtagagatggggtttcaccgtattggccaggctggtcttgaactccagacttcaagtgatccacccaccttggcctcccaaagtgctgggattacgggcatgagccactgcaccaggccaacatactttttataaaaacagctgtcttctctaaaacaacaaaaaaatgtagataatagtagtatcattttatagttttgcaactctctttaatgtttggcttaatagaagatagttggattctcgtatctgtttttgtattcagtctgttgtgtatgttgttttgattgaagtagatgaaggaaatccagctacatacagatttggagttggaaaaaatagtattttaataacctttttagatcatggtggatactcttctttgttatgtcatcaaaattagacaaatggcagtttctgaaaaattagttgtaatgtgtgtaaaaaattagttgaatccatatcagtgaactcatacttttctatattaaacttcattgctct

SEQ ID NO: 118 - DNA, 3650 bp, Homo sapiens
taatggcctcttttgtatgtgggagaccatggtgttgaggggaggcagttacacaaaaagcccagataccgagtgttagttccatgggtgtggctggtcatggtgcgcactcacgaaggatgtaggtgatgccctccactccgcagagccagtcccacaggggtacccattctgactcctaccaccacagctccctacctcccgcctgccatgggttccacgtgcatggctctgggcagtctgtgtctttgcgtgcgtctgtgtatgtctgcgtgtatctgcttacattcgctcagcatctgagattcacccaggcttttgcgtggatcagcggcagactcctgattgccgcgtggcggcctgttgtgtgggtgtgtgccgcgtgtgtatccagtccctactcaggagtgtacgtttccagtgtgggttgcagtcaggatccatttctcccttaactttcagattatttgctgcataggcttttttctcctaatttggcgcctttgtcagaaatcaactgacctacctgtgtgggtctgtttctgtttgtccttacgctcttgccattgccacactttagacaaggtcttgctctgtccctcaggctggagtgcagtagcgtgatctcagctcactgcacccttgacctcccatactccagcaatcccctcgcctcagtctcctgagtagtagctgcgaccacaggcgtgtgtcaccacacccggctgattttattttttttatttttattttttttgtagagacggggttttactatgttgcccaggcaggtcttgatctgggctcaagtgatgctcctgtctcagcctcccaaactactgggattacaggttgtaggtgtgagccatggtgcccggccgccacactgtcttggctacagttgggtttataataaaccctgaatcgaggtgatgtgcattttccaactcttctttttaaagattcttgtggctgtttatgtccttggtgtttccatatatgttttacaatcagtgtctcaatttctaccaaaaaacatgccttctggaatttcaatagcaattcccttgaacgcatttttgaataccttttctgaatgtcttgaatacatgttgggaaaaatcggtgtcttaacagtctccagtgtccacgcgttgactgccgtgtgtgactccagtcggcgtctcaacagtctccagtgtccacgcgttgactgccgtgtgtgactccagtcggcgtctcagcagtctccagtgtccacgcgttgactgccgtgtgtgactccagtcggcgtctcagcagtctccggtgtccacgcgttgactgccgtgtgtgactccagtcggcgtctcagcagtctccggtgtccacgcgttgactgccgtgtgtgactccagtcggcgtctcagcagtctccggtgtccacgcgttgactgccgtgtgtgactccagtcggcgtctcagcagtctccggtgtccacgcgttgactgccgtgtgtgactccagtcggcgtctcagcagtctccggtgtccacgcgttgactgccgtgtgtgactccagtcggcgtctcagcagtctccggtgtccacgcgttgactgccgtgtgtgactccagtcggcgtctcagcagtctccggtgtccacgcgttgactgccgtgtgtgactccagtcggcgtctcagcagtctccggtgtccacgcgttgactgccgtgtgtgactccagtcggcgtctcagcagtctccggtgtccacgcgttgactgccgtgtgtgactccagtcggcgtctcaatagtctccggtgtccatgcgttgactgccatgtatgactccaggtattgagttcatcttcaacttctcccaacaatgaactggagttttctgtgcatgtgtctggcatgttttcctttagatctagtcctaggtgttcgatatgctattgaggactgtgtatttttatttcatttgtcacctgtgcgtggtgctttaatcctgtgccctaaactcccgccttggccatggcggtgtttctgtggactcgtggggtttccgtgtgcacacgcgtgtcctctgtctgacagtggctttgcttccccttgttagtctgtgcctcggcttctcactgcactggcgaggtgagccggcgcttgctaatcttattcccagtctcggtgaacatgggctcagtctctcccggctcagtgttgggtttgcactggtgcacttacaggcggaagagcttcctcatttgctgagggcttttcctgaatccgtgttgaatgtggtcagctgcctttcctgcacctagtgagatgctcatgaggtcacttccttaccgcattactgtagtgaattacgctgactttcatatgccaagatgacctggcatttccaggtaagtccctgtggccatggtgcattggccttttctctgcatggccagatgagatttgctcataccgggctaaggacctcctgtgtaggaatgctcttgagggacactgggcttggatgttcattgtcttgtcatgtgatgtgtctgtcatggtttgatattgcattaagtgggcctcctgaaacaagttctgccatagtttgtataggattggcattatttgtttcatagagatgtgatgggtgaggccatctatgcctgccattttctttttgcttaggtttttcattaagaacttgatttttaaaaatagacatgaggcctggcatggtggctcacgcttgtaatcccggcactttgggaggccaacgtggatggatcacctgagggcaggagtttgagaccagcctggtcaacatggtgaaaccccgtctccattaaaaatataaaaattggcagggtgtggtggtgcatgcctgtggtcccagctgctctggaggctggggcgggagaatcgcttgagctcaggaggtggaggttgcggtgagctggggtcgcaccactgcactccagcctgggcaacagagcgaggctctgtctcaaaaaaaaagacatgaggcttttggattttctgtttcttcctttgtcatttttttaaagataggtttgtcgcagaatttcatctaagttatcaaaacaatttacataaatcattcacagtatcctctgtgcagtgatgtccattctcattcctgctctgggccatttgtgttttcttttccccctgatcagactagctaagagtttatcatttttacagatattttccccaaagaaacctacttttgggtccattgattttttttttctattgttttctctttcattgacttttgctcttttcttatgaatttcctttcttctacctattttgtgttcaatttgctgtccttgttttaggttcttttgatagaggcttagatcattgatgaagaatatgaaagaatgggataatacagttaaaaacttggtctacttatgcccattagagaaaacatccttaagcacgcatggaatcttttaaaaatggacaaggtactaggacccaaagcaaatgtcagtaattcgcagatgataatgtaatgtataaatatatgatatgtaggtaaataatacaaatcacattctttggccagagtgcaattgaggaggaaatcagtaacaaaaagacaattaaatccatttgattcttt

SEQ ID NO: 119 - DNA, 3588 bp, Homo sapiens
caattgcatgctgccactcctctgcttagcatccttccagggtttcccacagcattcagagtagtgcccaaactcgtagccaagcttccgagacaatgaagacctggtccctgcagatttctctaggcaaatctcaggactgtatccccttcacttattaatttccagcccctcctctctgcacattcacatgccatgctcttagttcaatctgccctatggcccatagcattccttttactgggctgcacttcccttctgctctttgcatgttgtccaaatcctcatttctcaggcctcagccttaccttttaaagcccttctctaacaacaactacaaaatggtgtttctatcccttaaccttatgctaatatccccttcagctattttgccctttgaagttcttttcttgtttgttgactgtcttccccactggactgaaagctacttaaagcctggagccatgttggttttctttactgttgtcacttcagcacctggaatgatgcctggcaatggaaggcattcaataaatatccattgaatagacaagagaaaaagaaaaagaaaaagaaaaacaacagcagtccttcaagctacaactcagtagggaaaataataaataaatatataaataaataaataaacctagtaacacattaaatgaatagtttccatgtactgactagttagtatataccacacacatagtgtgcccaacattttattttattgcccacaattctataagcaagatattactctccctgtatatttttctttccctttctccctccctttactttctttctttcttccttctttccttcttttctttctttctctttctttctttctttccttccttctcttctcttcttctttcttttctttctttccttttcttctttctttcttaatttctttctcctttctttctttcttccttcctccctttctttactgcttgccttctttctttctttctttctttctttctttctttctttctttctttctttctttctttcttctctctctctctctctctctcttcttttcacaagatttcactctgtcacccaggctggagtacagtggcacaattatgatcatggctcactgtagccatgacttcccaagctcaagcaatcccccgacttcagcctccagagtagctaggactataggcatacaccaccatgcccagctaatttaaaaaaaaaaaaagtttcccaaagtgctaggattacaggcatgagccacagtgtctggccaatatttttcaaactaactaagataaagaaaacatggtacttatatacaatggagtactattcagccataaaaaagaatgagattctgtcctttgcaacatggatggaactggtcatcattatgttgggtgaaatatgccaggcacagaaggaaaaacatcacattttctcacttatttgtgggttctaaagatcaaaaacaattgaactcatggagatagaaaatagaacaatggttaccagaggctgtgaaaaatagtgggggagtggagggaaggtaggaatgattaatgcatacaaaacatacatagttagaagaatgaataacagctagtatttgctagcacagcagaggggctataggcaataataatttaattgtacatttacagtaactgaaagagtataattaatataattgtttgaaacacaaaggataaatgattgaggggatagatacacaattttccatgctgattattacatattgcatgcctgtatccaaatatctcaggtaccccataaatatatatatctactaggtacccacaaaaacttaaaaaaacaactatgaaatgataaatgataaatgattgaggggatagatacacaattttccatgctgattgttatgtattgcatgactgtatccaaatgtctcaggtaccccataaatatatatacctactatgtacccacaaaaccttaaaaaacaaacaactaagaaaccagaagctcagacaaaaaaagtaccttggccaaagtcatagtcggtaagtggtagaaccaggtgttggttgtagaagggtttgaataccatactgagaatgaagactttatttaattgacatctaggaagcactgagggtgttttgagcaaggtaaaataattcttaaaatatctgattagtaggagtattcatgccctgaattataatagccaattggtagttttcacctttgaaacctaaatggagctgatattcaatttctctctcaggctttgcccaaggactcaatttctgattctactccctcaattaaagagaattgggttaactttttgaatgtaaaattctcctctgacacacaaataatcacaaggacaattaaagtgataaaatgtcgagttaaatgggaaagaaagtcaaacataatttcttctgagtgtttataattattttgtggcataaaattgtgttctgtgcgaaaattcagaaactttaatttttaagagagaaaaatagcataatcactatactcccttcctaaatgtgtttttaacataacacattataatttatgccacatttttaatatgaaataattttaatgtgtctggcctggttcagtcctgttaaacaacaaaaaagactgcaaaatgtatttccccatgtggctagatacattctaacgtcgtgaagaaacacattatgtatatatgtttttctatattctcaattatagatagaaatccaggcacaaagagatgtatctttgggcaacacgataatttgtgaaaaggctacacagttaaacaagcattttccaagatttgaaaaactaatgagggagtgtgaaagcacaaagaaattaaattgtaagctgtaaggactgacttgaaaatattaaagagaggtataattcacatatagttgtgtgactctttttccttaaaaatccattttgatcattttcttatgtcattaaatattattcatgctgtacaataaatatataatacttcaacatggggctatgccattattgctttaacaaagctttcttttatatagcaaaactccttttcaacttttattttttgctttttcagtttcaataatgtaaaaaaattccactgggatgaaaaaatattttttattaatcagctttatttagctataacttgcttatgatataatacacactttttaagttttatttcaaggagtttgaattatatatatacccatgcaaccatgattatagttagaactcagagtactccaatcagacaagtgtcccttagtgtcccccacttccctggcctagggaaccattgatctgtcactaaatgacctatgcctattctagaatttcctgtcagtgaaatcacacagtgtatatgcttttgggtttggcttttctcattcagaataatgactttgctatccatccatgttgttattgtaacaagttcattgttgctgagtggcagattcacaatttgtttattctttctccctttggaatatttgtgttgctttaggtttgggttgttttgaataaggccactatgaacattcgctt

SEQ ID NO: 120 - DNA, 4032 bp, Homo sapiens
agacaatgacaaatatgagcctgaaggaagatgagctgatggcattcccagcttattaccactccttgggggccttatcttacatacatggattcaattcgtagattcagctgggatttactgcctcaagatggttatgttggaggattccaatagttctactggatgtggagccagaaattgtgtggaatgcctggtgtttctttcagttcttggatgccaatctgaggcccctggcagctcgtggttggcaagagcacgaacccgtggtcagatgcaacgtcctgcctcatgcattttcctcttggtgctttggtcagaacttccccaagtggagtgaaactcaggagctgagaaaccgagtcactgtgaaaagatgggaaattatctcctgcgaaaactcaggcaggaaatgactacatttgaaagaaaacttcaagatcaagataagaaaagccaagaagtttcatccacttctaatcaggaaaacgagaatggcagtggttctgaagaagtgtgctacactgtcattaatcacatcccccatcagagatcctccctgagctccaatgatgatggctatgagaacattgactccctcacaaggaaagtgagacagtttagagaaaggtcagagacagaatatgcccttcttaggacttctgttagtaggccttgttcctgcacccatgagcatgattatgaagttgtgtttccacactaaaatcctcaagctgctttatcaccttccagcaatgaagacaatgcagaatagcagactctggcgaagttgttcaccctgagcagtgcatgaaacattcctttctggctaaagtttagaaatattatcttattatatatccttaggcaactctgatatgtggcatctctgtggcttaggtgaaatcatagaaattgacacaatgacctaaaatattctatgtgtttttgcttgtaaagtttgaggacatggaggtgataaaaaaaactttcttaggacaataatgtaaaatgaaaataaatttctaatccccctgactaactgaatggaccctcttctaggccaaagagacctcagatgaacctgaaagactgaattctggccatgataggaagggaggtgagacacaccttgttataccccttcccttttggagtttatgcacaagtgaccaggatgagtcataagactgatggaatagactgattgtggcaataagagtcccaattccaacctgactctggtgtagatcacacactgtctgagggattccatctatgagactttgtctacataacagagaccttggtttccacaacccctttattttagctaaagcattcttttctactgacttcttaagtctttagacaaagcttaactctttcaaccaattgccaatcagacaaactttgaatctacctatgacctgtaagctctctcctgcttcaagatcttgcctctttaagctgaaccgatgtgcactttccatttaatgatttatgtctttgcttgtaactcctgtctccctaaaatgtataaaagtaaacggtgacctgaccacctcaggcacactttctcaggacctcctgagagtgtatcccaggccatggtaagtcatgttggctcagaatcaacctctttaaatattttacagaatttgggttttggttaccaataagtctccacaaatatatgtccaagaatcttcaattccaagcctgctcaccaaatttcaaatgccaacatctccccatccaattacctatttcacctttgaggtgtaatctactcaataaactgtgtaagaccagtgaccagaccctttgctaacctgacatttacttcaatttttctttttctatgtactggatatttttgcatataaacttgcagtaatagttcaaaaattaatagtttttgacattggcttttctgagaagagaaattgaaagtgtcacaaaataaaaaaagatgaaatgaagcatatataattgtcaattttttcaattttctagccaacagagaatcgaaggattctgttcaaatattagtaaaaattgaaaataaacttgtgcttatattttgtttgcaacacactagttaatttaacctgtgactagttatctctaccgaaggtggatgtgtagtttctggttttaaaattcaagcaaactggaaaataatccatctaattatgctttctttcccaagaagttttttaatgatatgccagcttcctaatttggagacaaaagccttaattgacaatgcattcattatatatttttttgtatagttacagtatacgagttgagtatcccttagatgagatgcttgggaccagaagtgttttggatttcagatttatttttggattttggaatatttccatacatataatgagagagttggaaaatgggattcaagtctaatcataaaattcacttatgtttgatatacaccttatctgaatagcctgaaggtaattttatacaatattttaaataattttatgcctgaaacagagtttgcgcacattggaccatcagaaagcagaagtgtcactatttcaagtcagtgctcaaaaagtttcagatgttaagctggtgatgcagttcatgccagtgatccgagtactttgggaagccaagacaggtggatctcttgagcccaggagtttgaggccagactgcacaacacagtgagacctcgtttctacaaataattaaaaaattagccaggtgtggtggtgcacacctgtagtcccaggtactcaggaggctgaggtagtaggattgtttgagactgggaggttgaggctgaactgagccaggatcttgccaccacattccagcttgggcaacagagtgagaccctgtctcaaaaaaaaaaaaaaagtttcagattttggagcatttcagatcttcagattagggattttcaacctgtactgaccttttagtcattgacaagcattaatcaataggtggactccagataactcatttgctgtatacacattttgcctctctattcaacgaattcttatgccctcttgtggtgattttaatgtgcggaagggaaacaatagaaattttgcaattctagaaaagtcattctgtcaaaatatgtcagtcctgtagatattagccaattttaggaaaatgacaaaattttttacttttcgtctgcctttgtagctgttttatgatataaataccttatttgtaataaaattaattttaatttgagtaacaatctggaattatcagagaaggggcaagcaataggttaataaacagtattgattggtagaagggacgttgaaatccaagagcatcaatgtcttctggtggttcaccataagccacagcagatgtcttaatctttccgagatctagtttttcagcaaagcaggatttaagaaatgtaactatcttatgtggttatgaagaacaatagaatcattgctgtataagtgctttttaacctgtaaattttgtgaagcttatcttttatgcatataaatatttgaacattttacattgtttatatttttaatcagttttactcaagtgtgattatatacaagaaaatgtaaccactgtaagggtagagttataagaattttgtcaaatgtattcacccatgtagtcacctccttatgaagagacagaacacgtacatcctcccagaaagttccacagtgctccttttccctgagtttcaccagtcctggcaaccaatgatctgcttcgtataattataactgttctagatatttgtagcaatgtaccctttccatatttattttgtgtgtgtaaggcttcttttagtcattataatatttttgagattcatctatgtttaatgttctatcagtagttgtacatcttacttgtctcagcatatcaccatatagatatactataatttgttaatctaatcactgatggatatgtaggatatttaagtttttgacattatgaataaagtggctataaatgaataaagcgactacaaatttg

SEQ ID NO: 121 - DNA, 3701 bp, Homo sapiens
acatatgtaggcctgggcatttctatttgcagcctgatcctttgcttgtccgttgaggtcctagtctggagccaagtgacaaagacagagatcacctatttacgccatgtgtgcattgttaacattgcagccactttgctgatggcagatgtgtggttcattgtggcttcctttcttagtggcccaataacacaccacaagggatgtgtggcagccacattttttgttcatttcttttacctttctgtatttttctggatgcttgccaaggcactccttatcctctatggaatcatgattgttttccataccttgcccaagtcagtcctggtggcatctctgttttcagtgggctatggatgccctttggccattgctgccatcactgttgctgccactgaacctggcaaaggctatctacgacctgagatctgctggctcaactgggacatgaccaaagccctcctggccttcgtgatcccagctttggccatcgtggtagtaaacctgatcacagtcacactggtgattgtcaagacccagcgagctgccattggcaattccatgttccaggaagtgagagccattgtgagaatcagcaagaacatcgccatcctcacaccacttctgggactgacctggggatttggagtagccactgtcatcgatgacagatccctggccttccacattatcttctccctgctcaatgcattccagggtttcttcatccttgtgtttggaaccatcctggatccaaagataagagaagccttaaagggttgagtagcctctgcaaaaaggagctccagaatatcagagaatgcttcttctgaattatcttgtcatcccatcaaaggcccaagttaacaaaccaggctacatccctaacctaggaggaatggcagagcccaaaggagaaatgtgctcattcctgtcttcttgcttctggagaatatgtaggaagctcacacatgtggtgctgatggaggagggcgtgatgtgcagaaaggatgaaaggctcctctgtctaagctgttctgtgctactaaacatttctcgtccatcaactgtacgtagctacatatatgtcatgctgggcagccacagcaaacaaaaagacaaagggggccacaaccgtggtttttgttggggcttccatctctatgctgttgggtcacatttgtcttcagaaagcaacctctgtctcatcttggaaaaggcggcctgagatttcacctggctggattctgtgtgttgctgagggaggagcctcatgaatagtcacaaagagttgggctgactctaagtaggacattgcagattattttttttttttcaaaaggaatccactgccagtatattccactttttcaaatttaaatagattggattgtcaacttggtttaggcttagatacaacttccttggccatgaaccaaggggaaaagcatagagcttttgagacagaaagatgaccattttcagttaaggagatggaagcctggagttgtgagtcaatgctaatcgaggactgagccagaggtagaaacccaagtgtgctggctcccagccctgtacttcctcttcaagaccatatagacactgaaagatcttctgcctacactgacaatgtaaggtcaatcctcaccaacaatatgcttttttgatacctgggattggagagaggaaatatcacatttccaattcagagctgctctttttcttaacctgtatgtaaacaaattcaacattcaaaccaggtgttacctgatagaacagtattgtaggtagaagctctttgaggaaaaaaaaagcctctttacaaagcaaggacatagatgactgcagcagcatctaactagtggatgaaggcaaaggggcaatgggcagcctttaattatcccaacaagaagtcagtattgatgacgtttcattacaaaggagaaagtggggctcactttaggtatgagtgcagtcccttccttccttccttccttccttccttccttccttccttccttccttccttccttccttcttccctccctccctccctctctctctctttctccctttctctttctttctttttttctccctctctctctttctttctttctttgtttcttattacaaataatcttcctataagtaggaaagtttgagcagacaaaaagcatcaatctgaagttaaaaaaaatgcatcaacctggagaaatagtcatttttcaaatggcattgcttatcttgggacaacaaaagcatccttcacaaataaagtcagagagtggttgtaatttaccatttaccaatagatttgtatgttctttccaagagaaggggtgagatagacatagtcctcgttttcctcaatgcaggcttaggtacaaagagatgtcacttacccagagtccatatattgaagtgaaaatggaatttcatgaagcaaatatagttataggatggtaactctggacaaattttataaaagatgaactccaattgcctcatttcacagataacagctctgagcactagggagagagggagggattggcctagcatttgctttgtgtcttgagcagtcacatctattatggaagtactcactactcagctatactcactccctgagacaggatggttggaaagaaaccccaccttagcttcatcattaaccaagaaaccccaaggatgcttagagaaaaactctggaattatttgggaattcctggaagaagctatgccctctctcctgcatcccaaagcccactctacaccatcttgaaaaatgtcaaggaaccgcatggattaggttgactctggatgaccctgggtagagacacattcagtttcctgctgacaccgcaccaagaaagtgatttggtcaggtgactctaggagaaattggtactgatagtatccaaggcagatttttaagtatcagacttaatacataatgattcttgggaaagccatttaaatccctgagactttaagtggataaatgtaggtaaagtagtatagtacttggctcataataattgctcattcaaattcacatgttagttttagttgttttttttaaattagagtcctgtgaatacatgaacccacccacccacatgcaaacacaagcaaacacacagccatgaccccatgcataagtttggctgaagacaccctcatgggaactagttcactgacttccaaattaaagagttaagcatttgatttggtctgttcaacattaggggtatcagccagcaaaatctgttgagcttaccattgaaaaatcctttcattcattactgtggtcataatacacagttacctggccaggaaagagtacacatcacagggatctgctcactgcacgtgtgcctgagctctccctcactttctgccttcttcaagaattcttccctgattggtccaaccagaagcgctgattctccccacctgatttcctgtaattttataatctatgtccttcacttttgtgttatattgtttatttccttttggtctttttgtgtgcatatgtatatgttttggggaatggggtattcacttttgttactcactgtgttactcacttttgtatgcccatagtgcagagcatggtgccttgtacatagagtatgttcggtaaatatgtgcaataaaaagtcctttgattacacaaaaaaaaaaag

SEQ ID NO: 122 - DNA, 4818 bp, Homo sapiens
taacatcagctgccgaacggacgggcagatgccttgcacatgttgctggttctgccaaggtcagcgtctcttcctctggaagtcctttgtcttctccatcctttgtccatcctactgttccaccctttattctgcagcaggcccccagcctgtctttgtctggtgggacagtcacatttttgtagcaagcactgctgttactttacagaacgctcctgagtttgagtttgtccgctgtttcctggtcatgggatttgaagtgtgtcttaggctgtcacattatacagaggacatggtgtccctcttagggtactgtgtcctgaggcagccagtgcctgtctcgtctgcatgaccttgtttgttcttttaaatttaagtgaaattcacaaaacaacaattttttgttttttttattttcataataatatagaggcagggtctcactttgttgcccaggctggtctcccaactcctgggctcaagctgtcctcctaccttggcctcccaaagtgctcagattacaggcgtgagccagcacaccgggcccaaaataactactttaaagttactttaaactactcagtgacatttggtacatccacagagatgcagtcaccacctctttctcattcagaaacatttccactctagctgggcaccacggttcacgtgtgtagtaccagctactagtgaagctgaggtggaaggatggcctgaggagttcaaggccagcctgggcagtgtagtgagatcttgtctctaaaacataataaaaaagacattttcatcatttcaaaataaaccccctgccctttaagcactctctccccgtccctccctcccctcagcacctgggcagccagtagtttcctgtgatttccctgtctggacatttcgtggaaatggaatgcccagcctctcgtatggcagtgtgtttgaccttttgtgcctagctctcacctggcatactgttttgtggctcacccccgttgtgtagcatgcatcagtgctggcgtttctattgctaaataatattctcttgtatggctagaccacggtttgttttcccattcttcccctgaggcacatttgggctgtttctgtccttcagctgttgtgagtggtgctgctgtgaacacgtgtgtgcacatatgtgtttgagtgcctgttttcacattcgggtttatgcctgtgagtgggattgctggatttatgtggtaattctatgtttaactttttgaggaaccaccaaattgttttctgcagcagttgtaccattctatattccaccagcaatgtgagggttctcatatctcgacatcctcaccaatacttgttcttgtttttcttctttttaatagtcgtcctggtggctatgaagtagtacctgattgtggttttgatttgcattctctaaagacttatgtttagcatcttttcatatgcttgttggccatttccgtaccttctttagagaaatgtctactcaaggcctttacccatttttgaaatgggtggtttgtccttttgtggctgggttgtaggagctcctggcatgttctgagtaccaggctcttgtgagagatgtgatgtgcagatgtcttctcttgttctatgggttgtcgttatttacattcctcataattaatgtcttttttttttttttttttttttgagacagagtgcagtggcacgatcttggctcactgcaacctttgtttcctgggatcaagtgattctcatgcctcagactcccaagtagctgggactacaggtgcccgccaccatacctggctgatttttgtatttttagtagaggcggggtttcaccatgttggccagactggtctcaaactcctgacctcaagtgatctgcccgccttggcctcccaaagtgctgggattacaggcgtgaggcactatacccggcctagtacagccatcttaacaatatttttactccacgaacatgagatgtgttccatttatttaagctattttttcagcaatgttttgtaatttatagtgtacacatttttcccttctctggttaaactattcctagctattcttttggatgctgttgtaaattgaattttttttttcagtttccttttcagtgtgttcatttctggtgtatagaaacacaactgacttgtgtgtgttgatcttataccctataactttgctgagcttattagttttttgtggattcttttctttgggattttctacgtgtataatcatgtcatctgcaaagagagatagctttacttccttcctaacttggaatccttttcatttctgtttcttccctgatcgctctgcctagaacctctagccccatgttgaatagcagtggtgaaagcaggcatccttgccttgttgctgatcttttttctttttttctttttttttttttttgagacagagtctcactctacatgtagcccaggctggaatgcagtgatgcgatctcggctcactgcaagctccgcctcctgggttcacgccattctcctgcctcagcctcccgagtagctgggactacaggtgcccaccaccatgccaggctaattttttttgtatttttagcagagacagggtttcactgtgttaggatggtctcgatctcctgacctcatgatctgcccaccttggcctcccaaagtgctgggattacaggtgtgagccaccgcacccggcccgtggctgatcttaggggaaaattttgtctctcaccattgggtatggttagctgttttattttgttgaggaggttcccctctattcctagtgcttttctcaggaaagagtgtcgcgtttgtgactttgactgcttggttgcaggtgcgcaccactgtgcccggctgatttttgttttttttgttttgttttgttttgtgacggagtctcgctctgtcgcccaggctggagtgcagtggtgcagtctcggctcactgcaagctccgcctcccgggttcacgccattctcctgcctcagcctccccagcagttgggactacaggtgcatgctgccacgcccggctaattttttgtatttttagtagagacggggtttcaccatgttagccaggatggtcccaatctcctgactttgtgatccgcctgccttggcctcccaaagtgctgggattacaggcgtaagccaccacgcccggcctgatttttgtgttttcagtagagatggggtgttaccacattggccaggctggtctcaaactcctgacctcaagtgtgatccacccaccttggcctcccaaagtgctgggattacaggcaggagccactgcgtccggccccatctgatttcttcactacagagttgctgtcttttgtaatgataattaccatgttatttttgagtgggattagacatcaatttgtgactctcaccagcacgcctaagggccccacgaatcgctggtgtagagcgtgtgtgttttcataacatgaagggagaagagcagttgcgacagttgtccctgagcaaacatttgcatccagctgggcacgcgtgcctccccaggctagggcagcgggtgctcaccctgccctcttcctgttcacagcctgattcggactccaccaaacactcaactccatcgaatagctccaaccccagcggcccaccgagccccaactccccccacaggagccagctccccctcgaaggcctggagcagccggcctgtgacacctgaagccgccagctcgccacaggggccagggagctggagatggcctccagcgtcagtgccaagactgagcgggccctccagtgttgtccaaggaaatgtagaatcactttgtagatatggagatgaagaagacaaatctttattataatattgatcagttttatgccgcattgttcgtggcagtagaccacatctgttcgtctgcacagctgtgaggcgatgctgttccatctgcacatgaaggacccccatacagcctgtctcccacccctgacaacccgagagggcatatggggccctgccaacaccacttcctcagcagaaacccgtcatgacgcggctgcttcggaagcagacatctggggacacagcctcagtacccagtcttttccctagttcctgaaactttcctaggaccttaagagaatagtaggaggtcctatagcattcccagtgtcactagaattttgaagacaggaaagtggaggttagtctgtggcctttttttcatttagccattgcacagtcagctgcagaagtcctgctgaccacctagtcatggacaaaggcccaggaccagtgacaccctgcgtccctgtgtgcattaagttcattctgggtcgcagccatgaagtgtcaccagtatctactactgtgaagtcagctgtgctgttttccattcgcttccacggcttctgcctcctgccataaaaccagcgagtgtcgtggtgcaggcaggccctgtggcctgctgggctgagggaagtcagagccccagggcgccacgaagtagcccgtatgatcacgtagacccacccaacacactcctgcacactggccccggcccacggcacagcaatcccctgcgcgtggatttcacctcaccctttgtaccagatgttgagtgaccagctctgtggccctgtgtcgtcagaggcttgtgattaactgtggcggcagacacagcttgtccacagcttgggccaggcttcccctgtcctcccaccggtcggctgcttggcaaggctgttcaggacgtgcacttccccaagtcggcactgagtggcccagcaccgcctagccctgccaccccact

SEQ ID NO: 123 - DNA, 3377 bp, Homo sapiens
agcagtagcagcgccgcgggcccttcagagtggccgcagtccgagctttgccctcgcatcctgttccaacgcgaggctggtgtgagtggcgggagccatctgtgggcgccatggcaaagagggaggacagccctggcccagaggtccagccaatggacaagcagttcctggtatgcagcatctgcctggatcggtaccagtgccccaaggttcttccttgcctgcacaccttctgtgagagatgtctccaaaactatatccctgcccagatcagtgcagcgttcgaggacctggagaccatttgtggggccaaacagaaggtgttgcaaagccagctggacacactgcgccagggtcaggaacacatcggcagtagctgcagctttgcagagcaggcactgcgcctgggctcggccccggaggtgttgctggtgcgcaagcacatgcgagagcggctggctgcattggcggcacaggccttcccggagcggccacatgagaatgcacagctggaactggtccttgaggtggacggtctgcggcgatcggtgctcaatctgggcgcactgctcaccacgagcgccactgcacacgaaacggtggccacgggagagggcctgcgccaggcgctagtgggccagcctgcctcgctcactgtcactaccaaagacaaggacgggcggttggtgcgcacaggcagcgctgagctgcgtgcagagatcaccggcccggacggcacgcgccttccggtgccagtggtggaccacaagaatggcacatatgagctagtgtacacagcgcgcacggaaggcgagctgctcctctcggtgctgctctacggacagccagtgcgcggcagccccttccgcgtgcgtgccctgcgtccgggggacctgccaccttccccggacgatgtgaagcgccgtgtcaagtcccctggcggccccggcagccatgtgcgccagaaggcagtgcgtaggcccagctccatgtacagcacaggcggcaaacgaaaggacaacccaattgaggatgagctcgtcttccgtgttggcagtcgtggaagggagaaaggtgaattcaccaatttacaaggtgtgtccgcagccagcagcggccgcatcgtggtagcagacagcaacaaccagtgtattcaggttttctccaatgagggccagttcaagttccgttttggggtccgaggacgctcacctgggcagctgcagcgccccacaggtgtggcagtggacaccaatggagacataattgtggcagactatgacaaccgttgggtcagcatcttctcccctgagggcaagttcaagaccaagattggagctggccgcctcatgggccccaagggagtggccgtagaccggaatggacatatcattgtggtcgacaacaagtcttgctgcgtctttaccttccagcccaatggcaaactggttggccgttttgggggccgtggggccactgaccgccactttgcagggccccattttgtggctgtgagcaacaagaatgaaattgtagtaacggacttccataaccattcagtgaaggtcagtgtcttccctccctccgtgaccactgtcccaacatcctttcctcttccacaagcctcctctctattttacctcctccttttcccctttgagatcattcactcaaacaatacacatttacacatttatgcatggctgctttgtcccaggcagtatgctagaagctggagatacagtgatgcacaaagcaaatgtattctgtgtcttcttgattatagtctagtagggaagagaaaaaggtaaccaaaaaattacaatatgatgtaatagattctgtgataggaaggtgcagggaactgtgggaagggatacagaagtgtatgattcaggaaagactatatgaggaggacctcaagcacaagtgggaattaaatggaaggcagaggaggacgagagtgtttgagacaaaagacacaggaagagccaagaatgcaaggtgggaaccttaatagtgtgttcgagaaatcacaagtagttcagactcagcttgaggaggggaccgtgaaagctgagagtgaggcttgtgtgcccccttaaggggcttgctctcctcccaagagctatggggagtcacaggattgcaggcaggggagtgatgcagtcctgtgtgtcttagatcactcaggctgaggcaagactgagacaggaagatcaatcttttgcagtgatccagatgagaaatgatgtgagcctggaccgtgagaaagacgagacagtgtatgcatagggtatagacttgagagagggatttgagatggaatcaagagttgtgttaattcattggcctatcaaacagagaagaaattggagtcaagagtgactcatggccagctgggtggcaccagtcattgagatagagaactaagagaactgatttcccaaagaaaatgagctgttagatttgatattcccaatggacatcagcaagagatgtctactaggcagtagggcacatggatgtgaagcctatgaagcagatttgggctgtagctgtagatctgggtgggggttctcagccctggggcttcaccctatcctcctccaaagccctaccctctgcctgaggccaggtccccagtccctagccccttcccccgccaggtgtacagtgccgatggagagttcctcttcaagtttggctcccatggcgagggcaatgggcagttcaatgcccccacaggagtagctgtggactccaatggaaacatcattgtggctgactggggcaacagccgcatccaggtattcgacagctctggctccttcctgtcctatatcaacacatctgcagaaccactgtatggtccacagggcctggcactgacctcggacggccatgtggtggtggctgatgctggcaaccactgctttaaagcctatcgctacctccagtagctgtacagaggccctgcctggcttgtggagggacagacattggggtgattggacaagagggtctggctgggaggtgggccagacctggcagcactgaatgtgggctgtgggcatgggtgcacccggtgccctccctctcctacccccacccccacggttgcactttatttattcggttcttgctttggtgactgggtgagcctggactgtggtcccaaggatgtgtgcagagcttcaccctacccttcttacacacctccccacccctgtcagtctgctccccatcccccagcctggggccagaacagcctaccccaggacaggagtccctctagttgtctccctaccaccctatacacactgacagagacagcaataccccaccccccatattaaataaatgtcttcaccaag

SEQ ID NO: 124 - DNA, 3649 bp, Homo sapiens
gtctcaaggagagagggatgtgggaacagctggttaggagagcagtccgaacacacacttttttttattactttcactgccttacatgggtatggttcatgctgcctccaaatacttacaaaaacatcaaagatcactgattacagatcattaaaataggtttaataataatggaaacatttgaaatattgcaaaaattaccaaaatgcgacagagacatgaaatgagaacatgctgttgaaaaaaatggcactcatagacttgttggacacaggattgaaagaaaccaattcatcaaaaccacaatatctgcaaaacgcaataaggtgatgcacaataaaaggaagtatatctgcacttccttcttttttactgaaaaaagcccaagttcttactctggtgttgagaacctttcattagctggctacaatctcagttcacaatcatttcttattgcccttcaacaatgtcctgaccaaatcgagttctttctcattgggaacagttcattcctttatcccttcgctcattctgttccttttttcttagaaaaattatttgcccatgttttttatcccccaattctatctttttcaatgcccacttcgtgtccaacccctctctactttccctctaaacttactcaaacacttggtgaactttttctgaatgttttttctgaatgtttacttttaaaggagttgcccagtcacaaagtttgagccaagtttttttgttttaaacttgttttaaacttttgttttcatcaacttttttcaaacaatttttgtcagcttagaggttgtgttttaattactatttttaaaatcttgtatgaggtagtatgatttgaaattagatggaatgtgcccaaaattatctctgtagaataatatggaaaaacgaaaatgaaaagatgtattacctgaatgtgctcctcctagccagtttctcaagggagaagaatcattaataagtttgtgaggcttttttttttttttctggtagatttctgtttccttgatcagtggtttttcagaattttttaaagcttgtgaaatacttatttgtaaatagcatcttatgaggaaccttgatatgtgacaaaacagatgctttgatttgagagcagaagacctgcagcccctgactgctcacctttccagggacccctgaacattggcctagagggtagtgtacagtcacttcttcagtgataacttactgagtgtgattcaacaaaactgctttggtttatgggtgaaacataatttataactaggcaaatgtcagcttaaatttatattttctaaatagcactgaaaatgacaatagacaaatgtaatttctgatttttaagaaatgattttccattttaacatacattttaaatgttttgtcttcaaagggaatccttaaaaatgatatattggaaaccactgatttcttattttcatttcatgaatttcagattcatgaatggaatatattgataatagcattttttaagttgccccaaaaagatgaaatacaaataattttaatcccaaatctatttcagacacctaactttttttttattttttatactttaagttctaggatacacgtgccatgttggtttgctgcacccatcaacccgtcatctacattagatatttctactaatgctatccctcccctagccccctaccccacaaaaggccccagtgtgtgatgttcccctccctgtgtccatctgttctcattgttcaactcccacttatgagtggcaacatgtgctgtttggttttctgttcctgtgtgtgtttgctgagaatgatggtttccagcttcatccatatccctgaaaaggacatgaactcatccttttttatggctgcatagtattccatggtgtatatatgccacattttctttatccagtctatcattgatggacatttgggttggttccaagtctttactattgtgaacagtgctgcaataaacatatgtgtgtatgtgtctttacagtaaaatgatttataatcttttgggtatacacccagtaatgggattgctgggtcaaatggtatttctggttctagatccttgaggaatcaccacactgtcttccacaatggttgcaatttacactcccaccaacagtgtgtaaaagcttcctatttctctacattctctccagcatctgttgtttcctgacttaatgattgccattctaactggcgtgagatggtttctcactgtggttttgatttgcatttctgtaatgacccgtgatgatgagctttttttcatgtttgttggctgcataaatgtcttcttttgagaagtgtaaggtacttaattcttaaattaaaaaaaaatacccggccgggcacggtggctcacgcctgtaatcccagcactttgggaggccgaggcgggtggatcatgaggtcaagagatcgagaccatcctggctaacaaggtgaaaccccgtctctactaaaaatacaaaaaattagccgggcgcggtggcgggcgcctgtagtcccagctactcgggaggctgaggcaggagaatggcgtgaacccgggaagcggggcttgcagcgagccgagattgcgccactgcagtccgcagtccggcctgggcgacagagcgagactccgtctcaaaaaaaaaaaaaaaaaaaaaaaaaaatacccttctttaacaaaatcaagtttcaagttttctgccttgttgataacttgttaacatttttttattttagaataaatctaaacagagaccacactgatatctgttaacaacctatgtaaagttaagattaaggttaaatcacatttttcacagagagtgttttactgaaatataaacttttatgcatctgatattatctaattgtgtccttactgggtaacttgtgtatttttcaagttaaaggatttcctaaaaatgcttatttgaatatttatgtcatttgtcacacatactttcaaaacataaccttcttcaacgagtatcttcttttccttcctaaaatactgttaatagctggctattttgtaagcctgtatctggtttaaaaaaaagaagtgaatattttcaatacttatgaaccatagaattctgtattcttttcataacttttaacttttccataggacctatcactatgtaaaatattatacatatctactgatttatttattgcctatgtacctatactagaacatagtaaacatgagaacagggaatcttggttattaattcctgcaggactcaactacttatcactcaaacatttgttcttgaaaagaacttcgtataacatcattagatttttacagaatctttaaaaaagctttaatattttcaaggttttttatttatataaatattgttactttaccactagtgatttcaatagtggcattgtcacatgattcaagaagaggaggccattacattactgttgtattaaaaagtcagttcaggcttaatatatatgactactataagtcaacctcacattttaatgtatgaagaagattgtatgaacgatcacattaattcatttaaatagtatgtattttgatactaatttttaagaagaaatgtatcattctcatggaaataaaagataatttgaaaagc

SEQ ID NO: 125 - DNA, 3527 bp, Homo sapiens
gtgttttttcacaggtgctaccaagcgacagccaacatgtctcttgcagctcaggatcagggtggcagcctgacagttgccagggtagggcttcgcctttctatggagttgctcccaccggcctgactgggaaaaatctcccagggatcaggtcactggcctggtgccccagggccagggctgctgtgtctcctccccaccctaggctccatgcatgggtcctgctgcctcgggggagggcagcccctctctgtgtttgcatcattgcacatgggccccgaggccctggcactcaaggcaggcaggggatggtgtccgaccttccagagctttcctgagcctactcctagctacggagccccaggcgtggagttcatggggctgcaccaggagaacaacgctgtgacgcagatccacctcctgcccggccagtgccagctggtcaccctgctggatgacaacagcctgcacctttggagcctgaaggtcaagggcggggcatcggagctgcaggaggatgagagcttcacactgcgtggacccccaggggctgcccccagtgccacacagatcaccgtggtcctgccacattcctcctgcgagctgctctacctgggcaccgagagtggcaacgtgtttgtggtgcagctgccagcttttcgtgcgctggaggaccggaccatcagctcggacgcggtgctgcagcggttgccagaggaggcccgccaccggcgtgtgttcgagatggtggaggcactgcaggagcaccctcgagaccccaaccagatcctgatcggctacagccgaggcctcgttgtcatctgggacctacagggcagccgcgtgctctaccacttcctcagcagccagcaactggagaacatctggtggcagcgggacggccgcctgctcgtcagctgtcactctgacggcagctactgccagtggcccgtgtccagcgaagcccagcaaccagagcccctccgcagcctcgtgccttacggtccctttccttgcaaagcgattaccagaatcctctggctgaccactaggcaggggttgcccttcaccatcttccagggtggcatgccacgggccagctacggggaccgccactgcatctcagtgatccacgatggccagcagacggccttcgacttcacctcccgtgtcatcggcttcactgtcctcacagaggcagaccctgcagccacctttgacgacccctatgccctggtggtgctggctgaggaggagctggtggtgattgacctgcagacagcaggctggccaccggtccagctgccctacctggcttctctgcactgttccgccatcacctgctctcaccacgtctccaacatcccgctgaagctgtgggagcggatcattgccgccggcagccggcagaacgcacacttctccaccatggagtggccaattgatggtggcaccagcctgaccccagccccaccccagagggacctgctgctcacagggcacgaggacggcacggtgcggttctgggatgcctcgggtgtctgcctgcggctgctctacaaactcagcactgtgcgcgtgttcctcaccgacacggaccccaacgagaacttcagtgcccagggcgaggacgagtggcccccactccgcaaggtgggctcctttgacccctacagtgatgacccccggctgggcatccagaagatcttcctctgcaagtacagcggctacctggctgtggcaggcacggcagggcaggtgctggtactggaactgaatgacgaggcagcggagcaggctgtggagcaggtggaggccgacctgctgcaggaccaagagggctaccgctggaaggggcacgagcgcctggcagcccgctcagggcccgtgcgctttgagcctggctttcagcccttcgtgttggtgcagtgtcagcccccggctgtggtcacctccttggccctgcactctgagtggcggctcgtggccttcggcaccagccatggctttggcctctttgaccaccagcagcggcggcaggtctttgttaagtgcacactgcaccccagtgaccagctggccttggagggcccactctcccgcgtcaagtccctcaagaagtccttgcgtcagtcattccgccggatgcgtcggagccgggtgtccagccggaagcggcacccggctggccccccaggagaggcacaggaggggagtgccaaggctgagcggccaggcctccagaacatggagctggcgcctgtgcagcgcaagatcgaggctcgctcggcagaggactccttcacaggcttcgtccggaccctgtactttgctgacacctacctgaaggacagctcccggcactgcccctcgctgtgggctggcaccaatgggggcaccatctatgccttctccctgcgtgtgcctcccgccgagcggagaatggatgagcctgtgcgggcagagcaggccaaggagatccagctgatgcaccgggcgccggtggtgggcatcctggtgctcgacggacacagcgtaccccttcccgagcccctcgaagtggcccatgatctgtcgaagagccctgacatgcagggaagccaccagctgctcgtcgtatcagaggagcagttcaaggtgttcacgctgcccaaggtgagtgccaagctgaagttgaagctgacggccctggagggctcaagagtgcggcgggtcagcgtggcccacttcggcagtcgtcgagccgaggactacggggagcaccacctggcagtccttaccaacctgggcgacatccaggtggtctcgctgcccctgctcaagccccaggtgcgctacagctgcatccgccgggaggacgtcagtggcatcgcctcctgcgtcttcaccaaatatggccaaggcttctacctgatctcaccctcggagtttgagcgcttctctctctccaccaagtggctggtggagccccggtgtctggtggattcagcagaaaccaagaaccaccgccctggtaacggtgcgggccccaagaaggccccgagccgagccaggaactcagggactcagagtgatggcgaggagaagcagcccggcctggtgatggagcgcgctctgctcagtgatgagagagcggcaactggcgttcacatcgagccgccgtggggtgcagcctcagcaatggcggagcagagtgagtggctgagcgtccaggctgcgcgatgagcacacactactactgatggcctttcgggggtccctgccccaaccggagaggccggtgcacagggccccgccaggggctgggggcatcccggcttccacaatgcagctgctctgggcctcgggagaggagagaccccagtcccctgggctgcccttcccgggcctcgtctgtctgggtcctttggtcaatgttgcacagtttttattgctcccatccctttttgtagtgggctgggttttaagttataaatgttaactgcctctgggtgaaaaagtttttaataaacacctattacctcttg

SEQ ID NO: 126 - DNA, 3574 bp, Homo sapiens
tttttcttatctgggtacttttcagaatttatctttgtctttgcttttatgaagttttattatggtgtttctaggtaccatttaatttattctgcttgggattttgtgactcgatgttcttttaaggaaattcttggtaattgtttttttcacagagtgcttttactctgttctttctttattcctcttctaggacaccagtcagacagacacagactttcccaccaggtctccatgcctcttatgttctttttcatatttatctgcggttttctccttgttgctgtctggatgttgtcttctaacctatcattcattttactaattctatttgtgttttatatgctgttaaacttatctattgagttcttaattccagttactatgtttttttggttttagattaatttcgctttgctaaaattgtccacatggttatctatttcacagttattttaaaggttatatttgacaattctagtatttatatcttctgtggatttattttgacacttggtcctgcttcttggtgtgcctggtaatttacggttgaatttcaggccatgggtggttgtttccttctacaaagagtattcactcagcccatctcctgagaaaatttatcctgtcctccagtaggcaaagaagaggcagatcactttcagttcaatcagagacggaagccggttttcagtctttgtaaggttcagctatctctgattatccctctcttcctaagtgaaagacttgagtatttacttttgcctgggcaggtcctgagttccaaaattcatttcctcagcactttgaaccttctgaaaagtaagctcagctctcctgcttctttctgctcaacacttgagcctattatccttctttgactaagaatcattgagcactttgaaggaaaaacacgtgcatagtgtcttagttctctgtttctcttctgtcctagcttttccatcctcaagtcttgtttgccttgataggctcttgctacaacttttgtcttctcagctctgtaaaactgttgaaagctctccttagctgccacgtgctgcttgcctttctgtttatgtttctgccaggcttttcagtatctacccctatactgctcaagagctggcaaataacccaagggagaagaccagaatgctaagtgtcaggttacctccatgaagtccttcctccggatctttggcacttcaagttctggctgccaaggcagctcttgaatgtcttagaacagatgaagtaacttaccagcttttctcctcctcttggcagggacattggtttcctaaaagttgctcagttttggccggaagtggaggtctaaagtttttggttttgttttcctgaattatctgtgttgattttggaatcagagtttggcaagccacaaaatagattgatagattcctatatttttctataatgtaaaatgagttgagcagcttttacattatcttttgaaagtttgaagtaacttttttttttaagatggaatctcactctgtcgcccaggctggagtgcagtggtgcgatcttggctcactgcaggctccacctcccgggttcacgccattctcctgcctcagcctccccagtagctgggagtgcaggcccccaccaccacgcctggctagttttttgtatttttttagtagagacggggtttcactgtttagccacgatggtctcgatctcctgagctcgtgatccgcctgcctcggcctcccaaagtgctgggattacgggcgtgagccactgcgcccagcctgaaatagtttattaataaaatcatttggacatagtactctctctcccttcatagttgttctttggcaactttttctaatttctgattattagcttagtcagatttttctccctcctctctaataattttgataatatatttttgggtgggttgttttaatgcaatcattaatttcttctgtatttgccaagtttatttgttgtggagaatacataatattttaagatctctttgtgtttatagcctctttttcacagataatgtttttaagttttttatttctctctctgggtttgttttttaatcagtgcttttaaagaactgatttttttttttttttggatccagtctactgtttttattttttatttctgttaattattttgtgcttttaaaattaatcattttatcctacttggaacaagatgatatttgtgggtgtgttttttgctttttgtactttgtgctttacatatttttcttctttttaactttttttaaaatatatttttattatattttaagttctagggtacatgtgcaggtttgttacatatgtatacatgtgccatgttggtgtgctgcacccattaacttgtcatttacattaggtatatatcctaatgttgtccctcccccatccccccccccccaaaaaaaagccatccccccgctctgccccgtcgcacattcggcccccgcgactcggccagagcggcgctggcagaggagtgtccggcaggagggccaacgcccgctgttcggtttgcgacacgcagcagggaggtgggcggcagcgtcgccggcttccagacaccaatgggaatcccaatggggaagtcgatgctggtgcttctcaccttcttggccttcgcctcgtgctgcattgctgcttaccgccccagtgagaccctgtgcggcggggagctggtggacaccctccagttcgtctgtggggaccgcggcttctacttcagcaggcccgcaagccgtgtgagccgtcgcagccgtggcatcgttgaggagtgctgtttccgcagctgtgacctggccctcctggagacgtactgtgctacccccgccaagtccgagagggacgtgtcgacccctccgaccgtgcttccggacaacttccccagataccccgtgggcaagttcttccaatatgacacctggaagcagtccacccagcgcctgcgcaggggcctgcctgccctcctgcgtgcccgccggggtcacgtgctcgccaaggagctcgaggcgttcagggaggccaaacgtcaccgtcccctgattgctctacccacccaagaccccgcccacgggggcgcccccccagagatggccagcaatcggaagtgagcaaaactgccgcaagtctgcagcccggcgccaccatcctgcagcctcctcctgaccacggacgtttccatcaggttccatcccgaaaatctctcggttccacgtccccctggggcttctcctgacccagtccccgtgccccgcctccccgaaacaggctactctcctcggccccctccatcgggctgaggaagcacagcagcatcttcaaacatgtacaaaatcgattggctttaaacacccttcacataccctccccccaaattatccccaattatccccacacataaaaaatcaaaacattaaactaacccccttcccccccccccacaacaaccctcttaaaactaattggctttttagaaacaccccacaaaagctcagaaattggctttaaaaaaaacaaccaccaaaaaaaatcaattggcc

SEQ ID NO: 127 - DNA, 5126 bp, Homo sapiens
attaccacagttgagcaccaaatgttgatataagccttctagaggcaaaacagaaagcataatgcataatgtgtcaggttacagagggcttttttttttttttttaaatcaaaagagaagttgggcttttcttagtggctgttgtatttccagtaccaggtaattccatgtatttcttaaggataaggctctacctccctcttgtcatccctgtccccatcccctagagtaccatgagctctgcacaaaacctatagtaagatctcagagctagggcctccagccggtgacaggaaacagagcctttcagtgtcttctgaaagttgagcttactgatgttgggtgcaggctgacagaggccattcaggctggtctagacgttcatcctggagatgcgcccagcaccagccgaacttctggtgggaagtggaatgaaatggacaggggtggtcctttggagaatcttattatccgatggagacgaagcatacctttgggaactgggaacctctttctacagagagtctgggttaggggccttgttgcacctgcttgctatcctaagtgcaggcaaatgagaaatgttttaatttccccctaggaatgagaaaatgcattatgttactctgaatatccatagcctcaacagataccgacttatggaagagaatgttgagactgtcaggactaaatacttaaagcaaaatcaggaaatcggaggttgtgctgttcatgtgccactatccacatgtgtcttttgagctctcaaaatgtggctaagtccaaattgagatgggctgaaagtgtaaaatatacaccagattgcaaacactattgtgtgaaaaaaaaaaatctcagtagtaatattgtaatgtaaacgatctcaacatgtaataccagttacatgttgaaatactatttaggctatataaaatatattacaattaatcttacctatttcttttcactttttaatgtagccactagagaatttaaaattaaatatgtggcttggccgggcacggtggcttatacctgtaatcccagcactttgggaggccgaggtgggtggatcacctgaggtcaggaatttgagaccagcctggacaacatggtgaaacaccgtctctactaaaaatacaaaaattagccgggtgtggtggcaaacccttgtaatcccagctacttgggaggctaaggcagaagaatcacttgaacccgagaggcagaggttgcagtgagtcgatatcgcgccactgcaccccagcctgggtgacaagagtgaaactccatctcaaaaacaaacaaacaaaaagtatgtggcttgtgttatatttgtatctgacagctctggtctaaacatctagaattaaacaaaacttttttgaggagtaaatttctactgtgttttctaattcctatgttctctctttggttctctttcaacagatatgactccacgtagcatgtcaaggactacattaatcaccaattcctttatttttccccccctacagtttccatttttttttatacttgcttactccagccatctgcagtacaccagtttcaggtcttttgagctgtgtagagtttctgtgtgtacagatgtgtgctcggacttttctctttttgagaaatctgaaggagatggttgcagaagatccacttactactgagaaccattaccaccgactcggcctccggggtgttgggtggtttctgggtggctcctggagcctcctctgggcagtgcactgtcccatctgtacgccctaatgtgccattccctagaggggaacaaccaagtgccgtggaggcagatgatcatggtctgcctcaactgtctggtttcctgtaaaataaacacattgttttatatttttagggaacaaaaagtgctgctatagggttcaaagttttccttctgaacacttttccgaaacaaattaccccaaagacacattttgaatatcctggtcacatctttggatctgtaaaatataccttttagtatggcacctgttaaaatgcaaagcaaatttctttggggcagaaaaacaatctgacagtagcagtgtagaatttgttcattcaaatacatctgtgtaaatgcaaaaagtcataaaattcacctccgagctgcttgcttttgaacctgcagcaactagtcttagccggcccggtttgaacatcgttctttcagaagtgctgaaaatgctgcaaagttggataagtggaaatgtggctgcccctctcctcactacttcctctctgatcgttctgaagcttgcattgggaatggctgctttctctaaccattttcagcttgagtgggtattgctgaagaaatccaacatcattccagcagttgaaaaaggaagccttcgggagaaagtgcttgtcaaaattttgttctttgtgcttgtgtatgagtaagttgccatgaataagttattattttaacccataattggcgactgtttatatgaattctttctttggcaccaaataggtttcatcttcttaggcacaattagaaaaaatccacatagatggatattttacatttagttattgctttatccaaatacatgaatctaaagctgaatcaacccttacttccagttgtgcttattaagaagatcaatttccaagtagtaaagttttcagggaaactgactgtgctgctatttgttttgacaaatttgggggtaagtcaatgacaaccaaaccaatctcggtggaaactcctatcctatcatgttgtgtgcccaagatgagtgagctggcactgtgccctgaagctttcaccactgtaatgaaatatatgccaggggagactttgggcttttctcatgactgtgtgggtcgaaggtagctcaagtgtgtgtgtgtgtgtgtgtgtgtgtgtgtgtgtgtgtgtgtatgtgtgtaaagtgctaagaactgtgcattgacatccaaacatttcttgtacaaaatttccctagcaaagcaaacctgctttgacttaatttatttgttaaatgttgcactttgtttatgtatgttttgtttttggtggggaataaggagagagaggacgacaaattctattgaagtatttattttgtgaagatggcaattttgcatttgtttaaatttttttcattctttaattttgttatcagtgccagcccaatatacctgctctaccattatttgcggtctgataaaagggtccttgtggggcaggttttgcaaagcttatcaggtaataacatatgccacataaccttgttgatatgtttgcttctgatttgggaagctaaacattggtgtttgagaggattgccaattattaattgtcattaccactactctccattactttttgtttggaaattgaacaaaggtcagtaatggtttttggctcttgttaatatccatcataaaatagattgttttagattctttccagggtgatttttccctgggtaccccgtttcaacttctaaagaattgcttggcactttcatgtttcaaagggaaacattcgcttgtagttccattttacttgatctctacaagggactgacaacatttgctttacttttattcacagagaaagttggctttgatgtctcttaaagataattctgctagttgctgatcagccagtcagttcacctagcttcaatctttataggacttctaatctaattttcctatagtgtgactaaaagggaggcaaattattggaacggattattcaaatggatccttaaatattgctatgtataataagccagttattatatcaggaccatgttctctgtaggccactttctaaaaaagccacatatgtgcaattttcaggtttttagactattgctccctgtactttaaatgtaaaaaccacacttctgaacaactaagctcatgaatatgattttggttatatgcagcttttgactagcatgtattgtgtctttttctcctctatgaataattttatatttcatgctacttcttgaaagtttactctttgatgctctaagagaacagccagatggtttatatgaataatctttatctgcaggatggtggattggtaaattaggagaatgttgtttgagatatcaagatttatgtctgggaactaaaatatataatgccaaatgtgtttttgtcaattactagagaattctgtgcaaacatatcatctcttcaaatgctgcacactttgcttttgttaaacagcaggtagtagacagaacaataacagtttcgcgttaagacttttaaaggaaatagaatcgtgattaagaaatcagaatttatagatatattgggataaatgaagaaataaaaatgtttgtctagaatgtagcatctagtgactttttaaagccctaacgtttacataaagaagctctagttcttatagaaataacaaagcaaataaaagttcttaacaatcccctctttcgaagtgcatttttttaaagcagggcaggagacatttggactctagctatatgacatactgggaaaggcagagggtggagggaagatttcacttcattgtctagcccagaatcttgagcaagctaaagaaaccatcataatctaaaattgcttcatttaacactaacaatttagactttttaaaccaagcattgaataatggctggataactgccgaagtaagcgccgctccatgaagtctgcttacttatttaaaaattgtgtatcagttttaaatactgttcattgtgtgcagatataaggggaatagggcattctgtagaattatacatgtctagtttgtaaagtgtgtcctgtgtactgcagatgtgtgttctctgggctttatgtatctgtacagtagctttcacattaaaaaaattgtggacaaacttgtccggggggtttgaggggagaatggtggtttatatcaataacgatgctgtactatagtccatgtaacaaaagatctggaagtcaccctcctctggcccacggaaaattttggtaatcttctaggttctaaaatgaagatgtatgggtactctggcagactgcatgttgtataatttgaaaaatactaaaagtggaagataaaattgaattaaactttg

SEQ ID NO: 128 - DNA, 3677 bp, Homo sapiens
cctcatccgcttctgctgctgccggccccccgagccccacgggtccaagatcccctcgcccgggggaggctgcgtcacctggagctgcattgtcgcccttctcgccggctggtaatggggccccagggtgggtgggcggtggggacagggctccccaagctctttgctggccttcctgggggtgtcctccggggacatggaggaagcagacaggaaggaggaaactccctcgtccctgtccctgccatttgcaagcccacttcagcgcacagcaggaaggactgtcccatttgatggatggagaaagtgaggctctggagaggaagtgaatcaagggcagccatctgcactggcattggcatcggtttctatggcaacagtgagaccagtgatggggtgtcccagctcagctctgcgctgctgcacgccaaccacacactcagcaccattgaccacctgacggtggagaggctgggcgaggcggtgaggacagagctgaccaccctggaggaggtgctcgagccgcgcacggagctggtggctgccgcccgaggggctcgacggcaggcggaggctgcggcccagcagctgcaggggctggccttctggcagggggtgcccctgagccccctgcaggtggctgaaaatgtgtcctttgtggaggagtacaggtggctggcctacgtcctcctgctgctcctggagctgctggtctgcctcttcaccctcctgggcctggcgaagcagagcaagtggctggtgatcgtgatgacagtcatgagtctcctggttctcgtcctgagctggggctccatgggcctggaggcagccacggccgtgggcctcagtgacttctgctccaatccagacccttatgttctgaacctgacccaggaggagacagggctcagctcagacatcctgagctattatctcctctgcaaccgggccgtctccaaccccttccaacagaggctgactctgtcccagcgagctctggccaacatccactcccagctgctgggcctggagcgagaagctgtgcctcagttcccttcagcgcagaagcctctgctgtccttggaggagactctgaatgtgacagaaggaaatttccaccagttggtggcactgctacactgccgcagcctgcacaaggtgaagcccctcccctcccaatttcttctcccacggggggcctctgtctcgacccacagaactacctcctccttctccttggacccctgccattgcgcctgaggatatctctgtatcctctgtttatatgatttatctgtcctatatctattctctacctatttataacctgtcgtctacctacctatcaagcattatccatattccttccctcctccctccctttccccccaactcccgcactccccgctgggtccccatcccaccctccccgtccattcctgccaccttttccttccttgtcttctctcctctctccgtcctcctgcctctccctccctcctagaggctgccgcttagtgagttctggagcaagactgcctgggttccagtcctacctcctgaccaagggcaagtcacctaacttctctgtacctcagttagttccctcacttataaacctgggattgcaagagtgggcacctgtccagctcccctgcggcttgtgctgttcatacactggacaggcaggggtgggcagggtgcccaggaggaaagatatctggtgtcctgcaggctccagtttgggctctgccgcaggctgcacggccataggcaggtgagcgtggctgactctgcttcccacccgtaccgtgaggaaggacgagttttttttgtttgtttttttttcactggatggctgtgaggattgaaaaaaaaaatccccttataaaacagtaggagctggccgggcgcggaggctcacacctgtaatcccagcactttgggaggcccaggcgggtggatcacctgaggtcaggagttcaagaccagtctggccaacatggtgataccccgtctctactaaaaatagaaaaagttagccgggcatggtggtgggcgcctataatcccaactactcgggaggctgaggcaggagaatcgcttgaatccacgaggcagaggttgcagtgagccaagattgtgccactgcactccagcctgggcaacaagagcgaaactctgtcacaaacaaacaaacaaaaccagtaagagctgttctaaaacacacacccgaggatgcctttccccggccagtcttcccatcaaagacctcacatgtgcatagcttcaccaagtacctgaccctgttgcatttcacaggtggtaactcatcgatgcctcataacaatgctatgaagaaggaactatgattatcccacctaacaggttagaagatgaggagcagagttgagggaccttcccaaggtcacacggccagccagcccgtgcacactgaggagagagggaccttccggagggccccgccctctgccccccacagccaggcagttgcccagttttgtcctttctgcttctggaatgtcttcatccatctactctcaatgcccaatgcccctgctgcagctgaggcctcgttctctcccctgcagaaggaagcatggccccctccccatccgtccccccatggaccctagaatagggctgccagattcagcaaacagcaaaccactctgctataagtacgcccggtgcaatgctggggagatacttatactagaaaattatgtattgggcatccgatactcaaatgtaactggaagtcctgaatttgatctggcaaccctacccaagagggatttgtctacgccatcgcatggatctgagctttccctggtctggctcagacagaccccttctgtggctcccactgcctcccacccttctggaactggcattccaaaaagggagtggggagtaagcactgaagccatgctcagaattgctgactattgagctgagaaaggctgggcccccacccagcccagggctgccctgatcttttgcataaggataaactggggttcaggcgcttttctgtggcctaggcagaaactgggctggaatacaggcccccagactcctttgtggagggagggaagggaaggaagaggacagatcactctacccttccctaccactgcaccatgagaccctgggtctccatctcccctgtcagtgtgccagggtcctcacagattaaaatcaagaataagcggcggggccgggcactgtggctcacgcctgtaatcccagcactttgggaaaccaaggtgggcggatcaccagaggtcaggagtttgagaccagcctggccagcatggcgaaatcccatctctactaaaaatacaaaaaaactagccgggcgtggtggcgcacccctgtattcctagctactcaggaggctgaggcacgagaattgcttgaacctgggcagtggaggttgcagtgagctgagatcgagccactgcactccagccggggtgacagagcgagaatccgtctcaaaaaaaaaaaaaaaataggagggggctagggatgggtgcctcgtgcctatcaacccagcactttgggaggcccagtggggcagatcagaactccttgagctcaggagttcaagaccagcctggccaacatggtgaaaccccatctctatt

(The sequence listing continues in the following parts.)

What is claimed is:

1. A polynucleotide selected from the group consisting of:
(a) a polynucleotide comprising a protein-coding region of the nucleotide sequence according to any one of SEQ ID NOs: 1-1956 and SEQ ID NOs: 3913-3951;
(b) a polynucleotide comprising the nucleotide sequence encoding a polypeptide that comprises the amino acid sequence of any one of SEQ ID NOs: 1957-3912 and SEQ ID NOs: 3952-3990;
(c) a polynucleotide comprising a nucleotide sequence encoding a polypeptide, which comprises the amino acid sequence selected from SEQ ID NO: SEQ ID NOs: 1957-3912 and SEQ ID NOs: 3952-3990 wherein one or more amino acids have been substituted, deleted, inserted, and/or added, and which is functionally equivalent to the polypeptide comprising the selected amino acid sequence as described above;
(d) a polynucleotide which hybridizes to a polynucleotide comprising the nucleotide sequence selected from SEQ ID NOs: 1-1956 and SEQ ID NOs: 3913-3951, and which comprises the nucleotide sequence encoding a polypeptide functionally equivalent to a polypeptide encoded by the selected nucleotide sequence as described above;
(e) a polynucleotide comprising a nucleotide sequence encoding a partial amino acid sequence of a polypeptide encoded by the polynucleotides according to any one of (a)-(d);
(f) a polynucleotide comprising a nucleotide sequence having at least 70% identity to the nucleotide sequence of any one of SEQ ID NOs: 1-1956 and SEQ ID NOs: 3913-3951; and
(g) a polynucleotide comprising a nucleotide sequence having at least 90% identity to the nucleotide sequence of any one of SEQ ID NOs: 1-1956 and SEQ ID NOs: 3913-3951.

2. A polypeptide encoded by the polynucleotide according to claim 1, or a partial peptide thereof.

3. An antibody which binds to the polypeptide or the peptide according to claim 2.

4. An immunoassay method for the polypeptide or the peptide according to claim 2, which comprises the steps of:
(a) contacting the polypeptide or the peptide according to claim 2 with the antibody according to claim 3; and
(b) observing the binding between the two.

5. A vector comprising the polynucleotide according to claim 1.

6. A transformant comprising the polynucleotide according to claim 1 or the vector according to claim 5.

7. A transformant which comprises the polynucleotide according to claim 1 or vector according to claim 5 in an expressible manner.

8. A method for producing the polypeptide or the peptide according to claim 2, which comprises the steps of:
(a) culturing the transformant according to claim 7; and
(b) recovering the expression product.

9. An oligonucleotide comprising 15 or more nucleotides, which comprises the nucleotide sequence according to any one of SEQ ID NOs: 1-1956 and SEQ ID NOs: 3913-3951, or a nucleotide sequence complementary to the complementary strand thereof.

10. A primer for synthesizing a polynucleotide, which comprises the oligonucleotide according to claim 9.

11. A probe for detecting a polynucleotide, which comprises the oligonucleotide according to claim 9.

12. A polynucleotide according to any one of:
(a) an antisense polynucleotide comprising a nucleotide sequence complementary to the transcript of the polynucleotide according to claim 1;
(b) a polynucleotide with the ribozyme activity for specifically cleaving the transcript of the polynucleotide according to claim 1; and
(c) a polynucleotide which downregulates the expression of the polynucleotide of claim 1 due to RNAi activity in a host cell.

13. A method for detecting the polynucleotide according to claim 1, which comprises the steps of:
(a) incubating a target polynucleotide with the oligonucleotide according to claim 9 under conditions ensuring hybridization; and
(b) detecting the hybridization between the target polynucleotide and the oligonucleotide according to claim 9.

14. A database of polynucleotides and/or polypeptides, which comprises information on at least one of the nucleotide sequences of SEQ ID NOs: 1-1956 and SEQ ID NOs: 3913-3951 and/or on at least one of the amino acid sequences of SEQ ID NOs: 1957-3912 and SEQ ID NOs: 3952-3990.
